(19) United States
(12) Patent Application Publication
(10) Pub. No.: US 2021/0254056 A1
(43) Pub. Date: Aug. 19, 2021

(54) IDENTIFICATION AND TARGETED MODULATION OF GENE SIGNALING NETWORKS

(71) Applicant: CAMP4 THERAPEUTICS CORPORATION, Cambridge, MA (US)

(72) Inventors: Yuting LIU, Brookline, MA (US); Alla SIGOVA, Newton, MA (US); Charles W. O'DONNELL, Winchester, MA (US); Cynthia SMITH, Boston, MA (US); Gavin WHISSELL, North Reading, MA (US); Brett CHEVALIER, Melrose, MA (US); Jennifer F. BRYAN, Groton, MA (US); Donna T. WARD, Groton, MA (US)

(21) Appl. No.: 16/610,899

(22) PCT Filed: May 4, 2018
(86) PCT No.: PCT/US2018/031056

§ 371 Date: Nov. 4, 2019

Related U.S. Application Data
(60) Provisional application No. 62/501,795, filed on May 5, 2017.

(51) Int. Cl. C12N 15/113; G16B 20/30; G16B 20/50; G16B 25/10

(52) U.S. Cl. CPC C12N 15/113; G16B 20/30; G16B 20/50; C12N 2310/11; C12N 2310/14; C12N 2310/20; C12N 2320/12; G16B 25/10

(57) ABSTRACT

The present invention provides methods and compositions for the evaluation, alteration and/or optimization of gene signaling. Methods and systems are also provided which exploit the information generated in the identification of new targets and non-canonical signaling pathways.

### CROSS REFERENCE TO RELATED APPLICATIONS

[0001] The application claims priority to U.S. provisional application 62/501,795, filed May 5, 2017, entitled IDENTIFICATION AND TARGETED MODULATION OF GENE SIGNALING NETWORKS, the contents of which are hereby incorporated by reference herein in its entirety.

### SEQUENCE LISTING

[0002] The instant application contains a “lengthy” Sequence Listing which has been submitted via CD-R in lieu of a printed paper copy, and is hereby incorporated by reference in its entirety. Said CD-R, recorded on Apr. 5, 2018, are labeled “CRF,” “Copy 1−SEQUENCE LISTING PART,” and “Copy 2—SEQUENCE LISTING PART” and “Copy 3—SEQUENCE LISTING PART”, respectively, and each contains only one identical 233,328,640 bytes file (2093_1300 PCT_SL.txt).

### FIELD OF THE INVENTION

[0003] The invention relates to the identification, mapping, and optimization of gene expression mechanisms, such as genomic signaling centers (GSCs), in biological systems. Further, the invention relates to methods and compositions for identifying the location of occupancy-dependent signaling centers (ODSCs), and methods and compositions for altering the binding profile of the ODSC. These methods are useful in the identification of heretofore unidentified targets for disease.

### BACKGROUND OF THE INVENTION

[0004] It is now understood that a majority of human diseases have a genetic component. Common diseases such as diabetes, cancer, some types of heart diseases, and arthritis, which typically arise later in life, may run in families and often have a genetic component or driver.

[0005] Inherited genetic diseases can be fatal or result in conditions that require significant medical intervention. Amongst inherited genetic diseases, rare inherited genetic diseases represent a greater medical challenge. There is presently limited ability to approach therapies for inherited diseases, especially rare inherited diseases.

[0006] A variety of causative mutations or variants associated with inherited genetic diseases have been mapped to regions in the genome known as genomic signaling centers, or areas of active remodeling or occupancy by factors and biomolecules thought to be responsible for, or involved in, gene expression from nearby genes. Sets of genes associated in some way with genomic signaling centers and under similar control mechanisms have been identified in the literature and have been termed “insulated neighborhoods” (INs). The integrity of a single or multiple INs is important for proper expression of local genes. Disruption of GSCs or INs is thought to be involved in disease progression, pathogenesis and/or etiology.

[0007] Studies to map, with high fidelity, the relationships among chromatin status, structure and organization, GSCs, INs, gene expression, cell identity and disease are critical to understanding not only how therapeutic compounds affect biological systems but to help predict therapeutic outcomes of treatment modalities a priori and to aid in patient selection and/or stratification for such treatments. To date, such efforts have been only somewhat successful, owing, to some degree, to the current nature of describing, and hence studying, “canonical” gene signaling pathways. Canonical pathways described in scientific literature, e.g., the MAP Kinase pathway, NF-kappaB pathway, insulin signaling pathway, or integrin signaling pathway, are not self-contained pathways, per se. A subset of proteins and/or nucleic acids in any one pathway may also participate in the signaling of another pathway. In essence, the current paradigm of describing gene signaling is fraught with inherent uncertainties as selected pathway components exhibit a high degree of promiscuity. What is needed is an alternative approach to the characterization of signaling in which the actual signaling of any gene in response to any stimulus or perturbation may be described wholly and independent of canonical cascade labels. Such a system, while being more complex, would allow more efficient and informative hypothesis testing and therefore better prediction, stratification and/or mapping of cellular system response outcomes to various perturbations or stimuli. The present invention contemplates such an alternative approach as well as applications of such an approach in the fields of research, development and therapeutic treatment, diagnosis, prognosis and stratification.

[0008] Various embodiments of the invention provide for perturbation of cell signaling by disrupting the composition of molecules at GSCs, which may form an ODSC, by contacting the GSC with a stimulus, e.g., biomolecules such as for example small molecules, antibodies, or cell-penetrating polypeptides. Stimuli may also include alterations in the environment of a GSN such as a change in temperature, pH, a chemical change, or in some cases, no externally applied stimulus at all (e.g., null).

[0009] Control of cell signaling pathways may also be used to treat hundreds of inherited diseases caused by mutations in regulatory, non-coding regions by controlling gene expression. Even a seemingly slight change in gene expression has been shown to have a significant impact on diseases. Therefore, the applications of the invention extend beyond the boundaries of canonical cell signaling in that an alternative approach to the definition and description of “pathways” is provided, along with methods of studying the perturbation of such systems and the exploitation of the outcomes of such perturbations.

[0010] Perturbation of a genomic system using at least one of the stimuli described herein may result in a response such as the location of a GSC changing its relative location to an insulated neighborhood gene or the binding profile of the GSC forming an ODSC. Changes to GSCs may therefore be useful in the modulation of gene expression, mapping other GSCs in support of the creation of a map of gene signaling networks, personalized medicine, and as a drug discovery platform.

### SUMMARY OF THE INVENTION

[0011] The invention provides, among other things, a method of altering signaling of a primary neighborhood gene encoded within an insulated neighborhood. Such methods include, but are not limited to disrupting a primary upstream or primary downstream boundary of the insulated neighborhood; altering one or more regulatory sequence regions (RSRs) or portions thereof of the encoded primary neighborhood gene; duplicating one or more RSRs or portions thereof of the encoded primary neighborhood gene; inhibiting or reducing the expression and/or activity of one or more signaling molecules associated with the RSR of the primary neighborhood gene; activating or increasing the expression and/or activity of one or more signaling molecules associated with the RSR of the primary neighborhood gene; and/or altering one or more of the upstream or downstream neighborhood genes or its RSR of the insulated neighborhood. Such methods may further comprise contacting a genomic system that includes the insulated neighborhood with a stimulus. Such stimuli include any of those taught herein.

[0012] In some embodiments, the insulated neighborhood is a minimal insulated neighborhood.

[0013] In some embodiments, the method further includes contacting a genomic system that includes the insulated neighborhood with a stimulus. The stimulus may be a small molecule, a biologic, an antibody, an environmental condition, and a combination thereof. In some embodiments, the stimulus is selected from those described herein.

[0014] In some embodiments, the invention includes an isolated cell having at least one insulated neighborhood altered in any manner.

[0015] In some embodiments, the present invention comprises methods of altering the penetrance of a gene comprising altering the structure of one or more insulated neighborhoods that encompass the gene.

[0016] In some embodiments, the present invention comprises a method of predicting one or more treatment liabilities of a therapeutic agent comprising determining the signaling signature of one or more primary neighborhood genes which are differentially expressed upon treatment with the therapeutic agent compared to an untreated control.

[0017] In some embodiments, the present invention comprises altering the signaling signature of one or more primary neighborhood genes which are differentially expressed upon treatment with a therapeutic agent compared to an untreated control. In some embodiments, the signaling signature is altered by a method selected from the group consisting of increasing the level of a signaling molecule, decreasing the level of a signaling molecule, editing one or more RSRs, altering an IN boundary, affecting a downstream target, and mutating a genomic signaling center. In some embodiments, the signaling molecules to be increased or decreased comprise one or more transcription factors selected from those listed in Table 22.

[0018] In some embodiments, the present invention comprises a method of reducing or eliminating one or more treatment liabilities of a therapeutic agent comprising altering the penetrance of a primary neighborhood gene or its RSRs. Such treatment liability may be selected from toxicity, short half-life, and lack of efficacy.

[0019] In some embodiments, the present invention comprises a method of altering expression of gene selected from any of those listed in Tables 1-9 in a liver cell comprising contacting said liver cell with a compound selected from the group consisting of any of those taught herein.

[0020] In some embodiments, the present invention comprises a method of stratifying or selecting patients for treatment with a compound selected from the group consisting of any of those taught herein.

[0021] In some embodiments, the present invention comprises a method of screening cell for response to a stimulus by measuring differential gene expression between a group of the cells contacted with the stimulus and a group of the cells not contacted with the stimulus, wherein the stimulus comprises any of those selected from the group consisting of any of any compound taught herein.

[0022] In some embodiments, the present invention comprises a method of altering the gene expression attendant to an insulated neighborhood comprising altering a genomic signaling center, the method comprising using a CRISPR/Cas9 system to change the genomic signaling center.

[0023] In some embodiments, the present invention comprises a method of creating new genomic signaling centers in a genome, the method comprising altering a CTCF site to disrupt an enhancer-promoter interaction of a first insulated neighborhood, wherein the enhancer is available for interaction with a different promoter to form a new genomic signaling center. In some embodiments, the CTCF site is altered using a CRISPR/Cas9 enzyme.

[0024] In some embodiments, the present invention comprises a method of modulating gene expression in a cell, the method including contacting the cell with a perturbation stimulus targeting at least one occupancy-dependent signaling center, wherein the occupancy-dependent signaling center comprises a region of the genome bound by at least 2 signaling proteins and comprises i) a H3K27 chemical modification, or ii) independently at least one of a bromodomain-containing protein (Brd), a transcriptional coactivator, and at least two master transcription factors bound to the region, thereby modulating gene expression. In some embodiments, the bromodomain-containing protein (Brd) is selected from the group consisting of Brd2, Brd3, and Brd4. In some embodiments, the H3K27 chemical modification is acetylation or methylation. In some embodiments, the transcriptional coactivator is p300. In some embodiments, the occupancy-dependent signaling center comprises a nucleic acid sequence selected from SEQ ID NOs: 32,627-71,281. In some embodiments, the perturbation stimulus is at least one selected from the group consisting of a CRISPR/Cas system, a zinc finger nuclease, a transcription activator-like effector nuclease (TALEN), and a hybridizing oligonucleotide. In some embodiments, the perturbation stimulus binds the occupancy-dependent signaling center. In some embodiments, the perturbation stimulus is antisense to the nucleic acid sequence of the occupancy-dependent signaling center.

[0025] In some embodiments, the method further includes mutating the nucleic acid sequence of the occupancy-dependent signaling center. In some embodiments, the contacting alters the occupancy of the occupancy-dependent signaling center. In some embodiments, the contacting alters genome architecture in the cell. In some embodiments, the contacting alters gene looping. In some embodiments, the perturbation stimulus is at least one stimulus described herein.

[0026] In some embodiments, the present invention comprises a method of altering the occupancy of a signaling center, the method including contacting the cell with a perturbation stimulus targeting at least one occupancy-dependent signaling center comprising a nucleic acid sequence selected from SEQ ID NOs: 32,627-71,281. In some embodiments, the perturbation stimulus is at least one selected from the group consisting of a CRISPR/Cas system, a zinc finger nuclease, a transcription activator-like effector nuclease (TALEN), and a hybridizing oligonucleotide. In some embodiments, the perturbation stimulus binds at least a portion of the occupancy-dependent signaling center. In some embodiments, the perturbation stimulus is antisense to the portion of the occupancy-dependent signaling center.

[0027] In some embodiments, the present invention comprises a composition comprising an oligonucleotide that binds to at least a portion of an occupancy-dependent signaling center comprising a nucleic acid sequence selected from SEQ ID NOs: 32,627-71,281. In some embodiments, the oligonucleotide is antisense to the nucleic acid sequence of the occupancy-dependent signaling center. In some embodiments, the present invention comprises a pharmaceutical composition comprising the composition of the oligonucleotide and a pharmaceutically acceptable excipient.

[0028] In some embodiments, the present invention comprises a method of treating a disease in a subject, the method comprising administering to the subject the pharmaceutical composition described herein, wherein the occupancy-dependent signaling center controls expression of at least one gene associated with the disease. In some embodiments, the gene is a protein-coding gene. H some embodiments, the gene is a non-protein-coding gene.

[0029] In some embodiments, the present invention comprises a method of perturbing a signaling pathway of a cell, the method including contacting the cell with a perturbation stimulus that alters the occupancy of an occupancy-dependent signaling center comprising a nucleic acid sequence selected from SEQ ID NOs: 32,627-71,281.

### BRIEF DESCRIPTION OF THE DRAWINGS

[0030] FIG. 1 illustrates the packaging of chromosomes in a nucleus, the localized topological domains into which chromosomes are organized, insulated neighborhoods in TADs and finally an example of an arrangement of a genomic signaling center(s) around a particular disease gene.

[0031] FIG. 2A and FIG. 2B illustrate a linear and 3D arrangement of the CTCF boundaries of an insulated neighborhood.

[0032] FIG. 3A and FIG. 3B illustrate tandem insulated neighborhoods and gene loops formed in such insulated neighborhoods.

[0033] FIG. 4 illustrates the concept of an insulated neighborhood contained within a larger insulated neighborhood and the signaling which may occur in each.

[0034] FIG. 5 illustrates the components of a genomic signaling center; including transcriptional factors, signaling proteins, and/or chromatin regulators.

[0035] FIG. 6A illustrates alternative signaling from insulated neighborhoods in different cell types, and FIG. 6B shows how a silent gene may become activated when the CTCF (cohesin) boundaries are disrupted.

[0036] FIG. 7 illustrates nested insulated neighborhoods (NI Ns) and four of the layers of studies performed to identify and map the GSNs the GSCs of the present invention.

[0037] FIG. 8 illustrates a “window” of the ChIP-seq array aligned with the identification of chromatin markers, transcription factor binding, signaling proteins for a section of a chromosome. The genes of interest are annotated along the length of the chromosome at the bottom against both the plus/minus or Watson/Crick strands. The coincident appearance of transcription factors between CTCF sites along the chromosome indicate potential genomic signaling centers for that neighborhood. The insulated neighborhood shown in the figure contains the SLC37A4 gene, implicated in glycogen storage disease 1b, and the RNA-seq results show upregulation of expression of the SLC37A4 gene by prednisone (MT-861), an immunosuppressant.

[0038] FIG. 9 is a scatterplot comparing disease associated gene (DAG) expression measured by RNA-seq and qRT-PCR.

[0039] FIG. 10A are ChIP-seq results for an insulated neighborhood containing the DNMBP gene. FIG. 10B are ChIP-seq results for an insulated neighborhood containing GADD45A gene. FIG. 10C are ChIP-seq results for an insulated neighborhood containing the POC1A gene and liver disease gene ALAS1.

[0040] FIG. 11A are ChIP-seq results for an insulated neighborhood including FKBP5, and RNA-seq results showing that prednisone (MT-861) also upregulates FKBP5, a gene implicated in immunosuppression. FIG. 11B are ChIP-seq results for an insulated neighborhood and RNA-seq results showing modulation of the COL1A1 gene implicated in liver fibrosis by BIO inhibitor (MT-209), a Wnt pathway agonist. FIG. 11C are ChIP-seq results for an insulated neighborhood and RNA-seq results showing modulation of the PCSK9 gene implicated in hypercholesterolemia by simvastatin (MT-51), a sterol agonist.

[0041] FIG. 12A are ChIP-seq results for an insulated containing HMOX1, MSM5, and RASD2 genes. FIG. 12B shows an insulated neighborhood containing the FOXA2 gene.

[0042] FIG. 13 shows ChIP-seq results for the insulated neighborhood containing PCSK9 and RNA-seq results showing modulation of expression of PCSK9 by prednisone (MT-861).

[0043] FIG. 14A is a graph of the size distribution of about 77 million paired end tags (PETs) identified by HiChIP. FIG. 14B is a heatmap of showing the presence of topologically-associated domains (TADs) and insulated neighborhoods.

[0044] FIG. 15 is an illustration comparing the number of cells throughout expansion and differentiation of DBA patient cells (dash line), the healthy patient cells (solid line), and the conditionally immortalized inducible DBA phenotype model disease model (dotted line).

[0045] FIG. 16A, FIG. 16B, and FIG. 16C are gene tracks of ChIP-seq results comparing the binding profiles during differentiation and expansion of CD34+ progenitor cells. FIG. 16A shows the insulated neighborhood including apoptosis-associated gene GADD45A. FIG. 16B shows the insulated neighborhood including p53 pathway-associated gene RPS19. FIG. 16C shows the insulated neighborhood including CDKN1A.

[0046] FIG. 17A, FIG. 17B, FIG. 170, FIG. 17D show the log 10 p-values for genomic annotation of the binding sites of p53 in hematopoietic stem cells (HSCs) and erythroid cells (log 10 p-values 4 were considered significant). FIG. 17A characterizes p53 binding sites in hematopoietic stem cell promoter regions. FIG. 17B characterizes p53 binding sites in erythroid cell promoter regions. FIG. 17C characterizes p53 binding sites in non-promoter regions of hematopoietic stem cells. FIG. 17D characterizes p53 binding sites in non-promoter regions of erythroid cells.

[0047] FIG. 18 illustrates one embodiment of the relational aspects of a gene signaling network (GSN) and associated mapping of the connectivities of such GSNs described by the invention.

[0048] FIG. 19A provides a graph of the log 2 number of signaling proteins per each signaling protein cluster. FIG. 19B provides a graph of the log 2 number of master transcription factors (TFs) per each master TF cluster from ChIP-seq results.

[0049] FIG. 20 is an exemplary illustration of the the HiChIP results showing genome interactions and architecture.

### DETAILED DESCRIPTION OF THE INVENTION

### I. Introduction

[0050] The present invention relates to the alteration, perturbation and ultimate regulated control of gene signaling networks (GSNs). Such gene signaling networks include genomic signaling centers (GSCs) found within insulated neighborhoods (I Ns) of the genomes of biological systems.

[0051] As used herein, a “gene signaling network” or “GSN” comprises the set of biomolecules associated with any or all of the signaling events from a particular gene, e.g., a gene-centric network. As there are over 20,000 protein-coding genes in the human genome, there are at least this many GSNs. And to the extent some genes are non-coding genes, the number increases greatly. Gene signaling networks differ from canonical signaling pathways which are mapped as standard protein cascades and feedback bops.

[0052] Traditionally, signaling pathways have been identified using standard biochemical techniques and, for the most part, are linear cascades with one protein product signaling the next protein product-driven event in the cascade. While these pathways may bifurcate or have feedback loops, the focus has been almost exclusively at the protein level.

[0053] GSNs of the present invention represent a different paradigm to defining biological signaling—taking into account protein-coding and nonprotein-coding signaling molecules/signaling proteins, genomic structure, chromosomal occupancy, chromosomal remodeling, the status of the biological system and the range of outcomes associated with the perturbation of any biological systems comprising such GSNs.

[0054] Genomic architecture, while not static, plays an important role in defining the framework of the GSNs of the present invention. Such architecture includes the concepts of chromosomal organization and modification, topologically associated domains (TADs), insulated neighborhoods (INs), genomic signaling centers (GSCs), signaling molecules/signalling proteins and their binding motifs or sites, and of course, the genes encoded within the genomic architecture. GSCs containing at least (i) 2 signaling proteins and comprises: (ii) a H3K27 chemical modification, or independently at least one of a bromodomain-containing protein (Brd), a transcriptional coactivator, and at least two master transcription factors bound to the region are referred to as an ODSC.

### Genomic Architecture

[0055] Cells control gene expression using thousands of elements that link cellular signaling to the architecture of the genome. Genomic system architecture includes regions of DNA, RNA transcripts, chromatin remodelers, and signaling molecules/signaling proteins.

### Chromosomes

[0056] Chromosomes are the largest subunit of genome architecture that contain most of the DNA in humans. Specific chromosome structures have been observed to play important roles in gene control, as described in Hnisz et al., Cell 167, Nov. 17, 2016, which is hereby incorporated by reference in its entirety. Non-coding regions including introns provide protein binding sites and other regulatory structures, while the exons encode for proteins including signaling molecules/signaling proteins, such as transcription factors, that interact with the non-coding regions to regulate gene expression. DNA sites within non-coding regions on the chromosome also interact with each other to form looped structures. These interactions form a chromosome scaffold that plays an important role in gene activation and repression. Interactions rarely occur among chromosomes and are usually within the same domain of a chromosome.

[0057] In situ hybridization techniques and microscopy have revealed that each interphase chromosome tends to occupy only small portion of the nucleus and does not spread throughout the whole organelle. See, Cremer and Cremer, Cold Spring Harbor Perspectives in Biology 2, a003889, 2010, which is hereby incorporated by reference in its entirety. This restricted surface occupancy area might reduce interactions between chromosomes.

[0058] Tables 1-9 lists genes found in the human genome. The methods described herein may be used to modulate the expression of any of these genes. As used herein, “expression” of a nucleic acid or gene sequence refers to one or more of the following events: (1) production of an RNA template from a DNA sequence (e.g., by transcription); (2) processing of an RNA transcript (e.g., by splicing, editing, 5′ cap formation, and/or 3′ end processing); (3) translation of an RNA into a polypeptide or protein; (4) folding of a polypeptide or protein; and (5) post-translational modification of a polypeptide or protein.

[0059] Shown in Tables 1-9, in addition to the name and description of the gene (gene symbol) are the ENSEMBL Gene ID (ENSG), the gene found immediately upstream of the listed gene (Up ENSG) and the gene found immediately downstream of the listed gene (Down ENSG). It is noted that the unique identifiers for each ENSEMBL entry has been modified to remove the first five leading zeros (0) of the identifier after the ENSG label. Also given in the Tables are, in order of expression level, the tissues in which the transcripts are expressed. Table 1 provides the gene information for the genes found on Chromosome 1.

TABLE 1
Genes on Chromosome 1

| | | | Up | Down | Tissue |
|---|---|---|---|---|---|
| Gene Symbol | Gene Name | ENSG | ENSG | ENSG | Code |
| DHCR24 | 24-dehydrocholesterol reductase | 116133 | 162398 | 143001 | 2, 27, 43 |
| BPNT1 | 3′(2′),5′-bisphosphate nucleotidase 1 | 162813 | 136628 | 067704 | 13, 43, 45 |
| HMGCS2 | 3-hydroxy-3-methylglutaryl-CoA synthase 2 | 134240 | 092621 | 134193 | 19, 3, 38 |
| HMGCL | 3-hydroxymethyl-3-methylglutaryl-CoA lyase | 117305 | 117308 | 179163 | 3, 30, 17 |
| OXCT2 | 3-oxoacid CoA-transferase 2 | 198754 | 116985 | 043514 | 38, 28, 8 |
| HPDL | 4-hydroxyphenylpyruvate dioxygenase like | 186603 | 162415 | 132781 | 37, 9, 32 |
| HTR1D | 5-hydroxytryptamine receptor 1D | 179546 | 169641 | 125944 | 16, 14, 8 |
| HTR6 | 5-hydroxytryptamine receptor 6 | 158748 | 158747 | 162542 | 27, 23, |
| MTR | 5-methyltetrahydrofolate-homocysteine methyltransferase | 116984 | 077522 | 244020 | 2, 37, 11 |
| NT5C1A | 5′-nucleotidase, cytosolic IA | 116981 | 163909 | 116983 | |
| PFKFB2 | 6-phosphofructo-2-kinase/fructose-2,6-biphosphatase 2 | 123836 | 182795 | 180667 | |
| ABL2 | ABL proto-oncogene 2, non-receptor tyrosine kinase | 143322 | 186283 | 057252 | 34, 19, 25 |
| ASPM | abnormal spindle microtubule assembly | 066279 | 143278 | 177888 | 22, 13, 39 |
| AIM1L | absent in melanoma 1-like | 176092 | 169442 | 176083 | 24, 32, 2 |
| AIM2 | absent in melanoma 2 | 163568 | 163565 | 162706 | 22, 36, 30 |
| ASCL5 | achaete-scute family bHLH transcription factor 5 | 232237 | 081248 | 116857 | 16, |
| ACP6 | acid phosphatase 6, lysophosphatidic | 162836 | 116128 | 265107 | 9, 13, 42 |
| ANP32E | acidic nuclear phosphoprotein 32 family member E | 143401 | 023902 | 118298 | 34, 39, 11 |
| ACTL8 | actin like 8 | 117148 | 074964 | 117154 | 9, 38, 44 |
| ARPC5 | actin related protein 2/3 complex subunit 5 | 162704 | 116701 | 143344 | 43, 45, 13 |
| ACTRT2 | actin related protein T2 | 169717 | 215912 | 142611 | 38, 8, 12 |
| ACTA1 | actin, alpha 1, skeletal muscle | 143632 | 154429 | 069248 | 25, 18, 15 |
| ACTN2 | actinin alpha 2 | 077522 | 119285 | 116984 | 15, 18, 25 |
| ATF3 | activating transcription factor 3 | 162772 | 117691 | 162771 | 40, 26, 32 |
| ATF6 | activating transcription factor 6 | 118217 | 081721 | 162745 | 13, 45, 9 |
| ACBD3 | acyl-CoA binding domain containing 3 | 182827 | 163041 | 185155 | 29, 34, 1 |
| ACBD6 | acyl-CoA binding domain containing 6 | 230124 | 121454 | 143324 | |
| ACADM | acyl-CoA dehydrogenase, C-4 to C-12 straight chain | 117054 | 137968 | 137955 | 15, 1, 2 |
| ACOT11 | acyl-CoA thioesterase 11 | 162390 | 157216 | 162391 | 15, 1, 24 |
| ACOT7 | acyl-CoA thioesterase 7 | 097021 | 158292 | 069812 | 31, 26, 37 |
| ADAM15 | ADAM metallopeptidase domain 15 | 143537 | 163357 | 243364 | 24, 9, 45 |
| ADAM30 | ADAM metallopeptidase domain 30 | 134249 | 134193 | 134250 | 38, |
| ADAMTS4 | ADAM metallopeptidase with thrombospondin type 1 motif 4 | 158859 | 158850 | 158864 | 1, 42, 25 |
| ADAMTSL4 | ADAMTS like 4 | 143382 | 143369 | 143384 | 1, 32, 7 |
| AP4B1 | adaptor related protein complex 4 beta 1 subunit | 134262 | 188761 | 118655 | 39, 36, 22 |
| ADORA1 | adenosine A1 receptor | 163485 | 122180 | 133055 | |
| ADORA3 | adenosine A3 receptor | 282608 | 121933 | 116473 | 10, 26, 2 |
| ADAR | adenosine deaminase, RNA specific | 160710 | 160716 | 143603 | 40, 43, 22 |
| AMPD1 | adenosine monophosphate deaminase 1 | 116748 | 175984 | 213281 | 25, 15, 40 |
| AMPD2 | adenosine monophosphate deaminase 2 | 116337 | 134183 | 168765 | 8, 39, 3 |
| AHCYL1 | adenosylhomocysteinase like 1 | 168710 | 184371 | 143093 | 9, 26, 8 |
| ADCY10 | adenylate cyclase 10, soluble | 143199 | 197965 | 143158 | 38, 44, 14 |
| CAP1 | adenylate cyclase associated protein 1 | 131236 | 168389 | 131238 | 45, 43, 41 |
| AK2 | adenylate kinase 2 | 004455 | 116514 | 142920 | 29, 21, 3 |
| AK4 | adenylate kinase 4 | 162433 | 162434 | 116675 | 17, 1, 11 |
| AK5 | adenylate kinase 5 | 154027 | 142892 | 036549 | 10, 3, 1 |
| ADSS | adenylosuccinate synthase | 035687 | 173728 | 179397 | 45, 42, 4 |
| AJAP1 | adherens junctions associated protein 1 | 196581 | 198912 | 131697 | 10, 17, 36 |
| ADGRB2 | adhesion G protein-coupled receptor B2 | 121753 | 084636 | 134668 | 8, 42, 39 |
| ADGRL2 | adhesion G protein-coupled receptor L2 | 117114 | 162618 | 137941 | |
| ADGRL4 | adhesion G protein-coupled receptor L4 | 162618 | 137965 | 117114 | 45, 11, 10 |
| AMIGO1 | adhesion molecule with Ig like domain 1 | 181754 | 174151 | 156097 | 40, 42, 6 |
| ADIPOR1 | adiponectin receptor 1 | 159346 | 117153 | 159348 | 30, 9, 13 |
| ARF1 | ADP ribosylation factor 1 | 143761 | 154342 | 143793 | 3, 13, 32 |
| ARL8A | ADP ribosylation factor like GTPase 8A | 143862 | 170075 | 143851 | 33, 34, 5 |
| ADPRHL2 | ADP-ribosylhydrolase like 2 | 116863 | 092850 | 171812 | 43, 9, 26 |
| AGMAT | agmatinase | 116771 | 116138 | 197312 | 17, 3, 4 |
| AGRN | agrin | 188157 | 187608 | 237330 | 3, 27, 12 |
| AKIRIN1 | akirin 1 | 174574 | 158315 | 168653 | 34, 45, 31 |
| AKNAD1 | AKNA domain containing 1 | 162641 | 116266 | 274068 | 38, 10, 16 |
| AKT3 | AKT serine/threonine kinase 3 | 117020 | 054282 | 179456 | |
| ALDH4A1 | aldehyde dehydrogenase 4 family member A1 | 159423 | 255275 | 169991 | 39, 17, 24 |
| ALDH9A1 | aldehyde dehydrogenase 9 family member A1 | 143149 | 143198 | 143183 | 1, 40, 30 |
| AKR1A1 | aldo-keto reductase family 1 member A1 | 117448 | 117450 | 132780 | |
| AKR7L | aldo-keto reductase family 7 like (gene/pseudogene) | 211454 | 053372 | 162482 | 37, 27, 23 |
| AKR7A2 | aldo-keto reductase family 7 member A2 | 053371 | 162482 | 040487 | 34, 41, 9 |
| AKR7A3 | aldo-keto reductase family 7 member A3 | 162482 | 211454 | 053371 | 37, 16, 3 |
| ALG14 | ALG14, UDP-N-acetylglucosaminyltransferase subunit | 172339 | 117519 | 152078 | 10, 29, 20 |
| ALG6 | ALG6, alpha-1,3-glucosyltransferase | 088035 | 187140 | 142856 | 30, 4, 39 |
| ALPL | alkaline phosphatase, liver/bone/kidney | 162551 | 142794 | 076864 | 2, 1, 26 |
| A3GALT2 | alpha 1,3-galactosyltransferase 2 | 184389 | 160094 | 134686 | |
| ALX3 | ALX homeobox 3 | 156150 | 143093 | 186150 | 3, 16, 38 |
| AMY1A | amylase, alpha 1A (salivary) | 237763 | 243480 | 174876 | |
| AMY1B | amylase, alpha 1B (salivary) | 174876 | 237763 | 187733 | 34, 28, 44 |
| AMY1C | amylase, alpha 1C (salivary) | 187733 | 174876 | 198890 | 34, 28, 44 |
| AMY2A | amylase, alpha 2A (pancreatic) | 243480 | 240038 | 237763 | 28, 4, 34 |
| AMY2B | amylase, alpha 2B (pancreatic) | 240038 | 185946 | 243480 | 28, 10, 39 |
| AGL | amylo-alpha-1,6-glucosidase, 4-alpha-glucanotransferase | 162688 | 156869 | 283495 | 25, 22, 15 |
| APCS | amyloid P component, serum | 132703 | 184155 | 132693 | 19, 25, 20 |
| ANGEL2 | angel homolog 2 | 174606 | 143494 | 136643 | 9, 22, 42 |
| ANGPTL1 | angiopoietin like 1 | 116194 | 116191 | 116199 | 10, 44, 45 |
| ANGPTL3 | angiopoietin like 3 | 132855 | 116641 | 125703 | 19, 17, 26 |
| ANGPTL7 | angiopoietin like 7 | 171819 | 198793 | 120942 | 14, 1, 26 |
| AGTRAP | angiotensin II receptor associated protein | 177674 | 162490 | 215910 | 34, 9, 35 |
| AGT | angiotensinogen | 135744 | 135775 | 135773 | 19, 15, 8 |
| ASB17 | ankyrin repeat and SOCS box containing 17 | 154007 | 057468 | 184005 | 38, 8, |
| ANKRD13C | ankyrin repeat domain 13C | 118454 | 116754 | 197568 | 43, 10, 22 |
| ANKRD34A | ankyrin repeat domain 34A | 272031 | 271601 | 121851 | 14, 8, 6 |
| ANKRD35 | ankyrin repeat domain 35 | 198483 | 131788 | 143127 | 24, 13, 35 |
| ANKRD45 | ankyrin repeat domain 45 | 183831 | 162753 | 232113 | 38, 28, 8 |
| ANKRD65 | ankyrin repeat domain 65 | 235098 | 242485 | 205116 | 26, 14, 28 |
| ANXA9 | annexin A9 | 143412 | 143418 | 143409 | 16, 29, 19 |
| AZIN2 | antizyme inhibitor 2 | 142920 | 004455 | 116525 | 38, 8, 40 |
| APH1A | aph-1 homolog A, gamma-secretase subunit | 117362 | 118298 | 118292 | 9, 5, 39 |
| APITD1-CORT | APITD1 -CORT readthrough | 251503 | 142657 | 175279 | |
| APOA2 | apolipoprotein A2 | 158874 | 158869 | 158882 | 19, 36, 15 |
| APOBEC4 | apolipoprotein B mRNA editing enzyme catalytic polypeptide like 4 | 173627 | 143344 | 198756 | 38, 30, 24 |
| AQP10 | aquaporin 10 | 143595 | 143575 | 143515 | 37, 25, |
| ACAP3 | ArfGAP with coiled-coil, ankyrin repeat and PH domains 3 | 131584 | 162572 | 169972 | 26, 31, 3 |
| ASAP3 | ArfGAP with SH3 domain, ankyrin repeat and PH domain 3 | 088280 | 204219 | 007968 | 13, 29, 38 |
| RSRP1 | arginine and serine rich protein 1 | 117616 | 117614 | 187010 | 39, 4, 11 |
| AVPR1B | arginine vasopressin receptor 1B | 198049 | 263961 | 196550 | |
| RERE | arginine-glutamic acid dipeptide repeats | 142599 | 162426 | 074800 | |
| RNPEP | arginyl aminopeptidase | 176393 | 134375 | 163435 | 37, 26, 3 |
| AG01 | argonaute 1, RISC catalytic component | 092847 | 134698 | 126070 | 11, 40, 5 |
| AG03 | argonaute 3, RISC catalytic component | 126070 | 092847 | 092850 | 22, 3, 42 |
| AG04 | argonaute 4, RISC catalytic component | 134698 | 092853 | 092847 | 10, 29, 27 |
| ARTN | artemin | 117407 | 126091 | 117408 | 13, 29, 18 |
| ARV1 | ARV1 homolog, fatty acid homeostasis modulator | 173409 | 143643 | 182118 | 13, 34, 37 |
| ARNT | aryl hydrocarbon receptor nuclear translocator | 143437 | 143387 | 283324 | 18, 24, 4 |
| AADACL3 | arylacetamide deacetylase like 3 | 188984 | 204518 | 157330 | 35, 32 |
| AADACL4 | arylacetamide deacetylase like 4 | 204518 | 162496 | 188984 | |
| ASH1L | ASH1 like histone lysine methyltransferase | 116539 | 160753 | 125459 | 30, 22, 4 |
| DARS2 | aspartyl-tRNA synthetase 2, mitochondrial | 117593 | 120334 | 185278 | 31, 25, 42 |
| ASTN1 | astrotactin 1 | 152092 | 116183 | 198797 | 26, 14, 2 |
| ATXN7L2 | ataxin 7 like 2 | 162650 | 143028 | 174151 | 21, 38, 40 |
| AHCTF1 | AT-hook containing transcription factor 1 | 153207 | 143653 | 135747 | |
| AHDC1 | AT-hook DNA binding motif containing 1 | 126705 | 158195 | 000938 | 31, 27, 14 |
| ABCA4 | ATP binding cassette subfamily A member 4 | 198691 | 023909 | 137962 | 14, 25, 45 |
| ABCB10 | ATP binding cassette subfamily B member 10 | 135776 | 069248 | 135801 | 11, 29, 22 |
| ABCD3 | ATP binding cassette subfamily D member 3 | 117528 | 137962 | 117525 | 42, 39, 24 |
| ATPAF1 | ATP synthase mitochondrial F1 complex assembly factor 1 | 123472 | 142961 | 186118 | 27, 2, 23 |
| ATP5F1 | ATP synthase, H+ transporting, mitochondrial Fo complex subunit B1 | 116459 | 116455 | 143110 | 4, 34, 29 |
| AGBL4 | ATP/GTP binding protein like 4 | 186094 | 132122 | 162373 | 8, 17, 23 |
| ATP13A2 | ATPase 13A2 | 159363 | 117122 | 117118 | 7, 28, 22 |
| ATAD3A | ATPase family, AAA domain containing 3A | 197785 | 160072 | 205090 | 21, 35, 9 |
| ATAD3B | ATPase family, AAA domain containing 3B | 160072 | 215915 | 197785 | 31, 6, 3 |
| ATAD3C | ATPase family, AAA domain containing 3C | 215915 | 179403 | 160072 | 28, 17, 20 |
| ATP6V0B | ATPase H+ transporting V0 subunit b | 117410 | 132768 | 117411 | 31, 35, 14 |
| ATP6V1G3 | ATPase H+ transporting V1 subunit G3 | 151418 | 151414 | 081237 | 17, 25, 33 |
| ATPIF1 | ATPase inhibitory factor 1 | 130770 | 126698 | 130766 | 41, 25, 43 |
| ATP1A1 | ATPase Na+/K+ transporting subunit alpha 1 | 163399 | 173212 | 116815 | 40, 27, 35 |
| ATP1A2 | ATPase Na+/K+ transporting subunit alpha 2 | 018625 | 162729 | 132681 | 11, 8, 26 |
| ATP1A4 | ATPase Na+/K+ transporting subunit alpha 4 | 132681 | 018625 | 143318 | 38, 42, 4 |
| ATP1B1 | ATPase Na+/K+ transporting subunit beta 1 | 143153 | 143196 | 143156 | 29, 37, 17 |
| ATP8B2 | ATPase phospholipid transporting 8B2 | 143515 | 143595 | 160712 | 6, 31, 25 |
| ATP2B4 | ATPase plasma membrane Ca2+ transporting 4 | 058668 | 188770 | 122188 | 18, 44, 11 |
| ARID1A | AT-rich interaction domain 1A | 117713 | 117676 | 060642 | 43, 11, 23 |
| ARID4B | AT-rich interaction domain 4B | 054267 | 188739 | 152904 | 29, 22, 23 |
| ACKR1 | atypical chemokine receptor 1 (Duffy blood group) | 213088 | 162706 | 179639 | |
| AUNIP | aurora kinase A and ninein interacting protein | 127423 | 117640 | 182749 | 1, 13, 25 |
| AURKAIP1 | aurora kinase A interacting protein 1 | 175756 | 162576 | 221978 | 29, 15, 34 |
| ATG4C | autophagy related 4C cysteine peptidase | 125703 | 132855 | 187140 | 7, 10, 34 |
| AIDA | axin interactor, dorsalization associated | 186063 | 154305 | 162819 | 33, 45, 2 |
| AXDND1 | axonemal dynein light chain domain containing 1 | 162779 | 057252 | 116218 | 38, 40, 42 |
| BARHL2 | BarH like homeobox 2 | 143032 | 162664 | 122482 | |
| BSND | barttin CLCNK type accessory beta subunit | 162399 | 143001 | 169174 | 17, |
| BATF3 | basic leucine zipper ATF-like transcription factor 3 | 123685 | 162771 | 117697 | 10, 34, 39 |
| BLZF1 | basic leucine zipper nuclear factor 1 | 117475 | 143156 | 117477 | 45, 9, 18 |
| BTF3L4 | basic transcription factor 3 like 4 | 134717 | 198841 | 157077 | 4, 7, 5 |
| BCAS2 | BCAS2, pre-mRNA processing factor | 116752 | 197323 | 175984 | 4, 7, 34 |
| BCL10 | B-cell CLL/lymphoma 10 | 142867 | 162642 | 153904 | 45, 4, 22 |
| BCL9 | B-cell CLL/lymphoma 9 | 116128 | 131778 | 162836 | 2, 12, 26 |
| MCL1 | BCL2 family apoptosis regulator | 143384 | 143382 | 143420 | 42, 26, 44 |
| BNIPL | BCL2 interacting protein like | 163141 | 143363 | 143443 | 15, 30, 18 |
| BCL2L15 | BCL2 like 15 | 188761 | 134242 | 134262 | 4, 16, 3 |
| BECN2 | beclin 2 | 196289 | 174371 | 197769 | |
| BEND5 | BEN domain containing 5 | 162373 | 186094 | 162374 | 18, 10, 41 |
| BEST4 | bestrophin 4 | 142959 | 142937 | 173846 | 16, 9, 28 |
| B3GALT2 | beta-1,3-galactosyltransferase 2 | 162630 | 134371 | 162687 | 43, 8, 15 |
| B3GALT6 | beta-1,3-galactosyltransferase 6 | 176022 | 078808 | 184163 | 16, 22, 15 |
| B3GALNT2 | beta-1,3-N-acetylgalactosaminyltransferase 2 | 162885 | 116957 | 168243 | 30, 26, 6 |
| B4GALT2 | beta-1,4-galactosyltransferase 2 | 117411 | 117410 | 159214 | 3, 9, 18 |
| B4GALT3 | beta-1,4-galactosyltransferase 3 | 158850 | 143224 | 158859 | 13, 35, 9 |
| BRINP2 | BMP/retinoic acid inducible neural specific 2 | 198797 | 152092 | 120341 | 8, 42, 2 |
| BRINP3 | BMP/retinoic acid inducible neural specific 3 | 162670 | 116711 | 150681 | 8, 10, 19 |
| BOLA1 | bolA family member 1 | 178096 | 184270 | 159164 | 22, 15, 32 |
| BGLAP | bone gamma-carboxyglutamate protein | 242252 | 160783 | 160781 | 29, 6, 15 |
| BMP8A | bone morphogenetic protein 8a | 183682 | 127603 | 090621 | 6, 40, 18 |
| BMP8B | bone morphogenetic protein 8b | 116985 | 084072 | 198754 | 35, 3, 7 |
| BCAR3 | breast cancer anti-estrogen resistance 3 | 137936 | 137942 | 067334 | 1, 32, 23 |
| BCAN | brevican | 132692 | 132702 | 132688 | 8, 11, 14 |
| BROX | BRO1 domain and CAAX motif containing | 162819 | 186063 | 197520 | 4, 42, 25 |
| BRDT | bromodomain testis associated | 137948 | 069702 | 172031 | 38, 24, 25 |
| BSDC1 | BSD domain containing 1 | 160058 | 225828 | 254553 | 26, 39, 2 |
| BTBD19 | BTB domain containing 19 | 222009 | 188396 | 117425 | 40, 22, 27 |
| BTBD8 | BTB domain containing 8 | 189195 | 230667 | 069712 | 7, 25, 23 |
| BTG2 | BTG anti-proliferation factor 2 | 159388 | 133063 | 122176 | 21, 40, 22 |
| C2CD4D | C2 calcium dependent domain containing 4D | 225556 | 143365 | 196407 | 23, 16, 8 |
| CACHD1 | cache domain containing 1 | 158966 | 177414 | 162437 | 24, 12, 29 |
| CELSR2 | cadherin EGF LAG seven-pass G-type receptor 2 | 143126 | 031698 | 134222 | 29, 23, 8 |
| CACNA1E | calcium voltage-gated channel subunit alpha1 E | 198216 | 162783 | 179930 | 8, 20, 40 |
| CACNA1S | calcium voltage-gated channel subunit alpha1 S | 081248 | 116852 | 232237 | 25, 18, 40 |
| CAMK1G | calcium/calmodulin dependent protein kinase IG | 008118 | 076356 | 196878 | 34, 8, 17 |
| CAMK2N1 | calcium/calmodulin dependent protein kinase II inhibitor 1 | 162545 | 158816 | 090432 | 29, 33, 43 |
| CACYBP | calcyclin binding protein | 116161 | 203737 | 120333 | 4, 7, 26 |
| CAMTA1 | calmodulin binding transcription activator 1 | 171735 | 007923 | 049245 | 14, 8, 25 |
| CALML6 | calmodulin like 6 | 169885 | 078369 | 178821 | 26, 37, 25 |
| CAMSAP2 | calmodulin regulated spectrin associated protein family member 2 | 118200 | 118197 | 170128 | 4, 9, 32 |
| CAPN2 | calpain 2 | 162909 | 203697 | 143514 | 24, 42, 1 |
| CAPN8 | calpain 8 | 203697 | 178395 | 162909 | 37, 3, 18 |
| CAPN9 | calpain 9 | 135773 | 135744 | 119280 | 42, 3, 30 |
| CNN3 | calponin 3 | 117519 | 143036 | 172339 | 43, 13, 2 |
| CASQ1 | calsequestrin 1 | 143318 | 132681 | 162734 | 25, 15, 18 |
| CASQ2 | calsequestrin 2 | 118729 | 173218 | 177551 | 15, 43, 25 |
| CLSTN1 | calsyntenin 1 | 171603 | 171608 | 280113 | 18, 21, 26 |
| CREB3L4 | cAMP responsive element binding protein 3 like 4 | 143578 | 143570 | 143543 | 33, 26, 30 |
| CNR2 | cannabinoid receptor 2 | 188822 | 179163 | 189266 | 22, 7, 5 |
| CAPZA1 | capping actin protein of muscle Z-line alpha subunit 1 | 116489 | 007341 | 155363 | 4, 45, 3 |
| CAPZB | capping actin protein of muscle Z-line beta subunit | 077549 | 040487 | 173436 | 40, 34, 5 |
| CA14 | carbonic anhydrase 14 | 118298 | 143401 | 117362 | 11, 12, 35 |
| CA6 | carbonic anhydrase 6 | 131686 | 074800 | 197241 | 34, 30, 23 |
| CPT2 | carnitine palmitoyltransferase 2 | 157184 | 162383 | 162384 | 31, 36, 17 |
| CASP9 | caspase 9 | 132906 | 215704 | 116138 | 9, 21, 1 |
| CASZ1 | castor zinc finger 1 | 130940 | 142655 | 175262 | |
| CTNNBIP1 | catenin beta interacting protein 1 | 178585 | 280113 | 162441 | 41, 20, 35 |
| CTSE | cathepsin E | 196188 | 276600 | 263961 | 37, 3, 30 |
| CTSK | cathepsin K | 143387 | 163131 | 143437 | |
| CTSS | cathepsin S | 163131 | 143452 | 143387 | 5, 36, 10 |
| CATSPER4 | cation channel sperm associated 4 | 188782 | 142675 | 130695 | 38, |
| CITED4 | Cbp/p300 interacting transactivator with Glu/Asp rich carboxy-terminal domain 4 | 179862 | 117013 | 171793 | 22, 4, 28 |
| CD101 | CD101 molecule | 134256 | 134247 | 116830 | 18, 42, 7 |
| CD160 | CD160 molecule | 117281 | 174827 | 265491 | 5, 39, 28 |
| CD164L2 | CD164 molecule like 2 | 174950 | 142748 | 181773 | 7, 27, 39 |
| CD1A | CD1a molecule | 158477 | 158473 | 158481 | 39, 5, 22 |
| CD1B | CD1b molecule | 158485 | 158481 | 158488 | 39, 30, 15 |
| CD1C | CD1c molecule | 158481 | 158477 | 158485 | 39, 45, 15 |
| CD1D | CD1d molecule | 158473 | 183853 | 158477 | 39, 22, 9 |
| CD1E | CD1e molecule | 158488 | 158485 | 186306 | 39, 5, 15 |
| CD2 | CD2 molecule | 116824 | 143061 | 134247 | 30, 39, 36 |
| CD244 | CD244 molecule | 122223 | 122224 | 179914 | 36, 5, 39 |
| CD247 | CD247 molecule | 198821 | 143190 | 143162 | |
| CD34 | CD34 molecule | 174059 | 117335 | 076356 | 15, 45, 36 |
| CD46 | CD46 molecule | 117335 | 197721 | 174059 | 29, 42, 32 |
| CD48 | CD48 molecule | 117091 | 117090 | 026751 | 21, 39, 41 |
| CD5L | CD5 molecule like | 073754 | 163534 | 183853 | 36, 28, 32 |
| CD52 | CD52 molecule | 169442 | 158062 | 176092 | 30, 5, 2 |
| CD53 | CD53 molecule | 143119 | 177272 | 121931 | 30, 36, 22 |
| CD55 | CD55 molecule (Cromer blood group) | 196352 | 123838 | 117322 | 9, 45, 42 |
| CD58 | CD58 molecule | 116815 | 163399 | 143061 | 37, 13, 1 |
| CD84 | CD84 molecule | 066294 | 162739 | 117090 | 36, 5, 22 |
| CLK2 | CDC like kinase 2 | 176444 | 116521 | 143630 | 27, 1, 12 |
| CKS1B | CDC28 protein kinase regulatory subunit 1B | 173207 | 160691 | 160688 | 3, 29, 21 |
| CDC42BPA | CDC42 binding protein kinase alpha | 143776 | 163050 | 181450 | 26, 14, 33 |
| CDC42SE1 | CDC42 small effector 1 | 197622 | 143443 | 213190 | 18, 5, 39 |
| CADM3 | cell adhesion molecule 3 | 162706 | 163568 | 213088 | 31, 8, 32 |
| CDC14A | cell division cycle 14A | 079335 | 137996 | 181656 | 38, 29, 45 |
| CDC20 | cell division cycle 20 | 117399 | 117400 | 066322 | 21, 3, 27 |
| CDC42 | cell division cycle 42 | 070831 | 142789 | 162552 | 45, 29, 3 |
| CDC7 | cell division cycle 7 | 097046 | 162669 | 069702 | 12, 22, 39 |
| CDC73 | cell division cycle 73 | 134371 | 023572 | 162630 | 26, 7, 33 |
| CDCA8 | cell division cycle associated 8 | 134690 | 116922 | 183317 | 21, 22, 39 |
| CREG1 | cellular repressor of E1A stimulated genes 1 | 143162 | 198821 | 198771 | 2, 4, 26 |
| CRABP2 | cellular retinoic acid binding protein 2 | 143320 | 132688 | 143319 | 14, 27, 28 |
| CCSAP | centriole, cilia and spindle associated protein | 154429 | 213029 | 143632 | 32, 24, 26 |
| CENPF | centromere protein F | 117724 | 152104 | 082482 | 19, 13, 15 |
| CENPL | centromere protein L | 120334 | 076321 | 117593 | 45, 9, 39 |
| CENPS | centromere protein S | 175279 | 251503 | 241563 | |
| CEP104 | centrosomal protein 104 | 116198 | 130764 | 169598 | 29, 33, 27 |
| CEP170 | centrosomal protein 170 | 143702 | 180287 | 054282 | |
| CEP350 | centrosomal protein 350 | 135837 | 143337 | 116260 | 22, 11, 43 |
| CEP85 | centrosomal protein 85 | 130695 | 188782 | 142669 | 38, 42, 39 |
| CERS2 | ceramide synthase 2 | 143418 | 143379 | 143412 | 9, 1, 29 |
| CPTP | ceramide-1-phosphate transfer protein | 224051 | 127054 | 169962 | 28, 1, 38 |
| CCT3 | chaperonin containing TCP1 subunit 3 | 163468 | 189030 | 163467 | 21, 13, 9 |
| CHIT1 | chitinase 1 | 133063 | 133048 | 159388 | |
| CHI3L1 | chitinase 3 like 1 | 133048 | 133055 | 133063 | 10, 5, 13 |
| CHI3L2 | chitinase 3 like 2 | 064886 | 162777 | 134216 | 10, 3, 21 |
| CHIA | chitinase, acidic | 134216 | 064886 | 173947 | 40, 37, 44 |
| CTBS | chitobiase | 117151 | 174021 | 117155 | 41, 29, 1 |
| CLCA1 | chloride channel accessory 1 | 016490 | 137975 | 016602 | 16, 4, 37 |
| CLCA2 | chloride channel accessory 2 | 137975 | 122417 | 016490 | 24, 42, 13 |
| CLCA4 | chloride channel accessory 4 | 016602 | 016490 | 097033 | 13, 42, 4 |
| CLCC1 | chloride channel CLIC like 1 | 121940 | 121957 | 085433 | 13, 7, 33 |
| CLIC4 | chloride intracellular channel 4 | 169504 | 133226 | 020633 | 45, 42, 44 |
| CLCN6 | chloride voltage-gated channel 6 | 011021 | 177000 | 175206 | 26, 29, 1 |
| CLCNKA | chloride voltage-gated channel Ka | 186510 | 173641 | 184908 | 17, 29, 31 |
| CLCNKB | chloride voltage-gated channel Kb | 184908 | 186510 | 185519 | 17, 29, 40 |
| CHML | CHM like, Rab escort protein 2 | 203668 | 054277 | 162843 | 34, 40, 6 |
| CEPT1 | choline/ethanolamine phosphotransferase 1 | 134255 | 156171 | 162777 | 40, 22, 11 |
| CHRM3 | cholinergic receptor muscarinic 3 | 133019 | 270188 | 155816 | 28, |
| CHRNB2 | cholinergic receptor nicotinic beta 2 subunit | 160716 | 160714 | 160710 | 26, 8, 15 |
| CHTOP | chromatin target of PRMT1 | 160679 | 160678 | 143553 | 36, 19, 24 |
| CHD1L | chromodomain helicase DNA binding protein 1 like | 131778 | 131781 | 116128 | 25, 31, 12 |
| CHD5 | chromodomain helicase DNA binding protein 5 | 116254 | 069424 | 116251 | 8, 38, 14 |
| C1orf100 | chromosome 1 open reading frame 100 | 173728 | 179456 | 035687 | 38, 23, |
| C1orf101 | chromosome 1 open reading frame 101 | 179397 | 035687 | 121644 | |
| C1orf105 | chromosome 1 open reading frame 105 | 180999 | 135845 | 094975 | 15, 24, 38 |
| C1orf106 | chromosome 1 open reading frame 106 | 163362 | 170128 | 116852 | 42, 24, 3 |
| C1orf109 | chromosome 1 open reading frame 109 | 116922 | 169218 | 134690 | 31, 13, 44 |
| C1orf111 | chromosome 1 open reading frame 111 | 171722 | 239887 | 198574 | 38, 5, 8 |
| C1orf112 | chromosome 1 open reading frame 112 | 000460 | 174175 | 188404 | 29, 39, 9 |
| C1orf115 | chromosome 1 open reading frame 115 | 162817 | 116141 | 117791 | 32, 40, 18 |
| C1orf116 | chromosome 1 open reading frame 116 | 182795 | 162897 | 123836 | 42, 24, 33 |
| C1orf122 | chromosome 1 open reading frame 122 | 197982 | 196449 | 188786 | 31, 34, 28 |
| C1orf123 | chromosome 1 open reading frame 123 | 162384 | 157184 | 162385 | 26, 31, 1 |
| C1orf127 | chromosome 1 open reading frame 127 | 175262 | 130940 | 120948 | 28, 25, 10 |
| C1orf131 | chromosome 1 open reading frame 131 | 143633 | 119283 | 116906 | 29, 26, 7 |
| C1orf141 | chromosome 1 open reading frame 141 | 203963 | 116704 | 162594 | 38, 20, |
| C1orf145 | chromosome 1 open reading frame 145 | 162913 | 181873 | 154358 | 39, 38, 20 |
| C1orf146 | chromosome 1 open reading frame 146 | 203910 | 069712 | 174842 | 38, 5, 17 |
| C1orf158 | chromosome 1 open reading frame 158 | 157330 | 188984 | 116726 | 38, 20, 6 |
| C1orf159 | chromosome 1 open reading frame 159 | 131591 | 237330 | 162571 | 9, 39, 27 |
| C1orf162 | chromosome 1 open reading frame 162 | 143110 | 116459 | 121933 | 30, 22, 10 |
| C1orf167 | chromosome 1 open reading frame 167 | 215910 | 177674 | 177000 | 18, 5, 32 |
| C1orf168 | chromosome 1 open reading frame 168 | 187889 | 162409 | 157131 | 10, 18, 4 |
| C1orf174 | chromosome 1 open reading frame 174 | 198912 | 169598 | 196581 | 3, 19, 9 |
| C1orf185 | chromosome 1 open reading frame 185 | 204006 | 123080 | 123091 | 38, |
| C1orf186 | chromosome 1 open reading frame 186 | 263961 | 196188 | 198049 | 44, 17, 27 |
| C1orf189 | chromosome 1 open reading frame 189 | 163263 | 143549 | 143612 | 30, 38, |
| C1orf194 | chromosome 1 open reading frame 194 | 179902 | 215717 | 116299 | 38, 10, 14 |
| C1orf198 | chromosome 1 open reading frame 198 | 119280 | 135773 | 143643 | 11, 43, 26 |
| C1orf204 | chromosome 1 open reading frame 204 | 188004 | 158714 | 243284 | 2, 30, 40 |
| C1orf21 | chromosome 1 open reading frame 21 | 116667 | 198860 | 116406 | 2, 33, 10 |
| C1orf210 | chromosome 1 open reading frame 210 | 253313 | 179178 | 066056 | 22, 40, 42 |
| C1orf216 | chromosome 1 open reading frame 216 | 142686 | 126067 | 092853 | 34, 8, 33 |
| C1orf226 | chromosome 1 open reading frame 226 | 239887 | 254706 | 171722 | 42, 4, 24 |
| C1orf228 | chromosome 1 open reading frame 228 | 198520 | 126106 | 142945 | |
| C1orf234 | chromosome 1 open reading frame 234 | 227868 | 215906 | 004487 | 38, 32, |
| C1orf27 | chromosome 1 open reading frame 27 | 157181 | 047410 | 279374 | 29, 7, 19 |
| C1orf35 | chromosome 1 open reading frame 35 | 143793 | 143761 | 162910 | 41, 21, 3 |
| C1orf43 | chromosome 1 open reading frame 43 | 143612 | 163263 | 143569 | 9, 6, 18 |
| C1orf50 | chromosome 1 open reading frame 50 | 164008 | 117385 | 283580 | 29, 21, 17 |
| C1orf52 | chromosome 1 open reading frame 52 | 162642 | 097096 | 142867 | 15, 44, 35 |
| C1orf53 | chromosome 1 open reading frame 53 | 203724 | 213047 | 143355 | 44, 6, 10 |
| C1orf54 | chromosome 1 open reading frame 54 | 118292 | 117362 | 159208 | 15, 18, 1 |
| C1orf56 | chromosome 1 open reading frame 56 | 143443 | 163141 | 197622 | 38, 9, 13 |
| C1orf61 | chromosome 1 open reading frame 61 | 125462 | 132677 | 116604 | 8, 14, 31 |
| C1orf64 | chromosome 1 open reading frame 64 | 183888 | 116809 | 173641 | 31, 23, 17 |
| C1orf68 | chromosome 1 open reading frame 68 | 198854 | 187170 | 203786 | 35, 10, |
| C1orf74 | chromosome 1 open reading frame 74 | 162757 | 009790 | 117595 | 7, 30, 42 |
| C1orf87 | chromosome 1 open reading frame 87 | 162598 | 134716 | 162599 | 30, 38, 20 |
| C1orf94 | chromosome 1 open reading frame 94 | 142698 | 176256 | 163866 | 38, 25, 12 |
| CTRC | chymotrypsin C | 162438 | 142634 | 142615 | 28, 4, 36 |
| CELA2A | chymotrypsin like elastase family member 2A | 142615 | 162438 | 215704 | 28, 25, 38 |
| CELA2B | chymotrypsin like elastase family member 2B | 215704 | 142615 | 132906 | 28, 4, 20 |
| CELA3A | chymotrypsin like elastase family member 3A | 142789 | 219073 | 070831 | 28, 4, 19 |
| CELA3B | chymotrypsin like elastase family member 3B | 219073 | 142798 | 142789 | 28, 4, 19 |
| CFAP126 | cilia and flagella associated protein 126 | 188931 | 143252 | 143226 | |
| CFAP45 | cilia and flagella associated protein 45 | 213085 | 256029 | 158710 | 38, 20, 30 |
| CFAP57 | cilia and flagella associated protein 57 | 243710 | 117395 | 179178 | 30, 38, |
| CFAP74 | cilia and flagella associated protein 74 | 142609 | 178821 | 187730 | |
| CROCC | ciliary rootlet coiled-coil, rootletin | 058453 | 279132 | 117122 | 26, 12, 6 |
| CGN | cingulin | 143375 | 143442 | 143367 | 42, 16, 28 |
| CIART | circadian associated repressor of transcription | 159208 | 118292 | 266472 | 29, 23, 4 |
| CLSPN | claspin | 092853 | 142686 | 134698 | 18, 23, 3 |
| CLDN19 | claudin 19 | 164007 | 065978 | 117385 | 17, 14, 32 |
| CPSF3L | cleavage and polyadenylation specific factor 3-like | 127054 | 169972 | 224051 | 39, 1, 21 |
| F3 | coagulation factor III, tissue factor | 117525 | 117528 | 143036 | 13, 42, 24 |
| F5 | coagulation factor V | 198734 | 117479 | 174175 | 32, 19, 5 |
| F13B | coagulation factor XIIIB chain | 143278 | 134389 | 066279 | 19, 15, 10 |
| COPA | coatomer protein complex subunit alpha | 122218 | 162735 | 162736 | |
| COQ8A | coenzyme Q8A | 163050 | 143801 | 143776 | 24, 15, 1 |
| CC2D1B | coiled-coil and C2 domain containing 1B | 154222 | 157077 | 085840 | |
| CCDC163 | coiled-coil domain containing 163 | 280670 | 070759 | 132763 | 18, 42, 30 |
| CCDC17 | coiled-coil domain containing 17 | 159588 | 132780 | 159592 | 42, 20, 15 |
| CCDC18 | coiled-coil domain containing 18 | 122483 | 117500 | 117505 | 22, 31, 34 |
| CCDC181 | coiled-coil domain containing 181 | 117477 | 117475 | 117479 | |
| CCDC185 | coiled-coil domain containing 185 | 178395 | 143502 | 203697 | 38, 23, 20 |
| CCDC190 | coiled-coil domain containing 190 | 185860 | 132196 | 117152 | 24, 42, 17 |
| CCDC24 | coiled-coil domain containing 24 | 159214 | 117411 | 196517 | 1, 22, 29 |
| CCDC27 | coiled-coil domain containing 27 | 162592 | 078900 | 235169 | 38, |
| CCDC28B | coiled-coil domain containing 28B | 160050 | 084652 | 160051 | 29, 21, 15 |
| CCDC30 | coiled-coil domain containing 30 | 186409 | 127125 | 171960 | 31, 2, 17 |
| CSDE1 | cold shock domain containing E1 | 009307 | 213281 | 052723 | 42, 39, 24 |
| COLGALT2 | collagen beta(1-O)galactosyltransferase 2 | 198756 | 173627 | 198860 | 42, 8, 31 |
| COL9A2 | collagen type IX alpha 2 chain | 049089 | 084073 | 084070 | 11, 21, 14 |
| COL8A2 | collagen type VIII alpha 2 chain | 171812 | 116863 | 054116 | 16, 6, 14 |
| COL11A1 | collagen type XI alpha 1 chain | 060718 | 118733 | 185946 | 11, 6, 2 |
| COL16A1 | collagen type XVI alpha 1 chain | 084636 | 162517 | 121753 | 26, 6, 31 |
| COL24A1 | collagen type XXIV alpha 1 chain | 171502 | 117174 | 122417 | 11, 7, 37 |
| CSF1 | colony stimulating factor 1 | 184371 | 198758 | 168710 | 3, 42, 28 |
| CSF3R | colony stimulating factor 3 receptor | 119535 | 116898 | 163873 | 32, 5, 36 |
| C1QA | complement C1q A chain | 173372 | 070886 | 159189 | 36, 13, 16 |
| C1QB | complement C1q B chain | 173369 | 159189 | 133216 | 36, 1, 2 |
| C1QC | complement C1q C chain | 159189 | 173372 | 173369 | 36, 20, 32 |
| CR1 | complement C3b/C4b receptor 1 (Knops blood group) | 203710 | 117322 | 197721 | 22, 26, 45 |
| CR1L | complement C3b/C4b receptor 1 like | 197721 | 203710 | 117335 | 37, 7, 45 |
| CR2 | complement C3d receptor 2 | 117322 | 196352 | 203710 | 22, 36, 39 |
| C8A | complement C8 alpha chain | 157131 | 187889 | 021852 | 19, 36, 5 |
| C8B | complement C8 beta chain | 021852 | 157131 | 173406 | 19, 20, |
| C4BPA | complement component 4 binding protein alpha | 123838 | 123843 | 196352 | 19, 4, 20 |
| C4BPB | complement component 4 binding protein beta | 123843 | 180667 | 123838 | 19, 9, 16 |
| CFH | complement factor H | 000971 | 162687 | 116785 | 42, 19, 10 |
| CFHR1 | complement factor H related 1 | 244414 | 276911 | 134365 | 19, 15, 36 |
| CFHR2 | complement factor H related 2 | 080910 | 134365 | 134389 | 19, 10, |
| CFHR3 | complement factor H related 3 | 116785 | 000971 | 276911 | 19, 18, 25 |
| CFHR4 | complement factor H related 4 | 134365 | 244414 | 080910 | 19, |
| CFHR5 | complement factor H related 5 | 134389 | 080910 | 143278 | 19, |
| COG2 | component of oligomeric golgi complex 2 | 135775 | 177614 | 135744 | 24, 29, 38 |
| CNKSR1 | connector enhancer of kinase suppressor of Ras 1 | 142675 | 142684 | 188782 | 13, 24, 32 |
| CNST | consortin, connexin sorting protein | 162852 | 162851 | 143653 | 42, 1, 24 |
| CNTN2 | contactin 2 | 184144 | 163531 | 174529 | |
| CNIH3 | cornichon family AMPA receptor auxiliary protein 3 | 143786 | 162923 | 185842 | 35, 45, 8 |
| CNIH4 | cornichon family AMPA receptor auxiliary protein 4 | 143771 | 143748 | 162923 | 1, 29, 10 |
| CRNN | cornulin | 143536 | 143520 | 186207 | 13, 9, 30 |
| CORT | cortistatin | 241563 | 175279 | 160049 | 31, 38, 9 |
| COX20 | COX20, cytochrome c oxidase assembly factor | 203667 | 121644 | 153187 | 2, 19, 29 |
| CRP | C-reactive protein | 132693 | 132703 | 158716 | |
| CRTC2 | CREB regulated transcription coactivator 2 | 160741 | 198837 | 143570 | 40, 26, 6 |
| CRB1 | crumbs 1, cell polarity complex component | 134376 | 177888 | 213047 | 38, 26, 10 |
| CRYZ | crystallin zeta | 116791 | 178965 | 162623 | 4, 31, 19 |
| CTPS1 | CTP synthase 1 | 171793 | 179862 | 171790 | 34, 21, 45 |
| CTTNBP2NL | CTTNBP2 N-terminal like | 143079 | 171385 | 134245 | 24, 29, 26 |
| CSMD2 | CUB and Sushi multiple domains 2 | 121904 | 121903 | 176256 | 38, 8, 25 |
| CDCP2 | CUB domain containing protein 2 | 157211 | 256407 | 215883 | |
| CELF3 | CUGBP, Elav-like family member 3 | 159409 | 143376 | 178796 | 28, 14, 8 |
| CDK11A | cyclin dependent kinase 11A | 008128 | 189339 | 215790 | 18, 39, 1 |
| CDK11B | cyclin dependent kinase 11B | 248333 | 189409 | 189339 | 21, 27, 18 |
| CDK18 | cyclin dependent kinase 18 | 117266 | 186007 | 174514 | 8, 4, 14 |
| CDKN2C | cyclin dependent kinase inhibitor 2C | 123080 | 185104 | 204006 | 39, 34, 7 |
| CCNL2 | cyclin L2 | 221978 | 175756 | 242485 | 33, 30, 13 |
| CTH | cystathionine gamma-lyase | 116761 | 279230 | 050628 | 19, 14, 4 |
| CSRP1 | cysteine and glycine rich protein 1 | 159176 | 174307 | 134369 | 43, 13, 44 |
| CYR61 | cysteine rich angiogenic inducer 61 | 142871 | 153904 | 117174 | 1, 26, 45 |
| CRCT1 | cysteine rich C-terminal 1 | 169509 | 279850 | 185966 | 15, 30, 35 |
| CDA | cytidine deaminase | 158825 | 183114 | 158828 | 5, 19, 10 |
| CMPK1 | cytidine/uridine monophosphate kinase 1 | 162368 | 123473 | 186790 | 4, 24, 45 |
| CYB5R1 | cytochrome b5 reductase 1 | 159348 | 159346 | 163444 | 29, 18, 32 |
| CYB5RL | cytochrome b5 reductase like | 215883 | 157211 | 116221 | 1, 6, 22 |
| CYB561D1 | cytochrome b561 family member D1 | 174151 | 162650 | 181754 | 39, 27, 18 |
| COA6 | cytochrome c oxidase assembly factor 6 | 168275 | 183780 | 059588 | 29, 3, 28 |
| COA7 | cytochrome c oxidase assembly factor 7 (putative) | 162377 | 182183 | 162378 | |
| CYP2J2 | cytochrome P450 family 2 subfamily J member 2 | 134716 | 134709 | 162598 | 19, 10, 32 |
| CYP4A11 | cytochrome P450 family 4 subfamily A member 11 | 187048 | 142973 | 186377 | 19, 17, 5 |
| CYP4A22 | cytochrome P450 family 4 subfamily A member 22 | 162365 | 186160 | 162366 | |
| CYP4B1 | cytochrome P450 family 4 subfamily B member 1 | 142973 | 159658 | 187048 | |
| CYP4X1 | cytochrome P450 family 4 subfamily X member 1 | 186377 | 187048 | 186160 | 42, 26, 45 |
| CYP4Z1 | cytochrome P450 family 4 subfamily Z member 1 | 186160 | 186377 | 162365 | 10, 23, 42 |
| DAB1 | DAB1, reelin adaptor protein | 173406 | 021852 | 162600 | 10, 8, 12 |
| DCST1 | DC-STAMP domain containing 1 | 163357 | 163354 | 143537 | 26, 38, 14 |
| DCST2 | DC-STAMP domain containing 2 | 163354 | 160685 | 163357 | 38, 39, 14 |
| DCAF6 | DDB1 and CUL4 associated factor 6 | 143164 | 143158 | 143147 | 38, 40, 24 |
| DCAF8 | DDB1 and CUL4 associated factor 8 | 132716 | 162734 | 258465 | 31, 24, 39 |
| DDX20 | DEAD-box helicase 20 | 064703 | 197852 | 171385 | 38, 22, 45 |
| DDX59 | DEAD-box helicase 59 | 118197 | 118193 | 118200 | 9, 31, 22 |
| DAP3 | death associated protein 3 | 132676 | 163374 | 116580 | 31, 24, 43 |
| DEDD | death effector domain containing | 158796 | 158793 | 143222 | 9, 38, 22 |
| DOCK7 | dedicator of cytokinesis 7 | 116641 | 162607 | 132855 | |
| DHDDS | dehydrodolichyl diphosphate synthase subunit | 117682 | 131914 | 198830 | |
| DHRS3 | dehydrogenase/reductase 3 | 162496 | 048707 | 204518 | 1, 18, 9 |
| DEGS1 | delta 4-desaturase, sphingolipid 1 | 143753 | 143756 | 143748 | 45, 4, 2 |
| DENND1B | DENN domain containing 1B | 213047 | 134376 | 203724 | 4, 29, 22 |
| DENND2C | DENN domain containing 2C | 175984 | 116752 | 116748 | 18, 38, 25 |
| DENND2D | DENN domain containing 2D | 162777 | 134255 | 064886 | 36, 39, 3 |
| DENND4B | DENN domain containing 4B | 198837 | 143614 | 160741 | 5, 41, 22 |
| DTL | denticleless E3 ubiquitin protein ligase homolog | 143476 | 143493 | 066027 | 5, 38, 21 |
| DNTTIP2 | deoxynucleotidyltransferase terminal interacting protein 2 | 067334 | 137936 | 023909 | 45, 18, 28 |
| DNASE2B | deoxyribonuclease 2 beta | 137976 | 203943 | 117133 | 20, 35, 25 |
| DEPDC1 | DEP domain containing 1 | 024526 | 116745 | 033122 | 13, 22, 43 |
| DPT | dermatopontin | 143196 | 143184 | 143153 | 1, 30, 27 |
| DESI2 | desumoylating isopeptidase 2 | 121644 | 179397 | 203667 | 22, 4, 15 |
| DHX9 | DExH-box helicase 9 | 135829 | 135838 | 157060 | 42, 38, 12 |
| DMBX1 | diencephalon/mesencephalon homeobox 1 | 197587 | 117480 | 282881 | |
| DIEXF | digestive organ expansion factor homolog (zebrafish) | 117597 | 117595 | 143469 | 45, 9, 36 |
| DBT | dihydrolipoamide branched chain transacylase E2 | 137992 | 122477 | 137996 | 31, 40, 1 |
| DPYD | dihydropyrimidine dehydrogenase | 188641 | 117569 | 162627 | 26, 22, 42 |
| DDAH1 | dimethylarginine dimethylaminohydrolase 1 | 153904 | 142867 | 142871 | 17, 4, 45 |
| DPH5 | diphthamide biosynthesis 5 | 117543 | 162695 | 170989 | 18, 31, 9 |
| DIRAS3 | DIRAS family GTPase 3 | 162595 | 172380 | 116729 | 31, 34, 7 |
| DDR2 | discoidin domain receptor tyrosine kinase 2 | 162733 | 117143 | 132196 | |
| DVL1 | dishevelled segment polarity protein 1 | 107404 | 169962 | 162576 | 1, 34, 6 |
| DISP1 | dispatched RND transporter family member 1 | 154309 | 197520 | 187554 | 43, 13, 38 |
| DISP3 | dispatched RND transporter family member 3 | 204624 | 120942 | 116661 | 14, 38, 20 |
| DISC1 | disrupted in schizophrenia 1 | 162946 | 116918 | 116991 | 30, 43, 19 |
| DLGAP3 | DLG associated protein 3 | 116544 | 187513 | 271741 | 38, 36, 14 |
| DMRTA2 | DMRT like family A2 | 142700 | 162374 | 185104 | 14, 25, 8 |
| DMRTB1 | DMRT like family B with proline rich C-terminal 1 | 143006 | 157193 | 174332 | 38, 32, 8 |
| DCLRE1B | DNA cross-link repair 1B | 118655 | 134262 | 163349 | 6, 9, 39 |
| DDI2 | DNA damage inducible 1 homolog 2 | 197312 | 116771 | 215695 | 40, 24, 18 |
| DRAM2 | DNA damage regulated autophagy modulator 2 | 156171 | 121931 | 134255 | 1, 34, 7 |
| DFFA | DNA fragmentation factor subunit alpha | 160049 | 241563 | 142655 | 41, 25, 21 |
| DFFB | DNA fragmentation factor subunit beta | 169598 | 116198 | 198912 | 10, 45, 24 |
| DMAP1 | DNA methyltransferase 1 associated protein 1 | 178028 | 283039 | 117419 | 9, 2, 21 |
| DNAJB4 | DnaJ heat shock protein family (Hsp40) member B4 | 162616 | 162613 | 137960 | 45, 13, 26 |
| DNAJC11 | DnaJ heat shock protein family (Hsp40) member C11 | 007923 | 041988 | 171735 | 21, 41, 1 |
| DNAJC16 | DnaJ heat shock protein family (Hsp40) member C16 | 116138 | 132906 | 116771 | 22, 26, 7 |
| DNAJC6 | DnaJ heat shock protein family (Hsp40) member C6 | 116675 | 162433 | 213625 | 26, 8, 31 |
| DNAJC8 | DnaJ heat shock protein family (Hsp40) member C8 | 126698 | 169403 | 130770 | 29, 30, 3 |
| DDOST | dolichyl-diphosphooligosaccharide-protein glycosyltransferase non-catalytic subunit | 244038 | 158828 | 117245 | 13, 30, 4 |
| DPM3 | dolichyl-phosphate mannosyltransferase subunit 3 | 179085 | 169241 | 163463 | 31, 33, 25 |
| DRAXIN | dorsal inhibitory axon guidance protein | 162490 | 116670 | 177674 | |
| DCDC2B | doublecortin domain containing 2B | 222046 | 160051 | 160055 | 20, 44, |
| DR1 | down-regulator of transcription 1 | 117505 | 122483 | 137942 | 39, 22, 34 |
| DPH2 | DPH2 homolog | 132768 | 117408 | 117410 | 21, 9, 3 |
| DSTYK | dual serine/threonine and tyrosine protein kinase | 133059 | 117222 | 133069 | 35, 14, 11 |
| DUSP10 | dual specificity phosphatase 10 | 143507 | 136630 | 143512 | 6, 4, 26 |
| DUSP12 | dual specificity phosphatase 12 | 081721 | 162746 | 118217 | 3, 23, 44 |
| DUSP23 | dual specificity phosphatase 23 | 158716 | 132693 | 181036 | 35, 1, 16 |
| DUSP27 | dual specificity phosphatase 27 (putative) | 198842 | 143167 | 143190 | 16, 40, 18 |
| DYRK3 | dual specificity tyrosine phosphorylation regulated kinase 3 | 143479 | 143486 | 162889 | 38, 3, 6 |
| DNM3 | dynamin 3 | 197959 | 010165 | 135845 | 8, 2, 26 |
| DNAH14 | dynein axonemal heavy chain 14 | 185842 | 143786 | 143815 | 10, 4, 26 |
| DNALI1 | dynein axonemal light intermediate chain 1 | 163879 | 163877 | 134697 | 20, 17, 33 |
| E2F2 | E2F transcription factor 2 | 007968 | 088280 | 117318 | 21, 39, 22 |
| ELF3 | E74 like ETS transcription factor 3 | 163435 | 176393 | 170075 | 4, 42, 16 |
| EBNA1BP2 | EBNA1 binding protein 2 | 117395 | 186973 | 243710 | 17, 10, 19 |
| EVI5 | ecotropic viral integration site 5 | 067208 | 162676 | 122406 | 4, 31, 3 |
| EDARADD | EDAR associated death domain | 186197 | 086619 | 116977 | 24, 43, 9 |
| EFCAB14 | EF-hand calcium binding domain 14 | 159658 | 186118 | 142973 | 40, 29, 42 |
| EFCAB2 | EF-hand calcium binding domain 2 | 203666 | 153187 | 162849 | 4, 13, 34 |
| EFCAB7 | EF-hand calcium binding domain 7 | 203965 | 142856 | 079739 | 26, 7, 31 |
| EFHD2 | EF-hand domain family member D2 | 142634 | 142621 | 162438 | 34, 33, 37 |
| EGLN1 | egl-9 family hypoxia inducible factor 1 | 135766 | 010072 | 116918 | 34, 22, 7 |
| ELAVL4 | ELAV like RNA binding protein 4 | 162374 | 162373 | 142700 | |
| ELK4 | ELK4, ETS transcription factor | 158711 | 174514 | 158715 | 22, 17, 33 |
| ELOVL1 | ELOVL fatty acid elongase 1 | 066322 | 117399 | 159479 | 35, 37, 13 |
| ENAH | enabled homolog (Drosophila) | 154380 | 143815 | 143742 | 18, 4, 45 |
| ERO1B | endoplasmic reticulum oxidoreductase 1 beta | 086619 | 077585 | 186197 | 28, 38, 2 |
| ENSA | endosulfine alpha | 143420 | 143384 | 143457 | 3, 37, 6 |
| EDN2 | endothelin 2 | 127129 | 204060 | 127124 | 15, 23, 17 |
| ECE1 | endothelin converting enzyme 1 | 117298 | 075151 | 142794 | 43, 24, 42 |
| ENO1 | enolase 1 | 074800 | 142599 | 131686 | 9, 13, 27 |
| ECHDC2 | enoyl-CoA hydratase domain containing 2 | 121310 | 203995 | 116171 | 40, 26, 19 |
| EPHA10 | EPH receptor A10 | 183317 | 134690 | 185090 | 38, 16, 28 |
| EPHA2 | EPH receptor A2 | 142627 | 185519 | 142632 | 28, 27, 30 |
| EPHA8 | EPH receptor A8 | 070886 | 184677 | 173372 | 14, 36, 28 |
| EPHB2 | EPH receptor B2 | 133216 | 173369 | 215906 | 43, 16, 1 |
| EFNA1 | ephrin A1 | 169242 | 143590 | 169241 | 9, 34, 32 |
| EFNA3 | ephrin A3 | 143590 | 251246 | 169242 | 2, 6, 13 |
| EFNA4 | ephrin A4 | 243364 | 143537 | 251246 | 3, 43, 33 |
| EPS15 | epidermal growth factor receptor pathway substrate 15 | 085832 | 085831 | 117859 | 31, 26, 37 |
| EPHX1 | epoxide hydrolase 1 | 143819 | 143742 | 196187 | 2, 34, 1 |
| EPHX4 | epoxide hydrolase 4 | 172031 | 137948 | 230667 | 14, 27, 16 |
| EPS8L3 | EPS8 like 3 | 198758 | 134202 | 184371 | 37, 3, 16 |
| EDEM3 | ER degradation enhancing alpha-mannosidase like protein 3 | 116406 | 116667 | 135842 | 42, 18, 15 |
| EMC1 | ER membrane protein complex subunit 1 | 127463 | 127481 | 053372 | 7, 13, 38 |
| ERRFI1 | ERBB receptor feedback inhibitor 1 | 116285 | 116288 | 162426 | 40, 19, 10 |
| ERI3 | ERI1 exoribonuclease family member 3 | 117419 | 178028 | 187147 | 29, 34, 37 |
| ERMAP | erythroblast membrane associated protein (Scianna blood group) | 164010 | 177868 | 164011 | 42, 2, 26 |
| EPB41 | erythrocyte membrane protein band 4.1 | 159023 | 116329 | 253304 | 22, 19, 18 |
| ESPN | espin | 187017 | 069812 | 215788 | |
| ESRRG | estrogen related receptor gamma | 196482 | 042781 | 092978 | 32, 14, 34 |
| ETNK2 | ethanolamine kinase 2 | 143845 | 143842 | 143839 | 38, 17, 19 |
| ETV3 | ETS variant 3 | 117036 | 253831 | 143297 | 7, 16, 2 |
| ETV3L | ETS variant 3 like | 253831 | 132694 | 117036 | 35, 8, |
| EIF2B3 | eukaryotic translation initiation factor 2 B subunit gamma | 070785 | 117425 | 126107 | 18, 5, 16 |
| EIF2D | eukaryotic translation initiation factor 2D | 143486 | 266094 | 143479 | 9, 5, 45 |
| EIF3I | eukaryotic translation initiation factor 3 subunit I | 084623 | 160055 | 183615 | 7, 4, 34 |
| EIF4G3 | eukaryotic translation initiation factor 4 gamma 3 | 075151 | 127483 | 117298 | 40, 26, 11 |
| EVA1B | eva-1 homolog B | 142694 | 214193 | 196182 | 27, 26, 31 |
| EXOC8 | exocyst complex component 8 | 116903 | 116906 | 010072 | 1, 29, 22 |
| EXO1 | exonuclease 1 | 174371 | 162843 | 196289 | 6, 11, 39 |
| EXO5 | exonuclease 5 | 164002 | 187815 | 117010 | 6, 15, 44 |
| EXOSC10 | exosome component 10 | 171824 | 116649 | 198793 | 36, 45, 3 |
| EXTL1 | exostosin like glycosyltransferase 1 | 158008 | 158006 | 158014 | 8, 35, 25 |
| EXTL2 | exostosin like glycosyltransferase 2 | 162694 | 162692 | 162695 | 29, 6, 45 |
| ECM1 | extracellular matrix protein 1 | 143369 | 143374 | 143382 | 13, 3, 40 |
| EYA3 | EYA transcriptional coactivator and phosphatase 3 | 158161 | 158156 | 169403 | 22, 39, 43 |
| F11R | F11 receptor | 158769 | 158764 | 270149 | 24, 30, 42 |
| FAM20B | FAM20B, glycosaminoglycan xylosylkinase | 116199 | 116194 | 186283 | 1, 22, 34 |
| FAM102B | family with sequence similarity 102 member B | 162636 | 186086 | 162639 | 26, 35, 9 |
| FAM110D | family with sequence similarity 110 member D | 197245 | 175087 | 282872 | 1, 20, 32 |
| FAM129A | family with sequence similarity 129 member A | 135842 | 116406 | 121481 | 42, 22, 33 |
| FAM131C | family with sequence similarity 131 member C | 185519 | 184908 | 142627 | 8, 28, 6 |
| FAM132A | family with sequence similarity 132 member A | 184163 | 176022 | 160087 | 2, 17, 36 |
| FAM151A | family with sequence similarity 151 member A | 162391 | 162390 | 184313 | 17, 40, 36 |
| FAM159A | family with sequence similarity 159 member A | 182183 | 116157 | 162377 | 22, 10, 9 |
| FAM163A | family with sequence similarity 163 member A | 143340 | 162782 | 169905 | 26, 39, 38 |
| FAM167B | family with sequence similarity 167 member B | 183615 | 084623 | 182866 | 13, 29, 35 |
| FAM177B | family with sequence similarity 177 member B | 197520 | 162819 | 154309 | 42, 30, 5 |
| FAM183A | family with sequence similarity 183 member A | 186973 | 117394 | 117395 | 31, 20, 33 |
| FAM189B | family with sequence similarity 189 member B | 160767 | 177628 | 116521 | 21, 26, 25 |
| FAM19A3 | family with sequence similarity 19 member A3, C-C motif chemokine like | 184599 | 155367 | 155380 | 14, 6, 15 |
| FAM212B | family with sequence similarity 212 member B | 197852 | 116473 | 064703 | |
| FAM213B | family with sequence similarity 213 member B | 157870 | 157873 | 142606 | 3, 36, 2 |
| FAM229A | family with sequence similarity 229 member A | 225828 | 162526 | 160058 | 24, 39, 3 |
| FAM231A | family with sequence similarity 231 member A | 237847 | 219481 | 279132 | |
| FAM231B | family with sequence similarity 231 member B | 268991 | 157191 | 219481 | |
| FAM231C | family with sequence similarity 231 member C | 279132 | 237847 | 058453 | |
| FAM231D | family with sequence similarity 231 member D | 272058 | 263464 | 150337 | |
| FAM43B | family with sequence similarity 43 member B | 183114 | 090432 | 158825 | 2, 6, 44 |
| FAM46B | family with sequence similarity 46 member B | 158246 | 253368 | 280403 | 35, 14, 33 |
| FAM46C | family with sequence similarity 46 member C | 183508 | 198162 | 196505 | 42, 31, 4 |
| FAM63A | family with sequence similarity 63 member A | 143409 | 143412 | 143363 | 24, 40, 42 |
| FAM69A | family with sequence similarity 69 member A | 154511 | 122406 | 143033 | 3, 30, 17 |
| FAM71A | family with sequence similarity 71 member A | 162771 | 162772 | 123685 | 38, 8, |
| FAM72A | family with sequence similarity 72 member A | 196550 | 198049 | 266028 | 17, 16, |
| FAM72B | family with sequence similarity 72 member B | 188610 | 198019 | 171943 | 22, 21, 18 |
| FAM72C | family with sequence similarity 72 member C | 263513 | 203818 | 271567 | |
| FAM72D | family with sequence similarity 72 member D | 215784 | 196369 | 281571 | 24, 4, 5 |
| FAM76A | family with sequence similarity 76 member A | 009780 | 126709 | 117758 | 13, 29, 22 |
| FAM78B | family with sequence similarity 78 member B | 188859 | 143179 | 143157 | 14, 26, 4 |
| FAM89A | family with sequence similarity 89 member A | 182118 | 173409 | 119283 | 26, 32, 35 |
| FAAP20 | Fanconi anemia cere complex associated protein 20 | 162585 | 067606 | 157933 | 22, 41, 23 |
| FUBP1 | far upstream element binding protein 1 | 162613 | 162614 | 162616 | 7, 1, 12 |
| FDPS | farnesyl diphosphate synthase | 160752 | 143627 | 160753 | 21, 19, 27 |
| FAF1 | Fas associated factor 1 | 185104 | 142700 | 123080 | 10, 41, 25 |
| FASLG | Fas ligand | 117560 | 094975 | 120337 | 5, 7, 36 |
| FAAH | fatty acid amide hydrolase | 117480 | 117481 | 197587 | 38, 24, 27 |
| FABP3 | fatty acid binding protein 3 | 121769 | 121766 | 168528 | 15, 25, 20 |
| FBXO2 | F-box protein 2 | 116661 | 204624 | 132879 | 29, 26, 20 |
| FBXO28 | F-box protein 28 | 143756 | 143514 | 143753 | 29, 4, 39 |
| FBXO42 | F-box protein 42 | 037637 | 132881 | 055070 | 11, 4, 39 |
| FBXO44 | F-box protein 44 | 132879 | 116661 | 116663 | 41, 8, 36 |
| FBXO6 | F-box protein 6 | 116663 | 132879 | 116670 | 6, 35, 23 |
| FCAMR | Fc fragment of IgA and IgM receptor | 162897 | 162896 | 182795 | 17, 30, 16 |
| FCER1A | Fc fragment of IgE receptor Ia | 179639 | 213088 | 196266 | 33, 6, 30 |
| FCER1G | Fc fragment of IgE receptor Ig | 158869 | 158864 | 158874 | 5, 2, 40 |
| FCGR1A | Fc fragment of IgG receptor Ia | 150337 | 272058 | 203814 | 26, 30, 32 |
| FCGR1B | Fc fragment of IgG receptor Ib | 198019 | 281741 | 188610 | 34, 32, 30 |
| FCGR2A | Fc fragment of IgG receptor IIa | 143226 | 188931 | 173110 | |
| FCGR2B | Fc fragment of IgG receptor IIb | 072694 | 162747 | 132185 | 32, 1, 22 |
| FCGR2C | Fc fragment of IgG receptor IIc (gene/pseudogene) | 244682 | 203747 | 162747 | 13, 32, 10 |
| FCGR3A | Fc fragment of IgG receptor IIIa | 203747 | 173110 | 244682 | 5, 36, 10 |
| FCGR3B | Fc fragment of IgG receptor IIIb | 162747 | 244682 | 072694 | |
| FCMR | Fc fragment of IgM receptor | 162894 | 162892 | 162896 | |
| FCRL1 | Fc receptor like 1 | 163534 | 132704 | 073754 | 36, 22, 30 |
| FCRL2 | Fc receptor like 2 | 132704 | 160856 | 163534 | 22, 24, 21 |
| FCRL3 | Fc receptor like 3 | 160856 | 163518 | 132704 | 22, 36, 21 |
| FCRL4 | Fc receptor like 4 | 163518 | 143297 | 160856 | 22, |
| FCRL5 | Fc receptor like 5 | 143297 | 117036 | 163518 | 22, 24, 36 |
| FCRL6 | Fc receptor like 6 | 181036 | 158716 | 158714 | 36, 23, 35 |
| FCRLA | Fc receptor like A | 132185 | 072694 | 162746 | 21, 36, 35 |
| FCRLB | Fc receptor like B | 162746 | 132185 | 081721 | 10, 35, 23 |
| FLVCR1 | feline leukemia virus subgroup C cellular receptor 1 | 162769 | 185523 | 143494 | 1, 31, 23 |
| FRRS1 | ferric chelate reductase 1 | 156869 | 099260 | 162688 | 4, 24, 32 |
| FGGY | FGGY carbohydrate kinase domain containing | 172456 | 177606 | 134709 | 10, 26, 1 |
| FGR | FGR proto-oncogene, Src family tyrosine kinase | 000938 | 126705 | 126709 | 36, 5, 21 |
| FMOD | fibromodulin | 122176 | 159388 | 188783 | 10, 6, 43 |
| FNDC10 | fibronectin type III domain containing 10 | 228594 | 279244 | 197530 | 3, 26, 14 |
| FNDC5 | fibronectin type III domain containing 5 | 160097 | 116497 | 121905 | |
| FNDC7 | fibronectin type III domain containing 7 | 143107 | 134186 | 116266 | 38, 23, 32 |
| FCN3 | ficolin 3 | 142748 | 142733 | 174950 | 20, 19, 17 |
| FLG | filaggrin | 143631 | 197915 | 143520 | 35, 23, 24 |
| FLG2 | filaggrin family member 2 | 143520 | 143631 | 143536 | 35, |
| FBLIM1 | filamin binding LIM protein 1 | 162458 | 162460 | 233954 | 18, 37, 34 |
| FLAD1 | flavin adenine dinucleotide synthetase 1 | 160688 | 173207 | 163352 | 13, 43, 9 |
| FMO1 | flavin containing monooxygenase 1 | 010932 | 094963 | 076258 | 17, 15, 23 |
| FMO2 | flavin containing monooxygenase 2 | 094963 | 007933 | 010932 | 42, 30, 45 |
| FMO3 | flavin containing monooxygenase 3 | 007933 | 117501 | 094963 | 19, 40, 13 |
| FMO4 | flavin containing monooxygenase 4 | 076258 | 010932 | 117523 | 26, 29, 18 |
| FMO5 | flavin containing monooxygenase 5 | 131781 | 131791 | 131778 | 42, 29, 19 |
| FHAD1 | forkhead associated phosphopeptide binding domain 1 | 142621 | 171729 | 142634 | |
| FOXD2 | forkhead box D2 | 186564 | 186790 | 269113 | 5, 27, 16 |
| FOXD3 | forkhead box D3 | 187140 | 125703 | 088035 | 11, 15, 17 |
| FOXE3 | forkhead box E3 | 186790 | 162368 | 186564 | 14, 33, 38 |
| FOXJ3 | forkhead box J3 | 198815 | 197273 | 177181 | 37, 1, 9 |
| FOXO6 | forkhead box O6 | 204060 | 010803 | 127129 | |
| FMN2 | formin 2 | 155816 | 133019 | 180875 | 29, 11, 10 |
| FNBP1L | formin binding protein 1 like | 137942 | 117505 | 137936 | 43, 11, 42 |
| FHL3 | four and a half LIM domains 3 | 183386 | 183431 | 183520 | 25, 9, 22 |
| FPGT-TNNI3K | FPGT-TNNI3K readthrough | 259030 | 254685 | 116783 | |
| FPGT | fucose-1-phosphate guanylyltransferase | 254685 | 162620 | 259030 | |
| FUCA1 | fucosidase, alpha-L-1, tissue | 179163 | 117305 | 188822 | 5, 36, 29 |
| FH | fumarate hydratase | 091483 | 182901 | 117009 | 29, 35, 21 |
| GNL2 | G protein nucleolar 2 | 134697 | 163879 | 169218 | 45, 1, 13 |
| GNAI3 | G protein subunit alpha i3 | 065135 | 156097 | 134183 | |
| GNAT2 | G protein subunit alpha transducin 2 | 134183 | 065135 | 116337 | 14, 38, 33 |
| GNB1 | G protein subunit beta 1 | 078369 | 008130 | 169885 | 14, 40, 20 |
| GNG12 | G protein subunit gamma 12 | 172380 | 116717 | 162595 | 45, 4, 35 |
| GNG4 | G protein subunit gamma 4 | 168243 | 162885 | 143669 | 28, 26, 8 |
| GNG5 | G protein subunit gamma 5 | 174021 | 117133 | 117151 | 11, 1, 43 |
| GPR137B | G protein-coupled receptor 137B | 077585 | 116962 | 086619 | 35, 17, 29 |
| GPR153 | G protein-coupled receptor 153 | 158292 | 173673 | 097021 | 18, 1, 34 |
| GPR157 | G protein-coupled receptor 157 | 180758 | 142583 | 049239 | 24, 42, 40 |
| GPR161 | G protein-coupled receptor 161 | 143147 | 143164 | 143155 | 34, 44, 24 |
| GPR25 | G protein-coupled receptor 25 | 170128 | 118200 | 163362 | 37, |
| GPR3 | G protein-coupled receptor 3 | 181773 | 174950 | 158195 | 6, 14, 37 |
| GPR37L1 | G protein-coupled receptor 37 like 1 | 170075 | 163435 | 143862 | 8, 17, 38 |
| GPR52 | G protein-coupled receptor 52 | 203737 | 152061 | 116161 | 23, 17, |
| GPR61 | G protein-coupled receptor 61 | 156097 | 181754 | 065135 | |
| GPR88 | G protein-coupled receptor 88 | 181656 | 079335 | 162692 | 11, 36, 10 |
| GPR89A | G protein-coupled receptor 89A | 117262 | 162825 | 174827 | |
| GPR89B | G protein-coupled receptor 89B | 188092 | 121634 | 263956 | 13, 38, 42 |
| G0S2 | G0/G1 switch 2 | 123689 | 196878 | 117594 | 1, 26, 3 |
| GABPB2 | GA binding protein transcription factor beta subunit 2 | 143458 | 213190 | 143434 | 1, 2, 3 |
| LGALS8 | galectin 8 | 116977 | 186197 | 119285 | 42, 36, 24 |
| GABRD | gamma-aminobutyric acid type A receptor delta subunit | 187730 | 142609 | 067606 | 8, 26, 15 |
| GDAP2 | ganglioside induced differentiation associated protein 2 | 196505 | 183508 | 065183 | 9, 24, 30 |
| GJA4 | gap junction protein alpha 4 | 187513 | 188910 | 116544 | 32, 1, 23 |
| GJA5 | gap junction protein alpha 5 | 265107 | 162836 | 121634 | 32, 20, 37 |
| GJA8 | gap junction protein alpha 8 | 121634 | 265107 | 188092 | 38, 44, 14 |
| GJA9 | gap junction protein alpha 9 | 131233 | 274944 | 158315 | |
| GJB3 | gap junction protein beta 3 | 188910 | 189433 | 187513 | 9, 13, 37 |
| GJB4 | gap junction protein beta 4 | 189433 | 189280 | 188910 | 42, 24, 35 |
| GJB5 | gap junction protein beta 5 | 189280 | 163866 | 189433 | 30, 13, 35 |
| GJC2 | gap junction protein gamma 2 | 198835 | 143774 | 181873 | 9, 27, 14 |
| GATAD2B | GATA zinc finger domain containing 2B | 143614 | 143554 | 198837 | 18, 24, 22 |
| GPBP1L1 | GC-rich promoter binding protein 1 like 1 | 159592 | 159588 | 159596 | 42, 39, 38 |
| GTF2B | general transcription factor IIB | 137947 | 065243 | 137944 | 29, 4, 30 |
| GGPS1 | geranylgeranyl diphosphate synthase 1 | 152904 | 054267 | 116957 | 4, 31, 29 |
| GCSAML | germinal center associated signaling and motility like | 169224 | 177535 | 196242 | |
| GIPC2 | GIPC PDZ domain containing family member 2 | 137960 | 162616 | 122420 | 4, 17, 36 |
| GLIS1 | GLIS family zinc finger 1 | 174332 | 143006 | 058804 | 17, 14, 12 |
| GLMN | glomulin, FKBP associated protein | 174842 | 203910 | 122484 | 9, 26, 10 |
| GMEB1 | glucocorticoid modulatory element binding protein 1 | 162419 | 188060 | 198492 | 22, 24, 16 |
| GBA | glucosylceramidase beta | 177628 | 173171 | 160767 | 32, |
| GRIK3 | glutamate ionotropic receptor kainate type subunit 3 | 163873 | 119535 | 163874 | 14, 8, 20 |
| ERICH3 | glutamate rich 3 | 178965 | 162621 | 116791 | 31, 38, 20 |
| GLUL | glutamate-ammonia ligase | 135821 | 179930 | 203730 | 30, 26, 14 |
| GCLM | glutamate-cysteine ligase modifier subunit | 023909 | 067334 | 198691 | 4, 29, 32 |
| EPRS | glutamyl-prolyl-tRNA synthetase | 136628 | 196660 | 162813 | 2, 3, 43 |
| GLRX2 | glutaredoxin 2 | 023572 | 116747 | 134371 | 10, 2, 38 |
| GPX7 | glutathione peroxidase 7 | 116157 | 134744 | 182183 | 22, 15, 10 |
| GSTM1 | glutathione S-transferase mu 1 | 134184 | 213366 | 134201 | 26, 13, 23 |
| GSTM2 | glutathione S-transferase mu 2 | 213366 | 168765 | 134184 | 2, 26, 40 |
| GSTM3 | glutathione S-transferase mu 3 | 134202 | 134201 | 198758 | 5, 3, 1 |
| GSTM4 | glutathione S-transferase mu 4 | 168765 | 116337 | 213366 | 34, 31, 37 |
| GSTM5 | glutathione S-transferase mu 5 | 134201 | 134184 | 134202 | 18, 26, 15 |
| GNPAT | glyceronephosphate O-acyltransferase | 116906 | 143633 | 116903 | 41, 38, 36 |
| GPA33 | glycoprotein A33 | 143167 | 143194 | 198842 | 16, 3, 39 |
| GLMP | glycosylated lysosomal membrane protein | 198715 | 163472 | 189030 | 32, 6, 37 |
| GOLPH3L | golgi phosphoprotein 3 like | 143457 | 143420 | 143452 | 42, 11, 6 |
| GOLT1A | golgi transport 1A | 174567 | 170498 | 143850 | 29, 28, 19 |
| GORAB | golgin, RAB6 interacting | 120370 | 203740 | 116132 | 7, 45, 42 |
| GON4L | gon-4 like | 116580 | 132676 | 132718 | 40, 31, 37 |
| GPATCH2 | G-patch domain containing 2 | 092978 | 196482 | 162814 | 39, 10, 42 |
| GPATCH3 | G-patch domain containing 3 | 198746 | 142751 | 090273 | 39, 36, 3 |
| GPATCH4 | G-patch domain containing 4 | 160818 | 163382 | 280316 | 21, 27, 7 |
| GPN2 | GPN-loop GTPase 2 | 142751 | 175793 | 198746 | 35, 1, 6 |
| GPSM2 | G-protein signaling modulator 2 | 121957 | 274068 | 121940 | 31, 18, 10 |
| GRHL3 | grainyhead like transcription factor 3 | 158055 | 185436 | 001460 | 24, 29, 18 |
| GREM2 | gremlin 2, DAN family BMP antagonist | 180875 | 155816 | 182901 | 10, 15, 2 |
| GADD45A | growth arrest and DNA damage inducible alpha | 116717 | 142864 | 172380 | 29, 17, 6 |
| GFI1 | growth factor independent 1 transcriptional repressor | 162676 | 122484 | 067208 | 39, 7, 5 |
| GBP1 | guanylate binding protein 1 | 117228 | 117226 | 162645 | 36, 43, 44 |
| GBP2 | guanylate binding protein 2 | 162645 | 117228 | 213512 | 36, 2, 5 |
| GBP3 | guanylate binding protein 3 | 117226 | 213516 | 117228 | 45, 36, 13 |
| GBP4 | guanylate binding protein 4 | 162654 | 213512 | 154451 | 44, 1, 4 |
| GBP5 | guanylate binding protein 5 | 154451 | 162654 | 183347 | 5, 36, 13 |
| GBP7 | guanylate binding protein 7 | 213512 | 162645 | 162654 | 19, 37, 14 |
| GBP6 | guanylate binding protein family member 6 | 183347 | 154451 | 197147 | 24, 13, 42 |
| GUCA2A | guanylate cyclase activator 2A | 197273 | 044012 | 198815 | 16, 25, 10 |
| GUCA2B | guanylate cyclase activator 2B | 044012 | 127124 | 197273 | 16, 38, |
| GUK1 | guanylate kinase 1 | 143774 | 162910 | 198835 | 34, 3, 41 |
| HLX | H2.0 like homeobox | 136630 | 186205 | 143507 | 9, 13, 5 |
| H3F3A | H3 histone family member 3A | 163041 | 143751 | 182827 | |
| HAX1 | HCLS1 associated protein X-1 | 143575 | 143569 | 143595 | 34, 31, 21 |
| HEATR1 | HEAT repeat containing 1 | 119285 | 116977 | 077522 | 18, 3, 30 |
| HSPA6 | heat shock protein family A (Hsp70) member 6 | 173110 | 143226 | 203747 | 26, 42, 32 |
| HSPB11 | heat shock protein family B (small) member 11 | 081870 | 211452 | 116212 | |
| HSPB7 | heat shock protein family B (small) member 7 | 173641 | 183888 | 186510 | 15, 25, 1 |
| HECTD3 | HECT domain E3 ubiquitin protein ligase 3 | 126107 | 070785 | 126088 | 42, 23, 6 |
| HHAT | hedgehog acyltransferase | 054392 | 082497 | 143473 | 42, 11, 15 |
| HMCN1 | hemicentin 1 | 143341 | 116679 | 116690 | 18, 24, 11 |
| HFE2 | hemochromatosis type 2 (juvenile) | 168509 | 265972 | 271425 | 25, 19, 15 |
| HENMT1 | HEN1 methyltransferase homolog 1 | 162639 | 162636 | 134186 | 38, 9, 30 |
| HS2ST1 | heparan sulfate 2-O-sulfotransferase 1 | 153936 | 183291 | 267561 | 11, 22, 3 |
| HSPG2 | heparan sulfate proteoglycan 2 | 142798 | 187942 | 219073 | 26, 1, 12 |
| HDGF | hepatoma-derived growth factor | 143321 | 143314 | 143294 | 9, 34, 4 |
| HHLA3 | HERV-H LTR-associating 3 | 197568 | 118454 | 279230 | 34, 27, 7 |
| HES2 | hes family bHLH transcription factor 2 | 069812 | 097021 | 187017 | |
| HES3 | hes family bHLH transcription factor 3 | 173673 | 116237 | 158292 | 12, |
| HES4 | hes family bHLH transcription factor 4 | 188290 | 187642 | 187608 | 26, 37, 6 |
| HES5 | hes family bHLH transcription factor 5 | 197921 | 157881 | 157873 | 15, 14, 8 |
| HEYL | hes related family bHLH transcription factor with YRPW motif-like | 163909 | 090621 | 116981 | 25, 15, 32 |
| HP1BP3 | heterochromatin protein 1 binding protein 3 | 127483 | 189410 | 075151 | 39, 42, 11 |
| HNRNPCL1 | heterogeneous nuclear ribonucleoprotein C-like 1 | 179172 | 239810 | 120952 | 44, |
| HNRNPCL2 | heterogeneous nuclear ribonucleoprotein C-like 2 | 275774 | 277058 | 280267 | |
| HNRNPCL3 | heterogeneous nuclear ribonucleoprotein C-like 3 | 277058 | 229571 | 275774 | |
| HNRNPCL4 | heterogeneous nuclear ribonucleoprotein C-like 4 | 179412 | 280267 | 204505 | |
| HNRNPR | heterogeneous nuclear ribonucleoprotein R | 125944 | 179546 | 125945 | |
| HNRNPU | heterogeneous nuclear ribonucleoprotein U | 153187 | 203667 | 203666 | 29, 22, 40 |
| H6PD | hexose-6-phosphate dehydrogenase/glucose 1-dehydrogenase | 049239 | 180758 | 171621 | 22, 34, 24 |
| HFM1 | HFM1, ATP dependent DNA helicase homolog | 162669 | 122482 | 097046 | 38, 44, 25 |
| HHIPL2 | HHIP like2 | 143512 | 143507 | 143498 | 40, 38, 28 |
| HMGB4 | high mobility group box 4 | 176256 | 121904 | 142698 | |
| HMGN2 | high mobility group nudeosomal binding domain 2 | 198830 | 117682 | 117676 | 41, 21, 30 |
| HPCA | hippocalcin | 121905 | 160097 | 121900 | 14, 8, 28 |
| HPCAL4 | hippocalcin like 4 | 116983 | 116981 | 084072 | 8, 2, 14 |
| HIST2H2AA3 | histone cluster 2 H2 A family member a3 | 203812 | 203811 | 272196 | 33, 7, 18 |
| HIST2H2AA4 | histone cluster 2 H2 A family member a4 | 272196 | 203812 | 203852 | |
| HIST2H2AB | histone cluster 2 H2 A family member b | 184270 | 184260 | 178096 | 33, |
| HIST2H2AC | histone cluster 2 H2 A family member c | 184260 | 184678 | 184270 | 30, 7, 15 |
| HIST2H2BE | histone cluster 2 H2B family member e | 184678 | 270276 | 184260 | 39, 31, 13 |
| HIST2H2BF | histone cluster 2 H2B family member f | 203814 | 150337 | 183598 | 36, 13, 42 |
| HIST2H3A | histone cluster 2 H3 family member a | 203852 | 272196 | 270276 | |
| HIST2H3C | histone cluster 2 H3 family member c | 203811 | 270882 | 203812 | 28, 44, |
| HIST2H3D | histone cluster 2 H3 family member d | 183598 | 203814 | 270882 | 7, |
| HIST2H3PS2 | Histone cluster 2 H3 pseudogene 2 | 203818 | 171943 | 263513 | |
| HIST2H4A | histone cluster 2 H4 family member a | 270882 | 183598 | 203811 | 24, 37, 5 |
| HIST2H4B | histone cluster 2 H4 family member b | 270276 | 203852 | 184678 | |
| HIST3H2A | histone cluster 3 H2A | 181218 | 168148 | 196890 | 2, 3, 34 |
| HIST3H2BB | histone cluster 3 H2B family member b | 196890 | 181218 | 168159 | 3, 30, 24 |
| HIST3H3 | histone cluster 3 H3 | 168148 | 162931 | 181218 | 10, 38, |
| HDAC1 | histone deacetylase 1 | 116478 | 182866 | 175130 | 37, 24, 23 |
| HIPK1 | homeodomain interacting protein kinase 1 | 163349 | 118655 | 116774 | |
| HOOK1 | hook microtubule tethering protein 1 | 134709 | 172456 | 134716 | 29, 31, 38 |
| HORMAD1 | HORMA domain containing 1 | 143452 | 143457 | 163131 | 38, 23, 42 |
| HRNR | homerin | 197915 | 215853 | 143631 | 27, 38, |
| HIVEP3 | human immunodeficiency virus type I enhancer binding protein 3 | 127124 | 127129 | 044012 | 21, 40, 22 |
| HAPLN2 | hyaluronan and proteoglycan link protein 2 | 132702 | 280316 | 132692 | 26, 8, 17 |
| HAO2 | hydroxyacid oxidase 2 | 116882 | 116874 | 203859 | 18, 19, 17 |
| HSD3B1 | hydroxy-delta-5-steroid dehydrogenase, 3 beta- and steroid delta-isomerase 1 | 203857 | 203859 | 143067 | 32, 16, 35 |
| HSD3B2 | hydroxy-delta-5-steroid dehydrogenase, 3 beta- and steroid delta-isomerase 2 | 203859 | 116882 | 203857 | 2, 27, 16 |
| HYI | hydroxypyruvate isomerase (putative) | 178922 | 198198 | 142949 | 37, 34, 27 |
| HSD11B1 | hydroxysteroid 11-beta dehydrogenase 1 | 117594 | 123689 | 009790 | 27, 19, 44 |
| HSD17B7 | hydroxysteroid 17-beta dehydrogenase 7 | 132196 | 162733 | 185860 | 39, 1, 24 |
| HCN3 | hyperpolarization activated cyclic nucleotide gated potassium channel 3 | 143630 | 176444 | 143627 | 1, 31, 17 |
| HCRTR1 | hypocretin receptor 1 | 121764 | 142910 | 162517 | 28, 8, |
| IBA57 | IBA57 homolog, iron-sulfur cluster assembly | 181873 | 198835 | 162913 | 40, 26, 31 |
| IER5 | immediate early response 5 | 162783 | 153029 | 198216 | 32, 37, 7 |
| IGSF21 | immunoglobin superfamily member 21 | 117154 | 117148 | 179023 | 45, 8, 14 |
| ILDR2 | immunoglobulin like domain containing receptor 2 | 143195 | 152382 | 143194 | |
| IGSF3 | immunoglobulin superfamily member 3 | 143061 | 116815 | 116824 | 24, 30, 35 |
| IGSF8 | immunoglobulin superfamily member 8 | 162729 | 162728 | 018625 | 35, 26, 8 |
| IGSF9 | immunoglobulin superfamily member 9 | 085552 | 158710 | 162723 | 18, 4, 27 |
| IGFN1 | immunoglobulin-like and fibronectin type III domain containing 1 | 163395 | 116857 | 081277 | 40, 18, 4 |
| IPO13 | importin 13 | 117408 | 117407 | 132768 | 38, 8, 25 |
| IPO9 | importin 9 | 198700 | 134369 | 198892 | 18, 9, 26 |
| IVNS1ABP | influenza virus NS1A binding protein | 116679 | 116668 | 143341 | 24, 42, 1 |
| ID3 | inhibitor of DNA binding 3, HLH protein | 117318 | 007968 | 197880 | 11, 35, 26 |
| IKBKE | inhibitor of kappa light polypeptide gene enhancer in B-cells, kinase epsilon | 263528 | 266028 | 266094 | 43, 39, 36 |
| INPP5B | inositol polyphosphate-5-phosphatase B | 204084 | 188786 | 183431 | 22, 21, 42 |
| ITPKB | inositol-trisphosphate 3-kinase B | 143772 | 203685 | 143801 | 22, 26, 41 |
| INSL5 | insulin like 5 | 172410 | 152760 | 152763 | |
| INSRR | insulin receptor related receptor | 027644 | 198400 | 187800 | 38, 17, |
| INTS3 | integrator complex subunit 3 | 143624 | 169418 | 279767 | 18, 43, 21 |
| INTS7 | integrator complex subunit 7 | 143493 | 123684 | 143476 | 24, 38, 39 |
| ITGA10 | integrin subunit alpha 10 | 143127 | 198483 | 131779 | 42, 11, 25 |
| ITGB3BP | integrin subunit beta 3 binding protein | 142856 | 088035 | 203965 | 4, 34, 10 |
| ITLN1 | intelectin 1 | 179914 | 122223 | 158764 | 1, 15, 16 |
| ITLN2 | intelectin 2 | 158764 | 179914 | 158769 | 16, 10, 25 |
| IFI6 | interferon alpha inducible protein 6 | 126709 | 000938 | 009780 | |
| IFI16 | interferon gamma inducible protein 16 | 163565 | 163564 | 163568 | 39, 22, 18 |
| IFI44 | interferon induced protein 44 | 137965 | 137959 | 162618 | 13, 31, 6 |
| IFI44L | interferon induced protein 44 like | 137959 | 122420 | 137965 | 4, 36, 44 |
| IFNLR1 | interferon lambda receptor 1 | 185436 | 142677 | 158055 | 21, 22, 33 |
| IRF2BP2 | interferon regulatory factor 2 binding protein 2 | 168264 | 059588 | 279261 | 1, 11, 45 |
| IRF6 | interferon regulatory factor 6 | 117595 | 162757 | 117597 | 42, 13, 30 |
| ISG20L2 | interferon stimulated exonuclease gene 20 like 2 | 143319 | 143320 | 143303 | 9, 38, 1 |
| IL10 | interleukin 10 | 136634 | 162889 | 142224 | 36, 5, 10 |
| IL12RB2 | interleukin 12 receptor subunit beta 2 | 081985 | 162594 | 142864 | 42, 39, 35 |
| IL19 | interleukin 19 | 142224 | 136634 | 162891 | 44, 20, |
| IL20 | interleukin 20 | 162891 | 142224 | 162892 | 30, |
| IL22RA1 | interleukin 22 receptor subunit alpha 1 | 142677 | 142661 | 185436 | 4, 2, 13 |
| IL23R | interleukin 23 receptor | 162594 | 203963 | 081985 | 7, 30, 38 |
| IL24 | interleukin 24 | 162892 | 162891 | 162894 | 22, 45, 20 |
| IL6R | interleukin 6 receptor | 160712 | 143515 | 169291 | 18, 5, 36 |
| ILF2 | interleukin enhancer binding factor 2 | 143621 | 143553 | 169418 | 30, 11, 12 |
| IFFO2 | intermediate filament family orphan 2 | 169991 | 159423 | 127481 | 18, 35, 13 |
| IPP | intracistemal A particle-promoted polypeptide | 197429 | 159596 | 086015 | 40, 34, 6 |
| IVL | involucrin | 163207 | 163206 | 283227 | 18, 24, 4 |
| DIO1 | iodothyronine deiodinase 1 | 211452 | 058799 | 081870 | 17, 19, 40 |
| IQCC | IQ motif containing C | 160051 | 160050 | 222046 | 2, 13, 9 |
| IQGAP3 | IQ motif containing GTPase activating protein 3 | 183856 | 116604 | 187862 | 7, 16, 22 |
| ISG15 | ISG15 ubiquitin-like modifier | 187608 | 188290 | 188157 | 44, 23, 33 |
| IARS2 | isoleucyl-tRNA synthetase 2, mitochondrial | 067704 | 162813 | 118873 | 7, 22, 23 |
| ICMT | isoprenylcysteine carboxyl methyltransferase | 116237 | 158286 | 173673 | 6, 11, 35 |
| JAK1 | Janus kinase 1 | 162434 | 162437 | 162433 | 18, 22, 40 |
| JMJD4 | jumonji domain containing 4 | 081692 | 143740 | 185888 | |
| JTB | jumping translocation breakpoint | 143543 | 143578 | 143545 | 21, 7, 27 |
| JUN | Jun proto-oncogene, AP-1 transcription factor subunit | 177606 | 162601 | 172456 | 3, 1, 29 |
| KPNA6 | karyopherin subunit alpha 6 | 025800 | 121775 | 084652 | 18, 43, 42 |
| KAZN | kazrin, periplakin interacting protein | 189337 | 116731 | 171729 | 29, 14, 32 |
| KLHDC7A | kelch domain containing 7A | 179023 | 117154 | 009709 | 17, 42, 24 |
| KLHDC8A | kelch domain containing 8A | 162873 | 163545 | 186007 | 2, 27, 40 |
| KLHDC9 | kelch domain containing 9 | 162755 | 143217 | 143256 | 29, 38, 26 |
| KLHL12 | kelch like family member 12 | 117153 | 183155 | 159346 | 38, 1, 42 |
| KLHL17 | kelch like family member 17 | 187961 | 188976 | 187583 | 9, 3, 14 |
| KLHL20 | kelch like family member 20 | 076321 | 232113 | 120334 | 11, 13, 29 |
| KLHL21 | kelch like family member 21 | 162413 | 204859 | 116273 | 42, 35, 8 |
| KRTCAP2 | keratinocyte associated protein 2 | 163463 | 179085 | 273088 | 31, 19, 40 |
| KDF1 | keratinocyte differentiation factor 1 | 175707 | 131910 | 253368 | 3, 40, 37 |
| KPRP | keratinocyte proline rich protein | 203786 | 198854 | 240386 | 35, 10, |
| KHDRBS1 | KH RNA binding domain containing, signal transduction associated 1 | 121774 | 184007 | 121775 | 6, 34, 15 |
| KIAA0040 | KIAA0040 | 235750 | 120332 | 116147 | 42, 32, 39 |
| KIAA0319L | KIAA0319 like | 142687 | 146463 | 020129 | 42, 40, 9 |
| KIAA0907 | KIAA0907 | 132680 | 143622 | 173080 | 19, 31, 2 |
| KIAA1107 | KIAA1107 | 069712 | 189195 | 203910 | 4, 18, 8 |
| KIAA1324 | KIAA1324 | 116299 | 179902 | 031698 | 42, 31, 23 |
| KIAA1522 | KIAA1522 | 162522 | 162520 | 134684 | 26, 4, 9 |
| KIAA1614 | KIAA1614 | 135835 | 143324 | 135823 | 1, 14, 8 |
| KIAA2013 | KIAA2013 | 116685 | 120937 | 083444 | |
| KIRREL | kin of IRRE like (Drosophila) | 183853 | 073754 | 158473 | |
| KIFAP3 | kinesin associated protein 3 | 075945 | 000457 | 203740 | 8, 38, 10 |
| KIF14 | kinesin family member 14 | 118193 | 162702 | 118197 | 18, 23, 22 |
| KIF17 | kinesin family member 17 | 117245 | 244038 | 189410 | 38, 36, 32 |
| KIF1B | kinesin family member 1B | 054523 | 130939 | 142657 | 25, |
| KIF21B | kinesin family member 21B | 116852 | 163362 | 081248 | 14, 5, 22 |
| KIF26B | kinesin family member 26B | 162849 | 203666 | 185420 | 39, 27, 12 |
| KIF2C | kinesin family member 2C | 142945 | 198520 | 142937 | 38, 39, 21 |
| KNCN | kinocilin | 162456 | 282881 | 079277 | 38, 8, |
| KISS1 | KiSS-1 metastasis-suppressor | 170498 | 143839 | 174567 | 32, 35, 15 |
| KANK4 | KN motif and ankyrin repeat domains 4 | 132854 | 240563 | 162607 | 11, 25, 32 |
| KLF17 | Kruppel like factor 17 | 171872 | 196517 | 283039 | 38, 6, 8 |
| KLF18 | Kruppel like factor 18 | 283039 | 171872 | 178028 | |
| KTI12 | KTI12 chromatin associated homolog | 198841 | 117862 | 134717 | |
| KMO | kynurenine 3-monooxygenase | 117009 | 091483 | 054277 | 32, 19, 41 |
| KYAT3 | kynurenine aminotransferase 3 | 137944 | 137947 | 213516 | |
| LACTBL1 | lactamase beta like 1 | 215906 | 133216 | 227868 | |
| LAD1 | ladinin 1 | 159166 | 118194 | 159173 | 4, 18, 37 |
| LMNA | lamin A/C | 160789 | 254726 | 196189 | 24, 10, 45 |
| LBR | lamin B receptor | 143815 | 185842 | 154380 | |
| LAMB3 | laminin subunit beta 3 | 196878 | 008118 | 123689 | 13, 24, 35 |
| LAMC1 | laminin subunit gamma 1 | 135862 | 157060 | 058085 | 1, 26, 11 |
| LAMC2 | laminin subunit gamma 2 | 058085 | 135862 | 157064 | |
| LCE1A | late cornified envelope 1A | 186844 | 196734 | 235942 | 30, 35, |
| LCE1B | late cornified envelope 1B | 196734 | 197084 | 186844 | 35, |
| LCE1C | late cornified envelope 1C | 197084 | 172155 | 196734 | 35, 15, |
| LCE1D | late cornified envelope 1D | 172155 | 186226 | 197084 | 35, |
| LCE1E | late cornified envelope 1E | 186226 | 240386 | 172155 | |
| LCE1F | late cornified envelope 1F | 240386 | 203786 | 186226 | 35, |
| LCE2A | late cornified envelope 2A | 187173 | 159455 | 187170 | 10, 35, |
| LCE2B | late cornified envelope 2B | 159455 | 187180 | 187173 | 35, 15, 10 |
| LCE2C | late cornified envelope 2C | 187180 | 187223 | 159455 | 35, |
| LCE2D | late cornified envelope 2D | 187223 | 185962 | 187180 | 35, 17, |
| LCE3A | late cornified envelope 3A | 185962 | 187238 | 187223 | |
| LCE3B | late cornified envelope 3B | 187238 | 244057 | 185962 | |
| LCE3C | late cornified envelope 3C | 244057 | 163202 | 187238 | |
| LCE3D | late cornified envelope 3D | 163202 | 185966 | 244057 | |
| LCE3E | late cornified envelope 3E | 185966 | 169509 | 163202 | 4, 30, |
| LCE4A | late cornified envelope 4A | 187170 | 187173 | 198854 | 10, |
| LCE5A | late cornified envelope 5A | 186207 | 143536 | 279850 | 35, |
| LCE6A | late cornified envelope 6A | 235942 | 186844 | 163206 | 15, 10, 35 |
| LELP1 | late cornified envelope like proline rich 1 | 203784 | 159516 | 203783 | 38, 32, |
| LAMTOR2 | late endosomal/lysosomal adaptor, MAPK and MTOR activator 2 | 116586 | 160803 | 132698 | 43, 7, 1 |
| LAMTOR5 | late endosomal/lysosomal adaptor, MAPK and MTOR activator 5 | 134248 | 168679 | 143125 | 29, 15, 3 |
| LCK | LCK proto-oncogene, Src family tyrosine kinase | 182866 | 183615 | 116478 | 39, 41, 36 |
| LRP8 | LDL receptor related protein 8 | 157193 | 162385 | 143006 | 40, 3, 6 |
| LEFTY1 | left-right determination factor 1 | 243709 | 196187 | 255835 | 16, 9, 28 |
| LEFTY2 | left-right determination factor 2 | 143768 | 143811 | 143751 | 31, 38, 44 |
| LMOD1 | leiomodin 1 | 163431 | 198892 | 134375 | 42, 44, 26 |
| LEMD1 | LEM domain containing 1 | 186007 | 162873 | 117266 | |
| LENEP | lens epithelial protein | 163352 | 160688 | 160685 | 14, |
| LEPR | leptin receptor | 116678 | 213625 | 184588 | 42, 1, 7 |
| LEPROT | leptin receptor overlapping transcript | 213625 | 116675 | 116678 | 1, 29, 43 |
| LURAP1 | leucine rich adaptor protein 1 | 171357 | 085998 | 085999 | 29, 40, 8 |
| LINGO4 | leucine rich repeat and Ig domain containing 4 | 213171 | 182134 | 143365 | 14, 10, 17 |
| LRRC38 | leucine rich repeat containing 38 | 162494 | 204478 | 162493 | 14, 25, 32 |
| LRRC39 | leucine rich repeat containing 39 | 122477 | 122435 | 137992 | 25, 35, 15 |
| LRRC40 | leucine rich repeat containing 40 | 066557 | 033122 | 116754 | 43, 10, 5 |
| LRRC41 | leucine rich repeat containing 41 | 132128 | 085999 | 173660 | 39, 38, 45 |
| LRRC42 | leucine rich repeat containing 42 | 116212 | 081870 | 203985 | 29, 6, 9 |
| LRRC47 | leucine rich repeat containing 47 | 130764 | 235169 | 116198 | 27, 28, 3 |
| LRRC52 | leucine rich repeat containing 52 | 162763 | 143171 | 143198 | 38, 32, |
| LRRC53 | leucine rich repeat containing 53 | 162621 | 116783 | 178965 | |
| LRRC7 | leucine rich repeat containing 7 | 033122 | 024526 | 066557 | 18, 2, 15 |
| LRRC71 | leucine rich repeat containing 71 | 160838 | 187800 | 132694 | 38, 10, 20 |
| LRRC8B | leucine rich repeat containing 8 family member B | 197147 | 183347 | 171488 | 11, 38, 26 |
| LRRC8C | leucine rich repeat containing 8 family member C | 171488 | 197147 | 271949 | |
| LRRC8D | leucine rich repeat containing 8 family member D | 171492 | 271949 | 162664 | 26, 39, 44 |
| LGR6 | leucine rich repeat containing G protein-coupled receptor 6 | 133067 | 143851 | 077152 | 15, 27, 24 |
| LRRN2 | leucine rich repeat neuronal 2 | 170382 | 198625 | 163531 | 31, 27, 14 |
| LRIG2 | leucine rich repeats and immunoglobulin like domains 2 | 198799 | 155380 | 081026 | |
| LRRIQ3 | leucine rich repeats and IQ motif containing 3 | 162620 | 172260 | 254685 | 10, 38, 4 |
| LZIC | leucine zipper and CTNNBIP1 domain containing | 162441 | 178585 | 173614 | 42, 30, 43 |
| LUZP1 | leucine zipper protein 1 | 169641 | 004487 | 179546 | 16, 40, 24 |
| LRIF1 | ligand dependent nuclear receptor interacting factor 1 | 121931 | 143119 | 156171 | 22, 30, 24 |
| LMO4 | LIM domain only 4 | 143013 | 267561 | 065243 | 11, 18, 1 |
| LHX4 | LIM homeobox 4 | 121454 | 116260 | 230124 | 25, 44, |
| LHX8 | LIM homeobox 8 | 162624 | 162623 | 137968 | 35, 12, 10 |
| LHX9 | LIM homeobox 9 | 143355 | 203724 | 151414 | |
| LMX1A | LIM homeobox transcription factor 1 alpha | 162761 | 185630 | 143171 | 38, 17, 14 |
| LIX1L | limb and CNS expressed 1 like | 271601 | 280778 | 272031 | 29, 41, 26 |
| LIN28A | lin-28 homolog A | 131914 | 176083 | 117682 | 12, 38, 32 |
| LIN9 | lin-9 DREAM MuvB core complex component | 183814 | 185155 | 143799 | 39, 13, 22 |
| L1TD1 | LINE1 type transposase domain containing 1 | 240563 | 132849 | 132854 | 12, 32, 38 |
| LINC00083 | Long intergenic non-protein coding RNA 83 | 188585 | 075391 | 240021 | |
| LOR | loricrin | 203782 | 203783 | 159527 | 35, 10, |
| LDLRAP1 | low density lipoprotein receptor adaptor protein 1 | 157978 | 204178 | 117643 | 34, 35, 24 |
| LDLRAD1 | low density lipoprotein receptor class A domain containing 1 | 203985 | 116212 | 116209 | 20, 30, 15 |
| LDLRAD2 | low density lipoprotein receptor class A domain containing 2 | 187942 | 090686 | 142798 | 18, 4, 6 |
| LSM10 | LSM10, U7 small nuclear RNA associated | 181817 | 196182 | 116885 | 34, 29, 22 |
| LYPD8 | LY6/PLAUR domain containing 8 | 259823 | 189181 | 175137 | |
| LY9 | lymphocyte antigen 9 | 122224 | 026751 | 122223 | 36, 5, 39 |
| LEXM | lymphocyte expansion molecule | 162398 | 006555 | 116133 | 38, 6, 16 |
| LAX1 | lymphocyte transmembrane adaptor 1 | 122188 | 058668 | 058673 | 36, 30, 22 |
| KDM1A | lysine demethylase 1A | 004487 | 227868 | 169641 | 12, 23, 38 |
| KDM4A | lysine demethylase 4A | 066135 | 142949 | 126091 | 34, 44, 1 |
| KDM5B | lysine demethylase 5B | 117139 | 143858 | 183155 | 24, 38, 42 |
| LYSMD1 | LysM domain containing 1 | 163155 | 163156 | 163157 | 2, 39, 5 |
| LPAR3 | lysophosphatidic acid receptor 3 | 171517 | 117155 | 153898 | |
| LPGAT1 | lysophosphatidylglycerol acyltransferase 1 | 123684 | 117650 | 143493 | 1, 43, 22 |
| LYPLA2 | lysophospholipase II | 011009 | 057757 | 117308 | 41, 21, 2 |
| LYPLAL1 | lysophospholipase like 1 | 143353 | 092969 | 215817 | 1, 22, 15 |
| LAPTM5 | lysosomal protein transmembrane 5 | 162511 | 162510 | 162512 | 41, 22, 5 |
| LYST | lysosomal trafficking regulator | 143669 | 168243 | 116962 | 5, 40, 39 |
| MAB21L3 | mab-21 like 3 | 173212 | 163393 | 163399 | 17, 44, |
| MAD2L2 | MAD2 mitotic arrest deficient-like 2 (yeast) | 116670 | 116663 | 162490 | 21, 34, 1 |
| MAEL | maelstrom spermatogenic transposon silencer | 143194 | 143195 | 143167 | 38, 32, 8 |
| MROH7 | maestro heat like repeat family member 7 | 184313 | 162391 | 271723 | 38, 40, 41 |
| MROH9 | maestro heat like repeat family member 9 | 117501 | 116132 | 007933 | 42, 38, 20 |
| MAGOH | mago homolog, exon junction complex core component | 162385 | 162384 | 157193 | 11, 3, 30 |
| MFSD14A | major facilitator superfamily domain containing 14A | 156875 | 117620 | 156876 | 11, 9, 29 |
| MFSD2A | major facilitator superfamily domain containing 2A | 168389 | 116990 | 131236 | 32, 38, 33 |
| MFSD4A | major facilitator superfamily domain containing 4A | 174514 | 117266 | 158711 | 42, 8, 18 |
| MR1 | major histocompatibility complex, class I-related | 153029 | 135823 | 162783 | 31, 24, 42 |
| MASP2 | mannan binding lectin serine peptidase 2 | 009724 | 277726 | 116649 | 19, 40, 18 |
| MAN1A2 | mannosidase alpha class 1A member 2 | 198162 | 134258 | 183508 | 30, 32, 11 |
| MAN1C1 | mannosidase alpha class 1C member 1 | 117643 | 157978 | 162430 | 32, 1, 29 |
| MANEAL | mannosidase endo-alpha like | 185090 | 183317 | 196449 | |
| MKNK1 | MAP kinase interacting serine/threonine kinase 1 | 079277 | 162456 | 142961 | 18, 39, 36 |
| MAP7D1 | MAP7 domain containing 1 | 116871 | 054116 | 054118 | 26, 34, 12 |
| MARCKSL1 | MARCKS like 1 | 175130 | 116478 | 162526 | 41, 43, 21 |
| MATN1 | matrilin 1, cartilage matrix protein | 162510 | 060656 | 162511 | 42, 12, 32 |
| MMP23B | matrix metallopeptidase 23B | 189409 | 197530 | 248333 | 28, |
| MXRA8 | matrix remodeling associated 8 | 162576 | 107404 | 175756 | 10, 1, 45 |
| MDM4 | MDM4, p53 regulator | 198625 | 133056 | 170382 | 39, 18, 40 |
| MTOR | mechanistic target of rapamycin | 198793 | 171824 | 171819 | 22, 1, 35 |
| MED18 | mediator complex subunit 18 | 130772 | 130766 | 204138 | 21, 30, 41 |
| MED8 | mediator complex subunit 8 | 159479 | 066322 | 198198 | 37, 27, 5 |
| MAGI3 | membrane associated guanylate kinase, WW and PDZ domain containing 3 | 081026 | 198799 | 116793 | 14, 11, 31 |
| MMEL1 | membrane metalloendopeptidase like 1 | 142606 | 157870 | 215912 | 1, 38, 3 |
| MTF1 | metal regulatory transcription factor 1 | 188786 | 197982 | 204084 | 20, 9, 1 |
| MTF2 | metal response element binding transcription factor 2 | 143033 | 154511 | 117500 | 40, 22, 34 |
| MT1HL1 | metallothionein 1H-like 1 | 244020 | 116984 | 198626 | |
| MTX1 | metaxin 1 | 173171 | 169231 | 177628 | 34, 13, 20 |
| MTHFR | methylenetetrahydrofolate reductase | 177000 | 215910 | 011021 | |
| MMACHC | methylmalonic aciduria (cobalamin deficiency) cblC type, with homocystinuria | 132763 | 280670 | 117450 | 21, 6, 19 |
| METTL11B | methyltransferase like 11B | 203740 | 075945 | 120370 | |
| METTL13 | methyltransferase like 13 | 010165 | 117533 | 197959 | 3, 42, 24 |
| METTL18 | methyltransferase like 18 | 171806 | 007908 | 000457 | 29, 31, 3 |
| MEX3A | mex-3 RN A binding family member A | 254726 | 132698 | 160789 | 14, 12, 27 |
| MIA3 | MIA family member 3, ER export factor | 154305 | 143498 | 186063 | 11, 39, 30 |
| MFAP2 | microfibrillar associated protein 2 | 117122 | 058453 | 159363 | 15, 6, 12 |
| MGST3 | microsomal glutathione S-transferase 3 | 143198 | 162763 | 143149 | |
| MARK1 | microtubule affinity regulating kinase 1 | 116141 | 118873 | 162817 | 4, 26, 24 |
| MAP1LC3C | microtubule associated protein 1 light chain 3 gamma | 197769 | 196289 | 180287 | 12, |
| MAP10 | microtubule associated protein 10 | 212916 | 116991 | 135778 | 31, 39, 38 |
| MAST2 | microtubule associated serine/threonine kinase 2 | 086015 | 197429 | 117461 | 22, 26, 16 |
| MACF1 | microtubule-actin crosslinking factor 1 | 127603 | 168653 | 183682 | |
| MIER1 | MIER1 transcriptional regulator | 198160 | 152763 | 116704 | 26, 22, 7 |
| MIIP | migration and invasion inhibitory protein | 116691 | 116688 | 120949 | 1, 9, 36 |
| MIB2 | mindbomb E3 ubiquitin protein ligase 2 | 197530 | 228594 | 189409 | 28, 9, 39 |
| MINOS1-NBL1 | MINOS1-NBL1 readthrough | 270136 | 173436 | 158747 | |
| MSTO1 | misato 1, mitochondrial distribution and morphology regulator | 125459 | 116539 | 163374 | 1, 13, 35 |
| MARC1 | mitochondrial amidoxime reducing component 1 | 186205 | 117791 | 136630 | |
| MARC2 | mitochondrial amidoxime reducing component 2 | 117791 | 162817 | 186205 | 29, 30, 17 |
| MUL1 | mitochondrial E3 ubiquitin protein ligase 1 | 090432 | 162545 | 183114 | 36, 38, 41 |
| MTFR1L | mitochondrial fission regulator 1 like | 117640 | 255054 | 127423 | 15, 2, 38 |
| MINOS1 | mitochondrial inner membrane organizing system 1 | 173436 | 077549 | 270136 | 15, 3, 25 |
| MPC2 | mitochondrial pyruvate carrier 2 | 143158 | 143199 | 143164 | 43, 33, 41 |
| MRPL20 | mitochondrial ribosomal protein L20 | 242485 | 221978 | 235098 | 3, 31, 13 |
| MRPL24 | mitochondrial ribosomal protein L24 | 143314 | 143303 | 143321 | 29, 3, 35 |
| MRPL37 | mitochondrial ribosomal protein L37 | 116221 | 215883 | 157216 | 9, 41, 1 |
| MRPL55 | mitochondrial ribosomal protein L55 | 162910 | 143793 | 143774 | 29, 3, 15 |
| MRPL9 | mitochondrial ribosomal protein L9 | 143436 | 178796 | 143450 | 29, 14, 41 |
| MRPS14 | mitochondrial ribosomal protein S14 | 120333 | 116161 | 120332 | |
| MRPS15 | mitochondrial ribosomal protein S15 | 116898 | 116885 | 119535 | 43, 7, 27 |
| MRPS21 | mitochondrial ribosomal protein S21 | 266472 | 159208 | 278939 | 29, 7, 10 |
| MECR | mitochondrial trans-2-enoyl-CoA reductase | 116353 | 116350 | 060656 | 41, 35, 27 |
| MFN2 | mitofusin 2 | 116688 | 083444 | 116691 | 42, 40, 8 |
| MAP3K6 | mitogen-activated protein kinase kinase kinase 6 | 142733 | 142765 | 142748 | 34, 37, 26 |
| MAPKAPK2 | mitogen-activated protein kinase-activated protein kinase 2 | 162889 | 143479 | 136634 | 34, 18, 6 |
| MIGA1 | mitoguardin 1 | 180488 | 077254 | 162614 | 18, 45, 26 |
| MIXL1 | Mix paired-like homeobox | 185155 | 182827 | 183814 | 10, |
| MOB3C | MOB kinase activator 3C | 142961 | 079277 | 123472 | 1, 29, 14 |
| MORN1 | MORN repeat containing 1 | 116151 | 157933 | 157916 | 20, 34, 29 |
| MOV10 | Mov10 RISC complex RNA helicase | 155363 | 116489 | 155366 | 39, 43, 20 |
| MPL | MPL proto-oncogene, thrombopoietin receptor | 117400 | 066056 | 117399 | 38, 20, |
| MROH7-TTC4 | MROH7-TTC4 readthrough (NMD candidate) | 271723 | 184313 | 243725 | 38, 40, 41 |
| MRTO4 | MRT4 homolog, ribosome maturation factor | 053372 | 127463 | 211454 | 21, 35, 3 |
| MTRNR2L11 | MT-RNR2-like 11 | 270188 | 116996 | 133019 | |
| MUC1 | mucin 1, cell surface associated | 185499 | 163462 | 279986 | 37, 3, 23 |
| MCOLN2 | mucolipin 2 | 153898 | 171517 | 162643 | 13, 22, 36 |
| MCOLN3 | mucolipin 3 | 055732 | 162643 | 097096 | 29, 31, 2 |
| MEGF6 | multiple EGF like domains 6 | 162591 | 130762 | 158109 | 18, 15, 1 |
| MSH4 | mutS homolog 4 | 057468 | 137955 | 154007 | 10, 38, 24 |
| MUTYH | mutY DNA glycosylase | 132781 | 186603 | 132773 | 37, 21, 26 |
| MYSM1 | Myb like, SWIRM and MPN domains 1 | 162601 | 184292 | 177606 | 33, 30, 7 |
| MYCBP | MYC binding protein | 214114 | 116954 | 274944 | 3, 38, 32 |
| MPZ | myelin protein zero | 158887 | 248485 | 143252 | 26, 11, 31 |
| MPZL1 | myelin protein zero like 1 | 197965 | 198771 | 143199 | 24, 3, 11 |
| MDS2 | myelodysplastic syndrome 2 translocation associated | 197880 | 117318 | 142676 | 16, 20, 38 |
| MNDA | myeloid cell nuclear differentiation antigen | 163563 | 188340 | 163564 | 5, 40, 32 |
| MLLT11 | myeloid/lymphoid or mixed-lineage leukemia; translocated to, 11 | 213190 | 197622 | 143458 | 7, 45, 26 |
| MYOC | myocilin | 034971 | 283683 | 117533 | 42, 13, 14 |
| MEF2D | myocyte enhancer factor 2D | 116604 | 125462 | 183856 | 22, 14, 11 |
| MYOG | myogenin | 122180 | 143847 | 163485 | 26, 25, 14 |
| MYOM3 | myomesin 3 | 142661 | 188529 | 142677 | 15, 25, 18 |
| MYBPH | myosin binding protein H | 133055 | 163485 | 133048 | 29, 15, 24 |
| MYBPHL | myosin binding protein H like | 221986 | 134222 | 134243 | 27, 14, 37 |
| MTMR11 | myotubularin related protein 11 | 014914 | 143368 | 264522 | 18, 2, 16 |
| MEAF6 | MYST/Esa1 associated factor 6 | 163875 | 163874 | 163877 | 45, 34, 9 |
| NPL | N-acetylneuraminate pyruvate lyase | 135838 | 135824 | 135829 | 24, 17, 29 |
| NADK | NAD kinase | 008130 | 215790 | 078369 | 1, 22, 29 |
| NAXE | NAD(P)HX epimerase | 163382 | 187862 | 160818 | |
| NDUFS2 | NADH: ubiquinone oxidoreductase core subunit S2 | 158864 | 158859 | 158869 | 26, 35, 30 |
| NDUFS5 | NADH: ubiquinone oxidoreductase subunit S5 | 168653 | 174574 | 127603 | 41, 29, 25 |
| NRDC | nardilysin convertase | 078618 | 117859 | 169213 | 42, 38, 29 |
| NPPA | natriuretic peptide A | 175206 | 011021 | 120937 | 15, 20, 10 |
| NPPB | natriuretic peptide B | 120937 | 175206 | 116685 | 15, 12, 28 |
| NPR1 | natriuretic peptide receptor 1 | 169418 | 143621 | 143624 | 23, 1, 26 |
| NDC1 | NDC1 transmembrane nudeoporin | 058804 | 174332 | 058799 | 22, 38, 42 |
| NECAP2 | NECAP endocytosis associated 2 | 157191 | 187144 | 268991 | 34, 43, 41 |
| NECTIN4 | nectin cell adhesion molecule 4 | 143217 | 278883 | 162755 | 24, 42, 18 |
| NPHP4 | nephrocystin 4 | 131697 | 196581 | 069424 | 3, 25, 26 |
| NGF | nerve growth factor | 134259 | 134198 | 173218 | 36, 20, 35 |
| NHLH1 | nescient helix-loop-helix 1 | 171786 | 162736 | 162738 | 31, 20, 14 |
| NHLH2 | nescient helix-loop-helix 2 | 177551 | 118729 | 163393 | 38, 8, 24 |
| NES | nestin | 132688 | 132692 | 143320 | 12, 15, 27 |
| NTNG1 | netrin G1 | 162631 | 198890 | 134215 | 26, 8, 17 |
| NENF | neudesin neurotrophic factor | 117691 | 065600 | 162772 | 24, 15, 20 |
| NBL1 | neuroblastoma 1, DAN family BMP antagonist | 158747 | 270136 | 158748 | 34, 13, 3 |
| NBPF1 | neuroblastoma breakpoint family member 1 | 219481 | 268991 | 237847 | |
| NBPF10 | neuroblastoma breakpoint family member 10 | 271425 | 168509 | 213240 | |
| NBPF11 | neuroblastoma breakpoint family member 11 | 263956 | 188092 | 280649 | 18, 11, 45 |
| NBPF12 | neuroblastoma breakpoint family member 12 | 268043 | 270339 | 131791 | |
| NBPF14 | neuroblastoma breakpoint family member 14 | 270629 | 236334 | 178104 | 23, 33, |
| NBPF15 | neuroblastoma breakpoint family member 15 | 266338 | 271567 | 279782 | 40, 18, 26 |
| NBPF19 | neuroblastoma breakpoint family member 19 | 271383 | 269713 | 263464 | 34, 23, 9 |
| NBPF20 | neuroblastoma breakpoint family member 20 | 162825 | 256374 | 117262 | |
| NBPF26 | neuroblastoma breakpoint family member 26 | 273136 | 265808 | 263353 | |
| NBPF3 | neuroblastoma breakpoint family member 3 | 142794 | 117298 | 162551 | 38, 42, 13 |
| NBPF4 | neuroblastoma breakpoint family member 4 | 196427 | 085491 | 186086 | 38, |
| NBPF6 | neuroblastoma breakpoint family member 6 | 186086 | 196427 | 162636 | 38, |
| NBPF9 | neuroblastoma breakpoint family member 9 | 269713 | 178104 | 271383 | |
| NRAS | neuroblastoma RAS viral oncogene homolog | 213281 | 116748 | 009307 | 26, 22, 7 |
| NCDN | neurochondrin | 020129 | 142687 | 116819 | 34, 35, 40 |
| NFASC | neurofascin | 163531 | 170382 | 184144 | 26, 8, 11 |
| NAV1 | neuron navigator 1 | 134369 | 159176 | 198700 | 24, 43, 1 |
| NEGR1 | neuronal growth regulator 1 | 172260 | 132485 | 162620 | 1, 42, 10 |
| NTRK1 | neurotrophic receptor tyrosine kinase 1 | 198400 | 027869 | 027644 | 26, 7, 2 |
| NCF2 | neutrophil cytosolic factor 2 | 116701 | 116698 | 162704 | 5, 36, 10 |
| NEXN | nexilin F-actin binding protein | 162614 | 180488 | 162613 | 25, 15, 24 |
| NCSTN | nicastrin | 162736 | 122218 | 171786 | 40, 24, 38 |
| NMNAT1 | nicotinamide nucleotide adenylyltransferase 1 | 173614 | 162441 | 162444 | 43, 34, 15 |
| NMNAT2 | nicotinamide nucleotide adenylyltransferase 2 | 157064 | 058085 | 116698 | 11, 8, 31 |
| NID1 | nidogen 1 | 116962 | 143669 | 077585 | 11, 28, 15 |
| NEK2 | NIMA related kinase 2 | 117650 | 170385 | 123684 | 4, 3, 6 |
| NEK7 | NIMA related kinase 7 | 151414 | 143355 | 151418 | 40, 32, 43 |
| NIPAL3 | NIPAIike domain containing 3 | 001461 | 001460 | 117602 | 29, 8, 24 |
| NOS1AP | nitric oxide synthase 1 adaptor protein | 198929 | 162745 | 254706 | 23, 38, 17 |
| NIT1 | nitrilase 1 | 158793 | 143256 | 158796 | 2, 34, 22 |
| NLRP3 | NLR family pyrin domain containing 3 | 162711 | 162714 | 177535 | 39, 7, 10 |
| NME7 | NME/NM23 family member 7 | 143156 | 143153 | 117475 | 10, 43, 31 |
| NOC2L | NOC2 like nucleolar associated transcriptional repressor | 188976 | 187634 | 187961 | 18, 3, 9 |
| NCMAP | non-compact myelin associated protein | 184454 | 117602 | 133226 | 40, 26, 32 |
| NSUN4 | NOP2/Sun RNA methyltransferase family member 4 | 117481 | 173660 | 117480 | 18, 43, 38 |
| NOTCH2 | notch 2 | 134250 | 134249 | 265808 | 23, 11, 5 |
| NOTCH2NL | notch 2 N-terminal like | 264343 | 213240 | 270339 | |
| NPHS2 | NPHS2, podocin | 116218 | 162779 | 162782 | 17, |
| NSL1 | NSL1, MIS12 kinetochore complex component | 117697 | 123685 | 203705 | 29, 34, 22 |
| NUAK2 | NUAK family kinase 2 | 163545 | 133069 | 162873 | 21, 31, 42 |
| NASP | nuclear autoantigenic sperm protein | 132780 | 117448 | 159588 | 21, 12, 41 |
| NUCKS1 | nuclear casein kinase and cyclin dependent kinase substrate 1 | 069275 | 158715 | 117280 | 27, 11, 41 |
| NUDC | nuclear distribution C, dynein complex regulator | 090273 | 198746 | 131910 | 35, 12, 34 |
| NFIA | nuclear factor IA | 162599 | 162598 | 162604 | |
| NR0B2 | nuclear receptor subfamily 0 group B member 2 | 131910 | 090273 | 175707 | 15, 19, 37 |
| NR1I3 | nuclear receptor subfamily 1 group I member 3 | 143257 | 158882 | 248485 | 19, 17, 25 |
| NR5A2 | nuclear receptor subfamily 5 group A member 2 | 116833 | 081237 | 162702 | 26, 28, 42 |
| NFYC | nuclear transcription factor Y subunit gamma | 066136 | 117016 | 117013 | 43, 37, 36 |
| NVL | nuclear VCP-like | 143748 | 143753 | 143771 | 13, 39, 24 |
| NOL9 | nucleolar protein 9 | 162408 | 171680 | 173662 | 41, 37, 22 |
| NUP133 | nudeoporin 133 | 069248 | 143632 | 135776 | 42, 10, 24 |
| NUP210L | nudeoporin 210 like | 143552 | 177954 | 143549 | 38, 22, 12 |
| NTPCR | nudeoside-triphosphatase, cancer-related | 135778 | 212916 | 135749 | 43, 10, 41 |
| NUDT17 | nudix hydrolase 17 | 186364 | 186141 | 131788 | 27, 11, 29 |
| NUF2 | NUF2, NDC80 kinetochore complex component | 143228 | 143248 | 185630 | 34, 38, 39 |
| OBSCN | obscurin, cytoskeletal calmodulin and titin-interacting RhoGEF | 154358 | 162913 | 154370 | 18, 25, 40 |
| OCLM | oculomedin | 262180 | 279374 | 116703 | 12, |
| OLFM3 | olfactomedin 3 | 118733 | 170989 | 060718 | 8, 6, 17 |
| OLFML2B | olfactomedin like 2B | 162745 | 118217 | 198929 | |
| OLFML3 | olfactomedin like 3 | 116774 | 163349 | 134207 | 43, 9, 1 |
| OR1C1 | olfactory receptor family 1 subfamily C member 1 | 221888 | 153230 | 196772 | |
| OR10J1 | olfactory receptor family 10 subfamily J member 1 | 196184 | 249730 | 184155 | 38, |
| OR10J3 | olfactory receptor family 10 subfamily J member 3 | 196266 | 179639 | 249730 | |
| OR10J4 | olfactory receptor family 10 subfamily J member 4 (gene/pseudogene) | 249730 | 196266 | 196184 | |
| OR10J5 | olfactory receptor family 10 subfamily J member 5 | 184155 | 196184 | 132703 | |
| OR10K1 | olfactory receptor family 10 subfamily K member 1 | 173285 | 180708 | 198965 | |
| OR10K2 | olfactory receptor family 10 subfamily K member 2 | 180708 | 186306 | 173285 | |
| OR10R2 | olfactory receptor family 10 subfamily R member 2 | 198965 | 173285 | 197532 | 20, |
| OR10T2 | olfactory receptor family 10 subfamily T member 2 | 186306 | 158488 | 180708 | |
| OR10X1 | olfactory receptor family 10 subfamily X member 1 (gene/pseudogene) | 279111 | 186440 | 198967 | |
| OR10Z1 | olfactory receptor family 10 subfamily Z member 1 | 198967 | 279111 | 163554 | |
| OR11L1 | olfactory receptor family 11 subfamily L member 1 | 197591 | 196772 | 162722 | |
| OR13G1 | olfactory receptor family 13 subfamily G member 1 | 197437 | 177476 | 169214 | |
| OR14A16 | olfactory receptor family 14 subfamily A member 16 | 196772 | 221888 | 197591 | |
| OR14A2 | Olfactory receptor family 14 subfamily A member 2 | 241128 | 169214 | 153230 | |
| OR14C36 | olfactory receptor family 14 subfamily C member 36 | 177174 | 177186 | 196944 | |
| OR14I1 | olfactory receptor family 14 subfamily I member 1 | 189181 | 187701 | 259823 | |
| OR14K1 | Olfactory receptor family 14 subfamily K member 1 | 153230 | 241128 | 221888 | |
| OR2AJ1 | Olfactory receptor family 2 subfamily AJ member 1 | 177275 | 177462 | 279263 | |
| OR2AK2 | olfactory receptor family 2 subfamily AK member 2 | 187080 | 279263 | 197454 | |
| OR2B11 | olfactory receptor family 2 subfamily B member 11 | 177535 | 162711 | 169224 | 18, |
| OR2C3 | olfactory receptor family 2 subfamily C member 3 | 196242 | 169224 | 177489 | |
| OR2G2 | olfactory receptor family 2 subfamily G member 2 | 177489 | 196242 | 177476 | |
| OR2G3 | olfactory receptor family 2 subfamily G member 3 | 177476 | 177489 | 197437 | |
| OR2G6 | olfactory receptor family 2 subfamily G member 6 | 188558 | 203661 | 182783 | |
| OR2L13 | olfactory receptor family 2 subfamily L member 13 | 196071 | 198128 | 162727 | 8, |
| OR2L2 | olfactory receptor family 2 subfamily L member 2 | 203663 | 197454 | 198128 | |
| OR2L3 | olfactory receptor family 2 subfamily L member 3 | 198128 | 203663 | 196071 | |
| OR2L5 | olfactory receptor family 2 subfamily L member 5 | 197454 | 187080 | 203663 | |
| OR2L8 | olfactory receptor family 2 subfamily L member 8 (gene/pseudogene) | 279263 | 177275 | 187080 | |
| OR2M2 | olfactory receptor family 2 subfamily M member 2 | 198601 | 162727 | 228198 | |
| OR2M3 | olfactory receptor family 2 subfamily M member 3 | 228198 | 198601 | 171180 | |
| OR2M4 | olfactory receptor family 2 subfamily M member 4 | 171180 | 228198 | 177212 | |
| OR2M5 | olfactory receptor family 2 subfamily M member 5 | 162727 | 196071 | 198601 | |
| OR2M7 | olfactory receptor family 2 subfamily M member 7 | 177186 | 177201 | 177174 | |
| OR2T1 | olfactory receptor family 2 subfamily T member 1 | 175143 | 198104 | 196240 | |
| OR2T10 | olfactory receptor family 2 subfamily T member 10 | 184022 | 183310 | 279301 | |
| OR2T11 | olfactory receptor family 2 subfamily T member 11 (gene/pseudogene) | 279301 | 184022 | 177151 | |
| OR2T12 | olfactory receptor family 2 subfamily T member 12 | 177201 | 177212 | 177186 | |
| OR2T2 | olfactory receptor family 2 subfamily T member 2 | 196240 | 175143 | 196539 | |
| OR2T27 | olfactory receptor family 2 subfamily T member 27 | 187701 | 177151 | 189181 | |
| OR2T29 | olfactory receptor family 2 subfamily T member 29 | 182783 | 188558 | 183310 | |
| OR2T3 | olfactory receptor family 2 subfamily T member 3 | 196539 | 196240 | 203661 | |
| OR2T33 | olfactory receptor family 2 subfamily T member 33 | 177212 | 171180 | 177201 | |
| OR2T34 | olfactory receptor family 2 subfamily T member 34 | 183310 | 182783 | 184022 | |
| OR2T35 | olfactory receptor family 2 subfamily T member 35 | 177151 | 279301 | 187701 | |
| OR2T4 | olfactory receptor family 2 subfamily T member 4 | 196944 | 177174 | 198104 | |
| OR2T5 | olfactory receptor family 2 subfamily T member 5 | 203661 | 196539 | 188558 | |
| OR2T6 | olfactory receptor family 2 subfamily T member 6 | 198104 | 196944 | 175143 | |
| OR2T8 | olfactory receptor family 2 subfamily T member 8 | 177462 | 238243 | 177275 | |
| OR2W3 | olfactory receptor family 2 subfamily W member 3 | 238243 | 162722 | 177462 | |
| OR4F16 | olfactory receptor family 4 subfamily F member 16 | 273547 | 278566 | 187634 | |
| OR4F29 | olfactory receptor family 4 subfamily F member 29 | 278566 | 279457 | 273547 | |
| OR4F5 | olfactory receptor family 4 subfamily F member 5 | 186092 | 064703 | 279928 | |
| OR6F1 | olfactory receptor family 6 subfamily F member 1 | 169214 | 197437 | 241128 | 38, |
| OR6K2 | olfactory receptor family 6 subfamily K member 2 | 196171 | 163554 | 203757 | |
| OR6K3 | olfactory receptor family 6 subfamily K member 3 | 203757 | 196171 | 180433 | |
| OR6K6 | olfactory receptor family 6 subfamily K member 6 | 180433 | 203757 | 197403 | |
| OR6N1 | olfactory receptor family 6 subfamily N member 1 | 197403 | 180433 | 188340 | |
| OR6N2 | olfactory receptor family 6 subfamily N member 2 | 188340 | 197403 | 163563 | |
| OR6P1 | olfactory receptor family 6 subfamily P member 1 | 186440 | 197532 | 279111 | |
| OR6Y1 | olfactory receptor family 6 subfamily Y member 1 | 197532 | 198965 | 186440 | |
| OMA1 | OMA1 zinc metallopeptidase | 162600 | 173406 | 184292 | 10, 22, 33 |
| OPRD1 | opioid receptor delta 1 | 116329 | 198492 | 159023 | 27, 8, |
| OPN3 | opsin 3 | 054277 | 117009 | 203668 | 9, 32, 2 |
| OPTC | opticin | 188770 | 188783 | 058668 | 14, 8, 32 |
| OSCP1 | organic solute carrier partner 1 | 116885 | 181817 | 116898 | 30, 29, 1 |
| ORC1 | origin recognition complex subunit 1 | 085840 | 154222 | 134748 | 39, 7, 21 |
| OAZ3 | ornithine decarboxylase antizyme 3 | 143450 | 143436 | 182134 | 38, 29, 45 |
| OTUD3 | OTU deubiquitinase 3 | 169914 | 178828 | 188784 | 26, 18, 14 |
| OTUD7B | OTU deubiquitinase 7B | 264522 | 014914 | 136631 | 4, 1, 26 |
| ODF2L | outer dense fiber of sperm tails 2 like | 122417 | 171502 | 137975 | 4, 30, 29 |
| OVGP1 | oviductal glycoprotein 1 | 085465 | 173947 | 116455 | 27, 29, 44 |
| OSBPL9 | oxysterol binding protein like 9 | 117859 | 085832 | 078618 | 36, 24, 4 |
| PAX7 | paired box 7 | 009709 | 179023 | 179002 | 14, 10, 8 |
| PRRX1 | paired related homeobox 1 | 116132 | 120370 | 117501 | 26, 11, 15 |
| PALMD | palmdelphin | 099260 | 117600 | 156869 | 43, 15, 26 |
| PPT1 | palmitoyl-protein thioesterase 1 | 131238 | 131236 | 117000 | 30, 13, 36 |
| PANK4 | pantothenate kinase 4 | 157881 | 149527 | 197921 | 26, 39, 7 |
| PRCC | papillary renal cell carcinoma (translocation-associated) | 143294 | 143321 | 027869 | 13, 9, 14 |
| PAPPA2 | pappalysin 2 | 116183 | 143207 | 152092 | 32, 44, 14 |
| PARK7 | Parkinsonism associated deglycase | 116288 | 049249 | 116285 | 3, 31, 29 |
| PTCH2 | patched 2 | 117425 | 222009 | 070785 | 38, 5, 8 |
| PATJ | PATJ, crumbs cell polarity complex component | 132849 | 162604 | 240563 | 42, 24, 23 |
| PBX1 | PBX homeobox 1 | 185630 | 143228 | 162761 | 33, 23, 38 |
| PBXIP1 | PBX homeobox interacting protein 1 | 163346 | 163344 | 163348 | 39, 24, 42 |
| PDIK1L | PDLIM1 interacting kinase 1 like | 175087 | 158022 | 197245 | 11, 31, 22 |
| PDZK1 | PDZ domain containing 1 | 174827 | 117262 | 117281 | 17, 19, 26 |
| PDZK1IP1 | PDZK1 interacting protein 1 | 162366 | 162365 | 162367 | 17, 30, 37 |
| PCNX2 | pecanex homolog 2 (Drosophila) | 135749 | 135778 | 143674 | 24, 36, 40 |
| PEF1 | penta-EF-hand domain containing 1 | 162517 | 121764 | 084636 | 32, 41, 34 |
| PM20D1 | peptidase M20 domain containing 1 | 162877 | 133065 | 174502 | 35, 36, 22 |
| PGLYRP3 | peptidoglycan recognition protein 3 | 159527 | 203782 | 163218 | 35, |
| PGLYRP4 | peptidoglycan recognition protein 4 | 163218 | 159527 | 163220 | 13, 15, 25 |
| PADI1 | peptidyl arginine deiminase 1 | 142623 | 117115 | 142619 | 24, 13, 42 |
| PADI2 | peptidyl arginine deiminase 2 | 117115 | 117118 | 142623 | 18, 5, 14 |
| PADI3 | peptidyl arginine deiminase 3 | 142619 | 142623 | 159339 | 30, 24, 8 |
| PADI4 | peptidyl arginine deiminase 4 | 159339 | 142619 | 280226 | 5, 7, 36 |
| PADI6 | peptidyl arginine deiminase 6 | 276747 | 280226 | 179051 | 35, |
| PPIAL4A | peptidylprolyl isomerase A like 4A | 263353 | 273136 | 281741 | |
| PPIAL4C | peptidylprolyl isomerase A like 4C | 263464 | 271383 | 272058 | |
| PPIAL4D | peptidylprolyl isomerase A like 4D | 256374 | 281571 | 162825 | |
| PPIAL4E | peptidylprolyl isomerase A like 4E | 271567 | 263513 | 266338 | |
| PPIAL4F | peptidylprolyl isomerase A like 4F | 279782 | 266338 | 196369 | |
| PPIAL4G | peptidylprolyl isomerase A like 4G | 236334 | 280649 | 270629 | 38, |
| PPIE | peptidylprolyl isomerase E | 084072 | 116983 | 116985 | 34, 30, 41 |
| PPIH | peptidylprolyl isomerase H | 171960 | 186409 | 065978 | 43, 36, 2 |
| PER3 | period circadian clock 3 | 049246 | 049245 | 049247 | 40, 36, 14 |
| PRDX1 | peroxiredoxin 1 | 117450 | 132763 | 117448 | 4, 3, 34 |
| PRDX6 | peroxiredoxin 6 | 117592 | 117586 | 162753 | 7, 34, 9 |
| PEX10 | peroxisomal biogenesis factor 10 | 157911 | 157916 | 149527 | 26, 33, 38 |
| PEX11B | peroxisomal biogenesis factor 11 beta | 131779 | 143127 | 265241 | 34, 30, 31 |
| PEX14 | peroxisomal biogenesis factor 14 | 142655 | 160049 | 130940 | 31, 29, 14 |
| PEX19 | peroxisomal biogenesis factor 19 | 162735 | 258465 | 122218 | 42, 40, 1 |
| PHF13 | PHD finger protein 13 | 116273 | 162413 | 041988 | 31, 38, 22 |
| PDC | phosducin | 116703 | 262180 | 073756 | 14, 25, |
| PHACTR4 | phosphatase and actin regulator 4 | 204138 | 130772 | 180198 | 43, 2, 9 |
| PI4KB | phosphatidylinositol 4-kinase beta | 143393 | 143373 | 143390 | 31, 40, 18 |
| PIGC | phosphatidylinositol glycan anchor biosynthesis class C | 135845 | 197959 | 180999 | 1, 4, 7 |
| PIGK | phosphatidylinositol glycan anchor biosynthesis class K | 142892 | 117069 | 154027 | 10, 13, 29 |
| PIGM | phosphatidylinositol glycan anchor biosynthesis class M | 143315 | 177807 | 162728 | 39, 45, 11 |
| PIGV | phosphatidylinositol glycan anchor biosynthesis class V | 060642 | 117713 | 204160 | 38, 13, 9 |
| PIK3CD | phosphatidylinositol-4,5-bisphosphate 3-kinase catalytic subunit delta | 171608 | 188807 | 171603 | 22, 21, 43 |
| PIK3C2B | phosphatidylinositol-4-phosphate 3-kinase catalytic subunit type 2 beta | 133056 | 158615 | 198625 | 22, 32, 16 |
| PIP5K1A | phosphatidylinositol-4-phosphate 5-kinase type 1 alpha | 143398 | 163159 | 159352 | |
| PDE4B | phosphodiesterase 4B | 184588 | 116678 | 118473 | 42, 8, 40 |
| PDE4DIP | phosphodiesterase 4D interacting protein | 178104 | 270629 | 269713 | |
| PGM1 | phosphoglucomutase 1 | 079739 | 203965 | 185483 | 15, 11, 34 |
| PGD | phosphogluconate dehydrogenase | 142657 | 054523 | 251503 | 13, 5, 24 |
| PHGDH | phosphoglycerate dehydrogenase | 092621 | 143067 | 134240 | 21, 9, 3 |
| PIK3R3 | phosphoinositide-3-kinase regulatory subunit 3 | 117461 | 086015 | 278139 | 4, 40, 25 |
| PLA2G2A | phospholipase A2 group IIA | 188257 | 188784 | 127472 | 1, 10, 32 |
| PLA2G2C | phospholipase A2 group IIC | 187980 | 158786 | 162543 | |
| PLA2G2D | phospholipase A2 group IID | 117215 | 127472 | 158786 | 10, 36, 30 |
| PLA2G2E | phospholipase A2 group IIE | 188784 | 169914 | 188257 | |
| PLA2G2F | phospholipase A2 group IIF | 158786 | 117215 | 187980 | 39, |
| PLA2G4A | phospholipase A2 group IVA | 116711 | 073756 | 162670 | 30, 10, 44 |
| PLA2G5 | phospholipase A2 group V | 127472 | 188257 | 117215 | 14, 32, 2 |
| PLCH2 | phospholipase C eta 2 | 149527 | 157911 | 157881 | 31, 14, 22 |
| PLD5 | phospholipase D family member 5 | 180287 | 197769 | 143702 | 42, 28, 14 |
| PLPP3 | phospholipid phosphatase 3 | 162407 | 162402 | 162409 | |
| PLPPR4 | phospholipid phosphatase related 4 | 117600 | 117598 | 099260 | 31, 8, 24 |
| PLPPR5 | phospholipid phosphatase related 5 | 117598 | 162627 | 117600 | 10, 28, 45 |
| PMVK | phosphomevalonate kinase | 163344 | 143603 | 163346 | 21, 35, 28 |
| PPCS | phosphopantothenoylcysteine synthetase | 127125 | 066185 | 186409 | 4, 3, 23 |
| PEA15 | phosphoprotein enriched in astrocytes 15 | 162734 | 143318 | 132716 | 8, 15, 27 |
| PGBD2 | piggyBac transposable element derived 2 | 185220 | 171163 | 064703 | 29, 34, 18 |
| PGBD5 | piggyBac transposable element derived 5 | 177614 | 143641 | 135775 | 31, 20, 8 |
| PITHD1 | PITH domain containing 1 | 057757 | 011007 | 011009 | 29, 3, 26 |
| PKP1 | plakophilin 1 | 081277 | 163395 | 118194 | 24, 35, 18 |
| PAFAH2 | platelet activating factor acetylhydrolase 2 | 158006 | 117632 | 158008 | 21, 36, 11 |
| PTAFR | platelet activating factor receptor | 169403 | 158161 | 126698 | 5, 30, 21 |
| PEAR1 | platelet endothelial aggregation receptor 1 | 187800 | 027644 | 160838 | 43, 26, 38 |
| PLEKHG5 | pleckstrin homology and RhoGEF domain containing G5 | 171680 | 215788 | 162408 | 24, 18, 8 |
| PLEKHM2 | pleckstrin homology and RUN domain containing M2 | 116786 | 215695 | 162461 | 34, 14, 35 |
| PLEKHA6 | pleckstrin homology domain containing A6 | 143850 | 174567 | 158615 | |
| PLEKHN1 | pleckstrin homology domain containing N1 | 187583 | 187961 | 187642 | 40, 23, 12 |
| PLEKHO1 | pleckstrin homology domain containing O1 | 023902 | 136631 | 143401 | 41, 5, 6 |
| PHLDA3 | pleckstrin homology like domain family A member 3 | 174307 | 159173 | 159176 | 35, 4, 9 |
| PLXNA2 | plexin A2 | 076356 | 174059 | 008118 | 25, 40, 15 |
| PMF1-BGLAP | PMF1-BGLAP readthrough | 260238 | 160785 | 160783 | |
| PODN | podocan | 174348 | 279054 | 162383 | 39, 42, 1 |
| PDPN | podoplanin | 162493 | 162494 | 116731 | 24, 42, 10 |
| POGK | pogo transposable element with KRAB domain | 143157 | 188859 | 152382 | 11, 42, 18 |
| POGZ | pogo transposable element with ZNF domain | 143442 | 159377 | 143375 | 31, 1, 22 |
| PLK3 | polo like kinase 3 | 173846 | 142959 | 188396 | 27, 1, 25 |
| PABPC4 | poly(A) binding protein cytoplasmic 4 | 090621 | 183682 | 163909 | 9, 35, 16 |
| PARP1 | poly(ADP-ribose) polymerase 1 | 143799 | 183814 | 203685 | 21, 22, 12 |
| PMF1 | polyamine modulated factor 1 | 160783 | 260238 | 242252 | 29, 20, 41 |
| PHC2 | polyhomeotic homolog 2 | 134686 | 184389 | 121903 | 34, 18, 35 |
| PIGR | polymeric immunoglobulin receptor | 162896 | 162894 | 162897 | 16, 37, 25 |
| GALNT2 | polypeptide N-acetylgalactosaminyltransferase 2 | 143641 | 135763 | 177614 | 39, 24, 42 |
| PTBP2 | polypyrimidine tract binding protein 2 | 117569 | 122481 | 188641 | 38, 26, 8 |
| KCNN3 | potassium calcium-activated channel subfamily N member 3 | 143603 | 160710 | 163344 | 22, 21, 25 |
| KCTD3 | potassium channel tetramerization domain containing 3 | 136636 | 082482 | 042781 | 18, 4, 23 |
| KCNT2 | potassium sodium-activated channel subfamily T member 2 | 162687 | 162630 | 000971 | 31, 42, 17 |
| KCNK1 | potassium two pore domain channel subfamily K member 1 | 135750 | 143674 | 183780 | 3, 11, 2 |
| KCNK2 | potassium two pore domain channel subfamily K member 2 | 082482 | 117724 | 136636 | 2, 40, 35 |
| KCNA10 | potassium voltage-gated channel subfamily A member 10 | 143105 | 143125 | 177301 | |
| KCNA2 | potassium voltage-gated channel subfamily A member 2 | 177301 | 143105 | 177272 | |
| KCNA3 | potassium voltage-gated channel subfamily A member 3 | 177272 | 177301 | 143119 | 39, 30, 28 |
| KCNAB2 | potassium voltage-gated channel subfamily A regulatory beta subunit 2 | 069424 | 131697 | 116254 | 7, 8, 39 |
| KCNC4 | potassium voltage-gated channel subfamily C member 4 | 116396 | 197106 | 162775 | 43, 29, 28 |
| KCND3 | potassium voltage-gated channel subfamily D member 3 | 171385 | 064703 | 143079 | 8, 20, |
| KCNH1 | potassium voltage-gated channel subfamily H member 1 | 143473 | 054392 | 117625 | 31, 42, 2 |
| KCNJ10 | potassium voltage-gated channel subfamily J member 10 | 177807 | 162723 | 143315 | 8, 11, 26 |
| KCNJ9 | potassium voltage-gated channel subfamily J member 9 | 162728 | 143315 | 162729 | 8, 10, 38 |
| KCNQ4 | potassium voltage-gated channel subfamily Q member 4 | 117013 | 066136 | 179862 | 5, 14, 37 |
| POU2F1 | POU class 2 homeobox 1 | 143190 | 198842 | 198821 | 21, 39, 24 |
| POU3F1 | POU class 3 homeobox 1 | 185668 | 183520 | 116954 | 11, 35, 20 |
| PERM1 | PPARGC1 and ESRR induced regulator, muscle 1 | 187642 | 187583 | 188290 | 25, 24, 3 |
| PQLC2 | PQ loop repeat containing 2 | 040487 | 053371 | 077549 | 36, 2, 4 |
| PRDM16 | PR/SET domain 16 | 142611 | 169717 | 130762 | 11, 13, 42 |
| PRDM2 | PR/SET domain 2 | 116731 | 162493 | 189337 | 22, 6, 14 |
| PRAMEF1 | PRAME family member 1 | 116721 | 116726 | 239810 | |
| PRAMEF10 | PRAME family member 10 | 187545 | 243073 | 204510 | |
| PRAMEF11 | PRAME family member 11 | 239810 | 116721 | 179172 | |
| PRAMEF12 | PRAME family member 12 | 116726 | 157330 | 116721 | |
| PRAMEF14 | PRAME family member 14 | 204481 | 204501 | 204480 | |
| PRAMEF15 | PRAME family member 15 | 204501 | 182330 | 204481 | |
| PRAMEF17 | PRAME family member 17 | 204479 | 204480 | 204478 | |
| PRAMEF18 | PRAME family member 18 | 279804 | 204505 | 270601 | |
| PRAMEF19 | PRAME family member 19 | 204480 | 204481 | 204479 | |
| PRAMEF2 | PRAME family member 2 | 120952 | 179172 | 243073 | 38, |
| PRAMEF20 | PRAME family member 20 | 204478 | 204479 | 162494 | |
| PRAMEF25 | PRAME family member 25 | 229571 | 274764 | 277058 | |
| PRAMEF26 | PRAME family member 26 | 280267 | 275774 | 179412 | |
| PRAMEF27 | PRAME family member 27 | 274764 | 232423 | 229571 | |
| PRAMEF4 | PRAME family member 4 | 243073 | 120952 | 187545 | |
| PRAMEF5 | PRAME family member 5 | 270601 | 279804 | 182330 | |
| PRAMEF6 | PRAME family member 6 | 232423 | 204510 | 274764 | |
| PRAMEF7 | PRAME family member 7 | 204510 | 187545 | 232423 | |
| PRAMEF8 | PRAME family member 8 | 182330 | 270601 | 204501 | |
| PRAMEF9 | PRAME family member 9 | 204505 | 179412 | 279804 | |
| PFDN2 | prefoldin subunit 2 | 143256 | 162755 | 158793 | 15, 3, 29 |
| PRPF3 | pre-mRNA processing factor 3 | 117360 | 278939 | 163125 | 21, 18, 6 |
| PRPF38A | pre-mRNA processing factor 38A | 134748 | 085840 | 134744 | 30, 7, 39 |
| PRPF38B | pre-mRNA processing factor 38B | 134186 | 162639 | 143107 | 13, 36, 25 |
| PSEN2 | presenilin 2 | 143801 | 143772 | 163050 | 36, 33, 29 |
| PIFO | primary cilia formation | 173947 | 134216 | 085465 | 29, 42, 30 |
| PLOD1 | procollagen-lysine,2-oxoglutarate 5-dioxygenase 1 | 083444 | 116685 | 116688 | 45, 35, 43 |
| PAQR6 | progestin and adipoQ receptor family member 6 | 160781 | 242252 | 198952 | 8, 17, 3 |
| PAQR7 | progestin and adipoQ receptor family member 7 | 182749 | 127423 | 117632 | 40, 32, 38 |
| PROK1 | prokineticin 1 | 143125 | 134248 | 143105 | 27, 38, 32 |
| PRELP | proline and arginine rich end leucine rich repeat protein | 188783 | 122176 | 188770 | 10, 2, 14 |
| PSRC1 | proline and serine rich coiled-coil 1 | 134222 | 143126 | 221986 | 35, 9, 25 |
| PRR9 | proline rich 9 | 203783 | 203784 | 203782 | 15, 12, |
| PRRC2C | proline rich coiled-coil 2C | 117523 | 076258 | 283683 | 18, 27, 24 |
| PNRC2 | proline rich nuclear receptor coactivator 2 | 189266 | 188822 | 188529 | |
| P3H1 | prolyl 3-hydroxylase 1 | 117385 | 164007 | 164008 | 6, 18, 35 |
| PARS2 | prolyl-tRNA synthetase 2, mitochondrial (putative) | 162396 | 243725 | 006555 | 13, 36, 25 |
| PCSK9 | proprotein convertase subtilisin/kexin type 9 | 169174 | 162399 | 162402 | 24, 9, 3 |
| PROX1 | prospero homeobox 1 | 117707 | 136643 | 143499 | 14, 19, 16 |
| PTGER3 | prostaglandin E receptor 3 | 050628 | 116761 | 132485 | 17, 18, 25 |
| PTGFR | prostaglandin F receptor | 122420 | 137960 | 137959 | 10, 42, 6 |
| PTGFRN | prostaglandin F2 receptor inhibitor | 134247 | 116824 | 134256 | 37, 15, 24 |
| PTGS2 | prostaglandin-endoperoxide synthase 2 | 073756 | 116703 | 116711 | 45, 5, 9 |
| PRSS38 | protease, serine 38 | 185888 | 081692 | 143816 | 38, |
| PSMD4 | proteasome 26S subunit, non-ATPase 4 | 159352 | 143398 | 143373 | 3, 34, 12 |
| PSMA5 | proteasome subunit alpha 5 | 143106 | 134243 | 143028 | 29, 1, 35 |
| PSMB2 | proteasome subunit beta 2 | 126067 | 116819 | 142686 | 36, 39, 13 |
| PSMB4 | proteasome subunit beta 4 | 159377 | 143416 | 143442 | 21, 35, 9 |
| PRMT6 | protein arginine methyltransferase 6 | 198890 | 187733 | 162631 | 4, 45, 12 |
| PIAS3 | protein inhibitor of activated STAT 3 | 131788 | 186364 | 198483 | 24, 39, 1 |
| PRKAA2 | protein kinase AMP-activated catalytic subunit alpha 2 | 162409 | 162407 | 187889 | 25, 15, 14 |
| PRKAB2 | protein kinase AMP-activated non-catalytic subunit beta 2 | 131791 | 268043 | 131781 | 11, 42, 6 |
| PRKCZ | protein kinase C zeta | 067606 | 187730 | 162585 | 32, 8, 21 |
| PRKACB | protein kinase cAMP-activated catalytic subunit beta | 142875 | 137941 | 203943 | 42, 8, 39 |
| PKN2 | protein kinase N2 | 065243 | 143013 | 137947 | 4, 42, 43 |
| POMGNT1 | protein O-linked mannose N-acetylglucosaminyltransferase 1 (beta 1,2-) | 085998 | 250719 | 171357 | 40, 33, 31 |
| PPP1R12B | protein phosphatase 1 regulatory subunit 12B | 077157 | 077152 | 143858 | 15, 25, 26 |
| PPP1R15B | protein phosphatase 1 regulatory subunit 15B | 158615 | 143850 | 133056 | 13, 42, 5 |
| PPP1R8 | protein phosphatase 1 regulatory subunit 8 | 117751 | 117758 | 278868 | 3, 21, 31 |
| PPP2R5A | protein phosphatase 2 regulatory subunit B′alpha | 066027 | 143476 | 065600 | |
| PPM1J | protein phosphatase, Mg2+/Mn2+dependent 1J | 155367 | 271810 | 184599 | 41, 30, 34 |
| PTP4A2 | protein tyrosine phosphatase type IVA, member 2 | 184007 | 134668 | 121774 | 1, 6, 5 |
| PTPN14 | protein tyrosine phosphatase, non-receptor type 14 | 152104 | 143499 | 117724 | |
| PTPN22 | protein tyrosine phosphatase, non-receptor type 22 | 134242 | 081019 | 188761 | 39, 22, 10 |
| PTPN7 | protein tyrosine phosphatase, non-receptor type 7 | 143851 | 143862 | 133067 | 39, 36, 5 |
| PTPRC | protein tyrosine phosphatase, receptor type C | 081237 | 151418 | 116833 | 30, 10, 5 |
| PTPRF | protein tyrosine phosphatase, receptor type F | 142949 | 178922 | 066135 | 43, 4, 26 |
| PTPRU | protein tyrosine phosphatase, receptor type U | 060656 | 116353 | 162510 | 14, 12, 3 |
| PRG4 | proteoglycan 4 | 116690 | 143341 | 047410 | 10, 1, 9 |
| PPOX | protoporphyrinogen oxidase | 143224 | 143258 | 158850 | 2, 39, 5 |
| PRUNE1 | prune exopolyphosphatase | 143363 | 143409 | 163141 | 29, 24, 40 |
| PUSH | pseudouridylate synthase-like 1 | 169972 | 131584 | 127054 | 35, 13, 32 |
| PINK1 | PTEN induced putative kinase 1 | 158828 | 158825 | 244038 | 26, 38, 34 |
| PPFIA4 | PTPRF interacting protein alpha 4 | 143847 | 163444 | 122180 | |
| PUM1 | pumilio RNA binding family member 1 | 134644 | 162512 | 084628 | 42, 24, 43 |
| PCP4L1 | Purkinje cell protein 4 like 1 | 248485 | 143257 | 158887 | 31, 4, 14 |
| PHTF1 | putative homeodomain transcription factor 1 | 116793 | 081026 | 081019 | 38, 22, 26 |
| PYGO2 | pygopus family PHD finger 2 | 163348 | 163346 | 160691 | 4, 9, 22 |
| PYHIN1 | pyrin and HIN domain family member 1 | 163564 | 163563 | 163565 | 5, 22, 44 |
| PYCR2 | pyrroline-5-carboxylate reductase family member 2 | 143811 | 255835 | 143768 | 9, 6, 5 |
| PKLR | pyruvate kinase, liver and RBC | 143627 | 143630 | 160752 | 19, 17, 35 |
| QSOX1 | quiescin sulfhydryl oxidase 1 | 116260 | 135837 | 121454 | 20, 38, 32 |
| RABGGTB | Rab geranylgeranyltransferase beta subunit | 137955 | 117054 | 057468 | 11, 6, 34 |
| RABGAP1L | RAB GTPase activating protein 1 like | 152061 | 135870 | 203737 | |
| RABIF | RAB interacting factor | 183155 | 117139 | 117153 | 23, 31, 38 |
| RAB13 | RAB13, member RAS oncogene family | 143545 | 143543 | 177954 | 43, 26, 11 |
| RAB25 | RAB25, member RAS oncogene family | 132698 | 116586 | 254726 | 30, 27, 37 |
| RAB29 | RAB29, member RAS oncogene family | 117280 | 069275 | 133065 | |
| RAB3GAP2 | RAB3 GTPase activating non-catalytic protein subunit 2 | 118873 | 067704 | 116141 | 11, 22, 2 |
| RAB3B | RAB3B, member RAS oncogene family | 169213 | 078618 | 117862 | 28, 11, 31 |
| RAB42 | RAB42, member RAS oncogene family | 188060 | 120656 | 162419 | 34, 17, 35 |
| RAB4A | RAB4A, member RAS oncogene family | 168118 | 177800 | 213029 | 37, 43, 33 |
| RAB7B | RAB7B, member RAS oncogene family | 276600 | 174502 | 196188 | 24, 39, 15 |
| RAD54L | RAD54-like (S. cerevisiae) | 085999 | 171357 | 132128 | 39, 37, 27 |
| RALGPS2 | Ral GEF with PH domain and SH3 binding motif 2 | 116191 | 240021 | 116194 | 22, 38, 14 |
| RGL1 | ral guanine nucleotide dissociation stimulator like 1 | 143344 | 162704 | 173627 | 1, 34, 29 |
| RAP1GAP | RAP1 GTPase activating protein | 076864 | 162551 | 090686 | 3, 40, 31 |
| RAP1A | RAP1 A, member of RAS oncogene family | 116473 | 282608 | 197852 | 11, 45, 29 |
| RORC | RAR related orphan receptor C | 143365 | 213171 | 225556 | 39, 31, 42 |
| RASSF5 | Ras association domain family member 5 | 266094 | 263528 | 143486 | 39, 36, 42 |
| RHOC | ras homolog family member C | 155366 | 155363 | 271810 | 34, 29, 35 |
| RHOU | ras homolog family member U | 116574 | 168159 | 177800 | 29, 6, 2 |
| RIT1 | Ras like without CAAX1 | 143622 | 132718 | 132680 | 40, 11, 13 |
| RASAL2 | RAS protein activator like 2 | 075391 | 120341 | 188585 | 26, 25, 14 |
| RRAGC | Ras related GTP binding C | 116954 | 185668 | 214114 | 28, 6, 1 |
| RBBP4 | RB binding protein 4, chromatin remodeling factor | 162521 | 176261 | 162520 | 4, 45, 7 |
| RBBP5 | RB binding protein 5, histone lysine methyltransferase complex subunit | 117222 | 174529 | 133059 | 22, 45, 43 |
| RCAN3 | RCAN family member 3 | 117602 | 001461 | 184454 | |
| RCSD1 | RCSD domain containing 1 | 198771 | 143162 | 197965 | 41, 22, 21 |
| RLF | rearranged L-myc fusion | 117000 | 131238 | 188800 | 1, 24, 4 |
| ROR1 | receptor tyrosine kinase like orphan receptor 1 | 185483 | 079739 | 177414 | 1, 26, 11 |
| REG4 | regenerating family member 4 | 134193 | 134240 | 134249 | 37, 3, 16 |
| RIMS3 | regulating synaptic membrane exocytosis 3 | 117016 | 117010 | 066136 | 21, 26, 8 |
| RPRD2 | regulation of nuclear pre-mRNA domain containing 2 | 163125 | 117360 | 143374 | 22, 7, 24 |
| RCC1 | regulator of chromosome condensation 1 | 180198 | 204138 | 180098 | 41, 3, 21 |
| RCC2 | regulator of chromosome condensation 2 | 179051 | 276747 | 074964 | |
| RGS1 | regulator of G-protein signaling 1 | 090104 | 253148 | 127074 | 42, 39, 4 |
| RGS13 | regulator of G-protein signaling 13 | 127074 | 090104 | 116741 | 41, 21, 30 |
| RGS16 | regulator of G-protein signaling 16 | 143333 | 135828 | 135824 | 40, 36, 17 |
| RGS18 | regulator of G-protein signaling 18 | 150681 | 162670 | 253148 | 36, 5, 7 |
| RGS2 | regulator of G-protein signaling 2 | 116741 | 127074 | 116750 | 5, 7, 14 |
| RGS21 | regulator of G-protein signaling 21 | 253148 | 150681 | 090104 | |
| RGS4 | regulator of G-protein signaling 4 | 117152 | 185860 | 143248 | 45, 17, 8 |
| RGS5 | regulator of G-protein signaling 5 | 143248 | 117152 | 143228 | 45, 2, 26 |
| RGS7 | regulator of G-protein signaling 7 | 182901 | 180875 | 091483 | 26, 31, 10 |
| RGS8 | regulator of G-protein signaling 8 | 135824 | 143333 | 135838 | 10, 38, 8 |
| RGSL1 | regulator of G-protein signaling like 1 | 121446 | 203730 | 135828 | 38, 40, 33 |
| RSC1A1 | regulator of solute carriers 1 | 215695 | 197312 | 116786 | 26, 11, 40 |
| RFX5 | regulatory factor X5 | 143390 | 143393 | 143416 | 42, 21, 39 |
| RIIAD1 | regulatory subunit of type IIPKA R-subunit (RIIa) domain containing 1 | 178796 | 159409 | 143436 | 31, 38, 14 |
| RXFP4 | relaxin/insulin like family peptide receptor 4 | 173080 | 132680 | 116584 | |
| RSG1 | REM2 and RAB like small GTPase 1 | 132881 | 142632 | 037637 | 5, 15, 35 |
| REN | renin | 143839 | 143845 | 170498 | 16, 17, 4 |
| RPTN | repetin | 215853 | 159450 | 197915 | 24, 35, 23 |
| RPA2 | replication protein A2 | 117748 | 130775 | 130768 | 30, 21, 29 |
| RCOR3 | REST corepressor 3 | 117625 | 143473 | 082512 | 11, 42, 40 |
| RER1 | retention in endoplasmic reticulum sorting receptor 1 | 157916 | 116151 | 157911 | 29, 22, 13 |
| RD3 | retinal degeneration 3 | 198570 | 082512 | 170385 | 14, 38, 12 |
| RXRG | retinoid X receptor gamma | 143171 | 162761 | 162763 | 40, 14, 31 |
| RBP7 | retinol binding protein 7 | 162444 | 173614 | 130939 | 1, 10, 28 |
| RHCE | Rh blood group CcEe antigens | 188672 | 183726 | 204178 | 10, 5, 7 |
| RHD | Rh blood group D antigen | 187010 | 117616 | 183726 | 31, 5, 7 |
| RHBG | Rh family B glycoprotein (gene/pseudogene) | 132677 | 163467 | 125462 | 19, 27, 17 |
| ARHGAP29 | Rho GTPase activating protein 29 | 137962 | 198691 | 117528 | 45, 17, 19 |
| ARHGAP30 | Rho GTPase activating protein 30 | 186517 | 158773 | 278883 | 36, 39, 5 |
| ARHGEF10L | Rho guanine nucleotide exchange factor 10 like | 074964 | 179051 | 117148 | 42, 10, 3 |
| ARHGEF11 | Rho guanine nucleotide exchange factor 11 | 132694 | 160838 | 253831 | 30, 26, 18 |
| ARHGEF16 | Rho guanine nucleotide exchange factor 16 | 130762 | 142611 | 162591 | 37, 26, 9 |
| ARHGEF19 | Rho guanine nucleotide exchange factor 19 | 142632 | 142627 | 132881 | 3, 9, 27 |
| ARHGEF2 | Rho/Rac guanine nucleotide exchange factor 2 | 116584 | 173080 | 163479 | |
| RHBDL2 | rhomboid like 2 | 158315 | 131233 | 174574 | 18, 2, 20 |
| RNASEL | ribonuclease L | 135828 | 121446 | 143333 | 29, 22, 26 |
| RAVER2 | ribonucleoprotein, PTB binding 2 | 162437 | 158966 | 162434 | 42, 33, 11 |
| RIMKLA | ribosomal modification protein rimK like family member A | 177181 | 198815 | 066185 | 14, 24, 20 |
| RPL11 | ribosomal protein L11 | 142676 | 197880 | 011007 | 43, 12, 1 |
| RPL22 | ribosomal protein L22 | 116251 | 116254 | 158286 | 29, 15, 1 |
| RPL5 | ribosomal protein L5 | 122406 | 067208 | 154511 | 41, 43, 21 |
| RPS27 | ribosomal protein S27 | 177954 | 143545 | 143552 | |
| RPS6KA1 | ribosomal protein S6 kinase A1 | 117676 | 198830 | 117713 | 36, 21, 39 |
| RPS6KC1 | ribosomal protein S6 kinase C1 | 136643 | 174606 | 117707 | 6, 26, 42 |
| RPS8 | ribosomal protein S8 | 142937 | 142945 | 142959 | 41, 43, 21 |
| RRNAD1 | ribosomal RNA adenine dimethylase domain containing 1 | 143303 | 143319 | 143314 | |
| RRP15 | ribosomal RNA processing 15 homolog | 067533 | 162814 | 092969 | 34, 10, 4 |
| RPF1 | ribosome production factor 1 homolog | 117133 | 137976 | 174021 | 34, 30, 43 |
| RC3H1 | ring finger and CCCH-type domains 1 | 135870 | 117601 | 152061 | 25, 22, 24 |
| RFWD2 | ring finger and WD repeat domain 2 | 143207 | 116147 | 116183 | 35, 37, 4 |
| RNF11 | ring finger protein 11 | 123091 | 204006 | 085831 | 29, 11, 1 |
| RNF115 | ring finger protein 115 | 265491 | 117281 | 186141 | 41, 15, 18 |
| RNF186 | ring finger protein 186 | 178828 | 162542 | 169914 | 16, 17, 27 |
| RNF187 | ring finger protein 187 | 168159 | 196890 | 116574 | 34, 21, 27 |
| RNF19B | ring finger protein 19B | 116514 | 121900 | 004455 | 13, 38, 27 |
| RNF2 | ring finger protein 2 | 121481 | 135842 | 121486 | 13, 45, 5 |
| RNF207 | ring finger protein 207 | 158286 | 116251 | 116237 | 29, 15, 40 |
| RNF220 | ring finger protein 220 | 187147 | 117419 | 126106 | |
| RNF223 | ring finger protein 223 | 237330 | 188157 | 131591 | 9, |
| RTCA | RNA 3′-terminal phosphate cyclase | 137996 | 137992 | 079335 | 34, 1, 43 |
| RBM15 | RNA binding motif protein 15 | 162775 | 116396 | 168679 | 38, 22, 19 |
| RBM34 | RNA binding motif protein 34 | 188739 | 173726 | 054267 | 30, 7, 21 |
| RBM8A | RNA binding motif protein 8A | 265241 | 131779 | 280778 | 42, 24, 39 |
| RBMXL1 | RNA binding motif protein, X-linked like 1 | 213516 | 137944 | 117226 | 29, 36, 42 |
| RNPC3 | RNA binding region (RNP1, RRM) containing 3 | 185946 | 060718 | 240038 | 31, 1, 40 |
| RPAP2 | RNA polymerase II associated protein 2 | 122484 | 174842 | 162676 | 29, 30, 9 |
| POLR3C | RNApolymerase III subunit C | 186141 | 265491 | 186364 | 5, 23, 37 |
| POLR3GL | RNApolymerase III subunit G like | 121851 | 272031 | 265972 | 41, 11, 31 |
| RSBN1 | round spermatid basic protein 1 | 081019 | 116793 | 134242 | 22, 38, 7 |
| RPE65 | RPE65, retinoid isomerohydrolase | 116745 | 116729 | 024526 | 14, 8, |
| RSP01 | R-spondin 1 | 169218 | 134697 | 116922 | 29, 2, 15 |
| RUSC1 | RUN and SH3 domain containing 1 | 160753 | 160752 | 116539 | 9, 43, 13 |
| RUNX3 | runt related transcription factor 3 | 020633 | 169504 | 117614 | 22, 5, 36 |
| RWDD3 | RWD domain containing 3 | 122481 | 271092 | 117569 | 4, 39, 28 |
| RYR2 | ryanodine receptor 2 | 198626 | 244020 | 116996 | 15, 9, 19 |
| S100A1 | S100 calcium binding protein A1 | 160678 | 189171 | 160679 | 15, 25, 35 |
| S100A10 | S100 calcium binding protein A10 | 197747 | 159445 | 163191 | 23, 15, 11 |
| S100A11 | S100 calcium binding protein A11 | 163191 | 197747 | 182898 | 4, 18, 23 |
| S100A12 | S100 calcium binding protein A12 | 163221 | 163220 | 143546 | 7, 5, 1 |
| S100A13 | S100 calcium binding protein A13 | 189171 | 189334 | 160678 | 29, 15, 31 |
| S100A14 | S100 calcium binding protein A14 | 189334 | 188643 | 189171 | 40, 37, 13 |
| S100A16 | S100 calcium binding protein A16 | 188643 | 196754 | 189334 | 30, 35, 6 |
| S100A2 | S100 calcium binding protein A2 | 196754 | 188015 | 188643 | 4, 18, 30 |
| S100A3 | S100 calcium binding protein A3 | 188015 | 196154 | 196754 | 15, 18, 6 |
| S100A4 | S100 calcium binding protein A4 | 196154 | 196420 | 188015 | 3, 1, 19 |
| S100A5 | S100 calcium binding protein A5 | 196420 | 197956 | 196154 | 10, 22, |
| S100A6 | S100 calcium binding protein A6 | 197956 | 143556 | 196420 | 43, 37, 3 |
| S100A7 | S100 calcium binding protein A7 | 143556 | 197364 | 197956 | 18, 30, 24 |
| S100A7L2 | S100 calcium binding protein A7 like 2 | 197364 | 184330 | 143556 | |
| S100A7A | S100 calcium binding protein A7A | 184330 | 143546 | 197364 | 30, 18, 24 |
| S100A8 | S100 calcium binding protein A8 | 143546 | 163221 | 184330 | 30, 24, 7 |
| S100A9 | S100 calcium binding protein A9 | 163220 | 163218 | 163221 | 7, 18, 24 |
| S100PBP | SWOP binding protein | 116497 | 134684 | 160097 | 22, 4, 39 |
| SCCPDH | saccharopine dehydrogenase (putative) | 143653 | 162852 | 153207 | 38, 31, 29 |
| SASS6 | SAS-6 centriolar assembly protein | 156876 | 156875 | 122435 | 4, 39, 19 |
| SLFNL1 | schlafen like 1 | 171790 | 171793 | 010803 | 38, 42, 8 |
| STIL | SCL/TAL1 interrupting locus | 123473 | 162367 | 162368 | |
| SCYL3 | SCY1 like pseudokinase 3 | 000457 | 171806 | 075945 | 13, 24, 1 |
| SDE2 | SDE2 telomere maintenance homolog | 143751 | 143768 | 163041 | 34, 9, 4 |
| SEC16B | SEC16 homolog B, endoplasmic reticulum export factor | 120341 | 198797 | 075391 | 19, 26, 42 |
| SEC22B | SEC22 homolog B, vesicle trafficking protein (gene/pseudogene) | 265808 | 134250 | 273136 | 39, 20, 38 |
| SCAMP3 | secretory carrier membrane protein 3 | 116521 | 160767 | 176444 | 9, 16, 23 |
| SZT2 | seizure threshold 2 homolog (mouse) | 198198 | 159479 | 178922 | 18, 4, 33 |
| SELE | selectin E | 007908 | 188404 | 171806 | 42, 29, 44 |
| SELL | selectin L | 188404 | 000460 | 007908 | 5, 36, 30 |
| SELP | selectin P | 174175 | 198734 | 000460 | 42, 10, 18 |
| SELENBP1 | selenium binding protein 1 | 143416 | 143390 | 159377 | 16, 1, 36 |
| SELENOF | selenoprotein F | 183291 | 097033 | 153936 | 30, 29, 7 |
| SELENON | selenoprotein N | 162430 | 117643 | 255054 | 43, 35, 27 |
| SEMA4A | semaphorin 4A | 196189 | 160789 | 160785 | 24, 39, 40 |
| SEMA6C | semaphorin 6C | 143434 | 143458 | 163154 | |
| SRRM1 | serine and arginine repetitive matrix 1 | 133226 | 184454 | 169504 | 43, 22, 3 |
| SRSF10 | serine and arginine rich splicing factor 10 | 188529 | 189266 | 142661 | 30, 22, 29 |
| SRSF11 | serine and arginine rich splicing factor 11 | 116754 | 066557 | 118454 | 4, 12, 2 |
| SRSF4 | serine and arginine rich splicing factor 4 | 116350 | 253304 | 116353 | 21, 13, 11 |
| SERINC2 | serine incorporator 2 | 168528 | 121769 | 142910 | 23, 4, 32 |
| STK40 | serine/threonine kinase 40 | 196182 | 142694 | 181817 | 37, 22, 21 |
| SDCCAG8 | serologically defined colon cancer antigen 8 | 054282 | 143702 | 117020 | 11, 10, 40 |
| SERPINC1 | serpin family C member 1 | 117601 | 185278 | 135870 | 19, 36, 23 |
| SERBP1 | SERPINE1 mRNA binding protein 1 | 142864 | 081985 | 116717 | 11, 25, 29 |
| SERTAD4 | SERTA domain containing 4 | 082497 | 283619 | 054392 | 11, 37, 32 |
| SARS | seryl-tRNA synthetase | 031698 | 116299 | 143126 | 43, 21, 9 |
| SESN2 | sestrin 2 | 130766 | 130770 | 130772 | 21, 34, 14 |
| SMYD2 | SET and MYND domain containing 2 | 143499 | 117707 | 152104 | 10, 31, 22 |
| SMYD3 | SET and MYND domain containing 3 | 185420 | 162849 | 162851 | 10, 34, 26 |
| SETDB1 | SET domain bifurcated 1 | 143379 | 283324 | 143418 | 41, 1, 24 |
| SETSIP | SET-like protein | 230667 | 172031 | 189195 | |
| SCMH1 | sex comb on midleg homolog 1 (Drosophila) | 010803 | 171790 | 204060 | 26, 39, 38 |
| SFT2D2 | SFT2 domain containing 2 | 213064 | 143155 | 143178 | 39, 36, 38 |
| SH2D1B | SH2 domain containing 1B | 198574 | 171722 | 152332 | 36, 5, 30 |
| SH2D2A | SH2 domain containing 2A | 027869 | 143294 | 198400 | 5, 39, 37 |
| SH2D5 | SH2 domain containing 5 | 189410 | 117245 | 127483 | 22, 32, 3 |
| SH3BP5L | SH3 binding domain protein 5 like | 175137 | 259823 | 171161 | 39, 24, 38 |
| SH3BGRL3 | SH3 domain binding glutamate rich protein like 3 | 142669 | 130695 | 158062 | 30, 3, 43 |
| SH3D21 | SH3 domain containing 21 | 214193 | 054118 | 142694 | 37, 4, 30 |
| SH3GLB1 | SH3 domain containing GRB2 like endophilin B1 | 097033 | 016602 | 183291 | 1, 42, 38 |
| SGIP1 | SH3 domain GRB2 like endophilin interacting protein 1 | 118473 | 184588 | 152760 | |
| SHC1 | SHC adaptor protein 1 | 160691 | 163348 | 173207 | 24, 39, 42 |
| SHCBP1L | SHC binding and spindle associated 1 like | 157060 | 135829 | 135862 | 38, 8, |
| SHISA4 | shisa family member 4 | 198892 | 198700 | 163431 | 25, 2, 8 |
| SIPA1L2 | signal induced proliferation associated 1 like 2 | 116991 | 162946 | 212916 | 34, 43, 26 |
| SRP9 | signal recognition particle 9 | 143742 | 154380 | 143819 | |
| SSR2 | signal sequence receptor subunit 2 | 163479 | 116584 | 160803 | 13, 43, 27 |
| SLAMF1 | signaling lymphocytic activation molecule family member 1 | 117090 | 066294 | 117091 | 39, 22, 30 |
| SSBP3 | single stranded DNA binding protein 3 | 157216 | 116221 | 162390 | |
| SKI | SKI proto-oncogene | 157933 | 162585 | 116151 | 35, 22, 28 |
| SLAMF6 | SLAM family member 6 | 162739 | 162738 | 066294 | 36, 22, 5 |
| SLAMF7 | SLAM family member 7 | 026751 | 117091 | 122224 | 36, 5, 13 |
| SLAMF8 | SLAM family member 8 | 158714 | 181036 | 188004 | 1, 31, 20 |
| SLAMF9 | SLAM family member 9 | 162723 | 085552 | 177807 | 6, 5, 38 |
| SRGAP2 | SLIT-ROBO Rho GTPase activating protein 2 | 266028 | 196550 | 263528 | |
| SRGAP2B | SLIT-ROBO Rho GTPase activating protein 2B | 196369 | 279782 | 215784 | |
| SRGAP2C | SLIT-ROBO Rho GTPase activating protein 2C | 171943 | 188610 | 203818 | 11, 26, 14 |
| SNIP1 | Smad nuclear interacting protein 1 | 163877 | 163875 | 163879 | 43, 31, 36 |
| SMAP2 | small ArfGAP2 | 084070 | 049089 | 187801 | 41, 5, 39 |
| SMIM1 | small integral membrane protein 1 (Vel blood group) | 235169 | 162592 | 130764 | 17, 38, 7 |
| SMIM12 | small integral membrane protein 12 | 163866 | 142698 | 189280 | 8, |
| SNRPE | small nuclear ribonucleoprotein polypeptide E | 182004 | 257315 | 143842 | |
| SNRNP40 | small nuclear ribonucleoprotein U5 subunit 40 | 060688 | 084628 | 121766 | 21, 31, 12 |
| SPRR1A | small proline rich protein 1A | 169474 | 184148 | 163209 | 30, 18, 24 |
| SPRR1B | small proline rich protein 1B | 169469 | 163209 | 163216 | 30, 18, 24 |
| SPRR2A | small proline rich protein 2A | 241794 | 163216 | 196805 | 30, 24, 18 |
| SPRR2B | small proline rich protein 2B | 196805 | 241794 | 203785 | 30, 13, 10 |
| SPRR2D | small proline rich protein 2D | 163216 | 169469 | 241794 | 30, 10, 13 |
| SPRR2E | small proline rich protein 2E | 203785 | 196805 | 244094 | 30, 35, 18 |
| SPRR2F | small proline rich protein 2F | 244094 | 203785 | 159516 | 30, 27, 10 |
| SPRR2G | small proline rich protein 2G | 159516 | 244094 | 203784 | 30, 10, 24 |
| SPRR3 | small proline rich protein 3 | 163209 | 169474 | 169469 | 30, 24, 13 |
| SPRR4 | small proline rich protein 4 | 184148 | 283227 | 169474 | 30, 15, 33 |
| SVBP | small vasohibin binding protein | 177868 | 274386 | 164010 | |
| SMG5 | SMG5, nonsense mediated mRNA decay factor | 198952 | 160781 | 163472 | 33, 21, 12 |
| SMG7 | SMG7, nonsense mediated mRNA decay factor | 116698 | 157064 | 116701 | 22, 40, 9 |
| SNAPIN | SNAP associated protein | 143553 | 160679 | 143621 | 21, 41, 6 |
| SCNN1D | sodium channel epithelial 1 delta subunit | 162572 | 160087 | 131584 | 38, 28, 27 |
| SCNM1 | sodium channel modifier 1 | 163156 | 163154 | 163155 | 3, 6, 30 |
| NKAIN1 | Sodium/potassium transporting ATPase interacting 1 | 084628 | 134644 | 060688 | 26, 14, 4 |
| SLC1A7 | solute carrier family 1 member 7 | 162383 | 174348 | 157184 | 14, 42, 25 |
| SLC16A1 | solute carrier family 16 member 1 | 155380 | 184599 | 198799 | 38, 13, 45 |
| SLC16A4 | solute carrier family 16 member 4 | 168679 | 162775 | 134248 | 32, 45, 11 |
| SLC19A2 | solute carrier family 19 member 2 | 117479 | 117477 | 198734 | 1, 11, 45 |
| SLC2A1 | solute carrier family 2 member 1 | 117394 | 164011 | 186973 | 24, 13, 32 |
| SLC2A5 | solute carrier family 2 member 5 | 142583 | 197241 | 180758 | 38, 22, 21 |
| SLC2A7 | solute carrier family 2 member 7 | 197241 | 131686 | 142583 | 45, |
| SLC22A15 | solute carrier family 22 member 15 | 163393 | 177551 | 173212 | 26, 20, 4 |
| SLC25A24 | solute carrier family 25 member 24 | 085491 | 134215 | 196427 | 45, 42, 7 |
| SLC25A33 | solute carrier family 25 member 33 | 171612 | 171621 | 188807 | 3, 15, 17 |
| SLC25A34 | solute carrier family 25 member 34 | 162461 | 116786 | 162460 | 1, 25, 4 |
| SLC25A44 | solute carrier family 25 member 44 | 160785 | 196189 | 260238 | 8, 24, 29 |
| SLC26A9 | solute carrier family 26 member 9 | 174502 | 162877 | 276600 | 28, 30, 15 |
| SLC27A3 | solute carrier family 27 member 3 | 143554 | 279767 | 143614 | 1, 35, 5 |
| SLC30A1 | solute carrier family 30 member 1 | 170385 | 198570 | 117650 | 29, 26, 45 |
| SLC30A10 | solute carrier family 30 member 10 | 196660 | 215817 | 136628 | 38, 19, 8 |
| SLC30A2 | solute carrier family 30 member 2 | 158014 | 158008 | 158022 | 32, 17, 40 |
| SLC30A7 | solute carrier family 30 member 7 | 162695 | 162694 | 117543 | 45, 42, 32 |
| SLC35A3 | solute carrier family 35 member A3 | 117620 | 283495 | 156875 | 18, 45, 17 |
| SLC35D1 | solute carrier family 35 member D1 | 116704 | 198160 | 203963 | 39, 13, 6 |
| SLC35E2 | solute carrier family 35 member E2 | 215790 | 008128 | 008130 | |
| SLC35E2B | solute carrier family 35 member E2B | 189339 | 248333 | 008128 | 11, 31, 16 |
| SLC35F3 | solute carrier family 35 member F3 | 183780 | 135750 | 168275 | 29, 20, 28 |
| SLC39A1 | solute carrier family 39 member 1 | 143570 | 160741 | 143578 | 9, 13, 32 |
| SLC41A1 | solute carrier family 41 member 1 | 133065 | 117280 | 162877 | 40, 22, 33 |
| SLC44A3 | solute carrier family 44 member 3 | 143036 | 117525 | 117519 | 31, 37, 16 |
| SLC44A5 | solute carrier family 44 member 5 | 137968 | 162624 | 117054 | 24, 11, 38 |
| SLC45A1 | solute carrier family 45 member 1 | 162426 | 116285 | 142599 | 31, 14, 27 |
| SLC45A3 | solute carrier family 45 member 3 | 158715 | 158711 | 069275 | 33, 26, 36 |
| SLC5A9 | solute carrier family 5 member 9 | 117834 | 279096 | 132122 | 17, 38, 16 |
| SLC50A1 | solute carrier family 50 member 1 | 169241 | 169242 | 179085 | 34, 41, 28 |
| SLC6A17 | solute carrier family 6 member 17 | 197106 | 186150 | 116396 | 26, 31, 14 |
| SLC6A9 | solute carrier family 6 member 9 | 196517 | 159214 | 171872 | 44, 20, |
| SLC9A1 | solute carrier family 9 member A1 | 090020 | 280403 | 142784 | 40, 43, 42 |
| SLC9C2 | solute carrier family 9 member C2 (putative) | 162753 | 117592 | 183831 | 38, 27, 10 |
| SORT1 | sortilin 1 | 134243 | 221986 | 143106 | 29, 8, 26 |
| SNX7 | sorting nexin 7 | 162627 | 188641 | 117598 | 10, 4, 44 |
| SNX27 | sorting nexin family member 27 | 143376 | 143367 | 159409 | 1, 2, 16 |
| SPTA1 | spectrin alpha, erythrocytic 1 | 163554 | 198967 | 196171 | 7, 1, 19 |
| SPEN | spen family transcriptional repressor | 065526 | 233954 | 116809 | 22, 26, 6 |
| SPAG17 | sperm associated antigen 17 | 155761 | 065183 | 092607 | 42, 38, 20 |
| SMCP | sperm mitochondria associated cysteine rich protein | 163206 | 235942 | 163207 | 38, 26, 32 |
| STPG1 | sperm tail PG-rich repeat containing 1 | 001460 | 158055 | 001461 | |
| SPATA17 | spermatogenesis associated 17 | 162814 | 092978 | 067533 | 10, 29, 38 |
| SPATA21 | spermatogenesis associated 21 | 187144 | 055070 | 157191 | 38, 19, |
| SPATA45 | spermatogenesis associated 45 | 185523 | 203705 | 162769 | |
| SPATA6 | spermatogenesis associated 6 | 132122 | 117834 | 186094 | 38, 11, 12 |
| SRM | spermidine synthase | 116649 | 009724 | 171824 | 35, 34, 21 |
| SPHAR | S-phase response (cyclin related) | 213029 | 168118 | 154429 | |
| SMPDL3B | sphingomyelin phosphodiesterase acid like 3B | 130768 | 117748 | 158156 | 29, 4, 16 |
| S1PR1 | sphingosine-1-phosphate receptor 1 | 170989 | 117543 | 118733 | 45, 1, 22 |
| SPSB1 | splA/ryanodine receptor domain and SOCS box containing 1 | 171621 | 049239 | 171612 | 43, 35, 28 |
| SF3A3 | splicing factor 3a subunit 3 | 183431 | 204084 | 183386 | 21, 30, 31 |
| SF3B4 | splicing factor 3b subunit 4 | 143368 | 159164 | 014914 | 41, 21, 5 |
| SFPQ | splicing factor proline and glutamine rich | 116560 | 197056 | 146463 | 23, 44, 19 |
| SPOCD1 | SPOC domain containing 1 | 134668 | 121753 | 184007 | 34, 45, 38 |
| SPRTN | SprT-like N-terminal domain | 010072 | 116903 | 135766 | 38, 29, 42 |
| SHE | Src homology 2 domain containing E | 169291 | 160712 | 163239 | 1, 38, 40 |
| SOX13 | SRY-box 13 | 143842 | 182004 | 143845 | 35, 18, 42 |
| SSU72 | SSU72 homolog, RNA polymerase IICTD phosphatase | 160075 | 205090 | 279244 | 27, 22, 21 |
| SSX2IP | SSX family member 2 interacting protein | 117155 | 117151 | 171517 | 38, 6, 18 |
| ST3GAL3 | ST3 beta-galactoside alpha-2,3-sialyltransferase 3 | 126091 | 066135 | 117407 | 18, 21, 31 |
| ST6GALNAC3 | ST6 N-acetylgalactosaminide alpha-2,6-sialyltransferase 3 | 184005 | 154007 | 117069 | |
| ST6GALNAC5 | ST6 N-acetylgalactosaminide alpha-2,6-sialyltransferase 5 | 117069 | 184005 | 142892 | 4, 26, 8 |
| STMN1 | stathmin 1 | 117632 | 182749 | 158006 | 34, 39, 4 |
| SAMD11 | sterile alpha motif domain containing 11 | 187634 | 273547 | 188976 | 34, 14, 28 |
| SAMD13 | sterile alpha motif domain containing 13 | 203943 | 142875 | 137976 | 34, 31, 22 |
| SCP2 | sterol carrier protein 2 | 116171 | 121310 | 279054 | 4, 7, 34 |
| SOAT1 | sterol O-acyltransferase 1 | 057252 | 143322 | 162779 | 2, 42, 4 |
| SFN | stratifin | 175793 | 204160 | 142751 | 13, 18, 35 |
| STRIP1 | striatin interacting protein 1 | 143093 | 168710 | 156150 | 38, 24, 39 |
| SDF4 | stromal cell derived factor 4 | 078808 | 186827 | 176022 | 6, 34, 3 |
| STUM | stum, mechanosensory transduction mediator homolog | 203685 | 143799 | 143772 | 26, 8, 25 |
| SDHB | succinate dehydrogenase complex iron sulfur subunit B | 117118 | 159363 | 117115 | 41, 29, 35 |
| SDHC | succinate dehydrogenase complex subunit C | 143252 | 158887 | 188931 | 23, 27, 17 |
| SUCO | SUN domain containing ossification factor | 094975 | 180999 | 117560 | 11, 4, 28 |
| ST7L | suppression of tumorigenicity 7 like | 007341 | 134245 | 116489 | 38, 10, 5 |
| SIKE1 | suppressor of IKBKE1 | 052723 | 009307 | 198765 | 22, 26, 45 |
| SUSD4 | sushi domain containing 4 | 143502 | 187554 | 178395 | 24, 8, 28 |
| SZRD1 | SUZ RNA binding domain containing 1 | 055070 | 037637 | 187144 | 42, 24, 1 |
| SWT1 | SWT1, RNA endoribonuclease homolog | 116668 | 121486 | 116679 | 38, 25, 26 |
| SYF2 | SYF2 pre-mRNA splicing factor | 117614 | 020633 | 117616 | 2, 6, 5 |
| SYDE2 | synapse defective Rho GTPase homolog 2 | 097096 | 055732 | 162642 | 18, 40, 27 |
| SV2A | synaptic vesicle glycoprotein 2A | 159164 | 178096 | 143368 | 8, 34, 39 |
| SYCP1 | synaptonemal complex protein 1 | 198765 | 052723 | 134200 | 10, 38, |
| SYPL2 | synaptophysin like 2 | 143028 | 143106 | 162650 | 15, 2, 25 |
| SNAP47 | synaptosome associated protein 47 | 143740 | 181450 | 081692 | 9, 27, 14 |
| SYT11 | synaptotagmin 11 | 132718 | 116580 | 143622 | 8, 31, 26 |
| SYT14 | synaptotagmin 14 | 143469 | 117597 | 283619 | 21, 6, 38 |
| SYT2 | synaptotagmin 2 | 143858 | 077157 | 117139 | 18, 8, 2 |
| SYT6 | synaptotagmin 6 | 134207 | 116774 | 197323 | 28, 12, 8 |
| SYTL1 | synaptotagmin like 1 | 142765 | 186501 | 142733 | 39, 36, 13 |
| SYNC | syncoilin, intermediate filament protein | 162520 | 162521 | 162522 | 11, 45, 6 |
| SDC3 | syndecan 3 | 162512 | 162511 | 134644 | 43, 35, 26 |
| STX12 | syntaxin 12 | 117758 | 009780 | 117751 | 7, 29, 40 |
| STX6 | syntaxin 6 | 135823 | 135835 | 153029 | 11, 4, 39 |
| STXBP3 | syntaxin binding protein 3 | 116266 | 143107 | 162641 | 31, 4, 39 |
| TAL1 | TAL bHLH transcription factor 1, erythroid differentiation factor | 162367 | 162366 | 123473 | |
| TARBP1 | TAR (HIV-1) RNA binding protein 1 | 059588 | 168275 | 168264 | 2, 37, 44 |
| TARDBP | TAR DNA binding protein | 120948 | 175262 | 277726 | 39, 13, 45 |
| TOE1 | target of EGR1, member 1 (nuclear) | 132773 | 132781 | 070759 | 9, 40, 29 |
| TAS1R1 | taste 1 receptor member 1 | 173662 | 162408 | 204859 | 36, 6, 38 |
| TAS1R2 | taste 1 receptor member 2 | 179002 | 009709 | 255275 | |
| TAS1R3 | taste 1 receptor member 3 | 169962 | 224051 | 107404 | 31, 25, 33 |
| TAF12 | TATA-box binding protein associated factor 12 | 120656 | 180098 | 188060 | 4, 7, 10 |
| TAF13 | TATA-box binding protein associated factor 13 | 197780 | 085433 | 215717 | 23, 2, 30 |
| TAF5L | TATA-box binding protein associated factor 5 like | 135801 | 135776 | 135763 | 23, 11, 24 |
| TAF1A | TATA-box binding protein associated factor, RNA polymerase I subunit A | 143498 | 143512 | 154305 | 30, 22, 24 |
| TATDN3 | TatD DNase domain containing 3 | 203705 | 117697 | 185523 | 34, 7, 1 |
| TXLNA | taxilin alpha | 084652 | 025800 | 160050 | 18, 43, 35 |
| TBX15 | T-box 15 | 092607 | 155761 | 116874 | 26, 11, 10 |
| TBX19 | T-box 19 | 143178 | 213064 | 143185 | 31, 20, 2 |
| TCTEX1D1 | Tctex1 domain containing 1 | 152760 | 118473 | 172410 | 45, 20, 8 |
| TCTEX1D4 | Tctex1 domain containing 4 | 188396 | 173846 | 222009 | 20, 32, |
| TEKT2 | tektin 2 | 092850 | 126070 | 116863 | 42, 38, 30 |
| TNN | tenascin N | 120332 | 120333 | 235750 | 42, 14, 5 |
| TNR | tenascin R | 116147 | 235750 | 143207 | 8, 23, 19 |
| TEX35 | testis expressed 35 | 240021 | 188585 | 116191 | 38, 32, 25 |
| TEX38 | testis expressed 38 | 186118 | 123472 | 159658 | 38, 5, 8 |
| TSSK3 | testis specific serine kinase 3 | 162526 | 175130 | 225828 | 25, 12, |
| TESK2 | testis-specific kinase 2 | 070759 | 132773 | 280670 | 39, 38, 13 |
| TSPAN1 | tetraspanin 1 | 117472 | 278139 | 250719 | 30, 16, 33 |
| TSPAN2 | tetraspanin 2 | 134198 | 134200 | 134259 | 29, 44, 17 |
| TTC13 | tetratricopeptide repeat domain 13 | 143643 | 119280 | 173409 | 22, 28, 37 |
| TTC22 | tetratricopeptide repeat domain 22 | 006555 | 162396 | 162398 | 29, 13, 9 |
| TTC24 | tetratricopeptide repeat domain 24 | 187862 | 183856 | 163382 | 41, 39, 36 |
| TTC34 | tetratricopeptide repeat domain 34 | 215912 | 142606 | 169717 | |
| TTC39A | tetratricopeptide repeat domain 39A | 085831 | 123091 | 085832 | 38, 23, 16 |
| TTC4 | tetratricopeptide repeat domain 4 | 243725 | 271723 | 162396 | 43, 9, 13 |
| THAP3 | THAP domain containing 3 | 041988 | 116273 | 007923 | 21, 26, 38 |
| THEM4 | thioesterase superfamily member 4 | 159445 | 196407 | 197747 | 3, 31, 13 |
| THEM5 | thioesterase superfamily member 5 | 196407 | 225556 | 159445 | 35, 18, 24 |
| TXNDC12 | thioredoxin domain containing 12 | 117862 | 169213 | 198841 | 29, 6, 37 |
| TXNIP | thioredoxin interacting protein | 265972 | 121851 | 168509 | 39, 36, 42 |
| TSTD1 | thiosulfate sulfurtransferase like domain containing 1 | 215845 | 270149 | 158773 | 30, 23, 21 |
| TARS2 | threonyl-tRNA synthetase 2, mitochondrial (putative) | 143374 | 163125 | 143369 | 9, 23, 24 |
| THBS3 | thrombospondin 3 | 169231 | 279487 | 173171 | 37, 10, 38 |
| THEMIS2 | thymocyte selection associated family member 2 | 130775 | 278868 | 117748 | 36, 5, 7 |
| THRAP3 | thyroid hormone receptor associated protein 3 | 054118 | 116871 | 214193 | 30, 18, 7 |
| TSHB | thyroid stimulating hormone beta | 134200 | 198765 | 134198 | 31, 28, 10 |
| TM2D1 | TM2 domain containing 1 | 162604 | 162599 | 132849 | 1, 38, 40 |
| TMEM56- | TMEM56-RWDD3 readthrough | 271092 | 152078 | 122481 | |
| RWDD3 | | | | | |
| TRNP1 | TMF1-regulated nuclear protein 1 | 253368 | 175707 | 158246 | 37, 28, 33 |
| TNFAIP8L2 | TNF alpha induced protein 8 like 2 | 163154 | 143434 | 163156 | 30, 39, 2 |
| TRAF5 | TNF receptor associated factor 5 | 082512 | 117625 | 198570 | 29, 22, 9 |
| TNFRSF14 | TNF receptor superfamily member 14 | 157873 | 197921 | 157870 | 35, 34, 29 |
| TNFRSF18 | TNF receptor superfamily member 18 | 186891 | 162571 | 186827 | 13, 22, 37 |
| TNFRSF1B | TNF receptor superfamily member 1B | 028137 | 120949 | 048707 | 36, 28, 1 |
| TNFRSF25 | TNF receptor superfamily member 25 | 215788 | 187017 | 171680 | 3, 36, 9 |
| TNFRSF4 | TNF receptor superfamily member 4 | 186827 | 186891 | 078808 | 37, 5, 22 |
| TNFRSF8 | TNF receptor superfamily member 8 | 120949 | 116691 | 028137 | 34, 5, 44 |
| TNFRSF9 | TNF receptor superfamily member 9 | 049249 | 049247 | 116288 | 30, 5, 20 |
| TNNI3K | TNNI3 interacting kinase | 116783 | 259030 | 162621 | 10, 42, 15 |
| TLR5 | toll like receptor 5 | 187554 | 154309 | 143502 | 24, 23, 44 |
| TIPRL | TOR signaling pathway regulator | 143155 | 143147 | 213064 | 34, 18, 9 |
| TOR1AIP1 | torsin 1A interacting protein 1 | 143337 | 169905 | 135837 | 42, 4, 39 |
| TOR1AIP2 | torsin 1A interacting protein 2 | 169905 | 143340 | 143337 | |
| TOR3A | torsin family 3 member A | 186283 | 116199 | 143322 | 41, 21, 9 |
| TRABD2B | TraB domain containing 2B | 269113 | 186564 | 279096 | 17, 15, 44 |
| TRAF3IP3 | TRAF3 interacting protein 3 | 009790 | 117594 | 162757 | 39, 36, 5 |
| TRAPPC3 | trafficking protein particle complex 3 | 054116 | 171812 | 116871 | 18, 1, 34 |
| TCEANC2 | transcription elongation factor A N-terminal and central domain containing 2 | 116205 | 116209 | 256407 | 26, 37, 41 |
| TCEA3 | transcription elongation factor A3 | 204219 | 125945 | 088280 | 25, 26, 15 |
| TCEB3 | Transcription elongation factor B subunit 3 | 011007 | 142676 | 057757 | 3, 22, 41 |
| TFAP2E | transcription factor AP-2 epsilon | 116819 | 020129 | 126067 | 44, 8, |
| TFB2M | transcription factor B2, mitochondrial | 162851 | 185420 | 162852 | 3, 10, 7 |
| TTF2 | transcription termination factor 2 | 116830 | 134256 | 134253 | 23, 12, 1 |
| TADA1 | transcriptional adaptor 1 | 152382 | 143157 | 143195 | 7, 29, 9 |
| TGFB2 | transforming growth factor beta 2 | 092969 | 067533 | 143353 | 11, 23, 10 |
| TGFBR3 | transforming growth factor beta receptor 3 | 069702 | 097046 | 137948 | 11, 1, 31 |
| TAGLN2 | transgelin 2 | 158710 | 213085 | 085552 | 1, 41, 21 |
| TSNAX | translin associated factor X | 116918 | 135766 | 162946 | |
| TIMM17A | translocase of inner mitochondrial membrane 17 homolog A (yeast) | 134375 | 163431 | 176393 | 34, 7, 29 |
| TOMM20 | translocase of outer mitochondrial membrane 20 | 173726 | 279261 | 188739 | 42, 24, 8 |
| TOMM40L | translocase of outer mitochondrial membrane 40 like | 158882 | 158874 | 143257 | 34, 19, 35 |
| TPR | translocated promoter region, nuclear basket protein | 047410 | 116690 | 157181 | 18, 7, 37 |
| TMCC2 | transmembrane and coiled-coil domain family 2 | 133069 | 133059 | 163545 | 8, 42, 14 |
| TMCO1 | transmembrane and coiled-coil domains 1 | 143183 | 143149 | 143179 | |
| TMCO2 | transmembrane and coiled-coil domains 2 | 188800 | 117000 | 084073 | 38, 10, 32 |
| TMCO4 | transmembrane and coiled-coil domains 4 | 162542 | 158748 | 178828 | |
| TMIGD3 | transmembrane and immunoglobulin domain containing 3 | 121933 | 143110 | 282608 | |
| TEDDM1 | transmembrane epididymal protein 1 | 203730 | 135821 | 121446 | 38, |
| TMED5 | transmembrane p24 trafficking protein 5 | 117500 | 143033 | 122483 | 22, 42, 37 |
| TMEM125 | transmembrane protein 125 | 179178 | 243710 | 253313 | 16, 31, 2 |
| TMEM167B | transmembrane protein 167B | 215717 | 197780 | 179902 | 29, 24, 1 |
| TMEM183A | transmembrane protein 183A | 163444 | 159348 | 143847 | 34, 12, 22 |
| TMEM200B | transmembrane protein 200B | 253304 | 159023 | 116350 | 11, 15, 37 |
| TMEM201 | transmembrane protein 201 | 188807 | 171612 | 171608 | 28, 26, 27 |
| TMEM206 | transmembrane protein 206 | 065600 | 066027 | 117691 | 18, 22, 39 |
| TMEM222 | transmembrane protein 222 | 186501 | 142784 | 142765 | 34, 26, 11 |
| TMEM234 | transmembrane protein 234 | 160055 | 222046 | 084623 | 39, 36, 38 |
| TMEM240 | transmembrane protein 240 | 205090 | 197785 | 160075 | 33, 32, |
| TMEM35B | transmembrane protein 35B | 243749 | 271741 | 163867 | |
| TMEM39B | transmembrane protein 39B | 121775 | 121774 | 025800 | 43, 6, 3 |
| TMEM50A | transmembrane protein 50A | 183726 | 187010 | 188672 | 29, 2, 36 |
| TMEM51 | transmembrane protein 51 | 171729 | 189337 | 142621 | 29, 18, 37 |
| TMEM52 | transmembrane protein 52 | 178821 | 169885 | 142609 | 25, 3, 38 |
| TMEM53 | transmembrane protein 53 | 126106 | 187147 | 198520 | 30, 6, 38 |
| TMEM54 | transmembrane protein 54 | 121900 | 121905 | 116514 | 16, 32, 37 |
| TMEM56 | transmembrane protein 56 | 152078 | 172339 | 271092 | 4, 9, 42 |
| TMEM57 | transmembrane protein 57 | 204178 | 188672 | 157978 | 26, 3, 14 |
| TMEM59 | transmembrane protein 59 | 116209 | 203985 | 116205 | 13, 29, 31 |
| TMEM61 | transmembrane protein 61 | 143001 | 116133 | 162399 | 28, 31, 17 |
| TMEM63A | transmembrane protein 63A | 196187 | 143819 | 243709 | 16, 42, 1 |
| TMEM69 | transmembrane protein 69 | 159596 | 159592 | 197429 | 22, 34, 10 |
| TMEM78 | transmembrane protein 78 | 177800 | 116574 | 168118 | 38, |
| TMEM79 | transmembrane protein 79 | 163472 | 198952 | 198715 | 33, 24, 13 |
| TMEM81 | transmembrane protein 81 | 174529 | 184144 | 117222 | 29, 26, 28 |
| TMEM82 | transmembrane protein 82 | 162460 | 162461 | 162458 | 19, |
| TMEM88B | transmembrane protein 88B | 205116 | 235098 | 179403 | |
| TMEM9 | transmembrane protein 9 | 116857 | 232237 | 163395 | 9, 27, 14 |
| TCHH | trichohyalin | 159450 | 182898 | 215853 | 30, 32, 15 |
| TCHHL1 | trichohyalin like 1 | 182898 | 163191 | 159450 | |
| TRIM11 | tripartite motif containing 11 | 154370 | 154358 | 162931 | 1, 43, 21 |
| TRIM17 | tripartite motif containing 17 | 162931 | 154370 | 168148 | 36, 31, 38 |
| TRIM33 | tripartite motif containing 33 | 197323 | 134207 | 116752 | |
| TRIM45 | tripartite motif containing 45 | 134253 | 116830 | 134258 | |
| TRIM46 | tripartite motif containing 46 | 163462 | 273088 | 185499 | 8, 39, 31 |
| TRIM58 | tripartite motif containing 58 | 162722 | 197591 | 238243 | 34, 26, 18 |
| TRIM62 | tripartite motif containing 62 | 116525 | 142920 | 160094 | 26, 22, 32 |
| TRIM63 | tripartite motif containing 63 | 158022 | 158014 | 175087 | 15, 25, 35 |
| TRIM67 | tripartite motif containing 67 | 119283 | 182118 | 143633 | 8, 14, 35 |
| TRIT1 | tRNA isopentenyltransferase 1 | 043514 | 198754 | 116990 | 7, 4, 44 |
| TRMT1L | tRNA methyltransferase 1 like | 121486 | 121481 | 116668 | 42, 38, 36 |
| TRMT13 | tRNA methyltransferase 13 homolog | 122435 | 156876 | 122477 | 22, 26, 7 |
| TRNAU1AP | tRNA selenocysteine 1 associated protein 1 | 180098 | 180198 | 120656 | 21, 30, 11 |
| TSEN15 | tRNA splicing endonuclease subunit 15 | 198860 | 198756 | 116667 | 6, 43, 9 |
| TYW3 | tRNA-yW synthesizing protein 3 homolog | 162623 | 116791 | 162624 | 26, 31, 42 |
| TMOD4 | tropomodulin 4 | 163157 | 163155 | 163159 | 25, 15, 18 |
| TPM3 | tropomyosin 3 | 143549 | 143552 | 163263 | |
| TNNI1 | troponin 11, slow skeletal type | 159173 | 159166 | 174307 | 25, 15, 24 |
| TNNT2 | troponin T2, cardiac type | 118194 | 081277 | 159166 | 15, 18, 2 |
| TROVE2 | TROVE domain family member 2 | 116747 | 116750 | 023572 | 30, 11, 5 |
| WARS2 | tryptophanyl tRNA synthetase 2, mitochondrial | 116874 | 092607 | 116882 | 9, 45, 24 |
| TSNAX- | TSNAX-DISC1 readthrough (NMD candidate) | 270106 | 135766 | 162946 | |
| DISC1 | | | | | |
| TSACC | TSSK6 activating cochaperone | 163467 | 163468 | 132677 | 38, 10, 33 |
| TBCE | tubulin folding cofactor E | 116957 | 152904 | 162885 | 2, 1, 3 |
| TTLL10 | tubulin tyrosine ligase like 10 | 162571 | 131591 | 186891 | 38, 30, 25 |
| TTLL7 | tubulin tyrosine ligase like 7 | 137941 | 117114 | 142875 | 10, 38, 42 |
| TINAGL1 | tubulointerstitial nephritis antigen like 1 | 142910 | 168528 | 121764 | 32, 45, 1 |
| TDRKH | tudorand KH domain containing | 182134 | 143450 | 213171 | 38, 6, 8 |
| TDRD10 | tudor domain containing 10 | 163239 | 169291 | 160714 | 26, 38, 44 |
| TDRD5 | tudor domain containing 5 | 162782 | 116218 | 143340 | 38, 18, 20 |
| TUFT1 | tuftelin 1 | 143367 | 143375 | 143376 | 24, 18, 26 |
| TNFSF18 | tumor necrosis factor superfamily member 18 | 120337 | 117560 | 117586 | 45, 25, 8 |
| TNFSF4 | tumor necrosis factor superfamily member 4 | 117586 | 120337 | 117592 | 18, 7, 10 |
| TP53BP2 | tumor protein p53 binding protein 2 | 143514 | 162909 | 143756 | 8, 29, 5 |
| TPRG1L | tumor protein p63 regulated 1 like | 158109 | 162591 | 116213 | 15, 37, 35 |
| TP73 | tumor protein p73 | 078900 | 116213 | 162592 | 24, 42, 22 |
| TACSTD2 | tumor-associated calcium signal transducer 2 | 184292 | 162600 | 162601 | 27, 18, 30 |
| TIE1 | tyrosine kinase with immunoglobulin like and EGF like domains 1 | 066056 | 253313 | 117400 | 43, 45, 32 |
| YARS | tyrosyl-tRNA synthetase | 134684 | 162522 | 116497 | 21, 36, 3 |
| UHMK1 | U2AF homology motif kinase 1 | 152332 | 198574 | 117143 | 37, 22, 42 |
| UBIAD1 | UbiA prenyltransferase domain containing 1 | 120942 | 171819 | 204624 | 3, 14, 34 |
| UBQLN4 | ubiquilin 4 | 160803 | 163479 | 116586 | 21, 34, 9 |
| UQCRH | ubiquinol-cytochrome c reductase hinge protein | 173660 | 132128 | 117481 | 29, 3, 19 |
| UQCRHL | ubiquinol-cytochrome c reductase hinge protein like | 233954 | 162458 | 065526 | 29, 15, 14 |
| UBAP2L | ubiquitin associated protein 2 like | 143569 | 143612 | 143575 | |
| UBE2J2 | ubiquitin conjugating enzyme E2 J2 | 160087 | 184163 | 162572 | 27, 37, 41 |
| UBE2Q1 | ubiquitin conjugating enzyme E2 Q1 | 160714 | 163239 | 160716 | 14, 27, 6 |
| UBE2T | ubiquitin conjugating enzyme E2 T | 077152 | 133067 | 077157 | 34, 7, 4 |
| UBE2U | ubiquitin conjugating enzyme E2 U (putative) | 177414 | 185483 | 158966 | 38, 4, 32 |
| UCHL5 | ubiquitin C-terminal hydrolase L5 | 116750 | 116741 | 116747 | 14, 4, 7 |
| UBL4B | ubiquitin like 4B | 186150 | 156150 | 197106 | 38, 14, 8 |
| UBR4 | ubiquitin protein ligase E3 component n-recognin 4 | 127481 | 169991 | 127463 | 18, 43, 6 |
| USP1 | ubiquitin specific peptidase 1 | 162607 | 132854 | 116641 | 38, 4, 42 |
| USP21 | ubiquitin specific peptidase 21 | 143258 | 143222 | 143224 | 3, 30, 38 |
| USP24 | ubiquitin specific peptidase 24 | 162402 | 169174 | 162407 | 22, 6, 23 |
| USP33 | ubiquitin specific peptidase 33 | 077254 | 036549 | 180488 | 42, 11, 22 |
| USP48 | ubiquitin specific peptidase 48 | 090686 | 076864 | 187942 | 2, 10, 32 |
| UBE4B | ubiquitination factor E4B | 130939 | 162444 | 054523 | 29, 22, 11 |
| UFC1 | ubiquitin-fold modifier conjugating enzyme 1 | 143222 | 158796 | 143258 | 29, 30, 4 |
| UBXN10 | UBX domain protein 10 | 162543 | 187980 | 158816 | 42, 38, 23 |
| UBXN11 | UBX domain protein 11 | 158062 | 142669 | 169442 | 36, 39, 38 |
| GALE | UDP-galactose-4-epimerase | 117308 | 011009 | 117305 | 16, 35, 37 |
| UAP1 | UDP-N-acetylglucosamine pyrophosphorylase 1 | 117143 | 152332 | 162733 | 24, 10, 1 |
| USF1 | upstream transcription factor 1 | 158773 | 215845 | 186517 | 40, 5, 23 |
| URB2 | URB2 ribosome biogenesis 2 homolog (S. cerevisiae) | 135763 | 135801 | 143641 | 18, 21, 31 |
| UCK2 | uridine-cytidine kinase 2 | 143179 | 143183 | 188859 | 43, 3, 32 |
| UROD | uroporphyrinogen decarboxylase | 126088 | 126107 | 162415 | 29, 43, 40 |
| UTS2 | urotensin 2 | 049247 | 049246 | 049249 | 36, 7, 16 |
| USH2A | usherin | 042781 | 136636 | 196482 | 10, 14, 38 |
| UTP11 | UTP11, small subunit processome component homolog (S. cerevisiae) | 183520 | 183386 | 185668 | 30, 43, 25 |
| VPS13D | vacuolar protein sorting 13 homolog D | 048707 | 028137 | 162496 | 18, 40, 44 |
| VPS45 | vacuolar protein sorting 45 homolog | 136631 | 264522 | 023902 | 13, 29, 36 |
| VPS72 | vacuolar protein sorting 72 homolog | 163159 | 163157 | 143398 | 9, 23, 6 |
| VANGL1 | VANGL planar cell polarity protein 1 | 173218 | 134259 | 118729 | 2, 6, 15 |
| VANGL2 | VANGL planar cell polarity protein 2 | 162738 | 171786 | 162739 | 12, 14, 18 |
| VCAM1 | vascular cell adhesion molecule 1 | 162692 | 181656 | 162694 | 36, 10, 39 |
| VASH2 | vasohibin 2 | 143494 | 162769 | 174606 | 15, 11, 42 |
| VAV3 | vav guanine nucleotide exchange factor 3 | 134215 | 162631 | 085491 | 42, 24, 32 |
| VAMP3 | vesicle associated membrane protein 3 | 049245 | 171735 | 049246 | 45, 4, 13 |
| VAMP4 | vesicle associated membrane protein 4 | 117533 | 034971 | 010165 | 31, 25, 34 |
| MYCL | v-myc avian myelocytomatosis viral oncogene lung carcinoma derived homolog | 116990 | 043514 | 168389 | |
| VHLL | von Hippel-Lindau tumor suppressor like | 189030 | 198715 | 163468 | |
| VWA1 | von Willebrand factor A domain containing 1 | 179403 | 205116 | 215915 | 28, 33, 16 |
| VWA5B1 | von Willebrand factor A domain containing 5B1 | 158816 | 162543 | 162545 | 38, 8, 19 |
| VSIG8 | V-set and immunoglobulin domain containing 8 | 243284 | 188004 | 256029 | 2, 30, 40 |
| VTCN1 | V-set domain containing T cell activation inhibitor 1 | 134258 | 134253 | 198162 | 24, 27, 42 |
| WASF2 | WAS protein family member 2 | 158195 | 181773 | 126705 | 43, 9, 3 |
| WDTC1 | WD and tetratricopeptide repeats 1 | 142784 | 090020 | 186501 | |
| WRAP73 | WD repeat containing, antisense to TP73 | 116213 | 158109 | 078900 | 21, 1, 5 |
| WDR26 | WD repeat domain 26 | 162923 | 143771 | 143786 | 26, 11, 22 |
| WDR3 | WD repeat domain 3 | 065183 | 196505 | 155761 | 22, 4, 35 |
| WDR47 | WD repeat domain 47 | 085433 | 121940 | 197780 | 26, 8, 42 |
| WDR63 | WD repeat domain 63 | 162643 | 153898 | 055732 | 38, 30, 42 |
| WDR64 | WD repeat domain 64 | 162843 | 203668 | 174371 | 38, 40, 20 |
| WDR77 | WD repeat domain 77 | 116455 | 085465 | 116459 | 13, 41, 45 |
| WDR78 | WD repeat domain 78 | 152763 | 172410 | 198160 | 42, 10, 30 |
| WNT2B | Wnt family member 2B | 134245 | 143079 | 007341 | 38, 14, 32 |
| WNT3A | Wnt family member 3A | 154342 | 143816 | 143761 | 42, 32, 38 |
| WNT4 | Wnt family member 4 | 162552 | 070831 | 184677 | 20, 28, 12 |
| WNT9A | Wnt family member 9A | 143816 | 185888 | 154342 | 18, 20, 9 |
| WLS | wntless Wnt ligand secretion mediator | 116729 | 162595 | 116745 | 45, 42, 38 |
| XCL1 | X-C motif chemokine ligand 1 | 143184 | 143185 | 143196 | 5, 10, 20 |
| XCL2 | X-C motif chemokine ligand 2 | 143185 | 143178 | 143184 | 33, 22, 5 |
| XPR1 | xenotropic and polytropic retrovirus receptor 1 | 143324 | 230124 | 135835 | 13, 19, 11 |
| XKR8 | XK related 8 | 158156 | 130768 | 158161 | 34, 27, 7 |
| YBX1 | Y-box binding protein 1 | 065978 | 171960 | 164007 | 21, 12, 6 |
| YIPF1 | Yip1 domain family member 1 | 058799 | 058804 | 211452 | 31, 41, 5 |
| YOD1 | YOD1 deubiquitinase | 180667 | 123836 | 123843 | |
| YRDC | yrdC N6-threonylcarbamoyltransferase domain containing | 196449 | 185090 | 197982 | 21, 32, 37 |
| YTHDF2 | YTH N6-methyladenosine RNA binding protein 2 | 198492 | 162419 | 116329 | 38, 10, 45 |
| YY1AP1 | YY1 associated protein 1 | 163374 | 125459 | 132676 | 41, 21, 37 |
| ZFP69 | ZFP69 zinc finger protein | 187815 | 187801 | 164002 | 18, 15, 37 |
| ZFP69B | ZFP69 zinc finger protein B | 187801 | 084070 | 187815 | 41, 13, 17 |
| ZBTB17 | zinc finger and BTB domain containing 17 | 116809 | 065526 | 183888 | 36, 39, 1 |
| ZBTB18 | zinc finger and BTB domain containing 18 | 179456 | 117020 | 173728 | 8, 26, 14 |
| ZBTB37 | zinc finger and BTB domain containing 37 | 185278 | 117593 | 117601 | 31, 38, 30 |
| ZBTB40 | zinc finger and BTB domain containing 40 | 184677 | 162552 | 070886 | 24, 22, 29 |
| ZBTB41 | zinc finger and BTB domain containing 41 | 177888 | 066279 | 134376 | 18, 37, 31 |
| ZBTB48 | zinc finger and BTB domain containing 48 | 204859 | 173662 | 162413 | 41, 36, 38 |
| ZBTB7B | zinc finger and BTB domain containing 7B | 160685 | 163352 | 163354 | 42, 3, 33 |
| ZBTB80S | zinc finger and BTB domain containing 8 opposite strand | 176261 | 160062 | 162521 | 10, 1, 3 |
| ZBTB8A | zinc finger and BTB domain containing 8A | 160062 | 273274 | 176261 | 43, 26, 37 |
| ZBTB8B | zinc finger and BTB domain containing 8B | 273274 | 254553 | 160062 | 26, 32, 8 |
| ZSCAN20 | zinc finger and SCAN domain containing 20 | 121903 | 134686 | 121904 | 43, 42, 25 |
| ZBED6 | zinc finger BED-type containing 6 | 257315 | 058673 | 182004 | 15, 3, 5 |
| ZC3H11A | zinc finger CCCH-type containing 11A | 058673 | 122188 | 257315 | 29, 22, 40 |
| ZC3H11B | Zinc finger CCCH-type containing 11B pseudogene | 215817 | 143353 | 196660 | |
| ZC3H12A | zinc finger CCCH-type containing 12A | 163874 | 163873 | 163875 | 30, 36, 13 |
| ZCCHC11 | zinc finger CCHC-type containing 11 | 134744 | 134748 | 116157 | 13, 2, 35 |
| ZCCHC17 | zinc finger CCHC-type containing 17 | 121766 | 060688 | 121769 | 33, 3, 30 |
| ZDHHC18 | zinc finger DHHC-type containing 18 | 204160 | 060642 | 175793 | 5, 20, 34 |
| ZFYVE9 | zinc finger FYVE-type containing 9 | 157077 | 134717 | 154222 | 43, 40, 9 |
| ZNHIT6 | zinc finger HIT-type containing 6 | 117174 | 142871 | 171502 | 11, 9, 10 |
| ZMYM1 | zinc finger MYM-type containing 1 | 197056 | 163867 | 116560 | 30, 39, 29 |
| ZMYM4 | zinc finger MYM-type containing 4 | 146463 | 116560 | 142687 | 11, 1, 40 |
| ZMYM6 | zinc finger MYM-type containing 6 | 163867 | 243749 | 197056 | 31, 22, 30 |
| ZMYND12 | zinc finger MYND-type containing 12 | 066185 | 177181 | 127125 | 38, 30, 27 |
| ZNF124 | zinc finger protein 124 | 196418 | 188295 | 162714 | 24, 23, 14 |
| ZNF281 | zinc finger protein 281 | 162702 | 116833 | 118193 | 24, 12, 6 |
| ZNF326 | zinc finger protein 326 | 162664 | 171492 | 143032 | 22, 1, 6 |
| ZNF362 | zinc finger protein 362 | 160094 | 116525 | 184389 | 15, 23, 18 |
| ZNF436 | zinc finger protein 436 | 125945 | 125944 | 204219 | 1, 4, 24 |
| ZNF496 | zinc finger protein 496 | 162714 | 196418 | 162711 | 18, 39, 9 |
| ZNF593 | zinc finger protein 593 | 142684 | 236782 | 142675 | 41, 21, 32 |
| ZNF644 | zinc finger protein 644 | 122482 | 143032 | 162669 | 22, 7, 3 |
| ZNF648 | zinc finger protein 648 | 179930 | 198216 | 135821 | 42, 35, |
| ZNF669 | zinc finger protein 669 | 188295 | 277462 | 196418 | 18, 4, 45 |
| ZNF670 | zinc finger protein 670 | 277462 | 135747 | 188295 | 38, 4, 39 |
| ZNF672 | zinc finger protein 672 | 171161 | 175137 | 171163 | |
| ZNF678 | zinc finger protein 678 | 181450 | 143776 | 143740 | 16, 22, 36 |
| ZNF683 | zinc finger protein 683 | 176083 | 176092 | 131914 | 5, 38, 6 |
| ZNF684 | zinc finger protein 684 | 117010 | 164002 | 117016 | 7, 11, 31 |
| ZNF687 | zinc finger protein 687 | 143373 | 159352 | 143393 | 41, 43, 14 |
| ZNF691 | zinc finger protein 691 | 164011 | 164010 | 117394 | |
| ZNF692 | zinc finger protein 692 | 171163 | 171161 | 185220 | 24, 38, 36 |
| ZNF695 | zinc finger protein 695 | 197472 | 153207 | 277462 | 4, 7, 12 |
| ZNF697 | zinc finger protein 697 | 143067 | 203857 | 092621 | 35, 26, 2 |
| ZRANB2 | zinc finger RANBP2-type containing 2 | 132485 | 050628 | 172260 | 19, 45, 25 |
| ZSWIM5 | zinc finger SWIM-type containing 5 | 162415 | 126088 | 186603 | |
| ZZZ3 | zinc finger ZZ-type containing 3 | 036549 | 154027 | 077254 | 23, 24, 31 |
| ZMPSTE24 | zinc metallopeptidase STE24 | 084073 | 188800 | 049089 | 4, 42, 13 |
| ZNF670- | ZNF670-ZNF695 readthrough (NMD candidate) | 135747 | 153207 | 277462 | |
| ZNF695 | | | | | |
| ZP4 | zona pellucida glycoprotein 4 | 116996 | 198626 | 270188 | 19, 14, |
| ZYG11A | zyg-11 family member A, cell cycle regulator | 203995 | 162378 | 121310 | 17, 23, 44 |
| ZYG11B | zyg-11 family member B, cell cycle regulator | 162378 | 162377 | 203995 | 11, 25, 19 |

[0060] Table 2 provides the gene information for the genes found on Chromosomes 2 and 3.

TABLE 2
Genes on Chromosomes 2 and 3

| | | | | Up | Down | Tissue |
|---|---|---|---|---|---|---|
| Chr. | Gene Symbol | Gene Name | ENSG | ENSG | ENSG | Code |
| 2 | HAAO | 3-hydroxyanthranilate 3,4-dioxygenase | 162882 | 162881 | 152518 | 18, 26, 36 |
| 2 | HIBCH | 3-hydroxyisobutyryl-CoA hydrolase | 198130 | 138379 | 151689 | 17, 18, 31 |
| 2 | ATIC | 5-aminoimidazole-4-carboxamide ribonucleotide formyltransferase/IMP | 138363 | 144452 | 115414 | 21, 7, 3 |
| | | cyclohydrolase | | | | |
| 2 | HTR2B | 5-hydroxytryptamine receptor 2B | 135914 | 173692 | 135931 | 45, 17, 40 |
| 2 | NT5DC4 | 5′-nucleotidase domain containing 4 | 144130 | 144136 | 169607 | 18, 16, 8 |
| 2 | NT5C1B | 5′-nudeotidase, cytosolic IB | 185013 | 250741 | 143867 | 38, |
| 2 | ABHD1 | abhydrolase domain containing 1 | 143994 | 138028 | 138073 | 38, 14, 37 |
| 2 | ABI2 | abI interactor 2 | 138443 | 119004 | 173166 | 8, 31, 43 |
| 2 | ACP1 | acid phosphatase 1, soluble | 143727 | 035115 | 189292 | 29, 31, 32 |
| 2 | ASIC4 | acid sensing ion channel subunit family member 4 | 072182 | 144591 | 123989 | 8, 12, 32 |
| 2 | ADI1 | acireductone dioxygenase 1 | 182551 | 171853 | 255767 | 26, 6, 29 |
| 2 | ARPC2 | actin related protein 2/3 complex subunit 2 | 163466 | 163464 | 179921 | 41, 5, 35 |
| 2 | ACTG2 | actin, gamma 2, smooth muscle, enteric | 163017 | 124356 | 114956 | 43, 16, 33 |
| 2 | ATF2 | activating transcription factor 2 | 115966 | 128656 | 154518 | 25, 5, 8 |
| 2 | AHSA2 | activator of HSP90 ATPase homolog 2 | 173209 | 237651 | 115464 | 8, |
| 2 | ACVR1 | activin A receptor type 1 | 115170 | 123612 | 007001 | 15, 26, 11 |
| 2 | ACVR1C | activin A receptor type 1C | 123612 | 115165 | 115170 | 1, 37, 36 |
| 2 | ACVR2A | activin A receptor type 2A | 121989 | 169554 | 115947 | 29, 43, 24 |
| 2 | ACADL | acyl-CoA dehydrogenase, long chain | 115361 | 144445 | 279317 | 9, 17, 33 |
| 2 | ACOXL | acyl-CoA oxidase-like | 153093 | 169679 | 153094 | 28, 12, 33 |
| 2 | ACSL3 | acyl-CoA synthetase long-chain family member 3 | 123983 | 124003 | 152049 | 29, 33, 42 |
| 2 | ACYP2 | acylphosphatase 2 | 170634 | 068878 | 178021 | 10, 41, 1 |
| 2 | ADAM17 | ADAM metallopeptidase domain 17 | 151694 | 134330 | 134308 | 24, 44, 23 |
| 2 | ADAM23 | ADAM metallopeptidase domain 23 | 114948 | 279921 | 235118 | 13, 11, 29 |
| 2 | AP1S3 | adaptor related protein complex 1 sigma 3 subunit | 152056 | 171951 | 085449 | 41, 22, 21 |
| 2 | ASXL2 | additional sex combs like 2, transcriptional regulator | 143970 | 138101 | 084731 | 31, 24, 11 |
| 2 | ADD2 | adducin 2 | 075340 | 163235 | 183733 | 8, 14, 26 |
| 2 | ADCY3 | adenylate cyclase 3 | 138031 | 138092 | 115137 | 7, 27, 26 |
| 2 | ADGRF3 | adhesion G protein-coupled receptor F3 | 173567 | 138029 | 138018 | |
| 2 | ARL4C | ADP ribosylation factor like GTPase 4C | 188042 | 072080 | 130147 | |
| 2 | ARL5A | ADP ribosylation factor like GTPase 5A | 162980 | 183091 | 283228 | 34, 31, 17 |
| 2 | ARL6IP6 | ADP ribosylation factor like GTPase 6 interacting protein 6 | 177917 | 196504 | 177519 | 22, 26, 10 |
| 2 | ADRA2B | adrenoceptor alpha 2B | 274286 | 186281 | 188886 | 26, 17, 15 |
| 2 | AFF3 | AF4/FMR2 family member 3 | 144218 | 135945 | 170500 | 22, 8, 39 |
| 2 | AFTPH | aftiphilin | 119844 | 119862 | 279644 | 41, 30, 7 |
| 2 | AGXT | alanine-glyoxylate aminotransferase | 172482 | 130294 | 172478 | 19, 5, 17 |
| 2 | AOX1 | aldehyde oxidase 1 | 138356 | 163535 | 280298 | 2, 1, 19 |
| 2 | ALPI | alkaline phosphatase, intestinal | 163295 | 163286 | 171551 | 9, 16, 37 |
| 2 | ALPP | alkaline phosphatase, placental | 163283 | 144535 | 163286 | 32, 13, 15 |
| 2 | ALPPL2 | alkaline phosphatase, placental like 2 | 163286 | 163283 | 163295 | 3, 28, 44 |
| 2 | AGPS | alkylglycerone phosphate synthase | 018510 | 116044 | 196659 | 43, 26, 4 |
| 2 | ALLC | allantoicase | 151360 | 118004 | 214866 | 38, 17, 27 |
| 2 | ATRAID | all-trans retinoic acid induced differentiation factor | 138085 | 138074 | 084774 | 34, 31, 28 |
| 2 | ALMS1 | ALMS1, centrosome and basal body associated protein | 116127 | 135625 | 144035 | 4, 1, 3 |
| 2 | ALS2 | ALS2, alsin Rho guanine nucleotide exchange factor | 003393 | 082126 | 138395 | 13, 35, 22 |
| 2 | ACMSD | aminocarboxymuconate semialdehyde decarboxylase | 153086 | 152128 | 082258 | 17, 11, 19 |
| 2 | AMMECR1L | AMMECR1 like | 144233 | 144231 | 136715 | 40, 9, 37 |
| 2 | ALS2CR11 | amyotrophic lateral sclerosis 2 chromosome region candidate 11 | 155754 | 082146 | 155755 | 38, 26, 7 |
| 2 | ALS2CR12 | amyotrophic lateral sclerosis 2 chromosome region candidate 12 | 155749 | 064012 | 115993 | |
| 2 | ANAPC1 | anaphase promoting complex subunit 1 | 153107 | 153094 | 153208 | 11, 6, 40 |
| 2 | ALK | anaplastic lymphoma receptor tyrosine kinase | 171094 | 115295 | 119801 | 25, 37, 42 |
| 2 | AUP1 | ancient ubiquitous protein 1 | 115307 | 144045 | 115317 | 9, 5, 35 |
| 2 | AAMP | angio associated migratory cell protein | 127837 | 179921 | 127838 | 13, 37, 25 |
| 2 | ANKAR | ankyrin and armadillo repeat containing | 151687 | 138381 | 128694 | 38, 7, 36 |
| 2 | ANKMY1 | ankyrin repeat and MYND domain containing 1 | 144504 | 063660 | 188542 | |
| 2 | ASB1 | ankyrin repeat and SOCS box containing 1 | 065802 | 204104 | 233608 | 40, 18, 22 |
| 2 | ASB18 | ankyrin repeat and SOCS box containing 18 | 182177 | 168505 | 132321 | 24, |
| 2 | ASB3 | ankyrin repeat and SOCS box containing 3 | 115239 | 179915 | 270898 | 41, 13, 26 |
| 2 | ANKZF1 | ankyrin repeat and zinc finger domain containing 1 | 163516 | 198925 | 163521 | 39, 26, 24 |
| 2 | ANKRD23 | ankyrin repeat domain 23 | 163126 | 168763 | 213337 | 25, 7, 1 |
| 2 | ANKRD30BL | ankyrin repeat domain 30B like | 163046 | 163040 | 183840 | 38, 8, |
| 2 | ANKRD36 | ankyrin repeat domain 36 | 135976 | 144199 | 196912 | 19, 18, 1 |
| 2 | ANKRD36B | ankyrin repeat domain 36B | 196912 | 135976 | 135940 | 26, 19, 39 |
| 2 | ANKRD36C | ankyrin repeat domain 36C | 174501 | 144015 | 186281 | 10, 19, 29 |
| 2 | ANKRD39 | ankyrin repeat domain 39 | 213337 | 163126 | 168758 | 22, 6, 14 |
| 2 | ANKRD44 | ankyrin repeat domain 44 | 065413 | 197121 | 283224 | 22, 1, 39 |
| 2 | ANKRD53 | ankyrin repeat domain 53 | 144031 | 258881 | 144043 | 38, 32, 14 |
| 2 | ANXA4 | annexin A4 | 196975 | 115977 | 087338 | 4, 13, 37 |
| 2 | ANO7 | anoctamin 7 | 146205 | 115685 | 115677 | 33, 9, 3 |
| 2 | ANTXR1 | anthrax toxin receptor 1 | 169604 | 169605 | 198380 | 11, 1, 45 |
| 2 | AAK1 | AP2 associated kinase 1 | 115977 | 169599 | 196975 | 29, 40, 4 |
| 2 | AMER3 | APC membrane recruitment protein 3 | 178171 | 173302 | 136002 | 8, 14, 20 |
| 2 | APOB | apolipoprotein B | 084674 | 118961 | 218819 | 19, 36, 25 |
| 2 | APLF | aprataxin and PNKP like factor | 169621 | 204923 | 169618 | |
| 2 | AQP12A | aquaporin 12A | 184945 | 185176 | 130294 | |
| 2 | AQP12B | aquaporin 12B | 185176 | 178623 | 184945 | 28, 16, |
| 2 | AGFG1 | ArfGAP with FG repeats 1 | 173744 | 168955 | 042304 | 11, 4, 29 |
| 2 | AGAP1 | ArfGAP with GTPase domain, ankyrin repeat and PH domain 1 | 157985 | 130147 | 168505 | 26, 14, 23 |
| 2 | ASAP2 | ArfGAP with SH3 domain, ankyrin repeat and PH domain 2 | 151693 | 143797 | 119185 | 37, 24, 18 |
| 2 | RNPEPL1 | arginyl aminopeptidase like 1 | 142327 | 188542 | 142330 | 34, 3, 5 |
| 2 | ARMC9 | armadillo repeat containing 9 | 135931 | 135914 | 156966 | |
| 2 | ACTR1B | ARP1 actin-related protein 1 homolog B, centractin beta | 115073 | 135940 | 228486 | 9, 26, 3 |
| 2 | ACTR2 | ARP2 actin related protein 2 homolog | 138071 | 138069 | 198369 | 22, 25, 6 |
| 2 | ACTR3 | ARP3 actin related protein 3 homolog | 115091 | 115084 | 175497 | 45, 36, 13 |
| 2 | ASNSD1 | asparagine synthetase domain containing 1 | 138381 | 138449 | 151687 | 13, 11, 17 |
| 2 | ASPRV1 | aspartic peptidase, retroviral-like 1 | 244617 | 279229 | 169564 | 35, 4, 11 |
| 2 | DNPEP | aspartyl aminopeptidase | 123992 | 182698 | 175084 | 27, 3, 16 |
| 2 | DARS | aspartyl-tRNA synthetase | 115866 | 076003 | 121966 | 13, 1, 45 |
| 2 | ASTL | astacin like metalloendopeptidase | 188886 | 274286 | 158050 | 44, |
| 2 | ATL2 | atlastin GTPase 2 | 119787 | 138061 | 143889 | 13, 39, 42 |
| 2 | ATOH8 | atonal bHLH transcription factor 8 | 168874 | 115523 | 115525 | 3, 1, 45 |
| 2 | ABCA12 | ATP binding cassette subfamily A member 12 | 144452 | 138376 | 138363 | 24, 3, 20 |
| 2 | ABCB11 | ATP binding cassette subfamily B member 11 | 073734 | 152254 | 073737 | 42, 38, 19 |
| 2 | ABCB6 | ATP binding cassette subfamily B member 6 (Langereis blood group) | 115657 | 158552 | 198925 | 27, 7, 26 |
| 2 | ABCG5 | ATP binding cassette subfamily G member 5 | 138075 | 138036 | 143921 | 19, 37, 14 |
| 2 | ABCG8 | ATP binding cassette subfamily G member 8 | 143921 | 138075 | 138095 | 25, |
| 2 | ATP5G3 | ATP synthase, H+ transporting, mitochondrial Fo complex subunit C3 (subunit 9) | 154518 | 115966 | 144320 | 29, 11, 15 |
| 2 | AGBL5 | ATP/GTP binding protein like 5 | 084693 | 119777 | 228474 | 38, 9, 3 |
| 2 | ATAD2B | ATPase family, AAA domain containing 2B | 119778 | 119771 | 173960 | 39, 31, 32 |
| 2 | ATP6V1B1 | ATPase H+ transporting V1 subunit B1 | 116039 | 116035 | 258881 | 17, 23, 27 |
| 2 | ATP6V1C2 | ATPase H+ transporting V1 subunit C2 | 143882 | 115761 | 143870 | 11, 32, 40 |
| 2 | ATP6V1E2 | ATPase H+ transporting V1 subunit E2 | 250565 | 187600 | 119729 | 38, 9, 15 |
| 2 | ARID5A | AT-rich interaction domain 5A | 196843 | 163121 | 114982 | 26, 41, 5 |
| 2 | ACKR3 | atypical chemokine receptor 3 | 144476 | 132321 | 198612 | |
| 2 | ATG16L1 | autophagy related 16 like 1 | 085978 | 168918 | 130561 | 31, 34, 39 |
| 2 | ATG4B | autophagy related 4B cysteine peptidase | 168397 | 176946 | 168393 | 34, 38, 9 |
| 2 | ATG9A | autophagy related 9A | 198925 | 115657 | 163516 | 38, 8, 24 |
| 2 | BIRC6 | baculoviral IAP repeat containing 6 | 115760 | 119820 | 018699 | 10, 1, 23 |
| 2 | BBS5 | Bardet-Biedl syndrome 5 | 163093 | 081479 | 251569 | 38, 4, 2 |
| 2 | BZW1 | basic leucine zipper and W2 domains 1 | 082153 | 280298 | 013441 | 45, 4, 39 |
| 2 | BCL11A | B-cell CLL/lymphoma 11A | 119866 | 115392 | 115421 | 22, 29, 21 |
| 2 | BCL2L11 | BCL2 like 11 | 153094 | 153093 | 153107 | 22, 1, 26 |
| 2 | BCS1L | BCS1 homolog, ubiquinol-cytochrome c reductase complex chaperone | 074582 | 115568 | 163481 | |
| 2 | B3GALT1 | beta-1,3-galactosyltransferase 1 | 172318 | 163092 | 198648 | 10, |
| 2 | BOK | BOK, BCL2 family apoptosis regulator | 176720 | 115694 | 176946 | 1, 9, 28 |
| 2 | BOLA3 | bolA family member 3 | 163170 | 187605 | 114978 | 14, |
| 2 | BMP10 | bone morphogenetic protein 10 | 163217 | 163219 | 283586 | 3, |
| 2 | BMPR2 | bone morphogenetic protein receptor type 2 | 204217 | 055044 | 138439 | 45, 26, 16 |
| 2 | BOLL | boule homolog, RNA binding protein | 152430 | 247626 | 115896 | |
| 2 | BRE | brain and reproductive organ-expressed (TNFRSF1A modulator) | 158019 | 171174 | 075426 | |
| 2 | BARD1 | BRCA1 associated RING domain 1 | 138376 | 174453 | 144452 | 10, 22, 26 |
| 2 | BIN1 | bridging integrator 1 | 136717 | 237524 | 186684 | 34, 26, 25 |
| 2 | BAZ2B | bromodomain adjacent to zinc finger domain 2B | 123636 | 196151 | 136536 | 31, 24, 27 |
| 2 | BUB1 | BUB1 mitotic checkpoint serine/threonine kinase | 169679 | 183054 | 153093 | 39, 38, 7 |
| 2 | C1D | C1D nuclear receptor corepressor | 197223 | 143971 | 243667 | 34, 4, 7 |
| 2 | C1GALT1C1L | C1GALT1-specific chaperone 1 like | 223658 | 152527 | 138036 | 38, |
| 2 | CALCRL | calcitonin receptor like receptor | 064989 | 163012 | 003436 | 42, 45, 24 |
| 2 | CIB4 | calcium and integrin binding family member 4 | 157884 | 173557 | 171303 | 3, 38, 33 |
| 2 | CAB39 | calcium binding protein 39 | 135932 | 067066 | 135916 | 22, 40, 17 |
| 2 | CARF | calcium responsive transcription factor | 138380 | 138442 | 144426 | |
| 2 | CACNB4 | calcium voltage-gated channel auxiliary subunit beta 4 | 182389 | 283228 | 115145 | 8, 25, 22 |
| 2 | CALM2 | calmodulin 2 | 143933 | 273269 | 119888 | 4, 34, 31 |
| 2 | CAMKMT | calmodulin-lysine N-methyltransferase | 143919 | 138078 | 138083 | |
| 2 | CAPN10 | calpain 10 | 142330 | 142327 | 178623 | 21, 34, 39 |
| 2 | CAPN13 | calpain 13 | 162949 | 172954 | 158089 | 23, 24, 28 |
| 2 | CAPN14 | calpain 14 | 214711 | 158089 | 013016 | 24, 22, 30 |
| 2 | CREB1 | cAMP responsive element binding protein 1 | 118260 | 118263 | 144401 | 22, 4, 7 |
| 2 | CNRIP1 | cannabinoid receptor interacting protein 1 | 119865 | 221823 | 115956 | 26, 11, 14 |
| 2 | CLIP4 | CAP-Gly domain containing linker protein family member 4 | 115295 | 179270 | 171094 | 42, 31, 1 |
| 2 | CAPG | capping actin protein, gelsolin like | 042493 | 115459 | 152292 | 19, |
| 2 | CPS1 | carbamoyl-phosphate synthase 1 | 021826 | 115365 | 178568 | 19, 9, 36 |
| 2 | CAD | carbamoyl-phosphate synthetase 2, aspartate transcarbamylase, and | 084774 | 138085 | 115194 | 21, 7, 22 |
| | | dihydroorotase | | | | |
| 2 | CHST10 | carbohydrate sulfotransferase 10 | 115526 | 170500 | 204640 | 26, 40, 12 |
| 2 | CPO | carboxypeptidase O | 144410 | 118246 | 118263 | |
| 2 | CFLAR | CASP8 and FADD like apoptosis regulator | 003402 | 119013 | 003400 | 18, 21, 40 |
| 2 | CASP10 | caspase 10 | 003400 | 003402 | 064012 | 7, 26, 39 |
| 2 | CASP8 | caspase 8 | 064012 | 003400 | 155749 | 39, 30, 5 |
| 2 | CTNNA2 | catenin alpha 2 | 066032 | 172016 | 162951 | 8, 38, 26 |
| 2 | CCL20 | C-C motif chemokine ligand 20 | 115009 | 135917 | 123977 | 30, 16, 37 |
| 2 | CEBPZ | CCAAT/enhancer binding protein zeta | 115816 | 218739 | 003509 | 24, 38, 19 |
| 2 | CNOT11 | CCR4-NOT transcription complex subunit 11 | 158435 | 204634 | 163162 | 4, 7, 1 |
| 2 | CNOT9 | CCR4-NOT transcription complex subunit 9 | 144580 | 135913 | 115556 | |
| 2 | CD207 | CD207 molecule | 116031 | 152672 | 116035 | 4, 13, 40 |
| 2 | CD28 | CD28 molecule | 178562 | 173166 | 163599 | 1, 39, 30 |
| 2 | CD302 | CD302 molecule | 241399 | 136536 | 248672 | 42, 44, 7 |
| 2 | CD8A | CD8a molecule | 153563 | 153561 | 172116 | 39, 36, 5 |
| 2 | CD8B | CD8b molecule | 172116 | 153563 | 187627 | 39, 31, 27 |
| 2 | CLK1 | CDC like kinase 1 | 013441 | 082153 | 240344 | 39, 36, 42 |
| 2 | CDC42EP3 | CDC42 effector protein 3 | 163171 | 115828 | 115841 | |
| 2 | CEBPZOS | CEBPZ opposite strand | 218739 | 138068 | 115816 | 4, 7, 18 |
| 2 | CDCA7 | cell division cycle associated 7 | 144354 | 091436 | 172845 | 22, 4, 43 |
| 2 | CGREF1 | cell growth regulator with EF-hand domain 1 | 138028 | 138030 | 143994 | 3, 8, 14 |
| 2 | CREG2 | cellular repressor of E1A stimulated genes 2 | 175874 | 163162 | 196460 | 8, 6, 12 |
| 2 | CENPA | centromere protein A | 115163 | 213699 | 157851 | 9, 22, 6 |
| 2 | CENPO | centromere protein O | 138092 | 184924 | 138031 | 34, 26, 12 |
| 2 | CEP68 | centrosomal protein 68 | 011523 | 115902 | 138069 | 21, 1, 24 |
| 2 | CERKL | ceramide kinase like | 188452 | 115232 | 162992 | 15, 14, 27 |
| 2 | CERS6 | ceramide synthase 6 | 172292 | 198648 | 163072 | 40, 24, 16 |
| 2 | CHAC2 | ChaC cation transport regulator homolog 2 | 143942 | 270898 | 068912 | 34, 22, 4 |
| 2 | CCT4 | chaperonin containing TCP1 subunit 4 | 115484 | 170264 | 173163 | 13, 10, 29 |
| 2 | CCT7 | chaperonin containing TCP1 subunit 7 | 135624 | 135617 | 163013 | 13, 21, 9 |
| 2 | CHMP3 | charged multivesicular body protein 3 | 115561 | 115548 | 249884 | 26, 45, 4 |
| 2 | CHN1 | chimerin 1 | 128656 | 138435 | 115966 | 8, 30, 17 |
| 2 | CHRNA1 | cholinergic receptor nicotinic alpha 1 subunit | 138435 | 115935 | 128656 | |
| 2 | CHRND | cholinergic receptor nicotinic delta subunit | 135902 | 237412 | 196811 | 15, 25, 14 |
| 2 | CHRNG | cholinergic receptor nicotinic gamma subunit | 196811 | 135902 | 221944 | 24, |
| 2 | CHPF | chondroitin polymerizing factor | 123989 | 072182 | 188760 | 35, 18, 31 |
| 2 | C2orf15 | chromosome 2 open reading frame 15 | 273045 | 135951 | 144182 | 4, 40, 32 |
| 2 | C2orf16 | chromosome 2 open reading frame 16 | 221843 | 280034 | 243943 | 38, 16, 12 |
| 2 | C2orf40 | chromosome 2 open reading frame 40 | 119147 | 071051 | 115652 | 11, 10, 26 |
| 2 | C2orf42 | chromosome 2 open reading frame 42 | 115998 | 169564 | 116001 | 38, 36, 3 |
| 2 | C2orf49 | chromosome 2 open reading frame 49 | 135974 | 135966 | 115641 | 22, 26, 17 |
| 2 | C2orf50 | chromosome 2 open reading frame 50 | 150873 | 162975 | 162976 | 42, 38, 8 |
| 2 | C2orf54 | chromosome 2 open reading frame 54 | 172478 | 172482 | 226321 | 13, 24, 23 |
| 2 | C2orf57 | Chromosome 2 open reading frame 57 | 177673 | 171596 | 187514 | 38, 8, |
| 2 | C2orf61 | chromosome 2 open reading frame 61 | 239605 | 068724 | 273269 | 38, 39, 8 |
| 2 | C2orf66 | chromosome 2 open reading frame 66 | 187944 | 119041 | 197121 | 31, 2, 10 |
| 2 | C2orf68 | chromosome 2 open reading frame 68 | 168887 | 168883 | 168878 | 18, 30, 29 |
| 2 | C2orf69 | chromosome 2 open reading frame 69 | 178074 | 226124 | 162971 | 42, 43, 22 |
| 2 | C2orf70 | chromosome 2 open reading frame 70 | 173557 | 115155 | 157884 | 38, 16, 8 |
| 2 | C2orf71 | chromosome 2 open reading frame 71 | 179270 | 189350 | 115295 | |
| 2 | C2orf72 | chromosome 2 open reading frame 72 | 204128 | 173699 | 173692 | 26, 32, 19 |
| 2 | C2orf73 | chromosome 2 open reading frame 73 | 177994 | 178021 | 115306 | |
| 2 | C2orf74 | chromosome 2 open reading frame 74 | 237651 | 162929 | 173209 | 11, 27, 23 |
| 2 | C2orf76 | chromosome 2 open reading frame 76 | 186132 | 115107 | 155368 | 10, 22, 29 |
| 2 | C2orf78 | chromosome 2 open reading frame 78 | 187833 | 144048 | 124356 | 38, 25, |
| 2 | C2orf80 | chromosome 2 open reading frame 80 | 188674 | 168582 | 138413 | 8, 38, 10 |
| 2 | C2orf81 | chromosome 2 open reading frame 81 | 159239 | 204843 | 005448 | 17, 21, 38 |
| 2 | C2orf82 | chromosome 2 open reading frame 82 | 182600 | 115474 | 066248 | |
| 2 | C2orf83 | chromosome 2 open reading frame 83 | 042304 | 173744 | 135917 | 32, 8, |
| 2 | C2orf88 | chromosome 2 open reading frame 88 | 187699 | 064933 | 138379 | 38, 26, 44 |
| 2 | C2orf91 | chromosome 2 open reading frame 91 | 205086 | 183023 | 162878 | |
| 2 | CFAP221 | cilia and flagella associated protein 221 | 163075 | 080293 | 144120 | |
| 2 | CFAP36 | cilia and flagella associated protein 36 | 163001 | 115355 | 275052 | |
| 2 | CFAP65 | cilia and flagella associated protein 65 | 181378 | 163499 | 163501 | 26, 38, 42 |
| 2 | CROCC2 | ciliary rootlet coiled-coil, rootletin family member 2 | 226321 | 172478 | 162804 | |
| 2 | CATIP | ciliogenesis associated TTC17 interacting protein | 158428 | 135926 | 018280 | 32, 38, 12 |
| 2 | CLHC1 | clathrin heavy chain linker domain containing 1 | 162994 | 115310 | 143947 | 11, 26, 38 |
| 2 | CPSF3 | cleavage and polyadenylation specific factor 3 | 119203 | 119185 | 134330 | 10, 36, 1 |
| 2 | CBWD2 | COBW domain containing 2 | 136682 | 231292 | 184492 | |
| 2 | COQ10B | coenzyme Q10B | 115520 | 115524 | 144381 | 2, 43, 37 |
| 2 | CCDC115 | coiled-coil domain containing 115 | 136710 | 152086 | 136718 | 21, 41, 5 |
| 2 | CCDC121 | coiled-coil domain containing 121 | 176714 | 243943 | 198522 | 38, 22, 35 |
| 2 | CCDC138 | coiled-coil domain containing 138 | 163006 | 153201 | 135960 | |
| 2 | CCDC140 | coiled-coil domain containing 140 | 163081 | 135903 | 163082 | 25, |
| 2 | CCDC141 | coiled-coil domain containing 141 | 163492 | 283186 | 187231 | 2, 15, 14 |
| 2 | CCDC142 | coiled-coil domain containing 142 | 135637 | 204822 | 115282 | 24, 39, 36 |
| 2 | CCDC148 | coiled-coil domain containing 148 | 153237 | 007001 | 144283 | 10, 4, 42 |
| 2 | CCDC150 | coiled-coil domain containing 150 | 144395 | 138411 | 119041 | 16, 13, 12 |
| 2 | CCDC173 | coiled-coil domain containing 173 | 154479 | 138398 | 144362 | 38, 42, 10 |
| 2 | CCDC74A | coiled-coil domain containing 74A | 163040 | 075886 | 163046 | 43, 38, 21 |
| 2 | CCDC74B | coiled-coil domain containing 74B | 152076 | 196604 | 136699 | 38, 26, 31 |
| 2 | CCDC85A | coiled-coil domain containing 85A | 055813 | 115380 | 028116 | 10, 22, 7 |
| 2 | CCDC88A | coiled-coil domain containing 88A | 115355 | 085760 | 163001 | 22, 7, 26 |
| 2 | CCDC93 | coiled-coil domain containing 93 | 125633 | 088205 | 125629 | 18, 22, 41 |
| 2 | CHCHD5 | coiled-coil-helix-coiled-coil-helix domain containing 5 | 125611 | 125630 | 144136 | 29, 35, 41 |
| 2 | COL3A1 | collagen type III alpha 1 chain | 168542 | 174325 | 204262 | 11, 12, 43 |
| 2 | COL4A3 | collagen type IV alpha 3 chain | 169031 | 081052 | 168958 | 31, 14, 40 |
| 2 | COL4A4 | collagen type IV alpha 4 chain | 081052 | 144468 | 169031 | 31, 2, 17 |
| 2 | COL5A2 | collagen type V alpha 2 chain | 204262 | 168542 | 115368 | 12, 6, 11 |
| 2 | COL6A3 | collagen type VI alpha 3 chain | 163359 | 198612 | 115648 | 6, 1, 10 |
| 2 | COLEC11 | collectin subfamily member 11 | 118004 | 171863 | 151360 | 27, 8, 38 |
| 2 | C1QL2 | complement C1q like 2 | 144119 | 019169 | 115107 | 14, 8, 20 |
| 2 | CNTNAP5 | contactin associated protein like 5 | 155052 | 211460 | 136732 | 14, 8, 38 |
| 2 | COPS7B | COP9 signalosome subunit 7B | 144524 | 156973 | 163273 | 36, 39, 41 |
| 2 | COPS8 | COP9 signalosome subunit 8 | 198612 | 144476 | 163359 | 29, 30, 3 |
| 2 | COPS9 | COP9 signalosome subunit 9 | 172428 | 178586 | 178602 | |
| 2 | COMMD1 | copper metabolism domain containing 1 | 173163 | 115484 | 280544 | 10, 30, 15 |
| 2 | COBLL1 | cordon-bleu WH2 repeat protein like 1 | 082438 | 115290 | 169507 | 32, 22, 24 |
| 2 | CIR1 | corepressor interacting with RBPJ, 1 | 138433 | 217236 | 144306 | 11, 29, 6 |
| 2 | CFC1 | cripto, FRL-1, cryptic family 1 | 136698 | 183292 | 222038 | 28, 8, 20 |
| 2 | CFC1B | cripto, FRL-1, cryptic family 1B | 152093 | 196834 | 184761 | 20, 28, 14 |
| 2 | CRYBA2 | crystallin beta A2 | 163499 | 163497 | 181378 | 14, 28, 31 |
| 2 | CRYGA | crystallin gamma A | 168582 | 182187 | 188674 | 14, 10, |
| 2 | CRYGB | crystallin gamma B | 182187 | 163254 | 168582 | 14, |
| 2 | CRYGC | crystallin gamma C | 163254 | 118231 | 182187 | 14, 10, 38 |
| 2 | CRYGD | crystallin gamma D | 118231 | 178385 | 163254 | 14, 27, 12 |
| 2 | CTDSP1 | CTD small phosphatase 1 | 144579 | 018280 | 127831 | 34, 41, 9 |
| 2 | CLEC4F | C-type lectin domain family 4 member F | 152672 | 183733 | 116031 | 24, 30, 14 |
| 2 | CUL3 | cullin 3 | 036257 | 124019 | 283428 | 29, 30, 22 |
| 2 | CWC22 | CWC22 spliceosome associated protein homolog | 163510 | 144331 | 170035 | 4, 1, 30 |
| 2 | CXCR1 | C-X-C motif chemokine receptor 1 | 163464 | 180871 | 163466 | 5, 36, 39 |
| 2 | CXCR2 | C-X-C motif chemokine receptor 2 | 180871 | 188282 | 163464 | 5, 36, 2 |
| 2 | CXCR4 | C-X-C motif chemokine receptor 4 | 121966 | 115866 | 144229 | 2, 5, 36 |
| 2 | CRIPT | CXXC repeat containing interactor of PDZ3 domain | 119878 | 151665 | 171150 | 4, 34, 7 |
| 2 | CNGA3 | cyclic nucleotide gated channel alpha 3 | 144191 | 168658 | 040933 | 31, 14, 8 |
| 2 | CNNM3 | cyclin and CBS domain divalent metal cation transport mediator 3 | 168763 | 158158 | 163126 | 21, 14, 28 |
| 2 | CNNM4 | cyclin and CBS domain divalent metal cation transport mediator 4 | 158158 | 114988 | 168763 | 9, 22, 31 |
| 2 | CDK15 | cyclin dependent kinase 15 | 138395 | 003393 | 155760 | 1, 35, 38 |
| 2 | CDK5R2 | cyclin dependent kinase 5 regulatory subunit 2 | 171450 | 135925 | 163497 | 28, 2, 8 |
| 2 | CDKL4 | cyclin dependent kinase like 4 | 205111 | 115904 | 011566 | 38, 20, |
| 2 | CNPPD1 | cyclin Pas1/PHO80 domain containing 1 | 115649 | 213901 | 144567 | 29, 41, 27 |
| 2 | CCNT2 | cyclin T2 | 082258 | 153086 | 176601 | 42, 22, 30 |
| 2 | CCNYL1 | cyclin Y like 1 | 163249 | 144401 | 163251 | 26, 13, 29 |
| 2 | CSRNP3 | cysteine and serine rich nuclear protein 3 | 178662 | 136531 | 115339 | 11, 8, 1 |
| 2 | CRIM1 | cysteine rich transmembrane BMP regulator 1 | 150938 | 119812 | 171055 | 45, 31, 32 |
| 2 | CYS1 | cystin 1 | 205795 | 172059 | 171848 | 17, 44, 14 |
| 2 | CMPK2 | cytidine/uridine monophosphate kinase 2 | 134326 | 176887 | 134321 | 7, 34, 4 |
| 2 | CYBRD1 | cytochrome b reductase 1 | 071967 | 115827 | 077380 | 42, 1, 44 |
| 2 | COA5 | cytochrome c oxidase assembly factor 5 | 183513 | 040933 | 115446 | 17, 15, 11 |
| 2 | COX5B | cytochrome c oxidase subunit 5B | 135940 | 196912 | 115073 | 19, 25, 43 |
| 2 | COX7A2L | cytochrome c oxidase subunit 7A2 like | 115944 | 143924 | 171126 | |
| 2 | CYP1B1 | cytochrome P450 family 1 subfamily B member 1 | 138061 | 115841 | 119787 | |
| 2 | CYP20A1 | cytochrome P450 family 20 subfamily A member 1 | 119004 | 144426 | 138443 | 29, 2, 40 |
| 2 | CYP26B1 | cytochrome P450 family 26 subfamily B member 1 | 003137 | 135636 | 144036 | 1, 39, 2 |
| 2 | CYP27A1 | cytochrome P450 family 27 subfamily A member 1 | 135929 | 135912 | 115592 | 5, 19, 35 |
| 2 | CYP27C1 | cytochrome P450 family 27 subfamily C member 1 | 186684 | 136717 | 163161 | 24, 10, 44 |
| 2 | CYTIP | cytohesin 1 interacting protein | 115165 | 136541 | 123612 | 30, 22, 5 |
| 2 | CLASP1 | cytoplasmic linker associated protein 1 | 074054 | 115112 | 155438 | 23, 39, 18 |
| 2 | CKAP2L | cytoskeleton associated protein 2 like | 169607 | 144130 | 115008 | 22, 26, 39 |
| 2 | CIAO1 | cytosolic iron-sulfur assembly component 1 | 144021 | 135956 | 144028 | 35, 23, 3 |
| 2 | CTLA4 | cytotoxic T-lymphocyte associated protein 4 | 163599 | 178562 | 163600 | 22, 5, 33 |
| 2 | D2HGDH | D-2-hydroxyglutarate dehydrogenase | 180902 | 168395 | 154252 | |
| 2 | DCAF17 | DDB1 and CUL4 associated factor 17 | 115827 | 123600 | 071967 | 25, 39, 34 |
| 2 | DDX1 | DEAD-box helicase 1 | 079785 | 151779 | 134323 | 14, 40, 8 |
| 2 | DDX18 | DEAD-box helicase 18 | 088205 | 175497 | 125633 | 42, 22, 40 |
| 2 | DFNB59 | deafness, autosomal recessive 59 | 204311 | 180228 | 079150 | 40, 22, 38 |
| 2 | DQX1 | DEAQ-box RNA dependent ATPase 1 | 144045 | 115297 | 115307 | 18, 3, 13 |
| 2 | DAPL1 | death associated protein like 1 | 163331 | 281472 | 115183 | 14, 40, 15 |
| 2 | DOCK10 | dedicater of cytokinesis 10 | 135905 | 283428 | 144460 | 18, 1, 36 |
| 2 | DHRS9 | dehydrogenase/reductase 9 | 073737 | 073734 | 081479 | 42, 30, 22 |
| 2 | DNER | delta/notch like EGF repeat containing | 187957 | 153823 | 153827 | 11, 31, 8 |
| 2 | DGUOK | deoxyguanosine kinase | 114956 | 163017 | 187605 | 30, 29, 15 |
| 2 | DTYMK | deoxythymidylate kinase | 168393 | 168397 | 168395 | 22, 25, 9 |
| 2 | DES | desmin | 175084 | 123992 | 072195 | 15, 18, 25 |
| 2 | DHX57 | DExH-box helicase 57 | 163214 | 152147 | 188010 | 43, 26, 31 |
| 2 | DGKD | diacylglycerol kinase delta | 077044 | 130561 | 085982 | 22, 21, 1 |
| 2 | DBI | diazepam binding inhibitor, acyl-CoA binding protein | 155368 | 186132 | 171227 | 29, 33, 19 |
| 2 | DPYSL5 | dihydropyrimidinase like 5 | 157851 | 115163 | 084764 | 8, 14, 12 |
| 2 | DPP4 | dipeptidyl peptidase 4 | 197635 | 144290 | 115263 | 29, 32, 1 |
| 2 | DPP10 | dipeptidyl peptidase like 10 | 175497 | 115091 | 088205 | 8, 4, 2 |
| 2 | DIS3L2 | DIS3 like 3′-5′ exoribonuclease 2 | 144535 | 163273 | 163283 | 26, 1, 7 |
| 2 | DIRC1 | disrupted in renal carcinoma 1 | 174325 | 144366 | 168542 | 10, |
| 2 | DIRC3 | Disrupted in renal carcinoma 3 | 231672 | 278951 | 079308 | 6, 45, 38 |
| 2 | DLX1 | distal-less homeobox 1 | 144355 | 172878 | 115844 | 6, 24, 8 |
| 2 | DLX2 | distal-less homeobox 2 | 115844 | 144355 | 091409 | 30, 5, 40 |
| 2 | DNMT3A | DNA methyltransferase 3 alpha | 119772 | 115138 | 138101 | 18, 16, 12 |
| 2 | POLE4 | DNA polymerase epsilon 4, accessory subunit | 115350 | 159399 | 115353 | 2, 35, 14 |
| 2 | DNAJB2 | DnaJ heat shock protein family (Hsp40) member B2 | 135924 | 243910 | 054356 | 26, 40, 31 |
| 2 | DNAJC10 | DnaJ heat shock protein family (Hsp40) member C10 | 077232 | 115252 | 162998 | 22, 43, 13 |
| 2 | DNAJC27 | DnaJ heat shock protein family (Hsp40) member C27 | 115137 | 138031 | 084710 | 14, 38, 28 |
| 2 | DNAJC5G | DnaJ heat shock protein family (Hsp40) member C5 gamma | 163793 | 115194 | 138100 | 38, 12, 8 |
| 2 | DOK1 | docking protein 1 | 115325 | 115318 | 159374 | |
| 2 | DCDC2C | doublecortin domain containing 2C | 214866 | 151360 | 176887 | |
| 2 | DPY30 | dpy-30, histone methyltransferase complex regulatory subunit | 162961 | 162959 | 021574 | 29, 4, 11 |
| 2 | DUSP11 | dual specificity phosphatase 11 | 144048 | 144034 | 187833 | 13, 30, 7 |
| 2 | DUSP19 | dual specificity phosphatase 19 | 162999 | 061676 | 163002 | 29, 38, 6 |
| 2 | DUSP2 | dual specificity phosphatase 2 | 158050 | 188886 | 084090 | 9, 5, 26 |
| 2 | DUSP28 | dual specificity phosphatase 28 | 188542 | 144504 | 142327 | 28, 38, 27 |
| 2 | DCTN1 | dynactin subunit 1 | 204843 | 188687 | 159239 | |
| 2 | DAW1 | dynein assembly factor with WD repeats 1 | 123977 | 115009 | 153820 | 38, 30, 45 |
| 2 | DNAH6 | dynein axonemal heavy chain 6 | 115423 | 163541 | 186854 | 31, 42, 6 |
| 2 | DNAH7 | dynein axonemal heavy chain 7 | 118997 | 196950 | 081320 | 31, 10, 38 |
| 2 | DYNC1I2 | dynein cytoplasmic 1 intermediate chain 2 | 077380 | 071967 | 115840 | 45, 8, 13 |
| 2 | DYNC2LI1 | dynein cytoplasmic 2 light intermediate chain 1 | 138036 | 223658 | 138075 | 4, 43, 17 |
| 2 | DRC1 | dynein regulatory complex subunit 1 | 157856 | 138018 | 115155 | 38, 42, 27 |
| 2 | DYSF | dysferlin | 135636 | 075292 | 003137 | 43, 5, 36 |
| 2 | DTNB | dystrobrevin beta | 138101 | 119772 | 143970 | 9, 26, 18 |
| 2 | DYTN | dystrotelin | 232125 | 235118 | 138400 | 38, |
| 2 | E2F6 | E2F transcription factor 6 | 169016 | 134318 | 196208 | 29, 31, 2 |
| 2 | EGR4 | early growth response 4 | 135625 | 163013 | 116127 | 20, 38, 32 |
| 2 | EML4 | echinoderm microtubule associated protein like 4 | 143924 | 162878 | 115944 | 26, 3, 23 |
| 2 | EML6 | echinoderm microtubule associated protein like 6 | 214595 | 115306 | 115310 | |
| 2 | EDAR | ectodysplasin A receptor | 135960 | 163006 | 172985 | 24, 15, 33 |
| 2 | EFHD1 | EF-hand domain family member D1 | 115468 | 135930 | 204120 | |
| 2 | EFR3B | EFR3 homolog B | 084710 | 115137 | 115138 | 29, 15, 28 |
| 2 | EFEMP1 | EGF containing fibulin like extracellular matrix protein 1 | 115380 | 138035 | 055813 | 1, 45, 40 |
| 2 | EHBP1 | EH domain binding protein 1 | 115504 | 186889 | 115507 | 1, 31, 38 |
| 2 | EHD3 | EH domain containing 3 | 013016 | 214711 | 158125 | 22, 17, 31 |
| 2 | EMILIN1 | elastin microfibril interfacer 1 | 138080 | 228474 | 138030 | 6, 1, 34 |
| 2 | ELMOD3 | ELMO domain containing 3 | 115459 | 042445 | 042493 | 1, 34, 22 |
| 2 | EMX1 | empty spiracles homeobox 1 | 135638 | 116096 | 144040 | 17, 8, 23 |
| 2 | ERLEC1 | endoplasmic reticulum lectin 1 | 068912 | 143942 | 119737 | 25, 43, 40 |
| 2 | EPAS1 | endothelial PAS domain protein 1 | 116016 | 171132 | 187600 | 42, 32, 29 |
| 2 | ECEL1 | endothelin converting enzyme like 1 | 171551 | 163295 | 237412 | 41, 31, 26 |
| 2 | EN1 | engrailed homeobox 1 | 163064 | 125629 | 019169 | 6, 32, 20 |
| 2 | EPC2 | enhancer of polycomb homolog 2 | 135999 | 204406 | 168280 | 32, 15, 2 |
| 2 | EPHA4 | EPH receptor A4 | 116106 | 114923 | 135903 | 40, 24, 8 |
| 2 | EPCAM | epithelial cell adhesion molecule | 119888 | 143933 | 095002 | 16, 37, 29 |
| 2 | ERBB4 | erb-b2 receptor tyrosine kinase 4 | 178568 | 021826 | 030419 | 29, 42, 25 |
| 2 | ERCC3 | ERCC excision repair 3, TFIIH core complex helicase subunit | 163161 | 186684 | 169967 | 1, 39, 3 |
| 2 | ERMN | ermin | 136541 | 136542 | 115165 | 8, 17, 22 |
| 2 | EPB41L5 | erythrocyte membrane protein band 4.1 like 5 | 115109 | 088179 | 226479 | 38, 17, 12 |
| 2 | ERFE | erythroferrone | 178752 | 168427 | 132323 | 38, 28, 6 |
| 2 | ESPNL | espin-like | 144488 | 132330 | 168427 | 31, 21, 32 |
| 2 | EEF1B2 | eukaryotic translation elongation factor 1 beta 2 | 114942 | 023228 | 183671 | 41, 43, 34 |
| 2 | EIF2AK2 | eukaryotic translation initiation factor 2 alpha kinase 2 | 055332 | 152133 | 138068 | 37, 16, 11 |
| 2 | EIF2AK3 | eukaryotic translation initiation factor 2 alpha kinase 3 | 172071 | 172073 | 153574 | 22, 42, 4 |
| 2 | EIF2B4 | eukaryotic translation initiation factor 2B subunit delta | 115211 | 115207 | 115234 | 14, 21, 25 |
| 2 | EIF4E2 | eukaryotic translation initiation factor 4E family member 2 | 135930 | 221944 | 115468 | 4, 3, 25 |
| 2 | EIF5B | eukaryotic translation initiation factor 5B | 158417 | 115514 | 135945 | 27, 5, 7 |
| 2 | EVA1A | eva-1 homolog A, regulator of programmed cell death | 115363 | 115353 | 115364 | 45, 17, 19 |
| 2 | EVX2 | even-skipped homeobox 2 | 174279 | 144320 | 128714 | 27, |
| 2 | ETAA1 | Ewing tumor associated antigen 1 | 143971 | 143995 | 197223 | 1, 22, 20 |
| 2 | EXOC6B | exocyst complex component 6B | 144036 | 003137 | 116096 | 32, 18, 26 |
| 2 | XPO1 | exportin 1 | 082898 | 115464 | 170264 | 13, 42, 12 |
| 2 | FAM110C | family with sequence similarity 110 member C | 184731 | 115738 | 035115 | 40, 45, 5 |
| 2 | FAM117B | family with sequence similarity 117 member B | 138439 | 204217 | 163596 | 18, 1, 27 |
| 2 | FAM124B | family with sequence similarity 124 member B | 124019 | 135919 | 036257 | 45, 43, 25 |
| 2 | FAM126B | family with sequence similarity 126 member B | 155744 | 115942 | 119013 | 11, 39, 32 |
| 2 | FAM134A | family with sequence similarity 134 member A | 144567 | 115649 | 158552 | 38, 1, 6 |
| 2 | FAM136A | family with sequence similarity 136 member A | 035141 | 143977 | 163235 | 3, 30, 13 |
| 2 | FAM150B | family with sequence similarity 150 member B | 189292 | 143727 | 151353 | 31, 45, 28 |
| 2 | FAM161A | family with sequence similarity 161 member A | 170264 | 082898 | 115484 | 14, 38, 2 |
| 2 | FAM168B | family with sequence similarity 168 member B | 152102 | 136002 | 115762 | 34, 26, 29 |
| 2 | FAM171B | family with sequence similarity 171 member B | 144369 | 138448 | 163012 | 11, 31, 4 |
| 2 | FAM178B | family with sequence similarity 178 member B | 168754 | 168758 | 144199 | 7, 36, 38 |
| 2 | FAM179A | family with sequence similarity 179 member A | 189350 | 163811 | 179270 | 40, 15, 28 |
| 2 | FAM228A | family with sequence similarity 228 member A | 186453 | 276087 | 198399 | |
| 2 | FAM228B | family with sequence similarity 228 member B | 219626 | 115128 | 115129 | |
| 2 | FAM49A | family with sequence similarity 49 member A | 197872 | 134323 | 214842 | 8, 22, 1 |
| 2 | FAM84A | family with sequence similarity 84 member A | 162981 | 071575 | 151779 | |
| 2 | FAM98A | family with sequence similarity 98 member A | 119812 | 152689 | 150938 | 7, 17, 3 |
| 2 | FANCL | Fanconi anemia complementation group L | 115392 | 028116 | 119866 | 11, 16, 22 |
| 2 | FEZ2 | fasciculation and elongation protein zeta 2 | 171055 | 150938 | 205221 | 25, 18, 7 |
| 2 | FASTKD1 | FAST kinase domains 1 | 138399 | 239474 | 138398 | 24, 2, 45 |
| 2 | FASTKD2 | FAST kinase domains 2 | 118246 | 138400 | 144410 | |
| 2 | FABP1 | fatty acid binding protein 1 | 163586 | 115593 | 144115 | 19, 16, 36 |
| 2 | FBXO11 | F-box protein 11 | 138081 | 116062 | 170802 | 29, 42, 22 |
| 2 | FBXO36 | F-box protein 36 | 153832 | 153827 | 163053 | 1, 30, 10 |
| 2 | FBXO41 | F-box protein 41 | 163013 | 135624 | 135625 | 21, 22, 26 |
| 2 | FBXO48 | F-box protein 48 | 204923 | 115956 | 169621 | 30, 22, 17 |
| 2 | FER1L5 | fer-1 like family member 5 | 249715 | 114982 | 114988 | 31, 38, 28 |
| 2 | FARP2 | FERM, ARH/RhoGEF and pleckstrin domain protein 2 | 006607 | 168385 | 115694 | 43, 29, 22 |
| 2 | FEV | FEV, ETS transcription factor | 163497 | 171450 | 163499 | 28, 33, 8 |
| 2 | FAP | fibroblast activation protein alpha | 078098 | 115263 | 115267 | |
| 2 | FN1 | fibronectin 1 | 115414 | 138363 | 118242 | 10, 6, 7 |
| 2 | FNDC4 | fibronectin type III domain containing 4 | 115226 | 138002 | 084734 | 26, 2, 15 |
| 2 | FSIP2 | fibrous sheath interacting protein 2 | 188738 | 170396 | 065548 | 38, 30, 12 |
| 2 | FBLN7 | fibulin 7 | 144152 | 153214 | 144161 | 1, 32, 27 |
| 2 | FIGN | fidgetin, microtubule severing factor | 182263 | 184611 | 115290 | 40, 4, 45 |
| 2 | FKBP1B | FK506 binding protein 1B | 119782 | 163026 | 115128 | 26, 2, 44 |
| 2 | FKBP7 | FK506 binding protein 7 | 079150 | 204311 | 116095 | 31, 10, 6 |
| 2 | FSHR | follicle stimulating hormone receptor | 170820 | 138039 | 179915 | 38, |
| 2 | FIGLA | folliculogenesis specific bHLH transcription factor | 183733 | 075340 | 152672 | |
| 2 | FOXD4L1 | forkhead box D4-like 1 | 184492 | 136682 | 144134 | 39, 24, 44 |
| 2 | FOXI3 | forkhead box I3 | 214336 | 144115 | 172073 | 14, |
| 2 | FOXN2 | forkhead box N2 | 170802 | 138081 | 162869 | 4, 29, 27 |
| 2 | FTCDNL1 | Formiminotransferase cyclodeaminase N-terminal like | 226124 | 119042 | 178074 | 6, 17, 40 |
| 2 | FMNL2 | formin like 2 | 157827 | 115145 | 196504 | 31, 40, 3 |
| 2 | FOSL2 | FOS like 2, AP-1 transcription factor subunit | 075426 | 158019 | 163803 | 34, 4, 26 |
| 2 | FHL2 | four and a half LIM domains 2 | 115641 | 135974 | 071051 | 15, 34, 37 |
| 2 | FZD5 | frizzled class receptor 5 | 163251 | 163249 | 178385 | 6, 12, 18 |
| 2 | FZD7 | frizzled class receptor 7 | 155760 | 138395 | 182329 | 12, 27, 6 |
| 2 | FRZB | frizzled-related protein | 162998 | 077232 | 061676 | 11, 14, 36 |
| 2 | FAHD2A | fumarylacetoacetate hydrolase domain containing 2A | 115042 | 115041 | 144015 | |
| 2 | FAHD2B | fumarylacetoacetate hydrolase domain containing 2B | 144199 | 168754 | 135976 | 43, 13, 29 |
| 2 | GPBAR1 | G protein-coupled bile acid receptor 1 | 179921 | 163466 | 127837 | 26, 36, 32 |
| 2 | GPR1 | G protein-coupled receptor 1 | 183671 | 114942 | 204186 | 1, 10, 43 |
| 2 | GPR148 | G protein-coupled receptor 148 | 173302 | 222038 | 178171 | |
| 2 | GPR155 | G protein-coupled receptor 155 | 163328 | 144306 | 115935 | 26, 11, 31 |
| 2 | GPR17 | G protein-coupled receptor 17 | 144230 | 072163 | 136709 | |
| 2 | GPR35 | G protein-coupled receptor 35 | 178623 | 142330 | 185176 | 16, 37, 36 |
| 2 | GPR39 | G protein-coupled receptor 39 | 183840 | 163046 | 150551 | 17, 6, 38 |
| 2 | GPR45 | G protein-coupled receptor 45 | 135973 | 135972 | 135966 | 20, |
| 2 | GPR55 | G protein-coupled receptor 55 | 135898 | 135916 | 173699 | 3, 36, 38 |
| 2 | GPR75 | G protein-coupled receptor 75 | 119737 | 068912 | 068878 | |
| 2 | GALM | galactose mutarotase | 143891 | 143889 | 115875 | 2, 17, 4 |
| 2 | GAL3ST2 | galactose-3-O-sulfotransferase 2 | 154252 | 180902 | 204099 | 14, |
| 2 | GLB1L | galactosidase beta 1 like | 163521 | 163516 | 115661 | 38, 36, 26 |
| 2 | LGALSL | galectin like | 119862 | 197329 | 119844 | 29, 13, 14 |
| 2 | GGCX | gamma-glutamyl carboxylase | 115486 | 168906 | 118640 | 24, 29, 32 |
| 2 | GKN1 | gastrokine 1 | 169605 | 183607 | 169604 | 37, 44, 32 |
| 2 | GKN2 | gastrokine 2 | 183607 | 283586 | 169605 | 37, 10, 20 |
| 2 | GKN3P | Gastrokine 3, pseudogene | 283586 | 163217 | 183607 | |
| 2 | GBX2 | gastrulation brain homeobox 2 | 168505 | 157985 | 182177 | 37, 12, 25 |
| 2 | GCFC2 | GC-rich sequence DNA-binding factor 2 | 005436 | 115364 | 176204 | 26, 11, 34 |
| 2 | GMPPA | GDP-mannose pyrophosphorylase A | 144591 | 072195 | 072182 | 7, 3, 5 |
| 2 | GEMIN6 | gem nuclear organelle associated protein 6 | 152147 | 115875 | 163214 | 1, 3, 41 |
| 2 | GEN1 | GEN1, Holliday junction 5′ flap endonuclease | 178295 | 163029 | 151379 | 22, 30, 29 |
| 2 | GTF2A1L | general transcription factor IIA subunit 1 like | 242441 | 068781 | 279956 | 38, 43, 4 |
| 2 | GTF3C2 | general transcription factor IIIC subunit 2 | 115207 | 115204 | 115211 | 43, 29, 24 |
| 2 | GTF3C3 | general transcription factor IIIC subunit 3 | 119041 | 144395 | 187944 | 18, 42, 26 |
| 2 | GMCL1 | germ cell-less, spermatogenesis associated 1 | 087338 | 196975 | 124380 | 6, 37, 28 |
| 2 | GLI2 | GLI family zinc finger 2 | 074047 | 163083 | 115112 | 15, 7, 6 |
| 2 | GCG | glucagon | 115263 | 197635 | 078098 | |
| 2 | GCKR | glucokinase regulator | 084734 | 115226 | 233438 | 19, 45, 2 |
| 2 | G6PC2 | glucose-6-phosphatase catalytic subunit 2 | 152254 | 152253 | 073734 | 28, 42, 25 |
| 2 | GAD1 | glutamate decarboxylase 1 | 128683 | 204334 | 115806 | 23, 8, 16 |
| 2 | ERICH2 | glutamate rich 2 | 204334 | 204335 | 128683 | 38, 32, 23 |
| 2 | GLS | glutaminase | 115419 | 138386 | 115415 | |
| 2 | GFPT1 | glutamine--fructose-6-phosphate transaminase 1 | 198380 | 169604 | 169599 | 34, 16, 7 |
| 2 | QPCT | glutaminyl-peptide cyclotransferase | 115828 | 115825 | 163171 | 2, 10, 35 |
| 2 | GPAT2 | glycerol-3-phosphate acyltransferase 2, mitochondrial | 186281 | 174501 | 274286 | 38, 21, 15 |
| 2 | GPD2 | glycerol-3-phosphate dehydrogenase 2 | 115159 | 153234 | 136542 | 11, 42, 24 |
| 2 | GYPC | glycophorin C (Gerbich blood group) | 136732 | 155052 | 237524 | 22, 35, 25 |
| 2 | GTDC1 | glycosyltransferase like domain containing 1 | 121964 | 075884 | 169554 | 29, 22, 1 |
| 2 | GPC1 | glypican 1 | 063660 | 178602 | 144504 | 25, 9, 34 |
| 2 | GORASP2 | golgi reassembly stacking protein 2 | 115806 | 128683 | 198586 | 45, 3, 2 |
| 2 | GPATCH11 | G-patch domain containing 11 | 152133 | 008869 | 055332 | 29, 26, 7 |
| 2 | GPN1 | GPN-loop GTPase 1 | 198522 | 176714 | 119760 | 33, 43, 11 |
| 2 | GPR75-ASB3 | GPR75-ASB3 readthrough | 270898 | 115239 | 143942 | |
| 2 | GRHL1 | grainyhead like transcription factor 1 | 134317 | 115750 | 172059 | 18, 24, 42 |
| 2 | GCA | grancalcin | 115271 | 115267 | 184611 | 5, 43, 7 |
| 2 | GNLY | granulysin | 115523 | 168878 | 168874 | 36, 37, 29 |
| 2 | GIGYF2 | GRB10 interacting GYF protein 2 | 204120 | 115468 | 115474 | 18, 38, 24 |
| 2 | GAREM2 | GRB2 associated regulator of MAPK1 subtype 2 | 157833 | 084733 | 084754 | 26, 31, 29 |
| 2 | GCC2 | GRIP and coiled-coil domain containing 2 | 135968 | 198075 | 169756 | 22, 25, 4 |
| 2 | GDF7 | growth differentiation factor 7 | 143869 | 118960 | 118961 | 17, 38, |
| 2 | GRB14 | growth factor receptor bound protein 14 | 115290 | 182263 | 082438 | 10, 17, 45 |
| 2 | GREB1 | growth regulation by estrogen in breast cancer 1 | 196208 | 169016 | 169006 | 23, 27, 26 |
| 2 | GULP1 | GULP, engulfment adaptor PTB domain containing 1 | 144366 | 003436 | 174325 | 45, 32, 42 |
| 2 | HS1BP3 | HCLS1 binding protein 3 | 118960 | 143878 | 143869 | 34, 26, 6 |
| 2 | HEATR5B | HEAT repeat containing 5B | 008869 | 115808 | 152133 | 18, 24, 16 |
| 2 | HSPD1 | heat shock protein family D (Hsp60) member 1 | 144381 | 115520 | 115541 | |
| 2 | HSPE1 | heat shock protein family E (Hsp10) member 1 | 115541 | 144381 | 270757 | 7, 33, 29 |
| 2 | HECW2 | HECT, C2 and WW domain containing E3 ubiquitin protein ligase 2 | 138411 | 081320 | 144395 | 45, 25, 36 |
| 2 | HS6ST1 | heparan sulfate 6-O-sulfotransferase 1 | 136720 | 136731 | 222014 | 34, 41, 12 |
| 2 | HES6 | hes family bHLH transcription factor 6 | 144485 | 132323 | 132326 | 3, 35, 27 |
| 2 | HNRNPA3 | heterogeneous nuclear ribonucleoprotein A3 | 170144 | 128654 | 116044 | 18, 11, 2 |
| 2 | HNRNPLL | heterogeneous nuclear ribonucleoprotein L like | 143889 | 119787 | 143891 | 4, 1, 11 |
| 2 | HK2 | hexokinase 2 | 159399 | 135622 | 115350 | |
| 2 | HDLBP | high density lipoprotein binding protein | 115677 | 146205 | 168385 | 43, 30, 45 |
| 2 | HPCAL1 | hippocalcin like 1 | 115756 | 171848 | 115758 | 9, 41, 34 |
| 2 | HNMT | histamine N-methyltransferase | 150540 | 144229 | 144228 | 4, 17, 19 |
| 2 | HAT1 | histone acetyltransferase 1 | 128708 | 115840 | 172878 | 11, 31, 19 |
| 2 | HDAC4 | histone deacetylase 4 | 068024 | 233608 | 280260 | 38, 41, 39 |
| 2 | HJURP | Holliday junction recognition protein | 123485 | 185038 | 144481 | 3, 7, 22 |
| 2 | HOXD1 | homeobox D1 | 128645 | 170166 | 128654 | 17, 4, 35 |
| 2 | HOXD10 | homeobox D10 | 128710 | 128713 | 128709 | 17, 44, 33 |
| 2 | HOXD11 | homeobox D11 | 128713 | 170178 | 128710 | 9, 44, 33 |
| 2 | HOXD12 | homeobox D12 | 170178 | 128714 | 128713 | 23, 17, |
| 2 | HOXD13 | homeobox D13 | 128714 | 174279 | 170178 | 33, 10, 20 |
| 2 | HOXD3 | homeobox D3 | 128652 | 175879 | 278500 | 17, 27, 23 |
| 2 | HOXD4 | homeobox D4 | 170166 | 278500 | 128645 | 17, 36, 44 |
| 2 | HOXD8 | homeobox D8 | 175879 | 128709 | 128652 | 17, 15, 23 |
| 2 | HOXD9 | homeobox D9 | 128709 | 128710 | 175879 | 9, 27, 17 |
| 2 | HSPE1-MOB4 | HSPE1-MOB4 readthrough | 270757 | 115541 | 115540 | |
| 2 | HTRA2 | HtrA serine peptidase 2 | 115317 | 115307 | 115318 | 34, 9, 1 |
| 2 | HADHA | hydroxyacyl-CoA dehydrogenase/3-ketoacyl-CoA thiolase/enoyl-CoA hydratase | 084754 | 157833 | 138029 | 18, 21, 16 |
| | | (trifunctional protein), alpha subunit | | | | |
| 2 | HADHB | hydroxyacyl-CoA dehydrogenase/3-ketoacyl-CoA thiolase/enoyl-CoA hydratase | 138029 | 084754 | 173567 | 15, 2, 13 |
| | | (trifunctional protein), beta subunit | | | | |
| 2 | IKZF2 | IKAROS family zinc finger 2 | 030419 | 178568 | 144451 | 40, 4, 39 |
| 2 | ILKAP | ILK associated serine/threonine phosphatase | 132323 | 178752 | 144485 | 3, 26, 31 |
| 2 | IGKC | Immunoglobulin kappa constant | 211592 | 153574 | 211593 | 30, 41, 18 |
| 2 | IGKJ1 | Immunoglobulin kappa joining 1 | 211597 | 211596 | 211598 | |
| 2 | IGKJ2 | Immunoglobulin kappa joining 2 | 211596 | 211595 | 211597 | |
| 2 | IGKJ3 | Immunoglobulin kappa joining 3 | 211595 | 211594 | 211596 | |
| 2 | IGKJ4 | Immunoglobulin kappa joining 4 | 211594 | 211593 | 211595 | |
| 2 | IGKJ5 | Immunoglobulin kappa joining 5 | 211593 | 211592 | 211594 | |
| 2 | IGKV1OR2- | Immunoglobulin kappa variable 1/OR2-108 (non-functional) | 231292 | 125618 | 136682 | |
| | 108 | | | | | |
| 2 | IGKV1-12 | Immunoglobulin kappa variable 1-12 | 243290 | 241351 | 244437 | |
| 2 | IGKV1-16 | Immunoglobulin kappa variable 1-16 | 240864 | 244437 | 240382 | |
| 2 | IGKV1-17 | Immunoglobulin kappa variable 1-17 | 240382 | 240864 | 239951 | |
| 2 | IGKV1-27 | Immunoglobulin kappa variable 1-27 | 244575 | 241294 | 244116 | |
| 2 | IGKV1-33 | Immunoglobulin kappa variable 1-33 | 242076 | 243238 | 239862 | |
| 2 | IGKV1-37 | Immunoglobulin kappa variable 1-37 (non-functional) | 239862 | 242076 | 242371 | |
| 2 | IGKV1-39 | Immunoglobulin kappa variable 1-39 (gene/pseudogene) | 242371 | 239862 | 273962 | |
| 2 | IGKV1-5 | Immunoglobulin kappa variable 1-5 | 243466 | 211599 | 239855 | |
| 2 | IGKV1-6 | Immunoglobulin kappa variable 1-6 | 239855 | 243466 | 243063 | |
| 2 | IGKV1-8 | Immunoglobulin kappa variable 1-8 | 240671 | 243063 | 241755 | |
| 2 | IGKV1-9 | Immunoglobulin kappa variable 1-9 | 241755 | 240671 | 241351 | |
| 2 | IGKV1D-12 | Immunoglobulin kappa variable 1D-12 | 278857 | 276566 | 211632 | |
| 2 | IGKV1D-13 | Immunoglobulin kappa variable 1D-13 | 276566 | 224041 | 278857 | 22, 20, 16 |
| 2 | IGKV1D-16 | Immunoglobulin kappa variable 1D-16 | 241244 | 242766 | 224041 | |
| 2 | IGKV1D-17 | Immunoglobulin kappa variable 1D-17 | 242766 | 211626 | 241244 | |
| 2 | IGKV1D-33 | Immunoglobulin kappa variable 1D-33 | 239975 | 250036 | 239571 | |
| 2 | IGKV1D-37 | Immunoglobulin kappa variable 1D-37 | 250036 | 251546 | 239975 | |
| 2 | IGKV1D-39 | Immunoglobulin kappa variable 1D-39 | 251546 | 251039 | 250036 | |
| 2 | IGKV1D-42 | Immunoglobulin kappa variable 1D-42 (non-functional) | 211633 | 211632 | 242580 | |
| 2 | IGKV1D-43 | Immunoglobulin kappa variable 1D-43 | 242580 | 211633 | 239819 | |
| 2 | IGKV1D-8 | Immunoglobulin kappa variable 1D-8 | 239819 | 242580 | 228325 | 20, |
| 2 | IGKV2-24 | Immunoglobulin kappa variable 2-24 | 241294 | 211611 | 244575 | |
| 2 | IGKV2-28 | Immunoglobulin kappa variable 2-28 | 244116 | 244575 | 243238 | |
| 2 | IGKV2-30 | Immunoglobulin kappa variable 2-30 | 243238 | 244116 | 242076 | |
| 2 | IGKV2-40 | Immunoglobulin kappa variable 2-40 | 273962 | 242371 | 251039 | |
| 2 | IGKV2D-24 | Immunoglobulin kappa variable 2D-24 (non-functional) | 241566 | 211623 | 225523 | |
| 2 | IGKV2D-26 | Immunoglobulin kappa variable 2D-26 | 211623 | 242534 | 241566 | |
| 2 | IGKV2D-28 | Immunoglobulin kappa variable 2D-28 | 242534 | 243264 | 211623 | |
| 2 | IGKV2D-29 | Immunoglobulin kappa variable 2D-29 | 243264 | 239571 | 242534 | |
| 2 | IGKV2D-30 | Immunoglobulin kappa variable 2D-30 | 239571 | 239975 | 243264 | |
| 2 | IGKV2D-40 | Immunoglobulin kappa variable 2D-40 | 251039 | 273962 | 251546 | |
| 2 | IGKV3OR2- | Immunoglobulin kappa variable 3/OR2-268 (non-functional) | 233999 | 183281 | 125551 | |
| | 268 | | | | | |
| 2 | IGKV3-11 | Immunoglobulin kappa variable 3-11 | 241351 | 241755 | 243290 | |
| 2 | IGKV3-20 | Immunoglobulin kappa variable 3-20 | 239951 | 240382 | 211611 | |
| 2 | IGKV3-7 | Immunoglobulin kappa variable 3-7 (non-functional) | 243063 | 239855 | 240671 | |
| 2 | IGKV3D-11 | Immunoglobulin kappa variable 3D-11 | 211632 | 278857 | 211633 | |
| 2 | IGKV3-15 | Immunoglobulin kappa variable 3D-15 (gene/pseudogene) | 244437 | 243290 | 240864 | |
| 2 | IGKV3D-15 | Immunoglobulin kappa variable 3D-15 (gene/pseudogene) | 224041 | 241244 | 276566 | |
| 2 | IGKV3D-20 | Immunoglobulin kappa variable 3D-20 | 211625 | 225523 | 211626 | |
| 2 | IGKV3D-7 | Immunoglobulin kappa variable 3D-7 | 228325 | 239819 | 259916 | |
| 2 | IGKV4-1 | Immunoglobulin kappa variable 4-1 | 211598 | 211597 | 211599 | |
| 2 | IGKV5-2 | Immunoglobulin kappa variable 5-2 | 211599 | 211598 | 243466 | |
| 2 | IGKV6-21 | Immunoglobulin kappa variable 6-21 (non-functional) | 211611 | 239951 | 241294 | |
| 2 | IGKV6D-21 | Immunoglobulin kappa variable 6D-21 (non-functional) | 225523 | 241566 | 211625 | |
| 2 | IGKV6D-41 | Immunoglobulin kappa variable 6D-41 (non-functional) | 211626 | 211625 | 242766 | |
| 2 | IMP4 | IMP4 homolog, U3 small nucleolar ribonucleoprotein | 136718 | 136710 | 072135 | 41, 21, 36 |
| 2 | IHH | indian hedgehog | 163501 | 181378 | 187736 | 44, 16, 17 |
| 2 | ICOS | inducible T-cell costimulator | 163600 | 163599 | 116117 | 15, 30, 5 |
| 2 | INHA | inhibin alpha subunit | 123999 | 124006 | 144589 | 32, 27, 38 |
| 2 | INHBB | inhibin beta B subunit | 163083 | 281676 | 074047 | 40, 26, 14 |
| 2 | ID2 | inhibitor of DNA binding 2, HLH protein | 115738 | 151692 | 134313 | |
| 2 | ING5 | inhibitor of growth family member 5 | 168395 | 168393 | 180902 | |
| 2 | IMMT | inner membrane mitochondrial protein | 132305 | 132300 | 132313 | 24, 13, 3 |
| 2 | INO80B | INO80 complex subunit B | 115274 | 114993 | 274049 | 39, 14, 6 |
| 2 | INO80D | INO80 complex subunit D | 114933 | 118257 | 023228 | 40, 26, 22 |
| 2 | INO80B- | INO80B-WBP1 readthrough (NMD candidate) | 274049 | 115274 | 239779 | 39, 14, 6 |
| | WBP1 | | | | | |
| 2 | ITPRIPL1 | inositol 1,4,5-trisphosphate receptor interacting protein-like 1 | 198885 | 144028 | 121152 | 38, 15, 14 |
| 2 | INPP1 | inositol polyphosphate-1-phosphatase | 151689 | 198130 | 151690 | 18, 38, 20 |
| 2 | INPP4A | inositol polyphosphate-4-phosphatase type I A | 040933 | 144191 | 183513 | 1, 4, 14 |
| 2 | INPP5D | inositol polyphosphate-5-phosphatase D | 168918 | 115488 | 085978 | 22, 7, 21 |
| 2 | INSIG2 | insulin induced gene 2 | 125629 | 125633 | 163064 | 29, 26, 6 |
| 2 | IGFBP2 | insulin like growth factor binding protein 2 | 115457 | 197756 | 115461 | 27, 44, 12 |
| 2 | IGFBP5 | insulin like growth factor binding protein 5 | 115461 | 115457 | 118245 | 40, 1, 26 |
| 2 | IRS1 | insulin receptor substrate 1 | 169047 | 144460 | 144468 | 10, 40, 26 |
| 2 | ITM2C | integral membrane protein 2C | 135916 | 135932 | 135898 | 31, 8, 26 |
| 2 | ITGA4 | integrin subunit alpha 4 | 115232 | 170035 | 188452 | 39, 45, 22 |
| 2 | ITGA6 | integrin subunit alpha 6 | 091409 | 115844 | 152256 | 13, 4, 43 |
| 2 | ITGAV | integrin subunit alpha V | 138448 | 281192 | 144369 | 29, 4, 12 |
| 2 | ITGB1BP1 | integrin subunit beta 1 binding protein 1 | 119185 | 151693 | 119203 | 22, 43, 29 |
| 2 | ITGB6 | integrin subunit beta 6 | 115221 | 153246 | 153250 | 42, 28, 30 |
| 2 | IFIH1 | interferon induced with helicase C domain 1 | 115267 | 078098 | 115271 | 42, 44, 23 |
| 2 | IL1A | interleukin 1 alpha | 115008 | 169607 | 125538 | 45, 30, 22 |
| 2 | IL1B | interleukin 1 beta | 125538 | 115008 | 125571 | 45, 5, 13 |
| 2 | IL1F10 | interleukin 1 family member 10 (theta) | 136697 | 136695 | 136689 | 32, |
| 2 | IL1RN | interleukin 1 receptor antagonist | 136689 | 136697 | 125637 | 13, 18, 5 |
| 2 | IL1RL1 | interleukin 1 receptor like 1 | 115602 | 115598 | 115604 | 32, 45, 1 |
| 2 | IL1RL2 | interleukin 1 receptor like 2 | 115598 | 115594 | 115602 | 42, 23, 35 |
| 2 | IL1R1 | interleukin 1 receptor type 1 | 115594 | 115590 | 115598 | 29, 37, 45 |
| 2 | IL1R2 | interleukin 1 receptor type 2 | 115590 | 071054 | 115594 | 18, 3, 30 |
| 2 | IL18R1 | interleukin 18 receptor 1 | 115604 | 115602 | 115607 | 27, 19, 23 |
| 2 | IL18RAP | interleukin 18 receptor accessory protein | 115607 | 115604 | 180251 | 5, 45, 36 |
| 2 | IL36RN | interleukin 36 receptor antagonist | 136695 | 136696 | 136697 | |
| 2 | IL36A | interleukin 36, alpha | 136694 | 136688 | 136696 | 13, |
| 2 | IL36B | interleukin 36, beta | 136696 | 136694 | 136695 | 10, 8, |
| 2 | IL36G | interleukin 36, gamma | 136688 | 125571 | 136694 | 24, 30, 16 |
| 2 | IL37 | interleukin 37 | 125571 | 125538 | 136688 | 32, 16, |
| 2 | ITSN2 | intersectin 2 | 198399 | 186453 | 084676 | 22, 40, 35 |
| 2 | IFT172 | intraflagellar transport 172 | 138002 | 157992 | 115226 | 41, 9, 24 |
| 2 | IQCA1 | IQ motif containing with AAA domain 1 | 132321 | 182177 | 144476 | 31, 40, 30 |
| 2 | ICA1L | islet cell autoantigen 1 like | 163596 | 138439 | 138442 | 11, 28, 40 |
| 2 | IAH1 | isoamyl acetate-hydrolyzing esterase 1 homolog | 134330 | 119203 | 151694 | 18, 29, 38 |
| 2 | IDH1 | isocitrate dehydrogenase (NADP(+)) 1, cytosolic | 138413 | 188674 | 115020 | 19, 4, 2 |
| 2 | IWS1 | IWS1, SUPT6H interacting protein | 163166 | 115718 | 169994 | 13, 24, 39 |
| 2 | KANSL1L | KAT8 regulatory NSL complex subunit 1 like | 144445 | 197713 | 115361 | 26, 22, 29 |
| 2 | KANSL3 | KAT8 regulatory NSL complex subunit 3 | 114982 | 196843 | 249715 | 40, 21, 38 |
| 2 | KLHL23 | kelch like family member 23 | 213160 | 144362 | 138385 | 4, 2, 13 |
| 2 | KLHL29 | kelch like family member 29 | 119771 | 218819 | 119778 | 26, 36, 22 |
| 2 | KLHL30 | kelch like family member 30 | 168427 | 144488 | 178752 | 25, 24, 28 |
| 2 | KLHL41 | kelch like family member 41 | 239474 | 251569 | 138399 | 25, 24, 15 |
| 2 | KRTCAP3 | keratinocyte associated protein 3 | 157992 | 115216 | 138002 | 3, 18, 28 |
| 2 | KHK | ketohexokinase | 138030 | 138080 | 138028 | 19, 3, 17 |
| 2 | KIAA1211L | KIAA1211 like | 196872 | 071073 | 135951 | 27, 43, 29 |
| 2 | KIAA1841 | KIAA1841 | 162929 | 162928 | 237651 | 26, 11, 9 |
| 2 | KIAA2012 | KIAA2012 | 182329 | 155760 | 283310 | |
| 2 | KIAA2012 | KIAA2012 | 283310 | 182329 | 116030 | |
| 2 | KIDINS220 | kinase D interacting substrate 220 | 134313 | 115738 | 143797 | 18, 11, 31 |
| 2 | KIF1A | kinesin family member 1A | 130294 | 184945 | 172482 | |
| 2 | KIF3C | kinesin family member 3C | 084731 | 143970 | 084733 | 29, 26, 34 |
| 2 | KIF5C | kinesin family member 5C | 168280 | 135999 | 150556 | 12, 28, 8 |
| 2 | KLF11 | Kruppel like factor 11 | 172059 | 134317 | 205795 | 40, 27, 9 |
| 2 | KLF7 | Kruppel like factor 7 | 118263 | 144410 | 118260 | 26, 43, 18 |
| 2 | KYNU | kynureninase | 115919 | 168702 | 075884 | 30, 9, 11 |
| 2 | LCT | lactase | 115850 | 144224 | 076003 | 39, 16, 27 |
| 2 | LBX2 | ladybird homeobox 2 | 179528 | 115282 | 115289 | 34, 19, 14 |
| 2 | LANCL1 | LanC like 1 | 115365 | 168530 | 021826 | 8, 29, 2 |
| 2 | LTBP1 | latent transforming growth factor beta binding protein 1 | 049323 | 018699 | 152689 | 45, 6, 15 |
| 2 | LRP1B | LDL receptor related protein 1B | 168702 | 144227 | 115919 | 25, 8, 24 |
| 2 | LRP2 | LDL receptor related protein 2 | 081479 | 073737 | 163093 | 17, 40, 32 |
| 2 | LMAN2L | lectin, mannose binding 2 like | 114988 | 249715 | 158158 | 18, 1, 36 |
| 2 | LRPPRC | leucine rich pentatricopeptide repeat containing | 138095 | 143921 | 138032 | 42, 3, 38 |
| 2 | LRRTM1 | leucine rich repeat transmembrane neuronal 1 | 162951 | 066032 | 163541 | 8, 40, 28 |
| 2 | LRRTM4 | leucine rich repeat transmembrane neuronal 4 | 176204 | 005436 | 143954 | 9, 8, 38 |
| 2 | LIMS1 | LIM zinc finger domain containing 1 | 169756 | 135968 | 153201 | 7, 4, 13 |
| 2 | LIMS2 | LIM zinc finger domain containing 2 | 072163 | 169994 | 144230 | 26, 36, 15 |
| 2 | LIMS3 | LIM zinc finger domain containing 3 | 256977 | 015568 | 144063 | 7, 24, 38 |
| 2 | LIMS4 | LIM zinc finger domain containing 4 | 256671 | 257207 | 183054 | |
| 2 | LBH | limb bud and heart development | 213626 | 119801 | 172954 | 39, 41, 36 |
| 2 | LDAH | lipid droplet associated hydrolase | 118961 | 143869 | 084674 | 29, 6, 24 |
| 2 | LPIN1 | lipin 1 | 134324 | 169006 | 071575 | 2, 7, 38 |
| 2 | LIPT1 | lipoyltransferase 1 | 144182 | 273045 | 273155 | 34, 30, 22 |
| 2 | LONRF2 | LON peptidase N-terminal domain and ring finger 2 | 170500 | 144218 | 115526 | 2, 26, 31 |
| 2 | LINC01125 | Long intergenic non-protein coding RNA 1125 | 228486 | 115073 | 115085 | 1, 38, 42 |
| 2 | LINC00116 | Long intergenic non-protein coding RNA 116 | 175701 | 144061 | 257207 | 25, 31, 33 |
| 2 | LRRFIP1 | LRR binding FLII interacting protein 1 | 124831 | 124839 | 177483 | 29, 22, 6 |
| 2 | LNPK | lunapark, ER junction formation factor | 144320 | 154518 | 174279 | 29, 22, 42 |
| 2 | LHCGR | luteinizing hormone/choriogonadotropin receptor | 138039 | 279956 | 170820 | 4, 5, 38 |
| 2 | LYPD1 | LY6/PLAUR domain containing 1 | 150551 | 183840 | 176771 | 31, 27, 4 |
| 2 | LYPD6 | LY6/PLAUR domain containing 6 | 187123 | 150556 | 168288 | 4, 11, 31 |
| 2 | LYPD6B | LY6/PLAUR domain containing 6B | 150556 | 168280 | 187123 | |
| 2 | LY75-CD302 | LY75-CD302 readthrough | 248672 | 241399 | 054219 | |
| 2 | LY75 | lymphocyte antigen 75 | 054219 | 248672 | 153246 | 42, 22, 39 |
| 2 | KDM3A | lysine demethylase 3A | 115548 | 068615 | 115561 | 18, 29, 42 |
| 2 | KRCC1 | lysine rich coiled-coil 1 | 172086 | 185304 | 115593 | 28, 22, 6 |
| 2 | LCLAT1 | lysocardiolipin acyltransferase 1 | 172954 | 213626 | 162949 | 11, 45, 24 |
| 2 | LAPTM4A | lysosomal protein transmembrane 4 alpha | 068697 | 132031 | 115884 | 31, 13, 11 |
| 2 | LYG1 | lysozyme g1 | 144214 | 185674 | 115514 | 10, 27, 17 |
| 2 | LYG2 | lysozyme g2 | 185674 | 185414 | 144214 | 14, 35, 38 |
| 2 | LOXL3 | lysyl oxidase like 3 | 115318 | 115317 | 115325 | 6, 34, 43 |
| 2 | MARCO | macrophage receptor with collagenous structure | 019169 | 163064 | 144119 | 10, 1, 20 |
| 2 | MROH2A | maestro heat like repeat family member 2A | 185038 | 241635 | 123485 | |
| 2 | MFSD2B | major facilitator superfamily domain containing 2B | 205639 | 173960 | 163026 | 12, 21, 32 |
| 2 | MFSD6 | major facilitator superfamily domain containing 6 | 151690 | 151689 | 189362 | 26, 27, 18 |
| 2 | MFSD9 | major facilitator superfamily domain containing 9 | 135953 | 115616 | 170417 | 37, 27, 16 |
| 2 | MAL | mal, T-cell differentiation protein | 172005 | 163060 | 144029 | 30, 8, 11 |
| 2 | MALL | mal, T-cell differentiation protein like | 144063 | 256977 | 144061 | 37, 24, 40 |
| 2 | MDH1 | malate dehydrogenase 1 | 014641 | 143951 | 281071 | 29, 30, 40 |
| 2 | MDH1B | malate dehydrogenase 1B | 138400 | 232125 | 118246 | 38, 11, 42 |
| 2 | MGAT4A | mannosyl (alpha-1,3-)-glycoprotein beta-1,4-N-acetylglucosaminyltransferase, | 071073 | 115446 | 196872 | 29, 39, 31 |
| | | isozyme A | | | | |
| 2 | MGAT5 | mannosyl (alpha-1,6-)-glycoprotein beta-1,6-N-acetyl-glucosaminyltransferase | 152127 | 176771 | 152128 | 22, 41, 16 |
| 2 | MOGS | mannosyl-oligosaccharide glucosidase | 115275 | 239779 | 204822 | 27, 38, 5 |
| 2 | MATN3 | matrilin 3 | 132031 | 118965 | 068697 | 6, 26, 11 |
| 2 | MAIP1 | matrix AAA peptidase interacting protein 1 | 162972 | 162971 | 196141 | 10, 39, 33 |
| 2 | MXD1 | MAX dimerization protein 1 | 059728 | 124380 | 279229 | |
| 2 | MEMO1 | mediator of cell motility 1 | 162959 | 277893 | 162961 | 10, 3, 35 |
| 2 | M1AP | meiosis 1 associated protein | 159374 | 115325 | 135622 | 38, 44, 32 |
| 2 | MEIS1 | Meis homeobox 1 | 143995 | 198369 | 143971 | 18, 44, 42 |
| 2 | MLPH | melanophilin | 115648 | 163359 | 071677 | 23, 42, 3 |
| 2 | MREG | melanoregulin | 118242 | 115414 | 115425 | 10, 35, 34 |
| 2 | MARCH4 | membrane associated ring-CH-type finger 4 | 144583 | 079246 | 138375 | 35, 12, 20 |
| 2 | MARCH7 | membrane associated ring-CH-type finger 7 | 136536 | 123636 | 241399 | 40, 13, 45 |
| 2 | MBOAT2 | membrane bound O-acyltransferase domain containing 2 | 143797 | 134313 | 151693 | |
| 2 | MPP4 | membrane palmitoylated protein 4 | 082126 | 155755 | 003393 | 14, 25, 10 |
| 2 | MERTK | MER proto-oncogene, tyrosine kinase | 153208 | 153107 | 153214 | 30, 25, 2 |
| 2 | MSGN1 | mesogenin 1 | 151379 | 178295 | 170745 | |
| 2 | MTA3 | metastasis associated 1 family member 3 | 057935 | 171126 | 162881 | 18, 10, 12 |
| 2 | MTX2 | metaxin 2 | 128654 | 128645 | 170144 | 38, 25, 11 |
| 2 | MAT2A | methionine adenosyltransferase 2A | 168906 | 152292 | 115486 | |
| 2 | METAP1D | methionyl aminopeptidase type 1D, mitochondrial | 172878 | 128708 | 144355 | 26, 34, 2 |
| 2 | MARS2 | methionyl-tRNA synthetase 2, mitochondrial | 247626 | 162944 | 152430 | 39, 42, 23 |
| 2 | MBD5 | methyl-CpG binding domain protein 5 | 204406 | 115947 | 135999 | 31, 2, 40 |
| 2 | MTHFD2 | methylenetetrahydrofolate dehydrogenase (NADP+ dependent) 2, | 065911 | 114978 | 264324 | 13, 5, 34 |
| | | methenyltetrahydrofolate cyclohydrolase | | | | |
| 2 | MMADHC | methylmalonic aciduria and homocystinuria, cbID type | 168288 | 187123 | 115963 | 4, 7, 13 |
| 2 | MCEE | methylmalonyl-CoA epimerase | 124370 | 124357 | 124383 | 11, 19, 22 |
| 2 | METTL21A | methyltransferase like 21A | 144401 | 118260 | 163249 | 21, 3, 28 |
| 2 | METTL5 | methyltransferase like 5 | 138382 | 138385 | 144357 | 34, 22, 33 |
| 2 | METTL8 | methyltransferase like 8 | 123600 | 198586 | 115827 | 13, 6, 15 |
| 2 | MAP2 | microtubule associated protein 2 | 078018 | 144407 | 144406 | 8, 25, 31 |
| 2 | MAPRE3 | microtubule associated protein RP/EB family member 3 | 084764 | 157851 | 119777 | 28, 29, 14 |
| 2 | MITD1 | microtubule interacting and trafficking domain containing 1 | 158411 | 273155 | 185414 | 11, 22, 29 |
| 2 | MCM6 | minichromosome maintenance complex component 6 | 076003 | 115850 | 115866 | 39, 34, 24 |
| 2 | MFF | mitochondrial fission factor | 168958 | 169031 | 168955 | 38, 2, 6 |
| 2 | MRPL19 | mitochondrial ribosomal protein L19 | 115364 | 115363 | 005436 | |
| 2 | MRPL30 | mitochondrial ribosomal protein L30 | 185414 | 158411 | 185674 | 7, 42, 36 |
| 2 | MRPL33 | mitochondrial ribosomal protein L33 | 243147 | 163798 | 171174 | 25, 31, 7 |
| 2 | MRPL35 | mitochondrial ribosomal protein L35 | 132313 | 132305 | 068615 | 3, 42, 24 |
| 2 | MRPL44 | mitochondrial ribosomal protein L44 | 135900 | 085449 | 135919 | 15, 21, 12 |
| 2 | MRPL53 | mitochondrial ribosomal protein L53 | 204822 | 115275 | 135637 | 29, 15, 1 |
| 2 | MRPS5 | mitochondrial ribosomal protein S5 | 144029 | 172005 | 144026 | 24, 3, 43 |
| 2 | MRPS9 | mitochondrial ribosomal protein S9 | 135972 | 198914 | 135973 | 43, 31, 3 |
| 2 | MTERF4 | mitochondrial transcription termination factor 4 | 122085 | 162804 | 115687 | 15, 39, 30 |
| 2 | MTIF2 | mitochondrial translational initiation factor 2 | 085760 | 143947 | 115355 | 7, 19, 6 |
| 2 | MAP3K19 | mitogen-activated protein kinase kinase kinase 19 | 176601 | 082258 | 115839 | |
| 2 | MAP3K2 | mitogen-activated protein kinase kinase kinase 2 | 169967 | 163161 | 115718 | 22, 13, 42 |
| 2 | MAP4K3 | mitogen-activated protein kinase kinase kinase kinase 3 | 011566 | 205111 | 152154 | 4, 11, 2 |
| 2 | MAP4K4 | mitogen-activated protein kinase kinase kinase kinase 4 | 071054 | 196460 | 115590 | 6, 22, 24 |
| 2 | MZT2A | mitotic spindle organizing protein 2A | 173272 | 233087 | 075886 | 3, 21, 28 |
| 2 | MZT2B | mitotic spindle organizing protein 2B | 152082 | 136699 | 152086 | 33, 26, 15 |
| 2 | MOB4 | MOB family member 4, phocein | 115540 | 270757 | 162944 | 2, 22, 17 |
| 2 | MOB1A | MOB kinase activator 1A | 114978 | 163170 | 065911 | 22, 1, 13 |
| 2 | MOGAT1 | monoacylglycerol O-acyltransferase 1 | 124003 | 116120 | 123983 | |
| 2 | MORN2 | MORN repeat containing 2 | 188010 | 163214 | 214694 | 29, 17, 1 |
| 2 | MPHOSPH10 | M-phase phosphoprotein 10 | 124383 | 124370 | 124374 | 13, 3, 11 |
| 2 | MPV17 | MPV17, mitochondrial inner membrane protein | 115204 | 163794 | 115207 | 40, 23, 18 |
| 2 | MCFD2 | multiple coagulation factor deficiency 2 | 180398 | 171150 | 068724 | 42, 29, 45 |
| 2 | MSH2 | mutS homolog 2 | 095002 | 119888 | 184261 | 39, 12, 38 |
| 2 | MSH6 | mutS homolog 6 | 116062 | 184261 | 138081 | 12, 14, 38 |
| 2 | MYTH | myelin transcription factor 1 like | 186487 | 130508 | 032389 | |
| 2 | MYO1B | myosin IB | 128641 | 138378 | 173559 | 24, 11, 10 |
| 2 | MYO3B | myosin IIIB | 071909 | 144357 | 204335 | 31, 23, 24 |
| 2 | MYL1 | myosin light chain 1 | 168530 | 279317 | 115365 | 25, 15, 30 |
| 2 | MYO7B | myosin VIIB | 169994 | 163166 | 072163 | 5, 36, 26 |
| 2 | MSTN | myostatin | 138379 | 187699 | 198130 | 20, 15, 25 |
| 2 | NAGK | N-acetylglucosamine kinase | 124357 | 144043 | 124370 | 36, 30, 39 |
| 2 | NAT8 | N-acetyltransferase 8 (putative) | 144035 | 116127 | 204872 | 17, 19, 36 |
| 2 | NAT8B | N-acetyltransferase 8B (putative, gene/pseudogene) | 204872 | 144035 | 144034 | 27, 16, |
| 2 | NDUFAF7 | NADH: ubiquinone oxidoreductase complex assembly factor 7 | 003509 | 115816 | 115825 | 36, 38, 30 |
| 2 | NDUFS1 | NADH: ubiquinone oxidoreductase core subunit S1 | 023228 | 114933 | 114942 | 24, 45, 15 |
| 2 | NDUFA10 | NADH: ubiquinone oxidoreductase subunit A10 | 130414 | 280260 | 182083 | |
| 2 | NDUFB3 | NADH: ubiquinone oxidoreductase subunit B3 | 119013 | 155744 | 003402 | 29, 15, 25 |
| 2 | NPPC | natriuretic peptide C | 163273 | 144524 | 144535 | |
| 2 | NCK2 | NCK adaptor protein 2 | 071051 | 115641 | 119147 | 35, 34, 32 |
| 2 | NCKAP1 | NCK associated protein 1 | 061676 | 162998 | 162999 | 24, 45, 42 |
| 2 | NCKAP5 | NCK associated protein 5 | 176771 | 150551 | 152127 | 11, 43, 18 |
| 2 | NEB | nebulin | 183091 | 080345 | 162980 | 25, 18, 24 |
| 2 | NPHP1 | nephrocystin 1 | 144061 | 144063 | 175701 | 31, 29, 43 |
| 2 | NEURL3 | neuralized E3 ubiquitin protein ligase 3 | 163121 | 121152 | 196843 | 4, 39, 28 |
| 2 | NEU2 | neuraminidase 2 | 115488 | 066248 | 168918 | |
| 2 | NEU4 | neuraminidase 4 | 204099 | 154252 | 188389 | 8, 19, 16 |
| 2 | NRXN1 | neurexin 1 | 179915 | 170820 | 115239 | 38, |
| 2 | NXPH2 | neurexophilin 2 | 144227 | 144228 | 168702 | 17, 14, 12 |
| 2 | NBEAL1 | neurobeachin like 1 | 144426 | 138380 | 119004 | 23, 16, |
| 2 | NBAS | neuroblastoma amplified sequence | 151779 | 162981 | 079785 | 10, 14, 23 |
| 2 | NMS | neuromedin S | 204640 | 115526 | 115539 | |
| 2 | NMUR1 | neuromedin U receptor 1 | 171596 | 115053 | 177673 | 36, 1, 26 |
| 2 | NEUROD1 | neuronal differentiation 1 | 162992 | 188452 | 138434 | 28, 14, 25 |
| 2 | NGEF | neuronal guanine nucleotide exchange factor | 066248 | 182600 | 115488 | 2, 6, 26 |
| 2 | NPAS2 | neuronal PAS domain protein 2 | 170485 | 115539 | 071082 | 35, 20, 16 |
| 2 | NYAP2 | neuronal tyrosine-phosphorylated phosphoinositide-3-kinase adaptor 2 | 144460 | 135905 | 169047 | 45, 8, |
| 2 | NRP2 | neuropilin 2 | 118257 | 116117 | 114933 | 27, 43, 15 |
| 2 | NTSR2 | neurotensin receptor 2 | 169006 | 196208 | 134324 | 8, 38, 10 |
| 2 | NFU1 | NFU1 iron-sulfur cluster scaffold | 169599 | 198380 | 115977 | 24, 1, 28 |
| 2 | NAB1 | NGFI-A binding protein 1 | 138386 | 189362 | 115419 | |
| 2 | NIF3L1 | NGG1 interacting factor 3 like 1 | 196290 | 240344 | 115942 | 41, 27, 30 |
| 2 | NOSTRIN | nitric oxide synthase trafficking | 163072 | 172292 | 152253 | 7, 34, 16 |
| 2 | NLRC4 | NLR family CARD domain containing 4 | 091106 | 152683 | 119820 | 5, 4, 39 |
| 2 | NMI | N-myc and STAT interactor | 123609 | 184898 | 123610 | 34, 43, 11 |
| 2 | NHEJ1 | non-homologous end joining factor 1 | 187736 | 163501 | 280537 | 4, 40, 9 |
| 2 | NCAPH | non-SMC condensin I complex subunit H | 121152 | 198885 | 163121 | 28, 38, 22 |
| 2 | NOP58 | NOP58 ribonucleoprotein | 055044 | 116030 | 204217 | 41, 7, 6 |
| 2 | NOTO | notochord homeobox | 214513 | 135631 | 135632 | 38, |
| 2 | NT5C1B- | NT5C1B-RDH14readthrough | 250741 | 240857 | 185013 | |
| | RDH14 | | | | | |
| 2 | NEMP2 | nuclear envelope integral membrane protein 2 | 189362 | 151690 | 138386 | |
| 2 | NFE2L2 | nuclear factor, erythroid 2 like 2 | 116044 | 170144 | 018510 | 24, 45, 42 |
| 2 | NRBP1 | nuclear receptor binding protein 1 | 115216 | 115241 | 157992 | |
| 2 | NCOA1 | nuclear receptor coactivator 1 | 084676 | 198399 | 184924 | |
| 2 | NR4A2 | nuclear receptor subfamily 4 group A member 2 | 153234 | 162989 | 115159 | 42, 26, 24 |
| 2 | NABP1 | nucleic acid binding protein 1 | 173559 | 128641 | 168497 | 1, 27, 13 |
| 2 | NOL10 | nucleolar protein 10 | 115761 | 115758 | 143882 | 30, 34, 13 |
| 2 | NIFK | nucleolar protein interacting with the FHA domain of MKI67 | 155438 | 074054 | 211460 | 7, 4, 34 |
| 2 | NCL | nucleolin | 115053 | 156966 | 171596 | 3, 35, 18 |
| 2 | NUP35 | nudeoporin 35 | 163002 | 162999 | 170396 | 4, 34, 26 |
| 2 | OLA1 | Obg like ATPase 1 | 138430 | 172845 | 217236 | 4, 7, 38 |
| 2 | OBSL1 | obscurin like 1 | 124006 | 188760 | 123999 | 27, 40, 1 |
| 2 | OSR1 | odd-skipped related transciption factor 1 | 143867 | 185013 | 183891 | 1, 38, 15 |
| 2 | OR6B2 | olfactory receptor family 6 subfamily B member 2 | 182083 | 130414 | 221961 | |
| 2 | OR6B3 | olfactory receptor family 6 subfamily B member 3 | 178586 | 221961 | 172428 | |
| 2 | OST4 | oligosaccharyltransferase complex subunit 4, non-catalytic | 228474 | 084693 | 138080 | 34, 7, 43 |
| 2 | ORC2 | origin recognition complex subunit 2 | 115942 | 196290 | 155744 | 26, 13, 29 |
| 2 | ORC4 | origin recognition complex subunit 4 | 115947 | 121989 | 204406 | 26, 2, 30 |
| 2 | ORMDL1 | ORMDL sphingolipid biosynthesis regulator 1 | 128699 | 128694 | 064933 | 22, 11, 36 |
| 2 | ODC1 | ornithine decarboxylase 1 | 115758 | 115756 | 115761 | 21, 41, 18 |
| 2 | OTX1 | orthodenticle homeobox 1 | 115507 | 115504 | 143951 | 13, 23, 14 |
| 2 | OSGEPL1 | O-sialoglycoprotein endopeptidase like 1 | 128694 | 151687 | 128699 | 30, 34, 40 |
| 2 | OTOF | otoferlin | 115155 | 157856 | 173557 | 39, 6, 17 |
| 2 | OTOS | otospiralin | 178602 | 172428 | 063660 | 31, 40, 8 |
| 2 | OXER1 | oxoeicosanoid receptor 1 | 162881 | 057935 | 162882 | 39, 35, 25 |
| 2 | OSBPL6 | oxysterol binding protein like 6 | 079156 | 155636 | 180228 | 42, 6, 18 |
| 2 | PAX3 | paired box 3 | 135903 | 116106 | 163081 | 18, 35, 38 |
| 2 | PAX8 | paired box 8 | 125618 | 125637 | 231292 | 40, 27, 17 |
| 2 | PARD3B | par-3 family cell polarity regulator beta | 116117 | 163600 | 118257 | 11, 1, 27 |
| 2 | PTH2R | parathyroid hormone 2 receptor | 144407 | 115020 | 078018 | |
| 2 | PNKD | paroxysmal nonkinesigenic dyskinesia | 127838 | 127837 | 135926 | 29, 15, 31 |
| 2 | PNO1 | partner of NOB1 homolog | 115946 | 273398 | 221823 | 29, 4, 2 |
| 2 | PASK | PAS domain containing serine/threonine kinase | 115687 | 122085 | 115685 | 22, 39, 21 |
| 2 | PELI1 | pellino E3 ubiquitin protein ligase 1 | 197329 | 143952 | 119862 | 42, 22, 26 |
| 2 | PTCD3 | pentatricopeptide repeat domain 3 | 132300 | 068654 | 132305 | 39, 24, 3 |
| 2 | PPIG | peptidylprolyl isomerase G | 138398 | 138399 | 154479 | 29, 6, 7 |
| 2 | PPIL3 | peptidylprolyl isomerase like 3 | 240344 | 013441 | 196290 | 41, 4, 28 |
| 2 | PTRHD1 | peptidyl-tRNA hydrolase domain containing 1 | 184924 | 084676 | 138092 | 28, 2, 38 |
| 2 | PER2 | period circadian clock 2 | 132326 | 144485 | 204104 | 18, 45, 1 |
| 2 | PXDN | peroxidasin | 130508 | 115705 | 186487 | 43, 9, 15 |
| 2 | PEX13 | peroxisomal biogenesis factor 13 | 162928 | 162927 | 162929 | 13, 31, 43 |
| 2 | PECR | peroxisomal trans-2-enoyl-CoA reductase | 115425 | 118242 | 163449 | 7, 19, 25 |
| 2 | FARSB | phenylalanyl-tRNA synthetase beta subunit | 116120 | 163082 | 124003 | 10, 7, 13 |
| 2 | PDCL3 | phosducin like 3 | 115539 | 204640 | 170485 | 1, 30, 15 |
| 2 | PHOSPHO2 | phosphatase, orphan 2 | 144362 | 154479 | 213160 | 38, 4, 37 |
| 2 | PIGF | phosphatidylinositol glycan anchor biosynthesis class F | 151665 | 119729 | 119878 | 29, 11, 31 |
| 2 | PDE11A | phosphodiesterase 11A | 128655 | 197557 | 155636 | 18, 26, 29 |
| 2 | PDE1A | phosphodiesterase 1A | 115252 | 150722 | 077232 | 8, 40, 38 |
| 2 | PDE6D | phosphodiesterase 6D | 156973 | 187514 | 144524 | 21, 35, 5 |
| 2 | PIKFYVE | phosphoinositide kinase, FYVE-type zinc finger containing | 115020 | 138413 | 144407 | 22, 4, 5 |
| 2 | PLA2R1 | phospholipase A2 receptor 1 | 153246 | 054219 | 115221 | 29, 18, 42 |
| 2 | PLB1 | phospholipase B1 | 163803 | 075426 | 213639 | 7, 5, 2 |
| 2 | PLCD4 | phospholipase C delta 4 | 115556 | 144580 | 115568 | 25, 24, 40 |
| 2 | PLCL1 | phospholipase C like 1 | 115896 | 152430 | 119042 | 15, 17, 44 |
| 2 | PID1 | phosphotyrosine interaction domain containing 1 | 153823 | 153820 | 187957 | 15, 2, 36 |
| 2 | PKP4 | plakophilin 4 | 144283 | 153237 | 281472 | 11, 18, 40 |
| 2 | PLGLB1 | plasminogen-like B1 | 183281 | 187627 | 233999 | 19, 22, 20 |
| 2 | PLGLB2 | plasminogen-like B2 | 125551 | 233999 | 185304 | 19, 13, 25 |
| 2 | PLEK | pleckstrin | 115956 | 119865 | 204923 | 21, 30, 5 |
| 2 | PSD4 | pleckstrin and Sec7 domain containing 4 | 125637 | 136689 | 125618 | 21, 39, 22 |
| 2 | PLEKHA3 | pleckstrin homology domain containing A3 | 116095 | 079150 | 155657 | 20, 29, 1 |
| 2 | PLEKHB2 | pleckstrin homology domain containing B2 | 115762 | 152102 | 188219 | 8, 2, 37 |
| 2 | PLEKHM3 | pleckstrin homology domain containing M3 | 178385 | 163251 | 118231 | |
| 2 | PLEKHH2 | pleckstrin homology, MyTH4 and FERM domain containing H2 | 152527 | 115970 | 223658 | 42, 44, 20 |
| 2 | PMS1 | PMS1 homolog 1, mismatch repair system component | 064933 | 128699 | 187699 | 10, 22, 38 |
| 2 | PAIP2B | poly(A) binding protein interacting protein 2B | 124374 | 124383 | 075292 | 27, 15, 8 |
| 2 | PAPOLG | poly(A) polymerase gamma | 115421 | 119866 | 162924 | 24, 22, 38 |
| 2 | PCBP1 | poly(rC) binding protein 1 | 169564 | 244617 | 115998 | 1, 43, 27 |
| 2 | PCGF1 | polycomb group ring finger 1 | 115289 | 179528 | 115297 | 40, 3, 15 |
| 2 | GALNT13 | polypeptide N-acetylgalactosaminyltransferase 13 | 144278 | 177519 | 162989 | 18, 10, 30 |
| 2 | GALNT14 | polypeptide N-acetylgalactosaminyltransferase 14 | 158089 | 162949 | 214711 | |
| 2 | GALNT3 | polypeptide N-acetylgalactosaminyltransferase 3 | 115339 | 178662 | 123607 | 25, 16, 38 |
| 2 | GALNT5 | polypeptide N-acetylgalactosaminyltransferase 5 | 136542 | 115159 | 136541 | 20, |
| 2 | PNPT1 | polyribonucleotide nucleotidyltransferase 1 | 138035 | 275052 | 115380 | 1, 26, 4 |
| 2 | PGAP1 | post-GPI attachment to proteins 1 | 197121 | 187944 | 065413 | 11, 2, 26 |
| 2 | KCMF1 | potassium channel modulatory factor 1 | 176407 | 034510 | 152284 | 43, 22, 40 |
| 2 | KCTD18 | potassium channel tetramerization domain containing 18 | 155729 | 196141 | 163535 | 43, 22, 30 |
| 2 | KCNK12 | potassium two pore domain channel subfamily K member 12 | 184261 | 095002 | 116062 | 21, 41, 26 |
| 2 | KCNK3 | potassium two pore domain channel subfamily K member 3 | 171303 | 157884 | 213699 | 2, 28, 32 |
| 2 | KCNIP3 | potassium voltage-gated channel interacting protein 3 | 115041 | 155066 | 115042 | 8, 29, 24 |
| 2 | KCNF1 | potassium voltage-gated channel modifier subfamily F member 1 | 162975 | 143870 | 150873 | 8, 28, 16 |
| 2 | KCNG3 | potassium voltage-gated channel modifier subfamily G member 3 | 171126 | 115944 | 057935 | 12, 44, 38 |
| 2 | KCNS3 | potassium voltage-gated channel modifier subfamily S member 3 | 170745 | 151379 | 240857 | 15, 37, 23 |
| 2 | KCNE4 | potassium voltage-gated channel subfamily E regulatory subunit 4 | 152049 | 123983 | 171951 | 43, 26, 20 |
| 2 | KCNH7 | potassium voltage-gated channel subfamily H member 7 | 184611 | 115271 | 182263 | 45, 10, 28 |
| 2 | KCNJ13 | potassium voltage-gated channel subfamily J member 13 | 115474 | 204120 | 182600 | 29, 35, 14 |
| 2 | KCNJ3 | potassium voltage-gated channel subfamily J member 3 | 162989 | 144278 | 153234 | 4, 25, 15 |
| 2 | POTEE | POTE ankyrin domain family member E | 188219 | 115762 | 233087 | 33, 38, |
| 2 | POTEF | POTE ankyrin domain family member F | 196604 | 222014 | 152076 | 15, 23, 38 |
| 2 | POTEI | POTE ankyrin domain family member I | 196834 | 072135 | 152093 | 33, 23, 38 |
| 2 | POTEJ | POTE ankyrin domain family member J | 222038 | 136698 | 173302 | 33, |
| 2 | POU3F3 | POU class 3 homeobox 3 | 198914 | 170417 | 135972 | 12, 38, |
| 2 | PQLC3 | PQ loop repeat containing 3 | 162976 | 150873 | 134318 | 29, 1, 17 |
| 2 | PRPF40A | pre-mRNA processing factor 40 homolog A | 196504 | 157827 | 177917 | 19, 43, 29 |
| 2 | PCYOX1 | prenylcysteine oxidase 1 | 116005 | 116001 | 143977 | 42, 29, 11 |
| 2 | PFN4 | profilin family member 4 | 176732 | 115129 | 276087 | 38, 22, 33 |
| 2 | PDCD1 | programmed cell death 1 | 188389 | 204099 | 188011 | 5, 17, 23 |
| 2 | PROKR1 | prokineticin receptor 1 | 169618 | 169621 | 163219 | 38, |
| 2 | PREB | prolactin regulatory element binding | 138073 | 143994 | 186143 | 3, 34, 21 |
| 2 | PRLH | prolactin releasing hormone | 071677 | 115648 | 124839 | |
| 2 | PRR21 | proline rich 21 | 221961 | 182083 | 178586 | |
| 2 | PRR30 | proline rich 30 | 186143 | 138073 | 163792 | 38, 30, 8 |
| 2 | PREPL | prolyl endopeptidase-like | 138078 | 138079 | 143919 | 8, 42, 26 |
| 2 | PROM2 | prominin 2 | 155066 | 233757 | 115041 | 13, 18, 24 |
| 2 | POMC | proopiomelanocortin | 115138 | 084710 | 119772 | 31, 38, 8 |
| 2 | PRADC1 | protease associated domain containing 1 | 135617 | 135632 | 135624 | 21, 25, 14 |
| 2 | PRSS56 | protease, serine 56 | 237412 | 171551 | 135902 | 38, 14, 12 |
| 2 | PSMD1 | proteasome 26S subunit, non-ATPase 1 | 173692 | 204128 | 135914 | |
| 2 | PSMD14 | proteasome 26S subunit, non-ATPase 14 | 115233 | 136560 | 136535 | 10, 30, 7 |
| 2 | PSME4 | proteasome activator subunit 4 | 068878 | 119737 | 170634 | 24, 6, 4 |
| 2 | PRKRA | protein activator of interferon induced protein kinase EIF2AK2 | 180228 | 079156 | 204311 | 6, 38, 15 |
| 2 | PROC | protein C, inactivator of coagulation factors Va and VIIIa | 115718 | 169967 | 163166 | 19, 23, 17 |
| 2 | PDIA6 | protein disulfide isomerase family A member 6 | 143870 | 143882 | 162975 | 29, 13, 3 |
| 2 | PRKAG3 | protein kinase AMP-activated non-catalytic subunit gamma 3 | 115592 | 135929 | 115596 | 15, 25, 23 |
| 2 | PRKCE | protein kinase C epsilon | 171132 | 068784 | 116016 | 22, 8, 38 |
| 2 | PRKD3 | protein kinase D3 | 115825 | 003509 | 115828 | 22, 44, 21 |
| 2 | PKDCC | protein kinase domain containing, cytoplasmic | 162878 | 205086 | 143924 | 25, 12, 3 |
| 2 | PPP1CB | protein phosphatase 1 catalytic subunit beta | 213639 | 163803 | 163806 | 42, 45, 44 |
| 2 | PPP1R1C | protein phosphatase 1 regulatory inhibitor subunit 1C | 150722 | 138434 | 115252 | 40, 11, 10 |
| 2 | PPP1R21 | protein phosphatase 1 regulatory subunit 21 | 162869 | 170802 | 243244 | 13, 18, 1 |
| 2 | PPP1R7 | protein phosphatase 1 regulatory subunit 7 | 115685 | 115687 | 146205 | 41, 21, 40 |
| 2 | PPP3R1 | protein phosphatase 3 regulatory subunit B, alpha | 221823 | 115946 | 119865 | 37, 26, 5 |
| 2 | PPP4R3B | protein phosphatase 4 regulatory subunit 3B | 275052 | 163001 | 138035 | 42, 40, 22 |
| 2 | PPM1B | protein phosphatase, Mg2+/Mn2+ dependent 1B | 138032 | 138095 | 138079 | 11, 22, 36 |
| 2 | PPM1G | protein phosphatase, Mg2+/Mn2+ dependent 1G | 115241 | 163795 | 115216 | 13, 3, 43 |
| 2 | PTPN18 | protein tyrosine phosphatase, non-receptor type 18 | 072135 | 136718 | 196834 | 41, 36, 26 |
| 2 | PTPN4 | protein tyrosine phosphatase, non-receptor type 4 | 088179 | 144120 | 115109 | 17, 36, 44 |
| 2 | PTPRN | protein tyrosine phosphatase, receptor type N | 054356 | 135924 | 182698 | |
| 2 | PTMA | prothymosin, alpha | 187514 | 177673 | 156973 | 41, 30, 21 |
| 2 | PUS10 | pseudouridylate synthase 10 | 162927 | 162924 | 162928 | 22, 13, 42 |
| 2 | PUM2 | pumilio RNA binding family member 2 | 055917 | 115884 | 143878 | 22, 42, 23 |
| 2 | PDK1 | pyruvate dehydrogenase kinase 1 | 152256 | 091409 | 091428 | 1, 24, 42 |
| 2 | R3HDM1 | R3H domain containing 1 | 048991 | 121988 | 144224 | 45, 40, 8 |
| 2 | RABL2A | RAB, member of RAS oncogene family-like 2A | 144134 | 184492 | 115084 | 1, 40, 18 |
| 2 | RAB10 | RAB10, member RAS oncogene family | 084733 | 084731 | 157833 | 42, 22, 7 |
| 2 | RAB11FIP5 | RAB11 family interacting protein 5 | 135631 | 144040 | 214513 | 34, 38, 36 |
| 2 | RAB17 | RAB17, member RAS oncogene family | 124839 | 071677 | 124831 | |
| 2 | RAB1A | RAB1A, member RAS oncogene family | 138069 | 011523 | 138071 | 31, 29, 19 |
| 2 | RAB3GAP1 | RAB3 GTPase activating protein catalytic subunit 1 | 115839 | 176601 | 121988 | 22, 42, 24 |
| 2 | RAB6C | RAB6C, member RAS oncogene family | 222014 | 136720 | 196604 | 27, 23, 33 |
| 2 | WTH3DI | RAB6C-like | 233087 | 188219 | 173272 | 29, 24, 6 |
| 2 | RAD51AP2 | RAD51 associated protein 2 | 214842 | 197872 | 163032 | 38, |
| 2 | RSAD2 | radical S-adenosyl methionine domain containing 2 | 134321 | 134326 | 151692 | 42, 13, 5 |
| 2 | RFTN2 | raftlin family member 2 | 162944 | 115540 | 247626 | 11, 2, 8 |
| 2 | RANBP2 | RAN binding protein 2 | 153201 | 169756 | 163006 | 31, 22, 42 |
| 2 | RGPD1 | RANBP2-like and GRIP domain containing 1 | 187627 | 172116 | 183281 | 11, 39, 38 |
| 2 | RGPD2 | RANBP2-like and GRIP domain containing 2 | 185304 | 125551 | 172086 | 13, 32, 24 |
| 2 | RGPD3 | RANBP2-like and GRIP domain containing 3 | 153165 | 115652 | 144057 | 17, 30, 40 |
| 2 | RGPD4 | RANBP2-like and GRIP domain containing 4 | 196862 | 144057 | 115665 | 24, 44, 32 |
| 2 | RGPD5 | RANBP2-like and GRIP domain containing 5 | 015568 | 198142 | 256977 | |
| 2 | RGPD6 | RANBP2-like and GRIP domain containing 6 | 183054 | 256671 | 169679 | 11, 38, 40 |
| 2 | RGPD8 | RANBP2-like and GRIP domain containing 8 | 169629 | 188177 | 114999 | 26, 9, 30 |
| 2 | RAPGEF4 | Rap guanine nucleotide exchange factor 4 | 091428 | 152256 | 091436 | 8, 31, 37 |
| 2 | RAPH1 | Ras association (RalGDS/AF-6) and pleckstrin homology domains 1 | 173166 | 138443 | 178562 | 26, 11, 3 |
| 2 | RASGRP3 | RAS guanyl releasing protein 3 | 152689 | 049323 | 119812 | 22, 43, 42 |
| 2 | RHOB | ras homolog family member B | 143878 | 055917 | 118960 | 17, 45, 1 |
| 2 | RHOQ | ras homolog family member Q | 119729 | 250565 | 151665 | 31, 29, 26 |
| 2 | RALB | RAS like proto-oncogene B | 144118 | 226479 | 281676 | 29, 1, 43 |
| 2 | REEP1 | receptor accessory protein 1 | 068615 | 132313 | 115548 | 11, 8, 38 |
| 2 | RAMP1 | receptor activity modifying protein 1 | 132329 | 177483 | 184182 | 25, 33, 6 |
| 2 | RTP5 | receptor transporter protein 5 (putative) | 188011 | 188389 | 216921 | |
| 2 | REG1A | regenerating family member 1 alpha | 115386 | 172023 | 172016 | 28, 4, 37 |
| 2 | REG1B | regenerating family member 1 beta | 172023 | 143954 | 115386 | 28, 4, 37 |
| 2 | REG3A | regenerating family member 3 alpha | 172016 | 115386 | 066032 | 4, 37, 16 |
| 2 | REG3G | regenerating family member 3 gamma | 143954 | 176204 | 172023 | |
| 2 | RESP18 | regulated endocrine specific protein 18 | 182698 | 054356 | 123992 | |
| 2 | RMDN2 | regulator of microtubule dynamics 2 | 115841 | 163171 | 138061 | 10, 38, 2 |
| 2 | REL | REL proto-oncogene, NF-kB subunit | 162924 | 115421 | 162927 | 22, 5, 21 |
| 2 | RIF1 | replication timing regulatory factor 1 | 080345 | 123610 | 183091 | |
| 2 | RPRM | reprimo, TP53 dependent G2 arrest mediator candidate | 177519 | 177917 | 144278 | 31, 20, 8 |
| 2 | RMND5A | required for meiotic nuclear division 5 homolog A | 153561 | 239305 | 153563 | 30, 29, 39 |
| 2 | RTN4 | reticulon 4 | 115310 | 214595 | 162994 | |
| 2 | RDH14 | retinol dehydrogenase 14 (all-trans/9-cis/11-cis) | 240857 | 170745 | 250741 | 41, 31, 33 |
| 2 | RETSAT | retinol saturase | 042445 | 152291 | 115459 | 24, 1, 2 |
| 2 | REV1 | REV1, DNA directed polymerase | 135945 | 158417 | 144218 | 1, 26, 22 |
| 2 | RFX8 | RFX family member 8, lacking RFX DNA binding domain | 196460 | 175874 | 071054 | 40, 45, 16 |
| 2 | ROCK2 | Rho associated coiled-coil containing protein kinase 2 | 134318 | 162976 | 169016 | 22, 26, 45 |
| 2 | RND3 | Rho family GTPase 3 | 115963 | 168288 | 184898 | 1, 45, 35 |
| 2 | ARHGAP15 | Rho GTPase activating protein 15 | 075884 | 115919 | 121964 | |
| 2 | ARHGAP25 | Rho GTPase activating protein 25 | 163219 | 169618 | 163217 | |
| 2 | ARHGEF33 | Rho guanine nucleotide exchange factor 33 | 214694 | 188010 | 115904 | 28, 27, 20 |
| 2 | ARHGEF4 | Rho guanine nucleotide exchange factor 4 | 136002 | 178171 | 152102 | 4, 8, 14 |
| 2 | RHBDD1 | rhomboid domain containing 1 | 144468 | 169047 | 081052 | 22, 39, 24 |
| 2 | RTKN | rhotekin | 114993 | 005448 | 115274 | 4, 35, 16 |
| 2 | RBKS | ribokinase | 171174 | 243147 | 158019 | 10, 29, 17 |
| 2 | RNASEH1 | ribonuclease H1 | 171865 | 255767 | 171863 | 43, 11, 45 |
| 2 | RRM2 | ribonucleotide reductase regulatory subunit M2 | 171848 | 205795 | 115756 | 13, 39, 3 |
| 2 | RPIA | ribose 5-phosphate isomerase A | 153574 | 172071 | 211592 | 9, 11, 22 |
| 2 | RPL31 | ribosomal protein L31 | 071082 | 170485 | 204634 | 43, 7, 25 |
| 2 | RPL37A | ribosomal protein L37a | 197756 | 138375 | 115457 | 25, 33, 43 |
| 2 | RPS27A | ribosomal protein S27a | 143947 | 162994 | 085760 | |
| 2 | RPS7 | ribosomal protein S7 | 171863 | 171865 | 118004 | |
| 2 | RPE | ribulose-5-phosphate-3-epimerase | 197713 | 144406 | 144445 | 4, 45, 34 |
| 2 | RNF103 | ring finger protein 103 | 239305 | 249884 | 153561 | 11, 31, 2 |
| 2 | RNF144A | ring finger protein 144A | 151692 | 134321 | 115738 | 11, 29, 31 |
| 2 | RNF149 | ring finger protein 149 | 163162 | 158435 | 175874 | 1, 11, 5 |
| 2 | RNF181 | ring finger protein 181 | 168894 | 168899 | 168890 | 31, 43, 19 |
| 2 | RNF25 | ring finger protein 25 | 163481 | 074582 | 163482 | 31, 23, 1 |
| 2 | RBM43 | RNA binding motif protein 43 | 184898 | 115963 | 123609 | 29, 20, 24 |
| 2 | RBM44 | RNA binding motif protein 44 | 177483 | 124831 | 132329 | 10, 38, 8 |
| 2 | RBM45 | RNA binding motif protein 45 | 155636 | 128655 | 079156 | 13, 15, 4 |
| 2 | RBMS1 | RNA binding motif single stranded interacting protein 1 | 153250 | 115221 | 136560 | |
| 2 | POLR1A | RNA polymerase I subunit A | 068654 | 115525 | 132300 | 22, 21, 15 |
| 2 | POLR1B | RNA polymerase I subunit B | 125630 | 114999 | 125611 | 38, 25, 42 |
| 2 | POLR2D | RNA polymerase II subunit D | 144231 | 173349 | 144233 | 13, 29, 44 |
| 2 | RNF103- | RNF103-CHMP3 readthrough | 249884 | 115561 | 239305 | |
| | CHMP3 | | | | | |
| 2 | RUFY4 | RUN and FYVE domain containing 4 | 188282 | 079308 | 180871 | 39, 27, 36 |
| 2 | SRBD1 | S1 RNA binding domain 1 | 068784 | 170577 | 171132 | 42, 36, 25 |
| 2 | SAG | S-antigen visual arrestin | 130561 | 085978 | 077044 | 14, 25, 10 |
| 2 | SATB2 | SATB homeobox 2 | 119042 | 115896 | 226124 | 19, 8, 18 |
| 2 | SESTD1 | SEC14 and spectrin domain containing 1 | 187231 | 163492 | 144331 | 26, 29, 11 |
| 2 | SCRN3 | secern in 3 | 144306 | 138433 | 163328 | 4, 34, 43 |
| 2 | SPP2 | secreted phosphoprotein 2 | 072080 | 144481 | 188042 | 19, 25, |
| 2 | SCTR | secretin receptor | 080293 | 171227 | 163075 | 20, 28, 25 |
| 2 | SCG2 | secretogranin II | 171951 | 152049 | 152056 | 8, 28, 31 |
| 2 | SCLY | selenocysteine lyase | 132330 | 258984 | 144488 | 18, 9, 3 |
| 2 | SELENOI | selenoprotein I | 138018 | 173567 | 157856 | 29, 22, 26 |
| 2 | SEMA4C | semaphorin 4C | 168758 | 213337 | 168754 | 25, 12, 26 |
| 2 | SPR | sepiapterin reductase (7,8-dihydrobiopterin: NADP+ oxidoreductase) | 116096 | 144036 | 135638 | 29, 35, 34 |
| 2 | SEPT10 | septin 10 | 186522 | 279515 | 198142 | 13, 45, 38 |
| 2 | SEPT2 | septin 2 | 168385 | 115677 | 006607 | 42, 11, 24 |
| 2 | SRSF7 | serine and arginine rich splicing factor 7 | 115875 | 143891 | 152147 | 4, 34, 1 |
| 2 | STK11IP | serine/threonine kinase 11 interacting protein | 144589 | 123999 | 114923 | 13, 1, 41 |
| 2 | STK16 | serine/threonine kinase 16 | 115661 | 163521 | 127824 | 21, 5, 13 |
| 2 | STK17B | serine/threonine kinase 17b | 081320 | 118997 | 138411 | 22, 41, 13 |
| 2 | STK25 | serine/threonine kinase 25 | 115694 | 006607 | 176720 | 41, 34, 22 |
| 2 | STK36 | serine/threonine kinase 36 | 163482 | 163481 | 135912 | 43, 26, 38 |
| 2 | STK39 | serine/threonine kinase 39 | 198648 | 172318 | 172292 | 22, 4, 33 |
| 2 | SERPINE2 | serpin family E member 2 | 135919 | 135900 | 124019 | 10, 45, 32 |
| 2 | SERTAD2 | SERTA domain containing 2 | 179833 | 279644 | 115902 | 39, 15, 13 |
| 2 | SDPR | serum deprivation response | 168497 | 173559 | 144339 | 1, 43, 45 |
| 2 | SMYD1 | SET and MYND domain containing 1 | 115593 | 172086 | 163586 | 15, 25, 18 |
| 2 | SFT2D3 | SFT2 domain containing 3 | 173349 | 136709 | 144231 | 22, 28, 16 |
| 2 | SH2D6 | SH2 domain containing 6 | 152292 | 042493 | 168906 | |
| 2 | SH3YL1 | SH3 and SYLF domain containing 1 | 035115 | 184731 | 143727 | |
| 2 | SH3BP4 | SH3 domain binding protein 4 | 130147 | 188042 | 157985 | 43, 42, 23 |
| 2 | SH3RF3 | SH3 domain containing ring finger 3 | 172985 | 135960 | 279515 | 10, 16, 15 |
| 2 | SGO2 | shugoshin 2 | 163535 | 155729 | 138356 | 22, 34, 39 |
| 2 | SFXN5 | sideroflexin 5 | 144040 | 135638 | 135631 | 8, 34, 26 |
| 2 | STAT1 | signal transducer and activator of transcription 1 | 115415 | 115419 | 138378 | 42, 44, 43 |
| 2 | STAT4 | signal transducer and activator of transcription 4 | 138378 | 115415 | 128641 | 36, 18, 31 |
| 2 | STAM2 | signal transducing adaptor molecule 2 | 115145 | 182389 | 157827 | 25, 33, 45 |
| 2 | SAP130 | Sin3A associated protein 130 | 136715 | 144233 | 136731 | 38, 18, 24 |
| 2 | SIX2 | SIX homeobox 2 | 170577 | 138083 | 068784 | 9, 20, 25 |
| 2 | SIX3 | SIX homeobox 3 | 138083 | 143919 | 170577 | 14, 20, 17 |
| 2 | SSB | Sjogren syndrome antigen B | 138385 | 213160 | 138382 | 7, 4, 34 |
| 2 | SNRPG | small nuclear ribonucleoprotein polypeptide G | 143977 | 116005 | 035141 | |
| 2 | SNRNP27 | small nuclear ribonucleoprotein U4/U6.U5 subunit 27 | 124380 | 087338 | 059728 | 34, 7, 4 |
| 2 | SNRNP200 | small nuclear ribonucleoprotein U5 subunit 200 | 144028 | 144021 | 198885 | 18, 43, 22 |
| 2 | SUM01 | small ubiquitin-like modifier 1 | 116030 | 283310 | 055044 | 29, 34, 7 |
| 2 | SMYD5 | SMYD family member 5 | 135632 | 214513 | 135617 | 33, 4, 13 |
| 2 | SCN1A | sodium voltage-gated channel alpha subunit 1 | 144285 | 123607 | 169432 | 8, 25, 14 |
| 2 | SCN2A | sodium voltage-gated channel alpha subunit 2 | 136531 | 153253 | 178662 | 8, 25, 20 |
| 2 | SCN3A | sodium voltage-gated channel alpha subunit 3 | 153253 | 169507 | 136531 | 26, 42, 24 |
| 2 | SCN7A | sodium voltage-gated channel alpha subunit 7 | 136546 | 169432 | 163092 | 11, 26, 25 |
| 2 | SCN9A | sodium voltage-gated channel alpha subunit 9 | 169432 | 144285 | 136546 | 26, 24, 32 |
| 2 | SLC1A4 | solute carrier family 1 member 4 | 115902 | 179833 | 011523 | 21, 2, 42 |
| 2 | SLC11A1 | solute carrier family 11 member 1 | 018280 | 158428 | 144579 | 5, 36, 20 |
| 2 | SLC16A14 | solute carrier family 16 member 14 | 163053 | 153832 | 135899 | 42, 13, 24 |
| 2 | SLC19A3 | solute carrier family 19 member 3 | 135917 | 042304 | 115009 | 1, 32, 26 |
| 2 | SLC20A1 | solute carrier family 20 member 1 | 144136 | 125611 | 144130 | 34, 44, 7 |
| 2 | SLC23A3 | solute carrier family 23 member 3 | 213901 | 280537 | 115649 | 17, 9, 4 |
| 2 | SLC25A12 | solute carrier family 25 member 12 | 115840 | 077380 | 128708 | 26, 43, 24 |
| 2 | SLC3A1 | solute carrier family 3 member 1 | 138079 | 138032 | 138078 | 17, 4, 16 |
| 2 | SLC30A3 | solute carrier family 30 member 3 | 115194 | 084774 | 163793 | 38, 8, 6 |
| 2 | SLC30A6 | solute carrier family 30 member 6 | 152683 | 021574 | 091106 | 7, 42, 24 |
| 2 | SLC35F5 | solute carrier family 35 member F5 | 115084 | 144134 | 115091 | 13, 22, 2 |
| 2 | SLC35F6 | solute carrier family 35 member F6 | 213699 | 171303 | 115163 | 43, 29, 23 |
| 2 | SLC38A11 | solute carrier family 38 member 11 | 169507 | 082438 | 153253 | 36, 14, 30 |
| 2 | SLC39A10 | solute carrier family 39 member 10 | 196950 | 144339 | 118997 | 12, 33, 24 |
| 2 | SLC4A1AP | solute carrier family 4 member 1 adaptor protein | 163798 | 119760 | 243147 | 10, 13, 7 |
| 2 | SLC4A10 | solute carrier family 4 member 10 | 144290 | 136535 | 197635 | 8, 28, 22 |
| 2 | SLC4A3 | solute carrier family 4 member 3 | 114923 | 144589 | 116106 | 26, 15, 34 |
| 2 | SLC4A5 | solute carrier family 4 member 5 | 188687 | 264324 | 204843 | 40, 29, 24 |
| 2 | SLC40A1 | solute carrier family 40 member 1 | 138449 | 115368 | 138381 | 29, 25, 44 |
| 2 | SLC5A6 | solute carrier family 5 member 6 | 138074 | 163792 | 138085 | 37, 32, 41 |
| 2 | SLC5A7 | solute carrier family 5 member 7 | 115665 | 196862 | 196228 | 26, 2, 8 |
| 2 | SLC8A1 | solute carrier family 8 member A1 | 183023 | 138050 | 205086 | |
| 2 | SLC9A2 | solute carrier family 9 member A2 | 115616 | 180251 | 135953 | 29, 33, 3 |
| 2 | SLC9A4 | solute carrier family 9 member A4 | 180251 | 115607 | 115616 | 30, 24, 17 |
| 2 | SNX17 | sorting nexin 17 | 115234 | 115211 | 163795 | 13, 43, 36 |
| 2 | SOS1 | SOS Ras/Rac guanine nucleotide exchange factor 1 | 115904 | 214694 | 205111 | 22, 9, 40 |
| 2 | SOWAHC | sosondowah ankyrin repeat domain family member C | 198142 | 186522 | 015568 | 4, 9, 26 |
| 2 | SP100 | SP100 nuclear antigen | 067066 | 185404 | 135932 | 4, 30, 37 |
| 2 | SP110 | SP110 nuclear body protein | 135899 | 163053 | 280755 | 7, 41, 21 |
| 2 | SP140 | SP140 nuclear body protein | 079263 | 280755 | 185404 | 41, 22, 30 |
| 2 | SP140L | SP140 nuclear body protein like | 185404 | 079263 | 067066 | 33, 18, 39 |
| 2 | SP3 | Sp3 transcription factor | 172845 | 144354 | 138430 | 24, 18, 22 |
| 2 | SP5 | Sp5 transcription factor | 204335 | 071909 | 204334 | 19, 21, 12 |
| 2 | SP9 | Sp9 transcription factor | 217236 | 138430 | 138433 | 38, |
| 2 | SPAST | spastin | 021574 | 162961 | 152683 | 40, 13, 11 |
| 2 | SPC25 | SPC25, NDC80 kinetochore complex component | 152253 | 163072 | 152254 | 2, 22, 21 |
| 2 | SPOPL | speckle type BTB/POZ protein like | 144228 | 150540 | 144227 | 22, 1, 23 |
| 2 | SPTBN1 | spectrin beta, non-erythrocytic 1 | 115306 | 177994 | 214595 | 1, 29, 24 |
| 2 | SPDYA | speedy/RINGO cell cycle regulator family member A | 163806 | 213639 | 171103 | 10, 38, 26 |
| 2 | SPEG | SPEG complex locus | 072195 | 175084 | 144591 | 26, 31, 44 |
| 2 | SPAG16 | sperm associated antigen 16 | 144451 | 030419 | 174453 | 28, 38, 26 |
| 2 | SSFA2 | sperm specific antigen 2 | 138434 | 162992 | 150722 | 28, 43, 18 |
| 2 | SPATA3 | spermatogenesis associated 3 | 173699 | 135898 | 204128 | 38, 27, 8 |
| 2 | SPATS2L | spermatogenesis associated serine rich 2 like | 196141 | 162972 | 155729 | |
| 2 | SMPD4 | sphingomyelin phosphodiesterase 4 | 136699 | 152076 | 152082 | 42, 38, 39 |
| 2 | SGPP2 | sphingosine-1-phosphate phosphatase 2 | 163082 | 163081 | 116120 | 26, 37, 28 |
| 2 | SPHKAP | SPHK1 interactor, AKAP domain containing | 153820 | 123977 | 153823 | 15, 8, 20 |
| 2 | SF3B1 | splicing factor 3b subunit 1 | 115524 | 283224 | 115520 | 40, 24, 11 |
| 2 | SF3B6 | splicing factor 3b subunit 6 | 115128 | 119782 | 219626 | |
| 2 | SPRED2 | sprouty related EVH1 domain containing 2 | 198369 | 138071 | 143995 | 22, 29, 37 |
| 2 | SUPT7L | SPT7-like STAGA complex gamma subunit | 119760 | 198522 | 163798 | 39, 40, 36 |
| 2 | SOX11 | SRY-box 11 | 176887 | 214866 | 134326 | 12, 45, 14 |
| 2 | SEMA4F | ssemaphorin 4F | 135622 | 159374 | 159399 | 42, 8, 6 |
| 2 | ST3GAL5 | ST3 beta-galactoside alpha-2,3-sialyltransferase 5 | 115525 | 168874 | 068654 | 5, |
| 2 | ST6GAL2 | ST6 beta-galactoside alpha-2,6-sialyltransferase 2 | 144057 | 153165 | 196862 | 40, 12, 38 |
| 2 | STAMBP | STAM binding protein | 124356 | 187833 | 163017 | |
| 2 | STARD7 | StAR related lipid transfer domain containing 7 | 084090 | 158050 | 135956 | 34, 21, 4 |
| 2 | STRADB | STE20-related kinase adaptor beta | 082146 | 115993 | 155754 | 1, 17, 29 |
| 2 | STEAP3 | STEAP3 metalloreductase | 115107 | 144119 | 186132 | 29, 26, 7 |
| 2 | SRD5A2 | steroid 5 alpha-reductase 2 | 277893 | 158125 | 162959 | 42, 33, 14 |
| 2 | STON1- | STON1-GTF2A1L readthrough | 068781 | 243244 | 242441 | |
| | GTF2A1L | | | | | |
| 2 | STON1 | stonin 1 | 243244 | 162869 | 068781 | |
| 2 | STRN | striatin | 115808 | 205221 | 008869 | 29, 15, 22 |
| 2 | SMC6 | structural maintenance of chromosomes 6 | 163029 | 163032 | 178295 | |
| 2 | SUCLG1 | succinate-CoA ligase alpha subunit | 163541 | 162951 | 115423 | 17, 11, 25 |
| 2 | SULT1C2 | sulfotransferase family 1C member 2 | 198203 | 196228 | 198075 | 37, 17, 29 |
| 2 | SULT1C3 | sulfotransferase family 1C member 3 | 196228 | 115665 | 198203 | 14, |
| 2 | SULT1C4 | sulfotransferase family 1C member 4 | 198075 | 198203 | 135968 | 1, 15, 10 |
| 2 | SULT6B1 | sulfotransferase family 6B member 1 | 138068 | 055332 | 218739 | |
| 2 | SOCS5 | suppressor of cytokine signaling 5 | 171150 | 119878 | 180398 | 1, 42, 6 |
| 2 | SFTPB | surfactant protein B | 168878 | 168887 | 115523 | 20, 40, 10 |
| 2 | SNED1 | sushi, nidogen and EGF like domains 1 | 162804 | 226321 | 122085 | 34, 26, 40 |
| 2 | SMARCAL1 | SWI/SNF related, matrix associated, actin dependent regulator of chromatin, | 138375 | 144583 | 197756 | 7, 43, 24 |
| | | subfamily a like 1 | | | | |
| 2 | SDC1 | syndecan 1 | 115884 | 068697 | 055917 | 13, 32, 37 |
| 2 | SNTG2 | syntrophin gamma 2 | 172554 | 280360 | 115705 | 10, 38, 42 |
| 2 | TACR1 | tachykinin receptor 1 | 115353 | 115350 | 115363 | 1, 42, 44 |
| 2 | TAF1B | TATA-box binding protein associated factor, RNA polymerase I subunit B | 115750 | 134308 | 134317 | 19, 13, 18 |
| 2 | TBC1D8 | TBC1 domain family member 8 | 204634 | 071082 | 158435 | 37, 13, 34 |
| 2 | TBR1 | T-box, brain 1 | 136535 | 115233 | 144290 | 8, |
| 2 | TLX2 | T-cell leukemia homeobox 2 | 115297 | 115289 | 144045 | 14, 22, 33 |
| 2 | TEKT4 | tektin 4 | 163060 | 259916 | 172005 | 42, 20, 38 |
| 2 | TNS1 | tensin 1 | 079308 | 231672 | 188282 | 1, 40, 6 |
| 2 | TEX261 | testis expressed 261 | 144043 | 144031 | 124357 | 27, 26, 22 |
| 2 | TEX37 | testis expressed 37 | 172073 | 214336 | 172071 | 38, 32, |
| 2 | TSGA10 | testis specific 10 | 135951 | 196872 | 273045 | |
| 2 | TET3 | tet methylcytosine dioxygenase 3 | 187605 | 114956 | 163170 | |
| 2 | TTC21B | tetratricopeptide repeat domain 21B | 123607 | 115339 | 144285 | 4, 31, 15 |
| 2 | TTC27 | tetratricopeptide repeat domain 27 | 018699 | 115760 | 049323 | |
| 2 | TTC30A | tetratricopeptide repeat domain 30A | 197557 | 196659 | 128655 | 7, 38, 11 |
| 2 | TTC30B | tetratricopeptide repeat domain 30B | 196659 | 018510 | 197557 | 42, 2, 7 |
| 2 | TTC31 | tetratricopeptide repeat domain 31 | 115282 | 135637 | 179528 | 9, 22, 38 |
| 2 | TTC32 | tetratricopeptide repeat domain 32 | 183891 | 143867 | 118965 | 29, 34, 17 |
| 2 | TTC7A | tetratricopeptide repeat domain 7A | 068724 | 180398 | 239605 | 22, 7, 1 |
| 2 | TANC1 | tetratricopeptide repeat, ankyrin repeat and coiled-coil containing 1 | 115183 | 163331 | 196151 | 11, 31, 3 |
| 2 | THADA | THADA, armadillo repeat containing | 115970 | 152518 | 152527 | 30, 10, 40 |
| 2 | THAP4 | THAP domain containing 4 | 176946 | 176720 | 168397 | 29, 9, 18 |
| 2 | TXNDC9 | thioredoxin domain containing 9 | 115514 | 144214 | 158417 | 4, 7, 34 |
| 2 | THNSL2 | threonine synthase like 2 | 144115 | 163586 | 214336 | 27, 24, 33 |
| 2 | THSD7B | thrombospondin type 1 domain containing 7B | 144229 | 121966 | 150540 | 45, 25, 37 |
| 2 | THUMPD2 | THUMP domain containing 2 | 138050 | 152154 | 183023 | 29, 9, 25 |
| 2 | TMSB10 | thymosin beta 10 | 034510 | 279992 | 176407 | 43, 7, 45 |
| 2 | TRIP12 | thyroid hormone receptor interactor 12 | 153827 | 187957 | 153832 | 22, 4, 6 |
| 2 | TPO | thyroid peroxidase | 115705 | 172554 | 130508 | 40, 1, 18 |
| 2 | TIA1 | TIA1 cytotoxic granule associated RNA binding protein | 116001 | 115998 | 116005 | 22, 11, 1 |
| 2 | TIGD1 | tigger transposable element derived 1 | 221944 | 196811 | 135930 | 28, 25, 36 |
| 2 | TFPI | tissue factor pathway inhibitor | 003436 | 064989 | 144366 | 32, 43, 6 |
| 2 | TTN | titin | 155657 | 116095 | 283186 | 25, 18, 15 |
| 2 | TNFAIP6 | TNF alpha induced protein 6 | 123610 | 123609 | 080345 | 11, 6, 45 |
| 2 | TLK1 | tousled like kinase 1 | 198586 | 115806 | 123600 | 40, 26, 13 |
| 2 | TPRKB | TP53RK binding protein | 144034 | 204872 | 144048 | 11, 17, 7 |
| 2 | TRABD2A | TraB domain containing 2A | 186854 | 115423 | 279992 | 16, 39, 10 |
| 2 | TANK | TRAF family member associated NFKB activator | 136560 | 153250 | 115233 | 5, 31, 4 |
| 2 | TRAF3IP1 | TRAF3 interacting protein 1 | 204104 | 132326 | 065802 | 11, 26, 14 |
| 2 | TRAK2 | trafficking kinesin protein 2 | 115993 | 155749 | 082146 | 29, 40, 35 |
| 2 | TRAPPC12 | trafficking protein particle complex 12 | 171853 | 032389 | 182551 | 7, 22, 18 |
| 2 | TCF23 | transcription factor 23 | 163792 | 186143 | 138074 | 44, |
| 2 | TCF7L1 | transcription factor 7 like 1 | 152284 | 176407 | 152291 | 23, 12, 1 |
| 2 | TFCP2L1 | transcription factor CP2 like 1 | 115112 | 074047 | 074054 | 17, 40, 23 |
| 2 | TGFA | transforming growth factor alpha | 163235 | 035141 | 075340 | 40, 42, 24 |
| 2 | TGFBRAP1 | transforming growth factor beta receptor associated protein 1 | 135966 | 135973 | 135974 | 23, 18, 9 |
| 2 | TGOLN2 | trans-golgi network protein 2 | 152291 | 152284 | 042445 | 6, 40, 29 |
| 2 | TRPM8 | transient receptor potential cation channel subfamily M member 8 | 144481 | 123485 | 072080 | 33, 19, 45 |
| 2 | TNP1 | transition protein 1 | 118245 | 115461 | 278951 | 38, 17, 8 |
| 2 | TSN | translin | 211460 | 155438 | 155052 | 4, 13, 45 |
| 2 | TM4SF20 | transmembrane 4 L six family member 20 | 168955 | 168958 | 173744 | 16, 37, 25 |
| 2 | TMBIM1 | transmembrane BAX inhibitor motif containing 1 | 135926 | 127838 | 158428 | 18, 24, 4 |
| 2 | TMEM127 | transmembrane protein 127 | 135956 | 084090 | 144021 | 43, 26, 27 |
| 2 | TMEM131 | transmembrane protein 131 | 075568 | 115085 | 168658 | 22, 11, 42 |
| 2 | TMEM150A | transmembrane protein 150A | 168890 | 168894 | 168883 | 32, 26, 31 |
| 2 | TMEM163 | transmembrane protein 163 | 152128 | 152127 | 153086 | 30, 38, 26 |
| 2 | TMEM169 | transmembrane protein 169 | 163449 | 115425 | 079246 | 39, 28, 8 |
| 2 | TMEM17 | transmembrane protein 17 | 186889 | 170340 | 115504 | 13, 23, 28 |
| 2 | TMEM177 | transmembrane protein 177 | 144120 | 163075 | 088179 | 21, 34, 35 |
| 2 | TMEM178A | transmembrane protein 178A | 152154 | 011566 | 138050 | 14, 18, 17 |
| 2 | TMEM18 | transmembrane protein 18 | 151353 | 189292 | 280360 | 29, 15, 22 |
| 2 | TMEM182 | transmembrane protein 182 | 170417 | 135953 | 198914 | 15, 31, 7 |
| 2 | TMEM185B | transmembrane protein 185B | 226479 | 115109 | 144118 | 24, 4, 29 |
| 2 | TMEM198 | transmembrane protein 198 | 188760 | 123989 | 124006 | 38, 3, 27 |
| 2 | TMEM214 | transmembrane protein 214 | 119777 | 084764 | 084693 | 33, 40, 18 |
| 2 | TMEM237 | transmembrane protein 237 | 155755 | 155754 | 082126 | 18, 10, 6 |
| 2 | TMEM247 | transmembrane protein 247 | 187600 | 116016 | 250565 | 38, 32, |
| 2 | TMEM37 | transmembrane protein 37 | 171227 | 155368 | 080293 | 29, 17, 28 |
| 2 | TMEM87B | transmembrane protein 87B | 153214 | 153208 | 144152 | 24, 22, 29 |
| 2 | TMEFF2 | transmembrane protein with EGF like and two follistatin like domains 2 | 144339 | 168497 | 196950 | 26, 33, 8 |
| 2 | TRIB2 | tribbles pseudokinase 2 | 071575 | 134324 | 162981 | 42, 26, 22 |
| 2 | TRIM43 | tripartite motif containing 43 | 144015 | 115042 | 174501 | |
| 2 | TRIM54 | tripartite motif containing 54 | 138100 | 163793 | 163794 | 40, 25, 41 |
| 2 | TRMT61B | tRNA methyltransferase 61B | 171103 | 163806 | 163811 | 11, 13, 17 |
| 2 | TYW5 | tRNA-yW synthesizing protein 5 | 162971 | 178074 | 162972 | 36, 11, 42 |
| 2 | TSPYL6 | TSPY like 6 | 178021 | 170634 | 177994 | 38, 27, |
| 2 | TUBA3D | tubulin alpha 3d | 075886 | 173272 | 163040 | 38, 15, 23 |
| 2 | TUBA3E | tubulin alpha 3e | 152086 | 152082 | 136710 | 38, |
| 2 | TUBA4A | tubulin alpha 4a | 127824 | 115661 | 243910 | 21, 25, 41 |
| 2 | TUBA4B | Tubulin alpha 4b | 243910 | 127824 | 135924 | 34, 30, 21 |
| 2 | TTL | tubulin tyrosine ligase | 114999 | 169629 | 125630 | 29, 11, 9 |
| 2 | TTLL4 | tubulin tyrosine ligase like 4 | 135912 | 163482 | 135929 | 38, 41, 22 |
| 2 | TDRD15 | tudor domain containing 15 | 218819 | 084674 | 119771 | |
| 2 | TP53I3 | tumor protein p53 inducible protein 3 | 115129 | 219626 | 176732 | 6, 25, 26 |
| 2 | TSSC1 | tumor suppressing subtransferable candidate 1 | 032389 | 186487 | 171853 | 9, 29, 35 |
| 2 | TWIST2 | twist family bHLH transcription factor 2 | 233608 | 065802 | 068024 | 10, 15, 6 |
| 2 | YWHAQ | tyrosine 3-monooxygenase/tryptophan 5-monooxygenase activation protein | 134308 | 151694 | 115750 | 43, 22, 5 |
| | | theta | | | | |
| 2 | UBE2F-SCLY | UBE2F-SCLY readthrough (NMD candidate) | 258984 | 184182 | 132330 | 15, 32, 5 |
| 2 | UBE2E3 | ubiquitin conjugating enzyme E2 E3 | 170035 | 163510 | 115232 | |
| 2 | UBE2F | ubiquitin conjugating enzyme E2 F (putative) | 184182 | 132329 | 258984 | 15, 32, 5 |
| 2 | UBR3 | ubiquitin protein ligase E3 component n-recognin 3 (putative) | 144357 | 138382 | 071909 | 42, 29, 26 |
| 2 | USP34 | ubiquitin specific peptidase 34 | 115464 | 173209 | 082898 | 23, 26, 22 |
| 2 | USP37 | ubiquitin specific peptidase 37 | 135913 | 127831 | 144580 | 26, 42, 38 |
| 2 | USP39 | ubiquitin specific peptidase 39 | 168883 | 168890 | 168887 | 43, 39, 5 |
| 2 | USP40 | ubiquitin specific peptidase 40 | 085982 | 077044 | 242366 | 24, 13, 42 |
| 2 | UBXN2A | UBX domain protein 2A | 173960 | 119778 | 205639 | 40, 1, 4 |
| 2 | UBXN4 | UBX domain protein 4 | 144224 | 048991 | 115850 | 22, 4, 13 |
| 2 | UGT1A1 | UDP glucuronosyltransferase family 1 member A1 | 241635 | 243135 | 185038 | 13, 17, 24 |
| 2 | UGT1A10 | UDP glucuronosyltransferase family 1 member A10 | 242515 | 242366 | 241119 | |
| 2 | UGT1A3 | UDP glucuronosyltransferase family 1 member A3 | 243135 | 244474 | 241635 | |
| 2 | UGT1A4 | UDP glucuronosyltransferase family 1 member A4 | 244474 | 240224 | 243135 | |
| 2 | UGT1A5 | UDP glucuronosyltransferase family 1 member A5 | 240224 | 167165 | 244474 | |
| 2 | UGT1A6 | UDP glucuronosyltransferase family 1 member A6 | 167165 | 244122 | 240224 | 13, 38, |
| 2 | UGT1A7 | UDP glucuronosyltransferase family 1 member A7 | 244122 | 241119 | 167165 | |
| 2 | UGT1A8 | UDP glucuronosyltransferase family 1 member A8 | 242366 | 085982 | 242515 | |
| 2 | UGT1A9 | UDP glucuronosyltransferase family 1 member A9 | 241119 | 242515 | 244122 | |
| 2 | B3GNT2 | UDP-GlcNAc: betaGal beta-1,3-N-acetylglucosaminyltransferase 2 | 170340 | 280544 | 186889 | 4, 2, 12 |
| 2 | B3GNT7 | UDP-GlcNAc: betaGal beta-1,3-N-acetylglucosaminyltransferase 7 | 156966 | 135931 | 115053 | 13, 20, 10 |
| 2 | UGGT1 | UDP-glucose glycoprotein glucosyltransferase 1 | 136731 | 136715 | 136720 | 24, 22, 26 |
| 2 | UGP2 | UDP-glucose pyrophosphorylase 2 | 169764 | 281071 | 143952 | 15, 39, 13 |
| 2 | UXS1 | UDP-glucuronate decarboxylase 1 | 115652 | 119147 | 153165 | 23, 16, |
| 2 | UNC50 | unc-50 inner nuclear membrane RNA binding protein | 115446 | 183513 | 071073 | 45, 31, 28 |
| 2 | UNC80 | unc-80 homolog, NALCN activator | 144406 | 078018 | 197713 | 31, 8, 29 |
| 2 | TISP43 | Uncharacterized LOC150527 | 183292 | 184761 | 136698 | |
| 2 | UPP2 | uridine phosphorylase 2 | 007001 | 115170 | 153237 | 17, 19, 8 |
| 2 | UCN | urocortin | 163794 | 138100 | 115204 | 6, 2, 27 |
| 2 | VRK2 | vaccinia related kinase 2 | 028116 | 055813 | 115392 | |
| 2 | VAX2 | ventral anterior homeobox 2 | 116035 | 116031 | 116039 | 41, 14, 27 |
| 2 | VAMP5 | vesicle associated membrane protein 5 | 168899 | 281331 | 168894 | 25, 15, 34 |
| 2 | VAMP8 | vesicle associated membrane protein 8 | 118640 | 115486 | 281331 | 31, 5, 30 |
| 2 | VIL1 | villin 1 | 127831 | 144579 | 135913 | 16, 19, 3 |
| 2 | VSNL1 | visinin like 1 | 163032 | 214842 | 163029 | 8, 25, 16 |
| 2 | VIT | vitrin | 205221 | 171055 | 115808 | 26, 27, 42 |
| 2 | MYCN | v-myc avian myelocytomatosis viral oncogene neuroblastoma derived homolog | 134323 | 079785 | 197872 | 14, 12, 8 |
| 2 | VWA3B | von Willebrand factor A domain containing 3B | 168658 | 075568 | 144191 | 38, 42, 39 |
| 2 | VWC2L | von Willebrand factor C domain containing protein 2-like | 174453 | 144451 | 138376 | 8, |
| 2 | VPS54 | VPS54, GARP complex subunit | 143952 | 169764 | 197329 | 2, 13, 24 |
| 2 | WIPF1 | WAS/WASL interacting protein family member 1 | 115935 | 163328 | 138435 | |
| 2 | WDCP | WD repeat and coiled coil containing | 163026 | 205639 | 119782 | 39, 25, 32 |
| 2 | WDFY1 | WD repeat and FYVE domain containing 1 | 085449 | 152056 | 135900 | 31, 35, 45 |
| 2 | WDPCP | WD repeat containing planar cell polarity effector | 143951 | 115507 | 014641 | |
| 2 | WDR12 | WD repeat domain 12 | 138442 | 163596 | 138380 | 6, 13, 40 |
| 2 | WDR33 | WD repeat domain 33 | 136709 | 144230 | 173349 | 1, 22, 27 |
| 2 | WDR35 | WD repeat domain 35 | 118965 | 183891 | 132031 | 29, 40, 1 |
| 2 | WDR43 | WD repeat domain 43 | 163811 | 171103 | 189350 | 3, 13, 42 |
| 2 | WDR54 | WD repeat domain 54 | 005448 | 159239 | 114993 | 30, 43, 39 |
| 2 | WDR75 | WD repeat domain 75 | 115368 | 204262 | 138449 | 18, 42, 45 |
| 2 | WDR92 | WD repeat domain 92 | 243667 | 197223 | 273398 | 30, 2, 45 |
| 2 | WDSUB1 | WD repeat, sterile alpha motif and U-box domain containing 1 | 196151 | 115183 | 123636 | 31, 10, 17 |
| 2 | WNT10A | Wnt family member 10A | 135925 | 115596 | 171450 | 37, 33, 14 |
| 2 | WNT6 | Wnt family member 6 | 115596 | 115592 | 135925 | 15, 27, 32 |
| 2 | WBP1 | WW domain binding protein 1 | 239779 | 274049 | 115275 | 26, 1, 24 |
| 2 | XDH | xanthine dehydrogenase | 158125 | 013016 | 277893 | 30, 16, 24 |
| 2 | XIRP2 | xin actin binding repeat containing 2 | 163092 | 136546 | 172318 | 25, 18, 15 |
| 2 | XRCC5 | X-ray repair cross complementing 5 | 079246 | 163449 | 144583 | 42, 36, 38 |
| 2 | YIPF4 | Yip1 domain family member 4 | 119820 | 091106 | 115760 | 4, 22, 34 |
| 2 | YPEL5 | yippee like 5 | 119801 | 171094 | 213626 | 29, 36, 38 |
| 2 | ZAP70 | zeta chain of T cell receptor associated protein kinase 70 | 115085 | 228486 | 075568 | 39, 5, 22 |
| 2 | ZFP36L2 | ZFP36 ring finger protein like 2 | 152518 | 162882 | 115970 | 1, 41, 11 |
| 2 | ZFAND2B | zinc finger AN1-type containing 2B | 158552 | 144567 | 115657 | 26, 41, 22 |
| 2 | ZC3H15 | zinc finger CCCH-type containing 15 | 065548 | 188738 | 281192 | 3, 34, 43 |
| 2 | ZC3H6 | zinc finger CCCH-type containing 6 | 188177 | 144161 | 169629 | |
| 2 | ZC3H8 | zinc finger CCCH-type containing 8 | 144161 | 144152 | 188177 | 11, 9, 31 |
| 2 | ZDBF2 | zinc finger DBF-type containing 2 | 204186 | 183671 | 279921 | 2, 13, 32 |
| 2 | ZEB2 | zinc finger E-box binding homeobox 2 | 169554 | 121964 | 121989 | 1, 8, 7 |
| 2 | ZNF142 | zinc finger protein 142 | 115568 | 115556 | 074582 | 43, 26, 27 |
| 2 | ZNF2 | zinc finger protein 2 | 275111 | 144026 | 233757 | 9, 42, 36 |
| 2 | ZNF385B | zinc finger protein 385B | 144331 | 187231 | 163510 | 14, 13, 38 |
| 2 | ZNF512 | zinc finger protein 512 | 243943 | 221843 | 176714 | 18, 39, 26 |
| 2 | ZNF513 | zinc finger protein 513 | 163795 | 115234 | 115241 | 24, 22, 33 |
| 2 | ZNF514 | zinc finger protein 514 | 144026 | 144029 | 275111 | 43, 24, 34 |
| 2 | ZNF638 | zinc finger protein 638 | 075292 | 124374 | 135636 | 18, 26, 4 |
| 2 | ZNF804A | zinc finger protein 804A | 170396 | 163002 | 188738 | 6, 8, 28 |
| 2 | ZRANB3 | zinc finger RANBP2-type containing 3 | 121988 | 115839 | 048991 | 1, 10, 23 |
| 2 | ZSWIM2 | zinc finger SWIM-type containing 2 | 163012 | 144369 | 064989 | 38, 8, |
| 3 | GBE1 | 1,4-alpha-glucan branching enzyme 1 | 114480 | 169855 | 175161 | 10, 45, 26 |
| 3 | HACL1 | 2-hydroxyacyl-CoA lyase 1 | 131373 | 206561 | 169814 | 10, 43, 38 |
| 3 | PXYLP1 | 2-phosphoxylose phosphatase 1 | 155893 | 175093 | 177311 | 39, 34, 2 |
| 3 | HACD2 | 3-hydroxyacyl-CoA dehydratase 2 | 206527 | 173175 | 065534 | 22, 23, 6 |
| 3 | BDH1 | 3-hydroxybutyrate dehydrogenase 1 | 161267 | 075711 | 145016 | 16, 1, 21 |
| 3 | OXSM | 3-oxoacyl-ACP synthase, mitochondrial | 151093 | 151092 | 179796 | |
| 3 | XRN1 | 5′-3′ exoribonuclease 1 | 114127 | 175066 | 175054 | 30, 24, 22 |
| 3 | ALAS1 | 5′-aminolevulinate synthase 1 | 023330 | 164087 | 239732 | 2, 5, 45 |
| 3 | AZI2 | 5-azacytidine induced 2 | 163512 | 187118 | 206559 | |
| 3 | HMCES | 5-hydroxymethylcytosine binding, ES cell specific | 183624 | 181789 | 184897 | 21, 41, 22 |
| 3 | HTR1F | 5-hydroxytryptamine receptor 1F | 179097 | 064835 | 163320 | 7, 28, 32 |
| 3 | HTR3C | 5-hydroxytryptamine receptor 3C | 178084 | 186090 | 186038 | 1, |
| 3 | HTR3D | 5-hydroxytryptamine receptor 3D | 186090 | 114770 | 178084 | |
| 3 | HTR3E | 5-hydroxytryptamine receptor 3E | 186038 | 178084 | 145191 | |
| 3 | NT5DC2 | 5′-nucleotidase domain containing 2 | 168268 | 010327 | 168273 | 3, 43, 40 |
| 3 | PFKFB4 | 6-phosphofructo-2-kinase/fructose-2,6-biphosphatase 4 | 114268 | 164054 | 145040 | 38, 35, 5 |
| 3 | OGG1 | 8-oxoguanine DNA glycosylase | 114026 | 156983 | 134072 | |
| 3 | ABHD14A- | ABHD14A-ACY1 readthrough | 114786 | 248487 | 243989 | 9, 3, 17 |
| | ACY1 | | | | | |
| 3 | ABHD10 | abhydrolase domain containing 10 | 144827 | 144824 | 144834 | 37, 31, 7 |
| 3 | ABHD14A | abhydrolase domain containing 14A | 248487 | 114779 | 114786 | 31, 29, 33 |
| 3 | ABHD14B | abhydrolase domain containing 14B | 114779 | 090097 | 248487 | 9, 21, 40 |
| 3 | ABHD5 | abhydrolase domain containing 5 | 011198 | 160746 | 173769 | 31, 32, 35 |
| 3 | ABHD6 | abhydrolase domain containing 6 | 163686 | 163687 | 163684 | |
| 3 | ABI3BP | ABI family member 3 binding protein | 154175 | 114354 | 081148 | 40, 45, 10 |
| 3 | ACAA1 | acetyl-CoA acyltransferase 1 | 060971 | 008226 | 172936 | 36, 19, 3 |
| 3 | ACPP | acid phosphatase, prostate | 014257 | 196353 | 138246 | 33, 26, 23 |
| 3 | ACTL6A | actin like 6A | 136518 | 114450 | 136522 | 10, 30, 38 |
| 3 | ARPC4 | actin related protein 2/3 complex subunit 4 | 241553 | 171148 | 250151 | 9, 13, 1 |
| 3 | ACTRT3 | actin related protein T3 | 184378 | 281137 | 085274 | 38, 9, 2 |
| 3 | ALCAM | activated leukocyte cell adhesion molecule | 170017 | 170044 | 114423 | 42, 24, 18 |
| 3 | ACVR2B | activin A receptor type 2B | 114739 | 093217 | 157036 | 11, 32, 12 |
| 3 | APEH | acylaminoacyl-peptide hydrolase | 164062 | 164061 | 173531 | 21, 41, 31 |
| 3 | ACAD11 | acyl-CoA dehydrogenase family member 11 | 240303 | 138246 | 274810 | 26, 44, 39 |
| 3 | ACAD9 | acyl-CoA dehydrogenase family member 9 | 177646 | 075785 | 114656 | 24, 36, 2 |
| 3 | ACOX2 | acyl-CoA oxidase 2 | 168306 | 168301 | 168309 | 43, 19, 26 |
| 3 | ADAMTS9 | ADAM metallopeptidase with thrombospondin type 1 motif 9 | 163638 | 163637 | 151276 | 11, 26, 18 |
| 3 | APPL1 | adaptor protein, phosphotyrosine interacting with PH domain and leucine zipper 1 | 157500 | 163666 | 239388 | 11, 22, 30 |
| 3 | AP2M1 | adaptor related protein complex 2 mu 1 subunit | 161203 | 161202 | 161204 | 18, 2, 43 |
| 3 | ADCY5 | adenylate cyclase 5 | 173175 | 121542 | 206527 | 1, 26, 31 |
| 3 | ADGRG7 | adhesion G protein-coupled receptor G7 | 144820 | 181458 | 114354 | 16, 2, 19 |
| 3 | AMIGO3 | adhesion molecule with Ig like domain 3 | 176020 | 164068 | 173540 | 34, 35, 27 |
| 3 | ADIPOQ | adiponectin, C1Q and collagen domain containing | 181092 | 163918 | 073849 | 1, 42, 26 |
| 3 | ARF4 | ADP ribosylation factor 4 | 168374 | 174840 | 174839 | 18, 11, 4 |
| 3 | ARL13B | ADP ribosylation factor like GTPase 13B | 169379 | 184500 | 178750 | 40, 30, 22 |
| 3 | ARL14 | ADP ribosylation factor like GTPase 14 | 179674 | 186432 | 163590 | 22, 4, 3 |
| 3 | ARL6 | ADP ribosylation factor like GTPase 6 | 113966 | 080224 | 080200 | 10, 38, |
| 3 | ARL6IP5 | ADP ribosylation factor like GTPase 6 interacting protein 5 | 144746 | 144744 | 163380 | |
| 3 | ARL8B | ADP ribosylation factor like GTPase 8B | 134108 | 134107 | 134109 | 39, 24, 26 |
| 3 | ADPRH | ADP-ribosylarginine hydrolase | 144843 | 121594 | 144837 | 22, 21, 26 |
| 3 | ALDH1L1 | aldehyde dehydrogenase 1 family member L1 | 144908 | 114544 | 163884 | 4, 17, 19 |
| 3 | ALG1L | ALG1, chitobiosyldiphosphodolichol beta-mannosyltransferase like | 189366 | 144909 | 114547 | 30, 24, 42 |
| 3 | ALG1L2 | ALG1, chitobiosyldiphosphodolichol beta-mannosyltransferase like 2 | 251287 | 170893 | 172752 | 24, 36, |
| 3 | ALG3 | ALG3, alpha-1,3-mannosyltransferase | 214160 | 145198 | 145194 | 21, 9, 27 |
| 3 | AHSG | alpha 2-HS glycoprotein | 145192 | 283149 | 090512 | 19, 5, 15 |
| 3 | A4GNT | alpha-1,4-N-acetylglucosaminyl transferase | 118017 | 158163 | 138231 | 37, 17, |
| 3 | ALS2CL | ALS2 C-terminal like | 178038 | 283473 | 181585 | 1, 9, 40 |
| 3 | ACY1 | aminoacylase 1 | 243989 | 114786 | 162244 | 9, 3, 17 |
| 3 | AMT | aminomethyl transferase | 145020 | 145022 | 283189 | 2, 31, 15 |
| 3 | ANAPC13 | anaphase promoting complex subunit 13 | 129055 | 114019 | 182923 | 4, 29, 31 |
| 3 | AMOTL2 | angiomotin like 2 | 114019 | 163785 | 129055 | 42, 12, 1 |
| 3 | AGTR1 | angiotensin II receptor type 1 | 144891 | 152977 | 153002 | 32, 26, 23 |
| 3 | ABTB1 | ankyrin repeat and BTB domain containing 1 | 114626 | 114631 | 074416 | 29, 31, 22 |
| 3 | ASB14 | ankyrin repeat and SOCS box containing 14 | 239388 | 157500 | 174844 | 18, 22, 25 |
| 3 | ANKUB1 | ankyrin repeat and ubiquitin domain containing 1 | 206199 | 114744 | 082996 | |
| 3 | ANKRD28 | ankyrin repeat domain 28 | 206560 | 169814 | 131386 | 37, 21, 40 |
| 3 | ANO10 | anoctamin 10 | 160746 | 163788 | 011198 | 23, |
| 3 | APOD | apolipoprotein D | 189058 | 184203 | 176945 | 26, 10, 1 |
| 3 | ACAP2 | ArfGAP with coiled-coil, ankyrin repeat and PH domains 2 | 114331 | 173950 | 184203 | 22, 11, 6 |
| 3 | RSRC1 | arginine and serine rich coiled-coil 1 | 174891 | 168779 | 178053 | 10, 7, 34 |
| 3 | ARGFX | arginine-fifty homeobox | 186103 | 051341 | 163833 | |
| 3 | ARIH2OS | ariadne homolog 2 opposite strand | 221883 | 178537 | 177479 | 2, 25, 24 |
| 3 | ARIH2 | ariadne RBR E3 ubiquitin protein ligase 2 | 177479 | 221883 | 178467 | 1, 25, 34 |
| 3 | ARMC8 | armadillo repeat containing 8 | 114098 | 138231 | 181322 | 10, 24, 39 |
| 3 | ACTR8 | ARP8 actin-related protein 8 homolog | 113812 | 056736 | 113811 | 6, 38, 24 |
| 3 | ARPC4-TTLL3 | ARPC4-TTLL3 readthrough | 250151 | 241553 | 214021 | |
| 3 | AADAC | arylacetamide deacetylase | 114771 | 197953 | 198829 | 2, 19, 1 |
| 3 | AADACL2 | arylacetamide deacetylase like 2 | 197953 | 152580 | 114771 | 44, 15, 35 |
| 3 | ASTE1 | asteroid homolog 1 (Drosophila) | 034533 | 280127 | 114670 | |
| 3 | ATXN7 | ataxin 7 | 163635 | 163634 | 163636 | 39, 11, 22 |
| 3 | ABCC5 | ATP binding cassette subfamily C member 5 | 114770 | 175193 | 186090 | 24, 18, 13 |
| 3 | ABCF3 | ATP binding cassette subfamily F member 3 | 161204 | 161203 | 145198 | 24, 2, 9 |
| 3 | ATP13A3 | ATPase13A3 | 133657 | 178732 | 145014 | 18, 4, 45 |
| 3 | ATP13A4 | ATPase13A4 | 127249 | 187527 | 198836 | 24, 31, 42 |
| 3 | ATP13A5 | ATPase13A5 | 187527 | 127252 | 127249 | 24, 10, 23 |
| 3 | ATP6V1A | ATPase H+ transporting V1 subunit A | 114573 | 121579 | 178075 | 11, 24, 45 |
| 3 | ATP1B3 | ATPase Na+/K+ transporting subunit beta 3 | 069849 | 114124 | 114126 | 37, 11, 9 |
| 3 | ATP11B | ATPase phospholipid transporting 11B (putative) | 058063 | 181449 | 043093 | 33, 39, 22 |
| 3 | ATP2B2 | ATPase plasma membrane Ca2+ transporting 2 | 157087 | 157020 | 132164 | 18, 8, 36 |
| 3 | ATP2C1 | ATPase secretory pathway Ca2+ transporting 1 | 017260 | 196455 | 280127 | 42, 24, 18 |
| 3 | ATRIP | ATR interacting protein | 164053 | 232112 | 213689 | 38, 13, 5 |
| 3 | ATRIP | ATR interacting protein | 282827 | 232112 | 213689 | 22, 41, 34 |
| 3 | ATR | ATR serine/threonine kinase | 175054 | 114127 | 120756 | 26, 10, 22 |
| 3 | ACKR2 | atypical chemokine receptor 2 | 144648 | 181061 | 273291 | |
| 3 | ACKR4 | atypical chemokine receptor 4 | 129048 | 274810 | 081307 | |
| 3 | ATG3 | autophagy related 3 | 144848 | 186265 | 138459 | 10, 4, 11 |
| 3 | ATG7 | autophagy related 7 | 197548 | 196639 | 144560 | 7, 30, 42 |
| 3 | BTLA | B and T lymphocyte associated | 186265 | 091972 | 144848 | 42, 30, 22 |
| 3 | BHLHE40 | basic helix-loop-helix family member e40 | 134107 | 150995 | 134108 | 4, 1, 40 |
| 3 | BSN | bassoon presynaptic cytomatrix protein | 164061 | 173402 | 164062 | 26, 8, 5 |
| 3 | BBX | BBX, HMG-box containing | 114439 | 138483 | 196776 | 41, 2, 22 |
| 3 | BCL6 | B-cell CLL/lymphoma 6 | 113916 | 198471 | 223401 | 1, 18, 26 |
| 3 | BFSP2 | beaded filament structural protein 2 | 170819 | 144868 | 091527 | 14, 10, |
| 3 | B3GALNT1 | beta-1,3-N-acetylgalactosaminyltransferase 1 (globoside blood group) | 169255 | 163590 | 169251 | |
| 3 | B4GALT4 | beta-1,4-galactosyltransferase 4 | 121578 | 114638 | 031081 | |
| 3 | BTD | biotinidase | 169814 | 131373 | 206560 | 17, 43, 38 |
| 3 | BOC | BOC cell adhesion associated, oncogene regulated | 144857 | 163608 | 206530 | 11, 1, 40 |
| 3 | BAP1 | BRCA1 associated protein 1 | 163930 | 114841 | 010318 | 26, 37, 33 |
| 3 | BRK1 | BRICK1, SCAR/WAVE actin nucleating complex subunit | 254999 | 163705 | 134086 | 7, 11, 30 |
| 3 | BRPF1 | bromodomain and PHD finger containing 1 | 156983 | 144550 | 114026 | 9, 43, 35 |
| 3 | BCHE | butyrylcholinesterase | 114200 | 121871 | 169064 | 10, 40, 43 |
| 3 | CELSR3 | cadherin EGF LAG seven-pass G-type receptor 3 | 008300 | 225697 | 213672 | 21, 40, 26 |
| 3 | CDHR4 | cadherin related family member 4 | 187492 | 176095 | 185614 | 20, 44, 38 |
| 3 | CADPS | calcium dependent secretion activator | 163618 | 153266 | 163630 | 26, 31, 14 |
| 3 | CASR | calcium sensing receptor | 036828 | 114013 | 283187 | 29, 17, 28 |
| 3 | CASR | calcium sensing receptor | 283187 | 036828 | 121552 | 29, 17, 28 |
| 3 | CACNA2D2 | calcium voltage-gated channel auxiliary subunit alpha2delta 2 | 007402 | 126062 | 088543 | 26, 38, 23 |
| 3 | CACNA2D3 | calcium voltage-gated channel auxiliary subunit alpha2delta 3 | 157445 | 113811 | 144771 | 31, 30, 10 |
| 3 | CACNA1D | calcium voltage-gated channel subunit alpha1 D | 157388 | 272886 | 016391 | 31, 16, 20 |
| 3 | CAMK1 | calcium/calmodulin dependent protein kinase I | 134072 | 114026 | 171148 | 22, 9, 27 |
| 3 | CAMK2N2 | calcium/calmodulin dependent protein kinase II inhibitor 2 | 163888 | 145194 | 175166 | 31, 28, 20 |
| 3 | CAPN7 | calpain 7 | 131375 | 131381 | 131370 | |
| 3 | CLSTN2 | calsyntenin 2 | 158258 | 163864 | 155890 | 23, 24, 33 |
| 3 | CAMKV | CaM kinase like vesicle associated | 164076 | 183763 | 164078 | 8, 38, 17 |
| 3 | ARPP21 | cAMP regulated phosphoprotein 21 | 172995 | 170248 | 144681 | 39, 8, 10 |
| 3 | CHST13 | carbohydrate sulfotransferase 13 | 180767 | 159650 | 180697 | 38, 17, 36 |
| 3 | CHST2 | carbohydrate sulfotransferase 2 | 175040 | 163714 | 181804 | 11, 31, 13 |
| 3 | CPA3 | carboxypeptidase A3 | 163751 | 153002 | 163754 | 7, 30, 39 |
| 3 | CPB1 | carboxypeptidase B1 | 153002 | 144891 | 163751 | 28, 4, 19 |
| 3 | CPN2 | carboxypeptidase N subunit 2 | 178772 | 114315 | 172061 | 19, 17, |
| 3 | CRTAP | cartilage associated protein | 170275 | 188167 | 173705 | 42, 18, 2 |
| 3 | CTNNB1 | catenin beta 1 | 168036 | 172888 | 168038 | 42, 24, 39 |
| 3 | CAMP | cathelicidin antimicrobial peptide | 164047 | 164045 | 164048 | 5, 7, 22 |
| 3 | CAV3 | caveolin 3 | 182533 | 125046 | 180914 | 25, 10, 33 |
| 3 | CBLB | Cbl proto-oncogene B | 114423 | 170017 | 138483 | 24, 42, 21 |
| 3 | CCR1 | C-C motif chemokine receptor 1 | 163823 | 183625 | 121807 | 5, 20, 28 |
| 3 | CCR2 | C-C motif chemokine receptor 2 | 121807 | 163823 | 160791 | 42, 36, 39 |
| 3 | CCR3 | C-C motif chemokine receptor 3 | 183625 | 173578 | 163823 | 10, 5, |
| 3 | CCR4 | C-C motif chemokine receptor 4 | 183813 | 206557 | 170266 | 1, 39, 5 |
| 3 | CCR5 | C-C motif chemokine receptor 5 (gene/pseudogene) | 160791 | 121807 | 121797 | 30, 22, 42 |
| 3 | CCR8 | C-C motif chemokine receptor 8 | 179934 | 168329 | 144659 | 5, |
| 3 | CCR9 | C-C motif chemokine receptor 9 | 173585 | 163818 | 163820 | 39, 16, 37 |
| 3 | CCRL2 | C-C motif chemokine receptor like 2 | 121797 | 160791 | 012223 | |
| 3 | CNBP | CCHC-type zinc finger nucleic acid binding protein | 169714 | 240682 | 181789 | 13, 30, 1 |
| 3 | CNOT10 | CCR4-NOT transcription complex subunit 10 | 182973 | 144635 | 206557 | 26, 17, 38 |
| 3 | CD200 | CD200 molecule | 091972 | 172139 | 186265 | 32, 1, 43 |
| 3 | CD200R1 | CD200 receptor 1 | 163606 | 206531 | 163607 | 42, 26, 7 |
| 3 | CD200R1L | CD200 receptor 1 like | 206531 | 091986 | 163606 | 38, |
| 3 | CD47 | CD47 molecule | 196776 | 114439 | 114446 | 13, 10, 18 |
| 3 | CD80 | CD80 molecule | 121594 | 113845 | 144843 | 41, 39, 23 |
| 3 | CD86 | CD86 molecule | 114013 | 145103 | 036828 | 5, 36, 30 |
| 3 | CD96 | CD96 molecule | 153283 | 177707 | 177494 | |
| 3 | CDV3 | CDV3 homolog | 091527 | 170819 | 163781 | 22, 6, 40 |
| 3 | CADM2 | cell adhesion molecule 2 | 175161 | 114480 | 206538 | 44, 8, |
| 3 | CHL1 | cell adhesion molecule L1 like | 134121 | 280530 | 134115 | |
| 3 | CIDEC | cell death inducing DFFA like effector c | 187288 | 156990 | 171135 | 1, 23, 7 |
| 3 | CDC25A | cell division cycle 25A | 164045 | 047849 | 164047 | 21, 25, 3 |
| 3 | CEP19 | centrosomal protein 19 | 174007 | 163964 | 180370 | 31, 15, 19 |
| 3 | CEP63 | centrosomal protein 63 | 182923 | 129055 | 154928 | 13, 40, 34 |
| 3 | CEP70 | centrosomal protein 70 | 114107 | 158220 | 158234 | 38, 39, 33 |
| 3 | CEP97 | centrosomal protein 97 | 182504 | 114391 | 144815 | 30, 7, 23 |
| 3 | CRBN | cereblon | 113851 | 281584 | 144455 | 29, 31, 7 |
| 3 | CP | ceruloplasmin | 047457 | 163755 | 163762 | 42, 19, 24 |
| 3 | CGGBP1 | CGG triplet repeat binding protein 1 | 163320 | 179097 | 175105 | 22, 29, 11 |
| 3 | CHMP2B | charged multivesicular body protein 2B | 083937 | 206538 | 064835 | 13, 45, 29 |
| 3 | CLCN2 | chloride voltage-gated channel 2 | 114859 | 175182 | 163882 | 34, 38, 16 |
| 3 | CCK | cholecystokinin | 187094 | 182606 | 157093 | 3, 32, 8 |
| 3 | CHDH | choline dehydrogenase | 016391 | 157388 | 056736 | 29, 1, 9 |
| 3 | CSPG5 | chondroitin sulfate proteoglycan 5 | 114646 | 163832 | 173473 | 2, 14, 8 |
| 3 | CHRD | chordin | 090539 | 090534 | 182580 | 1, 25, 8 |
| 3 | C3orf14 | chromosome 3 open reading frame 14 | 114405 | 144724 | 153266 | 28, 26, 30 |
| 3 | C3orf18 | chromosome 3 open reading frame 18 | 088543 | 007402 | 114735 | 29, 31, 15 |
| 3 | C3orf20 | chromosome 3 open reading frame 20 | 131379 | 154781 | 154783 | 38, 8, |
| 3 | C3orf22 | chromosome 3 open reading frame 22 | 180697 | 180767 | 283374 | 38, 8, |
| 3 | C3orf30 | chromosome 3 open reading frame 30 | 163424 | 144847 | 251012 | 38, |
| 3 | C3orf33 | chromosome 3 open reading frame 33 | 174928 | 114805 | 169359 | 45, 2, 9 |
| 3 | C3orf36 | chromosome 3 open reading frame 36 | 221972 | 154917 | 174640 | 36, 17, |
| 3 | C3orf38 | chromosome 3 open reading frame 38 | 179021 | 175105 | 283434 | |
| 3 | C3orf49 | Chromosome 3 open reading frame 49 | 163632 | 188817 | 163634 | 10, 44, 20 |
| 3 | C3orf52 | chromosome 3 open reading frame 52 | 114529 | 176040 | 174500 | 39, 22, 20 |
| 3 | C3orf58 | chromosome 3 open reading frame 58 | 181744 | 181804 | 152952 | 24, 23, 11 |
| 3 | C3orf62 | chromosome 3 open reading frame 62 | 188315 | 173421 | 114316 | 11, 26, 35 |
| 3 | C3orf67 | chromosome 3 open reading frame 67 | 163689 | 198643 | 189283 | 10, 22, 38 |
| 3 | C3orf70 | chromosome 3 open reading frame 70 | 187068 | 156931 | 113790 | 31, 42, 32 |
| 3 | C3orf80 | chromosome 3 open reading frame 80 | 180044 | 168811 | 248710 | 8, 20, 44 |
| 3 | C3orf84 | chromosome 3 open reading frame 84 | 236980 | 185909 | 173421 | 38, |
| 3 | CFAP100 | cilia and flagella associated protein 100 | 163885 | 163884 | 070476 | 38, 44, 20 |
| 3 | CFAP44 | cilia and flagella associated protein 44 | 206530 | 144857 | 283241 | |
| 3 | CMTM6 | CKLF like MARVEL transmembrane domain containing 6 | 091317 | 153551 | 144635 | 30, 4, 43 |
| 3 | CMTM7 | CKLF like MARVEL transmembrane domain containing 7 | 153551 | 170293 | 091317 | 18, 35, 43 |
| 3 | CMTM8 | CKLF like MARVEL transmembrane domain containing 8 | 170293 | 152642 | 153551 | 28, 10, 18 |
| 3 | CLRN1 | clarin 1 | 163646 | 260234 | 144893 | 14, 25, |
| 3 | CLDN1 | claudin 1 | 163347 | 090530 | 113946 | 4, 42, 40 |
| 3 | CLDN11 | claudin 11 | 013297 | 136603 | 013293 | 23, 8, |
| 3 | CLDN16 | claudin 16 | 113946 | 163347 | 198398 | 17, 39, 37 |
| 3 | CLDN18 | claudin 18 | 066405 | 168875 | 158163 | 37, 3, 20 |
| 3 | CLDND1 | claudin domain containing 1 | 080822 | 231861 | 080819 | 8, 13, 30 |
| 3 | CMSS1 | cms1 ribosomal small subunit homolog (yeast) | 184220 | 144810 | 168386 | 6, 25, 5 |
| 3 | COPB2 | coatomer protein complex subunit beta 2 | 184432 | 233701 | 114113 | 24, 42, 39 |
| 3 | COPG1 | coatomer protein complex subunit gamma 1 | 181789 | 169714 | 183624 | 43, 24, 1 |
| 3 | CCDC12 | coiled-coil domain containing 12 | 160799 | 160801 | 160796 | 44, 5, 32 |
| 3 | CCDC13 | coiled-coil domain containing 13 | 244607 | 157119 | 280571 | 14, 38, 2 |
| 3 | CCDC14 | coiled-coil domain containing 14 | 175455 | 065534 | 065371 | 39, 22, 13 |
| 3 | CCDC174 | coiled-coil domain containing 174 | 154781 | 144596 | 131379 | 3, 27, 43 |
| 3 | CCDC191 | coiled-coil domain containing 191 | 163617 | 184307 | 151576 | 1, 31, 6 |
| 3 | CCDC36 | coiled-coil domain containing 36 | 173421 | 236980 | 188315 | 18, 38, 13 |
| 3 | CCDC39 | coiled-coil domain containing 39 | 145075 | 163728 | 114416 | |
| 3 | CCDC50 | coiled-coil domain containing 50 | 152492 | 188958 | 114279 | 1, 11, 24 |
| 3 | CCDC51 | coiled-coil domain containing 51 | 164051 | 164050 | 232112 | 9, 40, 21 |
| 3 | CCDC54 | coiled-coil domain containing 54 | 138483 | 114423 | 114439 | 38, 44, |
| 3 | CCDC58 | coiled-coil domain containing 58 | 160124 | 121552 | 114023 | 4, 3, 30 |
| 3 | CCDC66 | coiled-coil domain containing 66 | 180376 | 187672 | 163946 | 4, 30, 12 |
| 3 | CCDC71 | coiled-coil domain containing 71 | 177352 | 172037 | 185909 | 13, 5, 40 |
| 3 | CCDC80 | coiled-coil domain containing 80 | 091986 | 138459 | 206531 | 1, 10, 6 |
| 3 | CHCHD4 | coiled-coil-helix-coiled-coil-helix domain containing 4 | 163528 | 154764 | 170876 | 1, 9, 30 |
| 3 | CHCHD6 | coiled-coil-helix-coiled-coil-helix domain containing 6 | 159685 | 197763 | 114554 | 3, 10, 14 |
| 3 | COLQ | collagen like tail subunit of asymmetric acetylcholinesterase | 206561 | 144597 | 131373 | 10, |
| 3 | COL6A5 | collagen type VI alpha 5 chain | 172752 | 251287 | 206384 | 10, 38, 20 |
| 3 | COL6A6 | collagen type VI alpha 6 chain | 206384 | 172752 | 196455 | 29, 18, 28 |
| 3 | COL7A1 | collagen type VII alpha 1 chain | 114270 | 145040 | 010256 | 18, 4, 13 |
| 3 | COL8A1 | collagen type VIII alpha 1 chain | 144810 | 057019 | 184220 | 6, 1, 45 |
| 3 | COMMD2 | COMM domain containing 2 | 114744 | 018408 | 206199 | 30, 34, 43 |
| 3 | CNTN3 | contactin 3 | 113805 | 121440 | 172969 | 11, 31, 45 |
| 3 | CNTN4 | contactin 4 | 144619 | 134115 | 091181 | 29, 45, 38 |
| 3 | CNTN6 | contactin 6 | 134115 | 134121 | 144619 | 11, 8, 2 |
| 3 | CPNE4 | copine 4 | 196353 | 114686 | 014257 | 33, 38, |
| 3 | CPNE9 | copine family member 9 | 144550 | 163719 | 156983 | 26, 31, 28 |
| 3 | CPOX | coproporphyrinogen oxidase | 080819 | 080822 | 154165 | 19, 28, 5 |
| 3 | COX17 | COX17, cytochrome c oxidase copper chaperone | 138495 | 121577 | 183833 | 31, 15, 29 |
| 3 | CRYBG3 | crystallin beta-gamma domain containing 3 | 080200 | 113966 | 170854 | 26, 24, 16 |
| 3 | CRYGS | crystallin gamma S | 213139 | 058866 | 113838 | 14, 1, 45 |
| 3 | CTDSPL | CTD small phosphatase like | 144677 | 144668 | 136059 | 15, 16, 1 |
| 3 | CLEC3B | C-type lectin domain family 3 member B | 163815 | 075914 | 163814 | 1, 36, 6 |
| 3 | CDCP1 | CUB domain containing protein 1 | 163814 | 163815 | 249992 | 40, 13, 16 |
| 3 | CAND2 | cullin associated and neddylation dissociated 2 (putative) | 144712 | 088726 | 144713 | 40, 11, 31 |
| 3 | CX3CR1 | C-X3-C motif chemokine receptor 1 | 168329 | 168334 | 179934 | 36, 8, 17 |
| 3 | CMC1 | C-X9-C motif containing 1 | 187118 | 163508 | 163512 | 34, 27, 17 |
| 3 | CXCR6 | C-X-C motif chemokine receptor 6 | 172215 | 163820 | 173578 | 32, 36, 44 |
| 3 | CCNL1 | cyclin L1 | 163660 | 197980 | 197415 | |
| 3 | CSTA | cystatin A | 121552 | 283187 | 160124 | 30, 24, 31 |
| 3 | CSRNP1 | cysteine and serine rich nuclear protein 1 | 144655 | 168026 | 168334 | 6, 37, 1 |
| 3 | CRELD1 | cysteine rich with EGF like domains 1 | 163703 | 163702 | 163704 | 1, 43, 9 |
| 3 | CYB561D2 | cytochrome b561 family member D2 | 114395 | 114388 | 272104 | 22, 31, 27 |
| 3 | CYP8B1 | cytochrome P450 family 8 subfamily B member 1 | 180432 | 240747 | 182983 | |
| 3 | CISH | cytokine inducible SH2 containing protein | 114737 | 114735 | 114738 | 27, 32, 7 |
| 3 | CLASP2 | cytoplasmic linker associated protein 2 | 163539 | 153560 | 170248 | 8, 11, 22 |
| 3 | DALRD3 | DALR anticodon binding domain containing 3 | 178149 | 178252 | 178057 | 41, 38, 13 |
| 3 | DZIP1L | DAZ interacting zinc finger protein 1 like | 158163 | 066405 | 118017 | 1, 30, 7 |
| 3 | DZIP3 | DAZ interacting zinc finger protein 3 | 198919 | 280684 | 163515 | 42, 26, 31 |
| 3 | DCAF1 | DDB1 and CUL4 associated factor 1 | 145041 | 259956 | 164080 | 31, 34, 40 |
| 3 | DHX36 | DEAH-box helicase 36 | 174953 | 114790 | 174948 | 11, 12, 35 |
| 3 | DBR1 | debranching RNA lariats 1 | 138231 | 118017 | 114098 | 7, 35, 24 |
| 3 | DCP1A | decapping mRNA 1A | 272886 | 163931 | 157388 | 30, 43, 44 |
| 3 | D0CK3 | dedicator of cytokinesis 3 | 088538 | 114738 | 145050 | 8, 40, 14 |
| 3 | DCUN1D1 | defective in cullin neddylation 1 domain containing 1 | 043093 | 058063 | 078070 | 38, 22, 2 |
| 3 | DAZL | deleted in azoospermia like | 092345 | 131378 | 154822 | 38, 10, 25 |
| 3 | DLEC1 | deleted in lung and esophageal cancer 1 | 008226 | 187091 | 060971 | 20, 40, 38 |
| 3 | DTX3L | deltex E3 ubiquitin ligase 3L | 163840 | 138496 | 173200 | 29, 42, 21 |
| 3 | DENND6A | DENN domain containing 6A | 174839 | 168374 | 163681 | 29, 11, 24 |
| 3 | DNASE1L3 | deoxyribonuclease 1 like 3 | 163687 | 136068 | 163686 | 36, 30, 17 |
| 3 | DPPA2 | developmental pluripotency associated 2 | 163530 | 241224 | 121570 | 10, 38, 12 |
| 3 | DPPA4 | developmental pluripotency associated 4 | 121570 | 163530 | 177707 | 12, 39, 38 |
| 3 | DHX30 | DExH-box helicase 30 | 132153 | 173473 | 047849 | 35, 31, 38 |
| 3 | DGKG | diacylglycerol kinase gamma | 058866 | 244405 | 213139 | 2, 5, 31 |
| 3 | DHFR2 | dihydrofolate reductase 2 | 178700 | 178750 | 178694 | 36, 26, 31 |
| 3 | DPH3 | diphthamide biosynthesis 3 | 154813 | 131386 | 154814 | 31, 45, 43 |
| 3 | DCBLD2 | discoidin, CUB and LCCL domain containing 2 | 057019 | 064225 | 144810 | 45, 43, 40 |
| 3 | DLG1 | discs large MAGUK scaffold protein 1 | 075711 | 163975 | 161267 | 22, 11, 24 |
| 3 | DVL3 | dishevelled segment polarity protein 3 | 161202 | 145191 | 161203 | 40, 18, 16 |
| 3 | DIRC2 | disrupted in renal carcinema 2 | 138463 | 169087 | 082684 | 13, 9, 23 |
| 3 | POLQ | DNA polymerase theta | 051341 | 145087 | 186103 | 18, 11, 22 |
| 3 | DNAJB11 | DnaJ heat shock protein family (Hsp40) member B11 | 090520 | 113838 | 283149 | 40, 11, 15 |
| 3 | DNAJB8 | DnaJ heat shock protein family (Hsp40) member B8 | 179407 | 132394 | 179348 | 38, 5, 8 |
| 3 | DNAJC13 | DnaJ heat shock protein family (Hsp40) member C13 | 138246 | 014257 | 240303 | 24, 29, 31 |
| 3 | DNAJC19 | DnaJ heat shock protein family (Hsp40) member C19 | 205981 | 114416 | 181449 | 33, 31, 34 |
| 3 | DRD3 | dopamine receptor D3 | 151577 | 151576 | 174255 | 38, |
| 3 | DCLK3 | doublecortin like kinase 3 | 163673 | 144681 | 168016 | 38, 10, 45 |
| 3 | DUSP7 | dual specificity phosphatase 7 | 164086 | 162244 | 164087 | 9, 21, 45 |
| 3 | DNAH1 | dynein axonemal heavy chain 1 | 114841 | 168237 | 163930 | 22, 32, 20 |
| 3 | DNAH12 | dynein axonemal heavy chain 12 | 174844 | 239388 | 174840 | 30, 10, 20 |
| 3 | DYNC1LI1 | dynein cytoplasmic 1 light intermediate chain 1 | 144635 | 091317 | 182973 | 43, 31, 15 |
| 3 | DAG1 | dystroglycan 1 | 173402 | 145029 | 164061 | 25, 9, 32 |
| 3 | ENTPD3 | ectonucleoside triphosphate diphosphohydrolase 3 | 168032 | 114784 | 188846 | 28, 26, 31 |
| 3 | EFCC1 | EF-hand and coiled-coil domain containing 1 | 114654 | 187695 | 169704 | 27, 36, 6 |
| 3 | EFCAB12 | EF-hand calcium binding domain 12 | 172771 | 184897 | 129071 | 42, 38, 24 |
| 3 | EFHB | EF-hand domain family member B | 163576 | 183960 | 144566 | 17, 44, |
| 3 | EOGT | EGF domain specific O-linked N-acetylglucosamine transferase | 163378 | 163377 | 144747 | 11, 45, 42 |
| 3 | ERC2 | ELKS/RAB6-interacting/CAST family member 2 | 187672 | 114251 | 180376 | 31, 26, 8 |
| 3 | EAF1 | ELL associated factor 1 | 144597 | 206562 | 206561 | |
| 3 | EAF2 | ELL associated factor 2 | 145088 | 173226 | 163406 | 17, 41, 5 |
| 3 | ELP6 | elongator acetyltransferase complex subunit 6 | 163832 | 114650 | 114646 | 5, 27, 1 |
| 3 | EBLN2 | endogenous Bornavirus-like nucleoprotein 2 | 255423 | 163605 | 121440 | 36, 19, 22 |
| 3 | ECE2 | endothelin converting enzyme 2 | 145194 | 214160 | 163888 | 9, 10, 31 |
| 3 | EHHADH | enoyl-CoA hydratase and 3-hydroxyacyl CoA dehydrogenase | 113790 | 187068 | 073803 | 42, 19, 24 |
| 3 | EOMES | eomesodermin | 163508 | 033867 | 187118 | 30, 12, 8 |
| 3 | EPHA3 | EPH receptor A3 | 044524 | 283434 | 184500 | 42, 33, 8 |
| 3 | EPHA6 | EPH receptor A6 | 080224 | 269028 | 113966 | 38, 33, 8 |
| 3 | EPHB1 | EPH receptor B1 | 154928 | 182923 | 174611 | 8, 38, 23 |
| 3 | EPHB3 | EPH receptor B3 | 182580 | 090539 | 177383 | 34, 16, 18 |
| 3 | ECT2 | epithelial cell transforming 2 | 114346 | 144959 | 144962 | 24, 3, 13 |
| 3 | EPM2AIP1 | EPM2A interacting protein 1 | 178567 | 168016 | 076242 | 18, 11, 42 |
| 3 | EDEM1 | ER degradation enhancing alpha-mannosidase like protein 1 | 134109 | 134108 | 196277 | 22, 39, 9 |
| 3 | EMC3 | ER membrane protein complex subunit 3 | 125037 | 163704 | 144554 | 30, 2, 29 |
| 3 | ETV5 | ETS variant 5 | 244405 | 136527 | 058866 | 35, 42, 38 |
| 3 | EEFSEC | eukaryotic elongation factor, selenocysteine-tRNA specific | 132394 | 175792 | 179407 | 34, 21, 9 |
| 3 | EIF1B | eukaryotic translation initiation factor 1B | 114784 | 170011 | 168032 | 4, 28, 34 |
| 3 | EIF2A | eukaryotic translation initiation factor 2A | 144895 | 120742 | 198843 | 4, 10, 37 |
| 3 | EIF2B5 | eukaryotic translation initiation factor 2B subunit epsilon | 145191 | 186038 | 161202 | 24, 3, 35 |
| 3 | EIF4G1 | eukaryotic translation initiation factor 4 gamma 1 | 114867 | 175166 | 175182 | 23, 3, 18 |
| 3 | EIF4A2 | eukaryotic translation initiation factor 4A2 | 156976 | 113889 | 163918 | 39, 13, 31 |
| 3 | EIF4E3 | eukaryotic translation initiation factor 4E family member 3 | 163412 | 114861 | 170837 | 26, 1, 25 |
| 3 | EIF5A2 | eukaryotic translation initiation factor 5A2 | 163577 | 163584 | 163581 | 31, 11, 34 |
| 3 | EXOG | exo/endonuclease G | 157036 | 114739 | 183873 | 26, 18, 40 |
| 3 | EXOSC7 | exosome component 7 | 075914 | 163812 | 163815 | 29, 41, 11 |
| 3 | ESYT3 | extended synaptotagmin 3 | 158220 | 158186 | 114107 | 38, 17, 32 |
| 3 | FAM107A | family with sequence similarity 107 member A | 168309 | 168306 | 198643 | 8, 14, 15 |
| 3 | FAM131A | family with sequence similarity 131 member A | 175182 | 114867 | 114859 | 6, 28, 8 |
| 3 | FAM162A | family with sequence similarity 162 member A | 114023 | 160124 | 196981 | 29, 11, 15 |
| 3 | FAM19A1 | family with sequence similarity 19 member A1, C-C motif chemokine like | 183662 | 172340 | 163377 | 17, 8, |
| 3 | FAM19A4 | family with sequence similarity 19 member A4, C-C motif chemokine like | 163377 | 183662 | 163378 | 2, 38, 14 |
| 3 | FAM198A | family with sequence similarity 198 member A | 144649 | 182983 | 144647 | 1, 36, 44 |
| 3 | FAM208A | family with sequence similarity 208 member A | 163946 | 180376 | 163947 | 29, 22, 26 |
| 3 | FAM212A | family with sequence similarity 212 member A | 185614 | 187492 | 182179 | 41, 22, 20 |
| 3 | FAM3D | family with sequence similarity 3 member D | 198643 | 168309 | 163689 | 37, 16, 18 |
| 3 | FAM43A | family with sequence similarity 43 member A | 185112 | 041802 | 173950 | 24, 45, 36 |
| 3 | FANCD2OS | FANCD2 opposite strand | 163705 | 144554 | 254999 | |
| 3 | FANCD2 | Fanconi anemia complementation group D2 | 144554 | 125037 | 163705 | 37, 45, 6 |
| 3 | FAIM | Fas apoptotic inhibitory molecule | 158234 | 114107 | 051382 | 13, 14, 3 |
| 3 | FBXL2 | F-box and leucine rich repeat protein 2 | 153558 | 173705 | 153560 | 8, 38, 26 |
| 3 | FBXW12 | F-box and WD repeat domain containing 12 | 164049 | 229453 | 164050 | 38, |
| 3 | FBXO40 | F-box protein 40 | 163833 | 186103 | 180353 | 25, 15, 19 |
| 3 | FBXO45 | F-box protein 45 | 174013 | 185798 | 174004 | 3, 7, 22 |
| 3 | FRMD4B | FERM domain containing 4B | 114541 | 163380 | 187098 | 42, 1, 43 |
| 3 | FETUB | fetuin B | 090512 | 145192 | 113905 | 19, 24, 42 |
| 3 | FEZF2 | FEZ family zinc finger 2 | 153266 | 114405 | 163618 | 14, 8, 12 |
| 3 | FGF12 | fibroblast growth factor 12 | 114279 | 152492 | 180611 | 10, 11, 8 |
| 3 | FNDC3B | fibronectin type III domain containing 3B | 075420 | 186329 | 121853 | 11, 1, 23 |
| 3 | FBLN2 | fibulin 2 | 163520 | 163517 | 154764 | 38, 1, 42 |
| 3 | FILIP1L | filamin A interacting protein 1 like | 168386 | 184220 | 036054 | 45, 18, 25 |
| 3 | FLNB | filamin B | 136068 | 163681 | 163687 | 43, 9, 19 |
| 3 | FXR1 | FMR1 autosomal homolog 1 | 114416 | 145075 | 205981 | 39, 15, 13 |
| 3 | FSTL1 | follistatin like 1 | 163430 | 163428 | 065518 | 42, 18, 12 |
| 3 | FOXL2 | forkhead box L2 | 183770 | 051382 | 206262 | 27, 44, 9 |
| 3 | FOXP1 | forkhead box P1 | 114861 | 242120 | 163412 | 22, 45, 30 |
| 3 | FYTTD1 | forty-two-three domain containing 1 | 122068 | 145016 | 186001 | 38, 22, 39 |
| 3 | FOXL2NB | FOXL2 neighbor | 206262 | 183770 | 206260 | |
| 3 | FHIT | fragile histidine triad | 189283 | 163689 | 144724 | 23, 10, 37 |
| 3 | FRG2C | FSHD region gene 2 family member C | 172969 | 113805 | 227124 | |
| 3 | FYCO1 | FYVE and coiled-coil domain containing 1 | 163820 | 173585 | 172215 | |
| 3 | FGD5 | FYVE, RhoGEF and PH domain containing 5 | 154783 | 131379 | 177463 | 43, 36, 15 |
| 3 | GFM1 | G elongation factor mitochondrial 1 | 168827 | 178053 | 079257 | 42, 24, 26 |
| 3 | GNL3 | G protein nucleolar 3 | 163938 | 163939 | 016864 | 3, 45, 7 |
| 3 | GNAI2 | G protein subunit alpha i2 | 114353 | 188338 | 012171 | 41, 5, 35 |
| 3 | GNAT1 | G protein subunit alpha transducin 1 | 114349 | 001617 | 188338 | 14, 25, 8 |
| 3 | GNB4 | G protein subunit beta 4 | 114450 | 171109 | 136518 | 11, 43, 34 |
| 3 | GPR149 | G protein-coupled receptor 149 | 174948 | 174953 | 196549 | 8, |
| 3 | GPR15 | G protein-coupled receptor 15 | 154165 | 080819 | 064225 | 5, 39, 19 |
| 3 | GPR156 | G protein-coupled receptor 156 | 175697 | 082701 | 163428 | 13, 33, 38 |
| 3 | GPR160 | G protein-coupled receptor 160 | 173890 | 008952 | 173889 | |
| 3 | GPR171 | G protein-coupled receptor 171 | 174946 | 144893 | 174944 | 30, 45, 39 |
| 3 | GPR27 | G protein-coupled receptor 27 | 170837 | 163412 | 163421 | 27, 5, 28 |
| 3 | GPR62 | G protein-coupled receptor 62 | 180929 | 041880 | 090097 | 27, 8, 33 |
| 3 | GPR87 | G protein-coupled receptor 87 | 138271 | 174944 | 181631 | 4, 15, 2 |
| 3 | GRK7 | G protein-coupled receptor kinase 7 | 114124 | 114125 | 069849 | |
| 3 | GLB1 | galactosidase beta 1 | 170266 | 183813 | 188167 | 7, 13, 36 |
| 3 | GABRR3 | gamma-aminobutyric acid type A receptor rho3 subunit (gene/pseudogene) | 183185 | 170854 | 213439 | 2, 14, |
| 3 | GATA2 | GATA binding protein 2 | 179348 | 179407 | 163902 | 32, 33, 11 |
| 3 | GMPPB | GDP-mannose pyrophosphorylase B | 173540 | 176020 | 176095 | 42, 32, 35 |
| 3 | GMNC | geminin coiled-coil domain containing | 205835 | 196083 | 188729 | 42, 44, 27 |
| 3 | GTF2E1 | general transcription factor HE subunit 1 | 153767 | 144840 | 145087 | 39, 24, 38 |
| 3 | GCSAM | germinal center associated signaling and motility | 174500 | 114529 | 172139 | 21, 22, 5 |
| 3 | GHRL | ghrelin and obestatin prepropeptide | 157017 | 272410 | 157020 | 5, 10, 37 |
| 3 | GXYLT2 | glucoside xylosyltransferase 2 | 172986 | 144736 | 163605 | 31, 29, 18 |
| 3 | GADL1 | glutamate decarboxylase like 1 | 144644 | 163513 | 163527 | 42, 5, |
| 3 | GRM2 | glutamate metabotropic receptor 2 | 164082 | 164081 | 214686 | 8, 42, 14 |
| 3 | GRM7 | glutamate metabotropic receptor 7 | 196277 | 134109 | 071282 | 42, 8, 14 |
| 3 | GRIP2 | glutamate receptor interacting protein 2 | 144596 | 131389 | 154781 | 26, 6, 3 |
| 3 | ERICH6 | glutamate rich 6 | 163645 | 198843 | 181788 | 38, 33, |
| 3 | QRICH1 | glutamine rich 1 | 198218 | 178035 | 172053 | 39, 38, 42 |
| 3 | QARS | glutaminyl-tRNA synthetase | 172053 | 198218 | 172046 | 39, 36, 45 |
| 3 | GPX1 | glutathione peroxidase 1 | 233276 | 114316 | 067560 | 43, 1, 34 |
| 3 | GLYCTK | glycerate kinase | 168237 | 164091 | 114841 | 24, 19, 5 |
| 3 | GK5 | glycerol kinase 5 (putative) | 175066 | 114126 | 114127 | |
| 3 | GPD1L | glycerol-3-phosphate dehydrogenase 1-like | 152642 | 197385 | 170293 | 42, 24, 15 |
| 3 | GSK3B | glycogen synthase kinase 3 beta | 082701 | 144852 | 175697 | 29, 10, 22 |
| 3 | GYG1 | glycogenin 1 | 163754 | 163751 | 071794 | |
| 3 | GP9 | glycoprotein IX platelet | 169704 | 114654 | 172780 | 15, 14, 20 |
| 3 | GP5 | glycoprotein V platelet | 178732 | 172061 | 133657 | 7, |
| 3 | GLT8D1 | glycosyltransferase 8 domain containing 1 | 016864 | 163938 | 114902 | 31, 38, 2 |
| 3 | GOLIM4 | golgi integral membrane protein 4 | 173905 | 163536 | 085276 | 16, 45, 13 |
| 3 | GORASP1 | golgi reassembly stacking protein 1 | 114745 | 114742 | 168026 | 39, 27, 13 |
| 3 | GOLGA4 | golgin A4 | 144674 | 093167 | 144668 | 37, 24, 19 |
| 3 | GOLGB1 | golgin B1 | 173230 | 180353 | 173226 | 18, 40, 29 |
| 3 | GRAMD1C | GRAM domain containing 1C | 178075 | 114573 | 184307 | 42, 38, 31 |
| 3 | GAP43 | growth associated protein 43 | 172020 | 279380 | 185565 | 26, 10, 8 |
| 3 | GHSR | growth hormone secretagogue receptor | 121853 | 075420 | 121858 | 20, |
| 3 | GTPBP8 | GTP binding protein 8 (putative) | 163607 | 163606 | 163608 | 31, 41, 42 |
| 3 | GMPS | guanine monophosphate synthase | 163655 | 169359 | 169282 | 13, 3, 5 |
| 3 | GUCA1C | guanylate cyclase activator 1C | 138472 | 163519 | 114487 | 14, 10, 5 |
| 3 | H1FOO | H1 histone family member O, oocyte specific | 178804 | 163914 | 004399 | 38, |
| 3 | H1FX | H1 histone family member X | 184897 | 183624 | 172771 | 20, 33, 6 |
| 3 | HEG1 | heart development protein with EGF like domains 1 | 173706 | 173702 | 221955 | 1, 40, 10 |
| 3 | HHATL | hedgehog acyltransferase-like | 010282 | 157119 | 280571 | 25, 24, 14 |
| 3 | HLTF | helicase like transcription factor | 071794 | 163754 | 163755 | 2, 26, 9 |
| 3 | HCLS1 | hematopoietic cell-specific Lyn substrate 1 | 180353 | 163833 | 173230 | 21, 36, 30 |
| 3 | HEMK1 | HemK methyltransferase family member 1 | 114735 | 088543 | 114737 | 22, 34, 17 |
| 3 | HHLA2 | HERV-H LTR-associating 2 | 114455 | 114446 | 144821 | 16, 42, 3 |
| 3 | HES1 | hes family bHLH transcription factor 1 | 114315 | 198836 | 178772 | 19, 29, 26 |
| 3 | HESX1 | HESX homeobox 1 | 163666 | 144730 | 157500 | 27, 44, 16 |
| 3 | HIGD1A | HIG1 hypoxia inducible domain family member 1A | 181061 | 280571 | 144648 | |
| 3 | HRH1 | histamine receptor H1 | 196639 | 157103 | 197548 | 10, 26, 13 |
| 3 | HRG | histidine rich glycoprotein | 113905 | 090512 | 113889 | 19, 23, 17 |
| 3 | HDAC11 | histone deacetylase 11 | 163517 | 132182 | 163520 | 8, 43, 26 |
| 3 | HGD | homogentisate 1,2-dioxygenase | 113924 | 065518 | 144840 | 19, 17, 16 |
| 3 | HPS3 | HPS3, biogenesis of lysosomal organelles complex 2 subunit 1 | 163755 | 071794 | 047457 | 24, 22, 9 |
| 3 | HRASLS | HRAS like suppressor | 127252 | 180611 | 187527 | 27, 31, 38 |
| 3 | HSPBAP1 | HSPB1 associated protein 1 | 169087 | 173193 | 138463 | 6, 9, 32 |
| 3 | HYAL1 | hyaluronoglucosaminidase 1 | 114378 | 243477 | 068001 | 36, 9, 2 |
| 3 | HYAL2 | hyaluronoglucosaminidase 2 | 068001 | 114378 | 114383 | 1, 36, 45 |
| 3 | HYAL3 | hyaluronoglucosaminidase 3 | 186792 | 214706 | 243477 | |
| 3 | ILDR1 | immunoglobulin like domain containing receptor 1 | 145103 | 163406 | 114013 | 26, 27, 4 |
| 3 | IGSF10 | immunoglobulin superfamily member 10 | 152580 | 169313 | 197953 | 20, |
| 3 | IGSF11 | immunoglobulin superfamily member 11 | 144847 | 185565 | 163424 | 26, 38, 8 |
| 3 | IMPDH2 | inosine monophosphate dehydrogenase 2 | 178035 | 178057 | 198218 | 41, 21, 27 |
| 3 | ITPR1 | inositol 1,4,5-trisphosphate receptor type 1 | 150995 | 170364 | 134107 | 29, 26, 31 |
| 3 | IP6K1 | inositol hexakisphosphate kinase 1 | 176095 | 173540 | 187492 | 43, 11, 26 |
| 3 | IP6K2 | inositol hexakisphosphate kinase 2 | 068745 | 213672 | 114302 | 39, 29, 44 |
| 3 | IGF2BP2 | insulin like growth factor 2 mRNA binding protein 2 | 073792 | 163904 | 136527 | 12, 11, 18 |
| 3 | ITGA9 | integrin subunit alpha 9 | 144668 | 144674 | 144677 | 2, 15, 40 |
| 3 | ITGB5 | integrin subunit beta 5 | 082781 | 114491 | 173702 | 27, 24, 34 |
| 3 | ITIH1 | inter-alpha-trypsin inhibitor heavy chain 1 | 055957 | 114904 | 162267 | 19, 36, 23 |
| 3 | ITIH3 | inter-alpha-trypsin inhibitor heavy chain 3 | 162267 | 055957 | 055955 | 19, 15, 36 |
| 3 | ITIH4 | inter-alpha-trypsin inhibitor heavy chain family member 4 | 055955 | 162267 | 243696 | 19, 4, 26 |
| 3 | IFRD2 | interferon related developmental regulator 2 | 214706 | 179564 | 186792 | 9, 37, 41 |
| 3 | IL1RAP | interleukin 1 receptor accessory protein | 196083 | 198398 | 205835 | 18, 32, 7 |
| 3 | IRAK2 | interleukin 1 receptor associated kinase 2 | 134070 | 134086 | 157014 | 9, 4, 7 |
| 3 | IL12A | interleukin 12A | 168811 | 151967 | 180044 | 36, 16, 44 |
| 3 | IL17RB | interleukin 17 receptor B | 056736 | 016391 | 113812 | 9, 17, 26 |
| 3 | IL17RC | interleukin 17 receptor C | 163702 | 163701 | 163703 | 33, 29, 9 |
| 3 | IL17RD | interleukin 17 receptor D | 144730 | 186451 | 163666 | 12, 11, 38 |
| 3 | IL17RE | interleukin 17 receptor E | 163701 | 171135 | 163702 | 37, 39, 16 |
| 3 | IL20RB | interleukin 20 receptor subunit beta | 174564 | 158092 | 168875 | 30, 9, 18 |
| 3 | IL5RA | interleukin 5 receptor subunit alpha | 091181 | 144619 | 072756 | 42, 35, 33 |
| 3 | IMPG2 | interphotoreceptor matrix proteoglycan 2 | 081148 | 154175 | 138468 | 14, 25, 22 |
| 3 | IFT122 | intraflagellar transport 122 | 163913 | 129071 | 163914 | 38, 42, 24 |
| 3 | IFT57 | intraflagellar transport 57 | 114446 | 196776 | 114455 | 22, 1, 31 |
| 3 | IFT80 | intraflagellar transport 80 | 068885 | 248710 | 113810 | 39, 38, |
| 3 | IQSEC1 | IQ motif and Sec7 domain 1 | 144711 | 144713 | 132182 | 29, 14, 18 |
| 3 | IQCB1 | IQ motif containing B1 | 173226 | 173230 | 145088 | 9, 7, 22 |
| 3 | IQCF1 | IQ motif containing F1 | 173389 | 214681 | 114767 | 38, 8, |
| 3 | IQCF2 | IQ motif containing F2 | 184345 | 229972 | 214681 | 38, 8, |
| 3 | IQCF3 | IQ motif containing F3 | 229972 | 214686 | 184345 | 38, 20, |
| 3 | IQCF5 | IQ motif containing F5 | 214681 | 184345 | 173389 | 38, |
| 3 | IQCF6 | IQ motif containing F6 | 214686 | 164082 | 229972 | 38, |
| 3 | IQCG | IQ motif containing G | 114473 | 186001 | 182899 | |
| 3 | IQCJ | IQ motif containing J | 214216 | 118855 | 283154 | 17, 8, 38 |
| 3 | IQCJ-SCHIP1 | IQCJ-SCHIP1 readthrough | 283154 | 214216 | 283245 | |
| 3 | ISY1 | ISY1 splicing factor homolog | 240682 | 261796 | 169714 | 41, 35, 27 |
| 3 | ISY1-RAB43 | ISY1-RAB43 readthrough | 261796 | 172780 | 240682 | 41, 35, 27 |
| 3 | JAGN1 | jagunal homolog 1 | 171135 | 187288 | 163701 | 9, 1, 6 |
| 3 | KALRN | kalirin, RhoGEF kinase | 160145 | 065371 | 114491 | 3, 34, 29 |
| 3 | KPNA1 | karyopherin subunit alpha 1 | 114030 | 196981 | 138496 | 45, 9, 24 |
| 3 | KPNA4 | karyopherin subunit alpha 4 | 186432 | 213186 | 179674 | 18, 23, 2 |
| 3 | KLHDC8B | kelch domain containing 8B | 185909 | 177352 | 236980 | 1, 29, 2 |
| 3 | KLHL18 | kelch like family member 18 | 114648 | 088727 | 076201 | 26, 25, 22 |
| 3 | KLHL24 | kelch like family member 24 | 114796 | 172578 | 163872 | 40, 35, 24 |
| 3 | KLHL40 | kelch like family member 40 | 157119 | 114853 | 010282 | 24, 15, 25 |
| 3 | KLHL6 | kelch like family member 6 | 172578 | 176597 | 114796 | 22, 21, 39 |
| 3 | KBTBD12 | kelch repeat and BTB domain containing 12 | 187715 | 074416 | 058262 | 25, 38, 33 |
| 3 | KBTBD8 | kelch repeat and BTB domain containing 8 | 163376 | 144749 | 172340 | 22, 10, 39 |
| 3 | KIAA1143 | KIAA1143 | 163807 | 186446 | 163808 | 1, 42, 21 |
| 3 | KIAA1257 | KIAA1257 | 114656 | 177646 | 187695 | 38, 30, 24 |
| 3 | KIAA1524 | KIAA1524 | 163507 | 144821 | 280684 | 23, 39, 13 |
| 3 | KIF15 | kinesin family member 15 | 163808 | 163807 | 169964 | 12, 3, 34 |
| 3 | KIF9 | kinesin family member 9 | 088727 | 181555 | 114648 | 38, 17, 40 |
| 3 | KNG1 | kininogen 1 | 113889 | 113905 | 156976 | 19, 17, 23 |
| 3 | KRBOX1 | KRAB box domain containing 1 | 240747 | 273291 | 180432 | 38, 34, 15 |
| 3 | KLF15 | Kruppel like factor 15 | 163884 | 144908 | 163885 | 26, 17, 33 |
| 3 | KY | kyphoscoliosis peptidase | 174611 | 154928 | 073711 | 18, 2, 37 |
| 3 | LTF | lactotransferrin | 012223 | 121797 | 163825 | 42, 5, 30 |
| 3 | LAMB2 | laminin subunit beta 2 | 172037 | 172046 | 177352 | 1, 26, 6 |
| 3 | LSG1 | large 60S subunit nuclear export GTPase 1 | 041802 | 145014 | 185112 | 24, 3, 11 |
| 3 | LXN | latexin | 079257 | 168827 | 118849 | 5, 1, 43 |
| 3 | LMOD3 | leiomodin 3 | 163380 | 144746 | 114541 | 15, 25, 26 |
| 3 | LMLN | leishmanolysin like peptidase | 185621 | 182899 | 280530 | 43, 11, 42 |
| 3 | LRRC15 | leucine rich repeat containing 15 | 172061 | 178772 | 178732 | 6, 15, 24 |
| 3 | LRRC2 | leucine rich repeat containing 2 | 163827 | 163825 | 241186 | 25, 11, 15 |
| 3 | LRRC31 | leucine rich repeat containing 31 | 114248 | 188306 | 187033 | 37, 40, 16 |
| 3 | LRRC34 | leucine rich repeat containing 34 | 171757 | 085274 | 188306 | 31, 5, 38 |
| 3 | LRRC3B | leucine rich repeat containing 3B | 179796 | 151093 | 163491 | |
| 3 | LRRC58 | leucine rich repeat containing 58 | 163428 | 175697 | 163430 | 2, 1, 29 |
| 3 | LRRN1 | leucine rich repeat neuronal 1 | 175928 | 144455 | 170364 | |
| 3 | LRCH3 | leucine rich repeats and calponin homology domain containing 3 | 186001 | 122068 | 114473 | 33, 14, 12 |
| 3 | LRIG1 | leucine rich repeats and immunoglobulin like domains 1 | 144749 | 144741 | 163376 | 42, 11, 15 |
| 3 | LRRIQ4 | leucine rich repeats and IQ motif containing 4 | 188306 | 171757 | 114248 | 10, 20, 38 |
| 3 | LRTM1 | leucine rich repeats and transmembrane domains 1 | 144771 | 157445 | 114251 | 14, 28, 20 |
| 3 | LSMEM2 | leucine rich single-pass membrane protein 2 | 179564 | 012171 | 214706 | 33, 22, 15 |
| 3 | LZTFL1 | leucine zipper transcription factor like 1 | 163818 | 163817 | 173585 | |
| 3 | LEKR1 | leucine, glutamate and lysine rich 1 | 197980 | 163659 | 163660 | 34, 42, 4 |
| 3 | LARS2 | leucyl-tRNA synthetase 2, mitochondrial | 011376 | 249992 | 144791 | 43, 42, 41 |
| 3 | LNP1 | leukemia NUP98 fusion partner 1 | 206535 | 154174 | 181458 | 35, 38, 14 |
| 3 | LMCD1 | LIM and cysteine rich domains 1 | 071282 | 196277 | 125046 | 29, 43, 15 |
| 3 | LPP | LIM domain containing preferred translocation partner in lipoma | 145012 | 223401 | 188001 | 22, 42, 25 |
| 3 | LIMD1 | LIM domains containing 1 | 144791 | 011376 | 211456 | 2, 40, 37 |
| 3 | LSAMP | limbic system-associated membrane protein | 185565 | 172020 | 144847 | 34, 14, 22 |
| 3 | LIPH | lipase H | 163898 | 163900 | 163904 | 16, 3, 24 |
| 3 | LHFPL4 | lipoma HMGIC fusion partner-like 4 | 156959 | 168137 | 163719 | 14, 28, 8 |
| 3 | LINC00694 | Long intergenic non-protein coding RNA 694 | 225873 | 179152 | 185219 | 32, 38, |
| 3 | LRRFIP2 | LRR binding FLU interacting protein 2 | 093167 | 076242 | 144674 | 26, 4, 36 |
| 3 | LSM3 | LSM3 homolog, U6 small nuclear RNA and mRNA degradation associated | 170860 | 154767 | 131389 | 11, 29, 43 |
| 3 | KAT2B | lysine acetyltransferase 2B | 114166 | 183977 | 129810 | 26, 45, 11 |
| 3 | LAMP3 | lysosomal associated membrane protein 3 | 078081 | 078070 | 053524 | 39, 13, 30 |
| 3 | LYZL4 | lysozyme like 4 | 157093 | 187094 | 114812 | 10, 38, 14 |
| 3 | MB21D2 | Mab-21 domain containing 2 | 180611 | 114279 | 127252 | 17, 32, 24 |
| 3 | MST1 | macrophage stimulating 1 | 173531 | 164062 | 164068 | |
| 3 | MST1R | macrophage stimulating 1 receptor | 164078 | 164076 | 164077 | 16, 37, 33 |
| 3 | MAGEF1 | MAGE family member F1 | 177383 | 182580 | 156931 | 41, 21, 35 |
| 3 | MFSD1 | major facilitator superfamily domain containing 1 | 118855 | 118849 | 214216 | 2, 36, 24 |
| 3 | MKRN2 | makorin ring finger protein 2 | 075975 | 225526 | 132155 | 7, 38, 11 |
| 3 | MSL2 | male-specific lethal 2 homolog (Drosophila) | 174579 | 073711 | 114054 | 39, 24, 40 |
| 3 | MASP1 | mannan binding lectin serine peptidase 1 | 127241 | 175077 | 136514 | 44, 42, 19 |
| 3 | MAP6D1 | MAP6 domain containing 1 | 180834 | 163872 | 175193 | 8, 29, 22 |
| 3 | MCF2L2 | MCF.2 cell line derived transforming sequence-like 2 | 053524 | 078081 | 176597 | 24, 18, 1 |
| 3 | MECOM | MDS1 and EV11 complex locus | 085276 | 173905 | 281137 | |
| 3 | MED12L | mediator complex subunit 12 like | 144893 | 163646 | 174946 | |
| 3 | MITF | melanogenesis associated transcription factor | 187098 | 114541 | 242120 | 35, 1, 15 |
| 3 | MELTF | melanotransferrin | 163975 | 119227 | 075711 | 3, 35, 28 |
| 3 | MAGI1 | membrane associated guanylate kinase, WW and PDZ domain containing 1 | 151276 | 163638 | 144741 | 36, 23, 31 |
| 3 | MME | membrane metalloendopeptidase | 196549 | 174948 | 240045 | 22, 17, 6 |
| 3 | MANF | mesencephalic astrocyte derived neurotrophic factor | 145050 | 088538 | 259956 | 28, 43, 35 |
| 3 | MBD4 | methyl-CpG binding domain 4, DNA glycosylase | 129071 | 172771 | 163913 | 13, 39, 22 |
| 3 | MCCC1 | methylcrotonoyl-CoA carboxylase 1 | 078070 | 043093 | 078081 | 13, 17, 10 |
| 3 | METTL6 | methyltransferase like 6 | 206562 | 131370 | 144597 | 30, 43, 26 |
| 3 | MAP4 | microtubule associated protein 4 | 047849 | 132153 | 164045 | 21, 26, 14 |
| 3 | MCM2 | minichromosome maintenance complex component 2 | 073111 | 163870 | 114631 | 21, 39, 24 |
| 3 | MRPL3 | mitochondrial ribosomal protein L3 | 114686 | 198585 | 196353 | 2, 37, 41 |
| 3 | MRPL47 | mitochondrial ribosomal protein L47 | 136522 | 136518 | 136521 | 24, 29, 2 |
| 3 | MRPS22 | mitochondrial ribosomal protein S22 | 175110 | 206260 | 184814 | |
| 3 | MRPS25 | mitochondrial ribosomal protein S25 | 131368 | 177463 | 131381 | |
| 3 | MFN1 | mitofusin 1 | 171109 | 121864 | 114450 | 42, 35, 3 |
| 3 | MAP3K13 | mitogen-activated protein kinase kinase kinase 13 | 073803 | 113790 | 163900 | |
| 3 | MAPKAPK3 | mitogen-activated protein kinase-activated protein kinase 3 | 114738 | 114737 | 088538 | 40, 5, 3 |
| 3 | MKRN20S | MKRN2 opposite strand | 225526 | 154743 | 075975 | 44, |
| 3 | MON1A | MON1 homolog A, secretory trafficking associated | 164077 | 164078 | 004534 | 9, 2, 43 |
| 3 | MGLL | monoglyceride lipase | 074416 | 114626 | 187715 | 1, 28, 43 |
| 3 | MORC1 | MORO family CW-type zinc finger 1 | 114487 | 138472 | 241224 | 10, 38, |
| 3 | MTRNR2L12 | MT-RNR2-like 12 | 269028 | 178694 | 080224 | 14, 35, 38 |
| 3 | MUC13 | mucin 13, cell surface associated | 173702 | 082781 | 173706 | 16, 37, 42 |
| 3 | MUC20 | mucin 20, cell surface associated | 176945 | 189058 | 145113 | 13, 24, 17 |
| 3 | MUC4 | mucin 4, cell surface associated | 145113 | 176945 | 061938 | 30, 24, 37 |
| 3 | MRAS | muscle RAS oncogene homolog | 158186 | 181322 | 158220 | 26, 1, 2 |
| 3 | MBNL1 | muscleblind like splicing regulator 1 | 152601 | 198829 | 169860 | 45, 22, 34 |
| 3 | MUSTN1 | musculoskeletal, embryonic nuclear protein 1 | 272573 | 243696 | 248592 | 25, 1, 15 |
| 3 | MLH1 | mutL homolog 1 | 076242 | 178567 | 093167 | 13, 10, 21 |
| 3 | MINA | MYC induced nuclear antigen | 170854 | 080200 | 183185 | 11, 4, 1 |
| 3 | MAATS1 | MYCBP associated and testis expressed 1 | 183833 | 138495 | 144852 | 38, 26, 31 |
| 3 | MOBP | myelin-associated oligodendrocyte basic protein | 168314 | 168028 | 170011 | 8, 26, 17 |
| 3 | MYD88 | myeloid differentiation primary response 88 | 172936 | 060971 | 172939 | 5, 36, 24 |
| 3 | MLF1 | myeloid leukemia factor 1 | 178053 | 174891 | 168827 | 4, 38, 30 |
| 3 | MYNN | myoneurin | 085274 | 184378 | 171757 | 42, 30, 31 |
| 3 | MYH15 | myosin heavy chain 15 | 144821 | 114455 | 163507 | 10, 42, 44 |
| 3 | MYL3 | myosin light chain 3 | 160808 | 178055 | 160801 | |
| 3 | MYLK | myosin light chain kinase | 065534 | 206527 | 175455 | 44, 13, 33 |
| 3 | MYRIP | myosin VIIA and Rab interacting protein | 170011 | 168314 | 114784 | 11, 45, 2 |
| 3 | MTMR14 | myotubularin related protein 14 | 163719 | 156959 | 144550 | 36, 5, 38 |
| 3 | NAA50 | N(alpha)-acetyltransferase 50, NatE catalytic subunit | 121579 | 176542 | 114573 | 42, 24, 22 |
| 3 | NAALADL2 | N-acetylated alpha-linked acidic dipeptidase like 2 | 177694 | 169760 | 177565 | |
| 3 | NAT6 | N-acetyltransferase 6 | 243477 | 186792 | 114378 | |
| 3 | NDUFAF3 | NADH: ubiquinone oxidoreductase complex assembly factor 3 | 178057 | 178149 | 178035 | 41, 38, 26 |
| 3 | NDUFB4 | NADH: ubiquinone oxidoreductase subunit B4 | 065518 | 163430 | 113924 | 7, 2, 25 |
| 3 | NDUFB5 | NADH: ubiquinone oxidoreductase subunit B5 | 136521 | 136522 | 058056 | 34, 4, 29 |
| 3 | NKTR | natural killer cell triggering receptor | 114857 | 008324 | 114853 | 22, 29, 40 |
| 3 | NCBP2-AS2 | NCBP2 antisense RNA 2 (head to head) | 270170 | 114503 | 119227 | |
| 3 | NCK1 | NCK adaptor protein 1 | 158092 | 168917 | 174564 | 43, 39, 18 |
| 3 | NCKIPSD | NCK interacting protein with SH3 domain | 213672 | 008300 | 068745 | 21, 3, 43 |
| 3 | NECTIN3 | nectin cell adhesion molecule 3 | 177707 | 121570 | 153283 | 32, 38, |
| 3 | NRROS | negative regulator of reactive oxygen species | 174004 | 174013 | 163964 | 5, 32, 21 |
| 3 | NPHP3 | nephrocystin 3 | 113971 | 081307 | 144868 | 11, 36, 45 |
| 3 | NXPE3 | neurexophilin and PC-esterase domain family member 3 | 144815 | 182504 | 144802 | 37, 13, 2 |
| 3 | NBEAL2 | neurobeachin like 2 | 160796 | 160799 | 181555 | 22, 5, 26 |
| 3 | NLGN1 | neuroligin 1 | 169760 | 144962 | 177694 | |
| 3 | NCEH1 | neutral cholesterol ester hydrolase 1 | 144959 | 121858 | 114346 | 24, 4, 42 |
| 3 | NKIRAS1 | NFKB inhibitor interacting Ras like 1 | 197885 | 170142 | 174748 | 15, 8, 38 |
| 3 | NFKBIZ | NFKB inhibitor zeta | 144802 | 144815 | 170044 | 40, 37, 20 |
| 3 | NGLY1 | N-glycanase 1 | 151092 | 077097 | 151093 | 34, 5, 11 |
| 3 | NICN1 | nicolin 1 | 145029 | 283189 | 173402 | 29, 1, 30 |
| 3 | NMNAT3 | nicotinamide nucleotide adenylyltransferase 3 | 163864 | 114115 | 158258 | 14, 38, 18 |
| 3 | NEK10 | NIMA related kinase 10 | 163491 | 179796 | 033867 | |
| 3 | NEK11 | NIMA related kinase 11 | 114670 | 034533 | 198585 | 10, 31, 5 |
| 3 | NEK4 | NIMA related kinase 4 | 114904 | 114902 | 055957 | 38, 1, 13 |
| 3 | NISCH | nischarin | 010322 | 114854 | 010327 | 21, 38, 33 |
| 3 | NIT2 | nitrilase family member 2 | 114021 | 036054 | 154174 | 40, 4, 17 |
| 3 | NMD3 | NMD3 ribosome export adaptor | 169251 | 169255 | 196542 | 4, 24, 45 |
| 3 | NME9 | NME/NM23 family member 9 | 181322 | 114098 | 158186 | 40, 30, 4 |
| 3 | NME6 | NME/NM23 nucleoside diphosphate kinase 6 | 172113 | 164048 | 229453 | 21, 45, 25 |
| 3 | NSUN3 | NOP2/Sun RNA methyltransferase family member 3 | 178694 | 178700 | 269028 | |
| 3 | NPHP3- | NPHP3-ACAD11 readthrough (NMD candidate) | 274810 | 240303 | 129048 | 11, 36, 45 |
| | ACAD11 | | | | | |
| 3 | NPRL2 | NPR2-like, GATOR1 complex subunit | 114388 | 004838 | 114395 | 39, 36, 16 |
| 3 | NCBP2 | nuclear cap binding protein subunit 2 | 114503 | 119231 | 270170 | 13, 45, 36 |
| 3 | NR1D2 | nuclear receptor subfamily 1 group D member 2 | 174738 | 174748 | 151090 | 14, 4, 6 |
| 3 | NR1I2 | nuclear receptor subfamily 1 group I member 2 | 144852 | 183833 | 082701 | 19, 7, 37 |
| 3 | NR2C2 | nuclear receptor subfamily 2 group C member 2 | 177463 | 154783 | 131368 | 31, 42, 22 |
| 3 | NEPRO | nucleolus and neural progenitor protein | 163608 | 163607 | 144857 | 42, 36, 1 |
| 3 | NUP210 | nucleoporin 210 | 132182 | 144711 | 163517 | 22, 20, 33 |
| 3 | NUDT16 | nudix hydrolase 16 | 198585 | 114670 | 114686 | 26, 17, 40 |
| 3 | OR5AC1 | olfactory receptor family 5 subfamily AC member 1 (gene/pseudogene) | 213439 | 183185 | 196578 | |
| 3 | OR5AC2 | olfactory receptor family 5 subfamily AC member 2 | 196578 | 213439 | 231192 | |
| 3 | OR5H1 | olfactory receptor family 5 subfamily H member 1 | 231192 | 196578 | 236032 | |
| 3 | OR5H14 | olfactory receptor family 5 subfamily H member 14 | 236032 | 231192 | 233412 | |
| 3 | OR5H15 | olfactory receptor family 5 subfamily H member 15 | 233412 | 236032 | 230301 | |
| 3 | OR5H2 | olfactory receptor family 5 subfamily H member 2 | 197938 | 230301 | 232535 | |
| 3 | OR5H6 | olfactory receptor family 5 subfamily H member 6 (gene/pseudogene) | 230301 | 233412 | 197938 | |
| 3 | OR5H8 | olfactory receptor family 5 subfamily H member 8 (gene/pseudogene) | 232535 | 197938 | 196098 | |
| 3 | OR5K1 | olfactory receptor family 5 subfamily K member 1 | 232382 | 206536 | 231861 | |
| 3 | OR5K2 | olfactory receptor family 5 subfamily K member 2 | 231861 | 232382 | 080822 | |
| 3 | OR5K3 | olfactory receptor family 5 subfamily K member 3 | 206536 | 196098 | 232382 | |
| 3 | OR5K4 | olfactory receptor family 5 subfamily K member 4 | 196098 | 232535 | 206536 | |
| 3 | OPA1 | OPA1, mitochondrial dynamin like GTPase | 198836 | 127249 | 114315 | 7, 40, 6 |
| 3 | OSTN | osteocrin | 188729 | 205835 | 188958 | |
| 3 | OTOL1 | otolin 1 | 182447 | 196542 | 090402 | |
| 3 | OXSR1 | oxidative stress responsive 1 | 172939 | 172936 | 172940 | 26, 11, 12 |
| 3 | OXNAD1 | oxidoreductase NAD binding domain containing 1 | 154814 | 154813 | 131378 | 39, 40, 31 |
| 3 | OSBPL10 | oxysterol binding protein like 10 | 144645 | 163527 | 197385 | 44, |
| 3 | OSBPL11 | oxysterol binding protein like 11 | 144909 | 114520 | 189366 | 18, 4, 22 |
| 3 | OXTR | oxytocin receptor | 180914 | 182533 | 070950 | 35, 17, 44 |
| 3 | PAK2 | p21 (RAC1) activated kinase 2 | 180370 | 174007 | 119231 | 30, 29, 4 |
| 3 | PTH1R | parathyroid hormone 1 receptor | 160801 | 160808 | 160799 | 6, 26, 15 |
| 3 | PDZRN3 | PDZ domain containing ring finger 3 | 121440 | 255423 | 113805 | 18, 38, 1 |
| 3 | PTX3 | pentraxin 3 | 163661 | 197415 | 174899 | 7, 10, 6 |
| 3 | PEX5L | peroxisomal biogenesis factor 5 like | 114757 | 058056 | 163728 | 29, 11, 8 |
| 3 | PPARG | peroxisome proliferator activated receptor gamma | 132170 | 157150 | 154743 | 32, 16, 1 |
| 3 | PCNP | PEST proteolytic signal containing nuclear protein | 081154 | 174173 | 066422 | 26, 43, 7 |
| 3 | PHF7 | PHD finger protein 7 | 010318 | 163930 | 010319 | 38, 34, 22 |
| 3 | PCYT1A | phosphate cytidylyltransferase 1, choline, alpha | 161217 | 163959 | 272741 | 18, 1, 24 |
| 3 | PIGX | phosphatidylinositol glycan anchor biosynthesis class X | 163964 | 174004 | 174007 | 20, 22, 16 |
| 3 | PIGZ | phosphatidylinositol glycan anchor biosynthesis class Z | 119227 | 270170 | 163975 | 31, 35, 18 |
| 3 | PLCXD2 | phosphatidylinositol specific phospholipase C X domain containing 2 | 240891 | 177494 | 144824 | 32, 8, 39 |
| 3 | PIK3CA | phosphatidylinositol-4,5-bisphosphate 3-kinase catalytic subunit alpha | 121879 | 172667 | 171121 | |
| 3 | PIK3CB | phosphatidylinositol-4,5-bisphosphate 3-kinase catalytic subunit beta | 051382 | 158234 | 183770 | 7, 31, 45 |
| 3 | PDE12 | phosphodiesterase 12 | 174840 | 174844 | 168374 | 11, 29, 24 |
| 3 | PIK3R4 | phosphoinositide-3-kinase regulatory subunit 4 | 196455 | 206384 | 017260 | 18, 29, 26 |
| 3 | PLA1A | phospholipase A1 member A | 144837 | 144843 | 121577 | 29, 30, 35 |
| 3 | PLCD1 | phospholipase C delta 1 | 187091 | 136059 | 008226 | 39, 38, 36 |
| 3 | PLCH1 | phospholipase C eta 1 | 114805 | 240045 | 174928 | 38, 12, 4 |
| 3 | PLCL2 | phospholipase C like 2 | 154822 | 092345 | 131374 | |
| 3 | PLD1 | phospholipase D1 | 075651 | 154310 | 186329 | |
| 3 | PLSCR1 | phospholipid scramblase 1 | 188313 | 163746 | 231213 | 23, 37, 4 |
| 3 | PLSCR2 | phospholipid scramblase 2 | 163746 | 114698 | 188313 | 38, |
| 3 | PLSCR4 | phospholipid scramblase 4 | 114698 | 152952 | 163746 | 11, 18, 1 |
| 3 | PLSCR5 | phospholipid scramblase family member 5 | 231213 | 188313 | 174963 | 32, |
| 3 | PLS1 | plastin 1 | 120756 | 175054 | 144935 | 42, 3, 16 |
| 3 | PHLDB2 | pleckstrin homology like domain family B member 2 | 144824 | 240891 | 144827 | 11, 32, 26 |
| 3 | PLXNA1 | plexin A1 | 114554 | 159685 | 163870 | 18, 4, 6 |
| 3 | PLXNB1 | plexin B1 | 164050 | 164049 | 164051 | 18, 42, 40 |
| 3 | PLXND1 | plexin D1 | 004399 | 178804 | 172765 | 26, 1, 7 |
| 3 | POC1A | POC1 centriolar protein A | 164087 | 164086 | 023330 | 32, 23, 37 |
| 3 | PODXL2 | podocalyxin like 2 | 114631 | 073111 | 114626 | 26, 14, 3 |
| 3 | PARP14 | poly(ADP-ribose) polymerase family member 14 | 173193 | 173200 | 169087 | 1, 18, 22 |
| 3 | PARP15 | poly(ADP-ribose) polymerase family member 15 | 173200 | 163840 | 173193 | 39, 22, 36 |
| 3 | PARP3 | poly(ADP-ribose) polymerase family member 3 | 041880 | 114767 | 180929 | 41, 2, 14 |
| 3 | PARP9 | poly(ADP-ribose) polymerase family member 9 | 138496 | 114030 | 163840 | 13, 4, 23 |
| 3 | PCBP4 | poly(rC) binding protein 4 | 090097 | 180929 | 114779 | 14, 8, 45 |
| 3 | PBRM1 | polybromo 1 | 163939 | 168273 | 163938 | 22, |
| 3 | PHC3 | polyhomeotic homolog 3 | 173889 | 173890 | 163558 | 11, 30, 29 |
| 3 | GALNT15 | polypeptide N-acetylgalactosaminyltransferase 15 | 131386 | 206560 | 154813 | 42, 10, 43 |
| 3 | POPDC2 | popeye domain containing 2 | 121577 | 144837 | 138495 | 10, |
| 3 | KCNMB2 | potassium calcium-activated channel subfamily M regulatory beta subunit 2 | 197584 | 177565 | 275163 | 26, 28, 10 |
| 3 | KCNMB3 | potassium calcium-activated channel subfamily M regulatory beta subunit 3 | 171121 | 121879 | 121864 | 22, 3, 15 |
| 3 | KCTD6 | potassium channel tetramerization domain containing 6 | 168301 | 168291 | 168306 | 9, 34, 11 |
| 3 | KCNAB1 | potassium voltage-gated channel subfamily A member regulatory beta subunit 1 | 169282 | 163655 | 114850 | 26, 8, 39 |
| 3 | KCNH8 | potassium voltage-gated channel subfamily H member 8 | 183960 | 182568 | 163576 | 36, 4, 8 |
| 3 | POU1F1 | POU class 1 homeobox 1 | 064835 | 083937 | 179097 | 31, |
| 3 | PQLC2L | PQ loop repeat containing 2 like | 174899 | 163661 | 168779 | 10, 18, 44 |
| 3 | PARL | presenilin associated rhomboid like | 175193 | 180834 | 114770 | 18, 34, 27 |
| 3 | PRICKLE2 | prickle planar cell polarity protein 2 | 163637 | 163636 | 163638 | |
| 3 | PCOLCE2 | procollagen C-endopeptidase enhancer 2 | 163710 | 144935 | 188582 | 31, 10, 1 |
| 3 | PLOD2 | procollagen-lysine,2-oxoglutarate 5-dioxygenase 2 | 152952 | 181744 | 114698 | 40, 45, 11 |
| 3 | PFN2 | profilin 2 | 070087 | 082996 | 196428 | 8, 31, 25 |
| 3 | PAQR9 | progestin and adipoQ receptor family member 9 | 188582 | 163710 | 163714 | 38, |
| 3 | PDCD10 | programmed cell death 10 | 114209 | 174776 | 163536 | 34, 4, 24 |
| 3 | PDCD6IP | programmed cell death 6 interacting protein | 170248 | 163539 | 172995 | 11, 45, 7 |
| 3 | PROK2 | prokineticin 2 | 163421 | 170837 | 163602 | 38, 45, 7 |
| 3 | PRR23A | proline rich 23A | 206260 | 206262 | 175110 | 38, |
| 3 | PRR23B | proline rich 23B | 184814 | 175110 | 233701 | 38, |
| 3 | PRR23C | proline rich 23C | 233701 | 184814 | 184432 | 38, |
| 3 | PRRT3 | proline rich transmembrane protein 3 | 163704 | 163703 | 125037 | 26, 31, 34 |
| 3 | P3H2 | prolyl 3-hydroxylase 2 | 090530 | 073282 | 163347 | 2, 17, 33 |
| 3 | P4HTM | prolyl 4-hydroxylase, transmembrane | 178467 | 177479 | 178252 | 9, 26, 31 |
| 3 | PCCB | propionyl-CoA carboxylase beta subunit | 114054 | 174579 | 118007 | 31, 3, 2 |
| 3 | PRSS42 | protease, serine 42 | 178055 | 188086 | 160808 | 25, 15, 28 |
| 3 | PRSS45 | protease, serine 45 | 188086 | 261603 | 178055 | 33, 39, |
| 3 | PRSS46 | protease, serine 46 | 261603 | 206549 | 188086 | 38, |
| 3 | PRSS50 | protease, serine 50 | 206549 | 181585 | 261603 | 38, 28, 44 |
| 3 | PSMD2 | proteasome 26S subunit, non-ATPase 2 | 175166 | 163888 | 114867 | 35, 38, 34 |
| 3 | PSMD6 | proteasome 26S subunit, non-ATPase 6 | 163636 | 163635 | 163637 | 18, 41, 23 |
| 3 | PDIA5 | protein disulfide isomerase family A member 5 | 065485 | 082684 | 121542 | 32, 6, 9 |
| 3 | PRKCD | protein kinase C delta | 163932 | 163933 | 163931 | 3, 21, 26 |
| 3 | PRKCI | protein kinase C iota | 163558 | 173889 | 136603 | 31, 4, 7 |
| 3 | PRKAR2A | protein kinase cAMP-dependent type II regulatory subunit alpha | 114302 | 068745 | 178537 | 21, 38, 3 |
| 3 | POGLUT1 | protein O-glucosyltransferase 1 | 163389 | 176142 | 113845 | 11, 29, 18 |
| 3 | POMGNT2 | protein O-linked mannose N-acetylglucosaminyltransferase 2 (beta 1,4-) | 144647 | 144649 | 163788 | |
| 3 | PPP1R2 | protein phosphatase 1 regulatory inhibitor subunit 2 | 184203 | 114331 | 189058 | 29, 38, 23 |
| 3 | PPP2R3A | protein phosphatase 2 regulatory subunit B″alpha | 073711 | 174611 | 174579 | 15, 25, 24 |
| 3 | PP2D1 | protein phosphatase 2C like domain containing 1 | 183977 | 144566 | 114166 | 38, 37, 5 |
| 3 | PPP4R2 | protein phosphatase 4 regulatory subunit 2 | 163605 | 172986 | 255423 | 11, 26, 31 |
| 3 | PPM1L | protein phosphatase, Mg2+/Mn2+ dependent 1L | 163590 | 179674 | 169255 | 24, 42, 25 |
| 3 | PPM1M | protein phosphatase, Mg2+/Mn2+ dependent 1M | 164088 | 247596 | 164091 | |
| 3 | PROS1 | protein S (alpha) | 184500 | 044524 | 169379 | 42, 40, 35 |
| 3 | PTPN23 | protein tyrosine phosphatase, non-receptor type 23 | 076201 | 114648 | 114650 | 26, 18, 22 |
| 3 | PTPRG | protein tyrosine phosphatase, receptor type G | 144724 | 189283 | 114405 | 1, 40, 27 |
| 3 | P2RY1 | purinergic receptor P2Y1 | 169860 | 152601 | 181467 | 24, 9, 45 |
| 3 | P2RY12 | purinergic receptor P2Y12 | 169313 | 181631 | 152580 | 8, 17, 42 |
| 3 | P2RY13 | purinergic receptor P2Y13 | 181631 | 138271 | 169313 | 30, 5, 36 |
| 3 | P2RY14 | purinergic receptor P2Y14 | 174944 | 174946 | 138271 | 7, 32, 10 |
| 3 | PXK | PX domain containing serine/threonine kinase like | 168297 | 255154 | 168291 | 1, 8, 22 |
| 3 | PDHB | pyruvate dehydrogenase (lipoamide) beta | 168291 | 168297 | 168301 | 30, 3, 6 |
| 3 | QTRT2 | queuine tRNA-ribosyltransferase accessory subunit 2 | 151576 | 163617 | 151577 | |
| 3 | RABL3 | RAB, member of RAS oncogene family like 3 | 144840 | 113924 | 153767 | 29, 45, 43 |
| 3 | RAB43 | RAB43, member RAS oncogene family | 172780 | 169704 | 261796 | |
| 3 | RAB5A | RAB5A, member RAS oncogene family | 144566 | 163576 | 183977 | 45, 2, 4 |
| 3 | RAB6B | RAB6B, member RAS oncogene family | 154917 | 144867 | 221972 | 29, 8, 26 |
| 3 | RAB7A | RAB7A, member RAS oncogene family | 075785 | 163902 | 177646 | 45, 11, 34 |
| 3 | RBSN | rabenosyn, RAB effector | 131381 | 131368 | 131375 | 9, 14, 33 |
| 3 | RAD18 | RAD18, E3 ubiquitin protein ligase | 070950 | 180914 | 196220 | 45, 7, 34 |
| 3 | RAD54L2 | RAD54-like 2 (S. cerevisiae) | 164080 | 145041 | 164081 | 43, 26, 11 |
| 3 | RAF1 | Raf-1 proto-oncogene, serine/threonine kinase | 132155 | 075975 | 088726 | 39, 24, 42 |
| 3 | RFTN1 | raftlin, lipid raft linker 1 | 131378 | 154814 | 092345 | 41, 21, 22 |
| 3 | RAP2B | RAP2B, member of RAS oncogene family | 181467 | 169860 | 114790 | 41, 4, 6 |
| 3 | RASSF1 | Ras association domain family member 1 | 068028 | 114383 | 004838 | 36, 9, 13 |
| 3 | RHOA | ras homolog family member A | 067560 | 233276 | 145022 | |
| 3 | RASA2 | RAS p21 protein activator 2 | 155903 | 177311 | 280530 | 23, 31, 22 |
| 3 | RTP1 | receptor transporter protein 1 | 175077 | 163923 | 127241 | 38, 8, |
| 3 | RTP2 | receptor transporter protein 2 | 198471 | 157005 | 113916 | 34, |
| 3 | RTP3 | receptor transporter protein 3 | 163825 | 012223 | 163827 | 10, 19, |
| 3 | RTP4 | receptor transporter protein 4 | 136514 | 127241 | 157005 | 4, 35, 6 |
| 3 | RYK | receptor-like tyrosine kinase | 163785 | 174640 | 114019 | 27, 15, 4 |
| 3 | RFC4 | replication factor C subunit 4 | 163918 | 156976 | 181092 | 34, 4, 7 |
| 3 | RETNLB | resistin like beta | 163515 | 198919 | 163519 | 16, |
| 3 | RARB | retinoic acid receptor beta | 077092 | 151090 | 077097 | 24, 43, 11 |
| 3 | RARRES1 | retinoic acid receptor responder 1 | 118849 | 079257 | 118855 | 1, 23, 44 |
| 3 | RBP1 | retinol binding protein 1 | 114115 | 114113 | 163864 | 11, 24, 28 |
| 3 | RBP2 | retinol binding protein 2 | 114113 | 184432 | 114115 | 16, 20, 17 |
| 3 | RFT1 | RFT1 homolog | 163933 | 272305 | 163932 | 9, 6, 21 |
| 3 | ARHGAP31 | Rho GTPase activating protein 31 | 031081 | 121578 | 176142 | 43, 26, 31 |
| 3 | ARHGEF26 | Rho guanine nucleotide exchange factor 26 | 114790 | 181467 | 174953 | 33, 38, 29 |
| 3 | ARHGEF3 | Rho guanine nucleotide exchange factor 3 | 163947 | 163946 | 186451 | 1, 29, 42 |
| 3 | RHO | rhodopsin | 163914 | 163913 | 178804 | 14, 25, 8 |
| 3 | ROPN1 | rhophilin associated tail protein 1 | 065371 | 175455 | 160145 | |
| 3 | ROPN1B | rhophilin associated tail protein 1B | 114547 | 189366 | 114544 | 38, 24, 23 |
| 3 | RPP14 | ribonuclease P/MRP subunit p14 | 163684 | 163686 | 255154 | 30, 13, 29 |
| 3 | RPN1 | ribophorin I | 163902 | 179348 | 075785 | 13, 45, 36 |
| 3 | RPL14 | ribosomal protein L14 | 188846 | 168032 | 177873 | 27, 23, 7 |
| 3 | RPL15 | ribosomal protein L15 | 174748 | 197885 | 174738 | 29, 1, 31 |
| 3 | RPL22L1 | ribosomal protein L22 like 1 | 163584 | 013293 | 163577 | 33, 43, 29 |
| 3 | RPL24 | ribosomal protein L24 | 114391 | 066422 | 182504 | |
| 3 | RPL29 | ribosomal protein L29 | 162244 | 243989 | 164086 | 41, 29, 6 |
| 3 | RPL32 | ribosomal protein L32 | 144713 | 144712 | 144711 | 43, 11, 12 |
| 3 | RPL35A | ribosomal protein L35a | 182899 | 114473 | 185621 | 29, 11, 33 |
| 3 | RPL39L | ribosomal protein L39 like | 163923 | 073849 | 175077 | 23, 10, 5 |
| 3 | RPSA | ribosomal protein SA | 168028 | 144659 | 168314 | 21, 41, 43 |
| 3 | RRP9 | ribosomal RNA processing 9, small subunit (SSU) processome component, | 114767 | 173389 | 041880 | 40, 3, 35 |
| | | homolog (yeast) | | | | |
| 3 | RNF123 | ring finger protein 123 | 164068 | 173531 | 176020 | 43, 38, 31 |
| 3 | RNF13 | ring finger protein 13 | 082996 | 206199 | 070087 | 37, 30, 29 |
| 3 | RNF168 | ring finger protein 168 | 163961 | 163960 | 214097 | 34, 11, 1 |
| 3 | RNF7 | ring finger protein 7 | 114125 | 280530 | 114124 | 30, 26, 37 |
| 3 | RYBP | RING1 and YY1 binding protein | 163602 | 163421 | 144736 | 32, 4, 22 |
| 3 | RBM15B | RNA binding motif protein 15B | 259956 | 145050 | 145041 | 21, 7, 22 |
| 3 | RBM5 | RNA binding motif protein 5 | 003756 | 004534 | 001617 | |
| 3 | RBM6 | RNA binding motif protein 6 | 004534 | 164077 | 003756 | 29, 43, 42 |
| 3 | RBMS3 | RNA binding motif single stranded interacting protein 3 | 144642 | 283563 | 163513 | 26, 1, 42 |
| 3 | POLR2H | RNA polymerase II subunit H | 163882 | 114859 | 090534 | 40, 41, 7 |
| 3 | RPUSD3 | RNA pseudouridylate synthase domain containing 3 | 156990 | 214021 | 187288 | 34, 38, 4 |
| 3 | ROBO1 | roundabout guidance receptor 1 | 169855 | 185008 | 114480 | |
| 3 | ROBO2 | roundabout guidance receptor 2 | 185008 | 227124 | 169855 | 28, 31, 29 |
| 3 | RUBCN | RUN and cysteine rich domain containing beclin 1 interacting protein | 145016 | 161267 | 122068 | 22, 1, 41 |
| 3 | RUVBL1 | RuvB like AAA ATPase 1 | 175792 | 058262 | 132394 | 13, 41, 3 |
| 3 | SACM1L | SAC1 suppressor of actin mutations 1 -like (yeast) | 211456 | 144791 | 163817 | 42, 24, 11 |
| 3 | SLMAP | sarcolemma associated protein | 163681 | 174839 | 136068 | 45, 29, 15 |
| 3 | SATB1 | SATB homeobox 1 | 182568 | 131374 | 183960 | 39, |
| 3 | SCHIP1 | schwannomin interacting protein 1 | 151967 | 283245 | 168811 | 8, 45, 12 |
| 3 | SCHIP1 | schwannomin interacting protein 1 | 283245 | 283154 | 151967 | 8, 45, 12 |
| 3 | SFMBT1 | Scm-like with four mbt domains 1 | 163935 | 213533 | 272305 | 38, 29, 23 |
| 3 | SEC13 | SEC13 homolog, nuclear pore and COPII coat complex component | 157020 | 157017 | 157087 | 30, 9, 12 |
| 3 | SEC22A | SEC22 homolog A, vesicle trafficking protein | 121542 | 065485 | 173175 | 13, 29, 24 |
| 3 | SEC22C | SEC22 homolog C, vesicle trafficking protein | 093183 | 114812 | 008324 | |
| 3 | SEC61A1 | Sec61 translocon alpha 1 subunit | 058262 | 187715 | 175792 | 3, 24, 42 |
| 3 | SEC62 | SEC62 homolog, preprotein translocation factor | 008952 | 187033 | 173890 | 25, 31, 1 |
| 3 | SELENOK | selenoprotein K | 113811 | 113812 | 157445 | |
| 3 | SELENOT | selenoprotein T | 198843 | 144895 | 163645 | 7, 4, 34 |
| 3 | SEMA3B | semaphorin 3B | 012171 | 114353 | 179564 | 32, 26, 2 |
| 3 | SEMA3F | semaphorin 3F | 001617 | 003756 | 114349 | 40, 17, 24 |
| 3 | SEMA3G | semaphorin 3G | 010319 | 010318 | 114854 | 1, 6, 15 |
| 3 | SEMA5B | semaphorin 5B | 082684 | 138463 | 065485 | 12, 8, 17 |
| 3 | SNTN | sentan, cilia apical structure protein | 188817 | 163630 | 163632 | 30, 20, 42 |
| 3 | SPTSSB | serine palmitoyltransferase small subunit B | 196542 | 169251 | 182447 | 4, 43, 13 |
| 3 | SPINK8 | serine peptidase inhibitor, Kazal type 8 (putative) | 229453 | 172113 | 164049 | 10, 5, |
| 3 | SERPINI1 | serpin family I member 1 | 163536 | 114209 | 173905 | 8, 11, 28 |
| 3 | SERPINI2 | serpin family I member 2 | 114204 | 169064 | 174776 | 10, 28, 4 |
| 3 | SETMAR | SET domain and mariner transposase fusion gene | 170364 | 175928 | 150995 | 43, 15, 44 |
| 3 | SETD2 | SET domain containing 2 | 181555 | 160796 | 088727 | 20, 26, 22 |
| 3 | SETD5 | SET domain containing 5 | 168137 | 134077 | 156959 | 31, 40, 22 |
| 3 | STAC | SH3 and cysteine rich domain | 144681 | 172995 | 163673 | 33, 35, 17 |
| 3 | SH3BP5 | SH3 domain binding protein 5 | 131370 | 131375 | 206562 | 2, 29, 1 |
| 3 | SHISA5 | shisa family member 5 | 164054 | 213689 | 114268 | |
| 3 | SHOX2 | short stature homeobox 2 | 168779 | 174899 | 174891 | 15, 24, 35 |
| 3 | SHQ1 | SHQ1, H/ACA ribonucleoprotein assembly factor | 144736 | 163602 | 172986 | |
| 3 | SGO1 | shugoshin 1 | 129810 | 114166 | 151789 | |
| 3 | SIAH2 | siah E3 ubiquitin protein ligase 2 | 181788 | 163645 | 280141 | |
| 3 | SIDT1 | SID1 transmembrane family member 1 | 072858 | 163611 | 176542 | 39, 42, 36 |
| 3 | SPCS1 | signal peptidase complex subunit 1 | 114902 | 016864 | 114904 | 29, 7, 30 |
| 3 | SSR3 | signal sequence receptor subunit 3 | 114850 | 169282 | 163659 | 45, 42, 40 |
| 3 | SMCO1 | single-pass membrane protein with coiled-coil domains 1 | 214097 | 163961 | 185798 | 25, 15, 10 |
| 3 | SKIL | SKI like proto-oncogene | 136603 | 163558 | 013297 | |
| 3 | SLITRK3 | SLIT and NTRK like family member 3 | 121871 | 090402 | 114200 | 8, 44, |
| 3 | SRGAP3 | SLIT-ROBO Rho GTPase activating protein 3 | 196220 | 070950 | 134077 | 43, 26, 8 |
| 3 | SMIM4 | small integral membrane protein 4 | 168273 | 168268 | 163939 | 15, 4, 33 |
| 3 | SNRK | SNF related kinase | 163788 | 144647 | 160746 | 29, 45, 26 |
| 3 | SCN10A | sodium voltage-gated channel alpha subunit 10 | 185313 | 183873 | 168356 | 25, |
| 3 | SCN11A | sodium voltage-gated channel alpha subunit 11 | 168356 | 185313 | 114742 | 32, 38, |
| 3 | SCN5A | sodium voltage-gated channel alpha subunit 5 | 183873 | 157036 | 185313 | 27, 15, 14 |
| 3 | SLC12A8 | solute carrier family 12 member 8 | 221955 | 173706 | 163848 | 13, 33, 18 |
| 3 | SLC15A2 | solute carrier family 15 member 2 | 163406 | 145088 | 145103 | 42, 24, 33 |
| 3 | SLC2A2 | solute carrier family 2 member 2 | 163581 | 163577 | 154310 | 19, 17, 36 |
| 3 | SLC22A13 | solute carrier family 22 member 13 | 172940 | 172939 | 144671 | 17, |
| 3 | SLC22A14 | solute carrier family 22 member 14 | 144671 | 172940 | 093217 | 38, 37, 17 |
| 3 | SLC25A20 | solute carrier family 25 member 20 | 178537 | 114302 | 221883 | 29, 5, 15 |
| 3 | SLC25A26 | solute carrier family 25 member 26 | 144741 | 151276 | 144749 | 3, 32, 4 |
| 3 | SLC25A36 | solute carrier family 25 member 36 | 114120 | 155890 | 175093 | 26, 22, 17 |
| 3 | SLC25A38 | solute carrier family 25 member 38 | 144659 | 179934 | 168028 | 39, 3, 2 |
| 3 | SLC26A6 | solute carrier family 26 member 6 | 225697 | 183396 | 008300 | 27, 37, 5 |
| 3 | SLC33A1 | solute carrier family 33 member 1 | 169359 | 174928 | 163655 | 42, 39, 24 |
| 3 | SLC35A5 | solute carrier family 35 member A5 | 138459 | 144848 | 091986 | 39, 45, 24 |
| 3 | SLC35G2 | solute carrier family 35 member G2 | 168917 | 118007 | 158092 | |
| 3 | SLC38A3 | solute carrier family 38 member 3 | 188338 | 114349 | 114353 | 14, 19, 26 |
| 3 | SLC4A7 | solute carrier family 4 member 7 | 033867 | 163491 | 163508 | 1, 25, 26 |
| 3 | SLC41A3 | solute carrier family 41 member 3 | 114544 | 114547 | 144908 | 8, 2, 38 |
| 3 | SLC51A | solute carrier family 51 alpha subunit | 163959 | 163958 | 161217 | |
| 3 | SLC6A1 | solute carrier family 6 member 1 | 157103 | 132164 | 196639 | 29, 8, 4 |
| 3 | SLC6A11 | solute carrier family 6 member 11 | 132164 | 157087 | 157103 | 18, 25, 19 |
| 3 | SLC6A20 | solute carrier family 6 member 20 | 163817 | 211456 | 163818 | 26, 16, 18 |
| 3 | SLC6A6 | solute carrier family 6 member 6 | 131389 | 170860 | 144596 | 5, 24, 4 |
| 3 | SLC7A14 | solute carrier family 7 member 14 | 013293 | 013297 | 163584 | 31, 45, 8 |
| 3 | SLC9A9 | solute carrier family 9 member A9 | 181804 | 175040 | 181744 | 42, 39, 26 |
| 3 | SLC9C1 | solute carrier family 9 member C1 | 172139 | 174500 | 091972 | 38, 25, |
| 3 | SLC02A1 | solute carrier organic anion transporter family member 2A1 | 174640 | 221972 | 163785 | 28, 42, 17 |
| 3 | SST | somatostatin | 157005 | 136514 | 198471 | 28, 37, 15 |
| 3 | SNX4 | sorting nexin 4 | 114520 | 163848 | 144909 | 45, 43, 42 |
| 3 | SPATA12 | spermatogenesis associated 12 | 186451 | 163947 | 144730 | 38, 12, 32 |
| 3 | SPATA16 | spermatogenesis associated 16 | 144962 | 114346 | 169760 | 38, 10, 8 |
| 3 | SPICE1 | spindle and centriole associated protein 1 | 163611 | 283241 | 072858 | 39, 42, 37 |
| 3 | SPSB4 | splA/ryanodine receptor domain and SOCS box containing 4 | 175093 | 114120 | 155893 | 15, 27, 25 |
| 3 | SOAP | SREBF chaperone | 114650 | 076201 | 163832 | 38, 39, 42 |
| 3 | SRPRB | SRP receptor beta subunit | 144867 | 091513 | 154917 | 3, 4, 28 |
| 3 | SOX14 | SRY-box 14 | 168875 | 174564 | 066405 | 32, 17, |
| 3 | SOX2 | SRY-box2 | 181449 | 205981 | 058063 | 13, 25, 12 |
| 3 | SS18L2 | SS18 like 2 | 008324 | 093183 | 114857 | 29, 43, 7 |
| 3 | SSUH2 | ssu-2 homolog (C. elegans) | 125046 | 071282 | 182533 | |
| 3 | ST3GAL6 | ST3 beta-galactoside alpha-2,3-sialyltransferase 6 | 064225 | 154165 | 057019 | 43, 35, 1 |
| 3 | ST6GAL1 | ST6 beta-galactoside alpha-2,6-sialyltransferase 1 | 073849 | 181092 | 163923 | 22, 42, 40 |
| 3 | STAB1 | stabilin 1 | 010327 | 010322 | 168268 | 1, 7, 26 |
| 3 | SAMD7 | sterile alpha motif domain containing 7 | 187033 | 114248 | 008952 | 25, 14, |
| 3 | SERP1 | stress associated endoplasmic reticulum protein 1 | 120742 | 196428 | 144895 | 29, 41, 10 |
| 3 | STAG1 | stromal antigen 1 | 118007 | 114054 | 168917 | 1, 25, 39 |
| 3 | SMC4 | structural maintenance of chromosomes 4 | 113810 | 068885 | 213186 | 22, 39, 4 |
| 3 | STT3B | STT3B, catalytic subunit of the oligosaccharyltransferase complex | 163527 | 144644 | 144645 | 29, 32, 3 |
| 3 | SUCNR1 | succinate receptor 1 | 198829 | 114771 | 152601 | 17, 5, 19 |
| 3 | SUCLG2 | succinate-CoA ligase GDP-forming beta subunit | 172340 | 163376 | 183662 | 7, 9, 19 |
| 3 | SI | sucrase-isomaltase | 090402 | 182447 | 121871 | 10, 16, 25 |
| 3 | SUMF1 | sulfatase modifying factor 1 | 144455 | 113851 | 175928 | |
| 3 | SENP5 | SUMO1/sentrin specific peptidase 5 | 119231 | 180370 | 114503 | 24, 16, 35 |
| 3 | SENP7 | SUMO1/sentrin specific peptidase 7 | 138468 | 081148 | 174173 | 13, 26, 31 |
| 3 | SENP2 | SUMO1/sentrin/SMT3 specific peptidase 2 | 163904 | 163898 | 073792 | 24, 2, 38 |
| 3 | SUSD5 | sushi domain containing 5 | 173705 | 170275 | 153558 | 45, 42, 7 |
| 3 | SMARCC1 | SWI/SNF related, matrix associated, actin dependent regulator of chromatin | 173473 | 114646 | 132153 | 4, 12, 22 |
| | | subfamily c member 1 | | | | |
| 3 | SYN2 | synapsin II | 157152 | 144559 | 157150 | 26, 29, 8 |
| 3 | SYNPR | synaptoporin | 163630 | 163618 | 188817 | 8, 17, 14 |
| 3 | STX19 | syntaxin 19 | 178750 | 169379 | 178700 | 35, |
| 3 | STXBP5L | syntaxin binding protein 5 like | 145087 | 153767 | 051341 | 8, 40, 20 |
| 3 | TRAT1 | T cell receptor associated transmembrane adaptor 1 | 163519 | 163515 | 138472 | 39, 30, 5 |
| 3 | TAMM41 | TAM41 mitochondrial translocator assembly and maintenance homolog | 144559 | 144560 | 157152 | 43, 29, 3 |
| 3 | TMF1 | TATA element modulatory factor 1 | 144747 | 163378 | 144744 | 22, 45, 38 |
| 3 | TATDN2 | TatD DNase domain containing 2 | 157014 | 134070 | 272410 | 43, 22, 21 |
| 3 | TBC1D23 | TBC1 domain family member 23 | 036054 | 168386 | 114021 | 42, 43, 24 |
| 3 | TBC1D5 | TBC1 domain family member 5 | 131374 | 154822 | 182568 | 29, 22, 41 |
| 3 | TBCCD1 | TBCC domain containing 1 | 113838 | 213139 | 090520 | 38, 24, 13 |
| 3 | TIPARP | TCDD inducible poly(ADP-ribose) polymerase | 163659 | 114850 | 197980 | 29, 9, 42 |
| 3 | TCAIM | T-cell activation inhibitor, mitochondrial | 179152 | 173769 | 225873 | 22, 7, 4 |
| 3 | TIGIT | T-cell immunoreceptor with Ig and ITIM domains | 181847 | 174255 | 181722 | 36, 24, 39 |
| 3 | TCTA | T-cell leukemia translocation altered | 145022 | 067560 | 145020 | 2, 23, 15 |
| 3 | TCTEX1D2 | Tctex1 domain containing 2 | 213123 | 272741 | 273331 | 28, 15, 14 |
| 3 | TDGF1 | teratocarcinoma-derived growth factor 1 | 241186 | 163827 | 283473 | 12, 38, 36 |
| 3 | TOPAZ1 | testis and ovary specific PAZ domain containing 1 | 173769 | 011198 | 179152 | 38, |
| 3 | TEX264 | testis expressed 264 | 164081 | 164080 | 164082 | 18, 21, 6 |
| 3 | TRANK1 | tetratricopeptide repeat and ankyrin repeat containing 1 | 168016 | 163673 | 178567 | 21, 41, 22 |
| 3 | TTC14 | tetratricopeptide repeat domain 14 | 163728 | 114757 | 145075 | |
| 3 | TTC21A | tetratricopeptide repeat domain 21A | 168026 | 114745 | 144655 | 38, 42, 40 |
| 3 | TXNRD3 | thioredoxin reductase 3 | 197763 | 206483 | 159685 | 38, 26, 33 |
| 3 | TXNRD3NB | thioredoxin reductase 3 neighbor | 206483 | 283374 | 197763 | |
| 3 | TXNRD3NB | thioredoxin reductase 3 neighbor | 283374 | 180697 | 206483 | |
| 3 | THOC7 | THO complex 7 | 163634 | 163632 | 163635 | 4, 29, 18 |
| 3 | TREX1 | three prime repair exonuclease 1 | 213689 | 164053 | 164054 | 9, |
| 3 | THPO | thrombopoietin | 090534 | 163882 | 090539 | |
| 3 | THUMPD3 | THUMP domain containing 3 | 134077 | 196220 | 168137 | 18, 11, 38 |
| 3 | THRB | thyroid hormone receptor beta | 151090 | 174738 | 077092 | 4, 23, 1 |
| 3 | TRH | thyrotropin releasing hormone | 170893 | 172765 | 251287 | 27, 14, 20 |
| 3 | TIMP4 | TIMP metallopeptidase inhibitor 4 | 157150 | 157152 | 132170 | 1, 31, 3 |
| 3 | TM4SF19- | TM4SF19-TCTEX1D2 readthrough (NMD candidate) | 273331 | 213123 | 145107 | |
| | TCTEX1D2 | | | | | |
| 3 | TMEM110- | TMEM110-MUSTN1 readthrough | 248592 | 272573 | 213533 | |
| | MUSTN1 | | | | | |
| 3 | TLR9 | toll like receptor 9 | 239732 | 023330 | 173366 | 41, 22, 42 |
| 3 | TOP2B | topoisomerase (DNA) II beta | 077097 | 077092 | 151092 | |
| 3 | TOPBP1 | topoisomerase (DNA) II binding protein 1 | 163781 | 091527 | 091513 | |
| 3 | TRAIP | TRAF interacting protein | 183763 | 182179 | 164076 | 43, 21, 5 |
| 3 | TNIK | TRAF2 and NCK interacting kinase | 154310 | 163581 | 075651 | 3, 40, 38 |
| 3 | TRAK1 | trafficking kinesin protein 1 | 182606 | 168038 | 187094 | 22, 3, 18 |
| 3 | TFDP2 | transcription factor Dp-2 | 114126 | 069849 | 175066 | |
| 3 | TADA3 | transcriptional adaptor 3 | 171148 | 134072 | 241553 | 9, 21, 27 |
| 3 | TBL1XR1 | transducin beta like 1 X-linked receptor 1 | 177565 | 177694 | 197584 | 11, 4, 34 |
| 3 | TF | transferrin | 091513 | 163781 | 144867 | 19, 14, 8 |
| 3 | TFRC | transferrin receptor | 072274 | 061938 | 163958 | 24, 13, 32 |
| 3 | TRA2B | transformer 2 beta homolog (Drosophila) | 136527 | 073792 | 244405 | 39, 11, 4 |
| 3 | TGFBR2 | transforming growth factor beta receptor 2 | 163513 | 144642 | 144644 | 11, 1, 10 |
| 3 | TAGLN3 | transgelin 3 | 144834 | 144827 | 176040 | 8, 14, 26 |
| 3 | TGM4 | transglutaminase 4 | 163810 | 169964 | 163812 | 33, 25, 34 |
| 3 | TRPC1 | transient receptor potential cation channel subfamily C member 1 | 144935 | 120756 | 163710 | 26, 12, 17 |
| 3 | TKT | transketolase | 163931 | 163932 | 272886 | 5, 9, 39 |
| 3 | TMA7 | translation machinery associated 7 homolog | 232112 | 164051 | 164053 | 7, 43, 2 |
| 3 | TIMMDC1 | translocase of inner mitochondrial membrane domain containing 1 | 113845 | 163389 | 121594 | 6, 26, 17 |
| 3 | TOMM70 | translocase of outer mitochondrial membrane 70 | 154174 | 114021 | 206535 | 13, 31, 45 |
| 3 | TM4SF1 | transmembrane 4 L six family member 1 | 169908 | 163762 | 169903 | 1, 45, 3 |
| 3 | TM4SF18 | transmembrane 4 L six family member 18 | 163762 | 047457 | 169908 | 43, 17, 3 |
| 3 | TM4SF19 | transmembrane 4 L six family member 19 | 145107 | 273331 | 163960 | 13, 6, 35 |
| 3 | TM4SF4 | transmembrane 4 L six family member 4 | 169903 | 169908 | 018408 | 28, 19, 3 |
| 3 | TMCC1 | transmembrane and coiled-coil domain family 1 | 172765 | 004399 | 170893 | 31, 4, 23 |
| 3 | TMIE | transmembrane inner ear | 181585 | 178038 | 206549 | 14, 2, 25 |
| 3 | TMPRSS7 | transmembrane protease, serine 7 | 176040 | 144834 | 114529 | 25, 38, |
| 3 | TMEM108 | transmembrane protein 108 | 144868 | 113971 | 170819 | 38, 20, 14 |
| 3 | TMEM110 | transmembrane protein 110 | 213533 | 248592 | 163935 | |
| 3 | TMEM115 | transmembrane protein 115 | 126062 | 272104 | 007402 | 27, 9, 33 |
| 3 | TMEM158 | transmembrane protein 158 (gene/pseudogene) | 249992 | 163814 | 011376 | 4, 6, 34 |
| 3 | TMEM207 | transmembrane protein 207 | 198398 | 113946 | 196083 | 17, 10, |
| 3 | TMEM212 | transmembrane protein 212 | 186329 | 075651 | 075420 | 30, 42, 20 |
| 3 | TMEM39A | transmembrane protein 39A | 176142 | 031081 | 163389 | 16, 38, |
| 3 | TMEM40 | transmembrane protein 40 | 088726 | 132155 | 144712 | 32, 22, 30 |
| 3 | TMEM41A | transmembrane protein 41A | 163900 | 073803 | 163898 | 2, 11, 13 |
| 3 | TMEM42 | transmembrane protein 42 | 169964 | 163808 | 163810 | 11, 26, 31 |
| 3 | TMEM43 | transmembrane protein 43 | 170876 | 163528 | 268279 | 7, 45, 10 |
| 3 | TMEM44 | transmembrane protein 44 | 145014 | 133657 | 041802 | 6, 14, 2 |
| 3 | TMEM45A | transmembrane protein 45A | 181458 | 206535 | 144820 | 10, 30, 35 |
| 3 | TMEM89 | transmembrane protein 89 | 183396 | 010256 | 225697 | 38, 8, |
| 3 | TPRA1 | transmembrane protein adipocyte associated 1 | 163870 | 114554 | 073111 | 26, 9, 21 |
| 3 | TMPPE | transmembrane protein with metallophosphoesterase domain | 188167 | 170266 | 170275 | 7, 13, 36 |
| 3 | TRIM42 | tripartite motif containing 42 | 155890 | 158258 | 114120 | 38, 10, |
| 3 | TRIM59 | tripartite motif containing 59 | 213186 | 113810 | 186432 | 4, 22, 39 |
| 3 | TRIM71 | tripartite motif containing 71 | 206557 | 182973 | 183813 | 12, 27, 38 |
| 3 | TFG | TRK-fused gene | 114354 | 144820 | 154175 | 10, 29, 43 |
| 3 | TRMT10C | tRNA methyltransferase 10C, mitochondrial RNase P subunit | 174173 | 138468 | 081154 | 1, 22, 34 |
| 3 | TRNT1 | tRNA nucleotidyl transferase 1 | 072756 | 091181 | 281584 | 13, 4, 29 |
| 3 | TSEN2 | tRNA splicing endonuclease subunit 2 | 154743 | 132170 | 225526 | 28, 21, 25 |
| 3 | TNNC1 | troponin C1, slow skeletal and cardiac type | 114854 | 010319 | 010322 | 15, 25, 18 |
| 3 | TSC22D2 | TSC22 domain family member 2 | 196428 | 070087 | 120742 | |
| 3 | TTLL3 | tubulin tyrosine ligase like 3 | 214021 | 250151 | 156990 | 33, 29, 26 |
| 3 | TNFSF10 | tumor necrosis factor superfamily member 10 | 121858 | 121853 | 144959 | 13, 30, 2 |
| 3 | TP63 | tumor protein p63 | 073282 | 188001 | 090530 | 24, 4, 15 |
| 3 | TPRG1 | tumor protein p63 regulated 1 | 188001 | 145012 | 073282 | 10, 23, 24 |
| 3 | TUSC2 | tumor suppressor candidate 2 | 114383 | 068001 | 068028 | 32, 27, 14 |
| 3 | TWF2 | twinfilin actin binding protein 2 | 247596 | 173366 | 164088 | 41, 21, 34 |
| 3 | TNK2 | tyrosine kinase non receptor 2 | 061938 | 145113 | 072274 | 26, 22, 13 |
| 3 | U2SURP | U2 snRNP associated SURP domain containing | 163714 | 188582 | 175040 | 10, 1, 26 |
| 3 | UQCRC1 | ubiquinol-cytochrome c reductase core protein I | 010256 | 114270 | 183396 | 27, 35, 25 |
| 3 | UBE2E1 | ubiquitin conjugating enzyme E2 E1 | 170142 | 182247 | 197885 | 29, 43, 11 |
| 3 | UBE2E2 | ubiquitin conjugating enzyme E2 E2 | 182247 | 151789 | 170142 | 10, 43, 26 |
| 3 | UBA3 | ubiquitin like modifier activating enzyme 3 | 144744 | 144747 | 144746 | 45, 9, 30 |
| 3 | UBA5 | ubiquitin like modifier activating enzyme 5 | 081307 | 129048 | 113971 | 42, 45, 24 |
| 3 | UBA7 | ubiquitin like modifier activating enzyme 7 | 182179 | 185614 | 183763 | 7, 22, 26 |
| 3 | USP13 | ubiquitin specific peptidase 13 (isopeptidase T-3) | 058056 | 136521 | 114757 | 9, 18, 25 |
| 3 | USP19 | ubiquitin specific peptidase 19 | 172046 | 172053 | 172037 | 21, 26, 25 |
| 3 | USP4 | ubiquitin specific peptidase 4 | 114316 | 188315 | 233276 | |
| 3 | UBXN7 | UBX domain protein 7 | 163960 | 145107 | 163961 | 18, 31, 43 |
| 3 | B3GNT5 | UDP-GlcNAc: betaGal beta-1,3-N-acetylglucosaminyltransferase 5 | 176597 | 053524 | 172578 | |
| 3 | ULK4 | unc-51 like kinase 4 | 168038 | 168036 | 182606 | 38, 42, 7 |
| 3 | FLJ22763 | Uncharacterized LOC401081 | 241224 | 114487 | 163530 | 37, 17, 10 |
| 3 | UBP1 | upstream binding protein 1 (LBP-1a) | 153560 | 153558 | 163539 | 34, 26, 39 |
| 3 | USF3 | upstream transcription factor family member 3 | 176542 | 072858 | 121579 | 22, 26, 28 |
| 3 | UMPS | uridine monophosphate synthetase | 114491 | 160145 | 082781 | 30, 21, 9 |
| 3 | UROC1 | urocanate hydratase 1 | 159650 | 070476 | 180767 | 19, 23, |
| 3 | UCN2 | urocertin 2 | 145040 | 114268 | 114270 | 35, 44, 38 |
| 3 | UPK1B | uroplakin 1B | 114638 | 251012 | 121578 | 30, 42, 13 |
| 3 | UTS2B | urotensin 2B | 188958 | 188729 | 152492 | 38, 8, 33 |
| 3 | VIPR1 | vasoactive intestinal peptide receptor 1 | 114812 | 157093 | 093183 | |
| 3 | VEPH1 | ventricular zone expressed PH domain containing 1 | 197415 | 163660 | 163661 | 43, 10, 45 |
| 3 | VGLL3 | vestigial like family member 3 | 206538 | 175161 | 083937 | 32, 1, 26 |
| 3 | VGLL4 | vestigial like family member 4 | 144560 | 197548 | 144559 | 42, 24, 44 |
| 3 | VILL | villin like | 136059 | 144677 | 187091 | 39, 16, 28 |
| 3 | VHL | von Hippel-Lindau tumor suppressor | 134086 | 254999 | 134070 | 34, 43, 11 |
| 3 | VWA5B2 | vpn Willebrand factor A domain containing 5B2 | 145198 | 161204 | 214160 | 2, 28, 8 |
| 3 | VPS8 | VPS8, CORVET complex subunit | 156931 | 177383 | 187068 | |
| 3 | WDR48 | WD repeat domain 48 | 114742 | 168356 | 114745 | 42, 38, 39 |
| 3 | WDR49 | WD repeat domain 49 | 174776 | 114204 | 114209 | 42, 7, 38 |
| 3 | WDR53 | WD repeat domain 53 | 185798 | 214097 | 174013 | 9, 15, 38 |
| 3 | WDR5B | WD repeat domain 5B | 196981 | 114023 | 114030 | 39, 31, 32 |
| 3 | WDR6 | WD repeat domain 6 | 178252 | 178467 | 178149 | 43, 42, 39 |
| 3 | WDR82 | WD repeat domain 82 | 164091 | 164088 | 168237 | 42, 40, 24 |
| 3 | WNT5A | Wnt family member 5A | 114251 | 144771 | 187672 | 26, 4, 6 |
| 3 | WNT7A | Wnt family member 7A | 154764 | 163520 | 163528 | 36, 32, 44 |
| 3 | WWTR1 | WW domain containing transcription regulator 1 | 018408 | 169903 | 114744 | 11, 43, 24 |
| 3 | XCR1 | X-C motif chemokine receptor 1 | 173578 | 172215 | 183625 | 32, |
| 3 | XIRP1 | xin actin binding repeat containing 1 | 168334 | 144655 | 168329 | 18, 15, 25 |
| 3 | XPC | XPC complex subunit, DNA damage recog nition and repair factor | 154767 | 268279 | 170860 | 42, 1, 14 |
| 3 | XXYLT1 | xyloside xylosyltransferase 1 | 173950 | 185112 | 114331 | 45, 24, 27 |
| 3 | XYLB | xylulokinase | 093217 | 144671 | 114739 | 9, 23, 35 |
| 3 | YEATS2 | YEATS domain containing 2 | 163872 | 114796 | 180834 | 41, 13, 21 |
| 3 | ZIC1 | Zic family member 1 | 152977 | 174963 | 144891 | |
| 3 | ZIC4 | Zic family member 4 | 174963 | 231213 | 152977 | 11, 8, 10 |
| 3 | ZBTB11 | zinc finger and BTB domain containing 11 | 066422 | 081154 | 114391 | 34, 26, 2 |
| 3 | ZBTB20 | zinc finger and BTB domain containing 20 | 181722 | 181847 | 279131 | 42, 11, 22 |
| 3 | ZBTB38 | zinc finger and BTB domain containing 38 | 177311 | 155893 | 155903 | |
| 3 | ZBTB47 | zinc finger and BTB domain containing 47 | 114853 | 114857 | 157119 | 15, 40, 26 |
| 3 | ZBBX | zinc finger B-box domain containing | 169064 | 114200 | 114204 | 38, 31, 20 |
| 3 | ZBED2 | zinc finger BED-type containing 2 | 177494 | 153283 | 240891 | 22, 40, 18 |
| 3 | ZCWPW2 | zinc finger CW-type and PWWP domain containing 2 | 206559 | 163512 | 283563 | 34, 10, 28 |
| 3 | ZDHHC19 | zinc finger DHHC-type containing 19 | 163958 | 072274 | 163959 | 38, 12, 32 |
| 3 | ZDHHC23 | zinc finger DHHC-type containing 23 | 184307 | 178075 | 163617 | 24, 40, 13 |
| 3 | ZDHHC3 | zinc finger DHHC-type containing 3 | 163812 | 163810 | 075914 | 3, 9, 33 |
| 3 | ZMAT3 | zinc finger matrin-type 3 | 172667 | 275163 | 121879 | 26, 35, 45 |
| 3 | ZMYND10 | zinc finger MYND-type containing 10 | 004838 | 068028 | 114388 | 38, 9, 20 |
| 3 | ZNF148 | zinc finger protein 148 | 163848 | 221955 | 114520 | 31, 24, 30 |
| 3 | ZNF197 | zinc finger protein 197 | 186448 | 144792 | 169981 | 45, 40, 13 |
| 3 | ZNF35 | zinc finger protein 35 | 169981 | 186448 | 196653 | |
| 3 | ZNF385D | zinc finger protein 385D | 151789 | 129810 | 182247 | |
| 3 | ZNF445 | zinc finger protein 445 | 185219 | 225873 | 178917 | 12, 14, 18 |
| 3 | ZNF501 | zinc finger protein 501 | 186446 | 196653 | 163807 | 30, 2, 8 |
| 3 | ZNF502 | zinc finger protein 502 | 196653 | 169981 | 186446 | 31, 2, 3 |
| 3 | ZNF589 | zinc finger protein 589 | 164048 | 164047 | 172113 | 1, 43, 40 |
| 3 | ZNF619 | zinc finger protein 619 | 177873 | 188846 | 177842 | 40, 42, 45 |
| 3 | ZNF620 | zinc finger protein 620 | 177842 | 177873 | 172888 | 29, 39, 23 |
| 3 | ZNF621 | zinc finger protein 621 | 172888 | 177842 | 168036 | 37, 33, 15 |
| 3 | ZNF639 | zinc finger protein 639 | 121864 | 171121 | 171109 | 29, 31, 27 |
| 3 | ZNF654 | zinc finger protein 654 | 175105 | 163320 | 179021 | 22, 11, 45 |
| 3 | ZNF660 | zinc finger protein 660 | 144792 | 196345 | 186448 | 40, 45, 27 |
| 3 | ZNF662 | zinc finger protein 662 | 182983 | 180432 | 144649 | 33, 18, 20 |
| 3 | ZNF717 | zinc finger protein 717 | 227124 | 172969 | 185008 | 14, 38, 8 |
| 3 | ZNF80 | zinc finger protein 80 | 174255 | 151577 | 181847 | 45, 22, 20 |
| 3 | ZNF852 | zinc finger protein 852 | 178917 | 185219 | 196345 | 34, 30, 7 |
| 3 | ZNF860 | zinc finger protein 860 | 197385 | 144645 | 152642 | 22, 28, 24 |
| 3 | ZKSCAN7 | zinc finger with KRAB and SCAN domains 7 | 196345 | 178917 | 144792 | 1, 2, 38 |
| 3 | ZPLD1 | zona pellucida like domain containing 1 | 170044 | 144802 | 170017 | 14, 38, |
| 3 | ZXDC | ZXD family zinc finger C | 070476 | 163885 | 159650 | |

[0061] Table 3 provides the gene information for the genes found on Chromosomes 4-6.

TABLE 3
Genes on Chromosomes 4-6

| | | | | Up | Down | Tissue |
|---|---|---|---|---|---|---|
| Chr. | Gene Symbol | Gene Name | ENSG | ENSG | ENSG | Code |
| 4 | BDH2 | 3-hydroxybutyrate dehydrogenase 2 | 164039 | 164038 | 138778 | 29, 44, 4 |
| 4 | PAPSS1 | 3′-phosphoadenosine 5′-phosphosulfate synthase 1 | 138801 | 155011 | 164023 | 45, 30, 42 |
| 4 | ABHD18 | abhydrolase domain containing 18 | 164074 | 164073 | 138709 | |
| 4 | ASIC5 | acid sensing ion channel subunit family member 5 | 256394 | 061918 | 151790 | |
| 4 | ABLIM2 | actin binding LIM protein family member 2 | 163995 | 196526 | 125089 | 28, 24, 26 |
| 4 | AFAP1 | actin filament associated protein 1 | 196526 | 178597 | 163995 | 45, 12, 6 |
| 4 | ACOX3 | acyl-CoA oxidase 3, pristanoyl | 087008 | 170801 | 155275 | 45, 18, 36 |
| 4 | ACSL1 | acyl-CoA synthetase long-chain family member 1 | 151726 | 151725 | 187821 | 42, 1, 24 |
| 4 | ADAM29 | ADAM metallopeptidase domain 29 | 168594 | 145451 | 150625 | |
| 4 | ADAMTS3 | ADAM metallopeptidase with thrombospondin type 1 motif 3 | 156140 | 056291 | 163626 | 2, 23, 32 |
| 4 | AP1AR | adaptor related protein complex 1 associated regulatory protein | 138660 | 174749 | 145365 | 3, 44, 7 |
| 4 | ADD1 | adducin 1 | 087274 | 087266 | 109736 | 26, 14, 27 |
| 4 | ADAD1 | adenosine deaminase domain containing 1 | 164113 | 138688 | 109471 | 38, 10, 33 |
| 4 | ADGRA3 | adhesion G protein-coupled receptor A3 | 152990 | 185774 | 249948 | 11, 24, 9 |
| 4 | ADGRL3 | adhesion G protein-coupled receptor L3 | 150471 | 163453 | 205678 | |
| 4 | ARFIP1 | ADP ribosylation factor interacting protein 1 | 164144 | 169989 | 137460 | |
| 4 | ARL9 | ADP ribosylation factor like GTPase 9 | 196503 | 174780 | 249693 | 3, 38, 15 |
| 4 | ART3 | ADP-ribosyltransferase 3 | 156219 | 138755 | 169245 | 25, 38, 19 |
| 4 | ADRA2C | adrenoceptor alpha 2C | 184160 | 280230 | 163982 | 32, 42, 23 |
| 4 | AFF1 | AF4/FMR2 family member 1 | 172493 | 163633 | 145332 | 11, 32, 17 |
| 4 | AFM | afamin | 079557 | 081051 | 169435 | 19, 17, 23 |
| 4 | ALB | albumin | 163631 | 132466 | 081051 | 19, 15, 23 |
| 4 | ADH1A | alcohol dehydrogenase 1A (class I), alpha polypeptide | 187758 | 172955 | 196616 | 19, 10, 22 |
| 4 | ADH1B | alcohol dehydrogenase 1B (class I), beta polypeptide | 196616 | 187758 | 248144 | 1, 42, 19 |
| 4 | ADH1C | alcohol dehydrogenase 1C (class I), gamma polypeptide | 248144 | 196616 | 196344 | 16, 19, 30 |
| 4 | ADH4 | alcohol dehydrogenase 4 (class II), pi polypeptide | 198099 | 197894 | 172955 | 19, 23, 5 |
| 4 | ADH5 | alcohol dehydrogenase 5 (class III), chi polypeptide | 197894 | 164024 | 198099 | 42, 12, 44 |
| 4 | ADH6 | alcohol dehydrogenase 6 (class V) | 172955 | 198099 | 187758 | 19, 17, 16 |
| 4 | ADH7 | alcohol dehydrogenase 7 (class IV), mu or sigma polypeptide | 196344 | 248144 | 138813 | 13, 42, 24 |
| 4 | AFP | alpha fetoprotein | 081051 | 163631 | 079557 | 15, 19, 36 |
| 4 | ALPK1 | alpha kinase 1 | 073331 | 145365 | 178403 | 29, 22, 36 |
| 4 | AMBN | ameloblastin | 178522 | 187689 | 132464 | 10, 17, 8 |
| 4 | AMTN | amelotin | 187689 | 171195 | 178522 | 8, |
| 4 | AIMP1 | aminoacyl tRNA synthetase complex interacting multifunctional | 164022 | 145348 | 250298 | 13, 30, 6 |
| | | protein 1 | | | | |
| 4 | AADAT | aminoadipate aminotransferase | 109576 | 198948 | 174473 | 11, 10, 12 |
| 4 | AASDH | aminoadipate-semialdehyde dehydrogenase | 157426 | 109265 | 128059 | 42, 3, 26 |
| 4 | AREG | amphiregulin | 109321 | 124882 | 174808 | 13, 37, 19 |
| 4 | APBB2 | amyloid beta precursor protein binding family B member 2 | 163697 | 179299 | 154277 | 43, 1, 42 |
| 4 | ANAPC10 | anaphase promoting complex subunit 10 | 164162 | 164161 | 164163 | 10, 31, 7 |
| 4 | ANAPC4 | anaphase promoting complex subunit 4 | 053900 | 168228 | 157765 | 1, 42, 15 |
| 4 | ANK2 | ankyrin 2 | 145362 | 174720 | 145349 | 26, 8, 25 |
| 4 | ASB5 | ankyrin repeat and SOCS box containing 5 | 164122 | 150628 | 129128 | 26, 25, 15 |
| 4 | ANKRD17 | ankyrin repeat domain 17 | 132466 | 163626 | 163631 | 18, 22, 1 |
| 4 | ANKRD37 | ankyrin repeat domain 37 | 186352 | 109771 | 109775 | 11, 6, 14 |
| 4 | ANKRD50 | ankyrin repeat domain 50 | 151458 | 164056 | 196159 | 26, 11, 45 |
| 4 | ANXA10 | annexin A10 | 109511 | 196104 | 137628 | 4, 37, 3 |
| 4 | ANXA3 | annexin A3 | 138772 | 138759 | 138756 | 7, 1, 34 |
| 4 | ANXA5 | annexin A5 | 164111 | 186867 | 164112 | 30, 35, 32 |
| 4 | ANTXR2 | anthrax toxin receptor 2 | 163297 | 196475 | 152784 | 1, 44, 45 |
| 4 | APELA | apelin receptor early endogenous ligand | 248329 | 248771 | 183439 | 6, 12, 33 |
| 4 | ARAP2 | ArfGAP with RhoGAP domain, ankyrin repeat and PH domain 2 | 047365 | 169851 | 197057 | |
| 4 | ARSJ | arylsulfatase family member J | 180801 | 145349 | 174607 | |
| 4 | AGA | aspartylglucosaminidase | 038002 | 109674 | 218336 | 9, 1, 13 |
| 4 | ATOH1 | atonal bHLH transcription factor 1 | 172238 | 152208 | 163104 | |
| 4 | ABCE1 | ATP binding cassette subfamily E member 1 | 164163 | 164162 | 164164 | |
| 4 | ABCG2 | ATP binding cassette subfamily G member 2 (Junior blood group) | 118777 | 118762 | 163644 | 32, 30, 4 |
| 4 | ATP5I | ATP synthase, H+ transporting, mitochondrial Fo complex | 169020 | 133256 | 215375 | 19, 5, 43 |
| | | subunit E | | | | |
| 4 | ATP10D | ATPase phospholipid transporting 10D (putative) | 145246 | 169019 | 145244 | 35, 18, 11 |
| 4 | ATP8A1 | ATPase phospholipid transporting 8A1 | 124406 | 178343 | 215203 | 29, 26, 11 |
| 4 | BBS12 | Bardet-Biedl syndrome 12 | 181004 | 138684 | 138685 | 29, 4, 38 |
| 4 | BBS7 | Bardet-Biedl syndrome 7 | 138686 | 145386 | 138741 | 1, 45, 25 |
| 4 | BANK1 | B-cell scaffold protein with ankyrin repeats 1 | 153064 | 138814 | 138821 | |
| 4 | BEND4 | BEN domain containing 4 | 188848 | 014824 | 178343 | 22, 6, 39 |
| 4 | BTC | betacellulin | 174808 | 109321 | 169116 | 17, 27, 10 |
| 4 | BLOC1S4 | biogenesis of lysosomal organelles complex 1 subunit 4 | 186222 | 178988 | 170871 | 29, 32, 22 |
| 4 | BOD1L1 | biorientation of chromosomes in cell division 1 like 1 | 038219 | 109705 | 281620 | 1, 30, 26 |
| 4 | BMP2K | BMP2 inducible kinase | 138756 | 138772 | 163291 | 22, 40, 5 |
| 4 | BST1 | bone marrow stromal cell antigen 1 | 109743 | 237765 | 004468 | 43, 5, 32 |
| 4 | BMP3 | bone morphogenetic protein 3 | 152785 | 197826 | 138669 | 30, 7, 20 |
| 4 | BMPR1B | bone morphogenetic protein receptor type 1B | 138696 | 163110 | 182168 | 26, 27, 33 |
| 4 | C1QTNF7 | C1q and tumor necrosis factor related protein 7 | 163145 | 137449 | 048342 | 42, 25, 44 |
| 4 | CABS1 | calcium binding protein, spermatid associated 1 | 145309 | 171209 | 109208 | 38, 8, |
| 4 | CAMK2D | calcium/calmodulin dependent protein kinase II delta | 145349 | 145362 | 180801 | 25, 22, 29 |
| 4 | CLGN | calmegin | 153132 | 153130 | 205301 | 38, 30, 15 |
| 4 | CBR4 | carbonyl reductase 4 | 145439 | 129116 | 154447 | 42, 24, 18 |
| 4 | CPE | carboxypeptidase E | 109472 | 052802 | 038295 | 31, 28, 11 |
| 4 | CPZ | carboxypeptidase Z | 109625 | 155269 | 215612 | 43, 32, 27 |
| 4 | CSN1S1 | casein alpha s1 | 126545 | 109193 | 135222 | 10, |
| 4 | CSN2 | casein beta | 135222 | 126545 | 126549 | 10, |
| 4 | CSN3 | casein kappa | 171209 | 181617 | 145309 | 10, 8, |
| 4 | CASP3 | caspase 3 | 164305 | 168310 | 164306 | 13, 5, 11 |
| 4 | CASP6 | caspase 6 | 138794 | 005059 | 123739 | 3, 30, 4 |
| 4 | CTSO | cathepsin O | 256043 | 151790 | 145431 | 45, 1, 17 |
| 4 | CNOT6L | CCR4-NOT transcription complex subunit 6 like | 138767 | 156234 | 169288 | 2, 42, 22 |
| 4 | CD38 | CD38 molecule | 004468 | 109743 | 137440 | 22, 39, 36 |
| 4 | CISD2 | CDGSH iron sulfur domain 2 | 145354 | 109332 | 164037 | 2, 4, 1 |
| 4 | CDKN2AIP | CDKN2A interacting protein | 168564 | 185758 | 168556 | |
| 4 | CDS1 | CDP-diacylglycerol synthase 1 | 163624 | 163623 | 163625 | 29, 17, 32 |
| 4 | CWH43 | cell wall biogenesis 43 C-terminal homolog | 109182 | 145247 | 109184 | 26, 33, 30 |
| 4 | CENPC | centromere protein C | 145241 | 145242 | 035720 | 22, 26, 31 |
| 4 | CENPE | centromere protein E | 138778 | 164039 | 169836 | 22, 2, 12 |
| 4 | CENPU | centromere protein U | 151725 | 164306 | 151726 | |
| 4 | CEP135 | centrosomal protein 135 | 174799 | 090989 | 109265 | |
| 4 | CEP44 | centrosomal protein 44 | 164118 | 164117 | 164120 | 37, 23, 29 |
| 4 | CLCN3 | chloride voltage-gated channel 3 | 109572 | 137601 | 056050 | 24, 26, 11 |
| 4 | CCKAR | cholecystokinin A receptor | 163394 | 168214 | 109680 | 8, |
| 4 | CHRNA9 | cholinergic receptor nicotinic alpha 9 subunit | 174343 | 168421 | 163694 | |
| 4 | C4orf17 | chromosome 4 open reading frame 17 | 138813 | 196344 | 145331 | 38, 10, |
| 4 | C4orf19 | chromosome 4 open reading frame 19 | 154274 | 174145 | 181826 | 4, 29, 32 |
| 4 | C4orf22 | chromosome 4 open reading frame 22 | 197826 | 138675 | 152785 | 10, 38, 42 |
| 4 | C4orf26 | chromosome 4 open reading frame 26 | 174792 | 174796 | 138769 | 32, 4, 17 |
| 4 | C4orf3 | chromosome 4 open reading frame 3 | 164096 | 145390 | 145384 | 30, 29, 27 |
| 4 | C4orf32 | chromosome 4 open reading frame 32 | 174749 | 164093 | 138660 | 29, 21, 31 |
| 4 | C4orf33 | chromosome 4 open reading frame 33 | 151470 | 151466 | 138650 | 7, 4, 12 |
| 4 | C4orf36 | chromosome 4 open reading frame 36 | 163633 | 145283 | 172493 | 2, 32, 30 |
| 4 | C4orf45 | chromosome 4 open reading frame 45 | 164123 | 052795 | 109756 | 10, 38, |
| 4 | C4orf46 | chromosome 4 open reading frame 46 | 205208 | 171509 | 171503 | 18, 7, 9 |
| 4 | C4orf47 | chromosome 4 open reading frame 47 | 205129 | 109775 | 168491 | 10, 38, 32 |
| 4 | C4orf48 | chromosome 4 open reading frame 48 | 243449 | 185049 | 185818 | 28, 38, 14 |
| 4 | C4orf50 | chromosome 4 open reading frame 50 | 181215 | 072832 | 152969 | 39, |
| 4 | C4orf51 | chromosome 4 open reading frame 51 | 237136 | 151611 | 151612 | 10, |
| 4 | CFAP97 | cilia and flagella associated protein 97 | 164323 | 151729 | 109762 | 40, 29, 38 |
| 4 | CFAP99 | cilia and flagella associated protein 99 | 206113 | 159733 | 063978 | 38, 23, 17 |
| 4 | CLRN2 | clarin 2 | 249581 | 151552 | 002549 | |
| 4 | CLDN22 | claudin 22 | 177300 | 151718 | 185758 | |
| 4 | CLDN24 | claudin 24 | 185758 | 177300 | 168564 | |
| 4 | CLOCK | clock circadian regulator | 134852 | 134851 | 163440 | 29, 1, 25 |
| 4 | F11 | coagulation factor XI | 088926 | 164344 | 272297 | 19, 17, 4 |
| 4 | COQ2 | coenzyme Q2, polyprenyltransferase | 173085 | 145287 | 173083 | 9, 3, 28 |
| 4 | CC2D2A | coiled-coil and C2 domain containing 2A | 048342 | 163145 | 118564 | 26, 34, 40 |
| 4 | CCDC110 | coiled-coil domain containing 110 | 168491 | 205129 | 154553 | 11, 38, 4 |
| 4 | CCDC149 | coiled-coil domain containing 149 | 181982 | 109610 | 153012 | 34, 14, 33 |
| 4 | CCDC158 | coiled-coil domain containing 158 | 163749 | 118804 | 138771 | 38, 19, 5 |
| 4 | CCDC96 | coiled-coil domain containing 96 | 173013 | 132405 | 173011 | 38, 10, 27 |
| 4 | CCSER1 | coiled-coil serine rich protein 1 | 184305 | 138722 | 152208 | 31, 42, 38 |
| 4 | COL25A1 | collagen type XXV alpha 1 chain | 188517 | 164089 | 138802 | 9, 2, 38 |
| 4 | CRMP1 | collapsin response mediator protein 1 | 072832 | 072840 | 181215 | 8, 14, 26 |
| 4 | COMMD8 | COMM domain containing 8 | 169019 | 163288 | 145246 | 29, 4, 17 |
| 4 | CFI | complement factor I | 205403 | 123739 | 109534 | 4, 17, 19 |
| 4 | CPLX1 | complexin 1 | 168993 | 185619 | 178950 | 14, 8, 2 |
| 4 | COPS4 | COP9 signalosome subunit 4 | 138663 | 189308 | 145287 | 31, 29, 15 |
| 4 | CORIN | corin, serine peptidase | 145244 | 145246 | 170448 | 15, 44, 10 |
| 4 | COX18 | COX18, cytochrome c oxidase assembly factor | 163626 | 156140 | 132466 | 10, 29, 26 |
| 4 | CTBP1 | C-terminal binding protein 1 | 159692 | 159674 | 090316 | 11, 22, 1 |
| 4 | CXCL1 | C-X-C motif chemokine ligand 1 | 163739 | 109272 | 163737 | 45, 37, 10 |
| 4 | CXCL10 | C-X-C motif chemokine ligand 10 | 169245 | 156219 | 169248 | 29, 30, 44 |
| 4 | CXCL11 | C-X-C motif chemokine ligand 11 | 169248 | 169245 | 138750 | 24, 34, 7 |
| 4 | CXCL13 | C-X-C motif chemokine ligand 13 | 156234 | 138764 | 138767 | 30, 36, 23 |
| 4 | CXCL2 | C-X-C motif chemokine ligand 2 | 081041 | 163734 | 163738 | 19, 4, 37 |
| 4 | CXCL3 | C-X-C motif chemokine ligand 3 | 163734 | 163735 | 081041 | 9, 20, 4 |
| 4 | CXCL5 | C-X-C motif chemokine ligand 5 | 163735 | 163736 | 163734 | 20, 3, 45 |
| 4 | CXCL6 | C-X-C motif chemokine ligand 6 | 124875 | 169429 | 109272 | 45, 36, 4 |
| 4 | CXCL8 | C-X-C motif chemokine ligand 8 | 169429 | 169435 | 124875 | 5, 7, 45 |
| 4 | CXCL9 | C-X-C motif chemokine ligand 9 | 138755 | 280671 | 156219 | 36, 39, 37 |
| 4 | CXXC4 | CXXC finger protein 4 | 168772 | 169836 | 168769 | 1, 10, 42 |
| 4 | CNGA1 | cyclic nucleotide gated channel alpha 1 | 198515 | 163293 | 074966 | 15, 14, 25 |
| 4 | CCNA2 | cyclin A2 | 145386 | 123737 | 138686 | 9, 22, 39 |
| 4 | CDKL2 | cyclin dependent kinase like 2 | 138769 | 174792 | 138757 | 38, 30, 8 |
| 4 | GAK | cyclin G associated kinase | 178950 | 168993 | 127419 | 34, 29, 31 |
| 4 | CCNG2 | cyclin G2 | 138764 | 118816 | 156234 | 29, 1, 40 |
| 4 | CCNI | cyclin I | 118816 | 138758 | 138764 | 11, 41, 18 |
| 4 | CHIC2 | cysteine rich hydrophobic domain 2 | 109220 | 072201 | 180613 | 13, 38, 23 |
| 4 | CRIPAK | cysteine rich PAK1 inhibitor | 179979 | 163945 | 235608 | 13, 36, 39 |
| 4 | COX7B2 | cytochrome c oxidase subunit 7B2 | 170516 | 151834 | 109158 | 10, 38, 4 |
| 4 | CYP2U1 | cytochrome P450 family 2 subfamily U member 1 | 155016 | 164023 | 138796 | 39, 29, 35 |
| 4 | CYP4V2 | cytochrome P450 family 4 subfamily V member 2 | 145476 | 109794 | 164344 | 29, 11, 17 |
| 4 | CLNK | cytokine dependent hematopoietic cell linker | 109684 | 178163 | 002587 | 36, 5, 25 |
| 4 | CYTL1 | cytokine like 1 | 170891 | 163132 | 152953 | 10, 14, 6 |
| 4 | CPEB2 | cytoplasmic polyadenylation element binding protein 2 | 137449 | 281620 | 163145 | 45, 17, 23 |
| 4 | DCHS2 | dachsous cadherin-related 2 | 197410 | 145423 | 171566 | 27, 42, 25 |
| 4 | DCTD | dCMP deaminase | 129187 | 218336 | 151718 | 13, 9, 6 |
| 4 | DCAF16 | DDB1 and CUL4 associated factor 16 | 163257 | 047662 | 109805 | 11, 25, 4 |
| 4 | DCAF4L1 | DDB1 and CUL4 associated factor 4 like 1 | 182308 | 109133 | 014824 | 38, |
| 4 | DDX60L | DEAD-box helicase 60-like | 181381 | 137628 | 129116 | 1, 32, 25 |
| 4 | DHX15 | DEAH-box helicase 15 | 109606 | 109819 | 109610 | 11, 39, 24 |
| 4 | DTHD1 | death domain containing 1 | 197057 | 047365 | 174145 | 42, 30, 39 |
| 4 | DCUN1D4 | defective in cullin neddylation 1 domain containing 4 | 109184 | 109182 | 188993 | 34, 24, 26 |
| 4 | DEFB131 | defensin beta 131 | 186146 | 228856 | 109667 | |
| 4 | DMP1 | dentin matrix acidic phosphoprotein 1 | 152592 | 152591 | 029559 | 11, 6, 10 |
| 4 | DSPP | dentin sialophosphoprotein | 152591 | 152583 | 152592 | 17, |
| 4 | DCK | deoxycytidine kinase | 156136 | 173542 | 080493 | |
| 4 | DDX60 | DExD/H-box helicase 60 | 137628 | 109511 | 181381 | 44, 42, 39 |
| 4 | DGKQ | diacylglycerol kinase theta | 145214 | 127419 | 145217 | 31, 44, 26 |
| 4 | DKK2 | dickkopf WNT signaling pathway inhibitor 2 | 155011 | 250298 | 138801 | |
| 4 | DDIT4L | DNA damage inducible transcript 4 like | 145358 | 164032 | 164035 | 24, 15, 25 |
| 4 | POLN | DNA polymerase nu | 130997 | 185818 | 214367 | 29, 26, 2 |
| 4 | DNAJB14 | DnaJ heat shock protein family (Hsp40) member B14 | 164031 | 109270 | 164032 | 22, 30, 1 |
| 4 | DOK7 | docking protein 7 | 175920 | 109758 | 163956 | |
| 4 | DRD5 | dopamine receptor D5 | 169676 | 109667 | 071127 | 27, 14, 8 |
| 4 | DUX4 | double homeobox 4 | 260596 | 205097 | 151725 | |
| 4 | DCLK2 | doublecortin like kinase 2 | 170390 | 234828 | 198589 | 26, 29, 15 |
| 4 | DAPP1 | dual adaptor of phosphotyrosine and 3-phosphoinositides 1 | 070190 | 248713 | 109270 | 41, 30, 22 |
| 4 | ELF2 | E74 like ETS transcription factor 2 | 109381 | 151014 | 137463 | 26, 6, 22 |
| 4 | ENPP6 | ectonucleotide pyrophosphatase/phosphodiesterase 6 | 164303 | 173320 | 168310 | 26, 17, 31 |
| 4 | ETFDH | electron transfer flavoprotein dehydrogenase | 171503 | 205208 | 171497 | 31, 42, 21 |
| 4 | ELMOD2 | ELMO domain containing 2 | 179387 | 205301 | 109424 | 42, 2, 6 |
| 4 | ELOVL6 | ELOVL fatty acid elongase 6 | 170522 | 138798 | 138792 | 7, 4, 23 |
| 4 | ENAM | enamelin | 132464 | 178522 | 132465 | |
| 4 | ERVMER34-1 | Endogenous retrovirus group MER34 member 1 | 226887 | 109189 | 128045 | 32, 3, 17 |
| 4 | EMCN | endomucin | 164035 | 145358 | 138814 | 11, 43, 45 |
| 4 | EDNRA | endothelin receptor type A | 151617 | 137473 | 164168 | 44, 11, 31 |
| 4 | ENOPH1 | enolase-phosphatase 1 | 145293 | 152795 | 249242 | 13, 8, 29 |
| 4 | EPHA5 | EPH receptor A5 | 145242 | 205678 | 145241 | 8, 25, 20 |
| 4 | EGF | epidermal growth factor | 138798 | 183423 | 170522 | 10, 17, 31 |
| 4 | EREG | epiregulin | 124882 | 182585 | 109321 | 35, 3, 19 |
| 4 | EPGN | epithelial mitogen | 182585 | 163738 | 124882 | 13, 9, 44 |
| 4 | ETNPPL | ethanolamine-phosphate phospho-lyase | 164089 | 198856 | 188517 | 8, 26, 19 |
| 4 | EIF4E | eukaryotic translation initiation factor 4E | 151247 | 168785 | 164024 | 7, 4, 3 |
| 4 | EVC | EvC ciliary complex subunit 1 | 072840 | 173040 | 072832 | 23, 20, 30 |
| 4 | EVC2 | EvC ciliary complex subunit 2 | 173040 | 152953 | 072840 | 13, 41, 22 |
| 4 | EXOC1 | exocyst complex component 1 | 090989 | 250821 | 174799 | 4, 24, 42 |
| 4 | EXOSC9 | exosome component 9 | 123737 | 164112 | 145386 | 41, 6, 7 |
| 4 | FIP1L1 | factor interacting with PAPOLA and CPSF1 | 145216 | 184178 | 282278 | 5, 40, 18 |
| 4 | FAM47E- | FAM47E-STBD1 readthrough | 272414 | 189157 | 118804 | 26, 15, 28 |
| | STBD1 | | | | | |
| 4 | FAM114A1 | family with sequence similarity 114 member A1 | 197712 | 174130 | 121895 | 42, 6, 11 |
| 4 | FAM13A | family with sequence similarity 13 member A | 138640 | 177432 | 180346 | 32, 42, 8 |
| 4 | FAM149A | family with sequence similarity 149 member A | 109794 | 164342 | 145476 | 26, 17, 37 |
| 4 | FAM160A1 | family with sequence similarity 160 member A1 | 164142 | 189099 | 059691 | 18, 23, 24 |
| 4 | FAM175A | family with sequence similarity 175 member A | 163322 | 163319 | 138678 | 34, 45, 22 |
| 4 | FAM184B | family with sequence similarity 184 member B | 047662 | 118579 | 163257 | 24, 15, 8 |
| 4 | FAM193A | family with sequence similarity 193 member A | 125386 | 063978 | 168884 | 26, 18, 22 |
| 4 | FAM198B | family with sequence similarity 198 member B | 164125 | 120251 | 164124 | 43, 45, 2 |
| 4 | FAM200B | family with sequence similarity 200 member B | 237765 | 118564 | 109743 | 34, 25, 8 |
| 4 | FAM218A | family with sequence similarity 218 member A | 250486 | 183439 | 176979 | 26, 4, 28 |
| 4 | FAM47E | family with sequence similarity 47 member E | 189157 | 138760 | 272414 | 26, 15, 28 |
| 4 | FAM53A | family with sequence similarity 53 member A | 174137 | 235608 | 163950 | 31, 38, 37 |
| 4 | FAM90A26 | Family with sequence similarity 90 member A26 | 229924 | 215612 | 231396 | |
| 4 | FAT1 | FAT atypical cadherin 1 | 083857 | 168412 | 179059 | 26, 13, 23 |
| 4 | FAT4 | FAT atypical cadherin 4 | 196159 | 151458 | 164066 | 1, 14, 35 |
| 4 | FABP2 | fatty acid binding protein 2 | 145384 | 164096 | 138735 | 16, 10, 17 |
| 4 | FBXL5 | F-box and leucine rich repeat protein 5 | 118564 | 048342 | 237765 | 31, 13, 11 |
| 4 | FBXW7 | F-box and WD repeat domain containing 7 | 109670 | 059691 | 170006 | 29, 44, 23 |
| 4 | FBXO8 | F-box protein 8 | 164117 | 164107 | 164118 | 31, 28, 17 |
| 4 | FHDC1 | FH2 domain containing 1 | 137460 | 164144 | 109654 | 32, 15, 29 |
| 4 | FGA | fibrinogen alpha chain | 171560 | 171564 | 171557 | 19, 5, 36 |
| 4 | FGB | fibrinogen beta chain | 171564 | 171566 | 171560 | 19, 5, 15 |
| 4 | FGG | fibrinogen gamma chain | 171557 | 171560 | 121207 | 19, 25, 5 |
| 4 | FGF2 | fibroblast growth factor 2 | 138685 | 181004 | 170917 | 40, 44, 37 |
| 4 | FGF5 | fibroblast growth factor 5 | 138675 | 152784 | 197826 | 35, 6, 17 |
| 4 | FGFBP1 | fibroblast growth factor binding protein 1 | 137440 | 004468 | 137441 | 37, 22, 24 |
| 4 | FGFBP2 | fibroblast growth factor binding protein 2 | 137441 | 137440 | 007062 | 6, 10, 2 |
| 4 | FGFR3 | fibroblast growth factor receptor 3 | 068078 | 013810 | 168924 | 18, 12, 26 |
| 4 | FGFRL1 | fibroblast growth factor receptor-like 1 | 127418 | 127415 | 178222 | 2, 33, 27 |
| 4 | FDCSP | follicular dendritic cell secreted protein | 181617 | 109205 | 171209 | 30, 45, 22 |
| 4 | FNIP2 | folliculin interacting protein 2 | 052795 | 171497 | 164123 | |
| 4 | FSTL5 | follistatin like 5 | 168843 | 109756 | 145414 | 11, 8, 31 |
| 4 | FREM3 | FRAS1 related extracellular matrix 3 | 183090 | 153147 | 197465 | 20, 8, |
| 4 | FRAS1 | Fraser extracellular matrix complex subunit 1 | 138759 | 169288 | 138772 | 40, 20, 12 |
| 4 | FRYL | FRY like transcription coactivator | 075539 | 182223 | 109180 | 11, 29, 26 |
| 4 | FRG1 | FSHD region gene 1 | 109536 | 184108 | 205097 | 7, 30, 31 |
| 4 | FRG2 | FSHD region gene 2 | 205097 | 109536 | 260596 | |
| 4 | GPR78 | G protein-coupled receptor 78 | 155269 | 155275 | 109625 | 32, 25, 8 |
| 4 | GRK4 | G protein-coupled receptor kinase 4 | 125388 | 087269 | 197386 | 38, 2, 29 |
| 4 | G3BP2 | G3BP stress granule assembly factor 2 | 138757 | 138769 | 138768 | 42, 40, 12 |
| 4 | GABRA2 | gamma-aminobutyric acid type A receptor alpha2 subunit | 151834 | 163285 | 170516 | 8, 10, 20 |
| 4 | GABRA4 | gamma-aminobutyric acid type A receptor alpha4 subunit | 109158 | 170516 | 163288 | 8, 10, 45 |
| 4 | GABRB1 | gamma-aminobutyric acid type A receptor beta1 subunit | 163288 | 109158 | 169019 | 8, 15, 17 |
| 4 | GABRG1 | gamma-aminobutyric acid type A receptor gamma1 subunit | 163285 | 163281 | 151834 | 8, 14, |
| 4 | GAR1 | GAR1 ribonucleoprotein | 109534 | 205403 | 180245 | 3, 21, 6 |
| 4 | GC | GC, vitamin D binding protein | 145321 | 080493 | 056291 | 19, 28, 23 |
| 4 | GIMD1 | GIMAP family P-loop NTPase domain containing 1 | 250298 | 164022 | 155011 | |
| 4 | GNPDA2 | glucosamine-6-phosphate deaminase 2 | 163281 | 151806 | 163285 | 4, 31, 25 |
| 4 | GBA3 | glucosylceramidase beta 3 (gene/pseudogene) | 249948 | 152990 | 109819 | |
| 4 | GRIA2 | glutamate ionotropic receptor AMPA type subunit 2 | 120251 | 109738 | 164125 | 8, 31, 44 |
| 4 | GRID2 | glutamate ionotropic receptor delta type subunit 2 | 152208 | 184305 | 172238 | 38, 10, 8 |
| 4 | ENPEP | glutamyl aminopeptidase | 138792 | 170522 | 164093 | 17, 29, 32 |
| 4 | GATB | glutamyl-tRNA amidotransferase subunit B | 059691 | 164142 | 109670 | 5, 16, 8 |
| 4 | GRXCR1 | glutaredoxin and cysteine rich domain containing 1 | 215203 | 124406 | 183783 | 10, 33, |
| 4 | GSTCD | glutathione S-transferase C-terminal domain containing | 138780 | 138785 | 168743 | 22, 23, 13 |
| 4 | GK2 | glycerol kinase 2 | 196475 | 156269 | 163297 | 38, 8, 33 |
| 4 | GK3P | Glycerol kinase 3 pseudogene | 229894 | 109466 | 052802 | 38, 23, 8 |
| 4 | GPAT3 | glycerol-3-phosphate acyltransferase 3 | 138678 | 163322 | 163623 | 17, 13, 26 |
| 4 | GLRA3 | glycine receptor alpha 3 | 145451 | 164120 | 168594 | 38, |
| 4 | GLRB | glycine receptor beta | 109738 | 145431 | 120251 | 8, 26, 31 |
| 4 | GYPA | glycophorin A (MNS blood group) | 170180 | 250361 | 164161 | 34, 7, 5 |
| 4 | GYPB | glycophorin B (MNS blood group) | 250361 | 197465 | 170180 | 34, 7, 5 |
| 4 | GYPE | glycophorin E (MNS blood group) | 197465 | 183090 | 250361 | |
| 4 | GPM6A | glycoprotein M6A | 150625 | 168594 | 150627 | 8, |
| 4 | GNRHR | gonadotropin releasing hormone receptor | 109163 | 033178 | 153802 | 31, 2, |
| 4 | GPRIN3 | GPRIN family member 3 | 185477 | 180346 | 145335 | 22, 23, 42 |
| 4 | GAB1 | GRB2 associated binding protein 1 | 109458 | 170185 | 153147 | 31, 13, 8 |
| 4 | GRSF1 | G-rich RNA sequence binding factor 1 | 132463 | 018189 | 173542 | 21, 29, 22 |
| 4 | GRPEL1 | GrpE like 1, mitochondrial | 109519 | 173011 | 184985 | 2, 30, 11 |
| 4 | GSX2 | GS homeobox 2 | 180613 | 109220 | 134853 | 22, 8, |
| 4 | GUCY1A3 | guanylate cyclase 1 soluble subunit alpha | 164116 | 164114 | 061918 | 33, 15, 14 |
| 4 | GUCY1B3 | guanylate cyclase 1 soluble subunit beta | 061918 | 164116 | 256394 | 8, 17, 32 |
| 4 | GUF1 | GUF1 homolog, GTPase | 151806 | 177752 | 163281 | 42, 7, 13 |
| 4 | H2AFZ | H2A histone family member Z | 164032 | 164031 | 145358 | 7, 5, 29 |
| 4 | HMX1 | H6 family homeobox 1 | 215612 | 109625 | 229924 | 14, 8, 20 |
| 4 | HAUS3 | HAUS augmin like complex subunit 3 | 214367 | 130997 | 123933 | 39, 29, 38 |
| 4 | HAND2 | heart and neural crest derivatives expressed 2 | 164107 | 164106 | 164117 | 27, 26, 2 |
| 4 | HSPA4L | heat shock protein family A (Hsp70) member 4 like | 164070 | 151475 | 142731 | 38, 42, 4 |
| 4 | HERC3 | HECT and RLD domain containing E3 ubiquitin protein ligase 3 | 138641 | 145337 | 255072 | 42, 7, 1 |
| 4 | HERC5 | HECT and RLD domain containing E3 ubiquitin protein ligase 5 | 138646 | 138642 | 145337 | 18, 31, 10 |
| 4 | HERC6 | HECT and RLD domain containing E3 ubiquitin protein ligase | 138642 | 163644 | 138646 | 42, 1, 9 |
| | | family member 6 | | | | |
| 4 | HHIP | hedgehog interacting protein | 164161 | 170180 | 164162 | 33, |
| 4 | HELQ | helicase, POLQ-like | 163312 | 173083 | 163319 | 45, 42, 44 |
| 4 | HELT | helt bHLH transcription factor | 187821 | 151726 | 151729 | 27, |
| 4 | HPGDS | hematopoietic prostaglandin D synthase | 163106 | 163104 | 163110 | 10, 32, 30 |
| 4 | HS3ST1 | heparan sulfate-glucosamine 3-sulfotransferase 1 | 002587 | 109684 | 157869 | 27, 30, 20 |
| 4 | HPSE | heparanase | 173083 | 173085 | 163312 | 13, 32, 26 |
| 4 | HNRNPD | heterogeneous nuclear ribonucleoprotein D | 138668 | 138670 | 152795 | 11, 12, 6 |
| 4 | HNRNPDL | heterogeneous nuclear ribonucleoprotein D like | 152795 | 138668 | 145293 | |
| 4 | HGFAC | HGF activator | 109758 | 159788 | 175920 | 19, 27, 38 |
| 4 | HMGB2 | high mobility group box 2 | 164104 | 109586 | 164105 | 41, 21, 6 |
| 4 | HTN1 | histatin 1 | 126550 | 205649 | 187533 | 34, 25, 38 |
| 4 | HTN3 | histatin 3 | 205649 | 279857 | 126550 | 34, 25, 45 |
| 4 | HPF1 | histone PARylation factor 1 | 056050 | 109572 | 198948 | |
| 4 | HOPX | HOP homeobox | 171476 | 249693 | 128040 | 40, 10, 35 |
| 4 | HTRA3 | HtrA serine peptidase 3 | 170801 | 281359 | 087008 | 15, 13, 34 |
| 4 | HTT | huntingtin | 197386 | 125388 | 188981 | 18, 29, 34 |
| 4 | HADH | hydroxyacyl-CoA dehydrogenase | 138796 | 155016 | 138795 | 15, 3, 16 |
| 4 | HPGD | hydroxyprostaglandin dehydrogenase 15-(NAD) | 164120 | 164118 | 145451 | 4, 32, 44 |
| 4 | HSD17B11 | hydroxysteroid 17-beta dehydrogenase 11 | 198189 | 170509 | 170502 | 4, 7, 6 |
| 4 | HSD17B13 | hydroxysteroid 17-beta dehydrogenase 13 | 170509 | 145332 | 198189 | 19, 42, 23 |
| 4 | IDUA | iduronidase, alpha-L- | 127415 | 145217 | 127418 | 5, 20, 28 |
| 4 | ING2 | inhibitor of growth family member 2 | 168556 | 168564 | 182552 | 11, 33, 22 |
| 4 | INPP4B | inositol polyphosphate-4-phosphatase type II B | 109452 | 164136 | 170185 | 23, 35, 43 |
| 4 | IGFBP7 | insulin like growth factor binding protein 7 | 163453 | 047315 | 150471 | |
| 4 | INTS12 | integrator complex subunit 12 | 138785 | 236699 | 138780 | 29, 30, 7 |
| 4 | IBSP | integrin binding sialoprotein | 029559 | 152592 | 152595 | 11, 6, 10 |
| 4 | IRF2 | interferon regulatory factor 2 | 168310 | 164303 | 164305 | 24, 16, 5 |
| 4 | IL15 | interleukin 15 | 164136 | 109445 | 109452 | 18, 1, 45 |
| 4 | IL2 | interleukin 2 | 109471 | 164113 | 138684 | 5, |
| 4 | IL21 | interleukin 21 | 138684 | 109471 | 181004 | 38, |
| 4 | INTU | inturned planar cell polarity protein | 164066 | 196159 | 151475 | 31, 45, 42 |
| 4 | JADE1 | jade family PHD finger 1 | 077684 | 164040 | 151466 | 42, 23, 43 |
| 4 | JAKMIP1 | janus kinase and microtubule interacting protein 1 | 152969 | 181215 | 109501 | 8, 14, 6 |
| 4 | JCHAIN | joining chain of multimeric IgA and IgM | 132465 | 132464 | 132467 | |
| 4 | KLKB1 | kallikrein B1 | 164344 | 145476 | 088926 | 19, 29, 28 |
| 4 | KLHL2 | kelch like family member 2 | 109466 | 170088 | 229894 | 40, 37, 8 |
| 4 | KLHL5 | kelch like family member 5 | 109790 | 121895 | 157796 | 22, 33, 30 |
| 4 | KLHL8 | kelch like family member 8 | 145332 | 172493 | 170509 | |
| 4 | KIAA0232 | KIAA0232 | 170871 | 186222 | 132405 | 26, 43, 29 |
| 4 | KIAA0922 | KIAA0922 | 121210 | 121211 | 137462 | 22, 41, 7 |
| 4 | KIAA1109 | KIAA1109 | 138688 | 138741 | 164113 | 29, 1, 25 |
| 4 | KIAA1211 | KIAA1211 | 109265 | 174799 | 157426 | 31, 38, 22 |
| 4 | KDR | kinase insert domain receptor | 128052 | 157404 | 128039 | 31, 29, 11 |
| 4 | KIT | KIT proto-oncogene receptor tyrosine kinase | 157404 | 134853 | 128052 | 27, 42, 1 |
| 4 | KLB | klotho beta | 134962 | 035928 | 163682 | 1, 23, 38 |
| 4 | KLF3 | Kruppel like factor 3 | 109787 | 250254 | 174123 | 29, 44, 16 |
| 4 | LARP1B | La ribonucleoprotein domain family member 1B | 138709 | 164074 | 164040 | 10, 34, 45 |
| 4 | LARP7 | La ribonucleoprotein domain family member 7 | 174720 | 138658 | 145362 | 7, 12, 31 |
| 4 | LAMTOR3 | late endosomal/lysosomal adaptor, MAPK and MTOR activator 3 | 109270 | 070190 | 164031 | 29, 4, 34 |
| 4 | LRPAP1 | LDL receptor related protein associated protein 1 | 163956 | 175920 | 280230 | 29, 1, 34 |
| 4 | LRAT | lecithin retinol acyltransferase (phosphatidylcholine--retinol | 121207 | 171557 | 151962 | |
| | | O-acyltransferase) | | | | |
| 4 | LAP3 | leucine aminopeptidase 3 | 002549 | 249581 | 118579 | 13, 4, 30 |
| 4 | LRRC66 | leucine rich repeat containing 66 | 188993 | 109184 | 163069 | 31, 6, 38 |
| 4 | LGI2 | leucine rich repeat LGI family member 2 | 153012 | 181982 | 109618 | 29, 33, 12 |
| 4 | LRIT3 | leucine rich repeat, Ig-like and transmembrane domains 3 | 183423 | 180245 | 138798 | 14, 8, |
| 4 | LETM1 | leucine zipper and EF-hand containing transmembrane protein 1 | 168924 | 068078 | 109685 | 3, 34, 1 |
| 4 | LCORL | ligand dependent nuclear receptor corepressor like | 178177 | 109805 | 145147 | 2, 11, 3 |
| 4 | LNX1 | ligand of numb-protein X 1 | 072201 | 282278 | 109220 | |
| 4 | LIMCH1 | LIM and calponin homology domains 1 | 064042 | 154277 | 109132 | |
| 4 | LDB2 | LIM domain binding 2 | 169744 | 169762 | 151552 | 8, 36, 45 |
| 4 | LIN54 | lin-54 DREAM MuvB core complex component | 189308 | 168152 | 138663 | 42, 30, 40 |
| 4 | LIAS | lipoic acid synthetase | 121897 | 163682 | 109814 | 4, 1, 26 |
| 4 | LINC01207 | Long intergenic non-protein coding RNA 1207 | 248771 | 145416 | 248329 | 24, 33, 42 |
| 4 | LRBA | LPS responsive beige-like anchor protein | 198589 | 170390 | 181541 | 11, 37, 29 |
| 4 | LRP2BP | LRP2 binding protein | 109771 | 109762 | 186352 | 38, 42, 23 |
| 4 | LSM6 | LSM6 homolog, U6 small nuclear RNA and mRNA degradation | 164167 | 151612 | 250673 | 41, 22, 30 |
| | | associated | | | | |
| 4 | LYAR | Ly1 antibody reactive | 145220 | 132406 | 168826 | 3, 13, 38 |
| 4 | LEF1 | lymphoid enhancer binding factor 1 | 138795 | 138796 | 109475 | 39, 35, 11 |
| 4 | MAB21L2 | mab-21 like 2 | 181541 | 198589 | 145425 | 14, 24, 25 |
| 4 | MAEA | macrophage erythroblast attacher | 090316 | 159692 | 163945 | |
| 4 | MAD2L1 | MAD2 mitotic arrest deficient-like 1 (yeast) | 164109 | 138735 | 138738 | 7, 9, 21 |
| 4 | MFSD10 | major facilitator superfamily domain containing 10 | 109736 | 087274 | 087269 | 41, 26, 9 |
| 4 | MFSD7 | major facilitator superfamily domain containing 7 | 169026 | 215375 | 185619 | 23, 27, 9 |
| 4 | MFSD8 | major facilitator superfamily domain containing 8 | 164073 | 142731 | 164074 | 31, 26, 11 |
| 4 | MAN2B2 | mannosidase alpha class 2B member 2 | 013288 | 074211 | 179010 | 7, 22, 40 |
| 4 | MANBA | mannosidase beta | 109323 | 109320 | 109332 | 31, 39, 40 |
| 4 | MAML3 | mastermind like transcriptional coactivator 3 | 196782 | 085871 | 153130 | 22, 24, 42 |
| 4 | MEPE | matrix extracellular phosphoglycoprotein | 152595 | 029559 | 118785 | 6, 32, 8 |
| 4 | MXD4 | MAX dimerization protein 4 | 123933 | 214367 | 159733 | 26, 1, 6 |
| 4 | MED28 | mediator complex subunit 28 | 118579 | 002549 | 047662 | 43, 41, 12 |
| 4 | MND1 | meiotic nuclear divisions 1 | 121211 | 109654 | 121210 | 41, 6, 37 |
| 4 | MTNR1A | melatonin receptor 1A | 168412 | 272297 | 083857 | 38, 19, |
| 4 | MARCH1 | membrane associated ring-CH-type finger 1 | 145416 | 198498 | 248771 | |
| 4 | METAP1 | methionyl aminopeptidase 1 | 164024 | 151247 | 197894 | 13, 18, 37 |
| 4 | MTHFD2L | methylenetetrahydrofolate dehydrogenase (NADP+ dependent) | 163738 | 081041 | 182585 | |
| | | 2-like | | | | |
| 4 | MMAA | methylmalonic aciduria (cobalamin deficiency) cblA type | 151611 | 170365 | 237136 | 10, 7, 42 |
| 4 | MSMO1 | methylsterol monooxygenase 1 | 052802 | 229894 | 109472 | 34, 29, 2 |
| 4 | METTL14 | methyltransferase like 14 | 145388 | 164099 | 150961 | 30, 1, 43 |
| 4 | MGAT4D | MGAT4 family member D | 205301 | 153132 | 179387 | |
| 4 | MFAP3L | microfibrillar associated protein 3 like | 198948 | 056050 | 109576 | |
| 4 | MGST2 | microsomal glutathione S-transferase 2 | 085871 | 145391 | 196782 | 29, 44, 31 |
| 4 | MTTP | microsomal triglyceride transfer protein | 138823 | 145331 | 248713 | |
| 4 | MAP9 | microtubule associated protein 9 | 164114 | 185149 | 164116 | 29, 45, 1 |
| 4 | MGARP | mitochondria localized glutamic acid rich protein | 137463 | 109381 | 109390 | 14, 2, 44 |
| 4 | MCUB | mitochondrial calcium uniporter dominant negative beta subunit | 005059 | 138802 | 138794 | 34, 22, 26 |
| 4 | MRPL1 | mitochondrial ribosomal protein L1 | 169288 | 138767 | 138759 | 29, 10, 4 |
| 4 | MRPS18C | mitochondrial ribosomal protein S18C | 163319 | 163312 | 163322 | 29, 45, 7 |
| 4 | MAPK10 | mitogen-activated protein kinase 10 | 109339 | 138639 | 163629 | |
| 4 | MOB1B | MOB kinase activator 1B | 173542 | 132463 | 156136 | 1, 22, 17 |
| 4 | MRFAP1 | Morf4 family associated protein 1 | 179010 | 013288 | 163993 | 31, 33, 12 |
| 4 | MRFAP1L1 | Morf4 family associated protein 1 like 1 | 178988 | 163993 | 186222 | 36, 15, 39 |
| 4 | MSX1 | msh homeobox 1 | 163132 | 168818 | 170891 | 44, 12, 15 |
| 4 | MTRNR2L13 | MT-RNR2-like 13 | 270394 | 138653 | 174599 | |
| 4 | MUC7 | mucin 7, secreted | 171195 | 171199 | 187689 | 42, 34, 25 |
| 4 | MMRN1 | multimerin 1 | 138722 | 145335 | 184305 | 45, 43, 42 |
| 4 | MSANTD1 | Myb/SANT DNA binding domain containing 1 | 188981 | 197386 | 159788 | 36, 28, 14 |
| 4 | MYL5 | myosin light chain 5 | 215375 | 169020 | 169026 | |
| 4 | MYOZ2 | myozenin 2 | 172399 | 172403 | 145390 | 25, 15, 18 |
| 4 | NAA11 | N(alpha)-acetyltransferase 11, NatA catalytic subunit | 156269 | 163291 | 196475 | 35, 32, 38 |
| 4 | NAA15 | N(alpha)-acetyltransferase 15, NatA auxiliary subunit | 164134 | 109390 | 172007 | 13, 6, 45 |
| 4 | NAT8L | N-acetyltransferase 8 like | 185818 | 243449 | 130997 | 1, 31, 26 |
| 4 | NWD2 | NACHT and WD repeat domain containing 2 | 174145 | 197057 | 154274 | |
| 4 | NAAA | N-acylethanolamine acid amidase | 138744 | 156194 | 198301 | 5, 14, 17 |
| 4 | NDUFC1 | NADH: ubiquinone oxidoreductase subunit C1 | 109390 | 137463 | 164134 | 31, 17, 3 |
| 4 | NDST3 | N-deacetylase and N-sulfotransferase 3 | 164100 | 174599 | 164099 | 5, 39, 2 |
| 4 | NDST4 | N-deacetylase and N-sulfotransferase 4 | 138653 | 174607 | 270394 | 20, |
| 4 | N4BP2 | NEDD4 binding protein 2 | 078177 | 121892 | 168421 | 39, 12, 34 |
| 4 | NELFA | negative elongation factor complex member A | 185049 | 109685 | 243449 | 38, 39, 42 |
| 4 | NEIL3 | nei like DNA glycosylase 3 | 109674 | 150630 | 038002 | 41, 43, 34 |
| 4 | NPNT | nephronectin | 168743 | 138780 | 145348 | 11, 40, 45 |
| 4 | NEUROG2 | neurogenin 2 | 178403 | 073331 | 138658 | 8, 38, |
| 4 | NMU | neuromedin U | 109255 | 163440 | 250821 | 18, 27, 10 |
| 4 | NDNF | neuron derived neurotrophic factor | 173376 | 138738 | 050730 | 11, 14, 6 |
| 4 | NSG1 | Neuron-specific protein family member 1 | 168824 | 168826 | 168818 | 8, 31, 17 |
| 4 | NPFFR2 | neuropeptide FF receptor 2 | 056291 | 145321 | 156140 | 32, 10, 6 |
| 4 | NPY1R | neuropeptide Y receptor Y1 | 164128 | 145414 | 164129 | 23, 6, 36 |
| 4 | NPY2R | neuropeptide Y receptor Y2 | 185149 | 151962 | 164114 | 26, 8, |
| 4 | NPY5R | neuropeptide Y receptor Y5 | 164129 | 164128 | 151005 | |
| 4 | NEK1 | NIMA related kinase 1 | 137601 | 154447 | 109572 | 19, 11, 7 |
| 4 | NIPAL1 | NIPA like domain containing 1 | 163293 | 170448 | 198515 | 24, 32, 40 |
| 4 | NOA1 | nitric oxide associated 1 | 084092 | 084093 | 047315 | 39, 36, 22 |
| 4 | NKX1-1 | NK1 homeobox 1 | 235608 | 179979 | 174137 | |
| 4 | NKX3-2 | NK3 homeobox 2 | 109705 | 157869 | 038219 | 27, 38, 12 |
| 4 | NKX6-1 | NK6 homeobox 1 | 163623 | 138678 | 163624 | 28, 27, |
| 4 | NOCT | nocturnin | 151014 | 151012 | 109381 | 25, 4, 10 |
| 4 | NCAPG | non-SMC condensin I complex subunit G | 109805 | 163257 | 178177 | 9, 39, 10 |
| 4 | NOP14 | NOP14 nucleolar protein | 087269 | 109736 | 125388 | 21, 29, 26 |
| 4 | NSUN7 | NOP2/Sun RNA methyltransferase family member 7 | 179299 | 163694 | 163697 | 42, 38, 12 |
| 4 | NAF1 | nuclear assembly factor 1 ribonucleoprotein | 145414 | 168843 | 164128 | 37, 7, 42 |
| 4 | NFKB1 | nuclear factor kappa B subunit 1 | 109320 | 138821 | 109323 | 26, 42, 7 |
| 4 | NR3C2 | nuclear receptor subfamily 3 group C member 2 | 151623 | 071205 | 234828 | 37, 14, 34 |
| 4 | NFXL1 | nuclear transcription factor, X-box binding like 1 | 170448 | 145244 | 163293 | 7, 11, 45 |
| 4 | NUP54 | nucleoporin 54 | 138750 | 169248 | 138760 | |
| 4 | NAP1L5 | nucleosome assembly protein 1 like 5 | 177432 | 255072 | 138640 | 11, 31, 8 |
| 4 | NUDT6 | nudix hydrolase 6 | 170917 | 138685 | 145375 | 22, |
| 4 | NUDT9 | nudix hydrolase 9 | 170502 | 198189 | 152583 | 17, 26, 3 |
| 4 | OCIAD1 | OCIA domain containing 1 | 109180 | 075539 | 145247 | 24, 11, 31 |
| 4 | OCIAD2 | OCIA domain containing 2 | 145247 | 109180 | 109182 | 29, 45, 3 |
| 4 | ODAM | odontogenic, ameloblast asssociated | 109205 | 187533 | 181617 | 10, 42, 15 |
| 4 | OSTC | oligosaccharyltransferase complex non-catalytic subunit | 198856 | 109475 | 164089 | 34, 4, 7 |
| 4 | OPRPN | opiorphin prepropeptide | 171199 | 171201 | 171195 | 14, 10, |
| 4 | OTOP1 | otopetrin 1 | 163982 | 184160 | 132406 | |
| 4 | OTUD4 | OTU deubiquitinase 4 | 164164 | 164163 | 170365 | 1, 22, 25 |
| 4 | PHOX2B | paired like homeobox 2b | 109132 | 064042 | 109133 | 33, 12, 20 |
| 4 | PITX2 | paired like homeodomain 2 | 164093 | 138792 | 174749 | 32, 31, 24 |
| 4 | PALLD | palladin, cytoskeletal associated protein | 129116 | 181381 | 145439 | 43, 1, 44 |
| 4 | PACRGL | PARK2 coregulated like | 163138 | 145147 | 185774 | 36, 4, 38 |
| 4 | PDS5A | PDS5 cohesin associated factor A | 121892 | 078140 | 078177 | 11, 7, 6 |
| 4 | PDLIM3 | PDZ and LIM domain 3 | 154553 | 168491 | 154556 | 15, 25, 37 |
| 4 | PDLIM5 | PDZ and LIM domain 5 | 163110 | 163106 | 138696 | 25, 15, 45 |
| 4 | PPID | peptidylprolyl isomerase D | 171497 | 171503 | 052795 | 40, 15, 9 |
| 4 | PDCL2 | phosducin like 2 | 163440 | 134852 | 109255 | 38, 5, 10 |
| 4 | PI4K2B | phosphatidylinositol 4-kinase type 2 beta | 038210 | 281028 | 168228 | 42, 18, 11 |
| 4 | PIGG | phosphatidylinositol glycan anchor biosynthesis class G | 174227 | 182903 | 133256 | 39, |
| 4 | PIGY | phosphatidylinositol glycan anchor biosynthesis class Y | 255072 | 138641 | 177432 | 31, 34, 13 |
| 4 | PDE5A | phosphodiesterase 5A | 138735 | 145384 | 164109 | 45, 11, 42 |
| 4 | PDE6B | phosphodiesterase 6B | 133256 | 174227 | 169020 | 39, 26, 14 |
| 4 | PGM2 | phosphoglucomutase 2 | 169299 | 181826 | 279386 | 13, 43, 4 |
| 4 | PLA2G12A | phospholipase A2 group XIIA | 123739 | 138794 | 205403 | 29, 34, 31 |
| 4 | PPAT | phosphoribosyl pyrophosphate amidotransferase | 128059 | 157426 | 128050 | 42, 13, 21 |
| 4 | PAICS | phosphoribosylaminoimidazole carboxylase and | 128050 | 128059 | 174780 | 31, 3, 12 |
| | | phosphoribosylaminoimidazolesuccinocarboxamide synthase | | | | |
| 4 | PYURF | PIGY upstream reading frame | 145337 | 138646 | 138641 | |
| 4 | PTTG2 | pituitary tumor-transforming 2 | 250254 | 065882 | 109787 | 44, |
| 4 | PLAC8 | placenta specific 8 | 145287 | 138663 | 173085 | 37, 7, 36 |
| 4 | PDGFC | platelet derived growth factor C | 145431 | 256043 | 109738 | 29, 11, 6 |
| 4 | PDGFRA | platelet derived growth factor receptor alpha | 134853 | 180613 | 157404 | 11, 1, 29 |
| 4 | PF4 | platelet factor 4 | 163737 | 163739 | 163736 | 15, 7, 16 |
| 4 | PF4V1 | platelet factor 4 variant 1 | 109272 | 124875 | 163739 | |
| 4 | PLRG1 | pleiotropic regulator 1 | 171566 | 197410 | 171564 | 13, 43, 7 |
| 4 | PLK4 | polo like kinase 4 | 142731 | 164070 | 164073 | 38, 7, 12 |
| 4 | PABPC4L | poly(A) binding protein cytoplasmic 4 like | 254535 | 138650 | 189184 | 24, 7, 36 |
| 4 | PCGF3 | polycomb group ring finger 3 | 185619 | 169026 | 168993 | 43, 13, 26 |
| 4 | PKD2 | polycystin 2, transient receptor potential cation channel | 118762 | 118785 | 118777 | 11, 28, 43 |
| 4 | GALNT7 | polypeptide N-acetylgalactosaminyltransferase 7 | 109586 | 174473 | 164104 | 42, 39, 24 |
| 4 | GALNTL6 | polypeptide N-acetylgalactosaminyltransferase-like 6 | 174473 | 109576 | 109586 | 35, 38, 17 |
| 4 | KCTD8 | potassium channel tetramerization domain containing 8 | 183783 | 215203 | 177752 | 40, 8, 38 |
| 4 | KCNIP4 | potassium voltage-gated channel interacting protein 4 | 185774 | 163138 | 152990 | 26, 17, 29 |
| 4 | POU4F2 | POU class 4 homeobox 2 | 151615 | 120519 | 137473 | 14, 38, |
| 4 | PPARGC1A | PPARG coactivator 1 alpha | 109819 | 249948 | 109606 | |
| 4 | PRDM5 | PR/SET domain 5 | 138738 | 164109 | 173376 | |
| 4 | PRDM8 | PR/SET domain 8 | 152784 | 163297 | 138675 | 14, 8, 2 |
| 4 | PRIMPOL | primase and DNA directed polymerase | 164306 | 164305 | 151725 | 4, 10, 15 |
| 4 | PGRMC2 | progesterone receptor membrane component 2 | 164040 | 138709 | 077684 | 29, 43, 31 |
| 4 | PAQR3 | progestin and adipoQ receptor family member 3 | 163291 | 138756 | 156269 | 43, 4, 1 |
| 4 | PRR27 | proline rich 27 | 187533 | 126550 | 109205 | |
| 4 | PROM1 | prominin 1 | 007062 | 137441 | 169762 | |
| 4 | PPBP | pro-platelet basic protein | 163736 | 163737 | 163735 | 5, 15, 32 |
| 4 | PSAPL1 | prosaposin-like 1 (gene/pseudogene) | 178597 | 184985 | 196526 | 35, 38, 8 |
| 4 | PARM1 | prostate androgen-regulated mucin-like protein 1 | 169116 | 174808 | 163743 | 43, 28, 1 |
| 4 | PRSS12 | protease, serine 12 | 164099 | 164100 | 145388 | 13, 24, 28 |
| 4 | PRSS48 | protease, serine 48 | 189099 | 109686 | 164142 | 16, |
| 4 | PRMT9 | protein arginine methyltransferase 9 | 164169 | 164168 | 071205 | |
| 4 | PRKG2 | protein kinase, cGMP-dependent, type II | 138669 | 152785 | 138670 | 24, 25, 44 |
| 4 | PPP2R2C | protein phosphatase 2 regulatory subunit Bgamma | 074211 | 109501 | 013288 | 8, 26, 38 |
| 4 | PPP3CA | protein phosphatase 3 catalytic subunit alpha | 138814 | 164035 | 153064 | 6, 26, 33 |
| 4 | PPEF2 | protein phosphatase with EF-hand domain 2 | 156194 | 138768 | 138744 | |
| 4 | PPM1K | protein phosphatase, Mg2+/Mn2+ dependent 1K | 163644 | 118777 | 138642 | 1, 29, 22 |
| 4 | PTPN13 | protein tyrosine phosphatase, non-receptor type 13 | 163629 | 109339 | 145283 | 11, 31, 6 |
| 4 | PCDH10 | Protocadherin 10 | 138650 | 151470 | 254535 | 10, 8, 17 |
| 4 | PCDH18 | Protocadherin 18 | 189184 | 254535 | 151012 | |
| 4 | PCDH7 | Protocadherin 7 | 169851 | 109689 | 047365 | 11, 26, 45 |
| 4 | QRFPR | pyroglutamylated RFamide peptide receptor | 186867 | 050730 | 164111 | 24, 17, |
| 4 | PPA2 | pyrophosphatase (inorganic) 2 | 138777 | 168769 | 236699 | 4, 11, 17 |
| 4 | PDHA2 | pyruvate dehydrogenase (lipoamide) alpha 2 | 163114 | 182168 | 163116 | 38, 8, |
| 4 | QDPR | quinoid dihydropteridine reductase | 151552 | 169744 | 249581 | 8, 34, 26 |
| 4 | RAB28 | RAB28, member RAS oncogene family | 157869 | 002587 | 109705 | 26, 34, 2 |
| 4 | RAB33B | RAB33B, member RAS oncogene family | 172007 | 164134 | 145391 | 45, 26, 31 |
| 4 | RAPGEF2 | Rap guanine nucleotide exchange factor 2 | 109756 | 164123 | 168843 | 43, 29, 31 |
| 4 | RAP1GDS1 | Rap1 GTPase-GDP dissociation stimulator 1 | 138698 | 163116 | 168785 | 29, 31, 10 |
| 4 | RASSF6 | Ras association domain family member 6 | 169435 | 079557 | 169429 | 22, 4, 42 |
| 4 | RHOH | ras homolog family member H | 168421 | 078177 | 174343 | 39, 36, 22 |
| 4 | RASL11B | RAS like family 11 member B | 128045 | 226887 | 184178 | 32, 27, 25 |
| 4 | RASGEF1B | RasGEF domain family member 1B | 138670 | 138669 | 138668 | |
| 4 | REST | RE1 silencing transcription factor | 084093 | 128040 | 084092 | 26, 29, 45 |
| 4 | RBPJ | recombination signal binding protein for immunoglobulin kappa J | 168214 | 250317 | 163394 | 1, 30, 31 |
| | | region | | | | |
| 4 | RGS12 | regulator of G-protein signaling 12 | 159788 | 188981 | 109758 | 20, 14, 17 |
| 4 | RXFP1 | relaxin/insulin like family peptide receptor 1 | 171509 | 164124 | 205208 | 25, 8, 44 |
| 4 | RELL1 | RELT like 1 | 181826 | 154274 | 169299 | 11, 40, 26 |
| 4 | RFC1 | replication factor C subunit 1 | 035928 | 157796 | 134962 | 22, 40, 4 |
| 4 | RRH | retinal pigment epithelium-derived rhodopsin homolog | 180245 | 109534 | 183423 | 10, 14, 8 |
| 4 | ARHGAP10 | Rho GTPase activating protein 10 | 071205 | 164169 | 151623 | 1, 6, 26 |
| 4 | ARHGAP24 | Rho GTPase activating protein 24 | 138639 | 163625 | 109339 | 45, 1, 43 |
| 4 | ARHGEF38 | Rho guanine nucleotide exchange factor 38 | 236699 | 138777 | 138785 | |
| 4 | RPL34 | ribosomal protein L34 | 109475 | 138795 | 198856 | 41, 12, 43 |
| 4 | RPL9 | ribosomal protein L9 | 163682 | 134962 | 121897 | |
| 4 | RPS3A | ribosomal protein S3A | 145425 | 181541 | 109686 | 41, 21, 43 |
| 4 | RCHY1 | ring finger and CHY zinc finger domain containing 1 | 163743 | 169116 | 174796 | 9, 45, 42 |
| 4 | RNF150 | ring finger protein 150 | 170153 | 109436 | 109445 | 11, 31, 9 |
| 4 | RNF175 | ring finger protein 175 | 145428 | 137462 | 145423 | 10, 14, 8 |
| 4 | RNF212 | ring finger protein 212 | 178222 | 127418 | 159674 | 40, 9, 38 |
| 4 | RNF4 | ring finger protein 4 | 063978 | 206113 | 125386 | 39, 38, 30 |
| 4 | RBM46 | RNA binding motif protein 46 | 151962 | 121207 | 185149 | 38, |
| 4 | RBM47 | RNA binding motif protein 47 | 163694 | 174343 | 179299 | 29, 42, 17 |
| 4 | POLR2B | RNA polymerase II subunit B | 047315 | 084092 | 163453 | 42, 39, 44 |
| 4 | RUFY3 | RUN and FYVE domain containing 3 | 018189 | 132467 | 132463 | 38, |
| 4 | RWDD4 | RWD domain containing 4 | 182552 | 168556 | 168538 | 31, 6, 43 |
| 4 | SWOP | S100 calcium binding protein P | 163993 | 179010 | 178988 | 37, 3, 32 |
| 4 | SGCB | sarcoglycan beta | 163069 | 188993 | 163071 | 24, 6, 45 |
| 4 | SCARB2 | scavenger receptor class B member 2 | 138760 | 138750 | 189157 | 26, 42, 13 |
| 4 | SDAD1 | SDA1 domain containing 1 | 198301 | 138744 | 279909 | 30, 21, 26 |
| 4 | SCFD2 | sec1 family domain containing 2 | 184178 | 128045 | 145216 | |
| 4 | SEC24B | SEC24 homolog B, COPII coat complex component | 138802 | 188517 | 005059 | 43, 1, 31 |
| 4 | SEC24D | SEC24 homolog D, COPII coat complex component | 150961 | 145388 | 172403 | 44, 34, 11 |
| 4 | SEC31A | SEC31 homolog A, COPII coat complex component | 138674 | 145284 | 168152 | 42, 11, 24 |
| 4 | SFRP2 | secreted frizzled related protein 2 | 145423 | 145428 | 197410 | 42, 45, 13 |
| 4 | SPP1 | secreted phosphoprotein 1 | 118785 | 152595 | 118762 | 11, 17, 32 |
| 4 | SEL1L3 | SEL1L family member 3 | 091490 | 157765 | 250317 | 22, 16, 33 |
| 4 | SEPSECS | Sep (O-phosphoserine) tRNA: Sec (selenocysteine) tRNA synthase | 109618 | 153012 | 281028 | 31, 22, 42 |
| 4 | SEPT11 | septin 11 | 138758 | 186212 | 118816 | 1, 45, 15 |
| 4 | SPINK2 | serine peptidase inhibitor, Kazal type 2 | 128040 | 171476 | 084093 | 38, 10, 5 |
| 4 | STK32B | serine/threonine kinase 32B | 152953 | 170891 | 173040 | 39, 26, 17 |
| 4 | SETD7 | SET domain containing lysine methyltransferase 7 | 145391 | 172007 | 085871 | 1, 26, 22 |
| 4 | SH3TC1 | SH3 domain and tetratricopeptide repeats 1 | 125089 | 163995 | 281359 | |
| 4 | SH3BP2 | SH3 domain binding protein 2 | 087266 | 168884 | 087274 | 36, 7, 26 |
| 4 | SH3DW | SH3 domain containing 19 | 109686 | 145425 | 189099 | |
| 4 | SH3RF1 | SH3 domain containing ring finger 1 | 154447 | 145439 | 137601 | 9, 24, 27 |
| 4 | SHISA3 | shisa family member 3 | 178343 | 188848 | 124406 | 2, 33, 45 |
| 4 | SCOC | short coiled-coil protein | 153130 | 196782 | 153132 | 29, 4, 26 |
| 4 | SHROOM3 | shroom family member 3 | 138771 | 163749 | 186212 | 13, 4, 16 |
| 4 | SPCS3 | signal peptidase complex subunit 3 | 129128 | 164122 | 150630 | 42, 43, 32 |
| 4 | SRP72 | signal recognition particle 72 | 174780 | 128050 | 196503 | 7, 45, 13 |
| 4 | STAP1 | signal transducing adaptor family member 1 | 035720 | 145241 | 033178 | 41, 21, 22 |
| 4 | SAP30 | Sin3A associated protein 30 | 164105 | 164104 | 164106 | 20, 44, 37 |
| 4 | SLAIN2 | SLAIN motif family member 2 | 109171 | 135605 | 145248 | 11, 38, 45 |
| 4 | SLIT2 | slit guidance ligand 2 | 145147 | 178177 | 163138 | 11, 31, 42 |
| 4 | SMAD1 | SMAD family member 1 | 170365 | 164164 | 151611 | 43, 1, 26 |
| 4 | SMIM14 | small integral membrane protein 14 | 163683 | 109814 | 078140 | 11, 30, 4 |
| 4 | SMIM20 | small integral membrane protein 20 | 250317 | 091490 | 168214 | 29, 22, 10 |
| 4 | SCLT1 | sodium channel and clathrin linker 1 | 151466 | 077684 | 151470 | 11, 10, 4 |
| 4 | SLC10A4 | solute carrier family 10 member 4 | 145248 | 109171 | 182223 | 14, 8, 17 |
| 4 | SLC10A6 | solute carrier family 10 member 6 | 145283 | 163629 | 163633 | 30, |
| 4 | SLC10A7 | solute carrier family 10 member 7 | 120519 | 250673 | 151615 | 42, 24, 13 |
| 4 | SLC2A9 | solute carrier family 2 member 9 | 109667 | 186146 | 169676 | 17, 27, 42 |
| 4 | SLC25A31 | solute carrier family 25 member 31 | 151475 | 164066 | 164070 | 38, 10, 7 |
| 4 | SLC25A4 | solute carrier family 25 member 4 | 151729 | 187821 | 164323 | 29, 15, 31 |
| 4 | SLC26A1 | solute carrier family 26 member 1 | 145217 | 145214 | 127415 | |
| 4 | SLC30A9 | solute carrier family 30 member 9 | 014824 | 182308 | 188848 | 18, 42, 12 |
| 4 | SLC34A2 | solute carrier family 34 member 2 | 157765 | 053900 | 091490 | 40, 27, 42 |
| 4 | SLC39A8 | solute carrier family 39 member 8 | 138821 | 153064 | 109320 | 29, 32, 16 |
| 4 | SLC4A4 | solute carrier family 4 member 4 | 080493 | 156136 | 145321 | 17, 33, 37 |
| 4 | SLC7A11 | solute carrier family 7 member 11 | 151012 | 189184 | 151014 | 37, 13, 11 |
| 4 | SLC9B1 | solute carrier family 9 member B1 | 164037 | 145354 | 164038 | 38, 28, 39 |
| 4 | SLC9B2 | solute carrier family 9 member B2 | 164038 | 164037 | 164039 | 8, |
| 4 | SORBS2 | sorbin and SH3 domain containing 2 | 154556 | 154553 | 164342 | 38, |
| 4 | SORCS2 | sortilin related VPS10 domain containing receptor 2 | 184985 | 109519 | 178597 | 14, 4, 6 |
| 4 | SNX25 | sorting nexin 25 | 109762 | 164323 | 109771 | 22, 40, 11 |
| 4 | SOWAHB | sosondowah ankyrin repeat domain family member B | 186212 | 138771 | 138758 | 17, 16, 25 |
| 4 | SPARCL1 | SPARC like 1 | 152583 | 170502 | 152591 | |
| 4 | SPOCK3 | SPARC/osteonectin, cwcv and kazal like domains proteoglycan 3 | 196104 | 038295 | 109511 | 8, 29, 17 |
| 4 | STPG2 | sperm tail PG-rich repeat containing 2 | 163116 | 163114 | 138698 | 38, 28, |
| 4 | SPATA18 | spermatogenesis associated 18 | 163071 | 163069 | 109189 | 42, 38, 29 |
| 4 | SPATA4 | spermatogenesis associated 4 | 150628 | 150627 | 164122 | 38, 30, 20 |
| 4 | SPATA5 | spermatogenesis associated 5 | 145375 | 170917 | 164056 | 6, 1, 26 |
| 4 | SGMS2 | sphingomyelin synthase 2 | 164023 | 138801 | 155016 | 1, 40, 25 |
| 4 | SPON2 | spondin 2 | 159674 | 178222 | 159692 | 33, 26, 34 |
| 4 | SPRY1 | sprouty RTK signaling antagonist 1 | 164056 | 145375 | 151458 | 4, 26, 28 |
| 4 | STBD1 | starch binding domain 1 | 118804 | 272414 | 163749 | 43, 1, 15 |
| 4 | STATH | statherin | 126549 | 135222 | 279857 | 34, 42, 25 |
| 4 | SCD5 | stearoyl-CoA desaturase 5 | 145284 | 249242 | 138674 | 11, 26, 8 |
| 4 | SLBP | stem-loop binding protein | 163950 | 174137 | 168936 | 32, 3, 38 |
| 4 | SRD5A3 | steroid 5 alpha-reductase 3 | 128039 | 128052 | 134851 | 23, 10, 27 |
| 4 | SCRG1 | stimulator of chondrogenesis 1 | 164106 | 164105 | 164107 | 45, 6, 10 |
| 4 | STOX2 | storkhead box 2 | 173320 | 168538 | 164303 | |
| 4 | STIM2 | stromal interaction molecule 2 | 109689 | 109680 | 169851 | 22, 40, 27 |
| 4 | SMR3A | submaxillary gland androgen regulated protein 3A | 109208 | 145309 | 171201 | 14, 42, |
| 4 | SMR3B | submaxillary gland androgen regulated protein 3B | 171201 | 109208 | 171199 | 25, |
| 4 | SULT1B1 | sulfotransferase family 1B member 1 | 173597 | 271271 | 109193 | 7, 45, 17 |
| 4 | SULT1E1 | sulfotransferase family 1E member 1 | 109193 | 173597 | 126545 | 2, 18, 15 |
| 4 | SOD3 | superoxide dismutase 3 | 109610 | 109606 | 181982 | 1, 26, 10 |
| 4 | SMARCA5 | SWI/SNF related, matrix associated, actin dependent | 153147 | 109458 | 183090 | 1, 11, 22 |
| | | regulator of chromatin, subfamily a, member 5 | | | | |
| 4 | SMARCAD1 | SWI/SNF-related, matrix-associated actin-dependent | 163104 | 172238 | 163106 | 43, 11, 1 |
| | | regulator of chromatin, subfamily a, containing DEAD/H box 1 | | | | |
| 4 | SYNPO2 | synaptopodin 2 | 172403 | 150961 | 172399 | 25, 44, 33 |
| 4 | STX18 | syntaxin 18 | 168818 | 168824 | 163132 | 6, 44, 25 |
| 4 | SNCA | synuclein alpha | 145335 | 185477 | 138722 | 10, 15, 26 |
| 4 | TACR3 | tachykinin receptor 3 | 169836 | 138778 | 168772 | 9, 25, |
| 4 | TBCK | TBC1 domain containing kinase | 145348 | 168743 | 164022 | 42, 21, 38 |
| 4 | TBC1D1 | TBC1 domain family member 1 | 065882 | 279386 | 250254 | 22, 21, 34 |
| 4 | TBC1D14 | TBC1 domain family member 14 | 132405 | 170871 | 173013 | 29, 22, 33 |
| 4 | TBC1D19 | TBC1 domain family member 19 | 109680 | 163394 | 109689 | 39, 29, 4 |
| 4 | TBC1D9 | TBC1 domain family member 9 | 109436 | 109424 | 170153 | 23, 1, 28 |
| 4 | TEC | tec protein tyrosine kinase | 135605 | 074966 | 109171 | 7, 2, 22 |
| 4 | TENM3 | teneurin transmembrane protein 3 | 218336 | 038002 | 129187 | 12, 11, 15 |
| 4 | TET2 | tet methylcytosine dioxygenase 2 | 168769 | 168772 | 138777 | |
| 4 | TSPAN5 | tetraspanin 5 | 168785 | 138698 | 151247 | 35, 26, 6 |
| 4 | TTC29 | tetratricopeptide repeat domain 29 | 137473 | 151615 | 151617 | 10, 38, 30 |
| 4 | THAP6 | THAP domain containing 6 | 174796 | 163743 | 174792 | 4, 26, 24 |
| 4 | THAP9 | THAP domain containing 9 | 168152 | 138674 | 189308 | 11, 42, 38 |
| 4 | THEGL | theg spermatid protein-like | 249693 | 196503 | 171476 | 38, |
| 4 | TIGD2 | tigger transposable element derived 2 | 180346 | 138640 | 185477 | 1, 34, 16 |
| 4 | TIGD4 | tigger transposable element derived 4 | 169989 | 170006 | 164144 | 38, 25, 20 |
| 4 | TNIP2 | TNFAIP3 interacting protein 2 | 168884 | 125386 | 087266 | 9, 37, 21 |
| 4 | TNIP3 | TNFAIP3 interacting protein 3 | 050730 | 173376 | 186867 | 45, 10, 9 |
| 4 | TLR1 | toll like receptor 1 | 174125 | 174123 | 174130 | 5, 22, 42 |
| 4 | TLR10 | toll like receptor 10 | 174123 | 109787 | 174125 | |
| 4 | TLR2 | toll like receptor 2 | 137462 | 121210 | 145428 | 5, 4, 20 |
| 4 | TLR3 | toll like receptor 3 | 164342 | 154556 | 109794 | 42, 32, 1 |
| 4 | TLR6 | toll like receptor 6 | 174130 | 174125 | 197712 | 22, 5, 39 |
| 4 | TLL1 | tolloid like 1 | 038295 | 109472 | 196104 | 33, 32, 12 |
| 4 | TIFA | TRAF interacting protein with forkhead associated domain | 145365 | 138660 | 073331 | 22, 41, 42 |
| 4 | TRAPPC11 | trafficking protein particle complex 11 | 168538 | 182552 | 173320 | |
| 4 | TECRL | trans-2,3-enoyl-CoA reductase-like | 205678 | 150471 | 145242 | 15, 25, 20 |
| 4 | TADA2B | transcriptional adaptor 2B | 173011 | 173013 | 109519 | 29, 22, 26 |
| 4 | TACC3 | transforming acidic coiled-coil containing protein 3 | 013810 | 168936 | 068078 | 21, 5, 22 |
| 4 | TRPC3 | transient receptor potential cation channel subfamily C | 138741 | 138686 | 138688 | 15, 8, |
| | | member 3 | | | | |
| 4 | TKTL2 | transketolase like 2 | 151005 | 164129 | 198498 | 38, 24, 8 |
| 4 | TMA16 | translation machinery associated 16 homolog | 198498 | 151005 | 145416 | 34, 7, 6 |
| 4 | TRAM1L1 | translocation associated membrane protein 1-like 1 | 174599 | 270394 | 164100 | 11, 38, 8 |
| 4 | TAPT1 | transmembrane anterior posterior transformation 1 | 169762 | 007062 | 169744 | 26, 22, 10 |
| 4 | TMPRSS11A | transmembrane protease, serine 11A | 187054 | 153802 | 198092 | 24, 13, 42 |
| 4 | TMPRSS11B | transmembrane protease, serine 11B | 185873 | 198092 | 083896 | 13, 18, 30 |
| 4 | TMPRSS11D | transmembrane protease, serine 11D | 153802 | 109163 | 187054 | 24, 30, 13 |
| 4 | TMPRSS11E | transmembrane protease, serine 11E | 087128 | 083896 | 197888 | 13, 30, 24 |
| 4 | TMPRSS11F | transmembrane protease, serine 11F | 198092 | 187054 | 185873 | 13, 24, 32 |
| 4 | TMEM128 | transmembrane protein 128 | 132406 | 163982 | 145220 | 34, 2, 43 |
| 4 | TMEM129 | transmembrane protein 129 | 168936 | 163950 | 013810 | 1, 34, 26 |
| 4 | TMEM144 | transmembrane protein 144 | 164124 | 164125 | 171509 | 8, 38, 6 |
| 4 | TMEM150C | transmembrane protein 150C | 249242 | 145293 | 145284 | 36, 8, 24 |
| 4 | TMEM154 | transmembrane protein 154 | 170006 | 109670 | 169989 | 24, 5, 45 |
| 4 | TMEM155 | transmembrane protein 155 | 164112 | 164111 | 123737 | 32, 39, 8 |
| 4 | TMEM156 | transmembrane protein 156 | 121895 | 197712 | 109790 | 7, 45, 34 |
| 4 | TMEM165 | transmembrane protein 165 | 134851 | 128039 | 134852 | 22, 45, 6 |
| 4 | TMEM175 | transmembrane protein 175 | 127419 | 178950 | 145214 | 5, 26, 27 |
| 4 | TMEM184C | transmembrane protein 184C | 164168 | 151617 | 164169 | 40, 29, 30 |
| 4 | TMEM192 | transmembrane protein 192 | 170088 | 176979 | 109466 | 31, 17, 40 |
| 4 | TMEM33 | transmembrane protein 33 | 109133 | 109132 | 182308 | 13, 22, 42 |
| 4 | TRIM2 | tripartite motif containing 2 | 109654 | 137460 | 121211 | 8, 26, 31 |
| 4 | TRIM60 | tripartite motif containing 60 | 176979 | 250486 | 170088 | 38, |
| 4 | TRIM61 | tripartite motif containing 61 | 183439 | 248329 | 250486 | 38, 6, 28 |
| 4 | TRIML1 | tripartite motif family like 1 | 184108 | 179046 | 109536 | 2, 38, 32 |
| 4 | TRIML2 | tripartite motif family like 2 | 179046 | 179059 | 184108 | |
| 4 | TRMT10A | tRNA methyltransferase 10A | 145331 | 138813 | 138823 | 9, 22, 26 |
| 4 | TRMT44 | tRNA methyltransferase 44 homolog (S. cerevisiae) | 155275 | 087008 | 155269 | 40, 27, 37 |
| 4 | TDO2 | tryptophan 2,3-dioxygenase | 151790 | 256394 | 256043 | 19, 4, 31 |
| 4 | TXK | TXK tyrosine kinase | 074966 | 198515 | 135605 | 32, 41, 39 |
| 4 | UBE2D3 | ubiquitin conjugating enzyme E2 D3 | 109332 | 109323 | 145354 | 39, 2, 4 |
| 4 | UBE2K | ubiquitin conjugating enzyme E2 K | 078140 | 163683 | 121892 | 31, 29, 4 |
| 4 | UCHL1 | ubiquitin C-terminal hydrolase L1 | 154277 | 163697 | 064042 | 26, 28, 20 |
| 4 | UBA6 | ubiquitin like modifier activating enzyme 6 | 033178 | 035720 | 109163 | 4, 26, 9 |
| 4 | USP17L10 | ubiquitin specific peptidase 17-like family member 10 | 231396 | 229924 | 233136 | |
| 4 | USP17L11 | ubiquitin specific peptidase 17-like family member 11 | 233136 | 231396 | 227551 | |
| 4 | USP17L12 | ubiquitin specific peptidase 17-like family member 12 | 227551 | 233136 | 232399 | |
| 4 | USP17L13 | ubiquitin specific peptidase 17-like family member 13 | 232399 | 227551 | 223569 | |
| 4 | USP17L15 | ubiquitin specific peptidase 17-like family member 15 | 223569 | 232399 | 249104 | 16, |
| 4 | USP17L17 | ubiquitin specific peptidase 17-like family member 17 | 249104 | 223569 | 250844 | |
| 4 | USP17L18 | ubiquitin specific peptidase 17-like family member 18 | 250844 | 249104 | 248920 | |
| 4 | USP17L19 | ubiquitin specific peptidase 17-like family member 19 | 248920 | 250844 | 250745 | |
| 4 | USP17L20 | ubiquitin specific peptidase 17-like family member 20 | 250745 | 248920 | 249811 | |
| 4 | USP17L21 | ubiquitin specific peptidase 17-like family member 21 | 249811 | 250745 | 248933 | |
| 4 | USP17L22 | ubiquitin specific peptidase 17-like family member 22 | 248933 | 249811 | 250913 | |
| 4 | USP17L23 | ubiquitin specific peptidase 17-like family member 23 | 250913 | 248933 | 232264 | |
| 4 | USP17L24 | ubiquitin specific peptidase 17-like family member 24 | 232264 | 250913 | 230430 | |
| 4 | USP17L25 | ubiquitin specific peptidase 17-like family member 25 | 230430 | 232264 | 229579 | |
| 4 | USP17L26 | ubiquitin specific peptidase 17-like family member 26 | 229579 | 230430 | 227140 | |
| 4 | USP17L27 | ubiquitin specific peptidase 17-like family member 27 | 235780 | 227140 | 231051 | |
| 4 | USP17L28 | ubiquitin specific peptidase 17-like family member 28 | 231051 | 235780 | 231637 | |
| 4 | USP17L29 | ubiquitin specific peptidase 17-like family member 29 | 231637 | 231051 | 228856 | |
| 4 | USP17L30 | ubiquitin specific peptidase 17-like family member 30 | 228856 | 231637 | 186146 | |
| 4 | USP17L5 | ubiquitin specific peptidase 17-like family member 5 | 227140 | 229579 | 235780 | |
| 4 | USP38 | ubiquitin specific peptidase 38 | 170185 | 109452 | 109458 | 22, 11, 2 |
| 4 | USP46 | ubiquitin specific peptidase 46 | 109189 | 163071 | 226887 | 8, 37, 29 |
| 4 | USP53 | ubiquitin specific peptidase 53 | 145390 | 172399 | 164096 | 1, 45, 29 |
| 4 | UGT2A1 | UDP glucuronosyltransferase family 2 member A1 complex locus | 173610 | 156096 | 271271 | 42, 8, |
| 4 | UGT2A2 | UDP glucuronosyltransferase family 2 member A2 | 271271 | 173610 | 173597 | |
| 4 | UGT2A3 | UDP glucuronosyltransferase family 2 member A3 | 135220 | 109181 | 171234 | 17, 16, 4 |
| 4 | UGT2B10 | UDP glucuronosyltransferase family 2 member B10 | 109181 | 196620 | 135220 | 19, 10, 23 |
| 4 | UGT2B11 | UDP glucuronosyltransferase family 2 member B11 | 213759 | 171234 | 135226 | 10, 25, 33 |
| 4 | UGT2B15 | UDP glucuronosyltransferase family 2 member B15 | 196620 | 197888 | 109181 | 4, 19, 23 |
| 4 | UGT2B17 | UDP glucuronosyltransferase family 2 member B17 | 197888 | 087128 | 196620 | 10, 16, 33 |
| 4 | UGT2B28 | UDP glucuronosyltransferase family 2 member B28 | 135226 | 213759 | 156096 | 10, 33, |
| 4 | UGT2B4 | UDP glucuronosyltransferase family 2 member B4 | 156096 | 135226 | 173610 | 19, 15, 10 |
| 4 | UGT2B7 | UDP glucuronosyltransferase family 2 member B7 | 171234 | 135220 | 213759 | 17, 10, 19 |
| 4 | UGT8 | UDP glycosyltransferase 8 | 174607 | 180801 | 138653 | 11, 8, 24 |
| 4 | UGDH | UDP-glucose 6-dehydrogenase | 109814 | 121897 | 163683 | 13, 45, 4 |
| 4 | UFSP2 | UFM1 specific peptidase 2 | 109775 | 186352 | 205129 | 24, 45, 5 |
| 4 | UNC5C | unc-5 netrin receptor C | 182168 | 138696 | 163114 | 11, 23, 40 |
| 4 | UCP1 | uncoupling protein 1 | 109424 | 179387 | 109436 | 1, 10, |
| 4 | USO1 | USO1 vesicle transport factor | 138768 | 138757 | 156194 | 42, 45, 31 |
| 4 | UTP3 | UTP3, small subunit processome component homolog | 132467 | 132465 | 018189 | 13, 37, 36 |
| | | (S. cerevisiae) | | | | |
| 4 | UVSSA | UV stimulated scaffold protein A | 163945 | 090316 | 179979 | 39, 31, 40 |
| 4 | VEGFC | vascular endothelial growth factor C | 150630 | 129128 | 109674 | 35, 6, 28 |
| 4 | WDFY3 | WD repeat and FYVE domain containing 3 | 163625 | 163624 | 138639 | 18, 40, 26 |
| 4 | WDR1 | WD repeat domain 1 | 071127 | 169676 | 178163 | 45, 39, 17 |
| 4 | WDR17 | WD repeat domain 17 | 150627 | 150625 | 150628 | |
| 4 | WDR19 | WD repeat domain 19 | 157796 | 109790 | 035928 | 31, 26, 28 |
| 4 | WHSC1 | Wolf-Hirschhorn syndrome candidate 1 | 109685 | 168924 | 185049 | 22, 12, 31 |
| 4 | WFS1 | wolframin ER transmembrane glycoprotein | 109501 | 152969 | 074211 | 33, 38, 20 |
| 4 | WWC2 | WW and C2 domain containing 2 | 151718 | 129187 | 177300 | 45, 19, 12 |
| 4 | YIPF7 | Yip1 domain family member 7 | 177752 | 183783 | 151806 | |
| 4 | YTHDC1 | YTH domain containing 1 | 083896 | 185873 | 087128 | 4, 44, 26 |
| 4 | ZFP42 | ZFP42 zinc finger protein | 179059 | 083857 | 179046 | 32, 12, |
| 4 | ZBTB49 | zinc finger and BTB domain containing 49 | 168826 | 145220 | 168824 | 13, 40, 39 |
| 4 | ZCCHC4 | zinc finger CCHC-type containing 4 | 168228 | 038210 | 053900 | 34, 1, 24 |
| 4 | ZFYVE28 | zinc finger FYVE-type containing 28 | 159733 | 123933 | 206113 | 1, 39, 28 |
| 4 | ZGRF1 | zinc finger GRF-type containing 1 | 138658 | 178403 | 174720 | 11, 20, 22 |
| 4 | ZNF141 | zinc finger protein 141 | 131127 | 186777 | 182903 | |
| 4 | ZNF330 | zinc finger protein 330 | 109445 | 170153 | 164136 | 42, 4, 17 |
| 4 | ZNF518B | zinc finger protein 518B | 178163 | 071127 | 109684 | 11, 26, 31 |
| 4 | ZNF595 | zinc finger protein 595 | 272602 | 151725 | 250312 | 34, 1, 7 |
| 4 | ZNF718 | zinc finger protein 718 | 250312 | 272602 | 186777 | 45, 3, 19 |
| 4 | ZNF721 | zinc finger protein 721 | 182903 | 131127 | 174227 | |
| 4 | ZNF732 | zinc finger protein 732 | 186777 | 250312 | 131127 | 39, 12, 38 |
| 4 | ZNF827 | zinc finger protein 827 | 151612 | 237136 | 164167 | 35, |
| 4 | ZAR1 | zygote arrest 1 | 182223 | 145248 | 075539 | 23, 38, |
| 5 | HMGCR | 3-hydroxy-3-methylglutaryl-CoA reductase | 113161 | 145700 | 113163 | 42, 24, 8 |
| 5 | HMGCS1 | 3-hydroxy-3-methylglutaryl-CoA synthase 1 | 112972 | 177453 | 151882 | |
| 5 | OXCT1 | 3-oxoacid CoA-transferase 1 | 083720 | 182836 | 205765 | 42, 39, 3 |
| 5 | HTR1A | 5-hydroxytryptamine receptor 1A | 178394 | 186105 | 164197 | 8, |
| 5 | HTR4 | 5-hydroxytryptamine receptor 4 | 164270 | 145868 | 169252 | 26, 2, 37 |
| 5 | MTRR | 5-methyltetrahydrofolate-homocysteine methyltransferase | 124275 | 215217 | 124279 | 29, 42, 9 |
| | | reductase | | | | |
| 5 | PHYKPL | 5-phosphohydroxy-L-lysine phospho-lyase | 175309 | 197451 | 050767 | 30, 36, 18 |
| 5 | ABLIM3 | actin binding LIM protein family member 3 | 173210 | 169247 | 157510 | 34, 1, 40 |
| 5 | AFAP1L1 | actin filament associated protein 1 like 1 | 157510 | 173210 | 164284 | 34, 32, 45 |
| 5 | ACTBL2 | actin, beta like 2 | 169067 | 062194 | 145632 | 17, |
| 5 | ACSL6 | acyl-CoA synthetase long-chain family member 6 | 164398 | 281938 | 164399 | 38, 14, 8 |
| 5 | ACOT12 | acyl-CoA thioesterase 12 | 172497 | 131732 | 145687 | 19, 10, 20 |
| 5 | ADAM19 | ADAM metallopeptidase domain 19 | 135074 | 172568 | 172548 | 6, 35, 39 |
| 5 | ADAMTS12 | ADAM metallopeptidase with thrombospondin type 1 motif 12 | 151388 | 113407 | 182631 | 15, 43, 6 |
| 5 | ADAMTS16 | ADAM metallopeptidase with thrombospondin type 1 motif 16 | 145536 | 170549 | 164151 | 22, 27, 6 |
| 5 | ADAMTS19 | ADAM metallopeptidase with thrombospondin type 1 motif 19 | 145808 | 066583 | 186367 | 23, 12, 44 |
| 5 | ADAMTS2 | ADAM metallopeptidase with thrombospondin type 1 motif 2 | 087116 | 177932 | 176783 | 18, 6, 7 |
| 5 | ADAMTS6 | ADAM metallopeptidase with thrombospondin type 1 motif 6 | 049192 | 153015 | 123219 | 32, 19, 15 |
| 5 | AP3B1 | adapter related protein complex 3 beta 1 subunit | 132842 | 171530 | 085365 | 40, 22, 31 |
| 5 | AP3S1 | adapter related protein complex 3 sigma 1 subunit | 177879 | 145782 | 280329 | 11, 43, 4 |
| 5 | ADCY2 | adenylate cyclase 2 | 078295 | 112941 | 215217 | 26, 8, 42 |
| 5 | AK6 | adenylate kinase 6 | 085231 | 183323 | 273841 | |
| 5 | ADGRV1 | adhesion G protein-coupled receptor V1 | 164199 | 176018 | 113369 | 10, 2, 11 |
| 5 | ARL10 | ADP ribosylation factor like GTPase 10 | 175414 | 122203 | 048162 | 14, 44, 16 |
| 5 | ARL14EPL | ADP ribosylation factor like GTPase 14 effector protein like | 268223 | 268714 | 145781 | 32, |
| 5 | ARL15 | ADP ribosylation factor like GTPase 15 | 185305 | 164258 | 169271 | 4, 34, 15 |
| 5 | ADRA1B | adrenoceptor alpha 1B | 170214 | 113302 | 113312 | 45, 17, 6 |
| 5 | ADRB2 | adrenoceptor beta 2 | 169252 | 164270 | 169247 | 36, 42, 40 |
| 5 | AFF4 | AF4/FMR2 family member 4 | 072364 | 164406 | 155329 | 23, 39, 44 |
| 5 | AGXT2 | alanine--glyoxylate aminetransferase 2 | 113492 | 168724 | 113494 | 17, 19, 12 |
| 5 | ALDH7A1 | aldehyde dehydrogenase 7 family member A1 | 164904 | 155324 | 164902 | 18, 32, 11 |
| 5 | AMACR | alpha-methylacyl-CoA racemase | 242110 | 164175 | 273294 | 33, 17, 9 |
| 5 | APBB3 | amyloid beta precursor protein binding family B member 3 | 113108 | 243056 | 176087 | 26, 39, 40 |
| 5 | AGGF1 | angiogenic factor with G-patch and FHA domains 1 | 164252 | 145708 | 132846 | 30, 6, 22 |
| 5 | ANKH | ANKH inorganic pyrophosphate transport regulator | 154122 | 154124 | 183580 | |
| 5 | ANKHD1- | ANKHD1-EIF4EBP3 readthrough | 254996 | 131503 | 213523 | 18, 22, 11 |
| | EIF4EBP3 | | | | | |
| 5 | ANKDD1B | ankyrin repeat and death domain containing 1B | 189045 | 122008 | 152359 | 44, 20, 17 |
| 5 | ANKHD1 | ankyrin repeat and KH domain containing 1 | 131503 | 113073 | 254996 | 18, 22, 11 |
| 5 | ANKRD31 | ankyrin repeat domain 31 | 145700 | 176928 | 113161 | 10, 15, 38 |
| 5 | ANKRD33B | ankyrin repeat domain 33B | 164236 | 145491 | 112977 | 36, 14, 15 |
| 5 | ANKRD34B | ankyrin repeat domain 34B | 189127 | 152380 | 228716 | 22, 8, 17 |
| 5 | ANKRD55 | ankyrin repeat domain 55 | 164512 | 134352 | 225940 | 10, 30, 38 |
| 5 | ANKRA2 | ankyrin repeat family A member 2 | 164331 | 145741 | 164338 | 31, 9, 11 |
| 5 | ANXA2R | annexin A2 receptor | 177721 | 250722 | 172262 | 22, 34, 3 |
| 5 | ANXA6 | annexin A6 | 197043 | 145901 | 198624 | 7, 36, 26 |
| 5 | ATOX1 | antioxidant 1 capper chaperone | 177556 | 113140 | 145907 | 31, 19, 7 |
| 5 | APC | APC, WNT signaling pathway regulator | 134982 | 129595 | 258864 | 26, 8, 11 |
| 5 | ARAP3 | ArfGAP with RhoGAP domain, ankyrin repeat and PH domain 3 | 120318 | 197948 | 156453 | 25, 14, 7 |
| 5 | RARS | arginyl-tRNA synthetase | 113643 | 113645 | 188573 | 45, 3, 9 |
| 5 | ARRDC3 | arrestin domain containing 3 | 113369 | 164199 | 175745 | 42, 29, 4 |
| 5 | AHRR | aryl-hydrocarbon receptor repressor | 063438 | 249915 | 180104 | |
| 5 | ARSB | arylsulfatase B | 113273 | 145685 | 132837 | 10, 7, 36 |
| 5 | ARSI | arylsulfatase family member I | 183876 | 070808 | 070814 | 14, 24, 32 |
| 5 | ARSK | arylsulfatase family member K | 164291 | 198677 | 178015 | 29, 45, 42 |
| 5 | ATP6AP1L | ATPase H+ transporting accessory protein 1 like | 205464 | 186468 | 174695 | 34, 33, 28 |
| 5 | ATP6V0E1 | ATPase H+ transporting V0 subunit e1 | 113732 | 037241 | 164463 | 27, 43, 31 |
| 5 | ATP10B | ATPase phospholipid transporting 10B (putative) | 118322 | 164611 | 145864 | 16, 8, 14 |
| 5 | ATG10 | autophagy related 10 | 152348 | 145687 | 186468 | 33, 30, 29 |
| 5 | ATG12 | autophagy related 12 | 145782 | 129596 | 177879 | 4, 18, 7 |
| 5 | BDP1 | B double prime 1, subunit of RNA polymerase III | 145734 | 145736 | 131844 | 11, 5, 4 |
| | | transcription initiation factor IIIB | | | | |
| 5 | BTF3 | basic transcription factor 3 | 145741 | 251493 | 164331 | 4, 30, 28 |
| 5 | BNIP1 | BCL2 interacting protein 1 | 113734 | 164463 | 183072 | 29, 9, 21 |
| 5 | B4GALT7 | beta-1,4-galactosyltransferase 7 | 027847 | 184840 | 170074 | 29, 27, 1 |
| 5 | BHMT | betaine--homocysteine S-methyltransferase | 145692 | 132840 | 152409 | 17, 19, 14 |
| 5 | BHMT2 | betaine--homocysteine S-methyltransferase 2 | 132840 | 132837 | 145692 | 17, 19, 1 |
| 5 | BOD1 | biorientation of chromosomes in cell division 1 | 145919 | 113739 | 113742 | 31, 21, 9 |
| 5 | BASP1 | brain abundant membrane attached signal protein 1 | 176788 | 145555 | 145526 | 22, 41, 45 |
| 5 | BRD8 | bromodomain containing 8 | 112983 | 112981 | 112984 | 31, 11, 39 |
| 5 | BRD9 | bromodomain containing 9 | 028310 | 188818 | 071539 | 22, 40, 18 |
| 5 | BRIX1 | BRX1, biogenesis of ribosomes | 113460 | 113456 | 168724 | 31, 34, 30 |
| 5 | BTNL3 | butyrophilin like 3 | 168903 | 113303 | 165810 | 16, |
| 5 | BTNL8 | butyrophilin like 8 | 113303 | 196670 | 168903 | 16, 5, 3 |
| 5 | BTNL9 | butyrophilin like 9 | 165810 | 168903 | 185372 | 1, 22, 36 |
| 5 | C1QTNF2 | C1q and tumor necrosis factor related protein 2 | 145861 | 135083 | 221886 | 15, 14, 10 |
| 5 | C1QTNF3 | C1q and tumor necrosis factor related protein 3 | 082196 | 273294 | 039560 | 43, 10, 11 |
| 5 | C1QTNF3- | C1QTNF3-AMACR readthrough (NMD candidate) | 273294 | 242110 | 082196 | |
| | AMACR | | | | | |
| 5 | CDH10 | cadherin 10 | 040731 | 164256 | 113100 | 2, 8, 9 |
| 5 | CDH12 | cadherin 12 | 154162 | 145526 | 164256 | 10, 42, 2 |
| 5 | CDH18 | cadherin 18 | 145526 | 176788 | 154162 | 8, 27, 23 |
| 5 | CDH6 | cadherin 6 | 113361 | 113100 | 113360 | |
| 5 | CDH9 | cadherin 9 | 113100 | 040731 | 113361 | 17, 8, |
| 5 | CDHR2 | cadherin related family member 2 | 074276 | 146083 | 169258 | 38, 16, 42 |
| 5 | CAMLG | calcium modulating ligand | 164615 | 113615 | 145833 | 10, 38, 13 |
| 5 | CAMK2A | calcium/calmodulin dependent protein kinase II alpha | 070808 | 011083 | 183876 | 8, 17, 42 |
| 5 | CAMK4 | calcium/calmodulin dependent protein kinase IV | 152495 | 134987 | 164211 | 39, 38, 8 |
| 5 | CAPSL | calcyphosine like | 152611 | 168685 | 145626 | 30, 10, 31 |
| 5 | CANX | calnexin | 127022 | 204659 | 161021 | 42, 19, 9 |
| 5 | CAST | calpastatin | 153113 | 175426 | 164307 | |
| 5 | CMBL | carboxymethylenebutenolidase homolog | 164237 | 150753 | 145495 | 17, |
| 5 | CMYA5 | cardiomyopathy associated 5 | 164309 | 164329 | 177034 | 25, 15, 26 |
| 5 | CARTPT | CART prepropeptide | 164326 | 131844 | 131711 | 31, 2, 14 |
| 5 | CSNK1A1 | casein kinase 1 alpha 1 | 113712 | 127743 | 183111 | |
| 5 | CSNK1G3 | casein kinase 1 gamma 3 | 151292 | 168944 | 168916 | 29, 2, 4 |
| 5 | CARD6 | caspase recruitment domain family member 6 | 132357 | 145592 | 112936 | 36, 34, 45 |
| 5 | CTNNA1 | catenin alpha 1 | 044115 | 113013 | 146006 | |
| 5 | CTNND2 | catenin delta 2 | 169862 | 112977 | 039139 | 8, 10, 26 |
| 5 | CATSPER3 | cation channel sperm associated 3 | 152705 | 132570 | 069011 | 38, 16, 22 |
| 5 | CDX1 | caudal type homeobox 1 | 113722 | 113721 | 011083 | 3, 16, |
| 5 | CCL28 | C-C motif chemokine ligand 28 | 151882 | 112972 | 151881 | 42, 23, 4 |
| 5 | CNOT6 | CCR4-NOT transcription complex subunit 6 | 113300 | 131459 | 161055 | 11, 12, 22 |
| 5 | CNOT8 | CCR4-NOT transcription complex subunit 8 | 155508 | 170271 | 082516 | |
| 5 | CD14 | CD14 molecule | 170458 | 176087 | 131495 | 1, 32, 27 |
| 5 | CD180 | CD180 molecule | 134061 | 069020 | 145675 | 36, 22, 41 |
| 5 | CD74 | CD74 molecule | 019582 | 070814 | 164587 | 41, 36, 21 |
| 5 | CLK4 | CDC like kinase 4 | 113240 | 050767 | 169131 | 7, 13, 43 |
| 5 | CDC42SE2 | CDC42 small effector 2 | 158985 | 186687 | 158987 | 42, 39, 38 |
| 5 | CDKN2AIPNL | CDKN2A interacting protein N-terminal like | 237190 | 119048 | 043143 | 34, 26, 21 |
| 5 | CDC20B | cell division cycle 20B | 164287 | 145649 | 164294 | 24, 42, 44 |
| 5 | CDC23 | cell division cycle 23 | 094880 | 112984 | 146013 | 4, 39, 34 |
| 5 | CDC25C | cell division cycle 25C | 158402 | 146013 | 120709 | 44, 38, 6 |
| 5 | CETN3 | centrin 3 | 153140 | 081189 | 176055 | 11, 4, 34 |
| 5 | CENPH | centromere protein H | 153044 | 134057 | 134056 | 34, 21, 12 |
| 5 | CENPK | centromere protein K | 123219 | 049192 | 113593 | 4, 7, 34 |
| 5 | CEP120 | centrosomal protein 120 | 168944 | 061455 | 151292 | 22, 1, 7 |
| 5 | CEP72 | centrosomal protein 72 | 112877 | 066230 | 171368 | 13, 28, 38 |
| 5 | CCT5 | chaperonin containing TCP1 subunit 5 | 150753 | 150756 | 164237 | 13, 9, 4 |
| 5 | CBY3 | chibby family member 3 | 204659 | 169045 | 127022 | 45, 38, 8 |
| 5 | CHSY3 | chondroitin sulfate synthase 3 | 198108 | 186367 | 169567 | 1, 27, 37 |
| 5 | CHD1 | chromodomain helicase DNA binding protein 1 | 153922 | 279232 | 174132 | 39, 25, 18 |
| 5 | C5orf15 | chromosome 5 open reading frame 15 | 113583 | 053108 | 213585 | 13, 22, 45 |
| 5 | C5orf22 | chromosome 5 open reading frame 22 | 082213 | 113360 | 133401 | 4, 42, 2 |
| 5 | C5orf24 | chromosome 5 open reading frame 24 | 181904 | 145833 | 113621 | |
| 5 | C5orf30 | chromosome 5 open reading frame 30 | 181751 | 145725 | 112874 | 43, 9, 8 |
| 5 | C5orf34 | chromosome 5 open reading frame 34 | 172244 | 151881 | 172239 | 22, 45, 37 |
| 5 | C5orf38 | chromosome 5 open reading frame 38 | 186493 | 170561 | 170549 | 6, 33, 12 |
| 5 | C5orf42 | chromosome 5 open reading frame 42 | 197603 | 164190 | 113569 | 40, 26, 7 |
| 5 | C5orf46 | chromosome 5 open reading frame 46 | 178776 | 164265 | 133710 | 15, 45, 42 |
| 5 | C5orf47 | chromosome 5 open reading frame 47 | 185056 | 113742 | 170091 | 38, 25, 19 |
| 5 | C5orf49 | chromosome 5 open reading frame 49 | 215217 | 078295 | 124275 | 14, 38, 8 |
| 5 | C5orf51 | chromosome 5 open reading frame 51 | 205765 | 083720 | 151876 | 29, 11, 22 |
| 5 | C5orf52 | chromosome 5 open reading frame 52 | 187658 | 039600 | 113272 | 38, 10, |
| 5 | C5orf56 | Chromosome 5 open reading frame 56 | 197536 | 197375 | 125347 | 7, 39, 20 |
| 5 | C5orf58 | chromosome 5 open reading frame 58 | 234511 | 168269 | 043462 | 38, 36, 6 |
| 5 | C5orf63 | chromosome 5 open reading frame 63 | 164241 | 173926 | 145794 | 29, 7, 18 |
| 5 | C5orf67 | chromosome 5 open reading frame 67 | 225940 | 164512 | 095015 | 40, 14, 15 |
| 5 | CLINT1 | clathrin interactor 1 | 113282 | 155858 | 164330 | 4, 42, 30 |
| 5 | CLTB | clathrin light chain B | 175416 | 146066 | 113194 | 19, |
| 5 | CLPTM1L | CLPTM1 like | 049656 | 164362 | 142319 | 9, 37, 16 |
| 5 | F2R | coagulation factor II thrombin receptor | 181104 | 164220 | 164251 | |
| 5 | F2RL2 | coagulation factor II thrombin receptor like 2 | 164220 | 145703 | 181104 | 42, 17, 45 |
| 5 | F12 | coagulation factor XII | 131187 | 196570 | 198055 | 3, 37, 19 |
| 5 | CCDC112 | coiled-coil domain containing 112 | 164221 | 164219 | 145780 | 24, 10, 26 |
| 5 | CCDC125 | coiled-coil domain containing 125 | 183323 | 134058 | 085231 | 1, 3, 22 |
| 5 | CCDC127 | coiled-coil domain containing 127 | 164366 | 185028 | 073578 | 9, 30, 13 |
| 5 | CCDC152 | coiled-coil domain containing 152 | 198865 | 112964 | 250722 | 34, 36, 22 |
| 5 | CCDC192 | coiled-coil domain containing 192 | 230561 | 205279 | 064651 | |
| 5 | CCDC69 | coiled-coil domain containing 69 | 198624 | 197043 | 196743 | 21, 41, 22 |
| 5 | COL4A3BP | collagen type IV alpha 3 binding protein | 113163 | 113161 | 122008 | 29, 26, 22 |
| 5 | COL23A1 | collagen type XXIII alpha 1 chain | 050767 | 175309 | 113240 | 40, 15, 17 |
| 5 | CSF1R | colony stimulating factor 1 receptor | 182578 | 113716 | 113721 | 7, 32, 26 |
| 5 | CSF2 | colony stimulating factor 2 | 164400 | 164399 | 072682 | 20, 5, 6 |
| 5 | COMMD10 | COMM domain containing 10 | 145781 | 268223 | 092421 | 10, 31, 2 |
| 5 | C6 | complement C6 | 039537 | 171495 | 182836 | 19, 4, 28 |
| 5 | C7 | complement C7 | 112936 | 132357 | 171495 | 1, 2, 42 |
| 5 | C9 | complement C9 | 113600 | 082074 | 153071 | 19, 25, 17 |
| 5 | CPLX2 | complexin 2 | 145920 | 113749 | 051596 | 8, 26, 20 |
| 5 | CTXN3 | cortexin 3 | 205279 | 164244 | 230561 | 17, 8, |
| 5 | CRHBP | corticotropin releasing hormone binding protein | 145708 | 171643 | 164252 | 2, 17, 32 |
| 5 | CKMT2 | creatine kinase, mitochondrial 2 | 131730 | 113319 | 131732 | 25, 15, 29 |
| 5 | CREBRF | CREB3 regulatory factor | 164463 | 113732 | 113734 | 22, 7, 31 |
| 5 | CWC27 | CWC27 spliceosome associated protein homolog | 153015 | 153006 | 049192 | 10, 34, 6 |
| 5 | CXCL14 | C-X-C motif chemokine ligand 14 | 145824 | 181965 | 250378 | 26, 14, 17 |
| 5 | CXXC5 | CXXC finger protein 5 | 171604 | 131508 | 146005 | 31, 14, 29 |
| 5 | CCNB1 | cyclin B1 | 134057 | 145740 | 153044 | 21, 35, 13 |
| 5 | CDK7 | cyclin dependent kinase 7 | 134058 | 134056 | 183323 | 43, 9, 23 |
| 5 | CDKL3 | cyclin dependent kinase like 3 | 006837 | 113575 | 119048 | 38, 15, 42 |
| 5 | CCNG1 | cyclin G1 | 113328 | 113327 | 170584 | 4, 45, 7 |
| 5 | CCNH | cyclin H | 134480 | 145715 | 164180 | 7, 6, 31 |
| 5 | CCNI2 | cyclin I family member 2 | 205089 | 131437 | 164402 | 20, 23, 8 |
| 5 | CCNJL | cyclin J like | 135083 | 170231 | 145861 | 38, 27, 16 |
| 5 | CCNO | cyclin O | 152669 | 234602 | 067248 | 3, 4, 9 |
| 5 | CDO1 | cysteine dioxygenase type 1 | 129596 | 134970 | 145782 | 1, 10, 32 |
| 5 | CYSTM1 | cysteine rich transmembrane module containing 1 | 120306 | 182700 | 113068 | 10, 29, 3 |
| 5 | COX7C | cytochrome c oxidase subunit 7C | 127184 | 164176 | 145715 | 15, 12, 25 |
| 5 | CYFIP2 | cytoplasmic FMR1 interacting protein 2 | 055163 | 170613 | 172568 | 21, 22, 43 |
| 5 | CPEB4 | cytoplasmic polyadenylation element binding protein 4 | 113742 | 145919 | 185056 | 25, 29, 32 |
| 5 | DAB2 | DAB2, clathrin adaptor protein | 153071 | 113600 | 113638 | 32, 11, 35 |
| 5 | DDX4 | DEAD-box helicase 4 | 152670 | 177058 | 164509 | 38, 8, |
| 5 | DDX41 | DEAD-box helicase 41 | 183258 | 146094 | 146067 | 36, 37, 39 |
| 5 | DDX46 | DEAD-box helicase 46 | 145833 | 164615 | 181904 | 18, 31, 24 |
| 5 | DAP | death associated protein | 112977 | 164236 | 169862 | 40, 4, 34 |
| 5 | DCP2 | decapping mRNA 2 | 172795 | 212643 | 171444 | 22, 21, 30 |
| 5 | DOCK2 | dedicator of cytokinesis 2 | 134516 | 040275 | 204767 | 22, 21, 39 |
| 5 | DCANP1 | dendritic cell associated nuclear protein | 251380 | 113648 | 255833 | 15, 7, 36 |
| 5 | DEPDC1B | DEP domain containing 1B | 035499 | 280447 | 164181 | 32, 3, 7 |
| 5 | DHX29 | DExH-box helicase 29 | 067248 | 152669 | 039123 | 29, 22, 43 |
| 5 | DIAPH1 | diaphanous related formin 1 | 131504 | 240764 | 171720 | 22, 40, 18 |
| 5 | DHFR | dihydrofolate reductase | 228716 | 189127 | 113318 | |
| 5 | DPYSL3 | dihydropyrimidinase like 3 | 113657 | 169302 | 176049 | 12, 1, 14 |
| 5 | DIMT1 | DIM1 dimethyladenosine transferase 1 homolog | 086189 | 068796 | 086200 | 4, 45, 33 |
| 5 | DMGDH | dimethylglycine dehydrogenase | 132837 | 113273 | 132840 | 19, 17, 42 |
| 5 | PPIP5K2 | diphosphoinositol pentakisphosphate kinase 2 | 145725 | 145723 | 181751 | 7, 45, 13 |
| 5 | DMXL1 | Dmx like 1 | 172869 | 169570 | 145779 | 22, 40, 10 |
| 5 | POLK | DNA polymerase kappa | 122008 | 113163 | 189045 | 31, 42, 45 |
| 5 | DNAJC18 | DnaJ heat shock protein family (Hsp40) member C18 | 170464 | 170469 | 279686 | 8, 38, 31 |
| 5 | DNAJC21 | DnaJ heat shock protein family (Hsp40) member C21 | 168724 | 113460 | 113492 | 37, 18, 40 |
| 5 | DND1 | DND microRNA-mediated repression inhibitor 1 | 256453 | 120314 | 170445 | 3, 40, 16 |
| 5 | DOK3 | docking protein 3 | 146094 | 196923 | 183258 | 41, 36, 5 |
| 5 | DRD1 | dopamine receptor D1 | 184845 | 120149 | 164466 | 28, 8, 14 |
| 5 | DBN1 | drebrin 1 | 113758 | 131188 | 196923 | 26, 8, 39 |
| 5 | DROSHA | drosha ribonuclease III | 113360 | 113361 | 082213 | 10, 11, 24 |
| 5 | DTWD2 | DTW domain containing 2 | 169570 | 092421 | 172869 | 33, 10, 42 |
| 5 | DUSP1 | dual specificity phosphatase 1 | 120129 | 214357 | 113719 | 1, 29, 18 |
| 5 | DCTN4 | dynactin subunit 4 | 132912 | 086589 | 256235 | 42, 24, 8 |
| 5 | DNAH5 | dynein axonemal heavy chain 5 | 039139 | 169862 | 038382 | 10, 31, 42 |
| 5 | EBF1 | early B-cell factor 1 | 164330 | 113282 | 145860 | 22, 18, 11 |
| 5 | EGR1 | early growth response 1 | 120738 | 132563 | 120705 | 40, 26, 11 |
| 5 | ENC1 | ectodermal-neural cortex 1 | 171617 | 214944 | 049860 | 8, 29, 45 |
| 5 | EFCAB9 | EF-hand calcium binding domain 9 | 214360 | 072786 | 168246 | 38, |
| 5 | EDIL3 | EGF like repeats and discoidin domains 3 | 164176 | 145681 | 127184 | 18, 8, 42 |
| 5 | EGFLAM | EGF like, fibronectin type III and laminin G domains | 164318 | 168621 | 113594 | 26, 32, 33 |
| 5 | ELL2 | elongation factor for RNA polymerase II 2 | 118985 | 173221 | 175426 | 26, 40, 1 |
| 5 | ELOVL7 | ELOVL fatty acid elongase 7 | 164181 | 035499 | 049167 | 29, 26, 2 |
| 5 | EMB | embigin | 170571 | 164588 | 151883 | 40, 22, 42 |
| 5 | ERAP1 | endoplasmic reticulum aminopeptidase 1 | 164307 | 153113 | 164308 | 1, 42, 39 |
| 5 | ERAP2 | endoplasmic reticulum aminopeptidase 2 | 164308 | 164307 | 113441 | 42, 39, 41 |
| 5 | ERGIC1 | endoplasmic reticulum-golgi intermediate compartment 1 | 113719 | 120129 | 037241 | 33, 2, 16 |
| 5 | ESM1 | endothelial cell specific molecule 1 | 164283 | 178996 | 113088 | 45, 43, 4 |
| 5 | ECSCR | endothelial cell surface expressed chemotaxis and apoptosis | 249751 | 279686 | 283288 | 43, 26, 15 |
| | | regulator | | | | |
| 5 | EFNA5 | ephrin A5 | 184349 | 112874 | 145743 | 6, 31, 27 |
| 5 | ERBIN | erbb2 interacting protein | 112851 | 123213 | 153914 | |
| 5 | ERCC8 | ERCC excision repair 8, CSA ubiquitin ligase complex subunit | 049167 | 164181 | 164182 | 7, 4, 38 |
| 5 | EPB41L4A | erythrocyte membrane protein band 4.1 like 4A | 129595 | 134986 | 134982 | 40, 18, 26 |
| 5 | EIF4EBP3 | eukaryotic translation initiation factor 4E binding protein 3 | 243056 | 213523 | 113108 | |
| 5 | EIF4E1B | eukaryotic translation initiation factor 4E family member 1B | 175766 | 074317 | 048140 | 8, 14, 38 |
| 5 | ETF1 | eukaryotic translation termination factor 1 | 120705 | 120738 | 113013 | 13, 5, 40 |
| 5 | EXOC3 | exocyst complex component 3 | 180104 | 063438 | 066230 | 18, 19, 26 |
| 5 | F2RL1 | F2R like trypsin receptor 1 | 164251 | 181104 | 171643 | 29, 31, 12 |
| 5 | FAM105A | family with sequence similarity 105 member A | 145569 | 281325 | 154124 | 9, 18, 31 |
| 5 | FAM114A2 | family with sequence similarity 114 member A2 | 055147 | 155511 | 037749 | 38, |
| 5 | FAM13B | family with sequence similarity 13 member B | 031003 | 078795 | 061492 | 22, 2, 26 |
| 5 | FAM134B | family with sequence similarity 134 member B | 154153 | 173545 | 145555 | 29, 26, 17 |
| 5 | FAM151B | family with sequence similarity 151 member B | 152380 | 039319 | 189127 | 10, 17, 14 |
| 5 | FAM153A | family with sequence similarity 153 member A | 170074 | 027847 | 175325 | |
| 5 | FAM153B | family with sequence similarity 153 member B | 182230 | 051596 | 170085 | 1, 38, 9 |
| 5 | FAM153C | Family with sequence similarity 153 member C | 204677 | 175325 | 145911 | 28, 38, 33 |
| 5 | FAM159B | family with sequence similarity 159 member B | 145642 | 186479 | 153006 | 28, 10, 44 |
| 5 | FAM169A | family with sequence similarity 169 member A | 198780 | 164346 | 176928 | 14, 31, 42 |
| 5 | FAM170A | family with sequence similarity 170 member A | 164334 | 133835 | 184838 | |
| 5 | FAM172A | family with sequence similarity 172 member A | 113391 | 175745 | 248483 | 29, 31, 8 |
| 5 | FAM173B | family with sequence similarity 173 member B | 150756 | 169777 | 150753 | 29, 31, 10 |
| 5 | FAM174A | family with sequence similarity 174 member A | 174132 | 153922 | 113532 | 31, 10, 38 |
| 5 | FAM193B | family with sequence similarity 193 member B | 146067 | 183258 | 184840 | 18, 39, 1 |
| 5 | FAM196B | family with sequence similarity 196 member B | 204767 | 134516 | 168269 | 45, 8, 37 |
| 5 | FAM53C | family with sequence similarity 53 member C | 120709 | 158402 | 120733 | 42, 38, 9 |
| 5 | FAM71B | family with sequence similarity 71 member B | 170613 | 113263 | 055163 | 38, 8, |
| 5 | FAM81B | family with sequence similarity 81 member B | 153347 | 175471 | 198677 | 10, 30, 38 |
| 5 | FAF2 | Fas associated factor family member 2 | 113194 | 175416 | 146083 | 11, 3, 15 |
| 5 | FASTKD3 | FAST kinase domains 3 | 124279 | 124275 | 112902 | 43, 4, 42 |
| 5 | FAT2 | FAT atypical cadherin 2 | 086570 | 123643 | 113140 | 29, 24, 31 |
| 5 | FABP6 | fatty acid binding protein 6 | 170231 | 170234 | 135083 | 18, 10, 17 |
| 5 | FAXDC2 | fatty acid hydroxylase domain containing 2 | 170271 | 155506 | 155508 | 26, 43, 8 |
| 5 | FBXL17 | F-box and leucine rich repeat protein 17 | 145743 | 184349 | 151422 | 11, 33, 4 |
| 5 | FBXL7 | F-box and leucine rich repeat protein 7 | 183580 | 154122 | 183654 | 34, 15, 26 |
| 5 | FBXW11 | F-box and WD repeat domain containing 11 | 072803 | 185662 | 072786 | 43, 9, 26 |
| 5 | FBXO38 | F-box protein 38 | 145868 | 204909 | 164270 | 42, 22, 39 |
| 5 | FBXO4 | F-box protein 4 | 151876 | 205765 | 112964 | 18, 37, 22 |
| 5 | FCHSD1 | FCH and double SH3 domains 1 | 197948 | 164620 | 120318 | 29, 36, 22 |
| 5 | FCHO2 | FCH domain only 2 | 157107 | 083312 | 157111 | 4, 2, 42 |
| 5 | FEM1C | fem-1 homolog C | 145780 | 164221 | 251201 | 42, 7, 22 |
| 5 | FER | FER tyrosine kinase | 151422 | 145743 | 198961 | 36, 19, 4 |
| 5 | FTMT | ferritin mitochondrial | 181867 | 184838 | 151304 | 38, 8, |
| 5 | FBLL1 | Fibrillarin-like 1 | 188573 | 113643 | 120137 | 28, 38, 44 |
| 5 | FBN2 | fibrillin 2 | 138829 | 064651 | 113396 | 32, 12, 15 |
| 5 | FGF1 | fibroblast growth factor 1 | 113578 | 187678 | 145819 | |
| 5 | FGF10 | fibroblast growth factor 10 | 070193 | 112992 | 112996 | 42, 25, 16 |
| 5 | FGF18 | fibroblast growth factor 18 | 156427 | 181163 | 185662 | 27, 20, 15 |
| 5 | FGFR4 | fibroblast growth factor receptor 4 | 160867 | 113761 | 165671 | 25, 21, 16 |
| 5 | FNDC9 | fibronectin type III domain containing 9 | 172568 | 055163 | 135074 | 8, 17, 14 |
| 5 | FLT4 | fms related tyrosine kinase 4 | 037280 | 161055 | 174339 | 22, 32, 6 |
| 5 | FNIP1 | folliculin interacting protein 1 | 217128 | 273217 | 239642 | 22, 1, 19 |
| 5 | FST | follistatin | 134363 | 164172 | 164258 | 27, 11, 18 |
| 5 | FSTL4 | follistatin like 4 | 053108 | 170606 | 113583 | 28, 14, 24 |
| 5 | FOXD1 | forkhead box D1 | 251493 | 164325 | 145741 | |
| 5 | FOXI1 | forkhead box 11 | 168269 | 204767 | 234511 | 23, 17, 20 |
| 5 | FYB | FYN binding protein | 082074 | 164327 | 113600 | 39, 30, 7 |
| 5 | GFM2 | G elongation factor mitochondrial 2 | 164347 | 049860 | 164346 | 39, 42, 4 |
| 5 | GPRIN1 | G protein regulated inducer of neurite outgrowth 1 | 169258 | 074276 | 074317 | 31, 8, 25 |
| 5 | GPR150 | G protein-coupled receptor 150 | 178015 | 164291 | 175449 | 29, 38, |
| 5 | GPR151 | G protein-coupled receptor 151 | 173250 | 113649 | 156475 | |
| 5 | GRK6 | G protein-coupled receptor kinase 6 | 198055 | 131187 | 131188 | 5, 41, 3 |
| 5 | G3BP1 | G3BP stress granule assembly factor 1 | 145907 | 177556 | 145888 | 13, 45, 24 |
| 5 | GABRA1 | gamma-aminobutyric acid type A receptor alpha1 subunit | 022355 | 145863 | 113327 | 8, 2, 17 |
| 5 | GABRA6 | gamma-aminobutyric acid type A receptor alpha6 subunit | 145863 | 145864 | 022355 | 38, |
| 5 | GABRB2 | gamma-aminobutyric acid type A receptor beta2 subunit | 145864 | 118322 | 145863 | 8, 31, 5 |
| 5 | GABRG2 | gamma-aminobutyric acid type A receptor gamma2 subunit | 113327 | 022355 | 113328 | 8, 26, 18 |
| 5 | GABRP | gamma-aminobutyric acid type A receptor pi subunit | 094755 | 145936 | 204764 | 24, 42, 23 |
| 5 | GPBP1 | GC-rich promoter binding protein 1 | 062194 | 155545 | 169067 | 37, 38, 25 |
| 5 | GFRA3 | GDNF family receptor alpha 3 | 146013 | 094880 | 158402 | 26, 11, 15 |
| 5 | GEMIN5 | gem nuclear organelle associated protein 5 | 082516 | 155508 | 082515 | 21, 3, 1 |
| 5 | GTF2H2 | general transcription factor IIH subunit 2 | 145736 | 249437 | 145734 | 34, 31, 13 |
| 5 | GDNF | glial cell derived neurotrophic factor | 168621 | 082068 | 164318 | 35, 27, 25 |
| 5 | GNPDA1 | glucosamine-6-phosphate deaminase 1 | 113552 | 013561 | 131507 | 27, 4, 11 |
| 5 | GCNT4 | glucosaminyl (N-acetyl) transferase 4, core 2 | 176928 | 198780 | 145700 | 32, 20, |
| 5 | GRIA1 | glutamate ionotropic receptor AMPA type subunit 1 | 155511 | 132911 | 055147 | |
| 5 | GRM6 | glutamate metabotropic receptor 6 | 113262 | 178187 | 234284 | |
| 5 | GFPT2 | glutamine-fructose-6-phosphate transaminase 2 | 131459 | 050748 | 113300 | 11, 35, 10 |
| 5 | GLRX | glutaredoxin | 173221 | 164292 | 118985 | 1, 2, 32 |
| 5 | GRXCR2 | glutaredoxin and cysteine rich domain containing 2 | 204928 | 186314 | 156463 | |
| 5 | GPX3 | glutathione peroxidase 3 | 211445 | 279109 | 145901 | 40, 10, 14 |
| 5 | GPX8 | glutathione peroxidase 8 (putative) | 164294 | 164287 | 234602 | 42, 6, 10 |
| 5 | GLRA1 | glycine receptor alpha 1 | 145888 | 145907 | 132911 | 38, 8, |
| 5 | GM2A | GM2 ganglioside activator | 196743 | 198624 | 186334 | 18, 5, 36 |
| 5 | GOLPH3 | golgi phosphoprotein 3 | 113384 | 133401 | 150712 | 4, 42, 26 |
| 5 | GRAMD3 | GRAM domain containing 3 | 155324 | 168916 | 164904 | |
| 5 | GZMA | granzyme A | 145649 | 113088 | 164287 | 10, 30, 17 |
| 5 | GZMK | granzyme K | 113088 | 164283 | 145649 | 30, 40, 39 |
| 5 | GAPT | GRB2 binding adaptor protein, transmembrane | 175857 | 145632 | 152932 | 7, 1, 30 |
| 5 | GDF9 | growth differentiation factor 9 | 164404 | 164403 | 164405 | 2, 38, 23 |
| 5 | GHR | growth hormone receptor | 112964 | 151876 | 198865 | 26, 29, 1 |
| 5 | GRPEL2 | GrpE like 2, mitochondrial | 164284 | 157510 | 145882 | 11, 42, 24 |
| 5 | GTF2H2C | GTF2H2 family member C | 183474 | 197822 | 205572 | |
| 5 | GIN1 | gypsy retrotransposon integrase 1 | 145723 | 145730 | 145725 | 29, 4, 31 |
| 5 | H2AFY | H2A histone family member Y | 113648 | 069011 | 251380 | 5, 31, 7 |
| 5 | HAND1 | heart and neural crest derivatives expressed 1 | 113196 | 164576 | 155506 | 26, 12, 14 |
| 5 | HSPA4 | heat shock protein family A (Hsp70) member 4 | 170606 | 155329 | 053108 | 37, 3, 24 |
| 5 | HSPA9 | heat shock protein family A (Hsp70) member 9 | 113013 | 120705 | 044115 | 3, 40, 24 |
| 5 | HSPB3 | heat shock protein family B (small) member 3 | 169271 | 185305 | 178996 | 15, 20, 25 |
| 5 | HBEGF | heparin binding EGF like growth factor | 113070 | 281227 | 113073 | 26, 13, 15 |
| 5 | HAVCR1 | hepatitis A virus cellular receptor 1 | 113249 | 145850 | 135077 | 16, 17, 14 |
| 5 | HAVCR2 | hepatitis A virus cellular receptor 2 | 135077 | 113249 | 155868 | 5, 36, 10 |
| 5 | HNRNPAB | heterogeneous nuclear ribonucleoprotein A/B | 197451 | 145912 | 175309 | 21, 4, 12 |
| 5 | HNRNPA0 | heterogeneous nuclear ribonucleoprotein A0 | 177733 | 146021 | 120729 | 26, 12, 37 |
| 5 | HNRNPH1 | heterogeneous nuclear ribonucleoprotein H1 | 169045 | 176783 | 204659 | 39, 13, 45 |
| 5 | HK3 | hexokinase 3 | 160883 | 113763 | 087206 | 5, 1, 20 |
| 5 | HEXB | hexosaminidase subunit beta | 049860 | 171617 | 164347 | 45, 32, 17 |
| 5 | HIGD2A | HIG1 hypoxia inducible domain family member 2A | 146066 | 048162 | 175416 | 33, 15, 21 |
| 5 | HRH2 | histamine receptor H2 | 113749 | 164466 | 145920 | 27, 17, 35 |
| 5 | HINT1 | histidine triad nucleotide binding protein 1 | 169567 | 198108 | 186687 | 24, 34, 4 |
| 5 | HARS | histidyl-tRNA synthetase | 170445 | 256453 | 112855 | 2, 13, 8 |
| 5 | HARS2 | histidyl-tRNA synthetase 2, mitochondrial | 112855 | 170445 | 146007 | 21, 4, 35 |
| 5 | HMHB1 | histocompatibility minor HB-1 | 158497 | 113580 | 145817 | 10, |
| 5 | HDAC3 | histone deacetylase 3 | 171720 | 131504 | 164620 | 41, 9, 27 |
| 5 | HMGXB3 | HMG-box containing 3 | 113716 | 164296 | 182578 | 29, 34, 4 |
| 5 | HMP19 | HMP19 protein | 170091 | 185056 | 120149 | 8, 26, 31 |
| 5 | HOMER1 | homer scaffolding protein 1 | 152413 | 152409 | 164329 | 32, 26, 34 |
| 5 | HAPLN1 | hyaluronan and proteoglycan link protein 1 | 145681 | 038427 | 164176 | 11, 6, 12 |
| 5 | HMMR | hyaluronan mediated motility receptor | 072571 | 170584 | 038274 | 10, 39, 3 |
| 5 | HSD17B4 | hydroxysteroid 17-beta dehydrogenase 4 | 133835 | 145779 | 164334 | 1, 29, 2 |
| 5 | HCN1 | hyperpolarization activated cyclic nucleotide gated potassium | 164588 | 112996 | 170571 | 14, 25, 8 |
| | | channel 1 | | | | |
| 5 | IGIP | IgA inducing protein | 182700 | 185129 | 120306 | 1, 11, 29 |
| 5 | IK | IK cytokine, down-regulator of HLA II | 113141 | 113119 | 120314 | 30, 13, 4 |
| 5 | ITK | IL2 inducible T-cell kinase | 113263 | 155868 | 170613 | 39, 5, 42 |
| 5 | IRGM | immunity related GTPase M | 237693 | 256235 | 145908 | |
| 5 | IPO11 | importin 11 | 086200 | 086189 | 186105 | 42, 7, 38 |
| 5 | ITGA1 | integrin subunit alpha 1 | 213949 | 016082 | 152684 | 21, 10, 17 |
| 5 | ITGA2 | integrin subunit alpha 2 | 164171 | 152684 | 164172 | 42, 4, 3 |
| 5 | ICE1 | interactor of little elongation complex ELL subunit 1 | 164151 | 145536 | 133398 | 19, 18, 12 |
| 5 | IRF1 | interferon regulatory factor 1 | 125347 | 197536 | 113525 | 41, 44, 36 |
| 5 | IL12B | interleukin 12B | 113302 | 164332 | 170214 | |
| 5 | IL13 | interleukin 13 | 169194 | 113522 | 113520 | 7, 38, 8 |
| 5 | IL17B | interleukin 17B | 127743 | 145882 | 113712 | |
| 5 | IL3 | interleukin 3 | 164399 | 164398 | 164400 | |
| 5 | IL31RA | interleukin 31 receptor A | 164509 | 152670 | 279768 | 29, 45, 6 |
| 5 | IL4 | interleukin 4 | 113520 | 169194 | 131437 | 5, 36, |
| 5 | IL5 | interleukin 5 | 113525 | 125347 | 113522 | 39, |
| 5 | IL6ST | interleukin 6 signal transducer | 134352 | 279768 | 164512 | 29, 42, 26 |
| 5 | IL7R | interleukin 7 receptor | 168685 | 152582 | 152611 | 39, 5, 18 |
| 5 | IL9 | interleukin 9 | 145839 | 145832 | 145826 | 17, |
| 5 | IQGAP2 | IQ motif containing GTPase activating protein 2 | 145703 | 254893 | 164220 | 38, 11, 34 |
| 5 | IRX1 | iroquois homeobox 1 | 170549 | 186493 | 145536 | 26, 11, 15 |
| 5 | IRX2 | iroquois homeobox 2 | 170561 | 113430 | 186493 | 20, 28, 17 |
| 5 | IRX4 | iroquois homeobox 4 | 113430 | 145494 | 170561 | 18, 32, 27 |
| 5 | ISL1 | ISL LIM homeobox 1 | 016082 | 151883 | 213949 | 43, 14, 28 |
| 5 | ISOC1 | isochorismatase domain containing 1 | 066583 | 113396 | 145808 | 9, 4, 34 |
| 5 | JADE2 | jade family PHD finger 2 | 043143 | 237190 | 152700 | 18, 22, 39 |
| 5 | JAKMIP2 | janus kinase and microtubule interacting protein 2 | 176049 | 113657 | 164266 | 11, 26, 6 |
| 5 | JMY | junction mediating and regulatory protein, p53 cofactor | 152409 | 145692 | 152413 | 11, 29, 42 |
| 5 | KLHL3 | kelch like family member 3 | 146021 | 152377 | 177733 | 11, 40, 1 |
| 5 | KIAA0141 | KIAA0141 | 081791 | 156453 | 113555 | 22, 7, 29 |
| 5 | KIAA0825 | KIAA0825 | 185261 | 248483 | 133302 | 40, 45, 23 |
| 5 | KIAA1024L | KIAA1024like | 186367 | 145808 | 198108 | |
| 5 | KIAA1191 | KIAA1191 | 122203 | 170085 | 175414 | 29, 45, 12 |
| 5 | KIF20A | kinesin family member 20A | 112984 | 112983 | 094880 | 24, 45, 12 |
| 5 | KIF2A | kinesin family member 2A | 068796 | 130449 | 086189 | 22, 7, 39 |
| 5 | KIF3A | kinesin family member 3A | 131437 | 113520 | 205089 | 31, 26, 8 |
| 5 | KIF4B | kinesin family member 4B | 226650 | 082515 | 170624 | 38, 6, 22 |
| 5 | LARP1 | La ribonucleoprotein domain family member 1 | 155506 | 113196 | 170271 | 22, 23, 21 |
| 5 | LVRN | laeverin | 172901 | 280329 | 268714 | 32, 26, 44 |
| 5 | LMNB1 | lamin B1 | 113368 | 196900 | 173926 | 39, 4, 7 |
| 5 | LMAN2 | lectin, mannose binding 2 | 169223 | 169230 | 169220 | 27, 34, 28 |
| 5 | LRRC14B | leucine rich repeat containing 14B | 185028 | 153404 | 164366 | 14, |
| 5 | LRRC70 | leucine rich repeat containing 70 | 186105 | 086200 | 178394 | 1, 7, 5 |
| 5 | LRRTM2 | leucine rich repeat transmembrane neuronal 2 | 146006 | 044115 | 120725 | 8, 26, 14 |
| 5 | LNPEP | leucyl and cystinyl aminopeptidase | 113441 | 164308 | 145721 | 28, 33, 44 |
| 5 | LARS | leucyl-tRNA synthetase | 133706 | 173261 | 275740 | 42, 31, 24 |
| 5 | LIFR | leukemia inhibitory factor receptor alpha | 113594 | 164318 | 145623 | |
| 5 | LECT2 | leukocyte cell derived chemotaxin 2 | 145826 | 145839 | 120708 | 19, 38, |
| 5 | LTC4S | leukotriene C4 synthase | 213316 | 161021 | 161013 | 17, 6, 38 |
| 5 | LIX1 | limb and CNS expressed 1 | 145721 | 113441 | 058729 | 26, 8, 12 |
| 5 | LHFPL2 | lipoma HMGIC fusion partner-like 2 | 145685 | 085365 | 113273 | |
| 5 | LEAP2 | liver enriched antimicrobial peptide 2 | 164406 | 164405 | 072364 | 19, 35, 23 |
| 5 | LMBRD2 | LMBR1 domain containing 2 | 164187 | 168671 | 145604 | 40, 22, 25 |
| 5 | LSM11 | LSM11, U7 small nuclear RNA associated | 155858 | 113272 | 113282 | 27, 4, 9 |
| 5 | LCP2 | lymphocyte cytosolic protein 2 | 043462 | 234511 | 182132 | 5, 39, 36 |
| 5 | LYRM7 | LYR motif containing 7 | 186687 | 169567 | 158985 | 26, 4, 29 |
| 5 | KDM3B | lysine demethylase 3B | 120733 | 120709 | 132563 | 26, 31, 18 |
| 5 | LYSMD3 | LysM domain containing 3 | 176018 | 113356 | 164199 | 22, 18, 1 |
| 5 | LPCAT1 | lysophosphatidylcholine acyltransferase 1 | 153395 | 142319 | 171421 | 1, 33, 3 |
| 5 | LOX | lysyl oxidase | 113083 | 151304 | 164185 | 45, 6, 10 |
| 5 | MROH2B | maestro heat like repeat family member 2 B | 171495 | 112936 | 039537 | 38, 10, 19 |
| 5 | MAN2A1 | mannosidase alpha class 2A member 1 | 112893 | 198961 | 186952 | 1, 45, 11 |
| 5 | MGAT1 | mannosyl (alpha-1,3-)-glycoprotein | 131446 | 174339 | 196670 | 24, 36, 39 |
| | | beta-1,2-N-acetylglucosaminyltransferase | | | | |
| 5 | MGAT4B | mannosyl (alpha-1,3-)-glycoprotein | 161013 | 213316 | 161011 | 34, 28, 35 |
| | | beta-1,4-N-acetylglucosaminyltransferase, isozyme B | | | | |
| 5 | MZB1 | marginal zone B and B1 cell specific protein | 170476 | 170482 | 228672 | 39, 41, 22 |
| 5 | MARVELD2 | MARVEL domain containing 2 | 152939 | 152942 | 197822 | 29, 23, 18 |
| 5 | MAML1 | mastermind like transcriptional coactivator 1 | 161021 | 127022 | 213316 | 22, 1, 7 |
| 5 | MATR3 | matrin 3 | 015479 | 280987 | 120727 | 42, 25, 8 |
| 5 | MATR3 | matrin 3 | 280987 | 120725 | 015479 | 42, 25, 8 |
| 5 | MXD3 | MAX dimerization protein 3 | 213347 | 169228 | 169230 | 37, 41, 36 |
| 5 | MED10 | mediator complex subunit 10 | 133398 | 164151 | 215218 | 6, 34, 10 |
| 5 | MED7 | mediator complex subunit 7 | 155868 | 135077 | 113263 | |
| 5 | MEIKIN | meiotic kinetochore factor | 239642 | 217128 | 281938 | |
| 5 | MARCH11 | membrane associated ring-CH-type finger 11 | 183654 | 183580 | 173545 | 38, 10, 32 |
| 5 | MARCH3 | membrane associated ring-CH-type finger 3 | 173926 | 113368 | 164241 | 10, 38, 14 |
| 5 | MARCH6 | membrane associated ring-CH-type finger 6 | 145495 | 164237 | 145491 | 11, 39, 42 |
| 5 | MBLAC2 | metallo-beta-lactamase domain containing 2 | 176055 | 153140 | 113356 | 7, 42, 39 |
| 5 | MTX3 | metaxin 3 | 177034 | 164309 | 113296 | 30, 1, 26 |
| 5 | MAT2B | methionine adenosyltransferase 2B | 038274 | 072571 | 145934 | 43, 4, 7 |
| 5 | MCCC2 | methylcrotonoyl-CoA carboxylase 2 | 131844 | 145734 | 164326 | 33, 26, 4 |
| 5 | MFAP3 | microfibrillar associated protein 3 | 037749 | 055147 | 164574 | 42, 2, 32 |
| 5 | MAPI B | microtubule associated protein 1B | 131711 | 164326 | 113048 | 26, 8, 33 |
| 5 | MAST4 | microtubule associated serine/threonine kinase family member 4 | 069020 | 153914 | 134061 | 30, 2, 18 |
| 5 | MIER3 | MIER family member 3 | 155545 | 155542 | 062194 | 23, 4, 22 |
| 5 | MRPL22 | mitochondrial ribosomal protein L22 | 082515 | 082516 | 226650 | 10, 43, 31 |
| 5 | MRPL36 | mitochondrial ribosomal protein L36 | 171421 | 153395 | 145494 | 2, 26, 7 |
| 5 | MRPS27 | mitochondrial ribosomal protein S27 | 113048 | 131711 | 049883 | 21, 9, 3 |
| 5 | MRPS30 | mitochondrial ribosomal protein S30 | 112996 | 070193 | 164588 | 9, 43, 11 |
| 5 | MRPS36 | mitochondrial ribosomal protein S36 | 134056 | 153044 | 134058 | 11, 1, 31 |
| 5 | MAPK9 | mitogen-activated protein kinase 9 | 050748 | 146090 | 131459 | 29, 22, 43 |
| 5 | MAP3K1 | mitogen-activated protein kinase kinase kinase 1 | 095015 | 225940 | 155542 | 22, 40, 1 |
| 5 | MOCS2 | molybdenum cofactor synthesis 2 | 164172 | 164171 | 134363 | 29, 42, 34 |
| 5 | MRNIP | MRN complex interacting protein | 161010 | 161011 | 197226 | |
| 5 | MSX2 | msh homeobox 2 | 120149 | 170091 | 184845 | 29, 12, 32 |
| 5 | MCIDAS | multiciliate differentiation and DNA synthesis associated | 234602 | 164294 | 152669 | 9, 5, 23 |
| | | cell cycle protein | | | | |
| 5 | MCTP1 | multiple C2 and transmembrane domain containing 1 | 175471 | 133302 | 153347 | 43, 39, 26 |
| 5 | MEGF10 | multiple EGF like domains 10 | 145794 | 164241 | 164244 | 26, 8, 25 |
| 5 | MCC | mutated in colorectal cancers | 171444 | 172795 | 212122 | 11, 14, 35 |
| 5 | MSH3 | mutS homolog 3 | 113318 | 228716 | 113319 | 43, 17, 26 |
| 5 | MEF2C | myocyte enhancer factor 2C | 081189 | 164180 | 153140 | 22, |
| 5 | MYO10 | myosin X | 145555 | 154153 | 176788 | 35, 18, 31 |
| 5 | MYOT | myotilin | 120729 | 177733 | 078795 | 25, 15, 18 |
| 5 | MTMR12 | myotubularin related protein 12 | 150712 | 113384 | 056097 | 34, 40, 22 |
| 5 | MYOZ3 | myozenin 3 | 164591 | 171992 | 086589 | 25, 24, 33 |
| 5 | NADK2 | NAD kinase 2, mitochondrial | 152620 | 145604 | 164188 | 22, 19, 31 |
| 5 | NDUFAF2 | NADH: ubiquinone oxidoreductase complex assembly factor 2 | 164182 | 049167 | 188725 | 10, 31, 22 |
| 5 | NDUFA2 | NADH: ubiquinone oxidoreductase subunit A2 | 131495 | 170458 | 113119 | 29, 31, 15 |
| 5 | NDUFS4 | NADH: ubiquinone oxidoreductase subunit S4 | 164258 | 134363 | 185305 | 15, 29, 2 |
| 5 | NDUFS6 | NADH: ubiquinone oxidoreductase subunit S6 | 145494 | 171421 | 113430 | 25, 33, 2 |
| 5 | NKD2 | naked cuticle homolog 2 | 145506 | 071539 | 113504 | 23, 6, 14 |
| 5 | NPR3 | natriuretic peptide receptor 3 | 113389 | 113387 | 113407 | 7, 17, 27 |
| 5 | NDST1 | N-deacetylase and N-sulfotransferase 1 | 070614 | 164587 | 171992 | 40, 1, 27 |
| 5 | N4BP3 | NEDD4 binding protein 3 | 145911 | 204677 | 145916 | 18, 32, 22 |
| 5 | NDFIP1 | Nedd4 family interacting protein 1 | 131507 | 113552 | 187678 | 29, 8, 11 |
| 5 | NEURL1B | neuralized E3 ubiquitin protein ligase 1B | 214357 | 174705 | 120129 | 11, 1, 44 |
| 5 | NRG2 | neuregulin 2 | 158458 | 146005 | 185129 | 29, 31, 27 |
| 5 | NEUROG1 | neurogenin 1 | 181965 | 255833 | 145824 | 14, 8, |
| 5 | NLN | neurolysin | 123213 | 197860 | 112851 | 43, 10, 13 |
| 5 | NMUR2 | neuromedin U receptor 2 | 132911 | 145888 | 155511 | 3, 15, 32 |
| 5 | NREP | neuronal regeneration related protein | 134986 | 164211 | 129595 | 11, 15, 12 |
| 5 | NHP2 | NHP2 ribonucleoprotein | 145912 | 145916 | 197451 | 29, 3, 9 |
| 5 | NNT | nicotinamide nucleotide transhydrogenase | 112992 | 172239 | 070193 | 22, 7, 2 |
| 5 | NIM1K | NIM1 serine/threonine protein kinase | 177453 | 172262 | 112972 | 34, 8, 32 |
| 5 | NIPAL4 | NIPA like domain containing 4 | 172548 | 135074 | 039600 | 4, 24, 15 |
| 5 | NIPBL | NIPBL, cohesin loading factor | 164190 | 079215 | 197603 | 29, 24, 26 |
| 5 | NKX2-5 | NK2 homeobox 5 | 183072 | 113734 | 113739 | 15, 36, 12 |
| 5 | NAIP | NLR family apoptosis inhibitory protein | 249437 | 172062 | 145736 | |
| 5 | NME5 | NME/NM23 family member 5 | 112981 | 061492 | 112983 | 29, 27, 38 |
| 5 | NOP16 | NOP16 nucleolar protein | 048162 | 175414 | 146066 | 3, 29, 22 |
| 5 | NSUN2 | NOP2/Sun RNA methyltransferase family member 2 | 037474 | 215218 | 145545 | 29, 6, 12 |
| 5 | NSA2 | NSA2, ribosome biogenesis homolog | 164346 | 164347 | 198780 | 34, 25, 1 |
| 5 | NSD1 | nuclear receptor binding SET domain protein 1 | 165671 | 160867 | 169228 | 26, 1, 40 |
| 5 | NR2F1 | nuclear receptor subfamily 2 group F member 1 | 175745 | 113369 | 113391 | |
| 5 | NR3C1 | nuclear receptor subfamily 3 group C member 1 | 113580 | 145819 | 158497 | 31, 45, 22 |
| 5 | NPM1 | nucleophosmin | 181163 | 164438 | 156427 | 7, 4, 34 |
| 5 | NUP155 | nucleoporin 155 | 113569 | 197603 | 082068 | 38, 31, 24 |
| 5 | NUDCD2 | NudC domain containing 2 | 170584 | 113328 | 072571 | 29, 4, 18 |
| 5 | NUDT12 | nudix hydrolase 12 | 112874 | 181751 | 184349 | 42, 31, 2 |
| 5 | OCLN | occludin | 197822 | 152939 | 183474 | 43, 13, 29 |
| 5 | OR2V1 | olfactory receptor family 2 subfamily V member 1 | 185372 | 165810 | 182613 | |
| 5 | OR2V2 | olfactory receptor family 2 subfamily V member 2 | 182613 | 185372 | 146054 | |
| 5 | OR2Y1 | olfactory receptor family 2 subfamily Y member 1 | 174339 | 037280 | 131446 | |
| 5 | OR4F3 | olfactory receptor family 4 subfamily F member 3 | 230178 | 183718 | 176049 | |
| 5 | OSMR | oncostatin M receptor | 145623 | 113594 | 164327 | 18, 42, 13 |
| 5 | OTP | orthopedia homeobox | 171540 | 164253 | 171530 | 20, 14, 38 |
| 5 | OTULIN | OTU deubiquitinase with linear linkage specificity | 154124 | 145569 | 154122 | 6, 24, 2 |
| 5 | PITX1 | paired like homeodomain 1 | 069011 | 152705 | 113648 | 31, 9, 3 |
| 5 | PANK3 | pantothenate kinase 3 | 120137 | 188573 | 184347 | |
| 5 | PDLIM4 | PDZ and LIM domain 4 | 131435 | 072682 | 197208 | 27, 26, 35 |
| 5 | PDLIM7 | PDZ and LIM domain 7 | 196923 | 113758 | 146094 | 41, 33, 35 |
| 5 | PDZD2 | PDZ domain containing 2 | 133401 | 082213 | 113384 | 24, 26, 32 |
| 5 | PELO | pelota homolog (Drosophila) | 152684 | 213949 | 164171 | 21, 10, 17 |
| 5 | PTCD2 | pentatricopeptide repeat domain 2 | 049883 | 113048 | 178175 | 26, 45, 6 |
| 5 | PAM | peptidylglycine alpha-amidating monooxygenase | 145730 | 205359 | 145723 | |
| 5 | PPIC | peptidylprolyl isomerase C | 168938 | 064652 | 061455 | 18, 11, 6 |
| 5 | PPWD1 | peptidylprolyl isomerase domain and WD repeat containing 1 | 113593 | 123219 | 113595 | 13, 4, 42 |
| 5 | PLCXD3 | phosphatidylinositol specific phospholipase C X domain | 182836 | 039537 | 083720 | 28, 26, 2 |
| | | containing 3 | | | | |
| 5 | PDE4D | phosphodiesterase 4D | 113448 | 152932 | 280447 | |
| 5 | PDE6A | phosphodiesterase 6A | 132915 | 155846 | 155850 | 14, 25, 6 |
| 5 | PDE8B | phosphodiesterase 8B | 113231 | 132846 | 164253 | 40, 24, 28 |
| 5 | PIK3R1 | phosphoinositide-3-kinase regulatory subunit 1 | 145675 | 134061 | 145740 | 8, 44, 36 |
| 5 | PLPP1 | phospholipid phosphatase 1 | 067113 | 039123 | 177058 | |
| 5 | PHAX | phosphorylated adaptor for RNA export | 164902 | 164904 | 196900 | 18, 4, 3 |
| 5 | PTTG1 | pituitary tumor-transforming 1 | 164611 | 164609 | 118322 | 34, 7, 4 |
| 5 | PLAC8L1 | PLAC8 like 1 | 173261 | 156463 | 133706 | 10, 38, |
| 5 | PDGFRB | platelet derived growth factor receptor beta | 113721 | 182578 | 113722 | 26, 6, 18 |
| 5 | PSD2 | pleckstrin and Sec7 domain containing 2 | 146005 | 171604 | 158458 | 26, 8, 24 |
| 5 | PLEKHG4B | pleckstrin homology and RhoGEF domain containing G4B | 153404 | 176049 | 185028 | 31, 30, 12 |
| 5 | POC5 | POC5 centriolar protein | 152359 | 189045 | 122012 | 33, 13, 29 |
| 5 | PLK2 | polo like kinase 2 | 145632 | 169067 | 175857 | 36, 3, 45 |
| 5 | PAIP1 | poly(A) binding protein interacting protein 1 | 172239 | 172244 | 112992 | 18, 2, 32 |
| 5 | PAIP2 | poly(A) binding protein interacting protein 2 | 120727 | 015479 | 170482 | 29, 31, 1 |
| 5 | PAPD4 | poly(A) RNA polymerase D4, non-canonical | 164329 | 152413 | 164309 | 42, 23, 22 |
| 5 | PAPD7 | poly(A) RNA polymerase D7, non-canonical | 112941 | 145545 | 078295 | 9, 22, 6 |
| 5 | PARP8 | poly(ADP-ribose) polymerase family member 8 | 151883 | 170571 | 016082 | 39, 42, 5 |
| 5 | PKD2L2 | polycystin 2 like 2, transient receptor potential cation | 078795 | 120729 | 031003 | 38, 27, 5 |
| | | channel | | | | |
| 5 | GALNT10 | polypeptide N-acetylgalactosaminyltransferase 10 | 164574 | 037749 | 164576 | 40, 29, 15 |
| 5 | KCNMB1 | potassium calcium-activated channel subfamily M regulatory beta subunit 1 | 145936 | 182132 | 094755 | 1, 44, 45 |
| 5 | KCNN2 | potassium calcium-activated channel subfamily N member 2 | 080709 | 047188 | 152503 | 11, 2, 35 |
| 5 | KCTD16 | potassium channel tetramerization domain containing 16 | 183775 | 145817 | 186314 | 14, 12, 8 |
| 5 | KCNIP1 | potassium voltage-gated channel interacting protein 1 | 182132 | 043462 | 145936 | 28, 8, 30 |
| 5 | POU4F3 | POU class 4 homeobox 3 | 091010 | 091009 | 113649 | |
| 5 | POU5F2 | POU domain class 5, transcription factor 2 | 248483 | 113391 | 185261 | 38, 36, |
| 5 | PPARGC1B | PPARG coactivator 1 beta | 155846 | 183111 | 132915 | 1, 24, 18 |
| 5 | PRDM6 | PR/SET domain 6 | 061455 | 168938 | 168944 | 27, 6, 10 |
| 5 | PRDM9 | PR/SET domain 9 | 164256 | 154162 | 040731 | 38, 25, |
| 5 | PJA2 | praja ring finger ubiquitin ligase 2 | 198961 | 151422 | 112893 | 26, 11, 2 |
| 5 | PFDN1 | prefoldin subunit 1 | 113068 | 120306 | 281227 | 29, 30, 43 |
| 5 | PRELID1 | PRELI domain containing 1 | 169230 | 213347 | 169223 | 9, 21, 28 |
| 5 | PRELID2 | PRELI domain containing 2 | 186314 | 183775 | 204928 | 6, |
| 5 | PCYOX1L | prenylcysteine oxidase 1 like | 145882 | 164284 | 127743 | 7, 29, 5 |
| 5 | PFN3 | profilin 3 | 196570 | 131183 | 131187 | 38, |
| 5 | PDCD6 | programmed cell death 6 | 249915 | 073578 | 063438 | 18, 9, 26 |
| 5 | PRLR | prolactin receptor | 113494 | 113492 | 152582 | 29, 23, 32 |
| 5 | PRR16 | proline rich 16 | 184838 | 164334 | 181867 | 15, 6, 36 |
| 5 | PRR7 | proline rich 7, synaptic | 131188 | 198055 | 113758 | 41, 34, 37 |
| 5 | PROB1 | proline rich basic protein 1 | 228672 | 170476 | 170469 | 39, 22, 36 |
| 5 | PRRC1 | proline rich coiled-coil 1 | 164244 | 145794 | 205279 | 31, 11, 4 |
| 5 | P4HA2 | prolyl 4-hydroxylase subunit alpha 2 | 072682 | 164400 | 131435 | 43, 45, 13 |
| 5 | PROP1 | PROP paired-like homeobox 1 | 175325 | 170074 | 204677 | |
| 5 | PCSK1 | proprotein convertase subtilisin/kexin type 1 | 175426 | 118985 | 153113 | 28, 26, 31 |
| 5 | PTGER4 | prostaglandin E receptor 4 | 171522 | 113638 | 132356 | 22, 1, 42 |
| 5 | PGGT1B | protein geranylgeranyltransferase type I subunit beta | 164219 | 152503 | 164221 | 24, 22, 2 |
| 5 | PRKAA1 | protein kinase AMP-activated catalytic subunit alpha 1 | 132356 | 171522 | 279126 | 42, 29, 11 |
| 5 | PPP1R2P3 | Protein phosphatase 1 regulatory inhibitor subunit 2 | 231989 | 279646 | 145850 | 38, 20, |
| | | pseudogene 3 | | | | |
| 5 | PPP2CA | protein phosphatase 2 catalytic subunit alpha | 113575 | 272772 | 006837 | 4, 2, 29 |
| 5 | PPP2R2B | protein phosphatase 2 regulatory subunit Bbeta | 156475 | 173250 | 169302 | 38, |
| 5 | PCDH1 | protocadherin 1 | 156453 | 120318 | 081791 | 43, 32, 16 |
| 5 | PCDH12 | protocadherin 12 | 113555 | 081791 | 013561 | |
| 5 | PCDHA1 | Protocadherin alpha 1 | 204970 | 146007 | 204969 | |
| 5 | PCDHA10 | Protocadherin alpha 10 | 250120 | 204961 | 249158 | |
| 5 | PCDHA11 | Protocadherin alpha 11 | 249158 | 250120 | 251664 | |
| 5 | PCDHA12 | Protocadherin alpha 12 | 251664 | 249158 | 239389 | |
| 5 | PCDHA13 | Protocadherin alpha 13 | 239389 | 251664 | 248383 | |
| 5 | PCDHA2 | Protocadherin alpha 2 | 204969 | 204970 | 255408 | |
| 5 | PCDHA3 | Protocadherin alpha 3 | 255408 | 204969 | 204967 | |
| 5 | PCDHA4 | Protocadherin alpha 4 | 204967 | 255408 | 204965 | |
| 5 | PCDHA5 | Protocadherin alpha 5 | 204965 | 204967 | 081842 | |
| 5 | PCDHA6 | Protocadherin alpha 6 | 081842 | 204965 | 204963 | |
| 5 | PCDHA7 | Protocadherin alpha 7 | 204963 | 081842 | 204962 | |
| 5 | PCDHA8 | Protocadherin alpha 8 | 204962 | 204963 | 204961 | |
| 5 | PCDHA9 | Protocadherin alpha 9 | 204961 | 204962 | 250120 | 8, 29, 26 |
| 5 | PCDHAC1 | Protocadherin alpha subfamily C, 1 | 248383 | 239389 | 243232 | |
| 5 | PCDHAC2 | Protocadherin alpha subfamily C, 2 | 243232 | 248383 | 171815 | |
| 5 | PCDHB1 | Protocadherin beta 1 | 171815 | 243232 | 112852 | 38, |
| 5 | PCDHB10 | Protocadherin beta 10 | 120324 | 177839 | 197479 | 8, 26, 2 |
| 5 | PCDHB11 | Protocadherin beta 11 | 197479 | 120324 | 120328 | 11, 42, 39 |
| 5 | PCDHB12 | Protocadherin beta 12 | 120328 | 197479 | 187372 | 16, |
| 5 | PCDHB13 | Protocadherin beta 13 | 187372 | 120328 | 120327 | 18, 42, 33 |
| 5 | PCDHB14 | Protocadherin beta 14 | 120327 | 187372 | 279983 | 1, 39, 26 |
| 5 | PCDHB15 | Protocadherin beta 15 | 113248 | 279983 | 178913 | 26, 13, 37 |
| 5 | PCDHB16 | Protocadherin beta 16 | 272674 | 120322 | 279068 | 26, 37, 24 |
| 5 | PCDHB2 | Protocadherin beta 2 | 112852 | 171815 | 113205 | 38, 24, 12 |
| 5 | PCDHB3 | Protocadherin beta 3 | 113205 | 112852 | 081818 | 42, 24, 23 |
| 5 | PCDHB4 | Protocadherin beta 4 | 081818 | 113205 | 113209 | 14, 42, 28 |
| 5 | PCDHB5 | Protocadherin beta 5 | 113209 | 081818 | 113211 | 37, 12, |
| 5 | PCDHB6 | Protocadherin beta 6 | 113211 | 113209 | 113212 | 13, 27, 38 |
| 5 | PCDHB7 | Protocadherin beta 7 | 113212 | 113211 | 120322 | 24, 6, 10 |
| 5 | PCDHB8 | Protocadherin beta 8 | 120322 | 113212 | 272674 | 24, 42, 38 |
| 5 | PCDHB9 | Protocadherin beta 9 | 177839 | 279068 | 120324 | 26, 24, 28 |
| 5 | PCDHGA1 | Protocadherin gamma subfamily A, 1 | 204956 | 120329 | 081853 | |
| 5 | PCDHGA10 | Protocadherin gamma subfamily A, 10 | 253846 | 253305 | 254122 | |
| 5 | PCDHGA11 | Protocadherin gamma subfamily A, 11 | 253873 | 254122 | 253159 | |
| 5 | PCDHGA12 | Protocadherin gamma subfamily A, 12 | 253159 | 253873 | 240184 | |
| 5 | PCDHGA2 | Protocadherin gamma subfamily A, 2 | 081853 | 204956 | 254245 | |
| 5 | PCDHGA3 | Protocadherin gamma subfamily A, 3 | 254245 | 081853 | 254221 | |
| 5 | PCDHGA4 | Protocadherin gamma subfamily A, 4 | 262576 | 254221 | 253910 | |
| 5 | PCDHGA5 | Protocadherin gamma subfamily A, 5 | 253485 | 253910 | 262209 | |
| 5 | PCDHGA6 | Protocadherin gamma subfamily A, 6 | 253731 | 262209 | 253537 | |
| 5 | PCDHGA7 | Protocadherin gamma subfamily A, 7 | 253537 | 253731 | 253953 | |
| 5 | PCDHGA8 | Protocadherin gamma subfamily A, 8 | 253767 | 253953 | 276547 | 8, 35, 18 |
| 5 | PCDHGA9 | Protocadherin gamma subfamily A, 9 | 261934 | 276547 | 253305 | |
| 5 | PCDHGB1 | Protocadherin gamma subfamily B, 1 | 254221 | 254245 | 262576 | |
| 5 | PCDHGB2 | Protocadherin gamma subfamily B, 2 | 253910 | 262576 | 253485 | |
| 5 | PCDHGB3 | Protocadherin gamma subfamily B, 3 | 262209 | 253485 | 253731 | |
| 5 | PCDHGB4 | Protocadherin gamma subfamily B, 4 | 253953 | 253537 | 253767 | |
| 5 | PCDHGB5 | Protocadherin gamma subfamily B, 5 | 276547 | 253767 | 261934 | |
| 5 | PCDHGB6 | Protocadherin gamma subfamily B, 6 | 253305 | 261934 | 253846 | |
| 5 | PCDHGB7 | Protocadherin gamma subfamily B, 7 | 254122 | 253846 | 253873 | |
| 5 | PCDHGC3 | Protocadherin gamma subfamily C, 3 | 240184 | 253159 | 242419 | 8, 35, 18 |
| 5 | PCDHGC4 | Protocadherin gamma subfamily C, 4 | 242419 | 240184 | 240764 | |
| 5 | PCDHGC5 | Protocadherin gamma subfamily C, 5 | 240764 | 242419 | 131504 | |
| 5 | PCBD2 | pterin-4 alpha-carbinolamine dehydratase 2 | 132570 | 113621 | 152705 | 33, 30, 13 |
| 5 | PURA | purine rich element binding protein A | 185129 | 158458 | 182700 | 29, 31, 28 |
| 5 | PWWP2A | PWWP domain containing 2A | 170234 | 113312 | 170231 | |
| 5 | RAB24 | RAB24, member RAS oncogene family | 169228 | 165671 | 213347 | 37, 5, 28 |
| 5 | RAB3C | RAB3C, member RAS oncogene family | 152932 | 175857 | 113448 | 20, 10, 28 |
| 5 | RAD1 | RAD1 checkpoint DNA exonuclease | 113456 | 205838 | 113460 | |
| 5 | RAD17 | RAD17 checkpoint clamp leader component | 152942 | 273841 | 152939 | 22, 3, 38 |
| 5 | RAD50 | RAD50 double strand break repair protein | 113522 | 113525 | 169194 | 7, 24, 1 |
| 5 | RANBP17 | RAN binding protein 17 | 204764 | 094755 | 275038 | 40, 38, 42 |
| 5 | RANBP3L | RAN binding protein 3 like | 164188 | 152620 | 079215 | 31, 8, 38 |
| 5 | RAPGEF6 | Rap guanine nucleotide exchange factor 6 | 158987 | 158985 | 273217 | 22, 13, 1 |
| 5 | RASA1 | RAS p21 protein activator 1 | 145715 | 127184 | 134480 | 32, 40, 11 |
| 5 | RASGRF2 | Ras protein specific guanine nucleotide releasing factor 2 | 113319 | 113318 | 131730 | 14, 31, 29 |
| 5 | RASGEF1C | RasGEF domain family member 1C | 146090 | 113269 | 050748 | 38, 14, 23 |
| 5 | REEP2 | receptor accessory protein 2 | 132563 | 120733 | 120738 | 8, 37, 14 |
| 5 | REEP5 | receptor accessory protein 5 | 129625 | 153037 | 212643 | 11, 29, 42 |
| 5 | RACK1 | receptor for activated C kinase 1 | 204628 | 146063 | 183718 | |
| 5 | RGS14 | regulator of G-protein signaling 14 | 169220 | 169223 | 131183 | 3, 37, 7 |
| 5 | RGS7BP | regulator pf G-protein signaling 7 binding protein | 186479 | 164197 | 145642 | 2, 42, 8 |
| 5 | RXFP3 | relaxin/insulin like family peptide receptor 3 | 182631 | 151388 | 164175 | |
| 5 | RELL2 | RELT like 2 | 164620 | 171720 | 197948 | 39, 5, 32 |
| 5 | RGMB | repulsive guidance molecule family member b | 174136 | 058729 | 279232 | 26, 1, 35 |
| 5 | RMND5B | required for meiotic nuclear division 5 homolog B | 145916 | 145911 | 145912 | 33, 34, 38 |
| 5 | RAI14 | retinoic acid induced 14 | 039560 | 082196 | 205838 | 43, 11, 6 |
| 5 | ARHGAP26 | Rho GTPase activating protein 26 | 145819 | 113578 | 113580 | 24, 26, 37 |
| 5 | ARHGEF28 | Rho guanine nucleotide exchange factor 28 | 214944 | 164338 | 171617 | 3, 11, 6 |
| 5 | ARHGEF37 | Rho guanine nucleotide exchange factor 37 | 183111 | 113712 | 155846 | 29, 31, 33 |
| 5 | RHOBTB3 | Rho related BTB domain containing 3 | 164292 | 145757 | 173221 | |
| 5 | ROPN1L | rhophilin associated tail protein 1 like | 145491 | 145495 | 164236 | 38, 20, 42 |
| 5 | RPL26L1 | ribosomal protein L26 like 1 | 037241 | 113719 | 113732 | 7, 3, 30 |
| 5 | RPL37 | ribosomal protein L37 | 145592 | 279126 | 132357 | |
| 5 | RPS14 | ribosomal protein S14 | 164587 | 019582 | 070614 | 12, 41, 43 |
| 5 | RPS23 | ribosomal protein S23 | 186468 | 152348 | 205464 | 11, 12, 7 |
| 5 | RFESD | Rieske Fe-S domain containing | 175449 | 178015 | 145757 | |
| 5 | RNF130 | ring finger protein 130 | 113269 | 197226 | 146090 | 29, 31, 6 |
| 5 | RNF14 | ring finger protein 14 | 013561 | 113555 | 113552 | 2, 29, 23 |
| 5 | RNF145 | ring finger protein 145 | 145860 | 164330 | 164332 | 37, 24, 42 |
| 5 | RNF180 | ring finger protein 180 | 164197 | 178394 | 186479 | 29, 1, 45 |
| 5 | RNF44 | ring finger protein 44 | 146083 | 113194 | 074276 | 21, 4, 12 |
| 5 | RIOK2 | RIO kinase 2 | 058729 | 145721 | 174136 | 26, 22, 42 |
| 5 | RBM22 | RNA binding motif protein 22 | 086589 | 164591 | 132912 | 36, 24, 39 |
| 5 | RBM27 | RNA binding motif protein 27 | 091009 | 275740 | 091010 | 18, 44, 22 |
| 5 | POLR3G | RNA polymerase III subunit G | 113356 | 176055 | 176018 | 26, 19, 21 |
| 5 | RICTOR | RPTOR independent companion of MTOR complex 2 | 164327 | 145623 | 082074 | 31, 22, 7 |
| 5 | RUFY1 | RUN and FYVE domain containing 1 | 176783 | 087116 | 169045 | 22, 27, 2 |
| 5 | S100Z | S100 calcium binding protein Z | 171643 | 164251 | 145708 | 7, 6, 5 |
| 5 | SAP30L | SAP30 like | 164576 | 164574 | 113196 | 22, 34, 27 |
| 5 | SGCD | sarcoglycan delta | 170624 | 226650 | 279646 | 15, 1, 29 |
| 5 | SEC24A | SEC24 homolog A, COPII coat complex component | 113615 | 152700 | 164615 | 11, 6, 32 |
| 5 | SPARC | secreted protein acidic and cysteine rich | 113140 | 086570 | 177556 | 11, 6, 43 |
| 5 | SAR1B | secretion associated Ras related GTPase 1B | 152700 | 043143 | 113615 | 30, 43, 2 |
| 5 | SCGB3A1 | secretoglobin family 3A member 1 | 161055 | 113300 | 037280 | 33, 20, 15 |
| 5 | SCGB3A2 | secretoglobin family 3A member 2 | 164265 | 164266 | 178776 | 20, 18, 5 |
| 5 | SCAMP1 | secretory carrier membrane protein 1 | 085365 | 132842 | 145685 | 4, 42, 31 |
| 5 | SELENOP | selenoprotein P | 250722 | 198865 | 177721 | 19, 1, 36 |
| 5 | SEMA5A | semaphorin 5A | 112902 | 124279 | 169777 | 11, 15, 6 |
| 5 | SEMA6A | semaphorin 6A | 092421 | 145781 | 169570 | 12, 35, 32 |
| 5 | SEPT8 | septin 8 | 164402 | 205089 | 198944 | 8, 26, 40 |
| 5 | SQSTM1 | sequestosome 1 | 161011 | 161013 | 161010 | 23, 35, 27 |
| 5 | SERINC5 | serine incorporator 5 | 164300 | 113296 | 164299 | 11, 2, 33 |
| 5 | SPINK1 | serine peptidase inhibitor, Kazal type 1 | 164266 | 176049 | 164265 | 28, 4, 37 |
| 5 | SPINK13 | serine peptidase inhibitor, Kazal type 13 (putative) | 214510 | 248109 | 145879 | 38, |
| 5 | SPINK14 | serine peptidase inhibitor, Kazal type 14 (putative) | 196800 | 133710 | 178172 | |
| 5 | SPINK5 | serine peptidase inhibitor, Kazal type 5 | 133710 | 178776 | 196800 | 13, 24, 30 |
| 5 | SPINK6 | serine peptidase inhibitor, Kazal type 6 | 178172 | 196800 | 248109 | 10, 19, 9 |
| 5 | SPINK7 | serine peptidase inhibitor, Kazal type 7 (putative) | 145879 | 214510 | 204909 | 18, 30, 13 |
| 5 | SPINK9 | serine peptidase inhibitor, Kazal type 9 | 204909 | 145879 | 145868 | 38, |
| 5 | STK10 | serine/threonine kinase 10 | 072786 | 072803 | 214360 | 43, 22, 1 |
| 5 | STK32A | serine/threonine kinase 32A | 169302 | 156475 | 113657 | 4, 2, 30 |
| 5 | SRFBP1 | serum response factor binding protein 1 | 151304 | 181867 | 113083 | 42, 4, 12 |
| 5 | SETD9 | SET domain containing 9 | 155542 | 095015 | 155545 | 34, 13, 38 |
| 5 | SH3PXD2B | SH3 and PX domains 2B | 174705 | 168246 | 214357 | |
| 5 | SH3TC2 | SH3 domain and tetratricopeptide repeats 2 | 169247 | 169252 | 173210 | 32, 11, 7 |
| 5 | SH3RF2 | SH3 domain containing ring finger 2 | 156463 | 204928 | 173261 | 38, 24, 15 |
| 5 | SHROOM1 | shroom family member 1 | 164403 | 198944 | 164404 | 18, 7, 16 |
| 5 | SFXN1 | sideroflexin 1 | 164466 | 184845 | 113749 | 13, 23, 29 |
| 5 | SRP19 | signal recognition particle 19 | 153037 | 272869 | 129625 | 26, 33, 23 |
| 5 | SIL1 | SIL1 nucleotide exchange factor | 120725 | 146006 | 280987 | |
| 5 | SSBP2 | single stranded DNA binding protein 2 | 145687 | 172497 | 152348 | 29, 31, 30 |
| 5 | SKIV2L2 | Ski2 like RNA helicase 2 | 039123 | 067248 | 067113 | 42, 38, 24 |
| 5 | SLIT3 | slit guidance ligand 3 | 184347 | 120137 | 040275 | 29, 1, 15 |
| 5 | SLU7 | SLU7 homolog, splicing factor | 164609 | 221886 | 164611 | 41, 30, 31 |
| 5 | SMAD5 | SMAD family member 5 | 113658 | 120708 | 271824 | 25, 29, 22 |
| 5 | SERF1A | small EDRK-rich factor 1A | 172058 | 205571 | 172062 | |
| 5 | SERF1B | small EDRK-rich factor 1B | 205572 | 183474 | 205571 | |
| 5 | SGTB | small glutamine rich tetratricopeptide repeat containing beta | 197860 | 253251 | 123213 | 26, 34, 8 |
| 5 | SMIM15 | small integral membrane protein 15 | 188725 | 164182 | 130449 | 4, 26, 29 |
| 5 | SMIM23 | small integral membrane protein 23 | 185662 | 156427 | 072803 | |
| 5 | SMIM3 | small integral membrane protein 3 | 256235 | 132912 | 237693 | 1, 29, 35 |
| 5 | SLF1 | SMC5-SMC6 complex localization factor 1 | 133302 | 185261 | 175471 | |
| 5 | SLC1A3 | solute carrier family 1 member 3 | 079215 | 164188 | 164190 | 8, 13, 34 |
| 5 | SLC12A2 | solute carrier family 12 member 2 | 064651 | 230561 | 138829 | 11, 42, 16 |
| 5 | SLC12A7 | solute carrier family 12 member 7 | 113504 | 145506 | 174358 | 29, 1, 37 |
| 5 | SLC22A4 | solute carrier family 22 member 4 | 197208 | 131435 | 197375 | 45, 5, 42 |
| 5 | SLC22A5 | solute carrier family 22 member 5 | 197375 | 197208 | 197536 | 35, 11, 9 |
| 5 | SLC23A1 | solute carrier family 23 member 1 | 170482 | 120727 | 170476 | |
| 5 | SLC25A2 | solute carrier family 25 member 2 | 120329 | 178913 | 204956 | 38, |
| 5 | SLC25A46 | solute carrier family 25 member 46 | 164209 | 186952 | 145777 | 7, 2, 25 |
| 5 | SLC25A48 | solute carrier family 25 member 48 | 145832 | 250378 | 145839 | 17, 8, 14 |
| 5 | SLC26A2 | solute carrier family 26 member 2 | 155850 | 132915 | 164296 | 42, 29, 30 |
| 5 | SLC27A6 | solute carrier family 27 member 6 | 113396 | 138829 | 066583 | 15, 30, 23 |
| 5 | SLC30A5 | solute carrier family 30 member 5 | 145740 | 145675 | 134057 | 45, 4, 11 |
| 5 | SLC34A1 | solute carrier family 34 member 1 | 131183 | 169220 | 196570 | 17, 35, 19 |
| 5 | SLC35A4 | solute carrier family 35 member A4 | 176087 | 113108 | 170458 | 30, 41, 9 |
| 5 | SLC36A1 | solute carrier family 36 member 1 | 123643 | 186335 | 086570 | 26, 29, 18 |
| 5 | SLC36A2 | solute carrier family 36 member 2 | 186335 | 186334 | 123643 | 17, 15, 38 |
| 5 | SLC36A3 | solute carrier family 36 member 3 | 186334 | 196743 | 186335 | 38, 10, |
| 5 | SLC38A9 | solute carrier family 38 member 9 | 177058 | 067113 | 152670 | 29, 38, 2 |
| 5 | SLC4A9 | solute carrier family 4 member 9 | 113073 | 113070 | 131503 | 17, 38, 20 |
| 5 | SLC45A2 | solute carrier family 45 member 2 | 164175 | 182631 | 242110 | 35, 44, 17 |
| 5 | SLC6A18 | solute carrier family 6 member 18 | 164363 | 174358 | 164362 | 17, 16, 38 |
| 5 | SLC6A19 | solute carrier family 6 member 19 | 174358 | 113504 | 164363 | 17, 37, 27 |
| 5 | SLC6A3 | solute carrier family 6 member 3 | 142319 | 049656 | 153395 | 17, 39, 8 |
| 5 | SLC6A7 | solute carrier family 6 member 7 | 011083 | 113722 | 070808 | 8, 16, 14 |
| 5 | SLC9A3 | solute carrier family 9 member A3 | 066230 | 180104 | 112877 | 16, 42, 35 |
| 5 | SLCO4C1 | solute carrier organic anion transporter family member 4C1 | 173930 | 113532 | 205359 | 17, 42, 5 |
| 5 | SLCO6A1 | solute carrier organic anion transporter family member 6A1 | 205359 | 173930 | 145730 | 38, 8, |
| 5 | SNX18 | sorting nexin 18 | 178996 | 169271 | 164283 | 6, 11, 2 |
| 5 | SNX2 | sorting nexin 2 | 205302 | 064692 | 064652 | 30, 36, 18 |
| 5 | SNX24 | sorting nexin 24 | 064652 | 205302 | 168938 | 34, 11, 29 |
| 5 | SOWAHA | sosondowah ankyrin repeat domain family member A | 198944 | 164402 | 164403 | 17, 33, 16 |
| 5 | SPOCK1 | SPARC/osteonectin, cwcv and kazal like domains proteoglycan 1 | 152377 | 069018 | 146021 | |
| 5 | SPEF2 | sperm flagellar 2 | 152582 | 113494 | 168685 | 44, 4, 6 |
| 5 | SPATA24 | spermatogenesis associated 24 | 170469 | 228672 | 170464 | 21, 40, 27 |
| 5 | SPATA9 | spermatogenesis associated 9 | 145757 | 175449 | 164292 | 38, 6, 32 |
| 5 | SPZ1 | spermatogenic leucine zipper 1 | 164299 | 164300 | 039319 | 38, 8, |
| 5 | SKP1 | S-phase kinase associated protein 1 | 113558 | 081059 | 272772 | 33, 20, 38 |
| 5 | SKP2 | S-phase kinase associated protein 2 | 145604 | 164187 | 152620 | 32, 4, 24 |
| 5 | SPDL1 | spindle apparatus coiled-coil protein 1 | 040275 | 184347 | 134516 | 6, 45, 9 |
| 5 | SREK1 | splicing regulatory glutamic acid and lysine rich protein 1 | 153914 | 112851 | 069020 | 7, 1, 2 |
| 5 | SPRY4 | sprouty RTK signaling antagonist 4 | 187678 | 131507 | 113578 | 25, |
| 5 | SREK1IP1 | SREK1 interacting protein 1 | 153006 | 145642 | 153015 | 22, 31, 25 |
| 5 | SOX30 | SRY-box30 | 039600 | 172548 | 187658 | 38, 8, 32 |
| 5 | ST8SIA4 | ST8 alpha-N-acetyl-neuraminide alpha-2,8-sialyltransferase 4 | 113532 | 174132 | 173930 | 42, 22, 5 |
| 5 | STC2 | stanniocalcin 2 | 113739 | 183072 | 145919 | 23, 10, 25 |
| 5 | STARD4 | StAR related lipid transfer domain containing 4 | 164211 | 152495 | 134986 | 26, 45, 7 |
| 5 | SRD5A1 | steroid 5 alpha-reductase 1 | 145545 | 037474 | 112941 | 9, 24, 13 |
| 5 | SRA1 | steroid receptor RNA activator 1 | 213523 | 254996 | 243056 | 34, 21, 26 |
| 5 | SUB1 | SUB1 homolog, transcriptional regulator | 113387 | 056097 | 113389 | 34, 11, 24 |
| 5 | SDHA | succinate dehydrogenase complex flavoprotein subunit A | 073578 | 164366 | 249915 | 15, 24, 3 |
| 5 | SIMC1 | SLIMO interacting motifs containing 1 | 170085 | 182230 | 122203 | 31, 27, 22 |
| 5 | SMN1 | survival of motor neuron 1, telomeric | 172062 | 172058 | 249437 | 37, 24, 43 |
| 5 | SMN2 | survival of motor neuron 2, centromeric | 205571 | 205572 | 172058 | 11, 37, 31 |
| 5 | SV2C | synaptic vesicle glycoprotein 2C | 122012 | 152359 | 254893 | 26, 14, 10 |
| 5 | SYNPO | synaptopodin | 171992 | 070614 | 164591 | 1, 26, 25 |
| 5 | SNCAIP | synuclein alpha interacting protein | 064692 | 250803 | 205302 | |
| 5 | SNCB | synuclein beta | 074317 | 169258 | 175766 | 14, 26, 8 |
| 5 | TAS2R1 | taste 2 receptor member 1 | 169777 | 112902 | 150756 | 10, |
| 5 | TAF7 | TATA-box binding protein associated factor 7 | 178913 | 113248 | 120329 | 36, 39, 42 |
| 5 | TAF9 | TATA-box binding protein associated factor 9 | 273841 | 085231 | 152942 | 44, 43, 34 |
| 5 | TBC1D9B | TBC1 domain family member 9B | 197226 | 161010 | 113269 | 9, 34, 37 |
| 5 | TIMD4 | T-cell immunoglobulin and mucin domain containing 4 | 145850 | 231989 | 113249 | 38, 39, 10 |
| 5 | TLX3 | T-cell leukemia homeobox 3 | 164438 | 275038 | 181163 | 7, 25, |
| 5 | TERT | telomerase reverse transcriptase | 164362 | 164363 | 049656 | 21, 22, 3 |
| 5 | TENM2 | teneurin transmembrane protein 2 | 145934 | 038274 | 113645 | 18, 25, 6 |
| 5 | TEX43 | testis expressed 43 | 196900 | 164902 | 113368 | 38, 8, |
| 5 | TSSK1B | testis specific serine kinase 1B | 212122 | 171444 | 047188 | 38, 8, |
| 5 | TSPAN17 | tetraspanin 17 | 048140 | 175766 | 113763 | 24, 6, 9 |
| 5 | TTC1 | tetratricopeptide repeat domain 1 | 113312 | 170214 | 170234 | 24, 37, 5 |
| 5 | TTC23L | tetratricopeptide repeat domain 23 like | 205838 | 039560 | 113456 | 38, 30, 27 |
| 5 | TTC33 | tetratricopeptide repeat domain 33 | 113638 | 153071 | 171522 | 34, 26, 8 |
| 5 | TTC37 | tetratricopeptide repeat domain 37 | 198677 | 153347 | 164291 | 42, 6, 45 |
| 5 | TXNDC15 | thioredoxin domain containing 15 | 113621 | 181904 | 132570 | 31, 40, 45 |
| 5 | THOC3 | THO complex 3 | 051596 | 145920 | 182230 | |
| 5 | TARS | threonyl-tRNA synthetase | 113407 | 113389 | 151388 | 40, 24, 21 |
| 5 | THBS4 | thrombospondin 4 | 113296 | 177034 | 164300 | 24, 26, 31 |
| 5 | TSLP | thymic stromal lymphopoietin | 145777 | 164209 | 134987 | 34, 40, 10 |
| 5 | TRIP13 | thyroid hormone receptor interactor 13 | 071539 | 028310 | 145506 | 6, 38, 23 |
| 5 | TIFAB | TIFA inhibitor | 255833 | 251380 | 181965 | 2, 22, 44 |
| 5 | TIGD6 | tigger transposable element derived 6 | 164296 | 155850 | 113716 | 36, 24, 10 |
| 5 | TMED7- | TMED7-TICAM2 readthrough | 251201 | 145780 | 243414 | |
| | TICAM2 | | | | | |
| 5 | TNFAIP8 | TNF alpha induced protein 8 | 145779 | 172869 | 133835 | 30, 5, 4 |
| 5 | TNIP1 | TNFAIP3 interacting protein 1 | 145901 | 211445 | 197043 | 21, 34, 36 |
| 5 | TICAM2 | toll like receptor adaptor molecule 2 | 243414 | 251201 | 134970 | 14, |
| 5 | TRAPPC13 | trafficking protein particle complex 13 | 113597 | 113595 | 253251 | 29, 13, 42 |
| 5 | TCERG1 | transcription elongation regulator 1 | 113649 | 091010 | 173250 | 11, 12, 22 |
| 5 | TCF7 | transcription factor 7 (T-cell specific, HMG-box) | 081059 | 213585 | 113558 | 39, 22, 34 |
| 5 | TGFBI | transforming growth factor beta induced | 120708 | 145826 | 113658 | 10, 45, 17 |
| 5 | TRPC7 | transient receptor potential cation channel subfamily | 069018 | 271824 | 152377 | 10, 28, 38 |
| | | C member 7 | | | | |
| 5 | TMCO6 | transmembrane and coiled-coil domains 6 | 113119 | 131495 | 113141 | 31, 9, 21 |
| 5 | TMED7 | transmembrane p24 trafficking protein 7 | 134970 | 243414 | 129596 | 42, 24, 39 |
| 5 | TMED9 | transmembrane p24 trafficking protein 9 | 184840 | 146067 | 027847 | 28, 12, 35 |
| 5 | TMEM161B | transmembrane protein 161B | 164180 | 134480 | 081189 | 18, 36, 22 |
| 5 | TMEM167A | transmembrane protein 167A | 174695 | 205464 | 152422 | 34, 31, 42 |
| 5 | TMEM171 | transmembrane protein 171 | 157111 | 157107 | 164325 | 36, 37, 17 |
| 5 | TMEM173 | transmembrane protein 173 | 184584 | 283288 | 131508 | 7, 5, 36 |
| 5 | TMEM174 | transmembrane protein 174 | 164325 | 157111 | 251493 | 17, 44, |
| 5 | TMEM232 | transmembrane protein 232 | 186952 | 112893 | 164209 | 10, 29, 30 |
| 5 | TMEM267 | transmembrane protein 267 | 151881 | 151882 | 172244 | 1, 4, 31 |
| 5 | TNPO1 | transportin 1 | 083312 | 178175 | 157107 | 45, 2, 39 |
| 5 | TCOF1 | treacle ribosome biogenesis factor 1 | 070814 | 183876 | 019582 | 43, 13, 18 |
| 5 | TRIO | trio Rho guanine nucleotide exchange factor | 038382 | 039139 | 281325 | 31, 22, 6 |
| 5 | TRIM23 | tripartite motif containing 23 | 113595 | 113593 | 113597 | 8, 26, 7 |
| 5 | TRIM36 | tripartite motif containing 36 | 152503 | 080709 | 164219 | 38, 40, 31 |
| 5 | TRIM41 | tripartite motif containing 41 | 146063 | 146054 | 204628 | 39, 26, 28 |
| 5 | TRIM52 | tripartite motif containing 52 | 183718 | 204628 | 230178 | 9, 2, 15 |
| 5 | TRIM7 | tripartite motif containing 7 | 146054 | 182613 | 146063 | 34, 43, 16 |
| 5 | THG1L | tRNA-histidine guanylyltransferase 1 like | 113272 | 187658 | 155858 | 37, 15, 31 |
| 5 | TBCA | tubulin folding cofactor A | 171530 | 171540 | 132842 | |
| 5 | TPPP | tubulin polymerization promoting protein | 171368 | 112877 | 206077 | 29, 8, 18 |
| 5 | UQCRQ | ubiquinol-cytochrome c reductase complex III subunit VII | 164405 | 164404 | 164406 | 15, 29, 7 |
| 5 | UBE2B | ubiquitin conjugating enzyme E2 B | 119048 | 006837 | 237190 | 6, 30, 22 |
| 5 | UBE2D2 | ubiquitin conjugating enzyme E2 D2 | 131508 | 184584 | 171604 | 4, 7, 44 |
| 5 | UBE2QL1 | ubiquitin conjugating enzyme E2 Q family like 1 | 215218 | 133398 | 037474 | 31, 2, 14 |
| 5 | UBTD2 | ubiquitin domain containing 2 | 168246 | 214360 | 174705 | 6, 12, 4 |
| 5 | UIMC1 | ubiquitin interaction motif containing 1 | 087206 | 160883 | 113761 | 21, 9, 37 |
| 5 | UBLCP1 | ubiquitin like domain containing CTD phosphatase 1 | 164332 | 145860 | 113302 | 11, 1, 6 |
| 5 | UGT3A1 | UDP glycosyltransferase family 3 member A1 | 145626 | 152611 | 168671 | 17, 38, 24 |
| 5 | UGT3A2 | UDP glycosyltransferase family 3 member A2 | 168671 | 145626 | 164187 | 39, 38, 18 |
| 5 | UNC5A | unc-5 netrin receptor A | 113763 | 048140 | 160883 | 27, 14, 8 |
| 5 | UTP15 | UTP15, small subunit processome component | 164338 | 164331 | 214944 | 3, 13, 45 |
| 5 | VCAN | versican | 038427 | 152422 | 145681 | 45, 18, 12 |
| 5 | VDAC1 | voltage dependent anion channel 1 | 213585 | 113583 | 081059 | 15, 13, 35 |
| 5 | WDR36 | WD repeat domain 36 | 134987 | 145777 | 152495 | 9, 7, 22 |
| 5 | WDR41 | WD repeat domain 41 | 164253 | 113231 | 171540 | 43, 1, 3 |
| 5 | WDR55 | WD repeat domain 55 | 120314 | 113141 | 256453 | 13, 45, 39 |
| 5 | WDR70 | WD repeat domain 70 | 082068 | 113569 | 168621 | 43, 13, 9 |
| 5 | WNT8A | Wnt family member 8A | 061492 | 031003 | 112981 | |
| 5 | WWC1 | WW and C2 domain containing 1 | 113645 | 145934 | 113643 | 21, 3, 27 |
| 5 | XRCC4 | X-ray repair cross complementing 4 | 152422 | 174695 | 038427 | 10, 7, 5 |
| 5 | YIPF5 | Yip1 domain family member 5 | 145817 | 158497 | 183775 | 45, 26, 43 |
| 5 | YTHDC2 | YTH domain containing 2 | 047188 | 212122 | 080709 | 10, 11, 29 |
| 5 | ZFP2 | ZFP2 zinc finger protein | 198939 | 178338 | 178187 | 23, 38, 17 |
| 5 | ZFP62 | ZFP62 zinc finger protein | 196670 | 131446 | 113303 | 31, 39, 40 |
| 5 | ZBED3 | zinc finger BED-type containing 3 | 132846 | 164252 | 113231 | 7, 17, 30 |
| 5 | ZBED8 | zinc finger BED-type containing 8 | 221886 | 145861 | 164609 | 13, 28, 15 |
| 5 | ZRSR1 | Zinc finger CCCH-type, RNA binding motif and | 212643 | 129625 | 172795 | |
| | | serine/arginine rich 1 | | | | |
| 5 | ZCCHC10 | zinc finger CCHC-type containing 10 | 155329 | 072364 | 170606 | 4, 45, 22 |
| 5 | ZCCHC9 | zinc finger CCHC-type containing 9 | 131732 | 131730 | 172497 | 34, 7, 1 |
| 5 | ZDHHC11 | zinc finger DHHC-type containing 11 | 188818 | 206077 | 028310 | 18, 22, 19 |
| 5 | ZDHHC11B | zinc finger DHHC-type containing 11B | 206077 | 171368 | 188818 | 1, 31, 18 |
| 5 | ZFYVE16 | zinc finger FYVE-type containing 16 | 039319 | 164299 | 152380 | |
| 5 | ZMAT2 | zinc finger matrin-type 2 | 146007 | 112855 | 204970 | 11, 31, 5 |
| 5 | ZNF131 | zinc finger protein 131 | 172262 | 177721 | 177453 | 43, 22, 38 |
| 5 | ZNF300 | zinc finger protein 300 | 145908 | 237693 | 279109 | 8, 25, 12 |
| 5 | ZNF346 | zinc finger protein 346 | 113761 | 087206 | 160867 | 40, 45, 39 |
| 5 | ZNF354A | zinc finger protein 354A | 169131 | 113240 | 178338 | 26, 13, 28 |
| 5 | ZNF354B | zinc finger protein 354B | 178338 | 169131 | 198939 | |
| 5 | ZNF354C | zinc finger protein 354C | 177932 | 234284 | 087116 | 6, 25, 12 |
| 5 | ZNF366 | zinc finger protein 366 | 178175 | 049883 | 083312 | 42, 39, 32 |
| 5 | ZNF454 | zinc finger protein 454 | 178187 | 198939 | 113262 | 37, 38, 23 |
| 5 | ZNF474 | zinc finger protein 474 | 164185 | 113083 | 250803 | 42, 18, 38 |
| 5 | ZNF608 | zinc finger protein 608 | 168916 | 151292 | 155324 | 18, 12, 22 |
| 5 | ZNF622 | zinc finger protein 622 | 173545 | 183654 | 154153 | 18, 9, 6 |
| 5 | ZNF879 | zinc finger protein 879 | 234284 | 113262 | 177932 | 31, 22, 25 |
| 5 | ZFR | zinc finger RNA binding protein | 056097 | 150712 | 113387 | 1, 26, 11 |
| 5 | ZSWIM6 | zinc finger SWIM-type containing 6 | 130449 | 188725 | 068796 | 22, 20, 14 |
| 6 | AGPAT1 | 1-acylglycerol-3-phosphate O-acyltransferase 1 | 204310 | 241404 | 204308 | 2, 35, 9 |
| 6 | AGPAT4 | 1-acylglycerol-3-phosphate O-acyltransferase 4 | 026652 | 085511 | 185345 | 40, 24, 8 |
| 6 | DNPH1 | 2′-deoxynucleoside 5′-phosphate N-hydrolase 1 | 112667 | 112659 | 146216 | 29, 15, 33 |
| 6 | HMGCLL1 | 3-hydroxymethyl-3-methylglutaryl-CoA lyase like 1 | 146151 | 187871 | 112175 | 8, 15, 28 |
| 6 | HTR1B | 5-hydroxytryptamine receptor 1B | 135312 | 112706 | 269964 | 8, |
| 6 | HTR1E | 5-hydroxytryptamine receptor 1E | 168830 | 135316 | 135346 | |
| 6 | NT5DC1 | 5′-nucleotidase domain containing 1 | 178425 | 111816 | 123500 | 29, 22, 2 |
| 6 | NT5E | 5′-nudeotidase ecto | 135318 | 112837 | 135317 | 45, 40, 42 |
| 6 | AHI1 | Abelson helper integration site 1 | 135541 | 118513 | 171408 | 31, 1, 26 |
| 6 | ABHD16A | abhydrolase domain containing 16A | 204427 | 204428 | 204422 | 9, 5, 26 |
| 6 | ABRACL | ABRA C-terminal like | 146386 | 135597 | 112406 | 7, 1, 39 |
| 6 | AIM1 | absent in melanoma 1 | 112297 | 283623 | 130347 | 7, 32, 16 |
| 6 | ACAT2 | acetyl-CoA acetyltransferase 2 | 120437 | 146457 | 120438 | 21, 26, 41 |
| 6 | ARMT1 | acidic residue methyltransferase 1 | 146476 | 155906 | 120262 | 45, 31, 2 |
| 6 | ASCC3 | activating signal cointegrator 1 complex subunit 3 | 112249 | 112246 | 164418 | 29, 26, 1 |
| 6 | ATF6B | activating transcription factor 6 beta | 213676 | 168477 | 204315 | 40, 18, 13 |
| 6 | ABT1 | activator of basal transcription 1 | 146109 | 182952 | 181315 | 3, 22, 31 |
| 6 | ACOT13 | acyl-CoA thioesterase 13 | 112304 | 111802 | 112308 | 3, 29, 10 |
| 6 | ADAT2 | adenosine deaminase, tRNA specific 2 | 189007 | 146416 | 034693 | 22, 40, 29 |
| 6 | AMD1 | adenosylmethionine decarboxylase 1 | 123505 | 155111 | 155115 | 42, 33, 8 |
| 6 | AK9 | adenylate kinase 9 | 155085 | 112365 | 112367 | 31, 23, 42 |
| 6 | ADGRB3 | adhesion G protein-coupled receptor B3 | 135298 | 188107 | 168216 | 8, 31, 2 |
| 6 | ADGRF1 | adhesion G protein-coupled receptor F1 | 153292 | 069122 | 146072 | 42, 24, 17 |
| 6 | ADGRF2 | adhesion G protein-coupled receptor F2 | 164393 | 198087 | 153294 | 20, 35, 8 |
| 6 | ADGRF4 | adhesion G protein-coupled receptor F4 | 153294 | 164393 | 124818 | 24, 45, 13 |
| 6 | ADGRF5 | adhesion G protein-coupled receptor F5 | 069122 | 112818 | 153292 | |
| 6 | ADGRG6 | adhesion G protein-coupled receptor G6 | 112414 | 009844 | 010818 | 32, 43, 26 |
| 6 | AGER | advanced glycosylation end-product specific receptor | 204305 | 204308 | 204304 | 20, 11, 22 |
| 6 | AFDN | afadin, adherens junction formation factor | 130396 | 203690 | 125337 | |
| 6 | AKAP12 | A-kinase anchoring protein 12 | 131016 | 120254 | 181472 | 26, 43, 11 |
| 6 | AKAP7 | A-kinase anchoring protein 7 | 118507 | 079819 | 118520 | 8, 25, 18 |
| 6 | AKIRIN2 | akirin 2 | 135334 | 135336 | 118434 | 39, 22, 41 |
| 6 | AARS2 | alanyl-tRNA synthetase 2, mitochondrial | 124608 | 146221 | 249481 | 21, 23, 12 |
| 6 | ALDH5A1 | aldehyde dehydrogenase 5 family member A1 | 112294 | 112293 | 137261 | 29, 22, 11 |
| 6 | ALDH8A1 | aldehyde dehydrogenase 8 family member A1 | 118514 | 118515 | 112339 | 13, 17, 19 |
| 6 | AIF1 | allograft inflammatory factor 1 | 204472 | 204475 | 204469 | 15, 5, 2 |
| 6 | ATAT1 | alpha tubulin acetyltransferase 1 | 137343 | 204568 | 204564 | 8, 26, 24 |
| 6 | ADTRP | androgen dependent TFPI regulating protein | 111863 | 205269 | 095951 | 43, 37, 16 |
| 6 | AIG1 | androgen induced 1 | 146416 | 010818 | 189007 | 10, 4, 1 |
| 6 | ADGB | androglobin | 118492 | 118508 | 164506 | 10, 42, 30 |
| 6 | ANKS1A | ankyrin repeat and sterile alpha motif domain containing 1A | 064999 | 064995 | 124678 | 36, 26, 35 |
| 6 | ANKRD6 | ankyrin repeat domain 6 | 135299 | 025039 | 083099 | 31, 45, 34 |
| 6 | ANKRD66 | ankyrin repeat domain 66 | 230062 | 146070 | 112818 | 42, 40, 20 |
| 6 | ASF1A | anti-silencing function 1A histone chaperone | 111875 | 111877 | 111879 | 22, 31, 11 |
| 6 | APOBEC2 | apolipoprotein B mRNA editing enzyme catalytic subunit 2 | 124701 | 112212 | 001167 | 25, 15, 26 |
| 6 | APOM | apolipoprotein M | 204444 | 204463 | 204439 | 19, 29, 41 |
| 6 | ARFGEF3 | ARFGEF family member 3 | 112379 | 112378 | 254440 | 28, 33, 29 |
| 6 | ARG1 | arginase 1 | 118520 | 118507 | 112282 | 19, 5, 10 |
| 6 | RARS2 | arginyl-tRNA synthetase 2, mitochondrial | 146282 | 164414 | 135336 | 34, 9, 1 |
| 6 | ARMC12 | armadillo repeat containing 12 | 157343 | 096060 | 196748 | |
| 6 | ARMC2 | armadillo repeat containing 2 | 118690 | 118689 | 080546 | 38, 1, 2 |
| 6 | ATXN1 | ataxin 1 | 124788 | 137198 | 230873 | 34, 43, 31 |
| 6 | ABCC10 | ATP binding cassette subfamily C member 10 | 124574 | 171467 | 171462 | |
| 6 | ABCF1 | ATP binding cassette subfamily F member 1 | 204574 | 204576 | 204569 | 21, 37, 40 |
| 6 | ATP6V1G2- | ATP6V1G2-DDX39B readthrough (NMD candidate) | 254870 | 204511 | 213760 | |
| | DDX39B | | | | | |
| 6 | ATP6V1G2 | ATPase H+ transporting V1 subunit G2 | 213760 | 198563 | 204498 | 26, 8, 22 |
| 6 | ARID1B | AT-rich interaction domain 1B | 049618 | 074771 | 215712 | 40, 11, 9 |
| 6 | ATG5 | autophagy related 5 | 057663 | 085377 | 057657 | 11, 22, 6 |
| 6 | BAK1 | BCL2 antagonist/killer 1 | 030110 | 213588 | 096433 | 21, 5, 44 |
| 6 | BAG2 | BCL2 associated athanogene 2 | 112208 | 112200 | 112210 | 11, 9, 44 |
| 6 | BAG6 | BCL2 associated athanogene 6 | 204463 | 204469 | 204444 | 38, 41, 26 |
| 6 | BCLAF1 | BCL2 associated transcription factor 1 | 029363 | 146410 | 135525 | 22, 45, 24 |
| 6 | BEND3 | BEN domain containing 3 | 178409 | 130349 | 164494 | 20, 27, 28 |
| 6 | BEND6 | BEN domain containing 6 | 151917 | 151914 | 168116 | 24, 2, 8 |
| 6 | B3GALT4 | beta-1,3-galactosyltransferase 4 | 235863 | 231500 | 227057 | 1, 31, 38 |
| 6 | B3GAT2 | beta-1,3-glucuronyltransferase 2 | 112309 | 112305 | 119900 | 14, 8, 45 |
| 6 | BLOC1S5 | biogenesis of lysosomal organelles complex 1 subunit 5 | 188428 | 259040 | 265818 | 22, 37, 24 |
| 6 | BPHL | biphenyl hydrolase like | 137274 | 137275 | 137267 | 17, 27, 31 |
| 6 | BLOC1S5- | BLOC1S5-TXNDC5 readthrough (NMD candidate) | 259040 | 239264 | 188428 | 43, 21, 35 |
| | TXNDC5 | | | | | |
| 6 | BVES | blood vessel epicardial substance | 112276 | 187772 | 132429 | 29, 11, 13 |
| 6 | BMP5 | bone morphogenetic protein 5 | 112175 | 146151 | 124749 | 15, 32, 23 |
| 6 | BMP6 | bone morphogenetic protein 6 | 153162 | 168566 | 239264 | 45, 5, 27 |
| 6 | BCKDHB | branched chain keto acid dehydrogenase E1 subunit beta | 083123 | 112742 | 112773 | 42, 5, 27 |
| 6 | BRPF3 | bromodomain and PHD finger containing 3 | 096070 | 156711 | 180316 | 5, 4, 11 |
| 6 | BRD2 | bromodomain containing 2 | 204256 | 204257 | 204252 | 39, 21, 36 |
| 6 | BACH2 | BTB domain and CNC homolog 2 | 112182 | 135355 | 135341 | 22, 41, 39 |
| 6 | BTBD9 | BTB domain containing 9 | 183826 | 156639 | 124767 | 26, 8, 25 |
| 6 | BTNL2 | butyrophilin like 2 | 204290 | 204296 | 204287 | |
| 6 | BTN1A1 | butyrophilin subfamily 1 member A1 | 124557 | 112763 | 182952 | 22, |
| 6 | BTN2A1 | butyrophilin subfamily 2 member A1 | 112763 | 111801 | 124557 | 26, 39, 30 |
| 6 | BTN2A2 | butyrophilin subfamily 2 member A2 | 124508 | 186470 | 026950 | 36, 42, 39 |
| 6 | BTN3A1 | butyrophilin subfamily 3 member A1 | 026950 | 124508 | 111801 | 42, 36, 39 |
| 6 | BTN3A2 | butyrophilin subfamily 3 member A2 | 186470 | 158406 | 124508 | 36, 39, 30 |
| 6 | BTN3A3 | butyrophilin subfamily 3 member A3 | 111801 | 026950 | 112763 | 36, 39, 37 |
| 6 | BYSL | bystin like | 112578 | 124641 | 112576 | 34, 21, 3 |
| 6 | CAPN11 | calpain 11 | 137225 | 137216 | 262179 | 38, 26, 39 |
| 6 | PKIB | cAMP-dependent protein kinase inhibitor beta | 135549 | 111897 | 164434 | 29, 32, 26 |
| 6 | CAGE1 | cancer antigen 1 | 164304 | 124783 | 124784 | 38, 10, 33 |
| 6 | CNR1 | cannabinoid receptor 1 | 118432 | 118434 | 111880 | 8, 25, 22 |
| 6 | CNPY3 | canopy FGF signaling regulator 3 | 137161 | 171611 | 124713 | 41, 5, 27 |
| 6 | CMTR1 | cap methyltransferase 1 | 137200 | 112130 | 198937 | |
| 6 | CAP2 | CAP, adenylate cyclase-associated protein, 2 (yeast) | 112186 | 112183 | 137414 | 25, 15, 8 |
| 6 | CARMIL1 | capping protein regulator and myosin 1 linker 1 | 079691 | 283467 | 079689 | 29, 16, 20 |
| 6 | CSNK2B | casein kinase 2 beta | 204435 | 204438 | 263020 | 41, 27, 5 |
| 6 | CASP8AP2 | caspase 8 associated protein 2 | 118412 | 112159 | 135355 | 45, 18, 25 |
| 6 | CITED2 | Cbp/p300 interacting transactivator with Glu/Asp rich | 164442 | 164440 | 135577 | 29, 11, 6 |
| | | carboxy-terminal domain 2 | | | | |
| 6 | CCR6 | C-C motif chemokine receptor 6 | 112486 | 213066 | 166984 | 30, 36, 22 |
| 6 | CD109 | CD109 molecule | 156535 | 119899 | 111799 | 29, 13, 45 |
| 6 | CD164 | CD164 molecule | 135535 | 183137 | 185250 | 39, 45, 42 |
| 6 | CD2AP | CD2 associated protein | 198087 | 146072 | 164393 | 4, 16, 22 |
| 6 | CD24 | CD24 molecule | 272398 | 130348 | 130349 | |
| 6 | CD83 | CD83 molecule | 112149 | 180537 | 008083 | 5, 22, 2 |
| 6 | CDKAL1 | CDK5 regulatory subunit associated protein 1 like 1 | 145996 | 112242 | 124766 | 42, 18, 41 |
| 6 | CDC40 | cell division cycle 40 | 168438 | 112290 | 053328 | 42, 23, 9 |
| 6 | CDC5L | cell division cycle 5 like | 096401 | 249481 | 196284 | 43, 7, 34 |
| 6 | CENPQ | centromere protein Q | 031691 | 146085 | 203972 | 31, 37, 21 |
| 6 | CENPW | centromere protein W | 203760 | 066651 | 146374 | 34, 3, 29 |
| 6 | CEP162 | centrosomal protein 162 | 135315 | 135324 | 112837 | 10, 6, 15 |
| 6 | CEP57L1 | centrosomal protein 57 like 1 | 183137 | 080546 | 135535 | 29, 5, 3 |
| 6 | CEP85L | centrosomal protein 85 like | 111860 | 196376 | 198523 | |
| 6 | CLIC1 | chloride intracellular channel 1 | 213719 | 213722 | 204410 | 34, 37, 35 |
| 6 | CLIC5 | chloride intracellular channel 5 | 112782 | 124813 | 001561 | |
| 6 | CDYL | chromodomain Y-like | 153046 | 198721 | 124787 | 26, 9, 29 |
| 6 | C6orf1 | chromosome 6 open reading frame 1 | 186577 | 137309 | 272325 | 26, 21, 7 |
| 6 | C6orf10 | chromosome 6 open reading frame 10 | 204296 | 204301 | 204290 | 38, 14, |
| 6 | C6orf106 | chromosome 6 open reading frame 106 | 196821 | 124664 | 124562 | 1, 9, 14 |
| 6 | C6orf118 | chromosome 6 open reading frame 118 | 112539 | 112531 | 112541 | 42, 38, 20 |
| 6 | C6orf120 | chromosome 6 open reading frame 120 | 185127 | 184465 | 130024 | |
| 6 | C6orf132 | chromosome 6 open reading frame 132 | 188112 | 137413 | 048545 | 3, 23, 16 |
| 6 | C6orf136 | chromosome 6 open reading frame 136 | 204564 | 137343 | 204560 | 5, 29, 25 |
| 6 | C6orf141 | chromosome 6 open reading frame 141 | 197261 | 203972 | 112077 | |
| 6 | C6orf15 | chromosome 6 open reading frame 15 | 204542 | 261272 | 204540 | |
| 6 | C6orf163 | chromosome 6 open reading frame 163 | 203872 | 111850 | 272514 | 36, 17, 23 |
| 6 | C6orf201 | chromosome 6 open reading frame 201 | 185689 | 145975 | 198721 | 38, 19, |
| 6 | C6orf203 | chromosome 6 open reading frame 203 | 130349 | 272398 | 178409 | 31, 10, 39 |
| 6 | C6orf222 | chromosome 6 open reading frame 222 | 189325 | 180316 | 010030 | 4, 3, 16 |
| 6 | C6orf223 | chromosome 6 open reading frame 223 | 181577 | 112715 | 180992 | 9, 26, 21 |
| 6 | C6orf226 | chromosome 6 open reading frame 226 | 221821 | 146223 | 171611 | 34, 6, 20 |
| 6 | C6orf229 | chromosome 6 open reading frame 229 | 260286 | 112312 | 282804 | |
| 6 | C6orf25 | Chromosome 6 open reading frame 25 | 204420 | 244355 | 204421 | 36, 13, 7 |
| 6 | C6orf47 | chromosome 6 open reading frame 47 | 204439 | 204444 | 204438 | 1, 41, 6 |
| 6 | C6orf48 | chromosome 6 open reading frame 48 | 204387 | 204388 | 204386 | |
| 6 | C6orf52 | chromosome 6 open reading frame 52 | 137434 | 111846 | 111845 | 10, 4, 15 |
| 6 | C6orf58 | chromosome 6 open reading frame 58 | 184530 | 214338 | 172673 | 18, 42, 34 |
| 6 | C6orf62 | chromosome 6 open reading frame 62 | 112308 | 112304 | 112312 | 37, 45, 40 |
| 6 | C6orf89 | chromosome 6 open reading frame 89 | 198663 | 137168 | 164530 | 42, 26, 24 |
| 6 | CFAP206 | cilia and flagella associated protein 206 | 272514 | 203872 | 213204 | 29, 38, 42 |
| 6 | CLDN20 | claudin 20 | 171217 | 029639 | 074771 | 35, 16, |
| 6 | CLVS2 | clavesin 2 | 146352 | 172594 | 186439 | 8, 10, 20 |
| 6 | CNKSR3 | CNKSR family member 3 | 153721 | 074706 | 213079 | 11, 23, 17 |
| 6 | F13A1 | coagulation factor XIIIA chain | 124491 | 124785 | 112799 | 42, 32, 1 |
| 6 | COQ3 | coenzyme Q3, methyltransferase | 132423 | 146267 | 132424 | 10, 21, 25 |
| 6 | CCHCR1 | coiled-coil alpha-helical rod protein 1 | 204536 | 204538 | 137310 | 39, 9, 38 |
| 6 | CCDC167 | coiled-coil domain containing 167 | 198937 | 137200 | 112139 | 2, 15, 34 |
| 6 | CCDC170 | coiled-coil domain containing 170 | 120262 | 146476 | 091831 | 36, 30, 40 |
| 6 | CCDC28A | coiled-coil domain containing 28A | 024862 | 279968 | 203734 | 43, 29, 15 |
| 6 | CLPS | colipase | 137392 | 204140 | 197753 | 28, 4, 36 |
| 6 | CLPSL1 | colipase like 1 | 204140 | 196748 | 137392 | 38, |
| 6 | CLPSL2 | colipase like 2 | 196748 | 157343 | 204140 | 31, 38, |
| 6 | COL9A1 | collagen type IX alpha 1 chain | 112280 | 082293 | 082269 | 11, 6, 12 |
| 6 | COL10A1 | collagen type X alpha 1 chain | 123500 | 178425 | 187189 | 6, 18, 28 |
| 6 | COL11A2 | collagen type XI alpha 2 chain | 204248 | 223865 | 204231 | 11, 6, 2 |
| 6 | COL12A1 | collagen type XII alpha 1 chain | 111799 | 156535 | 112695 | 11, 6, 7 |
| 6 | COL19A1 | collagen type XIX alpha 1 chain | 082293 | 168216 | 112280 | 30, 6, 39 |
| 6 | COL21A1 | collagen type XXI alpha 1 chain | 124749 | 112175 | 151914 | 15, 1, 42 |
| 6 | C2 | complement C2 | 166278 | 204371 | 204366 | 19, 36, 10 |
| 6 | C4A | complement C4A (Rodgers blood group) | 244731 | 204344 | 279546 | 19, 26, 1 |
| 6 | C4B | complement C4B (Chido blood group) | 224389 | 279546 | 231852 | 26, 31, 19 |
| 6 | CFB | complement factor B | 243649 | 244255 | 204356 | 19, 4, 44 |
| 6 | CTGF | connective tissue growth factor | 118523 | 197594 | 079931 | 45, 10, 11 |
| 6 | CPNE5 | copine 5 | 124772 | 255587 | 137168 | |
| 6 | CDSN | corneodesmosin | 204539 | 204540 | 204538 | 29, 18, 15 |
| 6 | CTAGE9 | CTAGE family member 9 | 236761 | 180658 | 197594 | 40, 5, 6 |
| 6 | CUL7 | cullin 7 | 044090 | 124541 | 137171 | 43, 27, 7 |
| 6 | CUL9 | cullin 9 | 112659 | 112658 | 112667 | 43, 39, 22 |
| 6 | CUTA | cutA divalent cation tolerance homolog | 112514 | 112511 | 197283 | 29, 30, 31 |
| 6 | CONC | cyclin C | 112237 | 228439 | 112238 | 4, 13, 3 |
| 6 | CCND3 | cyclin D3 | 112576 | 112578 | 137413 | 34, 39, 36 |
| 6 | CDK19 | cyclin dependent kinase 19 | 155111 | 004809 | 123505 | 26, 38, 33 |
| 6 | CDKN1A | cyclin dependent kinase inhibitor 1A | 124762 | 112081 | 255587 | 20, 3, 1 |
| 6 | CRIP3 | cysteine rich protein 3 | 146215 | 137204 | 171467 | 21, 22, 40 |
| 6 | CRISP1 | cysteine rich secretory protein 1 | 124812 | 170950 | 214643 | 38, 33, |
| 6 | CRISP2 | cysteine rich secretory protein 2 | 124490 | 112077 | 096006 | 38, 8, 7 |
| 6 | CRISP3 | cysteine rich secretory protein 3 | 096006 | 124490 | 170950 | 42, 34, 6 |
| 6 | CYB5R4 | cytochrome b5 reductase 4 | 065615 | 203877 | 135324 | 4, 22, 5 |
| 6 | COX7A2 | cytochrome c oxidase subunit 7A2 | 112695 | 111799 | 112697 | 31, 7, 15 |
| 6 | CYP21A2 | cytochrome P450 family 21 subfamily A member 2 | 231852 | 224389 | 168477 | 2, 40, 23 |
| 6 | CYP39A1 | cytochrome P450 family 39 subfamily A member 1 | 146233 | 172348 | 153291 | 10, 29, 26 |
| 6 | DDO | D-aspartate oxidase | 203797 | 053328 | 004809 | 17, 14, 35 |
| 6 | DDX43 | DEAD-box helicase 43 | 080007 | 203907 | 164430 | 24, 38, 30 |
| 6 | DHX16 | DEAH-box helicase 16 | 204560 | 204564 | 146112 | 3, 26, 38 |
| 6 | DAXX | death domain associated protein | 204209 | 236104 | 237649 | 40, 13, 30 |
| 6 | DXO | decapping exoribonudease | 204348 | 204351 | 204344 | |
| 6 | PDSS2 | decaprenyl diphosphate synthase subunit 2 | 164494 | 178409 | 112320 | 43, 42, 24 |
| 6 | DEF6 | DEF6, guanine nucleotide exchange factor | 023892 | 065029 | 112033 | 7, 39, 3 |
| 6 | DEFB110 | defensin beta 110 | 203970 | 214642 | 180872 | 38, |
| 6 | DEFB112 | defensin beta 112 | 180872 | 203970 | 226733 | |
| 6 | DEFB113 | defensin beta 113 | 214642 | 177684 | 203970 | |
| 6 | DEFB114 | defensin beta 114 | 177684 | 214643 | 214642 | |
| 6 | DEFB133 | defensin beta 133 | 214643 | 124812 | 177684 | |
| 6 | DEK | DEK proto-oncogene | 124795 | 165097 | 137393 | 13, 45, 9 |
| 6 | DLL1 | delta like canonical Notch ligand 1 | 198719 | 130023 | 112584 | |
| 6 | DLK2 | delta like non-canonical Notch ligand 2 | 171462 | 124574 | 137221 | 9, 33, 30 |
| 6 | DSE | dermatan sulfate epimerase | 111817 | 187189 | 189241 | 11, 26, 23 |
| 6 | DSP | desmoplakin | 096696 | 124784 | 168566 | 24, 30, 18 |
| 6 | DPPA5 | developmental pluripotency associated 5 | 203909 | 135314 | 203908 | |
| 6 | DDX39B | DExD-box helicase 39B | 198563 | 204511 | 213760 | 39, 44, 12 |
| 6 | DPCR1 | diffuse panbronchiolitis critical region 1 | 168631 | 196260 | 204544 | 37, 28, 2 |
| 6 | DDAH2 | dimethylarginine dimethylaminohydrolase 2 | 213722 | 204421 | 213719 | 41, 12, 29 |
| 6 | DDR1 | discoidin domain receptor tyrosine kinase 1 | 204580 | 137331 | 213780 | |
| 6 | DCBLD1 | discoidin, CUB and LCCL domain containing 1 | 164465 | 282218 | 047932 | |
| 6 | DAAM2 | dishevelled associated activator of morphogenesis 2 | 146122 | 164627 | 124615 | 26, 8, 35 |
| 6 | DACT2 | dishevelled binding antagonist of beta catenin 2 | 164488 | 153303 | 112562 | 32, 44, 14 |
| 6 | POLH | DNA polymerase eta | 170734 | 124571 | 172432 | 21, 22, 45 |
| 6 | DOPEY1 | dopey family member 1 | 083097 | 118420 | 281446 | 40, 31, 23 |
| 6 | DCDC2 | doublecortin domain containing 2 | 146038 | 152954 | 146049 | 1, 31, 19 |
| 6 | DUSP22 | dual specificity phosphatase 22 | 112679 | 172426 | 137265 | 36, 31, 21 |
| 6 | DNAH8 | dynein axonemal heavy chain 8 | 124721 | 124767 | 112164 | 38, 22, 33 |
| 6 | DYNLT1 | dynein light chain Tctex-type 1 | 146425 | 146433 | 164674 | 29, 43, 31 |
| 6 | DST | dystonin | 151914 | 124749 | 151917 | 13, 26, 4 |
| 6 | DTNBP1 | dystrobrevin binding protein 1 | 047579 | 008083 | 007944 | 10, 22, 31 |
| 6 | E2F3 | E2F transcription factor 3 | 112242 | 172197 | 145996 | |
| 6 | ENPP1 | ectonucleotide pyrophosphatase/phosphodiesterase 1 | 197594 | 236761 | 118523 | 7, 29, 11 |
| 6 | ENPP3 | ectonucleotide pyrophosphatase/phosphodiesterase 3 | 154269 | 112282 | 180658 | 42, 39, 10 |
| 6 | ENPP4 | ectonucleotide pyrophosphatase/phosphodiesterase 4 (putative) | 001561 | 112782 | 112796 | 29, 22, 8 |
| 6 | ENPP5 | ectonucleotide pyrophosphatase/phosphodiesterase 5 (putative) | 112796 | 001561 | 172348 | 29, 24, 42 |
| 6 | EEF1E1- | EEF1E1-BLOC1S5 readthrough (NMD candidate) | 265818 | 188428 | 124802 | |
| | BLOC1S5 | | | | | |
| 6 | EFHC1 | EF-hand domain containing 1 | 096093 | 170915 | 065308 | 38, 30, 31 |
| 6 | EGFL8 | EGF like domain multiple 8 | 241404 | 258388 | 204310 | 26, 35, 3 |
| 6 | ELOVL2 | ELOVL fatty acid elongase 2 | 197977 | 153157 | 224531 | 26, 11, 29 |
| 6 | ELOVL4 | ELOVL fatty acid elongase 4 | 118402 | 198478 | 281602 | 39, 45, 8 |
| 6 | ELOVL5 | ELOVL fatty acid elongase 5 | 012660 | 137270 | 001084 | 24, 39, 45 |
| 6 | ERVFRD-1 | Endogenous retrovirus group FRD member 1 | 244476 | 224531 | 111859 | 29, 32, 10 |
| 6 | EDN1 | endothelin 1 | 078401 | 095951 | 112137 | 43, 45, 13 |
| 6 | ECI2 | enoyl-CoA delta isomerase 2 | 198721 | 185689 | 153046 | 43, 33, 25 |
| 6 | EPHA7 | EPH receptor A7 | 135333 | 135341 | 172469 | 29, 11, 12 |
| 6 | ECT2L | epithelial cell transforming 2 like | 203734 | 024862 | 135597 | 42, 20, 14 |
| 6 | EPM2A | EPM2A, laforin glucan phosphatase | 112425 | 152818 | 280184 | 31, 22, 20 |
| 6 | ERMARD | ER membrane associated RNA degradation | 130023 | 184786 | 198719 | 40, 42, 3 |
| 6 | EPB41L2 | erythrocyte membrane protein band 4.1 like 2 | 079819 | 256162 | 118507 | 15, 42, 25 |
| 6 | ESR1 | estrogen receptor 1 | 091831 | 120262 | 131018 | 44, 27, 25 |
| 6 | ECHDC1 | ethylmalonyl-CoA decarboxylase 1 | 093144 | 118518 | 255330 | 11, 13, 22 |
| 6 | ETV7 | ETS variant 7 | 010030 | 189325 | 179165 | 2, 39, 16 |
| 6 | EHMT2 | euchromatic histone lysine methyltransferase 2 | 204371 | 204385 | 166278 | 12, 29, 26 |
| 6 | EEF1A1 | eukaryotic translation elongation factor 1 alpha 1 | 156508 | 135297 | 119899 | 21, 12, 9 |
| 6 | EEF1E1 | eukaryotic translation elongation factor 1 epsilon 1 | 124802 | 265818 | 124786 | 10, 34, 4 |
| 6 | EXOC2 | exocyst complex component 2 | 112685 | 137265 | 188996 | |
| 6 | XPO5 | exportin 5 | 124571 | 137207 | 170734 | 24, 3, 21 |
| 6 | EYA4 | EYA transcriptional coactivator and phosphatase 4 | 112319 | 112306 | 118526 | 11, 25, 39 |
| 6 | EYS | eyes shut homolog (Drosophila) | 188107 | 118482 | 135298 | |
| 6 | EZR | ezrin | 092820 | 164674 | 130363 | 3, 16, 1 |
| 6 | FAXC | failed axon connections homolog | 146267 | 112234 | 132423 | 10, 11, 31 |
| 6 | FAM120B | family with sequence similarity 120B | 112584 | 198719 | 008018 | 13, 24, 10 |
| 6 | FAM135A | family with sequence similarity 135 member A | 082269 | 112280 | 154079 | 18, 25, 26 |
| 6 | FAM162B | family with sequence similarity 162 member B | 183807 | 196911 | 173612 | 30, 32, 2 |
| 6 | FAM184A | family with sequence similarity 184 member A | 111879 | 111875 | 111885 | 22, 1, 32 |
| 6 | FAM217A | family with sequence similarity 217 member A | 145975 | 112739 | 185689 | |
| 6 | FAM229B | family with sequence similarity 229 member B | 203778 | 074935 | 112769 | 31, 38, 2 |
| 6 | FAM26D | family with sequence similarity 26 member D | 164451 | 178033 | 111832 | 32, |
| 6 | FAM26E | family with sequence similarity 26 member E | 178033 | 173626 | 164451 | 45, 43, 32 |
| 6 | FAM26F | family with sequence similarity 26 member F | 188820 | 189241 | 173626 | 36, 20, 10 |
| 6 | FAM46A | family with sequence similarity 46 member A | 112773 | 083123 | 005700 | |
| 6 | FAM50B | family with sequence similarity 50 member B | 145945 | 168994 | 112739 | 9, 6, 22 |
| 6 | FAM65B | family with sequence similarity 65 member B | 111913 | 282804 | 283467 | 5, 36, 22 |
| 6 | FAM8A1 | family with sequence similarity 8 member A1 | 137414 | 112186 | 124789 | 37, 1, 24 |
| 6 | FAM83B | family with sequence similarity 83 member B | 168143 | 137251 | 137252 | 24, 23, 4 |
| 6 | FANCE | Fanconi anemia complementation group E | 112039 | 112033 | 198755 | 18, 32, 5 |
| 6 | FABP7 | fatty acid binding protein 7 | 164434 | 135549 | 172594 | 8, 14, 10 |
| 6 | FBXL4 | F-box and leucine rich repeat protein 4 | 112234 | 184486 | 146267 | 9, 7, 22 |
| 6 | FBXO30 | F-box protein 30 | 118496 | 280184 | 146414 | 43, 22, 44 |
| 6 | FBXO5 | F-box protein 5 | 112029 | 146469 | 112031 | 13, 22, 12 |
| 6 | FBXO9 | F-box protein 9 | 112146 | 112144 | 137270 | 24, 29, 28 |
| 6 | FRMD1 | FERM domain containing 1 | 153303 | 125337 | 164488 | 39, 36, 17 |
| 6 | FGFR10P | FGFR1 oncogene partner | 213066 | 026297 | 112486 | 38, 41, 42 |
| 6 | FRS3 | fibroblast growth factor receptor substrate 3 | 137218 | 096088 | 124593 | 3, 6, 8 |
| 6 | FNDC1 | fibronectin type III domain containing 1 | 164694 | 164691 | 112096 | 6, 15, 26 |
| 6 | FIG4 | FIG4 phosphoinositide 5-phosphatase | 112367 | 155085 | 146360 | 41, 39, 10 |
| 6 | FILIP1 | filamin A interacting protein 1 | 118407 | 112697 | 112701 | 11, 1, 15 |
| 6 | FKBP1C | FK506 binding protein 1C | 198225 | 112232 | 146166 | |
| 6 | FKBP5 | FK506 binding protein 5 | 096060 | 112041 | 157343 | 39, 42, 5 |
| 6 | FKBPL | FK506 binding protein like | 204315 | 213676 | 204314 | 29, 18, 6 |
| 6 | FLOT1 | flotillin 1 | 137312 | 196230 | 137331 | 34, 18, 29 |
| 6 | FOXC1 | forkhead box C1 | 054598 | 137273 | 112699 | 11, 10, 26 |
| 6 | FOXF2 | forkhead box F2 | 137273 | 164379 | 054598 | 9, 24, 37 |
| 6 | FOXO3 | forkhead box O3 | 118689 | 135537 | 118690 | |
| 6 | FOXP4 | forkhead box P4 | 137166 | 096264 | 112559 | 21, 37, 20 |
| 6 | FOXQ1 | forkhead box Q1 | 164379 | 188996 | 137273 | 4, 37, 33 |
| 6 | FHL5 | four and a half LIM domains 5 | 112214 | 014123 | 112218 | 38, 42, 26 |
| 6 | FUCA2 | fucosidase, alpha-L-2, plasma | 001036 | 034693 | 112419 | 3, 37, 32 |
| 6 | FUT9 | fucosyltransferase 9 | 172461 | 172469 | 014123 | 8, 14, 25 |
| 6 | FYN | FYN proto-oncogene, Src family tyrosine kinase | 010810 | 056972 | 112761 | 40, 1, 11 |
| 6 | FRK | fyn related Src family tyrosine kinase | 111816 | 249853 | 178425 | 4, 3, 18 |
| 6 | FGD2 | FYVE, RhoGEF and PH domain containing 2 | 146192 | 137409 | 137193 | 36, 1, 41 |
| 6 | GNL1 | G protein nucleolar 1 (putative) | 204590 | 204592 | 204576 | 39, 13, 3 |
| 6 | GPR31 | G protein-coupled receptor 31 | 120436 | 166984 | 112494 | |
| 6 | GPR6 | G protein-coupled receptor 6 | 146360 | 112367 | 112290 | 8, |
| 6 | GPR63 | G protein-coupled receptor 63 | 112218 | 112214 | 123545 | 18, 2, 17 |
| 6 | GPRC6A | G protein-coupled receptor class C group 6 member A | 173612 | 183807 | 185002 | 10, 17, |
| 6 | GABRR1 | gamma-aminobutyric acid type A receptor rho 1 subunit | 146276 | 146281 | 111886 | 20, 14, 10 |
| 6 | GABRR2 | gamma-aminobutyric acid type A receptor rho2 subunit | 111886 | 146276 | 198833 | 39, 37, 25 |
| 6 | GABBR1 | gamma-aminobutyric acid type B receptor subunit 1 | 204681 | 213886 | 204657 | 8, 26, 4 |
| 6 | GJA1 | gap junction protein alpha 1 | 152661 | 146350 | 025156 | 45, 24, 12 |
| 6 | GJA10 | gap junction protein alpha 10 | 135355 | 118412 | 112182 | |
| 6 | GJB7 | gap junction protein beta 7 | 164411 | 188994 | 111850 | 24, 42, 32 |
| 6 | GJE1 | Gap junction protein epsilon 1 | 203733 | 135577 | 009844 | |
| 6 | GFRAL | GDNF family receptor alpha like | 187871 | 137252 | 146151 | |
| 6 | GMDS | GDP-mannose 4,6-dehydratase | 112699 | 054598 | 145949 | 34, 16, 18 |
| 6 | GMNN | geminin, DNA replication inhibitor | 112312 | 112308 | 260286 | 34, 4, 7 |
| 6 | GTF2H4 | general transcription factor IIH subunit 4 | 213780 | 204580 | 137411 | 34, 21, 35 |
| 6 | GTF2H5 | general transcription factor IIH subunit 5 | 272047 | 122335 | 130338 | 10, 2, 33 |
| 6 | GTF3C6 | general transcription factor IIIC subunit 6 | 155115 | 123505 | 197498 | 41, 33, 21 |
| 6 | GCM1 | glial cells missing homolog 1 | 137270 | 112146 | 012660 | 32, 24, 17 |
| 6 | GCM2 | glial cells missing homolog 2 | 124827 | 111837 | 153157 | 29, |
| 6 | GLTSCR1L | GLTSCR1 like | 112624 | 124659 | 146223 | 22, 11, 7 |
| 6 | GLP1R | glucagon like peptide 1 receptor | 112164 | 124721 | 112167 | 35, 17, |
| 6 | GCNT2 | glucosaminyl (N-acetyl) transferase 2, I-branching enzyme | 111846 | 137203 | 137434 | 42, 24, 25 |
| | | (I blood group) | | | | |
| 6 | GFOD1 | glucose-fructose oxidoreductase domain containing 1 | 145990 | 145979 | 124523 | 39, 13, 15 |
| 6 | GRIK2 | glutamate ionotropic receptor kainate type subunit 2 | 164418 | 112249 | 085382 | 26, 11, 17 |
| 6 | GRM1 | glutamate metabotropic receptor 1 | 152822 | 146414 | 118508 | 8, 25, 14 |
| 6 | GRM4 | glutamate metabotropic receptor 4 | 124493 | 096395 | 137309 | 8, 28, 20 |
| 6 | GCLC | glutamate-cysteine ligase catalytic subunit | 001084 | 012660 | 124743 | 24, 23, 42 |
| 6 | QRSL1 | glutaminyl-tRNA synthase (glutamine-hydrolyzing)-like 1 | 130348 | 130347 | 272398 | 10, 45, 4 |
| 6 | GPX5 | glutathione peroxidase 5 | 224586 | 198704 | 232040 | 38, |
| 6 | GPX6 | glutathione peroxidase 6 | 198704 | 187987 | 224586 | |
| 6 | GSTA1 | glutathione S-transferase alpha 1 | 243955 | 244067 | 182793 | 2, 30, 19 |
| 6 | GSTA2 | glutathione S-transferase alpha 2 | 244067 | 096092 | 243955 | 19, 38, 17 |
| 6 | GSTA3 | glutathione S-transferase alpha 3 | 174156 | 182793 | 170899 | 2, 29, 32 |
| 6 | GSTA4 | glutathione S-transferase alpha 4 | 170899 | 174156 | 112144 | 29, 2, 15 |
| 6 | GSTA5 | glutathione S-transferase alpha 5 | 182793 | 243955 | 174156 | |
| 6 | GNMT | glycine N-methyltransferase | 124713 | 137161 | 124587 | 19, 36, 33 |
| 6 | GLYATL3 | glycine-N-acyltransferase like 3 | 203972 | 031691 | 197261 | 44, |
| 6 | CGA | glycoprotein hormones, alpha polypeptide | 135346 | 168830 | 188994 | 31, 32, 11 |
| 6 | GINM1 | glycoprotein integral membrane 1 | 055211 | 131013 | 186625 | 1, 40, 17 |
| 6 | GPLD1 | glycosylphosphatidylinositol specific phospholipase D1 | 112293 | 124532 | 112294 | 21, 19, 22 |
| 6 | GLO1 | glyoxalase I | 124767 | 183826 | 124721 | 13, 45, 43 |
| 6 | GOPC | golgi associated PDZ and coiled-coil motif containing | 047932 | 164465 | 153989 | 11, 22, 1 |
| 6 | GPANK1 | G-patch domain and ankyrin repeats 1 | 204438 | 204439 | 204435 | 29, 9, 31 |
| 6 | GPSM3 | G-protein signaling modulator 3 | 213654 | 204304 | 204301 | 41, 5, 36 |
| 6 | GTPBP2 | GTP binding protein 2 | 172432 | 170734 | 124688 | 9, 24, 29 |
| 6 | GMPR | guanosine monophosphate reductase | 137198 | 007944 | 124788 | 3, 18, 34 |
| 6 | GUCA1A | guanylate cyclase activator 1A | 048545 | 188112 | 214732 | 14, 38, 12 |
| 6 | GUCA1B | guanylate cyclase activator 1B | 112599 | 214732 | 048544 | 14, 25, 10 |
| 6 | GVQW2 | GVQW motif containing 2 | 279968 | 135540 | 024862 | 32, 23, 22 |
| 6 | HBS1L | HBS1 like translational GTPase | 112339 | 118514 | 118513 | 39, 13, 43 |
| 6 | HDDC2 | HD domain containing 2 | 111906 | 111907 | 135547 | |
| 6 | HECA | hdc homolog, cell cycle regulator | 112406 | 146386 | 164440 | 29, 1, 22 |
| 6 | HSP90AB1 | heat shock protein 90 alpha family class B member 1 | 096384 | 112759 | 157593 | 7, 21, 35 |
| 6 | HSPA1L | heat shock protein family A (Hsp70) member 1 like | 204390 | 204392 | 204389 | 38, 31, 10 |
| 6 | HSPA1A | heat shock protein family A (Hsp70) member 1A | 204389 | 204390 | 204388 | 36, 13, 42 |
| 6 | HSPA1B | heat shock protein family A (Hsp70) member 1B | 204388 | 204389 | 204387 | 13, 36, 4 |
| 6 | HSF2 | heat shock transcription factor 2 | 025156 | 152661 | 111897 | 34, 11, 10 |
| 6 | HACE1 | HECT domain and ankyrin repeat containing E3 ubiquitin | 085382 | 164418 | 187772 | 31, 42, 39 |
| | | protein ligase 1 | | | | |
| 6 | HEBP2 | heme binding protein 2 | 051620 | 262543 | 135540 | 33, 21, 1 |
| 6 | HFE | hemochromatosis | 010704 | 187837 | 197061 | 36, 4, 42 |
| 6 | HS3ST5 | heparan sulfate-glucosamine 3-sulfotransferase 5 | 249853 | 196591 | 111816 | 10, |
| 6 | HDGFL1 | hepatoma derived growth factor-like 1 | 112273 | 172179 | 152954 | 38, 33, 8 |
| 6 | HEY2 | hes related family bHLH transcription factor with | 135547 | 111906 | 111912 | 45, 18, 2 |
| | | YRPW motif 2 | | | | |
| 6 | HMGA1 | high mobility group AT-hook 1 | 137309 | 124493 | 186577 | |
| 6 | HMGN3 | high mobility group nucleosomal binding domain 3 | 118418 | 146247 | 135338 | 31, 29, 30 |
| 6 | HMGN4 | high mobility group nucleosomal binding domain 4 | 182952 | 124557 | 146109 | 18, 1, 31 |
| 6 | HINT3 | histidine triad nucleotide binding protein 3 | 111911 | 111912 | 066651 | 1, 42, 43 |
| 6 | HIST1H1A | histone cluster 1 H1 family member a | 124610 | 112343 | 275714 | 16, |
| 6 | HIST1H1B | histone cluster 1 H1 family member b | 184357 | 276903 | 275379 | 4, 35, 16 |
| 6 | HIST1H1C | histone cluster 1 H1 family member c | 187837 | 278272 | 010704 | 26, 7, 3 |
| 6 | HIST1H1D | histone cluster 1 H1 family member d | 124575 | 274750 | 274618 | 39, 13, 22 |
| 6 | HIST1H1E | histone cluster 1 H1 family member e | 168298 | 180573 | 158373 | 24, 17, 8 |
| 6 | HIST1H1T | histone cluster 1 H1 family member t | 187475 | 197061 | 180596 | 38, |
| 6 | HIST1H2AA | histone cluster 1 H2A family member a | 164508 | 079689 | 146047 | 38, |
| 6 | HIST1H2AB | histone cluster 1 H2A family member b | 278463 | 274267 | 276410 | 19, 38, |
| 6 | HIST1H2AC | histone cluster 1 H2A family member c | 180573 | 180596 | 168298 | 37, 9, 1 |
| 6 | HIST1H2AD | histone cluster 1 H2A family member d | 196866 | 197409 | 277224 | |
| 6 | HIST1H2AE | histone cluster 1 H2A family member e | 277075 | 273802 | 274750 | 13, 39, 7 |
| 6 | HIST1H2AG | histone cluster 1 H2A family member g | 196787 | 124635 | 276180 | 21, 9, 27 |
| 6 | HIST1H2AH | histone cluster 1 H2A family member h | 274997 | 197903 | 112812 | 7, 45, 21 |
| 6 | HIST1H2AI | histone cluster 1 H2A family member i | 196747 | 185130 | 278828 | 24, 39, 5 |
| 6 | HIST1H2AJ | histone cluster 1 H2A family member j | 276368 | 278828 | 273703 | 14, 10, |
| 6 | HIST1H2AK | histone cluster 1 H2A family member k | 275221 | 233822 | 276903 | 31, 39, 22 |
| 6 | HIST1H2AL | histone cluster 1 H2A family member l | 276903 | 275221 | 184357 | 32, |
| 6 | HIST1H2AM | histone cluster 1 H2A family member m | 278677 | 197153 | 274641 | 39, 14, 24 |
| 6 | HIST1H2BA | histone cluster 1 H2B family member a | 146047 | 164508 | 146039 | 38, |
| 6 | HIST1H2BB | histone cluster 1 H2B family member b | 276410 | 278463 | 278272 | |
| 6 | HIST1H2BC | histone cluster 1 H2B family member c | 180596 | 187475 | 180573 | |
| 6 | HIST1H2BD | histone cluster 1 H2B family member d | 158373 | 168298 | 274290 | 11, 39, 33 |
| 6 | HIST1H2BE | histone cluster 1 H2B family member e | 274290 | 158373 | 277157 | 23, 20, |
| 6 | HIST1H2BF | histone cluster 1 H2B family member f | 277224 | 196866 | 276966 | 45, 17, 33 |
| 6 | HIST1H2BG | histone cluster 1 H2B family member g | 273802 | 276966 | 277075 | 27, 13, 39 |
| 6 | HIST1H2BH | histone cluster 1 H2B family member h | 275713 | 277775 | 273983 | 7, 39, 19 |
| 6 | HIST1H2BI | histone cluster 1 H2B family member i | 278588 | 273983 | 158406 | |
| 6 | HIST1H2BJ | histone cluster 1 H2B family member j | 124635 | 181315 | 196787 | 38, |
| 6 | HIST1H2BK | histone cluster 1 H2B family member k | 197903 | 276180 | 274997 | |
| 6 | HIST1H2BL | histone cluster 1 H2B family member l | 185130 | 096654 | 196747 | 7, 44, |
| 6 | HIST1H2BM | histone cluster 1 H2B family member m | 273703 | 276368 | 197238 | 3, 23, 38 |
| 6 | HIST1H2BN | histone cluster 1 H2B family member n | 233822 | 273542 | 275221 | |
| 6 | HIST1H2BO | histone cluster 1 H2B family member o | 274641 | 278677 | 168131 | 19, |
| 6 | HIST1H3A | histone cluster 1 H3 family member a | 275714 | 124610 | 278637 | 44, 19, |
| 6 | HIST1H3B | histone cluster 1 H3 family member b | 274267 | 278705 | 278463 | 39, 19, 17 |
| 6 | HIST1H3C | histone cluster 1 H3 family member c | 278272 | 276410 | 187837 | 38, |
| 6 | HIST1H3D | histone cluster 1 H3 family member d | 197409 | 282988 | 196866 | 30, 9, 36 |
| 6 | HIST1H3E | histone cluster 1 H3 family member e | 274750 | 277075 | 124575 | |
| 6 | HIST1H3F | histone cluster 1 H3 family member f | 277775 | 275663 | 275713 | 19, 10, 35 |
| 6 | HIST1H3G | histone cluster 1 H3 family member g | 273983 | 275713 | 278588 | 5, 35, 17 |
| 6 | HIST1H3H | histone cluster 1 H3 family member h | 278828 | 196747 | 276368 | 16, 34, 32 |
| 6 | HIST1H3I | histone cluster 1 H3 family member i | 275379 | 184357 | 275126 | 22, 16, 8 |
| 6 | HIST1H3J | histone cluster 1 H3 family member j | 197153 | 275126 | 278677 | |
| 6 | HIST1H4A | histone cluster 1 H4 family member a | 278637 | 275714 | 278705 | 3, |
| 6 | HIST1H4B | histone cluster 1 H4 family member b | 278705 | 278637 | 274267 | 22, 38, 19 |
| 6 | HIST1H4C | histone cluster 1 H4 family member c | 197061 | 010704 | 187475 | 7, 5, 19 |
| 6 | HIST1H4D | histone cluster 1 H4 family member d | 277157 | 274290 | 282988 | 1, 45, |
| 6 | HIST1H4E | histone cluster 1 H4 family member e | 276966 | 277224 | 273802 | 7, 39, 33 |
| 6 | HIST1H4F | histone cluster 1 H4 family member f | 274618 | 124575 | 275663 | 5, 10, |
| 6 | HIST1H4G | histone cluster 1 H4 family member g | 275663 | 274618 | 277775 | |
| 6 | HIST1H4H | histone cluster 1 H4 family member h | 158406 | 278588 | 186470 | 23, 26, 33 |
| 6 | HIST1H4I | histone cluster 1 H4 family member i | 276180 | 196787 | 197903 | 12, 16, |
| 6 | HIST1H4J | histone cluster 1 H4 family member j | 197238 | 273703 | 273542 | 33, 12, 27 |
| 6 | HIST1H4K | histone cluster 1 H4 family member k | 273542 | 197238 | 233822 | 24, 36, 15 |
| 6 | HIST1H4L | histone cluster 1 H4 family member l | 275126 | 275379 | 197153 | |
| 6 | HDAC2 | histone deacetylase 2 | 196591 | 277443 | 249853 | 11, 45, 13 |
| 6 | HCG27 | HLA complex group 27 (non-protein coding) | 206344 | 204531 | 204525 | 5, 40, 7 |
| 6 | HIVEP1 | human immunodeficiency virus type I enhancer binding protein 1 | 095951 | 111863 | 078401 | 29, 31, 22 |
| 6 | HIVEP2 | human immunodeficiency virus type I enhancer binding protein 2 | 010818 | 112414 | 146416 | 18, 22, 25 |
| 6 | HUS1B | HUS1 checkpoint clamp component B | 188996 | 112685 | 164379 | 37, 38, |
| 6 | HSD17B8 | hydroxysteroid 17-beta dehydrogenase 8 | 204228 | 112473 | 204227 | 29, 9, 13 |
| 6 | HCRTR2 | hypecretin receptor 2 | 137252 | 168143 | 187871 | 10, 20, 8 |
| 6 | IER3 | immediate early response 3 | 137331 | 137312 | 204580 | 11, 30, 9 |
| 6 | IBTK | inhibitor of Bruton tyrosine kinase | 005700 | 112773 | 146242 | 1, 9, 29 |
| 6 | ID4 | inhibitor of DNA binding 4, HLH protein | 172201 | 137393 | 172197 | |
| 6 | ITPR3 | inositol 1,4,5-trisphosphate receptor type 3 | 096433 | 030110 | 137288 | 40, 18, 26 |
| 6 | IP6K3 | inositol hexakisphosphate kinase 3 | 161896 | 137288 | 161904 | 24, 15, 19 |
| 6 | IGF2R | insulin like growth factor 2 receptor | 197081 | 130368 | 175003 | 1, 22, 40 |
| 6 | IPCEF1 | interaction protein for cytohesin exchange factors 1 | 074706 | 112038 | 153721 | 5, 24, 8 |
| 6 | IFNGR1 | interferon gamma receptor 1 | 027697 | 164485 | 177468 | 30, 1, 13 |
| 6 | IRF4 | interferon regulatory factor 4 | 137265 | 112679 | 112685 | 35, 41, 5 |
| 6 | IRAK1BP1 | interleukin 1 receptor associated kinase 1 binding protein 1 | 146243 | 269964 | 146247 | 29, 4, 37 |
| 6 | IL17A | interleukin 17A | 112115 | 170927 | 112116 | |
| 6 | IL17F | interleukin 17F | 112116 | 112115 | 112118 | 5, |
| 6 | IL20RA | interleukin 20 receptor subunit alpha | 016402 | 182747 | 164485 | 43, 31, 16 |
| 6 | IL22RA2 | interleukin 22 receptor subunit alpha 2 | 164485 | 016402 | 027697 | 20, 32, 38 |
| 6 | IMPG1 | interphotoreceptor matrix proteoglycan 1 | 112706 | 196586 | 135312 | 14, 43, 25 |
| 6 | ICK | intestinal cell kinase | 112144 | 170899 | 112146 | 42, 11, 22 |
| 6 | IYD | iodotyrosine deicdinase | 009765 | 198729 | 120278 | 40, 17, 16 |
| 6 | JARID2 | jumonji and AT-rich interaction domain containing 2 | 008083 | 112149 | 047579 | 7, 24, 9 |
| 6 | KPNA5 | karyopherin subunit alpha 5 | 196911 | 153975 | 183807 | 38, 22, 25 |
| 6 | KATNA1 | katanin catalytic subunit A1 | 186625 | 055211 | 131023 | 10, 1, 6 |
| 6 | KLHDC3 | kelch domain containing 3 | 124702 | 124733 | 124541 | 13, 38, 8 |
| 6 | KLHL31 | kelch like family member 31 | 124743 | 001084 | 137269 | 25, 1, 18 |
| 6 | KLHL32 | kelch like family member 32 | 186231 | 123545 | 146263 | 8, 42, 40 |
| 6 | KHDC1L | KH domain containing 1 like | 256980 | 243501 | 135314 | 6, 38, |
| 6 | KHDC3L | KH domain containing 3 like, subcortical maternal | 203908 | 203909 | 203907 | 25, 38, |
| | | complex member | | | | |
| 6 | KHDC1 | KH homology domain containing 1 | 135314 | 256980 | 203909 | |
| 6 | KHDRBS2 | KH RNA binding domain containing, signal transduction | 112232 | 279892 | 198225 | 36, 12, 8 |
| | | associated 2 | | | | |
| 6 | KIAA0319 | KIAA0319 | 137261 | 112294 | 111802 | 13, 3, 8 |
| 6 | KIAA0408 | KIAA0408 | 189367 | 255330 | 214338 | |
| 6 | KIAA1586 | KIAA1586 | 168116 | 151917 | 112200 | 34, 5, 4 |
| 6 | KAAG1 | kidney associated antigen 1 | 146049 | 146038 | 124532 | 31, 4, 19 |
| 6 | KIF13A | kinesin family member 13A | 137177 | 124789 | 187566 | 18, 45, 30 |
| 6 | KIF25 | kinesin family member 25 | 125337 | 130396 | 153303 | 44, 32, |
| 6 | KIF6 | kinesin family member 6 | 164627 | 095981 | 146122 | 30, 10, 38 |
| 6 | KIFC1 | kinesin family member C1 | 237649 | 204209 | 112511 | 21, 39, 3 |
| 6 | KLC4 | kinesin light chain 4 | 137171 | 044090 | 112651 | 42, 26, 16 |
| 6 | L3MBTL3 | l(3)mbt-like 3 (Drosophila) | 198945 | 203756 | 164483 | 18, 16, 39 |
| 6 | LACE1 | lactation elevated 1 | 135537 | 112335 | 118689 | 37, 14, 17 |
| 6 | LAMA2 | laminin subunit alpha 2 | 196569 | 152894 | 146376 | 11, 15, 31 |
| 6 | LAMA4 | laminin subunit alpha 4 | 112769 | 203778 | 281613 | 1, 43, 45 |
| 6 | LATS1 | large tumor suppressor kinase 1 | 131023 | 186625 | 278899 | 1, 11, 4 |
| 6 | LCA5 | LCA5, lebercilin | 135338 | 118418 | 198478 | 45, 34, 42 |
| 6 | LRP11 | LDL receptor related protein 11 | 120256 | 120265 | 164520 | 29, 20, 9 |
| 6 | LEMD2 | LEM domain containing 2 | 161904 | 161896 | 096395 | 26, 43, 27 |
| 6 | LGSN | lengsin, lens protein with glutamine synthetase domain | 146166 | 198225 | 112245 | 14, 27, 44 |
| 6 | LRFN2 | leucine rich repeat and fibronectin type III domain | 156564 | 124615 | 124602 | 8, 3, 36 |
| | | containing 2 | | | | |
| 6 | LRRC1 | leucine rich repeat containing 1 | 137269 | 124743 | 146147 | 32, 4, 26 |
| 6 | LRRC73 | leucine rich repeat containing 73 | 204052 | 137221 | 171453 | 38, 31, 34 |
| 6 | LST1 | leukocyte specific transcript 1 | 204482 | 227507 | 204475 | 7, 29, 5 |
| 6 | LIN28B | lin-28 homolog B | 187772 | 085382 | 112276 | 11, 32, 12 |
| 6 | LHFPL5 | lipoma HMGIC fusion partner-like 5 | 197753 | 137392 | 096063 | 25, 8, |
| 6 | LPA | lipoprotein(a) | 198670 | 146477 | 122194 | 2, 7, 19 |
| 6 | LMBRD1 | LMBR1 domain containing 1 | 168216 | 135298 | 082293 | |
| 6 | LSM2 | LSM2 homolog, U6 small nuclear RNA and mRNA degradation | 204392 | 204394 | 204390 | 41, 15, 14 |
| | | associated | | | | |
| 6 | LTV1 | LTV1 ribosome biogenesis factor | 135521 | 257065 | 280148 | 9, 1, 4 |
| 6 | LY6G5B | lymphocyte antigen 6 complex, locus G5B | 240053 | 263020 | 204428 | 40, 23, 30 |
| 6 | LY6G5C | lymphocyte antigen 6 complex, locus G5C | 204428 | 240053 | 204427 | 28, 36, 39 |
| 6 | LY6G6C | lymphocyte antigen 6 complex, locus G6C | 204421 | 204420 | 213722 | 35, 15, 27 |
| 6 | LY6G6D | lymphocyte antigen 6 complex, locus G6D | 244355 | 255552 | 204420 | 33, |
| 6 | LY6G6E | Lymphocyte antigen 6 complex, locus G6E | 255552 | 250641 | 244355 | 24, 8, |
| 6 | LY6G6F | lymphocyte antigen 6 complex, locus G6F | 204424 | 204422 | 250641 | 36, 16, 19 |
| 6 | LY86 | lymphocyte antigen 86 | 112799 | 124491 | 124782 | 22, 30, 21 |
| 6 | LTA | lymphotoxin alpha | 226979 | 204498 | 232810 | 41, 30, 21 |
| 6 | LTB | lymphotoxin beta | 227507 | 232810 | 204482 | 41, 21, 36 |
| 6 | LYRM2 | LYR motif containing 2 | 083099 | 135299 | 112159 | 11, 31, 40 |
| 6 | LYRM4 | LYR motif containing 4 | 214113 | 219607 | 145982 | 41, 14, 20 |
| 6 | KDM1B | lysine demethylase 1B | 165097 | 137364 | 124795 | 40, 5, 22 |
| 6 | MB21D1 | Mab-21 domain containing 1 | 164430 | 080007 | 135297 | 36, 13, 9 |
| 6 | MAD2L1BP | MAD2L1 binding protein | 124688 | 172432 | 172426 | |
| 6 | MFSD4B | major facilitator superfamily domain containing 4B | 173214 | 112394 | 009413 | |
| 6 | HLA-A | major histocompatibility complex, class I, A | 206503 | 204632 | 066379 | 36, 1, 16 |
| 6 | HLA-B | major histocompatibility complex, class I, B | 234745 | 204525 | 204520 | |
| 6 | HLA-C | major histocompatibility complex, class I, C | 204525 | 206344 | 234745 | |
| 6 | HLA-E | major histocompatibility complex, class I, E | 204592 | 241370 | 204590 | 1, 41, 36 |
| 6 | HLA-F | major histocompatibility complex, class I, F | 204642 | 204644 | 204632 | 36, 22, 41 |
| 6 | HLA-G | major histocompatibility complex, class I, G | 204632 | 204642 | 206503 | 32, 16, 39 |
| 6 | HLA-DMA | major histocompatibility complex, class II, DM alpha | 204257 | 248993 | 204256 | 41, 30, 20 |
| 6 | HLA-DMB | major histocompatibility complex, class II, DM beta | 242574 | 168394 | 248993 | 30, 36, 1 |
| 6 | HLA-DOA | major histocompatibility complex, class II, DO alpha | 204252 | 204256 | 231389 | 22, 7, 21 |
| 6 | HLA-DOB | major histocompatibility complex, class II, DO beta | 241106 | 232629 | 250264 | 41, 21, 22 |
| 6 | HLA-DPA1 | major histocompatibility complex, class II, DP alpha 1 | 231389 | 204252 | 223865 | 41, 30, 21 |
| 6 | HLA-DPB1 | major histocompatibility complex, class II, DP beta 1 | 223865 | 231389 | 204248 | 41, 22, 21 |
| 6 | HLA-DQA1 | major histocompatibility complex, class II, DQ alpha 1 | 196735 | 196126 | 179344 | |
| 6 | HLA-DQA2 | major histocompatibility complex, class II, DQ alpha 2 | 237541 | 179344 | 232629 | |
| 6 | HLA-DQB1 | major histocompatibility complex, class II, DQ beta 1 | 179344 | 196735 | 237541 | 41, 36, 4 |
| 6 | HLA-DQB2 | major histocompatibility complex, class II, DQ beta 2 | 232629 | 237541 | 241106 | 4, 30, 41 |
| 6 | HLA-DRA | major histocompatibility complex, class II, DR alpha | 204287 | 204290 | 198502 | 30, 41, 22 |
| 6 | HLA-DRB1 | major histocompatibility complex, class II, DR beta 1 | 196126 | 198502 | 196735 | |
| 6 | HLA-DRB5 | major histocompatibility complex, class II, DR beta 5 | 198502 | 204287 | 196126 | |
| 6 | MAK | male germ cell associated kinase | 111837 | 272162 | 124827 | 14, 13, 18 |
| 6 | MEA1 | male-enhanced antigen 1 | 124733 | 112640 | 124702 | 33, 27, 31 |
| 6 | ME1 | malic enzyme 1 | 065833 | 013392 | 146250 | 10, 13, 31 |
| 6 | MDGA1 | MAM domain containing glycosylphosphatidylinositol anchor 1 | 112139 | 198937 | 156639 | 24, 8, 14 |
| 6 | MAN1A1 | mannosidase alpha class 1A member 1 | 111885 | 111879 | 146350 | 1, 11, 45 |
| 6 | MANEA | mannosidase endo-alpha | 172469 | 135333 | 172461 | |
| 6 | MAS1L | MAS1 proto-oncogene like, G protein-coupled receptor | 204687 | 204688 | 213886 | |
| 6 | MAS1 | MAS1 proto-oncogene, G protein-coupled receptor | 130368 | 146453 | 197081 | |
| 6 | MED20 | mediator complex subunit 20 | 124641 | 164663 | 112578 | 34, 13, 45 |
| 6 | MED23 | mediator complex subunit 23 | 112282 | 118520 | 154269 | 18, 26, 42 |
| 6 | MDC1 | mediator of DNA damage checkpoint 1 | 137337 | 137404 | 196230 | 43, 29, 40 |
| 6 | MEI4 | meiotic double-stranded break formation protein 4 | 269964 | 135312 | 146243 | |
| 6 | MCHR2 | melanin concentrating hormone receptor 2 | 152034 | 112238 | 112246 | 26, 8, |
| 6 | MRAP2 | melanocortin 2 receptor accessory protein 2 | 135324 | 065615 | 135315 | 34, 16, 17 |
| 6 | MBOAT1 | membrane bound O-acyltransferase domain containing 1 | 172197 | 172201 | 112242 | 18, 11, 24 |
| 6 | MEP1A | meprin A subunit alpha | 112818 | 230062 | 069122 | 16, 37, 3 |
| 6 | MTHFD1L | methylenetetrahydrofolate dehydrogenase (NADP+ | 120254 | 120278 | 131016 | 21, 45, 27 |
| | | dependent) 1-like | | | | |
| 6 | MUT | methylmalonyl-CoA mutase | 146085 | 244694 | 031691 | 29, 24, 19 |
| 6 | METTL24 | methyltransferase like 24 | 053328 | 168438 | 203797 | 27, 12, |
| 6 | MICA | MHC class I polypeptide-related sequence A | 204520 | 234745 | 204516 | 6, 13, 40 |
| 6 | MICB | MHC class I polypeptide-related sequence B | 204516 | 204520 | 204511 | 5, 36, 21 |
| 6 | MICAH | microtubule associated monooxygenase, calponin and LIM | 135596 | 135587 | 112365 | 26, 39, 1 |
| | | domain containing 1 | | | | |
| 6 | MAP7 | microtubule associated protein 7 | 135525 | 029363 | 197442 | 42, 13, 18 |
| 6 | MDN1 | midasin AAA ATPase 1 | 112159 | 083099 | 118412 | |
| 6 | MCM9 | minichromosome maintenance 9 homologous recombination | 111877 | 198523 | 111875 | 22, 37, 7 |
| | | repair factor | | | | |
| 6 | MCM3 | minichromosome maintenance complex component 3 | 112118 | 112116 | 170915 | 21, 39, 12 |
| 6 | MCUR1 | mitochondrial calcium uniporter regulator 1 | 050393 | 010017 | 180537 | 34, 29, 1 |
| 6 | MTCH1 | mitochondrial carrier 1 | 137409 | 164530 | 146192 | 34, 26, 40 |
| 6 | MCCD1 | mitochondrial coiled-coil domain 1 | 204511 | 204516 | 198563 | 17, 16, |
| 6 | MTFR2 | mitochondrial fission regulator 2 | 146410 | 171408 | 029363 | 3, 22, 13 |
| 6 | MPC1 | mitochondrial pyruvate carrier 1 | 060762 | 198818 | 071242 | 15, 45, 11 |
| 6 | MRPL14 | mitochondrial ribosomal protein L14 | 180992 | 181577 | 137216 | 25, 3, 34 |
| 6 | MRPL18 | mitochondrial ribosomal protein L18 | 112110 | 120438 | 146453 | 2, 30, 37 |
| 6 | MRPL2 | mitochondrial ribosomal protein L2 | 112651 | 137171 | 112655 | 43, 29, 6 |
| 6 | MRPS10 | mitochondrial ribosomal protein S10 | 048544 | 112599 | 124496 | 13, 3, 30 |
| 6 | MRPS18A | mitochondrial ribosomal protein S18A | 096080 | 172426 | 112715 | 21, 34, 35 |
| 6 | MRPS18B | mitochondrial ribosomal protein S18B | 204568 | 204569 | 137343 | 30, 1, 29 |
| 6 | MTRF1L | mitochondrial translational release factor 1 like | 112031 | 112029 | 091844 | 42, 17, 15 |
| 6 | MTO1 | mitochondrial tRNA translation optimization 1 | 135297 | 164430 | 156508 | 23, 36, 40 |
| 6 | MAPK13 | mitogen-activated protein kinase 13 | 156711 | 112062 | 096070 | 29, 18, 20 |
| 6 | MAPK14 | mitogen-activated protein kinase 14 | 112062 | 112053 | 156711 | 4, 1, 39 |
| 6 | MAP3K4 | mitogen-activated protein kinase kinase kinase 4 | 085511 | 122194 | 026652 | 30, 4, 29 |
| 6 | MAP3K5 | mitogen-activated protein kinase kinase kinase 5 | 197442 | 135525 | 112357 | 1, 22, 40 |
| 6 | MAP3K7 | mitogen-activated protein kinase kinase kinase 7 | 135341 | 112182 | 135333 | 11, 40, 45 |
| 6 | MMS22L | MMS22 like, DNA repair protein | 146263 | 186231 | 184486 | 9, 24, 10 |
| 6 | MOCS1 | molybdenum cofactor synthesis 1 | 124615 | 146122 | 156564 | 15, 26, 29 |
| 6 | MOXD1 | monooxygenase DBH like 1 | 079931 | 118523 | 079950 | 35, 10, 11 |
| 6 | MLN | motilin | 096395 | 161904 | 124493 | 37, |
| 6 | MRS2 | MRS2, magnesium transporter | 124532 | 146049 | 112293 | 29, 11, 22 |
| 6 | MSH5- | MSH5-SAPCD1 readthrough (NMD candidate) | 255152 | 204410 | 228727 | 39, 29, 38 |
| | SAPCD1 | | | | | |
| 6 | MUC21 | mucin 21, cell surface associated | 204544 | 168631 | 261272 | 13, 24, 30 |
| 6 | MUC22 | mucin 22 | 261272 | 204544 | 204542 | 14, |
| 6 | MLIP | muscular LMNA interacting protein | 146147 | 137269 | 137251 | 15, 26, 10 |
| 6 | MSH5 | mutS homolog 5 | 204410 | 213719 | 255152 | 39, 29, 38 |
| 6 | MYB | MYB proto-oncogene, transcription factor | 118513 | 112339 | 135541 | |
| 6 | MYCT1 | myc target 1 | 120279 | 131018 | 146469 | 43, 45, 1 |
| 6 | MOG | myelin oligodendrocyte glycoprotein | 204655 | 204657 | 204644 | 8, 17, 15 |
| 6 | MDFI | MyoD family inhibitor | 112559 | 137166 | 112561 | 12, 32, 4 |
| 6 | MYLK4 | myosin light chain kinase family member 4 | 145949 | 112699 | 124535 | 11, 18, 4 |
| 6 | MYLIP | myosin regulatory light chain interacting protein | 007944 | 047579 | 137198 | 29, 32, 26 |
| 6 | MYO6 | myosin VI | 196586 | 112701 | 112706 | 33, 11, 23 |
| 6 | MARCKS | myristoylated alanine rich protein kinase C substrate | 277443 | 251258 | 196591 | 11, 15, 20 |
| 6 | NQO2 | NAD(P)H quinone dehydrogenase 2 | 124588 | 124570 | 137275 | 34, 29, 9 |
| 6 | NDUFAF4 | NADH: ubiquinone oxidoreductase complex assembly factor 4 | 123545 | 112218 | 186231 | 29, 8, 25 |
| 6 | NOX3 | NADPH oxidase 3 | 074771 | 171217 | 049618 | 38, |
| 6 | NCR2 | natural cytotoxicity triggering receptor 2 | 096264 | 124731 | 137166 | 7, |
| 6 | NCR3 | natural cytotoxicity triggering receptor 3 | 204475 | 204482 | 204472 | 41, 5, 22 |
| 6 | NELFE | negative elongation factor complex member E | 204356 | 243649 | 204351 | 34, 43, 21 |
| 6 | NEDD9 | neural precursor cell expressed, developmentally | 111859 | 244476 | 205269 | 42, 45, 22 |
| | | down-regulated 9 | | | | |
| 6 | NEU1 | neuraminidase 1 | 204386 | 204387 | 204385 | 23, 2, 35 |
| 6 | NRSN1 | neurensin 1 | 152954 | 112273 | 146038 | 8, 31, 17 |
| 6 | NRN1 | neuritin 1 | 124785 | 145982 | 124491 | 34, 31, 6 |
| 6 | NMBR | neuromedin B receptor | 135577 | 164442 | 203733 | |
| 6 | NKAPL | NFKB activating protein like | 189134 | 187626 | 197062 | 31, 14, 2 |
| 6 | NFKBIE | NFKB inhibitor epsilon | 146232 | 157593 | 178233 | 41, 21, 9 |
| 6 | NFKBIL1 | NFKB inhibitor like 1 | 204498 | 213760 | 226979 | 18, 5, 26 |
| 6 | NHLRC1 | NHL repeat containing E3 ubiquitin protein ligase 1 | 187566 | 137177 | 137364 | 28, 38, 12 |
| 6 | NHSL1 | NHS like 1 | 135540 | 051620 | 279968 | 3, 16, 29 |
| 6 | NOTCH4 | notch 4 | 204301 | 213654 | 204296 | 26, 18, 32 |
| 6 | NCOA7 | nuclear receptor coactivator 7 | 111912 | 135547 | 111911 | 7, 42, 31 |
| 6 | NR2E1 | nuclear receptor subfamily 2 group E member 1 | 112333 | 081087 | 112335 | 8, 14, 32 |
| 6 | NFYA | nuclear transcription factor Y subunit alpha | 001167 | 124701 | 161911 | 11, 31, 1 |
| 6 | NOL7 | nucleolar protein 7 | 225921 | 124523 | 010017 | 29, 5, 26 |
| 6 | NUP153 | nucleoporin 153 | 124789 | 137414 | 137177 | 22, 32, 7 |
| 6 | NUP43 | nucleoporin 43 | 120253 | 278899 | 120265 | 29, 18, 34 |
| 6 | NUDT3 | nudix hydrolase 3 | 272325 | 186577 | 270800 | 29, 20, 26 |
| 6 | NRM | nurim (nuclear envelope membrane protein) | 137404 | 146112 | 137337 | 9, 27, 25 |
| 6 | NUS1 | NUS1 dehydrodolichyl diphosphate synthase subunit | 153989 | 047932 | 196376 | 26, 6, 4 |
| 6 | OARD1 | O-acyl-ADP-ribose deacylase 1 | 124596 | 124602 | 112212 | 34, 28, 10 |
| 6 | OR10C1 | olfactory receptor family 10 subfamily C member 1 (gene/pseudogene) | 206474 | 204694 | 204688 | |
| 6 | OR11A1 | olfactory receptor family 11 subfamily A member 1 | 204694 | 251608 | 206474 | |
| 6 | OR12D1 | olfactory receptor family 12 subfamily D member 1 (gene/pseudogene) | 251608 | 280236 | 204694 | |
| 6 | OR12D2 | olfactory receptor family 12 subfamily D member 2 (gene/pseudogene) | 280236 | 112462 | 251608 | |
| 6 | OR12D3 | olfactory receptor family 12 subfamily D member 3 | 112462 | 243729 | 280236 | |
| 6 | OR14J1 | olfactory receptor family 14 subfamily J member 1 | 204695 | 204700 | 243729 | |
| 6 | OR2A4 | olfactory receptor family 2 subfamily A member 4 | 180658 | 154269 | 236761 | 16, 30, 27 |
| 6 | OR2B2 | olfactory receptor family 2 subfamily B member 2 | 168131 | 274641 | 124657 | |
| 6 | OR2B3 | olfactory receptor family 2 subfamily B member 3 | 204703 | 204704 | 204702 | |
| 6 | OR2B6 | olfactory receptor family 2 subfamily B member 6 | 124657 | 168131 | 197279 | |
| 6 | OR2H1 | olfactory receptor family 2 subfamily H member 1 | 204688 | 206474 | 204687 | |
| 6 | OR2H2 | olfactory receptor family 2 subfamily H member 2 | 204657 | 204681 | 204655 | |
| 6 | OR2J1 | olfactory receptor family 2 subfamily J member 1 (gene/pseudogene) | 204702 | 204703 | 204701 | |
| 6 | OR2J2 | olfactory receptor family 2 subfamily J member 2 | 204700 | 204701 | 204695 | 38, |
| 6 | OR2J3 | olfactory receptor family 2 subfamily J member 3 | 204701 | 204702 | 204700 | |
| 6 | OR2W1 | olfactory receptor family 2 subfamily W member 1 | 204704 | 197935 | 204703 | 38, |
| 6 | OR5V1 | olfactory receptor family 5 subfamily V member 1 | 243729 | 204695 | 112462 | |
| 6 | OLIG3 | oligodendrocyte transcription factor 3 | 177468 | 027697 | 118503 | 27, 38, 12 |
| 6 | OOEP | oocyte expressed protein | 203907 | 203908 | 080007 | 32, 5, 35 |
| 6 | OGFRL1 | opioid growth factor receptor like 1 | 119900 | 112309 | 079841 | 18, 8, |
| 6 | OPRM1 | opioid receptor mu 1 | 112038 | 091844 | 074706 | 38, 8, |
| 6 | OPN5 | opsin 5 | 124818 | 153294 | 244694 | 38, |
| 6 | ORC3 | origin recognition complex subunit 3 | 135336 | 146282 | 135334 | 26, 13, 42 |
| 6 | OFCC1 | orofacial cleft 1 candidate 1 | 181355 | 124786 | 137203 | |
| 6 | OSTM1 | osteopetrosis associated transmembrane protein 1 | 081087 | 025796 | 112333 | |
| 6 | PAK1IP1 | PAK1 interacting protein 1 | 111845 | 137434 | 111843 | 6, 33, 30 |
| 6 | PPT2 | palmitoyl-protein thioesterase 2 | 221988 | 204314 | 258388 | 26, 39, 13 |
| 6 | PACRG | PARK2 coregulated | 112530 | 185345 | 112531 | 29, 38, 30 |
| 6 | PARK2 | parkin RBR E3 ubiquitin protein ligase | 185345 | 026652 | 112530 | 38, 24, 8 |
| 6 | PNLDC1 | PARN like, ribonuclease domain containing 1 | 146453 | 112110 | 130368 | 18, 24, 28 |
| 6 | PNPLA1 | patatin like phospholipase domain containing 1 | 180316 | 096070 | 189325 | 10, 17, |
| 6 | PTCHD4 | patched domain containing 4 | 244694 | 124818 | 146085 | 42, 32, 38 |
| 6 | PBX2 | PBX homeobox 2 | 204304 | 204305 | 213654 | 40, 29, 18 |
| 6 | PI16 | peptidase inhibitor 16 | 164530 | 198663 | 137409 | 43, 15, 10 |
| 6 | PM20D2 | peptidase M20 domain containing 2 | 146281 | 154548 | 146276 | 22, 31, 32 |
| 6 | PPIL1 | peptidylprolyl isomerase like 1 | 137168 | 124772 | 198663 | 4, 21, 13 |
| 6 | PPIL4 | peptidylprolyl isomerase like 4 | 131013 | 178199 | 055211 | 30, 1, 43 |
| 6 | PPIL6 | peptidylprolyl isomerase like 6 | 185250 | 135535 | 135587 | 23, 38, 3 |
| 6 | PRPH2 | peripherin 2 | 112619 | 024048 | 124659 | 25, 43, 14 |
| 6 | PEX3 | peroxisomal biogenesis factor 3 | 034693 | 189007 | 001036 | |
| 6 | PEX6 | peroxisomal biogenesis factor 6 | 124587 | 124713 | 112640 | 1, 21, 9 |
| 6 | PEX7 | peroxisomal biogenesis factor 7 | 112357 | 197442 | 182747 | 43, 10, 16 |
| 6 | PXT1 | peroxisomal, testis specific 1 | 179165 | 010030 | 112078 | 38, 17, |
| 6 | PPARD | peroxisome proliferator activated receptor delta | 112033 | 023892 | 112039 | 43, 32, 27 |
| 6 | PERP | PERP, TP53 apoptosis effector | 112378 | 118503 | 112379 | 13, 42, 4 |
| 6 | PHF1 | PHD finger protein 1 | 112511 | 237649 | 112514 | 26, 38, 33 |
| 6 | PHF10 | PHD finger protein 10 | 130024 | 185127 | 184786 | 1, 22, 29 |
| 6 | PHF3 | PHD finger protein 3 | 118482 | 112245 | 188107 | 31, 11, 30 |
| 6 | FARS2 | phenylalanyl-tRNA synthetase 2, mitochondrial | 145982 | 214113 | 124785 | 43, 10, 6 |
| 6 | PHACTR1 | phosphatase and actin regulator 1 | 112137 | 078401 | 145979 | 22, 35, 7 |
| 6 | PHACTR2 | phosphatase and actin regulator 2 | 112419 | 001036 | 257065 | 32, 26, 1 |
| 6 | PDE10A | phosphodiesterase 10A | 112541 | 112539 | 164458 | |
| 6 | PDE7B | phosphodiesterase 7B | 171408 | 135541 | 146410 | 11, 31, 25 |
| 6 | PGM3 | phosphoglucomutase 3 | 013375 | 281446 | 013392 | 45, 6, 38 |
| 6 | PGK2 | phosphoglycerate kinase 2 | 170950 | 096006 | 124812 | 38, 25, 8 |
| 6 | PLN | phospholamban | 198523 | 111860 | 111877 | 15, 25, 45 |
| 6 | PLA2G7 | phospholipase A2 group VII | 146070 | 180113 | 230062 | 30, 36, 32 |
| 6 | PGBD1 | piggyBac transposable element derived 1 | 137338 | 276302 | 235109 | 13, 43, 9 |
| 6 | PIM1 | Pim-1 proto-oncogene, serine/threonine kinase | 137193 | 146192 | 172738 | 24, 35, 22 |
| 6 | PLAGL1 | PLAG1 like zinc finger 1 | 118495 | 118491 | 169976 | 2, 32, 36 |
| 6 | PLG | plasminogen | 122194 | 198670 | 085511 | 19, 17, 36 |
| 6 | PLEKHG1 | pleckstrin homology and RhoGEF domain containing G1 | 120278 | 009765 | 120254 | 36, 22, 1 |
| 6 | PHIP | pleckstrin homology domain interacting protein | 146247 | 146243 | 118418 | |
| 6 | PNISR | PNN interacting serine and arginine rich protein | 132424 | 132423 | 123552 | |
| 6 | PKHD1 | polycystic kidney and hepatic disease 1 (autosomal recessive) | 170927 | 008196 | 112115 | 17, 2, 38 |
| 6 | POM121L2 | POM121 transmembrane nucleoporin like 2 | 158553 | 112812 | 124613 | |
| 6 | POPDC3 | popeye domain containing 3 | 132429 | 112276 | 085377 | 35, 28, 25 |
| 6 | KCTD20 | potassium channel tetramerization domain containing 20 | 112078 | 179165 | 112079 | 22, 9, 42 |
| 6 | KCNK16 | potassium two pore domain channel subfamily K member 16 | 095981 | 124780 | 164627 | 26, 28, |
| 6 | KCNK17 | potassium two pore domain channel subfamily K member 17 | 124780 | 164626 | 095981 | 11, 32, 39 |
| 6 | KCNK5 | potassium two pore domain channel subfamily K member 5 | 164626 | 112167 | 124780 | 7, 17, 1 |
| 6 | KCNQ5 | potassium voltage-gated channel subfamily Q member 5 | 185760 | 079841 | 243501 | |
| 6 | POU3F2 | POU class 3 homeobox 2 | 184486 | 146263 | 112234 | 45, 35, 12 |
| 6 | POU5F1 | POU class 5 homeobox 1 | 204531 | 137310 | 206344 | 12, 27, 37 |
| 6 | PPT2-EGFL8 | PPT2-EGFL8 readthrough | 258388 | 221988 | 241404 | 26, 35, 3 |
| 6 | PRDM1 | PR/SET domain 1 | 057657 | 057663 | 283623 | 24, 18, 22 |
| 6 | PRDM13 | PR/SET domain 13 | 112238 | 112237 | 152034 | |
| 6 | PTCRA | pre T-cell antigen receptor alpha | 171611 | 221821 | 137161 | 36, 39, 17 |
| 6 | PFDN6 | prefoldin subunit 6 | 204220 | 227057 | 237441 | 29, 24, 3 |
| 6 | PRPF4B | pre-mRNA processing factor 4B | 112739 | 145945 | 145975 | 42, 39, 7 |
| 6 | PRICKLE4 | prickle planar cell polarity protein 4 | 124593 | 137218 | 278224 | 36, 42, 15 |
| 6 | PRICKLE4 | prickle planar cell polarity protein 4 | 278224 | 124593 | 214736 | 36, 42, 15 |
| 6 | PRIM2 | primase (DNA) subunit 2 | 146143 | 112210 | 279892 | 13, 45, 10 |
| 6 | PGC | progastricsin | 096088 | 112561 | 137218 | 37, 3, 13 |
| 6 | PAQR8 | progestin and adipoQ receptor family member 8 | 170915 | 112118 | 096093 | 26, 16, 8 |
| 6 | PDCD2 | programmed cell death 2 | 071994 | 112592 | 172426 | 22, 27, 4 |
| 6 | PRL | prolactin | 172179 | 124766 | 112273 | |
| 6 | PRR18 | proline rich 18 | 176381 | 164458 | 198818 | 26, 30, 8 |
| 6 | PRR3 | proline rich 3 | 204576 | 204590 | 204574 | 13, 9, 25 |
| 6 | PRRC2A | proline rich coiled-coil 2A | 204469 | 204472 | 204463 | 21, 22, 26 |
| 6 | PNRC1 | proline rich nuclear receptor coactivator 1 | 146278 | 111880 | 154548 | 11, 5, 37 |
| 6 | PRRT1 | proline rich transmembrane protein 1 | 204314 | 204315 | 221988 | |
| 6 | PREP | prolyl endopeptidase | 085377 | 132429 | 057663 | 45, 31, 3 |
| 6 | PB0V1 | prostate and breast cancer overexpressed 1 | 254440 | 112379 | 262543 | |
| 6 | PRSS16 | protease, serine 16 | 112812 | 274997 | 158553 | 39, 13, 29 |
| 6 | PRSS35 | protease, serine 35 | 146250 | 065833 | 065609 | 43, 11, 6 |
| 6 | PSMG4 | proteasome assembly chaperone 4 | 180822 | 137285 | 137266 | |
| 6 | PSMB1 | proteasome subunit beta 1 | 008018 | 112584 | 112592 | 34, 30, 43 |
| 6 | PSMB8 | proteasome subunit beta 8 | 204264 | 204267 | 240065 | 34, 22, 5 |
| 6 | PSMB9 | proteasome subunit beta 9 | 240065 | 204264 | 168394 | 24, 18, 30 |
| 6 | PACSIN1 | protein kinase C and casein kinase substrate in neurons 1 | 124507 | 124614 | 124664 | 14, 26, 41 |
| 6 | PPP1R11 | protein phosphatase 1 regulatory inhibitor subunit 11 | 204619 | 066379 | 204618 | 35, 7, 9 |
| 6 | PPP1R14C | protein phosphatase 1 regulatory inhibitor subunit 14C | 198729 | 131019 | 009765 | 40, 29, 24 |
| 6 | PPP1R10 | protein phosphatase 1 regulatory subunit 10 | 204569 | 204574 | 204568 | 26, 7, 21 |
| 6 | PPP1R18 | protein phosphatase 1 regulatory subunit 18 | 146112 | 204560 | 137404 | 22, 41, 43 |
| 6 | PPP1R3G | protein phosphatase 1 regulatory subunit 3G | 219607 | 124787 | 214113 | 36, 19, |
| 6 | PPP2R5D | protein phosphatase 2 regulatory subunit B′delta | 112640 | 124587 | 124733 | 21, 39, 35 |
| 6 | PTK7 | protein tyrosine kinase 7 (inactive) | 112655 | 112651 | 112658 | 39, 12, 24 |
| 6 | PTP4A1 | protein tyrosine phosphatase type IVA, member 1 | 112245 | 146166 | 118482 | 9, 24, 19 |
| 6 | PTPRK | protein tyrosine phosphatase, receptor type K | 152894 | 172673 | 196569 | 30, 4, 16 |
| 6 | PCMT1 | protein-L-isoaspartate (D-aspartate) O-methyltransferase | 120265 | 120253 | 120256 | 1, 8, 13 |
| 6 | PSORS1C1 | psoriasis susceptibility 1 candidate 1 | 204540 | 204542 | 204539 | 18, 35, 32 |
| 6 | PSORS1C2 | psoriasis susceptibility 1 candidate 2 | 204538 | 204539 | 204536 | 35, 15, |
| 6 | PXDC1 | PX domain containing 1 | 168994 | 137266 | 145945 | 26, 32, 1 |
| 6 | QKI | QKI, KH domain containing RNA binding | 112531 | 112530 | 112539 | 26, 11, 8 |
| 6 | RAB23 | RAB23, member RAS oncogene family | 112210 | 112208 | 146143 | 45, 6, 44 |
| 6 | RAB32 | RAB32, member RAS oncogene family | 118508 | 152822 | 118492 | 43, 15, 35 |
| 6 | RAB44 | RAB44, member RAS oncogene family | 255587 | 124762 | 124772 | 5, 7, |
| 6 | RSPH3 | radial spoke 3 homolog | 130363 | 092820 | 164691 | 11, 38, 31 |
| 6 | RSPH4A | radial spoke head 4 homolog A | 111834 | 111832 | 153975 | 42, 30, 31 |
| 6 | RSPH9 | radial spoke head 9 homolog | 172426 | 124688 | 096080 | 43, 29, 14 |
| 6 | RGL2 | ral guanine nucleotide dissociation stimulator like 2 | 237441 | 204220 | 231925 | 40, 26, 36 |
| 6 | REPS1 | RALBP1 associated Eps domain containing 1 | 135597 | 203734 | 146386 | 31, 7, 23 |
| 6 | RANBP9 | RAN binding protein 9 | 010017 | 225921 | 050393 | 24, 18, 15 |
| 6 | RRAGD | Ras related GTP binding D | 025039 | 198833 | 135299 | 29, 26, 11 |
| 6 | RREB1 | ras responsive element binding protein 1 | 124782 | 112799 | 124783 | 35, 18, 5 |
| 6 | RIPK1 | receptor interacting serine/threonine kinase 1 | 137275 | 124588 | 137274 | 4, 13, 3 |
| 6 | RIMS1 | regulating synaptic membrane exocytosis 1 | 079841 | 119900 | 185760 | 8, 11, 40 |
| 6 | RCAN2 | regulator of calcineurin 2 | 172348 | 112796 | 146233 | 8, 29, 26 |
| 6 | RGS17 | regulator of G-protein signaling 17 | 091844 | 112031 | 112038 | 10, 23, 45 |
| 6 | RFX6 | regulatory factor X6 | 185002 | 173612 | 170162 | 28, 2, 10 |
| 6 | RMND1 | required for meiotic nuclear division 1 homolog | 155906 | 181472 | 146476 | 41, 13, 2 |
| 6 | RFPL4B | ret finger protein like 4B | 251258 | 281613 | 277443 | 38, |
| 6 | RTN4IP1 | reticulon 4 interacting protein 1 | 130347 | 112297 | 130348 | 41, 31, 10 |
| 6 | RAET1E | retinoic acid early transcript 1E | 164520 | 120256 | 203722 | 9, 36, 35 |
| 6 | RAET1G | retinoic acid early transcript 1G | 203722 | 164520 | 131015 | 30, 18, 2 |
| 6 | RAET1L | retinoic acid early transcript 1L | 155918 | 111981 | 131019 | 24, 25, |
| 6 | RXRB | retinoid X receptor beta | 204231 | 204248 | 112473 | 29, 9, 15 |
| 6 | REV3L | REV3 like, DNA directed polymerase zeta catalytic subunit | 009413 | 173214 | 056972 | 1, 43, 25 |
| 6 | RHAG | Rh-associated glycoprotein | 112077 | 197261 | 124490 | 7, 34, 5 |
| 6 | ARHGAP18 | Rho GTPase activating protein 18 | 146376 | 196569 | 203756 | 42, 45, 30 |
| 6 | RPP21 | ribonuclease P/MRP subunit p21 | 241370 | 248167 | 204592 | 43, 45, 14 |
| 6 | RPP40 | ribonuclease P/MRP subunit p40 | 124787 | 153046 | 219607 | 6, 18, 4 |
| 6 | RNASET2 | ribonuclease T2 | 026297 | 249141 | 213066 | 36, 18, 16 |
| 6 | RPL10A | ribosomal protein L10a | 198755 | 112039 | 007866 | |
| 6 | RPL7L1 | ribosomal protein L7 like 1 | 146223 | 112624 | 221821 | 30, 19, 24 |
| 6 | RPS10 | ribosomal protein S10 | 124614 | 270800 | 124507 | |
| 6 | RPS12 | ribosomal protein S12 | 112306 | 146409 | 112319 | 43, 12, 41 |
| 6 | RPS18 | ribosomal protein S18 | 231500 | 223501 | 235863 | |
| 6 | RPS6KA2 | ribosomal protein S6 kinase A2 | 071242 | 060762 | 249141 | 40, 8, 23 |
| 6 | RRP36 | ribosomal RNA processing 36 | 124541 | 124702 | 044090 | 34, 44, 37 |
| 6 | RPF2 | ribosome production factor 2 homolog | 197498 | 155115 | 112394 | 34, 4, 37 |
| 6 | RING1 | ring finger protein 1 | 204227 | 204228 | 223501 | 9, 1, 14 |
| 6 | RNF144B | ring finger protein 144B | 137393 | 124795 | 172201 | 40, 11, 42 |
| 6 | RNF146 | ring finger protein 146 | 118518 | 146374 | 093144 | 29, 11, 9 |
| 6 | RNF182 | ring finger protein 182 | 180537 | 050393 | 112149 | 8, 9, 38 |
| 6 | RNF217 | ring finger protein 217 | 146373 | 188580 | 111907 | 8, |
| 6 | RNF39 | ring finger protein 39 | 204618 | 204619 | 204616 | 18, 15, 16 |
| 6 | RNF5 | ring finger protein 5 | 204308 | 204310 | 204305 | 27, 3, 13 |
| 6 | RNF8 | ring finger protein 8 | 112130 | 065491 | 137200 | 27, 5, 38 |
| 6 | RIOK1 | RIO kinase 1 | 124784 | 164304 | 096696 | 10, 3, 9 |
| 6 | RIPPLY2 | ripply transcriptional repressor 2 | 203877 | 065609 | 065615 | 26, 28, 37 |
| 6 | RBM24 | RNA binding motif protein 24 | 112183 | 230873 | 112186 | 15, 25, 18 |
| 6 | RNGTT | RNA guanylyltransferase and 5′-phosphatase | 111880 | 118432 | 146278 | 31, 22, 42 |
| 6 | POLR1C | RNA polymerase I subunit C | 171453 | 204052 | 137207 | 1, 43, 5 |
| 6 | ROS1 | ROS proto-oncogene 1, receptor tyrosine kinase | 047936 | 170162 | 282218 | 45, 20, 10 |
| 6 | RPS10- | RPS10-NUDT3 readthrough | 270800 | 272325 | 124614 | |
| | NUDT3 | | | | | |
| 6 | RSPO3 | R-spondin 3 | 146374 | 203760 | 118518 | 1, 15, 44 |
| 6 | RUNX2 | runt related transcription factor 2 | 124813 | 283553 | 112782 | 11, 18, 27 |
| 6 | RWDD1 | RWD domain containing 1 | 111832 | 164451 | 111834 | 22, 15, 30 |
| 6 | RWDD2A | RWD domain containing 2A | 013392 | 013375 | 065833 | 31, 11, 33 |
| 6 | SASH1 | SAM and SH3 domain containing 1 | 111961 | 203727 | 111962 | 35, 1, 11 |
| 6 | SPDEF | SAM pointed domain containing ETS transcription factor | 124664 | 124507 | 196821 | 23, 27, 33 |
| 6 | SAYSD1 | SAYSVFN motif domain containing 1 | 112167 | 112164 | 164626 | 38, 11, 15 |
| 6 | SEC63 | SEC63 homolog, protein translocation regulator | 025796 | 146285 | 081087 | 18, 11, 1 |
| 6 | SCGN | secretagogin, EF-hand calcium binding protein | 079689 | 079691 | 164508 | 28, 20, 31 |
| 6 | SERAC1 | serine active site containing 1 | 122335 | 078269 | 272047 | 38, 42, 10 |
| 6 | SRSF12 | serine and arginine rich splicing factor 12 | 154548 | 146278 | 146281 | 38, 8, 27 |
| 6 | SRSF3 | serine and arginine rich splicing factor 3 | 112081 | 112079 | 124762 | 4, 7, 13 |
| 6 | SERINC1 | serine incorporator 1 | 111897 | 025156 | 135549 | 42, 39, 8 |
| 6 | STK19 | serine/threonine kinase 19 | 204344 | 204348 | 244731 | 1, 36, 2 |
| 6 | STK38 | serine/threonine kinase 38 | 112079 | 112078 | 112081 | 24, 5, 42 |
| 6 | SERPINB1 | serpin family B member 1 | 021355 | 124535 | 170542 | 7, 37, 5 |
| 6 | SERPINB6 | serpin family B member 6 | 124570 | 170542 | 124588 | 24, 10, 3 |
| 6 | SERPINB9 | serpin family B member 9 | 170542 | 021355 | 124570 | 34, 22, 21 |
| 6 | SRF | serum response factor | 112658 | 112655 | 112659 | 21, 1, 29 |
| 6 | SGK1 | serum/glucocorticoid regulated kinase 1 | 118515 | 146411 | 118514 | 45, 29, 2 |
| 6 | SESN1 | sestrin 1 | 080546 | 118690 | 183137 | 31, 38, 33 |
| 6 | SCML4 | sex comb on midleg-like 4 (Drosophila) | 146285 | 112320 | 025796 | 35, 39, 40 |
| 6 | SFT2D1 | SFT2 domain containing 1 | 198818 | 176381 | 060762 | 41, 11, 29 |
| 6 | SH3BGRL2 | SH3 domain binding glutamate rich protein like 2 | 198478 | 135338 | 118402 | 42, 11, 16 |
| 6 | SCUBE3 | signal peptide, CUB domain and EGF like domain containing 3 | 146197 | 124678 | 065029 | 40, 20, 27 |
| 6 | SSR1 | signal sequence receptor subunit 1 | 124783 | 124782 | 164304 | 30, 19, 24 |
| 6 | SOBP | sine oculis binding protein homolog | 112320 | 164494 | 146285 | 11, 34, 20 |
| 6 | SIM1 | single-minded family bHLH transcription factor 1 | 112246 | 152034 | 112249 | |
| 6 | SIRT5 | sirtuin 5 | 124523 | 145990 | 225921 | |
| 6 | SKIV2L | Ski2 like RNA helicase | 204351 | 204356 | 204348 | 3, 41, 9 |
| 6 | SMAP1 | small ArfGAP 1 | 112305 | 154079 | 112309 | 11, 22, 43 |
| 6 | SMIM13 | small integral membrane protein 13 | 224531 | 197977 | 244476 | 10, 45, 29 |
| 6 | SMIM8 | small integral membrane protein 8 | 111850 | 164411 | 203872 | |
| 6 | SMLR1 | small leucine rich protein 1 | 256162 | 164484 | 079819 | 17, 36, 19 |
| 6 | SNRPC | small nuclear ribonucleoprotein polypeptide C | 124562 | 196821 | 065060 | 43, 19, 29 |
| 6 | SNRNP48 | small nuclear ribonucleoprotein U11/U12 subunit 48 | 168566 | 096696 | 153162 | 29, 15, 26 |
| 6 | SLIMO4 | small ubiquitin-like modifier 4 | 177688 | 055208 | 178199 | 25, |
| 6 | SHPRH | SNF2 histone linker PHD RING helicase | 146414 | 118496 | 152822 | 31, 43, 39 |
| 6 | NKAIN2 | Sodium/potassium transporting ATPase interacting 2 | 188580 | 186439 | 146373 | 8, 10, 26 |
| 6 | SOGA3 | SOGA family member 3 | 214338 | 189367 | 184530 | 31, 8, 38 |
| 6 | SLC16A10 | solute carrier family 16 member 10 | 112394 | 197498 | 173214 | 29, 39, 10 |
| 6 | SLC17A1 | solute carrier family 17 member 1 | 124568 | 146039 | 124564 | 17, 19, 25 |
| 6 | SLC17A2 | solute carrier family 17 member 2 | 112337 | 124564 | 112343 | 19, 5, 17 |
| 6 | SLC17A3 | solute carrier family 17 member 3 | 124564 | 124568 | 112337 | 17, 8, 19 |
| 6 | SLC17A4 | solute carrier family 17 member 4 | 146039 | 146047 | 124568 | 16, 4, 19 |
| 6 | SLC17A5 | solute carrier family 17 member 5 | 119899 | 156508 | 156535 | 29, 42, 26 |
| 6 | SLC18B1 | solute carrier family 18 member B1 | 146409 | 112303 | 112306 | 34, 19, 40 |
| 6 | SLC2A12 | solute carrier family 2 member 12 | 146411 | 028839 | 118515 | 42, 10, 29 |
| 6 | SLC22A1 | solute carrier family 22 member 1 | 175003 | 197081 | 112499 | 19, 23, 10 |
| 6 | SLC22A16 | solute carrier family 22 member 16 | 004809 | 203797 | 155111 | 10, 38, 36 |
| 6 | SLC22A2 | solute carrier family 22 member 2 | 112499 | 175003 | 146477 | 17, 10, 32 |
| 6 | SLC22A23 | solute carrier family 22 member 23 | 137266 | 180822 | 168994 | 29, 42, 16 |
| 6 | SLC22A3 | solute carrier family 22 member 3 | 146477 | 112499 | 198670 | 11, 33, 19 |
| 6 | SLC22A7 | solute carrier family 22 member 7 | 137204 | 146216 | 146215 | 19, 17, 15 |
| 6 | SLC25A27 | solute carrier family 25 member 27 | 153291 | 146233 | 180113 | 31, 29, 1 |
| 6 | SLC26A8 | solute carrier family 26 member 8 | 112053 | 096063 | 112062 | 38, 1, 40 |
| 6 | SLC29A1 | solute carrier family 29 member 1 (Augustine blood group) | 112759 | 262179 | 096384 | 43, 2, 39 |
| 6 | SLC35A1 | solute carrier family 35 member A1 | 164414 | 213204 | 146282 | 11, 4, 22 |
| 6 | SLC35B2 | solute carrier family 35 member B2 | 157593 | 096384 | 146232 | 35, 4, 13 |
| 6 | SLC35B3 | solute carrier family 35 member B3 | 124786 | 124802 | 181355 | 31, 22, 13 |
| 6 | SLC35D3 | solute carrier family 35 member D3 | 182747 | 112357 | 016402 | 26, 20, 28 |
| 6 | SLC35F1 | solute carrier family 35 member F1 | 196376 | 153989 | 111860 | 11, 2, 8 |
| 6 | SLC39A7 | solute carrier family 39 member 7 | 112473 | 204231 | 204228 | 13, 45, 26 |
| 6 | SLC44A4 | solute carrier family 44 member 4 | 204385 | 204386 | 204371 | 42, 28, 33 |
| 6 | SNX14 | sorting nexin 14 | 135317 | 135318 | 271793 | 40, 38, 27 |
| 6 | SNX3 | sorting nexin 3 | 112335 | 112333 | 135537 | 34, 31, 29 |
| 6 | SNX9 | sorting nexin 9 | 130340 | 175048 | 078269 | 1, 45, 10 |
| 6 | SMOC2 | SPARC related modular calcium binding 2 | 112562 | 164488 | 186340 | 11, 1, 10 |
| 6 | SYNE1 | spectrin repeat containing nuclear envelope protein 1 | 131018 | 091831 | 120279 | |
| 6 | SPACA1 | sperm acrosome associated 1 | 118434 | 135334 | 118432 | 38, 8, |
| 6 | SPATS1 | spermatogenesis associated serine rich 1 | 249481 | 124608 | 096401 | 38, 42, 35 |
| 6 | SMPD2 | sphingomyelin phosphodiesterase 2 | 135587 | 185250 | 135596 | 37, 22, 14 |
| 6 | SMPDL3A | sphingomyelin phosphodiesterase acid like 3A | 172594 | 164434 | 146352 | 11, 32, 37 |
| 6 | SF3B5 | splicing factor 3b subunit 5 | 169976 | 118495 | 135604 | 29, 2, 41 |
| 6 | SUPT3H | SPT3 homolog, SAGA and STAGA complex component | 196284 | 096401 | 283553 | 2, 1, 10 |
| 6 | SCAF8 | SR-related CTD associated factor 8 | 213079 | 153721 | 146426 | 22, 1, 38 |
| 6 | SRPK1 | SRSF protein kinase 1 | 096063 | 197753 | 112053 | 42, 38, 24 |
| 6 | SOX4 | SRY-box4 | 124766 | 145996 | 172179 | 7, 19, 15 |
| 6 | STMND1 | stathmin domain containing 1 | 230873 | 124788 | 112183 | 20, |
| 6 | SAMD3 | sterile alpha motif domain containing 3 | 164483 | 198945 | 164484 | 10, 38, 36 |
| 6 | SAMD5 | sterile alpha motif domain containing 5 | 203727 | 164506 | 111961 | 11, 24, 18 |
| 6 | SDHAF4 | succinate dehydrogenase complex assembly factor 4 | 154079 | 082269 | 112305 | |
| 6 | SENP6 | SUMO1/sentrin specific peptidase 6 | 112701 | 118407 | 196586 | 31, 11, 21 |
| 6 | SOD2 | superoxide dismutase 2 | 112096 | 164694 | 146457 | 7, 21, 5 |
| 6 | SAPCD1 | suppressor APC domain containing 1 | 228727 | 255152 | 204396 | 3, 27, 33 |
| 6 | SFTA2 | surfactant associated 2 | 196260 | 137411 | 168631 | 20, 16, |
| 6 | SYNGAP1 | synaptic Ras GTPase activating protein 1 | 197283 | 112514 | 213588 | 2, 28, 14 |
| 6 | SYNJ2 | synaptojanin 2 | 078269 | 130340 | 122335 | 38, 9, 45 |
| 6 | SYCP2L | synaptonemal complex protein 2 like | 153157 | 124827 | 197977 | 29, 4, 3 |
| 6 | SNAP91 | synaptosome associated protein 91 | 065609 | 146250 | 203877 | 8, 26, 31 |
| 6 | SYNCRIP | synaptotagmin binding cytoplasmic RNA interacting protein | 135316 | 271793 | 168830 | 4, 6, 1 |
| 6 | SYTL3 | synaptotagmin like 3 | 164674 | 146425 | 092820 | 39, 42, 30 |
| 6 | STX11 | syntaxin 11 | 135604 | 169976 | 152818 | 22, 7, 1 |
| 6 | STX7 | syntaxin 7 | 079950 | 079931 | 237110 | 22, 42, 8 |
| 6 | STXBP5 | syntaxin binding protein 5 | 164506 | 118492 | 203727 | 8, |
| 6 | T | T brachyury transcription factor | 164458 | 112541 | 176381 | 20, 23, 10 |
| 6 | TAPBP | TAP binding protein | 231925 | 237441 | 236104 | 9, 26, 6 |
| 6 | TBP | TATA-box binding protein | 112592 | 008018 | 071994 | 31, 37, 18 |
| 6 | TAF11 | TATA-box binding protein associated factor 11 | 064995 | 065060 | 064999 | 39, 34, 21 |
| 6 | TAF8 | TATA-box binding protein associated factor 8 | 137413 | 112576 | 188112 | 3, 34, 29 |
| 6 | TBPL1 | TATA-box binding protein like 1 | 028839 | 118526 | 146411 | 34, 7, 38 |
| 6 | TTBK1 | tau tubulin kinase 1 | 146216 | 112667 | 137204 | 8, 27, 44 |
| 6 | TXLNB | taxilin beta | 164440 | 112406 | 164442 | 25, 15, 31 |
| 6 | TBC1D22B | TBC1 domain family member 22B | 065491 | 172738 | 112130 | 24, 42, 39 |
| 6 | TBC1D32 | TBC1 domain family member 32 | 146350 | 111885 | 152661 | 18, 42, 29 |
| 6 | TBC1D7 | TBC1 domain family member 7 | 145979 | 112137 | 145990 | 35, 34, 22 |
| 6 | TBX18 | T-box 18 | 112837 | 135315 | 135318 | |
| 6 | TAGAP | T-cell activation RhoGTPase activating protein | 164691 | 130363 | 164694 | 5, 39, 10 |
| 6 | TIAM2 | T-cell lymphoma invasion and metastasis 2 | 146426 | 213079 | 029639 | |
| 6 | TCP1 | t-complex 1 | 120438 | 120437 | 112110 | 39, 43, 13 |
| 6 | TCP10 | t-complex 10 | 203690 | 120440 | 130396 | 38, 27, 28 |
| 6 | TCP10L2 | t-complex 10-like 2 | 166984 | 112486 | 120436 | |
| 6 | TCP11 | t-complex 11 | 124678 | 064999 | 146197 | 38, 8, 10 |
| 6 | TCTE1 | t-complex-associated-testis-expressed 1 | 146221 | 272442 | 124608 | 38, 42, 27 |
| 6 | TCTE3 | t-complex-associated-testis-expressed 3 | 184786 | 130024 | 130023 | 40, 23, 2 |
| 6 | TEAD3 | TEA domain transcription factor 3 | 007866 | 198755 | 112041 | 32, 34, 12 |
| 6 | TNXB | tenascin XB | 168477 | 231852 | 213676 | 1, 2, 26 |
| 6 | TAB2 | TGF-beta activated kinase 1/MAP3K7 binding protein 2 | 055208 | 111962 | 177688 | 29, 43, 11 |
| 6 | TPMT | thiopurine S-methyltransferase | 137364 | 187566 | 165097 | 7, 40, 13 |
| 6 | TXNDC5 | thioredoxin domain containing 5 | 239264 | 153162 | 259040 | 43, 21, 35 |
| 6 | TSTD3 | thiosulfate sulfurtransferase (rhodanese)-like domain | 228439 | 123552 | 112237 | 29, 25, 23 |
| | | containing 3 | | | | |
| 6 | THBS2 | thrombospondin 2 | 186340 | 112562 | 184465 | 11, 6, 1 |
| 6 | THEMIS | thymocyte selection associated | 172673 | 184530 | 152894 | 39, 42, 36 |
| 6 | TJAP1 | tight junction associated protein 1 | 137221 | 171462 | 204052 | 24, 39, 43 |
| 6 | TNFAIP3 | TNF alpha induced protein 3 | 118503 | 177468 | 112378 | 42, 22, 39 |
| 6 | TNFRSF21 | TNF receptor superfamily member 21 | 146072 | 153292 | 198087 | 4, 42, 24 |
| 6 | TAAR1 | trace amine associated receptor 1 | 146399 | 146378 | 112299 | 37, |
| 6 | TAAR2 | trace amine associated receptor 2 | 146378 | 135569 | 146399 | |
| 6 | TAAR5 | trace amine associated receptor 5 | 135569 | 146383 | 146378 | |
| 6 | TAAR6 | trace amine associated receptor 6 | 146383 | 146385 | 135569 | |
| 6 | TAAR8 | trace amine associated receptor 8 | 146385 | 237110 | 146383 | |
| 6 | TAAR9 | trace amine associated receptor 9 (gene/pseudogene) | 237110 | 079950 | 146385 | |
| 6 | TRAF3IP2 | TRAF3 interacting protein 2 | 056972 | 009413 | 010810 | |
| 6 | TRAPPC3L | trafficking protein particle complex 3 like | 173626 | 188820 | 178033 | 7, 19, 32 |
| 6 | TCF19 | transcription factor 19 | 137310 | 204536 | 204531 | 39, 13, 3 |
| 6 | TCF21 | transcription factor 21 | 118526 | 112319 | 028839 | 32, 27, 36 |
| 6 | TFAP2A | transcription factor AP-2 alpha | 137203 | 181355 | 111846 | 32, 9, 23 |
| 6 | TFAP2B | transcription factor AP-2 beta | 008196 | 008197 | 170927 | 14, 12, 23 |
| 6 | TFAP2D | transcription factor AP-2 delta | 008197 | 226733 | 008196 | 14, 24, 8 |
| 6 | TFB1M | transcription factor B1, mitochondrial | 029639 | 146426 | 171217 | 4, 29, 6 |
| 6 | TFEB | transcription factor EB | 112561 | 112559 | 096088 | 7, 21, 22 |
| 6 | TRERF1 | transcriptional regulating factor 1 | 124496 | 048544 | 024048 | 1, 39, 3 |
| 6 | TOMM6 | translocase of outer mitochondrial membrane 6 | 214736 | 278224 | 164663 | 3, 2, 7 |
| 6 | TRAM2 | translocation associated membrane protein 2 | 065308 | 096093 | 096092 | 45, 11, 19 |
| 6 | TSPO2 | translocator protein 2 | 112212 | 124596 | 124701 | 5, |
| 6 | TMEM14A | transmembrane protein 14A | 096092 | 065308 | 244067 | 4, 2, 7 |
| 6 | TMEM14B | transmembrane protein 14B | 137210 | 111843 | 272162 | 45, 4, 2 |
| 6 | TMEM14C | transmembrane protein 14C | 111843 | 111845 | 137210 | 35, 31, 28 |
| 6 | TMEM151B | transmembrane protein 151B | 178233 | 146232 | 272442 | 26, 8, 20 |
| 6 | TMEM170B | transmembrane protein 170B | 205269 | 111859 | 111863 | 1, 29, 25 |
| 6 | TMEM181 | transmembrane protein 181 | 146433 | 130338 | 146425 | 29, 26, 12 |
| 6 | TMEM200A | transmembrane protein 200A | 164484 | 164483 | 256162 | 11, 31, 2 |
| 6 | TMEM217 | transmembrane protein 217 | 172738 | 137193 | 065491 | 4, 38, 9 |
| 6 | TMEM242 | transmembrane protein 242 | 215712 | 049618 | 175048 | 29, 1, 43 |
| 6 | TMEM244 | transmembrane protein 244 | 203756 | 146376 | 198945 | 14, |
| 6 | TMEM30A | transmembrane protein 30A | 112697 | 112695 | 118407 | 42, 13, 29 |
| 6 | TMEM63B | transmembrane protein 63B | 137216 | 180992 | 137225 | 18, 14, 35 |
| 6 | TAP1 | transporter 1, ATP binding cassette subfamily B member | 168394 | 240065 | 242574 | 36, 39, 13 |
| 6 | TAP2 | transporter 2, ATP binding cassette subfamily B member | 204267 | 250264 | 204264 | 4, 24, 37 |
| 6 | TRDN | triadin | 186439 | 146352 | 188580 | 25, 15, 26 |
| 6 | TREM1 | triggering receptor expressed on myeloid cells 1 | 124731 | 188056 | 096264 | 5, 32, 36 |
| 6 | TREM2 | triggering receptor expressed on myeloid cells 2 | 095970 | 161911 | 112195 | 1, 9, 28 |
| 6 | TREML1 | triggering receptor expressed on myeloid cells like 1 | 161911 | 001167 | 095970 | 32, |
| 6 | TREML2 | triggering receptor expressed on myeloid cells like 2 | 112195 | 095970 | 188056 | 41, 32, 5 |
| 6 | TREML4 | triggering receptor expressed on myeloid cells like 4 | 188056 | 112195 | 124731 | 8, |
| 6 | TRIM39- | TRIM39-RPP21 readthrough | 248167 | 204599 | 241370 | |
| | RPP21 | | | | | |
| 6 | TRIM10 | tripartite motif containing 10 | 204613 | 204614 | 204610 | 19, 5, 6 |
| 6 | TRIM15 | tripartite motif containing 15 | 204610 | 204613 | 234127 | 16, 13, 37 |
| 6 | TRIM26 | tripartite motif containing 26 | 234127 | 204610 | 204599 | 43, 41, 18 |
| 6 | TRIM27 | tripartite motif containing 27 | 204713 | 232040 | 197935 | 21, 3, 29 |
| 6 | TRIM31 | tripartite motif containing 31 | 204616 | 204618 | 204614 | 16, 4, 3 |
| 6 | TRIM38 | tripartite motif containing 38 | 112343 | 112337 | 124610 | 1, 22, 30 |
| 6 | TRIM39 | tripartite motif containing 39 | 204599 | 234127 | 248167 | 40, 38, 9 |
| 6 | TRIM40 | tripartite motif containing 40 | 204614 | 204616 | 204613 | 32, 16, 12 |
| 6 | TRMT11 | tRNA methyltransferase 11 homolog | 066651 | 111911 | 203760 | 11, 34, 29 |
| 6 | TPBG | trophoblast glycoprotein | 146242 | 005700 | 118420 | 11, 45, 12 |
| 6 | TSPYL1 | TSPY like 1 | 189241 | 111817 | 188820 | 11, 29, 6 |
| 6 | TSPYL4 | TSPY like 4 | 187189 | 123500 | 111817 | 8, 11, 31 |
| 6 | TTK | TTK protein kinase | 112742 | 281602 | 083123 | 39, 38, 13 |
| 6 | TULP1 | tubby like protein 1 | 112041 | 007866 | 096060 | 14, 12, 25 |
| 6 | TULP4 | tubby like protein 4 | 130338 | 272047 | 146433 | 18, 35, 1 |
| 6 | TUBB2A | tubulin beta 2A class IIa | 137267 | 137274 | 137285 | 26, 27, 21 |
| 6 | TUBB2B | tubulin beta 2B class IIb | 137285 | 137267 | 180822 | 8, 26, 12 |
| 6 | TUBB | tubulin beta class I | 196230 | 137337 | 137312 | 21, 12, 35 |
| 6 | TUBE1 | tubulin epsilon 1 | 074935 | 112761 | 203778 | 11, 38, 1 |
| 6 | TBCC | tubulin folding cofactorC | 124659 | 112619 | 112624 | 34, 28, 20 |
| 6 | TTLL2 | tubulin tyrosine ligase like 2 | 120440 | 112494 | 203690 | 38, |
| 6 | TINAG | tubulointerstitial nephritis antigen | 137251 | 146147 | 168143 | 17, 37, 3 |
| 6 | TDRD6 | tudor domain containing 6 | 180113 | 153291 | 146070 | 31, 38, 10 |
| 6 | TNF | tumor necrosis factor | 232810 | 226979 | 227507 | 5, 22, 20 |
| 6 | TPD52L1 | tumor protein D52-like 1 | 111907 | 146373 | 111906 | 23, 33, 34 |
| 6 | TDP2 | tyrosyl-DNA phosphodiesterase 2 | 111802 | 137261 | 112304 | 13, 4, 9 |
| 6 | UQCC2 | ubiquinol-cytochrome c reductase complex assembly factor 2 | 137288 | 096433 | 161896 | 6, 15, 22 |
| 6 | UBE2J1 | ubiquitin conjugating enzyme E2 J1 | 198833 | 111886 | 025039 | 22, 41, 45 |
| 6 | UBD | ubiquitin D | 213886 | 204687 | 204681 | 30, 4, 37 |
| 6 | UBR2 | ubiquitin protein ligase E3 component n-recognin 2 | 024048 | 124496 | 112619 | 31, 24, 42 |
| 6 | UBE3D | ubiquitin protein ligase E3D | 118420 | 146242 | 083097 | 29, 21, 9 |
| 6 | USP45 | ubiquitin specific peptidase 45 | 123552 | 132424 | 228439 | 6, 34, 29 |
| 6 | USP49 | ubiquitin specific peptidase 49 | 164663 | 214736 | 124641 | 14, 24, 12 |
| 6 | UFL1 | UFM1 specific ligase 1 | 014123 | 172461 | 112214 | 18, 22, 11 |
| 6 | UHRF1BP1 | UHRF1 binding protein 1 | 065060 | 124562 | 064995 | 23, 3, 43 |
| 6 | ULBP1 | UL16 binding protein 1 | 111981 | 131015 | 155918 | 9, 28, 6 |
| 6 | ULBP2 | UL16 binding protein 2 | 131015 | 203722 | 111981 | 6, 24, 22 |
| 6 | ULBP3 | UL16 binding protein 3 | 131019 | 155918 | 198729 | 3, 40, 45 |
| 6 | UNC5CL | unc-5 family C-terminal like | 124602 | 156564 | 124596 | 17, 28, 5 |
| 6 | UNC93A | unc-93 homolog A (C. elegans) | 112494 | 120436 | 120440 | 37, 19, 15 |
| 6 | UST | uranyl 2-sulfotransferase | 111962 | 111961 | 055208 | 42, 1, 11 |
| 6 | UTRN | utrophin | 152818 | 135604 | 112425 | 23, 29, 1 |
| 6 | VARS | valyl-tRNA synthetase | 204394 | 204396 | 204392 | 21, 35, 27 |
| 6 | VARS2 | valyl-tRNA synthetase 2, mitochondrial | 137411 | 213780 | 196260 | 21, 42, 8 |
| 6 | VNN1 | vanin 1 | 112299 | 146399 | 093134 | |
| 6 | VNN2 | vanin 2 | 112303 | 093134 | 146409 | |
| 6 | VNN3 | vanin 3 | 093134 | 112299 | 112303 | 42, 5, 13 |
| 6 | VEGFA | vascular endothelial growth factor A | 112715 | 096080 | 181577 | 40, 1, 19 |
| 6 | VIP | vasoactive intestinal peptide | 146469 | 120279 | 112029 | 26, 12, 8 |
| 6 | VTA1 | vesicle trafficking 1 | 009844 | 203733 | 112414 | 7, 30, 4 |
| 6 | VGLL2 | vestigial like family member 2 | 170162 | 185002 | 047936 | 25, 19, 32 |
| 6 | VWA7 | von Willebrand factor A domain containing 7 | 204396 | 228727 | 204394 | 42, 26, 37 |
| 6 | VPS52 | VPS52, GARP complex subunit | 223501 | 204227 | 231500 | 39, 24, 35 |
| 6 | WASF1 | WAS protein family member 1 | 112290 | 146360 | 168438 | 38, 8, 26 |
| 6 | WDR27 | WD repeat domain 27 | 184465 | 186340 | 185127 | 22, 39, 10 |
| 6 | WDR46 | WD repeat domain 46 | 227057 | 235863 | 204220 | 21, 13, 36 |
| 6 | WRNIP1 | Werner helicase interacting protein 1 | 124535 | 145949 | 021355 | 29, 22, 20 |
| 6 | WTAP | Wilms tumor 1 associated protein | 146457 | 112096 | 120437 | 37, 29, 24 |
| 6 | WISP3 | WNT1 inducible signaling pathway protein 3 | 112761 | 010810 | 074935 | 17, |
| 6 | YIPF3 | Yip1 domain family member 3 | 137207 | 171453 | 124571 | 27, 32, 41 |
| 6 | ZFP57 | ZFP57 zinc finger protein | 204644 | 204655 | 204642 | 32, 23, 44 |
| 6 | ZFAND3 | zinc finger AN1-type containing 3 | 156639 | 112139 | 183826 | 33, 26, 22 |
| 6 | ZBTB12 | zinc finger and BTB domain containing 12 | 204366 | 166278 | 244255 | 16, 12, |
| 6 | ZBTB2 | zinc finger and BTB domain containing 2 | 181472 | 131016 | 155906 | 40, 7, 43 |
| 6 | ZBTB22 | zinc finger and BTB domain containing 22 | 236104 | 231925 | 204209 | 30, 20, 14 |
| 6 | ZBTB24 | zinc finger and BTB domain containing 24 | 112365 | 135596 | 155085 | 4, 23, 9 |
| 6 | ZBTB9 | zinc finger and BTB domain containing 9 | 213588 | 197283 | 030110 | 18, 14, 24 |
| 6 | ZSCAN12 | zinc finger and SCAN domain containing 12 | 158691 | 189298 | 187987 | 18, 11, 13 |
| 6 | ZSCAN16 | zinc finger and SCAN domain containing 16 | 196812 | 197279 | 198315 | 1, 30, 22 |
| 6 | ZSCAN23 | zinc finger and SCAN domain containing 23 | 187987 | 158691 | 198704 | 25, 8, 38 |
| 6 | ZSCAN26 | zinc finger and SCAN domain containing 26 | 197062 | 189134 | 276302 | 36, 44, 30 |
| 6 | ZSCAN31 | zinc finger and SCAN domain containing 31 | 235109 | 137338 | 189298 | |
| 6 | ZSCAN9 | zinc finger and SCAN domain containing 9 | 137185 | 198315 | 187626 | 1, 37, 26 |
| 6 | ZBED9 | zinc finger BED-type containing 9 | 232040 | 224586 | 204713 | 38, 25, 12 |
| 6 | ZC2HC1B | zinc finger C2HC-type containing 1B | 118491 | 280148 | 118495 | 23, 38, 30 |
| 6 | ZC3H12D | zinc finger CCCH-type containing 12D | 178199 | 177688 | 131013 | 41, 22, 36 |
| 6 | ZDHHC14 | zinc finger DHHC-type containing 14 | 175048 | 215712 | 130340 | 14, 22, 18 |
| 6 | ZNF165 | zinc finger protein 165 | 197279 | 124657 | 196812 | 38, 3, 27 |
| 6 | ZNF184 | zinc finger protein 184 | 096654 | 124613 | 185130 | 22, 1, 11 |
| 6 | ZNF292 | zinc finger protein 292 | 188994 | 135346 | 164411 | |
| 6 | ZNF311 | zinc finger protein 311 | 197935 | 204713 | 204704 | 18, 32, 28 |
| 6 | ZNF318 | zinc finger protein 318 | 171467 | 146215 | 124574 | 22, 13, 21 |
| 6 | ZNF322 | zinc finger protein 322 | 181315 | 146109 | 124635 | 43, 11, 3 |
| 6 | ZNF391 | zinc finger protein 391 | 124613 | 158553 | 096654 | 42, 38, 19 |
| 6 | ZNF451 | zinc finger protein 451 | 112200 | 168116 | 112208 | 26, 11, 9 |
| 6 | ZNF76 | zinc finger protein 76 | 065029 | 146197 | 023892 | 41, 31, 32 |
| 6 | ZKSCAN3 | zinc finger with KRAB and SCAN domains 3 | 189298 | 235109 | 158691 | 15, 9, 45 |
| 6 | ZKSCAN4 | zinc finger with KRAB and SCAN domains 4 | 187626 | 137185 | 189134 | 9, 5, 41 |
| 6 | ZKSCAN8 | zinc finger with KRAB and SCAN domains 8 | 198315 | 196812 | 137185 | 42, 39, 1 |
| 6 | ZUFSP | zinc finger with UFM1 specific peptidase domain | 153975 | 111834 | 196911 | 45, 26, 7 |
| 6 | ZNRD1 | zinc ribbon domain containing 1 | 066379 | 206503 | 204619 | 7, 35, 2 |

[0062] Table 4 provides the gene information for the genes found on Chromosomes 7-9.

TABLE 4
Genes on Chromosomes 7-9

| | | | | Up | Down | Tissue |
|---|---|---|---|---|---|---|
| Chr. | Gene Symbol | Gene Name | ENSG | ENSG | ENSG | Code |
| 7 | HIBADH | 3-hydroxyisobutyrate dehydrogenase | 106049 | 106038 | 106052 | 4, 17, 31 |
| 7 | HTR5A | 5-hydroxytryptamine receptor 5A | 157219 | 157212 | 186480 | 39, 8, 38 |
| 7 | NT5C3A | 5′-nucleotidase, cytosolic IIIA | 122643 | 122642 | 164610 | 25, 4, 22 |
| 7 | ADCK2 | aarF domain containing kinase 2 | 133597 | 146966 | 090266 | 41, 22, 1 |
| 7 | ABHD11 | abhydrolase domain containing 11 | 106077 | 106089 | 165215 | 37, 27, 1 |
| 7 | ACHE | acetylcholinesterase (Cartwright blood group) | 087085 | 176125 | 169894 | 26, 8, 15 |
| 7 | ASIC3 | acid sensing ion channel subunit 3 | 213199 | 197150 | 164885 | 40, 38, 36 |
| 7 | ACTB | actin beta | 075624 | 155034 | 075618 | 43, 13, 41 |
| 7 | ACTL6B | actin like 6B | 077080 | 106327 | 172354 | 31, 28, 8 |
| 7 | ARPC1A | actin related protein 2/3 complex subunit 1A | 241685 | 185467 | 130429 | 9, 11, 35 |
| 7 | ARPC1B | actin related protein 2/3 complex subunit 1B | 130429 | 241685 | 106244 | 34, 41, 21 |
| 7 | AGK | acylglycerol kinase | 006530 | 261115 | 257093 | 35, 4, 26 |
| 7 | AOAH | acyloxyacyl hydrolase | 136250 | 011426 | 155849 | 36, 5, 39 |
| 7 | ADAM22 | ADAM metallopeptidase domain 22 | 008277 | 006634 | 075142 | 6, |
| 7 | AP1S1 | adaptor related protein complex 1 sigma 1 subunit | 106367 | 106366 | 128564 | 3, 26, 23 |
| 7 | AP4M1 | adaptor related protein complex 4 mu 1 subunit | 221838 | 166508 | 106290 | 41, 38, 11 |
| 7 | AP5Z1 | adaptor related protein complex 5 zeta 1 subunit | 242802 | 164916 | 157927 | 21, 3, 26 |
| 7 | ADCYAP1R1 | ADCYAP receptor type I | 078549 | 106128 | 164600 | 26, 8, 31 |
| 7 | AHCYL2 | adenosylhomocysteinase like 2 | 158467 | 128602 | 128578 | 16, 1, 31 |
| 7 | ADCY1 | adenylate cyclase 1 | 164742 | 122679 | 283247 | 14, 8, 15 |
| 7 | ARF5 | ADP ribosylation factor 5 | 004059 | 179562 | 106328 | 34, 13, 41 |
| 7 | ARL4A | ADP ribosylation factor like GTPase 4A | 122644 | 006747 | 006468 | 5, 29, 38 |
| 7 | AEBP1 | AE binding protein 1 | 106624 | 122678 | 106628 | 1, 39, 34 |
| 7 | AKAP9 | A-kinase anchoring protein 9 | 127914 | 127989 | 001630 | 23, 18, 4 |
| 7 | AKR1B1 | aldo-keto reductase family 1 member B | 085662 | 205060 | 198074 | 2, 17, 32 |
| 7 | AKR1B10 | aldo-keto reductase family 1 member B10 | 198074 | 085662 | 227471 | 20, 3, 13 |
| 7 | AKR1B15 | aldo-keto reductase family 1 member B15 | 227471 | 198074 | 172331 | 13, 19, 25 |
| 7 | AKR1D1 | aldo-keto reductase family 1 member D1 | 122787 | 182158 | 122779 | |
| 7 | ALKBH4 | alkB homolog 4, lysine demethylase | 160993 | 160991 | 161036 | 21, 1, 26 |
| 7 | AGMO | alkylglycerol monooxygenase | 187546 | 136267 | 106511 | 10, 45, 17 |
| 7 | AZGP1 | alpha-2-glycoprotein 1, zinc-binding | 160862 | 176402 | 106261 | 19, 33, 23 |
| 7 | AOC1 | amine oxidase, copper containing 1 | 002726 | 002933 | 055118 | |
| 7 | AIMP2 | aminoacyl tRNA synthetase complex interacting multifunctional protein 2 | 106305 | 122512 | 086232 | 21, 1, 34 |
| 7 | AASS | aminoadipate-semialdehyde synthase | 008311 | 106278 | 128610 | 12, 24, 18 |
| 7 | AMPH | amphiphysin | 078053 | 211701 | 006715 | 8, 31, 15 |
| 7 | ANLN | anillin actin binding protein | 011426 | 164542 | 136250 | 13, 8, 45 |
| 7 | ANKIB1 | ankyrin repeat and IBR domain containing 1 | 001629 | 001631 | 157259 | 18, 29, 34 |
| 7 | ANKMY2 | ankyrin repeat and MYND domain containing 2 | 106524 | 205858 | 136261 | 4, 7, 11 |
| 7 | ASB10 | ankyrin repeat and SOCS box containing 10 | 146926 | 164900 | 278685 | 15, 25, |
| 7 | ASB15 | ankyrin repeat and SOCS box containing 15 | 146809 | 128609 | 170807 | 24, 15, 38 |
| 7 | ASB4 | ankyrin repeat and SOCS box containing 4 | 005981 | 105854 | 004799 | 2, 20, 24 |
| 7 | ANKRD61 | ankyrin repeat domain 61 | 157999 | 086232 | 106346 | 16, |
| 7 | ANKRD7 | ankyrin repeat domain 7 | 106013 | 128534 | 184408 | 38, 8, 17 |
| 7 | ASZ1 | ankyrin repeat, SAM and basic leucine zipper domain containing 1 | 154438 | 105989 | 001626 | 38, |
| 7 | AGR2 | anterior gradient 2, protein disulphide isomerase family member | 106541 | 280130 | 173467 | 37, 28, 3 |
| 7 | AGR3 | anterior gradient 3, protein disulphide isomerase family member | 173467 | 106541 | 106546 | 37, 3, 20 |
| 7 | AQP1 | aquaporin 1 (Colton blood group) | 240583 | 250424 | 106128 | 39, 26, 17 |
| 7 | AMZ1 | archaelysin family metallopeptidase 1 | 174945 | 136295 | 146535 | 38, |
| 7 | ADAP1 | ArfGAP with dual PH domains 1 | 105963 | 239857 | 240230 | 16, 22, 1 |
| 7 | AGFG2 | ArfGAP with FG repeats 2 | 106351 | 166924 | 205307 | 26, 11, 36 |
| 7 | AGAP3 | ArfGAP with GTPase domain, ankyrin repeat and PH domain 3 | 133612 | 164897 | 164900 | 26, 40, 11 |
| 7 | ASL | argininosuccinate lyase | 126522 | 169919 | 249319 | 3, 9, 34 |
| 7 | ARMC10 | armadillo repeat containing 10 | 170632 | 128606 | 161048 | |
| 7 | ACTR3B | ARP3 actin related protein 3 homolog B | 133627 | 196584 | 130226 | 3, 29, 9 |
| 7 | ACTR3C | ARP3 actin-related protein 3 homolog C | 106526 | 171130 | 127399 | 26, 29, 40 |
| 7 | AHR | aryl hydrocarbon receptor | 106546 | 173467 | 283321 | 26, 43, 29 |
| 7 | ASNS | asparagine synthetase (glutamine-hydrolyzing) | 070669 | 006128 | 135175 | 21, 34, 9 |
| 7 | ATXN7L1 | ataxin 7 like 1 | 146776 | 185055 | 128536 | 30, 9, 13 |
| 7 | ABCA13 | ATP binding cassette subfamily A member 13 | 179869 | 183696 | 188730 | 42, 5, 24 |
| 7 | ABCB1 | ATP binding cassette subfamily B member 1 | 085563 | 005471 | 105784 | 2, 26, 17 |
| 7 | ABCB4 | ATP binding cassette subfamily B member 4 | 005471 | 005469 | 085563 | |
| 7 | ABCB5 | ATP binding cassette subfamily B member 5 | 004846 | 105855 | 164651 | 35, 23, 16 |
| 7 | ABCB8 | ATP binding cassette subfamily B member 8 | 197150 | 181652 | 213199 | |
| 7 | ABCF2 | ATP binding cassette subfamily F member 2 | 033050 | 278685 | 033100 | 21, 3, 26 |
| 7 | ATP5J2 | ATP synthase, H+ transporting, mitochondrial Fo complex subunit F2 | 241468 | 160917 | 198556 | |
| 7 | AGBL3 | ATP/GTP binding protein like 3 | 146856 | 122786 | 122783 | 39, 38, 3 |
| 7 | ATP5J2- | ATP5J2-PTCD1 readthrough | 248919 | 106246 | 160917 | |
| | PTCD1 | | | | | |
| 7 | ATP6V0A4 | ATPase H+ transporting V0 subunit a4 | 105929 | 157703 | 214128 | |
| 7 | ATP6V0E2 | ATPase H+ transporting V0 subunit e2 | 171130 | 106479 | 106526 | |
| 7 | ATP6V1F | ATPase H+ transporting V1 subunit F | 128524 | 135253 | 272899 | 29, 34, 2 |
| 7 | AUTS2 | autism susceptibility candidate 2 | 158321 | 198874 | 185274 | 11, 26, 18 |
| 7 | ATG9B | autophagy related 9B | 181652 | 164867 | 197150 | |
| 7 | AVL9 | AVL9 cell migration associated | 105778 | 106355 | 170852 | 26, 11, 22 |
| 7 | BAIAP2L1 | BAH associated protein 2 like 1 | 006453 | 164713 | 106236 | 37, 16, 3 |
| 7 | BBS9 | Bardet-Biedl syndrome 9 | 122507 | 164610 | 164619 | 42, 1, 38 |
| 7 | BMT2 | base methyltransferase of 25S rRNA 2 homolog | 164603 | 146802 | 164604 | 11, 7, 6 |
| 7 | BHLHA15 | basic helix-loop-helix family member a15 | 180535 | 164715 | 205356 | 22, |
| 7 | BZW2 | basic leucine zipper and W2 domains 2 | 136261 | 106524 | 106537 | 18, 15, 32 |
| 7 | BLACE | B-cell acute lymphoblastic leukemia expressed | 204960 | 186480 | 164778 | |
| 7 | BCAP29 | B-cell receptor associated protein 29 | 075790 | 105865 | 091137 | 38, 26, 45 |
| 7 | BCL7B | BCL tumor suppressor 7B | 106635 | 009954 | 106638 | 9, 28, 32 |
| 7 | BET1 | Bet1 golgi vesicular membrane trafficking protein | 105829 | 127920 | 164692 | 7, 29, 34 |
| 7 | BLVRA | biliverdin reductase A | 106605 | 106603 | 062582 | 34, 43, 30 |
| 7 | BPGM | bisphosphoglycerate mutase | 172331 | 227471 | 122786 | 32, 5, 43 |
| 7 | BMPER | BMP binding endothelial regulator | 164619 | 122507 | 187258 | 13, 31, 45 |
| 7 | BRAF | B-Raf proto-oncogene, serine/threonine kinase | 157764 | 090266 | 090263 | 1, 22, 31 |
| 7 | BRI3 | brain protein I3 | 164713 | 205356 | 006453 | 20, 16, 17 |
| 7 | BRAT1 | BRCA1 associated ATM activator 1 | 106009 | 106003 | 106012 | 27, 35, 9 |
| 7 | BAZ1B | bromodomain adjacent to zinc finger domain 1B | 009954 | 188763 | 106635 | 23, 43, 18 |
| 7 | BUD31 | BUD31 homolog | 106245 | 106244 | 106246 | 29, 3, 18 |
| 7 | C7orf55- | C7orf55-LUC7L2 readthrough | 269955 | 146963 | 188883 | |
| | LUC7L2 | | | | | |
| 7 | CPED1 | cadherin like and PC-esterase domain containing 1 | 106034 | 071243 | 002745 | 34, 7, 45 |
| 7 | CDHR3 | cadherin related family member 3 | 128536 | 146776 | 008282 | 34, 6, 12 |
| 7 | CALCR | calcitonin receptor | 004948 | 004766 | 127928 | 17, 6, 12 |
| 7 | CADPS2 | calcium dependent secretion activator 2 | 081803 | 128610 | 188050 | 44, 45, 42 |
| 7 | CACNA2D1 | calcium voltage-gated channel auxiliary subunit alpha2delta 1 | 153956 | 019991 | 186472 | 10, 31, 2 |
| 7 | CAMK2B | calcium/calmodulin dependent protein kinase II beta | 058404 | 106636 | 015676 | 8, 26, 22 |
| 7 | CALD1 | caldesmon 1 | 122786 | 172331 | 146856 | 45, 26, 11 |
| 7 | CALN1 | calneuron 1 | 183166 | 185274 | 277149 | 8, 18, 2 |
| 7 | CALU | calumenin | 128595 | 135248 | 128617 | 45, 13, 35 |
| 7 | CREB3L2 | cAMP responsive element binding protein 3 like 2 | 182158 | 279483 | 122787 | 32, 26, 40 |
| 7 | CREB5 | cAMP responsive element binding protein 5 | 146592 | 143814 | 255690 | 5, 36, 10 |
| 7 | CNPY1 | canopy FGF signaling regulator 1 | 146910 | 164778 | 184863 | 38, 8, 23 |
| 7 | CNPY4 | canopy FGF signaling regulator 4 | 166997 | 106290 | 214309 | 15, 34, 35 |
| 7 | CLIP2 | CAP-Gly domain containing linker protein 2 | 106665 | 049541 | 006704 | 34, 43, 3 |
| 7 | CAPZA2 | capping actin protein of muscle Z-line alpha subunit 2 | 198898 | 105976 | 004866 | 4, 7, 30 |
| 7 | CHST12 | carbohydrate sulfotransferase 12 | 136213 | 106263 | 275572 | 26, 36, 27 |
| 7 | CPA1 | carboxypeptidase A1 | 091704 | 158525 | 106477 | 28, 4, 19 |
| 7 | CPA2 | carboxypeptidase A2 | 158516 | 165120 | 128510 | 28, 10, 4 |
| 7 | CPA4 | carboxypeptidase A4 | 128510 | 158516 | 158525 | 17, 3, 24 |
| 7 | CPA5 | carboxypeptidase A5 | 158525 | 128510 | 091704 | 38, 15, 14 |
| 7 | CPVL | carboxypeptidase, vitellogenic like | 106066 | 255690 | 106069 | 30, 32, 40 |
| 7 | CROT | carnitine O-octanoyltransferase | 005469 | 135185 | 005471 | 4, 26, 32 |
| 7 | CASD1 | CAS1 domain containing 1 | 127995 | 164692 | 127990 | 32, 26, 11 |
| 7 | CASP2 | caspase 2 | 106144 | 178826 | 188037 | 22, 18, 39 |
| 7 | CARD11 | caspase recruitment domain family member 11 | 198286 | 146535 | 146555 | 41, 21, 22 |
| 7 | CAV1 | caveolin 1 | 105974 | 105971 | 105976 | 45, 35, 1 |
| 7 | CAV2 | caveolin 2 | 105971 | 281656 | 105974 | 1, 45, 40 |
| 7 | CBLL1 | Cbl proto-oncogene like 1 | 105879 | 091137 | 091138 | 42, 34, 29 |
| 7 | CCL24 | C-C motif chemokine ligand 24 | 106178 | 006606 | 005486 | 36, 19, 16 |
| 7 | CCL26 | C-C motif chemokine ligand 26 | 006606 | 127946 | 106178 | 14, 10, 16 |
| 7 | COM2 | COM2 scaffolding protein | 136280 | 136286 | 136274 | 34, 39, 41 |
| 7 | CNOT4 | CCR4-NOT transcription complex subunit 4 | 080802 | 146857 | 155561 | 29, 22, 4 |
| 7 | CCZ1B | CCZ1 homolog B, vacuolar protein trafficking and biogenesis associated | 146574 | 169402 | 106392 | 23, |
| 7 | CCZ1 | CCZ1 homolog, vacuolar protein trafficking and biogenesis associated | 122674 | 122543 | 155026 | 43, 12, 33 |
| 7 | CD36 | CD36 molecule | 135218 | 127955 | 214415 | 1, 15, 36 |
| 7 | CDCA7L | cell division cycle associated 7 like | 164649 | 105877 | 136237 | 39, 43, 38 |
| 7 | CEP41 | centrosomal protein 41 | 106477 | 091704 | 106484 | 38, 42, 7 |
| 7 | CRCP | CGRP receptor component | 241258 | 249319 | 169902 | 40, 13, 4 |
| 7 | CCT6A | chaperonin containing TCP1 subunit 6A | 146731 | 146733 | 129103 | 21, 35, 12 |
| 7 | CHN2 | chimerin 2 | 106069 | 106066 | 176532 | |
| 7 | CLCN1 | chloride voltage-gated channel 1 | 188037 | 106144 | 159784 | 39, 25, |
| 7 | CHRM2 | cholinergic receptor muscarinic 2 | 181072 | 267697 | 105894 | 15, 25, 20 |
| 7 | CHPF2 | chondroitin polymerizing factor 2 | 033100 | 033050 | 082014 | 3, 34, 7 |
| 7 | CBX3 | chromobox 3 | 122565 | 122566 | 086300 | 43, 11, 4 |
| 7 | C7orf25 | chromosome 7 open reading frame 25 | 136197 | 106571 | 256646 | 2, 29, 45 |
| 7 | C7orf26 | chromosome 7 open reading frame 26 | 146576 | 136247 | 236609 | 22, 1, 6 |
| 7 | C7orf31 | chromosome 7 open reading frame 31 | 153790 | 172115 | 105954 | 38, 36, 20 |
| 7 | C7orf33 | chromosome 7 open reading frame 33 | 170279 | 174469 | 055130 | 14, |
| 7 | C7orf34 | chromosome 7 open reading frame 34 | 165131 | 127412 | 197993 | 38, 10, 5 |
| 7 | C7orf43 | chromosome 7 open reading frame 43 | 146826 | 188186 | 197093 | 21, 5, 38 |
| 7 | C7orf49 | chromosome 7 open reading frame 49 | 122783 | 146856 | 146859 | |
| 7 | C7orf50 | chromosome 7 open reading frame 50 | 146540 | 073067 | 164849 | |
| 7 | C7orf57 | chromosome 7 open reading frame 57 | 164746 | 164744 | 183696 | 18, 38, |
| 7 | C7orf61 | chromosome 7 open reading frame 61 | 185955 | 160813 | 166925 | 38, 10, 27 |
| 7 | C7orf62 | chromosome 7 open reading frame 62 | 164645 | 182348 | 164647 | 38, 8, |
| 7 | C7orf72 | chromosome 7 open reading frame 72 | 164500 | 042813 | 185811 | 38, |
| 7 | C7orf73 | chromosome 7 open reading frame 73 | 243317 | 155561 | 164707 | 34, 7, 4 |
| 7 | C7orf77 | chromosome 7 open reading frame 77 | 275356 | 170775 | 128513 | |
| 7 | CFAP69 | cilia and flagella associated protein 69 | 105792 | 157214 | 283267 | 26, 33, 29 |
| 7 | CLDN12 | claudin 12 | 157224 | 105793 | 058091 | 42, 24, 4 |
| 7 | CLDN15 | claudin 15 | 106404 | 106400 | 214253 | 1, 26, 34 |
| 7 | CLDN3 | claudin 3 | 165215 | 106077 | 189143 | 16, 28, 40 |
| 7 | CLDN4 | claudin 4 | 189143 | 165215 | 165171 | |
| 7 | CPSF4 | cleavage and polyadenylation specific factor 4 | 160917 | 248919 | 241468 | 21, 34, 9 |
| 7 | COPG2 | coatomer protein complex subunit gamma 2 | 158623 | 106484 | 213265 | 18, 39, 14 |
| 7 | CCDC126 | coiled-coil domain containing 126 | 169193 | 164548 | 279448 | 31, 22, 40 |
| 7 | CCDC129 | coiled-coil domain containing 129 | 180347 | 164600 | 106341 | 42, 20, 8 |
| 7 | CCDC136 | coiled-coil domain containing 136 | 128596 | 128617 | 128591 | 38, 14, 8 |
| 7 | CCDC146 | coiled-coil domain containing 146 | 135205 | 146707 | 127951 | 45, 26, 42 |
| 7 | CCDC71L | coiled-coil domain containing 71-like | 253276 | 105835 | 105851 | 18, 16, 43 |
| 7 | CHCHD2 | coiled-coil-helix-coiled-coil-helix domain containing 2 | 106153 | 164776 | 185290 | |
| 7 | CHCHD3 | coiled-coil-helix-coiled-coil-helix domain containing 3 | 106554 | 221866 | 131558 | 25, 15, 10 |
| 7 | COL1A2 | collagen type I alpha 2 chain | 164692 | 105829 | 127995 | 11, 6, 12 |
| 7 | COL26A1 | collagen type XXVI alpha 1 chain | 160963 | 128581 | 106436 | 27, 12, 14 |
| 7 | COL28A1 | collagen type XXVIII alpha 1 chain | 215018 | 106392 | 164654 | 26, 32, 33 |
| 7 | COG5 | component of oligomeric golgi complex 5 | 164597 | 105856 | 172209 | 42, 24, 9 |
| 7 | CNTNAP2 | contactin associated protein-like 2 | 174469 | 196511 | 170279 | 12, 26, 11 |
| 7 | COPS6 | COP9 signalosome subunit 6 | 168090 | 166526 | 166508 | 34, 30, 35 |
| 7 | COBL | cordon-bleu WH2 repeat protein | 106078 | 106070 | 221900 | 9, 29, 11 |
| 7 | C1GALT1 | core 1 synthase, glycoprotein-N-acetylgalactosamine | 106392 | 146574 | 215018 | |
| | | 3-beta-galactosyltransferase 1 | | | | |
| 7 | CTTNBP2 | cortactin binding protein 2 | 077063 | 001626 | 128534 | 1, 5, 8 |
| 7 | CRHR2 | corticotropin releasing hormone receptor 2 | 106113 | 106105 | 241644 | |
| 7 | COX19 | COX19, cytochrome c oxidase assembly factor | 240230 | 105963 | 073067 | 11, 42, 3 |
| 7 | CRYGN | crystallin gamma N | 127377 | 187260 | 106615 | 12, 32, |
| 7 | CTAGE15 | CTAGE family member 15 | 271079 | 176510 | 170379 | 38, 3, 32 |
| 7 | CTAGE4 | CTAGE family member 4 | 225932 | 221938 | 213214 | |
| 7 | CTAGE6 | CTAGE family member 6 | 271321 | 283528 | 198420 | 38, 35, 12 |
| 7 | CTAGE8 | CTAGE family member 8 | 244693 | 243896 | 221970 | |
| 7 | CLEC2L | C-type lectin domain family 2 member L | 236279 | 188883 | 064393 | 15, 2, 39 |
| 7 | CLEC5A | C-type lectin domain family 5 member A | 258227 | 258083 | 257138 | 5, 10, 7 |
| 7 | CUL1 | cullin 1 | 055130 | 170279 | 106462 | 38, 3, 22 |
| 7 | CUX1 | cut like homeobox 1 | 257923 | 279538 | 160999 | 39, 21, 24 |
| 7 | DMTF1 | cyclin D binding myb like transcription factor 1 | 135164 | 164659 | 135185 | 39, 22, 42 |
| 7 | CDK13 | cyclin dependent kinase 13 | 065883 | 006451 | 168303 | 22, 27, 30 |
| 7 | CDK14 | cyclin dependent kinase 14 | 058091 | 157224 | 157240 | |
| 7 | CDK5 | cyclin dependent kinase 5 | 164885 | 213199 | 164889 | 2, 7, 41 |
| 7 | CDK6 | cyclin dependent kinase 6 | 105810 | 234545 | 205413 | 29, 22, 37 |
| 7 | CYP3A7- | CYP3A7-CYP3A51P readthrough | 282301 | 106258 | 160870 | |
| | CYP3A51P | | | | | |
| 7 | CFTR | cystic fibrosis transmembrane conductance regulator | 001626 | 154438 | 077063 | |
| 7 | COA1 | cytochrome c oxidase assembly factor 1 homolog | 106603 | 164543 | 106605 | 2, 3, 34 |
| 7 | CYCS | cytochrome c, somatic | 172115 | 070882 | 153790 | |
| 7 | CYP2W1 | cytochrome P450 family 2 subfamily W member 1 | 073067 | 240230 | 146540 | 2, 13, 3 |
| 7 | CYP3A4 | cytochrome P450 family 3 subfamily A member 4 | 160868 | 160870 | 021461 | 19, 10, 23 |
| 7 | CYP3A43 | cytochrome P450 family 3 subfamily A member 43 | 021461 | 160868 | 244623 | 27, 38, |
| 7 | CYP3A5 | cytochrome P450 family 3 subfamily A member 5 | 106258 | 197037 | 282301 | 19, 16, 17 |
| 7 | CYP3A7 | cytochrome P450 family 3 subfamily A member 7 | 160870 | 282301 | 160868 | 19, 15, 36 |
| 7 | CYP51A1 | cytochrome P450 family 51 subfamily A member 1 | 001630 | 127914 | 240720 | 29, 2, 4 |
| 7 | POR | cytochrome p450 oxidoreductase | 127948 | 005486 | 189077 | |
| 7 | CYTH3 | cytohesin 3 | 008256 | 106346 | 178397 | 32, 6, 44 |
| 7 | DBF4 | DBF4 zinc finger | 006634 | 075303 | 008277 | 38, 22, 33 |
| 7 | DDX56 | DEAD-box helicase 56 | 136271 | 015520 | 158604 | 40, 21, 3 |
| 7 | DOCK4 | dedicator of cytokinesis 4 | 128512 | 173114 | 198839 | 8, 40, 18 |
| 7 | DTX2 | deltex E3 ubiquitin ligase 2 | 091073 | 188372 | 243566 | 24, 38, 39 |
| 7 | DENND2A | DENN domain containing 2A | 146966 | 133606 | 133597 | 34, 31, 15 |
| 7 | DFNA5 | DFNA5, deafness associated tumor suppressor | 105928 | 105926 | 070882 | 32, 31, 17 |
| 7 | DGKB | diacylglycerol kinase beta | 136267 | 006468 | 187546 | 26, 8, 28 |
| 7 | DGKI | diacylglycerol kinase iota | 157680 | 105894 | 279483 | 6, |
| 7 | DAGLB | diacylglycerol lipase beta | 164535 | 136238 | 136240 | 24, 39, 22 |
| 7 | DLD | dihydrolipoamide dehydrogenase | 091140 | 091138 | 091136 | 3, 2, 42 |
| 7 | DUS4L | dihydrouridine synthase 4 like | 105865 | 172209 | 075790 | 43, 36, 6 |
| 7 | DPP6 | dipeptidyl peptidase like 6 | 130226 | 133627 | 157212 | |
| 7 | DLX5 | distal-less homeobox 5 | 105880 | 006377 | 196636 | 26, 6, 32 |
| 7 | DLX6 | distal-less homeobox 6 | 006377 | 127922 | 105880 | 26, 15, 24 |
| 7 | POLD2 | DNA polymerase delta 2, accessory subunit | 106628 | 106624 | 106631 | 34, 3, 21 |
| 7 | POLM | DNA polymerase mu | 122678 | 164708 | 106624 | 39, 36, 3 |
| 7 | DNAJB6 | DnaJ heat shock protein family (Hsp40) member B6 | 105993 | 009335 | 155093 | 35, 24, 45 |
| 7 | DNAJB9 | DnaJ heat shock protein family (Hsp40) member B9 | 128590 | 177683 | 184903 | 32, 17, 42 |
| 7 | DNAJC2 | DnaJ heat shock protein family (Hsp40) member C2 | 105821 | 105819 | 161057 | 19, 9, 42 |
| 7 | DNAJC30 | DnaJ heat shock protein family (Hsp40) member C30 | 176410 | 176428 | 071462 | 29, 18, 45 |
| 7 | DDC | dopa decarboxylase | 132437 | 132436 | 106070 | 17, 14, 3 |
| 7 | DPY19L1 | dpy-19 like 1 | 173852 | 187258 | 164532 | 6, 10, 35 |
| 7 | DBNL | drebrin like | 136279 | 136206 | 164708 | 41, 36, 34 |
| 7 | DNAAF5 | dynein axonemal assembly factor 5 | 164818 | 188191 | 164828 | |
| 7 | DNAH11 | dynein axonemal heavy chain 11 | 105877 | 105866 | 164649 | 29, 13, 40 |
| 7 | DYNC1I1 | dynein cytoplasmic 1 intermediate chain 1 | 158560 | 004799 | 004864 | 8, 11, 26 |
| 7 | EFCAB10 | EF-hand calcium binding domain 10 | 185055 | 135249 | 146776 | 34, 42, 30 |
| 7 | ELN | elastin | 049540 | 175877 | 106683 | 10, 42, 43 |
| 7 | ERV3-1 | Endogenous retrovirus group 3 member 1 | 213462 | 152926 | 280410 | 34, 38, 22 |
| 7 | ERVW-1 | Endogenous retrovirus group W member 1 | 242950 | 157259 | 127980 | |
| 7 | EEPD1 | endonuclease/exonuclease/phosphatase family domain containing 1 | 122547 | 122545 | 164542 | 37, 6, 23 |
| 7 | EN2 | engrailed homeobox 2 | 164778 | 204960 | 146910 | 23, 44, 16 |
| 7 | ELMO1 | engulfment and cell motility 1 | 155849 | 136250 | 187037 | 8, 40, 18 |
| 7 | EZH2 | enhancer of zeste 2 polycomb repressive complex 2 subunit | 106462 | 055130 | 155660 | 39, 22, 3 |
| 7 | EPDR1 | ependymin related 1 | 086289 | 187037 | 086288 | 26, 17, 2 |
| 7 | EPHA1 | EPH receptor A1 | 146904 | 159840 | 185899 | 3, 20, |
| 7 | EPHB4 | EPH receptor B4 | 196411 | 146839 | 146828 | 37, 2, 34 |
| 7 | EPHB6 | EPH receptor B6 | 106123 | 237254 | 165125 | 41, 1, 4 |
| 7 | EGFR | epidermal growth factor receptor | 146648 | 132432 | 132434 | 24, 32, 1 |
| 7 | EPO | erythropoietin | 130427 | 172336 | 146839 | 33, 14, 38 |
| 7 | ETV1 | ETS variant 1 | 006468 | 122644 | 136267 | 42, 8, 2 |
| 7 | EIF2AK1 | eukaryotic translation initiation factor 2 alpha kinase 1 | 086232 | 106305 | 157999 | 4, 27, 16 |
| 7 | EIF3B | eukaryotic translation initiation factor 3 subunit B | 106263 | 106266 | 136213 | 18, 21, 16 |
| 7 | EIF4H | eukaryotic translation initiation factor 4H | 106682 | 106683 | 086730 | 21, 29, 26 |
| 7 | EVX1 | even-skipped homeobox 1 | 106038 | 106031 | 106049 | 38, |
| 7 | EXOC4 | exocyst complex component 4 | 131558 | 106554 | 155530 | |
| 7 | ESYT2 | extended synaptotagmin 2 | 117868 | 146918 | 126870 | 34, 1, 27 |
| 7 | ELFN1 | extracellular leucine rich repeat and fibronectin type III domain containing 1 | 225968 | 157778 | 002822 | 35, 39, 15 |
| 7 | FAM20C | FAM20C, golgi associated secretory pathway kinase | 177706 | 106410 | 197461 | 34, 26, 18 |
| 7 | FAM126A | family with sequence similarity 126 member A | 122591 | 196683 | 122550 | 45, 43, 22 |
| 7 | FAM131B | family with sequence similarity 131 member B | 159784 | 188037 | 159840 | 8, 12, 38 |
| 7 | FAM133B | family with sequence similarity 133 member B | 234545 | 127993 | 105810 | 1, 31, 27 |
| 7 | FAM180A | family with sequence similarity 180 member A | 189320 | 164707 | 105887 | 10, 6, 45 |
| 7 | FAM185A | family with sequence similarity 185 member A | 222011 | 279168 | 161040 | 7, 27, 25 |
| 7 | FAM188B | family with sequence similarity 188 member B | 106125 | 254959 | 250424 | 26, 42, 40 |
| 7 | FAM200A | family with sequence similarity 200 member A | 221909 | 196652 | 197343 | 4, 2, 15 |
| 7 | FAM220A | family with sequence similarity 220 member A | 178397 | 008256 | 136238 | 22, 13, 38 |
| 7 | FAM221A | family with sequence similarity 221 member A | 188732 | 279448 | 196335 | 38, 28, 45 |
| 7 | FAM3C | family with sequence similarity 3 member C | 196937 | 002745 | 106278 | 40, 35, 22 |
| 7 | FAM71F1 | family with sequence similarity 71 member F1 | 135248 | 283368 | 128595 | 38, 23, 12 |
| 7 | FAM71F2 | family with sequence similarity 71 member F2 | 205085 | 165055 | 283368 | 38, 44, 10 |
| 7 | FASTK | Fas activated serine/threonine kinase | 164896 | 164889 | 164897 | 41, 3, 34 |
| 7 | FSCN1 | fascin actin-bundling protein 1 | 075618 | 075624 | 011275 | 12, 24, 34 |
| 7 | FSCN3 | fascin actin-bundling protein 3 | 106328 | 004059 | 106331 | 38, 44, 17 |
| 7 | FBXL13 | F-box and leucine rich repeat protein 13 | 161040 | 222011 | 128606 | 38, 7, 27 |
| 7 | FBXL18 | F-box and leucine rich repeat protein 18 | 155034 | 182095 | 075624 | |
| 7 | FBXO24 | F-box protein 24 | 106336 | 077454 | 106333 | 38, 22, 5 |
| 7 | FERD3L | Fer3 like bHLH transcription factor | 146618 | 122691 | 105849 | |
| 7 | FEZF1 | FEZ family zinc finger 1 | 128610 | 008311 | 081803 | 18, 3, 12 |
| 7 | FGL2 | fibrinogen like 2 | 127951 | 135205 | 186088 | 30, 45, 5 |
| 7 | FIGNL1 | fidgetin like 1 | 132436 | 185811 | 132437 | 39, 9, 27 |
| 7 | FLNC | filamin C | 128591 | 128596 | 135253 | 25, 28, 18 |
| 7 | FIS1 | fission, mitochondrial 1 | 214253 | 106404 | 128581 | 29, 1, 43 |
| 7 | FKBP14 | FK506 binding protein 14 | 106080 | 136193 | 106086 | 45, 43, 15 |
| 7 | FKBP6 | FK506 binding protein 6 | 077800 | 146755 | 188763 | 38, 27, 5 |
| 7 | FKBP9 | FK506 binding protein 9 | 122642 | 170852 | 122643 | 1, 11, 6 |
| 7 | FOXK1 | forkhead box K1 | 164916 | 146555 | 242802 | 22, 34, 38 |
| 7 | FOXP2 | forkhead box P2 | 128573 | 154415 | 135272 | 11, 24, 26 |
| 7 | FMC1 | formation of mitochondrial complex V assembly factor 1 homolog | 164898 | 157741 | 146963 | 15, 25, 20 |
| 7 | FZD1 | frizzled class receptor 1 | 157240 | 058091 | 127989 | 26, 3, 18 |
| 7 | FZD9 | frizzled class receptor 9 | 188763 | 077800 | 009954 | 35, 20, 38 |
| 7 | GNA12 | G protein subunit alpha 12 | 146535 | 174945 | 198286 | 34, 31, 35 |
| 7 | GNAI1 | G protein subunit alpha H | 127955 | 187391 | 135218 | 1, 42, 8 |
| 7 | GNAT3 | G protein subunit alpha transducin 3 | 214415 | 135218 | 075223 | 20, |
| 7 | GNB2 | G protein subunit beta 2 | 172354 | 077080 | 146830 | 34, 21, 3 |
| 7 | GNG11 | G protein subunit gamma 11 | 127920 | 105825 | 105829 | 43, 1, 25 |
| 7 | GNGT1 | G protein subunit gamma transducin 1 | 127928 | 004948 | 105825 | 32, 14, 45 |
| 7 | GPER1 | G protein-coupled estrogen receptor 1 | 164850 | 164849 | 178381 | 26, 2, 32 |
| 7 | GPR141 | G protein-coupled receptor 141 | 187037 | 155849 | 086289 | 5, |
| 7 | GPR146 | G protein-coupled receptor 146 | 164849 | 146540 | 164850 | 1, 17, 40 |
| 7 | GPR22 | G protein-coupled receptor 22 | 172209 | 164597 | 105865 | 8, 15, 2 |
| 7 | GPR37 | G protein-coupled receptor 37 | 170775 | 234224 | 275356 | 26, 10, 8 |
| 7 | GPR85 | G protein-coupled receptor 85 | 164604 | 164603 | 214194 | 8, 6, 38 |
| 7 | GAL3ST4 | galactose-3-O-sulfotransferase 4 | 197093 | 146826 | 213420 | 39, 13, 24 |
| 7 | GRIFIN | galectin-related inter-fiber protein | 275572 | 136213 | 106003 | |
| 7 | GGCT | gamma-glutamylcyclotransferase | 006625 | 106100 | 281039 | 34, 4, 35 |
| 7 | GSAP | gamma-secretase activating protein | 186088 | 127951 | 127947 | 22, 31, 40 |
| 7 | GJC3 | gap junction protein gamma 3 | 176402 | 146833 | 160862 | 23, 12, |
| 7 | GBX1 | gastrulation brain homeobox 1 | 164900 | 133612 | 146926 | 38, |
| 7 | GATAD1 | GATA zinc finger domain containing 1 | 157259 | 001629 | 242950 | 29, 18, 44 |
| 7 | GATSL2 | GATS protein like 2 | 274070 | 196275 | 274523 | 38, |
| 7 | GATS | GATS, stromal antigen 3 opposite strand | 239521 | 066923 | 213413 | 26, 31, 8 |
| 7 | GTF2I | general transcription factor IIi | 263001 | 006704 | 158517 | 42, 24, 18 |
| 7 | GIMAP1- | GIMAP1-GIMAP5 readthrough | 281887 | 213203 | 196329 | |
| | GIMAP5 | | | | | |
| 7 | GLI3 | GLI family zinc finger 3 | 106571 | 122641 | 136197 | 11, 1, 12 |
| 7 | GBAS | glioblastoma amplified sequence | 146729 | 178665 | 239789 | 15, 25, 30 |
| 7 | GLCCI1 | glucocorticoid induced 1 | 106415 | 219545 | 003147 | 22, 11, 9 |
| 7 | GCK | glucokinase | 106633 | 106631 | 106636 | 31, 1, 28 |
| 7 | GUSB | glucuronidase beta | 169919 | 196715 | 126522 | 36, 3, 42 |
| 7 | GRM3 | glutamate metabotropic receptor 3 | 198822 | 153993 | 164659 | 8, 45, 36 |
| 7 | GRM8 | glutamate metabotropic receptor 8 | 179603 | 128513 | 048405 | |
| 7 | GSTK1 | glutathione S-transferase kappa 1 | 197448 | 221937 | 178826 | 30, 27, 36 |
| 7 | GPNMB | glycoprotein nmb | 136235 | 136243 | 156928 | 24, 5, 13 |
| 7 | GARS | glycyl-tRNA synthetase | 106105 | 281039 | 106113 | 3, 45, 9 |
| 7 | GPC2 | glypican 2 | 213420 | 197093 | 066923 | 12, 22, 38 |
| 7 | GET4 | golgi to ER traffic protein 4 | 239857 | 164828 | 105963 | 37, 21, 31 |
| 7 | GIGYF1 | GRB10 interacting GYF protein 1 | 146830 | 172354 | 172336 | 29, 26, 40 |
| 7 | GRID2IP | Grid2 interacting protein | 215045 | 136240 | 136247 | 22, 25, |
| 7 | GCC1 | GRIP and coiled-coil domain containing 1 | 179562 | 048405 | 004059 | |
| 7 | GRB10 | growth factor receptor bound protein 10 | 106070 | 132437 | 106078 | |
| 7 | GHRHR | growth hormone releasing hormone receptor | 106128 | 240583 | 078549 | 31, 42, 20 |
| 7 | GTF2IRD1 | GTF2I repeat domain containing 1 | 006704 | 106665 | 263001 | 29, 9, 27 |
| 7 | GTF2IRD2 | GTF2I repeat domain containing 2 | 196275 | 158517 | 274070 | 31, 18, 28 |
| 7 | GTF2IRD2B | GTF2I repeat domain containing 2B | 174428 | 274523 | 178809 | 42, 28, 21 |
| 7 | GTPBP10 | GTP binding protein 10 | 105793 | 283267 | 157224 | |
| 7 | GIMAP1 | GTPase, IMAP family member 1 | 213203 | 106560 | 281887 | 30, 36, 5 |
| 7 | GIMAP2 | GTPase, IMAP family member 2 | 106560 | 133561 | 213203 | 34, 30, 39 |
| 7 | GIMAP4 | GTPase, IMAP family member 4 | 133574 | 179144 | 133561 | 5, 30, 43 |
| 7 | GIMAP5 | GTPase, IMAP family member 5 | 196329 | 281887 | 106565 | 30, 36, 5 |
| 7 | GIMAP6 | GTPase, IMAP family member 6 | 133561 | 133574 | 106560 | 45, 42, 39 |
| 7 | GIMAP7 | GTPase, IMAP family member 7 | 179144 | 171115 | 133574 | 30, 29, 17 |
| 7 | GIMAP8 | GTPase, IMAP family member 8 | 171115 | 196456 | 179144 | 1, 42, 36 |
| 7 | H2AFV | H2A histone family member V | 105968 | 196262 | 146676 | 41, 11, 21 |
| 7 | HSPB1 | heat shock protein family B (small) member 1 | 106211 | 177679 | 170027 | 3, 25, 27 |
| 7 | HECW1 | HECT, C2 and WW domain containing E3 ubiquitin protein ligase 1 | 002746 | 106591 | 164543 | 6, 38, |
| 7 | HEPACAM2 | HEPACAM family member 2 | 188175 | 177409 | 004766 | 3, 28, 31 |
| 7 | HGF | hepatocyte growth factor | 019991 | 075223 | 153956 | 32, 7, 23 |
| 7 | HERPUD2 | HERPUD family member 2 | 122557 | 164532 | 122545 | 31, 36, 38 |
| 7 | HNRNPA2B1 | heterogeneous nuclear ribonucleoprotein A2/B1 | 122566 | 050344 | 122565 | 11, 31, 40 |
| 7 | HDAC9 | histone deacetylase 9 | 048052 | 229937 | 122691 | |
| 7 | HBP1 | HMG-box transcription factor 1 | 105856 | 005249 | 164597 | 1, 42, 11 |
| 7 | HOXA1 | homeobox A1 | 105991 | 005020 | 105996 | 38, 4, 3 |
| 7 | HOXA10 | homeobox A10 | 253293 | 257184 | 005073 | 44, 34, 7 |
| 7 | HOXA11 | homeobox A11 | 005073 | 253293 | 106031 | 9, 44, 6 |
| 7 | HOXA13 | homeobox A13 | 106031 | 005073 | 106038 | 4, 2, 33 |
| 7 | HOW | homeobox A2 | 105996 | 105991 | 105997 | 18, 15, 17 |
| 7 | HOXA3 | homeobox A3 | 105997 | 105996 | 197576 | 31, 45, 38 |
| 7 | HOW | homeobox A4 | 197576 | 105997 | 106004 | 37, 6, 16 |
| 7 | HOXA5 | homeobox A5 | 106004 | 197576 | 106006 | 22, 20, 27 |
| 7 | HOXA6 | homeobox A6 | 106006 | 106004 | 122592 | 17, 20, |
| 7 | HOXA7 | homeobox A7 | 122592 | 106006 | 078399 | 16, |
| 7 | HOXA9 | homeobox A9 | 078399 | 122592 | 257184 | |
| 7 | HIPK2 | homeodomain interacting protein kinase 2 | 064393 | 236279 | 059377 | 18, 8, 31 |
| 7 | HIP1 | huntingtin interacting protein 1 | 127946 | 170092 | 006606 | 38, 27, 12 |
| 7 | HUS1 | HUS1 checkpoint clamp component | 136273 | 136205 | 158683 | 4, 29, 36 |
| 7 | HYAL4 | hyaluronoglucosaminidase 4 | 106302 | 106299 | 106304 | 32, |
| 7 | HILPDA | hypoxia inducible lipid droplet associated | 135245 | 279916 | 165055 | 37, 27, 1 |
| 7 | IKZF1 | IKAROS family zinc finger 1 | 185811 | 164500 | 132436 | |
| 7 | INMT | indolethylamine N-methyltransferase | 241644 | 106113 | 254959 | 1, 40, 33 |
| 7 | INHBA | inhibin beta A subunit | 122641 | 175600 | 106571 | |
| 7 | ING3 | inhibitor of growth family member 3 | 071243 | 106025 | 106034 | 34, 4, 11 |
| 7 | INMT- | INMT-FAM188B readthrough (NMD candidate) | 254959 | 241644 | 106125 | 26, 42, 40 |
| | FAM188B | | | | | |
| 7 | IMMP2L | inner mitochondrial membrane peptidase subunit 2 | 184903 | 128590 | 173114 | 10, 34, 7 |
| 7 | IMPDH1 | inosine monophosphate dehydrogenase 1 | 106348 | 224940 | 279916 | 1, 43, 3 |
| 7 | INSIG1 | insulin induced gene 1 | 186480 | 157219 | 204960 | 31, 21, 19 |
| 7 | IGF2BP3 | insulin like growth factor 2 mRNA binding protein 3 | 136231 | 156928 | 164548 | 12, 7, 21 |
| 7 | IGFBP1 | insulin like growth factor binding protein 1 | 146678 | 283247 | 146674 | 32, 19, 44 |
| 7 | IGFBP3 | insulin like growth factor binding protein 3 | 146674 | 146678 | 136205 | 34, 10, 32 |
| 7 | INTS1 | integrator complex subunit 1 | 164880 | 164877 | 198517 | 22, 1, 21 |
| 7 | ITGB8 | integrin subunit beta 8 | 105855 | 183742 | 004846 | |
| 7 | IRF5 | interferon regulatory factor 5 | 128604 | 272899 | 064419 | 22, 5, 39 |
| 7 | IFRD1 | interferon related developmental regulator 1 | 006652 | 198839 | 181016 | 12, |
| 7 | IL6 | interleukin 6 | 136244 | 105889 | 281889 | 20, 10, 28 |
| 7 | IFT22 | intraflagellar transport 22 | 128581 | 214253 | 160963 | |
| 7 | IQUB | IQ motif and ubiquitin domain containing | 164675 | 081800 | 128609 | 38, 42, 36 |
| 7 | IQCE | IQ motif containing E | 106012 | 106009 | 136295 | 35, 3, 38 |
| 7 | IQCA1L | IQ motif containing with AAA domain 1 like | 278685 | 146926 | 033050 | |
| 7 | ICA1 | islet cell autoantigen 1 | 003147 | 106415 | 122584 | 3, 16, 29 |
| 7 | ISPD | isoprenoid synthase domain containing | 214960 | 106511 | 171243 | 5, 25, 32 |
| 7 | JAZF1 | JAZF zinc finger 1 | 153814 | 106052 | 146592 | 2, 45, 1 |
| 7 | KPNA7 | karyopherin subunit alpha 7 | 185467 | 198742 | 241685 | 18, 28, |
| 7 | KDELR2 | KDEL endoplasmic reticulum protein retention receptor 2 | 136240 | 164535 | 215045 | 45, 10, 24 |
| 7 | KLHDC10 | kelch domain containing 10 | 128607 | 091732 | 146842 | 29, 26, 1 1 |
| 7 | KLHL7 | kelch like family member 7 | 122550 | 122591 | 136243 | 31, 38, 13 |
| 7 | KBTBD2 | kelch repeat and BTB domain containing 2 | 170852 | 105778 | 122642 | 43, 3, 11 |
| 7 | KEL | Kell blood group, metallo-endopeptidase | 197993 | 165131 | 179468 | 36, 7, 38 |
| 7 | KIAA0895 | KIAA0895 | 164542 | 122547 | 011426 | |
| 7 | KIAA1147 | KIAA1147 | 257093 | 006530 | 214102 | 29, 18, 20 |
| 7 | KIAA1324L | KIAA1324 like | 164659 | 198822 | 135164 | 24, 1, 12 |
| 7 | KIAA1549 | KIAA1549 | 122778 | 214128 | 146858 | 17, 9, 25 |
| 7 | KCP | kielin/chordin-like protein | 135253 | 128591 | 128524 | 1, 13, 33 |
| 7 | KLRG2 | killer cell lectin like receptor G2 | 188883 | 269955 | 236279 | 12, 39, 15 |
| 7 | KRBA1 | KRAB-A domain containing 1 | 133619 | 181220 | 181444 | 27, 24, 28 |
| 7 | KRIT1 | KRIT1, ankyrin repeat containing | 001631 | 240720 | 001629 | 24, 4, 36 |
| 7 | KLF14 | Kruppel like factor 14 | 266265 | 213265 | 128585 | 38, 35, |
| 7 | LAMB1 | laminin subunit beta 1 | 091136 | 091140 | 091128 | 11, 1, 26 |
| 7 | LAMB4 | laminin subunit beta 4 | 091128 | 091136 | 091129 | 15, 32, 38 |
| 7 | LANCL2 | LanC like 2 | 132434 | 146648 | 154978 | 34, 9, 24 |
| 7 | LAMTOR4 | late endosomal/lysosomal adaptor, MAPK and MTOR activator 4 | 188186 | 214309 | 146826 | 29, 3, 7 |
| 7 | LMOD2 | leiomodin 2 | 170807 | 146809 | 106299 | 25, 15, 24 |
| 7 | LMTK2 | lemur tyrosine kinase 2 | 164715 | 135175 | 180535 | 29, 22, 4 |
| 7 | LEP | leptin | 174697 | 128594 | 106344 | 1, 32, 23 |
| 7 | LRRC17 | leucine rich repeat containing 17 | 128606 | 161040 | 170632 | 11, 45, 15 |
| 7 | LRRC4 | leucine rich repeat containing 4 | 128594 | 197157 | 174697 | 13, 45, 24 |
| 7 | LRRC61 | leucine rich repeat containing 61 | 127399 | 106526 | 188707 | 9, 2, 27 |
| 7 | LRRC72 | leucine rich repeat containing 72 | 205858 | 171243 | 106524 | 38, 10, |
| 7 | LRRN3 | leucine rich repeat neuronal 3 | 173114 | 184903 | 128512 | 8, 38, 15 |
| 7 | LRCH4 | leucine rich repeats and calponin homology domain containing 4 | 077454 | 205307 | 106336 | 36, 5, 39 |
| 7 | LRRD1 | leucine rich repeats and death domain containing 1 | 240720 | 001630 | 001631 | 38, 8, |
| 7 | LRGUK | leucine rich repeats and guanylate kinase domain containing | 155530 | 131558 | 205060 | 37, 42, 20 |
| 7 | LRWD1 | leucine rich repeats and WD repeat domain containing 1 | 161036 | 160993 | 005075 | 38, 41, 21 |
| 7 | LSMEM1 | leucine rich single-pass membrane protein 1 | 181016 | 006652 | 146802 | 26, 25, 15 |
| 7 | LUZP6 | leucine zipper protein 6 | 267697 | 105887 | 181072 | |
| 7 | LFNG | LFNG O-fucosylpeptide 3-beta-N-acetylglucosaminyltransferase | 106003 | 275572 | 106009 | 17, 3, 30 |
| 7 | LIMK1 | LIM domain kinase 1 | 106683 | 049540 | 106682 | 40, 26, 22 |
| 7 | LMBR1 | limb development membrane protein 1 | 105983 | 105982 | 146909 | 45, 14, 38 |
| 7 | LAT2 | linker for activation of T-cells family member 2 | 086730 | 106682 | 049541 | 41, 21, 5 |
| 7 | LHFPL3 | lipoma HMGIC fusion partner-like 3 | 187416 | 164815 | 005483 | 8, 19, 17 |
| 7 | LINC00998 | Long intergenic non-protein coding RNA 998 | 214194 | 164604 | 154415 | |
| 7 | LSM5 | LSM5 homolog, U6 small nuclear RNA and mRNA degradation associated | 106355 | 154678 | 105778 | 11, 7, 15 |
| 7 | LSM8 | LSM8 homolog, U6 small nuclear RNA associated | 128534 | 077063 | 106013 | |
| 7 | LUC7L2 | LUC7 like 2, pre-mRNA splicing factor | 146963 | 164898 | 269955 | 42, 4, 40 |
| 7 | KDM7A | lysine demethylase 7A | 006459 | 059378 | 157800 | 18, 11, 29 |
| 7 | KMT2C | lysine methyltransferase 2C | 055609 | 178234 | 196584 | 18, 26, 23 |
| 7 | KMT2E | lysine methyltransferase 2E | 005483 | 187416 | 135250 | 11, 23, 7 |
| 7 | MACC1 | MACC1, MET transcriptional regulator | 183742 | 173452 | 105855 | 16, 37, 31 |
| 7 | MAD1L1 | MAD1 mitotic arrest deficient like 1 | 002822 | 225968 | 122687 | 10, 35, 41 |
| 7 | MAFK | MAF bZIP transcription factor K | 198517 | 164880 | 164855 | 34, 6, 20 |
| 7 | MKRN1 | makorin ring finger protein 1 | 133606 | 146955 | 146966 | 38, 2, 11 |
| 7 | MDH2 | malate dehydrogenase 2 | 146701 | 127952 | 177679 | 25, 1, 21 |
| 7 | MGAM | maltase-glucoamylase | 257335 | 165076 | 258083 | 17, 16, 5 |
| 7 | MGAM2 | maltase-glucoamylase 2 (putative) | 257743 | 257138 | 258223 | |
| 7 | MTURN | maturin, neural progenitor differentiation regulator homolog | 180354 | 106086 | 180233 | 26, 8, 14 |
| 7 | MIOS | meiosis regulator for oocyte development | 164654 | 215018 | 106399 | 22, 15, 42 |
| 7 | MAGI2 | membrane associated guanylate kinase, WW and PDZ domain containing 2 | 187391 | 006576 | 127955 | |
| 7 | MPP6 | membrane palmitoylated protein 6 | 105926 | 122585 | 105928 | 11, 19, 3 |
| 7 | MEOX2 | mesenchyme homeobox 2 | 106511 | 187546 | 214960 | 1, 10, 11 |
| 7 | MEST | mesoderm specific transcript | 106484 | 106477 | 158623 | 15, 32, 13 |
| 7 | MET | MET proto-oncogene, receptor tyrosine kinase | 105976 | 105974 | 198898 | 3, 13, 42 |
| 7 | MBLAC1 | metallo-beta-lactamase domain containing 1 | 214309 | 166997 | 188186 | 1, 16, 27 |
| 7 | MEPCE | methylphosphate capping enzyme | 146834 | 078487 | 160813 | 40, 2, 18 |
| 7 | METTL2B | methyltransferase like 2B | 165055 | 135245 | 205085 | 21, 9, 23 |
| 7 | MICALL2 | MICAL like 2 | 164877 | 164853 | 164880 | 26, 2, 36 |
| 7 | MCM7 | minichromosome maintenance complex component 7 | 166508 | 168090 | 221838 | 39, 21, 3 |
| 7 | MALSU1 | mitochondrial assembly of ribosomal large subunit 1 | 156928 | 136235 | 136231 | 41, 15, 36 |
| 7 | MRPL32 | mitochondrial ribosomal protein L32 | 106591 | 106588 | 002746 | 31, 1, 3 |
| 7 | MRPS17 | mitochondrial ribosomal protein S17 | 239789 | 146729 | 146733 | 2, 13, 25 |
| 7 | MRPS24 | mitochondrial ribosomal protein S24 | 062582 | 106605 | 106608 | 15, 25, 41 |
| 7 | MRPS33 | mitochondrial ribosomal protein S33 | 090263 | 157764 | 261115 | 29, 15, 30 |
| 7 | MRM2 | mitochondrial rRNA methyltransferase 2 | 122687 | 002822 | 106268 | |
| 7 | MTERF1 | mitochondrial transcription termination factor 1 | 127989 | 157240 | 127914 | 30, 5, 31 |
| 7 | MLXIPL | MLX interacting protein like | 009950 | 106638 | 176428 | 37, 16, 1 |
| 7 | MOGAT3 | monoacylglycerol O-acyltransferase 3 | 106384 | 167011 | 106397 | 16, |
| 7 | MMD2 | monocyte to macrophage differentiation associated 2 | 136297 | 218823 | 272968 | 8, 38, 14 |
| 7 | MOSPD3 | motile sperm domain containing 3 | 106330 | 106333 | 106327 | 6, 34, 29 |
| 7 | MNX1 | motor neuron and pancreas homeobox 1 | 130675 | 146909 | 009335 | 28, 16, 3 |
| 7 | MPLKIP | M-phase specific PLK1 interacting protein | 168303 | 065883 | 175600 | 31, 26, 2 |
| 7 | MTRNR2L6 | MT-RNR2-like 6 | 270672 | 211750 | 282499 | 44, |
| 7 | MUC12 | mucin 12, cell surface associated | 205277 | 169894 | 169876 | 16, 40, 27 |
| 7 | MUC17 | mucin 17, cell surface associated | 169876 | 205277 | 169871 | 37, 16, 28 |
| 7 | MUC3A | mucin 3A, cell surface associated | 169894 | 087085 | 205277 | |
| 7 | MKLN1 | muskelin 1 | 128585 | 266265 | 128567 | 26, 29, 17 |
| 7 | MDFIC | MyoD family inhibitor domain containing | 135272 | 128573 | 105967 | 22, 4, 11 |
| 7 | MYO1G | myosin IG | 136286 | 146676 | 136280 | 41, 39, 21 |
| 7 | MYL10 | myosin light chain 10 | 106436 | 160963 | 279538 | |
| 7 | MYL7 | myosin light chain 7 | 106631 | 106628 | 106633 | 15, 20, 39 |
| 7 | MTPN | myotrophin | 105887 | 189320 | 267697 | 9, 7, 23 |
| 7 | NACAD | NAC alpha domain containing | 136274 | 136280 | 136270 | 14, 27, 33 |
| 7 | NAT16 | N-acetyltransferase 16 (putative) | 167011 | 128564 | 106384 | 14, 20, 8 |
| 7 | NAPEPLD | N-acyl phosphatidylethanolamine phospholipase D | 161048 | 170632 | 105819 | 7, 29, 19 |
| 7 | NDUFA5 | NADH: ubiquinone oxidoreductase subunit A5 | 128609 | 164675 | 146809 | 7, 34, 4 |
| 7 | NDUFB2 | NADH: ubiquinone oxidoreductase subunit B2 | 090266 | 133597 | 157764 | 43, 25, 40 |
| 7 | NDUFA4 | NDUFA4, mitochondrial complex associated | 189043 | 122584 | 106443 | 29, 15, 45 |
| 7 | NUB1 | negative regulator of ubiquitin like proteins 1 | 013374 | 082014 | 187260 | 30, 31, 40 |
| 7 | NXPH1 | neurexophilin 1 | 122584 | 003147 | 189043 | 2, 8, 23 |
| 7 | NRCAM | neuronal cell adhesion molecule | 091129 | 091128 | 135241 | 26, 43, 8 |
| 7 | NEUROD6 | neuronal differentiation 6 | 164600 | 078549 | 180347 | 8, 45, 25 |
| 7 | NPTX2 | neuronal pentraxin 2 | 106236 | 006453 | 166448 | 2, 31, 28 |
| 7 | NYAP1 | neuronal tyrosine phosphorylated phosphoinositide-3-kinase adaptor 1 | 166924 | 166925 | 106351 | 26, 31, 28 |
| 7 | NPSR1 | neuropeptide S receptor 1 | 187258 | 164619 | 173852 | 3, 14, 38 |
| 7 | NPVF | neuropeptide VF precursor | 105954 | 153790 | 050344 | 14, 10, |
| 7 | NPY | neuropeptide Y | 122585 | 196335 | 105926 | 26, 33, 28 |
| 7 | NCF1 | neutrophil cytosolic factor 1 | 158517 | 263001 | 196275 | 22, 21, 41 |
| 7 | NAMPT | nicotinamide phosphoribosyltransferase | 105835 | 008282 | 253276 | 5, 13, 36 |
| 7 | NOS3 | nitric oxide synthase 3 | 164867 | 055118 | 181652 | 36, 3, 37 |
| 7 | NME8 | NME/NM23 family member 8 | 086288 | 086289 | 106483 | 38, |
| 7 | NOBOX | NOBOX oogenesis homeobox | 106410 | 050327 | 196511 | |
| 7 | NCAPG2 | non-SMC condensin II complex subunit G2 | 146918 | 155093 | 117868 | 39, 10, 38 |
| 7 | NSUN5 | NOP2/Sun RNA methyltransferase family member 5 | 130305 | 155428 | 146755 | 21, 36, 3 |
| 7 | NPC1L1 | NPC1 like intracellular cholesterol transporter 1 | 015520 | 015676 | 136271 | 28, 19, 14 |
| 7 | NFE2L3 | nuclear factor, erythroid 2 like 3 | 050344 | 105954 | 122566 | 26, 3, 16 |
| 7 | NUPR2 | nuclear protein 2, transcriptional regulator | 185290 | 106153 | 268187 | |
| 7 | NRF1 | nuclear respiratory factor 1 | 106459 | 240204 | 186591 | 3, 26, 22 |
| 7 | NOM1 | nucleolar protein with MIF4G domain 1 | 146909 | 105983 | 130675 | 21, 30, 12 |
| 7 | NUP205 | nucleoporin 205 | 155561 | 080802 | 243317 | 24, 31, 37 |
| 7 | NUPL2 | nucleoporin like 2 | 136243 | 122550 | 136235 | 4, 26, 11 |
| 7 | NOD1 | nucleotide binding oligomerization domain containing 1 | 106100 | 281593 | 006625 | 26, 1, 36 |
| 7 | NUDCD3 | NudC domain containing 3 | 015676 | 058404 | 015520 | 25, 26, 9 |
| 7 | NUDT1 | nudix hydrolase 1 | 106268 | 122687 | 106266 | 21, 18, 7 |
| 7 | OR10AC1 | olfactory receptor family 10 subfamily AC member 1 (gene/pseudogene) | 176510 | 221855 | 271079 | |
| 7 | OR2A1 | olfactory receptor family 2 subfamily A member 1 | 221970 | 244693 | 050327 | 27, |
| 7 | OR2A12 | olfactory receptor family 2 subfamily A member 12 | 221858 | 221933 | 221989 | |
| 7 | OR2A14 | olfactory receptor family 2 subfamily A member 14 | 221938 | 221989 | 225932 | |
| 7 | OR2A2 | olfactory receptor family 2 subfamily A member 2 | 221989 | 221858 | 221938 | |
| 7 | OR2A25 | olfactory receptor family 2 subfamily A member 25 | 221933 | 221836 | 221858 | |
| 7 | OR2A42 | olfactory receptor family 2 subfamily A member 42 | 212807 | 213214 | 243896 | |
| 7 | OR2A5 | olfactory receptor family 2 subfamily A member 5 | 221836 | 221813 | 221933 | |
| 7 | OR2A7 | olfactory receptor family 2 subfamily A member 7 | 243896 | 212807 | 244693 | 40, 16, 5 |
| 7 | OR2AE1 | olfactory receptor family 2 subfamily AE member 1 | 244623 | 021461 | 146833 | |
| 7 | OR2F1 | olfactory receptor family 2 subfamily F member 1 (gene/pseudogene) | 213215 | 221910 | 221813 | |
| 7 | OR2F2 | olfactory receptor family 2 subfamily F member 2 | 221910 | 198420 | 213215 | |
| 7 | OR6B1 | olfactory receptor family 6 subfamily B member 1 | 221813 | 213215 | 221836 | |
| 7 | OR6V1 | olfactory receptor family 6 subfamily V member 1 | 225781 | 179468 | 159763 | |
| 7 | OR9A2 | olfactory receptor family 9 subfamily A member 2 | 179468 | 197993 | 225781 | |
| 7 | OR9A4 | olfactory receptor family 9 subfamily A member 4 | 258083 | 257335 | 258227 | 32, |
| 7 | OCM | oncomodulin | 122543 | 011275 | 122674 | 17, 38, |
| 7 | OCM2 | oncomodulin 2 | 135175 | 070669 | 164715 | 10, |
| 7 | OPN1SW | opsin 1 (cone pigments), short-wave-sensitive | 128617 | 128595 | 128596 | 6, 23, 10 |
| 7 | ORAI2 | ORAI calcium release-activated calcium modulator 2 | 160991 | 128563 | 160993 | |
| 7 | ORC5 | origin recognition complex subunit 5 | 164815 | 189056 | 187416 | 38, 9, 31 |
| 7 | OGDH | oxoglutarate dehydrogenase | 105953 | 158604 | 122515 | 43, 42, 24 |
| 7 | OSBPL3 | oxysterol binding protein like 3 | 070882 | 105928 | 172115 | 18, 42, 22 |
| 7 | PAX4 | paired box 4 | 106331 | 106328 | 197157 | |
| 7 | PILRA | paired immunoglobin like type 2 receptor alpha | 085514 | 121716 | 078487 | 23, 5, 20 |
| 7 | PILRB | paired immunoglobin-like type 2 receptor beta | 121716 | 214300 | 085514 | 26, 18, 40 |
| 7 | PON1 | paraoxonase 1 | 005421 | 236197 | 105852 | 19, 6, 23 |
| 7 | PON2 | paraoxonase 2 | 105854 | 105852 | 005981 | 31, 32, 43 |
| 7 | PON3 | paraoxonase 3 | 105852 | 005421 | 105854 | 19, 28, 10 |
| 7 | PNPLA8 | patatin like phospholipase domain containing 8 | 135241 | 091129 | 177683 | 39, 45, 24 |
| 7 | PEG10 | paternally expressed 10 | 242265 | 127990 | 158528 | 31, 32, 15 |
| 7 | PAXIP1 | PAX interacting protein 1 | 157212 | 130226 | 157219 | 37, 39, 9 |
| 7 | PDAP1 | PDGFA associated protein 1 | 106244 | 130429 | 106245 | 3, 26, 27 |
| 7 | PTCD1 | pentatricopeptide repeat domain 1 | 106246 | 106245 | 248919 | 43, 1, 27 |
| 7 | PMPCB | peptidase, mitochondrial processing beta subunit | 105819 | 161048 | 105821 | 3, 2, 34 |
| 7 | PPIA | peptidylprolyl isomerase A | 196262 | 122515 | 105968 | 43, 41, 21 |
| 7 | PEX1 | peroxisomal biogenesis factor 1 | 127980 | 242950 | 127993 | 22, 23, 15 |
| 7 | PHF14 | PHD finger protein 14 | 106443 | 189043 | 005108 | 10, 26, 6 |
| 7 | PIK3CG | phosphatidylinositol-4,5-bisphosphate 3-kinase catalytic subunit gamma | 105851 | 253276 | 005249 | |
| 7 | PDE1C | phosphodiesterase 1C | 154678 | 106341 | 106355 | 26, 8, 15 |
| 7 | PGAM2 | phosphoglycerate mutase 2 | 164708 | 136279 | 122678 | 25, 15, 20 |
| 7 | PRPS1L1 | phosphoribosyl pyrophosphate synthetase 1-like 1 | 229937 | 071189 | 048052 | 38, 8, |
| 7 | PHKG1 | phosphorylase kinase catalytic subunit gamma 1 | 164776 | 129103 | 106153 | |
| 7 | PSPH | phosphoserine phosphatase | 146733 | 239789 | 146731 | 9, 3, 13 |
| 7 | PCLO | piccolo presynaptic cytomatrix protein | 186472 | 153956 | 170381 | 40, 23, 2 |
| 7 | PDGFA | platelet derived growth factor subunit A | 197461 | 177706 | 188191 | 26, 13, 27 |
| 7 | PLEKHA8 | pleckstrin homology domain containing A8 | 106086 | 106080 | 180354 | 12, 31, 32 |
| 7 | PTN | pleiotrophin | 105894 | 181072 | 157680 | 11, 29, 10 |
| 7 | PLXNA4 | plexin A4 | 221866 | 128567 | 106554 | 26, 8, 45 |
| 7 | PMS2 | PMS1 homolog 2, mismatch repair system component | 122512 | 155026 | 106305 | 7, 40, 23 |
| 7 | PODXL | podocalyxin like | 128567 | 128585 | 221866 | 12, 27, 1 |
| 7 | PVRIG | poliovirus receptor related immunoglobulin domain containing | 213413 | 239521 | 214300 | 21, 5, 41 |
| 7 | PAPOLB | poly(A) polymerase beta | 218823 | 157927 | 136297 | 38, 8, 5 |
| 7 | PARP12 | poly(ADP-ribose) polymerase family member 12 | 059378 | 059377 | 006459 | 24, 4, 30 |
| 7 | PKD1L1 | polycystin 1 like 1, transient receptor potential channel interacting | 158683 | 136273 | 164744 | 44, 38, 14 |
| 7 | GALNT11 | polypeptide N-acetylgalactosaminyltransferase 11 | 178234 | 106648 | 055609 | 17, 40, 31 |
| 7 | GALNTL5 | polypeptide N-acetylgalactosaminyltransferase-like 5 | 106648 | 106617 | 178234 | 38, 8, |
| 7 | POMZP3 | POM121 and ZP3 fusion | 146707 | 185040 | 135205 | 34, 10, 1 |
| 7 | POM121 | POM121 transmembrane nucleoporin | 196313 | 277149 | 155428 | 22, 3, 35 |
| 7 | POM121C | POM121 transmembrane nucleoporin C | 272391 | 178809 | 170092 | 30, 37, 31 |
| 7 | POM121L12 | POM121 transmembrane nucleoporin like 12 | 221900 | 106078 | 170419 | 38, 28, |
| 7 | POP7 | POP7 homolog, ribonuclease P/MRP subunit | 172336 | 146830 | 130427 | 18, 34, 27 |
| 7 | KCTD7 | potassium channel tetramerization domain containing 7 | 243335 | 169902 | 154710 | 8, 11, 33 |
| 7 | KCND2 | potassium voltage-gated channel subfamily D member 2 | 184408 | 106013 | 106025 | 8, 45, 2 |
| 7 | KCNH2 | potassium voltage-gated channel subfamily H member 2 | 055118 | 002726 | 164867 | 3, 31, 26 |
| 7 | POU6F2 | POU class 6 homeobox 2 | 106536 | 006715 | 241127 | 38, 8, 16 |
| 7 | PRKRIP1 | PRKR interacting protein 1 (IL11 inducible) | 128563 | 260097 | 160991 | 17, 33, 18 |
| 7 | PCOLCE | procollagen C-endopeptidase enhancer | 106333 | 106336 | 106330 | 34, 6, 15 |
| 7 | PLOD3 | procollagen-lysine,2-oxoglutarate 5-dioxygenase 3 | 106397 | 106384 | 106400 | 3, 45, 35 |
| 7 | PIP | prolactin induced protein | 159763 | 225781 | 236398 | 34, 14, 33 |
| 7 | PRR15 | proline rich 15 | 176532 | 106069 | 122574 | 16, 27, 40 |
| 7 | PRRT4 | proline rich transmembrane protein 4 | 224940 | 106344 | 106348 | 12, 14, 23 |
| 7 | PRSS1 | protease, serine 1 | 204983 | 232869 | 275896 | 28, 4, 19 |
| 7 | PRSS2 | protease, serine 2 | 275896 | 204983 | 282431 | |
| 7 | PRSS37 | protease, serine 37 | 165076 | 127366 | 257335 | 26, 10, 38 |
| 7 | PRSS58 | protease, serine 58 | 258223 | 257743 | 226660 | 38, |
| 7 | PSMC2 | proteasome 26S subunit, ATPase 2 | 161057 | 105821 | 170615 | 13, 3, 30 |
| 7 | PSMG3 | proteasome assembly chaperone 3 | 157778 | 164855 | 225968 | 43, 6, 3 |
| 7 | PSMA2 | proteasome subunit alpha 2 | 106588 | 256646 | 106591 | 29, 30, 3 |
| 7 | POT1 | protection of telomeres 1 | 128513 | 275356 | 179603 | 9, 26, 31 |
| 7 | PDIA4 | protein disulfide isomerase family A member 4 | 155660 | 106462 | 197362 | 40, 37, 13 |
| 7 | PRKAG2 | protein kinase AMP-activated non-catalytic subunit gamma 2 | 106617 | 106615 | 106648 | 43, 26, 29 |
| 7 | PRKAR1B | protein kinase cAMP-dependent type I regulatory subunit beta | 188191 | 197461 | 164818 | 8, 27, 26 |
| 7 | PRKAR2B | protein kinase cAMP-dependent type II regulatory subunit beta | 005249 | 105851 | 105856 | 1, 26, 2 |
| 7 | PPP1R17 | protein phosphatase 1 regulatory subunit 17 | 106341 | 180347 | 154678 | 8, 20, 14 |
| 7 | PPP1R35 | protein phosphatase 1 regulatory subunit 35 | 160813 | 146834 | 185955 | 6, 28, 41 |
| 7 | PPP1R3A | protein phosphatase 1 regulatory subunit 3A | 154415 | 214194 | 128573 | 25, 15, 24 |
| 7 | PPP1R9A | protein phosphatase 1 regulatory subunit 9A | 158528 | 242265 | 236197 | 29, 31, 42 |
| 7 | PTPN12 | protein tyrosine phosphatase, non-receptor type 12 | 127947 | 186088 | 187257 | 26, 11, 1 |
| 7 | PTPRN2 | protein tyrosine phosphatase, receptor type N2 | 155093 | 105993 | 146918 | 31, 8, 28 |
| 7 | PTPRZ1 | protein tyrosine phosphatase, receptor type Z1 | 106278 | 196937 | 008311 | |
| 7 | PUS7 | pseudouridylate synthase 7 (putative) | 091127 | 135250 | 135249 | 4, 24, 30 |
| 7 | PURB | purine rich element binding protein B | 146676 | 105968 | 136286 | 29, 2, 4 |
| 7 | PHTF2 | putative homeodomain transcription factor 2 | 006576 | 135211 | 187391 | 34, 22, 40 |
| 7 | PDK4 | pyruvate dehydrogenase kinase 4 | 004799 | 005981 | 158560 | 42, 2, 25 |
| 7 | RABGEF1 | RAB guanine nucleotide exchange factor 1 | 154710 | 243335 | 106609 | 1, 13, 42 |
| 7 | RAB19 | RAB19, member RAS oncogene family | 146955 | 157800 | 133606 | 40, 23, |
| 7 | RINT1 | RAD50 interactor 1 | 135249 | 091127 | 185055 | 9, 10, 22 |
| 7 | RSPH10B | radial spoke head 10 homolog B | 155026 | 122674 | 122512 | 38, 2, 40 |
| 7 | RSPH10B2 | radial spoke head 10 homolog B2 | 169402 | 164631 | 146574 | |
| 7 | RADIL | Rap associating with DIL domain | 157927 | 242802 | 218823 | 23, 38, 35 |
| 7 | RAPGEF5 | Rap guanine nucleotide exchange factor 5 | 136237 | 164649 | 105889 | 29, 30, 22 |
| 7 | RHEB | Ras homolog enriched in brain | 106615 | 127377 | 106617 | 10, 45, 32 |
| 7 | RALA | RAS like proto-oncogene A | 006451 | 241127 | 065883 | 45, 43, 24 |
| 7 | RASA4 | RAS p21 protein activator 4 | 105808 | 205238 | 205236 | 41, 29, 26 |
| 7 | RASA4B | RAS p21 protein activator 4B | 170667 | 005075 | 168255 | |
| 7 | RAC1 | ras-related C3 botulinum toxin substrate 1 (rho family, small GTP binding protein | 136238 | 178397 | 164535 | 11, 3, 28 |
| | | Rac1) | | | | |
| 7 | RBAK | RB associated KRAB zinc finger | 146587 | 272968 | 157954 | 40, 31, 29 |
| 7 | RBAK- | RBAK-RBAKDN readthrough | 272968 | 136297 | 146587 | |
| | RBAKDN | | | | | |
| 7 | RCC1L | RCC1 like | 274523 | 274070 | 174428 | 34, 21, 27 |
| 7 | RAMP3 | receptor activity modifying protein 3 | 122679 | 136270 | 164742 | 1, 26, 28 |
| 7 | RELN | reelin | 189056 | 170615 | 164815 | 11, 42, 8 |
| 7 | RFC2 | replication factor C subunit 2 | 049541 | 086730 | 106665 | 41, 34, 21 |
| 7 | REPIN1 | replication initiator 1 | 214022 | 106538 | 196456 | 39, 22, 29 |
| 7 | RPA3 | replication protein A3 | 106399 | 164654 | 219545 | 34, 23, 21 |
| 7 | RP9 | retinitis pigmentosa 9 (autosomal dominant) | 164610 | 122643 | 122507 | 27, 22, 15 |
| 7 | RARRES2 | retinoic acid receptor responder 2 | 106538 | 188707 | 214022 | 29, 2, 1 |
| 7 | ARHGEF35 | Rho guanine nucleotide exchange factor 35 | 213214 | 225932 | 212807 | 23, 16, 20 |
| 7 | ARHGEF5 | Rho guanine nucleotide exchange factor 5 | 050327 | 221970 | 106410 | 4, 3, 29 |
| 7 | RHBDD2 | rhomboid domain containing 2 | 005486 | 106178 | 127948 | 34, 26, 31 |
| 7 | RNF133 | ring finger protein 133 | 188050 | 081803 | 235631 | 38, 8, |
| 7 | RNF148 | ring finger protein 148 | 235631 | 188050 | 128519 | 38, 17, 16 |
| 7 | RNF216 | ring finger protein 216 | 011275 | 075618 | 122543 | |
| 7 | RNF32 | ring finger protein 32 | 105982 | 164690 | 105983 | 38, 34, 42 |
| 7 | RBM28 | RNA binding motif protein 28 | 106344 | 174697 | 224940 | 3, 9, 12 |
| 7 | RBM33 | RNA binding motif protein 33 | 184863 | 146910 | 164690 | 39, 31, 22 |
| 7 | RBM48 | RNA binding motif protein 48 | 127993 | 127980 | 234545 | 31, 30, 27 |
| 7 | POLR2J | RNA polymerase II subunit J | 005075 | 161036 | 170667 | 23, 29, 3 |
| 7 | POLR2J2 | RNA polymerase II subunit J2 | 228049 | 173678 | 279168 | 21, 30, 23 |
| 7 | POLR2J3 | RNA polymerase II subunit J3 | 168255 | 170667 | 270249 | |
| 7 | RSBN1L | round spermatid basic protein 1 like | 187257 | 127947 | 135211 | 23, 22, 14 |
| 7 | RUNDC3B | RUN domain containing 3B | 105784 | 085563 | 075303 | 42, 14, 8 |
| 7 | SUN1 | Sad1 and UNC84 domain containing 1 | 164828 | 164818 | 239857 | 42, 31, 38 |
| 7 | SUN3 | Sad1 and UNC84 domain containing 3 | 164744 | 158683 | 164746 | 38, 6, 10 |
| 7 | SGCE | sarcoglycan epsilon | 127990 | 127995 | 242265 | 45, 26, 10 |
| 7 | SBDS | SBDS ribosome assembly guanine nucleotide exchange factor | 126524 | 106609 | 198874 | |
| 7 | SSC4D | scavenger receptor cysteine rich family member with 4 domains | 146700 | 170027 | 188372 | 30, 40, 12 |
| 7 | SOIN | scinderin | 006747 | 226690 | 122644 | 32, 42, 26 |
| 7 | SOSTDC1 | sclerostin domain containing 1 | 171243 | 214960 | 205858 | 3, 11, 30 |
| 7 | SSPO | SCO-spondin | 197558 | 181444 | 106479 | 31, 27, 22 |
| 7 | SEC61G | Sec61 translocon gamma subunit | 132432 | 170419 | 146648 | 2, 7, 43 |
| 7 | SCRN1 | secemin 1 | 136193 | 122574 | 106080 | 29, 8, 22 |
| 7 | SFRP4 | secreted frizzled related protein 4 | 106483 | 086288 | 010270 | 11, 9, 44 |
| 7 | SEMA3A | semaphorin 3A | 075213 | 170381 | 153993 | 14, 8, 12 |
| 7 | SEMA3C | semaphorin 3C | 075223 | 214415 | 019991 | 4, 42, 23 |
| 7 | SEMA3D | semaphprin 3D | 153993 | 075213 | 198822 | |
| 7 | SEMA3E | semaphprin 3E | 170381 | 186472 | 075213 | 42, 30, 10 |
| 7 | SEPT14 | septin 14 | 154997 | 154978 | 249773 | 38, 8, |
| 7 | SEPT7 | septin 7 | 122545 | 122557 | 122547 | 45, 18, 8 |
| 7 | SSMEM1 | serine rich single-pass membrane protein 1 | 165120 | 146842 | 158516 | 38, 14, |
| 7 | SRRM3 | serine/arginine repetitive matrix 3 | 177679 | 146701 | 106211 | 14, 23, 26 |
| 7 | STK17A | serine/threonine kinase 17a | 164543 | 002746 | 106603 | 41, 22, 9 |
| 7 | STK31 | serine/threonine kinase 31 | 196335 | 188732 | 122585 | 38, 10, 40 |
| 7 | STYXL1 | serine/threonine/tyrosine interacting like 1 | 127952 | 189077 | 146701 | 27, 6, 7 |
| 7 | SERPINE1 | serpin family E member 1 | 106366 | 169871 | 106367 | 43, 45, 32 |
| 7 | SRRT | serrate, RNA effector molecule | 087087 | 087077 | 176125 | 21, 22, 41 |
| 7 | SH2B2 | SH2B adapter protein 2 | 160999 | 257923 | 260097 | 21, 22, 25 |
| 7 | SDK1 | sidekick cell adhesion molecule 1 | 146555 | 198286 | 164916 | 10, 36, 15 |
| 7 | SAP25 | Sin3A associated protein 25 | 205307 | 106351 | 077454 | 39, 5, 37 |
| 7 | SSBP1 | single stranded DNA binding protein 1 | 106028 | 214102 | 127362 | |
| 7 | SMURF1 | SMAD specific E3 ubiquitin protein ligase 1 | 198742 | 196367 | 185467 | 38, 42, 1 |
| 7 | SMKR1 | small lysine rich protein 1 | 240204 | 128578 | 106459 | 38, 20, 10 |
| 7 | SMO | smoothened, frizzled class receptor | 128602 | 158457 | 158467 | 12, 11, 10 |
| 7 | SLC12A9 | solute carrier family 12 member 9 | 146828 | 196411 | 087077 | 9, 26, 37 |
| 7 | SLC13A1 | solute carrier family 13 member 1 | 081800 | 128519 | 164675 | 17, 16, 44 |
| 7 | SLC13A4 | solute carrier family 13 member 4 | 164707 | 243317 | 189320 | 32, 8, 4 |
| 7 | SLC25A13 | solute carrier family 25 member 13 | 004864 | 158560 | 127922 | 2, 3, 13 |
| 7 | SLC25A40 | solute carrier family 25 member 40 | 075303 | 105784 | 006634 | 2, 22, 43 |
| 7 | SLC26A3 | solute carrier family 26 member 3 | 091138 | 105879 | 091140 | 16, 33, 37 |
| 7 | SLC26A4 | solute carrier family 26 member 4 | 091137 | 075790 | 105879 | 40, 45, 42 |
| 7 | SLC26A5 | solute carrier family 26 member 5 | 170615 | 161057 | 189056 | 37, 8, |
| 7 | SLC29A4 | solute carrier family 29 member 4 | 164638 | 157954 | 182095 | 34, 3, 14 |
| 7 | SLC35B4 | solute carrier family 35 member B4 | 205060 | 155530 | 085662 | 26, 23, 45 |
| 7 | SLC37A3 | solute carrier family 37 member 3 | 157800 | 006459 | 146955 | |
| 7 | SLC4A2 | solute carrier family 4 member 2 | 164889 | 164885 | 164896 | 41, 9, 28 |
| 7 | SHH | sonic hedgehog | 164690 | 184863 | 105982 | |
| 7 | SRI | sorcin | 075142 | 008277 | 127954 | 8, 3, 16 |
| 7 | SNX10 | sorting nexin 10 | 086300 | 122565 | 005020 | 7, 5, 17 |
| 7 | SNX13 | sorting nexin 13 | 071189 | 283321 | 229937 | 31, 25, 26 |
| 7 | SNX8 | sorting nexin 8 | 106266 | 106268 | 106263 | 29, 35, 22 |
| 7 | SP4 | Sp4 transcription factor | 105866 | 164651 | 105877 | 39, 11, 25 |
| 7 | SP8 | Sp8 transcription factor | 164651 | 004846 | 105866 | 33, 7, 8 |
| 7 | SPDYE1 | speedy/RINGO cell cycle regulator family member E1 | 136206 | 078967 | 136279 | 18, 22, 40 |
| 7 | SPDYE16 | speedy/RINGO cell cycle regulator family member E16 | 185040 | 243566 | 146707 | |
| 7 | SPDYE2 | speedy/RINGO cell cycle regulator family member E2 | 205238 | 270249 | 105808 | 31, 18, 24 |
| 7 | SPDYE2B | speedy/RINGO cell cycle regulator family member E2B | 173678 | 267645 | 228049 | |
| 7 | SPDYE3 | speedy/RINGO cell cycle regulator family member E3 | 214300 | 213413 | 121716 | 18, 43, 9 |
| 7 | SPDYE5 | speedy/RINGO cell cycle regulator family member E5 | 170092 | 272391 | 127946 | 40, 4, 3 |
| 7 | SPDYE6 | speedy/RINGO cell cycle regulator family member E6 | 260097 | 160999 | 128563 | |
| 7 | SPAM1 | sperm adhesion molecule 1 | 106304 | 106302 | 234224 | 38, 10, 8 |
| 7 | SHFM1 | Split hand/foot malformation (ectrodactyly) type 1 | 127922 | 004864 | 006377 | |
| 7 | SKAP2 | src kinase associated phosphoprotein 2 | 005020 | 086300 | 105991 | 4, 41, 38 |
| 7 | SRPK2 | SRSF protein kinase 2 | 135250 | 005483 | 091127 | 18, 8, 38 |
| 7 | SND1 | staphylococcal nuclease and tudor domain containing 1 | 197157 | 106331 | 128594 | 42, 43, 38 |
| 7 | STARD3NL | STARD3 N-terminal like | 010270 | 106483 | 227191 | 29, 26, 23 |
| 7 | STEAP1 | STEAP family member 1 | 164647 | 164645 | 157214 | 11, 33, 6 |
| 7 | STEAP1B | STEAP family member 1B | 105889 | 136237 | 136244 | 10, 30, 45 |
| 7 | STEAP2 | STEAP2 metalloreductase | 157214 | 164647 | 105792 | 33, 26, 16 |
| 7 | STEAP4 | STEAP4 metalloreductase | 127954 | 075142 | 182348 | 30, 32, 29 |
| 7 | SAMD9 | sterile alpha motif domain containing 9 | 205413 | 105810 | 177409 | 24, 30, 34 |
| 7 | SAMD9L | sterile alpha motif domain containing 9 like | 177409 | 205413 | 188175 | 1, 44, 25 |
| 7 | STRA8 | stimulated by retinoic acid 8 | 146857 | 105875 | 080802 | |
| 7 | STRIP2 | striatin interacting protein 2 | 128578 | 158467 | 240204 | 6, 31, 41 |
| 7 | STAG3 | stromal antigen 3 | 066923 | 213420 | 239521 | 38, 22, 41 |
| 7 | SDHAF3 | succinate dehydrogenase complex assembly factor 3 | 196636 | 105880 | 006128 | 4, 30, 10 |
| 7 | SUGCT | succinyl-CoA: glutarate-CoA transferase | 175600 | 168303 | 122641 | 10, 19, 17 |
| 7 | SUMF2 | sulfatase modifying factor 2 | 129103 | 146731 | 164776 | 13, 37, 40 |
| 7 | ST7 | suppression of tumorigenicity 7 | 004866 | 198898 | 105989 | 9, 16, 17 |
| 7 | SVOPL | SVOP like | 157703 | 122779 | 105929 | 9, 27, 25 |
| 7 | SMARCD3 | SWI/SNF related, matrix associated, actin dependent regulator of chromatin, | 082014 | 033100 | 013374 | 15, 26, 27 |
| | | subfamily d, member 3 | | | | |
| 7 | SYPL1 | synaptophysin like 1 | 008282 | 128536 | 105835 | 13, 4, 1 |
| 7 | STX1A | syntaxin 1A | 106089 | 071462 | 106077 | 31, 8, 26 |
| 7 | TRBC1 | T cell receptor beta constant 1 | 211751 | 282780 | 211764 | |
| 7 | TRBC2 | T cell receptor beta constant 2 | 211772 | 282499 | 211752 | |
| 7 | TRBD1 | T cell receptor beta diversity 1 | 282431 | 275896 | 282320 | |
| 7 | TRBJ1-1 | T cell receptor beta joining 1-1 | 282320 | 282431 | 282420 | |
| 7 | TRBJ1-2 | T cell receptor beta joining 1-2 | 282420 | 282320 | 282133 | |
| 7 | TRBJ1-3 | T cell receptor beta joining 1-3 | 282133 | 282420 | 281958 | |
| 7 | TRBJ1-4 | T cell receptor beta joining 1-4 | 281958 | 282133 | 282173 | |
| 7 | TRBJ1-5 | T cell receptor beta joining 1-5 | 282173 | 281958 | 282780 | |
| 7 | TRBJ1-6 | T cell receptor beta joining 1-6 | 282780 | 282173 | 211751 | |
| 7 | TRBJ2-1 | T cell receptor beta joining 2-1 | 211764 | 211751 | 211765 | |
| 7 | TRBJ2-2 | T cell receptor beta joining 2-2 | 211765 | 211764 | 211766 | |
| 7 | TRBJ2-2P | T cell receptor beta joining 2-2P (non-functional) | 211766 | 211765 | 211767 | |
| 7 | TRBJ2-3 | T cell receptor beta joining 2-3 | 211767 | 211766 | 211768 | |
| 7 | TRBJ2-4 | T cell receptor beta joining 2-4 | 211768 | 211767 | 211769 | |
| 7 | TRBJ2-5 | T cell receptor beta joining 2-5 | 211769 | 211768 | 211770 | |
| 7 | TRBJ2-6 | T cell receptor beta joining 2-6 | 211770 | 211769 | 211771 | |
| 7 | TRBJ2-7 | T cell receptor beta joining 2-7 | 211771 | 211770 | 237254 | |
| 7 | TRBV10-1 | T cell receptor beta variable 10-1 (gene/pseudogene) | 211717 | 211716 | 211720 | |
| 7 | TRBV10-2 | T cell receptor beta variable 10-2 | 229769 | 211720 | 211721 | |
| 7 | TRBV10-3 | T cell receptor beta variable 10-3 | 275791 | 276405 | 276597 | |
| 7 | TRBV11-1 | T cell receptor beta variable 11-1 | 211720 | 211717 | 229769 | |
| 7 | TRBV11-3 | T cell receptor beta variable 11-3 | 276597 | 275791 | 274752 | |
| 7 | TRBV12-3 | T cell receptor beta variable 12-3 | 274752 | 276597 | 276953 | |
| 7 | TRBV12-4 | T cell receptor beta variable 12-4 | 276953 | 274752 | 275158 | |
| 7 | TRBV12-5 | T cell receptor beta variable 12-5 | 275158 | 276953 | 275743 | |
| 7 | TRBV13 | T cell receptor beta variable 13 | 276405 | 278030 | 275791 | |
| 7 | TRBV14 | T cell receptor beta variable 14 | 275743 | 275158 | 276819 | |
| 7 | TRBV15 | T cell receptor beta variable 15 | 276819 | 275743 | 275243 | |
| 7 | TRBV16 | T cell receptor beta variable 16 (gene/pseudogene) | 275243 | 276819 | 277880 | |
| 7 | TRBV17 | T cell receptor beta variable 17 (non-functional) | 277880 | 275243 | 276557 | |
| 7 | TRBV18 | T cell receptor beta variable 18 | 276557 | 277880 | 211746 | |
| 7 | TRBV19 | T cell receptor beta variable 19 | 211746 | 276557 | 211747 | 39, 30, 23 |
| 7 | TRBV2 | T cell receptor beta variable 2 | 226660 | 258223 | 237702 | |
| 7 | TRBV20-1 | T cell receptor beta variable 20-1 | 211747 | 211746 | 211749 | |
| 7 | TRBV23-1 | T cell receptor beta variable 23-1 (non-functional) | 211749 | 211747 | 211750 | |
| 7 | TRBV24-1 | T cell receptor beta variable 24-1 | 211750 | 211749 | 270672 | |
| 7 | TRBV25-1 | T cell receptor beta variable 25-1 | 282499 | 270672 | 211772 | |
| 7 | TRBV27 | T cell receptor beta variable 27 | 211752 | 211772 | 211753 | 39, 7, 5 |
| 7 | TRBV28 | T cell receptor beta variable 28 | 211753 | 211752 | 232869 | |
| 7 | TRBV29-1 | T cell receptor beta variable 29-1 | 232869 | 211753 | 204983 | |
| 7 | TRBV30 | T cell receptor beta variable 30 (gene/pseudogene) | 237254 | 211771 | 106123 | |
| 7 | TRBV3-1 | T cell receptor beta variable 3-1 | 237702 | 226660 | 211710 | |
| 7 | TRBV4-1 | T cell receptor beta variable 4-1 | 211710 | 237702 | 211734 | |
| 7 | TRBV4-2 | T cell receptor beta variable 4-2 | 211745 | 211707 | 283063 | |
| 7 | TRBV5-1 | T cell receptor beta variable 5-1 | 211734 | 211710 | 211706 | |
| 7 | TRBV5-3 | T cell receptor beta variable 5-3 (non-functional) | 211715 | 211714 | 211716 | |
| 7 | TRBV5-4 | T cell receptor beta variable 5-4 | 230099 | 253409 | 211724 | |
| 7 | TRBV5-5 | T cell receptor beta variable 5-5 | 211725 | 211724 | 253188 | |
| 7 | TRBV5-6 | T cell receptor beta variable 5-6 | 211728 | 211727 | 253534 | |
| 7 | TRBV5-7 | T cell receptor beta variable 5-7 (non-functional) | 211731 | 253291 | 278030 | |
| 7 | TRBV6-1 | T cell receptor beta variable 6-1 | 211706 | 211734 | 211707 | |
| 7 | TRBV6-2 | T cell receptor beta variable 6-2 (gene/pseudogene) | 283063 | 211745 | 282939 | |
| 7 | TRBV6-4 | T cell receptor beta variable 6-4 | 211713 | 282939 | 211714 | |
| 7 | TRBV6-5 | T cell receptor beta variable 6-5 | 211721 | 229769 | 253409 | |
| 7 | TRBV6-6 | T cell receptor beta variable 6-6 | 211724 | 230099 | 211725 | |
| 7 | TRBV6-7 | T cell receptor beta variable 6-7 (non-functional) | 253188 | 211725 | 211727 | |
| 7 | TRBV6-8 | T cell receptor beta variable 6-8 | 253534 | 211728 | 253291 | |
| 7 | TRBV7-1 | T cell receptor beta variable 7-1 (non-functional) | 211707 | 211706 | 211745 | |
| 7 | TRBV7-2 | T cell receptor beta variable 7-2 | 282939 | 283063 | 211713 | |
| 7 | TRBV7-3 | T cell receptor beta variable 7-3 | 211714 | 211713 | 211715 | |
| 7 | TRBV7-4 | T cell receptor beta variable 7-4 (gene/pseudogene) | 253409 | 211721 | 230099 | |
| 7 | TRBV7-6 | T cell receptor beta variable 7-6 | 211727 | 253188 | 211728 | |
| 7 | TRBV7-7 | T cell receptor beta variable 7-7 | 253291 | 253534 | 211731 | |
| 7 | TRBV7-9 | T cell receptor beta variable 7-9 | 278030 | 211731 | 276405 | |
| 7 | TRBV9 | T cell receptor beta variable 9 | 211716 | 211715 | 211717 | |
| 7 | TRGC1 | T cell receptor gamma constant 1 | 211689 | 211688 | 211690 | |
| 7 | TRGC2 | T cell receptor gamma constant 2 | 227191 | 010270 | 211687 | |
| 7 | TRGJ1 | T cell receptor gamma joining 1 | 211690 | 211689 | 211691 | |
| 7 | TRGJ2 | T cell receptor gamma joining 2 | 211687 | 227191 | 211688 | |
| 7 | TRGJP | T cell receptor gamma joining P | 211691 | 211690 | 211692 | |
| 7 | TRGJP1 | T cell receptor gamma joining P1 | 211692 | 211691 | 211693 | |
| 7 | TRGJP2 | T cell receptor gamma joining P2 | 211688 | 211687 | 211689 | |
| 7 | TRGV1 | T cell receptor gamma variable 1 (non-functional) | 211701 | 233306 | 078053 | |
| 7 | TRGV10 | T cell receptor gamma variable 10 (non-functional) | 211694 | 211693 | 211695 | |
| 7 | TRGV11 | T cell receptor gamma variable 11 (non-functional) | 211693 | 211692 | 211694 | |
| 7 | TRGV2 | T cell receptor gamma variable 2 | 233306 | 211699 | 211701 | |
| 7 | TRGV3 | T cell receptor gamma variable 3 | 211699 | 211698 | 233306 | |
| 7 | TRGV4 | T cell receptor gamma variable 4 | 211698 | 211697 | 211699 | |
| 7 | TRGV5 | T cell receptor gamma variable 5 | 211697 | 211696 | 211698 | |
| 7 | TRGV8 | T cell receptor gamma variable 8 | 211696 | 211695 | 211697 | |
| 7 | TRGV9 | T cell receptor gamma variable 9 | 211695 | 211694 | 211696 | |
| 7 | TAC1 | tachykinin precursor 1 | 006128 | 196636 | 070669 | 26, 36, 8 |
| 7 | TAS2R16 | taste 2 receptor member 16 | 128519 | 235631 | 081800 | |
| 7 | TAS2R3 | taste 2 receptor member 3 | 127362 | 106028 | 127364 | 25, |
| 7 | TAS2R38 | taste 2 receptor member 38 | 257138 | 258227 | 257743 | |
| 7 | TAS2R39 | taste 2 receptor member 39 | 236398 | 159763 | 221937 | |
| 7 | TAS2R4 | taste 2 receptor member 4 | 127364 | 127362 | 127366 | |
| 7 | TAS2R40 | taste 2 receptor member 40 | 221937 | 236398 | 197448 | 32, |
| 7 | TAS2R41 | taste 2 receptor member 41 | 221855 | 185899 | 176510 | |
| 7 | TAS2R5 | taste 2 receptor member 5 | 127366 | 127364 | 165076 | 27, |
| 7 | TAS2R60 | taste 2 receptor member 60 | 185899 | 146904 | 221855 | |
| 7 | TAF6 | TATA-box binding protein associated factor 6 | 106290 | 221838 | 166997 | 34, 40, 13 |
| 7 | TAX1BP1 | Tax1 binding protein 1 | 106052 | 106049 | 153814 | 45, 31, 2 |
| 7 | TBX20 | T-box 20 | 164532 | 173852 | 122557 | 17, |
| 7 | TECPR1 | tectonin beta-propeller repeat containing 1 | 205356 | 180535 | 164713 | 42, 25, 1 |
| 7 | TNS3 | tensin 3 | 136205 | 146674 | 136273 | 18, 40, 32 |
| 7 | TES | testin LIM domain protein | 135269 | 105967 | 281656 | 40, 44, 23 |
| 7 | TSGA13 | testis specific 13 | 213265 | 158623 | 266265 | 38, 8, |
| 7 | TSPAN12 | tetraspanin 12 | 106025 | 184408 | 071243 | 2, 4, 42 |
| 7 | TSPAN13 | tetraspanin 13 | 106537 | 136261 | 280130 | 3, 31, 4 |
| 7 | TSPAN33 | tetraspanin 33 | 158457 | 230626 | 128602 | 22, 1, 17 |
| 7 | TTC26 | tetratricopeptide repeat domain 26 | 105948 | 105939 | 157741 | 42, 38, 30 |
| 7 | THAP5 | THAP domain containing 5 | 177683 | 135241 | 128590 | 7, 34, 29 |
| 7 | TPK1 | thiamin pyrophosphokinase 1 | 196511 | 106410 | 174469 | 38, 32, 15 |
| 7 | THSD7A | thrombospondin type 1 domain containing 7A | 005108 | 106443 | 106460 | 11, 32, 1 |
| 7 | TBXAS1 | thromboxane A synthase 1 | 059377 | 064393 | 059378 | 36, 5, 10 |
| 7 | TRIP6 | thyroid hormone receptor interactor 6 | 087077 | 146828 | 087087 | 9, 3, 27 |
| 7 | TFPI2 | tissue factor pathway inhibitor 2 | 105825 | 127928 | 127920 | 32, 45, 43 |
| 7 | TRIL | TLR4 interactor with leucine rich repeats | 255690 | 146592 | 106066 | 31, 10, 12 |
| 7 | TFEC | transcription factor EC | 105967 | 135272 | 135269 | |
| 7 | TBL2 | transducin beta like 2 | 106638 | 106635 | 009950 | 38, 9, 41 |
| 7 | TFR2 | transferrin receptor 2 | 106327 | 106330 | 077080 | 19, 10, 9 |
| 7 | TRRAP | transformation/transcription domain associated protein | 196367 | 166448 | 198742 | 18, 22, 21 |
| 7 | TRA2A | transformer 2 alpha homolog | 164548 | 136231 | 169193 | 36, 29, 18 |
| 7 | TBRG4 | transforming growth factor beta regulator 4 | 136270 | 136274 | 122679 | 9, 2, 21 |
| 7 | TRPV5 | transient receptor potential cation channel subfamily V member 5 | 127412 | 165125 | 165131 | 5, 20, |
| 7 | TRPV6 | transient receptor potential cation channel subfamily V member 6 | 165125 | 106123 | 127412 | |
| 7 | TOMM7 | translocase of outer mitochondrial membrane 7 | 196683 | 281889 | 122591 | 41, 25, 43 |
| 7 | TMUB1 | transmembrane and ubiquitin like domain containing 1 | 164897 | 164896 | 133612 | 22, 3, 9 |
| 7 | TMED4 | transmembrane p24 trafficking protein 4 | 158604 | 136271 | 105953 | 29, 11, 18 |
| 7 | TMEM106B | transmembrane protein 106B | 106460 | 005108 | 146530 | 22, 31, 4 |
| 7 | TMEM120A | transmembrane protein 120A | 189077 | 127948 | 127952 | 3, 1, 26 |
| 7 | TMEM130 | transmembrane protein 130 | 166448 | 106236 | 196367 | 8, 31, 26 |
| 7 | TMEM139 | transmembrane protein 139 | 178826 | 197448 | 106144 | 17, 32, 16 |
| 7 | TMEM140 | transmembrane protein 140 | 146859 | 122783 | 105875 | 1, 28, 36 |
| 7 | TMEM168 | transmembrane protein 168 | 146802 | 181016 | 164603 | 13, 29, 42 |
| 7 | TMEM176A | transmembrane protein 176A | 002933 | 106565 | 002726 | 27, 13, 28 |
| 7 | TMEM176B | transmembrane protein 176B | 106565 | 196329 | 002933 | 30, 16, 27 |
| 7 | TMEM178B | transmembrane protein 178B | 261115 | 090263 | 006530 | 40, 29, 8 |
| 7 | TMEM184A | transmembrane protein 184A | 164855 | 198517 | 157778 | |
| 7 | TMEM196 | transmembrane protein 196 | 173452 | 105849 | 183742 | 10, 14, 28 |
| 7 | TMEM209 | transmembrane protein 209 | 146842 | 128607 | 165120 | 30, 22, 4 |
| 7 | TMEM213 | transmembrane protein 213 | 214128 | 105929 | 122778 | 17, 42, 23 |
| 7 | TMEM229A | transmembrane protein 229A | 234224 | 106304 | 170775 | 14, 38, 8 |
| 7 | TMEM243 | transmembrane protein 243 | 135185 | 135164 | 005469 | 29, 22, 21 |
| 7 | TMEM248 | transmembrane protein 248 | 106609 | 154710 | 126524 | 6, 31, 29 |
| 7 | TMEM60 | transmembrane protein 60 | 135211 | 187257 | 006576 | 29, 31, 22 |
| 7 | TNPO3 | transportin 3 | 064419 | 128604 | 230626 | 24, 34, 3 |
| 7 | TNRC18 | trinucleotide repeat containing 18 | 182095 | 164638 | 155034 | 18, 29, 3 |
| 7 | TRIM24 | tripartite motif containing 24 | 122779 | 122787 | 157703 | 12, 18, 3 |
| 7 | TRIM4 | tripartite motif containing 4 | 146833 | 244623 | 176402 | 21, 22, 30 |
| 7 | TRIM50 | tripartite motif containing 50 | 146755 | 130305 | 077800 | 29, 4, 17 |
| 7 | TRIM56 | tripartite motif containing 56 | 169871 | 169876 | 106366 | 22, 21, 36 |
| 7 | TRIM73 | tripartite motif containing 73 | 178809 | 174428 | 272391 | |
| 7 | TRIM74 | tripartite motif containing 74 | 155428 | 196313 | 130305 | 3, 24, 8 |
| 7 | TYW1 | tRNA-yW synthesizing protein 1 homolog | 198874 | 126524 | 158321 | 6, 15, 37 |
| 7 | TYW1B | tRNA-yW synthesizing protein 1 homolog B | 277149 | 183166 | 196313 | 39, 44, 38 |
| 7 | TCAF1 | TRPM8 channel associated factor 1 | 198420 | 271321 | 221910 | |
| 7 | TCAF2 | TRPM8 channel associated factor 2 | 170379 | 271079 | 283528 | |
| 7 | TSC22D4 | TSC22 domain family member 4 | 166925 | 185955 | 166924 | 26, 41, 34 |
| 7 | TTYH3 | tweety family member 3 | 136295 | 106012 | 174945 | 34, 35, 12 |
| 7 | TWIST1 | twist family bHLH transcription factor 1 | 122691 | 048052 | 146618 | 6, 18, 44 |
| 7 | TWISTNB | TWIST neighbor | 105849 | 146618 | 173452 | 30, 2, 27 |
| 7 | YWHAG | tyrosine 3-monooxygenase/tryptophan 5-monooxygenase activation protein | 170027 | 106211 | 146700 | 26, 8, 44 |
| | | gamma | | | | |
| 7 | TPST1 | tyrosylprotein sulfotransferase 1 | 169902 | 241258 | 243335 | 38, 6, 32 |
| 7 | UMAD1 | UBAP1-MVB12-associated (UMA) domain containing 1 | 219545 | 106399 | 106415 | 40, 4, 18 |
| 7 | UBN2 | ubinuclein 2 | 157741 | 105948 | 164898 | 22, 40, 28 |
| 7 | UBE2D4 | ubiquitin conjugating enzyme E2 D4 (putative) | 078967 | 106608 | 136206 | 36, 25, 15 |
| 7 | UBE2H | ubiquitin conjugating enzyme E2 H | 186591 | 106459 | 091732 | 29, 26, 27 |
| 7 | UBE3C | ubiquitin protein ligase E3C | 009335 | 130675 | 105993 | 30, 45, 29 |
| 7 | USP42 | ubiquitin specific peptidase 42 | 106346 | 157999 | 008256 | 42, 38, 22 |
| 7 | UFSP1 | UFM1 specific peptidase 1 (inactive) | 176125 | 087087 | 087085 | 2, 27, 5 |
| 7 | UNCX | UNC homeobox | 164853 | 178381 | 164877 | 14, |
| 7 | URGCP | upregulator of cell proliferation | 106608 | 062582 | 078967 | 26, 6, 42 |
| 7 | URGCP- | URGCP-MRPS24 readthrough | 270617 | 106605 | 106608 | |
| | MRPS24 | | | | | |
| 7 | UPP1 | uridine phosphorylase 1 | 183696 | 164746 | 179869 | 35, 32, 37 |
| 7 | UPK3B | uroplakin 3B | 243566 | 091073 | 185040 | 1, 44, 13 |
| 7 | UPK3BL | uroplakin 3B-like | 267368 | 205236 | 267645 | |
| 7 | VIPR2 | vasoactive intestinal peptide receptor 2 | 106018 | 126870 | 106410 | 9, 15, 39 |
| 7 | VOPP1 | vesicular, overexpressed in cancer, prosurvival protein 1 | 154978 | 132434 | 154997 | 18, 43, 29 |
| 7 | VGF | VGF nerve growth factor inducible | 128564 | 106367 | 167011 | 28, 35, 31 |
| 7 | VKORC1L1 | vitamin K epoxide reductase complex subunit 1 like 1 | 196715 | 280427 | 169919 | 21, 11, 3 |
| 7 | VWC2 | von Willebrand factor C domain containing 2 | 188730 | 179869 | 042813 | 10, 44, 14 |
| 7 | VWDE | von Willebrand factor D and EGF domains | 146530 | 106460 | 226690 | 42, 12, 5 |
| 7 | VPS37D | VPS37D, ESCRT-I subunit | 176428 | 009950 | 176410 | 14, 17, 21 |
| 7 | VPS41 | VPS41, HOPS complex subunit | 006715 | 078053 | 106536 | 6, 29, 24 |
| 7 | VPS50 | VPS50, EARP/GARPII complex subunit | 004766 | 188175 | 004948 | 42, 31, 24 |
| 7 | VSTM2A | V-set and transmembrane domain containing 2A | 170419 | 221900 | 132432 | 8, 45, 17 |
| 7 | WIPF3 | WAS/WASL interacting protein family member 3 | 122574 | 176532 | 136193 | 27, 25, 40 |
| 7 | WDR60 | WD repeat domain 60 | 126870 | 117868 | 106018 | 26, 29, 40 |
| 7 | WDR86 | WD repeat domain 86 | 187260 | 013374 | 127377 | 26, 32, 36 |
| 7 | WDR91 | WD repeat domain 91 | 105875 | 146859 | 146857 | 24, 13, 17 |
| 7 | WIPI2 | WD repeat domain, phosphoinositide interacting 2 | 157954 | 146587 | 164638 | 21, 3, 34 |
| 7 | WEE2 | WEE1 homolog 2 | 214102 | 257093 | 106028 | 23, 39, 37 |
| 7 | WBSCR27 | Williams Beuren syndrome chromosome region 27 | 165171 | 189143 | 175877 | 45, 16, 23 |
| 7 | WBSCR17 | Williams-Beuren syndrome chromosome region 17 | 185274 | 158321 | 183166 | 11, 31, 8 |
| 7 | WBSCR22 | Williams-Beuren syndrome chromosome region 22 | 071462 | 176410 | 106089 | 34, 35, 28 |
| 7 | WBSCR28 | Williams-Beuren syndrome chromosome region 28 | 175877 | 165171 | 049540 | 38, |
| 7 | WASL | Wiskott-Aldrich syndrome like | 106299 | 170807 | 106302 | 26, 29, 35 |
| 7 | WNT16 | Wnt family member 16 | 002745 | 106034 | 196937 | 35, 5, 8 |
| 7 | WNT2 | Wnt family member 2 | 105989 | 004866 | 154438 | 32, 34, 10 |
| 7 | XRCC2 | X-ray repair cross complementing 2 | 196584 | 055609 | 133627 | 34, 12, 24 |
| 7 | YAE1D1 | Yae1 domain containing 1 | 241127 | 106536 | 006451 | 37, 7, 40 |
| 7 | YKT6 | YKT6 v-SNARE homolog (S. cerevisiae) | 106636 | 106633 | 058404 | 34, 35, 18 |
| 7 | ZBED6CL | ZBED6 C-terminal like | 188707 | 127399 | 106538 | 17, 41, 22 |
| 7 | ZNRF2 | zinc and ring finger 2 | 180233 | 180354 | 281593 | 40, 1, 23 |
| 7 | ZFAND2A | zinc finger AN 1-type containing 2A | 178381 | 164850 | 164853 | 42, 39, 40 |
| 7 | ZSCAN21 | zinc finger and SCAN domain containing 21 | 166529 | 106261 | 166526 | 34, 11, 24 |
| 7 | ZSCAN25 | zinc finger and SCAN domain containing 25 | 197037 | 272647 | 106258 | 40, 39, 31 |
| 7 | ZC3HC1 | zinc finger C3HC-type containing 1 | 091732 | 186591 | 128607 | 43, 6, 9 |
| 7 | ZC3HAV1 | zinc finger CCCH-type containing, antiviral 1 | 105939 | 146858 | 105948 | 42, 26, 6 |
| 7 | ZC3HAV1L | zinc finger CCCH-type containing, antiviral 1 like | 146858 | 122778 | 105939 | 39, 44, 35 |
| 7 | ZCWPW1 | zinc finger CW-type and PWWP domain containing 1 | 078487 | 085514 | 146834 | 38, 1, 13 |
| 7 | ZDHHC4 | zinc finger DHHC-type containing 4 | 136247 | 215045 | 146576 | 13, 9, 24 |
| 7 | ZNF783 | zinc finger family member 783 | 204946 | 170260 | 196453 | 1, 22, 31 |
| 7 | ZNHIT1 | zinc finger HIT-type containing 1 | 106400 | 106397 | 106404 | 6, 35, 27 |
| 7 | ZMIZ2 | zinc finger MIZ-type containing 2 | 122515 | 105953 | 196262 | 26, 3, 39 |
| 7 | ZNF107 | zinc finger protein 107 | 196247 | 173041 | 197008 | 22, 26, 39 |
| 7 | ZNF117 | zinc finger protein 117 | 152926 | 198039 | 213462 | 32, 43, 11 |
| 7 | ZNF12 | zinc finger protein 12 | 164631 | 205903 | 169402 | 1, 6, 22 |
| 7 | ZNF138 | zinc finger protein 138 | 197008 | 196247 | 198039 | 26, 31, 39 |
| 7 | ZNF212 | zinc finger protein 212 | 170260 | 170265 | 204946 | 3, 24, 36 |
| 7 | ZNF273 | zinc finger protein 273 | 198039 | 197008 | 152926 | 42, 38, 25 |
| 7 | ZNF277 | zinc finger protein 277 | 198839 | 128512 | 006652 | 43, 29, 9 |
| 7 | ZNF282 | zinc finger protein 282 | 170265 | 197024 | 170260 | 9, 34, 43 |
| 7 | ZNF3 | zinc finger protein 3 | 166526 | 166529 | 168090 | 26, 39, 15 |
| 7 | ZNF316 | zinc finger protein 316 | 205903 | 236609 | 164631 | 40, 29, 9 |
| 7 | ZNF394 | zinc finger protein 394 | 160908 | 198556 | 196652 | 36, 41, 5 |
| 7 | ZNF398 | zinc finger protein 398 | 197024 | 204947 | 170265 | 34, 38, 2 |
| 7 | ZNF425 | zinc finger protein 425 | 204947 | 197362 | 197024 | 29, 6, 3 |
| 7 | ZNF467 | zinc finger protein 467 | 181444 | 133619 | 197558 | 20, 14, 31 |
| 7 | ZNF479 | zinc finger protein 479 | 185177 | 268187 | 182111 | 38, |
| 7 | ZNF655 | zinc finger protein 655 | 197343 | 221909 | 272647 | 42, 11, 37 |
| 7 | ZNF679 | zinc finger protein 679 | 197123 | 223614 | 234444 | 38, |
| 7 | ZNF680 | zinc finger protein 680 | 173041 | 234444 | 196247 | 11, 39, 34 |
| 7 | ZNF713 | zinc finger protein 713 | 178665 | 249773 | 146729 | 2, 36, 38 |
| 7 | ZNF716 | zinc finger protein 716 | 182111 | 185177 | 275217 | 38, 32, |
| 7 | ZNF727 | zinc finger protein 727 | 214652 | 275217 | 223614 | 23, |
| 7 | ZNF735 | zinc finger protein 735 | 223614 | 214652 | 197123 | |
| 7 | ZNF736 | zinc finger protein 736 | 234444 | 197123 | 173041 | 5, 38, 39 |
| 7 | ZNF746 | zinc finger protein 746 | 181220 | 196453 | 133619 | 38, 26, 31 |
| 7 | ZNF775 | zinc finger protein 775 | 196456 | 214022 | 171115 | 11, 31, 27 |
| 7 | ZNF777 | zinc finger protein 777 | 196453 | 204946 | 181220 | 34, 16, 31 |
| 7 | ZNF786 | zinc finger protein 786 | 197362 | 155660 | 204947 | 12, 21, 14 |
| 7 | ZNF789 | zinc finger protein 789 | 198556 | 241468 | 160908 | 22, 31, 36 |
| 7 | ZNF800 | zinc finger protein 800 | 048405 | 179603 | 179562 | 22, 45, 4 |
| 7 | ZNF804B | zinc finger protein 804B | 182348 | 127954 | 164645 | 8, |
| 7 | ZNF853 | zinc finger protein 853 | 236609 | 146576 | 205903 | 26, 18, 4 |
| 7 | ZNF862 | zinc finger protein 862 | 106479 | 197558 | 171130 | 33, 26, 39 |
| 7 | ZNF92 | zinc finger protein 92 | 146757 | 280410 | 280427 | 43, 27, 45 |
| 7 | ZKSCAN1 | zinc finger with KRAB and SCAN domains 1 | 106261 | 160862 | 166529 | 24, 42, 22 |
| 7 | ZKSCAN5 | zinc finger with KRAB and SCAN domains 5 | 196652 | 160908 | 221909 | 43, 25, 31 |
| 7 | ZPBP | zona pellucida binding protein | 042813 | 188730 | 164500 | |
| 7 | ZP3 | zona pellucida glycoprotein 3 | 188372 | 146700 | 091073 | 10, 9, 1 |
| 7 | ZAN | zonadhesin (gene/pseudogene) | 146839 | 130427 | 196411 | 38, |
| 7 | ZYX | zyxin | 159840 | 159784 | 146904 | 5, 27, 1 |
| 8 | AGPAT5 | 1-acylglycerol-3-phosphate O-acyltransferase 5 | 155189 | 091879 | 275591 | 26, 32, 38 |
| 8 | DECR1 | 2,4-dienoyl-CoA reductase 1 | 104325 | 104320 | 104327 | 4, 11, 34 |
| 8 | OPLAH | 5-oxoprolinase (ATP-hydrolysing) | 178814 | 186583 | 178896 | 33, 34, 30 |
| 8 | ADCK5 | aarF domain containing kinase 5 | 173137 | 182325 | 071894 | 1, 36, 22 |
| 8 | ABRA | actin binding Rho activating protein | 174429 | 164830 | 154188 | 25, 15, 33 |
| 8 | ARC | activity regulated cytoskeleton associated protein | 198576 | 181790 | 234616 | 2, 20, 6 |
| 8 | ADAMDEC1 | ADAM like decysin 1 | 134028 | 042980 | 069206 | 25, |
| 8 | ADAM18 | ADAM metallopeptidase domain 18 | 168619 | 197140 | 104755 | 38, 10, 4 |
| 8 | ADAM2 | ADAM metallopeptidase domain 2 | 104755 | 168619 | 131203 | 38, 10, 33 |
| 8 | ADAM28 | ADAM metallopeptidase domain 28 | 042980 | 159167 | 134028 | 27, 18, 21 |
| 8 | ADAM32 | ADAM metallopeptidase domain 32 | 197140 | 168615 | 168619 | 38, 10, 1 |
| 8 | ADAM7 | ADAM metallopeptidase domain 7 | 069206 | 134028 | 104722 | 38, 25, 17 |
| 8 | ADAM9 | ADAM metallopeptidase domain 9 | 168615 | 169490 | 197140 | 45, 37, 33 |
| 8 | AP3M2 | adaptor related protein complex 3 mu 2 subunit | 070718 | 083168 | 104368 | |
| 8 | ADCY8 | adenylate cyclase 8 | 155897 | 153317 | 132294 | 40, 5, 38 |
| 8 | ADGRA2 | adhesion G protein-coupled receptor A2 | 020181 | 147471 | 104221 | 15, 26, 20 |
| 8 | ADGRB1 | adhesion G protein-coupled receptor B1 | 181790 | 171045 | 198576 | |
| 8 | ARFGEF1 | ADP ribosylation factor guanine nucleotide exchange factor 1 | 066777 | 104218 | 165078 | 26, 18, 29 |
| 8 | ADRA1A | adrenoceptor alpha 1A | 120907 | 092964 | 015592 | 38, |
| 8 | ADRB3 | adrenoceptor beta 3 | 188778 | 169154 | 187840 | 27, 32, 8 |
| 8 | AARD | alanine and arginine rich domain containing protein | 205002 | 281527 | 164756 | 38, 35, 17 |
| 8 | ADHFE1 | alcohol dehydrogenase, iron containing 1 | 147576 | 179041 | 169085 | 15, 29, 19 |
| 8 | TTPA | alpha tocopherol transfer protein | 137561 | 137563 | 185728 | 23, 17, 38 |
| 8 | ANGPT1 | angiopoietin 1 | 154188 | 174429 | 147655 | 7, 34, 42 |
| 8 | ANGPT2 | angiopoietin 2 | 091879 | 147316 | 155189 | 45, 43, 32 |
| 8 | ANK1 | ankyrin 1 | 029534 | 165066 | 083168 | 25, 5, 27 |
| 8 | ANKRD46 | ankyrin repeat domain 46 | 186106 | 034677 | 174226 | |
| 8 | ANXA13 | annexin A13 | 104537 | 175946 | 176853 | |
| 8 | AZIN1 | antizyme inhibitor 1 | 155096 | 155090 | 155097 | 42, 24, 39 |
| 8 | ASAP1 | ArfGAP with SH3 domain, ankyrin repeat and PH domain 1 | 153317 | 153310 | 155897 | |
| 8 | AGO2 | argonaute 2, RISC catalytic component | 123908 | 104472 | 169398 | 22, 26, 4 |
| 8 | ARMC1 | armadillo repeat containing 1 | 104442 | 172817 | 066855 | 11, 13, 17 |
| 8 | ASH2L | ASH2 like histone lysine methyltransferase complex subunit | 129691 | 187840 | 147465 | 13, 1, 36 |
| 8 | ASPH | aspartate beta-hydroxylase | 198363 | 177182 | 283485 | 3, 1, 6 |
| 8 | ATAD2 | ATPase family, AAA domain containing 2 | 156802 | 165156 | 156795 | 22, 13, 37 |
| 8 | ATP6V0D2 | ATPase H+ transporting V0 subunit d2 | 147614 | 104267 | 147613 | |
| 8 | ATP6V1B2 | ATPase H+ transporting V1 subunit B2 | 147416 | 036565 | 061337 | 26, 8, 38 |
| 8 | ATP6V1C1 | ATPase H+ transporting V1 subunit C1 | 155097 | 155096 | 164929 | 37, 13, 11 |
| 8 | ATP6V1H | ATPase H+ transporting V1 subunit H | 047249 | 082556 | 147509 | 10, 2, 8 |
| 8 | BHLHE22 | basic helix-loop-helix family member e22 | 180828 | 185728 | 172817 | 8, 14, 33 |
| 8 | BAG4 | BCL2 associated athanogene 4 | 156735 | 175324 | 085788 | 29, 9, 42 |
| 8 | BNIP3L | BCL2 interacting protein 3 like | 104765 | 221914 | 240694 | 5, 7, 1 |
| 8 | BLK | BLK proto-oncogene, Src family tyrosine kinase | 136573 | 154319 | 136574 | 21, 41, 36 |
| 8 | BOP1 | block of proliferation 1 | 261236 | 179832 | 260428 | 21, 35, 7 |
| 8 | BMP1 | bone morphogenetic protein 1 | 168487 | 168484 | 168490 | 32, 3, 6 |
| 8 | BAALC | brain and acute leukemia, cytoplasmic | 164929 | 155097 | 164930 | 34, 8, 26 |
| 8 | BRF2 | BRF2, RNA polymerase III transcription initiation factor subunit | 104221 | 020181 | 156675 | 9, 40, 15 |
| 8 | BIN3 | bridging integrator 3 | 147439 | 158941 | 179388 | 1, 35, 9 |
| 8 | C8orf44-SGK3 | C8orf44-SGK3 readthrough | 270024 | 175073 | 213865 | |
| 8 | CDH17 | cadherin 17 | 079112 | 164951 | 164949 | 16, 25, 37 |
| 8 | CALB1 | calbindin 1 | 104327 | 104325 | 180694 | 17, 10, 11 |
| 8 | PKIA | cAMP-dependent protein kinase inhibitor alpha | 171033 | 164751 | 104427 | 15, 25, 29 |
| 8 | CA1 | carbonic anhydrase 1 | 133742 | 185015 | 164879 | 5, 16, 10 |
| 8 | CA13 | carbonic anhydrase 13 | 185015 | 176731 | 133742 | 29, 27, 42 |
| 8 | CA2 | carbonic anhydrase 2 | 104267 | 164879 | 147614 | 5, 16, 17 |
| 8 | CA3 | carbonic anhydrase 3 | 164879 | 133742 | 104267 | 25, 11, 15 |
| 8 | CA8 | carbonic anhydrase 8 | 178538 | 198846 | 104388 | 10, 35, 15 |
| 8 | CPA6 | carboxypeptidase A6 | 165078 | 066777 | 046889 | 7, 14, 33 |
| 8 | CPQ | carboxypeptidase Q | 104324 | 169439 | 180543 | 1, 10, 29 |
| 8 | CTSB | cathepsin B | 164733 | 079459 | 205884 | 40, 6, 10 |
| 8 | CEBPD | CCAAT/enhancer binding protein delta | 221869 | 164808 | 253729 | 17, 11, 20 |
| 8 | CNOT7 | CCR4-NOT transcription complex subunit 7 | 198791 | 104219 | 155975 | 4, 10, 38 |
| 8 | CCAR2 | cell cycle and apoptosis regulator 2 | 158941 | 241852 | 147439 | 39, 42, 34 |
| 8 | CDCA2 | cell division cycle associated 2 | 184661 | 104756 | 221818 | 22, 38, 9 |
| 8 | CSPP1 | centrosome and spindle pole associated protein 1 | 104218 | 121022 | 066777 | 29, 7, 23 |
| 8 | CLN8 | ceroid-lipofuscinosis, neuronal 8 | 182372 | 283494 | 283239 | 1, 36, 27 |
| 8 | CHMP4C | charged multivesicular body protein 4C | 164695 | 104231 | 104497 | 43, 28, 34 |
| 8 | CHMP7 | charged multivesicular body protein 7 | 147457 | 104689 | 104679 | 21, 2, 22 |
| 8 | CHRNA2 | cholinergic receptor nicotinic alpha 2 subunit | 120903 | 120899 | 120915 | 8, 26, 2 |
| 8 | CHRNA6 | cholinergic receptor nicotinic alpha 6 subunit | 147434 | 147432 | 131931 | 21, 35, 25 |
| 8 | CHRNB3 | cholinergic receptor nicotinic beta 3 subunit | 147432 | 176209 | 147434 | 14, 8, |
| 8 | CSGALNACT1 | chondroitin sulfate N-acetylgalactosaminyltransferase 1 | 147408 | 104611 | 104613 | 2, 32, 40 |
| 8 | CHRAC1 | chromatin accessibility complex 1 | 104472 | 167632 | 123908 | 40, 13, 7 |
| 8 | CHD7 | chromodomain helicase DNA binding protein 7 | 171316 | 104388 | 177182 | |
| 8 | C8orf22 | chromosome 8 open reading frame 22 | 168333 | 019549 | 147481 | 25, 10, 15 |
| 8 | C8orf33 | chromosome 8 open reading frame 33 | 182307 | 170631 | 164935 | 9, 23, 3 |
| 8 | C8orf34 | chromosome 8 open reading frame 34 | 165084 | 046889 | 137573 | 11, 31, 8 |
| 8 | C8orf37 | chromosome 8 open reading frame 37 | 156172 | 175895 | 156466 | 29, 42, 14 |
| 8 | C8orf4 | chromosome 8 open reading frame 4 | 176907 | 188676 | 165061 | 19, 9, 20 |
| 8 | C8orf44 | chromosome 8 open reading frame 44 | 213865 | 270024 | 278888 | 31, 13, 18 |
| 8 | C8orf46 | chromosome 8 open reading frame 46 | 169085 | 147576 | 185697 | |
| 8 | C8orf48 | chromosome 8 open reading frame 48 | 164743 | 164741 | 185053 | 6, 18, 4 |
| 8 | C8orf58 | chromosome 8 open reading frame 58 | 241852 | 248235 | 158941 | 27, 5, 44 |
| 8 | C8orf59 | chromosome 8 open reading frame 59 | 176731 | 133740 | 185015 | 30, 31, 33 |
| 8 | C8orf74 | chromosome 8 open reading frame 74 | 171060 | 183638 | 171056 | 38, |
| 8 | C8orf76 | chromosome 8 open reading frame 76 | 189376 | 147689 | 259305 | 6, 22, 15 |
| 8 | C8orf82 | chromosome 8 open reading frame 82 | 213563 | 254402 | 147799 | 33, 19, 14 |
| 8 | C8orf86 | chromosome 8 open reading frame 86 | 196166 | 077782 | 147526 | 8, |
| 8 | C8orf88 | chromosome 8 open reading frame 88 | 253250 | 123119 | 155099 | |
| 8 | C8orf89 | chromosome 8 open reading frame 89 | 274443 | 164764 | 147604 | |
| 8 | CLDN23 | claudin 23 | 253958 | 275342 | 147324 | 29, 22, 18 |
| 8 | CLVS1 | clavesin 1 | 177182 | 171316 | 198363 | 10, 8, 7 |
| 8 | CPSF1 | cleavage and polyadenylation specific factor 1 | 071894 | 173137 | 147804 | 18, 29, 26 |
| 8 | CLU | clusterin | 120885 | 120915 | 168077 | 40, 26, 10 |
| 8 | CCDC166 | coiled-coil domain containing 166 | 255181 | 181135 | 181085 | 38, |
| 8 | CCDC25 | coiled-coil domain containing 25 | 147419 | 168077 | 171320 | 29, 6, 44 |
| 8 | CHCHD7 | coiled-coil-helix-coiled-coil-helix domain containing 7 | 170791 | 181690 | 170786 | 41, 11, 7 |
| 8 | CTHRC1 | collagen triple helix repeat containing 1 | 164932 | 164930 | 164933 | 6, 35, 43 |
| 8 | COL14A1 | collagen type XIV alpha 1 chain | 187955 | 155792 | 172172 | 45, 11, 26 |
| 8 | COL22A1 | collagen type XXII alpha 1 chain | 169436 | 147724 | 169427 | 31, 29, 2 |
| 8 | COLEC10 | collectin subfamily member 10 | 184374 | 164761 | 147676 | 19, 35, 27 |
| 8 | COMMD5 | COMM domain containing 5 | 170619 | 147789 | 196150 | 22, 6, 26 |
| 8 | COPS5 | COP9 signalosome subunit 5 | 121022 | 178125 | 104218 | 41, 25, 22 |
| 8 | CPNE3 | copine 3 | 085719 | 176623 | 170289 | 24, 22, 42 |
| 8 | CRH | corticotropin releasing hormone | 147571 | 147573 | 179041 | 32, 28, 2 |
| 8 | CSMD1 | CUB and Sushi multiple domains 1 | 183117 | 036448 | 147316 | 38, 10, 8 |
| 8 | CSMD3 | CUB and Sushi multiple domains 3 | 164796 | 164794 | 104447 | 8, 38, 14 |
| 8 | CNBD1 | cyclic nucleotide binding domain containing 1 | 176571 | 170289 | 176566 | 38, 36, 37 |
| 8 | CNGB3 | cyclic nucleotide gated channel beta 3 | 170289 | 085719 | 176571 | 14, 38, 25 |
| 8 | CCNE2 | cyclin E2 | 175305 | 164941 | 156170 | 4, 22, 7 |
| 8 | CYHR1 | cysteine and histidine rich 1 | 187954 | 160949 | 167702 | 18, 33, 14 |
| 8 | CRISPLD1 | cysteine rich secretory protein LCCL domain containing 1 | 121005 | 137558 | 164749 | 11, 42, 24 |
| 8 | COX6C | cytochrome c oxidase subunit 6C | 164919 | 132549 | 132554 | 15, 25, 7 |
| 8 | CYC1 | cytochrome c1 | 179091 | 197858 | 179526 | 34, 25, 35 |
| 8 | CYP11B1 | cytochrome P450 family 11 subfamily B member 1 | 160882 | 104499 | 179142 | 2, 25, 23 |
| 8 | CYP11B2 | cytochrome P450 family 11 subfamily B member 2 | 179142 | 160882 | 160932 | 2, |
| 8 | CYP7A1 | cytochrome P450 family 7 subfamily A member 1 | 167910 | 215114 | 137575 | 19, 38, |
| 8 | CYP7B1 | cytochrome P450 family 7 subfamily B member 1 | 172817 | 180828 | 104442 | 23, 42, 33 |
| 8 | DCAF13 | DDB1 and CUL4 associated factor 13 | 164934 | 164933 | 176406 | 30, 43, 45 |
| 8 | DCAF4L2 | DDB1 and CUL4 associated factor 4 like 2 | 176566 | 176571 | 156103 | 38, 13, |
| 8 | DDHD2 | DDHD domain containing 2 | 085788 | 156735 | 147535 | 1, 26, 40 |
| 8 | DOCK5 | dedicator of cytokinesis 5 | 147459 | 277586 | 147437 | 11, 20, 9 |
| 8 | DEFA1 | defensin alpha 1 | 206047 | 164821 | 240247 | 7, 5, 19 |
| 8 | DEFA1B | defensin alpha 1B | 240247 | 206047 | 239839 | |
| 8 | DEFA3 | defensin alpha 3 | 239839 | 240247 | 164816 | 7, 5, 36 |
| 8 | DEFA4 | defensin alpha 4 | 164821 | 164822 | 206047 | 7, 5, 6 |
| 8 | DEFA5 | defensin alpha 5 | 164816 | 239839 | 230549 | 16, 37, 14 |
| 8 | DEFA6 | defensin alpha 6 | 164822 | 164825 | 164821 | 16, 37, |
| 8 | DEFB1 | defensin beta 1 | 164825 | 275591 | 164822 | 17, 10, 40 |
| 8 | DEFB103A | defensin beta 103A | 176797 | 178287 | 171711 | |
| 8 | DEFB103B | defensin beta 103B | 177243 | 177257 | 164871 | |
| 8 | DEFB104A | defensin beta 104A | 176782 | 186579 | 178287 | |
| 8 | DEFB104B | defensin beta 104B | 177023 | 164871 | 187082 | |
| 8 | DEFB105A | defensin beta 105A | 186562 | 186572 | 186579 | |
| 8 | DEFB105B | defensin beta 105B | 186599 | 187082 | 198129 | |
| 8 | DEFB106A | defensin beta 106A | 186579 | 186562 | 176782 | |
| 8 | DEFB106B | defensin beta 106B | 187082 | 177023 | 186599 | |
| 8 | DEFB107A | defensin beta 107A | 186572 | 255378 | 186562 | |
| 8 | DEFB107B | defensin beta 107B | 198129 | 186599 | 255251 | |
| 8 | DEFB130 | defensin beta 130 | 232948 | 186523 | 145002 | |
| 8 | DEFB134 | defensin beta 134 | 205882 | 205883 | 233050 | 38, |
| 8 | DEFB135 | defensin beta 135 | 205883 | 205884 | 205882 | |
| 8 | DEFB136 | defensin beta 136 | 205884 | 164733 | 205883 | |
| 8 | DEFB4A | defensin beta 4A | 171711 | 176797 | 215356 | |
| 8 | DEFB4B | defensin beta 4B | 177257 | 215372 | 177243 | |
| 8 | DMTN | dematin actin binding protein | 158856 | 158815 | 158863 | 26, 8, 19 |
| 8 | DCSTAMP | dendrocyte expressed seven transmembrane protein | 164935 | 147647 | 147650 | 40, 5, 20 |
| 8 | DENND3 | DENN domain containing 3 | 105339 | 281855 | 022567 | 22, 43, 7 |
| 8 | DEPTOR | DEP domain containing MTOR interacting protein | 155792 | 136982 | 187955 | 2, 1, 42 |
| 8 | DERL1 | derlin 1 | 136986 | 178764 | 156787 | 11, 1, 24 |
| 8 | DGAT1 | diacylglycerol O-acyltransferase 1 | 185000 | 185122 | 261678 | 26, 21, 37 |
| 8 | DKK4 | dickkopf WNT signaling pathway inhibitor 4 | 104371 | 070501 | 078668 | 12, 23, 37 |
| 8 | DPYS | dihydropyrimidinase | 147647 | 176406 | 164935 | 19, 17, 39 |
| 8 | DPYSL2 | dihydropyrimidinase like 2 | 092964 | 240694 | 120907 | 1, 8, 26 |
| 8 | DLC1 | DLC1 Rho GTPase activating protein | 164741 | 250305 | 164743 | 1, 45, 15 |
| 8 | DLGAP2 | DLG associated protein 2 | 198010 | 104714 | 283494 | |
| 8 | DLGAP2 | DLG associated protein 2 | 283494 | 198010 | 182372 | 24, 38, 20 |
| 8 | POLB | DNA polymerase beta | 070501 | 104365 | 104371 | 29, 27, 25 |
| 8 | DSCC1 | DNA replication and sister chromatid cohesion 1 | 136982 | 064313 | 155792 | 7, 3, 4 |
| 8 | DNAJC5B | DnaJ heat shock protein family (Hsp40) member C5 beta | 147570 | 205268 | 147573 | 38, 23, 32 |
| 8 | DOK2 | docking protein 2 | 147443 | 168546 | 130227 | 1, 5, 10 |
| 8 | DPY19L4 | dpy-19 like 4 (C. elegans) | 156162 | 104413 | 164941 | 11, 45, 1 |
| 8 | DUSP26 | dual specificity phosphatase 26 | 133878 | 133874 | 156687 | 25, 8, 14 |
| 8 | DUSP4 | dual specificity phosphatase 4 | 120875 | 197892 | 133872 | 3, 35, 23 |
| 8 | DCTN6 | dynactin subunit 6 | 104671 | 177669 | 157110 | 29, 4, 15 |
| 8 | E2F5 | E2F transcription factor 5 | 133740 | 133739 | 176731 | 22, 29, 27 |
| 8 | EBF2 | early B-cell factor 2 | 221818 | 184661 | 221914 | 42, 37, 18 |
| 8 | EGR3 | early growth response 3 | 179388 | 147439 | 134020 | 11, 26, 31 |
| 8 | ENTPD4 | ectonucleoside triphosphate diphosphohydrolase 4 | 197217 | 134013 | 147454 | 22, 7, 12 |
| 8 | ENPP2 | ectonucleotide pyrophosphatase/phosphodiesterase 2 | 136960 | 136999 | 064313 | 26, 8, 11 |
| 8 | EFCAB1 | EF-hand calcium binding domain 1 | 034239 | 169139 | 019549 | 31, 42, 20 |
| 8 | EFR3A | EFR3 homolog A | 132294 | 155897 | 253117 | 6, 31, 13 |
| 8 | ELP3 | elongator acetyltransferase complex subunit 3 | 134014 | 189233 | 168081 | 18, 2, 39 |
| 8 | ENY2 | ENY2, transcription and export complex 2 subunit | 120533 | 120526 | 205038 | 41, 34, 29 |
| 8 | EPPK1 | epiplakin 1 | 261150 | 185189 | 178209 | 18, 23, 24 |
| 8 | ESRP1 | epithelial splicing regulatory protein 1 | 104413 | 164944 | 156162 | 4, 3, 13 |
| 8 | EPHX2 | epoxide hydrolase 2 | 120915 | 120903 | 120885 | 39, 17, 2 |
| 8 | ERLIN2 | ER lipid raft associated 2 | 147475 | 183779 | 147471 | 13, 12, 6 |
| 8 | EMC2 | ER membrane protein complex subunit 2 | 104412 | 104408 | 164841 | 31, 1, 4 |
| 8 | ESCO2 | establishment of sister chromatid cohesion N-acetyltransferase 2 | 171320 | 147419 | 168078 | 22, 4, 11 |
| 8 | EBAG9 | estrogen receptor binding site associated, antigen, 9 | 147654 | 205038 | 147642 | 31, 34, 43 |
| 8 | EEF1D | eukaryotic translation elongation factor 1 delta | 104529 | 147813 | 179886 | |
| 8 | EIF3E | eukaryotic translation initiation factor 3 subunit E | 104408 | 147655 | 104412 | |
| 8 | EIF3H | eukaryotic translation initiation factor 3 subunit H | 147677 | 104447 | 147679 | 41, 1, 21 |
| 8 | EIF4EBP1 | eukaryotic translation initiation factor 4E binding protein 1 | 187840 | 188778 | 129691 | 3, 34, 43 |
| 8 | ERI1 | exoribonuclease 1 | 104626 | 147324 | 173281 | 22, 7, 6 |
| 8 | EXOSC4 | exosome component 4 | 178896 | 178814 | 197858 | 25, 26, 33 |
| 8 | EXT1 | exostosin glycosyltransferase 1 | 182197 | 164758 | 177570 | 18, 34, 13 |
| 8 | EXTL3 | exostosin like glycosyltransferase 3 | 012232 | 104290 | 104299 | 3, 1, 14 |
| 8 | XPO7 | exportin 7 | 130227 | 147443 | 158806 | 29, 31, 37 |
| 8 | EYA1 | EYA transcriptional coactivator and phosphatase 1 | 104313 | 221947 | 178860 | 11, 42, 26 |
| 8 | FAM83H-AS1 | FAM83H antisense RNA 1 | 203499 | 180921 | 180900 | |
| 8 | FAM110B | family with sequence similarity 110 member B | 169122 | 104331 | 215114 | 11, 17, 29 |
| 8 | FAM135B | family with sequence similarity 135 member B | 147724 | 131773 | 169436 | |
| 8 | FAM150A | family with sequence similarity 150 member A | 196711 | 147488 | 023287 | 44, 16, |
| 8 | FAM160B2 | family with sequence similarity 160 member B2 | 158863 | 158856 | 275074 | 32, 39, 36 |
| 8 | FAM167A | family with sequence similarity 167 member A | 154319 | 177710 | 136573 | 34, 1, 26 |
| 8 | FAM49B | family with sequence similarity 49 member B | 153310 | 147697 | 153317 | 7, 34, 4 |
| 8 | FAM83A | family with sequence similarity 83 member A | 147689 | 156787 | 189376 | 24, 18, 9 |
| 8 | FAM83H | family with sequence similarity 83 member H | 180921 | 181085 | 203499 | |
| 8 | FAM84B | family with sequence similarity 84 member B | 168672 | 173334 | 212993 | 3, 4, 23 |
| 8 | FAM86B1 | family with sequence similarity 86 member B1 | 186523 | 223443 | 232948 | 26, 3, 9 |
| 8 | FAM86B2 | family with sequence similarity 86 member B2 | 145002 | 232948 | 154359 | 18, 9, 45 |
| 8 | FAM91A1 | family with sequence similarity 91 member A1 | 176853 | 104537 | 214814 | 4, 2, 6 |
| 8 | FAM92A | family with sequence similarity 92 member A | 188343 | 205133 | 183808 | |
| 8 | FDFT1 | farnesyl-diphosphate farnesyltransferase 1 | 079459 | 154328 | 164733 | |
| 8 | FNTA | farnesyltransferase, CAAX box, alpha | 168522 | 254673 | 185900 | 11, 29, 26 |
| 8 | FABP12 | fatty acid binding protein 12 | 197416 | 170323 | 133731 | 38, 27, 14 |
| 8 | FABP4 | fatty acid binding protein 4 | 170323 | 205186 | 197416 | 1, 15, 4 |
| 8 | FABP5 | fatty acid binding protein 5 | 164687 | 076641 | 147588 | 44, 6, 30 |
| 8 | FABP9 | fatty acid binding protein 9 | 205186 | 147588 | 170323 | |
| 8 | FBXL6 | F-box and leucine rich repeat protein 6 | 182325 | 185803 | 173137 | 37, 22, 27 |
| 8 | FBXO16 | F-box protein 16 | 214050 | 186918 | 104290 | 31, 29, 28 |
| 8 | FBXO25 | F-box protein 25 | 147364 | 172748 | 180190 | 33, 38, 3 |
| 8 | FBXO32 | F-box protein 32 | 156804 | 156795 | 175946 | 25, 18, 34 |
| 8 | FBXO43 | F-box protein 43 | 156509 | 132554 | 147669 | 26, 5, 19 |
| 8 | FER1L6 | fer-1 like family member 6 | 214814 | 176853 | 164983 | 30, 38, |
| 8 | FGL1 | fibrinogen like 1 | 104760 | 129422 | 078674 | 19, 4, 25 |
| 8 | FSBP | fibrinogen silencer binding protein | 265817 | 283460 | 164944 | 7, 44, 39 |
| 8 | FGF17 | fibroblast growth factor 17 | 158815 | 158806 | 158856 | 12, 14, 8 |
| 8 | FGF20 | fibroblast growth factor 20 | 078579 | 038945 | 155970 | 16, 14, 20 |
| 8 | FGFR1 | fibroblast growth factor receptor 1 | 077782 | 165046 | 196166 | 42, |
| 8 | FOXH1 | forkhead box H1 | 160973 | 167702 | 160972 | 12, 27, 38 |
| 8 | FZD3 | frizzled class receptor 3 | 104290 | 214050 | 012232 | 11, 14, 22 |
| 8 | FZD6 | frizzled class receptor 6 | 164930 | 164929 | 164932 | 42, 40, 18 |
| 8 | FUT10 | fucosyltransferase 10 | 172728 | 157168 | 129696 | 26, 27, 23 |
| 8 | GPR20 | G protein-coupled receptor 20 | 204882 | 022567 | 184489 | 26, 36, 10 |
| 8 | GGH | gamma-glutamyl hydrolase | 137563 | 185942 | 137561 | 6, 19, 17 |
| 8 | GDAP1 | ganglioside induced differentiation associated protein 1 | 104381 | 104369 | 137558 | 26, 18, 8 |
| 8 | GSDMC | gasdermin C | 147697 | 280151 | 153310 | 36, 24, 42 |
| 8 | GSDMD | gasdermin D | 104518 | 014164 | 204839 | 39, 34, 36 |
| 8 | GATA4 | GATA binding protein 4 | 136574 | 136573 | 154328 | 27, 38, 37 |
| 8 | GFRA2 | GDNF family receptor alpha 2 | 168546 | 061337 | 147443 | 14, 32, 6 |
| 8 | GTF2E2 | general transcription factor IIE subunit 2 | 197265 | 157110 | 253457 | 29, 11, 21 |
| 8 | GINS4 | GINS complex subunit 4 | 147536 | 147533 | 158669 | 9, 5, 19 |
| 8 | GLI4 | GLI family zinc finger 4 | 250571 | 264668 | 185730 | 33, 17, 34 |
| 8 | GRINA | glutamate ionotropic receptor NMDA type subunit associated protein 1 | 178719 | 178685 | 186583 | 27, 33, 28 |
| 8 | ERICH1 | glutamate rich 1 | 104714 | 180190 | 198010 | 12, |
| 8 | ERICH5 | glutamate rich 5 | 177459 | 156482 | 132541 | |
| 8 | GOT1L1 | glutamic-oxaloacetic transaminase 1-like 1 | 169154 | 156675 | 188778 | 38, |
| 8 | GPT | glutamic--pyruvic transaminase | 167701 | 160972 | 167700 | 1, 15, 16 |
| 8 | GSR | glutathione-disulfide reductase | 104687 | 253457 | 104691 | 29, 1, 37 |
| 8 | GPAT4 | glycerol-3-phosphate acyltransferase 4 | 158669 | 147536 | 165066 | 35, 27, 41 |
| 8 | GPAA1 | glycosylphosphatidylinositol anchor attachment 1 | 197858 | 178896 | 179091 | 36, 35, 9 |
| 8 | GPIHBP1 | glycosylphosphatidylinositol anchored high density lipoprotein binding protein 1 | 277494 | 176956 | 181638 | 15, 20, 10 |
| 8 | GML | glycosylphosphatidylinositol anchored molecule like | 104499 | 167656 | 160882 | 38, |
| 8 | GOLGA7 | golgin A7 | 147533 | 104332 | 147536 | 43, 7, 8 |
| 8 | GNRH1 | gonadotropin releasing hormone 1 | 147437 | 147459 | 104756 | 25, 20, 44 |
| 8 | GRHL2 | grainyhead like transcription factor 2 | 083307 | 120963 | 104490 | 18, 42, 23 |
| 8 | GDF6 | growth differentiation factor 6 | 156466 | 156172 | 156467 | 6, 12, 38 |
| 8 | GEM | GTP binding protein overexpressed in skeletal muscle | 164949 | 079112 | 197275 | 37, 45, 43 |
| 8 | HSF1 | heat shock transcription factor 1 | 185122 | 260428 | 185000 | 2, 39, 35 |
| 8 | HGSNAT | heparan-alpha-glucosaminide N-acetyltransferase | 165102 | 185900 | 164808 | 29, 40, 30 |
| 8 | HNF4G | hepatocyte nuclear factor 4 gamma | 164749 | 121005 | 091656 | |
| 8 | HHLA1 | HERV-H LTR-associating 1 | 132297 | 258417 | 184156 | 38, |
| 8 | HEY1 | hes related family bHLH transcription factor with YRPW motif 1 | 164683 | 104435 | 147586 | 11, 42, 26 |
| 8 | HGH1 | HGH1 homolog | 235173 | 179698 | 179832 | 3, 21, 27 |
| 8 | HMBOX1 | homeobox containing 1 | 147421 | 104299 | 197892 | 2, 42, 34 |
| 8 | HOOK3 | hook microtubule tethering protein 3 | 168172 | 120925 | 254673 | |
| 8 | HR | HR, lysine demethylase and nuclear receptor corepressor | 168453 | 275074 | 168476 | 18, 35, 8 |
| 8 | HTRA4 | HtrA serine peptidase 4 | 169495 | 169499 | 169490 | 32, 40, 44 |
| 8 | HAS2 | hyaluronan synthase 2 | 170961 | 172164 | 178764 | 45, 12, 7 |
| 8 | IDO1 | indoleamine 2,3-dioxygenase 1 | 131203 | 104755 | 188676 | 30, 32, 44 |
| 8 | IDO2 | indoleamine 2,3-dioxygenase 2 | 188676 | 131203 | 176907 | 32, 19, 44 |
| 8 | IKBKB | inhibitor of nuclear factor kappa B kinase subunit beta | 104365 | 104368 | 070501 | 11, 1, 39 |
| 8 | IMPA1 | inositol monophosphatase 1 | 133731 | 197416 | 253598 | 7, 4, 10 |
| 8 | IMPAD1 | inositol monophosphatase domain containing 1 | 104331 | 181195 | 169122 | 11, 1, 40 |
| 8 | INTS10 | integrator complex subunit 10 | 104613 | 147408 | 175445 | 3, 43, 33 |
| 8 | INTS8 | integrator complex subunit 8 | 164941 | 156162 | 175305 | 11, 24, 22 |
| 8 | INTS9 | integrator complex subunit 9 | 104299 | 012232 | 147421 | 21, 41, 9 |
| 8 | IL7 | interleukin 7 | 104432 | 104427 | 104435 | 31, 22, 24 |
| 8 | JRK | Jrk helix-turn-helix protein | 234616 | 198576 | 167653 | 18, 1, 23 |
| 8 | JPH1 | junctophilin 1 | 104369 | 154589 | 104381 | 6, 25, 24 |
| 8 | KLHL38 | kelch like family member 38 | 175946 | 156804 | 104537 | 15, |
| 8 | KBTBD11 | kelch repeat and BTB domain containing 11 | 176595 | 104728 | 036448 | 8, 17, 14 |
| 8 | KHDRBS3 | KH RNA binding domain containing, signal transduction associated 3 | 131773 | 066827 | 147724 | 10, 34, 38 |
| 8 | KIAA0196 | KIAA0196 | 164961 | 104549 | 156831 | 42, 22, 11 |
| 8 | KIAA1429 | KIAA1429 | 164944 | 265817 | 104413 | 19, 43, 31 |
| 8 | KIAA1456 | KIAA1456 | 250305 | 154359 | 164741 | 40, 28, 20 |
| 8 | KIF13B | kinesin family member 13B | 197892 | 147421 | 120875 | 29, 26, 16 |
| 8 | KIFC2 | kinesin family member C2 | 167702 | 187954 | 160973 | 1, 26, 3 |
| 8 | KLF10 | Kruppel like factor 10 | 155090 | 155087 | 155096 | 1, 24, 22 |
| 8 | LACTB2 | lactamase beta 2 | 147592 | 067167 | 221947 | 34, 4, 24 |
| 8 | LRP12 | LDL receptor related protein 12 | 147650 | 164935 | 169946 | 18, 26, 11 |
| 8 | LEPROTL1 | leptin receptor overlapping transcript-like 1 | 104660 | 133872 | 177669 | 38, 7, 32 |
| 8 | LRRCC1 | leucine rich repeat and coiled-coil centrosomal protein 1 | 133739 | 184672 | 133740 | 26, 38, 12 |
| 8 | LRRC14 | leucine rich repeat containing 14 | 160959 | 160957 | 254402 | 3, 35, 27 |
| 8 | LRRC24 | leucine rich repeat containing 24 | 254402 | 160959 | 213563 | 14, 24, 6 |
| 8 | LRRC6 | leucine rich repeat containing 6 | 129295 | 184156 | 165071 | 10, 29, 38 |
| 8 | LRRC69 | leucine rich repeat containing 69 | 214954 | 155100 | 147606 | |
| 8 | LGI3 | leucine rich repeat LGI family member 3 | 168481 | 168476 | 168484 | 26, 35, 4 |
| 8 | LETM2 | leucine zipper and EF-hand containing transmembrane protein 2 | 165046 | 147548 | 077782 | |
| 8 | LZTS1 | leucine zipper tumor suppressor 1 | 061337 | 147416 | 168546 | 26, 31, 35 |
| 8 | LPL | lipoprotein lipase | 175445 | 104613 | 036565 | 1, 29, 15 |
| 8 | LONRF1 | LON peptidase N-terminal domain and ring finger 1 | 154359 | 145002 | 250305 | 26, 22, 33 |
| 8 | LSM1 | LSM1 homolog, mRNA degradation associated | 175324 | 147465 | 156735 | 37, 3, 11 |
| 8 | LYNX1 | Ly6/neurotoxin 1 | 180155 | 197353 | 167656 | 29, 1, 8 |
| 8 | LYPD2 | LY6/PLAUR domain containing 2 | 197353 | 126233 | 180155 | 24, 14, 20 |
| 8 | LY6D | lymphocyte antigen 6 complex, locus D | 167656 | 180155 | 104499 | 13, 18, 9 |
| 8 | LY6E | lymphocyte antigen 6 complex, locus E | 160932 | 179142 | 261667 | 27, 34, 35 |
| 8 | LY6H | lymphocyte antigen 6 complex, locus H | 176956 | 261667 | 277494 | 8, 27, 10 |
| 8 | LY6K | lymphocyte antigen 6 complex, locus K | 160886 | 167653 | 130193 | 9, 35, 6 |
| 8 | LY6L | lymphocyte antigen 6 complex, locus L | 261667 | 160932 | 176956 | |
| 8 | LY96 | lymphocyte antigen 96 | 154589 | 175606 | 104369 | 2, 39, 22 |
| 8 | LYN | LYN proto-oncogene, Src family tyrosine kinase | 254087 | 137574 | 008988 | 41, 21, 22 |
| 8 | KAT6A | lysine acetyltransferase 6A | 083168 | 029534 | 070718 | 18, 40, 30 |
| 8 | LYPLA1 | lysophospholipase I | 120992 | 280473 | 137547 | 7, 38, 4 |
| 8 | LAPTM4B | lysosomal protein transmembrane 4 beta | 104341 | 147649 | 132561 | 29, 15, 38 |
| 8 | LOXL2 | lysyl oxidase like 2 | 134013 | 104679 | 197217 | |
| 8 | MSR1 | macrophage scavenger receptor 1 | 038945 | 104723 | 078579 | 25, 8, |
| 8 | MROH1 | maestro heat like repeat family member 1 | 179832 | 235173 | 261236 | 40, 18, 6 |
| 8 | MROH5 | maestro heat like repeat family member 5 | 226807 | 184489 | 226490 | 38, |
| 8 | MROH6 | maestro heat like repeat family member 6 | 204839 | 104518 | 147813 | |
| 8 | MAFA | MAF bZIP transcription factor A | 182759 | 158106 | 014164 | |
| 8 | MAF1 | MAF1 homolog, negative regulator of RNA polymerase III | 179632 | 179526 | 179698 | 41, 9, 27 |
| 8 | MFSD3 | major facilitator superfamily domain containing 3 | 167700 | 167701 | 160957 | 9, 7, 31 |
| 8 | MAK16 | MAK16 homolog | 198042 | 129696 | 133874 | 13, 35, 18 |
| 8 | MAL2 | mal, T-cell differentiation protein 2 (gene/pseudogene) | 147676 | 184374 | 136999 | 4, 16, 29 |
| 8 | MFHAS1 | malignant fibrous histiocytoma amplified sequence 1 | 147324 | 253958 | 104626 | 22, 24, 41 |
| 8 | MATN2 | matrilin 2 | 132561 | 104341 | 156482 | 44, 26, 42 |
| 8 | MMP16 | matrix metallopeptidase 16 | 156103 | 176566 | 104312 | 45, 15, 24 |
| 8 | MTBP | MDM2 binding protein | 172167 | 172172 | 172164 | 18, 13, 24 |
| 8 | MED30 | mediator complex subunit 30 | 164758 | 164756 | 182197 | 22, 27, 21 |
| 8 | MBOAT4 | membrane bound O-acyltransferase domain containing 4 | 177669 | 104660 | 104671 | |
| 8 | MTDH | metadherin | 147649 | 180543 | 104341 | 22, 11, 29 |
| 8 | MSRA | methionine sulfoxide reductase A | 175806 | 173273 | 253649 | 11, 17, 10 |
| 8 | MCPH1 | microcephalin 1 | 147316 | 183117 | 091879 | |
| 8 | MTUS1 | microtubule associated tumor suppressor 1 | 129422 | 104213 | 104760 | |
| 8 | MCM4 | minichromosome maintenance complex component 4 | 104738 | 253729 | 169139 | 24, 9, 22 |
| 8 | MCMDC2 | minichromosome maintenance domain containing 2 | 178460 | 104205 | 261787 | 29, 38, 42 |
| 8 | MICU3 | mitochondrial calcium uptake family member 3 | 155970 | 078579 | 104219 | 28, 8, 32 |
| 8 | MTFR1 | mitochondrial fission regulator 1 | 066855 | 104442 | 205268 | |
| 8 | MRPL13 | mitochondrial ribosomal protein L13 | 172172 | 187955 | 172167 | 29, 10, 43 |
| 8 | MRPL15 | mitochondrial ribosomal protein L15 | 137547 | 120992 | 164736 | 29, 22, 15 |
| 8 | MRPS28 | mitochondrial ribosomal protein S28 | 147586 | 164683 | 276418 | 29, 10, 15 |
| 8 | MTERF3 | mitochondrial transcription termination factor 3 | 156469 | 156467 | 156471 | 18, 2, 45 |
| 8 | MAPK15 | mitogen-activated protein kinase 15 | 181085 | 255181 | 180921 | 13, 23, 18 |
| 8 | MOS | MOS proto-oncogene, serine/threonine kinase | 172680 | 008988 | 181690 | 38, |
| 8 | MTSS1 | MTSS1, l-BAR domain containing | 170873 | 147684 | 180938 | 24, 18, 26 |
| 8 | MSC | musculin | 178860 | 104313 | 104321 | 35, 32, 43 |
| 8 | MYBL1 | MYB proto-oncogene like 1 | 185697 | 169085 | 175073 | 22, 21, 45 |
| 8 | MYOM2 | myomesin 2 | 036448 | 176595 | 183117 | 15, 25, 26 |
| 8 | MTMR7 | myotubularin related protein 7 | 003987 | 155975 | 003989 | 31, 28, 8 |
| 8 | MTMR9 | myotubularin related protein 9 | 104643 | 280273 | 177710 | 11, 34, 27 |
| 8 | NAT1 | N-acetyltransferase 1 | 171428 | 104763 | 156006 | 31, 29, 28 |
| 8 | NAT2 | N-acetyltransferase 2 | 156006 | 171428 | 156011 | 19, 16, 6 |
| 8 | ASAH1 | N-acylsphingosine amidohydrolase 1 | 104763 | 078674 | 171428 | |
| 8 | NDUFAF6 | NADH: ubiquinone oxidoreductase complex assembly factor 6 | 156170 | 175305 | 164938 | 10, |
| 8 | NDUFB9 | NADH: ubiquinone oxidoreductase subunit B9 | 147684 | 147687 | 170873 | 43, 41, 35 |
| 8 | NEIL2 | nei like DNA glycosylase 2 | 154328 | 136574 | 079459 | 9, 6, 45 |
| 8 | NOV | nephroblastoma overexpressed | 136999 | 147676 | 136960 | 2, 11, 45 |
| 8 | NRG1 | neuregulin 1 | 157168 | 165392 | 172728 | 10, 17, 45 |
| 8 | NCALD | neurocalcin delta | 104490 | 083307 | 048392 | 42, 8, 34 |
| 8 | NEFL | neurofilament light | 277586 | 104722 | 147459 | 26, 11, 8 |
| 8 | NEFM | neurofilament medium | 104722 | 069206 | 277586 | |
| 8 | NPBWR1 | neuropeptides B and W receptor 1 | 183729 | 023287 | 082556 | 20, |
| 8 | NSMAF | neutral sphingomyelinase activation asscciated factor | 035681 | 137575 | 198846 | 1, 9, 4 |
| 8 | NBN | nibrin | 104320 | 164823 | 104325 | 4, 10, 40 |
| 8 | NAPRT | nicotinate phosphoribosyltransferase | 147813 | 204839 | 104529 | 38, 34, 37 |
| 8 | NIPAL2 | NIPA like domain containing 2 | 104361 | 104356 | 104375 | 42, 24, 15 |
| 8 | NKX2-6 | NK2 homeobox 6 | 180053 | 167034 | 159167 | 12, |
| 8 | NKX3-1 | NK3 homeobox 1 | 167034 | 147454 | 180053 | 33, 38, 6 |
| 8 | NKX6-3 | NK6 homeobox 3 | 165066 | 158669 | 029534 | |
| 8 | NDRG1 | N-myc downstream regulated 1 | 104419 | 104415 | 008513 | 24, 39, 33 |
| 8 | NSMCE2 | NSE2/MMS21 homolog, SMC5-SMC6 complex SUMO ligase | 156831 | 164961 | 173334 | 36, 10, 26 |
| 8 | NECAB1 | N-terminal EF-hand calcium binding protein 1 | 123119 | 180694 | 253250 | 8, 17, 38 |
| 8 | NUGGC | nuclear GTPase, germinal center associated | 189233 | 168079 | 134014 | 22, 21, 19 |
| 8 | NRBP2 | nuclear receptor binding protein 2 | 185189 | 179950 | 261150 | 27, 6, 40 |
| 8 | NCOA2 | nuclear receptor coactivator 2 | 140396 | 147596 | 067167 | 1, 26, 22 |
| 8 | NPM2 | nucleophosmin/nudeoplasmin 2 | 158806 | 130227 | 158815 | 8, 35, 28 |
| 8 | NUDCD1 | NudC domain containing 1 | 120526 | 174417 | 120533 | 42, 1, 3 |
| 8 | NUDT18 | nudix hydrolase 18 | 275074 | 158863 | 168453 | 34, 27, 5 |
| 8 | OSR2 | odd-skipped related transciption factor 2 | 164920 | 156486 | 132549 | 44, 38, 27 |
| 8 | OR4F21 | olfactory receptor family 4 subfamily F member 21 | 176269 | 164935 | 172748 | |
| 8 | OPRK1 | opioid receptor kappa 1 | 082556 | 183729 | 047249 | 32, 33, 38 |
| 8 | OC90 | otoconin 90 | 253117 | 132294 | 258417 | 12, |
| 8 | OTUD6B | OTU domain containing 6B | 155100 | 155099 | 214954 | 22, 42, 43 |
| 8 | ODF1 | outer dense fiber of sperm tails 1 | 155087 | 104517 | 155090 | 38, 10, |
| 8 | OXR1 | oxidation resistance 1 | 164830 | 169946 | 174429 | 42, 2, 8 |
| 8 | OSGIN2 | oxidative stress induced growth inhibitor family member 2 | 164823 | 104312 | 104320 | 29, 7, 1 |
| 8 | PNMA2 | paraneoplastic Ma antigen 2 | 240694 | 104765 | 092964 | 8, 45, 26 |
| 8 | PDLIM2 | PDZ and LIM domain 2 | 120913 | 120896 | 248235 | 36, 22, 32 |
| 8 | PBK | PDZ binding kinase | 168078 | 171320 | 168079 | 38, 3, 19 |
| 8 | PI15 | peptidase inhibitor 15 | 137558 | 104381 | 121005 | 11, 30, 37 |
| 8 | PCM1 | pericentriolar material 1 | 078674 | 104760 | 104763 | 42, 38, 37 |
| 8 | PMP2 | peripheral myelin protein 2 | 147588 | 164687 | 205186 | 26, 8, 11 |
| 8 | PXDNL | peroxidasin like | 147485 | 147481 | 168300 | 15, 40, 38 |
| 8 | PEX2 | peroxisomal biogenesis factor 2 | 164751 | 091656 | 171033 | 7, 4, 13 |
| 8 | PHF20L1 | PHD finger protein 20-like 1 | 129292 | 165071 | 042832 | 29, 22, 37 |
| 8 | PEBP4 | phosphatidylethanolamine binding protein 4 | 134020 | 179388 | 008853 | 29, 25, 20 |
| 8 | PREX2 | phosphatidylinositol-3,4,5-trisphosphate dependent Rac exchange factor 2 | 046889 | 165078 | 165084 | 40, 45, 23 |
| 8 | PTDSS1 | phosphatidylserine synthase 1 | 156471 | 156469 | 169439 | 21, 7, 5 |
| 8 | PDE7A | phosphodiesterase 7A | 205268 | 066855 | 147570 | 22, 39, 26 |
| 8 | PLPP5 | phospholipid phosphatase 5 | 147535 | 085788 | 147548 | 33, 37, 20 |
| 8 | PAG1 | phosphoprotein membrane anchor with glycosphingolipid microdomains 1 | 076641 | 164684 | 164687 | 22, 39, 7 |
| 8 | PHYHIP | phytanoyl-CoA 2-hydroxylase interacting protein | 168490 | 168487 | 168495 | 8, 34, 14 |
| 8 | PINX1 | PIN2/TERF1 interacting, telomerase inhibitor 1 | 254093 | 258724 | 171044 | |
| 8 | PIWIL2 | piwi like RNA-mediated gene silencing 2 | 197181 | 168495 | 104635 | 38, 25, 16 |
| 8 | PLAG1 | PLAG1 zinc finger | 181690 | 172680 | 170791 | 31, 11, 30 |
| 8 | PLAT | plasminogen activator, tissue type | 104368 | 070718 | 104365 | 45, 29, 35 |
| 8 | PDGFRL | platelet derived growth factor receptor like | 104213 | 003989 | 129422 | 11, 1, 6 |
| 8 | PSD3 | pleckstrin and Sec7 domain containing 3 | 156011 | 156006 | 104611 | 29, 8, 26 |
| 8 | PLEKHF2 | pleckstrin homology and FYVE domain containing 2 | 175895 | 164938 | 156172 | 22, 41, 23 |
| 8 | PLEKHA2 | pleckstrin homology domain containing A2 | 169499 | 147526 | 169495 | 22, 7, 29 |
| 8 | PLEC | plectin | 178209 | 261150 | 178685 | 26, 18, 28 |
| 8 | PABPC1 | poly(A) binding protein cytoplasmic 1 | 070756 | 174226 | 164924 | 18, 11, 37 |
| 8 | PARP10 | poly(ADP-ribose) polymerase family member 10 | 178685 | 178209 | 178719 | 39, 42, 36 |
| 8 | PUF60 | poly(U) binding splicing factor 60 | 179950 | 180900 | 185189 | 3, 41, 27 |
| 8 | PKHD1L1 | polycystic kidney and hepatic disease 1 (autosomal recessive)-like 1 | 205038 | 120533 | 147654 | 1, 2, 44 |
| 8 | POP1 | POP1 homolog, ribonuclease P/MRP subunit | 104356 | 132541 | 104361 | 13, 9, 1 |
| 8 | KCNU1 | potassium calcium-activated channel subfamily U member 1 | 215262 | 156687 | 183779 | 38, 10, 39 |
| 8 | KCTD9 | potassium channel tetramerization domain containing 9 | 104756 | 147437 | 184661 | 26, 34, 19 |
| 8 | KCNK9 | potassium two pore domain channel subfamily K member 9 | 169427 | 169436 | 167632 | 8, 33, |
| 8 | KCNS2 | potassium voltage-gated channel modifier subfamily S member 2 | 156486 | 104375 | 164920 | 32, 44, 14 |
| 8 | KCNV1 | potassium voltage-gated channel modifier subfamily V member 1 | 164794 | 147642 | 164796 | 8, 17, 12 |
| 8 | KCNB2 | potassium voltage-gated channel subfamily B member 2 | 182674 | 104321 | 147601 | 38, 8, |
| 8 | KCNQ3 | potassium voltage-gated channel subfamily Q member 3 | 184156 | 132297 | 129295 | 8, 25, 2 |
| 8 | POU5F1B | POU class 5 homeobox 1B | 212993 | 168672 | 279524 | 3, 16, 42 |
| 8 | PRDM14 | PR/SET domain 14 | 147596 | 137571 | 140396 | 12, 30, 38 |
| 8 | PNOC | prepronociceptin | 168081 | 134014 | 186918 | 41, 22, 36 |
| 8 | PENK | proenkephalin | 181195 | 170786 | 104331 | |
| 8 | PRR23D1 | proline rich 23 domain containing 1 | 255251 | 198129 | 255378 | |
| 8 | PRR23D2 | proline rich 23 domain containing 2 | 255378 | 255251 | 186572 | |
| 8 | PROSC | proline synthetase cotranscribed homolog (bacterial) | 147471 | 147475 | 020181 | 29, 43, 16 |
| 8 | PSCA | prostate stem cell antigen | 167653 | 234616 | 160886 | 37, 33, 35 |
| 8 | PRSS51 | Protease, serine 51 | 253649 | 175806 | 184647 | 40, 25, 8 |
| 8 | PRSS55 | protease, serine 55 | 184647 | 253649 | 183638 | 38, 8, |
| 8 | PRKDC | protein kinase, DNA-activated, catalytic polypeptide | 253729 | 221869 | 104738 | 30, 4, 26 |
| 8 | PPP1R16A | protein phosphatase 1 regulatory subunit 16A | 160972 | 160973 | 167701 | 3, 31, 17 |
| 8 | PPP1R3B | protein phosphatase 1 regulatory subunit 3B | 173281 | 104626 | 173273 | 29, 25, 26 |
| 8 | PPP1R42 | protein phosphatase 1 regulatory subunit 42 | 178125 | 261787 | 121022 | |
| 8 | PPP2CB | protein phosphatase 2 catalytic subunit beta | 104695 | 104691 | 133863 | 11, 7, 4 |
| 8 | PPP2R2A | protein phosphatase 2 regulatory subunit Balpha | 221914 | 221818 | 104765 | 4, 1, 2 |
| 8 | PPP3CC | protein phosphatase 3 catalytic subunit gamma | 120910 | 104635 | 120896 | 22, 38, 29 |
| 8 | PSKH2 | protein serine kinase H2 | 147613 | 147614 | 164893 | |
| 8 | PTK2 | protein tyrosine kinase 2 | 169398 | 123908 | 281855 | |
| 8 | PTK2B | protein tyrosine kinase 2 beta | 120899 | 104228 | 120903 | 37, 41, 21 |
| 8 | PTP4A3 | protein tyrosine phosphatase type IVA, member 3 | 184489 | 204882 | 226807 | 26, 25, 27 |
| 8 | PCMTD1 | protein-L-isoaspartate (D-aspartate) O-methyltransferase domain containing 1 | 168300 | 147485 | 147488 | 27, 42, 1 |
| 8 | POMK | protein-O-mannose kinase | 185900 | 168522 | 165102 | |
| 8 | PURG | purine rich element binding protein G | 172733 | 133863 | 165392 | 33, 8, 27 |
| 8 | PYCRL | pyrroline-5-carboxylate reductase-like | 104524 | 179886 | 104522 | 34, 13, 9 |
| 8 | PDP1 | pyruvate dehyrogenase phosphatase catalytic subunit 1 | 164951 | 164953 | 079112 | 2, 25, 8 |
| 8 | R3HCC1 | R3H domain and coiled-coil containing 1 | 104679 | 147457 | 134013 | 1, 34, 5 |
| 8 | RAB11FIP1 | RAB11 family interacting protein 1 | 156675 | 104221 | 169154 | 3, 22, 16 |
| 8 | RAB2A | RAB2A, member RAS oncogene family | 104388 | 178538 | 171316 | 29, 31, 15 |
| 8 | RAD21 | RAD21 cohesin complex component | 164754 | 147679 | 281527 | 34, 22, 39 |
| 8 | RAD54B | RAD54 homolog B (S. cerevisiae) | 197275 | 164949 | 283460 | 11, 23, 3 |
| 8 | RAD54B | RAD54 homolog B (S. cerevisiae) | 283460 | 197275 | 265817 | 11, 23, 3 |
| 8 | RALYL | RALY RNA binding protein-like | 184672 | 104497 | 133739 | |
| 8 | RB1CC1 | RB1 inducible coiled-coil 1 | 023287 | 196711 | 183729 | 24, 23, 7 |
| 8 | RIDA | reactive intermediate imine deaminase A homolog | 132541 | 177459 | 104356 | |
| 8 | REEP4 | receptor accessory protein 4 | 168476 | 168453 | 168481 | 9, 39, 21 |
| 8 | RIPK2 | receptor interacting serine/threonine kinase 2 | 104312 | 156103 | 164823 | 45, 9, 37 |
| 8 | RECQL4 | RecQ like helicase 4 | 160957 | 167700 | 160959 | 41, 21, 3 |
| 8 | RIMS2 | regulating synaptic membrane exocytosis 2 | 176406 | 164934 | 147647 | 31, 2, 8 |
| 8 | RGS20 | regulator of G-protein signaling 20 | 147509 | 047249 | 187735 | 11, 6, 35 |
| 8 | RGS22 | regulator of G-protein signaling 22 | 132554 | 164919 | 156509 | 38, 30, 23 |
| 8 | RMDN1 | regulator of microtubule dynamics 1 | 176623 | 123124 | 085719 | |
| 8 | RDH10 | retinol dehydrogenase 10 | 121039 | 147604 | 040341 | 44, 14, 17 |
| 8 | ARHGAP39 | Rho GTPase activating protein 39 | 147799 | 213563 | 198169 | 3, 9, 42 |
| 8 | ARHGEF10 | Rho guanine nucleotide exchange factor 10 | 104728 | 283239 | 176595 | 39, 6, 12 |
| 8 | RHOBTB2 | Rho related BTB domain containing 2 | 008853 | 134020 | 120889 | 21, 4, 22 |
| 8 | RHPN1 | rhophilin Rho GTPase binding protein 1 | 158106 | 184428 | 182759 | 3, 31, 37 |
| 8 | RRM2B | ribonucleotide reductase regulatory TP53 inducible subunit M2B | 048392 | 104490 | 104517 | 22, 40, 29 |
| 8 | RPL30 | ribosomal protein L30 | 156482 | 132561 | 177459 | 31, 33, 24 |
| 8 | RPL7 | ribosomal protein L7 | 147604 | 274443 | 121039 | |
| 8 | RPL8 | ribosomal protein L8 | 161016 | 196378 | 197363 | 41, 21, 35 |
| 8 | RPS20 | ribosomal protein S20 | 008988 | 254087 | 172680 | 43, 11, 7 |
| 8 | RRS1 | ribosome biogenesis regulator homolog | 179041 | 147571 | 147576 | 21, 37, 9 |
| 8 | RNF122 | ring finger protein 122 | 133874 | 198042 | 133878 | 15, 40, 20 |
| 8 | RNF139 | ring finger protein 139 | 170881 | 183665 | 147687 | 26, 38, 39 |
| 8 | RNF170 | ring finger protein 170 | 120925 | 131931 | 168172 | 26, 6, 45 |
| 8 | RNF19A | ring finger protein 19A, RBR E3 ubiquitin protein ligase | 034677 | 104450 | 186106 | |
| 8 | RBM12B | RNA binding motif protein 12B | 183808 | 188343 | 164953 | 22, 12, 20 |
| 8 | RBPMS | RNA binding protein with multiple splicing | 157110 | 104671 | 197265 | 26, 27, 37 |
| 8 | POLR2K | RNA polymerase II subunit K | 147669 | 156509 | 104450 | 4, 18, 7 |
| 8 | POLR3D | RNA polymerase III subunit D | 168495 | 168490 | 197181 | 21, 26, 9 |
| 8 | RP1L1 | RP1 like 1 | 183638 | 184647 | 171060 | 14, |
| 8 | RP1 | RP1, axonemal microtubule associated | 104237 | 164736 | 206579 | |
| 8 | RSPO2 | R-spondin 2 | 147655 | 154188 | 104408 | 11, 31, 8 |
| 8 | RUNX1T1 | RUNX1 translocation partner 1 | 079102 | 147606 | 205133 | 8, 28, 15 |
| 8 | SGCZ | sarcoglycan zeta | 185053 | 164743 | 104723 | 20, |
| 8 | SPIDR | scaffolding protein involved in DNA repair | 164808 | 165102 | 221869 | 24, 13, 39 |
| 8 | SCARA3 | scavenger receptor class A member 3 | 168077 | 120885 | 147419 | 45, 6, 14 |
| 8 | SCARA5 | scavenger receptor class A member 5 | 168079 | 168078 | 189233 | 42, 10, 25 |
| 8 | SCX | scleraxis bHLH transcription factor | 260428 | 261236 | 185122 | |
| 8 | SCRT1 | scratch family transcriptional repressor 1 | 261678 | 185000 | 261587 | 14, 8, 38 |
| 8 | SCRIB | scribbled planar cell polarity protein | 180900 | 203499 | 179950 | 21, 35, 26 |
| 8 | SFRP1 | secreted frizzled related protein 1 | 104332 | 165061 | 147533 | 40, 15, 27 |
| 8 | SLURP1 | secreted LY6/PLAUR domain containing 1 | 126233 | 130193 | 197353 | |
| 8 | STK3 | serine/threonine kinase 3 | 104375 | 104361 | 156486 | |
| 8 | SGK3 | serum/glucocorticoid regulated kinase family member 3 | 104205 | 278888 | 178460 | 11, 31, 42 |
| 8 | SH2D4A | SH2 domain containing 4A | 104611 | 156011 | 147408 | 3, 37, 19 |
| 8 | SHARPIN | SHANK associated RH domain interactor | 179526 | 179091 | 179632 | 38, 34, 27 |
| 8 | SDR16C5 | short chain dehydrogenase/reductase family 16C member 5 | 170786 | 170791 | 181195 | 13, 30, 24 |
| 8 | SMIM18 | small integral membrane protein 18 | 253457 | 197265 | 104687 | 14, 20, 8 |
| 8 | SMIM19 | small integral membrane protein 19 | 176209 | 168575 | 147432 | 28, 6, 26 |
| 8 | SNAI2 | snail family transcriptional repressor 2 | 019549 | 034239 | 168333 | 35, 44, 9 |
| 8 | NKAIN3 | Sodium/potassium transporting ATPase interacting 3 | 185942 | 283485 | 137563 | 16, 10, 8 |
| 8 | SLC10A5 | solute carrier family 10 member 5 | 253598 | 133731 | 104231 | |
| 8 | SLC18A1 | solute carrier family 18 member A1 | 036565 | 175445 | 147416 | 26, 2, 36 |
| 8 | SLC20A2 | solute carrier family 20 member 2 | 168575 | 078668 | 176209 | 18, 40, 29 |
| 8 | SLC25A32 | solute carrier family 25 member 32 | 164933 | 164932 | 164934 | 45, 13, 31 |
| 8 | SLC25A37 | solute carrier family 25 member 37 | 147454 | 197217 | 167034 | 22, 27, 19 |
| 8 | SLC26A7 | solute carrier family 26 member 7 | 147606 | 214954 | 079102 | 40, 17, 18 |
| 8 | SLC30A8 | solute carrier family 30 member 8 | 164756 | 205002 | 164758 | 28, 38, 17 |
| 8 | SLC35G5 | solute carrier family 35 member G5 | 177710 | 104643 | 154319 | 33, |
| 8 | SLC39A14 | solute carrier family 39 member 14 | 104635 | 197181 | 120910 | 10, 40, 19 |
| 8 | SLC39A4 | solute carrier family 39 member 4 | 147804 | 071894 | 160948 | 17, 27, 35 |
| 8 | SLC45A4 | solute carrier family 45 member 4 | 022567 | 105339 | 204882 | 1, 16, 26 |
| 8 | SLC52A2 | solute carrier family 52 member 2 | 185803 | 271698 | 182325 | 37, 9, 34 |
| 8 | SLC7A13 | solute carrier family 7 member 13 | 164893 | 147613 | 123124 | 17, 42, |
| 8 | SLC7A2 | solute carrier family 7 member 2 | 003989 | 003987 | 104213 | 29, 9, 40 |
| 8 | SLCO5A1 | solute carrier organic anion transporter family member 5A1 | 137571 | 137573 | 147596 | 39, 36, 25 |
| 8 | SBSPON | somatomedin B and thrombospondin type 1 domain containing | 164764 | 147601 | 274443 | 11, 1, 32 |
| 8 | SORBS3 | sorbin and SH3 domain containing 3 | 120896 | 120910 | 120913 | 34, 26, 36 |
| 8 | SNX16 | sorting nexin 16 | 104497 | 164695 | 184672 | 1, 34, 13 |
| 8 | SNX31 | sorting nexin 31 | 174226 | 186106 | 070756 | 4, 31, 42 |
| 8 | SPAG1 | sperm associated antigen 1 | 104450 | 147669 | 034677 | 29, 16, 38 |
| 8 | SPAG11A | sperm associated antigen 11A | 178287 | 176782 | 176797 | 38, |
| 8 | SPAG11B | sperm associated antigen 11B | 164871 | 177243 | 177023 | 38, 14, |
| 8 | SPATC1 | spermatogenesis and centriole associated 1 | 186583 | 178719 | 178814 | 38, 8, |
| 8 | SOLE | squalene epoxidase | 104549 | 180938 | 164961 | 38, 7, 2 |
| 8 | SLA | Src like adaptor | 155926 | 042832 | 104415 | 39, 36, 40 |
| 8 | SOX17 | SRY-box 17 | 164736 | 137547 | 104237 | 27, 44, 45 |
| 8 | SOX7 | SRY-box 7 | 171056 | 171060 | 258724 | 45, 43, 11 |
| 8 | ST18 | ST18, C2H2C-type zinc finger | 147488 | 168300 | 196711 | 26, 31, 44 |
| 8 | ST3GAL1 | ST3 beta-galactoside alpha-2,3-sialyltransferase 1 | 008513 | 104419 | 066827 | |
| 8 | STC1 | stanniocalcin 1 | 159167 | 180053 | 042980 | 45, 17, 42 |
| 8 | STMN2 | stathmin 2 | 104435 | 104432 | 164683 | 26, 45, 8 |
| 8 | STMN4 | stathmin 4 | 015592 | 120907 | 104228 | 26, 8, 38 |
| 8 | STAU2 | staufen double-stranded RNA binding protein 2 | 040341 | 121039 | 258677 | 13, 43, 29 |
| 8 | SAMD12 | sterile alpha motif domain containing 12 | 177570 | 182197 | 164761 | 40, 42, 29 |
| 8 | STAR | steroidogenic acute regulatory protein | 147465 | 129691 | 175324 | 2, 25, 38 |
| 8 | SARAF | store-operated calcium entry associated regulatory factor | 133872 | 120875 | 104660 | 29, 18, 31 |
| 8 | SULF1 | sulfatase 1 | 137573 | 165084 | 137571 | 24, 1, 10 |
| 8 | SFTPC | surfactant protein C | 168484 | 168481 | 168487 | 10, 20, 15 |
| 8 | SDC2 | syndecan 2 | 169439 | 156471 | 104324 | |
| 8 | SDCBP | syndecan binding protein | 137575 | 167910 | 035681 | 5, 45, 29 |
| 8 | SYBU | syntabulin | 147642 | 147654 | 164794 | 8, 26, 1 |
| 8 | SNTB1 | syntrophin beta 1 | 172164 | 172167 | 170961 | 40, 2, 19 |
| 8 | SNTG1 | syntrophin gamma 1 | 147481 | 168333 | 147485 | 10, 8, 20 |
| 8 | TNKS | tankyrase | 173273 | 173281 | 175806 | 31, 38, 22 |
| 8 | TAF2 | TATA-box binding protein associated factor 2 | 064313 | 136960 | 136982 | 13, 24, 34 |
| 8 | TATDN1 | TatD DNase domain containing 1 | 147687 | 170881 | 147684 | 4, 34, 31 |
| 8 | TBC1D31 | TBC1 domain family member 31 | 156787 | 136986 | 147689 | 34, 39, 3 |
| 8 | TTI2 | TELO2 interacting protein 2 | 129696 | 172728 | 198042 | 1, 5, 31 |
| 8 | TERF1 | telomeric repeat binding factor 1 | 147601 | 182674 | 164764 | 12, 11, 33 |
| 8 | TDRP | testis development related protein | 180190 | 147364 | 104714 | 31, 32, 12 |
| 8 | TEX15 | testis expressed 15, meiosis and synapsis associated | 133863 | 104695 | 172733 | |
| 8 | THAP1 | THAP domain containing 1 | 131931 | 147434 | 120925 | 34, 22, 45 |
| 8 | THEM6 | thioesterase superfamily member 6 | 130193 | 160886 | 126233 | 9, 2, 37 |
| 8 | TOX | thymocyte selection associated high mobility group box | 198846 | 035681 | 178538 | 22, 39, 1 1 |
| 8 | TG | thyroglobulin | 042832 | 129292 | 155926 | 40, 18, 24 |
| 8 | TRHR | thyrotropin releasing hormone receptor | 174417 | 164841 | 120526 | |
| 8 | TIGD5 | tigger transposable element derived 5 | 179886 | 104529 | 104524 | 34, 33, 35 |
| 8 | TSTA3 | tissue specific transplantation antigen P35B | 104522 | 104524 | 183309 | 1, 16, 6 |
| 8 | TM2D2 | TM2 domain containing 2 | 169490 | 169495 | 168615 | 3, 6, 13 |
| 8 | TNFRSF10A | TNF receptor superfamily member 10a | 104689 | 173530 | 147457 | 27, 42, 39 |
| 8 | TNFRSF10B | TNF receptor superfamily member 10b | 120889 | 008853 | 173535 | 16, 42, 12 |
| 8 | TNFRSF10C | TNF receptor superfamily member 10c | 173535 | 120889 | 173530 | 5, 35, 17 |
| 8 | TNFRSF10D | TNF receptor superfamily member 10d | 173530 | 173535 | 104689 | 33, 12, 25 |
| 8 | TNFRSF11B | TNF receptor superfamily member 11b | 164761 | 177570 | 184374 | 45, 11, 40 |
| 8 | TONSL | tonsoku-like, DNA repair protein | 160949 | 160948 | 187954 | 34, 41, 12 |
| 8 | TOP1MT | topoisomerase (DNA) I, mitochondrial | 184428 | 185730 | 158106 | |
| 8 | TRAPPC9 | trafficking protein particle complex 9 | 167632 | 169427 | 104472 | 42, 24, |
| 8 | TCEA1 | transcription elongation factor A1 | 187735 | 147509 | 280473 | 40, 9, 7 |
| 8 | TCEB1 | Transcription elongation factor B subunit 1 | 154582 | 104343 | 175606 | |
| 8 | TCF24 | transcription factor 24 | 261787 | 178460 | 178125 | 27, 44, 12 |
| 8 | TRPS1 | transcriptional repressor GATA binding 1 | 104447 | 164796 | 147677 | |
| 8 | TACC1 | transforming acidic coiled-coil containing protein 1 | 147526 | 196166 | 169499 | 45, 29, 22 |
| 8 | TRPA1 | transient receptor potential cation channel subfamily A member 1 | 104321 | 178860 | 182674 | 24, 25, 10 |
| 8 | TRAM1 | translocation associated membrane protein 1 | 067167 | 140396 | 147592 | 43, 3, 4 |
| 8 | TMEM249 | transmembrane protein 249 | 261587 | 261678 | 271698 | 38, 17, 16 |
| 8 | TMEM55A | transmembrane protein 55A | 155099 | 253250 | 155100 | 45, 11, 14 |
| 8 | TMEM64 | transmembrane protein 64 | 180694 | 104327 | 123119 | |
| 8 | TMEM65 | transmembrane protein 65 | 164983 | 214814 | 183665 | 36, 4, 27 |
| 8 | TMEM67 | transmembrane protein 67 | 164953 | 183808 | 164951 | 42, 13, 38 |
| 8 | TMEM68 | transmembrane protein 68 | 167904 | 206579 | 137574 | 13, 29, 45 |
| 8 | TMEM70 | transmembrane protein 70 | 175606 | 154582 | 154589 | 22, 20, 29 |
| 8 | TMEM71 | transmembrane protein 71 | 165071 | 129295 | 129292 | 5, 39, 7 |
| 8 | TMEM74 | transmembrane protein 74 | 164841 | 104412 | 174417 | 8, 14, |
| 8 | TRIB1 | tibbles pseudokinase 1 | 173334 | 156831 | 168672 | 40, 29, 26 |
| 8 | TGS1 | trimethylguanosine synthase 1 | 137574 | 167904 | 254087 | 1, 45, 23 |
| 8 | TRIM35 | tripartite motif containing 35 | 104228 | 015592 | 120899 | 1, 41, 34 |
| 8 | TRIM55 | tripartite motif containing 55 | 147573 | 147570 | 147571 | 10, 15, 25 |
| 8 | TRIQK | triple QxxK/R motif containing | 205133 | 079102 | 188343 | 42, 6, 32 |
| 8 | TRMT12 | tRNA methyltransferase 12 homolog | 183665 | 164983 | 170881 | 27, 45, 17 |
| 8 | TSNARE1 | t-SNARE domain containing 1 | 171045 | 226490 | 181790 | 26, 22, 38 |
| 8 | TSPYL5 | TSPY like 5 | 180543 | 104324 | 147649 | 38, 11, 15 |
| 8 | TPD52 | tumor protein D52 | 076554 | 276418 | 205189 | 17, |
| 8 | TP53INP1 | tumor protein p53 inducible nuclear protein 1 | 164938 | 156170 | 175895 | 39, 22, 4 |
| 8 | TUSC3 | tumor suppressor candidate 3 | 104723 | 185053 | 038945 | |
| 8 | YWHAZ | tyrosine 3-monooxygenase/tryptophan 5-monooxygenase activation protein zeta | 164924 | 070756 | 120963 | 1, 12, 3 |
| 8 | SGK223 | Tyrosine-protein kinase SgK223 | 275342 | 225327 | 253958 | 7, 12, 41 |
| 8 | UQCRB | ubiquinol-cytochrome c reductase binding protein | 156467 | 156466 | 156469 | 11, 25, 6 |
| 8 | UBE2V2 | ubiquitin conjugating enzyme E2 V2 | 169139 | 104738 | 034239 | 4, 34, 7 |
| 8 | UBE2W | ubiquitin conjugating enzyme E2 W | 104343 | 258677 | 154582 | 26, 4, 13 |
| 8 | UBR5 | ubiquitin protein ligase E3 component n-recognin 5 | 104517 | 048392 | 155087 | 11, 18, 10 |
| 8 | USP17L1 | ubiquitin specific peptidase 17-like family member 1 | 230549 | 164816 | 236125 | |
| 8 | USP17L2 | ubiquitin specific peptidase 17-like family member 2 | 223443 | 226430 | 186523 | |
| 8 | USP17L3 | ubiquitin specific peptidase 17-like family member 3 | 225327 | 237038 | 275342 | |
| 8 | USP17L4 | ubiquitin specific peptidase 17-like family member 4 | 236125 | 230549 | 215372 | |
| 8 | USP17L7 | ubiquitin specific peptidase 17-like family member 7 | 226430 | 215343 | 223443 | |
| 8 | USP17L8 | ubiquitin specific peptidase 17-like family member 8 | 237038 | 215356 | 225327 | |
| 8 | UBXN2B | UBX domain protein 2B | 215114 | 169122 | 167910 | 11, 40, 5 |
| 8 | UBXN8 | UBX domain protein 8 | 104691 | 104687 | 104695 | |
| 8 | UNC5D | unc-5 netrin receptor D | 156687 | 133878 | 215262 | 14, 8, 12 |
| 8 | UTP23 | UTP23, small subunit processome component | 147679 | 147677 | 164754 | 42, 35, 23 |
| 8 | VPS13B | vacuolar protein sorting 13 homolog B | 132549 | 164920 | 164919 | 1, 18, 33 |
| 8 | VCPIP1 | valosin containing protein interacting protein 1 | 175073 | 185697 | 270024 | 22, 26, 39 |
| 8 | MYC | v-myc avian myelocytomatosis viral oncogene homolog | 136997 | 279524 | 280151 | 7, 4, 5 |
| 8 | VDAC3 | voltage dependent anion channel 3 | 078668 | 104371 | 168575 | 30, 15, 26 |
| 8 | VPS28 | VPS28, ESCRT-I subunit | 160948 | 147804 | 160949 | 29, 27, 15 |
| 8 | VPS37A | VPS37A, ESCRT-I subunit | 155975 | 198791 | 003987 | |
| 8 | WDR97 | WD repeat domain 97 | 179698 | 179632 | 235173 | 38, 36, 39 |
| 8 | WDYHV1 | WDYHV motif containing 1 | 156795 | 156802 | 156804 | 18, 11, 2 |
| 8 | WRN | Werner syndrome RecQ like helicase | 165392 | 172733 | 157168 | 18, 1, 11 |
| 8 | WISP1 | WNT1 inducible signaling pathway protein 1 | 104415 | 155926 | 104419 | 1, 11, 10 |
| 8 | WHSC1L1 | Wolf-Hirschhorn syndrome candidate 1-like 1 | 147548 | 147535 | 165046 | 22, 6, 40 |
| 8 | WWP1 | WW domain containing E3 ubiquitin protein ligase 1 | 123124 | 164893 | 176623 | 11, 23, 1 |
| 8 | XKR4 | XK related 4 | 206579 | 104237 | 167904 | 26, 14, 8 |
| 8 | XKR5 | XK related 5 | 275591 | 155189 | 164825 | 21, |
| 8 | XKR6 | XK related 6 | 171044 | 254093 | 280273 | |
| 8 | XKR9 | XK related 9 | 221947 | 147592 | 104313 | 16, 38, 25 |
| 8 | YTHDF3 | YTH N6-methyladenosine RNA binding protein 3 | 185728 | 137561 | 180828 | 1, 22, 10 |
| 8 | ZFP41 | ZFP41 zinc finger protein | 181638 | 277494 | 264668 | 11, 4, 26 |
| 8 | ZHX1-C8orf76 | ZHX1-C8orf76 readthrough | 259305 | 189376 | 165156 | |
| 8 | ZFAND1 | zinc finger AN1-type containing 1 | 104231 | 253598 | 164695 | 34, 29, 31 |
| 8 | ZFAT | zinc finger and AT-hook domain containing | 066827 | 008513 | 131773 | 43, 32, 1 |
| 8 | ZBTB10 | zinc finger and BTB domain containing 10 | 205189 | 076554 | 164684 | 26, 25, 33 |
| 8 | ZC2HC1A | zinc finger C2HC-type containing 1A | 104427 | 171033 | 104432 | 30, 22, 26 |
| 8 | ZC3H3 | zinc finger CCCH-type containing 3 | 014164 | 182759 | 104518 | 34, 9, 27 |
| 8 | ZDHHC2 | zinc finger DHHC-type containing 2 | 104219 | 155970 | 198791 | 31, 28, 14 |
| 8 | ZFHX4 | zinc finger homeobox 4 | 091656 | 164749 | 164751 | 19, 18, 38 |
| 8 | ZMAT4 | zinc finger matrin-type 4 | 165061 | 176907 | 104332 | 40, 31, 14 |
| 8 | ZNF16 | zinc finger protein 16 | 170631 | 196150 | 182307 | 26, 24, 9 |
| 8 | ZNF250 | zinc finger protein 250 | 196150 | 170619 | 170631 | 31, 15, 27 |
| 8 | ZNF251 | zinc finger protein 251 | 198169 | 147799 | 196378 | 29, 24, 36 |
| 8 | ZNF34 | zinc finger protein 34 | 196378 | 198169 | 161016 | 1, 15, 14 |
| 8 | ZNF395 | zinc finger protein 395 | 186918 | 168081 | 214050 | 41, 22, 18 |
| 8 | ZNF517 | zinc finger protein 517 | 197363 | 161016 | 147789 | 19, 13, 21 |
| 8 | ZNF572 | zinc finger protein 572 | 180938 | 170873 | 104549 | 24, 27, 38 |
| 8 | ZNF596 | zinc finger protein 596 | 172748 | 176269 | 147364 | 18, 38, 36 |
| 8 | ZNF623 | zinc finger protein 623 | 183309 | 104522 | 181135 | |
| 8 | ZNF696 | zinc finger protein 696 | 185730 | 250571 | 184428 | 42, 27, 23 |
| 8 | ZNF7 | zinc finger protein 7 | 147789 | 197363 | 170619 | 1, 4, 25 |
| 8 | ZNF703 | zinc finger protein 703 | 183779 | 215262 | 147475 | 26, 40, 37 |
| 8 | ZNF704 | zinc finger protein 704 | 164684 | 205189 | 076641 | |
| 8 | ZNF705B | zinc finger protein 705B | 215356 | 171711 | 237038 | 38, |
| 8 | ZNF705D | zinc finger protein 705D | 215343 | 233050 | 226430 | 35, |
| 8 | ZNF705G | zinc finger protein 705G | 215372 | 236125 | 177257 | |
| 8 | ZNF706 | zinc finger protein 706 | 120963 | 164924 | 083307 | 30, 11, 32 |
| 8 | ZNF707 | zinc finger protein 707 | 181135 | 183309 | 255181 | |
| 8 | ZFPM2 | zinc finger protein, FOG family member 2 | 169946 | 147650 | 164830 | 26, 15, 38 |
| 8 | ZHX1 | zinc fingers and homeoboxes 1 | 165156 | 259305 | 156802 | 42, 24, 4 |
| 8 | ZHX2 | zinc fingers and homeoboxes 2 | 178764 | 170961 | 136986 | 22, 21, 23 |
| 9 | AGPAT2 | 1-acylglycerol-3-phosphate O-acyltransferase 2 | 169692 | 172889 | 165716 | 3, 9, 34 |
| 9 | HACD4 | 3-hydroxyacyl-CoA dehydratase 4 | 188921 | 188352 | 171855 | |
| 9 | ABHD17B | abhydrolase domain containing 17B | 107362 | 135048 | 281760 | 39, 29, 22 |
| 9 | ABL1 | ABL proto-oncogene 1, non-receptor tyrosine kinase | 097007 | 130713 | 188710 | 25, 35, 43 |
| 9 | ABO | ABO, alpha 1-3-N-acetylgalactosaminyltransferase and alpha 1-3- | 175164 | 171102 | 148296 | 13, 2, 34 |
| | | galactosyltransferase | | | | |
| 9 | ANP32B | acidic nuclear phosphoprotein 32 family member B | 136938 | 136929 | 095380 | 41, 34, 11 |
| 9 | ACO1 | aconitase 1 | 122729 | 174482 | 107201 | 1, 42, 40 |
| 9 | ACTL7A | actin like 7A | 187003 | 148156 | 070061 | 38, 8, |
| 9 | ACTL7B | actin like 7B | 148156 | 136826 | 187003 | 38, 8, |
| 9 | ARPC5L | actin related protein 2/3 complex subunit 5 like | 136950 | 136942 | 136935 | 31, 41, 20 |
| 9 | ADAMTS13 | ADAM metallopeptidase with thrombospondin type 1 motif 13 | 160323 | 148300 | 160325 | 26, 16, 38 |
| 9 | ADAMTSL1 | ADAMTS like 1 | 178031 | 107295 | 155875 | |
| 9 | ADAMTSL2 | ADAMTS like 2 | 197859 | 187616 | 196990 | 26, 27, 23 |
| 9 | AK1 | adenylate kinase 1 | 106992 | 106991 | 160408 | 25, 34, 15 |
| 9 | AK3 | adenylate kinase 3 | 147853 | 106993 | 120158 | 29, 2, 15 |
| 9 | AK8 | adenylate kinase 8 | 165695 | 125484 | 165698 | 38, 13, 10 |
| 9 | ADGRD2 | adhesion G protein-coupled receptor D2 | 180264 | 136930 | 136931 | |
| 9 | AAED1 | AhpC/TSA antioxidant enzyme domain containing 1 | 158122 | 081377 | 081386 | 10, 20, 6 |
| 9 | AKAP2 | A-kinase anchoring protein 2 | 241978 | 157654 | 188959 | 42, 1, 45 |
| 9 | ALDH1A1 | aldehyde dehydrogenase 1 family member A1 | 165092 | 165091 | 135046 | 42, 2, 19 |
| 9 | ALDH1B1 | aldehyde dehydrogenase 1 family member B1 | 137124 | 107338 | 137142 | 3, 13, 1 |
| 9 | ALDOB | aldolase, fructose-bisphosphate B | 136872 | 136870 | 165152 | 19, 36, 17 |
| 9 | ALG2 | ALG2, alpha-1,3/1,6-mannosyltransferase | 119523 | 106799 | 106803 | 13, 42, 17 |
| 9 | ACER2 | alkaline ceramidase 2 | 177076 | 137154 | 155886 | 29, 24, 42 |
| 9 | AIF1L | allograft inflammatory factor 1 like | 126878 | 050555 | 126883 | 36, 8, 42 |
| 9 | AMBP | alpha-1-microglobulin/bikunin precursor | 106927 | 157657 | 136883 | 19, 36, 31 |
| 9 | ALAD | aminolevulinate dehydratase | 148218 | 119431 | 148229 | 2, 39, 8 |
| 9 | APBA1 | amyloid beta precursor protein binding family A member 1 | 107282 | 135063 | 188647 | |
| 9 | ANAPC2 | anaphase promoting complex subunit 2 | 176248 | 185863 | 176101 | 21, 26, 5 |
| 9 | ANGPTL2 | angiopoietin like 2 | 136859 | 136828 | 136895 | 1, 26, 10 |
| 9 | ASB6 | ankyrin repeat and SOCS box containing 6 | 148331 | 179058 | 167157 | 27, 17, 26 |
| 9 | ANKS6 | ankyrin repeat and sterile alpha motif domain containing 6 | 165138 | 136928 | 119514 | 3, 23, 26 |
| 9 | ANKRD18A | ankyrin repeat domain 18A | 180071 | 283486 | 283329 | 5, 3, 33 |
| 9 | ANKRD18B | ankyrin repeat domain 18B | 230453 | 165271 | 205274 | 19, 38, 28 |
| 9 | ANKRD20A1 | ankyrin repeat domain 20 family member A1 | 260691 | 275969 | 196873 | |
| 9 | ANKRD20A2 | ankyrin repeat domain 20 family member A2 | 183148 | 204849 | 273514 | 36, 22, 25 |
| 9 | ANKRD20A3 | ankyrin repeat domain 20 family member A3 | 276203 | 184659 | 274349 | |
| 9 | ANKRD20A4 | ankyrin repeat domain 20 family member A4 | 172014 | 283378 | 204779 | 27, 33, |
| 9 | ANXA1 | annexin A1 | 135046 | 165092 | 198963 | 30, 3, 18 |
| 9 | APTX | aprataxin | 137074 | 188133 | 086061 | 34, 9, 21 |
| 9 | AQP3 | aquaporin 3 (Gill blood group) | 165272 | 165269 | 165271 | 34, 13, 39 |
| 9 | AQP7 | aquaporin 7 | 165269 | 086102 | 165272 | 1, 23, 15 |
| 9 | ASS1 | argininosuccinate synthase 1 | 130707 | 148357 | 107164 | 9, 25, 16 |
| 9 | ARRDC1 | arrestin domain containing 1 | 197070 | 165724 | 181090 | 9, 5, 32 |
| 9 | ASPN | asporin | 106819 | 127083 | 106823 | 45, 13, 44 |
| 9 | ASTN2 | astrotactin 2 | 148219 | 182752 | 119401 | 31, 1, 14 |
| 9 | AKNA | AT-hook transcription factor | 106948 | 228278 | 095397 | 22, 1, 7 |
| 9 | ABCA1 | ATP binding cassette subfamily A member 1 | 165029 | 165028 | 070214 | 11, 1, 26 |
| 9 | ABCA2 | ATP binding cassette subfamily A member 2 | 107331 | 169583 | 180549 | 8, 26, 37 |
| 9 | AGTPBP1 | ATP/GTP binding protein 1 | 135049 | 148053 | 135040 | 10, 40, 8 |
| 9 | ATP6V1G1 | ATPase H+ transporting V1 subunit G1 | 136888 | 095397 | 157693 | 31, 29, 4 |
| 9 | ARID3C | AT-rich interaction domain 3C | 205143 | 137100 | 147955 | 41, |
| 9 | AUH | AU RNA binding methylglutaconyl-CoA hydratase | 148090 | 165025 | 165030 | 31, 29, 10 |
| 9 | BARHL1 | BarH like homeobox 1 | 125492 | 188523 | 125485 | 8, |
| 9 | BARX1 | BARX homeobox 1 | 131668 | 197724 | 158079 | 9, 37, 13 |
| 9 | BNC2 | basonuclin 2 | 173068 | 205549 | 044459 | 15, 44, 1 |
| 9 | BSPRY | B-box and SPRY domain containing | 119411 | 148225 | 119431 | 29, 40, 3 |
| 9 | BAG1 | BCL2 associated athanogene 1 | 107262 | 122711 | 086065 | 9, 44, 34 |
| 9 | B4GALT1 | beta-1,4-galactosyltransferase 1 | 086062 | 122692 | 122711 | 29, 22, 1 |
| 9 | BICD2 | BICD cargo adaptor 2 | 185963 | 127080 | 127081 | 29, 22, 11 |
| 9 | BAAT | bile acid-CoA: amino acid N-acyltransferase | 136881 | 148123 | 136897 | 19, 4, 35 |
| 9 | BRINP1 | BMP/retinoic acid inducible neural specific 1 | 078725 | 136869 | 136861 | 18, 7, 25 |
| 9 | BRD3 | bromodomain containing 3 | 169925 | 235106 | 196363 | 9, 22, 40 |
| 9 | CACFD1 | calcium channel flower domain containing 1 | 160325 | 160323 | 160326 | 29, 42, 38 |
| 9 | CACNA1B | calcium voltage-gated channel subunit alpha1 B | 148408 | 181090 | 107175 | 31, 26, 13 |
| 9 | CCIN | calicin | 185972 | 122694 | 122705 | 38, 8, 33 |
| 9 | CAMSAP1 | calmodulin regulated spectrin associated protein 1 | 130559 | 107147 | 130560 | 31, 14, 12 |
| 9 | CREB3 | cAMP responsive element binding protein 3 | 107175 | 137076 | 070610 | 34, 9, 27 |
| 9 | CA9 | carbonic anhydrase 9 | 107159 | 137135 | 198467 | 9, 3, 1 |
| 9 | CEL | carboxyl ester lipase | 170835 | 148308 | 160271 | |
| 9 | CRAT | carnitine O-acetyltransferase | 095321 | 167130 | 119383 | 7, 34, 35 |
| 9 | CARNMT1 | carnosine N-methyltransferase 1 | 156017 | 135045 | 106733 | 22, 26, 45 |
| 9 | CAAP1 | caspase activity and apoptosis inhibitor 1 | 120159 | 198680 | 137055 | 9, 43, 13 |
| 9 | CARD19 | caspase recruitment domain family member 19 | 165233 | 157303 | 131669 | 29, 36, 6 |
| 9 | CARD9 | caspase recruitment domain family member 9 | 187796 | 213221 | 165684 | 7, 36, 13 |
| 9 | CTNNAL1 | catenin alpha like 1 | 119326 | 119328 | 106771 | 11, 2, 45 |
| 9 | CTSL | cathepsin L | 135047 | 196730 | 177992 | 32, 29, 6 |
| 9 | CTSV | cathepsin V | 136943 | 188152 | 197816 | 39, 12, 13 |
| 9 | CCL19 | C-C motif chemokine ligand 19 | 172724 | 187186 | 137077 | 30, 45, 36 |
| 9 | CCL21 | C-C motif chemokine ligand 21 | 137077 | 172724 | 205108 | 45, 15, 22 |
| 9 | CCL27 | C-C motif chemokine ligand 27 | 213927 | 137070 | 187186 | 14, 32, 20 |
| 9 | CD274 | CD274 molecule | 120217 | 107020 | 197646 | 32, 39, 42 |
| 9 | CD72 | CD72 molecule | 137101 | 107140 | 137078 | 41, 36, 21 |
| 9 | CKS2 | CDC28 protein kinase regulatory subunit 2 | 123975 | 148082 | 187742 | 3, 12, 2 |
| 9 | CDK5RAP2 | CDK5 regulatory subunit associated protein 2 | 136861 | 078725 | 106780 | 29, 42, 1 |
| 9 | CIZ1 | CDKN1A interacting zinc finger protein 1 | 148337 | 171159 | 106976 | 34, 3, 9 |
| 9 | CDC14B | cell division cycle 14B | 081377 | 130956 | 158122 | 11, 2, 24 |
| 9 | CDC26 | cell division cycle 26 | 176386 | 136868 | 136875 | 31, 1, 43 |
| 9 | CDC37L1 | cell division cycle 37 like 1 | 106993 | 205808 | 147853 | 15, 26, 31 |
| 9 | CNTLN | centlein | 044459 | 173068 | 107295 | 6, 26, 13 |
| 9 | CNTRL | centriolin | 119397 | 106804 | 119396 | 22, 25, 39 |
| 9 | CENPP | centromere protein P | 188312 | 198000 | 106809 | 24, 21, 37 |
| 9 | CEP78 | centrosomal protein 78 | 148019 | 156052 | 135069 | 21, 37, 6 |
| 9 | CER1 | cerberus 1, DAN family BMP antagonist | 147869 | 175893 | 164946 | 12, 28, 27 |
| 9 | CERCAM | cerebral endothelial cell adhesion molecule | 167123 | 167118 | 136811 | 32, 27, 28 |
| 9 | CHMP5 | charged multivesicular body protein 5 | 086065 | 107262 | 086102 | 4, 7, 34 |
| 9 | CLIC3 | chloride intracellular channel 3 | 169583 | 148362 | 107331 | 32, 20, 15 |
| 9 | C9orf116 | chromosome 9 open reading frame 116 | 160345 | 196422 | 122140 | 17, 2, 6 |
| 9 | C9orf129 | chromosome 9 open reading frame 129 | 204352 | 165238 | 188938 | 33, 28, 8 |
| 9 | C9orf131 | chromosome 9 open reading frame 131 | 174038 | 137094 | 165280 | 38, 18, 30 |
| 9 | C9orf135 | chromosome 9 open reading frame 135 | 204711 | 188647 | 165072 | 10, 30, 38 |
| 9 | C9orf142 | chromosome 9 open reading frame 142 | 148362 | 214402 | 169583 | 9, 20, 27 |
| 9 | C9orf152 | chromosome 9 open reading frame 152 | 188959 | 241978 | 136810 | 42, 4, 23 |
| 9 | C9orf153 | chromosome 9 open reading frame 153 | 187753 | 135052 | 135070 | 38, 10, 8 |
| 9 | C9orf16 | chromosome 9 open reading frame 16 | 171159 | 148346 | 148337 | 2, 14, 34 |
| 9 | C9orf172 | chromosome 9 open reading frame 172 | 232434 | 196642 | 054148 | 17, 23, 8 |
| 9 | C9orf24 | chromosome 9 open reading frame 24 | 164972 | 164976 | 164970 | 38, 36, 8 |
| 9 | C9orf3 | chromosome 9 open reading frame 3 | 148120 | 165140 | 158169 | 34, 40, 6 |
| 9 | C9orf40 | chromosome 9 open reading frame 40 | 135045 | 119121 | 156017 | 22, 9, 38 |
| 9 | C9orf43 | chromosome 9 open reading frame 43 | 157653 | 148229 | 138835 | 38, 9, 44 |
| 9 | C9orf47 | chromosome 9 open reading frame 47 | 186354 | 130045 | 213694 | |
| 9 | C9orf50 | chromosome 9 open reading frame 50 | 179058 | 148335 | 148331 | 38, 37, 27 |
| 9 | C9orf57 | chromosome 9 open reading frame 57 | 204669 | 155621 | 119125 | 38, 16, |
| 9 | C9orf64 | chromosome 9 open reading frame 64 | 165118 | 165115 | 165119 | 30, 21, 4 |
| 9 | C9orf66 | chromosome 9 open reading frame 66 | 183784 | 172785 | 107099 | 17, 33, 38 |
| 9 | C9orf69 | chromosome 9 open reading frame 69 | 238227 | 148411 | 107187 | 27, 9, 14 |
| 9 | C9orf72 | chromosome 9 open reading frame 72 | 147894 | 147896 | 174482 | 31, 30, 5 |
| 9 | C9orf78 | chromosome 9 open reading frame 78 | 136819 | 136827 | 136878 | 30, 5, 7 |
| 9 | C9orf84 | chromosome 9 open reading frame 84 | 165181 | 242616 | 148154 | 38, 37, 23 |
| 9 | C9orf85 | chromosome 9 open reading frame 85 | 155621 | 281760 | 204669 | 7, 45, 42 |
| 9 | C9orf92 | chromosome 9 open reading frame 92 | 205549 | 164989 | 173068 | 10, 17, |
| 9 | CFAP157 | cilia and flagella associated protein 157 | 160401 | 187024 | 167094 | 9, 38, 44 |
| 9 | CFAP77 | cilia and flagella associated protein 77 | 188523 | 125482 | 125492 | 38, 44, |
| 9 | CNTFR | ciliary neurotrophic factor receptor | 122756 | 168913 | 164967 | 26, 14, 8 |
| 9 | CLTA | clathrin light chain A | 122705 | 185972 | 159921 | 21, 34, 35 |
| 9 | CBWD1 | COBW domain containing 1 | 172785 | 170122 | 183784 | |
| 9 | CBWD3 | COBW domain containing 3 | 196873 | 260691 | 187559 | |
| 9 | CBWD5 | COBW domain containing 5 | 147996 | 204779 | 184659 | |
| 9 | CBWD7 | COBW domain containing 7 | 215126 | 273514 | 154529 | |
| 9 | COQ4 | coenzyme Q4 | 167113 | 167112 | 167114 | 31, 9, 21 |
| 9 | CCDC107 | coiled-coil domain containing 107 | 159884 | 137078 | 137135 | 39, 36, 28 |
| 9 | CCDC171 | coiled-coil domain containing 171 | 164989 | 164985 | 205549 | 10, 6, 38 |
| 9 | CCDC180 | coiled-coil domain containing 180 | 197816 | 136943 | 196116 | 38, 42, 24 |
| 9 | CCDC183 | coiled-coil domain containing 183 | 213213 | 272896 | 196642 | 17, 20, 38 |
| 9 | CCDC187 | coiled-coil domain containing 187 | 260220 | 279813 | 160360 | 38, 20, 8 |
| 9 | COL5A1 | collagen type V alpha 1 chain | 130635 | 186350 | 160339 | 12, 6, 11 |
| 9 | COL15A1 | collagen type XV alpha 1 chain | 204291 | 119514 | 106799 | |
| 9 | COL27A1 | collagen type XXVII alpha 1 chain | 196739 | 136883 | 229314 | 11, 43, 26 |
| 9 | C5 | complement C5 | 106804 | 056558 | 119397 | 19, 41, 17 |
| 9 | C8G | complement C8 gamma chain | 176919 | 159069 | 184925 | 37, 19, 38 |
| 9 | CNTNAP3 | contactin associated protein-like 3 | 106714 | 283329 | 204849 | 26, 45, 5 |
| 9 | CNTNAP3B | contactin associated protein-like 3B | 154529 | 215126 | 185775 | |
| 9 | CORO2A | coronin 2A | 106789 | 106785 | 095383 | 3, 24, 33 |
| 9 | CRB2 | crumbs 2, cell polarity complex component | 148204 | 165209 | 119522 | 44, 8, 38 |
| 9 | CDK20 | cyclin dependent kinase 20 | 156345 | 283205 | 106723 | 2, 38, 42 |
| 9 | CDK9 | cyclin dependent kinase 9 | 136807 | 279363 | 136877 | 40, 26, 9 |
| 9 | CDKN2A | cyclin dependent kinase inhibitor 2A | 147889 | 264545 | 147883 | 9, 34, 44 |
| 9 | CDKN2B | cyclin dependent kinase inhibitor 2B | 147883 | 147889 | 176399 | 24, 4, 36 |
| 9 | CYLC2 | cylicin 2 | 155833 | 188386 | 136824 | 38, |
| 9 | CYSRT1 | cysteine rich tail 1 | 197191 | 212864 | 233198 | 19, 12, 8 |
| 9 | DAB2IP | DAB2 interacting protein | 136848 | 148175 | 175764 | |
| 9 | DCAF10 | DDB1 and CUL4 associated factor 10 | 122741 | 107371 | 122696 | 41, 18, 38 |
| 9 | DCAF12 | DDB1 and CUL4 associated factor 12 | 198876 | 137073 | 165006 | 38, 42, 24 |
| 9 | DDX31 | DEAD-box helicase 31 | 125485 | 125492 | 125484 | 9, 1, 33 |
| 9 | DAPK1 | death associated protein kinase 1 | 196730 | 180447 | 135047 | 32, 29, 39 |
| 9 | DOCK8 | dedicator of cytokinesis 8 | 107099 | 183784 | 107104 | 22, 26, 39 |
| 9 | DEC1 | deleted in esophageal cancer 1 | 173077 | 041982 | 182752 | 6, 35, |
| 9 | DENND1A | DENN domain containing 1A | 119522 | 148204 | 106689 | 26, 9, 31 |
| 9 | DENND4C | DENN domain containing 4C | 137145 | 147872 | 137154 | 11, 1, 4 |
| 9 | DDX58 | DExD/H-box helicase 58 | 107201 | 122729 | 197579 | 13, 23, 24 |
| 9 | DPP7 | dipeptidyl peptidase 7 | 176978 | 177239 | 176884 | 9, 1, 35 |
| 9 | DPH7 | diphthamide biosynthesis 7 | 148399 | 182154 | 165724 | 4, 39, 16 |
| 9 | DIRAS2 | DIRAS family GTPase 2 | 165023 | 130222 | 165025 | 8, 14, 23 |
| 9 | DMRTA1 | DMRT like family A1 | 176399 | 147883 | 107105 | 17, 42, 19 |
| 9 | POLE3 | DNA polymerase epsilon 3, accesspry subunit | 148229 | 148218 | 157653 | 2, 9, 21 |
| 9 | SMU1 | DNA replication regulator and spliceosomal factor | 122692 | 086061 | 086062 | 40, 20, 1 |
| 9 | DNAJA1 | DnaJ heat shock protein family (Hsp40) member A1 | 086061 | 137074 | 122692 | 41, 30, 1 |
| 9 | DNAJB5 | DnaJ heat shock protein family (Hsp40) member B5 | 137094 | 122733 | 174038 | 18, 25, 31 |
| 9 | DNAJC25 | DnaJ heat shock protein family (Hsp40) member C25 | 059769 | 106853 | 244115 | 28, 17, 7 |
| 9 | DNAJC25- | DNAJC25-GNG10 readthrough | 244115 | 059769 | 242616 | |
| | GNG10 | | | | | |
| 9 | DNLZ | DNL-type zinc finger | 213221 | 160360 | 187796 | 34, 33, 17 |
| 9 | DOLK | dolichol kinase | 175283 | 251184 | 095319 | 41, 27, 25 |
| 9 | DOLPP1 | dolichyldiphosphatase 1 | 167130 | 148343 | 095321 | 9, 26, 27 |
| 9 | DPM2 | dolichyl-phosphate mannosyltransferase subunit 2, regulatory | 136908 | 167103 | 167106 | 34, 9, 27 |
| 9 | DBH | dopamine beta-hydroxylase | 123454 | 196990 | 123453 | 26, 2, 8 |
| 9 | DMRT1 | doublesex and mab-3 related transcription factor 1 | 137090 | 107104 | 064218 | 10, 38, 8 |
| 9 | DMRT2 | doublesex and mab-3 related transcription factor 2 | 173253 | 064218 | 080503 | 29, 15, 17 |
| 9 | DMRT3 | doublesex and mab-3 related transcription factor 3 | 064218 | 137090 | 173253 | |
| 9 | DCTN3 | dynactin subunit 3 | 137100 | 164967 | 205143 | 34, 43, 41 |
| 9 | DNM1 | dynamin 1 | 106976 | 148337 | 167110 | 26, 8, 29 |
| 9 | DNAI1 | dynein axenemal intermediate chain 1 | 122735 | 164970 | 168913 | 38, 42, 30 |
| 9 | ENTPD2 | ectonucleoside triphosphate diphosphohydrolase 2 | 054179 | 107281 | 186193 | 26, 3, 27 |
| 9 | ENTPD8 | ectonucleoside triphosphate diphosphohydrolase 8 | 188833 | 188747 | 165802 | 3, 28, 16 |
| 9 | EGFL7 | EGF like domain multiple 7 | 172889 | 148400 | 169692 | 32, 17, 15 |
| 9 | ELAVL2 | ELAV like RNA binding protein 2 | 107105 | 176399 | 205442 | 38, 14, 8 |
| 9 | ENG | endoglin | 106991 | 136877 | 106992 | 45, 36, 39 |
| 9 | ENDOG | endonuclease G | 167136 | 107021 | 198917 | 41, 34, 33 |
| 9 | ERMP1 | endoplasmic reticulum metallopeptidase 1 | 099219 | 107036 | 183354 | 29, 24, 4 |
| 9 | ERP44 | endoplasmic reticulum protein 44 | 023318 | 136874 | 119509 | 31, 29, 32 |
| 9 | EDF1 | endothelial differentiation related factor 1 | 107223 | 177943 | 127191 | 43, 33, 18 |
| 9 | ENHO | energy homeostasis associated | 168913 | 122735 | 122756 | 26, 8, 38 |
| 9 | EQTN | equatorin | 120160 | 120156 | 120162 | 38, 20, |
| 9 | ERCC6L2 | ERCC excision repair 6 like 2 | 182150 | 185920 | 130948 | |
| 9 | EPB41L4B | erythrocyte membrane protein band 4.1 like 4B | 095203 | 260230 | 070159 | 26, 16, 4 |
| 9 | EHMT1 | euchromatic histone lysine methyltransferase 1 | 181090 | 197070 | 148408 | 21, 22, 41 |
| 9 | EXD3 | exonuclease 3′-5′ domain containing 3 | 187609 | 198435 | 188747 | 36, 6, 32 |
| 9 | EXOSC2 | exosome component 2 | 130713 | 130711 | 097007 | 1, 34, 43 |
| 9 | EXOSC3 | exosome component 3 | 107371 | 165275 | 122741 | |
| 9 | ECM2 | extracellular matrix protein 2 | 106823 | 106819 | 127080 | 45, 26, 6 |
| 9 | FAM102A | family with sequence similarity 102 member A | 167106 | 136908 | 171169 | 22, 28, 31 |
| 9 | FAM120A | family with sequence similarity 120A | 048828 | 188938 | 197724 | 11, 22, 6 |
| 9 | FAM120AOS | family with sequence similarity 120A opposite strand | 188938 | 204352 | 048828 | 29, 20, 16 |
| 9 | FAM122A | family with sequence similarity 122A | 187866 | 107242 | 165059 | 42, 1, 44 |
| 9 | FAM129B | family with sequence similarity 129 member B | 136830 | 148356 | 136854 | 9, 6, 33 |
| 9 | FAM163B | family with sequence similarity 163 member B | 196990 | 197859 | 123454 | 32, 8, |
| 9 | FAM166A | family with sequence similarity 166 member A | 188163 | 188229 | 197768 | 38, 27, 25 |
| 9 | FAM166B | family with sequence similarity 166 member B | 215187 | 198853 | 107140 | 2, 35, 20 |
| 9 | FAM189A2 | family with sequence similarity 189 member A2 | 135063 | 283143 | 107282 | 18, 40, 39 |
| 9 | FAM205A | family with sequence similarity 205 member A | 205108 | 137077 | 187791 | 38, |
| 9 | FAM205C | family with sequence similarity 205 member C | 187791 | 205108 | 122733 | |
| 9 | FAM206A | family with sequence similarity 206 member A | 119328 | 070061 | 119326 | 29, 31, 15 |
| 9 | FAM214B | family with sequence similarity 214 member B | 005238 | 165283 | 198722 | 45, 39, 10 |
| 9 | FAM219A | family with sequence similarity 219 member A | 164970 | 164972 | 122735 | 26, 32, 35 |
| 9 | FAM221B | family with sequence similarity 221 member B | 204930 | 137103 | 168828 | 38, 37, 32 |
| 9 | FAM69B | family with sequence similarity 69 member B | 165716 | 169692 | 187922 | 15, 29, 20 |
| 9 | FAM78A | family with sequence similarity 78 member A | 126882 | 126883 | 160539 | 7, 22, 43 |
| 9 | FANCC | Fanconi anemia complementation group C | 158169 | 148120 | 185920 | 38, 17, 3 |
| 9 | FANCG | Fanconi anemia complementation group G | 221829 | 165280 | 165282 | 9, 21, 39 |
| 9 | FUBP3 | far upstream element binding protein 3 | 107164 | 130707 | 130711 | 34, 40, 12 |
| 9 | FBXW2 | F-box and WD repeat domain containing 2 | 119402 | 106780 | 095261 | 40, 22, 15 |
| 9 | FBXW5 | F-box and WD repeat domain containing 5 | 159069 | 127191 | 176919 | 38, 9, 34 |
| 9 | FBXO10 | F-box protein 10 | 147912 | 137054 | 256966 | 22, 41, 36 |
| 9 | FRMPD1 | FERM and PDZ domain containing 1 | 070601 | 255872 | 165275 | 14, 2, 38 |
| 9 | FRMD3 | FERM domain containing 3 | 172159 | 165105 | 148057 | |
| 9 | FRRS1L | ferric chelate reductase 1 like | 260230 | 106771 | 095203 | 38, 28, 27 |
| 9 | FIBCD1 | fibrinogen C domain containing 1 | 130720 | 188710 | 050555 | 9, 2, 29 |
| 9 | FSD1L | fibronectin type III and SPRY domain containing 1 like | 106701 | 070214 | 106692 | 1, 26, 21 |
| 9 | FCN1 | ficolin 1 | 085265 | 160339 | 130558 | 5, 7, 20 |
| 9 | FCN2 | ficolin 2 | 160339 | 130635 | 085265 | 2, 19, 5 |
| 9 | FKBP15 | FK506 binding protein 15 | 119321 | 136867 | 136868 | 24, 36, 43 |
| 9 | FOCAD | focadhesin | 188352 | 171843 | 188921 | |
| 9 | FPGS | folylpolyglutamate synthase | 136877 | 136807 | 106991 | 21, 9, 22 |
| 9 | FOXB2 | forkhead box B2 | 204612 | 106772 | 197969 | |
| 9 | FOXD4 | forkhead box D4 | 170122 | 181404 | 172785 | 33, 20, 44 |
| 9 | FOXD4L3 | forkhead box D4-like 3 | 187559 | 196873 | 154330 | |
| 9 | FOXD4L4 | forkhead box D4-like 4 | 184659 | 147996 | 276203 | 38, |
| 9 | FOXD4L5 | forkhead box D4-like 5 | 204779 | 172014 | 147996 | |
| 9 | FOXD4L6 | forkhead box D4-like 6 | 273514 | 183148 | 215126 | 16, |
| 9 | FOXE1 | forkhead box E1 | 178919 | 136936 | 136932 | 40, 35, 38 |
| 9 | FNBP1 | formin binding protein 1 | 187239 | 136878 | 148358 | 22, 1, 41 |
| 9 | FREM1 | FRAS1 related extracellular matrix 1 | 164946 | 147869 | 155158 | 11, 26, 17 |
| 9 | FXN | frataxin | 165060 | 165059 | 119139 | 29, 27, 37 |
| 9 | FBP1 | fructose-bisphosphatase 1 | 165140 | 130957 | 148120 | 37, 20, 17 |
| 9 | FBP2 | fructose-bisphosphatase 2 | 130957 | 148110 | 165140 | 29, 25, 15 |
| 9 | FUT7 | fucosyltransferase 7 | 180549 | 107331 | 279073 | 1, 22, 3 |
| 9 | FKTN | fukutin | 106692 | 106701 | 186051 | 29, 43, 4 |
| 9 | FGD3 | FYVE, RhoGEF and PH domain containing 3 | 127084 | 127081 | 157303 | 39, 5, 41 |
| 9 | GKAP1 | G kinase anchoring protein 1 | 165113 | 135018 | 165115 | 38, 29, 10 |
| 9 | GNA14 | G protein subunit alpha 14 | 156049 | 197969 | 156052 | 45, 40, 44 |
| 9 | GNAQ | G protein subunit alpha q | 156052 | 156049 | 148019 | 35, 32, 4 |
| 9 | GNG10 | G protein subunit gamma 10 | 242616 | 244115 | 165181 | |
| 9 | GPR107 | G protein-coupled receptor 107 | 148358 | 187239 | 107130 | |
| 9 | GPR21 | G protein-coupled receptor 21 | 188394 | 011454 | 165209 | 42, 25, 8 |
| 9 | GALT | galactose-1-phosphate uridylyltransferase | 213930 | 147955 | 258728 | 39, 10, 38 |
| 9 | GABBR2 | gamma-aminobutyric acid type B receptor subunit 2 | 136928 | 095383 | 165138 | 2, 8, 45 |
| 9 | GSN | gelsolin | 148180 | 119396 | 283299 | 1, 24, 3 |
| 9 | GTF3C4 | general transcription factor IIIC subunit 4 | 125484 | 125485 | 165695 | 6, 45, 38 |
| 9 | GTF3C5 | general transcription factor IIIC subunit 5 | 148308 | 165702 | 170835 | 39, 3, 36 |
| 9 | GLE1 | GLE1, RNA export mediator | 119392 | 136811 | 197694 | 38, 41, 39 |
| 9 | GLIPR2 | GLI pathogenesis related 2 | 122694 | 122707 | 185972 | 43, 5, 1 |
| 9 | GLIS3 | GLIS family zinc finger 3 | 107249 | 279745 | 106688 | |
| 9 | GBGT1 | globoside alpha-1,3-N-acetylgalactosaminyltransferase 1 | 148288 | 160271 | 171102 | 7, 1, 2 |
| 9 | GNE | glucosamine (UDP-N-acetyl)-2-epimerase/N-acetylmannosamine kinase | 159921 | 122705 | 137075 | 42, 24, 29 |
| 9 | GCNT1 | glucosaminyl (N-acetyl) transferase 1, core 2 | 187210 | 135002 | 106772 | 29, 6, 37 |
| 9 | GBA2 | glucosylceramidase beta 2 | 070610 | 107175 | 107185 | 43, 30, 18 |
| 9 | GRIN1 | glutamate ionotropic receptor NMDA type subunit 1 | 176884 | 176978 | 184709 | |
| 9 | GRIN3A | glutamate ionotropic receptor NMDA type subunit 3A | 198785 | 155827 | 188386 | 26, 2, 9 |
| 9 | GLDC | glycine decarboxylase | 178445 | 147854 | 274527 | 17, 19, 12 |
| 9 | GLT6D1 | glycosyltransferase 6 domain containing 1 | 204007 | 236543 | 148386 | 38, |
| 9 | GRHPR | glyoxylate and hydroxypyruvate reductase | 137106 | 147905 | 168795 | 21, 3, 26 |
| 9 | GOLM1 | golgi membrane protein 1 | 135052 | 135040 | 187753 | 42, 3, 1 |
| 9 | GOLGA1 | golgin A1 | 136935 | 136950 | 173611 | 26, 30, 31 |
| 9 | GOLGA2 | golgin A2 | 167110 | 106976 | 175854 | 29, 19, 28 |
| 9 | GPSM1 | G-protein signaling modulator 1 | 160360 | 260220 | 213221 | 26, 14, 6 |
| 9 | GADD45G | growth arrest and DNA damage inducible gamma | 130222 | 187764 | 165023 | 28, 29, 32 |
| 9 | GAS1 | growth arrest specific 1 | 180447 | 083223 | 196730 | 15, 6, 45 |
| 9 | GFI1B | growth factor independent 1B transcriptional repressor | 165702 | 165699 | 148308 | 36, 7, 19 |
| 9 | GAPVD1 | GTPase activating protein and VPS9 domains 1 | 165219 | 044574 | 119487 | 24, 11, 40 |
| 9 | GARNL3 | GTPase activating Rap/RanGAP domain like 3 | 136895 | 136859 | 136856 | 11, 26, 8 |
| 9 | GDA | guanine deaminase | 119125 | 204669 | 107372 | 9, 8, 32 |
| 9 | GVQW1 | GVQW motif containing 1 | 241043 | 165264 | 122728 | 17, 33, 38 |
| 9 | HDHD3 | haloacid dehalogenase like hydrolase domain containing 3 | 119431 | 119411 | 148218 | 29, 16, 27 |
| 9 | HAUS6 | HAUS augmin like complex subunit 6 | 147874 | 155876 | 147872 | 12, 25, 38 |
| 9 | HSPA5 | heat shock protein family A (Hsp70) member 5 | 044574 | 136933 | 165219 | 40, 13, 1 |
| 9 | HMCN2 | hemicentin 2 | 148357 | 107130 | 130707 | 39, 16, 9 |
| 9 | HEMGN | hemogen | 136929 | 136932 | 136938 | 7, 38, 36 |
| 9 | HNRNPK | heterogeneous nuclear ribonucleoprotein K | 165119 | 165118 | 178966 | 39, 30, 18 |
| 9 | HRCT1 | histidine rich carboxyl terminus 1 | 196196 | 168828 | 235387 | 6, 2, 32 |
| 9 | HINT2 | histidine triad nucleotide binding protein 2 | 137133 | 137098 | 137103 | 25, 41, 31 |
| 9 | HABP4 | hyaluronan binding protein 4 | 130956 | 165244 | 081377 | 14, 40, 23 |
| 9 | HSD17B3 | hydroxysteroid 17-beta dehydrogenase 3 | 130948 | 182150 | 130958 | 38, 6, 8 |
| 9 | HSDL2 | hydroxysteroid dehydrogenase like 2 | 119471 | 119314 | 165185 | 15, 17, 26 |
| 9 | IDNK | IDNK, gluconokinase | 148057 | 172159 | 135018 | 10, 28, 15 |
| 9 | IER5L | immediate early response 5 like | 188483 | 119383 | 148335 | 37, 3, 22 |
| 9 | IKBKAP | inhibitor of kappa light polypeptide gene enhancer in B-cells, kinase complex- | 070061 | 187003 | 119328 | 2, 42, 29 |
| | | associated protein | | | | |
| 9 | INPP5E | inositol polyphosphate-5-phosphatase E | 148384 | 165688 | 148396 | 26, 12, 7 |
| 9 | IPPK | inositol-pentakisphosphate 2-kinase | 127080 | 106823 | 185963 | 33, 24, 22 |
| 9 | INSL4 | insulin like 4 | 120211 | 120210 | 107014 | 32, 10, |
| 9 | INSL6 | insulin like 6 | 120210 | 096968 | 120211 | 38, |
| 9 | IGFBPL1 | insulin like growth factor binding protein like 1 | 137142 | 137124 | 283486 | 26, 31, 14 |
| 9 | IFNA1 | interferon alpha 1 | 197919 | 120242 | 184995 | |
| 9 | IFNA10 | interferon alpha 10 | 186803 | 214042 | 147885 | |
| 9 | IFNA13 | interferon alpha 13 | 233816 | 120235 | 188379 | |
| 9 | IFNA14 | interferon alpha 14 | 228083 | 234829 | 147873 | |
| 9 | IFNA16 | interferon alpha 16 | 147885 | 186803 | 234829 | |
| 9 | IFNA17 | interferon alpha 17 | 234829 | 147885 | 228083 | |
| 9 | IFNA2 | interferon alpha 2 | 188379 | 233816 | 120242 | |
| 9 | IFNA21 | interferon alpha 21 | 137080 | 177047 | 236637 | |
| 9 | IFNA4 | interferon alpha 4 | 236637 | 137080 | 214042 | |
| 9 | IFNA5 | interferon alpha 5 | 147873 | 228083 | 198642 | |
| 9 | IFNA6 | interferon alpha 6 | 120235 | 198642 | 233816 | |
| 9 | IFNA7 | interferon alpha 7 | 214042 | 236637 | 186803 | |
| 9 | IFNA8 | interferon alpha 8 | 120242 | 188379 | 197919 | |
| 9 | IFNB1 | interferon beta 1 | 171855 | 188921 | 177047 | |
| 9 | IFNE | interferon epsilon | 184995 | 197919 | 099810 | 10, |
| 9 | IFNK | interferon kappa | 147896 | 120162 | 147894 | 44, |
| 9 | IFNW1 | interferon omega 1 | 177047 | 171855 | 137080 | 20, |
| 9 | IL11RA | interleukin 11 receptor subunit alpha | 137070 | 258728 | 213927 | 29, 1, 36 |
| 9 | IL33 | interleukin 33 | 137033 | 137040 | 170777 | 2, 45, 42 |
| 9 | IFT74 | intraflagellar transport 74 | 096872 | 137055 | 184434 | 4, 11, 7 |
| 9 | INIP | INTS3 and NABP interacting protein | 148153 | 165185 | 148158 | 30, 43, 23 |
| 9 | INVS | inversin | 119509 | 023318 | 136891 | 43, 29, 39 |
| 9 | ISCA1 | iron-sulfur cluster assembly 1 | 135070 | 187753 | 083223 | 15, 13, 9 |
| 9 | IARS | isoleucyl-tRNA synthetase | 196305 | 090054 | 279007 | 3, 40, 37 |
| 9 | IZUMO3 | IZUMO family member 3 | 205442 | 107105 | 198680 | 38, |
| 9 | JAK2 | Janus kinase 2 | 096968 | 120158 | 120210 | 7, 45, 1 |
| 9 | KLHL9 | kelch like family member 9 | 198642 | 147873 | 120235 | |
| 9 | KIAA0368 | KIAA0368 | 136813 | 171133 | 173258 | 37, 1, 23 |
| 9 | KIAA1161 | KIAA1161 | 164976 | 164978 | 164972 | 17, 32, 16 |
| 9 | KIAA1958 | KIAA1958 | 165185 | 119471 | 148153 | 18, 44, 12 |
| 9 | KIAA2026 | KIAA2026 | 183354 | 099219 | 120215 | 37, 6, 32 |
| 9 | KIF12 | kinesin family member 12 | 136883 | 106927 | 196739 | 17, 3, 28 |
| 9 | KIF24 | kinesin family member 24 | 186638 | 165006 | 164978 | 22, 5, 27 |
| 9 | KIF27 | kinesin family member 27 | 165115 | 165113 | 165118 | 30, 7, 6 |
| 9 | KANK1 | KN motif and ankyrin repeat domains 1 | 107104 | 107099 | 137090 | 1, 43, 40 |
| 9 | KLF4 | Kruppel like factor 4 | 136826 | 119318 | 148156 | 1, 18, 11 |
| 9 | KLF9 | Kruppel like factor 9 | 119138 | 198887 | 083067 | 26, 17, 25 |
| 9 | KYAT1 | kynurenine aminotransferase 1 | 171097 | 198917 | 136802 | 9, 37, 30 |
| 9 | LAMC3 | laminin subunit gamma 3 | 050555 | 130720 | 126878 | 32, 38, 24 |
| 9 | LURAP1L | leucine rich adaptor protein 1 like | 153714 | 107165 | 107186 | 26, 36, 45 |
| 9 | LINGO2 | leucine rich repeat and Ig domain containing 2 | 174482 | 147894 | 122729 | 11, 38, 23 |
| 9 | LRSAM1 | leucine rich repeat and sterile alpha motif containing 1 | 148356 | 197958 | 136830 | 9, 22, 8 |
| 9 | LRRC19 | leucine rich repeat containing 19 | 184434 | 096872 | 120156 | 17, 37, 25 |
| 9 | LRRC26 | leucine rich repeat containing 26 | 184709 | 176884 | 261793 | 3, 16, 33 |
| 9 | LRRC8A | leucine rich repeat containing 8 family member A | 136802 | 171097 | 175287 | 24, 40, 6 |
| 9 | LHX2 | LIM homeobox 2 | 106689 | 119522 | 119408 | 26, 14, 8 |
| 9 | LHX3 | LIM homeobox 3 | 107187 | 238227 | 165661 | 14, 8, |
| 9 | LHX6 | LIM homeobox 6 | 106852 | 185681 | 119446 | 8, 15, 33 |
| 9 | LMX1B | LIM homeobox transcription factor 1 beta | 136944 | 196814 | 169155 | 23, 14, 20 |
| 9 | LCN1 | lipocalin 1 | 160349 | 122140 | 122136 | 14, 38, |
| 9 | LCN10 | lipocalin 10 | 187922 | 165716 | 267206 | 36, 5, 15 |
| 9 | LCN12 | lipocalin 12 | 184925 | 176919 | 107317 | 36, 20, 17 |
| 9 | LCN15 | lipocalin 15 | 177984 | 204001 | 244187 | 16, |
| 9 | LCN2 | lipocalin 2 | 148346 | 148334 | 171159 | 37, 5, 30 |
| 9 | LCN6 | lipocalin 6 | 267206 | 187922 | 204001 | 44, 39, 38 |
| 9 | LCN8 | lipocalin 8 | 204001 | 267206 | 177984 | 36, 22, 7 |
| 9 | LCN9 | lipocalin 9 | 148386 | 204007 | 165643 | 12, |
| 9 | LCNL1 | lipocalin like 1 | 214402 | 107317 | 148362 | 26, 8, 38 |
| 9 | LINC00094 | Long intergenic non-protein coding RNA 94 | 235106 | 160293 | 169925 | 34, 29, 14 |
| 9 | LINC00961 | Long intergenic non-protein coding RNA 961 | 235387 | 196196 | 278889 | |
| 9 | KDM4C | lysine demethylase 4C | 107077 | 282960 | 137038 | 10, 42, 1 |
| 9 | LPAR1 | lysophosphatidic acid receptor 1 | 198121 | 030304 | 171133 | 11, 10, 8 |
| 9 | MFSD14B | major facilitator superfamily domain containing 14B | 148110 | 130950 | 130957 | 29, 34, 22 |
| 9 | MFSD14C | Major facilitator superfamily domain containing 14C | 196312 | 196597 | 188152 | |
| 9 | MAMDC2 | MAM domain containing 2 | 165072 | 204711 | 198887 | 12, 31, 43 |
| 9 | MAMDC4 | MAM domain containing 4 | 177943 | 054148 | 107223 | 19, 28, 44 |
| 9 | MAN1B1 | mannosidase alpha class 1B member 1 | 177239 | 197355 | 176978 | 9, 45, 36 |
| 9 | MELK | maternal embryonic leucine zipper kinase | 165304 | 137075 | 196092 | 13, 3, 24 |
| 9 | MED22 | mediator complex subunit 22 | 148297 | 148296 | 148303 | 42, 39, 3 |
| 9 | MED27 | mediator complex subunit 27 | 160563 | 107263 | 196358 | 13, 30, 10 |
| 9 | MLANA | melan-A | 120215 | 183354 | 137040 | 35, 11, 14 |
| 9 | MTAP | methylthioadenosine phosphorylase | 099810 | 184995 | 264545 | 1, 12, 33 |
| 9 | MSMP | microseminoprotein, prostate associated | 215183 | 107185 | 159899 | 40, 7, 10 |
| 9 | MRPL41 | mitochondrial ribosomal protein L41 | 182154 | 130653 | 148399 | 27, 23, 3 |
| 9 | MRPL50 | mitochondrial ribosomal protein L50 | 136897 | 136881 | 136870 | 4, 29, 34 |
| 9 | MRPS2 | mitochondrial ribosomal protein S2 | 122140 | 160345 | 160349 | 21, 9, 29 |
| 9 | MRRF | mitochondrial ribosome recycling factor | 148187 | 119446 | 095303 | 9, 34, 43 |
| 9 | MAPKAP1 | mitogen-activated protein kinase associated protein 1 | 119487 | 165219 | 167081 | 9, 14, 40 |
| 9 | MIGA2 | mitoguardin 2 | 148343 | 148341 | 167130 | 7, 24, 39 |
| 9 | MLLT3 | MLLT3, super elongation complex subunit | 171843 | 155886 | 188352 | 6, 11, 8 |
| 9 | MOB3B | MOB kinase activator 3B | 120162 | 120160 | 147896 | 32, 31, 17 |
| 9 | MORN5 | MORN repeat containing 5 | 185681 | 119421 | 106852 | 30, 38, 44 |
| 9 | MSANTD3- | MSANTD3-TMEFF1 readthrough | 251349 | 066697 | 241697 | |
| | TMEFF1 | | | | | |
| 9 | MEGF9 | multiple EGF like domains 9 | 106780 | 136861 | 119402 | 11, 26, 14 |
| 9 | MPDZ | multiple PDZ domain crumbs cell polarity complex component | 107186 | 153714 | 147862 | 26, 1, 43 |
| 9 | MVB12B | multivesicular body subunit 12B | 196814 | 167081 | 136944 | 26, 14, 8 |
| 9 | MUSK | muscle associated receptor tyrosine kinase | 030304 | 165124 | 198121 | 24, 25, 38 |
| 9 | MURO | muscle related coiled-coil protein | 170681 | 241697 | 148123 | 15, 25, 24 |
| 9 | MSANTD3 | Myb/SANT DNA binding domain containing 3 | 066697 | 136891 | 251349 | 6, 9, 24 |
| 9 | NAA35 | N(alpha)-acetyltransferase 35, NatC auxiliary subunit | 135040 | 135049 | 135052 | 18, 31, 29 |
| 9 | NACC2 | NACC family member 2 | 148411 | 130560 | 238227 | 34, 9, 15 |
| 9 | NANS | N-acetylneuraminate synthase | 095380 | 136938 | 106785 | 9, 6, 37 |
| 9 | NDUFA8 | NADH: ubiquinone oxidoreductase subunit A8 | 119421 | 175764 | 185681 | 28, 29, 15 |
| 9 | NDUFB6 | NADH: ubiquinone oxidoreductase subunit B6 | 165264 | 235453 | 241043 | 29, 45, 11 |
| 9 | NDOR1 | NADPH dependent diflavin oxidoreductase 1 | 188566 | 187713 | 283590 | 2, 4, 37 |
| 9 | NDOR1 | NADPH dependent diflavin oxidoreductase 1 | 283590 | 188566 | 212864 | 2, 4, 37 |
| 9 | NOXA1 | NADPH oxidase activator 1 | 188747 | 187609 | 188833 | 21, 23, 22 |
| 9 | NPR2 | natriuretic peptide receptor 2 | 159899 | 215183 | 137098 | 31, 43, 2 |
| 9 | NELFB | negative elongation factor complex member B | 188986 | 197768 | 198113 | 3, 9, 26 |
| 9 | NTNG2 | netrin G2 | 196358 | 160563 | 107290 | 14, 2, 5 |
| 9 | NPDC1 | neural proliferation, differentiation and control 1 | 107281 | 279073 | 054179 | 26, 31, 9 |
| 9 | NCS1 | neuronal calcium sensor 1 | 107130 | 148358 | 148357 | 26, 27, 8 |
| 9 | NTRK2 | neurotrophic receptor tyrosine kinase 2 | 148053 | 197506 | 135049 | 24, 13, 8 |
| 9 | NMRK1 | nicotinamide riboside kinase 1 | 106733 | 156017 | 134996 | 29, 9, 23 |
| 9 | NEK6 | NIMA related kinase 6 | 119408 | 106689 | 136930 | 41, 43, 3 |
| 9 | NINJ1 | ninjurin 1 | 131669 | 165233 | 165238 | 1, 34, 33 |
| 9 | NIPSNAP3A | nipsnap homolog 3A | 136783 | 179055 | 165028 | 7, 2, 45 |
| 9 | NIPSNAP3B | nipsnap homolog 3B | 165028 | 136783 | 165029 | 1, 25, 7 |
| 9 | NSMF | NMDA receptor synaptonuclear signaling and neuronal migration factor | 165802 | 188833 | 130653 | 34, 26, 3 |
| 9 | NOTCH1 | notch 1 | 148400 | 148396 | 172889 | 22, 1, 15 |
| 9 | NRARP | NOTCH-regulated ankyrin repeat protein | 198435 | 198113 | 187609 | 3, 28, 14 |
| 9 | NTMT1 | N-terminal Xaa-Pro-Lys N-methyltransferase 1 | 148335 | 188483 | 179058 | 34, 37, 35 |
| 9 | NAIF1 | nuclear apoptosis inducing factor 1 | 171169 | 167106 | 148339 | 36, 13, 24 |
| 9 | NCBP1 | nuclear cap binding protein subunit 1 | 136937 | 136925 | 136936 | 24, 39, 41 |
| 9 | NFIB | nuclear factor I B | 147862 | 107186 | 175893 | 11, 44, 40 |
| 9 | NFIL3 | nuclear factor, interleukin 3 regulated | 165030 | 148090 | 169071 | 31, 17, 1 |
| 9 | NR4A3 | nuclear receptor subfamily 4 group A member 3 | 119508 | 106803 | 136874 | 1, 5, 26 |
| 9 | NR5A1 | nuclear receptor subfamily 5 group A member 1 | 136931 | 180264 | 148200 | 36, 2, 38 |
| 9 | NR6A1 | nuclear receptor subfamily 6 group A member 1 | 148200 | 136931 | 185585 | 27, 38, 5 |
| 9 | NFX1 | nuclear transcription factor, X-box binding 1 | 086102 | 086065 | 165269 | 24, 42, 18 |
| 9 | NOL6 | nucleolar protein 6 | 165271 | 165272 | 230453 | 43, 24, 27 |
| 9 | NOL8 | nucleolar protein 8 | 198000 | 279007 | 188312 | 22, 24, 29 |
| 9 | NUP188 | nucleoporin 188 | 095319 | 175283 | 148341 | 21, 41, 44 |
| 9 | NUP214 | nucleoporin 214 | 126883 | 126878 | 126882 | |
| 9 | NXNL2 | nucleoredoxin-like 2 | 130045 | 106723 | 186354 | 23, 27, 17 |
| 9 | NUDT2 | nudix hydrolase 2 | 164978 | 186638 | 164976 | 37, 41, 28 |
| 9 | NUTM2F | NUT family member 2F | 130950 | 175787 | 148110 | 38, |
| 9 | NUTM2G | NUT family member 2G | 188152 | 196312 | 136943 | |
| 9 | OBP2A | odorant binding protein 2A | 122136 | 160349 | 122133 | |
| 9 | OBP2B | odorant binding protein 2B | 171102 | 148288 | 175164 | 38, 44, |
| 9 | OLFM1 | olfactomedin 1 | 130558 | 085265 | 196422 | 26, 11, 31 |
| 9 | OLFML2A | olfactomedin like 2A | 185585 | 148200 | 136918 | 11, 15, 27 |
| 9 | OR1B1 | olfactory receptor family 1 subfamily B member 1 (gene/pseudogene) | 280094 | 165202 | 173679 | |
| 9 | OR1J1 | olfactory receptor family 1 subfamily J member 1 | 136834 | 095303 | 197233 | |
| 9 | OR1J2 | olfactory receptor family 1 subfamily J member 2 | 197233 | 136834 | 239590 | |
| 9 | OR1J4 | olfactory receptor family 1 subfamily J member 4 | 239590 | 197233 | 171505 | |
| 9 | OR1K1 | olfactory receptor family 1 subfamily K member 1 | 165204 | 136940 | 056586 | |
| 9 | OR1L1 | olfactory receptor family 1 subfamily L member 1 | 173679 | 280094 | 171481 | |
| 9 | OR1L3 | olfactory receptor family 1 subfamily L member 3 | 171481 | 173679 | 136939 | |
| 9 | OR1L4 | olfactory receptor family 1 subfamily L member 4 | 136939 | 171481 | 171459 | |
| 9 | OR1L6 | olfactory receptor family 1 subfamily L member 6 | 171459 | 136939 | 148215 | |
| 9 | OR1L8 | olfactory receptor family 1 subfamily L member 8 | 171496 | 171501 | 165202 | |
| 9 | OR1N1 | olfactory receptor family 1 subfamily N member 1 | 171505 | 239590 | 171501 | |
| 9 | OR1N2 | olfactory receptor family 1 subfamily N member 2 | 171501 | 171505 | 171496 | |
| 9 | OR1Q1 | olfactory receptor family 1 subfamily Q member 1 | 165202 | 171496 | 280094 | |
| 9 | OR13C2 | olfactory receptor family 13 subfamily C member 2 | 276119 | 277556 | 136839 | |
| 9 | OR13C3 | olfactory receptor family 13 subfamily C member 3 | 204246 | 148136 | 186943 | |
| 9 | OR13C4 | olfactory receptor family 13 subfamily C member 4 | 148136 | 186881 | 204246 | |
| 9 | OR13C5 | olfactory receptor family 13 subfamily C member 5 | 277556 | 186943 | 276119 | |
| 9 | OR13C7 | olfactory receptor family 13 subfamily C member 7 (gene/pseudogene) | 243641 | 278889 | 122707 | |
| 9 | OR13C8 | olfactory receptor family 13 subfamily C member 8 | 186943 | 204246 | 277556 | |
| 9 | OR13C9 | olfactory receptor family 13 subfamily C member 9 | 136839 | 276119 | 179055 | |
| 9 | OR13D1 | olfactory receptor family 13 subfamily D member 1 | 179055 | 136839 | 136783 | |
| 9 | OR13F1 | olfactory receptor family 13 subfamily F member 1 | 186881 | 136824 | 148136 | |
| 9 | OR13J1 | olfactory receptor family 13 subfamily J member 1 | 168828 | 204930 | 196196 | |
| 9 | OR2K2 | olfactory receptor family 2 subfamily K member 2 | 171133 | 198121 | 136813 | |
| 9 | OR2S2 | olfactory receptor family 2 subfamily S member 2 (gene/pseudogene) | 278889 | 235387 | 243641 | |
| 9 | OR5C1 | olfactory receptor family 5 subfamily C member 1 | 148215 | 171459 | 136940 | |
| 9 | ORM1 | orosomucoid 1 | 229314 | 196739 | 228278 | 19, 33, 25 |
| 9 | ORM2 | orosomucoid 2 | 228278 | 229314 | 106948 | 19, 33, 37 |
| 9 | OSTF1 | osteoclast stimulating factor 1 | 134996 | 106733 | 099139 | 41, 22, 44 |
| 9 | OGN | osteoglycin | 106809 | 188312 | 127083 | 11, 45, 44 |
| 9 | OMD | osteomodulin | 127083 | 106809 | 106819 | 42, 15, 26 |
| 9 | ODF2 | outer dense fiber of sperm tails 2 | 136811 | 167123 | 119392 | 38, 43, 7 |
| 9 | PAX5 | paired box 5 | 196092 | 165304 | 147905 | 22, 41, 36 |
| 9 | PRRX2 | paired related homeobox 2 | 167157 | 148331 | 148344 | 33, 6, 44 |
| 9 | PALM2-AKAP2 | PALM2-AKAP2 readthrough | 157654 | 243444 | 241978 | |
| 9 | PAPPA | pappalysin 1 | 182752 | 173077 | 148219 | 32, 45, 26 |
| 9 | PALM2 | paralemmin 2 | 243444 | 070159 | 157654 | |
| 9 | PNPLA7 | patatin like phospholipase domain containing 7 | 130653 | 165802 | 182154 | 42, 22, 37 |
| 9 | PTCH1 | patched 1 | 185920 | 158169 | 182150 | 11, 38, 13 |
| 9 | PBX3 | PBX homeobox 3 | 167081 | 119487 | 196814 | |
| 9 | PSIP1 | PC4 and SFRS1 interacting protein 1 | 164985 | 164975 | 164989 | 11, 7, 29 |
| 9 | PMPCA | peptidase, mitochondrial processing alpha subunit | 165688 | 165689 | 148384 | 21, 2, 36 |
| 9 | PTRH1 | peptidyl-tRNA hydrolase 1 homolog | 187024 | 136854 | 160401 | 9, 3, 27 |
| 9 | PLIN2 | perilipin 2 | 147872 | 147874 | 137145 | 1, 11, 19 |
| 9 | PHF19 | PHD finger protein 19 | 119403 | 095261 | 056558 | 43, 6, 3 |
| 9 | PHF2 | PHD finger protein 2 | 197724 | 048828 | 131668 | 26, 6, 14 |
| 9 | PHF24 | PHD finger protein 24 | 122733 | 187791 | 137094 | |
| 9 | PDCL | phosducin like | 136940 | 148215 | 165204 | 26, 45, 6 |
| 9 | PIGO | phosphatidylinositol glycan anchor biosynthesis class O | 165282 | 221829 | 165283 | 40, 3, 26 |
| 9 | PIP5KL1 | phosphatidylinositol-4-phosphate 5-kinase like 1 | 167103 | 136840 | 136908 | 10, |
| 9 | PIP5K1B | phosphatidylinositol-4-phosphate 5-kinase type 1 beta | 107242 | 181778 | 187866 | 11, 38, 16 |
| 9 | PGM5 | phosphoglucomutase 5 | 154330 | 187559 | 181778 | 1, 44, 42 |
| 9 | PHPT1 | phosphohistidine phosphatase 1 | 054148 | 232434 | 177943 | 29, 31, 15 |
| 9 | PLAA | phospholipase A2 activating protein | 137055 | 120159 | 096872 | 9, 1, 3 |
| 9 | PLPP6 | phospholipid phosphatase 6 | 205808 | 106686 | 106993 | 4, 19, 39 |
| 9 | PLPP7 | phospholipid phosphatase 7 (inactive) | 160539 | 126882 | 130723 | 15, 25, 24 |
| 9 | PLPPR1 | phospholipid phosphatase related 1 | 148123 | 170681 | 136881 | 8, 26, 17 |
| 9 | PSAT1 | phosphoserine aminotransferase 1 | 135069 | 148019 | 106829 | 21, 9, 3 |
| 9 | PHYHD1 | phytanoyl-CoA dioxygenase domain containing 1 | 175287 | 136802 | 251184 | 29, 26, 30 |
| 9 | PLGRKT | plasminogen receptor with a C-terminal lysine | 107020 | 107018 | 120217 | 10, 26, 2 |
| 9 | GALNT12 | polypeptide N-acetylgalactosaminyltransferase 12 | 119514 | 165138 | 204291 | 34, 16, 31 |
| 9 | PTBP3 | polypyrimidine tract binding protein 3 | 119314 | 106868 | 119471 | 26, 11, 22 |
| 9 | KCNT1 | potassium sodium-activated channel subfamily T member 1 | 107147 | 165643 | 130559 | 26, 8, 38 |
| 9 | KCNV2 | potassium voltage-gated channel modifier subfamily V member 2 | 168263 | 147852 | 080608 | 14, 10, 19 |
| 9 | PRDM12 | PR/SET domain 12 | 130711 | 107164 | 130713 | 25, |
| 9 | PRPF4 | pre-mRNA processing factor 4 | 136875 | 176386 | 165188 | 13, 40, 39 |
| 9 | PAEP | progestagen associated endometrial protein | 122133 | 122136 | 236543 | 44, 27, 33 |
| 9 | PDCD1LG2 | programmed cell death 1 ligand 2 | 197646 | 120217 | 107036 | 40, 15, 44 |
| 9 | PRRC2B | proline rich coiled-coil 2B | 130723 | 160539 | 130714 | 18, 43, 40 |
| 9 | PCSK5 | proprotein convertase subtilisin/kexin type 5 | 099139 | 134996 | 135002 | 40, 39, 13 |
| 9 | PTGDS | prostaglandin D2 synthase | 107317 | 184925 | 214402 | 14, 26, 38 |
| 9 | PTGES | prostaglandin E synthase | 148344 | 167157 | 136816 | 33, 32, 20 |
| 9 | PTGES2 | prostaglandin E synthase 2 | 148334 | 148339 | 148346 | 9, 41, 40 |
| 9 | PTGR1 | prostaglandin reductase 1 | 106853 | 283263 | 059769 | 19, 1, 17 |
| 9 | PTGS1 | prostaglandin-endoperoxide synthase 1 | 095303 | 148187 | 136834 | 45, 24, 35 |
| 9 | PRSS3 | protease, serine 3 | 010438 | 229063 | 107341 | 28, 18, 3 |
| 9 | PSMD5 | proteasome 26S subunit, non-ATPase 5 | 095261 | 119402 | 119403 | 45, 38, 40 |
| 9 | PSMB7 | proteasome subunit beta 7 | 136930 | 119408 | 180264 | 43, 3, 30 |
| 9 | PRKACG | protein kinase cAMP-activated catalytic subunit gamma | 165059 | 187866 | 165060 | 38, 27, 8 |
| 9 | PKN3 | protein kinase N3 | 160447 | 119335 | 160446 | 1, 29, 18 |
| 9 | POMT1 | protein O-mannosyltransferase 1 | 130714 | 130723 | 130717 | 39, 38, 43 |
| 9 | PPP1R26 | protein phosphatase 1 regulatory subunit 26 | 196422 | 130558 | 160345 | 9, 3, 17 |
| 9 | PTPA | protein phosphatase 2 phosphatase activator | 119383 | 095321 | 188483 | 9, 3, 24 |
| 9 | PPP3R2 | protein phosphatase 3 regulatory subunit B, beta | 188386 | 198785 | 155833 | 38, 8, |
| 9 | PPP6C | protein phosphatase 6 catalytic subunit | 119414 | 173611 | 136933 | 4, 38, 29 |
| 9 | PTAR1 | protein prenyltransferase alpha subunit repeat containing 1 | 188647 | 107282 | 204711 | 39, 11, 42 |
| 9 | PTPDC1 | protein tyrosine phosphatase domain containing 1 | 158079 | 131668 | 175787 | 8, 6, 38 |
| 9 | PTPN3 | protein tyrosine phosphatase, non-receptor type 3 | 070159 | 095203 | 243444 | |
| 9 | PTPRD | protein tyrosine phosphatase, receptor type D | 153707 | 137038 | 107165 | 29, 18, 11 |
| 9 | PRUNE2 | prune homolog 2 | 106772 | 187210 | 204612 | 31, 26, 8 |
| 9 | PUM3 | pumilio RNA binding family member 3 | 080608 | 168263 | 080298 | 13, 11, 45 |
| 9 | QRFP | pyroglutamylated RFamide peptide | 188710 | 097007 | 130720 | 14, 38, |
| 9 | QSOX2 | quiescin sulfhydryl oxidase 2 | 165661 | 107187 | 279813 | 11, 22, 36 |
| 9 | RABGAP1 | RAB GTPase activating protein 1 | 011454 | 171448 | 188394 | |
| 9 | RABL6 | RAB, member RAS oncogene family-like 6 | 196642 | 213213 | 232434 | 21, 9, 12 |
| 9 | RAB14 | RAB14, member RAS oncogene family | 119396 | 119397 | 148180 | 26, 39, 11 |
| 9 | RABEPK | Rab9 effector protein with kelch motifs | 136933 | 119414 | 044574 | 9, 3, 13 |
| 9 | RAD23B | RAD23 homolog B, nucleotide excision repair protein | 119318 | 148143 | 136826 | 20, 23, 4 |
| 9 | RALGPS1 | Ral GEF with PH domain and SH3 binding motif 1 | 136828 | 177125 | 136859 | 35, 31, 37 |
| 9 | RALGDS | ral guanine nucleotide dissociation stimulator | 160271 | 170835 | 148288 | 41, 26, 31 |
| 9 | RANBP6 | RAN binding protein 6 | 137040 | 120215 | 137033 | 1, 26, 29 |
| 9 | RAPGEF1 | Rap guanine nucleotide exchange factor 1 | 107263 | 283526 | 160563 | 22, 21, 36 |
| 9 | RORB | RAR related orphan receptor B | 198963 | 135046 | 119121 | 14, 2, 32 |
| 9 | RASEF | RAS and EF-hand domain containing | 165105 | 214929 | 172159 | 4, 3, 40 |
| 9 | RRAGA | Ras related GTP binding A | 155876 | 155875 | 147874 | 1, 43, 32 |
| 9 | ROR2 | receptor tyrosine kinase like orphan receptor 2 | 169071 | 165030 | 090054 | |
| 9 | RMI1 | RecQ mediated genome instability 1 | 178966 | 165119 | 197506 | 22, 19, 13 |
| 9 | RGS3 | regulator of G-protein signaling 3 | 138835 | 157653 | 157657 | 34, 36, 6 |
| 9 | RFX3 | regulatory factor X3 | 080298 | 080608 | 279745 | 38, 26, 39 |
| 9 | RLN1 | relaxin 1 | 107018 | 107014 | 107020 | 33, 22, 5 |
| 9 | RLN2 | relaxin 2 | 107014 | 120211 | 107018 | 29, 31, 39 |
| 9 | RXRA | retinoid X receptor alpha | 186350 | 196363 | 130635 | 33, 1, 18 |
| 9 | RECK | reversion inducing cysteine rich protein with kazal motifs | 122707 | 243641 | 122694 | 1, 26, 32 |
| 9 | REXO4 | REX4 homolog, 3′-5′ exonuclease | 148300 | 198870 | 160323 | 9, 3, 45 |
| 9 | RGP1 | RGP1 homolog, RAB6A GEF complex partner 1 | 107185 | 070610 | 215183 | 27, 26, 17 |
| 9 | ARHGEF39 | Rho guanine nucleotide exchange factor 39 | 137135 | 159884 | 107159 | 1, 31, 35 |
| 9 | RFK | riboflavin kinase | 135002 | 099139 | 187210 | 26, 22, 8 |
| 9 | RPP25L | ribonuclease P/MRP subunit p25 like | 164967 | 122756 | 137100 | 29, 21, 15 |
| 9 | RPL12 | ribosomal protein L12 | 197958 | 196152 | 148356 | 41, 33, 3 |
| 9 | RPL35 | ribosomal protein L35 | 136942 | 136918 | 136950 | 33, 45, 43 |
| 9 | RPL7A | ribosomal protein L7a | 148303 | 148297 | 148290 | 41, 21, 43 |
| 9 | RPS6 | ribosomal protein S6 | 137154 | 137145 | 177076 | 41, 21, 43 |
| 9 | RIC1 | RIC1 homolog, RAB6A GEF complex partner 1 | 107036 | 197646 | 099219 | 11, 22, 26 |
| 9 | RC3H2 | ring finger and CCCH-type domains 2 | 056586 | 165204 | 186130 | 22, 1, 29 |
| 9 | RNF183 | ring finger protein 183 | 165188 | 136875 | 148225 | 11, 3, 17 |
| 9 | RNF20 | ring finger protein 20 | 155827 | 165152 | 198785 | 4, 30, 24 |
| 9 | RNF208 | ring finger protein 208 | 212864 | 283590 | 197191 | 14, 37, 6 |
| 9 | RNF224 | ring finger protein 224 | 233198 | 197191 | 198569 | 17, 32, |
| 9 | RNF38 | ring finger protein 38 | 137075 | 159921 | 165304 | 40, 38, 3 |
| 9 | RBM18 | RNA binding motif protein 18 | 119446 | 106852 | 148187 | 42, 29, 36 |
| 9 | POLR1E | RNA polymerase I subunit E | 137054 | 168795 | 147912 | |
| 9 | RCL1 | RNA terminal phosphate cyclase like 1 | 120158 | 147853 | 096968 | |
| 9 | RUSC2 | RUN and SH3 domain containing 2 | 198853 | 198722 | 215187 | 34, 26, 1 |
| 9 | SARDH | sarcosine dehydrogenase | 123453 | 123454 | 160293 | 19, 25, 17 |
| 9 | SEC16A | SEC16 homolog A, endoplasmic reticulum export factor | 148396 | 148384 | 148400 | 22, 37, 18 |
| 9 | SEC61B | Sec61 translocon beta subunit | 106803 | 119523 | 119508 | 43, 37, 31 |
| 9 | SECISBP2 | SECIS binding protein 2 | 187742 | 123975 | 187764 | 40, 3, 14 |
| 9 | SEMA4D | semaphorin 4D | 187764 | 187742 | 130222 | 22, 5, 29 |
| 9 | SETX | senataxin | 107290 | 196358 | 125482 | 22, 40, 1 |
| 9 | SPTLC1 | serine palmitoyltransferase long chain base subunit 1 | 090054 | 169071 | 196305 | 36, 16, 45 |
| 9 | SPINK4 | serine peptidase inhibitor, Kazal type 4 | 122711 | 086062 | 107262 | 16, 37, 10 |
| 9 | STKLD1 | serine/threonine kinase like domain containing 1 | 198870 | 148248 | 148300 | |
| 9 | SDCCAG3 | serologically defined colon cancer antigen 3 | 165689 | 165684 | 165688 | 9, 26, 35 |
| 9 | SET | SET nuclear proto-oncogene | 119335 | 119333 | 160447 | 11, 18, 6 |
| 9 | SH2D3C | SH2 domain containing 3C | 095370 | 160404 | 279363 | 39, 36, 22 |
| 9 | SHB | SH2 domain containing adaptor protein B | 107338 | 122696 | 137124 | 27, 17, 31 |
| 9 | SH3GL2 | SH3 domain containing GRB2 like 2, endophilin A1 | 107295 | 044459 | 178031 | 8, 31, 17 |
| 9 | SH3GLB2 | SH3 domain containing GRB2 like endophilin B2 | 148341 | 095319 | 148343 | 33, 3, 32 |
| 9 | SHC3 | SHC adaptor protein 3 | 148082 | 213694 | 123975 | 8, 2, 20 |
| 9 | SIGMAR1 | sigma non-opioid intracellular receptor 1 | 147955 | 205143 | 213930 | 35, 21, 9 |
| 9 | SIT1 | signaling threshold regulating transmembrane adaptor 1 | 137078 | 137101 | 159884 | 21, 41, 22 |
| 9 | SNAPC3 | small nuclear RNA activating complex polypeptide 3 | 164975 | 155158 | 164985 | 38, 40, 13 |
| 9 | SNAPC4 | small nuclear RNA activating complex polypeptide 4 | 165684 | 187796 | 165689 | 26, 21, 35 |
| 9 | SLC1A1 | solute carrier family 1 member 1 | 106688 | 107249 | 106686 | 22, 17, 9 |
| 9 | SLC2A6 | solute carrier family 2 member 6 | 160326 | 160325 | 187616 | 36, 45, 41 |
| 9 | SLC2A8 | solute carrier family 2 member 8 | 136856 | 136895 | 196152 | 38, 27, 6 |
| 9 | SLC24A2 | solute carrier family 24 member 2 | 155886 | 177076 | 171843 | 18, 2, 8 |
| 9 | SLC25A25 | solute carrier family 25 member 25 | 148339 | 171169 | 148334 | 26, 9, 27 |
| 9 | SLC25A51 | solute carrier family 25 member 51 | 122696 | 122741 | 107338 | 2, 42, 4 |
| 9 | SLC27A4 | solute carrier family 27 member 4 | 167114 | 167113 | 167118 | 9, 24, 3 |
| 9 | SLC28A3 | solute carrier family 28 member 3 | 197506 | 178966 | 148053 | 42, 4, 24 |
| 9 | SLC31A1 | solute carrier family 31 member 1 | 136868 | 119321 | 176386 | 3, 30, 42 |
| 9 | SLC31A2 | solute carrier family 31 member 2 | 136867 | 136866 | 119321 | 34, 29, 32 |
| 9 | SLC34A3 | solute carrier family 34 member 3 | 198569 | 233198 | 188229 | 17, |
| 9 | SLC35D2 | solute carrier family 35 member D2 | 130958 | 130948 | 165244 | |
| 9 | SLC44A1 | solute carrier family 44 member 1 | 070214 | 165029 | 106701 | 11, 26, 10 |
| 9 | SLC46A2 | solute carrier family 46 member 2 | 119457 | 148158 | 228623 | 39, 20, 5 |
| 9 | SNX30 | sorting nexin family member 30 | 148158 | 148153 | 119457 | 22, 26, 35 |
| 9 | SPATA31A1 | SPATA31 subfamily A member 1 | 204849 | 106714 | 183148 | |
| 9 | SPATA31A3 | SPATA31 subfamily A member 3 | 275969 | 274349 | 260691 | 38, |
| 9 | SPATA31A5 | SPATA31 subfamily A member 5 | 276581 | 277737 | 276040 | |
| 9 | SPATA31A6 | SPATA31 subfamily A member 6 | 185775 | 154529 | 277737 | 38, |
| 9 | SPATA31A7 | SPATA31 subfamily A member 7 | 276040 | 276581 | 283378 | |
| 9 | SPATA31D1 | SPATA31 subfamily D member 1 | 214929 | 186788 | 165105 | 38, |
| 9 | SPATA31D3 | SPATA31 subfamily D member 3 | 186788 | 189357 | 214929 | 25, 38, |
| 9 | SPATA31D4 | SPATA31 subfamily D member 4 | 189357 | 196781 | 186788 | 38, |
| 9 | SPATA31E1 | SPATA31 subfamily E member 1 | 177992 | 135047 | 283205 | 38, |
| 9 | SPTAN1 | spectrin alpha, non-erythrocytic 1 | 197694 | 119392 | 119333 | 26, 1, 13 |
| 9 | SPACA9 | sperm acrosome associated 9 | 165698 | 165695 | 165699 | |
| 9 | SPAG8 | sperm associated antigen 8 | 137098 | 159899 | 137133 | 38, 27, 20 |
| 9 | STRBP | spermatid perinuclear RNA binding protein | 165209 | 188394 | 148204 | 22, 41, 16 |
| 9 | SOHLH1 | spermatogenesis and oogenesis specific basic helix-loop-helix 1 | 165643 | 148386 | 107147 | 38, 8, |
| 9 | SPATA6L | spermatogenesis associated 6 like | 106686 | 106688 | 205808 | 4, 38, 37 |
| 9 | STPG3 | sperm-tail PG-rich repeat containing 3 | 197768 | 188163 | 188986 | |
| 9 | S1PR3 | sphingosine-1-phosphate receptor 3 | 213694 | 186354 | 148082 | 42, 33, 39 |
| 9 | SPIN1 | spindlin 1 | 106723 | 156345 | 130045 | 31, 11, 8 |
| 9 | SYK | spleen associated tyrosine kinase | 165025 | 165023 | 148090 | 41, 22, 29 |
| 9 | SPOUT1 | SPOUT domain containing methyltransferase 1 | 198917 | 167136 | 171097 | 37, 9, 41 |
| 9 | SSNA1 | SS nuclear autoantigen 1 | 176101 | 176248 | 176058 | 9, 41, 21 |
| 9 | ST6GALNAC4 | ST6 N-acetylgalactosaminide alpha-2,6-sialyltransferase 4 | 136840 | 160408 | 167103 | 41, 9, 28 |
| 9 | ST6GALNAC6 | ST6 N-acetylgalactosaminide alpha-2,6-sialyltransferase 6 | 160408 | 106992 | 136840 | |
| 9 | SAXO1 | stabilizer of axonemal microtubules 1 | 155875 | 178031 | 155876 | |
| 9 | STOM | stomatin | 148175 | 283430 | 136848 | 39, 32, 1 |
| 9 | STOML2 | stomatin like 2 | 165283 | 165282 | 005238 | 3, 28, 35 |
| 9 | SMC2 | structural maintenance of chromosomes 2 | 136824 | 155833 | 186881 | 34, 22, 4 |
| 9 | SMC5 | structural maintenance of chromosomes 5 | 198887 | 165072 | 119138 | 11, 25, 24 |
| 9 | SAPCD2 | suppressor APC domain containing 2 | 186193 | 054179 | 197355 | 34, 26, 9 |
| 9 | SCAI | suppressor of cancer cell invasion | 173611 | 136935 | 119414 | 39, 24, 31 |
| 9 | SURF1 | SURF1, cytochrome c oxidase assembly factor | 148290 | 148303 | 148291 | 1, 43, 6 |
| 9 | SURF2 | surfeit 2 | 148291 | 148290 | 148248 | 3, 11, 9 |
| 9 | SURF4 | surfeit 4 | 148248 | 148291 | 198870 | 3, 39, 2 |
| 9 | SURF6 | surfeit 6 | 148296 | 175164 | 148297 | 21, 41, 3 |
| 9 | SUSD1 | sushi domain containing 1 | 106868 | 148154 | 119314 | 45, 5, 11 |
| 9 | SUSD3 | sushi domain containing 3 | 157303 | 127084 | 165233 | 22, 18, 21 |
| 9 | SVEP1 | sushi, von Willebrand factor type A, EGF and pentraxin domain containing 1 | 165124 | 204193 | 030304 | 32, 1, 30 |
| 9 | SMARCA2 | SWI/SNF related, matrix associated, actin dependent regulator of chromatin, | 080503 | 173253 | 147852 | 29, 15, 23 |
| | | subfamily a, member 2 | | | | |
| 9 | SWI5 | SWI5 homologous recombination repair protein | 175854 | 167110 | 167112 | 7, 1, 3 |
| 9 | STX17 | syntaxin 17 | 136874 | 119508 | 023318 | 26, 22, 1 |
| 9 | STXBP1 | syntaxin binding protein 1 | 136854 | 136830 | 187024 | 8, 3, 26 |
| 9 | TRBV20OR9-2 | T cell receptor beta variable 20/OR9-2 (non-functional) | 205274 | 230453 | 183938 | |
| 9 | TRBV21OR9-2 | T cell receptor beta variable 21/OR9-2 (pseudogene) | 183938 | 205274 | 229063 | |
| 9 | TRBV23OR9-2 | T cell receptor beta variable 23/OR9-2 (non-functional) | 229063 | 183938 | 010438 | |
| 9 | TAL2 | TAL bHLH transcription factor 2 | 186051 | 106692 | 095209 | 22, |
| 9 | TLN1 | talin 1 | 137076 | 198467 | 107175 | 18, 40, 36 |
| 9 | TPRN | taperin | 176058 | 176101 | 187713 | 3, 16, 9 |
| 9 | TAF1L | TATA-box binding protein associated factor 1 like | 122728 | 241043 | 188133 | 40, 16, 25 |
| 9 | TBC1D13 | TBC1 domain family member 13 | 107021 | 160445 | 167136 | 9, 34, 15 |
| 9 | TBC1D2 | TBC1 domain family member 2 | 095383 | 106789 | 136928 | 24, 39, 4 |
| 9 | TEK | TEK receptor tyrosine kinase | 120156 | 184434 | 120160 | 42, 11, 45 |
| 9 | TNC | tenascin C | 041982 | 106952 | 173077 | |
| 9 | TEX10 | testis expressed 10 | 136891 | 119509 | 066697 | 24, 38, 39 |
| 9 | TESK1 | testis-specific kinase 1 | 107140 | 215187 | 137101 | 1, 43, 21 |
| 9 | TTC16 | tetratricopeptide repeat domain 16 | 167094 | 160401 | 160404 | 38, 27, 42 |
| 9 | TTC39B | tetratricopeptide repeat domain 39B | 155158 | 164946 | 164975 | 13, 11, 38 |
| 9 | TXN | thioredoxin | 136810 | 188959 | 204193 | 7, 19, 10 |
| 9 | TXNDC8 | thioredoxin domain containing 8 | 204193 | 136810 | 165124 | 38, |
| 9 | TSTD2 | thiosulfate sulfurtransferase like domain containing 2 | 136925 | 136842 | 136937 | 1, 26, 42 |
| 9 | TJP2 | tight junction protein 2 | 119139 | 165060 | 283143 | 40, 29, 16 |
| 9 | TRAF1 | TNF receptor associated factor 1 | 056558 | 119403 | 106804 | 43, 18, 20 |
| 9 | TRAF2 | TNF receptor associated factor 2 | 127191 | 107223 | 159069 | 36, 39, 9 |
| 9 | TLR4 | toll like receptor 4 | 136869 | 119401 | 078725 | 42, 7, 5 |
| 9 | TOPORS | TOP1 binding arginine/serine rich protein | 197579 | 107201 | 235453 | 45, 31, 39 |
| 9 | TOPORS-AS1 | TOPORS antisense RNA 1 | 235453 | 197579 | 165264 | |
| 9 | TOR1A | torsin family 1 member A | 136827 | 136816 | 136819 | 11, 9, 39 |
| 9 | TOR1B | torsin family 1 member B | 136816 | 148344 | 136827 | 35, 1, 33 |
| 9 | TOR2A | torsin family 2 member A | 160404 | 167094 | 095370 | 21, 1, 3 |
| 9 | TOR4A | torsin family 4 member A | 198113 | 188986 | 198435 | 22, 37, 42 |
| 9 | TTF1 | transcription termination factor 1 | 125482 | 107290 | 188523 | 13, 26, 34 |
| 9 | TLE1 | transducin like enhancer of split 1 | 196781 | 106829 | 189357 | |
| 9 | TLE4 | transducin like enhancer of split 4 | 106829 | 135069 | 196781 | 22, 38, 29 |
| 9 | TGFBR1 | transforming growth factor beta receptor 1 | 106799 | 204291 | 119523 | 31, 11, 2 |
| 9 | TRPM3 | transient receptor potential cation channel subfamily M member 3 | 083067 | 119138 | 135048 | 14, 31, 24 |
| 9 | TRPM6 | transient receptor potential cation channel subfamily M member 6 | 119121 | 198963 | 135045 | 17, 16, 42 |
| 9 | TOMM5 | translocase of outer mitochondrial membrane 5 | 175768 | 256966 | 255872 | 30, 34, 28 |
| 9 | TMC1 | transmembrane channel like 1 | 165091 | 107372 | 165092 | 7, 17, 33 |
| 9 | TMEM141 | transmembrane protein 141 | 244187 | 177984 | 272896 | 29, 33, 34 |
| 9 | TMEM2 | transmembrane protein 2 | 135048 | 083067 | 107362 | |
| 9 | TMEM203 | transmembrane protein 203 | 187713 | 176058 | 188566 | 22, 9, 37 |
| 9 | TMEM210 | transmembrane protein 210 | 185863 | 261793 | 176248 | |
| 9 | TMEM215 | transmembrane protein 215 | 188133 | 122728 | 137074 | 14, 38, 12 |
| 9 | TMEM245 | transmembrane protein 245 | 106771 | 119326 | 260230 | 29, 2, 26 |
| 9 | TMEM246 | transmembrane protein 246 | 165152 | 136872 | 155827 | 29, 28, 8 |
| 9 | TMEM252 | transmembrane protein 252 | 181778 | 154330 | 107242 | 17, 16, |
| 9 | TMEM261 | transmembrane protein 261 | 137038 | 107077 | 153707 | 29, 31, 3 |
| 9 | TMEM268 | transmembrane protein 268 | 157693 | 136888 | 230054 | |
| 9 | TMEM38B | transmembrane protein 38B | 095209 | 186051 | 148143 | 29, 38, 2 |
| 9 | TMEM8B | transmembrane protein 8B | 137103 | 137133 | 204930 | 40, 26, 38 |
| 9 | TMEM8C | transmembrane protein 8C | 187616 | 160326 | 197859 | |
| 9 | TMEFF1 | transmembrane protein with EGF like and two follistatin like domains 1 | 241697 | 251349 | 170681 | 45, 43, 26 |
| 9 | TRIM14 | tripartite motif containing 14 | 106785 | 095380 | 106789 | 39, 36, 24 |
| 9 | TRIM32 | tripartite motif containing 32 | 119401 | 148219 | 136869 | 43, 32, 35 |
| 9 | TRMT10B | tRNA methyltransferase 10B | 165275 | 070601 | 107371 | 1, 3, 27 |
| 9 | TRMO | tRNA methyltransferase O | 136932 | 178919 | 136929 | 35, 40, 13 |
| 9 | TMOD1 | tropomodulin 1 | 136842 | 196116 | 136925 | 15, 1, 11 |
| 9 | TPM2 | tropomyosin 2 (beta) | 198467 | 107159 | 137076 | 25, 43, 44 |
| 9 | TRUB2 | TruB pseudouridine synthase family member 2 | 167112 | 175854 | 167113 | 35, 31, 41 |
| 9 | TSC1 | tuberous sclerosis 1 | 165699 | 165698 | 165702 | 36, 23, 14 |
| 9 | TUBB4B | tubulin beta 4B class IVb | 188229 | 198569 | 188163 | 34, 21, 9 |
| 9 | TTLL11 | tubulin tyrosine liqase like 11 | 175764 | 136848 | 119421 | 38, 33, 9 |
| 9 | TDRD7 | tudor domain containinq 7 | 196116 | 197816 | 136842 | 14, 26, 1 |
| 9 | TNFSF15 | tumor necrosis factor superfamily member 15 | 181634 | 230601 | 106952 | 5, 32, 40 |
| 9 | TNFSF8 | tumor necrosis factor superfamily member 8 | 106952 | 181634 | 041982 | 39, 5, 22 |
| 9 | TPD52L3 | tumor protein D52 like 3 | 170777 | 137033 | 147854 | 38, 33, 8 |
| 9 | TUSC1 | tumor suppressor candidate 1 | 198680 | 205442 | 120159 | 31, 13, 22 |
| 9 | TYRP1 | tyrosinase related protein 1 | 107165 | 153707 | 153714 | 14, 11, 15 |
| 9 | UBAC1 | UBA domain containing 1 | 130560 | 130559 | 148411 | 21, 26, 32 |
| 9 | UBQLN1 | ubiquilin 1 | 135018 | 148057 | 165113 | 29, 22, 17 |
| 9 | UBAP1 | ubiquitin associated protein 1 | 165006 | 198876 | 186638 | 24, 41, 45 |
| 9 | UBAP2 | ubiquitin associated protein 2 | 137073 | 107341 | 198876 | 43, 21, 39 |
| 9 | UBE2R2 | ubiquitin conjugating enzyme E2 R2 | 107341 | 010438 | 137073 | 20, 15, 6 |
| 9 | UHRF2 | ubiquitin like with PHD and ring finger domains 2 | 147854 | 170777 | 178445 | 7, 22, 45 |
| 9 | URM1 | ubiquitin related modifier 1 | 167118 | 167114 | 167123 | 34, 41, 21 |
| 9 | USP20 | ubiquitin specific peptidase 20 | 136878 | 136819 | 187239 | 26, 7, 21 |
| 9 | UGCG | UDP-glucose ceramide glucosyltransferase | 148154 | 165181 | 106868 | |
| 9 | UAP1L1 | UDP-N-acetylglucosamine pyrophosphorylase 1 like 1 | 197355 | 186193 | 177239 | 34, 18, 21 |
| 9 | UNC13B | unc-13 homolog B | 198722 | 005238 | 198853 | 43, 35, 26 |
| 9 | UCK1 | uridine-cytidine kinase 1 | 130717 | 130714 | 283526 | 41, 9, 26 |
| 9 | VPS13A | vacuolar protein sorting 13 homolog A | 197969 | 204612 | 156049 | 1, 43, 33 |
| 9 | VCP | valosin containing protein | 165280 | 174038 | 221829 | 24, 21, 42 |
| 9 | VAV2 | vav guanine nucleotide exchange factor 2 | 160293 | 123453 | 235106 | 22, 13, 26 |
| 9 | VLDLR | very low density lipoprotein receptor | 147852 | 080503 | 168263 | 1, 15, 40 |
| 9 | WASH1 | WAS protein family homolog 1 | 181404 | 107175 | 170122 | |
| 9 | WDR31 | WD repeat domain 31 | 148225 | 165188 | 119411 | 29, 34, 38 |
| 9 | WDR34 | WD repeat domain 34 | 119333 | 197694 | 119335 | 34, 9, 20 |
| 9 | WDR38 | WD repeat domain 38 | 136918 | 185585 | 136942 | 43, 38, 27 |
| 9 | WDR5 | WD repeat domain 5 | 196363 | 169925 | 186350 | 21, 22, 39 |
| 9 | WHRN | whirlin | 095397 | 106948 | 136888 | |
| 9 | WNK2 | WNK lysine deficient protein kinase 2 | 165238 | 131669 | 204352 | 42, 21, 26 |
| 9 | XPA | XPA, DNA damage recognition and repair factor | 136936 | 136937 | 178919 | 3, 31, 41 |
| 9 | ZFP37 | ZFP37 zinc finger protein | 136866 | 228623 | 136867 | 30, 36, 6 |
| 9 | ZFAND5 | zinc finger AN1-type containing 5 | 107372 | 119125 | 165091 | 11, 31, 29 |
| 9 | ZBTB26 | zinc finger and BTB domain containing 26 | 171448 | 186130 | 011454 | 29, 38, 39 |
| 9 | ZBTB34 | zinc finger and BTB domain containing 34 | 177125 | 169155 | 136828 | 11, 22, 36 |
| 9 | ZBTB43 | zinc finger and BTB domain containing 43 | 169155 | 136944 | 177125 | 13, 20, 4 |
| 9 | ZBTB5 | zinc finger and BTB domain containing 5 | 168795 | 137106 | 137054 | 15, 6, 11 |
| 9 | ZBTB6 | zinc finger and BTB domain containing 6 | 186130 | 056586 | 171448 | 9, 26, 13 |
| 9 | ZCCHC6 | zinc finger CCHC-type containing 6 | 083223 | 135070 | 180447 | 31, 26, 23 |
| 9 | ZCCHC7 | zinc finger CCHC-type containing 7 | 147905 | 196092 | 137106 | 7, 41, 18 |
| 9 | ZDHHC12 | zinc finger DHHC-type containing 12 | 160446 | 160447 | 160445 | 3, 13, 9 |
| 9 | ZDHHC21 | zinc finger DHHC-type containing 21 | 175893 | 147862 | 147869 | 45, 25, 7 |
| 9 | ZMYND19 | zinc finger MYND-type containing 19 | 165724 | 148399 | 197070 | 9, 3, 38 |
| 9 | ZNF169 | zinc finger protein 169 | 175787 | 158079 | 130950 | 42, 30, 22 |
| 9 | ZNF189 | zinc finger protein 189 | 136870 | 136897 | 136872 | 13, 11, 31 |
| 9 | ZNF367 | zinc finger protein 367 | 165244 | 130958 | 130956 | 22, 3, 4 |
| 9 | ZNF462 | zinc finger protein 462 | 148143 | 095209 | 119318 | 33, 18, 2 |
| 9 | ZNF483 | zinc finger protein 483 | 173258 | 136813 | 283263 | 40, 38, 37 |
| 9 | ZNF484 | zinc finger protein 484 | 127081 | 185963 | 127084 | 1, 30, 42 |
| 9 | ZNF510 | zinc finger protein 510 | 081386 | 158122 | 196597 | 3, 36, 33 |
| 9 | ZNF618 | zinc finger protein 618 | 157657 | 138835 | 106927 | 43, 14, 27 |
| 9 | ZNF658 | zinc finger protein 658 | 274349 | 276203 | 275969 | |
| 9 | ZNF782 | zinc finger protein 782 | 196597 | 081386 | 196312 | 42, 15, 38 |
| 9 | ZNF79 | zinc finger protein 79 | 196152 | 136856 | 197958 | 13, 2, 20 |
| 9 | ZNF883 | zinc finger protein 883 | 228623 | 119457 | 136866 | 10, 25, 22 |
| 9 | ZER1 | zyg-11 related cell cycle regulator | 160445 | 160446 | 107021 | 27, 38, 29 |

[0063] Table 5 provides the gene information for the genes found on Chromosomes 10 and 11.

TABLE 5
Genes on Chromosomes 10 and 11

| | | | | Up | Down | Tissue |
|---|---|---|---|---|---|---|
| Chr. | Gene Symbol | Gene Name | ENSG | ENSG | ENSG | Code |
| 10 | ADO | 2-aminoethanethiol dioxygenase | 181915 | 138311 | 122877 | 22, 38, 11 |
| 10 | HACD1 | 3-hydroxyacyl-CoA dehydratase 1 | 165996 | 148488 | 136738 | 45, 11, 2 |
| 10 | PAPSS2 | 3′-phosphoadenosine 5′-phosphosulfate synthase 2 | 198682 | 107789 | 138138 | 45, 10, 6 |
| 10 | HOGA1 | 4-hydroxy-2-oxoglutarate aldolase 1 | 241935 | 165887 | 249967 | 2, 34, 17 |
| 10 | HTR7 | 5-hydroxytryptamine receptor 7 | 148680 | 138182 | 148688 | 6, 38, 8 |
| 10 | NT5C2 | 5′-nucleotidase, cytosolic II | 076685 | 148842 | 235376 | 42, 39, 24 |
| 10 | PFKFB3 | 6-phosphofructo-2-kinase/fructose-2,6-biphosphatase 3 | 170525 | 134453 | 065675 | 42, 8, 45 |
| 10 | ABI1 | abl interactor 1 | 136754 | 148459 | 107890 | 39, 4, 45 |
| 10 | ABLIM1 | actin binding LIM protein 1 | 099204 | 169129 | 151553 | 30, 26, 41 |
| 10 | AFAP1L2 | actin filament associated protein 1 like 2 | 169129 | 165816 | 099204 | 40, 29, 36 |
| 10 | ACTA2 | actin, alpha 2, smooth muscle, aorta | 107796 | 138134 | 026103 | 43, 1, 45 |
| 10 | ASCC1 | activating signal cointegrator 1 complex subunit 1 | 138303 | 107742 | 166295 | 13, 43, 36 |
| 10 | ACBD5 | acyl-CoA binding domain containing 5 | 107897 | 120539 | 182077 | 42, 43, 8 |
| 10 | ACBD7 | acyl-CoA binding domain containing 7 | 176244 | 152463 | 152464 | |
| 10 | ACADSB | acyl-CoA dehydrogenase, short/branched chain | 196177 | 095574 | 188620 | 17, 19, 4 |
| 10 | ACSL5 | acyl-CoA synthetase long-chain family member 5 | 197142 | 119913 | 023041 | 16, 42, 37 |
| 10 | ACSM6 | acyl-CoA synthetase medium-chain family member 6 | 173124 | 138115 | 107438 | 39, 15, 35 |
| 10 | ADAM12 | ADAM metallopeptidase domain 12 | 148848 | 203780 | 154493 | 32, 6, 18 |
| 10 | ADAM8 | ADAM metallopeptidase domain 8 | 151651 | 151650 | 130640 | 7, 39, 36 |
| 10 | ADAMTS14 | ADAM metallopeptidase with thrombospondin type 1 motif 14 | 138316 | 180644 | 166220 | 6, 42, 15 |
| 10 | AP3M1 | adaptor related protein complex 3 mu 1 subunit | 185009 | 035403 | 156110 | 24, 42, 13 |
| 10 | ADD3 | adducin 3 | 148700 | 108039 | 119950 | 11, 22, 1 |
| 10 | ADARB2 | adenosine deaminase, RNA specific B2 (inactive) | 185736 | 047056 | 067057 | 8, 31, 14 |
| 10 | ADK | adenosine kinase | 156110 | 185009 | 156650 | 10, 23, 25 |
| 10 | ADGRA1 | adhesion G protein-coupled receptor A1 | 197177 | 171811 | 171798 | 16, 8, 17 |
| 10 | ADIRF | adipogenesis regulatory factor | 148671 | 173267 | 188100 | 1, 27, 33 |
| 10 | ARL3 | ADP ribosylation factor like GTPase 3 | 138175 | 171206 | 156398 | 29, 15, 34 |
| 10 | ARL5B | ADP ribosylation factor like GTPase 5B | 165997 | 241058 | 204740 | 12, 42, 24 |
| 10 | ADRA2A | adrenoceptor alpha 2A | 150594 | 108061 | 119927 | 11, 26, 28 |
| 10 | ADRB1 | adrenoceptor beta 1 | 043591 | 196865 | 165813 | 22, 15, 32 |
| 10 | ARMS2 | age-related maculopathy susceptibility 2 | 254636 | 107679 | 166033 | 10, 32, 38 |
| 10 | ALDH18A1 | aldehyde dehydrogenase 18 family member A1 | 059573 | 095637 | 119977 | 42, 11, 24 |
| 10 | AKR1C1 | aldo-keto reductase family 1 member C1 | 187134 | 165568 | 151632 | 24, 19, 42 |
| 10 | AKR1C2 | aldo-keto reductase family 1 member C2 | 151632 | 187134 | 196139 | 13, 24, 4 |
| 10 | AKR1C3 | aldo-keto reductase family 1 member C3 | 196139 | 151632 | 198610 | 29, 4, 19 |
| 10 | AKR1C4 | aldo-keto reductase family 1 member C4 | 198610 | 196139 | 178473 | 19, 10, 3 |
| 10 | AKR1E2 | aldo-keto reductase family 1 member E2 | 165568 | 067082 | 187134 | 38, 45, 10 |
| 10 | APBB1IP | amyloid beta precursor protein binding family B member 1 interacting protein | 077420 | 136750 | 148459 | 39, 41, 7 |
| 10 | ANAPC16 | anaphase promoting complex subunit 16 | 166295 | 138303 | 168209 | 34, 11, 7 |
| 10 | ANK3 | ankyrin 3 | 151150 | 108091 | 170312 | |
| 10 | ASB13 | ankyrin repeat and SOCS box containing 13 | 196372 | 178363 | 108021 | 3, 34, 22 |
| 10 | ANKRD1 | ankyrin repeat domain 1 | 148677 | 148688 | 180628 | 15, 45, 18 |
| 10 | ANKRD16 | ankyrin repeat domain 16 | 134461 | 057608 | 134452 | 31, 5, 38 |
| 10 | ANKRD2 | ankyrin repeat domain 2 | 165887 | 165886 | 241935 | 25, 15, 7 |
| 10 | ANKRD22 | ankyrin repeat domain 22 | 152766 | 173239 | 138134 | 30, 4, 37 |
| 10 | ANKRD26 | ankyrin repeat domain 26 | 107890 | 136754 | 136758 | 11, 21, 13 |
| 10 | ANKRD30A | ankyrin repeat domain 30A | 148513 | 177283 | 256892 | 23, 5, |
| 10 | ANXA11 | annexin A11 | 122359 | 189129 | 151224 | 1, 21, 27 |
| 10 | ANXA7 | annexin A7 | 138279 | 156042 | 166343 | 30, 29, 7 |
| 10 | ANXA8 | annexin A8 | 265190 | 265763 | 189090 | |
| 10 | ANXA8L1 | annexin A8-like 1 | 264230 | 279058 | 204174 | 35, 15, 44 |
| 10 | ANTXRL | anthrax toxin receptor-like | 274209 | 263639 | 279058 | 38, 25, |
| 10 | A1CF | APOBEC1 complementation factor | 148584 | 204147 | 185532 | 19, 37, 28 |
| 10 | AIFM2 | apoptosis inducing factor, mitochondria associated 2 | 042286 | 099284 | 156521 | 1, 9, 20 |
| 10 | ALOX5 | arachidonate 5-lipoxygenase | 012779 | 256574 | 165406 | 22, 41, 7 |
| 10 | AGAP14 | ArfGAP with GTPase domain, ankyrin repeat and PH domain 14 | 279058 | 274209 | 264230 | |
| 10 | AGAP4 | ArfGAP with GTPase domain, ankyrin repeat and PH domain 4 | 188234 | 172661 | 265354 | |
| 10 | AGAP5 | ArfGAP with GTPase domain, ankyrin repeat and PH domain 5 | 172650 | 166317 | 176986 | 18, 4, 7 |
| 10 | AGAP6 | ArfGAP with GTPase domain, ankyrin repeat and PH domain 6 | 204149 | 204152 | 099290 | 18, 33, 40 |
| 10 | AGAP9 | ArfGAP with GTPase domain, ankyrin repeat and PH domain 9 | 204172 | 189090 | 277758 | |
| 10 | AVPI1 | arginine vasopressin induced 1 | 119986 | 155252 | 155254 | 9, 31, 1 |
| 10 | ATE1 | arginyltransferase 1 | 107669 | 066468 | 107672 | 39, 42, 38 |
| 10 | ARHGAP19- | ARHGAP19-SLIT1 readthrough (NMD candidate) | 269891 | 187122 | 213390 | |
| | SLIT1 | | | | | |
| 10 | ARMC3 | armadillo repeat containing 3 | 165309 | 150867 | 148450 | 38, 31, 42 |
| 10 | ARMC4 | armadillo repeat containing 4 | 169126 | 150051 | 150054 | 10, 42, 38 |
| 10 | ACTR1A | ARP1 actin-related protein 1 homolog A, centractin alpha | 138107 | 138111 | 107882 | 8, 39, 38 |
| 10 | AS3MT | arsenite methyltransferase | 214435 | 270316 | 148842 | 2, 17, 13 |
| 10 | ATOH7 | atonal bHLH transcription factor 7 | 179774 | 138347 | 108187 | 14, |
| 10 | ABCC2 | ATP binding cassette subfamily C member 2 | 023839 | 014919 | 107554 | 19, 17, 37 |
| 10 | ATP5C1 | ATP synthase, H+ transporting, mitochondrial F1 complex, gamma polypeptide 1 | 165629 | 151657 | 165632 | 4, 34, 7 |
| 10 | ATAD1 | ATPase family, AAA domain containing 1 | 138138 | 198682 | 227268 | 29, 42, 30 |
| 10 | ARID5B | AT-rich interaction domain 5B | 150347 | 183346 | 182010 | 11, 18, 13 |
| 10 | ATRNL1 | attractin like 1 | 107518 | 165832 | 151892 | 26, 1, 30 |
| 10 | BBIP1 | BBSome interacting protein 1 | 214413 | 150593 | 108061 | |
| 10 | BLNK | B-cell linker | 095585 | 177853 | 107447 | 30, 41, 22 |
| 10 | BAG3 | BCL2 associated athanogene 3 | 151929 | 151923 | 198825 | 1, 45, 29 |
| 10 | BNIP3 | BCL2 interacting protein 3 | 176171 | 175470 | 188385 | 6, 22, 1 |
| 10 | BEND7 | BEN domain containing 7 | 165626 | 086475 | 165630 | 29, 1, 17 |
| 10 | BTRC | beta-transducin repeat containing E3 ubiquitin protein ligase | 166167 | 138136 | 166171 | 29, 2, 25 |
| 10 | BICC1 | BicC family RNA binding protein 1 | 122870 | 108064 | 165443 | 17, 19, 14 |
| 10 | BLOC1S2 | biogenesis of lysosomal organelles complex 1 subunit 2 | 196072 | 095485 | 107593 | 11, 31, 22 |
| 10 | BORCS7 | BLOC-1 related complex subunit 7 | 166275 | 148795 | 270316 | 29, 2, 43 |
| 10 | BMI1 | BMI1 proto-oncogene, polycomb ring finger | 168283 | 269897 | 077327 | 29, 31, 13 |
| 10 | BAMBI | BMP and activin membrane bound inhibitor | 095739 | 095787 | 120563 | 11, 12, 35 |
| 10 | BMS1 | BMS1, ribosome biogenesis factor | 165733 | 196693 | 165731 | 25, 30, 1 |
| 10 | BMPR1A | bone morphogenetic protein receptor type 1A | 107779 | 122367 | 173269 | 42, 3, 29 |
| 10 | BORCS7-ASMT | BORCS7-ASMT readthrough (NMD candidate) | 270316 | 166275 | 214435 | 2, 17, 13 |
| 10 | BCCIP | BRCA2 and CDKN1A interacting protein | 107949 | 188690 | 089876 | 17, 6, 30 |
| 10 | BTBD16 | BTB domain containing 16 | 138152 | 138162 | 107679 | 15, 4, 38 |
| 10 | BTAF1 | B-TFIID TATA-box binding protein associated factor 1 | 095564 | 174721 | 107864 | 39, 42, 4 |
| 10 | BUB3 | BUB3, mitotic checkpoint protein | 154473 | 188816 | 154478 | 30, 22, 24 |
| 10 | CDH23 | cadherin related 23 | 107736 | 198246 | 214688 | 14, 36, 3 |
| 10 | CDHR1 | cadherin related family member 1 | 148600 | 188373 | 204033 | 14, 35, 16 |
| 10 | CALHM1 | calcium homeostasis modulator 1 | 185933 | 138172 | 183128 | 8, |
| 10 | CALHM2 | calcium homeostasis modulator 2 | 138172 | 148843 | 185933 | 13, 30, 15 |
| 10 | CALHM3 | calcium homeostasis modulator 3 | 183128 | 185933 | 107954 | 21, 9, 32 |
| 10 | CACNB2 | calcium voltage-gated channel auxiliary subunit beta 2 | 165995 | 148482 | 241058 | 31, 15, 19 |
| 10 | CAMK1D | calcium/calmodulin dependent protein kinase ID | 183049 | 151465 | 151468 | 1, 26, 20 |
| 10 | CAMK2G | calcium/calmodulin dependent protein kinase II gamma | 148660 | 166507 | 122861 | 8, 16, 44 |
| 10 | CALY | calcyon neuron specific vesicular protein | 130643 | 283496 | 165828 | 31, 28, 14 |
| 10 | CALML3 | calmodulin like 3 | 178363 | 178372 | 196372 | 18, 35, 13 |
| 10 | CALML5 | calmodulin like 5 | 178372 | 173848 | 178363 | 23, 13, 35 |
| 10 | CREM | cAMP responsive element modulator | 095794 | 108094 | 108100 | 38, 5, 1 |
| 10 | CASC10 | cancer susceptibility candidate 10 | 204682 | 204683 | 180592 | |
| 10 | CHST15 | carbohydrate sulfotransferase 15 | 182022 | 121898 | 065154 | 22, 23, 36 |
| 10 | CHST3 | carbohydrate sulfotransferase 3 | 122863 | 197746 | 107742 | 43, 19, 34 |
| 10 | CPN1 | carboxypeptidase N subunit 1 | 120054 | 107554 | 107566 | 19, 35, 5 |
| 10 | CPXM2 | carboxypeptidase X, M14 family member 2 | 121898 | 154478 | 182022 | 1, 11, 31 |
| 10 | CRTAC1 | cartilage acidic protein 1 | 095713 | 155265 | 166024 | 10, 14, 17 |
| 10 | CASP7 | caspase 7 | 165806 | 197893 | 148735 | 45, 4, 42 |
| 10 | COMTD1 | catechol-O-methyltransferase domain containing 1 | 165644 | 165637 | 165655 | 41, 37, 28 |
| 10 | CTNNA3 | catenin alpha 3 | 183230 | 165476 | 198739 | 10, 8, 26 |
| 10 | CISD1 | CDGSH iron sulfur domain 1 | 122873 | 151151 | 072401 | 34, 7, 4 |
| 10 | CACUL1 | CDK2 associated cullin domain 1 | 151893 | 119973 | 188613 | 11, 27, 38 |
| 10 | CDC123 | cell division cycle 123 | 151465 | 165609 | 183049 | 13, 7, 3 |
| 10 | CCAR1 | cell division cycle and apoptosis regulator 1 | 060339 | 138336 | 165730 | 24, 42, 13 |
| 10 | CEP55 | centrosomal protein 55 | 138180 | 138119 | 186188 | 6, 22, 3 |
| 10 | CDNF | cerebral dopamine neurotrophic factor | 185267 | 065809 | 187522 | 42, 4, 38 |
| 10 | CH25H | cholesterol 25-hydroxylase | 138135 | 026103 | 107798 | 1, 2, 30 |
| 10 | CHAT | choline O-acetyltransferase | 070748 | 243251 | 187714 | 14, 8, 38 |
| 10 | CSGALNACT2 | chondroitin sulfate N-acetylgalactosaminyltransferase 2 | 169826 | 165731 | 198915 | 45, 5, 22 |
| 10 | C10orf10 | chromosome 10 open reading frame 10 | 165507 | 107551 | 165512 | 1, 4, 39 |
| 10 | C10orf105 | chromosome 10 open reading frame 105 | 214688 | 107736 | 107738 | 14, 10, 20 |
| 10 | C10orf107 | chromosome 10 open reading frame 107 | 183346 | 196932 | 150347 | 26, 10, 38 |
| 10 | C10orf11 | chromosome 10 open reading frame 11 | 148655 | 165655 | 281042 | |
| 10 | C10orf113 | chromosome 10 open reading frame 113 | 204683 | 078114 | 204682 | 23, 38, |
| 10 | C10orf120 | chromosome 10 open reading frame 120 | 183559 | 187908 | 138161 | |
| 10 | C10orf128 | chromosome 10 open reading frame 128 | 204161 | 172538 | 177354 | 1, 30, 26 |
| 10 | C10orf142 | chromosome 10 open reading frame 142 | 277288 | 169740 | 107562 | 38, 8, |
| 10 | C10orf35 | chromosome 10 open reading frame 35 | 171224 | 122859 | 197467 | 26, 31, 14 |
| 10 | C10orf53 | chromosome 10 open reading frame 53 | 178645 | 187714 | 197444 | 38, 20, 28 |
| 10 | C10orf54 | Chromosome 10 open reading frame 54 | 107738 | 214688 | 197746 | 19, 26, 32 |
| 10 | C10orf55 | Chromosome 10 open reading frame 55 | 222047 | 122861 | 035403 | 38, 15, 17 |
| 10 | C10orf62 | chromosome 10 open reading frame 62 | 203942 | 249967 | 171160 | 38, 8, |
| 10 | C10orf67 | chromosome 10 open reading frame 67 | 179133 | 168267 | 165312 | 17, 20, |
| 10 | C10orf71 | chromosome 10 open reading frame 71 | 177354 | 204161 | 165606 | 25, 15, |
| 10 | C10orf76 | chromosome 10 open reading frame 76 | 120029 | 120049 | 166189 | 39, 23, 18 |
| 10 | C10orf82 | chromosome 10 open reading frame 82 | 165863 | 266200 | 165868 | 38, 12, 33 |
| 10 | C10orf88 | chromosome 10 open reading frame 88 | 119965 | 203795 | 179988 | 26, 38, 25 |
| 10 | C10orf90 | chromosome 10 open reading frame 90 | 154493 | 148848 | 150760 | 18, 6, 35 |
| 10 | C10orf95 | Chromosome 10 open reading frame 95 | 120055 | 107874 | 138111 | 28, 20, 27 |
| 10 | C10orf99 | chromosome 10 open reading frame 99 | 188373 | 165678 | 148600 | 16, 27, 9 |
| 10 | CFAP43 | cilia and flagella associated protein 43 | 197748 | 156384 | 148834 | 42, 38, 26 |
| 10 | CFAP46 | cilia and flagella associated protein 46 | 171811 | 148826 | 197177 | |
| 10 | CFAP58 | cilia and flagella associated protein 58 | 120051 | 148841 | 156395 | 30, 38, 44 |
| 10 | CFAP70 | cilia and flagella associated protein 70 | 156042 | 182180 | 138279 | 31, 26, 38 |
| 10 | CLRN3 | clarin 3 | 180745 | 186766 | 132334 | 3, 19, 16 |
| 10 | CSTF2T | cleavage stimulation factor subunit 2 tau variant | 177613 | 185532 | 107984 | 29, 36, 39 |
| 10 | CC2D2B | coiled-coil and C2 domain containing 2B | 188649 | 270099 | 107443 | 14, 38, |
| 10 | CCDC172 | coiled-coil domain containing 172 | 182645 | 151892 | 203837 | 10, 38, 12 |
| 10 | CCDC186 | coiled-coil domain containing 186 | 165813 | 043591 | 095627 | |
| 10 | CCDC3 | coiled-coil domain containing 3 | 151468 | 183049 | 123240 | 1, 26, 31 |
| 10 | CCDC6 | coiled-coil domain containing 6 | 108091 | 227877 | 151150 | 4, 3, 31 |
| 10 | CCDC7 | coiled-coil domain containing 7 | 216937 | 120616 | 150076 | 4, 34, 38 |
| 10 | CCSER2 | coiled-coil serine rich protein 2 | 107771 | 148604 | 182771 | 15, 10, 26 |
| 10 | CHCHD1 | coiled-coil-helix-coiled-coil-helix domain containing 1 | 172586 | 196968 | 214655 | 3, 4, 31 |
| 10 | COL13A1 | collagen type XIII alpha 1 chain | 197467 | 171224 | 099284 | 27, 6, 12 |
| 10 | COL17A1 | collagen type XVII alpha 1 chain | 065618 | 065613 | 156384 | |
| 10 | COMMD3 | COMM dcmain ccntaining 3 | 148444 | 223601 | 269897 | 29, 7, 5 |
| 10 | COMMD3-BMI1 | COMMD3-BMI1 readthrough | 269897 | 148444 | 168283 | |
| 10 | C1QL3 | complement C1q like 3 | 165985 | 165983 | 148484 | 26, 8, |
| 10 | CHUK | conserved helix-loop-helix ubiquitous kinase | 213341 | 107566 | 095485 | 26, 7, 34 |
| 10 | COX15 | COX15, cytochrome c oxidase assembly homolog | 014919 | 119929 | 023839 | 29, 7, 42 |
| 10 | CTBP2 | C-terminal binding protein 2 | 175029 | 019995 | 175018 | 38, |
| 10 | CUZD1 | CUB and zena pellucida like domains 1 | 138161 | 183559 | 213185 | 4, 28, 19 |
| 10 | CUBN | cubilin | 107611 | 148484 | 107614 | 17, 38, 42 |
| 10 | CUEDC2 | CUE domain containing 2 | 107874 | 107872 | 120055 | 41, 3, 26 |
| 10 | CELF2 | CUGBP, Elav-like family member 2 | 048740 | 107485 | 148429 | 22, 1, 5 |
| 10 | CUL2 | cullin 2 | 108094 | 148498 | 095794 | 6, 24, 26 |
| 10 | CUTC | cutC copper transporter | 119929 | 198018 | 014919 | 25, 30, 2 |
| 10 | CWF19L1 | CWF19-like 1, cell cycle central (S. pombe) | 095485 | 213341 | 196072 | 45, 39, 5 |
| 10 | CXCL12 | C-X-C motif chemokine ligand 12 | 107562 | 277288 | 187783 | 26, 6, 1 |
| 10 | CNNM1 | cyclin and CBS domain divalent metal cation transport mediator 1 | 119946 | 172987 | 120053 | 38, 14, 8 |
| 10 | CNNM2 | cyclin and CBS domain divalent metal cation transport mediator 2 | 148842 | 214435 | 076685 | 41, 6, 16 |
| 10 | CDK1 | cyclin dependent kinase 1 | 170312 | 151150 | 072422 | 22, 13, 23 |
| 10 | CCNJ | cyclin J | 107443 | 188649 | 177853 | 3, 12, 45 |
| 10 | CCNY | cyclin Y | 108100 | 095794 | 177291 | 36, 38, 29 |
| 10 | CYP17A1 | cytochrome P450 family 17 subfamily A member 1 | 148795 | 166272 | 166275 | 2, 17, 40 |
| 10 | CYP2C18 | cytochrome P450 family 2 subfamily C member 18 | 108242 | 119969 | 276490 | 19, 24, 37 |
| 10 | CYP2C19 | cytochrome P450 family 2 subfamily C member 19 | 165841 | 276490 | 138109 | 19, |
| 10 | CYP2C8 | cytochrome P450 family 2 subfamily C member 8 | 138115 | 138109 | 173124 | 19, 23, 24 |
| 10 | CYP2C9 | cytochrome P450 family 2 subfamily C member 9 | 138109 | 165841 | 138115 | 19, 10, 23 |
| 10 | CYP2E1 | cytochrome P450 family 2 subfamily E member 1 | 130649 | 203772 | 171772 | 19, 5, 27 |
| 10 | CYP26A1 | cytochrome P450 family 26 subfamily A member 1 | 095596 | 187553 | 138119 | 12, 18, 3 |
| 10 | CYP26C1 | cytochrome P450 family 26 subfamily C member 1 | 187553 | 138190 | 095596 | 27, 8, |
| 10 | CPEB3 | cytoplasmic polyadenylation element binding protein 3 | 107864 | 095564 | 198060 | 28, 19, 38 |
| 10 | DHX32 | DEAH-box helicase 32 (putative) | 089876 | 107949 | 203780 | 40, 11, 23 |
| 10 | PDSS1 | decaprenyl diphosphate synthase subunit 1 | 148459 | 077420 | 136754 | 10, 16, 3 |
| 10 | DOCK1 | dedicator of cytokinesis 1 | 150760 | 154493 | 188916 | 29, 24, 45 |
| 10 | DHTKD1 | dehydrogenase E1 and transketolase domain containing 1 | 181192 | 151461 | 065665 | 24, 23, 9 |
| 10 | DMBT1 | deleted in malignant brain tumors 1 | 187908 | 166033 | 183559 | 42, 37, 16 |
| 10 | DPCD | deleted in primary ciliary dyskinesia homolog (mouse) | 166171 | 166167 | 166169 | 29, 3, 30 |
| 10 | DDX21 | DExD-box helicase 21 | 165732 | 107625 | 198954 | 21, 41, 19 |
| 10 | DDX50 | DExD-box helicase 50 | 107625 | 165730 | 165732 | 24, 30, 31 |
| 10 | DKK1 | dickkopf WNT signaling pathway inhibitor 1 | 107984 | 177613 | 165471 | 37, 40, 32 |
| 10 | DPYSL4 | dihydropyrimidinase like 4 | 151640 | 188385 | 165752 | 34, 14, 2 |
| 10 | DIP2C | disco interacting protein 2 homolog C | 151240 | 015171 | 180525 | 11, 35, 17 |
| 10 | DLG5 | discs large MAGUK scaffold protein 5 | 151208 | 156113 | 148606 | 34, 23, 32 |
| 10 | DCLRE1A | DNA cross-link repair 1A | 198924 | 148735 | 196865 | 42, 29, 35 |
| 10 | DCLRE1C | DNA cross-link repair 1C | 152457 | 152455 | 197889 | 22, 41, 18 |
| 10 | DDIT4 | DNA damage inducible transcript 4 | 168209 | 166295 | 148719 | 3, 9, 4 |
| 10 | DNTT | DNA nucleotidylexotransferase | 107447 | 095585 | 197430 | 39, 5, 22 |
| 10 | POLL | DNA polymerase lambda | 166169 | 166171 | 107829 | 43, 1, 36 |
| 10 | DNA2 | DNA replication helicase/nuclease 2 | 138346 | 204130 | 122912 | 22, 18, 7 |
| 10 | DNAJB12 | DnaJ heat shock protein family (Hsp40) member B12 | 148719 | 168209 | 107745 | 29, 34, 41 |
| 10 | DNAJC1 | DnaJ heat shock protein family (Hsp40) member C1 | 136770 | 078403 | 223601 | 43, 29, 18 |
| 10 | DNAJC12 | DnaJ heat shock protein family (Hsp40) member C12 | 108176 | 198739 | 096717 | 29, 34, 10 |
| 10 | DNAJC9 | DnaJ heat shock protein family (Hsp40) member C9 | 213551 | 138286 | 182180 | 11, 16, 4 |
| 10 | DRGX | dorsal root ganglia homeobox | 165606 | 177354 | 225830 | |
| 10 | DYDC1 | DPY30 domain containing 1 | 170788 | 151224 | 133665 | 38, 8, |
| 10 | DYDC2 | DPY30 domain containing 2 | 133665 | 170788 | 122378 | 20, 30, 35 |
| 10 | DUSP13 | dual specificity phosphatase 13 | 079393 | 188716 | 156671 | 25, 15, 7 |
| 10 | DUSP5 | dual specificity phosphatase 5 | 138166 | 119953 | 108055 | 6, 11, 35 |
| 10 | DUPD1 | dual specificity phosphatase and pro isomerase domain containing 1 | 188716 | 156650 | 079393 | |
| 10 | DNMBP | dynamin binding protein | 107554 | 023839 | 120054 | 29, 3, 34 |
| 10 | EBF3 | early B-cell factor 3 | 108001 | 170430 | 237489 | 29, 14, 15 |
| 10 | EGR2 | early growth response 2 | 122877 | 181915 | 148572 | 40, 24, 5 |
| 10 | ECD | ecdysoneless cell cycle regulator | 122882 | 166321 | 138286 | 45, 26, 9 |
| 10 | ENTPD1 | ectonucleoside triphosphate diphosphohydrolase 1 | 138185 | 119977 | 282889 | 29, 43, 32 |
| 10 | ENTPD7 | ectonucleoside triphosphate diphosphohydrolase 7 | 198018 | 155287 | 119929 | 13, 25, 38 |
| 10 | ELOVL3 | ELOVL fatty acid elongase 3 | 119915 | 166197 | 107859 | 35, 6, 32 |
| 10 | EMX2 | empty spiracles homeobox 2 | 170370 | 165650 | 107560 | 17, 44, 15 |
| 10 | EBLN1 | endogenous Bomavirus-like nucleoprotein 1 | 223601 | 136770 | 148444 | 38, |
| 10 | EPC1 | enhancer of polycomb homolog 1 | 120616 | 170759 | 216937 | |
| 10 | ENKUR | enkurin, TRPC channel interacting protein | 151023 | 099256 | 185875 | 42, 30, 38 |
| 10 | ENO4 | enolase family member 4 | 188316 | 165868 | 187164 | 38, 22, 37 |
| 10 | ECHDC3 | enoyl-CoA hydratase domain containing 3 | 134463 | 148429 | 148426 | 1, 9, 31 |
| 10 | ECHS1 | enoyl-CoA hydratase, short chain 1 | 127884 | 148803 | 148832 | 34, 41, 28 |
| 10 | ERLIN1 | ER lipid raft associated 1 | 107566 | 120054 | 213341 | 1, 3, 6 |
| 10 | ERCC6 | ERCC excision repair 6, chromatin remodeling factor | 225830 | 165606 | 243251 | 32, |
| 10 | EDRF1 | erythroid differentiation regulatory factor 1 | 107938 | 175018 | 154485 | |
| 10 | EIF3A | eukaryotic translation initiation factor 3 subunit A | 107581 | 188613 | 119979 | 40, 12, 19 |
| 10 | EIF4EBP2 | eukaryotic translation initiation factor 4E binding protein 2 | 148730 | 172731 | 156574 | 24, 22, 40 |
| 10 | EIF5AL1 | eukaryotic translation initiation factor 5A-like 1 | 253626 | 165424 | 185303 | 30, 21, 44 |
| 10 | EXOC6 | exocyst complex component 6 | 138190 | 152804 | 187553 | 42, 31, 43 |
| 10 | EXOSC1 | exosome component 1 | 171311 | 171314 | 171307 | 29, 30, 3 |
| 10 | FAM107B | family with sequence similarity 107 member B | 065809 | 151474 | 185267 | |
| 10 | FAM13C | family with sequence similarity 13 member C | 148541 | 165443 | 165449 | 26, 1, 14 |
| 10 | FAM149B1 | family with sequence similarity 149 member B1 | 138286 | 122882 | 213551 | 26, 2, 45 |
| 10 | FAM160B1 | family with sequence similarity 160 member B1 | 151553 | 099204 | 165832 | 1, 26, 11 |
| 10 | FAM170B | family with sequence similarity 170 member B | 172538 | 165633 | 204161 | 38, 8, |
| 10 | FAM171A1 | family with sequence similarity 171 member A1 | 148468 | 152465 | 077943 | 8, 36, 26 |
| 10 | FAM175B | family with sequence similarity 175 member B | 165660 | 203791 | 019995 | 43, 4, 45 |
| 10 | FAM188A | family with sequence similarity 188 member A | 148481 | 077943 | 165983 | 45, 8, 42 |
| 10 | FAM196A | family with sequence similarity 196 member A | 188916 | 150760 | 214285 | 28, 20, 44 |
| 10 | FAM204A | family with sequence similarity 204 member A | 165669 | 107560 | 119973 | 11, 30, 15 |
| 10 | FAM208B | family with sequence similarity 208 member B | 108021 | 196372 | 057608 | 22, 45, 19 |
| 10 | FAM21A | Family with sequence similarity 21 member A | 099290 | 204149 | 188611 | 29, 11, 21 |
| 10 | FAM21C | Family with sequence similarity 21 member C | 172661 | 172671 | 188234 | |
| 10 | FAM213A | family with sequence similarity 213 member A | 122378 | 133665 | 108219 | 1, 25, 43 |
| 10 | FAM24A | family with sequence similarity 24 member A | 203795 | 213185 | 119965 | 38, |
| 10 | FAM24B | family with sequence similarity 24 member B | 213185 | 138161 | 203795 | 31, 3, 19 |
| 10 | FAM25A | family with sequence similarity 25 member A | 188100 | 148671 | 148672 | 9, 5, 32 |
| 10 | FAM25C | family with sequence similarity 25 member C | 276430 | 264717 | 170324 | |
| 10 | FAM25G | family with sequence similarity 25 member G | 189090 | 265190 | 204172 | |
| 10 | FAM35A | family with sequence similarity 35 member A | 122376 | 148672 | 184923 | 1, 42, 31 |
| 10 | FAM45A | family with sequence similarity 45 member A | 119979 | 107581 | 183605 | 4, 3, 13 |
| 10 | FAM53B | family with sequence similarity 53 member B | 189319 | 258539 | 203791 | 22, 21, 43 |
| 10 | FAS | Fas cell surface death receptor | 026103 | 107796 | 138135 | 5, 14, 1 |
| 10 | FBXL15 | F-box and leucine rich repeat protein 15 | 107872 | 059915 | 107874 | 41, 31, 21 |
| 10 | FBXW4 | F-box and WD repeat domain containing 4 | 107829 | 166169 | 107831 | 29, 3, 18 |
| 10 | FBXO18 | F-box protein, helicase, 18 | 134452 | 134461 | 134470 | 1, 34, 28 |
| 10 | FRMPD2 | FERM and PDZ domain containing 2 | 170324 | 276430 | 107643 | 42, 14, 8 |
| 10 | FRMD4A | FERM domain containing 4A | 151474 | 282246 | 065809 | |
| 10 | FGF8 | fibroblast growth factor 8 | 107831 | 107829 | 107833 | 16, 12, |
| 10 | FGFBP3 | fibroblast growth factor binding protein 3 | 174721 | 107854 | 095564 | 12, 27, 8 |
| 10 | FGFR2 | fibroblast growth factor receptor 2 | 066468 | 120008 | 107669 | 11, 3, 29 |
| 10 | FANK1 | fibronectin type III and ankyrin repeat domains 1 | 203780 | 089876 | 148848 | 18, 38, 42 |
| 10 | FOXI2 | forkhead box I2 | 186766 | 214285 | 180745 | 17, 44, |
| 10 | FRA10AC1 | FRA10A associated CGG repeat 1 | 148690 | 095464 | 108231 | 11, 10, 31 |
| 10 | FRAT1 | FRAT1, WNT signaling pathway regulator | 165879 | 213390 | 181274 | 31, 34, 29 |
| 10 | FRAT2 | FRAT2, WNT signaling pathway regulator | 181274 | 165879 | 052749 | 26, 19, 3 |
| 10 | FFAR4 | free fatty acid receptor 4 | 186188 | 138180 | 138207 | 3, 16, 10 |
| 10 | FZD8 | frizzled class receptor 8 | 177283 | 177291 | 148513 | 14, 29, 9 |
| 10 | FRG2B | FSHD region gene 2 family member B | 225899 | 171772 | 096746 | |
| 10 | FUOM | fucose mutarotase | 148803 | 165828 | 127884 | 31, 36, 33 |
| 10 | FUT11 | fucosyltransferase 11 | 196968 | 176986 | 172586 | 34, 18, 29 |
| 10 | FXYD4 | FXYD domain containing ion transport regulator 4 | 150201 | 198915 | 169813 | 17, 33, 38 |
| 10 | GPRIN2 | G protein regulated inducer of neurite outgrowth 2 | 204175 | 204174 | 204176 | 28, 38, 16 |
| 10 | GPR158 | G protein-coupled receptor 158 | 151025 | 185875 | 095777 | 34, 8, 33 |
| 10 | GPR26 | G protein-coupled receptor 26 | 154478 | 154473 | 121898 | 44, 8, 17 |
| 10 | GRK5 | G protein-coupled receptor kinase 5 | 198873 | 165672 | 148908 | 21, 29, 36 |
| 10 | GJD4 | gap junction protein delta 4 | 177291 | 108100 | 177283 | 12, 8, |
| 10 | GATA3 | GATA binding protein 3 | 107485 | 165632 | 048740 | 11, 29, 4 |
| 10 | GFRA1 | GDNF family receptor alpha 1 | 151892 | 107518 | 182645 | 29, 23, 1 |
| 10 | GDI2 | GDP dissociation inhibitor 2 | 057608 | 108021 | 134461 | 41, 36, 45 |
| 10 | GAD2 | glutamate decarboxylase 2 | 136750 | 095777 | 077420 | 28, 8, 20 |
| 10 | GLUD1 | glutamate dehydrogenase 1 | 148672 | 188100 | 122376 | 18, 17, 26 |
| 10 | GRID1 | glutamate ionotropic receptor delta type subunit 1 | 182771 | 107771 | 062650 | 40, 37, 8 |
| 10 | GOT1 | glutamic-oxaloacetic transaminase 1 | 120053 | 119946 | 119919 | 15, 40, 29 |
| 10 | GLRX3 | glutaredoxin 3 | 108010 | 237489 | 176769 | 4, 9, 7 |
| 10 | GSTO1 | glutathione S-transferase omega 1 | 148834 | 197748 | 065621 | 43, 29, 34 |
| 10 | GSTO2 | glutathione S-transferase omega 2 | 065621 | 148834 | 148841 | 29, 18, 33 |
| 10 | GPAM | glycerol-3-phosphate acyltransferase, mitochondrial | 119927 | 150594 | 119913 | |
| 10 | GBF1 | golgi brefeldin A resistant guanine nucleotide exchange factor 1 | 107862 | 107859 | 077150 | 25, 21, 1 |
| 10 | GOLGA7B | golgin A7 family member B | 155265 | 120057 | 095713 | |
| 10 | GDF10 | growth differentiation factor 10 | 266524 | 204179 | 263761 | 11, 38, 18 |
| 10 | GDF2 | growth differentiation factor 2 | 263761 | 266524 | 265203 | 19, |
| 10 | GHITM | growth hormone inducible transmembrane protein | 165678 | 185737 | 188373 | 15, 7, 34 |
| 10 | GTPBP4 | GTP binding protein 4 | 107937 | 107929 | 148377 | 45, 3, 37 |
| 10 | H2AFY2 | H2A histone family member Y2 | 099284 | 197467 | 042286 | 12, 27, 14 |
| 10 | HMX2 | H6 family homeobox 2 | 188816 | 188620 | 154473 | 17, 33, 44 |
| 10 | HMX3 | H6 family homeobox 3 | 188620 | 196177 | 188816 | 27, |
| 10 | HSPA12A | heat shock protein family A (Hsp70) member 12A | 165868 | 165863 | 188316 | 26, 31, 2 |
| 10 | HSPA14 | heat shock protein family A (Hsp70) member 14 | 187522 | 185267 | 152455 | |
| 10 | HERC4 | HECT and RLD domain containing E3 ubiquitin protein ligase 4 | 148634 | 096717 | 138347 | 11, 42, 7 |
| 10 | HECTD2 | HECT domain E3 ubiquitin protein ligase 2 | 165338 | 180628 | 119938 | 11, 45, 33 |
| 10 | HELLS | helicase, lymphoid-specific | 119969 | 108239 | 108242 | 7, 11, 12 |
| 10 | HHEX | hematopoietically expressed homeobox | 152804 | 138160 | 138190 | 18, 11, 40 |
| 10 | HPSE2 | heparanase 2 (inactive) | 172987 | 107521 | 119946 | |
| 10 | HNRNPF | heterogeneous nuclear ribonucleoprotein F | 169813 | 150201 | 243660 | 34, 39, 4 |
| 10 | HNRNPH3 | heterogeneous nuclear ribonucleoprotein H3 | 096746 | 108187 | 204130 | 1, 36, 40 |
| 10 | HK1 | hexokinase 1 | 156515 | 156510 | 075073 | 40, 21, 6 |
| 10 | HKDC1 | hexokinase domain containing 1 | 156510 | 156502 | 156515 | 30, 39, 16 |
| 10 | HPS1 | HPS1, biogenesis of lysosomal organelles complex 3 subunit 1 | 107521 | 119943 | 172987 | 34, 26, 21 |
| 10 | HPS6 | HPS6, biogenesis of lysosomal organelles complex 2 subunit 3 | 166189 | 120029 | 198728 | 27, 26, 21 |
| 10 | HTRA1 | HtrA serine peptidase 1 | 166033 | 254636 | 187908 | 43, 31, 32 |
| 10 | HABP2 | hyaluronan binding protein 2 | 148702 | 148737 | 197893 | 19, 17, 37 |
| 10 | HIF1AN | hypoxia inducible factor 1 alpha subunit inhibitor | 166135 | 166136 | 075891 | 29, 21, 40 |
| 10 | IKZF5 | IKAROS family zinc finger 5 | 095574 | 179988 | 196177 | 26, 25, 45 |
| 10 | ITPRIP | inositol 1,4,5-trisphosphate receptor interacting protein | 148841 | 065621 | 120051 | 42, 24, 39 |
| 10 | IPMK | inositol polyphosphate multikinase | 151151 | 122952 | 122873 | 45, 4, 15 |
| 10 | INPP5A | inositol polyphosphate-5-phosphatase A | 068383 | 171813 | 148826 | 29, 18, 37 |
| 10 | INPP5F | inositol polyphosphate-5-phosphatase F | 198825 | 151929 | 197771 | 12, 26, 40 |
| 10 | IDE | insulin degrading enzyme | 119912 | 198060 | 138160 | 18, 22, 29 |
| 10 | ITGA8 | integrin subunit alpha 8 | 077943 | 148468 | 148481 | 45, 42, 33 |
| 10 | ITGB1 | integrin subunit beta 1 | 150093 | 150076 | 099250 | 45, 43, 25 |
| 10 | ITIH2 | inter-alpha-trypsin inhibitor heavy chain 2 | 151655 | 123243 | 151657 | 19, 36, 15 |
| 10 | ITIH5 | inter-alpha-trypsin inhibitor heavy chain family member 5 | 123243 | 198879 | 151655 | 32, 42, 1 |
| 10 | IFIT1 | interferon induced protein with tetratricopeptide repeats 1 | 185745 | 204010 | 152778 | 13, 4, 44 |
| 10 | IFIT1B | interferon induced protein with tetratricopeptide repeats 1B | 204010 | 119917 | 185745 | 7, 5, |
| 10 | IFIT2 | interferon induced protein with tetratricopeptide repeats 2 | 119922 | 107798 | 119917 | 11, 2, 5 |
| 10 | IFIT3 | interferon induced protein with tetratricopeptide repeats 3 | 119917 | 119922 | 204010 | 4, 5, 36 |
| 10 | IFIT5 | interferon induced protein with tetratricopeptide repeats 5 | 152778 | 185745 | 152779 | 38, 4, 37 |
| 10 | IL15RA | interleukin 15 receptor subunit alpha | 134470 | 134452 | 134460 | 3, 34, 24 |
| 10 | IL2RA | interleukin 2 receptor subunit alpha | 134460 | 134470 | 134453 | 39, 2, 5 |
| 10 | INA | internexin neuronal intermediate filament protein alpha | 148798 | 235376 | 156374 | 26, 14, 8 |
| 10 | IDI1 | isopentenyl-diphosphate delta isomerase 1 | 067064 | 148377 | 047056 | 34, 4, 2 |
| 10 | IDI2 | isopentenyl-diphosphate delta isomerase 2 | 148377 | 107937 | 067064 | 25, 10, 23 |
| 10 | JAKMIP3 | Janus kinase and microtubule interacting protein 3 | 188385 | 176171 | 151640 | 38, 8, 33 |
| 10 | JMJD1C | jumonji domain containing 1C | 171988 | 148572 | 165476 | 18, 22, 40 |
| 10 | KAZALD1 | Kazal type serine peptidase inhibitor domain 1 | 107821 | 107819 | 107807 | 6, 13, 3 |
| 10 | KIAA1217 | KIAA1217 | 120549 | 165312 | 107863 | 40, 24, 23 |
| 10 | KIAA1462 | KIAA1462 | 165757 | 197321 | 107951 | 40, 11, 10 |
| 10 | KIF1BP | KIF1 binding protein | 198954 | 165732 | 122862 | 45, 40, 42 |
| 10 | KLLN | killin, p53-regulated DNA replication inhibitor | 227268 | 138138 | 171862 | 22, 14, |
| 10 | KIN | Kin17 DNA and RNA binding protein | 151657 | 151655 | 165629 | 3, 5, 26 |
| 10 | KNDC1 | kinase non-catalytic C-lobe domain containing 1 | 171798 | 197177 | 171794 | 26, 31, 8 |
| 10 | KIF11 | kinesin family member 11 | 138160 | 119912 | 152804 | 22, 9, 2 |
| 10 | KIF20B | kinesin family member 20B | 138182 | 152782 | 148680 | 4, 13, 22 |
| 10 | KIF5B | kinesin family member 5B | 170759 | 165322 | 120616 | 11, 29, 35 |
| 10 | KLF6 | Kruppel like factor 6 | 067082 | 107959 | 165568 | 1, 30, 5 |
| 10 | LARP4B | La ribonucleoprotein domain family member 4B | 107929 | 180525 | 107937 | |
| 10 | LBX1 | ladybird homeobox 1 | 138136 | 107807 | 166167 | |
| 10 | LGI1 | leucine rich glioma inactivated 1 | 108231 | 148690 | 176273 | 8, 43, 26 |
| 10 | LRRC18 | leucine rich repeat containing 18 | 165383 | 283652 | 165633 | 9, 38, |
| 10 | LRRC20 | leucine rich repeat containing 20 | 172731 | 148734 | 148730 | 38, 25, 15 |
| 10 | LRRC27 | leucine rich repeat containing 27 | 148814 | 165752 | 171813 | 38, 39, 34 |
| 10 | LRRTM3 | leucine rich repeat transmembrane neuronal 3 | 198739 | 183230 | 108176 | 28, 8, 3 |
| 10 | LRIT1 | leucine rich repeat, Ig-like and transmembrane domains 1 | 148602 | 204033 | 148604 | 38, 25, 14 |
| 10 | LRIT2 | leucine rich repeat, Ig-like and transmembrane domains 2 | 204033 | 148600 | 148602 | 14, 8, |
| 10 | LZTS2 | leucine zipper tumor suppressor 2 | 107816 | 107815 | 186862 | 35, 2, 7 |
| 10 | LCOR | ligand dependent nuclear receptor corepressor | 196233 | 155629 | 187122 | 11, 2, 22 |
| 10 | LDB1 | LIM domain binding 1 | 198728 | 166189 | 148840 | 29, 4, 15 |
| 10 | LDB3 | LIM domain binding 3 | 122367 | 122375 | 107779 | 15, 25, 18 |
| 10 | LIPA | lipase A, lysosomal acid type | 107798 | 138135 | 119922 | 36, 5, 13 |
| 10 | LIPF | lipase F, gastric type | 182333 | 204022 | 204021 | 37, 13, 10 |
| 10 | LIPJ | lipase family member J | 204022 | 184719 | 182333 | 38, 10, |
| 10 | LIPK | lipase family member K | 204021 | 182333 | 204020 | |
| 10 | LIPM | lipase family member M | 173239 | 204020 | 152766 | |
| 10 | LIPN | lipase family member N | 204020 | 204021 | 173239 | 25, |
| 10 | LINC00959 | Long intergenic non-protein coding RNA 959 | 237489 | 108001 | 108010 | 2, 18, 22 |
| 10 | KAT6B | lysine acetyltransferase 6B | 156650 | 156110 | 188716 | 40, 23, 22 |
| 10 | LYZL1 | lysozyme like 1 | 120563 | 095739 | 197321 | 38, 10, |
| 10 | LYZL2 | lysozyme like 2 | 151033 | 107968 | 183621 | 38, 10, 23 |
| 10 | LOXL4 | lysyl oxidase like 4 | 138131 | 166024 | 119943 | 42, 35, 20 |
| 10 | MFSD13A | major facilitator superfamily domain containing 13A | 138111 | 120055 | 138107 | 4, 22, 18 |
| 10 | MALRD1 | MAM and LDL receptor class A domain containing 1 | 204740 | 165997 | 120594 | 10, 38, 23 |
| 10 | MBL2 | mannose binding lectin 2 | 165471 | 107984 | 150275 | 19, |
| 10 | MRC1 | mannose receptor C-type 1 | 260314 | 148483 | 148482 | 36, 1, 5 |
| 10 | MKI67 | marker of proliferation Ki-67 | 148773 | 132334 | 170430 | 22, 21, 3 |
| 10 | MARVELD1 | MARVEL domain containing 1 | 155254 | 119986 | 155256 | 6, 34, 35 |
| 10 | MMP21 | matrix metallopeptidase 21 | 154485 | 107938 | 188690 | |
| 10 | MXI1 | MAX interactor 1, dimerization protein | 119950 | 148700 | 119953 | 2, 11, 31 |
| 10 | MEIG1 | meiosis/spermiogenesis associated 1 | 197889 | 152457 | 152463 | |
| 10 | MARCH5 | membrane associated ring-CH-type finger 5 | 198060 | 107864 | 119912 | 39, 31, 42 |
| 10 | MARCH8 | membrane associated ring-CH-type finger 8 | 165406 | 012779 | 172671 | 7, 22, 1 |
| 10 | MPP7 | membrane palmitoylated protein 7 | 150054 | 169126 | 095787 | 4, 45, 38 |
| 10 | MGEA5 | meningioma expressed antigen 5 (hyaluronidase) | 198408 | 107833 | 120049 | 37, 18, 29 |
| 10 | MAT1A | methionine adenosyltransferase 1A | 151224 | 122359 | 170788 | 19, 21, 15 |
| 10 | MSRB2 | methionine sulfoxide reductase B2 | 148450 | 165309 | 168267 | 17, 30, 44 |
| 10 | METTL10 | methyltransferase like 10 | 203791 | 189319 | 165660 | 9, 17, 24 |
| 10 | MSMB | microseminoprotein beta | 263639 | 266412 | 274209 | 33, 25, 37 |
| 10 | MASTL | microtubule associated serine/threonine kinase like | 120539 | 136758 | 107897 | 3, 24, 6 |
| 10 | MCM10 | minichromosome maintenance 10 replication initiation factor | 065328 | 123240 | 165623 | 34, 21, 3 |
| 10 | MCMBP | minichromosome maintenance complex binding protein | 197771 | 198825 | 107651 | |
| 10 | MCU | mitochondrial calcium uniporter | 156026 | 107745 | 138315 | 18, 9, 24 |
| 10 | MICU1 | mitochondrial calcium uptake 1 | 107745 | 148719 | 156026 | 3, 17, 45 |
| 10 | MTPAP | mitochondrial poly(A) polymerase | 107951 | 165757 | 107968 | 3, 2, 24 |
| 10 | MRPL43 | mitochondrial ribosomal protein L43 | 055950 | 119906 | 095539 | 30, 26, 28 |
| 10 | MRPS16 | mitochondrial ribosomal protein S16 | 182180 | 213551 | 156042 | 41, 45, 43 |
| 10 | MTG1 | mitochondrial ribosome associated GTPase 1 | 148824 | 254536 | 203772 | |
| 10 | MAPK8 | mitogen-activated protein kinase 8 | 107643 | 170324 | 128805 | 9, 24, 45 |
| 10 | MAP3K8 | mitogen-activated protein kinase kinase kinase 8 | 107968 | 107951 | 151033 | 43, 35, 26 |
| 10 | MMS19 | MMS19 homolog, cytosolic iron-sulfur assembly component | 155229 | 171307 | 165886 | 43, 42, 21 |
| 10 | MKX | mohawk homeobox | 150051 | 099246 | 169126 | 11, 44, 27 |
| 10 | MORN4 | MORN repeat containing 4 | 171160 | 203942 | 155252 | 8, 18, 6 |
| 10 | MSS51 | MSS51 mitochondrial translational activator | 166343 | 138279 | 107758 | 15, 25, 23 |
| 10 | MTRNR2L5 | MT-RNR2-like 5 | 249860 | 150275 | 122952 | 38, |
| 10 | MTRNR2L7 | MT-RNR2-like 7 | 256892 | 148513 | 283179 | |
| 10 | MMRN2 | multimerin 2 | 173269 | 107779 | 173267 | 42, 32, 44 |
| 10 | MINPP1 | multiple inositol-polyphosphate phosphatase 1 | 107789 | 214562 | 198682 | 13, 19, 43 |
| 10 | MLLT10 | myeloid/lymphoid or mixed-lineage leukemia; translocated to, 10 | 078403 | 180592 | 136770 | 45, 26, 13 |
| 10 | MYOF | myoferlin | 138119 | 095596 | 138180 | 30, 23, 33 |
| 10 | MYPN | myopalladin | 138347 | 148634 | 179774 | 18, 9, 25 |
| 10 | MRLN | myoregulin | 227877 | 165449 | 108091 | |
| 10 | MYO3A | myosin IIIA | 095777 | 151025 | 136750 | 38, 28, 23 |
| 10 | MYOZ1 | myozenin 1 | 177791 | 166348 | 166317 | 25, 15, 10 |
| 10 | ASAH2 | N-acylsphingosine amidohydrolase 2 | 188611 | 099290 | 198964 | 4, 35, 38 |
| 10 | ASAH2B | N-acylsphingosine amidohydrolase 2B | 204147 | 198964 | 148584 | 42, 25, 38 |
| 10 | NDUFB8 | NADH:ubiquinone oxidoreductase subunit B8 | 166136 | 255339 | 166135 | 29, 3, 15 |
| 10 | NANOS1 | nanos C2HC-type zinc finger 1 | 188613 | 151893 | 107581 | 20, 3, 15 |
| 10 | NDST2 | N-deacetylase and N-sulfotransferase 2 | 166507 | 272916 | 148660 | 5, 1, 36 |
| 10 | NEBL | nebulette | 078114 | 120594 | 204683 | 15, 40, 26 |
| 10 | NRAP | nebulin related anchoring protein | 197893 | 148702 | 165806 | 25, 15, 18 |
| 10 | NEURL1 | neuralized E3 ubiquitin protein ligase 1 | 107954 | 183128 | 107957 | 28, 29, 14 |
| 10 | NRG3 | neuregulin 3 | 185737 | 178217 | 165678 | 8, 35, 25 |
| 10 | NET1 | neuroepithelial cell transforming 1 | 173848 | 178462 | 178372 | 42, 3, 24 |
| 10 | NEUROG3 | neurogenin 3 | 122859 | 099282 | 171224 | 16, |
| 10 | NPFFR1 | neuropeptide FF receptor 1 | 148734 | 180817 | 172731 | 38, |
| 10 | NPS | neuropeptide S | 214285 | 188916 | 186766 | |
| 10 | NPY4R | neuropeptide Y receptor Y4 | 204174 | 264230 | 204175 | 24, 16, |
| 10 | NRP1 | neuropilin 1 | 099250 | 150093 | 148498 | 11, 45, 43 |
| 10 | NHLRC2 | NHL repeat containing 2 | 196865 | 198924 | 043591 | |
| 10 | NKX1-2 | NK1 homeobox 2 | 229544 | 065154 | 107902 | 12, |
| 10 | NKX2-3 | NK2 homeobox 3 | 119919 | 120053 | 155287 | 16, 36, |
| 10 | NKX6-2 | NK6 homeobox 2 | 148826 | 068383 | 171811 | 8, 20, 17 |
| 10 | NMT2 | N-myristoyltransferase 2 | 152465 | 152464 | 148468 | 29, 6, 3 |
| 10 | NOC3L | NOC3 like DNA replication regulator | 173145 | 138193 | 108239 | 13, 6, 42 |
| 10 | NODAL | nodal growth differentiation factor | 156574 | 148730 | 107719 | 10, 12, 8 |
| 10 | NSUN6 | NOP2/Sun RNA methyltransferase family member 6 | 241058 | 165995 | 165997 | 24, 13, 15 |
| 10 | NSMCE4A | NSE4 homolog A, SMC5-SMC6 complex component | 107672 | 107669 | 138162 | 29, 22, 9 |
| 10 | NFKB2 | nuclear factor kappa B subunit 2 | 077150 | 107862 | 059915 | |
| 10 | NRBF2 | nuclear receptor binding factor 2 | 148572 | 122877 | 171988 | 30, 9, 22 |
| 10 | NCOA4 | nuclear receptor coactivator 4 | 266412 | 265354 | 263639 | |
| 10 | NOLC1 | nucleolar and coiled-body phosphoprotein 1 | 166197 | 148840 | 119915 | 9, 37, 23 |
| 10 | NPM3 | nucleophosmin/nucleoplasmin 3 | 107833 | 107831 | 198408 | 3, 21, 26 |
| 10 | NUDT13 | nudix hydrolase 13 | 166321 | 122884 | 122882 | 9, 7, 18 |
| 10 | NUDT5 | nudix hydrolase 5 | 165609 | 065665 | 151465 | 30, 35, 21 |
| 10 | NUTM2A | NUT family member 2A | 184923 | 122376 | 214562 | 28, 17, |
| 10 | NUTM2B | NUT family member 2B | 188199 | 122852 | 228570 | |
| 10 | NUTM2D | NUT family member 2D | 214562 | 184923 | 107789 | 15, 20, 38 |
| 10 | NUTM2E | NUT family member 2E | 228570 | 188199 | 133661 | |
| 10 | MGMT | O-6-methylguanine-DNA methyltransferase | 170430 | 148773 | 108001 | 27, 37, 21 |
| 10 | OLAH | oleoyl-ACP hydrolase | 152463 | 197889 | 176244 | 32, 38, 23 |
| 10 | OR13A1 | olfactory receptor family 13 subfamily A member 1 | 256574 | 165512 | 012779 | 38, |
| 10 | OPALIN | oligodendrocytic myelin paranodal and inner loop protein | 197430 | 107447 | 095587 | 8, 17, 39 |
| 10 | OIT3 | oncoprotein induced transcript 3 | 138315 | 156026 | 138308 | 19, 24, 36 |
| 10 | OPN4 | opsin 4 | 122375 | 062650 | 122367 | 14, 38, |
| 10 | OPTN | optineurin | 123240 | 151468 | 065328 | 25, 43, 6 |
| 10 | OAT | ornithine aminotransferase | 065154 | 182022 | 229544 | 13, 45, 2 |
| 10 | OTUD1 | OTU deubiquitinase 1 | 165312 | 179133 | 120549 | 24, 29, 40 |
| 10 | OGDHL | oxoglutarate dehydrogenase-like | 197444 | 178645 | 227345 | 8, 43, 26 |
| 10 | PAX2 | paired box 2 | 075891 | 166135 | 119906 | 17, 29, 27 |
| 10 | PITX3 | paired like homeodomain 3 | 107859 | 119915 | 107862 | 25, |
| 10 | PTF1A | pancreas specific transcription factor, 1a | 168267 | 148450 | 179133 | 28, |
| 10 | PNLIP | pancreatic lipase | 175535 | 203837 | 187021 | 28, 19, 1 |
| 10 | PNLIPRP1 | pancreatic lipase related protein 1 | 187021 | 175535 | 266200 | 4, 28, 19 |
| 10 | PNLIPRP2 | pancreatic lipase related protein 2 (gene/pseudegene) | 266200 | 187021 | 165863 | 28, 4, 16 |
| 10 | PNLIPRP3 | pancreatic lipase related protein 3 | 203837 | 182645 | 175535 | 18, 35, 30 |
| 10 | PANK1 | pantothenate kinase 1 | 152782 | 152779 | 138182 | 18, 34, 37 |
| 10 | PARD3 | par-3 family cell polarity regulator | 148498 | 099250 | 108094 | 18, 3, 24 |
| 10 | PTCHD3 | patched domain containing 3 | 182077 | 107897 | 099246 | 38, |
| 10 | PDLIM1 | PDZ and LIM domain 1 | 107438 | 173124 | 095637 | 1, 30, 41 |
| 10 | PDZD7 | PDZ domain containing 7 | 186862 | 107816 | 107819 | 1, 21, 17 |
| 10 | PDZD8 | PDZ domain containing 8 | 165650 | 165646 | 170370 | 9, 19, 37 |
| 10 | PPIF | peptidylprolyl isomerase F | 108179 | 108175 | 165424 | 21, 2, 3 |
| 10 | PRF1 | perforin 1 | 180644 | 107719 | 138316 | 36, 5, 39 |
| 10 | PRDX3 | peroxiredoxin 3 | 165672 | 183605 | 198873 | 4, 7, 34 |
| 10 | PPRC1 | peroxisome proliferator-activated receptpr gamma, coactivator-related 1 | 148840 | 198728 | 166197 | 18, 37, 40 |
| 10 | PBLD | phenazine biosynthesis like protein domain containing | 108187 | 179774 | 096746 | 17, 4, 19 |
| 10 | PTEN | phosphatase and tensin homolog | 171862 | 227268 | 184719 | 22, 11, 29 |
| 10 | PALD1 | phosphatase domain containing, paladin 1 | 107719 | 156574 | 180644 | 41, 26, 21 |
| 10 | PI4K2A | phosphatidylinositol 4-kinase type 2 alpha | 155252 | 171160 | 119986 | 38, 43, 4 |
| 10 | PIP4K2A | phosphatidylinositol-5-phosphate 4-kinase type 2 alpha | 150867 | 077327 | 165309 | 22, 35, 6 |
| 10 | PDE6C | phosphodiesterase 6C | 095464 | 138207 | 148690 | 10, 44, 14 |
| 10 | PFKP | phosphofructokinase, platelet | 067057 | 185736 | 107959 | 38, 40, 34 |
| 10 | PGAM1 | phosphoglycerate mutase 1 | 171314 | 052749 | 171311 | 21, 34, 13 |
| 10 | PIK3AP1 | phosphoinositide-3-kinase adapter protein 1 | 155629 | 077147 | 196233 | 22, 21, 7 |
| 10 | PLA2G12B | phospholipase A2 group XIIB | 138308 | 138315 | 122884 | 17, 19, 15 |
| 10 | PLCE1 | phospholipase C epsilon 1 | 138193 | 176273 | 173145 | 10, 42, 11 |
| 10 | PLPP4 | phospholipid phosphatase 4 | 203805 | 107651 | 120008 | 10, 6, 35 |
| 10 | LHPP | phospholysine phosphohistidine inorganic pyrophosphate phosphatase | 107902 | 229544 | 258539 | 33, 41, 21 |
| 10 | PRTFDC1 | phosphoribosyl transferase domain containing 1 | 099256 | 107863 | 151023 | 37, 45, 8 |
| 10 | PSTK | phosphoseryl-tRNA kinase | 179988 | 119965 | 095574 | 29, 38, 34 |
| 10 | PTER | phosphotriesterase related | 165983 | 148481 | 165985 | 4, 34, 9 |
| 10 | PHYH | phytanoyl-CoA 2-hydroxylase | 107537 | 165623 | 086475 | 26, 1, 29 |
| 10 | PHYHIPL | phytanoyl-CoA 2-hydroxylase interacting protein like | 165443 | 122870 | 148541 | 14, 8, 26 |
| 10 | PGBD3 | piggyBac transposable element derived 3 | 243251 | 225830 | 070748 | |
| 10 | PITRM1 | pitrilysin metallopeptidase 1 | 107959 | 067057 | 067082 | 42, 43, 24 |
| 10 | PLAC9 | placenta specific 9 | 189129 | 133678 | 122359 | 15, 32, 14 |
| 10 | PLAU | plasminogen activator, urokinase | 122861 | 148660 | 222047 | 40, 28, 37 |
| 10 | PSD | pleckstrin and Sec7 domain containing | 059915 | 077150 | 107872 | 31, 8, 26 |
| 10 | PLEKHA1 | pleckstrin homology domain containing A1 | 107679 | 138152 | 254636 | 1, 32, 29 |
| 10 | PLEKHS1 | pleckstrin homology domain containing S1 | 148735 | 165806 | 198924 | 42, 30, 23 |
| 10 | PLXDC2 | plexin domain containing 2 | 120594 | 204740 | 078114 | 26, 6, 15 |
| 10 | PARG | poly(ADP-ribose) glycohydrolase | 227345 | 197444 | 204152 | 13, 42, 39 |
| 10 | PAOX | polyamine oxidase | 148832 | 127884 | 254536 | 34, 27, 1 |
| 10 | PCGF5 | polycomb group ring finger 5 | 180628 | 148677 | 165338 | 22, 42, 11 |
| 10 | PCGF6 | polycomb group ring finger 6 | 156374 | 148798 | 148835 | 9, 6, 44 |
| 10 | PKD2L1 | polycystin 2 like 1, transient receptor potential cation channel | 107593 | 196072 | 099194 | 14, 10, 38 |
| 10 | KCNMA1 | potassium calcium-activated channel subfamily M alpha 1 | 156113 | 281042 | 151208 | 34, 10, 44 |
| 10 | KCNK18 | potassium two pore domain channel subfamily K member 18 | 186795 | 148704 | 165646 | |
| 10 | KCNIP2 | potassium voltage-gated channel interacting protein 2 | 120049 | 198408 | 120029 | 1, 15, 8 |
| 10 | PRPF18 | pre-mRNA processing factor 18 | 165630 | 165626 | 282246 | 30, 29, 6 |
| 10 | PDCD11 | programmed cell death 11 | 148843 | 173915 | 138172 | 21, 22, 1 |
| 10 | PDCD4 | programmed cell death 4 | 150593 | 203867 | 214413 | 36, 40, 42 |
| 10 | PRLHR | prolactin releasing hormone receptor | 119973 | 165669 | 151893 | 2, 44, 25 |
| 10 | PROSER2 | proline and serine rich 2 | 148426 | 134463 | 151461 | 44, 9, 6 |
| 10 | PRR26 | Proline rich 26 | 180525 | 151240 | 107929 | |
| 10 | PRAP1 | proline rich acidic protein 1 | 165828 | 130643 | 148803 | 13, 16, 19 |
| 10 | P4HA1 | prolyl 4-hydroxylase subunit alpha 1 | 122884 | 138308 | 166321 | 30, 45, 18 |
| 10 | PSAP | prosaposin | 197746 | 107738 | 122863 | 13, 40, 26 |
| 10 | PRKCQ | protein kinase C theta | 065675 | 170525 | 198879 | 39, 15, 40 |
| 10 | PRKG1 | protein kinase, cGMP-dependent, type I | 185532 | 148584 | 177613 | 15, 29, 45 |
| 10 | PPP1R3C | protein phosphatase 1 regulatory subunit 3C | 119938 | 165338 | 107854 | 15, 42, 24 |
| 10 | PPP2R2D | protein phosphatase 2 regulatory subunit Bdelta | 175470 | 176769 | 176171 | 7, 23, 34 |
| 10 | PPP3CB | protein phosphatase 3 catalytic subunit beta | 107758 | 166343 | 166348 | 1, 6, 29 |
| 10 | PTPN20 | protein tyrosine phosphatase, non-receptor type 20 | 204179 | 204176 | 266524 | |
| 10 | PTPRE | protein tyrosine phosphatase, receptor type E | 132334 | 180745 | 148773 | 18, 5, 45 |
| 10 | PCDH15 | protocadherin related 15 | 150275 | 165471 | 249860 | |
| 10 | PCBD1 | pterin-4 alpha-carbinolamine dehydratase 1 | 166228 | 166224 | 107731 | 43, 28, 27 |
| 10 | PWWP2B | PWWP domain containing 2B | 171813 | 148814 | 068383 | 36, 28, 26 |
| 10 | PYROXD2 | pyridine nucleotide-disulphide oxidoreductase domain 2 | 119943 | 138131 | 107521 | 9, 40, 27 |
| 10 | PPA1 | pyrophosphatase (inorganic) 1 | 180817 | 079332 | 148734 | 37, 28, 6 |
| 10 | R3HCC1L | R3H domain and coiled-coil containing 1 like | 166024 | 095713 | 138131 | 42, 31, 40 |
| 10 | RAB11FIP2 | RAB11 family interacting protein 2 | 107560 | 170370 | 165669 | 31, 29, 11 |
| 10 | RAB18 | RAB18, member RAS oncogene family | 099246 | 182077 | 150051 | 31, 13, 8 |
| 10 | RASSF4 | Ras association domain family member 4 | 107551 | 187783 | 165507 | 34, 40, 26 |
| 10 | RSU1 | Ras suppressor protein 1 | 148484 | 165985 | 107611 | 30, 7, 42 |
| 10 | RASGEF1A | RasGEF domain family member 1A | 198915 | 169826 | 150201 | 29, 38, 28 |
| 10 | REEP3 | receptor accessory protein 3 | 165476 | 171988 | 183230 | 29, 33, 40 |
| 10 | RGS10 | regulator of G-protein signaling 10 | 148908 | 198873 | 151923 | 22, 1, 15 |
| 10 | RNLS | renalase, FAD dependent amine oxidase | 184719 | 171862 | 204022 | 10, 1, 31 |
| 10 | RET | ret proto-oncogene | 165731 | 165733 | 169826 | 26, 23, 8 |
| 10 | RGR | retinal G protein coupled receptor | 148604 | 148602 | 107771 | 14, 25, 8 |
| 10 | RBP3 | retinol binding protein 3 | 265203 | 263761 | 265763 | 14, 25, 8 |
| 10 | RBP4 | retinol binding protein 4 | 138207 | 186188 | 095464 | 19, 28, 15 |
| 10 | ARHGAP12 | Rho GTPase activating protein 12 | 165322 | 148516 | 170759 | 1, 26, 23 |
| 10 | ARHGAP19 | Rho GTPase activating protein 19 | 213390 | 269891 | 165879 | 22, 34, 41 |
| 10 | ARHGAP21 | Rho GTPase activating protein 21 | 107863 | 120549 | 099256 | 11, 7, 18 |
| 10 | ARHGAP22 | Rho GTPase activating protein 22 | 128805 | 107643 | 128815 | 35, |
| 10 | RHOBTB1 | Rho related BTB domain containing 1 | 072422 | 170312 | 196932 | 43, 34, 26 |
| 10 | RTKN2 | rhotekin 2 | 182010 | 150347 | 138311 | 5, 18, 10 |
| 10 | RPP30 | ribonuclease P/MRP subunit p30 | 148688 | 148680 | 148677 | 31, 29, 7 |
| 10 | RPP38 | ribonuclease P/MRP subunit p38 | 152464 | 176244 | 152465 | 17, |
| 10 | RPS24 | ribosomal protein S24 | 138326 | 148606 | 108175 | 43, 33, 7 |
| 10 | RRP12 | ribosomal RNA processing 12 homolog | 052749 | 181274 | 171314 | 43, 21, 1 |
| 10 | RPEL1 | ribulose-5-phosphate-3-epimerase like 1 | 235376 | 076685 | 148798 | 1, 42, 3 |
| 10 | RBM17 | RNA binding motif protein 17 | 134453 | 134460 | 170525 | 22, 40, 18 |
| 10 | RBM20 | RNA binding motif protein 20 | 203867 | 108055 | 150593 | 29, 24, 6 |
| 10 | POLR3A | RNA polymerase III subunit A | 148606 | 151208 | 138326 | 3, 16, 40 |
| 10 | RUFY2 | RUN and FYVE domain containing 2 | 204130 | 096746 | 138346 | 26, 13, 6 |
| 10 | SFMBT2 | Scm-like with four mbt domains 2 | 198879 | 065675 | 123243 | 29, 26, 31 |
| 10 | SEC23IP | SEC23 interacting protein | 107651 | 197771 | 203805 | 18, 37, 42 |
| 10 | SEC24C | SEC24 homolog C, COPII coat complex component | 176986 | 172650 | 196968 | 18, 16, 5 |
| 10 | SEC31B | SEC31 homolog B, COPII coat complex component | 075826 | 075290 | 255339 | 39, 18, 27 |
| 10 | SEC61A2 | Sec61 translocon alpha 2 subunit | 065665 | 181192 | 165609 | 38, 8, 23 |
| 10 | SFRP5 | secreted frizzled related protein 5 | 120057 | 155256 | 155265 | 26, 14, 28 |
| 10 | SAR1A | secretion associated Ras related GTPase 1A | 079332 | 156521 | 180817 | 26, 15, 22 |
| 10 | SEPHS1 | selenophosphate synthetase 1 | 086475 | 107537 | 165626 | 12, 31, 6 |
| 10 | SEMA4G | semaphorin 4G | 095539 | 055950 | 107815 | 37, 16, 19 |
| 10 | SRGN | serglycin | 122862 | 198954 | 122958 | 45, 5, 7 |
| 10 | STK32C | serine/threonine kinase 32C | 165752 | 151640 | 148814 | 9, 3, 38 |
| 10 | SH2D4B | SH2 domain containing 4B | 178217 | 108219 | 185737 | 36, 38, 8 |
| 10 | SH3PXD2A | SH3 and PX domains 2A | 107957 | 107954 | 107960 | 9, 15, 29 |
| 10 | SPRN | shadow of prion protein homolog (zebrafish) | 203772 | 148824 | 130649 | 27, 40, 14 |
| 10 | SHOC2 | SHOC2, leucine rich repeat scaffold protein | 108061 | 214413 | 150594 | 22, 42, 25 |
| 10 | SHTN1 | shootin 1 | 187164 | 188316 | 283266 | 8, 42, 38 |
| 10 | SFXN2 | sideroflexin 2 | 156398 | 138175 | 166272 | 17, 16, |
| 10 | SFXN3 | sideroflexin 3 | 107819 | 186862 | 107821 | 45, 39, 40 |
| 10 | SFXN4 | sideroflexin 4 | 183605 | 119979 | 165672 | 27, 3, 7 |
| 10 | STAM | signal transducing adaptor molecule | 136738 | 165996 | 148483 | 13, 26, 39 |
| 10 | SIRT1 | sirtuin 1 | 096717 | 108176 | 148634 | 11, 22, 31 |
| 10 | SKIDA1 | SKI/DACH domain containing 1 | 180592 | 204682 | 078403 | 11, 25, 12 |
| 10 | SLIT1 | slit guidance ligand 1 | 187122 | 196233 | 269891 | |
| 10 | SLF2 | SMC5-SMC6 complex localization factcr 2 | 119906 | 075891 | 055950 | 18, 22, 41 |
| 10 | SLC16A12 | solute carrier family 16 member 12 | 152779 | 152778 | 152782 | 28, 2, 17 |
| 10 | SLC16A9 | solute carrier family 16 member 9 | 165449 | 148541 | 227877 | 29, 17, 42 |
| 10 | SLC18A2 | solute carrier family 18 member A2 | 165646 | 186795 | 165650 | 40, 2, 28 |
| 10 | SLC18A3 | solute carrier family 18 member A3 | 187714 | 070748 | 178645 | 19, 8, 14 |
| 10 | SLC25A16 | solute carrier family 25 member 16 | 122912 | 138346 | 138336 | 37, 1, 32 |
| 10 | SLC25A28 | solute carrier family 25 member 28 | 155287 | 119919 | 198018 | 34, 26, 6 |
| 10 | SLC29A3 | solute carrier family 29 member 3 | 198246 | 107731 | 107736 | 32, 30, 38 |
| 10 | SLC35G1 | solute carrier family 35 member G1 | 176273 | 108231 | 138193 | |
| 10 | SLC39A12 | solute carrier family 39 member 12 | 148482 | 260314 | 165995 | 8, 17, 14 |
| 10 | SORBS1 | sorbin and SH3 domain containing 1 | 095637 | 107438 | 059573 | 1, 26, 11 |
| 10 | SORCS1 | sortilin related VPS10 domain containing receptor 1 | 108018 | 156395 | 108039 | 11, 14, 25 |
| 10 | SORCS3 | sortilin related VPS10 domain containing receptor 3 | 156395 | 120051 | 108018 | 38, 25, 8 |
| 10 | SPOCK2 | SPARC/osteonectin, cwcv and kazal like domains proteoglycan 2 | 107742 | 122863 | 138303 | 26, 27, 8 |
| 10 | SPAG6 | sperm associated antigen 6 | 077327 | 168283 | 150867 | 38, 34, 31 |
| 10 | SGMS1 | sphingomyelin synthase 1 | 198964 | 188611 | 204147 | 42, 45, 11 |
| 10 | SGPL1 | sphingosine-1-phosphate lyase 1 | 166224 | 166220 | 166228 | 40, 29, 4 |
| 10 | ST8SIA6 | ST8 alpha-N-acetyl-neuraminide alpha-2,8-sialyltransferase 6 | 148488 | 026025 | 165996 | 5, 33, |
| 10 | STAMBPL1 | STAM binding protein like 1 | 138134 | 152766 | 107796 | 36, 13, 2 |
| 10 | SLK | STE20 like kinase | 065613 | 107960 | 065618 | 29, 9, 4 |
| 10 | SCD | stearoyl-CoA desaturase | 099194 | 107593 | 075290 | 1, 23, 21 |
| 10 | SAMD8 | sterile alpha motif domain containing 8 | 156671 | 079393 | 165637 | 18, 16, 4 |
| 10 | STN1 | STN1, CST complex subunit | 107960 | 107957 | 065613 | |
| 10 | STOX1 | storkhead box 1 | 165730 | 060339 | 107625 | 27, 40, 20 |
| 10 | SMC3 | structural maintenance of chromosomes 3 | 108055 | 138166 | 203867 | 31, 21, 1 |
| 10 | SUFU | SUFU negative regulator of hedgehog signaling | 107882 | 138107 | 171206 | 22, 25, 36 |
| 10 | SVIL | supervillin | 197321 | 120563 | 165757 | 18, 25, 15 |
| 10 | SUV39H2 | suppressor of variegation 3-9 homolog 2 | 152455 | 187522 | 152457 | 9, 45, 25 |
| 10 | SFTPA1 | surfactant protein A1 | 122852 | 185303 | 188199 | 20, 10, 33 |
| 10 | SFTPA2 | surfactant protein A2 | 185303 | 253626 | 122852 | 10, 20, 33 |
| 10 | SFTPD | surfactant protein D | 133661 | 228570 | 133678 | 20, 18, 10 |
| 10 | SMNDC1 | survival motor neuron domain containing 1 | 119953 | 119950 | 138166 | 1, 18, 32 |
| 10 | SUPV3L1 | Suv3 like RNA helicase | 156502 | 122958 | 156510 | 44, 9, 1 |
| 10 | SFR1 | SWI5 dependent homologous recombination repair protein 1 | 156384 | 065618 | 197748 | 38, 18, 7 |
| 10 | SYCE1 | synaptonemal complex central element protein 1 | 171772 | 130649 | 225899 | 38, 2, 42 |
| 10 | SYNPO2L | synaptopodin 2 like | 166317 | 177791 | 172650 | 15, 25, 18 |
| 10 | SYT15 | synaptotagmin 15 | 204176 | 204175 | 204179 | 42, 4, 33 |
| 10 | SNCG | synuclein gamma | 173267 | 173269 | 148671 | 26, 2, 27 |
| 10 | TACR2 | tachykinin receptpr 2 | 075073 | 156515 | 099282 | 25, 13, 16 |
| 10 | TNKS2 | tankyrase 2 | 107854 | 119938 | 174721 | 26, 2, 32 |
| 10 | TAF3 | TATA-box binding protein associated factor 3 | 165632 | 165629 | 107485 | |
| 10 | TAF5 | TATA-box binding protein associated factor 5 | 148835 | 156374 | 173915 | 22, 4, 3 |
| 10 | TBC1D12 | TBC1 domain family member 12 | 108239 | 173145 | 119969 | 40, 31, 37 |
| 10 | TLX1 | T-cell leukemia homeobox 1 | 107807 | 107821 | 138136 | 37, 16, 8 |
| 10 | TCTN3 | tectonic family member 3 | 119977 | 059573 | 138185 | 40, 29, 24 |
| 10 | TECTB | tectorin beta | 119913 | 119927 | 197142 | 14, |
| 10 | TEX36 | testis expressed 36 | 175018 | 175029 | 107938 | 32, 38, |
| 10 | TET1 | tet methylcytosine dioxygenase 1 | 138336 | 122912 | 060339 | 18, 12, 2 |
| 10 | TSPAN14 | tetraspanin 14 | 108219 | 122378 | 178217 | 35, 34, 27 |
| 10 | TSPAN15 | tetraspanin 15 | 099282 | 075073 | 122859 | 4, 28, 16 |
| 10 | THNSL1 | threonine synthase like 1 | 185875 | 151023 | 151025 | 3, 13, 28 |
| 10 | TBATA | thymus, brain and testes associated | 166220 | 138316 | 166224 | 39, 38, |
| 10 | TIAL1 | TIA1 cytotoxic granule associated RNA binding protein like 1 | 151923 | 148908 | 151929 | 37, 1, 18 |
| 10 | TLL2 | tolloid like 2 | 095587 | 197430 | 077147 | 17, 15, 28 |
| 10 | TCERG1L | transcription elongaticn regulator 1 like | 176769 | 108010 | 175470 | 20, 14, 40 |
| 10 | TCF7L2 | transcription factor 7 like 2 | 148737 | 151532 | 148702 | 11, 18, 15 |
| 10 | TFAM | transcription factor A, mitochondrial | 108064 | 072401 | 122870 | 13, 5, 22 |
| 10 | TACC2 | transforming acidic coiled-coil containing protein 2 | 138162 | 107672 | 138152 | 24, 32, 37 |
| 10 | TIMM23 | translocase of inner mitochondrial membrane 23 | 265354 | 188234 | 266412 | |
| 10 | TIMM23B | translocase of inner mitochondrial membrane 23 homolog B | 204152 | 227345 | 204149 | 34, 2, 26 |
| 10 | TM9SF3 | transmembrane 9 superfamily member 3 | 077147 | 095587 | 155629 | 40, 29, 16 |
| 10 | TMEM236 | transmembrane protein 236 | 148483 | 136738 | 260314 | 32, 16, 14 |
| 10 | TMEM254 | transmembrane protein 254 | 133678 | 133661 | 189129 | 13, 29, 2 |
| 10 | TMEM26 | transmembrane protein 26 | 196932 | 072422 | 183346 | 36, 34, 44 |
| 10 | TMEM72 | transmembrane protein 72 | 187783 | 107562 | 107551 | 2, 14, 17 |
| 10 | TRIM8 | tripartite motif containing 8 | 171206 | 107882 | 138175 | 29, 17, 20 |
| 10 | TRDMT1 | tRNA aspartic acid methyltransferase 1 | 107614 | 107611 | 026025 | 18, 7, 42 |
| 10 | TRUB1 | TruB pseudouridine synthase family member 1 | 165832 | 151553 | 107518 | 42, 22, 29 |
| 10 | TYSND1 | trypsin domain containing 1 | 156521 | 042286 | 079332 | 27, 7, 29 |
| 10 | TUBAL3 | tubulin alpha like 3 | 178462 | 178473 | 173848 | 18, 16, 24 |
| 10 | TUBB8 | tubulin beta 8 class VIII | 261456 | 096746 | 015171 | 35, 12, 38 |
| 10 | TUBGCP2 | tubulin gamma complex associated protein 2 | 130640 | 151651 | 198546 | 29, 27, 14 |
| 10 | TDRD1 | tudor domain containing 1 | 095627 | 165813 | 165816 | 38, 42, 33 |
| 10 | TWNK | twinkle mtDNA helicase | 107815 | 095539 | 107816 | |
| 10 | UBE2D1 | ubiquitin conjugating enzyme E2 D1 | 072401 | 122873 | 108064 | 43, 10, 25 |
| 10 | UBTD1 | ubiquitin domain containing 1 | 165886 | 155229 | 165887 | 29, 1, 34 |
| 10 | USP54 | ubiquitin specific peptidase 54 | 166348 | 107758 | 177791 | 18, 40, 33 |
| 10 | UNC5B | unc-5 netrin receptor B | 107731 | 166228 | 198246 | 6, 36, 2 |
| 10 | UTF1 | undifferentiated embryonic cell transcription factor 1 | 171794 | 171798 | 151650 | |
| 10 | UPF2 | UPF2 regulator of nonsense transcripts homolog (yeast) | 151461 | 148426 | 181192 | 34, 41, 2 |
| 10 | UCMA | upper zone of growth plate and cartilage matrix associated | 165623 | 065328 | 107537 | 11, 10, 8 |
| 10 | USMG5 | up-regulated during skeletal muscle growth 5 homolog (mouse) | 173915 | 148835 | 148843 | 43, 33, 19 |
| 10 | UCN3 | urocortin 3 | 178473 | 198610 | 178462 | 28, |
| 10 | UROS | uroporphyrinogen III synthase | 188690 | 154485 | 107949 | 9, 34, 26 |
| 10 | USP6NL | USP6 N-terminal like | 148429 | 048740 | 134463 | 22, 23, 44 |
| 10 | VENTX | VENT homeobox | 151650 | 171794 | 151651 | 29, 12, 14 |
| 10 | VAX1 | ventral anterior homeobox 1 | 148704 | 283266 | 186795 | 14, 38, 8 |
| 10 | VTI1A | vesicle transport through interaction with t-SNAREs 1A | 151532 | 023041 | 148737 | 34, 39, 7 |
| 10 | VIM | vimentin | 026025 | 107614 | 148488 | 11, 43, 6 |
| 10 | VCL | vinculin | 035403 | 222047 | 185009 | 42, 24, 44 |
| 10 | VDAC2 | voltage dependent anion channel 2 | 165637 | 156671 | 165644 | 1, 37, 25 |
| 10 | VWA2 | von Willebrand factor A domain containing 2 | 165816 | 095627 | 169129 | 42, 24, 18 |
| 10 | VPS26A | VPS26, retromer complex component A | 122958 | 122862 | 156502 | 45, 4, 29 |
| 10 | VSTM4 | V-set and transmembrane domain containing 4 | 165633 | 165383 | 172538 | 29, 11, 2 |
| 10 | WAPL | WAPL cohesin release factor | 062650 | 182771 | 122375 | 22, 18, 31 |
| 10 | WDR11 | WD repeat domain 11 | 120008 | 203805 | 066468 | 42, 40, 22 |
| 10 | WDR37 | WD repeat domain 37 | 047056 | 067064 | 185736 | 24, 42, 1 |
| 10 | WDFY4 | WDFY family member 4 | 128815 | 128805 | 283652 | 21, 41, 22 |
| 10 | WDFY4 | WDFY family member 4 | 283652 | 128815 | 165383 | 21, 41, 22 |
| 10 | WNT8B | Wnt family member 8B | 075290 | 099194 | 075826 | 42, 27, 12 |
| 10 | WBP1L | WW domain binding protein 1-like | 166272 | 156398 | 148795 | 43, 26, 35 |
| 10 | WAC | WW domain containing adaptor with coiled-coil | 095787 | 150054 | 095739 | 5, 4, 2 |
| 10 | XPNPEP1 | X-prolyl aminopeptidase 1 | 108039 | 108018 | 148700 | 37, 3, 34 |
| 10 | YME1L1 | YME1 like 1 ATPase | 136758 | 107890 | 120539 | |
| 10 | ZFAND4 | zinc finger AN1-type containing 4 | 172671 | 165406 | 172661 | 38, 22, 26 |
| 10 | ZCCHC24 | zinc finger CCHC-type containing 24 | 165424 | 108179 | 253626 | 26, 6, 8 |
| 10 | ZDHHC16 | zinc finger DHHC-type containing 16 | 171307 | 171311 | 155229 | 9, 24, 27 |
| 10 | ZDHHC6 | zinc finger DHHC-type containing 6 | 023041 | 197142 | 151532 | 36, 39, 16 |
| 10 | ZEB1 | zinc finger E-box binding homeobox 1 | 148516 | 183621 | 165322 | 25, 45, 42 |
| 10 | ZFYVE27 | zinc finger FYVE-type containing 27 | 155256 | 155254 | 120057 | 39, 13, 43 |
| 10 | ZMIZ1 | zinc finger MIZ-type containing 1 | 108175 | 138326 | 108179 | 40, 23, 12 |
| 10 | ZMYND11 | zinc finger MYND-type containing 11 | 015171 | 261456 | 151240 | 11, 29, 44 |
| 10 | ZNF22 | zinc finger protein 22 | 165512 | 165507 | 256574 | 22, 30, 11 |
| 10 | ZNF239 | zinc finger protein 239 | 196793 | 243660 | 198298 | 9, 36, 28 |
| 10 | ZNF248 | zinc finger protein 248 | 198105 | 283179 | 175395 | 31, 6, 39 |
| 10 | ZNF25 | zinc finger protein 25 | 175395 | 198105 | 189180 | 31, 29, 8 |
| 10 | ZNF32 | zinc finger protein 32 | 169740 | 198298 | 277288 | 29, 11, 34 |
| 10 | ZNF33A | zinc finger protein 33A | 189180 | 175395 | 075407 | 42, 36, 25 |
| 10 | ZNF33B | zinc finger protein 33B | 196693 | 075407 | 165733 | 4, 36, 17 |
| 10 | ZNF365 | zinc finger protein 365 | 138311 | 182010 | 181915 | 8, 29, 10 |
| 10 | ZNF37A | zinc finger protein 37A | 075407 | 189180 | 196693 | 29, 26, 31 |
| 10 | ZNF438 | zinc finger protein 438 | 183621 | 151033 | 148516 | |
| 10 | ZNF485 | zinc finger protein 485 | 198298 | 196793 | 169740 | 13, 30, 40 |
| 10 | ZNF487 | Zinc finger protein 487 | 243660 | 169813 | 196793 | |
| 10 | ZNF488 | zinc finger protein 488 | 265763 | 265203 | 265190 | 8, 42, 25 |
| 10 | ZNF503 | zinc finger protein 503 | 165655 | 165644 | 148655 | 27, 11, 28 |
| 10 | ZNF511 | zinc finger protein 511 | 198546 | 130640 | 283496 | 41, 16, 32 |
| 10 | ZNF518A | zinc finger protein 518A | 177853 | 107443 | 095585 | 42, 24, 39 |
| 10 | ZRANB1 | zinc finger RANBP2-type containing 1 | 019995 | 165660 | 175029 | 26, 14, 40 |
| 10 | ZSWIM8 | zinc finger SWIM-type containing 8 | 214655 | 172586 | 272916 | 22, 31, 28 |
| 10 | ZNF511-PRAP1 | ZNF511-PRAP1 readthrough | 283496 | 198546 | 130643 | |
| 10 | ZWINT | ZW10 interacting kinetochore protein | 122952 | 249860 | 151151 | 21, 12, 9 |
| 11 | ACCS | 1-aminocyclopropane-1-carboxylate synthase homolog (inactive) | 110455 | 205126 | 151348 | 26, 44, 2 |
| 11 | ACCSL | 1-aminocyclopropane-1-carboxylate synthase homolog (inactive) like | 205126 | 187479 | 110455 | |
| 11 | HTR3A | 5-hydroxytryptamine receptor 3A | 166736 | 149305 | 109906 | 41, 18, 20 |
| 11 | HTR3B | 5-hydroxytryptamine receptor 3B | 149305 | 048028 | 166736 | 16, 8, |
| 11 | PTS | 6-pyruvoyltetrahydropterin synthase | 150787 | 197580 | 188771 | 17, 1, 28 |
| 11 | DHCR7 | 7-dehydrocholesterol reductase | 172893 | 162105 | 172890 | 2, 21, 26 |
| 11 | ACAT1 | acetyl-CoA acetyltransferase 1 | 075239 | 166266 | 149308 | 1, 25, 18 |
| 11 | ASCL2 | achaete-scute family bHLH transcription factor 2 | 183734 | 180176 | 110665 | 16, 32, 28 |
| 11 | ASCL3 | achaete-scute family bHLH transcription factor 3 | 176009 | 176029 | 175348 | 10, |
| 11 | ACP2 | acid phosphatase 2, lysosomal | 134575 | 134574 | 025434 | 2, 36, 13 |
| 11 | ACRV1 | acrosomal vesicle protein 1 | 134940 | 149554 | 171053 | 38, 32, 8 |
| 11 | ACTN3 | actinin alpha 3 (gene/pseudogene) | 248746 | 174165 | 174080 | 15, 25, 12 |
| 11 | ACAD8 | acyl-CoA dehydrogenase family member 8 | 151498 | 151500 | 166105 | 39, 42, 8 |
| 11 | ADAMTS15 | ADAM metallopeptidase with thrombospondin type 1 motif 15 | 166106 | 134917 | 120451 | 15, 27, 42 |
| 11 | ADAMTS8 | ADAM metallopeptidase with thrombospondin type 1 motif 8 | 134917 | 196323 | 166106 | 20, 33, 27 |
| 11 | AP2A2 | adaptor related protein complex 2 alpha 2 subunit | 183020 | 177830 | 184956 | 26, 38, 37 |
| 11 | AP5B1 | adaptor related protein complex 5 beta 1 subunit | 254470 | 172922 | 172818 | 5, 1, 21 |
| 11 | AMPD3 | adenosine monophosphate deaminase 3 | 133805 | 148926 | 255823 | |
| 11 | AAMDC | adipogenesis associated Mth938 domain containing | 087884 | 048649 | 149262 | 2, 43, 31 |
| 11 | ARFGAP2 | ADP ribosylation factor GTPase activating protein 2 | 149182 | 149179 | 165912 | 44, 18, 36 |
| 11 | ARFIP2 | ADP ribosylation factor interacting protein 2 | 132254 | 110171 | 132286 | 21, 31, 9 |
| 11 | ARL14EP | ADP ribosylation factor like GTPase 14 effector protein | 152219 | 131808 | 066382 | 9, 7, 42 |
| 11 | ARL2 | ADP ribosylation factor like GTPase 2 | 213465 | 168062 | 273003 | 29, 16, 12 |
| 11 | ART1 | ADP-ribosyltransferase 1 | 129744 | 167311 | 129749 | 25, |
| 11 | ART5 | ADP-ribosyltransferase 5 | 167311 | 005801 | 129744 | 11, 38, 12 |
| 11 | ADM | adrenomedullin | 148926 | 133812 | 133805 | 1, 32, 29 |
| 11 | AHNAK | AHNAK nucleoprotein | 124942 | 149021 | 254772 | 18, 1, 42 |
| 11 | AKIP1 | A-kinase interacting protein 1 | 166452 | 166444 | 176029 | 13, 29, 3 |
| 11 | ALDH3B1 | aldehyde dehydrogenase 3 family member B1 | 006534 | 110057 | 110717 | 34, 9, 20 |
| 11 | ALDH3B2 | aldehyde dehydrogenase 3 family member B2 | 132746 | 132744 | 110057 | 24, 4, 23 |
| 11 | ALG8 | ALG8, alpha-1,3-glucosyltransferase | 159063 | 151366 | 188997 | 34, 4, 10 |
| 11 | ALG9 | ALG9, alpha-1,2-mannosyltransferase | 086848 | 137713 | 258529 | 21, 40, 9 |
| 11 | ACER3 | alkaline ceramidase 3 | 078124 | 182704 | 198488 | 13, 31, 29 |
| 11 | ALKBH3 | alkB homolog 3, alpha-ketoglutaratedependent dioxygenase | 166199 | 149084 | 187479 | 43, 13, 36 |
| 11 | ALKBH8 | alkB homolog 8, tRNA methyltransferase | 137760 | 152404 | 110675 | 45, 42, 3 |
| 11 | ALX4 | ALX homeobox 4 | 052850 | 151348 | 085117 | 10, 14, 8 |
| 11 | ACY3 | aminoacylase 3 | 132744 | 167800 | 132746 | 17, 3, 21 |
| 11 | AASDHPPT | aminoadipate-semialdehyde dehydrogenase-phosphopantetheinyl transferase | 149313 | 182359 | 152402 | 34, 7, 8 |
| 11 | APLP2 | amyloid beta precursor like protein 2 | 084234 | 170325 | 149418 | 42, 24, 45 |
| 11 | APBB1 | amyloid beta precursor protein binding family B member 1 | 166313 | 166311 | 110169 | 26, 31, 8 |
| 11 | ANAPC15 | anaphase promoting complex subunit 15 | 110200 | 149357 | 110203 | 7, 31, 41 |
| 11 | AMOTL1 | angiomotin like 1 | 166025 | 134627 | 150316 | 25, 2, 42 |
| 11 | ANGPTL5 | angiopoietin like 5 | 187151 | 137672 | 110318 | 15, 10, 35 |
| 11 | ABTB2 | ankyrin repeat and BTB domain containing 2 | 166016 | 135372 | 121691 | 6, 26, 31 |
| 11 | ANKK1 | ankyrin repeat and kinase domain containing 1 | 170209 | 149292 | 149295 | 38, |
| 11 | ANKRD13D | ankyrin repeat domain 13D | 172932 | 173020 | 172830 | 39, 31, 36 |
| 11 | ANKRD42 | ankyrin repeat domain 42 | 137494 | 165494 | 137500 | 42, 1, 36 |
| 11 | ANKRD49 | ankyrin repeat domain 49 | 168876 | 020922 | 257057 | 39, 43, 19 |
| 11 | ANO1 | anoctamin 1 | 131620 | 186895 | 168040 | 30, 29, 18 |
| 11 | ANO3 | anoctamin 3 | 134343 | 187398 | 169550 | 8, 10, 32 |
| 11 | ANO5 | anoctamin 5 | 171714 | 165973 | 091664 | 29, 25, 11 |
| 11 | ANO9 | anoctamin 9 | 185101 | 185187 | 174915 | 39, 31, 16 |
| 11 | APIP | APAF1 interacting protein | 149089 | 135373 | 110435 | 3, 34, 43 |
| 11 | APLNR | apelin receptor | 134817 | 183908 | 149115 | 36, 26, 32 |
| 11 | APOA1 | apolipoprotein A1 | 118137 | 110245 | 160584 | 19, 36, 38 |
| 11 | APOA4 | apolipoprotein A4 | 110244 | 110243 | 110245 | 19, 16, 5 |
| 11 | APOA5 | apolipoprotein A5 | 110243 | 109917 | 110244 | 19, 20, |
| 11 | APOC3 | apolipoprotein C3 | 110245 | 110244 | 118137 | 19, 36, 17 |
| 11 | API5 | apoptosis inhibitor 5 | 166181 | 148948 | 052841 | 42, 24, 39 |
| 11 | AQP11 | aquaporin 11 | 178301 | 074201 | 048649 | 29, 10, 2 |
| 11 | ARCN1 | archain 1 | 095139 | 118096 | 019144 | 26, 29, 24 |
| 11 | ARAP1 | ArfGAP with RhoGAP domain, ankyrin repeat and PH domain 1 | 186635 | 186642 | 214530 | 41, 22, 5 |
| 11 | ARL2-SNX15 | ARL2-SNX15 readthrough (NMD candidate) | 273003 | 213465 | 110025 | 9, 1, 43 |
| 11 | ARRB1 | arrestin beta 1 | 137486 | 261594 | 149273 | 43, 1, 16 |
| 11 | AIP | aryl hydrocarbon receptor interacting protein | 110711 | 172663 | 110697 | 29, 6, 26 |
| 11 | ARNTL | aryl hydrocarbon receptor nuclear translocator like | 133794 | 189431 | 148925 | 24, 39, 36 |
| 11 | ASRGL1 | asparaginase like 1 | 162174 | 197745 | 149021 | 41, 9, 27 |
| 11 | NARS2 | asparaginyl-tRNA synthetase 2, mitochondrial (putative) | 137513 | 033327 | 149256 | 11, 13, 18 |
| 11 | ATL3 | atlastin GTPase 3 | 184743 | 176485 | 133318 | 1, 11, 9 |
| 11 | ATM | ATM serine/threonine kinase | 149311 | 149308 | 166323 | 22, 30, 23 |
| 11 | ABCC8 | ATP binding cassette subfamily C member 8 | 006071 | 187486 | 006611 | 28, 20, 25 |
| 11 | ABCG4 | ATP binding cassette subfamily G member 4 | 172350 | 172273 | 160703 | 8, 39, 14 |
| 11 | ATP5L | ATP synthase, H+ transporting, mitochondrial Fo complex subunit G | 167283 | 110344 | 118058 | 7, 34, 4 |
| 11 | AGBL2 | ATP/GTP binding protein like 2 | 165923 | 109919 | 109920 | 42, 38, 39 |
| 11 | AMBRA1 | autophagy and beclin 1 regulator 1 | 110497 | 180720 | 180423 | 43, 26, 42 |
| 11 | ATG13 | autophagy related 13 | 175224 | 180423 | 175220 | 42, 43, 39 |
| 11 | ATG16L2 | autophagy related 16 like 2 | 168010 | 214530 | 137478 | 18, 37, 5 |
| 11 | ATG2A | autophagy related 2A | 110046 | 110047 | 068971 | 1, 21, 9 |
| 11 | BIRC2 | baculoviral IAP repeat containing 2 | 110330 | 023445 | 152558 | 10, 29, 4 |
| 11 | BIRC3 | baculoviral IAP repeat containing 3 | 023445 | 137693 | 110330 | 22, 26, 16 |
| 11 | BBS1 | Bardet-Biedl syndrome 1 | 174483 | 256349 | 174165 | 42, 29, 24 |
| 11 | BANF1 | barrier to autointegration factor 1 | 175334 | 175376 | 175315 | 29, 7, 16 |
| 11 | BARX2 | BARX homeobox 2 | 043039 | 134909 | 151715 | 4, 23, 16 |
| 11 | BATF2 | basic leucine zipper ATF-like transcription factor 2 | 168062 | 168070 | 213465 | 1, 16, 7 |
| 11 | BCL9L | B-cell CLL/lymphoma 9-like | 186174 | 160683 | 110375 | 12, |
| 11 | BAD | BCL2 associated agonist of cell death | 002330 | 149782 | 173264 | 34, 14, 26 |
| 11 | BEST1 | bestrophin 1 | 167995 | 167994 | 167996 | 14, 1, 5 |
| 11 | BET1L | Bet1 golgi vesicular membrane trafficking protein like | 177951 | 134954 | 188076 | 39, 42, 31 |
| 11 | B3GAT1 | beta-1,3-glucuronyltransferase 1 | 109956 | 149328 | 134954 | 26, 14, 8 |
| 11 | B3GAT3 | beta-1,3-glucuronyltransferase 3 | 149541 | 149489 | 089597 | 41, 9, 26 |
| 11 | B4GAT1 | beta-1,4-glucuronyltransferase 1 | 174684 | 174744 | 174669 | 8, 11, 17 |
| 11 | B4GALNT4 | beta-1,4-N-acetyl-galactosaminyltransferase 4 | 182272 | 142089 | 184363 | 27, 12, 14 |
| 11 | BC02 | beta-carotene oxygenase 2 | 197580 | 150783 | 150787 | 2, 15, 19 |
| 11 | BACE1 | beta-secretase 1 | 186318 | 167257 | 110274 | 34, 29, 6 |
| 11 | BUD | BH3-like motif containing, cell death inducer | 259571 | 137642 | 154127 | |
| 11 | BRSK2 | BR serine/threonine kinase 2 | 174672 | 078902 | 182208 | 14, 8, 40 |
| 11 | BDNF | brain derived neurotrophic factor | 176697 | 148943 | 121621 | 10, 2, 15 |
| 11 | BSX | brain specific homeobox | 188909 | 109944 | 109971 | 27, |
| 11 | BRMS1 | breast cancer metastasis suppressor 1 | 174744 | 174791 | 174684 | 18, 41, 34 |
| 11 | BSCL2 | BSCL2, seipin lipid droplet biogenesis associated | 168000 | 177363 | 162188 | 31, 8, 38 |
| 11 | BTBD10 | BTB domain containing 10 | 148925 | 133794 | 152266 | 31, 13, 8 |
| 11 | BTBD18 | BTB domain containing 18 | 233436 | 254732 | 198561 | 40, 24, 12 |
| 11 | BTG4 | BTG anti-proliferation factor 4 | 137707 | 110777 | 183644 | |
| 11 | BUD13 | BUD13 homolog | 137656 | 182985 | 109917 | 43, 9, 1 |
| 11 | C1QTNF4 | C1q and tumor necrosis factor related protein 4 | 172247 | 196666 | 109919 | 31, 28, 14 |
| 11 | C1QTNF5 | C1q and tumor necrosis factor related protein 5 | 223953 | 173456 | 235718 | 14, 34, 28 |
| 11 | C2CD3 | C2 calcium dependent domain containing 3 | 168014 | 175564 | 214517 | 16, 22, 18 |
| 11 | C2CD2L | C2CD2 like | 172375 | 172269 | 172273 | 10, 8, 38 |
| 11 | CDHR5 | cadherin related family member 5 | 099834 | 185507 | 070031 | 16, 17, 37 |
| 11 | CALCA | calcitonin related polypeptide alpha | 110680 | 175868 | 188487 | 40, 33, |
| 11 | CALCB | calcitonin related polypeptide beta | 175868 | 186104 | 110680 | 6, 8, 38 |
| 11 | CABP2 | calcium binding protein 2 | 167791 | 167797 | 084207 | 14, |
| 11 | CABP4 | calcium binding protein 4 | 175544 | 175514 | 172663 | |
| 11 | CRACR2B | calcium release activated channel regulator 2B | 177685 | 177666 | 177697 | 26, 42, 3 |
| 11 | CAPN1 | calpain 1 | 014216 | 204710 | 014138 | |
| 11 | CAPN5 | calpain 5 | 149260 | 198488 | 254550 | 1, 26, 31 |
| 11 | CREB3L1 | cAMP responsive element binding protein 3 like 1 | 157613 | 135365 | 149091 | 16, 37, 20 |
| 11 | CHST1 | carbohydrate sulfotransferase 1 | 175264 | 019505 | 181830 | 31, 34, 29 |
| 11 | CLCF1 | cardiotrophin-like cytokine factor 1 | 175505 | 256514 | 172531 | 37, 26, 6 |
| 11 | CPT1A | carnitine palmitoyltransferase 1A | 110090 | 132749 | 197345 | 5, 16, 42 |
| 11 | CARNS1 | carnosine synthase 1 | 172508 | 175463 | 175634 | 40, 8, 25 |
| 11 | CSNK2A3 | casein kinase 2 alpha 3 | 254598 | 110328 | 170242 | |
| 11 | CASP1 | caspase 1 | 137752 | 137757 | 204397 | 13, 34, 30 |
| 11 | CASP12 | caspase 12 (gene/pseudogene) | 204403 | 170967 | 196954 | 10, 15, |
| 11 | CASP4 | caspase 4 | 196954 | 204403 | 137757 | 6, 15, 19 |
| 11 | CASP5 | caspase 5 | 137757 | 196954 | 137752 | 15, 10, 16 |
| 11 | CARD16 | caspase recruitment domain family member 16 | 204397 | 137752 | 255221 | 9, 19, 16 |
| 11 | CARD17 | caspase recruitment domain family member 17 | 255221 | 204397 | 255501 | 32, |
| 11 | CARD18 | caspase recruitment domain family member 18 | 255501 | 255221 | 152578 | 15, 32, 10 |
| 11 | CAT | catalase | 121691 | 166016 | 135374 | 7, 19, 5 |
| 11 | CTNND1 | catenin delta 1 | 198561 | 233436 | 186509 | 24, 42, 4 |
| 11 | CTSC | cathepsin C | 109861 | 123892 | 168959 | 34, 5, 13 |
| 11 | CTSD | cathepsin D | 117984 | 250644 | 149043 | 34, 1, 13 |
| 11 | CTSF | cathepsin F | 174080 | 248746 | 182791 | 26, 1, 2 |
| 11 | CTSW | cathepsin W | 172543 | 172638 | 172500 | 5, 36, 18 |
| 11 | CATSPER1 | cation channel sperm associated 1 | 175294 | 175315 | 175229 | 38, 6, 20 |
| 11 | CBL | Cbl proto-oncogene | 110395 | 248712 | 076706 | 22, 11, 36 |
| 11 | CD151 | CD151 molecule (Raph blood group) | 177697 | 177685 | 177700 | 1, 3, 26 |
| 11 | CD248 | CD248 molecule | 174807 | 179292 | 174791 | 6, 1, 32 |
| 11 | CD3D | CD3d molecule | 167286 | 198851 | 160654 | 10, 39, 5 |
| 11 | CD3E | CD3e molecule | 198851 | 149573 | 167286 | 39, 5, 36 |
| 11 | CD3G | CD3g molecule | 160654 | 167286 | 110344 | 39, 5, 36 |
| 11 | CD44 | CD44 molecule (Indian blood group) | 026508 | 110435 | 110436 | 7, 5, 23 |
| 11 | CD5 | CD5 molecule | 110448 | 013725 | 167987 | 39, 36, 5 |
| 11 | CD59 | CD59 molecule | 085063 | 110427 | 110429 | |
| 11 | CD6 | CD6 molecule | 013725 | 110446 | 110448 | 39, 36, 5 |
| 11 | CD81 | CD81 molecule | 110651 | 064201 | 184281 | 26, 41, 1 |
| 11 | CD82 | CD82 molecule | 085117 | 052850 | 157570 | 41, 16, 1 |
| 11 | CDC42BPG | CDC42 binding protein kinase gamma | 171219 | 133895 | 110047 | 18, 26, 35 |
| 11 | CDC42EP2 | CDC42 effector protein 2 | 149798 | 014138 | 133884 | 1, 40, 13 |
| 11 | CDON | cell adhesion associated, oncogene regulated | 064309 | 109832 | 165526 | 1, 15, 29 |
| 11 | CADM1 | cell adhesion molecule 1 | 182985 | 204361 | 137656 | 11, 28, 26 |
| 11 | CAPRIN1 | cell cycle associated protein 1 | 135387 | 135363 | 135372 | 42, 38, 24 |
| 11 | CEND1 | cell cycle exit and neuronal differentiation 1 | 184524 | 177225 | 177542 | 26, 8, 14 |
| 11 | CDCA5 | cell division cycle associated 5 | 146670 | 168060 | 162300 | 21, 5, 18 |
| 11 | CEP126 | centrosomal protein 126 | 110318 | 187151 | 137691 | 31, 42, 28 |
| 11 | CEP164 | centrosomal protein 164 | 110274 | 186318 | 177103 | 43, 7, 13 |
| 11 | CEP295 | centrosomal protein 295 | 166004 | 166002 | 166012 | 19, 18, 22 |
| 11 | CEP57 | centrosomal protein 57 | 166037 | 077458 | 087053 | 9, 22, 13 |
| 11 | CHEK1 | checkpoint kinase 1 | 149554 | 134910 | 134940 | 9, 39, 45 |
| 11 | CHID1 | chitinase domain containing 1 | 177830 | 214063 | 183020 | 1, 2, 36 |
| 11 | CLNS1A | chloride nucleotide-sensitive channel 1A | 074201 | 149269 | 178301 | 18, 27, 3 |
| 11 | CCKBR | cholecystokinin B receptor | 110148 | 132259 | 170955 | 37, 8, 38 |
| 11 | CHKA | choline kinase alpha | 110721 | 110719 | 110066 | 38, 22, 12 |
| 11 | CHRM1 | cholinergic receptor muscarinic 1 | 168539 | 168003 | 197901 | 8, 33, 23 |
| 11 | CHRM4 | cholinergic receptor muscarinic 4 | 180720 | 110492 | 110497 | 36, 28, 14 |
| 11 | CHRNA10 | cholinergic receptor nicotinic alpha 10 subunit | 129749 | 129744 | 110713 | 22, 39, 27 |
| 11 | CHRDL2 | chordin like 2 | 054938 | 077514 | 166439 | 44, 33, 9 |
| 11 | C11orf1 | chromosome 11 open reading frame 1 | 137720 | 255561 | 109846 | 29, 45, 20 |
| 11 | C11orf16 | chromosome 11 open reading frame 16 | 176029 | 166452 | 176009 | 42, 20, 44 |
| 11 | C11orf21 | chromosome 11 open reading frame 21 | 110665 | 183734 | 064201 | 5, 36, 27 |
| 11 | C11orf24 | chromosome 11 open reading frame 24 | 171067 | 110066 | 162337 | |
| 11 | C11orf40 | chromosome 11 open reading frame 40 | 171987 | 197790 | 226288 | |
| 11 | C11orf42 | chromosome 11 open reading frame 42 | 180878 | 175485 | 051009 | 4, 38, 8 |
| 11 | C11orf45 | chromosome 11 open reading frame 45 | 174370 | 120457 | 120471 | 24, 42, 6 |
| 11 | C11orf49 | chromosome 11 open reading frame 49 | 149179 | 134569 | 149182 | 26, 1, 34 |
| 11 | C11orf52 | chromosome 11 open reading frame 52 | 149300 | 254445 | 150764 | 30, 26, 14 |
| 11 | C11orf53 | chromosome 11 open reading frame 53 | 150750 | 137727 | 214290 | 33, 20, |
| 11 | C11orf54 | chromosome 11 open reading frame 54 | 182919 | 166012 | 042429 | 17, 1, 7 |
| 11 | C11orf57 | chromosome 11 open reading frame 57 | 150776 | 150773 | 150779 | 9, 29, 4 |
| 11 | C11orf58 | chromosome 11 open reading frame 58 | 110696 | 110693 | 166689 | 7, 34, 30 |
| 11 | C11orf63 | chromosome 11 open reading frame 63 | 109944 | 109943 | 188909 | 1, 38, 29 |
| 11 | C11orf65 | chromosome 11 open reading frame 65 | 166323 | 149311 | 178202 | 38, 39, |
| 11 | C11orf68 | chromosome 11 open reading frame 68 | 175573 | 175592 | 175550 | 34, 14, 6 |
| 11 | C11orf70 | chromosome 11 open reading frame 70 | 137691 | 110318 | 137693 | 38, 30, 6 |
| 11 | C11orf71 | chromosome 11 open reading frame 71 | 180425 | 166741 | 282682 | 38, 1, 29 |
| 11 | C11orf71 | chromosome 11 open reading frame 71 | 282682 | 180425 | 076053 | 38, 1, 29 |
| 11 | C11orf74 | chromosome 11 open reading frame 74 | 166352 | 175097 | 148948 | 43, 29, 15 |
| 11 | C11orf80 | chromosome 11 open reading frame 80 | 173715 | 173898 | 173653 | 29, 26, 2 |
| 11 | C11orf84 | chromosome 11 open reading frame 84 | 168005 | 188070 | 072518 | 26, 9, 6 |
| 11 | C11orf86 | chromosome 11 open reading frame 86 | 173237 | 173621 | 173227 | 3, 37, 16 |
| 11 | C11orf87 | chromosome 11 open reading frame 87 | 185742 | 178105 | 149289 | 11, 8, 7 |
| 11 | C11orf88 | chromosome 11 open reading frame 88 | 183644 | 137707 | 204381 | 30, 10, 38 |
| 11 | C11orf91 | chromosome 11 open reading frame 91 | 205177 | 110427 | 110429 | |
| 11 | C11orf94 | chromosome 11 open reading frame 94 | 234776 | 121653 | 121680 | 38, |
| 11 | C11orf95 | chromosome 11 open reading frame 95 | 188070 | 133318 | 168005 | 1, 17, 12 |
| 11 | C11orf96 | chromosome 11 open reading frame 96 | 187479 | 166199 | 205126 | 17, 20, 11 |
| 11 | C11orf97 | Chromosome 11 open reading frame 97 | 257057 | 168876 | 134627 | |
| 11 | C11orf98 | chromosome 11 open reading frame 98 | 278615 | 255432 | 162194 | |
| 11 | CNTF | ciliary neurotrophic factor | 242689 | 255073 | 149124 | 22, 18, 11 |
| 11 | CLDN25 | claudin 25 | 228607 | 086827 | 048028 | |
| 11 | CLP1 | cleavage and polyadenylation factor I subunit 1 | 172409 | 166793 | 156599 | 1, 6, 13 |
| 11 | CPSF7 | cleavage and polyadenylation specific factor 7 | 149532 | 187049 | 256591 | 42, 9, 24 |
| 11 | CSTF3 | cleavage stimulation factor subunit 3 | 176102 | 280550 | 110422 | |
| 11 | CLPB | ClpB homolog, mitochondrial AAA ATPase chaperonin | 162129 | 165462 | 186642 | 38, 5, 21 |
| 11 | F2 | coagulation factor II, thrombin | 180210 | 175213 | 175216 | 19, 23, 15 |
| 11 | COPB1 | coatomer protein complex subunit beta 1 | 129083 | 133818 | 256206 | |
| 11 | CFL1 | cofilin 1 | 172757 | 172818 | 172803 | 41, 34, 21 |
| 11 | CCDC15 | coiled-coil domain containing 15 | 149548 | 221932 | 134955 | 11, 31, 29 |
| 11 | CCDC153 | coiled-coil domain containing 153 | 248712 | 172367 | 110395 | 20, 44, 38 |
| 11 | CCDC179 | coiled-coil domain containing 179 | 255359 | 198168 | 187398 | 10, 38, |
| 11 | CCDC34 | coiled-coil domain containing 34 | 109881 | 129151 | 205213 | 40, 37, 9 |
| 11 | CCDC73 | coiled-coil domain containing 73 | 186714 | 149100 | 135378 | 10, 38, 22 |
| 11 | CCDC81 | coiled-coil domain containing 81 | 149201 | 149196 | 151376 | 43, 30, 38 |
| 11 | CCDC82 | coiled-coil domain containing 82 | 149231 | 184384 | 183340 | 4, 22, 45 |
| 11 | CCDC83 | coiled-coil domain containing 83 | 150676 | 137501 | 073921 | 38, 8, |
| 11 | CCDC84 | coiled-coil domain containing 84 | 186166 | 176302 | 118181 | 20, 14, 44 |
| 11 | CCDC85B | coiled-coil domain containing 85B | 175602 | 172500 | 175592 | 41, 20, 6 |
| 11 | CCDC86 | coiled-coil domain containing 86 | 110104 | 172689 | 183134 | 29, 9, 38 |
| 11 | CCDC87 | coiled-coil domain containing 87 | 182791 | 174080 | 173992 | 38, 24, 29 |
| 11 | CCDC88B | coiled-coil domain containing 88B | 168071 | 126432 | 162302 | 5, 21, 7 |
| 11 | CCDC89 | coiled-coil domain containing 89 | 179071 | 137504 | 137501 | 38, 35, 6 |
| 11 | CCDC90B | coiled-coil domain containing 90B | 137500 | 137494 | 150672 | 4, 34, 30 |
| 11 | COLCA2 | colorectal cancer associated 2 | 214290 | 150750 | 110777 | 3, 23, 16 |
| 11 | COMMD9 | COMM domain containing 9 | 110442 | 179241 | 135362 | |
| 11 | CNTN5 | contactin 5 | 149972 | 183340 | 165895 | 10, 32, 14 |
| 11 | CCS | copper chaperone for superoxide dismutase | 173992 | 182791 | 239306 | 4, 19, 26 |
| 11 | CNIH2 | cornichon family AMPA receptor auxiliary protein 2 | 174871 | 174903 | 174851 | 28, 12, 8 |
| 11 | CORO1B | coronin 1B | 172725 | 175634 | 175514 | 21, 37, 9 |
| 11 | CTTN | cortactin | 085733 | 131626 | 162105 | 18, 30, 35 |
| 11 | CREBZF | CREB/ATF bZIP transcription factor | 137504 | 171202 | 179071 | 22, 16, 11 |
| 11 | CRY2 | cryptochrome circadian clock 2 | 121671 | 181830 | 121653 | 3, 42, 24 |
| 11 | CRYAB | crystallin alpha B | 109846 | 137720 | 170276 | 14, 25, 15 |
| 11 | CTR9 | CTR9 homolog, Paf1/RNA polymerase II complex component | 198730 | 072952 | 110321 | 18, 31, 26 |
| 11 | CELF1 | CUGBP, Elav-like family member 1 | 149187 | 165917 | 213619 | 3, 22, 21 |
| 11 | CUL5 | cullin 5 | 166266 | 179331 | 075239 | |
| 11 | CWC15 | CWC15 spliceosome associated protein homolog | 150316 | 166025 | 186280 | 29, 11, 15 |
| 11 | CWF19L2 | CWF19-like 2, cell cycle control (S. pombe) | 152404 | 152402 | 137760 | 24, 42, 40 |
| 11 | CLMP | CXADR like membrane protein | 166250 | 109971 | 023171 | 1, 45, 10 |
| 11 | CXCR5 | C-X-C motif chemokine receptor 5 | 160683 | 110367 | 186174 | 36, 22, 5 |
| 11 | CNGA4 | cyclic nucleotide gated channel alpha 4 | 132259 | 051009 | 110148 | 42, 38, 20 |
| 11 | CCND1 | cyclin D1 | 110092 | 172927 | 149716 | 18, 40, 3 |
| 11 | CDK2AP2 | cyclin dependent kinase 2 associated protein 2 | 167797 | 110697 | 167791 | 41, 9, 21 |
| 11 | CDKN1C | cyclin dependent kinase inhibitor 1C | 129757 | 053918 | 254827 | 32, 15, 28 |
| 11 | CST6 | cystatin E/M | 175315 | 175334 | 175294 | 15, 22, 40 |
| 11 | CSRP3 | cysteine and glycine rich protein 3 | 129170 | 177054 | 129173 | 15, 25, 18 |
| 11 | CHORDC1 | cysteine and histidine rich domain containing 1 | 110172 | 077616 | 165323 | 13, 11, 7 |
| 11 | CARS | cysteinyl-tRNA synthetase | 110619 | 205531 | 021762 | 21, 17, 3 |
| 11 | CYB5R2 | cytochrome b5 reductase 2 | 166394 | 166387 | 183378 | 38, 3, 34 |
| 11 | CYB561A3 | cytochrome b561 family member A3 | 162144 | 149476 | 149483 | 41, 36, 2 |
| 11 | COA4 | cytochrome c oxidase assembly factor 4 homolog | 181924 | 175581 | 175575 | 9, 29, 41 |
| 11 | COX8A | cytochrome c oxidase subunit 8A | 176340 | 110583 | 256100 | 15, 25, 12 |
| 11 | CYP2R1 | cytochrome P450 family 2 subfamily R member 1 | 186104 | 152270 | 175868 | 37, 38, 45 |
| 11 | CKAP5 | cytoskeleton associated protein 5 | 175216 | 180210 | 134569 | |
| 11 | CRTAM | cytotoxic and regulatory T-cell molecule | 109943 | 154127 | 109944 | 5, 8, 36 |
| 11 | DCHS1 | dachsous cadherin-related 1 | 166341 | 166340 | 158042 | 1, 26, 2 |
| 11 | DDB1 | damage specific DNA binding protein 1 | 167986 | 167992 | 149476 | 43, 21, 32 |
| 11 | DDB2 | damage specific DNA binding protein 2 | 134574 | 165912 | 134575 | 41, 9, 43 |
| 11 | DDX10 | DEAD-box helicase 10 | 178105 | 110723 | 185742 | 21, 6, 10 |
| 11 | DDX25 | DEAD-box helicase 25 | 109832 | 110060 | 064309 | |
| 11 | DDX6 | DEAD-box helicase 6 | 110367 | 118094 | 160683 | 13, 29, 41 |
| 11 | DEAF1 | DEAF1, transcription factor | 177030 | 069696 | 177106 | 4, 26, 34 |
| 11 | DCPS | decapping enzyme, scavenger | 110063 | 150455 | 110080 | 7, 41, 37 |
| 11 | DCUN1D5 | defective in cullin neddylation 1 domain containing 5 | 137692 | 137745 | 187240 | 13, 11, 35 |
| 11 | DEFB108B | defensin beta 108B | 184276 | 158483 | 254469 | 38, |
| 11 | DTX4 | deltex E3 ubiquitin ligase 4 | 110042 | 166801 | 197629 | 15, 40, 26 |
| 11 | DENND5A | DENN domain containing 5A | 184014 | 175356 | 166471 | 34, 7, 25 |
| 11 | DEPDC7 | DEP domain containing 7 | 121690 | 060749 | 176148 | 22, 19, 38 |
| 11 | DEUP1 | deuterosome assembly protein 1 | 165325 | 180773 | 166002 | 34, 38, 20 |
| 11 | DBX1 | developing brain homeobox 1 | 109851 | 166833 | 109854 | |
| 11 | DGKZ | diacylglycerol kinase zeta | 149091 | 157613 | 110492 | 3, 39, 22 |
| 11 | DAGLA | diacylglycerol lipase alpha | 134780 | 011347 | 124920 | 28, 37, 36 |
| 11 | DGAT2 | diacylglycerol O-acyltransferase 2 | 062282 | 166391 | 198382 | 1, 35, 38 |
| 11 | DKK3 | dickkopf WNT signaling pathway inhibitor 3 | 050165 | 170242 | 133816 | 8, 28, 26 |
| 11 | DLAT | dihydrolipoamide S-acetyltransferase | 150768 | 150764 | 150773 | 42, 43, 22 |
| 11 | DPP3 | dipeptidyl peptidase 3 | 254986 | 174516 | 256349 | 24, 36, 9 |
| 11 | DLG2 | discs large MAGUK scaffold protein 2 | 150672 | 137500 | 171204 | 8, 17, 14 |
| 11 | DIXDC1 | DIX domain containing 1 | 150764 | 149300 | 150768 | 6, 42, 8 |
| 11 | DDIAS | DNA damage induced apoptosis suppressor | 165490 | 137509 | 137502 | 9, 38, 11 |
| 11 | DDI1 | DNA damage inducible 1 homolog 1 | 170967 | 170962 | 204403 | 38, 8, |
| 11 | POLA2 | DNA polymerase alpha 2, accessory subunit | 014138 | 014216 | 149798 | 13, 39, 38 |
| 11 | POLD3 | DNA polymerase delta 3, accessory subunit | 077514 | 175536 | 054938 | 43, 22, 30 |
| 11 | POLD4 | DNA polymerase delta 4, accessory subunit | 175482 | 172613 | 256514 | 36, 23, 25 |
| 11 | DNAJB13 | DnaJ heat shock protein family (Hsp40) member B13 | 187726 | 175575 | 175567 | 42, 38, 44 |
| 11 | DNAJC24 | DnaJ heat shock protein family (Hsp40) member C24 | 170946 | 170959 | 148950 | 23, 11, 7 |
| 11 | DNAJC4 | DnaJ heat shock protein family (Hsp40) member C4 | 110011 | 149761 | 173511 | 29, 22, 20 |
| 11 | DPAGT1 | dolichyl-phosphate N-acetylglucosaminephosphotransferase 1 | 172269 | 188486 | 172375 | 39, 13, 30 |
| 11 | DRD2 | dopamine receptor D2 | 149295 | 170209 | 166682 | 26, 31, 20 |
| 11 | DRD4 | dopamine receptor D4 | 069696 | 070031 | 177030 | 14, 17, 6 |
| 11 | DPF2 | double PHD fingers 2 | 133884 | 149798 | 173825 | 34, 40, 1 |
| 11 | DCDC1 | doublecortin domain containing 1 | 170959 | 066382 | 170946 | |
| 11 | DRAP1 | DR1 associated protein 1 | 175550 | 175573 | 175513 | 28, 6, 22 |
| 11 | DSCAML1 | DS cell adhesion molecule like 1 | 177103 | 110274 | 137731 | 31, 14, 42 |
| 11 | DUSP8 | dual specificity phosphatase 8 | 184545 | 182208 | 278919 | 28, 14, 35 |
| 11 | DYNC2H1 | dynein cytoplasmic 2 heavy chain 1 | 187240 | 137692 | 170962 | 18, 1, 10 |
| 11 | DNHD1 | dynein heavy chain domain 1 | 179532 | 132286 | 132275 | 38, 36, 39 |
| 11 | E2F8 | E2F transcription factor 8 | 129173 | 129170 | 166833 | 39, 22, 24 |
| 11 | ELF5 | E74 like ETS transcription factor 5 | 135374 | 121691 | 135373 | 42, 34, 37 |
| 11 | EML3 | echinoderm microtubule associated protein like 3 | 149499 | 149480 | 149489 | 9, 41, 21 |
| 11 | EFEMP2 | EGF containing fibulin like extracellular matrix protein 2 | 172638 | 172732 | 172543 | 34, 6, 32 |
| 11 | EHBP1L1 | EH domain binding protein 1 like 1 | 173442 | 176973 | 173338 | 26, 6, 9 |
| 11 | EHD1 | EH domain containing 1 | 110047 | 171219 | 110046 | 36, 39, 42 |
| 11 | EI24 | EI24, autophagy associated transmembrane protein | 149547 | 149557 | 134910 | 4, 9, 40 |
| 11 | ELMOD1 | ELMO domain containing 1 | 110675 | 137760 | 170290 | |
| 11 | ELP4 | elongator acetyltransferase complex subunit 4 | 109911 | 148950 | 007372 | 10, 11, 17 |
| 11 | EED | embryonic ectoderm development | 074266 | 073921 | 149196 | 30, 26, 11 |
| 11 | EMSY | EMSY, BRCA2 interacting transcriptional repressor | 158636 | 179240 | 137507 | 9, 32, 42 |
| 11 | ENDOD1 | endonuclease domain containing 1 | 149218 | 263465 | 149212 | 31, 33, 2 |
| 11 | ESAM | endothelial cell adhesion molecule | 149564 | 019102 | 120458 | 32, 1, 15 |
| 11 | EPS8L2 | EPS8 like 2 | 177106 | 177030 | 177042 | 13, 27, 17 |
| 11 | ESRRA | estrogen related receptor alpha | 173153 | 219435 | 173113 | 3, 41, 9 |
| 11 | EHF | ETS homologous factor | 135373 | 135374 | 149089 | 42, 24, 3 |
| 11 | ETS1 | ETS proto-oncogene 1, transcription factor | 134954 | 149571 | 151702 | 22, 1, 26 |
| 11 | EEF1G | eukaryotic translation elongation factor 1 gamma | 254772 | 124942 | 255508 | |
| 11 | EIF1AD | eukaryotic translation initiation factor 1A domain containing | 175376 | 175467 | 175334 | 20, 27, 35 |
| 11 | EIF3F | eukaryotic translation initiation factor 3 subunit F | 175390 | 182261 | 166402 | 22, 21, 41 |
| 11 | EIF3M | eukaryotic translation initiation factor 3 subunit M | 149100 | 184937 | 186714 | 34, 7, 4 |
| 11 | EIF4G2 | eukaryotic translation initiation factor 4 gamma 2 | 110321 | 198730 | 236287 | 42, 45, 13 |
| 11 | EXPH5 | exophilin 5 | 110723 | 178202 | 178105 | 32, 42, 4 |
| 11 | EXT2 | exostosin glycosyltransferase 2 | 151348 | 110455 | 052850 | 7, 9, 2 |
| 11 | FOXRED1 | FAD dependent oxidoreductase domain containing 1 | 110074 | 182934 | 150455 | 9, 19, 39 |
| 11 | FAM111A | family with sequence similarity 111 member A | 166801 | 189057 | 110042 | 29, 24, 22 |
| 11 | FAM111B | family with sequence similarity 111 member B | 189057 | 255151 | 166801 | 22, 4, 39 |
| 11 | FAM118B | family with sequence similarity 118 member B | 197798 | 165526 | 182934 | 37, 7, 34 |
| 11 | FAM160A2 | family with sequence similarity 160 member A2 | 051009 | 180878 | 132259 | 42, 38, 39 |
| 11 | FAM168A | family with sequence similarity 168 member A | 054965 | 054967 | 021300 | 9, 27, 18 |
| 11 | FAM180B | family with sequence similarity 180 member B | 196666 | 123444 | 172247 | 26, |
| 11 | FAM181B | family with sequence similarity 181 member B | 182103 | 149256 | 137509 | 8, 40, 27 |
| 11 | FAM76B | family with sequence similarity 76 member B | 077458 | 149212 | 166037 | 22, 38, 40 |
| 11 | FAM86C1 | family with sequence similarity 86 member C1 | 158483 | 204571 | 184276 | 3, 6, 14 |
| 11 | FAM89B | family with sequence similarity 89 member B | 176973 | 173465 | 173442 | 34, 28, 41 |
| 11 | FANCF | Fanconi anemia complementation group F | 183161 | 091664 | 148935 | 39, 36, 21 |
| 11 | FADD | Fas associated via death domain | 168040 | 131620 | 131626 | 34, 29, 9 |
| 11 | FEZ1 | fasciculation and elongation protein zeta 1 | 149557 | 165495 | 149547 | 29, 8, 26 |
| 11 | FAT3 | FAT atypical cadherin 3 | 165323 | 110172 | 134640 | 12, 8, 33 |
| 11 | FADS1 | fatty acid desaturase 1 | 149485 | 134824 | 221968 | |
| 11 | FADS2 | fatty acid desaturase 2 | 134824 | 168496 | 149485 | 35, 33, 12 |
| 11 | FADS3 | fatty acid desaturase 3 | 221968 | 149485 | 167994 | 41, 26, 22 |
| 11 | FAR1 | fatty acyl-CoA reductase 1 | 197601 | 152266 | 262655 | 37, 26, 22 |
| 11 | FAU | FAU, ubiquitin like and ribosomal protein S30 fusion | 149806 | 174276 | 162298 | 43, 33, 31 |
| 11 | FBXO3 | F-box protein 3 | 110429 | 085063 | 135363 | 42, 4, 24 |
| 11 | FCHSD2 | FCH and double SH3 domains 2 | 137478 | 168010 | 175591 | 22, 31, 40 |
| 11 | FRMD8 | FERM domain containing 8 | 126391 | 162241 | 279576 | 24, 42, 4 |
| 11 | FERMT3 | fermitin family member 3 | 149781 | 168439 | 149743 | 41, 7, 21 |
| 11 | FDX1 | ferredoxin 1 | 137714 | 137710 | 137727 | 2, 43, 32 |
| 11 | FDXACB1 | ferredoxin-fold anticodon binding domain containing 1 | 255561 | 258529 | 137720 | 21, 37, 45 |
| 11 | FTH1 | ferritin heavy chain 1 | 167996 | 167995 | 149503 | |
| 11 | FIBP | FGF1 intracellular binding protein | 172500 | 172543 | 175602 | 18, 9, 34 |
| 11 | FGF19 | fibroblast growth factor 19 | 162344 | 281781 | 075388 | 29, 38, 16 |
| 11 | FGF3 | fibroblast growth factor 3 | 186895 | 075388 | 131620 | |
| 11 | FGF4 | fibroblast growth factor 4 | 075388 | 162344 | 186895 | 12, 38, |
| 11 | FLRT1 | fibronectin leucine rich transmembrane protein 1 | 126500 | 133315 | 168439 | 18, 14, 8 |
| 11 | FIBIN | fin bud initiation factor homolog (zebrafish) | 176971 | 148942 | 129151 | 11, 45, 15 |
| 11 | FKBP2 | FK506 binding protein 2 | 173486 | 173511 | 173457 | 31, 43, 29 |
| 11 | FEN1 | flap structure-specific endonuclease 1 | 168496 | 134825 | 134824 | 34, 21, 9 |
| 11 | FLI1 | Fli-1 proto-oncogene, ETS transcription factor | 151702 | 134954 | 151704 | 21, 45, 39 |
| 11 | FOLH1 | folate hydrolase 1 | 086205 | 214891 | 258817 | 26, 33, 36 |
| 11 | FOLR1 | folate receptor 1 | 110195 | 110203 | 165457 | 9, 27, 20 |
| 11 | FOLR3 | folate receptor 3 | 110203 | 110200 | 110195 | 17, 18, 6 |
| 11 | FOLR2 | folate receptor beta | 165457 | 110195 | 165458 | 1, 29, 30 |
| 11 | FSHB | follicle stimulating hormone beta subunit | 131808 | 182255 | 152219 | 31, 38, 8 |
| 11 | FOXR1 | forkhead box R1 | 176302 | 110375 | 186166 | 38, 8, |
| 11 | FNBP4 | formin binding protein 4 | 109920 | 165923 | 030066 | |
| 11 | FOSL1 | FOS like 1, AP-1 transcription factor subunit | 175592 | 175602 | 175573 | 19, 35, 37 |
| 11 | FJX1 | four jointed box 1 | 179431 | 149090 | 166326 | 27, 12, 6 |
| 11 | FZD4 | frizzled class receptor 4 | 174804 | 150687 | 166575 | 1, 11, 45 |
| 11 | FUT4 | fucosyltransferase 4 | 196371 | 257057 | 166025 | 3, 7, 42 |
| 11 | FXYD2 | FXYD domain containing ion transport regulator 2 | 137731 | 177103 | 255245 | 17, |
| 11 | FXYD6 | FXYD domain containing ion transport regulator 6 | 137726 | 255245 | 137747 | 26, 1, 8 |
| 11 | FXYD6-FXYD2 | FXYD6-FXYD2 readthrough | 255245 | 137731 | 137726 | |
| 11 | GNG3 | G protein subunit gamma 3 | 162188 | 234857 | 214753 | |
| 11 | GPR137 | G protein-coupled receptor 137 | 173264 | 002330 | 182450 | 38, 34, 28 |
| 11 | GPR152 | G protein-coupled receptor 152 | 175514 | 213402 | 175544 | |
| 11 | GPR83 | G protein-coupled receptor 83 | 123901 | 183560 | 020922 | 26, 40, 8 |
| 11 | GRK2 | G protein-coupled receptor kinase 2 | 173020 | 173120 | 172932 | 30, 21, 41 |
| 11 | GAL3ST3 | galactose-3-O-sulfotransferase 3 | 175229 | 175294 | 087365 | 14, 38, 8 |
| 11 | GLB1L2 | galactosidase beta 1 like 2 | 149328 | 166105 | 109956 | 29, 14, 38 |
| 11 | GLB1L3 | galactosidase beta 1 like 3 | 166105 | 151498 | 149328 | 38, 33, 35 |
| 11 | GAL | galanin and GMAP prepropeptide | 069482 | 110075 | 132749 | 35, |
| 11 | LGALS12 | galectin 12 | 133317 | 168004 | 133321 | 5, 2, 23 |
| 11 | BBOX1 | gamma-butyrobetaine hydroxylase 1 | 129151 | 176971 | 109881 | 17, 11, 13 |
| 11 | GIF | gastric intrinsic factor | 134812 | 166902 | 134827 | 37, 16, |
| 11 | GTF2H1 | general transcription factor IIH subunit 1 | 110768 | 110756 | 134333 | 45, 13, 26 |
| 11 | GANAB | glucosidase II alpha subunit | 089597 | 149541 | 185085 | 43, 18, 24 |
| 11 | GRIA4 | glutamate ionotropic receptor AMPA type subunit 4 | 152578 | 255501 | 170903 | 14, 8, 26 |
| 11 | GRIK4 | glutamate ionotropic receptor kainate type subunit 4 | 149403 | 196914 | 154114 | 38, 19, 8 |
| 11 | GRM5 | glutamate metabotropic receptor 5 | 168959 | 109861 | 077498 | |
| 11 | QSER1 | glutamine and serine rich 1 | 060749 | 135378 | 121690 | 11, 22, 42 |
| 11 | GSTP1 | glutathione S-transferase pi 1 | 084207 | 167791 | 167792 | 3, 30, 16 |
| 11 | GDPD4 | glycerophosphodiester phosphodiesterase domain containing 4 | 178795 | 137474 | 149269 | |
| 11 | GDPD5 | glycerophosphodiester phosphodiesterase domain containing 5 | 158555 | 149243 | 149257 | |
| 11 | GLYAT | glycine-N-acyltransferase | 149124 | 242689 | 156689 | 17, 19, |
| 11 | GLYATL1 | glycine-N-acyltransferase like 1 | 166840 | 156689 | 255151 | 12, |
| 11 | GLYATL1P3 | Glycine-N-acyltransferase like 1 pseudogene 3 | 255151 | 166840 | 189057 | |
| 11 | GLYATL2 | glycine-N-acyltransferase like 2 | 156689 | 149124 | 166840 | 7, 12, |
| 11 | PYGM | glycogen phosphorylase, muscle associated | 068976 | 068831 | 168066 | 15, 25, 24 |
| 11 | GPHA2 | glycoprotein hormone alpha 2 | 149735 | 068971 | 168070 | 38, 5, 20 |
| 11 | GRAMD1B | GRAM domain containing 1B | 023171 | 166250 | 166257 | 27, 32, 2 |
| 11 | GAB2 | GRB2 associated binding protein 2 | 033327 | 118369 | 137513 | 43, 35, 32 |
| 11 | GAS2 | growth arrest specific 2 | 148935 | 183161 | 198168 | 11, 34, 19 |
| 11 | GUCY1A2 | guanylate cyclase 1 soluble subunit alpha 2 | 152402 | 149313 | 152404 | 32, 1, 25 |
| 11 | H2AFX | H2A histone family member X | 188486 | 256269 | 172269 | 22, 27, 41 |
| 11 | HARBI1 | harbinger transposase derived 1 | 180423 | 110497 | 175224 | 31, 38, 37 |
| 11 | HSPA8 | heat shock protein family A (Hsp70) member 8 | 109971 | 188909 | 166250 | 45, 36, 17 |
| 11 | HSPB2 | heat shock protein family B (small) member 2 | 170276 | 109846 | 254445 | 25, 1, 15 |
| 11 | HBB | hemoglobin subunit beta | 244734 | 176742 | 223609 | 5, 7, 25 |
| 11 | HBD | hemoglobin subunit delta | 223609 | 244734 | 213934 | 5, 10, 7 |
| 11 | HBE1 | hemoglobin subunit epsilon 1 | 213931 | 279346 | 183251 | 36, 15, 11 |
| 11 | HBG1 | hemoglobin subunit gamma 1 | 213934 | 223609 | 196565 | 36, 15, 11 |
| 11 | HBG2 | hemoglobin subunit gamma 2 | 196565 | 213934 | 279824 | 36, 31, 11 |
| 11 | HPX | hemopexin | 110169 | 166313 | 110171 | 19, 23, 36 |
| 11 | HEPACAM | hepatic and glial cell adhesion molecule | 165478 | 154133 | 221932 | 8, 23, 19 |
| 11 | HEPN1 | hepatocellular carcinoma, down-regulated 1 | 221932 | 165478 | 149548 | 26, 8, 23 |
| 11 | HEPHL1 | hephaestin like 1 | 181333 | 214376 | 110218 | 30, 24, 25 |
| 11 | HNRNPUL2 | heterogeneous nuclear ribonucleoprotein U like 2 | 214753 | 162188 | 162222 | 41, 33, 16 |
| 11 | HIKESHI | Hikeshi, heat shock protein nuclear import factor | 149196 | 074266 | 149201 | 30, 34, 11 |
| 11 | HINFP | histone H4 transcription factor | 172273 | 172375 | 172350 | 39, 36, 14 |
| 11 | HTATIP2 | HIV-1 Tat interactive protein 2 | 109854 | 109851 | 185238 | 10, 37, 43 |
| 11 | HNRNPUL2- | HNRNPUL2-BSCL2 readthrough (NMD candidate) | 234857 | 177363 | 162188 | |
| | BSCL2 | | | | | |
| 11 | HIPK3 | homeodomain interacting protein kinase 3 | 110422 | 176102 | 110427 | 18, 29, 22 |
| 11 | HPS5 | HPS5, biogenesis of lysosomal organelles complex 2 subunit 2 | 110756 | 173432 | 110768 | 42, 22, 43 |
| 11 | HRASLS2 | HRAS like suppressor 2 | 133328 | 133321 | 176485 | 3, 37, 40 |
| 11 | HRASLS5 | HRAS like suppressor family member 5 | 168004 | 149742 | 133317 | 38, 17, 12 |
| 11 | HRAS | HRas proto-oncogene, GTPase | 174775 | 023191 | 161328 | 24, 6, 34 |
| 11 | HSPB2-C11orf52 | HSPB2-C11orf52 readthrough (NMD candidate) | 254445 | 170276 | 149300 | 30, 26, 14 |
| 11 | HMBS | hydroxymethylbilane synthase | 256269 | 160695 | 188486 | 21, 3, 7 |
| 11 | HSD17B12 | hydroxysteroid 17-beta dehydrogenase 12 | 149084 | 052841 | 166199 | 13, 17, 45 |
| 11 | HYLS1 | HYLS1, centriolar and ciliogenesis associated | 198331 | 237353 | 110060 | 6, 22, 38 |
| 11 | HYOU1 | hypoxia up-regulated 1 | 149428 | 137700 | 160695 | 23, 42, 45 |
| 11 | IGHMBP2 | immunoglobulin mu binding protein 2 | 132740 | 197345 | 172938 | 36, 38, 39 |
| 11 | IGSF22 | immunoglobulin superfamily member 22 | 179057 | 151117 | 110786 | 26, 29, 22 |
| 11 | IGSF9B | immunoglobulin superfamily member 9B | 080854 | 166118 | 166086 | 38, 32, |
| 11 | IPO7 | importin 7 | 205339 | 166471 | 166478 | 29, 24, 23 |
| 11 | INCENP | inner centromere protein | 149503 | 167996 | 168515 | 13, 39, 1 |
| 11 | IMMP1L | inner mitochondrial membrane peptidase subunit 1 | 148950 | 170946 | 109911 | 31, 33, 44 |
| 11 | INPPL1 | inositol polyphosphate phosphatase like 1 | 165458 | 165457 | 165462 | 26, 41, 20 |
| 11 | INSC | inscuteable homolog (Drosophila) | 188487 | 110680 | 110693 | 29, 34, 11 |
| 11 | INS-IGF2 | INS-IGF2 readthrough | 129965 | 167244 | 254647 | |
| 11 | INS | insulin | 254647 | 129965 | 180176 | |
| 11 | IGF2 | insulin like growth factor 2 | 167244 | 214026 | 129965 | 28, 26, 27 |
| 11 | INTS4 | integrator complex subunit 4 | 149262 | 087884 | 151364 | 9, 16, 43 |
| 11 | INTS5 | integrator complex subunit 5 | 185085 | 089597 | 255432 | 9, 32, 12 |
| 11 | ILK | integrin linked kinase | 166333 | 132275 | 166337 | 34, 40, 9 |
| 11 | IFITM1 | interferon induced transmembrane protein 1 | 185885 | 185201 | 142089 | 7, 34, 30 |
| 11 | IFITM10 | interferon induced transmembrane protein 10 | 244242 | 205864 | 250644 | 34, 6, 24 |
| 11 | IFITM2 | interferon induced transmembrane protein 2 | 185201 | 206013 | 185885 | 7, 34, 5 |
| 11 | IFITM3 | interferon induced transmembrane protein 3 | 142089 | 185885 | 182272 | 1, 43, 7 |
| 11 | IFITM5 | interferon induced transmembrane protein 5 | 206013 | 142102 | 185201 | 6, |
| 11 | IRF7 | interferon regulatory factor 7 | 185507 | 070047 | 099834 | 22, 5, 27 |
| 11 | IL10RA | interleukin 10 receptor subunit alpha | 110324 | 137747 | 255274 | 36, 39, 10 |
| 11 | IL18 | interleukin 18 | 150782 | 255292 | 150783 | 37, 13, 34 |
| 11 | IL18BP | interleukin 18 binding protein | 137496 | 137522 | 137497 | 37, 16, 33 |
| 11 | IFT46 | intraflagellar transport 46 | 118096 | 149582 | 095139 | 9, 31, 4 |
| 11 | IZUMO1R | IZUMO1 receptor, JUNO | 183560 | 110218 | 123901 | |
| 11 | JRKL | JRK-like | 183340 | 149231 | 149972 | |
| 11 | JAML | junction adhesion molecule like | 160593 | 149575 | 160588 | 36, 5, 39 |
| 11 | JAM3 | junctional adhesion molecule 3 | 166086 | 080854 | 151503 | 42, 1, 8 |
| 11 | KDELC2 | KDEL motif containing 2 | 178202 | 166323 | 110723 | 29, 1, 32 |
| 11 | KLHL35 | kelch like family member 35 | 149243 | 149273 | 158555 | 38, 15, 20 |
| 11 | KBTBD3 | kelch repeat and BTB domain containing 3 | 182359 | 170903 | 149313 | 31, 36, 2 |
| 11 | KBTBD4 | kelch repeat and BTB domain containing 4 | 123444 | 110536 | 196666 | 36, 38, 30 |
| 11 | KRTAP5-1 | keratin associated protein 5-1 | 205869 | 278919 | 205867 | 27, |
| 11 | KRTAP5-10 | keratin associated protein 5-10 | 204572 | 254997 | 204571 | 44, |
| 11 | KRTAP5-11 | keratin associated protein 5-11 | 204571 | 204572 | 158483 | 10, |
| 11 | KRTAP5-2 | keratin associated protein 5-2 | 205867 | 205869 | 196224 | 4, 10, 16 |
| 11 | KRTAP5-3 | keratin associated protein 5-3 | 196224 | 205867 | 241598 | |
| 11 | KRTAP5-4 | keratin associated protein 5-4 | 241598 | 196224 | 185940 | |
| 11 | KRTAP5-5 | keratin associated protein 5-5 | 185940 | 241598 | 205864 | 15, |
| 11 | KRTAP5-6 | keratin associated protein 5-6 | 205864 | 185940 | 244242 | |
| 11 | KRTAP5-7 | keratin associated protein 5-7 | 244411 | 172890 | 241233 | 38, |
| 11 | KRTAP5-8 | keratin associated protein 5-8 | 241233 | 244411 | 254997 | 38, |
| 11 | KRTAP5-9 | keratin associated protein 5-9 | 254997 | 241233 | 204572 | 24, 23, 38 |
| 11 | KIAA1549L | KIAA1549 like | 110427 | 110422 | 085063 | 8, 15, 14 |
| 11 | KIRREL3 | kin of IRRE like 3 (Drosophila) | 149571 | 110080 | 134954 | 15, 14, 36 |
| 11 | KIF18A | kinesin family member 18A | 121621 | 176697 | 169519 | 13, 10, 4 |
| 11 | KLC2 | kinesin light chain 2 | 174996 | 175115 | 174903 | 39, 26, 9 |
| 11 | LDHA | lactate dehydrogenase A | 134333 | 110768 | 166796 | 3, 13, 19 |
| 11 | LDHAL6A | lactate dehydrogenase A like 6A | 166800 | 166796 | 074319 | 38, 19, |
| 11 | LDHC | lactate dehydrogenase C | 166796 | 134333 | 166800 | 38, 10, 8 |
| 11 | LMNTD2 | lamin tail domain containing 2 | 185522 | 161328 | 099849 | |
| 11 | LARGE2 | LARGE xylosyl- and glucuronyltransferase 2 | 165905 | 121680 | 135365 | 18, 22, 32 |
| 11 | LAMTOR1 | late endosomal/lysosomal adaptor, MAPK and MTOR activator 1 | 149357 | 184154 | 110200 | 32, 27, 23 |
| 11 | LTBP3 | latent transforming growth factor beta binding protein 3 | 168056 | 142186 | 173465 | 14, 26, 10 |
| 11 | LAYN | layilin | 204381 | 183644 | 170145 | 6, 34, 8 |
| 11 | LBHD1 | LBH domain containing 1 | 162194 | 278615 | 214756 | 43, 30, 33 |
| 11 | LRP4 | LDL receptor related protein 4 | 134569 | 175216 | 149179 | 40, 16, 26 |
| 11 | LRP5 | LDL receptor related protein 5 | 162337 | 171067 | 110075 | 18, 16, 37 |
| 11 | LRFN4 | leucine rich repeat and fibronectin type III domain containing 4 | 173621 | 173599 | 173237 | 37, 3, 6 |
| 11 | LRRC10B | leucine rich repeat containing 10B | 204950 | 162148 | 011347 | 31, 29, 28 |
| 11 | LRRC32 | leucine rich repeat containing 32 | 137507 | 158636 | 182704 | 26, 28, 18 |
| 11 | LRRC4C | leucine rich repeat containing 4C | 148948 | 166352 | 166181 | 14, 15, 25 |
| 11 | LRRC55 | leucine rich repeat containing 55 | 183908 | 181273 | 134817 | 27, 8, 19 |
| 11 | LRRC56 | leucine rich repeat containing 56 | 161328 | 174775 | 185522 | 8, 38, 22 |
| 11 | LGR4 | leucine rich repeat containing G protein-coupled receptor 4 | 205213 | 109881 | 148943 | 11, 17, 45 |
| 11 | LRTOMT | leucine rich transmembrane and O-methyltransferase domain containing | 184154 | 137497 | 149357 | 40, 1, 9 |
| 11 | LUZP2 | leucine zipper protein 2 | 187398 | 255359 | 134343 | |
| 11 | LPXN | leupaxin | 110031 | 198283 | 186660 | 5, 36, 30 |
| 11 | LMO1 | LIM domain only 1 | 166407 | 166405 | 130413 | 28, 23, 14 |
| 11 | LMO2 | LIM domain only 2 | 135363 | 110429 | 135387 | 22, 45, 31 |
| 11 | LIN7C | lin-7 homolog C, crumbs cell polarity complex component | 148943 | 205213 | 176697 | 42, 18, 45 |
| 11 | LIPT2 | lipoyl(octanoyl) transferase 2 (putative) | 175536 | 175538 | 077514 | 4, 38, 12 |
| 11 | LDLRAD3 | low density lipoprotein receptor class A domain containing 3 | 179241 | 166326 | 110442 | 18, 42, 35 |
| 11 | LRRN4CL | LRRN4 C-terminal like | 177363 | 162191 | 234857 | 1, 9, 35 |
| 11 | LYVE1 | lymphatic vessel endothelial hyaluronan receptor 1 | 133800 | 110315 | 072952 | 36, 32, 1 |
| 11 | LSP1 | lymphocyte-specific protein 1 | 130592 | 130598 | 130595 | 41, 21, 2 |
| 11 | KAT5 | lysine acetyltransferase 5 | 172977 | 173039 | 172922 | 9, 1, 2 |
| 11 | KDM2A | lysine demethylase 2A | 173120 | 173156 | 173020 | 18, 22, 40 |
| 11 | KDM4D | lysine demethylase 4D | 186280 | 150316 | 235268 | 18, 38, 10 |
| 11 | KDM4E | lysine demethylase 4E | 235268 | 186280 | 263465 | |
| 11 | KMT2A | lysine methyltransferase 2A | 118058 | 167283 | 172425 | 22, 18, 26 |
| 11 | KMT5B | lysine methyltransferase 5B | 110066 | 110721 | 171067 | |
| 11 | MACROD1 | MACRO domain containing 1 | 133315 | 167770 | 126500 | 6, 14, 3 |
| 11 | MPEG1 | macrophage expressed 1 | 197629 | 110042 | 176495 | 36, 22, 42 |
| 11 | ME3 | malic enzyme 3 | 151376 | 149201 | 150687 | 29, 1, 2 |
| 11 | MADD | MAP kinase activating death domain | 110514 | 025434 | 134571 | 31, 43, 8 |
| 11 | MRGPRD | MAS related GPR family member D | 172938 | 132740 | 172935 | |
| 11 | MRGPRE | MAS related GPR family member E | 184350 | 182170 | 005801 | |
| 11 | MRGPRF | MAS related GPR family member F | 172935 | 172938 | 162341 | 44, 36, 43 |
| 11 | MRGPRG | MAS related GPR family member G | 182170 | 021762 | 184350 | |
| 11 | MRGPRX1 | MAS related GPR family member X1 | 170255 | 110786 | 183695 | |
| 11 | MRGPRX2 | MAS related GPR family member X2 | 183695 | 170255 | 177054 | 7, 38, 8 |
| 11 | MRGPRX3 | MAS related GPR family member X3 | 179826 | 166788 | 179817 | 14, 38, |
| 11 | MRGPRX4 | MAS related GPR family member X4 | 179817 | 179826 | 148965 | 25, |
| 11 | MAML2 | mastermind like transcriptional coactivator 2 | 184384 | 087053 | 149231 | 18, 42, 24 |
| 11 | MMP1 | matrix metallopeptidase 1 | 196611 | 166670 | 149968 | 45, 40, 10 |
| 11 | MMP10 | matrix metallopeptidase 10 | 166670 | 118113 | 196611 | 13, 18, 45 |
| 11 | MMP12 | matrix metallopeptidase 12 | 262406 | 149968 | 137745 | 23, 13, 18 |
| 11 | MMP13 | matrix metallopeptidase 13 | 137745 | 262406 | 137692 | 11, 6, 13 |
| 11 | MMP20 | matrix metallopeptidase 20 | 137674 | 137673 | 137675 | 10, 38, |
| 11 | MMP26 | matrix metallopeptidase 26 | 167346 | 167332 | 280021 | 10, 44, 8 |
| 11 | MMP27 | matrix metallopeptidase 27 | 137675 | 137674 | 118113 | 10, |
| 11 | MMP3 | matrix metallopeptidase 3 | 149968 | 196611 | 262406 | 10, 13, 18 |
| 11 | MMP7 | matrix metallopeptidase 7 | 137673 | 152558 | 137674 | 18, 23, 37 |
| 11 | MMP8 | matrix metallopeptidase 8 | 118113 | 137675 | 166670 | 5, 39, 7 |
| 11 | MED17 | mediator complex subunit 17 | 042429 | 182919 | 214376 | 11, 36, 45 |
| 11 | MED19 | mediator complex subunit 19 | 156603 | 156599 | 213593 | 29, 6, 41 |
| 11 | MCAM | melanoma cell adhesion molecule | 076706 | 110395 | 173456 | 45, 43, 24 |
| 11 | MTNR1B | melatonin receptor 1B | 134640 | 165323 | 180773 | |
| 11 | MAJIN | membrane anchored junction protein | 168070 | 149735 | 168062 | 31, 38, 36 |
| 11 | MFRP | membrane frizzled-related protein | 235718 | 223953 | 036672 | 14, 34, 28 |
| 11 | MS4A1 | membrane spanning 4-domains A1 | 156738 | 166930 | 071203 | 36, 22, 5 |
| 11 | MS4A10 | membrane spanning 4-domains A10 | 172689 | 166961 | 110104 | 16, |
| 11 | MS4A12 | membrane spanning 4-domains A12 | 071203 | 156738 | 204979 | 16, |
| 11 | MS4A13 | membrane spanning 4-domains A13 | 204979 | 071203 | 166959 | 38, |
| 11 | MS4A14 | membrane spanning 4-domains A14 | 166928 | 166927 | 166930 | 38, 22, 4 |
| 11 | MS4A15 | membrane spanning 4-domains A15 | 166961 | 214782 | 172689 | 20, 16, 10 |
| 11 | MS4A18 | membrane spanning 4-domains A18 | 214782 | 166959 | 166961 | |
| 11 | MS4A2 | membrane spanning 4-domains A2 | 149534 | 149516 | 110077 | 9, 5, 10 |
| 11 | MS4A3 | membrane spanning 4-domains A3 | 149516 | 149507 | 149534 | 34, 7, 5 |
| 11 | MS4A4A | membrane spanning 4-domains A4A | 110079 | 214787 | 166926 | 30, 32, 10 |
| 11 | MS4A4E | membrane spanning 4-domains A4E | 214787 | 110077 | 110079 | 15, |
| 11 | MS4A5 | membrane spanning 4-domains A5 | 166930 | 166928 | 156738 | 38, 30, |
| 11 | MS4A6A | membrane spanning 4-domains A6A | 110077 | 149534 | 214787 | |
| 11 | MS4A6E | membrane spanning 4-domains A6E | 166926 | 110079 | 166927 | 38, |
| 11 | MS4A7 | membrane spanning 4-domains A7 | 166927 | 166926 | 166928 | 22, 36, 29 |
| 11 | MS4A8 | membrane spanning 4-domains A8 | 166959 | 204979 | 214782 | 42, 30, 20 |
| 11 | MEN1 | menin 1 | 133895 | 168067 | 171219 | 21, 34, 22 |
| 11 | MPPED2 | metallophosphoesterase domain containing 2 | 066382 | 152219 | 170959 | 31, 25, 26 |
| 11 | MTA2 | metastasis associated 1 family member 2 | 149480 | 149016 | 149499 | 18, 3, 23 |
| 11 | METTL12 | methyltransferase like 12 | 214756 | 162194 | 204922 | 39, 36, 4 |
| 11 | METTL15 | methyltransferase like 15 | 169519 | 121621 | 182255 | 24, 42, 40 |
| 11 | MICALCL | MICAL C-terminal like | 133808 | 133816 | 197702 | |
| 11 | MARK2 | microtubule affinity regulating kinase 2 | 072518 | 168005 | 167771 | 30, 18, 21 |
| 11 | MICAL2 | microtubule associated monooxygenase, calponin and LIM domain containing 2 | 133816 | 050165 | 133808 | |
| 11 | MAP6 | microtubule associated protein 6 | 171533 | 149257 | 166391 | 31, 26, 8 |
| 11 | MDK | midkine (neurite growth-promoting factor 2) | 110492 | 149091 | 180720 | 12, 27, 37 |
| 11 | MTCH2 | mitochondrial carrier 2 | 109919 | 172247 | 165923 | 40, 38, 4 |
| 11 | MRPL11 | mitochondrial ribosomal protein L11 | 174547 | 174576 | 174516 | 29, 9, 21 |
| 11 | MRPL16 | mitochondrial ribosomal protein L16 | 166902 | 166900 | 134812 | 29, 9, 21 |
| 11 | MRPL17 | mitochondrial ribosomal protein L17 | 158042 | 166341 | 188124 | 1, 9, 21 |
| 11 | MRPL21 | mitochondrial ribosomal protein L21 | 197345 | 110090 | 132740 | 7, 3, 30 |
| 11 | MRPL23 | mitochondrial ribosomal protein L23 | 214026 | 130595 | 167244 | 31, 41, 22 |
| 11 | MRPL48 | mitochondrial ribosomal protein L48 | 175581 | 175582 | 181924 | 43, 15, 22 |
| 11 | MRPL49 | mitochondrial ribosomal protein L49 | 149792 | 162298 | 204710 | 2, 13, 28 |
| 11 | MAPK8IP1 | mitogen-activated protein kinase 8 interacting protein 1 | 121653 | 121671 | 234776 | 31, 26, 8 |
| 11 | MAP3K11 | mitogen-activated protein kinase kinase kinase 11 | 173327 | 173338 | 197136 | 34, 24, 36 |
| 11 | MAP4K2 | mitogen-activated protein kinase kinase kinase kinase 2 | 168067 | 168066 | 133895 | 7, 22, 41 |
| 11 | MOB2 | MOB kinase activator 2 | 182208 | 174672 | 184545 | 41, 15, 37 |
| 11 | MOGAT2 | monoacylglycerol O-acyltransferase 2 | 166391 | 171533 | 062282 | 37, 16, 42 |
| 11 | MRE11 | MRE11 homolog, double strand break repair nuclease | 020922 | 123901 | 168876 | |
| 11 | MTRNR2L8 | MT-RNR2-like 8 | 255823 | 133805 | 110315 | 40, 18, 2 |
| 11 | MUC15 | mucin 15, cell surface associated | 169550 | 134343 | 148942 | 32, 42, 11 |
| 11 | MUC5AC | mucin 5AC, oligomeric mucus/gel-forming | 215182 | 184956 | 117983 | |
| 11 | MUC5B | mucin 5B, oligomeric mucus/gel-forming | 117983 | 215182 | 078902 | 18, 16, 3 |
| 11 | MUC6 | mucin 6, oligomeric mucus/gel-forming | 184956 | 183020 | 215182 | 37, 33, 3 |
| 11 | MRVI1 | murine retrovirus integration site 1 homolog | 072952 | 133800 | 198730 | |
| 11 | MUS81 | MUS81 structure-specific endonuclease subunit | 172732 | 172803 | 172638 | 22, 45, 34 |
| 11 | MSANTD2 | Myb/SANT DNA binding domain containing 2 | 120458 | 149564 | 279342 | 22, 15, 26 |
| 11 | MSANTD4 | Myb/SANT DNA binding domain containing 4 with coiled-coils | 170903 | 152578 | 182359 | |
| 11 | MPZL2 | myelin protein zero like 2 | 149573 | 160588 | 198851 | 4, 30, 24 |
| 11 | MPZL3 | myelin protein zero like 3 | 160588 | 160593 | 149573 | 42, 29, 24 |
| 11 | MYRF | myelin regulatory factor | 124920 | 134780 | 134825 | 37, 8, 28 |
| 11 | MYEOV | myeloma overexpressed | 172927 | 162341 | 110092 | 3, 27, 16 |
| 11 | MYOD1 | myogenic differentiation 1 | 129152 | 188162 | 129159 | 25, 21, 15 |
| 11 | MYBPC3 | myosin binding protein C, cardiac | 134571 | 110514 | 066336 | 15, 19, 25 |
| 11 | MYO7A | myosin VIIA | 137474 | 254550 | 178795 | 1, 26, 32 |
| 11 | MTMR2 | myotubularin related protein 2 | 087053 | 166037 | 184384 | 44, 38, |
| 11 | NAA40 | N(alpha)-acetyltransferase 40, NatD catalytic subunit | 110583 | 167771 | 176340 | 39, 34, 40 |
| 11 | NAALAD2 | N-acetylated alpha-linked acidic dipeptidase 2 | 077616 | 255009 | 110172 | 31, 11, 38 |
| 11 | NAALADL1 | N-acetylated alpha-linked acidic dipeptidase like 1 | 168060 | 168061 | 146670 | 1, 26, 41 |
| 11 | NAT10 | N-acetyltransferase 10 | 135372 | 135387 | 166016 | 43, 24, 13 |
| 11 | NADSYN1 | NAD synthetase 1 | 172890 | 172893 | 244411 | |
| 11 | NDUFS3 | NADH:ubiquinone oxidoreductase core subunit S3 | 213619 | 149187 | 110536 | 29, 28, 31 |
| 11 | NDUFS8 | NADH:ubiquinone oxidoreductase core subunit S8 | 110717 | 006534 | 110719 | 1, 34, 14 |
| 11 | NDUFV1 | NADH:ubiquinone oxidoreductase core subunit V1 | 167792 | 084207 | 167799 | 3, 21, 15 |
| 11 | NDUFC2 | NADH:ubiquinone oxidoreductase subunit C2 | 151366 | 151365 | 159063 | 23, 31, 2 |
| 11 | NOX4 | NADPH oxidase 4 | 086991 | 077498 | 214414 | 17, 24, 45 |
| 11 | NCR3LG1 | natural killer cell cytotoxicity receptor 3 ligand 1 | 188211 | 070081 | 187486 | 29, 39, 23 |
| 11 | NDUFC2- | NDUFC2-KCTD14 readthrough | 259112 | 151364 | 151365 | |
| | KCTD14 | | | | | |
| 11 | NECTIN1 | nectin cell adhesion molecule 1 | 110400 | 154096 | 137699 | |
| 11 | NCAM1 | neural cell adhesion molecule 1 | 149294 | 188771 | 149292 | 8, 11, 26 |
| 11 | NELL1 | neural EGFL like 1 | 165973 | 165970 | 171714 | 8, 31, 25 |
| 11 | NEU3 | neuraminidase 3 | 162139 | 118363 | 171561 | 13, 7, 39 |
| 11 | NRXN2 | neurexin 2 | 110076 | 197891 | 068831 | 14, 26, 8 |
| 11 | NXPE1 | neurexophilin and PC-esterase domain family member 1 | 095110 | 076043 | 137634 | 16, 33, 38 |
| 11 | NXPE2 | neurexophilin and PC-esterase domain family member 2 | 204361 | 137634 | 182985 | 42, 25, |
| 11 | NXPE4 | neurexophilin and PC-esterase domain family member 4 | 137634 | 095110 | 204361 | 34, 16, 10 |
| 11 | NRGN | neurogranin | 154146 | 064199 | 019102 | 8, 6, 27 |
| 11 | NAV2 | neuron navigator 2 | 166833 | 129173 | 109851 | 40, 12, 20 |
| 11 | NPAS4 | neuronal PAS domain protein 4 | 174576 | 174669 | 174547 | 20, 44, 5 |
| 11 | NTM | neurotrimin | 182667 | 120451 | 183715 | 29, 11, 14 |
| 11 | NNMT | nicotinamide N-methyltransferase | 166741 | 109906 | 180425 | 19, 6, 34 |
| 11 | NLRX1 | NLR family member X1 | 160703 | 172350 | 172367 | 24, 42, 6 |
| 11 | NLRP10 | NLR family pyrin domain containing 10 | 182261 | 170683 | 175390 | |
| 11 | NLRP14 | NLR family pyrin domain containing 14 | 158077 | 149050 | 170748 | 45, 42, 8 |
| 11 | NLRP6 | NLR family pyrin domain containing 6 | 174885 | 185627 | 142102 | 42, 39, 5 |
| 11 | NCAPD3 | non-SMC condensin II complex subunit D3 | 151503 | 166086 | 151502 | 33, 29, 22 |
| 11 | NFRKB | nuclear factor related to kappaB binding protein | 170322 | 151715 | 170325 | 2, 6, 38 |
| 11 | NUMA1 | nuclear mitotic apparatus protein 1 | 137497 | 137496 | 184154 | 18, 33, 26 |
| 11 | NPAT | nuclear protein, coactivator of histone transcription | 149308 | 075239 | 149311 | 42, 22, 2 |
| 11 | NRIP3 | nuclear receptor interacting protein 3 | 175352 | 175348 | 175356 | 38, 8, 29 |
| 11 | NR1H3 | nuclear receptcr subfamily 1 group H member 3 | 025434 | 134575 | 110514 | 1, 36, 9 |
| 11 | NXF1 | nuclear RNA export factor 1 | 162231 | 185475 | 162236 | 39, 42, 44 |
| 11 | NUCB2 | nucleobindin 2 | 070081 | 011405 | 188211 | 31, 10, 33 |
| 11 | NUP160 | nucleoporin 160 | 030066 | 109920 | 149177 | 12, 6, 38 |
| 11 | NUP98 | nucleoporin 98 | 110713 | 129749 | 148985 | 38, 22, 6 |
| 11 | NAP1L4 | nucleosome assembly protein 1 like 4 | 205531 | 181649 | 110619 | 36, 39, 34 |
| 11 | NUDT22 | nudix hydrolase 22 | 149761 | 149743 | 110011 | 5, 4, 2 |
| 11 | NUDT8 | nudix hydrolase 8 | 167799 | 167792 | 167800 | 5, 33, 24 |
| 11 | OLFML1 | olfactomedin like 1 | 183801 | 170743 | 166387 | 36, 15, 42 |
| 11 | OMP | olfactory marker protein | 254550 | 149260 | 137474 | |
| 11 | OR1S1 | olfactory receptor family 1 subfamily S member 1 (gene/pseudogene) | 280204 | 197887 | 180475 | |
| 11 | OR1S2 | olfactory receptor family 1 subfamily S member 2 | 197887 | 186513 | 280204 | |
| 11 | OR10A2 | olfactpry receptor family 10 subfamily A member 2 | 170790 | 166363 | 170782 | |
| 11 | OR10A3 | olfactory receptor family 10 subfamily A member 3 | 170683 | 279000 | 182261 | |
| 11 | OR10A4 | olfactory receptor family 10 subfamily A member 4 | 170782 | 170790 | 166368 | |
| 11 | OR10A5 | olfactory receptor family 10 subfamily A member 5 | 166363 | 184933 | 170790 | |
| 11 | OR10A6 | olfactory receptor family 10 subfamily A member 6 (gene/pseudogene) | 279000 | 182334 | 170683 | 32, |
| 11 | OR10AG1 | olfactory receptor family 10 subfamily AG member 1 | 174970 | 167825 | 149133 | |
| 11 | OR10D3 | Olfactory receptor family 10 subfamily D member 3 (putative) | 197309 | 110002 | 197849 | |
| 11 | OR10G4 | olfactory receptor family 10 subfamily G member 4 | 254737 | 198674 | 236981 | |
| 11 | OR10G6 | Olfactory receptor family 10 subfamily G member 6 | 198674 | 196248 | 254737 | |
| 11 | OR10G7 | olfactory receptor family 10 subfamily G member 7 | 182634 | 234560 | 110002 | |
| 11 | OR10G8 | olfactory receptor family 10 subfamily G member 8 | 234560 | 236981 | 182634 | |
| 11 | OR10G9 | olfactory receptor family 10 subfamily G member 9 | 236981 | 254737 | 234560 | |
| 11 | OR10Q1 | olfactory receptor family 10 subfamily Q member 1 | 180475 | 280204 | 172772 | |
| 11 | OR10S1 | olfactory receptor family 10 subfamily S member 1 | 196248 | 181499 | 198674 | |
| 11 | OR10V1 | olfactory receptor family 10 subfamily V member 1 | 172289 | 166889 | 166900 | |
| 11 | OR10W1 | olfactory receptor family 10 subfamily W member 1 | 172772 | 180475 | 197786 | |
| 11 | OR2AG1 | olfactory receptor family 2 subfamily AG member 1 (gene/pseudogene) | 279486 | 188124 | 184933 | |
| 11 | OR2AG2 | olfactory receptor family 2 subfamily AG member 2 | 188124 | 158042 | 279486 | |
| 11 | OR2AT4 | olfactory receptor family 2 subfamily AT member 4 | 171561 | 162139 | 137491 | |
| 11 | OR2D2 | olfactory receptor family 2 subfamily D member 2 | 166368 | 170782 | 178358 | |
| 11 | OR2D3 | olfactory receptor family 2 subfamily D member 3 | 178358 | 166368 | 149054 | 19, 38, |
| 11 | OR4A15 | olfactory receptor family 4 subfamily A member 15 | 181958 | 181961 | 181939 | |
| 11 | OR4A16 | olfactory receptor family 4 subfamily A member 16 | 181961 | 150244 | 181958 | |
| 11 | OR4A47 | olfactory receptor family 4 subfamily A member 47 | 237388 | 176540 | 182053 | |
| 11 | OR4A5 | olfactory receptor family 4 subfamily A member 5 | 221840 | 225997 | 150244 | |
| 11 | OR4A8 | olfactory receptor family 4 subfamily A member 8 (gene/pseudogene) | 225997 | 185926 | 221840 | |
| 11 | OR4B1 | olfactory receptor family 4 subfamily B member 1 | 175619 | 149177 | 172208 | |
| 11 | OR4C11 | olfactory receptor family 4 subfamily C member 11 | 172188 | 279514 | 181927 | |
| 11 | OR4C12 | olfactory receptor family 4 subfamily C member 12 | 221954 | 258817 | 185926 | |
| 11 | OR4C13 | olfactory receptor family 4 subfamily C member 13 | 258817 | 086205 | 221954 | |
| 11 | OR4C15 | olfactory receptor family 4 subfamily C member 15 | 181939 | 181958 | 279514 | |
| 11 | OR4C16 | olfactory receptor family 4 subfamily C member 16 (gene/pseudogene) | 279514 | 181939 | 172188 | |
| 11 | OR4C3 | olfactory receptor family 4 subfamily C member 3 | 176547 | 176555 | 176540 | |
| 11 | OR4C46 | olfactory receptor family 4 subfamily C member 46 | 185926 | 221954 | 225997 | |
| 11 | OR4C5 | olfactory receptor family 4 subfamily C member 5 (gene/pseudogene) | 176540 | 176547 | 237388 | |
| 11 | OR4C6 | olfactory receptor family 4 subfamily C member 6 | 181903 | 174982 | 279761 | 32, |
| 11 | OR4D10 | olfactory receptor family 4 subfamily D member 10 | 254466 | 166884 | 176200 | |
| 11 | OR4D11 | olfactory receptor family 4 subfamily D member 11 | 176200 | 254466 | 172742 | |
| 11 | OR4D5 | olfactory receptor family 4 subfamily D member 5 | 171014 | 181518 | 181499 | |
| 11 | OR4D6 | olfactory receptor family 4 subfamily D member 6 | 166884 | 172320 | 254466 | |
| 11 | OR4D9 | olfactory receptor family 4 subfamily D member 9 | 172742 | 176200 | 110048 | |
| 11 | OR4P4 | olfactory receptor family 4 subfamily P member 4 | 181927 | 172188 | 174982 | |
| 11 | OR4S1 | olfactory receptor family 4 subfamily S member 1 | 176555 | 176567 | 176547 | |
| 11 | OR4S2 | olfactory receptor family 4 subfamily S member 2 | 174982 | 181927 | 181903 | |
| 11 | OR4X1 | olfactory receptor family 4 subfamily X member 1 (gene/pseudogene) | 176567 | 172208 | 176555 | |
| 11 | OR4X2 | olfactory receptor family 4 subfamily X member 2 (gene/pseudogene) | 172208 | 175619 | 176567 | |
| 11 | OR5A1 | olfactory receptor family 5 subfamily A member 1 | 172320 | 172324 | 166884 | |
| 11 | OR5A2 | olfactory receptor family 5 subfamily A member 2 | 172324 | 176495 | 172320 | |
| 11 | OR5AK2 | olfactory receptor family 5 subfamily AK member 2 | 181273 | 241356 | 183908 | |
| 11 | OR5AL1 | olfactory receptor family 5 subfamily AL member 1 (gene/pseudogene) | 272987 | 172199 | 279961 | |
| 11 | OR5AN1 | olfactory receptor family 5 subfamily AN member 1 | 176495 | 197629 | 172324 | |
| 11 | OR5AP2 | olfactory receptor family 5 subfamily AP member 2 | 172464 | 255012 | 172459 | 8, |
| 11 | OR5AR1 | olfactory receptor family 5 subfamily AR member 1 (gene/pseudogene) | 172459 | 172464 | 174914 | |
| 11 | OR5AS1 | olfactory receptor family 5 subfamily AS member 1 | 181785 | 149133 | 172154 | |
| 11 | OR5B12 | olfactory receptor family 5 subfamily B member 12 | 172362 | 172365 | 198283 | |
| 11 | OR5B17 | olfactory receptor family 5 subfamily B member 17 | 197786 | 172772 | 172769 | |
| 11 | OR5B2 | olfactory receptor family 5 subfamily B member 2 | 172365 | 172769 | 172362 | |
| 11 | OR5B21 | olfactory receptor family 5 subfamily B member 21 | 198283 | 172362 | 110031 | |
| 11 | OR5B3 | olfactory receptor family 5 subfamily B member 3 | 172769 | 197786 | 172365 | |
| 11 | OR5D13 | olfactory receptor family 5 subfamily D member 13 (gene/pseudogene) | 279761 | 181903 | 186113 | |
| 11 | OR5D14 | olfactory receptor family 5 subfamily D member 14 | 186113 | 279761 | 279395 | |
| 11 | OR5D16 | olfactory receptor family 5 subfamily D member 16 | 205029 | 205030 | 124900 | |
| 11 | OR5D18 | olfactory receptor family 5 subfamily D member 18 | 186119 | 279395 | 205030 | |
| 11 | OR5F1 | olfactory receptor family 5 subfamily F member 1 | 149133 | 174970 | 181785 | |
| 11 | OR5G3 | olfactory receptor family 5 subfamily G member 3 (gene/pseudogene) | 241356 | 172457 | 181273 | |
| 11 | OR5I1 | olfactory receptor family 5 subfamily I member 1 | 167825 | 187612 | 174970 | |
| 11 | OR5J2 | olfactory receptor family 5 subfamily J member 2 | 174957 | 181752 | 254658 | |
| 11 | OR5L1 | olfactory receptor family 5 subfamily L member 1 (gene/pseudogene) | 279395 | 186113 | 186119 | |
| 11 | OR5L2 | olfactory receptor family 5 subfamily L member 2 | 205030 | 186119 | 205029 | |
| 11 | OR5M1 | olfactory receptor family 5 subfamily M member 1 | 255012 | 254834 | 172464 | |
| 11 | OR5M10 | olfactory receptor family 5 subfamily M member 10 | 254834 | 255223 | 255012 | |
| 11 | OR5M11 | olfactory receptor family 5 subfamily M member 11 | 255223 | 181371 | 254834 | |
| 11 | OR5M3 | olfactory receptor family 5 subfamily M member 3 | 174937 | 150269 | 181371 | |
| 11 | OR5M8 | olfactory receptor family 5 subfamily M member 8 | 181371 | 174937 | 255223 | |
| 11 | OR5M9 | olfactory receptor family 5 subfamily M member 9 | 150269 | 279961 | 174937 | |
| 11 | OR5P2 | olfactory receptor family 5 subfamily P member 2 | 183303 | 183378 | 182334 | |
| 11 | OR5P3 | olfactory receptor family 5 subfamily P member 3 | 182334 | 183303 | 279000 | |
| 11 | OR5R1 | olfactory receptor family 5 subfamily R member 1 (gene/pseudogene) | 279961 | 272987 | 150269 | |
| 11 | OR5T1 | olfactory receptor family 5 subfamily T member 1 | 181698 | 172489 | 181693 | |
| 11 | OR5T2 | olfactory receptor family 5 subfamily T member 2 | 181718 | 254658 | 172489 | |
| 11 | OR5T3 | olfactory receptor family 5 subfamily T member 3 | 172489 | 181718 | 181698 | |
| 11 | OR5W2 | olfactory receptor family 5 subfamily W member 2 | 187612 | 124900 | 167825 | |
| 11 | OR51A2 | olfactory receptor family 51 subfamily A member 2 | 205496 | 205497 | 176798 | |
| 11 | OR51A4 | olfactory receptor family 51 subfamily A member 4 | 205497 | 278870 | 205496 | |
| 11 | OR51A7 | olfactory receptor family 51 subfamily A member 7 | 176895 | 176900 | 176893 | |
| 11 | OR51B2 | olfactory receptor family 51 subfamily B member 2 (gene/pseudogene) | 279012 | 183251 | 242180 | |
| 11 | OR51B4 | olfactory receptor family 51 subfamily B member 4 | 183251 | 213931 | 279012 | 34, |
| 11 | OR51B5 | olfactory receptor family 51 subfamily B member 5 | 242180 | 279012 | 176239 | 34, 7, 35 |
| 11 | OR51B6 | olfactory receptor family 51 subfamily B member 6 | 176239 | 242180 | 184698 | |
| 11 | OR51D1 | olfactory receptor family 51 subfamily D member 1 | 197428 | 167333 | 180785 | |
| 11 | OR51E1 | olfactory receptor family 51 subfamily E member 1 | 180785 | 197428 | 167332 | 17, 16, |
| 11 | OR51E2 | olfactory receptor family 51 subfamily E member 2 | 167332 | 180785 | 167346 | 33, 44, 20 |
| 11 | OR51F1 | olfactory receptor family 51 subfamily F member 1 (gene/pseudogene) | 280021 | 167346 | 279270 | |
| 11 | OR51F2 | olfactory receptor family 51 subfamily F member 2 | 176925 | 279270 | 176922 | |
| 11 | OR51G1 | olfactory receptor family 51 subfamily G member 1 (gene/pseudogene) | 278870 | 176893 | 205497 | |
| 11 | OR51G2 | olfactory receptor family 51 subfamily G member 2 | 176893 | 176895 | 278870 | |
| 11 | OR51H1 | olfactory receptor family 51 subfamily H member 1 | 176904 | 176922 | 176900 | |
| 11 | OR51I1 | olfactory receptor family 51 subfamily I member 1 | 167359 | 167360 | 187918 | |
| 11 | OR51I2 | olfactory receptor family 51 subfamily I member 2 | 187918 | 167359 | 181609 | |
| 11 | OR51J1 | olfactory receptor family 51 subfamily J member 1 (gene/pseudogene) | 184321 | 184698 | 167360 | |
| 11 | OR51L1 | olfactory receptor family 51 subfamily L member 1 | 176798 | 205496 | 205495 | |
| 11 | OR51M1 | olfactory receptor family 51 subfamily M member 1 | 184698 | 176239 | 184321 | |
| 11 | OR51Q1 | olfactory receptor family 51 subfamily Q member 1 (gene/pseudogene) | 167360 | 184321 | 167359 | |
| 11 | OR51S1 | olfactory receptor family 51 subfamily S member 1 | 176922 | 176925 | 176904 | |
| 11 | OR51T1 | olfactory receptor family 51 subfamily T member 1 | 176900 | 176904 | 176895 | |
| 11 | OR51V1 | olfactory receptor family 51 subfamily V member 1 | 176742 | 176748 | 244734 | |
| 11 | OR52A1 | olfactory receptor family 52 subfamily A member 1 | 182070 | 171944 | 176748 | |
| 11 | OR52A5 | olfactory receptor family 52 subfamily A member 5 | 171944 | 273085 | 182070 | |
| 11 | OR52B2 | olfactory receptor family 52 subfamily B member 2 | 255307 | 180919 | 175485 | |
| 11 | OR52B4 | olfactory receptor family 52 subfamily B member 4 (gene/pseudogene) | 221996 | 167325 | 132109 | 40, |
| 11 | OR52B6 | olfactory receptor family 52 subfamily B member 6 | 187747 | 181616 | 121236 | |
| 11 | OR52D1 | olfactory receptor family 52 subfamily D member 1 | 181609 | 187918 | 175520 | |
| 11 | OR52E1 | olfactory receptor family 52 subfamily E member 1 (gene/pseudogene) | 273085 | 176787 | 171944 | |
| 11 | OR52E2 | olfactory receptor family 52 subfamily E member 2 | 176787 | 205495 | 273085 | |
| 11 | OR52E4 | olfactory receptor family 52 subfamily E member 4 | 180974 | 183269 | 277932 | |
| 11 | OR52E5 | Olfactory receptor family 52 subfamily E member 5 | 277932 | 180974 | 184478 | |
| 11 | OR52E6 | olfactory receptor family 52 subfamily E member 6 | 205409 | 180988 | 183269 | |
| 11 | OR52E8 | olfactory receptor family 52 subfamily E member 8 | 183269 | 205409 | 180974 | |
| 11 | OR52H1 | olfactory receptor family 52 subfamily H member 1 | 181616 | 175518 | 187747 | |
| 11 | OR52I1 | olfactory receptor family 52 subfamily I member 1 | 232268 | 226288 | 167333 | |
| 11 | OR52I2 | olfactory receptor family 52 subfamily I member 2 | 226288 | 171987 | 232268 | |
| 11 | OR52J3 | olfactory receptor family 52 subfamily J member 3 | 205495 | 176798 | 176787 | |
| 11 | OR52K1 | olfactory receptor family 52 subfamily K member 1 | 196778 | 181963 | 197790 | |
| 11 | OR52K2 | olfactory receptor family 52 subfamily K member 2 | 181963 | 132109 | 196778 | |
| 11 | OR52L1 | olfactory receptor family 52 subfamily L member 1 | 183313 | 188691 | 183389 | |
| 11 | OR52M1 | olfactory receptor family 52 subfamily M member 1 | 197790 | 196778 | 171987 | |
| 11 | OR52N1 | olfactory receptor family 52 subfamily N member 1 | 181001 | 181009 | 180988 | |
| 11 | OR52N2 | olfactory receptor family 52 subfamily N member 2 | 180988 | 181001 | 205409 | |
| 11 | OR52N4 | olfactory receptor family 52 subfamily N member 4 (gene/pseudogene) | 181074 | 181023 | 181009 | |
| 11 | OR52N5 | olfactory receptor family 52 subfamily N member 5 | 181009 | 181074 | 181001 | |
| 11 | OR52R1 | olfactory receptor family 52 subfamily R member 1 (gene/pseudogene) | 279270 | 280021 | 176925 | |
| 11 | OR52W1 | olfactory receptor family 52 subfamily W member 1 | 175485 | 255307 | 180878 | |
| 11 | OR52Z1 | olfactory receptor family 52 subfamily Z member 1 (gene/pseudogene) | 176748 | 182070 | 176742 | |
| 11 | OR56A1 | olfactory receptor family 56 subfamily A member 1 | 180934 | 183389 | 180919 | |
| 11 | OR56A3 | olfactory receptor family 56 subfamily A member 3 | 184478 | 277932 | 188691 | |
| 11 | OR56A4 | olfactory receptor family 56 subfamily A member 4 | 183389 | 183313 | 180934 | |
| 11 | OR56A5 | olfactory receptor family 56 subfamily A member 5 | 188691 | 184478 | 183313 | |
| 11 | OR56B1 | olfactory receptor family 56 subfamily B member 1 | 181023 | 132274 | 181074 | 39, |
| 11 | OR56B4 | olfactory receptor family 56 subfamily B member 4 | 180919 | 180934 | 255307 | |
| 11 | OR6A2 | olfactory receptor family 6 subfamily A member 2 | 184933 | 279486 | 166363 | |
| 11 | OR6M1 | olfactory receptor family 6 subfamily M member 1 | 196099 | 221931 | 204300 | |
| 11 | OR6Q1 | olfactory receptor family 6 subfamily Q member 1 (gene/pseudogene) | 279051 | 186509 | 172377 | |
| 11 | OR6T1 | olfactory receptor family 6 subfamily T member 1 | 181499 | 171014 | 196248 | |
| 11 | OR6X1 | olfactory receptor family 6 subfamily X member 1 | 221931 | 166261 | 196099 | |
| 11 | OR8A1 | olfactory receptor family 8 subfamily A member 1 | 196119 | 170953 | 154143 | 32, |
| 11 | OR8B12 | olfactory receptor family 8 subfamily B member 12 | 170953 | 197125 | 196119 | |
| 11 | OR8B2 | olfactory receptor family 8 subfamily B member 2 | 204293 | 279116 | 196661 | |
| 11 | OR8B3 | olfactory receptor family 8 subfamily B member 3 | 196661 | 204293 | 280090 | 23, |
| 11 | OR8B4 | olfactory receptor family 8 subfamily B member 4 (gene/pseudogene) | 280090 | 196661 | 197125 | |
| 11 | OR8B8 | olfactory receptor family 8 subfamily B member 8 | 197125 | 280090 | 170953 | |
| 11 | OR8D1 | olfactory receptor family 8 subfamily D member 1 | 196341 | 255298 | 279116 | |
| 11 | OR8D2 | olfactory receptor family 8 subfamily D member 2 (gene/pseudogene) | 279116 | 196341 | 204293 | |
| 11 | OR8D4 | olfactory receptor family 8 subfamily D member 4 | 181518 | 204300 | 171014 | 25, 38, |
| 11 | OR8G1 | olfactory receptor family 8 subfamily G member 1 (gene/pseudogene) | 197849 | 197309 | 255298 | |
| 11 | OR8G5 | olfactory receptor family 8 subfamily G member 5 | 255298 | 197849 | 196341 | 38, |
| 11 | OR8H1 | olfactory receptor family 8 subfamily H member 1 | 181693 | 181698 | 280314 | |
| 11 | OR8H2 | olfactory receptor family 8 subfamily H member 2 | 181767 | 172154 | 181761 | |
| 11 | OR8H3 | olfactory receptor family 8 subfamily H member 3 | 181761 | 181767 | 167822 | |
| 11 | OR8I2 | olfactory receptor family 8 subfamily I member 2 | 172154 | 181785 | 181767 | |
| 11 | OR8J1 | olfactory receptor family 8 subfamily J member 1 | 172487 | 150261 | 172199 | |
| 11 | OR8J2 | olfactory receptor family 8 subfamily J member 2 (gene/pseudogene) | 254658 | 174957 | 181718 | |
| 11 | OR8J3 | olfactory receptor family 8 subfamily J member 3 | 167822 | 181761 | 181752 | |
| 11 | OR8K1 | olfactory receptor family 8 subfamily K member 1 | 150261 | 280314 | 172487 | |
| 11 | OR8K3 | olfactory receptor family 8 subfamily K member 3 (gene/pseudogene) | 280314 | 181693 | 150261 | |
| 11 | OR8K5 | olfactory receptor family 8 subfamily K member 5 | 181752 | 167822 | 174957 | |
| 11 | OR8U1 | olfactory receptor family 8 subfamily U member 1 | 172199 | 172487 | 272987 | |
| 11 | OR9G1 | olfactory receptor family 9 subfamily G member 1 | 174914 | 172459 | 172457 | |
| 11 | OR9G4 | olfactory receptor family 9 subfamily G member 4 | 172457 | 174914 | 241356 | |
| 11 | OR9I1 | olfactory receptor family 9 subfamily I member 1 | 172377 | 279051 | 186513 | |
| 11 | OR9Q1 | olfactory receptor family 9 subfamily Q member 1 | 186509 | 198561 | 279051 | |
| 11 | OR9Q2 | olfactory receptor family 9 subfamily Q member 2 | 186513 | 172377 | 197887 | |
| 11 | OOSP2 | oocyte secreted protein 2 | 149507 | 134827 | 149516 | 38, |
| 11 | OPCML | opioid binding protein/cell adhesion molecule like | 183715 | 182667 | 166118 | 29, 8, 14 |
| 11 | ORAOV1 | oral cancer overexpressed 1 | 149716 | 110092 | 281781 | 18, 40, 37 |
| 11 | OTOG | otogelin | 188162 | 006611 | 129152 | 38, |
| 11 | OTUB1 | OTU deubiquitinase, ubiquitin aldehyde binding 1 | 167770 | 256100 | 133315 | 3, 13, 43 |
| 11 | OAF | out at first homolog | 184232 | 137699 | 137709 | 19, 11, 9 |
| 11 | ODF3 | outer dense fiber of sperm tails 3 | 177947 | 188076 | 177963 | 38, |
| 11 | OVOL1 | ovo like transcriptional repressor 1 | 172818 | 254470 | 172757 | |
| 11 | OVCH2 | ovochymase 2 (gene/pseudogene) | 183378 | 166394 | 183303 | 24, 17, |
| 11 | OSBP | oxysterol binding protein | 110048 | 172742 | 166889 | 1, 14, 40 |
| 11 | OSBPL5 | oxysterol binding protein like 5 | 021762 | 110619 | 182170 | 39, 42, 26 |
| 11 | PAK1 | p21 (RAC1) activated kinase 1 | 149269 | 178795 | 074201 | 10, 24, 23 |
| 11 | PIDD1 | p53-induced death domain protein 1 | 177595 | 274897 | 177600 | 26, 25, 41 |
| 11 | PAX6 | paired box 6 | 007372 | 109911 | 049449 | 28, 14, 31 |
| 11 | PHOX2A | paired like homeobox 2a | 165462 | 165458 | 162129 | 26, 24, 8 |
| 11 | PANX1 | pannexin 1 | 110218 | 181333 | 183560 | 6, 1, 4 |
| 11 | PANX3 | pannexin 3 | 154143 | 196119 | 154144 | |
| 11 | PTH | parathyroid hormone | 152266 | 148925 | 197601 | 29, 10, 12 |
| 11 | PDDC1 | Parkinson disease 7 domain containing 1 | 177225 | 177156 | 184524 | 3, 34, 17 |
| 11 | PARVA | parvin alpha | 197702 | 133808 | 187079 | 42, 26, 29 |
| 11 | PATL1 | PAT1 homolog 1, processing body mRNA decay factor | 166889 | 110048 | 172289 | 23, 5, 9 |
| 11 | PNPLA2 | patatin like phospholipase domain containing 2 | 177666 | 177600 | 177685 | 22, 6, 28 |
| 11 | PKNOX2 | PBX/knotted 1 homeobox 2 | 165495 | 150433 | 149557 | 40, 8, 14 |
| 11 | PCF11 | PCF11 cleavage and polyadenylation factor subunit | 165494 | 137502 | 137494 | |
| 11 | PDZD3 | PDZ domain containing 3 | 172367 | 160703 | 248712 | 17, 16, 3 |
| 11 | PCNX3 | pecanex homolog 3 (Drosophila) | 197136 | 173327 | 213445 | 26, 31, 5 |
| 11 | PELI3 | pellino E3 ubiquitin protein ligase family member 3 | 174516 | 174547 | 254986 | 1, 27, 26 |
| 11 | PGA3 | pepsinogen 3, group I (pepsinogen A) | 229859 | 167987 | 229183 | 37, 13, 31 |
| 11 | PGA4 | pepsinogen 4, group I (pepsinogen A) | 229183 | 229859 | 256713 | 37, 13, 25 |
| 11 | PGA5 | pepsinogen 5, group I (pepsinogen A) | 256713 | 229183 | 167992 | 37, 13, 17 |
| 11 | PAMR1 | peptidase domain containing associated with muscle regeneration 1 | 149090 | 110436 | 179431 | 45, 1, 35 |
| 11 | PRDX5 | peroxiredoxin 5 | 126432 | 173113 | 168071 | 41, 43, 2 |
| 11 | PEX16 | peroxisomal biogenesis factor 16 | 121680 | 234776 | 165905 | 6, 3, 26 |
| 11 | PHRF1 | PHD and ring finger domains 1 | 070047 | 099849 | 185507 | 21, 34, 41 |
| 11 | PHF21A | PHD finger protein 21A | 135365 | 165905 | 157613 | 9, 22, 7 |
| 11 | PICALM | phosphatidylinositol binding clathrin assembly protein | 073921 | 150676 | 074266 | 29, 26, 40 |
| 11 | PITPNM1 | phosphatidylinositol transfer protein membrane associated 1 | 110697 | 110711 | 167797 | 34, 18, 1 |
| 11 | PIK3C2A | phosphatidylinositol-4-phosphate 3-kinase catalytic subunit type 2 alpha | 011405 | 110700 | 070081 | 45, 40, 25 |
| 11 | PTDSS2 | phosphatidylserine synthase 2 | 174915 | 185101 | 023191 | 34, 38, 21 |
| 11 | PDE2A | phosphodiesterase 2A | 186642 | 162129 | 186635 | 9, 8, 36 |
| 11 | PDE3B | phosphodiesterase 3B | 152270 | 129084 | 186104 | 28, 31, 45 |
| 11 | PACS1 | phosphofurin acidic cluster sorting protein 1 | 175115 | 087365 | 174996 | 34, 41, 39 |
| 11 | PGM2L1 | phosphoglucomutase 2 like 1 | 165434 | 149380 | 175538 | 6, 8, 43 |
| 11 | PLA2G16 | phospholipase A2 group XVI | 176485 | 133328 | 184743 | 1, 26, 11 |
| 11 | PLCB3 | phospholipase C beta 3 | 149782 | 173457 | 002330 | 1, 35, 16 |
| 11 | PIH1D2 | PIH1 domain containing 2 | 150773 | 150768 | 150776 | 43, 31, 30 |
| 11 | PIWIL4 | piwi like RNA-mediated gene silencing 4 | 134627 | 257057 | 166025 | 10, 26, 38 |
| 11 | PLET1 | placenta expressed transcript 1 | 188771 | 150787 | 149294 | |
| 11 | PKP3 | plakophilin 3 | 184363 | 182272 | 185187 | 24, 16, 28 |
| 11 | PAFAH1B2 | platelet activating factor acetylhydrolase 1b catalytic subunit 2 | 168092 | 160584 | 149577 | 24, 37, 26 |
| 11 | PDGFD | platelet derived growth factor D | 170962 | 187240 | 170967 | 42, 2, 22 |
| 11 | PLEKHA7 | pleckstrin homology domain containing A7 | 166689 | 110696 | 110700 | 26, 40, 17 |
| 11 | PLEKHB1 | pleckstrin homology domain containing B1 | 021300 | 054965 | 175582 | 8, 14, 17 |
| 11 | PHLDA2 | pleckstrin homology like domain family A member 2 | 181649 | 110628 | 205531 | 32, 28, 16 |
| 11 | PHLDB1 | pleckstrin homology like domain family B member 1 | 019144 | 095139 | 118094 | 26, 27, 12 |
| 11 | GALNT18 | polypeptide N-acetylgalactosaminyltransferase 18 | 110328 | 236287 | 254598 | 24, 36, 8 |
| 11 | PGAP2 | post-GPI attachment to proteins 2 | 148985 | 110713 | 177105 | 21, 38, 5 |
| 11 | KCTD14 | potassium channel tetramerization domain containing 14 | 151364 | 149262 | 259112 | 18, 6, 27 |
| 11 | KCTD21 | potassium channel tetramerization domain containing 21 | 188997 | 159063 | 118369 | 43, 24, 8 |
| 11 | KCNK4 | potassium two pore domain channel subfamily K member 4 | 182450 | 173264 | 219435 | 25, 8, 27 |
| 11 | KCNK7 | potassium two pore domain channel subfamily K member 7 | 173338 | 173442 | 173327 | 15, 32, 20 |
| 11 | KCNA4 | potassium voltage-gated channel subfamily A member 4 | 182255 | 169519 | 131808 | 22, 20, 8 |
| 11 | KCNC1 | potassium voltage-gated channel subfamily C member 1 | 129159 | 129152 | 129158 | 14, 8, 30 |
| 11 | KCNE3 | potassium voltage-gated channel subfamily E regulatory subunit 3 | 175538 | 165434 | 175536 | 1, 37, 3 |
| 11 | KCNJ1 | potassium voltage-gated channel subfamily J member 1 | 151704 | 151702 | 120457 | 17, 40, 42 |
| 11 | KCNJ11 | potassium voltage-gated channel subfamily J member 11 | 187486 | 188211 | 006071 | |
| 11 | KCNJ5 | potassium voltage-gated channel subfamily J member 5 | 120457 | 151704 | 174370 | 2, 39, 36 |
| 11 | KCNQ1 | potassium voltage-gated channel subfamily Q member 1 | 053918 | 070985 | 129757 | 40, 2, 16 |
| 11 | POU2AF1 | POU class 2 associating factor 1 | 110777 | 214290 | 137707 | |
| 11 | POU2F3 | POU class 2 homeobox 3 | 137709 | 184232 | 181264 | 13, 16, 3 |
| 11 | PPFIBP2 | PPFIA binding protein 2 | 166387 | 183801 | 166394 | |
| 11 | PRDM10 | PR/SET domain 10 | 170325 | 170322 | 084234 | 13, 12, 7 |
| 11 | PRDM11 | PR/SET domain 11 | 019485 | 175274 | 019505 | 43, 9, 26 |
| 11 | PRPF19 | pre-mRNA processing factor 19 | 110107 | 149506 | 110108 | 9, 21, 3 |
| 11 | PANO1 | proapoptotic nucleolar protein 1 | 274897 | 177542 | 177595 | |
| 11 | PGR | progesterone receptor | 082175 | 170647 | 137672 | 25, 44, 26 |
| 11 | PRR5L | proline rich 5 like | 135362 | 110442 | 175104 | 36, 24, 42 |
| 11 | PRRG4 | proline rich and Gla domain 4 | 135378 | 186714 | 060749 | 32, 15, 44 |
| 11 | P4HA3 | prolyl 4-hydroxylase subunit alpha 3 | 149380 | 214517 | 165434 | 11, 24, 18 |
| 11 | PRCP | prolylcarboxypeptidase | 137509 | 182103 | 165490 | 43, 13, 15 |
| 11 | PCSK7 | proprotein convertase subtilisin/kexin type 7 | 160613 | 149591 | 167257 | 43, 39, 34 |
| 11 | PTGDR2 | prostaglandin D2 receptor 2 | 183134 | 110104 | 149506 | 28, 39, 15 |
| 11 | PATE1 | prostate and testis expressed 1 | 171053 | 134940 | 196844 | 33, 38, 8 |
| 11 | PATE2 | prostate and testis expressed 2 | 196844 | 171053 | 236027 | 33, |
| 11 | PATE3 | prostate and testis expressed 3 | 236027 | 196844 | 237353 | 38, |
| 11 | PATE4 | prostate and testis expressed 4 | 237353 | 236027 | 198331 | 33, |
| 11 | PRSS23 | protease, serine 23 | 150687 | 151376 | 174804 | |
| 11 | PAAF1 | proteasomal ATPase associated factor 1 | 175575 | 181924 | 187726 | 1, 30, 9 |
| 11 | PSMC3 | proteasome 26S subunit, ATPase 3 | 165916 | 165915 | 165917 | 34, 21, 9 |
| 11 | PSMD13 | proteasome 26S subunit, non-ATPase 13 | 185627 | 142082 | 174885 | 3, 30, 21 |
| 11 | PSMA1 | proteasome subunit alpha 1 | 129084 | 256206 | 152270 | 30, 34, 7 |
| 11 | PRMT3 | protein arginine methyltransferase 3 | 185238 | 109854 | 165970 | 6, 10, 31 |
| 11 | PACSIN3 | protein kinase C and casein kinase substrate in neurons 3 | 165912 | 149182 | 134574 | 9, 25, 1 |
| 11 | PRKCDBP | protein kinase C delta binding protein | 170955 | 110148 | 166311 | 34, 35, 38 |
| 11 | PPP1CA | protein phosphatase 1 catalytic subunit alpha | 172531 | 175505 | 175463 | 41, 21, 9 |
| 11 | PPP1R14B | protein phosphatase 1 regulatory inhibitor subunit 14B | 173457 | 173486 | 149782 | 15, 34, 22 |
| 11 | PPP1R32 | protein phosphatase 1 regulatory subunit 32 | 162148 | 167985 | 204950 | 38, 27, 14 |
| 11 | PPP2R5B | protein phosphatase 2 regulatory subunit B′beta | 068971 | 110046 | 149735 | 34, 26, 40 |
| 11 | PPP2R1B | protein phosphatase 2 scaffold subunit Abeta | 137713 | 170145 | 086848 | 1, 38, 45 |
| 11 | PPP6R3 | protein phosphatase 6 regulatory subunit 3 | 110075 | 162337 | 069482 | 42, 22, 7 |
| 11 | PPME1 | protein phosphatase methylesterase 1 | 214517 | 168014 | 149380 | 17, 37, 13 |
| 11 | PTPMT1 | protein tyrosine phosphatase, mitochondrial 1 | 110536 | 213619 | 123444 | |
| 11 | PTPN5 | protein tyrosine phosphatase, non-receptor type 5 | 110786 | 179057 | 170255 | 8, 38, 17 |
| 11 | PTPRCAP | protein tyrosine phosphatase, receptor type C associated protein | 213402 | 175634 | 175514 | 41, 21, 22 |
| 11 | PTPRJ | protein tyrosine phosphatase, receptor type J | 149177 | 030066 | 175619 | 17, 37, 6 |
| 11 | PGGHG | protein-glucosylgalactosylhydroxylysine glucosidase | 142102 | 174885 | 206013 | 39, 20, 1 |
| 11 | PRG2 | proteoglycan 2, pro eosinophil major basic protein | 186652 | 156575 | 254979 | 32, 7, 5 |
| 11 | PRG3 | proteoglycan 3, pro eosinophil major basic protein 2 | 156575 | 109991 | 186652 | 7, |
| 11 | PUS3 | pseudouridylate synthase 3 | 110060 | 198331 | 109832 | 31, 25, 26 |
| 11 | PPFIA1 | PTPRF interacting protein alpha 1 | 131626 | 168040 | 085733 | 18, 26, 9 |
| 11 | P2RX3 | purinergic receptor P2X 3 | 109991 | 149136 | 156575 | 38, 15, 12 |
| 11 | P2RY2 | purinergic receptor P2Y2 | 175591 | 137478 | 171631 | 37, 2, 5 |
| 11 | P2RY6 | pyrimidinergic receptor P2Y6 | 171631 | 175591 | 110237 | 36, 32, 26 |
| 11 | PC | pyruvate carboxylase | 173599 | 173653 | 173621 | 1, 9, 6 |
| 11 | PDHX | pyruvate dehydrogenase complex component X | 110435 | 149089 | 026508 | 3, 34, 15 |
| 11 | RAB1B | RAB1B, member RAS oncogene family | 174903 | 174996 | 174871 | 26, 21, 33 |
| 11 | RAB30 | RAB30, member RAS oncogene family | 137502 | 165490 | 165494 | 22, 13, 18 |
| 11 | RAB38 | RAB38, member RAS oncogene family | 123892 | 166575 | 109861 | 35, 31, 23 |
| 11 | RAB39A | RAB39A, member RAS oncogene family | 179331 | 110660 | 166266 | 42, 14, 12 |
| 11 | RAB3IL1 | RAB3A interacting protein like 1 | 167994 | 221968 | 167995 | 1, 34, 27 |
| 11 | RAB6A | RAB6A, member RAS oncogene family | 175582 | 021300 | 175581 | 8, 4, 34 |
| 11 | RAD9A | RAD9 checkpoint clamp component A | 172613 | 172830 | 175482 | 21, 27, 25 |
| 11 | RDX | radixin | 137710 | 149289 | 137714 | 11, 4, 6 |
| 11 | RIN1 | Ras and Rab interactor 1 | 174791 | 174807 | 174744 | 34, 7, 27 |
| 11 | RASSF10 | Ras association domain family member 10 | 189431 | 187079 | 133794 | 24, 2, 23 |
| 11 | RASSF7 | Ras association domain family member 7 | 099849 | 185522 | 070047 | 37, 35, 3 |
| 11 | RCE1 | Ras converting CAAX endopeptidase 1 | 173653 | 173715 | 173599 | 27, 18, 22 |
| 11 | RASGRP2 | RAS guanyl releasing protein 2 | 068831 | 110076 | 068976 | 36, 5, 7 |
| 11 | RHOD | ras homolog family member D | 173156 | 173227 | 173120 | 9, 22, 33 |
| 11 | RHOG | ras homolog family member G | 177105 | 148985 | 167323 | 5, 41, 31 |
| 11 | RBM14-RBM4 | RBM14-RBM4 readthrough | 248643 | 239306 | 173933 | |
| 11 | RAPSN | receptor associated protein of the synapse | 165917 | 165916 | 149187 | 25, 15, 14 |
| 11 | RAG1 | recombination activating 1 | 166349 | 175104 | 175097 | |
| 11 | RAG2 | recombination activating 2 | 175097 | 166349 | 166352 | 39, 22, 15 |
| 11 | RELA | RELA proto-oncogene, NF-kB subunit | 173039 | 213445 | 172977 | 36, 39, 24 |
| 11 | RRAS2 | related RAS viral (r-ras) oncogene homolog 2 | 133818 | 262655 | 129083 | 22, 6, 26 |
| 11 | RELT | RELT tumor necrosis factor receptor | 054967 | 110237 | 054965 | 36, 5, 39 |
| 11 | RSF1 | remodeling and spacing factor 1 | 048649 | 178301 | 087884 | 27, 9, 28 |
| 11 | RCOR2 | REST corepressor 2 | 167771 | 072518 | 110583 | 14, 26, 12 |
| 11 | RCN1 | reticulocalbin 1 | 049449 | 007372 | 184937 | |
| 11 | RTN3 | reticulon 3 | 133318 | 184743 | 188070 | 8, 13, 38 |
| 11 | RTN4RL2 | reticulon 4 receptor-like 2 | 186907 | 134802 | 149150 | 27, 2, 40 |
| 11 | ROM1 | retinal outer segment membrane protein 1 | 149489 | 149499 | 149541 | 14, 24, 26 |
| 11 | RARRES3 | retinoic acid receptor responder 3 | 133321 | 133317 | 133328 | 37, 3, 4 |
| 11 | ARHGAP1 | Rho GTPase activating protein 1 | 175220 | 175224 | 175213 | 28, 30, 15 |
| 11 | ARHGAP20 | Rho GTPase activating protein 20 | 137727 | 137714 | 150750 | 1, 25, 38 |
| 11 | ARHGAP32 | Rho GTPase activating protein 32 | 134909 | 120471 | 043039 | 26, 30, 11 |
| 11 | ARHGAP42 | Rho GTPase activating protein 42 | 165895 | 149972 | 170647 | 26, 29, 40 |
| 11 | ARHGEF12 | Rho guanine nucleotide exchange factor 12 | 196914 | 181264 | 149403 | 45, 11, 1 |
| 11 | ARHGEF17 | Rho guanine nucleotide exchange factor 17 | 110237 | 171631 | 054967 | 43, 26, 40 |
| 11 | RNASEH2C | ribonuclease H2 subunit C | 172922 | 172977 | 254470 | 36, 2, 39 |
| 11 | RNH1 | ribonuclease/angiogenin inhibitor 1 | 023191 | 174915 | 174775 | 3, 35, 9 |
| 11 | RRM1 | ribonucleotide reductase catalytic subunit M1 | 167325 | 167323 | 221996 | 13, 39, 18 |
| 11 | RPL27A | ribosomal protein L27a | 166441 | 166436 | 166444 | |
| 11 | RPLP2 | ribosomal protein lateral stalk subunit P2 | 177600 | 177595 | 177666 | 11, 43, 1 |
| 11 | RPS13 | ribosomal protein S13 | 110700 | 166689 | 011405 | 43, 33, 7 |
| 11 | RPS25 | ribosomal protein S25 | 118181 | 186166 | 196655 | 43, 41, 25 |
| 11 | RPS3 | ribosomal protein S3 | 149273 | 137486 | 149243 | 41, 21, 27 |
| 11 | RPS6KA4 | ribosomal protein S6 kinase A4 | 162302 | 168071 | 168065 | 9, 13, 28 |
| 11 | RPS6KB2 | ribosomal protein S6 kinase B2 | 175634 | 172508 | 213402 | 37, 21, 34 |
| 11 | RRP8 | ribosomal RNA processing 8, methyltransferase, homolog (yeast) | 132275 | 179532 | 166333 | 41, 35, 18 |
| 11 | RIC3 | RIC3 acetylcholine receptor chaperone | 166405 | 166402 | 166407 | 2, 1, 26 |
| 11 | RIC8A | RIC8 guanine nucleotide exchange factor A | 177963 | 177947 | 142082 | 35, 38, 36 |
| 11 | RNF121 | ring finger protein 121 | 137522 | 225805 | 137496 | 30, 43, 4 |
| 11 | RNF141 | ring finger protein 141 | 110315 | 255823 | 133800 | 38, 8, 41 |
| 11 | RNF169 | ring finger protein 169 | 166439 | 054938 | 166435 | |
| 11 | RNF214 | ring finger protein 214 | 167257 | 160613 | 186318 | 9, 23, 39 |
| 11 | RNF26 | ring finger protein 26 | 173456 | 076706 | 223953 | 24, 39, 35 |
| 11 | RBM14 | RNA binding motif protein 14 | 239306 | 173992 | 248643 | 24, 40, 16 |
| 11 | RBM4 | RNA binding motif protein 4 | 173933 | 248643 | 173914 | 30, 9, 22 |
| 11 | RBM4B | RNA binding motif protein 4B | 173914 | 173933 | 173898 | |
| 11 | RBM7 | RNA binding motif protein 7 | 076053 | 282682 | 255663 | 26, 7, 29 |
| 11 | RBMXL2 | RNA binding motif protein, X-linked like 2 | 170748 | 158077 | 170743 | 38, 17, 8 |
| 11 | REXO2 | RNA exonuclease 2 | 076043 | 255663 | 095110 | 33, 19, 12 |
| 11 | POLR2G | RNA polymerase II subunit G | 168002 | 185670 | 162227 | 7, 30, 34 |
| 11 | POLR2L | RNA polymerase II subunit L | 177700 | 177697 | 214063 | 25, 1, 34 |
| 11 | RPUSD4 | RNA pseudouridylate synthase domain containing 4 | 165526 | 064309 | 197798 | 3, 18, 39 |
| 11 | ROBO3 | roundabout guidance receptor 3 | 154134 | 279342 | 154133 | 2, 36, 26 |
| 11 | ROBO4 | roundabout guidance receptor 4 | 154133 | 154134 | 165478 | 43, 36, 45 |
| 11 | SAA2-SAA4 | SAA2-SAA4 readthrough | 255071 | 148965 | 134339 | |
| 11 | SAC3D1 | SAC3 domain containing 1 | 168061 | 110025 | 168060 | 31, 1, 26 |
| 11 | SIK2 | salt inducible kinase 2 | 170145 | 204381 | 137713 | 1, 26, 23 |
| 11 | SLN | sarcolipin | 170290 | 110675 | 110660 | 25, 10, 15 |
| 11 | SCYL1 | SCY1 like pseudokinase 1 | 142186 | 279576 | 168056 | 7, 1, 22 |
| 11 | SCT | secretin | 070031 | 099834 | 069696 | 38, |
| 11 | SERGEF | secretion regulating guanine nucleotide exchange factor | 129158 | 129159 | 129167 | 41, 10, 1 |
| 11 | SCGB1A1 | secretoglobin family 1A member 1 | 149021 | 162174 | 124942 | 20, 30, 33 |
| 11 | SCGB1C1 | secretoglobin family 1C member 1 | 188076 | 177951 | 177947 | 17, 10, 38 |
| 11 | SCGB1D1 | secretoglobin family 1D member 1 | 168515 | 149503 | 124939 | 14, |
| 11 | SCGB1D2 | secretoglobin family 1D member 2 | 124935 | 124939 | 110484 | 27, 25, 44 |
| 11 | SCGB1D4 | secretoglobin family 1D member 4 | 197745 | 110484 | 162174 | 44, |
| 11 | SCGB2A1 | secretoglobin family 2A member 1 | 124939 | 168515 | 124935 | 14, 40, 44 |
| 11 | SCGB2A2 | secretoglobin family 2A member 2 | 110484 | 124935 | 197745 | 23, 10, 27 |
| 11 | SELENOH | selenoprotein H | 211450 | 254462 | 254732 | |
| 11 | SRSF8 | serine and arginine rich splicing factor 8 | 263465 | 235268 | 149218 | 29, 24, 40 |
| 11 | STK33 | serine/threonine kinase 33 | 130413 | 166407 | 166436 | 38, 10, 20 |
| 11 | SERPING1 | serpin family G member 1 | 149131 | 156587 | 166793 | 1, 4, 43 |
| 11 | SERPINH1 | serpin family H member 1 | 149257 | 158555 | 171533 | 45, 10, 13 |
| 11 | SAAL1 | serum amyloid A like 1 | 166788 | 129167 | 179826 | 41, 35, 19 |
| 11 | SAA1 | serum amyloid A1 | 173432 | 134339 | 110756 | 19, 1, 30 |
| 11 | SAA2 | serum amyloid A2 | 134339 | 255071 | 173432 | 19, 25, 1 |
| 11 | SAA4 | serum amyloid A4, constitutive | 148965 | 179817 | 255071 | 19, 30, 17 |
| 11 | SESN3 | sestrin 3 | 149212 | 149218 | 077458 | |
| 11 | SBF2 | SET binding factor 2 | 133812 | 133789 | 148926 | 26, 11, 45 |
| 11 | SHANK2 | SH3 and multiple ankyrin repeat domains 2 | 162105 | 085733 | 172893 | 11, 42, 18 |
| 11 | SIAE | sialic acid acetylesterase | 110013 | 154144 | 064199 | |
| 11 | SIDT2 | SID1 transmembrane family member 2 | 149577 | 168092 | 149591 | 26, 40, 38 |
| 11 | SPCS2 | signal peptidase complex subunit 2 | 118363 | 166435 | 162139 | |
| 11 | SCUBE2 | signal peptide, CUB domain and EGF like domain containing 2 | 175356 | 175352 | 184014 | 23, 33, 15 |
| 11 | SIPA1 | signal-induced proliferation-associated 1 | 213445 | 197136 | 173039 | 41, 22, 3 |
| 11 | SIK3 | SIK family kinase 3 | 160584 | 118137 | 168092 | 18, 26, 20 |
| 11 | SIGIRR | single Ig and TIR domain containing | 185187 | 184363 | 185101 | 5, 29, 16 |
| 11 | SMCO4 | single-pass membrane protein with coiled-coil domains 4 | 166002 | 165325 | 166004 | 31, 34, 40 |
| 11 | SIRT3 | sirtuin 3 | 142082 | 177963 | 185627 | 38, 14, 34 |
| 11 | SSSCA1 | Sjogren syndrome/scleroderma autoantigen 1 | 173465 | 168056 | 176973 | 29, 28, 3 |
| 11 | SSH3 | slingshot protein phosphatase 3 | 172830 | 172932 | 172613 | 24, 27, 36 |
| 11 | SVIP | small VCP interacting protein | 198168 | 148935 | 255359 | 7, 28, 31 |
| 11 | SMTNL1 | smoothelin like 1 | 214872 | 134809 | 156587 | 25, 15, 19 |
| 11 | SCN2B | sodium voltage-gated channel beta subunit 2 | 149575 | 177098 | 160593 | 31, 15, 8 |
| 11 | SCN3B | sodium voltage-gated channel beta subunit 3 | 166257 | 023171 | 166261 | 8, 1, 26 |
| 11 | SCN4B | sodium voltage-gated channel beta subunit 4 | 177098 | 137648 | 149575 | 8, 42, 24 |
| 11 | SLC1A2 | solute carrier family 1 member 2 | 110436 | 026508 | 149090 | 8, 26, 3 |
| 11 | SLC15A3 | solute carrier family 15 member 3 | 110446 | 006118 | 013725 | 1, 10, 41 |
| 11 | SLC17A6 | solute carrier family 17 member 6 | 091664 | 171714 | 183161 | 8, 28, 17 |
| 11 | SLC22A10 | solute carrier family 22 member 10 | 184999 | 197658 | 196600 | 19, |
| 11 | SLC22A11 | solute carrier family 22 member 11 | 168065 | 162302 | 197891 | 32, 17, 8 |
| 11 | SLC22A12 | solute carrier family 22 member 12 | 197891 | 168065 | 110076 | 17, |
| 11 | SLC22A18 | solute carrier family 22 member 18 | 110628 | 254827 | 181649 | 16, 28, 26 |
| 11 | SLC22A18AS | solute carrier family 22 member 18 antisense | 254827 | 129757 | 110628 | 16, 6, 35 |
| 11 | SLC22A24 | solute carrier family 22 member 24 | 197658 | 149452 | 184999 | |
| 11 | SLC22A25 | solute carrier family 22 member 25 | 196600 | 184999 | 149742 | 19, 15, |
| 11 | SLC22A6 | solute carrier family 22 member 6 | 197901 | 168539 | 149452 | 17, 8, 25 |
| 11 | SLC22A8 | solute carrier family 22 member 8 | 149452 | 197901 | 197658 | 17, 14, 8 |
| 11 | SLC22A9 | solute carrier family 22 member 9 | 149742 | 196600 | 168004 | 19, |
| 11 | SLC25A22 | solute carrier family 25 member 22 | 177542 | 184524 | 274897 | 3, 26, 8 |
| 11 | SLC25A45 | solute carrier family 25 member 45 | 162241 | 173825 | 126391 | 36, 9, 29 |
| 11 | SLC29A2 | solute carrier family 29 member 2 | 174669 | 174684 | 174576 | 9, 40, 33 |
| 11 | SLC3A2 | solute carrier family 3 member 2 | 168003 | 133316 | 168539 | 13, 3, 4 |
| 11 | SLC35C1 | solute carrier family 35 member C1 | 181830 | 175264 | 121671 | 1, 40, 16 |
| 11 | SLC35F2 | solute carrier family 35 member F2 | 110660 | 170290 | 179331 | 45, 33, 24 |
| 11 | SLC36A4 | solute carrier family 36 member 4 | 180773 | 134640 | 165325 | 1, 9, 12 |
| 11 | SLC37A2 | solute carrier family 37 member 2 | 134955 | 149548 | 150433 | 24, 36, 2 |
| 11 | SLC37A4 | solute carrier family 37 member 4 | 137700 | 196655 | 149428 | 17, 39, 42 |
| 11 | SLC39A13 | solute carrier family 39 member 13 | 165915 | 066336 | 165916 | 13, 9, 31 |
| 11 | SLC43A1 | solute carrier family 43 member 1 | 149150 | 186907 | 134809 | 21, 41, 16 |
| 11 | SLC43A3 | solute carrier family 43 member 3 | 134802 | 254979 | 186907 | 7, 5, 42 |
| 11 | SLC5A12 | solute carrier family 5 member 12 | 148942 | 169550 | 176971 | 17, 12, 19 |
| 11 | SLC6A5 | solute carrier family 6 member 5 | 165970 | 185238 | 165973 | 38, |
| 11 | SLCO2B1 | solute carrier organic anion transporter family member 2B1 | 137491 | 171561 | 261594 | 10, 8, 42 |
| 11 | SORL1 | sortilin related receptor 1 | 137642 | 109929 | 259571 | 22, 5, 31 |
| 11 | SNX15 | sorting nexin 15 | 110025 | 273003 | 168061 | 9, 1, 43 |
| 11 | SNX19 | sorting nexin 19 | 120451 | 166106 | 182667 | 22, 14, 6 |
| 11 | SNX32 | sorting nexin 32 | 172803 | 172757 | 172732 | |
| 11 | SPTBN2 | spectrin beta, non-erythrocytic 2 | 173898 | 173914 | 173715 | 18, 14, 30 |
| 11 | SPDYC | speedy/RINGO cell cycle regulator family member C | 204710 | 149792 | 014216 | 34, 32, |
| 11 | SPA17 | sperm autoantigenic protein 17 | 064199 | 110013 | 154146 | 2, 38, 13 |
| 11 | SPATA19 | spermatogenesis associated 19 | 166118 | 183715 | 080854 | 38, 32, |
| 11 | SMPD1 | sphingomyelin phosphodiesterase 1 | 166311 | 170955 | 166313 | 29, 6, 26 |
| 11 | SPI1 | Spi-1 proto-oncogene | 066336 | 134571 | 165915 | 41, 22, 5 |
| 11 | SF1 | splicing factor 1 | 168066 | 068976 | 168067 | 2, 22, 12 |
| 11 | SF3B2 | splicing factor 3b subunit 2 | 087365 | 175229 | 175115 | |
| 11 | SPON1 | spondin 1 | 262655 | 197601 | 133818 | 27, 43, 44 |
| 11 | SPTY2D1 | SPT2 chromatin protein domain containing 1 | 179119 | 247595 | 151117 | 3, 1, 42 |
| 11 | SPTY2D1-AS1 | SPTY2D1 antisense RNA 1 | 247595 | 151116 | 179119 | 38, 33, |
| 11 | SART1 | squamous cell carcinoma antigen recognized by T-cells 1 | 175467 | 175513 | 175376 | 18, 1, 19 |
| 11 | SRPRA | SRP receptor alpha subunit | 182934 | 197798 | 110074 | 6, 23, 39 |
| 11 | SOX6 | SRY-box6 | 110693 | 188487 | 110696 | 1, 43, 17 |
| 11 | ST3GAL4 | ST3 beta-galactoside alpha-2,3-sialyltransferase 4 | 110080 | 110063 | 149571 | 37, 32, 9 |
| 11 | STARD10 | StAR related lipid transfer domain containing 10 | 214530 | 186635 | 168010 | 29, 16, 38 |
| 11 | SC5D | sterol-C5-desaturase | 109929 | 109927 | 137642 | 26, 11, 4 |
| 11 | STIP1 | stress induced phosphoprotein 1 | 168439 | 126500 | 149781 | |
| 11 | STIM1 | stromal interaction molecule 1 | 167323 | 177105 | 167325 | 41, 39, 26 |
| 11 | SSRP1 | structure specific recognition protein 1 | 149136 | 149115 | 109991 | 9, 21, 41 |
| 11 | STT3A | STT3A, catalytic subunit of the oligosaccharyltransferase complex | 134910 | 149547 | 149554 | 30, 24, 13 |
| 11 | SDHAF2 | succinate dehydrogenase complex assembly factor 2 | 167985 | 256591 | 162148 | 30, 9, 29 |
| 11 | SDHD | succinate dehydrogenase complex subunit D | 204370 | 150779 | 255292 | 34, 4, 7 |
| 11 | ST14 | suppression of tumorigenicity 14 | 149418 | 084234 | 196323 | 16, 37, 40 |
| 11 | ST5 | suppression of tumorigenicity 5 | 166444 | 166441 | 166452 | |
| 11 | SWAP70 | SWAP switching B-cell complex subunit 70 | 133789 | 166483 | 133812 | 41, 21, 18 |
| 11 | SYT12 | synaptotagmin 12 | 173227 | 173237 | 173156 | 29, 6, 33 |
| 11 | SYT13 | synaptotagmin 13 | 019505 | 019485 | 175264 | 3, 11, 28 |
| 11 | SYT7 | synaptotagmin 7 | 011347 | 204950 | 134780 | |
| 11 | SYT8 | synaptotagmin 8 | 149043 | 117984 | 130598 | 32, 4, 23 |
| 11 | SYT9 | synaptotagmin 9 | 170743 | 170748 | 183801 | 31, 26, 24 |
| 11 | SYTL2 | synaptotagmin like 2 | 137501 | 179071 | 150676 | 1, 23, 3 |
| 11 | SYVN1 | synoviolin 1 | 162298 | 149806 | 149792 | 22, 38, 35 |
| 11 | STX3 | syntaxin 3 | 166900 | 172289 | 166902 | 29, 37, 35 |
| 11 | STX5 | syntaxin 5 | 162236 | 162231 | 283268 | 33, 36, 18 |
| 11 | TNKS1BP1 | tankyrase 1 binding protein 1 | 149115 | 134817 | 149136 | 26, 40, 23 |
| 11 | TAF10 | TATA-box binding protein associated factor 10 | 166337 | 166333 | 166340 | 34, 27, 17 |
| 11 | TAF6L | TATA-box binding protein associated factor 6 like | 162227 | 168002 | 168569 | 29, 36, 20 |
| 11 | TAF1D | TATA-box binding protein associated factor, RNA polymerase I subunit D | 166012 | 166004 | 182919 | 13, 4, 7 |
| 11 | TBC1D10C | TBC1 domain family member 10C | 175463 | 172531 | 172508 | 41, 5, 22 |
| 11 | TBX10 | T-box 10 | 167800 | 167799 | 132744 | 16, 22, |
| 11 | TCIRG1 | T-cell immune regulator 1, ATPase H+ transporting V0 subunit a3 | 110719 | 110717 | 110721 | 7, 26, 20 |
| 11 | TCP11L1 | t-complex 11 like 1 | 176148 | 121690 | 280550 | 1, 35, 8 |
| 11 | TEAD1 | TEA domain transcription factor 1 | 187079 | 197702 | 189431 | 29, 31, 12 |
| 11 | TECTA | tectorin alpha | 109927 | 154114 | 109929 | 24, 5, 38 |
| 11 | TENM4 | teneurin transmembrane protein 4 | 149256 | 137513 | 182103 | 40, 29, 24 |
| 11 | TUT1 | terminal uridylyl transferase 1, U6 snRNA-specific | 149016 | 255508 | 149480 | 43, 39, 21 |
| 11 | TEX12 | testis expressed 12 | 150783 | 150782 | 197580 | 38, 25, |
| 11 | TEX40 | testis expressed 40 | 219435 | 182450 | 173153 | 38, 32, 14 |
| 11 | TESMIN | testis expressed metallothionein like protein | 132749 | 069482 | 110090 | 38, |
| 11 | TSGA10IP | testis specific 10 interacting protein | 175513 | 175550 | 175467 | 38, 8, |
| 11 | TSPAN18 | tetraspanin 18 | 157570 | 085117 | 175274 | 43, 15, 2 |
| 11 | TSPAN32 | tetraspanin 32 | 064201 | 110665 | 110651 | 5, 36, 13 |
| 11 | TSPAN4 | tetraspanin 4 | 214063 | 177700 | 177830 | 22, 1, 13 |
| 11 | TTC12 | tetratricopeptide repeat domain 12 | 149292 | 149294 | 170209 | 38, 18, 31 |
| 11 | TTC17 | tetratricopeptide repeat domain 17 | 052841 | 166181 | 149084 | 24, 34, 13 |
| 11 | TTC36 | tetratricopeptide repeat domain 36 | 172425 | 118058 | 149582 | 17, 19, 14 |
| 11 | TTC9C | tetratricopeptide repeat domain 9C | 162222 | 214753 | 185670 | 15, 22, 41 |
| 11 | THAP12 | THAP domain containing 12 | 137492 | 085741 | 179240 | 27, 4, 22 |
| 11 | TMX2 | thioredoxin related transmembrane protein 2 | 213593 | 156603 | 254462 | 30, 24, 40 |
| 11 | THY1 | Thy-1 cell surface antigen | 154096 | 036672 | 110400 | 8, 32, 26 |
| 11 | THYN1 | thymocyte nuclear protein 1 | 151500 | 151502 | 151498 | 5, 40, 4 |
| 11 | THRSP | thyroid hormone responsive | 151365 | 259112 | 151366 | 1, 35, 19 |
| 11 | TIGD3 | tigger transposable element derived 3 | 173825 | 133884 | 162241 | 29, 5, 14 |
| 11 | TIRAP | TIR domain containing adaptor protein | 150455 | 110074 | 110063 | 42, 19, 34 |
| 11 | TMEM9B | TMEM9 domain family member B | 175348 | 176009 | 175352 | 29, 1, 31 |
| 11 | TMPRSS4-AS1 | TMPRSS4 antisense RNA 1 | 255274 | 110324 | 279906 | |
| 11 | TMX2-CTNND1 | TMX2-CTNND1 readthrough (NMD candidate) | 254462 | 213593 | 211450 | |
| 11 | TRAF6 | TNF receptor associated factor 6 | 175104 | 135362 | 166349 | 29, 1, 11 |
| 11 | TOLLIP | toll interacting protein | 078902 | 117983 | 174672 | 34, 8, 1 |
| 11 | TRAPPC4 | trafficking protein particle complex 4 | 196655 | 118181 | 137700 | 29, 24, 30 |
| 11 | TALDO1 | transaldolase 1 | 177156 | 177042 | 177225 | 13, 34, 1 |
| 11 | TCN1 | transcobalamin 1 | 134827 | 134812 | 149507 | 34, 18, 30 |
| 11 | TBRG1 | transforming growth factor beta regulator 1 | 154144 | 154143 | 110013 | 1, 8, 22 |
| 11 | TAGLN | transgelin | 149591 | 149577 | 160613 | 26, 12, 7 |
| 11 | TRPC6 | transient receptor potential cation channel subfamily C member 6 | 137672 | 082175 | 187151 | 15, 32, 45 |
| 11 | TRPM5 | transient receptor potential cation channel subfamily M member 5 | 070985 | 184281 | 053918 | 16, 5, 23 |
| 11 | TIMM10 | translocase of inner mitochondrial membrane 10 | 134809 | 149150 | 214872 | 33, 12, 14 |
| 11 | TIMM10B | translocase of inner mitochondrial membrane 10B | 132286 | 132254 | 179532 | |
| 11 | TIMM8B | translocase of inner mitochondrial membrane 8 homolog B | 150779 | 150776 | 204370 | 11, 15, 25 |
| 11 | TM7SF2 | transmembrane 7 superfamily member 2 | 149809 | 149823 | 174276 | 27, 33, 5 |
| 11 | TMPRSS13 | transmembrane protease, serine 13 | 137747 | 137726 | 110324 | 1, 23, 24 |
| 11 | TMPRSS4 | transmembrane protease, serine 4 | 137648 | 279906 | 177098 | 13, 24, 16 |
| 11 | TMPRSS5 | transmembrane protease, serine 5 | 166682 | 149295 | 086827 | 8, 35, 6 |
| 11 | TMEM109 | transmembrane protein 109 | 110108 | 110107 | 006118 | 35, 31, 22 |
| 11 | TMEM123 | transmembrane protein 123 | 152558 | 110330 | 137673 | 42, 22, 4 |
| 11 | TMEM126A | transmembrane protein 126A | 171202 | 171204 | 137504 | 29, 15, 31 |
| 11 | TMEM126B | transmembrane protein 126B | 171204 | 150672 | 171202 | 4, 29, 7 |
| 11 | TMEM132A | transmembrane protein 132A | 006118 | 110108 | 110446 | |
| 11 | TMEM133 | transmembrane protein 133 | 170647 | 165895 | 082175 | 2, 11, 22 |
| 11 | TMEM134 | transmembrane protein 134 | 172663 | 175544 | 110711 | 39, 22, 23 |
| 11 | TMEM135 | transmembrane protein 135 | 166575 | 174804 | 123892 | 45, 31, 34 |
| 11 | TMEM136 | transmembrane protein 136 | 181264 | 137709 | 196914 | 26, 42, 8 |
| 11 | TMEM138 | transmembrane protein 138 | 149483 | 162144 | 187049 | 31, 40, 42 |
| 11 | TMEM151A | transmembrane protein 151A | 179292 | 174851 | 174807 | 26, 14, 8 |
| 11 | TMEM179B | transmembrane protein 179B | 185475 | 168569 | 162231 | 34, 29, 15 |
| 11 | TMEM216 | transmembrane protein 216 | 187049 | 149483 | 149532 | 30, 6, 4 |
| 11 | TMEM218 | transmembrane protein 218 | 150433 | 134955 | 165495 | 1, 17, 9 |
| 11 | TMEM223 | transmembrane protein 223 | 168569 | 162227 | 185475 | 41, 34, 22 |
| 11 | TMEM225 | transmembrane protein 225 | 204300 | 196099 | 181518 | 38, |
| 11 | TMEM25 | transmembrane protein 25 | 149582 | 172425 | 118096 | 2, 8, 39 |
| 11 | TMEM258 | transmembrane protein 258 | 134825 | 124920 | 168496 | 12, |
| 11 | TMEM262 | transmembrane protein 262 | 187066 | 162300 | 149823 | 29, 36, 16 |
| 11 | TMEM41B | transmembrane protein 41B | 166471 | 184014 | 205339 | 11, 7, 39 |
| 11 | TMEM45B | transmembrane protein 45B | 151715 | 043039 | 170322 | 16, 42, 9 |
| 11 | TMEM80 | transmembrane protein 80 | 177042 | 177106 | 177156 | 1, 32, 16 |
| 11 | TMEM86A | transmembrane protein 86A | 151117 | 179119 | 179057 | 10, 23, 17 |
| 11 | TREH | trehalase | 118094 | 019144 | 110367 | 17, 38, 16 |
| 11 | TRIM6-TRIM34 | TRIM6-TRIM34 readthrough | 258588 | 121236 | 258659 | 34, 17, 32 |
| 11 | TKFC | triokinase and FMN cyclase | 149476 | 167986 | 162144 | 38, |
| 11 | TRIM21 | tripartite motif containing 21 | 132109 | 221996 | 181963 | |
| 11 | TRIM22 | tripartite motif containing 22 | 132274 | 132256 | 181023 | 43, 36, 26 |
| 11 | TRIM29 | tripartite motif containing 29 | 137699 | 110400 | 184232 | 24, 18, 35 |
| 11 | TRIM3 | tripartite motif containing 3 | 110171 | 110169 | 132254 | 8, 23, 34 |
| 11 | TRIM34 | tripartite motif containing 34 | 258659 | 258588 | 132256 | |
| 11 | TRIM44 | tripartite motif containing 44 | 166326 | 179431 | 179241 | 29, 41, 44 |
| 11 | TRIM48 | tripartite motif containing 48 | 150244 | 221840 | 181961 | 35, 32, 44 |
| 11 | TRIM49 | tripartite motif containing 49 | 168930 | 214414 | 189253 | |
| 11 | TRIM49B | tripartite motif containing 49B | 182053 | 237388 | 214891 | 8, |
| 11 | TRIM49C | tripartite motif containing 49C | 204449 | 204450 | 255009 | |
| 11 | TRIM49D1 | tripartite motif containing 49D1 | 223417 | 189253 | 233802 | |
| 11 | TRIM49D2 | tripartite motif containing 49D2 | 233802 | 223417 | 204450 | |
| 11 | TRIM5 | tripartite motif containing 5 | 132256 | 258659 | 132274 | 39, 4, 44 |
| 11 | TRIM6 | tripartite motif containing 6 | 121236 | 187747 | 258588 | 34, 17, 32 |
| 11 | TRIM64 | tripartite motif containing 64 | 204450 | 233802 | 204449 | 44, |
| 11 | TRIM64B | tripartite motif containing 64B | 189253 | 168930 | 223417 | |
| 11 | TRIM64C | tripartite motif containing 64C | 214891 | 182053 | 086205 | |
| 11 | TRIM66 | tripartite motif containing 66 | 166436 | 130413 | 166441 | 29, 22, 26 |
| 11 | TRIM68 | tripartite motif containing 68 | 167333 | 232268 | 197428 | |
| 11 | TRIM77 | tripartite motif containing 77 | 214414 | 086991 | 168930 | |
| 11 | TRIM51 | tripartite motif-containing 51 | 124900 | 205029 | 187612 | |
| 11 | TPP1 | tripeptidyl peptidase 1 | 166340 | 166337 | 166341 | 36, 39, 42 |
| 11 | TRMT112 | tRNA methyltransferase 11-2 homolog (S. cerevisiae) | 173113 | 173153 | 126432 | 29, 15, 7 |
| 11 | TRPT1 | tRNA phosphotransferase 1 | 149743 | 149781 | 149761 | 34, 40, 22 |
| 11 | TPBGL | trophoblast glycoprotein-like | 261594 | 137491 | 137486 | 14, 35, 28 |
| 11 | TNNI2 | troponin I2, fast skeletal type | 130598 | 149043 | 130592 | 25, 30, 24 |
| 11 | TNNT3 | troponin T3, fast skeletal type | 130595 | 130592 | 214026 | 25, 18, 15 |
| 11 | TPH1 | tryptophan hydroxylase 1 | 129167 | 129158 | 166788 | 31, 20, 14 |
| 11 | TSKU | tsukushi, small leucine rich proteoglycan | 182704 | 137507 | 078124 | 24, 23, 42 |
| 11 | TUB | tubby bipartite transcription factor | 166402 | 175390 | 166405 | 29, 14, 18 |
| 11 | TBCEL | tubulin folding cofactor E like | 154114 | 149403 | 109927 | 29, 9, 13 |
| 11 | TP53I11 | tumor protein p53 inducible protein 11 | 175274 | 157570 | 019485 | 34, 3, 24 |
| 11 | TP53AIP1 | tumor protein p53 regulated apoptosis inducing protein 1 | 120471 | 174370 | 134909 | 31, 4, 24 |
| 11 | TSSC4 | tumor suppressing subtransferable candidate 4 | 184281 | 110651 | 070985 | 34, 29, 21 |
| 11 | TSG101 | tumor susceptibility 101 | 074319 | 166800 | 151116 | 31, 5, 7 |
| 11 | TPCN2 | two pore segment channel 2 | 162341 | 172935 | 172927 | 18, 14, 41 |
| 11 | TYR | tyrosinase | 077498 | 168959 | 086991 | 35, 40, 11 |
| 11 | TH | tyrosine hydroxylase | 180176 | 254647 | 183734 | 26, 24, 2 |
| 11 | UBQLN3 | ubiquilin 3 | 175520 | 181609 | 175518 | 38, 8, |
| 11 | UBQLNL | ubiquilin-like | 175518 | 175520 | 181616 | 38, 45, 44 |
| 11 | UQCC3 | ubiquinol-cytochrome c reductase complex assembly factor 3 | 204922 | 214756 | 162191 | 31, 14, 3 |
| 11 | UBASH3B | ubiquitin associated and SH3 domain containing B | 154127 | 259571 | 109943 | 36, 17, 45 |
| 11 | UBE2L6 | ubiquitin conjugating enzyme E2 L6 | 156587 | 214872 | 149131 | 30, 11, 41 |
| 11 | USP2 | ubiquitin specific peptidase 2 | 036672 | 235718 | 154096 | 38, 29, 21 |
| 11 | USP28 | ubiquitin specific peptidase 28 | 048028 | 228607 | 149305 | 9, 15, 12 |
| 11 | USP35 | ubiquitin specific peptidase 35 | 118369 | 188997 | 033327 | 7, 28, 6 |
| 11 | USP47 | ubiquitin specific peptidase 47 | 170242 | 254598 | 050165 | 11, 13, 43 |
| 11 | UBE4A | ubiquitination factor E4A | 110344 | 160654 | 167283 | 11, 27, 23 |
| 11 | UBXN1 | UBX domain protein 1 | 162191 | 204922 | 177363 | 41, 18, 21 |
| 11 | B3GNT6 | UDP-GlcNAc:betaGal beta-1,3-N-acetylglucosaminyltransferase 6 | 198488 | 078124 | 149260 | 42, 24, 16 |
| 11 | UEVLD | UEV and lactate/malate dehyrogenase domains | 151116 | 074319 | 247595 | 24, 13, 22 |
| 11 | UNC93B1 | unc-93 homolog B1 (C. elegans) | 110057 | 132746 | 006534 | 3, 41, 22 |
| 11 | UCP2 | uncoupling protein 2 | 175567 | 187726 | 175564 | 41, 36, 21 |
| 11 | UCP3 | uncoupling protein 3 | 175564 | 175567 | 168014 | 25, 15, 45 |
| 11 | UBTFL1 | upstream binding transcription factor, RNA polymerase I-like 1 | 255009 | 204449 | 077616 | |
| 11 | UPK2 | uroplakin 2 | 110375 | 186174 | 176302 | 4, 14, 12 |
| 11 | USH1C | USH1 protein network component harmonin | 006611 | 006071 | 188162 | 9, 16, 17 |
| 11 | UVRAG | UV radiation resistance associated | 198382 | 062282 | 085741 | 22, 1, 11 |
| 11 | VEGFB | vascular endothelial growth factor B | 173511 | 110011 | 173486 | |
| 11 | VWA5A | von Willebrand factor A domain containing 5A | 110002 | 182634 | 197309 | 42, 11, 9 |
| 11 | VWCE | von Willebrand factor C and EGF domains | 167992 | 256713 | 167986 | 21, 19, 14 |
| 11 | VPS11 | VPS11, CORVET/HOPS core subunit | 160695 | 149428 | 256269 | 43, 24, 39 |
| 11 | VPS26B | VPS26, retromer complex component B | 151502 | 151503 | 151500 | 34, 33, 6 |
| 11 | VPS37C | VPS37C, ESCRT-I subunit | 167987 | 110448 | 229859 | 1, 33, 38 |
| 11 | VPS51 | VPS51, GARP complex subunit | 149823 | 187066 | 149809 | 41, 9, 31 |
| 11 | VSIG2 | V-set and immunoglobulin domain containing 2 | 019102 | 154146 | 149564 | 3, 37, 16 |
| 11 | VSTM5 | V-set and transmembrane domain containing 5 | 214376 | 042429 | 181333 | 20, |
| 11 | WDR74 | WD repeat domain 74 | 133316 | 283268 | 168003 | |
| 11 | WEE1 | WEE1 G2 checkpoint kinase | 166483 | 166478 | 133789 | 4, 15, 7 |
| 11 | WT1 | Wilms tumor 1 | 184937 | 049449 | 149100 | 38, 34, 27 |
| 11 | WNT11 | Wnt family member 11 | 085741 | 198382 | 137492 | |
| 11 | XRRA1 | X-ray radiation resistance associated 1 | 166435 | 166439 | 118363 | 29, 38, 14 |
| 11 | YAP1 | Yes associated protein 1 | 137693 | 137691 | 023445 | 29, 11, 4 |
| 11 | YIF1A | Yip1 interacting factor homolog A, membrane trafficking protein | 174851 | 174871 | 179292 | 24, 28, 3 |
| 11 | YPEL4 | yippee like 4 | 166793 | 149131 | 172409 | 8, 2, 40 |
| 11 | ZFP91 | ZFP91 zinc finger protein | 186660 | 110031 | 255073 | 22, 18, 11 |
| 11 | ZFP91-CNTF | ZFP91-CNTF readthrough (NMD candidate) | 255073 | 186660 | 242689 | |
| 11 | ZBTB16 | zinc finger and BTB domain containing 16 | 109906 | 166736 | 166741 | 1, 26, 36 |
| 11 | ZBTB3 | zinc finger and BTB domain containing 3 | 185670 | 162222 | 168002 | 39, 38, 15 |
| 11 | ZBTB44 | zinc finger and BTB domain containing 44 | 196323 | 149418 | 134917 | 11, 22, 25 |
| 11 | ZBED5 | zinc finger BED-type containing 5 | 236287 | 110321 | 110328 | 42, 39, 8 |
| 11 | ZC3H12C | zinc finger CCCH-type containing 12C | 149289 | 185742 | 137710 | 26, 17, 44 |
| 11 | ZDHHC13 | zinc finger DHHC-type containing 13 | 177054 | 183695 | 129170 | 24, 4, 45 |
| 11 | ZDHHC24 | zinc finger DHHC-type containing 24 | 174165 | 174483 | 248746 | 41, 26, 37 |
| 11 | ZDHHC5 | zinc finger DHHC-type containing 5 | 156599 | 172409 | 156603 | 18, 22, 40 |
| 11 | ZNHIT2 | zinc finger HIT-type containing 2 | 174276 | 149809 | 149806 | 38, 17, 16 |
| 11 | ZNF143 | zinc finger protein 143 | 166478 | 205339 | 166483 | 31, 39, 38 |
| 11 | ZNF195 | zinc finger protein 195 | 005801 | 184350 | 167311 | 13, 37, 4 |
| 11 | ZNF202 | zinc finger protein 202 | 166261 | 166257 | 221931 | 29, 11, 42 |
| 11 | ZNF214 | zinc finger protein 214 | 149050 | 149054 | 158077 | |
| 11 | ZNF215 | zinc finger protein 215 | 149054 | 178358 | 149050 | 22, 3, 45 |
| 11 | ZNF408 | zinc finger protein 408 | 175213 | 175220 | 180210 | 39, 34, 43 |
| 11 | ZFPL1 | zinc finger protein like 1 | 162300 | 146670 | 187066 | 29, 36, 16 |
| 11 | ZP1 | zona pellucida glycoprotein 1 | 149506 | 183134 | 110107 | 39, 38, 23 |
| 11 | ZPR1 | ZPR1 zinc finger | 109917 | 137656 | 110243 | |
| 11 | ZW10 | zw10 kinetochore protein | 086827 | 166682 | 228607 | 24, 33, 6 |

[0064] Table 6 provides the gene information for the genes found on Chromosomes 12-14.

TABLE 6
Genes on Chromosomes 12-14

| Chr. | Gene Symbol | Gene Name | ENSG | Up ENSG | Down ENSG | Tissue Code |
|---|---|---|---|---|---|---|
| 12 | OAS1 | 2′-5′-oligoadenylate synthetase 1 | 089127 | 089169 | 111331 | 41, 16, 4 |
| 12 | OAS2 | 2′-5′-oligoadenylate synthetase 2 | 111335 | 111331 | 135144 | 42, 22, 21 |
| 12 | OAS3 | 2′-5′-oligoadenylate synthetase 3 | 111331 | 089127 | 111335 | |
| 12 | OASL | 2′-5′-oligoadenylate synthetase like | 135114 | 157895 | 089041 | 9, 13, 1 |
| 12 | OGFOD2 | 2-oxoglutarate and iron dependent oxygenase domain containing 2 | 111325 | 150967 | 182196 | 34, 6, 9 |
| 12 | HPD | 4-hydroxyphenylpyruvate dioxygenase | 158104 | 139718 | 110801 | 19, 9, 14 |
| 12 | NT5DC3 | 5′-nucleotidase domain containing 3 | 111696 | 136011 | 166598 | 35, 16, 3 |
| 12 | AACS | acetoacetyl-CoA synthetase | 081760 | 184992 | 139364 | 24, 42, 21 |
| 12 | ACACB | acetyl-CoA carboxylase beta | 076555 | 076248 | 139445 | 1, 23, 26 |
| 12 | ASCL1 | achaete-scute family bHLH transcription factor 1 | 139352 | 171759 | 179088 | 20, 8, 26 |
| 12 | ASCL4 | achaete-scute family bHLH transcription factor 4 | 187855 | 110851 | 075035 | 15, |
| 12 | ASIC1 | acid sensing ion channel subunit 1 | 110881 | 161800 | 066117 | 8, 14, 6 |
| 12 | ANP32D | acidic nuclear phosphoprotein 32 family member D | 139223 | 167528 | 177627 | |
| 12 | ACRBP | acrosin binding protein | 111644 | 184574 | 111653 | 38, 36, 8 |
| 12 | ARPC3 | actin related protein 2/3 complex subunit 3 | 111229 | 196510 | 111231 | 23, 29, 43 |
| 12 | ATF1 | activating transcription factor 1 | 123268 | 066084 | 186452 | 34, 18, 22 |
| 12 | ATF7 | activating transcription factor 7 | 170653 | 139574 | 135390 | 18, 34, 30 |
| 12 | ATF7IP | activating transcription factor 7 interacting protein | 171681 | 273079 | 121316 | 42, 38, 9 |
| 12 | AICDA | activation induced cytidine deaminase | 111732 | 166523 | 197614 | 41, 21, 22 |
| 12 | ACVRL1 | activin A receptor like type 1 | 139567 | 167612 | 135503 | 43, 45, 23 |
| 12 | ACVR1B | activin A receptor type 1B | 135503 | 139567 | 161835 | 29, 18, 30 |
| 12 | ACAD10 | acyl-CoA dehydrogenase family member 10 | 111271 | 089234 | 257767 | 9, 1, 17 |
| 12 | ACADS | acyl-CoA dehydrogenase, C-2 to C-3 short chain | 122971 | 175970 | 157837 | 3, 26, 38 |
| 12 | ACSM4 | acyl-CoA synthetase medium-chain family member 4 | 215009 | 139197 | 177675 | 12, 38, |
| 12 | ACSS3 | acyl-CoA synthetase short-chain family member 3 | 111058 | 111052 | 139220 | 10, 38, 30 |
| 12 | ADAMTS20 | ADAM metallopeptidase with thrombospondin type 1 motif 20 | 173157 | 139174 | 129317 | 24, 10, 14 |
| 12 | APPL2 | adaptor protein, phosphotyrosine interacting with PH domain | 136044 | 136051 | 235162 | 29, 11, 31 |
| | | and leucine zipper 2 | | | | |
| 12 | ADCY6 | adenylate cyclase 6 | 174233 | 257987 | 167535 | 6, 18, 12 |
| 12 | ADGRD1 | adhesion G protein-coupled receptor D1 | 111452 | 132341 | 061936 | 1, 38, 32 |
| 12 | AMIGO2 | adhesion molecule with Ig like domain 2 | 139211 | 139209 | 179715 | 45, 26, 31 |
| 12 | ADIPOR2 | adiponectin receptor 2 | 006831 | 171823 | 151062 | |
| 12 | ARF3 | ADP ribosylation factor 3 | 134287 | 255863 | 169884 | 8, 23, 38 |
| 12 | ARL1 | ADP ribosylation factor like GTPase 1 | 120805 | 120800 | 166211 | |
| 12 | ARL6IP4 | ADP ribosylation factor like GTPase 6 interacting protein 4 | 182196 | 111325 | 090975 | 31, 6, 28 |
| 12 | ART4 | ADP-ribosyltransferase 4 (Dombrock blood group) | 111339 | 179256 | 111341 | |
| 12 | AVIL | advillin | 135407 | 123297 | 175215 | 26, 25, 27 |
| 12 | AEBP2 | AE binding protein 2 | 139154 | 052126 | 172572 | 32, 40, 35 |
| 12 | AKAP3 | A-kinase anchoring protein 3 | 111254 | 272921 | 139180 | 38, 45, 36 |
| 12 | AAAS | aladin WD repeat nucleoporin | 094914 | 139637 | 170374 | 3, 9, 37 |
| 12 | ALDH1L2 | aldehyde dehydrogenase 1 family member L2 | 136010 | 151131 | 136051 | 1, 6, 42 |
| 12 | ALDH2 | aldehyde dehydrogenase 2 family (mitochondrial) | 111275 | 257767 | 089022 | 1, 19, 11 |
| 12 | ALG10 | ALG10, alpha-1,2-glucosyltransferase | 139133 | 110975 | 175548 | 29, 9, 23 |
| 12 | ALG10B | ALG10B, alpha-1,2-glucosyltransferase | 175548 | 139133 | 139117 | 4, 22, 29 |
| 12 | ALKBH2 | alkB homolog 2, alpha-ketoglutarate dependent dioxygenase | 189046 | 135093 | 076248 | 43, 3, 40 |
| 12 | A2M | alpha-2-macroglobulin | 175899 | 139187 | 126838 | 42, 19, 1 |
| 12 | A2ML1 | alpha-2-macroglobulin like 1 | 166535 | 166532 | 111752 | 24, 30, 13 |
| 12 | ALX1 | ALX homeobox 1 | 180318 | 133640 | 198774 | 35, 19, 23 |
| 12 | AMDHD1 | amidohydrolase domain containing 1 | 139344 | 165972 | 084110 | 2, 17, 19 |
| 12 | ANAPC5 | anaphase promoting complex subunit 5 | 089053 | 110931 | 170633 | 3, 1, 43 |
| 12 | ANAPC7 | anaphase promoting complex subunit 7 | 196510 | 174437 | 111229 | 29, 26, 2 |
| 12 | ANKLE2 | ankyrin repeat and LEM domain containing 2 | 176915 | 247077 | 090615 | 38, 22, 24 |
| 12 | ASB8 | ankyrin repeat and SOCS box containing 8 | 177981 | 152556 | 177875 | 18, 29, 25 |
| 12 | ANKS1B | ankyrin repeat and sterile alpha motif domain containing 1B | 185046 | 120868 | 180219 | 8, 11, 26 |
| 12 | ANKRD13A | ankyrin repeat domain 13A | 076513 | 139436 | 174456 | 40, 22, 38 |
| 12 | ANKRD33 | ankyrin repeat domain 33 | 167612 | 196876 | 139567 | 32, 14, 8 |
| 12 | ANKRD52 | ankyrin repeat domain 52 | 139645 | 139540 | 135469 | 43, 26, 33 |
| 12 | ANO2 | anoctamin 2 | 047617 | 185652 | 110799 | 14, 36, 38 |
| 12 | ANO4 | anoctamin 4 | 151572 | 139354 | 256870 | 31, 8, 17 |
| 12 | ANO6 | anoctamin 6 | 177119 | 185610 | 189079 | 1, 11, 40 |
| 12 | ANHX | anomalous homeobox | 227059 | 090612 | 111291 | 38, |
| 12 | AMN1 | antagonist of mitotic exit network 1 homolog | 151743 | 139160 | 188375 | 13, 34, 8 |
| 12 | AMHR2 | anti-Mullerian hormone receptor type 2 | 135409 | 185591 | 205352 | 36, 38, 15 |
| 12 | APOBEC1 | apolipoprotein B mRNA editing enzyme catalytic subunit 1 | 111701 | 177575 | 184344 | 16, |
| 12 | APOF | apolipoprotein F | 175336 | 170581 | 111602 | 19, 23, |
| 12 | APOLD1 | apolipoprotein L domain containing 1 | 178878 | 111276 | 213782 | 42, 26, 28 |
| 12 | APAF1 | apoptotic peptidase activating factor 1 | 120868 | 166130 | 185046 | 29, 11, 22 |
| 12 | AQP2 | aquaporin 2 | 167580 | 135472 | 161798 | 17, 33, 9 |
| 12 | AQP5 | aquaporin 5 | 161798 | 167580 | 086159 | 37, 38, 14 |
| 12 | AQP6 | aquaporin 6 | 086159 | 161798 | 161800 | 17, 10, 35 |
| 12 | AGAP2 | ArfGAP with GTPase domain, ankyrin repeat and PH domain 2 | 135439 | 135506 | 135452 | 39, 34, 5 |
| 12 | RSRC2 | arginine and serine rich coiled-coil 2 | 111011 | 033030 | 184445 | 15, 4, 11 |
| 12 | AVPR1A | arginine vasopressin receptor 1A | 166148 | 111110 | 177990 | 17, 11, 29 |
| 12 | ACTR6 | ARP6 actin-related protein 6 homolog | 075089 | 111647 | 166153 | 3, 32, 4 |
| 12 | ARNTL2 | aryl hydrocarbon receptor nuclear translocator like 2 | 029153 | 211455 | 165935 | |
| 12 | ASUN | asunder, spermatogenesis regulator | 064102 | 123104 | 111790 | 7, 45, 4 |
| 12 | ATXN2 | ataxin 2 | 204842 | 111252 | 089234 | 18, 31, 45 |
| 12 | ATXN7L3B | ataxin 7 like 3B | 253719 | 072657 | 166006 | 42, 29, 39 |
| 12 | ABCB9 | ATP binding cassette subfamily B member 9 | 150967 | 139722 | 111325 | 9, 8, 3 |
| 12 | ABCC9 | ATP binding cassette subfamily C member 9 | 069431 | 121361 | 111726 | 11, 26, 42 |
| 12 | ABCD2 | ATP binding cassette subfamily D member 2 | 173208 | 139116 | 180116 | 30, 8, 42 |
| 12 | ATP5B | ATP synthase, H+ transporting, mitochondrial F1 complex, | 110955 | 076108 | 110958 | 21, 9, 40 |
| | | beta polypeptide | | | | |
| 12 | ATP5G2 | ATP synthase, H+ transporting, mitochondrial Fo complex | 135390 | 170653 | 012822 | 4, 34, 7 |
| | | subunit C2 (subunit 9) | | | | |
| 12 | ATP23 | ATP23 metallopeptidase and ATP synthase assembly factor homolog | 166896 | 175215 | 139263 | 22, 17, 15 |
| 12 | ATP6V0A2 | ATPase H+ transporting V0 subunit a2 | 185344 | 168778 | 197653 | 22, 1, 41 |
| 12 | ATP2B1 | ATPase plasma membrane Ca2+ transporting 1 | 070961 | 259075 | 197651 | 6, 22, 11 |
| 12 | ATP2A2 | ATPase sarcoplasmic/endoplasmic reticulum Ca2+ transporting 2 | 174437 | 122970 | 196510 | 25, 15, 26 |
| 12 | ARID2 | AT-rich interaction domain 2 | 189079 | 177119 | 139218 | 38, 40, 18 |
| 12 | ATN1 | atrophin 1 | 111676 | 111674 | 111678 | 40, 18, 4 |
| 12 | ATG101 | autophagy related 101 | 123395 | 123358 | 167767 | |
| 12 | BBS10 | Bardet-Biedl syndrome 10 | 179941 | 187109 | 091039 | 9, 42, 1 |
| 12 | BHLHE41 | basic helix-loop-helix family member e41 | 123095 | 123094 | 123096 | 29, 14, 22 |
| 12 | BCDIN3D | BCDIN3 domain containing RNA methyltransferase | 186666 | 167566 | 135472 | 41, 27, 9 |
| 12 | BCL7A | BCL tumor suppressor 7A | 110987 | 158023 | 175727 | 29, 22, 40 |
| 12 | BCL2L14 | BCL2 like 14 | 121380 | 139083 | 070018 | |
| 12 | BEST3 | bestrophin 3 | 127325 | 198812 | 127328 | 24, 26, 21 |
| 12 | B4GALNT1 | beta-1,4-N-acetyl-galactosaminyltransferase 1 | 135454 | 135502 | 135506 | 8, 6, 33 |
| 12 | B4GALNT3 | beta-1,4-N-acetyl-galactosaminyltransferase 3 | 139044 | 120647 | 171840 | 24, 38, 16 |
| 12 | BICD1 | BICD cargo adaptor 1 | 151746 | 174718 | 139132 | 27, 22, 1 |
| 12 | BICDL1 | BICD family like cargo adaptor 1 | 135127 | 279777 | 111737 | 26, 18, 31 |
| 12 | BLOC1S1 | biogenesis of lysosomal organelles complex 1 subunit 1 | 135441 | 258311 | 135437 | 41, 5, 19 |
| 12 | BORCS5 | BLOC-1 related complex subunit 5 | 165714 | 111261 | 111266 | |
| 12 | BCAT1 | branched chain amino acid transaminase 1 | 060982 | 134532 | 118308 | 12, 38, 45 |
| 12 | BRAP | BRCA1 associated protein | 089234 | 204842 | 111271 | 38, 13, 21 |
| 12 | BRI3BP | BRI3 binding protein | 184992 | 150990 | 081760 | 21, 22, 28 |
| 12 | BIN2 | bridging integrator 2 | 110934 | 170545 | 139610 | 36, 5, 39 |
| 12 | BAZ2A | bromodomain adjacent to zinc finger domain 2A | 076108 | 076067 | 110955 | 26, 43, 21 |
| 12 | BTBD11 | BTB domain containing 11 | 151136 | 008405 | 136045 | 29, 31, 40 |
| 12 | BTG1 | BTG anti-proliferation factor 1 | 133639 | 011465 | 205057 | 11, 28, 22 |
| 12 | C2CD5 | C2 calcium dependent domain containing 5 | 111731 | 111728 | 139163 | 11, 45, 42 |
| 12 | CALCOCO1 | calcium binding and coiled-coil domain 1 | 012822 | 135390 | 123364 | 39, 42, 8 |
| 12 | CABP1 | calcium binding protein 1 | 157782 | 167272 | 110917 | 14, 8, 16 |
| 12 | CRACR2A | calcium release activated channel regulator 2A | 130038 | 111218 | 111224 | |
| 12 | CACNA2D4 | calcium voltage-gated channel auxiliary subunit alpha2delta 4 | 151062 | 006831 | 166159 | 7, 36, 5 |
| 12 | CACNB3 | calcium voltage-gated channel auxiliary subunit beta 3 | 167535 | 174233 | 174243 | 43, 13, 8 |
| 12 | CACNA1C | calcium voltage-gated channel subunit alphal C | 151067 | 151065 | 004478 | 15, |
| 12 | CAMKK2 | calcium/calmodulin dependent protein kinase kinase 2 | 110931 | 135124 | 089053 | 8, 33, 18 |
| 12 | CAPS2 | calcyphosine 2 | 180881 | 166006 | 173401 | 11, 31, 10 |
| 12 | CLSTN3 | calsyntenin 3 | 139182 | 139194 | 139197 | 8, 43, 26 |
| 12 | CREBL2 | cAMP responsive element binding protein like 2 | 111269 | 111266 | 183150 | 4, 2, 11 |
| 12 | CASC1 | cancer susceptibility candidate 1 | 118307 | 118308 | 205707 | 38, 42, 31 |
| 12 | CNPY2 | canopy FGF signaling regulator 2 | 257727 | 144785 | 135473 | 3, 1, 28 |
| 12 | CLIP1 | CAP-Gly domain containing linker protein 1 | 130779 | 139719 | 033030 | 45, 40, 18 |
| 12 | CAPZA3 | capping actin protein of muscle Z-line alpha subunit 3 | 177938 | 139151 | 052126 | 38, 8, |
| 12 | CAPRIN2 | caprin family member 2 | 110888 | 133704 | 110900 | 11, 26, 10 |
| 12 | CHST11 | carbohydrate sulfotransferase 11 | 171310 | 255150 | 136052 | 22, 35, 5 |
| 12 | CPM | carboxypeptidase M | 135678 | 135679 | 111605 | |
| 12 | CRADD | CASP2 and RIPK1 domain containing adaptor with death domain | 169372 | 120833 | 136040 | |
| 12 | CNOT2 | CCR4-NOT transcription complex subunit 2 | 111596 | 166268 | 279530 | 11, 31, 15 |
| 12 | CD163 | CD163 molecule | 177575 | 177675 | 111701 | 10, 42, 32 |
| 12 | CD163L1 | CD163 molecule like 1 | 177675 | 215009 | 177575 | 39, 32, 2 |
| 12 | CD27 | CD27 molecule | 139193 | 111321 | 139192 | 41, 13, 36 |
| 12 | CD4 | CD4 molecule | 010610 | 089692 | 250510 | 39, 36, 10 |
| 12 | CD63 | CD63 molecule | 135404 | 135437 | 135414 | 35, 43, 28 |
| 12 | CD69 | CD69 molecule | 110848 | 184293 | 150045 | 5, 7, 39 |
| 12 | CD9 | CD9 molecule | 010278 | 110799 | 008323 | 30, 29, 13 |
| 12 | CDCA3 | cell division cycle associated 3 | 111665 | 111664 | 111667 | |
| 12 | CEP290 | centrosomal protein 290 | 198707 | 133641 | 139324 | 11, 12, 31 |
| 12 | CEP83 | centrosomal protein 83 | 173588 | 136040 | 057704 | |
| 12 | CERS5 | ceramide synthase 5 | 139624 | 178449 | 050405 | 18, 5, 25 |
| 12 | CCT2 | chaperonin containing TCP1 subunit 2 | 166226 | 166225 | 198812 | 43, 4, 38 |
| 12 | CHFR | checkpoint with forkhead and ring finger domains | 072609 | 283396 | 196458 | 39, 42, 38 |
| 12 | CMKLR1 | chemerin chemokine-like receptor 1 | 174600 | 075035 | 198855 | 1, 40, 44 |
| 12 | CHPT1 | choline phosphotransferase 1 | 111666 | 196091 | 139351 | |
| 12 | CBX5 | chromobox 5 | 094916 | 123415 | 135486 | 22, 12, 26 |
| 12 | CHD4 | chromodomain helicase DNA binding protein 4 | 111642 | 111641 | 184574 | 21, 40, 12 |
| 12 | C12orf10 | chromosome 12 open reading frame 10 | 139637 | 123349 | 094914 | 38, 21, 29 |
| 12 | C12orf29 | chromosome 12 open reading frame 29 | 133641 | 165805 | 198707 | 22, 1, 26 |
| 12 | C12orf4 | chromosome 12 open reading frame 4 | 047621 | 111241 | 111247 | 30, 42, 3 |
| 12 | C12orf40 | chromosome 12 open reading frame 40 | 180116 | 173208 | 151229 | 38, 25, |
| 12 | C12orf42 | chromosome 12 open reading frame 42 | 179088 | 139352 | 136011 | 38, 22, 39 |
| 12 | C12orf43 | chromosome 12 open reading frame 43 | 157895 | 135100 | 135114 | 43, 2, 41 |
| 12 | C12orf45 | chromosome 12 open reading frame 45 | 151131 | 136052 | 136010 | 3, 30, 41 |
| 12 | C12orf49 | chromosome 12 open reading frame 49 | 111412 | 258102 | 135119 | 6, 40, 23 |
| 12 | C12orf50 | chromosome 12 open reading frame 50 | 165805 | 182050 | 133641 | 38, 7, 33 |
| 12 | C12orf54 | chromosome 12 open reading frame 54 | 177627 | 139223 | 197376 | 38, |
| 12 | C12orf56 | chromosome 12 open reading frame 56 | 185306 | 174206 | 184575 | 4, 40, 32 |
| 12 | C12orf57 | chromosome 12 open reading frame 57 | 111678 | 111676 | 111679 | 15, 31, 18 |
| 12 | C12orf60 | chromosome 12 open reading frame 60 | 182993 | 084463 | 179256 | 29, 34, 18 |
| 12 | C12orf65 | chromosome 12 open reading frame 65 | 130921 | 051825 | 111328 | 30, 29, 39 |
| 12 | C12orf66 | chromosome 12 open reading frame 66 | 174206 | 196935 | 185306 | 9, 3, 13 |
| 12 | C12orf71 | chromosome 12 open reading frame 71 | 214700 | 152944 | 211455 | 10, |
| 12 | C12orf73 | chromosome 12 open reading frame 73 | 204954 | 166598 | 139372 | 43, 11, 2 |
| 12 | C12orf74 | chromosome 12 open reading frame 74 | 214215 | 257127 | 187510 | 42, 4, 22 |
| 12 | C12orf75 | chromosome 12 open reading frame 75 | 235162 | 136044 | 074590 | 45, 10, 6 |
| 12 | C12orf76 | chromosome 12 open reading frame 76 | 174456 | 076513 | 122970 | |
| 12 | CLLU1 | chronic lymphocytic leukemia up-regulated 1 | 257127 | 205057 | 214215 | |
| 12 | CLLU1OS | chronic lymphocytic leukemia up-regulated 1 opposite strand | 205057 | 133639 | 257127 | |
| 12 | CELA1 | chymotrypsin like elastase family member 1 | 139610 | 110934 | 139629 | |
| 12 | CFAP54 | cilia and flagella associated protein 54 | 188596 | 059758 | 139350 | |
| 12 | CFAP73 | cilia and flagella associated protein 73 | 186710 | 111344 | 123064 | 21, 9, 3 |
| 12 | CS | citrate synthase | 062485 | 135469 | 144785 | |
| 12 | CIT | citron rho-interacting serine/threonine kinase | 122966 | 111725 | 279777 | 27, 6, 8 |
| 12 | CPSF6 | cleavage and polyadenylation specific factor 6 | 111605 | 135678 | 090382 | 3, 36, 12 |
| 12 | COPZ1 | coatomer protein complex subunit zeta 1 | 111481 | 123405 | 139572 | 9, 34, 15 |
| 12 | COQ10A | coenzyme Q10A | 135469 | 139645 | 062485 | 26, 25, 31 |
| 12 | COQ5 | coenzyme Q5, methyltransferase | 110871 | 088986 | 022840 | 40, 23, 41 |
| 12 | CCDC184 | coiled-coil domain containing 184 | 177875 | 177981 | 172640 | 8, 2, 14 |
| 12 | CCDC38 | coiled-coil domain containing 38 | 165972 | 139343 | 139344 | 38, |
| 12 | CCDC53 | Coiled-coil domain containing 53 | 120860 | 136048 | 075188 | 2, 29, 22 |
| 12 | CCDC59 | coiled-coil domain containing 59 | 133773 | 139220 | 127720 | 35, 7, 22 |
| 12 | CCDC60 | coiled-coil domain containing 60 | 183273 | 152137 | 224982 | 42, 14, 33 |
| 12 | CCDC62 | coiled-coil domain containing 62 | 130783 | 139726 | 130787 | 38, 31, 8 |
| 12 | CCDC63 | coiled-coil domain containing 63 | 173093 | 186298 | 111245 | 38, 10, 8 |
| 12 | CCDC65 | coiled-coil domain containing 65 | 139537 | 272822 | 134285 | 30, 38, 3 |
| 12 | CCDC77 | coiled-coil domain containing 77 | 120647 | 073614 | 139044 | 12, 34, 13 |
| 12 | CCDC91 | coiled-coil domain containing 91 | 123106 | 087494 | 064763 | 10, 30, 17 |
| 12 | CCDC92 | coiled-coil domain containing 92 | 119242 | 197653 | 250091 | |
| 12 | CCER1 | coiled-coil glutamate rich protein 1 | 197651 | 070961 | 083782 | 38, |
| 12 | COL2A1 | collagen type II alpha 1 chain | 139219 | 134291 | 079387 | 11, 10, 6 |
| 12 | C1QL4 | complement C1q like 4 | 186897 | 135451 | 178401 | 37, 27, 44 |
| 12 | C1R | complement C1r | 159403 | 182326 | 139178 | 1, 6, 30 |
| 12 | C1RL | complement C1r subcomponent like | 139178 | 159403 | 139194 | 18, 43, 4 |
| 12 | C1S | complement C1s | 182326 | 111684 | 159403 | 36, 42, 10 |
| 12 | C3AR1 | complement C3a receptor 1 | 171860 | 065970 | 089818 | 10, 5, 32 |
| 12 | CNTN1 | contactin 1 | 018236 | 188906 | 165966 | 11, 26, 31 |
| 12 | COPS7A | COP9 signalosome subunit 7A | 111652 | 139200 | 089693 | 35, 34, 43 |
| 12 | CPNE8 | copine 8 | 139117 | 175548 | 139116 | 43, 29, 18 |
| 12 | CORO1C | coronin 1C | 110880 | 110876 | 084112 | 30, 45, 11 |
| 12 | COX14 | COX14, cytochrome c oxidase assembly factor | 178449 | 167588 | 139624 | 29, 31, 2 |
| 12 | CRY1 | cryptochrome circadian deck 1 | 008405 | 120832 | 151136 | 29, 38, 39 |
| 12 | CTDSP2 | CTD small phosphatase 2 | 175215 | 135407 | 166896 | 25, 22, 23 |
| 12 | CLEC1A | C-type lectin domain family 1 member A | 150048 | 197992 | 172243 | 32, 39, 11 |
| 12 | CLEC1B | C-type lectin domain family 1 member B | 165682 | 172322 | 256660 | 19, 20, 38 |
| 12 | CLEC12A | C-type lectin domain family 12 member A | 172322 | 188393 | 165682 | 7, 5, 19 |
| 12 | CLEC12B | C-type lectin domain family 12 member B | 256660 | 165682 | 197992 | 38, 20, 35 |
| 12 | CLEC2A | C-type lectin domain family 2 member A | 188393 | 256797 | 172322 | |
| 12 | CLEC2B | C-type lectin domain family 2 member B | 110852 | 150045 | 256797 | 7, 4, 26 |
| 12 | CLEC2D | C-type lectin domain family 2 member D | 069493 | 111796 | 184293 | 5, 39, 30 |
| 12 | CLEC4A | C-type lectin domain family 4 member A | 111729 | 089818 | 196946 | 30, 7, 36 |
| 12 | CLEC4C | C-type lectin domain family 4 member C | 198178 | 187569 | 205857 | 30, 5, 38 |
| 12 | CLEC4D | C-type lectin domain family 4 member D | 166527 | 205846 | 166523 | 7, 5, 36 |
| 12 | CLEC4E | C-type lectin domain family 4 member E | 166523 | 166527 | 111732 | 5, 36, 17 |
| 12 | CLEC6A | C-type lectin domain family 6 member A | 205846 | 171847 | 166527 | 20, |
| 12 | CLEC7A | C-type lectin domain family 7 member A | 172243 | 150048 | 173391 | 5, 36, 18 |
| 12 | CLEC9A | C-type lectin domain family 9 member A | 197992 | 256660 | 150048 | 32, 38, 17 |
| 12 | CLECL1 | C-type lectin like 1 | 184293 | 069493 | 110848 | 39, 22, 5 |
| 12 | CAND1 | cullin associated and neddylation dissociated 1 | 111530 | 155974 | 127334 | 22, 42, 24 |
| 12 | CUX2 | cut like homeobox 2 | 111249 | 111245 | 198324 | 11, 14, 33 |
| 12 | CCND2 | cyclin D2 | 118971 | 111224 | 078237 | 40, 11, 12 |
| 12 | CDK17 | cyclin dependent kinase 17 | 059758 | 111145 | 188596 | 26, 42, 22 |
| 12 | CDK2 | cyclin dependent kinase 2 | 123374 | 185664 | 111540 | 39, 35, 9 |
| 12 | CDK2AP1 | cyclin dependent kinase 2 associated protein 1 | 111328 | 130921 | 139697 | 45, 24, 31 |
| 12 | CDK4 | cyclin dependent kinase 4 | 135446 | 135452 | 139266 | 25, 9, 27 |
| 12 | CDKN1B | cyclin dependent kinase inhibitor 1B | 111276 | 183150 | 178878 | 11, 39, 13 |
| 12 | CCNT1 | cyclin T1 | 129315 | 139620 | 257987 | 39, 12, 31 |
| 12 | CSRP2 | cysteine and glycine rich protein 2 | 175183 | 186908 | 165891 | 43, 45, 15 |
| 12 | CSRNP2 | cysteine and serine rich nuclear protein 2 | 110925 | 050426 | 135457 | 38, 26, 31 |
| 12 | CSAD | cysteine sulfinic acid decarboxylase | 139631 | 167780 | 139651 | 26, 11, 1 |
| 12 | CMAS | cytidine monophosphate N-acetylneuraminic acid synthetase | 111726 | 069431 | 111728 | 11, 31, 3 |
| 12 | COX6A1 | cytochrome c oxidase subunit 6A1 | 111775 | 135097 | 111780 | 29, 37, 7 |
| 12 | CYP27B1 | cytochrome P450 family 27 subfamily B member 1 | 111012 | 139266 | 037897 | 17, 14, 4 |
| 12 | CKAP4 | cytoskeleton associated protein 4 | 136026 | 074590 | 166046 | 35, 19, 43 |
| 12 | DAO | D-amine acid oxidase | 110887 | 084112 | 166111 | 17, 19, 14 |
| 12 | DAZAP2 | DAZ associated protein 2 | 183283 | 184271 | 170545 | 30, 41, 36 |
| 12 | DDX11 | DEAD/H-box helicase 11 | 013573 | 110900 | 177359 | |
| 12 | DDX23 | DEAD-box helicase 23 | 174243 | 167535 | 172602 | 39, 24, 42 |
| 12 | DDX47 | DEAD-box helicase 47 | 213782 | 178878 | 013588 | 13, 43, 30 |
| 12 | DDX51 | DEAD-box helicase 51 | 185163 | 185684 | 184967 | 14, 21, 1 |
| 12 | DDX54 | DEAD-box helicase 54 | 123064 | 186710 | 139405 | 3, 21, 22 |
| 12 | DDX55 | DEAD-box helicase 55 | 111364 | 086598 | 111361 | 26, 6, 1 |
| 12 | DHX37 | DEAH-box helicase 37 | 150990 | 150991 | 184992 | 21, 27, 3 |
| 12 | DCP1B | decapping mRNAIB | 151065 | 166159 | 151067 | 38, 37, 31 |
| 12 | DCN | decorin | 011465 | 139329 | 133639 | 44, 38, |
| 12 | DTX1 | deltex E3 ubiquitin ligase 1 | 135144 | 111335 | 111344 | 21, 22, 41 |
| 12 | DTX3 | deltex E3 ubiquitin ligase 3 | 178498 | 166908 | 240771 | 28, 40, 17 |
| 12 | DDN | dendrin | 181418 | 125084 | 181929 | 9, 3, 22 |
| 12 | DENND5B | DENN domain containing 5B | 170456 | 139146 | 139160 | 5, 22, 41 |
| 12 | DENR | density regulated re-initiation and release factor | 139726 | 196917 | 130783 | 4, 12, 1 |
| 12 | DERA | deoxyribose-phosphate aldolase | 023697 | 023734 | 188991 | 4, 29, 6 |
| 12 | DEPDC4 | DEP domain containing 4 | 166153 | 075089 | 136021 | |
| 12 | DCD | dermcidin | 161634 | 135413 | 172551 | 23, |
| 12 | DHH | desert hedgehog | 139549 | 167550 | 139636 | 38, 13, 9 |
| 12 | DBX2 | developing brain homeobox 2 | 185610 | 184613 | 177119 | 6, 17, 8 |
| 12 | DPPA3 | developmental pluripotency associated 3 | 187569 | 184344 | 198178 | |
| 12 | DIABLO | diablo IAP-binding mitochondrial protein | 184047 | 176383 | 256861 | 26, 9, 37 |
| 12 | DGKA | diacylglycerol kinase alpha | 065357 | 170473 | 185664 | 39, 24, 36 |
| 12 | DIP2B | disco interacting protein 2 homolog B | 066084 | 161813 | 123268 | 11, 35, 40 |
| 12 | DDIT3 | DNA damage inducible transcript 3 | 175197 | 166986 | 166987 | 37, 25, 31 |
| 12 | DRAM1 | DNA damage regulated autophagy modulator 1 | 136048 | 111670 | 120860 | 34, 9, 40 |
| 12 | HELB | DNA helicase B | 127311 | 090376 | 155974 | 25, 45, 39 |
| 12 | POLE | DNA polymerase epsilon, catalytic subunit | 177084 | 187848 | 176894 | 29, 21, 18 |
| 12 | DNAJC14 | DnaJ heat shock protein family (Hsp40) member C14 | 135392 | 123353 | 123342 | 24, 39, 25 |
| 12 | DNAJC22 | DnaJ heat shock protein family (Hsp40) member C22 | 178401 | 186897 | 123352 | |
| 12 | DPY19L2 | dpy-19 like 2 | 177990 | 166148 | 118600 | |
| 12 | DUSP16 | dual specificity phosphatase 16 | 111266 | 165714 | 111269 | 34, 2, 39 |
| 12 | DUSP6 | dual specificity phosphatase 6 | 139318 | 049130 | 139323 | |
| 12 | DYRK2 | dual specificity tyrosine phosphorylation regulated kinase 2 | 127334 | 111530 | 111537 | 37, 24, 22 |
| 12 | DYRK4 | dual specificity tyrosine phosphorylation regulated kinase 4 | 010219 | 111247 | 272921 | 43, 38, 18 |
| 12 | DCTN2 | dynactin subunit 2 | 175203 | 166987 | 155980 | 43, 2, 9 |
| 12 | DNM1L | dynamin 1 like | 087470 | 139132 | 139131 | 24, 42, 8 |
| 12 | DNAH10 | dynein axonemal heavy chain 10 | 197653 | 185344 | 119242 | 31, 5, 30 |
| 12 | DNAH10OS | dynein axonemal heavy chain 10 opposite strand | 250091 | 119242 | 179195 | 42, 22, 5 |
| 12 | DYNLL1 | dynein light chain LC8-type 1 | 088986 | 111786 | 110871 | 45, 43, 3 |
| 12 | EP400 | E1A binding protein p400 | 183495 | 177192 | 185684 | 1, 29, 22 |
| 12 | E2F7 | E2F transcription factor 7 | 165891 | 175183 | 067798 | 9, 7, 12 |
| 12 | EEA1 | early endosome antigen 1 | 102189 | 187510 | 173598 | 26, 29, 25 |
| 12 | ETFBKMT | electron transfer flavoprotein beta subunit lysine | 139160 | 170456 | 151743 | |
| | | methyltransferase | | | | |
| 12 | ETFRF1 | electron transfer flavoprotein regulatory factor 1 | 205707 | 118307 | 133703 | |
| 12 | ELK3 | ELK3, ETS transcription factor | 111145 | 111144 | 059758 | 45, 42, 43 |
| 12 | ERC1 | ELKS/RAB6-interacting/CAST family member 1 | 082805 | 002016 | 111186 | 18, 37, 23 |
| 12 | EMG1 | EMG1, N1-specific pseudouridine methyltransferase | 126749 | 215021 | 268439 | 13, 30, 3 |
| 12 | EMG1 | EMG1, N1-specific pseudouridine methyltransferase | 268439 | 126749 | 111684 | 13, 30, 3 |
| 12 | ENDOU | endonuclease, poly(U) specific | 111405 | 005175 | 079337 | 32, 13, 24 |
| 12 | ERP27 | endoplasmic reticulum protein 27 | 139055 | 111341 | 111348 | 29, 3, 7 |
| 12 | ERP29 | endoplasmic reticulum protein 29 | 089248 | 198270 | 111300 | 5, 9, 30 |
| 12 | ENO2 | enolase 2 | 111674 | 010626 | 111676 | 8, 14, 26 |
| 12 | EID3 | EP300 interacting inhibitor of differentiation 3 | 255150 | 198431 | 171310 | 38, 18, 22 |
| 12 | EP400NL | EP400 N-terminal like | 185684 | 183495 | 185163 | 22, 38, 29 |
| 12 | EPS8 | epidermal growth factor receptor pathway substrate 8 | 151491 | 151490 | 023734 | 42, 24, 1 |
| 12 | EPYC | epiphycan | 083782 | 197651 | 139330 | 11, 32, 12 |
| 12 | EMP1 | epithelial membrane protein 1 | 134531 | 111305 | 273079 | 13, 45, 24 |
| 12 | ERBB3 | erb-b2 receptor tyrosine kinase 3 | 065361 | 197728 | 257411 | 42, 24, 11 |
| 12 | ERGIC2 | ERGIC and golgi 2 | 087502 | 064763 | 187950 | 13, 29, 30 |
| 12 | ETNK1 | ethanolamine kinase 1 | 139163 | 111731 | 134532 | 18, 11, 16 |
| 12 | ETV6 | ETS variant 6 | 139083 | 121335 | 121380 | 11, 22, 23 |
| 12 | EIF2B1 | eukaryotic translation initiation factor 2 B subunit alpha | 111361 | 111364 | 111358 | 24, 37, 2 |
| 12 | EIF4B | eukaryotic translation initiation factor 4B | 063046 | 111057 | 111077 | 42, 39, 18 |
| 12 | XPOT | exportin for tRNA | 184575 | 185306 | 183735 | 9, 6, 24 |
| 12 | ESYT1 | extended synaptotagmin 1 | 139641 | 135482 | 196465 | 43, 1, 24 |
| 12 | ESPL1 | extra spindle pole bodies like 1, separase | 135476 | 182544 | 123349 | 41, 12, 22 |
| 12 | FAM109A | family with sequence similarity 109 member A | 198324 | 111249 | 111252 | 33, 16, 14 |
| 12 | FAM186A | family with sequence similarity 186 member A | 185958 | 050405 | 161813 | 10, 22, 38 |
| 12 | FAM186B | family with sequence similarity 186 member B | 135436 | 110844 | 161791 | 38, 22, 8 |
| 12 | FAM19A2 | family with sequence similarity 19 member A2, C-C motif | 198673 | 118596 | 135655 | |
| | | chemokine like | | | | |
| 12 | FAM216A | family with sequence similarity 216 member A | 204856 | 111231 | 111237 | 2, 24, 5 |
| 12 | FAM222A | family with sequence similarity 222 member A | 139438 | 110921 | 111199 | 11, 14, 2 |
| 12 | FAM234B | family with sequence similarity 234 member B | 084444 | 013583 | 111305 | 29, 23, 8 |
| 12 | FAM60A | family with sequence similarity 60 member A | 139146 | 177359 | 170456 | 39, 27, 38 |
| 12 | FAM71C | family with sequence similarity 71 member C | 180219 | 185046 | 111647 | 38, 8, |
| 12 | FAM90A1 | family with sequence similarity 90 member A1 | 171847 | 196946 | 205846 | 38, 20, 28 |
| 12 | FAIM2 | Fas apoptotic inhibitory molecule 2 | 135472 | 186666 | 167580 | 8, 26, 14 |
| 12 | FAR2 | fatty acyl-CpA reductase 2 | 064763 | 123106 | 087502 | |
| 12 | FBXL14 | F-box and leucine rich repeat protein 14 | 171823 | 111186 | 006831 | 1, 26, 21 |
| 12 | FBXW8 | F-box and WD repeat domain containing 8 | 174989 | 135116 | 088992 | 4, 22, 31 |
| 12 | FBXO21 | F-box protein 21 | 135108 | 088992 | 089250 | 38, 26, 4 |
| 12 | FGFR1OP2 | FGFR1 oncogene partner 2 | 111790 | 064102 | 064115 | 26, 31, 5 |
| 12 | FGF23 | fibroblast growth factor 23 | 118972 | 078237 | 111241 | 12, 38, |
| 12 | FGF6 | fibroblast growth factor 6 | 111241 | 118972 | 047621 | 25, 38, |
| 12 | FRS2 | fibroblast growth factor receptor substrate 2 | 166225 | 127337 | 166226 | 24, 11, 29 |
| 12 | FBRSL1 | fibrosin like 1 | 112787 | 182870 | 204583 | 12, |
| 12 | FICD | FIC domain containing | 198855 | 174600 | 075856 | 2, 1, 13 |
| 12 | FKBP11 | FK506 binding protein 11 | 134285 | 139537 | 255863 | 35, 24, 28 |
| 12 | FKBP4 | FK506 binding protein 4 | 004478 | 151067 | 111203 | |
| 12 | FOXJ2 | forkhead box J2 | 065970 | 059804 | 171860 | 27, 43, 2 |
| 12 | FOXM1 | forkhead box M1 | 111206 | 283297 | 171792 | 21, 18, 34 |
| 12 | FOXN4 | forkhead box N4 | 139445 | 076555 | 174527 | 38, 44, 14 |
| 12 | FMNL3 | formin like 3 | 161791 | 135436 | 139644 | 22, |
| 12 | FZD10 | frizzled class receptor 10 | 111432 | 151952 | 125207 | 9, 27, 32 |
| 12 | FGD4 | FYVE, RhoGEF and PH domain containing 4 | 139132 | 151746 | 087470 | 29, 38, 1 |
| 12 | FGD6 | FYVE, RhoGEF and PH domain containing 6 | 180263 | 120798 | 028203 | 22, 26, 13 |
| 12 | GNB3 | G protein subunit beta 3 | 111664 | 110811 | 111665 | 14, 31, 25 |
| 12 | GPR162 | G protein-coupled receptor 162 | 250510 | 010610 | 110811 | |
| 12 | GPR182 | G protein-coupled receptor 182 | 166856 | 139547 | 166860 | |
| 12 | GPR19 | G protein-coupled receptor 19 | 183150 | 111269 | 111276 | 38, 12, 32 |
| 12 | GPR84 | G protein-coupled receptor 84 | 139572 | 111481 | 161642 | 20, 5, 7 |
| 12 | GPRC5A | G protein-coupled receptor class C group 5 member A | 013588 | 213782 | 111291 | 13, 16, 1 |
| 12 | GPRC5D | G protein-coupled receptor class C group 5 member D | 111291 | 013588 | 013583 | 1, 7, 33 |
| 12 | GABARAPL1 | GABA type A receptor associated protein like 1 | 139112 | 165685 | 134539 | 15, 8, 32 |
| 12 | GTSF1 | gametocyte specific factor 1 | 170627 | 161638 | 123338 | 38, 7, 34 |
| 12 | GCN1 | GCN1, elF2 alpha kinase activator homolog | 089154 | 111737 | 089157 | 31, 18, 35 |
| 12 | GRASP | general receptor for phosphoinositides 1 associated | 161835 | 135503 | 123358 | 26, 1, 36 |
| | | scaffold protein | | | | |
| 12 | GTF2H3 | general transcription factor IIH subunit 3 | 111358 | 111361 | 168778 | 45, 4, 5 |
| 12 | GSG1 | germ cell associated 1 | 111305 | 084444 | 134531 | 14, 38, 8 |
| 12 | GIT2 | GIT ArfGAP2 | 139436 | 139437 | 076513 | 39, 22, 41 |
| 12 | GLI1 | GLI family zinc finger 1 | 111087 | 139269 | 123329 | 25, 21, 12 |
| 12 | GLIPR1 | GLI pathogenesis related 1 | 139278 | 180481 | 111615 | 45, 6, 44 |
| 12 | GLIPR1L1 | GLI pathogenesis related 1 like 1 | 173401 | 180881 | 180481 | 38, 10, 23 |
| 12 | GLIPR1L2 | GLI pathogenesis related 1 like 2 | 180481 | 173401 | 139278 | 10, 38, 24 |
| 12 | GNS | glucosamine (N-acetyl)-6-sulfatase | 135677 | 153179 | 111490 | 42, 24, 2 |
| 12 | GXYLT1 | glucoside xylosyltransferase 1 | 151233 | 165966 | 015153 | 31, 18, 4 |
| 12 | GRIN2B | glutamate ionotropic receptor NMDA type subunit 2B | 273079 | 134531 | 171681 | 8, 38, 16 |
| 12 | GRIP1 | glutamate receptor interacting protein 1 | 155974 | 127311 | 111530 | 29, 32, 34 |
| 12 | GLS2 | glutaminase 2 | 135423 | 176422 | 076067 | 29, 19, 8 |
| 12 | GATC | glutamyl-tRNA amidotransferase subunit C | 257218 | 170855 | 111786 | 11, 33, 29 |
| 12 | GAPDH | glyceraldehyde-3-phosphate dehydrogenase | 111640 | 010292 | 010295 | |
| 12 | GPD1 | glycerol-3-phosphate dehydrogenase 1 | 167588 | 066117 | 178449 | 1, 26, 25 |
| 12 | GYS2 | glycogen synthase 2 | 111713 | 134548 | 111716 | 19, 10, |
| 12 | GLTP | glycolipid transfer protein | 139433 | 111199 | 139437 | 29, 18, 11 |
| 12 | GLT1D1 | glycosyltransferase 1 domain containing 1 | 151948 | 139370 | 151952 | 38, 5, 27 |
| 12 | GLT8D2 | glycosyltransferase 8 domain containing 2 | 120820 | 139372 | 111727 | 1, 43, 15 |
| 12 | GOT1B | golgi transport 1B | 111711 | 004700 | 134548 | 4, 34, 22 |
| 12 | GOLGA3 | golgin A3 | 090615 | 176915 | 283396 | 13, 29, 6 |
| 12 | GPN3 | GPN-loop GTPase 3 | 111231 | 111229 | 204856 | 34, 7, 6 |
| 12 | GAS2L3 | growth arrest specific 2 like 3 | 139354 | 012504 | 151572 | 26, 35, 23 |
| 12 | GDF11 | growth differentiation factor 11 | 135414 | 135404 | 205323 | 14, 26, 43 |
| 12 | GDF3 | growth differentiation factor 3 | 184344 | 111701 | 187569 | 12, 38, 17 |
| 12 | GUCY2C | guanylate cyclase 2C | 070019 | 121316 | 197837 | 16, 37, 25 |
| 12 | H1FNT | H1 histone family member N, testis specific | 187166 | 172640 | 167528 | 38, 32, 17 |
| 12 | H2AFJ | H2A histone family member J | 246705 | 197837 | 084463 | 29, 33, 43 |
| 12 | H3F3C | H3 histone family member 3C | 188375 | 151743 | 174718 | 30, 41, 12 |
| 12 | HRK | harakiri, BCL2 interacting protein | 135116 | 135119 | 174989 | 40, 22, 32 |
| 12 | HSP90B1 | heat shock protein 90 beta family member 1 | 166598 | 111696 | 204954 | |
| 12 | HSPB8 | heat shock protein family B (small) member 8 | 152137 | 139767 | 183273 | 32, 15, 29 |
| 12 | HECTD4 | HECT domain E3 ubiquitin protein ligase 4 | 173064 | 135148 | 089009 | |
| 12 | HEBP1 | heme binding protein 1 | 013583 | 111291 | 084444 | 10, 11, 31 |
| 12 | HNRNPA1 | heterogeneous nuclear ribonucleoprotein A1 | 135486 | 094916 | 123405 | 11, 30, 12 |
| 12 | HIGD1C | HIG1 hypoxia inducible domain family member 1C | 214511 | 185432 | 110911 | 38, |
| 12 | HMGA2 | high mobility group AT-hook 2 | 149948 | 174099 | 139233 | 12, 3, 11 |
| 12 | HAL | histidine ammonia-lyase | 084110 | 139344 | 111144 | 19, 5, 15 |
| 12 | HIST4H4 | histone cluster 4 H4 | 197837 | 070019 | 246705 | 21, |
| 12 | HDAC7 | histone deacetylase 7 | 061273 | 211584 | 111424 | 39, 26, 44 |
| 12 | HNF1A | HNF1 homeobox A | 135100 | 157837 | 157895 | 3, 19, 37 |
| 12 | HOXC10 | homeobox C10 | 180818 | 123388 | 273049 | |
| 12 | HOXC11 | homeobox C11 | 123388 | 123407 | 180818 | 3, 9, 18 |
| 12 | HOXC12 | homeobox C12 | 123407 | 123364 | 123388 | |
| 12 | HOXC13 | homeobox C13 | 123364 | 012822 | 123407 | 9, 15, 3 |
| 12 | HOXC4 | homeobox C4 | 198353 | 037965 | 172789 | 17, |
| 12 | HOXC5 | homeobox C5 | 172789 | 198353 | 123415 | |
| 12 | HOXC6 | homeobox C6 | 197757 | 273049 | 180806 | 17, |
| 12 | HOXC8 | homeobox C8 | 037965 | 180806 | 198353 | 6, 38, 23 |
| 12 | HOXC9 | homeobox C9 | 180806 | 197757 | 037965 | 6, 37, 9 |
| 12 | HCFC2 | host cell factor C2 | 111727 | 120820 | 120837 | 29, 26, 38 |
| 12 | HIP1R | huntingtin interacting protein 1 related | 130787 | 130783 | 139722 | |
| 12 | HVCN1 | hydrogen voltage gated channel 1 | 122986 | 204852 | 186298 | 41, 22, 36 |
| 12 | HCAR1 | hydroxycarboxylic acid receptor 1 | 196917 | 255398 | 139726 | |
| 12 | HCAR2 | hydroxycarboxylic acid receptor 2 | 182782 | 184445 | 255398 | 36, 1, 13 |
| 12 | HCAR3 | hydroxycarboxylic acid receptor 3 | 255398 | 182782 | 196917 | 5, 36, 4 |
| 12 | HSD17B6 | hydroxysteroid 17-beta dehydrogenase 6 | 025423 | 198056 | 170426 | 19, 1, 33 |
| 12 | IKZF4 | IKAROS family zinc finger 4 | 123411 | 139531 | 197728 | 17, 32, |
| 12 | IKBIP | IKBKB interacting protein | 166130 | 075415 | 120868 | 1, 6, 40 |
| 12 | IPO8 | importin 8 | 133704 | 133687 | 110888 | 42, 38, 29 |
| 12 | INHBC | inhibin beta C subunit | 175189 | 179912 | 139269 | 19, 24, 37 |
| 12 | INHBE | inhibin beta E subunit | 139269 | 175189 | 111087 | 25, 19, 9 |
| 12 | ING4 | inhibitor of growth family member 4 | 111653 | 111644 | 126746 | 41, 31, 26 |
| 12 | ITPR2 | inositol 1,4,5-trisphosphate receptor type 2 | 123104 | 123096 | 064102 | 22, 2, 39 |
| 12 | IGF1 | insulin like growth factor 1 | 017427 | 183395 | 171759 | 11, 33, 27 |
| 12 | IGFBP6 | insulin like growth factor binding protein 6 | 167779 | 167778 | 167780 | 1, 26, 34 |
| 12 | ITFG2 | integrin alpha FG-GAP repeat containing 2 | 111203 | 004478 | 053702 | |
| 12 | ITGA5 | integrin subunit alpha 5 | 161638 | 161642 | 170627 | |
| 12 | ITGA7 | integrin subunit alpha 7 | 135424 | 170439 | 258311 | 26, 35, 25 |
| 12 | ITGB7 | integrin subunit beta 7 | 139626 | 139651 | 172819 | 36, 39, 5 |
| 12 | IFNG | interferon gamma | 111537 | 127334 | 111536 | 5, 22, 17 |
| 12 | IRAK3 | interleukin 1 receptor associated kinase 3 | 090376 | 155957 | 127311 | 11, 5, 7 |
| 12 | IRAK4 | interleukin 1 receptor associated kinase 4 | 198001 | 129317 | 151239 | 24, 45, 13 |
| 12 | IL22 | interleukin 22 | 127318 | 111536 | 111554 | 5, |
| 12 | IL23A | interleukin 23 subunit alpha | 110944 | 135473 | 170581 | 20, 28, 22 |
| 12 | IL26 | interleukin 26 | 111536 | 111537 | 127318 | 6, |
| 12 | IL31 | interleukin 31 | 204671 | 158113 | 176383 | |
| 12 | IFFO1 | intermediate filament family orphan 1 | 010295 | 111640 | 111641 | 31, 41, 21 |
| 12 | IFT81 | intraflagellar transport 81 | 122970 | 174456 | 174437 | 13, 1, 19 |
| 12 | IQSEC3 | IQ motif and Sec7 domain 3 | 120645 | 111291 | 111181 | 1, 18, 7 |
| 12 | IQCD | IQ motif containing D | 166578 | 139405 | 186815 | 21, 38, 10 |
| 12 | ISCU | iron-sulfur cluster assembly enzyme | 136003 | 075856 | 183160 | 18, 11, 29 |
| 12 | IAPP | islet amyloid polypeptide | 121351 | 084453 | 121350 | 28, 10, 38 |
| 12 | KANSL2 | KAT8 regulatory NSL complex subunit 2 | 139620 | 167531 | 129315 | 34, 21, 25 |
| 12 | KLHL42 | kelch like family member 42 | 087448 | 205693 | 087494 | 11, 26, 22 |
| 12 | KRT1 | keratin 1 | 167768 | 172867 | 189182 | 35, 15, 39 |
| 12 | KRT18 | keratin 18 | 111057 | 170421 | 063046 | 13, 16, 28 |
| 12 | KRT2 | keratin 2 | 172867 | 186049 | 167768 | 35, 5, |
| 12 | KRT3 | keratin 3 | 186442 | 185069 | 170477 | 14, 18, 39 |
| 12 | KRT4 | keratin 4 | 170477 | 186442 | 185640 | 13, 24, 18 |
| 12 | KRT5 | keratin 5 | 186081 | 205420 | 139648 | 18, 13, 24 |
| 12 | KRT6A | keratin 6A | 205420 | 170465 | 186081 | 30, 18, 24 |
| 12 | KRT6B | keratin 6B | 185479 | 170454 | 170465 | 18, 13, 24 |
| 12 | KRT6C | keratin 6C | 170465 | 185479 | 205420 | 13, 24, 18 |
| 12 | KRT7 | keratin 7 | 135480 | 167767 | 170442 | |
| 12 | KRT71 | keratin 71 | 139648 | 186081 | 170484 | 15, 39, 35 |
| 12 | KRT72 | keratin 72 | 170486 | 170484 | 186049 | 38, 5, |
| 12 | KRT73 | keratin 73 | 186049 | 170486 | 172867 | 15, |
| 12 | KRT74 | keratin 74 | 170484 | 139648 | 170486 | 15, 38, |
| 12 | KRT75 | keratin 75 | 170454 | 161850 | 185479 | 13, 15, 24 |
| 12 | KRT76 | keratin 76 | 185069 | 189182 | 186442 | 40, 24, |
| 12 | KRT77 | keratin 77 | 189182 | 167768 | 185069 | 35, 15, 38 |
| 12 | KRT78 | keratin 78 | 170423 | 185640 | 170421 | 13, 24, 18 |
| 12 | KRT79 | keratin 79 | 185640 | 170477 | 170423 | 24, 35, 43 |
| 12 | KRT8 | keratin 8 | 170421 | 170423 | 111057 | 32, 23, 37 |
| 12 | KRT80 | keratin 80 | 167767 | 123395 | 135480 | 9, 23, 28 |
| 12 | KRT81 | keratin 81 | 205426 | 170442 | 170523 | 6, 23, 10 |
| 12 | KRT82 | keratin 82 | 161850 | 161849 | 170454 | 15, |
| 12 | KRT83 | keratin 83 | 170523 | 205426 | 135443 | 23, 28, 20 |
| 12 | KRT84 | keratin 84 | 161849 | 135443 | 161850 | 24, 28, |
| 12 | KRT85 | keratin 85 | 135443 | 170523 | 161849 | 15, 39, 44 |
| 12 | KRT86 | keratin 86 | 170442 | 135480 | 205426 | 6, 28, 20 |
| 12 | KERA | keratocan | 139330 | 083782 | 139329 | 14, 42, 32 |
| 12 | KIAA1033 | KIAA1033 | 136051 | 136010 | 136044 | 22, 12, 35 |
| 12 | KIAA1551 | KIAA1551 | 174718 | 188375 | 151746 | 22, 44, 24 |
| 12 | KLRB1 | killer cell lectin like receptor B1 | 111796 | 126838 | 069493 | 15, 30, 20 |
| 12 | KLRC1 | killer cell lectin like receptor C1 | 134545 | 205809 | 180574 | 5, 32, 44 |
| 12 | KLRC2 | killer cell lectin like receptor C2 | 205809 | 255641 | 134545 | 9, 10, 19 |
| 12 | KLRC3 | killer cell lectin like receptor C3 | 205810 | 183542 | 205809 | 10, 8, 17 |
| 12 | KLRC4 | killer cell lectin like receptor C4 | 183542 | 213809 | 255641 | 42, 36, 22 |
| 12 | KLRD1 | killer cell lectin like receptor D1 | 134539 | 139112 | 213809 | |
| 12 | KLRF1 | killer cell lectin like receptor F1 | 150045 | 110848 | 110852 | 4, 27, 10 |
| 12 | KLRF2 | killer cell lectin like receptor F2 | 256797 | 110852 | 188393 | |
| 12 | KLRG1 | killer cell lectin like receptor G1 | 139187 | 003056 | 175899 | 43, 36, 22 |
| 12 | KLRK1 | killer cell lectin like receptor K1 | 213809 | 134539 | 183542 | 36, 9, 21 |
| 12 | KSR2 | kinase suppressor of ras 2 | 171435 | 089250 | 111445 | 31, 25, 20 |
| 12 | KIF21A | kinesin family member 21A | 139116 | 139117 | 173208 | 26, 2, 9 |
| 12 | KIF5A | kinesin family member 5A | 155980 | 175203 | 166908 | 8, 26, 14 |
| 12 | KNTC1 | kinetochore associated 1 | 184445 | 111011 | 182782 | 30, 19, 10 |
| 12 | KITLG | KIT ligand | 049130 | 139324 | 139318 | 42, 25, 17 |
| 12 | KLRC4-KLRK1 | KLRC4-KLRK1 readthrough | 255819 | 134539 | 183542 | |
| 12 | KRAS | KRAS proto-oncogene, GTPase | 133703 | 205707 | 152936 | 40, 22, 27 |
| 12 | KRR1 | KRR1, small subunit processome component homolog | 111615 | 139278 | 139289 | 4, 34, 22 |
| 12 | LARP4 | La ribonucleoprotein domain family member 4 | 161813 | 185958 | 066084 | 22, 23, 26 |
| 12 | LACRT | lacritin | 135413 | 135447 | 161634 | 14, 23, |
| 12 | LALBA | lactalbumin alpha | 167531 | 197376 | 139620 | |
| 12 | LDHB | lactate dehydrogenase B | 111716 | 111713 | 121361 | 4, 41, 21 |
| 12 | LMNTD1 | lamin tail domain containing 1 | 152936 | 133703 | 123094 | |
| 12 | LRP1 | LDL receptor related protein 1 | 123384 | 166888 | 182379 | 26, 1, 6 |
| 12 | LRP6 | LDL receptor related protein 6 | 070018 | 121380 | 111261 | 29, 11, 42 |
| 12 | LEMD3 | LEM domain containing 3 | 174106 | 156076 | 174099 | 4, 22, 42 |
| 12 | LETMD1 | LETM1 domain containing 1 | 050426 | 110911 | 110925 | 9, 39, 37 |
| 12 | LRCOL1 | leucine rich colipase like 1 | 204583 | 112787 | 187848 | 39, 32, 38 |
| 12 | LRRC10 | leucine rich repeat containing 10 | 198812 | 166226 | 127325 | 15, 25, 20 |
| 12 | LRRC23 | leucine rich repeat containing 23 | 010626 | 111671 | 111674 | 41, 34, 20 |
| 12 | LRRC43 | leucine rich repeat containing 43 | 158113 | 175727 | 204671 | 38, 3, 17 |
| 12 | LGR5 | leucine rich repeat containing G protein-coupled receptor 5 | 139292 | 127324 | 133858 | 44, 11, 32 |
| 12 | LRRK2 | leucine rich repeat kinase 2 | 188906 | 151229 | 018236 | 40, 22, 7 |
| 12 | LRIG3 | leucine rich repeats and immunoglobulin like domains 3 | 139263 | 166896 | 118596 | 42, 24, 18 |
| 12 | LRRIQ1 | leucine rich repeats and IQ motif containing 1 | 133640 | 231738 | 180318 | 38, 20, 42 |
| 12 | LRTM2 | leucine rich repeats and transmembrane domains 2 | 166159 | 151062 | 151065 | 8, 17, 14 |
| 12 | LTA4H | leukotriene A4 hydrolase | 111144 | 084110 | 111145 | 36, 39, 10 |
| 12 | LIMA1 | LIM domain and actin binding 1 | 050405 | 139624 | 185958 | 13, 45, 24 |
| 12 | LMO3 | LIM domain only 3 | 048540 | 008394 | 111404 | 8, 40, 42 |
| 12 | LHX5 | LIM homeobox 5 | 089116 | 139410 | 122965 | |
| 12 | LMBR1L | limb development membrane protein 1 like | 139636 | 139549 | 123416 | 39, 36, 45 |
| 12 | LIN7A | lin-7 homolog A, crumbs cell polarity complex component | 111052 | 111049 | 111058 | 10, 38, 30 |
| 12 | LLPH | LLP homolog, long-term synaptic facilitation | 139233 | 149948 | 228144 | 4, 7, 30 |
| 12 | LINC00935 | Long intergenic non-protein coding RNA 935 | 257987 | 129315 | 174233 | |
| 12 | LUM | lumican | 139329 | 139330 | 011465 | 43, 10, 32 |
| 12 | LAG3 | lymphocyte activating 3 | 089692 | 159335 | 010610 | 10, 36, 37 |
| 12 | LRMP | lymphoid restricted membrane protein | 118308 | 060982 | 118307 | 39, 22, 21 |
| 12 | LTBR | lymphotoxin beta receptor | 111321 | 111319 | 139193 | 3, 37, 4 |
| 12 | KDM2B | lysine demethylase 2B | 089094 | 170633 | 276045 | 11, 9, 21 |
| 12 | KDM5A | lysine demethylase 5A | 073614 | 010379 | 120647 | 45, 26, 36 |
| 12 | KMT2D | lysine methyltransferase 2D | 167548 | 181929 | 167550 | 5, 18, 4 |
| 12 | KMT5A | lysine methyltransferase 5A | 183955 | 139697 | 150977 | 18, 6, 21 |
| 12 | LPAR5 | lysophosphatidic acid receptor 5 | 184574 | 111642 | 111644 | 41, 36, 4 |
| 12 | LPCAT3 | lysophosphatidylcholine acyltransferase 3 | 111684 | 268439 | 182326 | 41, 39, 2 |
| 12 | LYZ | lysozyme | 090382 | 111605 | 127337 | 30, 18, 42 |
| 12 | MAGOHB | mago homolog B, exon junction complex core component | 111196 | 180574 | 060140 | 34, 7, 4 |
| 12 | MFSD5 | major facilitator superfamily domain containing 5 | 182544 | 283536 | 135476 | 9, 37, 5 |
| 12 | MIP | major intrinsic protein of lens fiber | 135517 | 111602 | 176422 | 14, 2, 23 |
| 12 | MLEC | malectin | 110917 | 157782 | 175970 | |
| 12 | M6PR | mannose-6-phosphate receptor, cation dependent | 003056 | 111752 | 139187 | 21, 38, 36 |
| 12 | MANSC1 | MANSC domain containing 1 | 111261 | 070018 | 165714 | 42, 45, 2 |
| 12 | MANSC4 | MANSC domain containing 4 | 205693 | 061794 | 087448 | 28, 20, |
| 12 | MGP | matrix Gla protein | 111341 | 111339 | 139055 | 45, 43, 11 |
| 12 | MMP17 | matrix metallopeptidase 17 | 198598 | 061936 | 177169 | 26, 35, 14 |
| 12 | MMP19 | matrix metallopeptidase 19 | 123342 | 135392 | 170473 | 32, 20, 31 |
| 12 | MDM1 | Mdm1 nuclear protein | 111554 | 127318 | 127314 | 10, 11, 38 |
| 12 | MDM2 | MDM2 proto-oncogene | 135679 | 175782 | 135678 | 40, 24, 5 |
| 12 | MED13L | mediator complex subunit 13 like | 123066 | 135111 | 258102 | 38, |
| 12 | MED21 | mediator complex subunit 21 | 152944 | 064115 | 214700 | 6, |
| 12 | MARCH9 | membrane associated ring-CH-type finger 9 | 139266 | 135446 | 111012 | 34, 18, 31 |
| 12 | MSRB3 | methionine sulfoxide reductase B3 | 174099 | 174106 | 149948 | 45, 44, 9 |
| 12 | METAP2 | methionyl aminopeptidase 2 | 111142 | 028203 | 136014 | 43, 13, 45 |
| 12 | MARS | methionyl-tRNA synthetase | 166986 | 123329 | 175197 | 25, 24, 3 |
| 12 | MBD6 | methyl-CpG binding domain protein 6 | 166987 | 175197 | 175203 | 25, 40, 18 |
| 12 | MMAB | methylmalonic aciduria (cobalamin deficiency) cbIB type | 139428 | 151148 | 110921 | 34, 41, 2 |
| 12 | METTL1 | methyltransferase like 1 | 037897 | 111012 | 123427 | 18, 25, 27 |
| 12 | METTL21B | methyltransferase like 21B | 123427 | 037897 | 257921 | 13, 24, 17 |
| 12 | METTL25 | methyltransferase like 25 | 127720 | 133773 | 179104 | 10, 45, 29 |
| 12 | METTL7A | methyltransferase like 7A | 185432 | 186452 | 214511 | 29, 1, 17 |
| 12 | METTL7B | methyltransferase like 7B | 170439 | 175398 | 135424 | 3, 40, 16 |
| 12 | MVK | mevalonate kinase | 110921 | 139428 | 139438 | 21, 9, 38 |
| 12 | MGAT4C | MGAT4 family member C | 182050 | 133636 | 165805 | |
| 12 | MFAP5 | microfibrillar associated protein 5 | 197614 | 111732 | 166532 | 45, 1, 15 |
| 12 | MGST1 | microsomal glutathione S-transferase 1 | 008394 | 188991 | 048540 | |
| 12 | MCRS1 | microspherule protein 1 | 187778 | 135519 | 110844 | 9, 5, 34 |
| 12 | MAP1LC3B2 | microtubule associated protein 1 light chain 3 beta 2 | 258102 | 123066 | 111412 | 12, |
| 12 | MRPL42 | mitochondrial ribosomal protein L42 | 198015 | 177889 | 120833 | 28, 32, |
| 12 | MRPL51 | mitochondrial ribosomal protein L51 | 111639 | 139190 | 010292 | 41, 31, 30 |
| 12 | MRPS35 | mitochondrial ribosomal protein S35 | 061794 | 174236 | 205693 | 3, 7, 4 |
| 12 | MTERF2 | mitochondrial transcription termination factor 2 | 120832 | 151135 | 008405 | 1, 43, 7 |
| 12 | MAP3K12 | mitogen-activated protein kinase kinase kinase 12 | 139625 | 197111 | 139546 | 26, 18, 31 |
| 12 | MAPKAPK5 | mitogen-activated protein kinase-activated protein kinase 5 | 089022 | 111275 | 198270 | 11, 9, 3 |
| 12 | MLXIP | MLX interacting protein | 175727 | 110987 | 158113 | |
| 12 | MON2 | MON2 homolog, regulator of endosome-to-Golgi trafficking | 061987 | 135655 | 111110 | 11, 22, 1 |
| 12 | MORN3 | MORN repeat containing 3 | 139714 | 276045 | 188735 | 43, 38, 14 |
| 12 | MPHOSPH9 | M-phase phosphoprotein 9 | 051825 | 090975 | 130921 | |
| 12 | MUCL1 | mucin like 1 | 172551 | 161634 | 135426 | 23, 10, 15 |
| 12 | MSI1 | musashi RNA binding protein 1 | 135097 | 170890 | 111775 | 14, 12, 38 |
| 12 | MYRFL | myelin regulatory factor-like | 166268 | 258052 | 111596 | 10, 17, 20 |
| 12 | MLF2 | myeloid leukemia factor 2 | 089693 | 111652 | 159335 | 26, 21, 27 |
| 12 | MYF5 | myogenic factor 5 | 111049 | 111046 | 111052 | 24, 25, 23 |
| 12 | MYF6 | myogenic factor 6 | 111046 | 139304 | 111049 | 25, 15, 19 |
| 12 | MYBPC1 | myosin binding protein C, slow type | 196091 | 166211 | 111666 | 25, 24, 26 |
| 12 | MYO1A | myosin IA | 166866 | 166863 | 166881 | 16, 3, 37 |
| 12 | MYO1H | myosin IH | 174527 | 139445 | 110906 | 39, 37, 17 |
| 12 | MYL2 | myosin light chain 2 | 111245 | 173093 | 111249 | 15, 25, 18 |
| 12 | MYL6 | myosin light chain 6 | 092841 | 196465 | 139613 | 31, 30, 28 |
| 12 | MYL6B | myosin light chain 6B | 196465 | 139641 | 092841 | 34, 25, 15 |
| 12 | NAA25 | N(alpha)-acetyltransferase 25, NatB auxiliary subunit | 111300 | 089248 | 135148 | 22, 45, 3 |
| 12 | GNPTAB | N-acetylglucosamine-1-phosphate transferase alpha | 111670 | 139351 | 136048 | 18, 39, 26 |
| | | and beta subunits | | | | |
| 12 | NDUFA12 | NADH: ubiquinone oxidoreductase subunit A12 | 184752 | 057704 | 120798 | 10, 3, |
| 12 | NDUFA9 | NADH: ubiquinone oxidoreductase subunit A9 | 139180 | 111254 | 255639 | 30, 4, 34 |
| 12 | NANOG | Nanog homeobox | 111704 | 205857 | 173262 | 5, 38, 12 |
| 12 | NANOGNB | NANOG neighbor homeobox | 205857 | 198178 | 111704 | 38, |
| 12 | NACA | nascent polypeptide-associated complex alpha subunit | 196531 | 110958 | 198056 | 18, 11, 43 |
| 12 | NCKAP1L | NCK associated protein 1 like | 123338 | 170627 | 123360 | 39, 21, 36 |
| 12 | NCKAP5L | NCK associated protein 5 like | 167566 | 139644 | 186666 | 25, 35, 12 |
| 12 | NDUFA4L2 | NDUFA4, mitochondrial complex associated like 2 | 185633 | 182199 | 185482 | 14, |
| 12 | NECAP1 | NECAP endocytosis associated 1 | 089818 | 171860 | 111729 | 31, 8, 1 |
| 12 | NTN4 | netrin 4 | 074527 | 136014 | 139343 | 45, 6, 4 |
| 12 | NELL2 | neural EGFL like 2 | 184613 | 139173 | 185610 | 8, 31, 40 |
| 12 | NEDD1 | neural precursor cell expressed, developmentally | 139350 | 188596 | 120802 | 4, 39, 35 |
| | | down-regulated 1 | | | | |
| 12 | NXPH4 | neurexophilin 4 | 182379 | 123384 | 182199 | 25, 6, 14 |
| 12 | NAV3 | neuron navigator 3 | 067798 | 165891 | 067715 | 11, 8, 36 |
| 12 | NEUROD4 | neuronal differentiation 4 | 123307 | 135426 | 170605 | 14, 8, |
| 12 | NPFF | neuropeptide FF-amide peptide precursor | 139574 | 267281 | 170653 | 28, 22, 17 |
| 12 | NTS | neurotensin | 133636 | 198774 | 182050 | 10, 37, 31 |
| 12 | NTF3 | neurotrophin 3 | 185652 | 130037 | 047617 | 32, 27, 12 |
| 12 | NAB2 | NGFI-A binding protein 2 | 166886 | 166881 | 166888 | 26, 27, 40 |
| 12 | NINJ2 | ninjurin 2 | 171840 | 139044 | 060237 | 22, 7, 5 |
| 12 | NOS1 | nitric oxide synthase 1 | 089250 | 135108 | 171435 | 25, 20, 8 |
| 12 | NCAPD2 | non-SMC condensin I complex subunit D2 | 010292 | 111639 | 111640 | 43, 22, 39 |
| 12 | NOP2 | NOP2 nucleolar protein | 111641 | 010295 | 111642 | 39, 24, 38 |
| 12 | NUAK1 | NUAK family kinase 1 | 074590 | 235162 | 136026 | 1, 18, 43 |
| 12 | NEMP1 | nuclear envelope integral membrane protein 1 | 166881 | 166866 | 166886 | 18, 11, 39 |
| 12 | NFE2 | nuclear factor, erythroid 2 | 123405 | 135486 | 111481 | 7, 5, 15 |
| 12 | NCOR2 | nuclear receptor corepressor 2 | 196498 | 274874 | 073060 | 18, 22, 35 |
| 12 | NRIP2 | nuclear receptor interacting protein 2 | 053702 | 111203 | 283297 | 18, 8, 42 |
| 12 | NR1H4 | nuclear receptor subfamily 1 group H member 4 | 012504 | 179520 | 139354 | 2, 4, 17 |
| 12 | NR2C1 | nuclear receptor subfamily 2 group C member 1 | 120798 | 184752 | 180263 | 39, 36, 11 |
| 12 | NR4A1 | nuclear receptor subfamily 4 group A member 1 | 123358 | 161835 | 123395 | |
| 12 | NFYB | nuclear transcription factor Y subunit beta | 120837 | 111727 | 198431 | 4, 29, 34 |
| 12 | NABP2 | nucleic acid binding protein 2 | 139579 | 181852 | 139540 | 9, 34, 27 |
| 12 | NOC4L | nucleolar complex associated 4 homolog | 184967 | 185163 | 182870 | 26, 41, 21 |
| 12 | NUP107 | nudeoporin 107 | 111581 | 127314 | 175782 | 11, 32, 12 |
| 12 | NUP37 | nudeoporin 37 | 075188 | 120860 | 281370 | 3, 34, 1 |
| 12 | NAP1L1 | nucleosome assembly protein 1 like 1 | 187109 | 139289 | 179941 | |
| 12 | NUDT4 | nudix hydrolase 4 | 173598 | 102189 | 177889 | 45, 42, 34 |
| 12 | OR10A7 | olfactory receptor family 10 subfamily A member 7 | 179919 | 170605 | 197706 | |
| 12 | OR10AD1 | olfactory receptor family 10 subfamily AD member 1 | 172640 | 177875 | 187166 | 25, 44, 38 |
| 12 | OR10P1 | olfactory receptor family 10 subfamily P member 1 | 175398 | 179615 | 170439 | |
| 12 | OR2AP1 | olfactory receptor family 2 subfamily AP member 1 | 179615 | 179626 | 175398 | |
| 12 | OR6C1 | olfactory receptor family 6 subfamily C member 1 | 205330 | 188324 | 205329 | |
| 12 | OR6C2 | olfactory receptor family 6 subfamily C member 2 | 179695 | 185821 | 184954 | 10, |
| 12 | OR6C3 | olfactory receptor family 6 subfamily C member 3 | 205329 | 205330 | 187857 | |
| 12 | OR6C4 | olfactory receptor family 6 subfamily C member 4 | 179626 | 205327 | 179615 | |
| 12 | OR6C6 | olfactory receptor family 6 subfamily C member 6 | 188324 | 197706 | 205330 | |
| 12 | OR6C65 | olfactory receptor family 6 subfamily C member 65 | 205328 | 187857 | 185821 | |
| 12 | OR6C68 | olfactory receptor family 6 subfamily C member 68 | 205327 | 184954 | 179626 | 10, |
| 12 | OR6C70 | olfactory receptor family 6 subfamily C member 70 | 184954 | 179695 | 205327 | |
| 12 | OR6C74 | olfactory receptor family 6 subfamily C member 74 | 197706 | 179919 | 188324 | |
| 12 | OR6C75 | olfactory receptor family 6 subfamily C member 75 | 187857 | 205329 | 205328 | |
| 12 | OR6C76 | olfactory receptor family 6 subfamily C member 76 | 185821 | 205328 | 179695 | |
| 12 | OR8S1 | olfactory receptor family 8 subfamily S member 1 | 197376 | 177627 | 167531 | |
| 12 | OR9K2 | olfactory receptor family 9 subfamily K member 2 | 170605 | 123307 | 179919 | |
| 12 | ORAI1 | ORAI calcium release-activated calcium modulator 1 | 276045 | 089094 | 139714 | 27, 3, 22 |
| 12 | ORMDL2 | ORMDL sphingolipid biosynthesis regulator 2 | 123353 | 257390 | 135392 | 11, 13, 30 |
| 12 | OS9 | OS9, endoplasmic reticulum lectin | 135506 | 135454 | 135439 | 24, 36, 45 |
| 12 | OTOGL | otogelin like | 165899 | 058272 | 139304 | 11, 45, 37 |
| 12 | OVCH1 | ovochymase 1 | 187950 | 087502 | 133687 | 25, 19, 38 |
| 12 | OLR1 | oxidized low density lipoprotein receptor 1 | 173391 | 172243 | 165685 | 13, 32, 17 |
| 12 | OSBPL8 | oxysterol binding protein like 8 | 091039 | 179941 | 186908 | 22, 7, 13 |
| 12 | PAN2 | PAN2 poly(A) specific ribonuclease subunit | 135473 | 257727 | 110944 | 40, 1, 22 |
| 12 | PTMS | parathymosin | 159335 | 089693 | 089692 | 34, 6, 14 |
| 12 | PTHLH | parathyroid hormone like hormone | 087494 | 087448 | 123106 | 18, 24, 26 |
| 12 | PARPBP | PARP1 binding protein | 185480 | 281370 | 183395 | 4, 38, 7 |
| 12 | PXN | paxillin | 089159 | 089157 | 089163 | 42, 35, 41 |
| 12 | PCED1B | PC-esterase domain containing 1B | 179715 | 139211 | 005175 | 41, 22, 5 |
| 12 | PDZRN4 | PDZ domain containing ring finger 4 | 165966 | 018236 | 151233 | 26, 11, 27 |
| 12 | PRPH | peripherin | 135406 | 167553 | 135451 | |
| 12 | PPHLN1 | periphilin 1 | 134283 | 015153 | 139168 | 6, 3, 15 |
| 12 | PEX5 | peroxisomal biogenesis factor 5 | 139197 | 139182 | 215009 | 39, 24, 38 |
| 12 | PXMP2 | peroxisomal membrane protein 2 | 176894 | 177084 | 256632 | 17, 6, 31 |
| 12 | PGAM5 | PGAM family member 5, mitochondrial serine/threonine | 247077 | 256632 | 176915 | 9, 4, 27 |
| | | protein phosphatase | | | | |
| 12 | PAH | phenylalanine hydroxylase | 171759 | 017427 | 139352 | 19, 17, 4 |
| 12 | PEBP1 | phosphatidylethanolamine binding protein 1 | 089220 | 176834 | 135090 | 2, 28, 29 |
| 12 | PITPNM2 | phosphatidylinositol transfer protein membrane associated 2 | 090975 | 182196 | 051825 | 39, 3, 14 |
| 12 | PIK3C2G | phosphatidylinositol-4-phosphate 3-kinase catalytic | 139144 | 111404 | 139151 | 10, 17, 42 |
| | | subunit type 2 gamma | | | | |
| 12 | PIP4K2C | phosphatidylinositol-5-phosphate 4-kinase type 2 gamma | 166908 | 155980 | 178498 | 38, 26, 31 |
| 12 | PDE1B | phosphodiesterase 1B | 123360 | 123338 | 135447 | 8, 1, 36 |
| 12 | PDE3A | phosphodiesterase 3A | 172572 | 139154 | 139155 | 45, 26, 11 |
| 12 | PDE6H | phosphodiesterase 6H | 139053 | 111348 | 134533 | 14, 8, |
| 12 | PFKM | phosphofructokinase, muscle | 152556 | 079387 | 177981 | 15, 24, 8 |
| 12 | PLA2G1B | phospholipase A2 group IB | 170890 | 089163 | 135097 | 28, 4, 10 |
| 12 | PLBD1 | phospholipase B domain containing 1 | 121316 | 171681 | 070019 | 24, 32, 6 |
| 12 | PLBD2 | phospholipase B domain containing 2 | 151176 | 089060 | 135094 | 26, 34, 13 |
| 12 | PLCZ1 | phospholipase C zeta 1 | 139151 | 139144 | 177938 | |
| 12 | PIANP | PILR alpha associated neural protein | 139200 | 126746 | 111652 | 31, 8, 14 |
| 12 | PIWIL1 | piwi like RNA-mediated gene silencing 1 | 125207 | 111432 | 060709 | 38, 25, 14 |
| 12 | PKP2 | plakophilin 2 | 057294 | 139131 | 110975 | 16, 15, 4 |
| 12 | PLEKHG6 | pleckstrin homology and RhoGEF domain containing G6 | 008323 | 010278 | 067182 | 3, 34, 16 |
| 12 | PLEKHG7 | pleckstrin homology and RhoGEF domain containing G7 | 187510 | 214215 | 102189 | 42, 18, 22 |
| 12 | PLEKHA5 | pleckstrin homology domain containing A5 | 052126 | 177938 | 139154 | 1, 17, 25 |
| 12 | PHLDA1 | pleckstrin homology like domain family A member 1 | 139289 | 111615 | 187109 | 6, 23, 42 |
| 12 | PLXNC1 | plexin C1 | 136040 | 169372 | 173588 | 35, 42, 22 |
| 12 | POC1B | POC1 centriolar protein B | 139323 | 139318 | 259075 | 42, 18, 16 |
| 12 | POC1B-GALNT4 | POC1B-GALNT4 readthrough | 259075 | 139323 | 070961 | |
| 12 | PARP11 | poly(ADP-ribose) polymerase family member 11 | 111224 | 130038 | 118971 | 22, 31, 15 |
| 12 | PCBP2 | poly(rC) binding protein 2 | 197111 | 205352 | 139625 | 18, 40, 10 |
| 12 | PHC1 | polyhomeotic homolog 1 | 111752 | 166535 | 003056 | 12, 38, 27 |
| 12 | GALNT4 | polypeptide N-acetylgalactosaminyltransferase 4 | 257594 | 139323 | 070961 | |
| 12 | GALNT6 | polypeptide N-acetylgalactosaminyltransferase 6 | 139629 | 139610 | 050438 | 23, 24, 45 |
| 12 | GALNT8 | polypeptide N-acetylgalactosaminyltransferase 8 | 130035 | 255639 | 151079 | 15, 8, 20 |
| 12 | GALNT9 | polypeptide N-acetylgalactosaminyltransferase 9 | 182870 | 184967 | 112787 | 8, 17, 20 |
| 12 | POP5 | POP5 homolog, ribonuclease P/MRP subunit | 167272 | 022840 | 157782 | 2, 6, 16 |
| 12 | KCNMB4 | potassium calcium-activated channel subfamily M | 135643 | 279530 | 127329 | 22, 45, 16 |
| | | regulatory beta subunit 4 | | | | |
| 12 | KCTD10 | potassium channel tetramerization domain containing 10 | 110906 | 174527 | 151148 | 42, 1, 40 |
| 12 | KCNA1 | potassium voltage-gated channel subfamily A member 1 | 111262 | 151079 | 130037 | |
| 12 | KCNA5 | potassium voltage-gated channel subfamily A member 5 | 130037 | 111262 | 185652 | 27, 28, 14 |
| 12 | KCNA6 | potassium voltage-gated channel subfamily A member 6 | 151079 | 130035 | 111262 | 15, 8, 20 |
| 12 | KCNC2 | potassium voltage-gated channel subfamily C member 2 | 166006 | 253719 | 180881 | 33, 31, 10 |
| 12 | KCNH3 | potassium voltage-gated channel subfamily H member 3 | 135519 | 123352 | 187778 | 26, 31, 20 |
| 12 | KCNJ8 | potassium voltage-gated channel subfamily J member 8 | 121361 | 111716 | 069431 | 40, 32, 36 |
| 12 | POU6F1 | POU class 6 homeobox 1 | 184271 | 135457 | 183283 | 36, 34, 8 |
| 12 | PPFIBP1 | PPFIA binding protein 1 | 110841 | 165935 | 174236 | 1, 25, 18 |
| 12 | PRDM4 | PR/SET domain 4 | 110851 | 136045 | 187855 | 29, 13, 2 |
| 12 | PFDN5 | prefoldin subunit 5 | 123349 | 135476 | 139637 | 40, 31, 41 |
| 12 | PMEL | premelanosome protein | 185664 | 065357 | 123374 | 35, 14, 44 |
| 12 | PRPF40B | pre-mRNA processing factor 40 homolog B | 110844 | 187778 | 135436 | |
| 12 | PRICKLE1 | prickle planar cell polarity protein 1 | 139174 | 139168 | 173157 | |
| 12 | PRIM1 | primase (DNA) subunit 1 | 198056 | 196531 | 025423 | 4, 41, 18 |
| 12 | PAWR | pro-apoptotic WT1 regulator | 177425 | 067715 | 058272 | 23, 18, 31 |
| 12 | PHB2 | prohibitin 2 | 215021 | 111679 | 126749 | 41, 21, 9 |
| 12 | PA2G4 | proliferation-associated 2G4 | 170515 | 257411 | 229117 | 21, 41, 43 |
| 12 | PRR13 | proline rich 13 | 205352 | 135409 | 197111 | 41, 30, 21 |
| 12 | PRR4 | proline rich 4 (lacrimal) | 111215 | 121318 | 212128 | 18, 42, 14 |
| 12 | PRB1 | proline rich protein BstNI subfamily 1 | 251655 | 230657 | 121335 | 34, 25, 10 |
| 12 | PRB2 | proline rich protein BstNI subfamily 2 | 121335 | 251655 | 139083 | 25, 20, 16 |
| 12 | PRB3 | proline rich protein BstNI subfamily 3 | 197870 | 186136 | 230657 | 18, 34, 25 |
| 12 | PRB4 | proline rich protein BstNI subfamily 4 | 230657 | 197870 | 251655 | 25, |
| 12 | PRH1 | proline rich protein HaeIII subfamily 1 | 231887 | 121381 | 121318 | 18, 34, 2 |
| 12 | PRH2 | proline rich protein HaeIII subfamily 2 | 134551 | 212128 | 212127 | 18, 25, 34 |
| 12 | P3H3 | prolyl 3-hydroxylase 3 | 110811 | 250510 | 111664 | 31, 34, 45 |
| 12 | PMCH | pro-melanin concentrating hormone | 183395 | 185480 | 017427 | 2, 8, 17 |
| 12 | PTGES3 | prostaglandin E synthase 3 | 110958 | 110955 | 196531 | 4, 13, 2 |
| 12 | PSMD9 | proteasome 26S subunit, non-ATPase 9 | 110801 | 158104 | 256950 | 11, 37, 13 |
| 12 | PRMT8 | protein arginine methyltransferase 8 | 111218 | 011105 | 130038 | 8, 39, 30 |
| 12 | PRKAB1 | protein kinase AMP-activated non-catalytic subunit beta 1 | 111725 | 224982 | 122966 | 36, 29, 16 |
| 12 | PRKAG1 | protein kinase AMP-activated non-catalytic subunit gamma 1 | 181929 | 181418 | 167548 | 38, |
| 12 | PPP1CC | protein phosphatase 1 catalytic subunit gamma | 186298 | 122986 | 173093 | 21, 4, 29 |
| 12 | PPP1R1A | protein phosphatase 1 regulatory inhibitor subunit 1A | 135447 | 123360 | 135413 | 25, 28, 26 |
| 12 | PPP1R12A | protein phosphatase 1 regulatory subunit 12A | 058272 | 177425 | 165899 | 11, 1, 45 |
| 12 | PPM1H | protein phosphatase, Mg2+/Mn2+ dependent 1H | 111110 | 061987 | 166148 | 11, 4, 18 |
| 12 | PTPN11 | protein tyrosine phosphatase, non-receptor type 11 | 179295 | 089009 | 089169 | 29, 26, 18 |
| 12 | PTPN6 | protein tyrosine phosphatase, non-receptor type 6 | 111679 | 111678 | 215021 | 36, 41, 5 |
| 12 | PTPRB | protein tyrosine phosphatase, receptor type B | 127329 | 135643 | 153233 | 43, 1, 17 |
| 12 | PTPRO | protein tyrosine phosphatase, receptor type O | 151490 | 134533 | 151491 | 8, 7, 17 |
| 12 | PTPRQ | protein tyrosine phosphatase, receptor type Q | 139304 | 165899 | 111046 | 45, 37, 38 |
| 12 | PTPRR | protein tyrosine phosphatase, receptor type R | 153233 | 127329 | 127324 | 26, 9, 4 |
| 12 | PUS1 | pseudouridylate synthase 1 | 177192 | 177169 | 183495 | 9, 1, 3 |
| 12 | PUS7L | pseudouridylate synthase 7 like | 129317 | 173157 | 198001 | 34, 1, 4 |
| 12 | PPTC7 | PTC7 protein phosphatase homolog | 196850 | 151164 | 204852 | 1, 22, 3 |
| 12 | PPFIA2 | PTPRF interacting protein alpha 2 | 139220 | 111058 | 133773 | |
| 12 | P2RX2 | purinergic receptor P2X2 | 187848 | 204583 | 177084 | 38, 17, |
| 12 | P2RX4 | purinergic receptor P2X4 | 135124 | 089041 | 110931 | 5, 29, 32 |
| 12 | P2RX7 | purinergic receptor P2X7 | 089041 | 135114 | 135124 | 36, 10, 8 |
| 12 | EIF2S3L | Putative eukaryotic translation initiation factor 2 | 180574 | 134545 | 111196 | |
| | | subunit 3-like protein | | | | |
| 12 | PWP1 | PWP1 homolog, endonuclein | 136045 | 151136 | 110851 | 41, 35, 17 |
| 12 | PYM1 | PYM homolog 1, exon junction complex associated factor | 170473 | 123342 | 065357 | 41, 29, 40 |
| 12 | PYROXD1 | pyridine nucleotide-disulphide oxidoreductase domain 1 | 121350 | 121351 | 004700 | 45, 22, 30 |
| 12 | PZP | PZP, alpha-2-macroglobulin like | 126838 | 175899 | 111796 | 42, 19, 9 |
| 12 | R3HDM2 | R3H domain containing 2 | 179912 | 258830 | 175189 | 29, 18, 40 |
| 12 | RILPL1 | Rab interacting lysosomal protein like 1 | 188026 | 184209 | 086598 | 43, 2, 15 |
| 12 | RILPL2 | Rab interacting lysosomal protein like 2 | 150977 | 183955 | 184209 | 1, 34, 36 |
| 12 | REP15 | RAB15 effector protein | 174236 | 110841 | 061794 | 23, 10, 28 |
| 12 | RAB21 | RAB21, member RAS oncogene family | 080371 | 139291 | 121749 | 31, 32, 1 |
| 12 | RAB35 | RAB35, member RAS oncogene family | 111737 | 135127 | 089154 | 26, 39, 31 |
| 12 | RAB3IP | RAB3A interacting protein | 127328 | 127325 | 258052 | 38, 17, 20 |
| 12 | RAB5B | RAB5B, member RAS oncogene family | 111540 | 123374 | 139531 | 26, 42, 24 |
| 12 | RPH3A | rabphilin 3A | 089169 | 179295 | 089127 | 8, 14, 2 |
| 12 | RACGAP1 | Rac GTPase activating protein 1 | 161800 | 086159 | 110881 | 39, 38, 9 |
| 12 | RAD51AP1 | RAD51 associated protein 1 | 111247 | 047621 | 010219 | 4, 13, 7 |
| 12 | RAD52 | RAD52 homolog, DNA repair protein | 002016 | 060237 | 082805 | 10, 39, 2 |
| 12 | RAD9B | RAD9 checkpoint clamp component B | 151164 | 111237 | 196850 | 38, 30, 9 |
| 12 | RHNO1 | RAD9-HUS1-RAD1 interacting nuclear orphan 1 | 171792 | 111206 | 078246 | 13, 9, 30 |
| 12 | RAN | RAN, member RAS oncogene family | 132341 | 111450 | 111452 | 41, 34, 21 |
| 12 | RAPGEF3 | Rap guanine nucleotide exchange factor 3 | 079337 | 111405 | 211584 | 43, 1, 40 |
| 12 | RAP1B | RAP1B, member of RAS oncogene family | 127314 | 111554 | 111581 | 13, 45, 39 |
| 12 | RASSF3 | Ras association domain family member 3 | 153179 | 183735 | 135677 | 33, 1, 40 |
| 12 | RASSF8 | Ras association domain family member 8 | 123094 | 152936 | 123095 | 38, 1, 3 |
| 12 | RASSF9 | Ras association domain family member 9 | 198774 | 180318 | 133636 | 43, 27, 42 |
| 12 | RHEBL1 | Ras homolog enriched in brain like 1 | 167550 | 167548 | 139549 | 5, 21, 15 |
| 12 | RHOF | ras homolog family member F, filopodia associated | 139725 | 188735 | 139718 | |
| 12 | RERG | RAS like estrogen regulated growth inhibitor | 134533 | 139053 | 151490 | 26, 45, 2 |
| 12 | RASAL1 | RAS protein activator like 1 | 111344 | 135144 | 186710 | 21, 41, 2 |
| 12 | RITA1 | RBPJ interacting and tubulin associated 1 | 139405 | 123064 | 166578 | |
| 12 | RECQL | RecQ like helicase | 004700 | 121350 | 111711 | 42, 45, 26 |
| 12 | RFLNA | refilin A | 178882 | 179195 | 274874 | 26, 37, 14 |
| 12 | RFX4 | regulatory factor X4 | 111783 | 013503 | 111785 | 38, 8, 12 |
| 12 | RFC5 | replication factor C subunit 5 | 111445 | 171435 | 176871 | 39, 9, 13 |
| 12 | RERGL | RERG like | 111404 | 048540 | 139144 | 26, 45, 7 |
| 12 | RARG | retinoic acid receptor gamma | 172819 | 139626 | 283536 | 24, 4, 44 |
| 12 | RBP5 | retinol binding protein 5 | 139194 | 139178 | 139182 | 36, 4, 17 |
| 12 | RDH16 | retinol dehydrogenase 16 (all-trans) | 139547 | 170426 | 166856 | 19, 37, 3 |
| 12 | RDH5 | retinol dehydrogenase 5 | 135437 | 135441 | 135404 | 1, 25, 14 |
| 12 | RND1 | Rho family GTPase 1 | 172602 | 174243 | 272822 | 21, 1, 8 |
| 12 | ARHGDIB | Rho GDP dissociation inhibitor beta | 111348 | 139055 | 139053 | 7, 41, 30 |
| 12 | ARHGAP9 | Rho GTPase activating protein 9 | 123329 | 111087 | 166986 | 36, 39, 5 |
| 12 | ARHGEF25 | Rho guanine nucleotide exchange factor 25 | 240771 | 178498 | 135502 | 37, 31, 3 |
| 12 | RIMKLB | ribosomal modification protein rimK like family member B | 166532 | 197614 | 166535 | 1, 32, 26 |
| 12 | RPL41 | ribosomal protein L41 | 229117 | 170515 | 135482 | |
| 12 | RPL6 | ribosomal protein L6 | 089009 | 173064 | 179295 | |
| 12 | RPLP0 | ribosomal protein lateral stalk subunit P0 | 089157 | 089154 | 089159 | 43, 7, 21 |
| 12 | RPS26 | ribosomal protein S26 | 197728 | 123411 | 065361 | |
| 12 | RIC8B | RIC8 guanine nucleotide exchange factor B | 111785 | 111783 | 151135 | 18, 17, 45 |
| 12 | RIMBP2 | RIMS binding protein 2 | 060709 | 125207 | 111450 | 29, 28, 20 |
| 12 | RNF10 | ring finger protein 10 | 022840 | 110871 | 167272 | |
| 12 | RNF34 | ring finger protein 34 | 170633 | 089053 | 089094 | 45, 30, 15 |
| 12 | RNF41 | ring finger protein 41 | 181852 | 139613 | 139579 | 43, 2, 9 |
| 12 | RNFT2 | ring finger protein, transmembrane 2 | 135119 | 111412 | 135116 | |
| 12 | RBM19 | RNA binding motif protein 19 | 122965 | 089116 | 089225 | 19, 3, 35 |
| 12 | RBMS2 | RNA binding motif single stranded interacting protein 2 | 076067 | 135423 | 076108 | 40, 32, 37 |
| 12 | RPAP3 | RNA polymerase II associated protein 3 | 005175 | 179715 | 111405 | 29, 18, 13 |
| 12 | POLR3B | RNA polymerase III subunit B | 013503 | 166046 | 111783 | 31, 24, 3 |
| 12 | SARNP | SAP domain containing ribonucleoprotein | 205323 | 135414 | 257390 | 3, 41, 6 |
| 12 | SSPN | sarcospan | 123096 | 123095 | 123104 | |
| 12 | SCARB1 | scavenger receptor class B member 1 | 073060 | 196498 | 150991 | 2, 34, 1 |
| 12 | SCYL2 | SCY1 like pseudokinase 2 | 136021 | 166153 | 179520 | 33, 22, 45 |
| 12 | SUDS3 | SDS3 homolog, SIN3A corepressor complex component | 111707 | 135090 | 139767 | 3, 40, 18 |
| 12 | SELPLG | selectin P ligand | 110876 | 183160 | 110880 | 36, 5, 39 |
| 12 | SRSF9 | serine and arginine rich splicing factor 9 | 111786 | 257218 | 088986 | 34, 11, 35 |
| 12 | SDS | serine dehydratase | 135094 | 151176 | 139410 | 19, 27, 2 |
| 12 | SDSL | serine dehydratase like | 139410 | 135094 | 089116 | 1, 20, 17 |
| 12 | SHMT2 | serine hydroxymethyltransferase 2 | 182199 | 182379 | 185633 | 25, 21, 39 |
| 12 | SRRM4 | serine/arginine repetitive matrix 4 | 139767 | 111707 | 152137 | 26, 25, 8 |
| 12 | STK38L | serine/threonine kinase 38 like | 211455 | 214700 | 029153 | 29, 45, 42 |
| 12 | STRAP | serine/threonine kinase receptor associated protein | 023734 | 151491 | 023697 | 13, 38, 3 |
| 12 | STYK1 | serine/threonine/tyrosine kinase 1 | 060140 | 111196 | 060138 | 24, 31, 33 |
| 12 | SETD1B | SET domain containing 1B | 139718 | 139725 | 158104 | 40, 9, 1 |
| 12 | SH2B3 | SH2B adaptor protein 3 | 111252 | 198324 | 204842 | 36, 45, 6 |
| 12 | STAC3 | SH3 and cysteine rich domain 3 | 185482 | 185633 | 258830 | 25, 15, 18 |
| 12 | SDR9C7 | short chain dehydrogenase/reductase family 9C member 7 | 170426 | 025423 | 139547 | 13, 35, |
| 12 | SPPL3 | signal peptide peptidase like 3 | 157837 | 122971 | 135100 | 26, 29, 4 |
| 12 | STAT2 | signal transducer and activator of transcription 2 | 170581 | 110944 | 175336 | 42, 43, 24 |
| 12 | STAT6 | signal transducer and activator of transcription 6 | 166888 | 166886 | 123384 | 24, 43, 39 |
| 12 | SMCO2 | single-pass membrane protein with coiled-coil domains 2 | 165935 | 029153 | 110841 | 44, 16, 32 |
| 12 | SMCO3 | single-pass membrane protein with coiled-coil domains 3 | 179256 | 182993 | 111339 | 9, 17, 14 |
| 12 | SMUG1 | single-strand-selective monofunctional uracil-DNA glycosylase 1 | 123415 | 172789 | 094916 | |
| 12 | SIRT4 | sirtuin 4 | 089163 | 089159 | 170890 | 29, 15, 17 |
| 12 | SSH1 | slingshot protein phosphatase 1 | 084112 | 110880 | 110887 | 41, 14, 35 |
| 12 | SRGAP1 | SLIT-ROBO Rho GTPase activating protein 1 | 196935 | 118600 | 174206 | |
| 12 | SMAGP | small cell adhesion glycoprotein | 170545 | 183283 | 110934 | 32, 37, 18 |
| 12 | SMIM10L1 | small integral membrane protein 10 like 1 | 256537 | 256188 | 186136 | 40, 25, 26 |
| 12 | SNRPF | small nuclear ribonucleoprotein polypeptide F | 139343 | 074527 | 165972 | 31, 21, 12 |
| 12 | SNRNP35 | small nuclear ribonucleoprotein U11/U12 subunit 35 | 184209 | 150977 | 188026 | 3, 30, 13 |
| 12 | SCNN1A | sodium channel epithelial 1 alpha subunit | 111319 | 067182 | 111321 | 42, 40, 27 |
| 12 | SCN8A | sodium voltage-gated channel alpha subunit 8 | 196876 | 050438 | 167612 | |
| 12 | SLC11A2 | solute carrier family 11 member 2 | 110911 | 214511 | 050426 | 42, 39, 8 |
| 12 | SLC15A4 | solute carrier family 15 member 4 | 139370 | 181234 | 151948 | 22, 40, 39 |
| 12 | SLC15A5 | solute carrier family 15 member 5 | 188991 | 023697 | 008394 | |
| 12 | SLC16A7 | solute carrier family 16 member 7 | 118596 | 139263 | 198673 | 25, 17, 42 |
| 12 | SLC17A8 | solute carrier family 17 member 8 | 179520 | 136021 | 012504 | 6, 39, 16 |
| 12 | SLC2A13 | solute carrier family 2 member 13 | 151229 | 180116 | 188906 | |
| 12 | SLC2A14 | solute carrier family 2 member 14 | 173262 | 111704 | 059804 | 38, 9, 8 |
| 12 | SLC2A3 | solute carrier family 2 member 3 | 059804 | 173262 | 065970 | 42, 39, 38 |
| 12 | SLC25A3 | solute carrier family 25 member 3 | 075415 | 120802 | 166130 | 41, 21, 35 |
| 12 | SLC26A10 | solute carrier family 26 member 10 | 135502 | 240771 | 135454 | 8, 42, 14 |
| 12 | SLC35E3 | solute carrier family 35 member E3 | 175782 | 111581 | 135679 | 2, 4, 13 |
| 12 | SLC38A1 | solute carrier family 38 member 1 | 111371 | 139218 | 134294 | 29, 32, 22 |
| 12 | SLC38A2 | solute carrier family 38 member 2 | 134294 | 111371 | 139209 | 18, 42, 25 |
| 12 | SLC38A4 | solute carrier family 38 member 4 | 139209 | 134294 | 139211 | 19, 4, 28 |
| 12 | SLC39A5 | solute carrier family 39 member 5 | 139540 | 139579 | 139645 | 4, 17, 16 |
| 12 | SLC4A8 | solute carrier family 4 member 8 | 050438 | 139629 | 196876 | 23, 26, 27 |
| 12 | SLC41A2 | solute carrier family 41 member 2 | 136052 | 171310 | 151131 | 13, 10, 2 |
| 12 | SLC48A1 | solute carrier family 48 member 1 | 211584 | 079337 | 061273 | 27, 8, 2 |
| 12 | SLC5A8 | solute carrier family 5 member 8 | 256870 | 151572 | 120800 | 42, 17, 40 |
| 12 | SLC6A12 | solute carrier family 6 member 12 | 111181 | 120645 | 010379 | 17, 19, 8 |
| 12 | SLC6A13 | solute carrier family 6 member 13 | 010379 | 111181 | 073614 | 17, 14, 8 |
| 12 | SLC6A15 | solute carrier family 6 member 15 | 072041 | 179104 | 231738 | 8, 32, 35 |
| 12 | SLC8B1 | solute carrier family 8 member B1 | 089060 | 186815 | 151176 | |
| 12 | SLCO1A2 | solute carrier organic anion transporter family member 1A2 | 084453 | 134538 | 121351 | 8, 18, 42 |
| 12 | SLCO1B1 | solute carrier organic anion transporter family member 1B1 | 134538 | 257062 | 084453 | 19, 36, 23 |
| 12 | SLCO1B3 | solute carrier organic anion transporter family member 1B3 | 111700 | 139155 | 257046 | 19, 37, 7 |
| 12 | SLCO1B7 | solute carrier organic anion transporter family member 1B7 | 205754 | 257046 | 257062 | 19, |
| | | (putative) | | | | |
| 12 | SLCO1C1 | solute carrier organic anion transporter family member 1C1 | 139155 | 172572 | 111700 | 11, 26, 40 |
| 12 | SP1 | Sp1 transcription factor | 185591 | 170374 | 135409 | 22, 29, 12 |
| 12 | SP7 | Sp7 transcription factor | 170374 | 094914 | 185591 | 11, 42, 10 |
| 12 | SPATS2 | spermatogenesis associated serine rich 2 | 123352 | 178401 | 135519 | 45, 40, 4 |
| 12 | SPX | spexin hormone | 134548 | 111711 | 111713 | |
| 12 | SPIC | Spi-C transcription factor | 166211 | 120805 | 196091 | 19, |
| 12 | SPSB2 | splA/ryanodine receptor domain and SOCS box containing 2 | 111671 | 111669 | 010626 | |
| 12 | SFSWAP | splicing factor SWAP homolog | 061936 | 111452 | 198598 | 41, 27, 22 |
| 12 | SPRYD3 | SPRY domain containing 3 | 167778 | 111077 | 167779 | 8, 45, 42 |
| 12 | SPRYD4 | SPRY domain containing 4 | 176422 | 135517 | 135423 | 4, 7, 27 |
| 12 | SART3 | squamous cell carcinoma antigen recognized by T-cells 3 | 075856 | 198855 | 136003 | 18, 38, 15 |
| 12 | SCAF11 | SR-related CTD associated factor 11 | 139218 | 189079 | 111371 | 11, 22, 1 |
| 12 | SOX5 | SRY-box5 | 134532 | 139163 | 060982 | 38, 10, 20 |
| 12 | ST8SIA1 | ST8 alpha-N-acetyl-neuraminide alpha-2,8-sialyltransferase 1 | 111728 | 111726 | 111731 | 29, 11, 34 |
| 12 | STAB2 | stabilin 2 | 136011 | 179088 | 111696 | 36, 18, 24 |
| 12 | SOAT2 | sterol O-acyltransferase 2 | 167780 | 167779 | 139631 | 19, 35, |
| 12 | SBNO1 | strawberry notch homolog 1 | 139697 | 111328 | 183955 | 39, 24, 23 |
| 12 | SUOX | sulfite oxidase | 139531 | 111540 | 123411 | 3, 40, 4 |
| 12 | SENP1 | SUMO1/sentrin specific peptidase 1 | 079387 | 139219 | 152556 | 10, 38, 22 |
| 12 | SOCS2 | suppresser of cytokine signaling 2 | 120833 | 198015 | 169372 | |
| 12 | SVOP | SV2 related protein | 166111 | 110887 | 135093 | 8, 38, 17 |
| 12 | SMARCC2 | SWI/SNF related, matrix associated, actin dependent | 139613 | 092841 | 181852 | 40, 41, 39 |
| | | regulator of chromatin subfamily c member 2 | | | | |
| 12 | SMARCD1 | SWI/SNF related, matrix associated, actin dependent | 066117 | 110881 | 167588 | |
| | | regulator of chromatin, subfamily d, member 1 | | | | |
| 12 | SYCP3 | synaptonemal complex protein 3 | 139351 | 111666 | 111670 | 10, 38, 33 |
| 12 | SYT1 | synaptotagmin 1 | 067715 | 067798 | 177425 | 26, 8, 31 |
| 12 | SYT10 | synaptptagmin 10 | 110975 | 057294 | 139133 | 25, 28, |
| 12 | STX2 | syntaxin 2 | 111450 | 060709 | 132341 | 1, 40, 26 |
| 12 | TAC3 | tachykinin 3 | 166863 | 166860 | 166866 | 32, 10, 37 |
| 12 | TBK1 | TANK binding kinase 1 | 183735 | 184575 | 153179 | 26, 11, 22 |
| 12 | TAOK3 | TAO kinase 3 | 135090 | 089220 | 111707 | 39, 22, 41 |
| 12 | TAPBPL | TAP binding protein like | 139192 | 139193 | 139190 | |
| 12 | TARBP2 | TARBP2, RISC loading complex RNA binding subunit | 139546 | 139625 | 267281 | 1, 34, 22 |
| 12 | TAS2R10 | taste 2 receptor member 10 | 121318 | 231887 | 275778 | 19, |
| 12 | TAS2R13 | taste 2 receptor member 13 | 212128 | 275778 | 134551 | |
| 12 | TAS2R14 | taste 2 receptor member 14 | 212127 | 134551 | 212126 | 22, 45, 42 |
| 12 | TAS2R19 | taste 2 receptor member 19 | 212124 | 255837 | 256436 | |
| 12 | TAS2R20 | taste 2 receptor member 20 | 255837 | 212126 | 212124 | 14, 35, |
| 12 | TAS2R30 | taste 2 receptor member 30 | 256188 | 255374 | 256537 | 30, 17, |
| 12 | TAS2R31 | taste 2 receptor member 31 | 256436 | 212124 | 226761 | |
| 12 | TAS2R42 | taste 2 receptor member 42 | 186136 | 256537 | 197870 | |
| 12 | TAS2R43 | taste 2 receptor member 43 | 255374 | 226761 | 256188 | |
| 12 | TAS2R46 | taste 2 receptor member 46 | 226761 | 256436 | 255374 | |
| 12 | TAS2R50 | taste 2 receptor member 50 | 212126 | 212127 | 255837 | |
| 12 | TAS2R7 | taste 2 receptor member 7 | 121377 | 060138 | 121314 | |
| 12 | TAS2R8 | taste 2 receptor member 8 | 121314 | 121377 | 121381 | |
| 12 | TAS2R9 | taste 2 receptor member 9 | 121381 | 121314 | 231887 | |
| 12 | TBC1D15 | TBC1 domain family member 15 | 121749 | 080371 | 139287 | 39, 38, 24 |
| 12 | TBC1D30 | TBC1 domain family member 30 | 111490 | 135677 | 156076 | 8, 16, 45 |
| 12 | TBX3 | T-box 3 | 135111 | 089225 | 123066 | 2, 32, 33 |
| 12 | TBX5 | T-box 5 | 089225 | 122965 | 135111 | 32, 13, 15 |
| 12 | TCP11L2 | t-complex 11 like 2 | 166046 | 136026 | 013503 | 34, 37, 39 |
| 12 | TEAD4 | TEA domain transcription factor 4 | 197905 | 078246 | 011105 | 9, 37, 13 |
| 12 | TCTN1 | tectonic family member 1 | 204852 | 196850 | 122986 | 41, 1, 26 |
| 12 | TCTN2 | tectonic family member 2 | 168778 | 111358 | 185344 | 45, 17, 16 |
| 12 | TNS2 | tensin 2 | 111077 | 063046 | 167778 | 26, 40, 6 |
| 12 | TESC | tescalcin | 088992 | 174989 | 135108 | 31, 21, 40 |
| 12 | TSPAN11 | tetraspanin 11 | 110900 | 110888 | 013573 | 26, 34, 44 |
| 12 | TSPAN19 | tetraspanin 19 | 231738 | 072041 | 133640 | 10, 42, 30 |
| 12 | TSPAN31 | tetraspanin 31 | 135452 | 135439 | 135446 | 30, 25, 13 |
| 12 | TSPAN8 | tetraspanin 8 | 127324 | 153233 | 139292 | 37, 16, 3 |
| 12 | TSPAN9 | tetraspanin 9 | 011105 | 197905 | 111218 | 34, 14, 29 |
| 12 | THAP2 | THAP domain containing 2 | 173451 | 133858 | 258064 | 22, 45, 25 |
| 12 | TXNRD1 | thioredoxin reductase 1 | 198431 | 120837 | 255150 | 42, 24, 45 |
| 12 | TDG | thymine DNA glyco sylase | 139372 | 204954 | 120820 | 39, 29, 4 |
| 12 | TESPA1 | thymocyte expressed, positive selection associated 1 | 135426 | 172551 | 123307 | 8, 5, 39 |
| 12 | TMPO | thymopoietin | 120802 | 139350 | 075415 | 11, 22, 4 |
| 12 | TRHDE | thyrotropin releasing hormone degrading enzyme | 072657 | 139287 | 253719 | 25, 4, 42 |
| 12 | TIMELESS | timeless circadian clock | 111602 | 175336 | 135517 | 3, 41, 33 |
| 12 | TNFRSF1A | TNF receptor superfamily member 1A | 067182 | 008323 | 111319 | 36, 2, 45 |
| 12 | TIGAR | TP53 induced glycolysis regulatory phosphatase | 078237 | 118971 | 118972 | |
| 12 | TRIAP1 | TP53 regulated inhibitor of apoptosis 1 | 170855 | 111780 | 257218 | 34, 43, 27 |
| 12 | TRAFD1 | TRAF-type zinc finger domain containing 1 | 135148 | 111300 | 173064 | 41, 34, 36 |
| 12 | TFCP2 | transcription factor CP2 | 135457 | 110925 | 184271 | 15, 42, 10 |
| 12 | TRPV4 | transient receptor potential cation channel subfamily V member 4 | 111199 | 139438 | 139433 | 31, 24, 35 |
| 12 | TM7SF3 | transmembrane 7 superfamily member 3 | 064115 | 111790 | 152944 | 5, 4, 3 |
| 12 | TMCC3 | transmembrane and coiled-coil domain family 3 | 057704 | 173588 | 184752 | |
| 12 | TMTC1 | transmembrane and tetratricopeptide repeat containing 1 | 133687 | 187950 | 133704 | 26, 31, 25 |
| 12 | TMTC2 | transmembrane and tetratricopeptide repeat containing 2 | 179104 | 127720 | 072041 | 33, 1, 24 |
| 12 | TMTC3 | transmembrane and tetratricopeptide repeat containing 3 | 139324 | 198707 | 049130 | 11, 4, 17 |
| 12 | TMBIM4 | transmembrane BAX inhibitor motif containing 4 | 155957 | 228144 | 090376 | 1, 30, 10 |
| 12 | TMBIM6 | transmembrane BAX inhibitor motif containing 6 | 139644 | 161791 | 167566 | 24, 30, 42 |
| 12 | TMED2 | transmembrane p24 trafficking protein 2 | 086598 | 188026 | 111364 | 4, 31, 13 |
| 12 | TMPRSS12 | transmembrane protease, serine 12 | 186452 | 123268 | 185432 | 38, 32, 8 |
| 12 | TMEM106C | transmembrane protein 106C | 134291 | 111424 | 139219 | 9, 29, 4 |
| 12 | TMEM116 | transmembrane protein 116 | 198270 | 089022 | 089248 | 29, 34, 43 |
| 12 | TMEM117 | transmembrane protein 117 | 139173 | 151239 | 184613 | 11, 26, 35 |
| 12 | TMEM119 | transmembrane protein 119 | 183160 | 136003 | 110876 | |
| 12 | TMEM120B | transmembrane protein 120B | 188735 | 139714 | 139725 | |
| 12 | TMEM132B | transmembrane protein 132B | 139364 | 081760 | 255595 | 26, 8, 40 |
| 12 | TMEM132C | transmembrane protein 132C | 181234 | 255595 | 139370 | 11, 1, 28 |
| 12 | TMEM132D | transmembrane protein 132D | 151952 | 151948 | 111432 | 26, 28, 14 |
| 12 | TMEM19 | transmembrane protein 19 | 139291 | 258064 | 080371 | 22, 43, 4 |
| 12 | TMEM233 | transmembrane protein 233 | 224982 | 183273 | 111725 | 40, 6, 25 |
| 12 | TMEM263 | transmembrane protein 263 | 151135 | 111785 | 120832 | 45, 42, 29 |
| 12 | TMEM5 | transmembrane protein 5 | 118600 | 177990 | 196935 | 26, 9, 6 |
| 12 | TMEM52B | transmembrane protein 52B | 165685 | 173391 | 139112 | 17, 32, 5 |
| 12 | TCHP | trichoplein keratin filament binding | 139437 | 139433 | 139436 | 41, 17, 3 |
| 12 | TPI1 | triosephosphate isomerase 1 | 111669 | 111667 | 111671 | 30, 7, 34 |
| 12 | TROAP | trophinin associated protein | 135451 | 135406 | 186897 | 39, 9, 21 |
| 12 | TPH2 | tryptophan hydroxylase 2 | 139287 | 121749 | 072657 | 38, 8, |
| 12 | TSFM | Ts translation elongation factor, mitochondrial | 123297 | 257921 | 135407 | 33, 9, 1 |
| 12 | TULP3 | tubby like protein 3 | 078246 | 171792 | 197905 | 27, 18, 9 |
| 12 | TUBA1A | tubulin alpha 1a | 167552 | 123416 | 167553 | 8, 30, 26 |
| 12 | TUBA1B | tubulin alpha 1b | 123416 | 139636 | 167552 | 21, 3, 9 |
| 12 | TUBA1C | tubulin alpha 1c | 167553 | 167552 | 135406 | |
| 12 | TWF1 | twinfilin actin binding protein 1 | 151239 | 198001 | 139173 | 4, 22, 33 |
| 12 | TPCN1 | two pore segment channel 1 | 186815 | 166578 | 089060 | 40, 41, 22 |
| 12 | YARS2 | tyrosyl-tRNA synthetase 2 | 139131 | 087470 | 057294 | 12, 9, 3 |
| 12 | UBC | ubiquitin C | 150991 | 073060 | 150990 | 36, 39, 42 |
| 12 | UBE2N | ubiquitin conjugating enzyme E2 N | 177889 | 173598 | 198015 | 31, 41, 30 |
| 12 | UBE3B | ubiquitin protein ligase E3B | 151148 | 110906 | 139428 | 29, 22, 34 |
| 12 | USP15 | ubiquitin specific peptidase 15 | 135655 | 198673 | 061987 | 5, 22, 11 |
| 12 | USP30 | ubiquitin specific peptidase 30 | 135093 | 166111 | 189046 | 2, 13, 29 |
| 12 | USP44 | ubiquitin specific peptidase 44 | 136014 | 111142 | 074527 | 38, 12, 22 |
| 12 | USP5 | ubiquitin specific peptidase 5 | 111667 | 111665 | 111669 | 21, 26, 34 |
| 12 | B3GNT4 | UDP-GlcNAc: betaGal beta-1,3-N-acetylglucosaminyltransferase 4 | 176383 | 204671 | 184047 | 3, 17, 20 |
| 12 | UHRF1BP1L | UHRF1 binding protein 1 like | 111647 | 180219 | 075089 | 6, 38, 34 |
| 12 | UNC119B | unc-119 lipid binding chaperone B | 175970 | 110917 | 122971 | 34, 29, 22 |
| 12 | ULK1 | unc-51 like autophagy activating kinase 1 | 177169 | 198598 | 177192 | 27, 3, 29 |
| 12 | UNG | uracil DNA glycosylase | 076248 | 189046 | 076555 | 2, 21, 9 |
| 12 | UTP20 | UTP20, small subunit processome component | 120800 | 256870 | 120805 | |
| 12 | VAMP1 | vesicle associated membrane protein 1 | 139190 | 139192 | 111639 | 39, 26, 36 |
| 12 | VEZT | vezatin, adherens junctions transmembrane protein | 028203 | 180263 | 111142 | 13, 24, 39 |
| 12 | VDR | vitamin D (1,25-dihydroxyvitamin D3) receptor | 111424 | 061273 | 134291 | 29, 27, 24 |
| 12 | VWF | von Willebrand factor | 110799 | 047617 | 010278 | 43, 1, 26 |
| 12 | VPS29 | VPS29, retromer complex component | 111237 | 204856 | 151164 | 29, 4, 43 |
| 12 | VPS33A | VPS33A, CORVET/HOPS core subunit | 139719 | 256861 | 130779 | 37, 1, 3 |
| 12 | VPS37B | VPS37B, ESCRT-I subunit | 139722 | 130787 | 150967 | 28, 14, 25 |
| 12 | VSIG10 | V-set and immunoglobulin domain containing 10 | 176834 | 176871 | 089220 | |
| 12 | WSB2 | WD repeat and SOCS box containing 2 | 176871 | 111445 | 176834 | 18, 34, 43 |
| 12 | WDR66 | WD repeat domain 66 | 158023 | 256950 | 110987 | 36, 30, 38 |
| 12 | WNK1 | WNK lysine deficient protein kinase 1 | 060237 | 171840 | 002016 | 29, 22, 24 |
| 12 | WNT1 | Wnt family member 1 | 125084 | 169884 | 181418 | 38, |
| 12 | WNT10B | Wnt family member 10B | 169884 | 134287 | 125084 | 18, 26, 15 |
| 12 | WNT5B | Wnt family member 5B | 111186 | 082805 | 171823 | 25, 33, 7 |
| 12 | WIF1 | WNT inhibitory factor 1 | 156076 | 111490 | 174106 | 40, 31, 14 |
| 12 | WSCD2 | WSC domain containing 2 | 075035 | 187855 | 174600 | |
| 12 | WBP11 | WW domain binding protein 11 | 084463 | 246705 | 182993 | 38, 9, 40 |
| 12 | YBX3 | Y-box binding protein 3 | 060138 | 060140 | 121377 | 25, 5, 14 |
| 12 | YEATS4 | YEATS domain containing 4 | 127337 | 090382 | 166225 | 22, 10, 38 |
| 12 | YAF2 | YY1 associated factor 2 | 015153 | 151233 | 134283 | 11, 26, 2 |
| 12 | ZBTB39 | zinc finger and BTB domain containing 39 | 166860 | 166856 | 166863 | 1, 2, 38 |
| 12 | ZFC3H1 | zinc finger C3H1 -type containing | 133858 | 139292 | 173451 | 26, 1, 22 |
| 12 | ZC3H10 | zinc finger CCCH-type containing 10 | 135482 | 229117 | 139641 | 2, 39, 13 |
| 12 | ZCRB1 | zinc finger CCHC-type and RNA binding motif containing 1 | 139168 | 134283 | 139174 | 43, 29, 22 |
| 12 | ZCCHC8 | zinc finger CCHC-type containing 8 | 033030 | 130779 | 111011 | 11, 21, 40 |
| 12 | ZDHHC17 | zinc finger DHHC-type containing 17 | 186908 | 091039 | 175183 | 18, 11, 2 |
| 12 | ZNF10 | zinc finger protein 10 | 256223 | 214029 | 256825 | 1, 29, 26 |
| 12 | ZNF140 | zinc finger protein 140 | 196387 | 198040 | 214029 | 40, 1, 4 |
| 12 | ZNF26 | zinc finger protein 26 | 198393 | 196458 | 198040 | 42, 18, 24 |
| 12 | ZNF268 | zinc finger protein 268 | 090612 | 256825 | 227059 | 42, 11, 38 |
| 12 | ZNF384 | zinc finger protein 384 | 126746 | 111653 | 139200 | 43, 18, 39 |
| 12 | ZNF385A | zinc finger protein 385A | 161642 | 139572 | 161638 | 7, 14, 9 |
| 12 | ZNF605 | zinc finger protein 605 | 196458 | 072609 | 198393 | 40, 22, 1 |
| 12 | ZNF641 | zinc finger protein 641 | 167528 | 187166 | 139223 | 31, 2, 43 |
| 12 | ZNF664 | zinc finger protein 664 | 179195 | 250091 | 178882 | 11, 29, 26 |
| 12 | ZNF705A | zinc finger protein 705A | 196946 | 111729 | 171847 | 38, 10, |
| 12 | ZNF740 | zinc finger protein 740 | 139651 | 139631 | 139626 | 33, |
| 12 | ZNF84 | zinc finger protein 84 | 198040 | 198393 | 196387 | |
| 12 | ZNF891 | zinc finger protein 891 | 214029 | 196387 | 256223 | 19, 32, 20 |
| 13 | HTR2A | 5-hydroxytryptamine receptor 2A | 102468 | 139684 | 136143 | 42, 27, 8 |
| 13 | ABHD13 | abhydrolase domain containing 13 | 139826 | 174405 | 102524 | 9, 22, 2 |
| 13 | ACOD1 | aconitate decarboxylase 1 | 102794 | 178695 | 102805 | 5, 20, |
| 13 | ARL11 | ADP ribosylation factor like GTPase 11 | 152213 | 136144 | 123179 | 21, 7, 45 |
| 13 | ADPRHL1 | ADP-ribosylhydrolase like 1 | 153531 | 139835 | 150401 | 21, 6, 25 |
| 13 | AKAP11 | A-kinase anchoring protein 11 | 023516 | 102780 | 120659 | 26, 25, 45 |
| 13 | ALG11 | ALG11, alpha-1,2-mannosyltransferase | 253710 | 123191 | 253797 | 22, 40, 43 |
| 13 | ALG5 | ALG5, dolichyl-phosphate beta-glucosyltransferase | 120697 | 120693 | 120699 | 29, 26, 17 |
| 13 | ANKRD10 | ankyrin repeat domain 10 | 088448 | 153487 | 102606 | 11, 26, 37 |
| 13 | AMER2 | APC membrane recruitment protein 2 | 165566 | 151846 | 139505 | 26, 14, 31 |
| 13 | ALOX5AP | arachidonate 5-lipoxygenase activating protein | 132965 | 132952 | 102802 | 30, 5, 7 |
| 13 | ARGLU1 | arginine and glutamate rich 1 | 134884 | 125266 | 204442 | 29, 1, 31 |
| 13 | ABCC4 | ATP binding cassette subfamily C member 4 | 125257 | 125285 | 134873 | 33, 37, 29 |
| 13 | ATP5EP2 | ATP synthase, H+ transporting, mitochondrial F1 complex, | 180389 | 139515 | 165556 | 33, 30, 9 |
| | | epsilon subunit pseudogene 2 | | | | |
| 13 | ATP7B | ATPase copper transporting beta | 123191 | 123171 | 253710 | |
| 13 | ATP4B | ATPase H+/K+ transporting beta subunit | 186009 | 198176 | 185974 | 37, |
| 13 | ATP12A | ATPase H+/K+ transporting non-gastric alpha2 subunit | 075673 | 102699 | 132972 | 42, 32, 39 |
| 13 | ATP11A | ATPase phospholipid transporting 11A | 068650 | 126216 | 126217 | 29, 1, 3 |
| 13 | ATP8A2 | ATPase phospholipid transporting 8A2 | 132932 | 139496 | 180730 | 31, 20, 26 |
| 13 | BIVM | basic, immunoglobulin-like variable motif containing | 134897 | 134901 | 270181 | 7, 45, 27 |
| 13 | B3GLCT | beta 3-glucosyltransferase | 187676 | 120694 | 133105 | 11, 14, 4 |
| 13 | BIVM-ERCC5 | BIVM-ERCC5 readthrough | 270181 | 134897 | 134899 | |
| 13 | BORA | bora, aurora kinase A activator | 136122 | 204899 | 083520 | 4, 30, 6 |
| 13 | BRCA2 | BRCA2, DNA repair associated | 139618 | 189167 | 139597 | 22, 4, 23 |
| 13 | C1QTNF9 | C1q and tumor necrosis factor related protein 9 | 240654 | 182957 | 281899 | 30, 6, 38 |
| 13 | C1QTNF9B | C1q and tumor necrosis factor related protein 9B | 205863 | 027001 | 273167 | 38, |
| 13 | C1QTNF9B-AS1 | C1QTNF9B antisense RNA 1 | 281899 | 240654 | 102699 | 38, 18, 33 |
| 13 | CAB39L | calcium binding protein 39 like | 102547 | 102543 | 136169 | 29, 34, 38 |
| 13 | CPB2 | carboxypeptidase B2 | 080618 | 123200 | 136167 | 19, 23, 36 |
| 13 | CSNK1A1L | casein kinase 1 alpha 1 like | 180138 | 279238 | 133110 | 38, |
| 13 | CDX2 | caudal type homeobox 2 | 165556 | 180389 | 183463 | 16, 3, 19 |
| 13 | CCDC169- | CCDC169-SOHLH2 readthrough | 250709 | 120669 | 242715 | |
| | SOHLH2 | | | | | |
| 13 | CDC16 | cell division cycle 16 | 130177 | 283361 | 169062 | 31, 26, 2 |
| 13 | CENPJ | centromere protein J | 151849 | 132972 | 151846 | 1, 11, 31 |
| 13 | CLN5 | ceroid-lipofuscinosis, neuronal 5 | 102805 | 102794 | 283208 | 24, 42, 26 |
| 13 | CHAMP1 | chromosome alignment maintaining phosphoprotein 1 | 198824 | 169062 | 133083 | |
| 13 | CLYBL | citrate lyase beta like | 125246 | 125304 | 139800 | 17, 6, 23 |
| 13 | CLDN10 | claudin 10 | 134873 | 125257 | 134874 | 30, 17, 34 |
| 13 | F7 | coagulation factor VII | 057593 | 126217 | 126218 | 19, 23, 38 |
| 13 | F10 | coagulation factor X | 126218 | 057593 | 126231 | 30, 1, 33 |
| 13 | CCDC122 | coiled-coil domain containing 122 | 151773 | 120658 | 179630 | 4, 34, 22 |
| 13 | CCDC168 | coiled-coil domain containing 168 | 175820 | 139780 | 151287 | 38, 19, 8 |
| 13 | CCDC169 | coiled-coil domain containing 169 | 242715 | 250709 | 133104 | 38, 7, 45 |
| 13 | CCDC70 | coiled-coil domain containing 70 | 123171 | 281106 | 123191 | 38, 10, |
| 13 | COL4A1 | collagen type IV alpha 1 chain | 187498 | 185950 | 134871 | 11, 1, 12 |
| 13 | COL4A2 | collagen type IV alpha 2 chain | 134871 | 187498 | 139832 | 1, 26, 12 |
| 13 | COMMD6 | COMM domain containing 6 | 188243 | 136111 | 118939 | 15, 11, 7 |
| 13 | COG3 | component of oligomeric golgi complex 3 | 136152 | 174032 | 165837 | 42, 13, 26 |
| 13 | COG6 | component of oligomeric golgi complex 6 | 133103 | 183722 | 150907 | 42, 29, 24 |
| 13 | CRYL1 | crystallin lambda 1 | 165475 | 121742 | 032742 | 31, 1, 35 |
| 13 | CUL4A | cullin 4A | 139842 | 126226 | 185896 | 9, 18, 6 |
| 13 | CCNA1 | cyclin A1 | 133101 | 133104 | 180440 | 7, 38, 29 |
| 13 | CDK8 | cyclin dependent kinase 8 | 132964 | 127870 | 132970 | 34, 43, 11 |
| 13 | CYSLTR2 | cysteinyl leukotriene receptor 2 | 152207 | 136161 | 102531 | 32, 25, 10 |
| 13 | CARS2 | cysteinyl-tRNA synthetase 2, mitochondrial (putative) | 134905 | 213995 | 153487 | 5, 21, 38 |
| 13 | CDADC1 | cytidine and dCMP deaminase domain containing 1 | 102543 | 102539 | 102547 | 43, 24, 19 |
| 13 | CKAP2 | cytoskeleton associated protein 2 | 136108 | 136100 | 139675 | 4, 22, 38 |
| 13 | DACH1 | dachshund family transcription factor 1 | 276644 | 150361 | 204899 | 14, 36, 44 |
| 13 | DAOA | D-amino acid oxidase activator | 182346 | 125255 | 125266 | |
| 13 | DZIP1 | DAZ interacting zinc finger protein 1 | 134874 | 134873 | 102580 | 10, 6, 38 |
| 13 | DOCK9 | dedicator of cytokinesis 9 | 088387 | 088386 | 134882 | 33, 1, 32 |
| 13 | DCUN1D2 | defective in cullin neddylation 1 domain containing 2 | 150401 | 153531 | 150403 | 39, 1, 40 |
| 13 | DHRS12 | dehydrogenase/reductase 12 | 102796 | 139668 | 281106 | 1, 13, 14 |
| 13 | DLEU1 | Deleted in lymphocytic leukemia 1 | 176124 | 198553 | 186047 | |
| 13 | DLEU7 | deleted in lymphocytic leukemia, 7 | 186047 | 176124 | 136104 | 39, 8, 16 |
| 13 | DGKH | diacylglycerol kinase eta | 102780 | 102763 | 023516 | 30, 4, 27 |
| 13 | DIAPH3 | diaphanous related formin 3 | 139734 | 118946 | 083544 | 10, 38, 6 |
| 13 | DIS3 | DIS3 homolog, exosome endoribonuclease and 3′-5′ | 083520 | 136122 | 083535 | 24, 42, 38 |
| | | exoribonuclease | | | | |
| 13 | LIG4 | DNA ligase 4 | 174405 | 204442 | 139826 | 39, 11, 31 |
| 13 | DNAJC15 | DnaJ heat shock protein family (Hsp40) member C15 | 120675 | 133106 | 120658 | 10, 15, 31 |
| 13 | DNAJC3 | DnaJ heat shock protein family (Hsp40) member C3 | 102580 | 134874 | 102595 | 13, 29, 42 |
| 13 | DCT | dopachrome tautomerase | 080166 | 183098 | 088451 | 35, 11, 14 |
| 13 | DCLK1 | doublecortin like kinase 1 | 133083 | 180660 | 120669 | 8, 31, 1 |
| 13 | ELF1 | E74 like ETS transcription factor 1 | 120690 | 102743 | 120688 | 42, 22, 39 |
| 13 | ENOX1 | ecto-NOX disulfide-thiol exchanger 1 | 120658 | 120675 | 151773 | 38, 45, 17 |
| 13 | EBPL | emopamil binding protein like | 123179 | 152213 | 102753 | 11, 17, 7 |
| 13 | EDNRB | endothelin receptor type B | 136160 | 139737 | 152192 | 32, 11, 26 |
| 13 | EFNB2 | ephrin B2 | 125266 | 182346 | 134884 | 11, 1, 15 |
| 13 | EPSTI1 | epithelial stromal interaction 1 | 133106 | 179813 | 120675 | 18, 39, 37 |
| 13 | ERCC5 | ERCC excision repair 5, endonuclease | 134899 | 270181 | 125255 | 42, 22, 3 |
| 13 | ESD | esterase D | 139684 | 136141 | 102468 | 29, 41, 11 |
| 13 | EEF1AKMT1 | eukaryotic translation elongation factor 1 alpha lysine | 150456 | 172458 | 132953 | |
| | | methyltransferase 1 | | | | |
| 13 | EXOSC8 | exosome component 8 | 120699 | 120697 | 102710 | 34, 4, 29 |
| 13 | XPO4 | exportin 4 | 132953 | 150456 | 150457 | 14, 22, 25 |
| 13 | FAM124A | family with sequence similarity 124 member A | 150510 | 226792 | 253309 | |
| 13 | FAM155A | family with sequence similarity 155 member A | 204442 | 134884 | 174405 | 11, 45, 35 |
| 13 | FAM216B | family with sequence similarity 216 member B | 179813 | 120659 | 133106 | 42, 30, 20 |
| 13 | FBXL3 | F-box and leucine rich repeat protein 3 | 005812 | 283208 | 005810 | 42, 1, 24 |
| 13 | FARP1 | FERM, ARH/RhoGEF and pleckstrin domain protein 1 | 152767 | 065150 | 139797 | |
| 13 | FGF14 | fibroblast growth factor 14 | 102466 | 198542 | 134900 | 20, 40, 26 |
| 13 | FGF9 | fibroblast growth factor 9 | 102678 | 165487 | 279282 | 40, 17, 5 |
| 13 | FNDC3A | fibronectin type III domain containing 3A | 102531 | 152207 | 102539 | 11, 32, 4 |
| 13 | FLT1 | fms related tyrosine kinase 1 | 102755 | 152520 | 132963 | 32, 29, 1 |
| 13 | FLT3 | fms related tyrosine kinase 3 | 122025 | 183463 | 152520 | 7, 4, 5 |
| 13 | FOXO1 | forkhead box O1 | 150907 | 133103 | 102738 | 11, 22, 27 |
| 13 | FREM2 | FRAS1 related extracellular matrix protein 2 | 150893 | 120686 | 133115 | 12, 26, 24 |
| 13 | FRY | FRY microtubule binding protein | 073910 | 133105 | 189167 | 1, 13, 11 |
| 13 | GPR12 | G protein-coupled receptor 12 | 132975 | 132970 | 152484 | 26, 8, 14 |
| 13 | GPR18 | G protein-coupled receptor 18 | 125245 | 134882 | 169508 | 22, 30, 21 |
| 13 | GPR180 | G protein-coupled receptor 180 | 152749 | 088451 | 125285 | 9, 45, 18 |
| 13 | GPR183 | G protein-coupled receptor 183 | 169508 | 125245 | 125304 | 30, 5, 42 |
| 13 | GRK1 | G protein-coupled receptor kinase 1 | 185974 | 186009 | 184497 | |
| 13 | GGACT | gamma-glutamylamine cyclotransferase | 134864 | 175198 | 125247 | 17, 22, 29 |
| 13 | GJA3 | gap junction protein alpha 3 | 121743 | 121741 | 165474 | 14, 17, 15 |
| 13 | GJB2 | gap junction protein beta 2 | 165474 | 121743 | 121742 | 30, 11, 24 |
| 13 | GJB6 | gap junction protein beta 6 | 121742 | 165474 | 165475 | 30, 24, 4 |
| 13 | GTF2F2 | general transcription factor IIF subunit 2 | 188342 | 133114 | 180332 | 1, 37, 12 |
| 13 | GTF3A | general transcription factor IIIA | 122034 | 122035 | 122033 | 9, 41, 21 |
| 13 | ERICH6B | glutamate rich 6B | 165837 | 136152 | 174015 | 2, 38, 28 |
| 13 | GPC5 | glypican 5 | 179399 | 165300 | 183098 | |
| 13 | GPC6 | glypican 6 | 183098 | 179399 | 080166 | 11, 12, 10 |
| 13 | GPALPP1 | GPALPP motifs containing 1 | 133114 | 083635 | 188342 | |
| 13 | GAS6 | growth arrest specific 6 | 183087 | 184497 | 283199 | 6, 26, 20 |
| 13 | GRTP1 | growth hormone regulated TBC protein 1 | 139835 | 185896 | 153531 | 34, 17, 27 |
| 13 | GSX1 | GS homeobox 1 | 169840 | 186184 | 139515 | |
| 13 | HSPH1 | heat shock protein family H (Hsp110) member 1 | 120694 | 175664 | 187676 | 31, 42, 26 |
| 13 | HS6ST3 | heparan sulfate 6-O-sulfotransferase 3 | 185352 | 102595 | 165621 | 10, 8, 17 |
| 13 | HNRNPA1L2 | heterogeneous nuclear ribonucleoprotein A1-like 2 | 139675 | 136108 | 165416 | 39, 41, 30 |
| 13 | HMGB1 | high mobility group box 1 | 189403 | 236444 | 132952 | 29, 41, 30 |
| 13 | IPO5 | importin 5 | 065150 | 125249 | 152767 | 40, 38, 42 |
| 13 | ING1 | inhibitor of growth family member 1 | 153487 | 134905 | 088448 | 13, 1, 36 |
| 13 | IRS2 | insulin receptor substrate 2 | 185950 | 041515 | 187498 | 31, 27, 2 |
| 13 | ITM2B | integral membrane protein 2B | 136156 | 136146 | 139687 | 40, 31, 11 |
| 13 | INTS6 | integrator complex subunit 6 | 102786 | 253309 | 139668 | 42, 38, 1 |
| 13 | ITGBL1 | integrin subunit beta like 1 | 198542 | 102452 | 102466 | 11, 45, 10 |
| 13 | IL17D | interleukin 17D | 172458 | 032742 | 150456 | 15, 25, 8 |
| 13 | IFT88 | intraflagellar transport 88 | 032742 | 165475 | 172458 | 38, 31, 30 |
| 13 | KPNA3 | karyopherin subunit alpha 3 | 102753 | 123179 | 123178 | 4, 25, 38 |
| 13 | KATNAL1 | katanin catalytic subunit A1 like 1 | 102781 | 122042 | 236444 | |
| 13 | KDELC1 | KDEL motif containing 1 | 134901 | 151287 | 134897 | 43, 9, 45 |
| 13 | KLHL1 | kelch like family member 1 | 150361 | 184226 | 276644 | 9, 8, 2 |
| 13 | KBTBD6 | kelch repeat and BTB domain containing 6 | 165572 | 120688 | 120696 | 8, 24, 39 |
| 13 | KBTBD7 | kelch repeat and BTB domain containing 7 | 120696 | 165572 | 120662 | 24, 8, 39 |
| 13 | KL | klotho | 133116 | 083642 | 133121 | 29, 17, 37 |
| 13 | KLF12 | Kruppel like factor 12 | 118922 | 102554 | 136111 | 22, 1, 31 |
| 13 | KLF5 | Kruppel like factor 5 | 102554 | 083535 | 118922 | 18, 37, 16 |
| 13 | LACC1 | laccase domain containing 1 | 179630 | 151773 | 281883 | 2, 31, 45 |
| 13 | LATS2 | large tumor suppressor kinase 2 | 150457 | 132953 | 150459 | 11, 45, 37 |
| 13 | LRRC63 | leucine rich repeat containing 63 | 173988 | 136167 | 102445 | 10, 38, 14 |
| 13 | LRCH1 | leucine rich repeats and calponin homology domain containing 1 | 136141 | 102445 | 139684 | 22, 11, 39 |
| 13 | LECT1 | Leukocyte cell derived chemotaxin 1 | 136110 | 165416 | 136099 | 11, 20, 12 |
| 13 | LNX2 | ligand of numb-protein X 2 | 139517 | 122033 | 186184 | 4, 42, 1 |
| 13 | LMO7 | UM domain 7 | 136153 | 118939 | 178734 | 42, 24, 11 |
| 13 | LHFP | lipoma HMGIC fusion partner | 183722 | 188811 | 133103 | 11, 13, 43 |
| 13 | LMO7DN | LMO7 downstream neighbor | 178734 | 136153 | 178695 | 26, 23, 25 |
| 13 | LINC00371 | Long intergenic non-protein coding RNA 371 | 226792 | 136104 | 150510 | 31, 38, 12 |
| 13 | LCP1 | lymphocyte cytosolic protein 1 | 136167 | 080618 | 173988 | 39, 21, 41 |
| 13 | LPAR6 | lysophosphatidic acid receptor 6 | 139679 | 139687 | 136161 | |
| 13 | LAMP1 | lysosomal associated membrane protein 1 | 185896 | 139842 | 139835 | 4, 1, 26 |
| 13 | MAB21L1 | mab-21 like 1 | 180660 | 172915 | 133083 | 2, 14, 24 |
| 13 | MCF2L | MCF.2 cell line derived transforming sequence like | 126217 | 068650 | 057593 | |
| 13 | MED4 | mediator complex subunit 4 | 136146 | 136159 | 136156 | 4, 7, 30 |
| 13 | MEDAG | mesenteric estrogen dependent adipogenesis | 102802 | 132965 | 175664 | 45, 10, 44 |
| 13 | METTL21C | methyltransferase like 21C | 139780 | 134900 | 175820 | 15, 10, 32 |
| 13 | MTUS2 | microtubule associated tumor suppressor candidate 2 | 132938 | 139508 | 139514 | 15, 20, 42 |
| 13 | MICU2 | mitochondrial calcium uptake 2 | 165487 | 180776 | 102678 | 29, 11, 22 |
| 13 | MIPEP | mitochondrial intermediate peptidase | 027001 | 127863 | 205863 | 30, 23, 29 |
| 13 | MRPL57 | mitochondrial ribosomal protein L57 | 173141 | 165480 | 180776 | |
| 13 | MRPS31 | mitochondrial ribosomal protein S31 | 102738 | 150907 | 102743 | 4, 7, 10 |
| 13 | MTRF1 | mitochondrial translation release factor 1 | 120662 | 120696 | 172766 | 28, |
| 13 | MTIF3 | mitochondrial translational initiation factor 3 | 122033 | 122034 | 139517 | 29, 30, 38 |
| 13 | MZT1 | mitotic spindle organizing protein 1 | 204899 | 276644 | 136122 | 1, 25, 4 |
| 13 | MLNR | motilin receptor | 102539 | 102531 | 102543 | 27, |
| 13 | MPHOSPH8 | M-phase phosphoprotein 8 | 196199 | 132958 | 121390 | 16, 18, 33 |
| 13 | MBNL2 | muscleblind like splicing regulator 2 | 139793 | 165621 | 125249 | 22, 4, 2 |
| 13 | MYCBP2 | MYC binding protein 2, E3 ubiquitin protein ligase | 005810 | 005812 | 136155 | 41, 1, 22 |
| 13 | MYO16 | myosin XVI | 041515 | 283384 | 185950 | 26, 10, 7 |
| 13 | MTMR6 | myotubularin related protein 6 | 139505 | 165566 | 139496 | 42, 38, 22 |
| 13 | NAA16 | N(alpha)-acetyltransferase 16, NatA auxiliary subunit | 172766 | 120662 | 102760 | 42, 39, 18 |
| 13 | NAXD | NAD(P)HX dehydratase | 213995 | 139832 | 134905 | 24, 39, 36 |
| 13 | N4BP2L1 | NEDD4 binding protein 2 like 1 | 139597 | 139618 | 244754 | 7, 29, 22 |
| 13 | N4BP2L2 | NEDD4 binding protein 2 like 2 | 244754 | 139597 | 083642 | 40, 29, 18 |
| 13 | NDFIP2 | Nedd4 family interacting protein 2 | 102471 | 139746 | 136158 | 13, 4, 26 |
| 13 | NBEA | neurobeachin | 172915 | 133119 | 180660 | |
| 13 | NHLRC3 | NHL repeat containing 3 | 188811 | 120685 | 183722 | 42, 27, 2 |
| 13 | NEK3 | NIMA related kinase 3 | 136098 | 197168 | 136114 | 11, 13, 14 |
| 13 | NEK5 | NIMA related kinase 5 | 197168 | 253797 | 136098 | 30, 38, 42 |
| 13 | NUP58 | nucleoporin 58 | 139496 | 139505 | 132932 | 38, 30, 22 |
| 13 | NUDT15 | nudix hydrolase 15 | 136159 | 136143 | 136146 | 12, 29, 44 |
| 13 | NUFIP1 | NUFIP1, FMR1 interacting protein 1 | 083635 | 102804 | 133114 | 34, 42, 38 |
| 13 | OLFM4 | olfactomedin 4 | 102837 | 136099 | 204919 | 4, 16, 44 |
| 13 | OXGR1 | oxoglutarate receptor 1 | 165621 | 185352 | 139793 | 42, 40, 24 |
| 13 | PAN3 | PAN3 poly(A) specific ribonuclease subunit | 152520 | 122025 | 102755 | 11, 31, 22 |
| 13 | PDX1 | pancreatic and duodenal homeobox 1 | 139515 | 169840 | 180389 | 28, 3, 37 |
| 13 | PSPC1 | paraspeckle component 1 | 121390 | 196199 | 132950 | 21, 22, 26 |
| 13 | PCID2 | PCI domain containing 2 | 126226 | 126231 | 139842 | 13, 18, 38 |
| 13 | PDS5B | PDS5 cohesin associated factor B | 083642 | 244754 | 133116 | 1, 29, 42 |
| 13 | POSTN | periostin | 133110 | 180138 | 133107 | |
| 13 | PHF11 | PHD finger protein 11 | 136147 | 136169 | 136144 | 18, 37, 41 |
| 13 | PABPC3 | poly(A) binding protein cytoplasmic 3 | 151846 | 151849 | 165566 | 23, 38, 18 |
| 13 | PARP4 | poly(ADP-ribose) polymerase family member 4 | 102699 | 281899 | 075673 | 40, 16, 4 |
| 13 | KCNRG | potassium channel regulator | 198553 | 204977 | 176124 | 42, 30, 15 |
| 13 | KCTD12 | potassium channel tetramerization domain containing 12 | 178695 | 178734 | 102794 | 11, 26, 1 |
| 13 | KCTD4 | potassium channel tetramerization domain containing 4 | 180332 | 188342 | 133112 | 31, 35, 6 |
| 13 | POU4F1 | POU class 4 homeobox 1 | 152192 | 136160 | 152193 | 14, 22, 12 |
| 13 | PIBF1 | progesterone immunomodulatory binding factor 1 | 083535 | 083520 | 102554 | 10, 34, 11 |
| 13 | PROSER1 | proline and serine rich 1 | 120685 | 133115 | 188811 | 31, 12, 44 |
| 13 | PRR20A | proline rich 20A | 204919 | 102837 | 204918 | |
| 13 | PRR20B | proline rich 20B | 204918 | 204919 | 227151 | |
| 13 | PRR20C | proline rich 20C | 229665 | 102837 | 204918 | |
| 13 | PRR20D | proline rich 20D | 227151 | 204918 | 234278 | |
| 13 | PRR20E | proline rich 20E | 234278 | 227151 | 118946 | |
| 13 | PCCA | propionyl-CoA carboxylase alpha subunit | 175198 | 043355 | 134864 | 10, 2, 17 |
| 13 | POMP | proteasome maturation protein | 132963 | 102755 | 139508 | 34, 7, 43 |
| 13 | PROZ | protein Z, vitamin K dependent plasma glycoprotein | 126231 | 126218 | 126226 | 1, 19, 17 |
| 13 | PCDH17 | protocadherin 17 | 118946 | 234278 | 139734 | 26, 11, 36 |
| 13 | PCDH20 | protocadherin 20 | 280165 | 083544 | 197991 | 15, 45, 39 |
| 13 | PCDH8 | protocadherin 8 | 136099 | 136110 | 102837 | 12, 8, 6 |
| 13 | PCDH9 | protocadherin 9 | 184226 | 197991 | 150361 | 11, 8, 16 |
| 13 | RAB20 | RAB20, member RAS oncogene family | 139832 | 134871 | 213995 | 16, 2, 17 |
| 13 | RAP2A | RAP2A, member of RAS oncogene family | 125249 | 139793 | 065150 | 18, 29, 22 |
| 13 | RASL11A | RAS like family 11 member A | 122035 | 122026 | 122034 | 13, 33, 14 |
| 13 | RASA3 | RAS p21 protein activator 3 | 185989 | 283199 | 283361 | 39, 1, 3 |
| 13 | RB1 | RB transcriptional corepressor 1 | 139687 | 136156 | 139679 | 18, 22, 42 |
| 13 | RCBTB1 | RCC1 and BTB domain containing protein 1 | 136144 | 136147 | 152213 | 31, 42, 29 |
| 13 | RCBTB2 | RCC1 and BTB domain containing protein 2 | 136161 | 139679 | 152207 | 11, 36, 2 |
| 13 | RGCC | regulator of cell cycle | 102760 | 172766 | 102763 | 20, 29, 5 |
| 13 | RFXAP | regulatory factor X associated protein | 133111 | 180440 | 120693 | 11, 22, 19 |
| 13 | RXFP2 | relaxin/insulin like family peptide receptor 2 | 133105 | 187676 | 073910 | |
| 13 | RFC3 | replication factor C subunit 3 | 133119 | 133121 | 172915 | 36, 45, 21 |
| 13 | ARHGEF7 | Rho guanine nucleotide exchange factor 7 | 102606 | 088448 | 153495 | 1, 22, 9 |
| 13 | RNASEH2B | ribonuclease H2 subunit B | 136104 | 186047 | 226792 | 11, 43, 29 |
| 13 | RPL21 | ribosomal protein L21 | 122026 | 152484 | 122035 | |
| 13 | RNF113B | ring finger protein 113B | 139797 | 152767 | 102572 | 24, 38, 8 |
| 13 | RNF17 | ring finger protein 17 | 132972 | 075673 | 151849 | 38, 32, 14 |
| 13 | RNF219 | ring finger protein 219 | 152193 | 152192 | 139746 | 22, 42, 24 |
| 13 | RNF6 | ring finger protein 6 | 127870 | 180730 | 132964 | 42, 39, 22 |
| 13 | RBM26 | RNA binding motif protein 26 | 139746 | 152193 | 102471 | 3, 29, 7 |
| 13 | POLR1D | RNA polymerase I subunit D | 186184 | 139517 | 169840 | 5, 4, 9 |
| 13 | RUBCNL | RUN and cysteine rich domain containing bedin 1 interacting | 102445 | 173988 | 136141 | 41, 39, 36 |
| | | protein like | | | | |
| 13 | SACS | sacsin molecular chaperone | 151835 | 102683 | 127863 | 45, 44, 1 |
| 13 | SGCG | sarcoglycan gamma | 102683 | 280175 | 151835 | 15, 25, 10 |
| 13 | SCEL | sciellin | 136155 | 005810 | 139737 | 24, 13, 1 |
| 13 | SERTM1 | serine rich and transmembrane domain containing 1 | 180440 | 133101 | 133111 | 14, 8, 44 |
| 13 | STK24 | serine/threonine kinase 24 | 102572 | 139797 | 088386 | 29, 3, 26 |
| 13 | SERPINE3 | serpin family E member 3 | 253309 | 150510 | 102786 | 22, 14, |
| 13 | SETDB2 | SET domain bifurcated 2 | 136169 | 102547 | 136147 | 22, 2, 15 |
| 13 | SUGT1 | SGT1 homolog, MIS12 kinetochore complex assembly cochaperone | 165416 | 139675 | 136110 | 10, 41, 28 |
| 13 | SHISA2 | shisa family member 2 | 180730 | 132932 | 127870 | 18, 17, 30 |
| 13 | SIAH3 | siah E3 ubiquitin protein ligase family member 3 | 215475 | 174015 | 123200 | 6, 8, |
| 13 | SAP18 | Sin3A associated protein 18 | 150459 | 150457 | 165480 | 30, 11, 29 |
| 13 | SLAIN1 | SLAIN motif family member 1 | 139737 | 136155 | 136160 | 8, 17, 38 |
| 13 | SLITRK1 | SLIT and NTRK like family member 1 | 178235 | 136158 | 184564 | 8, 38, 19 |
| 13 | SLITRK5 | SLIT and NTRK like family member 5 | 165300 | 184564 | 179399 | 11, 18, 15 |
| 13 | SLITRK6 | SLIT and NTRK like family member 6 | 184564 | 178235 | 165300 | 42, 24, 3 |
| 13 | SMAD9 | SMAD family member 9 | 120693 | 133111 | 120697 | 37, 31, 40 |
| 13 | SMIM2 | small integral membrane protein 2 | 139656 | 281883 | 151778 | |
| 13 | NALCN | sodium leak channel, non-selective | 102452 | 125247 | 198542 | 19, 8, 13 |
| 13 | SLC10A2 | solute carrier family 10 member 2 | 125255 | 134899 | 182346 | 17, 16, 14 |
| 13 | SLC15A1 | solute carrier family 15 member 1 | 088386 | 102572 | 088387 | 29, 35, 3 |
| 13 | SLC25A15 | solute carrier family 25 member 15 | 102743 | 102738 | 120690 | 1, 19, 43 |
| 13 | SLC25A30 | solute carrier family 25 member 30 | 174032 | 133112 | 136152 | 42, 13, 29 |
| 13 | SLC46A3 | solute carrier family 46 member 3 | 139508 | 132963 | 132938 | 20, 31, 24 |
| 13 | SLC7A1 | solute carrier family 7 member 1 | 139514 | 132938 | 122042 | 26, 16, 9 |
| 13 | SPG20 | spastic paraplegia 20 (Troyer syndrome) | 133104 | 242715 | 133101 | 45, 18, 31 |
| 13 | SPACA7 | sperm acrosome associated 7 | 153498 | 182968 | 126216 | 38, 32, |
| 13 | SPERT | spermatid associated | 174015 | 165837 | 215475 | 38, |
| 13 | SOHLH2 | spermatogenesis and oogenesis specific basic helix-loop-helix 2 | 120669 | 133083 | 250709 | 38, 3, 32 |
| 13 | SPATA13 | spermatogenesis associated 13 | 182957 | 273167 | 240654 | |
| 13 | SKA3 | spindle and kinetochore associated complex subunit 3 | 165480 | 150459 | 173141 | 3, 2, 41 |
| 13 | SPRY2 | sprouty RTK signaling antagonist 2 | 136158 | 102471 | 178235 | 26, 14, 37 |
| 13 | SPRYD7 | SPRY domain containing 7 | 123178 | 102753 | 204977 | 18, 3, 19 |
| 13 | SUPT20H | SPT20 homolog, SAGA complex component | 102710 | 120699 | 279238 | 38, 21, 42 |
| 13 | SOX1 | SRY-box 1 | 182968 | 153495 | 153498 | 20, 12, 8 |
| 13 | SOX21 | SRY-box21 | 125285 | 152749 | 125257 | 12, 8, 37 |
| 13 | STARD13 | StAR related lipid transfer domain containing 13 | 133121 | 133116 | 133119 | 43, 26, 29 |
| 13 | STOML3 | stomatin like 3 | 133115 | 150893 | 120685 | 42, 30, 24 |
| 13 | SERP2 | stress associated endoplasmic reticulum protein family member 2 | 151778 | 139656 | 102804 | 22, 20, 17 |
| 13 | SUCLA2 | succinate-CoA ligase ADP-forming beta subunit | 136143 | 102468 | 136159 | 2, 13, 8 |
| 13 | TBC1D4 | TBC1 domain family member 4 | 136111 | 118922 | 188243 | 22, 42, 25 |
| 13 | TGDS | TDP-glucose 4,6-dehydratase | 088451 | 080166 | 152749 | 43, 22, 4 |
| 13 | TEX26 | testis expressed 26 | 175664 | 102802 | 120694 | 10, 30, 38 |
| 13 | TEX29 | testis expressed 29 | 153495 | 102606 | 182968 | 6, 38, 37 |
| 13 | TEX30 | testis expressed 30 | 151287 | 175820 | 134901 | 4, 38, 34 |
| 13 | THSD1 | thrombospondin type 1 domain containing 1 | 136114 | 136098 | 136100 | 11, 25, 42 |
| 13 | TNFRSF19 | TNF receptor superfamily member 19 | 127863 | 151835 | 027001 | 42, 11, 2 |
| 13 | TFDP1 | transcription factor Dp-1 | 198176 | 150403 | 186009 | 4, 9, 37 |
| 13 | TRPC4 | transient receptor potential cation channel subfamily C member 4 | 133107 | 133110 | 120686 | 44, 10, 42 |
| 13 | TM9SF2 | transmembrane 9 superfamily member 2 | 125304 | 169508 | 125246 | 30, 2, 4 |
| 13 | TMC03 | transmembrane and coiled-coil domains 3 | 150403 | 150401 | 198176 | |
| 13 | TMTC4 | transmembrane and tetratricopeptide repeat containing 4 | 125247 | 134864 | 102452 | 24, 8, 13 |
| 13 | TPTE2 | transmembrane phosphoinositide 3-phosphatase and tensin homolog 2 | 132958 | 198033 | 196199 | 10, 37, 38 |
| 13 | TMEM255B | transmembrane protein 255B | 184497 | 185974 | 183087 | 1, 26, 25 |
| 13 | TRIM13 | tripartite motif containing 13 | 204977 | 123178 | 198553 | 22, 6, 12 |
| 13 | TPP2 | tripeptidyl peptidase 2 | 134900 | 102466 | 139780 | 38, 10, 11 |
| 13 | TSC22D1 | TSC22 domain family member 1 | 102804 | 151778 | 083635 | 29, 20, 25 |
| 13 | TUBA3C | tubulin alpha 3c | 198033 | 279081 | 132958 | 38, 5, 6 |
| 13 | TUBGCP3 | tubulin gamma complex associated protein 3 | 126216 | 153498 | 068650 | 40, 22, 38 |
| 13 | TDRD3 | tudor domain containing 3 | 083544 | 139734 | 280165 | 10, 18, 6 |
| 13 | TNFSF11 | tumor necrosis factor superfamily member 11 | 120659 | 023516 | 179813 | 22, 28, 10 |
| 13 | TNFSF13B | tumor necrosis factor superfamily member 13b | 102524 | 139826 | 283384 | 45, 5, 7 |
| 13 | TPT1 | tumor protein, translationally-controlled 1 | 133112 | 180332 | 174032 | 30, 43, 25 |
| 13 | UBAC2 | UBA domain containing 2 | 134882 | 088387 | 125245 | 35, 41, 21 |
| 13 | UBE2L5P | Ubiquitin conjugating enzyme E2 L5, pseudogene | 236444 | 102781 | 189403 | |
| 13 | UCHL3 | ubiquitin C-terminal hydrolase L3 | 118939 | 188243 | 136153 | 6, 31, 32 |
| 13 | UFM1 | ubiquitin fold modifier 1 | 120686 | 133107 | 150893 | 45, 11, 7 |
| 13 | UBL3 | ubiquitin like 3 | 122042 | 139514 | 102781 | 11, 8, 35 |
| 13 | USP12 | ubiquitin specific peptidase 12 | 152484 | 132975 | 122026 | 1, 22, 10 |
| 13 | USPL1 | ubiquitin specific peptidase like 1 | 132952 | 189403 | 132965 | 22, 7, 42 |
| 13 | UGGT2 | UDP-glucose glycoprotein glucosyltransferase 2 | 102595 | 102580 | 185352 | 29, 11, 6 |
| 13 | UPF3A | UPF3 regulator of nonsense transcripts homolog A (yeast) | 169062 | 130177 | 198824 | 33, 22, 29 |
| 13 | URAD | ureidoimidazoline (2-oxo-4-hydroxy-4-carboxy-5-) decarboxylase | 183463 | 165556 | 122025 | |
| 13 | UTP14C | UTP14, small subunit processome component homolog C (S. cerevisiae) | 253797 | 253710 | 197168 | |
| 13 | VPS36 | vacuolar protein sorting 36 homolog | 136100 | 136114 | 136108 | 26, 11, 22 |
| 13 | VWA8 | von Willebrand factor A domain containing 8 | 102763 | 102760 | 102780 | 29, 18, 11 |
| 13 | WASF3 | WAS protein family member 3 | 132970 | 132964 | 132975 | 29, 8, 14 |
| 13 | WDFY2 | WD repeat and FYVE domain containing 2 | 139668 | 102786 | 102796 | 13, 2, 39 |
| 13 | WBP4 | WW domain binding protein 4 | 120688 | 120690 | 165572 | 22, 43, 21 |
| 13 | ZIC2 | Zic family member 2 | 043355 | 139800 | 175198 | 11, 12, 26 |
| 13 | ZIC5 | Zic family member 5 | 139800 | 125246 | 043355 | 11, 12, 30 |
| 13 | ZC3H13 | zinc finger CCCH-type containing 13 | 123200 | 215475 | 080618 | 18, 5, 32 |
| 13 | ZDHHC20 | zinc finger DHHC-type containing 20 | 180776 | 173141 | 165487 | 1, 4, 32 |
| 13 | ZMYM2 | zinc finger MYM-type containing 2 | 121741 | 132950 | 121743 | 40, 11, 23 |
| 13 | ZMYM5 | zinc finger MYM-type containing 5 | 132950 | 121390 | 121741 | 4, 1, 2 |
| 13 | ZAR1L | zygote arrest 1-like | 189167 | 073910 | 139618 | 38, |
| 14 | ADCK1 | aarF domain containing kinase 1 | 063761 | 197734 | 021645 | 23, 27, 15 |
| 14 | ABHD12B | abhydrolase domain containing 12B | 131969 | 100504 | 100505 | 14, 2, 35 |
| 14 | ABHD4 | abhydrolase domain containing 4 | 100439 | 129562 | 255804 | 33, 13, 20 |
| 14 | ACTN1 | actinin alpha 1 | 072110 | 185650 | 139990 | 24, 12, 35 |
| 14 | ACTR10 | actin-related protein 10 homolog | 131966 | 139971 | 100567 | 29, 30, 5 |
| 14 | AHSA1 | activator of HSP90 ATPase activity 1 | 100591 | 151445 | 100593 | 18, 21, 1 |
| 14 | ACOT1 | acyl-CoA thioesterase 1 | 184227 | 170468 | 119673 | 29, 25, 35 |
| 14 | ACOT2 | acyl-CoA thioesterase 2 | 119673 | 184227 | 177465 | 29, 1, 6 |
| 14 | ACOT4 | acyl-CoA thioesterase 4 | 177465 | 119673 | 205669 | 1, 11, 6 |
| 14 | ACOT6 | acyl-CoA thioesterase 6 | 205669 | 177465 | 119661 | 10, 38, |
| 14 | ACYP1 | acylphosphatase 1 | 119640 | 119684 | 119703 | 29, 11, 31 |
| 14 | ADAM20 | ADAM metallopeptidase domain 20 | 134007 | 139985 | 133997 | 38, 8, |
| 14 | ADAM21 | ADAM metallopeptidase domain 21 | 139985 | 213463 | 134007 | 38, 6, 16 |
| 14 | AP1G2 | adaptor related protein complex 1 gamma 2 subunit | 213983 | 259431 | 092051 | |
| 14 | AP4S1 | adaptor related protein complex 4 sigma 1 subunit | 100478 | 196792 | 092148 | |
| 14 | AP5M1 | adaptor related protein complex 5 mu 1 subunit | 053770 | 070367 | 139977 | 24, 39, 42 |
| 14 | ADCY4 | adenylate cyclase 4 | 129467 | 213903 | 258973 | 15, 1, 32 |
| 14 | AK7 | adenylate kinase 7 | 140057 | 100744 | 090060 | 42, 23, 20 |
| 14 | ADSSL1 | adenylosuccinate synthase like 1 | 185100 | 203485 | 184990 | 1, 25, 9 |
| 14 | ARF6 | ADP ribosylation factor 6 | 165527 | 165525 | 100483 | 18, 24, 22 |
| 14 | AHNAK2 | AHNAK nucleoprotein 2 | 185567 | 166428 | 140104 | 43, 26, 6 |
| 14 | AJUBA | ajuba LIM protein | 129474 | 259132 | 100802 | 19, 9, 24 |
| 14 | AKAP5 | A-kinase anchoring protein 5 | 179841 | 089775 | 126804 | 36, 23, 22 |
| 14 | AKAP6 | A-kinase anchoring protein 6 | 151320 | 100852 | 151322 | 26, 8, 40 |
| 14 | AKT1 | AKT serine/threonine kinase 1 | 142208 | 184990 | 179627 | |
| 14 | ALDH6A1 | aldehyde dehydrogenase 6 family member A1 | 119711 | 119636 | 205659 | 17, 25, 8 |
| 14 | ALKBH1 | alkB homolog 1, histone H2A dioxygenase | 100601 | 100596 | 119705 | 14, 37, 2 |
| 14 | AMN | amnion associated transmembrane protein | 166126 | 131323 | 198752 | 17, 16, 28 |
| 14 | ANGEL1 | angel homolog 1 | 013523 | 071246 | 100565 | 38, 4, 36 |
| 14 | ANG | angiogenin | 214274 | 258818 | 259171 | 19, 3, 30 |
| 14 | ASB2 | ankyrin repeat and SOCS box containing 2 | 100628 | 140067 | 175699 | 15, 44, 25 |
| 14 | ANKRD9 | ankyrin repeat domain 9 | 156381 | 196663 | 089902 | 37, 9, 19 |
| 14 | APOPT1 | apoptogenic 1, mitochondrial | 256053 | 126214 | 126215 | 29, 27, 22 |
| 14 | AREL1 | apoptosis resistant E3 ubiquitin protein ligase 1 | 119682 | 119681 | 119616 | 42, 7, 22 |
| 14 | ACIN1 | apoptotic chromatin condensation inducer 1 | 100813 | 139880 | 179933 | 16, 12, 23 |
| 14 | APEX1 | apurinic/apyrimidinic endodeoxyribonuclease 1 | 100823 | 092094 | 165782 | 29, 9, 3 |
| 14 | ARG2 | arginase 2 | 081181 | 100564 | 100568 | 29, 40, 33 |
| 14 | ASPG | asparaginase | 166183 | 227729 | 066735 | 27, 17, 19 |
| 14 | ATXN3 | ataxin 3 | 066427 | 100815 | 279963 | 10, |
| 14 | ATL1 | atlastin GTPase 1 | 198513 | 012983 | 151748 | 8, 26, 17 |
| 14 | ABCD4 | ATP binding cassette subfamily D member 4 | 119688 | 119614 | 133980 | 1, 29, 36 |
| 14 | ATP5S | ATP synthase, H+ transporting, mitochondrial Fo | 125375 | 087299 | 100490 | 29, 26, 3 |
| | | complex subunit s (factor B) | | | | |
| 14 | ATP6V1D | ATPase H+ transporting V1 subunit D | 100554 | 072415 | 134001 | 43, 30, 31 |
| 14 | ARID4A | AT-rich interaction domain 4A | 032219 | 100567 | 196860 | 11, 26, 31 |
| 14 | ATG14 | autophagy related 14 | 126775 | 178974 | 182521 | 1, 11, 9 |
| 14 | ATG2B | autophagy related 2B | 066739 | 100739 | 100744 | 1, 39, 14 |
| 14 | BBOF1 | basal body orientation factor 1 | 119636 | 279461 | 119711 | 38, 34, 20 |
| 14 | BATF | basic leucine zipper ATF-like transcription factor | 156127 | 140044 | 119686 | 41, 22, 5 |
| 14 | BCL11B | B-cell CLL/lymphoma 11B | 127152 | 176605 | 183576 | 35, 39, 30 |
| 14 | BAG5 | BCL2 associated athanogene 5 | 166170 | 166166 | 126214 | 38, 1, 42 |
| 14 | BCL2L2 | BCL2 like 2 | 129473 | 235194 | 258643 | 29, 6, 14 |
| 14 | BCL2L2-PABPN1 | BCL2L2-PABPN1 readthrough | 258643 | 129473 | 100836 | |
| 14 | BMP4 | bone morphogenetic protein 4 | 125378 | 100523 | 100526 | 16, 37, 12 |
| 14 | BDKRB1 | bradykinin receptor B1 | 100739 | 258691 | 066739 | 9, 3, 10 |
| 14 | BDKRB2 | bradykinin receptor B2 | 168398 | 227051 | 258691 | |
| 14 | BEGAIN | brain enriched guanylate kinase associated | 183092 | 176473 | 185559 | 9, 28, 8 |
| 14 | BRMS1L | breast cancer metastasis-suppressor 1-like | 100916 | 174373 | 151332 | 26, 29, 25 |
| 14 | BRF1 | BRF1, RNA polymerase III transcription initiation factor subunit | 185024 | 183828 | 184887 | 13, 35, 26 |
| 14 | BAZ1A | bromodomain adjacent to zinc finger domain 1A | 198604 | 165410 | 100883 | 41, 6, 21 |
| 14 | BTBD6 | BTB domain containing 6 | 184887 | 185024 | 179364 | 30, 31, 25 |
| 14 | BTBD7 | BTB domain containing 7 | 011114 | 012963 | 133958 | 18, 11, 6 |
| 14 | CDH24 | cadherin 24 | 139880 | 222028 | 100813 | 9, 23, 1 |
| 14 | CLMN | calmin | 165959 | 100697 | 176438 | |
| 14 | CALM1 | calmodulin 1 | 198668 | 119720 | 165914 | 8, 31, 45 |
| 14 | CARMIL3 | capping protein regulator and myosin 1 linker 3 | 186648 | 187630 | 100884 | 18, 4, 14 |
| 14 | CTSG | cathepsin G | 100448 | 092009 | 100450 | 5, 15, 7 |
| 14 | CATSPERB | cation channel sperm associated auxiliary subunit beta | 133962 | 100796 | 165929 | 4, 27, 38 |
| 14 | CEBPE | CCAAT/enhancer binding protein epsilon | 092067 | 283654 | 092068 | 5, 6, 17 |
| 14 | CDC42BPB | CDC42 binding protein kinase beta | 198752 | 166126 | 283071 | 34, 14, 3 |
| 14 | CIDEB | cell death-inducing DFFA-like effector b | 136305 | 196943 | 213906 | 36, |
| 14 | CDCA4 | cell division cycle associated 4 | 170779 | 140104 | 183484 | 9, 7, 22 |
| 14 | CGRRF1 | cell growth regulator with ring finger domain 1 | 100532 | 197045 | 020577 | 31, 22, 1 |
| 14 | CEP128 | centrosomal protein 128 | 100629 | 211448 | 165409 | 36, |
| 14 | CEP170B | centrosomal protein 170B | 099814 | 179627 | 166428 | 26, 3, 37 |
| 14 | CBLN3 | cerebellin 3 precursor | 139899 | 205978 | 100441 | 36, 45, 6 |
| 14 | CHMP4A | charged multivesicular body protein 4A | 254505 | 139908 | 213920 | 21, 30, 26 |
| 14 | CHD8 | chromodomain helicase DNA binding protein 8 | 100888 | 092201 | 129472 | 3, 36, 31 |
| 14 | CHGA | chromogranin A | 100604 | 066455 | 100605 | 29, 31, 2 |
| 14 | C14orf1 | chromosome 14 open reading frame 1 | 133935 | 119685 | 119650 | 30, 29, 2 |
| 14 | C14orf105 | chromosome 14 open reading frame 105 | 100557 | 139977 | 151812 | 17, 4, 5 |
| 14 | C14orf119 | chromosome 14 open reading frame 119 | 179933 | 100813 | 283654 | |
| 14 | C14orf132 | Chromosome 14 open reading frame 132 | 227051 | 250366 | 168398 | 8, 31, 42 |
| 14 | C14orf159 | chromosome 14 open reading frame 159 | 133943 | 100784 | 119714 | 24, 13, 5 |
| 14 | C14orf166 | chromosome 14 open reading frame 166 | 087302 | 186469 | 087303 | 41, 40, 43 |
| 14 | C14orf169 | Chromosome 14 open reading frame 169 | 170468 | 187105 | 184227 | 9, 45, 6 |
| 14 | C14orf177 | chromosome 14 open reading frame 177 | 176605 | 100749 | 127152 | 15, 38, |
| 14 | C14orf178 | chromosome 14 open reading frame 178 | 197734 | 100603 | 063761 | |
| 14 | C14orf180 | chromosome 14 open reading frame 180 | 184601 | 258986 | 203485 | 15, 1, 25 |
| 14 | C14orf2 | chromosome 14 open reading frame 2 | 156411 | 088808 | 156414 | 31, 43, 34 |
| 14 | C14orf28 | chromosome 14 open reading frame 28 | 179476 | 189139 | 179454 | 15, 2, 38 |
| 14 | C14orf37 | chromosome 14 open reading frame 37 | 139971 | 151812 | 131966 | |
| 14 | C14orf39 | chromosome 14 open reading frame 39 | 179008 | 100614 | 184302 | 37, 38, 19 |
| 14 | C14orf79 | chromosome 14 open reading frame 79 | 140104 | 185567 | 170779 | 24, 6, 35 |
| 14 | C14orf80 | chromosome 14 open reading frame 80 | 185347 | 257341 | 184986 | 3, 9, 21 |
| 14 | C14orf93 | chromosome 14 open reading frame 93 | 100802 | 129474 | 100804 | 39, 9, 36 |
| 14 | CHURC1-FNTB | CHURC1-FNTB readthrough | 125954 | 258289 | 176153 | |
| 14 | CHURC1 | churchill domain containing 1 | 258289 | 279654 | 125954 | 1, 2, 25 |
| 14 | CMA1 | chymase 1 | 092009 | 100445 | 100448 | 23, |
| 14 | CMTM5 | CKLF like MARVEL transmembrane domain containing 5 | 166091 | 166090 | 197616 | 26, 8, 14 |
| 14 | CPSF2 | cleavage and polyadenylation specific factor 2 | 165934 | 183648 | 140090 | 18, 3, 42 |
| 14 | CIPC | CLOCK interacting pacemaker | 198894 | 119669 | 259164 | 31, 8, 42 |
| 14 | COCH | cochlin | 100473 | 092108 | 196792 | 11, 26, 31 |
| 14 | COQ6 | coenzyme Q6, monooxygenase | 119723 | 156050 | 187097 | 9, 13, 24 |
| 14 | CFL2 | cofilin 2 | 165410 | 129515 | 198604 | 25, 18, 15 |
| 14 | CCDC175 | coiled-coil domain containing 175 | 151838 | 050130 | 139970 | 44, 33, 20 |
| 14 | CCDC177 | coiled-coil domain containing 177 | 267909 | 175985 | 100647 | 14, 8, |
| 14 | CCDC85C | coiled-coil domain containing 85C | 205476 | 090061 | 182218 | 3, 44, 26 |
| 14 | CCDC88C | coiled-coil domain containing 88C | 015133 | 119714 | 100796 | 21, 9, 3 |
| 14 | CPNE6 | copine 6 | 100884 | 186648 | 129535 | 8, 31, 17 |
| 14 | CNIH1 | cornichon family AMPA receptor auxiliary protein 1 | 100528 | 100526 | 197045 | |
| 14 | COX16 | COX16, cytochrome c oxidase assembly homolog | 133983 | 100678 | 258644 | 10, 15, 30 |
| 14 | CKB | creatine kinase B | 166165 | 075413 | 166166 | 33, 14, 8 |
| 14 | CTAGE5 | CTAGE family member 5, ER export factor | 150527 | 258941 | 165355 | 19, 24, 2 |
| 14 | CLEC14A | C-type lectin domain family 14 member A | 176435 | 139874 | 100934 | 6, 32, 25 |
| 14 | CCNB1IP1 | cyclin B1 interacting protein 1 | 100814 | 136319 | 129484 | 3, 12, 6 |
| 14 | CINP | cyclin dependent kinase 2 interacting protein | 100865 | 022976 | 196663 | 29, 3, 18 |
| 14 | CDKN3 | cyclin dependent kinase inhibitor 3 | 100526 | 125378 | 100528 | 38, 43, 22 |
| 14 | CDKL1 | cyclin dependent kinase like 1 | 100490 | 125375 | 012983 | 9, 25, 24 |
| 14 | CCNK | cyclin K | 090061 | 183576 | 205476 | 16, 22, 23 |
| 14 | CRIP1 | cysteine rich protein 1 | 213145 | 182809 | 257341 | 9, 28, 7 |
| 14 | CRIP2 | cysteine rich protein 2 | 182809 | 182979 | 213145 | 27, 28, 26 |
| 14 | COX8C | cytochrome c oxidase subunit 8C | 187581 | 133958 | 175785 | 38, |
| 14 | CYP46A1 | cytochrome P450 family 46 subfamily A member 1 | 036530 | 182218 | 066629 | 26, 14, 28 |
| 14 | DCAF11 | DDB1 and CUL4 associated factor 11 | 100897 | 100889 | 259371 | 24, 39, 13 |
| 14 | DCAF4 | DDB1 and CUL4 associated factor 4 | 119599 | 205683 | 165861 | 13, 9, 27 |
| 14 | DCAF5 | DDB1 and CUL4 associated factor 5 | 139990 | 072110 | 081177 | 38, 1, 28 |
| 14 | DDHD1 | DDHD domain containing 1 | 100523 | 073712 | 125378 | 22, 26, 18 |
| 14 | DDX24 | DEAD-box helicase 24 | 089737 | 089723 | 165948 | 21, 24, 36 |
| 14 | DAD1 | defender against cell death 1 | 129562 | 211888 | 100439 | 31, 2, 11 |
| 14 | DHRS1 | dehydrogenase/reductase 1 | 157379 | 100949 | 196943 | 34, 36, 39 |
| 14 | DHRS2 | dehydrogenase/reductase 2 | 100867 | 092051 | 157326 | 4, 19, 3 |
| 14 | DHRS4 | dehydrogenase/reductase 4 | 157326 | 100867 | 187630 | 29, 1, 13 |
| 14 | DHRS4L2 | dehydrogenase/reductase 4 like 2 | 187630 | 157326 | 186648 | 3, 37, 13 |
| 14 | DHRS7 | dehydroaenase/reductase 7 | 100612 | 126773 | 100614 | 29, 33, 30 |
| 14 | DEGS2 | delta 4-desaturase, sphingolipid 2 | 168350 | 196405 | 100811 | 3, 37, 22 |
| 14 | DLK1 | delta like non-canonical Notch ligand 1 | 185559 | 183092 | 254656 | 32, 31, 2 |
| 14 | DICER1 | dicer 1, ribonuclease III | 100697 | 133937 | 165959 | 22, 43, 12 |
| 14 | DLST | dihydrolipoamide S-succinyltransferase | 119689 | 119608 | 198208 | 39, 40, 24 |
| 14 | DAAM1 | dishevelled associated activator of morphogenesis 1 | 100592 | 165617 | 181619 | 40, 36, 22 |
| 14 | DACT1 | dishevelled binding antagonist of beta catenin 1 | 165617 | 100578 | 100592 | 26, 12, 29 |
| 14 | DLGAP5 | DLG associated protein 5 | 126787 | 131981 | 178974 | 39, 5, 3 |
| 14 | POLE2 | DNA polymerase epsilon 2, accessory subunit | 100479 | 165506 | 197776 | 10, 4, 3 |
| 14 | DPF3 | double PHD fingers 3 | 205683 | 280188 | 119599 | 38, |
| 14 | DTD2 | D-tyrosyl-tRNA deacylase 2 (putative) | 129480 | 203546 | 214943 | 38, 23, 45 |
| 14 | DNAAF2 | dynein axonemal assembly factor 2 | 165506 | 168282 | 100479 | 34, 31, 10 |
| 14 | DNAL1 | dynein axonemal light chain 1 | 119661 | 205669 | 176903 | 1, 20, 26 |
| 14 | DYNC1H1 | dynein cytoplasmic 1 heavy chain 1 | 197102 | 078304 | 080824 | 26, 23, 43 |
| 14 | EAPP | E2F associated phosphoprotein | 129518 | 165389 | 129515 | 29, 45, 30 |
| 14 | EML1 | echinoderm microtubule associated protein like 1 | 066629 | 036530 | 196405 | 29, 8, 14 |
| 14 | EML5 | echinoderm microtubule associated protein like 5 | 165521 | 100722 | 165533 | 26, 31, 2 |
| 14 | ENTPD5 | ectonucleoside triphosphate diphosphohydrolase 5 | 187097 | 119723 | 279461 | 17, 26, 42 |
| 14 | EFCAB11 | EF-hand calcium binding domain 11 | 140025 | 053254 | 042088 | |
| 14 | EGLN3 | egl-9 family hypoxia inducible factor 3 | 129521 | 151322 | 165389 | 35, 32, 27 |
| 14 | ELMSAN1 | ELM2 and Myb/SANT domain containing 1 | 156030 | 176903 | 140043 | 4, 18, 24 |
| 14 | EFS | embryonal Fyn-associated substrate | 100842 | 283151 | 166090 | 11, 26, 15 |
| 14 | EVL | Enah/Vasp-like | 196405 | 066629 | 168350 | 39, 41, 36 |
| 14 | ERO1A | endoplasmic reticulum oxidoreductase 1 alpha | 197930 | 180998 | 100519 | |
| 14 | ERH | enhancer of rudimentary homolog (Drosophila) | 100632 | 100626 | 029364 | 29, 3, 28 |
| 14 | EDDM3A | epididymal protein 3A | 181562 | 259171 | 181552 | 33, 38, |
| 14 | EDDM3B | epididymal protein 3B | 181552 | 181562 | 169413 | 38, |
| 14 | EMC9 | ER membrane protein complex subunit 9 | 100908 | 092010 | 100911 | 29, 26, 41 |
| 14 | ESR2 | estrogen receptor 2 | 140009 | 054654 | 100714 | 38, 20, |
| 14 | ESRRB | estrogen related receptor beta | 119715 | 089916 | 071246 | 14, 25, 17 |
| 14 | EIF2S1 | eukaryotic translation initiation factor 2 subunit alpha | 134001 | 100554 | 100558 | 1, 30, 6 |
| 14 | EIF2B2 | eukaryotic translation initiation factor 2B subunit beta | 119718 | 119630 | 119684 | 29, 21, 41 |
| 14 | EIF5 | eukaryotic translation initiation factor 5 | 100664 | 185215 | 075413 | 29, 37, 22 |
| 14 | EXOC3L4 | exocyst complex component 3 like 4 | 205436 | 283071 | 185215 | 20, |
| 14 | EXOC5 | exocyst complex component 5 | 070367 | 165588 | 053770 | 7, 38, 31 |
| 14 | EXD2 | exonuclease 3′-5′ domain containing 2 | 081177 | 139990 | 100626 | 29, 38, 18 |
| 14 | FAM161B | family with sequence similarity 161 member B | 156050 | 119725 | 119723 | 8, 31, 38 |
| 14 | FAM177A1 | family with sequence similarity 177 member A1 | 151327 | 100883 | 092020 | |
| 14 | FAM179B | family with sequence similarity 179 member B | 198718 | 179454 | 185246 | 11, 29, 24 |
| 14 | FAM181A | family with sequence similarity 181 member A | 140067 | 175785 | 100628 | 38, 27, 8 |
| 14 | FAM71D | family with sequence similarity 71 member D | 172717 | 171723 | 072415 | 40, 38, 5 |
| 14 | FANCM | Fanconi anemia complementation group M | 187790 | 100442 | 129534 | 26, 38, 23 |
| 14 | FNTB | farnesyltransferase, CAAX box, beta | 257365 | 139998 | 125952 | 24, 35, 9 |
| 14 | FITM1 | fat storage inducing transmembrane protein 1 | 139914 | 259371 | 092010 | 25, 9, 31 |
| 14 | FBXO33 | F-box protein 33 | 165355 | 150527 | 165379 | 4, 11, 31 |
| 14 | FBXO34 | F-box protein 34 | 178974 | 126787 | 126775 | 24, 36, 42 |
| 14 | FCF1 | FCF1 rRNA-processing protein | 119616 | 119682 | 119596 | |
| 14 | FLVCR2 | feline leukemia virus subgroup C cellular receptor family member 2 | 119686 | 156127 | 119685 | 38, 32, 2 |
| 14 | FRMD6 | FERM domain containing 6 | 139926 | 139921 | 186469 | 45, 24, 18 |
| 14 | FERMT2 | fermitin family member 2 | 073712 | 100522 | 100523 | 1, 32, 18 |
| 14 | FLRT2 | fibronectin leucine rich transmembrane protein 2 | 185070 | 071537 | 054983 | |
| 14 | FSCB | fibrous sheath CABYR binding protein | 189139 | 165379 | 179476 | 38, 25, |
| 14 | FBLN5 | fibulin 5 | 140092 | 165929 | 100815 | 36, 1, 2 |
| 14 | FKBP3 | FK506 binding protein 3 | 100442 | 185246 | 187790 | 11, 6, 25 |
| 14 | FOXA1 | forkhead box A1 | 129514 | 151338 | 139865 | 33, 4, 26 |
| 14 | FOXG1 | forkhead box G1 | 176165 | 139910 | 184304 | |
| 14 | FOXN3 | forkhead box N3 | 053254 | 165533 | 140025 | 22, 7, 29 |
| 14 | FOS | Fos proto-oncogene, AP-1 transcription factor subunit | 170345 | 170348 | 140044 | 5, 42, 1 |
| 14 | FUT8 | fucosyltransferase 8 | 033170 | 125952 | 196553 | 23, 19, 13 |
| 14 | GNG2 | G protein subunit gamma 2 | 186469 | 139926 | 087302 | |
| 14 | GPR132 | G protein-coupled receptor 132 | 183484 | 170779 | 184916 | 39, 41, 26 |
| 14 | GPR135 | G protein-coupled receptor 135 | 181619 | 100592 | 126790 | 38, 9, 37 |
| 14 | GPR137C | G protein-coupled receptor 137C | 180998 | 087301 | 197930 | 11, 45, 22 |
| 14 | GPR33 | G protein-coupled receptor 33 (gene/pseudogene) | 214943 | 129480 | 151413 | |
| 14 | GPR65 | G protein-coupled receptor 65 | 140030 | 054983 | 100433 | 5, 1, 36 |
| 14 | GPR68 | G protein-coupled receptor 68 | 119714 | 133943 | 015133 | 32, 6, 10 |
| 14 | G2E3 | G2/M-phase specific E3 ubiquitin protein ligase | 092140 | 184304 | 092108 | 13, 31, 22 |
| 14 | GALC | galactosylceramidase | 054983 | 185070 | 140030 | 42, 31, 2 |
| 14 | LGALS3 | galectin 3 | 131981 | 168175 | 126787 | 35, 1, 34 |
| 14 | GEMIN2 | gem nuclear organelle associated protein 2 | 092208 | 100934 | 182400 | 22, 31, 34 |
| 14 | GTF2A1 | general transcription factor IIA subunit 1 | 165417 | 165409 | 140022 | 22, 23, 25 |
| 14 | GPHN | gephyrin | 171723 | 196553 | 172717 | 42, 24, 8 |
| 14 | GMFB | glia maturation factor beta | 197045 | 100528 | 100532 | |
| 14 | GNPNAT1 | glucosamine-phosphate N-acetyltransferase 1 | 100522 | 198252 | 073712 | 42, 25, 37 |
| 14 | GLRX5 | glutaredoxin 5 | 182512 | 176438 | 213231 | 11, 29, 14 |
| 14 | GPX2 | glutathione peroxidase 2 | 176153 | 125954 | 139998 | 4, 16, 37 |
| 14 | GSTZ1 | glutathione S-transferase zeta 1 | 100577 | 009830 | 100580 | 34, 21, 9 |
| 14 | PYGL | glycogen phosphorylase L | 100504 | 100503 | 131969 | 5, 4, 1 |
| 14 | GPHB5 | glycoprotein hormone beta 5 | 179600 | 126785 | 154001 | |
| 14 | GOLGA5 | golgin A5 | 066455 | 100600 | 100604 | 11, 45, 32 |
| 14 | GON7 | GON7, KEOPS complex subunit homolog | 170270 | 259066 | 012963 | 29, 4, 17 |
| 14 | GSC | goosecoid homeobox | 133937 | 196136 | 100697 | 6, 44, 10 |
| 14 | GPATCH2L | G-patch domain containing 2 like | 089916 | 119699 | 119715 | 5, |
| 14 | GZMB | granzyme B | 100453 | 100450 | 168952 | 5, 36, 37 |
| 14 | GZMH | granzyme H | 100450 | 100448 | 100453 | 30, 5, 10 |
| 14 | GSKIP | GSK3B interacting protein | 100744 | 066739 | 140057 | 29, 35, 4 |
| 14 | GCH1 | GTP cyclohydrolase 1 | 131979 | 020577 | 198554 | 22, 28, 19 |
| 14 | GMPR2 | guanosine monophosphate reductase 2 | 100938 | 129559 | 092330 | 29, 5, 32 |
| 14 | HAUS4 | HAUS augmin like complex subunit 4 | 092036 | 100462 | 259132 | 21, 5, 9 |
| 14 | HEATR4 | HEAT repeat containing 4 | 187105 | 133961 | 170468 | 38, 20, 14 |
| 14 | HEATR5A | HEAT repeat containing 5A | 129493 | 092148 | 203546 | 30, 41, 6 |
| 14 | HSP90AA1 | heat shock protein 90 alpha family class A member 1 | 080824 | 197102 | 140153 | 13, 30, 3 |
| 14 | HSPA2 | heat shock protein family A (Hsp70) member 2 | 126803 | 126804 | 165807 | 43, 38, 8 |
| 14 | HECTD1 | HECT domain E3 ubiquitin protein ligase 1 | 092148 | 100478 | 129493 | 40, 1, 42 |
| 14 | HNRNPC | heterogeneous nuclear ribonucleoprotein C (C1/C2) | 092199 | 169327 | 092200 | 21, 9, 34 |
| 14 | HHIPL1 | HHIP Iike 1 | 182218 | 205476 | 036530 | 1, 6, 14 |
| 14 | HOMEZ | homeobox and leucine zipper encoding | 215271 | 215277 | 235194 | 21, 38, 22 |
| 14 | HIF1A | hypoxia inducible factor 1 alpha subunit | 100644 | 258989 | 023608 | 42, 24, 45 |
| 14 | IGHA1 | Immunoglobulin heavy constant alpha 1 | 211895 | 211893 | 211896 | |
| 14 | IGHA2 | Immunoglobulin heavy constant alpha 2 (A2m marker) | 211890 | 184986 | 211891 | |
| 14 | IGHD | Immunoglobulin heavy constant delta | 211898 | 211897 | 211899 | |
| 14 | IGHE | Immunoglobulin heavy constant epsilon | 211891 | 211890 | 211892 | |
| 14 | IGHG1 | Immunoglobulin heavy constant gamma 1 (G1m marker) | 211896 | 211895 | 211897 | 36, 41, 10 |
| 14 | IGHG2 | Immunoglobulin heavy constant gamma 2 (G2m marker) | 211893 | 211892 | 211895 | |
| 14 | IGHG3 | Immunoglobulin heavy constant gamma 3 (G3m marker) | 211897 | 211896 | 211898 | |
| 14 | IGHG4 | Immunoglobulin heavy constant gamma 4 (G4m marker) | 211892 | 211891 | 211893 | |
| 14 | IGHM | Immunoglobulin heavy constant mu | 211899 | 211898 | 211900 | |
| 14 | IGHD1-1 | Immunoglobulin heavy diversity 1-1 | 236170 | 211931 | 211933 | |
| 14 | IGHD1-14 | Immunoglobulin heavy diversity 1-14 (non-functional) | 227108 | 211918 | 211920 | |
| 14 | IGHD1-20 | Immunoglobulin heavy diversity 1-20 | 237020 | 211912 | 211914 | |
| 14 | IGHD1-26 | Immunoglobulin heavy diversity 1-26 | 211907 | 236597 | 225825 | |
| 14 | IGHD1-7 | Immunoglobulin heavy diversity 1-7 | 237197 | 211925 | 228131 | |
| 14 | IGHD2-15 | Immunoglobulin heavy diversity 2-15 | 211918 | 211917 | 227108 | |
| 14 | IGHD2-2 | Immunoglobulin heavy diversity 2-2 | 211931 | 211930 | 236170 | |
| 14 | IGHD2-21 | Immunoglobulin heavy diversity 2-21 | 211912 | 211911 | 237020 | |
| 14 | IGHD2-8 | Immunoglobulin heavy diversity 2-8 | 211925 | 211924 | 237197 | |
| 14 | IGHD3-10 | Immunoglobulin heavy diversity 3-10 | 211923 | 232543 | 211924 | |
| 14 | IGHD3-16 | Immunoglobulin heavy diversity 3-16 | 211917 | 227800 | 211918 | |
| 14 | IGHD3-22 | Immunoglobulin heavy diversity 3-22 | 211911 | 227196 | 211912 | |
| 14 | IGHD3-3 | Immunoglobulin heavy diversity 3-3 | 211930 | 233655 | 211931 | |
| 14 | IGHD3-9 | Immunoglobulin heavy diversity 3-9 | 211924 | 211923 | 211925 | |
| 14 | IGHD4-11 | Immunoglobulin heavy diversity 4-11 (non-functional) | 232543 | 211921 | 211923 | |
| 14 | IGHD4-17 | Immunoglobulin heavy diversity 4-17 | 227800 | 211915 | 211917 | |
| 14 | IGHD4-23 | Immunoglobulin heavy diversity 4-23 (non-functional) | 227196 | 211909 | 211911 | |
| 14 | IGHD4-4 | Immunoglobulin heavy diversity 4-4 | 233655 | 211928 | 211930 | |
| 14 | IGHD5-12 | Immunoglobulin heavy diversity 5-12 | 211921 | 211920 | 232543 | |
| 14 | IGHD5-18 | Immunoglobulin heavy diversity 5-18 | 211915 | 211914 | 227800 | |
| 14 | IGHD5-24 | Immunoglobulin heavy diversity 5-24 (non-functional) | 211909 | 225825 | 227196 | |
| 14 | IGHD5-5 | Immunoglobulin heavy diversity 5-5 | 211928 | 228131 | 233655 | |
| 14 | IGHD6-13 | Immunoglobulin heavy diversity 6-13 | 211920 | 227108 | 211921 | |
| 14 | IGHD6-19 | Immunoglobulin heavy diversity 6-19 | 211914 | 237020 | 211915 | |
| 14 | IGHD6-25 | Immunoglobulin heavy diversity 6-25 | 225825 | 211907 | 211909 | |
| 14 | IGHD6-6 | Immunoglobulin heavy diversity 6-6 | 228131 | 237197 | 211928 | |
| 14 | IGHD7-27 | Immunoglobulin heavy diversity 7-27 | 236597 | 211905 | 211907 | |
| 14 | IGHJ1 | Immunoglobulin heavy joining 1 | 211905 | 211904 | 236597 | |
| 14 | IGHJ2 | Immunoglobulin heavy joining 2 | 211904 | 242887 | 211905 | |
| 14 | IGHJ3 | Immunoglobulin heavy joining 3 | 242887 | 240041 | 211904 | |
| 14 | IGHJ4 | Immunoglobulin heavy joining 4 | 240041 | 242472 | 242887 | |
| 14 | IGHJ5 | Immunoglobulin heavy joining 5 | 242472 | 211900 | 240041 | |
| 14 | IGHJ6 | Immunoglobulin heavy joining 6 | 211900 | 211899 | 242472 | |
| 14 | IGHV1-18 | Immunoglobulin heavy variable 1-18 | 211945 | 211944 | 211946 | |
| 14 | IGHV1-2 | Immunoglobulin heavy variable 1-2 | 211934 | 211933 | 211935 | |
| 14 | IGHV1-24 | Immunoglobulin heavy variable 1-24 | 211950 | 211949 | 211951 | |
| 14 | IGHV1-3 | Immunoglobulin heavy variable 1-3 | 211935 | 211934 | 276775 | |
| 14 | IGHV1-45 | Immunoglobulin heavy variable 1-45 | 211961 | 232216 | 211962 | |
| 14 | IGHV1-46 | Immunoglobulin heavy variable 1-46 | 211962 | 211961 | 211964 | |
| 14 | IGHV1-58 | Immunoglobulin heavy variable 1-58 | 211968 | 211967 | 224373 | |
| 14 | IGHV1-69 | Immunoglobulin heavy variable 1-69 | 211973 | 282359 | 211974 | 10, 36, 37 |
| 14 | IGHV1-69-2 | Immunoglobulin heavy variable 1-69-2 | 280411 | 281990 | 274576 | |
| 14 | IGHV2-26 | Immunoglobulin heavy variable 2-26 | 211951 | 211950 | 211952 | |
| 14 | IGHV2-5 | Immunoglobulin heavy variable 2-5 | 211937 | 282122 | 211938 | |
| 14 | IGHV2-70 | Immunoglobulin heavy variable 2-70 | 211974 | 211973 | 281990 | |
| 14 | IGHV2-70 | Immunoglobulin heavy variable 2-70 | 274576 | 280411 | 225698 | |
| 14 | IGHV3-11 | Immunoglobulin heavy variable 3-11 (gene/pseudogene) | 211941 | 282651 | 211942 | |
| 14 | IGHV3-13 | Immunoglobulin heavy variable 3-13 | 211942 | 211941 | 211943 | |
| 14 | IGHV3-15 | Immunoglobulin heavy variable 3-15 | 211943 | 211942 | 211944 | |
| 14 | IGHV3-16 | Immunoglobulin heavy variable 3-16 | 211944 | 211943 | 211945 | |
| 14 | IGHV3-20 | Immunoglobulin heavy variable 3-20 | 211946 | 211945 | 211947 | |
| 14 | IGHV3-21 | Immunoglobulin heavy variable 3-21 | 211947 | 211946 | 211949 | |
| 14 | IGHV3-23 | Immunoglobulin heavy variable 3-23 | 211949 | 211947 | 211950 | |
| 14 | IGHV3-30 | Immunoglobulin heavy variable 3-30 | 270550 | 211952 | 231475 | |
| 14 | IGHV3-33 | Immunoglobulin heavy variable 3-33 | 211955 | 231475 | 211956 | |
| 14 | IGHV3-35 | Immunoglobulin heavy variable 3-35 (non-functional) | 211957 | 211956 | 211958 | |
| 14 | IGHV3-38 | Immunoglobulin heavy variable 3-38 (non-functional) | 211958 | 211957 | 211959 | |
| 14 | IGHV3-43 | Immunoglobulin heavy variable 3-43 | 232216 | 211959 | 211961 | |
| 14 | IGHV3-48 | Immunoglobulin heavy variable 3-48 | 211964 | 211962 | 211965 | 10, 30, 36 |
| 14 | IGHV3-49 | Immunoglobulin heavy variable 3-49 | 211965 | 211964 | 211966 | |
| 14 | IGHV3-53 | Immunoglobulin heavy variable 3-53 | 211967 | 211966 | 211968 | |
| 14 | IGHV3-64 | Immunoglobulin heavy variable 3-64 | 223648 | 211970 | 211972 | |
| 14 | IGHV3-66 | Immunoglobulin heavy variable 3-66 | 211972 | 223648 | 282359 | |
| 14 | IGHV3-7 | Immunoglobulin heavy variable 3-7 | 211938 | 211937 | 282639 | |
| 14 | IGHV3-72 | Immunoglobulin heavy variable 3-72 | 225698 | 274576 | 211976 | |
| 14 | IGHV3-73 | Immunoglobulin heavy variable 3-73 | 211976 | 225698 | 224650 | |
| 14 | IGHV3-74 | Immunoglobulin heavy variable 3-74 | 224650 | 211976 | 211979 | |
| 14 | IGHV4-28 | Immunoglobulin heavy variable 4-28 | 211952 | 211951 | 270550 | |
| 14 | IGHV4-31 | Immunoglobulin heavy variable 4-31 | 231475 | 270550 | 211955 | |
| 14 | IGHV4-34 | Immunoglobulin heavy variable 4-34 | 211956 | 211955 | 211957 | |
| 14 | IGHV4-39 | Immunoglobulin heavy variable 4-39 | 211959 | 211958 | 232216 | |
| 14 | IGHV4-4 | Immunoglobulin heavy variable 4-4 | 276775 | 211935 | 282122 | |
| 14 | IGHV4-59 | Immunoglobulin heavy variable 4-59 | 224373 | 211968 | 211970 | |
| 14 | IGHV4-61 | Immunoglobulin heavy variable 4-61 | 211970 | 224373 | 223648 | |
| 14 | IGHV5-51 | Immunoglobulin heavy variable 5-51 | 211966 | 211965 | 211967 | |
| 14 | IGHV6-1 | Immunoglobulin heavy variable 6-1 | 211933 | 236170 | 211934 | |
| 14 | IGHV7-81 | Immunoglobulin heavy variable 7-81 (non-functional) | 211979 | 224650 | 080815 | |
| 14 | IPO4 | importin 4 | 196497 | 100918 | 259522 | 38, 42, 24 |
| 14 | ITPK1 | inositol-tetrakisphosphate 1-kinase | 100605 | 100604 | 165943 | 3, 35, 20 |
| 14 | INSM2 | INSM transcriptional repressor 2 | 168348 | 100906 | 174373 | 14, 8, |
| 14 | IFI27 | interferon alpha inducible protein 27 | 165949 | 165948 | 119632 | 13, 43, 16 |
| 14 | IFI27L1 | interferon alpha inducible protein 27 like 1 | 165948 | 089737 | 165949 | 3, 34, 14 |
| 14 | IFI27L2 | interferon alpha inducible protein 27 like 2 | 119632 | 165949 | 119698 | 31, 45, 13 |
| 14 | IRF2BPL | interferon regulatory factor 2 binding protein like | 119669 | 100565 | 198894 | 1, 27, 12 |
| 14 | IRF9 | interferon regulatory factor 9 | 213928 | 259529 | 100918 | 37, 39, 29 |
| 14 | IL25 | interleukin 25 | 166090 | 100842 | 166091 | |
| 14 | IFT43 | intraflagellar transport 43 | 119650 | 133935 | 119699 | 26, 1, 30 |
| 14 | INF2 | inverted formin, FH2 and WH2 domain containing | 203485 | 184601 | 185100 | 34, 1, 43 |
| 14 | DIO2 | iodothyronine deiodinase 2 | 211448 | 021645 | 100629 | |
| 14 | DIO3 | iodothyronine deiodinase 3 | 197406 | 254656 | 078304 | 32, 1, 43 |
| 14 | ISCA2 | iron-sulfur cluster assembly 2 | 165898 | 119655 | 119681 | 11, 44, 6 |
| 14 | ISM2 | isthmin 2 | 100593 | 100591 | 100596 | 32, 45, 44 |
| 14 | JAG2 | jagged 2 | 184916 | 183484 | 183828 | 1, 3, 26 |
| 14 | JKAMP | JNK1/MAPK8-associated membrane protein | 050130 | 126790 | 151838 | 30, 2, 7 |
| 14 | JDP2 | Jun dimerization protein 2 | 140044 | 170345 | 156127 | 21, 4, 40 |
| 14 | JPH4 | junctophilin 4 | 092051 | 213983 | 100867 | 31, 8, 14 |
| 14 | KLHDC1 | kelch domain containing 1 | 197776 | 100479 | 165516 | 31, 28, 8 |
| 14 | KLHDC2 | kelch domain containing 2 | 165516 | 197776 | 165525 | 38, 29, 16 |
| 14 | KLHL28 | kelch like family member 28 | 179454 | 179476 | 198718 | |
| 14 | KLHL33 | kelch like family member 33 | 185271 | 129566 | 092094 | 14, |
| 14 | KHNYN | KH and NYN domain containing | 100441 | 139899 | 100445 | 18, 1, 33 |
| 14 | KIAA0391 | KIAA0391 | 100890 | 092020 | 258790 | 21, 29, 31 |
| 14 | KIAA0586 | KIAA0586 | 100578 | 100575 | 165617 | 13, 38, 10 |
| 14 | KTN1 | kinectin 1 | 126777 | 182521 | 139946 | 10, 31, 4 |
| 14 | KIF26A | kinesin family member 26A | 066735 | 166183 | 258986 | 26, 3, 14 |
| 14 | KLC1 | kinesin light chain 1 | 126214 | 166170 | 256500 | 26, 8, 31 |
| 14 | L2HGDH | L-2-hydroxyglutarate dehydrogenase | 087299 | 100485 | 125375 | 26, 13, 17 |
| 14 | LTBP2 | latent transforming growth factor beta binding protein 2 | 119681 | 165898 | 119682 | 6, 26, 40 |
| 14 | LRP10 | LDL receptor related protein 10 | 197324 | 157227 | 139890 | 9, 20, 16 |
| 14 | LGMN | legumain | 100600 | 100599 | 066455 | 5, 32, 10 |
| 14 | LRFN5 | leucine rich repeat and fibronectin type III domain containing 5 | 165379 | 165355 | 189139 | 10, 8, 24 |
| 14 | LRRC74A | leucine rich repeat containing 74A | 100565 | 013523 | 119669 | 38, |
| 14 | LRRC9 | Leucine rich repeat containing 9 | 131951 | 139970 | 126773 | 12, 38, 25 |
| 14 | LRR1 | leucine rich repeat protein 1 | 165501 | 213741 | 165502 | 1, 9, 41 |
| 14 | LTB4R | leukotriene B4 receptor | 213903 | 213906 | 129467 | |
| 14 | LTB4R2 | leukotriene B4 receptor 2 | 213906 | 136305 | 213903 | 36, 7, 39 |
| 14 | LIN52 | lin-52 DREAM MuvB core complex component | 205659 | 119711 | 119614 | 39, 6, 5 |
| 14 | LINC00238 | Long intergenic non-protein coding RNA 238 | 196553 | 033170 | 171723 | 38, 19, 8 |
| 14 | LINC00521 | Long intergenic non-protein coding RNA 521 | 175699 | 100628 | 089723 | 38, |
| 14 | MDP1 | magnesium dependent phosphatase 1 | 213920 | 254505 | 255526 | 17, 15, 1 |
| 14 | MDGA2 | MAM domain containing glycosylphosphatidylinositol anchor 2 | 139915 | 165496 | 213741 | 45, 38, 6 |
| 14 | MGAT2 | mannosyl (alpha-1,6-)-glycoprotein | 168282 | 165502 | 165506 | 11, 45, 24 |
| | | beta-1,2-N-acetylglucosaminyltransferase | | | | |
| 14 | MBIP | MAP3K12 binding inhibitory protein 1 | 151332 | 100916 | 229415 | 7, 45, 4 |
| 14 | MMP14 | matrix metallopeptidase 14 | 157227 | 172590 | 197324 | 18, 13, 40 |
| 14 | MED6 | mediator complex subunit 6 | 133997 | 134007 | 133985 | 45, 42, 12 |
| 14 | MIA2 | melanoma inhibitory activity 2 | 150526 | 100941 | 258941 | 19, 17, 16 |
| 14 | MPP5 | membrane palmitoylated protein 5 | 072415 | 172717 | 100554 | |
| 14 | MTA1 | metastasis associated 1 | 182979 | 226174 | 182809 | 21, 3, 27 |
| 14 | MTHFD1 | methylenetetrahydrofolate dehydrogenase, cyclohydrolase and | 100714 | 140009 | 089775 | 43, 3, 1 |
| | | formyltetrahydrofolate synthetase 1 | | | | |
| 14 | METTL17 | methyltransferase like 17 | 165792 | 169385 | 165794 | 39, 41, 9 |
| 14 | METTL3 | methyltransferase like 3 | 165819 | 092203 | 165821 | 39, 36, 13 |
| 14 | MARK3 | microtubule affinity regulating kinase 3 | 075413 | 100664 | 166165 | 1, 3, 22 |
| 14 | MIPOL1 | mirror-image polydactyly 1 | 151338 | 183032 | 129514 | |
| 14 | MIS18BP1 | MIS18 binding protein 1 | 129534 | 187790 | 165496 | 22, 7, 12 |
| 14 | MRPL52 | mitochondrial ribosomal protein L52 | 172590 | 155465 | 157227 | 7, 43, 27 |
| 14 | MAPK1IP1L | mitogen-activated protein kinase 1 interacting protein 1 like | 168175 | 180008 | 131981 | 17, 22, 12 |
| 14 | MAP3K9 | mitogen-activated protein kinase kinase kinase 9 | 006432 | 133985 | 100731 | |
| 14 | MAP4K5 | mitogen-activated protein kinase kinase kinase kinase 5 | 012983 | 100490 | 198513 | 43, 44, 42 |
| 14 | MNAT1 | MNAT1, CDK activating kinase assembly factor | 020426 | 100625 | 126814 | 29, 6, 5 |
| 14 | MOAP1 | modulator of apoptosis 1 | 165943 | 100605 | 153485 | 8, 36, 17 |
| 14 | MOK | MOK protein kinase | 080823 | 140153 | 022976 | |
| 14 | MLH3 | mutL homolog 3 | 119684 | 119718 | 119640 | 41, 7, 30 |
| 14 | MAX | MYC associated factor X | 125952 | 257365 | 033170 | 18, 39, 16 |
| 14 | MYH6 | myosin heavy chain 6 | 197616 | 166091 | 092054 | 15, 24, 25 |
| 14 | MYH7 | myosin heavy chain 7 | 092054 | 197616 | 129460 | 25, 15, 18 |
| 14 | NAA30 | N(alpha)-acetyltransferase 30, NatC catalytic subunit | 139977 | 053770 | 100557 | 22, 1, 6 |
| 14 | NDUFB1 | NADH: ubiquinone oxidoreductase subunit B1 | 183648 | 279963 | 165934 | 31, 33, 10 |
| 14 | NOXRED1 | NADP dependent oxidoreductase domain containing 1 | 165555 | 100583 | 280308 | 38, 8, |
| 14 | NDRG2 | NDRG family member 2 | 165795 | 165794 | 179636 | 2, 8, 34 |
| 14 | NEDD8-MDP1 | NEDD8-MDP1 readthrough | 255526 | 213920 | 129559 | |
| 14 | NEDD8 | neural precursor cell expressed, developmentally down-regulated 8 | 129559 | 255526 | 100938 | 29, 31, 34 |
| 14 | NRL | neural retina leucine zipper | 129535 | 100884 | 100889 | 14, 5, 19 |
| 14 | NRXN3 | neurexin 3 | 021645 | 063761 | 211448 | 14, |
| 14 | NGB | neuroglobin | 165553 | 177108 | 009830 | 14, 8, 20 |
| 14 | NGDN | neuroguidin | 129460 | 092054 | 136367 | 3, 9, 30 |
| 14 | NPAS3 | neuronal PAS domain protein 3 | 151322 | 151320 | 129521 | |
| 14 | NFKBIA | NFKB inhibitor alpha | 100906 | 100902 | 168348 | 3, 41, 32 |
| 14 | NID2 | nidogen 2 | 087303 | 087302 | 168229 | 11, 1, 25 |
| 14 | NEK9 | NIMA related kinase 9 | 119638 | 119703 | 170348 | 29, 1, 22 |
| 14 | NIN | ninein | 100503 | 151748 | 100504 | 22, 1, 21 |
| 14 | NKX2-1 | NK2 homeobox 1 | 136352 | 229415 | 136327 | 31, 40, 20 |
| 14 | NKX2-8 | NK2 homeobox 8 | 136327 | 136352 | 198807 | 24, 20, 44 |
| 14 | NOP9 | NOP9 nucleolar protein | 196943 | 157379 | 136305 | 9, 24, 21 |
| 14 | NOVA1 | NOVA alternative splicing regulator 1 | 139910 | 281282 | 176165 | 11, 23, 1 |
| 14 | NPC2 | NPC intracellular cholesterol transporter 2 | 119655 | 183379 | 165898 | 43, 30, 29 |
| 14 | NRDE2 | NRDE-2, necessary for RNA interference, domain containing | 119720 | 100764 | 198668 | 13, 42, 24 |
| 14 | NEMF | nuclear export mediator factor | 165525 | 165516 | 165527 | 26, 7, 18 |
| 14 | NFATC4 | nuclear factor of activated T-cells 4 | 100968 | 129465 | 205978 | 42, 44, 6 |
| 14 | NUBPL | nucleotide binding protein like | 151413 | 214943 | 100852 | |
| 14 | NUDT14 | nudix hydrolase 14 | 183828 | 184916 | 185024 | 20, 41, 28 |
| 14 | NUMB | NUMB, endocytic adaptor protein | 133961 | 100767 | 187105 | 42, 9, 24 |
| 14 | NYNRIN | NYN domain and retroviral integrase containing | 205978 | 100968 | 139899 | 18, 27, 11 |
| 14 | OR10G2 | olfactory receptor family 10 subfamily G member 2 | 255582 | 255569 | 256553 | |
| 14 | OR10G3 | olfactory receptor family 10 subfamily G member 3 | 169208 | 165821 | 255569 | |
| 14 | OR11G2 | olfactory receptor family 11 subfamily G member 2 | 196832 | 184394 | 176219 | |
| 14 | OR11H12 | olfactory receptor family 11 subfamily H member 12 | 257115 | 080815 | 222036 | |
| 14 | OR11H2 | olfactory receptor family 11 subfamily H member 2 | 258453 | 187537 | 176294 | |
| 14 | OR11H4 | olfactory receptor family 11 subfamily H member 4 | 176198 | 258806 | 136319 | |
| 14 | OR11H6 | olfactory receptor family 11 subfamily H member 6 | 176219 | 196832 | 258806 | |
| 14 | OR11H7 | olfactory receptor family 11 subfamily H member 7 (gene/pseudogene) | 258806 | 176219 | 176198 | |
| 14 | OR4E2 | olfactory receptor family 4 subfamily E member 2 | 221977 | 256553 | 211776 | |
| 14 | OR4K1 | olfactory receptor family 4 subfamily K member 1 | 155249 | 176281 | 169488 | |
| 14 | OR4K13 | olfactory receptor family 4 subfamily K member 13 | 176253 | 169484 | 176246 | |
| 14 | OR4K14 | olfactory receptor family 4 subfamily K member 14 | 169484 | 196383 | 176253 | |
| 14 | OR4K15 | olfactory receptor family 4 subfamily K member 15 | 169488 | 155249 | 196383 | |
| 14 | OR4K17 | olfactory receptor family 4 subfamily K member 17 | 176230 | 176246 | 184394 | |
| 14 | OR4K2 | olfactory receptor family 4 subfamily K member 2 | 165762 | 176299 | 176281 | |
| 14 | OR4K5 | olfactory receptor family 4 subfamily K member 5 | 176281 | 165762 | 155249 | |
| 14 | OR4L1 | olfactory receptor family 4 subfamily L member 1 | 176246 | 176253 | 176230 | |
| 14 | OR4M1 | olfactory receptor family 4 subfamily M member 1 | 176299 | 182652 | 165762 | |
| 14 | OR4N2 | olfactory receptor family 4 subfamily N member 2 | 176294 | 258453 | 182652 | |
| 14 | OR4N5 | olfactory receptor family 4 subfamily N member 5 | 184394 | 176230 | 196832 | |
| 14 | OR4Q2 | olfactory receptor family 4 subfamily Q member 2 (gene/pseudogene) | 196383 | 169488 | 169484 | |
| 14 | OR4Q3 | olfactory receptor family 4 subfamily Q member 3 | 182652 | 176294 | 176299 | |
| 14 | OR5AU1 | olfactory receptor family 5 subfamily AU member 1 | 169327 | 232070 | 092199 | |
| 14 | OR6J1 | olfactory receptor family 6 subfamily J member 1 (gene/pseudogene) | 255804 | 100439 | 279510 | |
| 14 | OR6S1 | olfactory receptor family 6 subfamily S member 1 | 181803 | 258436 | 258818 | |
| 14 | OTX2 | orthodenticle homeobox 2 | 165588 | 070269 | 070367 | |
| 14 | OSGEP | O-sialoglycoprotein endopeptidase | 092094 | 185271 | 100823 | 25, 1, 13 |
| 14 | OTUB2 | OTU deubiquitinase, ubiquitin aldehyde binding 2 | 089723 | 175699 | 089737 | 38, 32, 14 |
| 14 | OXA1L | OXA1L, mitochondrial inner membrane protein | 155463 | 279510 | 155465 | 9, 21, 3 |
| 14 | PAX9 | paired box 9 | 198807 | 136327 | 183032 | 29, 24, 30 |
| 14 | PAPLN | papilin, proteoglycan like sulfated glycoprotein | 100767 | 080815 | 133961 | 17, 1, 24 |
| 14 | PNMA1 | paraneoplastic Ma antigen 1 | 176903 | 119661 | 156030 | 31, 28, 14 |
| 14 | PCNX1 | pecanex homolog 1 (Drosophila) | 100731 | 006432 | 197555 | 6, 25, 28 |
| 14 | PCNX4 | pecanex homolog 4 (Drosophila) | 126773 | 131951 | 100612 | 38, |
| 14 | PELI2 | pellino E3 ubiquitin protein ligase family member 2 | 139946 | 126777 | 070269 | 26, 39, 11 |
| 14 | PIGH | phosphatidylinositol glycan anchor biosynthesis class H | 100564 | 054690 | 081181 | 45, 13, 17 |
| 14 | PCK2 | phosphoenolpyruvate carboxykinase 2, mitochondrial | 100889 | 129535 | 100897 | 3, 21, 17 |
| 14 | PACS2 | phosphofurin acidic cluster sorting protein 2 | 179364 | 184887 | 226174 | 38, 34, 18 |
| 14 | PLD4 | phospholipase D family member 4 | 166428 | 099814 | 185567 | 41, 7, 36 |
| 14 | PNN | pinin, desmosome associated protein | 100941 | 182400 | 150526 | 39, 24, 36 |
| 14 | PGF | placental growth factor | 119630 | 198208 | 119718 | 32, 4, 25 |
| 14 | PLEK2 | pleckstrin 2 | 100558 | 134001 | 198133 | 2, 3, 35 |
| 14 | PLEKHD1 | pleckstrin homology and coiled-coil domain containing D1 | 175985 | 029364 | 267909 | 40, 23, |
| 14 | PLEKHG3 | pleckstrin homology and RhoGEF domain containing G3 | 126822 | 165807 | 070182 | 9, 1, 37 |
| 14 | PLEKHH1 | pleckstrin homology, MyTH4 and FERM domain containing H1 | 054690 | 198133 | 100564 | 8, 4, 29 |
| 14 | PABPN1 | poly(A) binding protein nuclear 1 | 100836 | 258643 | 092096 | 3, 1, 26 |
| 14 | PAPOLA | poly(A) polymerase alpha | 090060 | 140057 | 100749 | 42, 11, 40 |
| 14 | PARP2 | poly(ADP-ribose) polymerase 2 | 129484 | 100814 | 129566 | 18, 33, 40 |
| 14 | GALNT16 | polypeptide N-acetylgalactosaminyltransferase 16 | 100626 | 081177 | 100632 | 8, |
| 14 | KCNK10 | potassium two pore domain channel subfamily K member 10 | 100433 | 140030 | 042317 | 30, 8, 17 |
| 14 | KCNK13 | potassium two pore domain channel subfamily K member 13 | 152315 | 042088 | 100764 | 26, 5, 38 |
| 14 | KCNH5 | potassium voltage-gated channel subfamily H member 5 | 140015 | 139973 | 126785 | 26, 35, 38 |
| 14 | POTEG | POTE ankyrin domain family member G | 187537 | 279508 | 258453 | 33, 24, 10 |
| 14 | POTEM | POTE ankyrin domain family member M | 222036 | 257115 | 279508 | 33, 38, |
| 14 | PRPF39 | pre-mRNA processing factor 39 | 185246 | 198718 | 100442 | 13, 40, 18 |
| 14 | PSEN1 | presenilin 1 | 080815 | 119707 | 100767 | 24, 16, 42 |
| 14 | PRIMA1 | proline rich membrane anchor 1 | 175785 | 187581 | 140067 | 26, 1, 31 |
| 14 | PROX2 | prospero homeobox 2 | 119608 | 119596 | 119689 | 23, 44, |
| 14 | PTGDR | prostaglandin D2 receptor | 168229 | 087303 | 125384 | 16, 44, 19 |
| 14 | PTGER2 | prostaglandin E receptor 2 | 125384 | 168229 | 087301 | 1, 7, 17 |
| 14 | PTGR2 | prostaglandin reductase 2 | 140043 | 156030 | 258653 | 40, 25, 23 |
| 14 | PSMC1 | proteasome 26S subunit, ATPase 1 | 100764 | 152315 | 119720 | 3, 27, 11 |
| 14 | PSMC6 | proteasome 26S subunit, ATPase 6 | 100519 | 197930 | 198252 | 4, 34, 44 |
| 14 | PSME1 | proteasome activator subunit 1 | 092010 | 139914 | 100908 | 30, 7, 5 |
| 14 | PSME2 | proteasome activator subunit 2 | 100911 | 100908 | 092098 | 38, |
| 14 | PSMA3 | proteasome subunit alpha 3 | 100567 | 131966 | 032219 | 4, 37, 6 |
| 14 | PSMA6 | proteasome subunit alpha 6 | 100902 | 258790 | 100906 | 29, 4, 3 |
| 14 | PSMB11 | proteasome subunit beta 11 | 222028 | 100804 | 139880 | 39, 38, |
| 14 | PSMB5 | proteasome subunit beta 5 | 100804 | 100802 | 222028 | 30, 34, 9 |
| 14 | PRMT5 | protein arginine methyltransferase 5 | 100462 | 100461 | 092036 | 3, 13, 45 |
| 14 | PRKCH | protein kinase C eta | 027075 | 139974 | 182107 | |
| 14 | PRKD1 | protein kinase D1 | 184304 | 176165 | 092140 | |
| 14 | POMT2 | protein O-mannosyltransferase 2 | 009830 | 165553 | 100577 | 6, 1, 20 |
| 14 | PPP1R13B | protein phosphatase 1 regulatory subunit 13B | 088808 | 100711 | 156411 | 40, 38, 16 |
| 14 | PPP1R36 | protein phosphatase 1 regulatory subunit 36 | 165807 | 126803 | 126822 | 28, 3, 38 |
| 14 | PPP1R3E | protein phosphatase 1 regulatory subunit 3E | 235194 | 215271 | 129473 | 26, 14, 29 |
| 14 | PPP2R5E | protein phosphatase 2 regulatory subunit B′epsilon | 154001 | 179600 | 140006 | 4, 11, 36 |
| 14 | PPP2R5C | protein phosphatase 2 regulatory subunit B′gamma | 078304 | 197406 | 197102 | |
| 14 | PPP2R3C | protein phosphatase 2 regulatory subunit B″gamma | 092020 | 151327 | 100890 | 10, 30, 38 |
| 14 | PPP4R3A | protein phosphatase 4 regulatory subunit 3A | 100796 | 015133 | 133962 | 7, 2, 18 |
| 14 | PPP4R4 | protein phosphatase 4 regulatory subunit 4 | 119698 | 119632 | 140093 | 42, 23, 14 |
| 14 | PPM1A | protein phosphatase, Mg2+/Mn2+ dependent 1A | 100614 | 100612 | 179008 | 26, 1, 21 |
| 14 | PTPN21 | protein tyrosine phosphatase, non-receptor type 21 | 070778 | 042317 | 100722 | 11, 31, 29 |
| 14 | PNP | purine nucleoside phosphorylase | 198805 | 165782 | 182545 | 3, 30, 29 |
| 14 | RABGGTA | Rab geranylgeranyltransferase alpha subunit | 100949 | 092295 | 157379 | 36, 2, 31 |
| 14 | RAB15 | RAB15, member RAS oncogene family | 139998 | 176153 | 257365 | 4, 26, 31 |
| 14 | RAB2B | RAB2B, member RAS oncogene family | 129472 | 100888 | 092203 | 1, 26, 31 |
| 14 | RAD51B | RAD51 paralog B | 182185 | 072121 | 185650 | 10, 5, 6 |
| 14 | RALGAPA1 | Ral GTPase activating protein catalytic alpha subunit 1 | 174373 | 168348 | 100916 | |
| 14 | RIN3 | Ras and Rab interactor 3 | 100599 | 140090 | 100600 | 36, 7, 5 |
| 14 | RHOJ | ras homolog family member J | 126785 | 140015 | 179600 | 45, 11, 43 |
| 14 | REC8 | REC8 meiotic recombination protein | 100918 | 213928 | 196497 | 39, 38, 36 |
| 14 | RIPK3 | receptor interacting serine/threonine kinase 3 | 129465 | 258973 | 100968 | 36, 4, 5 |
| 14 | RGS6 | regulator of G-protein signaling 6 | 182732 | 197555 | 280188 | 2, 38, |
| 14 | RCOR1 | REST corepressor 1 | 089902 | 156381 | 131323 | 22, 29, 39 |
| 14 | RTN1 | reticulon 1 | 139970 | 151838 | 131951 | 8, 26, 14 |
| 14 | RD3L | retinal degeneration 3-like | 227729 | 156414 | 166183 | 29, 14, |
| 14 | RPGRIP1 | retinitis pigmentosa GTPase regulator interacting protein 1 | 092200 | 092199 | 092201 | 38, 25, 14 |
| 14 | RDH11 | retinol dehydrogenase 11 (all-trans/9-cis/11-cis) | 072042 | 258466 | 139988 | 33, 2, 7 |
| 14 | RDH12 | retinol dehydrogenase 12 (all-trans/9-cis/11-cis) | 139988 | 072042 | 072121 | |
| 14 | RTL1 | retrotransposon-like 1 | 254656 | 185559 | 197406 | 25, 10, 32 |
| 14 | ARHGAP5 | Rho GTPase activating protein 5 | 100852 | 151413 | 151320 | 4, 40, 23 |
| 14 | ARHGEF40 | Rho guanine nucleotide exchange factor 40 | 165801 | 173431 | 165804 | 27, 40, 32 |
| 14 | RNASE1 | ribonuclease A family member 1, pancreatic | 129538 | 169413 | 169397 | 30, 1, 2 |
| 14 | RNASE10 | ribonuclease A family member 10 (inactive) | 182545 | 198805 | 188655 | 44, |
| 14 | RNASE11 | ribonuclease A family member 11 (inactive) | 173464 | 259060 | 258436 | 38, 32, 8 |
| 14 | RNASE12 | ribonuclease A family member 12 (inactive) | 258436 | 173464 | 181803 | 38, |
| 14 | RNASE13 | ribonuclease A family member 13 (inactive) | 206150 | 179636 | 165799 | 38, |
| 14 | RNASE2 | ribonuclease A family member 2 | 169385 | 169397 | 165792 | 5, 7, 36 |
| 14 | RNASE3 | ribonuclease A family member 3 | 169397 | 129538 | 169385 | 5, 18, 7 |
| 14 | RNASE4 | ribonuclease A family member 4 | 258818 | 181803 | 214274 | |
| 14 | RNASE7 | ribonuclease A family member 7 | 165799 | 206150 | 173431 | 15, 39, 27 |
| 14 | RNASE8 | ribonuclease A family member 8 | 173431 | 165799 | 165801 | |
| 14 | RNASE9 | ribonuclease A family member 9 (inactive) | 188655 | 182545 | 259060 | |
| 14 | RNASE6 | ribonuclease A family member k6 | 169413 | 181552 | 129538 | 30, 2, 45 |
| 14 | RPL10L | ribosomal protein L10 like | 165496 | 129534 | 139915 | 38, 8, |
| 14 | RPL36AL | ribosomal protein L36a like | 165502 | 165501 | 168282 | |
| 14 | RPS29 | ribosomal protein S29 | 213741 | 139915 | 165501 | 12, 7, 33 |
| 14 | RPS6KA5 | ribosomal protein S6 kinase A5 | 100784 | 165914 | 133943 | 11, 41, 32 |
| 14 | RPS6KL1 | ribosomal protein S6 kinase like 1 | 198208 | 119689 | 119630 | 18, 8, 38 |
| 14 | RNF212B | ring finger protein 212B | 215277 | 092068 | 215271 | |
| 14 | RNF31 | ring finger protein 31 | 092098 | 100911 | 259529 | |
| 14 | RBM23 | RNA binding motif protein 23 | 100461 | 139890 | 100462 | 24, 34, 32 |
| 14 | RBM25 | RNA binding motif protein 25 | 119707 | 165861 | 080815 | 11, 43, 5 |
| 14 | REM2 | RRAD and GEM like GTPase 2 | 139890 | 197324 | 100461 | 31, 36, 20 |
| 14 | SAV1 | salvador family WW domain containing protein 1 | 151748 | 198513 | 100503 | 45, 11, 38 |
| 14 | SCFD1 | sec1 family domain containing 1 | 092108 | 092140 | 100473 | 10, 31, 45 |
| 14 | SEC23A | Sec23 homolog A, coat complex II component | 100934 | 176435 | 092208 | 42, 24, 45 |
| 14 | SEL1L | SEL1L ERAD E3 ligase adaptor subunit | 071537 | 140022 | 185070 | 11, 22, 45 |
| 14 | SRSF5 | serine and arginine rich splicing factor 5 | 100650 | 100647 | 100652 | |
| 14 | SPTLC2 | serine palmitoyltransferase long chain base subunit 2 | 100596 | 100593 | 100601 | 18, 37, 22 |
| 14 | SPTSSA | serine palmitoyltransferase small subunit A | 165389 | 129521 | 129518 | 7, 34, 4 |
| 14 | STYX | serine/threonine/tyrosine interacting protein | 198252 | 100519 | 100522 | 22, 43, 7 |
| 14 | SERPINA1 | serpin family A member 1 | 197249 | 258597 | 186910 | 19, 36, 20 |
| 14 | SERPINA10 | serpin family A member 10 | 140093 | 119698 | 170099 | 19, 15, |
| 14 | SERPINA11 | serpin family A member 11 | 186910 | 197249 | 170054 | 19, 44, 12 |
| 14 | SERPINA12 | serpin family A member 12 | 165953 | 170054 | 100665 | 35, 24, 19 |
| 14 | SERPINA2 | serpin family A member 2 (gene/pseudogene) | 258597 | 170099 | 197249 | |
| 14 | SERPINA3 | serpin family A member 3 | 196136 | 273259 | 133937 | |
| 14 | SERPINA3 | serpin family A member 3 | 273259 | 188488 | 196136 | |
| 14 | SERPINA4 | serpin family A member 4 | 100665 | 165953 | 188488 | 2, 38, 19 |
| 14 | SERPINA5 | serpin family A member 5 | 188488 | 100665 | 273259 | 2, 38, 19 |
| 14 | SERPINA6 | serpin family A member 6 | 170099 | 140093 | 258597 | 19, 23, 28 |
| 14 | SERPINA9 | serpin family A member 9 | 170054 | 186910 | 165953 | 41, 22, 21 |
| 14 | SETD3 | SET domain containing 3 | 183576 | 127152 | 090061 | 31, 1, 43 |
| 14 | SDR39U1 | short chain dehydrogenase/reductase family 39U member 1 | 100445 | 100441 | 092009 | 9, 26, 5 |
| 14 | SIPA1L1 | signal induced proliferation associated 1 like 1 | 197555 | 100731 | 182732 | 43, 36, 31 |
| 14 | SRP54 | signal recognition particle 54 | 100883 | 198604 | 151327 | 4, 5, 13 |
| 14 | SIVA1 | SIVA1 apoptosis inducing factor | 184990 | 185100 | 142208 | 41, 39, 34 |
| 14 | SIX1 | SIX homeobox 1 | 126778 | 184302 | 100625 | 29, |
| 14 | SIX4 | SIX homeobox 4 | 100625 | 126778 | 020426 | |
| 14 | SIX6 | SIX homeobox 6 | 184302 | 179008 | 126778 | 31, 5, 14 |
| 14 | SNAPC1 | small nuclear RNA activating complex polypeptide 1 | 023608 | 100644 | 139973 | 18, 40, 7 |
| 14 | SNW1 | SNW domain containing 1 | 100603 | 119705 | 197734 | 13, 7, 21 |
| 14 | SLC10A1 | solute carrier family 10 member 1 | 100652 | 100650 | 198732 | 19, 18, 30 |
| 14 | SLC22A17 | solute carrier family 22 member 17 | 092096 | 100836 | 283151 | 26, 31, 8 |
| 14 | SLC22A17 | solute carrier family 22 member 17 | 283151 | 092096 | 100842 | 26, 31, 8 |
| 14 | SLC24A4 | solute carrier family 24 member 4 | 140090 | 165934 | 100599 | 25, 5, 8 |
| 14 | SLC25A21 | solute carrier family 25 member 21 | 183032 | 198807 | 151338 | 29, 34, 30 |
| 14 | SLC25A29 | solute carrier family 25 member 29 | 197119 | 100811 | 140107 | |
| 14 | SLC25A47 | solute carrier family 25 member 47 | 140107 | 197119 | 140105 | 19, 23, 5 |
| 14 | SLC35F4 | solute carrier family 35 member F4 | 151812 | 100557 | 139971 | |
| 14 | SLC38A6 | solute carrier family 38 member 6 | 139974 | 126814 | 027075 | 13, 45, 9 |
| 14 | SLC39A2 | solute carrier family 39 member 2 | 165794 | 165792 | 165795 | 33, 30, 44 |
| 14 | SLC39A9 | solute carrier family 39 member 9 | 029364 | 100632 | 175985 | 13, 42, 2 |
| 14 | SLC7A7 | solute carrier family 7 member 7 | 155465 | 155463 | 172590 | 36, 43, 29 |
| 14 | SLC7A8 | solute carrier family 7 member 8 | 092068 | 092067 | 215277 | 18, 29, 24 |
| 14 | SLC8A3 | solute carrier family 8 member A3 | 100678 | 198732 | 133983 | 11, 14, 8 |
| 14 | SSTR1 | somatostatin receptor 1 | 139874 | 139865 | 176435 | 9, 28, 8 |
| 14 | SNX6 | sorting nexin 6 | 129515 | 129518 | 165410 | 29, 13, 32 |
| 14 | SOS2 | SOS Ras/Rho guanine nucleotide exchange factor 2 | 100485 | 100483 | 087299 | 22, 26, 7 |
| 14 | SALL2 | spalt like transcription factor 2 | 165821 | 165819 | 169208 | |
| 14 | SMOC1 | SPARC related modular calcium binding 1 | 198732 | 100652 | 100678 | 9, 8, 26 |
| 14 | SPTB | spectrin beta, erythrocytic | 070182 | 126822 | 279654 | 26, 18, 25 |
| 14 | SYNE3 | spectrin repeat containing nuclear envelope family member 3 | 176438 | 165959 | 182512 | 26, 18, 40 |
| 14 | SYNE2 | spectrin repeat containing nuclear envelope protein 2 | 054654 | 126821 | 140009 | 18, 24, 40 |
| 14 | SPATA7 | spermatogenesis associated 7 | 042317 | 100433 | 070778 | 31, 38, 8 |
| 14 | SGPP1 | sphingosine-1-phosphate phosphatase 1 | 126821 | 140006 | 054654 | 4, 11, 32 |
| 14 | SUPT16H | SPT16 homolog, facilitates chromatin remodeling subunit | 092201 | 092200 | 100888 | 21, 30, 13 |
| 14 | SLIRP | SRA stem-loop interacting RNA binding protein | 119705 | 100601 | 100603 | 25, 45, 37 |
| 14 | SAMD15 | sterile alpha motif domain containing 15 | 100583 | 100580 | 165555 | 30, 38, 36 |
| 14 | SAMD4A | sterile alpha motif domain containing 4A | 020577 | 100532 | 131979 | |
| 14 | STON2 | stonin 2 | 140022 | 165417 | 071537 | 18, 4, 7 |
| 14 | STRN3 | striatin 3 | 196792 | 100473 | 100478 | 11, 18, 31 |
| 14 | SOCS4 | suppressor of cytokine signaling 4 | 180008 | 198554 | 168175 | 13, 4, 43 |
| 14 | SFTA3 | surfactant associated 3 | 229415 | 151332 | 136352 | 40, 20, 10 |
| 14 | SUSD6 | sushi domain containing 6 | 100647 | 267909 | 100650 | 29, 22, 26 |
| 14 | SYNDIG1L | synapse differentiation inducing 1 like | 183379 | 133980 | 119655 | 26, 28, 8 |
| 14 | SYNJ2BP | synaptojanin 2 binding protein | 213463 | 258644 | 139985 | 29, 9, 4 |
| 14 | SYT16 | synaptotagmin 16 | 139973 | 023608 | 140015 | 45, 33, 38 |
| 14 | SYNJ2BP- | SYNJ2BP-COX16 readthrough | 258644 | 133983 | 213463 | |
| | COX16 | | | | | |
| 14 | STXBP6 | syntaxin binding protein 6 | 168952 | 100453 | 281282 | 44, 21, 35 |
| 14 | TRAJ1 | T cell receptor alpha joining 1 (non-functional) | 211888 | 211887 | 129562 | |
| 14 | TRAJ10 | T cell receptor alpha joining 10 | 211879 | 211878 | 211880 | |
| 14 | TRAJ11 | T cell receptor alpha joining 11 | 211878 | 211877 | 211879 | |
| 14 | TRAJ12 | T cell receptor alpha joining 12 | 211877 | 211876 | 211878 | |
| 14 | TRAJ13 | T cell receptor alpha joining 13 | 211876 | 211875 | 211877 | |
| 14 | TRAJ14 | T cell receptor alpha joining 14 | 211875 | 211873 | 211876 | |
| 14 | TRAJ16 | T cell receptor alpha joining 16 | 211873 | 211872 | 211875 | |
| 14 | TRAJ17 | T cell receptor alpha joining 17 | 211872 | 211871 | 211873 | |
| 14 | TRAJ18 | T cell receptor alpha joining 18 | 211871 | 211870 | 211872 | |
| 14 | TRAJ19 | T cell receptor alpha joining 19 (non-functional) | 211870 | 211869 | 211871 | |
| 14 | TRAJ2 | T cell receptor alpha joining 2 (non-functional) | 211887 | 211886 | 211888 | |
| 14 | TRAJ20 | T cell receptor alpha joining 20 | 211869 | 211868 | 211870 | |
| 14 | TRAJ21 | T cell receptor alpha joining 21 | 211868 | 211867 | 211869 | |
| 14 | TRAJ22 | T cell receptor alpha joining 22 | 211867 | 211866 | 211868 | |
| 14 | TRAJ23 | T cell receptor alpha joining 23 | 211866 | 211865 | 211867 | |
| 14 | TRAJ24 | T cell receptor alpha joining 24 | 211865 | 211864 | 211866 | |
| 14 | TRAJ25 | T cell receptor alpha joining 25 (non-functional) | 211864 | 211863 | 211865 | |
| 14 | TRAJ26 | T cell receptor alpha joining 26 | 211863 | 211862 | 211864 | |
| 14 | TRAJ27 | T cell receptor alpha joining 27 | 211862 | 211861 | 211863 | |
| 14 | TRAJ28 | T cell receptor alpha joining 28 | 211861 | 211860 | 211862 | |
| 14 | TRAJ29 | T cell receptor alpha joining 29 | 211860 | 211859 | 211861 | |
| 14 | TRAJ3 | T cell receptor alpha joining 3 | 211886 | 211885 | 211887 | |
| 14 | TRAJ30 | T cell receptor alpha joining 30 | 211859 | 211858 | 211860 | |
| 14 | TRAJ31 | T cell receptor alpha joining 31 | 211858 | 211857 | 211859 | |
| 14 | TRAJ32 | T cell receptor alpha joining 32 | 211857 | 211856 | 211858 | |
| 14 | TRAJ33 | T cell receptor alpha joining 33 | 211856 | 211855 | 211857 | |
| 14 | TRAJ34 | T cell receptor alpha joining 34 | 211855 | 211854 | 211856 | |
| 14 | TRAJ35 | T cell receptor alpha joining 35 (non-functional) | 211854 | 276699 | 211855 | |
| 14 | TRAJ36 | T cell receptor alpha joining 36 | 276699 | 278661 | 211854 | |
| 14 | TRAJ37 | T cell receptor alpha joining 37 | 278661 | 211851 | 276699 | |
| 14 | TRAJ38 | T cell receptor alpha joining 38 | 211851 | 211850 | 278661 | |
| 14 | TRAJ39 | T cell receptor alpha joining 39 | 211850 | 211849 | 211851 | |
| 14 | TRAJ4 | T cell receptor alpha joining 4 | 211885 | 211884 | 211886 | |
| 14 | TRAJ40 | T cell receptor alpha joining 40 | 211849 | 211848 | 211850 | |
| 14 | TRAJ41 | T cell receptor alpha joining 41 | 211848 | 211847 | 211849 | |
| 14 | TRAJ42 | T cell receptor alpha joining 42 | 211847 | 211846 | 211848 | |
| 14 | TRAJ43 | T cell receptor alpha joining 43 | 211846 | 211845 | 211847 | |
| 14 | TRAJ44 | T cell receptor alpha joining 44 | 211845 | 211844 | 211846 | |
| 14 | TRAJ45 | T cell receptor alpha joining 45 | 211844 | 211843 | 211845 | |
| 14 | TRAJ46 | T cell receptor alpha joining 46 | 211843 | 211842 | 211844 | |
| 14 | TRAJ47 | T cell receptor alpha joining 47 | 211842 | 211841 | 211843 | |
| 14 | TRAJ48 | T cell receptor alpha joining 48 | 211841 | 211840 | 211842 | |
| 14 | TRAJ49 | T cell receptor alpha joining 49 | 211840 | 211839 | 211841 | |
| 14 | TRAJ5 | T cell receptor alpha joining 5 | 211884 | 211883 | 211885 | |
| 14 | TRAJ50 | T cell receptor alpha joining 50 | 211839 | 211838 | 211840 | |
| 14 | TRAJ52 | T cell receptor alpha joining 52 | 211838 | 211837 | 211839 | |
| 14 | TRAJ53 | T cell receptor alpha joining 53 | 211837 | 211836 | 211838 | |
| 14 | TRAJ54 | T cell receptor alpha joining 54 | 211836 | 211835 | 211837 | |
| 14 | TRAJ56 | T cell receptor alpha joining 56 | 211835 | 211834 | 211836 | |
| 14 | TRAJ57 | T cell receptor alpha joining 57 | 211834 | 211833 | 211835 | |
| 14 | TRAJ58 | T cell receptor alpha joining 58 (non-functional) | 211833 | 211832 | 211834 | |
| 14 | TRAJ59 | T cell receptor alpha joining 59 (non-functional) | 211832 | 211831 | 211833 | |
| 14 | TRAJ6 | T cell receptor alpha joining 6 | 211883 | 211882 | 211884 | |
| 14 | TRAJ61 | T cell receptor alpha joining 61 (non-functional) | 211831 | 256590 | 211832 | |
| 14 | TRAJ7 | T cell receptor alpha joining 7 | 211882 | 211880 | 211883 | |
| 14 | TRAJ9 | T cell receptor alpha joining 9 | 211880 | 211879 | 211882 | |
| 14 | TRAV10 | T cell receptor alpha variable 10 | 211784 | 211783 | 211785 | |
| 14 | TRAV1-1 | T cell receptor alpha variable 1-1 | 255569 | 169208 | 255582 | |
| 14 | TRAV1-2 | T cell receptor alpha variable 1-2 | 256553 | 255582 | 221977 | |
| 14 | TRAV12-1 | T cell receptor alpha variable 12-1 | 211785 | 211784 | 211786 | |
| 14 | TRAV12-2 | T cell receptor alpha variable 12-2 | 211789 | 211788 | 211790 | 30, 37, |
| 14 | TRAV12-3 | T cell receptor alpha variable 12-3 | 211794 | 211793 | 211795 | |
| 14 | TRAV13-1 | T cell receptor alpha variable 13-1 | 211788 | 211787 | 211789 | |
| 14 | TRAV13-2 | T cell receptor alpha variable 13-2 | 211791 | 211790 | 211792 | |
| 14 | TRAV14DV4 | T cell receptor alpha variable 14/delta variable 4 | 211792 | 211791 | 211793 | |
| 14 | TRAV16 | T cell receptor alpha variable 16 | 211796 | 211795 | 211797 | |
| 14 | TRAV17 | T cell receptor alpha variable 17 | 211797 | 211796 | 211798 | |
| 14 | TRAV18 | T cell receptor alpha variable 18 | 211798 | 211797 | 211799 | |
| 14 | TRAV19 | T cell receptor alpha variable 19 | 211799 | 211798 | 211800 | |
| 14 | TRAV2 | T cell receptor alpha variable 2 | 211776 | 221977 | 211777 | |
| 14 | TRAV20 | T cell receptor alpha variable 20 | 211800 | 211799 | 211801 | |
| 14 | TRAV21 | T cell receptor alpha variable 21 | 211801 | 211800 | 211802 | |
| 14 | TRAV22 | T cell receptor alpha variable 22 | 211802 | 211801 | 211803 | |
| 14 | TRAV23DV6 | T cell receptor alpha variable 23/delta variable 6 | 211803 | 211802 | 211804 | |
| 14 | TRAV24 | T cell receptor alpha variable 24 | 211805 | 211804 | 211806 | |
| 14 | TRAV25 | T cell receptor alpha variable 25 | 211806 | 211805 | 211807 | |
| 14 | TRAV26-1 | T cell receptor alpha variable 26-1 | 211807 | 211806 | 211808 | |
| 14 | TRAV26-2 | T cell receptor alpha variable 26-2 | 211812 | 259092 | 277734 | |
| 14 | TRAV27 | T cell receptor alpha variable 27 | 211809 | 211808 | 211810 | |
| 14 | TRAV29DV5 | T cell receptor alpha variable 29/delta variable 5 (gene/pseudogene) | 211810 | 211809 | 259092 | |
| 14 | TRAV3 | T cell receptor alpha variable 3 (gene/pseudogene) | 211777 | 211776 | 211778 | |
| 14 | TRAV30 | T cell receptor alpha variable 30 | 259092 | 211810 | 211812 | |
| 14 | TRAV34 | T cell receptor alpha variable 34 | 211813 | 277734 | 211815 | |
| 14 | TRAV36DV7 | T cell receptor alpha variable 36/delta variable 7 | 211815 | 211813 | 211816 | |
| 14 | TRAV38-1 | T cell receptor alpha variable 38-1 | 211816 | 211815 | 211829 | |
| 14 | TRAV38-2DV8 | T cell receptor alpha variable 38-2/delta variable 8 | 211817 | 211829 | 211818 | |
| 14 | TRAV39 | T cell receptor alpha variable 39 | 211818 | 211817 | 211819 | |
| 14 | TRAV4 | T cell receptor alpha variable 4 | 211778 | 211777 | 211779 | |
| 14 | TRAV40 | T cell receptor alpha variable 40 | 211819 | 211818 | 211820 | |
| 14 | TRAV41 | T cell receptor alpha variable 41 | 211820 | 211819 | 211821 | |
| 14 | TRAV5 | T cell receptor alpha variable 5 | 211779 | 211778 | 211780 | |
| 14 | TRAV6 | T cell receptor alpha variable 6 | 211780 | 211779 | 211781 | |
| 14 | TRAV7 | T cell receptor alpha variable 7 | 211781 | 211780 | 211782 | |
| 14 | TRAV8-1 | T cell receptor alpha variable 8-1 | 211782 | 211781 | 211783 | |
| 14 | TRAV8-2 | T cell receptor alpha variable 8-2 | 211786 | 211785 | 211787 | |
| 14 | TRAV8-3 | T cell receptor alpha variable 8-3 | 211787 | 211786 | 211788 | |
| 14 | TRAV8-4 | T cell receptor alpha variable 8-4 | 211790 | 211789 | 211791 | |
| 14 | TRAV8-6 | T cell receptor alpha variable 8-6 | 211795 | 211794 | 211796 | |
| 14 | TRAV8-7 | T cell receptor alpha variable 8-7 (non-functional) | 211808 | 211807 | 211809 | |
| 14 | TRAV9-1 | T cell receptor alpha variable 9-1 | 211783 | 211782 | 211784 | |
| 14 | TRAV9-2 | T cell receptor alpha variable 9-2 | 211793 | 211792 | 211794 | |
| 14 | TRDC | T cell receptor delta constant | 211829 | 211816 | 211817 | |
| 14 | TRDD1 | T cell receptor delta diversity 1 | 223997 | 211821 | 237235 | |
| 14 | TRDD2 | T cell receptor delta diversity 2 | 237235 | 223997 | 228985 | |
| 14 | TRDD3 | T cell receptor delta diversity 3 | 228985 | 237235 | 211825 | |
| 14 | TRDJ1 | T cell receptor delta joining 1 | 211825 | 228985 | 211826 | |
| 14 | TRDJ2 | T cell receptor delta joining 2 | 211827 | 211826 | 211828 | |
| 14 | TRDJ3 | T cell receptor delta joining 3 | 211828 | 211827 | 256590 | |
| 14 | TRDJ4 | T cell receptor delta joining 4 | 211826 | 211825 | 211827 | |
| 14 | TRDV1 | T cell receptor delta variable 1 | 211804 | 211803 | 211805 | 39, 36, 22 |
| 14 | TRDV2 | T cell receptor delta variable 2 | 211821 | 211820 | 223997 | |
| 14 | TRDV3 | T cell receptor delta variable 3 | 256590 | 211828 | 211831 | |
| 14 | TC2N | tandem C2 domains, nuclear | 165929 | 133962 | 140092 | 42, 4, 29 |
| 14 | TBPL2 | TATA-box binding protein like 2 | 182521 | 126775 | 126777 | 38, |
| 14 | TCL1A | T-cell leukemia/lymphoma 1A | 100721 | 213231 | 250366 | 21, 41, 22 |
| 14 | TCL1B | T-cell leukemia/lymphoma 1B | 213231 | 182512 | 100721 | 21, 22, 23 |
| 14 | TRAC | T-cell receptor alpha constant | 277734 | 211812 | 211813 | |
| 14 | TUNAR | TCL1 upstream neural differentiation-associated RNA | 250366 | 100721 | 227051 | 14, 8, 38 |
| 14 | TECPR2 | tectonin beta-propeller repeat containing 2 | 196663 | 100865 | 156381 | 34, 29, 18 |
| 14 | TEP1 | telomerase associated protein 1 | 129566 | 129484 | 185271 | 35, 31, 18 |
| 14 | TINF2 | TERF1 interacting nuclear factor 2 | 092330 | 100938 | 092295 | 29, 11, 27 |
| 14 | TEX22 | testis expressed 22 | 226174 | 179364 | 182979 | 21, 2, 38 |
| 14 | TSSK4 | testis specific serine kinase 4 | 139908 | 254692 | 254505 | 38, 4, 39 |
| 14 | TTC5 | tetratricopeptide repeat domain 5 | 136319 | 176198 | 100814 | |
| 14 | TTC6 | tetratricopeptide repeat domain 6 | 139865 | 129514 | 139874 | |
| 14 | TTC7B | tetratricopeptide repeat domain 7B | 165914 | 198668 | 100784 | 26, 11, 32 |
| 14 | TTC8 | tetratricopeptide repeat domain 8 | 165533 | 165521 | 053254 | 33, 2, 29 |
| 14 | TTC9 | tetratricopeptide repeat domain 9 | 133985 | 133997 | 006432 | 31, 32, 30 |
| 14 | THTPA | thiamine triphosphatase | 259431 | 136367 | 213983 | 40, 39, 33 |
| 14 | TXNDC16 | thioredoxin domain containing 16 | 087301 | 125384 | 180998 | 22, 42, 38 |
| 14 | TMX1 | thioredoxin related transmembrane protein 1 | 139921 | 100505 | 139926 | 45, 42, 13 |
| 14 | TRIP11 | thyroid hormone receptor interactor 11 | 100815 | 140092 | 066427 | 1, 30, 29 |
| 14 | TSHR | thyroid stimulating hormone receptor | 165409 | 100629 | 165417 | 40, 39, 27 |
| 14 | TNFAIP2 | TNF alpha induced protein 2 | 185215 | 205436 | 100664 | |
| 14 | TRAF3 | TNF receptor associated factor 3 | 131323 | 089902 | 166126 | 3, 22, 5 |
| 14 | TOX4 | TOX high mobility group box family member 4 | 092203 | 129472 | 165819 | 9, 3, 24 |
| 14 | TRAPPC6B | trafficking protein particle complex 6B | 182400 | 092208 | 100941 | 39, 26, 33 |
| 14 | TGFB3 | transforming growth factor beta 3 | 119699 | 119650 | 089916 | 15, 1, 26 |
| 14 | TGM1 | transglutaminase 1 | 092295 | 092330 | 100949 | 18, 24, 13 |
| 14 | L3HYPDH | trans-L-3-hydroxyproline dehydratase | 126790 | 181619 | 050130 | |
| 14 | TIMM9 | translocase of inner mitochondrial membrane 9 | 100575 | 196860 | 100578 | 1, 29, 4 |
| 14 | TOMM20L | translocase of outer mitochondrial membrane 20 like | 196860 | 032219 | 100575 | 6, 27, 33 |
| 14 | TM9SF1 | transmembrane 9 superfamily member 1 | 100926 | 259522 | 254692 | 32, 9, 4 |
| 14 | TMED10 | transmembrane p24 trafficking protein 10 | 170348 | 119638 | 170345 | 42, 30, 29 |
| 14 | TMED8 | transmembrane p24 trafficking protein family member 8 | 100580 | 100577 | 100583 | |
| 14 | TMEM121 | transmembrane protein 121 | 184986 | 185347 | 211890 | 33, 23, 8 |
| 14 | TMEM179 | transmembrane protein 179 | 258986 | 066735 | 184601 | 20, 8, 14 |
| 14 | TMEM229B | transmembrane protein 229B | 198133 | 100558 | 054690 | 29, 35, 40 |
| 14 | TMEM251 | transmembrane protein 251 | 153485 | 165943 | 259066 | 35, 3, 29 |
| 14 | TMEM253 | transmembrane protein 253 | 232070 | 165804 | 169327 | 27, 3, 19 |
| 14 | TMEM260 | transmembrane protein 260 | 070269 | 139946 | 165588 | 22, 11, 24 |
| 14 | TMEM30B | transmembrane protein 30B | 182107 | 027075 | 258989 | |
| 14 | TMEM55B | transmembrane protein 55B | 165782 | 100823 | 198805 | 3, 26, 31 |
| 14 | TMEM63C | transmembrane protein 63C | 165548 | 259164 | 177108 | |
| 14 | TRIM9 | tripartite motif containing 9 | 100505 | 131969 | 139921 | 8, 31, 26 |
| 14 | TRMT5 | tRNA methyltransferase 5 | 126814 | 020426 | 139974 | 1, 13, 24 |
| 14 | TRMT61A | tRNA methyltransferase 61A | 166166 | 166165 | 166170 | 41, 34, 1 |
| 14 | WARS | tryptophanyl-tRNA synthetase | 140105 | 140107 | 176473 | 36, 9, 45 |
| 14 | TPPP2 | tubulin polymerization promoting protein family member 2 | 179636 | 165795 | 206150 | 38, |
| 14 | TTLL5 | tubulin tyrosine ligase like 5 | 119685 | 119686 | 133935 | 43, 38, 10 |
| 14 | TDRD9 | tudor domain containing 9 | 156414 | 156411 | 227729 | 40, 28, 29 |
| 14 | TDP1 | tyrosyl-DNA phosphodiesterase 1 | 042088 | 140025 | 152315 | 22, 42, 12 |
| 14 | UBR7 | ubiquitin protein ligase E3 component n-recognin 7 (putative) | 012963 | 170270 | 011114 | 26, 39, 5 |
| 14 | UNC79 | unc-79 homolog (C. elegans) | 133958 | 011114 | 187581 | 26, 31, 8 |
| 14 | VRK1 | vaccinia related kinase 1 | 100749 | 090060 | 176605 | 4, 7, 10 |
| 14 | VCPKMT | valosin containing protein lysine methyltransferase | 100483 | 165527 | 100485 | 5, 29, 22 |
| 14 | VASH1 | vasohibin 1 | 071246 | 119715 | 013523 | 18, 45, 20 |
| 14 | VRTN | vertebrae development associated | 133980 | 119688 | 183379 | 12, 27, 38 |
| 14 | VTI1B | vesicle transport through interaction with t-SNAREs 1B | 100568 | 081181 | 258466 | 21, 9, 40 |
| 14 | VSX2 | visual system homeobox 2 | 119614 | 205659 | 119688 | 14, 25, 8 |
| 14 | VIPAS39 | VPS33B interacting protein, apical-basolateral polarity | 151445 | 280308 | 100591 | 29, 40, 18 |
| | | regulator, spe-39 homolog | | | | |
| 14 | WDHD1 | WD repeat and HMG-box DNA binding protein 1 | 198554 | 131979 | 180008 | 43, 12, 22 |
| 14 | WDR20 | WD repeat domain 20 | 140153 | 080824 | 080823 | 22, 38, 23 |
| 14 | WDR25 | WD repeat domain 25 | 176473 | 140105 | 183092 | 21, 26, 32 |
| 14 | WDR89 | WD repeat domain 89 | 140006 | 154001 | 126821 | 2, 45, 42 |
| 14 | XRCC3 | X-ray repair cross complementing 3 | 126215 | 256500 | 100711 | 21, 3, 41 |
| 14 | YLPM1 | YLP motif containing 1 | 119596 | 119616 | 119608 | 18, 16, 40 |
| 14 | YY1 | YY1 transcription factor | 100811 | 168350 | 197119 | |
| 14 | ZFP36L1 | ZFP36 ring finger protein like 1 | 185650 | 182185 | 072110 | 44, 43, 29 |
| 14 | ZBTB1 | zinc finger and BTB domain containing 1 | 126804 | 179841 | 126803 | 22, 6, 9 |
| 14 | ZBTB25 | zinc finger and BTB domain containing 25 | 089775 | 100714 | 179841 | |
| 14 | ZBTB42 | zinc finger and BTB domain containing 42 | 179627 | 142208 | 099814 | 3, 34, 23 |
| 14 | ZC2HC1C | zinc finger C2HC-type containing 1C | 119703 | 119640 | 119638 | 38, 21, 44 |
| 14 | ZC3H14 | zinc finger CCCH-type containing 14 | 100722 | 070778 | 165521 | 38, 4, 37 |
| 14 | ZDHHC22 | zinc finger DHHC-type containing 22 | 177108 | 165548 | 165553 | 14, 8, 15 |
| 14 | ZFYVE1 | zinc finger FYVE-type containing 1 | 165861 | 119599 | 119707 | 24, 43, 26 |
| 14 | ZFYVE21 | zinc finger FYVE-type containing 21 | 100711 | 126215 | 088808 | 34, 26, 1 |
| 14 | ZFYVE26 | zinc finger FYVE-type containing 26 | 072121 | 139988 | 182185 | 43, 21, 18 |
| 14 | ZFHX2 | zinc finger homeobox 2 | 136367 | 129460 | 259431 | 2, 28, 20 |
| 14 | ZNF219 | zinc finger protein 219 | 165804 | 165801 | 232070 | 26, 39, 37 |
| 14 | ZNF410 | zinc finger protein 410 | 119725 | 258653 | 156050 | 36, 30, 45 |
| 14 | ZNF839 | zinc finger protein 839 | 022976 | 080823 | 100865 | 34, 26, 41 |

[0065] Table 7 provides the gene information for the genes found on Chromosomes 15-17.

TABLE 7
Genes on Chromosomes 15-17

| | | | | Up | Down | Tissue |
|---|---|---|---|---|---|---|
| Chr. | Gene Symbol | Gene Name | ENSG | ENSG | ENSG | Code |
| 15 | HACD3 | 3-hydroxyacyl-CoA dehydratase 3 | 074696 | 074603 | 138614 | |
| 15 | ABHD17C | abhydrolase domain containing 17C | 136379 | 172379 | 103888 | 11, 4, 16 |
| 15 | ABHD2 | abhydrolase domain containing 2 | 140526 | 140545 | 140522 | 24, 38, 33 |
| 15 | ANP32A | acidic nuclear phosphoprotein 32 family member A | 140350 | 103647 | 258484 | 21, 4, 18 |
| 15 | ACTC1 | actin, alpha, cardiac muscle 1 | 159251 | 159248 | 021776 | 15, 43, 25 |
| 15 | ARPIN | actin-related protein 2/3 complex inhibitor | 242498 | 250021 | 140548 | |
| 15 | ACSBG1 | acyl-CoA synthetase bubblegum family member 1 | 103740 | 166411 | 140403 | 26, 8, 35 |
| 15 | ADAM10 | ADAM metallopeptidase domain 10 | 137845 | 166035 | 128923 | 42, 39, 45 |
| 15 | ADAMTS17 | ADAM metallopeptidase with thrombospondin type 1 motif 17 | 140470 | 183060 | 154227 | 39, 11, 15 |
| 15 | ADAMTS7 | ADAM metallopeptidase with thrombospondin type 1 motif 7 | 136378 | 117971 | 185787 | 15, 12, 37 |
| 15 | ADAMTSL3 | ADAMTS like 3 | 156218 | 140600 | 259511 | 1, 42, 40 |
| 15 | AP3B2 | adapter related protein complex 3 beta 2 subunit | 103723 | 214575 | 186628 | 29, 31, 14 |
| 15 | AP3S2 | adapter related protein complex 3 sigma 2 subunit | 157823 | 166825 | 250021 | 13, 21, 34 |
| 15 | AP4E1 | adapter related protein complex 4 epsilon 1 subunit | 081014 | 138600 | 183578 | 18, 39, 4 |
| 15 | ADAL | adenosine deaminase like | 168803 | 168806 | 140265 | 24, 9, 2 |
| 15 | ADPGK | ADP dependent glucokinase | 159322 | 140463 | 067141 | 29, 34, 30 |
| 15 | ACAN | aggrecan | 157766 | 172183 | 140511 | 10, 6, 42 |
| 15 | AKAP13 | A-kinase anchoring protein 13 | 170776 | 073417 | 183655 | 5, 32, |
| 15 | ANPEP | alanyl aminepeptidase, membrane | 166825 | 188095 | 157823 | 16, 19, 37 |
| 15 | ALDH1A2 | aldehyde dehydrogenase 1 family member A2 | 128918 | 255529 | 103569 | |
| 15 | ALDH1A3 | aldehyde dehydrogenase 1 family member A3 | 184254 | 279588 | 154237 | 42, 33, 23 |
| 15 | AAGAB | alpha- and gamma-adaptin binding protein | 103591 | 166949 | 103599 | 13, 29, 43 |
| 15 | ALPK3 | alpha kinase 3 | 136383 | 166716 | 156222 | 43, 25, 26 |
| 15 | APBA2 | amyloid beta precursor protein binding family A member 2 | 034053 | 261649 | 104059 | |
| 15 | ANKDD1A | ankyrin repeat and death domain containing 1A | 166839 | 241839 | 090487 | 2, 17, 45 |
| 15 | ASB7 | ankyrin repeat and SOCS box containing 7 | 183475 | 140471 | 279588 | 29, 13, 22 |
| 15 | ANKRD34C | ankyrin repeat domain 34C | 235711 | 058335 | 166557 | 25, 8, |
| 15 | ANKRD63 | ankyrin repeat domain 63 | 230778 | 137841 | 188549 | 27, |
| 15 | ANXA2 | annexin A2 | 182718 | 171956 | 128915 | 43, 4, 6 |
| 15 | APH1B | aph-1 homolog B, gamma-secretase subunit | 138613 | 166128 | 074410 | 38, 42, 14 |
| 15 | AVEN | apoptosis and caspase activation inhibitor | 169857 | 198838 | 184984 | 3, 31, 22 |
| 15 | AEN | apoptosis enhancing nuclease | 181026 | 140543 | 172183 | 9, 35, 12 |
| 15 | AQP9 | aquaporin 9 | 103569 | 128918 | 166035 | 5, 19, 36 |
| 15 | AQR | aquarius intron-binding spliceosomal factor | 021776 | 159251 | 198146 | 31, 1, 42 |
| 15 | ARIH1 | ariadne RBR E3 ubiquitin protein ligase 1 | 166233 | 187806 | 215186 | 9, 6, 4 |
| 15 | ARRDC4 | arrestin domain containing 4 | 140450 | 185594 | 185087 | 43, 11, 19 |
| 15 | ARNT2 | aryl hydrocarbon receptor nuclear translocator 2 | 172379 | 259417 | 136379 | 29, 26, 8 |
| 15 | AGBL1 | ATP/GTP binding protein like 1 | 166748 | 273540 | 140538 | 33, 10, 28 |
| 15 | AGBL1 | ATP/GTP binding protein like 1 | 273540 | 183655 | 166748 | 33, 10, 28 |
| 15 | ATP10A | ATPase phospholipid transporting 10A (putative) | 206190 | 114062 | 166206 | 6, 35, 40 |
| 15 | ATP8B4 | ATPase phospholipid transporting 8B4 (putative) | 104043 | 104047 | 140284 | 5, 42, 7 |
| 15 | ARID3B | AT-rich interaction domain 3B | 179361 | 138629 | 179335 | 12, |
| 15 | BBS4 | Bardet-Biedl syndrome 4 | 140463 | 175202 | 159322 | 4, 30, 45 |
| 15 | BNC1 | basonudin 1 | 169594 | 166503 | 140600 | 38, 9, 16 |
| 15 | BNIP2 | BCL2 interacting protein 2 | 140299 | 140307 | 171956 | 42, 4, 24 |
| 15 | BCL2L10 | BCL2 like 10 | 137875 | 069956 | 069966 | 44, 28, 17 |
| 15 | BMF | Bcl2 modifying factor | 104081 | 140319 | 156970 | 21, 18, 5 |
| 15 | BCL2A1 | BCL2 related protein A1 | 140379 | 180953 | 086666 | 5, 22, 10 |
| 15 | B2M | beta-2-microglobulin | 166710 | 229474 | 185880 | 30, 5, 7 |
| 15 | BLOC1S6 | biogenesis of lysosomal organelles complex 1 subunit 6 | 104164 | 104154 | 260170 | 22, 42, 13 |
| 15 | BLM | Bloom syndrome RecQ like helicase | 197299 | 140577 | 140564 | 22, 41, 34 |
| 15 | BAHD1 | bromo adjacent homology domain containing 1 | 140320 | 128928 | 169105 | 41, 1, 35 |
| 15 | BTBD1 | BTB domain containing 1 | 064726 | 169609 | 136404 | 18, 37, 6 |
| 15 | BUB1B | BUB1 mitotic checkpoint serine/threonine kinase B | 156970 | 104081 | 259288 | 12, 24, 39 |
| 15 | BUB1B-PAK6 | BUB1B-PAK6 readthrough | 259288 | 156970 | 137843 | |
| 15 | C15orf38-AP3S2 | C15orf38-AP3S2 readthrough | 250021 | 157823 | 242498 | |
| 15 | C2CD4A | C2 calcium dependent domain containing 4A | 198535 | 129003 | 205502 | 37, 28, 20 |
| 15 | C2CD4B | C2 calcium dependent domain containing 4B | 205502 | 198535 | 171914 | 28, 26, 20 |
| 15 | CHP1 | calcineurin like EF-hand protein 1 | 187446 | 178997 | 104147 | 11, 42, 24 |
| 15 | CIB1 | calcium and integrin binding 1 | 185043 | 185033 | 183208 | 3, 34, 41 |
| 15 | CIB2 | calcium and integrin binding family member 2 | 136425 | 183476 | 166411 | 34, 41, 20 |
| 15 | CALML4 | calmodulin like 4 | 129007 | 260007 | 128973 | 3, 42, 16 |
| 15 | CAPN3 | calpain 3 | 092529 | 214013 | 103994 | 35, 25, 24 |
| 15 | ARPP19 | cAMP regulated phosphoprotein 19 | 128989 | 280817 | 047346 | 8, 11, 2 |
| 15 | CASC4 | cancer susceptibility candidate 4 | 166734 | 171877 | 137770 | |
| 15 | CT62 | cancer/testis antigen 62 | 225362 | 187720 | 278570 | 38, 10, 8 |
| 15 | CHST14 | carbohydrate sulfotransferase 14 | 169105 | 140320 | 128891 | 11, 12, 10 |
| 15 | CA12 | carbonic anhydrase 12 | 074410 | 138613 | 140455 | 17, 14, 6 |
| 15 | CILP | cartilage intermediate layer protein | 138615 | 166855 | 138617 | 10, 42, 43 |
| 15 | CSNK1G1 | casein kinase 1 gamma 1 | 169118 | 166794 | 259316 | 23, 22, 38 |
| 15 | CLPX | caseinolytic mitochondrial matrix peptidase chaperone subunit | 166855 | 090470 | 138615 | 26, 7, 29 |
| 15 | CTSH | cathepsin H | 103811 | 185787 | 058335 | 22, 37, 41 |
| 15 | CATSPER2 | cation channel sperm associated 2 | 166762 | 242866 | 223572 | 26, 38, 43 |
| 15 | CD276 | CD276 molecule | 103855 | 156642 | 205363 | |
| 15 | CLK3 | CDC like kinase 3 | 179335 | 179361 | 179151 | 1, 29, 24 |
| 15 | CCPG1 | cell cycle progression 1 | 260916 | 069943 | 261652 | 42, 1, 10 |
| 15 | CEMIP | cell migration inducing hyaluronan binding protein | 103888 | 136379 | 117899 | 6, 11, 10 |
| 15 | CRABP1 | cellular retinoic acid binding protein 1 | 166426 | 140395 | 136381 | 14, 27, 31 |
| 15 | CEP152 | centrosomal protein 152 | 103995 | 166147 | 185634 | 19, 6, 12 |
| 15 | CERS3 | ceramide synthase 3 | 154227 | 140470 | 140471 | 38, 24, 35 |
| 15 | CLN6 | ceroid-lipofuscinosis, neuronal 6, late infantile, variant | 128973 | 129007 | 169018 | 18, 9, 41 |
| 15 | CHAC1 | ChaC glutathione specific gamma-glutamylcyclotransferase 1 | 128965 | 128917 | 128908 | 9, 21, 3 |
| 15 | CHRM5 | cholinergic receptor muscarinic 5 | 184984 | 169857 | 134153 | 38, 44, 8 |
| 15 | CHRNA3 | cholinergic receptor nicotinic alpha 3 subunit | 080644 | 169684 | 117971 | 26, 39, 14 |
| 15 | CHRNA5 | cholinergic receptor nicotinic alpha 5 subunit | 169684 | 041357 | 080644 | 4, 26, 31 |
| 15 | CHRNA7 | cholinergic receptor nicotinic alpha 7 subunit | 175344 | 169918 | 249931 | |
| 15 | CHRNB4 | cholinergic receptor nicotinic beta 4 subunit | 117971 | 080644 | 136378 | 26, 38, 44 |
| 15 | CSPG4 | chondroitin sulfate proteoglycan 4 | 173546 | 173548 | 182950 | 35, 26, 6 |
| 15 | CHSY1 | chondroitin sulfate synthase 1 | 131873 | 154237 | 131871 | |
| 15 | CHRFAM7A | CHRNA7 (exons 5-10) and FAM7A (exons A-E) fusion | 166664 | 261247 | 186399 | 29, 40, 26 |
| 15 | CHD2 | chromodomain helicase DNA binding protein 2 | 173575 | 279765 | 182175 | 30, 18, 19 |
| 15 | C15orf39 | chromosome 15 open reading frame 39 | 167173 | 138621 | 140478 | 38, 7, 22 |
| 15 | C15orf40 | chromosome 15 open reading frame 40 | 169609 | 169612 | 064726 | 7, 28, 18 |
| 15 | C15orf41 | chromosome 15 open reading frame 41 | 186073 | 134146 | 134138 | 4, 34, 10 |
| 15 | C15orf48 | chromosome 15 open reading frame 48 | 166920 | 171763 | 104154 | 38, 28, 16 |
| 15 | C15orf52 | chromosome 15 open reading frame 52 | 188549 | 230778 | 233041 | 4, 25, 26 |
| 15 | C15orf53 | chromosome 15 open reading frame 53 | 175779 | 172575 | 137801 | 36, |
| 15 | C15orf57 | chromosome 15 open reading frame 57 | 128891 | 169105 | 166133 | 30, 17, 37 |
| 15 | C15orf59 | chromosome 15 open reading frame 59 | 205363 | 103855 | 167139 | 16, 14, |
| 15 | C15orf61 | chromosome 15 open reading frame 61 | 189227 | 103599 | 137764 | 38, 33, |
| 15 | C15orf62 | chromosome 15 open reading frame 62 | 188277 | 104129 | 166140 | 13, 24, 22 |
| 15 | C15orf65 | chromosome 15 open reading frame 65 | 261652 | 260916 | 256061 | |
| 15 | CFAP161 | cilia and flagella associated protein 161 | 156206 | 140406 | 172349 | |
| 15 | CGNL1 | cingulin like 1 | 128849 | 140262 | 137878 | 40, 1, 32 |
| 15 | CDAN1 | codanin 1 | 140326 | 159433 | 128881 | 27, 40, 44 |
| 15 | CCDC33 | coiled-coil domain containing 33 | 140481 | 137868 | 140459 | |
| 15 | COMMD4 | COMM domain containing 4 | 140365 | 167195 | 140398 | 34, 41, 38 |
| 15 | CPLX3 | complexin 3 | 213578 | 140506 | 140474 | 14, 26, 36 |
| 15 | COPS2 | COP9 signalosome subunit 2 | 166200 | 138593 | 156958 | 1, 13, 45 |
| 15 | CORO2B | coronin 2B | 103647 | 137809 | 140350 | 26, 8, 18 |
| 15 | CTXN2 | cortexin 2 | 233932 | 104177 | 074803 | 26, 14, |
| 15 | CKMT1A | creatine kinase, mitochondrial 1A | 223572 | 166762 | 167004 | 26, 31, 30 |
| 15 | CKMT1B | creatine kinase, mitochondrial 1B | 237289 | 168781 | 242866 | 8, 37, 13 |
| 15 | CRTC3 | CREB regulated transcription coactivator 3 | 140577 | 140575 | 197299 | |
| 15 | CSK | c-src tyrosine kinase | 103653 | 140505 | 140506 | 41, 36, 5 |
| 15 | CTDSPL2 | CTD small phosphatase like 2 | 137770 | 166734 | 104131 | 42, 22, 7 |
| 15 | CELF6 | CUGBP, Elav-like family member 6 | 140488 | 273025 | 213614 | 26, 31, 15 |
| 15 | CCNB2 | cyclin B2 | 157456 | 137776 | 157483 | 13, 3, 4 |
| 15 | CCNDBP1 | cyclin D1 binding protein 1 | 166946 | 137842 | 104055 | 3, 11, 1 |
| 15 | COX5A | cytochrome c oxidase subunit 5A | 178741 | 178761 | 178718 | 25, 22, 16 |
| 15 | CYP1A1 | cytochrome P450 family 1 subfamily A member 1 | 140465 | 179151 | 140505 | 1, 42, 13 |
| 15 | CYP1A2 | cytochrome P450 family 1 subfamily A member 2 | 140505 | 140465 | 103653 | 19, 23, |
| 15 | CYP11A1 | cytochrome P450 family 11 subfamily A member 1 | 140459 | 140481 | 138623 | 2, 32, 9 |
| 15 | CYP19A1 | cytochrome P450 family 19 subfamily A member 1 | 137869 | 183578 | 186417 | 32, 27, 45 |
| 15 | CYFIP1 | cytoplasmic FMR1 interacting protein 1 | 273749 | 140157 | 275835 | 24, 6, 29 |
| 15 | CPEB1 | cytoplasmic polyadenylation element binding protein 1 | 214575 | 260836 | 103723 | |
| 15 | DAPK2 | death associated protein kinase 2 | 035664 | 103657 | 166797 | 38, |
| 15 | DET1 | de-etiolated homolog 1 (Arabidopsis) | 140543 | 181991 | 181026 | 18, 36, 33 |
| 15 | DLL4 | delta like canonical Notch ligand 4 | 128917 | 104142 | 128965 | 32, 16, 2 |
| 15 | DENND4A | DENN domain containing 4A | 174485 | 074621 | 103769 | 22, 26, 9 |
| 15 | DUT | deoxyuridine triphosphatase | 128951 | 074803 | 166147 | 22, 4, 11 |
| 15 | DPP8 | dipeptidyl peptidase 8 | 074603 | 103742 | 074696 | 34, 24, 38 |
| 15 | PPIP5K1 | diphosphoinositol pentakisphosphate kinase 1 | 168781 | 166963 | 237289 | 40, 18, 22 |
| 15 | DPH6 | diphthamine biosynthesis 6 | 134146 | 255192 | 186073 | 4, 36, 3 |
| 15 | DIS3L | DIS3 like exosome 3′-5′ exoribonuclease | 166938 | 157890 | 075131 | 9, 2, 25 |
| 15 | DISP2 | dispatched RND transporter family member 2 | 140323 | 233041 | 128944 | 20, |
| 15 | DMXL2 | Dmx like 2 | 104093 | 186417 | 104112 | 45, 31, 5 |
| 15 | POLG | DNA polymerase gamma, catalytic subunit | 140521 | 140525 | 140519 | 41, 1, 35 |
| 15 | DNAJA4 | DnaJ heat shock protein family (Hsp40) member A4 | 140403 | 103740 | 140395 | 42, 26, 31 |
| 15 | DNAJC17 | DnaJ heat shock protein family (Hsp40) member C17 | 104129 | 137880 | 188277 | 40, 37, 34 |
| 15 | DTWD1 | DTW domain containing 1 | 104047 | 140285 | 104043 | 29, 7, 34 |
| 15 | DUOX1 | dual oxidase 1 | 137857 | 140254 | 138606 | 40, 42, 4 |
| 15 | DUOX2 | dual oxidase 2 | 140279 | 140263 | 140274 | 35, 40, 24 |
| 15 | DUOXA1 | dual oxidase maturation factor 1 | 140254 | 140274 | 137857 | 40, 24, 20 |
| 15 | DUOXA2 | dual oxidase maturation factor 2 | 140274 | 140279 | 140254 | 16, 42, 22 |
| 15 | DYX1C1 | dyslexia susceptibility 1 candidate 1 | 256061 | 261652 | 171016 | 4, 31, 40 |
| 15 | EHD4 | EH domain containing 4 | 103966 | 137877 | 188089 | 1, 21, 22 |
| 15 | ETFA | electron transfer flavoprotein alpha subunit | 140374 | 169758 | 159556 | 29, 1, 31 |
| 15 | ELL3 | elongation factor for RNA polymerase II 3 | 128886 | 167004 | 262560 | |
| 15 | EFL1 | elongation factor like GTPase 1 | 140598 | 183496 | 188659 | 10, 43, 18 |
| 15 | EDC3 | enhancer of mRNA decapping 3 | 179151 | 179335 | 140465 | 33, 1, 13 |
| 15 | EID1 | EP300 interacting inhibitor of differentiation 1 | 255302 | 185634 | 138593 | 43, 13, 15 |
| 15 | EMC4 | ER membrane protein complex subunit 4 | 128463 | 134152 | 140199 | 29, 6, 28 |
| 15 | EMC7 | ER membrane protein complex subunit 7 | 134153 | 184984 | 182405 | 18, 31, 29 |
| 15 | EPB42 | erythrocyte membrane protein band 4.2 | 166947 | 159459 | 137842 | 19, 7, 15 |
| 15 | EIF2AK4 | eukaryotic translation initiation factor 2 alpha kinase 4 | 128829 | 283382 | 140319 | 3, 31, 34 |
| 15 | EIF3J | eukaryotic translation initiation factor 3 subunit J | 104131 | 137770 | 104133 | 9, 40, 34 |
| 15 | EXD1 | exonuclease 3′-5′ domain containing 1 | 178997 | 128908 | 187446 | 38, 25, 8 |
| 15 | FAM103A1 | family with sequence similarity 103 member A1 | 169612 | 103942 | 169609 | 29, 4, 1 |
| 15 | FAM169B | family with sequence similarity 169 member B | 185087 | 140450 | 140443 | 16, |
| 15 | FAM174B | family with sequence similarity 174 member B | 185442 | 140557 | 279765 | 4, 28, 31 |
| 15 | FAM189A1 | family with sequence similarity 189 member A1 | 104059 | 034053 | 185115 | 8, 17, 14 |
| 15 | FAM214A | family with sequence similarity 214 member A | 047346 | 128989 | 169856 | 22, 29, 42 |
| 15 | FAM219B | family with sequence similarity 219 member B | 178761 | 178802 | 178741 | 6, 2, 5 |
| 15 | FAM227B | family with sequence similarity 227 member B | 166262 | 156958 | 140285 | 31, 38, 28 |
| 15 | FAM63B | family with sequence similarity 63 member B | 128923 | 137845 | 157450 | 39, 25, 4 |
| 15 | FAM81A | family with sequence similarity 81 member A | 157470 | 171989 | 140297 | |
| 15 | FAM96A | family with sequence similarity 96 member A | 166797 | 035664 | 028528 | 34, 29, 6 |
| 15 | FAM98B | family with sequence similarity 98 member B | 171262 | 166068 | 172575 | 43, 4, 6 |
| 15 | FAN1 | FANCD2 and FANCI associated nuclease 1 | 198690 | 187951 | 166912 | 1, 26, 17 |
| 15 | FANCI | Fanconi anemia complementation group I | 140525 | 140522 | 140521 | 18, 22, 34 |
| 15 | FBXL22 | F-box and leucine rich repeat protein 22 | 197361 | 140455 | 103657 | |
| 15 | FBXO22 | F-box protein 22 | 167196 | 140367 | 169752 | 7, 4, 29 |
| 15 | FEM1B | fem-1 homolog B | 169018 | 128973 | 137809 | 9, 42, 38 |
| 15 | FRMD5 | FERM domain containing 5 | 171877 | 092470 | 166734 | 40, 8, 35 |
| 15 | FES | FES proto-oncogene, tyrosine kinase | 182511 | 140564 | 196547 | 36, 42, 1 |
| 15 | FBN1 | fibrillin 1 | 166147 | 128951 | 103995 | 3, 6, 37 |
| 15 | FGF7 | fibroblast growth factor 7 | 140285 | 166262 | 104047 | 45, 26, 11 |
| 15 | FSD2 | fibronectin type III and SPRY domain containing 2 | 186628 | 103723 | 156232 | 15, 25, 22 |
| 15 | FSIP1 | fibrous sheath interacting protein 1 | 150667 | 137801 | 166073 | 23, 39, 38 |
| 15 | FOXB1 | forkhead box B1 | 171956 | 140299 | 182718 | 38, 17, 12 |
| 15 | FMN1 | formin 1 | 248905 | 166923 | 198838 | 35, 1, 6 |
| 15 | FAH | fumarylacetoacetate hydrolase | 103876 | 086666 | 259417 | 5, 21, 1 |
| 15 | FURIN | furin, paired basic amino acid cleaving enzyme | 140564 | 197299 | 182511 | 1, 9, 34 |
| 15 | GNB5 | G protein subunit beta 5 | 069966 | 137875 | 128833 | 31, 34, 29 |
| 15 | GPR176 | G protein-coupled receptor 176 | 166073 | 150667 | 283382 | |
| 15 | GABPB1 | GA binding protein transcription factor beta subunit 1 | 104064 | 140287 | 138592 | 22, 14, 20 |
| 15 | GALK2 | galactokinase 2 | 156958 | 166200 | 166262 | 36, 2, 13 |
| 15 | GABRA5 | gamma-aminobutyric acid type A receptor alpha5 subunit | 186297 | 166206 | 182256 | 8, 39, 17 |
| 15 | GABRB3 | gamma-aminobutyric acid type A receptor beta3 subunit | 166206 | 206190 | 186297 | |
| 15 | GABRG3 | gamma-aminobutyric acid type A receptor gamma3 subunit | 182256 | 186297 | 104044 | 38, |
| 15 | GJD2 | gap junction protein delta 2 | 159248 | 215252 | 159251 | 14, |
| 15 | GDPGP1 | GDP-D-glucose phosphorylase 1 | 183208 | 185043 | 261147 | 15, 24, 22 |
| 15 | GTF2A2 | general transcription factor IIA subunit 2 | 140307 | 140297 | 140299 | 29, 31, 38 |
| 15 | GLDN | gliomedin | 186417 | 137869 | 104093 | 18, 32, 8 |
| 15 | GCNT3 | glucosaminyl (N-acetyl) transferase 3, mucin type | 140297 | 157470 | 140307 | |
| 15 | GANC | glucosidase alpha, neutral C | 214013 | 103978 | 092529 | 11, 29, 42 |
| 15 | GLCE | glucuronic acid epimerase | 138604 | 255346 | 137819 | 29, 18, 42 |
| 15 | GATM | glycine amidinotransferase | 171766 | 137860 | 171763 | 17, 19, 4 |
| 15 | GOLGA6A | golgin A6 family member A | 159289 | 140464 | 167178 | |
| 15 | GOLGA6B | golgin A6 family member B | 215186 | 166233 | 175202 | |
| 15 | GOLGA6C | golgin A6 family member C | 167195 | 140478 | 140365 | 38, 19, |
| 15 | GOLGA6D | golgin A6 family member D | 140478 | 167173 | 167195 | 38, 35, |
| 15 | GOLGA6L1 | golgin A6 family-like 1 | 273976 | 275835 | 261739 | 38, |
| 15 | GOLGA6L10 | golgin A6 family-like 10 | 278662 | 188659 | 197978 | 18, 19, 23 |
| 15 | GOLGA6L2 | golgin A6 family-like 2 | 174450 | 261739 | 179455 | |
| 15 | GOLGA6L22 | golgin A6 family-like 22 | 277865 | 259261 | 170113 | |
| 15 | GOLGA6L4 | golgin A6 family-like 4 | 184206 | 259511 | 176371 | 25, 12, 15 |
| 15 | GOLGA6L6 | golgin A6 family-like 6 | 277322 | 271336 | 230031 | 38, |
| 15 | GOLGA6L7P | Golgin A6 family-like 7, pseudogene | 261649 | 188626 | 034053 | 38, |
| 15 | GOLGA6L9 | golgin A6 family-like 9 | 197978 | 278662 | 182774 | |
| 15 | GOLGA8A | golgin A8 family member A | 175265 | 176454 | 215252 | 40, 18, 12 |
| 15 | GOLGA8B | golgin A8 family member B | 215252 | 175265 | 159248 | |
| 15 | GOLGA8F | Golgin A8 family member F | 153684 | 128731 | 183629 | 38, 2, 14 |
| 15 | GOLGA8G | Golgin A8 family member G | 183629 | 153684 | 188626 | 38, 2, 14 |
| 15 | GOLGA8H | golgin A8 family member H | 261794 | 178115 | 187951 | |
| 15 | GOLGA8J | golgin A8 family member J | 179938 | 104067 | 261247 | 38, 12, |
| 15 | GOLGA8K | golgin A8 family member K | 249931 | 175344 | 206127 | 30, 38, |
| 15 | GOLGA8M | golgin A8 family member M | 188626 | 183629 | 261649 | |
| 15 | GOLGA8N | golgin A8 family member N | 232653 | 206127 | 198826 | 24, 38, 5 |
| 15 | GOLGA80 | golgin A8 family member O | 206127 | 249931 | 232653 | |
| 15 | GOLGA8Q | Golgin A8 family member Q | 178115 | 186399 | 261794 | |
| 15 | GOLGA8R | golgin A8 family member R | 186399 | 166664 | 178115 | 24, 38, 5 |
| 15 | GOLGA8S | Golgin A8 family members | 261739 | 273976 | 174450 | 38, 40, |
| 15 | GOLGA8T | Golgin A8 family member T | 261247 | 179938 | 166664 | 40, 7, 33 |
| 15 | GRAMD2 | GRAM domain containing 2 | 175318 | 166192 | 067225 | 18, 32, 42 |
| 15 | GREM1 | gremlin 1, DAN family BMP antagonist | 166923 | 166922 | 248905 | 7, 24, 35 |
| 15 | GC0M1 | GRINL1A complex locus 1 | 137878 | 128849 | 263155 | |
| 15 | GCHFR | GTP cyclohydrolase I feedback regulator | 137880 | 137824 | 104129 | 41, 21, 33 |
| 15 | HAUS2 | HAUS augmin like complex subunit 2 | 137814 | 180979 | 159433 | 9, 22, 3 |
| 15 | HDDC3 | HD domain containing 3 | 184508 | 196547 | 140553 | 3, 9, 29 |
| 15 | HERC2 | HECT and RLD domain containing E3 ubiquitin protein ligase 2 | 128731 | 104044 | 153684 | |
| 15 | HERC1 | HECT and RLD domain containing E3 ubiquitin protein ligase family member 1 | 103657 | 197361 | 035664 | 26, 40, 22 |
| 15 | HEXA | hexosaminidase subunit alpha | 213614 | 140488 | 187806 | |
| 15 | HIGD2B | HIG1 hypoxia inducible domain family member 2B | 175202 | 215186 | 140463 | |
| 15 | HMG20A | high mobility group 20A | 140382 | 173517 | 169783 | 42, 39, 38 |
| 15 | HDC | histidine decarboxylase | 140287 | 140284 | 104064 | 1, 39, 30 |
| 15 | HOMER2 | homer scaffolding protein 2 | 103942 | 156232 | 169612 | 2, 40, 33 |
| 15 | HYPK | huntingtin interacting protein K | 242028 | 184716 | 140259 | 2, 11, 25 |
| 15 | HAPLN3 | hyaluronan and proteoglycan link protein 3 | 140511 | 157766 | 140545 | 39, 43, 27 |
| 15 | HYKK | hydroxylysine kinase | 188266 | 136381 | 041357 | 33, 28, 3 |
| 15 | HCN4 | hyperpolarization activated cyclic nucleotide gated potassium channel 4 | 138622 | 067141 | 183324 | 20, 15, 38 |
| 15 | IGHD1OR15-1A | Immunoglobulin heavy diversity 1/OR15-1A (non-functional) | 271336 | 282599 | 277322 | |
| 15 | IGHD1OR15-1B | Immunoglobulin heavy diversity 1/OR15-1B (non-functional) | 270185 | 282268 | 278522 | |
| 15 | IGHD2OR15-2A | Immunoglobulin heavy diversity 2/OR15-2A (non-functional) | 282599 | 282520 | 271336 | |
| 15 | IGHD2OR15-2B | Immunoglobulin heavy diversity 2/OR15-2B (non-functional) | 282268 | 282089 | 270185 | |
| 15 | IGHD3OR15-3A | Immunoglobulin heavy diversity 3/OR15-3A (non-functional) | 282520 | 271317 | 282599 | |
| 15 | IGHD3OR15-3B | Immunoglobulin heavy diversity 3/OR15-3B (non-functional) | 282089 | 270451 | 282268 | |
| 15 | IGHD4OR15-4A | Immunoglobulin heavy diversity 4/OR15-4A (non-functional) | 271317 | 270961 | 282520 | |
| 15 | IGHD4OR15-4B | Immunoglobulin heavy diversity 4/OR15-4B (non-functional) | 270451 | 270824 | 282089 | |
| 15 | IGHD5OR15-5A | Immunoglobulin heavy diversity 5/OR15-5A (non-functional) | 270961 | 259490 | 271317 | |
| 15 | IGHD5OR15-5B | Immunoglobulin heavy diversity 5/OR15-5B (non-functional) | 270824 | 230031 | 270451 | |
| 15 | IGHV1OR15-1 | Immunoglobulin heavy variable 1/OR15-1 (non-functional) | 270505 | 183706 | 259261 | |
| 15 | IGHV1OR15-9 | Immunoglobulin heavy variable 1/OR15-9 (non-functional) | 188403 | 279084 | 259490 | |
| 15 | IGHV3OR15-7 | Immunoglobulin heavy variable 3/OR15-7 (pseudogene) | 259490 | 188403 | 270961 | |
| 15 | IGHV4OR15-8 | Immunoglobulin heavy variable 4/OR15-8 (non-functional) | 259261 | 270505 | 277865 | |
| 15 | ISLR | immunoglobulin superfamily containing leucine rich repeat | 129009 | 167178 | 137868 | 45, 44, 10 |
| 15 | ISLR2 | immunoglobulin superfamily containing leucine rich repeat 2 | 167178 | 159289 | 129009 | 26, 8, 38 |
| 15 | IGDCC3 | immunoglobulin superfamily DCC subclass member 3 | 174498 | 138617 | 103742 | 12, 29, 14 |
| 15 | IGDCC4 | immunoglobulin superfamily DCC subclass member 4 | 103742 | 174498 | 074603 | 40, 32, 36 |
| 15 | IMP3 | IMP3, U3 small nucleolar ribonucleoprotein | 177971 | 169371 | 173548 | 33, 19, 41 |
| 15 | INO80 | INO80 complex subunit | 128908 | 128965 | 178997 | 22, 23, 18 |
| 15 | ITPKA | inosi tol-trisphosphate 3-kinase A | 137825 | 137815 | 062524 | 3, 27, 38 |
| 15 | IGF1R | insulin like growth factor 1 receptor | 140443 | 185087 | 183571 | 31, 12, 18 |
| 15 | ITGA11 | integrin subunit alpha 11 | 137809 | 169018 | 103647 | 6, 34, 43 |
| 15 | ICE2 | interactor pf little elongation complex ELL subunit 2 | 128915 | 182718 | 069667 | 42, 39, 11 |
| 15 | ISG20 | interferon stimulated exonuclease gene 20 | 172183 | 181026 | 157766 | 41, 22, 16 |
| 15 | IL16 | interleukin 16 | 172349 | 156206 | 172345 | 41, 39, 36 |
| 15 | IQGAP1 | IQ mctif containing GTPase activating protein 1 | 140575 | 196391 | 140577 | 24, 23, 30 |
| 15 | IQCH | IQ motif containing H | 103599 | 103591 | 189227 | 38, 42, 23 |
| 15 | IREB2 | iron responsive element binding protein 2 | 136381 | 166426 | 188266 | 4, 1, 39 |
| 15 | ISL2 | ISL LIM homeobox 2 | 159556 | 140374 | 140386 | 27, 5, 14 |
| 15 | IDH2 | isocitrate dehydrogenase (NADP(+)) 2, mitochondrial | 182054 | 140548 | 185033 | 15, 25, 37 |
| 15 | IDH3A | isocitrate dehydrogenase 3 (NAD(+)) alpha | 166411 | 136425 | 103740 | 39, 21, 13 |
| 15 | IVD | ispvaleryl-CpA dehydrogenase | 128928 | 128944 | 140320 | 29, 37, 40 |
| 15 | JMJD7-PLA2G4B | JMJD7-PLA2G4B readthrough | 168970 | 243789 | 243708 | 18, 27, 15 |
| 15 | JMJD7 | jumonji domain containing 7 | 243789 | 279937 | 168970 | |
| 15 | KATNBL1 | katanin regulatory subunit B1 like 1 | 134152 | 182405 | 128463 | |
| 15 | KLHL25 | kelch like family member 25 | 183655 | 170776 | 273540 | 42, 38, 1 |
| 15 | KBTBD13 | kelch repeat and BTB domain containing 13 | 234438 | 103710 | 246922 | 25, 18, 38 |
| 15 | KIAA0101 | KIAA0101 | 166803 | 259316 | 103671 | 7, 4, 34 |
| 15 | KIAA1024 | KIAA1024 | 169330 | 166557 | 136371 | 25, 28, 42 |
| 15 | KIF23 | kinesin family member 23 | 137807 | 137819 | 137818 | 6, 30, 39 |
| 15 | KIF7 | kinesin family member 7 | 166813 | 140534 | 166819 | |
| 15 | KNSTRN | kinetochore localized astrin/SPAG5 binding protein | 128944 | 140323 | 128928 | 6, 38, 12 |
| 15 | KNL1 | kinetochore scaffold 1 | 137812 | 166133 | 279084 | |
| 15 | KLF13 | Kruppel like factor 13 | 169926 | 134160 | 169918 | |
| 15 | LARP6 | La ribonucleoprotein domain family member 6 | 166173 | 137831 | 137821 | 25, 15, 43 |
| 15 | LACTB | lactamase beta | 103642 | 140416 | 185088 | 31, 6, 3 |
| 15 | LCTL | lactase like | 188501 | 174442 | 137834 | 14, 35, 12 |
| 15 | LDHAL6B | lactate dehydrogenase A like 6B | 171989 | 157483 | 157470 | 38, 4, 8 |
| 15 | LMAN1L | lectin, manncse binding 1 like | 140506 | 103653 | 213578 | 33, 34, 36 |
| 15 | LEO1 | LEO1 homolog, Paf1/RNA polymerase II complex component | 166477 | 138594 | 069956 | 30, 2, 13 |
| 15 | LCMT2 | leucine carboxyl methyltransferase 2 | 168806 | 159495 | 168803 | 37, 23, 26 |
| 15 | LINGO1 | leucine rich repeat and Ig domain containing 1 | 169783 | 140382 | 167202 | |
| 15 | LRRC28 | leucine rich repeat containing 28 | 168904 | 103852 | 281635 | |
| 15 | LRRC49 | leucine rich repeat containing 49 | 137821 | 166173 | 129028 | 10, 31, 8 |
| 15 | LRRC57 | leucine rich repeat containing 57 | 180979 | 092531 | 137814 | 1, 22, 30 |
| 15 | LRRK1 | leucine rich repeat kinase 1 | 154237 | 184254 | 131873 | 22, 18, 1 |
| 15 | LTK | leukocyte receptor tyrosine kinase | 062524 | 137825 | 103932 | 16, 38, 24 |
| 15 | LINS1 | lines homolog 1 | 140471 | 154227 | 183475 | |
| 15 | UPC | lipase C, hepatic type | 166035 | 103569 | 137845 | 19, 36, 15 |
| 15 | UNC01314 | Leng intergenic non-protein ceding RNA 1314 | 259417 | 103876 | 172379 | |
| 15 | LYSMD2 | LysM domain containing 2 | 140280 | 104112 | 128872 | 28, 9, 7 |
| 15 | LYSMD4 | LysM domain containing 4 | 183060 | 068305 | 140470 | 13, 26, 22 |
| 15 | LPCAT4 | lysophosphatidylcholine acyltransferase 4 | 176454 | 184507 | 175265 | 16, 20, 26 |
| 15 | LOXL1 | lysyl oxidase like 1 | 129038 | 167139 | 067221 | 6, 45, 32 |
| 15 | MAGEL2 | MAGE family member L2 | 254585 | 281873 | 182636 | 31, 2, 44 |
| 15 | MKRN3 | makorin ring finger protein 3 | 179455 | 174450 | 281873 | 32, |
| 15 | MPI | mannose phosphate isomerase | 178802 | 140497 | 178761 | 13, 9, 2 |
| 15 | MAN2A2 | mannosidase alpha class 2A member 2 | 196547 | 182511 | 184508 | |
| 15 | MAN2C1 | mannosidase alpha class 2C member 1 | 140400 | 140398 | 169375 | |
| 15 | MNS1 | meiosis specific nuclear structural 1 | 138587 | 151575 | 137871 | 38, 4, 32 |
| 15 | MEIS2 | Meis homeobox 2 | 134138 | 186073 | 166069 | 31, 12, 38 |
| 15 | MESDC1 | mesoderm development candidate 1 | 140406 | 117899 | 156206 | 35, 11, 22 |
| 15 | MESDC2 | mesoderm development candidate 2 | 117899 | 103888 | 140406 | 37, 11, 4 |
| 15 | MESP1 | mesoderm posterior bHLH transcription factor 1 | 166823 | 140527 | 188095 | 31, 33, 17 |
| 15 | MESP2 | mesoderm posterior bHLH transcription factor 2 | 188095 | 166823 | 166825 | 10, 15, 14 |
| 15 | MTHFS | methenyltetrahydrofolate synthetase | 136371 | 169330 | 259332 | 28, |
| 15 | MEX3B | mex-3 RNA binding family member B | 183496 | 188869 | 140598 | 38, 12, 8 |
| 15 | MGA | MGA, MAX dimerization protein | 174197 | 092445 | 137802 | 31, 1, 26 |
| 15 | MFAP1 | microfibrillar associated protein 1 | 140259 | 242028 | 092470 | 37, 13, 21 |
| 15 | MAP1A | microtubule associated protein 1A | 166963 | 067369 | 168781 | 26, 8, 31 |
| 15 | MFGE8 | milk fat globule-EGF factor 8 protein | 140545 | 140511 | 140526 | 42, 35, 12 |
| 15 | MTFMT | mitochondrial methionyl-tRNA formyltransferase | 103707 | 090487 | 186198 | 29, 28, 33 |
| 15 | MRPL46 | mitochondrial ribosomal protein L46 | 259494 | 140538 | 181991 | 43, 6, 15 |
| 15 | MRPS11 | mitochondrial ribosomal protein S11 | 181991 | 259494 | 140543 | 41, 3, 37 |
| 15 | MAPK6 | mitogen-activated protein kinase 6 | 069956 | 166477 | 137875 | 34, 7, 42 |
| 15 | MAPKBP1 | mitogen-activated protein kinase binding protein 1 | 137802 | 174197 | 279937 | 4, 38, 40 |
| 15 | MAP2K1 | mitogen-activated protein kinase kinase 1 | 169032 | 075131 | 174446 | 22, 34, 29 |
| 15 | MAP2K5 | mitogen-activated protein kinase kinase 5 | 137764 | 189227 | 188779 | 26, 33, 39 |
| 15 | MORF4L1 | mortality factor 4 like 1 | 185787 | 136378 | 103811 | 12, 11, 31 |
| 15 | MCTP2 | multiple C2 and transmembrane domain containing 2 | 140563 | 182175 | 185551 | 22, 42, 31 |
| 15 | MEGF11 | multiple EGF like domains 11 | 157890 | 103769 | 166938 | 38, 8, 14 |
| 15 | MYEF2 | myelin expression factor 2 | 104177 | 188467 | 233932 | 38, |
| 15 | MYZAP | myocardial zonula adherens protein | 263155 | 137878 | 255529 | |
| 15 | MEF2A | myocyte enhancer factor 2 A | 068305 | 281635 | 183060 | 43, 45, 29 |
| 15 | MYO1E | myosin IE | 157483 | 157456 | 171989 | 21, 3, 22 |
| 15 | MYO9A | myosin IXA | 066933 | 278570 | 166192 | 9, 1, 32 |
| 15 | MYO5A | myosin VA | 197535 | 128833 | 280817 | 26, 8, 35 |
| 15 | MYO5C | myosin VC | 128833 | 069966 | 197535 | 42, 37, 13 |
| 15 | MTMR10 | myotubularin related protein 10 | 166912 | 198690 | 134160 | 3, 11, 22 |
| 15 | NDUFAF1 | NADH: ubiquinone oxidoreductase complex assembly factor 1 | 137806 | 137804 | 137815 | 33, 38, 17 |
| 15 | NOX5 | NADPH oxidase 5 | 255346 | 258484 | 138604 | 38, 36, 31 |
| 15 | NANOGP8 | Nanog homeobox pseudogene 8 | 255192 | 198146 | 134146 | |
| 15 | NDN | necdin, MAGE family member | 182636 | 254585 | 185823 | 11, 34, 32 |
| 15 | NEIL1 | nei like DNA glycosylase 1 | 140398 | 140365 | 140400 | 39, 22, 29 |
| 15 | NEO1 | neogenin 1 | 067141 | 159322 | 138622 | 29, 11, 16 |
| 15 | NGRN | neugrin, neurite outgrowth associated | 182768 | 261147 | 275674 | 28, 18, 9 |
| 15 | NEDD4 | neural precursor cell expressed, developmentally down-regulated 4, | 069869 | 166450 | 181827 | 4, 45, 19 |
| | | E3 ubiquitin protein ligase | | | | |
| 15 | NRG4 | neuregulin 4 | 169752 | 167196 | 169758 | |
| 15 | NMB | neuromedin B | 197696 | 177082 | 140612 | 40, 13, 17 |
| 15 | NPTN | neuroplastin | 156642 | 183324 | 103855 | 31, 13, 26 |
| 15 | NTRK3 | neurotrophic receptor tyrosine kinase 3 | 140538 | 166748 | 259494 | |
| 15 | NIPA1 | non imprinted in Prader-Willi/Angelman syndrome 1 | 170113 | 277865 | 140157 | 9, 36, 8 |
| 15 | NIPA2 | non imprinted in Prader-Willi/Angelman syndrome 2 | 140157 | 170113 | 273749 | 11, 2, 28 |
| 15 | NOP10 | NOP10 ribonucleoprotein | 182117 | 140199 | 184507 | 15, 7, 2 |
| 15 | NSMCE3 | NSE3 homolog, SMC5-SMC6 complex component | 185115 | 104059 | 104067 | 29, 2, 13 |
| 15 | NPAP1 | nuclear pore associated protein 1 | 185823 | 182636 | 128739 | 27, 6, 38 |
| 15 | NR2E3 | nuclear receptor subfamily 2 group E member 3 | 278570 | 225362 | 066933 | 25, 14, 27 |
| 15 | NR2F2 | nuclear receptor subfamily 2 group F member 2 | 185551 | 140563 | 185594 | 11, 12, 1 |
| 15 | NUSAP1 | nucleolar and spindle associated protein 1 | 137804 | 104147 | 137806 | 19, 13, 39 |
| 15 | NUTM1 | NUT midline carcinoma family member 1 | 184507 | 182117 | 176454 | 38, 8, |
| 15 | OCA2 | OCA2 melanosomal transmembrane protein | 104044 | 182256 | 128731 | 35, 32, 38 |
| 15 | OR4F15 | olfactory receptor family 4 subfamily F member 15 | 182854 | 184140 | 177693 | |
| 15 | OR4F4 | olfactory receptor family 4 subfamily F member 4 | 177693 | 182854 | 279084 | |
| 15 | OR4F6 | olfactory receptor family 4 subfamily F member 6 | 184140 | 185418 | 182854 | |
| 15 | OR4M2 | olfactory receptor family 4 subfamily M member 2 | 274102 | 233917 | 183706 | |
| 15 | OR4N4 | olfactory receptor family 4 subfamily N member 4 | 183706 | 274102 | 270505 | 38, 18, 8 |
| 15 | ONECUT1 | one cut homeobox 1 | 169856 | 047346 | 166415 | 6, 14, 20 |
| 15 | OIP5 | Opa interacting protein 5 | 104147 | 187446 | 137804 | 22, 37, 4 |
| 15 | OAZ2 | ornithine decarboxylase antizyme 2 | 180304 | 180357 | 166831 | 43, 41, 9 |
| 15 | OTUD7A | OTU deubiquitinase 7A | 169918 | 169926 | 175344 | 38, 8, 17 |
| 15 | ODF3L1 | outer dense fiber of sperm tails 3 like 1 | 182950 | 173546 | 140367 | 38, 20, 8 |
| 15 | PAK6 | p21 (RAC1) activated kinase 6 | 137843 | 259288 | 137841 | 38, 8, 42 |
| 15 | PATL2 | PAT1 homolog 2 | 229474 | 104133 | 166710 | 39, 5, 22 |
| 15 | PPIB | peptidylprolyl isomerase B | 166794 | 157734 | 169118 | 4, 37, 2 |
| 15 | PLIN1 | perilipin 1 | 166819 | 166813 | 166821 | 1, 26, 15 |
| 15 | PEX11A | peroxisomal biogenesis factor 11 alpha | 166821 | 166819 | 140527 | 1, 23, 17 |
| 15 | PIGB | phosphatidylinositol glycan anchor biosynthesis class B | 069943 | 225973 | 260916 | 13, 43, 4 |
| 15 | PDE8A | phosphodiesterase 8A | 073417 | 156222 | 170776 | 4, 18, 11 |
| 15 | PLA2G4B | phospholipase A2 group IVB | 243708 | 168970 | 137877 | |
| 15 | PLA2G4D | phospholipase A2 group IVD | 159337 | 188089 | 168907 | 33, 35, 8 |
| 15 | PLA2G4E | phospholipase A2 group IVE | 188089 | 103966 | 159337 | 4, 24, 39 |
| 15 | PLA2G4F | phospholipase A2 group IVF | 168907 | 159337 | 166887 | 24, 30, 42 |
| 15 | PLCB2 | phospholipase C beta 2 | 137841 | 137843 | 230778 | 7, 5, 22 |
| 15 | PPCDC | phosphopantothenoylcysteine decarboxylase | 138621 | 198794 | 167173 | |
| 15 | PIF1 | PIF1 5′-to-3′ DNA helicase | 140451 | 166831 | 241839 | 22, 27, 12 |
| 15 | PIGBOS1 | PIGB opposite strand 1 | 225973 | 069974 | 069943 | |
| 15 | PGBD4 | piggyBac transposable element derived 4 | 182405 | 134153 | 134152 | 10, 44, 38 |
| 15 | PLEKHO2 | pleckstrin homology domain containing O2 | 241839 | 140451 | 166839 | 36, 1, 35 |
| 15 | PARP16 | poly(ADP-ribose) polymerase family member 16 | 138617 | 138615 | 174498 | 1, 22, 23 |
| 15 | PARP6 | poly(ADP-ribose) polymerase family member 6 | 137817 | 067225 | 273025 | 18, 1, 38 |
| 15 | POTEB | POTE ankyrin domain family member B | 233917 | 278263 | 274102 | |
| 15 | POTEB2 | POTE ankyrin domain family member B2 | 230031 | 277322 | 270824 | |
| 15 | POTEB3 | POTE ankyrin domain family member B3 | 278522 | 270185 | 182974 | |
| 15 | PAQR5 | progestin and adipoQ receptor family member 5 | 137819 | 138604 | 137807 | 31, 29, 9 |
| 15 | PDCD7 | programmed cell death 7 | 090470 | 246922 | 166855 | 31, 18, 4 |
| 15 | PHGR1 | proline, histidine and glycine rich 1 | 233041 | 188549 | 140323 | 16, 37, |
| 15 | PSTPIP1 | proline-serine-threonine phosphatase interacting protein 1 | 140368 | 117906 | 140391 | 36, 5, 39 |
| 15 | PML | promyelocytic leukemia | 140464 | 067221 | 159289 | 34, 40, 22 |
| 15 | PCSK6 | proprotein convertase subtilisin/kexin type 6 | 140479 | 131876 | 184277 | 19, 9, 38 |
| 15 | PSMA4 | proteasome subunit alpha 4 | 041357 | 188266 | 169684 | 4, 34, 7 |
| 15 | PDIA3 | protein disulfide isomerase family A member 3 | 167004 | 223572 | 128886 | 13, 18, 12 |
| 15 | PIAS1 | protein inhibitor of activated STAT 1 | 033800 | 188779 | 260007 | 11, 28, 7 |
| 15 | PPP1R14D | protein phosphatase 1 regulatory inhibitor subunit 14D | 166143 | 166140 | 166145 | 16, 17, 44 |
| 15 | PRC1 | protein regulator of cytokinesis 1 | 198901 | 166965 | 184056 | 19, 39, 18 |
| 15 | PTPN9 | protein tyrosine phosphatase, non-receptor type 9 | 169410 | 169375 | 169371 | 34, 31, 20 |
| 15 | PRTG | protogenin | 166450 | 171016 | 069869 | 12, 38, 18 |
| 15 | PEAK1 | pseudopodium enriched atypical kinase 1 | 173517 | 140391 | 140382 | 11, 7, 15 |
| 15 | PYGO1 | pygopus family PHD finger 1 | 171016 | 256061 | 166450 | 40, 9, 12 |
| 15 | PGPEP1L | pyroglutamyl-peptidase l-like | 183571 | 140443 | 182253 | 38, |
| 15 | PKM | pyruvate kinase, muscle | 067225 | 175318 | 137817 | 21, 34, 35 |
| 15 | RAB11A | RAB11 A, member RAS oncogene family | 103769 | 174485 | 157890 | 4, 45, 11 |
| 15 | RAB27A | RAB27A, member RAS oncogene family | 069974 | 137876 | 225973 | 34, 35, 7 |
| 15 | RAB8B | RAB8B, member RAS oncogene family | 166128 | 185088 | 138613 | 45, 25, 7 |
| 15 | RAD51 | RAD51 recombinase | 051180 | 279084 | 137824 | 7, 2, 39 |
| 15 | RORA | RAR related orphan receptor A | 069667 | 128915 | 129003 | |
| 15 | RASGRP1 | RAS guanyl releasing protein 1 | 172575 | 171262 | 175779 | 22, 36, 39 |
| 15 | RHOV | ras homolog family member V | 104140 | 166145 | 104142 | 9, 4, 32 |
| 15 | RASL12 | RAS like family 12 | 103710 | 186198 | 234438 | 26, 33, 20 |
| 15 | RASGRF1 | Ras protein specific guanine nucleotide releasing factor 1 | 058335 | 103811 | 235711 | 26, 5, 8 |
| 15 | RCCD1 | RCC1 domain containing 1 | 166965 | 140553 | 198901 | 9, 29, 1 |
| 15 | REC114 | REC114 meiotic recombination protein | 183324 | 138622 | 156642 | |
| 15 | RMDN3 | regulator of microtubule dynamics 3 | 137824 | 051180 | 137880 | 34, 25, 27 |
| 15 | RFX7 | regulatory factor X7 | 181827 | 069869 | 151575 | 34, 26, 11 |
| 15 | RGMA | repulsive guidance molecule family member a | 182175 | 173575 | 140563 | 24, 25, 38 |
| 15 | RCN2 | reticulocalbin 2 | 117906 | 140386 | 140368 | 11, 4, 29 |
| 15 | RLBP1 | retinaldehyde binding protein 1 | 140522 | 140526 | 140525 | 14, 10, 35 |
| 15 | RHCG | Rh family C glycoprotein | 140519 | 140521 | 140534 | 13, 24, 18 |
| 15 | ARHGAP11A | Rho GTPase activating protein 11A | 198826 | 232653 | 166922 | |
| 15 | ARHGAP11B | Rho GTPase activating protein 11B | 187951 | 261794 | 198690 | |
| 15 | RPP25 | ribonuclease P/MRP subunit p25 | 178718 | 178741 | 198794 | 29, 9, 26 |
| 15 | RSL24D1 | ribosomal L24 domain containing 1 | 137876 | 137766 | 069974 | 34, 7, 4 |
| 15 | RPL4 | ribosomal protein L4 | 174444 | 174446 | 174442 | |
| 15 | RPLP1 | ribosomal protein lateral stalk subunit P1 | 137818 | 137807 | 140332 | 43, 7, 25 |
| 15 | RPS17 | ribosomal protein S17 | 182774 | 197978 | 260836 | |
| 15 | RPS27L | ribosomal protein S27 like | 185088 | 103642 | 166128 | 29, 24, 7 |
| 15 | RNF111 | ring finger protein 111 | 157450 | 128923 | 137776 | 11, 19, 40 |
| 15 | RBPMS2 | RNA binding protein with multiple splicing 2 | 166831 | 180304 | 140451 | 15, 12, 44 |
| 15 | RPAP1 | RNA polymerase II associated protein 1 | 103932 | 062524 | 092445 | 43, 38, 21 |
| 15 | POLR2M | RNA polymerase II subunit M | 255529 | 263155 | 128918 | |
| 15 | RPUSD2 | RNA pseudouridylate synthase domain containing 2 | 166133 | 128891 | 137812 | 9, 21, 45 |
| 15 | RTF1 | RTF1 homolog, Paf1/RNA polymerase II complex component | 137815 | 137806 | 137825 | 29, 25, 22 |
| 15 | RYR3 | ryanodine receptor 3 | 198838 | 248905 | 169857 | 10, 36, 2 |
| 15 | SLTM | SAFB like transcription modulator | 137776 | 157450 | 157456 | 24, 26, 11 |
| 15 | SEC11A | SEC11 homolog A, signal peptidase complex subunit | 140612 | 197696 | 166716 | 18, 26, 31 |
| 15 | SECISBP2L | SECIS binding protein 2 like | 138593 | 255302 | 166200 | 1, 26, 22 |
| 15 | SCG3 | secretogranin III | 104112 | 104093 | 140280 | 28, 8, 31 |
| 15 | SCG5 | secretogranin V | 166922 | 198826 | 166923 | 28, 31, 29 |
| 15 | SCAMP2 | secretary carrier membrane protein 2 | 140497 | 140474 | 178802 | 36, 21, 6 |
| 15 | SCAMP5 | secretory carrier membrane protein 5 | 198794 | 178718 | 138621 | |
| 15 | SELENOS | selenoprotein S | 131871 | 131873 | 131876 | |
| 15 | SEMA4B | semaphorin 4B | 185033 | 182054 | 185043 | |
| 15 | SEMA6D | semaphprin 6D | 137872 | 259752 | 188467 | |
| 15 | SEMA7A | semaphprin 7A (John Milton Hagen blood group) | 138623 | 140459 | 138629 | 32, 8, 2 |
| 15 | SERINC4 | serine incorporator 4 | 184716 | 279808 | 242028 | 3, 31, 25 |
| 15 | SPINT1 | serine peptidase inhibitor, Kunitz type 1 | 166145 | 166143 | 104140 | 32, 16, 29 |
| 15 | SH2D7 | SH2 domain containing 7 | 183476 | 167202 | 136425 | 32, |
| 15 | SH3GL3 | SH3 domain containing GRB2 like 3, endophilin A3 | 140600 | 169594 | 156218 | 26, 8, 38 |
| 15 | SHC4 | SHC adaptor protein 4 | 185634 | 103995 | 255302 | 26, 11, 38 |
| 15 | SPPL2A | signal peptide peptidase like 2A | 138600 | 092439 | 081014 | 10, 11, 29 |
| 15 | SRP14 | signal recognition particle 14 | 140319 | 128829 | 104081 | 43, 41, 34 |
| 15 | SIN3A | SIN3 transcription regulator family member A | 169375 | 140400 | 169410 | 34, 7, 24 |
| 15 | SKOR1 | SKI family transcriptional corepressor 1 | 188779 | 137764 | 033800 | 22, 20, 38 |
| 15 | SMAD3 | SMAD family member 3 | 166949 | 137834 | 103591 | 34, 15, 1 |
| 15 | SMAD6 | SMAD family member 6 | 137834 | 188501 | 166949 | 27, 29, 20 |
| 15 | SERF2 | small EDRK-rich factor 2 | 140264 | 262560 | 279808 | |
| 15 | SNRPA1 | small nuclear ribonucleoprotein polypeptide A′ | 131876 | 131871 | 140479 | 18, 4, 31 |
| 15 | SNRPN | small nuclear ribonucleoprotein polypeptide N | 128739 | 185823 | 273173 | |
| 15 | SNAPC5 | small nuclear RNA activating complex polypeptide 5 | 174446 | 169032 | 174444 | 29, 43, 21 |
| 15 | SNURF | SNRPN upstream reading frame | 273173 | 128739 | 214265 | |
| 15 | SNUPN | snurportin 1 | 169371 | 169410 | 177971 | 40, 27, 26 |
| 15 | SLC12A1 | splute carrier family 12 member 1 | 074803 | 233932 | 128951 | 17, 29, 25 |
| 15 | SLC12A6 | solute carrier family 12 member 6 | 140199 | 128463 | 182117 | 38, 6, 9 |
| 15 | SLC24A1 | solute carrier family 24 member 1 | 074621 | 138614 | 174485 | 14, 29, 4 |
| 15 | SLC24A5 | solute carrier family 24 member 5 | 188467 | 137872 | 104177 | 35, 45, 28 |
| 15 | SLC27A2 | solute carrier family 27 member 2 | 140284 | 104043 | 140287 | 17, 13, 32 |
| 15 | SLC28A1 | solute carrier family 28 member 1 | 156222 | 136383 | 073417 | 17, 22, 19 |
| 15 | SLC28A2 | solute carrier family 28 member 2 | 137860 | 138606 | 171766 | 17, 10, 16 |
| 15 | SLC30A4 | solute carrier family 30 member 4 | 104154 | 166920 | 104164 | 22, 21, 38 |
| 15 | SLC51B | solute carrier family 51 beta subunit | 186198 | 103707 | 103710 | 17, 16, 38 |
| 15 | SLCO3A1 | solute carrier organic anion transporter family member 3A1 | 176463 | 185518 | 140557 | 38, 26, 22 |
| 15 | SORD | sorbitol dehydrogenase | 140263 | 167014 | 140279 | 33, 40, 26 |
| 15 | SNX1 | sorting nexin 1 | 028528 | 166797 | 157734 | 40, 23, 1 |
| 15 | SNX22 | sorting nexin 22 | 157734 | 028528 | 166794 | 16, 40, 18 |
| 15 | SNX33 | sorting nexin 33 | 173548 | 177971 | 173546 | 1, 4, 34 |
| 15 | SPG11 | spastic paraplegia 11 (autosomal recessive) | 104133 | 104131 | 229474 | 30, 2, 40 |
| 15 | SPG21 | spastic paraplegia 21 (autosomal recessive, Mast syndrome) | 090487 | 166839 | 103707 | 40, 18, 31 |
| 15 | SPTBN5 | spectrin beta, non-erythrocytic 5 | 137877 | 243708 | 103966 | 14, 15, 42 |
| 15 | SPESP1 | sperm equatorial segment protein 1 | 258484 | 140350 | 255346 | |
| 15 | SPATA5L1 | spermatogenesis associated 5 like 1 | 171763 | 171766 | 166920 | 9, 24, 4 |
| 15 | SPATA8 | spermatogenesis associated 8 | 185594 | 185551 | 140450 | 38, 8, |
| 15 | SCAPER | S-phase cyclin A associated protein in the ER | 140386 | 159556 | 117906 | 6, 10, 14 |
| 15 | SPRED1 | sprouty related EVH1 domain containing 1 | 166068 | 166069 | 171262 | 11, 42, 30 |
| 15 | SHF | Src homology 2 domain containing F | 138606 | 137857 | 137860 | 26, 14, 4 |
| 15 | ST20-MTHFS | ST20-MTHFS readthrough | 259332 | 136371 | 180953 | |
| 15 | ST8SIA2 | ST8 alpha-N-acetyl-neuraminide alpha-2,8-sialyltransferase 2 | 140557 | 176463 | 185442 | 18, 8, 14 |
| 15 | SAXO2 | stabilizer of axonemal microtubules 2 | 188659 | 140598 | 278662 | 42, 40, 22 |
| 15 | STARD5 | StAR related lipid transfer domain containing 5 | 172345 | 172349 | 188869 | 34, 29, 32 |
| 15 | STARD9 | StAR related lipid transfer domain containing 9 | 159433 | 137814 | 140326 | 1, 18, 26 |
| 15 | STRC | stereocilin | 242866 | 237289 | 166762 | 37, 39, 8 |
| 15 | STRA6 | stimulated by retinoic acid 6 | 137868 | 129009 | 140481 | 32, 40, 38 |
| 15 | STOML1 | stomatin like 1 | 067221 | 129038 | 140464 | 4, 8, 42 |
| 15 | SQRDL | sulfide quinone reductase-like (yeast) | 137767 | 260170 | 259752 | 16, 5, 13 |
| 15 | SENP8 | SUMO/sentrin peptidase family member, NEDD8 specific | 166192 | 066933 | 175318 | 9, 30, 2 |
| 15 | ST20 | suppressor of tumorigenicity 20 | 180953 | 259332 | 140379 | 10, 22, 15 |
| 15 | SV2B | synaptic vesicle glycoprotein 2B | 185518 | 184056 | 176463 | 26, 14, 8 |
| 15 | SNAP23 | synaptosome associated protein 23 | 092531 | 103994 | 180979 | 45, 5, 36 |
| 15 | SYNM | synemin | 182253 | 183571 | 103852 | 40, 26, 16 |
| 15 | TLN2 | talin 2 | 171914 | 205502 | 140416 | 14, 15, 3 |
| 15 | TTBK2 | tau tubulin kinase 2 | 128881 | 140326 | 159459 | 9, 22, 38 |
| 15 | TBC1D21 | TBC1 domain family member 21 | 167139 | 205363 | 129038 | 38, 8, |
| 15 | TBC1D2B | TBC1 domain family member 2B | 167202 | 169783 | 183476 | 39, 24, 4 |
| 15 | TERB2 | telomere repeat binding bouquet formation protein 2 | 167014 | 185880 | 140263 | 38, |
| 15 | TEX9 | testis expressed 9 | 151575 | 181827 | 138587 | |
| 15 | TSPAN3 | tetraspanin 3 | 140391 | 140368 | 173517 | 16, 8, 35 |
| 15 | TTC23 | tetratricopeptide repeat domain 23 | 103852 | 182253 | 168904 | 24, 18, 1 |
| 15 | THAP10 | THAP domain containing 10 | 129028 | 137821 | 187720 | 4, 13, 8 |
| 15 | TARSL2 | threonyl-tRNA synthetase like 2 | 185418 | 184277 | 184140 | 31, 9, 6 |
| 15 | THBS1 | thrombospondin 1 | 137801 | 175779 | 150667 | 13, 45, 6 |
| 15 | THSD4 | thrombospondin type 1 domain containing 4 | 187720 | 129028 | 225362 | 42, 26, 23 |
| 15 | TRIP4 | thyroid hormone receptor interactor 4 | 103671 | 166803 | 180357 | 13, 10, 11 |
| 15 | TJP1 | tight junction protein 1 | 104067 | 185115 | 179938 | 1, 24, 26 |
| 15 | TIPIN | TIMELESS interacting protein | 075131 | 166938 | 169032 | 4, 43, 2 |
| 15 | TM2D3 | TM2 domain containing 3 | 184277 | 140479 | 185418 | |
| 15 | TNFAIP8L3 | TNF alpha induced protein 8 like 3 | 183578 | 081014 | 137869 | 34, 24, 38 |
| 15 | TICRR | TOPBP1 interacting checkpoint and replication regulator | 140534 | 140519 | 166813 | 34, 3, 18 |
| 15 | TCF12 | transcription factor 12 | 140262 | 137871 | 128849 | |
| 15 | TLE3 | transducin like enhancer of split 3 | 140332 | 137818 | 137831 | 22, 40, 9 |
| 15 | TGM5 | transglutaminase 5 | 104055 | 166946 | 159495 | 24, 5, 39 |
| 15 | TGM7 | transglutaminase 7 | 159495 | 104055 | 168806 | 15, 38, |
| 15 | TRPM1 | transient receptor potential cation channel subfamily M member 1 | 134160 | 166912 | 169926 | 35, 14, 38 |
| 15 | TRPM7 | transient receptor potential cation channel subfamily M member 7 | 092439 | 170236 | 138600 | 13, 31, 30 |
| 15 | TM6SF1 | transmembrane 6 superfamily member 1 | 136404 | 064726 | 166503 | 45, 5, 37 |
| 15 | TMCO5A | transmembrane and coiled-coil domains 5A | 166069 | 134138 | 166068 | 38, 30, 8 |
| 15 | TMC3 | transmembrane channel like 3 | 188869 | 172345 | 183496 | 29, 14, 20 |
| 15 | TMED3 | transmembrane p24 trafficking protein 3 | 166557 | 235711 | 169330 | 9, 35, 28 |
| 15 | TMEM202 | transmembrane protein 202 | 187806 | 213614 | 166233 | 38, 10, |
| 15 | TMEM266 | transmembrane protein 266 | 169758 | 169752 | 140374 | 32, 36, 10 |
| 15 | TMEM62 | transmembrane protein 62 | 137842 | 166947 | 166946 | 22, 16, 1 |
| 15 | TMEM87A | transmembrane protein 87A | 103978 | 166887 | 214013 | 13, 30, 42 |
| 15 | TRIM69 | tripartite motif containing 69 | 185880 | 166710 | 167014 | 11, 38, 37 |
| 15 | TMOD2 | tropomodulin 2 | 128872 | 140280 | 138594 | |
| 15 | TMOD3 | tropomodulin 3 | 138594 | 128872 | 166477 | 37, 38, 20 |
| 15 | TPM1 | tropomyosin 1 (alpha) | 140416 | 171914 | 103642 | |
| 15 | TUBGCP4 | tubulin gamma complex associated protein 4 | 137822 | 140265 | 067369 | 26, 39, 31 |
| 15 | TUBGCP5 | tubulin gamma complex associated protein 5 | 275835 | 273749 | 273976 | 42, 9, 25 |
| 15 | TP53BP1 | tumor protein p53 binding protein 1 | 067369 | 137822 | 166963 | 23, 18, 1 |
| 15 | TYRO3 | TYRO3 protein tyrosine kinase | 092445 | 103932 | 174197 | 26, 27, 1 |
| 15 | UBAP1L | ubiquitin associated protein 1 like | 246922 | 234438 | 090470 | 1, 14, 35 |
| 15 | UBE2Q2 | ubiquitin conjugating enzyme E2 Q2 | 140367 | 182950 | 167196 | 34, 29, 44 |
| 15 | UBE2Q2L | ubiquitin conjugating enzyme E2 Q2 like | 259511 | 156218 | 184206 | |
| 15 | UBL7 | ubiquitin like 7 | 138629 | 138623 | 179361 | 35, 21, 9 |
| 15 | UBR1 | ubiquitin protein ligase E3 component n-recognin 1 | 159459 | 128881 | 166947 | 1, 26, 33 |
| 15 | UBE3A | ubiquitin protein ligase E3A | 114062 | 279735 | 206190 | 22, 38, |
| 15 | USP3 | ubiquitin specific peptidase 3 | 140455 | 074410 | 197361 | 1, 11, 39 |
| 15 | USP50 | ubiquitin specific peptidase 50 | 170236 | 138592 | 092439 | 38, 5, |
| 15 | USP8 | ubiquitin specific peptidase 8 | 138592 | 104064 | 170236 | 11, 34, 4 |
| 15 | UNC13C | unc-13 homolog C | 137766 | 166415 | 137876 | 35, 14, 8 |
| 15 | UNC45A | unc-45 myosin chaperone A | 140553 | 184508 | 166965 | 43, 24, 39 |
| 15 | ULK3 | unc-51 like kinase 3 | 140474 | 213578 | 140497 | 31, 2, 9 |
| 15 | UACA | uveal autoantigen with coiled-coil domains and ankyrin repeats | 137831 | 140332 | 166173 | 1, 45, 43 |
| 15 | VPS13C | vacuolar protein sorting 13 homolog C | 129003 | 069667 | 198535 | 22, 42, 26 |
| 15 | VWA9 | Von Willebrand factor A domain containing 9 | 138614 | 074696 | 074621 | 45, 9, 17 |
| 15 | VPS18 | VPS18, CORVET/HOPS core subunit | 104142 | 104140 | 128917 | 21, 7, 22 |
| 15 | VPS33B | VPS33B, late endosome and lysosome associated | 184056 | 198901 | 185518 | 9, 45, 21 |
| 15 | VPS39 | VPS39, HOPS complex subunit | 166887 | 168907 | 103978 | 4, 41, 22 |
| 15 | WHAMM | WAS protein homolog associated with actin, golgi membranes and microtubules | 156232 | 186628 | 103942 | 4, 39, 6 |
| 15 | WDR61 | WD repeat domain 61 | 140395 | 140403 | 166426 | 34, 43, 38 |
| 15 | WDR72 | WD repeat domain 72 | 166415 | 169856 | 137766 | |
| 15 | WDR73 | WD repeat domain 73 | 177082 | 176371 | 197696 | 36, 41, 44 |
| 15 | WDR76 | WD repeat domain 76 | 092470 | 140259 | 171877 | 13, 22, 9 |
| 15 | WDR93 | WD repeat domain 93 | 140527 | 166821 | 166823 | 10, 38, 30 |
| 15 | ZFAND6 | zinc finger AN 1-type containing 6 | 086666 | 140379 | 103876 | |
| 15 | ZSCAN2 | zinc finger and SCAN domain containing 2 | 176371 | 184206 | 177082 | 26, 42, 39 |
| 15 | ZSCAN29 | zinc finger and SCAN domain containing 29 | 140265 | 168803 | 137822 | 21, 40, 22 |
| 15 | ZFYVE19 | zinc finger FYVE-type containing 19 | 166140 | 188277 | 166143 | 9, 34, 27 |
| 15 | ZNF106 | zinc finger protein 106 | 103994 | 092529 | 092531 | 25, 1, 15 |
| 15 | ZNF280D | zinc finger protein 280D | 137871 | 138587 | 140262 | |
| 15 | ZNF592 | zinc finger protein 592 | 166716 | 140612 | 136383 | 41, 22, 40 |
| 15 | ZNF609 | zinc finger protein 609 | 180357 | 103671 | 180304 | |
| 15 | ZNF710 | zinc finger protein 710 | 140548 | 242498 | 182054 | 28, 16, 26 |
| 15 | ZNF770 | zinc finger protein 770 | 198146 | 021776 | 255192 | 31, 17, 4 |
| 15 | ZNF774 | zinc finger protein 774 | 196391 | 275674 | 140575 | 29, 2, 24 |
| 15 | ZWILCH | zwilch kinetochore protein | 174442 | 174444 | 188501 | 38, 35, 43 |
| 16 | DECR2 | 2,4-dienoyl-CoA reductase 2 | 242612 | 103202 | 090565 | 13, 16, |
| 16 | OGFOD1 | 2-oxoglutarate and iron dependent oxygenase domain containing 1 | 087263 | 167005 | 125124 | 36, 7, 25 |
| 16 | PDPK1 | 3-phosphoinositide dependent protein kinase 1 | 140992 | 205923 | 167977 | |
| 16 | ABAT | 4-aminobutyrate aminotransferase | 183044 | 067365 | 184857 | |
| 16 | ACD | ACD, shelterin complex subunit and telomerase recruitment factor | 102977 | 159753 | 102981 | 22, 34, 9 |
| 16 | ATF7IP2 | activating transcription factor 7 interacting protein 2 | 166669 | 183454 | 213853 | |
| 16 | ACSF3 | acyl-CoA synthetase family member 3 | 176715 | 129993 | 129910 | |
| 16 | ACSM1 | acyl-CoA synthetase medium-chain family member 1 | 166743 | 005187 | 066654 | 4, 40, 33 |
| 16 | ACSM2A | acyl-CoA synthetase medium-chain family member 2A | 183747 | 183549 | 066813 | 17, 19, 23 |
| 16 | ACSM2B | acyl-CoA synthetase medium-chain family member 2B | 066813 | 183747 | 005187 | |
| 16 | ACSM3 | acyl-CoA synthetase medium-chain family member 3 | 005187 | 066813 | 166743 | 7, 17, 4 |
| 16 | ACSM5 | acyl-CoA synthetase medium-chain family member 5 | 183549 | 169340 | 183747 | 19, 17, 2 |
| 16 | ADAMTS18 | ADAM metallopeptidase with thrombospondin type 1 motif 18 | 140873 | 205078 | 140876 | 14, 20, 32 |
| 16 | AP1G1 | adaptor related protein complex 1 gamma 1 subunit | 166747 | 040199 | 224470 | |
| 16 | APRT | adenine phosphoribosyltransferase | 198931 | 167513 | 141012 | 7, 35, 33 |
| 16 | ADAD2 | adenosine deaminase domain containing 2 | 140955 | 103168 | 168418 | 38, 14, 40 |
| 16 | ADAT1 | adenosine deaminase, tRNA specific 1 | 065457 | 034713 | 065427 | 43, 24, 9 |
| 16 | ADCY7 | adenylate cyclase 7 | 121281 | 121274 | 166164 | 22, 7, 32 |
| 16 | ADCY9 | adenylate cyclase 9 | 162104 | 005339 | 185739 | 26, 11, 13 |
| 16 | ADGRG1 | adhesion G protein-coupled receptor G1 | 205336 | 159618 | 182885 | 40, 42, 38 |
| 16 | ADGRG3 | adhesion G protein-coupled receptor G3 | 182885 | 205336 | 159625 | 7, 1, 36 |
| 16 | ADGRG5 | adhesipn G prptein-cpupled receptor G5 | 159618 | 135736 | 205336 | 22, 7, 41 |
| 16 | ARL2BP | ADP ribosylation factor like GTPase 2 binding protein | 102931 | 159579 | 102934 | 43, 2, 1 |
| 16 | ARL6IP1 | ADP ribosylation factor like GTPase 6 interacting protein 1 | 170540 | 260342 | 157106 | 8, 4, 45 |
| 16 | AGRP | agouti related neuropeptide | 159723 | 159720 | 039523 | 10, 17, 22 |
| 16 | AKTIP | AKT interacting protein | 166971 | 103479 | 103494 | 45, 11, 39 |
| 16 | AARS | alanyl-tRNA synthetase | 090861 | 223496 | 157349 | 21, 9, 40 |
| 16 | ALDOA | aldolase, fructose-bisphosphate A | 149925 | 149926 | 149923 | 30, 18, 25 |
| 16 | ALG1 | ALG1, chitobiosyldiphosphodolichol beta-mannosyltransferase | 033011 | 103174 | 153446 | 43, 2, 9 |
| 16 | AHSP | alpha hemoglobin stabilizing protein | 169877 | 140688 | 197302 | 5, 36, 7 |
| 16 | AMDHD2 | amidohydrolase domain containing 2 | 162066 | 259784 | 205923 | 29, 37, 14 |
| 16 | ANKS3 | ankyrin repeat and sterile alpha motif domain containing 3 | 168096 | 168101 | 166246 | 13, 34, 32 |
| 16 | ANKS4B | ankyrin repeat and sterile alpha motif domain containing 4B | 175311 | 103310 | 103316 | 16, 19, 17 |
| 16 | ANKRD11 | ankyrin repeat domain 11 | 167522 | 170100 | 197912 | |
| 16 | APOBR | apolipoprotein B receptor | 184730 | 283220 | 197272 | 5, 4, 2 |
| 16 | AQP8 | aquaporin 8 | 103375 | 205629 | 155592 | 10, 16, 28 |
| 16 | ARMC5 | armadillo repeat containing 5 | 140691 | 176723 | 140682 | 7, 26, 39 |
| 16 | ASPHD1 | aspartate beta-hydroxylase domain containing 1 | 174939 | 174938 | 174943 | 26, 28, 35 |
| 16 | ATXN1L | ataxin 1 like | 224470 | 166747 | 182149 | 17, 1, 14 |
| 16 | ATXN2L | ataxin 2 like | 168488 | 196993 | 178952 | 20, |
| 16 | ATMIN | ATM interactor | 166454 | 166451 | 166455 | 29, 22, 44 |
| 16 | ABCA3 | ATP binding cassette subfamily A member 3 | 167972 | 279473 | 162063 | 14, 1, 3 |
| 16 | ABCC1 | ATP binding cassette subfamily C member 1 | 103222 | 133393 | 091262 | 7, 30, 9 |
| 16 | ABCC11 | ATP binding cassette subfamily C member 11 | 121270 | 140798 | 102910 | 23, 38, 33 |
| 16 | ABCC12 | ATP binding cassette subfamily C member 12 | 140798 | 102893 | 121270 | 7, 38, 19 |
| 16 | ABCC6 | ATP binding cassette subfamily C member 6 | 091262 | 103222 | 103226 | 17, 3, 19 |
| 16 | ATP6V0C | ATPase H+ transporting V0 subunit c | 185883 | 260272 | 259784 | 37, 26, 27 |
| 16 | ATP6V0D1 | ATPase H+ transporting V0 subunit d1 | 159720 | 176387 | 159723 | 43, 18, 41 |
| 16 | ATP2A1 | ATPase sarcoplasmic/endoplasmic reticulum Ca2+ transporting 1 | 196296 | 178188 | 177548 | 25, 18, 24 |
| 16 | ATP2C2 | ATPase secretary pathway Ca2+ transporting 2 | 064270 | 103175 | 140950 | |
| 16 | AMFR | autocrine motility factor receptor | 159461 | 087258 | 167005 | 5, 9, 30 |
| 16 | AXIN1 | axin 1 | 103126 | 185615 | 086504 | 9, 40, 21 |
| 16 | BAIAP3 | BAI1 associated protein 3 | 007516 | 103275 | 007520 | 8, 31, 42 |
| 16 | BBS2 | Bardet-Biedl syndrome 2 | 125124 | 087263 | 102891 | 31, 2, 26 |
| 16 | BCAR1 | BCAR1, Cas family scaffolding protein | 050820 | 168925 | 153774 | 3, 6, 26 |
| 16 | BCL7C | BCL tumor suppressor 7C | 099385 | 102870 | 150281 | 5, |
| 16 | BCO1 | beta-carotene oxygenase 1 | 135697 | 279362 | 261609 | 14, 17, 16 |
| 16 | BICDL2 | BICD family like cargo adapter 2 | 162069 | 131652 | 008516 | 27, 13, 37 |
| 16 | BFAR | bifunctional apoptosis regulator | 103429 | 140694 | 069764 | 35, 40, 11 |
| 16 | BOLA2 | bolA family member 2 | 183336 | 254206 | 261740 | |
| 16 | BOLA2B | bolA family member 2B | 169627 | 102879 | 132207 | |
| 16 | BEAN1 | brain expressed, associated with NEDD4, 1 | 166546 | 179776 | 260851 | |
| 16 | BCKDK | branched chain ketoacid dehydrogenase kinase | 103507 | 167397 | 103510 | 34, 40, 2 |
| 16 | BRICD5 | BRICHOS domain containing 5 | 182685 | 167965 | 184207 | 2, 3, 23 |
| 16 | BRD7 | bromodomain containing 7 | 166164 | 121281 | 140807 | 15, 40, 6 |
| 16 | BANP | BTG3 associated nuclear protein | 172530 | 174990 | 225614 | |
| 16 | C1QTNF8 | C1q and tumor necrosis factor related protein 8 | 184471 | 162009 | 196557 | 10, 16, |
| 16 | CDH1 | cadherin 1 | 039068 | 062038 | 103047 | 23, 18, 37 |
| 16 | CDH11 | cadherin 11 | 140937 | 150394 | 179776 | 18, 11, 42 |
| 16 | CDH13 | cadherin 13 | 140945 | 135698 | 230989 | 10, 42, 44 |
| 16 | CDH15 | cadherin 15 | 129910 | 176715 | 259803 | 25, 15, 32 |
| 16 | CDH16 | cadherin 16 | 166589 | 172840 | 166592 | 17, 40, 25 |
| 16 | CDH3 | cadherin 3 | 062038 | 184939 | 039068 | 42, |
| 16 | CDH5 | cadherin 5 | 179776 | 140937 | 166546 | 32, 45, 40 |
| 16 | CDH8 | cadherin 8 | 150394 | 278499 | 140937 | 26, 10, 12 |
| 16 | CALB2 | calbindin 2 | 172137 | 180917 | 167377 | 1, 26, 31 |
| 16 | CHP2 | calcineurin like EF-hand protein 2 | 166869 | 134398 | 166501 | 16, 24, 17 |
| 16 | CPPED1 | calcineurin like phosphoesterase domain containing 1 | 103381 | 048471 | 237515 | 5, 26, 45 |
| 16 | CARHSP1 | calcium regulated heat stable protein 1 | 153048 | 140650 | 283516 | 38, 29, 1 |
| 16 | CACNG3 | calcium voltage-gated channel auxiliary subunit gamma 3 | 006116 | 166501 | 122257 | 8, 14, 17 |
| 16 | CACNA1H | calcium voltage-gated channel subunit alpha1 H | 196557 | 184471 | 116176 | 28, 29, 33 |
| 16 | CAPN15 | calpain 15 | 103326 | 090565 | 161992 | 34, 3, 35 |
| 16 | CAPNS2 | calpain small subunit 2 | 256812 | 087253 | 103546 | 4, 43, 18 |
| 16 | CMTR2 | cap methyltransferase 2 | 180917 | 157423 | 172137 | |
| 16 | CARMIL2 | capping protein regulator and myosin 1 linker 2 | 159753 | 102974 | 102977 | 22, 41, 39 |
| 16 | CHST4 | carbohydrate sulfotransferase 4 | 140835 | 157429 | 198650 | 4, 42, 25 |
| 16 | CHST5 | carbohydrate sulfotransferase 5 | 135702 | 260092 | 205084 | 12, 38, |
| 16 | CHST6 | carbohydrate sulfotransferase 6 | 183196 | 166822 | 260092 | 31, 42, 18 |
| 16 | CA5A | carbonic anhydrase 5A | 174990 | 103257 | 172530 | 19, |
| 16 | CA7 | carbonic anhydrase 7 | 168748 | 159593 | 172840 | 8, 16, |
| 16 | CES1 | carboxylesterase 1 | 198848 | 103546 | 159398 | 18, 13, 19 |
| 16 | CES2 | carboxylesterase 2 | 172831 | 166595 | 172828 | 21, |
| 16 | CES3 | carboxylesterase 3 | 172828 | 172831 | 172824 | 42, 16, 23 |
| 16 | CES4A | carboxylesterase 4A | 172824 | 172828 | 067955 | 11, 26, 29 |
| 16 | CES5A | carboxylesterase 5A | 159398 | 198848 | 087258 | 38, 39, 8 |
| 16 | CTF1 | cardiotrophin 1 | 150281 | 099385 | 099364 | 26, 14, 3 |
| 16 | CSNK2A2 | casein kinase 2 alpha 2 | 070770 | 070761 | 103021 | 6, 15, 4 |
| 16 | CASKIN1 | CASK interacting protein 1 | 167971 | 131653 | 167965 | 26, 33, 14 |
| 16 | CBFA2T3 | CBFA2/RUNX1 translocation partner 3 | 129993 | 205022 | 176715 | 21, 41, 39 |
| 16 | CCL17 | C-C motif chemokine ligand 17 | 102970 | 006210 | 005194 | 23, |
| 16 | CCL22 | C-C motif chemokine ligand 22 | 102962 | 102934 | 006210 | 30, 5, 39 |
| 16 | CTCF | CCCTC-binding factor | 102974 | 283332 | 159753 | 39, 21, 13 |
| 16 | CNOT1 | CCR4-NOT transcription complex subunit 1 | 125107 | 103037 | 279816 | |
| 16 | CD19 | CD19 molecule | 177455 | 177548 | 176953 | 41, 36, 22 |
| 16 | CD2BP2 | CD2 cytoplasmic tail binding protein 2 | 169217 | 198064 | 169221 | 21, 34, 20 |
| 16 | CDIPT | CDP-diacylglycerol-inositol 3-phosphatidyltransferase | 103502 | 013364 | 174938 | |
| 16 | CDIP1 | cell death inducing p53 target 1 | 089486 | 103415 | 205832 | 8, 26, 14 |
| 16 | CEMP1 | cementum protein 1 | 205923 | 162066 | 140992 | 29, 37, 14 |
| 16 | CENPBD1 | CENPB DNA-binding domain containing 1 | 177946 | 140995 | 003249 | |
| 16 | CCP110 | centriolar coiled-coil protein 110 | 103540 | 006007 | 103544 | 11, 31, 8 |
| 16 | CENPN | centromere protein N | 166451 | 103121 | 166454 | 3, 33, 22 |
| 16 | CENPT | centromere protein T | 102901 | 102904 | 168286 | 39, 36, 13 |
| 16 | CDR2 | cerebellar degeneration related protein 2 | 140743 | 058600 | 243716 | |
| 16 | CBLN1 | cerebellin 1 precursor | 102924 | 102921 | 166152 | 38, 12, 8 |
| 16 | CHMP1A | charged multivesicular body protein 1A | 131165 | 015413 | 167523 | 9, 21, 38 |
| 16 | CKLF | chemokine like factor | 217555 | 166548 | 254788 | 11, 29, 5 |
| 16 | CLCN7 | chloride voltage-gated channel 7 | 103249 | 197599 | 251692 | 7, 22, 39 |
| 16 | CETP | cholesteryl ester transfer protein | 087237 | 051108 | 140853 | 29, 36, 30 |
| 16 | CDT1 | chromatin licensing and DNA replication factor 1 | 167513 | 103335 | 198931 | 9, 21, 5 |
| 16 | CHD9 | chromodomain helicase DNA binding protein 9 | 177200 | 277639 | 279018 | |
| 16 | CDYL2 | chromodomain Y-like 2 | 166446 | 168589 | 103121 | 32, 23, 33 |
| 16 | C16orf45 | chromosome 16 open reading frame 45 | 166780 | 261130 | 166783 | |
| 16 | C16orf46 | chromosome 16 open reading frame 46 | 166455 | 166454 | 140905 | 11, 10, 42 |
| 16 | C16orf52 | chromosome 16 open reading frame 52 | 185716 | 155714 | 175267 | |
| 16 | C16orf54 | chromosome 16 open reading frame 54 | 185905 | 103485 | 174992 | 36, 5, 30 |
| 16 | C16orf58 | chromosome 16 open reading frame 58 | 140688 | 140675 | 169877 | |
| 16 | C16orf59 | chromosome 16 open reading frame 59 | 162062 | 162063 | 162068 | 39, 5, 26 |
| 16 | C16orf62 | chromosome 16 open reading frame 62 | 103544 | 103540 | 103550 | 24, 40, 39 |
| 16 | C16orf70 | chromosome 16 open reading frame 70 | 125149 | 067955 | 237172 | 26, 31, 16 |
| 16 | C16orf71 | chromosome 16 open reading frame 71 | 166246 | 168096 | 103199 | 38, 42, 27 |
| 16 | C16orf72 | chromosome 16 open reading frame 72 | 182831 | 187555 | 183454 | 34, 29, 22 |
| 16 | C16orf74 | chromosome 16 open reading frame 74 | 154102 | 131153 | 131148 | 34, 29, 32 |
| 16 | C16orf78 | chromosome 16 open reading frame 78 | 166152 | 102924 | 102935 | 38, 8, |
| 16 | C16orf82 | Chromosome 16 open reading frame 82 | 234186 | 182601 | 155666 | 38, 8, |
| 16 | C16orf86 | chromosome 16 open reading frame 86 | 159761 | 124074 | 141098 | 29, 26, 38 |
| 16 | C16orf87 | chromosome 16 open reading frame 87 | 155330 | 140795 | 166123 | 38, 7, 1 |
| 16 | C16orf89 | chromosome 16 open reading frame 89 | 153446 | 033011 | 118894 | 26, 40, 13 |
| 16 | C16orf90 | chromosome 16 open reading frame 90 | 215131 | 122390 | 103351 | 38, 33, 12 |
| 16 | C16orf91 | chromosome 16 open reading frame 91 | 174109 | 059145 | 197599 | 6, 3, 22 |
| 16 | C16orf92 | chromosome 16 open reading frame 92 | 167194 | 149927 | 149926 | 14, 38, |
| 16 | C16orf95 | chromosome 16 open reading frame 95 | 260456 | 176678 | 131152 | 38, |
| 16 | C16orf96 | chromosome 16 open reading frame 96 | 205832 | 089486 | 153443 | 38, 35, |
| 16 | CHTF18 | chromosome transmission fidelity factor 18 | 127586 | 007376 | 127588 | 27, 6, 12 |
| 16 | CHTF8 | chromosome transmission fidelity factor 8 | 168802 | 103044 | 141076 | 13, 3, 21 |
| 16 | CTRL | chymotrypsin like | 141086 | 159792 | 261884 | 4, 28, 22 |
| 16 | CTRB1 | chymotrypsinogen B1 | 168925 | 168928 | 050820 | 28, 4, 36 |
| 16 | CTRB2 | chymotrypsinogen B2 | 168928 | 184517 | 168925 | 28, 4, 36 |
| 16 | CFAP20 | cilia and flagella associated protein 20 | 070761 | 102996 | 070770 | 31, 37, 13 |
| 16 | CMTM1 | CKLF like MARVEL transmembrane domain containing 1 | 089505 | 254788 | 140932 | |
| 16 | CMTM2 | CKLF like MARVEL transmembrane domain containing 2 | 140932 | 089505 | 140931 | 38, 1, 8 |
| 16 | CMTM3 | CKLF like MARVEL transmembrane domain containing 3 | 140931 | 140932 | 183723 | 32, 5, 38 |
| 16 | CMTM4 | CKLF like MARVEL transmembrane domain containing 4 | 183723 | 140931 | 135720 | 29, 40, 16 |
| 16 | CKLF-CMTM1 | CKLF-CMTM1 readthrough | 254788 | 217555 | 089505 | |
| 16 | CIITA | class II major histocompatibility complex transactivator | 179583 | 166676 | 182108 | 22, 21, 1 |
| 16 | CLDN6 | claudin 6 | 184697 | 213937 | 006327 | 12, |
| 16 | CLDN9 | claudin 9 | 213937 | 270168 | 184697 | 31, 20, 16 |
| 16 | CLN3 | CLN3, battenin | 188603 | 233232 | 283220 | |
| 16 | CLN3 | CLN3, battenin | 283220 | 188603 | 184730 | 9, 29, 32 |
| 16 | CLUAP1 | clusterin associated protein 1 | 103351 | 215131 | 167984 | 30, 29, 14 |
| 16 | CMIP | c-Maf inducing protein | 153815 | 261609 | 197943 | 26, 20, 14 |
| 16 | COTL1 | coactosin like F-actin binding protein 1 | 103187 | 140950 | 135686 | 41, 3, 40 |
| 16 | COQ7 | coenzyme Q7, hydroxylase | 167186 | 170537 | 205730 | |
| 16 | COQ9 | coenzyme Q9 | 088682 | 005194 | 102978 | 9, 25, 21 |
| 16 | CCDC102A | coiled-coil domain containing 102A | 135736 | 125170 | 159618 | 1, 18, 9 |
| 16 | CCDC113 | coiled-coil domain containing 113 | 103021 | 070770 | 103023 | 40, 11, 9 |
| 16 | CCDC154 | coiled-coil domain containing 154 | 197599 | 174109 | 103249 | 25, 39, 21 |
| 16 | CCDC189 | coiled-coil domain containing 189 | 196118 | 156873 | 103549 | 39, 37, 22 |
| 16 | CCDC78 | coiled-coil domain containing 78 | 162004 | 103254 | 103253 | 42, 37, 20 |
| 16 | COG4 | component of oligomeric golgi complex 4 | 103051 | 157353 | 189091 | 1, 43, 3 |
| 16 | COG7 | component of oligomeric golgi complex 7 | 168434 | 168447 | 103365 | 9, 34, 4 |
| 16 | COG8 | component of oligomeric golgi complex 8 | 213380 | 132612 | 272617 | 38, 41, 9 |
| 16 | COG8 | component of oligomeric golgi complex 8 | 272617 | 213380 | 258429 | 38, 41, 9 |
| 16 | CNTNAP4 | contactin associated protein like 4 | 152910 | 166848 | 261833 | 8, 38, 25 |
| 16 | CPNE2 | copine 2 | 140848 | 140853 | 172775 | 11, 5, 43 |
| 16 | CPNE7 | copine 7 | 178773 | 167526 | 015413 | 3, 16, 37 |
| 16 | CBFB | core-binding factor beta subunit | 067955 | 172824 | 125149 | 34, 43, 29 |
| 16 | CORO7-PAM16 | CORO7-PAM16 readthrough | 103426 | 217930 | 262246 | |
| 16 | CORO1A | coronin 1A | 102879 | 102882 | 169627 | 41, 39, 21 |
| 16 | CORO7 | coronin 7 | 262246 | 103426 | 168140 | |
| 16 | CRAMP1 | cramped chromatin regulator homolog 1 | 007545 | 131634 | 261732 | 40, 22, 18 |
| 16 | CFDP1 | craniofacial development protein 1 | 153774 | 050820 | 261717 | 31, 30, 34 |
| 16 | CREBBP | CREB binding protein | 005339 | 126602 | 162104 | 18, 23, 22 |
| 16 | CRYM | crystallin mu | 103316 | 175311 | 169246 | 11, 31, 8 |
| 16 | CNEP1R1 | CTD nuclear envelope phosphatase 1 regulatory subunit 1 | 205423 | 102935 | 155393 | 39, 38, |
| 16 | CLEC16A | C-type lectin domain family 16 member A | 038532 | 182108 | 175643 | 38, 39, 21 |
| 16 | CLEC18A | C-type lectin domain family 18 member A | 157322 | 198373 | 279533 | 17, 40, 38 |
| 16 | CLEC18B | C-type lectin domain family 18 member B | 140839 | 196436 | 090863 | |
| 16 | CLEC18C | C-type lectin domain family 18 member C | 157335 | 090857 | 280006 | 17, 38, |
| 16 | CLEC19A | C-type lectin domain family 19 member A | 261210 | 103528 | 103534 | 12, |
| 16 | CLEC3A | C-type lectin domain family 3 member A | 166509 | 171724 | 186153 | |
| 16 | CX3CL1 | C-X3-C motif chemokine ligand 1 | 006210 | 102962 | 102970 | 8, 20, 1 |
| 16 | CMC2 | C-X9-C motif containing 2 | 103121 | 166446 | 166451 | 43, 29, 22 |
| 16 | CNGB1 | cyclic nucleotide gated channel beta 1 | 070729 | 140859 | 159648 | 14, 9, 8 |
| 16 | CDK10 | cyclin dependent kinase 10 | 185324 | 167523 | 158792 | 9, 40, 32 |
| 16 | CCNF | cyclin F | 162063 | 167972 | 162062 | 21, 39, 4 |
| 16 | CYLD | CYLD lysine 63 deubiquitinase | 083799 | 167207 | 103449 | |
| 16 | CRISPLD2 | cysteine rich secretary protein LCCL domain containing 2 | 103196 | 103194 | 153786 | 42, 44, 32 |
| 16 | CYBA | cytochrome b-245 alpha chain | 051523 | 124391 | 167508 | 41, 22, 5 |
| 16 | CYB5B | cytcchrome b5 type B | 103018 | 132604 | 102908 | 2, 9, 21 |
| 16 | COX4I1 | cytechrome c cxidase subunit 4I1 | 131143 | 131148 | 140968 | 43, 29, 41 |
| 16 | COX6A2 | cytcchrome c oxidase subunit 6A2 | 156885 | 156886 | 176723 | 25, 15, 33 |
| 16 | CIAPIN1 | cytokine induced apoptosis inhibitor 1 | 005194 | 102970 | 088682 | 21, 30, 9 |
| 16 | CTU2 | cytosolic thiouridylase subunit 2 | 174177 | 158717 | 103335 | 21, 22, 31 |
| 16 | DCTPP1 | dCTP pyrophosphatase 1 | 179958 | 179965 | 179918 | 1, 3, 9 |
| 16 | DDX19A | DEAD-box helicase 19A | 168872 | 260537 | 157350 | 24, 35, 21 |
| 16 | DDX19B | DEAD-box helicase 19B | 157349 | 090861 | 260537 | 13, 33, 38 |
| 16 | DDX28 | DEAD-box helicase 28 | 182810 | 263201 | 072736 | 7, 3, 37 |
| 16 | DHX38 | DEAH-box helicase 38 | 140829 | 261701 | 118557 | 42, 21, 1 |
| 16 | DCUN1D3 | defective in cullin neddylation 1 domain containing 3 | 188215 | 005189 | 102897 | 1, 3, 5 |
| 16 | DNASE1 | deoxyribonudease 1 | 213918 | 188827 | 126602 | |
| 16 | DNASE1L2 | deoxyribonudease 1 like 2 | 167968 | 167967 | 167969 | 35, 14, 6 |
| 16 | DEXI | Dexi homolog | 182108 | 179583 | 038532 | 36, 34, 29 |
| 16 | DEF8 | differentially expressed in FDCP 8 homolog | 140995 | 258947 | 177946 | 8, 42, 41 |
| 16 | DHODH | dihydroorotate dehydrogenase (quinone) | 102967 | 277481 | 140830 | 3, 31, 40 |
| 16 | DUS2 | dihydrouridine synthase 2 | 167264 | 167261 | 263201 | 21, 3, 9 |
| 16 | DPEP1 | dipeptidase 1 (renal) | 015413 | 178773 | 131165 | 16, 22, 17 |
| 16 | DPEP2 | dipeptidase 2 | 167261 | 141096 | 167264 | 5, 36, 32 |
| 16 | DPEP3 | dipeptidase 3 | 141096 | 124067 | 167261 | 38, 44, 17 |
| 16 | DNAJA2 | DnaJ heat shock protein family (Hsp40) member A2 | 069345 | 166123 | 171208 | 18, 6, 40 |
| 16 | DNAJA3 | DnaJ heat shock protein family (Hsp40) member A3 | 103423 | 168140 | 153406 | 13, 34, 3 |
| 16 | DOK4 | docking protein 4 | 125170 | 102978 | 135736 | 8, 45, 16 |
| 16 | DOC2A | double C2 domain alpha | 149927 | 169592 | 167194 | 38, |
| 16 | DCTN5 | dynactin subunit 5 | 166847 | 083093 | 166851 | 42, 24, 39 |
| 16 | DNAAF1 | dynein axonemal assembly factor 1 | 154099 | 103160 | 103168 | 38, 42, 32 |
| 16 | DNAH3 | dynein axonemal heavy chain 3 | 158486 | 102897 | 011638 | 42, 38, 27 |
| 16 | DYNC1LI2 | dynein cytoplasmic 1 light intermediate chain 2 | 135720 | 183723 | 249961 | 29, 42, 13 |
| 16 | DYNLRB2 | dynein light chain roadblock-type 2 | 168589 | 178573 | 166446 | 38, 30, 17 |
| 16 | DRC7 | dynein regulatory complex subunit 7 | 159625 | 182885 | 140854 | 38, 42, 17 |
| 16 | DBNDD1 | dysbindin domain containing 1 | 003249 | 177946 | 141013 | 33, 4, 8 |
| 16 | E2F4 | E2F transcription factor 4 | 205250 | 179044 | 102890 | 3, 9, 29 |
| 16 | E4F1 | E4F transcription factor 1 | 167967 | 184207 | 167968 | 1, 41, 38 |
| 16 | ERN2 | endoplasmic reticulum to nucleus signaling 2 | 134398 | 166851 | 166869 | 42, 3, 16 |
| 16 | ELMO3 | engulfment and cell motility 3 | 102890 | 205250 | 125122 | 3, 13, 40 |
| 16 | EDC4 | enhancer of mRNA decapping 4 | 038358 | 102898 | 188038 | 26, 18, 39 |
| 16 | ENKD1 | enkurin domain containing 1 | 124074 | 102981 | 159761 | 9, 6, 5 |
| 16 | ECI1 | enoyl-CoA delta isomerase 1 | 167969 | 167968 | 205937 | 28, 14, 20 |
| 16 | EMP2 | epithelial membrane protein 2 | 213853 | 166669 | 153060 | 29, 18, 20 |
| 16 | ESRP2 | epithelial splicing regulatory protein 2 | 103067 | 072736 | 103066 | 43, 18, 38 |
| 16 | EMC8 | ER membrane protein complex subunit 8 | 131148 | 154102 | 131143 | 34, 43, 33 |
| 16 | ERCC4 | ERCC excision repair 4, endonuclease catalytic subunit | 175595 | 237515 | 186260 | 23, 38, 6 |
| 16 | ERI2 | ERI1 exoribonuclease family member 2 | 196678 | 066654 | 005189 | 33, 11, 9 |
| 16 | EME2 | essential meiotic structure-specific endonuclease subunit 2 | 197774 | 074071 | 162032 | 26, 12, 37 |
| 16 | EEF2K | eukaryotic elongation factor 2 kinase | 103319 | 183921 | 058600 | 1, 34, 35 |
| 16 | EEF2KMT | eukaryotic elongation factor 2 lysine methyltransferase | 118894 | 153446 | 078328 | 11, 34, 38 |
| 16 | EIF3C | eukaryotic translation initiation factor 3 subunit C | 184110 | 255524 | 196993 | 39, 43, 21 |
| 16 | EIF3CL | eukaryotic translation initiation factor 3 subunit C-like | 205609 | 198156 | 261832 | 43, 1, 3 |
| 16 | EXOC3L1 | exocyst complex component 3 like 1 | 179044 | 196123 | 205250 | 36, 18, 27 |
| 16 | EXOSC6 | exosome component 6 | 223496 | 280252 | 090861 | |
| 16 | XPO6 | exportin 6 | 169180 | 169181 | 188322 | 43, 9, 21 |
| 16 | FAM173A | family with sequence similarity 173 member A | 103254 | 103260 | 162004 | 34, 6, 20 |
| 16 | FAM192A | family with sequence similarity 192 member A | 172775 | 140848 | 159579 | 9, 3, 6 |
| 16 | FAM234A | family with sequence similarity 234 member A | 167930 | 007392 | 269881 | 37, 9, 33 |
| 16 | FAM57B | family with sequence similarity 57 member B | 149926 | 167194 | 149925 | 38, 22, 8 |
| 16 | FAM65A | family with sequence similarity 65 member A | 039523 | 159723 | 283332 | 43, 40, 26 |
| 16 | FAM92B | family with sequence similarity 92 member B | 153789 | 135709 | 131149 | 42, 10, 20 |
| 16 | FAM96B | family with sequence similarity 96 member B | 166595 | 166592 | 172831 | 28, 34, 35 |
| 16 | FANCA | Fanconi anemia complementation group A | 187741 | 158805 | 204991 | 9, 21, 43 |
| 16 | FA2H | fatty acid 2-hydroxylase | 103089 | 168404 | 103091 | 37, 9, 3 |
| 16 | FBXL16 | F-box and leucine rich repeat protein 16 | 127585 | 127580 | 103260 | 28, 8, 26 |
| 16 | FBXL19 | F-box and leucine rich repeat protein 19 | 099364 | 150281 | 175938 | 12, 2, 28 |
| 16 | FBXL8 | F-box and leucine rich repeat protein 8 | 135722 | 102871 | 265690 | 34, 42, 9 |
| 16 | FBXO31 | F-box protein 31 | 103264 | 131152 | 283277 | 33, 22, 15 |
| 16 | FBXO31 | F-box protein 31 | 283277 | 103264 | 140941 | 33, 22, 15 |
| 16 | FOPNL | FGFR1OP N-terminal like | 133393 | 133392 | 103222 | 45, 13, 22 |
| 16 | FBRS | fibrosin | 156860 | 156858 | 080603 | 34, 41, 28 |
| 16 | FLYWCH2 | FLYWCH family member 2 | 162076 | 005001 | 059122 | 1, 18, 27 |
| 16 | FLYWCH1 | FLYWCH-type zinc finger 1 | 059122 | 162076 | 131650 | 31, 1, 14 |
| 16 | FOXC2 | forkhead box C2 | 176692 | 103248 | 176678 | 11, 45, 12 |
| 16 | FOXF1 | forkhead box F1 | 103241 | 140968 | 103248 | 9, 10, 37 |
| 16 | FOXL1 | forkhead box L1 | 176678 | 176692 | 260456 | 14, |
| 16 | FHOD1 | formin homology 2 domain containing 1 | 135723 | 168701 | 135740 | 34, 7, 40 |
| 16 | FTO | FTO, alpha-ketoglutarate dependent dioxygenase | 140718 | 103494 | 177508 | 9, 18, 8 |
| 16 | FUK | fucokinase | 157353 | 157350 | 103051 | 42, 39, 18 |
| 16 | FAHD1 | fumarylacetoacetate hydrolase domain containing 1 | 180185 | 063854 | 162039 | 23, 2, 11 |
| 16 | FUS | FUS RNA binding protein | 089280 | 178226 | 103490 | 21, 12, 40 |
| 16 | GNAO1 | G protein subunit alpha o1 | 087258 | 159398 | 159461 | 8, 14, 20 |
| 16 | GNG13 | G protein subunit gamma 13 | 127588 | 127586 | 167945 | 14, 33, 8 |
| 16 | GPR139 | G protein-coupled receptor 139 | 180269 | 167191 | 169347 | |
| 16 | GPRC5B | G protein-coupled receptor class C group 5 member B | 167191 | 174628 | 180269 | 14, |
| 16 | GSPT1 | G1 to S phase transition 1 | 103342 | 171490 | 234719 | 9, 40, 33 |
| 16 | GABARAPL2 | GABA type A receptor associated protein like 2 | 034713 | 205084 | 065457 | 31, 5, 8 |
| 16 | GALNS | galactosamine (N-acetyl)-6-sulfatase | 141012 | 198931 | 280675 | 9, 1, 3 |
| 16 | GTF3C1 | general transcription factor IIIC subunit 1 | 077235 | 103522 | 047578 | |
| 16 | GAN | gigaxonin | 261609 | 135697 | 153815 | 13, 23, 24 |
| 16 | GINS2 | GINS complex subunit 2 | 131153 | 131149 | 154102 | 21, 22, 9 |
| 16 | GINS3 | GINS complex subunit 3 | 181938 | 103023 | 103034 | 43, 21, 26 |
| 16 | GLIS2 | GLIS family zinc finger 2 | 126603 | 090447 | 217930 | 1, 28, 34 |
| 16 | GFOD2 | glucose-fructose oxidoreductase domain containing 2 | 141098 | 159761 | 141084 | 41, 13, 9 |
| 16 | GRIN2A | glutamate ionotropic receptor NMDA type subunit 2A | 183454 | 182831 | 166669 | 3, 17, 25 |
| 16 | GOT2 | glutamic-oxaloacetic transaminase 2 | 125166 | 103042 | 278499 | 15, 24, 21 |
| 16 | GPT2 | glutamic-pyruvic transaminase 2 | 166123 | 155330 | 069345 | 1, 11, 33 |
| 16 | EARS2 | glutamyl-tRNA synthetase 2, mitochondrial | 103356 | 103365 | 103353 | 39, 9, 24 |
| 16 | GDE1 | glycerophosphodiester phosphodiesterase 1 | 006007 | 103534 | 103540 | 43, 33, 38 |
| 16 | GDPD3 | glycerophosphodiester phosphodiesterase domain containing 3 | 102886 | 090238 | 102882 | 30, 24, 15 |
| 16 | GCSH | glycine cleavage system protein H | 140905 | 166455 | 166473 | 17, 43, 34 |
| 16 | GP2 | glycoprotein 2 | 169347 | 180269 | 169344 | 4, 28, 19 |
| 16 | GLYR1 | glyoxylate reductase 1 homolog | 140632 | 067836 | 118900 | 22, 15, 38 |
| 16 | GGA2 | golgi associated, gamma adaptin ear containing, ARF binding protein 2 | 103365 | 168434 | 103356 | |
| 16 | GLG1 | golgi glycoprotein 1 | 090863 | 140839 | 168411 | 42, 40, 38 |
| 16 | GAS8 | growth arrest specific 8 | 141013 | 003249 | 283182 | |
| 16 | GFER | growth factor, augmenter of liver regeneration | 127554 | 196408 | 127561 | 34, 6, 14 |
| 16 | GSE1 | Gse1 coiled-coil protein | 131149 | 153789 | 131153 | |
| 16 | GSG1L | GSG1 like | 169181 | 047578 | 169180 | 14, 8, 38 |
| 16 | HP | haptoglobin | 257017 | 140830 | 261701 | 19, 5, 1 |
| 16 | HPR | haptoglobin-related protein | 261701 | 257017 | 140829 | 19, 15, 8 |
| 16 | HEATR3 | HEAT repeat containing 3 | 155393 | 205423 | 121274 | 23, 31, 45 |
| 16 | HSBP1 | heat shock factor binding protein 1 | 230989 | 140945 | 103150 | 29, 15, 5 |
| 16 | HSF4 | heat shock transcription factor 4 | 102878 | 265690 | 140939 | 29, 40, 15 |
| 16 | HN1L | hematological and neurological expressed 1 like | 206053 | 261732 | 138834 | 24, 42, 34 |
| 16 | HMOX2 | heme oxygenase 2 | 103415 | 153406 | 089486 | 21, 29, 1 |
| 16 | HBA1 | hemoglobin subunit alpha 1 | 206172 | 188536 | 086506 | 36, 30, 19 |
| 16 | HBA2 | hemoglobin subunit alpha 2 | 188536 | 206177 | 206172 | 36, 32, 7 |
| 16 | HBM | hemoglobin subunit mu | 206177 | 130656 | 188536 | 19, 22, 10 |
| 16 | HBQ1 | hemoglobin subunit theta 1 | 086506 | 206172 | 007392 | 5, 33, 38 |
| 16 | HBZ | hemoglobin subunit zeta | 130656 | 103148 | 206177 | 36, 39, 15 |
| 16 | HS3ST2 | heparan sulfate-glucosamine 3-sulfotransferase 2 | 122254 | 243716 | 103404 | |
| 16 | HS3ST4 | heparan sulfate-glucosamine 3-sulfotransferase 4 | 182601 | 155592 | 234186 | 20, 14, 6 |
| 16 | HS3ST6 | heparan sulfate-glucosamine 3-sulfotransferase 6 | 162040 | 162039 | 198736 | 15, 14, 33 |
| 16 | HIRIP3 | HIRA interacting protein 3 | 149929 | 149930 | 169592 | 41, 3, 34 |
| 16 | HERPUD1 | homocysteine inducible ER protein with ubiquitin like domain 1 | 051108 | 070915 | 087237 | 41, 29, 37 |
| 16 | HCFC1R1 | host cell factor C1 regulator 1 | 103145 | 006327 | 131652 | 41, 25, 1 |
| 16 | HAS3 | hyaluronan synthase 3 | 103044 | 103047 | 168802 | 24, 40, 4 |
| 16 | HYDIN | HYDIN, axonemal central pair apparatus protein | 157423 | 103043 | 180917 | |
| 16 | HAGH | hydroxyacylglutathione hydrolase | 063854 | 099769 | 180185 | 31, 17, 38 |
| 16 | HAGHL | hydroxyacylglutathione hydrolase-like | 103253 | 162004 | 103245 | |
| 16 | HSD3B7 | hydroxy-delta-5-steroid dehydrogenase, 3 beta- and steroid delta-isomerase 7 | 099377 | 099381 | 099365 | 1, 9, 31 |
| 16 | HSD11B2 | hydroxysteroid 11-beta dehydrogenase 2 | 176387 | 159714 | 159720 | 32, 3, 16 |
| 16 | HSD17B2 | hydroxysteroid 17-beta dehydrogenase 2 | 086696 | 184860 | 135698 | 32, 7, 16 |
| 16 | HSDL1 | hydroxysteroid dehydrogenase like 1 | 103160 | 140943 | 154099 | 8, 42, 38 |
| 16 | IGHV2OR16-5 | Immunoglobulin heavy variable 2/OR16-5 (non-functional) | 259303 | 183632 | 233732 | |
| 16 | IGHV3OR16-10 | Immunoglobulin heavy variable 3/OR16-10 (non-functional) | 233732 | 259303 | 271130 | |
| 16 | IGHV3OR16-12 | Immunoglobulin heavy variable 3/OR16-12 (non-functional) | 270467 | 278848 | 271178 | |
| 16 | IGHV3OR16-13 | Immunoglobulin heavy variable 3/OR16-13 (non-functional) | 271178 | 270467 | 259680 | |
| 16 | IGHV3OR16-8 | Immunoglobulin heavy variable 3/OR16-8 (non-functional) | 271130 | 233732 | 205457 | |
| 16 | IGHV3OR16-9 | Immunoglobulin heavy variable 3/OR16-9 (non-functional) | 270472 | 185947 | 205456 | |
| 16 | IGSF6 | immunoglobulin superfamily member 6 | 140749 | 197006 | 155719 | 30, 13, 5 |
| 16 | INO80E | INO80 complex subunit E | 169592 | 149929 | 149927 | 3, 26, 1 |
| 16 | ITPRIPL2 | inositol 1,4,5-trisphosphate receptor interacting protein like 2 | 205730 | 167186 | 261427 | 22, 1, 29 |
| 16 | IGFALS | insulin like growth factor binding protein acid labile subunit | 099769 | 095906 | 063854 | 19, 39, 23 |
| 16 | ITFG1 | integrin alpha FG-GAP repeat containing 1 | 129636 | 171208 | 102893 | 26, 40, 18 |
| 16 | ITGAD | integrin subunit alpha D | 156886 | 140678 | 156885 | 36, 25, 20 |
| 16 | ITGAL | integrin subunit alpha L | 005844 | 179918 | 169957 | 39, 36, 22 |
| 16 | ITGAM | integrin subunit alpha M | 169896 | 169900 | 140678 | 7, 5, 26 |
| 16 | ITGAX | integrin subunit alpha X | 140678 | 169896 | 156886 | 7, 5, 18 |
| 16 | IRF8 | interferon regulatory factor 8 | 140968 | 131143 | 103241 | 21, 22, 41 |
| 16 | IL17C | interleukin 17C | 124391 | 158545 | 051523 | 20, 38, |
| 16 | IL21R | interleukin 21 receptor | 103522 | 077238 | 077235 | 39, 41, 21 |
| 16 | IL27 | interleukin 27 | 197272 | 184730 | 176046 | 20, |
| 16 | IL32 | interleukin 32 | 008517 | 008516 | 130182 | 45, 3, 37 |
| 16 | IL34 | interleukin 34 | 157368 | 189091 | 132613 | 36, 1, 8 |
| 16 | IL4R | interleukin 4 receptor | 077238 | 169189 | 103522 | 18, 22, 25 |
| 16 | IFT140 | intraflagellar transport 140 | 187535 | 100726 | 131634 | 27, 38, 12 |
| 16 | IQCK | IQ motif containing K | 174628 | 103550 | 167191 | 38, |
| 16 | IRX3 | iroquois homeobox 3 | 177508 | 140718 | 176842 | 34, 9, 20 |
| 16 | IRX5 | iroquois homeobox 5 | 176842 | 177508 | 159387 | 20, 6, 23 |
| 16 | IRX6 | iroquois homeobox 6 | 159387 | 176842 | 087245 | 39, 14, 20 |
| 16 | IST1 | IST1, ESCRT-III associated factor | 182149 | 224470 | 102984 | 36, 42, 39 |
| 16 | JMJD8 | jumonji domain containing 8 | 161999 | 103266 | 127580 | 34, 27, 3 |
| 16 | JPH3 | junctophilin 3 | 154118 | 140948 | 104731 | 14, 8, 2 |
| 16 | KATNB1 | katanin regulatory subunit B1 | 140854 | 159625 | 140859 | 25, 35, 5 |
| 16 | KLHDC4 | kelch domain containing 4 | 104731 | 154118 | 103257 | |
| 16 | KLHL36 | kelch like family member 36 | 135686 | 103187 | 103194 | 13, 37, 22 |
| 16 | KIAA0430 | KIAA0430 | 166783 | 166780 | 072864 | 18, 41, 22 |
| 16 | KIAA0513 | KIAA0513 | 135709 | 153786 | 153789 | 34, 27, 33 |
| 16 | KIAA0556 | KIAA0556 | 047578 | 077235 | 169181 | 40, 30, 33 |
| 16 | KIAA0895L | KIAA0895 like | 196123 | 140939 | 179044 | 13, 8, 33 |
| 16 | KIF22 | kinesin family member 22 | 079616 | 174992 | 103495 | 39, 21, 9 |
| 16 | KIFC3 | kinesin family member C3 | 140859 | 140854 | 070729 | |
| 16 | KREMEN2 | kringle containing transmembrane protein 2 | 131650 | 059122 | 127564 | 37, 9, 39 |
| 16 | LDHD | lactate dehydrogenase D | 166816 | 186187 | 184517 | 3, 14, 16 |
| 16 | LCAT | lecithin-cholesterol acyltransferase | 213398 | 205220 | 124067 | |
| 16 | LCMT1 | leucine carboxyl methyltransferase 1 | 205629 | 140750 | 103375 | 1, 31, 43 |
| 16 | LRRC29 | leucine rich repeat containing 29 | 125122 | 102890 | 168701 | 26, 31, 36 |
| 16 | LRRC36 | leucine rich repeat containing 36 | 159708 | 168676 | 159713 | 38, 1, 32 |
| 16 | LAT | linker for activation of T-cells | 213658 | 169682 | 254206 | 39, 5, 15 |
| 16 | LMF1 | lipase maturation factor 1 | 103227 | 167945 | 005513 | 2, 42, 8 |
| 16 | LITAF | lipopolysaccharide induced TNF factor | 189067 | 188897 | 184602 | 5, 36, 11 |
| 16 | LONP2 | lon peptidase 2, peroxisomal | 102910 | 121270 | 196470 | 24, 40, 23 |
| 16 | LUC7L | LUC7 like | 007392 | 086506 | 167930 | 39, 36, 1 |
| 16 | LYRM1 | LYR metif containing 1 | 102897 | 188215 | 158486 | 29, 10, 2 |
| 16 | KAT8 | lysine acetyltransferase 8 | 103510 | 103507 | 052344 | 11, 18, 29 |
| 16 | KDM8 | lysine demethylase 8 | 155666 | 234186 | 169189 | 21, 2, 19 |
| 16 | KNOP1 | lysine rich nucleolar protein 1 | 103550 | 103544 | 174628 | 9, 11, 19 |
| 16 | LPCAT2 | lysophosphatidylcholine acyltransferase 2 | 087253 | 087245 | 256812 | 26, 29, 17 |
| 16 | KARS | lysyl-tRNA synthetase | 065427 | 065457 | 166848 | 3, 21, 9 |
| 16 | MAF | MAF bZIP transcription factor | 178573 | 186153 | 168589 | 11, 29, 17 |
| 16 | MGRN1 | mahogunin ring finger 1 | 102858 | 153443 | 168101 | 34, 26, 23 |
| 16 | MVP | major vault protein | 013364 | 281348 | 103502 | 24, 36, 39 |
| 16 | MLYCD | malonyl-CoA decarboxylase | 103150 | 230989 | 260300 | 2, 1, 26 |
| 16 | MCRIP2 | MAPK regulated corepressor interacting protein 2 | 172366 | 130731 | 161996 | |
| 16 | MARVELD3 | MARVEL domain containing 3 | 140832 | 198650 | 040199 | 37, 23, 29 |
| 16 | MMP15 | matrix metallopeptidase 15 | 102996 | 103005 | 070761 | 3, 26, 37 |
| 16 | MMP2 | matrix metallopeptidase 2 | 087245 | 159387 | 087253 | |
| 16 | MMP25 | matrix metallopeptidase 25 | 008516 | 162069 | 008517 | 36, 5, 39 |
| 16 | MEFV | MEFV, pyrin innate immunity regulator | 103313 | 010539 | 006194 | 5, 38, |
| 16 | MEIOB | meiosis specific with OB domains | 162039 | 180185 | 162040 | 38, 6, 10 |
| 16 | MC1R | melanocortin 1 receptor | 258839 | 141002 | 198211 | |
| 16 | MBTPS1 | membrane bound transcription factor peptidase, site 1 | 140943 | 166558 | 103160 | 42, 43, 31 |
| 16 | MSLN | mesothelin | 102854 | 103245 | 162006 | 27, 9, 1 |
| 16 | MSLNL | Mesothelin-like | 162006 | 102854 | 007376 | |
| 16 | MT1A | metallothionein 1A | 205362 | 205364 | 169688 | 16, 1, 14 |
| 16 | MT1B | metallothionein 1B | 169688 | 205362 | 198417 | 10, 5, |
| 16 | MT1E | metallothionein 1E | 169715 | 125148 | 205364 | 19, 31, 15 |
| 16 | MT1F | metallothionein 1F | 198417 | 169688 | 125144 | 40, 33, 18 |
| 16 | MT1G | metallothionein 1G | 125144 | 198417 | 205358 | 40, 19, 36 |
| 16 | MT1H | metallothionein 1H | 205358 | 125144 | 275691 | 19, 14, 40 |
| 16 | MT1M | metallothionein 1M | 205364 | 169715 | 205362 | 10, 44, 33 |
| 16 | MT1X | metallothionein 1X | 187193 | 275691 | 102900 | 25, 10, 19 |
| 16 | MT2A | metallothionein 2A | 125148 | 087250 | 169715 | 19, 1, 12 |
| 16 | MT3 | metallothionein 3 | 087250 | 102891 | 125148 | 8, 2, 10 |
| 16 | MT4 | metallothionein 4 | 102891 | 125124 | 087250 | 16, |
| 16 | METRN | meteorin, glial cell differentiation regulator | 103260 | 127585 | 103254 | |
| 16 | MTHFSD | methenyltetrahydrofolate synthetase domain containing | 103248 | 103241 | 176692 | 22, 13, 7 |
| 16 | MSRB1 | methionine sulfoxide reductase B1 | 198736 | 162040 | 140986 | 43, 17, 16 |
| 16 | METTL22 | methyltransferase like 22 | 067365 | 232258 | 183044 | 35, 6, 38 |
| 16 | METTL26 | methyltransferase like 26 | 130731 | 127578 | 172366 | |
| 16 | METTL9 | methyltransferase like 9 | 197006 | 169246 | 140749 | 29, 35, 6 |
| 16 | MVD | mevalonate diphosphate decarboxylase | 167508 | 051523 | 185669 | 21, 26, 41 |
| 16 | MAP1LC3B | microtubule associated protein 1 light chain 3 beta | 140941 | 283277 | 140948 | |
| 16 | MRPL28 | mitochondrial ribosomal protein L28 | 086504 | 103126 | 129925 | 35, 41, 25 |
| 16 | MRPS34 | mitochondrial ribosomal protein S34 | 074071 | 103024 | 197774 | 3, 14, 33 |
| 16 | MAPK3 | mitogen-activated protein kinase 3 | 102882 | 102886 | 102879 | 26, 21, 14 |
| 16 | MAPK8IP3 | mitogen-activated protein kinase 8 interacting protein 3 | 138834 | 206053 | 103024 | 26, 22, 16 |
| 16 | MLKL | mixed lineage kinase domain like pseudokinase | 168404 | 168411 | 103089 | 1, 18, 9 |
| 16 | MKL2 | MKL1/myocardin like 2 | 186260 | 175595 | 140694 | 11, 18, 34 |
| 16 | MON1B | MON1 homolog B, secretory trafficking associated | 103111 | 261833 | 205078 | 42, 39, 36 |
| 16 | MPHOSPH6 | M-phase phosphoprotein 6 | 135698 | 086696 | 140945 | 4, 11, 6 |
| 16 | MPV17L | MPV17 mitochondrial inner membrane protein like | 156968 | 183793 | 166780 | 4, 22, 33 |
| 16 | MLST8 | MTOR associated protein, LST8 homolog | 167965 | 167971 | 182685 | |
| 16 | MTRNR2L4 | MT-RNR2-like 4 | 232196 | 262621 | 140987 | |
| 16 | MTSS1L | MTSS1L, I-BAR domain containing | 132613 | 157368 | 103043 | 14, 18, 8 |
| 16 | MAZ | MYC associated zinc finger protein | 103495 | 079616 | 167371 | 23, 9, 41 |
| 16 | MYH11 | myosin heavy chain 11 | 133392 | 072864 | 133393 | 33, 16, 18 |
| 16 | MYLK3 | myosin light chain kinase 3 | 140795 | 091651 | 155330 | 15, 24, 25 |
| 16 | MYLPF | myosin light chain, phosphorylatable, fast skeletal muscle | 180209 | 169221 | 180035 | 25, 15, 24 |
| 16 | NAA60 | N(alpha)-acetyltransferase 60, NatF catalytic subunit | 122390 | 167981 | 215131 | 39, 24, 36 |
| 16 | GNPTG | N-acetylglucosamine-1-phosphate transferase gamma subunit | 090581 | 007520 | 059145 | 31, 35, 6 |
| 16 | NAGPA | N-acetylglucosamine-1-phosphodiester alpha-N-acetylglucosaminidase | 103174 | 103184 | 033011 | 9, 41, 36 |
| 16 | NQO1 | NAD(P)H quinone dehydrogenase 1 | 181019 | 102908 | 141101 | 3, 4, 24 |
| 16 | NDUFAB1 | NADH: ubiquinone oxidoreductase subunit AB1 | 004779 | 103353 | 083093 | 41, 13, 28 |
| 16 | NDUFB10 | NADH: ubiquinone oxidoreductase subunit B10 | 140990 | 140986 | 140988 | 25, 34, 31 |
| 16 | NOXO1 | NADPH oxidase organizer 1 | 196408 | 183751 | 127554 | 16, 4, 20 |
| 16 | NKD1 | naked cuticle homolog 1 | 140807 | 166164 | 167208 | 19, 21, 16 |
| 16 | NDRG4 | NDRG family member 4 | 103034 | 181938 | 103037 | 8, 26, 18 |
| 16 | N4BP1 | NEDD4 binding protein 1 | 102921 | 196470 | 102924 | 37, 43, 41 |
| 16 | NAE1 | NEDD8 activating enzyme E1 subunit 1 | 159593 | 249961 | 168748 | 3, 9, 6 |
| 16 | NTN3 | netrin 3 | 162068 | 162062 | 162065 | 16, |
| 16 | NRN1L | neuritin 1 like | 188038 | 038358 | 159792 | 14, 28, 12 |
| 16 | NPW | neuropeptide W | 183971 | 167962 | 065054 | 28, 22, 33 |
| 16 | NETO2 | neuropilin and tolloid like 2 | 171208 | 069345 | 129636 | 2, 40, 29 |
| 16 | NHLRC4 | NHL repeat containing 4 | 257108 | 007541 | 197562 | 2, 39, 36 |
| 16 | NOB1 | NIN1/PSMD8 binding protein 1 homolog | 141101 | 181019 | 198373 | 3, 21, 29 |
| 16 | NIP7 | NIP7, nucleolar pre-rRNA processing protein | 132603 | 259900 | 157315 | 7, 30, 4 |
| 16 | NLRC3 | NLR family CARD domain containing 3 | 167984 | 103351 | 188827 | 22, 1, 21 |
| 16 | NLRC5 | NLR family CARD domain containing 5 | 140853 | 087237 | 140848 | 43, 22, 36 |
| 16 | NME3 | NME/NM23 nucleoside diphosphate kinase 3 | 103024 | 138834 | 074071 | 3, 28, 29 |
| 16 | NME4 | NME/NM23 nucleoside diphosphate kinase 4 | 103202 | 129925 | 242612 | 33, 23, 1 |
| 16 | MPG | N-methylpurine DNA glycosylase | 103152 | 007384 | 103148 | 7, 43, 41 |
| 16 | NMRAL1 | NmrA like redox sensor 1 | 153406 | 103423 | 103415 | 38, |
| 16 | NOMO1 | NODAL modulator 1 | 103512 | 254852 | 183426 | 43, 9, 26 |
| 16 | NOMO2 | NODAL modulator 2 | 185164 | 233024 | 134419 | 43, 29, 31 |
| 16 | NOMO3 | NODAL modulator 3 | 103226 | 091262 | 183889 | 43, 29, 31 |
| 16 | NPRL3 | NPR3 like, GATOR1 complex subunit | 103148 | 103152 | 130656 | 7, 36, 14 |
| 16 | NSMCE1 | NSE1 homolog, SMC5-SMC6 complex component | 169189 | 155666 | 077238 | 43, 18, 33 |
| 16 | NTAN1 | N-terminal asparagine amidase | 157045 | 179889 | 085721 | 29, 34, 22 |
| 16 | NECAB2 | N-terminal EF-hand calcium binding protein 2 | 103154 | 140961 | 166558 | 8, 17, 10 |
| 16 | NTHL1 | nth like DNA glycosylase 1 | 065057 | 065054 | 103197 | 37, 16, 14 |
| 16 | NFATC2IP | nuclear factor of activated T-cells 2 interacting protein | 176953 | 177455 | 169682 | 14, 11, 36 |
| 16 | NFATC3 | nuclear factor of activated T-cells 3 | 072736 | 182810 | 103067 | 22, 41, 2 |
| 16 | NFAT5 | nuclear factor of activated T-cells 5 | 102908 | 103018 | 181019 | 18, 31, 22 |
| 16 | NPIPA1 | nuclear pore complex interacting protein family member A1 | 183426 | 103512 | 179889 | |
| 16 | NPIPA2 | nuclear pore complex interacting protein family member A2 | 254852 | 224712 | 103512 | 37, |
| 16 | NPIPA3 | nuclear pore complex interacting protein family member A3 | 224712 | 069764 | 254852 | 37, |
| 16 | NPIPA5 | nuclear pore complex interacting protein family member A5 | 183793 | 085721 | 261130 | |
| 16 | NPIPA7 | nuclear pore complex interacting protein family member A7 | 214967 | 183889 | 103489 | |
| 16 | NPIPA8 | nuclear pore complex interacting protein family member A8 | 214940 | 103489 | 233024 | |
| 16 | NPIPB11 | nuclear pore complex interacting protein family member B11 | 254206 | 213658 | 183336 | |
| 16 | NPIPB15 | nuclear pore complex interacting protein family member B15 | 196436 | 103035 | 140839 | 10, 14, 38 |
| 16 | NPIPB3 | nuclear pore complex interacting protein family member B3 | 169246 | 103316 | 197006 | |
| 16 | NPIPB4 | nuclear pore complex interacting protein family member B4 | 185864 | 155719 | 140740 | 26, 40, 30 |
| 16 | NPIPB5 | nuclear pore complex interacting protein family member B5 | 243716 | 140743 | 122254 | 8, |
| 16 | NPIPB6 | nuclear pore complex interacting protein family member B6 | 198156 | 188322 | 205609 | |
| 16 | NPIPB7 | Nuclear pore complex interacting protein family member B7 | 233232 | 261832 | 188603 | |
| 16 | NPIPB8 | nuclear pore complex interacting protein family member B8 | 255524 | 196502 | 184110 | |
| 16 | NPIPB9 | nuclear pore complex interacting protein family member B9 | 196993 | 184110 | 168488 | |
| 16 | NPIPB12 | Nuclear pore complex interacting protein family, member B12 | 169203 | 258150 | 197471 | |
| 16 | NPIPB13 | nuclear pore complex interacting protein family, member B13 | 198064 | 258130 | 169217 | 40, 36, 23 |
| 16 | NPIPB2 | Nuclear pore complex interacting protein family, member B2 | 234719 | 103342 | 048462 | 21, 9, |
| 16 | NARFL | nuclear prelamin A recognition factor like | 103245 | 103253 | 102854 | 9, 39, 36 |
| 16 | NUPR1 | nuclear protein 1, transcriptional regulator | 176046 | 197272 | 176476 | 29, 3, 6 |
| 16 | NUTF2 | nuclear transport factor 2 | 102898 | 168286 | 038358 | 41, 35, 44 |
| 16 | NOL3 | nucleolar protein 3 | 140939 | 102878 | 196123 | 34, 29, 1 |
| 16 | NUP93 | nudeoporin 93 | 102900 | 187193 | 070915 | 10, 24, 3 |
| 16 | NOD2 | nucleotide binding oligomerization domain containing 2 | 167207 | 167208 | 083799 | 4, 36, 20 |
| 16 | NUBP1 | nucleotide binding protein 1 | 103274 | 153060 | 166676 | 15, 34, 35 |
| 16 | NUBP2 | nucleotide binding protein 2 | 095906 | 162032 | 099769 | 1, 34, 27 |
| 16 | NDE1 | nudE neurodevelopment protein 1 | 072864 | 166783 | 133392 | 27, 23, 39 |
| 16 | NUDT16L1 | nudix hydrolase 16 like 1 | 168101 | 102858 | 168096 | 21, 33, 34 |
| 16 | NUDT21 | nudix hydrolase 21 | 167005 | 159461 | 087263 | 23, 40, 22 |
| 16 | NUDT7 | nudix hydrolase 7 | 140876 | 140873 | 171724 | 26, 17, 7 |
| 16 | OR1F1 | olfactory receptor family 1 subfamily F member 1 | 168124 | 085644 | 010539 | |
| 16 | OR2C1 | olfactory receptor family 2 subfamily C member 1 | 168158 | 162086 | 262621 | 32, |
| 16 | ORAI3 | ORAI calcium release-activated calcium modulator 3 | 175938 | 099364 | 099381 | 9, 17, 26 |
| 16 | ORC6 | origin recognition complex subunit 6 | 091651 | 069329 | 140795 | 43, 12, 13 |
| 16 | OTOA | otoancorin | 155719 | 140749 | 185864 | 21, 38, 10 |
| 16 | OSGIN1 | oxidative stress induced growth inhibitor 1 | 140961 | 260300 | 103154 | 33, 34, 29 |
| 16 | PARD6A | par-6 family cell polarity regulator alpha | 102981 | 102977 | 124074 | 29, 21, 26 |
| 16 | PALB2 | partner and localizer of BRCA2 | 083093 | 004779 | 166847 | 22, 12, 6 |
| 16 | PAGR1 | PAXIP1 associated glutamate rich protein 1 | 280789 | 280893 | 281348 | 9, 28, 31 |
| 16 | PDZD9 | PDZ domain containing 9 | 155714 | 140740 | 185716 | 38, 36, 8 |
| 16 | PTX4 | pentraxin 4 | 251692 | 103249 | 100726 | |
| 16 | PDF | peptide deformylase (mitochondrial) | 258429 | 272617 | 260371 | |
| 16 | PPL | periplakin | 118898 | 118900 | 103184 | 18, 23, 1 |
| 16 | PHLPP2 | PH domain and leucine rich repeat protein phosphatase 2 | 040199 | 140832 | 166747 | 22, 31, 38 |
| 16 | PIGQ | phosphatidylinositol glycan anchor biosynthesis class Q | 007541 | 161992 | 257108 | 26, 9, 31 |
| 16 | PGP | phosphoglycolate phosphatase | 184207 | 182685 | 167967 | 9, 20, 38 |
| 16 | PLA2G10 | phosph olipase A2 group X | 069764 | 103429 | 224712 | 3, 20, 28 |
| 16 | PLA2G15 | phospholipase A2 group XV | 103066 | 103067 | 103064 | 36, 18, 2 |
| 16 | PLCG2 | phospholipase C gamma 2 | 197943 | 153815 | 184860 | 21, 22, 43 |
| 16 | PMM2 | phosphomannomutase 2 | 140650 | 184857 | 153048 | 45, 24, 16 |
| 16 | PHKG2 | phosphorylase kinase catalytic subunit gamma 2 | 156873 | 281991 | 196118 | |
| 16 | PHKB | phosphorylase kinase regulatory subunit beta | 102893 | 129636 | 140798 | 7, 26, 17 |
| 16 | PIEZO1 | piezo type mechanosensitive ion channel component 1 | 103335 | 174177 | 167513 | 21, 6, 4 |
| 16 | PLLP | plasmolipin | 102934 | 102931 | 102962 | 26, 29, 37 |
| 16 | PLEKHG4 | pleckstrin homology and RhoGEF domain containing G4 | 196155 | 135740 | 168676 | 38, 5, 18 |
| 16 | PLK1 | polo like kinase 1 | 166851 | 166847 | 134398 | 3, 21, 41 |
| 16 | PABPN1L | poly(A) binding protein nuclear 1 like, cytoplasmic | 205022 | 167515 | 129993 | |
| 16 | PAPD5 | poly(A) RNA polymerase D5, non-canonical | 121274 | 155393 | 121281 | 45, 19, 31 |
| 16 | PARN | poly(A)-specific ribonuclease | 140694 | 186260 | 103429 | 45, 24, 39 |
| 16 | PMFBP1 | polyamine modulated factor 1 binding protein 1 | 118557 | 140829 | 280264 | 38, 5, 15 |
| 16 | PKD1L2 | polycystin 1 like 2 (gene/pseudogene) | 166473 | 140905 | 279362 | 1, 22, 8 |
| 16 | PKD1L3 | polycystin 1 like 3, transient receptor potential channel interacting | 277481 | 102984 | 102967 | 14, |
| 16 | PKD1 | polycystin 1, transient receptor potential channel interacting | 008710 | 103197 | 167964 | 36, 8, 22 |
| 16 | KCTD13 | potassium channel tetramerization domain containing 13 | 174943 | 174939 | 149932 | 11, 4, 38 |
| 16 | KCTD19 | potassium channel tetramerization domain containing 19 | 168676 | 196155 | 159708 | 38, 5, 14 |
| 16 | KCTD5 | potassium channel tetramerization domain containing 5 | 167977 | 140992 | 172382 | 22, 24, 44 |
| 16 | KCNG4 | potassium voltage-gated channel modifier subfamily G member 4 | 168418 | 140955 | 103175 | 25, 21, |
| 16 | PRDM7 | PR/SET domain 7 | 126856 | 283182 | 198156 | 35, 17, |
| 16 | PAM16 | presequence translocase associated motor 16 homolog | 217930 | 126603 | 103426 | 3, 15, |
| 16 | PAQR4 | progestin and adipoQ receptor family member 4 | 162073 | 127564 | 270168 | 9, 21, 14 |
| 16 | PRR14 | proline rich 14 | 156858 | 156853 | 156860 | 41, 35, 13 |
| 16 | PRR25 | proline rich 25 | 167945 | 127588 | 103227 | 14, 38, |
| 16 | PRR35 | proline rich 35 | 161992 | 103326 | 007541 | 14, 38, |
| 16 | PRRT2 | proline rich transmembrane protein 2 | 167371 | 103495 | 280893 | 8, 43, 2 |
| 16 | PRM1 | protamine 1 | 175646 | 122304 | 280717 | 38, 32, 8 |
| 16 | PRM2 | protamine 2 | 122304 | 178257 | 175646 | 38, 32, 8 |
| 16 | PRM3 | protamine 3 | 178257 | 178279 | 122304 | |
| 16 | PRSS21 | protease, serine 21 | 007038 | 103355 | 162078 | 9, 38, 18 |
| 16 | PRSS22 | protease, serine 22 | 005001 | 162078 | 162076 | 37, 13, 42 |
| 16 | PRSS27 | protease, serine 27 | 172382 | 167977 | 167978 | 13, 30, 9 |
| 16 | PRSS33 | protease, serine 33 | 103355 | 103363 | 007038 | 35, 5, 44 |
| 16 | PRSS36 | protease, serine 36 | 178226 | 052344 | 089280 | 9, 39, 10 |
| 16 | PRSS53 | protease, serine 53 | 151006 | 167395 | 255439 | 6, 14, 37 |
| 16 | PRSS54 | protease, serine 54 | 103023 | 103021 | 181938 | 38, 10, 8 |
| 16 | PRSS8 | protease, serine 8 | 052344 | 103510 | 178226 | 13, 4, 16 |
| 16 | PSMD7 | proteasome 26S subunit, nen-ATPase 7 | 103035 | 140836 | 196436 | 3, 6, 11 |
| 16 | PSMB10 | proteasome subunit beta 10 | 205220 | 261884 | 213398 | 41, 22, 3 |
| 16 | PRMT7 | protein arginine methyltransferase 7 | 132600 | 103061 | 103056 | 39, 36, 45 |
| 16 | PDIA2 | protein disulfide isomerase family A member 2 | 185615 | 242173 | 103126 | 4, 28, 8 |
| 16 | PDILT | protein disulfide isomerase like, testis expressed | 169340 | 169344 | 183549 | 38, |
| 16 | PRKCB | protein kinase C beta | 166501 | 166869 | 006116 | 22, 39, 36 |
| 16 | PKMYT1 | protein kinase, membrane associated tyrosine/threonine 1 | 127564 | 131650 | 162073 | |
| 16 | PPP4C | protein phosphatase 4 catalytic subunit | 149923 | 149925 | 149922 | 12, 27, 6 |
| 16 | PSKH1 | protein serine kinase H1 | 159792 | 188038 | 141086 | 40, 29, 26 |
| 16 | PYCARD | PYD and CARD domain containing | 103490 | 089280 | 177238 | 43, 41, 16 |
| 16 | PDXDC1 | pyridpxal dependent decarboxylase domain containing 1 | 179889 | 183426 | 157045 | 42, 38, 24 |
| 16 | PYDC1 | pyrin domain containing 1 | 169900 | 177238 | 169896 | 15, 10, 8 |
| 16 | PDPR | pyruvate dehydrogenase phosphatase regulatory subunit | 090857 | 279533 | 157335 | 40, 22, 38 |
| 16 | PDP2 | pyruvate dehyrogenase phosphatase catalytic subunit 2 | 172840 | 168748 | 166589 | 13, 8, 3 |
| 16 | QPRT | quinolinate phosphoribosyltransferase | 103485 | 277669 | 185905 | 27, |
| 16 | RAB11FIP3 | RAB11 family interacting protein 3 | 090565 | 242612 | 103326 | 34, 17, 6 |
| 16 | RAB26 | RAB26, member RAS oncogene family | 167964 | 008710 | 131653 | 33, 19, 28 |
| 16 | RAB40C | RAB40C, member RAS oncogene family | 197562 | 257108 | 127578 | 33, 9, 20 |
| 16 | RABEP2 | rabaptin, RAB GTPase binding effector protein 2 | 177548 | 196296 | 177455 | 36, 24, 42 |
| 16 | RANBP10 | RAN binding protein 10 | 141084 | 141098 | 102904 | 40, 26, 3 |
| 16 | RHOT2 | ras homolog family member T2 | 140983 | 161996 | 103269 | 5, 6, 22 |
| 16 | RBBP6 | RB binding protein 6, ubiquitin ligase | 122257 | 006116 | 090905 | 32, 29, 22 |
| 16 | RBL2 | RB transcriptional corepressor like 2 | 103479 | 279018 | 166971 | 22, 4, 39 |
| 16 | RMI2 | RecQ mediated genome instability 2 | 175643 | 038532 | 185338 | |
| 16 | RGS11 | regulator of G-protein signaling 11 | 076344 | 269881 | 242173 | 40, 26, 8 |
| 16 | ARHGDIG | Rhe GDP dissociation inhibitor gamma | 242173 | 076344 | 185615 | 14, 8, 44 |
| 16 | ARHGAP17 | Rho GTPase activating protein 17 | 140750 | 158865 | 205629 | 40, 32, 2 |
| 16 | RHBDF1 | rhomboid 5 homolog 1 | 007384 | 161981 | 103152 | 11, 33, 29 |
| 16 | RHBDL1 | rhomboid like 1 | 103269 | 140983 | 103266 | 14, 9, 39 |
| 16 | RSL1D1 | ribosomal L1 domain containing 1 | 171490 | 122299 | 103342 | 34, 4, 7 |
| 16 | RPL13 | ribosomal protein L13 | 167526 | 197912 | 178773 | 41, 21, 22 |
| 16 | RPL3L | ribosomal protein L3 like | 140986 | 198736 | 140990 | 25, 15, 26 |
| 16 | RPS15A | ribosomal protein S15a | 134419 | 185164 | 260342 | 12, 43, 41 |
| 16 | RPS2 | ribosomal protein S2 | 140988 | 140990 | 179580 | |
| 16 | RSPRY1 | ring finger and SPRY domain containing 1 | 159579 | 172775 | 102931 | 42, 30, 6 |
| 16 | RFWD3 | ring finger and WD repeat domain 3 | 168411 | 090863 | 168404 | 41, 42, 38 |
| 16 | RNF151 | ring finger protein 151 | 179580 | 140988 | 183751 | 38, |
| 16 | RNF166 | ring finger protein 166 | 158717 | 280603 | 174177 | 39, 5, 36 |
| 16 | RNF40 | ring finger protein 40 | 103549 | 196118 | 102870 | 43, 42, 38 |
| 16 | RNPS1 | RNA binding protein with serine rich domain 1 | 205937 | 167969 | 279473 | 3, 11, 33 |
| 16 | RBFOX1 | RNA binding protein, fox-1 homolog 1 | 078328 | 118894 | 232258 | 25, 8, 1 |
| 16 | POLR2C | RNA polymerase II subunit C | 102978 | 088682 | 125170 | 31, 34, 41 |
| 16 | POLR3E | RNA polymerase III subunit E | 058600 | 103319 | 140743 | 24, 22, 40 |
| 16 | POLR3K | RNA polymerase III subunit K | 161980 | 198156 | 161981 | 14, 28, 3 |
| 16 | RPUSD1 | RNA pseudouridylate synthase domain containing 1 | 007376 | 162006 | 127586 | 9, 33, 41 |
| 16 | ROGDI | rogdi homolog | 067836 | 267795 | 140632 | 8, 14, 26 |
| 16 | RPGRIP1L | RPGRIP1 like | 103494 | 166971 | 140718 | 38, 31, 42 |
| 16 | RRAD | RRAD, Ras related glycolysis inhibitor and calcium channel regulator | 166592 | 166589 | 166595 | 18, 25, 15 |
| 16 | RRN3 | RRN3 homolog, RNA polymerase I transcription factor | 085721 | 157045 | 183793 | 34, 31, 9 |
| 16 | SGF29 | SAGA complex associated factor 29 | 176476 | 176046 | 197165 | 1, 36, 15 |
| 16 | SRL | sarcalumenin | 185739 | 162104 | 090447 | 25, 24, 15 |
| 16 | SEC14L5 | SEC14 like lipid binding 5 | 103184 | 118898 | 103174 | 11, 8, 23 |
| 16 | SEZ6L2 | seizure related 6 homolog like 2 | 174938 | 103502 | 174939 | 26, 14, 28 |
| 16 | SEPHS2 | selenophosphate synthetase 2 | 179918 | 179958 | 005844 | 19, 17, 5 |
| 16 | SEPT1 | septin 1 | 180096 | 180035 | 283620 | 39, 22, 5 |
| 16 | SEPT12 | septin 12 | 140623 | 103199 | 267795 | 38, 8, 44 |
| 16 | SRRM2 | serine/arginine repetitive matrix 2 | 167978 | 172382 | 103363 | |
| 16 | SETD1A | SET domain containing 1A | 099381 | 175938 | 099377 | 41, 23, 22 |
| 16 | SETD6 | SET domain containing 6 | 103037 | 103034 | 125107 | 31, 24, 35 |
| 16 | SH2B1 | SH2B adaptor protein 1 | 178188 | 178952 | 196296 | 34, 26, 31 |
| 16 | SBK1 | SH3 domain binding kinase 1 | 188322 | 169180 | 198156 | 14, 26, 12 |
| 16 | SHCBP1 | SHC binding and spindle associated 1 | 171241 | 259680 | 069329 | 11, 39, 12 |
| 16 | SHISA9 | shisa family member 9 | 237515 | 103381 | 175595 | 18, 14, 8 |
| 16 | SDR42E1 | short chain dehydrogenase/reductase family 42E, member 1 | 184860 | 197943 | 086696 | 22, 4, 23 |
| 16 | SDR42E2 | short chain dehydrogenase/reductase family 42E, member 2 | 183921 | 175267 | 103319 | |
| 16 | SIAH1 | siah E3 ubiquitin protein ligase 1 | 196470 | 102910 | 102921 | 11, 32, 13 |
| 16 | SPN | sialophorin | 197471 | 169203 | 277669 | 39, 36, 5 |
| 16 | SLC9A3R2 | SLC9A3 regulator 2 | 065054 | 183971 | 065057 | 3, 1, 33 |
| 16 | SLX1A | SLX1 homolog A, structure-specific endonuclease subunit | 132207 | 169627 | 261052 | 13, 5, 22 |
| 16 | SLX1B | SLX1 homolog B, structure-specific endonuclease subunit | 181625 | 261740 | 213648 | 41, 6, 35 |
| 16 | SLX4 | SLX4 structure-specific endonuclease subunit | 188827 | 167984 | 213918 | 22, 24, 3 |
| 16 | SMIM22 | small integral membrane protein 22 | 267795 | 140623 | 067836 | 18, 16, 38 |
| 16 | SNRNP25 | small nuclear ribonucleoprotein U11/U12 subunit 25 | 161981 | 161980 | 007384 | 3, 21, 6 |
| 16 | SMG1 | SMG1, nonsense mediated mRNA decay associated PI3K related kinase | 157106 | 170540 | 170537 | |
| 16 | SNAI3 | snail family transcriptional repressor 3 | 185669 | 167508 | 280603 | |
| 16 | SRCAP | Snf2 related CREBBP activator protein | 080603 | 156860 | 282034 | 18, 34, 16 |
| 16 | SCNN1B | sodium channel epithelial 1 beta subunit | 168447 | 166828 | 168434 | 24, 22, 17 |
| 16 | SCNN1G | sodium channel epithelial 1 gamma subunit | 166828 | 103404 | 168447 | 26, 17, 44 |
| 16 | SLC12A3 | solute carrier family 12 member 3 | 070915 | 102900 | 051108 | 17, 9, 32 |
| 16 | SLC12A4 | solute carrier family 12 member 4 | 124067 | 213398 | 141096 | 32, 39, 23 |
| 16 | SLC22A31 | solute carrier family 22 member 31 | 259803 | 129910 | 170100 | 33, 12, 23 |
| 16 | SLC38A7 | solute carrier family 38 member 7 | 103042 | 279816 | 125166 | 45, 24, 38 |
| 16 | SLC38A8 | solute carrier family 38 member 8 | 166558 | 103154 | 140943 | 38, |
| 16 | SLC5A11 | solute carrier family 5 member 11 | 158865 | 090905 | 140750 | 10, 17, 29 |
| 16 | SLC5A2 | solute carrier family 5 member 2 | 140675 | 140682 | 140688 | 17, 38, 28 |
| 16 | SLC6A2 | solute carrier family 6 member 2 | 103546 | 256812 | 198848 | 26, 18, 32 |
| 16 | SLC7A5 | solute carrier family 7 member 5 | 103257 | 104731 | 174990 | 21, 9, 35 |
| 16 | SLC7A6 | solute carrier family 7 member 6 | 103064 | 103066 | 103061 | 18, 39, 22 |
| 16 | SLC7A6OS | solute carrier family 7 member 6 opposite strand | 103061 | 103064 | 132600 | 42, 39, 43 |
| 16 | SLC9A5 | solute carrier family 9 member A5 | 135740 | 135723 | 196155 | 23, 36, 40 |
| 16 | SSTR5 | somatostatin receptor 5 | 162009 | 005513 | 184471 | 28, 10, 42 |
| 16 | SNX20 | sorting nexin 20 | 167208 | 140807 | 167207 | 22, 39, 7 |
| 16 | SNX29 | sorting nexin 29 | 048471 | 048462 | 103381 | 22, 41, 21 |
| 16 | SALL1 | spalt like transcription factor 1 | 103449 | 083799 | 103460 | 12, 17, 8 |
| 16 | SPATA2L | spermatogenesis associated 2 like | 158792 | 185324 | 075399 | 22, 33, 13 |
| 16 | SPATA33 | spermatogenesis associated 33 | 167523 | 131165 | 185324 | 26, 38, 3 |
| 16 | SPG7 | SPG7, paraplegin matrix AAA peptidase subunit | 197912 | 167522 | 167526 | 26, 18, 27 |
| 16 | SPNS1 | sphingolipid transporter 1 (putative) | 169682 | 176953 | 213658 | 5, 9, 35 |
| 16 | SMPD3 | sphingomyelin phosphodiesterase 3 | 103056 | 132600 | 184939 | 39, 1, 26 |
| 16 | SPIRE2 | spire type actin nucleation factor 2 | 204991 | 187741 | 141002 | |
| 16 | SPSB3 | splA/ryanodine receptor domain and SOCS box containing 3 | 162032 | 197774 | 095906 | 28, 22, 26 |
| 16 | SF3B3 | splicing factor 3b subunit 3 | 189091 | 103051 | 157368 | 43, 21, 39 |
| 16 | SOX8 | SRY-box 8 | 005513 | 103227 | 162009 | 8, 26, 14 |
| 16 | ST3GAL2 | ST3 beta-galactoside alpha-2,3-sialyltransferase 2 | 157350 | 168872 | 157353 | 22, 29, 21 |
| 16 | SNN | stannin | 184602 | 189067 | 153066 | 34, 43, 11 |
| 16 | STUB1 | STIP1 homology and U-box containing protein 1 | 103266 | 103269 | 161999 | 34, 35, 26 |
| 16 | SULT1A1 | sulfotransferase family 1A member 1 | 196502 | 197165 | 255524 | 40, 19, 6 |
| 16 | SULT1A2 | sulfotransferase family 1A member 2 | 197165 | 176476 | 196502 | 15, 40, 22 |
| 16 | SULT1A3 | sulfotransferase family 1A member 3 | 261052 | 132207 | 258130 | 13, 26, 15 |
| 16 | SULT1A4 | sulfotransferase family 1A member 4 | 213648 | 181625 | 258150 | 9, 1, 43 |
| 16 | SOCS1 | suppressor of cytokine signaling 1 | 185338 | 175643 | 178279 | 27, 22, 15 |
| 16 | SYNGR3 | synaptogyrin 3 | 127561 | 127554 | 167962 | 26, 41, 8 |
| 16 | SYCE1L | synaptonemal complex central element protein 1 like | 205078 | 103111 | 140873 | 17, 12, 33 |
| 16 | SYT17 | synaptotagmin 17 | 103528 | 261427 | 261210 | 31, 26, 41 |
| 16 | STX1B | syntaxin 1B | 099365 | 099377 | 103496 | 8, 14, 12 |
| 16 | STX4 | syntaxin 4 | 103496 | 099365 | 167394 | 18, 6, 20 |
| 16 | SNTB2 | syntrophin beta 2 | 168807 | 141076 | 260914 | 22, 29, 11 |
| 16 | TAOK2 | TAO kinase 2 | 149930 | 149932 | 149929 | 34, 26, 2 |
| 16 | TAF1C | TATA-box binding protein associated factor, RNA polymerase I subunit C | 103168 | 154099 | 140955 | 40, 26, 9 |
| 16 | TLDC1 | TBC/LysM-associated domain containing 1 | 140950 | 064270 | 103187 | 9, 18, 23 |
| 16 | TBC1D10B | TBC1 domain family member 10B | 169221 | 169217 | 180209 | 34, 27, 41 |
| 16 | TBC1D24 | TBC1 domain family member 24 | 162065 | 162068 | 260272 | |
| 16 | TBX6 | T-box 6 | 149922 | 149923 | 090238 | 18, 21, 6 |
| 16 | TEKT5 | tektin 5 | 153060 | 213853 | 103274 | 38, 35, 44 |
| 16 | TELO2 | telomere maintenance 2 | 100726 | 251692 | 187535 | 9, 3, 41 |
| 16 | TERB1 | telomere repeat binding bouquet formation protein 1 | 249961 | 135720 | 159593 | 38, |
| 16 | TERF2 | telomeric repeat binding factor 2 | 132604 | 157315 | 103018 | 5, 18, 1 |
| 16 | TERF2IP | TERF2 interacting protein | 166848 | 065427 | 152910 | 31, 11, 8 |
| 16 | TEPP | testis, prostate and placenta expressed | 159648 | 070729 | 166188 | 38, 33, |
| 16 | THAP11 | THAP domain containing 11 | 168286 | 102901 | 102898 | 27, 20, 29 |
| 16 | TXNDC11 | thioredoxin domain containing 11 | 153066 | 184602 | 122299 | 7, 24, 10 |
| 16 | TXNL4B | thioredoxin like 4B | 140830 | 102967 | 257017 | 36, 17, 22 |
| 16 | THOC6 | THO complex 6 | 131652 | 103145 | 162069 | 41, 21, 27 |
| 16 | THUMPD1 | THUMP domain containing 1 | 066654 | 166743 | 196678 | 45, 30, 43 |
| 16 | TK2 | thymidine kinase 2, mitochondrial | 166548 | 260851 | 217555 | 26, 9, 1 |
| 16 | TIGD7 | tigger transposable element derived 7 | 140993 | 006194 | 162086 | 29, 38, 42 |
| 16 | TRAF7 | TNF receptor associated factor 7 | 131653 | 167964 | 167971 | 21, 6, 27 |
| 16 | TRAP1 | TNF receptor associated protein 1 | 126602 | 213918 | 005339 | 21, 3, 9 |
| 16 | TNFRSF12A | TNF receptor superfamily member 12A | 006327 | 184697 | 103145 | 37, 34, 35 |
| 16 | TNFRSF17 | TNF receptor superfamily member 17 | 048462 | 234719 | 048471 | 30, 22, 23 |
| 16 | TRADD | TNFRSF1A associated via death domain | 102871 | 237172 | 135722 | 29, 22, 36 |
| 16 | TOX3 | TOX high mobility group box family member 3 | 103460 | 103449 | 277639 | 11, 26, 37 |
| 16 | TP53TG3 | TP53 target 3 | 183632 | 205456 | 259303 | 38, 7, 32 |
| 16 | TP53TG3E | TP53 target 3 family member E | 275034 | 205457 | 261509 | 32, 38, |
| 16 | TP53TG3F | TP53 target 3 family member F | 278848 | 261509 | 270467 | |
| 16 | TP53TG3B | TP53 target 3B | 261509 | 275034 | 278848 | 38, 7, 32 |
| 16 | TP53TG3C | TP53 target 3C | 205457 | 271130 | 275034 | 32, 38, |
| 16 | TP53TG3D | TP53 target 3D | 205456 | 270472 | 183632 | 38, 4, 35 |
| 16 | TRAPPC2L | trafficking protein particle complex 2 like | 167515 | 280675 | 205022 | 2, 43, 29 |
| 16 | TCEB2 | Transcription elongation factor B subunit 2 | 103363 | 167978 | 103355 | 29, 25, 11 |
| 16 | TCF25 | transcription factor 25 | 141002 | 204991 | 258839 | 1, 32, 21 |
| 16 | TFAP4 | transcription factor AP-4 | 090447 | 185739 | 126603 | 32, 16, 3 |
| 16 | TBL3 | transducin beta like 3 | 183751 | 179580 | 196408 | 3, 21, 22 |
| 16 | TGFB1I1 | transforming growth factor beta 1 induced transcript 1 | 140682 | 140691 | 140675 | 43, 44, 13 |
| 16 | TVP23A | trans-golgi network vesicle protein 23 homolog A | 166676 | 103274 | 179583 | 1, 30, 18 |
| 16 | TNP2 | transition protein 2 | 178279 | 185338 | 178257 | 38, |
| 16 | TSNAXIP1 | translin associated factor X interacting protein 1 | 102904 | 141084 | 102901 | 38, 42, 6 |
| 16 | TMC5 | transmembrane channel like 5 | 103534 | 261210 | 006007 | 42, 37, 16 |
| 16 | TMC7 | transmembrane channel like 7 | 170537 | 157106 | 167186 | 38, 5, 8 |
| 16 | TMED6 | transmembrane p24 trafficking protein 6 | 157315 | 132603 | 132604 | 28, 37, 19 |
| 16 | TMEM114 | transmembrane protein 114 | 232258 | 078328 | 067365 | 20, 14, 33 |
| 16 | TMEM159 | transmembrane protein 159 | 011638 | 158486 | 103310 | 25, 28, 22 |
| 16 | TMEM170A | transmembrane protein 170A | 166822 | 261717 | 183196 | 10, 33, 1 |
| 16 | TMEM186 | transmembrane protein 186 | 184857 | 183044 | 140650 | 37, 33, 30 |
| 16 | TMEM204 | transmembrane protein 204 | 131634 | 187535 | 007545 | 2, 36, 15 |
| 16 | TMEM208 | transmembrane protein 208 | 168701 | 125122 | 135723 | 3, 40, 33 |
| 16 | TMEM219 | transmembrane protein 219 | 149932 | 174943 | 149930 | 38, 1, 43 |
| 16 | TMEM231 | transmembrane protein 231 | 205084 | 135702 | 034713 | 42, 11, 38 |
| 16 | TMEM265 | transmembrane protein 265 | 281991 | 282034 | 156873 | |
| 16 | TMEM8A | transmembrane protein 8A | 129925 | 086504 | 103202 | 26, 20, 16 |
| 16 | TANGO6 | transport and golgi organization 6 homolog | 103047 | 039068 | 103044 | 26, 25, 24 |
| 16 | TNRC6A | trinucleotide repeat containing 6A | 090905 | 122257 | 158865 | 18, 11, 40 |
| 16 | TRIM72 | tripartite motif containing 72 | 177238 | 103490 | 169900 | 15, 24, 25 |
| 16 | TPSAB1 | tryptase alpha/beta 1 | 172236 | 197253 | 095917 | |
| 16 | TPSB2 | tryptase beta 2 (gene/pseudogene) | 197253 | 116176 | 172236 | 1, 26, 37 |
| 16 | TPSD1 | tryptase delta 1 | 095917 | 172236 | 103275 | 25, 14, |
| 16 | TPSG1 | tryptase gamma 1 | 116176 | 196557 | 197253 | 16, 17, 14 |
| 16 | TSR3 | TSR3, acp transferase ribosome maturation factor | 007520 | 007516 | 090581 | 27, 22, 20 |
| 16 | TUFM | Tu translation elongation factor, mitochondrial | 178952 | 168488 | 178188 | 3, 21, 35 |
| 16 | TSC2 | tuberous sclerosis 2 | 103197 | 065057 | 008710 | 21, 18, 39 |
| 16 | TUBB3 | tubulin beta 3 class III | 258947 | 198211 | 140995 | 26, 8, 34 |
| 16 | TPPP3 | tubulin polymerization promoting protein family member 3 | 159713 | 159708 | 159714 | 18, 26, 1 |
| 16 | TAT | tyrosine aminotransferase | 198650 | 140835 | 140832 | 19, 23, 25 |
| 16 | USB1 | U6 snRNA biogenesis phosphodiesterase 1 | 103005 | 166188 | 102996 | 45, 34, 43 |
| 16 | UBALD1 | UBA like domain containing 1 | 153443 | 205832 | 102858 | 34, 27, 3 |
| 16 | UBN1 | ubinuclein 1 | 118900 | 140632 | 118898 | 43, 26, 18 |
| 16 | UQCRC2 | ubiquinol-cytochrome c reductase core protein II | 140740 | 185864 | 155714 | 15, 30, 43 |
| 16 | UBE2I | ubiquitin conjugating enzyme E2 I | 103275 | 095917 | 007516 | 37, 40, 22 |
| 16 | UBFD1 | ubiquitin family domain containing 1 | 103353 | 103356 | 004779 | 21, 22, 12 |
| 16 | USP10 | ubiquitin specific peptidase 10 | 103194 | 135686 | 103196 | 24, 13, 8 |
| 16 | USP31 | ubiquitin specific peptidase 31 | 103404 | 122254 | 166828 | 43, 18, 4 |
| 16 | USP7 | ubiquitin specific peptidase 7 | 187555 | 283516 | 182831 | 22, 41, 14 |
| 16 | B3GNT9 | UDP-GlcNAc: betaGal beta-1,3-N-acetylglucosaminyltransferase 9 | 237172 | 125149 | 102871 | 31, 26, 6 |
| 16 | UNKL | unkempt family like zinc finger | 059145 | 090581 | 174109 | 43, 31, 41 |
| 16 | UMOD | uromodulin | 169344 | 169347 | 169340 | 17, 4, 8 |
| 16 | UTP4 | UTP4, small subunit processome component | 141076 | 168802 | 168807 | 13, 9, 45 |
| 16 | VAC14 | Vac14, PIKFYVE complex component | 103043 | 132613 | 157423 | 21, 26, 9 |
| 16 | VPS4A | vacuolar protein sorting 4 homolog A | 132612 | 260914 | 213380 | 41, 27, 9 |
| 16 | VASN | vasorin | 168140 | 262246 | 103423 | 26, 6, 14 |
| 16 | VAT1L | vesicle amine transport 1 like | 171724 | 140876 | 166509 | 26, 34, 11 |
| 16 | VKORC1 | vitamin K epoxide reductase complex subunit 1 | 167397 | 255439 | 103507 | 28, 34, 6 |
| 16 | VWA3A | von Willebrand factor A domain containing 3A | 175267 | 185716 | 183921 | 42, 20, 30 |
| 16 | VPS35 | VPS35, retromer complex component | 069329 | 171241 | 091651 | 13, 38, 36 |
| 16 | VPS9D1 | VPS9 domain containing 1 | 075399 | 158792 | 158805 | 34, 6, 28 |
| 16 | WFDC1 | WAP four-disulfide core domain 1 | 103175 | 168418 | 064270 | 34, 35, 32 |
| 16 | WFIKKN1 | WAP, follistatin/kazal, immunoglobulin, kunitz and netrin domain containing 1 | 127578 | 197562 | 130731 | 9, 12, 38 |
| 16 | WDR24 | WD repeat domain 24 | 127580 | 161999 | 127585 | 27, 1, 38 |
| 16 | WDR59 | WD repeat domain 59 | 103091 | 103089 | 186187 | 14, 3, 12 |
| 16 | WDR90 | WD repeat domain 90 | 161996 | 172366 | 140983 | 22, 39, 3 |
| 16 | WWP2 | WW domain containing E3 ubiquitin protein ligase 2 | 198373 | 141101 | 157322 | 42, 43, 1 |
| 16 | WWOX | WW domain containing oxidoreductase | 186153 | 166509 | 178573 | 34, 17, 36 |
| 16 | XYLT1 | xylosyltransferase 1 | 103489 | 214967 | 214940 | 2, 43, 22 |
| 16 | YPEL3 | yippee like 3 | 090238 | 149922 | 102886 | 32, 23, 40 |
| 16 | ZFP1 | ZFP1 zinc finger protein | 184517 | 166816 | 168928 | 43, 8, 4 |
| 16 | ZFP90 | ZFP90 zinc finger protein | 184939 | 103056 | 062038 | |
| 16 | ZNRF1 | zinc and ring finger 1 | 186187 | 103091 | 166816 | 9, 20, 28 |
| 16 | ZSCAN10 | zinc finger and SCAN domain containing 10 | 130182 | 008517 | 122386 | 12, 38, |
| 16 | ZSCAN32 | zinc finger and SCAN domain containing 32 | 140987 | 232196 | 103343 | 12, 37, 23 |
| 16 | ZC3H18 | zinc finger CCCH-type containing 18 | 158545 | 179588 | 124391 | 24, 42, 39 |
| 16 | ZC3H7A | zinc finger CCCH-type containing 7A | 122299 | 153066 | 171490 | |
| 16 | ZCCHC14 | zinc finger CCHC-type containing 14 | 140948 | 140941 | 154118 | 29, 16, 6 |
| 16 | ZDHHC1 | zinc finger DHHC-type containing 1 | 159714 | 159713 | 176387 | 26, 3, 13 |
| 16 | ZDHHC7 | zinc finger DHHC-type containing 7 | 153786 | 103196 | 135709 | 16, 13, 10 |
| 16 | ZFHX3 | zinc finger homeobox 3 | 140836 | 280264 | 103035 | 11, 26, 14 |
| 16 | ZNF174 | zinc finger protein 174 | 103343 | 140987 | 167981 | 9, 24, 39 |
| 16 | ZNF19 | zinc finger protein 19 | 157429 | 261611 | 140835 | |
| 16 | ZNF200 | zinc finger protein 200 | 010539 | 168124 | 103313 | |
| 16 | ZNF205 | zinc finger protein 205 | 122386 | 130182 | 085644 | 13, 9, 35 |
| 16 | ZNF213 | zinc finger protein 213 | 085644 | 122386 | 168124 | 44, 36, 39 |
| 16 | ZNF23 | zinc finger protein 23 | 167377 | 172137 | 261611 | 4, 2, 23 |
| 16 | ZNF263 | zinc finger protein 263 | 006194 | 103313 | 140993 | 15, 4, 24 |
| 16 | ZNF267 | zinc finger protein 267 | 185947 | 197302 | 270472 | 7, 42, 39 |
| 16 | ZNF276 | zinc finger protein 276 | 158805 | 075399 | 187741 | 1, 3, 36 |
| 16 | ZNF319 | zinc finger protein 319 | 166188 | 159648 | 103005 | 40, 1, 31 |
| 16 | ZNF423 | zinc finger protein 423 | 102935 | 166152 | 205423 | 11, 1, 10 |
| 16 | ZNF469 | zinc finger protein 469 | 225614 | 172530 | 179588 | 6, 22, 40 |
| 16 | ZNF48 | zinc finger protein 48 | 180035 | 180209 | 180096 | 33, 35, 2 |
| 16 | ZNF48 | zinc finger protein 48 | 283620 | 180096 | 179965 | 33, 35, 2 |
| 16 | ZNF500 | zinc finger protein 500 | 103199 | 166246 | 140623 | 42, 1, 38 |
| 16 | ZNF597 | zinc finger protein 597 | 167981 | 103343 | 122390 | 22, 42, 30 |
| 16 | ZNF598 | zinc finger protein 598 | 167962 | 127561 | 183971 | 9, 3, 14 |
| 16 | ZNF629 | zinc finger protein 629 | 102870 | 103549 | 099385 | 29, 33, 44 |
| 16 | ZNF646 | zinc finger protein 646 | 167395 | 167394 | 151006 | 41, 21, 1 |
| 16 | ZNF668 | zinc finger protein 668 | 167394 | 103496 | 167395 | 29, 24, 7 |
| 16 | ZNF688 | zinc finger protein 688 | 229809 | 169951 | 197162 | 34, 33, 41 |
| 16 | ZNF689 | zinc finger protein 689 | 156853 | 197162 | 156858 | 21, 11, 38 |
| 16 | ZNF720 | zinc finger protein 720 | 197302 | 169877 | 185947 | 11, 4, 18 |
| 16 | ZNF747 | zinc finger protein 747 | 169955 | 261459 | 260869 | 41, 13, 4 |
| 16 | ZNF75A | zinc finger protein 75a | 162086 | 140993 | 168158 | 22, 30, 11 |
| 16 | ZNF764 | zinc finger protein 764 | 169951 | 260869 | 229809 | 29, 22, 35 |
| 16 | ZNF768 | zinc finger protein 768 | 169957 | 005844 | 261459 | 21, 1, 26 |
| 16 | ZNF771 | zinc finger protein 771 | 179965 | 283620 | 179958 | 20, 29, 25 |
| 16 | ZNF778 | zinc finger protein 778 | 170100 | 259803 | 167522 | 30, 7, 45 |
| 16 | ZNF785 | zinc finger protein 785 | 197162 | 229809 | 156853 | 42, 36, 44 |
| 16 | ZNF821 | zinc finger protein 821 | 102984 | 182149 | 277481 | 41, 26, 31 |
| 16 | ZNF843 | zinc finger protein 843 | 176723 | 156885 | 140691 | 27, 14, 12 |
| 16 | ZFPM1 | zinc finger protein, FOG family member 1 | 179588 | 225614 | 158545 | 20, 27, 17 |
| 16 | ZKSCAN2 | zinc finger with KRAB and SCAN domains 2 | 155592 | 103375 | 182601 | 4, 39, 18 |
| 16 | ZP2 | zona pellucida glycoprotein 2 | 103310 | 011638 | 175311 | 8, 44, 38 |
| 16 | ZG16 | zymogen granule protein 16 | 174992 | 185905 | 079616 | 16, 28, 37 |
| 16 | ZG16B | zymogen granule protein 16B | 162078 | 007038 | 005001 | 34, 42, 37 |
| 17 | CNP | 2′,3′-cyclic nucleotide 3′ phosphodiesterase | 173786 | 204815 | 168259 | 8, 35, 17 |
| 17 | OGFOD3 | 2-oxoglutarate and iron dependent oxygenase domain containing 3 | 181396 | 181408 | 169660 | 40, |
| 17 | NT5C | 5′,3′-nudeotidase, cytosolic | 125458 | 125449 | 189159 | 3, 41, 34 |
| 17 | NT5M | 5′,3′-nucleotidase, mitochondrial | 205309 | 141030 | 141026 | 3, 9, 25 |
| 17 | NT5C3B | 5′-nucleotidase, cytosolic IIIB | 141698 | 141756 | 161594 | 9, 25, 38 |
| 17 | AATK-AS1 | AATK antisense RNA 1 | 225180 | 181409 | 141577 | |
| 17 | ABHD15 | abhydrolase domain containing 15 | 168792 | 160551 | 167543 | 22, 1, 30 |
| 17 | ABI3 | ABI family member 3 | 108798 | 167083 | 173868 | 41, 5, 31 |
| 17 | ACACA | acetyl-CoA carboxylase alpha | 278540 | 275700 | 278505 | 26, 33, 43 |
| 17 | ASIC2 | acid sensing ion channel subunit 2 | 108684 | 141316 | 108691 | 31, 8, 14 |
| 17 | ACTG1 | actin gamma 1 | 184009 | 266074 | 186765 | |
| 17 | ABR | active BCR-related | 159842 | 177370 | 205899 | |
| 17 | ACBD4 | acyl-CoA binding domain containing 4 | 181513 | 161714 | 186834 | 34, 1, 14 |
| 17 | ACADVL | acyl-CoA dehydrogenase, very long chain | 072778 | 132535 | 004975 | 2, 1, 26 |
| 17 | ACOX1 | acyl-CoA oxidase 1 | 161533 | 188878 | 257949 | 18, 4, 29 |
| 17 | ACSF2 | acyl-CoA synthetase family member 2 | 167107 | 108829 | 136457 | 2, 17, 39 |
| 17 | ADAM11 | ADAM metallopeptidase domain 11 | 073670 | 161692 | 182963 | 14, 12, 8 |
| 17 | AP2B1 | adaptor related protein complex 2 beta 1 subunit | 006125 | 108733 | 270647 | 38, 43, 24 |
| 17 | ADORA2B | adenosine A2b receptor | 170425 | 214946 | 214941 | 24, 18, 15 |
| 17 | ARL16 | ADP ribosylation factor like GTPase 16 | 214087 | 185298 | 185359 | 34, 1, 12 |
| 17 | ARL17A | ADP ribosylation factor like GTPase 17A | 185829 | 238083 | 283194 | |
| 17 | ARL17B | ADP ribosylation factor like GTPase 17B | 228696 | 120071 | 176681 | 3, 39, 37 |
| 17 | ARL4D | ADP ribosylation factor like GTPase 4D | 175906 | 236383 | 067596 | 26, 14, 9 |
| 17 | ARL5C | ADP ribosylation factor like GTPase 5C | 141748 | 161381 | 067191 | 39, 15, |
| 17 | ADPRM | ADP-ribose/CDP-alcohol diphosphatase, manganese dependent | 170222 | 133028 | 187824 | 4, 26, 11 |
| 17 | AKAP1 | A-kinase anchoring protein 1 | 121057 | 121064 | 153944 | 38, 40, 37 |
| 17 | AKAP10 | A-kinase anchoring protein 10 | 108599 | 083290 | 128487 | 18, 45, 38 |
| 17 | AARSD1 | alanyl-tRNA synthetase domain containing 1 | 266967 | 131482 | 267060 | |
| 17 | ALDH3A1 | aldehyde dehydrogenase 3 family member A1 | 108602 | 180638 | 083290 | 13, 3, 14 |
| 17 | ALDH3A2 | aldehyde dehydrogenase 3 family member A2 | 072210 | 142494 | 180638 | 2, 42, 24 |
| 17 | ALDOC | aldolase, fructose-bisphosphate C | 109107 | 087111 | 076382 | 8, 1, 15 |
| 17 | ALKBH5 | alkB homolog 5, RNA demethylase | 091542 | 091536 | 131899 | 34, 1, 22 |
| 17 | ALYREF | Aly/REF export factor | 183684 | 141522 | 141552 | 22, 3, 34 |
| 17 | AOC2 | amine oxidase, copper containing 2 | 131480 | 131467 | 131471 | 14, 6, 10 |
| 17 | AOC3 | amine oxidase, copper containing 3 | 131471 | 131480 | 131482 | 44, 42, 1 |
| 17 | NPEPPS | aminopeptidase puromycin sensitive | 141279 | 178852 | 108424 | 24, 39, 23 |
| 17 | APPBP2 | amyloid beta precursor protein binding protein 2 | 062725 | 141371 | 170836 | 38, 37, 10 |
| 17 | ANAPC11 | anaphase promoting complex subunit 11 | 141552 | 183684 | 183979 | 29, 31, 34 |
| 17 | ACE | angiotensin I converting enzyme | 159640 | 008283 | 264813 | 38, 29, 1 |
| 17 | ANKFN1 | ankyrin repeat and fibronectin type III domain containing 1 | 153930 | 141179 | 183691 | |
| 17 | ANKFY1 | ankyrin repeat and FYVE domain containing 1 | 185722 | 167740 | 132388 | 24, 39, 36 |
| 17 | ASB16 | ankyrin repeat and SOCS box containing 16 | 161664 | 125319 | 168591 | 18, 4, 24 |
| 17 | ANKRD13B | ankyrin repeat domain 13B | 198720 | 108262 | 167549 | 9, 6, 7 |
| 17 | ANKRD40 | ankyrin repeat domain 40 | 154945 | 108846 | 108848 | 6, 40, 37 |
| 17 | APOH | apolipoprotein H | 091583 | 154240 | 154229 | 19, 28, 15 |
| 17 | AATF | apoptosis antagonizing transcription factor | 275700 | 273706 | 278540 | 10, 9, 3 |
| 17 | AATK | apoptosis associated tyrosine kinase | 181409 | 175866 | 225180 | 26, 8, 11 |
| 17 | ALOX12B | arachidonate 12-lipoxygenase, 12R type | 179477 | 179593 | 179148 | 35, 4, 30 |
| 17 | ALOX12 | arachidonate 12-lipoxygenase, 12S type | 108839 | 167858 | 219200 | 27, 25, 12 |
| 17 | ALOX15 | arachidonate 15-lipoxygenase | 161905 | 188176 | 141456 | 24, 42, 1 |
| 17 | ALOX15B | arachidonate 15-lipoxygenase, type B | 179593 | 132518 | 179477 | 33, 35, 1 |
| 17 | ALOXE3 | arachidonate lipoxygenase 3 | 179148 | 179477 | 179111 | 4, 30, 8 |
| 17 | AANAT | aralkylamine N-acetyltransferase | 129673 | 175931 | 129667 | 14, 27, 17 |
| 17 | AMZ2 | archaelysin family metallopeptidase 2 | 196704 | 182481 | 141337 | 34, 7, 38 |
| 17 | ACAP1 | ArfGAP with coiled-coil, ankyrin repeat and PH domains 1 | 072818 | 215041 | 213859 | 21, 5, 22 |
| 17 | ADAP2 | ArfGAP with dual PH domains 2 | 184060 | 172171 | 181481 | |
| 17 | JMJD6 | arginine demethylase and lysine hydroxylase | 070495 | 182534 | 181038 | 34, 3, 29 |
| 17 | ARMC7 | armadillo repeat containing 7 | 125449 | 170190 | 125458 | 3, 13, 34 |
| 17 | ARRB2 | arrestin beta 2 | 141480 | 141456 | 161920 | 5, 1, 9 |
| 17 | AIPL1 | aryl hydrocarbon receptor interacting protein like 1 | 129221 | 179314 | 129195 | 14, 25, 32 |
| 17 | AFMID | arylformamidase | 183077 | 167900 | 089685 | 18, 7, 27 |
| 17 | ARSG | arylsulfatase G | 141337 | 196704 | 108932 | 5, 30, 40 |
| 17 | ASGR1 | asialoglycoprotein receptor 1 | 141505 | 161944 | 132535 | 19, 21, 38 |
| 17 | ASGR2 | asialoglycoprotein receptor 2 | 161944 | 132514 | 141505 | 19, 5, 36 |
| 17 | ASPA | aspartoacylase | 108381 | 141255 | 167723 | 17, 2, 25 |
| 17 | ASPSCR1 | ASPSCR1, UBX domain containing tether for SLC2A4 | 169696 | 185269 | 169689 | 29, 19, 5 |
| 17 | ATXN7L3 | ataxin 7 like 3 | 087152 | 168591 | 108312 | 21, 39, 43 |
| 17 | ABCA10 | ATP binding cassette subfamily A member 10 | 154263 | 154262 | 154265 | 11, 42, 4 |
| 17 | ABCA5 | ATP binding cassette subfamily A member 5 | 154265 | 154263 | 108984 | 29, 31, 18 |
| 17 | ABCA6 | ATP binding cassette subfamily A member 6 | 154262 | 154258 | 154263 | 26, 45, 22 |
| 17 | ABCA8 | ATP binding cassette subfamily A member 8 | 141338 | 108950 | 154258 | 11, 26, 2 |
| 17 | ABCA9 | ATP binding cassette subfamily A member 9 | 154258 | 141338 | 154262 | 1, 25, 42 |
| 17 | ABCC3 | ATP binding cassette subfamily C member 3 | 108846 | 006283 | 154945 | 16, 2, 19 |
| 17 | ACLY | ATP citrate lyase | 131473 | 178502 | 204815 | |
| 17 | ATPAF2 | ATP synthase mitochondrial F1 complex assembly factor 2 | 171953 | 171962 | 141034 | 29, 3, 39 |
| 17 | ATP5G1 | ATP synthase, H+ transporting, mitochondrial Fp complex subunit C1 (subunit 9) | 159199 | 136436 | 159202 | 29, 15, 7 |
| 17 | ATP5H | ATP synthase, H+ transporting, mitpchpndrial Fp complex subunit D | 167863 | 281674 | 170190 | 43, 29, 27 |
| 17 | ATAD5 | ATPase family, AAA domain containing 5 | 176208 | 176390 | 172171 | 13, 7, 22 |
| 17 | ATP6V0A1 | ATPase H+ transporting V0 subunit a1 | 033627 | 177469 | 108784 | 8, 26, 39 |
| 17 | ATP1B2 | ATPase Na+/K+ transporting subunit beta 2 | 129244 | 141504 | 141510 | 8, 14, 26 |
| 17 | ATP2A3 | ATPase sarcoplasmic/endoplasmic reticulum Ca2+ transporting 3 | 074370 | 108405 | 074755 | 22, 28, 7 |
| 17 | AURKB | aurora kinase B | 178999 | 279152 | 178971 | 21, 19, 12 |
| 17 | AXIN2 | axin 2 | 168646 | 108370 | 266076 | 16, 44, 26 |
| 17 | B9D1 | B9 domain containing 1 | 108641 | 072134 | 166484 | 29, 31, 18 |
| 17 | BIRC5 | baculoviral IAP repeat containing 5 | 089685 | 183077 | 204278 | 34, 9, 39 |
| 17 | BAHCC1 | BAH domain and coiled-coil containing 1 | 266074 | 185332 | 184009 | |
| 17 | BAIAP2 | BAH associated protein 2 | 175866 | 176108 | 181409 | 8, 14, 9 |
| 17 | BHLHA9 | basic helix-loop-helix family member a9 | 205899 | 159842 | 184811 | |
| 17 | BCAS3 | BCAS3, microtubule associated cell migration factor | 141376 | 281267 | 121068 | |
| 17 | BCL6B | B-cell CLL/lymphoma 6B | 161940 | 258315 | 174327 | 44, 20, 17 |
| 17 | BECN1 | beclin 1 | 126581 | 176563 | 131467 | 45, 36, 15 |
| 17 | B4GALNT2 | beta-1,4-N-acetyl-galactosaminyltransferase 2 | 167080 | 159217 | 167083 | 15, 16, 38 |
| 17 | BLMH | bleomycin hydrolase | 108578 | 108576 | 182271 | 21, 45, 39 |
| 17 | BORCS6 | BLOC-1 related complex subunit 6 | 196544 | 179029 | 279152 | |
| 17 | BRIP1 | BRCA1 interacting protein C-terminal helicase 1 | 136492 | 253506 | 108506 | 38, 23, 22 |
| 17 | BRCA1 | BRCA1, DNA repair associated | 012048 | 108830 | 188554 | 22, 35, 3 |
| 17 | BPTF | bromodomain PHD finger transcription factor | 171634 | 130935 | 186665 | 26, 22, 18 |
| 17 | BTBD17 | BTB domain containing 17 | 204347 | 196169 | 257008 | 27, 8, 28 |
| 17 | C1QTNF1 | C1q and tumor necrosis factor related protein 1 | 173918 | 171302 | 167280 | 2, 26, 6 |
| 17 | CANT1 | calcium activated nucleotidase 1 | 171302 | 108679 | 173918 | |
| 17 | CALCOCO2 | calcium binding and coiled-coil domain 2 | 136436 | 170703 | 159199 | |
| 17 | CACNB1 | calcium voltage-gated channel auxiliary subunit beta 1 | 067191 | 141748 | 108298 | 26, 25, 15 |
| 17 | CACNG1 | calcium voltage-gated channel auxiliary subunit gamma 1 | 108878 | 075461 | 198265 | 25, 15, 17 |
| 17 | CACNG4 | calcium voltage-gated channel auxiliary subunit gamma 4 | 075461 | 075429 | 108878 | 26, 23, 8 |
| 17 | CACNG5 | calcium voltage-gated channel auxiliary subunit gamma 5 | 075429 | 154229 | 075461 | 27, 14, |
| 17 | CACNA1G | calcium voltage-gated channel subunit alpha1 G | 006283 | 006282 | 108846 | 11, 14, 15 |
| 17 | CAMKK1 | calcium/calmodulin dependent protein kinase kinase 1 | 004660 | 074356 | 108405 | 26, 9, 14 |
| 17 | CAMTA2 | calmodulin binding transcription activator 2 | 108509 | 091640 | 196388 | 21, 33, 14 |
| 17 | CASC3 | cancer susceptibility candidate 3 | 108349 | 188895 | 108352 | 42, 24, 38 |
| 17 | CA10 | carbonic anhydrase 10 | 154975 | 011260 | 141200 | 8, 14, 32 |
| 17 | CA4 | carbonic anhydrase 4 | 167434 | 068097 | 170832 | 1, 29, 15 |
| 17 | CPD | carboxypeptidase D | 108582 | 182271 | 108587 | 42, 1, 45 |
| 17 | CSNK1D | casein kinase 1 delta | 141551 | 141526 | 173762 | 24, 42, 39 |
| 17 | CASKIN2 | CASK interacting protein 2 | 177303 | 177728 | 182173 | 26, 18, 1 |
| 17 | CARD14 | caspase recruitment domain family member 14 | 141527 | 141543 | 181523 | 32, |
| 17 | CCL1 | C-C motif chemokine ligand 1 | 108702 | 181374 | 181291 | 41, 20, 38 |
| 17 | CCL11 | C-C motif chempkine ligand 11 | 172156 | 108688 | 108700 | 28, 44, 17 |
| 17 | CCL13 | C-C metif chempkine ligand 13 | 181374 | 108700 | 108702 | 28, 6, 20 |
| 17 | CCL14 | C-C metif chempkine ligand 14 | 276409 | 275152 | 275688 | 1, 36, 15 |
| 17 | CCL15 | C-C metif chempkine ligand 15 | 275718 | 275688 | 274736 | 11, 3, 17 |
| 17 | CCL16 | C-C metif chempkine ligand 16 | 275152 | 275722 | 276409 | 26, 19, |
| 17 | CCL18 | C-C metif chempkine ligand 18 | 275385 | 274736 | 277632 | 6, 28, 45 |
| 17 | CCL2 | C-C metif chemokine ligand 2 | 108691 | 108684 | 108688 | 2, 5, 28 |
| 17 | CCL23 | C-C motif chemokine ligand 23 | 274736 | 275718 | 275385 | 20, 19, 32 |
| 17 | CCL3 | C-C motif chemokine ligand 3 | 277632 | 275385 | 275302 | 5, 32, 14 |
| 17 | CCL3L3 | C-C motif chemokine ligand 3 like 3 | 276085 | 274808 | 276070 | 5, 29, 2 |
| 17 | CCL4 | C-C motif chemokine ligand 4 | 275302 | 277632 | 274808 | 5, 2, 29 |
| 17 | CCL4L2 | C-C motif chemokine ligand 4 like 2 | 276070 | 276085 | 274933 | 5, 2, 29 |
| 17 | CCL5 | C-C motif chemokine ligand 5 | 271503 | 270379 | 278023 | 30, 5, 1 |
| 17 | CCL7 | C-C motif chemokine ligand 7 | 108688 | 108691 | 172156 | 5, 35, 44 |
| 17 | CCL8 | C-C motif chemokine ligand 8 | 108700 | 172156 | 181374 | 2, 6, 19 |
| 17 | CCR10 | C-C motif chemokine receptor 10 | 184451 | 068137 | 108797 | 6, 14, 28 |
| 17 | CCR7 | C-C motif chemokine receptor 7 | 126353 | 131746 | 073584 | 30, 5, 36 |
| 17 | CCL15-CCL14 | CCL15-CCL14 readthrough (NMD candidate) | 275688 | 276409 | 275718 | |
| 17 | CD300LB | CD300 molecule like family member b | 178789 | 167851 | 167850 | 5, 36, 25 |
| 17 | CD300LD | CD300 molecule like family member d | 204345 | 167850 | 186407 | |
| 17 | CD300LF | CD300 molecule like family member f | 186074 | 172794 | 109062 | 7, 30, 34 |
| 17 | CD300LG | CD300 molecule like family member g | 161649 | 161647 | 108852 | 38, 32, 25 |
| 17 | CD300A | CD300a molecule | 167851 | 170412 | 178789 | 5, 11, 27 |
| 17 | CD300C | CD300c molecule | 167850 | 178789 | 204345 | 20, 42, 23 |
| 17 | CD300E | CD300e molecule | 186407 | 204345 | 172794 | |
| 17 | CD68 | CD68 molecule | 129226 | 161960 | 129255 | 1, 10, 36 |
| 17 | CD7 | CD7 molecule | 173762 | 141551 | 141574 | 5, 36, 41 |
| 17 | CD79B | CD79b molecule | 007312 | 259384 | 007314 | 41, 21, 22 |
| 17 | CDC42EP4 | CDC42 effector protein 4 | 179604 | 187959 | 069188 | 24, 28, 39 |
| 17 | CISD3 | CDGSH iron sulfur domain 3 | 277972 | 279119 | 277258 | 14, 27, 29 |
| 17 | CDK5RAP3 | CDK5 regulatory subunit associated protein 3 | 108465 | 167183 | 005243 | 39, 13, 36 |
| 17 | CDC27 | cell division cycle 27 | 004897 | 179673 | 198336 | 22, 10, 1 |
| 17 | CDC6 | cell division cycle 6 | 094804 | 171475 | 131759 | 9, 24, 45 |
| 17 | CNTROB | centrobin, centriole duplication and spindle assembly protein | 170037 | 170043 | 132518 | |
| 17 | CENPV | centromere protein V | 166582 | 108474 | 170315 | 37, 27, 12 |
| 17 | CENPX | centromere protein X | 169689 | 169696 | 169683 | |
| 17 | CEP112 | centrosomal protein 112 | 154240 | 266076 | 091583 | 38, 10, 13 |
| 17 | CEP131 | centrosomal protein 131 | 141577 | 225180 | 167302 | |
| 17 | CEP95 | centrosomal protein 95 | 258890 | 108654 | 108854 | 23, 7, 18 |
| 17 | CEP295NL | CEP295 N-terminal like | 178404 | 035862 | 108679 | |
| 17 | CDR2L | cerebellar degeneration related protein 2 like | 109089 | 167861 | 167862 | 26, 6, 3 |
| 17 | CCT6B | chaperonin containing TCP1 subunit 6B | 132141 | 181291 | 198783 | 38, 37, 45 |
| 17 | CHMP6 | charged multivesicular body protein 6 | 176108 | 141564 | 175866 | 34, 1, 9 |
| 17 | CHRNB1 | cholinergic receptor nicotinic beta 1 subunit | 170175 | 161958 | 174282 | 24, 25, 15 |
| 17 | CHRNE | cholinergic receptor nicotinic epsilon subunit | 108556 | 141503 | 205710 | 36, 14, |
| 17 | CHAD | chondroadherin | 136457 | 167107 | 136444 | 6, 10, 4 |
| 17 | CSH1 | chorionic somatomammotropin hormone 1 | 136488 | 136487 | 204414 | 32, 45, 11 |
| 17 | CSH2 | chorionic somatomammotropin hormone 2 | 213218 | 108604 | 136487 | 32, 45, 40 |
| 17 | CSHL1 | chorionic somatomammotropin hormone like 1 | 204414 | 136488 | 259384 | 32, 40, 5 |
| 17 | CBX1 | chromobox 1 | 108468 | 082641 | 002919 | 29, 11, 15 |
| 17 | CBX2 | chromobox 2 | 173894 | 182156 | 141570 | 12, 3, 44 |
| 17 | CBX4 | chromobox 4 | 141582 | 141570 | 167291 | 18, 9, 21 |
| 17 | CBX8 | chromobox 8 | 141570 | 173894 | 141582 | 13, 9, 18 |
| 17 | CHD3 | chromodomain helicase DNA binding protein 3 | 170004 | 182224 | 179859 | 18, 21, 22 |
| 17 | C17orf100 | chromosome 17 open reading frame 100 | 279257 | 108590 | 141485 | 20, 38, 16 |
| 17 | C17orf105 | chromosome 17 open reading frame 105 | 231256 | 108861 | 161647 | |
| 17 | C17orf107 | chromosome 17 open reading frame 107 | 205710 | 108556 | 185245 | 43, 42, 39 |
| 17 | C17orf47 | chromosome 17 open reading frame 47 | 181013 | 108387 | 121101 | 38, 5, |
| 17 | C17orf49 | chromosome 17 open reading frame 49 | 258315 | 161939 | 161940 | 22, 41, 7 |
| 17 | C17orf50 | chromosome 17 open reading frame 50 | 270806 | 271447 | 270379 | 38, 8, |
| 17 | C17orf51 | chromosome 17 open reading frame 51 | 212719 | 184185 | 260458 | |
| 17 | C17orf53 | chromosome 17 open reading frame 53 | 125319 | 108840 | 161664 | 41, 12, 22 |
| 17 | C17orf58 | chromosome 17 open reading frame 58 | 186665 | 171634 | 182481 | 9, 34, 18 |
| 17 | C17orf62 | chromosome 17 open reading frame 62 | 178927 | 169660 | 141562 | 36, 5, 21 |
| 17 | C17orf64 | chromosome 17 open reading frame 64 | 141371 | 170832 | 062725 | 38, 28, 10 |
| 17 | C17orf67 | chromosome 17 open reading frame 67 | 214226 | 183691 | 153933 | 39, 45, 28 |
| 17 | C17orf74 | chromosome 17 open reading frame 74 | 184560 | 181323 | 283439 | 38, 8, |
| 17 | C17orf75 | chromosome 17 open reading frame 75 | 108666 | 141314 | 010244 | 26, 38, 11 |
| 17 | C17orf78 | chromosome 17 open reading frame 78 | 278505 | 278540 | 276234 | 2, 16, |
| 17 | C17orf80 | chromosome 17 open reading frame 80 | 141219 | 133193 | 187959 | 29, 41, 22 |
| 17 | C17orf96 | Chromosome 17 open reading frame 96 | 273604 | 277363 | 275023 | 29, 3, 9 |
| 17 | C17orf97 | chromosome 17 open reading frame 97 | 187624 | 181031 | 183688 | 38, 31, 23 |
| 17 | C17orf98 | chromosome 17 open reading frame 98 | 275489 | 273559 | 125691 | 38, 10, |
| 17 | C17orf99 | chromosome 17 open reading frame 99 | 187997 | 167895 | 108639 | 39, 15, 36 |
| 17 | CFAP52 | cilia and flagella associated protein 52 | 166596 | 170310 | 154914 | 30, 42, 38 |
| 17 | CLTC | clathrin heavy chain | 141367 | 108406 | 141378 | 3, 12, 25 |
| 17 | CLDN7 | claudin 7 | 181885 | 170291 | 181856 | 16, 13, 27 |
| 17 | CPSF4L | cleavage and polyadenylation specific factor 4 like | 187959 | 141219 | 179604 | |
| 17 | CLUH | clustered mitochondria homolog | 132361 | 007168 | 132359 | 3, 21, 1 |
| 17 | CDRT1 | CMT1A duplicated region transcript 1 | 241322 | 175106 | 283295 | |
| 17 | CDRT1 | CMT1A duplicated region transcript 1 | 283295 | 241322 | 251537 | |
| 17 | CDRT15 | CMT1A duplicated region transcript 15 | 223510 | 006695 | 125430 | 38, |
| 17 | CDRT15L2 | CMT1A duplicated region transcript 15-like 2 | 214819 | 170298 | 205212 | 38, |
| 17 | CDRT4 | CMT1A duplicated region transcript 4 | 239704 | 125409 | 259024 | 16, 38, 44 |
| 17 | COPZ2 | coatomer protein complex subunit zeta 2 | 005243 | 108465 | 082641 | 6, 40, 15 |
| 17 | COASY | Coenzyme A synthase | 068120 | 108786 | 108788 | 36, 2, 39 |
| 17 | CCDC103 | coiled-coil domain containing 103 | 167131 | 108883 | 214447 | 42, 43, 38 |
| 17 | CCDC137 | coiled-coil domain containing 137 | 185298 | 204237 | 214087 | 3, 9, 27 |
| 17 | CCDC144NL | coiled-coil domain containing 144 family, N-terminal like | 205212 | 214819 | 124422 | 22, 38, 23 |
| 17 | CCDC144A | coiled-coil domain containing 144A | 170160 | 197566 | 266302 | |
| 17 | CCDC182 | coiled-coil domain containing 182 | 166329 | 153944 | 181610 | |
| 17 | CCDC40 | coiled-coil domain containing 40 | 141519 | 167291 | 171298 | |
| 17 | CCDC42 | coiled-coil domain containing 42 | 161973 | 133026 | 183318 | 38, 10, 33 |
| 17 | CCDC43 | coiled-coil domain containing 43 | 180329 | 180336 | 161692 | 21, 25, 40 |
| 17 | CCDC47 | coiled-coil domain containing 47 | 108588 | 125695 | 198231 | 43, 13, 40 |
| 17 | CCDC57 | coiled-coil domain containing 57 | 176155 | 169710 | 141526 | |
| 17 | COIL | coilin | 121058 | 121060 | 121064 | 11, 9, 38 |
| 17 | COL1A1 | collagen type I alpha 1 chain | 108821 | 108823 | 167105 | 11, 6, 12 |
| 17 | CSF3 | colony stimulating factor 3 | 108342 | 108344 | 008838 | 9, 20, 35 |
| 17 | C1QBP | complement C1q binding protein | 108561 | 129197 | 005100 | 21, 3, 41 |
| 17 | C1QL1 | complement C1q like 1 | 131094 | 186185 | 172992 | 28, 6, 8 |
| 17 | COG1 | component of oligomeric golgi complex 1 | 166685 | 180616 | 133193 | 31, 40, 38 |
| 17 | CNTNAP1 | contactin associated protein 1 | 108797 | 184451 | 108799 | 18, 26, 14 |
| 17 | COPRS | coordinator of PRMT5 and differentiation stimulator | 172301 | 131242 | 108651 | 34, 33, 17 |
| 17 | COPS3 | COP9 signalosome subunit 3 | 141030 | 154803 | 205309 | 31, 25, 15 |
| 17 | CORO6 | coronin 6 | 167549 | 198720 | 141298 | 26, 18, 25 |
| 17 | CRHR1 | corticotropin releasing hormone receptor 1 | 120088 | 263715 | 185294 | 14, 8, 27 |
| 17 | CRHR1 | corticotropin releasing hormone receptor 1 | 263715 | 225190 | 120088 | 14, 8, 27 |
| 17 | COX10 | COX10, heme A: farnesyltransferase cytochrome c oxidase assembly factor | 006695 | 153976 | 223510 | 43, 37, 38 |
| 17 | COX11 | COX11, cytochrome c oxidase copper chaperone | 166260 | 141198 | 166263 | 11, 14, 4 |
| 17 | CRK | CRK proto-oncogene, adaptor protein | 167193 | 108953 | 197879 | 3, 45, 23 |
| 17 | CRYBA1 | crystallin beta A1 | 108255 | 221995 | 108256 | 14, 12, 10 |
| 17 | CTC1 | CST telomere replication complex component 1 | 178971 | 178999 | 178921 | 39, 22, 41 |
| 17 | CTDNEP1 | CTD nuclear envelope phosphatase 1 | 175826 | 262526 | 262302 | 43, 27, 9 |
| 17 | CLEC10A | C-type lectin domain family 10 member A | 132514 | 174326 | 161944 | 1, 5, 6 |
| 17 | CUEDC1 | CUE domain containing 1 | 180891 | 181610 | 136451 | 34, 26, 13 |
| 17 | CWC25 | CWC25 spliceosome associated protein homolog | 273559 | 276293 | 275489 | 39, 43, 1 |
| 17 | CXCL16 | C-X-C motif chemokine ligand 16 | 161921 | 161920 | 141497 | 36, 10, 37 |
| 17 | CDK12 | cyclin dependent kinase 12 | 167258 | 125686 | 171532 | |
| 17 | CDK3 | cyclin dependent kinase 3 | 250506 | 261408 | 167880 | 22, 23, 16 |
| 17 | CDK5R1 | cyclin dependent kinase 5 regulatory subunit 1 | 176749 | 108671 | 176658 | 5, 38, |
| 17 | CNTD1 | cyclin N-terminal domain containing 1 | 176563 | 183978 | 126581 | 38, 16, 40 |
| 17 | CTNS | cystinosin, lysosomal cystine transporter | 040531 | 197417 | 213977 | 9, 5, 38 |
| 17 | CYB5D1 | cytochrome b5 domain containing 1 | 182224 | 183011 | 170004 | 42, 40, 26 |
| 17 | CYB5D2 | cytochrome b5 domain containing 2 | 167740 | 074755 | 185722 | 29, 13, 3 |
| 17 | CYB561 | cytochrome b561 | 008283 | 170921 | 159640 | 23, 27, 2 |
| 17 | COA3 | cytochrome c oxidase assembly factor 3 | 183978 | 126562 | 176563 | 29, 15, 34 |
| 17 | CYGB | cytoglobin | 161544 | 129667 | 214140 | 26, 15, 31 |
| 17 | CYTH1 | cytohesin 1 | 108669 | 187775 | 055483 | 8, 39, 34 |
| 17 | CRLF3 | cytokine receptor like factor 3 | 176390 | 266733 | 176208 | |
| 17 | DBF4B | DBF4 zinc finger B | 161692 | 180329 | 073670 | 39, 5, 22 |
| 17 | DCAF7 | DDB 1 and CUL4 associated factor 7 | 136485 | 173826 | 136463 | 22, 1, 14 |
| 17 | DDX42 | DEAD-box helicase 42 | 198231 | 108588 | 108592 | |
| 17 | DDX5 | DEAD-box helicase 5 | 108654 | 256525 | 258890 | 42, 39, 36 |
| 17 | DHX33 | DEAH-box helicase 33 | 005100 | 108561 | 072849 | 44, 23, 3 |
| 17 | DHX40 | DEAH-box helicase 40 | 108406 | 175155 | 141367 | 29, 45, 11 |
| 17 | DHX8 | DEAH-box helicase 8 | 067596 | 175906 | 175832 | 24, 42, 43 |
| 17 | DHRS11 | dehydrogenase/reductase 11 | 278535 | 278311 | 278619 | 3, 16, 40 |
| 17 | DHRS13 | dehydrogenase/reductase 13 | 167536 | 132589 | 109118 | 40, 9, 5 |
| 17 | DHRS7B | dehydrogenase/reductase 7B | 109016 | 124422 | 178307 | 6, |
| 17 | DHRS7C | dehydrogenase/reductase 7C | 184544 | 154914 | 214978 | 15, 25, |
| 17 | DCAKD | dephospho-CoA kinase domain containing | 172992 | 131094 | 136448 | 9, 27, 28 |
| 17 | DERL2 | derlin 2 | 072849 | 005100 | 167842 | 30, 2, 20 |
| 17 | DRG2 | develppmentally regulated GTP binding protein 2 | 108591 | 141034 | 091536 | 9, 2, 39 |
| 17 | DDX52 | DExD-bex helicase 52 | 278053 | 275066 | 275410 | 4, 30, 5 |
| 17 | DHX58 | DExH-box helicase 58 | 108771 | 267221 | 108773 | 39, 4, 36 |
| 17 | DGKE | diacylglycerol kinase epsilcn | 153933 | 214226 | 121060 | 9, 22, 1 |
| 17 | DCXR | dicarbcnyl and L-xylulcse reductase | 169738 | 169750 | 169733 | 33, 34, 19 |
| 17 | DUS1L | dihydrouridine synthase 1 like | 169718 | 169727 | 169710 | 3, 9, 40 |
| 17 | DPH1 | diphthamide biosynthesis 1 | 108963 | 185924 | 262664 | 26, 2, 22 |
| 17 | DLG4 | discs large MAGUK scaffold protein 4 | 132535 | 141505 | 072778 | |
| 17 | DVL2 | dishevelled segment polarity protein 2 | 004975 | 072778 | 040633 | 24, 9, 39 |
| 17 | DLX3 | distal-less homeobox 3 | 064195 | 108813 | 005884 | 10, 32, 13 |
| 17 | DLX4 | distal-less homeobox 4 | 108813 | 176358 | 064195 | 32, 6, 35 |
| 17 | LIG3 | DNA ligase 3 | 005156 | 198783 | 092871 | 43, 9, 7 |
| 17 | POLDIP2 | DNA polymerase delta interacting protein 2 | 004142 | 109079 | 244045 | 18, 34, 2 |
| 17 | POLG2 | DNA polymerase gamma 2, accessory subunit | 256525 | 271605 | 108654 | 9, 1, 25 |
| 17 | DNAJC7 | DnaJ heat shock protein family (Hsp40) member C7 | 168259 | 173786 | 168256 | |
| 17 | DOC2B | double C2 domain beta | 272636 | 268320 | 181031 | 27, 17, 14 |
| 17 | DUSP14 | dual specificity phosphatase 14 | 276023 | 276234 | 275066 | 9, 6, 31 |
| 17 | DUSP3 | dual specificity phcsphatase 3 | 108861 | 167941 | 231256 | 35, 24, 9 |
| 17 | DNAH17 | dynein axonemal heavy chain 17 | 187775 | 087157 | 108669 | 38, 18, 8 |
| 17 | DNAH2 | dynein axonemal heavy chain 2 | 183914 | 108947 | 132510 | 26, 23, 42 |
| 17 | DNAH9 | dynein axonemal heavy chain 9 | 007174 | 188803 | 154957 | 42, 38, 20 |
| 17 | DNAI2 | dynein axonemal intermediate chain 2 | 171595 | 141540 | 196169 | 38, 20, 44 |
| 17 | DYNLL2 | dynein light chain LC8-type 2 | 264364 | 136450 | 141194 | 38, 15, 40 |
| 17 | DRC3 | dynein regulatory complex subunit 3 | 171962 | 175662 | 171953 | |
| 17 | EVI2A | ecotropic viral integration site 2A | 126860 | 265118 | 131242 | 22, 6, 8 |
| 17 | EVI2B | ecotropic viral integration site 2B | 185862 | 126861 | 265118 | 5, 36, 7 |
| 17 | ENPP7 | ectonucleotide pyrophosphatase/phosphodiesterase 7 | 182156 | 167281 | 173894 | 19, 17, 37 |
| 17 | EFCAB13 | EF-hand calcium binding domain 13 | 178852 | 259753 | 141279 | 45, 4, 25 |
| 17 | EFCAB3 | EF-hand calcium binding domain 3 | 172421 | 270033 | 087995 | 38, |
| 17 | EFCAB5 | EF-hand calcium binding domain 5 | 176927 | 141298 | 126653 | 38, 22, 10 |
| 17 | ELAC2 | elaC ribonuclease Z 2 | 006744 | 006740 | 153976 | 3, 24, 39 |
| 17 | EFTUD2 | elongation factor Tu GTP binding domain containing 2 | 108883 | 131097 | 167131 | 43, 24, 21 |
| 17 | ELP5 | elongator acetyltransferase complex subunit 5 | 170291 | 262302 | 181885 | 9, 14, 3 |
| 17 | ENGASE | endo-beta-N-acetylglucosaminidase | 167280 | 173918 | 167281 | 18, 7, 1 |
| 17 | ENDOV | endonuclease V | 173818 | 173821 | 171246 | 20, 39, 44 |
| 17 | ERN1 | endoplasmic reticulum to nucleus signaling 1 | 178607 | 108622 | 136478 | 45, 25, 7 |
| 17 | EZH1 | enhancer of zeste 1 polycomb repressive complex 2 subunit | 108799 | 108797 | 131477 | 29, 39, 26 |
| 17 | ENO3 | enolase 3 | 108515 | 108518 | 091640 | 25, 15, 18 |
| 17 | EVPL | envoplakin | 167880 | 250506 | 167881 | 40, 4, 30 |
| 17 | EVPLL | envoplakin like | 214860 | 176974 | 171916 | 9, 38, 35 |
| 17 | EPX | eosinophil peroxidase | 121053 | 255713 | 011143 | 7, 39, 5 |
| 17 | EFNB3 | ephrin B3 | 108947 | 141499 | 183914 | 27, 12, 8 |
| 17 | EPN2 | epsin 2 | 072134 | 189152 | 108641 | 24, 8, 26 |
| 17 | EPN3 | epsin 3 | 049283 | 136449 | 006282 | |
| 17 | EMC6 | ER membrane protein complex subunit 6 | 127774 | 257950 | 083454 | 29, 6, 35 |
| 17 | ERAL1 | Era like 12S mitochondrial rRNA chaperone 1 | 132591 | 173065 | 132589 | 19, 13, 27 |
| 17 | ERBB2 | erb-b2 receptor tyrosine kinase 2 | 141736 | 161395 | 141741 | 23, 18, 16 |
| 17 | EME1 | essential meiotic structure-specific endonuclease 1 | 154920 | 108826 | 108829 | 18, 34, 13 |
| 17 | ETV4 | ETS variant 4 | 175832 | 067596 | 005102 | 37, 27, 16 |
| 17 | EIF1 | eukaryotic translation initiation factor 1 | 173812 | 128422 | 184502 | 1, 11, 43 |
| 17 | EIF4A1 | eukaryotic translation initiation factor 4A1 | 161960 | 277957 | 129226 | 9, 21, 3 |
| 17 | EIF4A3 | eukaryotic translation initiation factor 4A3 | 141543 | 171298 | 141527 | |
| 17 | EIF5A | eukaryotic translation initiation factor 5A | 132507 | 006047 | 132522 | 12, 21, 23 |
| 17 | EXOC7 | exocyst complex component 7 | 182473 | 182687 | 129654 | 34, 4, 40 |
| 17 | FAM20A | FAM20A, golgi associated secretory pathway pseudokinase | 108950 | 108946 | 141338 | 18, 38, 17 |
| 17 | FAM104A | family with sequence similarity 104 member A | 133193 | 166685 | 141219 | 38, 24, 41 |
| 17 | FAM106A | Family with sequence similarity 106 member A | 213077 | 171916 | 189375 | 25, 15, 12 |
| 17 | FAM117A | family with sequence similarity 117 member A | 121104 | 121073 | 136504 | 29, 38, 36 |
| 17 | FAM134C | family with sequence similarity 134 member C | 141699 | 131470 | 131462 | 42, 43, 29 |
| 17 | FAM171A2 | family with sequence similarity 171 member A2 | 161682 | 030582 | 005961 | 13, 12, 8 |
| 17 | FAM187A | family with sequence similarity 187 member A | 214447 | 167131 | 131095 | 42, 43, 38 |
| 17 | FAM222B | family with sequence similarity 222 member B | 173065 | 076604 | 132591 | 35, 38, 13 |
| 17 | FAM57A | family with sequence similarity 57 member A | 167695 | 141252 | 179409 | |
| 17 | FAM64A | family with sequence similarity 64 member A | 129195 | 129221 | 091622 | 3, 34, 12 |
| 17 | FAM83G | family with sequence similarity 83 member G | 188522 | 154025 | 154016 | 9, 12, 3 |
| 17 | FAAP100 | Fanconi anemia core complex associated protein 100 | 185504 | 186765 | 182446 | 29, 22, 27 |
| 17 | FBF1 | Fas binding factor 1 | 188878 | 267426 | 161533 | 25, 26, 40 |
| 17 | FSCN2 | fascin actin-bundling protein 2, retinal | 186765 | 184009 | 185504 | 14, 22, 27 |
| 17 | FADS6 | fatty acid desaturase 6 | 172782 | 161513 | 182040 | 2, 8, 35 |
| 17 | FASN | fatty acid synthase | 169710 | 169718 | 176155 | 33, 35, 1 |
| 17 | FBXL20 | F-box and leucine rich repeat protein 20 | 108306 | 141750 | 125686 | 23, 24, 18 |
| 17 | FBXW10 | F-box and WD repeat domain containing 10 | 171931 | 108448 | 171928 | 38, 32, 8 |
| 17 | FBXO39 | F-box protein 39 | 177294 | 132530 | 167858 | 38, 8, |
| 17 | FBXO47 | F-box protein 47 | 204952 | 263874 | 161381 | 38, |
| 17 | FDXR | ferredoxin reductase | 161513 | 161509 | 172782 | 2, 36, 38 |
| 17 | FGF11 | fibroblast growth factor 11 | 161958 | 181284 | 170175 | 2, 14, 23 |
| 17 | FNDC8 | fibronectin type III domain containing 8 | 073598 | 185379 | 073536 | 38, 17, 8 |
| 17 | FKBP10 | FK506 binding protein 10 | 141756 | 141696 | 141698 | 45, 10, 35 |
| 17 | FLII | FLII, actin remodeling protein | 177731 | 131899 | 177427 | 9, 42, 22 |
| 17 | FLOT2 | flotillin 2 | 132589 | 132591 | 167536 | 18, 9, 21 |
| 17 | FXR2 | FMR1 autosomal homolog 2 | 129245 | 129194 | 129214 | 34, 26, 21 |
| 17 | FLCN | folliculin | 154803 | 264187 | 141030 | 25, 1, 26 |
| 17 | FOXJ1 | forkhead box J1 | 129654 | 182473 | 141576 | 27, 20, 44 |
| 17 | FOXK2 | forkhead box K2 | 141568 | 141562 | 141580 | |
| 17 | FOXN1 | forkhead box N1 | 109101 | 007216 | 109103 | 24, 18, 39 |
| 17 | FMNL1 | formin like 1 | 184922 | 168517 | 184361 | 5, 21, 41 |
| 17 | FZD2 | frizzled class receptor 2 | 180340 | 186566 | 180336 | 29, 12, 19 |
| 17 | FN3K | fructosamine 3 kinase | 167363 | 280575 | 141556 | 40, 26, 31 |
| 17 | FN3KRP | fructosamine 3 kinase related protein | 141560 | 141542 | 280575 | 9, 17, 3 |
| 17 | FTSJ3 | FtsJ homolog 3 | 108592 | 198231 | 087191 | 24, 39, 43 |
| 17 | GPS1 | G protein pathway suppressor 1 | 169727 | 169733 | 169718 | 1, 2, 31 |
| 17 | GPS2 | G protein pathway suppressor 2 | 132522 | 132507 | 261915 | 21, 35, 40 |
| 17 | GNA13 | G protein subunit alpha 13 | 120063 | 176809 | 108370 | 22, 39, 26 |
| 17 | GNGT2 | G protein subunit gamma transducin 2 | 167083 | 167080 | 108798 | 14, 22, 39 |
| 17 | GPR142 | G protein-coupled receptor 142 | 257008 | 204347 | 170412 | |
| 17 | GPR179 | G protein-coupled receptor 179 | 277399 | 278845 | 274211 | 15, 14, 8 |
| 17 | GPRC5C | G protein-coupled receptor class C group 5 member C | 170412 | 257008 | 167851 | 3, 37, 15 |
| 17 | GABARAP | GABA type A receptor-associated protein | 170296 | 040633 | 262526 | 40, 1, 33 |
| 17 | GALK1 | galactokinase 1 | 108479 | 132470 | 132475 | 1, 13, 29 |
| 17 | GALR2 | galanin receptor 2 | 182687 | 186919 | 182473 | 6, |
| 17 | LGALS3BP | galectin 3 binding protein | 108679 | 178404 | 171302 | 7, 13, 27 |
| 17 | LGALS9 | galectin 9 | 168961 | 266728 | 007171 | 36, 27, 5 |
| 17 | LGALS9B | galectin 9B | 170298 | 128487 | 214819 | 13, 37, 5 |
| 17 | LGALS9C | galectin 9C | 171916 | 214860 | 213077 | 16, 13, 5 |
| 17 | GGNBP2 | gametogenetin binding protein 2 | 278311 | 277161 | 278535 | 4, 11, 26 |
| 17 | GGT6 | gamma-glutamyltransferase 6 | 167741 | 132382 | 188176 | 13, 17, 42 |
| 17 | GJD3 | gap junction protein delta 3 | 183153 | 131759 | 131747 | 13, 20, 45 |
| 17 | GJC1 | gap junction protein gamma 1 | 182963 | 073670 | 131097 | 12, 32, 44 |
| 17 | GSDMA | gasdermin A | 167914 | 204913 | 108344 | 24, 35, 18 |
| 17 | GSDMB | gasdermin B | 073605 | 186075 | 172057 | 40, 16, 39 |
| 17 | GIP | gastric inhibitory polypeptide | 159224 | 159210 | 159217 | 37, 16, |
| 17 | GAST | gastrin | 184502 | 173812 | 173805 | 37, |
| 17 | GEMIN4 | gem nuclear organelle associated protein 4 | 179409 | 167695 | 167699 | 38, 21, 9 |
| 17 | GSG2 | germ cell associated 2, haspin | 177602 | 083457 | 074356 | 22, 38, 21 |
| 17 | GHDC | GH3 domain containing | 167925 | 161610 | 173757 | 36, 2, 26 |
| 17 | GID4 | GID complex subunit 4 homolog | 141034 | 171953 | 108591 | 4, 14, 38 |
| 17 | GIT1 | GIT ArfGAP 1 | 108262 | 167543 | 198720 | 25, 43, 27 |
| 17 | GFAP | glial fibrillary acidic protein | 131095 | 214447 | 186185 | 8, 26, 18 |
| 17 | GLP2R | glucagon like peptide 2 receptor | 065325 | 214978 | 109047 | 26, 9, 20 |
| 17 | GCGR | glucagon receptor | 215644 | 183048 | 225663 | 19, 17, 28 |
| 17 | G6PC | glucose-6-phosphatase catalytic subunit | 131482 | 131471 | 266967 | |
| 17 | G6PC3 | glucose-6-phosphatase catalytic subunit 3 | 141349 | 161654 | 108840 | 27, 43, 35 |
| 17 | GAA | glucosidase alpha, acid | 171298 | 141519 | 141543 | 38, 32, 36 |
| 17 | GRIN2C | glutamate ionotropic receptor NMDA type subunit 2C | 161509 | 109066 | 161513 | 14, 40, 38 |
| 17 | QRICH2 | glutamine rich 2 | 129646 | 185262 | 161542 | 40, 42, 32 |
| 17 | GDPD1 | glycerophosphodiester phosphodiesterase domain containing 1 | 153982 | 167447 | 175155 | 37, 45, 28 |
| 17 | GLTPD2 | glycolipid transfer protein domain containing 2 | 182327 | 182853 | 142507 | 17, 4, 28 |
| 17 | GP1BA | glycoprotein Ib platelet alpha subunit | 185245 | 205710 | 108528 | 22, 5, 12 |
| 17 | GLOD4 | glyoxalase domain containing 4 | 167699 | 179409 | 281182 | 30, 4, 9 |
| 17 | GGA3 | golgi associated, gamma adaptin ear containing, ARF binding protein 3 | 125447 | 125450 | 125445 | 24, 42, 43 |
| 17 | GOSR1 | golgi SNAP receptor complex member 1 | 108587 | 108582 | 266733 | 9, 28, 30 |
| 17 | GOSR2 | golgi SNAP receptor complex member 2 | 108433 | 158955 | 262633 | 7, 31, 29 |
| 17 | GPATCH8 | G-patch domain containing 8 | 186566 | 005961 | 180340 | 15, 21, 30 |
| 17 | GRN | granulin precursor | 030582 | 013306 | 161682 | |
| 17 | GRAPL | GRB2 related adaptor protein like | 189152 | 154016 | 072134 | |
| 17 | GRAP | GRB2-related adaptor protein | 154016 | 188522 | 189152 | 21, 41, 5 |
| 17 | GAS2L2 | growth arrest specific 2 like 2 | 270765 | 270885 | 271447 | 27, 20, |
| 17 | GAS7 | growth arrest specific 7 | 007237 | 109047 | 006788 | 8, 1, 35 |
| 17 | GRB2 | growth factor receptor bound protein 2 | 177885 | 125454 | 177728 | 22, 36, 41 |
| 17 | GRB7 | growth factor receptor bound protein 7 | 141738 | 141741 | 161405 | 13, 9, 24 |
| 17 | GH1 | growth hormone 1 | 259384 | 204414 | 007312 | 31, 11, 8 |
| 17 | GH2 | growth hormone 2 | 136487 | 213218 | 136488 | 32, 31, 34 |
| 17 | GSG1L2 | GSG1 like 2 | 214978 | 184544 | 065325 | |
| 17 | GUCY2D | guanylate cyclase 2D, retinal | 132518 | 170037 | 179593 | 40, 14, 33 |
| 17 | H3F3B | H3 histone family member 3B | 132475 | 108479 | 132478 | |
| 17 | HEATR6 | HEAT repeat containing 6 | 068097 | 189050 | 167434 | 31, 24, 2 |
| 17 | HEATR9 | HEAT repeat containing 9 | 270379 | 270806 | 271503 | 38, 8, |
| 17 | HSPB9 | heat shock protein family B (small) member 9 | 260325 | 267261 | 108774 | 38, 28, 20 |
| 17 | HSF5 | heat shock transcription factor 5 | 176160 | 108375 | 108389 | 38, 39, 8 |
| 17 | HELZ | helicase with zinc finger | 198265 | 108878 | 197170 | 22, 13, 1 |
| 17 | HN1 | hematological and neurological expressed 1 | 189159 | 125458 | 188612 | 34, 43, 3 |
| 17 | HS3ST3A1 | heparan sulfate-glucosamine 3-sulfotransferase 3A1 | 153976 | 006744 | 006695 | 32, 2, 25 |
| 17 | HS3ST3B1 | heparan sulfate-glucosamine 3-sulfotransferase 3B1 | 125430 | 223510 | 109099 | 32, 39, 24 |
| 17 | HGS | hepatocyte growth factor-regulated tyrosine kinase substrate | 185359 | 214087 | 262814 | |
| 17 | HES7 | hes family bHLH transcription factor 7 | 179111 | 179148 | 179094 | 6, 9, 27 |
| 17 | HEXIM1 | hexamethylene bisacetamide inducible 1 | 186834 | 181513 | 168517 | 4, 28, 32 |
| 17 | HEXIM2 | hexamethylene bisacetamide inducible 2 | 168517 | 186834 | 184922 | 29, 14, 27 |
| 17 | HEXDC | hexosaminidase D | 169660 | 181396 | 178927 | 27, 7, 17 |
| 17 | HIC1 | HIC ZBTB transcriptional repressor 1 | 177374 | 262664 | 070366 | |
| 17 | HID1 | HID1 domain containing | 167861 | 182938 | 109089 | 42, 26, 33 |
| 17 | HIGD1B | HIG1 hypoxia inducible domain family member 1B | 131097 | 182963 | 108883 | 15, 28, 2 |
| 17 | HDAC5 | histone deacetylase 5 | 108840 | 141349 | 125319 | 1, 34, 27 |
| 17 | HLF | HLF, PAR bZIP transcription factor | 108924 | 166263 | 108960 | 19, 13, 8 |
| 17 | HNF1B | HNF1 homeobox B | 275410 | 278053 | 273513 | 17, 3, 29 |
| 17 | HOXB1 | homeobox B1 | 120094 | 141293 | 173917 | 12, 38, |
| 17 | HOXB13 | homeobox B13 | 159184 | 229637 | 170703 | 33, 37, 16 |
| 17 | HOXB2 | homeobox B2 | 173917 | 120094 | 120093 | |
| 17 | HOXB3 | homeobox B3 | 120093 | 173917 | 182742 | 38, 12, 44 |
| 17 | HOXB4 | homeobox B4 | 182742 | 120093 | 120075 | 44, 15, 28 |
| 17 | HOXB5 | homeobox B5 | 120075 | 182742 | 108511 | 16, 33, 20 |
| 17 | HOXB6 | homeobox B6 | 108511 | 120075 | 260027 | 16, 1, 26 |
| 17 | HOXB7 | homeobox B7 | 260027 | 108511 | 120068 | 16, 25, 9 |
| 17 | HOXB8 | homeobox B8 | 120068 | 260027 | 170689 | 16, 17, 33 |
| 17 | HOXB9 | homeobox B9 | 170689 | 120068 | 159182 | 16, 38, 17 |
| 17 | HAP1 | huntingtin associated protein 1 | 173805 | 184502 | 173801 | |
| 17 | HSD17B1 | hydroxysteroid 17-beta dehydrogenase 1 | 108786 | 108784 | 068120 | 32, 23, 4 |
| 17 | HCRT | hypocretin neuropeptide precursor | 161610 | 089558 | 167925 | 10, 8, |
| 17 | IKZF3 | IKAROS family zinc finger 3 | 161405 | 141738 | 186075 | 22, 41, 30 |
| 17 | INCA1 | inhibitor of CDK, cyclin A1 interacting protein 1 | 196388 | 108509 | 129250 | 4, 38, 27 |
| 17 | INPP5K | inositol polyphosphate-5-phosphatase K | 132376 | 197879 | 174238 | 31, 22, 14 |
| 17 | IGF2BP1 | insulin like growth factor 2 mRNA binding protein 1 | 159217 | 159224 | 167080 | 12, 38, 14 |
| 17 | IGFBP4 | insulin like growth factor binding protein 4 | 141753 | 131747 | 131746 | 37, 23, 20 |
| 17 | INTS2 | integrator complex subunit 2 | 108506 | 136492 | 108510 | 39, 34, 13 |
| 17 | ITGA2B | integrin subunit alpha 2b | 005961 | 161682 | 186566 | 7, 39, 36 |
| 17 | ITGA3 | integrin subunit alpha 3 | 005884 | 064195 | 005882 | 17, 4, 44 |
| 17 | ITGAE | integrin subunit alpha E | 083457 | 083454 | 177602 | 33, 17, 7 |
| 17 | ITGB3 | integrin subunit beta 3 | 259207 | 198336 | 259753 | 17, 40, 1 |
| 17 | ITGB4 | integrin subunit beta 4 | 132470 | 161526 | 108479 | 23, 27, 18 |
| 17 | ICAM2 | intercellular adhesion molecule 2 | 108622 | 224383 | 178607 | 43, 29, 36 |
| 17 | IFI35 | interferon induced protein 35 | 068079 | 131469 | 108828 | 3, 34, 13 |
| 17 | IFT20 | intraflagellar transport 20 | 109083 | 109084 | 109079 | 1, 36, 26 |
| 17 | JUP | junction plakoglobin | 173801 | 173805 | 141696 | 18, 28, 4 |
| 17 | KPNA2 | karyopherin subunit alpha 2 | 182481 | 186665 | 196704 | 3, 38, 37 |
| 17 | KPNB1 | karyopherin subunit beta 1 | 108424 | 141279 | 198933 | 25, 21, 24 |
| 17 | KANSL1 | KAT8 regulatory NSL complex subunit 1 | 120071 | 256762 | 228696 | 11, 37, 5 |
| 17 | KLHL10 | kelch like family member 10 | 161594 | 141698 | 178502 | |
| 17 | KLHL11 | kelch like family member 11 | 178502 | 161594 | 131473 | 38, 25, 8 |
| 17 | KRT10 | keratin 10 | 186395 | 173908 | 167920 | 35, 19, 9 |
| 17 | KRT12 | keratin 12 | 187242 | 167920 | 171431 | 14, 8, |
| 17 | KRT13 | keratin 13 | 171401 | 126337 | 171346 | 13, 24, 30 |
| 17 | KRT14 | keratin 14 | 186847 | 171403 | 186832 | 30, 18, 4 |
| 17 | KRT15 | keratin 15 | 171346 | 171401 | 171345 | 13, 18, 24 |
| 17 | KRT16 | keratin 16 | 186832 | 186847 | 128422 | 13, 18, 35 |
| 17 | KRT17 | keratin 17 | 128422 | 186832 | 173812 | 18, 9, 13 |
| 17 | KRT19 | keratin 19 | 171345 | 171346 | 171403 | 28, 23, 16 |
| 17 | KRT20 | keratin 20 | 171431 | 187242 | 108244 | 16, 37, 25 |
| 17 | KRT222 | keratin 222 | 213424 | 264058 | 167916 | 31, 2, 36 |
| 17 | KRT23 | keratin 23 | 108244 | 171431 | 196859 | 32, 18, 23 |
| 17 | KRT24 | keratin 24 | 167916 | 213424 | 204897 | 30, 14, 32 |
| 17 | KRT25 | keratin 25 | 204897 | 167916 | 186393 | 15, |
| 17 | KRT26 | keratin 26 | 186393 | 204897 | 171446 | |
| 17 | KRT27 | keratin 27 | 171446 | 186393 | 173908 | 15, 18, 35 |
| 17 | KRT28 | keratin 28 | 173908 | 171446 | 186395 | 10, 15, 35 |
| 17 | KRT31 | keratin 31 | 094796 | 131737 | 108417 | 13, 18, 24 |
| 17 | KRT32 | keratin 32 | 108759 | 171360 | 197079 | 16, 20, 30 |
| 17 | KRT33A | keratin 33A | 006059 | 186860 | 131738 | 38, |
| 17 | KRT33B | keratin 33B | 131738 | 006059 | 131737 | 17, 15, |
| 17 | KRT34 | keratin 34 | 131737 | 131738 | 094796 | 35, 7, 19 |
| 17 | KRT35 | keratin 35 | 197079 | 108759 | 126337 | 18, 16, 10 |
| 17 | KRT36 | keratin 36 | 126337 | 197079 | 171401 | 16, 20, |
| 17 | KRT37 | keratin 37 | 108417 | 094796 | 171360 | 16, |
| 17 | KRT38 | keratin 38 | 171360 | 108417 | 108759 | 16, |
| 17 | KRT39 | keratin 39 | 196859 | 108244 | 204889 | 32, |
| 17 | KRT40 | keratin 40 | 204889 | 196859 | 212899 | 31, 42, 15 |
| 17 | KRT9 | keratin 9 | 171403 | 171345 | 186847 | |
| 17 | KRTAP1-1 | keratin associated protein 1-1 | 188581 | 221880 | 212725 | |
| 17 | KRTAP1-3 | keratin associated protein 1-3 | 221880 | 204887 | 188581 | |
| 17 | KRTAP1-4 | keratin associated protein 1-4 | 204887 | 221852 | 221880 | |
| 17 | KRTAP1-5 | keratin associated protein 1-5 | 221852 | 212901 | 204887 | 10, 6, |
| 17 | KRTAP16-1 | keratin associated protein 16-1 | 212657 | 212658 | 186860 | 23, |
| 17 | KRTAP17-1 | keratin associated protein 17-1 | 186860 | 212657 | 006059 | 32, |
| 17 | KRTAP2-1 | keratin associated protein 2-1 | 212725 | 188581 | 214518 | |
| 17 | KRTAP2-2 | keratin associated protein 2-2 | 214518 | 212725 | 212724 | 3, |
| 17 | KRTAP2-3 | keratin associated protein 2-3 | 212724 | 214518 | 213417 | 19, 23, 22 |
| 17 | KRTAP2-4 | keratin associated protein 2-4 | 213417 | 212724 | 240871 | |
| 17 | KRTAP29-1 | keratin associated protein 29-1 | 212658 | 180386 | 212657 | |
| 17 | KRTAP3-1 | keratin associated protein 3-1 | 212901 | 212900 | 221852 | |
| 17 | KRTAP3-2 | keratin associated protein 3-2 | 212900 | 212899 | 212901 | 3, 44, 14 |
| 17 | KRTAP3-3 | keratin associated protein 3-3 | 212899 | 204889 | 212900 | |
| 17 | KRTAP4-1 | keratin associated protein 4-1 | 198443 | 244537 | 240542 | 28, |
| 17 | KRTAP4-11 | keratin associated protein 4-11 | 212721 | 212722 | 213416 | |
| 17 | KRTAP4-12 | keratin associated protein 4-12 | 213416 | 212721 | 198090 | |
| 17 | KRTAP4-16 | Keratin associated protein 4-16 | 241241 | 204880 | 212722 | |
| 17 | KRTAP4-2 | keratin associated protein 4-2 | 244537 | 196156 | 198443 | |
| 17 | KRTAP4-3 | keratin associated protein 4-3 | 196156 | 171396 | 244537 | 35, |
| 17 | KRTAP4-4 | keratin associated protein 4-4 | 171396 | 198271 | 196156 | |
| 17 | KRTAP4-5 | keratin associated protein 4-5 | 198271 | 198090 | 171396 | 25, |
| 17 | KRTAP4-6 | keratin associated protein 4-6 | 198090 | 213416 | 198271 | |
| 17 | KRTAP4-7 | keratin associated protein 4-7 | 240871 | 213417 | 204880 | |
| 17 | KRTAP4-8 | keratin associated protein 4-8 | 204880 | 240871 | 241241 | |
| 17 | KRTAP4-9 | keratin associated protein 4-9 | 212722 | 241241 | 212721 | |
| 17 | KRTAP9-1 | keratin associated protein 9-1 | 240542 | 198443 | 239886 | |
| 17 | KRTAP9-2 | keratin associated protein 9-2 | 239886 | 240542 | 204873 | 15, |
| 17 | KRTAP9-3 | keratin associated protein 9-3 | 204873 | 239886 | 187272 | |
| 17 | KRTAP9-4 | keratin associated protein 9-4 | 241595 | 187272 | 198083 | |
| 17 | KRTAP9-6 | keratin associated protein 9-6 | 212659 | 198083 | 180386 | |
| 17 | KRTAP9-7 | keratin associated protein 9-7 | 180386 | 212659 | 212658 | |
| 17 | KRTAP9-8 | keratin associated protein 9-8 | 187272 | 204873 | 241595 | |
| 17 | KRTAP9-9 | keratin associated protein 9-9 | 198083 | 241595 | 212659 | |
| 17 | KIAA0100 | KIAA0100 | 007202 | 167524 | 132581 | 18, 16, 23 |
| 17 | KIAA0753 | KIAA0753 | 198920 | 091622 | 282936 | 29, 38, 42 |
| 17 | KSR1 | kinase suppressor of ras 1 | 141068 | 109046 | 266728 | 1, 26, 38 |
| 17 | KIF18B | kinesin family member 18B | 186185 | 131095 | 131094 | |
| 17 | KIF19 | kinesin family member 19 | 196169 | 171595 | 204347 | 9, 8, 36 |
| 17 | KIF1C | kinesin family member 1C | 129250 | 196388 | 132517 | 34, 40, 35 |
| 17 | KIF2B | kinesin family member 2B | 141200 | 154975 | 141198 | 38, 8, |
| 17 | KRBA2 | KRAB-A domain containing 2 | 184619 | 184650 | 263809 | 24, 40, 45 |
| 17 | LPO | lactoperoxidase | 167419 | 011143 | 005381 | 42, 34, 25 |
| 17 | LRRC37A2 | leucine rich repeat containing 37 member A2 | 238083 | 176681 | 185829 | 31, 1, 26 |
| 17 | LRRC37A3 | leucine rich repeat containing 37 member A3 | 176809 | 108854 | 120063 | 30, 18, 1 |
| 17 | LRRC37A | leucine rich repeat containing 37A | 176681 | 228696 | 238083 | 18, 37, 12 |
| 17 | LRRC37B | leucine rich repeat containing 37B | 185158 | 178691 | 126858 | |
| 17 | LRRC3C | leucine rich repeat containing 3C | 204913 | 172057 | 167914 | 38, |
| 17 | LRRC45 | leucine rich repeat containing 45 | 169683 | 169689 | 169750 | 41, 9, 5 |
| 17 | LRRC46 | leucine rich repeat containing 46 | 141294 | 159111 | 141295 | 42, 38, 22 |
| 17 | LRRC59 | leucine rich repeat containing 59 | 108829 | 154920 | 167107 | 21, 23, 3 |
| 17 | LRRC75A | leucine rich repeat containing 75A | 181350 | 187688 | 141040 | 31, 30, 9 |
| 17 | LASP1 | LIM and SH3 protein 1 | 002834 | 125691 | 263874 | 39, 42, 43 |
| 17 | LIMD2 | LIM domain containing 2 | 136490 | 198909 | 266173 | 41, 21, 22 |
| 17 | LHX1 | LIM homeobox 1 | 273706 | 278619 | 275700 | 40, 27, 12 |
| 17 | LLGL1 | LLGL1, scribble cell polarity complex component | 131899 | 091542 | 177731 | 22, 3, 7 |
| 17 | LLGL2 | LLGL2, scribble cell polarity complex cpmppnent | 073350 | 182173 | 266714 | 28, 3, 16 |
| 17 | LINC00672 | Long intergenic non-protein coding RNA 672 | 263874 | 002834 | 204952 | 27, 31, 10 |
| 17 | LINC00675 | Long intergenic non-protein coding RNA 675 | 263429 | 187824 | 233670 | 3, 33, 16 |
| 17 | LINC00854 | Long intergenic non-protein coding RNA 854 | 236383 | 184988 | 175906 | 23, 38, 44 |
| 17 | LSM12 | LSM12 homolog | 161654 | 091947 | 141349 | 43, 18, 6 |
| 17 | LUC7L3 | LUC7 like 3 pre-mRNA splicing factor | 108848 | 154945 | 173714 | 39, 11, 13 |
| 17 | LYRM9 | LYR motif containing 9 | 232859 | 266202 | 087095 | 17, 8, 38 |
| 17 | KAT2A | lysine acetyltransferase 2A | 108773 | 108771 | 267261 | 1, 18, 9 |
| 17 | KAT7 | lysine acetyltransferase 7 | 136504 | 121104 | 176358 | 38, 42, 24 |
| 17 | KDM6B | lysine demethylase 6B | 132510 | 183914 | 167874 | 20, 22, 14 |
| 17 | LYZL6 | lysozyme like 6 | 275722 | 278023 | 275152 | 38, 10, 8 |
| 17 | MAFG | MAF bZIP transcription factor G | 197063 | 187531 | 183010 | 30, 9, 26 |
| 17 | MFSD11 | major facilitator superfamily domain containing 11 | 092931 | 161547 | 167889 | |
| 17 | MFSD6L | major facilitator superfamily domain containing 6 like | 185156 | 183318 | 276231 | 38, 20, 28 |
| 17 | MSL1 | male specific lethal 1 homolog | 188895 | 126368 | 108349 | 40, 15, 14 |
| 17 | MRC2 | mannose receptor C type 2 | 011028 | 146872 | 173838 | 6, 34, 12 |
| 17 | MPDU1 | mannose-P-dolichol utilization defect 1 | 129255 | 129226 | 129194 | 28, 35, 17 |
| 17 | MGAT5B | mannosyl (alpha-1,6-)-glycoprotein beta-1,6-N-acetyl-glucosaminyltransferase, | 167889 | 092931 | 129657 | 9, 36, 7 |
| | | isozyme B | | | | |
| 17 | MCRIP1 | MAPK regulated corepressor interacting protein 1 | 225663 | 215644 | 182676 | |
| 17 | MILR1 | mast cell immunoglobulin like receptor 1 | 271605 | 261371 | 256525 | 35, 21, 30 |
| 17 | MMP28 | matrix metallopeptidase 28 | 271447 | 270765 | 270806 | 38, 1, 26 |
| 17 | MXRA7 | matrix remodeling associated 7 | 182534 | 070526 | 070495 | |
| 17 | MNT | MAX network transcriptional repressor | 070444 | 141258 | 127804 | 24, 1, 26 |
| 17 | MBTD1 | mbt domain containing 1 | 011258 | 243678 | 011260 | 14, 22, 31 |
| 17 | MKS1 | Meckel syndrome, type 1 | 011143 | 121053 | 167419 | 3, 9, 30 |
| 17 | MED1 | mediator complex subunit 1 | 125686 | 108306 | 167258 | 23, 45, 29 |
| 17 | MED11 | mediator complex subunit 11 | 161920 | 141480 | 161921 | 1, 6, 4 |
| 17 | MED13 | mediator complex subunit 13 | 108510 | 108506 | 270033 | 23, 34, 11 |
| 17 | MED24 | mediator complex subunit 24 | 008838 | 108342 | 126351 | 24, 42, 39 |
| 17 | MED31 | mediator complex subunit 31 | 108590 | 129235 | 279257 | 30, 43, 26 |
| 17 | MED9 | mediator complex subunit 9 | 141026 | 205309 | 108551 | 36, 25, 9 |
| 17 | MEIOC | meiosis specific with coiled-coil domain | 180336 | 180340 | 180329 | |
| 17 | MARCH10 | membrane associated ring-CH-type finger 10 | 173838 | 011028 | 170921 | |
| 17 | MPP2 | membrane palmitoylated protein 2 | 108852 | 161649 | 108849 | 8, 29, 38 |
| 17 | MPP3 | membrane palmitoylated protein 3 | 161647 | 231256 | 161649 | 2, 20, 8 |
| 17 | MEOX1 | mesenchyme homeobox 1 | 005102 | 175832 | 167941 | 1, 27, 25 |
| 17 | METRNL | meteorin like, glial cell differentiation regulator | 176845 | 175711 | 167693 | 36, 6, 4 |
| 17 | METTL16 | methyltransferase like 16 | 127804 | 070444 | 007168 | |
| 17 | METTL23 | methyltransferase like 23 | 181038 | 070495 | 267168 | 43, 22, 31 |
| 17 | METTL2A | methyltransferase like 2A | 087995 | 172421 | 146872 | 41, 3, 29 |
| 17 | MFAP4 | microfibrillar associated protein 4 | 166482 | 166484 | 128482 | |
| 17 | MAPT | microtubule associated protein tau | 186868 | 185294 | 256762 | 26, 8, 14 |
| 17 | MIF4GD | MIF4G domain containing | 125457 | 125445 | 125454 | 9, 40, 13 |
| 17 | MIEN1 | migration and invasion enhancer 1 | 141741 | 141736 | 141738 | 29, 6, 32 |
| 17 | MIS12 | MIS12, kinetochore complex component | 167842 | 072849 | 091592 | 24, 36, 39 |
| 17 | MINK1 | misshapen like kinase 1 | 141503 | 129219 | 108556 | 26, 14, 41 |
| 17 | MIEF2 | mitochondrial elongation factor 2 | 177427 | 177731 | 177302 | 39, 26, 34 |
| 17 | MRPL10 | mitochondrial ribosomal protein L10 | 159111 | 006025 | 141294 | 43, 9, 5 |
| 17 | MRPL12 | mitochondrial ribosomal protein L12 | 262814 | 185359 | 262660 | 34, 33, 41 |
| 17 | MRPL27 | mitochondrial ribosomal protein L27 | 108826 | 015532 | 154920 | 29, 15, 30 |
| 17 | MRPL38 | mitochondrial ribosomal protein L38 | 204316 | 141569 | 267426 | 28, 25, 43 |
| 17 | MRPL45 | mitochondrial ribosomal protein L45 | 278845 | 274611 | 277399 | 43, 1, 34 |
| 17 | MRPL58 | mitochondrial ribosomal protein L58 | 167862 | 109089 | 180901 | |
| 17 | MRPS23 | mitochondrial ribosomal protein S23 | 181610 | 166329 | 180891 | 29, 1, 15 |
| 17 | MRPS7 | mitochondrial ribosomal protein S7 | 125445 | 125447 | 125457 | 30, 23, 21 |
| 17 | MRM1 | mitochondrial rRNA methyltransferase 1 | 278619 | 278535 | 273706 | 9, 34, 6 |
| 17 | MRM3 | mitochondrial rRNA methyltransferase 3 | 171861 | 281182 | 167693 | |
| 17 | MAPK7 | mitogen-activated protein kinase 7 | 166484 | 108641 | 166482 | 39, 25, 41 |
| 17 | MAP2K3 | mitogen-activated protein kinase kinase 3 | 034152 | 274180 | 184185 | 21, 3, 5 |
| 17 | MAP2K4 | mitogen-activated protein kinase kinase 4 | 065559 | 154957 | 141052 | 41, 8, 3 |
| 17 | MAP2K6 | mitogen-activated protein kinase kinase 6 | 108984 | 154265 | 153822 | 25, 15, 6 |
| 17 | MAP3K14 | mitogen-activated protein kinase kinase kinase 14 | 006062 | 184361 | 159314 | 9, 39, 11 |
| 17 | MAP3K3 | mitogen-activated protein kinase kinase kinase 3 | 198909 | 136463 | 136490 | 21, 35, 6 |
| 17 | MLLT6 | MLLT6, PHD finger domain containing | 275023 | 273604 | 279119 | 29, 26, 22 |
| 17 | MLX | MLX, MAX dimerization protein | 108788 | 068120 | 131470 | 21, 33, 6 |
| 17 | MMD | monocyte to macrophage differentiation associated | 108960 | 108924 | 261873 | 1, 23, 22 |
| 17 | MTRNR2L1 | MT-RNR2-like 1 | 256618 | 283566 | 109046 | |
| 17 | MSI2 | musashi RNA binding protein 2 | 153944 | 121057 | 166329 | 22, 13, 39 |
| 17 | MYBBP1A | MYB binding protein 1a | 132382 | 183018 | 167741 | 21, 36, 12 |
| 17 | MYCBPAP | MYCBP associated protein | 136449 | 136444 | 049283 | 38, 2, 32 |
| 17 | MYADML2 | myeloid associated differentiation marker like 2 | 185105 | 183010 | 185269 | 14, 25, 33 |
| 17 | MPO | myeloperoxidase | 005381 | 167419 | 005379 | 5, 7, 40 |
| 17 | MYOCD | myocardin | 141052 | 065559 | 006740 | 42, 26, 33 |
| 17 | MYH1 | myosin heavy chain 1 | 109061 | 264424 | 125414 | 18, 25, 40 |
| 17 | MYH10 | myosin heavy chain 10 | 133026 | 166579 | 161973 | 43, 1, 12 |
| 17 | MYH13 | myosin heavy chain 13 | 006788 | 007237 | 133020 | 8, |
| 17 | MYH2 | myosin heavy chain 2 | 125414 | 109061 | 109063 | 18, 25, 24 |
| 17 | MYH3 | myosin heavy chain 3 | 109063 | 125414 | 133028 | 25, 15, 26 |
| 17 | MYH4 | myosin heavy chain 4 | 264424 | 133020 | 109061 | 40, |
| 17 | MYH8 | myosin heavy chain 8 | 133020 | 006788 | 264424 | 25, 28, 39 |
| 17 | MYO1C | myosin IC | 197879 | 167193 | 132376 | 43, 9, 1 |
| 17 | MYO1D | myosin ID | 176658 | 176749 | 006042 | |
| 17 | MYL4 | myosin light chain 4 | 198336 | 004897 | 259207 | 15, 41, 20 |
| 17 | MPRIP | myosin phosphatase Rho interacting protein | 133030 | 240505 | 179598 | 27, 3, 25 |
| 17 | MYO19 | myosin XIX | 278259 | 273611 | 277161 | |
| 17 | MYO15A | myosin XVA | 091536 | 108591 | 091542 | 31, 38, 8 |
| 17 | MYO15B | myosin XVB | 266714 | 073350 | 108469 | 36, 26, 22 |
| 17 | MYO18A | myosin XVIIIA | 196535 | 063015 | 221995 | 18, 22, 27 |
| 17 | MTMR4 | myotubularin related protein 4 | 108389 | 176160 | 108387 | 43, 22, 26 |
| 17 | NAA38 | N(alpha)-acetyltransferase 38, NatC auxiliary subunit | 183011 | 167874 | 182224 | 29, 33, 15 |
| 17 | NAGLU | N-acetyl-alpha-glucosaminidase | 108784 | 033627 | 108786 | 2, 37, 20 |
| 17 | NAGS | N-acetylglutamate synthase | 161653 | 131096 | 091947 | 43, 17, 40 |
| 17 | NAT9 | N-acetyltransferase 9 (putative) | 109065 | 109062 | 109066 | 2, 31, 26 |
| 17 | NATD1 | N-acetyltransferase domain containing 1 | 274180 | 178307 | 034152 | 29, 2, 18 |
| 17 | NDUFAF8 | NADH: ubiquinone oxidoreductase complex assembly factor 8 | 224877 | 167302 | 157637 | |
| 17 | NACA2 | nascent polypeptide associated complex alpha subunit 2 | 253506 | 121075 | 136492 | 43, 1, 18 |
| 17 | NBR1 | NBR1, autophagy cargo receptor | 188554 | 012048 | 184988 | 42, 38, 29 |
| 17 | NLK | nemo like kinase | 087095 | 232859 | 109084 | |
| 17 | NGFR | nerve growth factor receptor | 064300 | 281126 | 182575 | 26, 27, 10 |
| 17 | NSF | N-ethylmaleimide sensitive factor, vesicle fusing ATPase | 073969 | 283191 | 108379 | 8, 24, 3 |
| 17 | NTN1 | netrin 1 | 065320 | 141506 | 170310 | 27, 13, 14 |
| 17 | NEURL4 | neuralized E3 ubiquitin protein ligase 4 | 215041 | 261915 | 072818 | 31, 22, 14 |
| 17 | NXPH3 | neurexophilin 3 | 182575 | 064300 | 121067 | 31, 2, 14 |
| 17 | NF1 | neurofibromin 1 | 196712 | 181481 | 126861 | 29, 4, 38 |
| 17 | NLGN2 | neuroligin 2 | 169992 | 205544 | 181323 | 27, 29, 12 |
| 17 | NEUROD2 | neuronal differentiation 2 | 171532 | 167258 | 131771 | 8, |
| 17 | NPTX1 | neuronal pentraxin 1 | 171246 | 173818 | 141564 | 8, 2, 14 |
| 17 | NPB | neuropeptide B | 183979 | 141552 | 185813 | 20, 38, |
| 17 | NKIRAS2 | NFKB inhibitor interacting Ras like 2 | 168256 | 168259 | 187595 | 14, 32, 15 |
| 17 | NEK8 | NIMA related kinase 8 | 160602 | 160606 | 076604 | 41, 21, 9 |
| 17 | NOS2 | nitric oxide synthase 2 | 007171 | 168961 | 266202 | 30, 16, 37 |
| 17 | NLRP1 | NLR family pyrin domain containing 1 | 091592 | 167842 | 179314 | 43, 22, 5 |
| 17 | NME1 | NME/NM23 nucleoside diphosphate kinase 1 | 239672 | 008294 | 011052 | |
| 17 | NME2 | NME/NM23 nucleoside diphosphate kinase 2 | 243678 | 011052 | 011258 | 35, 21, 43 |
| 17 | NME1-NME2 | NME1-NME2 readthrough | 011052 | 239672 | 243678 | |
| 17 | NMT1 | N-myristoyltransferase 1 | 136448 | 172992 | 161714 | |
| 17 | NOG | noggin | 183691 | 153930 | 214226 | 36, 5, 33 |
| 17 | NLE1 | notchless homolog 1 | 073536 | 073598 | 141161 | 43, 3, 34 |
| 17 | NOTUM | NOTUM, palmitoleoyl-protein carboxylesterase | 185269 | 185105 | 169696 | 32, 44, 16 |
| 17 | NPLOC4 | NPL4 homolog, ubiquitin recognition factor | 182446 | 185504 | 182612 | 34, 37, 38 |
| 17 | SGSH | N-sulfoglucosamine sulfohydrolase | 181523 | 141527 | 181045 | 34, 2, 36 |
| 17 | NCBP3 | nuclear cap binding subunit 3 | 074356 | 177602 | 004660 | |
| 17 | NFE2L1 | nuclear factor, erythroid 2 like 1 | 082641 | 005243 | 108468 | |
| 17 | NARF | nuclear prelamin A recognition factor | 141562 | 178927 | 141568 | 39, 38, 5 |
| 17 | NCOR1 | nuclear receptor corepressor 1 | 141027 | 011295 | 108474 | 1, 13, 37 |
| 17 | NR1D1 | nuclear receptor subfamily 1 group D member 1 | 126368 | 126351 | 188895 | 26, 18, 3 |
| 17 | NSRP1 | nuclear speckle splicing regulatory protein 1 | 126653 | 176927 | 108576 | 18, 26, 13 |
| 17 | NOL11 | nucleolar protein 11 | 130935 | 154217 | 171634 | 24, 36, 13 |
| 17 | NUP85 | nucleoporin 85 | 125450 | 188612 | 125447 | 3, 39, 21 |
| 17 | NUP88 | nucleoporin 88 | 108559 | 029725 | 129197 | 29, 18, 42 |
| 17 | NXN | nucleoredoxin | 167693 | 171861 | 177370 | |
| 17 | NDEL1 | nudE neurodevelopment protein 1 like 1 | 166579 | 189051 | 133026 | |
| 17 | NUFIP2 | NUFIP2, FMR1 interacting protein 2 | 108256 | 108255 | 160551 | 29, 26, 22 |
| 17 | OR1A1 | olfactory receptor family 1 subfamily A member 1 | 172146 | 172150 | 221882 | |
| 17 | OR1A2 | olfactory receptor family 1 subfamily A member 2 | 172150 | 183024 | 172146 | |
| 17 | OR1D2 | olfactory receptor family 1 subfamily D member 2 | 184166 | 262628 | 183024 | |
| 17 | OR1D5 | olfactory receptor family 1 subfamily D member 5 | 262628 | 132359 | 184166 | |
| 17 | OR1E1 | olfactory receptor family 1 subfamily E member 1 | 180016 | 180090 | 159961 | 33, |
| 17 | OR1E2 | olfactory receptor family 1 subfamily E member 2 | 127780 | 159961 | 141255 | |
| 17 | OR1G1 | olfactory receptor family 1 subfamily G member 1 | 183024 | 184166 | 172150 | |
| 17 | OR3A1 | olfactory receptor family 3 subfamily A member 1 | 180090 | 221882 | 180016 | |
| 17 | OR3A2 | olfactory receptor family 3 subfamily A member 2 | 221882 | 172146 | 180090 | 38, |
| 17 | OR3A3 | olfactory receptor family 3 subfamily A member 3 | 159961 | 180016 | 127780 | |
| 17 | OR4D1 | olfactory receptor family 4 subfamily D member 1 | 141194 | 264364 | 255713 | |
| 17 | OR4D2 | olfactory receptor family 4 subfamily D member 2 | 255713 | 141194 | 121053 | |
| 17 | OMG | oligodendrocyte myelin glycoprotein | 126861 | 196712 | 185862 | 8, 17, 2 |
| 17 | ORMDL3 | ORMDL sphingolipid bipsynthesis regulater 3 | 172057 | 073605 | 204913 | 1, 23, 21 |
| 17 | OTOP2 | otopetrin 2 | 183034 | 182040 | 281273 | 19, 16, 38 |
| 17 | OTOP3 | otopetrin 3 | 182938 | 281273 | 167861 | 14, |
| 17 | ODF4 | outer dense fiber of sperm tails 4 | 184650 | 198844 | 184619 | 38, 37, |
| 17 | OVCA2 | ovarian tumor suppresser candidate 2 | 262664 | 108963 | 177374 | |
| 17 | OXLD1 | oxidoreductase like domain containing 1 | 204237 | 185527 | 185298 | 26, 27, 44 |
| 17 | OSBPL7 | oxysterol binding protein like 7 | 006025 | 073861 | 159111 | 3, 31, 33 |
| 17 | P2RX5-TAX1BP3 | P2RX5-TAX1BP3 readthrough (NMD candidate) | 257950 | 213977 | 127774 | 9, 11, 6 |
| 17 | PPY | pancreatic polypeptide | 108849 | 108852 | 131096 | |
| 17 | PYY | peptide YY | 131096 | 108849 | 161653 | 16, 17, 38 |
| 17 | PTRH2 | peptidyl-tRNA hydrolase 2 | 141378 | 141367 | 062716 | 43, 26, 3 |
| 17 | PER1 | period circadian deck 1 | 179094 | 179111 | 263620 | 26, 42, 39 |
| 17 | PMP22 | peripheral myelin protein 22 | 109099 | 125430 | 125409 | 11, 26, 15 |
| 17 | PEX12 | peroxisemal biogenesis factor 12 | 108733 | 236320 | 006125 | 45, 1, 24 |
| 17 | PHF12 | PHD finger protein 12 | 109118 | 167536 | 179761 | 18, 33, 22 |
| 17 | PHF23 | PHD finger protein 23 | 040633 | 004975 | 170296 | 35, 6, 40 |
| 17 | PNMT | phenylethanolamine N-methyltransferase | 141744 | 173991 | 161395 | 2, 14, 40 |
| 17 | PCYT2 | phosphate cytidylyltransferase 2, ethanolamine | 185813 | 183979 | 187531 | 38, 25, 19 |
| 17 | PCTP | phosphatidylcholine transfer protein | 141179 | 166292 | 153930 | 29, 4, 17 |
| 17 | PEMT | phosphatidylethanolamine N-methyltransferase | 133027 | 108551 | 108557 | 33, 10, 27 |
| 17 | PGS1 | phosphatidylglycerophosphate synthase 1 | 087157 | 184557 | 187775 | 31, 34, 36 |
| 17 | PIGL | phosphatidylinositol glycan anchor biosynthesis class L | 108474 | 141027 | 166582 | 39, 36, 13 |
| 17 | PIGS | phosphatidylinositol glycan anchor biosynthesis class S | 087111 | 109103 | 109107 | 24, 13, 3 |
| 17 | PIGW | phosphatidylinositol glycan anchor biosynthesis class W | 277161 | 278259 | 278311 | 40, 7, 42 |
| 17 | PITPNA | phosphatidylinositol transfer protein alpha | 174238 | 132376 | 167703 | 40, 29, 14 |
| 17 | PITPNC1 | phosphatidylinositol transfer protein, cytoplasmic 1 | 154217 | 197170 | 130935 | 22, 14, 41 |
| 17 | PIP4K2B | phosphatidylinositol-5-phosphate 4-kinase type 2 beta | 276293 | 277791 | 273559 | 26, 3, 8 |
| 17 | PDE6G | phosphodiesterase 6G | 185527 | 182612 | 204237 | 14, 10, 25 |
| 17 | PHOSPHO1 | phosphoethanolamine/phosphocholine phosphatase | 173868 | 108798 | 198740 | 7, 27, 38 |
| 17 | PIRT | phosphoinositide interacting regulator of transient receptor potential channels | 233670 | 263429 | 188803 | 26, 4, 8 |
| 17 | PIK3R5 | phosphoinositide-3-kinase regulatory subunit 5 | 141506 | 276231 | 065320 | |
| 17 | PIK3R6 | phosphoinositide-3-kinase regulatory subunit 6 | 276231 | 185156 | 141506 | 7, 36, 5 |
| 17 | PLCD3 | phospholipase C delta 3 | 161714 | 136448 | 181513 | 3, 4, 9 |
| 17 | PLD6 | phospholipase D family member 6 | 179598 | 133030 | 264187 | 31, 38, 15 |
| 17 | PLD2 | phospholipase D2 | 129219 | 262165 | 141503 | 43, 24, 1 |
| 17 | PRPSAP1 | phosphoribosyl pyrophosphate synthetase associated protein 1 | 161542 | 129646 | 176170 | 29, 38, 4 |
| 17 | PRPSAP2 | phosphoribosyl pyrophosphate synthetase associated protein 2 | 141127 | 171928 | 154025 | 41, 43, 29 |
| 17 | PFAS | phosphoribosylformylglycinamidine synthase | 178921 | 178971 | 125434 | 24, 12, 21 |
| 17 | PRCD | photoreceptor disc component | 214140 | 161544 | 070731 | |
| 17 | PIPOX | pipecolic acid and sarcosine oxidase | 179761 | 109118 | 063015 | 19, 17, 25 |
| 17 | PITPNM3 | PITPNM family member 3 | 091622 | 129195 | 198920 | 9, 36, 25 |
| 17 | PAFAH1B1 | platelet activating factor acetylhydrolase 1b regulatory subunit 1 | 007168 | 127804 | 132361 | 8, 6, 42 |
| 17 | PECAM1 | platelet and endothelial cell adhesion molecule 1 | 261371 | 136478 | 271605 | 43, 32, 45 |
| 17 | PLEKHM1 | pleckstrin homology and RUN domain containing M1 | 225190 | 159314 | 263715 | 43, 24, 4 |
| 17 | PLEKHH3 | pleckstrin homology, MyTH4 and FERM domain containing H3 | 068137 | 037042 | 184451 | 6, 14, 26 |
| 17 | PLXDC1 | plexin domain containing 1 | 161381 | 204952 | 141748 | |
| 17 | PCGF2 | polycomb group ring finger 2 | 277258 | 277972 | 277791 | 34, 14, 6 |
| 17 | PTRF | polymerase I and transcript release factor | 177469 | 168610 | 033627 | 45, 36, 42 |
| 17 | PGAP3 | post-GPI attachment to proteins 3 | 161395 | 141744 | 141736 | 24, 36, 40 |
| 17 | KCTD11 | potassium channel tetramerization domain containing 11 | 213859 | 072818 | 182896 | 37, 26, 45 |
| 17 | KCTD2 | potassium channel tetramerization domain containing 2 | 180901 | 167862 | 281674 | 14, 33, 1 |
| 17 | KCNAB3 | potassium voltage-gated channel subfamily A regulatory beta subunit 3 | 170049 | 281523 | 262730 | 26, 14, 27 |
| 17 | KCNH4 | potassium voltage-gated channel subfamily H member 4 | 089558 | 108774 | 161610 | 41, 13, 5 |
| 17 | KCNH6 | potassium voltage-gated channel subfamily H member 6 | 173826 | 264813 | 136485 | 39, 17, 14 |
| 17 | KCNJ12 | potassium voltage-gated channel subfamily J member 12 | 184185 | 034152 | 212719 | 14, 42, 25 |
| 17 | KCNJ16 | potassium voltage-gated channel subfamily J member 16 | 153822 | 108984 | 123700 | 29, 40, 17 |
| 17 | KCNJ18 | potassium voltage-gated channel subfamily J member 18 | 260458 | 212719 | 283566 | |
| 17 | KCNJ2 | potassium voltage-gated channel subfamily J member 2 | 123700 | 153822 | 125398 | 13, 29, 18 |
| 17 | PRPF8 | pre-mRNA processing factor 8 | 174231 | 167705 | 185561 | 18, 43, 23 |
| 17 | PFN1 | profilin 1 | 108518 | 108523 | 108515 | 41, 37, 27 |
| 17 | PHB | prohibitin | 167085 | 198740 | 281126 | 19, 21, 9 |
| 17 | PRR11 | proline rich 11 | 068489 | 182628 | 265303 | 39, 21, 22 |
| 17 | PRR15L | proline rich 15 like | 167183 | 108439 | 108465 | 37, 16, 33 |
| 17 | PRR29 | proline rich 29 | 224383 | 007314 | 108622 | 43, 42, 38 |
| 17 | PELP1 | proline, glutamate and leucine rich protein 1 | 141456 | 161905 | 141480 | 21, 24, 12 |
| 17 | P3H4 | prolyl 3-hydroxylase family member 4 (non-enzymatic) | 141696 | 173801 | 141756 | 3, 10, 23 |
| 17 | P4HB | prolyl 4-hydroxylase subunit beta | 185624 | 182676 | 141522 | 45, 36, 42 |
| 17 | PTGES3L | prostaglandin E synthase 3 like | 267060 | 266967 | 198863 | |
| 17 | PRAC1 | prostate cancer susceptibility candidate 1 | 159182 | 170689 | 229637 | |
| 17 | PRAC2 | prostate cancer susceptibility candidate 2 | 229637 | 159182 | 159184 | |
| 17 | PSMC5 | proteasome 26S subunit, ATPase 5 | 087191 | 108592 | 108604 | 30, 34, 1 |
| 17 | PSMD11 | proteasome 26S subunit, non-ATPase 11 | 108671 | 010244 | 176749 | 30, 4, 26 |
| 17 | PSMD12 | proteasome 26S subunit, non-ATPase 12 | 197170 | 198265 | 154217 | 1, 18, 26 |
| 17 | PSMD3 | proteasome 26S subunit, non-ATPase 3 | 108344 | 167914 | 108342 | 44, 21, 2 |
| 17 | PSME3 | proteasome activator subunit 3 | 131467 | 126581 | 131480 | |
| 17 | PSMB3 | proteasome subunit beta 3 | 277791 | 277258 | 276293 | 29, 10, 31 |
| 17 | PSMB6 | proteasome subunit beta 6 | 142507 | 182327 | 262165 | 34, 9, 3 |
| 17 | PROCA1 | protein interacting with cyclin A1 | 167525 | 109111 | 109113 | 26, 38, 12 |
| 17 | PRKCA | protein kinase C alpha | 154229 | 091583 | 075429 | 6, 17, 10 |
| 17 | PRKAR1A | protein kinase cAMP-dependent type I regulatory subunit alpha | 108946 | 070540 | 108950 | 42, 39, 8 |
| 17 | PPP1R1B | protein phosphatase 1 regulatory inhibitor subunit 1B | 131771 | 171532 | 131748 | 37, 16, 3 |
| 17 | PPP1R27 | protein phosphatase 1 regulatory subunit 27 | 182676 | 225663 | 185624 | 18, 15, 25 |
| 17 | PPP1R9B | protein phosphatase 1 regulatory subunit 9B | 108819 | 167100 | 108823 | 34, 21, 9 |
| 17 | PPM1D | protein phosphatase, Mg2+/Mn2+ dependent 1D | 170836 | 062725 | 281267 | 39, 38, 41 |
| 17 | PPM1E | protein phosphatase, Mg2+/Mn2+ dependent 1E | 175175 | 108384 | 108395 | 38, 8, 28 |
| 17 | PSMC3IP | PSMC3 interacting protein | 131470 | 108788 | 141699 | 35, 44, 20 |
| 17 | PTGES3L- | PTGES3L-AARSD1 readthrough | 108825 | 131482 | 267060 | 13, 25, 41 |
| | AARSD1 | | | | | |
| 17 | P2RX1 | purinergic receptor P2X1 | 108405 | 004660 | 074370 | 43, 5, 36 |
| 17 | P2RX5 | purinergic receptor P2X5 | 083454 | 127774 | 083457 | 9, 11, 6 |
| 17 | PNPO | pyridoxamine 5′-phosphate oxidase | 108439 | 167182 | 167183 | 24, 42, 27 |
| 17 | PYCR1 | pyrroline-5-carboxylate reductase 1 | 183010 | 197063 | 185105 | 21, 37, 3 |
| 17 | PDK2 | pyruvate dehydrogenase kinase 2 | 005882 | 005884 | 167100 | 15, 17, 8 |
| 17 | RILP | Rab interacting lysosomal protein | 167705 | 074660 | 174231 | 9, 41, 25 |
| 17 | RAB11FIP4 | RAB11 family interacting protein 4 | 131242 | 126860 | 172301 | 31, 27, 38 |
| 17 | RAB34 | RAB34, member RAS oncogene family | 109113 | 167525 | 198242 | 34, 43, 13 |
| 17 | RAB37 | RAB37, member RAS oncogene family | 172794 | 186407 | 186074 | 5, 7, 39 |
| 17 | RAB40B | RAB40B, member RAS oncogene family | 141542 | 141580 | 141560 | 23, 8, 31 |
| 17 | RAB5C | RAB5C, member RAS oncogene family | 108774 | 260325 | 089558 | 18, 2, 3 |
| 17 | RABEP1 | rabaptin, RAB GTPase binding effector protein 1 | 029725 | 161929 | 108559 | 26, 22, 23 |
| 17 | RPH3AL | rabphilin 3A-like (without C2 domains) | 181031 | 272636 | 187624 | 36, 28, 1 |
| 17 | RAD51C | RAD51 paralog C | 108384 | 121101 | 175175 | 30, 35, 3 |
| 17 | RAD51D | RAD51 paralog D | 185379 | 267618 | 073598 | 3, 9, 5 |
| 17 | RDM1 | RAD52 motif containing 1 | 278023 | 271503 | 275722 | 22, 3, 7 |
| 17 | RSAD1 | radical S-adenosyl methionine domain containing 1 | 136444 | 136457 | 136449 | 29, 1, 40 |
| 17 | RANGRF | RAN guanine nucleotide release factor | 108961 | 125434 | 198844 | 29, 22, 41 |
| 17 | RAPGEFL1 | Rap guanine nucleotide exchange factor like 1 | 108352 | 108349 | 171475 | 24, 4, 18 |
| 17 | RAP1GAP2 | RAP1 GTPase activating protein 2 | 132359 | 132361 | 262628 | |
| 17 | RHOT1 | ras homolog family member T1 | 126858 | 185158 | 141314 | 34, 29, 7 |
| 17 | RASL10B | RAS like family 10 member B | 270885 | 270647 | 270765 | 31, 34, 29 |
| 17 | RASD1 | ras related dexamethasone induced 1 | 108551 | 141026 | 133027 | 31, 28, 26 |
| 17 | RAC3 | ras-related C3 botulinum toxin substrate 3 (rho family, small GTP binding protein | 169750 | 169683 | 169738 | 34, 26, 2 |
| | | Rac3) | | | | |
| 17 | RAMP2 | receptor activity modifying protein 2 | 131477 | 108799 | 131475 | 40, 36, 14 |
| 17 | RCVRN | recoverin | 109047 | 065325 | 007237 | 14, 25, 27 |
| 17 | RECQL5 | RecQ like helicase 5 | 108469 | 266714 | 204323 | 43, 21, 18 |
| 17 | RFLNB | refilin B | 183688 | 187624 | 141252 | 34, 6, 7 |
| 17 | RGS9 | regulator of G-protein signaling 9 | 108370 | 120063 | 168646 | 28, 26, 31 |
| 17 | RPTOR | regulatory associated protein of MTOR complex 1 | 141564 | 171246 | 176108 | 22, 14, 6 |
| 17 | RPA1 | replication protein A1 | 132383 | 186532 | 185924 | 41, 40, 3 |
| 17 | RPRML | reprimo like | 179673 | 262633 | 004897 | 14, 8, 38 |
| 17 | RTN4RL1 | reticulon 4 receptor like 1 | 185924 | 132383 | 108963 | 3, 6, 14 |
| 17 | RAH | retinoic acid induced 1 | 108557 | 133027 | 072310 | 18, 16, 40 |
| 17 | RARA | retinoic acid receptor alpha | 131759 | 094804 | 183153 | 23, 42, 13 |
| 17 | RFNG | RFNG O-fucosylpeptide 3-beta-N-acetylglucosaminyltransferase | 169733 | 169738 | 169727 | 36, 31, 37 |
| 17 | RND2 | Rho family GTPase 2 | 108830 | 108828 | 012048 | 31, 29, 8 |
| 17 | ARHGDIA | Rho GDP dissociation inhibitor alpha | 141522 | 185624 | 183684 | 34, 35, 21 |
| 17 | ARHGAP23 | Rho GTPase activating protein 23 | 275832 | 274211 | 277363 | 34, 24, 26 |
| 17 | ARHGAP27 | Rho GTPase activating protein 27 | 159314 | 006062 | 225190 | 22, 36, 16 |
| 17 | ARHGAP44 | Rho GTPase activating protein 44 | 006740 | 141052 | 006744 | 26, 21, 8 |
| 17 | ARHGEF15 | Rho guanine nucleotide exchange factor 15 | 198844 | 108961 | 184650 | 43, 2, 15 |
| 17 | RHBDF2 | rhomboid 5 homolog 2 | 129667 | 129673 | 161544 | 24, 26, 22 |
| 17 | RHBDL3 | rhomboid like 3 | 141314 | 126858 | 108666 | 14, 22, 20 |
| 17 | RNASEK | ribonuclease K | 219200 | 108839 | 161939 | 31, 29, 2 |
| 17 | RPL19 | ribosomal protein L19 | 108298 | 067191 | 141750 | 18, 43, 11 |
| 17 | RPL23 | ribosomal protein L23 | 125691 | 275489 | 002834 | 43, 33, 12 |
| 17 | RPL23A | ribosomal protein L23a | 198242 | 109113 | 160606 | 41, 29, 3 |
| 17 | RPL26 | ribosomal protein L26 | 161970 | 263809 | 189051 | |
| 17 | RPL27 | ribosomal protein L27 | 131469 | 281079 | 068079 | 45, |
| 17 | RPL38 | ribosomal protein L38 | 172809 | 069188 | 141540 | 7, 27, 43 |
| 17 | RPS6KB1 | ribosomal protein S6 kinase B1 | 108443 | 108423 | 267318 | |
| 17 | RFFL | ring finger and FYVE like domain containing E3 ubiquitin protein ligase | 092871 | 005156 | 267618 | 21, 22, 42 |
| 17 | RNF112 | ring finger protein 112 | 128482 | 166482 | 142494 | 14, 25, 8 |
| 17 | RNF135 | ring finger protein 135 | 181481 | 184060 | 196712 | 34, 29, 2 |
| 17 | RNF157 | ring finger protein 157 | 141576 | 129654 | 185262 | 14, 26, 38 |
| 17 | RNF167 | ring finger protein 167 | 108523 | 108528 | 108518 | 7, 9, 6 |
| 17 | RNF213 | ring finger protein 213 | 173821 | 181045 | 173818 | 23, 26, 36 |
| 17 | RNF222 | ring finger protein 222 | 189051 | 161970 | 166579 | 13, 20, |
| 17 | RNF43 | ring finger protein 43 | 108375 | 213246 | 176160 | |
| 17 | RNFT1 | ring finger protein, transmembrane 1 | 189050 | 267318 | 068097 | 38, 34, 7 |
| 17 | RBFOX3 | RNA binding protein, fox-1 homolog 3 | 167281 | 167280 | 182156 | |
| 17 | POLR2A | RNApolymerase II subunit A | 181222 | 259224 | 239697 | 18, 23, 43 |
| 17 | RNASEK- | RNASEK-C17orf49 readthrough | 161939 | 219200 | 258315 | |
| | C17orf49 | | | | | |
| 17 | RPAIN | RPA interacting protein | 129197 | 108559 | 108561 | 37, 15, 1 |
| 17 | RUNDC1 | RUN domain containing 1 | 198863 | 267060 | 281079 | 11, 34, 33 |
| 17 | RUNDC3A | RUN domain containing 3A | 108309 | 004939 | 013306 | 31, 8, 26 |
| 17 | STH | saitohin | 256762 | 186868 | 120071 | |
| 17 | SAP30BP | SAP30 binding protein | 161526 | 259120 | 132470 | 34, 30, 24 |
| 17 | SGCA | sarcoglycan alpha | 108823 | 108819 | 108821 | 25, 43, 15 |
| 17 | SCARF1 | scavenger receptor class F member 1 | 074660 | 167703 | 167705 | 26, 11, 45 |
| 17 | SLFN11 | schlafen family member 11 | 172716 | 166750 | 172123 | 25, 1, 7 |
| 17 | SLFN12 | schlafen family member 12 | 172123 | 172716 | 154760 | 43, 45, 17 |
| 17 | SLFN12L | schlafen family member 12 like | 205045 | 154760 | 236320 | 42, 39, 36 |
| 17 | SLFN13 | schlafen family member 13 | 154760 | 172123 | 205045 | 42, 39, 36 |
| 17 | SLFN14 | schlafen family member 14 | 236320 | 205045 | 108733 | 5, |
| 17 | SLFN5 | schlafen family member 5 | 166750 | 164729 | 172716 | 24, 30, 39 |
| 17 | SOST | sderostin | 167941 | 005102 | 108861 | 17, 45, 6 |
| 17 | SCO1 | SCO1, cytochrome c oxidase assembly protein | 133028 | 109063 | 170222 | 6, 13, 21 |
| 17 | SEBOX | SEBOX homeobox | 274529 | 244045 | 273171 | |
| 17 | SEC14L1 | SEC14 like lipid binding 1 | 129657 | 167889 | 184640 | 45, 6, 39 |
| 17 | SCRN2 | secemin 2 | 141295 | 141294 | 189120 | 26, 40, 1 |
| 17 | SECTM1 | secreted and transmembrane 1 | 141574 | 173762 | 182459 | 34, 9, 5 |
| 17 | SCGB1C2 | secretoglobin family 1C member 2 | 268320 | 167693 | 272636 | |
| 17 | SHPK | sedoheptulokinase | 197417 | 262304 | 040531 | 1, 26, 24 |
| 17 | SEZ6 | seizure related 6 homolog | 063015 | 179761 | 196535 | 8, 14, 28 |
| 17 | SENP3-EIF4A1 | SENP3-EIF4A1 readthrough (NMD candidate) | 277957 | 161956 | 161960 | |
| 17 | SEPT4 | septin 4 | 108387 | 108389 | 181013 | 8, 26, 15 |
| 17 | SEPT9 | septin 9 | 184640 | 129657 | 278938 | |
| 17 | SRSF1 | serine and arginine rich splicing factor 1 | 136450 | 266086 | 264364 | 22, 39, 7 |
| 17 | SRSF2 | serine and arginine rich splicing factor 2 | 161547 | 267168 | 092931 | 39, 36, 13 |
| 17 | SCPEP1 | serine carboxypeptidase 1 | 121064 | 121058 | 121057 | 13, 2, 42 |
| 17 | SHMT1 | serine hydroxymethyltransferase 1 | 176974 | 176994 | 214860 | |
| 17 | SRR | serine racemase | 167720 | 070366 | 167721 | 30, 8, 15 |
| 17 | SERPINF1 | serpin family F member 1 | 132386 | 167711 | 186532 | 14, 1, 30 |
| 17 | SERPINF2 | serpin family F member 2 | 167711 | 167716 | 132386 | 19, 17, 36 |
| 17 | SMYD4 | SET and MYND domain containing 4 | 186532 | 132386 | 132383 | 2, 24, 34 |
| 17 | SHBG | sex hormone binding globulin | 129214 | 129245 | 141504 | 19, 14, 38 |
| 17 | STAC2 | SH3 and cysteine rich domain 2 | 141750 | 108298 | 108306 | 14, 1, 33 |
| 17 | SHISA6 | shisa family member 6 | 188803 | 233670 | 007174 | 8, 17, 33 |
| 17 | SDK2 | sidekick cell adhesion molecule 2 | 069188 | 179604 | 172809 | 38, 30, 12 |
| 17 | SPPL2C | signal peptide peptidase like 2C | 185294 | 120088 | 186868 | 38, 8, |
| 17 | SRP68 | signal recognition particle 68 | 167881 | 167880 | 186919 | 41, 35, 13 |
| 17 | STAT3 | signal transducer and activator of transcription 3 | 168610 | 126561 | 177469 | 24, 42, 36 |
| 17 | STAT5A | signal transducer and activator of transcription 5A | 126561 | 173757 | 168610 | 41, 39, 22 |
| 17 | STAT5B | signal transducer and activator of transcription 5B | 173757 | 167925 | 126561 | 31, 22, 32 |
| 17 | SIRT7 | sirtuin 7 | 187531 | 185813 | 197063 | 21, 28, 29 |
| 17 | SLC9A3R1 | SLC9A3 regulator 1 | 109062 | 186074 | 109065 | |
| 17 | SSH2 | slingshot protein phosphatase 2 | 141298 | 167549 | 176927 | 5, 21, 22 |
| 17 | SCIMP | SLP adaptor and CSK interacting membrane protein | 161929 | 180626 | 029725 | 22, 36, 5 |
| 17 | SMURF2 | SMAD specific E3 ubiquitin protein ligase 2 | 108854 | 258890 | 176809 | 37, 43, 45 |
| 17 | SGSM2 | small G protein signaling modulator 2 | 141258 | 167721 | 070444 | 9, 33, 26 |
| 17 | SMIM5 | small integral membrane protein 5 | 204323 | 108469 | 259120 | 17, 6, 40 |
| 17 | SMIM6 | small integral membrane protein 6 | 259120 | 204323 | 161526 | 29, 38, 28 |
| 17 | SUMO2 | small ubiquitin-like modifier 2 | 188612 | 189159 | 125450 | |
| 17 | SMG6 | SMG6, nonsense mediated mRNA decay factor | 070366 | 177374 | 167720 | 43, 39, 18 |
| 17 | SMG8 | SMG8, nonsense mediated mRNA decay factor | 167447 | 265303 | 153982 | 13, 7, 24 |
| 17 | SMCR8 | Smith-Magenis syndrome chromosome region, candidate 8 | 176994 | 177302 | 176974 | 29, 37, 36 |
| 17 | SMTNL2 | smoothelin like 2 | 188176 | 167741 | 161905 | 25, 26, 30 |
| 17 | SNF8 | SNF8, ESCRT-II complex subunit | 159210 | 159202 | 159224 | 22, |
| 17 | SCN4A | sodium voltage-gated channel alpha subunit 4 | 007314 | 007312 | 224383 | 31, 18, 25 |
| 17 | SLC13A2 | solute carrier family 13 member 2 | 007216 | 258472 | 109101 | 42, 17, 16 |
| 17 | SLC13A5 | solute carrier family 13 member 5 | 141485 | 279257 | 132530 | 19, 42, 8 |
| 17 | SLC16A11 | solute carrier family 16 member 11 | 174326 | 174327 | 132514 | 29, 2, 23 |
| 17 | SLC16A13 | solute carrier family 16 member 13 | 174327 | 161940 | 174326 | 7, 24, 23 |
| 17 | SLC16A3 | solute carrier family 16 member 3 | 141526 | 176155 | 141551 | 17, 13, 9 |
| 17 | SLC16A5 | solute carrier family 16 member 5 | 170190 | 167863 | 125449 | 3, 9, 1 |
| 17 | SLC16A6 | solute carrier family 16 member 6 | 108932 | 141337 | 070540 | 35, 9, 2 |
| 17 | SLC2A4 | solute carrier family 2 member 4 | 181856 | 181885 | 006047 | 15, 25, 13 |
| 17 | SLC25A10 | solute carrier family 25 member 10 | 183048 | 262660 | 215644 | 21, 37, 27 |
| 17 | SLC25A11 | solute carrier family 25 member 11 | 108528 | 185245 | 108523 | 34, 19, 25 |
| 17 | SLC25A19 | solute carrier family 25 member 19 | 125454 | 125457 | 177885 | 38, 22, 21 |
| 17 | SLC25A35 | solute carrier family 25 member 35 | 125434 | 178921 | 108961 | 22, 7, 44 |
| 17 | SLC25A39 | solute carrier family 25 member 39 | 013306 | 108309 | 030582 | 3, 9, 5 |
| 17 | SLC26A11 | solute carrier family 26 member 11 | 181045 | 181523 | 173821 | 26, 9, 2 |
| 17 | SLC35B1 | solute carrier family 35 member B1 | 121073 | 121067 | 121104 | |
| 17 | SLC35G3 | solute carrier family 35 member G3 | 164729 | 141161 | 166750 | 38, |
| 17 | SLC35G6 | solute carrier family 35 member G6 | 259224 | 174282 | 181222 | |
| 17 | SLC38A10 | solute carrier family 38 member 10 | 157637 | 224877 | 185332 | 34, 21, 31 |
| 17 | SLC39A11 | solute carrier family 39 member 11 | 133195 | 125398 | 180616 | 34, 24, 35 |
| 17 | SLC4A1 | solute carrier family 4 member 1 (Diego blood group) | 004939 | 108312 | 108309 | 19, 15, 7 |
| 17 | SLC43A2 | solute carrier family 43 member 2 | 167703 | 174238 | 074660 | 32, 36, 28 |
| 17 | SLC46A1 | solute carrier family 46 member 1 | 076351 | 109072 | 258472 | 29, 36, 2 |
| 17 | SLC47A1 | solute carrier family 47 member 1 | 142494 | 128482 | 072210 | 2, 24, 38 |
| 17 | SLC47A2 | solute carrier family 47 member 2 | 180638 | 072210 | 108602 | 13, 17, 3 |
| 17 | SLC5A10 | solute carrier family 5 member 10 | 154025 | 141127 | 188522 | 17, 15, 22 |
| 17 | SLC52A1 | solute carrier family 52 member 1 | 132517 | 129250 | 180787 | 32, 18, 24 |
| 17 | SLC6A4 | solute carrier family 6 member 4 | 108576 | 126653 | 108578 | 32, 24, 16 |
| 17 | SSTR2 | somatostatin receptor 2 | 180616 | 133195 | 166685 | 8, 14, 17 |
| 17 | SNX11 | sorting nexin 11 | 002919 | 108468 | 141293 | 41, 45, 36 |
| 17 | SP2 | Sp2 transcription factor | 167182 | 189120 | 108439 | 43, 9, 3 |
| 17 | SP6 | Sp6 transcription factor | 189120 | 141295 | 167182 | 29, 26, 32 |
| 17 | SPOP | speckle type BTB/POZ protein | 121067 | 182575 | 121073 | 30, 45, 13 |
| 17 | SPDYE4 | speedy/RINGO cell cycle regulator family member E4 | 183318 | 161973 | 185156 | 38, |
| 17 | SPACA3 | sperm acrosome associated 3 | 141316 | 006042 | 108684 | 38, 10, 8 |
| 17 | SPECC1 | sperm antigen with calponin homology and coiled-coil domains 1 | 128487 | 108599 | 170298 | |
| 17 | SPAG5 | sperm associated antigen 5 | 076382 | 109107 | 167524 | 38, 43, 9 |
| 17 | SPAG7 | sperm associated antigen 7 | 091640 | 108515 | 108509 | 4, |
| 17 | SPAG9 | sperm associated antigen 9 | 008294 | 141232 | 239672 | 11, 4, 8 |
| 17 | SPEM1 | spermatid maturation 1 | 181323 | 169992 | 184560 | 38, |
| 17 | SPATA20 | spermatogenesis associated 20 | 006282 | 049283 | 006283 | 38, 7, 3 |
| 17 | SPATA22 | spermatogenesis associated 22 | 141255 | 127780 | 108381 | 38, 8, 32 |
| 17 | SPATA32 | spermatogenesis associated 32 | 184361 | 184922 | 006062 | 38, 8, |
| 17 | SAT2 | spermidine/spermine N1-acetyltransferase family member 2 | 141504 | 129214 | 129244 | 1, 34, 20 |
| 17 | SPNS2 | sphingolipid transporter 2 | 183018 | 182557 | 132382 | 37, 14, 16 |
| 17 | SPNS3 | sphingolipid transporter 3 (putative) | 182557 | 132388 | 183018 | 5, 21, 7 |
| 17 | SPHK1 | sphingosine kinase 1 | 176170 | 161542 | 175931 | 13, 45, 35 |
| 17 | SKA2 | spindle and kinetochore associated complex subunit 2 | 182628 | 108395 | 068489 | 34, 10, 9 |
| 17 | SUPT4H1 | SPT4 homolog, DSIF elongation factor subunit | 213246 | 005379 | 108375 | 1, 34, 6 |
| 17 | SUPT6H | SPT6 homolog, histone chaperone | 109111 | 132581 | 167525 | 43, 20, 16 |
| 17 | SKAP1 | src kinase associated phosphoprotein 1 | 141293 | 002919 | 120094 | 31, 36, 10 |
| 17 | SRCIN1 | SRC kinase signaling inhibitor 1 | 277363 | 275832 | 273604 | 31, 8, 14 |
| 17 | SOX15 | SRY-box 15 | 129194 | 129255 | 129245 | 13, 31, 35 |
| 17 | SOX9 | SRY-box 9 | 125398 | 123700 | 133195 | 11, 38, 26 |
| 17 | ST6GALNAC1 | ST6 N-acetylgalactosaminide alpha-2,6-sialyltransferase 1 | 070526 | 070731 | 182534 | 42, 36, 3 |
| 17 | ST6GALNAC2 | ST6 N-acetylgalactosaminide alpha-2,6-sialyltransferase 2 | 070731 | 214140 | 070526 | 13, 35, 40 |
| 17 | STARD3 | StAR related lipid transfer domain containing 3 | 131748 | 131771 | 173991 | 39, 9, 31 |
| 17 | STRADA | STE20-related kinase adaptor alpha | 266173 | 136490 | 125695 | 36, 45, 38 |
| 17 | SARM1 | sterile alpha and TIR motif containing 1 | 004139 | 273171 | 109072 | 36, 8, 2 |
| 17 | SAMD14 | sterile alpha motif domain containing 14 | 167100 | 005882 | 108819 | 8, 29, 14 |
| 17 | SREBF1 | sterol regulatory element binding transcription factor 1 | 072310 | 108557 | 175662 | 24, 39, 42 |
| 17 | SDF2 | stromal cell derived factor 2 | 132581 | 007202 | 109111 | 34, 27, 43 |
| 17 | SENP3 | SUMO 1/sentrin/SMT3 specific peptidase 3 | 161956 | 161955 | 277957 | 6, 31, 9 |
| 17 | SOCS3 | suppressor of cytokine signaling 3 | 184557 | 204278 | 087157 | 1, 27, 10 |
| 17 | SOCS7 | suppressor of cytokine signaling 7 | 274211 | 277399 | 275832 | 18, 23, 14 |
| 17 | SUZ12 | SUZ12 polycomb repressive complex 2 subunit | 178691 | 108651 | 185158 | 11, 22, 7 |
| 17 | SMARCD2 | SWI/SNF related, matrix associated, actin dependent regulator of chromatin, | 108604 | 087191 | 213218 | 31, 3, 33 |
| | | subfamily d, member 2 | | | | |
| 17 | SMARCE1 | SWI/SNF related, matrix associated, actin dependent regulator of chromatin, | 073584 | 126353 | 264058 | 36, 45, 12 |
| | | subfamily e, member 1 | | | | |
| 17 | SYNGR2 | synaptogyrin 2 | 108639 | 187997 | 167900 | 41, 27, 21 |
| 17 | SYNRG | synergin qamma | 275066 | 276023 | 278053 | 22, 39, 20 |
| 17 | STX8 | syntaxin 8 | 170310 | 065320 | 166596 | 45, 2, 1 |
| 17 | STXBP4 | syntaxin binding protein 4 | 166263 | 166260 | 108924 | 9, 6, 45 |
| 17 | TAC4 | tachykinin 4 (hemokinin) | 176358 | 136504 | 108813 | 18, |
| 17 | TAOK1 | TAO kinase 1 | 160551 | 108256 | 168792 | |
| 17 | TOM1L1 | target of myb1 like 1 membrane trafficking protein | 141198 | 141200 | 166260 | |
| 17 | TOM1L2 | target of myb1 like 2 membrane trafficking protein | 175662 | 072310 | 171962 | 34, 26, 38 |
| 17 | TAF15 | TATA-box binding protein associated factor 15 | 270647 | 006125 | 270885 | 36, 24, 39 |
| 17 | TAX1BP3 | Tax1 binding protein 3 | 213977 | 040531 | 257950 | 34, 19, 1 |
| 17 | TBC1D16 | TBC1 domain family member 16 | 167291 | 141582 | 141519 | 43, 35, 23 |
| 17 | TBC1D26 | TBC1 domain family member 26 | 214946 | 255104 | 170425 | 38, 39, 8 |
| 17 | TBC1D26 | TBC1 domain family member 26 | 255104 | 187607 | 214946 | 38, 39, 8 |
| 17 | TBC1D28 | TBC1 domain family member 28 | 189375 | 213077 | 249459 | 38, |
| 17 | TBC1D29 | TBC1 domain family member 29 | 266733 | 108587 | 176390 | |
| 17 | TBC1D3 | TBC1 domain family member 3 | 274611 | 278599 | 278845 | 18, 24, 16 |
| 17 | TBC1D3B | TBC1 domain family member 3B | 274808 | 275302 | 276085 | 38, 16, 37 |
| 17 | TBC1D3C | TBC1 domain family member 3C | 278299 | 274419 | 278599 | 38, 16, 22 |
| 17 | TBC1D3D | TBC1 domain family member 3D | 274419 | 274512 | 278299 | |
| 17 | TBC1D3E | TBC1 domain family member 3E | 278599 | 278299 | 274611 | |
| 17 | TBC1D3F | TBC1 domain family member 3F | 275954 | 274226 | 273611 | |
| 17 | TBC1D3G | TBC1 domain family member 3G | 260287 | 274933 | 274226 | |
| 17 | TBC1D3H | TBC1 domain family member 3H | 274226 | 260287 | 275954 | 16, 2, 36 |
| 17 | TBC1D3I | TBC1 domain family member 3I | 274933 | 276070 | 260287 | |
| 17 | TBC1D3K | TBC1 domain family member 3K | 273513 | 275410 | 274512 | |
| 17 | TBC1D3L | TBC1 domain family member 3L | 274512 | 273513 | 274419 | 16, 2, 36 |
| 17 | TBKBP1 | TBK1 binding protein 1 | 198933 | 108424 | 073861 | 26, 18, 14 |
| 17 | TBX2 | T-box 2 | 121068 | 141376 | 121075 | |
| 17 | TBX21 | T-box 21 | 073861 | 198933 | 006025 | 36, 22, 28 |
| 17 | TBX4 | T-box 4 | 121075 | 121068 | 253506 | 1, 10, 32 |
| 17 | TEKT1 | tektin 1 | 167858 | 177294 | 108839 | 42, 30, 26 |
| 17 | TEKT3 | tektin 3 | 125409 | 109099 | 239704 | 38, 42, 10 |
| 17 | TEN1 | TEN1, CST complex subunit | 257949 | 161533 | 261408 | 34, 4, 9 |
| 17 | TEN1-CDK3 | TEN1-CDK3 readthrough (NMD candidate) | 261408 | 257949 | 250506 | 22, 23, 16 |
| 17 | TNS4 | tensin 4 | 131746 | 141753 | 126353 | 4, 24, 40 |
| 17 | TEPSIN | TEPSIN, adaptor related protein complex 4 accessory protein | 167302 | 141577 | 224877 | |
| 17 | TEX14 | testis expressed 14, intercellular bridge forming factor | 121101 | 181013 | 108384 | 38, 10, 22 |
| 17 | TEX19 | testis expressed 19 | 182459 | 141574 | 181408 | 38, 21, 3 |
| 17 | TEX2 | testis expressed 2 | 136478 | 178607 | 261371 | 38, 24, 42 |
| 17 | TSPAN10 | tetraspanin 10 | 182612 | 182446 | 185527 | |
| 17 | TTC19 | tetratricopeptide repeat domain 19 | 011295 | 214941 | 141027 | 29, 15, 31 |
| 17 | TTC25 | tetratricopeptide repeat domain 25 | 204815 | 131473 | 173786 | 30, 9, 6 |
| 17 | TANC2 | tetratricopeptide repeat, ankyrin repeat and coiled-coil containing 2 | 170921 | 173838 | 008283 | 18, 26, 31 |
| 17 | TIAF1 | TGFB1-induced anti-apoptotic factor 1 | 221995 | 196535 | 108255 | 13, 15, 17 |
| 17 | TXNDC17 | thioredoxin domain containing 17 | 129235 | 282936 | 108590 | 43, 33, 34 |
| 17 | TK1 | thymidine kinase 1 | 167900 | 108639 | 183077 | 21, 41, 23 |
| 17 | THRA | thyroid hormone receptor, alpha | 126351 | 008838 | 126368 | 34, 11, 8 |
| 17 | TIMP2 | TIMP metallopeptidase inhibitor 2 | 035862 | 055483 | 178404 | 11, 15, 32 |
| 17 | TCAP | titin-cap | 173991 | 131748 | 141744 | 25, 15, 26 |
| 17 | TLCD1 | TLC domain containing 1 | 160606 | 198242 | 160602 | 17, 20, |
| 17 | TLCD2 | TLC domain containing 2 | 185561 | 174231 | 167716 | 34, 14, 24 |
| 17 | TMEM256- | TMEM256-PLSCR3 readthrough (NMD candidate) | 187838 | 174292 | 262481 | 13, 45, 26 |
| | PLSCR3 | | | | | |
| 17 | TMEM256- | TMEM256-PLSCR3 readthrough (NMD candidate) | 262481 | 187838 | 205544 | |
| | PLSCR3 | | | | | |
| 17 | TNFAIP1 | TNF alpha induced protein 1 | 109079 | 109083 | 004142 | 43, 34, 25 |
| 17 | TRAF4 | TNF receptor associated factor 4 | 076604 | 160602 | 173065 | 37, 26, 12 |
| 17 | TNFRSF13B | TNF receptor superfamily member 13B | 240505 | 266302 | 133030 | 36, 21, 39 |
| 17 | TNFSF12- | TNFSF12-TNFSF13 readthrough | 248871 | 239697 | 161955 | |
| | TNFSF13 | | | | | |
| 17 | TOP2A | topoisomerase (DNA) II alpha | 131747 | 183153 | 141753 | |
| 17 | TOP3A | topoisomerase (DNA) III alpha | 177302 | 177427 | 176994 | 41, 39, 23 |
| 17 | TLK2 | tousled like kinase 2 | 146872 | 087995 | 011028 | 41, 38, 12 |
| 17 | TRAPPC1 | trafficking protein particle complex 1 | 170043 | 262730 | 170037 | 34, 41, 27 |
| 17 | TEFM | transcription elongation factor, mitochondrial | 172171 | 176208 | 184060 | 29, 34, 26 |
| 17 | TADA2A | transcriptional adaptor 2A | 276234 | 278505 | 276023 | 30, 5, 9 |
| 17 | TOB1 | transducer of ERBB2,1 | 141232 | 173714 | 008294 | 2, 4, 7 |
| 17 | TVP23B | trans-golgi network vesicle protein 23 homolog B | 171928 | 171931 | 141127 | 4, 30, 31 |
| 17 | TVP23C | trans-golgi network vesicle protein 23 homolog C | 175106 | 259024 | 241322 | 31, 29, 37 |
| 17 | TRPV1 | transient receptor potential cation channel subfamily V member 1 | 196689 | 167723 | 262304 | 27, 24, 30 |
| 17 | TRPV2 | transient receptor potential cation channel subfamily V member 2 | 187688 | 170315 | 181350 | 7, 22, 35 |
| 17 | TRPV3 | transient receptor potential cation channel subfamily V member 3 | 167723 | 108381 | 196689 | 29, 25, 38 |
| 17 | TACO1 | translational activator of cytochrome c oxidase I | 136463 | 136485 | 198909 | 41, 3, 18 |
| 17 | TIMM22 | translocase of inner mitochondrial membrane 22 | 177370 | 167693 | 159842 | 27, 37, 1 |
| 17 | TM4SF5 | transmembrane 4 L six family member 5 | 142484 | 141497 | 182853 | 29, 17, 15 |
| 17 | TMIGD1 | transmembrane and immunoglobulin domain containing 1 | 182271 | 108578 | 108582 | 17, 14, 16 |
| 17 | TMUB2 | transmembrane and ubiquitin like domain containing 2 | 168591 | 161664 | 087152 | 5, 23, 1 |
| 17 | TMC6 | transmembrane channel like 6 | 141524 | 078687 | 167895 | 41, 5, 36 |
| 17 | TMC8 | transmembrane channel like 8 | 167895 | 141524 | 187997 | 39, 41, 22 |
| 17 | TMEM100 | transmembrane protein 100 | 166292 | 261873 | 141179 | 44, |
| 17 | TMEM101 | transmembrane protein 101 | 091947 | 161653 | 161654 | 21, 9, 25 |
| 17 | TMEM102 | transmembrane protein 102 | 181284 | 283439 | 161958 | 21, 2, 13 |
| 17 | TMEM104 | transmembrane protein 104 | 109066 | 109065 | 161509 | 26, 31, 6 |
| 17 | TMEM105 | transmembrane protein 105 | 185332 | 157637 | 266074 | |
| 17 | TMEM106A | transmembrane protein 106A | 184988 | 188554 | 236383 | 39, 36, 17 |
| 17 | TMEM107 | transmembrane protein 107 | 179029 | 220205 | 196544 | 7, 5, 29 |
| 17 | TMEM11 | transmembrane protein 11 | 178307 | 109016 | 274180 | 29, 40, 17 |
| 17 | TMEM132E | transmembrane protein 132E | 181291 | 108702 | 132141 | 2, 15, 33 |
| 17 | TMEM199 | transmembrane protein 199 | 244045 | 004142 | 274529 | 29, 1, 37 |
| 17 | TMEM220 | transmembrane protein 220 | 187824 | 170222 | 263429 | 13, 33, 2 |
| 17 | TMEM235 | transmembrane protein 235 | 204278 | 089685 | 184557 | 8, 12, |
| 17 | TMEM256 | transmembrane protein 256 | 205544 | 262481 | 169992 | 3, 7, 41 |
| 17 | TMEM88 | transmembrane protein 88 | 167874 | 132510 | 183011 | 32, 36, 25 |
| 17 | TMEM92 | transmembrane protein 92 | 167105 | 108821 | 015532 | 37, 16, 9 |
| 17 | TMEM94 | transmembrane protein 94 | 177728 | 177885 | 177303 | 43, 26, 8 |
| 17 | TMEM95 | transmembrane protein 95 | 182896 | 213859 | 174292 | 24, 38, |
| 17 | TMEM97 | transmembrane protein 97 | 109084 | 087095 | 109083 | 38, 4, 9 |
| 17 | TMEM98 | transmembrane protein 98 | 006042 | 176658 | 141316 | 14, 31, 32 |
| 17 | TMEM99 | transmembrane protein 99 | 167920 | 186395 | 187242 | 6, 41, 23 |
| 17 | TNRC6C | trinucleotide repeat containing 60 | 078687 | 278938 | 141524 | 22, 18, 29 |
| 17 | TRIM16 | tripartite motif containing 16 | 221926 | 251537 | 187607 | 24, 32, |
| 17 | TRIM16L | tripartite motif containing 16-like | 108448 | 249459 | 171931 | 13, 34, 20 |
| 17 | TRIM25 | tripartite motif containing 25 | 121060 | 153933 | 121058 | 22, 9, 1 |
| 17 | TRIM37 | tripartite motif containing 37 | 108395 | 175175 | 182628 | 38, 8, 31 |
| 17 | TRIM47 | tripartite motif containing 47 | 132481 | 132471 | 141569 | 34, 29, 26 |
| 17 | TRIM65 | tripartite motif containing 65 | 141569 | 132481 | 204316 | 41, 21, 11 |
| 17 | TSEN54 | tRNA splicing endonuclease subunit 54 | 182173 | 177303 | 073350 | 37, 9, 25 |
| 17 | TSPOAP1 | TSPO associated protein 1 | 005379 | 005381 | 213246 | |
| 17 | TSR1 | TSR1, ribosome maturation factor | 167721 | 167720 | 141258 | 42, 3, 24 |
| 17 | TUBD1 | tubulin delta 1 | 108423 | 062716 | 108443 | 29, 28, 1 |
| 17 | TBCD | tubulin folding cofactor D | 141556 | 167363 | 141579 | 14, 44, 40 |
| 17 | TUBG1 | tubulin gamma 1 | 131462 | 141699 | 037042 | 30, 18, 38 |
| 17 | TUBG2 | tubulin gamma 2 | 037042 | 131462 | 068137 | 36, 8, 24 |
| 17 | TTLL6 | tubulin tyrosine ligase like 6 | 170703 | 159184 | 136436 | |
| 17 | TNFSF12 | tumor necrosis factor superfamily member 12 | 239697 | 181222 | 248871 | |
| 17 | TNFSF13 | tumor necrosis factor superfamily member 13 | 161955 | 248871 | 161956 | 27, 5, 17 |
| 17 | TP53 | tumor protein p53 | 141510 | 129244 | 141499 | 24, 45, 4 |
| 17 | TP53I13 | tumor protein p53 inducible protein 13 | 167543 | 168792 | 108262 | |
| 17 | TUSC5 | tumor suppressor candidate 5 | 184811 | 205899 | 108953 | 1, 6, 25 |
| 17 | TVP23C-CDRT4 | TVP23C-CDRT4 readthrough | 259024 | 239704 | 175106 | |
| 17 | TTYH2 | tweety family member 2 | 141540 | 172809 | 171595 | 8, 1, 38 |
| 17 | YWHAE | tyrosine 3-monooxygenase/tryptophan 5-monooxygenase activation protein | 108953 | 184811 | 167193 | 45, 13, 15 |
| | | epsilon | | | | |
| 17 | TNK1 | tyrosine kinase non receptor 1 | 174292 | 182896 | 187838 | 24, 33, 44 |
| 17 | UBALD2 | UBA like domain containing 2 | 185262 | 141576 | 129646 | 6, 29, 22 |
| 17 | UBB | ubiquitin B | 170315 | 166582 | 187688 | |
| 17 | UBE2G1 | ubiquitin conjugating enzyme E2 G1 | 132388 | 185722 | 182557 | 22, 29, 11 |
| 17 | UBE20O | ubiquitin conjugating enzyme E2 O | 175931 | 176170 | 129673 | 35, 33, 18 |
| 17 | UBE2Z | ubiquitin conjugating enzyme E2 Z | 159202 | 159199 | 159210 | 29, 40, 9 |
| 17 | USP22 | ubiquitin specific peptidase 22 | 124422 | 205212 | 109016 | 22, 35, 9 |
| 17 | USP32 | ubiquitin specific peptidase 32 | 170832 | 167434 | 141371 | 23, 34, 29 |
| 17 | USP36 | ubiquitin specific peptidase 36 | 055483 | 108669 | 035862 | 23, 43, 24 |
| 17 | USP43 | ubiquitin specific peptidase 43 | 154914 | 166596 | 184544 | 1, 26, 32 |
| 17 | USP6 | ubiquitin specific peptidase 6 | 129204 | 167840 | 180626 | 22, 38, 3 |
| 17 | B3GNTL1 | UDP-GlcNAc: betaGal beta-1,3-N-acetylglucosaminyltransferase-like 1 | 175711 | 141579 | 176845 | 9, 5, 36 |
| 17 | UNC119 | unc-119 lipid binding chaperone | 109103 | 109101 | 087111 | 14, 34, 22 |
| 17 | UNC13D | unc-13 homolog D | 092929 | 132478 | 132471 | 37, 5, 22 |
| 17 | UNC45B | unc-45 myosin chaperone B | 141161 | 073536 | 164729 | 15, 18, 25 |
| 17 | ULK2 | unc-51 like autophagy activating kinase 2 | 083290 | 108602 | 108599 | 11, 38, 22 |
| 17 | SGK494 | Uncharacterized serine/threonine-protein kinase SgK494 | 167524 | 076382 | 007202 | 40, 18, 24 |
| 17 | UNK | unkempt family zinc finger | 132478 | 132475 | 092929 | 14, 36, 12 |
| 17 | UBTF | upstream binding transcription factor, RNA polymerase I | 108312 | 087152 | 004939 | 41, 33, 39 |
| 17 | UTS2R | urotensin 2 receptor | 181408 | 182459 | 181396 | 27, 38, |
| 17 | USH1G | USH1 protein network component sans | 182040 | 172782 | 183034 | 24, 8, 38 |
| 17 | UTP18 | UTP18, small subunit processome component | 011260 | 011258 | 154975 | 10, 22, 29 |
| 17 | UTP6 | UTP6, small subunit processome component | 108651 | 172301 | 178691 | 10, 43, 45 |
| 17 | VPS25 | vacuolar protein sorting 25 homolog | 131475 | 131477 | 126562 | 34, 30, 6 |
| 17 | VMP1 | vacuole membrane protein 1 | 062716 | 141378 | 108423 | 5, 40, 23 |
| 17 | VEZF1 | vascular endothelial zinc finger 1 | 136451 | 180891 | 266086 | 1, 14, 6 |
| 17 | VAT1 | vesicle amine transport 1 | 108828 | 068079 | 108830 | 35, 2, 39 |
| 17 | VAMP2 | vesicle associated membrane protein 2 | 220205 | 263620 | 179029 | 26, 14, 40 |
| 17 | VMO1 | vitelline membrane outer layer 1 homolog | 182853 | 142484 | 182327 | 31, 20, 6 |
| 17 | VTN | vitronectin | 109072 | 004139 | 076351 | 19, 23, 2 |
| 17 | VPS53 | VPS53, GARP complex subunit | 141252 | 183688 | 167695 | |
| 17 | WFIKKN2 | WAP, follistatin/kazal, immunoglobulin, kunitz and netrin domain containing 2 | 173714 | 108848 | 141232 | 24, 8, 37 |
| 17 | WIPF2 | WAS/WASL interacting protein family member 2 | 171475 | 108352 | 094804 | |
| 17 | WSB1 | WD repeat and SOCS box containing 1 | 109046 | 256618 | 141068 | 39, 42, 11 |
| 17 | WRAP53 | WD repeat containing antisense to TP53 | 141499 | 141510 | 108947 | 39, 24, 9 |
| 17 | WDR45B | WD repeat domain 45B | 141580 | 141568 | 141542 | 37, 29, 9 |
| 17 | WDR81 | WD repeat domain 81 | 167716 | 185561 | 167711 | 24, 22, 1 |
| 17 | WIPI1 | WD repeat domain, phosphoinositide interacting 1 | 070540 | 108932 | 108946 | 43, 32, 29 |
| 17 | WNK4 | WNK lysine deficient protein kinase 4 | 126562 | 131475 | 183978 | 17, 16, 23 |
| 17 | WNT3 | Wnt family member 3 | 108379 | 073969 | 158955 | 37, 29, 15 |
| 17 | WNT9B | Wnt family member 9B | 158955 | 108379 | 108433 | 11, 27, 25 |
| 17 | WSCD1 | WSC domain containing 1 | 179314 | 091592 | 129221 | |
| 17 | WBP2 | WW domain binding protein 2 | 132471 | 092929 | 132481 | 2, 8, 39 |
| 17 | XAF1 | XIAP associated factor 1 | 132530 | 141485 | 177294 | 36, 13, 4 |
| 17 | XYLT2 | xylosyltransferase 2 | 015532 | 167105 | 108826 | 35, 3, 22 |
| 17 | YBX2 | Y-box binding protein 2 | 006047 | 181856 | 132507 | 38, 18, 1 |
| 17 | YPEL2 | yippee like 2 | 175155 | 153982 | 108406 | 30, 26, 22 |
| 17 | ZFP3 | ZFP3 zinc finger protein | 180787 | 132517 | 167840 | 18, 26, 29 |
| 17 | ZACN | zinc activated ion channel | 186919 | 167881 | 182687 | 39, 15, 10 |
| 17 | ZBTB4 | zinc finger and BTB domain containing 4 | 174282 | 170175 | 259224 | 29, 34, 14 |
| 17 | ZNHIT3 | zinc finger HIT-type containing 3 | 273611 | 275954 | 278259 | 34, 15, 43 |
| 17 | ZMYND15 | zinc finger MYND-type containing 15 | 141497 | 161921 | 142484 | 38, 3, 30 |
| 17 | ZNF18 | zinc finger protein 18 | 154957 | 007174 | 065559 | 18, 13, 29 |
| 17 | ZNF207 | zinc finger protein 207 | 010244 | 108666 | 108671 | |
| 17 | ZNF232 | zinc finger protein 232 | 167840 | 180787 | 129204 | 13, 5, 44 |
| 17 | ZNF286A | zinc finger protein 286A | 187607 | 221926 | 255104 | 11, 41, 15 |
| 17 | ZNF286B | zinc finger protein 286B | 249459 | 189375 | 108448 | 12, 22, 14 |
| 17 | ZNF287 | zinc finger protein 287 | 141040 | 181350 | 197566 | 45, 22, 17 |
| 17 | ZNF385C | zinc finger protein 385C | 187595 | 168256 | 267221 | 14, 38, 12 |
| 17 | ZNF594 | zinc finger protein 594 | 180626 | 129204 | 161929 | 1, 15, 40 |
| 17 | ZNF624 | zinc finger protein 624 | 197566 | 141040 | 170160 | 24, 9, 17 |
| 17 | ZNF652 | zinc finger protein 652 | 198740 | 173868 | 167085 | |
| 17 | ZNF750 | zinc finger protein 750 | 141579 | 141556 | 175711 | 24, 42, 39 |
| 17 | ZNF830 | zinc finger protein 830 | 198783 | 132141 | 005156 | 6, |
| 17 | ZSWIM7 | zinc finger SWIM-type containing 7 | 214941 | 170425 | 011295 | 6, 34, 30 |
| 17 | ZZEF1 | zinc finger ZZ-type and EF-hand domain containing 1 | 074755 | 074370 | 167740 | 43, 22, 36 |
| 17 | ZPBP2 | zona pellucida binding protein 2 | 186075 | 161405 | 073605 | 38, 8 |

[0066] Table 8 provides the gene information for the genes found on Chromosomes 18-19.

TABLE 8
Genes on Chromosomes 18-19

| | | | | Up | Down | Tissue |
|---|---|---|---|---|---|---|
| Chr. | Gene Symbol | Gene Name | ENSG | ENSG | ENSG | Code |
| 18 | KDSR | 3-ketodihydrosphingosine reductase | 119537 | 171791 | 119541 | 10, 1, 42 |
| 18 | ABHD3 | abhydrolase domain containing 3 | 158201 | 167088 | 101752 | 1, 26, 37 |
| 18 | ACAA2 | acetyl-CoA acyltransferase 2 | 167315 | 101670 | 266997 | 21, 17, 15 |
| 18 | ASXL3 | additional sex combs like 3, transcriptional regulator | 141431 | 166960 | 101746 | 38, 28, 9 |
| 18 | ADCYAP1 | adenylate cyclase activating polypeptide 1 | 141433 | 176105 | 101574 | |
| 18 | ADNP2 | ADNP homeobox 2 | 101544 | 101546 | 178184 | 22, 12, 9 |
| 18 | AFG3L2 | AFG3 like matrix AAA peptidase subunit 2 | 141385 | 176014 | 141391 | 35, 21, 1 |
| 18 | AKAIN1 | A-kinase anchor inhibitor 1 | 231824 | 170579 | 198081 | |
| 18 | ALPK2 | alpha kinase 2 | 198796 | 049759 | 172175 | 18, 9, 17 |
| 18 | ANKRD12 | ankyrin repeat domain 12 | 101745 | 178127 | 128791 | 36, 39, 22 |
| 18 | ANKRD29 | ankyrin repeat domain 29 | 154065 | 141458 | 053747 | 5, 17, |
| 18 | ANKRD30B | ankyrin repeat domain 30B | 180777 | 183206 | 278923 | 40, 23, 38 |
| 18 | ANKRD62 | ankyrin repeat domain 62 | 181626 | 141401 | 176194 | |
| 18 | APCDD1 | APC down-regulated 1 | 154856 | 101558 | 134265 | 34, 37, 15 |
| 18 | AQP4 | aquaporin 4 | 171885 | 134504 | 154080 | 8, 26, 31 |
| 18 | NARS | asparaginyl-tRNA synthetase | 134440 | 066926 | 081923 | 36, 39, 3 |
| 18 | ATP5A1 | ATP synthase, H+ transporting, mitochondrial | 152234 | 152229 | 152240 | 14, 15, 43 |
| | | F1 complex, alpha subunit 1, cardiac muscle | | | | |
| 18 | ATP8B1 | ATPase phospholipid transporting 8B1 | 081923 | 134440 | 049759 | 4, 37, 42 |
| 18 | ATP9B | ATPase phospholipid transporting 9B (putative) | 166377 | 256463 | 131196 | 33, 23, 26 |
| 18 | BCL2 | BCL2, apoptosis regulator | 171791 | 081913 | 119537 | 21, 29, 37 |
| 18 | B4GALT6 | beta-1,4-galactosyltransferase 6 | 118276 | 118271 | 141437 | 31, 7, 39 |
| 18 | BOD1L2 | biorientation of chromosomes in cell division 1 like 2 | 228075 | 091157 | 177511 | 38, 8, |
| 18 | CDH19 | cadherin 19 | 071991 | 081138 | 171451 | 26, 42, 35 |
| 18 | CDH2 | cadherin 2 | 170558 | 154080 | 134762 | 45, 12, 38 |
| 18 | CDH20 | cadherin 20 | 101542 | 166603 | 176641 | 45, 8, 14 |
| 18 | CDH7 | cadherin 7 | 081138 | 166401 | 071991 | 8, 12, |
| 18 | CABYR | calcium binding tyrosine phosphorylation regulated | 154040 | 168234 | 141447 | 38, 13, 15 |
| 18 | CTIF | cap binding complex dependent translation initiation factor | 134030 | 184828 | 101665 | 1, 26, 14 |
| 18 | CHST9 | carbohydrate sulfotransferase 9 | 154080 | 171885 | 170558 | |
| 18 | CNDP1 | carnosine dipeptidase 1 | 150656 | 133313 | 215421 | 8, 10, 17 |
| 18 | CD226 | CD226 molecule | 150637 | 206052 | 176225 | 36, 5, 45 |
| 18 | CABLES1 | Cdk5 and Abl enzyme substrate 1 | 134508 | 101773 | 134490 | 18, 29, 43 |
| 18 | CIDEA | cell death-inducing DFFA-like effector a | 176194 | 181626 | 176014 | 1, 35, 26 |
| 18 | CETN1 | centrin 1 | 177143 | 158270 | 079101 | 38, 32, 8 |
| 18 | CEP192 | centrosomal protein 192 | 101639 | 085415 | 168675 | 22, 40, 1 |
| 18 | CEP76 | centrosomal protein 76 | 101624 | 128789 | 175354 | 24, 38, 30 |
| 18 | CBLN2 | cerebellin 2 precursor | 141668 | 170677 | 166342 | |
| 18 | CHMP1B | charged multivesicular body protein 1B | 255112 | 141404 | 154889 | 11, 43, 26 |
| 18 | C18orf21 | chromosome 18 open reading frame 21 | 141428 | 141429 | 141425 | 24, |
| 18 | C18orf25 | chromosome 18 open reading frame 25 | 152242 | 152240 | 141622 | 26, 13, 45 |
| 18 | C18orf32 | chromosome 18 open reading frame 32 | 177576 | 141627 | 215472 | 4, 34, 31 |
| 18 | C18orf54 | chromosome 18 open reading frame 54 | 166845 | 174448 | 178690 | 22, 12, 38 |
| 18 | C18orf63 | chromosome 18 open reading frame 63 | 206043 | 166347 | 187773 | 38, |
| 18 | C18orf8 | chromosome 18 open reading frame 8 | 141452 | 101782 | 141458 | 34, 5, 40 |
| 18 | CFAP53 | cilia and flagella associated protein 53 | 172361 | 167306 | 141644 | 38, 17, 20 |
| 18 | CLUL1 | clusterin like 1 | 079101 | 177143 | 176890 | 31, 25, 14 |
| 18 | CNDP2 | CNDP dipeptidase 2 (metallopeptidase M20 family) | 133313 | 187773 | 150656 | 36, 17, 21 |
| 18 | CCDC102B | coiled-coil domain containing 102B | 150636 | 166479 | 206052 | 24, 38, 10 |
| 18 | CCDC178 | coiled-coil domain containing 178 | 166960 | 197705 | 141431 | 10, 38, 8 |
| 18 | CCDC68 | coiled-coil domain containing 68 | 166510 | 041353 | 196628 | 31, 42, 3 |
| 18 | CCBE1 | collagen and calcium binding EGF domains 1 | 183287 | 074695 | 141682 | 26, 27, 19 |
| 18 | COLEC12 | collectin subfamily member 12 | 158270 | 079134 | 177143 | 11, 32, 6 |
| 18 | CPLX4 | complexin 4 | 166569 | 134438 | 074695 | 14, 25, 8 |
| 18 | CTDP1 | CTD phosphatase subunit 1 | 060069 | 131196 | 178342 | 38, |
| 18 | CELF4 | CUGBP, Elav-like family member 4 | 101489 | 150477 | 078142 | 31, 8, 20 |
| 18 | CTAGE1 | cutaneous T-cell lymphoma-associated antigen 1 | 212710 | 141448 | 101773 | 38, 17, 32 |
| 18 | CXXC1 | CXXC finger protein 1 | 154832 | 141644 | 154839 | 18, 26, 21 |
| 18 | CYB5A | cytochrome b5 type A | 166347 | 075336 | 206043 | 10, 29, 33 |
| 18 | DCC | DCC netrin 1 receptor | 187323 | 176624 | 280098 | |
| 18 | DSEL | dermatan sulfate epimerase-like | 171451 | 071991 | 166479 | 43, 45, 15 |
| 18 | DSC1 | desmocollin 1 | 134765 | 134755 | 134760 | 35, 15, 12 |
| 18 | DSC2 | desmocollin 2 | 134755 | 134762 | 134765 | 18, 24, 32 |
| 18 | DSC3 | desmocollin 3 | 134762 | 170558 | 134755 | 10, 24, 42 |
| 18 | DSG1 | desmoglein 1 | 134760 | 134765 | 175065 | 35, 15, 14 |
| 18 | DSG2 | desmoglein 2 | 046604 | 134757 | 118271 | 34, 13, 24 |
| 18 | DSG3 | desmoglein 3 | 134757 | 175065 | 046604 | 30, 24, 13 |
| 18 | DSG4 | desmoglein 4 | 175065 | 134760 | 134757 | 33, 38, |
| 18 | DLGAP1 | DLG associated protein 1 | 170579 | 177426 | 231824 | |
| 18 | POLI | DNA polymerase iota | 101751 | 134046 | 174448 | 29, 12, 32 |
| 18 | DOK6 | docking protein 6 | 206052 | 150636 | 150637 | 11, 29, 32 |
| 18 | DYM | dymeclin | 141627 | 101665 | 177576 | 38, |
| 18 | DYNAP | dynactin associated protein | 178690 | 166845 | 041353 | 24, 32, |
| 18 | DTNA | dystrobrevin alpha | 134769 | 101746 | 166974 | 8, 15, 26 |
| 18 | EPG5 | ectopic P-granules autophagy protein 5 homolog | 152223 | 197046 | 152229 | 26, 18, 22 |
| 18 | ELAC1 | elaC ribonuclease Z 1 | 141642 | 082212 | 267699 | 11, 25, 22 |
| 18 | EMILIN2 | elastin microfibril interfacer 2 | 132205 | 101596 | 101577 | 40, 33, 18 |
| 18 | ELP2 | elongator acetyltransferase complex subunit 2 | 134759 | 141424 | 075643 | 1, 39, 23 |
| 18 | ENOSF1 | enolase superfamily member 1 | 132199 | 176890 | 176105 | 31, 19, 11 |
| 18 | EPB41L3 | erythrocyte membrane protein band 4.1 like 3 | 082397 | 198081 | 206432 | |
| 18 | ESCO1 | establishment of sister chromatid cohesion | 141446 | 141449 | 167088 | 26, 31, 34 |
| | | N-acetyltransferase 1 | | | | |
| 18 | FAM210A | family with sequence similarity 210 member A | 177150 | 168675 | 101654 | 29, 4, 14 |
| 18 | FAM69C | family with sequence similarity 69 member C | 187773 | 206043 | 133313 | 26, 15, 14 |
| 18 | FBXO15 | F-box protein 15 | 141665 | 166342 | 075336 | 10, 38, 6 |
| 18 | FECH | ferrochelatase | 066926 | 119547 | 134440 | 43, 33, 11 |
| 18 | FHOD3 | formin homology 2 domain containing 3 | 134775 | 075643 | 134779 | 26, 42, 15 |
| 18 | GNAL | G protein subunit alpha L | 141404 | 236396 | 255112 | 8, 11, 31 |
| 18 | GALR1 | galanin receptor 1 | 166573 | 197971 | 256463 | 26, 33, |
| 18 | GRP | gastrin releasing peptide | 134443 | 166562 | 134438 | 29, 20, 44 |
| 18 | GATA6 | GATA binding protein 6 | 141448 | 101752 | 212710 | 27, 1, 9 |
| 18 | GAREM1 | GRB2 associated regulator of MAPK1 subtype 1 | 141441 | 134758 | 141434 | |
| 18 | GREB1L | growth regulation by estrogen in breast cancer 1 like | 141449 | 067900 | 141446 | 12, 27, 14 |
| 18 | HDHD2 | haloacid dehalogenase like hydrolase domain containing 2 | 167220 | 206181 | 267228 | 26, 1, 36 |
| 18 | HAUS1 | HAUS augmin like complex subunit 1 | 152240 | 152234 | 152242 | 14, 29, 26 |
| 18 | HSBP1L1 | heat shock factor binding protein 1 like 1 | 226742 | 122490 | 141759 | 28, 44, 37 |
| 18 | HRH4 | histamine receptor H4 | 134489 | 154059 | 198795 | 38, |
| 18 | HMSD | histocompatibility minor serpin domain containing | 221887 | 242550 | 166401 | 14, 8, |
| 18 | IER3IP1 | immediate early response 3 interacting protein 1 | 134049 | 267228 | 215474 | 34, 7, 4 |
| 18 | IMPACT | impact RWD domain protein | 154059 | 141447 | 134489 | 29, 4, 1 |
| 18 | INO80C | INO80 complex subunit C | 153391 | 267140 | 141429 | 3, 33, 13 |
| 18 | IMPA2 | inositol monophosphatase 2 | 141401 | 154889 | 181626 | 34, 32, 9 |
| 18 | KATNAL2 | katanin catalytic subunit A1 like 2 | 167216 | 078043 | 274744 | 38, 8, 22 |
| 18 | KLHL14 | kelch like family member 14 | 197705 | 141434 | 166960 | 29, 22, 32 |
| 18 | KIAA1328 | KIAA1328 | 150477 | 134779 | 101489 | |
| 18 | KIAA1468 | KIAA1468 | 134444 | 197563 | 141655 | 26, 11, 7 |
| 18 | L3MBTL4 | I(3)mbt-like 4 (Drosophila) | 154655 | 206432 | 088756 | 38, 15, 14 |
| 18 | LAMA1 | laminin subunit alpha 1 | 101680 | 088756 | 206422 | 40, 12, 38 |
| 18 | LAMA3 | laminin subunit alpha 3 | 053747 | 154065 | 168234 | |
| 18 | LMAN1 | lectin, mannose binding 1 | 074695 | 166569 | 183287 | 13, 42, 11 |
| 18 | LRRC30 | leucine rich repeat containing 30 | 206422 | 101680 | 173482 | |
| 18 | LIPG | lipase G, endothelial type | 101670 | 265681 | 167315 | 40, 32, 25 |
| 18 | LPIN2 | lipin 2 | 101577 | 132205 | 101605 | 19, 26, 15 |
| 18 | LOXHD1 | lipoxygenase homology domains 1 | 167210 | 141622 | 101638 | 38, 5, 33 |
| 18 | LDLRAD4 | low density lipoprotein receptor class A domain containing 4 | 168675 | 101639 | 177150 | 39, 26, 8 |
| 18 | MRO | maestro | 134042 | 141639 | 082212 | 17, 8, 38 |
| 18 | ME2 | malic enzyme 2 | 082212 | 134042 | 141642 | 43, 31, 2 |
| 18 | MALT1 | MALT1 paracaspase | 172175 | 198796 | 074657 | 22, 41, 5 |
| 18 | MC2R | melanocortin 2 receptor | 185231 | 176136 | 175322 | 2, 8, |
| 18 | MC4R | melanocortin 4 receptor | 166603 | 141682 | 101542 | |
| 18 | MC5R | melanocortin 5 receptor | 176136 | 101654 | 185231 | |
| 18 | MEP1B | meprin A subunit beta | 141434 | 141441 | 197705 | 16, 21, 40 |
| 18 | MPPE1 | metallophosphoesterase 1 | 154889 | 255112 | 141401 | 22, 40, 26 |
| 18 | MBD1 | methyl-CpG binding domain protein 1 | 141644 | 172361 | 154832 | 38, 14, 6 |
| 18 | MBD2 | methyl-CpG binding domain protein 2 | 134046 | 280098 | 101751 | 10, 18, 4 |
| 18 | METTL4 | methyltransferase like 4 | 101574 | 141433 | 080986 | 1, 23, 39 |
| 18 | MEX3C | mex-3 RNA binding family member C | 176624 | 141646 | 187323 | 40, 29, 22 |
| 18 | MAPRE2 | microtubule associated protein RP/EB family member 2 | 166974 | 134769 | 186812 | |
| 18 | MTCL1 | microtubule crosslinking factor 1 | 168502 | 206418 | 178127 | 11, 31, 14 |
| 18 | MIB1 | mindbomb E3 ubiquitin protein ligase 1 | 101752 | 158201 | 141448 | 22, 29, 11 |
| 18 | MAPK4 | mitogen-activated protein kinase 4 | 141639 | 154839 | 134042 | 29, 11, 14 |
| 18 | MOCOS | molybdenum cofactor sulfurase | 075643 | 134759 | 134775 | 9, 34, 13 |
| 18 | MBP | myelin basic protein | 197971 | 130856 | 166573 | 8, 17, 26 |
| 18 | MYOM1 | myomesin 1 | 101605 | 101577 | 101608 | 15, 25, 18 |
| 18 | MYL12A | myosin light chain 12A | 101608 | 101605 | 118680 | |
| 18 | MYL12B | myosin light chain 12B | 118680 | 101608 | 177426 | 4, 43, 30 |
| 18 | MYO5B | myosin VB | 167306 | 266997 | 172361 | 3, 23, 40 |
| 18 | NDUFV2 | NADH: ubiquinone oxidoreductase core subunit V2 | 178127 | 168502 | 101745 | 10, 30, 33 |
| 18 | NDC80 | NDC80, kinetochore complex component | 080986 | 101574 | 101596 | 4, 9, 39 |
| 18 | NEDD4L | neural precursor cell expressed, developmentally | 049759 | 081923 | 198796 | 33, 35, 19 |
| | | down-regulated 4-like, E3 ubiquitin protein ligase | | | | |
| 18 | NETO1 | neuropilin and tolloid like 1 | 166342 | 141668 | 141665 | 33, 14, 4 |
| 18 | NPC1 | NPC intracellular cholesterol transporter 1 | 141458 | 141452 | 154065 | 2, 42, 6 |
| 18 | NAPG | NSF attachment protein gamma | 134265 | 154856 | 154864 | 34, 29, 26 |
| 18 | NFATC1 | nuclear factor of activated T-cells 1 | 131196 | 166377 | 060069 | 22, 29, 15 |
| 18 | NOL4 | nucleolar protein 4 | 101746 | 141431 | 134769 | 8, 20, 28 |
| 18 | ONECUT2 | one cut homeobox 2 | 119547 | 177511 | 066926 | 26, 20, 14 |
| 18 | OSBPL1A | oxysterol binding protein like 1A | 141447 | 154040 | 154059 | |
| 18 | PARD6G | par-6 family cell polarity regulator gamma | 178184 | 101544 | 166562 | 27, 29, 35 |
| 18 | PHLPP1 | PH domain and leucine rich repeat protein phosphatase 1 | 081913 | 141664 | 171791 | 14, 26, 11 |
| 18 | PMAIP1 | phorbol-12-myristate-13-acetate-induced protein 1 | 141682 | 183287 | 166603 | 4, 7, 34 |
| 18 | PIK3C3 | phosphatidylinositol 3-kinase catalytic subunit type 3 | 078142 | 101489 | 152214 | 43, 29, 6 |
| 18 | PIGN | phosphatidylinositol glycan anchor biosynthesis class N | 197563 | 176641 | 134444 | 42, 4, 11 |
| 18 | PIEZO2 | piezo type mechanosensitive ion channel component 2 | 154864 | 134265 | 236396 | 45, 20, 15 |
| 18 | GALNT1 | polypeptide N-acetylgalactosaminyltransferase 1 | 141429 | 153391 | 141428 | |
| 18 | KCTD1 | potassium channel tetramerization domain containing 1 | 134504 | 141384 | 171885 | 15, 32, 29 |
| 18 | KCNG2 | potassium voltage-gated channel modifier subfamily G member 2 | 178342 | 060069 | 122490 | |
| 18 | POTEC | POTE ankyrin domain family member C | 183206 | 175322 | 180777 | 25, 38, |
| 18 | PQLC1 | PQ loop repeat containing 1 | 122490 | 178342 | 226742 | 26, 1, 29 |
| 18 | PRELID3A | PRELI domain containing 3A | 141391 | 141385 | 134278 | 13, 37, 35 |
| 18 | PSTPIP2 | proline-serine-threonine phosphatase interacting protein 2 | 152229 | 152223 | 152234 | 43, 36, 5 |
| 18 | PSMG2 | proteasome assembly chaperone 2 | 128789 | 134278 | 101624 | 4, 40, 38 |
| 18 | PSMA8 | proteasome subunit alpha 8 | 154611 | 141380 | 141384 | 38, 30, 10 |
| 18 | PIAS2 | protein inhibitor of activated STAT 2 | 078043 | 101638 | 167216 | 38, |
| 18 | PPP4R1 | protein phosphatase 4 regulatory subunit 1 | 154845 | 017797 | 168461 | 29, 42, 23 |
| 18 | PTPN2 | protein tyrosine phosphatase, non-receptor type 2 | 175354 | 101624 | 085415 | 6, 15, 4 |
| 18 | PTPRM | protein tyrosine phosphatase, receptor type M | 173482 | 206422 | 206418 | 40, 39, 6 |
| 18 | RAB12 | RAB12, member RAS oncogene family | 206418 | 173482 | 168502 | 13, 23, 18 |
| 18 | RAB27B | RAB27B, member RAS oncogene family | 041353 | 178690 | 166510 | 42, 26, 25 |
| 18 | RAB31 | RAB31, member RAS oncogene family | 168461 | 154845 | 168454 | 6, 9, 1 |
| 18 | RALBP1 | ralA binding protein 1 | 017797 | 128791 | 154845 | 24, 31, 6 |
| 18 | RIT2 | Ras like without CAAX 2 | 152214 | 078142 | 132872 | 10, 8, 14 |
| 18 | RBBP8 | RB binding protein 8, endonuclease | 101773 | 212710 | 134508 | |
| 18 | RPRD1A | regulation of nuclear pre-mRNA domain containing 1A | 141425 | 141428 | 141424 | |
| 18 | RAX | retina and anterior neural fold homeobox | 134438 | 134443 | 166569 | |
| 18 | ROCK1 | Rho associated coiled-coil containing protein kinase 1 | 067900 | 278923 | 141449 | 22, 26, 11 |
| 18 | ARHGAP28 | Rho GTPase activating protein 28 | 088756 | 154655 | 101680 | |
| 18 | RPL17 | ribosomal protein L17 | 265681 | 215472 | 101670 | |
| 18 | RBFA | ribosome binding factor A (putative) | 101546 | 267127 | 101544 | 18, 1, 5 |
| 18 | RNF125 | ring finger protein 125 | 101695 | 153339 | 134758 | 35, 10, 9 |
| 18 | RNF138 | ring finger protein 138 | 134758 | 101695 | 141441 | 38, 13, 42 |
| 18 | RNF152 | ring finger protein 152 | 176641 | 101542 | 197563 | 18, 1, 26 |
| 18 | RNF165 | ring finger protein 165 | 141622 | 152242 | 167210 | 5, 8, 14 |
| 18 | RIOK3 | RIO kinase 3 | 101782 | 134490 | 141452 | 24, 42, 39 |
| 18 | RNMT | RNA guanine-7 methyltransferase | 101654 | 177150 | 176136 | 24, 40, 3 |
| 18 | RTTN | rotatin | 176225 | 150637 | 170677 | 40, 26, 23 |
| 18 | RPL17-C18orf32 | RPL17-C18orf32 readthrough | 215472 | 177576 | 265681 | |
| 18 | SEC11C | SEC11 homolog C, signal peptidase complex subunit | 166562 | 074657 | 134443 | |
| 18 | SEH1L | SEH1 like nucleoporin | 085415 | 175354 | 101639 | 11, 42, 6 |
| 18 | SERPINB10 | serpin family B member 10 | 242550 | 197632 | 221887 | 7, 5, 24 |
| 18 | SERPINB11 | serpin family B member 11 (gene/pseudogene) | 206072 | 206073 | 057149 | 42, 13, 33 |
| 18 | SERPINB12 | serpin family B member 12 | 166634 | 206075 | 197641 | 35, 24, |
| 18 | SERPINB13 | serpin family B member 13 | 197641 | 166634 | 206073 | 24, 42, 13 |
| 18 | SERPINB2 | serpin family B member 2 | 197632 | 166396 | 242550 | 5, 13, 45 |
| 18 | SERPINB3 | serpin family B member 3 | 057149 | 206072 | 166396 | 18, 30, 24 |
| 18 | SERPINB4 | serpin family B member 4 | 206073 | 197641 | 206072 | 13, 42, 30 |
| 18 | SERPINB5 | serpin family B member 5 | 206075 | 119541 | 166634 | 24, 13, 18 |
| 18 | SERPINB7 | serpin family B member 7 | 166396 | 057149 | 197632 | 43, 35, 13 |
| 18 | SERPINB8 | serpin family B member 8 | 166401 | 221887 | 081138 | 45, 35, 34 |
| 18 | SETBP1 | SET binding protein 1 | 152217 | 132872 | 132874 | 11, 22, 24 |
| 18 | SIGLEC15 | sialic acid binding Ig like lectin 15 | 197046 | 141469 | 152223 | 5, 6, 36 |
| 18 | SKOR2 | SKI family transcriptional corepressor 2 | 215474 | 134049 | 175387 | |
| 18 | SMAD2 | SMAD family member 2 | 175387 | 215474 | 184828 | 32, 27, |
| 18 | SMAD4 | SMAD family member 4 | 141646 | 267699 | 176624 | 11, 40, 29 |
| 18 | SMAD7 | SMAD family member 7 | 101665 | 134030 | 141627 | 26, 15, 45 |
| 18 | SMIM21 | small integral membrane protein 21 | 206026 | 179981 | 101493 | 38, |
| 18 | SNRPD1 | small nuclear ribonucleoprotein D1 polypeptide | 167088 | 141446 | 158201 | 30, 12, 7 |
| 18 | SLC14A1 | solute carrier family 14 member 1 (Kidd blood group) | 141469 | 132874 | 197046 | 33, 26, 4 |
| 18 | SLC14A2 | solute carrier family 14 member 2 | 132874 | 152217 | 141469 | 16, 38, 5 |
| 18 | SLC25A52 | solute carrier family 25 member 52 | 141437 | 118276 | 153339 | 38, |
| 18 | SLC35G4 | solute carrier family 35 member G4 | 236396 | 154864 | 141404 | |
| 18 | SLC39A6 | solute carrier family 39 member 6 | 141424 | 141425 | 134759 | 11, 40, 18 |
| 18 | SALL3 | spalt like transcription factor 3 | 256463 | 166573 | 166377 | 12, 17, 14 |
| 18 | SKA1 | spindle and kinetochore associated complex subunit 1 | 154839 | 154832 | 141639 | 41, 34, 2 |
| 18 | SPIRE1 | spire type actin nucleation factor 1 | 134278 | 141391 | 128789 | 11, 29, 20 |
| 18 | SS18 | SS18, nBAF chromatin remodeling complex subunit | 141380 | 198795 | 154611 | 42, 24, 39 |
| 18 | ST8SIA3 | ST8 alpha-N-acetyl-neuraminide alpha-2,8-sialyltransferase 3 | 177511 | 228075 | 119547 | 31, 8, 20 |
| 18 | ST8SIA5 | ST8 alpha-N-acetyl-neuraminide alpha-2,8-sialyltransferase 5 | 101638 | 167210 | 078043 | |
| 18 | STARD6 | StAR related lipid transfer domain containing 6 | 174448 | 101751 | 166845 | 38, |
| 18 | SMCHD1 | structural maintenance of chromosomes flexible hinge | 101596 | 080986 | 132205 | 22, 1, 37 |
| | | domain containing 1 | | | | |
| 18 | SOCS6 | suppressor of cytokine signaling 6 | 170677 | 176225 | 141668 | 34, 29, 44 |
| 18 | SYT4 | synaptotagmin 4 | 132872 | 152214 | 152217 | 8, 26, 31 |
| 18 | TAF4B | TATA-box binding protein associated factor 4b | 141384 | 154611 | 134504 | 22, 9, 45 |
| 18 | TSHZ1 | teashirt zinc finger homeobox 1 | 179981 | 180011 | 206026 | 1, 26, 29 |
| 18 | TTC39C | tetratricopeptide repeat domain 39C | 168234 | 053747 | 154040 | 22, 5, |
| 18 | TGIF1 | TGFB induced factor homeobox 1 | 177426 | 118680 | 170579 | |
| 18 | TXNDC2 | thioredoxin domain containing 2 | 168454 | 168461 | 101558 | 38, 8, 32 |
| 18 | TXNL1 | thioredoxin like 1 | 091164 | 196628 | 091157 | |
| 18 | TXNL4A | thioredoxin like 4A | 141759 | 226742 | 267127 | 30, 41, 21 |
| 18 | TMX3 | thioredoxin related transmembrane protein 3 | 166479 | 171451 | 150636 | 11, 42, 26 |
| 18 | THOC1 | THO complex 1 | 079134 | 101557 | 158270 | 18, 10, 22 |
| 18 | TYMS | thymidylate synthetase | 176890 | 079101 | 132199 | 21, 9, 4 |
| 18 | TNFRSF11A | TNF receptor superfamily member 11a | 141655 | 134444 | 141664 | |
| 18 | TRAPPC8 | trafficking protein particle complex 8 | 153339 | 141437 | 101695 | 26, 4, 9 |
| 18 | TCEB3B | Transcription elongation factor B subunit 3B | 206181 | 183791 | 167220 | 38, |
| 18 | TCEB3C | Transcription elongation factor B subunit 3C | 183791 | 278674 | 206181 | |
| 18 | TCEB3CL | Transcription elongation factor B subunit 3C like | 275553 | 274744 | 278674 | |
| 18 | TCEB3CL | Transcription elongation factor B subunit 3C like | 278674 | 275553 | 183791 | |
| 18 | TCEB3CL2 | Transcription elongation factor B subunit 3C like 2 | 274744 | 167216 | 275553 | |
| 18 | TCF4 | transcription factor 4 | 196628 | 166510 | 091164 | 45, 30, 43 |
| 18 | TIMM21 | translocase of inner mitochondrial membrane 21 | 075336 | 141665 | 166347 | 1, 30, 40 |
| 18 | TMEM200C | transmembrane protein 200C | 206432 | 082397 | 154655 | 23, 12, 15 |
| 18 | TMEM241 | transmembrane protein 241 | 134490 | 134508 | 101782 | 33, 44, 32 |
| 18 | TTR | transthyretin | 118271 | 046604 | 118276 | 28, 29, 19 |
| 18 | TUBB6 | tubulin beta 6 class V | 176014 | 176194 | 141385 | |
| 18 | TPGS2 | tubulin polyglutamylase complex subunit 2 | 134779 | 134775 | 150477 | 38, 14, 9 |
| 18 | TWSG1 | twisted gastrulation BMP signaling modulator 1 | 128791 | 101745 | 017797 | 11, 42, 4 |
| 18 | USP14 | ubiquitin specific peptidase 14 | 101557 | 166562 | 079134 | 4, 19, 13 |
| 18 | VPS4B | vacuolar protein sorting 4 homolog B | 119541 | 119537 | 206075 | 30, 13, 38 |
| 18 | VAPA | VAMP associated protein A | 101558 | 168454 | 154856 | 31, 26, 10 |
| 18 | WDR7 | WD repeat domain 7 | 091157 | 091164 | 228075 | 10, |
| 18 | YES1 | YES proto-oncogene 1, Src family tyrosine kinase | 176105 | 132199 | 141433 | 11, 13, 42 |
| 18 | ZADH2 | zinc binding alcohol dehydrogenase domain containing 2 | 180011 | 215421 | 179981 | 34, 22, 1 |
| 18 | ZBTB14 | zinc finger and BTB domain containing 14 | 198081 | 231824 | 082397 | 11, 29, 22 |
| 18 | ZBTB7C | zinc finger and BTB domain containing 7C | 184828 | 175387 | 134030 | 14, 32, |
| 18 | ZSCAN30 | zinc finger and SCAN domain containing 30 | 186814 | 186812 | 172466 | 29, 42, 39 |
| 18 | ZCCHC2 | zinc finger CCHC-type containing 2 | 141664 | 141655 | 081913 | |
| 18 | ZNF236 | zinc finger protein 236 | 130856 | 101493 | 197971 | 1, 40, 36 |
| 18 | ZNF24 | zinc finger protein 24 | 172466 | 186814 | 186496 | 40, 30, 13 |
| 18 | ZNF396 | zinc finger protein 396 | 186496 | 172466 | 267140 | 31, 14, 42 |
| 18 | ZNF397 | zinc finger protein 397 | 186812 | 166974 | 186814 | 43, 22, 26 |
| 18 | ZNF407 | zinc finger protein 407 | 215421 | 150656 | 180011 | 22, 1, 40 |
| 18 | ZNF516 | zinc finger protein 516 | 101493 | 206026 | 130856 | |
| 18 | ZNF519 | zinc finger protein 519 | 175322 | 185231 | 183206 | 22, 36, 8 |
| 18 | ZNF521 | zinc finger protein 521 | 198795 | 134489 | 141380 | 43, 11, 31 |
| 18 | ZNF532 | zinc finger protein 532 | 074657 | 172175 | 166562 | 18, 24, 12 |
| 19 | PGLS | 6-phosphogluconolactonase | 130313 | 130304 | 167483 | 21, 22, 27 |
| 19 | ABHD17A | abhydrolase domain containing 17A | 129968 | 129911 | 227500 | |
| 19 | ABHD8 | abhydrolase domain containing 8 | 127220 | 160117 | 130312 | 2, 39, 38 |
| 19 | ACP5 | acid phosphatase 5, tartrate resistant | 102575 | 198551 | 197933 | 43, 6, 41 |
| 19 | ACP7 | acid phosphatase 7, tartrate resistant (putative) | 183760 | 161243 | 130669 | 28, 44, 8 |
| 19 | ACPT | acid phosphatase, testicular | 142513 | 261341 | 167747 | 38, |
| 19 | ACTL9 | actin like 9 | 181786 | 142303 | 181733 | 38, 8, |
| 19 | ACTN4 | actinin alpha 4 | 130402 | 178982 | 182472 | 18, 33, 40 |
| 19 | ATF5 | activating transcription factor 5 | 169136 | 269179 | 161640 | 21, 19, 25 |
| 19 | ACSBG2 | acyl-CoA synthetase bubblegum family member 2 | 130377 | 087903 | 130382 | 38, 8, 32 |
| 19 | ADAMTS10 | ADAM metallopeptidase with thrombospondin type 1 motif 10 | 142303 | 142347 | 181786 | 15, 26, 39 |
| 19 | ADAMTSL5 | ADAMTS like 5 | 185761 | 115255 | 185988 | |
| 19 | AP1M1 | adaptor related protein complex 1 mu 1 subunit | 072958 | 105058 | 127528 | 21, 3, 35 |
| 19 | AP1M2 | adaptor related protein complex 1 mu 2 subunit | 129354 | 129355 | 129353 | 31, 13, 16 |
| 19 | AP2A1 | adaptor related protein complex 2 alpha 1 subunit | 196961 | 126467 | 010361 | 40, 21, 34 |
| 19 | AP2S1 | adaptor related protein complex 2 sigma 1 subunit | 042753 | 280050 | 160007 | 35, 15, 6 |
| 19 | AP3D1 | adaptor related protein complex 3 delta 1 subunit | 065000 | 099840 | 104885 | 35, 1, 27 |
| 19 | ADAT3 | adenosine deaminase, tRNA specific 3 | 213638 | 227500 | 133275 | |
| 19 | ADGRE1 | adhesion G protein-coupled receptor E1 | 174837 | 141968 | 196589 | 36, 39, 5 |
| 19 | ADGRE2 | adhesion G protein-coupled receptor E2 | 127507 | 160961 | 188269 | 7, 36, 5 |
| 19 | ADGRE3 | adhesion G protein-coupled receptor E3 | 131355 | 187912 | 160961 | |
| 19 | ADGRE5 | adhesion G protein-coupled receptor E5 | 123146 | 072071 | 123136 | 36, 39, 5 |
| 19 | ADGRL1 | adhesion G protein-coupled receptor L1 | 072071 | 105011 | 123146 | 14, 27, 31 |
| 19 | ADM5 | adrenomedullin 5 (putative) | 224420 | 126457 | 169169 | 9, 6, 16 |
| 19 | AKAP8 | A-kinase anchoring protein 8 | 105127 | 141867 | 011243 | 1, 43, 6 |
| 19 | AKAP8L | A-kinase anchoring protein 8 like | 011243 | 105127 | 011451 | 39, 36, 41 |
| 19 | AKT2 | AKT serine/threonine kinase 2 | 105221 | 105219 | 160392 | |
| 19 | AKT1S1 | AKT1 substrate 1 | 204673 | 039650 | 104946 | |
| 19 | ALDH16A1 | aldehyde dehydrogenase 16 family member A1 | 161618 | 104872 | 269469 | 21, 7, 34 |
| 19 | ACER1 | alkaline ceramidase 1 | 167769 | 130382 | 125656 | 35, |
| 19 | ALKBH6 | alkB homolog 6 | 239382 | 181392 | 105270 | 3, 39, 6 |
| 19 | ALKBH7 | alkB homolog 7 | 125652 | 125656 | 125650 | 29, 41, 18 |
| 19 | A1BG | alpha-1-B glycoprotein | 121410 | 182318 | 174586 | 19, 23, 5 |
| 19 | AES | amino-terminal enhancer of split | 104964 | 065717 | 088256 | 41, 26, 31 |
| 19 | APLP1 | amyloid beta precursor like protein 1 | 105290 | 126259 | 167604 | 8, 28, 31 |
| 19 | APBA3 | amyloid beta precursor protein binding family A member 3 | 011132 | 105289 | 183617 | 41, 28, 30 |
| 19 | ANGPTL4 | angiopoietin like 4 | 167772 | 186994 | 185236 | |
| 19 | ANGPTL6 | angiopoietin like 6 | 130812 | 130813 | 243207 | 32, 16, 38 |
| 19 | ANGPTL8 | angiopoietin like 8 | 130173 | 130158 | 130167 | 19, 15, 17 |
| 19 | ANKLE1 | ankyrin repeat and LEM domain containing 1 | 160117 | 269307 | 127220 | 21, 39, 5 |
| 19 | ANKRD24 | ankyrin repeat domain 24 | 089847 | 077463 | 105246 | 32, 37, 17 |
| 19 | ANKRD27 | ankyrin repeat domain 27 | 105186 | 105185 | 186326 | 22, 31, 27 |
| 19 | ANO8 | anoctamin 8 | 074855 | 130311 | 130299 | 26, 12, 36 |
| 19 | AMH | anti-Mullerian hormone | 104899 | 104897 | 167476 | 12, 44, 37 |
| 19 | ASF1B | anti-silencing function 1B histone chaperone | 105011 | 072062 | 072071 | 41, 21, 9 |
| 19 | APC2 | APC2, WNT signaling pathway regulator | 115266 | 115268 | 119559 | 26, 8, 14 |
| 19 | APOC4-APOC2 | APOC4-APOC2 readthrough (NMD candidate) | 224916 | 130208 | 234906 | 19, 17, 10 |
| 19 | APOC1 | apolipoprotein C1 | 130208 | 130203 | 224916 | 19, 2, 40 |
| 19 | APOC2 | apolipoprotein C2 | 234906 | 224916 | 104853 | 19, 36, 31 |
| 19 | APOC4 | apolipoprotein C4 | 267467 | 130208 | 234906 | 19, 17, 10 |
| 19 | APOE | apolipoprotein E | 130203 | 130204 | 130208 | 35, 2, 8 |
| 19 | ARMC6 | armadillo repeat containing 6 | 105676 | 064607 | 181035 | 9, 35, 43 |
| 19 | ARRDC2 | arrestin domain containing 2 | 105643 | 105642 | 096996 | 39, 1, 36 |
| 19 | ARRDC5 | arrestin domain containing 5 | 205784 | 105355 | 276043 | 17, 38, 23 |
| 19 | ASNA1 | arsA arsenite transporter, ATP-binding, homolog 1 (bacterial) | 198356 | 123144 | 039987 | 34, 35, 6 |
| 19 | ASPDH | aspartate dehydrogenase domain containing | 204653 | 161677 | 131409 | 17, 14, 20 |
| 19 | ATCAY | ATCAY, caytaxin | 167654 | 105278 | 077009 | 8, 26, 38 |
| 19 | ABCA7 | ATP binding cassette subfamily A member 7 | 064687 | 064666 | 180448 | 39, 22, 36 |
| 19 | ATP5D | ATP synthase, H+ transporting, mitochondrial F1 complex, | 099624 | 099625 | 167470 | 41, 25, 33 |
| | | delta subunit | | | | |
| 19 | ATP5SL | ATP5S like | 105341 | 177191 | 204978 | 33, 20, 34 |
| 19 | ATP13A1 | ATPase 13A1 | 105726 | 089639 | 181896 | 40, 39, 18 |
| 19 | ATP4A | ATPase H+/K+ transporting alpha subunit | 105675 | 105677 | 249115 | 2, 37, 8 |
| 19 | ATP1A3 | ATPase Na+/K+ transporting subunit alpha 3 | 105409 | 105404 | 105737 | 8, 14, 26 |
| 19 | ATP8B3 | ATPase phospholipid transporting 8B3 | 130270 | 205922 | 079313 | 38, 9, 10 |
| 19 | ARID3A | AT-rich interaction domain 3A | 116017 | 116014 | 065268 | 32, 12, 22 |
| 19 | AURKC | aurora kinase C | 105146 | 083844 | 204524 | 38, 26, 12 |
| 19 | ATG4D | autophagy related 4D cysteine peptidase | 130734 | 180739 | 129347 | 28, 34, 2 |
| 19 | AXL | AXL receptor tyrosine kinase | 167601 | 167600 | 105323 | 6, 15, 9 |
| 19 | AZU1 | azurocidin 1 | 172232 | 129951 | 196415 | 5, 7, 6 |
| 19 | B9D2 | B9 protein domain 2 | 123810 | 142046 | 077348 | 31, 29, 18 |
| 19 | BIRC8 | baculoviral IAP repeat containing 8 | 163098 | 228567 | 203326 | 38, 8, |
| 19 | BCAM | basal cell adhesion molecule (Lutheran blood group) | 187244 | 142273 | 130202 | 30, 27, 18 |
| 19 | BHMG1 | basic helix-loop-helix and HMG-box containing 1 | 237452 | 177051 | 177045 | |
| 19 | BSG | basigin (Ok blood group) | 172270 | 197540 | 099822 | 13, 32, 7 |
| 19 | BCL3 | B-cell CLL/lymphoma 3 | 069399 | 213892 | 142273 | 34, 27, 16 |
| 19 | BAX | BCL2 associated X, apoptosis regulator | 087088 | 104808 | 087086 | 30, 26, 24 |
| 19 | BBC3 | BCL2 binding component 3 | 105327 | 142230 | 105321 | 18, 16, 27 |
| 19 | BCL2L12 | BCL2 like 12 | 126453 | 126456 | 126457 | 39, 36, 22 |
| 19 | BEST2 | bestrophin 2 | 039987 | 198356 | 095066 | 16, 38, 12 |
| 19 | BLVRB | biliverdin reductase B | 090013 | 167565 | 160460 | 34, 29, 23 |
| 19 | BSPH1 | binder of sperm protein homolog 1 | 188334 | 105398 | 169393 | |
| 19 | BLOC1S3 | biogenesis of lysosomal organelles complex 1 subunit 3 | 189114 | 007255 | 267545 | 34, 4, 27 |
| 19 | BORCS8 | BLOC-1 related complex subunit 8 | 254901 | 213999 | 064490 | |
| 19 | BST2 | bone marrow stromal cell antigen 2 | 130303 | 269720 | 141971 | 27, 2, 1 |
| 19 | BORCS8-MEF2B | BORCS8-MEF2B readthrough | 064489 | 064545 | 213999 | |
| 19 | BRSK1 | BR serine/threonine kinase 1 | 160469 | 133265 | 180061 | 26, 15, 21 |
| 19 | BCAT2 | branched chain amino acid transaminase 2 | 105552 | 105550 | 087076 | 9, 34, 27 |
| 19 | BCKDHA | branched chain keto acid dehydrogenase E1, alpha polypeptide | 248098 | 077348 | 177191 | 1, 15, 2 |
| 19 | BABAM1 | BRISC and BRCA1A complex member 1 | 105393 | 130307 | 269307 | 25, 35, 1 |
| 19 | BRD4 | bromodomain containing 4 | 141867 | 105131 | 105127 | 22, 34, 21 |
| 19 | BTBD2 | BTB domain containing 2 | 133243 | 133275 | 099875 | |
| 19 | C2CD4C | C2 calcium dependent domain containing 4C | 183186 | 105549 | 129946 | 5, 14, 12 |
| 19 | CPAMD8 | C3 and PZP like, alpha-2-macroglobulin domain containing 8 | 160111 | 127533 | 131351 | 14, 9, 10 |
| 19 | CBARP | CACN beta subunit associated regulatory protein | 099625 | 118046 | 099624 | |
| 19 | CACTIN | cactin, spliceosome C complex subunit | 105298 | 006638 | 186111 | |
| 19 | CIB3 | calcium and integrin binding family member 3 | 141977 | 196684 | 105058 | 10, |
| 19 | CABP5 | calcium binding protein 5 | 105507 | 169393 | 105499 | 14, 25, |
| 19 | CHERP | calcium homeostasis endoplasmic reticulum protein | 085872 | 105072 | 127526 | 22, 34, 12 |
| 19 | CACNG6 | calcium voltage-gated channel auxiliary subunit gamma 6 | 130433 | 142408 | 189068 | 14, 12, 20 |
| 19 | CACNG7 | calcium voltage-gated channel auxiliary subunit gamma 7 | 105605 | 126583 | 142408 | 26, 12, 8 |
| 19 | CACNG8 | calcium voltage-gated channel auxiliary subunit gamma 8 | 142408 | 105605 | 130433 | 45, 8, 16 |
| 19 | CACNA1A | calcium voltage-gated channel subunit alpha1 A | 141837 | 160888 | 104957 | 41, 14, 27 |
| 19 | CAPS | calcyphosine | 105519 | 187650 | 031823 | 44, 26, 35 |
| 19 | CALM3 | calmodulin 3 | 160014 | 204851 | 160013 | 8, 26, 4 |
| 19 | CAMSAP3 | calmodulin regulated spectrin associated protein family | 076826 | 032444 | 076924 | 17, 16, 14 |
| | | member 3 | | | | |
| 19 | CAPN12 | calpain 12 | 182472 | 130402 | 205076 | 13, 37, 30 |
| 19 | CAPNS1 | calpain small subunit 1 | 126247 | 105254 | 161281 | 18, 34, 26 |
| 19 | CNN1 | calponin 1 | 130176 | 130159 | 130165 | |
| 19 | CNN2 | calponin 2 | 064666 | 182087 | 064687 | 5, 36, 34 |
| 19 | CALR | calreticulin | 179218 | 179115 | 179262 | 40, 23, 27 |
| 19 | CALR3 | calreticulin 3 | 269058 | 127527 | 141979 | 38, 8, |
| 19 | CREB3L3 | cAMP responsive element binding protein 3 like 3 | 060566 | 126934 | 077463 | 37, 19, 16 |
| 19 | CLIP3 | CAP-Gly domain containing linker protein 3 | 105270 | 239382 | 161277 | 8, 26, 18 |
| 19 | CIC | capicua transcriptional repressor | 079432 | 105722 | 079462 | 34, 26, 22 |
| 19 | CHST8 | carbohydrate sulfotransferase 8 | 124302 | 124299 | 153885 | 31, 28, 25 |
| 19 | CA11 | carbonic anhydrase 11 | 063180 | 105516 | 142233 | 26, 31, 8 |
| 19 | CEACAM1 | carcinoembryonic antigen related cell adhesion molecule 1 | 079385 | 189377 | 124469 | 16, 5, 30 |
| 19 | CEACAM16 | carcinoembryonic antigen related cell adhesion molecule 16 | 213892 | 186567 | 069399 | |
| 19 | CEACAM18 | carcinoembryonic antigen related cell adhesion molecule 18 | 213822 | 105366 | 254521 | |
| 19 | CEACAM19 | carcinoembryonic antigen related cell adhesion molecule 19 | 186567 | 073008 | 213892 | 26, 33, 4 |
| 19 | CEACAM20 | carcinoembryonic antigen related cell adhesion molecule 20 | 273777 | 167384 | 216588 | |
| 19 | CEACAM21 | carcinoembryonic antigen related cell adhesion molecule 21 | 007129 | 204978 | 105352 | 30, 36, 7 |
| 19 | CEACAM3 | carcinoembryonic antigen related cell adhesion molecule 3 | 170956 | 086548 | 273111 | 5, 32, 36 |
| 19 | CEACAM4 | carcinoembryonic antigen related cell adhesion molecule 4 | 105352 | 007129 | 007306 | 5, 14, 17 |
| 19 | CEACAM5 | carcinoembryonic antigen related cell adhesion molecule 5 | 105388 | 007306 | 267881 | 16, 42, 24 |
| 19 | CEACAM6 | carcinoembryonic antigen related cell adhesion molecule 6 | 086548 | 267881 | 170956 | 16, 3, 24 |
| 19 | CEACAM7 | carcinoembryonic antigen related cell adhesion molecule 7 | 007306 | 105352 | 105388 | 16, 13, 30 |
| 19 | CEACAM8 | carcinoembryonic antigen related cell adhesion molecule 8 | 124469 | 079385 | 221826 | 5, 7, 36 |
| 19 | CPT1C | carnitine palmitoyltransferase 1C | 169169 | 224420 | 126467 | 26, 8, 14 |
| 19 | CILP2 | cartilage intermediate layer protein 2 | 160161 | 250067 | 105717 | 42, 38, 10 |
| 19 | COMP | cartilage oligomeric matrix protein | 105664 | 105662 | 005007 | 10, 6, 24 |
| 19 | CSNK1G2 | casein kinase 1 gamma 2 | 133275 | 213638 | 133243 | 26, 3, 34 |
| 19 | CLPP | caseinolytic mitochondrial matrix peptidase proteolytic | 125656 | 167769 | 125652 | 21, 6, 27 |
| | | subunit | | | | |
| 19 | CASP14 | caspase 14 | 105141 | 160994 | 094661 | 35, 44, 4 |
| 19 | CARD8 | caspase recruitment domain family member 8 | 105483 | 178150 | 105479 | |
| 19 | CATSPERD | cation channel sperm associated auxiliary subunit delta | 174898 | 196365 | 212123 | 38, 2, 25 |
| 19 | CATSPERG | cation channel sperm associated auxiliary subunit gamma | 099338 | 099337 | 099341 | 38, 2, 40 |
| 19 | CBLC | Cbl proto-oncogene C | 142273 | 069399 | 187244 | 18, 37, 20 |
| 19 | CCL25 | C-C motif chemokine ligand 25 | 131142 | 066044 | 142449 | 39, 20, 37 |
| 19 | CEBPA | CCAAT/enhancer binding protein alpha | 245848 | 130876 | 153879 | 37, 1, 16 |
| 19 | CEBPG | CCAAT/enhancer binding protein gamma | 153879 | 245848 | 124299 | 34, 26, 9 |
| 19 | CNOT3 | CCR4-NOT transcription complex subunit 3 | 088038 | 105618 | 105617 | 18, 27, 31 |
| 19 | CD177 | CD177 molecule | 204936 | 183668 | 131126 | 16, 33, 37 |
| 19 | CD209 | CD209 molecule | 090659 | 182566 | 104938 | 1, 42, 25 |
| 19 | CD22 | CD22 molecule | 012124 | 105695 | 126266 | |
| 19 | CD320 | CD320 molecule | 167775 | 090661 | 167774 | 35, 21, 27 |
| 19 | CD33 | CD33 molecule | 105383 | 168995 | 179213 | 5, 29, 7 |
| 19 | CD37 | CD37 molecule | 104894 | 063127 | 074219 | 41, 36, 21 |
| 19 | CD3EAP | CD3e molecule associated protein | 117877 | 104881 | 012061 | 13, 34, 33 |
| 19 | CD70 | CD70 molecule | 125726 | 125657 | 125735 | 17, 16, |
| 19 | CD79A | CD79a molecule | 105369 | 105372 | 076928 | 41, 21, 22 |
| 19 | CDC42EP5 | CDC42 effector protein 5 | 167617 | 275183 | 167618 | 37, 3, 16 |
| 19 | CADM4 | cell adhesion molecule 4 | 105767 | 131116 | 011422 | 26, 17, 14 |
| 19 | CDC34 | cell division cycle 34 | 099804 | 141933 | 197540 | 14, 27, 35 |
| 19 | CDC37 | cell division cycle 37 | 105401 | 105397 | 065989 | 35, 26, 32 |
| 19 | CEP89 | centrosomal protein 89 | 121289 | 021488 | 131944 | 18, 31, 6 |
| 19 | CERS1 | ceramide synthase 1 | 223802 | 005007 | 105669 | 26, 8, 28 |
| 19 | CERS4 | ceramide synthase 4 | 090661 | 142449 | 167775 | 33, 41, 35 |
| 19 | CLC | Charcot-Leyden crystal galectin | 105205 | 006659 | 213921 | 7, 15, 36 |
| 19 | CHMP2A | charged multivesicular body protein 2A | 130724 | 130726 | 130725 | 11, 31, 35 |
| 19 | CGB1 | chorionic gonadotropin beta subunit 1 | 267631 | 104818 | 189052 | 32, 15, 12 |
| 19 | CGB2 | chorionic gonadotropin beta subunit 2 | 104818 | 267335 | 267631 | 38, 32, |
| 19 | CGB3 | chorionic gonadotropin beta subunit 3 | 104827 | 268655 | 267335 | 32, 12, 38 |
| 19 | CGB5 | chorionic gonadotropin beta subunit 5 | 189052 | 267631 | 213030 | 32, 12, 38 |
| 19 | CGB7 | chorionic gonadotropin beta subunit 7 | 196337 | 213030 | 283663 | |
| 19 | CGB8 | chorionic gonadotropin beta subunit 8 | 213030 | 189052 | 196337 | 32, 15, 14 |
| 19 | CHAF1A | chromatin assembly factor 1 subunit A | 167670 | 141985 | 167671 | 19, 2, 22 |
| 19 | C19orf12 | chromosome 19 open reading frame 12 | 131943 | 166289 | 105173 | 1, 45, 27 |
| 19 | C19orf18 | chromosome 19 open reading frame 18 | 177025 | 152454 | 166704 | 33, 6, 38 |
| 19 | C19orf24 | chromosome 19 open reading frame 24 | 228300 | 099622 | 099617 | 31, 41, 35 |
| 19 | C19orf25 | chromosome 19 open reading frame 25 | 119559 | 115266 | 115257 | 9, 37, 36 |
| 19 | C19orf33 | chromosome 19 open reading frame 33 | 167644 | 267748 | 167645 | 27, 7, 4 |
| 19 | C19orf35 | chromosome 19 open reading frame 35 | 188305 | 273734 | 220008 | 22, 5, |
| 19 | C19orf38 | chromosome 19 open reading frame 38 | 214212 | 099203 | 142453 | 5, 2, 38 |
| 19 | C19orf43 | chromosome 19 open reading frame 43 | 123144 | 105576 | 198356 | 41, 34, 23 |
| 19 | C19orf44 | chromosome 19 open reading frame 44 | 105072 | 141979 | 085872 | 38, 22, 44 |
| 19 | C19orf45 | chromosome 19 open reading frame 45 | 198723 | 104883 | 267952 | 38, 14, 16 |
| 19 | C19orf47 | chromosome 19 open reading frame 47 | 160392 | 105221 | 105223 | |
| 19 | C19orf48 | chromosome 19 open reading frame 48 | 167747 | 142513 | 167748 | 9, 21, 33 |
| 19 | C19orf53 | chromosome 19 open reading frame 53 | 104979 | 037757 | 280221 | 31, 34, 29 |
| 19 | C19orf54 | chromosome 19 open reading frame 54 | 188493 | 086544 | 077312 | 26, 33, 34 |
| 19 | C19orf57 | chromosome 19 open reading frame 57 | 132016 | 187556 | 132024 | 36, 23, 38 |
| 19 | C19orf60 | chromosome 19 open reading frame 60 | 006015 | 006016 | 105696 | 33, 17, 27 |
| 19 | C19orf66 | chromosome 19 open reading frame 66 | 130813 | 080511 | 130812 | 36, 26, 2 |
| 19 | C19orf67 | chromosome 19 open reading frame 67 | 188032 | 141854 | 141858 | |
| 19 | C19orf68 | chromosome 19 open reading frame 68 | 185453 | 105486 | 178150 | 31, 2, 37 |
| 19 | C19orf70 | chromosome 19 open reading frame 70 | 174917 | 130255 | 167733 | 33, 34, 28 |
| 19 | C19orf71 | chromosome 19 open reading frame 71 | 183397 | 161091 | 064961 | 38, 40, 32 |
| 19 | C19orf73 | chromosome 19 open reading frame 73 | 221916 | 104863 | 177380 | 28, 20, 23 |
| 19 | C19orf81 | chromosome 19 open reading frame 81 | 235034 | 213023 | 161681 | 14, 33, 17 |
| 19 | C19orf84 | chromosome 19 open reading frame 84 | 262874 | 105370 | 142512 | 27, 12, |
| 19 | CLDND2 | claudin domain containing 2 | 160318 | 269403 | 105374 | 40, 44, 38 |
| 19 | CLASRP | CLK4 associating serine/arginine rich protein | 104859 | 104856 | 170684 | 3, 36, 39 |
| 19 | CLPTM1 | CLPTM1, transmembrane protein | 104853 | 234906 | 104856 | 31, 26, 9 |
| 19 | CARM1 | coactivator associated arginine methyltransferase 1 | 142453 | 214212 | 130733 | 3, 34, 18 |
| 19 | COPE | coatomer protein complex subunit epsilon | 105669 | 223802 | 268193 | 34, 21, 41 |
| 19 | COQ8B | coenzyme Q8B | 123815 | 105245 | 086544 | 21, 12, 7 |
| 19 | CC2D1A | coiled-coil and C2 domain containing 1A | 132024 | 132016 | 132000 | 39, 16, 30 |
| 19 | CCDC105 | coiled-coil domain containing 105 | 160994 | 105143 | 105141 | 38, |
| 19 | CCDC106 | coiled-coil domain containing 106 | 173581 | 171425 | 063244 | 34, 1, 9 |
| 19 | CCDC114 | coiled-coil domain containing 114 | 105479 | 105483 | 142227 | 42, 38, 37 |
| 19 | CCDC124 | coiled-coil domain containing 124 | 007080 | 105641 | 105642 | 34, 21, 35 |
| 19 | CCDC130 | coiled-coil domain containing 130 | 104957 | 141837 | 037757 | 28, 21, 37 |
| 19 | CCDC151 | coiled-coil domain containing 151 | 198003 | 205517 | 130175 | 29, 38, 14 |
| 19 | CCDC155 | coiled-coil domain containing 155 | 161609 | 104901 | 142538 | 38, 39, 21 |
| 19 | CCDC159 | coiled-coil domain containing 159 | 183401 | 105518 | 105520 | 29, 28, 36 |
| 19 | CCDC61 | coiled-coil domain containing 61 | 104983 | 104967 | 008438 | 39, 16, 27 |
| 19 | CCDC8 | coiled-coil domain containing 8 | 169515 | 011485 | 277531 | 27, 11, 29 |
| 19 | CCDC9 | coiled-coil domain containing 9 | 105321 | 105327 | 257704 | 18, 40, 3 |
| 19 | CCDC94 | coiled-coil domain containing 94 | 105248 | 105246 | 105251 | 13, 1, 26 |
| 19 | CCDC97 | coiled-coil domain containing 97 | 142039 | 105329 | 255730 | 21, 4, 13 |
| 19 | CCER2 | coiled-coil glutamate rich protein 2 | 262484 | 104825 | 104835 | 14, 37, 25 |
| 19 | CIRBP | cold inducible RNA binding protein | 099622 | 167470 | 228300 | |
| 19 | COLGALT1 | collagen beta(1-O)galactosyltransferase 1 | 130309 | 167483 | 130477 | 6, 26, 3 |
| 19 | COL5A3 | collagen type V alpha 3 chain | 080573 | 105088 | 080511 | 26, 23, 6 |
| 19 | C3 | complement C3 | 125730 | 125735 | 125734 | 1, 27, 19 |
| 19 | C5AR1 | complement C5a receptor 1 | 197405 | 257704 | 134830 | 34, 5, 40 |
| 19 | C5AR2 | complement component 5a receptor 2 | 134830 | 197405 | 134815 | 1, 42, 36 |
| 19 | CFD | complement factor D | 197766 | 197561 | 175221 | 1, 38, 26 |
| 19 | CRX | cone-rod homeobox | 105392 | 178928 | 105398 | |
| 19 | CNFN | cornifelin | 105427 | 105429 | 079435 | 18, 33, 30 |
| 19 | CTXN1 | cortexin 1 | 178531 | 104976 | 104980 | 31, 34, 33 |
| 19 | CKM | creatine kinase, M-type | 104879 | 130201 | 104892 | 25, 15, 18 |
| 19 | CRTC1 | CREB regulated transcription coactivator 1 | 105662 | 167487 | 105664 | 8, 43, 26 |
| 19 | CRB3 | crumbs 3, cell polarity complex component | 130545 | 125648 | 205744 | 28, 42, 37 |
| 19 | CLEC11A | C-type lectin domain family 11 member A | 105472 | 161681 | 142511 | 6, 1, 10 |
| 19 | CLEC17A | C-type lectin domain family 17 member A | 187912 | 099795 | 131355 | 5, 44, |
| 19 | CLEC4G | C-type lectin domain family 4 member G | 182566 | 104921 | 090659 | 28, 32, 19 |
| 19 | CLEC4M | C-type lectin domain family 4 member M | 104938 | 090659 | 142459 | 32, 19, 2 |
| 19 | CELF5 | CUGBP, Elav-like family member 5 | 161082 | 125912 | 141905 | 14, 8, 20 |
| 19 | CXCL17 | C-X-C motif chemokine ligand 17 | 189377 | 079435 | 079385 | 30, 18, 37 |
| 19 | CDKN2D | cyclin dependent kinase inhibitor 2D | 129355 | 129347 | 129354 | 5, 28, 38 |
| 19 | CCNE1 | cyclin E1 | 105173 | 131943 | 105176 | 32, 3, 15 |
| 19 | CNTD2 | cyclin N-terminal domain containing 2 | 105219 | 174521 | 105221 | |
| 19 | COX6B1 | cytochrome c oxidase subunit 6B1 | 126267 | 105672 | 105668 | 29, 25, 15 |
| 19 | COX6B2 | cytochrome c oxidase subunit 6B2 | 160471 | 133247 | 267706 | |
| 19 | COX7A1 | cytochrome c oxidase subunit 7A1 | 161281 | 126247 | 196357 | 25, 15, 29 |
| 19 | CYP2A13 | cytochrome P450 family 2 subfamily A member 13 | 197838 | 197408 | 197446 | 20, |
| 19 | CYP2A6 | cytochrome P450 family 2 subfamily A member 6 | 255974 | 268797 | 198077 | 19, 23, 20 |
| 19 | CYP2A7 | cytochrome P450 family 2 subfamily A member 7 | 198077 | 255974 | 197408 | 19, 23, 40 |
| 19 | CYP2B6 | cytochrome P450 family 2 subfamily B member 6 | 197408 | 198077 | 197838 | 19, 23, 16 |
| 19 | CYP2F1 | cytochrome P450 family 2 subfamily F member 1 | 197446 | 197838 | 167600 | 30, 20, 42 |
| 19 | CYP2S1 | cytochrome P450 family 2 subfamily S member 1 | 167600 | 197446 | 167601 | 3, 24, 13 |
| 19 | CYP4F11 | cytochrome P450 family 4 subfamily F member 11 | 171903 | 186115 | 176231 | 13, 24, 31 |
| 19 | CYP4F12 | cytochrome P450 family 4 subfamily F member 12 | 186204 | 186529 | 171942 | 3, 13, 42 |
| 19 | CYP4F2 | cytochrome P450 family 4 subfamily F member 2 | 186115 | 186723 | 171903 | 17, 19, 16 |
| 19 | CYP4F22 | cytochrome P450 family 4 subfamily F member 22 | 171954 | 161031 | 186526 | 36, 33, 35 |
| 19 | CYP4F3 | cytochrome P450 family 4 subfamily F member 3 | 186529 | 186526 | 186204 | 13, 24, 18 |
| 19 | CYP4F8 | cytochrome P450 family 4 subfamily F member 8 | 186526 | 171954 | 186529 | 33, 35, 15 |
| 19 | CYTH2 | cytohesin 2 | 105443 | 268465 | 142235 | 27, 31, 9 |
| 19 | CRLF1 | cytokine receptor like factor 1 | 006016 | 221983 | 006015 | 19, 24, 10 |
| 19 | CTU1 | cytosolic thiouridylase subunit 1 | 142544 | 129437 | 129450 | 9, 28, 6 |
| 19 | DAND5 | DAN domain BMP antagonist family member 5 | 179284 | 179271 | 008441 | 15, 14, 38 |
| 19 | DAZAP1 | DAZ associated protein 1 | 071626 | 130005 | 115268 | 12, 9, 31 |
| 19 | DBP | D-box binding PAR bZIP transcription factor | 105516 | 063176 | 063180 | 14, 6, 2 |
| 19 | DCAF15 | DDB1 and CUL4 associated factor 15 | 132017 | 132000 | 132005 | 28, 27, 38 |
| 19 | DDX49 | DEAD-box helicase 49 | 105671 | 268193 | 051128 | 13, 43, 34 |
| 19 | DAPK3 | death associated protein kinase 3 | 167657 | 077009 | 167658 | 45, 13, 24 |
| 19 | DEDD2 | death effector domain containing 2 | 160570 | 028277 | 167625 | 41, 29, 12 |
| 19 | DOCK6 | dedicator of cytokinesis 6 | 130158 | 197256 | 130173 | 43, 23, 16 |
| 19 | DLL3 | delta like canonical Notch ligand 3 | 090932 | 105197 | 186838 | 35, 8, 14 |
| 19 | DENND1C | DENN domain containing 1C | 205744 | 130545 | 104833 | 36, 39, 5 |
| 19 | DOHH | deoxyhypusine hydroxylase/monooxygenase | 129932 | 095932 | 105325 | 21, 27, 29 |
| 19 | DHPS | deoxyhypusine synthase | 095059 | 105583 | 132004 | 39, 36, 2 |
| 19 | DNASE2 | deoxyribonuclease 2, lysosomal | 105612 | 105613 | 105610 | 1, 9, 43 |
| 19 | DMKN | dermokine | 161249 | 188508 | 189001 | 35, 15, 29 |
| 19 | DDA1 | DET1 and DDB1 associated 1 | 130311 | 130312 | 074855 | 26, 34, 21 |
| 19 | DDX39A | DExD-box helicase 39A | 123136 | 123146 | 123143 | 21, 38, 41 |
| 19 | DHX34 | DExH-box helicase 34 | 134815 | 134830 | 105419 | 21, 5, 38 |
| 19 | DKKL1 | dickkopf like acrosomal protein 1 | 104901 | 074219 | 161609 | 38, 14, 10 |
| 19 | DHDH | dihydrodiol dehydrogenase | 104808 | 104805 | 087088 | 17, 6, 44 |
| 19 | DUS3L | dihydrouridine synthase 3 like | 141994 | 267157 | 171119 | 22, 21, 23 |
| 19 | DPP9 | dipeptidyl peptidase 9 | 142002 | 074842 | 141965 | 35, 42, 28 |
| 19 | DIRAS1 | DIRAS family GTPase 1 | 176490 | 176533 | 267001 | 29, 14, 15 |
| 19 | DACT3 | dishevelled binding antagonist of beta catenin 3 | 197380 | 167414 | 105287 | 15, 39, 33 |
| 19 | DPRX | divergent-paired related homeobox | 204595 | 130844 | 142405 | |
| 19 | DMRTC2 | DMRT like family C2 | 142025 | 273111 | 105372 | 38, 8, |
| 19 | LIG1 | DNA ligase 1 | 105486 | 105499 | 185453 | 39, 21, 25 |
| 19 | DNMT1 | DNA methyltransferase 1 | 130816 | 130811 | 267534 | 22, 21, 11 |
| 19 | POLD1 | DNA polymerase delta 1, catalytic subunit | 062822 | 131400 | 142539 | 21, 9, 27 |
| 19 | DNAJB1 | DnaJ heat shock protein family (Hsp40) member B1 | 132002 | 123159 | 099797 | 1, 26, 36 |
| 19 | DOTH | DOT1 like histone lysine methyltransferase | 104885 | 065000 | 104886 | 22, 12, 20 |
| 19 | DUXA | double homeobox A | 258873 | 141946 | 083844 | 6, |
| 19 | DPF1 | double PHD fingers 1 | 011332 | 105738 | 167642 | 26, 34, 8 |
| 19 | DPY19L3 | dpy-19 like 3 (C. elegans) | 178904 | 168813 | 105185 | 29, 12, 22 |
| 19 | DYRK1B | dual specificity tyrosine phosphorylation regulated kinase 1B | 105204 | 213921 | 105202 | 38, 26, 9 |
| 19 | DNM2 | dynamin 2 | 079805 | 213339 | 099203 | |
| 19 | DNAAF3 | dynein axonemal assembly factor 3 | 167646 | 267110 | 129990 | 38, 10, 42 |
| 19 | DMPK | dystrophia myotonica protein kinase | 104936 | 177045 | 268434 | 34, 15, 26 |
| 19 | DMWD | dystrophia myotonica, WD repeat containing | 185800 | 268434 | 104941 | 26, 14, 41 |
| 19 | EML2 | echinoderm microtubule associated protein like 2 | 125746 | 177464 | 010310 | 21, 1, 36 |
| 19 | EVI5L | ecotropic viral integration site 5 like | 142459 | 104938 | 183248 | 26, 31, 14 |
| 19 | ECSIT | ECSIT signalling integrator | 130159 | 161914 | 130176 | 21, 1, 9 |
| 19 | EGLN2 | egl-9 family hypoxia inducible factor 2 | 269858 | 171570 | 268797 | 22, 36, 38 |
| 19 | EHD2 | EH domain containing 2 | 024422 | 063169 | 105373 | 42, 44, 24 |
| 19 | ELANE | elastase, neutrophil expressed | 197561 | 196415 | 197766 | 7, 5, 9 |
| 19 | ELAVL1 | ELAV like RNA binding protein 1 | 066044 | 104980 | 131142 | 29, 26, 4 |
| 19 | ELAVL3 | ELAV like RNA binding protein 3 | 196361 | 130175 | 267477 | 14, 45, 8 |
| 19 | ETFB | electron transfer flavoprotein beta subunit | 105379 | 186806 | 269403 | 25, 14, 35 |
| 19 | ELOF1 | elongation factor 1 homolog | 130165 | 130176 | 198551 | 1, 26, 27 |
| 19 | ELL | elongation factor for RNA polymerase II | 105656 | 105655 | 105701 | 21, 5, 16 |
| 19 | ERVK3-1 | Endogenous retrovirus group K3 member 1 | 142396 | 267216 | 182318 | |
| 19 | ERVV-1 | Endogenous retrovirus group V member 1 | 269526 | 180257 | 268964 | 32, |
| 19 | ERVV-2 | Endogenous retrovirus group V member 2 | 268964 | 269526 | 170949 | 32, 6, 22 |
| 19 | ECH1 | enoyl-CoA hydratase 1 | 104823 | 171747 | 268083 | 30, 1, 25 |
| 19 | EID2 | EP300 interacting inhibitor of differentiation 2 | 176396 | 176401 | 105198 | 6, 4, 34 |
| 19 | EID2B | EP300 interacting inhibitor of differentiation 2B | 176401 | 186838 | 176396 | 11, 34, 13 |
| 19 | EFNA2 | ephrin A2 | 099617 | 228300 | 160953 | 6, 16, 14 |
| 19 | EPS15L1 | epidermal growth factor receptor pathway substrate 15 like 1 | 127527 | 127528 | 269058 | 43, 2, 36 |
| 19 | ELSPBP1 | epididymal sperm binding protein 1 | 169393 | 188334 | 105507 | 14, 38, 10 |
| 19 | EMP3 | epithelial membrane protein 3 | 142227 | 105479 | 161558 | 6, 43, 1 |
| 19 | EPHX3 | epoxide hydrolase 3 | 105131 | 074181 | 141867 | 13, 22, 32 |
| 19 | EPS8L1 | EPS8 like 1 | 131037 | 160439 | 125503 | 29, 32, 27 |
| 19 | EPN1 | epsin 1 | 063245 | 063244 | 185792 | 17, |
| 19 | EBI3 | Epstein-Barr virus induced 3 | 105246 | 089847 | 105248 | 32, 41, 9 |
| 19 | EMC10 | ER membrane protein complex subunit 10 | 161671 | 142530 | 161677 | 31, 11, 12 |
| 19 | ERCC1 | ERCC excision repair 1, endonuclease non-catalytic subunit | 012061 | 117877 | 125740 | 5, 33, 6 |
| 19 | ERCC2 | ERCC excision repair 2, TFIIH core complex helicase subunit | 104884 | 104892 | 104881 | 21, 3, 31 |
| 19 | EPOR | erythropoietin receptor | 187266 | 173928 | 205517 | 2, 1, 32 |
| 19 | ETHE1 | ETHE1, persulfide dioxygenase | 105755 | 176531 | 176472 | 43, 16, 4 |
| 19 | ETV2 | ETS variant 2 | 105672 | 126254 | 126267 | 38, 32, 9 |
| 19 | ERF | ETS2 repressor factor | 105722 | 268643 | 079432 | 26, 40, 43 |
| 19 | EEF2 | eukaryotic translation elongation factor 2 | 167658 | 167657 | 105229 | 33, 40, 24 |
| 19 | EIF3G | eukaryotic translation initiation factor 3 subunit G | 130811 | 244165 | 130816 | 34, 1, 35 |
| 19 | EIF3K | eukaryotic translation initiation factor 3 subunit K | 178982 | 104814 | 130402 | 27, 7, 29 |
| 19 | EXOC3L2 | exocyst complex component 3 like 2 | 130201 | 283632 | 104879 | 40, 28, 14 |
| 19 | EXOC3L2 | exocyst complex component 3 like 2 | 283632 | 267545 | 130201 | 40, 28, 14 |
| 19 | EXOSC5 | exosome component 5 | 077348 | 123810 | 248098 | 21, 41, 9 |
| 19 | F2RL3 | F2R like thrombin/trypsin receptor 3 | 127533 | 127511 | 160111 | 7, 28, 16 |
| 19 | FAM129C | family with sequence similarity 129 member C | 167483 | 130313 | 130309 | 36, 21, 22 |
| 19 | FAM187B | family with sequence similarity 187 member B | 177558 | 089327 | 105699 | 38, 44, 8 |
| 19 | FAM32A | family with sequence similarity 32 member A | 105058 | 141977 | 072958 | 12, 6, 21 |
| 19 | FAM71E1 | family with sequence similarity 71 member E1 | 142530 | 086967 | 161671 | 38, 14, 21 |
| 19 | FAM71E2 | family with sequence similarity 71 member E2 | 180043 | 267706 | 095752 | 38, 39, 23 |
| 19 | FAM83E | family with sequence similarity 83 member E | 105523 | 088002 | 177202 | 37, 16, 24 |
| 19 | FAM98C | family with sequence similarity 98 member C | 130244 | 188766 | 171777 | 28, 41, 20 |
| 19 | FAAP24 | Fanconi anemia core complex associated protein 24 | 131944 | 121289 | 131941 | 4, 2, 30 |
| 19 | FBXL12 | F-box and leucine rich repeat protein 12 | 127452 | 196605 | 198258 | 39, 37, 9 |
| 19 | FBXW9 | F-box and WD repeat domain containing 9 | 132004 | 095059 | 105576 | 34, 3, 21 |
| 19 | FBXO17 | F-box protein 17 | 269190 | 128626 | 161243 | 6, 28, 12 |
| 19 | FBXO27 | F-box protein 27 | 161243 | 269190 | 183760 | 28, 17, 7 |
| 19 | FBXO46 | F-box protein 46 | 177051 | 011478 | 237452 | 26, 22, 44 |
| 19 | FCAR | Fc fragment of IgA receptor | 186431 | 240403 | 189430 | 5, 7, 10 |
| 19 | FCER2 | Fc fragment of IgE receptor II | 104921 | 181029 | 182566 | 41, 36, 22 |
| 19 | FCGBP | Fc fragment of IgG binding protein | 275395 | 105202 | 013275 | 3, 16, 21 |
| 19 | FCGRT | Fc fragment of IgG receptor and transporter | 104870 | 142534 | 142552 | 27, 7, 23 |
| 19 | FCHO1 | FCH domain only 1 | 130475 | 130479 | 179913 | 21, 22, 7 |
| 19 | FEM1A | fem-1 homolog A | 141965 | 142002 | 127666 | 34, 35, 29 |
| 19 | FDX2 | ferredoxin 2 | 267673 | 167807 | 267303 | |
| 19 | FTL | ferritin light chain | 087086 | 087088 | 104812 | |
| 19 | FBL | fibrillarin | 105202 | 105204 | 275395 | 28, 27, 21 |
| 19 | FBN3 | fibrillin 3 | 142449 | 131142 | 090661 | 12, 2, 37 |
| 19 | FGF21 | fibroblast growth factor 21 | 105550 | 174951 | 105552 | 20, |
| 19 | FGF22 | fibroblast growth factor 22 | 070388 | 099821 | 070423 | 27, 8, |
| 19 | FSD1 | fibronectin type III and SPRY domain containing 1 | 105255 | 167664 | 178078 | 8, 14, 26 |
| 19 | FZR1 | fizzy/cell division cycle 20 related 1 | 105325 | 129932 | 161091 | 21, 34, 29 |
| 19 | FKBP8 | FK506 binding protein 8 | 105701 | 105656 | 105700 | 32, |
| 19 | FIZ1 | FLT3 interacting zinc finger 1 | 179943 | 218891 | 171443 | 34, 29, 25 |
| 19 | FLT3LG | fms related tyrosine kinase 3 ligand | 090554 | 269469 | 142541 | 14, 36, 39 |
| 19 | FSTL3 | follistatin like 3 | 070404 | 070423 | 185198 | 32, 26, 38 |
| 19 | FOXA3 | forkhead box A3 | 170608 | 125755 | 170604 | 3, 37, 16 |
| 19 | FPR1 | formyl peptide receptor 1 | 171051 | 105509 | 171049 | 5, 36, 14 |
| 19 | FPR2 | formyl peptide receptor 2 | 171049 | 171051 | 187474 | 5, 36, 15 |
| 19 | FPR3 | formyl peptide receptor 3 | 187474 | 171049 | 161551 | 29, 10, 5 |
| 19 | FOSB | FosB proto-oncogene, AP-1 transcription factor subunit | 125740 | 012061 | 125744 | 42, 1, 44 |
| 19 | FFAR1 | free fatty acid receptor 1 | 126266 | 012124 | 185897 | 28, 44, 8 |
| 19 | FFAR2 | free fatty acid receptor 2 | 126262 | 126251 | 188508 | 3, 28, 20 |
| 19 | FFAR3 | free fatty acid receptor 3 | 185897 | 126266 | 126251 | 27, 5, 16 |
| 19 | FUT1 | fucosyltransferase 1 (H blood group) | 174951 | 182264 | 105550 | 29, 37, 9 |
| 19 | FUT2 | fucosyltransferase 2 | 176920 | 142233 | 176909 | |
| 19 | FUT3 | fucosyltransferase 3 (Lewis blood group) | 171124 | 156413 | 130383 | 3, 42, 16 |
| 19 | FUT5 | fucosyltransferase 5 | 130383 | 171124 | 267740 | 38, |
| 19 | FUT6 | fucosyltransferase 6 | 156413 | 171119 | 171124 | |
| 19 | FKRP | fukutin related protein | 181027 | 090372 | 105281 | 18, 44, |
| 19 | FUZ | fuzzy planar cell polarity protein | 010361 | 196961 | 104973 | 21, 38, 26 |
| 19 | FXYD1 | FXYD domain containing ion transport regulator 1 | 266964 | 153902 | 221946 | 25, 15, 14 |
| 19 | FXYD3 | FXYD domain containing ion transport regulator 3 | 089356 | 105707 | 153902 | 4, 16, 33 |
| 19 | FXYD5 | FXYD domain containing ion transport regulator 5 | 089327 | 221946 | 177558 | 34, 41, 37 |
| 19 | FXYD7 | FXYD domain containing ion transport regulator 7 | 221946 | 266964 | 089327 | 8, 44, 10 |
| 19 | GNA11 | G protein subunit alpha 11 | 088256 | 104964 | 060558 | |
| 19 | GNA15 | G protein subunit alpha 15 | 060558 | 088256 | 125910 | 39, 13, 24 |
| 19 | GNG7 | G protein subunit gamma 7 | 176533 | 099860 | 176490 | |
| 19 | GNG8 | G protein subunit gamma 8 | 167414 | 160013 | 197380 | |
| 19 | GPR108 | G protein-coupled receptor 108 | 125734 | 125730 | 125733 | 9, 24, 4 |
| 19 | GPR32 | G protein-coupled receptor 32 | 142511 | 105472 | 261341 | 32, |
| 19 | GPR4 | G protein-coupled receptor 4 | 177464 | 125741 | 125746 | 43, 45, 4 |
| 19 | GPR42 | G protein-coupled receptor 42 (gene/pseudogene) | 126251 | 185897 | 126262 | |
| 19 | GADD45GIP1 | GADD45G interacting protein 1 | 179271 | 179262 | 179284 | 20, 23, 16 |
| 19 | GALP | galanin like peptide | 197487 | 167685 | 197213 | 12, |
| 19 | LGALS13 | galectin 13 | 105198 | 176396 | 249861 | 32, |
| 19 | LGALS14 | galectin 14 | 006659 | 249861 | 105205 | 32, 45, 27 |
| 19 | LGALS16 | galectin 16 | 249861 | 105198 | 006659 | 32, 12, |
| 19 | LGALS4 | galectin 4 | 171747 | 178934 | 104823 | 16, 3, 37 |
| 19 | LGALS7 | galectin 7 | 205076 | 182472 | 178934 | 15, 26, 18 |
| 19 | LGALS7B | galectin 7B | 178934 | 205076 | 171747 | 15, 33, 10 |
| 19 | GGN | gametogenetin | 179168 | 099341 | 188766 | 38, 21, 19 |
| 19 | GIPR | gastric inhibitory polypeptide receptor | 010310 | 125746 | 125743 | 28, 16, 12 |
| 19 | GATAD2A | GATA zinc finger domain containing 2A | 167491 | 129933 | 178093 | 22, 16, 21 |
| 19 | GMIP | GEM interacting protein | 089639 | 064547 | 105726 | 29, 22, 9 |
| 19 | GEMIN7 | gem nuclear organelle associated protein 7 | 142252 | 170684 | 007047 | 41, 34, 25 |
| 19 | GTF2F1 | general transcription factor IIF subunit 1 | 125651 | 125650 | 088247 | 2, 14, 40 |
| 19 | GIPC1 | GIPC PDZ domain containing family member 1 | 123159 | 160951 | 132002 | 35, 28, 34 |
| 19 | GIPC3 | GIPC PDZ domain containing family member 3 | 179855 | 064961 | 006638 | 43, 40, 14 |
| 19 | GMFG | glia maturation factor gamma | 130755 | 128011 | 179134 | 7, 29, 30 |
| 19 | GLTSCR1 | glioma tumor suppressor candidate region gene 1 | 063169 | 118156 | 024422 | 21, 12, 9 |
| 19 | GLTSCR2 | glioma tumor suppressor candidate region gene 2 | 105373 | 024422 | 178980 | 21, 41, 22 |
| 19 | GPI | glucose-6-phosphate isomerase | 105220 | 166398 | 266953 | 13, 7, 2 |
| 19 | GRIK5 | glutamate ionotropic receptor kainate type subunit 5 | 105737 | 105409 | 105732 | 26, 22, 12 |
| 19 | GRIN2D | glutamate ionotropic receptor NMDA type subunit 2D | 105464 | 105438 | 105447 | 6, 23, 16 |
| 19 | GRIN3B | glutamate ionotropic receptor NMDA type subunit 3B | 116032 | 065268 | 182087 | 20, 12, |
| 19 | ERICH4 | glutamate rich 4 | 204978 | 105341 | 007129 | 17, 20, |
| 19 | GRWD1 | glutamate rich WD repeat containing 1 | 105447 | 105464 | 182324 | 36, 21, 45 |
| 19 | QPCTL | glutaminyl-peptide cyclotransferase like | 011478 | 125743 | 177051 | 18, 9, 37 |
| 19 | GCDH | glutaryl-CoA dehydrogenase | 105607 | 105610 | 161860 | |
| 19 | GPX4 | glutathione peroxidase 4 | 167468 | 099817 | 064932 | 29, 1, 15 |
| 19 | GAPDHS | glyceraldehyde-3-phosphate dehydrogenase, spermatogenic | 105679 | 189001 | 105677 | 38, 35, 12 |
| 19 | GYS1 | glycogen synthase 1 | 104812 | 087086 | 183207 | 24, 43, 42 |
| 19 | GSK3A | glycogen synthase kinase 3 alpha | 105723 | 167625 | 268643 | 34, 27, 29 |
| 19 | GP6 | glycoprotein VI platelet | 088053 | 022556 | 160439 | 30, 25, 24 |
| 19 | GFY | golgi associated olfactory signaling regulator | 261949 | 142538 | 104888 | |
| 19 | GPATCH1 | G-patch domain containing 1 | 076650 | 131941 | 166359 | 45, 1, 31 |
| 19 | GRAMD1A | GRAM domain containing 1A | 089351 | 180884 | 105711 | 36, 34, 33 |
| 19 | GZMM | granzyme M | 197540 | 099804 | 172270 | 45, 39, 16 |
| 19 | GADD45B | growth arrest and DNA damage inducible beta | 099860 | 176619 | 176533 | 3, 1, 20 |
| 19 | GDF1 | growth differentiation factor 1 | 130283 | 005007 | 105669 | |
| 19 | GDF15 | growth differentiation factor 15 | 130513 | 130517 | 175489 | 20, 19, 14 |
| 19 | GTPBP3 | GTP binding protein 3 (mitochondrial) | 130299 | 074855 | 130300 | |
| 19 | GAMT | guanidinoacetate N-methyltransferase | 130005 | 115286 | 071626 | 25, 19, 21 |
| 19 | HAUS5 | HAUS augmin like complex subunit 5 | 249115 | 105675 | 126254 | 26, 9, 5 |
| 19 | HAUS8 | HAUS augmin like complex subunit 8 | 131351 | 160111 | 099331 | 9, 35, 6 |
| 19 | HSPB6 | heat shock protein family B (small) member 6 | 004776 | 267796 | 167595 | 25, 1, 15 |
| 19 | HCST | hematopoietic cell signal transducer | 126264 | 167604 | 011600 | 7, 43, 37 |
| 19 | HSH2D | hematopoietic SH2 domain containing | 196684 | 167461 | 141977 | 5, 7, 4 |
| 19 | HAMP | hepcidin antimicrobial peptide | 105697 | 105698 | 105695 | 36, 19, 14 |
| 19 | HPN | hepsin | 105707 | 105711 | 089356 | 19, 41, 40 |
| 19 | HNRNPL | heterogeneous nuclear ribonucleoprotein L | 104824 | 268083 | 187994 | 30, 33, 39 |
| 19 | HNRNPM | heterogeneous nuclear ribonucleoprotein M | 099783 | 099785 | 133246 | 12, 31, 3 |
| 19 | HNRNPUL1 | heterogeneous nuclear ribonucleoprotein U like 1 | 105323 | 167601 | 105329 | 41, 21, 39 |
| 19 | HMG20B | high mobility group 20B | 064961 | 183397 | 179855 | 35, 3, 34 |
| 19 | HRC | histidine rich calcium binding protein | 130528 | 177380 | 130529 | 15, 25, 11 |
| 19 | HKR1 | HKR1, GLI-Kruppel zinc finger family member | 181666 | 188283 | 189164 | |
| 19 | HIPK4 | homeodomain interacting protein kinase 4 | 160396 | 105223 | 105227 | 38, 2, 33 |
| 19 | HOMER3 | homer scaffolding protein 3 | 051128 | 105671 | 064607 | 13, 19, 40 |
| 19 | HOOK2 | hook microtubule tethering protein 2 | 095066 | 039987 | 171223 | 1, 40, 13 |
| 19 | HSPBP1 | HSPA (Hsp70) binding protein 1 | 133265 | 105063 | 160469 | 9, 21, 3 |
| 19 | HAPLN4 | hyaluronan and proteoglycan link protein 4 | 187664 | 130287 | 213996 | 14, 15, 24 |
| 19 | HAS1 | hyaluronan synthase 1 | 105509 | 182310 | 171051 | 1, 32, 6 |
| 19 | HSD11B1L | hydroxysteroid 11-beta dehydrogenase 1 like | 167733 | 174917 | 196365 | |
| 19 | HSD17B14 | hydroxysteroid 17-beta dehydrogenase 14 | 087076 | 105552 | 105559 | 11, 17, 20 |
| 19 | HCN2 | hyperpolarization activated cyclic nucleotide gated | 099822 | 172270 | 099821 | 29, 28, 9 |
| | | potassium channel 2 | | | | |
| 19 | HIF3A | hypoxia inducible factor 3 alpha subunit | 124440 | 188293 | 011485 | 36, 26, 15 |
| 19 | IFI30 | IFI30, lysosomal thiol reductase | 216490 | 268173 | 254858 | 41, 21, 30 |
| 19 | IGFL1 | IGF like family member 1 | 188293 | 204866 | 124440 | 24, 44, 33 |
| 19 | IGFL2 | IGF like family member 2 | 204866 | 188624 | 188293 | 24, 38, 16 |
| 19 | IGFL3 | IGF like family member 3 | 188624 | 204869 | 204866 | 6, 15, 35 |
| 19 | IGFL4 | IGF like family member 4 | 204869 | 008438 | 188624 | |
| 19 | IGFLR1 | IGF like family receptor 1 | 126246 | 272333 | 267120 | 43, 6, 14 |
| 19 | IGLON5 | IgLON family member 5 | 142549 | 179213 | 186806 | 2, 14, 12 |
| 19 | ILVBL | ilvB acetolactate synthase like | 105135 | 105137 | 074181 | 21, 29, 3 |
| 19 | IER2 | immediate early response 2 | 160888 | 104915 | 141837 | 32, 29, 27 |
| 19 | IRGC | immunity related GTPase cinema | 124449 | 011422 | 105771 | 38, 32, 8 |
| 19 | IRGQ | immunity related GTPase Q | 167378 | 234465 | 124444 | 18, 32, 26 |
| 19 | IGSF23 | immunoglobulin superfamily member 23 | 216588 | 273777 | 073008 | 10, 38, 16 |
| 19 | INAFM1 | InaF motif containing 1 | 257704 | 105321 | 197405 | |
| 19 | ISYNA1 | inositol-3-phosphate synthase 1 | 105655 | 130511 | 105656 | |
| 19 | ITPKC | inositol-trisphosphate 3-kinase C | 086544 | 123815 | 188493 | 18, 43, 30 |
| 19 | INSL3 | insulin like 3 | 248099 | 179913 | 105639 | 38, 8, 5 |
| 19 | INSR | insulin receptor | 171105 | 130544 | 263264 | 1, 32, 40 |
| 19 | ICAM1 | intercellular adhesion molecule 1 | 090339 | 105364 | 105371 | 36, 20, 1 |
| 19 | ICAM3 | intercellular adhesion molecule 3 | 076662 | 161847 | 105397 | 36, 5, 7 |
| 19 | ICAM4 | intercellular adhesion molecule 4 (Landsteiner-Wiener | 105371 | 090339 | 105376 | 5, 20, 12 |
| | | blood group) | | | | |
| 19 | ICAM5 | intercellular adhesion molecule 5 | 105376 | 105371 | 220201 | 40, 7, 8 |
| 19 | IFNL1 | interferon lambda 1 | 182393 | 183709 | 128011 | |
| 19 | IFNL2 | interferon lambda 2 | 183709 | 272395 | 182393 | 14, |
| 19 | IFNL3 | interferon lambda 3 | 197110 | 179751 | 272395 | |
| 19 | IFNL4 | interferon lambda 4 (gene/pseudogene) | 272395 | 197110 | 183709 | |
| 19 | IRF2BP1 | interferon regulatory factor 2 binding protein 1 | 170604 | 170608 | 176182 | 36, 28, 34 |
| 19 | IRF3 | interferon regulatory factor 3 | 126456 | 126461 | 126453 | 21, 41, 28 |
| 19 | IL11 | interleukin 11 | 095752 | 180043 | 160472 | 45, 35, 28 |
| 19 | IL12RB1 | interleukin 12 receptor subunit beta 1 | 096996 | 105643 | 099308 | |
| 19 | IL27RA | interleukin 27 receptor subunit alpha | 104998 | 171136 | 187867 | 40, 41, 22 |
| 19 | IL4I1 | interleukin 4 induced 1 | 104951 | 104946 | 213024 | 26, 38, 32 |
| 19 | ILF3 | interleukin enhancer binding factor 3 | 129351 | 129353 | 213339 | 12, 21, 22 |
| 19 | ISOC2 | isochorismatase domain containing 2 | 063241 | 187902 | 283567 | 41, 21, 34 |
| 19 | IZUMO2 | IZUMO family member 2 | 161652 | 142528 | 105357 | 38, |
| 19 | IZUMO4 | IZUMO family member 4 | 099840 | 172081 | 065000 | 38, 13, 8 |
| 19 | IZUMO1 | izumo sperm-egg fusion 1 | 182264 | 105538 | 174951 | 26, 38, 7 |
| 19 | JAK3 | Janus kinase 3 | 105639 | 248099 | 105640 | 22, 41, 1 |
| 19 | JOSD2 | Josephin domain containing 2 | 161677 | 161671 | 204653 | 29, 6, 3 |
| 19 | JUNB | JunB proto-oncogene, AP-1 transcription factor subunit | 171223 | 095066 | 167815 | 1, 26, 31 |
| 19 | JSRP1 | junctional sarcoplasmic reticulum protein 1 | 167476 | 104899 | 104904 | 20, |
| 19 | JUND | JunD proto-oncogene, AP-1 transcription factor subunit | 130522 | 130518 | 130520 | 41, 27, 17 |
| 19 | KLK1 | kallikrein 1 | 167748 | 167747 | 174562 | 34, 28, 41 |
| 19 | KLK10 | kallikrein related peptidase 10 | 129451 | 213022 | 167757 | 3, 18, 24 |
| 19 | KLK11 | kallikrein related peptidase 11 | 167757 | 129451 | 186474 | 27, 1, 31 |
| 19 | KLK12 | kallikrein related peptidase 12 | 186474 | 167757 | 167759 | 24, 38, |
| 19 | KLK13 | kallikrein related peptidase 13 | 167759 | 186474 | 129437 | 30, 24, 38 |
| 19 | KLK14 | kallikrein related peptidase 14 | 129437 | 167759 | 142544 | 15, 20, |
| 19 | KLK15 | kallikrein related peptidase 15 | 174562 | 167748 | 142515 | 13, 6, 33 |
| 19 | KLK2 | kallikrein related peptidase 2 | 167751 | 142515 | 167749 | 33, 26, 6 |
| 19 | KLK3 | kallikrein related peptidase 3 | 142515 | 174562 | 167751 | 33, 26, 23 |
| 19 | KLK4 | kallikrein related peptidase 4 | 167749 | 167751 | 167754 | 33, 44, 5 |
| 19 | KLK5 | kallikrein related peptidase 5 | 167754 | 167749 | 167755 | 22, 27, 15 |
| 19 | KLK6 | kallikrein related peptidase 6 | 167755 | 167754 | 169035 | 22, 30, 27 |
| 19 | KLK7 | kallikrein related peptidase 7 | 169035 | 167755 | 129455 | 3, 13, 27 |
| 19 | KLK8 | kallikrein related peptidase 8 | 129455 | 169035 | 269741 | 1, 27, 13 |
| 19 | KLK9 | kallikrein related peptidase 9 | 213022 | 269741 | 129451 | 18, 32, |
| 19 | KPTN | kaptin, actin binding protein | 118162 | 118160 | 105402 | 40, 22, 26 |
| 19 | KDELR1 | KDEL endoplasmic reticulum protein retention receptor 1 | 105438 | 105467 | 105464 | 32, 1, 31 |
| 19 | KEAP1 | kelch like ECH associated protein 1 | 079999 | 065989 | 180739 | 21, 24, 3 |
| 19 | KLHL26 | kelch like family member 26 | 167487 | 105696 | 105662 | 27, 37, 39 |
| 19 | KRTDAP | keratinocyte differentiation associated protein | 188508 | 126262 | 161249 | 18, 15, 30 |
| 19 | KHSRP | KH-type splicing regulatory protein | 088247 | 125651 | 181240 | 21, 22, 14 |
| 19 | KIAA0355 | KIAA0355 | 166398 | 257103 | 105220 | 1, 22, 25 |
| 19 | KIAA1683 | KIAA1683 | 130518 | 105650 | 130522 | 38, 36, 29 |
| 19 | KIR3DL1 | killer cell immunoglobulin like receptor, three Ig domains | 167633 | 189013 | 221957 | 25, 19, |
| | | and long cytoplasmic tail 1 | | | | |
| 19 | KIR3DL2 | killer cell immunoglobulin like receptor, three Ig domains | 240403 | 221957 | 186431 | 5, 23, 28 |
| | | and long cytoplasmic tail 2 | | | | |
| 19 | KIR3DL3 | killer cell immunoglobulin like receptor, three Ig domains | 242019 | 186818 | 243772 | |
| | | and long cytoplasmic tail 3 | | | | |
| 19 | KIR3DX1 | Killer cell immunoglobulin like receptor, three Ig domains X1 | 104970 | 167618 | 239998 | 7, 5, |
| 19 | KIR2DL1 | killer cell immunoglobulin like receptor, two Ig domains | 125498 | 243772 | 189013 | |
| | | and long cytoplasmic tail 1 | | | | |
| 19 | KIR2DL3 | killer cell immunoglobulin like receptor, two Ig domains | 243772 | 242019 | 125498 | 5, 23, 32 |
| | | and long cytoplasmic tail 3 | | | | |
| 19 | KIR2DL4 | killer cell immunoglobulin like receptor, two Ig domains | 189013 | 125498 | 167633 | |
| | | and long cytoplasmic tail 4 | | | | |
| 19 | KIR2DS4 | killer cell immunoglobulin like receptor, two Ig domains | 221957 | 167633 | 240403 | 5, |
| | | and short cytoplasmic tail 4 | | | | |
| 19 | KIRREL2 | kin of IRRE like 2 (Drosophila) | 126259 | 161270 | 105290 | 31, 14, 20 |
| 19 | KLC3 | kinesin light chain 3 | 104892 | 104879 | 104884 | 2, 32, 27 |
| 19 | KISS1R | KISS1 receptor | 116014 | 198858 | 116017 | 17, 32, 16 |
| 19 | KANK2 | KN motif and ankyrin repeat domains 2 | 197256 | 161888 | 130158 | |
| 19 | KANK3 | KN motif and ankyrin repeat domains 3 | 186994 | 233927 | 167772 | 26, 32, 3 |
| 19 | KRI1 | KRI1 homolog | 129347 | 130734 | 129355 | 36, 39, 1 |
| 19 | KLF1 | Kruppel like factor 1 | 105610 | 105612 | 105607 | 5, 16, |
| 19 | KLF16 | Kruppel like factor 16 | 129911 | 079313 | 129968 | 31, 28, 16 |
| 19 | KLF2 | Kruppel like factor 2 | 127528 | 072958 | 127527 | 20, 28, 17 |
| 19 | KXD1 | KxDL motif containing 1 | 105700 | 105701 | 221983 | 29, 27, 3 |
| 19 | LMNB2 | lamin B2 | 176619 | 099800 | 099860 | 34, 12, 22 |
| 19 | LTBP4 | latent transforming growth factor beta binding protein 4 | 090006 | 160410 | 279183 | 41, 37, 27 |
| 19 | LRP3 | LDL receptor related protein 3 | 130881 | 166359 | 130876 | 34, 26, 14 |
| 19 | LMTK3 | lemur tyrosine kinase 3 | 142235 | 105443 | 088002 | 26, 16, 8 |
| 19 | LIM2 | lens intrinsic membrane protein 2 | 105370 | 105374 | 262874 | 14, |
| 19 | LRG1 | leucine rich alpha-2-glycoprotein 1 | 171236 | 267385 | 167680 | 19, 5, 37 |
| 19 | LRFN1 | leucine rich repeat and fibronectin type III domain | 128011 | 182393 | 130755 | 27, 33, 6 |
| | | containing 1 | | | | |
| 19 | LRFN3 | leucine rich repeat and fibronectin type III domain | 126243 | 011600 | 205138 | 35, 22, 3 |
| | | containing 3 | | | | |
| 19 | LINGO3 | leucine rich repeat and Ig domain containing 3 | 220008 | 188305 | 130332 | 36, 5, 20 |
| 19 | LRRC25 | leucine rich repeat containing 25 | 175489 | 130513 | 130511 | 5, 36, 32 |
| 19 | LRRC4B | leucine rich repeat containing 4B | 131409 | 204653 | 213023 | 14, 15, 8 |
| 19 | LRRC8E | leucine rich repeat containing 8 family member E | 171017 | 183248 | 076984 | 18, 24, 4 |
| 19 | LGI4 | leucine rich repeat LGI family member 4 | 153902 | 089356 | 266964 | 26, 1, 14 |
| 19 | LEUTX | leucine twenty homeobox | 213921 | 105205 | 105204 | 32, |
| 19 | LAIR1 | leukocyte associated immunoglobulin like receptor 1 | 167613 | 239961 | 167614 | 39, 36, 5 |
| 19 | LAIR2 | leukocyte associated immunoglobulin like receptor 2 | 167618 | 167617 | 104970 | 32, 44, 10 |
| 19 | LILRA1 | leukocyte immunoglobulin like receptor A1 | 104974 | 239998 | 104972 | 7, 5, 36 |
| 19 | LILRA2 | leukocyte immunoglobulin like receptor A2 | 239998 | 104970 | 104974 | 5, 36, 7 |
| 19 | LILRA4 | leukocyte immunoglobulin like receptor A4 | 239961 | 187116 | 167613 | 36, 22, 7 |
| 19 | LILRA5 | leukocyte immunoglobulin like receptor A5 | 187116 | 131042 | 239961 | 5, 23, |
| 19 | LILRA6 | leukocyte immunoglobulin like receptor A6 | 244482 | 204577 | 105609 | 5, 36, 26 |
| 19 | LILRB1 | leukocyte immunoglobulin like receptor B1 | 104972 | 104974 | 186818 | 36, 7, 41 |
| 19 | LILRB2 | leukocyte immunoglobulin like receptor B2 | 131042 | 105609 | 187116 | 36, 5, 7 |
| 19 | LILRB3 | leukocyte immunoglobulin like receptor B3 | 204577 | 170889 | 244482 | |
| 19 | LILRB4 | leukocyte immunoglobulin like receptor B4 | 186818 | 104972 | 242019 | 10, 5, 13 |
| 19 | LILRB5 | leukocyte immunoglobulin like receptor B5 | 105609 | 244482 | 131042 | 36, 10, 39 |
| 19 | LENG1 | leukocyte receptor cluster member 1 | 105617 | 088038 | 167608 | 6, 14, 44 |
| 19 | LENG8 | leukocyte receptor cluster member 8 | 167615 | 167614 | 275183 | 40, 26, 7 |
| 19 | LENG9 | leukocyte receptor cluster member 9 | 275183 | 167615 | 167617 | 9, 32, 20 |
| 19 | LIN37 | lin-37 DREAM MuvB core complex component | 267796 | 188223 | 004776 | 15, 26, 41 |
| 19 | LIN7B | lin-7 homolog B, crumbs cell polarity complex component | 104863 | 104852 | 221916 | 31, 15, 13 |
| 19 | LIPE | lipase E, hormone sensitive type | 079435 | 105427 | 189377 | 1, 23, 22 |
| 19 | LSR | lipolysis stimulated lipoprotein receptor | 105699 | 177558 | 105698 | 3, 37, 16 |
| 19 | LONP1 | Ion peptidase 1, mitochondrial | 196365 | 167733 | 174898 | 21, 34, 35 |
| 19 | LDLR | low density lipoprotein receptor | 130164 | 127616 | 161888 | 43, 42, 24 |
| 19 | LSM14A | LSM14A, mRNA processing body assembly factor | 257103 | 153885 | 166398 | 11, 1, 12 |
| 19 | LSM4 | LSM4 homolog, U6 small nuclear RNA and mRNA degradation | 130520 | 130522 | 130517 | 29, 27, 41 |
| | | associated | | | | |
| 19 | LSM7 | LSM7 homolog, U6 small nuclear RNA and mRNA degradation | 130332 | 220008 | 005206 | 41, 29, 22 |
| | | associated | | | | |
| 19 | LHB | luteinizing hormone beta polypeptide | 104826 | 183207 | 268655 | 31, 12, 32 |
| 19 | LYPD3 | LY6/PLAUR domain containing 3 | 124466 | 131126 | 176531 | 13, 30, 32 |
| 19 | LYPD4 | LY6/PLAUR domain containing 4 | 273111 | 170956 | 142025 | 38, 10, |
| 19 | LYPD5 | LY6/PLAUR domain containing 5 | 159871 | 104783 | 167637 | |
| 19 | LYL1 | LYL1, basic helix-loop-helix family member | 104903 | 008441 | 104907 | 22, 41, 38 |
| 19 | KDM4B | lysine demethylase 4B | 127663 | 276043 | 105426 | |
| 19 | KMT2B | lysine methyltransferase 2B | 272333 | 011590 | 126246 | |
| 19 | KMT5C | lysine methyltransferase 5C | 133247 | 180061 | 160471 | 18, 44, 9 |
| 19 | LPAR2 | lysophosphatidic acid receptor 2 | 064547 | 105717 | 089639 | 29, 38, 12 |
| 19 | MFSD12 | major facilitator superfamily domain containing 12 | 161091 | 105325 | 183397 | 35, 9, 20 |
| 19 | MAN2B1 | mannosidase alpha class 2B member 1 | 104774 | 269242 | 269590 | 39, 36, 10 |
| 19 | MKNK2 | MAP kinase interacting serine/threonine kinase 2 | 099875 | 133243 | 172081 | 3, 21, 41 |
| 19 | MCEMP1 | mast cell expressed membrane protein 1 | 183019 | 104918 | 269711 | 20, 5, 2 |
| 19 | MAU2 | MAU2 sister chromatid cohesion factor | 129933 | 105705 | 167491 | 18, 39, 37 |
| 19 | MED16 | mediator complex subunit 16 | 175221 | 197766 | 198858 | 29, 34, 27 |
| 19 | MED25 | mediator complex subunit 25 | 104973 | 010361 | 104960 | |
| 19 | MED26 | mediator complex subunit 26 | 105085 | 127526 | 268790 | 38, 9, 27 |
| 19 | MED29 | mediator complex subunit 29 | 063322 | 006712 | 128016 | 42, 8, 36 |
| 19 | MAMSTR | MEF2 activating motif and SAP domain containing | 176909 | 176920 | 105538 | 2, 45, 25 |
| | | transcriptional regulator | | | | |
| 19 | MATK | megakaryocyte-associated tyrosine kinase | 007264 | 173976 | 105278 | 5, 14, 36 |
| 19 | MEIS3 | Meis homeobox 3 | 105419 | 134815 | 118160 | 37, 18, 9 |
| 19 | MUM1 | melanoma associated antigen (mutated) 1 | 160953 | 099617 | 115286 | 26, 27, 40 |
| 19 | MIA | melanoma inhibitory activity | 261857 | 077312 | 167578 | 15, 11, 35 |
| 19 | MARCH2 | membrane associated ring-CH-type finger 2 | 099785 | 185236 | 099783 | 21, 40, 31 |
| 19 | MBOAT7 | membrane bound O-acyltransferase domain containing 7 | 125505 | 167608 | 170892 | 3, 27, 5 |
| 19 | MBD3 | methyl-CpG binding domain protein 3 | 071655 | 181588 | 267059 | 6, |
| 19 | MBD3L1 | methyl-CpG binding domain protein 3 like 1 | 170948 | 167785 | 181143 | 38, |
| 19 | MBD3L2 | methyl-CpG binding domain protein 3 like 2 | 230522 | 205718 | 182315 | |
| 19 | MBD3L3 | methyl-CpG binding domain protein 3 like 3 | 182315 | 230522 | 130544 | |
| 19 | MBD3L4 | methyl-CpG binding domain protein 3 like 4 | 205718 | 237247 | 230522 | |
| 19 | MBD3L5 | methyl-CpG binding domain protein 3 like 5 | 237247 | 196589 | 205718 | |
| 19 | MRI1 | methylthioribose-1-phosphate isomerase 1 | 037757 | 104957 | 104979 | 9, 33, 31 |
| 19 | MEX3D | mex-3 RNA binding family member D | 181588 | 185988 | 071655 | 31, 27, 3 |
| 19 | MIA-RAB4B | MIA-RAB4B readthrough (NMD candidate) | 268975 | 077312 | 167578 | |
| 19 | MARK4 | microtubule affinity regulating kinase 4 | 007047 | 142252 | 104866 | 34, 21, 25 |
| 19 | MAP1S | microtubule associated protein 1S | 130479 | 130477 | 130475 | 38, 39, 8 |
| 19 | MAST1 | microtubule associated serine/threonine kinase 1 | 105613 | 132026 | 105612 | 26, 31, 14 |
| 19 | MAST3 | microtubule associated serine/threonine kinase 3 | 099308 | 096996 | 105647 | 22, 26, 21 |
| 19 | MIDN | midnolin | 167470 | 099624 | 099622 | 34, 12, 22 |
| 19 | MIER2 | MIER family member 2 | 105556 | 141934 | 105549 | 26, 9, 31 |
| 19 | MISP3 | MISP family member 3 | 141854 | 187867 | 188032 | |
| 19 | MRPL34 | mitochondrial ribosomal protein L34 | 130312 | 127220 | 130311 | |
| 19 | MRPL4 | mitochondrial ribosomal protein L4 | 105364 | 267534 | 090339 | 21, 3, 35 |
| 19 | MRPL54 | mitochondrial ribosomal protein L54 | 183617 | 011132 | 173976 | 3, 29, 7 |
| 19 | MRPS12 | mitochondrial ribosomal protein S12 | 128626 | 269547 | 269190 | 28, 41, 3 |
| 19 | MAP2K2 | mitogen-activated protein kinase kinase 2 | 126934 | 178951 | 060566 | 38, 33, |
| 19 | MAP2K7 | mitogen-activated protein kinase kinase 7 | 076984 | 171017 | 260001 | 22, 27, 14 |
| 19 | MAP3K10 | mitogen-activated protein kinase kinase kinase 10 | 130758 | 197782 | 174521 | 37, 9, 2 |
| 19 | MAP4K1 | mitogen-activated protein kinase kinase kinase kinase 1 | 104814 | 196218 | 178982 | 41, 22, 21 |
| 19 | MISP | mitotic spindle positioning | 099812 | 099864 | 011304 | 16, 9, 37 |
| 19 | MLLT1 | MLLT1, super elongation complex subunit | 130382 | 130377 | 167769 | 34, 32, 22 |
| 19 | MOB3A | MOB kinase activator 3A | 172081 | 099875 | 099840 | 39, 36, 22 |
| 19 | MPND | MPN domain containing | 008382 | 178078 | 141985 | 24, 27, 40 |
| 19 | MPV17L2 | MPV17 mitochondrial inner membrane protein like 2 | 254858 | 216490 | 105649 | 2, 27, 36 |
| 19 | MUC16 | mucin 16, cell surface associated | 181143 | 170948 | 170929 | 42, 23, 1 |
| 19 | MCOLN1 | mucolipin 1 | 090674 | 198816 | 268614 | 26, 5, 14 |
| 19 | MADCAM1 | mucosal vascular addressin cell adhesion molecule 1 | 099866 | 181781 | 141933 | 40, 36, 15 |
| 19 | MEGF8 | multiple EGF like domains 8 | 105429 | 167619 | 105427 | 21, 6, 4 |
| 19 | MVB12A | muItivesicular body subunit 12A | 141971 | 130303 | 188051 | 41, 9, 21 |
| 19 | MYPOP | Myb related transcription factor, partner of profilin | 176182 | 170604 | 188425 | 26, 21, 2 |
| 19 | MAG | myelin associated glycoprotein | 105695 | 105697 | 012124 | 8, 17, 26 |
| 19 | MYADM | myeloid associated differentiation marker | 179820 | 142405 | 126583 | 5, 40, 45 |
| 19 | MYDGF | myeloid derived growth factor | 074842 | 185361 | 142002 | |
| 19 | MZF1 | myeloid zinc finger 1 | 099326 | 130725 | 243772 | 29, 22, 23 |
| 19 | MEF2B | myocyte enhancer factor 2B | 213999 | 064489 | 254901 | |
| 19 | MYBPC2 | myosin binding protein C, fast type | 086967 | 269404 | 142530 | 25, 29, 40 |
| 19 | MYH14 | myosin heavy chain 14 | 105357 | 161652 | 131398 | 16, 40, 18 |
| 19 | MYO1F | myosin IF | 142347 | 133250 | 142303 | 36, 5, 7 |
| 19 | MYO9B | myosin IXB | 099331 | 131351 | 053501 | 22, 41, 21 |
| 19 | NAT14 | N-acetyltransferase 14 (putative) | 090971 | 197483 | 179954 | 28, 15, 8 |
| 19 | NWD1 | NACHT and WD repeat domain containing 1 | 188039 | 072954 | 127511 | 30, 18, 33 |
| 19 | NDUFS7 | NADH: ubiquinone oxidoreductase core subunit S7 | 115286 | 160953 | 130005 | 34, 25, 39 |
| 19 | NDUFA11 | NADH: ubiquinone oxidoreductase subunit A11 | 174886 | 267740 | 267314 | 34, 29, 25 |
| 19 | NDUFA13 | NADH: ubiquinone oxidoreductase subunit A13 | 186010 | 178093 | 258674 | 29, 43, 25 |
| 19 | NDUFA3 | NADH: ubiquinone oxidoreductase subunit A3 | 170906 | 170909 | 105619 | 7, 25, 33 |
| 19 | NDUFA7 | NADH: ubiquinone oxidoreductase subunit A7 | 267855 | 167774 | 233927 | 7, 26, 25 |
| 19 | NDUFB7 | NADH: ubiquinone oxidoreductase subunit B7 | 099795 | 099797 | 187912 | 31, 27, 3 |
| 19 | NANOS2 | nanos C2HC-type zinc finger 2 | 188425 | 176182 | 104967 | 38, |
| 19 | NANOS3 | nanos C2HC-type zinc finger 3 | 187556 | 132003 | 132016 | 28, 24, 20 |
| 19 | NAPSA | napsin A aspartic peptidase | 131400 | 131408 | 062822 | 20, 10, 33 |
| 19 | NCR1 | natural cytotoxicity triggering receptor 1 | 189430 | 186431 | 167634 | 36, 5, 38 |
| 19 | NKG7 | natural killer cell granule protein 7 | 105374 | 160318 | 105370 | 5, 30, 31 |
| 19 | NECTIN2 | nectin cell adhesion molecule 2 | 130202 | 187244 | 130204 | |
| 19 | NTN5 | netrin 5 | 142233 | 063180 | 176920 | 25, 21, 40 |
| 19 | NCAN | neurocan | 130287 | 184162 | 187664 | 8, 45, 24 |
| 19 | NPAS1 | neuronal PAS domain protein 1 | 130751 | 160007 | 130748 | 34, 41, 35 |
| 19 | NTF4 | neurotrophin 4 | 225950 | 283663 | 104848 | |
| 19 | NRTN | neurturin | 171119 | 141994 | 156413 | 14, 28, 25 |
| 19 | NFKBIB | NFKB inhibitor beta | 104825 | 068903 | 262484 | 26, 3, 28 |
| 19 | NFKBID | NFKB inhibitor delta | 167604 | 105290 | 126264 | 40, 41, 5 |
| 19 | NCLN | nicalin | 125912 | 125910 | 161082 | 3, 16, 26 |
| 19 | NMRK2 | nicotinamide riboside kinase 2 | 077009 | 167654 | 167657 | 15, 25, 14 |
| 19 | NOSIP | nitric oxide synthase interacting protein | 142546 | 142552 | 126460 | 29, 34, 19 |
| 19 | NLRP11 | NLR family pyrin domain containing 11 | 179873 | 229292 | 160505 | 41, 21, 37 |
| 19 | NLRP12 | NLR family pyrin domain containing 12 | 142405 | 204595 | 179820 | 5, 33, 7 |
| 19 | NLRP13 | NLR family pyrin domain containing 13 | 173572 | 160505 | 179709 | |
| 19 | NLRP2 | NLR family pyrin domain containing 2 | 022556 | 167634 | 088053 | 32, 38, 4 |
| 19 | NLRP4 | NLR family pyrin domain containing 4 | 160505 | 179873 | 173572 | 41, 38, 21 |
| 19 | NLRP5 | NLR family pyrin domain containing 5 | 171487 | 179709 | 142409 | 6, |
| 19 | NLRP7 | NLR family pyrin domain containing 7 | 167634 | 189430 | 022556 | 21, 30, 38 |
| 19 | NLRP8 | NLR family pyrin domain containing 8 | 179709 | 173572 | 171487 | |
| 19 | NLRP9 | NLR family pyrin domain containing 9 | 185792 | 063245 | 223638 | 22, 33, 44 |
| 19 | NCCRP1 | non-specific cytotoxic cell receptor protein 1 homolog | 188505 | 130669 | 179751 | 35, 36, 30 |
| | | (zebrafish) | | | | |
| 19 | NOTCH3 | notch 3 | 074181 | 105135 | 105131 | 27, 12, 26 |
| 19 | NOVA2 | NOVA alternative splicing regulator 2 | 104967 | 188425 | 104983 | 29, 14, 28 |
| 19 | NPHS1 | NPHS1, nephrin | 161270 | 250799 | 126259 | 8, |
| 19 | NAPA | NSF attachment protein alpha | 105402 | 118162 | 118156 | 34, 28, 2 |
| 19 | NKPD1 | NTPase, KAP family P-loop domain containing 1 | 179846 | 104866 | 007255 | 15, 22, 27 |
| 19 | NFIC | nuclear factor I C | 141905 | 161082 | 095932 | 45, 40, 1 |
| 19 | NFIX | nuclear factor I X | 008441 | 179284 | 104903 | 6, 40, 33 |
| 19 | NR2C2AP | nuclear receptor 2C2 associated protein | 184162 | 064490 | 130287 | 30, 13, 16 |
| 19 | NR1H2 | nuclear receptor subfamily 1 group H member 2 | 131408 | 131398 | 131400 | 7, 25, 41 |
| 19 | NR2F6 | nuclear receptor subfamily 2 group F member 6 | 160113 | 099330 | 269095 | 27, 34, 29 |
| 19 | NUCB1 | nucleobindin 1 | 104805 | 104804 | 104808 | 36, 45, 2 |
| 19 | NUP62 | nucleoporin 62 | 213024 | 104951 | 269179 | 38, |
| 19 | NXNL1 | nucleoredoxin-like 1 | 171773 | 269035 | 130304 | 14, 38, |
| 19 | NACC1 | nucleus accumbens associated 1 | 160877 | 104907 | 104915 | 26, 9, 12 |
| 19 | NUDT19 | nudix hydrolase 19 | 213965 | 186326 | 173809 | 37, 6, 30 |
| 19 | NUMBL | NUMB like, endocytic adaptor protein | 105245 | 279183 | 123815 | 28, 26, 4 |
| 19 | OCEL1 | occludin/ELL domain containing 1 | 099330 | 053501 | 160113 | 10, 30, 14 |
| 19 | OLFM2 | olfactomedin 2 | 105088 | 127445 | 080573 | 26, 14, 35 |
| 19 | OR1I1 | olfactory receptor family 1 subfamily I member 1 | 094661 | 105141 | 105137 | |
| 19 | OR1M1 | olfactory receptor family 1 subfamily M member 1 | 170929 | 181143 | 170923 | |
| 19 | OR10H1 | olfactory receptor family 10 subfamily H member 1 | 186723 | 172519 | 186115 | |
| 19 | OR10H2 | olfactory receptor family 10 subfamily H member 2 | 171942 | 186204 | 171936 | 10, |
| 19 | OR10H3 | olfactory receptor family 10 subfamily H member 3 | 171936 | 171942 | 172519 | |
| 19 | OR10H4 | olfactory receptor family 10 subfamily H member 4 | 176231 | 171903 | 167460 | |
| 19 | OR10H5 | olfactory receptor family 10 subfamily H member 5 | 172519 | 171936 | 186723 | |
| 19 | OR2Z1 | olfactory receptor family 2 subfamily Z member 1 | 181733 | 181786 | 167785 | |
| 19 | OR4F17 | olfactory receptor family 4 subfamily F member 17 | 176695 | 243772 | 141934 | |
| 19 | OR7A10 | olfactory receptor family 7 subfamily A member 10 | 127515 | 127530 | 185385 | |
| 19 | OR7A17 | olfactory receptor family 7 subfamily A member 17 | 185385 | 127515 | 127529 | 23, |
| 19 | OR7A5 | olfactory receptor family 7 subfamily A member 5 | 188269 | 127507 | 127530 | 24, 38, 8 |
| 19 | OR7C1 | olfactory receptor family 7 subfamily C member 1 | 127530 | 188269 | 127515 | 38, |
| 19 | OR7C2 | olfactory receptor family 7 subfamily C member 2 | 127529 | 185385 | 105143 | |
| 19 | OR7D2 | olfactory receptor family 7 subfamily D member 2 | 188000 | 130803 | 174667 | 5, |
| 19 | OR7D4 | olfactory receptor family 7 subfamily D member 4 | 174667 | 188000 | 237521 | 40, |
| 19 | OR7E24 | olfactory receptor family 7 subfamily E member 24 | 237521 | 174667 | 196110 | 38, |
| 19 | OR7G1 | olfactory receptor family 7 subfamily G member 1 | 161807 | 170923 | 170920 | |
| 19 | OR7G2 | olfactory receptor family 7 subfamily G member 2 | 170923 | 170929 | 161807 | |
| 19 | OR7G3 | olfactory receptor family 7 subfamily G member 3 | 170920 | 161807 | 130803 | |
| 19 | ONECUT3 | one cut homeobox 3 | 205922 | 071564 | 130270 | 14, |
| 19 | OPA3 | OPA3, outer mitochondrial membrane lipid metabolism regulator | 125741 | 125753 | 177464 | 18, 37, 32 |
| 19 | OAZ1 | ornithine decarboxylase antizyme 1 | 104904 | 167476 | 273734 | 41, 34, 21 |
| 19 | OSCAR | osteoclast associated, immunoglobulin-like receptor | 170909 | 248385 | 170906 | 5, 7, 19 |
| 19 | ODF3L2 | outer dense fiber of sperm tails 3 like 2 | 181781 | 129946 | 099866 | 38, 16, 8 |
| 19 | OVOL3 | ovo like zinc finger 3 | 105261 | 075702 | 105258 | 27, 10, 38 |
| 19 | PAK4 | p21 (RAC1) activated kinase 4 | 130669 | 183760 | 188505 | 33, 28, 34 |
| 19 | PAF1 | PAF1 homolog, Paf1/RNA polymerase II complex component | 006712 | 179134 | 063322 | 28, 40, 18 |
| 19 | PALM | paralemmin | 099864 | 185198 | 099812 | 34, 26, 17 |
| 19 | PALM3 | paralemmin 3 | 187867 | 104998 | 141854 | 4, 14, 15 |
| 19 | PNMAL1 | paraneoplastic Ma antigen family like 1 | 182013 | 277531 | 230510 | 40, 29, 26 |
| 19 | PNMAL2 | paraneoplastic Ma antigen family like 2 | 204851 | 230510 | 160014 | 26, 2, 14 |
| 19 | PTH2 | parathyroid hormone 2 | 142538 | 161609 | 261949 | |
| 19 | PNPLA6 | patatin like phospholipase domain containing 6 | 032444 | 268614 | 076826 | 7, 38, 8 |
| 19 | PEG3 | paternally expressed 3 | 198300 | 269699 | 131864 | 31, 2, 32 |
| 19 | PBX4 | PBX homeobox 4 | 105717 | 160161 | 064547 | 39, 3, 20 |
| 19 | PEPD | peptidase D | 124299 | 153879 | 124302 | 17, 2, 37 |
| 19 | PGLYRP1 | peptidoglycan recognition protein 1 | 008438 | 104983 | 204869 | 7, 5, 10 |
| 19 | PGLYRP2 | peptidoglycan recognition protein 2 | 161031 | 105122 | 171954 | 38, 19, 23 |
| 19 | PIN1 | peptidylprolyl cis/trans isomerase, NIMA-interacting 1 | 127445 | 198258 | 105088 | |
| 19 | PRX | periaxin | 105227 | 160396 | 197019 | 26, 14, 12 |
| 19 | PLIN3 | perilipin 3 | 105355 | 127666 | 205784 | 21, 41, 35 |
| 19 | PLIN4 | perilipin 4 | 167676 | 167674 | 214456 | 1, 23, 26 |
| 19 | PLIN5 | perilipin 5 | 214456 | 167676 | 267385 | 29, 1, 25 |
| 19 | PRDX2 | peroxiredoxin 2 | 167815 | 171223 | 104889 | 5, 24, 2 |
| 19 | PEX11G | peroxisomal biogenesis factor 11 gamma | 104883 | 104880 | 198723 | 37, 16, 38 |
| 19 | PSPN | persephin | 125650 | 125652 | 125651 | 20, |
| 19 | PET100 | PET100 homolog | 229833 | 076924 | 268400 | 43, 11, 7 |
| 19 | PPAN | peter pan homolog (Drosophila) | 130810 | 243207 | 244165 | |
| 19 | FARSA | phenylalanyl-tRNA synthetase alpha subunit | 179115 | 161860 | 179218 | 43, 2, 21 |
| 19 | PIP5K1C | phosphatidylinositol-4-phosphate 5-kinase type 1 gamma | 186111 | 105298 | 105289 | 26, 34, 14 |
| 19 | PDE4A | phosphodiesterase 4A | 065989 | 105401 | 079999 | 34, 18, 27 |
| 19 | PDE4C | phosphodiesterase 4C | 105650 | 105649 | 130518 | 27, 20, 16 |
| 19 | PIK3R2 | phosphoinositide-3-kinase regulatory subunit 2 | 105647 | 099308 | 268173 | 34, 27, 18 |
| 19 | PLA2G4C | phospholipase A2 group IVC | 105499 | 105507 | 105486 | 36, 45, 1 |
| 19 | PINLYP | phospholipase A2 inhibitor and LY6/PLAUR domain containing | 234465 | 268361 | 167378 | 29, 17, 20 |
| 19 | PLD3 | phospholipase D family member 3 | 105223 | 160392 | 160396 | 26, 27, 31 |
| 19 | PLPP2 | phospholipid phosphatase 2 | 141934 | 176695 | 105556 | 16, 31, 44 |
| 19 | PLPPR2 | phospholipid phosphatase related 2 | 105520 | 183401 | 173928 | |
| 19 | PLPPR3 | phospholipid phosphatase related 3 | 129951 | 011304 | 172232 | 7, 12, 14 |
| 19 | PIH1D1 | PIH1 domain containing 1 | 104872 | 104888 | 161618 | |
| 19 | PLVAP | plasmalemma vesicle associated protein | 130300 | 130299 | 269720 | 24, 40, 36 |
| 19 | PLAUR | plasminogen activator, urokinase receptor | 011422 | 105767 | 124449 | 20, 27, 5 |
| 19 | PAFAH1B3 | platelet activating factor acetylhydrolase 1b catalytic | 079462 | 079432 | 188368 | 31, 27, 15 |
| | | subunit 3 | | | | |
| 19 | PLEKHF1 | pleckstrin homology and FYVE domain containing 1 | 166289 | 105171 | 131943 | 27, 34, 32 |
| 19 | PLEKHG2 | pleckstrin homology and RhoGEF domain containing G2 | 090924 | 128016 | 105193 | 28, 22, 20 |
| 19 | PLEKHA4 | pleckstrin homology domain containing A4 | 105559 | 087076 | 087074 | 35, 44, 31 |
| 19 | PLEKHJ1 | pleckstrin homology domain containing J1 | 104886 | 104885 | 104897 | 41, 12, 34 |
| 19 | PHLDB3 | pleckstrin homology like domain family B member 3 | 176531 | 124466 | 105755 | 39, 27, 15 |
| 19 | PRAM1 | PML-RARA regulated adaptor molecule 1 | 133246 | 099783 | 133250 | 5, 39, 40 |
| 19 | PODNL1 | podocan like 1 | 132000 | 132024 | 132017 | 34, 10, 6 |
| 19 | PVR | poliovirus receptor | 073008 | 216588 | 186567 | 45, 17, 30 |
| 19 | PLK5 | polo like kinase 5 | 185988 | 185761 | 181588 | 19, 8, 38 |
| 19 | PNKP | polynucleotide kinase 3′-phosphatase | 039650 | 104960 | 204673 | 9, 27, 20 |
| 19 | PTBP1 | polypyrimidine tract binding protein 1 | 011304 | 099812 | 129951 | 32, 12, 22 |
| 19 | POP4 | POP4 homolog, ribonuclease P/MRP subunit | 105171 | 187135 | 166289 | 27, 3, 21 |
| 19 | KCNN1 | potassium calcium-activated channel subfamily N member 1 | 105642 | 007080 | 105643 | 45, 14, 8 |
| 19 | KCNN4 | potassium calcium-activated channel subfamily N member 4 | 104783 | 105771 | 159871 | 3, 32, 33 |
| 19 | KCTD15 | potassium channel tetramerization domain containing 15 | 153885 | 124302 | 257103 | 45, 29, 15 |
| 19 | KCNK6 | potassium two pore domain channel subfamily K member 6 | 099337 | 167645 | 099338 | 24, 36, 34 |
| 19 | KCNA7 | potassium voltage-gated channel subfamily A member 7 | 104848 | 225950 | 104852 | 25, |
| 19 | KCNC3 | potassium voltage-gated channel subfamily C member 3 | 131398 | 105357 | 131408 | 29, 18, 12 |
| 19 | KCNJ14 | potassium voltage-gated channel subfamily J member 14 | 182324 | 105447 | 268465 | 27, 14, 5 |
| 19 | POU2F2 | POU class 2 homeobox 2 | 028277 | 105732 | 160570 | 22, 41, 23 |
| 19 | PPAN-P2RY11 | PPAN-P2RY11 readthrough | 243207 | 130812 | 130810 | |
| 19 | PPP5D1 | PPP5 tetratricopeptide repeat domain containing 1 | 230510 | 182013 | 204851 | |
| 19 | PSG1 | pregnancy specific beta-1-glycoprotein 1 | 231924 | 124467 | 170848 | 32, 18, 45 |
| 19 | PSG11 | pregnancy specific beta-1-glycoprotein 11 | 243130 | 221878 | 242221 | 32, 45, 10 |
| 19 | PSG2 | pregnancy specific beta-1-glycoprotein 2 | 242221 | 243130 | 204941 | 32, 10, 6 |
| 19 | PSG3 | pregnancy specific beta-1-glycoprotein 3 | 221826 | 124469 | 124467 | 32, 45, 38 |
| 19 | PSG4 | pregnancy specific beta-1-glycoprotein 4 | 243137 | 204941 | 183668 | 32, 29, 35 |
| 19 | PSG5 | pregnancy specific beta-1-glycoprotein 5 | 204941 | 242221 | 243137 | 32, 35, 4 |
| 19 | PSG6 | pregnancy specific beta-1-glycoprotein 6 | 170848 | 231924 | 221878 | 32, 45, 15 |
| 19 | PSG7 | pregnancy specific beta-1-glycoprotein 7 (gene/pseudogene) | 221878 | 170848 | 243130 | 32, 5, |
| 19 | PSG8 | pregnancy specific beta-1-glycoprotein 8 | 124467 | 221826 | 231924 | 32, 37, 40 |
| 19 | PSG9 | pregnancy specific beta-1-glycoprotein 9 | 183668 | 243137 | 204936 | 32, 45, 36 |
| 19 | PRPF31 | pre-mRNA processing factor 31 | 105618 | 105619 | 088038 | 27, 34, 14 |
| 19 | PSENEN | presenilin enhancer gamma-secretase subunit | 205155 | 161265 | 188223 | 30, 7, 29 |
| 19 | PDCD2L | programmed cell death 2 like | 126249 | 266953 | 126261 | 41, 3, 38 |
| 19 | PDCD5 | programmed cell death 5 | 105185 | 178904 | 105186 | 10, 33, 44 |
| 19 | PROSER3 | proline and serine rich 3 | 167595 | 004776 | 004777 | 18, 38, 37 |
| 19 | PRODH2 | proline dehydrogenase 2 | 250799 | 004777 | 161270 | 17, 19, |
| 19 | PRR12 | proline rich 12 | 126464 | 126460 | 126458 | 14, 4, 31 |
| 19 | PRR19 | proline rich 19 | 188368 | 079462 | 167619 | 41, 22, 38 |
| 19 | PRR22 | proline rich 22 | 212123 | 174898 | 267157 | 37, 38, 6 |
| 19 | PRR36 | proline rich 36 | 183248 | 142459 | 171017 | 26, 14, 8 |
| 19 | PRRG2 | proline rich and Gla domain 2 | 126460 | 142546 | 126464 | 3, 27, 40 |
| 19 | PCSK4 | proprotein convertase subtilisin/kexin type 4 | 115257 | 119559 | 115255 | 38, 39, 24 |
| 19 | PTGER1 | prostaglandin E receptor 1 | 160951 | 123143 | 123159 | 17, 28, 36 |
| 19 | PTGIR | prostaglandin I2 (prostacyclin) receptor (IP) | 160013 | 160014 | 167414 | 7, 1, 5 |
| 19 | PTOV1 | prostate tumor overexpressed 1 | 104960 | 104973 | 039650 | 20, 14, 27 |
| 19 | PRSS57 | protease, serine 57 | 185198 | 070404 | 099864 | 7, 5, 38 |
| 19 | PSMC4 | proteasome 26S subunit, ATPase 4 | 013275 | 275395 | 187187 | 27, 28, 21 |
| 19 | PSMD8 | proteasome 26S subunit, non-ATPase 8 | 099341 | 099338 | 179168 | 5, 29, 16 |
| 19 | PRMT1 | protein arginine methyltransferase 1 | 126457 | 126453 | 224420 | 21, 3, 35 |
| 19 | PIAS4 | protein inhibitor of activated STAT 4 | 105229 | 167658 | 178951 | 38, 26, 12 |
| 19 | PRKCG | protein kinase C gamma | 126583 | 179820 | 105605 | 8, 39, 17 |
| 19 | PRKCSH | protein kinase C substrate 80K-H | 130175 | 198003 | 196361 | 39, 36, 45 |
| 19 | PRKACA | protein kinase cAMP-activated catalytic subunit alpha | 072062 | 141858 | 105011 | 26, 31, 36 |
| 19 | PRKD2 | protein kinase D2 | 105287 | 197380 | 090372 | 39, 36, 42 |
| 19 | PKN1 | protein kinase N1 | 123143 | 123136 | 160951 | 21, 41, 34 |
| 19 | PPP1R14A | protein phosphatase 1 regulatory inhibitor subunit 14A | 167641 | 167642 | 267748 | 43, 15, 28 |
| 19 | PPP1R12C | protein phosphatase 1 regulatory subunit 12C | 125503 | 131037 | 105048 | 29, 34, 26 |
| 19 | PPP1R13L | protein phosphatase 1 regulatory subunit 13 like | 104881 | 104884 | 117877 | 37, 23, 44 |
| 19 | PPP1R15A | protein phosphatase 1 regulatory subunit 15A | 087074 | 105559 | 104804 | 13, 41, 4 |
| 19 | PPP1R37 | protein phosphatase 1 regulatory subunit 37 | 104866 | 007047 | 179846 | |
| 19 | PPP2R1A | protein phosphatase 2 scaffold subunit Aalpha | 105568 | 196267 | 196214 | 2, 36, 8 |
| 19 | PPP5C | protein phosphatase 5 catalytic subunit | 011485 | 124440 | 169515 | 4, 35, 43 |
| 19 | PPP6R1 | protein phosphatase 6 regulatory subunit 1 | 105063 | 180089 | 133265 | 41, 21, 35 |
| 19 | PPM1N | protein phosphatase, Mg2+/Mn2+ dependent 1N (putative) | 213889 | 125744 | 125753 | 10, 34, 22 |
| 19 | PTPRH | protein tyrosine phosphatase, receptor type H | 080031 | 129990 | 180089 | 36, 42, 16 |
| 19 | PTPRS | protein tyrosine phosphatase, receptor type S | 105426 | 127663 | 283229 | 18, 33, 6 |
| 19 | PRTN3 | proteinase 3 | 196415 | 172232 | 197561 | 5, 7, |
| 19 | PPFIA3 | PTPRF interacting protein alpha 3 | 177380 | 221916 | 130528 | 26, 6, 3 |
| 19 | P2RY11 | purinergic receptor P2Y11 | 244165 | 130810 | 130811 | 21, 5, 35 |
| 19 | PCP2 | Purkinje cell protein 2 | 174788 | 268400 | 076944 | 14, 38, 40 |
| 19 | PGPEP1 | pyroglutamyl-peptidase I | 130517 | 130520 | 130513 | 17, 34, 1 |
| 19 | QTRT1 | queuine tRNA-ribosyltransferase catalytic subunit 1 | 213339 | 129351 | 079805 | 26, 21, 3 |
| 19 | R3HDM4 | R3H domain containing 4 | 198858 | 175221 | 116014 | 41, 34, 5 |
| 19 | RABAC1 | Rab acceptor 1 | 105404 | 076928 | 105409 | 28, 21, 31 |
| 19 | RAB11B | RAB11B, member RAS oncogene family | 185236 | 167772 | 099785 | 36, 34, 21 |
| 19 | RAB3A | RAB3A, member RAS oncogene family | 105649 | 254858 | 105650 | 8, 14, 26 |
| 19 | RAB3D | RAB3D, member RAS oncogene family | 105514 | 130167 | 105518 | 1, 27, 29 |
| 19 | RAB4B | RAB4B, member RAS oncogene family | 167578 | 268975 | 171570 | |
| 19 | RAB4B-EGLN2 | RAB4B-EGLN2 readthrough (NMD candidate) | 171570 | 167578 | 269858 | |
| 19 | RAB8A | RAB8A, member RAS oncogene family | 167461 | 167460 | 196684 | 21, 13, 35 |
| 19 | RAD23A | RAD23 homolog A, nucleotide excision repair protein | 179262 | 179218 | 179271 | 3, 34, 6 |
| 19 | RSPH6A | radial spoke head 6 homolog A | 104941 | 185800 | 125755 | 38, |
| 19 | RGL3 | ral guanine nucleotide dissociation stimulator like 3 | 205517 | 187266 | 198003 | 40, 29, 36 |
| 19 | RANBP3 | RAN binding protein 3 | 031823 | 105519 | 087903 | 39, 3, 38 |
| 19 | RINL | Ras and Rab interactor like | 187994 | 104824 | 068903 | 41, 26, 28 |
| 19 | RASGRP4 | RAS guanyl releasing protein 4 | 171777 | 130244 | 196218 | 7, 5, 36 |
| 19 | RASIP1 | Ras interacting protein 1 | 105538 | 176909 | 182264 | 9, 43, 27 |
| 19 | RASAL3 | RAS protein activator like 3 | 105122 | 011451 | 161031 | 5, 41, 1 |
| 19 | REEP6 | receptor accessory protein 6 | 115255 | 115257 | 185761 | 38, 7, 27 |
| 19 | RGS9BP | regulator of G-protein signaling 9 binding protein | 186326 | 105186 | 213965 | 15, 14, 33 |
| 19 | RFXANK | regulatory factor X associated ankyrin containing protein | 064490 | 254901 | 184162 | 21, 34, 22 |
| 19 | RFX1 | regulatory factor X1 | 132005 | 132017 | 171136 | |
| 19 | RFX2 | regulatory factor X2 | 087903 | 031823 | 130377 | |
| 19 | RRAS | related RAS viral (r-ras) oncogene homolog | 126458 | 126464 | 126461 | 33, 21, 25 |
| 19 | RLN3 | relaxin 3 | 171136 | 132005 | 104998 | 38, |
| 19 | RELB | RELB proto-oncogene, NF-kB subunit | 104856 | 104853 | 104859 | 21, 36, 22 |
| 19 | RETN | resistin | 104918 | 076944 | 183019 | 7, 5, 16 |
| 19 | RFPL4A | ret finger protein like 4A | 223638 | 185792 | 229292 | |
| 19 | RFPL4AL1 | ret finger protein like 4A like 1 | 229292 | 223638 | 179873 | |
| 19 | RTBDN | retbindin | 132026 | 104889 | 105613 | 14, 39, 6 |
| 19 | RCN3 | reticulocalbin 3 | 142552 | 104870 | 142546 | 6, 15, 27 |
| 19 | RTN2 | reticulon 2 | 125744 | 125740 | 213889 | 25, 26, 29 |
| 19 | RAX2 | retina and anterior neural fold homeobox 2 | 173976 | 183617 | 007264 | 14, |
| 19 | RDH13 | retinol dehydrogenase 13 | 160439 | 088053 | 131037 | |
| 19 | RDH8 | retinol dehydrogenase 8 (all-trans) | 080511 | 080573 | 130813 | 14, 35, 25 |
| 19 | ARHGAP33 | Rho GTPase activating protein 33 | 004777 | 167595 | 250799 | 22, 8, 27 |
| 19 | ARHGAP35 | Rho GTPase activating protein 35 | 160007 | 042753 | 130751 | 22, 26, 40 |
| 19 | ARHGAP45 | Rho GTPase activating protein 45 | 180448 | 064687 | 099817 | 39, 21, 41 |
| 19 | ARHGEF1 | Rho guanine nucleotide exchange factor 1 | 076928 | 105369 | 105404 | |
| 19 | ARHGEF18 | Rho/Rac guanine nucleotide exchange factor 18 | 104880 | 268861 | 104883 | 21, 22, 27 |
| 19 | RHPN2 | rhophilin Rho GTPase binding protein 2 | 131941 | 131944 | 076650 | 42, 37, 27 |
| 19 | RNASEH2A | ribonuclease H2 subunit A | 104889 | 167815 | 132026 | 21, 41, 9 |
| 19 | RAVER1 | ribonucleoprotein, PTB binding 1 | 161847 | 267303 | 076662 | 21, 9, 26 |
| 19 | RPL13A | ribosomal protein L13a | 142541 | 090554 | 142534 | 41, 43, 21 |
| 19 | RPL18 | ribosomal protein L18 | 063177 | 177202 | 063176 | 41, 21, 43 |
| 19 | RPL18A | ribosomal protein L18a | 105640 | 105639 | 105641 | 41, 12, 21 |
| 19 | RPL28 | ribosomal protein L28 | 108107 | 233493 | 108106 | 41, 27, 21 |
| 19 | RPL36 | ribosomal protein L36 | 130255 | 160633 | 174917 | 31, 43, 7 |
| 19 | RPS11 | ribosomal protein S11 | 142534 | 142541 | 104870 | 18, 43, 7 |
| 19 | RPS15 | ribosomal protein S15 | 115268 | 071626 | 115266 | 43, 41, 31 |
| 19 | RPS16 | ribosomal protein S16 | 105193 | 090924 | 196235 | 28, 43, 27 |
| 19 | RPS19 | ribosomal protein S19 | 105372 | 142025 | 105369 | 30, 43, 33 |
| 19 | RPS28 | ribosomal protein S28 | 233927 | 267855 | 186994 | |
| 19 | RPS5 | ribosomal protein S5 | 083845 | 152475 | 269855 | 41, 43, 21 |
| 19 | RPS9 | ribosomal protein S9 | 170889 | 170892 | 204577 | 7, 41, 27 |
| 19 | RNF126 | ring finger protein 126 | 070423 | 070388 | 070404 | 41, 3, 9 |
| 19 | RNF225 | ring finger protein 225 | 269855 | 083845 | 171574 | 38, |
| 19 | RBM42 | RNA binding motif protein 42 | 126254 | 249115 | 105672 | 21, 35, 27 |
| 19 | REXO1 | RNA exonuclease 1 homolog | 079313 | 130270 | 129911 | 26, 18, 4 |
| 19 | POLR2E | RNA polymerase II subunit E | 099817 | 180448 | 167468 | 41, 1, 21 |
| 19 | POLR2I | RNA polymerase II subunit I | 105258 | 105261 | 105254 | 29, 15, 11 |
| 19 | POLRMT | RNA polymerase mitochondrial | 099821 | 099822 | 070388 | 38, 29, 27 |
| 19 | RUVBL2 | RuvB like AAA ATPase 2 | 183207 | 104812 | 104826 | 21, 38, 9 |
| 19 | RYR1 | ryanodine receptor 1 | 196218 | 171777 | 104814 | 18, 25, 30 |
| 19 | SAFB | scaffold attachment factor B | 160633 | 130254 | 130255 | 39, 21, 29 |
| 19 | SAFB2 | scaffold attachment factor B2 | 130254 | 223573 | 160633 | 34, 26, 14 |
| 19 | SSC5D | scavenger receptor cysteine rich family member with 5 domains | 179954 | 090971 | 187550 | 1, 6, 36 |
| 19 | SCGB2B2 | secretoglobin family 2B member 2 | 205209 | 142279 | 089335 | 27, 14, 38 |
| 19 | SCAMP4 | secretory carrier membrane protein 4 | 227500 | 129968 | 213638 | 13, 1, 36 |
| 19 | SELENOV | selenoprotein V | 186838 | 090932 | 176401 | 12, 38, |
| 19 | SELENOW | selenoprotein W | 178980 | 105373 | 178928 | |
| 19 | SEMA6B | semaphorin 6B | 167680 | 171236 | 185361 | 30, 37, 35 |
| 19 | SPINT2 | serine peptidase inhibitor, Kunitz type 2 | 167642 | 011332 | 167641 | 27, 28, 37 |
| 19 | SRRM5 | serine/arginine repetitive matrix 5 | 226763 | 124444 | 131116 | 34, 38, 36 |
| 19 | STK11 | serine/threonine kinase 11 | 118046 | 064932 | 099625 | 34, 21, 33 |
| 19 | SERTAD1 | SERTA domain containing 1 | 197019 | 105227 | 167565 | 27, 41, 6 |
| 19 | SERTAD3 | SERTA domain containing 3 | 167565 | 197019 | 090013 | 27, 26, 12 |
| 19 | SARS2 | seryl-tRNA synthetase 2, mitochondrial | 104835 | 262484 | 269547 | 41, 5, 3 |
| 19 | SH2D3A | SH2 domain containing 3A | 125731 | 125733 | 141968 | 9, 4, 24 |
| 19 | SHANK1 | SH3 and multiple ankyrin repeat domains 1 | 161681 | 235034 | 105472 | 2, 23, 8 |
| 19 | SBK2 | SH3 domain binding kinase family member 2 | 187550 | 179954 | 231274 | 12, |
| 19 | SBK3 | SH3 domain binding kinase family member 3 | 231274 | 187550 | 218891 | 38, |
| 19 | SH3GL1 | SH3 domain containing GRB2 like 1, endophilin A2 | 141985 | 008382 | 167670 | 21, 34, 41 |
| 19 | SHKBP1 | SH3KBP1 binding protein 1 | 160410 | 160460 | 090006 | 36, 21, 40 |
| 19 | SHC2 | SHC adaptor protein 2 | 129946 | 183186 | 181781 | 26, 15, 2 |
| 19 | SHISA7 | shisa family member 7 | 187902 | 108106 | 063241 | 8, 17, 12 |
| 19 | SIGLEC10 | sialic acid binding Ig like lectin 10 | 142512 | 262874 | 105366 | 36, 41, 5 |
| 19 | SIGLEC11 | sialic acid binding Ig like lectin 11 | 161640 | 169136 | 105053 | 36, 27, 2 |
| 19 | SIGLEC12 | sialic acid binding Ig like lectin 12 (gene/pseudogene) | 254521 | 213822 | 105492 | 15, 36, 37 |
| 19 | SIGLEC14 | sialic acid binding Ig like lectin 14 | 254415 | 268500 | 182310 | 5, 32, 22 |
| 19 | SIGLEC5 | sialic acid binding Ig like lectin 5 | 105501 | 105497 | 268500 | 5, 36, 4 |
| 19 | SIGLEC6 | sialic acid binding Ig like lectin 6 | 105492 | 254521 | 105497 | 32, 42, 44 |
| 19 | SIGLEC7 | sialic acid binding Ig like lectin 7 | 168995 | 129450 | 105383 | 36, 5, 2 |
| 19 | SIGLEC8 | sialic acid binding Ig like lectin 8 | 105366 | 142512 | 213822 | 30, 36, 39 |
| 19 | SIGLEC9 | sialic acid binding Ig like lectin 9 | 129450 | 142544 | 168995 | 5, 6, 30 |
| 19 | SIGLECL1 | SIGLEC family like 1 | 179213 | 105383 | 142549 | 38, 14, 8 |
| 19 | SIPA1L3 | signal induced proliferation associated 1 like 3 | 105738 | 171804 | 011332 | 22, 29, 26 |
| 19 | SPPL2B | signal peptide peptidase like 2B | 005206 | 130332 | 178297 | 38, 7, 26 |
| 19 | STAP2 | signal transducing adaptor family member 2 | 178078 | 105255 | 008382 | 29, 16, 3 |
| 19 | SIN3B | SIN3 transcription regulator family member B | 127511 | 188039 | 127533 | 26, 22, 32 |
| 19 | SSBP4 | single stranded DNA binding protein 4 | 130511 | 175489 | 105655 | 3, 34, 28 |
| 19 | SIRT2 | sirtuin 2 | 068903 | 187994 | 104825 | 15, 8, 25 |
| 19 | SIRT6 | sirtuin 6 | 077463 | 060566 | 089847 | 27, 3, 36 |
| 19 | SIX5 | SIX homeobox 5 | 177045 | 237452 | 104936 | 12, 26, 2 |
| 19 | SGTA | small glutamine rich tetratricopeptide repeat containing alpha | 104969 | 141873 | 172009 | 21, 26, 34 |
| 19 | SMIM17 | small integral membrane protein 17 | 268182 | 197951 | 127903 | 8, 12, |
| 19 | SMIM24 | small integral membrane protein 24 | 095932 | 141905 | 129932 | |
| 19 | SMIM7 | small integral membrane protein 7 | 214046 | 268790 | 072954 | 34, 30, 13 |
| 19 | SNRPD2 | small nuclear ribonucleoprotein D2 polypeptide | 125743 | 010310 | 011478 | 29, 7, 43 |
| 19 | SNRPA | small nuclear ribonucleoprotein polypeptide A | 077312 | 188493 | 268975 | 21, 3, 26 |
| 19 | SNRNP70 | small nuclear ribonucleoprotein U1 subunit 70 | 104852 | 104848 | 104863 | 3, 44, 39 |
| 19 | SNAPC2 | small nuclear RNA activating complex polypeptide 2 | 104976 | 260001 | 178531 | 9, 33, 34 |
| 19 | SMG9 | SMG9, nonsense mediated mRNA decay factor | 105771 | 124449 | 104783 | 38, 43, 26 |
| 19 | SCN1B | sodium voltage-gated channel beta subunit 1 | 105711 | 089351 | 105707 | 25, 23, 14 |
| 19 | SLC1A5 | solute carrier family 1 member 5 | 105281 | 181027 | 280050 | 27, 3, 16 |
| 19 | SLC1A6 | solute carrier family 1 member 6 | 105143 | 127529 | 160994 | 38, 8, 37 |
| 19 | SLC17A7 | solute carrier family 17 member 7 | 104888 | 261949 | 104872 | 14, 8, 27 |
| 19 | SLC25A23 | solute carrier family 25 member 23 | 125648 | 181240 | 130545 | 40, 9, 14 |
| 19 | SLC25A41 | solute carrier family 25 member 41 | 181240 | 088247 | 125648 | 37, 38, 8 |
| 19 | SLC25A42 | solute carrier family 25 member 42 | 181035 | 105676 | 064545 | 9, 17, 15 |
| 19 | SLC27A1 | solute carrier family 27 member 1 | 130304 | 171773 | 130313 | 26, 11, 27 |
| 19 | SLC27A5 | solute carrier family 27 member 5 | 083807 | 083838 | 119574 | 19, 1, 31 |
| 19 | SLC35E1 | solute carrier family 35 member E1 | 127526 | 085872 | 105085 | 11, 23, 33 |
| 19 | SLC39A3 | solute carrier family 39 member 3 | 141873 | 267001 | 104969 | 21, 9, 6 |
| 19 | SLC44A2 | solute carrier family 44 member 2 | 129353 | 129354 | 129351 | 36, 38, 32 |
| 19 | SLC5A5 | solute carrier family 5 member 5 | 105641 | 105640 | 007080 | 25, 14, 8 |
| 19 | SLC6A16 | solute carrier family 6 member 16 | 063127 | 130529 | 104894 | 38, 26, 24 |
| 19 | SLC7A10 | solute carrier family 7 member 10 | 130876 | 130881 | 245848 | 1, 15, 8 |
| 19 | SLC7A9 | solute carrier family 7 member 9 | 021488 | 173809 | 121289 | 17, 37, 16 |
| 19 | SLC8A2 | solute carrier family 8 member A2 | 118160 | 105419 | 118162 | 8, 28, 14 |
| 19 | SPC24 | SPC24, NDC80 kinetochore complex component | 161888 | 130164 | 197256 | 21, 39, 27 |
| 19 | SPTBN4 | spectrin beta, non-erythrocytic 4 | 160460 | 090013 | 160410 | 26, 28, 2 |
| 19 | SYNE4 | spectrin repeat containing nuclear envelope family member 4 | 181392 | 205138 | 239382 | 31, 23, 39 |
| 19 | SPACA4 | sperm acrosome associated 4 | 177202 | 105523 | 063177 | 38, 8, |
| 19 | SPACA6 | sperm acrosome associated 6 | 182310 | 254415 | 105509 | 28, 2, 38 |
| 19 | SPHK2 | sphingosine kinase 2 | 063176 | 063177 | 105516 | 24, 8, 42 |
| 19 | S1PR2 | sphingosine-1-phosphate receptor 2 | 267534 | 130816 | 105364 | 22, 29, 21 |
| 19 | S1PR4 | sphingosine-1-phosphate receptor 4 | 125910 | 060558 | 125912 | |
| 19 | S1PR5 | sphingosine-1-phosphate receptor 5 | 180739 | 079999 | 130734 | 36, 8, 34 |
| 19 | SPIB | Spi-B transcription factor | 269404 | 142539 | 086967 | 41, 21, 22 |
| 19 | SF3A2 | splicing factor 3a subunit 2 | 104897 | 104886 | 104899 | 21, 26, 9 |
| 19 | SPRED3 | sprouty related EVH1 domain containing 3 | 188766 | 179168 | 130244 | 31, 28, 14 |
| 19 | SUPT5H | SPT5 homolog, DSIF elongation factor subunit | 196235 | 105193 | 105197 | 42, 43, 38 |
| 19 | SHD | Src homology 2 domain containing transforming protein D | 105251 | 105248 | 167664 | 3, 25, 8 |
| 19 | SCAF1 | SR-related CTD associated factor 1 | 126461 | 126458 | 126456 | 21, 14, 12 |
| 19 | SAMD1 | sterile alpha motif domain containing 1 | 141858 | 188032 | 072062 | 12, |
| 19 | SAMD4B | sterile alpha motif domain containing 4B | 179134 | 130755 | 006712 | 28, 26, 18 |
| 19 | SBNO2 | strawberry notch homolog 2 | 064932 | 167468 | 118046 | 34, 27, 1 |
| 19 | STRN4 | striatin 4 | 090372 | 105287 | 181027 | 36, 34, 4 |
| 19 | SDHAF1 | succinate dehydrogenase complex assembly factor 1 | 205138 | 126243 | 181392 | 27, 35, 16 |
| 19 | SULT2A1 | sulfotransferase family 2A member 1 | 105398 | 105392 | 188334 | 2, 19, 29 |
| 19 | SULT2B1 | sulfotransferase family 2B member 1 | 088002 | 142235 | 105523 | 33, 32, 3 |
| 19 | SAE1 | SUMO1 activating enzyme subunit 1 | 142230 | 130749 | 105327 | 10, 38, |
| 19 | SBSN | suprabasin | 189001 | 161249 | 105679 | 18, 35, 24 |
| 19 | SUGP1 | SURP and G-patch domain containing 1 | 105705 | 213996 | 129933 | 39, 38, 36 |
| 19 | SUGP2 | SURP and G-patch domain containing 2 | 064607 | 051128 | 105676 | |
| 19 | SMARCA4 | SWI/SNF related, matrix associated, actin dependent | 127616 | 142444 | 130164 | 43, 18, 21 |
| | | regulator of chromatin, subfamily a, member 4 | | | | |
| 19 | SWSAP1 | SWIM-type zinc finger 7 associated protein 1 | 173928 | 105520 | 187266 | 3, 32, 20 |
| 19 | SYMPK | symplekin | 125755 | 104941 | 170608 | 43, 38, 4 |
| 19 | SYDE1 | synapse defective Rho GTPase homolog 1 | 105137 | 094661 | 105135 | 34, 32, 6 |
| 19 | SYNGR4 | synaptogyrin 4 | 105467 | 161558 | 105438 | 3, 38, 10 |
| 19 | SYCE2 | synaptonemal complex central element protein 2 | 161860 | 105607 | 179115 | 21, 38, 32 |
| 19 | SYT3 | synaptotagmin 3 | 213023 | 131409 | 235034 | 2, 22, 14 |
| 19 | SYT5 | synaptotagmin 5 | 129990 | 167646 | 080031 | |
| 19 | SYCN | syncoilin | 179751 | 188505 | 197110 | 28, 38, |
| 19 | STX10 | syntaxin 10 | 104915 | 160877 | 160888 | 1, 43, 20 |
| 19 | STXBP2 | syntaxin binding protein 2 | 076944 | 174788 | 104918 | 5, 39, 9 |
| 19 | TARM1 | T cell-interacting, activating receptor on myeloid cells 1 | 248385 | 189068 | 170909 | 10, 38, |
| 19 | TBC1D17 | TBC1 domain family member 17 | 104946 | 204673 | 104951 | 2, 39, 36 |
| 19 | TFPT | TCF3 fusion partner | 105619 | 170906 | 105618 | 1, 13, 29 |
| 19 | TEAD2 | TEA domain transcription factor 2 | 074219 | 104894 | 104901 | 34, 1, 29 |
| 19 | TSHZ3 | teashirt zinc finger homeobox 3 | 121297 | 198597 | 168813 | 45, 29, 1 |
| 19 | TEX101 | testis expressed 101 | 131126 | 204936 | 124466 | 38, 14, 8 |
| 19 | TSSK6 | testis specific serine kinase 6 | 178093 | 167491 | 186010 | 38, 4, 27 |
| 19 | TSKS | testis specific serine kinase substrate | 126467 | 169169 | 196961 | 38, 32, 28 |
| 19 | TPRX1 | tetrapeptide repeat homeobox 1 | 178928 | 178980 | 105392 | 14, 38, |
| 19 | TSPAN16 | tetraspanin 16 | 130167 | 130173 | 105514 | 38, 5, 8 |
| 19 | TTC9B | tetratricopeptide repeat domain 9B | 174521 | 130758 | 105219 | 6, 8, 14 |
| 19 | THAP8 | THAP domain containing 8 | 161277 | 105270 | 075702 | 25, 38, 35 |
| 19 | THEG | theg spermatid protein | 105549 | 105556 | 183186 | 38, 23, 20 |
| 19 | THOP1 | thimet oligopeptidase 1 | 172009 | 104969 | 172006 | 41, 27, 3 |
| 19 | TBXA2R | thromboxane A2 receptor | 006638 | 179855 | 105298 | 17, 44, 39 |
| 19 | TRIP10 | thyroid hormone receptor interactor 10 | 125733 | 125734 | 125731 | 25, 18, 6 |
| 19 | TJP3 | tight junction protein 3 | 105289 | 186111 | 011132 | 42, 27, 24 |
| 19 | TINCR | Tissue differentiation-inducing non-protein coding RNA | 223573 | 105428 | 130254 | 32, 15, 33 |
| 19 | TNFAIP8L1 | TNF alpha induced protein 8 like 1 | 185361 | 167680 | 074842 | 27, 15, 36 |
| 19 | TICAM1 | toll like receptor adaptor molecule 1 | 127666 | 141965 | 105355 | 21, 6, 22 |
| 19 | TRAPPC2B | Trafficking protein particle complex 2B | 256060 | 152433 | 268133 | |
| 19 | TRAPPC5 | trafficking protein particle complex 5 | 181029 | 269711 | 104921 | 34, 20, 22 |
| 19 | TRAPPC6A | trafficking protein particle complex 6A | 007255 | 179846 | 189114 | 22, 1, 6 |
| 19 | TECR | trans-2,3-enoyl-CoA reductase | 099797 | 132002 | 099795 | 1, 9, 13 |
| 19 | TCF3 | transcription factor 3 | 071564 | 127540 | 205922 | 22, 21, 41 |
| 19 | TLE2 | transducin like enhancer of split 2 | 065717 | 104953 | 104964 | 33, 23, 14 |
| 19 | TLE6 | transducin like enhancer of split 6 | 104953 | 175691 | 065717 | 3, 21, 2 |
| 19 | TGFB1 | transforming growth factor beta 1 | 105329 | 105323 | 142039 | 34, 5, 6 |
| 19 | TGFBR3L | transforming growth factor beta receptor 3 like | 260001 | 076984 | 104976 | 44, 28, 14 |
| 19 | TRPM4 | transient receptor potential cation channel subfamily | 130529 | 130528 | 063127 | 26, 41, 33 |
| | | M member 4 | | | | |
| 19 | TIMM13 | translocase of inner mitochondrial membrane 13 | 099800 | 178297 | 176619 | 2, 25, 33 |
| 19 | TIMM29 | translocase of inner mitochondrial membrane 29 | 142444 | 130733 | 127616 | |
| 19 | TIMM44 | translocase of inner mitochondrial membrane 44 | 104980 | 178531 | 066044 | 3, 13, 43 |
| 19 | TIMM50 | translocase of inner mitochondrial membrane 50 | 105197 | 196235 | 090932 | 38, 12, |
| 19 | TOMM40 | translocase of outer mitochondrial membrane 40 | 130204 | 130202 | 130203 | 41, 37, 34 |
| 19 | TM6SF2 | transmembrane 6 superfamily member 2 | 213996 | 187664 | 105705 | 16, 27, 19 |
| 19 | TMIGD2 | transmembrane and immunoglobulin domain containing 2 | 167664 | 105251 | 105255 | 6, 39, 32 |
| 19 | TMC4 | transmembrane channel like 4 | 167608 | 105617 | 125505 | 33, 27, 23 |
| 19 | TMED1 | transmembrane p24 trafficking protein 1 | 099203 | 079805 | 214212 | 9, 35, 31 |
| 19 | TMPRSS9 | transmembrane protease, serine 9 | 178297 | 005206 | 099800 | |
| 19 | TMEM143 | transmembrane protein 143 | 161558 | 142227 | 105467 | 15, 39, 13 |
| 19 | TMEM145 | transmembrane protein 145 | 167619 | 188368 | 105429 | 14, 12, 8 |
| 19 | TMEM147 | transmembrane protein 147 | 105677 | 105679 | 105675 | 1, 3, 28 |
| 19 | TMEM150B | transmembrane protein 150B | 180061 | 160469 | 133247 | 5, 17, 16 |
| 19 | TMEM160 | transmembrane protein 160 | 130748 | 130751 | 130749 | 1, 28, 26 |
| 19 | TMEM161A | transmembrane protein 161A | 064545 | 181035 | 064489 | 9, 13, 21 |
| 19 | TMEM190 | transmembrane protein 190 | 160472 | 095752 | 233493 | 30, 38, 27 |
| 19 | TMEM205 | transmembrane protein 205 | 105518 | 105514 | 183401 | 29, 27, 41 |
| 19 | TMEM221 | transmembrane protein 221 | 188051 | 141971 | 269035 | 37, 23, 17 |
| 19 | TMEM238 | transmembrane protein 238 | 233493 | 160472 | 108107 | 17, 16, 23 |
| 19 | TMEM259 | transmembrane protein 259 | 182087 | 116032 | 064666 | 29, 22, 21 |
| 19 | TMEM38A | transmembrane protein 38A | 072954 | 214046 | 188039 | 18, 25, 21 |
| 19 | TMEM59L | transmembrane protein 59 like | 105696 | 006015 | 167487 | 8, 34, 31 |
| 19 | TMEM86B | transmembrane protein 86B | 180089 | 080031 | 105063 | 41, 6, 39 |
| 19 | TMEM91 | transmembrane protein 91 | 142046 | 255730 | 123810 | 40, 14, 17 |
| 19 | TNPO2 | transportin 2 | 105576 | 132004 | 123144 | 7, 41, 43 |
| 19 | TRIM28 | tripartite motif containing 28 | 130726 | 119574 | 130724 | 27, 35, 21 |
| 19 | TRMT1 | tRNA methyltransferase 1 | 104907 | 104903 | 160877 | 36, 2, 39 |
| 19 | TSEN34 | tRNA splicing endonuclease subunit 34 | 170892 | 125505 | 170889 | 27, 43, 6 |
| 19 | TPM4 | tropomyosin 4 | 167460 | 176231 | 167461 | 6, 23, 19 |
| 19 | TNNI3 | troponin I3, cardiac type | 129991 | 105048 | 267110 | 15, 20, 19 |
| 19 | TNNT1 | troponin T1, slow skeletal type | 105048 | 125503 | 129991 | 25, 24, 15 |
| 19 | TULP2 | tubby like protein 2 | 104804 | 087074 | 104805 | 38, 33, 19 |
| 19 | TUBB4A | tubulin beta 4A class IVa | 104833 | 205744 | 125657 | 8, 2, 17 |
| 19 | TBCB | tubulin folding cofactor B | 105254 | 105258 | 126247 | 28, 41, 35 |
| 19 | TPGS1 | tubulin polyglutamylase complex subunit 1 | 141933 | 099866 | 099804 | 22, 28, 37 |
| 19 | TDRD12 | tudor domain containing 12 | 173809 | 213965 | 021488 | |
| 19 | TNFSF14 | tumor necrosis factor superfamily member 14 | 125735 | 125726 | 125730 | 19, 36, 23 |
| 19 | TNFSF9 | tumor necrosis factor superfamily member 9 | 125657 | 104833 | 125726 | 9, 26, 37 |
| 19 | TTYH1 | tweety family member 1 | 167614 | 167613 | 167615 | 8, 26, 38 |
| 19 | TYROBP | TYRO protein tyrosine kinase binding protein | 011600 | 126264 | 126243 | 24, 1, 11 |
| 19 | TYK2 | tyrosine kinase 2 | 105397 | 076662 | 105401 | 43, 42, 39 |
| 19 | U2AF1L4 | U2 small nuclear RNA auxiliary factor 1 like 4 | 161265 | 267120 | 205155 | 29, 36, 22 |
| 19 | U2AF2 | U2 small nuclear RNA auxiliary factor 2 | 063244 | 173581 | 063245 | 34, 22, 14 |
| 19 | UQCR11 | ubiquinol-cytochrome c reductase, complex III subunit XI | 127540 | 267059 | 071564 | 25, 15, 43 |
| 19 | UQCRFS1 | ubiquinol-cytochrome c reductase, Rieske iron-sulfur | 169021 | 213096 | 187135 | 2, 24, 27 |
| | | polypeptide 1 | | | | |
| 19 | UBA52 | ubiquitin A-52 residue ribosomal protein fusion product 1 | 221983 | 105700 | 006016 | 12, 25, 43 |
| 19 | UBE2M | ubiquitin conjugating enzyme E2 M | 130725 | 130724 | 099326 | 37, 27, 9 |
| 19 | UBE2S | ubiquitin conjugating enzyme E2 S | 108106 | 108107 | 187902 | 41, 21, 35 |
| 19 | UBL5 | ubiquitin like 5 | 198258 | 127452 | 127445 | 43, 15, 31 |
| 19 | UBA2 | ubiquitin like modifier activating enzyme 2 | 126261 | 126249 | 142279 | 45, 3, 37 |
| 19 | UHRF1 | ubiquitin like with PHD and ring finger domains 1 | 276043 | 205784 | 127663 | 39, 22, 12 |
| 19 | USP29 | ubiquitin specific peptidase 29 | 131864 | 198300 | 141946 | 38, |
| 19 | UBXN6 | UBX domain protein 6 | 167671 | 167670 | 167674 | 34, 29, 26 |
| 19 | B3GNT3 | UDP-GlcNAc: betaGal beta-1,3-N-acetylglucosaminyltransferase 3 | 179913 | 130475 | 248099 | 16, |
| 19 | B3GNT8 | UDP-GlcNAc: betaGal beta-1,3-N-acetylglucosaminyltransferase 8 | 177191 | 248098 | 105341 | |
| 19 | UNC13A | unc-13 homolog A | 130477 | 130309 | 130479 | 26, 31, 8 |
| 19 | USE1 | unconventional SNARE in the ER 1 | 053501 | 099331 | 099330 | 41, 37, 3 |
| 19 | UPF1 | UPF1, RNA helicase and ATPase | 005007 | 105664 | 223802 | 22, 34, 38 |
| 19 | USF2 | upstream transcription factor 2, c-fos interacting | 105698 | 105699 | 105697 | 34, 18, 37 |
| 19 | URI1 | URI1, prefoldin like chaperone | 105176 | 105173 | 198597 | |
| 19 | UPK1A | uroplakin 1A | 105668 | 126267 | 011590 | 4, 33, 44 |
| 19 | USHBP1 | USH1 protein network component harmonin binding protein 1 | 130307 | 269095 | 105393 | 1, 36, 15 |
| 19 | VRK3 | vaccinia related kinase 3 | 105053 | 161640 | 142528 | 38, 21, 39 |
| 19 | VASP | vasodilator-stimulated phosphoprotein | 125753 | 213889 | 125741 | 41, 5, 7 |
| 19 | VAV1 | vav guanine nucleotide exchange factor 1 | 141968 | 125731 | 174837 | 39, 36, 5 |
| 19 | VMAC | vimentin-type intermediate filament associated coiled-coil | 187650 | 267314 | 105519 | 34, 9, 39 |
| | | protein | | | | |
| 19 | VN1R1 | vomeronasal 1 receptor 1 | 178201 | 268163 | 197128 | 36, 33, 8 |
| 19 | VN1R2 | vomeronasal 1 receptor 2 | 196131 | 197928 | 228567 | |
| 19 | VN1R4 | vomeronasal 1 receptor 4 | 228567 | 196131 | 163098 | |
| 19 | VSIG10L | V-set and immunoglobulin domain containing 10 like | 186806 | 142549 | 105379 | 26, 31, 6 |
| 19 | VSTM1 | V-set and transmembrane domain containing 1 | 189068 | 130433 | 248385 | 5, 10, 8 |
| 19 | VSTM2B | V-set and transmembrane domain containing 2B | 187135 | 169021 | 105171 | 8, 32, |
| 19 | WDR18 | WD repeat domain 18 | 065268 | 116017 | 116032 | 9, 27, 5 |
| 19 | WDR62 | WD repeat domain 62 | 075702 | 161277 | 105261 | 38, 22, 21 |
| 19 | WDR83 | WD repeat domain 83 | 123154 | 269590 | 105583 | 1, 43, 6 |
| 19 | WDR83OS | WD repeat domain 83 opposite strand | 105583 | 123154 | 095059 | 29, 31, 30 |
| 19 | WDR87 | WD repeat domain 87 | 171804 | 189144 | 105738 | 38, |
| 19 | WDR88 | WD repeat domain 88 | 166359 | 076650 | 130881 | 38, 14, 8 |
| 19 | WIZ | widely interspaced zinc finger motifs | 011451 | 011243 | 105122 | 34, 35, 14 |
| 19 | WTIP | Wilms tumor 1 interacting protein | 142279 | 126261 | 205209 | 27, 26, 45 |
| 19 | XAB2 | XPA binding protein 2 | 076924 | 076826 | 229833 | 40, 5, 21 |
| 19 | XRCC1 | X-ray repair cross complementing 1 | 073050 | 176472 | 268361 | 21, 14, 9 |
| 19 | YIPF2 | Yip1 domain family member 2 | 130733 | 142453 | 142444 | 26, 33, 9 |
| 19 | YIF1B | Yip1 interacting factor homolog B, membrane trafficking | 167645 | 167644 | 099337 | 26, 27, 6 |
| | | protein | | | | |
| 19 | YJEFN3 | YjeF N-terminal domain containing 3 | 250067 | 258674 | 160161 | 1, 4, 38 |
| 19 | ZFP14 | ZFP14 zinc finger protein | 142065 | 167635 | 181007 | 1, 11, 30 |
| 19 | ZFP28 | ZFP28 zinc finger protein | 196867 | 196263 | 197016 | 25, 6, 40 |
| 19 | ZFP30 | ZFP30 zinc finger protein | 120784 | 180479 | 196381 | 1, 30, 22 |
| 19 | ZFP36 | ZFP36 ring finger protein | 128016 | 063322 | 090924 | 26, 28, 1 |
| 19 | ZFP82 | ZFP82 zinc finger protein | 181007 | 142065 | 186017 | 30, 9, 45 |
| 19 | ZNRF4 | zinc and ring finger 4 | 105428 | 283229 | 223573 | 38, 8, |
| 19 | ZBTB32 | zinc finger and BTB domain containing 32 | 011590 | 105668 | 272333 | |
| 19 | ZBTB45 | zinc finger and BTB domain containing 45 | 119574 | 083807 | 130726 | 37, 36, 3 |
| 19 | ZBTB7A | zinc finger and BTB domain containing 7A | 178951 | 105229 | 126934 | 22, 33, 14 |
| 19 | ZSCAN1 | zinc finger and SCAN domain containing 1 | 152467 | 166704 | 176293 | 14, 38, 8 |
| 19 | ZSCAN18 | zinc finger and SCAN domain containing 18 | 121413 | 176293 | 181894 | 8, 36, 2 |
| 19 | ZSCAN22 | zinc finger and SCAN domain containing 22 | 182318 | 142396 | 121410 | 11, 34, 3 |
| 19 | ZSCAN4 | zinc finger and SCAN domain containing 4 | 180532 | 121417 | 204519 | 32, 44, |
| 19 | ZSCAN5A | zinc finger and SCAN domain containing 5A | 131848 | 204532 | 267710 | 38, 42, 13 |
| 19 | ZSCAN5B | zinc finger and SCAN domain containing 5B | 197213 | 197487 | 204532 | 38, |
| 19 | ZSCAN5C | Zinc finger and SCAN domain containing 5C | 204532 | 197213 | 131848 | |
| 19 | ZC3H4 | zinc finger CCCH-type containing 4 | 130749 | 130748 | 142230 | 26, 34, 29 |
| 19 | ZNF788 | zinc finger family member 788 | 214189 | 223547 | 132010 | 39, 17, 38 |
| 19 | ZIM2 | zinc finger imprinted 2 | 269699 | 127903 | 198300 | |
| 19 | ZIM3 | zinc finger imprinted 3 | 141946 | 131864 | 258873 | |
| 19 | ZNF100 | zinc finger protein 100 | 197020 | 197013 | 198521 | 22, 37, 2 |
| 19 | ZNF101 | zinc finger protein 101 | 181896 | 105726 | 105708 | 36, 39, 3 |
| 19 | ZNF112 | zinc finger protein 112 | 062370 | 159915 | 267173 | 29, 42, 40 |
| 19 | ZNF114 | zinc finger protein 114 | 178150 | 185453 | 105483 | 40, 35, 19 |
| 19 | ZNF121 | zinc finger protein 121 | 197961 | 130818 | 171469 | 31, 3, 10 |
| 19 | ZNF132 | zinc finger protein 132 | 131849 | 171574 | 249471 | 38, 3, 21 |
| 19 | ZNF134 | zinc finger protein 134 | 213762 | 183647 | 121417 | 1, 45, 42 |
| 19 | ZNF135 | zinc finger protein 135 | 176293 | 152467 | 121413 | 31, 26, 25 |
| 19 | ZNF136 | zinc finger protein 136 | 196646 | 257591 | 197857 | 18, 42, 36 |
| 19 | ZNF14 | zinc finger protein 14 | 105708 | 181896 | 081665 | 2, 39, 3 |
| 19 | ZNF146 | zinc finger protein 146 | 167635 | 196357 | 142065 | 42, 22, 4 |
| 19 | ZNF154 | zinc finger protein 154 | 179909 | 269026 | 083814 | 40, 42, 39 |
| 19 | ZNF155 | zinc finger protein 155 | 204920 | 159905 | 159882 | 36, 4, 24 |
| 19 | ZNF160 | zinc finger protein 160 | 170949 | 268964 | 170954 | |
| 19 | ZNF17 | zinc finger protein 17 | 186272 | 268533 | 186230 | 42, 2, 36 |
| 19 | ZNF175 | zinc finger protein 175 | 105497 | 105492 | 105501 | 26, 31, 34 |
| 19 | ZNF177 | zinc finger protein 177 | 188629 | 270011 | 174652 | 8, 39, 38 |
| 19 | ZNF180 | zinc finger protein 180 | 167384 | 278318 | 273777 | 29, 36, 4 |
| 19 | ZNF181 | zinc finger protein 181 | 197841 | 089335 | 153896 | 39, 15, 37 |
| 19 | ZNF20 | zinc finger protein 20 | 132010 | 214189 | 213297 | 38, 41, 39 |
| 19 | ZNF208 | zinc finger protein 208 | 160321 | 198521 | 197134 | 29, 42, 40 |
| 19 | ZNF211 | zinc finger protein 211 | 121417 | 213762 | 180532 | 11, 5, 36 |
| 19 | ZNF221 | zinc finger protein 221 | 159905 | 124459 | 204920 | 45, 37, 14 |
| 19 | ZNF222 | zinc finger protein 222 | 159885 | 159882 | 267022 | 15, 32, 17 |
| 19 | ZNF223 | zinc finger protein 223 | 178386 | 267022 | 186026 | 2, 3, 17 |
| 19 | ZNF224 | zinc finger protein 224 | 267680 | 186026 | 256294 | |
| 19 | ZNF225 | zinc finger protein 225 | 256294 | 267680 | 263002 | 26, 39, 22 |
| 19 | ZNF226 | zinc finger protein 226 | 167380 | 263002 | 131115 | 31, 13, 39 |
| 19 | ZNF227 | zinc finger protein 227 | 131115 | 167380 | 159917 | |
| 19 | ZNF229 | zinc finger protein 229 | 278318 | 267508 | 167384 | 14, 42, 17 |
| 19 | ZNF230 | zinc finger protein 230 | 159882 | 204920 | 159885 | 40, 22, 4 |
| 19 | ZNF233 | zinc finger protein 233 | 159915 | 159917 | 062370 | 26, 11, 24 |
| 19 | ZNF234 | zinc finger protein 234 | 263002 | 256294 | 167380 | 28, 36, 2 |
| 19 | ZNF235 | zinc finger protein 235 | 159917 | 131115 | 159915 | 31, 42, 39 |
| 19 | ZNF253 | zinc finger protein 253 | 256771 | 081665 | 184635 | |
| 19 | ZNF254 | zinc finger protein 254 | 213096 | 213967 | 169021 | 4, 34, 28 |
| 19 | ZNF256 | zinc finger protein 256 | 152454 | 196724 | 177025 | 1, 45, 4 |
| 19 | ZNF257 | zinc finger protein 257 | 197134 | 160321 | 196109 | 39, 17, 45 |
| 19 | ZNF260 | zinc finger protein 260 | 254004 | 186017 | 186020 | 11, 4, 12 |
| 19 | ZNF264 | zinc finger protein 264 | 083844 | 258873 | 105146 | 36, 43, 2 |
| 19 | ZNF266 | zinc finger protein 266 | 174652 | 188629 | 198028 | 40, 16, 22 |
| 19 | ZNF274 | zinc finger protein 274 | 171606 | 181894 | 198131 | 39, 29, 42 |
| 19 | ZNF28 | zinc finger protein 28 | 198538 | 189190 | 204604 | |
| 19 | ZNF283 | zinc finger protein 283 | 167637 | 159871 | 176222 | 13, 42, 40 |
| 19 | ZNF284 | zinc finger protein 284 | 186026 | 178386 | 267680 | 36, 6, 8 |
| 19 | ZNF285 | zinc finger protein 285 | 267508 | 267173 | 278318 | 36, 15, 40 |
| 19 | ZNF296 | zinc finger protein 296 | 170684 | 104859 | 142252 | 21, 3, 28 |
| 19 | ZNF30 | zinc finger protein 30 | 168661 | 153896 | 180884 | 22, 23, 7 |
| 19 | ZNF302 | zinc finger protein 302 | 089335 | 205209 | 197841 | 11, 2, 22 |
| 19 | ZNF304 | zinc finger protein 304 | 131845 | 178229 | 152433 | 45, 23, 37 |
| 19 | ZNF317 | zinc finger protein 317 | 130803 | 170920 | 188000 | 43, 24, 42 |
| 19 | ZNF320 | zinc finger protein 320 | 182986 | 204604 | 283088 | 42, 29, 18 |
| 19 | ZNF324 | zinc finger protein 324 | 083812 | 249471 | 083838 | 39, 24, 8 |
| 19 | ZNF324B | zinc finger protein 324B | 249471 | 131849 | 083812 | 2, 27, 38 |
| 19 | ZNF329 | zinc finger protein 329 | 181894 | 121413 | 171606 | 11, 23, 31 |
| 19 | ZNF331 | zinc finger protein 331 | 130844 | 198346 | 204595 | 24, 12, 39 |
| 19 | ZNF333 | zinc finger protein 333 | 160961 | 131355 | 127507 | 1, 27, 8 |
| 19 | ZNF345 | zinc finger protein 345 | 251247 | 197863 | 185869 | 39, 38, 24 |
| 19 | ZNF347 | zinc finger protein 347 | 197937 | 170954 | 197497 | 42, 25, 5 |
| 19 | ZNF350 | zinc finger protein 350 | 256683 | 176024 | 197619 | 2, 13, 25 |
| 19 | ZNF358 | zinc finger protein 358 | 198816 | 267952 | 090674 | 27, 28, 25 |
| 19 | ZNF382 | zinc finger protein 382 | 161298 | 186020 | 197808 | 30, 23, 38 |
| 19 | ZNF383 | zinc finger protein 383 | 188283 | 245680 | 181666 | |
| 19 | ZNF404 | zinc finger protein 404 | 176222 | 167637 | 124459 | 13, 14, 28 |
| 19 | ZNF414 | zinc finger protein 414 | 133250 | 133246 | 142347 | 29, 22, 34 |
| 19 | ZNF415 | zinc finger protein 415 | 170954 | 170949 | 197937 | 29, 38, 8 |
| 19 | ZNF416 | zinc finger protein 416 | 083817 | 251369 | 171649 | 1, 22, 9 |
| 19 | ZNF417 | zinc finger protein 417 | 173480 | 269476 | 196724 | 18, 6, 40 |
| 19 | ZNF418 | zinc finger protein 418 | 196724 | 173480 | 152454 | 39, 38, 22 |
| 19 | ZNF419 | zinc finger protein 419 | 105136 | 197128 | 268107 | 45, 39, 41 |
| 19 | ZNF420 | zinc finger protein 420 | 197050 | 198453 | 267360 | 1, 26, 39 |
| 19 | ZNF426 | zinc finger protein 426 | 130818 | 198028 | 197961 | 4, 13, 3 |
| 19 | ZNF428 | zinc finger protein 428 | 131116 | 226763 | 105767 | 26, 44, 12 |
| 19 | ZNF429 | zinc finger protein 429 | 197013 | 269237 | 197020 | |
| 19 | ZNF43 | zinc finger protein 43 | 198521 | 197020 | 160321 | 39, 38, 23 |
| 19 | ZNF430 | zinc finger protein 430 | 118620 | 105750 | 160352 | 36, 4, 31 |
| 19 | ZNF431 | zinc finger protein 431 | 196705 | 160352 | 182141 | 1, 31, 39 |
| 19 | ZNF432 | zinc finger protein 432 | 256087 | 142556 | 197608 | 5, 42, 28 |
| 19 | ZNF433 | zinc finger protein 433 | 197647 | 197054 | 257355 | 38, 12, 19 |
| 19 | ZNF439 | zinc finger protein 439 | 171291 | 171295 | 198429 | |
| 19 | ZNF44 | zinc finger protein 44 | 197857 | 196646 | 188868 | 1, 30, 41 |
| 19 | ZNF440 | zinc finger protein 440 | 171295 | 177599 | 171291 | 24, 42, 2 |
| 19 | ZNF441 | zinc finger protein 441 | 197044 | 197933 | 177599 | 4, 40, 23 |
| 19 | ZNF442 | zinc finger protein 442 | 198342 | 188868 | 268744 | 42, 2, 36 |
| 19 | ZNF443 | zinc finger protein 443 | 180855 | 268870 | 269755 | 36, 4, 39 |
| 19 | ZNF444 | zinc finger protein 444 | 167685 | 142409 | 197487 | 34, 39, 36 |
| 19 | ZNF446 | zinc finger protein 446 | 083838 | 083812 | 083807 | 43, 4, 26 |
| 19 | ZNF45 | zinc finger protein 45 | 124459 | 176222 | 159905 | 29, 42, 24 |
| 19 | ZNF460 | zinc finger protein 460 | 197714 | 204524 | 178229 | 40, 42, 1 |
| 19 | ZNF461 | zinc finger protein 461 | 197808 | 161298 | 189042 | 4, 22, 42 |
| 19 | ZNF468 | zinc finger protein 468 | 204604 | 198538 | 182986 | 42, 32, 3 |
| 19 | ZNF470 | zinc finger protein 470 | 197016 | 196867 | 197951 | 26, 14, 2 |
| 19 | ZNF471 | zinc finger protein 471 | 196263 | 198046 | 196867 | 2, 33, 15 |
| 19 | ZNF473 | zinc finger protein 473 | 142528 | 105053 | 161652 | 38, 26, 3 |
| 19 | ZNF480 | zinc finger protein 480 | 198464 | 196214 | 167554 | 24, 28, 39 |
| 19 | ZNF486 | zinc finger protein 486 | 256229 | 213988 | 237440 | 40, 27, 32 |
| 19 | ZNF490 | zinc finger protein 490 | 188033 | 269693 | 173875 | 29, 21, 7 |
| 19 | ZNF491 | zinc finger protein 491 | 177599 | 197044 | 171295 | 38, 14, 8 |
| 19 | ZNF492 | zinc finger protein 492 | 229676 | 197360 | 213973 | 25, 17, 38 |
| 19 | ZNF493 | zinc finger protein 493 | 196268 | 172687 | 269237 | 42, 2, 40 |
| 19 | ZNF497 | zinc finger protein 497 | 174586 | 121410 | 152475 | 27, 14, 22 |
| 19 | ZNF506 | zinc finger protein 506 | 081665 | 105708 | 256771 | 3, 39, 42 |
| 19 | ZNF507 | zinc finger protein 507 | 168813 | 121297 | 178904 | 11, 22, 31 |
| 19 | ZNF524 | zinc finger protein 524 | 171443 | 179943 | 261221 | 37, 28, 10 |
| 19 | ZNF525 | zinc finger protein 525 | 203326 | 163098 | 213799 | 4, 22, 30 |
| 19 | ZNF526 | zinc finger protein 526 | 167625 | 160570 | 105723 | 41, 39, 6 |
| 19 | ZNF527 | zinc finger protein 527 | 189164 | 181666 | 196437 | 36, 37, 45 |
| 19 | ZNF528 | zinc finger protein 528 | 167555 | 221923 | 198633 | 42, 7, 36 |
| 19 | ZNF529 | zinc finger protein 529 | 186020 | 254004 | 161298 | |
| 19 | ZNF530 | zinc finger protein 530 | 183647 | 171649 | 213762 | 7, 33, 37 |
| 19 | ZNF534 | zinc finger protein 534 | 198633 | 167555 | 258405 | |
| 19 | ZNF536 | zinc finger protein 536 | 198597 | 105176 | 121297 | 8, 30, 35 |
| 19 | ZNF540 | zinc finger protein 540 | 171817 | 188227 | 180479 | 8, 29, 39 |
| 19 | ZNF541 | zinc finger protein 541 | 118156 | 105402 | 063169 | 2, 35, 17 |
| 19 | ZNF543 | zinc finger protein 543 | 178229 | 197714 | 131845 | 40, 30, 24 |
| 19 | ZNF544 | zinc finger protein 544 | 198131 | 171606 | 283515 | 24, 38, 13 |
| 19 | ZNF546 | zinc finger protein 546 | 187187 | 013275 | 128000 | 31, 36, 38 |
| 19 | ZNF547 | zinc finger protein 547 | 152433 | 131845 | 256060 | 1, 30, 43 |
| 19 | ZNF548 | zinc finger protein 548 | 188785 | 268133 | 269533 | 38, 13, 39 |
| 19 | ZNF549 | zinc finger protein 549 | 121406 | 152439 | 251369 | 40, 45, 42 |
| 19 | ZNF550 | zinc finger protein 550 | 251369 | 121406 | 083817 | 1, 31, 6 |
| 19 | ZNF551 | zinc finger protein 551 | 204519 | 180532 | 269026 | 1, 25, 42 |
| 19 | ZNF552 | zinc finger protein 552 | 178935 | 083828 | 268750 | 40, 33, 36 |
| 19 | ZNF554 | zinc finger protein 554 | 172006 | 172009 | 186300 | 26, 33, 36 |
| 19 | ZNF555 | zinc finger protein 555 | 186300 | 172006 | 172000 | 3, 23, 38 |
| 19 | ZNF556 | zinc finger protein 556 | 172000 | 186300 | 171970 | 25, 19, 12 |
| 19 | ZNF557 | zinc finger protein 557 | 130544 | 182315 | 171105 | 29, 40, 45 |
| 19 | ZNF558 | zinc finger protein 558 | 167785 | 181733 | 170948 | 13, 31, 37 |
| 19 | ZNF559 | zinc finger protein 559 | 188321 | 196110 | 270011 | |
| 19 | ZNF560 | zinc finger protein 560 | 198028 | 174652 | 130818 | 6, 38, 35 |
| 19 | ZNF561 | zinc finger protein 561 | 171469 | 197961 | 279471 | 42, 45, 44 |
| 19 | ZNF562 | zinc finger protein 562 | 171466 | 279471 | 224689 | 40, 45, 13 |
| 19 | ZNF563 | zinc finger protein 563 | 188868 | 197857 | 198342 | 24, 38, 7 |
| 19 | ZNF564 | zinc finger protein 564 | 249709 | 196826 | 269693 | 31, 45, 24 |
| 19 | ZNF565 | zinc finger protein 565 | 196357 | 161281 | 167635 | |
| 19 | ZNF566 | zinc finger protein 566 | 186017 | 181007 | 254004 | 13, 4, 45 |
| 19 | ZNF567 | zinc finger protein 567 | 189042 | 197808 | 267041 | 11, 27, 39 |
| 19 | ZNF568 | zinc finger protein 568 | 198453 | 185869 | 197050 | |
| 19 | ZNF569 | zinc finger protein 569 | 196437 | 189164 | 171827 | 31, 24, 42 |
| 19 | ZNF57 | zinc finger protein 57 | 171970 | 172000 | 175691 | 9, 3, 21 |
| 19 | ZNF570 | zinc finger protein 570 | 171827 | 196437 | 188227 | 38, |
| 19 | ZNF571 | zinc finger protein 571 | 180479 | 171817 | 120784 | 26, 25, 38 |
| 19 | ZNF573 | zinc finger protein 573 | 189144 | 198182 | 171804 | 11, 25, 39 |
| 19 | ZNF574 | zinc finger protein 574 | 105732 | 105737 | 028277 | 21, 38, 41 |
| 19 | ZNF575 | zinc finger protein 575 | 176472 | 105755 | 073050 | 36, 40, 16 |
| 19 | ZNF576 | zinc finger protein 576 | 124444 | 167378 | 226763 | 43, 26, 2 |
| 19 | ZNF577 | zinc finger protein 577 | 161551 | 187474 | 283617 | 11, 33, 38 |
| 19 | ZNF578 | zinc finger protein 578 | 258405 | 198633 | 198482 | 31, 45, 38 |
| 19 | ZNF579 | zinc finger protein 579 | 218891 | 231274 | 179943 | 12, 21, 44 |
| 19 | ZNF580 | zinc finger protein 580 | 213015 | 179922 | 171425 | 34, 28, 3 |
| 19 | ZNF581 | zinc finger protein 581 | 171425 | 213015 | 173581 | 1, 43, 41 |
| 19 | ZNF582 | zinc finger protein 582 | 018869 | 267710 | 198440 | 36, 17, 38 |
| 19 | ZNF583 | zinc finger protein 583 | 198440 | 018869 | 198046 | |
| 19 | ZNF584 | zinc finger protein 584 | 171574 | 269855 | 131849 | 3, 2, 36 |
| 19 | ZNF585A | zinc finger protein 585A | 196967 | 267360 | 245680 | |
| 19 | ZNF585B | zinc finger protein 585B | 245680 | 196967 | 188283 | 2, 7, 45 |
| 19 | ZNF586 | zinc finger protein 586 | 083828 | 152443 | 178935 | 39, 26, 11 |
| 19 | ZNF587 | zinc finger protein 587 | 198466 | 204514 | 269476 | 1, 4, 23 |
| 19 | ZNF587B | zinc finger protein 587B | 269343 | 268750 | 204514 | 29, 13, 23 |
| 19 | ZNF599 | zinc finger protein 599 | 153896 | 197841 | 168661 | 26, 31, 17 |
| 19 | ZNF600 | zinc finger protein 600 | 189190 | 213020 | 198538 | 30, 21, 37 |
| 19 | ZNF606 | zinc finger protein 606 | 166704 | 177025 | 152467 | 39, 4, 44 |
| 19 | ZNF607 | zinc finger protein 607 | 198182 | 267552 | 189144 | 37, 42, 38 |
| 19 | ZNF610 | zinc finger protein 610 | 167554 | 198464 | 221923 | 2, 14, 38 |
| 19 | ZNF611 | zinc finger protein 611 | 213020 | 167766 | 189190 | 33, 42, 36 |
| 19 | ZNF613 | zinc finger protein 613 | 176024 | 198093 | 256683 | |
| 19 | ZNF614 | zinc finger protein 614 | 142556 | 197619 | 256087 | 34, 4, 45 |
| 19 | ZNF615 | zinc finger protein 615 | 197619 | 256683 | 142556 | 42, 39, 9 |
| 19 | ZNF616 | zinc finger protein 616 | 204611 | 197608 | 196267 | |
| 19 | ZNF625 | zinc finger protein 625 | 257591 | 213297 | 196646 | 29, 24, 6 |
| 19 | ZNF626 | zinc finger protein 626 | 188171 | 237440 | 160229 | 34, 11, 42 |
| 19 | ZNF627 | zinc finger protein 627 | 198551 | 130165 | 102575 | |
| 19 | ZNF628 | zinc finger protein 628 | 197483 | 283567 | 090971 | 35, 4, 38 |
| 19 | ZNF649 | zinc finger protein 649 | 198093 | 283617 | 176024 | 13, 42, 1 |
| 19 | ZNF653 | zinc finger protein 653 | 161914 | 267477 | 130159 | 27, 29, 15 |
| 19 | ZNF66 | Zinc finger protein 66 | 160229 | 188171 | 105750 | 45, 37, 38 |
| 19 | ZNF665 | zinc finger protein 665 | 197497 | 197937 | 197928 | |
| 19 | ZNF667 | zinc finger protein 667 | 198046 | 198440 | 196263 | 31, 1, 25 |
| 19 | ZNF671 | zinc finger protein 671 | 083814 | 179909 | 152443 | 36, 39, 11 |
| 19 | ZNF675 | zinc finger protein 675 | 197372 | 167232 | 196172 | 30, 23, 13 |
| 19 | ZNF676 | zinc finger protein 676 | 196109 | 197134 | 196350 | 29, 4, 40 |
| 19 | ZNF677 | zinc finger protein 677 | 197928 | 197497 | 196131 | 2, 20, 33 |
| 19 | ZNF681 | zinc finger protein 681 | 196172 | 197372 | 213967 | 26, 45, 42 |
| 19 | ZNF682 | zinc finger protein 682 | 197124 | 184635 | 213988 | 15, 40, 7 |
| 19 | ZNF69 | zinc finger protein 69 | 198429 | 171291 | 196757 | 40, 7, 16 |
| 19 | ZNF699 | zinc finger protein 699 | 196110 | 237521 | 188321 | 31, 40, 5 |
| 19 | ZNF700 | zinc finger protein 700 | 196757 | 198429 | 267179 | 1, 13, 29 |
| 19 | ZNF701 | zinc finger protein 701 | 167562 | 198482 | 167766 | 40, 30, 21 |
| 19 | ZNF708 | zinc finger protein 708 | 182141 | 196705 | 172687 | 42, 30, 22 |
| 19 | ZNF709 | zinc finger protein 709 | 242852 | 269755 | 196826 | 2, 5, 20 |
| 19 | ZNF71 | zinc finger protein 71 | 197951 | 197016 | 268182 | 43, 26, 15 |
| 19 | ZNF714 | zinc finger protein 714 | 160352 | 118620 | 196705 | 40, 39, 25 |
| 19 | ZNF724 | Zinc finger protein 724 | 196081 | 183850 | 283201 | 36, 44, 17 |
| 19 | ZNF726 | zinc finger protein 726 | 213967 | 196172 | 213096 | 7, 27, 14 |
| 19 | ZNF728 | zinc finger protein 728 | 269067 | 213973 | 183850 | 7, 38, 37 |
| 19 | ZNF729 | zinc finger protein 729 | 196350 | 196109 | 197360 | 38, |
| 19 | ZNF730 | zinc finger protein 730 | 183850 | 269067 | 196081 | 38, 12, 39 |
| 19 | ZNF737 | zinc finger protein 737 | 237440 | 256229 | 188171 | 23, 41, 4 |
| 19 | ZNF738 | Zinc finger protein 738 | 172687 | 182141 | 196268 | 12, 21, 22 |
| 19 | ZNF749 | zinc finger protein 749 | 186230 | 186272 | 268163 | 35, 39, 30 |
| 19 | ZNF761 | zinc finger protein 761 | 160336 | 196417 | 198346 | 29, 18, 33 |
| 19 | ZNF763 | zinc finger protein 763 | 197054 | 267179 | 197647 | 36, 23, 6 |
| 19 | ZNF765 | zinc finger protein 765 | 196417 | 213799 | 160336 | 29, 21, 18 |
| 19 | ZNF766 | zinc finger protein 766 | 196214 | 105568 | 198464 | 4, 15, 43 |
| 19 | ZNF77 | zinc finger protein 77 | 175691 | 171970 | 104953 | 2, 27, 15 |
| 19 | ZNF772 | zinc finger protein 772 | 197128 | 178201 | 105136 | 31, 45, 36 |
| 19 | ZNF773 | zinc finger protein 773 | 152439 | 268107 | 121406 | 2, 25, 24 |
| 19 | ZNF776 | zinc finger protein 776 | 152443 | 083814 | 083828 | 39, 2, 22 |
| 19 | ZNF780A | zinc finger protein 780A | 197782 | 128000 | 130758 | 13, 4, 24 |
| 19 | ZNF780B | zinc finger protein 780B | 128000 | 187187 | 197782 | 26, 31, 32 |
| 19 | ZNF781 | zinc finger protein 781 | 196381 | 120784 | 267552 | 9, 45, 36 |
| 19 | ZNF784 | zinc finger protein 784 | 179922 | 261221 | 213015 | 31, 39, 4 |
| 19 | ZNF787 | zinc finger protein 787 | 142409 | 171487 | 167685 | 1, 27, 3 |
| 19 | ZNF790 | zinc finger protein 790 | 197863 | 267041 | 251247 | 23, 28, 30 |
| 19 | ZNF791 | zinc finger protein 791 | 173875 | 188033 | 269242 | 36, 45, 24 |
| 19 | ZNF792 | zinc finger protein 792 | 180884 | 168661 | 089351 | 26, 36, 22 |
| 19 | ZNF793 | zinc finger protein 793 | 188227 | 171827 | 171817 | 29, 13, 28 |
| 19 | ZNF799 | zinc finger protein 799 | 196466 | 268744 | 268870 | 3, 42, 36 |
| 19 | ZNF8 | zinc finger protein 8 | 278129 | 283515 | 267216 | |
| 19 | ZNF805 | zinc finger protein 805 | 204524 | 105146 | 197714 | 31, 15, 40 |
| 19 | ZNF808 | zinc finger protein 808 | 198482 | 258405 | 167562 | 21, 29, 39 |
| 19 | ZNF812P | Zinc finger protein 812, pseudogene | 224689 | 171466 | 196605 | 24, 18, 42 |
| 19 | ZNF813 | zinc finger protein 813 | 198346 | 160336 | 130844 | 16, 42, 24 |
| 19 | ZNF814 | zinc finger protein 814 | 204514 | 269343 | 198466 | 38, 10, |
| 19 | ZNF816 | zinc finger protein 816 | 180257 | 221874 | 269526 | 42, 40, 39 |
| 19 | ZNF823 | zinc finger protein 823 | 197933 | 102575 | 197044 | 45, 17, 15 |
| 19 | ZNF829 | zinc finger protein 829 | 185869 | 251247 | 198453 | 29, 4, 32 |
| 19 | ZNF83 | zinc finger protein 83 | 167766 | 167562 | 213020 | 26, 2, 24 |
| 19 | ZNF835 | zinc finger protein 835 | 127903 | 268182 | 269699 | 22, 17, 8 |
| 19 | ZNF836 | zinc finger protein 836 | 196267 | 204611 | 105568 | 1, 29, 2 |
| 19 | ZNF837 | zinc finger protein 837 | 152475 | 174586 | 083845 | 41, 2, 44 |
| 19 | ZNF841 | zinc finger protein 841 | 197608 | 256087 | 204611 | 30, 29, 33 |
| 19 | ZNF844 | zinc finger protein 844 | 223547 | 257446 | 214189 | 2, 42, 27 |
| 19 | ZNF845 | zinc finger protein 845 | 213799 | 203326 | 196417 | 41, 14, 4 |
| 19 | ZNF846 | zinc finger protein 846 | 196605 | 224689 | 127452 | |
| 19 | ZNF85 | zinc finger protein 85 | 105750 | 160229 | 118620 | 39, 38, 15 |
| 19 | ZNF850 | zinc finger protein 850 | 267041 | 189042 | 197863 | 32, 7, 6 |
| 19 | ZNF865 | zinc finger protein 865 | 261221 | 171443 | 179922 | 34, 29, 21 |
| 19 | ZNF878 | zinc finger protein 878 | 257446 | 257355 | 223547 | 28, |
| 19 | ZNF880 | zinc finger protein 880 | 221923 | 167554 | 167555 | 30, 29, 25 |
| 19 | ZNF90 | zinc finger protein 90 | 213988 | 197124 | 256229 | 18, 33, 12 |
| 19 | ZNF91 | zinc finger protein 91 | 167232 | 283201 | 197372 | |
| 19 | ZNF93 | zinc finger protein 93 | 184635 | 256771 | 197124 | |
| 19 | ZNF98 | zinc finger protein 98 | 197360 | 196350 | 229676 | |
| 19 | ZNF99 | zinc finger protein 99 | 213973 | 229676 | 269067 | 38, |
| 19 | ZIK1 | zinc finger protein interacting with K protein 1 | 171649 | 083817 | 183647 | 39, 22, 33 |
| 19 | ZFR2 | zinc finger RNA binding protein 2 | 105278 | 007264 | 167654 | 14, 12, 38 |
| 19 | ZSWIM4 | zinc finger SWIM-type containing 4 | 132003 | 280221 | 187556 | 40, 27, 33 |
| 19 | ZGLP1 | zinc finger, GATA-like protein 1 | 220201 | 105376 | 167807 | 3, 37, 28 |
| 19 | ZNF559-ZNF177 | ZNF559-ZNF177 readthrough | 270011 | 188321 | 188629 | |
| 19 | ZNF625-ZNF20 | ZNF625-ZNF20 readthrough (NMD candidate) | 213297 | 132010 | 257591 | |
| 19 | ZNF816-ZNF321P | ZNF816-ZNF321P readthrough | 221874 | 283088 | 180257 | 42, 23, 12 |

[0067] Table 9 provides the gene information for the genes found on Chromosomes 20-22, MT, X and Y.

TABLE 9
Genes on Chromosomes 20-22, MT, X and Y

| | | | | Up | Down | Tissue |
|---|---|---|---|---|---|---|
| Chr. | Gene Symbol | Gene Name | ENSG | ENSG | ENSG | Code |
| 20 | XRN2 | 5′-3′ exoribonuclease 2 | 088930 | 088970 | 125816 | 42, 43, 18 |
| 20 | AAR2 | AAR2 splicing factor homolog | 131043 | 088367 | 080845 | 9, 35, 2 |
| 20 | ABHD12 | abhydrolase domain containing 12 | 100997 | 100994 | 101003 | 26, 27, 34 |
| 20 | ABHD16B | abhydrolase domain containing 16B | 183260 | 130584 | 101150 | 38, 7, 23 |
| 20 | ACTL10 | actin like 10 | 182584 | 149609 | 101412 | 33, 36, 16 |
| 20 | ADNP | activity dependent neuroprotector homeobox | 101126 | 124243 | 000419 | 22, 3, 18 |
| 20 | ACSS1 | acyl-CoA synthetase short-chain family member 1 | 154930 | 101474 | 100987 | 7, 26, 24 |
| 20 | ACSS2 | acyl-CoA synthetase short-chain family member 2 | 131069 | 131067 | 100983 | 21, 24, 2 |
| 20 | ACOT8 | acyl-CoA thioesterase 8 | 101473 | 124104 | 132801 | 39, 29, 22 |
| 20 | ADAM33 | ADAM metallopeptidase domain 33 | 149451 | 125861 | 088827 | 44, 1, 42 |
| 20 | AP5S1 | adaptor related protein complex 5 sigma 1 subunit | 125843 | 101224 | 088888 | 3, 40, 20 |
| 20 | ASXL1 | additional sex combs like 1, transcriptional regulator | 171456 | 101350 | 197183 | 22, 29, 40 |
| 20 | ADA | adenosine deaminase | 196839 | 168734 | 064205 | 5, 22, 43 |
| 20 | AHCY | adenosylhomocysteinase | 101444 | 101440 | 078747 | 13, 21, 7 |
| 20 | ADRM1 | adhesion regulating molecule 1 | 130706 | 130703 | 130702 | 35, 27, 9 |
| 20 | APMAP | adipocyte plasma membrane associated protein | 101474 | 077984 | 154930 | 40, 1, 5 |
| 20 | ADIG | adipogenin | 182035 | 170471 | 124143 | 38 |
| 20 | ARFGAP1 | ADP ribosylation factor GTPase activating protein 1 | 101199 | 101198 | 101203 | |
| 20 | ARFGEF2 | ADP ribosylation factor guanine nucleotide exchange factor 2 | 124198 | 124126 | 124207 | 1, 29, 9 |
| 20 | ARFRP1 | ADP ribosylation factor related protein 1 | 101246 | 243509 | 197114 | |
| 20 | ADRA1D | adrenoceptor alpha 1D | 171873 | 088826 | 171867 | 6, 23, 33 |
| 20 | ASIP | agouti signaling protein | 101440 | 125977 | 101444 | 15 |
| 20 | TTPAL | alpha tocopherol transfer protein like | 124120 | 101076 | 132824 | 11, 29, 24 |
| 20 | NPEPL1 | aminopeptidase-like 1 | 215440 | 254995 | 087460 | 10, 16, 12 |
| 20 | ANGPT4 | angiopoietin 4 | 101280 | 125898 | 101282 | 38, 44, 32 |
| 20 | ANKEF1 | ankyrin repeat and EF-hand domain containing 1 | 132623 | 101349 | 132639 | 38, 27, 42 |
| 20 | ANKRD60 | ankyrin repeat domain 60 | 124227 | 124237 | 124209 | |
| 20 | APCDD1L | APC down-regulated 1 like | 198768 | 124164 | 124222 | 13, 10, 6 |
| 20 | AVP | arginine vasopressin | 101200 | 101405 | 185019 | 17, 8 |
| 20 | ACTR5 | ARP5 actin-related protein 5 homolog | 101442 | 101438 | 101445 | 3, 27, 38 |
| 20 | ATP5E | ATP synthase, H+ transporting, mitochondrial F1 complex, epsilon subunit | 124172 | 101162 | 101166 | 41, 19, 31 |
| 20 | ATP9A | ATPase phospholipid transporting 9A (putative) | 054793 | 101096 | 101115 | 26, 31, 18 |
| 20 | ATRN | attractin | 088812 | 088854 | 125861 | 1, 30, 40 |
| 20 | AURKA | aurora kinase A | 087586 | 124098 | 101138 | 13, 9, 6 |
| 20 | BPI | bactericidal/permeability-increasing protein | 101425 | 149633 | 129988 | |
| 20 | BIRC7 | baculoviral IAP repeat containing 7 | 101197 | 149658 | 101198 | 35, 14, 12 |
| 20 | BANF2 | barrier to autointegration factor 2 | 125888 | 125844 | 089006 | 11, 38, 10 |
| 20 | BHLHE23 | basic helix-loop-helix family member e23 | 125533 | 101194 | 149658 | |
| 20 | BCL2L1 | BCL2 like 1 | 171552 | 131055 | 088325 | 19, 37, 27 |
| 20 | BFSP1 | beaded filament structural protein 1 | 125864 | 125851 | 283253 | 14, 19, 6 |
| 20 | B4GALT5 | beta-1,4-galactosyltransferase 5 | 158470 | 124212 | 197818 | 27, 6, 42 |
| 20 | BLCAP | bladder cancer associated protein | 166619 | 197122 | 053438 | |
| 20 | BMP2 | bone morphogenetic protein 2 | 125845 | 101311 | 101323 | 18, 9, 15 |
| 20 | BMP7 | bone morphogenetic protein 7 | 101144 | 087510 | 054796 | 15, 21, 14 |
| 20 | BPIFA1 | BPI fold containing family A member 1 | 198183 | 131059 | 125999 | 30, 18, 20 |
| 20 | BPIFA2 | BPI fold containing family A member 2 | 131050 | 186191 | 131059 | 34, 25, 23 |
| 20 | BPIFA3 | BPI fold containing family A member 3 | 131059 | 131050 | 198183 | 38, 14, 8 |
| 20 | BPIFB1 | BPI fold containing family B member 1 | 125999 | 198183 | 101391 | 30, 18, 23 |
| 20 | BPIFB2 | BPI fold containing family B member 2 | 078898 | 167098 | 167104 | 42, 34, 18 |
| 20 | BPIFB3 | BPI fold containing family B member 3 | 186190 | 167104 | 186191 | |
| 20 | BPIFB4 | BPI fold containing family B member 4 | 186191 | 186190 | 131050 | 30, 19, 6 |
| 20 | BPIFB6 | BPI fold containing family B member 6 | 167104 | 078898 | 186190 | |
| 20 | BCAS1 | breast carcinoma amplified sequence 1 | 064787 | 171940 | 019186 | 8, 42, 4 |
| 20 | BCAS4 | breast carcinoma amplified sequence 4 | 124243 | 124171 | 101126 | 22, 21, 4 |
| 20 | BTBD3 | BTB domain containing 3 | 132640 | 101384 | 172296 | 8, 37, 11 |
| 20 | CDH22 | cadherin 22 | 149654 | 101017 | 080189 | 26, 28, 18 |
| 20 | CDH26 | cadherin 26 | 124215 | 132825 | 179242 | 42, 24, 4 |
| 20 | CDH4 | cadherin 4 | 179242 | 124215 | 130699 | 14, 8, 12 |
| 20 | PKIG | cAMP-dependent protein kinase inhibitor gamma | 168734 | 132824 | 196839 | 29, 41, 18 |
| 20 | CPXM1 | carboxypeptidase X, M14 family member 1 | 088882 | 088881 | 241690 | 34, 12, 44 |
| 20 | CRLS1 | cardiolipin synthase 1 | 088766 | 125885 | 125872 | 19, 17, 20 |
| 20 | CASS4 | Cas scaffolding protein family member 4 | 087589 | 101138 | 022277 | 5, 32, 37 |
| 20 | CSNK2A1 | casein kinase 2 alpha 1 | 101266 | 125875 | 125878 | 24, 39, 13 |
| 20 | CTNNBL1 | catenin beta like 1 | 132792 | 053438 | 132821 | 13, 21, 41 |
| 20 | CTSA | cathepsin A | 064601 | 124257 | 100979 | 2, 35, 16 |
| 20 | CTSZ | cathepsin Z | 101160 | 101158 | 101162 | 37, 16, 23 |
| 20 | CBFA2T2 | CBFA2/RUNX1 translocation partner 2 | 078699 | 101400 | 125967 | 37, 33, 27 |
| 20 | CEBPB | CCAAT/enhancer binding protein beta | 172216 | 240849 | 196396 | 26, 3, 21 |
| 20 | CTCFL | CCCTC-binding factor like | 124092 | 132819 | 124253 | 34, 7, 38 |
| 20 | CCM2L | COM2 like scaffolding protein | 101331 | 260903 | 101336 | 36, 1, 26 |
| 20 | CD40 | CD40 molecule | 101017 | 124160 | 149654 | 22, 21, 41 |
| 20 | CD93 | CD93 molecule | 125810 | 178726 | 132661 | 43, 1, 32 |
| 20 | CABLES2 | Cdk5 and Abl enzyme substrate 2 | 149679 | 171858 | 130701 | 38, 18, 32 |
| 20 | CDK5RAP1 | CDK5 regulatory subunit associated protein 1 | 101391 | 125999 | 101400 | 3, 36, 20 |
| 20 | CDS2 | CDP-diacylglycerol synthase 2 | 101290 | 132646 | 101292 | 13, 26, 38 |
| 20 | CDC25B | cell division cycle 25B | 101224 | 125817 | 125843 | 34, 39, 3 |
| 20 | CENPB | centromere protein B | 125817 | 101222 | 101224 | 34, 35, 14 |
| 20 | CEP250 | centrosomal protein 250 | 126001 | 125965 | 125975 | 22, 16, 18 |
| 20 | CBLN4 | cerebellin 4 precursor | 054803 | 101134 | 124089 | 2, 8, 39 |
| 20 | CHMP4B | charged multivesicular body protein 4B | 101421 | 131061 | 125970 | 16, 18, 11 |
| 20 | CHRNA4 | cholinergic receptor nicotinic alpha 4 subunit | 101204 | 101203 | 075043 | |
| 20 | CHD6 | chromodomain helicase DNA binding protein 6 | 124177 | 183798 | 196090 | 25, 23, 11 |
| 20 | CHGB | chromogranin B | 089199 | 171984 | 089195 | 31, 2, 28 |
| 20 | C20orf141 | chromosome 20 open reading frame 141 | 258713 | 241690 | 198326 | 38, 14, 32 |
| 20 | C20orf144 | chromosome 20 open reading frame 144 | 149609 | 125967 | 182584 | 38, 32, 39 |
| 20 | C20orf173 | chromosome 20 open reading frame 173 | 125975 | 126001 | 125991 | 38, 5, |
| 20 | C20orf194 | chromosome 20 open reading frame 194 | 088854 | 088836 | 088812 | 1, 40, 18 |
| 20 | C20orf196 | chromosome 20 open reading frame 196 | 171984 | 125772 | 089199 | 10, 30, 22 |
| 20 | C20orf202 | chromosome 20 open reading frame 202 | 215595 | 125895 | 244588 | 20, 32, 10 |
| 20 | C20orf24 | chromosome 20 open reading frame 24 | 101084 | 259399 | 101082 | 34, 2, 29 |
| 20 | C20orf27 | chromosome 20 open reading frame 27 | 101220 | 132622 | 101222 | 3, 27, 26 |
| 20 | C20orf85 | chromosome 20 open reading frame 85 | 124237 | 124225 | 124227 | 30, 38, 20 |
| 20 | C20orf96 | chromosome 20 open reading frame 96 | 196476 | 186458 | 247315 | 40, 39, 36 |
| 20 | CSE1L | chromosome segregation 1 like | 124207 | 124198 | 124214 | 38, 42, 24 |
| 20 | CFAP61 | cilia and flagella associated protein 61 | 089101 | 101343 | 173404 | 38, 42, 15 |
| 20 | CSTF1 | cleavage stimulation factor subunit 1 | 101138 | 087586 | 087589 | 13, 2, 5 |
| 20 | COL9A3 | collagen type IX alpha 3 chain | 092758 | 060491 | 101190 | 24, 11, 41 |
| 20 | COL20A1 | collagen type XX alpha 1 chain | 101203 | 101199 | 101204 | 8, 14, 38 |
| 20 | COMMD7 | COMM domain containing 7 | 149600 | 283233 | 088305 | 43, 34, 41 |
| 20 | CPNE1 | copine 1 | 214078 | 061656 | 272897 | 41, 21, 27 |
| 20 | CRNKL1 | crooked neck pre-mRNA splicing factor 1 | 101343 | 173418 | 089101 | 34, 42, 13 |
| 20 | CNBD2 | cyclic nucleotide binding domain containing 2 | 149646 | 171222 | 088367 | 38, 10, 3 |
| 20 | CST11 | cystatin 11 | 125831 | 125823 | 125815 | 38, |
| 20 | CST8 | cystatin 8 | 125815 | 125831 | 101435 | 38, |
| 20 | CST9 | cystatin 9 | 173335 | 101435 | 101439 | 23, |
| 20 | CST9L | cystatin 9-like | 101435 | 125815 | 173335 | 38, 32, |
| 20 | CST3 | cystatin C | 101439 | 173335 | 101441 | 29, 37, 8 |
| 20 | CST5 | cystatin D | 170367 | 170369 | 149435 | 34, 23, |
| 20 | CST7 | cystatin F | 077984 | 101463 | 101474 | 5, 1, 36 |
| 20 | CSTL1 | cystatin like 1 | 125823 | 125814 | 125831 | 42, 38, |
| 20 | CST4 | cystatin S | 101441 | 101439 | 170373 | 34, 14, 25 |
| 20 | CST2 | cystatin SA | 170369 | 170373 | 170367 | 34, 28, 37 |
| 20 | CST1 | cystatin SN | 170373 | 101441 | 170369 | 34, 4, 16 |
| 20 | COX4I2 | cytochrome c oxidase subunit 4I2 | 131055 | 125968 | 171552 | 32, 25, 17 |
| 20 | CYP24A1 | cytochrome P450 family 24 subfamily A member 1 | 019186 | 064787 | 101132 | 11, 33, 18 |
| 20 | DDRGK1 | DDRGK domain containing 1 | 198171 | 088899 | 125877 | 41, 27, 21 |
| 20 | DDX27 | DEAD-box helicase 27 | 124228 | 124214 | 124201 | 13, 21, 3 |
| 20 | DHX35 | DEAH-box helicase 35 | 101452 | 101447 | 204103 | 24, 39, 42 |
| 20 | DIDO1 | death inducer-obliterator 1 | 101191 | 101190 | 101193 | 25, 39, 24 |
| 20 | DEFB115 | defensin beta 115 | 215547 | 175170 | 215545 | |
| 20 | DEFB116 | defensin beta 116 | 215545 | 215547 | 131068 | |
| 20 | DEFB118 | defensin beta 118 | 131068 | 215545 | 180483 | 38, |
| 20 | DEFB119 | defensin beta 119 | 180483 | 131068 | 204548 | |
| 20 | DEFB121 | defensin beta 121 | 204548 | 180483 | 180424 | |
| 20 | DEFB123 | defensin beta 123 | 180424 | 204548 | 180383 | 38, |
| 20 | DEFB124 | defensin beta 124 | 180383 | 180424 | 088320 | |
| 20 | DEFB125 | defensin beta 125 | 178591 | 124209 | 125788 | 38, |
| 20 | DEFB126 | defensin beta 126 | 125788 | 178591 | 088782 | 38, |
| 20 | DEFB127 | defensin beta 127 | 088782 | 125788 | 185982 | 38, |
| 20 | DEFB128 | defensin beta 128 | 185982 | 088782 | 125903 | |
| 20 | DEFB129 | defensin beta 129 | 125903 | 185982 | 186458 | 38, |
| 20 | DEFB132 | defensin beta 132 | 186458 | 125903 | 196476 | 33, |
| 20 | DNTTIP1 | deoxynucleotidyltransferase terminal interacting protein 1 | 101457 | 124116 | 175063 | 33, 37, 9 |
| 20 | DSTN | destrin, actin depolymerizing factor | 125868 | 283253 | 125844 | 43, 13, 26 |
| 20 | DLGAP4 | DLG associated protein 4 | 080845 | 131043 | 101335 | 35, 28, 3 |
| 20 | DNMT3B | DNA methyltransferase 3 beta | 088305 | 149600 | 101367 | |
| 20 | DNAJC5 | DnaJ heat shock protein family (Hsp40) member C5 | 101152 | 101150 | 198276 | 14, 16, 23 |
| 20 | DOK5 | docking protein 5 | 101134 | 280041 | 054803 | 27, 8, 1 |
| 20 | DPM1 | dolichyl-phosphate mannosyltransferase subunit 1, catalytic | 000419 | 101126 | 124217 | 4, 34, 10 |
| 20 | DZANK1 | double zinc ribbon and ankyrin repeat domains 1 | 089091 | 125846 | 132664 | 29, 26, 3 |
| 20 | DSN1 | DSN1 homolog, MIS12 kinetochore complex component | 149636 | 101079 | 149639 | 13, 21, 1 |
| 20 | DTD1 | D-tyrosyl-tRNA deacylase 1 | 125821 | 232388 | 132631 | 10, 31, 41 |
| 20 | DUSP15 | dual specificity phosphatase 15 | 149599 | 179772 | 131044 | 26, 38, 17 |
| 20 | DYNLRB1 | dynein light chain roadblock-type 1 | 125971 | 283472 | 101460 | 29, 27, 43 |
| 20 | DBNDD2 | dysbindin domain containing 2 | 244274 | 124251 | 124155 | 26, 1, 16 |
| 20 | E2F1 | E2F transcription factor 1 | 101412 | 182584 | 101417 | 9, 3, 34 |
| 20 | EBF4 | early B-cell factor 4 | 088881 | 101365 | 088882 | 26, 34, 18 |
| 20 | ENTPD6 | ectonucleoside triphosphate diphosphohydrolase 6 (putative) | 197586 | 100987 | 100994 | 3, 31, 39 |
| 20 | EFCAB8 | EF-hand calcium binding domain 8 | 215529 | 101367 | 167098 | 38, |
| 20 | EMILIN3 | elastin microfibril interfacer 3 | 183798 | 132793 | 124177 | 15, 27, 14 |
| 20 | EDN3 | endothelin 3 | 124205 | 124203 | 087495 | 11, 26, 18 |
| 20 | ELMO2 | engulfment and cell motility 2 | 062598 | 080189 | 198185 | 8, 21, 38 |
| 20 | EPPIN | epididymal peptidase inhibitor | 101448 | 249139 | 158901 | 38, 15, 44 |
| 20 | EPPIN-WFDC6 | EPPIN-WFDC6 readthrough | 249139 | 243543 | 101448 | |
| 20 | EDEM2 | ER degradation enhancing alpha-mannosidase like protein 2 | 088298 | 100991 | 101000 | 21, 36, 5 |
| 20 | ERGIC3 | ERGIC and golgi 3 | 125991 | 125975 | 061656 | 40, 16, 27 |
| 20 | EPB41L1 | erythrocyte membrane protein band 4.1 like 1 | 088367 | 149646 | 131043 | 18, 27, 26 |
| 20 | ESF1 | ESF1 nucleolar pre-rRNA processing protein hemeleg | 089048 | 089123 | 101247 | 19, 1, 12 |
| 20 | EEF1A2 | eukaryotic translation elongation factor 1 alpha 2 | 101210 | 075043 | 125534 | 23, 26, 28 |
| 20 | EIF2S2 | eukaryotic translation initiation factor 2 subunit beta | 125977 | 125970 | 101440 | 3, 13, 6 |
| 20 | EIF6 | eukaryotic translation initiation factor 6 | 242372 | 261582 | 125998 | 21, 35, 34 |
| 20 | EYA2 | EYA transcriptipnal coactivator and phosphatase 2 | 064655 | 197496 | 101040 | |
| 20 | FAM110A | family with sequence similarity 110 member A | 125898 | 101276 | 101280 | 5, 25, 35 |
| 20 | FAM182B | Family with sequence similarity 182 member B | 175170 | 130684 | 215547 | 38, 15, 8 |
| 20 | FAM209A | family with sequence similarity 209 member A | 124103 | 124091 | 213714 | 38, 15, 32 |
| 20 | FAM209B | family with sequence similarity 209 member B | 213714 | 124103 | 087510 | 38, 5, 32 |
| 20 | FAM210B | family with sequence similarity 210 member B | 124098 | 124089 | 087586 | 33, 35, 43 |
| 20 | FAM217B | family with sequence similarity 217 member B | 196227 | 196074 | 132825 | 11, 4, 22 |
| 20 | FAM65C | family with sequence similarity 65 member C | 042062 | 196396 | 124171 | 2, 1, 17 |
| 20 | FAM83C | family with sequence similarity 83 member C | 125998 | 242372 | 101019 | 24, 18, 38 |
| 20 | FAM83D | family with sequence similarity 83 member D | 101447 | 101445 | 101452 | 9, 21, 27 |
| 20 | FASTKD5 | FAST kinase domains 5 | 215251 | 185019 | 088899 | 21, 3, 11 |
| 20 | FITM2 | fat storage inducing transmembrane protein 2 | 197296 | 124194 | 101074 | 21, 27, 25 |
| 20 | FERMT1 | fermitin family member 1 | 101311 | 125872 | 125845 | 16, 4, 30 |
| 20 | FLRT3 | fibronectin leucine rich transmembrane protein 3 | 125848 | 172264 | 089177 | 11, 29, 12 |
| 20 | FNDC11 | fibronectin type III demain containing 11 | 125531 | 125508 | 130589 | 9, 38, 32 |
| 20 | FKBP1A | FK506 binding protein 1A | 088832 | 274322 | 088833 | 34, 35, 21 |
| 20 | FOXA2 | forkhead boxA2 | 125798 | 125813 | 132671 | 20, 16, 28 |
| 20 | FOXS1 | forkhead box S1 | 179772 | 101306 | 149599 | 25, 33, 32 |
| 20 | GTSF1L | gametocyte specific factor 1 like | 124196 | 101057 | 124191 | 38, 32, 20 |
| 20 | GGT7 | gamma-glutamyltransferase 7 | 131067 | 078804 | 131069 | 18, 20, 33 |
| 20 | GGTLC1 | gamma-glutamyltransferase light chain 1 | 149435 | 170367 | 101463 | 5, 20, |
| 20 | GDAP1L1 | ganglipside induced differentiation associated protein 1 like 1 | 124194 | 132823 | 197296 | 8, 14, 15 |
| 20 | GATA5 | GATA binding protein 5 | 130700 | 130701 | 101187 | 44, 20, 17 |
| 20 | GFRA4 | GDNF family receptor alpha 4 | 125861 | 088812 | 149451 | |
| 20 | GZF1 | GDNF inducible zinc finger protein 1 | 125812 | 132661 | 125814 | |
| 20 | GID8 | GID complex subunit 8 homolog | 101193 | 101191 | 101194 | 11, 6, 42 |
| 20 | GINS1 | GINS complex subunit 1 | 101003 | 100997 | 101004 | 9, 12, 21 |
| 20 | GMEB2 | glucocorticoid modulatory element binding protein 2 | 101216 | 130589 | 197457 | 41, 21, 1 |
| 20 | GCNT7 | glucosaminyl (N-acetyl) transferase family member 7 | 124091 | 022277 | 124103 | 1, 38, 28 |
| 20 | GSS | glutathione synthetase | 100983 | 131069 | 078814 | 24, 16, 3 |
| 20 | GPCPD1 | glycerophosphocholine phosphodiesterase 1 | 125772 | 101292 | 171984 | 44, 26, 18 |
| 20 | PYGB | glycogen phosphorylase B | 100994 | 197586 | 100997 | 16, 26, 35 |
| 20 | GNAS | GNAS complex locus | 087460 | 215440 | 101158 | 31, 40, 18 |
| 20 | GNRH2 | gonadotropin releasing hormone 2 | 125787 | 132670 | 125901 | 14, |
| 20 | GDF5 | growth differentiation factor 5 | 125965 | 204183 | 126001 | 34, 31, 6 |
| 20 | GDF5OS | Growth differentiation factor 5 opposite strand | 204183 | 101019 | 125965 | 27, 14, 23 |
| 20 | GHRH | growth hormone releasing hormone | 118702 | 118705 | 101363 | 20, |
| 20 | HCK | HCK proto-oncogene, Src family tyrosine kinase | 101336 | 101331 | 101337 | 5, 36, 21 |
| 20 | HSPA12B | heat shock protein family A (Hsp70) member 12B | 132622 | 088827 | 101220 | 36, 43, 15 |
| 20 | HELZ2 | helicase with zinc finger 2 | 130589 | 125531 | 101216 | 22, 1, 23 |
| 20 | HNF4A | hepatocyte nuclear factor 4 alpha | 101076 | 101074 | 124120 | 16, 17, 37 |
| 20 | HRH3 | histamine receptor H3 | 101180 | 101181 | 130703 | 8, 12, 23 |
| 20 | HM13 | histocompatibility minor 13 | 101294 | 088320 | 125968 | 27, 13, 33 |
| 20 | HAO1 | hydroxyacid oxidase 1 | 101323 | 125845 | 125827 | 19, 28, 17 |
| 20 | ID1 | inhibitor of DNA binding 1, HLH protein | 125968 | 101294 | 131055 | 37, 3, 6 |
| 20 | ITPA | inosine triphosphatase | 125877 | 198171 | 088836 | 15, 1, 3 |
| 20 | INSM1 | INSM transcriptional repressor 1 | 173404 | 089101 | 188559 | 28, 20, 31 |
| 20 | IFT52 | intraflagellar transport 52 | 101052 | 101049 | 101057 | 26, 5, 29 |
| 20 | IDH3B | isocitrate dehydrogenase 3 (NAD(+)) beta | 101365 | 101361 | 088881 | 18, 3, 41 |
| 20 | ISM1 | isthmin 1 | 101230 | 172296 | 089123 | 1, 2, 42 |
| 20 | ITCH | itchy E3 ubiquitin protein ligase | 078747 | 101444 | 283472 | 13, 42, 24 |
| 20 | ITCH | itchy E3 ubiquitin protein ligase | 283472 | 078747 | 125971 | 13, 42, 24 |
| 20 | JAG1 | jagged 1 | 101384 | 149346 | 132640 | 18, 24, 26 |
| 20 | JPH2 | junctophilin 2 | 149596 | 124191 | 132823 | 44, 38, 15 |
| 20 | KIAA1755 | KIAA1755 | 149633 | 198959 | 101425 | |
| 20 | KIF16B | kinesin family member 16B | 089177 | 125848 | 280240 | 2, 24, 29 |
| 20 | KIF3B | kinesin family member 3B | 101350 | 101346 | 171456 | 29, 22, 33 |
| 20 | KIZ | kizuna centrosomal protein | 088970 | 188559 | 088930 | |
| 20 | L3MBTL1 | l(3)mbt-like 1 (Drosophila) | 185513 | 124193 | 277611 | 11, 42, 40 |
| 20 | LAMA5 | laminin subunit alpha 5 | 130702 | 130706 | 171858 | 13, 3, 26 |
| 20 | LIME1 | Lck interacting transmembrane adaptor 1 | 203896 | 273154 | 273047 | 37, 17, 5 |
| 20 | LRRN4 | leucine rich repeat neuronal 4 | 125872 | 088766 | 101311 | 17, 12, 27 |
| 20 | LZTS3 | leucine zipper tumor suppressor family member 3 | 088899 | 215251 | 198171 | 14, 11, 2 |
| 20 | LPIN3 | lipin 3 | 132793 | 174306 | 183798 | 3, 40, 18 |
| 20 | LBP | lipopolysaccharide binding protein | 129988 | 101425 | 170471 | 19, 34, 5 |
| 20 | LKAAEAR1 | LKAAEAR motif containing 1 | 171695 | 125510 | 125522 | 38, |
| 20 | LINC00176 | Long intergenic non-protein coding RNA 176 | 196421 | 101161 | 203883 | 27, 5, 39 |
| 20 | LINC00493 | Long intergenic non-protein coding RNA 493 | 232388 | 101310 | 125821 | 18, 25, 11 |
| 20 | LSM14B | LSM family member 14B | 149657 | 130699 | 101182 | 33, 23, 9 |
| 20 | KAT14 | lysine acetyltransferase 14 | 149474 | 232838 | 125846 | 1, 31, 33 |
| 20 | LAMP5 | lysosomal associated membrane protein family member 5 | 125869 | 101333 | 101349 | 31, 8, 18 |
| 20 | MACROD2 | MACRO domain containing 2 | 172264 | 101251 | 125848 | |
| 20 | MROH8 | maestro heat like repeat family member 8 | 101353 | 080839 | 118705 | 38, 9, 39 |
| 20 | MAFB | MAF bZIP transcription factor B | 204103 | 101452 | 198900 | 36, 24, 29 |
| 20 | MANBAL | mannosidase beta like | 101363 | 118702 | 197122 | 26, 37, 27 |
| 20 | MATN4 | matrilin 4 | 124159 | 124107 | 124232 | 12, 4, 2 |
| 20 | MMP24 | matrix metallopeptidase 24 | 125966 | 126005 | 261582 | 26, 17, 1 |
| 20 | MMP9 | matrix metallopeptidase 9 | 100985 | 198026 | 124140 | 5, 30, 36 |
| 20 | MKKS | McKusick-Kaufman syndrome | 125863 | 132639 | 149346 | |
| 20 | MC3R | melanocortin 3 receptor | 124089 | 054803 | 124098 | |
| 20 | MAP1LC3A | microtubule associated protein 1 light chain 3 alpha | 101460 | 125971 | 101464 | 30, 26, 14 |
| 20 | MAPRE1 | microtubule associated protein RP/EB family member 1 | 101367 | 088305 | 215529 | 43, 11, 45 |
| 20 | MCM8 | minichromosome maintenance 8 homologous recombination repair factor | 125885 | 089195 | 088766 | 21, 35, 3 |
| 20 | MAVS | mitochondrial antiviral signaling protein | 088888 | 125843 | 125779 | 26, 39, 23 |
| 20 | MGME1 | mitochondrial genome maintenance exonuclease 1 | 125871 | 125850 | 232838 | 41, 11, 13 |
| 20 | MRPS26 | mitochondrial ribosomal protein S26 | 125901 | 125787 | 101405 | 29, 22, 27 |
| 20 | MTG2 | mitochondrial ribosome associated GTPase 2 | 101181 | 184402 | 101180 | |
| 20 | MMP24-AS1 | MMP24 antisense RNA 1 | 126005 | 101000 | 125966 | |
| 20 | MOCS3 | molybdenum cofactor synthesis 3 | 124217 | 000419 | 026559 | 12, 2, 9 |
| 20 | MRGBP | MRG domain binding protein | 101189 | 101188 | 060491 | 38, 9, 29 |
| 20 | MTRNR2L3 | MT-RNR2-like 3 | 256222 | 101146 | 132819 | |
| 20 | MYBL2 | MYB proto-oncogene like 2 | 101057 | 101052 | 124196 | 41, 21, 9 |
| 20 | MYT1 | myelin transcription factor 1 | 196132 | 125522 | 203880 | 26, 31, 29 |
| 20 | MYH7B | myosin heavy chain 7B | 078814 | 100983 | 100991 | 10, 38, 15 |
| 20 | MYL9 | myosin light chain 9 | 101335 | 080845 | 118707 | 43, 6, 1 |
| 20 | MYLK2 | myosin light chain kinase 2 | 101306 | 088325 | 179772 | 25, 26, 38 |
| 20 | NAA20 | N(alpha)-acetyltransferase 20, NatB catalytic subunit | 173418 | 132669 | 101343 | 28, 22, 30 |
| 20 | NANP | N-acetylneuraminic acid phosphatase | 170191 | 101004 | 130684 | 24, 39, 40 |
| 20 | NDUFAF5 | NADH:ubiquinone oxidoreductase complex assembly factor 5 | 101247 | 089048 | 101251 | 29, 41, 22 |
| 20 | NDRG3 | NDRG family member 3 | 101079 | 101082 | 149636 | 29, 23, 38 |
| 20 | NELFCD | negative elongation factor complex member C/D | 101158 | 087460 | 101160 | 34, 3, 1 |
| 20 | NEURL2 | neuralized E3 ubiquitin protein ligase 2 | 124257 | 149634 | 064601 | |
| 20 | NRSN2 | neurensin 2 | 125841 | 177732 | 101255 | 2, 3, 8 |
| 20 | NNAT | neuronatin | 053438 | 166619 | 132792 | 31, 45, 14 |
| 20 | NPBWR2 | neuropeptides B and W receptor 2 | 125522 | 171695 | 196132 | |
| 20 | NTSR1 | neurotensin receptor 1 | 101188 | 101187 | 101189 | 3, 28, 16 |
| 20 | NFS1 | NFS1, cysteine desulfurase | 244005 | 244462 | 125995 | 2, 13, 29 |
| 20 | NINL | ninein like | 101004 | 101003 | 170191 | 26, 29, 1 |
| 20 | NKX2-2 | NK2 homeobox 2 | 125820 | 125816 | 125813 | 28, 6, 8 |
| 20 | NKX2-4 | NK2 homeobox 4 | 125816 | 088930 | 125820 | 38, |
| 20 | NOP56 | NOP56 ribonucleoprotein | 101361 | 149488 | 101365 | 13, 3, 17 |
| 20 | NAPB | NSF attachment protein beta | 125814 | 125812 | 125823 | 8, 42, 4 |
| 20 | NSFL1C | NSFL1 cofactor | 088833 | 088832 | 196209 | 23, 41, 32 |
| 20 | NECAB3 | N-terminal EF-hand calcium binding protein 3 | 125967 | 078699 | 149609 | 9, 6, 27 |
| 20 | NFATC2 | nuclear factor of activated T-cells 2 | 101096 | 026559 | 054793 | 22, 36, 29 |
| 20 | NCOA3 | nuclear receptor coactivator 3 | 124151 | 101040 | 196562 | 13, 22, 23 |
| 20 | NCOA5 | nuclear receptor coactivator 5 | 124160 | 124140 | 101017 | 41, 40, 22 |
| 20 | NCOA6 | nuclear receptor coactivator 6 | 198646 | 101464 | 078804 | |
| 20 | NXT1 | nuclear transport factor 2 like export factor 1 | 132661 | 125810 | 125812 | 35, 3, 44 |
| 20 | NOL4L | nucleolar protein 4 like | 197183 | 171456 | 283233 | 26, 27, 38 |
| 20 | OGFR | opioid growth factor receptor | 060491 | 101189 | 092758 | 35, 13, 41 |
| 20 | OPRL1 | opioid related nociceptin receptor 1 | 125510 | 171700 | 171695 | 26, 21, 8 |
| 20 | OCSTAMP | osteoclast stimulatory transmembrane protein | 149635 | 198185 | 158296 | 5, |
| 20 | OTOR | otoraplin | 125879 | 125870 | 125851 | 11, 8, |
| 20 | OVOL2 | ovo like zinc finger 2 | 125850 | 089006 | 125871 | 16, 27, 20 |
| 20 | OSER1 | oxidative stress responsive serine rich 1 | 132823 | 149596 | 124194 | |
| 20 | OSBPL2 | oxysterol binding protein like 2 | 130703 | 101180 | 130706 | |
| 20 | OXT | oxytocin/neurophysin I prepropeptide | 101405 | 125901 | 101200 | 17, 8, |
| 20 | PAK5 | p21 (RAC1) activated kinase 5 | 101349 | 125869 | 132623 | 8, 14, 24 |
| 20 | PDRG1 | p53 and DNA damage regulated 1 | 088356 | 131044 | 260903 | 9, 1, 3 |
| 20 | PAX1 | paired box 1 | 125813 | 125820 | 125798 | 29, 39, 15 |
| 20 | PPDPF | pancreatic progenitor cell differentiation and proliferation factor | 125534 | 101210 | 101213 | 34, 23, 27 |
| 20 | PANK2 | pantothenate kinase 2 | 125779 | 088888 | 101236 | 40, 22, 18 |
| 20 | PARD6B | par-6 family cell polarity regulator beta | 124171 | 042062 | 124243 | 40, 23, 14 |
| 20 | PCED1A | PC-esterase domain containing 1A | 132635 | 198326 | 215305 | 4, 26, 13 |
| 20 | PCIF1 | PDX1 C-terminal inhibiting factor 1 | 100982 | 100979 | 198026 | 41, 25, 14 |
| 20 | PI3 | peptidase inhibitor 3 | 124102 | 168703 | 124233 | 18, 30, 24 |
| 20 | PXMP4 | peroxisomal membrane protein 4 | 101417 | 101412 | 131061 | 13, 40, 14 |
| 20 | PET117 | PET117 homolog | 232838 | 125871 | 149474 | 29, 28, 14 |
| 20 | PHF20 | PHD finger protein 20 | 025293 | 131051 | 171222 | 12, 45, 1 |
| 20 | PHACTR3 | phosphatase and actin regulator 3 | 087495 | 124205 | 196074 | |
| 20 | PIGT | phosphatidylinositol glycan anchor biosynthesis class T | 124155 | 244274 | 101443 | 36, 2, 3 |
| 20 | PIGU | phosphatidylinositol glycan anchor biosynthesis class U | 101464 | 101460 | 198646 | 43, 26, 18 |
| 20 | PREX1 | phosphatidylinositol-3,4,5-trisphosphate dependent Rac exchange factor 1 | 124126 | 196562 | 124198 | 25, 36, 26 |
| 20 | PCK1 | phosphoenolpyruvate carboxykinase 1 | 124253 | 124092 | 124256 | 3, 1, 17 |
| 20 | PLCB1 | phospholipase C beta 1 | 182621 | 125827 | 101333 | |
| 20 | PLCB4 | phospholipase C beta 4 | 101333 | 182621 | 125869 | 34, 11, 23 |
| 20 | PLCG1 | phospholipase C gamma 1 | 124181 | 198900 | 174306 | 37, |
| 20 | PLTP | phospholipid transfer protein | 100979 | 064601 | 100982 | 32, 1, 27 |
| 20 | PLAGL2 | PLAG1 like zinc finger 2 | 126003 | 101337 | 101346 | 29, 11, 16 |
| 20 | PABPC1L | poly(A) binding protein cytoplasmic 1 like | 101104 | 166913 | 025772 | 40, 29, 22 |
| 20 | KCNK15 | potassium two pore domain channel subfamily K member 15 | 124249 | 064205 | 101098 | 23, 33, 44 |
| 20 | KCNG1 | potassium voltage-gated channel modifier subfamily G member 1 | 026559 | 124217 | 101096 | |
| 20 | KCNS1 | potassium voltage-gated channel modifier subfamily S member 1 | 124134 | 101109 | 175121 | 8, 35, 44 |
| 20 | KCNB1 | potassium voltage-gated channel subfamily B member 1 | 158445 | 124201 | 124212 | 14, 8, 10 |
| 20 | KCNQ2 | potassium voltage-gated channel subfamily Q member 2 | 075043 | 101204 | 101210 | |
| 20 | PFDN4 | prefoldin subunit 4 | 101132 | 019186 | 280041 | 29, 28, 12 |
| 20 | PRELID3B | PRELI domain containing 3B | 101166 | 124172 | 124203 | 11, 4, 6 |
| 20 | PRPF6 | pre-mRNA processing factor 6 | 101161 | 130590 | 196421 | 28, 21, 13 |
| 20 | PRNP | prion protein | 171867 | 171873 | 171864 | 8, 26, 17 |
| 20 | PRNT | Prion protein (testis specific) | 180259 | 171864 | 101265 | 38, |
| 20 | PRND | prion protein 2 (dublet) | 171864 | 171867 | 180259 | 38, 15, 44 |
| 20 | PDYN | prodynorphin | 101327 | 198053 | 125834 | 8, 38, 17 |
| 20 | PROKR2 | prokineticin receptor 2 | 101292 | 101290 | 125772 | 25, 8, |
| 20 | PCNA | proliferating cell nuclear antigen | 132646 | 089063 | 101290 | |
| 20 | PCSK2 | proprotein convertase subtilisin/kexin type 2 | 125851 | 125879 | 125864 | 28, 8, 40 |
| 20 | PTGIS | prostaglandin I2 synthase | 124212 | 158445 | 158470 | 1, 44, 43 |
| 20 | PMEPA1 | prostate transmembrane protein, androgen induced 1 | 124225 | 124256 | 124237 | 1, 33, 28 |
| 20 | PSMF1 | proteasome inhibitor subunit 1 | 125818 | 101282 | 125895 | 2, 43, 24 |
| 20 | PSMA7 | proteasome subunit alpha 7 | 101182 | 149657 | 184402 | 43, 34, 41 |
| 20 | PROCR | protein C receptor | 101000 | 088298 | 126005 | 43, 18, 15 |
| 20 | POFUT1 | protein O-fucosyltransferase 1 | 101346 | 126003 | 101350 | 27, 33, 31 |
| 20 | PPP1R16B | protein phosphatase 1 regulatory subunit 16B | 101445 | 101442 | 101447 | 22, 41, 21 |
| 20 | PPP1R3D | protein phosphatase 1 regulatory subunit 3D | 132825 | 196227 | 124215 | 26, 15, 22 |
| 20 | PTK6 | protein tyrosine kinase 6 | 101213 | 125534 | 125508 | 9, 13, 24 |
| 20 | PTPN1 | protein tyrosine phosphatase, non-receptor type 1 | 196396 | 172216 | 042062 | 24, 39, 42 |
| 20 | PTPRA | protein tyrosine phosphatase, receptor type A | 132670 | 215305 | 125787 | 31, 27, 5 |
| 20 | PTPRT | protein tyrosine phosphatase, receptor type T | 196090 | 124177 | 124193 | 25, 14, 8 |
| 20 | PCMTD2 | protein-L-isoaspartate (D-aspartate) O-methyltransferase domain containing 2 | 203880 | 196132 | 124209 | 11, 31, 42 |
| 20 | R3HDML | R3H domain containing like | 101074 | 197296 | 101076 | 10, |
| 20 | RAB22A | RAB22A, member RAS oncogene family | 124209 | 124227 | 124164 | 4, 26, 11 |
| 20 | RAD21L1 | RAD21 cohesin complex component like 1 | 244588 | 215595 | 101298 | 38, |
| 20 | RALGAPA2 | Ral GTPase activating protein catalytic alpha subunit 2 | 188559 | 173404 | 088970 | 20, 18, 25 |
| 20 | RALGAPB | Ral GTPase activating protein non-catalytic beta subunit | 170471 | 129988 | 182035 | 22, 23, 1 |
| 20 | RALY | RALY heterogeneous nuclear ribonucleoprotein | 125970 | 101421 | 125977 | 34, 3, 41 |
| 20 | RBCK1 | RANBP2-type and C3HC4-type zinc finger containing 1 | 125826 | 101255 | 125875 | |
| 20 | RIN2 | Ras and Rab interactor 2 | 132669 | 185052 | 173418 | 30, 11, 45 |
| 20 | RASSF2 | Ras association domain family member 2 | 101265 | 180259 | 089057 | 41, 22, 21 |
| 20 | RBBP9 | RB binding protein 9, serine hydrolase | 089050 | 132664 | 101310 | 40, 1, 31 |
| 20 | RBL1 | RB transcriptional corepressor like 1 | 080839 | 101347 | 101353 | 24, 35, 5 |
| 20 | RBBP8NL | RBBP8 N-terminal like | 130701 | 149679 | 130700 | 13, 29, 24 |
| 20 | ROMO1 | reactive oxygen species modulator 1 | 125995 | 244005 | 131051 | 25, 43, 2 |
| 20 | RBPJL | recombination signal binding protein for immunoglobulin kappa J region like | 124232 | 124159 | 124145 | 28, 4, |
| 20 | RIMS4 | regulating synaptic membrane exocytosis 4 | 101098 | 124249 | 166913 | 8, 38, 9 |
| 20 | RPRD1B | regulation of nuclear pre-mRNA domain containing 1B | 101413 | 101407 | 198959 | 42, 24, 44 |
| 20 | RGS19 | regulator of G-protein signaling 19 | 171700 | 171703 | 125510 | 22, 9, 3 |
| 20 | RTEL1 | regulator of telomere elongation helicase 1 | 258366 | 197457 | 026036 | 21, 16, 37 |
| 20 | RTFDC1 | replication termination factor 2 domain containing 1 | 022277 | 087589 | 124091 | 41, 34, 6 |
| 20 | ARHGAP40 | Rho GTPase activating protein 40 | 124143 | 182035 | 101438 | |
| 20 | RAE1 | ribonucleic acid export 1 | 101146 | 054796 | 256222 | 38, 30, 18 |
| 20 | RPN2 | ribophorin II | 118705 | 101353 | 118702 | 13, 40, 9 |
| 20 | RPS21 | ribosomal protein S21 | 171858 | 130702 | 149679 | 33, 41, 7 |
| 20 | RRBP1 | ribosome binding protein 1 | 125844 | 125868 | 125888 | 13, 29, 28 |
| 20 | RNF114 | ring finger protein 114 | 124226 | 158480 | 124216 | 9, 18, 3 |
| 20 | RNF24 | ring finger protein 24 | 101236 | 125779 | 088826 | 1, 34, 13 |
| 20 | RBM12 | RNA binding motif protein 12 | 244462 | 272897 | 244005 | 42, 45, 39 |
| 20 | RBM38 | RNA binding motif protein 38 | 132819 | 256222 | 124092 | 21, 41, 33 |
| 20 | RBM39 | RNA binding motif protein 39 | 131051 | 125995 | 025293 | 7, 1, 31 |
| 20 | POLR3F | RNA polymerase III subunit F | 132664 | 089091 | 089050 | 26, 31, 35 |
| 20 | REM1 | RRAD and GEM like GTPase 1 | 088320 | 180383 | 101294 | 15, 32, 6 |
| 20 | RSPO4 | R-spondin 4 | 101282 | 101280 | 125818 | 14, 10, 38 |
| 20 | RTEL1- | RTEL1-TNFRSF6B readthrough (NMD candidate) | 026036 | 258366 | 243509 | |
| | TNFRSF6B | | | | | |
| 20 | SUN5 | Sad1 and UNC84 domain containing 5 | 167098 | 215529 | 078898 | 38, 8, |
| 20 | SAMHD1 | SAM and HD domain containing deoxynucleoside triphosphate | 101347 | 101342 | 080839 | 42, 13, 36 |
| | | triphosphohydrolase 1 | | | | |
| 20 | SCAND1 | SCAN domain containing 1 | 171222 | 025293 | 149646 | 22, 35, 6 |
| 20 | SCP2D1 | SCP2 sterol binding domain containing 1 | 132631 | 125821 | 185052 | 38, |
| 20 | SCRT2 | scratch family transcriptional repressor 2 | 215397 | 270299 | 101276 | 14, 28, 8 |
| 20 | SEC23B | Sec23 homolog B, coat complex II component | 101310 | 089050 | 232388 | 24, 42, 31 |
| 20 | SLPI | secretory leukocyte peptidase inhibitor | 124107 | 124157 | 124159 | 30, 18, 27 |
| 20 | SEL1L2 | SEL1L2 ERAD E3 ligase adaptor subunit | 101251 | 101247 | 172264 | 10, 42, 38 |
| 20 | SEMG1 | semenogelin I | 124233 | 124102 | 124157 | 33, 25, 23 |
| 20 | SEMG2 | semenogelin II | 124157 | 124233 | 124107 | 33, 25, 42 |
| 20 | SRSF6 | serine and arginine rich splicing factor 6 | 124193 | 196090 | 185513 | 11, 31, 13 |
| 20 | SERINC3 | serine incorporator 3 | 132824 | 124120 | 168734 | 38, 30, 45 |
| 20 | SPTLC3 | serine palmitoyltransferase long chain base subunit 3 | 172296 | 132640 | 101230 | 11, 32, 29 |
| 20 | SPINT3 | serine peptidase inhibitor, Kunitz type 3 | 101446 | 101443 | 243543 | 38, |
| 20 | SPINT4 | serine peptidase inhibitor, Kunitz type 4 | 149651 | 168634 | 124116 | |
| 20 | STK35 | serine/threonine kinase 35 | 125834 | 101327 | 125780 | 14, 39, 18 |
| 20 | STK4 | serine/threonine kinase 4 | 101109 | 025772 | 124134 | 22, 30, 5 |
| 20 | SGK2 | SGK2, serine/threonine kinase 2 | 101049 | 277611 | 101052 | |
| 20 | SIGLEC1 | sialic acid binding Ig like lectin 1 | 088827 | 149451 | 132622 | 1, 27, 6 |
| 20 | SIRPA | signal regulatory protein alpha | 198053 | 089012 | 101327 | 35, 1, 8 |
| 20 | SIRPB1 | signal regulatory protein beta 1 | 101307 | 260861 | 089012 | 5, 36, 7 |
| 20 | SIRPB2 | signal regulatory protein beta 2 | 196209 | 088833 | 125900 | 18, 5, 7 |
| 20 | SIRPD | signal regulatory protein delta | 125900 | 196209 | 260861 | 38, 36, 5 |
| 20 | SIRPG | signal regulatory protein gamma | 089012 | 101307 | 198053 | 39, 30, 38 |
| 20 | SLC2A4RG | SLC2A4 regulator | 125520 | 273047 | 130584 | 34, 6, 17 |
| 20 | SLX4IP | SLX4 interacting protein | 149346 | 125863 | 101384 | 33, 39, 28 |
| 20 | SNRPB2 | small nuclear ribonucleoprotein polypeptide B2 | 125870 | 280240 | 125879 | 34, 11, 4 |
| 20 | SNRPB | small nuclear ribonucleoprotein polypeptides B and B1 | 125835 | 166948 | 256566 | 41, 35, 34 |
| 20 | SNAI1 | snail family transcriptional repressor 1 | 124216 | 124226 | 124208 | 3, 45, 6 |
| 20 | NKAIN4 | Sodium/potassium transporting ATPase interacting 4 | 101198 | 101197 | 101199 | 17, 26, 8 |
| 20 | SLC12A5 | solute carrier family 12 member 5 | 124140 | 100985 | 124160 | 14, 8, 31 |
| 20 | SLC13A3 | solute carrier family 13 member 3 | 158296 | 149635 | 172315 | 17, 32, 11 |
| 20 | SLC17A9 | solute carrier family 17 member 9 | 101194 | 101193 | 125533 | 22, 3, 42 |
| 20 | SLC2A10 | solute carrier family 2 member 10 | 197496 | 172315 | 064655 | 29, 23, 1 |
| 20 | SLC23A2 | solute carrier family 23 member 2 | 089057 | 101265 | 089063 | 29, 2, 14 |
| 20 | SLC24A3 | solute carrier family 24 member 3 | 185052 | 132631 | 132669 | 30, 11, 25 |
| 20 | SLC32A1 | solute carrier family 32 member 1 | 101438 | 124143 | 101442 | 8, 14, 17 |
| 20 | SLC35C2 | solute carrier family 35 member C2 | 080189 | 149654 | 062598 | 36, 13, 9 |
| 20 | SLC4A11 | solute carrier family 4 member 11 | 088836 | 125877 | 088854 | 24, 3, 27 |
| 20 | SLC52A3 | solute carrier family 52 member 3 | 101276 | 215397 | 125898 | 38, 34, 33 |
| 20 | SLC9A8 | solute carrier family 9 member A8 | 197818 | 158470 | 158480 | 7, 22, 3 |
| 20 | SLCO4A1 | solute carrier organic anion transporter family member 4A1 | 101187 | 130700 | 101188 | 14, 16, 3 |
| 20 | SSTR4 | somatostatin receptor 4 | 132671 | 125798 | 178726 | |
| 20 | SNX5 | sorting nexin 5 | 089006 | 125888 | 125850 | 29, 32, 18 |
| 20 | SNX21 | sorting nexin family member 21 | 124104 | 101470 | 101473 | 26, 14, 31 |
| 20 | SALL4 | spalt like transcription factor 4 | 101115 | 054793 | 020256 | 12, 2, 38 |
| 20 | SPAG4 | sperm associated antigen 4 | 061656 | 125991 | 214078 | 11, 7, 4 |
| 20 | SPEF1 | sperm flagellar 1 | 101222 | 101220 | 125817 | 38, 24, 3 |
| 20 | SPATA2 | spermatogenesis associated 2 | 158480 | 197818 | 124226 | 38, 34, 24 |
| 20 | SPATA25 | spermatogenesis associated 25 | 149634 | 168612 | 124257 | 37, 38, 8 |
| 20 | SMOX | spermine oxidase | 088826 | 101236 | 171873 | 9, 33, 7 |
| 20 | SPO11 | SPO11, initiator of meiotic double stranded breaks | 054796 | 101144 | 101146 | 10, 8, |
| 20 | SLA2 | Src like adaptor 2 | 101082 | 101084 | 101079 | 5, 7, 39 |
| 20 | SRC | SRC proto-oncogene, non-receptor tyrosine kinase | 197122 | 101363 | 166619 | 43, 4, 20 |
| 20 | SRMS | src-related kinase lacking C-terminal regulatory tyrosine and N-terminal | 125508 | 101213 | 125531 | 23, 37, 17 |
| | | myristylation sites | | | | |
| 20 | SOX12 | SRY-box 12 | 177732 | 247315 | 125841 | 26, 14, 12 |
| 20 | SOX18 | SRY-box 18 | 203883 | 196421 | 171703 | 32, 27, 28 |
| 20 | SS18L1 | SS18L1, nBAF chromatin remodeling complex subunit | 184402 | 101182 | 101181 | 19, 1, 26 |
| 20 | STMN3 | stathmin 3 | 197457 | 101216 | 258366 | 8, 26, 39 |
| 20 | STAU1 | staufen double-stranded RNA binding protein 1 | 124214 | 124207 | 124228 | 39, 42, 3 |
| 20 | SAMD10 | sterile alpha motif domain containing 10 | 130590 | 196700 | 101161 | 9, 37, 40 |
| 20 | STX16-NPEPL1 | STX16-NPEPL1 readthrough (NMD candidate) | 254995 | 124222 | 215440 | |
| 20 | SULF2 | sulfatase 2 | 196562 | 124151 | 124126 | 8, |
| 20 | SRXN1 | sulfiredoxin 1 | 271303 | 125878 | 270299 | 20, 40, 3 |
| 20 | SOGA1 | suppressor of glucose, autophagy associated 1 | 149639 | 149636 | 101342 | 26, 23, 2 |
| 20 | SYNDIG1 | synapse differentiation inducing 1 | 101463 | 149435 | 077984 | 43, 8, 27 |
| 20 | SYCP2 | synaptonemal complex protein 2 | 196074 | 087495 | 196227 | 37, 23, 38 |
| 20 | SNAP25 | synaptosome associated protein 25 | 132639 | 132623 | 125863 | 8, 17, 26 |
| 20 | SDC4 | syndecan 4 | 124145 | 124232 | 204070 | 13, 4, 40 |
| 20 | SDCBP2 | syndecan binding protein 2 | 125775 | 101298 | 274322 | 13, 16, 26 |
| 20 | SNPH | syntaphilin | 101298 | 244588 | 125775 | 29, 13, 18 |
| 20 | STX16 | syntaxin 16 | 124222 | 198768 | 254995 | 31, 2, 12 |
| 20 | SNTA1 | syntrophin alpha 1 | 101400 | 101391 | 078699 | 21, 18, 15 |
| 20 | SYS1 | SYS1, golgi trafficking protein | 204070 | 124145 | 254806 | 41, 1, 13 |
| 20 | SYS1-DBNDD2 | SYS1-DBNDD2 readthrough (NMD candidate) | 254806 | 204070 | 124251 | |
| 20 | TASP1 | taspase 1 | 089123 | 101230 | 089048 | 18, 31, 13 |
| 20 | TAF4 | TATA-box binding protein associated factor 4 | 130699 | 179242 | 149657 | 29, 11, 31 |
| 20 | TLDC2 | TBC/LysM-associated domain containing 2 | 101342 | 149639 | 101347 | 37, 4, 2 |
| 20 | TBC1D20 | TBC1 domain family member 20 | 125875 | 125826 | 101266 | 43, 34, 35 |
| 20 | TSHZ2 | teashirt zinc finger homeobox 2 | 182463 | 020256 | 171940 | 24, 1, 31 |
| 20 | TTI1 | TELO2 interacting protein 1 | 101407 | 132821 | 101413 | 9, 42, 21 |
| 20 | TGIF2 | TGFB induced factor homeobox 2 | 118707 | 101335 | 259399 | 34, 13, 25 |
| 20 | TGIF2-C20orf24 | TGIF2-C20orf24 readthrough | 259399 | 118707 | 101084 | |
| 20 | TMX4 | thioredoxin related transmembrane protein 4 | 125827 | 101323 | 182621 | 31, 38, 29 |
| 20 | THBD | thrombomodulin | 178726 | 132671 | 125810 | 36, 24, 45 |
| 20 | TMEM189- | TMEM189-UBE2V1 readthrough | 124208 | 124216 | 240849 | 18, 5, 13 |
| | UBE2V1 | | | | | |
| 20 | TNFRSF6B | TNF receptor superfamily member 6b | 243509 | 026036 | 101246 | 3, 37, 26 |
| 20 | TOP1 | topoisomerase (DNA) I | 198900 | 204103 | 124181 | 24, 26, 13 |
| 20 | TOX2 | TOX high mobility group box family member 2 | 124191 | 124196 | 149596 | 39, 34, 28 |
| 20 | TP53RK | TP53 regulating kinase | 172315 | 158296 | 197496 | 26, 19, 7 |
| 20 | TP53TG5 | TP53 target 5 | 124251 | 254806 | 244274 | 6, 38, 8 |
| 20 | TPX2 | TPX2, microtubule nucleation factor | 088325 | 171552 | 101306 | 3, 39, 24 |
| 20 | TCEA2 | transcription elongation factor A2 | 171703 | 203883 | 171700 | 11, 27, 38 |
| 20 | TCF15 | transcription factor 15 (basic helix-loop-helix) | 125878 | 101266 | 271303 | 20, 15, 14 |
| 20 | TFAP2C | transcription factor AP-2 gamma | 087510 | 213714 | 101144 | 34, 27, 18 |
| 20 | TCFL5 | transcription factor like 5 | 101190 | 092758 | 101191 | 35, 26, 38 |
| 20 | TGM2 | transglutaminase 2 | 198959 | 101413 | 149633 | 43, 32, 44 |
| 20 | TGM3 | transglutaminase 3 | 125780 | 125834 | 166948 | 24, 13, 30 |
| 20 | TGM6 | transglutaminase 6 | 166948 | 125780 | 125835 | 20, |
| 20 | TRPC4AP | transient receptor potential cation channel subfamily C member 4 associated | 100991 | 078814 | 088298 | 21, 39, 43 |
| | | protein | | | | |
| 20 | TOMM34 | translocase of outer mitochondrial membrane 34 | 025772 | 101104 | 101109 | 3, 38, 2 |
| 20 | TM9SF4 | transmembrane 9 superfamily member 4 | 101337 | 101336 | 126003 | 24, 42, 13 |
| 20 | TMC2 | transmembrane channel like 2 | 149488 | 088876 | 101361 | 36, 8, 44 |
| 20 | TMEM189 | transmembrane protein 189 | 240849 | 124208 | 172216 | |
| 20 | TMEM230 | transmembrane protein 230 | 089063 | 089057 | 132646 | 43, 31, 28 |
| 20 | TMEM239 | transmembrane protein 239 | 198326 | 258713 | 132635 | 38, 8, |
| 20 | TMEM74B | transmembrane protein 74B | 125895 | 125818 | 215595 | 34, 29, 10 |
| 20 | TRIB3 | tribbles pseudokinase 3 | 101255 | 125841 | 125826 | 9, 41, 13 |
| 20 | TRMT6 | tRNA methyltransferase 6 | 089195 | 089199 | 125885 | 9, 13, 18 |
| 20 | TNNC2 | troponin C2, fast skeletal type | 101470 | 175063 | 124104 | 25, 15, 18 |
| 20 | TUBB1 | tubulin beta 1 class VI | 101162 | 101160 | 124172 | 11, 7, 36 |
| 20 | TTLL9 | tubulin tyrosine ligase like 9 | 131044 | 149599 | 088356 | 31, 38, 10 |
| 20 | TPD52L2 | tumor protein D52 like 2 | 101150 | 183260 | 101152 | 45, 1, 35 |
| 20 | TP53INP2 | tumor protein p53 inducible nuclear protein 2 | 078804 | 198646 | 131067 | 26, 11, 14 |
| 20 | YWHAB | tyrosine 3-monooxygenase/tryptophan 5-monooxygenase activation protein beta | 166913 | 101098 | 101104 | 11, 4, 40 |
| 20 | UQCC1 | ubiquinol-cytochrome c reductase complex assembly factor 1 | 101019 | 125998 | 204183 | |
| 20 | UBE2C | ubiquitin conjugating enzyme E2 C | 175063 | 101457 | 101470 | 41, 3, 11 |
| 20 | UBE2V1 | ubiquitin conjugating enzyme E2 V1 | 244687 | 124216 | 240849 | |
| 20 | UBOX5 | U-box domain containing 5 | 185019 | 101200 | 215251 | 29, 25, 6 |
| 20 | UCKL1 | uridine-cytidine kinase 1 like 1 | 198276 | 101152 | 196700 | 14, 13, 37 |
| 20 | VAPB | VAMP associated protein B and C | 124164 | 124209 | 198768 | 34, 2, 17 |
| 20 | VSX1 | visual system homeobox 1 | 100987 | 154930 | 197586 | 14, 10, 8 |
| 20 | VPS16 | VPS16, CORVET/HOPS core subunit | 215305 | 132635 | 132670 | |
| 20 | VSTM2L | V-set and transmembrane domain containing 2 like | 132821 | 132792 | 101407 | 28, 8, 20 |
| 20 | WFDC10A | WAP four-disulfide core domain 10A | 180305 | 180205 | 180083 | 10, 44, 32 |
| 20 | WFDC10B | WAP four-disulfide core domain 10B | 182931 | 180083 | 168634 | 38, 8, |
| 20 | WFDC11 | WAP four-disulfide core domain 11 | 180083 | 180305 | 182931 | 38, |
| 20 | WFDC12 | WAP four-disulfide core domain 12 | 168703 | 175121 | 124102 | 35, |
| 20 | WFDC13 | WAP four-disulfide core domain 13 | 168634 | 182931 | 149651 | |
| 20 | WFDC2 | WAP four-disulfide core domain 2 | 101443 | 124155 | 101446 | 27, 40, 15 |
| 20 | WFDC3 | WAP four-disulfide core domain 3 | 124116 | 149651 | 101457 | 14, 38, 19 |
| 20 | WFDC5 | WAP four-disulfide core domain 5 | 175121 | 124134 | 168703 | 35, 30, 24 |
| 20 | WFDC6 | WAP four-disulfide core domain 6 | 243543 | 101446 | 249139 | 38, 10, |
| 20 | WFDC8 | WAP four-disulfide core domain 8 | 158901 | 101448 | 180205 | 38, |
| 20 | WFDC9 | WAP four-disulfide core domain 9 | 180205 | 158901 | 180305 | |
| 20 | WISP2 | WNT1 inducible signaling pathway protein 2 | 064205 | 196839 | 124249 | 23, 9, 27 |
| 20 | XKR7 | XK related 7 | 260903 | 088356 | 101331 | 20, 14, |
| 20 | YTHDF1 | YTH N6-methyladenosine RNA binding protein 1 | 149658 | 125533 | 101197 | 37, 21, 3 |
| 20 | ZBP1 | Z-DNA binding protein 1 | 124256 | 124253 | 124225 | 5, 13, 9 |
| 20 | ZFP64 | ZFP64 zinc finger protein | 020256 | 101115 | 182463 | 29, 21, 24 |
| 20 | ZBTB46 | zinc finger and BTB domain containing 46 | 130584 | 125520 | 183260 | 1, 27, 33 |
| 20 | ZGPAT | zinc finger COCH-type and G-patch domain containing | 197114 | 101246 | 273154 | 36, 39, 13 |
| 20 | ZCCHC3 | zinc finger CCHC-type containing 3 | 247315 | 196476 | 177732 | 15, 26, 31 |
| 20 | ZMYND8 | zinc finger MYND-type containing 8 | 101040 | 064655 | 124151 | |
| 20 | ZNFX1 | zinc finger NFX1-type containing 1 | 124201 | 124228 | 158445 | |
| 20 | ZNF133 | zinc finger protein 133 | 125846 | 149474 | 089091 | 15, 43, 26 |
| 20 | ZNF217 | zinc finger protein 217 | 171940 | 182463 | 064787 | 3, 23, 29 |
| 20 | ZNF334 | zinc finger protein 334 | 198185 | 062598 | 149635 | 26, 31, 33 |
| 20 | ZNF335 | zinc finger protein 335 | 198026 | 100982 | 100985 | 29, 36, 22 |
| 20 | ZNF337 | zinc finger protein 337 | 130684 | 170191 | 175170 | 24, 42, 1 |
| 20 | ZNF341 | zinc finger protein 341 | 131061 | 101417 | 101421 | 4, 21, 33 |
| 20 | ZNF343 | zinc finger protein 343 | 088876 | 256566 | 149488 | 1, 4, 41 |
| 20 | ZNF512B | zinc finger protein 512B | 196700 | 198276 | 130590 | 40, 28, 18 |
| 20 | ZNF831 | zinc finger protein 831 | 124203 | 101166 | 124205 | 36, |
| 20 | ZSWIM1 | zinc finger SWIM-type containing 1 | 168612 | 132801 | 149634 | 7, 45, 13 |
| 20 | ZSWIM3 | zinc finger SWIM-type containing 3 | 132801 | 101473 | 168612 | 9, 33, 39 |
| 20 | ZHX3 | zinc fingers and homeoboxes 3 | 174306 | 124181 | 132793 | |
| 21 | AGPAT3 | 1-acylglycerol-3-phosphate O-acyltransferase 3 | 160216 | 160214 | 160218 | |
| 21 | ADAMTS1 | ADAM metallopeptidase with thrombospondin type 1 motif 1 | 154734 | 166265 | 154736 | 26, 33, 44 |
| 21 | ADAMTS5 | ADAM metallopeptidase with thrombospondin type 1 motif 5 | 154736 | 154734 | 156239 | 15, 1, 11 |
| 21 | ADARB1 | adenosine deaminase, RNA specific B1 | 197381 | 160256 | 186866 | |
| 21 | APP | amyloid beta precursor protein | 142192 | 154727 | 166265 | 40, 11, 18 |
| 21 | ABCG1 | ATP binding cassette subfamily G member 1 | 160179 | 177398 | 160180 | 26, 39, 14 |
| 21 | ATP5O | ATP synthase, H+ transporting, mitochondrial F1 complex, O subunit | 241837 | 205726 | 243927 | 43, 29, 41 |
| 21 | ATP5J | ATP synthase, H+ transporting, mitochondrial Fo complex subunit F6 | 154723 | 154721 | 154727 | 29, 15, 2 |
| 21 | AIRE | autoimmune regulator | 160224 | 142182 | 141959 | 39, 17, |
| 21 | B3GALT5 | beta-1,3-galactosyltransferase 5 | 183778 | 185437 | 183067 | 42, 16, 23 |
| 21 | BACE2 | beta-site APP-deaving enzyme 2 | 182240 | 171587 | 183844 | 3, 9, 35 |
| 21 | BRWD1 | bromodomain and WD repeat domain containing 1 | 185658 | 183527 | 205581 | 23, 22, 39 |
| 21 | BACH1 | BTB domain and CNC homolog 1 | 156273 | 156265 | 171189 | 2, 13, 42 |
| 21 | BTG3 | BTG anti-proliferation factor 3 | 154640 | 154639 | 154642 | 18, 6, 32 |
| 21 | C2CD2 | C2 calcium dependent domain containing 2 | 157617 | 141956 | 173276 | 2, 29, 1 |
| 21 | CBR1 | carbonyl reductase 1 | 159228 | 185917 | 159231 | 13, 8, 3 |
| 21 | CBR3 | carbonyl reductase 3 | 159231 | 159228 | 142197 | 24, 34, 1 |
| 21 | CCT8 | chaperonin containing TCP1 subunit 8 | 156261 | 156256 | 156265 | 13, 43, 4 |
| 21 | CLIC6 | chloride intracellular channel 6 | 159212 | 159200 | 159216 | 20, 18, 14 |
| 21 | CHODL | chondrolectin | 154645 | 154642 | 154646 | 36, 38, 10 |
| 21 | CHAF1B | chromatin assembly factor 1 subunit B | 159259 | 159256 | 159261 | 9, 26, 13 |
| 21 | C21orf140 | chromosome 21 open reading frame 140 | 222018 | 205670 | 243627 | |
| 21 | C21orf2 | chromosome 21 open reading frame 2 | 160226 | 141959 | 142185 | 26, 27, 22 |
| 21 | C21orf33 | chromosome 21 open reading frame 33 | 160221 | 241945 | 160223 | 21, 9, 34 |
| 21 | C21orf58 | chromosome 21 open reading frame 58 | 160298 | 182362 | 160299 | 39, 9, 26 |
| 21 | C21orf59 | chromosome 21 open reading frame 59 | 159079 | 265590 | 159082 | 34, 28, 41 |
| 21 | C21orf62 | chromosome 21 open reading frame 62 | 205929 | 159086 | 205927 | 28, 37, 9 |
| 21 | C21orf91 | chromosome 21 open reading frame 91 | 154642 | 154640 | 154645 | 22, 4, 11 |
| 21 | CLDN14 | daudin 14 | 159261 | 159259 | 159263 | |
| 21 | CLDN17 | daudin 17 | 156282 | 171189 | 156284 | |
| 21 | CLDN8 | daudin 8 | 156284 | 156282 | 188694 | 17, 33, 13 |
| 21 | COL6A1 | collagen type VI alpha 1 chain | 142156 | 183570 | 142173 | 6, 26, 15 |
| 21 | COL6A2 | collagen type VI alpha 2 chain | 142173 | 142156 | 160282 | 6, 12, 26 |
| 21 | COL18A1 | collagen type XVIII alpha 1 chain | 182871 | 186866 | 173638 | 26, 27, 12 |
| 21 | CXADR | coxsackie virus and adenovirus receptor | 154639 | 155313 | 154640 | 11, 18, 4 |
| 21 | CRYAA | crystallin alpha A | 160202 | 160201 | 142178 | 14, 17, 9 |
| 21 | CRYZL1 | crystallin zeta like 1 | 205758 | 249209 | 205726 | 30, 31, 15 |
| 21 | CBS | cystathionine-beta-synthase | 160200 | 160199 | 160201 | 21, 26, 9 |
| 21 | CBSL | cystathionine-beta-synthase like | 274276 | 275993 | 275895 | 21, 26, 9 |
| 21 | CSTB | cystatin B | 160213 | 160209 | 160214 | 30, 29, 18 |
| 21 | CYYR1 | cysteine and tyrosine rich 1 | 166265 | 142192 | 154734 | 1, 43, 2 |
| 21 | DIP2A | disco interacting protein 2 homolog A | 160305 | 160299 | 160307 | 37, 40, 1 |
| 21 | DNMT3L | DNA methyltransferase 3 like | 142182 | 160223 | 160224 | 32, 38, |
| 21 | DNAJC28 | DnaJ heat shock protein family (Hsp40) member C28 | 177692 | 142188 | 159131 | 30, 42, 6 |
| 21 | DOPEY2 | dopey family member 2 | 142197 | 159231 | 159256 | 13, 5, 33 |
| 21 | DSCR4 | Down syndrome critical region 4 | 184029 | 157542 | 198054 | |
| 21 | DSCR8 | Down syndrome critical region 8 | 198054 | 184029 | 157551 | 10, 34, 38 |
| 21 | DONSON | downstream neighbor of SON | 159147 | 159140 | 249209 | 11, 9, 4 |
| 21 | DSCAM | DS cell adhesion molecule | 171587 | 183036 | 182240 | 23, 8, 25 |
| 21 | DSCR3 | DSCR3 arrestin fold containing | 157538 | 182670 | 157540 | 39, 34, 37 |
| 21 | DYRK1A | dual specificity tyrosine phosphorylation regulated kinase 1A | 157540 | 157538 | 157542 | 11, 24, 31 |
| 21 | ERG | ERG, ETS transcription factor | 157554 | 157551 | 157557 | 45, 1, 36 |
| 21 | ETS2 | ETS proto-oncogene 2, transcription factor | 157557 | 157554 | 183527 | 1, 42, 18 |
| 21 | EVA1C | eva-1 homolog C | 166979 | 142207 | 242220 | 9, 32, 36 |
| 21 | FAM207A | family with sequence similarity 207 member A | 160256 | 160255 | 197381 | 21, 35, 25 |
| 21 | FAM3B | family with sequence similarity 3 member B | 183844 | 182240 | 183486 | 37, 31, 27 |
| 21 | FTCD | formimidoyltransferase cyclodeaminase | 160282 | 142173 | 160284 | 17, 19, 38 |
| 21 | GABPA | GA binding protein transcription factor alpha subunit | 154727 | 154723 | 142192 | 42, 32, 13 |
| 21 | GRIK1 | glutamate ionotropic receptor kainate type subunit 1 | 171189 | 156273 | 156282 | 8, 22, 15 |
| 21 | H2BFS | H2B histone family member S | 234289 | 160207 | 160208 | |
| 21 | HSPA13 | heat shock protein family A (Hsp70) member 13 | 155304 | 185272 | 155307 | 42, 4, 8 |
| 21 | HSF2BP | heat shock transcription factor 2 binding protein | 160207 | 142178 | 234289 | 13, 9, 38 |
| 21 | HMGN1 | high mobility group nucleosome binding domain 1 | 205581 | 185658 | 182093 | 18, 12, 29 |
| 21 | HLCS | holocarboxylase synthetase | 159267 | 159263 | 183145 | 26, 29, 18 |
| 21 | HUNK | hormonally up-regulated Neu-associated kinase | 142149 | 156304 | 159055 | 11, 27, 12 |
| 21 | IGHV1OR21-1 | Immunoglobulin heavy variable 1/OR21-1 (non-functional) | 277282 | 274391 | 280108 | |
| 21 | IGSF5 | immunoglobulin superfamily member 5 | 183067 | 183778 | 183036 | 32, 17, 38 |
| 21 | ICOSLG | inducible T-cell costimulator ligand | 160223 | 160221 | 142182 | 8, 2, 41 |
| 21 | ITGB2 | integrin subunit beta 2 | 160255 | 183255 | 160256 | 39, 36, 5 |
| 21 | IFNAR1 | interferon alpha and beta receptor subunit 1 | 142166 | 243646 | 159128 | 4, 45, 42 |
| 21 | IFNAR2 | interferon alpha and beta receptor subunit 2 | 159110 | 184221 | 249624 | 1, 15, 36 |
| 21 | IFNGR2 | interferon gamma receptor 2 | 159128 | 142166 | 142188 | |
| 21 | IL10RB | interleukin 10 receptor subunit beta | 243646 | 249624 | 142166 | 13, 37, 9 |
| 21 | ITSN1 | intersectin 1 | 205726 | 205758 | 241837 | 26, 11, 1 |
| 21 | JAM2 | junctional adhesion molecule 2 | 154721 | 154719 | 154723 | 11, 42, 32 |
| 21 | KRTAP10-1 | keratin associated protein 10-1 | 215455 | 175894 | 205445 | |
| 21 | KRTAP10-10 | keratin associated protein 10-10 | 221859 | 221837 | 243489 | |
| 21 | KRTAP10-11 | keratin associated protein 10-11 | 243489 | 221859 | 205439 | 15, |
| 21 | KRTAP10-12 | keratin associated protein 10-12 | 189169 | 187175 | 184787 | 27, 14, |
| 21 | KRTAP10-2 | keratin associated protein 10-2 | 205445 | 215455 | 212935 | |
| 21 | KRTAP10-3 | keratin associated protein 10-3 | 212935 | 205445 | 215454 | |
| 21 | KRTAP10-4 | keratin associated protein 10-4 | 215454 | 212935 | 241123 | |
| 21 | KRTAP10-5 | keratin associated protein 10-5 | 241123 | 215454 | 188155 | |
| 21 | KRTAP10-6 | keratin associated protein 10-6 | 188155 | 241123 | 272804 | |
| 21 | KRTAP10-7 | keratin associated protein 10-7 | 272804 | 188155 | 187766 | |
| 21 | KRTAP10-8 | keratin associated protein 10-8 | 187766 | 272804 | 221837 | |
| 21 | KRTAP10-9 | keratin associated protein 10-9 | 221837 | 187766 | 221859 | |
| 21 | KRTAP11-1 | keratin associated protein 11-1 | 182591 | 274749 | 206102 | |
| 21 | KRTAP12-1 | keratin associated protein 12-1 | 187175 | 221864 | 189169 | |
| 21 | KRTAP12-2 | keratin associated protein 12-2 | 221864 | 212933 | 187175 | |
| 21 | KRTAP12-3 | keratin associated protein 12-3 | 205439 | 243489 | 212933 | |
| 21 | KRTAP12-4 | keratin associated protein 12-4 | 212933 | 205439 | 221864 | |
| 21 | KRTAP13-1 | keratin associated protein 13-1 | 198390 | 182816 | 240432 | |
| 21 | KRTAP13-2 | keratin associated protein 13-2 | 182816 | 186980 | 198390 | 15, |
| 21 | KRTAP13-3 | keratin associated protein 13-3 | 240432 | 198390 | 186971 | |
| 21 | KRTAP13-4 | keratin associated protein 13-4 | 186971 | 240432 | 186970 | |
| 21 | KRTAP15-1 | keratin associated protein 15-1 | 186970 | 186971 | 184351 | |
| 21 | KRTAP19-1 | keratin associated protein 19-1 | 184351 | 186970 | 186965 | 15, |
| 21 | KRTAP19-2 | keratin associated protein 19-2 | 186965 | 184351 | 244025 | |
| 21 | KRTAP19-3 | keratin associated protein 19-3 | 244025 | 186965 | 186967 | 15, |
| 21 | KRTAP19-4 | keratin associated protein 19-4 | 186967 | 244025 | 186977 | |
| 21 | KRTAP19-5 | keratin associated protein 19-5 | 186977 | 186967 | 186925 | |
| 21 | KRTAP19-6 | keratin associated protein 19-6 | 186925 | 186977 | 244362 | |
| 21 | KRTAP19-7 | keratin associated protein 19-7 | 244362 | 186925 | 206106 | |
| 21 | KRTAP19-8 | keratin associated protein 19-8 | 206102 | 182591 | 156299 | 38, |
| 21 | KRTAP20-1 | keratin associated protein 20-1 | 244624 | 184724 | 206105 | |
| 21 | KRTAP20-2 | keratin associated protein 20-2 | 184032 | 206105 | 206104 | |
| 21 | KRTAP20-3 | keratin associated protein 20-3 | 206104 | 184032 | 231068 | |
| 21 | KRTAP20-4 | Keratin associated protein 20-4 | 206105 | 244624 | 184032 | |
| 21 | KRTAP21-1 | keratin associated protein 21-1 | 187005 | 187026 | 183640 | |
| 21 | KRTAP21-2 | keratin associated protein 21-2 | 187026 | 231068 | 187005 | |
| 21 | KRTAP21-3 | keratin associated protein 21-3 | 231068 | 206104 | 187026 | |
| 21 | KRTAP22-1 | keratin associated protein 22-1 | 186924 | 186930 | 184724 | |
| 21 | KRTAP22-2 | keratin associated protein 22-2 | 206106 | 244362 | 212938 | |
| 21 | KRTAP23-1 | keratin associated protein 23-1 | 186980 | 206107 | 182816 | |
| 21 | KRTAP24-1 | keratin associated protein 24-1 | 188694 | 156284 | 232263 | |
| 21 | KRTAP25-1 | keratin associated protein 25-1 | 232263 | 188694 | 197683 | |
| 21 | KRTAP26-1 | keratin associated protein 26-1 | 197683 | 232263 | 206107 | 32, |
| 21 | KRTAP27-1 | keratin associated protein 27-1 | 206107 | 197683 | 186980 | |
| 21 | KRTAP6-1 | keratin associated protein 6-1 | 184724 | 186924 | 244624 | |
| 21 | KRTAP6-2 | keratin associated protein 6-2 | 186930 | 212938 | 186924 | |
| 21 | KRTAP6-3 | keratin associated protein 6-3 | 212938 | 206106 | 186930 | |
| 21 | KRTAP7-1 | keratin associated protein 7-1 (gene/pseudogene) | 274749 | 183640 | 182591 | |
| 21 | KRTAP8-1 | keratin associated protein 8-1 | 183640 | 187005 | 274749 | |
| 21 | LSS | lanosterol synthase | 160285 | 160284 | 160294 | 43, 8, 21 |
| 21 | LCA5L | LCA5L, lebercilin like | 157578 | 182093 | 185437 | 30, 38, |
| 21 | LRRC3 | leucine rich repeat containing 3 | 160233 | 142185 | 175894 | 9, 44, |
| 21 | LIPI | lipase I | 188992 | 166351 | 185272 | 6, 10, 38 |
| 21 | LTN1 | listerin E3 ubiquitin protein ligase 1 | 198862 | 156239 | 156253 | 30, 7, 29 |
| 21 | MAP3K7CL | MAP3K7 C-terminal like | 156265 | 156261 | 156273 | 22, 45, 25 |
| 21 | MRAP | melanocortin 2 receptor accessory protein | 170262 | 159055 | 142207 | 3, 2, |
| 21 | MCM3AP | minichromosome maintenance complex component 3 associated protein | 160294 | 160285 | 182362 | 34, 25, 36 |
| 21 | MIS18A | MIS18 kinetochore protein A | 159055 | 142149 | 170262 | 22, 29, 21 |
| 21 | MRPL39 | mitochondrial ribosomal protein L39 | 154719 | 154654 | 154721 | 1, 29, 30 |
| 21 | MRPS6 | mitochondrial ribosomal protein S6 | 243927 | 241837 | 198743 | 18, 41, 11 |
| 21 | MORC3 | MORC family CW-type zinc finger 3 | 159256 | 142197 | 159259 | 18, 42, 4 |
| 21 | MX1 | MX dynamin like GTPase 1 | 157601 | 183486 | 184012 | 36, 4, 41 |
| 21 | MX2 | MX dynamin like GTPase 2 | 183486 | 183844 | 157601 | 39, 36, 22 |
| 21 | N6AMT1 | N-6 adenine-specific DNA methyltransferase 1 (putative) | 156239 | 154736 | 198862 | 28, 45, 36 |
| 21 | NDUFV3 | NADH:ubiquinone oxidoreductase subunit V3 | 160194 | 160193 | 160199 | 45, 9, 15 |
| 21 | NCAM2 | neural cell adhesion molecule 2 | 154654 | 154646 | 154719 | 26, 33, 7 |
| 21 | NRIP1 | nuclear receptor interacting protein 1 | 180530 | 243440 | 155313 | 45, 29, 1 |
| 21 | OLIG1 | oligodendrocyte transcription factor 1 | 184221 | 205927 | 159110 | |
| 21 | OLIG2 | oligodendrocyte transcription factor 2 | 205927 | 205929 | 184221 | 8, 38, 17 |
| 21 | PAXBP1 | PAX3 and PAX7 binding protein 1 | 159086 | 159082 | 205929 | 1, 22, 39 |
| 21 | PKNOX1 | PBX/knotted 1 homeobox 1 | 160199 | 160194 | 160200 | 18, 4, 13 |
| 21 | PCNT | pericentrin | 160299 | 160298 | 160305 | 18, 31, 2 |
| 21 | PIGP | phosphatidylinositol glycan anchor biosynthesis class P | 185808 | 183145 | 182670 | |
| 21 | PDE9A | phosphodiesterase 9A | 160191 | 160190 | 160193 | 33, 16, 26 |
| 21 | PFKL | phosphofructokinase, liver type | 141959 | 160224 | 160226 | 21, 9, 35 |
| 21 | GART | phosphoribosylglycinamide formyltransferase, phosphoribosylglycinamide | 159131 | 177692 | 159140 | 38, 9, 45 |
| | | synthetase, phosphoribosylaminoimidazole synthetase | | | | |
| 21 | PTTG1IP | pituitary tumor-transforming 1 interacting protein | 183255 | 184900 | 160255 | 35, 45, 17 |
| 21 | PCBP3 | poly(rC) binding protein 3 | 183570 | 173638 | 142156 | 39, 5, 38 |
| 21 | KCNE1 | potassium voltage-gated channel subfamily E regulatory subunit 1 | 180509 | 243627 | 159200 | 42, 26, 30 |
| 21 | KCNE1B | potassium voltage-gated channel subfamily E regulatory subunit 1B | 276289 | 278961 | 274391 | |
| 21 | KCNE2 | potassium voltage-gated channel subfamily E regulatory subunit 2 | 159197 | 198743 | 205670 | 37, 10, 38 |
| 21 | KCNJ15 | potassium voltage-gated channel subfamily J member 15 | 157551 | 198054 | 157554 | 40, 5, 17 |
| 21 | KCNJ6 | potassium voltage-gated channel subfamily J member 6 | 157542 | 157540 | 184029 | 28, 33, 8 |
| 21 | POTED | POTE ankyrin domain family member D | 166351 | 280108 | 188992 | |
| 21 | PRDM15 | PR/SET domain 15 | 141956 | 183421 | 157617 | |
| 21 | PSMG1 | proteasome assembly chaperone 1 | 183527 | 157557 | 185658 | 9, 25, 14 |
| 21 | PRMT2 | protein arginine methyltransferase 2 | 160310 | 160307 | 183036 | 34, 26, 15 |
| 21 | POFUT2 | protein O-fucosyltransferase 2 | 186866 | 197381 | 182871 | 15, 6, 13 |
| 21 | PCP4 | Purkinje cell protein 4 | 183036 | 183067 | 171587 | 29, 14, 10 |
| 21 | PWP2 | PWP2 periodic tryptophan protein homolog (yeast) | 241945 | 160218 | 160221 | 43, 3, 25 |
| 21 | PDXK | pyridoxal kinase | 160209 | 160208 | 160213 | 34, 26, 38 |
| 21 | RSPH1 | radial spoke head 1 homolog | 160188 | 160185 | 160190 | 10, 40, 42 |
| 21 | RIPK4 | receptor interacting serine/threonine kinase 4 | 183421 | 184012 | 141956 | 24, 42, 39 |
| 21 | RCAN1 | regulator of calcineurin 1 | 159200 | 180509 | 159212 | 29, 4, 35 |
| 21 | RRP1 | ribosomal RNA processing 1 | 160214 | 160213 | 160216 | 13, 9, 4 |
| 21 | RRP1B | ribosomal RNA processing 1B | 160208 | 234289 | 160209 | 22, 9, 13 |
| 21 | RIPPLY3 | ripply transcriptional repressor 3 | 183145 | 159267 | 185808 | |
| 21 | RBM11 | RNA binding motif protein 11 | 185272 | 188992 | 155304 | 6, 25, 8 |
| 21 | RUNX1 | runt related transcription factor 1 | 159216 | 159212 | 280170 | |
| 21 | RWDD2B | RWD domain containing 2B | 156253 | 198862 | 156256 | 28, 15, 17 |
| 21 | S100B | S100 calcium binding protein B | 160307 | 160305 | 160310 | 11, 35, 8 |
| 21 | SIK1 | salt inducible kinase 1 | 142178 | 160202 | 160207 | 18, 29, 2 |
| 21 | SAMSN1 | SAM domain, SH3 domain and nuclear localization signals 1 | 155307 | 155304 | 243440 | 7, 34, 5 |
| 21 | SETD4 | SET domain containing 4 | 185917 | 280170 | 159228 | 39, 13, 30 |
| 21 | SH3BGR | SH3 domain binding glutamate rich protein | 185437 | 157578 | 183778 | 25, 10, 6 |
| 21 | SIM2 | single-minded family bHLH transcription factor 2 | 159263 | 159261 | 159267 | 27, 16, 30 |
| 21 | SMIM11A | small integral membrane protein 11A | 205670 | 159197 | 222018 | |
| 21 | SMIM11B | small integral membrane protein 11B | 273590 | 276076 | 278961 | 18, 34, 5 |
| 21 | SUMO3 | small ubiquitin-like modifier 3 | 184900 | 184787 | 183255 | 27, 3, 13 |
| 21 | SLC19A1 | solute carrier family 19 member 1 | 173638 | 182871 | 183570 | |
| 21 | SLC37A1 | solute carrier family 37 member 1 | 160190 | 160188 | 160191 | 37, 33, 16 |
| 21 | SLC5A3 | solute carrier family 5 member 3 | 198743 | 243927 | 159197 | 18, 41, 11 |
| 21 | SON | SON DNA binding protein | 159140 | 159131 | 159147 | 31, 29, 19 |
| 21 | SPATC1L | spermatogenesis and centriole associated 1 like | 160284 | 160282 | 160285 | 21, 16, 7 |
| 21 | SCAF4 | SR-related CTD associated factor 4 | 156304 | 142168 | 142149 | 22, 18, 38 |
| 21 | SOD1 | superoxide dismutase 1 | 142168 | 156299 | 156304 | 11, 28, 34 |
| 21 | SYNJ1 | synaptojanin 1 | 159082 | 159079 | 159086 | 31, 32, 8 |
| 21 | TIAM1 | T-cell lymphoma invasion and metastasis 1 | 156299 | 206102 | 142168 | 26, 30, 40 |
| 21 | TCP10L | t-complex 10-like | 242220 | 166979 | 265590 | 38, 22, 27 |
| 21 | TTC3 | tetratricopeptide repeat domain 3 | 182670 | 185808 | 157538 | 11, 14, 44 |
| 21 | TSPEAR | thrombospondin type laminin G domain and EAR repeats | 175894 | 160233 | 215455 | 38, 20, |
| 21 | TRAPPC10 | trafficking protein particle complex 10 | 160218 | 160216 | 241945 | 21, 22, 26 |
| 21 | TRPM2 | transient receptor potential cation channel subfamily M member 2 | 142185 | 160226 | 160233 | 3, 26, 6 |
| 21 | TPTE | transmembrane phosphatase with tensin homology | 274391 | 276289 | 277282 | 38, 2, |
| 21 | TMPRSS15 | transmembrane protease, serine 15 | 154646 | 154645 | 154654 | 23, 22, 37 |
| 21 | TMPRSS2 | transmembrane protease, serine 2 | 184012 | 157601 | 183421 | 33, 4, 37 |
| 21 | TMPRSS3 | transmembrane protease, serine 3 | 160183 | 160182 | 160185 | 42, 4, 9 |
| 21 | TMEM50B | transmembrane protein 50B | 142188 | 159128 | 177692 | 40, 11, 31 |
| 21 | TFF1 | trefoil factor 1 | 160182 | 160181 | 160183 | 37, 23, 16 |
| 21 | TFF2 | trefoil factor 2 | 160181 | 160180 | 160182 | 37, 10, 18 |
| 21 | TFF3 | trefoil factor 3 | 160180 | 160179 | 160181 | 40, 16, 15 |
| 21 | WRB | tryptophan rich basic protein | 182093 | 205581 | 157578 | |
| 21 | U2AF1 | U2 small nuclear RNA auxiliary factor 1 | 160201 | 160200 | 160202 | 12, 4, 19 |
| 21 | U2AF1L5 | U2 small nuclear RNA auxiliary factor 1 like 5 | 275895 | 274276 | 276076 | |
| 21 | UBASH3A | ubiquitin associated and SH3 domain containing A | 160185 | 160183 | 160188 | 36, 5, 39 |
| 21 | UBE2G2 | ubiquitin conjugating enzyme E2 G2 | 184787 | 189169 | 184900 | 43, 6, 14 |
| 21 | USP16 | ubiquitin specific peptidase 16 | 156256 | 156253 | 156261 | 45, 17, 29 |
| 21 | USP25 | ubiquitin specific peptidase 25 | 155313 | 180530 | 154639 | 43, 40, 37 |
| 21 | URB1 | URB1 ribosome biogenesis 1 homolog (S. cerevisiae) | 142207 | 170262 | 166979 | 3, 21, 40 |
| 21 | UMODL1 | uromodulin like 1 | 177398 | 173276 | 160179 | 39, |
| 21 | WDR4 | WD repeat domain 4 | 160193 | 160191 | 160194 | 41, 36, 13 |
| 21 | YBEY | ybeY metallopeptidase (putative) | 182362 | 160294 | 160298 | 43, 15, 37 |
| 21 | ZBTB21 | zinc finger and BTB domain containing 21 | 173276 | 157617 | 177398 | 42, 39, 32 |
| 22 | ACO2 | aconitase 2 | 100412 | 100410 | 100413 | 40, 1, 21 |
| 22 | ACR | acrosin | 100312 | 251322 | 079974 | 38, 27, 8 |
| 22 | ASCC2 | activating signal cointegrator 1 complex subunit 2 | 100325 | 184076 | 100330 | 24, 27, 4 |
| 22 | ATF4 | activating transcription factor 4 | 128272 | 100335 | 187051 | 13, 18, 21 |
| 22 | AP1B1 | adaptor related protein complex 1 beta 1 subunit | 100280 | 100276 | 128250 | 21, 38, 40 |
| 22 | ADORA2A | adenosine A2a receptor | 128271 | 258555 | 100024 | |
| 22 | ADSL | adenylosuccinate lyase | 239900 | 100354 | 100359 | 34, 31, 1 |
| 22 | ARFGAP3 | ADP ribosylation factor GTPase activating protein 3 | 242247 | 128274 | 100266 | 18, 38, 13 |
| 22 | ADM2 | adrenomedullin 2 | 128165 | 100241 | 100253 | 18, 5, 45 |
| 22 | ALG12 | ALG12, alpha-1,6-mannosyltransferase | 182858 | 100426 | 184164 | 9, 1, 40 |
| 22 | A4GALT | alpha 1,4-galactosyltransferase | 128274 | 249222 | 242247 | 36, 41, 4 |
| 22 | NAGA | alpha-N-acetylgalactosaminidase | 198951 | 183066 | 177096 | 29, 32, 6 |
| 22 | ANKRD54 | ankyrin repeat domain 54 | 100124 | 128310 | 100129 | 9, 31, 41 |
| 22 | APOBEC3A | apolipoprotein B mRNA editing enzyme catalytic subunit 3A | 128383 | 183741 | 179750 | |
| 22 | APOBEC3B | apolipoprotein B mRNA editing enzyme catalytic subunit 3B | 179750 | 128383 | 244509 | 18, 11, 5 |
| 22 | APOBEC3C | apolipoprotein B mRNA editing enzyme catalytic subunit 3C | 244509 | 179750 | 243811 | 18, 2, 21 |
| 22 | APOBEC3D | apolipoprotein B mRNA editing enzyme catalytic subunit 3D | 243811 | 244509 | 128394 | 40, 18, 36 |
| 22 | APOBEC3F | apolipoprotein B mRNA editing enzyme catalytic subunit 3F | 128394 | 243811 | 239713 | 41, 29, 22 |
| 22 | APOBEC3G | apolipoprotein B mRNA editing enzyme catalytic subunit 3G | 239713 | 128394 | 100298 | 41, 5, 21 |
| 22 | APOBEC3H | apolipoprotein B mRNA editing enzyme catalytic subunit 3H | 100298 | 239713 | 100307 | 5, 40, 32 |
| 22 | APOL1 | apolipoprotein L1 | 100342 | 128335 | 100345 | 36, 37, 39 |
| 22 | APOL2 | apolipoprotein L2 | 128335 | 100336 | 100342 | 39, 34, 36 |
| 22 | APOL3 | apolipoprotein L3 | 128284 | 100320 | 100336 | 36, 10, 15 |
| 22 | APOL4 | apolipoprotein L4 | 100336 | 128284 | 128335 | 42, 33, 36 |
| 22 | APOL5 | apolipoprotein L5 | 128313 | 221963 | 100320 | 23, 38, 32 |
| 22 | APOL6 | apolipoprotein L6 | 221963 | 198125 | 128313 | 36, 13, 21 |
| 22 | AIFM3 | apoptosis inducing factor, mitochondria associated 3 | 183773 | 099942 | 099949 | |
| 22 | ARVCF | armadillo repeat gene deleted in velocardiofacial syndrome | 099889 | 093010 | 183597 | 29, 33, 15 |
| 22 | ARSA | arylsulfatase A | 100299 | 008735 | 251322 | 40, 20, |
| 22 | ASPHD2 | aspartate beta-hydroxylase domain containing 2 | 128203 | 100095 | 100099 | 26, 14, 36 |
| 22 | DRICH1 | aspartate rich 1 | 189269 | 128322 | 159496 | |
| 22 | ATXN10 | ataxin 10 | 130638 | 077942 | 188064 | 41, 13, 21 |
| 22 | ATP5L2 | ATP synthase, H+ transporting, mitochondrial Fo complex subunit G2 | 249222 | 100243 | 128274 | 6, 17, |
| 22 | ATP6V1E1 | ATPase H+ transporting V1 subunit E1 | 131100 | 182902 | 099968 | 41, 34, 30 |
| 22 | BAGE5 | B melanoma antigen family member 5 | 279973 | 280363 | 130538 | |
| 22 | BAIAP2L2 | BAI1 associated protein 2 like 2 | 128298 | 100156 | 184381 | 16, 28, 23 |
| 22 | BIK | BCL2 interacting killer | 100290 | 100271 | 100294 | 21, 41, 22 |
| 22 | BCL2L13 | BCL2 like 13 | 099968 | 131100 | 015475 | |
| 22 | BCR | BCR, RhoGEF and GTPase activating protein | 186716 | 100228 | 128322 | 43, 1, 21 |
| 22 | UPB1 | beta-ureidopropionase 1 | 100024 | 128271 | 138867 | 19, 17, 26 |
| 22 | BID | BH3 interacting domain death agonist | 015475 | 099968 | 243156 | 43, 6, 3 |
| 22 | BPIFC | BPI fold containing family C | 184459 | 100220 | 100225 | 13, 35, 28 |
| 22 | BRD1 | bromodomain containing 1 | 100425 | 219438 | 100426 | 38, 26, 33 |
| 22 | C1QTNF6 | C1q and tumor necrosis factor related protein 6 | 133466 | 100385 | 278195 | |
| 22 | CELSR1 | cadherin EGF LAG seven-pass G-type receptor 1 | 075275 | 100416 | 075240 | 34, 40, 30 |
| 22 | CABIN1 | calcineurin binding protein 1 | 099991 | 099984 | 099994 | |
| 22 | CABP7 | calcium binding protein 7 | 100314 | 186575 | 100319 | 11, 41, 29 |
| 22 | CACNG2 | calcium voltage-gated channel auxiliary subunit gamma 2 | 166862 | 100353 | 100360 | 7, 14, 8 |
| 22 | CACNA1I | calcium voltage-gated channel subunit alpha1 I | 100346 | 187051 | 176177 | 26, 40, 25 |
| 22 | CPT1B | carnitine palmitoyltransferase 1B | 205560 | 217442 | 254413 | 15, 38, 24 |
| 22 | CSNK1E | casein kinase 1 epsilon | 213923 | 198792 | 168135 | |
| 22 | CARD10 | caspase recruitment domain family member 10 | 100065 | 100060 | 128283 | 17, 28, 26 |
| 22 | CECR1 | cat eye syndrome chromosome region, candidate 1 | 093072 | 069998 | 099954 | 39, 42, 10 |
| 22 | CECR5 | cat eye syndrome chromosome region, candidate 5 | 069998 | 183307 | 093072 | 33, 5, 9 |
| 22 | CECR6 | cat eye syndrome chromosome region, candidate 6 | 183307 | 177663 | 069998 | 5, 10, 14 |
| 22 | COMT | catechol-O-methyltransferase | 093010 | 184470 | 099889 | 35, 41, 32 |
| 22 | CDC42EP1 | CDC42 effector protein 1 | 128283 | 100065 | 100079 | 3, 6, 37 |
| 22 | CECR2 | CECR2, histone acetyl-lysine reader | 099954 | 093072 | 182902 | 18, 2, 32 |
| 22 | CDC45 | cell division cycle 45 | 093009 | 070010 | 184113 | 5, 39, 7 |
| 22 | CENPM | centromere protein M | 100162 | 159958 | 100167 | 21, 41, 35 |
| 22 | CERK | ceramide kinase | 100422 | 075240 | 054611 | 22, 43, 29 |
| 22 | CCT8L2 | chaperonin containing TCP1 subunit 8 like 2 | 198445 | 198062 | 172967 | 38, 17, 8 |
| 22 | CHEK2 | checkpoint kinase 2 | 183765 | 100154 | 100209 | 10, 9, 5 |
| 22 | CBY1 | chibby family member 1, beta catenin antagonist | 100211 | 184949 | 100216 | 23, 30, 9 |
| 22 | CHKB-CPT1B | CHKB-CPT1 Breadthrough | 254413 | 205560 | 100288 | |
| 22 | CHKB | choline kinase beta | 100288 | 254413 | 008735 | 7, 11, 31 |
| 22 | CHADL | chondroadherin like | 100399 | 100395 | 100401 | 26, 31, 8 |
| 22 | CBX6 | chromobox 6 | 183741 | 221890 | 128383 | 26, 34, 1 |
| 22 | CBX7 | chromobox 7 | 100307 | 100298 | 100311 | 26, 14, 28 |
| 22 | C22orf15 | chromosome 22 open reading frame 15 | 169314 | 128218 | 250479 | 42, 39, 30 |
| 22 | C22orf23 | chromosome 22 open reading frame 23 | 128346 | 100139 | 100142 | 38, 30, 37 |
| 22 | C22orf29 | chromosome 22 open reading frame 29 | 215012 | 185838 | 184470 | 40, 43, 11 |
| 22 | C22orf31 | chromosome 22 open reading frame 31 | 100249 | 183579 | 183762 | 29, 20, 38 |
| 22 | C22orf39 | chromosome 22 open reading frame 39 | 242259 | 100084 | 185608 | 29, 33, 26 |
| 22 | C22orf42 | chromosome 22 open reading frame 42 | 205856 | 100170 | 128253 | 28, 38, |
| 22 | C22orf46 | chromosome 22 open reading frame 46 | 184208 | 100138 | 167077 | 40, 18, 34 |
| 22 | CLTCL1 | clathrin heavy chain like 1 | 070371 | 100075 | 100084 | 26, 31, 38 |
| 22 | CLDN5 | claudin 5 | 184113 | 093009 | 184702 | 1, 26, 20 |
| 22 | CCDC116 | coiled-coil domain containing 116 | 161180 | 161179 | 128228 | 38, 10, 8 |
| 22 | CCDC117 | coiled-coil domain containing 117 | 159873 | 100209 | 100219 | 43, 22, 38 |
| 22 | CCDC134 | coiled-coil domain containing 134 | 100147 | 167077 | 198911 | 2, 6, 18 |
| 22 | CCDC157 | coiled-coil domain containing 157 | 187860 | 099995 | 099999 | 38, 26, 39 |
| 22 | CCDC188 | coiled-coil domain containing 188 | 234409 | 099904 | 040608 | 38, 28, |
| 22 | CHCHD10 | coiled-coil-helix-coiled-coil-helix domain containing 10 | 250479 | 169314 | 099953 | 25, 28, 17 |
| 22 | CSDC2 | cold shock domain containing C2 | 172346 | 100413 | 100417 | 14, 8, 17 |
| 22 | CSF2RB | colony stimulating factor 2 receptor beta common subunit | 100368 | 100365 | 185264 | 1, 32, 22 |
| 22 | CRKL | CRK like proto-oncogene, adaptor protein | 099942 | 099940 | 183773 | 37, 7, 29 |
| 22 | CRYBA4 | crystallin beta A4 | 196431 | 100122 | 169184 | 14, 12, 32 |
| 22 | CRYBB1 | crystallin beta B1 | 100122 | 128294 | 196431 | 14, 10, 22 |
| 22 | CRYBB2 | crystallin beta B2 | 244752 | 100053 | 100068 | 14, 20, 38 |
| 22 | CRYBB3 | crystallin beta B3 | 100053 | 197077 | 244752 | 14, 33, 35 |
| 22 | CDPF1 | cysteine rich DPF motif domain containing 1 | 205643 | 186951 | 130943 | 27, 5, 3 |
| 22 | CRELD2 | cysteine rich with EGF like domains 2 | 184164 | 182858 | 198355 | 41, 25, 6 |
| 22 | CYB5R3 | cytochrome b5 reductase 3 | 100243 | 100227 | 249222 | 1, 26, 2 |
| 22 | CYP2D6 | cytochrome P450 family 2 subfamily D member 6 | 100197 | 184983 | 205702 | |
| 22 | CYP2D7 | cytochrome P450 family 2 subfamily D member 7 (gene/pseudogene) | 205702 | 100197 | 100207 | 19, 39, 35 |
| 22 | CYTH4 | cytohesin 4 | 100055 | 128340 | 166897 | 39, 5, 36 |
| 22 | DDT | D-dopachrome tautomerase | 099977 | 099974 | 099984 | 15, 19, 8 |
| 22 | DDTL | D-dopachrome tautomerase-like | 099974 | 133433 | 099977 | 36, 1, 39 |
| 22 | DDX17 | DEAD-box helicase 17 | 100201 | 100196 | 100206 | 31, 11, 40 |
| 22 | DENND6B | DENN domain containing 6B | 205593 | 196576 | 100239 | 26, 41, 38 |
| 22 | DEPDC5 | DEP domain containing 5 | 100150 | 183530 | 128245 | 22, 13, 43 |
| 22 | DERL3 | derlin 3 | 099958 | 099956 | 133460 | 22, 20, 41 |
| 22 | DESI1 | desumoylating isopeptidase 1 | 100418 | 100417 | 196419 | 9, 26, 15 |
| 22 | DRG1 | developmentally regulated GTP binding protein 1 | 185721 | 100105 | 184708 | 43, 38, 9 |
| 22 | DGCR8 | DGCR8, microprocessor complex subunit | 128191 | 183597 | 099899 | 1, 37, 13 |
| 22 | DGCR14 | DiGeorge syndrome critical region gene 14 | 100056 | 070413 | 206203 | 34, 31, 32 |
| 22 | DGCR2 | DiGeorge syndrome critical region gene 2 | 070413 | 279560 | 100056 | 8, 42, 38 |
| 22 | DGCR6 | DiGeorge syndrome critical region gene 6 | 183628 | 275793 | 100033 | 25, 2, 8 |
| 22 | DGCR6L | DiGeorge syndrome critical region gene 6-like | 128185 | 040608 | 161133 | 34, 29, 25 |
| 22 | DMC1 | DNA meiotic recombinase 1 | 100206 | 100201 | 184949 | 45, 39, 22 |
| 22 | POLDIP3 | DNA polymerase delta interacting protein 3 | 100227 | 183569 | 100243 | 39, 42, 24 |
| 22 | DNAJB7 | DnaJ heat shock protein family (Hsp40) member B7 | 172404 | 196236 | 100387 | 38, 40, 22 |
| 22 | DUSP18 | dual specificity phosphatase 18 | 167065 | 100036 | 184792 | |
| 22 | DNAL4 | dynein axonemal light chain 4 | 100246 | 100242 | 221890 | 1, 27, 26 |
| 22 | EP300 | E1A binding protein p300 | 100393 | 100387 | 100395 | 18, 22, 5 |
| 22 | EFCAB6 | EF-hand calcium binding domain 6 | 186976 | 186732 | 130540 | 38, 31, 40 |
| 22 | EMID1 | EMI domain containing 1 | 186998 | 183762 | 100263 | 36, 29, 33 |
| 22 | ENTHD1 | ENTH domain containing 1 | 176177 | 100346 | 100351 | 38, 7, 35 |
| 22 | EIF3D | eukaryotic translation initiation factor 3 subunit D | 100353 | 100350 | 166862 | 21, 3, 13 |
| 22 | EIF3L | eukaryotic translation initiation factor 3 subunit L | 100129 | 100124 | 100139 | 13, 39, 2 |
| 22 | EIF4ENIF1 | eukaryotic translation initiation factor 4E nuclear import factor 1 | 184708 | 185721 | 198089 | |
| 22 | EWSR1 | EWS RNA binding protein 1 | 182944 | 100263 | 185340 | 41, 21, 39 |
| 22 | ELFN2 | extracellular leucine rich repeat and fibronectin type III domain containing 2 | 166897 | 100055 | 100060 | 22, 28, 38 |
| 22 | FOXRED2 | FAD dependent oxidoreductase domain containing 2 | 100350 | 100348 | 100353 | 28, 9, 8 |
| 22 | FAM109B | family with sequence similarity 109 member B | 177096 | 198951 | 183172 | 15, 1, 32 |
| 22 | FAM118A | family with sequence similarity 118 member A | 100376 | 100373 | 077935 | |
| 22 | FAM19A5 | family with sequence similarity 19 member A5, C-C motif chemokine like | 219438 | 278881 | 100425 | 11, 8, 14 |
| 22 | FAM227A | family with sequence similarity 227 member A | 184949 | 100206 | 100211 | 14, 7, 38 |
| 22 | FAM83F | family with sequence similarity 83 member F | 133477 | 100351 | 100354 | 22, 28, 3 |
| 22 | FBXO7 | F-box protein 7 | 100225 | 184459 | 185666 | 25, 9, 32 |
| 22 | FBLN1 | fibulin 1 | 077942 | 128408 | 130638 | 32, 34, 27 |
| 22 | GNAZ | G protein subunit alpha z | 128266 | 100218 | 100228 | 8, 26, 14 |
| 22 | GNB1L | G protein subunit beta 1 like | 185838 | 184058 | 215012 | 40, 43, 11 |
| 22 | GRK3 | G protein-coupled receptor kinase 3 | 100077 | 100068 | 133454 | 22, 26, 28 |
| 22 | GTSE1 | G2 and S-phase expressed 1 | 075218 | 075234 | 100416 | 13, 39, 22 |
| 22 | GAL3ST1 | galactose-3-O-sulfotransferase 1 | 128242 | 214491 | 100029 | 17, 8, 3 |
| 22 | GALR3 | galanin receptor 3 | 128310 | 100116 | 100124 | 27, 14, |
| 22 | LGALS1 | galectin 1 | 100097 | 241360 | 273899 | 43, 34, 45 |
| 22 | LGALS2 | galectin 2 | 100079 | 128283 | 100083 | 10, 17, 30 |
| 22 | GGT1 | gamma-glutamyltransferase 1 | 100031 | 100028 | 178026 | 5, 23, 24 |
| 22 | GGT2 | gamma-glutamyltransferase 2 | 133475 | 187905 | 274600 | |
| 22 | GGT5 | gamma-glutamyltransferase 5 | 099998 | 099994 | 100014 | 2, 36, 45 |
| 22 | GGTLC2 | gamma-glutamyltransferase light chain 2 | 100121 | 211657 | 211658 | 38, 28, |
| 22 | GGTLC3 | Gamma-glutamyltransferase light chain 3 | 274252 | 184979 | 278558 | |
| 22 | GATSL3 | GATS protein like 3 | 239282 | 099985 | 248751 | 13, 44, 38 |
| 22 | GSTT2 | glutathione S-transferase theta 2 (gene/pseudogene) | 099984 | 099977 | 099991 | 34, 2, 3 |
| 22 | GSTT2B | glutathione S-transferase theta 2B (gene/pseudogene) | 133433 | 240972 | 099974 | 2, 15, 29 |
| 22 | GOAT | glycine C-acetyltransferase | 100116 | 189060 | 128310 | 29, 40, 26 |
| 22 | GP1BB | glycoprotein lb platelet beta subunit | 203618 | 184702 | 184058 | 31, 36, 28 |
| 22 | GGA1 | golgi associated, gamma adaptin ear containing, ARF binding protein 1 | 100083 | 100079 | 100092 | 3, 38, 36 |
| 22 | GSC2 | goosecoid homeobox 2 | 063515 | 206203 | 100075 | 38, |
| 22 | GRAMD4 | GRAM domain containing 4 | 075240 | 075275 | 100422 | 22, 20, 17 |
| 22 | GAB4 | GRB2 associated binding protein family member 4 | 215568 | 172967 | 177663 | 38, |
| 22 | GRAP2 | GRB2-related adaptor protein 2 | 100351 | 176177 | 133477 | 39, 13, 7 |
| 22 | GAS2L1 | growth arrest specific 2 like 1 | 185340 | 182944 | 100276 | 38, 5, 13 |
| 22 | GTPBP1 | GTP binding protein 1 | 100226 | 100221 | 100242 | 22, 13, 43 |
| 22 | GUCD1 | guanylyl cyclase domain containing 1 | 138867 | 100024 | 100028 | 3, 9, 34 |
| 22 | H1F0 | H1 histone family member 0 | 189060 | 100106 | 100116 | 13, 1, 6 |
| 22 | HMOX1 | heme oxygenase 1 | 100292 | 100284 | 100297 | 36, 32, 34 |
| 22 | HIC2 | HIC ZBTB transcriptional repressor 2 | 169635 | 274600 | 206140 | 1, 32, 15 |
| 22 | HIRA | histone cell cycle regulator | 100084 | 070371 | 242259 | 3, 24, 40 |
| 22 | HDAC10 | histone deacetylase 10 | 100429 | 128159 | 188130 | 9, 22, 5 |
| 22 | HMGXB4 | HMG-box containing 4 | 100281 | 175329 | 100284 | 19, 12, 6 |
| 22 | HORMAD2 | HORMA domain containing 2 | 176635 | 100330 | 128342 | 38, 19, 28 |
| 22 | HPS4 | HPS4, biogenesis of lysosomal organelles complex 3 subunit 2 | 100099 | 128203 | 100104 | 22, 39, 43 |
| 22 | HSCB | HscB mitochondrial iron-sulfur cluster cochaperone | 100209 | 183765 | 159873 | 40, 21, 17 |
| 22 | IGLC1 | Immunoglobulin lambda constant 1 | 211675 | 211674 | 211676 | 30, 41, 7 |
| 22 | IGLC2 | Immunoglobulin lambda constant 2 | 211677 | 211676 | 211678 | |
| 22 | IGLC3 | Immunoglobulin lambda constant 3 (Kern-Oz+ marker) | 211679 | 211678 | 211680 | |
| 22 | IGLC7 | Immunoglobulin lambda constant 7 | 211685 | 211684 | 100218 | |
| 22 | IGLJ1 | Immunoglobulin lambda joining 1 | 211674 | 254709 | 211675 | |
| 22 | IGLJ2 | Immunoglobulin lambda joining 2 | 211676 | 211675 | 211677 | |
| 22 | IGLJ3 | Immunoglobulin lambda joining 3 | 211678 | 211677 | 211679 | |
| 22 | IGLJ4 | Immunoglobulin lambda joining 4 (non-functional) | 211680 | 211679 | 211681 | |
| 22 | IGLJ5 | Immunoglobulin lambda joining 5 (non-functional) | 211681 | 211680 | 211682 | |
| 22 | IGLJ6 | Immunoglobulin lambda joining 6 | 211682 | 211681 | 211684 | |
| 22 | IGLJ7 | Immunoglobulin lambda joining 7 | 211684 | 211682 | 211685 | |
| 22 | IGLL1 | immunoglobulin lambda like polypeptide 1 | 128322 | 186716 | 189269 | 7, 5, 15 |
| 22 | IGLL5 | immunoglobulin lambda like polypeptide 5 | 254709 | 211673 | 211674 | |
| 22 | IGLV10-54 | Immunoglobulin lambda variable 10-54 | 211642 | 211641 | 169575 | |
| 22 | IGLV11-55 | Immunoglobulin lambda variable 11-55 (non-functional) | 211641 | 211640 | 211642 | |
| 22 | IGLV1-36 | Immunoglobulin lambda variable 1-36 | 211655 | 211654 | 275004 | |
| 22 | IGLV1-40 | Immunoglobulin lambda variable 1-40 | 211653 | 211652 | 211654 | |
| 22 | IGLV1-44 | Immunoglobulin lambda variable 1-44 | 211651 | 211650 | 211652 | 30, 41, 22 |
| 22 | IGLV1-47 | Immunoglobulin lambda variable 1-47 | 211648 | 211647 | 211649 | |
| 22 | IGLV1-50 | Immunoglobulin lambda variable 1-50 (non-functional) | 211645 | 211644 | 223350 | |
| 22 | IGLV1-51 | Immunoglobulin lambda variable 1-51 | 211644 | 211643 | 211645 | |
| 22 | IGLV2-11 | Immunoglobulin lambda variable 2-11 | 211668 | 211667 | 211669 | |
| 22 | IGLV2-14 | Immunoglobulin lambda variable 2-14 | 211666 | 211665 | 211667 | |
| 22 | IGLV2-18 | Immunoglobulin lambda variable 2-18 | 211664 | 211663 | 211665 | |
| 22 | IGLV2-23 | Immunoglobulin lambda variable 2-23 | 211660 | 211659 | 211661 | |
| 22 | IGLV2-33 | Immunoglobulin lambda variable 2-33 (non-functional) | 211656 | 185686 | 211657 | |
| 22 | IGLV2-8 | Immunoglobulin lambda variable 2-8 | 278196 | 211670 | 211672 | |
| 22 | IGLV3-1 | Immunoglobulin lambda variable 3-1 | 211673 | 211672 | 254709 | |
| 22 | IGLV3-10 | Immunoglobulin lambda variable 3-10 | 211669 | 211668 | 211670 | |
| 22 | IGLV3-12 | Immunoglobulin lambda variable 3-12 | 211667 | 211666 | 211668 | |
| 22 | IGLV3-16 | Immunoglobulin lambda variable 3-16 | 211665 | 211664 | 211666 | |
| 22 | IGLV3-19 | Immunoglobulin lambda variable 3-19 | 211663 | 211662 | 211664 | |
| 22 | IGLV3-21 | Immunoglobulin lambda variable 3-21 | 211662 | 211661 | 211663 | |
| 22 | IGLV3-22 | Immunoglobulin lambda variable 3-22 (gene/pseudogene) | 211661 | 211660 | 211662 | |
| 22 | IGLV3-25 | Immunoglobulin lambda variable 3-25 | 211659 | 211658 | 211660 | |
| 22 | IGLV3-27 | Immunoglobulin lambda variable 3-27 | 211658 | 100121 | 211659 | |
| 22 | IGLV3-32 | Immunoglobulin lambda variable 3-32 (non-functional) | 211657 | 211656 | 100121 | |
| 22 | IGLV3-9 | Immunoglobulin lambda variable 3-9 (gene/pseudogene) | 211670 | 211669 | 278196 | |
| 22 | IGLV4-3 | Immunoglobulin lambda variable 4-3 | 211672 | 278196 | 211673 | |
| 22 | IGLV4-60 | Immunoglobulin lambda variable 4-60 | 211639 | 211638 | 211640 | |
| 22 | IGLV4-69 | Immunoglobulin lambda variable 4-69 | 211637 | 100038 | 211638 | |
| 22 | IGLV5-37 | Immunoglobulin lambda variable 5-37 | 211654 | 211653 | 211655 | |
| 22 | IGLV5-45 | Immunoglobulin lambda variable 5-45 | 211650 | 211649 | 211651 | |
| 22 | IGLV5-48 | Immunoglobulin lambda variable 5-48 (non-functional) | 211647 | 223350 | 211648 | |
| 22 | IGLV5-52 | Immunoglobulin lambda variable 5-52 | 211643 | 169575 | 211644 | |
| 22 | IGLV6-57 | Immunoglobulin lambda variable 6-57 | 211640 | 211639 | 211641 | 30, 24, 36 |
| 22 | IGLV7-43 | Immunoglobulin lambda variable 7-43 | 211652 | 211651 | 211653 | |
| 22 | IGLV7-46 | Immunoglobulin lambda variable 7-46 (gene/pseudogene) | 211649 | 211648 | 211650 | |
| 22 | IGLV8-61 | Immunoglobulin lambda variable 8-61 | 211638 | 211637 | 211639 | |
| 22 | IGLV9-49 | Immunoglobulin lambda variable 9-49 | 223350 | 211645 | 211647 | |
| 22 | INPP5J | inositol polyphosphate-5-phosphatase J | 185133 | 198832 | 100078 | 40, 29, 24 |
| 22 | IL17RA | interleukin 17 receptor A | 177663 | 215568 | 183307 | 5, 40, 31 |
| 22 | IL17REL | interleukin 17 receptor E like | 188263 | 198355 | 138892 | 36, 38, |
| 22 | IL2RB | interleukin 2 receptor subunit beta | 100385 | 187045 | 133466 | 42, 36, 32 |
| 22 | ISX | intestine specific homeobox | 175329 | 133424 | 100281 | 19, 16, |
| 22 | IFT27 | intraflagellar transport 27 | 100360 | 166862 | 100362 | 26, 29, 40 |
| 22 | JOSD1 | Josephin domain containing 1 | 100221 | 100216 | 100226 | 4, 34, 1 |
| 22 | KDELR3 | KDEL endoplasmic reticulum protein retention receptor 3 | 100196 | 168135 | 100201 | 7, 9, 6 |
| 22 | KLHDC7B | kelch domain containing 7B | 130487 | 177989 | 217442 | 29, 23, 9 |
| 22 | KLHL22 | kelch like family member 22 | 099910 | 277971 | 099917 | 18, 1, 34 |
| 22 | KIAA0930 | KIAA0930 | 100364 | 093000 | 100373 | 26, 5, 34 |
| 22 | KIAA1644 | KIAA1644 | 138944 | 138964 | 188636 | 44, 14, 6 |
| 22 | KIAA1671 | KIAA1671 | 197077 | 206069 | 100053 | 43, 24, 39 |
| 22 | KREMEN1 | kringle containing transmembrane protein 1 | 183762 | 100249 | 186998 | 24, 35, 1 |
| 22 | L3MBTL2 | L3MBTL2 polycomb repressive complex 1 subunit | 100395 | 100393 | 100399 | 41, 35, 22 |
| 22 | LARGE1 | LARGE xylosyl- and glucuronyltransferase 1 | 133424 | 100234 | 175329 | |
| 22 | LRP5L | LDL receptor related protein 5 like | 100068 | 244752 | 100077 | 39, 25, 5 |
| 22 | LRRC74B | leucine rich repeat containing 74B | 187905 | 099960 | 133475 | |
| 22 | LRRC75B | leucine rich repeat containing 75B | 178026 | 100031 | 184571 | |
| 22 | LDOC1L | leucine zipper down-regulated in cancer 1 like | 188636 | 138944 | 186654 | 11, 42, 44 |
| 22 | LZTR1 | leucine zipper like transcription regulator 1 | 099949 | 183773 | 184436 | 1, 40, 18 |
| 22 | LIF | leukemia inhibitory factor | 128342 | 176635 | 099985 | 12, 28, 37 |
| 22 | LIMK2 | LIM domain kinase 2 | 182541 | 138942 | 100100 | 42, 24, 32 |
| 22 | LMF2 | lipase maturation factor 2 | 100258 | 100253 | 025770 | 35, 7, 28 |
| 22 | MIF | macrophage migration inhibitory factor (glycosylation-inhibiting factor) | 240972 | 251357 | 133433 | 3, 21, 12 |
| 22 | MAFF | MAF bZIP transcription factor F | 185022 | 184381 | 198792 | 1, 32, 23 |
| 22 | MCAT | malonyl-CoA-acyl carrier protein transacylase | 100294 | 100290 | 100300 | 27, 20, 3 |
| 22 | MGAT3 | mannosyl (beta-1,4-)-glycoprotein beta-1,4-N-acetylglucosaminyltransferase | 128268 | 100324 | 100335 | 22, 14, 26 |
| 22 | MMP11 | matrix metallopeptidase 11 | 099953 | 250479 | 280178 | 32, 27, 44 |
| 22 | MED15 | mediator complex subunit 15 | 099917 | 099910 | 241973 | 18, 3, 28 |
| 22 | MKL1 | megakaryoblastic leukemia (translocation) 1 | 196588 | 100359 | 128285 | 22, 26, 7 |
| 22 | MLC1 | megalencephalic leukoencephalopathy with subcortical cysts 1 | 100427 | 138892 | 073146 | 8, 7, 26 |
| 22 | MEI1 | meiotic double-stranded break formation protein 1 | 167077 | 184208 | 100147 | 36, 38, 5 |
| 22 | MCHR1 | melanin concentrating hormone receptor 1 | 128285 | 196588 | 100372 | 8, 44, 28 |
| 22 | MPST | mercaptopyruvate sulfurtransferase | 128309 | 128311 | 100379 | 34, 21, 16 |
| 22 | MPPED1 | metallophosphoesterase domain containing 1 | 186732 | 159307 | 186976 | 8, 18, 39 |
| 22 | MFNG | MFNG O-fucosylpeptide 3-beta-N-acetylglucosaminyltransferase | 100060 | 166897 | 100065 | 41, 43, 22 |
| 22 | MICALL1 | MICAL like 1 | 100139 | 100129 | 128346 | 41, 9, 32 |
| 22 | MICAL3 | microtubule associated monooxygenase, calponin and UM domain containing 3 | 243156 | 015475 | 215193 | |
| 22 | MCM5 | minichromosome maintenance complex component 5 | 100297 | 100292 | 100302 | 21, 34, 36 |
| 22 | MIEF1 | mitochondrial elongation factor 1 | 100335 | 128268 | 128272 | |
| 22 | MTFP1 | mitochondrial fission process 1 | 242114 | 249590 | 100012 | 21, 41, 7 |
| 22 | MRPL40 | mitochondrial ribosomal protein L40 | 185608 | 242259 | 070010 | 34, 43, 29 |
| 22 | MAPK1 | mitogen-activated protein kinase 1 | 100030 | 100027 | 100034 | 24, 34, 22 |
| 22 | MAPK11 | mitogen-activated protein kinase 11 | 185386 | 188130 | 196576 | 1, 5, 26 |
| 22 | MAPK12 | mitogen-activated protein kinase 12 | 188130 | 100429 | 185386 | 5, 13, 9 |
| 22 | MAPK8IP2 | mitogen-activated protein kinase 8 interacting protein 2 | 008735 | 100288 | 100299 | 26, 8, 13 |
| 22 | MN1 | MN1 proto-oncogene, transcriptional regulator | 169184 | 196431 | 180957 | 11, 1, 45 |
| 22 | MORC2 | MORC family CW-type zinc finger 2 | 133422 | 184792 | 183963 | 26, 6, 16 |
| 22 | MOV10L1 | Mov10 RISC complex RNA helicase like 1 | 073146 | 100427 | 073150 | 38, 45, 1 |
| 22 | MB | myoglobin | 198125 | 100302 | 221963 | 25, 15, 18 |
| 22 | MIOX | myo-inositol oxygenase | 100253 | 128165 | 100258 | 17, 40, 23 |
| 22 | MYH9 | myosin heavy chain 9 | 100345 | 100342 | 100348 | 18, 40, 16 |
| 22 | MYO18B | myosin XVIIIB | 133454 | 100077 | 100095 | |
| 22 | MTMR3 | myotubularin related protein 3 | 100330 | 100325 | 176635 | 11, 26, 20 |
| 22 | NDUFA6 | NADH:ubiquinone oxidoreductase subunit A6 | 184983 | 183172 | 100197 | 25, 34, 29 |
| 22 | NF2 | neurofibromin 2 | 186575 | 184117 | 100314 | 27, 22, 35 |
| 22 | NEFH | neurofilament heavy | 100285 | 128250 | 100296 | 26, 33, 11 |
| 22 | NPTXR | neuronal pentraxin receptor | 221890 | 100246 | 183741 | 8, 9, 23 |
| 22 | NCF4 | neutrophil cytosolic factor 4 | 100365 | 100362 | 100368 | 5, 41, 7 |
| 22 | NFAM1 | NFAT activating protein with ITAM motif 1 | 235568 | 100207 | 189306 | 5, 36, 6 |
| 22 | NIPSNAP1 | nipsnap homolog 1 | 184117 | 100296 | 186575 | 3, 21, 14 |
| 22 | NCAPH2 | non-SMC condensin II complex subunit H2 | 025770 | 100258 | 130489 | 1, 26, 14 |
| 22 | NOL12 | nucleolar protein 12 | 273899 | 100097 | 100101 | 36, 37, 39 |
| 22 | NUP50 | nudeoporin 50 | 093000 | 056487 | 100364 | |
| 22 | OR11H1 | olfactory receptor family 11 subfamily H member 1 | 130538 | 279973 | 198062 | |
| 22 | OSM | on costatin M | 099985 | 128342 | 239282 | 5, 20, 39 |
| 22 | ODF3B | outer dense fiber of sperm tails 3B | 177989 | 025708 | 130487 | 22, 20, 27 |
| 22 | OSBP2 | oxysterol binding protein 2 | 184792 | 167065 | 133422 | |
| 22 | PANX2 | pannexin 2 | 073150 | 073146 | 170638 | 23, 6, 37 |
| 22 | PVALB | parvalbumin | 100362 | 100360 | 100365 | 29, 17, 14 |
| 22 | PARVB | parvin beta | 188677 | 100347 | 138964 | 43, 28, 9 |
| 22 | PARVG | parvin gamma | 138964 | 188677 | 138944 | 5, 36, 39 |
| 22 | PNPLA3 | patatin like phospholipase domain containing 3 | 100344 | 100341 | 100347 | 35, 5, 16 |
| 22 | PNPLA5 | patatin like phospholipase domain containing 5 | 100341 | 130540 | 100344 | 35, 8, 12 |
| 22 | PPIL2 | peptidylprolyl isomerase like 2 | 100023 | 128228 | 100027 | 43, 34, 30 |
| 22 | PEX26 | peroxisomal biogenesis factor 26 | 215193 | 243156 | 183785 | 37, 24, 6 |
| 22 | PPARA | peroxisome proliferator activated receptor alpha | 186951 | 182257 | 205643 | 25, 2, 19 |
| 22 | PES1 | pescadillo ribosomal biogenesis factor 1 | 100029 | 128242 | 185339 | 36, 3, 21 |
| 22 | PHF21B | PHD finger protein 21B | 056487 | 241484 | 093000 | 14, 38, 8 |
| 22 | PHF5A | PHD finger protein 5A | 100410 | 183864 | 100412 | 26, 21, 35 |
| 22 | PI4KA | phosphatidylinositol 4-kinase alpha | 241973 | 099917 | 099937 | |
| 22 | PITPNB | phosphatidylinositol transfer protein beta | 180957 | 169184 | 100154 | 13, 9, 40 |
| 22 | PISD | phosphatidylserine decarboxylase | 241878 | 198089 | 183530 | 31, 32, 9 |
| 22 | PIK3IP1 | phosphoinositide-3-kinase interacting protein 1 | 100100 | 182541 | 100105 | 36, 39, 29 |
| 22 | PLA2G3 | phospholipase A2 group III | 100078 | 185133 | 138942 | 3, 2, 16 |
| 22 | PLA2G6 | phospholipase A2 group VI | 184381 | 128298 | 185022 | 39, 38, 42 |
| 22 | PMM1 | phosphomannomutase 1 | 100417 | 172346 | 100418 | 1, 35, 3 |
| 22 | PIM3 | Pim-3 proto-oncogene, serine/threonine kinase | 198355 | 184164 | 188263 | 43, 28, 21 |
| 22 | PIWIL3 | piwi like RNA-mediated gene silencing 3 | 184571 | 178026 | 167037 | 38, |
| 22 | PDGFB | platelet derived growth factor subunit B | 100311 | 100307 | 100316 | 24, 45, 32 |
| 22 | PLXNB2 | plexin B2 | 196576 | 185386 | 205593 | 26, 27, 22 |
| 22 | PKDREJ | polycystin (PKD) family receptor for egg jelly | 130943 | 205643 | 075234 | 24, 28, 38 |
| 22 | KCTD17 | potassium channel tetramerization domain containing 17 | 100379 | 128309 | 187045 | 31, 27, 22 |
| 22 | KCNJ4 | potassium voltage-gated channel subfamily J member 4 | 168135 | 213923 | 100196 | 15, 8, 20 |
| 22 | POTEH | POTE ankyrin domain family member H | 198062 | 130538 | 198445 | 38, |
| 22 | PATZ1 | POZ/BTB and AT hook containing zinc finger 1 | 100105 | 100100 | 185721 | |
| 22 | VPREB1 | pre-B lymphocyte 1 | 169575 | 211642 | 211643 | 5, 38, |
| 22 | VPREB3 | pre-B lymphocyte 3 | 128218 | 187792 | 169314 | 41, 36, 22 |
| 22 | PRAME | preferentially expressed antigen in melanoma | 185686 | 169548 | 211656 | 7, 35, 9 |
| 22 | PRODH | proline dehydrogenase 1 | 100033 | 183628 | 279560 | 12, 24, 15 |
| 22 | PRR14L | proline rich 14 like | 183530 | 241878 | 100150 | 7, 23, 1 |
| 22 | PRR34 | proline rich 34 | 182257 | 188064 | 186951 | |
| 22 | PRR5 | proline rich 5 | 186654 | 188636 | 248405 | 32, 5, 29 |
| 22 | PICK1 | protein interacting with PRKCA1 | 100151 | 100146 | 100156 | 36, 4, 35 |
| 22 | PACSIN2 | protein kinase C and casein kinase substrate in neurons 2 | 100266 | 242247 | 100271 | 3, 24, 5 |
| 22 | PPP6R2 | protein phosphatase 6 regulatory subunit 2 | 100239 | 205593 | 100241 | 3, 41, 34 |
| 22 | PPM1F | protein phosphatase, Mg2+/Mn2+ dependent 1F | 100034 | 100030 | 100038 | 43, 7, 1 |
| 22 | PRR5-ARHGAP8 | PRR5-ARHGAP8 readthrough | 248405 | 186654 | 241484 | |
| 22 | P2RX6 | purinergic receptor P2X 6 | 099957 | 184436 | 099960 | 36, 25, 14 |
| 22 | PDXP | pyridoxal phosphatase | 241360 | 100092 | 100097 | 5, 15, 3 |
| 22 | RABL2B | RAB, member of RAS oncogene family-like 2B | 079974 | 100312 | 215012 | 15, 11, 41 |
| 22 | RAB36 | RAB36, member RAS oncogene family | 100228 | 128266 | 186716 | 3, 29, 28 |
| 22 | RSPH14 | radial spoke head 14 homolog | 100218 | 211685 | 128266 | 2, 30, 38 |
| 22 | RGL4 | ral guanine nucleotide dissociation stimulator like 4 | 159496 | 189269 | 187792 | 5, 13, 36 |
| 22 | RANBP1 | RAN binding protein 1 | 099901 | 099899 | 099904 | 43, 22, 6 |
| 22 | RANGAP1 | Ran GTPase activating protein 1 | 100401 | 100399 | 100403 | 20, 38, |
| 22 | RASL10A | RAS like family 10 member A | 100276 | 185340 | 100280 | 5, 8, 27 |
| 22 | RASD2 | RASD family member 2 | 100302 | 100297 | 198125 | 33, 2, 27 |
| 22 | RAC2 | ras-related C3 botulinum toxin substrate 2 (rho family, small GTP binding protein | 128340 | 278195 | 100055 | 41, 21, 5 |
| | | Rac2) | | | | |
| 22 | RFPL1 | ret finger protein like 1 | 128250 | 100280 | 100285 | |
| 22 | RFPL2 | ret finger protein like 2 | 128253 | 205856 | 279219 | 25, 23, 33 |
| 22 | RFPL3 | ret finger protein like 3 | 128276 | 100191 | 205853 | 38, 8, |
| 22 | RTN4R | reticulon 4 receptor | 040608 | 234409 | 128185 | 9, 27, 5 |
| 22 | RFPL3S | RFPL3 antisense | 205853 | 128276 | 100220 | 38, 10, 39 |
| 22 | ARHGAP8 | Rho GTPase activating protein 8 | 241484 | 248405 | 056487 | |
| 22 | RHBDD3 | rhomboid domain containing 3 | 100263 | 186998 | 182944 | 5, 6, 33 |
| 22 | RIBC2 | RIB43A domain with coiled-coils 2 | 128408 | 077935 | 077942 | 9, 31, 20 |
| 22 | RPL3 | ribosomal protein L3 | 100316 | 100311 | 100321 | 41, 21, 30 |
| 22 | RPS19BP1 | ribosomal protein S19 binding protein 1 | 187051 | 128272 | 100346 | 34, 41, 37 |
| 22 | RRP7A | ribosomal RNA processing 7 homolog A | 189306 | 235568 | 183569 | 21, 29, 41 |
| 22 | RIMBP3 | RIMS binding protein 3 | 275793 | 278558 | 183628 | 38, 20, 5 |
| 22 | RIMBP3B | RIMS binding protein 3B | 274600 | 133475 | 169635 | 38, 27, 14 |
| 22 | RIMBP3C | RIMS binding protein 30 | 183246 | 206140 | 185651 | 38, 27, 14 |
| 22 | RNF185 | ring finger protein 185 | 138942 | 100078 | 182541 | 39, 29, 42 |
| 22 | RNF215 | ring finger protein 215 | 099999 | 187860 | 100003 | |
| 22 | RBX1 | ring-box 1 | 100387 | 172404 | 100393 | 10, 34, 15 |
| 22 | RTCB | RNA 2′,3′-cydic phosphate and 5′-OH ligase | 100220 | 205853 | 184459 | 34, 2, 30 |
| 22 | RBFOX2 | RNA binding protein, fox-1 homolog 2 | 100320 | 128313 | 128284 | 29, 12, 15 |
| 22 | POLR2F | RNA polymerase II subunit F | 100142 | 128346 | 100146 | 43, 15, 8 |
| 22 | POLR3H | RNA polymerase III subunit H | 100413 | 100412 | 172346 | 43, 40, 35 |
| 22 | SUN2 | Sad1 and UNC84 domain containing 2 | 100242 | 100226 | 100246 | 1, 39, 22 |
| 22 | SAMM50 | SAMM50 sorting and assembly machinery component | 100347 | 100344 | 188677 | 1, 41, 21 |
| 22 | SCARF2 | scavenger receptor class F member 2 | 244486 | 185252 | 277971 | 6, 27, 14 |
| 22 | SCO2 | SCO2, cytochrome c oxidase assembly protein | 130489 | 025770 | 025708 | |
| 22 | SEC14L2 | SEC14 like lipid binding 2 | 100003 | 099999 | 249590 | 33, 8, 43 |
| 22 | SEC14L3 | SEC14 like lipid binding 3 | 100012 | 242114 | 133488 | 42, 20, 30 |
| 22 | SEC14L4 | SEC14 like lipid binding 4 | 133488 | 100012 | 214491 | 15, 7, 36 |
| 22 | SEC14L6 | SEC14 like lipid binding 6 | 214491 | 133488 | 128242 | 17, 12, 8 |
| 22 | SEZ6L | seizure related 6 homolog like | 100095 | 133454 | 128203 | 26, 28, 20 |
| 22 | SELENOM | selenoprotein M | 198832 | 183963 | 185133 | |
| 22 | SELENOO | selenoprotein O | 073169 | 170638 | 128159 | 9, 21, 5 |
| 22 | SEPT3 | septin 3 | 100167 | 100162 | 183066 | 26, 8, 45 |
| 22 | SEPT5 | septin 5 | 184702 | 184113 | 203618 | |
| 22 | SERHL2 | serine hydrolase-like 2 | 183569 | 189306 | 100227 | 29, 12, 33 |
| 22 | SERPIND1 | serpin family D member 1 | 099937 | 241973 | 099940 | 19, 45, 23 |
| 22 | SBF1 | SET binding factor 1 | 100241 | 100239 | 128165 | 22, 21, 9 |
| 22 | SFI1 | SFI1 centrin binding protein | 198089 | 184708 | 241878 | 26, 39, 40 |
| 22 | SHANK3 | SH3 and multiple ankyrin repeat domains 3 | 251322 | 100299 | 100312 | 6, 26, 36 |
| 22 | SH3BP1 | SH3 domain binding protein 1 | 100092 | 100083 | 241360 | 1, 4, 41 |
| 22 | SHISA8 | shisa family member 8 | 234965 | 198911 | 159958 | 22, 16, |
| 22 | SCUBE1 | signal peptide, CUB domain and EGF like domain containing 1 | 159307 | 100304 | 186732 | 26, 10, 14 |
| 22 | SMDT1 | single-pass membrane protein with aspartate rich tail 1 | 183172 | 177096 | 184983 | 31, 41, 14 |
| 22 | SGSM1 | small G protein signaling modulator 1 | 167037 | 184571 | 206069 | 29, 20, 14 |
| 22 | SGSM3 | small G protein signaling modulator 3 | 100359 | 239900 | 196588 | 13, 5, 31 |
| 22 | SNRPD3 | small nuclear ribonucleoprotein D3 polypeptide | 100028 | 138867 | 100031 | 29, 21, 26 |
| 22 | SMTN | smoothelin | 183963 | 133422 | 198832 | 44, 13, 42 |
| 22 | SNU13 | SNU13 homolog, small nuclear ribonucleoprotein (U4/U6.U5) | 100138 | 196419 | 184208 | |
| 22 | SLC16A8 | solute carrier family 16 member 8 | 100156 | 100151 | 128298 | 14, 9, 33 |
| 22 | SLC2A11 | solute carrier family 2 member 11 | 133460 | 099958 | 251357 | |
| 22 | SLC25A1 | solute carrier family 25 member 1 | 100075 | 063515 | 070371 | 34, 1, 3 |
| 22 | SLC25A17 | solute carrier family 25 member 17 | 100372 | 128285 | 100380 | 2, 35, 7 |
| 22 | SLC25A18 | solute carrier family 25 member 18 | 182902 | 099954 | 131100 | 19, 8, 6 |
| 22 | SLC35E4 | solute carrier family 35 member E4 | 100036 | 185339 | 167065 | 38, 6, 3 |
| 22 | SLC5A1 | solute carrier family 5 member 1 | 100170 | 128245 | 205856 | 42, 15, 16 |
| 22 | SLC5A4 | solute carrier family 5 member 4 | 100191 | 279219 | 128276 | 35, |
| 22 | SLC7A4 | solute carrier family 7 member 4 | 099960 | 099957 | 187905 | 32, 38, 35 |
| 22 | SSTR3 | somatostatin receptor 3 | 278195 | 133466 | 128340 | 39, 22, 28 |
| 22 | SPECC1L- | SPECC1L-ADORA2A readthrough (NMD candidate) | 258555 | 100014 | 128271 | |
| | ADORA2A | | | | | |
| 22 | SPECC1L | sperm antigen with calponin homology and coiled-coil domains 1 like | 100014 | 099998 | 258555 | 41, 22, 33 |
| 22 | SF3A1 | splicing factor 3a subunit 1 | 099995 | 099992 | 187860 | 39, 22, 41 |
| 22 | SRRD | SRR1 domain containing | 100104 | 100099 | 100109 | 27, 7, 35 |
| 22 | SOX10 | SRY-box 10 | 100146 | 100142 | 100151 | 35, 26, 11 |
| 22 | SREBF2 | sterol regulatory element binding transcription factor 2 | 198911 | 100147 | 234965 | 30, 21, 22 |
| 22 | SDF2L1 | stromal cell derived factor 2 like 1 | 128228 | 161180 | 100023 | 34, 18, 28 |
| 22 | SMC1B | structural maintenance of chromosomes 1B | 077935 | 100376 | 128408 | 10, 22, 5 |
| 22 | SULT4A1 | sulfotransferase family 4A member 1 | 130540 | 186976 | 100341 | 26, 8, 14 |
| 22 | ST13 | suppression of tumorigenicity 13 (colon carcinoma) (Hsp70 interacting protein) | 100380 | 100372 | 196236 | 31, 40, 45 |
| 22 | SUSD2 | sushi domain containing 2 | 099994 | 099991 | 099998 | 17, 42, 20 |
| 22 | SMARCB1 | SWI/SNF related, matrix associated, actin dependent regulator of chromatin, | 099956 | 280178 | 099958 | 21, 18, 41 |
| | | subfamily b, member 1 | | | | |
| 22 | SYN3 | synapsin III | 185666 | 100225 | 100234 | |
| 22 | SYNGR1 | synaptogyrin 1 | 100321 | 100316 | 100324 | 14, 8, 35 |
| 22 | SYCE3 | synaptonemal complex central element protein 3 | 217442 | 130487 | 205560 | 38, 17, 20 |
| 22 | SNAP29 | synaptosome associated protein 29 | 099940 | 099937 | 099942 | 9, 44, 23 |
| 22 | TOM1 | target of myb1 membrane trafficking protein | 100284 | 100281 | 100292 | 36, 5, 39 |
| 22 | TBC1D10A | TBC1 domain family member 10A | 099992 | 248751 | 099995 | 32, 5, 36 |
| 22 | TBC1D22A | TBC1 domain family member 22A | 054611 | 100422 | 280080 | 18, 3, 13 |
| 22 | TBX1 | T-box 1 | 184058 | 203618 | 185838 | 20, 24, 27 |
| 22 | TEF | TEF, PAR bZIP transcription factor | 167074 | 100403 | 183864 | 27, 8, 11 |
| 22 | TEX33 | testis expressed 33 | 185264 | 100368 | 128311 | 38, 8, |
| 22 | TSSK2 | testis specific serine kinase 2 | 206203 | 100056 | 063515 | 38, 15, 8 |
| 22 | TTC28 | tetratricopeptide repeat domain 28 | 100154 | 180957 | 183765 | 11, 36, 18 |
| 22 | TTC38 | tetratricopeptide repeat domain 38 | 075234 | 130943 | 075218 | 34, 17, 33 |
| 22 | TAB1 | TGF-beta activated kinase 1 (MAP3K7) binding protein 1 | 100324 | 100321 | 128268 | 41, 18, 43 |
| 22 | THAP7 | THAP domain containing 7 | 184436 | 099949 | 099957 | 29, 31, 2 |
| 22 | TXN2 | thioredoxin 2 | 100348 | 100345 | 100350 | 34, 30, 7 |
| 22 | TXNRD2 | thioredoxin reductase 2 | 184470 | 215012 | 093010 | 9, 33, 41 |
| 22 | TST | thiosulfate sulfurtransferase | 128311 | 185264 | 128309 | 3, 1, 16 |
| 22 | THOC5 | THO complex 5 | 100296 | 100285 | 184117 | 3, 41, 45 |
| 22 | TYMP | thymidine phosphorylase | 025708 | 130489 | 177989 | 32, 5, 18 |
| 22 | TIMP3 | TIMP metallopeptidase inhibitor 3 | 100234 | 185666 | 133424 | 26, 11, 32 |
| 22 | TNFRSF13C | TNF receptor superfamily member 130 | 159958 | 234965 | 100162 | 22, |
| 22 | TOP3B | topoisomerase (DNA) III beta | 100038 | 100034 | 211637 | 39, 13, 24 |
| 22 | TRABD | TraB domain containing | 170638 | 073150 | 073169 | 21, 22, 34 |
| 22 | TCN2 | transcobalamin 2 | 185339 | 100029 | 100036 | 7, 24, 2 |
| 22 | TCF20 | transcription factor 20 | 100207 | 205702 | 235568 | 18, 4, 16 |
| 22 | TOB2 | transducer of ERBB2, 2 | 183864 | 167074 | 100410 | 9, 1, 22 |
| 22 | TOMM22 | translocase of outer mitochondrial membrane 22 | 100216 | 100211 | 100221 | 27, 7, 37 |
| 22 | TSPO | translocator protein | 100300 | 100294 | 100304 | 3, 6, 34 |
| 22 | TMPRSS6 | transmembrane protease, serine 6 | 187045 | 100379 | 100385 | 2, 19, 38 |
| 22 | TMEM184B | transmembrane protein 184B | 198792 | 185022 | 213923 | 32, 27, 42 |
| 22 | TMEM191B | transmembrane protein 191B | 278558 | 274252 | 275793 | |
| 22 | TMEM191C | transmembrane protein 191C | 206140 | 169635 | 183246 | 29, 3, 38 |
| 22 | TMEM211 | transmembrane protein 211 | 206069 | 167037 | 197077 | 10, 44, |
| 22 | TANGO2 | transport and golgi organization 2 homolog | 183597 | 099889 | 128191 | 40, 5, 26 |
| 22 | TNRC6B | trinucleotide repeat containing 6B | 100354 | 133477 | 239900 | 26, 31, 22 |
| 22 | TRIOBP | TRIO and F-actin binding protein | 100106 | 100101 | 189060 | 34, 41, 35 |
| 22 | TRMU | tRNA 5-methylaminomethyl-2-thiouridylate methyltransferase | 100416 | 075218 | 075275 | 3, 9, 39 |
| 22 | TRMT2A | tRNA methyltransferase 2 homolog A | 099899 | 128191 | 099901 | 36, 2, 9 |
| 22 | TUBA8 | tubulin alpha 8 | 183785 | 215193 | 184979 | 25, 15, 8 |
| 22 | TUBGCP6 | tubulin gamma complex associated protein 6 | 128159 | 073169 | 100429 | 26, 33, 39 |
| 22 | TTLL1 | tubulin tyrosine ligase like 1 | 100271 | 100266 | 100290 | 34, 8, 6 |
| 22 | TTLL12 | tubulin tyrosine ligase like 12 | 100304 | 100300 | 159307 | 21, 3, 9 |
| 22 | TTLL8 | tubulin tyrosine ligase like 8 | 138892 | 188263 | 100427 | |
| 22 | TFIP11 | tuftelin interacting protein 11 | 100109 | 100104 | 128294 | 24, 38, 3 |
| 22 | YWHAH | tyrosine 3-monooxygenase/tryptophan 5-monooxygenase activation protein eta | 128245 | 100150 | 100170 | 28, 5, 8 |
| 22 | TPST2 | tyrosylprotein sulfotransferase 2 | 128294 | 100109 | 100122 | 32, 5, 40 |
| 22 | UQCR10 | ubiquinol-cytochrome c reductase, complex III subunit X | 184076 | 100319 | 100325 | 41, 34, 25 |
| 22 | UBE2L3 | ubiquitin conjugating enzyme E2 L3 | 185651 | 183246 | 161179 | 29, 2, 39 |
| 22 | UFD1L | ubiquitin fusion degradation 1 like (yeast) | 070010 | 185608 | 093009 | 43, 29, 30 |
| 22 | USP18 | ubiquitin specific peptidase 18 | 184979 | 183785 | 274252 | 4, 18, 45 |
| 22 | USP41 | ubiquitin specific peptidase 41 | 161133 | 128185 | 185252 | |
| 22 | FP325331.1 | Uncharacterized protein UNQ6126/PRO20091 | 278881 | 280080 | 219438 | |
| 22 | UPK3A | uroplakin 3A | 100373 | 100364 | 100376 | 33, 14, |
| 22 | WBP2NL | WBP2 N-terminal like | 183066 | 100167 | 198951 | |
| 22 | WNT7B | Wnt family member 7B | 188064 | 130638 | 182257 | 34, 33, 14 |
| 22 | XBP1 | X-box binding protein 1 | 100219 | 159873 | 183579 | 11, 23, 28 |
| 22 | XKR3 | XK related 3 | 172967 | 198445 | 215568 | 38, 8, |
| 22 | XPNPEP3 | X-prolyl aminopeptidase 3 | 196236 | 100380 | 172404 | 35, 6, 15 |
| 22 | XRCC6 | X-ray repair cross complementing 6 | 196419 | 100418 | 100138 | 13, 45, 35 |
| 22 | YDJC | YdjC homolog (bacterial) | 161179 | 185651 | 161180 | 41, 5, 9 |
| 22 | YPEL1 | yippee like 1 | 100027 | 100023 | 100030 | 43, 38, 21 |
| 22 | ZNRF3 | zinc and ring finger 3 | 183579 | 100219 | 100249 | 25, 12, 6 |
| 22 | ZBED4 | zinc finger BED-type containing 4 | 100426 | 100425 | 182858 | 22, 1, 37 |
| 22 | ZC3H7B | zinc finger COCH-type containing 7B | 100403 | 100401 | 167074 | 24, 21, 42 |
| 22 | ZDHHC8 | zinc finger DHHC-type containing 8 | 099904 | 099901 | 234409 | 27, 6, 26 |
| 22 | ZMAT5 | zinc finger matrin-type 5 | 100319 | 100314 | 184076 | 15, 39, 41 |
| 22 | ZNF280A | zinc finger protein 280A | 169548 | 275004 | 185686 | 7, 14, 38 |
| 22 | ZNF280B | zinc finger protein 280B | 275004 | 211655 | 169548 | 29, 11, 38 |
| 22 | ZNF70 | zinc finger protein 70 | 187792 | 159496 | 128218 | 24, 44, 7 |
| 22 | ZNF74 | zinc finger protein 74 | 185252 | 161133 | 244486 | 12, 1, 31 |
| MT | MT-ATP6 | mitochondrially encoded ATP synthase 6 | 198899 | 228253 | 198938 | |
| MT | MT-ATP8 | mitochondrially encoded ATP synthase 8 | 228253 | 198712 | 198899 | |
| MT | MT-CYB | mitochondrially encoded cytochrome b | 198727 | 198695 | 198840 | |
| MT | MT-CO1 | mitochondrially encoded cytochrome c oxidase I | 198804 | 198763 | 198712 | |
| MT | MT-CO2 | mitochondrially encoded cytochrome c oxidase II | 198712 | 198804 | 228253 | |
| MT | MT-CO3 | mitochondrially encoded cytochrome c oxidase III | 198938 | 198899 | 198840 | |
| MT | MT-ND1 | mitochondrially encoded NADH:ubiquinone oxidoreductase core subunit 1 | 198888 | 198840 | 198763 | |
| MT | MT-ND2 | mitochondrially encoded NADH:ubiquinone oxidoreductase core subunit 2 | 198763 | 198888 | 198804 | |
| MT | MT-ND3 | mitochondrially encoded NADH:ubiquinone oxidoreductase core subunit 3 | 198840 | 198938 | 212907 | |
| MT | MT-ND4 | mitochondrially encoded NADH:ubiquinone oxidoreductase core subunit 4 | 198886 | 212907 | 198786 | |
| MT | MT-ND4L | mitochondrially encoded NADH:ubiquinone oxidoreductase core subunit 4L | 212907 | 198840 | 198886 | |
| MT | MT-ND5 | mitochondrially encoded NADH:ubiquinone oxidoreductase core subunit 5 | 198786 | 198886 | 198695 | |
| MT | MT-ND6 | mitochondrially encoded NADH:ubiquinone oxidoreductase core subunit 6 | 198695 | 198786 | 198727 | |
| X | ALAS2 | 5′-aminolevulinate synthase 2 | 158578 | 169188 | 238269 | 43, 5, 19 |
| X | HTR2C | 5-hydroxytryptamine receptor 2C | 147246 | 126016 | 123496 | 8, 25, 12 |
| X | PFKFB1 | 6-phosphofructo-2-kinase/fructose-2,6-biphosphatase 1 | 158571 | 067445 | 169188 | 25, 19, 39 |
| X | ASMT | acetylserotonin O-methyltransferase | 196433 | 197976 | 169084 | 29, 22, 16 |
| X | ASMTL | acetylserotonin O-methyltransferase-like | 169093 | 169100 | 182162 | 41, 3, 39 |
| X | ACRC | acidic repeat containing | 147174 | 147162 | 186810 | 26, 38, 5 |
| X | ACTRT1 | actin related protein T1 | 123165 | 183631 | 102038 | 38, 19, |
| X | ACSL4 | acyl-CoA synthetase long-chain family member 4 | 068366 | 176076 | 157600 | |
| X | ACOT9 | acyl-CoA thioesterase 9 | 123130 | 123131 | 130066 | 29, 4, 40 |
| X | AWAT1 | acyl-CoA wax alcohol acyltransferase 1 | 204195 | 184210 | 186912 | 15, 35, |
| X | AWAT2 | acyl-CoA wax alcohol acyltransferase 2 | 147160 | 158813 | 189401 | 35, 38, 8 |
| X | AP1S2 | adaptor related protein complex 1 sigma 2 subunit | 182287 | 169249 | 126010 | 35, 15, 29 |
| X | ADGRG2 | adhesion G protein-coupled receptor G2 | 173698 | 044446 | 131828 | 29, 4, 6 |
| X | ADGRG4 | adhesion G protein-coupled receptor G4 | 156920 | 129680 | 102239 | 14, |
| X | ARL13A | ADP ribosylation factor like GTPase 13A | 174225 | 182489 | 188917 | 45, 38, 10 |
| X | AFF2 | AF4/FMR2 family member 2 | 155966 | 176988 | 010404 | 22, 5, 24 |
| X | AKAP14 | A-kinase anchoring protein 14 | 186471 | 125356 | 101882 | 10, 38, 20 |
| X | AKAP17A | A-kinase anchoring protein 17A | 197976 | 182162 | 196433 | 29, 22, 16 |
| X | AKAP4 | A-kinase anchoring protein 4 | 147081 | 171365 | 147082 | 38, |
| X | ALG13 | ALG13, UDP-N-acetylglucosaminyltransferase subunit | 101901 | 260802 | 072315 | |
| X | AMMECR1 | Alport syndrome, mental retardation, midface hypoplasia and elliptocytosis | 101935 | 157600 | 243978 | 18, 32, 45 |
| | | chromosomal region gene 1 | | | | |
| X | AMELX | amelogenin, X-linked | 125363 | 047648 | 005302 | 10, |
| X | AR | androgen receptor | 169083 | 131080 | 079482 | 33, 26, 11 |
| X | AMOT | angiomotin | 126016 | 182508 | 147246 | 24, 15, 17 |
| X | ACE2 | angiotensin I converting enzyme 2 | 130234 | 102010 | 147003 | 38, 16, 17 |
| X | AGTR2 | angiotensin II receptor type 2 | 180772 | 102024 | 268104 | 15, 17, 38 |
| X | ASB11 | ankyrin repeat and SOCS box containing 11 | 165192 | 102048 | 165195 | 25, |
| X | ASB12 | ankyrin repeat and SOCS box containing 12 | 198881 | 184675 | 102043 | 25, 15, 38 |
| X | ASB9 | ankyrin repeat and SOCS box containing 9 | 102048 | 130150 | 165192 | 28, 35, 38 |
| X | ANOS1 | anosmin 1 | 011201 | 205642 | 183304 | 29, 34, 38 |
| X | AMER1 | APC membrane recruitment protein 1 | 184675 | 131089 | 198881 | 36, 40, 15 |
| X | APLN | apelin | 171388 | 122126 | 122121 | 45, 43, 26 |
| X | APOO | apolipoprotein O | 184831 | 130066 | 165182 | 4, 10, 14 |
| X | APOOL | apolipoprotein O like | 155008 | 165259 | 184788 | 45, 4, 23 |
| X | AIFM1 | apoptosis inducing factor mitochondria associated 1 | 156709 | 102034 | 134594 | 17, 3, 35 |
| X | APEX2 | apurinic/apyrimidinic endodeoxyribonuclease 2 | 169188 | 158571 | 158578 | 9, 23, 27 |
| X | ARAF | A-Raf proto-oncogene, serine/threonine kinase | 078061 | 147124 | 008056 | 9, 36, 45 |
| X | AVPR2 | arginine vasopressin receptor 2 | 126895 | 198910 | 089820 | 28, 20, |
| X | ARX | aristaless related homeobox | 004848 | 101868 | 176774 | 27, 28, 6 |
| X | ARMCX1 | armadillo repeat containing, X-linked 1 | 126947 | 196440 | 198960 | 45, 2, 43 |
| X | ARMCX2 | armadillo repeat containing, X-linked 2 | 184867 | 102401 | 126952 | 11, 1, 12 |
| X | ARMCX3 | armadillo repeat containing, X-linked 3 | 102401 | 198960 | 184867 | 40, 43, 2 |
| X | ARMCX4 | armadillo repeat containing, X-linked 4 | 196440 | 126945 | 126947 | 31, 44, 8 |
| X | ARMCX5 | armadillo repeat containing, X-linked 5 | 125962 | 158164 | 198932 | 6, 18, 7 |
| X | ARMCX6 | armadillo repeat containing, X-linked 6 | 198960 | 126947 | 102401 | 36, 2, 35 |
| X | ARR3 | arrestin 3 | 120500 | 186912 | 147127 | 14, 25, |
| X | ARSD | arylsulfatase D | 006756 | 056998 | 157399 | 43, 17, 42 |
| X | ARSE | arylsulfatase E (chondrodysplasia punctata 1) | 157399 | 006756 | 205667 | 17, 43, 26 |
| X | ARSF | arylsulfatase F | 062096 | 205667 | 101825 | 17, 33, 38 |
| X | ARSH | arylsulfatase family member H | 205667 | 157399 | 062096 | 28, |
| X | ATXN3L | ataxin 3 like | 123594 | 187268 | 198759 | 38, 8, |
| X | ABCB7 | ATP binding cassette subfamily B member 7 | 131269 | 050030 | 094841 | 22, 39, 36 |
| X | ABCD1 | ATP binding cassette subfamily D member 1 | 101986 | 185825 | 198753 | 9, 28, 32 |
| X | ATP7A | ATPase copper transporting alpha | 165240 | 131174 | 226784 | 24, 29, 45 |
| X | ATP6AP1 | ATPase H+ transporting accessory protein 1 | 071553 | 102125 | 203879 | 36, 2, 8 |
| X | ATP6AP2 | ATPase H+ transporting accessory protein 2 | 182220 | 183337 | 238205 | 29, 11, 8 |
| X | ATP1B4 | ATPase Na+/K+ transporting family member beta 4 | 101892 | 125355 | 005893 | 1, 24, 25 |
| X | ATP11C | ATPase phospholipid transporting 11C | 101974 | 101977 | 203933 | 1, 12, 4 |
| X | ATP2B3 | ATPase plasma membrane Ca2+ transporting 3 | 067842 | 182492 | 262919 | |
| X | ATRX | ATRX, chromatin remodeler | 085224 | 196468 | 102158 | 11, 29, 23 |
| X | ATG4A | autophagy related 4A cysteine peptidase | 101844 | 101843 | 197565 | 21, 36, 45 |
| X | BHLHB9 | basic helix-loop-helix domain containing, class B, 9 | 198908 | 158301 | 102128 | 42, 26, 8 |
| X | BCAP31 | B-cell receptor-associated protein 31 | 185825 | 130821 | 101986 | 30, 37, 29 |
| X | BCOR | BCL6 corepressor | 183337 | 165175 | 182220 | 22, 39, 25 |
| X | BCORL1 | BCL6 corepressor-like 1 | 085185 | 156697 | 102034 | 43, 32, 40 |
| X | BEND2 | BEN domain containing 2 | 177324 | 131831 | 102098 | 38, 25, |
| X | BGN | biglycan | 182492 | 213397 | 067842 | 36, 10, 45 |
| X | BMX | BMX non-receptor tyrosine kinase | 102010 | 087842 | 130234 | 45, 40, 43 |
| X | BRS3 | bombesin receptor subtype 3 | 102239 | 156920 | 102241 | 17, 38, |
| X | BMP15 | bone morphogenetic protein 15 | 130385 | 158352 | 122824 | |
| X | BEX1 | brain expressed X-linked 1 | 133169 | 102128 | 147206 | 31, 29, 28 |
| X | BEX2 | brain expressed X-linked 2 | 133134 | 204065 | 182916 | 31, 28, 8 |
| X | BEX3 | brain expressed X-linked 3 | 166681 | 185222 | 172476 | |
| X | BEX4 | brain expressed X-linked 4 | 102409 | 147206 | 180964 | 26, 1, 34 |
| X | BEX5 | brain expressed X-linked 5 | 184515 | 204071 | 269405 | 44, 8, 17 |
| X | BRCC3 | BRCA1/BRCA2-containing complex subunit 3 | 185515 | 214827 | 155959 | 25, 30, 9 |
| X | BRWD3 | bromodomain and WD repeat domain containing 3 | 165288 | 174016 | 198157 | 1, 3, 31 |
| X | BTK | Bruton tyrosine kinase | 010671 | 126953 | 241343 | 21, 41, 5 |
| X | C1GALT1C1 | C1GALT1 specific chaperone 1 | 171155 | 232119 | 236446 | 31, 29, 30 |
| X | CACNA1F | calcium voltage-gated channel subunit alpha1 F | 102001 | 102003 | 101997 | 14, 25, 39 |
| X | CASK | calcium/calmodulin dependent serine protein kinase | 147044 | 188937 | 171659 | 29, 12, 4 |
| X | CAPN6 | calpain 6 | 077274 | 077264 | 077279 | 32, 25, 42 |
| X | CTAG1A | cancer/testis antigen 1A | 268651 | 269335 | 184033 | |
| X | CTAG1B | cancer/testis antigen 1B | 184033 | 268651 | 126890 | |
| X | CTAG2 | cancer/testis antigen 2 | 126890 | 184033 | 160219 | 23, 3, 44 |
| X | CT55 | cancer/testis antigen 55 | 169551 | 224107 | 186376 | |
| X | CT83 | cancer/testis antigen 83 | 204019 | 268104 | 003096 | |
| X | CT45A1 | cancer/testis antigen family 45 member A1 | 268940 | 165359 | 269096 | 38, 20, |
| X | CT45A10 | cancer/testis antigen family 45 member A10 | 269586 | 270946 | 181433 | |
| X | CT45A2 | cancer/testis antigen family 45 member A2 | 271449 | 278289 | 273696 | |
| X | CT45A3 | cancer/testis antigen family 45 member A3 | 269096 | 268940 | 228836 | 37, 38, 35 |
| X | CT45A5 | cancer/testis antigen family 45 member A5 | 228836 | 269096 | 278289 | 34, 13, 6 |
| X | CT45A6 | cancer/testis antigen family 45 member A6 | 278289 | 228836 | 271449 | 19, 38, |
| X | CT45A7 | cancer/testis antigen family 45 member A7 | 273696 | 271449 | 278085 | |
| X | CT45A8 | cancer/testis antigen family 45 member A8 | 278085 | 273696 | 270946 | |
| X | CT45A9 | cancer/testis antigen family 45 member A9 | 270946 | 278085 | 269586 | |
| X | CT47A1 | cancer/testis antigen family 47, member A1 | 236371 | 242362 | 182890 | |
| X | CT47A10 | cancer/testis antigen family 47, member A10 | 224089 | 226929 | 226600 | 38, |
| X | CT47A11 | cancer/testis antigen family 47, member A11 | 226929 | 226685 | 224089 | 38, |
| X | CT47A12 | cancer/testis antigen family 47, member A12 | 226685 | 278646 | 226929 | |
| X | CT47A2 | cancer/testis antigen family 47, member A2 | 242362 | 236126 | 236371 | 38, |
| X | CT47A3 | cancer/testis antigen family 47, member A3 | 236126 | 230594 | 242362 | 38, |
| X | CT47A4 | cancer/testis antigen family 47, member A4 | 230594 | 237957 | 236126 | 38, |
| X | CT47A5 | cancer/testis antigen family 47, member A5 | 237957 | 226023 | 230594 | 38, |
| X | CT47A6 | cancer/testis antigen family 47, member A6 | 226023 | 228517 | 237957 | |
| X | CT47A7 | cancer/testis antigen family 47, member A7 | 228517 | 230347 | 226023 | |
| X | CT47A8 | cancer/testis antigen family 47, member A8 | 230347 | 226600 | 228517 | 38, |
| X | CT47A9 | cancer/testis antigen family 47, member A9 | 226600 | 224089 | 230347 | 38, |
| X | CT47B1 | cancer/testis antigen family 47, member B1 | 236446 | 171155 | 278646 | 26, 38, |
| X | CHST7 | carbohydrate sulfotransferase 7 | 147119 | 251192 | 065923 | 45, 28, 5 |
| X | CA5B | carbonic anhydrase 5B | 169239 | 147003 | 169249 | 11, 31, 13 |
| X | CDX4 | caudal type homeobox 4 | 131264 | 186462 | 204116 | |
| X | CITED1 | Cbp/p300 interacting transactivator with Glu/Asp rich carboxy-terminal domain 1 | 125931 | 198034 | 147099 | 31, 35, 38 |
| X | CD40LG | CD40 ligand | 102245 | 102243 | 129675 | 5, 39, |
| X | CD99 | CD99 molecule | 002586 | 214717 | 124343 | 28, |
| X | CD99L2 | CD99 molecule like 2 | 102181 | 063601 | 029993 | 8, 43, 42 |
| X | ARHGEF9 | Cdc42 guanine nucleotide exchange factor 9 | 131089 | 186767 | 184675 | 14, 2, 8 |
| X | CETN2 | centrin 2 | 147400 | 197172 | 147383 | 30, 11, 4 |
| X | CENPI | centromere protein I | 102384 | 126950 | 102385 | |
| X | CENPVL1 | Centromere protein V like 1 | 223591 | 283093 | 189369 | |
| X | CENPVL2 | Centromere protein V like 2 | 283093 | 224109 | 223591 | |
| X | CENPVL3 | Centromere protein V like 3 | 224109 | 196368 | 283093 | |
| X | CDR1 | cerebellar degeneration related protein 1 | 184258 | 134595 | 227234 | 8, 1, 30 |
| X | CLIC2 | chloride intracellular channel 2 | 155962 | 155961 | 277858 | 29, 34, 30 |
| X | CLCN4 | chloride voltage-gated channel 4 | 073464 | 047644 | 101871 | 8, 22, 14 |
| X | CLCN5 | chloride voltage-gated channel 5 | 171365 | 273820 | 147081 | 11, 17, 31 |
| X | CHM | CHM, Rab escort protein 1 | 188419 | 124429 | 126733 | 42, 45, 24 |
| X | CSAG1 | chondrosarcoma associated gene 1 | 198930 | 183305 | 213401 | 34, 10, 35 |
| X | CHRDL1 | chordin like 1 | 101938 | 243978 | 077264 | 29, 1, 44 |
| X | CXorf21 | chromosome X open reading frame 21 | 120280 | 169297 | 198814 | 36, 30, 22 |
| X | CXorf23 | chromosome X open reading frame 23 | 173681 | 147010 | 184368 | |
| X | CXorf36 | chromosome X open reading frame 36 | 147113 | 147050 | 147121 | 15, 1, 43 |
| X | CXorf38 | chromosome X open reading frame 38 | 185753 | 238205 | 180182 | 1, 6, 31 |
| X | CXorf40A | chromosome X open reading frame 40A | 197620 | 241489 | 283697 | 29, 21, 3 |
| X | CXorf40B | chromosome X open reading frame 40B | 197021 | 156009 | 283463 | 26, 3, 15 |
| X | CXorf49 | chromosome X open reading frame 49 | 215115 | 283599 | 215113 | |
| X | CXorf49B | chromosome X open reading frame 49B | 215113 | 215115 | 204131 | |
| X | CXorf51A | Chromosome X open reading frame 51A | 224440 | 235699 | 102081 | 38, |
| X | CXorf51B | Chromosome X open reading frame 51B | 235699 | 221870 | 224440 | |
| X | CXorf56 | chromosome X open reading frame 56 | 018610 | 005022 | 077721 | 34, 41, 43 |
| X | CXorf57 | chromosome X open reading frame 57 | 147231 | 157502 | 133135 | 4, 38, 28 |
| X | CXorf58 | chromosome X open reading frame 58 | 165182 | 184831 | 174010 | 28, 19, 38 |
| X | CXorf65 | chromosome X open reading frame 65 | 204165 | 184481 | 147168 | 38, 7, |
| X | CXorf66 | chromosome X open reading frame 66 | 203933 | 101974 | 134595 | 38, |
| X | CXorf67 | chromosome X open reading frame 67 | 187690 | 122824 | 196368 | 32, 35, 38 |
| X | CFAP47 | cilia and flagella associated protein 47 | 165164 | 189023 | 198173 | 42, 30, 23 |
| X | CLDN2 | daudin 2 | 165376 | 147223 | 089682 | 17, 37, 16 |
| X | CLDN34 | daudin 34 | 234469 | 146950 | 047644 | |
| X | CSTF2 | cleavage stimulation factor subunit 2 | 101811 | 102362 | 007952 | 7, 35, 25 |
| X | F9 | coagulation factor IX | 101981 | 283147 | 101977 | 19, |
| X | F8 | coagulation factor VIII | 185010 | 203870 | 274183 | 29, 26, 31 |
| X | F8A1 | coagulation factor VIII-associated 1 | 277203 | 274183 | 165775 | 26, 9, 28 |
| X | F8A2 | coagulation factor VIII-associated 2 | 274791 | 277858 | 277150 | 40, 22, 44 |
| X | F8A3 | coagulation factor VIII-associated 3 | 277150 | 274791 | 277745 | |
| X | CCDC120 | coiled-coil domain containing 120 | 147144 | 068323 | 243279 | 24, 42, 4 |
| X | CCDC160 | coiled-coil domain containing 160 | 203952 | 147257 | 156531 | 12, 17, 20 |
| X | CCDC22 | coiled-coil domain containing 22 | 101997 | 102001 | 049768 | 21, 5, 7 |
| X | COL4A5 | collagen type IV alpha 5 chain | 188153 | 197565 | 260548 | 11, 12, 31 |
| X | COL4A6 | collagen type IV alpha 6 chain | 197565 | 101844 | 188153 | 12, 9, 13 |
| X | CSF2RA | colony stimulating factor 2 receptor alpha subunit | 198223 | 205755 | 185291 | 32, 5, 7 |
| X | CFP | complement factor properdin | 126759 | 102265 | 126767 | 36, 41, 1 |
| X | CNKSR2 | connector enhancer of kinase suppressor of Ras 2 | 149970 | 177189 | 185915 | 8, 26, 11 |
| X | CPXCR1 | CPX chromosome region, candidate 1 | 147183 | 102271 | 153779 | 38, 35, |
| X | CTPS2 | CTP synthase 2 | 047230 | 182798 | 169906 | 22, 18, 25 |
| X | CUL4B | cullin 4B | 158290 | 005893 | 232119 | 45, 38, 26 |
| X | CMC4 | C-X9-C motif containing 4 | 182712 | 165775 | 185515 | 10, 9, 22 |
| X | CXCR3 | C-X-C motif chemokine receptor 3 | 186810 | 147174 | 283599 | 36, 5, 25 |
| X | CNGA2 | cyclic nucleotide gated channel alpha 2 | 183862 | 147378 | 147381 | 38, |
| X | CCNB3 | cyclin B3 | 147082 | 147081 | 274588 | |
| X | CDK16 | cyclin dependent kinase 16 | 102225 | 130985 | 102226 | 9, 15, 40 |
| X | CDKL5 | cyclin dependent kinase like 5 | 008086 | 102098 | 102104 | 38, 25, 8 |
| X | CYLC1 | cylicin 1 | 183035 | 196767 | 072133 | 38, |
| X | CHIC1 | cysteine rich hydrophobic domain 1 | 204116 | 131264 | 187969 | 26, 13, 42 |
| X | CYSLTR1 | cysteinyl leukotriene receptor 1 | 173198 | 187325 | 179300 | 30, 22, 42 |
| X | CYBB | cytochrome b-245 beta chain | 165168 | 047597 | 165169 | 22, 5, 30 |
| X | COX7B | cytochrome c oxidase subunit 7B | 131174 | 102158 | 165240 | 29, 11, 25 |
| X | CRLF2 | cytokine receptor-like factor 2 | 205755 | 185960 | 198223 | |
| X | DACH2 | dachshund family transcription factor 2 | 126733 | 188419 | 102271 | 25, 28, 8 |
| X | DCAF12L1 | DDB1 and CUL4 associated factor 12 like 1 | 198889 | 198354 | 183631 | 45, 38, 17 |
| X | DCAF12L2 | DDB1 and CUL4 associated factor 12 like 2 | 198354 | 282815 | 198889 | 33, 15, 38 |
| X | DCAF8L1 | DDB1 and CUL4 associated factor 8 like 1 | 226372 | 177689 | 169306 | 38, |
| X | DCAF8L2 | DDB1 and CUL4 associated factor 8 like 2 | 189186 | 224960 | 177689 | |
| X | DDX3X | DEAD-box helicase 3, X-linked | 215301 | 124486 | 188937 | 42, 44, 39 |
| X | DDX53 | DEAD-box helicase 53 | 184735 | 175809 | 165186 | 38, |
| X | DOCK11 | dedicator of cytokinesis 11 | 147251 | 131725 | 131724 | 22, 1, 11 |
| X | DHRSX | dehydrogenase/reductase X-linked | 169084 | 196433 | 214717 | 34, 28, 1 |
| X | DNASE1L1 | deoxyribonuclease 1 like 1 | 013563 | 147403 | 102125 | 21, 6, 9 |
| X | DGKK | diacylglycerol kinase kappa | 274588 | 147082 | 158352 | 27, 38, 12 |
| X | DGAT2L6 | diacylglycerol O-acyltransferase 2 like 6 | 184210 | 089289 | 204195 | 35, |
| X | DIAPH2 | diaphanous related formin 2 | 147202 | 179083 | 204086 | 13, 10, 18 |
| X | DLG3 | discs large MAGUK scaffold protein 3 | 082458 | 130055 | 120498 | 28, 3, 40 |
| X | DMRTC1 | DMRT like family C1 | 269502 | 225396 | 283594 | 31, 40, 38 |
| X | DMRTC1B | DMRT like family C1B | 184911 | 067177 | 268994 | |
| X | POLA1 | DNA polymerase alpha 1, catalytic subunit | 101868 | 102230 | 004848 | 9, 7, 19 |
| X | DCX | doublecortin | 077279 | 077274 | 260802 | 8, 14, 45 |
| X | DUSP21 | dual specificity phosphatase 21 | 189037 | 069509 | 147050 | 38, |
| X | DUSP9 | dual specificity phosphatase 9 | 130829 | 262919 | 130822 | 19, 32, 17 |
| X | DYNLT3 | dynein light chain Tctex-type 3 | 165169 | 165168 | 187516 | 13, 43, 17 |
| X | DKC1 | dyskerin pseudouridine synthase 1 | 130826 | 160219 | 130830 | 21, 13, 1 |
| X | DMD | dystrophin | 198947 | 132446 | 185448 | 11, 42, 25 |
| X | DRP2 | dystrophin related protein 2 | 102385 | 102384 | 102387 | 26, 8, 25 |
| X | ELF4 | E74 like ETS transcription factor 4 | 102034 | 085185 | 156709 | 21, 5, 4 |
| X | EDA | ectodysplasin A | 158813 | 130054 | 147160 | 36, 40, 35 |
| X | EDA2R | ectodysplasin A2 receptor | 131080 | 089472 | 169083 | 40, 12, 39 |
| X | ENOX2 | ecto-NOX disulfide-thiol exchanger 2 | 165675 | 134597 | 147256 | 31, 24, 42 |
| X | EFHC2 | EF-hand domain containing 2 | 183690 | 124479 | 069509 | 42, 31, 38 |
| X | EGFL6 | EGF like domain multiple 6 | 198759 | 123594 | 176896 | 32, 11, 15 |
| X | ELK1 | ELK1, ETS transcription factor | 126767 | 126759 | 126756 | 9, 14, 40 |
| X | EMD | emerin | 102119 | 196924 | 147403 | 35, 6, 29 |
| X | EBP | emopamil binding protein (sterol isomerase) | 147155 | 102312 | 068354 | 19, 5, 33 |
| X | EFNB1 | ephrin B1 | 090776 | 130052 | 181191 | 3, 13, 16 |
| X | ERCC6L | ERCC excision repair 6 like, spindle assembly checkpoint helicase | 186871 | 102309 | 198034 | 23, 22, 6 |
| X | ERAS | ES cell expressed Ras | 187682 | 094631 | 102109 | 38, |
| X | ESX1 | ESX homeobox 1 | 123576 | 123575 | 189108 | 38, 8, |
| X | EIF1AX | eukaryotic translation initiation factor 1A, X-linked | 173674 | 184368 | 177189 | 3, 4, 2 |
| X | EIF2S3 | eukaryotic translation initiation factor 2 subunit gamma | 130741 | 174010 | 005889 | 9, 21, 42 |
| X | FAM104B | family with sequence similarity 104 member B | 182518 | 234068 | 256045 | 1, 42, 19 |
| X | FAM120C | family with sequence similarity 1200 | 184083 | 172943 | 196632 | 4, 26, 31 |
| X | FAM122B | family with sequence similarity 122B | 156504 | 170965 | 156500 | 31, 45, 1 |
| X | FAM122C | family with sequence similarity 122C | 156500 | 156504 | 101928 | 38, 29, 9 |
| X | FAM127A | family with sequence similarity 127 member A | 134590 | 212747 | 203950 | 34, 6, 35 |
| X | FAM127B | family with sequence similarity 127 member B | 203950 | 134590 | 196972 | 23, 33, 30 |
| X | FAM127C | family with sequence similarity 127 member C | 212747 | 184785 | 134590 | 1, 30, 23 |
| X | FAM133A | family with sequence similarity 133 member A | 179083 | 186310 | 147202 | 2, 38, 23 |
| X | FAM155B | family with sequence similarity 155 member B | 130054 | 181191 | 158813 | 40, 33, 14 |
| X | FAM156A | family with sequence similarity 156 member A | 268350 | 179304 | 184194 | |
| X | FAM156B | family with sequence similarity 156 member B | 179304 | 171402 | 268350 | |
| X | FAM199X | family with sequence similarity 199, X-linked | 123575 | 166707 | 123576 | 22, 29, 40 |
| X | FAM3A | family with sequence similarity 3 member A | 071889 | 126903 | 160211 | 1, 9, 28 |
| X | FAM46D | family with sequence similarity 46 member D | 174016 | 122145 | 165288 | 45, 38, 25 |
| X | FAM47A | family with sequence similarity 47 member A | 185448 | 198947 | 147027 | 38, |
| X | FAM47B | family with sequence similarity 47 member B | 189132 | 147027 | 189023 | 38, 8, |
| X | FAM47C | family with sequence similarity 47 member C | 198173 | 165164 | 130962 | 38, |
| X | FAM50A | family with sequence similarity 50 member A | 071859 | 203879 | 130827 | 7, 35, 6 |
| X | FAM58A | family with sequence similarity 58 member A | 262919 | 067842 | 130829 | 34, 41, 13 |
| X | FAM9A | family with sequence similarity 9 member A | 183304 | 011201 | 177138 | |
| X | FAM9B | family with sequence similarity 9 member B | 177138 | 183304 | 101849 | 9, 6, 38 |
| X | FAM9C | family with sequence similarity 9 member C | 187268 | 205542 | 123594 | 36, 37, 38 |
| X | FANCB | Fanconi anemia complementation group B | 181544 | 101958 | 130150 | 22, 45, 19 |
| X | FAAH2 | fatty acid amide hydrolase 2 | 165591 | 147059 | 198455 | |
| X | FRMPD3 | FERM and PDZ domain containing 3 | 147234 | 080572 | 147224 | 38, 8, |
| X | FRMPD4 | FERM and PDZ domain containing 4 | 169933 | 005302 | 101911 | 29, 26, 28 |
| X | FRMD7 | FERM domain containing 7 | 165694 | 134602 | 123728 | 17, 38, |
| X | FTHL17 | ferritin heavy chain like 17 | 132446 | 157625 | 198947 | |
| X | FATE1 | fetal and adult testis expressed 1 | 147378 | 130032 | 183862 | 38, 2, 8 |
| X | FGF13 | fibroblast growth factor 13 | 129682 | 156925 | 283147 | 34, 8, 12 |
| X | FGF16 | fibroblast growth factor 16 | 196468 | 198934 | 085224 | |
| X | FLNA | filamin A | 196924 | 007350 | 102119 | 18, 13, 1 |
| X | FOXO4 | forkhead box O4 | 184481 | 147164 | 204165 | 32, 29, 18 |
| X | FOXP3 | forkhead box P3 | 049768 | 101997 | 049769 | 36, 39, 3 |
| X | FOXR2 | forkhead box R2 | 189299 | 247746 | 083750 | 23, 10, 35 |
| X | FHL1 | four and a half UM domains 1 | 022267 | 198689 | 129680 | 24, 15, 25 |
| X | FMR1 | fragile X mental retardation 1 | 102081 | 224440 | 176988 | 22, 17, 44 |
| X | FMR1NB | fragile X mental retardation 1 neighbor | 176988 | 102081 | 155966 | 38, 8, |
| X | FTSJ1 | FtsJ RNA methyltransferase homolog 1 (E. coli) | 068438 | 017483 | 102312 | 13, 9, 37 |
| X | FUNDC1 | FUN14 domain containing 1 | 069509 | 183690 | 189037 | 3, 12, 30 |
| X | FUNDC2 | FUN14 domain containing 2 | 165775 | 277203 | 214827 | 43, 25, 26 |
| X | FGD1 | FYVE, RhoGEF and PH domain containing 1 | 102302 | 158526 | 130119 | 34, 18, 12 |
| X | GAGE1 | G antigen 1 | 205777 | 224902 | 189064 | |
| X | GAGE10 | G antigen 10 | 215274 | 049769 | 224659 | |
| X | GAGE12B | G antigen 12B | 236737 | 275113 | 237671 | 19, 10, |
| X | GAGE12C | G antigen 12C | 237671 | 236737 | 227488 | |
| X | GAGE12D | G antigen 12D | 227488 | 237671 | 216649 | 10, |
| X | GAGE12E | G antigen 12E | 216649 | 227488 | 236362 | |
| X | GAGE12F | G antigen 12F | 236362 | 216649 | 215269 | 10, 33, 38 |
| X | GAGE12G | G antigen 12G | 215269 | 236362 | 224902 | 10, 33, 38 |
| X | GAGE12H | G antigen 12H | 224902 | 215269 | 205777 | 38, |
| X | GAGE12J | G antigen 12J | 224659 | 215274 | 274274 | |
| X | GAGE13 | G antigen 13 | 274274 | 224659 | 275113 | |
| X | GAGE2A | G antigen 2A | 189064 | 205777 | 068985 | |
| X | GAGE2E | G antigen 2E | 275113 | 274274 | 236737 | 38, |
| X | GNL3L | G protein nucleolar 3 like | 130119 | 102302 | 102313 | 36, 9, 24 |
| X | GPR101 | G protein-coupled receptor 101 | 165370 | 147274 | 156925 | 33, |
| X | GPR119 | G protein-coupled receptor 119 | 147262 | 102078 | 134597 | 28, |
| X | GPR143 | G protein-coupled receptor 143 | 101850 | 101849 | 146950 | |
| X | GPR173 | G protein-coupled receptor 173 | 184194 | 268350 | 184205 | 6, 14, 28 |
| X | GPR174 | G protein-coupled receptor 174 | 147138 | 078589 | 078596 | 22, 39, |
| X | GPR34 | G protein-coupled receptor 34 | 171659 | 147044 | 171657 | 1, 32, 42 |
| X | GPR50 | G protein-coupled receptor 50 | 102195 | 029993 | 160131 | 17, 12, |
| X | GPR82 | G protein-coupled receptor 82 | 171657 | 171659 | 279849 | 22, 16, 32 |
| X | GPRASP1 | G protein-coupled receptor associated sorting protein 1 | 198932 | 125962 | 158301 | 1, 26, 25 |
| X | GPRASP2 | G protein-coupled receptor associated sorting protein 2 | 158301 | 198932 | 198908 | 8, 42, 38 |
| X | GSPT2 | G1 to S phase transition 2 | 189369 | 223591 | 179222 | 15, 38, 36 |
| X | GLA | galactosidase alpha | 102393 | 257529 | 126945 | 20, 3, 11 |
| X | GABRA3 | gamma-aminobutyric acid type A receptor alpha3 subunit | 011677 | 124260 | 268089 | 18, 8, 10 |
| X | GABRE | gamma-aminobutyric acid type A receptor epsilon subunit | 102287 | 147381 | 124260 | 32, 44, 35 |
| X | GABRQ | gamma-aminobutyric acid type A receptor theta subunit | 268089 | 011677 | 221867 | 27, 8, |
| X | GJB1 | gap junction protein beta 1 | 169562 | 196338 | 147130 | 35, 37, 16 |
| X | GRPR | gastrin releasing peptide receptor | 126010 | 182287 | 182798 | 12, 23, 16 |
| X | GATA1 | GATA binding protein 1 | 102145 | 171433 | 094631 | 7, 34, 25 |
| X | GDI1 | GDP dissociation inhibitor 1 | 203879 | 071553 | 071859 | 8, 36, 39 |
| X | GEMIN8 | gem nuclear organelle associated protein 8 | 046647 | 046653 | 101958 | 34, 29, 15 |
| X | G6PD | glucose-6-phosphate dehydrogenase | 160211 | 071889 | 269335 | 7, 13, 41 |
| X | GLUD2 | glutamate dehydrogenase 2 | 182890 | 236371 | 125675 | 5, 35, 21 |
| X | GRIA3 | glutamate ionotropic receptor AMPA type subunit 3 | 125675 | 182890 | 125676 | 8, 2, 25 |
| X | GK | glycerol kinase | 198814 | 120280 | 157625 | 42, 29, 30 |
| X | GDPD2 | glycerophosphodiester phosphodiesterase domain containing 2 | 130055 | 090889 | 082458 | 36, 12, 8 |
| X | GLRA2 | glycine receptor alpha 2 | 101958 | 046647 | 181544 | 8, 27, 38 |
| X | GLRA4 | glycine receptor alpha 4 | 188828 | 123562 | 179363 | 12, |
| X | GYG2 | glycogenin 2 | 056998 | 124343 | 006756 | 1, 3, 35 |
| X | GPM6B | glycoprotein M6B | 046653 | 046651 | 046647 | 11, 8, 26 |
| X | GLOD5 | glyoxalase domain containing 5 | 171433 | 101945 | 102145 | 16, 17, 20 |
| X | GPC3 | glypican 3 | 147257 | 076716 | 203952 | 43, 32, 19 |
| X | GPC4 | glypican 4 | 076716 | 183434 | 147257 | 12, 31, 15 |
| X | GPKOW | G-patch domain and KOW motifs | 068394 | 196998 | 280116 | 9, 3, 5 |
| X | GAB3 | GRB2 associated binding protein 3 | 160219 | 126890 | 130826 | 45, 22, 42 |
| X | GRIPAP1 | GRIP1 associated protein 1 | 068400 | 102057 | 068323 | 6, 35, 18 |
| X | GTPBP6 | GTP binding protein 6 (putative) | 178605 | 182378 | 167393 | 1, 34, 20 |
| X | GUCY2F | guanylate cyclase 2F, retinal | 101890 | 133124 | 101888 | 14, |
| X | H2AFB1 | H2A histone family member B1 | 274183 | 185010 | 277203 | 38, |
| X | H2AFB2 | H2A histone family member B2 | 277858 | 155962 | 274791 | 38, 14, |
| X | H2AFB3 | H2A histone family member B3 | 277745 | 277150 | 185973 | |
| X | H2BFM | H2B histone family member M | 101812 | 123569 | 269226 | 38, |
| X | H2BFWT | H2B histone family member W, testis specific | 123569 | 158427 | 101812 | 38, |
| X | HAUS7 | HAUS augmin like complex subunit 7 | 213397 | 183479 | 182492 | 3, 9, 21 |
| X | HSFX1 | heat shock transcription factor family, X-linked 1 | 171116 | 185247 | 123584 | |
| X | HSFX2 | heat shock transcription factor family, X-linked 2 | 268738 | 267978 | 269556 | 38, 14, 27 |
| X | HUWE1 | HECT, UBA and WWE domain containing 1, E3 ubiquitin protein ligase | 086758 | 072506 | 172943 | 18, 43, 31 |
| X | HS6ST2 | heparan sulfate 6-O-sulfotransferase 2 | 171004 | 076770 | 134588 | 24, 4, 38 |
| X | HEPH | hephaestin | 089472 | 155659 | 131080 | 11, 1, 16 |
| X | HNRNPH2 | heterogeneous nuclear ribonucleoprotein H2 | 126945 | 102393 | 196440 | |
| X | HMGB3 | high mobility group box 3 | 029993 | 102181 | 102195 | 29, 12, 37 |
| X | HMGN5 | high mobility group nucleosome binding domain 5 | 198157 | 165288 | 131171 | 7, 9, 11 |
| X | HDX | highly divergent homeobox | 165259 | 072133 | 155008 | 11, 24, 45 |
| X | HDAC6 | histone deacetylase 6 | 094631 | 102145 | 187682 | 43, 39, 38 |
| X | HDAC8 | histone deacetylase 8 | 147099 | 125931 | 067177 | 21, 9, 5 |
| X | HTATSF1 | HIV-1 Tat specific factor 1 | 102241 | 102239 | 102243 | 31, 18, 17 |
| X | HCCS | holocytochrome c synthase | 004961 | 101871 | 047648 | 41, 45, 29 |
| X | HCFC1 | host cell factor C1 | 172534 | 102032 | 177854 | 21, 1, 27 |
| X | HYPM | huntingtin interacting protein M | 187516 | 165169 | 147041 | 38, |
| X | HSD17B10 | hydroxysteroid 17-beta dehydrogenase 10 | 072506 | 158423 | 086758 | 29, 9, 27 |
| X | HPRT1 | hypoxanthine phosphoribosyltransferase 1 | 165704 | 156531 | 170965 | 31, 22, 9 |
| X | IDS | iduronate 2-sulfatase | 010404 | 155966 | 241489 | 8, 31, 28 |
| X | IGBP1 | immunoglobulin (CD79A) binding protein 1 | 089289 | 189401 | 184210 | 9, 5, 21 |
| X | IGSF1 | immunoglobulin superfamily member 1 | 147255 | 147256 | 171054 | 31, 40, 38 |
| X | IKBKG | inhibitor of kappa light polypeptide gene enhancer in B-cells, kinase gamma | 269335 | 160211 | 268651 | |
| X | IRS4 | insulin receptor substrate 4 | 133124 | 260548 | 101890 | 2, 17, 14 |
| X | ITM2A | integral membrane protein 2A | 078596 | 147138 | 122145 | |
| X | INTS6L | integrator complex subunit 6 like | 165359 | 178947 | 268940 | |
| X | ITGB1BP2 | integrin subunit beta 1 binding protein 2 | 147166 | 147140 | 147133 | 43, 15, 25 |
| X | ITIH6 | inter-alpha-trypsin inhibitor heavy chain family member 6 | 102313 | 130119 | 102316 | 42, 35, 6 |
| X | IL1RAPL1 | interleukin 1 receptor accessory protein like 1 | 169306 | 226372 | 099399 | 11, 39, 33 |
| X | IL1RAPL2 | interleukin 1 receptor accessory protein like 2 | 189108 | 123576 | 268629 | 19, 38, 8 |
| X | IRAK1 | interleukin 1 receptor associated kinase 1 | 184216 | 177854 | 169057 | 9, 35, 1 |
| X | IL13RA1 | interleukin 13 receptor subunit alpha 1 | 131724 | 147251 | 174460 | 40, 4, 27 |
| X | IL13RA2 | interleukin 13 receptor subunit alpha 2 | 123496 | 147246 | 130224 | 1, 38, 2 |
| X | IL2RG | interleukin 2 receptor subunit gamma | 147168 | 204165 | 184634 | 5, 39, 41 |
| X | IL3RA | interleukin 3 receptor subunit alpha | 185291 | 198223 | 169100 | 1, 18, 2 |
| X | IL9R | interleukin 9 receptor | 124334 | 124333 | 102054 | |
| X | IQSEC2 | IQ motif and Sec7 domain 2 | 124313 | 126012 | 072501 | 34, 6, 3 |
| X | IDH3G | isocitrate dehydrogenase 3 (NAD(+)) gamma | 067829 | 184343 | 180879 | 23, 26, 41 |
| X | JADE3 | jade family PHD finger 3 | 102221 | 102218 | 130988 | 4, 39, 28 |
| X | KLHL13 | kelch like family member 13 | 003096 | 204019 | 131725 | 1, 42, 38 |
| X | KLHL15 | kelch like family member 15 | 174010 | 165182 | 130741 | 18, 29, 26 |
| X | KLHL34 | kelch like family member 34 | 185915 | 149970 | 091482 | 24, 36, 25 |
| X | KLHL4 | kelch like family member 4 | 102271 | 126733 | 147183 | 38, 8, 45 |
| X | KIAA1210 | KIAA1210 | 250423 | 277535 | 101856 | 27, 38, 33 |
| X | KIAA2022 | KIAA2022 | 050030 | 131263 | 131269 | 42, 25, 8 |
| X | KIF4A | kinesin family member 4A | 090889 | 120509 | 130055 | 9, 22, 21 |
| X | KRBOX4 | KRAB box domain containing 4 | 147121 | 147113 | 251192 | 4, 39, 15 |
| X | KLF8 | Kruppel like factor 8 | 102349 | 083750 | 188021 | 18, 30, 26 |
| X | LAGE3 | L antigen family member 3 | 196976 | 130827 | 102178 | 20, 2, 33 |
| X | L1CAM | L1 cell adhesion molecule | 198910 | 067840 | 126895 | 26, 9, 8 |
| X | LANCL3 | LanC like 3 | 147036 | 250349 | 047597 | 27, 5, 19 |
| X | LAS1L | LAS1 like, ribosome biogenesis factor | 001497 | 102053 | 147065 | 3, 13, 20 |
| X | LRCH2 | leucine rich repeats and calponin homology domain containing 2 | 130224 | 123496 | 175718 | 18, 31, 45 |
| X | LDOC1 | leucine zipper down-regulated in cancer 1 | 182195 | 227234 | 198573 | 41, 31, 1 |
| X | LUZP4 | leucine zipper protein 4 | 102021 | 175718 | 102024 | 38, |
| X | LHFPL1 | lipoma HMGIC fusion partner-like 1 | 182508 | 187823 | 126016 | 22, 30, 32 |
| X | LONRF3 | LON peptidase N-terminal domain and ring finger 3 | 175556 | 174460 | 277535 | 40, 4, 16 |
| X | LINC01420 | Long intergenic non-protein coding RNA 1420 | 204272 | 188021 | 204271 | 30, 31, 10 |
| X | LINC00633 | Long intergenic non-protein coding RNA 633 | 224107 | 196972 | 169551 | 38, |
| X | LINC00684 | Long intergenic non-protein coding RNA 684 | 275520 | 283594 | 184388 | 38, |
| X | LINC00890 | Long intergenic non-protein coding RNA 890 | 260802 | 077279 | 101901 | 25, 44, 38 |
| X | KDM5C | lysine demethylase 5C | 126012 | 184205 | 124313 | 37, 22, 24 |
| X | KDM6A | lysine demethylase 6A | 147050 | 189037 | 147113 | 1, 15, 13 |
| X | LPAR4 | lysophosphatidic acid receptor 4 | 147145 | 179300 | 078589 | 38, 12, 39 |
| X | LAMP2 | lysosomal associated membrane protein 2 | 005893 | 101892 | 158290 | 42, 8, 24 |
| X | MAGEA1 | MAGE family member A1 | 198681 | 235961 | 225110 | 6, 23, 35 |
| X | MAGEA10 | MAGE family member A10 | 124260 | 102287 | 011677 | 35, 32, 24 |
| X | MAGEA11 | MAGE family member A11 | 185247 | 269556 | 171116 | 13, 32, 6 |
| X | MAGEA12 | MAGE family member A12 | 213401 | 198930 | 268606 | 35, 2, 33 |
| X | MAGEA2 | MAGE family member A2 | 268606 | 213401 | 197172 | |
| X | MAGEA2B | MAGE family member A2B | 183305 | 221867 | 198930 | 2, 23, 33 |
| X | MAGEA3 | MAGE family member A3 | 221867 | 268089 | 183305 | 35, 34, 33 |
| X | MAGEA4 | MAGE family member A4 | 147381 | 183862 | 102287 | 16, 37, 19 |
| X | MAGEA6 | MAGE family member A6 | 197172 | 268606 | 147400 | 35, 2, 32 |
| X | MAGEA8 | MAGE family member A8 | 156009 | 123584 | 197021 | 32, 35, 44 |
| X | MAGEA9 | MAGE family member A9 | 123584 | 171116 | 156009 | |
| X | MAGEA9B | MAGE family member A9B | 267978 | 283697 | 268738 | 13, 4, 6 |
| X | MAGEB1 | MAGE family member B1 | 214107 | 120289 | 169297 | 34, 35, 38 |
| X | MAGEB10 | MAGE family member B10 | 177689 | 189186 | 226372 | 38, |
| X | MAGEB16 | MAGE family member B16 | 189023 | 189132 | 165164 | |
| X | MAGEB17 | MAGE family member B17 | 182798 | 126010 | 047230 | |
| X | MAGEB18 | MAGE family member B18 | 176774 | 004848 | 232030 | 38, |
| X | MAGEB2 | MAGE family member B2 | 099399 | 169306 | 198798 | 6, 5, 35 |
| X | MAGEB3 | MAGE family member B3 | 198798 | 099399 | 120289 | 38, 33, |
| X | MAGEB4 | MAGE family member B4 | 120289 | 198798 | 214107 | 38, |
| X | MAGEB5 | MAGE family member B5 | 188408 | 176746 | 224960 | |
| X | MAGEB6 | MAGE family member B6 | 176746 | 232030 | 188408 | 38, |
| X | MAGEB6P1 | MAGE family member B6 pseudogene 1 | 232030 | 176774 | 176746 | |
| X | MAGEC1 | MAGE family member C1 | 155495 | 165509 | 046774 | 35, 6, 3 |
| X | MAGEC2 | MAGE family member C2 | 046774 | 155495 | 189326 | 35, 34, 38 |
| X | MAGEC3 | MAGE family member C3 | 165509 | 196406 | 155495 | 8, |
| X | MAGED1 | MAGE family member D1 | 179222 | 189369 | 187243 | 35, 34, 31 |
| X | MAGED2 | MAGE family member D2 | 102316 | 102313 | 067445 | 31, 26, 35 |
| X | MAGED4 | MAGE family member D4 | 154545 | 187243 | 155622 | |
| X | MAGED4B | MAGE family member D4B | 187243 | 179222 | 154545 | |
| X | MAGEE1 | MAGE family member E1 | 198934 | 102390 | 196468 | 8, 26, 11 |
| X | MAGEE2 | MAGE family member E2 | 186675 | 102383 | 102390 | 8, |
| X | MAGEH1 | MAGE family member H1 | 187601 | 204279 | 247746 | 31, 1, 26 |
| X | MAGIX | MAGI family member, X-linked | 269313 | 280116 | 102007 | 29, 31, 2 |
| X | MAGT1 | magnesium transporter 1 | 102158 | 085224 | 131174 | 42, 45, 24 |
| X | MSL3 | male-specific lethal 3 homolog (Drosophila) | 005302 | 125363 | 169933 | 39, 36, 5 |
| X | MAP7D2 | MAP7 domain containing 2 | 184368 | 173681 | 173674 | 8, 19, 22 |
| X | MAP7D3 | MAP7 domain containing 3 | 129680 | 022267 | 156920 | 31, 40, 17 |
| X | MAMLD1 | mastermind like domain containing 1 | 013619 | 283463 | 171100 | 11, 40, 1 |
| X | MXRA5 | matrix remodeling associated 5 | 101825 | 062096 | 183943 | 11, 1, 40 |
| X | MTCP1 | mature T-cell proliferation 1 | 214827 | 165775 | 185515 | 10, 9, 22 |
| X | MCF2 | MCF.2 cell line derived transforming sequence | 101977 | 101981 | 101974 | 31, 38, 2 |
| X | MCTS1 | MCTS1, re-initiation and release factor | 232119 | 158290 | 171155 | 4, 7, 43 |
| X | MED12 | mediator complex subunit 12 | 184634 | 147168 | 196338 | 7, 43, 22 |
| X | MED14 | mediator complex subunit 14 | 180182 | 185753 | 124486 | 22, 24, 40 |
| X | MBTPS2 | membrane bound transcription factor peptidase, site 2 | 012174 | 091482 | 230797 | 42, 26, 38 |
| X | MMGT1 | membrane magnesium transporter 1 | 169446 | 181433 | 198689 | 42, 39, 29 |
| X | MPP1 | membrane palmitoylated protein 1 | 130830 | 130826 | 203870 | 39, 36, 5 |
| X | MECP2 | methyl-CpG binding protein 2 | 169057 | 184216 | 102076 | 6, 1, 26 |
| X | MID1IP1 | MIDI interacting protein 1 | 165175 | 156298 | 183337 | 3, 13, 5 |
| X | MIDI | midline 1 | 101871 | 073464 | 004961 | 42, 24, 29 |
| X | MID2 | midline 2 | 080561 | 170935 | 170925 | 10, 11, 42 |
| X | MPC1L | mitochondrial pyruvate carrier 1-like | 238205 | 182220 | 185753 | 38, |
| X | MAP3K15 | mitogen-activated protein kinase kinase kinase 15 | 180815 | 131828 | 147010 | 40, 2, 17 |
| X | MSN | moesin | 147065 | 001497 | 155659 | |
| X | MAOA | monoamine oxidase A | 189221 | 102055 | 069535 | 26, 1, 42 |
| X | MAOB | monoamine oxidase B | 069535 | 189221 | 124479 | 26, 2, 17 |
| X | MORC4 | MORO family CW-type zinc finger 4 | 133131 | 133138 | 147223 | 13, 32, 33 |
| X | MORF4L2 | mortality factor 4 like 2 | 123562 | 172465 | 188828 | 13, 31, 9 |
| X | MOSPD1 | motile sperm domain containing 1 | 101928 | 156500 | 184785 | 4, 13, 45 |
| X | MOSPD2 | motile sperm domain containing 2 | 130150 | 181544 | 102048 | 22, 4, 1 |
| X | MTRNR2L10 | MT-RNR2-like 10 | 256045 | 182518 | 158639 | 8, |
| X | MUM1L1 | MUM1 like 1 | 157502 | 123561 | 147231 | 38, 44, 27 |
| X | MBNL3 | muscleblind like splicing regulator 3 | 076770 | 123728 | 171004 | 32, 31, 22 |
| X | MTM1 | myotubularin 1 | 171100 | 013619 | 063601 | 42, 19, 22 |
| X | MTMR1 | myotubularin related protein 1 | 063601 | 171100 | 102181 | 22, 26, 40 |
| X | MTMR8 | myotubularin related protein 8 | 102043 | 198881 | 126970 | 27, 36, 44 |
| X | NAA10 | N(alpha)-acetyltransferase 10, NatA catalytic subunit | 102030 | 089820 | 102032 | 31, 9, 2 |
| X | NSDHL | NAD(P) dependent steroid dehydrogenase-like | 147383 | 147400 | 147394 | 2, 3, 34 |
| X | NDUFA1 | NADH:ubiquinone oxidoreductase subunit A1 | 125356 | 125352 | 186471 | 25, 15, 19 |
| X | NDUFB11 | NADH:ubiquinone oxidoreductase subunit B11 | 147123 | 130988 | 182872 | 29, 15, 25 |
| X | NOX1 | NADPH oxidase 1 | 007952 | 101811 | 182489 | 16, 23, |
| X | NDP | NDP, nonin cystine knot growth factor | 124479 | 069535 | 183690 | 44, 14, 8 |
| X | NLGN3 | neuroligin 3 | 196338 | 184634 | 169562 | 8, 38, 2 |
| X | NLGN4X | neuroligin 4, X-linked | 146938 | 183943 | 169059 | 26, 4, 31 |
| X | NKAP | NFKB activating protein | 101882 | 186471 | 203989 | 11, 41, 9 |
| X | NKRF | NFKB repressing factor | 186416 | 077721 | 125354 | 13, 9, 11 |
| X | NHS | NHS actin remodeling regulator | 188158 | 169891 | 047634 | 11, 37, 14 |
| X | NHSL2 | NHS like 2 | 204131 | 215113 | 242732 | |
| X | NRK | Nik related kinase | 123572 | 268629 | 123561 | 32, 15, 12 |
| X | NLRP2B | NLR family pyrin domain containing 2B | 215174 | 198455 | 198205 | |
| X | NONO | non-POU domain containing, octamer-binding | 147140 | 147130 | 147166 | |
| X | NCBP2L | nuclear cap binding protein subunit 2-like | 170935 | 157514 | 080561 | |
| X | NR0B1 | nuclear receptor subfamily 0 group B member 1 | 169297 | 214107 | 120280 | 2, 20, 4 |
| X | NXF2 | nuclear RNA export factor 2 | 269405 | 184515 | 269437 | |
| X | NXF2B | nuclear RNA export factor 2B | 269437 | 269405 | 215029 | 38, 18, 35 |
| X | NXF3 | nuclear RNA export factor 3 | 147206 | 133169 | 102409 | 38, 3, 27 |
| X | NXF5 | nuclear RNA export factor 5 | 126952 | 184867 | 166432 | |
| X | NXT2 | nuclear transport factor 2 like export factor 2 | 101888 | 101890 | 176076 | 24, 38, 32 |
| X | NUP62CL | nudeoporin 62 C-terminal like | 198088 | 089682 | 080572 | 34, 5, 39 |
| X | NAP1L2 | nucleosome assembly protein 1 like 2 | 186462 | 204118 | 131264 | 26, 43, 8 |
| X | NAP1L3 | nucleosome assembly protein 1 like 3 | 186310 | 102290 | 179083 | 8, 26, 17 |
| X | NAP1L6 | Nucleosome assembly protein 1 like 6 | 204118 | 186288 | 186462 | 14, 8, |
| X | NUDT10 | nudix hydrolase 10 | 122824 | 130385 | 187690 | 18, 12, 2 |
| X | NUDT11 | nudix hydrolase 11 | 196368 | 187690 | 224109 | 45, 38, 28 |
| X | NYX | nyctalopin | 188937 | 215301 | 147044 | 17, |
| X | OCRL | OCRL, inositol polyphosphate-5-phosphatase | 122126 | 102038 | 171388 | 44, 3, 9 |
| X | OFD1 | OFD1, centriole and centriolar satellite protein | 046651 | 196459 | 046653 | |
| X | OR13H1 | olfactory receptor family 13 subfamily H member 1 | 171054 | 147255 | 134602 | |
| X | OPHN1 | oligophrenin 1 | 079482 | 169083 | 181704 | 1, 23, 32 |
| X | OGT | O-linked N-acetylglucosamine (GlcNAc) transferase | 147162 | 147133 | 147174 | 24, 39, 18 |
| X | OPN1LW | opsin 1 (cone pigments), long-wave-sensitive | 102076 | 169057 | 268221 | 14, |
| X | OPN1MW | opsin 1 (cone pigments), medium-wave-sensitive | 268221 | 102076 | 166160 | 36, 14, |
| X | OPN1MW2 | opsin 1 (cone pigments), medium-wave-sensitive 2 | 166160 | 268221 | 269433 | 14, |
| X | OPN1MW3 | opsin 1 (cone pigments), medium-wave-sensitive 3 | 269433 | 166160 | 278057 | 36, 14, |
| X | OTC | ornithine carbamoyltransferase | 036473 | 156313 | 156298 | 19, 10, 38 |
| X | OTUD5 | OTU deubiquitinase 5 | 068308 | 102096 | 102057 | 34, 41, 9 |
| X | OTUD6A | OTU deubiquitinase 6A | 189401 | 147160 | 089289 | 38, |
| X | PAK3 | p21 (RAC1) activated kinase 3 | 077264 | 101938 | 077274 | 31, 28, 36 |
| X | PAGE1 | PAGE family member 1 | 068985 | 189064 | 101951 | 35, 17, 6 |
| X | PAGE2 | PAGE family member 2 | 234068 | 238269 | 182518 | 38, 37, 10 |
| X | PAGE2B | PAGE family member 2B | 238269 | 158578 | 234068 | 3, 37, 38 |
| X | PAGE3 | PAGE family member 3 | 204279 | 158639 | 187601 | 38, 8, |
| X | PAGE4 | PAGE family member 4 | 101951 | 068985 | 273820 | 32, 33, 15 |
| X | PAGE5 | PAGE family member 5 | 158639 | 256045 | 204279 | 35, 38, 32 |
| X | PNMA3 | paranecplastic Ma antigen 3 | 183837 | 198883 | 235961 | |
| X | PNMA5 | paranecplastic Ma antigen family member 5 | 198883 | 147394 | 183837 | 18, 38, 8 |
| X | PNMA6A | paranecplastic Ma antigen family member 6A | 235961 | 183837 | 198681 | 11, 8, 14 |
| X | PASD1 | PAS domain ccntaining 1 | 166049 | 160131 | 130032 | 38, 6, |
| X | PNPLA4 | patatin like phospholipase domain containing 4 | 006757 | 182583 | 177504 | 29, 9, 20 |
| X | PTCHD1 | patched dcmain containing 1 | 165186 | 184735 | 123131 | 27, 44, 23 |
| X | PDZD11 | PDZ domain containing 11 | 120509 | 147127 | 090889 | 4, 29, 31 |
| X | PDZD4 | PDZ domain containing 4 | 067840 | 180879 | 198910 | 26, 1, 8 |
| X | PIN4 | peptidylprolyl cis/trans isomerase, NIMA-interacting 4 | 102309 | 242732 | 186871 | 4, 17, 2 |
| X | PRDX4 | peroxiredoxin 4 | 123131 | 165186 | 123130 | 17, 45, 31 |
| X | PHF6 | PHD finger protein 6 | 156531 | 203952 | 165704 | 22, 4, 7 |
| X | PHF8 | PHD finger protein 8 | 172943 | 086758 | 184083 | 43, 38, 22 |
| X | PCYT1B | phosphate cytidylyltransferase 1, choline, beta | 102230 | 067992 | 101868 | 38, 8, 12 |
| X | PHEX | phosphate regulating endopeptidase hemeleg, X-linked | 102174 | 102172 | 175809 | 10, 42, 39 |
| X | PIGA | phosphatidylinositol glycan anchor biosynthesis class A | 165195 | 165192 | 165197 | |
| X | PLCXD1 | phosphatidylinositol specific phcsphclipase C X dcmain ccntaining 1 | 182378 | 102054 | 178605 | 22, 30, 21 |
| X | PGK1 | phosphoglycerate kinase 1 | 102144 | 226784 | 187325 | 13, 9, 3 |
| X | PGAM4 | phosphoglycerate mutase family member 4 | 226784 | 165240 | 102144 | 16, 33, 28 |
| X | PRPS1 | phosphoribosyl pyrophosphate synthetase 1 | 147224 | 147234 | 157514 | 39, 21, 36 |
| X | PRPS2 | phosphoribosyl pyrophpsphate synthetase 2 | 101911 | 169933 | 196664 | 3, 29, 38 |
| X | PHKA1 | phosphorylase kinase regulatory subunit alpha 1 | 067177 | 147099 | 184911 | 29, 11, 30 |
| X | PHKA2 | phosphorylase kinase regulatory subunit alpha 2 | 044446 | 086717 | 173698 | 22, 42, 26 |
| X | PIH1D3 | PIH1 dpmain cpntaining 3 | 080572 | 198088 | 147234 | 44, 38, 20 |
| X | PIM2 | Pim-2 protp-pncpgene, serine/threenine kinase | 102096 | 102100 | 068308 | 5, 36, 39 |
| X | PIR | pirin | 087842 | 165197 | 102010 | 10, 34, 35 |
| X | PLAC1 | placenta specific 1 | 170965 | 165704 | 156504 | 32, 10, 23 |
| X | PLS3 | plastin 3 | 102024 | 102021 | 180772 | 45, 13, 39 |
| X | PLXNA3 | plexin A3 | 130827 | 071859 | 196976 | 26, 18, 16 |
| X | PLXNB3 | plexin B3 | 198753 | 101986 | 184343 | 26, 8, 2 |
| X | PABPC1L2A | poly(A) binding protein cytoplasmic 1 like 2A | 186288 | 184388 | 204118 | 27, 33, |
| X | PABPC1L2B | poly(A) binding protein cytoplasmic 1 like 2B | 184388 | 275520 | 186288 | 27, 17, 8 |
| X | PABPC5 | poly(A) binding protein cytoplasmic 5 | 174740 | 153779 | 102290 | 10, 32, 14 |
| X | PQBP1 | polyglutamine binding protein 1 | 102103 | 126768 | 102100 | 29, 21, 3 |
| X | PBDC1 | polysaccharide biosynthesis domain containing 1 | 102390 | 186675 | 198934 | 2, 41, 37 |
| X | PORCN | porcupine homolog (Drosophila) | 102312 | 068438 | 147155 | 34, 2, 40 |
| X | KCND1 | potassium voltage-gated channel subfamily D member 1 | 102057 | 068308 | 068400 | 15, 10, 16 |
| X | KCNE5 | potassium voltage-gated channel subfamily E regulatory subunit 5 | 176076 | 101888 | 068366 | 15, 25, 39 |
| X | POU3F4 | POU class 3 homeobox 4 | 196767 | 131171 | 183035 | 8, |
| X | PRAF2 | PRA1 domain family member 2 | 243279 | 147144 | 196998 | 34, 21, 43 |
| X | PJA1 | praja ring finger ubiquitin ligase 1 | 181191 | 090776 | 130054 | 43, 8, 26 |
| X | PNCK | pregnancy up-regulated nonubiquitous CaM kinase | 130822 | 130829 | 130821 | |
| X | POF1B | premature ovarian failure, 1B | 124429 | 147180 | 188419 | 42, 4, 16 |
| X | PRICKLE3 | prickle planar cell polarity protein 3 | 012211 | 102007 | 102003 | 13, 21, 39 |
| X | PGRMC1 | progesterone receptor membrane component 1 | 101856 | 250423 | 077713 | 11, 26, 29 |
| X | PRR32 | proline rich 32 | 183631 | 198889 | 123165 | 10, 15, 20 |
| X | PRRG1 | proline rich and Gla domain 1 | 130962 | 198173 | 250349 | 42, 8, 32 |
| X | PRRG3 | proline rich and Gla domain 3 | 130032 | 166049 | 147378 | 14, 33, 27 |
| X | PCSK1N | proprotein convertase subtilisin/kexin type 1 inhibitor | 102109 | 187682 | 126768 | 28, 31, 17 |
| X | PSMD10 | proteasome 26S subunit, non-ATPase 10 | 101843 | 101842 | 101844 | 30, 34, 9 |
| X | PRKX | protein kinase, X-linked | 183943 | 101825 | 146938 | 21, 12, 3 |
| X | PPP1R2P9 | Protein phosphatase 1 regulatory inhibitor subunit 2 pseudogene 9 | 102055 | 279849 | 189221 | 38, |
| X | PPP1R3F | protein phosphatase 1 regulatory subunit 3F | 049769 | 049768 | 215274 | 14, 31, 33 |
| X | PPP2R3B | protein phosphatase 2 regulatory subunit B″beta | 167393 | 178605 | 185960 | 9, 43, 26 |
| X | PPP4R3CP | Protein phosphatase 4 regulatory subunit 30, pseudogene | 224960 | 188408 | 189186 | 38, |
| X | PPEF1 | protein phosphatase with EF-hand domain 1 | 086717 | 102104 | 044446 | 38, 2, 8 |
| X | PLP1 | proteolipid protein 1 | 123560 | 179363 | 123570 | 8, 17, 26 |
| X | PLP2 | proteolipid protein 2 | 102007 | 269313 | 012211 | 37, 9, 6 |
| X | PCDH11X | protocadherin 11 X-linked | 102290 | 174740 | 186310 | 11, 31, 14 |
| X | PCDH19 | protocadherin 19 | 165194 | 204086 | 5 | |
| X | PUDP | pseudouridine 5′-phosphatase | 130021 | 169059 | 101846 | 32, 45, 2 |
| X | P2RY10 | purinergic receptor P2Y10 | 078589 | 147145 | 147138 | 39, 5, 42 |
| X | P2RY8 | purinergic receptor P2Y8 | 182162 | 169093 | 197976 | 22, 21, 39 |
| X | P2RY4 | pyrimidinergic receptor P2Y4 | 186912 | 204195 | 120500 | |
| X | PDHA1 | pyruvate dehydrogenase (lipoamide) alpha 1 | 131828 | 173698 | 180815 | 1, 25, 40 |
| X | PDK3 | pyruvate dehydrogenase kinase 3 | 067992 | 005889 | 102230 | 31, 40, 29 |
| X | RAB33A | RAB33A, member RAS oncogene family | 134594 | 156709 | 056277 | 21, 41, 14 |
| X | RAB39B | RAB39B, member RAS oncogene family | 155961 | 155959 | 155962 | 22, 29, 28 |
| X | RAB40A | RAB40A, member RAS oncogene family | 172476 | 166681 | 133142 | 23, 20, 33 |
| X | RAB40AL | RAB40A, member RAS oncogene family-like | 102128 | 198908 | 133169 | 20, |
| X | RAB41 | RAB41, member RAS oncogene family | 147127 | 120500 | 120509 | 14, 38, 20 |
| X | RAB9A | RAB9A, member RAS oncogene family | 123595 | 176896 | 196459 | 18, 29, 1 |
| X | RAB9B | RAB9B, member RAS oncogene family | 123570 | 123560 | 158427 | 13, 8, 28 |
| X | ARHGEF6 | Rac/Cdc42 guanine nucleotide exchange factor 6 | 129675 | 102245 | 147274 | 39, 1, 42 |
| X | REPS2 | RALBP1 associated Eps domain containing 2 | 169891 | 102054 | 188158 | 29, 26, 14 |
| X | RAP2C | RAP2C, member of RAS oncogene family | 123728 | 165694 | 076770 | 22, 44, 4 |
| X | RRAGB | Ras related GTP binding B | 083750 | 189299 | 102349 | 2, 30, 25 |
| X | RBBP7 | RB binding protein 7, chromatin remodeling factor | 102054 | 086712 | 169891 | 2, 11, 21 |
| X | RGN | regucalcin | 130988 | 102221 | 147123 | 2, 31, 17 |
| X | RENBP | renin binding protein | 102032 | 102030 | 172534 | 26, 36, 35 |
| X | RPA4 | replication protein A4 | 204086 | 147202 | 165194 | 45, 38, |
| X | RP2 | retinitis pigmentosa 2 (X-linked recessive) | 102218 | 065923 | 102221 | 7, 22, 5 |
| X | RPGR | retinitis pigmentosa GTPase regulator | 156313 | 101955 | 036473 | 45, 4, 31 |
| X | RAI2 | retinoic acid induced 2 | 131831 | 047634 | 177324 | 44, 9, 20 |
| X | RS1 | retinoschisin 1 | 102104 | 008086 | 086717 | 14, 17, 10 |
| X | RGAG1 | retrotransposon gag domain containing 1 | 243978 | 101935 | 101938 | 38, 20, 35 |
| X | RGAG4 | retrotransposon gag domain containing 4 | 242732 | 204131 | 102309 | 31, 29, 40 |
| X | ARHGAP36 | Rho GTPase activating protein 36 | 147256 | 165675 | 147255 | 31, 26, 40 |
| X | ARHGAP4 | Rho GTPase activating protein 4 | 089820 | 126895 | 102030 | 7, 39, 36 |
| X | ARHGAP6 | Rho GTPase activating protein 6 | 047648 | 004961 | 125363 | 10, 33, 26 |
| X | RHOXF1 | Rhox homeobox family member 1 | 101883 | 203989 | 131721 | |
| X | RHOXF2 | Rhox homeobox family member 2 | 131721 | 101883 | 177485 | 38, 19, 44 |
| X | RHOXF2B | Rhox homeobox family member 2B | 203989 | 101882 | 101883 | 10, 38, 6 |
| X | RIBC1 | RIB43A domain with coiled-coils 1 | 158423 | 072501 | 072506 | 42, 30, 24 |
| X | RPL10 | ribosomal protein L10 | 147403 | 102119 | 013563 | 41, 21, 3 |
| X | RPL36A | ribosomal protein L36a | 241343 | 010671 | 257529 | |
| X | RPL39 | ribosomal protein L39 | 198918 | 187808 | 125351 | |
| X | RPS4X | ribosomal protein S4, X-linked | 198034 | 186871 | 125931 | 25, |
| X | RPS6KA3 | ribosomal protein S6 kinase A3 | 177189 | 173674 | 149970 | 40, 3, 45 |
| X | RPS6KA6 | ribosomal protein S6 kinase A6 | 072133 | 183035 | 165259 | 29, 40, 28 |
| X | RNF113A | ring finger protein 113A | 125352 | 125351 | 125356 | 21, 30, 26 |
| X | RNF128 | ring finger protein 128, E3 ubiquitin protein ligase | 133135 | 147231 | 133138 | 31, 2, 34 |
| X | RLIM | ring finger protein, LIM domain interacting | 131263 | 147100 | 050030 | 31, 15, 43 |
| X | RIPPLY1 | ripply transcriptional repressor 1 | 147223 | 133131 | 165376 | 44, 19, 17 |
| X | RBM3 | RNA binding motif (RNP1, RRM) protein 3 | 102317 | 068354 | 101940 | 39, 9, 36 |
| X | RBM10 | RNA binding motif protein 10 | 182872 | 147123 | 130985 | 21, 3, 9 |
| X | RBM41 | RNA binding motif protein 41 | 089682 | 165376 | 198088 | 4, 40, 31 |
| X | RBMX | RNA binding motif protein, X-linked | 147274 | 129675 | 165370 | 39, 13, 3 |
| X | RBMX2 | RNA binding motif protein, X-linked 2 | 134597 | 147262 | 165675 | 31, 33, 11 |
| X | RBMXL3 | RNA binding motif protein, X-linked like 3 | 175718 | 130224 | 102021 | 38, |
| X | RPL36A- | RPL36A-HNRNPH2 readthrough | 257529 | 241343 | 102393 | |
| | HNRNPH2 | | | | | |
| X | S100G | S100 calcium binding protein G | 169906 | 047230 | 169895 | |
| X | SASH3 | SAM and SH3 domain containing 3 | 122122 | 122121 | 188706 | 41, 5, 21 |
| X | SAGE1 | sarcoma antigen 1 | 181433 | 269586 | 169446 | 7, 38, 8 |
| X | SEPT6 | septin 6 | 125354 | 186416 | 187808 | 39, 41, 36 |
| X | STK26 | serine/threonine kinase 26 | 134602 | 171054 | 165694 | 39, 11, 4 |
| X | SERPINA7 | serpin family A member 7 | 123561 | 123572 | 157502 | 19, 15, 20 |
| X | SCML1 | sex comb on midleg-like 1 (Drosophila) | 047634 | 188158 | 131831 | 19, 11, 38 |
| X | SCML2 | sex comb on midleg-like 2 (Drosophila) | 102098 | 177324 | 008086 | 38, 11, 40 |
| X | SH2D1A | SH2 domain containing 1A | 183918 | 101972 | 282419 | 39, 5, 7 |
| X | SH3BGRL | SH3 domain binding glutamate rich protein like | 131171 | 198157 | 196767 | 45, 7, 13 |
| X | SH3KBP1 | SH3 domain containing kinase binding protein 1 | 147010 | 180815 | 173681 | 21, 43, 18 |
| X | SHOX | short stature homeobox | 185960 | 167393 | 205755 | 14, |
| X | SHROOM2 | shroom family member 2 | 146950 | 101850 | 234469 | 30, 8, 33 |
| X | SHROOM4 | shroom family member 4 | 158352 | 274588 | 130385 | 45, 40, 37 |
| X | SSR4 | signal sequence receptor subunit 4 | 180879 | 067829 | 067840 | 29, 31, 33 |
| X | SLITRK2 | SLIT and NTRK like family member 2 | 185985 | 203923 | 221870 | 11, 18, 8 |
| X | SLITRK4 | SLIT and NTRK like family member 4 | 179542 | 189252 | 268988 | 42, 17, 8 |
| X | SMIM10 | small integral membrane protein 10 | 184785 | 101928 | 212747 | 24, 29, 35 |
| X | SMIM10L2A | small integral membrane protein 10 like 2A | 178947 | 173275 | 165359 | |
| X | SMIM10L2B | small integral membrane protein 10 like 2B | 196972 | 203950 | 224107 | 2, 17, 33 |
| X | SMIM9 | small integral membrane protein 9 | 203870 | 130830 | 185010 | 10, 38, 32 |
| X | SMPX | small muscle protein, X-linked | 091482 | 185915 | 012174 | 25, 15, 42 |
| X | SLC10A3 | solute carrier family 10 member 3 | 126903 | 102178 | 071889 | 32, 1, 3 |
| X | SLC16A2 | solute carrier family 16 member 2 | 147100 | 187969 | 131263 | 11, 31, 6 |
| X | SLC25A14 | solute carrier family 25 member 14 | 102078 | 056277 | 147262 | 34, 14, 31 |
| X | SLC25A43 | solute carrier family 25 member 43 | 077713 | 101856 | 005022 | 9, 4, 35 |
| X | SLC25A5 | solute carrier family 25 member 5 | 005022 | 077713 | 018610 | 30, |
| X | SLC25A53 | solute carrier family 25 member 53 | 269743 | 269226 | 166707 | 31, 39, 37 |
| X | SLC25A6 | solute carrier family 25 member 6 | 169100 | 185291 | 169093 | 9, 21, 1 |
| X | SLC35A2 | solute carrier family 35 member A2 | 102100 | 102103 | 102096 | 13, 3, 4 |
| X | SLC38A5 | solute carrier family 38 member 5 | 017483 | 269791 | 068438 | 24, 9, 4 |
| X | SLC6A14 | solute carrier family 6 member 14 | 268104 | 180772 | 204019 | 42, 37, 23 |
| X | SLC6A8 | solute carrier family 6 member 8 | 130821 | 130822 | 185825 | 35, 29, 16 |
| X | SLC7A3 | solute carrier family 7 member 3 | 165349 | 120498 | 147164 | 39, 21, 12 |
| X | SLC9A6 | solute carrier family 9 member A6 | 198689 | 169446 | 022267 | 29, 11, 8 |
| X | SLC9A7 | solute carrier family 9 member A7 | 065923 | 147119 | 102218 | |
| X | SNX12 | sorting nexin 12 | 147164 | 165349 | 184481 | 9, 45, 3 |
| X | SOWAHD | sosondowah ankyrin repeat domain family member D | 187808 | 125354 | 198918 | 20, 32, 19 |
| X | SPANXA2 | SPANX family member A2 | 203926 | 198021 | 196406 | 19, |
| X | SPANXB1 | SPANX family member B1 | 227234 | 184258 | 182195 | |
| X | SPANXC | SPANX family member C | 198573 | 182195 | 198021 | 38, |
| X | SPANXD | SPANX family member D | 196406 | 203926 | 165509 | 19, 38, 10 |
| X | SPANXN1 | SPANX family member N1 | 203923 | 276380 | 185985 | |
| X | SPANXN2 | SPANX family member N2 | 268988 | 179542 | 276380 | 8, |
| X | SPANXN3 | SPANX family member N3 | 189252 | 189326 | 179542 | 38, |
| X | SPANXN4 | SPANX family member N4 | 189326 | 046774 | 189252 | 38, |
| X | SPANXN5 | SPANX family member N5 | 204363 | 268447 | 171405 | 17, |
| X | SPACA5 | sperm acrosome associated 5 | 171489 | 221994 | 171478 | |
| X | SPACA5B | sperm acrosome associated 5B | 171478 | 171489 | 165583 | |
| X | SPANXA1 | sperm protein associated with the nucleus, X-linked, family member A1 | 198021 | 198573 | 203926 | 19, 7, 38 |
| X | SATL1 | spermidine/spermine N1-acetyl transferase-like 1 | 184788 | 155008 | 147180 | 9, 15, 16 |
| X | SAT1 | spermidine/spermine N1-acetyltransferase 1 | 130066 | 123130 | 184831 | 30, 5, 36 |
| X | SMS | spermine synthase | 102172 | 230797 | 102174 | 2, 11, 23 |
| X | SPIN2A | spindlin family member 2A | 147059 | 186787 | 165591 | 5, 6, 14 |
| X | SPIN2B | spindlin family member 2B | 186787 | 204271 | 147059 | |
| X | SPIN3 | spindlin family member 3 | 204271 | 204272 | 186787 | 9, 8, 42 |
| X | SPIN4 | spindlin family member 4 | 186767 | 198205 | 131089 | 11, 7, 44 |
| X | SPRY3 | sprouty RTK signaling antagonist 3 | 168939 | 185973 | 124333 | 24, 33, 7 |
| X | SRPK3 | SRSF protein kinase 3 | 184343 | 198753 | 067829 | 25, 43, 31 |
| X | SOX3 | SRY-box 3 | 134595 | 203933 | 184258 | 38, 8, 12 |
| X | SSX1 | SSX family member 1 | 126752 | 165583 | 165584 | 34, 7, 35 |
| X | SSX2 | SSX family member 2 | 241476 | 187754 | 268447 | |
| X | SSX2B | SSX family member 2B | 268447 | 241476 | 204363 | 7, 35, 19 |
| X | SSX3 | SSX family member 3 | 165584 | 126752 | 268009 | 7, 38, 35 |
| X | SSX4 | SSX family member 4 | 268009 | 165584 | 269791 | |
| X | SSX4B | SSX family member 4B | 269791 | 268009 | 017483 | |
| X | SSX5 | SSX family member 5 | 165583 | 171478 | 126752 | 35, |
| X | SSX7 | SSX family member 7 | 187754 | 204382 | 241476 | |
| X | STARD8 | StAR related lipid transfer domain containing 8 | 130052 | 181704 | 090776 | 26, 32, 6 |
| X | STS | steroid sulfatase (microsomal), isozyme S | 101846 | 130021 | 182583 | 32, 18, 1 |
| X | STAG2 | stromal antigen 2 | 101972 | 101966 | 183918 | 11, 4, 22 |
| X | SMC1A | structural maintenance of chromosomes 1A | 072501 | 124313 | 158423 | 22, 19, 4 |
| X | SUV39H1 | suppressor of variegation 3-9 homolog 1 | 101945 | 015285 | 171433 | 21, 39, 24 |
| X | SRPX | sushi repeat containing protein, X-linked | 101955 | 147041 | 156313 | 45, 15, 43 |
| X | SRPX2 | sushi repeat containing protein, X-linked 2 | 102359 | 3 | 102362 | 45, 43, 26 |
| X | SMARCA1 | SWI/SNF related, matrix associated, actin dependent regulator of chromatin, | 102038 | 123165 | 122126 | 11, 12, 27 |
| | | subfamily a, member 1 | | | | |
| X | SYAP1 | synapse associated protein 1 | 169895 | 169906 | 086712 | 19, 2, 29 |
| X | SYN1 | synapsin I | 008056 | 078061 | 102265 | 26, 8, 28 |
| X | SYP | synaptophysin | 102003 | 012211 | 102001 | 8, 14, 26 |
| X | SYTL4 | synaptotagmin like 4 | 102362 | 102359 | 101811 | 44, 13, 1 |
| X | SYTL5 | synaptotagmin like 5 | 147041 | 187516 | 101955 | 11, 24, 42 |
| X | TAZ | tafazzin | 102125 | 013563 | 071553 | 31, 9, 5 |
| X | TAF1 | TATA-box binding protein associated factor 1 | 147133 | 147166 | 147162 | 18, 4, 40 |
| X | TAF7L | TATA-box binding protein associated factor 7 like | 102387 | 102385 | 126953 | 38, 19, 14 |
| X | TAF9B | TATA-box binding protein associated factor 9b | 187325 | 102144 | 173198 | 31, 4, 42 |
| X | TXLNG | taxilin gamma | 086712 | 169895 | 102054 | 1, 3, 6 |
| X | TBC1D25 | TBC1 domain family member 25 | 068354 | 147155 | 102317 | 34, 32, 21 |
| X | TBC1D8B | TBC1 domain family member 8B | 133138 | 133135 | 133131 | 31, 45, 23 |
| X | TBX22 | T-box22 | 122145 | 078596 | 174016 | 38, 35, |
| X | TCP11X2 | t-complex 11 family, X-linked 2 | 215029 | 269437 | 158164 | |
| X | TENM1 | teneurin transmembrane protein 1 | 009694 | 282419 | 282815 | 40, 39, 26 |
| X | TNMD | tenomodulin | 5 | 165194 | 3 | 15, 26, 33 |
| X | TEX11 | testis expressed 11 | 120498 | 082458 | 165349 | 10, 38, 36 |
| X | TEX13A | testis expressed 13A | 268629 | 189108 | 123572 | 38, 8, |
| X | TEX13B | testis expressed 13B | 170925 | 080561 | 101842 | |
| X | TEX28 | testis expressed 28 | 278057 | 269433 | 007350 | 38, 8, |
| X | TSPAN6 | tetraspanin 6 | 3 | 5 | 102359 | 42, 43, 4 |
| X | TSPAN7 | tetraspanin 7 | 156298 | 036473 | 165175 | 8, 2, 11 |
| X | TEX13C | TEX13 family member C | 282815 | 009694 | 198354 | |
| X | TEX13D | TEX13 family member D | 282419 | 183918 | 009694 | |
| X | TGIF2LX | TGFB induced factor homeobox 2 like, X-linked | 153779 | 147183 | 174740 | 38, |
| X | TAB3 | TGF-beta activated kinase 1/MAP3K7 binding protein 3 | 157625 | 198814 | 132446 | 11, 40, 26 |
| X | THOC2 | THO complex 2 | 125676 | 125675 | 101966 | 22, 4, 11 |
| X | TREX2 | three prime repair exonuclease 2 | 183479 | 189420 | 213397 | 17, 38, |
| X | TMSB15A | thymosin beta 15a | 158164 | 215029 | 125962 | 29, 11, 15 |
| X | TMSB15B | thymosin beta 15B | 158427 | 123570 | 123569 | 19, 39, 8 |
| X | TMSB4X | thymosin beta 4, X-linked | 205542 | 101916 | 187268 | |
| X | TIMP1 | TIMP metallopeptidase inhibitor 1 | 102265 | 008056 | 126759 | 18, 43, 6 |
| X | TLR7 | toll like receptor 7 | 196664 | 101911 | 101916 | 29, 10, 22 |
| X | TLR8 | toll like receptor 8 | 101916 | 196664 | 205542 | 10, 5, 32 |
| X | TRAPPC2 | trafficking protein particle complex 2 | 196459 | 123595 | 046651 | 39, 9, 22 |
| X | TCEAL1 | transcription elongation factor A like 1 | 172465 | 196507 | 123562 | 11, 31, 1 |
| X | TCEAL2 | transcription elongation factor A like 2 | 184905 | 166432 | 204071 | 1, 31, 2 |
| X | TCEAL3 | transcription elongation factor A like 3 | 196507 | 133142 | 172465 | 43, 26, 30 |
| X | TCEAL4 | transcription elongation factor A like 4 | 133142 | 172476 | 196507 | 4, 7, 19 |
| X | TCEAL5 | transcription elongation factor A like 5 | 204065 | 180964 | 133134 | 14, 32, 8 |
| X | TCEAL6 | transcription elongation factor A like 6 | 204071 | 184905 | 184515 | 2, 14, 38 |
| X | TCEAL7 | transcription elongation factor A like 7 | 182916 | 133134 | 185222 | 26, 31, 45 |
| X | TCEAL8 | transcription elongation factor A like 8 | 180964 | 102409 | 204065 | 31, 4, 29 |
| X | TCEAL9 | transcription elongation factor A like 9 | 185222 | 182916 | 166681 | |
| X | TCEANC | transcription elongation factor A N-terminal and central domain containing | 176896 | 198759 | 123595 | |
| X | TFE3 | transcription factor binding to IGHM enhancer 3 | 068323 | 068400 | 147144 | 26, 18, 35 |
| X | TFDP3 | transcription factor Dp family member 3 | 183434 | 134588 | 076716 | 38, 35, |
| X | TBL1X | transducin beta like 1X-linked | 101849 | 177138 | 101850 | 22, 29, 15 |
| X | TRPC5 | transient receptor potential cation channel subfamily C member 5 | 072315 | 101901 | 204025 | 40, 32, 8 |
| X | TKTL1 | transketolase like 1 | 007350 | 278057 | 196924 | 38, 7, 30 |
| X | TIMM17B | translocase of inner mitochondrial membrane 17 homolog B (yeast) | 126768 | 102109 | 102103 | 31, 34, 20 |
| X | TIMM8A | translocase of inner mitochondrial membrane 8 homolog A (yeast) | 126953 | 102387 | 010671 | 7, 34, 4 |
| X | TMEM164 | transmembrane protein 164 | 157600 | 068366 | 101935 | 43, 22, 1 |
| X | TMEM185A | transmembrane protein 185A | 269556 | 268738 | 185247 | 26, 13, 31 |
| X | TMEM187 | transmembrane protein 187 | 177854 | 172534 | 184216 | 22, 33, 5 |
| X | TMEM255A | transmembrane protein 255A | 125355 | 177485 | 101892 | 26, 39, 38 |
| X | TMEM257 | transmembrane protein 257 | 221870 | 185985 | 235699 | 14, 8, 20 |
| X | TMEM27 | transmembrane protein 27 | 147003 | 130234 | 169239 | 17, 10, 19 |
| X | TMEM31 | transmembrane protein 31 | 179363 | 188828 | 123560 | 38, 32, |
| X | TMEM35A | transmembrane protein 35A | 126950 | 188917 | 102384 | 8, 29, 26 |
| X | TMEM47 | transmembrane protein 47 | 147027 | 185448 | 189132 | 45, 11, 36 |
| X | TMLHE | trimethyllysine hydroxylase, epsilon | 185973 | 277745 | 168939 | 29, 21, 7 |
| X | TRMT2B | tRNA methyltransferase 2 homolog B | 188917 | 174225 | 126950 | 21, 9, 29 |
| X | TRO | trophinin | 067445 | 102316 | 158571 | 39, 8, 38 |
| X | TRPC5OS | TRPC5 opposite strand | 204025 | 072315 | 187823 | |
| X | TSC22D3 | TSC22 domain family member 3 | 157514 | 147224 | 170935 | 2, 10, 1 |
| X | TSPYL2 | TSPY like 2 | 184205 | 184194 | 126012 | 26, 5, 31 |
| X | TSR2 | TSR2, ribosome maturation factor | 158526 | 196632 | 102302 | 9, 3, 27 |
| X | UBQLN2 | ubiquilin 2 | 188021 | 102349 | 204272 | 20, 33, 23 |
| X | UBE2A | ubiquitin conjugating enzyme E2 A | 077721 | 018610 | 186416 | 43, 13, 32 |
| X | UBE2NL | ubiquitin conjugating enzyme E2 N like (gene/pseudogene) | 276380 | 268988 | 203923 | 36, 2, 14 |
| X | UBL4A | ubiquitin like 4A | 102178 | 196976 | 126903 | 3, 2, 9 |
| X | UBA1 | ubiquitin like modifier activating enzyme 1 | 130985 | 182872 | 102225 | 21, 12, 27 |
| X | USP11 | ubiquitin specific peptidase 11 | 102226 | 102225 | 147117 | 8, 39, 38 |
| X | USP26 | ubiquitin specific peptidase 26 | 134588 | 171004 | 183434 | 6, 38, |
| X | USP27X | ubiquitin specific peptidase 27, X-linked | 273820 | 101951 | 171365 | 20, 16, 17 |
| X | USP51 | ubiquitin specific peptidase 51 | 247746 | 187601 | 189299 | 26, 15, 22 |
| X | USP9X | ubiquitin specific peptidase 9, X-linked | 124486 | 180182 | 215301 | 20, 3, 31 |
| X | UXT | ubiquitously expressed prefoldin like chaperone | 126756 | 126767 | 279988 | 30, 7, 3 |
| X | UPF3B | UPF3 regulator of nonsense transcripts homolog B (yeast) | 125351 | 198918 | 125352 | 18, 25, 6 |
| X | UPRT | uracil phosphoribosyltransferase homolog | 094841 | 131269 | 102383 | 2, 43, 37 |
| X | UTP14A | UTP14A small subunit processome component | 156697 | 188706 | 085185 | 41, 13, 3 |
| X | VCX2 | variable charge, X-linked | 182583 | 101846 | 006757 | 38, |
| X | VCX2 | variable charge, X-linked 2 | 177504 | 006757 | 205642 | 38, |
| X | VCX3A | variable charge, X-linked 3A | 169059 | 146938 | 130021 | 37, 35, 38 |
| X | VCX3B | variable charge, X-linked 3B | 205642 | 177504 | 011201 | 38, |
| X | VEGFD | vascular endothelial growth factor D | 165197 | 165195 | 087842 | 1, 20, 2 |
| X | VAMP7 | vesicle associated membrane protein 7 | 124333 | 168939 | 124334 | 35, 29, 45 |
| X | VGLL1 | vestigial like family member 1 | 102243 | 102241 | 102245 | 32, 23, 34 |
| X | VBP1 | VHL binding protein 1 | 155959 | 185515 | 155961 | 34, 7, 29 |
| X | VMA21 | VMA21 vacuolar H+-ATPase homolog (S. cerevisiae) | 160131 | 102195 | 166049 | 22, 11, 35 |
| X | VSIG1 | V-set and immunoglobulin domain containing 1 | 101842 | 170925 | 101843 | 38, 37, 30 |
| X | VSIG4 | V-set and immunoglobulin domain containing 4 | 155659 | 147065 | 089472 | 10, 32, 1 |
| X | WDR13 | WD repeat domain 13 | 101940 | 102317 | 015285 | 3, 34, 9 |
| X | WDR44 | WD repeat domain 44 | 131725 | 003096 | 147251 | 24, 42, 22 |
| X | WDR45 | WD repeat domain 45 | 196998 | 243279 | 068394 | 29, 18, 9 |
| X | WAS | Wiskott-Aldrich syndrome | 015285 | 101940 | 101945 | 21, 41, 5 |
| X | WNK3 | WNK lysine deficient protein kinase 3 | 196632 | 184083 | 158526 | 31, 11, 38 |
| X | WWC3 | WWC family member 3 | 047644 | 234469 | 073464 | 29, 22, 21 |
| X | XAGE1A | X antigen family member 1A | 204379 | 155622 | 204382 | 10, |
| X | XAGE1B | X antigen family member 1B | 204382 | 204379 | 187754 | 10, |
| X | XAGE2 | X antigen family member 2 | 155622 | 154545 | 204379 | 32, 15, 6 |
| X | XAGE3 | X antigen family member 3 | 171402 | 171405 | 179304 | 32, |
| X | XAGE5 | X antigen family member 5 | 171405 | 204363 | 171402 | 38, |
| X | XG | Xg blood group | 124343 | 002586 | 056998 | 1, 26, 24 |
| X | XKRX | XK related, X-linked | 182489 | 007952 | 174225 | 22, 24, 39 |
| X | XIAP | X-linked inhibitor of apoptosis | 101966 | 125676 | 101972 | 13, 22, 26 |
| X | XK | X-linked Kx blood group | 047597 | 147036 | 165168 | 26, 19, 25 |
| X | XPNPEP2 | X-prolyl aminopeptidase 2 | 122121 | 171388 | 122122 | 15, 17, 40 |
| X | YIPF6 | Yip1 domain family member 6 | 181704 | 079482 | 130052 | 31, 29, 32 |
| X | YY2 | YY2 transcription factor | 230797 | 012174 | 102172 | 36, 38, 20 |
| X | ZFP92 | ZFP92 zinc finger protein | 189420 | 214897 | 183479 | |
| X | ZIC3 | Zic family member 3 | 156925 | 165370 | 129682 | 12, 38, 40 |
| X | ZBTB33 | zinc finger and BTB domain containing 33 | 177485 | 131721 | 125355 | 43, 11, 7 |
| X | ZBED1 | zinc finger BED-type containing 1 | 214717 | 169084 | 002586 | 34, 28, 1 |
| X | ZC4H2 | zinc finger C4H2-type containing | 126970 | 102043 | 102053 | 39, 21, 38 |
| X | ZC3H12B | zinc finger CCCH-type containing 12B | 102053 | 126970 | 001497 | 36, 39, 25 |
| X | ZRSR2 | zinc finger CCCH-type, RNA binding motif and serine/arginine rich 2 | 169249 | 169239 | 182287 | 41, 19, 22 |
| X | ZCCHC12 | zinc finger CCHC-type containing 12 | 174460 | 131724 | 175556 | 8, 31, 9 |
| X | ZCCHC13 | zinc finger CCHC-type containing 13 | 187969 | 204116 | 147100 | 38, |
| X | ZCCHC16 | zinc finger CCHC-type containing 16 | 187823 | 204025 | 182508 | 17, |
| X | ZCCHC18 | zinc finger CCHC-type containing 18 | 166707 | 269743 | 123575 | 15, 20, 28 |
| X | ZCCHC5 | zinc finger CCHC-type containing 5 | 179300 | 173198 | 147145 | 15, 45, 17 |
| X | ZDHHC15 | zinc finger DHHC-type containing 15 | 102383 | 094841 | 186675 | 11, 42, 31 |
| X | ZDHHC9 | zinc finger DHHC-type containing 9 | 188706 | 122122 | 156697 | 17, 8, 13 |
| X | ZMAT1 | zinc finger matrin-type 1 | 166432 | 126952 | 184905 | 31, 14, 22 |
| X | ZMYM3 | zinc finger MYM-type containing 3 | 147130 | 169562 | 147140 | 27, 43, 12 |
| X | ZNF157 | zinc finger protein 157 | 147117 | 102226 | 147124 | 45, |
| X | ZNF182 | zinc finger protein 182 | 147118 | 197779 | 221994 | 42, 39, 22 |
| X | ZNF185 | zinc finger protein 185 (LIM domain) | 147394 | 147383 | 198883 | 7, 31, 9 |
| X | ZNF275 | zinc finger protein 275 | 063587 | 225110 | 214897 | |
| X | ZNF280C | zinc finger protein 280C | 056277 | 134594 | 102078 | 24, 37, 12 |
| X | ZNF41 | zinc finger protein 41 | 147124 | 147117 | 078061 | 42, 22, 25 |
| X | ZNF449 | zinc finger protein 449 | 173275 | 283644 | 178947 | 1, 24, 32 |
| X | ZNF630 | zinc finger protein 630 | 221994 | 147118 | 171489 | 39, 8, 6 |
| X | ZNF645 | zinc finger protein 645 | 175809 | 102174 | 184735 | 38, |
| X | ZNF674 | zinc finger protein 674 | 251192 | 147121 | 147119 | 9, 42, 23 |
| X | ZNF711 | zinc finger protein 711 | 147180 | 184788 | 124429 | 45, 39, 25 |
| X | ZNF75D | zinc finger protein 75D | 186376 | 169551 | 238210 | |
| X | ZNF81 | zinc finger protein 81 | 197779 | 279988 | 147118 | 42, 17, 27 |
| X | ZFX | zinc finger protein, X-linked | 005889 | 130741 | 067992 | 13, 7, 43 |
| X | ZXDA | zinc finger, X-linked, duplicated A | 198205 | 215174 | 186767 | 3, 40, 42 |
| X | ZXDB | zinc finger, X-linked, duplicated B | 198455 | 165591 | 215174 | 43, 1, 19 |
| Y | AMELY | amelogenin, Y-linked | 099721 | 168757 | 092377 | 10, |
| Y | BPY2 | basic charge, Y-linked, 2 | 183753 | 169789 | 188120 | |
| Y | BPY2B | basic charge, Y-linked, 2B | 183795 | 279274 | 187191 | |
| Y | BPY2C | basic charge, Y-linked, 2C | 185894 | 205916 | 279115 | |
| Y | CDY1 | chromodomain Y-linked 1 | 172288 | 280301 | 233803 | |
| Y | CDY1B | chromodomain Y-linked 1B | 172352 | 205944 | 279287 | 38, |
| Y | CDY2A | chromodomain Y-linked 2A | 182415 | 129873 | 172468 | |
| Y | CDY2B | chromodomain Y-linked 2B | 129873 | 165246 | 182415 | |
| Y | DDX3Y | DEAD-box helicase 3, Y-linked | 067048 | 114374 | 183878 | 42, 39, 36 |
| Y | DAZ1 | deleted in azoospermia 1 | 188120 | 183753 | 205944 | 37, 38, 20 |
| Y | DAZ2 | deleted in azoospermia 2 | 205944 | 188120 | 172352 | 37, 38, |
| Y | DAZ3 | deleted in azoospermia 3 | 187191 | 183795 | 205916 | |
| Y | DAZ4 | deleted in azoospermia 4 | 205916 | 187191 | 185894 | |
| Y | EIF1AY | eukaryotic translation initiation factor 1A, Y-linked | 198692 | 012817 | 280969 | 29, 5, 17 |
| Y | HSFY1 | heat shock transcription factor, Y-linked 1 | 172468 | 182415 | 169953 | |
| Y | HSFY2 | heat shock transcription factor, Y-linked 2 | 169953 | 172468 | 279335 | |
| Y | KDM5D | lysine demethylase 5D | 012817 | 279335 | 198692 | 39, 1, 43 |
| Y | NLGN4Y | neuroligin 4, Y-linked | 165246 | 129862 | 129873 | 43, 26, 31 |
| Y | PRORY | proline rich, Y-linked | 183146 | 280969 | 242875 | |
| Y | PCDH11Y | protocadherin 11 Y-linked | 099715 | 176679 | 168757 | 6, 38, 8 |
| Y | PRY | PTPN13-like, Y-linked | 169789 | 226941 | 183753 | |
| Y | PRY2 | PTPN13-like, Y-linked 2 | 169807 | 242389 | 169800 | |
| Y | RPS4Y1 | ribosomal protein S4, Y-linked 1 | 129824 | 184895 | 067646 | 37, 29, 11 |
| Y | RPS4Y2 | ribosomal protein S4, Y-linked 2 | 280969 | 198692 | 183146 | |
| Y | RBMY1A1 | RNA binding motif protein, Y-linked, family 1, member A1 | 234414 | 242875 | 244395 | 38, |
| Y | RBMY1B | RNA binding motif protein, Y-linked, family 1, member B | 242875 | 183146 | 234414 | 38, 35, 19 |
| Y | RBMY1D | RNA binding motif protein, Y-linked, family 1, member D | 244395 | 234414 | 242389 | |
| Y | RBMY1E | RNA binding motif protein, Y-linked, family 1, member E | 242389 | 244395 | 169807 | 38, 35, 19 |
| Y | RBMY1F | RNA binding motif protein, Y-linked, family 1, member F | 169800 | 169807 | 226941 | 38, |
| Y | RBMY1J | RNA binding motif protein, Y-linked, family 1, member J | 226941 | 169800 | 169789 | |
| Y | SRY | sex determining region Y | 184895 | 233803 | 129824 | |
| Y | TSPY1 | testis specific protein, Y-linked 1 | 258992 | 228927 | 236424 | |
| Y | TSPY10 | testis specific protein, Y-linked 10 | 236424 | 258992 | 114374 | |
| Y | TSPY2 | testis specific protein, Y-linked 2 | 168757 | 099715 | 099721 | 38, 8, |
| Y | TSPY3 | testis specific protein, Y-linked 3 | 228927 | 229549 | 258992 | 38, 8, |
| Y | TSPY4 | testis specific protein, Y-linked 4 | 233803 | 279547 | 229549 | |
| Y | TSPY8 | testis specific protein, Y-linked 8 | 229549 | 233803 | 228927 | |
| Y | TGIF2LY | TGFB induced factor homeobox 2 like, Y-linked | 176679 | 067646 | 099715 | 38, |
| Y | TMSB4Y | thymosin beta 4, Y-linked | 154620 | 183878 | 129864 | 31, 26, 38 |
| Y | TBL1Y | transducin beta like 1, Y-linked | 092377 | 099721 | 279435 | 33, 38, 12 |
| Y | USP9Y | ubiquitin specific peptidase 9, Y-linked | 114374 | 236424 | 067048 | 26, 39, 43 |
| Y | UTY | ubiquitously transcribed tetratricopeptide repeat containing, Y-linked | 183878 | 067048 | 154620 | 42, 13, 31 |
| Y | VCY | variable charge, Y-linked | 129864 | 154620 | 129862 | |
| Y | VCY1B | variable charge, Y-linked 1B | 129862 | 129864 | 165246 | |
| Y | ZFY | zinc finger protein, Y-linked | 067646 | 129824 | 176679 | 4, 26, 17 |

[0068] Table 10 provides a listing of tissues and their designated codes for expression in Tables 1-9. These tissues may embody the target tissue of an embodiment of the invention. In some embodiments, more than one tissue may be targeted. In some embodiments, different cell types of any one or more of these tissues may be targeted. In some embodiments, the same one or more genes may be found to be expressed in one or more of the tissues listed. In some embodiments, any one or more of the listed tissues may be perturbed by a stimulus or may exhibit an outcome attendant to such perturbation.

TABLE 10
Tissue Expression Code

| Tissue | Code |
|---|---|
| adipose tissue | 1 |
| adrenal gland | 2 |
| ascites | 3 |
| bladder | 4 |
| blood | 5 |
| bone | 6 |
| bone marrow | 7 |
| brain | 8 |
| cervix | 9 |
| connective tissue | 10 |
| ear | 11 |
| embryonic tissue | 12 |
| esophagus | 13 |
| eye | 14 |
| heart | 15 |
| intestine | 16 |
| kidney | 17 |
| larynx | 18 |
| liver | 19 |
| lung | 20 |
| lymph | 21 |
| lymph node | 22 |
| mammary gland | 23 |
| mouth | 24 |
| muscle | 25 |
| nerve | 26 |
| ovary | 27 |
| pancreas | 28 |
| parathyroid | 29 |
| pharynx | 30 |
| pituitary gland | 31 |
| placenta | 32 |
| prostate | 33 |
| salivary gland | 34 |
| skin | 35 |
| spleen | 36 |
| stomach | 37 |
| testis | 38 |
| thymus | 39 |
| thyroid | 40 |
| tonsil | 41 |
| trachea | 42 |
| umbilical cord | 43 |
| uterus | 44 |
| vascular | 45 |

### Topologically Associating Domains (TADs)

[0069] Topologically Associating Domains (TADs), alternatively known as topological domains, are hierarchical units that are subunits of the mammalian chromosome structure. See, Dixon et al., Nature, 485(7398):376-80, 2012; Filippova et al., Algorithms for Molecular Biology, 9:14, 2014; Gibcus and Dekker Molecular Cell, 49(5):773-82, 2013; Naumova et al., Science, 42(6161):948-53, 2013; which are hereby incorporated by reference in their entireties. TADs are megabase-sized chromosomal regions that demarcate a microenvironment that allows genes and regulatory elements to make productive DNA-DNA contacts. TADs are defined by DNA-DNA interaction frequencies. The boundaries of TADs consist of regions where relatively fewer DNA-DNA interactions occur, as described in Dixon et al., Nature, 485(7398):376-80, 2012; Nora et al., Nature, 485(7398):381-5, 2012; which are hereby incorporated by reference in their entireties. TADs represent structural chromosomal units that function as gene expression regulators.

[0070] TADs may contain about 7 or more protein-coding genes and have boundaries that are shared by the different cell types. See, Smallwood et al., Current Opinion in Cell Biology, 25(3):387-94, 2013, which is hereby incorporated by reference in its entirety. Some TADs contain active genes and others contain repressed genes, as the expression of genes within a single TAD is usually correlated. See, Cavalli et al., Nature Structural & Molecular Biology, 20(3):290-9, 2013, which is hereby incorporated by reference in its entirety. Sequences within a TAD find each other with high frequency and have concerted, TAD-wide histone chromatin signatures, expression levels, DNA replication timing, lamina association, and chromocenter association. See, Dixon et al., Nature, 485(7398):376-80, 2012; Le Dily et al., Genes Development, 28:2151-62, 2014; Dixon et al., Nature, 485(7398):376-80, 2012; Wijchers, Genome Research, 25:958-69, 2015, which are hereby incorporated by reference in their entireties.

[0071] Gene loops and other structures within TADs influence the activities of transcription factors (TFs), cohesin, and 11-zinc finger protein (CTCF), a transcriptional repressor. See, Baranello et al., Proceedings of the National Academy of Sciences, 111(3):889-9, 2014, which is hereby incorporated by reference in its entirety. The structures within TADs include cohesin-associated enhancer-promoter loops that are produced when enhancer-bound TFs bind cofactors, for example Mediator, that, in turn, bind RNA polymerase II at promoter sites. See, Lee and Young, Cell, 152(6):1237-51, 2013; Lelli et al., 2012; Roeder, Annual Reviews Genetics 46:43-68, 2005; Spitz and Furlong, Nature Reviews Genetics, 13(9):613-26, 2012; Dowen et al., Cell, 159(2): 374-387, 2014; Lelli et al., Annual Review of Genetics, 46:43-68, 2012, which are hereby incorporated by reference in their entireties. The cohesin-loading factor Nipped-B-like protein (NIPBL) binds Mediator and loads cohesin at these enhancer-promoter loops. See, Kagey et al., Nature, 467(7314):430-5, 2010, which is hereby incorporated by reference in its entirety.

[0072] TADs have similar boundaries in all human cell types examined and constrain enhancer-gene interactions. See, Dixon et al., Nature, 518:331-336, 2015; Dixon et al., Nature, 485:376-380, 2012, which are hereby incorporated by reference in their entireties. This architecture of the genome helps explain why most DNA contacts occur within the TADs and enhancer-gene interactions rarely occur between chromosomes. However, TADs provide only partial insight into the molecular mechanisms that influence specific enhancer-gene interactions within TADs.

[0073] Long-range genomic contacts segregate TADs into an active and inactive compartment. See, Lieberman-Aden et al., Science, 326:289-93, 2009, which is hereby incorporated by reference in its entirety. The loops formed between TAD boundaries seem to represent the longest-range contacts that are stably and reproducibly formed between specific pairs of sequences. See, Dixon et al., Nature, 485(7398):376-80, 2012, which is hereby incorporated by reference in its entirety.

[0074] In some embodiments, the methods of the present invention are used to after gene expression from genes located in a TAD. In some embodiments, TAD regions are modified to alter gene expression of a non-canonical pathway as defined herein or as definable using the methods described herein.

[0075] Insulated Neighborhoods

[0076] As used herein, an “insulated neighborhood” or “IN” is defined as a chromosome structure formed by the looping of two interacting sites in the chromosome sequence. These interacting sites may comprise CCCTC-Binding factor (CTCF). These CTCF sites are often co-occupied by cohesin. The integrity of these cohesin-associated chromosome structures affects the expression of genes in the IN as well as those genes in the vicinity of the INs. A “neighborhood gene” is a gene localized within an IN. Neighborhood genes may be coding or non-coding. Such neighborhood genes may be selected from those in Tables 1-9.

[0077] IN architecture is defined by at least two boundaries which come together, directly or indirectly, to form a DNA loop. The boundaries of any IN comprise a primary upstream boundary and a primary downstream boundary. Such boundaries are the outermost boundaries of any N. Within any IN loop, however, secondary loops may be formed. Such secondary loops, when present, are defined by secondary upstream boundaries and secondary downstream boundaries, relative to the primary IN. Where a primary insulated neighborhood contains more than one internal loop, the loops are numbered relative to the primary upstream boundary of the primary loop, e.g., the secondary loop (first loop within the primary loop), the tertiary loop (second loop within the primary loop), the quaternary loop (the third loop within the primary loop) and so on.

[0078] INs may be located within TADs and other gene loops. Largest insulated neighborhoods may be TADs. TADs are defined by DNA-DNA interaction frequencies, and average 0.8 Mb, contain approximately 7 protein-coding genes and have boundaries that are shared by the different cell types of an organism. According to Dowen, the expression of genes within a TAD is somewhat correlated, and thus some TADs tend to have active genes and others tend to have repressed genes. See, Dowen, et al Cell. 2014 Oct. 9; 159(2): 374-387, which is herby incorporated by reference herein in its entirety.

[0079] INs may exist as contiguous entities along a chromosome or may be separated by non-insulated neighborhood sequence regions. INs may overlap linearly only to be defined once the DNA looping regions have been joined. While INs may comprise 3-12 genes, they may contain, 1, 2, 3, 4, 5, 6, 7, 8, 9, 10, 11, 12, 13 or more genes.

[0080] A “minimal insulated neighborhood” is an insulated neighborhood having at least one neighborhood gene and associated regulatory sequence region or regions (RSRs) which facilitate the expression or repression of the neighborhood gene such as a promoter and/or enhancer and/or repressor region, and the like. It is contemplated that in some instances RSRs may coincide or even overlap with an IN boundary. RSRs, as used herein, include but are not limited to regions, sections, sites or zones along a chromosome whereby interactions with signaling molecules/signaling proteins occur in order to alter expression of a neighborhood gene. As used herein, a “signaling molecule” or a “signaling protein” is any entity, whether protein, nucleic acid (DNA or RNA), organic small molecule, lipid, sugar or other biomolecule, which interacts directly, or indirectly, with a regulatory sequence region (RSR) on a chromosome. RSR may also refer to a portion of DNA that functions as a binding site for a GSC.

[0081] One category of specialized signaling molecules/signaling proteins are transcription factors. “Transcription factors” are those signaling molecules/signaling proteins which alter, whether to increase or decrease, the transcription of a target gene, e.g., a neighborhood gene.

[0082] According to the present invention, neighborhood genes may have any number of upstream or downstream genes along the chromosome. Within any IN, there may be one or more, e.g., one, two, three, four or more, upstream and/or downstream neighborhood genes relative to the primary neighborhood gene. A “primary neighborhood gene” is a gene which is most commonly found within a specific IN along a chromosome. An upstream neighborhood gene of a primary neighborhood gene may be located within the same IN as the primary neighborhood gene. A downstream neighborhood gene of a primary neighborhood gene may be located within the same IN as the primary neighborhood gene.

[0083] The present invention provides methods of altering the penetrance of a gene or gene variant. As used herein, “penetrance” is the proportion of individuals carrying a particular variant of a gene (e.g., mutation, allele or generally a genotype, whether wild type or not) that also exhibits an associated trait (phenotype) of that variant gene. In some situations of disease, penetrance of a disease-causing mutation measured as the proportion of individuals with the mutation who exhibit clinical symptoms. Consequently, penetrance of any gene or gene variant exists on a continuum.

[0084] INs are functional units that may group genes under the same control mechanism, which are described in Dowen et al., Cell, 159: 374-387 (2014), which is hereby incorporated by reference in its entirety. INs provide the mechanistic background for higher-order chromosome structures, such as TADs which are shown in FIG. 1. INs are chromosome structures formed by the looping of the two interacting CTCF sites co-occupied by cohesin which are shown in FIG. 2B. The integrity of these structures is important for proper expression of local genes. Generally, 1 to 10 genes are clustered in each neighborhood with a median number of 3 genes within each one. The genes controlled by the same IN are not readily apparent from a two-dimensional view of DNA. In humans, there are about 13,801 IN in a size range of 25 kb-940 kb with a median size of 186 kb. INs are conserved among different cell types. Smaller INs that occur within a bigger IN are referred to as nested insulated neighborhoods (NINs). TADs can consist of a single IN, or one IN and one NIN and two NINs as shown in FIG. 3B.

[0085] As used herein, the term “boundary” refers to a point, limit, or range indicating where a feature, element, or property ends or begins. Accordingly, an “insulated neighborhood boundary” refers to a boundary that delimits an IN on a chromosome. According to the present invention, an IN is defined by at least two IN boundaries, a primary upstream boundary and a primary downstream boundary. The “primary upstream boundary” refers to the IN boundary located upstream of a primary neighborhood gene. The “primary downstream boundary” refers to the IN boundary located downstream of a primary neighborhood gene. Similarly, when secondary loops are present, they are defined by secondary upstream and downstream boundaries. A “secondary upstream boundary” is the upstream boundary of a secondary loop within a primary IN, and a “secondary downstream boundary” is the downstream boundary of a secondary loop within a primary N. The directionality of the secondary boundaries follows that of the primary boundaries.

[0086] Components of an IN boundary may comprise the DNA sequences at the anchor regions and associated factors (e.g., CTCF, cohesin) that facilitate the looping of the two boundaries. The DNA sequences at the anchor regions may contain at least one CTCF binding site. Experiments using the ChIP-exo technique revealed a 52 bp CTCF binding motif containing four CTCF binding modules (Ong and Corces, Nature reviews Genetics, 12:283-293, 2011, which is incorporated herein by reference in its entirety). The DNA sequences at the IN boundaries may contain insulators. In some cases, IN boundaries may also coincide or overlap with regulatory sequence regions, such as enhancer-promoter interaction sites.

[0087] In some embodiments of the present invention, disrupting or altering an insulated neighborhood boundary may be accomplished by altering specific DNA sequences (e.g., CTCF binding sites) at the boundaries. For example, existing CTCF binding sites at IN boundaries may be deleted, mutated, or inverted. Alternatively, new CTCF binding sites may be introduced to form new INs. In other embodiments, disrupting or altering an IN boundary may be accomplished by altering the histone modification (e.g., methylation, demethylation) at the boundaries. In other embodiments, disrupting or altering an IN boundary may be accomplished by altering (e.g., block) the binding of CTCF and/or cohesin to the boundaries. In cases where IN boundaries coincide or overlap with regulatory sequence regions, disrupting or altering an IN boundary may be accomplished by altering the RSR or the binding of the RSR-associated signaling molecules.

### Regulatory Elements

### Enhancers

[0088] Enhancers are gene regulatory elements that control cell type specific gene expression programs in humans. See, Buecker and Wysocka, Trends in genetics: TIG 28, 276-284, 2012; Heinz et al., Nature reviews Molecular Cell Biology, 16:144-154, 2015; Levine et al., Cell, 157:13-25, 2014; Ong and Corces, Nature reviews Genetics, 12:283-293, 2011; Ren and Yue, Cold Spring Harbor symposia on quantitative biology, 80:17-26, 2015, which are hereby incorporated by reference in their entireties. Enhancers are segments of DNA that are generally a few hundred base pairs in length that may be occupied by multiple transcription factors that recruit co-activators and RNA polymerase II to target genes. See, Bulger and Groudine, Cell, 144:327-339, 2011; Spitz and Furlong, Nature reviews Genetics, 13:613-626, 2012; Tjian and Maniatis, Cell, 77:5-8, 1994, which are hereby incorporated by reference in their entireties. Enhancer RNA molecules transcribed from these regions of DNA also “trap” transcription factors capable of binding DNA and RNA. A region with more than one enhancer is a “super-enhancer.”

[0089] INs provide a microenvironment for specific enhancer-gene interactions that are vital for both normal gene activation and repression. Transcriptional enhancers control over 20,000 protein-coding genes to maintain cell type-specific gene expression programs in all human cells. Tens of thousands of enhancers are estimated to be active in any given human cell type. See, ENCODE Project Consortium et al., Nature, 489, 57-74, 2012; Roadmap Epigenomics et al., Nature, 518, 317-330, 2015, which are hereby incorporated by reference in their entireties. Enhancers and their associated factors can regulate expression of genes located upstream or downstream by looping to the promoters of these genes. Cohesin ChIA-PET studies carried out to gain insight into the relationship between transcriptional control of cell identity and control of chromosome structure reveal that majority of the super-enhancers and their associated genes occur within large loops that are connected through interacting CTCF-sites co-occupied by cohesin. Such super-enhancer domains (SD) usually contain one super-enhancer that loops to one gene within the SD and the SDs appear to restrict super-enhancer activity to genes within the SD. The correct association of super-enhancers and their target genes in insulated neighborhoods is highly vital because the mis-targeting of a single super-enhancer is sufficient to cause disease. See Groschel et al., Cell, 157(2):369-81, 2014.

[0090] Most of the disease-associated non-coding variation occurs in the vicinity of enhancers and hence might impact these enhancers target genes. Therefore, deciphering the features conferring specificity to enhancers is important for modulatory gene expression. See, Ernst et al., Nature, 473, 43-49, 2011; Farh et al., Nature, 518, 337-343, 2015; Hnisz et al., Cell, 155, 934-947, 2013; Maurano et al., Science, 337, 1190-1195, 2012, which are hereby incorporated by reference in their entireties. Studies suggest that some of the specificity of enhancer-gene interactions may be due to the interaction of DNA binding transcription factors at enhancers with specific partner transcription factors at promoters. See, Butler and Kadonaga, Genes & Development, 15, 2515-2519, 2001; Choi and Engel, Cell, 55, 17-26, 1988; Ohtsuki et al., Genes & Development, 12, 547-556, 1998, which are hereby incorporated by reference in their entireties. DNA sequences in enhancers and in promoter-proximal regions bind to a variety of transcription factors expressed in a single cell. Diverse factors bound at these two sites interact with large cofactor complexes and interact with one another to produce enhancer-gene specificity. See, Zabidi et al., Nature, 518:556-559, 2015, which is hereby incorporated by reference in its entirety.

[0091] In some embodiments, enhancer regions may be targeted to after or elucidate GSNs. In certain embodiments, a GSC is modulated by targeting enhancer RNA molecules (eRNAs) from enhancer regions. For example, an occupancy-dependent signaling center (ODSC) comprising a nucleic acid sequence of SEQ ID NOs: 32,627-71,281 is targeted to modulate transcription of enhancer RNA molecules (eRNAs) from enhancer regions.

### Insulators

[0092] Insulators are regulatory elements that block the ability of an enhancer to activate a gene when located between them and contribute to specific enhancer-gene interactions. See, Chung et al., Cell 74:505-514, 1993; Geyer and Corces, Genes & Development 6:1865-1873, 1992; Kellum and Schedl, Cell 64:941-950, 1991; Udvardy et al., Journal of molecular biology 185:341-358, 1985, which are hereby incorporated by reference in their entireties. Insulators are bound by the transcription factor CTCF but not all CTCF sites function as insulators. See, Bell et al., Cell 98: 387-396, 1999; Liu et al., Nature biotechnology 33:198-203, 2015, which are hereby incorporated by reference in their entireties. The features that distinguish the subset of CTCF sites that function as insulators have not been previously understood.

[0093] Genome-wide maps of the proteins that bind enhancers, promoters and insulators, together with knowledge of the physical contacts that occur between these elements provide further insight into understanding of the mechanisms that generate specific enhancer-gene interactions. See, Chepelev et al., Cell research, 22:490-503, 2012; DeMare et al., Genome Research, 23:1224-1234, 2013; Dowen et al., Cell, 159:374-387, 2014; Fullwood et al., Genes & Development 6:1865-1873, 2009; Handoko et al., Nature genetics 43:630-638, 2011; Phillips-Cremins et al., Cell, 153:1281-1295, 2013; Tang et al., Cell 163:1611-1627, 2015, which are hereby incorporated by reference in their entireties. Enhancer-bound proteins are constrained such that they tend to interact only with genes within these CTCF-CTCF loops. The subset of CTCF sites that form these loop anchors thus function to insulate enhancers and genes within the loop from enhancers and genes outside the loop, as shown in FIG. 3B. In some embodiments, insulator regions may be targeted to after or elucidate GSNs.

Controlling Expression from Insulated Neighborhoods: Genomic Signaling Centers (GSCs)

[0094] GSCs have been discovered to regulate the activity of INs. These regions control which genes are expressed and the level of expression in the human genome by a context-specific combination of factors, such as signaling proteins, chromatin modifications, and transcriptional coactivators. GSCs permit drugs to control response by targeting signaling pathways. GSCs include enhancer regions bound by highly context-specific combinatorial assemblies that interact to form a three-dimensional transcription factor hub macrocomplex. GSCs mediate interactions of the regulatory elements of one to four genes in a gene loop organized by biological function. Loss of the structural integrity of GSCs contributes to deregulation of gene expression, which potentially causes disease.

[0095] GSCs may have a unique composition including chromatin modifications and binding by the assemblies of transcription factors, the transcription apparatus, and chromatin regulators. GSCs may be highly context specific. Multiple GSCs may interact to control different combinations of genes within the same IN.

[0096] In some embodiments of the invention herein, an ODSC is defined as a region of the genome bound by at least (i) 2 signaling proteins, and comprising (ii) a H3K27 chemical modification or independently at least one of a bromodomain-containing protein (Brd), a transcriptional coactivator, or at least two master transcription factors that control gene expression in an insulated neighborhood. In certain embodiments, the chemical modification is H3K27ac, a histone modification associated with active enhancers, and/or the bromodomain-containing protein is one of Brd2, Brd3, and Brd4. The definition of an ODSC may also be expressed as (H3K27ac or Brd4 or p300 or at least 2 master transcription factors)+at least 2 signaling proteins. Boundaries of the 38,659 occupancy-dependent signaling centers identified using this definition are shown in Tables 43-67. The nucleic acid sequences of the ODSCs are shown in SEQ ID NOs: 32,627-71,281.

### Binding Sites for Signaling Molecules

[0097] A series of consensus binding sites, or binding motifs for binding sites, for signaling molecules has been identified by the present inventors. These consensus sequences reflect binding sites along a chromosome, gene, or polynucleotide for signaling molecules or for complexes which include one or more signaling molecules. These sites are given in Table 11.

TABLE 11
Motifs for Binding Sites or Genomic Signaling Centers

| | SEQ | Gene | | SEQ | Gene | | SEQ | Gene |
|---|---|---|---|---|---|---|---|---|
| Motif Sequence | ID NO | symbol | Motif Sequence | ID NO | symbol | Motif Sequence | ID NO | symbol |
| AAAAGTCAA | 1 | NR2E1 | GGCVGTTR | 230 | MYB | NYMATTAN | 429 | MKX6-2 |
| AAAATGGCGCCATTTT | 2 | E2F2 | GNCACGTGYN | 231 | HEY2 | NYMATTAN | 429 | PDX1 |
| AAACCACAAA | 3 | RUNX1 | GTAATWAAAN | 232 | HOXC10 | NYNATTAN | 430 | BARX1 |
| AAAGTAAACA | 4 | FOXA1 | GTCACGCNNMATTAN | 232 | PAX3 | NYNATTAN | 430 | BSX |
| AAATGGCGCCATTT | 5 | E2F1 | GTCGTWAAAN | 234 | HOXC10 | NYTAATCCN | 431 | PITX1 |
| AACAGCTGTT | 6 | MSC | GTCGTWAAAN | 234 | HOXD11 | NYTAATCCN | 431 | PITX3 |
| AACATCTGGA | 7 | ZBTB18 | GTTAATNATTAAY | 235 | HNF1B | NYTAATTARN | 432 | LHX6 |
| AACCGGAAGT | 8 | ELF1 | TAATCRATAN | 236 | CUX1 | NYTAGTTAMN | 432 | HMBOX1 |
| AACCGGAAGT | 8 | ETV1 | TAATCRATAN | 236 | CUZ2 | NYYTGTTTACHN | 434 | FOXP1 |
| AACCGGAAGT | 8 | GABPA | TRTTTACTTW | 237 | FOXM1 | RACATATGTY | 435 | NEUROG2 |
| AATGGCGCCAAA | 9 | E2F1 | TSAAGGTCAN | 238 | ESRRG | RAGGTCAAAAGGTCAAKN | 436 | RARA |
| AATGGCGCCAAA | 9 | E2F4 | TTACGYAM | 239 | GMEB2 | RATAAAAR | 437 | CPEB1 |
| AATTGGCCAATTA | 10 | LBX2 | TTGGCANNNTGCCAR | 240 | NFIA | RCGGACACAATR | 438 | FOXG1 |
| ACAGGAAGTG | 11 | ERG | TTGGCANNNTGCCAR | 240 | NFIB | RGGATTAR | 439 | GSC |
| ACAGGAAGTG | 11 | ETS1 | A.yTrAAt | 241 | ARRB1 | RGGcAm | 440 | EGLN2 |
| ACATCCTGGT | 12 | SPDEF | AACAATNNNAKTGTT | 242 | SOX21 | RGGGCACTAACY | 441 | ZNF264 |
| ACCCTTGAACCC | 13 | ZNF524 | AACAATNNNNAKTGTT | 243 | SOX21 | RRGGTCAAAGTCCRNN | 442 | HNF4A |
| ACCGAACAAT | 14 | SOX17 | AACAATNNNNAKTGTT | 243 | SOX7 | RRGGTCAN | 443 | NR2F1 |
| aCGCGTc | 15 | MBL2 | AAGGKGRCGCAGGCA | 244 | ZNF165 | RRGGTCATGACCYY | 444 | RXRA |
| ACTACAATTCCC | 16 | GFY | ACCCTmAAGGTyrT | 245 | ZNF569 | RRGGTCATGACCYY | 444 | RXRG |
| ACTGAAACCA | 17 | IRF4 | ACNGTTAAACNG | 246 | MYBL1 | RTCACGTGAY | 445 | SREBF2 |
| ACTTTCACTTTC | 18 | PRDM1 | AkGmCACGTA | 247 | TRIM3 | RTCACGTGAY | 445 | TFEB |
| AGAAATGACTTCCCT | 19 | ZNF528 | AMCATATGKT | 246 | OLIG2 | RTCACGTGAY | 445 | TFEC |
| AGAGGAAGTG | 20 | MAZ | AMCATATGKT | 248 | OLIG3 | RTCACGTGAY | 445 | USF1 |
| aGATAAG | 21 | SLC6A1 | ANCATATGNT | 249 | BHLHE23 | RTGCCMNNN | 446 | HIC2 |
| AGGCCTAG | 22 | ZNF711 | ANCATATGNT | 249 | OLIG1 | SCACGTGS | 447 | MYCLP1 |
| AGGCCTGG | 23 | ZFX | ANRTAAAYAAACA | 250 | FOXC1 | SYMATTAN | 448 | HOXA6 |
| AGGTCTCTAACC | 24 | PRDM14 | ARRGGTCANNNRRGGTCA | 251 | RARA | VCAGCTGBNN | 449 | TCF12 |
| AGGTGTGA | 25 | MGAM | AWCAGCTGWT | 252 | TFAP4 | WATGCGCATW | 450 | POU5F1 |
| AGGTGTGA | 25 | TBX1 | AWNTAGGTCATGACCTANWT | 253 | RORB | WRCGTAACCACGYN | 451 | GMEB2 |
| AGGTGTGA | 25 | TBX15 | CCCGCNTNNNRCGAA | 254 | CENPB | YGCGCATGCGCN | 452 | NFE2L1 |
| AGGTGTGA | 25 | TBX4 | cCr.RTcrGG | 255 | ASCL1 | yGCGGCk. | 453 | SULT1A1 |
| AGGTGTGA | 25 | TBX5 | CGTRNAAARTGA | 256 | MSC | YRATTGCAATYR | 454 | LHX6 |
| AGGTGTGAAAAAAGGTGTGA | 26 | TBX1 | CNNBRGCGCCCCCTGSTGGC | 257 | CTCFL | YTAATTAN | 455 | VAX1 |
| AGGTGTGAAGGTGTGA | 27 | TBX20 | GACCACMCACNNNG | 258 | GLI2 | YTAATTAN | 455 | VAX2 |
| ATaacATG | 25 | SLC6A11 | GCCMCGCCCMC | 259 | AZF1 | YTAATTAN | 455 | VSX1 |
| ATAGTGCCACCTGGTGGCCA | 29 | CTCF | GCCMCGCCCMC | 259 | KLF16 | YTAATTAN | 455 | VSX2 |
| ATCAATAACATTGAT | 30 | SOX15 | GCCMCGCCCMC | 259 | PSG1 | ...a...gTAAACAa | 456 | FOXG1 |
| ATCAATTGCAGTGAT | 31 | SOX10 | GNCACGTGNC | 260 | HES1 | .gCsGgg | 457 | SLC13A4 |
| ATCACGTGAT | 32 | MLX | GRGGTCAAAAGGTCANA | 261 | RARG | DATGASTCAT | 458 | BATF |
| ATCACGTGAT | 32 | MLXIPL | GRGGTCAAAAGKTCAC | 262 | RARG | kGmCAGCGTGTC | 459 | TRIM3 |
| ATGAATAACATTCAT | 33 | SOX15 | GRGTTCANNRRGTTCA | 263 | CYP27B1 | NAACAATTKCAGTGTT | 460 | SOX4 |
| ATGAATTGCAGTCAT | 34 | SOX10 | GTCWGCTGTYYCTCT | 264 | ZNF317 | NATTTCCNGGAAAT | 461 | STAT1 |
| ATGACGTCAT | 35 | JUN | GTtgyCATgG.aAc | 265 | RFX1 | NCCGCCATNNT | 462 | YY2 |
| ATGACTCAT | 36 | BACH1 | GYCATCMATCAT | 266 | HOXA2 | NCYAATAAAA | 463 | HOXD13 |
| ATGACTCATC | 37 | FOS | TAATTAGYRYTRATTA | 267 | LHX6 | NGYAATAAAA | 464 | HOXD11 |
| ATGCCCTGAGGC | 38 | TFAP2A | TAATTRCYAATTA | 268 | LHX9 | NNCATCCCATAATANTC | 465 | ZNF410 |
| ATTGCGCAAC | 39 | CEBPA | TGAATNNNAKTCA | 269 | SOX21 | NNNGCATGTCCNGACATGCC | 465 | UVRAG |
| CAAGATGGCGGC | 40 | YY1 | TGAATRTKCAGTCA | 270 | SOX10 | NNNGMCACGTCATC | 467 | XBP1 |
| CACCGAACAAT | 41 | SOX6 | TGGKCTARCCTCGA | 271 | ZKSCAN3 | NRAAGGTCAANNNNRGGTCA | 468 | RORA |
| CCAAT | 42 | NFYA | TTCya.....TTC | 272 | HSF1 | NTGCCACGTCANCA | 469 | CREB3L1 |
| CCAAT | 42 | NFYB | tttCC.rAt.gg | 273 | SRF | NYAATTAAAANNYAATTA | 470 | MSX1 |
| CCAAT | 42 | NFYC | TTTCGCNTGGCNNGTCA | 274 | ZBTB49 | NYAATTAAAANNYAATTA | 470 | MSX2 |
| CCATGCCGCCAT | 43 | YY2 | TWCCCAYAATGCATTG | 275 | ZNF143 | RACATGTYNNRACATGTC | 471 | TP63 |
| CCCCGCGC | 44 | SLC13A4 | AGATSTNDNNDSAGATAASN | 275 | GATA3 | RAGGTCANTCAAGGTCA | 472 | ESRRA |
| CGCAGCTGCG | 45 | NHLH1 | ARGAGGMCAAAATGW | 277 | ZNF675 | RAGGTCANTCAAGGTCA | 472 | ESRRG |
| CGCGAAAa | 46 | VANGL2 | ATTTCCCAGVAKSCY | 278 | ZNF143 | RAGTCAANAAGTCA | 472 | NR2E1 |
| CGGACACAAT | 47 | FOXK1 | GGmraTA.CGs | 279 | APEX1 | rCGGC...rCGGC | 474 | SULT1A1 |
| CGGTTGCCATGGCAAC | 48 | RFX1 | AACAATRTKCAGWGTT | 280 | SOX10 | RGTTCRNNNRGTTC | 475 | NR1I2 |
| CGGTTTCAAA | 49 | CHR | AACAATRTKCAGWGTT | 280 | SOX8 | RMATWCCA | 476 | TEAD3 |
| CGTGGGTGGTCC | 50 | GLI3 | AACAATRTKCAGWGTT | 280 | SOX9 | rracGCsAaa | 477 | VANGL2 |
| CTAATTAG | 51 | PAX4 | ADGGYAGYAGCATCT | 281 | PRDM9 | RRGGTCANNNRRGGTCA | 476 | RARG |
| CTGCGCATGCGC | 52 | NFE2L1 | AGGTGTKANGGTGTSA | 282 | TBX20 | RTAAACAATAAAYA | 479 | FOXJ2 |
| CTTCGAG | 53 | XBP1 | AGGTGTKANNTMACACCT | 283 | MGAM | RTAAACARTAAACA | 480 | FOXJ3 |
| GAAAGTGAAAGT | 54 | IRF1 | AGGTGTNANWWNTNACACCT | 284 | TBX4 | RTAAACAWMAACA | 481 | FOXJ2 |
| GAGGTCAAAGGTCA | 59 | NR2C2 | AGGTGTNANWWNTNACACCT | 284 | FBX5 | RTAAAYA | 482 | FOXD2 |
| GATGACGTCATC | 56 | XBP1 | ATCAATRTKCAGWGAT | 285 | SOX9 | RTAAAYA | 482 | FOXD3 |
| GATGACTCAGCA | 57 | NFE2 | ATCRATNNNNNATCRAT | 286 | CUX1 | RTAAAYA | 482 | FOXL1 |
| GATTGCATCA | 58 | APEH | ATCRATNNNNNNATCRAT | 287 | CUZ1 | RTAAAYAAACA | 482 | FOXC2 |
| GCACTTAA | 59 | ISL2 | ATCRATNNNNNNATCRAT | 287 | CUZ2 | rTGTAcGGrT | 484 | FHL1 |
| GCAGCCAAGCGTGACC | 60 | PAX5 | ATGAATRTKCAGWCAT | 286 | SOX9 | RTGTTAAAYGTAGATTAAG | 485 | ZNF232 |
| GCTAATCC | 61 | CRX | CCTCATGGTGYCYTWYTCCCTT | 289 | ZNF41 | WRTAAAYAAACAA | 486 | FOXL1 |
| | | | GTG | | | | | |
| GCTTTTCCCACA | 62 | ZNF75A | GACCMCCYRMTGNG | 290 | ZIC1 | WTTCGAAYG | 487 | HSFY2 |
| ggACCCt | 63 | NRG1 | gcsGsg..sG | 291 | SLC13A4 | YACGTAACNKACGTA | 486 | GMEB2 |
| GGCCATAAATCA | 64 | HOXA9 | GGMTNAKCC | 292 | RHOXF1 | yGGCGCTAyca | 489 | SNTB1 |
| GGGGGTGTGTCC | 65 | KLF10 | GGTGTNANWWNTNACACC | 293 | TBX2 | YTGGCANNNTGCCAA | 490 | NFIX |
| GGGGTCAAAGGTCA | 66 | RXRA | GGYGTGANNNNTCACRCC | 294 | MGAM | YTGGCNNNNTGCCAA | 491 | NFIX |
| GGGGTCAAAGGTCA | 66 | RXRB | GRTGMTRGAGCC | 295 | ZNF415 | ...ACCCR.aCMy | 492 | RAP1A |
| GGGGTCAAAGGTCA | 66 | RXRG | TAAWYGNNNNTAAWYG | 296 | BARHL2 | .tGrTAGCGCCr... | 492 | SNTB1 |
| GGTCACGTGA | 67 | USF1 | TGAATRTKCAGWCA | 297 | SOX8 | KCTAWAAATAGM | 494 | MEF2A |
| GGTCCCTAGGGA | 68 | EBF1 | TGMATNNNTNA | 298 | POU3F4 | MCCATATAWGGN | 495 | SRF |
| GTAAACA | 69 | FOXI1 | tGyayGGrtg | 299 | RAP1A | NAAACGATNNAN | 496 | HOMEZ |
| GTAAACA | 69 | FOXO4 | tktCC..wTtGGAAA | 300 | SRF | NAACAATANCATTGTTN | 497 | SOX2 |
| GTAMCA | 69 | FOXO6 | TNACACCTNNNAGGTGTNA | 301 | TBX21 | NAACAATKNYAGTGTTN | 496 | SOX8 |
| GTAAACAA | 70 | FOXO1 | TRGGTYASTAGGTCA | 302 | NR1D2 | NAACAATKNYAGTGTTN | 496 | SOX9 |
| GTAAACATGTTTAC | 71 | FOXO1 | TYTCACACCTNNNAGGTGTGAR | 303 | TBX1 | NAACAATNNNATTGTTN | 499 | SOX2 |
| | | | A | | | | | |
| GTAAACATGTTTAC | 71 | FOXO3 | AAACYKGTTWDACMRGTTTB | 304 | GRHL2 | NAACCGCAAACCRCAN | 500 | RUNX2 |
| GTAAACATGTTTAC | 71 | FOXO4 | GACCCCCYGYTGNGN | 305 | ZIC3 | NAACCGCAAACCRCAN | 500 | RUNX3 |
| GTAAACATGTTTAC | 71 | FOXO6 | GACCCCCYGYTGNGN | 305 | ZIC4 | NAACCRCAAN | 501 | RUNX3 |
| GTAATAAAA | 72 | HOXD12 | TTTYACGCWTGANTGMNYN | 306 | PAX6 | NAAGACGYCTTN | 502 | PROX1 |
| GTACCTACCT | 73 | ZNF784 | ACCYTmArGGT.rTG | 307 | ZNF569 | NAANCGAAASYR | 503 | IRF2 |
| GTCACGTG | 74 | RBPJ | CNATTAAAWANCNATTA | 308 | BARX1 | NAASATCAAAGN | 504 | TCF7L1 |
| GTCACGTGAC | 75 | ARNTL | TAGAYRAYTGMCANGAA | 309 | ZNF713 | NACAYATGNN | 505 | TCF15 |
| GTCACGTGAC | 75 | BHLHE41 | TWGHWACAWTGTWDC | 310 | DMRT1 | NACTTCCGSCGGAARMN | 506 | ELK1 |
| GTCCCCAGGGGA | 76 | EBF1 | GNCTGTASTRNTGBCTCHTT | 311 | ZNF382 | NAGGTCAMSRTGACCTN | 507 | ESR1 |
| GTGCGCATGCGC | 77 | NKRF | ....gTAAACAa | 312 | FOXO1 | NAMCCGGAAGTR | 506 | ELF2 |
| GTGGGCCCCA | 76 | ZNF692 | KCCACGTGAC | 313 | NPAS2 | NATCAATANCATTGATN | 509 | SOX2 |
| TCACACCTAGGTGTGA | 75 | Tr | MCGCCCACGCA | 314 | EGR2 | NATCAATKNYAGTGATN | 516 | SOX8 |
| tCACGTG | 80 | RBPJ | NACCCGGAAGTA | 315 | EHF | NATCAATKNYAGTGATN | 510 | SOX9 |
| TGACCTTTAAAGGTCA | 81 | NR4A2 | NAGGTGTGAA | 316 | TBX21 | NATCAATNNNATTGATN | 511 | SOX2 |
| TGATGACGTCATCA | 82 | BATF3 | NATGCGGGTA | 317 | GCM1 | NATGAATKNYAGTCATN | 512 | SOX9 |
| TGCCACGTGGCA | 82 | CREB3L1 | NCCACGTG | 318 | MYC | NATGASTCATN | 512 | NFE2 |
| tGCTGGT | 84 | ACE2 | NCCACTTAA | 319 | NKX3-1 | NCACTTNAN | 514 | NKX2-8 |
| TGGCAGTTGG | 85 | MYBL1 | NCCACTTAA | 319 | NKX3-2 | NCCACTTRAN | 515 | NKX2-3 |
| TTACGTAA | 86 | GMEB2 | NCCCCCCCAC | 320 | ZNF740 | NCCGGAWATCCGGN | 516 | ERG |
| TTACTAA | 87 | ARRB1 | NCGAAACCGAAACT | 321 | RF8 | NCCGGAWRYRYWTCCGGN | 517 | ETS1 |
| TTgccATggCAAC | 88 | RFX1 | NNCACGTGCC | 322 | HEY2 | NCCGGNNNNNNCCGGN | 518 | TFCP2 |
| tTgTTTac | 89 | FOXO1 | NNGCGGAAGTG | 323 | ETV7 | NCGAAANYGAAACY | 519 | IRF7 |
| TTTAAAGGTCA | 90 | NR4A2 | NTGGGTGTGGCC | 324 | KLF1 | NCGACCACCNAN | 520 | ZBTB7C |
| TTTCCCCACAC | 91 | FOXO3 | NTTTCCAGGAAA | 325 | STAT4 | NCTAWAAATAGM | 521 | MEF2D |
| TTTCCCCACACG | 92 | FOXO1 | rACGCGt | 326 | MBL2 | NGACCCCCCACGANGN | 522 | GLIS1 |
| TTTCCCCACACG | 92 | FOX04 | rCACAAT | 327 | MAT1A | NGAGGTCANNGAGTTCANNN | 523 | CYP27B1 |
| TTTCCCGCCAAA | 92 | E2F8 | RCCGGAAGTG | 328 | ETS2 | NGCCNNNNGGCN | 524 | TFAP2A |
| TTTGGCGCCAAA | 94 | E2F1 | RRGGTCAAAAGGTCA | 329 | NR2F6 | NGCCNNNNGGCN | 524 | TFAP2B |
| TTTGGCGCCAAA | 94 | E2F4 | RRGGTCAAAGGTCA | 330 | HNF4A | NGCCNNNNGGCN | 524 | TFAP2C |
| TTTTCCATGGAAAA | 95 | NFATC1 | RRGGTCAAAGGTCA | 330 | NR2C2 | NGCCNNNNNGGCN | 525 | TFAP2C |
| AAAAAGCGGAAGTN | 96 | SPI1 | RRGGTCAAAGGTCA | 330 | NR2F6 | RGGGGAWTCCCCN | 526 | NFKB1 |
| AAAAATGGCGCCAAAANN | 97 | E2F2 | RRGTCCAAAGGTCAA | 331 | HNF4A | NGGGGAWTCCCCN | 526 | NFKB2 |
| AAAGATCAAAGGRWW | 98 | LEF1 | RTAAACA | 332 | FOXP3 | NGTCGTWAAAN | 527 | HOXC11 |
| AACCCGGAAGTN | 99 | ELF1 | RTAAACAA | 333 | FOXJ2 | RGTCGTWAAANN | 528 | HOXA10 |
| AACCCGGAAGTR | 100 | ELF1 | RTAAACAA | 333 | FOXJ3 | NHAACBGYYV | 529 | MYBL2 |
| AACCCGGAAGTR | 100 | ELF4 | RTAAACATAAACA | 334 | FOXJ3 | NMCGCCCMCGCANN | 530 | 2GR1 |
| AACCGTTAACGGNN | 101 | MYBL2 | RTCATGTGAC | 335 | MITF | NMCRATTAR | 531 | VENTX |
| ACCCGGAAGTN | 102 | ELF5 | VDTTTCCCGCCA | 336 | E2F7 | NNAAAATCRATANN | 532 | ONECUT3 |
| ACCGGAAGTN | 103 | ELK1 | WACCCGGAAGTA | 337 | ELF3 | NNAAAATCRATAWN | 533 | ONECUT1 |
| ACCGGAAGTN | 103 | ELK3 | WDNCTGGGCA | 338 | ZNF416 | NNAAAATCRATAWN | 533 | ONECUT2 |
| ACCGGAAGTN | 103 | ERF | wwwwsyGGGG | 339 | VPS4B | NNATGAYGCAATN | 534 | ATF4 |
| ACCGGAAGTN | 103 | ETV3 | YGTCTAGACA | 340 | SMAD3 | NNCAMTTAANN | 535 | HMX1 |
| ACCGGAAGTN | 103 | ETV4 | yTGACT | 341 | ASCL1 | NNCAMTTAANN | 535 | HMX2 |
| ACCGGAAGTN | 103 | FEV | .gcTgAcTAA. | 342 | YAP1 | NNCAMTTAANN | 535 | HMX3 |
| ACCGGAAGTN | 103 | GABPA | DNNNGGTCANNNH | 342 | NR2F1 | NNMCCATATAWGGKNN | 536 | SRF |
| ACCGGAARYN | 104 | ETS1 | HAATAAAGNN | 344 | PABPC1 | NNNNTGCTGASTCAGCANNNN | 537 | MAFG |
| ACCGGAARYN | 104 | ETV1 | HNHNAGGTGTGANHH | 346 | TBX20 | NNNNTGCTGASTCAGCANNNN | 537 | MAFK |
| ACCGGAARYN | 104 | FLI1 | kGCTGr | 346 | SWI5 | NNRTGACGTCAYCN | 538 | CREB3 |
| AGATAAN | 105 | GATA1 | KSYGGAAGTN | 347 | ETV6 | NNTAATCCGMTTANN | 539 | OTX2 |
| AGATAANN | 106 | GATA3 | NAAACCGGTTTN | 348 | GRHL1 | NNTCCCNNGGGANN | 540 | EBF1 |
| AGATAANN | 106 | GATA4 | NAACAATRN | 349 | SOX9 | NNTNATTANN | 541 | EVX1 |
| AGATAANN | 106 | GATA5 | NAACCGCAAN | 350 | RUNX3 | NNTNATTANN | 541 | EVX2 |
| AGATAASR | 107 | GATA3 | NAACCGGTTN | 351 | GRHL1 | NNYATGMATAATTAATN | 542 | POU1F1 |
| AGGTGTGANN | 108 | TBR1 | NAACCGGTTN | 351 | TFCP2 | NRGGTCANNGGTCAN | 543 | NR2F1 |
| AGGTGTNR | 109 | TBX3 | NACACGTGTN | 352 | CLOCK | NRMATWCCWN | 544 | TEAD1 |
| CCAATAAAAN | 110 | HOXA13 | NACCCGGAAGTAN | 353 | ELF3 | NRNWAAYRTTKNYN | 545 | FOXD2 |
| CCAATAAAAN | 110 | HOXB13 | NACCGAAACYN | 354 | IRF5 | NRNWAAYRTTKNYN | 545 | FOXD3 |
| CCAATAAAAN | 110 | HOXC13 | NACGCCCACGCANN | 355 | EGR1 | NRTTAATNATTAACN | 546 | HNF1A |
| CCGAAACCGAAACY | 111 | IRF5 | NAGGTGTGAAAWN | 356 | EOMES | NRTTAATNATTAACN | 546 | HNF1B |
| cTCGAGG. | 112 | XBP1 | NAGGTGTGAAN | 357 | TBR1 | NRTTACRTAAYN | 547 | NFIL3 |
| gCTTCCw | 113 | NR3C1P1 | NAGGTGTGAAN | 357 | TBX20 | NRTTACRTAAYN | 547 | TEF |
| GGCGGGAAAH | 114 | E2F4 | NAGGTGTGAWN | 358 | TBX2 | NSCCNNNGGSN | 548 | TFAP2A |
| GGCGGGAARN | 115 | E2F6 | NATATGCTAATKN | 359 | POU5F1 | NSCCNNNGGSN | 548 | TFAP2B |
| GHCACGTG | 116 | CLOCK | NATGACGTCAYN | 360 | JDP2 | NSCCNNNGGSN | 548 | TFAP2C |
| GNCACGTG | 117 | ARNTL | NATGCGGAAGTR | 361 | ELF2 | NSCCNNNNNGGSN | 549 | TFAP2A |
| GTAAACAW | 118 | FOXO3 | NATGCGGGTAN | 362 | GCM1 | NSCCNNNNNGGSN | 549 | TFAP2B |
| TCAAGGTCAWN | 119 | ESRRB | NATGCGGGTN | 363 | GCM2 | NSCCNNNNNGGSN | 549 | TFAP2C |
| tgCACCy | 120 | FAM64A | NCCGCCATTNN | 364 | YY1 | NSCTMATTAN | 550 | POU6F2 |
| tgCATTT. | 121 | CST6 | NCCGTTAACGGN | 365 | MYBL1 | NTAATTANNNTAATTAN | 551 | MEOX2 |
| tGCTGg.. | 122 | SW15 | NCGAAACCGAAACY | 366 | IRF8 | NTAATYNRATTAN | 552 | ALX3 |
| TGCTTTCTAGGAATTMM | 123 | BCL6B | NCGAAACCGAAACYN | 367 | IRF4 | NTAATYNRATTAN | 552 | ALX4 |
| TGGGGAAGGGCM | 124 | ZNF467 | NCGACCACCGAN | 368 | ZBTB7B | NTAATYNRATTAN | 552 | UBA2 |
| TTGACAGS | 125 | MEIS2 | NCTAATTANN | 369 | LHX2 | NTAATYTAATTAN | 553 | ISX |
| TTTTCCCGCCAAAW | 126 | E2F7 | NCTCGTAAAAN | 370 | HOXA13 | NTAATYTAATTAN | 553 | UNCX |
| aaa.GTAAACAa | 127 | FOXG1 | NCTCGTAAAAN | 370 | HOXB13 | NTAAYYNAATTAN | 554 | DRGX |
| AACAATAMCATTGTT | 128 | SOX15 | NCTCGTAAAAN | 370 | HOXC13 | NTAAYYYAATTAN | 555 | ALX1 |
| AACAATANCATTGTT | 129 | SRY | NCTCGTAAAAN | 370 | HOXD13 | NTATCGCGAYATR | 556 | ZBED1 |
| AACAATKNYAGTGTT | 130 | SOX8 | NGATGACGTCATCR | 371 | FOS | NTATGCWAATN | 557 | POU2F2 |
| AACAATNNCATTGTT | 131 | SOX18 | NGCGACCACCNN | 372 | ZBTB7A | NTATYGATCH | 556 | ONECUT1 |
| AACAATNNNAGTGTT | 132 | SOX10 | NGGCACGTGCCN | 373 | HES5 | NTGAATNNCATTCAN | 559 | SOX14 |
| AACAATNNNCATTGTT | 133 | SRY | NGGCACGTGCCN | 373 | HES7 | NTGAATNNNATTCAN | 560 | SOX2 |
| AACAVBTGTT | 134 | MYF6 | NGTCGTAAAAN | 374 | HOXC12 | NTGAATWNCATTCAN | 561 | SOX2 |
| AACCGGWNNNWCCGGTT | 135 | GRHL1 | NGTCGTAAAAN | 374 | HOXD12 | NTGACCTNNNNNAGGTCAN | 562 | THRB |
| AAGAACATWHTGTTC | 136 | PGR | NKCACGTGMN | 375 | BHLHE40 | NTGCCACGTCAYCN | 563 | CREB3 |
| AAGGTCANNNNAAGGTCA | 137 | ESRRG | NKCACGTGMN | 375 | BHLHE41 | NTGCTGANTCAGCRN | 567 | MAFK |
| AANTAGGTCAGTAGGTCA | 138 | RORB | NNAAATGGCGCCAAAANN | 376 | E2F3 | NTGCTGASTCAGCAN | 565 | MAFF |
| AARGGTCAAAAGGTCA | 139 | RARB | NNAAATGGCGCCATTTNN | 377 | E2F3 | NTGMATAATTAATGAN | 566 | POU4F3 |
| ACAATANCATTG | 140 | SOX14 | NNAACCGTTNN | 378 | MYBL1 | NTMATCATCATTAN | 567 | MEOX2 |
| ACCGGAWATCCGGT | 141 | ERG | NNAACCGTTNN | 378 | MYBL2 | NTTRCGCAAY | 568 | CEBPB |
| ACCGGAWATCCGGT | 141 | FLI1 | NNACGCCCACGCANN | 379 | EGR3 | NTTRCGCAAY | 568 | CEBPD |
| ACCGTTARRACCGTTA | 142 | MYBL2 | NNACGCCCACGCANNN | 380 | EGR4 | NTTRCGCAAY | 568 | CEBPE |
| ACTACTAwwwwTAG | 143 | TMEM50A | NNATGACGTCATNN | 381 | ATF7 | NTTRCGCAAY | 566 | CEBPG |
| ACVAGGAAGT | 144 | ELF5 | NNCACCTGCN | 382 | TCF3 | NWACAYRACAWN | 569 | IRX2 |
| AGATGKDGAGATAAG | 145 | GATA3 | NNCACCTGNN | 383 | FIGLA | NWACAYRACAWN | 569 | IRX5 |
| AGGTCANNNNNTGACCT | 146 | NR4A2 | NNCACCTGNN | 383 | MESP1 | NWTATGCWAATN | 570 | POU2F1 |
| AGGTGTGAANTTCACACCT | 147 | TBX15 | NNCACCTGNN | 383 | TCF3 | NWTATGCWAATTW | 571 | POU3F3 |
| AGGTGTGAAWTTCACACCT | 148 | TBX1 | NNCACCTGNN | 383 | TCF4 | NYAATTARNNNYAATTAN | 572 | PDX1 |
| AGGTGTGAWWWTCACACCT | 149 | TBX20 | NNCACGTGNN | 384 | HEY1 | MYTMATTANN | 573 | NOTO |
| AGTGTTAACAGARCACCT | 150 | ZSCAN16 | NNCACGTGNN | 384 | MAX | RACCGTTAAACNGYY | 574 | MYBL2 |
| ANACAGCTGC | 151 | TCF3 | NNCACGTGNN | 384 | MNT | RCATTCCNNRCATTCCN | 575 | TEAD3 |
| ANCAGCTG | 152 | KRT7 | NNCACGTGNN | 384 | TFE3 | RCTAWAAATAGM | 576 | BORCS8- |
| | | | | | | | | MEF2B |
| ARGGTCAAAAGGTCA | 153 | RARA | NNCATATGNN | 385 | BHLHA15 | RRGGTCANNNGGTCAN | 577 | NR2F1 |
| ATAAACAANWGTAAACA | 154 | FOXG1 | NNCATATGNN | 385 | NEUROD2 | RTMATTAN | 578 | HOXA4 |
| ATCAATNNCATTGAT | 155 | SOX18 | NNCCGCCATNW | 386 | YY2 | SCTMATTANN | 579 | POU6F2 |
| ATGAATKKTAGTC | 156 | SOX8 | NNGCAACAGGTGGNN | 387 | SCRT1 | WAACCRCAN | 580 | RUNX2 |
| ATGAATWYCATTCAT | 157 | SOX18 | NNGCAACAGGTGN | 388 | SCRT2 | WGTAAAYAN | 581 | FOXB1 |
| ATGASTCAT | 158 | JDP2 | NNGGAAGTGCTTCCNN | 389 | ETV7 | WTATGCWAATNW | 582 | POU3F1 |
| ATGCGGGYRCCCGCAT | 159 | GCM1 | NNGGATTANN | 390 | DMBX1 | YAATTANNCTAATTR | 583 | LHX2 |
| ATGMATAATTAATG | 160 | POU4F1 | NNGGATTANN | 390 | DPRX | YMATTARYTAATKR | 584 | EMX1 |
| ATTTCTNAGAAA | 161 | STAT5A | NMMCGCCCACGCANN | 391 | EGR2 | YMATTARYTAATKR | 584 | EMX2 |
| AVCAGGAAGT | 162 | EHF | NNMCGCCCACGCANNN | 392 | EGR4 | YTCACACCTNNAGGTGTGAR | 585 | TBX1 |
| CACGTGNNNNNCACGTG | 163 | MAX | NNNNNTGCTGAN | 393 | MAFK | DGGGYGKGGC | 586 | KLF5 |
| CGatAa..sC | 164 | APEX1 | NNNNTGCTGAN | 394 | NRL | NGACCACMCACGWNG | 587 | GL13 |
| CGG...........cCg | 165 | LGALS4 | NNNTGGCGCCANNN | 395 | E2F1 | NGCCACGCCCMCNT | 588 | SP6 |
| CGGas.rsw.y.s.CCGa | 166 | LGALS4 | NNRRAAAGGAAACCGAAACTN | 396 | IRF3 | NTGMATAATTAATKAG | 589 | POU4F2 |
| CTTGGCACNGTGCCAA | 167 | NF1 | NNTAAACGNN | 397 | BARHL2 | NWTATGCWAATKAG | 590 | POU1F1 |
| CWGGCGGGAA | 168 | E2F1 | NNTAATCCGATTANN | 398 | OTX1 | rGAA..TtctrGAA | 591 | HSF1 |
| GACCCCCCGCGNNG | 169 | GLIS2 | NNTAATCCNN | 399 | GSC | RGGTCANNNARRGGTCA | 592 | RARA |
| GACCCCCCGCGNNG | 169 | GLIS3 | NNTAATCCNN | 399 | GSC2 | RGKGGGCGKGGC | 593 | SP6 |
| GAGSCCGAGC | 170 | ZVF519 | NNTAATTANN | 400 | HOXD8 | RRGGTCANNNARAGGTCA | 594 | RARG |
| GARTGGTCATCGCCC | 171 | ZNF669 | NNTAATTGNN | 401 | BARHL2 | rTCAyt....Acg | 595 | MSC |
| GCGACCACNCTG | 172 | GLI2 | NNTAATTRNN | 402 | HESX1 | rTGTayGGrtg | 596 | FHL1 |
| ggGTGca.t | 173 | FAM64A | NNTCCAGATGTKN | 403 | ZBTB18 | SAAGGTCANNTSAAGGTCA | 597 | ESRRA |
| GGGTTTTGAAGGATGARTAGG | 174 | ZFP3 | NNTGCCAAN | 404 | NFIX | sc.GC.gg | 598 | EGLN2 |
| AGTT | | | | | | | | |
| GGNTCTCGCGAGAAC | 175 | ZBTB33 | NNTGCCAANN | 405 | NFIA | SMCAGTCWGAKGGAGGAGGC | 599 | ZSCAN22 |
| GGTGTGANNTCACACC | 176 | TBX21 | NNTTTTGGCGCCAAAANN | 406 | E2F2 | WTATGCWAATKA | 600 | POU3F2 |
| GGTGTGAWATCACACC | 177 | TBX21 | NNTTTTGGCGCCAAAANN | 406 | E2F3 | .rTCAyty..ACG. | 601 | MSC |
| GNCCACGTGG | 178 | MYC | NNYAATTANN | 407 | ALX3 | MACCTTCYATGGCTCCCTAKTG | 602 | ZNF16 |
| | | | | | | CCY | | |
| GSCTGTCACTCA | 179 | PBX1 | NNYAATTANN | 407 | DLX1 | NAACAATKNYAKTGTTN | 603 | SOX7 |
| GTCACGCTCNCTGA | 180 | PAX5 | NNYAATTANN | 407 | EMX1 | NANCATATGNTN | 604 | BHLHE22 |
| GTGGTCCCGGATYAT | 181 | SPDPF | NNYAATTANN | 407 | EMX2 | NATGAATKNYAKTCATN | 605 | SOX7 |
| GYAATAAAA | 182 | HOXC12 | NNYAATTANN | 407 | EN1 | NATGGAAANWWWWTTTYCMN | 606 | NFATC1 |
| TAATTRNNYAATTA | 183 | GBX2 | NNYAATTANN | 407 | EN2 | NCAGNAAGAMGTAWMM | 607 | SPDEF |
| TAATTRSNYAATTA | 184 | EN1 | NNYAATTANN | 407 | ESX1 | NGCGCCMYCTAGYGGTN | 608 | CTCF |
| TAATYNAATTA | 185 | PROP1 | NNYAATTANN | 407 | GBX1 | NGNTCTAGAACCNGV | 609 | ZBTB12 |
| TAATYRATTA | 186 | PAX3 | NNYAATTANN | 407 | GBX2 | NGTCACGCWTSRNTGNNY | 610 | PAX2 |
| TAATYRATTA | 186 | PAX7 | NNYAATTANN | 407 | HOXA1 | NGTCACGCWTSRNTGNNY | 610 | PAX5 |
| TAATYTAATTA | 187 | PRRX1 | NNYAATTANN | 407 | LBX2 | NGTTNCCATGGNAACN | 611 | RFX3 |
| TAATYYAATTA | 188 | PHOX2A | NNYAATTANN | 407 | MIXL1 | NGTTNCCATGGNAACN | 611 | RFX4 |
| TAATYYAATTA | 188 | PHOX2B | NNYAATTANN | 407 | MNX1 | NGTTRCCATGGYAACN | 612 | RFX2 |
| TAAYYNAATTA | 189 | PROP1 | NNYAATTANN | 407 | PRKRA | NGTTRCCATGGYAACN | 612 | RFX5 |
| TATGCWAAT | 190 | POU2F3 | NNYMATTANN | 408 | GSX1 | NGYAATWAAAN | 613 | HOXA10 |
| TATGCWAAT | 190 | POU3F4 | NNYMATTANN | 408 | GSX2 | NGYAATWAAAN | 613 | HOXC11 |
| TATGCWAAT | 190 | POU5F1B | NNYMATTANN | 408 | HOXA2 | NMCMCGCCCMCN | 614 | SP8 |
| TCAATANCATTGA | 191 | SRY | NNYMATTANN | 408 | HOXB2 | NNGNNACGCCCMYTTTNN | 615 | KLF13 |
| TCAATNNCATTGA | 192 | SOX14 | NNYMATTANN | 408 | HOXB3 | NRTMAATATTKAYN | 616 | FOXC1 |
| TCAATNNNATTGA | 193 | SOX21 | NNYMATTANN | 408 | HOXB5 | NRTMAATATTKAYN | 616 | FOXC2 |
| TCACACCTNNNNAGGTGTGA | 194 | EOMES | NNYMATTANN | 408 | HOXD4 | NTAATTRGYAATTAN | 617 | HESX1 |
| TGAATANCATTCA | 195 | SRY | NNYTAATTANN | 409 | VSX1 | NTGACCTNATNAGGTCAN | 618 | THRA |
| TGACAGSTGTCA | 196 | MEIS3P1 | NNYTTCCGGGAARNR | 410 | ETV7 | NTGACCTNATNAGGTCAN | 618 | THRB |
| TGACAGSTGTCA | 196 | PKNOX1 | NRAAAGTGAAAGTGN | 411 | PRDM1 | NTGTTTACRGTAAAYAN | 619 | FOXI1 |
| TGACAGSTGTCA | 196 | PKNOX2 | NRCACCTGNN | 412 | ID4 | NTRAKCCN | 620 | RHOXF1 |
| TGACAGSTGTCA | 196 | TGIF1 | NRCAGGTGN | 413 | SNAI2 | NTRAYNTAATCAN | 621 | DUXA |
| TGACAGSTGTCA | 196 | TGIF2 | NRCATTCCWN | 414 | TEAD4 | NWRGCCMCGCCCMCTNN | 622 | SP4 |
| TGACAGSTGTCA | 196 | TGIF2LX | NRGATAATCYN | 415 | DPRX | NWTRMATATKYAWN | 623 | POU2F1 |
| TGCACACNCTGAAAA | 197 | ZSCAN4 | NRGTCCAAAGTCCANY | 416 | HNF4A | NWTRMATATKYAWN | 623 | POU2F2 |
| TGGAACAGMA | 198 | ZNF189 | NRTTACGTAAYN | 417 | DBP | RCATTCCNNRCATWCCN | 624 | TEAD1 |
| TRNGTAAACA | 199 | FOXA1 | NRTTACGTAAYN | 417 | EPAS1 | RTGGAAAANTMCNN | 625 | NFAT5 |
| TTaGTmAGc | 200 | YAP1 | NRYTTCCGGH | 418 | FLII | SGTTGCYARGCAACS | 626 | RFX2 |
| TTCCKNAGAA | 201 | STAT6 | NSTAATTANN | 419 | HOXA3 | SGTTGCYARGCAACS | 626 | RFX3 |
| TTCGAANNNTTCGAA | 202 | HSFY2 | NSTAATTANN | 419 | MEOX1 | SGTTGCYARGCAACS | 626 | RFX4 |
| TTCTAGAANNTTC | 203 | HSF1 | NSTAATTANN | 419 | MEOX2 | SGTTRCCATRGCAACS | 627 | RFX5 |
| TTCTAGAANNTTC | 203 | HSF2 | NTAATCCN | 420 | OTX1 | SSYTAATCGRWAANCGATTAR | 628 | VENTX |
| TTCTAGAANNTTC | 203 | HSF4 | NTAATCCN | 420 | OTX2 | w.TTRamkAR | 629 | SPTLC2 |
| TTGACAGSTGTCAA | 204 | MEIS2 | NTAATCCN | 420 | PITX1 | WAWRTAAAYAWW | 630 | FOXC2 |
| TTTCAAGGCYCCC | 205 | PRDM4 | NTAATTAN | 421 | LMX1A | WNWGTMAATATTRACWNW | 631 | FOXB1 |
| TTTCCAYNRTGGAAA | 206 | NFATC1 | NTCAAGGTCAN | 422 | ESRRA | WRWGTMAAYAN | 632 | FOXB1 |
| TTTCCCCACACRAC | 207 | FOXO6 | NTGACAGN | 423 | MEIS3P1 | WRWRTMAAYAW | 633 | FOXC1 |
| TTTTATKRGG | 206 | HOXB13 | NTGACAN | 424 | MEIS1 | WTAATKAGCTMATTAW | 634 | POU6F2 |
| AAAAAGMGGAAGTN | 209 | SPIB | NTTAATCCN | 425 | PITX1 | ymtGTmTytAw | 635 | SPTLC2 |
| AAAAAGNGGAAGTN | 210 | SPIC | NWAACCACADNN | 426 | RUNX2 | NGTGTTCAVTSAAGCGKAAA | 636 | PAX6 |
| AACCGGAARTR | 211 | ETV2 | NYAATTAN | 427 | DLX2 | NWTGMATAAWTNA | 637 | POU3F2 |
| ACCGGAARTN | 212 | ELK4 | NYAATTAN | 427 | DLX3 | SGTCACGCWTGANTGMA | 638 | PAX1 |
| ACCGGAARTN | 212 | ERG | NYAATTAN | 427 | DLX4 | SGTCACGCWTGANTGMA | 638 | PAX9 |
| ACCGGAWATCCGGN | 212 | FLI1 | NYAATTAN | 427 | DLX5 | VAGRACAKNCTGTBC | 639 | PGR |
| ACCGGAWGYN | 214 | ETV5 | NYAATTAN | 427 | DLX6 | WAWNTRGGTYAGTAGGTCA | 640 | RORA |
| AGGTCANTGACCTN | 215 | NR1H4 | NYAATTAN | 427 | EN1 | WTGMATAAWTNA | 641 | POU3F1 |
| AMCCGGATGTN | 216 | SPDEF | NYAATTAN | 427 | ISX | NTGMATAAWTNA | 641 | POU3F3 |
| AVYTATCGATAD | 217 | ZBED1 | NYAATTAN | 427 | LHX9 | WTRMATATKYAW | 642 | POU2F3 |
| AWCGAAACCGAAACY | 218 | IRF9 | NYAATTAN | 427 | LMX1B | WTRMATATKYAW | 642 | POU3F3 |
| CCAAT.a. | 219 | NFYA | NYAATTAN | 427 | MSX1 | NTRMATATKYAW | 642 | POU5F1B |
| CCCATWAAAN | 220 | HOXC10 | NYAATTAN | 427 | MSX2 | YTKGATAHAGTATTCTWGGTN | 643 | 2NF136 |
| | | | | | | GGCA | | |
| CCGGAASCGGAAGTN | 221 | ETV6 | NYAATTAN | 427 | PRRX1 | NNCNGTTNNNACNGTTN | 644 | MYBL1 |
| CCWGGAATGY | 222 | TEAD2 | NYAATTAN | 427 | PRRX2 | NRGNACANNNTGTNCYN | 645 | NR3C2 |
| CCWGGAATGY | 222 | TEAD4 | NYAATTAN | 427 | RAX2 | NRGWACANNNTGTWCYN | 646 | VR3C1 |
| CGSGTAA. | 223 | VANGL1 | NYAATTAN | 427 | SHOX | NTGACCTYANNTRAGGTCAN | 647 | THRB |
| CTCGRACCCGTGCN | 224 | ZNF524 | NYAATTAN | 427 | SHOX2 | RAANCGAAAWTCGNTTY | 648 | RF7 |
| CTTTCCCMYAACACKNN | 225 | ZNF282 | NYAATTAN | 427 | UNCX | RRGWACANNNTGTWCYY | 649 | AKR1B1 |
| CYAATAAAAN | 226 | HOXD13 | NYMATAAAN | 428 | CDX1 | WAACCRCAAWAACCRCAN | 650 | RUNX2 |
| GAAASYGAAASY | 227 | IRF2 | NYMATAAAN | 428 | CDX2 | WAACCRCAAWAACCRCAN | 650 | RUNX3 |
| GAATGACACRGCGN | 228 | FOXB1 | NYMATTAN | 429 | HOXA7 | NNTCRCACNTANGTGYGANN | 651 | TBX19 |
| GAGCCTGGTACTGWGCCTGR | 229 | ZNF322 | NYMATTAN | 429 | NKX6-1 | YwTTkcKkTyyckgykky | 652 | AZF1 |

[0098] In some embodiments, binding sites are associated with more than one signaling molecule or complex of molecules.

[0099] Further, nonlimiting examples of such motifs or sites are given in Table 12.

TABLE 12
Motifs for Binding Sites or Genomic Signaling Centers

| | SEQ | | | SEQ | |
|---|---|---|---|---|---|
| Motif Sequence | ID | Complex_name | Motif Sequence | ID | Complex_name |
| ACCGGAAATGA | 653 | HOXB2:ETV1 | NRSCGGAAGNNGTAAAN | 944 | HOXD12:ELK1 |
| CCATAAATCA | 654 | PBX4:HOXA10 | NSCGGAARNCACGTGNN | 945 | ERF:SREBF2 |
| TAAACAGGATTA | 655 | FOXJ2:PITX1 | NSCGGAARNNNNNMATTAN | 946 | HOXB2:ETV7 |
| TGTCAATTA | 656 | MEIS1:DRGX | NSCGGAARNNNNNNMATTAN | 947 | HOXB2:ETV7 |
| ACCGGAAACAGCTGNN | 657 | TFAP4:FLI1 | NSCGGAARNNNNNNTCACACNN | 948 | ETV7:TBX21 |
| ACCGGAAATGAN | 658 | HOXB2:ETV4 | NSCGGAARNNNNNTCACACNN | 949 | ETV7:TBX21 |
| AGGTGTTAATKN | 659 | HOXB2:TBX3 | NSCGGAWNTTACGTAAN | 950 | ELK1:TEF |
| AGGTGTTGACAN | 660 | MEIS1:EOMES | NSMGGACGGAYNTCCKSN | 951 | ELK1:SPDEF |
| CTCGTAAAATGYN | 661 | TEAD4:HOXB13 | NSMGGACGGAYNTCCKSN | 951 | ERF:ETV7 |
| GAAAACCGAAAN | 662 | FLI1:FOXI1 | NSMGGACGGAYNTCCKSN | 951 | ETV2:ETV7 |
| GGAATGCGGAAGTN | 663 | TEAD4:ELF1 | NSMGGACGGAYNTCCKSN | 951 | FLI1:ETV7 |
| GGAATGTTAATTR | 664 | TEAD4:DRGX | NTAATKRSNMRTAAAN | 952 | HOXD12:HOXA3 |
| GTGCGGGCGGAAGTN | 665 | GCM1:ELF1 | NTAATNRSNYMRTAAAN | 953 | HOXD12:HOXA3 |
| TCACACCGGAWRY | 666 | ETV2:EOMES | NTGACRNNNNNNCACGTGN | 954 | MEIS1:MAX |
| TGTTGCCGGANNN | 667 | FOXO1:ELK1 | NTGTTGATRNGGGN | 955 | GCM1:FOXI1 |
| ACAAWRSNNNNNYMATTA | 668 | HOXB2:SOX15 | NTGTTGNCGGAARNN | 956 | FOXO1:ELF1 |
| ACAAWRSNNNNYMATTA | 669 | HOXB2:SOX15 | NTTTAYNNCCGGAARNN | 957 | HOXD12:ELK3 |
| ACAAWRSNNNYMATTA | 670 | HOXB2:SOX15 | NYMATTANNNNNACAATR | 958 | HOXB2:SOX15 |
| AGGTGTKAAGTCGTAAA | 671 | HOXD12:TBX21 | NYMATTANNNNNCAGCTGNN | 959 | HOXB2:NHLH1 |
| CAGCTGNNNNNNNNNNNTGCGGG | 672 | GCM1:FIGLA | NYMATTANNNNNNACAATR | 960 | HOXB2:SOX15 |
| CAGCTGNNNNNNNNNTGCGGG | 673 | GCM1:FIGLA | NYMATTANNNNNNCAGCTGNN | 961 | HOXB2:NHLH1 |
| CAGCTGNNNNNNNNTGCGGG | 674 | GCM1:FIGLA | NYMATTANNNNNNNCAGCTGNN | 962 | HOXB2:NHLH1 |
| CAGCTGNNNNNNNTGCGGG | 675 | GCM1:FIGLA | NYMATTANNNNNNNNGGAAGNN | 963 | HOXB2:ELF1 |
| | | | RAGGTSRNNNNNNNNNNNNNNNNCGGAAGY | 964 | ELK1:TBX21 |
| CCGGAANNNNNNCACGTG | 676 | ETV5:HES7 | N | | |
| GGAATGNNNNNYTAATTA | 677 | TEAD4:ALX4 | RCATTCCNNATCGAYN | 965 | TEAD4:ONECUT2 |
| GGATTANNNNNNNNNTGCGGG | 678 | GCM1:PITX1 | RCATTCCNNNNTAATKR | 966 | TEAD4:DLX3 |
| GGATTANNNNNNNTGCGGG | 679 | GCM1:PITX1 | RCATTCNNNNNNNNNNNNNNNNGCAACN | 967 | TEAD4:RFX5 |
| GGATTANNNNNNTGCGGG | 680 | GCM1:PITX1 | RCATTCNNNNNNNNNNNNNNNNNGCAACN | 968 | TEAD4:RFX5 |
| GGTGTGNNNNNCACGTG | 681 | CLOCK:TBX3 | RCATTCNNNNNTAATKR | 969 | TEAD4:DLX3 |
| TAATKNNNNNNNNAAGGTCA | 682 | HOXB2:ESRRB | RCATTCYNNNNCAAGGTCAN | 970 | TEAD4:ESRRB |
| TAATKRNGGATTA | 683 | HOXB2:PITX1 | RCATTCYNNNNTAATTR | 971 | TEAD4:DLX2 |
| TAATKRNNNNGCAAC | 684 | HOXB2:RFX5 | RCCGGAANNNNNATCGATN | 972 | ETV2:ONECUT2 |
| TAATKRNNNNGGATTA | 685 | HOXB2:PITX1 | RCCGGAANNNNNNATCGATN | 973 | ETV2:ONECUT2 |
| TAATKRNNNNGGATTA | 685 | PITX1:HOXA3 | RCCGGANNNNNNNNNNNACACCTN | 974 | ETV2:EOMES |
| TAATKRNNNNNGCAAC | 686 | HOXB2:RFX5 | RCCGGANNNNNNNNNNNACACCTN | 974 | ETV2:TBX21 |
| TAATKRNNNNNNAAGGTCA | 687 | HOXB2:ESRRB | RCCGGANNNNNNNNNNTAATCCN | 975 | ETV2:GSC2 |
| TAATKRNRNGGATTA | 688 | HOXB2:PITX1 | RCCGGANNNNNNNNNTAATCCN | 976 | ETV2:GSC2 |
| TAATTANNNNNNCACGTG | 689 | CLOCK:EVX1 | RCCGGANNNNNNNNTAATCCN | 977 | ETV2:GSC2 |
| TGACANNNNNTCATTA | 690 | MEIS1:EVX1 | RCCGGAWGTKKN | 978 | FOXO1:ETV1 |
| TGACANSNTAATTG | 691 | MEIS1:DLX3 | RCCGGAWGTKKN | 978 | FOXO1:ETV4 |
| TMACACCGGAAG | 692 | ERF:TBX21 | RCCGGAWGTKKW | 979 | FOXO1:ELK3 |
| TNTCACACCGGAAAT | 693 | ERF:EOMES | RGAATGCGGAARYNNNTCCN | 980 | TEAD4:ETV7 |
| ACCCGCANCCGGAAGN | 694 | GCM1:ELK3 | RGAATSCGGAAGYN | 981 | TEAD4:ELK1 |
| ACCGGANNTACGCNNNNNYR | 695 | ETV2:PAX5 | RGGTGTNNNNNNNNGAATGYN | 982 | TEAD4:EOMES |
| AGGTGNTAATKR | 696 | MGA:DLX3 | RGGTGYTAATWR | 983 | ALX4:TBX21 |
| AGGTGNTAATKW | 697 | MGA:EVX1 | RGTGTNNNAATATKNN | 984 | POU2F1:EOMES |
| AGGTGNTAATTR | 698 | MGA:DLX2 | RGWATGTTAATCCS | 985 | TEAD4:GSC2 |
| ATTTGCATNACAATRN | 699 | POU2F1:SOX2 | RKCACGTGNNNMCATATGKN | 986 | ARNTL:BHLHA15 |
| CACGTGNNNGCGGGY | 700 | GCM1:MAX | RKRNRGGCGGAARCGGAAGNN | 987 | GCM1:ELK1 |
| CACGTGNNNNNSRGGAARNN | 701 | ERF:CLOCK | RMATWCCGGAWRN | 988 | TEAD4:ELK1 |
| CACGTGNNNRGATTAN | 702 | ARNTL:PITX1 | RNCGGAANNNNNNNNNGCAACN | 989 | ETV2:RFX5 |
| CAGCTGNNNNNNCCCGCAY | 703 | GCM1:FIGLA | RNCGGANNTTGCGCAAN | 990 | FLI1:CEBPB |
| CYAATAAAATGYN | 704 | TEAD4:HOXB13 | RNCGGANNTTGCGCAAN | 990 | FLI1:CEBPD |
| GTMAACAGGAWRN | 705 | ETV5:FOXI1 | RRGTGTNNNNNNNNACAATRN | 991 | SOX6:TBX21 |
| GTMAATAAGGGYRN | 706 | GCM1:FOXO1 | RSCGGAAATRCM | 992 | TEAD4:ETV1 |
| TAATGNNNNNCGGAAGTN | 707 | HOXB2:ELK3 | RSCGGAAGNNGTAAAN | 993 | ELK1:HOXB13 |
| TAATKRCCGGAAGNN | 708 | HOXB2:ELK1 | RSCGGAAGTNGTAAAN | 994 | HOXD12:ETV1 |
| TAATKRNNNNGGAAGTN | 709 | HOXB2:ELF1 | RSCGGAANCACGTGN | 995 | ERF:MAX |
| TAATKRNNNNNGGAAGTN | 710 | HOXB2:ELF1 | RSCGGAANCACGTGN | 995 | FLI1:MAX |
| TAATTRNNNNCGGAARYN | 711 | ETV2:DLX3 | RSCGGAANNNNNNCACGTGNN | 996 | ETV2:HES7 |
| TGACAKNNNAACAATGN | 712 | MEIS1:SOX2 | RSCGGAANNNNNNNCACGTGNN | 997 | ETV2:HES7 |
| TGACANNNTAATKR | 713 | MEIS1:DLX2 | RSCGGAANNNNNNNTAATKR | 998 | ETV2:DLX3 |
| TGACASTAATKR | 714 | MEIS1:DRGX | RSCGGAANNNNNNRTCGATN | 999 | ERF:ONECUT2 |
| TGTTGANGCGGGN | 715 | GCMI:FOXI1 | RSCGGAANNNNNYAATTAN | 1000 | FLI1:DLX2 |
| TGTTGNCGGAWRN | 716 | ETV5:FOXI1 | RSCGGAANNRYMAACAN | 1001 | ETV2:FOXI1 |
| TGTTKMCGGAWRN | 717 | ERF:FOXI1 | RSCGGAANRWMAACAN | 1002 | ELK1:FOXI1 |
| TGTTKMCGGAWRNN | 718 | FLI1:FOXI1 | RSCGGAARCAGGTGN | 1003 | ETV5:FIGLA |
| TNRCACCGGAAGN | 719 | ELK1:EOMES | RSCGGAARYNNTAAAN | 1004 | HOXB13:ETV1 |
| TNRCACCGGAAGNN | 720 | ELK1:TBX21 | RSCGGANNCATATGK | 1005 | ETV2:BHLHA15 |
| TNRCACCGGAWN | 721 | ETV5:EOMES | RSCGGATGTTRTN | 1006 | FOXO1:ELK1 |
| TTACGTNNNNNNNNNCCGGAANN | 722 | ETV2:TEF | RSCGGAWNNNNNNACAATRN | 1007 | ETV2:SOX15 |
| ACCGGAARTNNNYAATTA | 723 | FLI1:DLX2 | RSCGGAWNNNNNNNACAATRN | 1008 | ETV2:SOX15 |
| AGGTGNGAARGGATTA | 724 | PITX1:TBX21 | RSCGGWAATKR | 1009 | ETV5:EVX1 |
| AGGTGTGNNNNATCRAT | 725 | CUX1:TBX3 | RSCGGWAATKR | 1009 | ETV5:HOXA2 |
| ANCCGGATNNNNNNMATTA | 726 | HOXB2:SPDEF | RSGTGNNNAACGK | 1010 | MYBL1:EOMES |
| ARGTGNNNNNNATAAA | 727 | HOXB13:TBX21 | RTAAACAYNRTAAAN | 1011 | FOXJ2:HOXB13 |
| ATCRATNNNNNNNNSYATTGTT | 728 | CUX1:SOX15 | RTAAACMGGAARYN | 1012 | ERF:FOXI1 |
| CACGTGNNNTAATKAT | 729 | CLOCK:EVX1 | RTAAACMGGAARYN | 1012 | FLI1:FOXI1 |
| CASSTGNNNNNNNNNNNTGCGGG | 730 | GCM1:FIGLA | RTAAATANGGGNN | 1013 | GCM1:FOXI1 |
| CASSTGNNNNNNNNNNTGCGGG | 731 | GCM1:FIGLA | RTAAATANGGGNN | 1013 | GCM2:FOXI1 |
| CASSTGNNNNNNNNTGCGGG | 732 | GCM1:FIGLA | RTCACGYSNCCGGAWN | 1014 | ETV2:SREBF2 |
| CASSTGNNNNNNNTGCGGG | 733 | GCM1:FIGLA | RTGCGGGNAGGTGNNN | 1015 | GCM2:EOMES |
| CYCATAAANNTGTCA | 734 | MEIS2:HOXA13 | RTGCGGGNNATCGATR | 1016 | GCM1:ONECUT2 |
| GGAATKNNCASSTG | 735 | TEAD4:FIGLA | RTGCGGGNNNNNNNCACGTGN | 1017 | GCM1:MAX |
| GGWATGNNNRTAAA | 736 | TEAD4:HOXA13 | RTGCGGGNNNTCGATR | 1018 | GCM1:ONECUT2 |
| GGWATGNNNRTAAA | 736 | TEAD4:HOXB13 | RTMAACAGGAAGTN | 1019 | FOXO1:ELK3 |
| GTTGCYNNNNNNNNNNNNCASSTG | 737 | RFX3:FIGLA | RTMAACAGGAAGTN | 1019 | FOXO1:FLI1 |
| GWMAACANNSYMRTAAA | 738 | FOXO1:HOXB13 | RTMAACAGGAARNN | 1020 | ERF:FOXO1 |
| GWMAACAYMRTAAA | 739 | FOXO1:HOXB13 | RTMAACAGGAWRN | 1021 | ETV5:FOXO1 |
| TAATCCNNNNCASSTG | 740 | PITX1:FIGLA | RTRCGGGTAATAAAN | 1022 | GCM2:HOM13 |
| TAATKAGGTGNKA | 741 | HOXA3:EOMES | RTRNNGGCGGAAGTN | 1023 | GCM1:ETV1 |
| TAATKANNGGATTA | 742 | HOXB2:PITX1 | RTRYGGGCGGAARKN | 1024 | GCMI1:ERG |
| TAATKRGGTGYM | 743 | HOXB2:EOMES | RWCACGTGNNCGGAANN | 1025 | ELK1:SREBF2 |
| TAATKRGGTGYM | 743 | HOXB2:TBX21 | RWMAACAGGNNNNNNTTCCNN | 1026 | FOXO1:ETV7 |
| TMACACCYAATA | 744 | CUX1:TBX21 | SGCGCCNNNNNNNNNNNNCAGCTGNN | 1027 | E2F1:NHLH1 |
| TTIWATNRNMAACA | 745 | FOXJ2:HOXB13 | SGCGCNNNNNCGGAAGN | 1028 | E2F1:ELK1 |
| AGGTGNTAATKWNNNNTN | 746 | MGA:EVX1 | SGCGCNNNNNNNNNNCGGAAGN | 1029 | E2F1:ELK1 |
| AGGTGTGNCSGTTR | 747 | MYBL1:TBX21 | SGCGCNNNNNNNNNNNCGGAAGN | 1030 | E2F1:ELK1 |
| AGGTGTNNNGSGGGN | 748 | GCM2:TBX21 | SGTCACGCNTCATTNN | 1031 | HOXB2:PAX9 |
| AGGTGTNRTRCGGGNN | 749 | GCM1:TBX21 | SYMATTANNNNNNRGCAACN | 1032 | HOXB2:RFX5 |
| ANGTGTGAATWCY | 750 | TEAD4:TBX21 | WTGMATAACAATR | 1033 | POU2F1:SOX15 |
| ANGTGTSNNATAAAN | 751 | HOXB13:EOMES | YNATTANRGGTGTGAN | 1034 | MGA:DLX3 |
| ATRCGGGYNNNNNYWTTGTNN | 752 | GCM2:SOX15 | NCACGTGNNNNNNCATWCC | 1035 | TEAD4:CLOCK |
| CASSTGNNCCCGCAY | 753 | GCM1:FIGLA | NCACGTGNNNNNNNCATWCC | 1036 | TEAD4:CLOCK |
| CASSTGNNCCGGAWRYN | 754 | ETV2:TCF3 | NCAGCTGNNNNNNNNTRCGGG | 1037 | GCMI:NHLH1 |
| CASSTGNRNNGGAAGNN | 755 | ETV5:TCF3 | NCAGCTGNNNNNNNTRCGGG | 1038 | GCMI:NHLH1 |
| CTCRTAAAWNNNNRMCGTTR | 756 | MYBL1:HOM13 | NCCGGAANNNNNNNMAPEC | 1039 | TEAD4:ELK3 |
| GGATTANNARGTGTKN | 757 | PITX1:EOMES | NCRCGTGNNNGGATTA | 1040 | PITX1:HES7 |
| GGATTANNNNATCRATN | 758 | CUX1:PITX1 | NGTGNNNNMATATKNNNACACC | 1041 | POU2F1:TBX21 |
| GGWATGNNNNNNCACGTGN | 759 | TEAD4:CLOCK | NNCRCGTGNNNNGGATTA | 1042 | PITX1:HES7 |
| GGWATGNNNNNNNCACGTGN | 760 | TEAD4:CLOCK | NNMATTAGTCACGCWTSRNTG | 1043 | HOXB2:PAX1 |
| GGWATGNRAGGTGNNR | 761 | TEAD4:EOMES | NNMATTAGTCACGCWTSRNTG | 1043 | HOXB2:PAX5 |
| TAATKNNNNGNNNNNNCTTCCNN | 762 | HOXB2:ETV7 | NNMATTAGTCACGCWTSRNTG | 1043 | HOXB2:PAX9 |
| TAATKRSCGGAWGN | 763 | ETV5:DRGX | NNNTATGCAGYGTKA | 1044 | POU2F1:EOMES |
| TGACAGNWAATCRATR | 764 | MEIS1:ONECUT2 | NNTCCCGCNNNCCNNNGGC | 1045 | TFAP2C:E2F8 |
| TGTTKATRCGGGN | 765 | GCM2:FOXI1 | NSCCNNNRGGCANNNNYMATTA | 1046 | TFAP2C:DLX3 |
| TGTTKMCGGAWRTN | 766 | ETV2:FOXI1 | NSCGGACGGAWATCCGSNT | 1047 | ETV2:SPDEF |
| TMACACMGGAARN | 767 | ETV2:TBX21 | NSCGGANNNNNGGMTTA | 1048 | ERF:PITX1 |
| TTGCGYAANNSCGGAAGN | 768 | CEBPG:ELF1 | NSCGGANNNNNNGGMTTA | 1049 | ERF:PITX1 |
| ATCRATNNNNYCRTAAA | 769 | CUX1:HOXA13 | NTRNGGGNNNCACGTG | 1050 | GCM2:MAX |
| ATRATYANNNNCACGTG | 770 | CLOCK:EVX1 | NTTTATNRNTMAACA | 1051 | FOXJ2:HOXB13 |
| GGWATGYGTMAACA | 771 | TEAD4:FOXI1 | RCATWCCNNNNNNNNYNNTAAA | 1052 | TEAD4:HOM13 |
| TMACACYYMRTWAA | 772 | HOXC10:EOMES | RCATWCNNNNGGATTA | 1053 | TEAD4:PITX1 |
| TMRCACCTCRTWAA | 773 | HOXD12:EOMES | RCATWCNNNNNGGATTA | 1054 | TEAD4:PITX1 |
| ARGTGNNANNNMWTAAAN | 774 | HOXB13:TBX21 | RCATWCNNNNNNAGGTCA | 1055 | TEAD4:ESRRB |
| ARGTGTKANTTTATNN | 775 | HOXB13:TBX21 | RCATWCYNNNNNTAATCC | 1056 | TEAD4:PITX1 |
| ARGTGTKRNNNNNRGWATGY | 776 | TEAD4:TBX21 | RCATWCYNNNNTAATCC | 1057 | TEAD4:PITX1 |
| CYCRTAAATWCCN | 777 | TEAD4:HOXA13 | RGGTGTKANNNNGGATTA | 1058 | PITX1:EOMES |
| | | | RMATATKCNNNNNNNNNNNNNNNNRWMAAC | 1059 | POU2F1:FOXO6 |
| GTMAACANNNNNATCRATN | 778 | CUX1:FOXO1 | A | | |
| TGMATATKCANNNNNTAATKR | 779 | POU2F1:DLX2 | RMATATKCNNNNNNNNNNNNNNNRWMAACA | 1060 | POU2F1:FOXO6 |
| TGMATATKCANNNNTAATKR | 780 | POU2F1:DLX2 | RMATATKCNNNNNNNNNNNNNRWMAACA | 1061 | POU2F1:FOXO6 |
| TNSCCNNNGGSNNNCACGTGN | 781 | TFAP2C:MAX | RNCGGAWGTMATTA | 1062 | ETV5:HOXA2 |
| TNSCCNNNGGSNNNNCACGTGN | 782 | TFAP2C:MAX | RSCGGAANNNNNNNNCATWCC | 1063 | TEAD4:ERG |
| TNSCCNNNGGSNNNNNNNNNNNNNCACGTG | | | | | |
| N | 783 | TFAP2C:MAX | RSCGGAANTSRCGTGA | 1064 | ELK1:SREBF2 |
| TNSCCNNNGGSNNNNNNNNNNNNNNCACGT | | | | | |
| GN | 784 | TFAP2C:MAX | RSCGGAASNGRTCGATA | 1065 | ELK1:ONECUT2 |
| TMRCACYTMATWAA | 785 | HOXC10:TBX21 | RSCGGWAATKNNNNNNNNMATTA | 1066 | ETV5:HOXA2 |
| ANGTGNNANNNNNNNNNNNCNNMGGAWNN | 786 | ELK1:TBX21 | RSCGGWANNNNYMATTA | 1067 | ELK1:EVX1 |
| ARGTGTNNNAATATKYNNNCRCNN | 787 | POU2F1:EOMES | RSMGGAWGYAATTA | 1068 | ETV5:DRGX |
| ATRSGGGNNNNTTRCGYAAN | 788 | GCM1:CEBPB | RTAAACWNATWAAA | 1069 | FOXJ2:HOXB13 |
| GGWATGYNNNNCRCGYGY | 789 | TEAD4:HES7 | RTGNKGGCGGAWG | 1070 | GCM1:SPDEF |
| GGWATGYNNNNNNCRCGYGY | 790 | TEAD4:HES7 | RTRCGGGNNGATTA | 1071 | GCM2:PITX1 |
| TRGYAACNNNNCASSTGNN | 791 | RFX3:FIGLA | RTRCGGGNNNNTTACGTAA | 1072 | GCM2:TEF |
| AGGYGYGANNNNNNNNNNNNNNNTCRTWAA | 792 | HOXD12:EOMES | RWMAACASYMRTWAAA | 1073 | FOXO1:HOXB13 |
| NNCGTAAAATTA | 793 | HOXB2:HOXB13 | SCCNNNGGCNNYAATTA | 1074 | TFAP2C:DRGX |
| NRMATATACCAATAAA | 794 | POU2F1:HOXB13 | SYAATTANWGGTGYGA | 1075 | MGA:DLX2 |
| NTCGTAAAATGC | 795 | TEAD4:HOXB13 | WTWTGCATANNTAATTA | 1076 | POU2F1:DLX2 |
| NTCGTAAATCA | 796 | PBX4:HOXA10 | YNRCACSTCGTWAA | 1077 | HOXD12:TBX21 |
| RCCGGAAGTAATTA | 797 | ELK1:HOXA1 | NAACGGNNATYGANN | 1078 | MYBL1:ONECUT2 |
| YNNRTAAATCAATCA | 798 | PBX4:HOXA10 | NATCGATNNNNNGCCTNNGGSNN | 1079 | TFAP2C:ONECUT2 |
| NCCGGATATGCAN | 799 | POU2F1:ELK1 | NATCGATNNNNNNNGCCTNNGGSNN | 1080 | TFAP2C:ONECUT2 |
| NCCGGATATGCAN | 799 | POU2F1:ETV1 | NATCGATNNNNNNNNGCCTNNGGSNN | 1081 | TFAP2C:ONECUT2 |
| NCCGGATATGCAN | 799 | POU2F1:ETV4 | NATCRATNNNNNNNAACAATRS | 1082 | CUX1:SOX15 |
| NGATGATGCAATNN | 800 | ATF4:CEBPD | NATCRATNNNNNNNNAACAATRS | 1083 | CUX1:SOX15 |
| NGCAGCTGCCGGAWRYN | 801 | ETV2:NHLH1 | NATTTRCNNNACAATRN | 1084 | POU2F1:SOX2 |
| NGCCACGCAAYN | 802 | CEBPG:CREB3L1 | NCACGTGNNYAACSGNN | 1085 | MYBL1:MAX |
| NMATGACACGCGCCMNN | 803 | E2F3:FOXO6 | NCAGGTGNGWATGYN | 1086 | TEAD4:TCF3 |
| NMCCGGAACCGTTR | 804 | MYBL1:ELF1 | NCAGSTGNNNNNNGTAATKR | 1087 | TFAP4:DLX3 |
| NNCAGCTGCCGGAWRYN | 805 | ERF:NHLH1 | NCAGSTGNNNNNNNGTAATKR | 1088 | TFAP4:DLX3 |
| NNGAAAACCGAANM | 806 | FOXO1:ELF1 | NCASSTGKNNNNNNNNCACGTGN | 1089 | CLOCK:FIGLA |
| NNMATCACATAAAN | 807 | HOXB2:HOXB13 | NCASSTGKNNNNNNNNNCACGTGN | 1090 | CLOCK:FIGLA |
| NNMCACCGCGCCCMN | 808 | E2F3:FOXI1 | NCCGGAAGYNNCNTAGCAACS | 1091 | ETV2:RFX5 |
| NNNRTAAATCACACNN | 809 | HOXB13:TBX3 | NCCGGAANNNNNNCACGYGNN | 1092 | ERF:HES7 |
| NTGCCGGAAGTN | 810 | MEIS1:ELF1 | NCCGGAANTNRTAAAN | 1093 | FLI1:HOXB13 |
| NWAAACAGGAAGNN | 811 | FOXJ2:ELF1 | NCCGGANNCASSTGY | 1094 | FLI1:TCF3 |
| RCCGGAAATRSY | 812 | TEAD4:FLI1 | NGATAASNNNRGWATGY | 1095 | TEAD4:GATA3 |
| RCCGGATGTTKWN | 813 | ETV2:FOX06 | NGCCTNNGGSNNCGGAAGYN | 1096 | TFAP2C:ELK1 |
| RCCGGATGTTKWY | 814 | FLI1:FOXI1 | NGGTGTGNNGGCGCSNNNNCRMN | 1097 | E2F3:TBX21 |
| RGAATGCGGAAGTN | 815 | TEAD4:SPIB | NNCACGTGNNNNRGMTTAN | 1098 | ARNTL:PITX1 |
| RGAATGCGGAAGTR | 816 | TEAD4:ELF1 | NNCAGCTGNNNNNNNNNATYGATN | 1099 | CUX1:NHLH1 |
| RGAATGCGGATN | 817 | TEAD4:SPDEF | NNCGGAWGYMATTAN | 1100 | FLI1:DRGX |
| RGGTGTTAATKN | 818 | HOXB2:EOMES | NNGGAMGGATKTCCGSN | 1101 | ETV5:ETV7 |
| RMAGAAAACCGAANN | 819 | FOXJ2:ELF1 | NNGTMAATANGGGYR | 1102 | GCM1:FOXI1 |
| RNCGGATGTTKWN | 820 | ETV5:FOXO1 | NNGYGNNNNNNNNWAACAACACNN | 1103 | FOXJ3:TBX21 |
| RNMTGATGCAATN | 821 | ATF4:TEF | NNGYGYSACATTCCN | 1104 | TEAD4:EOMES |
| RSCGGAAGTAATAAAN | 822 | HOXD12:ELK1 | NNMGGAARTGCKGGN | 1105 | GCM1:ELF1 |
| RSCGGAAGTAATAAAN | 822 | HOXD12:ELK3 | NNMRTAAANTMACACNN | 1106 | HOXB13:EOMES |
| RSCGGAAGTAATAAAN | 822 | HOXD12:ETV1 | NNNMGGAANNNNNTCCNNNRCAACN | 1107 | RFX3:ETV7 |
| RSCGGAAGTAATAAAN | 822 | HOXD12:ETV4 | NNNRTAAANNTNACACYN | 1108 | HOXB13:TBX3 |
| RSCGGAAGTCGTAAAN | 823 | HOXD12:ELK3 | NNNRTAAAWATYGAYY | 1109 | HOXB13:ONECUT2 |
| RSCGGAAGTCGTAAAN | 823 | HOXD12:ETV4 | NNRGYAACNTCACGTGAY | 1110 | RFX3:SREBF2 |
| RSCGGATGTKKN | 824 | ELK1:FOXI1 | NRGTGTNANNNNNNNNNNNNNCCGGAANN | 1111 | ERF:TBX21 |
| RSCGGATGTTGN | 825 | ETV5:FOXI1 | NRGYAACNNNCATATGKN | 1112 | RFX3:BHLHA15 |
| RSCGGATGTTKW | 826 | ETV2:FOXI1 | NRTCRATANCGGAARYN | 1113 | ETV2:ONECUT2 |
| RSCGGATGTTKWN | 827 | ERF:FOXI1 | NRTMAACMGGAARYN | 1114 | ETV2:FOXI1 |
| RSCGGTAATKR | 828 | ELK1:HOXA3 | NSCCNNNRGGCANNNNNNTAATKR | 1115 | TFAP2C:DLX3 |
| RTGCGGGCGGAAGTN | 829 | GCM1:ELK1 | NSCCNNNRGGCANNNNNTAATKR | 1116 | TFAP2C:DLX3 |
| RTGCGGGCGGAAGTN | 829 | GCM1:ELK3 | NTCACACMNNNATCRATN | 1117 | CUX1:TBX21 |
| RTGCGGGCGGAAGTR | 830 | GCM1:ETV4 | NTGACAGNTAATCRATAN | 1118 | MEIS2:ONECUT2 |
| RTGCGGGTAATAAAN | 831 | GCM1:HOXB13 | NTNNNGGCGGAAGNNNTTCCNNN | 1119 | GCM1:ETV7 |
| RWMAACAGGAAGTN | 832 | FOXO1:ELF1 | NTRNGGGCGGAAGNNNTTCCNNN | 1120 | GCM1:ETV7 |
| RWMAACAGGAARNN | 833 | FOXO1:ETV4 | NTRYGGGNNNTGGCGGGARN | 1121 | GCM2:E2F8 |
| RWYAACAGGAAGYN | 834 | FOXO1:ELK1 | NYMRTAAANATYGATN | 1122 | CUX1:HOM13 |
| SGCGCTAATTKN | 835 | E2F3:DRGX | RATTCCNNNNNNNNNNCASSTGN | 1123 | TEAD4:FIGLA |
| WAACAACACW | 836 | FOXJ3:TBX21 | RCATWCCNNNNNNNNNNNNRWGCGTGACN | 1124 | TEAD4:PAX5 |
| WMSCGGATGTKNW | 837 | FOXO1:SPDEF | RCATWCCNNNNNNTTTAYNNN | 1125 | TEAD4:HOM13 |
| NCACCTGNNNNNMATTA | 838 | HOXB2:TCF3 | RCCGGAANNNNNNRATCRATN | 1126 | ETV2:ONECUT2 |
| NCACGTGNNGGATTA | 839 | PITX1:HES7 | RCCGGAARCASSTGNN | 1127 | TFAP4:ETV4 |
| NCAGGTGNNNNNMATTA | 840 | HOXB2:TCF3 | RCCGGANRNNCGGWATKN | 1128 | TEAD4:ELK1 |
| NCCCGCANNMATAAA | 841 | GCM1:HOXB13 | RGGTGNTAAKCCN | 1129 | MGA:PITX1 |
| NCCCGCANNNMRTAAA | 842 | GCM1:HOXB13 | RGGTGNTAATNNNNNNNNNCASYNN | 1130 | ALX4:TBX21 |
| NCCGGAAGNNNNNNYMATTA | 843 | ETV2:HOXA2 | RGWATGYTAATKN | 1131 | TEAD4:DRGX |
| NCCGGAAGTMATTA | 844 | ETV2:HOXA2 | RGWATGYTAATKR | 1132 | TEAD4:DLX2 |
| NNATCATNGTAAA | 845 | HOXB2:HOXB13 | RNCGGAAGNNNNNCASSTGN | 1133 | ETV5:TCF3 |
| NNATGAYGCAAT | 846 | CEBPG:ATF4 | RNCGGAANYNRIWAAN | 1134 | ELK1:HOXB13 |
| NNMAACAYNRTAAA | 847 | HOXB13:Fox | RNGTGNNNNNNNNNNNNNRCRCCGGAWSN | 1135 | ETV5:EOMES |
| NTAATCCNNWMAACA | 848 | FOXJ2:PITX1 | RRGTGTKNNNNNNNNNNNNNNCMGGANNN | 1136 | ERF:EOMES |
| NYNATMAATCA | 849 | PBX4:HOM1 | RRTCRATNNNCGGAARYN | 1137 | ETV2:ONECUT2 |
| RCATTCCNNNNNNCACGTG | 850 | TEAD4:MAX | RSCGGAANCAGSTGNN | 1138 | TFAP4:ETV1 |
| RCATTCCNNNNNNNCACGTG | 851 | TEAD4:MAX | RSCGGAANCASCTGNN | 1139 | ERF:FIGLA |
| RCATTCCNNNYAATTA | 852 | TEAD4:DLX3 | RSCGGAANCASSTGN | 1140 | FLI1:FIGLA |
| RCATTCCNNNYMATTA | 853 | TEAD4:DLX3 | RSCGGAANNNNNGGMTTAN | 1141 | ETV2:PITX1 |
| RCATTCNNNNNNCATTA | 854 | TEAD4:HOXA2 | RSCGGAASNGRTCGATAN | 1142 | ELK1:ONECUT2 |
| RCATTCNNNNNNCATTA | 854 | TEAD4:HOXA3 | RSCGGANNTTGCGYAAN | 1143 | ETV2:CEBPD |
| RCATTCNNNNNTAATCC | 855 | TEAD4:PITX1 | RSCGGAWRCASSTGN | 1144 | TFAP4:FLI1 |
| RCATTCYNNNCAATTA | 856 | TEAD4:DLX2 | RSCGGWAATNNNNATTAN | 1145 | ETV5:EVX1 |
| RCATTCYNNNNCAATTA | 857 | TEAD4:DLX2 | RSCGGWAATNNNNNATTAN | 1146 | ETV5:EVX1 |
| RCATTCYNNNNNCATTA | 858 | TEAD4:HOXA3 | RSCGGWAATNNNYATTAN | 1147 | ETV2:EVX1 |
| RCCGGAAATRCC | 859 | TEAD4:ETV4 | RSMGGAANTTGCGYAAN | 1148 | ERF:CEBPD |
| RCCGGAANNNNNNYAATTA | 860 | ETV2:DLX2 | RSMGGAARTNNTAAAN | 1149 | HOXB13:ELK1 |
| RCCGGAANNNNNYAATTA | 861 | ETV2:DLX2 | RTAAACANNNNNATCRATN | 1150 | CUX1:FOXI1 |
| RGAATGCGGAWRT | 862 | TEAD4:SPDEF | RTAAACANNNNNATCRATN | 1150 | CUX1:FOXO6 |
| RGAATGCNNRTAAA | 863 | TEAD4:HOXB13 | RTMAACATRNGGGN | 1151 | GCM1:FOXI1 |
| RGAATGYGTGA | 864 | TEAD4:EOMES | RTMAATAMGGGYRN | 1152 | GCM1:FOXO1 |
| RGAATGYNNACGTG | 865 | TEAD4:MAX | RTMRCGTGACGGAWGN | 1153 | ETV2:SREBF2 |
| RGGTGTNNNNNNNNNYATTGT | 866 | SOX6:TBX21 | RTRCGGGNNNNNNNYWTTGTNN | 1154 | GCM2:SOX15 |
| RKRNGGGNNATAAA | 867 | GCM1:HOM13 | RTRCGGGNNNNNNTAATKR | 1155 | GCM2:DLX3 |
| RNCGGAANNAAACA | 868 | ETV2:FOXI1 | RTRCGGGNNNNNTAATKR | 1156 | GCM2:DLX3 |
| RRAATGCARTAAA | 869 | TEAD4:HOXB13 | RTRCGGGNNNNNTAATTR | 1157 | GCM2:DLX2 |
| RSCGGAAATRCC | 870 | TEAD4:ERG | RTRCGGGNNNNRNACAAWN | 1158 | GCM2:SOX15 |
| RSCGGAAGTMRTTA | 871 | HOXB2:ELK1 | RTRCGGGNNNRNACAAWN | 1159 | GCM2:SOX15 |
| RSCGGAAGTMRTTA | 871 | HOXB2:ELK3 | RTRCGGGSGATTAN | 1160 | GCM2:PITX1 |
| RSCGGAANNNNGGATTA | 872 | ETV2:GSC2 | RTRNGGGTNNTAAAN | 1161 | GCM1:HOXB13 |
| RSCGGAANNNNNGGATTA | 873 | ETV2:GSC2 | RTRSGGGNAATTAN | 1162 | GCM2:DRGX |
| RSCGGAANNNNNNNYWTTGT | 874 | ETV2:SOX15 | RTRSGGGNNAATTAN | 1163 | GCM2:DRGX |
| RSCGGAANNNNNNRTCGAT | 875 | FLI1:ONECUT2 | RTRSGGGNNNATTGTKY | 1164 | GCM1:SOX2 |
| RSCGGAANNNNNNYAATTA | 876 | ETV2:DLX3 | RTRSGGGNNTAATKR | 1165 | GCM1:HOXA2 |
| RSCGGAANNNNNNYWTTGT | 877 | ETV2:SOX15 | RTRSKGGCGGANNNNNATCCNNN | 1166 | GCM1:SPDEF |
| RSCGGAANNNNNYAATTA | 878 | ERF:DLX3 | RTRSKGGCGGANNNNNNATCCNNN | 1167 | GCM1:SPDEF |
| RSCGGAANNNNNYAATTA | 878 | ETV2:DLX3 | SYMRTAAANATYGATN | 1168 | CUX1:HOXB13 |
| RSCGGAANNNNNYAATTA | 878 | ETV5:DLX2 | SYMRTAAANNNNCASSTGN | 1169 | HOXD12:FIGLA |
| RSCGGAANNNNNYMATTA | 879 | ERF:DLX2 | WGTTKMCGGAWRTN | 1170 | ELK1:FOXI1 |
| RSCGGAANNNNYAATTA | 880 | ERF:DLX3 | YNATTAGTCACGCWTSRNTR | 1171 | HOXA3:PAX5 |
| RSCGGAANYAATTA | 881 | ETV2:DRGX | NCASSTGNNNNNNNNRTRCGGG | 1172 | GCM2:FIGLA |
| RSCGGAANYNRTAAA | 882 | FLI1:HOXB13 | NGGTGTGNNNGGCGCSNNNCRC | 1173 | E2F1:EOMES |
| RSCGGAARYAATTA | 883 | FLI1:DLX2 | NNCGGANGNNNTWAA | 1174 | ETV5:HOXB13 |
| RSCGGAWNNNNNNNYMATTA | 884 | ERF:HOXA3 | NNCGGAWGTNRTWAA | 1175 | ETV5:HOXA13 |
| RSCGGAWRYATTA | 885 | ETV2:DRGX | NTATKCAGYGTNA | 1176 | POU2F1:EOMES |
| SMGGAAGTMRTTA | 886 | HOXB2:ELF1 | NTATKCAGYGTNA | 1176 | POU2F1:TBX21 |
| SYMRTAAANCTGTCA | 887 | MEIS1:HOXB13 | RATCRATNNNNNNNNNNRGYAAC | 1177 | CUX1:RFX5 |
| SYNRTAAANNTGTCA | 888 | MEIS1:HOM13 | RATCRATNNNNNNNNNRGYAAC | 1178 | CUX1:RFX5 |
| YAACGGNNNNNNNNNNCACGTG | 889 | MYBL1:MAX | RCATWCCNNNNNNNNNNNNNNRTMAACA | 1179 | TEAD4:FOXI1 |
| YAACGGNNNNNNNNNNNCACGTG | 890 | MYBL1:MAX | RCATWCCNNNNNNNNNNNNNRTMAACA | 1180 | TEAD4:FOXI1 |
| YRATTANNNNNNNCACGTG | 891 | CLOCK:EVX1 | RCATWCCNNNNNNNNNNNNRTMAACA | 1181 | TEAD4:FOXI1 |
| NACAATRNNNNGAATGY | 892 | TEAD4:SOX15 | RCATWCCNNNNNNNNNNNRTMAACA | 1182 | TEAD4:FOXI1 |
| NACAATRNNNNNGAATGY | 893 | TEAD4:SOX15 | RCATWCYNNNNTAATYRNATTA | 1183 | TEAD4:ALX4 |
| NACTTCCGGYNNNNGCAACSN | 894 | ETV2:RFX5 | RSCGGAACYACGCWYSANTG | 1184 | ELK1:PAX1 |
| NAGGTGNTAATKR | 895 | HOXB2:TBX21 | RSCGGAACYACGCWYSANTG | 1184 | ELK1:PAX5 |
| NCACGTGNNNNNCATATGN | 896 | CLOCK:BHLHA15 | RSCGGAACYACGCWYSANTG | 1184 | ELK1:PAX9 |
| NCACGTGNNNNNSCGGAWRN | 897 | ETV5:CLOCK | RSCGGAANNAGGYGYNA | 1185 | ELK1:EOMES |
| NCAGCTGNNNNNCACGTGN | 898 | TFAP4:MAX | RSCGGAANNRTMAAYA | 1186 | ELK1:FOXI1 |
| NCAGCTGNNNNNNNCACGTGN | 899 | TFAP4:MAX | RSCGGAANRTMAAYA | 1187 | ELK1:FOXI1 |
| NCCGGAAGTYRTAAAN | 900 | ETV2:HOXB13 | RTRCGGGNNCASSTG | 1188 | GCM2:FIGLA |
| NCCGGAANCATATGN | 901 | FLI1:BHLHA15 | RWMAACAYCRTWAA | 1189 | FOXO1:HOXA10 |
| NCCGGAANNNNNNCAGCTGNN | 902 | ETV2:NHLH1 | SCCNNNNGGCATNGTWAA | 1190 | TFAP2C:HOXB13 |
| NCCGGAANYATAAAN | 903 | ETV2:HOXB13 | NATYGATNNNNNNNNNGCCTNNGGSNN | 1191 | TFAP2C:ONECUT2 |
| NCCGGWNNNNNNNNNNNSCATTAN | 904 | ELK1:HOXA3 | NCASSTGNNNNNNNCSGTTR | 1192 | MYBL1:FIGLA |
| NGGTGTGNNGGCGCSN | 905 | E2F3:TBX21 | NCASSTGNNNNNNNNCSGTTR | 1193 | MYBL1:FIGLA |
| NGGTGTGNNNGGCGCSN | 906 | E2F3:TBX21 | NCASSTGNNNNNNNNNCSGTTR | 1194 | MYBL1:FIGLA |
| NGGTGTNNNNNNNNNNNNNNNCCGGAWNNN | 907 | ETV2:EOMES | NCASSTGNNNNNNYAACSGYN | 1195 | MYBL1:FIGLA |
| NMATGACACNGCGCCMNN | 908 | E2F3:FOXO6 | NCASSTGNNNNNYAACSGYN | 1196 | MYBL1:FIGLA |
| NNACAATNNNNNNGAATGY | 909 | TEAD4:SOX6 | NCCATAYWNGGWNNNNATCRATN | 1197 | CUX1:SRF |
| NNARAAAACCGAAWMN | 910 | FOXJ3:ELF1 | NGGTGTGNNNNNTMATTWGCRN | 1198 | HOXB2:TBX21 |
| NNATGAYGCAAYN | 911 | ATF4:CEBPB | NRGCAACNNNCRCGYGNN | 1199 | RFX3:HES7 |
| NNCACGTGACMGGAARNN | 912 | ERF:SREBF2 | NRGYAACNNNNNCCIWWWNNGGN | 1200 | RFX3:SRF |
| NNCACGTGNNNGCGGGYN | 913 | GCM1:MAX | NSCGGANNTTRCGYAAN | 1201 | ETV5:CEBPD |
| NNCACGTGNNNNCCGGAANN | 914 | ERF:HES7 | NTTRCGYAANNNNNNGGAATGY | 1202 | TEAD4:CEBPB |
| NNCACGTGNNNNCCGGAANN | 914 | ETV5:HES7 | RCATTCCNNCRCGYGYN | 1203 | TEAD4:HES7 |
| NNCACGTGNNNNNCCGGAANN | 915 | ERF:HES7 | RCATTCCNNNNNCRCGYGYN | 1204 | TEAD4:HES7 |
| NNCACGTGNNNNNCCGGAWRY | 916 | ETV2:CLOCK | RGGTGNGANNNNNNNNTNNCACCGGAAGY | 1205 | ELK1:EOMES |
| NNCACGTGNNNNNCGGAWRY | 917 | ETV2:HES7 | RGGTGTNNNGGCGSNNTNNCRSNN | 1206 | E2F1:EOMES |
| NNCACGTGNNNNNNNNNNRTGCGGGYRN | 918 | GCM1:MAX | RGTGTKRNNNNNNNNNNNCNCMGGAARN | 1207 | ETV2:TBX21 |
| NNCAGCTGNNNNNNCACGTGNN | 919 | CLOCK:NHLH1 | RGWATSCGGATGNNNNTCCKNNN | 1208 | TEAD4:SPDEF |
| NNCAGCTGNNNNNNNNATCGATN | 920 | CUX1:NHLH1 | RRCRCGYGYNNNNSGCGCSN | 1209 | E2F1:HES7 |
| NNCAGCTGNNNNNNNTAATTN | 921 | TFAP4:DLX3 | RSCGGAANNRTMAAYAN | 1210 | ELK1:FOXI1 |
| NNCAGCTGNNNNTAATKR | 922 | TFAP4:DLX3 | RSCGGAWNTTRCGYAAN | 1211 | ETV2:TEF |
| NNCAGGTGNNNNNMCGGAARYN | 923 | ETV2:FIGLA | RTGNKGGCGGAWGNNNNNTCCGGNN | 1212 | GCM1:SPDEF |
| NNCGGAANCAGGTGNN | 924 | ETV2:FIGLA | RTGNKGGCGGAWGNNNNTCCGGNN | 1213 | GCM1:SPDEF |
| NNGATTANNNATGCAWNNN | 925 | POU2F1:GSC2 | RTRCGGGNNNNNNATCRATN | 1214 | GCM2:ONECUT2 |
| NNGTCACGCNNCATTAN | 926 | HOXB2:PAX5 | RTRNKGGTNNNGCACGYGNN | 1215 | GCM2:HES7 |
| NNGTCACGNNTCATTNN | 927 | HOXB2:PAX1 | SCCNNNGGSNNNGGAAGNNNTTCCNN | 1216 | TFAP2C:ETV7 |
| NNMGGAARNNRTAAAN | 928 | ERF:HOXB13 | SRCRCGYGSYNNNNSGCGCSN | 1217 | E2F1:HES7 |
| NNNACGANNNNNNTCGTNNN | 929 | HOXD12:EOMES | WNGTGYKAMATWCY | 1218 | TEAD4:EOMES |
| NNNCGGGNNNGGTGTNN | 930 | GCM2:TBX21 | MTRSGGGNNNNNNTTRCGYAAN | 1219 | GCM1:CEBPB |
| NNNGMATAACAAWRRN | 931 | POU2F1:SOX15 | MTRSGGGNNNNNTTRCGYAAN | 1220 | GCM1:CEBPB |
| NNNNGCGCSNNNNNCACGTGNN | 932 | E2F3:HES7 | NGGTGTNNNNNNNNNNNNNCACNTNNTWAN | 1221 | HOXD12:TBX21 |
| NNNRTAAANCTGTN | 933 | HOXB13:MEIS1 | NGYGYTAAYNNNNNNTNACACNN | 1222 | ALX4:EOMES |
| NNNTTCCGSNNNNGCAACNN | 934 | ETV2:RFX5 | NNCRCGYGNNNNNNNSCCNNNGGS | 1223 | TFAP2C:HES7 |
| NNRNGGGCGGAARTN | 935 | GCM2:ELK1 | NNCRCGYGNNNNNNSCCNNNGGS | 1224 | TFAP2C:HES7 |
| NNSGCGCSNNNATCGAYN | 936 | E2F3:ONECUT2 | NNGYGNNNNGGCGCSNNNNCRCNN | 1225 | E2F3:EOMES |
| NNSGCGCSNNNNATCGAYN | 937 | E2F3:ONECUT2 | NNNTATGCNNNGYGANNNNNNNNNNNCRCN | 1226 | POU2F1:EOMES |
| NNSMGGACGGAYNTCCKSNN | 938 | ELK1:ETV7 | NNSYGNCNAACNNNNNNCACRCNN | 1227 | MYBL1:EOMES |
| NNYMATTANNNNNNNGGAAGNN | 939 | HOXB2:ELF1 | NTTRCGYAANNNNNNNNRGWATGY | 1228 | TEAD4:CEBPD |
| NRCAGCTGNNNNNCACGTGNN | 940 | CLOCK:NHLH1 | NTTRCGYAANNNNNNNRGWATGY | 1229 | TEAD4:CEBPD |
| NRCATTCNNNNNTAATTRN | 941 | TEAD4:DLX2 | NTTRCGYAANNNNNNRGWATGY | 1230 | TEAD4:CEBPD |
| NRCATTCNNNNYAATTN | 942 | TEAD4:DLX2 | RGGTGWKNNNNNNNNNTNNCRTRNGGGN | 1231 | GCM1:TBX21 |
| NRCCCRNNCGGAAGNN | 943 | GCM1:ELF1 | RGWATGYNNTTRCGYAAN | 1232 | TEAD4:CEBPD |
| | | | NGYGNNAMATWCYNNTMRCRCN | 1233 | TEAD4:EOMES |

[0100] It has further been determined that certain patterns are found in the binding motifs. A list of such patterns for complexes (Tables 13 and 14) and single molecules (Tables 15 and 16) are shown below.

TABLE 13
Gene Complex Motif Patterns

| | Number of each pattern |
|---|---|
| Pattern | in Gene Complex Table |
| AB | 11 |
| ABA | 27 |
| ABAB | 29 |
| ABABA | 25 |
| ABABAB | 23 |
| ABABABA | 5 |
| ABABABAB | 11 |
| ABABABABA | 1 |
| ABABABABAB | 6 |
| ABABABABABA | 1 |

TABLE 14
Gene Complex Motif Patterns

| | Number of each pattern |
|---|---|
| Pattern | in Gene Complex Table |
| BA | 6 |
| BAB | 46 |
| BABA | 58 |
| BABAB | 155 |
| BABABA | 45 |
| BABABAB | 95 |
| BABABABA | 22 |
| BABABABAB | 28 |
| BABABABABAB | 14 |
| BABABABABABABABAB | 1 |

TABLE 15
Single Gene Motif Patterns

| | Number of each pattern |
|---|---|
| Pattern | in Single Gene Table |
| AB | 42 |
| ABA | 97 |
| ABAB | 37 |
| ABABA | 40 |
| ABABAB | 4 |
| ABABABA | 28 |
| ABABABAB | 4 |
| ABABABABA | 4 |
| ABABABABABA | 1 |

TABLE 16
Single Gene Motif Patterns

| | Number of each pattern |
|---|---|
| Pattern | in Single Gene Table |
| BA | 34 |
| BAB | 186 |
| BABA | 40 |
| BABAB | 120 |
| BABABA | 15 |
| BABABAB | 47 |
| BABABABA | 8 |
| BABABABAB | 8 |
| BABABABABA | 1 |
| BABABABABAB | 2 |

[0101] Table 17 shows motifs which may be targeted by biomolecule complexes (such as transcription factors or signaling molecules or chromatin remodeling molecules, in any combination) acting at GSCs. “A” represents a normal nucleotide region, and “B” represents a variable nucleotide, gap, or spacer region.

TABLE 17
Complex motif patterns starting with A

| | Number of | | | | | | | | | | | |
|---|---|---|---|---|---|---|---|---|---|---|---|---|
| | each pattern | | | | | | | | | | | |
| | in gene | | | | | | | | | | | |
| | complex | Number of nucleotides/variables | | | | | | | | | | |
| Pattern | table | A1 | B1 | A2 | B2 | A3 | B3 | A4 | B4 | A5 | B5 | A6 |
| AB | 11 | 10-14 | 1-3 | | | | | | | | | |
| ABA | 27 | 1, 4-6 | 1, 3, 5-11 | 4-7, 10, 13 | | | | | | | | |
| ABAB | 29 | 1, 2, 4-8 | 1-7, 9 | 4-9 | 1-4, 7 | | | | | | | |
| ABABA | 25 | 1-7 | 1-4, 13 | 1-6 | 1-4, 6-8, 10, 11 | 1, 2, 4-6 | | | | | | |
| ABABAB | 23 | 1-7 | 1-5 | 1-4, 8 | 1-4, 6-8 | 1-6 | 1-4 | | | | | |
| ABABABA | 5 | 1-3 | 1, 2 | 2-4, 6 | 1, 4, 5 | 1, 2 | 2, 4, 6 | | | | | |
| ABABABAB | 11 | 1, 2 | 1, 2 | 1-4 | 1-3, 5, 8 | 1-3, 5 | 1, 4, 5, 14, 15 | 2-6 | 1, 2 | | | |
| ABABABABA | 1 | 1 | 2 | 3 | 1 | 1 | 1 | 2 | 1 | 2 | | |
| ABABABABAB | 6 | 1, 2 | 1, 2 | 1, 3, 4 | 1-5, 7 | 1-3, 5 | 1, 4, 5, 11 | 1-3 | 1-3 | 1-3 | 1-3 | |
| ABABABABABA | 1 | 3 | 1 | 1 | 1 | 2 | 15 | 1 | 1 | 1 | 1 | 2 |

[0102] Table 18 is an additional table of motifs which may be targeted by biomolecule complexes (such as transcription factors or signaling molecules or chromatin remodeling molecules, in any combination) acting at GSCs. “A” represents a normal nucleotide region, and “B” represents a variable nucleotide, gap, or spacer region.

TABLE 18
Complex motif patterns starting with B

| | Number of | | | | | |
|---|---|---|---|---|---|---|
| | each pattern | | | | | |
| | in gene | | | | | |
| | complex | Number of nucleotides/variables | | | | |
| Pattern | table | B1 | A1 | B2 | A2 | B3 |
| BA | 6 | 1-4 | 10-13 | | | |
| BAB | 46 | 1-4 | 7-13 | 1-4 | | |
| BABA | 58 | 1-4 | 2-9 | 1-11 | 1-6 | |
| BABAB | 155 | 1-5 | 1-8, 10 | 1-13, 15-18 | 1-11 | 1-4 |
| BABABA | 45 | 1-3 | 1-8, 11 | 1-8 | 1-6 | 1-6, 10, 11, 16, 18, 19 |
| BABABAB | 95 | 1-4 | 1-7, 11 | 1-10, 14, 15 | 1-6, 8, 9 | 1-10, 13, 14 |
| BABABABA | 22 | 1-3 | 1-6 | 1-4 | 1-5 | 1-5, 10-15 |
| BABABABAB | 28 | 1-2 | 1-6 | 1-3, 13 | 1-4, 6 | 1, 3-9 |
| BABABABABA | 14 | 1-4 | 1, 2, 4, 5 | 1-3, 11, 13 | 1-3 | 1-6 |
| BABABABABAB | 1 | 1 | 1 | 1 | 1 | 2 |

| | Number of nucleotides/variables | | | | | | | | | | | |
|---|---|---|---|---|---|---|---|---|---|---|---|---|
| Pattern | A3 | B4 | A4 | B5 | A5 | B6 | A6 | B7 | A7 | B8 | A8 | B9 |
| BA | | | | | | | | | | | | |
| BAB | | | | | | | | | | | | |
| BABA | | | | | | | | | | | | |
| BABAB | | | | | | | | | | | | |
| BABABA | 1-6, 8 | | | | | | | | | | | |
| BABABAB | 1-8 | 1-4 | | | | | | | | | | |
| BABABABA | 1, 2, 4 | 1-3 | 1-4 | | | | | | | | | |
| BABABABAB | 1-6 | 1-7 | 1-6, 9 | 1-4 | | | | | | | | |
| BABABABABA | 1-3, 5 | 1, 2, 5-9, 11 | 1-3 | 1-3 | 1-4 | 1-2 | | | | | | |
| BABABABABAB | 1 | 1 | 2 | 1 | 1 | 3 | 1 | 2 | 1 | 1 | 1 | 1 |

[0103] Table 19 is a table of motifs which may be targeted by single biomolecules such as transcription factors or signaling molecules or chromatin remodeling molecules acting at GSCs. “A” represents a normal nucleotide region, and “B” represents a variable nucleotide, gap, or spacer region.

TABLE 19
Single motif patterns starting with A

| | Number of | | | | | | | | | | | |
|---|---|---|---|---|---|---|---|---|---|---|---|---|
| | each pattern | | | | | | | | | | | |
| | in gene | | | | | | | | | | | |
| | complex | Number of nucleotides/variables | | | | | | | | | | |
| Pattern | table | A1 | B1 | A2 | B2 | A3 | B3 | A4 | B4 | A5 | B5 | A6 |
| AB | 42 | 6-13, 15, 16 | 1-3 | | | | | | | | | |
| ABA | 97 | 1-9, 11, 12, 16 | 1-5, 10, 11 | 1-10, 12, 13, 15 | | | | | | | | |
| ABAB | 37 | 1-9, 13 | 1-3 | 1-8, 12 | 1-3 | | | | | | | |
| ABABA | 40 | 1-7 | 1-4 | 1-7, 9, 10, 13, 14 | 1-5 | 1-6, 8, 9 | | | | | | |
| ABABAB | 4 | 1, 2, 4, 9 | 1, 2 | 1, 3, 4 | 1, 2, 6 | 1, 2, 6, 7 | 1, 2 | | | | | |
| ABABABA | 28 | 1-6, 10 | 1, 2 | 1-4, 6, 8 | 1-6 | 1-6, 8 | 1-3 | 1-3, 5-7, 9 | | | | |
| ABABABAB | 4 | 3, 4, 7 | 1, 2 | 1, 3, 4 | 1, 2 | 2, 3 | 1, 2 | 1, 2, 4 | 1, 4 | | | |
| ABABABABA | 4 | 1, 3, 4 | 1, 2 | 1, 6 | 1, 4 | 1-3 | 1 | 1-3 | 1, 2 | 1-4 | | |
| ABABABABABA | 1 | 1 | 1 | 5 | 1 | 1 | 2 | 2 | 1 | 3 | 1 | 2 |

[0104] Table 20 is a table of motifs which may be targeted by single biomolecules such as transcription factors or signaling molecules or chromatin remodeling molecules acting at GSCs. “A” represents a normal nucleotide region, and “B” represents a variable nucleotide, gap, or spacer region.

TABLE 20
Single motif patterns starting with B

| | Number of | | | | | | | | | | | |
|---|---|---|---|---|---|---|---|---|---|---|---|---|
| | each pattern | | | | | | | | | | | |
| | in gene | | | | | | | | | | | |
| | complex | Number of nucleotides/variables | | | | | | | | | | |
| Pattern | table | B1 | A1 | B2 | A2 | B3 | A3 | B4 | A4 | B5 | A5 | B6 |
| BA | 34 | 1-4, 6 | 4-13 | | | | | | | | | |
| BAB | 186 | 1-5 | 4-12, 14-16 | 1-4 | | | | | | | | |
| BABA | 40 | 1-3 | 1, 2, 4-8, 10-12 | 1-5 | 1-10 | | | | | | | |
| BABAB | 120 | 1-4 | 1-8, 10-12 | 1-6 | 1-11 | 1-4 | | | | | | |
| BABABA | 15 | 1, 2 | 1-7, 9 | 1-3 | 1-5, 9 | 1, 2, 4 | 1-3, 5-7, 9 | | | | | |
| BABABAB | 47 | 1-4 | 1-7 | 1-3, 5 | 1-6, 9, 11 | 1-4 | 1-6 | 1-3 | | | | |
| BABABABA | 8 | 1, 2 | 1, 2, 7 | 1, 2 | 1, 3, 4 | 1, 2 | 1-5 | 1 | 1, 3, 9 | | | |
| BABABABAB | 8 | 1, 2 | 1, 2, 4, 6 | 1 | 1, 3, 5 | 1-3 | 1-4 | 1 | 1, 2, 3, 6 | 1, 2 | | |
| BABABABABA | 1 | 1 | 1 | 1 | 4 | 1 | 8 | 1 | 3 | 1 | 4 | |
| BABABABABAB | 2 | 2 | 2 | 1 | 1, 3 | 1, 2 | 1, 2 | 1, 2 | 1, 3 | 1 | 1, 2 | 2, 4 |

[0105] In the Motif Tables above, certain designators are used according to the IUPAC nucleotide code. This code is shown in Table 21.

TABLE 21
IUPAC Nucleotide Code

| IUPAC code | Base | IUPAC code | Base |
|---|---|---|---|
| A | Adenine | K | G or T |
| C | Cytosine | M | A or C |
| G | Guanine | B | C or G or T |
| T (or U) | Thymine (or Uracil) | D | A or G or T |
| R | A or G | H | A or C or T |
| Y | C or T | V | A or C or G |
| S | G or C | N | Any base |
| W | A or T | “.” or “-” | gap |

### Cohesin and CTCF Associated Loops and Anchor Site/Regions

[0106] CTCF interactions link sites on the same chromosome forming loops, which are generally less than 1 Mb in length. Transcription occurs both within and outside the loops, but the nature of this transcription differs between the two regions. Studies show that enhancer-associated transcription is more prominent within the loops. Thus, the insulator state is enriched specifically at the CTCF loop anchors. CTCF loops thus either enclose gene poor regions, with a tendency for genes to be centered within the loops or leave out gene dense regions outside the CTCF loops. FIG. 2A and FIG. 2B compare the linear to the 3-dimensional (3D) conformation of the loops.

[0107] CTCF loops exhibit reduced exon density relative to their flanking regions. Gene ontology analysis reveals that genes located within CTCF loops are enriched for response to stimuli and for extracellular, plasma membrane, and vesicle cellular localizations. On the other hand, genes present within the flanking regions just outside the loops exhibit an expression pattern similar to housekeeping genes i.e. these genes are on average more highly expressed than the loop-enclosed genes, are less cell-line specific in their expression pattern, and have less variation in their expression levels across cell lines. See Oti et al., BMC Genomics, 17:252, 2016, which is hereby incorporated by reference herein in its entirety.

[0108] Anchor regions are binding sites for CTCF that influence conformation of an insulated neighborhood. FIG. 4 shows the relationship between the CTCF anchor regions and gene transcription. Deletion of anchor sites may result in activation of genes that are usually transcriptionally silent, thereby resulting in a disease phenotype. In fact, somatic mutations are common in loop anchor sites of oncogene-associated insulated neighborhoods. The CTCF DNA-binding motif of the loop anchor region has been observed to be the most altered human transcription-factor binding sequence of cancer cells. See, Hnisz et al., Cell 167, Nov. 17, 2016, which is hereby incorporated by reference here in its entirety. FIG. 6B is an illustration of the differences between conformation between a transcriptionally silent gene and an activated gene due to deletions of a deleted CTCF anchor region.

[0109] Anchor regions have been observed to be largely maintained during cell development, and are especially conserved in the germline of humans and primates. In fact, the DNA sequence of anchor regions are more conserved in CTCF anchor regions than at CTCF binding sites that are not part of an insulated neighborhood. Therefore, cohesin may be used as a target for ChIA-PET to identify locations of both.

[0110] Cohesin also becomes associated with CTCF-bound regions of the genome, and some of these cohesin-associated CTCF sites facilitate gene activation while others may function as insulators. See, Dixon et al., Nature, 485(7398):376-80, 2012; Parelho et al., Cell, 132(3):422-33, 2008; Phillips-Cremins and Corces, Molecular Cell, 50(4):461-74, 2013); Seitan et al., Genome Research, 23(12):2066-77, 2013; Wendt et al., Nature, 451(7180):796-801, 2008), which are hereby incorporated by reference in their entireties. Cohesin and CTCF are associated with large loop substructures within TADs, and cohesin and Mediator are associated with smaller loop structures that form within CTCF-bounded regions. See, de Wit et al., Nature, 501(7466):227-31, 2013; Cremins et al., Cell, 153(6):1281-95, 2013; Sofueva et al., EMBO, 32(24):3119-29, 2013, which are hereby incorporated by reference in their entireties. FIG. 3B shows nested gene loops within an insulated neighborhood. In some embodiments, cohesin and CTCF associated loops and anchor sites/regions may be targeted to after or elucidate GSNs.

### Genetic Variants

[0111] Genetic variations within IN boundary sites are known to contribute to disease by disrupting protein binding on chromosomes, such as described in Hnisz et al., Cell 167, Nov. 17, 2016, which is hereby incorporated by reference in its entirety. Variations of the sequence of CTCF anchor regions of IN boundary sites that interfere with formation of INs are observed to result in dysregulation of gene activation and repression. CTCF malfunctions caused by various genetic and epigenetic mechanisms may lead to pathogenesis. Moreover, genetic variations within binding sites of signaling molecules may disrupt genomic signaling centers by altering the binding profile. In certain embodiments, genetic variations within binding sites of signaling molecules may disrupt an ODSC. Therefore, in some embodiments, itis beneficial to after any one or more GSNs associated with such variant-driven etiology in order to effect one or more positive treatment outcomes.

### Single Nucleotide Polymorphisms (SNPs)

[0112] 94.2% of SNPs occur in non-coding regions, which include enhancer regions. See, Hnisz et al., Cell, 155, 934-947, 2013; which is hereby incorporated by reference herein in its entirety. In some embodiments, SNPs are altered in order to study and/or after the signaling from one or more GSNs. Most disease associated SNPs are located in the proximity of GSCs. In some embodiments, SNPs are altered to restore a GSC occurring in the genome without the SNP. Alternatively, SNPs are altered to change at least one binding site of a signaling molecule to change the binding profile of a GSC. In certain embodiments, SNPs are altered to change at least one binding site of a signaling molecule to change the binding profile of an ODSC.

### Signaling Molecules

[0113] Signaling molecules/signaling proteins include any protein that functions in cellular signaling pathways, whether canonical or the GSN pathways defined herein or capable of being defined using the methods described herein. Transcription factors are a subset of signaling molecules/signaling proteins. Certain combinations of signaling and master transcription factors associate to an enhancer region to influence expression of a gene. Master transcriptin factors direct transcription factors in specific tissues. For example, in blood, GATA transcription factors are master transcription factors that direct TCF7L2 of the Wnt cellular signaling pathway. In the liver, HNF4A is a master transcription factor to direct SMAD in lineage tissues and patterns.

[0114] Transcriptional regulation allows controlling how often a given gene is transcribed. Transcription factors alter the rate at which transcripts are produced by making conditions for transcription initiation more or less favorable. A transcription factor selectively alters a signaling pathway which in turn affects the genes controlled by a GSC. GSCs are transcriptional regulators. In some embodiments, signaling molecules/signaling proteins may be used or targeted in order to elucidate or after the signaling of GSNs of the present invention. For example, the signaling proteins of an ODSC are targeted.

[0115] Table 22 provides a list of signaling molecules/signaling proteins including those which act as transcription factors (TF) and/or chromatin remodeling factors (CR) that function in various cellular signaling pathways.

Lengthy table referenced here
US20210254056A1-20210819-T00001
Please refer to the end of the specification for access instructions.

[0116] The methods described herein may be used to inhibit or activate the expression of one or more signaling molecules/signaling proteins associated with the RSR of the primary neighborhood gene encoded within an IN. The methods may thus after the signaling signature of one or more primary neighborhood genes which are differentially expressed upon treatment with the therapeutic agent compared to an untreated control.

[0117] Various embodiments of the transcripts encoding the signaling proteins of Table 22 contain internal stop codons. These internal stop codons result in translation of multiple polypeptides. In one embodiment, a polypeptide that is a fragment of the signaling proteins taught in Table 22 may have signaling properties.

[0118] As a non-limiting example, the polypeptide may be a fragment such as SEQ ID NO: 32606 and SEQ ID NO: 32607 from SEQ ID NO: 5047. As a non-limiting example, the polypeptide may be a fragment such as SEQ ID NO: 32608 and SEQ ID NO: 32609 from SEQ ID NO: 5048. As a non-limiting example, the polypeptide may be a fragment such as SEQ ID NO: 32610 and SEQ ID NO: 32611 from SEQ ID NO: 5049. As a non-limiting example, the polypeptide may be a fragment such as SEQ ID NO: 32612-32613 from SEQ ID NO: 5050. As a non-limiting example, the polypeptide may be a fragment such as SEQ ID NO: 32614 and SEQ ID NO: 32615 from SEQ ID NO: 5051. As a non-limiting example, the polypeptide may be a fragment such as SEQ ID NO: 32616 and SEQ ID NO: 32617 from SEQ ID NO: 5053. As a non-limiting example, the polypeptide may be a fragment such as SEQ ID NO: 32618 and SEQ ID NO: 32619 from SEQ ID NO: 5054. As a non-limiting example, the polypeptide may be a fragment such as SEQ ID NO: 32620 and SEQ ID NO: 32621 from SEQ ID NO: 5055. As a non-limiting example, the polypeptide may be a fragment such as SEQ ID NO: 32622-32626 from SEQ ID NO: 18908.

[0119] Transcription Factors

[0120] Transcription factors generally regulate gene expression by binding to enhancers and recruiting coactivators and RNA polymerase II to target genes. See, Whyte et al., Cell, 153(2): 307-319, 2013, which is hereby incorporated by reference herein in its entirety. Transcription factors bind “enhancers” to stimulate cell-specific transcriptional program by binding regulatory elements distributed throughout the genome. The context-specific combination of transcription factors and signaling molecules/signaling proteins and the region of the genome to which they are bound may be referred to as a GSC. In certain embodiments of a GSC, the presence of (i) at least 2 signaling proteins, and (ii) a H3K27 chemical modification or independently at least one of a bromodomain-containing protein (Brd), a transcriptional coactivator, and at least two master transcription factors define an ODSC.

[0121] There are about 1800 known transcription factors in the human genome. There are epitopes on the DNA of the chromosomes that provide binding sites for proteins or nucleic acid molecules such as ribosomal RNA complexes. Master transcription factors direct a combination of signaling transcription factors through cell signaling above and DNA below. These characteristics allow for determination of the location of the next GSC. In some embodiments, transcription factors may be used or targeted, to after or elucidate the GSNs of the present invention.

[0122] Master Transcription Factors

[0123] Master transcription factors bind and establish cell-type specific enhancers. Master transcription factors recruit additional signaling proteins and signaling transcription factors, to enhancers to form GSCs. An atlas of candidate master TFs for 233 human cell types and tissues is described in D'Alessio et al., Stem Cell Reports 5, 763-775 (2015), which is hereby incorporated by reference in its entirety. In some embodiments, master transcription factors may be used or targeted, to after or elucidate the GSNs of the present invention.

### Signaling Transcription Factors

[0124] Signaling transcription factors are transcription factors, such as homeoproteins, that travel between cells as they contain protein domains that allow them to do the so. Homeoproteins such as Engrailed, Hoxa5, Hoxb4, Hoxc8, Emx1, Emx2, Otx2 and Pax6 are able to act as signaling transcription factors. The homeoprotein Engrailed possesses internalization and secretion signals that are believed to be present in other homeoproteins as well. This property allows homeoproteins to act as signaling molecules/signaling proteins in addition to being transcription factors. Homeoproteins lack characterized extracellular functions leading to the perception that their paracrine targets are intracellular. The ability of homeoproteins to regulate transcription and, in some cases, translation is most likely to affect paracrine action. See Prochiantz and Joliot, Nature Reviews Molecular Cell Biology, 2003. In some embodiments, signaling transcription factors may be used or targeted, to after or elucidate the GSNs of the present invention.

[0125] FIG. 5 illustrates the components of a GSC; including transcriptional factors, signaling proteins, and chromatin regulators.

### Chromatin Modifications

[0126] Chromatin remodeling is regulated by over a thousand proteins that are associated with histone modification. See, Ji et al., PNAS, 112(12):3841-3846(2015), which is hereby incorporated by reference in its entirety. Chromatin regulators are specific sets of proteins associated with genomic regions marked with modified histones. For example, histones may be modified at certain lysine residues: H3K20me3, H3K27ac, H3K4me1, H3K4me3, H3K79me2, H3K36me3, H3K9me3, and H3K9me2. Certain histone modifications mark regions of the genome that are available for binding by signaling molecules/signaling proteins. For example, previous studies have observed that active enhancer regions include nucleosomes with H3K27ac, and active promoters include nucleosomes with H3K27ac. Further, transcribed genes include nucleosomes with H3K79me2. ChIP-MS may be performed identify chromatin regulator proteins associated with specific histone modification. ChIP-seq with antibodies specific to certain modified histones may also be used to identify regions of the genome that are bound by signaling molecules/signaling proteins. In some embodiments, chromatin modifying enzymes or proteins may be used or targeted, to after or elucidate the GSNs of the present invention.

RNAs Derived from Regulatory Sequence Regions

[0127] Many active regulatory sequence regions (RSRs), such as regions from enhancers, GSCs, and promoters of protein-coding genes, are known to produce non-coding RNAs. Transcripts produced at or in the vicinity of active regulatory sequence regions have been implicated in transcription regulation of nearby genes. Recent reports have demonstrated that enhancer-associated RNAs (eRNAs) are strong indicators of enhancer activity (See Li et al., Nat Rev Genet. 2016 April; 17(4):207-23, which is hereby incorporated by reference in its entirety). Further, non-coding RNAs from active RSRs have been shown to be involved in facilitating the binding of transcription factors to these regions (Sigova et al., Science. 2015 Nov. 20; 350(6263):978-81, which is hereby incorporated by reference in its entirety). This suggests that such RNAs may be important for the assembly of GSCs and regulation of neighborhood genes.

[0128] In some embodiments, RNAs derived from regulatory sequence regions may be an enhancer-associated RNA (eRNA). In some embodiments, RNAs derived from RSRs may be a promoter-associated RNA, including but not limited to, a promoter upstream transcript (PROMPT), a promoter-associated long RNA (PALR), and a promoter-associated small RNA (PASR). In further embodiments, RNAs derived from RSRs may include but are not limited to transcription start sites (TSS)-associated RNAs (TSSa-RNAs), transcription initiation RNAs (tiRNAs), and terminator-associated small RNAs (TASRs).

[0129] In some embodiments, RNAs derived from RSRs may be long non-coding RNAs (IncRNAs) (i.e., >200 nucleotides). In some embodiments, RNAs derived from RSRs may be intermediate non-coding RNAs (i.e., about 50 to 200 nucleotides). In some embodiments, RNAs derived from RSRs may be short non-coding RNAs (i.e., about 20 to 50 nucleotides).

[0130] In some embodiments, eRNAs that may be modulated by methods and compounds described herein may be characterized by one or more of the following features: (1) transcribed from regions with high levels of monomethylation on lysine 4 of histone 3 (H3K4me1) and low levels of trimethylation on lysine 4 of histone 3 (H3K4me3); (2) transcribed from genomic regions with high levels of acetylation on lysine 27 of histone 3 (H3K27ac); (3) transcribed from genomic regions with low levels of trimethylation on lysine 36 of histone 3 (H3K36me3); (4) transcribed from genomic regions enriched for RNA polymerase II (Pol II); (5) transcribed from genomic regions enriched for transcriptional co-regulators, such as the p300 co-activator; (6) transcribed from genomic regions with low density of CpG island; (7) their transcription is initiated from Pol II-binding sites and elongated bidirectionally; (8) evolutionarily conserved DNA sequences encoding eRNAs; (9) short half-life; (10) reduced levels of splicing and polyadenylation, (11) dynamically regulated upon signaling; (12) positively correlated to levels of nearby mRNA expression; (13) extremely high tissue specificity; (14) preferentially nuclear and chromatin-bound; and/or (15) degraded by the exosome.

[0131] Exemplary eRNAs include those described in Djebali et al., Nature. 2012 Sep. 6; 489(7414) (for example, Supplementary data file for FIG. 5a) and Andersson et al., Nature. 2014 Mar. 27; 507(7493):455-461 (for example, Supplementary Tables S3, S12, S13, S15, and 16), which are herein incorporated by reference in their entireties.

[0132] In some embodiments, promoter-associated RNAs that may be modulated by methods or compounds described herein may be characterized by one or more of the following features: (1) transcribed from regions with high levels of H3K4me1 and low to medium levels of H3K4me3; (2) transcribed from genomic regions with high levels of H3K27ac; (3) transcribed from genomic regions with no or low levels of H3K36me3; (4) transcribed from genomic regions enriched for RNA polymerase II (Pol II); (5) transcribed from genomic regions with high density of CpG island; (6) their transcription is initiated from Pol II-binding sites and elongated in the opposite direction from the sense strand (that is, mRNAs) or bidirectionally; (7) short half-life; (8) reduced levels of splicing and polyadenylation; (9) preferentially nuclear and chromatin-bound; and/or (10) degraded by the exosome.

[0133] In some embodiments, methods and compositions described herein may be used to modulate RNAs derived from RSRs to after or elucidate the GSNs of the present invention. In some embodiments, methods and compounds described herein may be used to inhibit the production and/or function of an RNA derived from RSRs. In some embodiments, a hybridizing oligonucleotide such as an siRNA or an antisense oligonucleotide may be used to inhibit the activity of the RNA of interest via RNA interference (RNA), or RNase H-mediated cleavage, or physically block binding of various signaling molecules to the RNA. Exemplary hybridizing oligonucleotide may include those described in U.S. Pat. No. 9,518,261 and WO 2014/040742, which are hereby incorporated by reference in their entireties. The hybridizing oligonucleotide may be provided as a chemically modified or unmodified RNA, DNA, locked nucleic acids (LNA), or a combination of RNA and DNA, a nucleic acid vector encoding the hybridizing oligonucleotide, or a virus carrying such vector. In other embodiments, genome editing tools such as CRISPR/Cas9 may be used to delete specific DNA elements in the regulatory sequence regions that control the transcription of the RNA or degrade the RNA itself. In other embodiments, genome editing tools such as a catalytically inactive CRISPR/Cas9 may be used to bind to specific elements in the regulatory sequence regions and block the transcription of the RNA of interest. In further embodiments, bromodomain and extra-terminal domain (BET) inhibitors (e.g., JQ1, I-BET) may be used to reduce RNA transcription through inhibition of histone acetylation by BET protein Brd4.

[0134] In alternative embodiments, methods and compounds described herein may be used to increase the production and/or function of an RNA derived from regulatory sequence regions. In some embodiments, an exogenous synthetic RNA that mimic the RNA of interest may be introduced into the cell. The synthetic RNA may be provided as an RNA, a nucleic acid vector encoding the RNA, or a virus carrying such vector. In other embodiments, genome editing tools such as CRISPR/Cas9 may be used to tether an exogenous synthetic RNA to specific sites in the RSRs. Such RNA may be fused to the guide RNA of the CRISPR/Cas9 complex.

### Perturbation of Genomic Systems

[0135] Behavior of one or more components of the GSNs, INs, GSCs, and/or ODSC described herein may be altered by contacting the systems containing such features with a perturbation stimulus. Potential stimuli include exogenous biomolecules such as small molecules, antibodies, proteins, peptides, lipids, fats, nucleic acids, and the like or environmental stimuli such as radiation, pH, temperature, ionic strength, sound, light and the like. In some embodiments, these stimuli selectively target an ODSC comprising a nucleic acid sequence SEQ ID NOs: 32,627-71,281. In some embodiments, contacting a genomic system with a perturbation stimulus results in an alteration of the genome architecture, such as gene looping. Alternatively, in some embodiments, the binding profile of the GSC is altered by the perturbation stimuli.

[0136] The present invention serves, not only as a discovery tool for the elucidation of better defined GSNs and consequently a better understanding of biological systems. The present invention allows, for the first time, the ability to properly define gene signaling at the gene level in a manner which allows the prediction, a priori, of potential treatment outcomes, the identification of novel gene targets which may have never been implicated in the pathology of a disease or condition path and/or the resolution, reduction or removal of one or more treatment liabilities associated with new or known drugs such as toxicity, poor haft-life, poor bioavailability, lack of or loss of efficacy or pharmacokinetic or pharmacodynamic risks.

[0137] Treatment of disease by altering gene expression of canonical cellular signaling pathways has been shown to be effective. Even small changes in gene expression may have a significant impact on disease. For example, changes in GSCs affecting signaling pathways related to cell suicide suppression are associated with disease. The present invention, by elucidating a more definitive set of connectivities of the GSNs provides a fine-tuned mechanism to address disease, including genetic diseases. In some embodiments, a method of treating a disease may include modifying a GSC that is involved with a gene associated with that disease. For example, a method of treating a disease may include modifying an ODSC that is involved with a gene associated with that disease. Such genes may not presently be associated with the disease except as is elucidated using the methods described herein.

### Perturbation Stimuli

[0138] Below are provided listings of various stimuli which may be used to perturb GSCs of INs or GSNs. The stimuli herein also may be used to perturb ODSCs. These include small molecules, known drugs, biologicals, gene therapy products, and other products. Any of the compounds listed below can be used to as a perturbation to study changes in gene expression and to define GSNs associated with each stimulus.

[0139] In some embodiments, the perturbation stimulus binds at least a portion of a GSC. In some embodiments, the perturbation stimulus binds at least a portion of an ODSC comprising a nucleic acid sequence of one of SEQ ID NOs: 32,627-71,281. In some embodiments, the perturbation stimulus is formulated as a pharmaceutical composition with a pharmaceutically acceptable excipient.

### Small Molecules

[0140] In certain embodiments, a stimulus that perturbs a GSC is a small molecule drug selected from: (−)-Epigallocatechin 3-gallate, (−)-phenserine, (+)-calanolide A, (R)-folitixorin, (R)-mequitazine, (S)-pantoprazole sodium, [11C]DASB, [11C]-raclopride, [18F] FDG, [18F] HX4, 1-(2-chloroethyl)-3-cyclohexyl-1-nitrosourea, 1,2-decanediol, 11,11-di-deutero-ethyl linoleate, 11C-PBR-28, 123I-iometopane, 124I-CLR-1404, 131I-M1BG, 131-Iodine, 13-cis-retinoic acid, 13C-labeled methacetin, 13N-ammonia, 1400W94, 17 beta-estradiol, 17-alpha hydroxyprogesterone caproate, 17-beta-estradiol, 17beta-estradiol valerate, 17-hydroxysteroid dehydrogenase inhibitors, 18F-EF5, 18F-FDG, 2 L polyethylene glycol, 25-dihydroxy-vitamin D3, 25-OH vitamin D, 2-chloroprocaine, 2-deoxyglucose, 2-Hydroxypropyl-Beta-Cyclodextrin, 2MD, 2-methoxyestradiol, 4-aminopyridine, 4-aminosalicylic acid, 4-FEC, 4-hydroxytamoxifen, 5-aminolevulinic acid, 5-aminosalicylic acid, 5-aracytine, 5-fluorouracil (5-FU), 5-hydroxytryptophan, 5-methoxypsoralen, 6-mercaptopurine, 6-thioguanine, 9-aminocamptothecin, 9-aminofusin, 9-nitrocamptothecin, abacavir, abafungin, abametapir, abediterol, abexinostat, abiraterone, ABT-072, ABT-751, acadesine, acalabrutinib, acamprosate, acamprosate calcium, acarbose, acebilustat, acebutolol, aceclidine, aceclofenac, aceneuramic acid, acenocoumarol, Acetadote, acetaminophen, acetate-free bicarbonate, acetazolamide, acetic acid, acetylcholine, acetylcysteine, acetyl-L-carnitine, acetyl-L-carnitine hydrochloride, acetyl-L-leucine, acetylsalicylic acid, acetyl-salicylic acid, Acetylsalicylic acid (ASA), acetylsalicylic acid lysinate, aciclovir, acipimox, acitretin, aclarubicin, aclidinium, aclidinium bromide, acolbifene, acorafloxacin, acotiamide hydrochloride, ACP-104, acrivastine, ACT-01, ACT-280778, actinomycin D, acumapimod, acyline, adapalene, ADC-3680, Adderall XR, adefovir dipivoxil, ademetionine, adenosine, adinazolam, adipiplon, adomeglivant, adozelesin, adramycin, adrenalin, adrenaline, adriamycin, Advair, Advil, AE-941, afacifenacin fumarate, afatinib, afegostat, afeletecan, afimoxifene, aflibercept, aftobetin, afuresertib, aganepag isopropyl, agatolimod, agave inulin, agomelatine, Aiphagan, ajmaline, aladorian, alagebrium chloride, alanyl-glutamine dipeptide, albaconazole, albendazole, albiglutide, albitiazolium bromide, albumin, albuterol, albuterol sulphate, albuterpenoids, alcaftadine, alcipotriol/betamethasone, aldesleukin, aldoxorubicin, alectinib, aleglitazar, alemtuzumab, alendronate, alendronate sodium, alendronic acid, Alequel, Aleve, alphacalcidol, alfentanil, alfuzosin, algeldrate/magnesium oxide, Alimta, alisertib, aliskiren, alisporivir, alitretinoin, alizapride, allantoin, allisartan isoproxil, allopregnanolone, allopurinol, all-trans retinoic acid, almorexant, almotriptan, Alodan, alogliptin benzoate, alosetron, alovudine, alpelisib, alpha lipoic acid, alpha tocopherol, alpha-1 antitrypsin, alpha-cyclodextrin, alpha-glucosidase inhibitor, alpha-interferon, alpha-lipoic acid, alpha-tocopherol, alpha-tocopherol acetate, alpha-trichosanthin, alprazolam, alprostadil, alprostadil alphadex, ALS-08, altinicline, Altropane, aluminium MgS, aluminum hydroxide, alvespimycin hydrochloride, alvimopan, alvocidib, amantadine, amantadine hydrochloride, ambrisentan, ambroxol, ambroxol hydrochloride, AMD-070, amdoxovir, amelubant, amenamevir, Ametop, amfetamine, amibegron, amifampridine phosphate, amifostine, amikacin, amiloride, amiloride hydrochloride, amino acid, Aminocaproic Acid, aminoglutethimide, aminoguanidine, aminolevulinic acid, aminolevulinic acid hydrochloride, aminophylline, aminopterin, amiodarone, amiprilose, amiselimod, amisulpride, amitifadine hydrochloride, amitriptyline, Amitriptyline hydrochloride, amlexanox, amlodipine, amlodipine besilate, amlodipine besylate, amlodipine camsylate, amlodipine maleate, ammonium lactate, amnion, amodiaquine, amonafide dihydrochloride, amonafide L-malate, amorolfine, amoxapine, amoxicillin, amoxicillin clavulanate, amoxicillin MR, amoxicillin/clavulanate, amoxicillin-clavulanic acid, amoxycillin, amphetamine, amphetamine aspartate, amphetamine sulphate, amphotericin, amphotericin B, ampicillin, ampicillin sodium, ampicillin/flucloxacillin, amprenavir, amrubicin, amsacrine, amsilarotene, AN-2898, AN-9, anacetrapib, anagliptin, anagrelide, anamorelin, anastrozole, anatibant, ancriviroc, ancrod, androgen, Androxy, anecortave, angiotensin converting enzyme inhibitor, angiotensin I, angiotensin II, Angiozyme, anidulafungin, aniracetam, annamycin, antazoline, anthocyanin, anthracycline, anti-emetic, antihistamine, antilymphocyte globulin, antineoplaston A-10, antineoplaston A10-I, antineoplaston AS2-1, Antioxidant Vitamins, antipsychotic, antiretroviral drugs, antithymocyte globulin, anti-thymocyte globulin, apabet, apadenoson, apaziquone, apelin, apheresis, apilimod, apimostinel, apitolisib, apixaban, aplaviroc, aplindore, apomorphine, Apovir, apratastat, apremilast, aprepitant, apricitabine, apricoxib, aprotinin, AR-623, Ara-C, arachidonic acid, aracytine, Aralast, aramchol, arasertaconazole, arbaclofen, arbaclofen placarbil, arbekacin sulphate, arbutin, ARC-100, arformoterol, argatoroban, argatroban, arginine, arginine vasopressin, ARH-1, arhalofenate, arimoclomol, aripiprazole, armodafinil, arogliptin, arsenic trioxide, artefenomel mesylate, artemether, artemether-lumefantrine combination, artemisinin, artemisone, artemotil, artenimol, arterolane, arterolane maleate, artesunate, artesunate+mefloquine, artesunate-amodiaquine, articaine, articaine hydrochloride, arundic acid, arzoxifene, asapiprant, ASCJ-9, ascorbate, ascorbic acid, asenapine, asimadoline, ASM-024, asoprisnil, aspirin, astaxanthin, astodrimer, asunaprevir, AT-101, ataciguat, atagabalin, ataluren, atamestane, atazanavir, atazanavir sulphate, atazanavilritonavir, atecegatran fexenetil, Atelvia, Atenativ, atenolol, atevirdine, ATHX-105, atiprimod, atiratecan, Ativan, atomoxetine, atopaxar, atorvastatin, atovaquone, atracurium, atracurium besylate, atrasentan, atreleuton, Atripla, atropine, auranofin, auriclosene, AVAC, avacopan, avagacestat, avanafil, avasimibe, avatrombopag, AVE-0657, AVE-2268, avibactam sodium, Avil, avobenzone, avoralstat, avosentan, AWD-12-281, axelopran, Axiron, axitinib, axomadol, azacitidine, azathioprine, AZD-1775, AZD-4547, AZD-9668, Azedra, azelaic acid, azelastine, azelastine hydrochloride, azeliragon, azelnidipine, azidothimidine, azilsartan, azilsartan medoxomil potassium, azimilide, azithromycin, azithromycin dihydrate, azosemide, aztreonam, aztreonam lysine, bacitracin, baclofen, bafetinib, baicalin, balaglitazone, balicatib, balsalazide, bambuterol, banoxantrone, barasertib, bardoxolone methyl, baricitinib, barnidipine, basiliximab, basimglurant, basmisanil, batabulin, batefenterol succinate, bavisant, bazedoxifene, BCG vaccine, BCNU, becatecarin, beclabuvir, beclometasone, beclometasone dipropionate, beclomethasone, beclomethasone dipropionate, becocalcidiol, Beconase, bedaquiline, bedoradrine, bedrocon, belinostat, Belladonna, belnacasan, beloranib, belotecan, bempedoic acid, benazepril, bendamustine, bendroflumethiazide, beneh, benfotiamine, benidipine, benserazide, bentamapimod, benzalkonium, benzalkonium chloride, benzathine penicillin, benzbromarone, benznidazole, benzocaine, benzodiazepine, benzophenone-3, benzoyl peroxide, benztropine, benzydamine hydrochloride, benzylic alcohol, benzylpenicillin, benzylpiperazine, Bepantol, bepotastine, beractant, beraprost sodium, berberine, berubicin, besifloxacin, besifovir, beta erythropoietin, beta-1,3/1,6-glucan, beta-blocker, beta-blockers, beta-carotene, beta-cryptoxanthin, betadine, Betafectin, betahistine, betaine, Betaine anhydrous, beta-lactamase inhibitor, Betamarc, betamethasone, betamethasone dipropionate, betamethasone mousse, betamethasone valerate, betamethasone dipropionate, beta-tricalcium phosphate bone substitute, betaxolol, betaxolol hydrochloride, bethanechol, bethanechol chloride, betrixaban, betulinic acid, bevacizumab, bevenopran, bevirimat, bexagliflozin, bexarotene, bezafibrate, BF-derm1, BGP-15, BI-54903, biapenem, bicalutamide, bicifadine, bifeprunox, Bifidobacterium, Bifidobacterium bifidum, Bifidobacterium infantis 35624, bifonazole, biguanide, BIIB-021, bilastine, BILR-355-BS, bimatoprost, bimoclomol, bimosiamose, bindarit, binimetinib, binodenoson, Bio-25, biotin, biperiden, biphentin, birabresib dihydrate, biricodar, birinapant, bisacodyl, biskalcitrate potassium, bismuth, bismuth citrate, bismuth potassium citrate, bismuth sodium tartrate, bismuth subcitrate, bismuth subsalicylate, bisoprolol, bisoprolol fumarate, bisphosphate, bitopertin, bixalomer, bleomycin, bleomycin sulphate, blonanserin, BMP-7, BNC-105P, boceprevir, boric acid, boron-anticancers, bortezomib, bosentan, bosutinib, bradanicline, bradykinin, Bramitob, branched chain amino acid, brecanavir, brexpiprazole, Bricanyl, Bricasol, brimonidine, brimonidine tartrate, Brinavess, brinzolamide, brivanib alaninate, brivaracetam, brivudine, brolucizumab, bromfenac, bromfenac sodium, bromhexine, bromocriptine, brompheniramine, bronopol, brostallicin, brotizolam, bryostatin-1, BTI-320, BTL-TML-HSV, BTS-67582, bucindolol, budesonide, budesonide/formoterol, budesonine, budiodarone, bumetanide, bunazosin, buparlisib, bupivacaine, bupivacaine hydrochloride, bupivacaine with fentanyl, bupivacaine-clonidine, buprenorphine, buprenorphine hemiadipate hydrochloride, buprenorphine hydrochloride, buprenorphine/naloxone, bupropion, bupropion hydrochloride, bupropion SR, burapitant, burixafor, buserelin, buserelin acetate, buspirone, buspirone hydrochloride, busulfan, Busulfex, butalbital, butenafine, butoconazole, butoconazole nitrate, butorphanol, butorphanol tartrate, C5a, Cabaseril, cabazitaxel, cabergoline, cabotegravir, cabozantinib S-malate, Cacit D3, cadazolid, CAF regimen, caffeic acid, caffeine, caffeine citrate, caffeinol, Calcichew D3 Forte, calcipotriol, calcipotriol/betamethasone, calcitriol, calcium, calcium acetate, calcium ascorbate, calcium carbonate, Calcium chloride, calcium chloride dihydrate, calcium citrate, calcium dobesilate, calcium fluoride, calcium folinate, calcium glucarate, calcium gluconate, calcium hydrogenphosphate, calcium L-aspartate, calcium levofolinate, calcium phosphate, calcium polycarbophil, Calcium sodium phosphosilicate, Calcium supplements, calcium and vitamin D, calcium leucovorin, caldaret, calphactant, camicinal, camobucol, camptothecin, canagliflozin, candesartan, candesartan cilexetil, canertinib, canfosfamide, cangrelor, cannabidiol, Cannabidiol (CBD), cannabidivarin, cantharidin, capadenoson, capecitabine, capmatinib, Capolac, capravirine, Capros, capsaicin, captopril, carbamazepine, carbenoxolone, carbetimer, carbetocin, carbidopa, carbocisteine, carbocysteine, Carbogen, carbon [14C] oxaliplatin, carbon dioxide, carbon monoxide, carbondioxide, carboplatin, Carboxymethylcellulose sodium, cardidopa, cardonutrient, carfilzomib, carglumic acid, cariporide, cariprazine, carisbamate, carisoprodol, carmegliptin, carmoterol, carmustine, carnitine, carotegrast methyl, carteolol, carteolol hydrochloride, carvedilol, carvedilol phosphate, CA5AD, casein, casopitant, caspofungin, catechin, CBT-1, CCPI, cebranopadol, cediranib, cefaclor, cefadroxil, cefalexin, cefazolin, cefazolin sodium, cefdinir, cefditoren pivoxil, cefepime, cefilavancin, cefixime, cefmetazole, cefoperazone, cefotaxime, cefotetan, cefoxitin, cefozopran, cefpirome, cefpodoxime, cefprozil, ceftaroline, ceftaroline fosamil, ceftazidime, ceftibuten, ceftobiprole medocaril, ceftolozane sulphate, ceftriaxone, cefuroxime, celecoxib, Celestone, celgosivir, celiprolol, celivarone, Cenestin, cenicriviroc, cenobamate, censavudine, centanafadine, Centrum forte, Centrum Silver, cephalexin, cephalosporin, ceralifimod, ceramide, ceritinib, cerium nitrate, cerivastatin, cerlapirdine, certoparin, cetaphil, cethromycin, cetilistat, cetirizine, cetylpyridinium chloride, cevimeline, chenodeoxycholic acid, CHF-1535, CHF-5992, chitosan, chitosan-thiomer, chlorambucil, chloramphenicol, chlordiazepoxide, chlorhexidin, chlorhexidine, chlorhexidine digluconate, chlorhexidine gluconate, chlorhexidine-alcohol, chlorhydrate, chlormadinone acetate, chloroprocaine, chloroquine, chloroquine diphosphate, chloroquine phosphate, chlorpheniramine, chlorpheniramine maleate, chlorproguanil, chlorpromazine, chlortalidone, chlorthalidone, chlorzoxazone, cholecalciferol, cholecystokinin-8, cholesterol absorption inhibitors, cholestyramine, cholic acid, choline, choline alfoscerate, choline diepalrestat, choline fenofibrate, choline magnesium trisalicylate, chondroitin, chondroitin sulphate, CHP-HER2, Chromium cobalt, Chromium Picolinate, CHS-131, CHVP-interferon, ciclesonide, cicletanine, ciclopirox, ciclopirox olamine, ciclosporin, ciclosporine A, cidofovir, cilansetron, cilastatin, cilazapril, cilnidipine, cilomilast, cilostazol, ciluprevir, cimetidine, cimicoxib, cinacalcet, cinaciguat, cindunistat hydrochloride maleate, cinhyaluronate sodium, cinitapride, cinitapride tartrate, cinnamaldehyde, cinnarizine, cipargamin, ciprofibrate, ciprofloxacin, ciprofloxacin hydrochloride, ciraparantag, Cisapride, cisatracurium, cisatracurium besilate, cisplatin, cisplatin liposomal, cisplatinum, citalopram, citalopram hydrobromide, Citanest, citicoline, citrate, citrate fentanyl, citric acid, citric acid monohydrate, citrulline, CK-2017357, cladribine, Clarinex, clarithromycin, clavulanate, clavulanate potassium, clavulanic acid, clazosentan, clebopride, clemastine, clemastine fumarate, clenbuterol, clevidipine, clevudine, clindamicin, clindamycin, clindamycin phosphate, clindamycin/benzoyl peroxide, Clinisol, clioquinol, clobazam, clobetasol, clobetasol propionate, Clobex, clodronic acid, clofarabine, clofazimine, clomethiazole edisylate, clomifen, clomifene, clomifene citrate, clomiphene, clomiphene citrate, clomipramine, clonazepam, clonidine, clonidine hydrochloride, clopidogrel, clopidogrel hydrogen sulphate, clopidogrel napadisilate, Cloratadd-D, clorazepate, Clostridium butyricum MIYAIRI 588, clotrimazole, cloxacillin, clozapine, coamoxiclav, cobalamin, cobamamide, cobicistat, cobimetinib, cobiprostone, cocaine, codeine, codeine phosphate, coenzyme Q10, Coeruleus, cogentin, Cogentus, colchicine, colcine, colecalciferol, colecalciferol D3, coleneuramide, colesevelam, colestilan, colestipol, colfosceril palmitate, colistimethate, colistimethate sodium, colistin, colistin sulphate, colistineb, colloidal bismuth, colloidal bismuth tartrate, coloxyl, coluracetam, combretastatin, Comp-01, Comp-02, Comp-03, Comp-04, conivaptan, conivaptan hydrochloride, conjugated estrogen, conjugated estrogens, controlled-release carvedilol, copanlisib, copper, copper histidine, coQ10, cortexolone 17alpha-propionate, corticosteroid, cortisol, cortivazol, cositecan, CosmoFer, cotrifazid, cotrimoxazol, cotrimoxazole, co-trimoxazole, COX-inhibitor, CPI-613, CRAd 3/5-delta, creatine, creatine ethyl ester, creatine monohydrate, crenolanib, crisaborole, crizotinib, CRM-197, crobenetine, crofelemer, cromoglicate, cromoglicic acid, cromolyn sodium, Crsytalloids, C-Tb, CTO, CUDC-305, Curcuma aeruginosa, curcumin, curcuminoids, curdlan sulphate, cutamesine dihydrochloride, CX-516, cyanocobalamin, cyclizine, cyclizine lactate, cyclobenzaprine, cyclobenzaprine hydrochloride, cyclodextrin, cyclodextrin-combined diclofenac, Cyclogest, cyclopentolate, cyclophophamide, cyclophosphamide, cyclophosphamide monohydrate, cyclophosphan, cycloserine, cyclosporin, cyclosporine, cyclosporine A, cyclosporine microemulsion, cyclphosphamide, cyproheptadine, cyproterane acetate, cyproteron, cyproterone, cyproterone acetate, cysteamine, Cysteamine hydrochloride, cysteine, cysteine hydrochloride monohydrate, cytarabine, cytarabine arabinoside, cytarabine-asparagine conjugate, cytophosphan, Cytosin-Arabinosid, cytosine arabinoside, cytoxan, Cytozar, D3 vitamine, DA-9601, dabigatran etexilate, dabrafenib, dacarbazine, daclatasvir, daclizumab, dacomitinib, dactinomycin, dactolisib, daglutril, daidzein, dalbavancin, dalcetrapib, dalfopristin, dalteparin sodium, D-amphetamine, danazol, danirixin, danoprevir, dantrolene, dantrolene sodium, danusertib, dapaconazole, dapagliflozin, dapagliflozin propanediol, dapansutrile, dapivirine, daporinad, dapoxetine, dapsone, dapsone gel, darapladib, darifenacin, darinaparsin, darolutamide, darotropium bromide, darunavir, darunavir/ritonavir, darusentan, dasabuvir, dasatinib, dasotraline, daunorubicin, daunorubicin hydrochloride, daunorubicine, D-cycloserine, dDAVP, DDP, DE-104, DE-110, DE-112, Deanxit, Debio-1450, Debio-1452, decadron, decarbazine, decernotinib, decitabine, decoglurant, Decuprate, defactinib, deferasirox, deferiprone, deferitazole, deferoxamine, deferoxamine mesylate, deflazacort, dehydroepiandrosterone, delafloxacin, delamanid, delanzomib, delapril, delapril hydrochloride, delavirdine, Delazine, deleobuvir, deligoparin sodium, delorazepam, delta-8-THC, delta-9-tetrahydrocannabinol, denagliptin, denufosol tetrasodium, Depacon, Depade, depo-medroxyprogesterone, depomedroxyprogesterone acetate, depomethylprednisolone, depotestosterone, DER-45-EV, derenofylline, dersalazine sodium, desferrioxamine, desflurane, desipramine, desloratadine, desmopressin, desmopressin acetate, desogestrel, desonide, desote fumarate, desoximetasone, desvenlafaxine, Detox-B adjuvant, deutetrabenazine, dexamethasone, dexamethasone acetate, dexamethasone cipecilate, dexamethasone diphosphate, dexamethasone phosphate, dexamethasone sodium phosphate, dexamfetamine, dexanabinol, dexchlorpheniramine, dexedrine, dexelvucitabine, dexfenfluramine, dexibuprofen, Dexid, dexisometheptene mucate, dexketoprofen, dexketoprofen trometamol, dexlansoprazole, dexlipotam, dexloxiglumide, dexmecamylamine, dexmedetomidine, dexmethylphenidate, dexniguldipine, dexpanthenol, dexpramipexole, dexrazoxane, dexrazoxane hydrochloride, dextofisopam, dextran, dextroamphetamine, dextroamphetamine saccharate, dextroamphetamine sulphate, dextromethorphan, dextromethorphan hydrobromide, dextropropoxyphene, dextropropoxyphene hydrochloride, dextrose, dexverapamil, dezocine, DHEA, diacerein, diacetylmorphine, Dialysate calcium, Diamel, diammindichloridoplatin, diamorphine, diamorphine hydrochloride, dianhydrogalactitol, dianicline, Diao Xin Xue Kang, diazemuls, diazepam, diazepam autoinjector, diazoxide, diazoxide choline, dibasic dihydrate sodium phosphate, dibasic sodium phosphate, dibekacin, dichlorphenamide, Diclazuril, diclofenac, diclofenac diethylamine, diclofenac potassium, diclofenac sodium, dicloxacillin, didanosine, dienogest, diethylcarbamazine, diethylnorspermine, diethylpropion, diethylstilbestrol, diflomotecan, diflunisal, difluprednate, digitoxin, digoxin, dihematoporphyrin, dihomo gamma-linolenic acid, dihydralazine, dihydroartemisinin, dihydroartemisinin-piperaquine, dihydrocodeine, dihydroergotamine, dihydroergotamine mesylate, di hydroxy vitamin D3, diiodothyropropionic acid and its analogs, diiphenhydramine, dilaudid, dilmapimod, diltiazem, diltiazem hydrochloride, dimenhidrinate, dimenhydrinate, dimesna, dimethindene, dimethindene maleate, dimethyl fumarate, dimethylfumarate, dimiracetam, dinoprostone, diosmin, diphencyprone, diphenhydramine, diphenylcyclopropenone, dipirone, dipraglurant-IR, dipyradimole, dipyridamole, dipyrone, diquafosol sodium, diquafosol tetrasodium, disopyramide, Dispase II, disufenton sodium, disulfiram, dithranol, ditiocarb sodium, DLBS-1033, DLBS-1425, D-methadone, DNE3, dobutamine, docetaxel, dociparstat, doconexent, doconexent ethyl ester, docosahexaenoic acid [DHA], docosahexaenoic acid monoglycerides, docosanol, docusate, docusate sodium, dofetilide, dolasetron, dolastatin-10, dologesic, dolutegravir, domperidone, donepezil, donepezil hydrochloride, donu, dopamine, dopexamine, doramapimod, doravirine, doripenem, dorzolamide, dorzolamide hydrochloride, dorzolamide hydrochloride+timolol maleate, dothiepin, dovitinib, doxapram, doxazosin, doxazosin mesylate, doxepin, doxepin hydrochloride, doxercalciferol, doxifluridine, Doxil, doxophylline, doxorubicin, doxorubicin etarfolatide, doxorubicin HCl liposome, doxorubicin hydrochloride, doxorubicin hydrochloride liposome, doxycycline, doxycycline hyclate, doxylamine, doxylamine succinate, D-penicillamine, DPP-IV inhibitors, DPS-102, draflazine, drinabant, dronabinol, dronedarone, droperidol, dropropizine, drospirenone, drotaverine, droxidopa, D-tagatose, D-TRANS fentanyl, Duac, dual-release hydrocortisone, dulaglutide, Dulcolax, duloxetine, Duracain, duramorph, Durolane, dutasteride, dutogliptin, duvelisib, duvoglustat, D-xylose, dydrogesterone, dyhydroprogesterone, DZ-1, E coli Nissle, E-7016, E-7820, ebastine, ebselen, EC-17, ecabet, ecabet sodium, Echinacea, econazole nitrate, ecopipam, ecosprin, ecraprost, Ecural, edaglitazone, edaravone, edetate calcium disodium, edivoxetine, edonerpic maleate, edotecarin, edoxaban, EES0000645/A, efaproxiral, efatutazone, efavirenz, efinaconazole, eflornithine, efonidipine hydrochloride, EGb-761, EGCG, eicosapentaenoic acid, eicosapentanoeic acid, elacestrant, elacridar, elacytarabine, elafibranor, elagolix, elamipretide, elbasvir, elbion, eldecalcitol, eleclazine, elesclomol sodium, eletriptan, eliglustat tartrate, elinogrel, eliprodil, ELND-005, elobixibat, elocalcitol, Elomet, Elosalic, elsamitrucin, eltoprazine, eltrombopag, elubrixin, eluxadoline dihydrochloride, elvitegravir, elvorin, elvucitabine, elzasonan, Emdogain, emedastine, emepepimut-S, emicerfont, emivirine, emixustat, empagliflozin, emricasan, emtricitabine, enalapril, enalapril maleate, enalaprilat, enasidenib, encaleret sulphate, enclomifene citrate, enclomiphene, encorafenib, endocannabinoid palmitoylethanolamide, endonase, endotoxin, endoxan, enecadin, enflurane, enfuvirtide, eniluracil, ENMD-2076, enobosarm, enocitabine, enoxaparin sodium, enoximone, entacapone, entecavir, entecavir maleate, enteric-coated mycophenolate sodium, enteric-coated tegafur-uracil, Enteroaggregative E coli, entinostat, entonox, enzalutamide, enzastaurin, epacadostat, Epadel, epalrestat, eperisone, eperisone hydrochloride, epetirimod, epetraborole, ephedrine, Epiceram, epidoxirubicin, epidoxorubicin, epidural/paravertebral analgesia, epigallocatechin gallate, epigallocatechin-3-gallate, epigallocatechin-gallate, Epiggallocatechin, epinastine, epinastine hydrochloride, epinephrine, epirubicin, epirubicin hydrochloride, Episalvan, eplerenone, eplivanserin, epoprostenol, Eppikajutsutou, eprodisate, eprosartan, eprotirome, epsilon-aminocaproic acid, eptastigmine, eptifibatide, Equine antithymocyte immunoglobulin, Equisetum arvense, eravacycline, erdosteine, Eremostachys laciniata, ergocalciferol, ergotamine, eribaxaban, eribulin mesylate, Eritex, eritoran, erlotinib, ertapenem, erteberel, ertugliflozin, erythromycin, erythromycin lactobionate, erythropoetin, erythropoietin beta, ESAT-6CFP10, esaxerenone, Escherichia coli endotoxin, escitalopram, esflurbiprofen, Eskalith, esketamine, esketamine hydrochloride, eslicarbazepine acetate, Esmeron, esmirtazapine, esmolol, esmolol hydrochloride, esomeprazole, esoxybutynin, esreboxetine, estazolam, estetrol, estradiol, estradiol acetate, estradiol cypionate, estradiol valerate, estradiol/norethindrone acetate, estramustine, estramustine phosphate, estramustine phosphate sodium, Estratest, estriol, estriol E3, estrodiol, estrogen, estrogens, eszopiclone, etacrynic acid, etalocib, Etalpha, etanercept biosimilar, etazolate, Ethacrynic acid, ethambutol, ethambutol hydrochloride, ethanol, ethinyl estradiol, ethinyl estradiol/levonorgestrel, ethinylestradiol, ethiodized oil, ethosuximide, ethyl chloride, ethyl eicosapentaenoate, ethyl hydrogen fumarate calcium, ethyl hydrogen fumarate magnesium, ethyl hydrogen fumarate zinc, ethylenediaminetetraacetate, ethylhexyl triazone, ethynylcytidine, etidronic acid, etilefrine, etodolac, etomidate, etomidate Lipuro, etomoxir, etonogestrel, etonox, etoposide, etoposide phosphate, etoricoxib, etravirine, EV-06, evacetrapib, evatanepag, everolimus, eviprostat, evofosfamide, evogliptin, exatecan, exemestane, exenatide, exeporfinium chloride, exisulind, ezatiostat, ezetimibe, ezetimibe/atorvastatin, F-0434, F0-M0, F0-M1700, F160-M0, F160-M1000, F160-M1700, F80-M1000, F80-M1700, FA, facinicline hydrochloride, faldaprevir, famciclovir, famitinib L-malate, famotidine, fampridine, Fangji, farampator, farglitazar, faropenem, faropenem medoxomil, fasiglifam hemihydrate, fasitibant chloride, fasudil, favipiravir, FBG-18, FBP peptides, FE[50]C, FE[75]C, Fe-58, febuxostat, fedovapagon, fedratinib, felbamate, felbinac, felodipine, fenatnyl, fenobam, fenofibrate, fenoldopam, fenoterol, fenoterol prednisone, fenretinide, fentanyl, fentanyl citrate, fermagate, ferric carboxymaltose, ferric citrate, ferric maltol, ferric pyrophosphate, Ferripel-3, ferroquine, ferrous fumarate, ferrous sulphate, ferumoxtran-10, ferumoxytol, FeSO4, fesoterodine fumarate, fevipiprant, fexinidazole, fexofenadine, fiboflapon, fibrinogen, fidaxomicin, filanesib, filgotinib, filgrastim, filibuvir, filorexant, fimaporfin, fimasartan, finafloxacin, finafloxacin hydrochloride, finasteride, finerenone, fingolimod, Fioricet, fipamezole, fish oil (eicosapentaenoic acid [EPA] plus docosahexaenoic acid [DHA]), Fisiogel, fispemifene, Flagyl, Flavan-3-ol, flavanone, flavoxate, flecainide, flibanserin, flomoxef, flomoxef sodium, flopristin, florbenazine, florbetapir, flortaucipir F 18, flourinic acid, flovagatran, floxuridine, fluciclatide F 18, flucloxacillin, fluconazole, flucytosine, fludarabine, fludeoxyglucose, fludeoxyglucose F 18, fludrocortisone, flumazenil, flunarizine, flunisolide, fluocinolone acetonide, fluocinonide, fluorescein, fluorometholone, fluorometholone acetate, fluoropyrimidine, fluoroquinolones, fluorouracil, fluoxetine, fluoxetine hydrochloride, flupenthixol, flupentixol, fluphenazine, flupirtine, flurbiprofen, flurbiprofen axetil, flurbiprofen sodium, flutamide, fluticasone, fluticasone furoate, fluticasone propionate, flutrimazole, fluvastatin, fluvoxamine, FM-VP4, folacin, folate, folate/iron, FOLFIRI, FOLFOX4, FOLFOXIRI, folic acid, folinate, folinic acid, folitixorin calcium, follitropin beta, fonadelpar, fondaparinux sodium, Foradil, foretinib, formoterol, formoterol fumarate, forodesine, foropafant, fosalvudine tidoxil, fosamprenavir, fosamprenavir calcium, fosaprepitant, fosbretabulin, fosbretabulin disodium, foscarnet, foscarnet sodium, fosdagrocorat, fosdevirine, fosfluridine tidoxil, fosfomycin, fosfomycin trometamol, fosfructose, fosinopril, fosmidomycin, fosphenytoin, fospropofol, fostamatinib, fostemsavir tromethamine, Fostimone, Fostrap, fotemustine, fozivudine tidoxil, freselestat, Fresubin, frovatriptan, fructose, fructose-1,6-diphosphate, fruquintinib, frusemide, fucoidan, fulvestrant, fumarate, funapide, furaprevir, furazolidone, furosemide, fusidate sodium, fusidic acid, Fuzheng Huayu, gabapentin, gabapentin enacarbil, gaboxadol, gadobenic acid, gadobutrol, gadofosveset, gadolinium, gadopentetate dimeglumine, gadoterate meglumine, gadoversetamide, gadoxetate disodium, Galactooligosaccharide, Galacto-oligosaccharides, galantamine, galantamine CR, galeterone, gallium maltolate, gallium nitrate, gallopamil, gambogic acid, Gamma-Linolenic Acid, gamma-tocopherol, ganaxolone, ganciclovir, ganciclovir phosphonate, ganetespib, ganirelix acetate, ganstigmine, garenoxacin, garlic, gatifloxacin, GCS-100, G-CSF, gedatolisib, gefitinib, gelatin, Gelofusine, Gelpart, gemcabene, gemcitabine, gemcitabine elaidate, gemcitabine prodrug, gemfibrozil, gemifloxacin, gemigliptin, gemigliptin tartaric acid, Gemzar, Genaera, genistein, genistein+decitabine, gentamicin, gentamicin sulphate, gentamycin, gepirone, gepotidacin, gestodene, gestodone, gestrinone, gilteritinib, gimatecan, gimeracil, Ginkgo biloba, ginkgolides meglumine, ginsenoside Rg3, ginsenoside-Rd, giripladib, gisadenafil, givinostat, GKT-831, glatiramer acetate, glecaprevir, glesatinib glycolate, glibenclamide, gliclazide, glimepiride, glinide, glipizide, glitazone, GLP-1 analog, glucagon-like peptide-1, glucocorticoids, glucocorticosteroid, glucosamine, glucosamine hydrochloride, glucose, glufosfamide, glutamic acid, glutamine, glutathione, glycerin, glycerol, glycerol phenylbutyrate, glycoprotein IIb/IIIa inhibitor, glycopyrolate, glycopyrrolate, glycopyrronium bromide, glycopyrronium tosylate, glycopyrroniumbromide, glycyrrhizin, glyminox, GM1, GM-CT-01, GnRH antagonist, gold sodium thiosulphate, golotimod, golvatinib tartrate, gonadotopin, gonadotropin, gonadotropins, GoodBelly probiotic, goserelin acetate, goshajinkigan, gosogliptin, gp100, GPO-Vir Z30, granisetron, granotapide, grazoprevir, grepafloxacin, griseofulvin, GR-MD-02, GSK-2269557, GSK-2330672, GSK-2339345, guaifenesin, guanethidine, guanfacine, Guizhi fulings, gusperimus trihydrochloride, GWP-42004, gycerol, Gynostemma pentapyllum, H2 blockers, haldol, halofuginone, haloperidol, haloperidol decanoate, halothane, Hangeshashin-to, HBW, HE-3286, Healon, Helico DR, heliox, heme arginate, hemin, hemoximer, heparin, heparin sodium, Her-2/neu, heroin, hexachlorophene, hexaminolevulinate hydrochloride, Hextend, HF-0220, Hibiscus sabdariffa, hidrotalcid, himantane, histamine dihydrochloride, homatropine, honey, hpFSH, HPP-404, HQK-1004, huachansu, Huai Qi Huang, human chorionic gonadotrophin, huperzine A, Hyabest J, hyaluronan, hyaluronate sodium, hyaluronic acid, hyaluronic acid hydrogel, hydralazine, hydrochloric acid, hydrochlorothiazide, hydrochlorothiazide tablet, hydrochlorthiazide, hydrocodone, hydrocodone bitartrate, hydrocodone/acetaminophen, hydrocortisone, hydrocortisone sodium succinate, hydrocortisone-17-butyrate, hydrocodone, hydrogel, hydrogen peroxide, hydromorphine, hydromorphone, hydromorphone hydrochloride, hydroquinidine, hydroquinone, hydroxocobalamin, hydroxycarbamide, hydroxychloroquine, hydroxydaunorubicin, hydroxyethyl starch, hydroxyethylstarch solution, Hydroxyl-propyl-methyl cellulose powder, hydroxymethylbutyrate, hydroxynortriptyline, hydroxyprogesterone caproate, hydroxypropyl cellulose, hydroxytryptophan, hydroxyurea, hydroxyzine, hylastan, Hylenex recombinant, hyoscine butylbromide, hyoscine hydrobromide, hyoscine N-butylbromide, hyoscyamine sulphate, hyperbaric bupivacaine, hypericin, Hypericum perforatum, hyperosmolar dextrose, hypertonic saline, hypromellose, ibandronate, ibandronic acid, iberogast, iberogast N, IBH-B, ibipinabant, ibodutant, ibopamine, ibrutinib, ibudilast, ibuprofen, ibutamoren mesylate, ibuterol, ibutilide, icaritin, icodextrin, icofungipen, icosabutate, icosapent, icosapent ethyl, icosapent ethyl ester, icotinib hydrochloride, idalopirdine, idarubicin, idazoxan, IdB-1016, idebenone, idelalisib, idoxuridine, idrabiotaparinux sodium, idraparinux sodium, idronoxil, iferanserin, ifetroban, ifetroban sodium, IFN-alpha2b, Ifosfamide, iguratimod, IHBG-10, IL-2, ilaprazole, ilepatril, iloperidone, iloprost, iloprost betadex clathrate, imagabalin, imatinib, ImCOOH, imeglimin, imexon, imidafenacin, imidapril, imiglitazar, imipenem, imipramine, imiquimod, imisopasem manganese, IMO-2125, implitapide, incyclinide, indacaterol, indacaterol acetate, indacaterol maleate, indacaterol xinafoate, indantadol, indapamide, indapamide SR, indeglitazar, indinavir, Indinol Forto, indiplon, indisetron, indisulam, Indium In 111 anti-CD66 monoclonal antibody BW250/183, indocyanine green, indometacin, indomethacin, indoramin, industrial nitric oxide, inecalcitol, INF-alpha, infigratinib, infliximab, lngavirin, ingenol mebutate, inhaled sodium nitrite, iniparib, injectable progestin, inosine, inosine pranobex, inositol, INS-1, insulin, insulin glargine, insulin NPH, intepirdine, interferon, interferon alpha, interferon alpha-2a, interferon alpha-2b, interferon beta-1a, interferon beta1b, Interleukin, interleukin-2, interleukin-6, intetumumab, Intracel, intranasal ketamine, intravenous immunoglobulin, intravenous minocycline, iobenguane I-131, iodine, iodine I 131 ethiodized oil, iodine I 131 monoclonal antibody BC8, iodine tincture, iodixanol, iohexol, iopamidol, iopromide, ipragliflozin, ipratropium, ipratropium bromide, IPX-159, IPX-231, irbesartan, irinotecan, irinotecan hydrochloride, irinotecan sucrosofate, irofulven, iron, iron folic acid, iron hydroxide polymaltose, iron oxide, iron proteinsuccinylate, iron solution, iron sucrose, iron supplements, irosustat, irsogladine maleate, IRX-5183, ISA-51, isavuconazonium chloride/sulphate, Iscar, iseganan, isobide, isocaloric diet, isocarboxazid, isoflavone, isoflavones, isoflurane, isolyte-S, isoniazid, isoniazide, isoprinosine, isopropyl alcohol, isopropyl unoprostone, isoproterenol, isoquercetin, isosorbide dinitrate, isosorbide mononitrate, isosorbide-5-mononitrate, isosulfan blue, isotretinoin, isovaleramide, ispinesib, ispronicline, Isradipine, israpafant, istaroxime, itacitinib, itasetron, itopride hydrochloride, itraconazole, itriglumide, ivabradine, ivabradine hydrochloride, ivacaftor, ivermectin, ixabepilone, ixazomib citrate, Jin Fu Kang, JNJ-56914845, Jobelyn, josamycin, Juglans regia extract, Juvidex, Kamikihi-to, kanamycin, kava, KD-018, Keflin, Kenalog, Kenalog-10, ketamine, ketamine hydrochloride, ketanserin, ketoconazole, ketoprofen, ketorolac, ketorolac tromethamine, ketotifen, KLH, Krestin, KRX-0402, KT6-971, KW-2450, KW-2478, KWA-0711, KX2-391, L9NC, labetalol, labradimil, lacidipine, Lacidofil Strong, lacosamide, lactated ringer's solution, lactic acid, LACTIN-V, lactitol, lactobacillus, Lactobacillus acidophilus, Lactobacillus acidophilus KS400, Lactobacillus casei rhamnosus, Lactobacillus delbrueckii, Lactobacillus paracasei F19, Lactobacillus paracasei LP-33, Lactobacillus plantarum 299v, Lactobacillus reuteri, Lactobacillus rhamnosus, Lactobacillus Sporogens, lactose, lactose monohydrate, lactulose, ladarixin, ladostigil, lafutidine, L-alanosine, lamivudine, lamotrigine, landiolol, lanicemine, laninamivir octanoate, laniquidar, lanoconazole, lanopepden, lanperisone, lansoprazole, lanthanum carbonate, lapaquistat, lapatinib, laquinimod, L-arginine, laromustine, laropiprant, larotaxel, L-ascorbic acid, lasmiditan, lasofoxifene, L-asparaginase, latanoprost, latanoprost, latanoprostene bunod, latrepirdine, lauric acid, lazabemide, LC-150444, L-carnitine, L-citrulline, LCL-161, Lcr-35, L-dopa, lecovorin, lecozotan, lecozotan SR, lederfolin, ledipasvir, lefamulin, leflunomide, lemborexant, lemuteporfin, lenalidomide, lenograstim, lentinan, lentinan viral, lenvatinib mesylate, LEO-80122, L-epinephrine, lercanidipine, lersivirine, lesinurad, lesogaberan, lestaurtinib, letaxaban, leteprinim, letermovir, letrozole, leucine, leucoverin, leucovorin, leucovorin calcium, leukapheresis, leukotriene B4 (LTB4), leuprorelide, leuprorelin acetate, levalbuterol, levalbuterol hydrochloride, levamfetamine, levamisole, levamlodipine, levamlodipine besylate, levetiracetam, levobetaxolol, levobupivacaine, levocabastine hydrochloride, levocarnitine, levocetirizine, levocetirizine di hydrochloride, levodopa, levofloxacin, levofolinate, levogestrel, levoketoconazole, levoleucovorin, levo-leucovorin, levomequitazine, levomilnacipran, levonorgestrel, levo-phencynonate hydrochloride, levorphanol, levosalbutamol, levosimendan, levosulpiride, levothyroxine, levothyroxine sodium, levotofisopam, lexibulin, lexipafant, L-folinic acid, L-glutamine, LH-RH agonist, liafensine, liarozole, Libifem, licarbazepine, licochalcone A, licofelone, lidocaine, lidocaine chlorhydrate, lidocaine-prilocaine, lifibrol, lifitegrast, lignocaine, LIK-066, limaprost, Limtop, linagliptin, linaprazan, lincomycin, linezolid, linifanib, linoleic acid, linopristin, linsitinib, liothyronine, liothyronine sodium, lipid, lipiodol, Lipiodol-ethanol mixture, Lipocine, LipoCol, lipoic acid, lipopolysaccharide, liposomal amphotericin B, liposomal cisplatin, liposomal doxorubicin, liposomal paclitaxel, liposomal prostaglandin E-1, liposomal vincristine, Liproca Depot, lisavanbulin hydrochloride, lisdexamfetamine, lisinopril, lisofylline, lisuride, lithium, lithium carbonate, Lithium citrate, lithium salt, litronesib, lixivaptan, L-leucovorin, L-leucyl-L-leucine methyl ester, L-NMMA, lobaplatin, lobeglitazone, lobeline, lobeline sulphate, lobucavir, lodenafil carbonate, lodenosine, lofepramine, lofexidine, lomibuvir, lomitapide, lomustine, Lomustine (CCNU), lonafarnib, lonaprisan, Long chain fatty acids, long-chain polyunsaturated fatty acids, lonidamine, loperamide, loperamide hydrochloride, loperamide oxide, lopinavir, lopinavir/ritonavir, loratadine, lorazepam, lorcaserin, lorediplon, lormetazepam, L-ornithine L-aspartate, lornoxicam, losartan, losartan potassium, losigamone, losmapimod, loteprednol etabonate, lovastatin, loxapine, loxoprofen, lubiprostone, lucanthone, lucitanib hydrochloride, luliconazole, lumacaftor, lumateperone toluenesulfonate, lumefantrine, lumicitabine, luminespib, lumiracoxib, lunacalcipol, lurasidone, lurbinectedin, Lurotin, lurtotecan, luseogliflozin hydrate, lusutrombopag, lutein, LY-2090314, LY-2623091, Lybrido, lycopene, lymecycline, lynestrenol, Lysomucil, macimorelin, macitentan, Macrolids, mafenide, mafosfamide, MAGE-A1, MAG-EPA oil, magnesium, magnesium aluminum hydroxide, magnesium carbonate, magnesium chloride, magnesium chloride hexahydrate, magnesium citrate, magnesium gluconate, magnesium hydroxide, magnesium isoglycyrrhizinate, magnesium oxide, magnesium sulphate, magnesium valproate, malathion, managlinat dialanetil, mangafodipir, manganese, manidipine, manidipine dihydrochloride, manitimus, mannitol, mapracorat, maprotiline, maralixibat chloride, maraviroc, maribavir, Marijuana, marimastat, marvelone, masilukast, masitinib, masoprocol, mavoglurant, maxacalcitol, mazindol, MCC-135, MDR1, MDT-10013, mebendazole, mebeverine, mebeverine hydrochloride, mecamylamine, mechlorethamine, meclinertant, meclizine, mecobalamin, mecobalamin monohydrate, Medium chain fatty acids, medroxyprogesterone, medroxyprogesterone acetate, mefenamic acid, mefloquine, megestrol, megestrol acetate, meglumine antimoniate, melagatran, Melan-A, melarsoprol, melatonin, meldonium, melfalan, meloxicam, melperone, melphalan, melphalan hydrochloride, memantine hydrochloride, menaquinone, menaquinone-7, menatetrenone, Meniace, menotropin, menotropins, menstrogol, mepacrine, meperidine, mephalan, mepivacaine, mepivacaine chlorhydrate, mepivacaine hydrochloride, mepridine, MER-104, merbarone, mercaptamine, mercaptamine bitartrate, mercaptopurine, mericitabine, merimepodib, meropenem, mesalamine, mesalazine, mesna, metadoxine, Metafolin, Metaglip, metamizole, metamizole sodium, metaraminol, Meteospasmyl, metformin, metformin glycinate, metformin HCl, metformin hydrochloride, metformin SR, methacholine, methadone, methadone hydrochloride, methamphetamine, methazolamide, methimazole, methionine, methocarbamol, methohexital, methotrexate, methotrimeprazine, methoxsalen, methoxyflurane, methoxypsoralen, methyl aminolevulinate hydrochloride, methyl prednisolone, methyl prednisolone acetate, methylcobalamin, methyldibromoglutaronitrile, methyldopa, methylene blue, methylnaltrexone bromide, methylphenidate, methylphenidate hydrochloride, methylprednisolone, methylprednisolone aceponate, methylprednisolone acetate, methylprednisolone sodium succinate, methylprednisone, methylsamidorphan, methylsulfonylmethane, methyltetrahydrofolate, methylthioninium chloride, metirosine, Metobes-compound, metocloperamide, metoclopramide, metolazone, metoprolol, metoprolol succinate, metoprolol tartrate, metoprolol XL, metranidazole, MetroGel, metronidazole, metronomic cyclophosphamide, metyrapone, mexiletine, mexiletine hydrochloride, Mexoryl SX, Mexoryl XI+titanium dioxide, mianserin, mibampator, MIBG, miconazole, miconazole nitrate, microalgal oil, micronized progesterone, micronutrient mixture, midazolam, midazolam hydrochloride, middle-chain and polyunsaturated fatty acids, midodrine, midostaurin, mifepristone, miflonide, migalastat, miglitol, miglustat, milataxel, milnacipran, milrinone, miltefosine, milveterol, mimopezil, minocycline, minocycline hydrochloride, minodronic acid, minoxidil, mirabegron, miriplatin hydrate, mirodenafil, mirtazapine, misoprostol, mitemcinal, mitiglinide, mitoguazone, mitolactol, mitomycin, Mitomycin C, mitoquinone/mitoquinol redox mixture, mitotane, mitoxantrone, mivacurium, mivacurium chloride, mivobulin, mixed salt amphetamine, mizolastine, mizoribine, MK-0782, MK-0893, MK-2206, MK-7622, MK-8457, MMF, mocetinostat dihydrobromide, moclobemide, modafinil, moexipril, molidustat, molindone, molsidomine, molybdenum, momelotinib, mometasone, mometasone furoate, monolaurin, monosodium glutamate, montanide ISA-51, montelukast, montelukast sodium, moracizine, morphine, morphine chloride, morphine glucuronide, morphine hydrochloride, morphine sulphate, mosapride, motesanib diphosphate, motexafin gadolinium, motexafin lutetium, motolimod, moxidectin, moxifloxacin, moxifloxacin hydrochloride, moxonidine, MP-435, MSC-apceth-111, MT-102, Mucaine, Mucopolysaccharide, Mucuna pruriens, multivitamins, muparfostat sodium, mupirocin, muraglitazar, mustine, Mycobacterium w, mycophenolate acid, mycophenolate mofetil, mycophenolate sodium, mycophenolic acid, mycostatin, Mydriasert, Myfenax, Myrtus communis L, mytomycin, N20-02, nabilone, nabiximols, nabumetone, N-acetyl cysteine, N-acetylcisteine, N-acetylcysteine, N-acetyl-L-cysteine, N-acetyl-p-aminophenol, NaCl, nadifloxacin, nadolol, nadroparin calcium, nafamostat, nafamostat mesilate, nafarelin, NaFeEDTA, naftifine, naftifine hydrochloride, naftopidil, nalbuphine, nalbuphine sebacate, naldemedine, nalfurafine, nalmefene, naloxegol, naloxone, naltrexone, naltrexone hydrochloride, naltrexone-poly(DL-lactide), naluzotan, Namodenoson, nandrolone, Naoxintong, napabucasin, naphthoquine, naproxcinod, naproxen, naproxen etemesil, naproxen sodium, naratriptan, naronapride, narrowband UVB, nasapaque, nastorazepide calcium, natamycin, nateglinide, navamepent, navarixin, naveglitazar, navitoclax, N-chlorotaurine, nebentan, nebicapone, nebivolol, nebulized amikacin, nebulized budesonide, Nebusal, nedaplatin, nefazodone, nefiracetam, neflamapimod, nefopam, neladenoson bialanate, nelarabine, nelfinavir, nelivaptan, nelociguat, nelonicline, nelotanserin, nemonoxacin, nemorubicin, neomycin, neomycin sulphate, neostigmine, nepadutant, nepafenac, nepicastat, neramexane, neratinib, neridronic acid, nerispirdine, netarsudil, netilmicin, netivudine, netupitant, Neu-120, neurotropin, nevirapine, niacin, niacinamide, Niacor, NIC5-15, nicardipine, nicergoline, Niclosamide, niconinamide, nicorandil, nicotinamide, nicotine, nicotine polacrilex, nicotinic acid, nifedipine, nifurtimox, Nigella sativa, nikkomycin Z, nilotinib, nilutamide, nilvadipine, nimesulide, nimodipine, nimorazole, nimotuzumab, nimustine hydrochloride, nintedanib, nipradilol, niraparib, nirogacestat, nitazoxanide, nitisinone, nitrazepam, nitrendipine, nitric oxide, nitroflurbiprofen, nitrofurantoin, nitrogen gas, nitroglycerin, nitroglycerine, nitroprusside, nitrous oxide, Nitrousoxide, nivocasan, nizatidine, N-Lite, N-monomethyl-L-arginine, Nobactine, nolatrexed, nolpitantium besilate, nomegestrol acetate, non-amlodipine calcium channel blockers, nonoxynol-9, non-preserved latanoprost, norelgestromin, norepinephrine, norethandrolone, norethindrone, norethindrone acetate, norethisterone, norethisterone acetate, norethisterone enantate, norethrindone acetate, norfloxacin, norgestimate, nortriptylatine, nortriptyline, norursodeoxycholic acid, noscapine, novabupivacaine, Novasoy, Novotaks, NPC-18, NRTI, NS-2, NS-8, NTC-510A, NucleomaxX, nucleoside antiretroviral drugs, NVB, nystatin, Nystatin LF, Nyxol, O2, obatoclax, obeticholic acid, obicetrapib, obinepitide, OBT, ocaperidone, ocinaplon, octinoxate, octocrylene, octocrylene+tinosorb, octreotide acetate, odalasvir, odanacatib, odiparcil, Odyliresin, oestrogen, ofloxacin, oglemilast, oglufanide disodium, olanzapine, olanzapine/fluoxetine, olaparib, olcegepant, oleic acid, olepra, olesoxime, oliceridine, OligoG CF-5/20, olmesartan, olmesartan cilexetil, olmesartan medoxomil, olodaterol, olodaterol hydrochloride, olopatadine, olopatadine hydrochloride, olprinone, olsalazine, oltipraz, omacetaxine mepesuccinate, omadacycline, omapatrilat, omarigliptin, omaveloxolone, ombitasvir, ombrabulin, omecamtiv mecarbil, omega, omega-3, omega-3 carboxylic acids, omega-3 fatty acids, Omega-3 polyunsaturated fatty acids, omega-3-acid ethyl esters, omega-3-carboxylic acids, omega-6, OmegaMAX, Omegaven, omeprazole, omeprazole and bicarbonate, omeprazole sodium, o-methylphenidate, omidenepag isopropyl, omigapil, Ommaya reservoir, Omri-Hep-B, onalespib, oncovin, ondansetron, ondelopran, opicapone, opipramol, opium, fumagillin, orantinib, orbofiban, Org-9426, orilotimod, oritavancin, orlistat, ornithine phenylacetate, orphenadrine citrate, ortataxel, orteronel, Orthokine, orthosilicic acid, Orthostat, Orthostat-L, Orthovisc, orvepitant, oseltamivir, osemozotan, OSI-632, osilodrostat, ospemifene, OsteoDex, Osteonil, otenabant, oteracil potassium, oteseconazole, otilonium bromide, oxacillin, oxaliplatin, oxandrolone, oxantel pamoate, oxazepam, oxcarbazepine, oxidized glutathione sodium, Oximax, oxitriptan, oxitropium bromide, OX-NLA, oxybuprocaine, oxybutinin, oxybutynin, oxybutynin chloride, oxybutynin hydrochloride, oxycodone, oxycodone CR, oxycodone extended-release, oxycodone hydrochloride, oxycodone IR, Oxycyte, oxygen, oxymetazoline, oxymetazoline hydrochloride, oxymetholone, oxymorphone ER, oxymorphone IR, oxypurinol, oxytocin, ozagrel, ozagrel hydrochloride, ozanimod, ozenoxacin, P-276-00, P-53, PAC-14028, paclitaxel, paclitaxel poliglumex, paclitaxel-PM, pacritinib, pactimibe, pafuramidine, pagoclone, palanosetron hydrochloride, palbociclib, palifosfamide, paliperidone, paliperidone ER, paliperidone palmitate, paliroden, palivizumab, palonosetron, palovarotene, pamapimod, pamidronate disodium, PAN-90806, Panavir I, panobinostat, pantoprazole, pantothenic acid, pantovigar, papaverine, paquinimod, paracetamol, pardoprunox, parecoxib, paricalcitol, paritaprevir, parnaparin sodium, parogrelil, paromomycin, paroxetine, paroxetine hydrochloride, paroxetine hydrochloride hemihydrate, paroxetine mesylate, parthenolide, Passiflora incarnata, patidegib, patiromer calcium, patupilone, pazopanib, pazufloxacin, pazufloxacin mesylate, PCI-24781, PCI-27483, PD-110843, PD-115934, pectin, pefcalcitol, peficitinib, pegamotecan, pegcantratinib, pegylated liposomal doxorubicin, PEITC, pelitinib, pelitrexol, pelubiprofen, pemafibrate, pemetrexate, pemetrexed, pemetrexed disodium, pemirolast, pemirolast sodium, pemoline, penciclovir, penclomedine, penehyclidine hydrochloride, penicillamine, penicillin, penicillin G, penicillin V, pentaerythritol tetranitrate, PentaLyte, pentamidine, pentamidine isethionate, pentazocine, pentobarbital, pentosan polysulphate sodium, pentostatin, pentothal, pentoxifylline, pentoxyphilline, peramivir, perchlozone, peretinoin, perflubron emulsion, perflutren lipid microsphere, pergolide, perhexiline, perifosine, perillyl alcohol, perindopril, perindopril arginine, permethrin, perospirone, perphenazine, perzinfotel, pethidine, pethidine hydrochloride, petrolatum, pexacerfont, pexidartinib, PF-04447943, PF-05089771, PF-05175157, PF-3654746, PF-3654764, PF-4191834, PF-4531083, PF-4691502, PF-489791, PF-610355, PG-2, PGL-2001, PGP/BCRP inhibitor, PH-797804, phenelzine, phenindione, pheniramine maleate, phenobarbital, phenobarbital sodium, phenoxybenzamine, phenprocoumon, phenserine, phentermine, phentolamine mesylate, phenylbutyrate, phenylephrine, phenylephrine hydrochloride, phenytoin, phloroglucinol, PHN-031, PHN-033, phosphate, phosphatidyl serine, phosphatidylcholine, phosphatidylcholine-associated naproxen, phosphatidylcholine-encapsulated ibuprofen, Phospho-Lax, phosphorus, photopheresis, physostigmine, phytate, phytonadione, phytosterols, piboserod, pibrentasvir, picibanil, piclidenoson, piclozotan, picoplatin, picotamide, picroliv, picropodophyllin, picrorhiza, pictilisib, pilaralisib, pilocarpine, pilocarpine hydrochloride, pilsicainide, PIM-447, pimagedine, pimasertib hydrochloride, pimavanserin, pimecrolimus, pimodivir, pimozide, pindolol, pinocembrin, pioglitazone, pioglitazone hydrochloride, pipamperone, piperacillin, piperacillin sodium, piperacillin-tazobactam, piperaquine, piperaquine phosphate, piperine, piracetam, piragliatin, pirarubicin, pirenzepine, pirfenidone, piribedil, piridoxine, piritramide, piritrexim, piromelatine, piroxicam, pitavastatin, pitavastatin calcium, pitolisant, pivmeciellinam, pivmecillinam, pixantrone, PL-3994, plant sterols, platinum, plazomicin, pleconaril, plerixafor, plevitrexed, plinabulin, PLX-8394, PM-00104/50, PMI-001, PMK-N02RS1, pocapavir, polaprezinc, policosanol, polidocanol, polifeprosan 20 with carmustine, polmacoxib, polyethylene glycol, polyethylene glycolated IL-2, polyethylene glycol-citrate-simethicone, polymeric nanoparticle docetaxel, polymyxin B sulphate, polyphenon E, polysaccharide-K, polysorbate 80, polysporin, polytetrafluoroethylene, pomaglumetad methionil, pomalidomide, ponatinib, ponesimod, poractant alpha, porfimer sodium, porfiromycin, posaconazole, posizolid, Posterisan akut, potassium, potassium canrenoate, potassium chloride, Potassium iodide, potassium nitrate, Potassium perchlorate, povidone, povidone iodine, pozanicline, poziotinib, PPA Lux 680, PPA-904, PPD-10558, PPI, PR-104, pracinostat, pradefovir, pradigastat, pralatrexate, pralidoxime, pralnacasan, pramiconazole, pramipexole, pranlukast, pranlukast hydrate, prasterone, prasugrel, pravastatin, praziquantel, prazosin, prednicarbate, prednisolone, prednisolone acetate, prednisolone phosphate, prednisolone sodium metazoate, prednisolone sodium succinate, prednisone, pregabalin, pregnenolone, preladenant, Premarin, Prempro, Prenatal vitamin, presatovir, pretomanid, prilocaine, primaquine, prinaberel, prinomastat, pritelivir, probenecid, Probiotics, probucol, procainamide, procaine, procaine hydrochloride, procarbazine, procarbazine hydrochloride, procaterol, procaterol hydrochloride, prochlorperazine, Procysteine, pro-docosapentaenoic acid, pro-eicosapentaenoic acid, progesterone, progestin, progestogen, progestogen dienogest, proglumide, proguanil, proguanil hydrochloride, Prolarix, promethazine, Prometra, Prometrium, Promisan, propacaine hydrochloride, propacetamol, propafenone, propafenone-SR, propanolol, proparacaine, propionyl-L-carnitine, propiverine, propiverine hydrochloride, propofol, Propofol Lipuro, propofol-lipuro, propranolol, propranolol hydrochloride, propranolol LA, propranolol XL, propylthiouracil, propyphenazone, Prosorba, prostaglandin, prostaglandin-E2, Prostin, Protelos, protriptyline, ProvideXtra, proxymetacaine, proxymetacaine hydrochloride, PRS-211375, prucalopride, prulifloxacin, Prurisol, pruvanserin, PRX-3140, PRX-8066, PSD-508, pseudoephedrine, pseudoephedrine hydrochloride, Pseudomonas aeruginosa mannose-sensitive hemagglutinin (PA-MSHA), PSI-5004, PSI-938, Psyllium powder, PTH, p-toluene sulfonamide, puerarin, puerarin sodium phosphate, pumosetrag, PVAC, PVP-ILH liposomes, PX-12, PYN-17, pyrantel-oxantel, pyrazinamide, pyridostigmine bromide, pyridoxal, pyridoxamine dihydrochloride, pyridoxine, pyridoxine hydrochloride, pyrimethamine, pyrimethamine/sulfadoxine, pyrimethamine/sulphadoxine, pyronaridine, Q-301, QAV-680, Qinbudan, Qizhitongluo, quercetin, quetiapine, quetiapine fumarate, quetiapine IR, quinacrine, quinagolide hydrochloride, quinapril hydrochloride, quinfamide, quinidine, quinine, quinolone, quinolones, quinupristin, quisinostat, quizartinib dihydrochloride, R-112, rabacfosadine, rabeprazole, rabeximod, rabusertib, racecadotril, raclopride, radafaxine, radalbuvir, radequinil, radezolid, Radha-108, radioactive iodine, Radioiodine, radiolabeled iodobenzamide, radiprodil, radium Ra 223 dichloride, radotinib, ragaglitazar, ralfinamide, raloxifene, raltegravir, raltitrexed, ramatroban, ramelteon, ramipril, ramosetron, ranibizumab, ranimustine, ranirestat, ranitidine, ranolazine, rapamycin, rasagiline, raseglurant, ravidasvir hydrochloride, ravuconazole, raxatrigine, razupenem, RBP-8000, RBx-10017609, RDEA-806, RDP-58, rebamipide, rebaudioside A, rebimastat, reboxetine, refametinib, reformulated diclofenac, reformulated mebendazole, regadenoson, regorafenib, regrelor, relebactam, relenopride, relugolix, remifentanil, remimazolam, remimazolam tosylate, remogliflozin etabonate, REN-1654, renzapride, repaglinide, reparixin, repinotan, repurposed ajulemic acid, repurposed ondansetron, resatorvid, reserpine, resiniferatoxin, resminostat, Resoferon, Respifor, Respimat, Restylane, Restylane SubQ, resveratrol, retagliptin, retapamulin, retaspimycin, retigabine, retinoic acid, retinoid, retinol, retosiban, retrovir, revamilast, revefenacin, revexepride, reviparin sodium, rezatomidine, RF-07026, rFSH, RG-4929, RG-7234, RG-7795, RGH-478, RGH-507, Rhenium-188-HEDP, Rhinox, RhuDex, ribavirin, ribociclib, riboflavin, ridaforolimus, ridinilazole, rifabutin, rifalazil, rifampicin, rifampin, rifamycin, rifapentine, rifaximin, rigosertib sodium, rikkunshito, rilapladib, rilmenidine, rilpivirine hydrochloride, riluzole, rimacalib, rimegepant, rimexolone, rimonabant, Ringer's acetate, Ringer's lactate solution, riociguat, ripasudil hydrochloride hydrate, risedronate sodium, risperidone, ritanserin, ritobegron ethyl ester hydrochloride, ritodrine, ritonavir, rituximab, rivaroxaban, rivastigmine, rivenprost, rivipansel sodium, rivoglitazone, rizatriptan, RLP-068, RNF43, RNS-60, RO-4929097, RO-5036505, robalzotan, rociletinib, rocuronium, rocuronium bromide, rofecoxib, Roferon-A, roflumilast, rolapitant, rolipram, rolofylline, ronacaleret, roniciclib, ronopterin, ropinirole, ropinirole hydrochloride, ropivacaine, roquinimex, rose bengal sodium, rosiglitazone, rosiglitazone maleate, rosiglitazone XR, rosiptor acetate, rostafuroxin, rostaporfin, rosuvastatin, rosuvastatin calcium, rotigotine, rovatirelin, roxadustat, roxithromycin, RP-323, RPh-201, RPL-554, RPM-02/08, RQ-00000004, R-salbutamol sulphate, rubitecan, ruboxistaurin, rucaparib, rucaparib camsylate, rucaparib phosphate, rufinamide, rupatadine, ruxolitinib, S Ketamine, S(+)-Ketamine, S-1, S-111, S-38093, S-707106, SAB-378, sabarubicin, Saccharomyces boulardii, sacubitril, S-adenosyl methionine, SAF-312, saffron, safinamide, safotibant, sagopilone, salbutamol, salbutamol HFA, salbutamol sulphate, salicylic acid, salicylic acid+benzoic acid, salidroside, saline, salirasib, salmon calcitonin, salsalate, Salubrin, samarium(153Sm) lexidronam, samatasvir, samidorphan, S-amlodipine gentisate, sapacitabine, sapanisertib, sapitinib, sapropterin, sapropterin dihydrochloride, saquinavir, SAR-110894, saracatinib, sarecycline, saredutant, sargramostim, sarizotan hydrochloride, saroglitazar, sarpogrelate hydrochloride, satavaptan, satraplatin, saxagliptin, SB-773812, SBP-002, SC-49483, SCH-002063, SCH-497079, SCH-900776, schisandra sphenanthera extract, scopolamine, SCY-078, SDX-101, secnidazole, Sedlitzia rosmarinus, segesterone acetate, seladelpar L-lysine dihydrate, selegiline, selegiline hydrochloride, selenium, selenium sulfide, selenomethionine, selepressin, seletracetam, selexipag, seliciclib, selinexor, selisistat, selodenoson, selonsertib, Selozok, selumetinib, selurampanel, semagacestat, semapimod, semaxanib, sembragiline, senicapoc, senna, Sensorcaine, Sentra PM, seocalcitol, sepantronium bromide, sepetaprost, sepranolone, septin, SER-150-DN, Serenoa repens, sergliflozin etabonate, serlopitant, serotonin reuptake inhibitors, serotonin/norepinephrine reuptake inhibitors, sertaconazole, sertindole, sertraline, S-ethylisothiourea diethylphosphate, setileuton, setipiprant, S-etodolac, setrobuvir, sevelamer carbonate, sevelamer hydrochloride, sevoflurane, Sevofran, sevuparin sodium, SG-2000, Shanhuang Wuji decoction, SHP-465, sibrafiban, sibutramine, sildenafil, sildenafil citrate, Silexan, stin, silibinin dihydrogensuccinate, silimarine, silodosin, silver nanoparticle, silver nitrate, silver sulfadiazine, silybin, silymarin, simenepag isopropyl, simeprevir, simethicone, simeticone, simvastatin, Sinbaro, siponimod, sirolimus, sitafloxacin, sitagliptin, sitamaquine, sitaxentan, sitosterol, sivelestat, sivifene, s-ketamine, SKP-1052, SK-PC-B70M, SLx-4090, SMANCS, S-methionyl-L-citrulline, smilagenin, SMP-028, SN-38, SNX-5422, sodelglitazar, sodium, sodium 4-phenylbutyrate, sodium ascorbate, sodium benzoate, sodium bicarbonate, sodium butyrate, sodium carboxymethylcellulose, sodium chloride, sodium chromoglycate, sodium citrate, sodium dichloroacetate, sodium ferric gluconate complex, sodium fluoride, sodium folinate, sodium fusidate, sodium hyaluronate, sodium hydroxide, sodium hypochlorite, sodium ketorolac, sodium lactate, sodium nitrate, sodium nitrite, sodium nitroprusside, sodium oxybate, sodium phenylacetate, sodium phenylbutyrate, sodium phosphate, sodium picosulphate hydrate, sodium polystyrene sulfonate, sodium prasterone sulphate, sodium pyruvate, sodium stibogluconate, sodium sulfide, sodium tetradecyl sulphate, sodium thiopental, sodium thiosulphate, sodium valproate, sodium-fluoride, sofinicline, sofosbuvir, sofosbuvir+daclatasvir, sofpironium bromide, solabegron, solcitinib, Soldesam, solifenacin, solithromycin, soluble ferric pyrophosphate citrate, Solvazinc, somatostatin, sonedenoson, sonidegib, sonolisib, sorafenib, soraprazan, sorbitol, sorivudine, sotagliflozin, sotalol, sotrastaurin, sovaprevir, soy isoflavones, sparsentan, spebrutinib, spiramycin, spironolactone, sPLA2 inhibitors, SQ-109, squalamine, SR-T100, SSS, ST-101, STA-4783, standard bicarbonate, standard pneumoperitoneum, stannous compounds, stannsoporfin, statin, stavudine, stearidonic acid, S-tenatoprazole, Sterofundin, steroid, steroids, stiripentol, Stopain, Streptococcus faecium, Streptococcus thermophillus, streptomycin, streptozocin, strontium chloride Sr 89, strontium malonate, strontium ranelate, strontium-89, STW-5, STX-107, SU, SU-101, SU-14813, succimer, succinic acid, succinylcholine, sucralphate, sucralose, sucroferric oxyhydroxide, sucrose, Sufenta, sufentanil, sufentanil citrate, sufentanyl, sugammadex, sulbactam, sulbactam sodium, sulfadiazine, sulfadoxine, sulfadoxine+pyrimethamine, sulfalene-pyrimethamine, sulfamethoxazole, sulfasalazine, sulphate salt solution, sulfonyl urea, sulfonylurea, sulfonylureas, sulforaphane, sulindac, sulodexide, sulopenem, sulopenem etzadroxil, sulphacetamide sodium, sulphadoxine, sulphadoxine-pyrimethamine, sulphamethoxazole, sulphonylurea, sulpiride, sultamicillin, sumanirole, sumatriptan, sumatriptan succinate, SUN-0597, SUN-1334H, sunitinib, suplatast tosilate, suramin, suramin sodium, surinabant, sutezolid, suxamethonium, SYI-2074, symbiotic, synbiotics, SYNSORB-Pk, synthetic hypericin, TIS, T-1225, T-2000, T3, tacalcitol, tacedinaline, tacrine, tacrolimus, Tacrolimus Hexal, tadalafil, tadekinig alpha, tafamidis, tafenoquine, tafluprost, tafoxiparin sodium, TAK-715, TAK-783, talabostat, taladegib, talampanel, talaporfin, talarozole, talazoparib, talc, TALL-104, talmapimod, talnetant, talniflumate, talotrexin, talsaclidine fumarate, taltirelin, tamibarotene, tamoxifen, tamsulosin, tamsulosin hydrochloride, tandospirone, tandutinib, tanespimycin, tanomastat, tanzisertib, tapentadol, taprenepag, Taradyal, tarafenacin, taranabant, tarenflurbil, taribavirin hydrochloride, tariquidar, tarloxotinib bromide, tasidotin HCl, tasimelteon, tasisulam, taspoglutide, tasquinimod, taurolidine, tauroursodeoxycholic acid, tavaborole, tavilermide, Taxol, Taxus, tazarotene, tazobactam, TC-2403, TC-3, TCM-606F, tebipenem pivoxil, tecadenoson, tecalcet, tecarfarin, tecastemizole, technetium bicisate, technetium etarfolatide, technetium Tc 99m tilmanocept, technetium Tc 99m trofolastat, technetium-99, tecovirimat, tedatioxetine, tedisamil, tedizolid phosphate, tegafur, tegaserod, teglarinad chloride, tegobuvir, teicoplanin, telaprevir, telapristone acetate, telatinib, telbivudine, telcagepant, telithromycin, telmisartan, telotristat etiprate, temazepam, temocapril, temocillin, temoporfin, temozolomide, temsirolimus, tenapanor, teneligliptin, teniposide, tenofovir, tenofovir alafenamide, tenofovir alafenamide fumarate, tenofovir disoproxil fumarate, tenofovir exalidex, tenofovir/emtricitabine, tenoxicam, teprenone, terameprocol, terazosin, terbinafine, terbinafine gel, terbinafine hydrochloride, terbogrel, terbutaline, terbutaline sulphate, terconazole, terguride, teriparatide, terlipressin acetate, terutroban, tesaglitazar, tesetaxel, tesevatinib, tesmilifene, tesofensine, Testagen, testosterone, testosterone cypionate, testosterone enanthate, testosterone undecanoate, Tetanus toxoid, tetomilast, tetrabenazine, tetracaine, tetracaine hydrochloride, tetracycline, tetracycline HCl, tetrahydrobiopterin, tetrahydrocannabinol, tetrathiomolybdate, Tetrodin, tezacaftor, tezacitabine, tezampanel, tezosentan, TG-100-115, TG-100801, thalidomide, THC, theophyllamine, theophylline, theophylline SR, theracurmin, thiamine, thiamine hydrochloride, thiazide, thiazide diuretics, thiazolidinedione, thiazolidinediones, thiocolchicoside, thioctic acid, thioguanine, thiopental, thiopental sodium, thiopentone, thioridazine, thiotepa, thiothixene, THR-0921, THR-4109, thrombin, thrombin microcapsules, thymoctonan, Thymoglobulin, thyroxine, tiagabine, tianeptine, tiapride, tibolone, ticagrelor, ticlopidine, tideglusib, tigecycline, tilapertin, tilarginine acetate, tiludronate disodium, timapiprant, timcodar, timnodonic acid, timolol, timolol, timolol maleate, tinidazole, tinzaparin sodium, tiopronin, tiotropium, tiotropium bromide, tipelukast, tipifarnib, tipiracil hydrochloride, tipranavir, tirapazamine, tirasemtiv, tirilazad, tirofiban, tirofiban hydrochloride, titanium dioxide, TIVA, tivantinib, tivozanib, tizanidine, TMC-114/RTV, TMC-310911, TMC-647055, TNF-alpha, TNP-470, tobramycin, tocladesine, tocofersolan, tocopherol, tocopherols, tocopheryl phosphate mixture (TPM), tofacitinib, tofimilast, tofogliflozin, tolcapone, tolevamer, tolnaftato, tolperisone, tolterodine, tolterodine tartrate, tolvaptan, TOMM34, tonabersat, Tonalin SG1000T FFA, tonapofylline, Tongxinluo, topiramate, topiroxostat, topotecan, topotecan hydrochloride, torasemide, torcetrapib, toreforant, toremifene, tosedostat, tosufloxacin, tozadenant, tozasertib, trabectedin, trabectome, trabodenoson, tradipitant, tramadol, tramadol hydrochloride, tramazoline, trametinib, tramiprosate, trandolapril, tranexamic acid, tranilast, transcrocetinate-sodium, tranylcypromine, trastuzumab, travoprost, traxoprodil, trazadone, trazodone, trazodone hydrochloride, TRC-101, trehalose, trelagliptin succinate, trelanserin, treosulfan, treprostinil, treprostinil diolamine, tretinoin, triamcinolone, triamcinolone acetonide, triamcinolone hexacetonide, Triapine, Triatec HCT, Triaz, triazavirin, triazolam, tribendimidine, trichlormethiazide, trichlorothiazide, triciribine, tridolgosir, trientine, trientine hydrochloride, trifarotene, trifluoperazine, trifluridine, triflusal, triheptanoin, trihexyphenidyl, triiodothyronine, trilostane, trimebutine, trimebutine 3-thiocarbamoyl-benzenesulfonate, trimegestone, trimetazidine, trimethaphan, trimethobenzamide, trimethoprim, trimethoprim-sulfa, trimetrexate, trimipramine, trimipramine maleate, trinitrate, Triomune, Triplixam, tripotassium dicitrate bismuthate, tripterygium wilfordii, triptorelin acetate, triptorelin pamoate, trisodium citrate dihydrate, Trivax-AD, trofinetide, trofosfamide, troglitazone, tropicamide, tropisetron, trospium chloride, troxacitabine, troxipide, Trunature, trypsin-EDTA, TS-022, TTK, TTP-054, TTP-399, TTP-435, TTP-889, TTX-9401, tucaresol, tucidinostat, tulobuterol, TV-46763, TV-5010, TY-51924, tylenol, TZD, TZP-102, ubidecarenone, ubiquinol, ubrogepant, UCA-001, UCA-002, UCN-01, udenafil, UFT, UFT/LV, UFUR, UISH-001, UK-390957, UK-432097, UK-447841, ulimorelin, ulinastatin, ulipristal, ulobetasol, ulodesine, umeclidinium, umeclidinium bromide, umirolimus, unfractionated heparin, uniphyllin, upadacitinib, upamostat, uprifosbuvir, uprosertib, UR-906, uracil, urapidil, urea, uridine, uridine triacetate, URLC10, ursodeoxycholic acid, Ursolic acid, Urtica diociea, usistapide, UTD-1, utrogestan, V-116517, V-158866, V-404, VA-111913, vabicaserin, vaborbactam, vadadustat, vadimezan, Vagiprost, VAK-694, valaciclovir, valacyclovir, valbenazine, valdecoxib, valerian extract, valganciclovir, valium, valnivudine hydrochloride, valnoctamide stereoisomers, valomaciclovir stearate, valopicitabine dihydrochloride, valproate, valproic acid, valrocemide, valrubicin, valsartan, valsartan trisodium hemipentahydrate, valspodar, valtorcitabine, vancomycin, vancomycin hydrochloride, vandetanib, vaniprevir, vanoxerine, vapendavir, vapitadine, vardenafil hydrochloride, varenicline, varespladib, varespladib methyl, varlitinib, vasopressin, vatalanib, vatiquinone, VDC-2008, vecuronium, vecuronium bromide, vedroprevir, VEGFR1, VEGFR1 peptide, VEGFR1-A02-770, VEGFR2 peptide, VEGFR2-derived HLA-A0201, veliflapon, veliparib, velneperit, velpatasvir, velusetrag, vemurafenib, venetoclax, venlafaxine, venlafaxine hydrochloride, venlafaxine XR, vepoloxamer, verapamil, verapamil hydrochloride, vercirnon, verdiperstat, vericiguat, verinurad, vernakalant, vernakalant hydrochloride, verteporfin, verubulin, verucerfont, Verutex, vesatolimod, vesnarinone, vestipitant, vibegron, vicriviroc, Vidoca, vidofludimus, vidupiprant, vigabatrin, viitamin D, vilanterol, vilanterol trifenatate, vilaprisan, vilazodone, vildagliptin, vinblastin, vinblastine, vinblastine sulphate, vincristin, vincristine, vincristine sulphate, vindesine, vinflunine, vinorelbine, vinorelbine ditartrate, vinpocetine, vintafolide, vipadenant, vismodegib, vistusertib, Vit B12, Vitamac, vitamin A, vitamin B, vitamin B1, vitamin B12, vitamin B-12, vitamin B2, vitamin B6, vitamin B-6, vitamin C, vitamin D, vitamin D2, vitamin D3, vitamin E, vitamin E succinate derivatives, vitamin K, vitamin K1, vitamins B1, vitamins B12, vitamins B2, vitamins B6, Vitreosolve, Viusid, Vizomitin, vofopitant, voglibose, volasertib, volinanserin, vonoprazan fumarate, vorapaxar, voriconazole, vorinostat, vortioxetine hydrobromide, vosaroxin, voxilaprevir, voxtalisib, VP-101, VRx-3996, VSL-3, WZ-149, VX-105, VX-135, VX-702, VX-710, Wafermine, warfarin, warfarin sodium, Water, WF-10, WH-1, Wobenzym, WX-554, xaliproden, xemilofiban, xenon, Xiang-sha-hu-jun decoction, xiaoqinglong, Xibrom, Xilei-San, ximelagatran, Xiyanping, XL-139, XP-21279, Xylitol, xylometazoline, Y-39983, Yallaferon, yonkenafil, yttrium clivatuzumab tetraxetan, yttrium Y 90 anti-CD66 monoclonal antibody BW 250/183, zabofloxacin, zafirlukast, zalcitabine, zaleplon, zaltoprofen, zanamivir, ZD-6126, zeaxanthin, zibotentan, zicronapine, zidovudine, zileuton, zinc, zinc acetate, zinc oxide, zinc picolinate, zinc sulphate, zinc supplement, Zincas Forte, Zinthionein, ziprasidone, zofenopril, zoledronate, zoledronic acid, zoliflodacin, zolmitriptan, zolpidem, zolpidem tartrate, Zometa, zonampanel, zonisamide, zonisamide SR, zopiclone, zosuquidar, zotarolimus, zotepine, zucapsaicin, zuclopenthixol, and zuretinol acetate.

[0141] In certain embodiments, a stimulus that perturbs a GSC is a small molecule selected from the CeMM Library of Unique Drugs (CLOUD), as shown in Licciardello et al., Nat Chem Bid; Vol. 13, pages 781-780 (2017). For example, the small molecule is selected from: Pinacidil, Altretamine, Pipobroman, Uracil Mustard, Trioxsalen, Plicamycin, Ambenonium, Edrophonium, Hexafluorenium, Oxtriphylline, Arbutamine, Guanabenz, Mephentermine, Methoxamine, Phenylpropanolamine, Protokylol, Tetrahydrozoline, Tolazoline, Bethanidine, Ergoloid, Oxprenolol, Penbutolol, Phentolamine, Propiomazine, Thiethylperazine, Fomepizole, Triamterene, Stanozolol, Dromostanolone, Ethylestrenol, Fluoxymesterone, Methyltestosterone, Deserpidine, Quinapril, Rescinnamine, Spirapril, Testolactone, Ethionamide, Sulfameter, Sulfacytine, Sulfamerazine, Sulfamethazine, Sulfamethizole, Sulfaphenazole, Sulfapyridine, Sulfathiazole, Sulfisoxazole, Sulfoxone, Cefmenoxime, Amdinocillin, Azlocillin, Bacampicillin, Carbenicillin, Cefalotin, Cefamandole, Cefditoren, Cefonicid, Ceforanide, Cefotiam, Cefpiramide, Cefradine, Ceftizoxime, Cephaloglycin, Cephapirin, Cyclacillin, Hetacillin, Loracarbef, Methicillin, Mezlocillin, Moxalactam, Nafcillin, Ticarcillin, Capreomycin, Demeclocycline, Dirithromycin, Methacycline, Oxytetracycline, Spectinomycin, Troleandomycin, Viomycin, Enoxacin, Novobiocin, Alatrofloxacin, Cinoxacin, Lomefloxacin, Nalidixic Acid, Sparfloxacin, Trovafloxacin, Acetohydroxamic Acid, Marinol, Ethoxzolamide, Acetohexamide, Fenoprofen, Oxyphenbutazone, Carprofen, Oxaprozin, Phenylbutazone, Tolmetin, Meclofenamic Acid, Methylergonovine, Acetophenazine, Carphenazine, Chlorprothixene, Mesoridazine, Triflupromazine, Promazine, Benzphetamine, Phenmetrazine, Chlorotrianisene, Estrone, Mestranol, Polyestradiol, Quinestrol, Cortisone, Fluprednisolone, Meprednisone, Paramethasone, Oxamniquine, Azatadine, Bromodiphenhydramine, Buclizine, Carbinoxamine, Chlophedianol, Dexbrompheniramine, Diphenylpyraline, Mepyramine, Methdilazine, Trimeprazine, Tripelennamine, Triprolidine, Romidepsin, Primidone, Butabarbital, Chlormezanone, Flurazepam, Glutethimide, Halazepam, Meprobamate, Metharbital, Methyprylon, Prazepam, Quazepam, Secobarbital, Talbutal, Thiamylal, Gamma Hydroxybutyric Acid, Memantine, Triclofos, Piperazine Hexahydrate, Desoxycorticosterone Pivalate, Pargyline, Carbachol, Oxyphenonium Bromide, Anisotropine, Clidinium, Cycrimine, Dicyclomine, Diphemanil, Ethopropazine, Fesoterodine, Hexocyclium, Isopropamide, Mepenzolate, Methantheline, Methylscopolamine, Metixene, Orphenadrine, Oxyphencyclimine, Procyclidine, Propantheline, Tridihexethyl, Trospium, Decamethonium, Pentolinium Tartrate, Cisatracurium Besylate, Succinylcholine Chloride, Doxacurium, Gallamine, Metocurine, Pancuronium, Pipecuronium, Rapacuronium, Tubocurarine, Guanadrel, Phendimetrazine, Anileridine, Difenoxin, Diphenoxylate, Levomethal, Oxymorphone, Propoxyphene, Levallorphan, Methylnaltrexone, (4)-Sulfinpyrazone, Pamidronic Acid, Risedronate, Tiludronate, Clofibrate, Dyphylline, Inamrinone, Vardenafil, Ethynodiol, Hydroxyprogesterone, Norethynodrel, Ulipristal Acetate, Carboprost, Etretinate, Methysergide, Chlorphentermine, Acetyldigitoxin, Deslanoside, Chlorpropamide, Tolazamide, Tolbutamide, Methyclothiazide, Benzthiazide, Chlorothiazide, Cyclothiazide, Hydroflumethiazide, Polythiazide, Quinethazone, 5-Fluorouracil, Dextrothyroxine, Metyrosine, Rimantadine, Adefovir, Anisindione, Dicumarol, Nisoldipine, Trimethadione, Bepridil, Paramethadione, Bretylium Tosylate, Mephenytoin, Benzonatate, Ethotoin, Indecainide, Moricizine, Phenacemide, Tocainide, Pyrvinium Chloride Dihydrate, Halofantrine, Metaxalone, Diphenidol, Mebutamate, Chlorphenesin, Phensuximide, Thiabendazole, Benzquinamide, Piperacetazine, Ethchlorvynol, and Ethinamate.

[0142] In some embodiments, a biological may be used in lieu of a small molecule in the above-described list. In some embodiments, an herbal preparation may be used in lieu of a small molecule in the above-described list. In some embodiments, a borderline product may be used in lieu of a small molecule in the above-described list.

### Known Drugs

[0143] In certain embodiments, a stimulus that perturbs a GSC is a drug selected from: (11C) acetate, (11C)-PHNO, (13C) sodium acetate, (18F) fluorothymidine, (2 beta-carbomethoxy-3 beta-[4-iodophenyl] tropane), [1-13C] leucine, [1-13C] NaHCO3, [11C] Cimbi-36, [11C](R)-PK11195, [11C]-(S)-ketoprofen methyl ester, [11C]-K-2, [11-C]methionine, [11C]-raclopride, [123I] 5-IA, [123I] iodobenzamide, [18]FDG, [18F] fallypride, [18F]-Fluoromisonidazole, [18F]-CP18, [18F]-FDG, [18F]Fluoro-2-deoxy-2-D-glucose, [18F]-fluorodeoxyglucose, [18]-fluorodeoxythymidine, [18F]fluorothymidine, [F-18] fluorodeoxyglucose, [F-18] FMISO, 1-(Di-isopropyl-phosphinoyl)-nonane, 1,2 dithiolane 3 valeric acid, 1,5-pentanediol, 1-[13C]-leucine, 11C choline, 11C-5-HTP, 11C-acetate, 11-carbon-choline, 11C-choline, 11C-L-deprenyl-D2, 11C-metomidate, 123-I iodobenzovesamicol, 125I-albumin, 131 iodine, 13C Methacetin, 13C Sodium Octanoate, 13C-dextromethorphan, 13-cis-retinoic acid, 13C-labeled methacetin, 13C-Methacetin, 13C-uracil, 150-water, 16-18-F-fluoro-4-thiapalmitate, 16 alpha-[18F] estradiol, 16-alpha-[18-fluoro]-17betaestradiol, 17 hydroxyprogesterone caproate, 17-b-estradiol, 17-beta-estradiol, 17-beta-estradiol/dydrogesterone, 17-hydroxyprogesterone caproate, 18 F-fluorothymidine, 1-84 parathyroid hormone, 188Re-sulfur colloid, 18F, 18F choline, 18F fallypride, 18F fluorodeoxyglucose, 18F Fluoromisonidazole, 18F fluorothymidine, 18F-2-deoxy-2-fluoro-D-glucose, 18F-2-fluoro-2-deoxy-D-glucose, 18F-choline, 18F-deoxyglucose, 18-FDG, 18F-DOPA, 18F-DTBZ, 18F-ethylcholine, 18F-FDG, 18F-flouro-deoxyglucose, 18F-FLT, 18F-flumazenil, 18F-fluoride, 18F-fluoro-3′-deoxy-3-L-fluorothymidine, 18F-fluoroazomycin arabinoside, 18F-fluorocholine, 18F-fluorodeoxy-d-glucose, 18F-fluorodeoxyglucose, 18F-fluorodihydrotestosterone, 18F-fluoroestradiol, 18F-fluoro-L-thymidine, 18F-fluoromethylcholine, 18F-fluoromisonidazole, 18F-fluorothymidine, 18F-FMISO, 18F-labeled fluorodeoxyglucose, 18F-labelled HX4, 18-fluorodeoxyglucose, 18-fluoro-deoxy-glucose, 18-fluorodeoxyglucose/F-18 FDG, 18F-MISO, 18-NaF, 1-deamino-8-D-arginine, 1F-fluoro-ethyl-tyrosine, 1-octanol, 2[fluorine-18]fluoro-2-deoxy-d-glucose, 25 vitamin D, 25-hydroxyvitamin D, 2-aminoethanesulfonic acid, 2-chloroprocaine, 2-ClinOleic, 2-deoxy-2-[18F] fluoro-D-glucose, 2-octylcyanoacrylate, 3,4-methylenedioxymethamphetamine, 3,4-methylenedioxymethamphetmine, 3,4-methylenedioxymethemphetmaine, 3-deoxy-3∝[18F]-fluorothymidine, 3-deoxy-3-[18F]fluorothymidine, 3-deoxy-3-18F-fluorothymidine, 3-helium gas, 3-hydroxybutyrate, 3M ESPE, 3-O-methylglucose, 4 methylenedioxyamphetamine, 4-aminosalicylic acid, 4-dichlorobenzyl alcohol, 4-hydroxybutanoic acid, 4-methylenedioxymethamphetamine, 4-n-butylresorcinol, 4-terpineol, 5 hydroxy-tryptophan, 5-ALA, 5-amino levulinic acid, 5-aminoimidazole-4-carboxamide ribonucleoside, 5-aminolevulinic, 5-aminolevulinic acid, 5-aminosalicylic acid, 5-hydroxy tryptamine, 5LGr, 5-Loxin, 5-methyltetrahydrofolate, 6,6-[2H2]glucose, 62Cu-ethylglyoxal bis, 64Cu-ATSM, 68Ga-alphatide 11, 68Ga-DOTA-[3-Tyr]-octreotide, 68Ga-DOTANOC, 68-Ga-DOTANOC, 68Ga-PSMA, 6-alpha-(18F)fluoro-17 beta-estradiol, 6-DIG, 6-mercaptopurine, 82rubidium, 8-methoxypsoralen, 90 Yttrium spheres, 99 m Technetium, 99 m Technetium-labeled albumin, 99mTc, 99mTc sulfur colloid, 99mTc-albumin, 99mTc-labeled nanocolloidal albumin, 99mTc-radiolabelled tiotropium, 99mTc-sestamibi, 99mTc-sulfur colloid, 9-d-tetra hydro cannabinol, A4I Antagonist, abacavir, ABH, Abnoba Viscum F, abnobaVISCUM Fraxini, AboMeg-B-09 syrup, Absinthium, AC-1204, Acacia catechu, acamprosate calcium, Acanya, acarbose, acebrophylline, acebutolol, aceclofenac, ACE-inhibitor, acenocoumarol, Acetadote EF, acetaminophen, acetate, acetate mafenide, acetazolamide, acetazolamide acetate, acetic acid, acetylcholine, Acetyl-hexapeptide-8, acetyl-L-carnitine, acetylsalicylic acid, acetylsalicylic acid lysinate, acetyl-salicylicum, aciclovir, acipimox, acitretin, aclidinium, AcSDKP-NH2 Cr-EDTA, AcSDKP-NH2 inuline, ActaVisc, ActaVisc Mx, Actinidia arguta extract, activated carbon, Activomin, Actovegin, ACYC, acyline, Ad2/HIF-1aNP16, Adamin-G, adapalene, adcal-D3, Addyzoa, adefovir dipivoxil, adenosine, adenosine 5′-triphosphate, adenosine-5′-monophosphate, adomiparin, adrenalin, adrenaline, adrenocorticotropic hormone, adriamycin, Advil, gentamicin, Afalaza, Aflapin, Aflubin, Aflurax, Aftogel, AG-01, AG-05, AG-06, AG-07, Ageratum conyzoides, agomelatine, Ajwain, AL-817, alagebrium, Alamin SN, alanylglutamine, alanyl-glutamine-dipeptide, Alaria esculenta, albendazole, albumin, Albutein, albuterol, albuterol HFA, albuterol/salbutamol, alcaftadine, Alcaine, alclometasone, alcohol, alendronate, alendronate sodium, alendronate/cholecalciferol, alendronic acid, alphacalcidiol, alphacalcidol, alfentanil, alginic acid, alhydran, Alimax, alisertib, aliskiren, Allegra, Allergovit, Allerslit forte, allopurinol, alosetron, alpha lipoic acid, alpha methyl-para-tyrosine, alpha/beta-arteether, alpha-[11C]methyl-L-tryptophan, alpha-keto acid, alpha-linolenic acid, alpha-lipoic acid, alpha-methylnoradrenaline, Alpha-Tocopherol, alprazolam, Alprostadil, Atim, aluminium based phosphate binder, aluminum hydroxide, alvocidib, amantadine, amantadine sulphate, Amargol, ambrisentan, ambroxol, ambulatory oxygen, Amerigel, amethocaine, AMI-25, amibegron, amifostine, amikacin, amikacin sulphate, aminaftone, amine fluoride, amine fluoride/stannous fluoride, aminexil, amino acids mixture, Aminoleban EN, aminomidazole carboxamide riboside, aminophylline, aminosalicylic acid, amiodarone, amithiozone, amitriptyline, amitriptyline hydrochloride, amlodipine, amlodipine besylate, amlodipine/valsartan, amlodopine, ammonia, Amnioexcel, AmnioFix, amodiaquine, amorolfine, amoxicillin, amoxycillin, Amphadase, amphetamine, Amphomul, Amphora, amphotericin B, amphotericin B deoxycholate, ampicillin, amprenavir, Amurojipin, amylmetacresol, Anaesterit, anafranil, anagrelide retard, analgecine, anastrozole, Anatabloc, Ancef, Androfeme, AndroForte 5, andrographis, Andrographis paniculata p/st extract, andrographolide, angiotensin, angiotensin amide, angiotensin II, Angipars, anidulafungin, anlotinib, annona muricata, Antara, AnteAGE, anthocyan, anthracycline, Antibiophilus, antibiophilus(Lactobacillus casei), Anti-D, antihypertensive agents, antihypertensives, antimonials, Antinitus, antipyrine, Anti-Rin, antiscorpion serum, Antistax, anti-thymocyte globulin, antithymoglobulin, Antivipmyn, Antiwei granule, Antox, apatinib mesylate, APD-209, APDDR-0901, apelin, apomorphine hydrochloride, Apo-Oxycodone CR, Apotel Max, A-prexa, aprotinin, AR-623, arabinogalactan extract, Arbidol, arbutin, Argamater, argatroban, Arginaid Water, arginine, arginine acetate, arginine hydrochloride, arginine vasopressin, argireline, Aridol, aripiprazole, Arista, Aristocort A, aristospan, armodafinil, Arnica, arsenic trioxide, Arsuamoon, Arsumax, ArtCure, Artelac Rebalance, artemether, artemisinin, artemotil, artenimol, Artequick, Artequin, artesunate, Arthrem, articaine, articaine hydrochloride, Artichoke WPC, Artrox, Artz, AS-01 adjuvant, As4S4, ascorbic acid, ascorbic acid, Askina Calgitrol, asparaginase, asparaginase medac, astaxanthin, Astragalus, Astressin 2B, asunaprevir, atamestane, Atarax, atazanavir, atenolol, Ateronon, ATG, ATG Fresenius, ATG Fresenius S, ATG-F, atomoxetine, Atorva, atorvastatin, atovaquone, atracurium, Atralin, Atrapro, atrasentan, atropine, Augment, Autan, AutoloGel, Avagard, Avocado soya unsaponifiable, axitinib, Ayulax, Ayurved Siriraj Prasaplai, azathioprine, azelaic acid, azelastine, azelastine hydrochloride/fluticasone propionate, azithromycin, bacitracin, Baclofen ER, Bacopa monnieri, Bactigras, Balance, Bangpungtongsung-san, Banlice, BanxiaHoupuTang, barium sulphate, basiliximab, Basiscreme DAC, BAY86-5032, BAY-86-5037, BAY-98-7111, bazedoxifene, BCG, BCN Peptides, beclabuvir, beclometason, beclometasone dipropionate, beclomethasone, beclomethasone dipropionate, Bedicort A, bedrocan, benazepril, Benefiber, Benjakul extract, benoxinate hydrochloride, benserazide, BenzaClin, benzalkonium chloride, benzatropine, benzocaine, benzodiazepines, benzoyl peroxide, benzydamine, benzydamine hydrochloride, benzydamine hydrochloride/cetylpyridinium chloride, benzylpenicillin sodium, beractant, berberine, Berocca Performance, Beta-1,3-glucan, Beta-Aescin, beta-carotene, Betadine, beta-glucosylceramide, betahistamine, betahistine dihydrochloride, Betaine, betaine HCl, beta-lactam, beta-lactam antibiotics, betamethasone, betamethasone acibutate, betamethasone dipropionate, Betamethasone sodium phosphate, betamethasone valerate, betamethasone valerate, betamethasone-ESI, Betaprim, BetaSal Losung, Betaserc, Beta-TCP/HA, Betnoderm, Betnovat, Betnovate, BH4, bhaspa sweda, Biafine, bicalutamide, bicarbonate, BicaVera, Bicillin L-A, Bifidobacteria lactis, Bifidobacterium breve, Bifilact, Bifluorid 10, bifonazole, Bile acids, bimatoprost, bimatoprost, bimatoprost/timolol PF, BIND-014, bioclavid, Biofreeze, Bioglan, Biogun, Bio-K+CL1285, Biolipid B2, bo-three, biotin, BioXtra, Bi-PegLyte, Biphosphonate, Biprol, birinapant, BIS ImpediMe SFB7, bisacodyl, Biseko, bismuth, bismuth subcitrate, bismuth subsalicylate, bisoctrizole, Bisono, bisoprolol, bisoprololo, bisphosphonate, Black Cohosh, Bledilait Biofer, bleomycin, Blephamide, BUS, blonanserin, Blox4, BLR-250, BLR-350, BLVR Hydrogel, bofutsushosan, Bolgre, boric acid, boron phenylalanine, boronophenylalanine-fructose complex, bortesomib, bortezomib, bosentan, bosutinib, Boswelan, Boswellia extract, Boswellia serrrata, Botulaks, bovine calf intestinal alkaline phosphatase, bovine hyaluronidase, bovine lactoferrin, bradykinin, branchamin, branched-chain amino acid, Bricanyl, brilacidin, brimonidine, brimonidine tartrate, brimonidine UD, brincidofovir, brinzolamide, brivanib alaninate, Brizantin, bromelaine, bromocriptine, bronchobarij, Broncho-Vaxom, brushing, Bryophyllum pinnatum, bryostatin-1, BSC, BSL02-150929Y, BSS Plus, BST-DermOn, Buccagel, Budesonida, budesonide, budesonide chlorofluorocarbon, budesonide hydrofluoroalkane, bulaquine, Bulkamid, buparlisib, bupivacaine, Bupivacaine hydrochloride, bupivicaine, buprenorphine, buprenorphine hydrochloride, bupropion, bupropion hydrochloride, bupropion hydrochloride SR, buproprion, burprenorphine, buscopan, Buscopan plus, buserelin, buspirone, busulfan, Busulfex, Butantan, butenyl ALA, butoconazole nitrate, butorphanol tartrate, Buzzy, B-vitamins, C-11 Acetate, C13 cholesterol, c13 methacetin, C-1-esterase, 01-esterase inhibitor, Ca ionophore, cabazitaxel, caffeine, caffeine benzoate, calci soya balance, calcichew D3, calciferol, Calcifidiol, Calcijex, calcipotriol, calcitriol, calcium, calcium acetate, calcium acetate oral, Calcium Alumina-Silicate, calcium based phosphate binder, calcium carbonate, Calcium channel blocker, calcium chloride, calcium citrate, calcium dialysate, calcium disodium EDTA, calcium fructoborate, calcium gluconate, calcium glycerophosphate, calcium hydroxide, calcium ionophore, calcium pantothanate, calcium phosphate bone cement, calcium phosphopeptide-amorphous calcium phosphate, calcium sodium phosphosilicate, calcium supplement, calcium carbonate, calcium-based phosphate binder, Calendula Weleda, Calmagen, Calmoseptine, Calver, Camel Snus, canagliflozin, Canasa, candesartan, candesartan cilexetil, Canephron N, cangrelor, cannabidiol, Cannabis, Canoderm, canrenone, cantharidin, capecitabine, Caphosol, Capilen, Cappra, capreomycin sulphate, capsaicin, captopril, carbabenzpyride, carbamazepine, Carbatin, carbetocin, carbidopa, carbogen, Carbomer, Carbon C 11 alpha-methyltryptophan, carbon dioxde, carbon nanoparticles, carbon-11 acetate, carboplatin, carbosylane, Carbosymag, Carboxymethylcellulose, Carboxymethylcellulose sodium, carfilzomib, cariprazine, carisoprodol SR, carmustine, carni Q-gel, carnosine, caroverine, carraghenates, carteolol hydrochloride, carvedilol, carvedilol phosphate, casein, casein glycomacropeptide, CasiGold, CasiMax, casopitant, caspofungin, Catechin, catecholamine, cathine hydrochloride, CD-1579, CDRI 80/574, Cebes, cefazolin, cefazolin sodium, cefazoline, cefixime, cefmetazole, cefotaxime, cefpodoxime, ceftazidime, ceftriaxone, cefuroxim, cefuroxime, Celadrin, celecoxib, Celestone, Celox, Centella asiatica selected triterpenes, cepacol, cephalexin, cephalozin, cephazolin, ceramide, Ceratonia siliqua, Cerebrolysin, Cernilton, certoparin, cerubidine, Cervitec CHX, Cetaphil, cetirizine, cetirizine dihydrochloride, cetirizine hydrochloride, cetomacrogol, cetrozole, cetuximab, cetylpyridimium chloride, Chakshusya-Rasayana, chamomile, Chamomilla, Chamomilla recutita, Chandrakanthi Choornam, charcoal, ChiNing decoction, Chixiangshen Tongxin, chlorhexidine, chlorhexidine acetate, chlorhexidine digluconate, chlorhexidine gluconate, chlorine dioxide, chlorofluorocarbon beclomethasone dipropionate, chlorogenic acid, chloromycetin, chloroprocaine HCl, chloroquine, chloroquine diphosphate, chloroquine sulphate, chloroquine/proguanil, chloroquinoxaline sulfonamide, chlorpheniramine, chlorproguanil, chlorpromazine, chlorthalidone, cholecalcierol, cholecalciferol, cholecystokinin, cholesterol, Choline, choline bitartrate, choline dihydrogen citrate, chondroitin sulphate, Chondroitin sulphate/Diacerein, chondroitin sulphate-iron colloid, Chondrosulf, Chong Kun Dang, chorionic gonadotropin, chromium, chromium ethylenediaminetetraacetic acid, chromium nicotinate, chromium piccolinate, chromium picolinate, CI-581, cibenzoline, ciclesonide, ciclopirox, ciclopirox olamine, ciclopiroxolamine, ciclosporin, ciclosporin Pro, Cimicifuga racemosa, cinacalcet, cineole, CINGAL, cinitapride hydrogen tartrate ER, cinnamon, cinnarazine, cinnarizine, Clonal, ciprofloxacin, ciprofloxacin hydrochloride, cis-4-hydroxy-L-proline, cisatracurium, cis-atracurium, cisatracurium besilate, cisplatin, citalopram, citalopram hydrobromide, citicoline, Citracal, Citrafleet, citrate, citric acid, citric acid-based nano hydroxyapatite, cladribine, clarithromycin, clarithromycin ER, clavulanate, clavulanate potassium, Clenil Compositum, Clenilexx, Clindac-A, clindamycin, clindamycin phosphate, Clinisol, Clinolipid, Clino-san, Clinpro, ClinSupV3, ClinSupV3ER, clobetasol, clobetasol propionate, clobetasone butyrate, Clobex, Cloderm, clofarabine, clofazimine, Clomid, clomiphene, clomiphene citrate, clomiphene citrate HMG, clomiphene citrate rFSH, clonazepam, clonidine, clonidine HCL, clopidogrel, clopidogrel bisulphate, Clopirin, Cloratadd D, clorhexidine, cloricromen hydrochloride, clotrimazole, clotting factor FVIII, clozapine, CO2, co-amoxiclave, co-artemether, cocaine, cocaine HCl, Coccinia cordifolia, Coccinia grandis, Cocculine, cocoa, Co-codamol, codeine, codeine phosphate, codeine sulphate, codeine/paracetamol, coenzyme A, coenzyme Q, Coenzyme Q10, Cofact, Cofantrine, cogniVida, colchicine, Colchicum LM, Colchimax, colecalciferol, colesevelam, Colibiogen, colistin, Collagen tripeptide, colloids, Colonlytely, Colopeg, Colpermin, colposeptine, CombiflexOmega, CombiflexOmega peri, Committ Lozenge, Comp-01, Compleat, compound sodium alginate, Compound Sodium Lactate, Condrosulf, Conivaptan, Conjugated equine estrogen, conjugated equine estrogens, conjugated estrogen, conjugated estrogens, conjugated linoleic acid, Contovir, Contractubex, contusugene ladenovec, Coolprep, Cordyceps sinensis, Corever, Corsodyl, Cortef, corticosteroid, corticosteroids, corticotropin-releasing hormone, cortisol, CORvalen, CosmoFer, cotinine fumarate, cotrimoxazole, co-trimoxazole, coumarin/troxerutin, cranberry, Creapure, creatine monohydrate, Crescita, Cresnon, cromolyn, cromolyn sodium, Crosslinked hyaluronic acid, Cry j1-galactomannan, cryoprecipitate, crystallized human recombinant insulin, crystalloid, crystalloids, C-Tb, Curasept, curenext, Curosurf, cuscuta, custodiol, Custodiol HTK, cyanoacrylate, cyanocobalamin, cyclizine, cyclobenzaprine, Cyclokapron, Cyclomydril, cyclophosphamide, cycloserine, cyclosporine microemulsion, cyclo-Z, Cynara scolymus, cyproheptadine, cyproheptadine hydrochloride, cyproterone acetate, cysteine hydrochloride, Cystone, cytarabine, cytarabine, cytosine arabinoside, cytomel, D-(6,6-[2]H2)glucose, DA-9701, dabigatran etexilate, dabrafenib, DAC N-055, dacarbazine, daclatasvir, dacomitinib, dafalgan, Dafalgan codeine, Daflon, daiobotanpito, Dalap Duo, dalbavancin, d-alpha-tocopheryl acetate, daminaide 995, D-amphetamine, Danzen, DAOI-B, dapivirine, dapsone, daraprim, darexaban, darunavir, dasabuvir, dasatinib, Dawa-e-Musakkin, D-chiro-inositol, d-cycloserine, D-cyclosporine, dDAVP, debrisoquine, decitabine, Decortin H, deferasirox, deferoxamine mesylate, Deflux, Dehydrex, dehydroepiandrosterone, dehydroepiandrosterone sulphate, dehydroepiandrostrone, Dehypotin, delmopinol, delparantag, delta-9-tetrahydrocannabivarin, Demerol, Dentaid, deoxycholate, Depakote DR, Depalgos, Deplin, depot medroxyprogesterone acetate, deprenyl, dequalinium chloride, dermabrasion, Dermacid, Dermacyd, Dermacyd breeze, Dermacyd Femina, Dermacyd Femina Delicata, Dermacyd PH_DETINLYN, Dermacyd PH_Detinlyn Tangerine mix, Dermacyd Silver Floral, Dermacyd Silver Frutal, Dermacyd Tina Tangerina Mix, Dermacyn, Dermacyte, Dermatix, dermatop, Dermatophagoides pteronyssinus, Dermatophagoides pteronyssinus 1, Dermylex, Derris scandens Benth extracts, Desensebilize Nano P, Desensibilize KF, Desenssiv, desflurane, desipramine, desipramine hydrochloride, desloratadine, desmethyl-loperamide, Desmotabs, desogestrel, Desonide, desonide hydrogel, desorelle, Desoximetasone, Destin, desvenlafaxine, Detralex, dexamethasone, dexamethasone nanoparticles, dexamethasone sodium phosphate, dexamethasone USP Micronized, dexamethasone w, dexamphetamine, dexamphetamine SR, Dexcom G4 Platinum sensors, dexeryl, dexfenfluramine, dexketoprofen trometamol, dexmedetomedine, dexmedetomidine, dexotic, dexpanthenol, dextralink, dextran, dextran 70, dextrin, dextro-amphetamin, dextroamphetamine SR, dextromethorphan, dextromethorphan hydrobromide, dextropropoxifen, dextrose, D-galactose, dHACM, Dhatri Lauha Vati, Diabecinn, Diabetan, diacerein, diacetylmorphine, dialysate bicarbonate, dialysate calcium, Dialysate magnesium, dialysate sodium, Diamicron MR, Diamox, Dianeal, Diazepam, dichloroacetate, diclofenac, diclofenac diethylamine, diclofenac epolamine, Diclofenac HPBCD, diclofenac sodium, dicyclomine hydrochloride, didanosine, Didrogyl, Diena, Dietressa, digoxin, digoxine, dihydroartemisinin, dihydroartemisinin-piperaquine, diindolylmethane, Dilaudid, dill, diltiazem, diltiazem hydrochloride, dimercaptosuccinic acid, dimethicone, dimethindene maleate, dimethyl fumarate, dimeticone, dinaciclib, dinitrate isosorbide, dinitrochlorobenzene, dinoprostone, diosmectite, Dipeptiven, Diphenhydramine, diphenhydramine citrate, diphenhydramine hydrochloride, dipotassium-clorazepate, Diproderm, Diprospan, dipyridamole, dipyrone, diquafosol, diquafosol sodium, diquafosol tetrasodium, Disci/Rhus toxicodendron comp., Discogel, disodium cromoglycate, disodium cromoglycate/reproterol, disulfiram, diuretics, Diurisa, divalproate sodium, DL-alpha-tocopherol, d-Limonene, D-mannitol, D-methionine, dobutamine, docetaxel, doconexent ethyl ester, docosahexaenoic acid, docusate, docusate sodium, dofetilide, Dogmatil, Dolocam plus, dolutegravir, domperidone, domperidone maleate, donepezil hydrochloride, Dong Quai, Donifoxate, dopamine, dornase alpha, dorzolamide, dorzolamide hydrochloride, Dosin, doxapram, doxazosin, doxercalciferol, doxofylline, doxorubicin, doxorubicin hydrochloride, doxycycline, doxycycline hyclate, doxycycline monohydrate, doxycycyline, d-penicillamine, d-phenothrin mousse, DPP-4 inhibitor, D-reglis, Drioff, Drisdol, Drogenil, dronabinol, drospirenone, drotaverine hydrochloride, Drotin A, DRxHQ Brightning, Drysol, DTP3a-IPV-HBV/HIB vaccine, DTPw-HBV/HIB vaccine, Dual-time PET/CT, duloxetine, Duolans, DuoTrav APS, Duphastone, duramorph, DuraPrep, Durolane, Durolane SJ, dutasteride, dydrogesterone, Dydrogesterone M, Dynamiclear, Dynexan Mundgel, dypirone, E-004, eberconazole, EC-17, Echinacea, Echinacea purpurea, EchiTabPlus-ICP, Ecologic Femi, econazole nitrate, EconoPred Plus, ECP-019, Ecstasy, Ectoin, edaravone, edoxaban, edroxyprogesterone acetate, EDTA, EDTA-T, Eductyl, Efamax, efavirenz, EFB-0026, Effaclar, eflornithine, eformoterol, Efudex, EGb 761, EGb-761, Eicosapentaenoic acid, Ekzevowen derma, Elaeagnus angustifolia, elbasvir, Electrolytes, elemental calcium, elemental iron, Elestat, Eligen B12, Elimite, ellagic acid, Elo-Mel Isoton, eltrombopag, Emdogain, EMLA, empagliflozin, EMS acarbose, emtricitabine, En2nox, enalapril, Enalapril-TAD, encenicline, enclomifene citrate, endolubri, endotoxin, Engystol, Enjuvia, Enox, Enoxa, enoxaparin, enoxaparin sodium, Ensure, entecavir, enteric-coated mycophenolate sodium, Enterogermina, Enterolactis plus, Entonox, epalrestat, eperisone HCl SR, ephedra, ephedrine, ephedrine hydrochloride, Epimorph, epinastine hydrochloride, epinephrine, epirubicin, epithelium-off, EPO-alpha, epoetin-alpha, Epogam-1000, epoietin zeta, EPs 7630-solution, epsilon aminocaproic acid, EQ-5, equine estrogen, eremostachyslaciniata, Ergocalciferol, ergoferon, ergotamine, eribulin mesylate, Erigeron breviscapus, erlotinib, Erylik, erythomycin, Erythrina mulungu, erythritol, erythromycin, erythromycin ethylsuccinate, erythropoietin beta, Esarin, Escherichia coli endotoxin, Escherichia coli rHu GM-CSF, escitalopram, eslicarbazepine acetate, esomeprazole, esprico, Essiac, esterified estrogen, estetrol, Estrace, estradiol, estradiol acetate, estradiol hemimydrate, Estradiol valerate, estrodiol, Estrofem, EstroG-100, Estrogen, ethambutol, ethambutol hydrochloride, ethambutol+rifampin+pyrazinamide, ethanol, Ethinyl E2, ethinylestradiol, ethyl eicosapentaenoate, Ethyl vinyl acetate, Ethyl-eicosapentaenoic acid, ethylenediamine dihydrochloride in methylcellulose, ethylenediamine dihydrochloride in polyvinylpyrrolidone, ethylmethylhydroxypyridine succinate, ethynil estradiol, etidronic acid, etifoxine, etimicin sulphate, etinoline, etirinotecan pegol, etizolam CR, etodolac, etomidate, etonogestrel, etoposide phosphate, etoricoxib, E-TRANS Fentanyl hydrochloride, Eucerin, Euflexxa, Euminz, Eupasidin-s, Euphorbia prostrata, Euthyrox, Eutrophill, everolimus, Eviendep, eviprostat N, evofosfamide, EvoraKids, Evoser, EVT-301, exemestane, exendin, extended-release metformin, Extraneal, EYN-1601, EZ-Paque, EZ-Varibar, F-18 16-alpha-fluoroestradiol, F-18 Fludeoxyglucose, F-18 fluorodeoxyglucose, F-18 fluorothymidine, F-18 NaF, F-18-F-DOPA, F-18-fluoro-deoxi-glucose, famotidine, Fang(30), Fansidar, Faramir, Faringosept, Farlutal, faropenem, Fastact, fatty acid, F-Choline, F-deoxyglucose, FDG, FDG-(18F), FEC-100, felodipine, femanest, Femarelle, Femoston, Femulen, fenfluramine, fenofibrate, fenofibric acid, fenoterol, fenoverine, Fentanest, fentany, Fentanyl, fentanyl citrate, fenugreek seed, ferfolic, Ferogradumet, Feronia-XT, ferric carboxymaltose, Ferro Sanol, Ferro Zinc, FerroGrad, ferrosulphate, ferrous ascorbate, ferrous bisglycinate chelate, ferrous fumarate, ferrous glycine sulphate, ferrous glycine sulphate complex, ferrous iron sulphate, ferrous sulphate, FES, Fetal neural retinal tissue, fevipiprant, fexofenadine, fiacitabine, fibrinogen, fibrinogen concentrate, Ficortril, filgrastim, Filme Nasale, Filtek Silorane p90, Filtek Supreme—3M, Finalgon, finasteride, fingolimod, FiO2, firategrast, Fitostimoline, Flamazine, Flammacerium, Flammazine, Flavangenol, flax lignans, flecainide, flecainide acetate, Rector Tissugel Heparine, FloraGLO, Florajen3, florbetapir, Florestor, Florisia, florouracil, FloSeal matrix, FLT, flucinolone, fluconazole, fludarabine, Fludeoxyglucose, fludeoxyglucose F 18, fludiazine, fludrocortisone, fludrocortisone acetate, Fluimucil, Flumicil, fluocinolone, fluocinonide, Fluomizin, fluorescein sodium, Fluoride, fluorine F 18 fluorothymidine, fluorine F 18 sodium fluoride, Fluorine F 18-clevudine, fluorine F-18 fluorodopa, fluorine-18 fluorocholine, Fluorine-18 labeled L-leucine analog 1-amino-3-fluorocyclobutane-1-carboxylic acid, FluoroDeoxyGlucose, fluoro-L-thymidine, fluoro-L-thymidine-(18F), fluorometholone, fluorometholone, fluorothymidine, fluorouracil, fluoruracil, fluoxentine, fluoxetine, fluoxetine HCL, fluoxetine hydrochloride, flupentixol, fluphenazine decanoate, flupirtine maleate, flurbiprofen, flutamide, fluticasone, fluticasone furoate, fluticasone propionate, Folate, FOLFIRI, Folic acid, folinic acid, follicle stimulating hormone, Folrex, Forair, Foraseq, foretinib, Forlax, formalin, Formatris, Formoline L112, Formopen, formoterol, formoterol fumarate, formoterol Spiromax, formoterol/budesonide, formoterol/fluticasone, fosamprenavir, foscarnet sodium, foscavir, fosfolipovit, fosmidomycin, fostamatinib, Fostipur, Fragmin Protamin nano particle, framycetin sulphate, freezed-dried plasma, Fresofol, fructo-Oligosaccharides+Bacillus coagulans, Fructus Mume, FS VH SID 500 S-apr, FSH-r, Fucicort, Fucidin, fucoidan, fucoxanthin, fulvestrant, fumaric acid esters, Funhab, furosemide, Furoxone, fusidic acid, fusidic acid+adapalene, fuxiong san, Fu-zheng-qu-zhuo, FX80, G238, gabapentin, Gablofen, gadobenate dimeglumine, Gadolinium, gadopentetate dimeglumine, Gadopentetic Acid, gadoterate meglumine, gadoxetate disodium, galactooligosaccharide, galactose, Gallium-68 citrate, gallium-68-DOTATATE, galvanizator, Gambrosol-Trio, Gamma hydroxybutyric, gamma-amino-butyric acid, gamma-hydroxybutyric acid, gamma-linolenic acid, gamma-tocopherol, gammimmune N, ganciclovir, gancyclovir, Ganeden BC-30, Ganfort, ganirelix acetate, Ganoderma lucidum, gantacurium chloride, gargle dextromethorphan, Gargling, Garlicin, garsin, gastrofin, Gastrografin, Gastroview, Gastrus, gatifloxacin, Gatorade, Gavindo, GCJBP Laennec, G-CSF, G-CSF mobilized PB-MNC, gefitinib, Gel-200, gelatin, gelatin hydrogel, Gelclair, Gelesis-100, Gelofen, Gelofusine, Gel-One, Geloplasma, Geltim LP, gemcitabine, Gencydo, generic, GenF20 Plus, genistein, Genistein combined polysaccharide, gentamicin sulphate, gentamycin, gentamycine, Genteal HA, gestapuran, gestodene, ghrelin, GHRP-3, GIC KetacMolar Easymix, GIK, gimeracil, gin, Ginger, Gingko biloba, Ginkgo biloba, Ginkgolides Meglumine, Ginsana, Ginsana-115, Ginseng, Gintuit, Gipotef, glibenclamide, gliclazide, glimepiride, glimepiride ER, glipizide, GLP-1 analogs, glucagon, Glucagon-like peptide 2, Glucagon-like Peptide-1, Glucagon-like-peptide-1 amide, Glucantime, Glucerna, Glucion, glucomannan, glucopyrron, glucosamine, glucosamine sulphate, Glucose, glucose dependent insulinotropic polypeptide, glucose insulin potassium, Glucose potassium insulin, Glucose PROAMP 30%, glucose-bicarbonate-ringer lactate, glucose-dependent insulinotropic peptide, glucose-insulin-potassium, Glumin XR, glutamine, glyceral trinitrate, glycerin, glycerine, glycerine magnesium sulphate, glycerine trinitrate, glycerol, glycerol trinitrate, Glycerol/heparin, glyceryl nitrate, Glyceryl triacetate, glyceryl trierucate and glyceryl trioleate, glyceryl trinitrate, glycolic acid, glycopyrrolate, glycopyrronium, glycopyrronium bromide, glycosidase inhibitor, glycyrrhizin, GlyT-1 inhibitor-1, GlyTI-M, GM1 Ganglioside, GMP-grade HRV-39, GnRH antagonist, GnRHa, Gokshur-punarnava basti, Goksura, Golnaar, Golytely, Gonadotropin, gonyautoxin, goserelin acetate, GRALB, gramicidin, Grammidin, granisetron, Granulocyte colony-stimulating factor, granulocyte-macrophage colony-stimulating factor, grazoprevir, Grintuss, GSK-3532795, GTR, guaifenesin, Gualou, guanfacine, guanidinoacetic acid, guggul extract, guggulu, Gugulipid, Guifu dihuang pill, Guilongtongluofang, GutGard, GW-05, GW-2000-02, GWP-42004, Gymnema sylvestre, Gynazole 1, Gynomunal, Gynophilus, HAART regimen, Habitual hemostasis, Haelan, Haemate HS, Haemate P, HAIRAL 7, HalfLytely, halobetasol propionate, halometasone, haloperidol, haloperidole, haloperidole/perphenazine, Hamdoroid, Hametum, hangekobokuto, Haridra Khanda, Harpagophytum, Hartmann's solution, hawthorn, heavy silicone oil, Heberprot-P, Hedrin lotion, Hedrin Once, Heliox, Heliox gas, helium-hyperoxia, helium-powered albuterol, heme iron polypeptide, HemoHES 6%, Hemoionic, Hepalean, hepalean heparin, Heparin, heparin sodic, heparin sodium, heparin sulphate, HepaSphere, HepaSphere Microspheres, Hepavir, herba scutellaria Barbatae, Herbagut, Herbavate, Herbmed plus, heroin, HES 130/0.42, hesperidin, Hetastarch, hexacetonide triamcinolone, hexylresorcinol, hGM-CSF, Hibiscus sabdariffa, HiDHA, Hidroferol, High fibre, High flow oxygen, highly purified urinary follicle stimulating hormone, Hingwastaka choorna, histaglobulin, histamine, histidine-tryptophan-ketoglutarate Custodiol, HIVS-2004, HLA-A24-restricted peptide, HMG, hMG-IBSA, Hochu-ekki-tou, Holopon, homatropine, Homeodent, HP menotrophin, hPTH 1-34, HPV4 vaccine, hR3 MaB, hua tan san, hua tuo zai zao wan, Huangqi Bushen, Hugeltox, human acylated ghrelin, human chorionic gonadotrophin, human Chorionic gonadotropin, human FSH, human ghrelin, human menopausal gonadotropin, human recombinant epidermal growth factor, human recombinant erythropoietin, Human recombinant growth hormone, Human Recombinant Interferon-alpha, Human thrombin, Human urinary kallidinogenase, Humate-P, Hwangryunhaedoktang, Hyabak, Hya-Joint, HYAJOINT Plus, Hyalobarrier, hyaluronan, hyaluronan hydrogel, hyaluronate sodium, hyaluronic acid, hyaluronic acid-carboxymethylcellulose, hyaluronidase, Hyaneb, Hydrabak, hydralazine, hydralazine hydrochloride, hydrochloric acid oxybuprocaine, hydrochlorothiazide, hydrocizine, hydrocodone, hydrocodone/APAP, Hydrocortison, hydrocortisone, hydrocortisone acetate, Hydrocortisone hemisuccinate, hydrocortisone sodium acetate, hydrocortisone sodium succinate, Hydroeye, hydrofluoroalkane-134a beclomethasone dipropionate, Hydromorphone, hydromorphone hydrochloride, Hydromorphone Hydrochloride Extended-Release [HHER], hydroquinone, hydroxy camptothecin, hydroxy ethyl starch, Hydroxy Ethyl Starch 130/0.4, Hydroxy Ethyl Starch 70/0.55, hydroxycamptothecia, hydroxycarbamide, hydroxychloroquine, hydroxychloroquine sulphate, hydroxycitrate, Hydroxyethyl starch, Hydroxyethyl starch 130/0.4, hydroxyethyl starch+sodium chloride, hydroxyethylsterke, hydroxyisohexyl 3-cyclohexene carboxaldehyde, hydroxynortriptyline, hydroxyprogesterone caproate, hydroxypropylmethylcellulose, Hydroxyurea, hydroxyzine, Hylagan, Hylenex, Hylo-Comod, HYNR-CS inj, hyoscine, hyoscine bromide, hyoscine butylbromide, hyoscine hydrobromide, hyoscine N-butylbromide, hyoscine-N-butyl bromide, hyoscine-N-butylbromide, hyosine butylbromide, hyperbaric bupivacaine, hyperbaric levobupivacaine, hyperbaric oxygen, Hyperbaric prilocaine, HyperHAES, hypericum, Hypericum extract WS-5570, Hypericum perforatum, Hyperimmune intravenous immunoglobulin, hyperosmolar sodium lactate, Hyperoxia, HyperSal, Hypersaline, Hypertonic lactate, Hypertonic saline, hypertonic saline/Dextran-70, hypertonic saline/hetastarch, hypertonic saline-dextran, Hypiran, Hypocol, Hypo-osmolar ORS, hypo-osmolar riboflavin, hypotonic saline, hypromellose, Hyruan Plus, I-123 15-(4-iodophenyl)-3(R,S)-methylpentadecanoic acid, I-123-ADAM, I-124, I-125, I-131, Ibalgin, ibandronic acid, ibopamine hydrochloride, Ibuprofen, ibuprofen arginine, ibuprofen sodium, ibuprofen/acetaminophen, ibuprofen/phenylephrine, ibuprofen/phenylephrine/chlorpheniramine, ibuprofenamine hydrochloride, Icaps, Ichthraletten, iclaprim, icodextrin, icodextrin dialysate, icosapent ethyl, icosapent ethyl ester, ICT-107, idarubicin, idebenone, idraparinux sodium, IFN, IFN-beta-1, IFN-gamma, Ifosfamide, IK-01, IK-5001, ikshvadi avaleha, IL-1Ra, IL-2, iloperidone, Iloprost, imatinib, imatinib mesylate, imatinib-TL, Imazol, imipenem, imipramine, Imiquimod, immediate release methylphenidate, immediate-release oxcarbazepine, IMMUNATE S/D, Immunine, immunoglobulin, immunoglobulin G, ImmunoHBs, immunomodulator drug, IMMUVAC, Imodium Plus, Imotun capsule, Imovane, Imprimis, Imuran, Imurril, inactivated poliovirus, indacaterol, indacaterol maleate, indapamide, indisetron, Indium 111-DTPA, indium In 111 folic acid, Indium In 111 pentetreotide, Indivina, indobufen, indocyanine green, indole-3-carbinol, Indoleamine 2,3-dioxygenase peptide vaccine, indomethacin, indoximod, Ineo, Inersan, Infloran, Influcid, Infufer, Ingavirin, ingenol, ingenol disoxate, Ingenol Mebutate, Innolak, INOmax, inositol, IN-PHARM-002, inspired oxygen, Instillagel, insulin, insulin aspart protamine+insulin aspart, Insulin Nph, IN-SUPR-002, interferon, interferon alpha-2b, interferon alpha 2a, interferon alpha-2, Interleukin-2, Intralipid/heparin, Intralipid/Liposyn, intralipids, IODEX, Iodex Ultragel, Iodide, Iodine, iodinel 125, iodine-131, iodopovidone, Iodosorb, iohexol, ionic silver, Iopamidol, Iota-Carrageenan, IP-007, Ipocal, ipraglifrozin, ipramol Ster-Neb, ipratropium, ipratropium bromide, ipratropium bromide HFA-134a, ipratropium bromide/salbutamol sulphate HFA, IPT-sulphadoxinepyrimethamine, iralvex, Iranian clozapine, irbesartan, Irgacare MP, iridium-192, irinotecan, irinotecan sucrosofate, Iron, iron bisglycine chelate, iron Carboxymaltose, iron hydroxide polymaltose, iron isomaltoside 1000, iron sucrose, iron sulphate, Iron supplement, iron-HES, IRONPLUS, isavuconazonium chloride/sulphate, Ismigen, Isocolan, isoflavone, isoflavones, isoflurane, Isoniazid, isoprinosine, isopropyl alcohol, Isopto-Dex, isosorbide-dinitrate, isosulfan blue, Ispaghula husk, istradefylline, itraconazole, ivabradine hydrochloride, ivacaftor, IVF-M HP, ixabepilone, Ixeris of sonchifolia Hance, Jasmine officinale, Jiangtang Xiaozhi, Jobelyn, Jonosteril, josamycin propionate, Juzentaihoto, Juzen-taiho-to, kalcipos-D, Kalinox, Kallunk oxide, kanamycin, kanamycin/metronidazole, kandhaga rasayanam, Kanuka, Kardostin, Kava, Kefir, Keflin, keishi-bukuryo-gan-ka-yokuinin, kelocote, Kemstro, kenacort, Kenalog, Kenalog-40, ketamine, ketamine hydrochloride, Ketasyn, ketoconazole, ketofol, Ketoprofen, ketoprofen lysinate, ketoprofen lysine, ketorolac, Ketosteril, ketotifen, ketotifen fumarate, KHCO3, Kikyo-to, Kligman's Trio, Klimadynon, Klorhex, Klyx, koloforta, Konakion MM, kopyrrol, KP24, KRG (Korea Red ginseng), Ksenaltena, Kuan-Sin-Yin, Kukkkutanda Twak, KULIST, kunxian, kunzea oil, Kytta-Salbe f, KyungBangn Gamisoyosan, KyungBangn-Gamisoyosan-x-gwarip, L bupivacaine, L sakei KCTC 10755BP, L-[1-C]-valine, LAAM, labetalol, labetalol hydrochloride, L-acetyl carnitine, L-acetylcarnitine, Lacidophil, lacosamide, Lacribell, lactase, lactate, lactate Zhry capsules, Lactated Ringer's solution, Lacteol, LacTEST, lactic acid, lactitol monohydrate, Lactobacillus acidophilus, Lactobacillus acidophilus L-92, Lactobacillus acidophilus NCFM, Lactobacillus brevis CD2 lozenges, Lactobacillus casei strain Shirota, Lactobacillus fermentum, Lactobacillus GG, Lactobacillus paracasei Lpc-37, Lactobacillus reuteri, Lactobacillus reuteri RC-14, Lactobacillus rhamnosus, Lactobacillus rhamnosus GG, Lactobacillus rhamnosus GR-1, Lactobacillus salivarius LS01, Lactobacillus strain Th1, Lactobacillus reuteri DSM 17938, lactoferrin, lactofiltrum, Lactol, lactose, lacto-tripeptide Ile-Pro-Pro (IPP), Lactowell, Lactulose, L-alanine, L-Alpha Glycerylphosphorylcholine, Lamaline, Lambdalina, lamivudine, lamotrigine, lansoprazole, lanthanum carbonate, lanzoprazole, lapatinib, Lapis judaicus, L-arginine, L-arginine aspartate, L-arginine hydrochloride, laropiprant, L-ascorbic acid, latanoprost, latanoprost PK, Lattoglobina, Lavasept, Lavender, Laxabon, Lax-asab, Laxymig, L-baclofen, LBSA-0103, L-citrulline, Lcr Regenerans, L-dopa, Ledermix, ledipasvir, lenalidomide, Lepisor, leptin, leptin A, leptin A-100, lercanidipine, lesinurad, Lessina, letibotulinumtoxinA, letrosol, letrozole, Leucine, leucovorin, leucovorin calcium, Leukichtan, leukotriene D4, leuprolide, leuprorelin acetate, levacetylmethadol, levalbuterol, levalbuterol hydrochloride, levamisole, levenorgesterol, levetiracetam, levobupivacaine, levocabastine hydrochloride, levocarnitine, levocetirizine, levodopa, Levodyn, levofloxacin, levomefolate calcium, levomepromazine, levonorgestrel, levophed, Levosert-20, levosimendan, levothyroxin, levothyroxin sodium, Levothyroxine, levothyroxine sodium, L-glutamine, L-GSH, lianhua qingwen capsule, Lianhuaqingwen, LIBERTAL, Licaps, Licefreee, LiceMD, licorice, lidocaine, lidocaine hydrochloride, lidocaine/adrenalin, lidocaine/tetracaine, LidoDyn, lignocaine, linaclotide, linagliptin, Lingzhi, Linolacort Hydro, linoleic acid, LinumLife EXTRA, Lioresal, liothyronine, liothyronine sodium, liothyronine sodium/triiodothyronine, Lipicure80, Lipidem, lipid-nutrients, Lipigesic M, Lipilou, Lipinon, Lipiocis, Lipiodol, LipoCol Forte, Lipofundin MCT, Lipogel, lipoic acid, Lipophilic hydroxy acid, Lipoplus, lipopolysaccaride, Lipopolysaccharide, Liposic, liposomal 9-Nitro-20, cyclosporine, liposomal amphotericin B, liposomal bupivacaine, liposomal doxorubicin hydrochloride, liposomal iron, liposomal latanoprost, liposomal prednisolone, Lipuro, LiQ-Nol, liquid nitrogen, liquor carbonis distillate, lisdexamfetamine, L-isoleucine, Lisonorm, listerine, Litesse Ultra, lithium, lithium carbonate, Lithium gluconate, lithium sulphate, Litramine, liu wei di huang pill, Livact, Livact Granules, L-leucyl-L-leucine methyl ester, (lidocaine hydrochloride, L-lysine, LMB B, LMB C, L-Menthol, L-methylfolate, LMX-4, L-NAME, L-NG-monomethylarginine, locapred, Locobase Repair, lofexidine, lomerizine, Lomotil, lonafarnib, Lo-Ovral, loperamide, lopinavir, loratadine, lorazepam, lorcaserin, lornoxicam, lornoxicam SR, lornoxicam/paracetamol, Lortab, losartan, loteprednol, loteprednol etabonate, Louxiangdan Tongxin, lovastatin, loversol, Low dialysate calcium, low-dose fentanyl, loxoprofen sodium, lozenges, LPS, L-selenomethionine, I-tetrahydropalmatine, L-Theanine, L-thryoxine, L-thyroxin, L-Thyroxine, L-Tryptophan, L-tyrosine, lubiprostone, Lubricin, lucinactant, Lugol's iodine, lumacaftor, Lumartem, lumefantrine, lupeol, Luphere, lurasidone, luseogliflozin hydrate, Lutrepulse, LY-3053102, Lyc-o-Mato, lycopene, lymecycline, Lymphdiaral Basistropfen, Lymphomyosot, Lyral, lysergic acid diethylamide, lysine acetylsalicylate, lysozyme, lysozyme hydrochloride, LZ Complex3, MAb 17-1A, Mablet, macadamia nut/oil, macrogol, macrogo13350, Madhumega chooranam, magnesia, Magnesium, magnesium bicarbonate, magnesium carbonate, magnesium chloride, magnesium citrate, magnesium hydroxide, magnesium oxide, magnesium pidolate, magnesium sulphate heptahydrate, magnesium sulphate, magnesium-aluminium antacid, MagniXene, Magnox 520, Malacur, malic acid, maltodexterine, Maltodextrin, Mannan Binding Lectin, mannitol, maralixibat chloride, Marijuana, Marine phospholipids, Maxepa, Maxidex, Maxigesic, Maxigesic 325, Maximum D3, Maxitrol, Maxolon, Maxomat, mayinglong musk, MaZiRenWan, mCPP, MDMA, mebendazole, mebeverine, MEBO, Mebo, mecobalamin, mecobalamin monohydrate, MediHoney, medroxyprogesterone, mefenamic acid, mefloquine, Megace, megesterol, megestrol, megestrol acetate, meglumine antimoniate, meglumine antimony, melatonin, melatonin SR, Melfade, Melissa officinalis, melissan, melitracen, meloxicam, melphalan, memantine hydrochloride, menadiol phosphate, menaquinone 7, menatetrenone, Menest, Menevit, Menopur, menotrophin, menthol, menthol nicotine polacrilex, MEOPA, Mepentol Leche, meperidine, Mepiform, Mepilex Ag, mepivacaine, mercaptopurine, Merional, Merislon, Merlin, Meropem, meropenem, Mersina, mesalamine, Mesalazine, mesalazine EC, mesna, Meso Tetra Porphine, meta-chlorophenylpiperazine, metaclopramide, Metamin 3D, metamizol, metamizole, metamizole sodium, metaraminol, metclopramide, Meteospasmyl, metformin, mefformin ER, metformin hydrochloride, metformin IR, mefformin SR, metformin/glimepiride, metformin/sitagliptin, methacholine, methacholine chloride, methadone, methadyl acetate, methamphetamine, Methergine, methimazole, methionine, methocarbamol, methotrexate, methoxsalen, Methyl 5-aminolaevulinic Acid, methyl aminolevulinate, Methyl B12, methyl nicotinate, methylcellulose, methylcobalamin, methylene blue, methylene blue dye, methylphenidate, methylphenidate extended release, methylphenidate hydrochloride, methylprednisolone, methylprednisolone acetate, methylprednisone, metoclopramide, metoprolol, metoprolol succinate ER, metoprolol tartrate, metreleptin, metrifonate, MetroGel, metronidazole, metronidazole benzoate, metypredsolone, mFOLFOX6, MgSO(4), micafungin, miconazole, miconazole nitrate, microcrystalline cellulose, micronized progesterone, Microvlar, midazolam, midazolam hydrochloride, midodrine, mifepristone, Mignar MF, Migraleve, Miniderm, Minidril, MINIRIN Oral Lyophilisate, minocycline hydrochloride, minocycline-EDTA, minoxidil, mirabegron, MiraLax, mirazid, mirogabalin, mirtazapine, misoprostol, miswak, mithramycin, mitiglinide, mitomycin, mitoxantrone, MK-0507a, MLF-541, MMR vaccine, MNC-01, modafinil, molindone hydrochloride, Momendol, mometasone, mometasone furoate, mometazon froat, Momordica charantia, monoammonium glycyrrhizinate glycine DL-methionine, monocaprin, monochloroacetic acid, monosodium glutamate, Monovisc, montelukast, montelukast sodium, Monurelle Biogel, Moov, Morphine, morphine sulphate, Motherwort extract, Motilium, Motore, Motrin, Movicol, movicolon, moxaverine, moxifloxicin hydrochloride, MPT64, MS Contin, Mscontin, Mucinex, Mucinex D, Mucoangin, Mucopolysaccharide polysulphate, mudga yoosha, MultiBic, Multivitamin, mupirocin, murepavadin, MuStD05 vaccine, Mutaflor, Muxan, mycophenolate mofetil, mycophenolic acid, Mydriasert, myfortic acid, Mygliol 810, myo-inositol, Myrrhinil-Intest, mythylprednisolone, N acetyl-aspartyl-glutamic acid, N(2)-L-alanine L-glutamine dipeptide, N(G)-monomethyl-L-arginine, N-13-ammonia, N2O—O2 mixture, n-3 fatty acid, n-3 PUFA, n-3 PUFAs, Na ascorbate, Na sulphate, Na134I, Nabi-HB, nabiximols, N-acetyl-aspartyl-glutamate, N-acetylcysteine, N-acetylsucteine, NaCl, NaCl/hydroxyethylstarch, nadroparin calcium, NaF, Naftin, nalbuphine hydrochloride, naloxone, naltexone, naltrexone, naltrexone hydrochloride, naltrexone implant, naltrexone SR, naltrexone-HCl, nandrolone decanoate, NanoCis, nanocrystalline silver, Naoan, naphazoline, naphthoquine, Naprosyn, Naproxen, naproxen sodium, naproxene, naratriptan, Nardostachys jatamansi, Nartana, Nasaleze, Nasha Dx, Nasik, Nasopore, native glp-1, natriumchloride, natriuretic peptides, Natsa, Nattokinase, natural progesterone, Natural source d-alpha-tocopheryl acetate, Naturetti, nebivolol, nefopam, NeoGep, neomycin, neomycin sulphate, NEOSORB PLUS, neostigmine, Neptazane, nesdonal, Nettle, Neumoterol, Neumotex, Neuragen, Neuraxen, Neurodoron, neuropeptide Y, Neuroskin forte, Neurotec, NeutraLice, nevirapine, Newfill, Nexrutine, NG-monomethyl-L-arginine, NH(3), niacinamide, Niacin-ER, Niacor, nicardipine chlorhydrate, nickel sulphate, nicoboxil, Nicoderm, nicorandil, nicotinamide, nicotine, nicotinic acid, Nidadd, nifedipine, Niferidil, Nigella, Nigella sativa, nilotinib, nimodipine, nintedanib, nitrate, nitrates, nitric oxide, Nitrite, Nitrofurantoin monohydrate, nitrogen, nitroglycerin, nitroglycerine, Nitronox, nitroprusside, nitrous oxide, NKP-5191, N-methyl glycine, N-nitro L-arginine-methylester, Noex, nomegestrol acetate, Nonafact, nonivamide, noradrenalin, noradrenaline, Noragol, norepinephrine, norethindrone acetate, norethisterone, norethisterone acetate, Norethisterone enantate, norgestimate, norgestrel, Normia, Normoxia, nortriptyline, Norzyme, Notuss, Novafen, Novelose, Nozinan, nucleoside/nucleotide analogue, NuLYTELY, Nuon, Nutrineal, NYC-0462, Nycoplus, nystatin, Nystatin LF, O2, O3mega, O3mega+ Joy, Oasys, Oaxaca, octafluoropropane, octanediol, octanoic acid, Octaplas, OctaplasLG, octenidine, Octenidine dihydrochloride, Octenidol, Octenisept, octylcyanoacrylate, Oestrofeminal, olanzapine, Olea, Oliclinomel N4, oligofructose-enriched inulin, oligomeric lactic acid, olmesartan, olmesartan medoxomil, olodaterol, olopatadine hydrochloride, ombitasvir, omega-3, omega-3 ethyl-eicosapentaenoic acid, omega-3 fatty acid, omega-3 polyunsaturated fatty acid, Omegaven, Omegaven Fresenius, omeprazole, omeprazole and bicarbonate, omidenepag isopropyl, Omni-stat, ondansetron, OPF-102, Opioid, Opti-EPA, Optifree RepleniSH, Optiginon, Optiginon vulvovaginal candidiasis, Opti-mist, Optivate, Optive, Optive Fusion, Optive Sensitive, OPV, Oramorph, Oraqix, OraTest, Orexigen, Origanum vulgare, Orinase, Orlaam, orlistat, Orlistat Canon, ortho-phthaldehyde, Orthokine, Oscillococcinum, oseltamivir, Osmitrol, Ostend, Ostenil plus, osteoclastogenesis inhibitory factor (OCIF), Ostine, Ostoforte, Osvix, otamixaban, oteracil potassium, Otociriax, Otodolor, otrivin, Ovestin, oxaceprol, oxaliplatin, oxantel pamoate, oxantel-albendazole, oxazepam, oxcarbazepine, oxitropium, oxybutynin, oxybutynin IR, oxybutynin ratiopharm, oxycdone, oxycodone, oxycodone CR, oxycodone HCl XL, oxycodone IR, oxycodone/naloxone, Oxygen, oxymetazoline HCl, oxymix, OxyNeo, oxyntomodulin, oxytocin, ozone, Paclitaxel, paclitaxel liposome capsulated, paclitaxel-PM, palanosetron hydrochloride, palifosfamide, paliperidone, paliperidone palmitate, palladium Pd 103, palmitoylethanolamide, Paludrine, pamidronate disodium, p-aminosalicylic acid, Panadol, Panax ginseng, Panax notoginseng saponins, panchtiktaguggulu ghrita, Pandel, Pandughni vati, Pangramin, pangramin SLIT HDM-mix, Panhematin, pantazocine, Panthenol, Pantoline, pantoprazole, pantoprazole sodium sesquihydrate, pantoprazole-magnesium, Panzytrat, papain, papaverine, Paracetamol, paracetmol, paraffin, parasikayavanyadi, Parcel, paricalcitol, paritaprevir, paromomycin sulphate, paroxetine, paroxetine hydrochloride, paroxetine hydrochloride controlled release, paroxetine hydrochloride hemihydrate, paroxetine mesylate, Pascoflair, Paser, Pavulon, pazopanib, Pd-103, PDS PLUS, PDsol 12, Pectin, Pedialyte, PediaSure, Pediatril, PedyPhar, PEG, PEG-3350, PEG-4000, PEG-CS, PEG-IL-2, peginterferon alpha-2a, peg-interferon alpha, Pegorion, pegylated interferon, pegylated interferon alpha, pegylated liposomal doxorubicin hydrochloride, pemetrexed, pemetrexed disodium, penicillin, penicillin VK, penicilline, Pennel, Pentacarinat, Pentaerythrithyltetrantrate, Pentaglobin, Pentalong, Pentasa, Pentaspan, pentavalent antimony, Pentoxifylline, pentoxyphylline, Peplin, Peptamen 1.5, peptide YY, peramivir, perampanel, Perenterol Forte, perfluorocarbon-exposed sonicated dextrose albumin, perfluropropane, perflutren lipid microsphere, Perforan, pergolid, Peridex, perifosine, perindopril, Perio-aid, Periogen, periorinse, Permacol, permethrin, Permixon, perphenazine, Persantine, Persica, petasine, pethidine, pethidine hydrochloride, Peucedanum japonicum Thunb, Peya, pH altered Tc-99m sulfur colloid, phenazopyridine hydrochloride, phenelzine sulphate, Phenergan, phenobarbitone, Phenolphthalein, phenoxymethylpenicillin, Phenprocoumon, phenserine tartrate, phentermine, phentermine/fenfluramine, phentoloamine, phenylacetate, Phenylephrine, Phenylephrine hydrochloride, phenylephrine hydrochloride extended release, phenyramidol, phenytoin, PhosLo, phosphatidylcholine, phosphatidylcholine-associated acetylsalicylic acid, phosphatidylserine, phosphorus, phosphorus-188Re, Photocil, Photrexa ZD, phyllanthus, phyllanthus urinaria, phylloquinone, PhyllPro, Physioneal, Physioneal 35, phytoestrogen, phytonadione, phytosphingosine, phytosterols, Piascledine, Pidogrel, pimecrolimus, pimonidazole hydrochloride, pinaverium bromide, Pindolol, pioglitazone, piperacillin, piperacillin-tazobactam, piperaquine, Pippalyadi taila, pirarubicin, pirfenidone with modified oxide diallyl disulfide, piritramid, Piritramide, piroxicam, Pistacia mutica extract, pisuvastatin, Pitocin, pituitary adenylate cyclase-activating polypeptide, pivmecillinam hydrochloride, pivmecillinum, Plantago extract, Plantago ovata, plantago ovata husk, Plasbumin 5, Plasmalyte, Plasmalyte 148, Plasma-Lyte 148, plasmalyte A, Plasma-Lyte A, Plasmalyte-A, plasmin, Platinol, Platosin, PLGA, PLP-10, PluroGel N, Plurogel PN, Pluronic F-68, PluronicF-127, PN-2034, podophyllin, policosanol, polihexanide, poly(lactide-co-glycolide), polydatin, polydeoxyribonucleotide, polydioxanone, polyethylene glycol, polyethylene glycol 3350, polyethylene glycol 3350 laxative, polyethylene glycol 400/propylene glycol, polyethyleneglycol3350, polyferose, polyglucosamine L-112, polyglycolic acid, Polygonum cuspidatum extract, polyhematoporphyrin, polyhexamethylene biguanide, polyhexanide, poly-L-lactic acid, polymaltose, polymeric nanoparticle docetaxel, polymyxin E, polysaccharide-K, polysporin, polystyrene sulfonate, polyunsaturated fatty acids, polyvinylpyrrolidone, pomalidomide, POMx, poractant alpha, porcine secretin, porfimer sodium, Portia, Portulaca oleracea, Posiformin, Posterisan, Potassium, potassium bicarbonate, potassium canrenoate, Potassium chloride, potassium citrate, potassium clavulanate, potassium dichromate, potassium hydroxide, potassium iodide, potassium iodine, potassium magnesium citrate, potassium nitrate, Potassium oxalate, potassium phosphate, potassium sodium citrate, povidone, povidone iodine, povidone K-25, PPC heparin, PPSB-SD, PPSV23, pralidoxime, pramipexole, pranoprofen, prasugrel, pratimarsha nasya, pravastatin, praziquantel, prazosin, Pred Forte, PredKeterolac, prednesolone, prednisolone, prednisolone acetate, prednisolone sodium phosphate, prednisone, Prednisone Axapharm, pregabalin, pregnacare plus, pregnenolone, premixed nitrous oxide, Premixed nitrous oxide and oxygen, Prempro, Presillion Plus, Prevadh, Prevenox, PRGF, pridopidine, prilocaine, primaquine, primatene, Prismocitrate 10/2, PRK-124, ProAlgaZyme, probenecid, Probiotic lactobacilli reuteri, probiotic preparation bifilac-beals, Probiotic pur, Probiotics-Bio-plus, procaine, Procalcitonin, procarbazine, procarbazine hydrochloride, procaterol, procaterol hydrochloride, Prodarsan, Proferrin, Proferrin ES, progesterone, progestin, progestin medroxyprogesterone acetate, progestins, proguanil, progynova, promethazine, PROMETRIUM, Promiseb, Pronase, Prontoderm, Prontogest, Prontosan, propacetamol, propafenone, propanol-2-ol, proparacaine, proparacaine hydrochloride, propatylnitrate, Propess, Propofol, Propofol-Lipuro, propolis, Propoven, propoxyphene napsylate, propranolol, propranolol LA, propyl nicotinate, propylthiouracil, propylthiouracile, prostaglandin F2alpha, ProstateEZE Max, Prostin E2, prosultiamine, Pro-Symbioflor, protamine sulphate, ProTectis, Protein C zymogen, Prothromplex Total, protionamide, Provera, Provocholine, prucalopride, Pseudoephedrine, pseudoephedrine hydrochloride, psilocybin, Psoralen, Pulmonarom, pumactant, Punarnavadi Mandur, Punica granatum extract, Purethal Grass, Purite, PVP-iodine, Pycnogenol, Pycrinil, Pylorex plus, pyrazinamide, Pyridium, pyridostigmine, pyridoxal, pyridoxine, pyridoxine hydrochloride, pyrimethamine, pyrimethamine/sulfdoxine, pyrimethamine/sulphadoxine, pyronaridine, QAV-680, Qideng Mingmu, Qing-shang-fang-feng-tang, Quadriderme, quetiapine, quetiapine fumarate, quetiapine IR, quinapril/hydrochlorothiazide, quinidine, quinidine sulphate, quinine, quinine sulphate, Qurs Mufasil, Qurse mafasil, R-610, rabeprazole, rabeprazole sodium, racementhol, racemic adrenaline, racemic albuterol, racemic bupivacaine, radio-active iodine, radioiodine, radium Ra 223 dichloride, raktashali odana, raloxifene, raltegravir, ramipril, ranitidine, rapifen, Read-Cat 2, Realsil, rebamipide, reboxetine, Recaldent, recoflavone, recombinant alpha-interferon, recombinant asparaginase, recombinant asparginase, recombinant brain natriuretic peptide, recombinant factor Vlla, Recombinant factor VIII, recombinant flt3 ligand, Recombinant Follicle Stimulating Hormone, Recombinant Follicular Stimulating Hormone, recombinant FSH, recombinant FVIIa, recombinant gonadotropin, recombinant growth hormone, recombinant hepatitis B vaccine, recombinant human activated protein C, recombinant human coagulation factor VIII, Recombinant human epidermal growth factor, recombinant human erythropoietin, recombinant human growth hormone, recombinant human hyaluronidase, recombinant human insulin-like growth factor I, recombinant human interleukin-10, recombinant human LFA3, recombinant human luteinizing hormone, recombinant human prolactin, recombinant human tissue plasminogen activator, recombinant interferon alpha, recombinant interferon alpha-1b, recombinant interferon alpha-2a, Recombinant interferon beta, recombinant interferon gamma, recombinant interleukin-12, recombinant interleukin-6, recombinant methionyl human leptin, recombinant tissue plasminogen activator, recombinant tissue plasminogen activator (rt-PA), recombinant tumor necrosis factor, Recombinant VZV glycoprotein gE antigen, Recombinant-methionyl human stem cell factor, Recuperat-ion, red clover phytoestrogens, redback spider antivenom, Reduced glutathione, regorafenib, ReliDerm DT, Remegal, Remember-fX, remifentanil, Rengalina, repaglinide, Replavite, Replenine, Replenine-VF, rEPO, reproterol, Rescueflow, Resfenol, resiniferatoxin, Respocort, Restylane, resveratrol, resveravine, Resvida, Retacnyl, Retaine, retapamulin, Retaron, retinol, retinyl palmitate, Reumatocept, revaprazan, Revia, rFSH, r-FSH, Rg3, rhenium-188 hydroxyethylidene diphosphonate, Rhodiola Crenulata, Rhodiola rosea extract, rhTSH, rHuEpo, r-HuEPO, Rhus coriaria powder, ribavirin, riboflavin, ribose, Ricrolin TE, Rifafour, rifambutin, rifampin, rigosertib sodium, Rikkunshito, Rikuzit, rilapladib, rilpivirine hydrochloride, rimostil, Ringer-Acetat, Ringer-lactate/dextrose, Ringer's lactate, ripasudil hydrochloride hydrate, risedronate sodium, risperidone, ritonavir, rituximab, rivaroxaban, rivastigmine, r-metHuGDNF, RMJH-111b, Rocuronium, roflumilast, Rohto Hydra, ropinirole, ropivacaine, Rosa damascena, rosiglitazone, rosiglitazone maleate, rosuvastatin, rotavirus vaccine, rotigotine, Rowachol, Rowasa, RRR-alpha-tocopherol, R-sibutramine, Rubus occidentalis extract, rucoronium, ruzasvir, S(−)-bupivacaine, Saccharomyces Cerevisiae CNCM I-3856, saccharose, S-Adenosyl-L-Methionine, S-adenosyl-L-methionine disulphate p-toluene-sulfonate, S-adenosyl-methionine, saffron, Safoof-e-Muhazzil, SagaPro, sage, sagopilone, Saireito, salacinol, salbutamol, salbutamol sulphate, salbutamol sulphate HFA, salicylate, salicylic acid, Saline, saliva natura, Salofalk, salsalate, Salvia officinalis, salvianolate, salvinorin A, Samital, S-amlodipine besylate, sandalwood oil, Sandostatina LAR, Sanjiu weitai granules, Santafer, sapropterin dihydrochloride, saquinavir, sarcosine, saxagliptin, Scandicain, secretin human, Sedron, segesterone acetate, selegiline, Selenase, Selenium, selenium yeast, selenomethionine, Selenplus, SELG 1000, selinexor, semaxanib, Senna, SennaS, sennoside, sennosides, Sensodyne dentifrice, Sense, Septanazal, Septilin, Septolete total, Seraseal, Serenoa repens, Seresis, sericin, Serkangabin, Seroflo, Seromycin, SeroVital, sertraline, Setarud, S-etodolac, sevelamer carbonate, sevelamer hydrochloride, sevoflurane, SGPF-C, ShanStar, Shebet oil, Shegan, Shenwu, shexiang baoxin, Shi-Bi-Lin, Shinbaro, Shirazi Thymus Vulgaris, short chain fatty acid, Shuxuening, sibutramine, Siccafluid, sildenafil citrate, Silexan, stin, silicon oil dimeticone, silicone, silodosin, silver, Silver diamine fluoride, Silver diammine fluoride, Silver fluoride, silver nanoparticles, silver sulfadiazine, silver sulphadiazine, silver zinc sulfadiazine, silybin-phytosome, silybin-vitamin E-phospholipids, Silybum marianum, Silymarin, simethicone, simvastatin, Sinecort, Sinucare, Sinuclean, Sinutab, sirolimus, sisomicin, sitagliptin, Skoal, SLITone ULTRA, Sb-Niacin, SM-1, Smecta, SmellX, S-methyl-L-thiocitrulline, SMOF Kabiven, SMOF lipid, SmofKabiven, SMOFlipid, SNUBH-NM-333, sodium, sodium acetate C11, sodium alendronate, sodium alginate, sodium bicarbonate, sodium bituminosulfonate, sodium butyrate, sodium carboxymethylcellulose, sodium chenodeoxycholate, sodium chlorate, Sodium chloride, sodium chlorite, sodium chondroitin sulphate, sodium citrate, sodium cromoglycate, sodium dialysate, sodium ferrous citrate, Sodium Fluoride, sodium fluoride 18-F, sodium fusidate, Sodium Fusidate, sodium hyaluronate, sodium hydrogen carbonate, sodium hypochlorite, sodium iodide, sodium lactate, sodium L-ascorbyl-2-phosphate, Sodium lauryl sulphate, sodium monofluorophosphate, sodium nitrate, Sodium nitroprusside, sodium octanoate, sodium oxybate, Sodium Phenylbutyrate, sodium phosphate, sodium picosulphate, sodium picosulphate and magnesium citrate, sodium selenite, sodium stibogluconate, sodium thiopental, sodium tungstate, sodium valproate, sodium zirconium cyclosilicate, Sodium-Nitroprusside, sodium-selenite, Sofinox, Sofinox rd, sofosbuvir, Sojourn, Sokatin, solidago, solifenacin, Solosite, Soluble epoxide hydrolase, Solu-Cortef, somatostatin, Songha Night, sorafenib, sorbitol, sotalol, Soventol HydroCort, soy isoflavones, soya phytoestrogens, Spersadex, sphingomyelin, spironolactone, Spirulina, Spirulina platensis, Spongel, SQIN, squill extract, SSRIs, stachys lavandulifolia, Staloral, Staloral 300, Staloral 300R, standard doxazosin, standard silicone oil (PDMS), stannous compounds, stannous fluoride, statin, Statins, stavudine, StemEnhance, StemFlo, Steroid, steroid-dexamethasone, steroids, Stimdate, Strefen, strepsils, Strepsils Original, streptomycin, streptomycin sulphate, strontium chloride, Structum, Suan Tzao Ren Tang, Suan-Zao-Ren Tang, SUBA-itraconazole, Subetta, Subgam, succinylcholine, Suc-HSA (succinylated human serum albumin), sucralphate, sucralose, Sucromalt, sucrose, sudachi peel, Sudafed, sufentanil, Sugammadex, sulfadoxine, Sulfadoxine pyrimethamine, sulfadoxine/pyrimethamine, sulfamethoxypyrazine, sulfasalazine, sulfentanil, sulfonylurea, sulfonylureas, sulfur colloid, sulfur hexafluoride, sulindac, sulphadoxine, sulphadoxine/pyrimethamine, sulphamethoxazole, sulphaphenazole, sulphonylurea, sulpiride, sulthiame, sultiame, Sumaklid, sumatriptan, sumatriptan succinate, sunitinib, Supartz, superoxide dismutase, superparamagnetic iron oxide, SUPREP oral sulphate with gastrografin, suramin, Sureheal, Surgicel, Sustanon, Sustanon 250, suvorexant, suxamethon, suxamethonium, sylimarine, Symfona forte, Systane, Systane Ultra, T-1225, T4P-1001, Tabex, tacrolimus, tadalafil, Taeumjowi-tang, Tagitol V, Talcid, talmapimod, Talwin Nx, Tame, Tamoxifen, tamsulosin, tamsulosin hydrochloride, Tang Ning Tongluo, Tangshen, tapentadol, tariquidar, Tasectan plus, tasimelteon, taurolidine, taurolidine citrate, Taurolock, TauroLock Hep500, tauroursodeoxycholic acid UR-906, taxane, tazarotene, tazobactam, TC-325, Tc-99m DTPA, Tc99m-ethyl cysteinate dimer, TCu380A, Tears Naturale, technetium 99m, Technetium 99m-sulfur, Technetium Tc 99m Sulfur Colloid, technetium Tc 99m tilmanocept, technetium-99, technetium-99m, technetium-99m-diethylenetriamine pentaacetic acid, Technetium-TC99m-labeled Annexin A5, tegafur, tegaserod, Tegeline, telaprevir, telbivudine, telithromycin, telmisartan, temazepam, temozolomide, Tempocol, Tempocol-ColoPulse, temsirolimus, Ten-cha, Tendoactive, tenecteplase, tenofovir, tenofovir disoproxilfumarate, Terbinafine, terbinafine HBF, terbutaline sulphate, teriflunomide, teriparatide acetate, terlipressin, Terminalia arjuna, Testofen, Testosterone, testosterone cypionate, testosterone enanthate, Tetra (4-carboxyphenyl) Porphine (TCPP), tetracaine, tetracaine hydrochloride, tetracosactide hexacetaat, tetracosactrin, tetracycline, tetracycline hydrochloride, Tetradecylthioacetic acid, tetraethylammonium, tetrahydrobiopterin, tetrahydrocannabinol, tetralgin, tetralgin H, Tetrix, Tetronine, Thacapzol, thalidomide, Thealoz, Thealoz Duo, theophylline, theracurmin, Theragran Hematinic, Theramine, TheraSphere, TheraTears, Theraworx, thiamin, thienopyridine, thiocolchicoside, thiocolchicoside SR, thioctic acid, thiopental, thiopentone, thiotepa, Thrombi-Gel, Thrombin-VSI, Thromboreductin, thromboserin, thryoxine, thymidine, Thymoglobulin, Thymol, thymopentin, thymostimulin, Thyroid-stimulating hormone, thyrotropin releasing hormone, thyroxin, Ti02 microfine, Ti02 pigmentary, Tian-qi Jiang-tang, Tianshu capsule, Tian-Wang-Bu-Xin Dan, tiapride, tibolone, ticarcillin-clavulanate, Tigan, tigecycline, timentin, timnodonic acid, timolol, timolol hemihydrate, timolol maleate, timolol maleate in sorbate, Timophtal sine, tinidazole, tinoridine HCl, Tinospora crispa-extract, tinzaparin sodium, Tioth, tiotropium, tiotropium bromide, tipepidine hibenzate, tirapazamine, tirofiban, Tiscover, Tisseel, Tisseel 4 IU/ml VH SID, TISSEEL VH, Tisseela, Tissucol, Tisuacryl, titanium dioxide/zinc oxide, tixocortol, tizanidine, TMD-322, tobramycin, Tobrex, Tocopherol, tocopherol nicotinate, tocopheryl phosphate, tocotrienols, tofacitinib, tokishigyakukagosyuyushokyoto, tolcapone, tolimidone, tolperisone, tolperisone hydrochloride, Tongjiang, Tongxinluo, Tonoferon, Tonsitin, topiramate, topotecan, topotecan hydrochloride, topotecan/carboplatin, torasemide, toremifene, Totilac, trabectedin, tramadol, tramadol hydrochloride, trandolapril, tranexamic acid, tranilast, transamin, transepithelial CXL, transforming growth factor-beta, trans-resveratrol, tranylcypromine, Traumaplant, Traumeel S, Travelan, travoprost, trazodone hydrochloride, tretinoin, triamcinolone, triamcinolone acetate, triamcinolone acetonid, triamcinolone acetonide, triamcinolone hexacetonide, triamsinolone, triazolam, tribulus terrestris, trichloro acetic acid, trichloroacetate, triclosan, Triclosan/Fluoride, triflusal, Trigonella Foenun-Graecum, Trigonelline, triheptanoin, triiodothyronine, Tri-iodothyronine, Tri-luma, Trimedat, trimetazidine, trimethoprim, trimetrexate, trimodal (18)F-choline, Trimo-San, Trinessa, trinitroglycerin, Triomar, Triomune, Triomune 40, triphala, triphala kashaya, triphaladi, Triphalaguduchyadi vati, triptan, triptans, tripterygium, tripterygium glycosides, tripterygium wilfordii, triptophan, trisodium citrate, trisodium citrate dihydrate, trivrut leya, trolamine, TrophAmine, tropisetron, troponin T, troxerutin, trypan blue, tryptophan, TU-025 Keishi Bukuryo Gan, Tualang honey, turmeric, Tylenol, tyramine, Tyrosur, tyrothricin, Tyvera, Ubiquinol, UFT, ulipristal, Ultrapure dialysate, Ultrase MT20, umeclidinium bromide, unacid, unfractionated heparin, uprifosbuvir, Uracyst, Ural-BPH, urea, uridine, urinastatin, Urofleks, Uromax, ursodeoxycholic acid, Urtica dioica, USP endotoxin, Utrogestan, Uvadex, V0034CR01B, Vacyless, Vagifem, Vagipills, Vagisan, VAH-631, valaciclovir, valdecoxib, valerian, valerian mono-extract, Valeriana officinalis L, Valeriane officinalis, Valette, Valexxol, valganciclovir, valproic acid, valpromide, valsartan, valsartan/hydrochlorothiazide, Vamin-J amino acid, vancomycin, vandetanib, vanokserina, vapocoolant, vardenafil hydrochloride, varenicline, vasopressin, vatreptacog alpha, VDO, vecuronium, vecuronium bromide, VEGF-165, VEGF-A165/bFGF plasmid, veliparib, velpatasvir, vemurafenib, Venbig, venlafaxine hydrochloride, Venocur Triplex, Venoferrum, Venozin, Venthamarai chooranam, verapamil, verapamil hydrochloride, Verein, verosudil, vidofludimus, Vigam, Vigantol, Vilac Plus, vilanterol, vilanterol trifenatate, vildagliptin, Vilepi, Vimang, vinblastine, vinblastine sulphate, vincristine, vincristine sulphate, vinegar, vineuro, vinorelbine, Viokase 16, Viscum album homoeopathic mother tincture, viscum fraxinifor, Vismed, vitagnuse, Vitalipin, Vitaliver, vitamin A, Vitamin B12, Vitamin B6, vitamin C, Vitamin D, Vitamin D3, vitamin D3 and calcium, Vitamin E, vitamin K, vitamin K antagonists, vitamin E acetate, Vitano, Vition, Vitreoscilla filiformis, Vivomixx, vleomycin sulphate, VM-26, voglibase, voglibose, Volulyte, Voluven, vonoprazan fumarate, voriconazole, vorinostat, vortioxetine hydrobromide, VP-VI, VSL-3 probiotic, Vyaghrihareetaki avaleha, warfarin, wellbutrin SR, WF-10, WinUBoost, Wobenzym mono, Wobenzym Plus, WS-1442, wuling capsule, Xanmax2002, xanthan gum, xenon, xenon-133, xiaoer qingfei hej, Xin Ran, xiyanping, Xuefu Zhuyu, xylitol, xylometazoline hydrochloride, xylomethazoline, Y-90 hydroxyapatite, Yestimun, Ying Qiao san, Yi Qi Pin Chuan, Yittrium-90, Yohimbine, yohimbine hydrochloride, Yokukansan, Yokukansankachimpihange, yomogi, Yttrium-90, yttrium-90 SIR-spheres microspheres, Z250, Zalain, zalcitabine, zaleplon, Zataria multiflora, zavedos, Ze-91019, Zemuron, Zestra, Zhi Byed 11, zhi ke san, zidovudine, zinc, zinc acetate, zinc gluconate, zinc oxide, zinc pyrithione, zinc sulphate, zincol, Zinga, Zingiber, Zingiber officinale, Zinova, Zintoma, ziprasidone, zofenopril, zoledronic acid, zolmitriptan, zolpidem, Zonnic, and Zyactinase.

### Biologics

[0144] In certain embodiments, a stimulus that perturbs a GSC is a biologic selected from (−)-Epigallocatechin 3-gallate, (131)I-rituximab, [1-13C] leucine, [2H5] phenylalanine, 1,4,7,10-tetraazacyclododecane-N, 111In M5A anti-CEA antibody, 111In-capromab pendetide, 12-ATC, 131I-8106, 131I-BC8, 13-cis-retinoic acid, 17 alpha hydroxyprogesterone caproate, 177Lu-DOTATATE, 177Lu-girentuximab, 18 F-fluorothymidine, 18 fluoro-2-deoxyglucose, 18C3, 18F-alovudine, 18F-FDG, 18F-fluorodeoxythymidine, 18F-fluorothymidine, 209-217(210M) peptide vaccine, 213Bi-lintuzumab, 2830929A, 2830930A, 2-methoxyestradiol, 3F8 antibody, 4B5 scFv, 5-flucytosine, 6 mercaptopurine, 6-melanoma helper peptide vaccine, 6-MP, 6-thioguanine, 89Zr-GC-1008, 89Zr-trastuzumab, 90Y-edotreotide, 9-aminocamptothecin, A/H5N1 Antigen, abacavir, abagovomab, abaloparatide, abaloparatide, abarelix, abatacept, abciximab, abetimus, abicipar pegol, abiraterone, abituzumab, abobotulinumtoxinA, ABT-510, acalabrutinib, acarbose, Angiotensin-converting enzyme, acenocoumarol, acetaminophen, acetazolamide, acetylcholine, acetylcysteine, acetylsalicylic acid, aciclovir, acitretin, aclacinomycin, aclarubicin, aclerastide, actoxumab, ACV-1, ACVBP, acyline, Ad26-ZEBOV, Ad35-CS.01, Adacel, adalimumab, adalimumab biosimilar, adecatumumab, adefovir dipivoxil, adenosine, adenovir, adenovirus B7-1, aderbasib, ADH-1, Adhexil, ADM, adrenaline, adrenocorticotropin, adrenomedullin, adriamycin, adriblastin, ADV-TK, AEG-35156, afamelanotide, afatinib, afelimomab, aflibercept, agalsidase alpha, agalsidase beta, agatolimod, Agriflu, AGS-1C4D4, alacizumab pegol, albendazole, albiglutide, albinterferon alpha-2b, albumin, albuterol, Albuterol sulphate, albutrepenonacog alpha, Albutropin, aldesleukin, alefacept, alemtuzumab, alendronic acid, alexamorelin, alphacalcidol, alfimeprase, algenpantucel-L, alglucosidase alpha, alhydrogel, alipogene tiparyovec, alirocumab, alisertib, aliskiren, alisporivir, alitretinoin, Alkeran, Allergovit 6-grasses, Alloferon, allopurinol, all-trans-retinoic acid, alogliptin, alpelisib, alpha 1 proteinase inhibitor, Alpha1-PI, alpha-conotoxins, alpha-galactosidase, alpha-glucosidase, alpha-glucosidase inhibitor, alpha-interferon, alpha-methyldopa, Alphanate, Altastaph, alteplase, alum adjuvant, aluminium hydroxide, aluminum phosphate, ALVAC-1452, ALVAC-CENB7.1, ALVAC-gp100 melanoma vaccine, ALVAC-MART-1 melanoma vaccine, alvocidib, amantadine, amatuximab, amdoxovir, Ametop, AMG-0101, AMG-108, amifostine, amiloride, aminoguanidine, aminopterin, amlodipine, amolimogene bepiplasmid, amoxicillin, amphotericin B, ampicillin, amprenavir, amrubicin, amsacrine, anakinra, anakinra biosimilar, Analatro, anastrozole, anatumomab mafenatox, Anavip, Anbainuo, andexanet alpha, Anfibatide, Angiostatin, anifrolumab, anivamersen, anrukinzumab, anthracycline, anti-IFN alpha, Anti Thymocyte Globulin, anti-CD20-IL2 immunocytokine, anti-CD3 bivalent antibody-diphtheria toxin conjugate, anti-CD3 monoclonal antibody, anti-CD45 mAbs, anti-CEAxanti-DTPA bispecific antibody, anti-IFN gamma, anti-IRL2, antimony, antipsychotics, anti-TAT monoclonal antibodies, antithrombin, antithrombin alpha, antithrombin III, antithymocyte globulin, anti-thymocyte globulin, anti-thymocyte-globulin, anti-T-lymphocyte globulin, anti-TNF alpha, anti-TNF-alpha monoclonals, AP-01, apalutamide, apatorsen sodium, apheresis, apheresis platelets, APITOXIN, apixaban, Apligraf, APN-301, apolizumab, apremilast, aprepitant, aprinocarsen, aprotinin, aquaphor, AR-623, arabinofuranosyl cytidine, ARAC, Ara-C, aracytin, aracytine, ARC-100, ARC-520, argatroban, arginine, arginine vasopressin, argipressin, arsenic trioxide, AS-01 adjuvant, AS-02 adjuvant, AS-02V, AS-03, ascrinvacumab, asfotase alpha, ASN-002, asoprisnil, asparaginase, aspart insulin, aspartame insulin, aspirin, asunaprevir, asunercept, asvasiran sodium, atacicept, atazanavir, atezolizumab, ATG, ATL-101, atorvastatin, atosiban, ATRA, Atrial natriuretic peptide, Atu-027, audencel, Aurograb, avacincaptad pegol sodium, Avanz, Avastin, AVE-1642, aviscumine, Avonex, avotermin, Avrina, axalimogene filolisbac, axitinib, azacitidine, AZA-DR, azathioprine, AZD-1775, azficel-T, azithromycin, azulphidine, Bacillus Calmette Guerin, Bacillus clausii, Bacillus coagulans, bacitracin, baclofen, bacteriophage (Phi-X 174), Bakri Balloon, balapiravir, balixafortide, balugrastim, baminercept, bapineuzumab, barusiban, Basilea, basiliximab, bavituximab, BCG, BCM-95, BCNU, BEAM, becaplermin, beclabuvir, beclomethasone diproprionate, behenoyl-ara-C, belatacept, belimumab, belinostat, bemiparin, bendamustine, benralizumab, benzalkonium chloride, benzylpenicilloyl polylysine, Beriglobin, Beriplast-P, Beriplex P/N, beroctocog alpha, bertilimumab, beta-glucan, beta-hydroxy beta methylbutyrate, betaine, betamethasone, betamethasone dipropionate, Betaseron, bevacizumab, bevacizumab biosimilar, bexarotene, Bexsero, bezlotoxumab, BHQ-880, BHT-3009, bicalutamide, BiCNU, Bifidobacterium breve, bifidobacterium infantis, Bifidobacterium lactis UABLA-12, Bifidobacterium longum, biguanide, BHB-023, bimagrumab, bimekizumab, binimetinib, BioChaperone rhlnsulin, Biolipideo/B2, biotin, biphasic human insulin, biphasic human insulin 30, bisphosphonate, BIT-225, bivalirudin, Bivigam, BL-8040, bleomycin, bleomycin sulphate, bleselumab, blinatumomab, blisibimod, blood cardiplegia, blosozumab, BmAb-200, boceprevir, bococizumab, Boostrix, Boostrix Polio, bortezomib, BOTOX, Botulinum toxin, bovine thrombin, BQ-123, BQ-788, bradykinin, brain natriuretic peptide, brazikumab, bremelanotide, brentuximab vedotin, briakinumab, brimapitide, brimonidine, brivanib alaninate, brodalumab, brolucizumab, bromelain, bromfenac sodium, bromocriptine, bryostatin-1, BSC, BTH-1704, BTI-322, bucelipase alpha, bucillamine, budesonide, budesonide/formoterol, bulsulfex, buparlisib, bupivacaine, burixafor, burlulipase, burosumab, buserelin, buserelin acetate, busulfan, Busulfex, busulphan, butylphthalide, butylscopolammonium bromide, Byclot, Bydureon, cabazitaxel, cabergoline, caboplatin, cad-05, caffeine, CAL, calcineurin inhibitor, calcipotriol, calcitonin, calcitonin gene-related peptide, calcitriol, Caltratate D, Campath, canakinumab, cantuzumab ravtansine, capecitabine, Caphosol, caplacizumab, capromorelin, capsaicin, captopril, carbamazepine, carbetocin, carbimazole, carbohydrate, carbon ion, carboplatin, carfilzomib, carlumab, carmustine, carmustine BCNU, carotuximab, carperitide, caspofungin, catridecacog, catumaxomab, Cavatak, CBP-501, CC-5013, CD34 antibody, CD40 ligand, CDP-870, CDX-1307, CDX-1401, CDX-301, CEA(6D)-TRICOM vaccine, CeaVac, Cedartolen, cefadroxil, cefazolin, ceftaroline fosamil, ceftazidime, ceftriaxone, cefuroxime, celecoxib, celgosivir, celmoleukin, CelTx Apligraf, cenderitide, cenegermin, cenersen, CEpOP+/−R, ceramide, Cerebrolysin, cerliponase alpha, certolizumab pegol, Cervarix, cervical cerclage, cetirizine, cetraben, cetrorelix, cetuximab, CGRP, ChimeriVax-JE, chlorambucil, chlorhexidine, chlorhexidine gluconate, chloroquine, chlorphenamine, chlorpheniramine, chlorpheniramine maleate, chlorthalidone, CHO-Campath-1H, cholecalciferol, cholera vaccine, Chong Kun Dang, CHOP (cyclophosphamide, doxorubicin, vincristine, prednisone), choriogonadotropin alpha, chorionic gonadotropin biosimilar, chorionic gonadotropins, CHP-MAGE-A4, ChronVac-C, CI, cibinetide, ciclosporin, ciclosporine, cilengitide, CimaVax EGF, cimetidine, Cinryze, cintredekin besudotox, Ciprofloxacin, ciprofloxacin hydrochloride, cisplatin, Civacir, cixutumumab, cladribine, Clairyg, clarithromycin, claudiximab, clavulanic acid, clazakizumab, clemastine, clindamycin, clobetasol, clobetasol propionate, clofarabine, clofazimine, clomiphene, clomiphene citrate, clopidogrel, cloxacillin, CML vaccine, CMV peptide N495, CMV pp65 peptide, CMV vaccine, Coagadex, cobimetinib, cocaine, codeine, codrituzumab, colecalciferol, colistin, collagenase, collagenase ABC, coltuximab ravtansine, conatumumab, conbercept, condoliase, conestat alpha, conivaptan, conjugated estrogens, contusugene ladenovec, corifollitropin alpha, corticorelin human, corticosteroid, corticosteroids, corticotrophin-releasing hormone, corticotropin, cosyntropin, cotrimoxazole, co-trimoxazole, C-peptide, CpG-10101, creatine, crenezumab, crisantaspase, crizanlizumab, CroFab, CSII, CSL, CSL-111, CSL's DTPw, CT-102, CTLA4-Ig, CTO, CTS-1027, CultureIle, custirsen, Cutanea, CV-301, Cyclogest, cyclophophamide, cyclophoshamide, cyclophosphamide, cyclophosphamide hydrate, cyclophosphomide, cyclopsorine, cyclosphosphamide, cyclosporin, Cyclosporin A, cyclosporine, cycnocobalamin, cycolophosphamide, cycolphosphamide, cydroxydaunorubicin, Cyklokapron, cylcophosphamide, cyproterone, cyslophosphamide, CYT-107, cytarabine, cytarabine ARA-C, CytoGam, Cytori, cytosine arabinoside, Cytotect, cytoxan, D mannose, dabrafenib, dacarbazine, dacetuzumab, daclatasvir, daclizumab, Dacorin, dactinomycin, dactolisib, Dactylis glomerata pollen, D-Aa-1-peptide-T-amide, dalantercept, dalotuzumab, danaparoid sodium, danazol, danegaptide, danoprevir, dapagliflozin propanediol, dapiclermin, daptomycin, daratumumab, darbepoetin alpha, darunavir, dasabuvir, dasatinib, dasiglucagon, daunomycin, daunorubicin, daunorubicin hydrochloride, daunorubicin liposomal, davalintide, davunetide, DC/I540/KLH vaccine, DCVAC/OvCa, DDAVP, decadron, decitabine, Decortin H, dectrekumab, defibrotide, deflazacort, degarelix, dehydroepiandrosterone, delate synacthen, delavirdine, delcasertib, deleobuvir, demcizumab, denenicokin, Dengvaxia, denileukin diftitox, denosumab, depatuxizumab mafodotin, Depigoid, DermaPro Pep-04, DermaVir, desirudin, desloratadine, deslorelin, desmopressin, desmopressin acetate, desmoteplase, desogestrel, DetoxPC, deuterium-labeled cysteine, dexamethasone, dexchlorpheniramine, DexCom G4 platinum, dexmedetomidine, dexrazoxane, dextromethorphan, dextromethorphan hydrobromide, dextrose, Diamyd, dianexin, DiaPep-277, diaspirin crosslinked hemoglobin, diazoxide, dibotermin alpha, dichloroacetate, didanosine, di-DTPA-131I peptide, difelikefalin, Diffistat-G, Digibind, Dimericine, dimesna, dimethyl fumarate, dimethyl sulfoxide, dinoprostone, dinutuximab, dinutuximab beta, diphenhydramine, dipyridamole, diroton, dirucotide, disitertide, DITC, ditiazem, DKN-01, DMARD, DNA/MVA.HBs, DnaK, DNE-3, docetaxel, dociparstat, doconexent ethyl ester, dolcanatide, donepezil hydrochloride, dopamine, dorgenmeltucel-L, dornase alpha, doxorubicin, doxorubicin HCl liposome, doxorubicin hydrochloride, doxorubicin-antibody conjugate, doxorubicin-BR96 conjugate, doxycycline, DPP-4 inhibitor, DRibbles vaccine, drospirenone, drotrecogin alpha, drozitumab, DT, DT PACE, DTaP, DTGM, DTP3, DTP3a-IPV-HBV/HIB vaccine, DTP3a-IPV-HIB, DTP4, DTPa, DTPa vaccine, DTPwcsl, DTPw-HBV Kft., DTwP—HBV-HIB vaccine, Dukoral, dulaglutide, dulanermin, duligotuzumab, dupilumab, durvalumab, dusigitumab, dutasteride, duvelisib, E coli endotoxin, E7 peptide, ebenatide, ecallantide, echinocandin, Ecosprine, ecromeximab, eculizumab, Ecural, edaravone, edifoligide, edobacomab, edodekin alpha, edratide, edrecolomab, EF-1 peptide, EF-2 peptide, efalizumab, efavirenz, eflapegrastim, efmoroctocog alpha, efpeglenatide, eftrenonacog alpha, efungumab, egaptivon pegol, elbasvir, elcatonin, eldecalcitol, eldelumab, elemental calcium, elgemtumab, elisidepsin, Elocom, Elocon, Elomet, Elosalic, elosulfase alpha, elotuzumab, elpamotide, elsiglutide, eltrapuldencel-T, eltrombopag, emapticap pegol, Emdogain, emepepimut-S, emfilermin, emibetuzumab, emicizumab, empegfilgrastim, emtricitabine, EMZ-701, enalapril, endolipide, endothelin-1, enfuvirtide, Engerix B, enocitabine, enokizumab, enoxaparin sodium, entecavir, enteric-coated mycophenolate sodium, entinostat, enzalutamide, enzastaurin, EP-100, epacadostat, ephedrine, Epifasi, epinephrine, epirubicin, epoetin, epoetin alpha, epoetin alpha biosimilar, epoetin alpha BS, epoetin alpha or beta, epoetin beta, epoetin delta, epoetin omega, epoetin theta, epoetin-A, Eposin, epratuzumab, eptacog alpha, eptifibatide, eptinezumab, eptotermin alpha, Equine antithymocyte immunoglobulin, equine ATG, erenumab, ergometrine, ergonovine, ergonovine maleate, eribulin mesylate, erlotinib, ertugliflozin, ertumaxomab, erythrocyte stimulating agents, erythromycin, erythropoietin, erythropoietin biosimilar, erythropoietin follow-on biologic, erythropoietin receptor activator, erythropoietin stimulating agents, ESBA-105, Escherichia coli L-asparaginase, esomeprazole, estetrol, estrace, estradiol, estradiol acetate, estradiol valerate, estramustine, estramustine phosphate sodium, estriol, estriol E3, estrodiol, estrogen, estroprogestins, etanercept, etanercept biosimilar, etaracizumab, etelcalcetide, ethinyl estradiol, ethinylestradiol, ethyl hydrogen fumarate calcium, ethyl hydrogen fumarate magnesium, ethyl hydrogen fumarate zinc, etirinotecan pegol, etoposide, etoposide phosphate, etravirine, etrolizumab, Eudragit-L-coated mesalamine, everolimus, evofosfamide, evolocumab, examorelin, exbivirumab, exemestane, exenatide, exendin, exendin-4, exendin-9, Exsulin, Extavia, ezetimibe, F18, F-18 fluorodeoxyglucose, F-627, Factor VIII, Factor VIII concentrate, Factor VIII/von Willebrand Factor complex, Factor XIII concentrate, faldaprevir, famotidine, Fanhdi, farletuzumab, fasinumab, fat-soluble vitamins, FE[50]C, FE[75]C, FEBA, FEIBA NF, fenofibrate, fenretinide, fentanyl, Feron, ferric gluconate, ferric saccharose, ferrous fumarate, ferrous sulphate, fesoterodine fumarate, fetal fibronectin, fexapotide triflutate, fexofenadine, fezakinumab, fibatuzumab, fibrinogen, fibrinogen concentrate, ficlatuzumab, fidaxomicin, figitumumab, filanesib, filgrastim, filgrastim biosimilar, filgrastim biosimilar API, filgrastim SD/01, filibuvir, fingolimod, Flagyl, Flebogamma DIF, fletikumab, flotegatide, floxuridine, flt3-ligand, Fluarix Quadrivalent, fluciclovine, flucloxacillin, fluconazole, flucytosine, fludarabine, fludarabine monophosphate, fludarabine phosphate, fludeoxyglucose, fludeoxyglucose F 18, fludrocortisone, Flufirvitide, flunarizine, fluocinolone acetonide, fluoraouracil, fluoro-L-thymidine, fluorometholone, fluoropyrimidine, fluorouracil, fluoxetine hydrochloride, flupirtine, flutamide, fluticasone propionate, fluvastatin, Fluvirin, Fluzone, FMISO, FMP1/ASO2A, Folacin, FOLFIRI, FOLFIRINOX, folic acid, folinate, folinic acid, follicle stimulating hormone, Follistim, follitropin alpha, follitropin alpha biosimilar, follitropin beta, follitropin delta, fomivirsen, fondaparinux sodium, fontolizumab, foralumab, foravirumab, forigerimod, formoterol, fosamprenavir, fosbretabulin, foscarnet, fosphenytoin, fostamatinib, Fostipur, fotemustine, Fovepta, fowlpox-CEA-TRICOM vaccine, fowlpox-PSA vaccine, FP9 ME-TRAP, fragmin, fresolimumab, Freund's adjuvant, FSH, FSH-GEX, fulranumab, fulvestrant, furosemide, fusidic acid, G-4460, gadolinium, gadolinium-diethylenetriamine penta-acetic acid, gadopentetate dimeglumine, galactose, galantamine, galcanezumab, galinpepimut-S, galiximab, gallium nitrate, galsulfase, gamma-globulin, Gammaplex, Gamunex, ganciclovir, ganciclovir phosphonate, ganetespib, ganirelix acetate, ganitumab, Gardasil, Gardasil 9, gataparsen, gavilimomab, GCS-100, GCSF, G-CSF, Gd-MRI, gedatolisib, gefitinib, Gelsolin, gemcitabine, gemtuzumab, gemtuzumab ozogamicin, gentamicin, gentamicin sulphate, gevokizumab, ghrelin, GI-4000, GI-5005, gimeracil, girentuximab, Glamin, glatiramer acetate, glembatumumab vedotin, glepaglutide, glibenclamide, gliclazide, gliclazide MR, glimepiride, glipizide, GLP-1, GLP-1 analogues, GlucaGen, glucagon, glucagon like peptide-1, glucagon-like peptide-1, glucagon-like peptide-1-albumin recombinant protein, glucarpidase, glucocerebrosidase, Glucose dependent insulinotropic polypeptide, glucose oxidase, Glucose potassium insulin, GlutaDON, glutamic acid, glutamine, Glutoxim, glycerin trinitrate, glyceryl trierucate, glyceryl trioleate, Glymera, Glypromate, GM-CSF, GM-CSF vaccine, GM-CT-01, GnRH, GnRH agonist, GnRH antagonist, golimumab, golnerminogene pradenovec, gonadotrophins, gonadotropin, gonadotropin releasing hormone, gonadotropin releasing hormone agonist, gonadotropin releasing hormone antagonist, Gonadotropin-releasing hormone, goserelin, goserelin acetate, gp100, gp100 17-25, gp100 209-217(210M), gp100 antigen, gp100 antigen/tyrosinase antigen, gp100 peptides, gp100:209-217(210M) peptide vaccine, gpASIT+, granulocyte colony-stimulating factor, Granulocyte-macrophage colony-stimulating factorr, Grazax, grazoprevir, GS-4774, GS-9256, GSK-1437173A, GSK-208108, GSK-2189242A, GSK-2197870A, GSK-2202083A, GSK-2302024A, guadecitabine sodium, guselkumab, gusperimus trihydrochloride, GVAX, H-101, H-1299, H1N1 pandemic influenza vaccine, H5N1 influenza vaccine, HAART, Haemaccel, Haemate P, hANP, Haporine-S, Havrix, HBV, HBV-MPL 208129, HCG, HDMTX, Hearticellgram, Hecoria, Hemabate, HemaMax, Hemate P, hemicellulose, hemoglobin glutamer 250, hemoglobin raffimer, Hemospan, Hemospray, HepaGam B, heparin, heparin sodium follow-on biologic, heparinoid, hepatitis B immunoglobulin, Hepavax-Gene, HerpV, Hexaxim, HIB vaccine, HIB-MCVc, Hib-MenCY-TT, HinsBet, histamine dihydrochloride, histrelin, HIV-1G, Hizentra, HL-143, hLF 1-11, HMG, HMG-CoA reductase inhibitor, hMG-IBSA, HMG-Lepor, HOE21PH insulin, horse antithymocyte globulin, HPbetaCD-I complex, hpFSH, hpHMG, HP-hMG, HRT-FER, hTERT D988Y peptide, hTERT 1540 peptide, hTERT R572Y peptide, human albumin, human anti-thymocyte globulin, human atrial natriuretic peptide, human BNP-32, human chorionic gonadotrophin follow-on biologic, human chorionic gonadotropin, human fibrinogen, human growth hormone, human immune globulin, human insulin, human insulin mix 30/70, human menopausal gonadotropin, human normal immunoglobulin, human parathyroid hormone, human protein C, human recombinant hyaluronidase, human recombinant insulin, human secretin, human serum albumin, Human serum albumin 20, human thrombin, Humate P, HuMax-IL8, hyaluronate sodium, hyaluronic acid, hyaluronidase, hydralazine, hydrochlorothiazide, hydrocortisone, hydrocortisone sodium succinate, hydroxycarbamide, hydroxychloquine, hydroxychloroquine, hydroxydaunorubicin, hydroxydaunorubicin hydrochloride, hydroxyethyl starch, hydroxyprogesterone caproate, hydroxyrubicin, hydroxyurea, hydroxyzine, Hylenex, hyperfractionated cyclophosphamide, ibalizumab, ibandronic acid, iboctadekin, ibritumomab tiuxetan, ibrutinib, ibuprofen, Ibutilide, icatibant, icodextrin, icosapent ethyl ester, icrucumab, idarubicin, idarucizumab, idelalisib, Id-KLH, idursulfase, IDX-184, IFN-alpha, IFN-beta, IFN-gama-1b, IFN-gamma, ifosafamide, ifosamide, Ifosfamide, Ig NextGen 10%, Ig VENA, Igantibe, IGIV3I, 11V, IL-15, IL-2, IL-4R, ilodecakin, iloprost, I-LV, IMA-901, IMA-910, IMA-950, ImaginAb, imalumab, imatinib, imetelstat, imgatuzumab, imiglitazar, imiglucerase, imiglucerase biosimilar, Iminoral, imipramine, imiquimod, ImmTher, ImMucin, ImmuCyst, Immuncell-LC, immuneGlobulin, immunocyanin, immunoglobulin, IMO-2055, IMO-2125, IMO-8400, IMP-321, Imprime PGG, Imuran, inclacumab, incobotulinumtoxinA, incomplete Freund's adjuvant, indinavir, indium In 111 monoclonal antibody MN-14, indium-111, indocyanine green, indomethacin, inebilizumab, infliximab, infliximab biosimilar, Influvac TC, inogatran, inotuzumab ozogamicin, Insujet, insulatard, insulin, insulin aspart, insulin aspart protamine, insulin aspart protamine 30/70, insulin degludec, insulin detemir, insulin glargine, insulin glargine biosimilar, insulin glulisine, insulin insulatard, insulin isophane, insulin lispro, insulin lispro biosimilar, insulin NPH, insulin peglispro, insulin tregopil, Intanza, Intercell, interferon, interferon alpha, interferon alpha-2a, interferon alpha-2b, interferon alphacon-1, interferon alpha-n1, interferon alpha-n3, interferon beta, interferon beta-1a, interferon beta-1a follow-on biologic, interferon beta-1b, interferon beta-1b follow-on biologic, interferon gamma, interferon gamma-1b, Interferon-beta, interleukin 2, interleukin-1, interleukin-1 receptor antagonist, Interleukin-10, interleukin-11, interleukin-12, interleukin-2, interleukin-4, Intragam P, iodine I 125, Iodine I 131, iodine-123 metaiodobenzylguanidine, iodine-131, iodixanol, IONIS-GCGRRx, IONIS-PTP1BRx, ioxaglate, ipamorelin, iphosphamide, ipilimumab, I-Port, ipragliflozin, IPV-AI SSI, iratumumab, irinotecan, irinotecan sucrosofate, IRIS, iron, iron dextran, IRX-2, IRX-5183, ISA-102, ISIS-14803, isoflurane, isofomide, isoniazid, isophosphamide, isosorbide dinitrate, isosorbidedinitrate, isotretinoin, isunakinra, itolizumab, itraconazole, ixabepilone, ixekizumab, JNJ-56914845, Jumtab, Kedbumin, keratinocyte growth factor, ketoconazole, ketorolac, Keyhole-Limpet Hemocyanin, Kidrolase, Kinevac, Kinrix, KLH, kollagenase, KSL-W, L19-IL-2, L19-TNF-alpha, labetuzumab, Lactated Ringers, Lactobacillus acidiphilus, Lactobacillus acidophilus DDS-1, Lactobacillus fermentin, Lactobacillus fermentum CECT5716, Lactobacillus fermentum LC40, Lactobacillus reuteri CR20, Lactobacillus reuteri RC-14, Lactobacillus rhamnosus GR-1, Lactobacillus salivarius, Lactobacillus salivarius HN6, lactoserum, Lais, lamivudine, lampalizumab, lancovutide, landogrozumab, lanoteplase, lanreotide, lanreotide acetate, lansoprazole, lapatinib, laquinimod, larazotide acetate, L-arginine, laromustine, laronidase, larotaxel, L-asparaginase, latiglutenase, LBVW-0101, LC-280126, lebrikizumab, ledipasvir, lefitolimod, leflunomide, leishmaniasis vaccine, lenalidomide, lenograstim, lenzilumab, lepirudin, Leptin, leridistim, lestaurtinib, letrozole, Leucotropin, leucovorin, leucovorin calcium, leuprolide, Leuprone, leuprorelin acetate, Leuvectin, levamisole, levetiracetam, levobupivacaine, levocarnitine, levocetirizine, levofloxacin, levo-folinate, levofolinic acid, levonorgestrel, levothyroxine sodium, lexaptepid pegol, LH, liatermin, libivirumab, lidocaine, ligelizumab, lignocaine, linaclotide, linagliptin, linezolid, linsitinib, lintuzumab, liothyronine sodium, lipegfilgrastim, Lipopoolysaccharide, liposomal amphotericin B, liposomal cytarabine, liposomal doxorubicin, liposomal interleukin-2, liposome-based adjuvant ASO1B, liprotamase, liraglutide, lisinopril, lithium, litronesib, lixisenatide, L-Leucine, L-leucovorin, LMB-2, L-menthol, LN-145, L-NMMA, lomibuvir, lomustine, lonafarnib, long-acting beta-2-agonist, long-acting insulin, long-acting polysialic acid-erythropoietin conjugate, Long-chain triglycerides, lonoctocog alpha, lopinavir, LOR-2040, loratadine, lorazepam, lorvotuzumab mertansine, losartan, loteprednol etabonate, lovastatin, low molecular weight sulphated dextran, LPS endotoxin, Lubriderm, lucatumumab, lucinactant, lumiliximab, luminespib, lumretuzumab, LungVax, Lupron, luspatercept, lusupultide, lutein, luteinizing hormone, luteinizing hormone releasing hormone agonist, lutropin alpha, LY-2181308, lycopene, lysine, mAb anti-CD3 conjugated to recombinant ricin A chain, mAb anti-CD7 conjugated to recombinant ricin A chain, Macrophage colony-stimulating factor, MAGE-1.A2, MAGE-10.A2, MAGE-3, MAGE-3.A2, MAGE-4.A2, MAGE-C2.A2, mapatumumab, maraviroc, MART-1 antigen, MART-1 peptide vaccine, masitinib, matuzumab, mavrilimumab, MBL-HCV1, MCVc vaccine, MDRNA, MDX-1379, MDX-CTLA4, mecasermin, mecasermin rinfabate, MEDT-551, MEDT-7510, Medihoney, medroxyprogesterone, medroxyprogesterone 17-acetate, medroxyprogesterone acetate, megestrol, Melan-A, melatonin, Melaxin, meloxicam, melphalan, melphalan flufenamide hydrochloride, Menactra, MenAfriVac, Mencevax, Meningitec, Menitorix, Menogon, Menopur, menotropin, menotropins, Menveo, mepivacaine, mepolizumab, mercaptopurine, mericitabine, merimepodib, Merional, meropenem, mesalamine, mesalazine, mesna, metelimumab, metenkefalin, metenkefalin acetate, metformin, metformin hydrochloride, methadone, methimazole, methotexrate, methotrexate, methoxsalen, methoxy polyethylene glycol-epoetin beta, methyl prednisolone, methylphenidate hydrochloride, methylprednisolone, methylprednisone, methyprednisolone, metranidazole, metreleptin, metronidazole, MF-59, micafungin, MicOryx, microbial nanocellulose, micronized progesterone, Microrelin, midazolam hydrochloride, midismase, midodrine, mifepristone, migalastat, miglitol, miglustat, milatuzumab, milatuzumab-doxorubicin conjugate, minocycline, Minprostin, mipsagargin, mirostipen, misoprostol, mitiglinide, Mitizax, mitomycin, mitomycin C, mitotane, mitoxantrone, mitoxantrone hydrochloride, mitumprotimut-t, mizoribine, MK-0941, MK-2206, MK-3641, MK-8226, MM-111, MM-121, MM-121+paclitaxel+doxorubicin+cyclophosphamide, MMR vaccine, M-M-RII, MMRV vaccine, M-M-RVAXPRO, MoAbs, MOAD, mocetinostat dihydrobromide, modimelanotide, mogamulizumab, molgramostim, mometasone, mometasone furoate, monalizumab, monoclonal antibody CD19, monoclonal antibody CD20, monoclonal antibody Mel-14 F(ab′)2, monotard, Montanide, montanide ISA 51 VG, Montanide ISA51, montanide ISA-51, montelukast sodium, monteplase, moroctocog alpha, moroctocog alpha biosimilar, morphine, mosapride, motavizumab, motesanib diphosphate, motexafin gadolinium, moxetumomab pasudotox, MP, MPR, mRNA-gp100, mRNA-Mage-A1, mRNA-Mage-A3, mRNA-Melan-A, mRNA-survivin, mRNA-tyrosinase, MT-2301, MUC-1-KLH vaccine, multiclade DNA recombinant adenovirus-5, multi-epitope tyrosinase/gp100 vaccine, Multiferon, Multifocal ERG, Multikine, muromonab-CD3, mutant butyrylcholinesterase-albumin fusion protein, MVA ME-TRAP, MVA-BN Filo, M-Vax, mycophenolate acid, mycophenolate acid sodium, mycophenolate mofetil, mycophenolate sodium, mycophenolic acid, Myeloma Immunoglobulin Idiotype Vaccine-KLH, Myrcludex B, N′,N″,N′″-tetraacetic acid, NA17.A2, Nabi-HB, N-acetylcysteine, nafarelin, NAHE-001, naloxone, namilumab, Nanogam, naproxen, naptumomab estafenatox, narlaprevir, natalizumab, nateglinide, natrium chloride, navitoclax, NDDPX-08, Necator americanus, necitumumab, nedaplatin, neihulizumab, NeisVac-C, nelarabine, nelfinavir, nelipepimut-s, nemifitide, nemolizumab, Neoral, Neoveil, nepidermin, nesbuvir, nesiritide, Nesp, Neublastin, Neucardin, Neupogen, Neurim, Neurotropin, Neurovision, neutrazumab, nevirapine, NewGam, Nexfin, NGM-282, NGR-hTNF, NHS-IL2-LT, nicorandil, nicotine, NicVAX, nifedipine, Niferex, nilotinib, nilutamide, Nimenrix, nimotuzumab, nimustine hydrochloride, nintedanib, nirogacestat, nitazoxanide, nitrazepam, nitric oxide, nitroglycerin, Nitromex, nitroprusside, nitrous oxide, Niuliva, nivobotulinumtoxin A, nivolumab, NN-1953, N-Nitro-L-Arginine Methyl Ester, Nobex, nonacog alpha, nonacog alpha biosimilar, nonacog beta pegol, nonacog gamma, non-pegylated granulocyte-colony stimulating factor, non-pegylated liposome-encapsulated doxorubicin, noradrenaline, Norelin, norepinephrine, norethindrone, norethindrone acetate, norethisterone, norethisterone acetate, norfloxacin, NovaCaps, Novaferon, novosis, NovoTTF-100A, NPH insulin, NPH/Regular insulin, NPO-11, nucleoside/nucleotide analog, Nuleusin, Nutropin, NY-ESO-1 vaccine, NY-ESO-1.A2, nystatin, obatoclax, obinutuzumab, oblimersen, ocaratuzumab, ocrelizumab, ocriplasmin, Octafibrin, Octagam, Octaplex, octocog alpha, octreotide, octreotide acetate, octreotide hydrochloride, octreotide LAR, OCV-101, ofatumumab, ofloxacin, OHR-118, OKT3, olaptesed pegol, olaratumab, oligodeoxynucleotides, olokizumab, olopatadine, olopatadine hydrochloride, omacetaxine mepesuccinate, omalizumab, omarigliptin, ombitasvir, omega interferon, Omegaven, omeprazole, omiganan, omiganan pentahydrochloride, Omnitrope, Omr-IgG-am, onabotulinumtoxinA, onartuzumab, once-daily naproxen, Onco-TCS, OncoVAX, Oncovin, Oncovir, ondansetron, onercept, ontuxizumab, opebacan, opicinumab, oportuzumab monatox, oprelvekin, oprozomib, Optivate, Optive, OPV3, OPV4, Oralgam, oregovomab, orlistat, Orthovisc, oseltamivir, OSH-101, osimertinib, Ostenil, otelixizumab, oteracil potassium, otlertuzumab, OTR-4120, oxaliplatin, oxaloacetic acid, oxandrolone, Oxazyme, oxelumab, oxybutynin, oxygen, oxyntomodulin, oxytocin, ozanezumab, ozarelix, ozoralizumab, P1A, P-3072, P-3073, paclitaxel, paclitaxel trevatide, pacritinib, pagibaximab, palifermin, palivizumab, palladium Pd 103, pamidronate disodium, pamrevlumab, Pancrease MT, pancreatin, pancrelipase, panitumumab, panobacumab, panobinostat, pantoprazole, paracetamol, paricalcitol, paritaprevir, paromomycin, parsatuzumab, pascolizumab, pasireotide diaspartate, pasireotide pamoate, pateclizumab, patritumab, pazopanib, PCV7, PDGF-BB, Pediarix, Pediasure, pednisone, PedvaxHIB, pegapamodutide, pegaptanib, pegargiminase, PEG-asparaginase, pegaspargase, Pegasys, PEG-bHb-CO, pegcrisantaspase, pegdinetanib, PEG-FGF21, pegfilgrastim, pegfilgrastim biosimilar, PEG-glucocerebrosidase, peg-granulocyte-colony stimulating factor, PEG-IFN, peg-IFN-alpha, Peg-IFN-alpha2a, PEG-IFN-SA, peg-ilodecakin, peginesatide, peg-INF, peginterferon alpha, peginterferon alpha-2a, peginterferon alpha-2a biosimilar API, peginterferon alpha-2a follow-on biologic, peginterferon alpha-2b, peginterferon alpha-2b follow-on biologic, peg-interferon alpha, peginterferon alpha 2, peg-interferon alpha-2a, peg-interferon alpha-2b, peginterferon beta-la, peginterferon lambda-la, PEG-interleukin-2, pegloticase, PEG-loxenatide, pegmusirudin, pegnivacogin, pegpleranib sodium, PEG-rASNase, pegsunercept, pegteograstim, pegvaliase, pegvisomant, PEGylated hyaluronidase, Pegylated IFN-alpha 2B, pegylated IFN-alpha-2a, pegylated intereferon alpha, pegylated interferon, pegylated interferon alpha-2a, pegylated interferon alpha, pegylated interferons, pegylated liposomal doxorubicin, PEGylated recombinant human growth hormone, PEGylated recombinant staphylokinase variant, pegylated-GCSF, pegylated-G-CSF, pegylated-IFN-alpha, pegylated-interferon-alpha, pelareorep, pembrolizumab, pemetrexed, pemetrexed disodium, penicillin, Pentacel, pentamidine, pentavalent rotavirus vaccine, Pentaxim, pentetic acid calcium, pentostatin, pentoxifylline, perfluoropropane, Perioperative Corticosteroids, personalized recombinant protein vaccines, pertuzumab, pevonedistat, pexastimogene devacirepvec, pexelizumab, pexiganan acetate, phenergen, pheniramine maleate, phentermine, phenylbutyrate, phenylephrine, phenytoin, PhiX 174, picibanil, pictilisib, pidilizumab, pilaralisib, pioglitazone, piperacillin, pirarubicin, pitavastatin, pitrakinra, Pituitary adenylate cyclase-activating polypeptide-38, pixantrone, Pixykine, placebo, placulumab, PlaMavax, plasma, Plasmin, Plasmodium vivax vaccine, platelets, platinum, plecanatide, plerixafor, plitidepsin, plovamer acetate, plozalizumab, Pneumaococcal Vaccine, Pneumo Novum, pneumococcal polyvalent vaccine, Pneumovax 23, polidocanol, polifeprosan 20 with carmustine, Poliorix, poliovirus vaccine, polyclonal IgY antibody, polyglutamate camptothecin, polyglycolic acid sheets, polymyxin B, polysaccharide-K, polysialic acicVKLH/QS-21 vaccine, pomalidomide, ponezumab, POT-4, potassium, potassium chloride, povidone iodine, povidone-iodine, poziotinib, PPSV23, pramlintide, pramlintide acetate, prasugrel, pravastatin, Pred Forte, Pred Mud, prednisolon, prednisolone, prednisone, prednsione, pregabalin, Pregnyl, Premarin, Premixed nitrous oxide, Prempro, Prevnar, Prevnar 13, prezatide copper acetate, PRHgh, prilocaine, Priorix, Priorix-Tetra, Privigen, probiotic, probiotics, procarbazine, procarbazine hydrochloride, progesterone, Progesterone in oil, progestin, Prolastin, Prolastin-C, Proleukin, promethazine, Prontogest, proparacaine, propranolol, propylthiouracil, ProQuad, Prosaptide TX14(A), Prosigne, prostaglandin F2alpha, protamine, protaphane, prourokinase, Provera, PTH(1-34), PUFA, PVX-410, PXFK peptide, pyrazinamide, pyridoxine, QS-21, Quadracel, quilizumab, quinine, Quintanrix, quizartinib dihydrochloride, rAAT, Rabies immunoglobulins, racotumomab, radalbuvir, radioactive iodine, radiolabeled anti-PSMA huJ591 minibodies, rafivirumab, ragaglitazar, raloxifene, raltegravir, raltitrexed, ramatercept, ramipril, ramoplanin, ramucirumab, ranibizumab, ranibizumab biosimilar, ranimustine, ranitidine, ranpirnase, rapamycin, rapastinel, Rapid acting regular insulin(correction factor), rasburicase, RATG, RAV-12, raxibacumab, Rebidose, Rebif 22, Rebif 44, Rebif Rebidose, recAAT, recFSH, Recombinant adenovirus-herpes simplex virus thymidine kinase, recombinant adenovirus-poxvirus prime-boost malaria vaccine, recombinant antithrombin III, recombinant factor VIII, recombinant flt3 ligand, recombinant follicle stimulating hormone, recombinant fowlpox GM-CSF vaccine adjuvant, recombinant fowlpox-CEA(6D)/TRICOM vaccine, recombinant fowlpox-prostate specific antigen vaccine, recombinant FSH, recombinant GM-CSF, Recombinant growth hormone, Recombinant HBsAg with different concentrations of aluminium salts and/or MPL, recombinant HBV vaccine, recombinant hCG, recombinant hepatitis B vaccine, recombinant human alpha B-crystallin, recombinant human alpha-fetoprotein, recombinant human arylsulfatase A, recombinant human chorionic gonadotropin, recombinant human endostatin, recombinant human epoetin alpha, recombinant human erythropoietin, recombinant human fibroblast growth factor type 2, Recombinant human follicle stimulating hormone, recombinant human granulocyte colony stimulating factor, recombinant human growth hormone, recombinant human hyaluronidase, recombinant human iduronate-2-sulfatase, Recombinant human IGF-1, recombinant Human IL-15, recombinant human insulin, Recombinant human intrinsic factor, recombinant human keratinocyte growth factor-2, recombinant human lactoferrin, recombinant human parathyroid hormone, recombinant human thrombopoietin, recombinant hypoallergenic vaccine, recombinant insulin glargine, recombinant interferon alpha, Recombinant interferon alpha-2a, recombinant interferon alpha-2b, recombinant interferon beta, recombinant interferon beta-la, recombinant interferon gamma, recombinant interleukin-12, recombinant interleukin-2, recombinant interleukin-3, recombinant LH, recombinant luteinizing hormone, recombinant lysostaphin, recombinant midismase, recombinant moroctocog alpha, recombinant prolactin, recombinant streptokinase, recombinant thymosin alpha 1, recombinant thyroid-stimulating hormone, recombinant tissue plasminogen activator, recombinant tumor necrosis factor family protein, recombinant vaccinia prostate-specific antigen vaccine, recombinant vaccinia-CEA(6D)-TRICOM vaccine, Recombinate, Recombivax HB, reconstituted HDL, Reditux, refanezumab, Refresh Endura, regorafenib, relamorelin, Rellidep, reltecimod, relugolix, remtolumab, repaglinide, reslizumab, RespiGam, resveratrol, retaspimycin, reteplase, retinoic acid, retinyl palmitate, reveglucosidase alpha, rexlemestrocel-L, rFSH, r-FSH, RG-6149, Rh-Apo2L, rhBMP-2, rhBMP-2/ACS/INTER AX, rhGDF-5, rhIL-11, rhIL-12, rhPDGF-BB, rhTPO, rhuCD40L, rHuEPO, r-Hu-EPO, R-hyperCVAD, ribavirin, ribaxamase, riboflavin, ridaforolimus, ridogrel, rifabutin, rifampicin, rifampin, rIFN-g, rilonacept, rilotumumab, rilpivirine hydrochloride, riluzole, rimabotulinumtoxinB, rindopepimut, Ringer lactate, rintatolimod, risankizumab, risedronate sodium, ritodrine, ritonavir, rituximab, rituximab biosimilar, rivaroxaban, r-LH, rNAPc2, RO-4929097, robatumumab, rocapuldencel-T, Roferon-A, roflumilast, romiplostim, romiplostim biosimilar, romosozumab, rontalizumab, ropeginterferon alpha-2b, ropivacaine, rosiglitazone, rosiglitazone maleate, rosomidnar, rosuvastatin, Rotarix, RotaTeq, rotigaptide, rovelizumab, rozrolimupab, RPI-78M, r-proUK, rT-PA, ruplizumab, rurioctocog alpha pegol, rusalatide, ruxolitinib, rV-PSA, RX-0201, Sabin-IPV, S-adenosyl-L-methionine, sagopilone, salbutamol, saline, salmon calcitonin, samalizumab, samarium(153Sm) lexidronam, SAMe, saquinavir, sargramostim, sarilumab, satraplatin, saxagliptin, SB-743921, Sch-58500, SCY-078, SCY-635, sebelipase alpha, secnidazole, second-generation leptin analogs, secukinumab, selenium, selonsertib, selumetinib, semaglutide, semaxanib, Se-methyl-seleno-L-cysteine, semuloparin, senrebotase, sepantronium bromide, serelaxin, seribantumab, setmelanotide, setrobuvir, sevirumab, SGN-30, sibrotuzumab, sibutramine, sifalimumab, siG12D LODER, sildenafil citrate, silibinin dihydrogensuccinate, siltuximab, silver sulfadiazine, simeprevir, simoctocog alpha, simtuzumab, simvastatin, sincalide, siplizumab, sipuleucel-T, sirolimus, SIR-Spheres, SIR-Spheres microspheres, sirukumab, sitagliptin, sitimagene ceradenovec, soblidotin, sodium aurothiomalate, sodium hyaluronate, sodium nitroprusside, sodium stibogluconate, sodium thiosulphate, sofosbuvir, solanezumab, solnatide, SomaDex, somapacitan, somatostatin, Somatotropin, somatrogon, somatropin, somatropin biosimilar, somatropine, somavaratan, sonepcizumab, sonolisib, sorafenib, sotatercept, sotrastaurin, sovaprevir, SPI-1620, spironolactone, sprifermin, squalamine, stamulumab, stavudine, Stereonate, sterile sodium hyaluronate solution, steroids, streptokinase, streptozocin, streptozotocin, strontium chloride Sr 89, Subcuvia, succinobucol, sulfamethoxazole, sulfasalazin, sulfasalazine, sulfonated human immunoglobulin, sulfonylurea, sulindac, sulphamethoxazole, sulphonylurea, sunitinib, suprachoroidal CLS-TA, suramin sodium, surotomycin, survivin peptide, survivin Sur1M2 peptide, synacthen, Synflorix, Synthroid, Syntocinon, Syntometrine, Syntommetrine, tabalumab, TA-CIN, tacrolimus, tadalafil, talabostat, talactoferrin alpha, taliglucerase alpha, talimogene laherparepvec, tamoxifen, tamoxifen citrate, tamsulosin hydrochloride, tandutinib, tanezumab, tarextumab, taribavirin hydrochloride, tasonermin, taspoglutide, tasquinimod, Tauferon, taurine, taxanes, taxol, tazobactam, TC-3, TC-3 hydrogel, TCM-700C, Tdap vaccine, Td-IPV, Tdvaccine, teduglutide, tefibazumab, tegafur, tegafur-gimeracil-oteracil potassium, tegafur-uracil, tegobuvir, telaprevir, telavancin, telbermin, telbivudine, temozolomide, temsirolimus, tenecteplase, teniposide, tenofovir, tenofovir disoproxil fumarate, teplizumab, teprotumumab, Terap C, terbutaline, tergenpumatucel-L, teriflunomide, teriparatide, teriparatide biosimilar, terlipressin, tertomotide, tesamorelin, tesidolumab, testosterone, testosterone cypionate, testosterone enanthanate, testosterone enanthate, Tetanol, tetanus diphtheria toxoids, tetanus toxoid, tetracaine, tetracosactide, tetracosactide hexaacetate, Tetravisc, teverelix, tezepelumab, TG-4010, TG-4040, tgDCC-E1A, TGF-beta 2, Thal/IFN, thalidomide, theophylline, Theratope, thiazolidinedione, thioguanine, thiotepa, thrombin, thrombin alpha, Thrombogenics, thrombolysis, thrombomodulin alpha, thrombopoietin, Thrombuster H, thymalphasin, thymoglobulin, thymopentin, thyrotropin alpha, thyrotropin-releasing hormone, thyroxine, thyroxine and triiodothyronine, tiagabine, ticagrelor, tifacogin, tigapotide, tigatuzumab, tildrakizumab, timolol, tinzaparin sodium, tipapkinogene sovacivec, tipifarnib, tipiracil hydrochloride, tipranavir, tirapazamine, tirofiban, Tisporin, Tisseel, Tisseel VH, tissue plasminogen activator, tivantinib, TIVb, tizanidine, tobramycin, tocilizumab, tocopherol, tofacitinib, tolvaptan, topiramate, topotecan, topotecan hydrochloride, topsalysin, toralizumab, tositumomab, tovetumab, tPA, trabectedin, trabedersen, trafermin, tralokinumab, tranexamic acid, trastuzumab, trastuzumab biosimilar, trastuzumab emtansine, trebananib, tregalizumab, tremelimumab, trenonacog alpha, treosulfan, tretinoin, trevogrumab, TriAb, triamcinolone, triamcinolone acetate, triamcinolone acetonide, Trichuris suis ova, tridecactide acetate, trifluridine, TriGem, triiodothyronine, trimethoprim, trimetrexate, TriMixDC, Trimovax, tripegfilgrastim, triptorelin, triptorelin acetate, triptorelin pamoate, Tritanrix HB, troglitazone, troplasminogen alpha, TroVax, TRU-015, TRX-318, tucotuzumab celmoleukin, tumor infiltrating lymphocytes, tumor necrosis factor, turoctocog alpha, TXA-127, tyrosinase, tyrosinase 206-214, tyrosinase peptide, Tyrosinase (1-9), Tyrosinase (240-251), Tyrosinase.A2, Tyrosinase/gp100/MART-1 Peptides, ublituximab, UFH, UFT, ularitide, ulinastatin, Ultralente, Unconjugated Myeloma Immunoglobulin plasma paraprotein, unfractionated heparin, urelumab, uric acid, urocortin 3, urocortin II, urofollitropin, urokinase, ursodeoxycholic acid, ustekinumab, Utrogestan, Vacc-4x, Vacc-05, vaccinia-CEA-TRICOM vaccine, vacristine, VAK-694, valaciclovir, valategrast, VALERGEN-BT, VALERGEN-DP, VALERGEN-DS, VALERGENT-BT, valganciclovir, valopicitabine dihydrochloride, valproic acid, valspodar, vancomycin, vaniprevir, vanutide cridificar, vapreotide, Vaqta, varenicline, Varicella live attenuated vaccine with gelatin, Varicella live attenuated vaccine without gelatin, varicella vaccine, varicella-zoster vaccine, VariZIG, Vasoactive Intestinal Peptide, vasopressin, vatalanib, vatelizumab, vatreptacog alpha, Vavelta, Vaxelis, VCL-HB01, VCL-HM01, vecuronium, vedolizumab, vedroprevir, VEGF, VEGFR1-1084, VEGFR2-169, Veglin, velafermin, velaglucerase alpha, Velban, veldoreotide, velimogene aliplasmid, veliparib, velmanase alpha, velpatasvir, veltuzumab, vemurafenib, vepalimomab, Veronate, verteporfin, ViaDor-hPTH, viagenpumatucel-L, Vialebex, vigabatrin, Vigantol, vildagliptin, vinblastine, vinblastine sulphate, vincristin, vincristine, vincristine sulphate, vindesine, vindesine sulphate, vinflunine, vinorelbine, Virulizin, visilizumab, vismodegib, vitespen, Vivaglobin, Vivaglobulin, Vivotif, VM26, VM-26, vobarilizumab, voclosporin, volociximab, Volulyte, Voluven, von Willebrand Factor/Factor VIII, vonapanitase, vonicog alpha, vorhyaluronidase alpha, voriconazole, vorinostat, votucalis, VP16, VR795 varicella Oka strain, W-135, warfarin, WinRho SDF, xenograft, XG-102, XG-104, XL-281, XmAb-5871, Y tetanus toxoid, Ypeginterferon alpha-2b, yttrium Y 90 epratuzumab, yttrium Y 90 monoclonal antibody MN-14, yttrium Y 90 resin microspheres, yttrium-90, Yttrium-90 spheres, yttrium-90-labeled daclizumab, zalcitabine, zalutumumab, zanolimumab, zastumotide, Zemaira, Zevalin, ziconotide, zidovudine, zinc gluconate, ZMapp, zoptarelin doxorubicin, zosuquidar, ZP-Glucagon, ZT-031, and Zutectra.

[0145] In some embodiments, a small molecule may be used in lieu of a biological in the above-described list. In some embodiments, an herbal preparation may be used in lieu of a biological in the above-described list. In some embodiments, a borderline product may be used in lieu of a biological in the above-described list.

### Gene Therapy and Cell Therapy

[0146] In certain embodiments, a stimulus that perturbs a GSC may be selected from a gene and cell therapy selected from 5-flourouracil, ACT-GRO-777, Ad35-GRIN, adenovirus gene therapy, aganirsen, aglatimagene besadenovec, aglatimagene besadenovec, alferminogene tadenovec, alicaforsen, alicaforsen, anti-HIV ribozyme therapy, anti-PD-1/PD-L1 therapy, aprinocarsen, asvasiran sodium, atesidorsen, ATL-1102, AVI-4126, AVI, baliforsen, beclanorsen, beperminogene perplasmid, bevacizumab, bevasiranib, BioBypass, capecitabine, cenersen, cetuximab, cobitolimod, cyclophosphamide, cystic fibrosis gene therapy, cytarabine, dexamethasone, drisapersen, Electroporation-mediated plasmid DNA vaccine therapy, eteplirsen, fludarabine, G-207 virus construct, ganciclovir, gataparsen, gemcitabine, gemtuzumab ozogamicin, Gendicine, Genedexa, golnerminogene pradenovec, GTU MultiHIV vaccine, HER-2 DNA AutoVac, HIF-1 alpha gene therapy, IFN beta gene therapy, IL-2, cLipid, imetelstat, inotersen, Instiladrin, interferon alfa, IONIS-APO(a)-LRx, irinotecan, ISIS-5132, ISIS-EIF4ERx, itarnafloxin, IT-pIL12-EP, Leuvectin, LIPO-5, LOR-2040, lymphocyte gene therapy, mipomersen, miravirsen, mongersen, MRX-34, MVATG-17401, Mydicar, Nek2 siRNA therapy, Nexagon, nusinersen, oblimersen, ofranergene obadenovec, patisiran, pCF1-CFTR, pexastimogene devacirepvec, pGM169/GL67A gene therapy, ProSavin, ranibizumab, recombinant adeno-associated virus acid alpha-glucosidase, revusiran, Rexin-G, riferminogene pecaplasmid, rituximab, sitimagene ceradenovec, sorafenib, SPK-9001, taberminogene vadenovec, tgAAV-CFTR, VEGF-2 gene therapy, volanesorsen, and ZFP-VEGF.

### Other Treatment Products

[0147] In certain embodiments, a stimulus that perturbs a GSC is one of the treatment products selected from 1-propanol, 2-propanol, 5-hydroxytryptophan, abexol, acetaminophen, Acetated Ringer's solution, Acetobacter, acetylcysteine, adenosine, air/oxygen, alanine, alanyl-glutamine, alpha-lipoic acid, Amcrylate, amoxicillin, Antibiophilus, Apevitin BC, AquADEKs-2, armodafinil, Arthronat, AS Orthana, ascorbic acid, aspartate, astaxanthin, Bacillus coagulans GB1-30, Baker's yeast, BeneFlax, benzoyl peroxide, beta-carotene, beta-glucan, bicarbonate, bicarbonate dialysate, BIFICOPEC, Bifidobacterium bifidum BGN4, Bifidobacterium breve M-16V, Bifidobacterium infantis M-63, Bifidobacterium lactis, Bifidobacterium lactis AD011, Bifidobacterium longum BB536, Biograf-G, Bioperine, Biotene, bisacodil, bisacodyl, bismuth, Brassica vegetable, bupropion, caffeine, calcium carbonate, calcium gluconate, calcium polystyrene sulfonate, Carboxymethylcellulose, carnitine complex, carvedilol, Casein, casein phosphopeptide-amorphous calcium phosphate, catechins polyphenols, Cetaphil Dermacontrol Moisturizer SPF-30, chitosan, chloramphenicol, chlorhexidine, chlorhexidine alcohol, chloroquine, cholecalciferol, choline chloride, chondroitin, chondroitin sulphate, cisplatin, citrulline, clarithromycin, CleanDental, ClinOleic, cocamide diethanolamine, cocoa, coenzyme q10, Colocap Balance, Coolprep, copper, corn/soy oil, Cosamin DS, Cremalax, curcumin, cyanoacrylate, cyanocobalamin, cycloserine, D-chiro-inositol, D-cycloserine, Dexeryl, dextrose, DFD-03, DHA, diacerein, diammine silver fluoride, Dibikor, Difinsa53, dimethicome, dipotassium oxalate monohydride, Diprobase, dl-phenylalanine, docosahexaenoic acid, Doublebase, D-serine, Dulcolax, Duraphat, edetate calcium disodium, eformoterol fumarate dihydrate, eicosapentaenoic acid, entecavir, EPA, epicatechin, ethanol, Evonail, Flamazine, Flortec, floxuridine, Flugel FFA, fluoxetine hydrochloride, folate, folic acid, gabapentin, Gastrus, gelatin tannate, gemcitabine, ginger, glucosamine, glucosamine sulphate, glucose, Glucose-potassium-insulin, glucosyl hesperidin, glutathione, glycine, guar gum, Gum Hydral, Hedrin, helium, HeO2, heparin, histidine, Histoacryl, hyaluronic acid, hydrocortisone, hydrogen, hydrogen water, hydrogen-rich dissolution water, Hydromol, ibuprofen, indigocarmine, intralipid, inulin, iodine, iodipin, iron hydroxide polymaltose, isotonic magnesium sulphate, ivermectin, Juven, Lactobacillus acidophilus, Lactobacillus acidophilus AD031, Lactobacillus acidophilus CL-1285, Lactobacillus casei, Lactobacillus rhamnosus, Lactobacillus rhamnosus GG, lactoferrin, lactose, lactulose, LAIS Birch-Alder, lauromacrogol, L-carnosine, lenalidomide, letrozole, leucine rich aminoacid product, leucovorin, levobupivacaine, lidocaine, lipiodol, lipopolysaccharide, Liposyn III, Listerine, L-Menthol, Locapred, Locatop, 1-tyrosine, lutein, magnesium, Magnesium sulphate, maltitol, mannitol, marine n-3 fatty acids, MaxClarity H, melatonin, meloxicam, Melsmon, mesalamine, mesalazine, meso-zeaxanthin, methotrexate, methylphenidate hydrochloride, methylsulfonylmethane, metronidazol, metronidazole, midazolam hydrochloride, minocycline, mitomycin, molecular hydrogen, Moviprep, myo-inositol, Nailprotex, NAVS naphthalan, NeoVIDERM, Neutrafluor 5000, NeutraLice Advance, niacin, Niflec, nitrogen, nitroglycerin, nitrous oxide, Novabone, NuCel, octenidine dihydrochloride, olanzapine, oleanolic acid, oleuropein, Olynth, omega-3 fatty acid, omega-3-carboxylic acids, Omegaven, omeprazole, OPH, Optifast, Optive, Oralgen Pollen, orthosilicic acid, oxygen, Panzytrat ‘HL’, Partly hydrogenated vegetable oils, PB-DM-04, PEG, PEG-400, PEG-Asc, Peglec, phosphatidylcholine, Picosalax, polaprezinc, poly-2-methoxyethylacrylate, polyethylene glycol, potassium chloride, potassium citrate, potassium hydroxide, potassium magnesium citrate, prednisolone, Prevenox, Probiotic B longum, Probiotic S thermophilus, proline, ProTectis, proteoglycan, prucalopride, psilocybin, quercetin, Rafasal, Rennie, resveratrol, Rhinaction, Ringer lactate, Ringerfundin, ropivacaine, rutin, saline, salsalate, sarcosine, Scleremo, serine, sevoflurane, SFCA acetate, SFCA butyrate, SFCA propionate, silver diammine fluoride, simethicone, Sinuclean nebules 45, sodium, sodium alginate, sodium bicarbonate, sodium citrate, sodium cromoglycate, sodium phosphate, sodium polystyrene sulfonate, sodium shale oil sulfonate, soy, soya, stannous fluoride, starch, Sterofundin ISO, Streptococcus salivarius, sulindac, sulphamethoxazole, Systane, Tacholiquine, taurine, tetracycline, Tetraspan, theobromine, theophylline, Trametes versicolor extract, Trans fatty acids, Traumeel, trehalose, triamcinolone acetonide, trichloracetic acid, Triclosan, trimethoprim, Truehope EMP, turmeric, ubiquinone, valerian, Vertise Row, vitamin A palmitate, vitamin B complex, vitamin B12, vitamin B6, isolated whey protein, and zopiclone.

[0148] Additional perturbations/drugs which may be utilized include, but are not limited to, TRW3-(2-AMINO-3-HYDROXY-PROPYL)-6-(N′-CYCLOHEXYL-HYDRAZINO)OCTAHYDRO-INDOL-7-OL; ({[(3E)-2′-OXO-2′,7′-DIHYDRO-2,3′-BIINDOL-3(7H)-YLIDENE]AMINO}OXY)ACETIC ACID; 9-Butyl-8-(4-Methoxybenzyl)-9h-Purin-6-Amine; (10R)-10-methyl-3-(6-methylpyridin-3-yl)-9,10,11,12-tetrahydro-8H-[1,4]diazepino[5′,6′:4,5]thieno[3,2-f]quinolin-8-one; (11R)-10-acetyl-11-(2,4-dichlorophenyl)-6-hydroxy-3,3-dimethyl-2,3,4,5,10,11-hexahydro-1H-dibenzo[b,e][1,4]diazepin-1-one; (11S)-8-CHLORO-11-[1-(METHYLSULFONYL)PIPERIDIN-4-YL]-6-PIPERAZIN-1-YL-11H-BENZO[5,6]CYCLOHEPTA[1,2-B]PYRIDINE; 9-HYDROXY-4-PHENYL-6H-PYRROLO[3,4-C]CARBAZOLE-1,3-DIONE; 9-Butyl-8-(3,4,5-Trimethoxybenzyl)-9h-Purin-6-Amine; 9-DEAZAINOSINE-2′,3-O-ETHYLIDENEPHOSPHONATE; AC-(D)PHE-PRO-BOROHOMOORNITHINE-OH; (1R)-N,6-DIHYDROXY-7-METHOXY-2-[(4-METHOXYPHENYL)SULFONYL]-1,2,3,4-TETRAHYDROISOQUINOLINE-1-CARBOXAMIDE; (1R)-1-{[(4′-METHOXY-1,1′-BIPHENYL-4-YL)SULFONYL]AMINO}-2-METHYLPROPYLPHOSPHONIC ACID; (1-Methyl-1h-Imidazol-2-Yl)-(3-Methyl-4-{3-[(Pyridin-3-Ylmethyl)-Amino]-Propoxy}-Benzofuran-2-Yl)-Methanone; Adenosine-5′-[Beta, Gamma-Methylene]Tetraphosphate; Adenosine-5′-Diphosphate-2′,3′-Vanadate; (13S)-13-METHYLDODECAHYDRO-1H-CYCLOPENTA[A]PHENANTHRENE-3,17(2H,4H)-DIONE; (1aR,8S,13S,14S,15aR)-5,13,14-trihydroxy-3-methoxy-8-methyl-8,9,13,14,15,15a-hexahydro-6H-oxireno[k][2]benzoxacyclotetradecine-6,12(1aH)-dione; Adenosine-5′-[Beta, Gamma-Methylene]Triphosphate; ({3-[1-(4-HYDROXY-2-OXO-2H-CHROMEN-3-YL)-PROPYL]-PHENYLCARBAMOYL}-METHYL)-CARBAMIC ACID TERT-BUTYL ESTER; (1R)-2-{[AMINO(IMINO)METHYL]AMINO)-1-(4-[(4R)-4-(HYDROXYMETHYL)-1,3,2-DIOXABOROLAN-2-YL]PHENYL}ETHYL NICOTINATE; Alpha,Alpha,Alpha-Trifluoro-P-Cresol; (1R)-2-PHENYLACETAMIDO-2-(3-CARBOXYPHENYL)ETHYL BORONIC ACID; Alpha-1-proteinase inhibitor; Alpha-Aminobutyric Acid; (1R,2S)-2-(5-thioxo-4,5-dihydro-1H-1,2,4-triazol-3-yl)cyclohexanecarboxylic acid; Adenylyl-3-5′-Phospho-Uridine-3-Monophosphate; Alpha-Cyclodextrin (Cyclohexa-Amylose); (1R,4S,7AS)-1-(1-FORMYLPROP-1-EN-1-YL)-4-METHOXY-2,4,5,6,7,7A-HEXAHYDRO-1H-ISOINDOLE-3-CARBOXYLIC ACID; (1S)-1-(1H-INDOL-3-YLMETHYL)-2-(2-PYRIDIN-4-YL-[1,7]NAPHTYRIDIN-5-YLOXY)-EHYLAMINE; (1S)-1-(3-chlorophenyl)-2-oxo-2-[(1,3,4-trioxo-1,2,3,4-tetrahydroisoquinolin-5-yl)amino]ethyl acetate; Alpha-D-Glucopyranosyl-2-Carboxylic Acid Amide; alpha-D-mannose 6-phosphate; Alpha-D-Galactose-1-Phosphate; Alpha-Difluoromethylornithine; (1S,4R,7AR)-4-BUTOXY-1-[(1R)-1-FORMYLPROPYL]-2,4,5,6,7,7A-HEXAHYDRO-1H-ISOINDOLE-3-CARBOXYLIC ACID; Alpha-Fluoro-Carboxymethyldethia Coenzyme a Complex; (1S)-2-[(2S,5R)-2-(AMINOMETHYL)-5-PROP-1-YN-1-YLPYRROLIDIN-1-YL]-1-CYCLOPENTYL-2-OXOETHANAMINE; ALPHA-HYDROXYFARNESYLPHOSPHONIC ACID; (1S,5S,7R)-N˜7˜-(BIPHENYL-4-YLMETHYL)-N˜3˜HYDROXY-6,8-DIOXA-3-AZABICYCLO[3.2.1]OCTANE-3,7-DICARBOXAMIDE; Alpha-Methylisocitric Acid; (2R)-3-{[(4Z)-5,6-DIPHENYL-6,7-DIHYDRO-4H-PYRROLO[2,3-D]PYRIMIDIN-4-YLIDENE]AMINO}PROPANE-1,2-DIOL; (1S,6R)-3-{[3-(TRIFLUOROMETHYL)-5,6-DIHYDRO[1,2,4]TRIAZOLO[4,3-A]PYRAZIN-7(8H)-YL]CARBONYL}-6-(2,4,5-TRIFLUOROPHENYL)CYCLOHEX-3-EN-1-AMINE; Alpha-Methyl-N-Acetyl-D-Glucosamine; Alpha-N-Dichloroacetyl-P-Aminophenylserinol; (3AR,5R,6S,7R,7AR)-5-(HYDROXYMETHYL)-2-PROPYL-5,6,7,7A-TETRAHYDRO-3AH-PYRANO[3,2-D][1,3]THIAZOLE-6,7-DIOL; Alpha-Ribazole-5′-Phosphate; (3ASR,4RS,8ASR,8BRS)-4-(2-(4-FLUOROBENZYL)-1,3-DIOXODEACAHYDROPYRROLO[3,4-A] PYRROLIZIN-4-YL)BENZAMIDINE; (3aS)-3a-hydroxy-5-methyl-1-phenyl-1,2,3,3a-tetrahydro-4H-pyrrolo[2,3-b]quinolin-4-one; Alpha-Ribazole-5′-Phosphate Derivative; (3AS,4R,9BR)-2,2-DIFLUORO-4-(4-HYDROXYPHENYL)-1,2,3,3A,4,9B-HEXAHYDROCYCLOPENTA[C]CHROMEN-8-OL; ANDROSTA-1,4-DIENE-3,17-DIONE; (3AS,4R,9BR)-4-(4-HYDROXYPHENYL)-1,2,3,3A,4,9B-HEXAHYDROCYCLOPENTA[C]CHROMEN-8-OL; Anthrax immune globulin human; autologous activated macrophage therapy; (3a5)-3a-hydroxy-1-phenyl-1,2,3,3a-tetrahydro-4H-pyrrolo[2,3-b]quinolin-4-one; (1-Tert-Butyl-5-Hydroxy-1h-Pyrazol-4-Yl)-(6-Methanesulfonyl-4′-Methoxy-2-Methyl-Biphenyl-3-Yl)-Methanone; Autologous cultured chondrocytes; (1S,3R,6S)-4-oxo-6-{4-[(2-phenylquinolin-4-yl)methoxy]phenyl}-5-azaspiro[2.4]heptane-1-carboxylic acid; Beta-1,2,3,4,6-Penta-O-Galloyl-D-Glucopyranose; (1S)-2-(1H-INDOL-3-YL)-1-{[(5-ISOQUINOLIN-6-YLPYRIDIN-3-YL)OXY]METHYL}ETHYLAMINE; (2-{[(4-BROMO-2-FLUOROBENZYL)AMINO]CARBONYL}-5-CHLOROPHENOXY)ACETIC ACID; Beta-D-Arabinofuranose-5′-Phosphate; (20S)-19,20,22,23-TETRAHYDRO-19-OXO-5H,21H-18,20-ETHANO-12,14-ETHENO-6,10-METHENOBENZ[D]IMIDAZO[4,3-L][1,6,9,13]OXATRIAZACYCLONOADECOSINE-9-CARBONITRILE; beta-D-galactopyranosyl-(1-&gt;4)-beta-D-galactopyranose; (1S,2S,3R,4S,5S)-2,3,4-TRIHYDROXY-5-(HYDROXYMETHYL)CYCLOHEXYL (1E)-2-PHENYL-N-(SULFOOXY)ETHANIMIDOTHIOATE; Beta-D-Glucopyranose Spirohydantoin; (2R)-1-[4-({4-[(2,5-DICHLOROPHENYL)AMINO]PYRIMIDIN-2-YL}AMINO)PHENOXY]-3-(DIMETHYLAMINO)PROPAN-2-OL; (2R)-1-[(5,6-DIPHENYL-7H-PYRROLO[2,3-D]PYRIMIDIN-4-YL)AMINO]PROPAN-2-OL; (2R)-1-[4-({6-[(2,6-DIFLUOROPHENYL)AMINO]PYRIMIDIN-4-YL}AMINO)PHENOXY]-3-(DIMETHYLAMINO)PROPAN-2-OL; bis(4-hydroxyphenyl)methanone; (2R)-1-(DIMETHYLAMINO)-3-{4-[(6-{[2-FLUORO-5-(TRIFLUOROMETHYL)PHENYL]AMINO}PYRIMIDIN-4-YL)AMINO]PHENOXY}PROPAN-2-OL; Biliverdin 1× Gamma Chromophore; (2r)-2-(Aminomethyl)-2,4-Dihydroxy-5-Oxo-3-(2-Oxoethyl)-2,5-Dihydro-1h-Imidazol-3-lum; Bis(5-Amidino-2-Benzimidazolyl)Methane Ketone; Bis(5-Amidino-Benzimidazolyl)Methane; (2R)-2-AMINO-3,3,3-TRIFLUORO-N-HYDROXY-2-{[(4-PHENOXYPHENYL)SULFONYL]METHYL}PROPANAMIDE; Bis(Adenosine)-5-Pentaphosphate; (2R)-3-{[(BENZYLAMINO)CARBONYL]AMINO}-2-HYDROXYPROPANOIC ACID; (2R)-4-[(8R)-8-METHYL-2-(TRIFLUOROMETHYL)-5,6-DIHYDRO[1,2,4]TRIAZOLO[1,5-A]PYRAZIN-7(8H)-YL]-4-OXO-1-(2,4,5-TRIFLUOROPHENYL)BUTAN-2-AMINE; (2S)-2-[3-(AMINOMETHYL)PHENYL]-3-{(S)-HYDROXY[(1R)-2-METHYL-1-{[(2-PHENYLETHYL)SULFONYL]AMINO}PROPYL]PHOSPHORYL}PROPANOIC ACID; (2R)-4-(2-BENZOYL-1,2-DIAZEPAN-1-YL)-4-OXO-1-(2,4,5-TRIFLUOROPHENYL)BUTAN-2-AMINE; Bis(Adenosine)-5′-Triphosphate; (2R,3R)-3-{[3,5-BIS(TRIFLUOROMETHYL)PHENYL]AMINO}-2-CYANO-3-THIOXOPROPANAMIDE; BOC-GAMMA-D-GLU-L-LYS(CBZ)-D-BOROALA; (2S)-2-[3-(AMINOMETHYL)PHENYL]-3-[(R)-HYDROXY{(1R)-2-METHYL-1-[(PHENYLSULFONYL)AMINO]PROPYL}PHOSPHORYL]PROPANOIC ACID; (2S)-4-(2,5-DIFLUOROPHENYL)-N,N-DIMETHYL-2-PHENYL-2,5-DIHYDRO-1H-PYRROLE-1-CARBOXAMIDE; (2S)-4-(2,5-difluorophenyl)-N-[(3R,4S)-3-fluoro-1-methylpiperidin-4-yl]-2-(hydroxymethyl)-N-methyl-2-phenyl-2,5-dihydro-1H-pyrrole-1-carboxamide; C1 Esterase Inhibitor (Recombinant); C-(1-Hydrogyl-Beta-D-Glucopyranosyl) Formamide; C1 Esterase Inhibitor (Human); (1S)-2-oxo-1-phenyl-2-[(1,3,4-trioxo-1,2,3,4-tetrahydroisoquinolin-5-yl)amino]ethyl acetate; Carba-Nicotinamide-Adenine-Dinucleotide; (2S)-2-(3-{[AMINO(IMINO)METHYL]AMINO}PHENYL)-3-[(S)-HYDROXY(3-PHENYLPROPYL)PHOSPHORYL]PROPANOIC ACID; (2R,3R)-7-(methylsulfonyl)-3-(2,4,5-trifluorophenyl)-1,2,3,4-tetrahydropyrido[1,2-a]benzimidazol-2-amine; (2R,3R)-N\hat{ }1\hat{ }-[(1S)-2,2-DIMETHYL-1-(METHYLCARBAMOYL)PROPYL]-N\hat{ }4\hat{ }-HYDROXY-2-(2-METHYLPROPYL)-3-{[(1,3-THIAZOL-2-YLCARBONYL)AMINO]METHYL}BUTANEDIAMIDE; (2r,3r,4r,5r)-3,4-Dihydroxy-N,N′-Bis[(1s,2r)-2-Hydroxy-2,3-Dihydro-1h-Inden-1-Yl]-2,5-Bis(2-Phenylethyl)Hexanediamide; CHLORAMPHENICOL SUCCINATE; (2S)-1-(6H-INDOL-3-YL)-3-{[5-(7H-PYRAZOLO[3,4-C]PYRIDIN-5-YL)PYRIDIN-3-YL]OXY}PROPAN-2-AMINE; (2R)—N-HYDROXY-2-[(3S)-3-METHYL-3-{4-[(2-METHYLQUINOLIN-4-YL)METHOXY]PHENYL}-2-OXOPYRROLIDIN-1-YL]PROPANAMIDE; (2R,4R)-N˜1˜-(4-CHLOROPHENYL)-N˜2˜-[2-FLUORO-4-(2-OXOPYRIDIN-1 (2H)-YL)PHENYL]-4-METHOXYPYRROLIDINE-1,2-DICARBOXAMIDE; Chorionic Gonadotropin (Recombinant); (2r)-N-[4-Cyano-3-(Trifluoromethyl)Phenyl]-3-[(4-Fluorophenyl)Sulfonyl]-2-Hydroxy-2-Methylpropanamide; Coagulation Factor IX (Recombinant); Cmp-2-Keto-3-Deoxy-Octulosonic Acid; (2S)-1-(1H-INDOL-3-YL)-3-{[5-(3-METHYL-1H-INDAZOL-5-YL)PYRIDIN-3-YL]OXY}PROPAN-2-AMINE; (2E)-3-(3,4-DIHYDROXYPHENYL)-N-[2-(4-HYDROXYPHENYL)ETHYL]ACRYLAMIDE; (2S)-1-[4-({4-[(2,5-DICHLOROPHENYL)AMINO]PYRIMIDIN-2-YL}AMINO)PHENOXY]-3-(DIMETHYLAMINO)PROPAN-2-OL; CCR5 mAb (human monoclonal antibody to CCR5); Coa-S-Acetyl 5-Bromotryptamine; Collagenase Clostridium histolyticum; (2R,3R,4R,5S)-2-(HYDROXYMETHYL)-1-NONYLPIPERIDINE-3,4,5-TRIOL; (2R,3R,4S,5R)-2-[6-amino-8-[(3,4-dichlorophenyl)methylamino]purin-9-yl]-5-(hydroxymethyl)oxolane-3,4-diol; cyclic 3′,5′-thymidine monophosphate; (2S)-1-{[5-(1H-INDAZOL-5-YL)PYRIDIN-3-YL]OXY}-3-[(7AS)-7AH-INDOL-3-YL]PROPAN-2-AMINE; (2-CARBAMOYLMETHYL-5-PROPYL-OCTAHYDRO-INDOL-7-YL)ACETIC ACID; D-[(N-Hydroxyamino)Carbonyl]Phenylalanine; (2S)-2-({6-[(3-amino-5-chlorophenyl)amino]-9-isopropyl-9H-purin-2-yl}amino)-3-methylbutan-1-ol; Decylamine-N,N-Dimethyl-N-Oxide; D-(L-a-Aminoadipoyl)-L-Cysteinyl-D-Isodehydrovaline; (2S)-2-(4-CHLOROPHENYL)-2-[4-(1H-PYRAZOL-4-YL)PHENYL]ETHANAMINE; (2E)-1-[2-hydroxy-4-methoxy-5-(3-methylbut-2-en-1-yl)phenyl]-3-(4-hydroxyphenyl)prop-2-en-1-one; Delta-Amino Valeric Acid; (2S)-1-{4-[(4-ANILINO-5-BROMOPYRIMIDIN-2-YL)AMINO]PHENOXY}-3-(DIMETHYLAMINO)PROPAN-2-OL; Delta-Bis(2,2′-Bipyridine)Imidazole Ruthenium (Ii); (2s)-2-[(2,4-Dichloro-Benzoyl)-(3-Trifluoromethyl-Benzyl)-Amino]-3-Phenyl-Propionic Acid; (2S)-2-[(3aR,4R,7S,7aS)-1,3-dioxooctahydro-2H-4,7-methanoisoindol-2-yl]propanoic acid; (2s)-2-[(5-Benzofuran-2-Yl-Thiophen-2-Ylmethyl)-(2,4-Dichloro-Benzoyl)-Amino]-3-Phenyl-Propionic Acid; (2S)-2-{[3-(3-aminophenyl)imidazo[1,2-b]pyridazin-6-yl]amino}-3-methylbutan-1-ol; BIS(HEXAMETHYLENE)TRIAMINE; (2S)-5-hydroxy-2-(4-hydroxyphenyl)-7-methoxy-2,3-dihydro-4H-chromen-4-one; (2S,3S)-3-{3-[2-chloro-4-(methylsulfonyl)phenyl]-1,2,4-oxadiazol-5-yl}-1-cyclopentylidene-4-cyclopropyl-1-fluorobutan-2-amine; DIETHYL 4-METHOXYPHENYL PHOSPHATE; (2S,3S)-3-AMINO-4-(3,3-DIFLUOROPYRROLIDIN-1-YL)-N,N-DIMETHYL-4-OXO-2-(TRANS-4-[1,2,4]TRIAZOLO[1,5-A]PYRIDIN-6-YLCYCLOHEXYL)BUTANAMIDE; D-leucyl-N-(4-carbamimidoylbenzyl)-L-prolinamide; (2S,3S,4R,5R,6R)-5-Amino-2-(Aminomethyl)-6-((2R,3R,4R,5S)-5-((1R,2R,3S,5R,6S)-3,5-Diamino-2-((2S,3R,4R,5S,6R)-3-amino-4,5-dihydroxy-6-(hydroxymethyl)-tetrahydro-2H-pyran-2-yloxy)-6-hydroxycyclohexyloxy)-2-(hydroxymethyl)-4-(2-((R)-piperidin-3-ylmethylamin; DIETHYL PROPANE-1,3-DIYLBISCARBAMATE; D-phenylalanyl-N-{4-[amino(iminio)methyl]benzyl}-L-prolinamide; D-Myo-Inositol-1,4-Bisphosphate; (3-ENDO)-8-METHYL-8-AZABICYCLO[3.2.1]OCT-3-YL 1H-PYRROLO[2,3-B]PYRIDINE-3-CARBOXYLATE; (3-EXO)-3-(10,11-DIHYDRO-5H-DIBENZO[A,D][7]ANNULEN-5-YLOXY)-8,8-DIMETHYL-8-AZONIABICYCLO[3.2.1]OCTANE; D-Myo-Inositol-2,4,5-Trisphosphate; (4-AMINO-2-{[1-(METHYLSULFONYL)PIPERIDIN-4-YL]AMINO}PYRIMIDIN-5-YL)(2,3-DIFLUORO-6-METHOXYPHENYL)METHANONE; D-Naphthyl-1-Acetamido Boronic Acid Alanine; (3R)-3-(aminomethyl)-9-methoxy-1,2,3,4-tetrahydro-5H-[1]benzothieno[3,2-e][1,4]diazepin-5-one; ETHYL (1E)-2-PHENYL-N-(SULFOOXY)ETHANIMIDOTHIOATE; Flavin adenine dinucleotide; (3R)-3-[(1,2,3,4-tetrahydroisoquinolin-7-yloxy)methyl]-2,3-dihydrothieno[2,3-f][1,4]oxazepin-5-amine; D-phenylalanyl-N-(3-fluorobenzyl)-L-prolinamide; (2S)-3-(1-{[2-(2-CHLOROPHENYL)-5-METHYL-1,3-OXAZOL-4-YL]METHYL}-1H-INDOL-5-YL)-2-ETHOXYPROPANOIC ACID; Di-Stearoyl-3-Sn-Phosphatidylethanolamine; (2S,3S)-3-AMINO-4-[(3S)-3-FLUOROPYRROLIDIN-1-YL]-N,N-DIMETHYL-4-OXO-2-(TRANS-4-[1,2,4]TRIAZOLO[1,5-A]PYRIDIN-5-YLCYCLOHEXYL)BUTANAMIDE; (2S,3S)-3-FORMYL-2-({[(4-METHYLPHENYL)SULFONYL]AMINO}METHYL)PENTANOIC ACID; (2S)-1-AMINO-3-[(5-NITROQUINOLIN-8-YL)AMINO]PROPAN-2-OL; (2S,3S)-4-cyclopropyl-3-{(3R,5R)-3-[2-fluoro-4-(methylsulfonyl)phenyl]-1,2,4-oxadiazolidin-5-yl}-1-[(3S)-3-fluoropyrrolidin- 1-yl]-1-oxobutan-2-amine; (2S)-6-(2,4-DIAMINO-6-ETHYLPYRIMIDIN-5-YL)-2-(3,5-DIFLUOROPHENYL)-4-(3-METHOXYPROPYL)-2H-1,4-BENZOXAZIN-3(4H)-ONE; ETHYL 3-[4-(AMINOSULFONYL)PHENYL]PROPANOATE; Flavin-Adenine Dinucleotide-N5-Isobutyl Ketone; (2S)-2-{[HYDROXY(4-IODOBENZYL)PHOSPHORYL]METHYL}PENTANEDIOIC ACID; (2S)-2-{3-[({[2-fluoro-4-(trifluoromethyl)phenyl]carbonyl}amino)methyl]-4-methoxybenzyl}butanoic acid; Glycyl-L-a-Aminopimelyl-E-(D-2-Aminoethyl)Phosphonate; (2S)N-ACETYL-L-ALANYL-ALPHAL-PHENYLALANYL-CHLOROETHYLKETONE; Glycyl-L-Alpha-Amino-Epsilon-Pimelyl-D-Alanine; (2R,3R,4S)-3-(4-HYDROXYPHENYL)-4-METHYL-2-[4-(2-PYRROLIDIN-1-YLETHOXY)PHENYL]CHROMAN-6-OL; GUANOSINE-2′,3′-O-ETHYLIDENEPHOSPHONATE; (2R)-N-hydroxy-3-naphthalen-2-yl-2-[(naphthalen-2-ylsulfonyl)amino]propanamide; (1S,3aS,5aR,8aS)-1,7,7-trimethyl-1,2,3,3a,5a,6,7,8-octahydrocyclopenta[c]pentalene-4-carboxylic acid; (2e)-N-Alyl-4-{[3-(4-Bromophenyl)-5-Fluoro-1-Methyl-1h-Indazol-6-Yl]Oxy}-N-Methyl-2-Buten-1-Amine; (2E)-N-hydroxy-3-[1-methyl-4-(phenylacetyl)-1H-pyrrol-2-yl]prop-2-enamide; (1S,2R,3S,4R,5R)-2,3,4-trihydroxy-N-octyl-6-oxa-8-azabicyclo[3.2.1]octane-8-carbothioamide; HGS-TR2J (human monoclonal antibody to TRAIL Receptor 2); (2s,3s,8s,9s)-3-Amino-9-Methoxy-2,6,8-Trimethyl-10-Phenyldeca-4,6-Dienoic Acid; (2E,4E)-11-METHOXY-3,7,11-TRIMETHYLDODECA-2,4-DIENOIC ACID; (2S)-8-[(tert-butoxycarbonyl)amino]-2-(1H-indol-3-yl)octanoic acid; (2S)—N-(4-cyano-3-iodophenyl)-3-(4-cyanophenoxy)-2-hydroxy-2-methylpropanamide; (1R)-1-(2-thienylacetylamino)-1-phenylmethylboronic acid; L-Alfa-Lysophosphatidylcholine, Lauroyl; (1,10 Phenanthroline)-(Th-Carbon Monoxide) Rhenium (1); (16ALPHA,17ALPHA)-ESTRA-1,3,5(10)-TRIENE-3,16,17-TRIOL; (1H-indol-3-yl)-(2-mercapto-ethoxyimino)-acetic acid; (1-HYDROXYDODECANE-1,1-DIYL)BIS(PHOSPHONIC ACID); Lambda-Bis(2,2′-Bipyridine)Imidazole Ruthenium (Ii); (1-HYDROXYNONANE-1,1-DIYL)BIS(PHOSPHONIC ACID); 3-(5-amino-3-imino-3H-pyrazol-4-ylazo)-benzoic acid; (1R)-1,2,2-TRIMETHYLPROPYL (R)-METHYLPHOSPHINATE; (1R)-4-(3-phenoxyphenyl)-1-phosphonobutane-1-sulfonic acid; (1R)-MENTHYL HEXYL PHOSPHONATE GROUP; (1R, 2S)-cis 1,2 dihydroxy-1,2-dihydronaphthalene; (1S,2S,3R,6R)-4-(hydroxymethyl)-6-(octylamino)cyclohex-4-ene-1,2,3-triol; Methoxy arachidonyl fluorophosphonate; (1S,2R,3S,4R,5S)-8-AZABICYCLO[3.2.1]OCTANE-1,2,3,4-TETROL; (1S)-MENTHYL HEXYL PHOSPHONATE GROUP; (1S,2S,5S)2-(4-GLUTARIDYLBENZYL)-5-PHENYL-1-CYCLOHEXANOL; (1S,4R,9S)-5-(trifluoromethyl)-1,2,3,4-tetrahydro-1,4-methanonaphthalen-9-amine; (1S,4S)-4-(3,4-dichlorophenyl)-N-methyl-1,2,3,4-tetrahydronaphthalen-1-amine; (1Z)-2-HYDROXY-3-OXOHEX-1-EN-1-YL DIHYDROGEN PHOSPHATE; (1Z)-4-(4-FLUOROPHENYL)-2-METHYLIDENEBUTAN-1-IMINE; (2,2-DIPHOSPHONOETHYL)(DODECYL)DIMETHYLPHOSPHONIUM; (2-ACETYL-5-METHYLANILINO)(2,6-DIBROMOPHENYL)ACETAMIDE; (2-AMINO-1,3-OXAZOL-5-YL)-(3-BROMOPHENYL)METHANONE; (2-AMINO-3-PHENYL-BICYCLO[2.2.1]HEPT-2-YL)-PHENYL-METHANONE; (2-BROMOETHYL)(2-′FORMYL-4′-AMINOPHENYL) ACETATE; (2E)-3-(2,4-DICHLOROPHENYL)-N-HYDROXYACRYLAMIDE; (2E)-3-(2-OCT-1-YN-1-YLPHENYL)ACRYLIC ACID; (2E)-3-(3,4-DIHYDROXYPHENYL)-2-IMINOPROPANOIC ACID; N-(2,6-Diflouro-Benzyl)-4-Sulfamoyl-Benzamide; (2E)-3-(4-CHLOROPHENYL)-N-HYDROXYACRYLAMIDE; (2E,4E)-2-HYDROXY-6-OXO-6-PHENYLHEXA-2,4-DIENOIC ACID; (2E,4R,5S)-2,3,4,5-TETRAHYDROXY-6-(PALMITOYLOXY)HEX-2-ENOIC ACID; (2R)-1-[(4-tert-butylphenyl)sulfonyl]-2-methyl-4-(4-nitrophenyl)piperazine; N-(1-benzylpiperidin-4-yl)-4-sulfanylbutanamide; (2R)-2-({9-(1-methylethyl)-6-[(4-pyridin-2-ylbenzyl)amino]-9H-purin-2-yl}amino)butan-1-ol; (2R)-2-(4-CHLOROPHENYL)-2-PHENYLETHANAMINE; N-(2-Acetamido)Iminodiacetic Acid; (2R)-3-(phosphonooxy)propane-1,2-diyl diheptanoate; (2R)-4,4-dihydroxy-5-nitro-2-(phenylmethyl)pentanoic acid; (2r)-Amino(3,5-Dihydroxyphenyl)Acetic Acid; (2R)-amino(4-hydroxyphenyl)ethanoic acid; (2E)-3-(3-hydroxy-4-methoxyphenyl)prop-2-enoic acid; (2r,4s)-2-Methyl-2,3,3,4-Tetrahydroxytetrahydrofuran; (2S)-1-(2,5-dimethylphenoxy)-3-morpholin-4-ylpropan-2-ol; (2S)-1-(9H-Carbazol-4-yloxy)-3-(isopropylamino)propan-2-ol; N-(3,5-dibromo-4-hydroxyphenyl)benzamide; (2S)-1-methyl-2-[(2S,4R)-2-methyl-4-phenylpentyl]piperidine; N-(3-AMINOPROPYL)-2-NITROBENZENAMINE; (2S)-2-AMINO-1-(5-TERT-BUTYL-1,3,4-OXADIAZOL-2-YL)PROPAN-1-ONE; (2S)-2-AMINO-4-(METHYLSULFANYL)-1-(1,3-THIAZOL-2-YL)BUTANE-1,1-DIOL; (2s)-2-Amino-4-(Methylsulfanyl)-1-Pyridin-2-Ylbutane-1,1-Diol; (2S)-2-amino-5-oxo-5-[(4-phenylmethoxyphenyl)amino]pentanoic acid; (2S)-2-HYDROXY-2H-CHROMENE-2-CARBOXYLICACID; N-(3-MERCAPTOPROPANOYL)-D-ALANINE; (2S)-2-hydroxy-2-methyl-N-[4-nitro-3-(trifluoromethyl)phenyl]-3-(pentafluorophenoxy)propanamide; (2S)-2-methyl-2,3-dihydrothieno[2,3-f][1,4]oxazepin-5-amine; (2S)-3-(4-chloro-3-fluorophenoxy)-N-[4-cyano-3-(trifluoromethyl)phenyl]-2-hydroxy-2-methylpropanamide; (2S)-3-[(9H-fluoren-9-ylideneamino)oxy]-2-methylpropanoic acid; (2S)-3-[(R)-[(1S)-1-amino-3-phenylpropyl](hydroxy)phosphoryl]-2-benzylpropanoic acid; (2S)-3-[4-(acetylamino)phenoxy]-2-hydroxy-2-methyl-N-[4-nitro-3-(trifluoromethyl)phenyl]propanamide; (2S)-4-(4-fluorobenzyl)-N-(2-sulfanylethyl)piperazine-2-carboxamide; (2S)-4-(4-fluorobenzyl)-N-(3-sulfanylpropyl)piperazine-2-carboxamide; (2s)-4-(Beta-Alanylamino)-2-Aminobutanoic Acid; (2s,3r)-3-Amino-2-Hydroxy-5-(Ethylsulfanyl)Pentanoyl-((S)-(−)-(1-Naphthyl)Ethyl)Amide; (2S,3S)-3-(4-fluorophenyl)-2,3-dihydroxypropanoic acid; (2z)-2-(Benzoylamino)-3-[4-(2-Bromophenoxy)Phenyl]-2-Propenoic Acid; (2s,3s)-Trans-2,3-Dihydro-3-Hydroxyanthranilic Acid; (2Z)-2-cyano-N-(2,2′-dichlorobiphenyl-4-yl)-3-hydroxybut-2-enamide; (2Z)-2-cyano-N-(3′-ethoxybiphenyl-4-yl)-3-hydroxybut-2-enamide; (2z)-3-{[Oxido(Oxo)Phosphino]Oxy}-2-Phenylacrylate; (2Z)-5-BROMO-2,3′-BIINDOLE-2′,3(1H,1′H)-DIONE AMMONIATE; (2Z)-N-(3-chloro-2′-methoxybiphenyl-4-yl)-2-cyano-3-hydroxybut-2-enamide; (2Z)-N-biphenyl-4-yl-2-cyano-3-cyclopropyl-3-hydroxyprop-2-enamide; N-(5-(4-CHLORO-3-(2-HYDROXY-ETHYLSULFAMOYL)-PHENYLTHIAZOLE-2-YL)-ACETAMIDE; (2Z,3E)-2,3′-BIINDOLE-2′,3(1H,1′H)-DIONE 3-{O-[(3R)-3,4-DIHYDROXYBUTYL]OXIME}; N-(4-MORPHOLINE)CARBONYL-B-(1-NAPHTHYL)-L-ALANINE-L-LEUCINE BORONIC ACID; (2Z,4E)-3-chloro-2-hydroxy-6-oxo-6-phenylhexa-2,4-dienoic acid; (3R)-8-(dioxidosulfanyl)-3-methyl-1,2,3,4-tetrahydroquinoline; (3,3-dimethylpiperidin-1-yl)(6-(3-fluoro-4-methylphenyl)pyridin-2-yl)methanone; (3,4,5-Trihydroxy-6-Hydroxymethyl-Tetrahydro-Pyran-2-Yl)-Phosphoramidic Acid Dimethyl Ester; (3,4-DIHYDROXY-2-NITROPHENYL)(PHENYL)METHANONE; (3,4-Dihydroxy-Phenyl)-Triphenyl-Arsonium; (3-{3-[[2-Chloro-3-(Trifluoromethyl)Benzyl](2,2-Diphenylethyl)Amino]Propoxy}Phenyl)Acetic Acid; (3-Carboxy-2-(R)-Hydroxy-Propyl)-Trimethyl-Ammonium; N-(5-{[(2S)-4-amino-2-(3-chlorophenyl)butanoyl]amino}-1H-indazol-3-yl)benzamide; (3E)-3-[(phenylamino)methylidene]dihydrofuran-2(3H)-one; (3R)-3-ethyl-N-[(4-methylphenyl)sulfonyl]-L-aspartic acid; (3E)-4-(1-METHYL-1H-INDOL-3-YL)BUT-3-EN-2-ONE; N-(5-Amino-5-Carboxypentyl)Glutamic Acid; (3E)-5-fluoro-1-[(6-fluoro-4H-1,3-benzodioxin-8-yl)methyl]-1H-indole-2,3-dione 3-oxime; (3e)-6′-Bromo-2,3′-Biindole-2′,3(1h,1′h)-Dione 3-Oxime; (3r)-3-{[(Benzyloxy)Carbonyl]Amino}- 2-Oxo-4-Phenylbutane-1-Diazonium; (3R)-3-cyclopentyl-6-methyl-7-[(4-methylpiperazin-1-yl)sulfonyl]-3,4-dihydro-2H-1,2-benzothiazine 1,1-dioxide; N-(5′-Phosphopyridoxyl)-D-Alanine; N-(ethoxycarbonyl)-L-leucine; (3r)-4-(P-Toluenesulfonyl)-1,4-Thiazane-3-Carboxylicacid-L-Leucine; N-(Chlorophenyl)-N′-Hydroxyguanidine; (3R)-4,4-DIFLUORO-3-[(4-METHOXYPHENYL)SULFONYL]BUTANOIC ACID; (3R)-4-[(3R)-3-AMINO-4-(2,4,5-TRIFLUOROPHENYL)BUTANOYL]-3-(2,2,2-TRIFLUOROETHYL)-1,4-DIAZEPAN-2-ONE; N-(Phosphonoacetyl)-L-Ornithine; (3R)-4-{[(3,4-dihydroxyphenyl)acetyl]oxy}-N-(2-formylindolizin-3-yl)-3-sulfino-D-valine; (3R)-METHYLCARBAMOYL-7-SULFOAMINO-3,4-DIHYDRO-1H-ISOQUINOLINE-2-CARBOXYLIC ACID BENZYL ESTER; N-(QUINOLIN-8-YL)METHANESULFONAMIDE; (3R)-N-methyl-3-phenyl-3-[4-(trifluoromethyl)phenoxy]propan-1-amine; (3R,4R)-1-{6-[3-(METHYLSULFONYL)PHENYL]PYRIMIDIN-4-YL}-4-(2,4,5-TRIFLUOROPHENYL)PIPERIDIN-3-AMINE; (3R,4R)-4-(pyrrolidin-1-ylcarbonyl)-1-(quinoxalin-2-ylcarbonyl)pyrrolidin-3-amine; (3R,4R,5R)-5-(HYDROXYMETHYL)-1-(3-PHENYLPROPYL)PIPERIDINE-3,4-DIOL; (3r,4r,5r)-5-(Hydroxymethyl)Piperidine-3,4-Diol; (3R,4S)-1-(3,4-DIMETHOXYPHENYL)-3-(3-METHYLPHENYL)PIPERIDIN-4-AMINE; (3R,4S)-1-[(4-amino-5H-pyrrolo[3,2-d]pyrimidin-7-yl)methyl]-4-[(benzylsulfanyl)methyl]pyrrolidin-3-ol; (3R,4S)-1-[(4-amino-5H-pyrrolo[3,2-d]pyrimidin-7-yl)methyl]-4-[(butylsulfanyl)methyl]pyrrolidin-3-ol; N-(Sulfanylacetyl)Tyrosylprolylmethioninamide; (3R,4S)-1-[6-(6-METHOXYPYRIDIN-3-YL)PYRIMIDIN-4-YL]-4-(2,4,5-TRIFLUOROPHENYL)PYRROLIDIN-3-AMINE; N-[1-(2,6-dimethoxybenzyl)piperidin-4-yl]-4-sulfanylbutanamide; N-[12-(1H-imidazol-1-yl)dodecanoyl]-L-leucine; (3r,5r)-7-((1r,2r,6s,8r,8as)-2,6-Dimethyl-8-{[(2r)-2-Methylbutanoyl]Oxy}-1,2,6,7,8,8a-Hexahydronaphthalen-1-Yl)-3,5-Dihydroxyheptanoic Acid; (3R,5S,7R,12S,13R)-13-FORMYL-12,14-DIHYDROXY-3,5,7-TRIMETHYLTETRADECANOIC ACID; [1H-INDOL-3-YL-ACETYL]ASPARTIC ACID; (3S)-1-(1,3-BENZODIOXOL-5-YLMETHYL)-3-[4-(1H-IMIDAZOL-1-YL)PHENOXY]PIPERIDINE; (3S)-1-(2-hydroxyphenyl)-5-oxopyrrolidine-3-carboxylic acid; (3S)-1-(4-acetylphenyl)-5-oxopyrrolidine-3-carboxylic acid; (3S)-1-{[4-(but-2-yn-1-yloxy)phenyl]sulfonyl}pyrrolidine-3-thiol; (3S)-1-CYCLOHEXYL-5-OXO-N-PHENYLPYRROLIDINE-3-CARBOXAMIDE; N-[4-(2,4-Dimethyl-1,3-Thiazol-5-Yl)Pyrimidin-2-Yl]-N′-Hydroxyimidoformamide; (3s)-3,4-Di-N-Hexanoyloxybutyl-1-Phosphocholine; (3s)-3-Amino-1-(Cyclopropylamino)Heptane-2,2-Diol; (3S)-3-cyclopentyl-6-methyl-7-[(4-methylpiperazin-1-yl)sulfonyl]-3,4-dihydro-2H-1,2,4-benzothiadiazine 1,1-dioxide; (3S)-3-hydroxy-1-methyl-2,3-dihydro-1H-indole-5,6-dione; (3S)-4-{[4-(BUT-2-YNYLOXY)PHENYL]SULFONYL}-N-HYDROXY-2,2-DIMETHYLTHIOMORPHOLINE-3-CARBOXAMIDE; (3S)—N-(3-BROMOPHENYL)-1-CYCLOHEXYL-5-OXOPYRROLIDINE-3-CARBOXAMIDE; N-[4-(3-BROMO-PHENYLAMINO)-QUINAZOLIN-6-YL]-ACRYLAMIDE; (3S)—N-(5-CHLORO-2-METHYLPHENYL)-1-CYCLOHEXYL-5-OXOPYRROLIDINE-3-CARBOXAMIDE; (3S)-N-methyl-3-phenyl-3-[4-(trifluoromethyl)phenoxy]propan-1-amine; N-[N-[1-Hydroxycarboxyethyl-Carbonyl]Leucylamino-Butyl]-Guanidine; (3S,5E)-3-propyl-3,4-dihydrothieno[2,3-f][1,4]oxazepin-5(2H)-imine; (3S,5R,7R,8S,9S,10R)-7-(hydroxymethyl)-3-(2-naphthyl)-1,6-dioxa-2-azaspiro[4.5]decane-8,9,10-triol; N-[4-Hydroxymethyl-Cyclohexan-6-Yl-1,2,3-Triol]-4,6-Dideoxy-4-Aminoglucopyranoside; (3S,6S)-3,6-bis(4-hydroxybenzyl)piperazine-2,5-dione; (3s,6s,9r,10r,11s,12s,13e,15e,18s,21s)-18-{(1e,3e,7s,8s)-9-[(2s,3r,4s,5s,6r,9s,11s)-9-Ethyl-4-Hydroxy-3,5,11-Trimethyl-8-Oxo-1-Oxa-7-Azaspiro[5.5]Undec-2-Yl]-8-Hydroxy-1,7-Dimethylnona-1,3-Dienyl}-10,12-Dihydroxy-3-(3-Hydroxybenzyl)-6-Isopropyl-11-Methyl-; (3s,8ar)-3-(1h-Imidazol-5-Ylmethyl)Hexahydropyrrolo[1,2-a]Pyrazine-1,4-Dione; N-[0-Phosphono-Pyridoxyl]-Isoleucine; (3Z)-1-[(6-fluoro-4H-1,3-benzodioxin-8-yl)methyl]-4-[(E)-2-phenylethenyl]-1H-indole-2,3-dione 3-oxime; (3Z)-1-[(6-fluoro-4H-1,3-benzodioxin-8-yl)methyl]-4-phenyl-1H-indole-2,3-dione 3-oxime; (3Z)-6-(4-HYDROXY-3-METHOXYPHENYL)-3-(1H-PYRROL-2-YLMETHYLENE)-1,3-DIHYDRO-2H-INDOL-2-ONE; (3Z)-N,N-DIMETHYL-2-OXO-3-(4,5,6,7-TETRAHYDRO-1H-INDOL-2-YLMETHYLIDENE)-2,3-DIHYDRO-1H-INDOLE-5-SULFONAMIDE; N˜3˜-[3-(5-METHOXYPYRIDIN-3-YL)BENZYL]PYRIDINE-2,3-DIAMINE; (3Z,5S,6R,7S,8R,8aS)-3-(octylimino)hexahydro[1,3]thiazolo[3,4-a]pyridine-5,6,7,8-tetrol; N-cycloheptylglycyl-N-(4-carbamimidoylbenzyl)-L-prolinamide; (4-{(2S)-2-[(tert-butoxycarbonyl)amino]-3-methoxy-3-oxopropyl}phenyl)methaneseleninic acid; (4′-{[Allyl(Methyl)Amino]Methyl}-1,1′-Biphenyl-4-Yl)(4-Bromophenyl)Methanone; (4-{2-Acetylamino-2-[1-(3-Carbamoyl-4-Cyclohexylmethoxy-Phenyl)-Ethylcarbamoyl}-Ethyl}-2-Phosphono-Phenoxy)-Acetic Acid; (4aS)-5-[(2,4-diaminopteridin-6-yl)methyl]-4a,5-dihydro-2H-dibenzo[b,f]azepin-8-ol; N-cyclopropyl-4-pyrazolo[1,5-b]pyridazin-3-ylpyrimidin-2-amine; (4-BROMOPHENYL)[4-({(2E)-4-[CYCLOPROPYL(METHYL)AMINO]BUT-2-ENYL}OXY)PHENYL]METHANONE; (4E)-N-(4-fluorophenyl)-4-[(phenylcarbonyl)imino]-4H-pyrazole-3-carboxamide; (4e,8e,12z,16z)-N,N,4,8,13,17,21-Heptamethyldocosa-4,8,12,16,20-Pentaen-1-Amine; (4R)-4-(3-butoxy-4-methoxybenzyl)imidazolidin-2-one; (4R)-4-(3-HYDROXYPHENYL)-N, N,7,8-TETRAMETHYL-3,4-DIHYDROISOQUINOLINE-2(1H)-CARBOXAMIDE; N-ethyl-N-[3-(propylamino)propyl]propane-1,3-diamine; (4R)-7-chloro-9-methyl-1-oxo-1,2,4,9-tetrahydrospiro[beta-carboline-3,4′-piperidine]-4-carbonitrile; (3s)-Tetrahydrofuran-3-YI (1r,2s)-3-[4-((1r)-2-{[(S)- Amino(Hydroxy)Methyl]Oxy}-2,3-Dihydro-1h-Inden-1-Yl)-2-Benzyl-3-Oxopyrrolidin-2-Yl]-1-Benzyl-2-Hydroxypropylcarbamate; Nicotinamide Adenine Dinucleotide 3-Pentanone Adduct; (4R,5R)-5-AMINO-1-[2-(1,3-BENZODIOXOL-5-YL)ETHYL]-4-(2,4,5-TRIFLUOROPHENYL)PIPERIDIN-2-ONE; (4r,5s,6s,7r)-1,3-Dibenzyl-4,7-Bis(Phenoxymethyl)-5,6-Dihydroxy-1,3 Diazepan-2-One; (4s)-2-[(1e)-1-Aminoprop-1-Enyl]-4,5-Dihydro-1,3-Thiazole-4-Carboxylic Acid; (4S)-4-(2-NAPHTHYLMETHYL)-D-GLUTAMIC ACID; (4s)-4-{[(2s)-2-Amino-3-Oxopropyl]Sulfanyl}-L-Homoserinate; (4S,5E,7Z,10Z,13Z,16Z,19Z)-4-hydroxydocosa-5,7,10,13,16,19-hexaenoic acid; (4s-Trans)-4-(Methylamino)-5,6-Dihydro-6-Methyl-4h-Thieno(2,3-B)Thiopyran-2-Sulfonamide-7,7-Dioxide; (4-sulfamoyl-phenyl)-thiocarbamic acid 0-(2-thiophen-3-yl-ethyl) ester; Nicotinamide Adenine Dinucleotide Acetone Adduct; (4Z)-6-bromo-4-({[4-(pyrrolidin-1-ylmethyl)phenyl]amino}methylidene)isoquinoline-1,3(2H,4H)-dione; N-Pyridoxyl-1-Amino-Cyclopropanecarboxylic Acid-5-Monophosphate; (5-(PYRIDIN-3-YL)FURAN-2-YL)METHANAMINE; (5,6-DIPHENYL-FURO[2,3-D]PYRIMIDIN-4-YLAMINO)-ACETIC; N-Naphthalen-1-Ylmethyl-2′-[3,5-Dimethoxybenzamido]-2′-Deoxy-Adenosine; (5-BROMO-4-CHLORO-3-INDOLYL)-A-D-MANNOSE; (5-CHLORO-2-{[(3-NITROBENZYL)AMINO]CARBONYL}PHENOXY)ACETIC ACID; (5-Chloropyrazolo[1,5-a]Pyrimidin-7-Yl)-(4-Methanesulfonylphenyl)Amine; Open Form of 2′-Deoxy-Ribofuranose-5′-Phosphate; (5E)-14-CHLORO-15,17-DIHYDROXY-4,7,8,9,10,11-HEXAHYDRO-2-BENZOXACYCLOPENTADECINE-1,12(3H,13H)-DIONE; (5E)-5-[(2,2-DIFLUORO-1,3-BENZODIOXOL-5-YL)METHYLENE]-1,3-THIAZOLIDINE-2,4-DIONE; (5E,13E)-11-HYDROXY-9,15-DIOXOPROSTA-5,13-DIEN-1-OIC ACID; (5e,13e)-9,15-Dihydroxy-11-Oxoprosta-5,13-Dien-1-Oicacid; (5E,14E)-11-oxoprosta-5,9,12,14-tetraen-1-oic acid; (5E,7S)-2-amino-7-(4-fluoro-2-pyridin-3-ylphenyl)-4-methyl-7,8-dihydroquinazolin-5(6H)-one oxime; (5-Methyl-6-Oxo-1,6-Dihydro-Pyridin-3-Yl)-1,2-Dideoxy-Ribofuranose-5-Monophosphate; (5-Oxo-5,6-Dihydro-Indolo[1,2-a]Quinazolin-7-Yl)-Acetic Acid; (5-phenyl-7-(pyridin-3-ylmethylamino)pyrazolo[1,5-a]pyrimidin-3-yl)methanol; (5R)-2-[(2-fluorophenyl)amino]-5-(1-methylethyl)-1,3-thiazol-4(5H)-one; (5R)-2-SULFANYL-5-[4-(TRIFLUOROMETHYL)BENZYL]-1,3-THIAZOL-4-ONE; PARA-NITROBENZYL GLUTARYL GLYCINIC ACID; P1-(5′-Adenosyl)P5-(5-(3azido-3′-Deoxythymidyl))Pentaphosphate; (5R)-5-[(1E)-BUTA-1,3-DIENYL]-4-HYDROXY-3,5-DIMETHYLTHIOPHEN-2(5H)-ONE; (5R,6E,8Z,11Z,14Z,17Z)-5-hydroxyicosa-6,8,11,14,17-pentaenoic acid; (5r)-6-(4-{[2-(3-Iodobenzyl)-3-Oxocyclohex-1-En-1-Yl]Amino}Phenyl)-5-Methyl-4,5-Dihydropyridazin-3(2h)-One; Phosphomethylphosphonic Acid Guanylate Ester; Phosphoaminophosphonic Acid Guanylate Ester; Phosphomethylphosphonic Acid Adenosyl Ester; (5S)-2-{[(1S)-1-(4-fluorophenyl)ethyl]amino}-5-(1-hydroxy-1-methylethyl)-5-methyl-1,3-thiazol-4(5H)-one; (5R,7R,8S,9S,10R)-7-(hydroxymethyl)-3-phenyl-1,6-dioxa-2-azaspiro[4.5]dec-2-ene-8,9,10-triol; (5S)-1-benzyl-3-(1,1-dioxido-1,2-benzisothiazol-3-yl)-4-hydroxy-5-(1-methylethyl)-1,5-dihydro-2H-pyrrol-2-one; (5S)-2-(cyclooctylamino)-5-methyl-5-propyl-1,3-thiazol-4(5H)-one; Phosphomethylphosphonic Acid-Guanylate Ester; (5R,6S,8S)-8-[3-(AMINOMETHYL)PHENYL]-6-HYDROXY-5-ISOPROPYL-3-OXO-1-PHENYL-2,7-DIOXA-4-AZA-6-PHOSPHANONAN-9-OIC ACID 6-OXIDE; (5S)-3-ANILINO-5-(2,4-DIFLUOROPHENYL)-5-METHYL-1,3-OXAZOLIDINE-2,4-DIONE; (5S)-4,5-difluoro-6-[(2-fluoro-4-iodophenyl)imino]-N-(2-hydroxyethoxy)cyclohexa-1,3-diene-1-carboxamide; Phosphothiophosphoric Acid-Adenylate Ester; (5S)-5-(3-AMINOPROPYL)-3-(2,5-DIFLUOROPHENYL)-N-ETHYL-5-PHENYL-4,5-DIHYDRO-1H-PYRAZOLE-1-CARBOXAMIDE; (5s)-5-Iododihydro-2,4(1h,3h)-Pyrimidinedione; (5S,6S)-6-[(R)ACETOXYETH-2-YL]-PENEM-3-CARBOXYLATEPROPANE; (5S,8R,9S,10S,13R,14S,17S)-13-{2-[(3,5-DIFLUOROBENZYL)OXY]ETHYL}-17-HYDROXY-10-METHYLHEXADECAHYDRO-3H-CYCLOPENTA[A]PHENANTHREN-3-ONE; PUROMYCIN AMINONUCLEOSIDE-5′-MONOPHOSPHATE; rhMBL (recombinant human mannose binding lectin); (5z)-2-[(1s,2r)-1-Amino-2-Hydroxypropyl]-5-[(4-Amino-1h-Indol-3-Yl)Methylene]-3-(2-Hydroxyethyl)-3,5-Dihydro-4h-Imidazol-4-One; (5Z)-3-(4-CHLOROPHENYL)-4-HYDROXY-5-(1-NAPHTHYLMETHYLENE)FURAN-2(5H)-ONE; (5z)-5-(1h-Indol-3-Ylmethylene)-4h-Imidazol-4-One; (5Z)-5-(3-BROMOCYCLOHEXA-2,5-DIEN-1-YLIDENE)-N-(PYRIDIN-4-YLMETHYL)-1,5-DIHYDROPYRAZOLO[1,5-A]PYRIMIDIN-7-AMINE; (6,7-Difluoro-Quinazolin-4-Yl)-(1-Methyl-2,2-Diphenyl-Ethyl)-Amine; S-Ethyl-N-[4-(Trifluoromethyl)Phenyl]Isothiourea; (6,7-Dihydro-5h-Cyclopenta[D]Imidazo[2,1-B]Thiazol-2-Yl]-4,7-Dihydro[1,4]Thiazepine-3,6-Dicarboxylic Acid; (6-[4-(AMINOMETHYL)-2,6-DIMETHYLPHENOXY]-2-{[4-(AMINOMETHYL)PHENYL]AMINO}-5-BROMOPYRIMIDIN-4-YL)M ETHANOL; Sodium phosphate, monobasic, monohydrate; (6e)-6-[(2e,4e,6e)-3,7-Dimethylnona-2,4,6,8-Tetraenylidene]-1,5,5-Trimethylcyclohexene; Sodium phosphate, monobasic, anhydrous; (6E,11E)-HEPTADECA-6,11-DIENE-9,9-DIYLBIS(PHOSPHONIC ACID); Technetium Tc 99m nofetumomab merpentan; (6R)-2-amino-6-[2-(3-methoxybiphenyl-3-yl)ethyl]-3,6-dimethyl-5,6-dihydropyrimidin-4(3H)-one; UNDECA-3,7-DIENE-1,3,7,11-TETRACARBALDEHYDE; (6S)-1-chloro-3-[(4-fluorobenzyl)oxy]-6-(pyrrolidin-1-ylcarbonyl)pyrrolo[1,2-a]pyrazin-4(6H)-one; (6S)-2-amino-6-(3′-methoxybiphenyl-3-yl)-3,6-dimethyl-5,6-dihydropyrimidin-4(3H)-one; (6S)-6-CYCLOPENTYL-6-[2-(3-FLUORO-4-ISOPROPOXYPHENYL)ETHYL]-4-HYDROXY-5,6-DIHYDRO-2H-PYRAN-2-ONE; (7as,12ar,12bs)-1,2,3,4,7a,12,12a,12b-Octahydroindolo[2,3-a]Quinolizin-7(6h)-One; (7R,8R)-8-(2,4,5-trifluorophenyl)-6,7,8,9-tetrahydroimidazo[1,2-a:4,5-c]dipyridin-7-amine; (7S)-2-(2-aminopyrimidin-4-yl)-7-(2-fluoroethyl)-1,5,6,7-tetrahydro-4H-pyrrolo[3,2-c]pyridin-4-one; (8alpha,10alpha,13alpha,17beta)-17-[(4-hydroxyphenyl)carbonyl]androsta-3,5-diene-3-carboxylic acid; Uridine-5′-Diphosphate-N-Acetylmuramoyl-L-Alanine; (8R,9Z,12Z)-8-hydroxy-6-oxooctadeca-9,12-dienoic acid; (9ALPHA,13BETA,17BETA)-2-[(1Z)-BUT-1-EN-1-YL]ESTRA-1,3,5(10)-TRIENE-3,17-DIOL; (9aS)-4-bromo-9a-butyl-7-hydroxy-1,2,9,9a-tetrahydro-3H-fluoren-3-one; (9BETA,11ALPHA,13ALPHA,14BETA,17ALPHA)-11-(METHOXYMETHYL)ESTRA-1(10),2,4-TRIENE-3,17-DIOL; (9BETA,13ALPHA,14BETA,17ALPHA)-2-METHOXYESTRA-1,3,5(10)-TRIENE-3,17-DIYL DISULFAMATE; (9r,10r)-9-(S-Glutathionyl)-10-Hydroxy-9,10-Dihydrophenanthrene; (9S)-9-[(8-AMMONIOOCTYL)AMINO]-1,2,3,4,9,10-HEXAHYDROACRIDINIUM; (9S, 10E,12Z)-9-hydroxyoctadeca-10,12-dienoic acid; (9s,10s)-9-(S-Glutathionyl)-10-Hydroxy-9,10-Dihydrophenanthrene; (9S, 12S)-9-(1-methylethyl)-7,10-dioxo-2-oxa-8, 11-diazabicyclo[12.2.2]octadeca-1(16),14, 17-triene-12-carboxylic acid; (CHLOROACETYL)CARBAMIC ACID (3R,4S,5S,5R)-5-M ETHOXY-4-[(2R,3R)-2-METHYL-3-(3-METHYL-2-BUTENYL)OXIRANYL]-1-OXASPIRO[2.5]OCT-6-YL ESTER; 4-[5-(4-FLUORO-PHENYL)-2-(4-METHANESULFINYL-PHENYL)-3H-IMIDAZOL-4-YL]-PYRIDINE; (E)-(2r,3r,4s,5r)-3,4,5-Trihydroxy-2-Methoxy-8,8-Dimethyl-Non-6-Enoic Acid ((3s,6r)-6-Hydroxy-2-Oxo-Azepan-3-Yl)-Amide; (E)-(4S,6S)-6-((S)-2-{(S)-2-[(FURAN-2-CARBONYL)-AMINO]-3-METHYL-BUTYRYLAMINO}-3-METHYL-BUTYRYLAMINO)-8-METHYL-5-OXO-4-((R)-2-OXO-PYRROLIDIN-3-YLMETHYL)-NON-2-ENOIC ACID ETHYL ESTER; 4-BROMO-3-(CARBOXYMETHOXY)-5-[3-(CYCLOHEXYLAMINO)PHENYL]THIOPHENE-2-CARBOXYLIC ACID; (E)-(S)-4-[(S)-2-((S)-2-TERT-BUTOXYCARBONYLAMINO-3-METHYL-BUTYRYLAMINO)-2-PHENYL-ACETYLAMINO]-5-(2-OXO-PYRROLIDIN-3-YL)-PENT-2-ENOIC ACID ETHYL ESTER; 4-[(5-{[4-(3-CHLOROPHENYL)-3-OXOPIPERAZIN-1-YL]METHYL}-1H-IMIDAZOL-1-YL)METHYL]BENZONITRILE; (E)-[4-(3,5-difluorophenyl)-3H-pyrrolo[2,3-b]pyridin-3-ylidene](3-methoxyphenyl)methanol; 4-{[(2,6-dichlorophenyl)carbonyl]amino}-N-piperidin-4-yl-1H-pyrazole-3-carboxamide; 4-{2-(4-Fluoro-Benzyl)-6-Methyl-5-[(5-Methyl-Isoxazole-3-Carbonyl)-Amino]-4-Oxo-Heptanoylamino}-5-(2-Oxo-Pyrrolidin-3-Yl)-Pentanoic Acid Ethyl Ester; (METHYLPYRIDAZINE PIPERIDINE BUTYLOXYPHENYL)ETHYLACETATE; (METHYLPYRIDAZINE PIPERIDINE ETHYLOXYPHENYL)ETHYLACETATE; (METHYLPYRIDAZINE PIPERIDINE PROPYLOXYPHENYL)ETHYLACETATE; (N-{4-[(ETHYLANILINO)SULFONYL]-2-METHYLPHENYL}-3,3,3-TRI FLUORO-2-HYDROXY-2-METHYLPROPANAMIDE; (R)-(+) 5(9BH)-OXO-9B-PHENYL-2,3-DIHYDROTHIAZOLO[2,3-A]ISOINDOL-3-CARBOXYLIC ACID METHYL ESTER; (R)-(+)9B-(3-METHYL)PHENYL-2,3-DIHYDROTHIAZOLO[2,3-A]ISOINDOL-5(9BH)-ONE; 4-{[(1R,2S)-1,2-dihydroxy-2-methyl-3-(4-nitrophenoxy)propyl]amino}-2-(trifluoromethyl)benzonitrile; (R)-1-(4-(4-(HYDROXYMETHYL)-1,3,2-DIOXABOROLAN-2-YL)PHENETHYL)GUANIDINE; 4-{5-[(1Z)-1-(2-IMINO-4-OXO-1,3-THIAZOLIDIN-5-YLIDENE)ETHYL]-2-FURYL}BENZENESULFONAMIDE; (R)-2-(FORMYLOXY)-3-(PHOSPHONOOXY)PROPYL PENTANOATE; (R)-3-BROMO-2-HYDROXY-2-METHYL-N-[4-NITRO-3-(TRIFLUOROMETHYL)PHENYL]PROPANAMIDE; (R)â€N[2-[1-(aminoiminomethyl)-3-piperidinyl]-1-oxoethyl]-4-(phenylethynyl)-1-phenylalanine methylester; (R)-TRANS-4-(1-AMINOETHYL)-N-(4-PYRIDYL) CYCLOHEXANECARBOXAMIDE; 4-Benzoylamino-4-{1-{1-Carbamoyl-2-[4-(Difluoro-Phosphono-Methyl)-Phenyl]-Ethylcarbamoyl}-2-[4-(Difluoro-Phosphono-Methyl)-Phenyl]-Ethylcarbamoyl}-Butyric Acid; (RP,SP)-O-(2R)-(1-PHENOXYBUT-2-YL)-METHYLPHOSPHONIC ACID CHLORIDE; (S)-(+)-2-[4-(FLUOROBENZYLOXY-BENZYLAMINO)PROPIONAMIDE]; 4-{[(2-OXO-1,2-DIHYDRO-3H-INDOL-3-YLIDENE)METHYL]AMINO}-N-(1,3-THIAZOL-2-YL)BENZENESULFONAMIDE; (S)-2-((S)-3-ISOBUTYL-2,5-DIOXO-4-QUINOLIN-3-YLMETHYL-[1,4]DIAZEPAN-1YL)-N-METHYL-3-NAPHTALEN-2-YL-PROPIONAMIDE; (S)-2-(MERCAPTOMETHYL)-5-PHENYLPENTANOIC ACID; (S)-2(Phosphonoxy)Caproyl-L-Leucyl-P-Nitroanilide; 4-(4-METHYLPIPERAZIN-1-YL)-N-[5-(2-THIENYLACETYL)-1,5-DIHYDROPYRROLO[3,4-C]PYRAZOL-3-YL]BENZAMIDE; (S)-2-[4-(Aminomethyl)-1h-1,2,3-Triazol-1-Yl]-4-Methylpentanoic Acid; (5)-2-{Methyl-[2-(Naphthalene-2-Sulfonylamino)-5-(Naphthalene-2-Sulfonyloxy)-Benzoyl]-Amino}-Succinicacid; (S)-2-CHLORO-N-(1-(2-(2-HYDROXYETHYLAMINO)-2-OXOETHYL)-2-OXO-1,2,3,4-TETRAHYDROQUINOLIN-3-YL)-6H-THIENO[2,3-B]PYRROLE-5-CARBOXAMIDE; 4-[4-(2,3-DIHYDRO-1,4-BENZODIOXIN-6-YL)-3-METHYL-1H-PYRAZOL-5-YL]-6-ETHYLBENZENE-1,3-DIOL; (S)-2-Amino-3-(6h-Selenolo[2,3-B]-Pyrrol-4-Yl)-Propionic Acid; (S)-2-Amino-4-[(2s,3r)-2,3,5-Trihydroxy-4-Oxo-Pentyl]Mercapto-Butyric Acid; (S)-2-Amino-3-(1,3,5,7-Pentahydro-2,4-Dioxo-Cyclopenta[E]Pyrimidin-1-Yl) Proionic Acid; (S)-2-METHYL-1-[(4-METHYL-5-ISOQUINOLINE)SULFONYL]-HOMOPIPERAZINE; 4-[4-(2,5-DIOXO-PYRROLIDIN-1-YL)-PHENYLAMINO]-4-HYDROXY-BUTYRIC ACID; (S)-4-Bromo-3-Hydroxy-3-Methylbutyl Diphosphate; (S)-4-ISOPROPOXYCARBONYL-6-METHOXY-3-METHYLTHIOMETHYL-3,4-DIHYDROQUINOXALIN-2(1H)-THIONE; (S)-5-(4-Benzyloxy-Phenyl)-4-(7-Phenyl-Heptanoylamino)-Pentanoic Acid; 4-HYDROXYBENZALDEHYDE 0-(3,3-DIMETHYLBUTANOYL)OXIME; (S)—N-(3-Indol-1-Yl-2-Methyl-Propyl)-4-Sulfamoyl-Benzamide; (S)—N-(4-carbamimidoylbenzyl)-1-(2-(cyclohexylamino)ethanoyl)pyrrolidine-2-carboxamide; (S)—N-(4-carbamimidoylbenzyl)-1-(2-(cyclopentylamino)ethanoyl)pyrrolidine-2-carboxamide; (S)—N-(4-carbamimidoylbenzyl)-1-(2-(cyclohexyloxy)ethanoyl)pyrrolidine-2-carboxamide; (S)—N-(4-carbamimidoylbenzyl)-1-(2-(cyclopentyloxy)ethanoyl)pyrrolidine-2-carboxamide; (S)—N-(4-carbamimidoylbenzyl)-1-(3-cyclohexylpropanoyl)pyrrolidine-2-carboxamide; (S)—N-(4-carbamimidoylbenzyl)-1-(3-cyclopentylpropanoyl)pyrrolidine-2-carboxamide; (S)-TETRAHYDROFURAN-3-YL (2S,3S)-4-((S)-4-((1R,3R)-3-(2-AMINO-2-OXOETHYL)-2,3-DIHYDRO-1H-INDEN-1-YL)-2-BENZYL-3-OXO-2,3-DIHYDRO-1H-PYRROL-2-YL)-3-HYDROXY-1-PHENYLBUTAN-2-YLCARBAMATE; (TERT-BUTYLOXYCARBONYL)-ALANYL-AMINO ETHYL-FORMAMIDE; (Z)-3-BENZYL-5-(2-HYDROXY-3-NITROBENZYLIDENE)-2-THIOXOTHIAZOLIDIN-4-ONE; (Z,Z)-4-Hydroxy-N,N,N-Trimethyl-10-Oxo-7-[(1-Oxo-9-Octadecenyl)Oxy]-3,5,9-Trioxa-4-Phosphaheptacos-18-En-1-Aminium-4-Oxide; [(1-{2[(4-Carbamimidoyl-Phenylamino)-Methyl]-1-Methyl-1h-Benzoimidazol-5-Yl}-Cyclopropyl)-Pyridin-2-Yl-Methyleneaminooxy]-Acetic Acid Ethyl Ester; 4-chloro-N-(3-methoxypropyl)-N-[(3S)-1-(2-phenylethyl)piperidin-3-yl]benzamide; [(2-AMINO-ALPHA-METHOXYIMINO-4-THIAZOLYLACETYL)AMINO]METHYLBORONIC ACID; (S)-3-(4-(2-Carbazol-9-Yl-Ethoxy)-Phenyl)-2-Ethoxy-Propionic Acid; [(2r,3s,4r,5r)-5-(6-Amino-9h-Purin-9-Yl)-3,4-Dihydroxytetrahydro-2-Furanyl]Methyl Sulfamate; [(2r,3s,4s,5r)-3,4,5-Trihydroxytetrahydrofuran-2-Yl]Methyl Dihydrogen Phosphate; [(2S)-4-methyl-3-oxo-2,3,4,5-tetrahydro-1H-1,4-benzodiazepin-2-yl]acetic acid; [(3R,4S)-4-HYDROXY-3-METHYL-2-OXOHEXYL]PHOSPHONIC ACID; [(3R)-7-NITRO-1,2,3,4-TETRAHYDROISOQUINOLIN-3-YL]METHANOL; [(3,7,11-TRIMETHYL-DODECA-2,6,10-TRIENYLOXYCARBAMOYL)-METHYL]-PHOSPHONIC ACID; [(3R,4S,5S,7R)-4,8-DIHYDROXY-3,5,7-TRIMETHYL-2-OXOOCTYL]PHOSPHONIC ACID; [(3S)-9-hydroxy-1-methyl-10-oxo-4,10-dihydro-3H-benzo[g]isochromen-3-yl]acetic acid; [(4-{4-[4-(Difluoro-Phosphono-Methyl)-Phenyl]-Butyl}-Phenyl)-Difluoro-Methyl]-Phosphonic Acid; [(4R)-2,2-DIMETHYL-1,3-DIOXOLAN-4-YL]METHYL HYDROGEN HEX-5-ENYLPHOSPHONATE; [(4R)-4-(3-HYDROXYPHENYL)-1,6-DIMETHYL-2-THIOXO-1,2,3,4-TETRAHYDROPYRIMIDIN-5-YL]PHENYL)METHANONE; 4-Carbamoyl-4-{[6-(Difluoro-Phosphono-Methyl)-Naphthalene-2-Carbonyl]-Amino}-Butyric Acid; [(5R)-5-(2,3-dibromo-5-ethoxy-4-hydroxybenzyl)-4-oxo-2-thioxo-1,3-thiazolidin-3-yl]acetic acid; [[(3R,4R,5S,6R)-3-(butanoylamino)-4,5-dihydroxy-6-(hydroxymethyl)oxan-2-ylidene]amino] N-phenylcarbamate; [[(3R,4R,5S,6R)-4,5-dihydroxy-6-(hydroxymethyl)-3-(pentanoylamino)oxan-2-ylidene]amino] N-phenylcarbamate; [[1-[N-HYDROXY-ACETAMIDYL]-3-METHYL-BUTYL]-CARBONYL-LEUCINYL]-ALANINE ETHYL ESTER; [[CYCLOHEXANESULFONYL-GLYCYL]-3[PYRIDIN-4-YL-AMINOMETHYL]ALANYL]PIPERIDINE; [{2-bromo-4-[(2R)-3-oxo-2,3-diphenylpropyl]phenyl}(difluoro)methyl]phosphonic acid; 5-AMINO-3-{[4-(AMINOSULFONYL)PHENYL]AMINO}-N-(2,6-DIFLUOROPHENYL)-1H-1,2,4-TRIAZOLE-1-CARBOTHIOAMIDE; [1(1-Methyl-4,5-Dioxo-Pent-2-Enylcarbamoyl)-2-Phenyl-Ethyl]-Carbamic Acid Benzyl Ester; [1-(3-CHLORO-2-FORMYL-PHENYLCARBAMOYL)-2-METHYL-PROPYL]-CARBAMIC ACID TERT-BUTYL ESTER; [1-(3-Hydroxy-2-Oxo-1-Phenethyl-Propylcarbamoyl)2-Phenyl-Ethyl]-Carbamic Acid Pyridin-4-Ylmethyl Ester; [1-(4-Fluorobenzyl)Cyclobutyl]Methyl (1s)-1-[Oxo(1h-Pyrazol-5-Ylamino)Acetyl]Pentylcarbamate; 5-[3-(BENZYLAMINO)PHENYL]-4-BROMO-3-(CARBOXYMETHOXY)THIOPHENE-2-CARBOXYLIC ACID; [1-HYDROXY-2-(1,1′:3′,1″-TERPHENYL-3-YLOXY)ETHANE-1,1-DIYL]BIS(PHOSPHONIC ACID); [2-(1-Amino-2-Hydroxy-Propyl)-4-(1h-Indol-3-Ylmethylene)-5-Oxo-4,5-Dihydro-Imidazol-1-Yl]-Acetaldehyde; [1-(1-Benzyl-3-Hydroxy-2-Oxo-Propylcarbamoyl)-2-Phenyl-Ethyl]-Carbamic Acid Benzyl Ester; [2-(3-DIBENZOFURAN-4-YL-PHENYL)-1-HYDROXY-1-PHOSPHONO-ETHYL]-PHOSPHONIC ACID; [2-(5-MERCAPTO-[1,3,4]THIADIAZOL-2-YLCARBAMOYL)-1-PHENYL-ETHYL]-CARBAMIC ACID BENZYL ESTER; [2-(Methyleneamine)-4-(4-Hydroxy-Benzylidine)-5-Oxo-4,5-Dihydro-Imidazol-1-Yl]-Acetaldehyde; [2,4,6-Triisopropyl-Phenylsulfonyl-L-[3-Amidino-Phenylalanine]]-Piperazine-N′-Beta-Alanine; [2-Amino-6-(2,6-Difluoro-Benzoyl)-Imidazo[1,2-a]Pyridin-3-Yl]-Phenyl-Methanone; [2-Aminomethyl-5-Oxo-4-(4-Oxo-Cyclohexa-2,5-Dienylmethyl)-4,5-Dihydro-Imidazol-1-Yl]-Acetaldehyde; [2′-CARBOXYLETHYL]-10-METHYL-ANTHRACENE ENDOPEROXIDE; 5-[4-(DIMETHYLAMINO)PHENYL]-6-[(6-MORPHOLIN-4-YLPYRIDIN-3-YL)ETHYNYL]PYRIMIDIN-4-AMINE; [4-({4-[(5-CYCLOPROPYL-1H-PYRAZOL-3-YL)AMINO]QUINAZOLIN-2-YL}IMINO)CYCLOHEXA-2,5-DIEN-1-YL]ACETONITRILE; [3-(1,3,2-Dioxaborolan-2-Yloxy)Propyl]Guanidine; [3-(1-Benzyl-3-Carbamoylmethyl-2-Methyl-1h-Indol-5-Yloxy)-Propyl-]-Phosphonic Acid; [3-(4-Bromo-2-Fluoro-Benzyl)-7-Chloro-2,4-Dioxo-3,4-Dihydro-2h-Quinazolin-1-Yl]-Acetic Acid; [3-(Dodecanoylamino)Propyl](Hydroxy)Dimethylammonium; [3,5-Dibromo-4-(4-Hydroxy-3-Phenethylcarbamoyl-Phenoxy)-Phenyl]-Acetic Acid; [4-({[5-Benzyloxy-1-(3-Carbamimidoyl-Benzyl)-1h-Indole-2-Carbonyl]-Amino}-Methyl)-Phenyl]-Trimethyl-Ammonium; 5-Chloro-1h-Indole-2-Carboxylic Acid{[Cyclopentyl-(2-Hydroxy-Ethyl)-Carbamoyl]-Methyl}-Amide; [4-({4-[(5-cyclopropyl-1H-pyrazol-3-yl)amino]quinazolin-2-yl}amino)phenyl]acetonitrile; [2′-HYDROXY-3-(1H-PYRROLO[3,2-C]PYRIDIN-2-YL)-BIPHENYL-3-YLMETHYL]-UREA; [4-({5-(AMINOCARBONYL)-4-[(3-METHYLPHENYL)AMINO]PYRIMIDIN-2-YL}AMINO)PHENYL]ACETIC ACID; 5-(4′-AMINO-1′-ETHYL-5′,8′-DIFLUORO-1′H-SPIRO[PIPERIDINE-4,2′-QUINAZOLINE]-1-YLCARBONYL)PICOLINONITRILE; [4-(2-Amino-4-Methyl-Thiazol-5-Yl)-Pyrimidin-2-Yl]-(3-Nitro-Phenyl)-Amine; [4-(3-AMINOMETHYL-PHENYL)-PIPERIDIN-1-YL]-(5-PHENETHYL-PYRIDIN-3-YL)-METHANONE; [4-(4-ACETYLAMINO-PHENYL)-3,5-DIOXO-4-AZA-TRICYCLO[5.2.2.0 2,6]UNDEC-1-YLCARBAMOYLOXY]-ACETIC ACID; [4-(4-Hydroxy-3-Iodo-Phenoxy)-3,5-Diiodo-Phenyl]-Acetic Acid; 5-CHLORO-N-{(3S)-1-[(1S)-1-METHYL-2-MORPHOLIN-4-YL-2-5-CHLORO-N-{(3S)-1-[(1S)-1-METHYL-2-MORPHOLIN-4-YL-2-SULFONAMIDE; [4-(4-PHENYL-PIPERIDIN-1-YL)-BENZENESULFONYLAMINO]-ACETIC ACID; 5-chloro-N-({(5S)-2-oxo-3-[4-(3-oxomorpholin-4-yl)phenyl]-1,3-oxazolidin-5-yl}methyl)thiophene-2-carboxamide; [5-AMINO-1-(4-FLUOROPHENYL)-1H-PYRAZOL-4-Yl](3-{[(2R)-2,3-DIHYDROXYPROPYL]OXY}PHENYL)METHANONE; [4,6-O-(1-CARBOXYETHYLIDENE)-BETA-D-MANNOSE]; [4-amino-2-(tert-butylamino)-1,3-thiazol-5-yl](phenyl)methanone; [4-R-(4-ALPHA,6-BETA,7-BETA]-HEXAHYDRO-5,6-DI(HYDROXY)-1,3-DI(ALLYL)-4,7-BISPHENYLMETHYL)-2H-1,3-DIAZEPINONE; 5-FLUORO-1-[4-(4-PHENYL-3,6-DIHYDROPYRIDIN-1(2H)-YL)BUTYL]QUINAZOLINE-2,4(1H,3H)-DIONE; [4-(6-Chloro-Naphthalene-2-Sulfonyl)-Piperazin-1-Yl]-(3,4,5,6-Tetrahydro-2h-[1,4′]Bipyridinyl-4-Yl)-Methanone; [5-AMINO-1-(4-FLUOROPHENYL)-1H-PYRAZOL-4-YL][3-(PIPERIDIN-4-YLOXY)PHENYL]METHANONE; [5-HYDROXY-2-(4-HYDROXYPHENYL)-1-BENZOFURAN-7-YL]ACETONITRILE; [5-hydroxy-6-methyl-4-({[(4E)-3-oxo-1,2-oxazolidin-4-ylidene]amino}methyl)pyridin-3-yl]methyl dihydrogen phosphate; [Cyclohexylethyl]-[[[[4-[2-Methyl-1-Imidazolyl-Buty]Phenyl]Acetyl]-Seryl]-Lysinyl]-Amine; 5-(4-PHENOXYPHENYL)-5-(4-PYRIMIDIN-2-YLPIPERAZIN-1-YL)PYRIMIDINE-2,4,6(2H,3H)-TRIONE; [HYDROXY(3-PHENYLPROPYL)AMINO]METHANOL; [Formylmethyl]Trimethyl-Ammonium, N,N,N-Trimethylammonium Acetaldehyde; [N-(3-DIBENZYLCARBAMOYL-OXIRANECARBONYL)-HYDRAZINO]-ACETIC ACID; [N-(BENZYLOXYCARBONYL)AMINO](4-AMIDINOPHENYL)METHANE-PHOSPHONATE; 5-(5-(2,6-dichloro-4-(4,5-dihydro-2-oxazolyl)phenoxy)pentyl)-3-(hydroxyethyl oxymethyleneoxymethyl) isoxazole; {(2Z)-3-[(6-chloropyridin-3-yl)methyl]-1,3-thiazolidin-2-ylidene}cyanamide; {(2S)-1-[N-(tert-butoxycarbonyl)glycyl]pyrrolidin-2-yl}methyl (3-chlorophenyl)acetate; {(1s)-1-Benzyl-4-[3-Carbamoyl-1-(1-Carbamoyl-2-Phenyl-Ethylcarbamoyl)-(S)-Propylcarbamoyl]-2-Oxo-5-Phenyl-Pentyl}-Carbamic Acid Tert-Butyl Ester; {(2Z)-4-AMINO-2-[(4-METHOXYPHENYL)IMINO]-2,3-DIHYDRO-1,3-THIAZOL-5-YL}(4-METHOXYPHENYL)METHANONE; {[(2,2-Dihydroxy-Ethyl)-(2,3,4,5-Tetrahydroxy-6-Phosphonooxy-Hexyl)-Amino]-Methyl}-Phosphonic Acid; {[(2,6-difluorophenyl)carbonyl]amino}-N-(4-fluorophenyl)-1H-pyrazole-3-carboxamide; 5-[(3R)-3-(5-methoxy-3′,5′-dimethylbiphenyl-3-yl)but-1-yn-1-yl]-6-methylpyrimidine-2,4-diamine; {[4-AMINO-2-(3-CHLOROANILINO)-1,3-THIAZOL-5-YL](4-FLUOROPHENYL)METHANONE; {3-[(3-Hydroxy-2-Methyl-5-Phosphonooxymethyl-Pyridin-4-Ylmethyl)-Amino]-2-Methyl-Propyl}-Phosphonic Acid; {1-[(3-Hydroxy-Methyl-5-Phosphonooxy-Methyl-Pyridin-4-Ylmethyl)-Amino]-Ethyl}-Phosphonic Acid; {1-[2-(1-FORMYL-PROPYL)-3-METHANESULFONYLAMINO-PYRROLIDINE-1-CARBONYL]-2-METHYL-PROPYL}-CARBAMIC ACID TERT-BUTYL ESTER; ([7-(Difluoro-Phosphono-Methyl)-Naphthalen-2-Yl]-Difluoro-Methyl}-Phosphonic Acid; {3-[(4,5,7-TRIFLUORO-1,3-BENZOTHIAZOL-2-YL)METHYL]-1H-INDOL-1-YL}ACETIC ACID; {4-[(2R)-pyrrolidin-2-ylmethoxy]phenyl}(4-thiophen-3-ylphenyl)methanone; {3-[3-(3,4-Dimethoxy-Phenyl)-1-(1-{1-[2-(3,4,5-Trimethoxy-Phenyl)-Butyryl]-Piperidin-2yl)-Vinyloxy)-Propyl]-Phenoxy}-Acetic Acid; {3-[(5-CHLORO-1,3-BENZOTHIAZOL-2-YL)METHYL]-2,4-DIOXO-3,4-DIHYDROPYRIMIDIN-1(2H)-YL}ACETIC ACID; ≡4-[(2s,4e)-2-(1,3-Benzothiazol-2-Yl)-2-(1h-1,2,3-Benzotriazol-1-Yl)-5-Phenylpent-4-Enyl]Phenyl}(Difluoro)Methylphosphonic Acid; {4-[(CARBOXYMETHOXY)CARBONYL]-3,3-DIOXIDO-1-OXONAPHTHO[1,2-D]ISOTHIAZOL-2(1H)-YL}ACETIC ACID; {4-[2,2-BIS(5-METHYL-1,2,4-OXADIAZOL-3-YL)-3-PHENYLPROPYL]PHENYL}SULFAMIC ACID; {4-[2-Acetylamino-2-(3-Carbamoyl-2-Cyclohexylmethoxy-6,7,8,9-Tetrahydro-5h-Benzocyclohepten-5ylcarbamoyl)-Ethyl]-2-Phosphono-Phenyl}-Phosphonic Acid; {4-[2-BENZYL-3-METHOXY-2-(METHOXYCARBONYL)-3-OXOPROPYL]PHENYL}SULFAMIC ACID; 6-({5-fluoro-2-[(3,4,5-trimethoxyphenyl)amino]pyrimidin-4-yl}amino)-2,2-dimethyl-2H-pyrido[3,2-b][1,4]oxazin-3(4H)-one; {4-[3-(6,7-Diethoxy-Quinazolin-4-Ylamino)-Phenyl]-Thiazol-2-Yl}-Methanol; {4-[4-hydroxy-3-(1-methylethyl)benzyl]-3,5-dimethylphenoxy}acetic acid; {5-(5-AMINO-1H-PYRROLO[3,2-B]PYRIDIN-2-YL)-6-HYDROXY-3′-NITRO-BIPHENYL-3-YL]-ACETIC ACID; +/−METHYL 4-(AMINOIMINOMETHYL)-BETA-[3-INH (AMINOIMINO)PHENYL]BENZENE PENTANOATE; 6-(3-AMINOPHENYL)-N-(TERT-BUTYL)-2-(TRIFLUOROMETHYL)QUINAZOLIN-4-AMINE; 1-((1R,2S)-1-{2-[2-(4-CHLOROPHENYL)-1,3-BENZOXAZOL-7-YL]ETHYL}-2-HYDROXYPROPYL)-1H-IMIDAZOLE-4-CARBOXAMIDE; 1-((2-HYDROXYETHOXY)METHYL)-5-(3-(BENZYLOXY)BENZYL)-6-HYDROXYPYRIMIDINE-2,4(1H,3H)-DIONE; 1-((2-HYDROXYETHOXY)METHYL)-5-(3-(BENZYLOXY)BENZYL)PYRIMIDINE-2,4(1H,3H)-DIONE; 1-((2-HYDROXYETHOXY)METHYL)-5-(PHENYLTHIO)PYRIMIDINE-2,4(1H,3H)-DIONE; 6-(2,4-DIAMINO-6-ETHYLPYRIMIDIN-5-YL)-4-(3-METHOXYPROPYL)-2,2-DIMETHYL-2H-1,4-BENZOXAZIN-3(4H)-ONE; 1-({2-[2-(4-CHLOROPHENYL)ETHYL]-1,3-DIOXOLAN-2-YL}METHYL)-1H-IMIDAZOLE; 1-(1,4-dimethyl-1,2,3,4-tetrahydroquinoxalin-6-yl)methanamine; 1-(1′-{[3-(methylsulfanyl)-2-benzothiophen-1-yl]carbonyl}spiro[1-benzofuran-3,4′-piperidin]-5-yl)methanamine; 1-(1-HYDROXY-2,2,6,6-TETRAMETHYLPIPERIDIN-4-YL)PYRROLIDINE-2,5-DIONE; 1-(1-methylethyl)-3-quinolin-6-yl-1H-pyrazolo[3,4-d]pyrimidin-4-amine; 1-(2,3-dihydro-1,4-benzodioxin-6-ylsulfonyl)-4-[(4-methoxyphenyl)sulfonyl]piperazine; 1-(2,5-dideoxy-5-pyrrolidin-1-yl-beta-L-erythro-pentofuranosyl)-5-methylpyrimidine-2,4(1H,3H)-dione; 1-(2,6-Dichlorophenyl)-5-(2,4-Difluorophenyl)-7-Piperazin-1-Yl-3,4-Dihydroquinazolin-2(1h)-One; 8-(6-BROMO-BENZO[1,3]DIOXOL-5-YLSULFANYL)-9-(3-ISOPROPYLAMINO-PROPYL)-ADENINE; 1-(2-{[(6-AMINO-2-METHYLPYRIDIN-3-YL)METHYL]AMINO}ETHYL)-6-CHLORO-3-[(2,2-DIFLUORO-2-PYRIDIN-2-YLETHYL)AMINO]-1,4-DIHYDROPYRAZIN-2-OL; 1-(2-Chlorophenyl)-3,5-Dimethyl-1 h-Pyrazole-4-Carboxylic Acid Ethyl Ester; 1-(2-CYCLOPROPYLETHYL)-3-(1,1-DIOXIDO-2H-1,2,4-BENZOTHIADIAZIN-3-YL)-6-FLUORO-4-HYDROXYQUINOLIN-2(1H)-ONE; 1-(2-Deoxy-2-Fluoro-3-O-Phosphono-Beta-L-Ribofuranosyl)Pyrimidine-2,4(1h,3h)-Dione; 1-(2-DEOXY-5-O-PHOSPHONO-BETA-D-ERYTHRO-PENTOFURANOSYL)-4-METHYL-1H-INDOLE; 1-(2-DEOXY-5-O-PHOSPHONO-BETA-D-ERYTHRO-PENTOFURANOSYL)-5-NITRO-1H-INDOLE; 1-(3-bromophenyl)-7-chloro-6-methoxy-3,4-dihydroisoquinoline; 1-(2-Fluorobenzyl)-3-Butyl-8-(N-Acetyl-4-Aminobenzyl)-Xanthine; 1-(2-HYDROXYETHYLOXYMETHYL)-6-PHENYL THIOTHYMINE; 1-(2-Methoxy-Ethoxy)-2-{2-[2-(2-Methoxy-Ethoxy]-Ethoxy}-Ethane; 1-(3-(2,4-DIMETHYLTHIAZOL-5-YL)-4-OXO-2,4-DIHYDROINDENO[1,2-C]PYRAZOL-5-YL)-3-(4-METHYLPIPERAZIN-1-YL)UREA; 1-(3,5-DICHLOROPHENYL)-5-METHYL-1H-1,2,4-TRIAZOLE-3-CARBOXYLIC ACID; 1-(2-Ethanone)-2-Hydroxy-2-(1-Amino-2-Methyl-2-Ethanol)-4-(2-Dimethyl)Ethane-Imidazoline-5-One; Chromophore (Thr-Leu-Gly); 1-(3-chloro-4-methylphenyl)-3-{2-[({5-[(dimethylamino)methyl]-2-furyl}methyl)thio]ethyl}urea; 1-(3-chlorophenyl)-3-{5-[2-(thieno[3,2-d]pyrimidin-4-ylamino)ethyl]-1,3-thiazol-2-yl}urea; 1-(3-HYDROXYPROPYL)-2-[(3-NITROBENZOYL)AMINO]-1H-BENZIMIDAZOL-5-YL PIVALATE; 1-(3-Mercapto-2-Methyl-Propionyl)-Pyrrolidine-2-Carboxylic Acid; N-(2-M ETHOXYETHYL)-4-({4-[2-METHYL-1-(1-METHYLETHYL)-1H-IMIDAZOL-5-YL]PYRIMIDIN-2-YL}AMINO)BENZENESULFONAMIDE; 1-(4-Aminophenyl)-3,5-Dimethyl-1h-Pyrazole-4-Carboxylic Acid Ethyl Ester; 1-(4-CYANO-PHENYL)-3-[2-(2,6-DICHLORO-PHENYL)-1-IMINO-ETHYL]-THIOUREA; 1-(4-fluorophenyl)-N-[3-fluoro-4-(1H-pyrrolo[2,3-b]pyridin-4-yloxy)phenyl]-2-oxo-1,2-dihydropyridine-3-carboxamide; N-(2-AMINOETHYL)-N˜2˜-{(1S)-1-[4′-(AMINOSULFONYL)BIPHENYL-4-YL]-2,2,2-TRIFLUOROETHYL}-L-LEUCINAMIDE; 1-(4-Methoxyphenyl)-3,5-Dimethyl-1h-Pyrazole-4-Carboxylic Acid Ethyl Ester; 1-(4-Tert-Butylcarbamoyl-Piperazine-1-Carbonyl)-3-(3-Guanidino-Propyl)-4-Oxo-Azetidine-2-Carboxylic Acid; 1-(5-{2-[(1-methyl-1H-pyrazolo[4,3-d]pyrimidin-7-yl)amino]ethyl}-1,3-thiazol-2-yl)-3-[3-(trifluoromethyl)phenyl]urea; 1-(5-BROMO-PYRIDIN-2-YL)-3-[2-(6-FLUORO-2-HYDROXY-3-PROPIONYL-PHENYL)-CYCLOPROPYL]-UREA; 1-(5-Carboxypentyl)-5-[(2,6-Dichlorobenzyl)Oxy]-1H-Indole-2-Carboxylic Acid; N-(3-(8-CYANO-4-(PHENYLAMINO)PYRAZOLO[1,5-A][1,3,5]TRIAZIN-2-YLAMINO)PHENYL)ACETAMIDE; 1-(5-CHLORO-2-METHOXYPHENYL)-3-{6-[2-(DIMETHYLAMINO)-1-METHYLETHOXY]PYRAZIN-2-YL}UREA; 1-(5-Chloroindol-3-Yl)-3-Hydroxy-3-(2h-Tetrazol-5-Yl)-Propenone; N-(3-TERT-BUTYL-1H-PYRAZOL-5-YL)-N′-{4-CHLORO-3-[(PYRIDIN-3-YLOXY)METHYL]PHENYL}UREA; 1-(5-OXO-2,3,5,9B-TETRAHYDRO-1H-PYRROLO[2,1-A]ISOINDOL-9-YL)-3-(5-PYRROLIDIN-2-YL-1H-PYRAZOL-3-YL)-UREA; N′-(5-CHLORO-1,3-BENZODIOXOL-4-YL)-N-(3-MORPHOLIN-4-YLPHENYL)PYRIMIDINE-2,4-DIAMINE; 1-(Isopropylamino)-3-(1-Naphthyloxy)-2-Propanol; 1-(5-Tert-Butyl-2-Methyl-2h-Pyrazol-3-Yl)-3-(4-Chloro-Phenyl)-Urea; N-(5-CHLORO-BENZO[B]THIOPHEN-3-YLMETHYL)-2-[6-CHLORO-OXO-3-(2-PYRIDIN-2-YL-ETHYLAMINO)-2H-PYRAZIN-1-YL]-ACETAMIDE; 1-(6-CYANO-3-PYRIDYLCARBONYL)-5′,8′-DIFLUOROSPIRO[PIPERIDINE-4,2′(1′ H)-QUINAZOLINE]-4′-AMINE; N-(7-CARBAMIMIDOYL-NAPHTHALEN-1-YL)-3-HYDROXY-2-METHYL-BENZAMIDE; 1-(DIMETHYLAMINO)-3-(4-{{4-(2-METHYLIMIDAZO[1,2-A]PYRIDIN-3-YL)PYRIMIDIN-2-YL]AMINO}PHENOXY)PROPAN-2-OL; 1-(HYDROXYMETHYLENEAMINO)-8-HYDROXY-OCTANE; N-(TERT-BUTYL)-3,5-DIMETHYL-N′-[(5-METHYL-2,3-DIHYDRO-1,4-BENZODIOXIN-6-YL)CARBONYL]BENZOHYDRAZIDE; N-[(1S)-2-AMINO-1-(2,4-DICHLOROBENZYL)ETHYL]-5-[2-(METHYLAMINO)PYRIMIDIN-4-YL]THIOPHENE-2-CARBOXAMIDE; 1-(O-Carboxy-Phenylamino)-1-Deoxy-D-Ribulose-5-Phosphate; N-[(1S)-2-{[(1R)-2-(benzyloxy)-1-cyano-1-methylethyl]amino}-1-(cyclohexylmethyl)-2-oxoethyl]morpholine-4-carboxamide; 1(R)-1-ACETAMIDO-2-(3-CARBOXY-2-HYDROXYPHENYL)ETHYL BORONIC ACID; 1(R)-1-Acetamido-2-(3-Carboxyphenyl)Ethyl Boronic Acid; N-[(1S)-1-{1-[(1R,3E)-1-ACETYLPENT-3-EN-1-YL]-1H-1,2,3-TRIAZOL-4-YL}-1,2-DIMETHYLPROPYL]BENZAMIDE; 1,1,1-TRIFLUORO-3-((N-ACETYL)-L-LEUCYLAMIDO)-4-PHENYL-BUTAN-2-ONE(N-ACETYL-L-LEUCYL-L-PHENYLALANYL TRIFLUOROMETHYL KETONE); 1,1,1,3,3,3-HEXAFLUORO-2-{4-[(2,2,2-TRIFLUOROETHYL)AMINO]PHENYL}PROPAN-2-OL; 1,1,1-TRIFLUORO-3-(OCTYLTHIO)ACETONE; 1,1,1-TRIFLUORO-3-ACETAMIDO-4-PHENYL BUTAN-2-ONE(N-ACETYL-L-PHENYLALANYL TRIFLUOROMETHYL KETONE); N-[1-(AMINOMETHYL)CYCLOPROPYL]-3-(MORPHOLIN-4-YLSULFONYL)-N˜2˜-[(1S)-2,2,2-TRIFLUORO-1-(4-FLUOROPHENYL)ETHYL]-L-ALANINAMIDE; 1,2,3-TRIHYDROXY-1,2,3,4-TETRAHYDROBENZO[A]PYRENE; 1,2,5,6-Tetrahydro-4h-Pyrrolo(3,2,1-lj)Quinolin-4-One; 1,2-Di-1-(3,7,11,15-Tetramethyl-Hexadecane)-Sn-Glycero-3-Phosphate; N-[1-(4-CARBAMIMIDOYL-BENZYLCARBAMOYL)-3-METHYLSULFANYL-PROPYL]-3-HYDROXY-2-PROPOXYAMINO-BUTYRAMID; N-[(2R,3S)-1-((2S)-2-{[(CYCLOPENTYLAMINO)CARBONYL]AMINO}-3-METHYLBUTANOYL)-2-(1-FORMYL-1-CYCLOBUTYL)PYRROLIDINYL]CYCLOPROPANECARBOXAMIDE; 1,2-Hydro-1-Oxy-3,4-Hydro-3-(1-Methoxy-2-Oxy-3,4-Dihydroxypentyl)-8,9-Dihydroxy-7-(Sec-Butyl)-Anthracene; 1,3,3-trimethyl-2-[(1E,3E)-3-methylpenta-1,3-dien-1-yl]cyclohexene; 1,3,4,9-Tetrahydro-2-(Hydroxybenzoyl)-9-[(4-Hydroxyphenyl)Methyl]-6-Methoxy-2h-Pyrido[3,4-B]Indole; 1,3,4-TRIHYDROXY-5-(3-PHENOXYPROPYL)-CYCLOHEXANE-1-CARBOXYLIC ACID; 1,3-CYCLOHEXANEDIOL, 4-METHYLENE-5-[(2E)-[(1S,3AS,7AS)-OCTAHYDRO-1-(5-HYDROXY-5-METHYL-1,3-HEXADIYNYL)-7A-METHYL-4H-INDEN-4-YLIDENE]ETHYLIDENE]-, (1R,3S,5Z); 1,3-Di(N-Propyloxy-a-Mannopyranosyl)-Carbomyl 5-Methyazido-Benzene; 1,4-Deoxy-4-((5-Hydroxymethyl-2,3,4-Trihydroxycyclohex-5-Enyl)Amino)Fructose; N-[2-(carbamimidamidooxy)ethyl]-2-{6-cyano-3-[(2,2-difluoro-2-pyridin-2-ylethyl)amino]-2-fluorophenyl}acetamide; 1,5-Bis(N-Benzyloxycarbonyl-L-Leucinyl)Carbohydrazide; 1,6,7,8,9,11A,12,13,14,14A-DECAHYDRO-1,13-DIHYDROXY-6-METHYL-4H-CYCLOPENT[F]OXACYCLOTRIDECIN-4-ONE; N-[3-(2-fluoroethoxy)phenyl]-N′-(1,3,4-trioxo-1,2,3,4-tetrahydroisoquinolin-6-yl)butanediamide; 1-[(2,6-difluorophenyl)sulfonyl]-4-(2,3-dihydro-1,4-benzodioxin-6-ylsulfonyl)piperazine; N-{[2-({[1-(4-CARBOXYBUTANOYL)AMINO]-2-PHENYLETHYL}-HYDROXYPHOSPHINYL)OXY]ACETYL}-2-PHENYLETHYLAMINE; 1-[(2-Amino-6,9-Dihydro-1h-Purin-6-Yl)Oxy]-3-Methyl-2-Butanol; N-[4-(2,4-DIMETHYL-THIAZOL-5-YL)-PYRIMIDIN-2-YL]-N′,N′-DIMETHYL-BENZENE-1,4-DIAMINE; 1-[(2R)-2-aminobutanoyl]-N-(3-chlorobenzyl)-L-prolinamide; N-[5-(ETHYLSULFONYL)-2-METHOXYPHENYL]-5-[3-(2-PYRIDINYL)PHENYL]-1,3-OXAZOL-2-AMINE; 1-[(2S)-2-[(4-CHLOROBENZYL)OXY]-2-(2,4-DICHLOROPHENYL)ETHYL]-1H-IMIDAZOLE; 1-[(2S)-4-(5-BROMO-1H-PYRAZOLO[3,4-B]PYRIDIN-4-YL)MORPHOLIN-2-YL]METHANAMINE; N-[7-(3-AMINOPHENYL)-5-METHOXY-1,3-BENZOXAZOL-2-YL]-2,5-DICHLOROBENZENESULFONAMIDE; 1-[(3S)-5-PHENYL-3-THIOPHEN-2-YL-3H-1,4-BENZODIAZEPIN-2-YL]AZETIDIN-3-OL; 1-[[(1E)-2-(4-CHLOROPHENYL)ETHENYL]SULFONYL]-4-[[1-(4-PYRIDINYL)-4-PIPERIDINYL]METHYL]PIPERAZINE; 1-[1-(3-aminophenyl)-3-tert-butyl-1H-pyrazol-5-yl]-3-naphthalen-1-ylurea; 1-[1-(3-aminophenyl)-3-tert-butyl-1H-pyrazol-5-yl]-3-phenylurea; 1-[1′-(3-phenylacryloyl)spiro[1-benzofuran-3,4′-piperidin]-5-yl]methanamine; 1-[2-(3-ACETYL-2-HYDROXY-6-METHOXY-PHENYL)-CYCLOPROPYL]-3-(5-CYANO-PYRIDIN-2-YL)-THIOUREA; N-[2-Hydroxy-2-(8-Isopropyl-6,9-Dioxo-2-Oxa-7,10-Diaza-Bicyclo[11.2.2]Heptadeca-1(16),13(17),14-Trien-11-Yl)-Ethyl]-N-(3-Methyl-Butyl)-Benzenesulfonamide, Inhibitor 3; 1-[2-(4-ETHOXY-3-FLUOROPYRIDIN-2-YL)ETHYL]-3-(5-METHYLPYRIDIN-2-YL)THIOUREA; 1-[2-(S)-AMINO-3-BIPHENYL-4-YL-PROPIONYL]-PYRROLIDINE-2-(S)-CARBONITRILE; N-[2-methyl-5-(methylcarbamoyl)phenyl]-2-{[(1R)-1-methylpropyl]amino}-1,3-thiazole-5-carboxamide; 1-[2-DEOXYRIBOFURANOSYL]-2,4-DIFLUORO-5-METHYL-BENZENE-5′MONOPHOSPHATE; 1-[2-HYDROXY-3-(4-CYCLOHEXYL-PHENOXY)-PROPYL]-4-(2-PYRIDYL)-PIPERAZINE; 1-[3-({[(4-AMINO-5-FLUORO-2-METHYLQUINOLIN-3-YL)METHYL]THIO}METHYL)PHENYL]-2,2,2-TRIFLUOROETHANE-1,1-DIOL; 1-[3,3-Dimethyl-2-(2-Methylamino-Propionylamino)-Butyryl]-Pyrrolidine-2-Carboxylic Acid(1,2,3,4-Tetrahydro-Naphthalen-1-Yl)-Amide; 1-[4-(4-chlorobenzyl)-1-(7H-pyrrolo[2,3-d]pyrimidin-4-yl)piperidin-4-yl]methanamine; 1-[4-(4-chlorophenyl)-1-(7H-pyrrolo[2,3-d]pyrimidin-4-yl)piperidin-4-yl]methanamine; 1-[4-(AMINOMETHYL)BENZOYL]-5-FLUORO-1′ H-SPIRO[PIPERIDINE-4,2′-QUINAZOLIN]-4′-AMINE; 1-[4-(AMINOSULFONYL)PHENYL]-1,6-DIHYDROPYRAZOLO[3,4-E]INDAZOLE-3-CARBOXAMIDE; 1-[4-(Octahydro-Pyrido[1,2-a]Pyrazin-2-Yl)-Phenyl]-2-Phenyl-1,2,3,4-Tetrahydro-Isoquinolin-6-Ol; 1-[4-(PYRIDIN-4-YLOXY)PHENYL]-3-[3-(TRIFLUOROMETHYL)PHENYL]UREA; 1-[4-Carboxy-2-(3-Pentylamino)Phenyl]-5,5′-Di(Hydroxymethyl)Pyrrolidin-2-One; 1-[5-methyl-2-(trifluoromethyl)furan-3-yl]-3-[(2Z)-5-(2-{[6-(1H-1,2,4-triazol-3-ylamino)pyrimidin-4-yl]amino}ethyl)-1,3-thiazol-2(3H)-ylidene]urea; 1-[6-(2-CHLORO-4-METHYXYPHENOXY)-HEXYL]-IMIDAZOLE; 1-[Glycerolylphosphonyl]-2-[8-(2-Hexyl-Cyclopropyl)-Octanal-1-Yl]-3-[Hexadecanal-1-Yl]-Glycerol; 1-[N[(Phenylmethoxy)Carbonyl]-L-Leucyl-4-[[N/N-[(Phenylmethoxy)Carbonyl]-/NI-Leucyl]Amino]-3-Pyrrolidinone/N; 1-[N-4′-NITROBENZYL-N-4′-CARBOXYBUTYLAMINO]METHYLPHOSPHONIC ACID; 1-[Pyrrol-1-Yl-2,5-Dione-Methoxymethyl]-Pyrrole-2,5-Dione; 1-{(1R,2S)-2-HYDROXY-1-[2-(2-NAPHTHYLOXY)ETHYL]PROPYL}-1H-IMIDAZONE-4-CARBOXAMIDE; D-[3-hydroxy-2-methyl-5-phosphonooxymethyl-pyridin-4-ylmethyl]-N,O-cycloserylamide; 1-{[(1E)-(3-HYDROXY-2-METHYL-5-{[(TRIHYDROXY-LAMBDA\hat{ }5\hat{ }-PHOSPHANYL)OXY]METHYL}PYRIDIN-4-YL)METHYLIDENE]AMINO}UNDECAN-2-ONE; METHYL (2Z)-3-METHOXY-2-{2-[(E)-2-PHENYLVINYL]PHENYL}ACRYLATE; dimethyl (1R,4S)-5,6-bis(4-hydroxyphenyl)-7-oxabicyclo[2.2.1]hepta-2,5-diene-2,3-dicarboxylate; 1-{[N-(1-IMINO-GUANIDINO-METHYL)]SULFANYLMETHYL}-3-TRIFLUOROMETHYL-BENZENE; 1-{2-[(4-CHLOROPHENYL)AMINO]-2-OXOETHYL}-N-(1-ISOPROPYLPIPERIDIN-4-YL)-1H-INDOLE-2-CARBOXAMIDE; 1-{2-[2-(2-Methoxyethoxy)Ethoxy]Ethoxy}-4-(1,1,3,3-Tetramethylbutyl)Benzene; 1-{2-[3-(2-Chloro-4,5-difluoro-benzoyl)-ureido]-4-fluoro-phenyl}-piperidine-4-carboxylic acid; 1-{2-OXO-3-[(1R)-1-(1H-PYRROL-2-YL)ETHYL]-2H-INDOL-5-YL}UREA; 1-{3-[(4-pyridin-2-ylpiperazin-1-yl)sulfonyl]phenyl}-3-(1,3-thiazol-2-yl)urea; 1-{3-oxo-3-[(2S)-2-(pyrrolidin-1-ylcarbonyl)pyrrolidin-1-yl]propyl}-3-phenylquinoxalin-2(1H)-one; 1-{5-[2-(thieno[3,2-d]pyrimidin-4-ylamino)ethyl]-1,3-thiazol-2-yl}-3[3-(trifluoromethyl)phenyl]urea; 1-{7-cyclohexyl-6-[4-(4-methylpiperazin-1-yl)benzyl]-7H-pyrrolo[2,3-d]pyrimidin-2-yl}methanamine; 1044-Dimethylamino-5-Hydroxy-6-Methyl-Tetrahydro-Pyran-2-Yloxy)-8-Ethyl-1,8,11-Trihydroxy-7,8,9,10-Tetrahydro-Naphthacene-5,12-Dione; methyl (1R,2S)-2-(hydroxycarbamoyl)-1-{4-[(2-methylquinolin-4-yl)methoxy]benzyl}cyclopropanecarboxylate; 17Alpha-methyl-3beta,17beta-dihydroxy-5alpha-androstane; 11-[(MERCAPTOCARBONYL)OXY]UNDECANOIC ACID; HYDROXY(OXO)(3-{[(2Z)-4-[3-(1H-1,2,4-TRIAZOL-1-YLMETHYL)PHENYL]PYRIMIDIN-2(5H)-YLIDENE]AMINO}PHENYL)AMMONIUM; 12-(2-hydroxyethyl)-2-(1-methylethoxy)-13,14-dihydronaphtho[2,1-a]pyrrolo[3,4-c]carbazol-5(12H)-one; 17Alpha-methyl-3alpha,17beta-dihydroxy-5alpha-androstane; 10-{4-Dimethylamino-5-[4-Hydroxy-6-Methyl-5-(6-Methyl-5-Oxo-Tetrahydro-Pyran-2-Yloxy)-Tetrahydro-Pyrane-2-Yloxy]-6-Methyl-Tetrahydro-Pyran-2-Yloxy}-8-Ethyl-1,8,11-Trihydroxy-7,8,9,10-Tetrahydro-Naphthacene-5,12-Dione; METHYL N-[(2S,3R)-3-AMINO-2-HYDROXY-3-(4-ISOPROPYLPHENYL)PROPANOYL]-D-ALANYL-D-LEUCINATE; 19-(cyclopropylamino)-4,6,7,15-tetrahydro-5H-16,1-(azenometheno)-10,14-(metheno)pyrazolo[4,3-o][1,3,9]triazacyclohexadecin-8(9H)-one; 17-METHYL-17-ALPHA-DIHYDROEQUILENIN; 18-CHLORO-11,12,13,14-TETRAHYDRO-1H,10H-8,4-(AZENO)-9,15,1,3,6-BENZODIOXATRIAZACYCLOHEPTADECIN-2-ONE; 17-HYDROXY-18A-HOMO-19-NOR-17ALPHA-PREGNA-4,9,11-TRIEN-3-ONE; 1-ACETYL-2-LYSO-SN-GLYCERO-3-PHOSPHOETHANOLAMINE; 1-Acetyl-4-(4-{4-[(2-Ethoxyphenyl)Thio]-3-Nitrophenyl}Pyridin-2-Yl)Piperazine; 1-Allyl-3-Butyl-8-(N-Acetyl-4-Aminobenzyl)-Xanthine; 1-alpha, 25-dihydroxyl-20-epi-22-oxa-24, 26,27-trihomovitamin D3; N-(1-Benzyl-3-{[3-(1,3-Dioxo-1,3-Dihydro-Isoindol-2-Yl)-Propionyl]-[2-(Hexahydro-Benzo[1,3]Dioxol-5-Yl)-Ethyl]-Amino}-2-Hydroxy-Propyl)-4-Benzyloxy-3,5-Dimethoxy-Benzamide; 1-Amino-6-Cyclohex-3-Enylmethyloxypurine; METHYL 3-CHLORO-2-{3-[(2,5-DIHYDROXY-4-METHOXYPHENYL)AMINO]-3-OXOPROPYL}-4,6-DIHYDROXYBENZOATE; 1-Benzyl-3-(4-Methoxy-Benzenesulfonyl)-6-Oxo-Hexahydro-Pyrimidine-4-Carboxylic Acid Hydroxyamide; 1-BENZYL-3-(4-METHOXYPHENYLAMINO)-4-PHENYLPYRROLE-2,5-DIONE; N-({(1R)-1-carboxy-2-[(4-fluorobenzyl)sulfanyl]ethyl}carbamoyl)-L-glutamic acid; 1-Benzyl-5-Methoxy-2-Methyl-1h-Indol-3-Yl)-Acetic Acid; 1-Benzyloxycarbonylamino-2-Phenyl-Ethyl)-{2-[1-Carbamoyl-2-(1h-Indol-3-Yl)-Ethylcarbamoyl]-5-Phenyl-Pentyl}-Phosphinic Acid; N-((1R,2S)-2-(5-CHLORO-1H-INDOLE-2-CARBOXAMIDO)CYCLOHEXYL)-5-METHYL-4,5,6,7-TETRAHYDROTHIAZOLO[5,4-C]PYRIDINE-2-CARBOXAMIDE; N-({6-[(4-CYANO-2-FLUOROBENZYL)OXY]NAPHTHALEN-2-YL}SULFONYL)-D-GLUTAMIC ACID; 1-CHLORO-6-(4-HYDROXYPHENYL)-2-NAPHTHOL; 1-Deoxy-1-Methoxycarbamido-Beta-D-Glucopyranose; 1-CYCLOHEXYL-N-{[1-(4-METHYLPHENYL)-1H-INDOL-3-YL]METHYL}METHANAMINE; 1-cyclopentyl-3-(1H-pyrrolo[2,3-b]pyridin-5-yl)-1H-pyrazolo[3,4-d]pyrimidin-4-amine; 1-DECYL-3-TRIFLUORO ETHYL-SN-GLYCERO-2-PHOSPHOMETHANOL; N-[(13-CYCLOHEXYL-6,7-DIHYDROINDOLO[1,2-D][1,4]BENZOXAZEPIN-10-YL)CARBONYL]-2-METHYL-L-ALANINE; 1-Deoxy-1-Methoxycarbamido-Beta-D-Gluco-2-Heptulopyranosonamide; 1-cyclobutyl-3-(3,4-dimethoxyphenyl)-1H-pyrazolo[3,4-d]pyrimidin-4-amine; 1-Deoxy-6-O-Phosphono-1-[(Phosphonomethyl)Amino]-L-Threo-Hexitol; 1-ETHOXYCARBONYL-D-PHE-PRO-2(4-AMINOBUTYL)HYDRAZINE; 1-ethyl-N-(phenylmethyl)-4-(tetrahydro-2H-pyran-4-ylamino)-1H-pyrazolo[3,4-b]pyridine-5-carboxamide; 1-GUANIDINO-4-(N-NITRO-BENZOYLAMINO-L-LEUCYL-L-PROLYLAMINO)BUTANE; HYDROXY[3-(6-METHYLPYRIDIN-2-YL)PROPYL]FORMAMIDE; 1-Hydroxy-2-S-Glutathionyl-3-Para-Nitrophenoxy-Propane; 1-METHYL ETHYL 1-CHLORO-5-[[(5,6DIHYDRO-2-METHYL-1,4-OXATHIIN-3-YL)CARBONYL]AMINO]MENZOATE; 1-METHYL ETHYL 2-CHLORO-5-[[[(1-METHYLETHOXY)THIOOXO]METHYL]AMINO]-BENZOATE; 1-Methyl-2-Oxy-5,5-Dimethyl Pyrrolidine; 1-methyl-3-naphthalen-2-yl-1H-pyrazolo[3,4-d]pyrimidin-4-amine; N-{2-[(4′-CYANO-1,1′-BIPHENYL-4-YL)OXY]ETHYL}-N′-HYDROXY-N-METHYLUREA; 1-METHYL-3-PHENYL-1H-PYRAZOL-5-YLSULFAMIC ACID; 1-METHYL-3-TRIFLUOROMETHYL-1H-THIENO[2,3-C]PYRAZOLE-5-CARBOXYLIC ACID (2-MERCAPTO-ETHYL)-AMIDE; 1-METHYL-5-(2-PHENOXYMETHYL-PYRROLIDINE-1-SULFONYL)-1H-INDOLE-2,3-DIONE; 1-methyl-8-(phenylamino)-4,5-dihydro-1H-pyrazolo[4,3-h]quinazoline-3-carboxylic acid; 9-CYCLOPENTYL-6-[2-(3-IMIDAZOL-1-YL-PROPOXY)-PHENYLAMINO]-9H-PURINE-2-CARBONITRILE; BENZYL 6-BENZYL-5,7-DIOXO-6,7-DIHYDRO-5H-[1,3]THIAZOLO[3,2-C]PYRIMIDINE-2-CARBOXYLATE; 1-O-[O-Nitrophenyl]-Beta-D-Galactopyranose; 1-Octadecyl-2-Acetamido-2-Deoxy-Sn-Glycerol-3-Phosphoethylmethyl Sulfide; N-{2,2-DIFLUORO-2-[(2R)-PIPERIDIN-2-YL]ETHYL}-2-[2-(1H-1,2,4-TRIAZOL-1-YL)BENZYL][1,3]OXAZOLO[4,5-C]PYRIDIN-4-AMINE; N-({(2S)-1-[(3R)-3-amino-4-(3-chlorophenyl)butanoyl]pyrrolidin-2-yl}methyl)-3-(methylsulfonyl)benzamide; 1-Phenylsulfonamide-3-Trifluoromethyl-5-Parabromophenylpyrazole; 1S,3AS,8AS-TRIMETHYL-1-OXIDO-1,2,3,3A,8,8A-HEXAHYDROPYRROLO[2,3-B]INDOL-5-YL 2-ETHYLPHENYLCARBAMATE; 1-Ter-Butyl-3-P-Tolyl-1h-Pyrazolo[3,4-D]Pyrimidin-4-Ylamine; 1-TERT-BUTYL-3-(2,5-DIMETHYLBENZYL)-1H-PYRAZOLO[3,4-D]PYRIMIDIN-4-AMINE; 1-tert-butyl-3-(3-methylbenzyl)-1H-pyrazolo[3,4-d]pyrimidin-4-amine; 1-Tert-Butyl-3-(4-Chloro-Phenyl)-1h-Pyrazolo[3,4-D]Pyrimidin-4-Ylamine; N-{2-[6-(2,4-DIAMINO-6-ETHYLPYRIMIDIN-5-YL)-2,2-DIMETHYL-3-OXO-2,3-DIHYDRO-4H-1,4-BENZOXAZIN-4-YL]ETHYL}ACETAMIDE; 2-((3,5′-DIMETHYL-4′-HYDROXYPHENYL)AZO)BENZOIC ACID; 2-(2-CHLORO-4-FLUOROPHENOXY)-2-METHYL-N-[(1R,25,35,55,75)-5-(METHYLSULFONYL)-2-ADAMANTYL]PROPANAMIDE; 2-((3′-TERTBUTYL-4′-HYDROXYPHENYL)AZO)BENZOIC ACID; 2-((9H-PURIN-6-YLTHIO)METHYL)-5-CHLORO-3-(2-METHOXYPHENYL)QUINAZOLIN-4(3H)-ONE; 2-({[3-(3,4-dihydroisoquinolin-2(1H)-ylsulfonyl)phenyl]carbonyl}amino)benzoic acid; 2-({[2,3,5,6-TETRAFLUORO-3-(TRIFLUOROMETHOXY)BIPHENYL-4-YL]AMINO}CARBONYL)CYCLOPENTA-1,3-DIENE-1-CARBOXYLIC ACID; 2-({[3,5-DIFLUORO-3-(TRIFLUOROMETHOXY)BIPHENYL-4-YL]AMINO}CARBONYL)CYCLOPENT-1-ENE-1-CARBOXYLIC ACID; 2-({[4-(TRIFLUOROMETHOXY)PHENYL]SULFONYL}AMINO)ETHYL DIHYDROGEN PHOSPHATE; 2-({[4-bromo-3-(diethylsulfamoyl)phenyl]carbonyl}amino)benzoic acid; 2-({2-[(3-HYDROXYPHENYL)AMINO]PYRIMIDIN-4-YL}AMINO)BENZAMIDE; N-{3-[4-(3-Amino-Propyl)-Piperazin-1-Yl]-Propyl}-3-Nitro-5-(Galactopyranosyl)-Alpha-Benzamide; 2-({4-[(5-CHLORO-1H-INDOL-2-YL)SULFONYL]PIPERAZIN-1-YL}CARBONYL)THIENO[3,2-B]PYRIDINE 4-OXIDE; 2-({4-[4-(pyridin-4-ylmethyl)-1H-pyrazol-3-yl]phenoxy}methyl)quinoline; 2-({5-CHLORO-2-[(2-METHOXY-4-MORPHOLIN-4-YLPHENYL)AMINO]PYRIMIDIN-4-YL}AMINO)-N-METHYLBENZAMIDE; 2-({8-[(3R)-3-AMINOPIPERIDIN-1-YL]-1,3-DIMETHYL-2,6-DIOXO-1,2,3,6-TETRAHYDRO-7H-PURIN-7-YL}METHYL)BENZONITRILE; 2-(1,1-DIMETHYLETHYL)9-FLUORO-3,6-DIHYDRO-7H-BENZ[H]-IMIDAZ[4,5-F]ISOQUINOLIN-7-ONE; 2-(1,3-benzodioxol-5-yl)-5-[(3-fluoro-4-methoxybenzyl)sulfanyl]-1,3,4-oxadiazole; 2-(11-{2-[Benzenesulfonyl-(3-Methyl-Butyl)-Amino]-1-Hydroxy-Ethyl}-6,9-Dioxo-2-Oxa-7,10-Diaza-Bicyclo[11.2.2]Heptadeca-1(16),13(17),14-Trien-8-Yl)-Acetamide, Inhibitor 2; 2-(1H-imidazol-1-yl)-9-methoxy-8-(2-methoxyethoxy)benzo[c][2,7]naphthyridin-4-amine; 2-(2,4-DICHLOROPHENOXY)-5-(PYRIDIN-2-YLMETHYL)PHENOL; N˜2˜-[(BENZYLOXY)CARBONYL]-N-[(1S,2S)-2-HYDROXY-1-(4-HYDROXYBENZYL)PROPYL]-L-LEUCINAMIDE; N˜3˜cyclopropyl-N˜4˜′-(cyclopropylmethyl)-6-methylbiphenyl-3,4′-dicarboxamide; N˜2˜,N˜2˜-DIMETHYL-N-1--(6-OXO-5,6-DIHYDROPHENANTHRIDIN-2-YL)GLYCINAMIDE; 2-(2-{2-[2-(2-{2-[2-(2-Ethoxy-Ethoxy)-Ethoxy]-Ethoxy}-Ethoxy)-Ethoxy]-Ethoxy}-Ethoxy)-Ethanol, Polyethyleneglycol Peg400; 2-(2-{2-[2-(2-Methoxy-Ethoxy)-Ethoxy]-Ethoxy}-Ethoxy)-Ethanol; 2-((3-METHYL-4′-HYDROXYPHENYL)AZO)BENZOIC ACID; 2-(2-chloropyridin-4-yl)-4-methyl-1H-isoindole-1,3(2H)-dione; 2-(2f-Benzothiazolyl)-5-Styryl-3-(4f-Phthalhydrazidyl)Tetrazolium Chloride; 2-(2-Hydroxy-1,1-Dihydroxymethyl-Ethylamino)-Ethanesulfonic Acid; 2-(2-Hydroxy-5-Methoxy-Phenyl)-1h-Benzoimidazole-5-Carboxamidine; 2-(2-HYDROXY-BIPHENYL)-1H-BENZOIMIDAZOLE-5-CARBOXAMIDINE; 2-(2-HYDROXYETHYLAMINO)-6-(3-CHLOROANILINO)-9-ISOPROPYLPURINE; 2-(2-Hydroxy-Phenyl)-1h-Benzoimidazole-5-Carboxamidine; 2-(2-Hydroxy-Phenyl)-1h-Indole-5-Carboxamidine; 2-(2-Hydroxy-Phenyl)-3h-Benzoimidazole-5-Carboxamidine; 2-(2-METHYLPHENYL)-1H-INDOLE-5-CARBOXIMIDAMIDE; 2-(2-METHYLPHENYL)-1H-INDOLE-6-CARBOXIMIDAMIDE; 2-(2-Oxo-1,2-Dihydro-Pyridin-3-Yl)-1h-Benzoimidazole-5-Carboxamidine; N-3-OXO-DODECANOYL-L-HOMOSERINE LACTONE; 2-(2-QUINOLIN-3-YLPYRIDIN-4-YL)-1,5,6,7-TETRAHYDRO-4H-PYRROLO[3,2-C]PYRIDIN-4-ONE; 2-(3-((4,5,7-trifluorobenzo[d]thiazol-2-yl)methyl)-1H-pyrrolo[2,3-b]pyridin-1-yl)acetic acid; 2-(3,4-DIHYDROXYPHENYL)-8-(1,1-DIOXIDOISOTHIAZOLIDIN-2-YL)-3-HYDROXY-6-METHYL-4H-CHROMEN-4-ONE; 2-(3,4-Dihydro-3-Oxo-2h-Benzo[B][1,4]Thiazin-2-Yl)-N-Hydroxyacetamide; 2-(3-AMINO-2,5,6-TRIMETHOXYPHENYL)ETHYL 5-CHLORO-2,4-DIHYDROXYBENZOATE; 2-(3-BENZOYLPHENOXY)ETHYL(HYDROXY)FORMAMIDE; 2-(3-BROMOPHENYL)-6-[(2-HYDROXYETHYL)AMINO]-1H-BENZO[DE]ISOQUINOLINE-1,3(2H)-DIONE; 2-(3-CARBOXYPROPIONYL)-6-HYDROXY-CYCLOHEXA-2,4-DIENE CARBOXYLIC ACID; 2-(3-CHLORO-6-{[2,2-DIFLUORO-2-(1-OXIDOPYRIDIN-2-YL)ETHYL]AMINO}-1-OXIDOPYRIDIN-2-YL)-N-[1-(3-CHLOROPHENYL)ETHYL]ACETAMIDE; 2-(3-FLUORO-4-HYDROXYPHENYL)-7-VINYL-1,3-BENZOXAZOL-5-OL; 2-(3-GUANIDINOPHENYL)-3-MERCAPTOPROPANOIC ACID; N-ALLYL-5-AMIDINOAMINOOXY-PROPYLOXY-3-CHLORO-N-CYCLOPENTYLBENZAMIDE; 2-(3-METHYLPHENYL)-1H-INDOLE-5-CARBOXIMIDAMIDE; 2-(3-OXO-PROPYLSULFANYLCARBONYL)-ETHANETHIOLATE; 2-(4-(2-((3-(5-(PYRIDIN-2-YLTHIO)THIAZOL-2-YL)UREIDO)METHYL)-1H-IMIDAZOL-4-YL)PHENOXY)ACETIC ACID; 2-(4-(2-HYDROXY-3-(ISOPROPYLAMINO)PROPOXY)PHENYL)ETHANAMIDE; 2-(4-(AMINOMETHYL)PIPERIDIN-1-YL)-N-(3_CYCLOHEXYL-4-OXO-2,4-DIHYDROINDENO[1,2-C]PYRAZOL-5-YL)ACETAMIDE; 2-(4-{(3S,5S)-5-[(3,3-difluoropyrrolidin-1-yl)carbonyl]pyrrolidin-3-yl}piperazin-1-yl)pyrimidine; 2-(4-CARCOXY-5-ISOPROPYLTHIAZOLYL)BENZOPIPERIDINE; N-BENZYLOXYCARBONYL-ALA-PRO-3-AMINO-4-PHENYL-BUTAN-2-OL; 2-(4-Chlorophenyl)-5-Quinoxalinecarboxamide; 2-(4-CHLORO-PHENYLAMINO)-NICOTINIC ACID; 2′-(4-Dimethylaminophenyl)-5-(4-Methyl-1-Piperazinyl)-2,5′-Bi-Benzimidazole; 2-(4-DIMETHYLAMINOPHENYL)DIAZENYLBENZOIC ACID; 2-(4-ETHYLPIPERAZIN-1-YL)-4-(PHENYLAMINO)PYRAZOLO[1,5-A][1,3,5]TRIAZINE-8-CARBONITRILE; 2-(4-fluorophenyl)-N-{[3-fluoro-4-(1H-pyrrolo[2,3-b]pyridin-4-yloxy)phenyl]carbamoyl}acetamide; N-METHYL O-NITROPHENYL AMINOETHYLDIPHOSPHATE BERYLLIUM TRIFLUORIDE; 2-(4-HYDROXY-5-PHENYL-1H-PYRAZOL-3-YL)-1H-BENZOIMIDAZOLE-5-CARBOXAMIDINE; 2-(4-hydroxybiphenyl-3-yl)-4-methyl-1H-isoindole-1,3(2H)-dione; Phosphoric Acid Mono-[2-Amino-3-(3h-Imidazol-4-Yl)-Propyl]Ester; 2-(4-Morpholinyl)-8-Phenyl-4h-1-Benzopyran-4-One; Phosphoric Acid Mono-[3-Amino-5-(5-Methyl-2,4-Dioxo-3,4-Dihydro-2h-Pyrimidin-1-Yl)-Tetrahydro-Furan-2-Ylmethyl] Ester; 2-(6-{[(3-chloro-2-methylphenyl)sulfonyl]amino}pyridin-2-yl)-N,N-diethylacetamide; 2-(5-HYDROXY-NAPHTHALEN-1-YL)-1,3-BENZOOXAZOL-6-OL; 2-(5-CHLORO-2-THIENYL)-N-{(3S)-1-[(1S)-1-METHYL-2-MORPHOLIN-4-YL-2-OXOETHYL]-2-OXOPYRROLIDIN-3-YL}ETHENESULFONAMIDE; 2-(6-CHLORO-3-{[2,2-DIFLUORO-2-(1-OXIDO-2-PYRIDINYL)ETHYL]AMINO}-2-OXO-1(2H)-PYRAZINYL)-N-[(2-FLUOROPHENYL)METHYL]ACETAMIDE; 2-(6-CHLORO-3-{[2,2-DIFLUORO-2-(2-PYRIDINYL)ETHYL]AMINO}-2-OXO-1(2H)-PYRAZINYL)-N-[(2-FLUORO-3-METHYL-6-PYRIDINYL)METHYL]ACETAMIDE; 2-(6-CHLORO-3-{[2,2-DIFLUORO-2-(2-PYRIDINYL)ETHYL]AMINO}-2-OXO-1(2H)-PYRAZINYL)-N-[(2-FLUORO-6-PYRIDINYL)METHYL]ACETAMIDE; Phosphoric Acid Mono-[3-Fluoro-5-(5-Methyl-2,4-Dioxo-3,4-Dihydro-2h-Pyrimidin-1-Yl)-Tetrahyro-Furan-2-Ylmethyl] Ester; 2′,3-Dehydro-2′,3′-Deoxy-Thymidine 5-Triphosphate; 2-(Acetylamino)-2-Deoxy-4-O-Beta-D-Galactopyranosyl-Alpha-D-Glucopyranose; 2-(Acetylamino)-2-Deoxy-4-O-Sulfo-Alpha-D-Galactopyranose; 2-(Acetylamino)-2-Deoxy-6-O-Methyl-Alpha-D-Allopyranose; 2-(ACETYL-HYDROXY-AMINO)-4-METHYL-PENTANOIC ACID METHYL ESTER; 2-(Beta-D-Glucopyranosyl)-5-Methyl-1,2,3-Benzimidazole; 2-(Beta-D-Glucopyranosyl)-5-Methyl-1,3,4-Benzothiazole; TRANS-4-(GUANIDINOMETHYL)-CYCLOHEXANE-L-YL-D-3-CYCLOHEXYLALANYL-L-AZETIDINE-2-YL-D-TYROSINYL-L-HOMOARGININAMIDE; S-(2-{[N-(2-HYDROXY-4-{[HYDROXY(OXIDO)PHOSPHINO]OXY}-3,3-DIMETHYLBUTANOYL)-BETA-ALANYL]AMINO}ETHYL) HEPTANETHIOATE; SUCCINIC ACID MONO-(13-METHYL-3-OXO-2,3,6,7,8,9,10,11,12,13,14,15,16,17-TETRADECAHYDRO-1H-CYCLOPENTA[A]PHENANTHREN-17-YL) ESTER; 2-(Carboxymethoxy)-5-[(2s)-2-({(2s)-2-[(3-Carboxypropanoyl)Amino]-3-Phenylpropanoyl}Amino)-3-Oxo-3-(Pentylamino)Propyl]Benzoic Acid; 2-(CARBOXYMETHYL)-1-OXO-1,2-DIHYDRONAPHTHO[1,2-D]ISOTHIAZOLE-4-CARBOXYLIC ACID 3,3-DIOXIDE; 2-(cycloheptylmethyl)-1,1-dioxido-1-benzothiophen-6-yl sulfamate; 2-(CYCLOHEXYLMETHYLAMINO)-4-(PHENYLAMINO)PYRAZOLO[1,5-A][1,3,5]TRIAZINE-8-CARBONITRILE; 2-(ETHOXYMETHYL)-4-(4-FLUOROPHENYL)-3-[2-(2-HYDROXYPHENOXY)PYRIMIDIN-4-YL]ISOXAZOL-5(2H)-ONE; Pinacol[[2-Amino-Alpha-(1-Carboxy-1-Methylethoxyimino)-4-Thiazoleacetyl]Amino]Methaneboronate; N-ethyl-4-{[5-(methoxycarbamoyl)-2-methylphenyl]amino}-5-methylpyrrolo[2,1-f][1,2,4]triazine-6-carboxamide; 2-(methylsulfanyl)-5-(thiophen-2-ylmethyl)-1H-imidazol-4-ol; 2-(Oxalyl-Amino)-4,5,6,7-Tetrahydro-Thieno[2,3-C]Pyridine-3-Carboxylic Acid; 2-(Oxalyl-Amino)-4,7-Dihydro-5h-Thieno[2,3-C]Pyran-3-Carboxylic Acid; 2-(Oxalyl-Amino)-4,7-Dihydro-5h-Thieno[2,3-C]Thiopyran-3-Carboxylic Acid; 2-(TOLUENE-4-SULFONYL)-2H-BENZO[D][1,2,3]DIAZABORININ-1-OL; 2,2,2-TRIFLUORO-1-{5-[(3-PHENYL-5,6-DIHYDROIMIDAZO[1,2-A]PYRAZIN-7(8H)-YL)CARBONYL]THIOPHEN-2-YL}ETHANE-1,1-DIOL; 2,2,5,5-TETRAMETHYL-3-(SULFANYLMETHYL)-2,5-DIHYDRO-1H-PYRROL-1-OL; TERT-BUTYL {2-[(1,3-THIAZOL-2-YLAMINO)CARBONYL]PYRIDIN-3-YL}CARBAMATE; 2,2-Dichloro-1-Methanesulfinyl-3-Methyl-Cyclopropanecarboxylic Acid [1-(4-Bromo-Phenyl)-Ethyl]-Amide; 2,2-Dimethylthiazolidine-4-Carboxylic Acid; (Dmt)Thiazolidine; 2,3,17BETA-TRIHYDROXY-1,3,5(10)-ESTRATRIENE; 2,4-DIAMINO-1,5-DIPHENYL-3-HYDROXYPENTANE; 2,3-Bis-Benzo[1,3]Dioxol-5-Ylmethyl-Succinic Acid; TERT-BUTYL 2-CYANO-2-METHYLHYDRAZINECARBOXYLATE; 2-(Beta-D-Glucopyranosyl)-5-Methyl-1,3,4-Oxadiazole; 2,3-Dicarboxy-4-(2-Chloro-Phenyl)-1-Ethyl-5-Isopropoxycarbonyl-6-Methyl-Pyridinium; 2,3-DIMETHOXY-12H-[1,3]DIOXOLO[5,6]INDENO[1,2-C]ISOQUINOLIN-6-IUM; 2,3-Di-O-Phytanly-3-Sn-Glycero-1-Phosphoryl-3′-Sn-Glycerol-1′-Phosphate; 2,3-DIPHENYL-N-(2-PIPERAZIN-1-YLETHYL)FURO[2,3-13]PYRIDIN-4-AMINE; 2,4-Deoxy-4-Guanidine-5-N-Acetyl-Neuraminic Acid; 2,3,6A,7,8,9-HEXAHYDRO-11H-[1,4]DIOXINO[2,3-G]PYRROLO[2,1-B][1,4]BENZOXAZIN-11-ONE; 2,4-Diamine-5-(3,4,5-Trimethoxy-Benzyl)-Pyrimidin-1-lum; 2,4-Diamino-5-Methyl-6-[(3,4,5-Trimethoxy-N-Methylanilino)Methyl]Pyrido[2,3-D]Pyrimidine; 2,4-Diamino-6-[N-(2′,5′-Dimethoxybenzyl)-N-Methylamino]Quinazoline; 2,4-Diamino-6-[N-(3′,4′,5′-Trimethoxybenzyl)-N-Methylamino]Pyrido[2,3-D]Pyrimidine; 2,4-Diamino-6-[N-(3′,5′-Dimethoxybenzyl)-N-Methylamino]Pyrido[2,3-D]Pyrimidine; S-[2-({N-[(2S)-2-hydroxy-3,3-dimethyl-4-(phosphonooxy)butanoyl]-beta-alanyl}amino)ethyl] hexanethioate; 2′,4′-DICHLORO-4-HYDROXY-1,1′-BIPHENYL-3-CARBOXYLIC ACID; 2,4-Difluorobenzyl Alcohol 2,4-Difluoro-1-(Hydroxymethyl)Benzene; 2,4-Dihydroxy-7-(Methyloxy)-2h-1,4-Benzoxazin-3(4h)-One; 2,4-Dinitro,5-[Bis(2-Bromoethyl)Amino]-N-(2′,3′-Dioxopropyl)Benzamide; N′-[(1E)-(3,5-DIBROMO-2,4-DIHYDROXYPHENYL)METHYLENE]NICOTINOHYDRAZIDE; 2-[(3-Hydroxy-2-Methyl-5-Phosphonooxymethyl-Pyridin-4-Ylmethyl)-Imino]-5-Phosphono-Pent-3-Enoic Acid; 4-(6-CHLORO-2,4-DIOXO-1,2,3,4-TETRAHYDROPYRIMIDIN-5-YL) BUTYL PHOSPHATE; 2,5-bis-o-{3-[amino(imino)methyl]phenyl}-1,4:3,6-dianhydro-d-glucitol; 2,5-DI-(TERT-BUTYL)-1,4,BENZOHYDROQUINONE; 2,5-Diaziridin-1-Yl-3-(Hydroxymethyl)-6-Methylcyclohexa-2,5-Diene-1,4-Dione; 2,5-dichloro-N-(3,5-dibromo-4-hydroxyphenyl)benzamide; 2,5-DICHLORO-N-(5-CHLORO-1,3-BENZOXAZOL-2-YL)BENZENESULFONAMIDE; 2,5-DICHLORO-N-[5-METHOXY-7-(6-METHOXYPYRIDIN-3-YL)-1,3-BENZOXAZOL-2-YL]BENZENESULFONAMIDE; 2′,5′-DIDEOXY-ADENOSINE 3′-MONOPHOSPHATE; 2,5-Dimethoxy-4-(n)-propylthiophenethylamine; 2,5-DIPHENYLFURAN-3,4-DICARBOXYLIC ACID; 2,5-O,O-BIS-(4′,4″-AMIDINOPHENYL)-1,4:3,6-DIANHYDRO-D-SORBITOL; 2,6,8-Trimethyl-3-Amino-9-Benzyl-9-Methoxynonanoic Acid; N-[(6-BUTOXYNAPHTHALEN-2-YL)SULFONYL]-L-GLUTAMIC ACID; 2,6-Anhydro-3-Deoxy-D-Erythro-Hex-2-Enonic Acid; 2,6-Diamino-(S)-9-[2-(Phosphonomethoxy)Propyl]Purine; 2,6-diamine-1,7-dihydro-8H-imidazo[4,5-g]quinazolin-8-one; 2,6-Diamino-8-(2-Dimethylaminoethylsulfanylmethyl)-3h-Quinazolin-4-One; 2,6-Diamino-8-(1h-Imidazol-2-Ylsulfanylmethyl)-3h-Quinazoline-4-One; 2,6-Diamino-8-Propylsulfanylmethyl-3h-Quinazoline-4-One; 2,6-dibromo-4-[(E)-2-phenylethenyl]phenol; 2′,6′-DIFLUOROBIPHENYL-4-CARBOXYLIC ACID; 4-{4-[(5-hydroxy-2-methylphenyl)amino]quinolin-7-yl}-1,3-thiazole-2-carbaldehyde; 4-AMINO-5-(2-METHYLPHENYL)-2,4-DIHYDRO-3H-1,2,4-TRIAZOLE-3-THIONE; 2,6-DIMETHYL-1-(3-[3-METHYL-5-ISOXAZOLYL]-PROPANYL)-4-[2N-METHYL-2H-TETRAZOL-5-YL]-PHENOL; 2,6-DIMETHYL-1-(3-[3-METHYL-5-ISOXAZOLYL]-PROPANYL)-4-[4-METHYL-2H-TETRAZOL-2-YL]-PHENOL; 2,6-dimethyl-4-[(E)-2-phenylethenyl]phenol; 2-[(1R)-2-carboxy-1-(naphthalen-1-ylmethyl)ethyl]-1,3-dioxo-2,3-dihydro-1H-isoindole-5-carboxylic acid; 2-[({4-[2-(trifluoromethyl)phenyl]piperidin-1-yl}carbonyl)amino]benzoic acid; 2-[(1R)-1-CARBOXY-2-(4-HYDROXYPHENYL)ETHYL]-1,3-DIOXOISOINDOLINE-5-CARBOXYLIC ACID; 2-[(1R)-1-carboxy-2-naphthalen-1-ylethyl]-1,3-dioxo-2,3-dihydro-1H-isoindole-5-carboxylic acid; 2-[({2-[(1Z)-3-(DIMETHYLAMINO)PROP-1-ENYL]-4-FLUOROPHENYL}SULFONYL)AMINO]-5,6,7,8-TETRAHYDRONAPHTHALENE-1-CARBOXYLIC ACID; 4-[3-Carboxymethyl-3-(4-Phosphonooxy-Benzyl)-Ureido]-4-[(3-Cyclohexyl-Propyl)-Methyl-Carbamoyl]Butyric Acid; 2-[(2′,3,4′-TRIFLUOROBIPHENYL-2-YL)OXY]ETHANOL; 2-[(2,4-DICHLORO-5-METHYLPHENYL)SULFONYL]-1,3-DINITRO-5-(TRIFLUOROMETHYL)BENZENE; 2-[(2,4-DICHLOROBENZOYL)AMINO]-5-(PYRIMIDIN-2-YLOXY)BENZOIC ACID; 4-(2-(1H-IMIDAZOL-4-YL)ETHYLAMINO)-2-(PHENYLAMINO)PYRAZOLO[1,5-A][1,3,5]TRIAZINE-8-CARBONITRILE; 2-[(2e,6e,10e,14e,18e,22e,26e)-3,7,11,15,19,23,27,31-Octamethyldotriaconta-2,6,10,14,18,22,26,30-Octaenyl]Phenol; 2-[(2-methoxy-5-methylphenoxy)methyl]pyridine; 2-[(2-methoxyethyl)amino]-4-(4-oxo-1,2,3,4-tetrahydro-9H-carbazol-9-yl)benzamide; 4-{2,6,8-Trioxo-9-[(2r,3s,4r)-2,3,4,5-Tetrahydroxypentyl]-1,2,3,6,8,9-Hexahydro-7h-Purin-7-Yl}Butyl Dihydrogen Phosphate; 2-[(2-Oxo-2-Piperidin-1-Ylethyl)Thio]-6-(Trifluoromethyl)Pyrimidin-4(1h)-One; 2-[(3,5-Dichloro-4-trioxidanylphenyl)amino]benzoic acid; 2,4-DINITROPHENYL 2-DEOXY-2-FLUORO-BETA-D-MANNOPYRANOSIDE; 2-[(4-ETHYNYL-2-FLUOROPHENYL)AMINO]-3,4-DIFLUORO-N-(2-HYDROXYETHOXY)BENZAMIDE; 4-({4-[(4-AMINOBUT-2-YNYL)OXY]PHENYL}SULFONYL)-N-HYDROXY-2,2-DIMETHYLTHIOMORPHOLINE-3-CARBOXAMIDE; 2-[(5,6-DIPHENYLFURO[2,3-D]PYRIMIDIN-4-YL)AMINO]ETHANOL; 2-[(5-hex-1-yn-1-ylfuran-2-yl)carbonyl]-N-methylhydrazinecarbothioamide; 2-[(7-HYDROXY-NAPHTHALEN-1-YL)-OXALYL-AMINO]-BENZOIC ACID; 2-[(CYCLOPROPYLCARBONYL)AMINO]-4,5,6,7-TETRAHYDRO-1-BENZOTHIOPHENE-3-CARBOXAMIDE; 4-(2-aminoethoxy)-N-(3-chloro-5-piperidin-1-ylphenyl)-3,5-dimethylbenzamide; 2-[(PHENYLSULFONYL)AMINO]-5,6,7,8-TETRAHYDRONAPHTHALENE-1-CARBOXYLIC ACID; 2-[1-(4-CHLOROBENZOYL)-5-METHOXY-2-METHYL-1H-INDOL-3-YL]-N-[(1R)-1-(HYDROXYMETHYL)PROPYL]ACETAMIDE; 5,6,7,8,9,10-HEXAHYDRO-4-HYDROXY-3-(1-PHENYLPROPYL)CYCLOOCTA[B]PYRAN-2-ONE; 2-[1-(4-CHLORO-PHENYL)-ETHYL]-4,6-DINITRO-PHENOL; 2-[1-METHYLHEXYL]-4,6-DINITROPHENOL; 2-[2-(1,3-Dioxo-1,3-Dihydro-2h-Isoindol-2-Yl)Ethyl]-4-(4′-Ethoxy-1,1′-Biphenyl-4-Yl)-4-Oxobutanoic Acid; 2-[3-({ethyl[1-(2-Naphthoyl)Piperidin-4-Yl]Amino}Carbonyl)-2-Naphthyl]-1-(1-Naphthyl)-2-Oxoethylphosphonic Acid; 2-[2-(2-Cyclohexyl-2-Guanidino-Acetylamino)-Acetylamino]-N-(3-Mercapto-Propyl)-Propionamide; 2-[2-(2-FLUOROPHENYL)PYRIDIN-4-YL]-1,5,6,7-TETRAHYDRO-4H-PYRROLO[3,2-C]PYRIDIN-4-ONE; 5,6-DIPHENYL-N-(2-PIPERAZIN-1-YLETHYL)FURO[2,3-D]PYRIMIDIN-4-AMINE; 5-AMINO-6-CYCLOHEXYL-4-HYDROXY-2-ISOPROPYL-HEXANOIC ACID; 2-[2-ETHANESULFONYLAMINO-3-(1H-INDOL-3-YL)-PROPIONYLAMINO]-PENTANEDIOIC ACID 5-AMIDE 1-(4-CARBAMIMIDOYL-BENZYLAMIDE); 2-[2-ETHANESULFONYLAMINO-3-(5-PROPOXY-1H-INDOL-3-YL)-PROPIONYLAMINO]-PENTANEDIOIC ACID 5-AMIDE 1-(4-CARBAMIMIDOYL-BENZYLAMIDE); 2-[2-(1H-tetrazol-5-yl)ethyl]-1H-isoindole-1,3(2H)dione; 2-[3-(2-Hydroxy-1,1-Dihydroxymethyl-Ethylamino)-Propylamino]-2-Hydroxymethyl-Propane-1,3-Diol; 2-[3-(5-MERCAPTO-[1,3,4]THIADIAZOL-2YL)-UREIDO]-N-METHYL-3-PENTAFLUOROPHENYL-PROPIONAMIDE; 2-[3-(5-MERCAPTO-[1,3,4]THIADIAZOL-2-YL)-UREIDO]-N-METHYL-3-PHENYL-PROPIONAMIDE; 2-[3,4-Dihydroxy-2-Hydroxymethyl-5-(2-Hydroxy-Nonyl)-Tetrahydro-Furan-2-Yloxy]-6-Hydroxymethyl-Tetra Hydro-Pyran-3,4,5-Triol; 2-[4-({[(3,5-DICHLOROPHENYL)AMINO]CARBONYL}AMINO)PHENOXY]-2-METHYLPROPANOIC ACID; 2-[4(2,4-Dichlorophenoxy)Phenoxy]Propanoic Acid; 2-[4-(2H-1,4-BENZOTHIAZINE-3-YL)-PIPERAZINE-1-LY]-1,3-THIAZOLE-4-CARBOXYLIC ACID ETHYLESTER; 2-[4-(3-METHYL-1H-PYRAZOL-4-YL)PHENYL]ETHANAMINE; 2-[4-(4-Chlorophenyl)Cyclohexylidene]-3,4-Dihydroxy-1(2h)-Naphthalenone; 2-[4-(4-Hydroxy-3-Isopropyl-Phenoxy)-3,5-Dimethyl-Phenyl]-2h-[1,2,4]Triazine-3,5-Dione; 2-[4-(DIMETHYLAMINO)PHENYL]-6-HYDROXY-3-METHYL-1,3-BENZOTHIAZOL-3-IUM; 2-[4-(Hydroxy-Methoxy-Methyl)-Benzyl]-7-(4-Hydroxymethyl-Benzyl)-1,1-Dioxo-3,6-Bis-Phenoxymethyl-1lambda6-[1,2,7]Thiadiazepane-4,5-Diol; 6-CYCLOHEXYLMETHYLOXY-2-(4′-HYDROXYANILINO)PURINE; 2[4-BROMO-2-FLUOROPHENYL)METHYL]-6-FLUOROSPIRO[ISOQUINOLINE-4-(1H),3-PYRROLIDINE]-1,2′,3,5′(2H)-TETRONE; 2-[4-chloro-2-(phenylcarbonyl)phenoxy]-N-phenylacetamide; 2-[5,6-BIS-(4-METHOXY-PHENYL)-FURO[2,3-D]PYRIMIDIN-4-YLAMINO]-ETHANOL; 2-[5-Hydroxy-3-Methyl-1-(2-Methyl-4-Sulfo-Phenyl)-1h-Pyrazol-4-Ylazo]-4-Sulfo-Benzoic Acid; 2-[5-Methanesulfonylamino-2-(4-Aminophenyl)-6-Oxo-1,6-Dihydro-1-Pyrimidinyl]-N-(3,3,3-Trifluoro-1-Isopropyl-2-Oxopropyl)Acetamide; 6-(CYCLOHEXYLMETHOXY)-8-ISOPROPYL-9H-PURIN-2-AMINE; 2-[METHYL-(5-GERANYL-4-METHYL-PENT-3-ENYL)-AMINO]-ETHYL-DIPHOSPHATE; 6-amino-2-[(1-naphthylmethyl)amino]-3,7-dihydro-8H-imidazo[4,5-g]quinazolin-8-one; 2-[Trans-(4-Aminocyclohexyl)Amino]-6-(Benzyl-Amino)-9-Cyclopentylpurine; 2-{(9as)-9a-[(1s)-1-Hydroxyethyl]-2,7-Dimethyl-9a,10-Dihydro-5h-Pyrimido[4,5-D][1,3]Thiazolo[3,2-a]Pyrimidin-8-Yl}Ethyl Trihydrogen Diphosphate; 2-{[(1R,2S)-2-aminocyclohexyl]amino}-4-[(3-methylphenyl)amino]pyrimidine-5-carboxamide; 2-{[(4-CHLOROPHENOXY)ACETYL]AMINO}BENZOIC ACID; 6-(DIFLUORO-PHOSPHONO-METHYL)-NAPHTHALENE-2-CARBOXYLIC ACID; 2-{[4-(1-methyl-4-pyridin-4-yl-1H-pyrazol-3-yl)phenoxy]methyl}quinoline; 2-{[4-(4-pyridin-4-yl-1H-pyrazol-3-yl)phenoxy]methyl}quinoline; 2-{[4-(TRIFLUOROMETHOXY)BENZOYL]AMINO}ETHYL DIHYDROGEN PHOSPHATE; 2-{[Formyl(Hydroxy)Amino]Methyl}-4-Methylpentanoic Acid; 4′-[(1R)-1-amino-2-(2,5-difluorophenyl)ethyl]biphenyl-3-carboxamide; 2-{1-[2-(2-Amino-Thiazol-4-Yl)-2-Methoxyimino-Acetylamino]-2-Oxo-Ethyl}-5,5-Dimethyl-Thiazolidine-4-Carboxylic Acid; 2-{1-[2-Amino-2-(4-Hydroxy-Phenyl)-Acetylamino]-2-Oxo-Ethyl}-5,5-Dimethyl-Thiazolidine-4-Carboxylic Acid; 4-[(3R)-3-{[2-(4-FLUOROPHENYL)-2-OXOETHYL]AMINO}BUTYL]BENZAMIDE; 2-{2-[2-2-(Methoxy-Ethoxy)-Ethoxy]-Ethoxy}-Ethanol; 2-{3-[(2S)-4,4-difluoro-2-(pyrrolidin-1-ylcarbonyl)pyrrolidin-1-yl]-3-oxopropyl}-isoindole-1,3(2H)-dione; 2-{3-[4-(4-Fluorophenyl)-3,6-Dihydro-1(2h)-Pyridinyl]Propyl}-8-Methyl-4(3h)-Quinazolinone; 2-{4-[(2s)-2-[({[(1s)-1-Carboxy-2-Phenylethyl]Amino}Carbonyl)Amino]-3-Oxo-3-(Pentylamino)Propyl]Phenoxy}Malonic Acid; 4-({4-[(4-methoxypyridin-2-yl)amino]piperidin-1-yl}carbonyl)benzonitrile; 2-{4-[(4-imidazo[1,2-a]pyridin-3-ylpyrimidin-2-yl)amino]piperidin-1-yl}-N-methylacetamide; 2-{4-[2-(2-AMINO-4-OXO-4,7-DIHYDRO-3H-PYRROLO[2,3-D]PYRIMIDIN-5-YL)-ETHYL]-BENZOYLAMINO}-3-METHYL-BUTYRIC ACID; 3-O—N-Octanoyl-a-D-Glucopyranosyl-B-D-Fructofuranoside; 2-{4-[4-(4-Chloro-Phenoxy)-Benzenesulfonyl]-Tetrahydro-Pyran-4-Yl}-N-Hydroxy-Acetamide; 3-Phosphate-Adenosine-5′-Phosphate Sulfate; 2-{5-[3-(6-BENZOYL-1-PROPYLNAPHTHALEN-2-YLOXY)PROPOXYL]INDOL-1-YL}ETHANOIC ACID; 2-{5-[3-(7-PROPYL-3-TRIFLUOROMETHYLBENZO[D]ISOXAZOL-6-YLOXY)PROPOXY]INDOL-1-YL}ETHANOIC ACID; 4-(1,3,2-Dioxaborolan-2-Yloxy)Butan-1-Aminium; 3-PYRIDIN-4-YL-2,4-DIHYDRO-INDENO[1,2-.C.] PYRAZOLE; 2-ACETAMIDO-2-DEOXY-BETA-D-GLUCOPYRANOSE(BETA1-4)-2-ACETAMIDO-1,6-ANHYDRO-3-O-[(R)-1-CARBOXYETHYL]-2-DEOXY-BETA-D-GLUCOPYRANOSE-L-ALANYL-GAMMA-D-GLUTAMYL-MESO-DIAMINOPIMELYL-D-ALANINE; 2-Acetamido-2-Deoxy-D-Glucono-1,5-Lactone; 2-Acetyl-3-[(4-Amino-2-Methyl-5-Pyrimidinyl)Methyl]-4-Methyl-5-(4,6,6-Trihydroxy-3,5-Dioxa-4,6-Diphosphahex-1-Yl)Thiazolium Inner Salt P,P′-Dioxide; 2-ACETYLAMINO-4-METHYL-PENTANOIC ACID (1-FORMYL-2-PHENYL-ETHYL)-AMIDE; 2-ACETYLAMINO-4-METHYL-PENTANOIC ACID [1-(1-FORMYL-PENTYLCARBAMOYL)-3-METHYL-BUTYL]-AMIDE; 2-AMINO-1-METHYL-6-PHENYLIMIDAZO[4,5-B]PYRIDINE; 2-Amino-3-(1h-Indol-3-Yl)-Propan-1-Ol; 2-AMINO-3-(1-HYDROPEROXY-1H-INDOL-3-YL)PROPAN-1-OL; 4-(2,5-Dichloro-Thiophen-3-Yl)-Pyrimidin-2-Ylamine; 2-Amino-3-(4-Amino-1h-Indol-3-Yl)Propanoic Acid; 2-Amino-3-(5-Tert-Butyl-3-(Phosphonomethoxy)-4-Isoxazolyl)Propionic Acid; 2-Amino-3-(Cystein-S-Yl)-Isoxazolidin-5-Yl-Acetic Acid; 2-Amino-3-(Diethoxy-Phosphoryloxy)-Propionic Acid; 4-(2,4-Dimethyl-Thiazol-5-Yl)-Pyrimidin-2-Yl]-(4-Trifluoromethyl-Phenyl)-Amine; 2-Amino-3-[5-(Amino-Carboxy-Methyl)-2,3-Dihydro-Isoxazol-3-Ylsulfanyl]-Propionic Acid; 2-Amino-3-Hydroxy-3-Phosphonooxy-Propionic Acid; 2-Amino-4-(4-Amino-Cyclohexa-2,5-Dienyl)-Butyric Acid; 2-AMINO-4-(2,4-DICHLOROPHENYL)-N-ETHYLTHIENO[2,3-D]PYRIMIDINE-6-CARBOXAMIDE; 2-Amino-4-(2-Amino-Ethoxy)-Butyric Acid; 2-Amino-3-Methyl-1-Pyrrolidin-1-YI-Butan-1-One; 2-Amino-4-(Hydroxymethyl-Phosphinyl)Butanoic Acid; 4-(2-Oxo-Hexahydro-Thieno[3,4-D]Imidazol-4-Yl)-Butyricacid; 2-AMINO-4-CHLORO-3-HYDROXYBENZOIC ACID; 2-AMINO-4-FLUORO-5-[(1-METHYL-1H-IMIDAZOL-2-YL)SULFANYL]-N-(1,3-THIAZOL-2-YL)BENZAMIDE; 2-AMINO-4-HYDROXYPYRIMIDINE-5-CARBOXYLIC ACID ETHYL ESTER; 2-amino-5-[3-(1-ethyl-1H-pyrazol-5-yl)-1H-pyrrolo[2,3-b]pyridin-5-yl]-N,N-dimethylbenzamide; 4-(6-HYDROXY-BENZO[D]ISOXAZOL-3-YL)BENZENE-1,3-DIOL; 2-AMINO-6-(3,5-DIMETHYLPHENYL)SULFONYLBENZONITRILE; 2-amino-6-[2-(1H-indol-6-yl)ethyl]pyrimidin-4(3H)-one; 2-Amino-6-Aminomethyl-8-Phenylsulfanylmethyl-3h-Quinazolin-4-One; 2-Amino-7-[2-(2-Hydroxy-1-Hydroxymethyl-Ethylamino)-Ethyl]-1,7-Dihydro-Purin-6-One; 2-amino-7-fluoro-5-oxo-5H-chromeno[2,3-b]pyridine-3-carboxamide; 2-Amino-8-Methylquinazolin-4(3h)-One; 2-amino-N-(4-methyl-1,3-thiazol-2-yl)-5-[(4-methyl-4H-1,2,4-triazol-3-yl)sulfanyl]benzamide; 2-AMINO-N,N-BIS(PHENYLMETHYL)-1,3-OXAZOLE-5-CARBOXAMIDE; 2-Ammoniobut-3-Enoate, 2-Amino-3-Butenoate; 4-(Acetylamino)-3-[(Hydroxyacetyl)Amino]Benzoic Acid; 2-Benzo[1,3]Dioxol-5-Ylmethyl-3-Benzyl-Succinic Acid; 2-ANILINO-6-CYCLOHEXYLMETHOXYPURINE; 2-Butyl-5,6-Dihydro-1h-Imidazo[4,5-D]Pyridazine-4,7-Dione; 4-(1h-Imidazol-4-Yl)-3-(5-Ethyl-2,4-Dihydroxy-Phenyl)-1h-Pyrazole; 2-chloro-4-{[(1R,3Z,7S,7aS)-7-hydroxy-1-(trifluoromethyl)tetrahydro-1H-pyrrolo[1,2-c][1,3]oxazol-3-ylidene]amino}-3-methylbenzonitrile; 2-CHLORO-4-ETHYLAMINO-6-(R(+)-2′-CYANO-4-BUTYLAMINO)-1,3,5-TRIAZINE; 2-CHLORO-4-ETHYLAMINO-6-(S(−)-2′-CYANO-4-BUTYLAMINO)-1,3,5-TRIAZINE; 2-CHLORO-4-ISOPROPYLAMINO-6-ETHYLAMINO-1,3,5-TRIAZINE; 2-CHLORO-5-(3-CHLORO-PHENYL)-6-[(4-CYANO-PHENYL)-(3-METHYL-3H-IMIDAZOL-4-YL)-METHOXYMETHYL]-NICOTINONITRILE; 2-chloro-5-[(1S)-1-hydroxy-3-oxo-2H-isoindol-1-yl]benzenesulfonamide; 4-(Aminosulfonyl)-N-[(2,4-Difluorophenyl)Methyl]-Benzamide; 2-CHLORO-N-[(1R,2R)-1-HYDROXY-2,3-DIHYDRO-1H-INDEN-2-YL]-6H-THIENO[2,3-B]PYRROLE-5-CARBOXAMIDE; 4-(Aminosulfonyl)-N-[(4-Fluorophenyl)Methyl]-Benzamide; 2c-Methyl-D-Erythritol 2,4-Cyclodiphosphate; 2-Deamino-6-Deoxy-6thiophosphite-5′-Phosphate Guanosine; 2-Deazo-6-Thiophosphate Guanosine-5′-Monophosphate; 2-decyl-5,6-dimethoxy-3-methylcyclohexa-2,5-diene-1,4-dione; 2-fluoro-6-{[2-({2-methoxy-4-[(methylsulfonyl)methyl]phenyl}amino)-7H-pyrrolo[2,3-d]pyrimidin-4-yl]amino}benzamide; 2-Deoxy-2-Amino Glucitol-6-Phosphate; 2-Deoxy-2-Fluoro-Alpha-D-Mannosyl Fluoride; 4-(1-Amino-1-Carboxy-Ethyl)-Benzoic Acid; 2′-DEOXY-5-FORMYLCYTIDINE-5-MONOPHOSPHATE; 2′-Deoxycytidine-2′-Deoxyadenosine-3′,5′-Monophosphate; 2-Deoxy-D-Glucitol 6-(E)-Vinylhomophosphonate; 2′-deoxy-N-(naphthalen-1-ylmethyl)guanosine 5′-(dihydrogen phosphate); 2′deoxy-Thymidine-5′-Diphospho-Alpha-D-Glucose; 2′-deoxyuridine 5′-alpha,beta-imido-diphosphate; 2′-Deoxyuridine 5′-Alpha,Beta-Imido-Triphosphate; 2-Dimethylamino-Ethyl-Diphosphate; 2-DEOXY-3,4-BIS-O-[3-(4-HYDROXYPHENYL)PROPANOYL]-L-THREO-PENTARIC ACID; 4-[(Isopropylamino)Methyl]Phenylalanine; 2-fluoro-4-[4-(4-fluorophenyl)-1H-pyrazol-3-yl]pyridine; 2-Deoxy-2,3-Dehydro-N-Acetyl-Neuraminic Acid; 2-HEPTYL-4-HYDROXY QUINOLINE N-OXIDE; 2-Hexyloxy-6-Hydroxymethyl-Tetrahydro-Pyran-3,4,5-Triol; 2-Hexyloxy-6-Hydroxymethyl-Tetrahydro-Pyran-3,5-Diol; 4-[(6-phenyl[1,2,4]triazolo[4,3-b]pyridazin-3-yl)methyl]phenol; 2-Hydroxy-3-Amino-4-Phenyl Butane; 2-Hydroxy-5-({1-[(2-Naphthyloxy)Methyl]-3-Oxoprop-1-Enyl}Amino)Tyrosine; 2-Hydroxy-5-({1-[(4-Methylphenoxy)Methyl]-3-Oxoprop-1-Enyl}Amino)-L-Tyrosine; 2-HYDROXY-5-(2-MERCAPTO-ETHYLSULFAMOYL)-BENZOIC ACID; 2-Hydroxy-5-[4-(2-Hydroxy-Ethyl)-Piperidin-1-Yl]-5-Phenyl-1h-Pyrimidine-4,6-Dione; 2-HYDROXY-5-{[(1E)-2-PHENYLETHYLIDENE]AMINO}-L-TYROSINE; 4-[(5-ISOPROPYL-1,3-THIAZOL-2-YL)AMINO]BENZENESULFONAMIDE; 2-HYDROXYMETHYL-6-OCTYLSULFANYL-TETRAHYDRO-PYRAN-3,4,5-TRIOL; 2-Hydroxymethyl-Pyrrolidine-3,4-Diol; 4-[3-Methylsulfanylanilino]-6,7-Dimethoxyquinazoline; 2-KETO-6-PHOSPHATE-D-GLUCONIC ACID, ALPHA-FURANOSE FORM; 2-MERCAPTO-N-[1,2,3,10-TETRAMETHOXY-9-OXO-5,6,7,9-TETRAHYDRO-BENZO[A]HEPTALEN-7-YL]ACETAMIDE; 2-METHYL-2-(4-{[({4-METHYL-2-[4-(TRIFLUOROMETHYL)PHENYL]-1,3-THIAZOL-5-YL}CARBONYL)AMINO]METHYL}PHENOXY)PROPANOIC ACID; 2-Methyl-3-(2-Aminothiazolo)Propanal; 2-methyl-3,5,7,8-tetrahydro-4H-thiopyrano[4,3-d]pyrimidin-4-one; 2-METHYLCARBAMOYL-3-(4-PHOSPHONOOXY-PHENYL)-CYCLOPROPANECARBOXYLIC ACID; 4-[Hydroxypethyl-[Methyl-Phosphinoyl]]-3-Oxo-Butanoic Acid; 2-METHYLTHIO-N6-ISOPENTENYL-ADENOSINE-5′-MONOPHOSPHATE; 2′-Monophosphoadenosine 5′-Diphosphoribose; 4-Hydroxy-3,5-Dimethyl-5-(2-Methyl-Buta-1,3-Dienyl)-5h-Thiophen-2-One; 541-Carboxy-1-Phosphonooxy-Ethoxyl)-Shikimate-3-Phosphate; 2-NONYL-4-HYDROXYQUINOLINE N-OXIDE; AMIDINOPHENYL)-5-O-(4″-AMIDINOPHENYL)-1,4:3,6-DIANHYDRO-D-SORBITOL; 5-(2,3-dichlorophenyl)-N-(pyridin-4-ylmethyl)-3-thiocyanatopyrazolo[1,5-a]pyrimidin-7-amine; 2′-O-[1-ETHYL-1H-IMIDAZOL)] THYMIDINE-5-MONOPHOSPHATE; 2″-O-[N-(3-(aminopropyl)2-aminoethyl]paromomycin; 2′-O-Acetyl Adenosine-5-Diphosphoribose; 2′-O-Methyl-3′-Methyl-3′-Deoxy-Arabinofuranosyl-Thymine-5′-Phosphate; 2-Oxy-4-Hydroxy-5-(2-Hydrazinopyridine)Phenylalanine; 2-Phenethyl-2,3-Dihydro-Phthalazine-1,4-Dione; 2-Phenyl-1-[4-(2-Piperidin-1-Yl-Ethoxy)-Phenyl]-1,2,3,4-Tetrahydro-Isoquinolin-6-Ol; 2-phenyl-1H-imidazole-4-carboxylic acid; 4-Carboxy-5-(1-Pentyl)Hexylsulfanyl-1,2,3-Triazole; 2-Ribofuranosyl-3-Iodo-2,3-Dihydro-1h-Pyrazolo[3,4-D]Pyrimidin-4-Ylamine; 2-T-BUTYLAMINO-4-ETHYLAMINO-6-METHYLTHIO-S-TRIAZINE; 3-((3-bromo-5-o-tolylpyrazolo[1,5-a]pyrimidin-7-ylamino)methyl)pyridine 1-oxide; 3-({[(1Z)-(2-methoxyphenyl)methylidene]amino}oxy)propanoic acid; 3-({[(3S)-3,4-dihydroxybutyl]oxy}amino)-1H,2′H-2,3′-biindol-2′-one; 3-({[3,5-DIFLUORO-3′-(TRIFLUOROMETHOXY)BIPHENYL-4-YL]AMINO}CARBONYL)THIOPHENE-2-CARBOXYLIC ACID; 4-Diphosphocytidyl-2-C-Methyl-D-Erythritol; 3-({2-[(2-AMINO-6-METHYLPYRIMIDIN-4-YL)ETHYNYL]BENZYL}AMINO)-1,3-OXAZOL-2(3H)-ONE; 4-Hydroxy-1,2,5-Thiadiazole-3-Carboxylic Acid; 3-({3-[(1S,4aS,6S,7S,9S,9aR)-1,6-dimethyl-2-oxodecahydro-6,9-epoxy-4a,7-methanobenzo[7]annulen-1-yl]propanoyl}amino)-2,4-dihydroxybenzoic acid; 3-({4-[(1E)-3-morpholin-4-yl-3-oxoprop-1-en-1-yl]-2,3-bis(trifluoromethyl)phenyl}sulfanyl)aniline; 4′-Deoxy-4′-Acetylyamino-Pyridoxal-5′-Phosphate; 3-({4-[(5-chloro-1,3-benzodioxol-4-yl)amino]pyrimidin-2-yl}amino)benzenesulfonamide; 4-Hydroxy-1,2,5-Oxadiazole-3-Carboxylic Acid; 3-O-Benzyl-6-Hydroxy-2,4-Bis-(4-Hydroxy-Benzyl)-3-Oxo-[1,2,4]-Triazepane-1-Sulfonyl)-Benzonitrile; 4-Hydroxy-3-Methyl Butyl Diphosphate; 3-(10-METHYL-ANTHRACEN-9-YL)-PROPIONIC ACID; 3-(1H-BENZIMIDAZOL-2-YL)-1H-INDAZOLE; 4-Imidazolmethylene-5-Imidazolone Chromophore; 3-(1H-INDOL-3-YL)-4-(1-{2-[(2S)-1-METHYLPYRROLIDINYL]ETHYL}-1H-INDOL-3-YL)-1H-PYRROLE-2,5-DIONE; 4-iodo-acetamido phenylboronic acid; 3-(1H-tetrazol-5-ylamino)cyclohex-2-en-1-one; 3-(1H-tetrazol-5-ylmethyl)-5,6,7,8-tetrahydro[1]benzothieno[2,3-d]pyrimidin-4(3H)-one; 3-(1-NAPHTHYLMETHOXY)PYRIDIN-2-AMINE; 3-(2,6-difluorophenyl)-2-(methylthio)quinazolin-4(3H)-one; 4-HYDROXY-N′-(4-ISOPROPYLBENZYL)BENZOHYDRAZIDE; 3-(2-Aminoethyl)-4-(Aminomethyl)Heptanedioic Acid; 3-(2-aminoquinazolin-6-yl)-1-(3,3-dimethylindolin-6-yl)-4-methylpyridin-2(1H)-one; 4-Oxo-Nicotinamide-Adenine Dinucleotide Phosphate; 5-(2-CHLORO-4-NITROPHENYL)-2-FUROIC ACID; 3-(2-Benzothiazolylthio)-1-Propanesulfonic Acid; 4-ethyl-5-methyl-2-(1H-tetrazol-5-yl)-1,2-dihydro-3H-pyrazol-3-one; 5-(4-Methoxyphenoxy)-2,4-Quinazolinediamine; 5-(6-Amino-9h-Purin-9-Yl)-4-Hydroxytetrahydrofuran-3-YI Dihydrogen Phosphate; 3-(3,5-Dibromo-4-Hydroxy-Benzoyl)-2-Ethyl-Benzofuran-6-Sulfonic Acid Dimethylamide; 3-(3-aminophenyl)-N-(3-chlorophenyl)pyrazolo[1,5-a]pyrimidin-5-amine; 3-(3-FLUORO-4-HYDROXYPHENYL)-7-HYDROXY-1-NAPHTHONITRILE; 5-(5-(4-(4,5-dihydro-2-oxazoly)phenoxy)pentyl)-3-methyl osoxazole; 3-(3-methylbut-2-en-1-yl)-3H-purin-6-amine; 3-(4-Amino-1-Tert-Butyl-1h-Pyrazolo[3,4-D]Pyrimidin-3-Yl)Phenol; 3-(4-Amino-2-Tert-Butyl-5-Methyl-Phenylsulfanyl)-6-Cyclopentyl-4-Hydroxy-6-[2-(4-Hydroxy-Phenyl)-Ethyl]-5,6-Dihydro-Pyran-2-One; 3-(4-Benzenesulfonyl-Thiophene-2-Sulfonylamino)-Phenylboronic Acid; 3-(4-Carbamoyl-1-Carboxy-2-Methylsulfonyl-Buta-1,3-Dienylamino)-Indolizine-2-Carboxylic Acid; 3-(4-CHLOROPHENYL)-5-(METHYLTHIO)-4H-1,2,4-TRIAZOLE; 3-(4-DIETHYLAMINO-2-HYDROXY-PHENYL)-2-METHYL-PROPIONIC ACID; 3-(4-Fluorophenyl)-1-Hydroxy-2-(Pyridin-4-Yl)-1h-Pyrrolo[3,2-B]Pyridine; 3-(4-Fluorophenyl)-2-(6-Methylpyridin-2-Yl)-5,6-Dihydro-4h-Pyrrolo[1,2-B]Pyrazole; 3-(4-fluorophenyl)-5-phenyl-4H-1,2,4-triazole; 3-(4-Hydroxy-3-Imino-6-Oxo-Cyclohexa-1,4-Dienyl)-Alanine; 3-(4-HYDROXY-3-METHOXYPHENYL)-2-PROPENOIC ACID; 3-(4-HYDROXYPHENYL)-1-(2,4,6-TRIHYDROXYPHENYL)PROPAN-1-ONE; 3-(4-Phenylamino-Phenylamino)-2-(1h-Tetrazol-5-Yl)-Acrylonitrile; 3-(5-{[4-(AMINOMETHYL)PIPERIDIN-1-YL]METHYL}-1H-INDOL-2-YL)-1H-INDAZOLE-6-CARBONITRILE; 5-(PARA-NITROPHENYL PHOSPHONATE)-PENTANOIC ACID; 3-(4-HYDROXYPHENYL)-4,5-DIHYDRO-5-ISOXAZOLE-ACETIC ACID METHYL ESTER; 3-(5-Amino-7-Hydroxy-[1,2,3]Triazolo[4,5-D]Pyrimidin-2-Yl)-Benzoic Acid; 3-(5-Amino-7-Hydroxy-[1,2,3]Triazolo[4,5-D]Pyrimidin-2-Yl)-N-(3,5-Dichlorobenzyl)-Benzamide; 5-[(phenylsulfonyl)amino]-1,3,4-thiadiazole-2-sulfonamide; 3-(5-methoxy-1H-indol-3-yl)propanoic acid; 3-(6-Aminopyridin-3-Yl)-N-Methyl-N-[(1-Methyl-1h-Indol-2-Yl)Methyl]Acrylamide; 3-(6-CYCLOHEXYLMETHOXY-9H-PURIN-2-YLAMINO)-BENZENESULFONAMIDE; 3-(6-HYDROXY-NAPHTHALEN-2-YL)-BENZO[D]ISOOXAZOL-6-OL; 5,7-dihydroxy-2-(4-hydroxyphenyl)-4H-chromen-4-one; 3-(7-Hydroxy-8-Ribityllumazine-6-Yl) Propionic Acid; 5-{[1-(2,3-dichlorobenzyl)piperidin-4-yl]methoxy}quinazoline-2,4-diamine; 3″-(Beta-Chloroethyl)-2″,4″-Dioxo-3, 5″-Spiro-Oxazolidino-4-Deacetoxy-Vinblastine; 3-(BUTYLSULPHONYL)-PROPANOIC ACID; 3-(CARBOXYAMIDE(2-CARBOXYAMIDE-2-TERTBUTYLETHYL))PENTAN; 3-(CARBOXYMETHOXY)THIENO[2,3-B]PYRIDINE-2-CARBOXYLIC ACID; 3-(HYDROXYMETHYL)-1-METHYL-5-(2-METHYLAZIRIDIN-1-YL)-2-PHENYL-1H-INDOLE-4,7-DIONE; 3-(HYDROXY-PHENYL-PHOSPHINOYLOXY)-8-METHYL-8-AZA-BICYCLO[3.2.1]OCTANE-2-CARBOXYLIC ACID METHYL ESTER; 5-{[1-(2-fluorobenzyl)piperidin-4-yl]methoxy}quinazoline-2,4-diamine; 3(S)-METHYLCARBAMOYL-7-SULFOAMINO-3,4-DIHYDRO-1H-ISOQUINOLINE-2-CARBOXYLIC ACID TERT-BUTYL ESTER; 3,3-Dichloro-2-Phosphonomethyl-Acrylic Acid; 3,4-bis(7-chloro-1H-indol-3-yl)-1H-pyrrole-2,5-dicarboxylic acid; 3,4-DI-1H-INDOL-3-YL-1H-PYRROLE-2,5-DICARBOXYLIC ACID; 3,4-DIHYDRO-4-OXO-3-((5-TRIFLUOROMETHYL-2-BENZOTHIAZOLYL)METHYL)-1-PHTHALAZINE ACETIC ACID; 3,4-dihydroxy-9,10-secoandrosta-1(10),2,4-triene-9,17-dione; 3,5,6,8-Tetramethyl-N-Methyl Phenanthrolinium; 3′,5′-DIBROMO-2′,4,4′,6′-TETRAHYDROXY AURONE; 3,5-Dichloro-4-[(4-Hydroxy-3-Isopropylphenoxy)Phenylacetic Acid; 3′,5′-DIFLUOROBIPHENYL-4-CARBOXYLIC ACID; 3,5-Dihydro-5-Methylidene-4h-Imidazol-4-On; 3,5-Dimethyl-1-(3-Nitrophenyl)-1h-Pyrazole-4-Carboxylic Acid Ethyl Ester; 5-Amino-3-Methyl-Pyrrolidine-2-Carboxylic Acid; 3,5-DIMETHYL-1-PHENYL-1H-PYRAZOLE-4-CARBOXYLIC ACID ETHYL ESTER; 5-{[Ethyl(Methyl)Amino]Methyl}-2-Methyl-5,6-Dihydropyrimidin-4-Amine; 3,7-BIS(DIMETHYLAMINO)PHENOTHIAZIN-5-IUM; 3,7-DIHYDROXYNAPHTHALENE-2-CARBOXYLIC ACID; 5-Bromo-2′-Deoxyuridine-5-Monophosphate; 3,8-Diamino-6-Phenyl-5-[6-[1-[2-[(1,2,3,4-Tetrahydro-9-Acridinyl)Amino]Ethyl]-1h-1,2,3-Triazol-4-Yl]Hexyl]-Phenanthridinium; 3,8-Diamino-6-Phenyl-5-[6-[1-[2-[(1,2,3,4-Tetrahydro-9-Acridinyl)Amino]Ethyl]-1h-1,2,3-Triazol-5-Yl]Hexyl]-Phenanthridinium; 3,8-DIBROMO-7-HYDROXY-4-METHYL-2H-CHROMEN-2-ONE; 5-Hydroxyamino-3-Methyl-Pyrrolidine-2-Carboxylic Acid; 5-Hydroxymethylene-6-Hydrofolic Acid; 5-Hydroxy-2-(Hydroxymethyl)-4h-Pyran-4-One; 5-Mercapto-2-Nitro-Benzoic Acid; 3-[(2,2-DIMETHYLPROPANOYL)AMINO]-N-1,3-THIAZOL-2-YLPYRIDINE-2-CARBOXAMIDE; 5-Methoxy-N,N-diisopropyltryptamine; 3-[(3-(2-CARBOXYETHYL)-4-METHYLPYRROL-2-YL)METHYLENE]-2-INDOLINONE; 3-[(4-AMINO-1-TERT-BUTYL-1H-PYRAZOLO[3,4-D]PYRIMIDIN-3-YL)METHYL]PHENOL; 5-Methoxy-1,2-Dimethyl-3-(Phenoxymethyl)Indole-4,7-Dione; 3-[(4′-cyanobiphenyl-4-yl)oxy]-N-hydroxypropanamide; 5-methyl-6-phenylquinazoline-2,4-diamine; 3-[(5s)-1-Acetyl-3-(2-Chlorophenyl)-4,5-Dihydro-1h-Pyrazol-5-Yl]Phenol; 3-[(9H-fluoren-9-ylideneamino)oxy]propanoic acid; 3-[(Acetyl-Methyl-Amino)-Methyl]-4-Amino-N-Methyl-N-(1-Methyl-1h-Indol-2-Ylmethyl)-Benzamide; 5-[Bis-2(Chloro-Ethyl)-Amino]-2,4-Dintro-Benzamide; 3-[[N-[4-Methyl-Piperazinyl]Carbonyl]-Phenylalaninyl-Amino]-5-Phenyl-Pentane-1-Sulfonic Acid Benzyloxy-Amide; 3-[1-(3-AMINOPROPYL)-1H-INDOL-3-YL]-4-(1H-INDOL-3-YL)-1H-PYRROLE-2,5-DIONE; 3-[1-(3-Aminopropyl)-1h-Indol-3-Yl]-4-(1-Methyl-1h-Indol-3-Yl)-1h-Pyrrole-2,5-Dione; 3-[1-(4-BROMO-PHENYL)-2-METHYL-PROPYL]-4-HYDROXY-CHROMEN-2-ONE; 3-[2-(2-BENZYLOXYCARBONYLAMINO-3-METHYL-BUTYRYLAMINO)-PROPIONYLAMINO]-4-OXO-PENTANOIC ACID; 3-[2-bromo-4-(1H-pyrazolo[3,4-c]pyridazin-3-ylmethyl)phenoxy]-5-methylbenzonitrile; 3-[3-(2,3-Dihydroxy-Propylamino)-Phenyl]-4-(5-Fluoro-1-Methyl-1h-Indol-3-Yl)-Pyrrole-2,5-Dione; 3-[3-(3-methyl-6-{[(1S)-1-phenylethyl]amino}-1H-pyrazolo[4,3-c]pyridin-1-yl)phenyl]propanamide; 3-[3-(4-methylpiperazin-1-yl)-7-(trifluoromethyl)quinoxalin-5-yl]phenol; 6((S)-3-Benzylpiperazin-1-Yl)-3-(Naphthalen-2-Yl)-4-(Pyridin-4-Yl)Pyrazine; 3-[4-(2,4-Dimethyl-Thiazol-5-Yl)-Pyrimidin-2-Ylamino]-Phenol; 3-[4-(2-METHYL-IMIDAZO[4,5-C]PYRIDIN-1-YL)BENZYL]-3H-BENZOTHIAZOL-2-ONE; 3-[4-(AMINOSULFONYL)PHENYL]PROPANOIC ACID; 3-[4-AMINO-1-(1-METHYLETHYL)-1H-PYRAZOLO[3,4-D]PYRIMIDIN-3-YL]PHENOL; 3-[5-(1H-IMIDAZOL-1-YL)-7-METHYL-1H-BENZIMIDAZOL-2-YL]-4-[(PYRIDIN-2-YLMETHYL)AMINO]PYRIDIN-2(1H)-ONE; 3-[5-(2-nitropent-1-en-1-yl)furan-2-yl]benzoic acid; 3-[5-(3-nitrophenyl)thiophen-2-yl]propanoic acid; 5-O-(N-(L-Cysteinyl)-Sulfamoyl)Adenosine; 3-[Aminoethylphosphoryl]-[1,2-Di-Palmitoyl]-Sn-Glycerol; 5′-O-(N-(L-Seryl)-Sulfamoyl)Adenosine; 3-[N-[Benzyloxycarbonyl]-Phenylalaninyl-Amino]-5-Phenyl-Pentane-1-Sulfonic Acid 4-Nitro-Phenyl Ester; 5-O-(N-Ethyl-Sulfamoyl)Adenosine; 3-{(3R,4R)-4-methyl-3-[methyl(7H-pyrrolo[2,3-d]pyrimidin-4-yl)amino]piperidin-1-yl}-3-oxopropanenitrile; 3-{[(1r)-1-Benzyl-2-Sulfanylethyl]Amino}-3-Oxopropanoic Acid; 5-O-[(L-Methionyl)-Sulphamoyl]Adenosine; 5-Nitro-6-Ribityl-Amino-2,4(1h,3h)-Pyrimidinedione; 3-{[(2,2-DIOXIDO-1,3-DIHYDRO-2-BENZOTHIEN-5-YL)AMINO]METHYLENE}-5-(1,3-OXAZOL-5-YL)-1,3-DIHYDRO-2H-INDOL-2-ONE; 3-{[(3-FLUORO-3-METHOXYBIPHENYL-4-YL)AMINO]CARBONYL}THIOPHENE-2-CARBOXYLIC ACID; 3-{[(3-NITROANILINE]SULFONYL}THIOPHENE-2-CARBOXYLIC ACID; 3-{[(4-CARBOXY-2-HYDROXYANILINE]SULFONYL}THIOPHENE-2-CARBOXYLIC ACID; 6,8-DIMERCAPTO-OCTANOIC ACID AMIDE; 6-(2-phenoxyethoxy)-1,3,5-triazine-2,4-diamine; 5-S-[2-(decylamino)ethyl]-5′-thioadenosine; 3-{[4-(but-2-yn-1-yloxy)phenyl]sulfonyl}propane-1-thiol; 5-Thio-a/B-D-Mannopyranosylamine; 3-{2,6,8-trioxo-9-[(2R,3S,4R)-2,3,4,5-tetrahydroxypentyl]-1,2,3,6,8,9-hexahydro-7H-purin-7-Yl}propyl dihydrogen phosphate; 6-[2-(3′-METHOXYBIPHENYL-3-YL)ETHYL]PYRIDIN-2-AMINE; 3-{2,6,8-trioxo-9-[(2S,3S,4R)-2,3,4,5-tetrahydroxypentyl]-1,2,3,6,8,9-hexahydro-7H-purin-7-Yl}propyl dihydrogen phosphate; 3-{3-[(DIMETHYLAMINO)METHYL]-1H-INDOL-7-YL}PROPAN-1-OL; 3-{3-bromo-4-[(2,4-difluorobenzyl)oxy]-6-methyl-2-oxopyridin-1(2H)-yl}-N,4-dimethylbenzamide; 3-{5-[(6-amino-1H-pyrazolo[3,4-b]pyridin-3-yl)methoxy]-2-chlorophenoxy}-5-chlorobenzonitrile; 3-{5-[AMINO(IMINIO)METHYL]-1H-INDOL-2-YL}-5-METHOXY-1,1′-BIPHENYL-2-OLATE; 3-{5-methoxy-1-[(4-methoxyphenyl)sulfonyl]-1H-indol-3-yl}propanoic acid; 6-[4-(2-piperidin-1-ylethoxy)phenyl]-3-pyridin-4-ylpyrazolo[1,5-a]pyrimidine; 3-{ISOPROPYL[(TRANS-4-METHYLCYCLOHEXYL)CARBONYL]AMINO}-5-PHENYLTHIOPHENE-2-CARBOXYLIC ACID; 3′-1-Carboxy-1-Phosphonooxy-Ethoxy-Uridine-Diphosphate-N-Acetylglucosamine; 3-AMINO-3-BENZYL-[4.3.0]BICYCLO-1,6-DIAZANONAN-2-ONE; 6-BENZYL-1-ETHOXYMETHYL-5-ISOPROPYL URACIL; 3-Amino-4,5-Dihydroxy-Cyclohex-1-Enecarboxylate; 3-Amino-4-{3-[2-(2-Propoxy-Ethoxy)-Ethoxy]-Propylamino}-Cyclobut-3-Ene-1,2-Dione; 3-Amino-8,9,10-Trihydroxy-7-Hydroxymethyl-6-Oxa-1,3-Diaza-Spiro[4.5]Decane-2,4-Dione; 3-AMINO-AZACYCLOTRIDECAN-2-ONE; 6-HYDROXY-1,3-BENZOTHIAZOLE-2-SULFONAMIDE; 3-Amino-N-{4-[2-(2,6-Dimethyl-Phenoxy)-Acetylamino]-3-Hydroxy-1-Isobutyl-5-Phenyl-Pentyl}-Benzamide; 3ar,5r,6s,7r,7ar-5-Hydroxymethyl-2-Methyl-5,6,7,7a-Tetrahydro-3ah-Pyrano[3,2-D]Thiazole-6,7-Diol; 3-Aza-2,3-Dihydrogeranyl Diphosphate; 3-Azido-3-Deoxythymidine-5′-Diphosphate; 3-Azido-3-Deoxythymidine-5-Monophosphate; 3-Benzylaminocarbonylphenyl-Alpha-D-Galactoside; 6-Chloropurine Riboside, 5′-Monophosphate; 6-Hydroxy-7,8-Dihydro Purine Nucleoside; 3-bromo-5-phenyl-N-(pyridin-4-ylmethyl)pyrazolo[1,5-a]pyrimidin-7-amine; 3-bromo-5-phenyl-N-(pyrimidin-5-ylmethyl)pyrazolo[1,5-a]pyridin-7-amine; 3-BROMO-6-HYDROXY-2-(4-HYDROXYPHENYL)-1H-INDEN-1-ONE; 6-Hydroxy-Flavin-Adenine Dinucleotide; 3-bromo-N′-[(1E)-(3,5-dibromo-2,4-dihydroxyphenyl)methylidene]benzohydrazide; 3-CARBOXAMIDO-1,3,5(10)-ESTRATRIEN-17(R)-SPIRO-2′(5′,5′-DIMETHYL-6′OXO)TETRAHYDROPYRAN; 3-CARBOXY-4-METHYL-5-PROPYL-2-FURANPROPIONIC; 3-Carboxy-N,N,N-Trimethyl-2-(Octanoyloxy)Propan-1-Aminium; 3-CHLORO-2-(4-HYDROXYPHENYL)-2H-INDAZOL-5-OL; 3-CHLORO-2,2-DIMETHYL-N-[4-(TRIFLUOROMETHYL)PHENYL]PROPANAMIDE; 3-chloro-5-[2-chloro-5-(1H-indazol-3-ylmethoxy)phenoxy]benzonitrile; 3-chloro-5-[2-chloro-5-(1H-pyrazolo[3,4-b]pyridin-3-ylmethoxy)phenoxy]benzonitrile; 3-Chloro-9-Ethyl-6,7,8,9,10,11-Hexahydro-7,11-Methanocycloocta[B]Quinolin-12-Amine; 7,8-dihydroxy-4-phenyl-2H-chromen-2-one; 3-cyclohexyl-D-alanyl-N-(3-chlorobenzyl)-L-prolinamide; 3-cyclopropyl-5-phenyl-N-(pyridin-3-ylmethyl)pyrazolo[1,5-a]pyrimidin-7-amine; 3-Decyl-2,5-Dioxo-4-Hydroxy-3-Pyrroline; 7-[(3-CHLOROBENZYL)OXY]-4-[(METHYLAMINO)METHYL]-2H-CHROMEN-2-ONE; 3-Deoxy-D-Manno-Oct-2-Ulosonic Acid; 3-DIPHENOL-6-NITRO-3H-BENZO[DE]ISOCHROMEN-1-ONE; 3-ETHYL-2-(4-HYDROXYPHENYL)-2H-INDAZOL-5-OL; 3-ETHYL-6-{[(4-FLUOROPHENYL)SULFONYL]AMINO}-2-METHYLBENZOIC ACID; 7-[2-METHOXY-1-(METHOXYMETHYL)ETHYL]-7H-PYRROLO[3,2-F] QUINAZOLINE-1,3-DIAMINE; 7-Alpha-D-Ribofuranosyl-Purine-5′-Phosphate; 7-amino-2-tert-butyl-4-(4-pyrimidin-2-ylpiperazin-1-yl)pyrido[2,3-d]pyrimidine-6-carboxamide; 3-fluoro-N-[3-(1H-tetrazol-5-yl)phenyl]benzamide; 3-FLUORO-N-[1-(4-FLUOROPHENYL)-3-(2-THIENYL)-1H-PYRAZOL-5-YL]BENZENESULFONAMIDE; 3-FORMYL-2-HYDROXY-5-METHYL-HEXANOIC ACID HYDROXYAMIDE; 7-AMINO-4-METHYL-CHROMEN-2-ONE; 3-Hydroxymethyl-5-Aziridinyl-1methyl-2-[1h-Indole-4,7-Dione]-Propanol; 3-HYDROXYPROPYL 3-[({7-[AMINO(IMINO)METHYL]-1-NAPHTHYL}AMINO)CARBONYL]BENZENESULFONATE; 3-Mercapto-1-(1,3,4,9-Tetrahydro-B-Carbolin-2-Yl)-Propan-1-One; 3-METHOXY-6-[4-(3-METHYLPHENYL)-1-PIPERAZINYL]PYRIDAZINE; 3-Methyl-5-Sulfo-Pyrrolidine-2-Carboxylic Acid; 3-METHYL-1,6,8-TRIHYDROXYANTHRAQUINONE; 3-FLUORO-4-HYDROXYBENZALDEHYDE O-(CYCLOHEXYLCARBONYL)OXIME; 7-Hydroxy-2-Oxo-Chromene-3-Carboxylic Acid Ethyl Ester; 3-FLUORO-5-MORPHOLIN-4-YL-N-[1-(2-PYRIDIN-4-YLETHYL)-1H-INDOL-6-YL]BENZAMIDE; 7n-Methyl-8-Hydroguanosine-5′-Diphosphate; 7-thionicotinamide-adenine-dinucleotide phosphate; 4-({4-[(6-CHLORO-1-BENZOTHIEN-2-YL)SULFONYL]-2-OXOPIPERAZIN-1-YL}METHYL)BENZENECARBOXIMIDAMIDE; 8-(2-Chloro-3,4,5-Trimethoxy-Benzyl)-2-Fluoro-9-Pent-4-Ylnyl-9h-Purin-6-Ylamine; 4-({6-AMINO-5-BROMO-2-[(4-CYANOPHENYL)AMINO]PYRIMIDIN-4-YL}OXY)-3,5-DIMETHYLBENZONITRILE; 4-({(2R,5S)-2,5-DIMETHYL-4-[(2R)-3,3,3-TRIFLUORO-2-HYDROXY-2-METHYLPROPANOYL]PIPERAZIN-1-YL}CARBONYL)BENZONITRILE; 8-(2,5-Dimethoxy-Benzyl)-2-Fluoro-9-Pent-9h-Purin-6-Ylamine; 4-(3,14-Dihydroxy-10,13-Dimethyl-Hexadecahydro-Cyclopenta[a]Phenanthren-17-Yl)-5h-Furan-2-One; 4-(3,5-DIMETHYLPHENOXY)-5-(FURAN-2-YLMETHYLSULFANYLMETHYL)-3-IODO-6-METHYLPYRIDIN-2(1H)-ONE; 4-(3-{[5-(trifluoromethyl)pyridin-2-yl]oxy}benzyl)piperidine-1-carboxylic acid; 8-Amino-1,3-Dimethyl-3,7-Dihydropurine-2,6-Dione; 4,6-Dideoxy-4-{[4,5,6-Trihydroxy-3-(Hydroxymethyl)Cyclohex-2-En-1-Yl]Amino}-Alpha-D-Lyxo-Hexopyranosyl-(1->4)-Alpha-D-Threo-Hexopyranosyl-(1->6)-Alpha-L-Threo-Hexopyranose; 4,6-DIDEOXY-4-{[4-[(4-O-HEXOPYRANOSYLHEXOPYRANOSYL)OXY]-5,6-DIHYDROXY-3-(HYDROXYMETHYL)CYCLOHEX-2-EN-1-YL]AMINO}HEXOPYRANOSYL-(1-&gt;4)HEXOPYRANOSYL-(1-&gt;4)HEXOPYRANOSE; 8-Benzo[1,3]Dioxol-,5-Ylmethyl-9-Butyl-2-Fluoro-9h-Purin-6-Ylamine; 4-[(1S,2S,5S)-5-(HYDROXYMETHYL)-6,8,9-TRIMETHYL-3-OXABICYCLO[3.3.1]NON-7-EN-2-YL]PHENOL; 8-Demethyl-8-Dimethylamino-Flavin-Adenine-Dinucleotide; 4-[(1S,2S,5S,9R)-5-(HYDROXYMETHYL)-8,9-DIMETHYL-3-OXABICYCLO[3.3.1]NON-7-EN-2-YL]PHENOL; 8-Hydroxy-4-(1-Hydroxyethyl)Quinoline-2-Carboxylic Acid; 4-[(3AS,4R,7R,8AS,8BR)-2-(1,3-BENZODIOXOL-5-YLMETHYL)-7-HYDROXY-1,3-DIOXODECAHYDROPYRROLO[3,4-A]PYRROLIZIN-4-YL]BENZENECARBOXIMIDAMIDE; 9-(4-Hydroxyphenyl)-2,7-Phenanthroline; 4-[(3-CHLORO-4-{[(2R)-3,3,3-TRIFLUORO-2-HYDROXY-2-METHYLPROPANOYL]AMINO}PHENYL)SULFONYL]-N,N-DIMETHYLBENZAMIDE; 4-({[(4-METHYLPIPERAZIN-1-YL)AMINO]CARBONOTHIOYL}AMINO)BENZENESULFONAMIDE; 8-Bromo-Adenosine-5′-Monophosphate; 4-[(3-BROMO-4-O-SULFAMOYLBENZYL)(4-CYANOPHENYL)AMINO]-4H-[1,2,4]-TRIAZOLE; 6-(4-chloro-2-fluoro-3-phenoxybenzyl)pyridazin-3(2H)-one; 9-(5,5-Difluoro-5-Phosphonopentyl)Guanine; 6-[3-(4-Morpholinyl)Propyl]-2-(3-Nitrophenyl)-5-Thioxo-5,6,-Dihydro-7h-Thienol[2′,3′:4,5]Pyrrolo[1,2-C]Imidazol-7-One; 9-(6-Deoxy-Beta-D-Allofuranosyl)-6-Methylpurine; 6-[(5-CHLORO-3-METHYL-1-BENZOFURAN-2-YL)SULFONYL]PYRIDAZIN-3(2H)-ONE; 9-benzyl-2,3,4,9-tetrahydro-1H-carbazole-8-carboxylic acid; 9-amino-5-(2-aminopyrimidin-4-yl)pyrido[3′,2′:4,5]pyrrolo[1,2-c]pyrimidin-4-ol; 6-[1-(3,5,5,8,8-Pentamethyl-5,6,7,8-Tetrahydronaphthalen-2-Yl)Cyclopropyl]Pyridine-3-Carboxylic Acid; 6-AMINO-4-[2-(4-METHOXYPHENYL)ETHYL]-1,7-DIHYDRO-8H-IMIDAZO[4,5-G]QUINAZOLIN-8-ONE; 6-AMINO-4-[2-(4-METHYLPHENYL)ETHYL]-1,7-DIHYDRO-8H-IMIDAZO[4,5-G]QUINAZOLIN-8-ONE; 6-BROMO-13-THIA-2,4,8,12,19-PENTAAZATRICYCLO[12.3.1.1˜3,7˜]NONADECA-1(18),3(19),4,6,14,16-HEXAENE 13,13-DIOXIDE; 9-Beta-D-Xylofuranosyl-Adenine; 6-CARBAMIMIDOYL-2-[2-HYDROXY-6-(4-HYDROXY-PHENYL)-INDAN-1-YL]-HEXANOIC ACID; 9-Butyl-8-(2,5-Dimethoxy-Benzyl)-9h-Purin-6-Ylamine; 6-CHLORO-1-(2-{[(5-CHLORO-1-BENZOTHIEN-3-YL)METHYL]AMINO}ETHYL)-3-[(2-PYRIDIN-2-YLETHYL)AMINO]-1,4-DIHYDROPYRAZIN-2-OL; 6-CHLORO-2-(1-FURO[2,3-C]PYRIDIN-5-YL-ETHYLSULFANYL)-PYRIMIDIN-4-YLAMINE; 6,11-DIHYDRO-11-ETHYL-6-METHYL-9-NITRO-5H-PYRIDO[2,3-B][1,5]BENZODIAZEPIN-5-ONE; 6-CHLORO-9-HYDROXY-1,3-DIMETHYL-1,9-DIHYDRO-4H-PYRAZOLO[3,4-B]QUINOLIN-4-ONE; 6-CHLORO-N-{(3S)-1-[(1S)-1-METHYL-2-(4-MORPHOLINYL)-2-OXO ETHYL]-2-OXO-3-PYRROLIDINYL}-2-NAPHTHALENESULFONAMIDE; 4-[(7R,7AS)-7-HYDROXY-1,3-DIOXOTETRAHYDRO-1H-PYRROLO[1,2-C]]IMIDAZOL-2(3H)-YL]-1-NAPHTHONITRILE; 6-FLUORO-2-(2-HYDROXY-3-ISOBUTOXY-PHENYL)-1H-BENZOIMIDAZOLE-5-CARBOXAMIDINE; 9-amino-n-[3-(dimethylamino)propyl]acridine-4-carboxamide; 4-{[4-(1-CYCLOPROPYL-2-METHYL-1H-IMIDAZOL-5-YL)PYRIMIDIN-2-YL]AMINO}-N-METHYLBENZENESULFONAMIDE; 6-CHLORO-3-(DICHLOROMETHYL)-3,4-DIHYDRO-2H-1,2,4-BENZOTHIADIAZINE-7-SULFONAMIDE 1,1-DIOXIDE; 6-CHLORO-4-(CYCLOHEXYLOXY)-3-ISOPROPYLQUINOLIN-2(1H)-ONE; 6-CHLORO-4-(CYCLOHEXYLOXY)-3-PROPYLQUINOLIN-2(1H)-ONE; 6-CHLORO-4-(CYCLOHEXYLSULFANYL)-3-PROPYLQUINOLIN-2(1H)-ONE; 6-METHYL-2(PROPANE-1-SULFONYL)-2H-THIENO[3,2-1N1,2,3]DIAZABORININ-1-OL; 4-[(10s,14s,18s)-18-(2-Amino-2-Oxoethyl)-14-(1-Naphthylmethyl)-8,17,20-Trioxo-7,16,19-Triazaspiro[5.14]Icos-11-En-10-Yl]Benzylphosphonic Acid; 4-[(1E,7E)-8-(2,6-DIOXO-1,2,3,6-TETRAHYDROPYRIMIDIN-4-YL)-3,6-DIOXA-2,7-DIAZAOCTA-1,7-DIEN-1-YL]BENZOIC ACID; 4-[[(1E)-2-(4-CHLOROPHENYL)ETHENYL]SULFONYL]-1-[[1-(4-PYRIDINYL)-4-PIPERIDINYL]METHYL]PIPERAZINONE; ((2r,3s,5r)-3-Hydroxy-5-(4-Hydroxy-2-Oxo-3,4-Dihydropyrimidin-1(2h)-Yl)-Tetrahydrofuran-2-Yl)Methyldihydrogen Phosphate; (10ALPHA,13ALPHA,14BETA,17ALPHA)-17-HYDROXYANDROST-4-EN-3-ONE; 9-Butyl-8-(3-Methoxybenzyl)-9h-Purin-6-Amine; (1-HYDROXY-1-PHOSPHONO-2-[1,1′;3,1″]TERPHENYL-3-YL-ETHYL)-PHOSPHONIC ACID; (1r)-4-[(1e,3e,5e,7z,9e,11z,13e,15e)-17-Hydroxy-3,7,12,16-Tetramethylheptadeca-1,3,5,7,9,11,13,15-Octaen-1-Yl]-3,5,5-Trimethylcyclohex-3-En-1-Ol; (13R,15S)-13-METHYL-16-OXA-8,9,12,22,24-PENTAAZAHEXACYCLO[15.6.2.16,9.1,12,15.0,2,7.0,21,25]HEPTACOSA-1(24),2,4,6,17(25),18,20-HEPTAENE-23,26-DIONE; 9-Hydroxy-8-Methoxy-6-Nitro-Phenanthrol[3,4-D][1,3]Dioxole-5-Carboxylic Acid; A Disubstituted Succinyl Caprolactam Hydroxymate Mmp3inhibitor; ABX-PTH (human monoclonal antibody to parathyroid hormone); AC-(D)PHE-PRO-BOROHOMOLYS-OH; (1R)-2-[(CYANOMETHYL)AMINO]-1-({[2-(DIFLUOROMETHOXY)BENZYL]SULFONYL}METHYL)-2-OXOETHYL MORPHOLINE-4-CARBOXYLATE; AC-(D)PH E-PRO-BOROLYS-OH; (1n)-4-N-Butoxyphenylsulfonyl-(2r)-N-Hydroxycarboxamido-(4s)-Methanesulfonylamino-Pyrrolidine; Adenosine-5′-Monophosphate Glucopyranosyl-Monophosphate Ester; Adenosine-5′-Diphosphate Monothiophosphate; (1R)-1-(2-THIENYLACETYLAMINO)-1-(3-CARBOXYPHENYL)METHYLBORONIC ACID; (1R,2R)—N-(2-AMINOETHYL)-2-{[(4-M ETHOXYPHENYL)SULFONYL]METHYL}CYCLOHEXANECARBOXAMIDE; Adenosine-5-Rp-Alpha-Thio-Triphosphate; (1R,3R)-5-[(2E)-3-{(1S,3R)-2,2,3-trimethyl-3-[6,6,6-trifluoro-5-hydroxy-5-(trifluoromethyl)hex-3-yn-1-yl]cyclopentyl}prop-2-en-1-ylidene]cyclohexane-1,3-diol; (1R)-2-METHYL-1-(PHENYLMETHYL)PROPYL[(1S)-1-FORMYLPENTYL]CARBAMATE; Alpha,Beta-Methyleneadenosine-5′-Triphosphate; (1E)-5-(1-piperidin-4-yl-3-pyridin-4-yl-1H-pyrazol-4-yl)-2,3-dihydro-1H-inden-1-one oxime; Alpha-Adenosine Monophosphate; Alpha-Amino-2-Indanacetic Acid; (1R,2R,3R,4S,5R)-4-(BENZYLAMINO)-5-(METHYLTHIO)CYCLOPENTANE-1,2,3-TRIOL; Alpha-Aminoisobutyric Acid; Alpha-Benzyl-Aminobenzyl-Phosphonic Acid; (1R,3S,5S,8R)-8-HYDROXY-2-OXABICYCLO[3.3.1]NON-6-ENE-3,5-DICARBOXYLIC ACID; (1S)-1-CYCLOPROPYL-2-[(2S)-4-(2,5-DIFLUOROPHENYL)-2-PHENYL-2,5-DIHYDRO-1H-PYRROL-1-YL]-2-OXOETHANAMINE; (1s)-1-(9-Deazaadenin-9-Yl)-1,4,5-Trideoxy-1,4-Imino-5-Methylthio-D-Ribitol; Alpha-D-Glucose 1,6-Bisphosphate; alpha-D-glucose 6-phosphate; Alpha-D-Glucose-1-Phosphate; Alpha-D-Glucose-1-Phosphate-6-Vanadate; (1S)-2-(1H-INDOL-3-YL)-1-[({5-[(E)-2-PYRIDIN-4-YLVINYL]PYRIDIN-3-YL}OXY)METHYL]ETHYLAMINE; (1s)-1(9-Deazahypoxanthin-9yl)1,4-Dideoxy-1,4-Imino-D-Ribitol-5-Phosphate; (1S)-2-[(2S,5R)-2-(AMINOMETHYL)-5-ETHYNYLPYRROLIDIN-1-YL]-1-CYCLOPENTYL-2-OXOETHANAMINE; Alpha-Hydroxy-Beta-Phenyl-Propionic Acid; (1S,2R,5S)-5-[3-(TRIFLUOROMETHYL)-5,6-DIHYDRO[1,2,4]TRIAZOLO[4,3-A]PYRAZIN-7(8H)-YL]-2-(2,4,5-TRIFLUOROPHENYL)CYCLOHEXANAMINE; Alpha-Methylene Adenosine Monophosphate; (1S,4S,5S)-1,4,5-TRIHYDROXY-3-[3-(PHENYLTHIO)PHENYL]CYCLOHEX-2-ENE-1-CARBOXYLIC ACID; (1S,7S,8S,8AR)-1,2,3,7,8,8A-HEXAHYDRO-7-METHYL-8-[2-[(2R,4R)-TETRAHYDRO-4-HYDROXY-6-OXO-2H-PYRAN-2-YL]ETHYL]-1-NAPHTHALENOL; Alpha-methyltryptamine; alpha-N-Acetyl-D-galactosamine; (3AALPHA,4ALPHA,7ALPHA,7AALPHA)-3A,4,7,7A-TETRAHYDRO-2-(4-NITRO-1-NAPHTHALENYL)-4,7-ETHANO-1H-ISOINDOLE-1,3(2H)-DIONE; Alpha-Phosphoribosylpyrophosphoric Acid; (3AR,6R,6AS)-6-((S)-((S)-CYCLOHEX-2-ENYL)(HYDROXY)METHYL)-6A-METHYL-4-OXO-HEXAHYDRO-2H-FURO[3,2-C]PYRROLE-6-CARBALDEHYDE; (3aS)-3a-hydroxy-7-methyl-1-phenyl-1,2,3,3a-tetrahydro-4H-pyrrolo[2,3-b]quinolin-4-one; Aminodi(Ethyloxy)Ethylaminocarbonylbenzenesulfonamide; (3aS,4R,9bR)-2,2-difluoro-4-(4-hydroxyphenyl)-6-(methoxymethyl)-1,2,3,3a,4,9b-hexahydrocyclopenta[c]chromen-8-ol; ANILINOMETHYL GLUCO-PHENYLIMIDAZOLE; (3AS,4R,9BR)-4-(4-HYDROXYPHENYL)-1,2,3,3A,4,9B-HEXAHYDROCYCLOPENTA[C]CHROMEN-9-OL; anti-alpha5Beta1-integrin antibody; Antihemophilic Factor (Recombinant); Antihemophilic Factor (Recombinant), PEGylated; (3AS,4R,9BR)-4-(4-HYDROXYPHENYL)-6-(METHOXYMETHYL)-1,2,3,3A,4,9B-HEXAHYDROCYCLOPENTA[C]CHROMEN-8-OL; autologous adipose stem cell therapy; (1S,3R,4S,5S,7S)-4-{[2-(4-METHOXYPHENOXY)-2-METHYLPROPANOYL]AMINO}ADAMANTAN E-1-CARBOXAMIDE; autologous fibroblast transplant; BENZOYL-TYROSINE-ALANINE-METHYL KETONE; (1S,3S,5S)-2-{(2S)-2-amino-2-[(1R,3S,5R,7S)-3-hydroxytricyclo[3.3.1.1˜3,7˜]dec-1-yl]acetyl}-2-azabicyclo[3.1.0]hexane-3-carbonitrile; Beta-Dadf, Msa, Multisubstrate Adduct Inhibitor; (20S)-19,20,21,22-TETRAHYDRO-19-OXO-5H-18,20-ETHANO-12,14-ETHENO-6,10-METHENO-18H-BENZ[D]IMIDAZO[4,3-K][1,6,9,12]OXATRIAZA-CYCLOOCTADECOSINE-9-CARBONITRILE; Bis(5-Amidino-2-Benzimidazolyl)Methane Ketone Hydrate; (21S)-1AZA-4,4-DIMETHYL-6,19-DIOXA-2,3,7,20-TETRAOXOBICYCLO[19.4.0] PENTACOSANE; beta-D-galactopyranosyl-(1->4)-beta-D-galactopyranose; (2R)-({4-[AMINO(IMINO)METHYL]PHENYL}AMINO){5-ETHOXY-2-FLUORO-3-[(3R)-TETRAHYDROFURAN-3-YLOXY]PHENYL}ACETICACID; beta-phenyl-D-phenylalanyl-N-propyl-L-prolinamide; (2R)-2-(5-CHLORO-2-THIENYL)-N-{(3S)-1-[(1S)-1-METHYL-2-MORPHOLIN-4-YL-2-OXOETHYL]-2-OXOPYRROLIDIN-3-YL}PROPENE-1-SULFONAMIDE; BIPHENYL-4-YL-ACETALDEHYDE; (2R)-1-{4-[(4-ANILINO-5-BROMOPYRIMIDIN-2-YL)AMINO]PHENOXY}-3-(DIMETHYLAMINO)PROPAN-2-OL; bis(4-nitrophenyl) hydrogen phosphate; (2R)-2-{(1R)-2-oxo-1-[(2-thienylacetyl)amino]ethyl}-5,6-dihydro-2h-1,3-thiazine-4-carboxylic acid; beta-D-fructofuranose 1,6-bisphosphate; Bis(5-Amidino-2-Benzimidazolyl)Methanone; (2R)-2-{[(4-FLUORO-3-METHYLPHENYL)SULFONYL]AMINO}-N-HYDROXY-2-TETRAHYDRO-2H-PYRAN-4-YLACETAMIDE; Bis(5-Amidino-Benzimidazolyl)Methane Zinc; Bis(5-Amidino-Benzimidazolyl)Methanone Zinc; (1S,6BR,9AS,11R,11BR)-9A,11B-DIMETHYL-1-[(METHYLOXY)METHYL]-3,6,9-TRIOXO-1,6,6B,7,8,9,9A,10,11,11B-DECAHYDRO-3H-FURO[4,3,2-DE]INDENO[4,5-H][2]BENZOPYRAN-11-YL ACETATE; (2R)-3-{[{[(2S)-2,3-DIHYDROXYPROPYL]OXY}(HYDROXY)PHOSPHORYL]OXY}-2-[(9E)-HEXADEC-9-ENOYLOXY]PROPYL (9E)-OCTADEC-9-ENOATE; (2S)-4-METHYL-2-(3-PHENYLTHIOUREDO)-N-((3S)-TETRAHYDRO-2-HYDROXY-3-FURANYL)PENTANAMIDE; bis(molybdopterin)tungsten cofactor; (2S)-2-[3-(AMINOMETHYL)PH ENYL]-3-[(R)-[(1R)-1-{[(BENZYLOXY)CARBONYL]AMINO}-2-METHYLPROPYL](HYDROXY)PHOSPHORYL]PROPANOIC ACID; C-(1-Azido-Alpha-D-Glucopyranosyl) Formamide; (2S)-2-[3-(AMINOMETHYL)PHENYL]-3-{(R)-HYDROXY[(1R)-2-METHYL-1-{[(3-PHENYLPROPYL)SULFONYL]AMINO}PROPYL]PHOSPHORYL}PROPANOIC ACID; (1-HYDROXY-1-PHOSPHONO-2-[1,1′;4,1″]TERPHENYL-3-YL-ETHYL)-PHOSPHONIC ACID; (2S)-4-(2,5-DIFLUOROPHENYL)-N-METHYL-2-PHENYL-N-PIPERIDIN-4-YL-2,5-DIHYDRO-1H-PYRROLE-1-CARBOXAMIDE; C-1027 Aromatized Chromophore; C16-Fatty-Acyl-Substrate-Mimic; C1-INH (human pasteurized C1-inhibitor concentrate); Carboxymethylthio-3-(3-Chlorophenyl)-1,2,4-Oxadiazol; Carbobenzoxy-Pro-Lys-Phe-Y(Po2)-Aa-Pro-Ome; (1S)-2-{[{[(2S)-2,3-DIHYDROXYPROPYL]OXY}(HYDROXY)PHOSPHORYL]OXY}-1-[(PENTANOYLOXY)METHYL]ETHYL OCTANOATE; CBZ-LEU-LEU-TYR-CH2F; (2R)—N-[(2R)-2-(D1HYDROXYBORYL)-1-L-PROLYLPYRROLIDIN-2-YL]-N-[(5R)-5-(DIHYDROXYBORYL)-1-L-PROLYLPYRROLIDIN-2-YL]-L-PROLINAMIDE; (2R)-2-{[4-(benzylamino)-8-(1-methylethyl)pyrazolo[1,5-a][1,3,5]triazin-2-yl]amino}butan-1-ol; Chorionic Gonadotropin (Human); (2R,4S)-2-[(R)-BENZYLCARBAMOYL- PHENYLACETYL-METHYL]-5,5-DIMETHYL-THIAZOLIDINE-4-CARBOXYLIC ACID; CIS-(1R,2S)-2-AMINO-1,2,3,4-TETRAHYDRONAPHTHALEN-1-OL; (2S)-({(5Z)-5-[(5-ETHYL-2-FURYL)METHYLENE]-4-OXO-4,5-DIHYDRO-1,3-THIAZOL-2-YL}AMINO)(4-FLUOROPHENYL)ACETIC ACID; Co(Iii)-(Deuteroporphyrin Ix); (2R)-N˜4˜-hydroxy-2-(3-hydroxybenzyl)-N˜1˜-[(1S,2R)-2-hydroxy-2,3-dihydro-1H-inden-1-yl]butanediamide; Coagulation factor VIIa Recombinant Human; Coagulation Factor XIII A-Subunit (Recombinant); (2E)-3-{3-[(5-ETHYL-3-IODO-6-METHYL-2-OXO-1,2-DIHYDROPYRIDIN-4-YL)OXY]PHENYL}ACRYLONITRILE; (2E)-N-{4-[(3-bromophenyl)amino]quinazolin-6-yl}-4-(dimethylamino)but-2-enamide; (2S)-1-[4-({6-[(2,6-DIFLUOROPHENYL)AMINO]PYRIMIDIN-4-YL}AMINO)PHENOXY]-3-(DIMETHYLAMINO)PROPAN-2-OL; Cyclic Adenosine Monophosphate; Cyclic Guanosine Monophosphate; Cyclohexyl-Hexyl-Beta-D-Maltoside; Cysteine-Methylene-Carbamoyl-1,10-Phenanthroline; (2S)-2-(4-{[3-CHLORO-5-(TRIFLUOROMETHYL)PYRIDIN-2-YL]OXY}PHENOXY)PROPANOIC ACID; D-[(Amino)Carbonyl]Phenylalanine; (2S)-1-{[5-(3-METHYL-1H-INDAZOL-5-YL)PYRIDIN-3-YL]OXY}-3-PHENYLPROPAN-2-AMINE; D-1-(4-CHLOROPHENYL)-2-(ACETAMIDO)ETHANE BORONIC ACID; D-2-Amino-3-Phosphono-Propionic Acid; D-1-NAPHTHYL-2-ACETAMIDO-ETHANE BORONIC ACID; DECYL(DIMETHYL)PHOSPHINE OXIDE; (2S)-2-(3-bromophenyl)-3-(5-chloro-2-hydroxyphenyl)-1,3-thiazolidin-4-one; DEHYDRO-2(S)-AMINO-6-BORONOHEXANOIC ACID; Delta-(L-Alpha-Aminoadipoyl)-L-Cysteinyl-D-Vinylglycine; Delta-2-Albomycin A1; (2R)-2-(4-CHLOROPHENYL)-2-[4-(1H-PYRAZOL-4-YL)PHENYL]ETHANAMINE; Delta-Bis(2,2′-Bipyridine)Imidazole Osmium (Ii); (2S)-2-[(2,1,3-BENZOTHIADIAZOL-4-YLSULFONYL)AMINO]-2-PHENYL-N-PYRIDIN-4-YLACETAMIDE; D-ERITHRO-2,3-DIAMINO-BUTYRIC ACID; DERIVATIVE OF AKLANONIC ACID METHYL ESTER (AAME); D-Gluco-2,5-Anhydro-1-Deoxy-1-Phosphonohexitol-6-Phosphate; D-Glycero-D-Mannopyranose-7-Phosphate; diethyl [(1R)-1,5-diaminopentyl]boronate; (2S,3S)-3-{3-[4-(METHYLSULFONYL)PHENYL]-1,2,4-OXADIAZOL-5-YL}-1-OXO-1-PYRROLIDIN-1-YLBUTAN-2-AMINE; Diethyl 4-Methylbenzylphosphonate; (2s,4r)-1-Acetyl-N-[(1s)-4-[(Aminoiminomethyl)Amino]-1-(2-Benzothiazolylcarbonyl)Butyl]-4-Hydroxy-2-Pyrrolidinecarboxamide; Di-Stearoyl-3-Sn-Phosphatidylcholine; (2S,5R,8S,11R,12S,15S,18S,19S,E)-8-ISOBUTYL-18-((5S,6S)-6-METHOXY-3,5-DIMETHYL-7-PHENYLHEPTYL)-1,2,5,12,15,19-HEXAMETHYL-3,6,9,13,16,20,25-HEPTAOXO-1,4,7,10,14,17,21-HEPTAAZACYCLOPENTACOS-21-ENE-11,22-DICARBOXYLIC ACID; D-leucyl-N-(3-chlorobenzyl)-L-prolinamide; (2S,3S,4E,6E,8S,9S)-3-amino-9-methoxy-2,6,8-trimethyl-10-phenyldeca-4,6-dienoic acid; D-Myo-Inositol-1,4,5-Triphosphate; (25,45,5R)-2-ISOBUTYL-5-(2-THIENYL)-1-[4-(TRIFLUOROMETHYL)BENZOYL]PYRROLIDINE-2,4-DICARBOXYLIC ACID; (4-{4-[(TERT-BUTOXYCARBONYL)AMINO]-2,2-BIS(ETHOXYCARBONYL)BUTYL}PHENYL)SULFAMIC ACID; D-Myo-Inositol-Hexasulphate; (4ar,6s,8ar)-11-[8-(1,3-Dioxo-1,3-Dihydro-2h-Isoindol-2-Yl)Octyl]-6-Hydroxy-3-Methoxy-5,6,9,10-Tetrahydro-4ah-[1]Benzofuro[3a,3,2-Ef][2]Benzazepin-11-lum; Dodecanesulfonate ion; D-Para-Chlorophenyl-1-Acetamidoboronic Acid Alanine; D-Para-Chlorophenyl-1-Acteamidoboronic Acid Alanine; D-phenylalanyl-N-(3-chlorobenzyl)-L-prolinamide; (2s,5r,6r)-6-{[(6r)-6-(Glycylamino)-7-Oxido-7-Oxoheptanoyl]Amino}-3,3-Dimethyl-7-Oxo-4-Thia-1-Azabicyclo[3.2.0]Heptane-2-Carboxylate; D-phenylalanyl-N-(3-methylbenzyl)-L-prolinamide; (2S,4S,5R)-1-(4-TERT-BUTYLBENZOYL)-2-ISOBUTYL-5-(1,3-THIAZOL-2-YL)PYRROLIDINE-2,4-DICARBOXYLIC ACID; D-phenylalanyl-N-benzyl-L-prolinamide; (2S)—N-[(3S)-1-(2-AMINO-2-OXOETHYL)-2-OXO-1,2,3,4-TETRAHYDROQUINOLIN-3-YL]-2-CHLORO-2H-THIENO[2,3-B]PYRROLE-5-CARBOXAMIDE; (3R)-3-(FLUOROMETHYL)-7-(THIOMORPHOLIN-4-YLSULFONYL)-1,2,3,4-TETRAHYDROISOQUINOLINE; ETHYL HYDROGEN DIETHYLAMIDOPHOSPHATE; (3R)-3-(FLUOROMETHYL)-N-(3,3,3-TRIFLUOROPROPYL)-1,2,3,4-TETRAHYDROISOQUINOLINE-7-SULFONAMIDE; (2S)-N-[(3Z)-5-CYCLOPROPYL-3H-PYRAZOL-3-YLIDENE]-2-[4-(2-OXOIMIDAZOLIDIN-1-YL)PHENYL]PROPANAMIDE; GLYCYLALANYL-N-2-NAPHTHYL-L-PROLINEAMIDE; Flavin-N7 Protonated-Adenine Dinucleotide; (2R,6S)-6-{[methyl(3,4,5-trimethoxyphenyl)amino]methyl}-1,2,5,6,7,8-hexahydroquinazoline-2,4-diamine; (2S,3S)-3-FORMYL-2-({[(4-NITROPHENYL)SULFONYL]AMINO}METHYL)PENTANOIC ACID; Glycyl-L-Alpha-Amino-Epsilon-Pimelyl-D-Alanyl-D-Alanine; Guanosine 5′-(Trihydrogen Diphosphate), P′-D-Mannopyranosyl Ester; Guanosine 5′-Diphosphate Monophosphate; (2E)-2-({(2S)-2-CARBOXY-2-[(PHENOXYACETYL)AMINO]ETHOXY}IMINO)PENTANEDIOIC ACID; GUANOSINE-2′,3-O-METHYLIDENEPHOSPHONATE; HEXYLPHOSPHONIC ACID (R)-2-METHYL-3-PHENYLPROPYL ESTER; HEXYLPHOSPHONIC ACID (S)-2-METHYL-3-PHENYLPROPYL ESTER; (2e,3s)-3-Hydroxy-5′-[(4-Hydroxypiperidin-1-Yl)Sulfonyl]-3-Methyl-1,3-Dihydro-2,3′-Biindol-2′(1′ h)-One; HONH-BENZYLMALONYL-L-ALANYLGLYCINE-P-NITROANILIDE; Hydroxy-Phenyl-Acetic Acid 8-Methyl-8-Aza-Bicyclo[3.2.1]Oct-3-Yl Ester; IMIDAZO[2,1-A]ISOQUINOLINE-2-CARBOHYDRAZIDE; L-1-(4-CHLOROPHENYL)-2-(ACETAMIDO)ETHANE BORONIC ACID; L-1-NAPHTHYL-2-ACETAMIDO-ETHANE BORONIC ACID; L-alanyl-N-[(1S,2R)-1-benzyl-2-hydroxypropyl]-L-alaninamide; (17beta)-17-(cyanomethyl)-2-methoxyestra-1(10),2,4-trien-3-ylsulfamate; L-Alpha-Glycerophospho-D-Myo-Inositol-4,5-Bis-Phosphate; L-Alpha-Glycerophosphorylethanolamine; L-Alpha-Phosphatidyl-Beta-Oleoyl-Gamma-Palmitoyl-Phosphatidylethanolamine; Lambda-Bis(2,2′-Bipyridine)-(5-Methyl-2-2′-Bipyridine)-C9-Adamantane Ruthenium (Ii); Lambda-Bis(2,2′-Bipyridine)Imidazole Osmium (Ii); (1-HYDROXYHEPTANE-1,1-DIYL)BIS(PHOSPHONIC ACID); LCP-AtorFen (atorvastatin and and fenofibrate); L-PROLINE, 1-[(2S)-3-MERCAPTO-2-METHYL-1-OXOPROPYL]-4-(PHENYLTHIO)-, 4S; L-D-(a-Aminoadipoyl)-L-Cysteinyl-D-Valine; L-N(Omega)-Nitroarginine-(4r)-Amino-L-Proline Amide; L-N(Omega)-Nitroarginine-2,4-L-Diaminobutyric Amide; L-Naphthyl-1-Acetamido Boronic Acid Alanine; L-CYSTEIN-S-1-(IMINOMETHYL)-L-ORNITHINE; M-(N,N,N-Trimethylammonio)-2,2,2-Trifluoro-1,1-Dihydroxyethylbenzene; Maltosyl-Alpha (1,4)-D-Gluconhydroximo-1,5-Lactam; (1S,2R)-2-[(2,5-difluorophenyl)carbamoyl]cyclopropanecarboxylic acid; Methoxy polyethylene glycol-epoetin beta; methyl (3S)-3-[(tert-butoxycarbonyl)amino]-4-oxopentanoate; methyl 4-(2,3-dihydroxy-5-methylphenoxy)-2-hydroxy-6-methylbenzoate; Methyl 4,6-O-[(1r)-1-Carboxyethylidene]-Beta-D-Galactopyranoside; methyl 4-bromo-N-[8-(hydroxyamino)-8-oxooctanoyl]-L-phenylalaninate; Methyl(6s)-1-Thio-L-Manno-Hexodialdo-6,2-Pyranoside; Methyl-[4-(4-Piperidine-1-Ylmethyl-Phenyl)-Cyclohexyl]-Carbaminic Acid-(4-Chlorophenyl)-Ester; Methyl-2-S-(Alpha-D-Mannopyranosyl)-2-Thio-Alpha-D-Mannopyranoside; METHYLAMINO-PHENYLALANYL-LEUCYL-HYDROXAMIC ACID; Mixed Carbamic Phosphoric Acid Anhydride of 7,8-Diaminononanic Acid; (2r,3r,4s,5r)-2-Acetamido-3,4-Dihydroxy-5-Hydroxymethyl-Piperidinium; N-(1-Carboxy-3-Phenylpropyl)Phenylalanyl-Alpha-Asparagine; N-(2,3,4,5,6-Pentaflouro-Benzyl)-4-Sulfamoyl-Benzamide; N-(2,3-DIFLUORO-BENZYL)-4-SULFAMOYL-BENZAMIDE; N-(1-PHENYL-PROPYL)-FORMAMIDE; N-(2,6-dimethylphenyl)-5-phenylimidazo[1,5-a]pyrazin-8-amine; (2r)-2-{[Formyl(Hydroxy)Amino]Methyl}Hexanoic Acid; (2R)-2-({6-[benzyl(methyl)amino]-9-isopropyl-9H-purin-2-yl}amino)butan-1-ol; N-(2-Aminoethyl)-5-Chloroisoquinoline-8-Sulfonamide; N-(2-AMINOETHYL)-P-CHLOROBENZAMIDE; N-(2-chloro-6-methylphenyl)-8-[(3S)-3-methylpiperazin-1-yl]imidazo[1,5-a]quinoxalin-4-amine; N-(2-chlorophenyl)-5-phenylimidazo[1,5-a]pyrazin-8-amine; N-(2-Ferrocenylethyl)Maleimide; N-(2-Flouro-Benzyl)-4-Sulfamoyl-Benzamide; N-(2-OXOTETRAHYDROFURAN-3-YL)OCTANAMIDE; N′-(2s,3r)-3-Amino-4-Cyclohexyl-2-Hydroxy-Butano-N-(4-Methylphenyl)Hydrazide; N-(2-Thienylmethyl)-2,5-Thiophenedisulfonamide; N-(3,5-dibromo-4-hydroxyphenyl)-2,6-dimethylbenzamide; N-(3-(Aminomethyl)Benzyl)Acetamidine; N-(3,5-dibromo-4-hydroxyphenyl)-4-hydroxy-3,5-dimethylbenzamide; (2S)-1,3-benzothiazol-2-yl{2-[(2-pyridin-3-ylethyl)amino]pyrimidin-4-yl}ethanenitrile; N-(3,5-dimethoxyphenyl)imidodicarbonimidic diamide; (2S)-2-(BUTYRYLOXY)-3-HYDROXYPROPYL NONANOATE; N-(3-carboxypropanoyl)-L-norvaline; N-(3-chlorobenzyl)-1-(4-methylpentanoyl)-L-prolinamide; N-(3-cyano-4,5,6,7-tetrahydro-1-benzothien-2-yl)-2-fluorobenzamide; N-(3-cyclopropyl-1H-pyrazol-5-yl)-2-(2-naphthyl)acetamide; (2S)-2-ETHOXY-3-{4-[2-(10H-PHENOXAZIN-10-YL)ETHOXY]PHENYL}PROPANOIC ACID; N-(3-METHYLBUT-2-EN-1-YL)-9H-PURIN-6-AMINE; N-(3-Phenyl-2-Sulfanylpropanoyl)Phenylalanylalanine; N-(4-(2-((3-Chlorophenylmethyl)Amino)Ethyl)Phenyl)-2-Thiophecarboxamidine; N-(3-Propylcarbamoyloxirane-2-Carbonyl)-Isoleucyl-Proline; N-(4-CHLOROPHENYL)-1,2,3,4-TETRAHYDROISOQUINOLINE-7-SULFONAMIDE; N-(4-{[amino(imino)methyl]amino}butyl)-2,4′-bi-1,3-thiazole-4-carboxamide; N-(4-Aminobutanoyl)-S-(4-Methoxybenzyl)-L-Cysteinylglycine; N-(4-carbamimidoylbenzyl)-1-(3-phenylpropanoyl)-L-prolinamide; N-(4-carbamimidoylbenzyl)-1-(4-methylpentanoyl)-L-prolinamide; N-(4-chlorobenzyl)-N-methylbenzene-1,4-disulfonamide; N(4)-adenosyl-N(4)-methyl-2,4-diaminobutanoic acid; N-(4-CHLOROPHENYL)-3-(PHOSPHONOOXY)NAPHTHALENE-2-CARBOXAMIDE; N-(4-chlorophenyl)-2-[(pyridin-4-ylmethyl)amino]benzamide; N-(4-Methoxybenzyl)-N′-(5-Nitro-1,3-Thiazol-2-Yl)Urea; N-(4-METHYLBENZOYL)-4-BENZYLPIPERIDINE; (2Z,4E)-2-HYDROXY-6-OXO-6-PHENYLHEXA-2,4-DIENOIC ACID; N-(M-Trifluoromethylphenyl) Phenoxazine-4,6-Dicarboxylic Acid; N-(PARA-GLUTARAMIDOPHENYL-ETHYL)-PIPERIDINIUM-N-OXIDE; N-(P-CYANOPHENYL)-N′-DIPHENYLMETHYL-GUANIDINE-ACETIC ACID; N-(cyclopropylmethyl)-2′-methyl-5′-(5-methyl-1,3,4-oxadiazol-2-yl)biphenyl-4-carboxamide; N′-(6-aminopyridin-3-yl)-N-(2-cyclopentylethyl)-4-methyl-benzene-1,3-dicarboxamide; N-(6,7,9,10,17,18,20,21-octahydrodibenzo[b,k][1,4,7,10,13,16]hexaoxacyclooctadecin-2-yl)acetamide; N-(6-{[3-(4-Bromophenyl)-1,2-Benzisothiazol-6-Yl]Oxy}Hexyl)-N-Methylprop-2-En-1-Amine; N-[(2S,4S,6R)-2-(dihydroxymethyl)-4-hydroxy-3,3-dimethyl-7-oxo-4lambda˜4μ-thia-1-azabicyclo[3.2.0]hept-6-yl]-2-phenylacetamide; N-(4-OXO-5,6,7,8-TETRAHYDRO-4H-[1,3]THIAZOLO[5,4-C]AZEPIN-2-YL)ACETAMIDE; N-(4-phenoxyphenyl)-2-[(pyridin-4-ylmethyl)amino]nicotinamide; N-(4-PHENYLAMINO-QUINAZOLIN-6-YL)-ACRYLAMIDE; N-(4-sulfamoylphenyl)-1H-indazole-3-carboxamide; (2Z)-N-biphenyl-4-yl-2-cyano-3-hydroxybut-2-enamide; (3e)-3-[(4-Hydroxyphenyl)Imino]-1h-Indol-2(3h)-One; N-(5,5,8,8-Tetramethyl-5,8-Dihydro-Naphthalen-2-Yl)-Terephthalamic Acid; N-(5,6-DIPHENYLFURO[2,3-D]PYRIMIDIN-4-YL)GLYCINE; N-(5-{3,4-difluoro-2-[(2-fluoro-4-iodophenyl)amino]phenyl}-1,3,4-oxadiazol-2-yl)ethane-1,2-diamine; N′-(5-chloro-1,3-benzodioxol-4-yl)-N-(3-methylsulfonylphenyl)pyrimidine-2,4-diamine; (3E)-4-(2-HYDROXYPHENYL)-2-OXOBUT-3-ENOIC ACID; N-(5-chloro-1,3-benzodioxol-4-yl)-6-methoxy-7-(3-piperidin-1-ylpropoxy)quinazolin-4-amine; N-(5-Cyclopropyl-1h-Pyrazol-3-Yl)Benzamide; N-(5-ISOPROPYL-THIAZOL-2-YL)-2-PYRIDIN-3-YL-ACETAMIDE; N-(5-METHYL-1H-PYRAZOL-3-YL)-2-PHENYLQUINAZOLIN-4-AMINE; N-(6-Aminohexyl)-5-Chloro-1-Naphthalenesulfonamide; (3R)-3-cyclopentyl-7-[(4-methylpiperazin-1-yl)sulfonyl]-3,4-dihydro-2H-1,2-benzothiazine 1,1-dioxide; N-(biphenyl-4-ylsulfonyl)-D-leucine; N-(carboxycarbonyl)-D-phenylalanine; (3r)-4-(P-Toluenesulfonyl)-1,4-Thiazane-3-Carboxylicacid-L-Phenylalanine Ethyl Ester; N-(dibenzo[b,d]thiophen-3-ylsulfonyl)-L-valine; (3R)-3-hydroxy-2,2-dimethyl-4-oxo-4-({3-oxo-3-[(2-sulfanylethyl)amino]propyl}amino)butyl 2,2-dimethylpropanoate; (3R)-4-[(3R)-3-AMINO-4-(2,4,5-TRIFLUOROPHENYL)BUTANOYL]-3-METHYL-1,4-DIAZEPAN-2-ONE; N-(pyridin-3-ylmethyl)aniline; N′-(Pyrrolidino[2,1-B]Isoindolin-4-On-8-Yl)-N-(Pyridin-2-Yl)Urea; (3R)—N-(4-CHLOROPHENYL)-3-(HYDROXYMETHYL)-1,2,3,4-TETRAHYDROISOQUINOLINE-7-SULFONAMIDE; N-(R-Carboxy-Ethyl)-Alpha-(S)-(2-Phenylethyl); N-(R-Carboxy-Ethyl)-Alpha-(S)-(2-Phenylethyl)Glycyl-L-Arginine-N-Phenylamide; (3R,4S)-1-[(4-AMINO-5H-PYRROLO[3,2-D]PYRIMIDIN-7-YL)METHYL]-4-[(METHYLSULFANYL)METHYL]PYRROLIDIN-3-OL; N-(tert-butyl)-4-[5-(pyridin-2-ylamino)quinolin-3-yl]benzenesulfonamide; N-(TRANS-4′-NITRO-4-STILBENYL)-N-METHYL-5-AMINO-PENTANOIC ACID; N,4-Dihydroxy-N-Oxo-3-(Sulfooxy)Benzenaminium; N,4-dimethyl-3-[(1-phenyl-1H-pyrazolo[3,4-d]pyrimidin-4-yl)amino]benzamide; N,N′-[biphenyl-4,4′-diyldi(2R)propane-2,1-diyl]dimethanesulfonamide; N,N-bis(3-(D-gluconamido)propyl)deoxycholamide; N,N′-Bis(4-Amino-2-Methylquinolin-6-Yl)Urea; (3R,4S)-1-{6-[3-(METHYLSULFONYL)PHENYL]PYRIMIDIN-4-YL}-4-(2,4,5-TRIFLUOROPHENYL)PYRROLIDIN-3-AMINE; N-[1-(5-bromo-2,3-dimethoxybenzyl)piperidin-4-yl]-4-sulfanylbutanamide; N-[1-(4-Bromophenyl)Ethyl]-5-Fluoro Salicylamide; (3R,4S,5S,7R,9E,11R,12R)-12-ETHYL-4-HYDROXY-3,5,7,11-TETRAMETHYLOXACYCLODODEC-9-ENE-2,8-DIONE; (3R,5Z,8S,9S,11E)-8,9,16-TRIHYDROXY-14-METHOXY-3-METHYL-3,4,9,10-TETRAHYDRO-1H-2-BENZOXACYCLOTETRADECINE-1,7(8H)-DIONE; N-[1H-INDOL-3-YL-ACETYL]GLYCINE ACID; N-[3-(1H-BENZIMIDAZOL-2-YL)-1H-PYRAZOL-4-YL]BENZAMIDE; N-[2-chloro-5-(trifluoromethyl)phenyl]imidodicarbonimidic diamide; N-[2-(1h-Indol-5-Yl)-Butyl]-4-Sulfamoyl-Benzamide; N-[2-(1-Maleimidyl)Ethyl]-7-Diethylaminocoumarin-3-Carboxamide; N-[2-(METHYLAMINO)ETHYL]-5-ISOQUINOLINESULFONAMIDE; N-[2-(2-methyl-1H-Indol-3-yl)ethyl]thiophene-2-carboxamide; N-[2-(2-Iodo-5-methoxy-1H-Indol-3-yl)ethyl]acetamide; N-[1H-INDOL-3-YL-ACETYL]VALINE ACID; (3S)-1-CYCLOHEXYL-N-(3,5-DICHLOROPHENYL)-5-OXOPYRROLIDINE-3-CARBOXAMIDE; N-[4-(2-Methylimidazo[1,2-a]Pyridin-3-Yl)-2-Pyrimidinyl]Acetamide; (3S)—N-(3-CHLORO-2-METHYLPHENYL)-1-CYCLOHEXYL-5-OXOPYRROLIDINE-3-CARBOXAMIDE; N-[4-(5-fluoro-6-methylpyridin-2-yl)-5-quinoxalin-6-yl-1H-Imidazol-2-yl]acetamide; N-[4-(AMINOSULFONYL)PHENYL]-2-MERCAPTOBENZAMIDE; N-[4-CHLORO-3-(PYRIDIN-3-YLOXYMETHYL)-PHENYL]-3-FLUORO-; N-[4-CLORO-3-(T-BUTYLOXOME)PHENYL-2-METHYL-3-FURAN-CARBOTHIAMIDE; (3S,5R,7R,8S,9S,10R)-7-(hydroxymethyl)-3-(4-methylphenyl)-1,6-dioxa-2-azaspiro[4.5]decane-8,9,10-triol; N-[4-Methyl-3-[[4-(3-Pyridinyl)-2-Pyrimidinyl]Amino]Phenyl]-3-Pyridinecarboxamide; N-[amino(imino)methyl]-2-(2,5-diphenyl-1H-pyrrol-1-yl)acetamide; N-[amino(imino)methyl]-2-[2-(2-chlorophenyl)-4-(4-propoxyphenyl)-3-thienyl]acetamide; N-[Isoleucinyl]-N′-[Adenosyl]-Diaminosufone; (4R)—N-[4-({[2-(DIMETHYLAMINO)ETHYL]AMINO}CARBONYL)-1,3-THIAZOL-2-YL]-4-METHYL-1-OXO-2,3,4,9-TETRAHYDRO-1H-BETA-CARBOLINE-6-CARBOXAMIDE; (3s,8ar)-3-(4-Hydroxybenzyl)Hexahydropyrrolo[1,2-a]Pyrazine-1,4-Dione; N-[Tosyl-D-Prolinyl]Amino-Ethanethiol; N-{[4-(but-2-yn-1-yloxy)phenyl]sulfonyl}-5-methyl-D-tryptophan; N˜3˜-(3-PYRIDIN-3-YLBENZYL)PYRIDINE-2,3-DIAMINE; N˜3˜-[3-(1H-INDOL-6-YL)BENZYL]PYRIDINE-2,3-DIAMINE; (3Z,5S,6R,7S,8R,8aR)-3-(octylimino)hexahydro[1,3]oxazolo[3,4-a]pyridine-5,6,7,8-tetrol; N-butyl-3-{[6-(9H-purin-6-ylamino)hexanoyl]amino}benzamide; (3Z,5S,6R,7S,8S,8aR)-3-(octylimino)hexahydro[1,3]oxazolo[3,4-a]pyridine-5,6,7,8-tetrol; N-cyclopropyl-2′,6-dimethyl-4′-(5-methyl-1,3,4-oxadiazol-2-yl)biphenyl-3-carboxamide; N-cyclohexyl-4-imidazo[1,2-a]pyridin-3-yl-N-methylpyrimidin-2-amine; N-cyclooctylglycyl-N-(4-carbamimidoylbenzyl)-L-prolinamide; N-cyclohexyl-3-[3-(trifluoromethyl)phenyl][1,2,4]triazolo[4,3-b]pyridazin-6-amine; N-cyclopropyl-4-methyl-3-[1-(2-methylphenyl)phthalazin-6-yl]benzamide; N-cyclopropyl-4-methyl-3-{2-[(2-morpholin-4-ylethyl)amino]quinazolin-6-yl}benzamide; (4aS,4bR,10bS,12aS)-12a-methyl-1,3-dioxo-2-(pyridin-3-ylmethyl)-1,2,3,4,4a,4b,5,6,10b,11,12,12a-dodecahydronaphtho[2,1-f]isoquinolin-8-ylsulfamate; N-cyclopropyl-6-[(6,7-dimethoxyquinolin-4-yl)oxy]naphthalene-1-carboxamide; Ndelta-(N′-Sulphodiaminophosphinyl)-L-Ornithine; N-Dodecyl-N,N-Dimethyl-3-Ammonio-1-Propanesulfonate; (4R)-7,8-dichloro-1′,9-dimethyl-1-oxo-1,2,4,9-tetrahydrospiro[beta-carboline-3,4′-piperidine]-4-carbonitrile; Nicotinamide 8-Bromo-Adenine Dinucleotide Phosphate; (4R,2S)-5′-(4-(4-CHLOROBENZYLOXY)PYRROLIDIN-2-YLMETHANESULFONYL)ISOQUINOLINE; (4Z)-2,8:7,12:11,15:14,18:17,22-PENTAANHYDRO-4,5,6,9,10,13,19,20,21-NONADEOXY-D-ARABINO-D-ALLO-D-ALLO-DOCOSA-4,9,20-TRIENITOL; Nicotinamide Adenine Dinucleotide Cyclohexanone; Nicotinamide-Adenine-Dinucleotide-5-Hydroxy-4-Oxonorvaline; N-methyl-1-(2-thiophen-2-ylphenyl)methanamine; N-METHYL-1-[4-(9H-PURIN-6-YL)PHENYL]METHANAMINE; N-METHYL-N-[(1R)-1-METHYL-2-PHENYLETHYL]PROP-2-EN-1-AMINE; N-Methyl-N-[3-(6-Phenyl[1,2,4]Triazolo[4,3-B]Pyridazin-3-Yl)Phenyl]Acetamide; N-Methyl-N-Propargyl-3-(2,4-Dichlorophenoxy)Propylamine; (5-{3-[5-(PIPERIDIN-1-YLMETHYL)-1H-INDOL-2-YL]-1H-INDAZOL-6-YL}-2H-1,2,3-TRIAZOL-4-YL)METHANOL; N-Octanoyl-B-D-Fructofuranosyl-a-D-Glucopyranoside, Sucrose Monocaproylate; N-oxo-2-[(4-phenylphenyl)sulfonylamino]ethanamide; (5-(aminomethyl)-2H-spiro[benzofuran-3,4′-piperidine]-1)(5-(phenylethynyl)furan-2-yl)methanone; N-PYRIDOXYL-2-METHYL-L-GLUTAMIC ACID-5′-MONOPHOSPHATE; N-Pyridoxyl-7-Keto-8-Aminopelargonic Acid-5′-Monophosphate; N-PYRIDOXYL-D-GLUTAMIC ACID-5′-MONOPHOSPHATE; 0-(2-Acetamido-2-Deoxy-Alpha-D-Galactopyranosyl)-L-Serine; 0,0-DIETHYL HYDROGEN THIOPHOSPHATE; (5E)-12-CHLORO-13,15-DIHYDROXY-4,7,8,9-TETRAHYDRO-2-BENZOXACYCLOTRIDECINE-1,10(3H,11H)-DIONE; ORTHONITROPHENYL-BETA-D-FUCOPYRANOSIDE; P-(2′-Iodo-5′-Thenoyl)Hydrotropic Acid; (5R)-5-(4-{[(2R)-6-HYDROXY-2,5,7,8-TETRAMETHYL-3,4-DIHYDRO-2H-CHROMEN-2-YL]METHOXY}BENZYL)-1,3-THIAZOLIDINE-2,4-DIONE; P1-(5-Adenosyl)P5-(5′-Thymidyl)Pentaphosphate; P1-(Adenosine-5′-P5-(Uridine-5′)Pentaphosphate; PA mAb (human monoclonal antibody to Bacillus anthracis protective antigen); PANTOTHENYL-AMINOETHANOL-11-PIVALIC ACID; Pantothenyl-Aminoethanol-Acetate Pivalic Acid; O-[2-(1,3-dioxo-1,3-dihydro-2H-isoindol-2-yl)ethyl] (4-bromophenyl)thiocarbamate; O-[2-(1,3-dioxo-1,3-dihydro-2H-isoindol-2-yl)ethyl] (4-chlorophenyl)thiocarbamate; O-[2-(1,3-dioxo-1,3-dihydro-2H-isoindol-2-yl)ethyl] (4-iodophenyl)thiocarbamate; O6-CYCLOHEXYLMETHOXY-2-(4′-SULPHAMOYLANILINO) PURINE; (5R)-4-HYDROXY-3,5-DIMETHYL-5-[(1E,3E)-2-METHYLPENTA-1,3-DIENYL]THIOPHEN-2(5H)-ONE; PARA-NITROPHENYL 1-THIO-BETA-D-GLUCOPYRANOSIDE; PARA-NITROPHENYL PHOSPHONOBUTANOYL D-ALANINE; PARA-NITROPHENYL PHOSPHONOBUTANOYL L-ALANINE; PARA-NITROPHENYLPHOSPHONOBUTANOYL-GLYCINE; PHENYL[1-(N-SUCCINYLAMINO)PENTYL]PHOSPHONATE; PHENYL-5-(1H-PYRAZOL-3-YL)-1,3-THIAZOLE; (5r)-5-Amino-6-Hydroxyhexylcarbamic Acid; Phosphoaminophosphonic Acid-Adenylate Ester; (5r,6s,7s,8s)-5-Hydroxymethyl-6,7,8-Trihydroxy-Tetrazolo[1,5-a]Piperidine; Phosphoric Acid-2′-[2′-Deoxy-Uridine]Ester-5′-Guanosine Ester; (5R)-N,N-DIETHYL-5-METHYL-2-[(THIOPHEN-2-YLCARBONYL)AMINO]-4,5,6,7-TETRAHYDRO-1-BENZOTHIOPHENE-3-CARBOXAMIDE; (5S)-2-{[(1S)-1-(2-fluorophenyl)ethyl]amino}-5-methyl-5-(trifluoromethyl)-1,3-thiazol-4(5H)-one; Phosphomethylphosphonic Acid Guanosyl Ester; (5S)-5-(2-amino-2-oxoethyl)-4-oxo-N-[(3-oxo-3,4-dihydro-2H-1,4-benzoxazin-6-yl)methyl]-3,4,5,6,7,8-hexahydro[1]benzothieno[2,3-d]pyrimidine-2-carboxamide; PIPERIDINE-2-CARBOXYLIC ACID TERT-BUTYLAMIDE; Pmp-Hydroxyisoxazole, Pyridoxamine-5-Phosphate-Hydroxyisoxazole; PROGESTERONE-11-ALPHA-OL-HEMISUCCINATE; (5Z)-12-CHLORO-13,15-DIHYDROXY-4,7,8,9-TETRAHYDRO-2-BENZOXACYCLOTRIDECINE-1,10(3H,11H)-DIONE; rGLP-1 (continuous infusion of glucagon-like peptide 1); rhGAD65 (recombinant human glutamic acid decarboxylase); (5Z)-13-CHLORO-14,16-DIHYDROXY-3,4,7,8,9,10-HEXAHYDRO-1H-2-BENZOXACYCLOTETRADECINE-1,11(12H)-DIONE; S-(N-Hydroxy-N-Bromophenylcarbamoyl)Glutathione; S-(N-Hydroxy-N-Iodophenylcarbamoyl)Glutathione; S,S′-(1,3-Phenylene-Bis(1,2-Ethanediyl))Bis-Isothiourea; S,S′-(1,4-Phenylene-Bis(1,2-Ethanediyl))Bis-Isothiourea; Selenazole-4-Carboxyamide-Adenine Dinucleotide; (5Z)-5-[(5-ETHYL-2-FURYL)METHYLENE]-2-{[(S)-(4-FLUOROPHENYL)(1H-TETRAZOL-5-YL)METHYL]AMINO}-1,3-THIAZOL-4(5H)-ONE; S-METHYL-4,5,6,7-TETRABROMO-BENZIMIDAZOLE; Sodium phosphate, dibasic, heptahydrate; (6E)-7-{6-[(1E)-OCT-1-ENYL]-2,3-DIAZABICYCLO[2.2.1]HEPT-2-EN-5-YL}HEPT-6-ENOIC ACID; (6AR,11AS,11BR)-10-ACETYL-9-HYDROXY-7,7-DIMETHYL-2,6,6A,7,11A,11B-HEXAHYDRO-11H-PYRROLO[1′,2′:2,3]ISOINDOLO[4,5,6-CD]INDOL-11-ONE; Sp-Adenosine-3′,5′-Cyclic-Monophosphorothioate; Sulfoquinovose-Uridine-C1,5′-Diphosphate; Tazobactam Trans-Enamine Intermediate; (6-METHYL-3,4-DIHYDRO-2H-CHROMEN-2-YL)METHYLPHOSPHINATE; Tert-Butyl(1s)-1-Cyclohexyl-2-Oxoethylcarbamate; TETRAHEDRAL INTERMEDIATE OF BLASTICIDIN S; trans-4-(7-carbamoyl-1H-benzimidazol-2-yl)-1-propylpiperidinium; Trans-6-(2-Phenylcyclopropyl)-Naphthalene-2-Carboxamidine; tripotassium (1R)-4-biphenyl-4-yl-1-phosphonatobutane-1-sulfonate; (6r,7r)-3-[(Acetyloxy)Methyl]-7-{[(6s)-6-(Glycylamino)-7-Oxido-7-Oxoheptanoyl]Amino}-8-Oxo-5-Thia-1-Azabicyclo[4.2.0]Octane-2-Carboxylate; Uridine-5′-Diphosphate-2-Deoxy-2-Fluoro-Alpha-D-Galactose; Uridine-5′-Diphosphate-4-Deoxy-4-Fluoro-Alpha-D-Galactose; (8E,10S,12Z)-10-hydroxy-6-oxooctadeca-8,12-dienoic acid; 4-[[2-[[4-chloro-3-(trifluoromethyl)phenyl]amino]-3H-benzimidazol-5-yl]oxy]-N-methyl-pyridine-2-carboxamide; Vitamin B6 Complexed with 2-Amino-Hexanoic Acid; Vitamin B6 Complexed with 2-Amino-Pentanoic Acid; Uridine-5′-Diphosphate-N-Acetylmuramoyl-L-Alanine-D-Glutamate; 4-[1-(2,6-dichlorobenzyl)-2-methyl-1H-imidazol-4-yl]pyrimidin-2-amine; 4-[5-(2-CARBOXY-1-FORMYL-ETHYLCARBAMOYL)-PYRIDIN-3-YL]-BENZOIC ACID; 4-[4-AMINO-6-(5-CHLORO-1H-INDOL-4-YLMETHYL)-[1,3,5]TRIAZIN-2-YLAMINO]-BENZONITRILE; 4-[4-AMINO-6-(2,6-DICHLORO-PHENOXY)-[1,3,5]TRIAZIN-2-YLAMINO]-BENZONITRILE; 4-[5-(3-IODO-PHENYL)-2-(4-METHANESULFINYL-PHENYL)-1H-IMIDAZOL-4-YL]-PYRIDINE; (9Z, 11E, 13S)-13-hydroxyoctadeca-9,11-dienoic acid; 4-Bromo-3-(5-Carboxy-4′-Chloro-2′-Fluorophenyl)-1-Methyl-5-Trifluoromethyl-Pyrazol; 4-[5-[2-(1-Phenyl-Ethylamino)-Pyrimidin-4-Yl]-1-Methyl-4-(3-Trifluoromethylphenyl)-1h-Imidazol-2-Yl]-Piperidine; 4-BROMO-2-FLUORO-N-[(4E)-6-METHOXY-7-[(1-METHYLPIPERIDIN-4-YL)METHOXY]QUINAZOLIN-4(1H)-YLIDEN]ANILINE; 4-[5-(Trans-4-Aminocyclohexylamino)-3-Isopropylpyrazolo[1,5-a]Pyrimidin-7-Ylamino]-N,N-Dimethylbenzenesulfonamide; 4-BROMO-3-(CARBOXYMETHOXY)-5-(4-HYDROXYPHENYL)THIOPHENE-2-CARBOXYLIC ACID; (E)-(45,65)-8-METHYL-6-((S)-3-METHYL-2-{(S)-2-[(5-METHYL-ISOXAZOLE-3-CARBONYL)-AMINO]-PROPIONYLAMINO}-BUTYRYLAMINO)-5-OXO-4-((R)-2-OXO-PYRROLIDIN-3-YLMETHYL)-NON-2-ENOIC ACID BENZYL ESTER; 4-{(Z)-[2-[3-(Methylsulfanyl)Propanoyl]-5-Oxo-1-(2-Oxoethyl)-1,5-Dihydro-4h-Imidazol-4-Ylidene]Methyl}Benzenolate; (E)-(S)-4-[(S)-4-METHYL-2-((S)-3-METHYL-2{(S)-2-[(5-METHYL-ISOXAZOLE-3-CARBONYL)-AMINO]-PROPIONYLAMINO}-BUTYRYLAMINO)-PENTANOYLAMINO]-5-((S)-2-OXO-PYRROLIDIN-3-YL)-PENT-2-ENOIC ACID ETHYL ESTER; 4-{(1E)-3-OXO-3-[(2-PHENYLETHYL)AMINO]PROP-1-EN-1-YL}-1,2-PHENYLENE DIACETATE; 4-BROMO-3-(CARBOXYMETHOXY)-5-PHENYLTHIOPHENE-2-CARBOXYLIC ACID; 4-{[(14beta,17alpha)-3-hydroxyestra-1,3,5(10)-trien-17-yl]oxy}-4-oxobutanoic acid; 4-{4-[2-(1A,7A-DIMETHYL-4-OXY-OCTAHYDRO-1-OXA-4-AZA-CYCLOPROPA[A]NAPHTHALEN-4-YL)-ACETYLAMINO]-PHENYLCARBAMOYL}-BUTYRIC ACID; 4-{4-[3-(2,4-DICHLORO-BENZOYL)-UREIDO]-2,3-DIMETHYL-PHENOXY}-BUTYRIC ACID; 4-{4-[4-(3-AMINOPROPOXY)PHENYL]-1H-PYRAZOL-5-YL}-6-CHLOROBENZENE-1,3-DIOL; (R)-1-(4-(4-(HYDROXYMETHYL)-1,3,2-DIOXABOROLAN-2-YL)PHENYL)GUANIDINE; 4-{5-[(Z)-(2,4-DIOXO-1,3-THIAZOLIDIN-5-YLIDENE)METHYL]FURAN-2-YL}BENZENESULFONAMIDE; 4-{5-[(Z)-(2-IMINO-4-OXO-1,3-THIAZOLIDIN-5-YLIDENE)METHYL]-2-FURYL}-N-METHYLBENZENESULFONAMIDE; 4-{5-[(Z)-(2-IMINO-4-OXO-1,3-THIAZOLIDIN-5-YLIDENE)METHYL]FURAN-2-YL}-2-(TRIFLUOROMETHYL)BENZENESULFONAMIDE; (E)-3,4-DIHYDROXY-N′-[(2-METHOXYNAPHTHALEN-1-YL)METHYLENE]BENZOHYDRAZIDE; 4-{5-[(Z)-(2-IMINO-4-OXO-1,3-THIAZOLIDIN-5-YLIDENE)METHYL]FURAN-2-YL}BENZENESULFONAMIDE; 4-{5-[(Z)-(2-IMINO-4-OXO-1,3-THIAZOLIDIN-5-YLIDENE)METHYL]FURAN-2-YL}BENZOIC ACID; (R)-1-(4-(4-(HYDROXYMETHYL)-1,3,2-DIOXABOROLAN-2-YL)BENZYL)GUANIDINE; (E)-3-(5((5-(4-CHLOROPHENYL)FURAN-2-YL)METHYLENE)-4-OXO-2-THIOXOTHIAZOLIDIN-3-YL)PROPANOIC ACID; 4-{[(2,6-difluorophenyl)carbonyl]amino}-N-[(3S)-piperidin-3-yl]-1H-pyrazole-3-carboxamide; (S)-1-PHENYL-1-[4-(9H-PURIN-6-YL)PHENYL]METHANAMINE; 4-(1R,3AS,4R,8AS,8BR)-[1-DIFLUOROMETHYL-2-(4-FLUOROBENZYL)-3-OXODECAHYDROPYRROLO[3,4-A]PYRROLIZIN-4-YL]BENZAMIDINE; 4-(2-AMINOETHOXY)-3,5-DICHLORO-N-[3-(1-METHYLETHOXY)PHENYL]BENZAMIDE; 4-(2-chlorophenyl)-8-(2-hydroxyethyl)-6-methylpyrrolo[3,4-e]indole-1,3(2H,6H)-dione; 4-Amino-N-{4-[2-(2,6-Dimethyl-Phenoxy)-Acetylamino]-3-Hydroxy-1-Isobutyl-5-Phenyl-Pentyl}-Benzamide; (R)┌ÇöN[2-[1-(aminoiminomethyl)-3-piperidinyl]-1-oxoethyl]-4-(phenylethynyl)-1-phenylalanine methylester; 4-(2-HYDROXY-4-FLUOROPHENYLTHIO)-BUTYLPHOSPHONIC ACID; 4-(5,11-DIOXO-5H-INDENO[1,2-C]ISOQUINOLIN-6(11H)-YL)BUTANOATE; 4-[(5-CHLOROINDOL-2-YL)SULFONYL]-2-(2-METHYLPROPYL)-1-[[5-(PYRIDIN-4-YL)PYRIMIDIN-2-YL]CARBONYL]PIPERAZINE; (S)-2-[(R)-3-amino-4-(2-fluorophenyl)butyryl]-1,2,3,4-tetrahydroisoquinoline-3-carboxamide; 4-(5-BENZENESULFONYLAMINO-1-METHYL-1H-BENZOIMIDAZOL-2-YLMETHYL)-BENZAMIDINE; 4-[2-(3-Benzyloxycarbonylamino-4-Cyclohexyl-1-Hydroxy-2-Oxo-Butylamino)-5-Guanidino-Pentanoylamino]-4-(1-Carboxy-2-Cyclohexyl-Ethylcarbamoyl)-Butyric Acid; 4-(4-CHLORO-PHENYL)-1-{3-[2-(4-FLUORO-PHENYL)-[1,3]DITHIOLAN-2-YL]-PROPYL}-PIPERIDIN-4-OL; 4-(4-CHLOROPHENYL)-4-[4-(1H-PYRAZOL-4-YL)PHENYL]PIPERIDINE; 4-[3-Oxo-3-(5,5,8,8-Tetramethyl-5,6,7,8-Tetrahydro-Naphthalen-2-Yl)-Propenyl]-Benzoic Acid; 4-[4-(1-Amino-1-Methylethyl)Phenyl]-5-Chloro-N-[4-(2-Morpholin-4-Ylethyl)Phenyl]Pyrimidin-2-Amine; (S)-2-Amino-3-(4h-Selenolo[3,2-B]-Pyrrol-6-Yl)-Propionic Acid; 4-[4-(2,4,6-TRIMETHYL-PHENYLAMINO)-PYRIMIDIN-2-YLAMINO]-BENZONITRILE; [(2-Ethoxy-1-Naphthoyl)Amino]Methylboronic Acid; 4-[4-(4-CHLORO-PHENOXY)-BENZENESULFONYLMETHYL]-TETRAHYDRO-PYRAN-4-CARBOXYLIC ACID HYDROXYAMIDE; 4-HYDROXY-3-[(1S,3R)-3-HYDROXY-1-PHENYLBUTYL]-2H-CHROMEN-2-ONE; 4-HYDROXY-3-[(1S,3S)-3-HYDROXY-1-PHENYLBUTYL]-2H-CHROMEN-2-ONE; 4-PHENOXY-N-(PYRIDIN-2-YLMETHYL)BENZAMIDE; 4-PHOSPHONOOXY-PHENYL-METHYL-[4-PHOSPHONOOXY]BENZEN; 4-CHLORO-6-(4-{4-[4-(METHYLSULFONYL)BENZYL]PIPERAZIN-1-YL}-1H-PYRAZOL-5-YL)BENZENE-1,3-DIOL; 4-CHLORO-6-(4-PIPERAZIN-1-YL-1H-PYRAZOL-5-YL)BENZENE-1,3-DIOL; 4-HYDROXY-3-NITROPHENYLACETYL-EPSILON-AMINOCAPROIC ACID ANION; 4-HYDROXY-5-IODO-3-NITROPHENYLACETYL-EPSILON-AMINOCAPROIC ACID ANION; 4-HYDROXY-7-METHOXY-3-(1-PHENYL-PROPYL)-CHROMEN-2-ONE; (S)—N-(1-(3-CHLORO-4-FLUOROPHENYL)-2-HYDROXYETHYL)-4-(4-(3-CHLOROPHENYL)-1H-PYRAZOL-3-YL)-1H-PYRROLE-2-CARBOXAMIDE; 4-METHYL-5-{(2E)-2-[(4-MORPHOLIN-4-YLPHENYL)IMINO]-2,5-DIHYDROPYRIMIDIN-4-YL}-1,3-THIAZOL-2-AMINE; 4-NITROPHENYL-(6-S-ALPHA-D-XYLOPYRANOSYL)-BETA-D-GLUCOPYRANOSIDE; 4-CHLORO-8-METHYL-7-(3-METHYL-BUT-2-ENYL)-6,7,8,9-TETRAHYDRO-2H-2,7,9A-TRIAZA-BENZO[CD]AZULENE-1-THIONE; [(1S)-1-(5-CHLORO-1-BENZOTHIEN-3-YL)-2-(2-NAPHTHYLAMINO)-2-OXOETHYL]PHOSPHONIC ACID; 4-tert-butyl-N′-[(1E)-(3,5-dibromo-2,4-dihydroxyphenyl)methylidene]benzohydrazide; 5-(2-ETHOXYETHYL)-5-[4-(4-FLUOROPHENOXY)PHENOXY]PYRIMIDINE-2,4,6(1H,3H,5H)-TRIONE; 4-chloro-N-[(2S)-2-methyl-2,3-dihydro-1H-indol-1-yl]-3-sulfamoylbenzamide; 4-chloro-N′-[(1E)-(3,5-dibromo-2,4-dihydroxyphenyl)methylidene]benzohydrazide; 5-(2-fluorophenyl)-N-(pyridin-4-ylmethyl)pyrazolo[1,5-a]pyrimidin-7-amine; 4-Dimethylamino-N-(6-Hydroxycarbamoyethyl)Benzamide-N-Hydroxy-7-(4-Dimethyla Minobenzoyl)Aminoheptanamide; 5-(2-PHENYLPYRAZOLO[1,5-A]PYRIDIN-3-YL)-1H-PYRAZOLO[3,4-C]PYRIDAZIN-3-AMINE; 5-(3-(2,6-dichloro-4-(4,5-dihydro-2-oxazolyl)phenoxy)propyl)-3-methyl isoxazole; 4′-Deaza-1′-Aza-2′-Deoxy-1′-(9-Methylene)-Immucillin-H, (3r,4r)-N-[9-Deazahypoxanthin-9-Yl)Methyl]-4-Hydroxymethyl-Pyrrolidin-3-Ol; 4-Deoxy-4-((5-Hydroxymethyl-2,3,4-Trihydroxycyclohex-5,6-Enyl)Amino)Fructose; 4-bromo-N′-[(1E)-(3,5-dibromo-2,4-dihydroxyphenyl)methylidene]benzohydrazide; 4-Carbamoyl-1-Beta-D-Ribofuranosyl-Imidazolium-5-Olate-5′-Phosphate; [(4S)-2,2-DIMETHYL-1,3-DIOXOLAN-4-YL]METHYL HYDROGEN HEX-5-ENYLPHOSPHONATE; 4-AMINO-N-[(2-SULFANYLETHYL)CARBAMOYL]BENZENESULFONAMIDE; 4-{[5-chloro-4-(1H-indol-3-yl)pyrimidin-2-yl]amino}-N-ethylpiperidine-1-carboxamide; 5-(2,6-dichlorophenyl)-2-[(2,4-difluorophenyl)sulfanyl]-6H-pyrimido[1,6-b]pyridazin-6-one; 5-(5-(6-CHLORO-4-(4,5-DIHYDRO-2-OXAZOLYL)PHENOXY)PENTYL)-3-METHYLISOXAZOLE; 5-(5-CHLORO-2,4-DIHYDROXYPHENYL)-N-ETHYL-4-(4-METHOXYPHENYL)-1H-PYRAZOLE-3-CARBOXAMIDE; 5-(5-CHLORO-2,4-DIHYDROXYPHENYL)-N-ETHYL-4-(4-METHOXYPHENYL)ISOXAZOLE-3-CARBOXAMIDE; 5-(5-chloro-2,4-dihydroxyphenyl)-N-ethyl-4-[4-(morpholin-4-ylmethyl)phenyl]isoxazole-3-carboxamide; 5-(5-CHLORO-2,4-DIHYDROXYPHENYL)-N-ETHYL-4-PIPERAZIN-1-YL-1H-PYRAZOLE-3-CARBOXAMIDE; 5-(5-CHLORO-2-THIENYL)-N-{(3S)-1-[(1S)-1-METHYL-2-MORPHOLIN-4-YL-2-OXOETHYL]-2-OXOPYRROLIDIN-3-YL}-1H-1,2,4-TRIAZOLE-3-SULFONAMIDE; 5-(5-chloro-7H-pyrrolo[2,3-d]pyrimidin-4-yl)-4,5,6,7-tetrahydro-1H-imidazo[4,5-c]pyridine; 5-(3,5-DICHLOROPHENYL)THIO-4-ISOPROPYL-1-(PYRIDIN-4-YL-METHYL)-1H-IMIDAZOL-2-YL-METHYL CARBAMATE; 5-[3-(2-METHOXYPHENYL)-1H-PYRROLO[2,3-B]PYRIDIN-5-YL]-N,N-DIMETHYLPYRIDINE-3-CARBOXAMIDE; [1-(6-{6-[(1-methylethyl)amino]-1H-indazol-1-yl}pyrazin-2-yl)-1H-pyrrol-3-yl]acetic acid; [2-(1-Amino-2-Hydroxy-Propyl)-4-(4-Fluoro-1h-Indol-3-Ylmethyl)-5-Hydroxy-Imidazol-1-Yl]-Acetic Acid; 5-{[(4-AMINO-3-CHLORO-5-FLUOROPHENYL)SULFONYL]AMINO}-1,3,4-THIADIAZOLE-2-SULFONAMIDE; 5-AMINO-2-{4-[(4-AMINOPHENYL)SULFANYL]PHENYL}-1H-ISOINDOLE-1,3(2H)-DIONE; 5-[4-(1-Carboxymethyl-2-Oxo-Propylcarbamoyl)-Benzylsulfamoyl]-2-Hydroxy-Benzoic Acid; 5-[5,6-BIS(METHYLOXY)-1H-BENZIMIDAZOL-1-YL]-3-{[1-(2-CHLOROPHENYL)ETHYL]OXY}-2-THIOPHENECARBOXAMIDE; 5-{2-[1-(1-METHYL-PROPYL)-7A-METHYL-OCTAHYDRO-INDEN-4-YLIDENE]-ETHYLIDENE}-2-METHYLENE-CYCLOHEXANE-1,3-DIOL; 5-{3-[3-(2,4-DICHLORO-BENZOYL)-UREIDO]-2-METHYL-PHENOXY}-PENTANOIC ACID; 5-{4-[(3,5-DIFLUOROBENZYL)AMINO]PHENYL}-6-ETHYLPYRIMIDINE-2,4-DIAMINE; 5-ACETAMIDO-5,6-DIHYDRO-4-HYDROXY-6-ISOBUTOXY-4H-PYRAN-2-CARBOXYLIC ACID; 5′-ACETYL-4-{[(2,4-DIMETHYLPHENYL)SULFONYL]AMINO}-2,2′-BITHIOPHENE-5-CARBOXYLIC ACID; [2-Cytidylate-O′-Phosphonyloxyl]-Ethyl-Trimethyl-Ammonium; 5-[2,3-Dichloro-4-(5-{1-[2-(2-Guanidino-4-Methyl-Pentanoylamino)-Acetyl]-Piperidin-4-Yl}-1-Methyl-1h-Pyrazol-3-Yl)-Phenoxymethyl]-Furan-2-Carboxylic Acid; 5-(3-{3-[3-HYDROXY-2-(METHOXYCARBONYL)PHENOXY]PROPENYL}PHENYL)-4-(HYDROXYMETHYL)ISOXAZOLE-3-CARBOXYLIC ACID; [4-(1,3,2-Dioxaborolan-2-Yloxy)Methyl]Benzamidine; 5-Bromo-N-(2,3-Dihydroxypropoxy)-3,4-Difluoro-2-[(2-Fluoro-4-Iodophenyl)Amino]Benzamide; 5-bromo-N-(3-chloro-2-(4-(prop-2-ynyl)piperazin-1-yl)phenyl)furan-2-carboxamide; 5-Chloro-1h-Indole-2-Carboxylic Acid [1-(4-Fluorobenzyl)-2-(4-Hydroxypiperidin-1yl)-2-Oxoethyl]Amide; 5-Bromo-N[2-(Dimethylamino)Ethyl]-9-Aminoacridine-4-Carboxamide; [4-({4-[(5-cyclopropyl-1H-pyrazol-3-yl)amino]-6-(methylamino)pyrimidin-2-yl}amino)phenyl]acetonitrile; 5-Chloro-6-[(2-Iminopyrrolidin-1-Yl)Methyl]Pyrimidine-2,4(1h,3h)-Dione; 5-CHLORO-6-METHYL-N-(2-PHENYLETHYL)-2-PYRIDIN-2-YLPYRIMIDIN-4-AMINE; 5-chloro-7-[(1-methylethyl)amino]pyrazolo[1,5-a]pyrimidine-3-carbonitrile; 5-CHLORO-8-METHYL-7-(3-METHYL-BUT-2-ENYL)-6,7,8,9-TETRAHYDRO-2H-2,7,9A-TRIAZA-BENZO[CD]AZULENE-1-THIONE; 5-CHLORO-N-((1R,2S)-2-(4-(2-OXOPYRIDIN-1(2H)-YL)BENZAMIDO) CYCLOPENTYL)THIOPHENE-2-CARBOXAMIDE; [4-(5-naphthalen-2-yl-1H-pyrrolo[2,3-b]pyridin-3-yl)phenyl]acetic acid; 5-CHLORO-N-(2-(4-(2-OXOPYRIDIN-1(2H)-YL)BENZAMIDO)ETHYL)THIOPHENE-2-CARBOXAMIDE; 5-chloro-N-[(3R)-1-(2-{[2-fluoro-4-(2-oxopyridin-1(2H)-yl)phenyl]amino}-2-oxoethyl)pyrrolidin-3-yl]thiophene-2-carboxamide; [4-(4-Hydroxy-Benzyl)-2-(2-Hydroxy-1-Methyl-Ethyl)-5-Oxo-Imidazolidin-1-Yl]-Acetic Acid; 5-CHLORO-N-{(3S)-1-[(1S)-1-METHYL-2-MORPHOLIN-4-YL-2-OXOETHYL]-2-OXOPYRROLIDIN-3-YL}-1-BENZOTHIOPHENE-2-SULFONAMIDE; 5-chloro-N-{4-[(1R)-1,2-dihydroxyethyl]phenyl}-1H-indole-2-carboxamide; 5-Chloro-thiophene-2-carboxylic acid ((3S,4S)-1-{[2-fluoro-4-(2-oxo-2H-pyridin-1-yl)-phenylcarbamoyl]-methyl}-4-hydroxy-pyrrolidin-3-yl)-amide; 5-CHLORO-THIOPHENE-2-CARBOXYLIC ACID ((3S,4S)-4-FLUORO-1-{[2-FLUORO-4-(2-OXO-2H-PYRIDIN-1-YL)-PHENYLCARBAMOYL]-METHYL)-PYRROLIDIN-3-YL)-AMIDE; 5-CYANO-FURAN-2-CARBOXYLIC ACID [5-HYDROXYMETHYL-2-(4-METHYL-PIPERIDIN-1-YL)-PHENYL]-AMIDE; 5-CYANO-N-(2,5-DIMETHOXYBENZYL)-6-ETHOXYPYRIDINE-2-CARBOXAMIDE; 5-cyclopropyl-2-(4-fluorophenyl)-6-[(2-hydroxyethyl)(methylsulfonyl)amino]-N-methyl-1-benzofuran-3-carboxamide; 5-ethoxy-4-(1-methyl-7-oxo-3-propyl-6,7-dihydro-1H-pyrazolo[4,3-d]pyrimidin-5-yl)thiophene-2-sulfonamide; 5-ETHYL-3-[(2-METHOXYETHYL)METHYLAMINO]-6-METHYL-4-(3-METHYLBENZYL)PYRIDIN-2(1H)-ONE; 5-ETHYL-3-METHYL-1,5-DIHYDRO-4H-PYRAZOLO[4,3-C]QUINOLIN-4-ONE; [5-(5-nitro-2-furyl)-1,3,4-oxadiazol-2-yl]thio}acetic acid; 5-(4-CYANOPHENYL)-3-{[(2-METHYLPHENYL)SULFONYL]AMINO}THIOPHENE-2-CARBOXYLIC ACID; 5-(4-CHLORO-5-PHENYL-3-THIENYL)-1,2,5-THIADIAZOLIDIN-3-ONE 1,1-DIOXIDE; 5-(4-FLUOROPHENYL)-3-{[(4-METHYLPHENYL)SULFONYL]AMINO}THIOPHENE-2-CARBOXYLIC ACID; 5-(4-METHOXYBIPHENYL-3-YL)-1,2,5-THIADIAZOLIDIN-3-ONE 1,1-DIOXIDE; [N-(2,4-DIAMINOPTERIDIN-6-YL)-METHYL]-DIBENZ[B,F]AZEPINE; 5-(5-(2,6-DICHLORO-4-(4,5-DIHYDRO-2-OXAZOLY)PHENOXY)PENTYL)-3-METHYLISOXAZOLE; [PHENYLALANINYL-PROLINYL]-[2-(PYRIDIN-4-YLAMINO)-ETHYL]-AMINE; 5-[1-(3,4-Dimethoxy-Benzoyl)-1,2,3,4-Tetrahydro-Quinolin-6-Yl]-6-Methyl-3,6-Dihydro-[1,3,4]Thiadiazin-2-One; 5-[1-(4-methoxyphenyl)-1H-benzimidazol-6-yl]-1,3,4-oxadiazole-2(3H)-thione; 5-[1-(Acetylamino)-3-Methylbutyl]-2,5-Anhydro-3,4-Dideoxy-4-(Methoxycarbonyl)Pentonic Acid; 5-[(E)-(5-CHLORO-2-OXO-1,2-DIHYDRO-3H-INDOL-3-YLIDENE)METHYL]-N-[2-(DIETHYLAMINO)ETHYL]-2,4-DIMETHYL-1H-PYRROLE-3-CARBOXAMIDE; 5-[(Z)-(5-CHLORO-2-OXO-1,2-DIHYDRO-3H-INDOL-3-YLIDENE)METHYL]-N-(DIETHYLAMINO)ETHYL]-2,4-DIMETHYL-1H-PYRROLE-3-CARBOXAMIDE; 5-[[(2R)-2-cyclopropyl-7,8-dimethoxy-2H-chromen-5-yl]methyl]pyrimidine-2,4-diamine; 5-[[(2R)-2-cyclopropyl-7,8-dimethoxy-chroman-5-yl]methyl]pyrimidine-2,4-diamine; 5-[(2-AMINOETHYL)AMINO]-6-FLUORO-3-(1H-PYRROL-2-YL)BENZO[CD]INDOL-2(1H)-ONE; 5-[(2-methyl-5-{[3-(trifluoromethyl)phenyl]carbamoyl}phenyl)amino]pyridine-3-carboxamide; 5-[(3AS,4R,6AR)-2-OXOHEXAHYDRO-1H-THIENO[3,4-D]IMIDAZOL-4-YL]PENTANOIC ACID; 5-[(3R)-3-(5-methoxy-2′,6′-dimethylbiphenyl-3-yl)but-1-yn-1-yl]-6-methylpyrimidine-2,4-diamine; {[2-(1h-1,2,3-Benzotriazol-1-Yl)-2-(3,4-Difluorophenyl)Propane-1,3-Diyl]Bis[4,1-Phenylene(Difluoromethylene)]}Bis(Phosphonic Acid); 5-[(3R)-3-(5-methoxy-4′-methylbiphenyl-3-yl)but-1-yn-1-yl]-6-methylpyrimidine-2,4-diamine; 5-[(3R)-3-(5-methoxybiphenyl-3-yl)but-1-yn-1-yl]-6-methylpyrimidine-2,4-diamine; 5-[(3S)-3-(2-methoxybiphenyl-4-yl)but-1-yn-1-yl]-6-methylpyrimidine-2,4-diamine; 5-[(4-AMINOCYCLOHEXYL)AMINO]-7-(PROPAN-2-YLAMINO)PYRAZOLO[1,5-A]PYRIMIDINE-3-CARBONITRILE; 4-O-(4,6-Dideoxy-4-{[4,5,6-Trihydroxy-3-(Hydroxymethyl)Cyclohex-2-En-1-Yl]Amino}-Beta-D-Lyxo-Hexopyranosyl)-Alpha-D-Erythro-Hexopyranose; 4-O-(4,6-Dideoxy-4-{[4-[(4-O-Hexopyranosylhexopyranosyl)Oxy]-5,6-Dihydroxy-3-(Hydroxymethyl)Cyclohex-2-En-1-Yl]Amino}Hexopyranosyl)Hexopyranose; 5-(4-METHYL-BENZOYLAMINO)-BIPHENYL-3,4′-DICARBOXYLIC ACID 3-DIMETHYLAMIDE-4′-HYDROXYAMIDE; {4-[3-(4-acetyl-3-hydroxy-2-propylphenoxy)propoxy]phenoxy}acetic acid; 6-(4-{(1S,2S)-2-AMINO-1-[(DIMETHYLAMINO)CARBONYL]-3-[(3S)-3-FLUOROPYRROLIDIN-1-YL]-3-OXOPROPYL}PHENYL)-1H-[1,2,4]TRIAZOLO[1,5-A]PYRIDIN-4-IUM; 5R-(3,4-DICHLOROPHENYLMETHYL)-3-(2-THIOPHENESULFONYLAMINO)-4-OXO-2-THIONOTHIAZOLIDINE; 6,7,8,9-TETRAHYDRO-4-HYDROXY-3-(1-PHENYLPROPYL)CYCLOHEPTA[B]PYRAN-2-ONE; 6,7-DIMETHOXY-4-[(3R)-3-(2-NAPHTHYLOXY)PYRROLIDIN-1-YL]QUINAZOLINE; 6,7-DIMETHOXY-4-[(3R)-3-(QUINOXALIN-2-YLOXY)PYRROLIDIN-1-YL]QUINAZOLINE; 6-(1,1-Dimethylallyl)-2-(1-Hydroxy-1-Methylethyl)-2,3-Dihydro-7h-Furo[3,2-G]Chromen-7-One; 6-(3,4-DIHYDROXYBENZYL)-3-ETHYL-1-(2,4,6-TRICHLOROPHENYL)-1H-PYRAZOLO[3,4-D]PYRIMIDIN-4(5H)-ONE; 6-(3′,5-DIMETHYLBENZYL)-1-ETHOXYMETHYL-5-ISOPROPYLURACIL; 1-((1R)-1-(HYDROXYMETHYL)-3-{6-[(3-PHENYLPROPANOYL)AMINO]-1H-INDOL-1-YL}PROPYL)-1H-IMIDAZOLE-4-CARBOXAMIDE; 6-(3-AMINOPROPYL)-4,9-DIMETHYLPYRROLO[3,4-C]CARBAZOLE-1,3(2H,6H)-DIONE; 6-(2,3,4,5,6,7-HEXAHYDRO-2,4,4-TRIMETHYL-1-METYLENEINDEN-2-YL)-3-METHYLHEXA-2,4-DIENOIC ACID; 1-((2-HYDROXYETHOXY)METHYL)-5-BENZYLPYRIMIDINE-2,4(1H,3H)-DIONE; 6-(2,6-DICHLOROPHENYL)-2-{[3-(HYDROXYMETHYL)PHENYL]AMINO}-8-METHYLPYRIDO[2,3-D]PYRIMIDIN-7(8H)-ONE; 6-(2,6-DIMETHOXYPHENYL)PYRIDO[2,3-D]PYRIMIDINE-2,7-DIAMINE; Adenosine Diphosphate 5-(Beta-Ethyl)-4-Methyl-Thiazole-2-Carboxylic Acid; 7-PYRIDIN-2-YL-N-(3,4,5-TRIMETHOXYPHENYL)-7H-PYRROLO[2,3-D]PYRIMIDIN-2-AMINE; 8-(2-CHLOROPHENYLAMINO)-2-(2,6-DIFLUOROPHENYLAMINO)-9-ETHYL-9H-PURINE-1,7-DIIUM; Adamantane-1-Carboxylic Acid-5-Dimethylamino-Naphthalene-1-Sulfonylamino-Butyl-Amide; Adamantane-1-Carboxylic Acid-5-Dimethylamino-Naphthalene-1-Sulfonylamino-Octyl-Amide; 6,6-DIMETHYL-1-[3-(2,4,5-TRICHLOROPHENOXY)PROPOXY]-1,6-DIHYDRO-1,3,5-TRIAZINE-2,4-DIAMINE; 1-(2,6-Dichlorophenyl)-5-(2,4-Difluorophenyl)-7-Piperidin-4-Yl-3,4-Dihydroquinolin-2(1h)-One; A-6619, [2h-Thieno[3,2-E]-1,2-Thiazine-6-Sulfonamide,2-(3-Hydroxyphenyl)-3-(4-Morpholinyl)-, 1,1-Dioxide]; A-6629, [2h-Thieno[3,2-E]-1,2-Thiazine-6-Sulfonamide,2-(3-Methoxyphenyl)-3-(4-Morpholinyl)-, 1,1-Dioxide]; Alyl-{4-[3-(4-Bromo-Phenyl)-Benzofuran-6-Yloxy]-but-2-Enyl}-Methyl-Amine; Alyl-{6-[3-(4-Bromo-Phenyl)-1-Methyl-1h-Indazol-6-Yl]Oxy}Hexyl)-N-Methylamine; Alyl-{6-[3-(4-Bromo-Phenyl)-Benzofuran-6-Yloxy]-Hexyl-}-Methyl-Amin; ALPHA-(2,6-DICHLOROPHENYL)-ALPHA-(2-ACETYL-5-METHYLANILINO)ACETAMIDE; 8-ethyl-3,10,10-trimethyl-4,5,6,8,10,12-hexahydropyrazolo[4′,3′:6,7]cyclohepta[1,2-b]pyrrolo[2,3-f]indol-9(1H)-one; 8-HYDROXY-2-OXA-BICYCLO[3.3.1]NON-6-ENE-3,5-DICARBOXYLIC ACID; 8-Benzyl-2-Hydroperoxy-2-(4-Hydroxy-Benzyl)-6-(4-Hydroxy-Phenyl)-2h-Imidazo[1,2-a]Pyrazin-3-One; Compound 12, N-Acetyl-4-[(Carboxycarbonyl)(2-Carboxyphenyl)Amino]-N-Pentyl-1-Napthylalaniamide; Compound 5, 2-(Naphthalen-1-Yl-Oxalyl-Amino)-Benzoicacid; N-(2-(((5-CHLORO-2-PYRIDINYL)AMINO)SULFONYL)PHENYL)-4-(2-OXO-1(2H)-PYRIDINYL)BENZAMIDE; CYCLOHEXYLMETHYL-2,3-DIHYDROXY-5-METHYL-HEXYLAMIDE; N-(1-CYANOCYCLOPROPYL)-3-({[(2S)-5-OXOPYRROLIDIN-2-YL]METHYL}SULFONYL)-N˜2˜-[(1S)-2,2,2-TRIFLUORO-1-(4-FLUOROPHENYL)ETHYL]-L-ALANINAMIDE; N-(1-ISOPROPYLPIPERIDIN-4-YL)-1-(3-METHOXYBENZYL)-1H-INDOLE-2-CARBOXAMIDE; Cyclohexyl-{4-[5-(3,4-Dichlorophenyl)-2-Piperidin-4-Yl-3-Propyl-3h-Imidazol-4-Yl]-Pyrimidin-2-Yl}Amine; N-(2-AMINOETHYL)-2-{3-CHLORO-4-[(4-ISOPROPYLBENZYL)OXY]PHENYL} ACETAMIDE; 1-(3-METHYLPHENYL)-1H-BENZIMIDAZOL-5-AMINE; N-(2,2,2-TRIFLUOROETHYL)-N-{4-[2,2,2-TRIFLUORO-1-HYDROXY-1-(TRIFLUOROMETHYL)ETHYL]PHENYL}BENZENESULFONAMIDE; N-(2-hydroxy-1,1-dimethylethyl)-1-methyl-3-(1H-pyrrolo[2,3-b]pyridin-2-yl)-1H-indole-5-carboxamide; 1-(4-IODOBENZOYL)-5-METHOXY-2-METHYLINDOLE-3-ACETIC ACID; N-(2-Morpholin-4-Yl-1-Morpholin-4-Ylmethyl-Ethyl)-3-Nitro-5-(3,4,5-Trihydroxy-6-Hydroxymethyl-Tetrahydro-Pyran-2-Yloxy)-Benzamide; N′-(3-CHLORO-4-METHOXY-PHENYL)-N-(3,4,5-TRIMETHOXYPHENYL)-1,3,5-TRIAZINE-2,4-DIAMINE; 1-(5-CHLORO-2,4-DIMETHOXYPHENYL)-3-(5-CYANOPYRAZIN-2-YL)UREA; N-(3-cyanophenyl)-2-methyl-5′-(5-methyl-1,3,4-oxadiazol-2-yl)-4-biphenylcarboxamide; N-(3-Cyclopropyl(5,6,7,8,9,10-Hexahydro-2-Oxo-2h-Cycloocta[B]Pyran-3-Yl)Methyl)Phenylbenzensulfonamide; N-(3-chlorophenyl)-N-methyl-2-oxo-3-[(3,4,5-trimethyl-1H-pyrrol-2-yl)methyl]-2H-indole-5-sulfonamide; N-(2-CHLORO-4-FLUOROBENZOYL)-N′-(5-HYDROXY-2-METHOXYPHENYL)UREA; N-(4-{4-AMINO-6-[4-(METHYLOXY)PHENYL]FURO[2,3-D]PYRIMIDIN-5-YL}PHENYL)-N′-[2-FLUORO-5-(TRIFLUOROMETHYL)PHENYL]UREA; N-(4-ACETYLPHENYL)-5-(5-CHLORO-2,4-DIHYDROXYPHENYL)-1H-PYRAZOLE-4-CARBOXAMIDE; 1-(5-ISOQUINOLINESULFONYL)-2-METHYLPIPERAZINE; N-(4-AMINO-5-CYANO-6-ETHOXYPYRIDIN-2-YL)-2-(4-BROMO-2,5-DIMETHOXYPHENYL)ACETAMIDE; N-(4-bromo-2-{[(3R,5S)-3,5-dimethylpiperidin-1-yl]carbonyl}phenyl)-4-morpholin-4-yl-4-oxobutanamide; N′-(5-CHLORO-1,3-BENZODIOXOL-4-YL)-N-(3,4,5-TRIMETHOXYPHENYL)PYRIMIDINE-2,4-DIAMINE; 1-(5′-Phospho-Beta-D-Ribofuranosyl)Barbituric Acid; 1-(5-Tert-Butyl-2-P-Tolyl-2h-Pyrazol-3-Yl)-3-[4-(2-Morpholin-4-Yl-Ethoxy)-Naphthalen-1-Yl]-Urea; N′-(5-CHLOROBENZOFURAN-2-CARBONYL)-2-(TRIFLUOROMETHYL)BENZENESULFONOHYDRAZIDE; 1-(CYCLOHEXYLAMINO)-3-(6-METHYL-3,4-DIHYDRO-1H-CARBAZOL-9(2H)-YL)PROPAN-2-OL; N-(8,9,10-Trihydroxy-7-Hydroxymethyl-2,4-Dioxo-6-Oxa-1,3-Diaza-Spiro[4.5]Dec-3-Yl-Acetamide; N-(TRANS-4-{(1 S,2S)-2-AMINO-3-[(3S)-3-FLUOROPYRROLIDIN-1-YL]-1-METHYL-3-OXOPROPYL}CYCLOHEXYL)-N-METHYLACETAMIDE; 1-(5-TERT-BUTYL-1,3,4-OXADIAZOL-2-YL)-2-(METHYLAMINO)ETHANONE; N-(CYCLOPROPYLMETHYL)-4-(METHYLOXY)-3-({5-[3-(3-PYRIDINYL)PHENYL]-1,3-OXAZOL-2-YL}AMINO)BENZENESULFONAMIDE; N,N-DIETHYL-2-[(2-THIENYLCARBONYL)AMINO]-4,5,6,7-TETRAHYDRO-1-BENZOTHIOPHENE-3-CARBOXAMIDE; 1-(thiophen-2-ylacetyl)-4-(3-thiophen-2-yl-1,2,4-oxadiazol-5-yl)piperidine; N-[(1S)-2-[(4-cyano-1-methylpiperidin-4-yl)amino]-1-(cyclohexylmethyl)-2-oxoethyl]morpholine-4-carboxamide; 1-(PHENYLMETHYL)CYCLOPENTYL[(1S)-1-FORMYLPENTYL]CARBAMATE; 1-(N-Imidazolyl)-2-Hydroxy-2-(2,3-Dichlorophenyl)Octane; N-(Allyloxycarbonyl)-4-[N-(Carboxy-Formyl)-2-(Benzoic Acid)-Amino]-L-Phenylalaninyl-Amino-Butyloxy-(6-Hydroxy-Benzoic Acid Methyl Ester); N-[(2R,3S)-3-AMINO-2-HYDROXY-4-PHENYLBUTYL]-4-METHOXY-2,3,6-TRIMETHYLBENZENESULFONAMIDE; N-[[2-METHYL-4-HYDROXYCARBAMOYL]BUT-4-YL-N]-BENZYL-P-[PHENYL]-P-[METHYL]PHOSPHINAMID; N-[[3-FLUORO-4-ETHOXY-PYRID-2-YL]ETHYL]-N′-[5-CHLORO-PYRIDYL]-THIOUREA; N-[[3-FLUORO-4-ETHOXY-PYRID-2-YL]ETHYL]-N′-[5-NITRILOMETHYL-PYRIDYL]-THIOUREA; N-[1-(AMINOMETHYL)CYCLOPROPYL]-3-(BENZYLSULFONYL)-N˜2˜-[(1S)-2,2,2-TRIFLUORO-1-(4-HYDROXYPHENYL)ETHYL]-L-ALANINAMIDE; 1,2,3,4-Tetrahydro-Isoquinoline-7-Sulfonic Acid Amide; 1,2-DI-1-(3,7,11,15-Tetramethyl-Hexadecane)-Sn-Glycerol; 1,2-Di-N-Pentanoyl-Sn-Glycero-3-Dithiophosphocholine; N-[(5R,14R)-5-AMINO-5,14-DIMETHYL-4-OXO-3-OXA-18-AZATRICYCLO[15.3.1.1˜7,11˜]DOCOSA-1(21),7(22),8,10,17,19-HEXAEN-19-YL]-N-METHYLMETHANESULFONAMIDE; N-[(2-AMINO-6-METHYLPYRIMIDIN-4-YL)METHYL]-3-{[(E)-(2-OXODIHYDROFURAN-3(2H)-YLIDENE)METHYL]AMINO}BENZENESULFONAMIDE; N-[1-Hydroxycarboxyethyl-Carbonyl]Leucylamino-2-Methyl-Butane; N-[2-(2,4-diaminopyrido[2,3-d]pyrimidin-7-yl)-2-methylpropyl]-4-phenoxybenzamide; N-[2-(4-AMINO-5,8-DIFLUORO-1,2-DIHYDROQUINAZOLIN-2-YL)ETHYL]-3-FURAMIDE; N-[2-(4-BROMOCINNAMYLAMINO)ETHYL]-5-ISOQUINOLINE SULFONAMIDE; N-[3-(Dimethylamino)Propyl]-2-({[4-({[4-(Formylamino)-1-Methyl-1h-Pyrrol-2-Yl]Carbonyl}Amino)-1-Methyl-1h-Pyrrol-2-Yl]Carbonyl}Amino)-5-Isopropyl-1,3-Thiazole-4-Carboxamide; N-[2-(6-AMINO-4-METHYLPYRIDIN-2-YL)ETHYL]-4-CYANOBENZAMIDE; 1,4-Dideoxy-5-Dehydro-02-Sulfo-Glucuronic Acid; N-[2-({[amino(imino)methyl]amino}oxy)ethyl]-2-{6-chloro-3-[(2,2-difluoro-2-phenylethyl)amino]-2-fluorophenyl}acetamide; N-[2-(1,3-BENZODIOXOL-5-YL)ETHYL]-1-[2-(1H-IMIDAZOL-1-YL)-6-METHYLPYRIMIDIN-4-YL]-D-PROLINAMIDE; 1-[(1s)-Carboxy-2-(Methylsulfinyl)Ethyl]-(3r)-[(5s)-5-Amino-5-Carboxypentanamido]-(4r)-Sulfanylazetidin-2-One; N-[2-(5-methyl-4H-1,2,4-triazol-3-yl)phenyl]-7H-pyrrolo[2,3-d]pyrimidin-4-amine; N-[3-(N′-HYDROXYCARBOXAMIDO)-2-(2-METHYLPROPYL)-PROPANOYL]-O-TYROSINE-N-METHYLAMIDE; N-[2(S)-Cyclopentyl-1(R)-Hydroxy-3(R)Methyl]-5-[(2(S)-Tertiary-Butylamino-Carbonyl)-4-(N1-(2)-(N-Methylpiperazinyl)-3-Chloro-Pyrazinyl-5-Carbonyl)-Piperazino]-4(S)-Hydroxy-2(R)-Phenylmethyl-Pentanamide; N-[3-[(1-Aminoethyl)(Hydroxy)Phosphoryl]-2-(1,1′-Biphenyl-4-Ylmethyl)Propanoyl]Alanine; N-[5-(1,1-DIOXIDOISOTHIAZOLIDIN-2-YL)-1H-INDAZOL-3-YL]-2-(4-PIPERIDIN-1-YLPHENYL)ACETAMIDE; 1-[(2R)-2-aminobutanoyl]-N-(4-carbamimidoylbenzyl)-L-prolinamide; N-[5′-O-Phosphono-Ribofuranosyl]-2-[2-Hydroxy-2-[4-[Glutamic Acid]-N-Carbonylphenyl]-3-[2-Amino-4-Hydroxy-Quinazolin-6-Yl]-Propanylamino]-Acetamide; 1-[(2S)-4-(5-phenyl-1H-pyrazolo[3,4-b]pyridin-4-yl)morpholin-2-yl]methanamine; N-[3-[[4-[(5-CHLORO-1,3-BENZODIOXOL-4-YL)AMINO]PYRIMIDIN-2-YL]AMINO]PHENYL]METHANESULFONAMIDE; N-[4-({[5-(DIMETHYLAMINO)-1-NAPHTHYL]SULFONYL}AMINO)BUTYL]-3-SULFANYLPROPANAMIDE; 1-[(2-NITROPHENYL)SULFONYL]-1H-PYRROLO[3,2-B]PYRIDINE-6-CARBOXAMIDE; N-[4-(AMINOSULFONYL)BENZYL]-5-(5-CHLORO-2,4-DIHYDROXYPHENYL)-1H-PYRAZOLE-4-CARBOXAMIDE; N-[4-(2-{2-[3-(2-Bromo-Acetylamino)-Propionylamino]-3-Hydroxy-Propionylamino}-Ethyl)-Phenyl]-Oxalamic Acid; N-[4-(2-CHLOROPHENYL)-1,3-DIOXO-1,2,3,6-TETRAHYDROPYRROLO[3,4-C]CARBAZOL-9-YL]FORMAMIDE; N-[4-(1-BENZOYLPIPERIDIN-4-YL)BUTYL]-3-PYRIDIN-3-YLPROPANAMIDE; N-{(1s)-4-[Bis(2-Chloroethyl)Amino]-1-Methylbutyl}-N-(6-Chloro-2-Methoxy-9-Acridinyl)Amine; N-{(1S,2R)-1-BENZYL-3-[(CYCLOPROPYLMETHYL)(2-FURYLSULFONYL)AMINO]-2-HYDROXYPROPYL}-N′-METHYLSUCCINAMIDE; N-{(1S,2R)-2-hydroxy-1-[(hydroxyamino)carbonyl]propyl}-4-{[4-(morpholin-4-ylmethyl)phenyl]ethynyl}benzamide; N-{(3R,4S)-4-[(6-amino-4-methylpyridin-2-yl)methyl]pyrrolidin-3-yl}-N′-(3-chlorobenzyl)ethane-1,2-diamine; N-{(2S)-3-[(1R)-1-aminoethyl](hydroxy)phosphoryl-2-benzylpropanoyl}-L-phenylalanine; N-{(3S,4S)-4-[(6-AMINO-4-METHYLPYRIDIN-2-YL)METHYL]PYRROLIDIN-3-YL}-N′-(4-CHLOROBENZYL)ETHANE-1,2-DIAMINE; 1-[2-(3-Biphenyl)-4-Methylvaleryl)]Amino-3-(2-Pyridylsulfonyl)Amino-2-Propanone; 1-[2-AMINO-2-CYCLOHEXYL-ACETYL]-PYRROLIDINE-3-CARBOXYLIC ACID 5-CHLORO-2-(2-ETHYLCARBAMOYL-ETHOXY)-BENZYLAMIDE; N-{(4s)-4-Amino-5-[(2-Aminoethyl)Amino]Pentyl}-N′-Nitroguanidine; N-{[(2R)-2,3-dihydroxypropyl]oxy}-3,4-difluoro-2-[(2-fluoro-4-iodophenyl)amino]benzamide; N-{[(2S,3S)-3-(ETHOXYCARBONYL)OXIRAN-2-YL]CARBONYL}-; N-{[(2S,3S)-3-(ETHOXYCARBONYL)OXIRAN-2-YL]CARBONYL}-L-ISOLEUCINE; N-{[(2S,3S)-3-(ETHOXYCARBONYL)OXIRAN-2-YL]CARBONYL}-L-ISOLEUCYL-L-ALANINE; N-{[(2S,3S)-3-(ETHOXYCARBONYL)OXIRAN-2-YL]CARBONYL}-L-ISOLEUCYL-L-ISOLEUCINE; 1-[(2-AMINO-4-CHLORO-5-METHYLPHENYL)SULFONYL]-L-PROLINE; N-[2-(1-Formyl-2-Methyl-Propyl)-1-(4-Piperidin-1-Yl-but-2-Enoyl)-Pyrrolidin-3-Yl]-Methanesulfonamide; N-[(2R,3S)-3-AMINO-2-HYDROXY-4-PHENYLBUTYL]NAPHTHALENE-2-SULFONAMIDE; N-(4-CARBAMIMIDOYL-3-CHORO-PHENYL)-2-HYDROXY-3-IODO-5-METHYL-BENZAMIDE; N-(4-{[(3S)-3-(dimethylamino)pyrrolidin-1-yl]carbonyl}phenyl)-5-fluoro-4-[2-methyl-1-(1-methylethyl)-1H-imidazol-5-yl]pyrimidin-2-amine; Cyclopropyl-{4-[5-(3,4-Dichlorophenyl)-2-[(1-Methyl)-Piperidin]-4-Yl-3-Propyl-3h-Imidazol-4-Yl]-Pyrimidin-2-Yl}Amine; BUT-3-ENYL-[5-(4-CHLORO-PHENYL)-3,6-DIHYDRO-[1,3,4]THIADIAZIN-2-YLIDENE]-AMINE; Cp-166572, 2-Hydroxymethyl-4-(4-N,N-Dimethylaminosulfonyl-1-Piperazino)-Pyrimidine; 1-{(2S,5S)-4-FLUORO-5-[(TRITYLOXY)METHYL]TETRAHYDROFURAN-2-YL}PYRIMIDINE-2,4(1H,3H)-DIONE; Cp403700, (S)-1-{2-[(5-Chloro-1h-Indole-2-Carbonyl)-Amino]-3-Phenyl-Propionyl}-Azetidine-3-Carboxylate; DIETHYL (1R,2S,3R,4S)-5,6-BIS(4-HYDROXYPHENYL)-7-OXABICYCLO[2.2.1]HEPT-5-ENE-2,3-DICARBOXYLATE; Delta-Bis(2,2′-Bipyridine)-(5-Methyl-2-2′-Bipyridine)-C2-Adamantane Ruthenium (Ii); Delta-Bis(2,2′-Bipyridine)-(5-Methyl-2-2′-Bipyridine)-C9-Adamantane Ruthenium (Ii); 1-{[1-(2-AMINO-3-PHENYL-PROPIONYL)-PYRROLIDINE-2-CARBONYL]-AMINO}-2-(3-CYANO-PHENYL)-ETHANEBORONIC ACID; D-phenylalanyl-N-[(1S)-4-{[amino(iminio)methyl]amino}-1-(chloroacetyl)butyl]-L-prolinamide; DIMETHYL-(4,5,6,7-TETRABROMO-1H-BENZOIMIDAZOL-2-YL)-AMINE; ethyl 3-[(E)-2-amino-1-cyanoethenyl]-6,7-dichloro-1-methyl-1H-indole-2-carboxylate; ETHYL 4-[(4-CHLOROPYRIDIN-2-YL)AMINO]PIPERIDINE-1-CARBOXYLATE; ETHYL 4-[(4-METHYLPYRIDIN-2-YL)AMINO]PIPERIDINE-1-CARBOXYLATE; difluoro(5-{2-[(5-octyl-1H-pyrrol-2-yl-kappaN)methylidene]-2H-pyrrol-5-yl-kappaN}pentanoato)boron; 10,11-dimethoxy-4-methyldibenzo[c,f]-2,7-naphthyridine-3,6-diamine; METHYL (2Z)-2-(2-{[6-(2-CYANOPHENOXY)PYRIMIDIN-4-YL]OXY}PHENYL)-3-METHOXYACRYLATE; 1-{[(3R)-3-methyl-4-({4-[(1S)-2,2,2-trifluoro-1-hydroxy-1-methyl ethyl]phenyl}sulfonyl)piperazin-1-yl]methyl}cyclopropanecarboxamide; METHYL (3R)-3-{[(3R)-3-{[(3R)-3-HYDROXYBUTANOYL]OXY}BUTANOYL]OXY}BUTANOATE; 11-TRANS-13-TRANS-15-CIS-OCTADECATRIENOIC ACID; methyl [(1E,5R)-5-{(3S)-3-[(2E,4E)-2,5-dimethylocta-2,4-dienoyl]-2,4-dioxo-3,4-dihydro-2H-pyran-6-yl}hexylidene]carbamate; METHYL 1-(4-{[(2,4-DIAMINOPTERIDIN-6-YL)METHYL](METHYL)AMINO}BENZOYL)PIPERIDINE-4-CARBOXYLATE; METHYL 1-(4-{[(2,4-DIAMINOPTERIDIN-6-YL)METHYL]AMINO}BENZOYL)PIPERIDINE-4-CARBOXYLATE; 1-Azepan-1-Yl-2-Phenyl-2-(4-Thioxo-1,4-Dihydro-Pyrazolo[3,4-D]Pyrimidin-5-Yl)Ethanone Adduct; METHYL 4-{[({[(2R,5S)-5-{[(2S)-2-(AMINOMETHYL)PYRROLIDIN-1-YL]CARBONYL}PYRROLIDIN-2-YL]METHYL}AMINO)CARBONYL]AMINO}BENZOATE; METHYL N-({(2S,3S)-3-[(PROPYLAMINO)CARBONYL]OXIRAN-2-YL}CARBONYL)-L-ISOLEUCYL-L-PROLINATE; METHYL N-[(2′,4′-DIFLUORO-4-HYDROXY-5-IODOBIPHENYL-3-YL)CARBONYL]-BETA-ALANINATE; 17Alpha-methyl-3beta,17beta-dihydroxyandrost-4-ene; METHYL N-[(2S,3R)-3-AMINO-2-HYDROXY-3-(4-METHYLPHENYL)PROPANOYL]-D-ALANYL-D-LEUCINATE; Mono-[3,4-Dihydroxy-5-(5-Methyl-Benzoimidazol-1-Yl)-Tetrahydor-Furan-2-Ylmethyl] Ester; Morpholine-4-Carboxylic Acid (1-(3-Benzenesulfonyl-1-Phenethylallylcarbamoyl)-3-Methylbutyl)-Amide; Morpholine-4-Carboxylic Acid [1-(2-Benzylsulfanyl-1-Formyl-Ethylcarbamoyl)-2-Phenyl-Ethyl]-Amide; Morpholine-4-Carboxylic Acid [1s-(2-Benzyloxy-1r-Cyano-Ethylcarbamoyl)-3-Methyl-Butyl]Amide; 1-Amino-2,3-Dihydroxy-5-Hydroxymethyl Cyclohex-5-Ene; N-((1R,2R)-2-(5-CHLORO-1H-INDOLE-2-CARBOXAMIDO)CYCLOHEXYL)-5-METHYL-4,5,6,7-TETRAHYDROTHIAZOLO[5,4-C]PYRIDINE-2-CARBOXAMIDE; 1-butanoyl-N-(4-carbamimidoylbenzyl)-L-prolinamide; N-((2-aminopyrimidin-5-yl)methyl)-5-(2,6-difluorophenyl)-3-ethylpyrazolo[1,5-a]pyrimidin-7-amine; N′-((2S,3R)-3-AMINO-2-HYDROXY-5-(ISOPROPYLSULFANYL)PENTANOYL)-N-3-CHLOROBENZOYL HYDRAZIDE; 1-BENZYL-4-[(5,6-DIMETHOXY-1-INDANON-2-YL)METHYL]PIPERIDINE; N-({(2S)-1-[(3R)-3-AMINO-4-(2-FLUOROPHENYL)BUTANOYL]PYRROLIDIN-2-YL}METHYL)BENZAMIDE; N-({(3R,4R)-4-[(benzyloxy)methyl]pyrrolidin-3-yl}methyl)-N-(2-methylpropyl)benzenesulfonamide; N-({(2S,3S)-3-[(BENZYLAMINO)CARBONYL]OXIRAN-2-YL}CARBONYL)-L-ISOLEUCYL-L-PROLINE; N-{1-[5-(1-Carbamoyl-2-Mercapto-Ethylcarbamoyl)-Pentylcarbamoyl]-2-[4-(Difluoro-Phosphono-Methyl)-Phenyl]-Ethyl}-3-{2-[4-(Difluoro-Phosphono-Methyl)-Phenyl]-Acetylamino}-Succinamic Acid; N-({[4-(AMINOSULFONYL)PHENYL]AMINO}CARBONYL)-4-METHYLBENZENESULFONAMIDE; N-({4-[(2-aminopyridin-4-yl)oxy]-3-fluorophenyl}carbamoyl)-2-(4-fluorophenyl)acetamide; 1-Carboxyethylaminomethyl-4-Aminomethylbenzene; N-({6-[(4-CYANOBENZYL)OXY]NAPHTHALEN-2-YL}SULFONYL)-D-GLUTAMIC ACID; N,N-DIMETHYL(5-(PYRIDIN-3-YL)FURAN-2-YL)METHANAMINE; ISOPROPYL (2S)-2-ETHYL-7-FLUORO-3-OXO-3,4-DIHYDROQUINOXALINE-1(2H)-CARBOXYLATE; ISOQUINOLINE-5-SULFONIC ACID (2-(2-(4-CHLOROBENZYLOXY)ETHYLAMINO)ETHYL)AMIDE; N,N-DIMETHYL-4-(4-PHENYL-1H-PYRAZOL-3-YL)-1H-PYRROLE-2-CARBOXAMIDE; N,N′-DIMETHYL-N-(ACETYL)-N′-(7-NITROBENZ-2-OXA-1,3-DIAZOL-4-YL)ETHYLENEDIAMINE; N,N′-DIPHENYLPYRAZOLO[1,5-A][1,3,5]TRIAZINE-2,4-DIAMINE; 1-Deoxy-1-Acetylamino-Beta-D-Gluco-2-Heptulopyranosonamide; N-[(1-CHLORO-4-HYDROXYISOQUINOLIN-3-YL)CARBONYL]GLYCINE; N-(1,4-DIHYDRO-5H-TETRAZOL-5-YLIDENE)-9-OXO-9H-XANTHENE-2-SULFONAMIDE; N-(1-BENZYL-3,3,3-TRIFLUORO-2,2-DIHYDROXY-PROPYL)-ACETAMIDE; METHYL(2-ACETOXY-2-(2-CARBOXY-4-AMINO-PHENYL))ACETATE; 1-GUANIDINO-4-(N-PHENYLMETHANESULFONYL-L-LEUCYL-L-PROLYLAMINO)BUTANE; 8-Benzyl-2-Hydroxy-2-(4-Hydroxy-Benzyl)-6-(4-Hydroxy-Phenyl)-2h-Imidazo[1,2-a]Pyrazin-3-One; 1-Monohexanoyl-2-Hydroxy-Sn-Glycero-3-Phosphate; 9-(4-HYDROXY-2,6-DIMETHYL-PHENYL)-3,7-DIMETHYL-NONA-4,6,8-TRIENOIC ACID; 9-HYDROXY-6-(3-HYDROXYPROPYL)-4-(2-METHOXYPHENYL)PYRROLO[3,4-C]CARBAZOLE-1,3(2H,6H)-DIONE; 1-N-(4-SULFAMOYLPHENYL-ETHYL)-2,4,6-TRIMETHYLPYRIDINIUM; Benzofuran-2-Carboxylic Acid {(S)-3-Methyl-1-[3-Oxo-1-(Pyridin-2-Ylsulfonyl)Azepan-4-Ylcarbamoyl]Butyl}Amide; BENZYL N-({(2S,3S)-3-[(PROPYLAMINO)CARBONYL]OXIRAN-2-YL}CARBONYL)-L-ISOLEUCYL-L-PROLINATE; BIS-1,2-{[(Z)-2-CARBOXY-2-METHYL-1,3-DIOXANE]-5-YLOXYCARBAMOYL}-ETHANE; Cis-[4,5-Bis-(4-Chlorophenyl)-2-(2-Isopropoxy-4-Methoxyphenyl)-4,5-Dihyd Roimidazol-1-Yl]-Piperazin-1-Yl-Methanone; Cis-[4,5-Bis-(4-Bromophenyl)-2-(2-Ethoxy-4-Methoxyphenyl)-4,5-Dihydroimidazol-1-Yl]-[4-(2-Hydroxyethyl)Piperazin-1-Yl]Methanone; 1-PHENYL-1H-PYRAZOLE-4-CARBOXYLIC ACID; BIS-1,2-{[(Z)-2CARBOXY-2-METHYL-1,3-DIOXANE]-5-YLOXYCARBONYL}-PIPERAZINE; CIS-4-METHYL-N-[(1S)-3-(METHYLSULFANYL)-1-(PYRIDIN-4-YLCARBAMOYL)PROPYL]CYCLOHEXANECARBOXAMIDE; 8-bromo-4-(2-chlorophenyl)-N-(2-hydroxyethyl)-6-methyl-1,3-dioxo-1,2,3,6-tetrahydropyrrolo[3,4-e]indole-7-carboxamide; N{[6-(PENTYLOXY)NAPHTHALEN-2-YL]SULFONYL}-D-GLUTAMIC ACID; N-{1-[(1-carbamoylcyclopropyl)methyl]piperidin-4-yl}-N-cyclopropyl-4-[(1S)-2,2,2-trifluoro-1-hydroxy-1-methylethyl]benzamide; CARBOBENZYLOXY-(L)-LEUCINYL-(L)LEUCINYL METHOXYMETHYLKETONE; 1-O-Octyl-2-Heptylphosphonyl-Sn-Glycero-3-Phosphoethanolamine; N-{2,4-difluoro-3-[(5-pyridin-3-yl-1H-pyrrolo[2,3-b]pyridin-3-yl)carbonyl]phenyl}ethanesulfonamide; 1-Methyl-3-Oxo-1,3-Dihydro-Benzo[C]Isothiazole-5-Sulfonic Acid Amide; N-{2′-[(4-FLUOROPHENYL)AMINO]-4,4′-BIPYRIDIN-2-YL}-4-METHOXYCYCLOHEXANECARBOXAMIDE; 2-((3′,5′-DIMETHOXY-4′-HYDROXYPHENYL)AZO)BENZOIC ACID; N-{2-[6-(2,4-DIAMINO-6-ETHYLPYRIMIDIN-5-YL)-2,2-DIMETHYL-3-OXO-2,3-DIHYDRO-4H-1,4-BENZOTHIAZIN-4-YL]ETHYL}ACETAMIDE; N-{2-methyl-5-[(6-phenylpyrimidin-4-yl)amino]phenyl}methanesulfonamide; N-{2-[4-(AMINOSULFONYL)PHENYL]ETHYL}ACETAMIDE; N″-{3-[(3s,8ar)-1,4-Dioxooctahydropyrrolo[1,2-a]Pyrazin-3-Yl]Propyl}Guanidine; N-{3-[(4-{[3-(TRIFLUOROMETHYL)PHENYL]AMINO}PYRIMIDIN-2-YL)AMINO]PHENYL}CYCLOPROPANECARBOXAMIDE; N-{3-[4-(3-Amino-Propyl)-Piperazin-1-Yl]-Propyl}-3-(2-Thiophen-2-Yl-Acetylamino)-5-(3,4,5-Trihydroxy-6-Hydroxymethyl-Tetrahydro-Pyran-2-Yloxy)-Benzamide; N-{3-[(7ar,12as,12bs)-7-Oxo-1,3,4,6,7,7a,12a,12b-Octahydroindolo[2,3-a]Quinolizin-12(2h)-Yl]Propyl}Propane-2-Sulfonamide; N-{3-[(5-chloro-1H-pyrrolo[2,3-b]pyridin-3-yl)carbonyl]-2,4-difluorophenyl}propane-1-sulfonamide; 2-({2-[(3R)-3-AMINOPIPERIDIN-1-YL]-4-OXOQUINAZOLIN-3(4H)-YL}METHYL)BENZONITRILE; N-{3-[4-(3-Amino-Propyl)-Piperazin-1-Yl]-Propyl}-3-Nitro-5-(Galactopyranosyl)-Beta-Benzamide; N-{3-[4-hydroxy-1-(3-methylbutyl)-2-oxo-1,2-dihydropyrrolo[1,2-b]pyridazin-3-yl]-1,1-dioxido-2H-1,2,4-benzothiadiazin-7-yl}methanesulfonamide; N-{3-[5-(1H-1,2,4-triazol-3-yl)-1H-indazol-3-yl]phenyl}furan-2-carboxamide; N-{3-[5-(6-Amino-Purin-9-Yl)-3,4-Dihydroxy-Tetrahydro-Furan-2-Yl]-Allyl}-2,3-Dihydroxy-5-Nitro-Benzamide; N-{5-[4-(4-METHYLPIPERAZIN-1-YL)PHENYL]-1H-PYRROLO[2,3-B]PYRIDIN-3-YL}NICOTINAMIDE; N-{4-METHYL-3-[(3-PYRIMIDIN-4-YLPYRIDIN-2-YL)AMINO]PHENYL}-3-(TRIFLUOROMETHYL)BENZAMIDE; N-{3-METHYL-5-[2-(PYRIDIN-4-YLAMINO)-ETHOXY]-PHENYL}-BENZENESULFONAMIDE; 2-(2-{2-[(BIPHENYL-4-YLMETHYL)-AMINO]-3-MERCAPTO-PENTANOYLAMINO}-ACETYLAMINO)-3-METHYL-BUTYRIC ACID METHYL ESTER; N˜2˜-(biphenyl-4-ylsulfonyl)-N-hydroxy-N˜2˜-(2-hydroxyethyl)glycinamide; 2-(2,6-DICHLOROPHENYL)-1,3-BENZOXAZOLE-6-CARBOXYLIC ACID; N˜2˜-1,3-BENZOXAZOL-2-YL-3-CYCLOHEXYL-N-[2-[(4-METHOXYPHENYL)AMINO]ETHYL]-L-ALANINAMIDE; N˜2˜-1H-benzimidazol-5-yl-N˜4˜-(3-cyclopropyl-1H-pyrazol-5-yl)pyrimidine-2,4-diamine; N˜3˜-[5-(1H-INDOL-6-YL)-2-(PYRIDIN-2-YLMETHOXY)BENZYL]PYRIDINE-2,3-DIAMINE; 2-(2,6-DIFLUOROPHENOXY)-N-(2-FLUOROPHENYL)-9-ISOPROPYL-9H-PURIN-8-AMINE; ˜-4˜-(3-methyl-1H-indazol-6-yl)-N˜2˜-(3,4,5-trimethoxyphenyl)pyrimidine-2,4-diamine; N˜4˜-methyl-N˜4˜-(3-methyl-1H-indazol-6-yl)-N˜2˜-(3,4,5-trimethoxyphenyl)pyrimidine-2,4-diamine; N˜6˜-cyclohexyl-N˜2˜-(4-morpholin-4-ylphenyl)-9H-purine-2,6-diamine; N1-(1-Dimethylcarbamoyl-2-Phenyl-Ethyl)-2-Oxo-N4-(2-Pyridin-2-Yl-Ethyl)-Succinamide; N1-(2-AMINO-4-METHYLPENTYL)OCTAHYDRO-PYRROLO[1,2-A] PYRIMIDINE; N-1,2,3,4-Tetrahydronaphth-1-Yl-2′-[3,5-Dimethoxybenzamido]-2′-Deoxy-Adenosine; N1,N14-Bis((S-Methyl)Isothioureido)Tetradecane; N1,N2-ETHYLENE-2-METHYLAMINO-4,5,6,7-TETRABROMO-BENZIMIDAZOLE; N1-CYCLOPENTYL-N2-(THIAZOL-2-YL)OXALAMIDE; N-2-Thiophen-2-Yl-Acetamide Boronic Acid; N-1H-indazol-5-yl-2-(6-methylpyridin-2-yl)quinazolin-4-amine; N2-({[(4-Bromophenyl)Methyl]Oxy}Carbonyl)-N1-[(1s)-1-Formylpentyl]-L-Leucinamide; N2-[(benzyloxy)carbonyl]-n1-[(3S)-1-cyanopyrrolidin-3-yl]-l-leucinamide; N-1H-imidazol-2-yl-N′-[4-(1H-imidazol-2-ylamino)phenyl]benzene-1,4-diamine; N6-ISOPENTENYL-ADENOSINE-5′-MONOPHOSPHATE; 2-(2-PHENYL-3-PYRIDIN-2-YL-4,5,6,7-TETRAHYDRO-2H-ISOPHOSPHINDOL-1-YL)PYRIDINE; N4-(N,N-DIPHENYLCARBAMOYL)-AMINOGUANIDINE; N-ETHYL-N-ISOPROPYL-3-METHYL-5-{[(2S)-2-(PYRIDIN-4-YLAMINO)PROPYL]OXY}BENZAMIDE; N-Hydroxy 1n(4-Methoxyphenyl)Sulfonyl-4-(Z,E-N-Methoxyimino)Pyrrolidine-2r-Carboxamide; N7-BUTYL-N2-(5-CHLORO-2-METHYLPHENYL)-5-METHYL[1,2,4]TRIAZOLO[1,5-A]PYRIMIDINE-2,7-DIAMINE; N-Hydroxy-4-[(4-Methoxylphenyl)Sulfonyl]-2,2-Dimethyl-Hexahydro-1,4-Thiazepine-3(S)-Carboxamide; N-HYDROXY-2-[4-(4-PHENOXY-BENZENESULFONYL)-TETRAHYDRO-PYRAN-4-YL]-ACETAMIDE; N-hydroxy-4-({4-[4-(trifluoromethyl)phenoxy]phenyl}sulfonyl)tetrahydro-2H-pyran-4-carboxamide; N-HYDROXY-2(R)-[[(4-METHOXYPHENYL)SULFONYL](3-PICOLYL)AMINO]-3-METHYLBUTANAMIDE HYDROCHLORIDE; N-Hydroxy-4-(Methyl{[5-(2-Pyridinyl)-2-Thienyl]Sulfonyl}Amino)Benzamide; N-hydroxy-5-[(3-phenyl-5,6-dihydroimidazo[1,2-a]pyrazin-7(8H)-yl)carbonyl]thiophene-2-carboxamide; N4-HYDROXY-2-ISOBUTYL-N1-(9-OXO-1,8-DIAZA-TRICYCLO[10.6.1.013,18]NONADECA-12(19),13,15,17-TETRAEN-10-YL)-SUCCINAMIDE; N6-(2,5-Dimethoxy-Benzyl)-N6-Methyl-Pyrido[2,3-D]Pyrimidine-2,4,6-Triamine; N-Hydroxy-1-(4-Methoxyphenyl)Sulfonyl-4-Benzyloxycarbonyl-Piperazine-2-Carboxamide; N-ACETYL-L-PHENYLALANYL-4-[DIFLUORO(PHOSPHONO)METHYL]-L-PHENYLALANINAMIDE; NALPHA-[(BENZYLOXY)CARBONYL]-N-[(1R)-4-HYDROXY-1-METHYL-2-OXOBUTYL]-L-PHENYLALANINAMIDE; N-METHYLALANYL-3-METHYLVALYL-4-PHENOXY-N-(1,2,3,4-TETRAHYDRONAPHTHALEN-1-YL)PROLINAMIDE; N-Alpha-(2-Naphthylsulfonyl)-N(3-Amidino-L-Phenylalaninyl)-4-Acetyl-Piperazine; N-Alpha-(2-Naphthylsulfonyl)-N-(3-Amidino-L-Phenylalaninyl)-D-Pipecolinic Acid; N-Alpha-(2-Naphthylsulfonyl)-N(3-Amidino-L-Phenylalaninyl)Isopipecolinic Acid Methyl Ester; 2-(4-HYDROXY-3-NITROPHENYL)ACETIC ACID; Nadph Dihydro-Nicotinamide-Adenine-Dinucleotidephosphate; N-anthracen-2-yl-5-methyl[1,2,4]triazolo[1,5-a]pyrimidin-7-amine; N-BENZYL-4-[4-(3-CHLOROPHENYL)-1H-PYRAZOL-3-YL]-1H-PYRROLE-2-CARBOXAMIDE; 2-(4-CHLOROBENZYLAMINO)-4-(PHENYLAMINO)PYRAZOLO[1,5-A][1,3,5]TRIAZINE-8-CARBONITRILE; N-BENZYLOXYCARBONYL-L-SERINE-BETALACTONE; N-ISOBUTYL-N-[4-METHOXYPHENYLSULFONYL]GLYCYL HYDROXAMIC ACID; Nalpha-(2-Naphthylsulfonylglycyl)-3-Amidino-D,L-Phenylalanine-Isopropylester; N-METHYL(5-(PYRIDIN-3-YL)FURAN-2-YL)METHANAMINE; PHOSPHONIC ACID 2-DODECANOYLAMINO-HEXYL ESTER PROPYL ESTER; 2-(4-METHYLPHENOXY)ETHYLPHOSPHINATE; Phosphoric Acid Mono-[3,4-Dihydroxy-5-(5-Hydroxy-Benzoimidazol-1-Yl)Tetrahydro-Furan-2-Ylmethyl] Ester; 2-(5-CHLORO-2-THIENYL)-N-{(3S)-1-[(1S)-1-METHYL-2-MORPHOLIN-4-YL-2-OXOETHYL]-2-OXOPYRROLIDIN-3-YL}ETHANESULFONAMIDE; 2-(6-HYDROXY-1,3-BENZOTHIAZOL-2-YL)-1,3-THIAZOL-4(5H)-ONE; N-METHYL-{4-[2-(7-OXO-6,7-DIHYDRO-8H-[1,3]THIAZOLO[5,4-E]INDOL-8-YLIDENE)HYDRAZINO]PHENYL}METHANESULFONAMIDE; N-Butyl-11-[(7r,8r,9s,13s,14s,17s)-3,17-Dihydroxy-13-Methyl-7,8,9,11,12,13,14,15,16,17-Decahydro-6h-Cyclopenta[a]Phenanthren-7-Yl]-N-Methylundecanamide; N-METHYL-4-{[(2-OXO-1,2-DIHYDRO-3H-INDOL-3-YLIDENE)METHYL]AMINO}BENZENESULFONAMIDE; O-(((1R)-((N-(PHENYL-METHOXY-CARBONYL)-ALANYL)-AMINO)METHYL)HYDROXYPHOSPHINYL)3-L-PHENYLLACTATE; O-(((1R)-((N-PHENYLMETHOXYCARBONYL-L-ALANYL)AMINO)ETHYL)HYDROXYPHOSPHONO)-L-BENZYLACETIC ACID; 2-(3-Methoxyphenyl) Benzimidazole-4-Carboxamide; Uridine-5′-Monophosphate 2-Deoxy-2-Fluoro-Galactopyranosyl-Monophosphate Ester; 2-(6-methylpyridin-2-yl)-N-pyridin-4-ylquinazolin-4-amine; PYRIMIDINE-4,6-DICARBOXYLIC ACID BIS-(3-METHYL-BENZYLAMIDE); PYRIMIDINE-4,6-DICARBOXYLIC ACID BIS-(4-FLUORO-3-METHYL-BENZYLAMIDE); PYRIMIDINE-4,6-DICARBOXYLIC ACID BIS-[(PYRIDIN-3-YLMETHYL)-AMIDE]; R-2-{[4′-Methoxy-(1,1′-Biphenyl)-4-Yl]-Sulfonyl}-Amino-6-Methoxy-Hex-4-Ynoic Acid; R-3-FLUORO-4-[2-HYDROXY-2-(5,5,8,8-TETRAMETHYL-5,6,7,8,-TETRAHYDRO-NAPHTALEN-2-YL)-ACETYLAMINO]-BENZOIC ACID; REL-(9R,12S)-9,10,11,12-TETRAHYDRO-9,12-EPOXY-1H-DIINDOLO[1,2,3-FG:3′,2′,1′-KL]PYRROLO[3,4-I][1,6]BENZODIAZOCINE-1,3(2H)-DIONE; N-Methyl-N-(10-Methylundecanoyl)-D-Seryl-L-Alanyl-N˜1˜-[(7s,10s,13s)-13-Carboxy-3,18-Di hydroxy-10-Methyl-8,11-Dioxo-9, 12-Diazatricyclo[13.3.1.1˜2,6˜]Icosa-1(19),2(20),3, 5, 15,17-Hexaen-7-YI]-N˜1˜-Methylglycinamide; O5′-(4-(3-{2-[2-((R)-3- Hydroxy-4-(Trimethylammonio)-1-Oxo-Butyl)Sulfanyl-Ethylcarbamoyl]-Ethylcarbamoyl}-(R)-3-Hydroxy-2,2-Dimethyl-Propyl)-1-Hydroxy-3-Oxido-1,3-Dioxo-2,4-Dioxa-1,3-Diphosphabut-1-Yl) 3-Phospho-Adenosine; Phosporic Acid Mono-[3,4-Dihydroxy-5-(5-Methoxy-Benzoimidazol-1-Yl)-Tetrahydro-Furan-2-Ylmethyl] Ester; 2-(hydrazinocarbonyl)-3-phenyl-1H-indole-5-sulfonamide; PHENYLALANYLAMINODI(ETHYLOXY)ETHYL BENZENESULFONAMIDEAMINOCARBONYLBENZENESULFONAMIDE; O6-(R)-ROSCOVITINE, R-2-(6-BENZYLOXY-9-ISOPROPYL-9H-PURIN-2-YLAMINO)-BUTAN-1-OL; N-cyclopropyl-3-{[1-(2,4-difluorophenyl)-7-methyl-6-oxo-6,7-dihydro-1H-pyrazolo[3,4-b]pyridin-4-yl]amino}-4-methylbenzamide; N-cyclopropyl-N-(trans-4-pyridin-3-ylcyclohexyl)-4-[(1S)-2,2,2-trifluoro-1-hydroxy-1-methylethyl]benzamide; 2-(methylamino)-N-(4-methyl-1,3-thiazol-2-yl)-5-[(4-methyl-4H-1,2,4-triazol-3-yl)sulfanyl]benzamide; 2-(Biphenyl-4-Sulfonyl)-1,2,3,4-Tetrahydro-Isoquinoline-3-Carboxylic Acid; tert-butyl [(2-amino-4-oxo-4,7-dihydro-3H-pyrrolo[2,3-d]pyrimidin-5-yl)methyl]carbamate; TERT-BUTYL [(1R)-2-METHYL-1-(1,3,4-OXADIAZOL-2-YL)PROPYL]CARBAMATE; TERT-BUTYL [(1S)-2-METHYL-1-(1,3,4-OXADIAZOL-2-YL)PROPYL]CARBAMATE; S-(2-{[N-(2-HYDROXY-4-{[HYDROXY(OXIDO)PHOSPHINO]OXY}-3,3-DIMETHYLBUTANOYL)-BETA-ALANYL]AMINO}ETHYL) HEXANETHIOATE; 2,2′-{[9-(HYDROXYIMINO)-9H-FLUORENE-2,7-DIYL]BIS(OXY)}DIACETIC ACID; THIENO[3,2-B]PYRIDINE-2-SULFONIC ACID [1-(1-AMINO-ISOQUINOLIN-7-YLMETHYL)-2-OXO-PYRROLDIN-3-YL]-AMIDE; THIENO[3,2-B]PYRIDINE-2-SULFONIC ACID [2-OXO-1-(1H-PYRROLO[2,3-C]PYRIDIN-2-YLMETHYL)-PYRROLIDIN-3-YL]-AMIDE; THIOPHENE-2,5-DISULFONIC ACID 2-AMIDE-5-(4-METHYL-BENZYLAMIDE); TRANS-(1S,2S)-2-AMINO-1,2,3,4-TETRAHYDRONAPHTHALEN-1-OL; TRANS-2-(DIMETHYLPHENYLSILYL)-PIPERIDINE-N-OXIDE; 2′,3-Dehydro-2′,3′-Deoxy-Thymidine 5′-Diphosphate; TERT-BUTYL 4-({[4-(BUT-2-YN-1-YLAMINO)PHENYL]SULFONYL}METHYL)-4-[(HYDROXYAMINO)CARBONYL]PIPERIDINE-1-CARBOXYLATE; tert-butyl 4-(3-thiophen-2-yl-1,2,4-oxadiazol-5-yl)piperidine-1-carboxylate; Spiro(2,4,6-Trinitrobenzene[1,2a]-20′,3d-Methylene-Adenine-Triphosphate; 2-(BUTYRYLOXY)-1-{[(TETRAHYDROXYPHOSPHORANYL)OXY]METHYL}ETHYL BUTYRATE; Sulfamic Acid 2,3-O-(1-Methylethylidene)-4,5-O-Sulfonyl-Beta-Fructopyranose Ester; S-[(2E)-3,7-DIMETHYLOCTA-2,6-DIENYL] TRIHYDROGENTHIODIPHOSPHATE; 2,4-Diamino-6-Phenyl-5,6,7,8,-Tetrahydropteridine; S-[2-({N-[(2S)-2-hydroxy-3,3-dimethyl-4-(phosphonooxy)butanoyl]-beta-alanyl}amino)ethyl] octanethioate; S-[3-(3,4-DICHLOROPHENYL)-3-OXOPROPYL]-L-CYSTEINE; S-[5-(TRIFLUOROMETHYL)-4H-1,2,4-TRIAZOL-3-YL] 5-(PHENYLETHYNYL)FURAN-2-CARBOTHIOATE; S-{2-[(2-chloro-4-sulfamoylphenyl)amino]-2-oxoethyl} 6-methyl-3,4-dihydroquinoline-1(2H)-carbothioate; S-{2-[Amino(Dihydroxy)-Lambda-4--Sulfanyl]Ethyl}-D-Cysteine; S-{3-[(4-ANILINOQUINAZOLIN-6-YL)AMINO]-3-OXOPROPYL}-L-CYSTEINE; S-3-(4-FLUOROPHENOXY)-2-HYDROXY-2-METHYL-N-[4-NITRO-3-(TRI FLUOROMETHYL)PHENYL]PROPANAMIDE; octyl 3-amino-3-deoxy-2-O-(2,6-dideoxy-alpha-L-lyxo-hexopyranosyl)-beta-D-galactopyranoside; octyl 3-deoxy-2-O-(6-deoxy-alpha-L-galactopyranosyl)-beta-D-xylo-hexopyranoside; N,N-Bis(4-Chlorobenzyl)-1h-1,2,3,4-Tetraazol-5-Amine; 2,4-Dinitrophenyl 2-Deoxy-2-Fluoro-Beta-D-Allopyranoside; N′-[(1E)-(3,5-dibromo-2,4-dihydroxyphenyl)methylidene]-4-methoxybenzohydrazide; N′-[(1E)-(3,5-dibromo-2,4-dihydroxyphenyl)methylidene]naphthalene-2-carbohydrazide; N-[(1R)-3-(4-HYDROXYPHENYL)-1-METHYLPROPYL]-2-(2-PHENYL-1H-INDOL-3-YL)ACETAMIDE; N-[(1R,2R,3E)-2-hydroxy-1-(hydroxymethyl)heptadec-3-en-1-yl]acetamide; N-[(1S)-1-(AMINOCARBONYL)-4-(ETHANIMIDOYLAMINO)BUTYL]BENZAMIDE; N-[(1S)-2-amino-1-phenylethyl]-5-(1H-pyrrolo[2,3-b]pyridin-4-yl)thiophene-2-carboxamide; N-[(1S)-2-methyl-1-(pyridin-4-ylcarbamoyl)propyl]cyclohexanecarboxamide; N-[(1S)-5-amino-1-(chloroacetyl)pentyl]-4-methylbenzenesulfonamide; N-[(2′,4′-DIFLUORO-4-HYDROXY-5-IODOBIPHENYL-3-YL)CARBONYL]-BETA-ALANINE; N-[(2R)-2-{[(2S)-2-(1,3-benzoxazol-2-yl)pyrrolidin-1-yl]carbonyl}hexyl]-N-hydroxyformamide; N-[(2R)-2-benzyl-4-(hydroxyamino)-4-oxobutanoyl]-L-alanine; N-[(2R)-5-(aminosulfonyl)-2,3-dihydro-1H-inden-2-yl]-2-propylpentanamide; N-[(3z)-5-Tert-Butyl-2-Phenyl-1,2-Dihydro-3h-Pyrazol-3-Ylidene]-N′-(4-Chlorophenyl)Urea; N-[(4-HYDROXY-8-IODOISOQUINOLIN-3-YL)CARBONYL]GLYCINE; N-[(6-BUTOXYNAPHTHALEN-2-YL)SULFONYL]-D-GLUTAMIC ACID; 2,6-anhydro-3-deoxy-3-fluoronononic acid; 4-Oxo-2-Phenylmethanesulfonyl-Octahydro-Pyrrolo[1,2-a]Pyrazine-6-Carboxylic Acid [1-(N-Hydroxycarbamimidoyl)-Piperidin-4-Ylmethyl]-Amide; 5-HYDROXY-2-(4-HYDROXYPHENYL)-1-BENZOFURAN-7-CARBONITRILE; 5-BROMO-2-{[(4-CHLOROPHENYL)SULFONYL]AMINO}BENZOIC ACID; 5,6,7,8-TETRAHYDRO[1]BENZOTHIENO[2,3-D]PYRIMIDIN-4(3H)-ONE; 4-{2-[(7-amino-2-furan-2-yl[1,2,4]triazolo[1,5-a][1,3,5]triazin-5-yl)amino]ethyl}phenol; 4-{2-[4-(2-Aminoethyl)Piperazin-1-Yl]Pyridin-4-Yl}-N-(3-Chloro-4-Methylphenyl)Pyrimidin-2-Amine; 4-{3-CHLORO-4-[3-(2,4-DICHLORO-BENZOYL)-UREIDO]-PHENOXY}-BUTYRIC ACID; 4-AMINO-2-HEXYLOXY-6-HYDROXYMETHYL-TETRAHYDRO-PYRAN-3,5-DIOL; 4-AMINO-2-OCTYLOXY-6-HYDROXYMETHYL-TETRAHYDRO-PYRAN-3,5-DIOL; 4-AMINO-2-TRIFLUOROMETHYL-5-HYDROXYMETHYLPYRIMIDINE PYROPHOSPHATE; 2,6-DIMETHYL-1-(3-[3-METHYL-5-ISOXAZOLYL]-PROPANYL)-4-[2-METHYL-4-ISOXAZOLYL]-PHENOL; 2,6-Dihydroanthra/1,9-Cd/Pyrazol-6-One; 4-Acetamido-2,4-Didexoy-D-Glycero-Beta-D-Galacto-Octopyranosylphosphonic Acid; 4-Acetyl-4-Guanidino-6-Methyl(Propyl)Carboxamide-4,5-Dihydro-2h-Pyran-2-Carboxylic Acid; 4-Amino-1-[(1s,3r,4r,7s)-7-Hydroxy-1-(Hydroxymethyl)-2,5-Dioxabicyclo[2.2.1]Hept-3-Yl]-5-Methylpyrimidin-2(1h)-One; 4-METHYL-N-METHYL-N- (2-PHENYL-2H-PYRAZOL-3-YL)BENZENESULFONAMIDE; 4-METHYL-PENTANOIC ACID {1-[4-GUANIDINO-1-(THIAZOLE-2-CARBONYL)-BUTYLCARBAMOYL]-2-METHYL-PROPYL}-AMIDE; 4-Morpholin-4-Yl-Piperidine-1-Carboxylic Acid [1-(3-Benzenesulfonyl-1-Propyl-Allylcarbamoyl)-2-Phenylethyl]-Amide; 2-[(1S)-1-BENZYL-2-SULFANYLETHYL]-1H-IMIDAZO[4,5-C]PYRIDIN-5-IUM; 4-(2-HYDROXYBENZYLAMINO)-N-(3-(4-FLUOROPHENOXY)PHENYL)PIPERIDINE-1-SULFONAMIDE; 2-[(2-chloro-4-iodophenyl)amino]-N-{[(2R)-2,3-dihydroxypropyl]oxy}-3,4-difluorobenzamide; 4-(6-{[(1R)-1-(hydroxymethyl)propyl]amino}imidazo[1,2-b]pyridazin-3-yl)benzoic acid; 4-(1,3-BENZODIOXOL-5-YLOXY)-2-[4-(1H-IMIDAZOL-1-YL)PHENOXY]-6-METHYLPYRIMIDINE; 2′,4′-Dinitrophenyl-2deoxy-2-Fluro-B-D-Cellobioside; 2-[(2-NAPHTHYLSULFONYL)AMINO]ETHYL DIHYDROGEN PHOSPHATE; 4-{2,6,8-Trioxo-9-[(2s,3r,4r)-2,3,4,5-Tetrahydroxypentyl]-1,2,3,6,8,9-Hexahydro-7h-Purin-7-Yl}Butyl Dihydrogen Phosphate; 4-(6-CYCLOHEXYLMETHOXY-9H-PURIN-2-YLAMINO)--BENZAMIDE; 2-[(4-fluorophenyl)sulfonylamino]-N-oxo-ethanamide; 4-(1,3-Benzodioxol-5-Yl)-5-(5-Ethyl-2,4-Dihydroxyphenyl)-2h-Pyrazole-3-Carboxylic Acid; 4-(2-Amino-Ethoxy)-2-[(3-Hydroxy-2-Methyl-5-Phosphonooxymethyl-Pyridin-4-Ylmethyl)-Amino]-but-3-Enoic Acid; 4-(6-{[(4-METHYLCYCLOHEXYL)AMINO]METHYL}-1,4-DIHYDROINDENO[1,2-C]PYRAZOL-3-YL)BENZOIC ACID; 4-(2-{[4{[3-(4-Chlorophenyl)Propyl]Sulfanyl}-6-(1-Piperazinyl)-1,3,5-Triazin-2-Yl]Amino}Ethyl)Phenol; 4-(2-aminoethoxy)-N-(2,5-diethoxyphenyl)-3,5-dimethylbenzamide; 4-(2-aminoethoxy)-N-(3-chloro-2-ethoxy-5-piperidin-1-ylphenyl)-3,5-dimethylbenzamide; 2-[(Formyl-Hydroxy-Amino)-Methyl]-Heptanoic Acid [1-(2-Hydroxymethyl-Pyrrolidine-1-Carbonyl)-2-Methyl-Propyl]-Amide; 4-HYDROXYBENZALDEHYDE O-(CYCLOHEXYLCARBONYL)OXIME; 4-METHYL-N-{(5E)-5-[(5-METHYL-2-FURYL)METHYLENE]-4-OXO-4,5-DIHYDRO-1,3-THIAZOL-2-YL}BENZENESULFONAMIDE; 2-[1-(4-CHLOROBENZOYL)-5-METHOXY-2-METHYL-1H-INDOL-3-YL]-N-[(1S)-1-(HYDROXYMETHYL)PROPYL]ACETAMIDE; 5-[2-CHLORO-4-(TRIFLUOROMETHYL)PHENOXY]-2-NITROBENZOIC ACID; 5,7-DIHYDROXY-2-(3,4,5-TRIHYDROXYPHENYL)-4H-CHROMEN-4-ONE; 2-[2-(2-Hydroxy-Ethoxy)-Ethoxy]-Ethanol; 5-HYDROXY-3-[(1R)-1-(1H-PYRROL-2-YL)ETHYL]-2H-INDOL-2-ONE; 5-hydroxy-4-(7-methoxy-1,1-dioxido-2H-1,2,4-benzothiadiazin-3-yl)-2-(3-methylbutyl)-6-phenylpyridazin-3(2H)-one; 5-AMINO-6-CYCLOHEXYL-4-HYDROXY-2-ISOBUTYL-HEXANOIC ACID; 2-[2-(4-CHLORO-PHENYLSULFANYL)-ACETYLAMINO]-3-(4-GUANIDINO-PHENYL)-PROPIONAMIDE; 5-Imino-4-(3-trifluoromethyl-phenylazo)-5H-pyrazol-3-ylamine; 5-IMINO-4-(2-TRIFLUOROMETHYL-PHENYLAZO)-5H-PYRAZOL-3-YLAMINE; 5-METHYL-3-(9-OXO-1,8-DIAZA-TRICYCLO[10.6.1.013,18]NONADECA-12(19),13,15,17-TETRAEN-10-YLCARBAMOYL)-HEXANOIC ACID; 74(Carboxy(4-Hydroxyphenyl)Acetyl)Amino)-7-Methoxy-(3-((1-Methyl-1h-Tetrazol-5-Yl)Thio)Methyl)-8-Oxo-5-Oxa-1-Azabicyclo[4.2.0]Oct-2-Ene-2-Carboxylic Acid; 6-methyl-5-[3-methyl-3-(3,4,5-trimethoxyphenyl)but-1-yn-1-yl]pyrimidine-2,4-diamine; 4-(1,3-BENZODIOXOL-5-YLOXY)-2-[4-(1H-IMIDAZOL-1-YL)PHENOXY]PYRIMIDINE; 7-(1,1-Dioxo-1h-Benzo[D]Isothiazol-3-Yloxymethyl)-2-(Oxalyl-Amino)-4,7-Dihydro-5h-Thieno[2,3-C]Pyran-3-Carboxylic Acid; 7,8-Dihydroxy-1-Methoxy-3-Methyl-10-Oxo-4,10-Dihydro-1h,3h-Pyrano[4,3-B]Chromene-9-Carboxylic Acid; 7-(1-Methyl-1,2,3-Triazol-4-Yl)-6-Formyl-2,7-Dihydro-[1,4]Thiazepine-3-Carboxylic Acid, Brl42715, C6-(N1-Methyl-1,2,3-Triazolylmethylene)Penem; 7-(2-Amino-2-Phenyl-Acetylamino)-3-Chloro-8-Oxo-1-Aza-Bicyclo[4.2.0]Oct-2-Ene-2-Carboxylic Acid; 7-(1-ETHYL-PROPYL)-7H-PYRROLO-[3,2-F]QUINAZOLINE-1,3-DIAMINE; 6-{4-[HYDROXY-(4-NITRO-PHENOXY)-PHOSPHORYL]-BUTYRYLAMINO}-HEXANOIC ACID; 7-(aminomethyl)-6-(2-chlorophenyl)-1-methyl-1H-benzimidazole-5-carbonitrile; 7,10,13-Tri(Carboxymethyl)-5,15-Dioxo-4,7,10,13,16-Pentaaza-1,19-Dithianonadecane; 6-CHLORO-4-(CYCLOHEXYLSULFINYL)-3-PROPYLQUINOLIN-2(1H)-ONE; 6-CYCLOHEXYLMETHOXY-2-(3-CHLOROANILINO) PURINE; 2-[4-[[(S)-1-[[(S)-2-[[(Rs)-3,3,3-Trifluoro-1-Isopropyl-2-Oxopropyl]Aminocarbonyl]Pyrrolidin-1-Yl-]Carbonyl]-2-Methylpropyl]Aminocarbonyl]Benzoylamino]Acetic Acid; 6-CYCLOHEXYLMETHYLOXY-5-NITROSO-PYRIMIDINE-2,4-DIAMINE; 6-ethyl-5-[(2S)-1-(3-methoxypropyl)-2-phenyl-1,2,3,4-tetrahydroquinolin-7-yl]pyrimidine-2,4-diamine; 6-ETHYL-5-[9-(3-METHOXYPROPYL)-9H-CARBAZOL-2-YL]PYRIMIDINE-2,4-DIAMINE; 6-Fluoro-2-(2′-Fluoro-1,1′-Biphenyl-4-Yl)-3-Methylquinoline-4-Carboxylic Acid; 7-(5-DEOXY-BETA-D-RIBOFURANOSYL)-5-IODO-7H-PYRROLO[2,3-D]PYRIMIDIN-4-AMINE; 2-[N′-(4-AMINO-BUTYL)-HYDRAZINOCARBONYL]-PYRROLIDINE-1-CARBOXYLIC ACID BENZYL ESTER; 6-amino-2-[(2-morpholin-4-ylethyl)amino]-3,7-dihydro-8H-Imidazo[4,5-g]quinazolin-8-one; 6-amino-2-[(thiophen-2-ylmethyl)amino]-1,7-dihydro-8H-Imidazo[4,5-g]quinazolin-8-one; 6-(Adenosine Tetraphosphate-Methyl)-7,8-Dihydropterin; 6-(cyclohexylamino)-9-[2-(4-methylpiperazin-1-yl)-ethyl]-9H-purine-2-carbonitrile; 2-[CARBOXY-(2-THIOPHEN-2-YL-ACETYLAMINO)-METHYL]-5-METHYLENE-5,6-DIHYDRO-2H-[1,3]THIAZINE-4-CARBOXYLIC ACID; 6-(cyclohexylsulfanyl)-1-(ethoxymethyl)-5-(1-methylethyl)pyrimidine-2,4(1H,3H)-dione; 2-{[(6-OXO-1,6-DIHYDROPYRIDIN-3-YL)METHYL]AMINO}-N-[4-PROPYL-3-(TRIFLUOROMETHYL)PHENYL]BENZAMIDE; 6-(Hydroxyethyldithio)-8-(Aminomethylthio)Octanoic Acid; 6-(N-Phenylcarbamyl)-2-Naphthalenecarboxamidine; 6-(Octahydro-1h-Indol-1-Ylmethyl)Decahydroquinazoline-2,4-Diamine; 2-{[N-(2-ACETYL-5-CHLORO-4-FLUOROPHENYL)GLYCYL]AMINO}BENZOIC ACID; 4-[(1S)-1-(3-fluoro-4-methoxyphenyl)-2-(2-methoxy-5-nitrophenyl)ethyl]-1H-imidazol-2-amine; 4-[(1S,2R,5S)-4,4,8-TRIMETHYL-3-OXABICYCLO[3.3.1]NON-7-EN-2-YL]PHENOL; 2-{2-[(3,5-dimethylphenyl)amino]pyrimidin-4-yl}-N-[(1S)-2-hydroxy-1-methylethyl]-4-methyl-1,3-thiazole-5-carboxamide; 4-[(3S)-1-AZABICYCLO[2.2.2]OCT-3-YLAMINO]-3-(1H-BENZIMIDAZOL-2-YL)-6-CHLOROQUINOLIN-2(1H)-ONE; 4-[(4-bromo-2-{[(3R,5S)-3,5-dimethylpiperidin-1-yl]carbonyl}phenyl)amino]-4-oxobutanoic acid; 4-[(4-Imidazo[1,2-a]Pyridin-3-Ylpyrimidin-2-Yl)Amino]Benzenesulfonamide; 4,6-O(1-CARBOXYETHYLIDENE)-BETA-D-MANNOSE-(1-&gt;4)-BETA-D-GLUCURONIC ACID; 4,6-O-(1-CARBOXYETHYLIDENE)-BETA-D-MANNOSE-(1->4)-BETA-D-GLUCURONIC ACID; 2-{4-[(3,5-DIMETHYLANILINO)-CARBONYL-METHYL]-PHENOXY}-2-METHYLPROPIONIC ACID; 3-methyl-N4pyridin-4-ylmethyl)imidazo[1,2-a]pyrazin-8-amine; 3-Nitro-4-(2-Oxo-Pyrrolidin-1-Yl)-Benzenesulfonamide; 2-{4-[4-({4-[2-methyl-1-(1-methylethyl)-1H-imidazol-5-yl]pyrimidin-2-yl}amino)phenyl]piperazin-1-yl}-2-oxoethanol; 3-OXO-N-[(3S)-2-OXOPYRROLIDIN-3-YL]DODECANAMIDE; 3-OXO-OCTANOIC ACID (2-OXO-TETRAHYDRO-FURAN-3-YL)-AMIDE; 3′-Phosphate-Adenosine-5′-Diphosphate; 2-{HYDROXY[2-NITRO-4-(TRIFLUOROMETHYL)PHENYL]METHYLENE}CYCLOHEXANE-1,3-DIONE; 2-{N′-[2(5-Amino-1-Phenylcarbamoyl-Pentylcarbamoyl)-Hexyl]-Hydrazinomethyl}-Hexanoic Acid(5-Amino-1-Phenylcarbamoyl-Pentyl)-Amide; 3-Pyridin-4-Yl-2,4-Dihydro-Indeno[1,2-.C.]Pyrazole; 2-{4-[5-(4-chlorophenyl)-4-pyrimidin-4-yl-1H-pyrazol-3-yl]piperidin-1-yl}-2-oxoethanol; 2-ETHOXYETHYL (2S,3S)-4-((S)-2-BENZYL-3-OXO-4-((3AR,8R,8AS)-2-OXO-3,3A,8,8A-TETRAHYDRO-2H-INDENO[1,2-D]OXAZOL-8-YL)-2,3-DIHYDRO-1H-PYRROL-2-YL)-3-HYDROXY-1-PHENYLBUTAN-2-YLCARBAMATE; 4-(2,4-Dimethyl-Thiazol-5-Yl)-Pyrimidin-2-Ylamine; 2-CHLORO-4-[(7R,7AS)-7-HYDROXY-1,3-DIOXOTETRAHYDRO-1H-PYRROLO[1,2-C]IMIDAZOL-2(3H)-YL]-3-METHYLBENZONITRILE; 4-(2,4-dichlorophenyl)-5-phenyldiazenyl-pyrimidin-2-amine; 2-Amino-3-[4-Hydroxy-6-Oxo-3-(2-Phenyl-Cyclopropylimino)-Cyclohexa-1,4-Dienyl]-Propionic Acid; 4-(1-Benzyl-3-Carbamoylmethyl-2-Methyl-1h-Indol-5-Yloxy)-Butyric Acid; 4-(2,5-DIAMINO-5-HYDROXY-PENTYL)-PHENOL; 2-Amino-3(3-Hydroxy-7,8-Dihydro-6h-Cyclohepta[D]-4-Isoxazolyl)Propionic Acid; 4-(2-amino-1,3-thiazol-4-yl)pyrimidin-2-amine; 4-(2-AMINOETHYL)BENZENESULFONAMIDE; 4-(2-amino-1-methyl-1H-imidazo[4,5-b]pyridin-6-yl)phenol; 4-(2-AMINOETHYL)BENZENESULFONYL FLUORIDE; 4-(2-AMINOPHENYL)-4-OXOBUTANOIC ACID; 4-(2-HYDROXYPHENYLSULFINYL)-BUTYLPHOSPHONIC ACID; 4-(2-HYDROXYPHENYLTHIO)-1-BUTENYLPHOSPHONIC ACID; 4-(2-methoxyethoxy)-6-methylpyrimidin-2-amine; 4-(2-METHOXYPHENYL)-2-OXOBUT-3-ENOIC ACID; 2-amino-4-[2,4-dichloro-5-(2-pyrrolidin-1-ylethoxy)phenyl]-N-ethylthieno[2,3-d]pyrimidine-6-carboxamide; 4-(2-Thienyl)-1-(4-Methylbenzyl)-1h-Imidazole; 4-(3-ethylthiophen-2-yl)benzene-1,2-diol; 4-(3-amino-1H-indazol-5-yl)-N-tert-butylbenzenesulfonamide; 4-(3-Pyridin-2-Yl-1h-Pyrazol-4-Yl)Quinoline; 4-(4-chlorobenzyl)-1-(7H-pyrrolo[2,3-d]pyrimidin-4-yl)piperidin-4-aminium; 4-(4-FLUOROPHENYL)-1-CYCLOROPROPYLMETHYL-5-(4-PYRIDYL)-IMIDAZOLE; 4-(5-Bromo-2-Oxo-2h-Indol-3-Ylazo)-Benzenesulfonamide; 4-(4-Hydroxy-3-Isopropylphenylthio)-2-Isopropylphenol; 4-(4-hydroxy-3-methylphenyl)-6-phenylpyrimidin-2(5H)-one; 4-(4-HYDROXYPHENYL)-1-NAPHTHALDEHYDE OXIME; 4-(4-methoxy-1H-pyrrolo[2,3-b]pyridin-3-yl)pyrimidin-2-amine; 4-(4-methyl-1,3-dioxo-1,3-dihydro-2H-isoindol-2-yl)benzonitrile; 4-(4-propoxy-1H-pyrrolo[2,3-b]pyridin-3-yl)pyrimidin-2-amine; 4-(4-STYRYL-PHENYLCARBAMOYL)-BUTYRIC ACID; 4-(4-fluoro-phenylazo)-5-imino-5H-pyrazol-3-ylamine; 4-(5-phenyl-1H-pyrrolo[2,3-b]pyridin-3-yl)benzoic acid; 4-(6-HYDROXY-1H-INDAZOL-3-YL)BENZENE-1,3-DIOL; 2-Amino-5-Bromo-6-Phenylpyrimidin-4-Ol; 4-(Acetylamino)-3-[(Aminoacetyl)Amino]Benzoic Acid; 2-butoxy-9-(2,6-difluorobenzyl)-N-(2-morpholin-4-ylethyl)-9H-purin-6-amine; 4-(Acetylamino)-3-Amino Benzoic Acid; 4-(Acetylamino)-3-Guanidinobenzoic Acid; 4-(ACETYLAMINO)-3-HYDROXY-5-NITROBENZOIC ACID; 4-(ACETYLAMINO)-5-AMINO-3-HYDROXYBENZOIC ACID; 4-(acetylamino)-N-(4-fluorophenyl)-1H-pyrazole-3-carboxamide; 4-(Aminosulfonyl)-N-[(2,3,4-Trifluorophenyl)Methyl]-Benzamide; 4-(Aminosulfonyl)-N-[(2,4,6-Trifluorophenyl)Methyl]-Benzamide; 2-CHLORO-N-(3-CYANO-5,6-DIHYDRO-4H-CYCLOPENTA[B]THIOPHEN-2-YL)-5-DIETHYLSULFAMOYL-BENZAMIDE; 4-(Aminosulfonyl)-N-[(2,5-Difluorophenyl)Methyl]-Benzamide; 4-(Aminosulfonyl)-N-[(3,4,5-Trifluorophenyl)Methyl]-Benzamide; 2-CHLORO-N-[(3R)-2-OXO-1,2,3,4-TETRAHYDROQUINOLIN-3-YL]-6H-THIENO[2,3-B]PYRROLE-5-CARBOXAMIDE; 4-(BENZHYDRYLOXY)-1-[3-(1H-TETRAAZOL-5-YL)PROPYL]PIPERIDINE; 4-(dihydroxyboranyl)-2-({[4-(phenylsulfonyl)thiophen-2-yl]sulfonyl}amino)benzoic acid; 4-(N-ACETYLAMINO)-3-[N-(2-ETHYLBUTANOYLAMINO)]BENZOIC ACID; 4-(Fluorophenyl)-1-Cyclopropylmethyl-5-(2-Amino-4-Pyrimidinyl)Imidazole; 4-(DIMETHYLAMINO)BUTYL IMIDOTHIOCARBAMATE; 4-(METHYLSULFONYL)BENZENECARBOXIMIDAMIDE; 4-(N,N-Dimethylamino)Cinnamoyl-Coa; 4-(Methylsulfanyl)-2-Oxobutanoic Acid; 4-(quinolin-3-ylmethyl)piperidine-1-carboxylic acid; 4,4′[1,6-Hexanediylbis(Oxy)]Bisbenzenecarboximidamide; 4,4′-BIS([H]METHYLSULFONYL)-2,2′,5,5′-TETRACHLOROBIPHENYL; 4,5,6,7-Tetrachloro-3h-Isobenzofuran-1-One; 4,5-bis(4-methoxyphenyl)-2-thiophen-2-yl-1H-imidazole; 4,5-Dihydroxy-Tetrahydro-Pyran-2-Carboxylic Acid; 4,5-Dimethyl-1,2-Phenylenediamine; 4,6-O-(1-Carboxyethylidene)-Beta-D-Glucose; 4-[(5-bromopyridin-2-yl)amino]-4-oxobutanoic acid; 2-hydroxy-7-methoxy-5-methyl-naphthalene-1-carboxylic acid meso-2,5-dihydroxy-cyclopent-3-enyl ester; 4-[(5-methoxy-2-methylphenoxy)methyl]pyridine; 4-[(6-Amino-4-Pyrimidinyl)Amino]Benzenesulfonamide; 4-[(6-chloropyrazin-2-yl)amino]benzenesulfonamide; 2-HYDROXY-1,1′-BIPHENYL-2-SULFINIC ACID; 4-[(E)-(3,5-DIAMINO-1H-PYRAZOL-4-YL)DIAZENYL]PHENOL; 2-Fluoro-2-Deoxy-Beta-D-Galactopyranosyl-Beta-D-Glucopyranose; 4-[1-allyl-7-(trifluoromethyl)-1H-indazol-3-yl]benzene-1,3-diol; 4-[(METHYLSULFONYL)AMINO]BENZOIC ACID; 4-[3-(1,4-diazepan-1-ylcarbonyl)-4-fluorobenzyl]phthalazin-1(2H)-one; 4-[3-(1H-BENZIMIDAZOL-2-YL)-1H-INDAZOL-6-YL]-2-METHOXYPHENOL; 4-[3-(2-Chloro-4,5-difluoro-benzoyl)ureido]-3-trifluoromethoxybenzoic acid; 4-[3-(3-NITROPHENYL)-1,2,4-OXADIAZOL-5-YL]BUTANOIC ACID; 4-[3-(4-CHLOROPHENYL)-1H-PYRAZOL-5-YL]PIPERIDINE; 4-[3-(4-chlorophenyl)-2,1-benzisoxazol-5-yl]pyrimidin-2-amine; 4-[3-(4-FLUOROPHENYL)-1H-PYRAZOL-4-YL]PYRIDINE; 4-[3-(dibenzylamino)phenyl]-2,4-dioxobutanoic acid; 4-[5-Pyridin-4-Yl-1h-[1,2,4]Triazol-3-Yl]-Pyridine-2-Carbonitrile; 2-IMINO-5-(1-PYRIDIN-2-YL-METH-(E)-YLIDENE)-1,3-THIAZOLIDIN-4-ONE; 4-[4-(4-methoxyphenyl)-5-methyl-1H-pyrazol-3-yl]benzene-1,3-diol; 3-({1-[3-CARBAMIMIDOYL-1-(4-CARBAMIMIDOYL-BENZYLCARBAMOYL)-PROPYLCARBAMOYL]-2-METHYL-BUTYLSULFAMOYL}-METHYL)-BENZOIC ACID; 4-[3-Hydroxyanilino]-6,7-Dimethoxyquinazoline; 4-[8-(3-nitrophenyl)-1,7-naphthyridin-6-yl]benzoic acid; 2-METHYL-FURAN-3-CARBOTHIOIC ACID [4-CHLORO-3-(3-METHYL-BUT-2-ENYLOXY)-PHENYL]-AMIDE; 4-{[(2R)-2-(2-methylphenyl)pyrrolidin-1-yl]carbonyl}benzene-1,3-diol; 4-{[(2S)-3-(tert-butylamino)-2-hydroxypropyl]oxy}-3H-indole-2-carbonitrile; 2′-Monophosphoadenosine-5′-Diphosphate; 4-Hydroxy-3-[(1s)-3-Oxo-1-Phenylbutyl]-2h-Chromen-2-One; 4-chloro-6-{5-[(2-morpholin-4-ylethyl)amino]-1,2-benzisoxazol-3-yl}benzene-1,3-diol; 2′-Monophosphoadenosine-5-Diphosphoribose; 2-O-(4′-AMIDINOPHENYL)-5-O-(3″-AMIDINOPHENYL)-1,4:3,6-DIANHYDRO-D-SORBITOL; dichlorophenyl)-N-(pyridin-4-ylmethyl)pyrazolo[1,5-a]pyrimidin-7-amine; 4-{2,4-Bis[(3-Nitrobenzoyl)Amino]Phenoxy}Phthalic Acid; 4-{2-[(3-Nitrobenzoyl)Amino]Phenoxy}Phthalic Acid; 4-Amino-2-Deoxy-2,3-Dehydro-N-Neuraminic Acid; 4-bromo-2-{[(3R,5S)-3,5-dimethylpiperidin-1-yl]carbonyl}aniline; 4-amino-7,7-dimethyl-7,8-dihydroquinazolin-5(6H)-one; 4-amino-N-[4-(benzyloxy)phenyl]butanamide; 4-bromo-2-{[(2R)-2-(2-chlorobenzyl)pyrrolidin-1-yl]carbonyl}aniline; 4-Amino-5-Hydroxymethyl-2-Methylpyrimidine; 4-Bromo-3-Hydroxy-3-Methyl Butyl Diphosphate; 4-bromo-6-(6-hydroxy-1,2-benzisoxazol-3-yl)benzene-1,3-diol; 2-PHENYLAMINO-4-METHYL-5-ACETYL THIAZOLE; 4-CHLORO-3′,3″-DIBROMOPHENOL-1,8-NAPHTHALEIN; 3-({4-[(5-CHLORO-1,3-BENZODIOXOL-4-YL)AMINO]PYRIMIDIN-2-YL}AMINO)BENZAMIDE; 4-[4-(4-Methyl-2-Methylamino-Thiazol-5-Yl)-Pyrimidin-2-Ylamino]-Phenol; 3-({2-[(4-{[6-(CYCLOHEXYLMETHOXY)-9H-PURIN-2-YL]AMINO}PHENYL)SULFONYL]ETHYL}AMINO)PROPAN-1-OL; 4-Epi-Vancosaminyl Derivative of Vancomycin; 3-(2-CHLOROPHENYL)-1-(2-{[(1S)-2-HYDROXY-1,2-DIMETHYLPROPYL]AMINO}PYRIMIDIN-4-YL)-1-(4-METHOXYPHENYL)UREA; 4′-FLUORO-1,1′-BIPHENYL-4-CARBOXYLIC ACID; 3-({4-[(6-CHLORO-1-BENZOTHIEN-2-YL)SULFONYL]-2-OXOPIPERAZIN-1-YL}METHYL)BENZENECARBOXIMIDAMIDE; 4-Diphosphocytidyl-2-C-Methyl-D-Erythritol 2-Phosphate; 4-Hydroxy-3,4-Dihydro-1h-Pyrimidin-2-One; 3-(1,1-dioxido-4H-1,2,4-benzothiadiazin-3-yl)-4-hydroxy-1-(3-methylbutyl)quinolin-2(1H)-one; 4-Hydroxy-L-Threonine-5-Monophosphate; 3-(2-AMINO-6-BENZOYLQUINAZOLIN-3(4H)-YL)-N-CYCLOHEXYL-N-METHYLPROPANAMIDE; 4-HYDROXY-N-PROPARGYL-1(R)-AMINOINDAN; 3-(1h-Indol-3-Yl)-2-[4-(4-Phenyl-Piperidin-1-Yl)-Benzenesulfonylamino]-Propionic Acid; 4-Imino-5-Methidyl-2-Methylpyrimidine; 4-Imino-5-Methidyl-2-Trifluoromethylpyrimidine; 3-(1H-INDOL-3-YL)-4-{1-[2-(1-METHYLPYRROLIDIN-2-YL)ETHYL]-1H-INDOL-3-YL}-1H-PYRROLE-2,5-DIONE; 4-Iodobenzo[B]Thiophene-2-Carboxamidine; 4-Methyl-5-Hydroxyethylthiazole; 4-methyl-7,8-dihydro-5H-thiopyrano[4,3-d]pyrimidin-2-amine; 4-Methyl-5-Hydroxyethylthiazole Phosphate; 4-NITRO-BENZYLPHOSPHONOBUTANOYL-GLYCINE; 3-(2-aminoquinazolin-6-yl)-4-methyl-1-[3-(trifluoromethyl)phenyl]pyridin-2(1H)-one; 4-Sulfonamide-[1-(4-Aminobutane)]Benzamide; 4-Sulfonamide-[4-(Thiomethylaminobutane)]Benzamide; 4-TERT-BUTYLBENZENESULFONIC ACID; 5-(1,4-DIAZEPAN-1-SULFONYL)ISOQUINOLINE; 5-(2,5-DICHLOROPHENYL)-2-FUROIC ACID; 3-(2-AMINOQUINAZOLIN-6-YL)-4-METHYL-N-[3-(TRIFLUOROMETHYL)PHENYL]BENZAMIDE; 5-(dodecylthio)-1H-1,2,3-triazole-4-carboxylic acid; 5-(3-Amino-4,4-Dihyroxy-Butylsulfanylmethyl)-Tetrahydro-Furan-2,3,4-Triol; 5-(3-carbamoylbenzyl)-5,6,7,8,9,10-hexahydrocyclohepta[b]indole-4-carboxylic acid; 5-(3-HYDROXYPHENYL)ISOTHIAZOL-3(2H)-ONE 1,1-DIOXIDE; 3-(3,5-Dibromo-4-Hydroxy-Benzoyl)-2-Ethyl-Benzofuran-6-Sulfonic Acid (4-Sulfamoyl-Phenyl)-Amide; 5-(4-Morpholin-4-Yl-Phenylsulfanyl)-2,4-Quinazolinediamine; 3-(3-methoxybenzyl)-1H-pyrrolo[2,3-b]pyridine; 5-(5-(4-(5-hydro-4-methyl-2-oxazolyl)phenoxy)pentyl)-3-methyl isoxazole; 3-(3,5-Dibromo-4-Hydroxy-Benzoyl)-2-Ethyl-Benzofuran-6-Sulfonic Acid [4-(Thiazol-2-Ylsulfamoyl)-Phenyl]-Amide; 5-(6-D-Ribitylamino-2,4-Dihydroxypyrimidin-5-Yl)-1-Pentyl-Phosphonic Acid; 5-(7-(4-(4,5-dihydro-2-oxazolyl)phenoxy)heptyl)-3-methyl isoxazole; 5-(7-(5-hydro-4-ethyl-2-oxazolyl)phenoxy)heptyl)-3-methyl isoxazole; 5-(7-(5-hydro-4-methyl-2-oxazolyl)phenoxy)heptyl)-3-methyl isoxazole; 5-(7-(6-chloro-4-(5-hydro-4-methyl-2-oxazolyl)phenoxy)heptyl)-3-methyl isoxazole; 5-(AMINOCARBONYL)-1,1′:1,1″-TERPHENYL-3-CARBOXYLICACID; 5,10-Dimethylene Tetrahydromethanopterin; 5(R)-5-Fluoro-Beta-D-Xylopyranosyl-Enzyme Intermediate; 5,10,15,20-Tetrakis(4-Sulpfonatophenyl)-21h,23h-Porphine; 5-(3,3-Dihydroxypropeny)-3-Methoxy-Benzene-1,2-Diol; 5-(Aminomethyl)-2-Methylpyrimidin-4-Amine; 5-(Aminomethyl)-6-(2,4-Dichlorophenyl)-2-(3,5-Dimethoxyphenyl)Pyrimidin-4-Amine; 3-(5-{[4-(AMINOMETHYL)PIPERIDIN-1-YL]METHYL}-1H-INDOL-2-YL)QUINOLIN-2(1H)-ONE; 5-(DIMETHYLAMINO)-2-NAPHTHALENESULFONIC ACID; 5-(HEXAHYDRO-2-OXO-1H-THIENO[3,4-D]IMIDAZOL-6-YL)PENTANAL; 5-(Hydroxy-Methyl-Amino)-3-Methyl-Pyrrolidine-2-Carboxylic Acid; 3-(5-Amino-7-Hydroxy-[1,2,3]Triazolo[4,5-D]Pyrimidin-2-Yl)-N-[2-(2-(Hydroxymethyl-Phenylsulfanyl)-Benzyl]-Benzamide; 5,5-dimethyl-2-morpholin-4-yl-5,6-dihydro-1,3-benzothiazol-7(4H)-one; 5,6-dichloro-1-beta-D-ribofuranosyl-1H-benzimidazole; 5-[(5-fluoro-3-methyl-1H-indazol-4-yl)oxy]benzene-1,3-dicarbonitrile; 3-(7-DIAMINOMETHYL-NAPHTHALEN-2-YL)-PROPIONIC ACID ETHYL ESTER; 5-[(1S)-1-(3-chlorophenyl)ethoxy]quinazoline-2,4-diamine; 5-[(4-Methylphenyl)Sulfanyl]-2,4-Quinazolinediamine; 5,6-Dihydro-Benzo[H]Cinnolin-3-Ylamine; 5-(DIMETHYLAMINO)-1-NAPHTHALENESULFONIC ACID(DANSYL ACID); 5′-[[2-(Aminooxy)Ethyl]Methylsulfonio]-5-Deoxy-Adenosine; 5-[2-(4-hydroxyphenyl)ethyl]benzene-1,3-diol; 5-[2-(TRIFLUOROMETHOXY)PHENYL]-2-FUROIC ACID; 5-[2-(TRIFLUOROMETHYL)PHENYL]-2-FUROIC ACID; 3-(9-HYDROXY-1,3-DIOXO-4-PHENYL-2,3-DIHYDROPYRROLO[3,4-C]CARBAZOL-6(1H)-YL)PROPANOIC ACID; 3(R)-METHYLCARBAMOYL-7-SULFOAMINO-3,4-DIHYDRO-1H-ISOQUINOLINE-2-CARBOXYLIC ACID TERT-BUTYL ESTER; 5′-{[4-(aminooxy)butyl](methyl)amino}-5′-deoxy-8-ethenyladenosine; 3,6-DIAMINO-5-CYANO-4-(4-ETHOXYPHENYL)THIENO[2,3-B]PYRIDINE-2-CARBOXAMIDE; 5-amino-2,4,6-tribromobenzene-1,3-dicarboxylic acid; 5-[4-Tert-Butylphenylsulfanyl]-2,4-Quinazolinediamine; 5-{[(2-Amino-9h-Purin-6-Yl)Oxy]Methyl}-2-Pyrrolidinone; 3-[[(METHYLAMINO)SULFONYL]AMINO]-2-OXO-6-PHENYL-N-[3,3,3-TRIFLUORO-1-(1-METHYLETHYL)-2-OXOPHENYL]-1(2H)-PYRIDINE ACETAMIDE; 5-ALPHA-PREGNANE-3-BETA-OL-HEMISUCCINATE; 5-amino-1-(4-chlorophenyl)-1H-pyrazole-4-carbonitrile; 5-[3-(2,5-dimethoxyphenyl)prop-1-yn-1-yl]-6-ethylpyrimidine-2,4-diamine; 5-amino-2-methyl-N-[(1R)-1-naphthalen-1-ylethyl]benzamide; 3,5-Dimethyl-1h-Pyrazole-4-Carboxylic Acid Ethyl Ester; 5-Amino-5-Deoxy-Cellobiono-1,5-Lactam; 5-Aminocarbonyl-3-Nitrophenyl-Alpha-D-Galactopyranose; 5-AMINO-NAPHTALENE-2-MONOSULFONATE; 5-Beta-D-Ribofuranosylnicotinamide Adenine Dinucleotide; 5-HEPTYL-6-HYDROXY-1,3-BENZOTHIAZOLE-4,7-DIONE; 3,8,9,10-Tetrahydroxy-7-Hydroxymethyl-6-Oxa-1,3-Diaza-Spiro[4.5]Decane-2,4-Dione; 5-bromo-3-(pyrrolidin-1-ylsulfonyl)-1H-indole-2-carboxamide; 5-Guanosine-Diphosphate-Monothiophosphate; 3-[(1E,7E)-8-(2,6-dioxo-1,2,3,6-tetrahydropyrimidin-4-yl)-3,6-dioxa-2,7-diazaocta-1,7-dien-1-yl]benzoic acid; 3-[({(1E)-[2-(trifluoromethyl)phenyl]methylidene}amino)oxy]propanoic acid; 3-[(1-Amino-2-Carboxy-Ethyl)-Hydroxy-Phosphinoyl]-2-Methyl-Propionic Acid; 5-Hydroxymethyluridine-2′-Deoxy-5′-Monophosphate; 5-hydroxynaphthalene-1-sulfonamide; 5-Hydroxy-N-Propargyl-1(R)-Aminoindan; 5-Iodo-2′-Deoxyuridine-5-Monophosphate; 3-[(1R)-1-(2,6-dichloro-3-fluorophenyl)ethoxy]-5-(1-piperidin-4-yl-1H-pyrazol-4-yl)pyridin-2-amine; 5-Mercaptoethanol-2-Decenoyl-Coenzyme A; 5-Methoxy-1,2-Dimethyl-3-(4-Nitrophenoxymethyl)Indole-4,7-Dione; 3-[(4-CHLOROANILINO)SULFONYL]THIOPHENE-2-CARBOXYLIC ACID; 3-[(2,4-Dichlorobenzoyl)(Isopropyl)Amino]-5-Phenylthiophene-2-Carboxylic Acid; 5-METHYL-2-[(PHENYLSULFONYL)AMINO]BENZOIC ACID; 5-Methyl-2′-Deoxypseudouridine; 5-Methyl-5-(4-Phenoxy-Phenyl)-Pyrimidine-2,4,6-Trione; 5-Methyl-5,6,7,8-Tetrahydrofolic Acid; 3-[(4-fluorophenyl)sulfanyl]-N-(4-methyl-1,3-thiazol-2-yl)-6-[(4-methyl-4H-1,2,4-triazol-3-yl)sulfanyl]pyridine-2-carboxamide; 5--Monophosphate-9-Beta-D-Ribofuranosyl Xanthine; 5-methyl-N-[4-(trifluoromethyl)phenyl][1,2,4]triazolo[1,5-a]pyrimidin-7-amine; 5-N-Acetyl-4-Amino-6-Diethylcarboxamide-4,5-Dihydro-2h-Pyran-2-Carboxylic Acid; 5-QUINOXALIN-6-YLMETHYLENE-THIAZOLIDINE-2,4-DIONE; 5-N-Acetyl-3-(1-Ethylpropyl)-1-Cyclohexene-1-Carboxylic Acid; 3-[3-chloro-5-(5-{[(1S)-1-phenylethyl]amino}isoxazolo[5,4-c]pyridin-3-yl)phenyl]propan-1-ol; N-[(BENZYLOXY)CARBONYL]-L-CYSTEINYLGLYCINE; 6-(3-METHYL-1,4-DIOXO-1,4-DIHYDRONAPHTHALEN-2-YL)HEXANOIC ACID; 6-(2-fluorobenzyl)-2,4-dimethyl-4,6-dihydro-5H-thieno[2′,3′:4,5]pyrrolo[2,3-d]pyridazin-5-one; 6-(2-fluorophenyl)-N-(pyridin-3-ylmethyl)imidazo[1,2-a]pyrazin-8-amine; 6-(2-HYDROXY-CYCLOPENTYL)-7-OXO-HEPTANAMIDINE; 6-(2-Oxo-Hexahydro-Thieno[3,4-D]Imidazol-4-Yl)-Hexanoic Acid; 6-(2,5-Dimethoxy-Benzyl)-5-Methyl-Pyrido[2,3-D]Pyrimidine-2,4-Diamine; 6,7,12,13-tetrahydro-5H-indolo[2,3-a]pyrrolo[3,4-c]carbazol-5-one; 6-(3-BROMO-2-NAPHTHYL)-1,3,5-TRIAZINE-2,4-DIAMINE; 3-{[(2,2,5,5-TETRAMETHYL-1-OXO-4-PHENYL-2,5-DIHYDRO-1H-PYRROLIUM-3-YL)METHYL]DISULFANYL}-D-ALANINE; 5-Nitroso-6-Ribityl-Amino-2,4(1h,3h)-Pyrimidinedione; 5-n-undecyl-6-hydroxy-4,7-dioxobenzothiazole; ‘5’-O-(N-(L-Alanyl)-Sulfamoyl)Adenosine; 3-[6-bromo-2-fluoro-3-(1H-pyrazolo[3,4-c]pyridazin-3-ylmethyl)phenoxy]-5-chlorobenzonitrile; ‘5’-O-(N-(L-Prolyl)-Sulfamoyl)Adenosine; 3-[Isopropyl(4-Methylbenzoyl)Amino]-5-Phenylthiophene-2-Carboxylic Acid; 5′-O-(N-(L-Threonyl)-Sulfamoyl)Adenosine; 3-[N-[Benzyloxycarbonyl]-Phenylalaninyl-Amino]-5-Phenyl-Pentane-1-Sulfonylmethylbenzene; 3-{[(1R)-1-phenylethyl]amino}-4-(pyridin-4-ylamino)cyclobut-3-ene-1,2-dione; 5-Phospho-D-Arabinohydroxamic Acid; 5-Phosphoribosyl-1-(Beta-Methylene) Pyrophosphate; 3-{[4-([AMINO(IMINO)METHYL]AMINOSULFONYL)ANILINO]METHYLENE}-2-OXO-2,3-DIHYDRO-1H-INDOLE; 3-{2,6,8-trioxo-9-[(2R,3R,4R)-2,3,4,5-tetrahydroxypentyl]-1,2,3,6,8,9-hexahydro-7H-purin-7-Yl}propyl dihydrogen phosphate; 6-(2,6-dibromophenyl)pyrido[2,3-d]pyrimidine-2,7-diamine; 3-{[(9-CYANO-9,10-DIHYDRO-10-METHYLACRIDIN-9-YL)CARBONYL]AMINO}PROPANOIC ACID; 6-(Oxalyl-Amino)-1h-Indole-5-Carboxylic Acid; 6,4′-Dihydroxy-3-Methyl-3′,5′-Dibromoflavone; 6,7-Dioxo-5h-8-Ribitylaminolumazine; 3-{[(4-methylphenyl)sulfonyl]amino}propyl pyridin-4-ylcarbamate; 6-[2-(1H-INDOL-6-YL)ETHYL]PYRIDIN-2-AMINE; 3-{2,6,8-trioxo-9-[(2S,3R,4R)-2,3,4,5-tetrahydroxypentyl]-1,2,3,6,8,9-hexahydro-7H-purin-7-Yl}propyl dihydrogen phosphate; 6-[4-(2-fluorophenyl)-1,3-oxazol-5-yl]-N-(1-methylethyl)-1,3-benzothiazol-2-amine; 3-{6-[(8-HYDROXY-QUINOLINE-2-CARBONYL)-AMINO]-2-THIOPHEN-2-YL-HEXANOYLAMINO}-4-OXO-BUTYRI ACID; 6-[5-(2-Oxo-Hexahydro-Thieno[3,4-D]Imidazol-4-Yl)-Pentanoylamino]-Hexanoic Acid; 6-[BIS(2,2,2-TRIFLUOROETHYL)AMINO]-4-(TRIFLUOROMETHYL)QUINOLIN-2(1H)-ONE; 6-[N-(1-Isopropyl-1,2,3,4-Tetrahydro-7-Isoquinolinyl)Carbamyl]-2-Naphthalenecarboxamidine; 6-[N-(1-Isopropyl-3,4-Dihydro-7-Isoquinolinyl)Carbamyl]-2-Naphthalenecarboxamidine; 6-[N-(4-(Aminomethyl)Phenyl)Carbamyl]-2-Naphthalenecarboxamidine; 6-[N-(4-Ethyl-1,2,3,4-Tetrahydro-6-Isoquinolinyl)Carbamyl]-2-Naphthalenecarboxamidine; 6-{[(CYCLOHEXYLAMINO)CARBONYL]AMINO}HEXANOIC ACID; 6-{[6-(1-methyl-1H-pyrazol-4-yl)[1,2,4]triazolo[4,3-b]pyridazin-3-yl]sulfanyl}quinoline; 6-{4-[4-(4-CHLOROPHENYL)PIPERIDIN-4-YL]PHENYL}-9H-PURINE; 6-amino-2-methyl-1,7-dihydro-8H-imidazo[4,5-g]quinazolin-8-one; 6-AMINO-3,7-DIHYDRO-IMIDAZO[4,5-G]QUINAZOLIN-8-ONE; 6-amino-4-(2-phenylethyl)-1,7-dihydro-8H-imidazo[4,5-g]quinazolin-8-one; 6-Amino-4-Hydroxymethyl-Cyclohex-4-Ene-1,2,3-Triol; 6-AMINO-BENZO[DE]ISOQUINOLINE-1,3-DIONE; 6-BENZYL-1-BENZYLOXYMETHYL-5-ISOPROPYL URACIL; 3-AMINO-3-BENZYL-9-CARBOXAMIDE[4.3.0]BICYCLO-1,6-DIAZANONAN-2-ONE; 6-Chloro-2-(2-Hydroxy-Biphenyl-3-Yl)-1h-Indole-5-Carboxamidine; 6-Hydro-1-Methyladenosine-5′-Monophosphate; 3-Aminomethyl-Pyridinium-Adenine-Dinucleotide; 6-Hydroxy-1,6-Dihydro Purine Nucleoside; 6-ETHYL-5-PHENYLPYRIMIDINE-2,4-DIAMINE; 6-Deoxy-2-O-Methyl-Alpha-L-Galactopyranose; 6-Hydroxy-6-Methyl-Heptan-3-One; 3-BENZYLOXYCARBONYLAMINO-2-HYDROXY-4-PHENYL-BUTYRIC ACID; 3-bromo-5-phenyl-N-(pyridin-3-ylmethyl)pyrazolo[1,5-a]pyrimidin-7-amine; 3-bromo-6-phenyl-N-(pyrimidin-5-ylmethyl)imidazo[1,2-a]pyridin-8-amine; 6-O-Phosphoryl Inosine Monophosphate; 6-methoxy-9-methyl[1,3]dioxolo[4,5-h]quinolin-8(9H)-one; 3-CYCLOHEXYL-1-(2-MORPHOLIN-4-YL-2-OXOETHYL)-2-PHENYL-1H-INDOLE-6-CARBOXYLIC ACID; 6-PHENYL[5H]PYRROLO[2,3-B]PYRAZINE; 6-Phenyl-4(R)-(7-Phenyl-Heptanoylamino)-Hexanoic Acid; 7,8,10-TRIMETHYLBENZO[G]PTERIDINE-2,4(3H,10H)-DIONE; 7,8-DICHLORO-1,2,3,4-TETRAHYDROISOQUINOLINE; 7,8-dihydro-6-hydroxymethyl-7-methyl-7-[2-phenylethyl]-pterin; 7,8-Dihydro-7,7-Dimethyl-6-Hydroxypterin; 7-(2,5-dihydropyrrol-1-yl)-6-phenyl-pyrido[6,5-d]pyrimidin-2-amine; 7-(Carboxyamino)-8-Amino-Nonanoic Acid; 6-Oxo-8,9,10,11-Tetrahydro-7h-Cyclohepta[C][1]Benzopyran-3-O-Sulfamate; 7-[(3-CHLOROBENZYL)OXY]-2-OXO-2H-CHROMENE-4-CARBALDEHYDE; 3′-Deoxy 3-Amino Adenosine-5′-Diphosphate; 7-[3-(4-FLUORO-PHENYL)-1-ISOPROPYL-1H-INDOL-2-YL]-3,5-DIHYDROXY-HEPTANOIC ACID; 3-Fluoro-2-(Phosphonooxy)Propanoic Acid; 7-[4-(Dimethylamino)Phenyl]-N-Hydroxy-4,6-Dimethyl-7-Oxo-2,4-Heptadienamide; 7-{2,6-DICHLORO-4-[3-(2-CHLORO-BENZOYL)-UREIDO]-PHENOXY}-HEPTANOIC ACID; 7-{[(CYCLOHEXYLAMINO)CARBONYL]AMINO}HEPTANOIC ACID; 7A-[(4-cyanophenyl)methyl]-6-(3,5-dichlorophenyl)-5-oxo-2,3,5,7A-tetrahydro-1H-pyrrolo[1,2-A]pyrrole-7-carbonitrile; 7-Alpha-D-Ribofuranosyl-2-Aminopurine-5′-Phosphate; 3-fluoro-6-(4-fluorophenyl)-2-hydroxy-6-oxohexa-2,4-dienoic acid; 3-fluoro-N-1H-indol-5-yl-5-morpholin-4-ylbenzamide; 7-amino-2-tert-butyl-4-{[2-(1H-imidazol-4-yl)ethyl]amino}pyrido[2,3-d]pyrimidine-6-carboxamide; 3-Hydroxy-4-(3,4,5-Trihydroxy-Tetrahydro-Pyran-2-Yloxy)-Piperidin-2-One; 7-hydroxy-4-methyl-2H-chromen-2-one; 7-carboxy-5-hydroxy-12,13-dihydro-6H-indolo[2,3-a]pyrrolo[3,4-c]carbazole; 3-FLUORO-4-[2-HYDROXY-2-(5,5,8,8-TETRAMETHYL-5,6,7,8,-TETRAHYDRO-NAPHTALEN-2-YL)-ACETYLAMINO]-BENZOIC ACID; 7-BENZYL-1,3-DIMETHYL-8-PIPERAZIN-1-YL-3,7-DIHYDRO-PURINE-2,6-DIONE; 7-HYDROXY-4-METHYL-3-(2-HYDROXY-ETHYL)COUMARIN; 7-METHOXY-1-METHYL-9H-BETA-CARBOLINE; 7-methoxy-4-[(6-phenyl[1,2,4]triazolo[4,3-b]pyridazin-3-yl)methoxy]quinoline; 7-Methoxy-8-[1-(Methylsulfonyl)-1h-Pyrazol-4-Yl]Naphthalene-2-Carboximidamide; 7-methyl-guanosine-5′-triphosphate-5′-guanosine; 3-FLUORO-5-MORPHOLIN-4-YL-N-[3-(2-PYRIDIN-4-YLETHYL)-1H-INDOL-5-YL]BENZAMIDE; 7n-Methyl-8-Hydroguanosine-5′-Monophosphate; 7n-Methyl-8-Hydroguanosine-5′-Triphosphate; 4-((3r,4s,5r)-4-Amino-3,5-Dihydroxy-Hex-1-Ynyl)-5-Fluoro-3-[1-(3-Methoxy-1h-Pyrrol-2-Yl)-Meth-(Z)-Ylidene]-1,3-Dihydro-Indol-2-One; 8-(2,5-Dimethoxy-Benzyl)-2-Fluoro-9h-Purin-6-Ylamine; 4-(3,12,14-Trihydroxy-10,13-Dimethyl-Hexadecahydro-Cyclopenta[a]Phenanthren-17-Yl)-5h-Furan-2-One; 4-({5[(4-AMINOCYCLOHEXYL)AMINO][1,2,4]TRIAZOLO[1,5-A]PYRIMIDIN-7-YL}AMINO)BENZENESULFONAMIDE; 8-(2-Chloro-3,4,5-Trimethoxy-Benzyl)-9-Pent-4-Ylnyl-9h-Purin-6-Ylamine; 8-(Pyrimidin-2-Ylamino)Naphthalene-2-Carboximidamide; 8,9,10-Trihydroxy-7-Hydroxymethyl-2-Thioxo-6-Oxa-1,3-Diaza-Spiro[4.5]Decan-4-One; 8,9,10-Trihydroxy-7-Hydroxymethyl-3-Methyl-6-Oxa-1,3-Diaza-Spiro[4.5]Decane-2,4-Dione; 8,9-Dichloro-2,3,4,5-Tetrahydro-1h-Benzo[C]Azepine; 4,6-Dideoxy-4-{[4,5,6-Trihydroxy-3-(Hydroxymethyl)Cyclohex-2-En-1-Yl]Amino}-Alpha-D-Lyxo-Hexopyranosyl-(1-&gt;4)-Alpha-D-Threo-Hexopyranosyl-(1-&gt;6)-Alpha-L-Threo-Hexopyranose; 4,6-DIDEOXY-4-{[4-[(4-O-HEXOPYRANOSYLHEXOPYRANOSYL)OXY]-5,6-DIHYDROXY-3-(HYDROXYMETHYL)CYCLOHEX-2-EN-1-YL]AMINO}HEXOPYRANOSYL-(1->4)HEXOPYRANOSYL-(1->4)HEXOPYRANOSE; 8-BENZO[1,3]DIOXOL-,5-YLMETHYL-9-BUTYL-9H-; N-[(CYCLOHEXYLAMINO)CARBONYL]GLYCINE; N-[(Furan-2-Yl)Carbonyl]-(S)-Leucyl-(R)-[1-Amino-2(1h-Indol-3-Yl)Ethyl]-Phosphonic Acid; 4-({[4-(3-METHYLBENZOYL)PYRIDIN-2-YL]AMINO}METHYL)BENZENECARBOXIMIDAMIDE; 4-[(1S,2S,5S)-5-(HYDROXYMETHYL)-8-METHYL-3-OXABICYCLO[3.3.1]NON-7-EN-2-YL]PHENOL; 4-[(2-{4-[(CYCLOPROPYLCARBAMOYL)AMINO]-1H-PYRAZOL-3-YL}-1H-BENZIMIDAZOL-6-YL)METHYL]MORPHOLIN-4-IUM; 8-Oxo-2′-Deoxy-Guanosine-5′-Monophosphate; 4-{[4-{[(1R,2R)-2-(dimethylamino)cyclopentyl]amino}-5-(trifluoromethyl)pyrimidin-2-yl]amino}-N-methylbenzenesulfonamide; 6-chloro-N-pyrimidin-5-yl-3-{[3-(trifluoromethyl)phenyl]amino}-1,2-benzisoxazole-7-carboxamide; 9-(4-hydroxybutyl)-N2-phenylguanine; 9-(3-IODOBENZYLAMINO)-1,2,3,4-TETRAHYDROACRIDINE; 6-(4-Difluoromethoxy-3-Methoxy-Phenyl)-2h-Pyridazin-3-One; 9-(6-Deoxy-Alpha-L-Talofuranosyl)-6-Methylpurine; 6-(5-BROMO-2-HYDROXYPHENYL)-2-OXO-4-PHENYL-1,2-DIHYDROPYRIDINE-3-CARBONITRILE; 9,10-Deepithio-9,10-Didehydroacanthifolicin; 9,9,9-TRI FLUORO-8-OXO-N-PHENYLNONANAMIDE; 9-ACETYL-2,3,4,9-TETRAHYDRO-1H-CARBAZOL-1-ONE; 9-Amino-2-Deoxy-2,3-Dehydro-N-Acetyl-Neuraminic Acid; 6-[(Z)-Amino(Imino)Methyl]-N-[4-(Aminomethyl)Phenyl]-4-(Pyrimidin-2-Ylamino)-2-Naphthamide; 6-FLUORO-2-[2-HYDROXY-3-(2-METHYL-CYCLOHEXYLOXY)-PHENYL]-1H-INDOLE-5-CARBOXAMIDINE; 6-[(Z)-AMINO(IMINO)METHYL]-N-[3-(CYCLOPENTYLOXY)PHENYL]-2-NAPHTHAMIDE; 6-CARBAMIMIDOYL-2-[2-HYDROXY-5-(3-METHOXY-PHENYL)-INDAN-1-YL]-HEXANOIC ACID; 9-Butyl-8-(2,5-Dimethoxy-Benzyl)-2-Fluoro-9h-Purin-6-Ylamine; 6-CARBAMIMIDOYL-4-(3-HYDROXY-2-METHYL-BENZOYLAMINO)-NAPHTHALENE-2-CARBOXYLIC ACID METHYL ESTER; 9-Butyl-8-(2-Chloro-3,4,5-Trimethoxy-Benzyl)-9h-Purin-6-Ylamine; 4-[(7-OXO-7H-THIAZOLO[5,4-E]INDOL-8-YLMETHYL)-AMINO]-N-PYRIDIN-2-YL-BENZENESULFONAMIDE; 6-CHLORO-3-(3-METHYLISOXAZOL-5-YL)-4-PHENYLQUINOLIN-2(1H)-ONE; 4-[(CYCLOPROPYLETHYNYL)OXY]-6-FLUORO-3-ISOPROPYLQUINOLIN-2(1H)-ONE; 4-[(4-METHYL-1-PIPERAZINYL)METHYL]-N-[3-[[4-(3-PYRIDINYL)-2-PYRIMIDINYL]AMINO]PHENYL]-BENZAMIDE; 6-CHLORO-N-{(3S)-1-[(1S)-1-METHYL-2-MORPHOLIN-4-YL-2-OXOETHYL]-2-OXOPYRROLIDIN-3-YL}-1-BENZOTHIOPHENE-2-SULFONAMIDE; 4-{[(CYCLOHEXYLAMINO)CARBONYL]AMINO}BUTANOIC ACID; 4-{[(E)-2-(5-CHLOROTHIEN-2-YL)VINYL]SULFONYL}-1-(1H-PYRROLO[3,2-C]PYRIDIN-2-YLMETHYL)PIPERAZIN-2-ONE; 4-{[(Z)-(5-OXO-2-PHENYL-1,3-OXAZOL-4(5H)-YLIDENE)METHYL]AMINO}BUTANOIC ACID; 4-{[1-METHYL-2,4-DIOXO-6-(3-PHENYLPROP-1-YN-1-YL)-1,4-DIHYDROQUINAZOLIN-3(2H)-YL]METHYL}BENZOIC ACID; 4-{[1-Methyl-5-(2-Methyl-Benzoimidazol-1-Ylmethyl)-1h-Benzoimidazol-2-Ylmethyl]-Amino}-Benzamidine; 4-[(4-O-SULFAMOYLBENZYL)(4-CYANOPHENYL)AMINO]-4H-[1,2,4]-TRIAZOLE; 4-{[4-(4-fluoro-3-methylphenyl)-1,3-thiazol-2-yl]amino}-2-hydroxybenzoic acid; 9-(2-Deoxy-Beta-D-Ribofuranosyl)-6-Methylpurine; 4-{[4-AMINO-6-(CYCLOHEXYLMETHOXY)-5-NITROSOPYRIMIDIN-2-YL]AMINO}BENZAMIDE; 4-{[5-(CYCLOHEXYLAMINO)[1,2,4]TRIAZOLO[1,5-A]PYRIMIDIN-7-YL]AMINO}BENZENESULFONAMIDE; 4-{[5-(CYCLOHEXYLOXY)[1,2,4]TRIAZOLO[1,5-A]PYRIMIDIN-7-YL]AMINO}BENZENESULFONAMIDE; and 4-{[5-(CYCLOHEXYLMETHOXY)[1,2,4]TRIAZOLO[1,5-A]PYRIMIDIN-7-YL]AMINO}BENZENESULFONAMIDE

[0149] Additional perturbations/drugs which may be utilized include, but are not limited to, abacavir; abarelix; abatacept; abatacept; abciximab; abequose; abiraterone; acadesine; acamprosate; acarbose; acarbose derived hexasaccharide; acebutolol; acediasulfone; acenocoumarol; acepromazine; aceprometazine; acetamide; acetaminophen; acetazolamide; acetic acid; acetic acid salicyloyl-amino-ester; acetoacetic acid; acetoacetyl-coenzyme a; acetohexamide; acetohydroxamic acid; acetone cyanohydrin; acetophenazine; acetophenone; acetorphine; acetrizoic acid; acetyl dithranol; acetylamino-acetic acid; acetylcarnitine; acetylcholine; acetylcysteine; acetyldigitoxin; acetyldihydrocodeine; acetylgalactosamine-4-sulfate; acetylphosphate; acetylsalicylic acid; aciclovir; acitretin; aclarubicin; aclidinium; aconitate ion; acrivastine; acrylic acid; activated charcoal; actyve hormone therapy; acylated ceftazidime; adalimumab; adamantane; adamantanone; adapalene; adefovir dipivoxil; adenine; adenosine; adenosine monophosphate; adenosine monotungstate; adenosine phosphonoacetic acid; adenosine triphosphate; adenosine-2′-5′-diphosphate; adenosine-3-5′-diphosphate; adenosine-5′-(dithio)phosphate; adenosine-5-diphosphoribose; adenosine-5′-ditungstate; adenosine-5′-pentaphosphate; adenosine-5′-phosphosulfate; adenosine-5′-propylphosphate; adenylosuccinic acid; adinazolam; ado-p-ch2-p-ps-ado; adrafinil; aerolef; aeruginosin 98-b; aetiocholanolone; afamelanotide; afatinib; afelimomab; afimoxifene; aflibercept; agalsidase beta; agmatine; agomelatine; aicar; ajmaline; alatrofloxacin; albendazole; albiglutide; albumin-interferon alpha; alcaftadine; alclometasone; aldesleukin; aldosterone; alectinib; alefacept; aleglitazar; alemtuzumab; alendronic acid; alfacalcidol; alfentanil; alferminogene tadenovec; alfimeprase; alfuzosin; alglucerase; alglucosidase alfa; alimemazine; alirocumab; aliskiren; alitretinoin; alizapride; alkaline phosphatase; alto-isoleucine; allolactose; allopurinol; allosamidin; allosamizoline; allylestrenol; allylprodine; almitrine; almotriptan; alogliptin; alosetron; alpha chlorophyll a; alphacetylmethadol; alpha-d-fucose; alpha-d-xylopyranose; alpha-ethyltryptamine; alpha-ketoisovalerate; alpha-ketomalonic acid; alpha-1-arabinose; alpha-1-fucose; alpha-1-iduronic acid; alpha-linolenic acid; alpha-1-methyl-fucose; alpha-maltotriose; alphameprodine; alphamethadol; alprazolam; alprazolam lingual spray; alprenolol; alprostadil; alrestatin; alseroxylon; alsterpaullone; alteplase; altretamine; altropane; aluminium; aluminium monostearate; aluminum hydroxide; alverine; alvimopan; amantadine; ambenonium; ambrisentan; ambroxol; amcinonide; amdinocillin; amedalin; amfecloral; amido phenyl pyruvic acid; amifostine; amikacin; amiloride; aminacrine; amineptine; aminoanthracene; aminocandin; aminocaproic acid; aminoglutethimide; aminoguanidine; aminohippuric acid; aminolevulinic acid; aminomethylcyclohexane; aminooxyacetic acid; aminophenazone; aminophosphonic acid-guanylate ester; aminophylline; aminopterin; aminorex; aminosalicylic acid; amiodarone; amisulpride; amitriptyline; amlexanox; amlodipine; ammonia n-13; ammonium chloride; ammonium lactate; amobarbital; amodiaquine; amolimogene; amonafide; amoxapine; amoxicillin; amperozide; amphetamine; amphotericin b; ampicillin; amprenavir; amrinone; amrubicin; amsacrine; amyl nitrite; amylamine; amylocaine; anagrelide; anakinra; analogue of indinavir drug; anastrozole; anatibant; ancestim; ancrod; androstanedione; androstenediol; anecortave acetate; anhydrous dextrose; anidulafungin; anileridine; aniline; aniracetam; anisindione; anisomycin; anisotropine methylbromide; anistreplase; antazoline; antiproliferative agent a771726; antipyrine; antithrombin alfa; antithrombin iii human; anti-thymocyte globulin (equine); anti-thymocyte globulin (rabbit); antrafenine; apadenoson; apixaban; aplyronine a; apomorphine; apraclonidine; apramycin; apremilast; aprepitant; aprindine; aprobarbital; aprotinin; apstatin; aptazapine; ara-alpha(1,3)-xyl; arabinose-5-phosphate; arachidonic acid; aranidipine; arbaclofen; arbaclofen placarbil; arbekacin; arbutamine; arcitumomab; ardeparin; arecoline; arformoterol; argadin; argatroban; argifin; arginineamide; argininosuccinate; arimoclomol; aripiprazole; armodafinil; arotinolol; arsanilic acid; arsenic trioxide; arsthinol; artemether; artesunate; articaine; asenapine; asfotase alfa; asimadoline; asparaginase; asparaginase Erwinia chrysanthemi; aspartame; aspartate beryllium trifluoride; aspartate semialdehyde; aspartic acid-4-carboxymethyl ester; aspartyl-adenosine-5′-monophosphate; astemizole; ataluren; atamestane-plus-toremifene; atazanavir; atenolol; atezolizumab; atg-fresenius s; atomoxetine; atorvastatin; atovaquone; atpenin a5; atracurium besylate; atrazine glutathione conjugate; atropine; attapulgite; auranofin; aurodox; aurothioglucose; aurovertin b; avanafil; avibactam; avobenzone; axitinib; azacitidine; azapropazone; azatadine; azathioprine; azelaic acid; azelastine; azelnidipine; azidocillin; azilsartan medoxomil; azimilide; azithromycin; azlocillin; azo-dye hapten; azosemide; aztreonam; b-2-octylglucoside; bacampicillin; bacitracin; baclofen; bacteriochlorophyll a; bafilomycin al; bafilomycin b1; balanol; balanol analog 1; balanol analog 2; balanol analog 8; balhimycin; balsalazide; bambuterol; banoxantrone; barbexaclone; barbital; barbituric acid derivative; barnidipine; basiliximab; batimastat; bavituximab; bazedoxifene; becaplermin; beclamide; beclomethasone dipropionate; becocalcidiol; bectumomab; bedaquiline; beeswax; befunolol; belatacept; belimumab; belinostat; bemiparin; benactyzine; benazepril; bendamustine; bendroflumethiazide; benfluorex; benidipine; benmoxin; benoxaprofen; bentiromide; bentoquatam; benzamidine; benzathine benzylpenicillin; benzatropine; benzene hexacarboxylic acid; benzenesulfonyl; benzethidine; benzhydroxamic acid; benzimate; benzimidazole; benzo[b]thiophene-2-boronic acid; benzo[b]thiophene-2-carboxamidine; benzocaine; benzoctamine; benzofuran; benzoic acid; benzonatate; benzophenone; benzothiazole; benzoyl peroxide; benzoyl-arginine-alanine-methyl ketone; benzoylecgonine; benzoylformic acid; benzphetamine; benzquinamide; benzthiazide; benzydamine; benzyl (2-oxopropyl)carbamate; benzyl alcohol; benzyl benzoate; benzylamine; benzylcysteine; benzylfentanyl; benzylmorphine; benzylpenicillin; benzylpenicilloyl polylysine; benzylsulfinic acid; bepotastine; bepridil; beractant; beraprost; berberine; besifloxacin; beta alethine; beta-(1-&gt;4)-galactotriose; beta-(1->4)-galactotriose; beta-(2-naphthyl)-alanine; beta(2-thienyl)alanine; beta-3-cysteine; beta-3-serine; beta-alanine; beta-amino isobutyrate; beta-cellotriose; betacetylmethadol; beta-cyclohexyl-alanine; beta-d-fructopyranose; beta-d-fucose; beta-d-galactose 6-phosphate; beta-d-glucose; beta-d-glucose 6-phosphate; beta-d-ribopyranose; betahistine; beta-hydroxyasparagine; beta-hydroxyaspartic acid; beta-hydroxyfentanyl; beta-hydroxyleucine; beta-hydroxytryptophane; beta-1-arabinose; beta-1-fucose; beta-1-methyl-fucose; beta-mannobiose; betameprodine; beta-mercaptoethanol; betamethasone; beta-methyllactoside; beta-naphthoflavone; betaprodine; beta-propiolactone; betaxolol; betazole; bethanechol; bethanidine; bevacizumab; bevantolol; bevirimat; bexarotene; bezafibrate; bezitramide; bicalutamide; bicifadine; bicine; bicuculline; bifeprunox; bifonazole; bilastine; biliverdine ix alpha; bimatoprost; binodenoson; biopterin; biotin; biotino1-5-amp; biotinyl p-nitroaniline; biperiden; biphenyl-2,3-diol; biphenylalanine; biricodar dicitrate; bisacodyl; bis-benzamidine; bishydroxy[2h-1-benzopyran-2-one,1,2-benzopyrone]; bismuth subcitrate; bismuth subsalicylate; bis-napthyl beta-ketophosphonic acid; bisoprolol; bisoxatin; bithionol; bitolterol; bivalirudin; bleomycin; blinatumomab; blonanserin; boceprevir; bolasterone; boldenone; bombykol; bopindolol; bortezomib; bosentan; bosutinib; botulinum toxin type a; botulinum toxin type b; bradanicline; brasofensine; br-coeleneterazine; brecanavir; brentuximab vedotin; brequinar analog; bretylium; brexpiprazole; briakinumab; brifentanil; brimonidine; brinzolamide; brodimoprim-4,6-dicarboxylate; bromamphenicol; bromazepam; bromfenac; bromhexine; bromocriptine; bromodiphenhydramine; bromo-dodecanol; bromopride; bromopurine; bromo-willardiine; brompheniramine; brotizolam; buclizine; budesonide; buformin; bufotenine; bufuralol; bulgecin a; bumetanide; bunamiodyl; bupivacaine; bupranolol; buprenorphine; bupropion; buserelin; buspirone; busulfan; butabarbital; butalbital; butan-1-ol; butanoic acid; butenafine; butenoic acid; butethal; butoconazole; butorphanol; butriptyline; butylamine; butylphosphonate; butyramide; butyrfentanyl; butyrylthiocholine; cabazitaxel; cabergoline; cabozantinib; caffeine; calanolide a; calcidiol; calcipotriol; calcitriol; calcium; calcium acetate; calcium carbimide; calcium carbonate; calcium chloride; calcium gluceptate; calfactant; calusterone; calyculin a; camazepam; camphane; camphor; camptothecin; canagliflozin; canakinumab; canaline; candesartan; candicidin; candoxatril; candoxatrilat; canfosfamide; cangrelor; cannabidiol; cannabinor; canrenoic acid; capecitabine; capreomycin; capromab; caprospinol; caprylic acid; capsaicin; captodiame; captopril; carbachol; carbamazepine; carbamic acid; carbaphosphonate; carbazochrome; carbazole butanoic acid; carbenicillin; carbenoxolone; carbetocin; carbidopa; carbimazole; carbinoxamine; carbocisteine; carbon dioxide; carbon monoxide; carboplatin; carboprost tromethamine; carboxin; carboxyatractyloside; carboxyethyllumazine; carboxylic prpp; carboxymycobactin s; carboxymycobactin t; cardiolipin; carfentanil; carfilzomib; carglumic acid; cariprazine; carisoprodol; carmofur; carmustine; caroxazone; carphenazine; carprofen; carpropamide; carteolol; carvedilol; caspofungin; castanospermine; cat hair allergenic extracts; cathine; cathinone; cefacetrile; cefaclor; cefadroxil; cefalotin; cefamandole; cefapirin; cefazolin; cefdinir; cefditoren; cefepime; cefixime; cefmenoxime; cefmetazole; cefonicid; cefoperazone; ceforanide; cefotaxime; cefotaxime group; cefotetan; cefotiam; cefoxitin; cefpiramide; cefpodoxime; cefprozil; cefradine; cefroxadine; ceftaroline fosamil; ceftazidime; ceftibuten; ceftizoxime; ceftobiprole; ceftolozane; ceftriaxone; cefuroxime; celecoxib; celiprolol; cellobiose; cellotetraose; cephalexin; cephaloglycin; cephaloridine; cephalosporin analog; cephalosporin c; cephalothin group; ceritinib; cerivastatin; certolizumab pegol; certoparin; cerulenin; ceruletide; cethromycin; cetirizine; cetrimonium; cetrorelix; cetuximab; cevimeline; chenodeoxycholic acid; chitotriose; chloral betaine; chloral hydrate; chlorambucil; chloramphenicol; chlorcyclizine; chlordiazepoxide; chlorhexadol; chlorhexidine; chlormerodrin; chlormezanone; chloro diiron-oxo moiety; chlorophyll a; chlorophyll b; chloroprocaine; chloropyramine; chloroquine; chlorothiazide; chlorotrianisene; chloroxine; chlorphenamine; chlorphenesin; chlorphenoxamine; chlorphentermine; chlorpromazine; chlorpropamide; chlorprothixene; chlortetracycline; chlorthalidone; chlorzoxazone; cholecalciferol; cholecystokinin; cholesterol; cholesterol-sulfate; cholesteryl linoleate; cholestyramine; cholic acid; choline; choline alfoscerate; choline c 11; choline c-11; chondroitin sulfate; chromic chloride; chromophore (asp-tyr-gly); chromophore (glu-tyr-gly); chromophore (gly-tyr-gly); chromophore (his-tyr-gly); chromophore (lys-tyr-gly); chromophore (met-tyr-gly); chymostatin; cibacron blue; ciclesonide; ciclopirox; cidofovir; ciglitazone; cilansetron; cilastatin; cilazapril; cilnidipine; cilomilast; cilostazol; cimetidine; cimetropium; cimicoxib; cinacalcet; cinalukast; cinchocaine; cinitapride; cinnarizine; cinolazepam; cinoxacin; cintredekin besudotox; ciprofloxacin; cirazoline; cisapride; cisatracurium besylate; cisplatin; cis-tetracosenoyl sulfatide; citalopram; citraconic acid; citric acid; cladribine; clarithromycin; clavulanate; clemastine; clenbuterol; clevidipine; clidinium; clindamycin; clinofibrate; clioquinol; clobazam; clobetasol propionate; clobutinol; clocapramine; clocortolone; clodronate; clofarabine; clofazimine; clofedanol; clofibrate; clomifene; clomipramine; clomocycline; clonazepam; clonidine; clonitazene; clonixin; cloperastine; clopidogrel; clorazepate; clorobiocin; clorocruoro hem; clortermine; clostebol; clotiazepam; clotrimazole; cloxacillin; cloxazolam; clozapine; coa-s-acetyl tryptamine; coa-s-trimethylene-acetyl-tryptamine; cobalt hexammine ion; cobicistat; cobimetinib; cocaine; Coccidioides immitis spherule; codeine; codeine methylbromide; codeine-n-oxide; coelenteramide; coenzyme a; coenzyme a persulfide; coenzyme f420; coenzyme q10; colchicine; colesevelam; colestipol; colforsin; colfosceril palmitate; colistimethate; colistin; conivaptan; conjugated equine estrogens; copper; coprogen; coproporphyrin coproporphyrin containing co(iii); coproporphyrin iii; cordycepin triphosphate; corticorelin ovine triflutate; corticotropin; corticotropin-releasing factor; cortisone acetate; cosyntropin; cp-coeleneterazine; crc200 (chiron-behring); creatine; crizotinib; crofelemer; cromoglicic acid; cronidipine; crotamiton; crotonaldehyde; cryopreserved human liver cells; cryptenamine; cu-bicyclam; cu-cyclam; cupric chloride; cyamemazine; cyanamide; cyanocinnoline; cyanocobalamin; cyclacillin; cyclandelate; cyclizine; cyclobenzaprine; cyclo-hepta-amylose; cyclohexane propionic acid; cyclohexanol; cyclohexanone; cyclohexylammonium ion; cyclohexylformamide; cyclohexyl-norstatine; cyclohexyl-pentyl-maltoside; cycloleucine; cyclopamine; cyclopentamine; cyclopentolate; cyclophosphamide; cycloserine; cyclosporine; cyclo-tetrametavanadate; cyclotheonamide a; cyclothiazide; cyclouridine; cycrimine; cyprenorphine; cyproheptadine; cyproterone acetate; cysteamine; cysteine hydrochloride; cysteine-s-acetamide; cysteinesulfonic acid; cystein-s-yl cacodylate; cyt006-angqb; cytarabine; cytidine; cytidine 5′-diphosphoglycerol; cytidine-3-monophosphate; cytidine-5′-diphosphate; cytidine-5′-diphospho-beta-d-xylose; cytidine-5′-monophosphate; cytidine-5′-monophosphate-5-n-acetylneuraminic acid; cytidine-5′-triphosphate; cytidyl-2′-5′-phospho-guanosine; cytisine; cytosine arabinose-5′-phosphate; d-1,4-dithiothreitol; d-2-keto-3-deoxygalactonate; d-2-keto-3-deoxygluconate; d-4-phosphoerythronic acid; dabigatran etexilate; dabrafenib; dacarbazine; daclatasvir; daclizumab; dactinomycin; daidzin; d-alanine; dalbavancin; daledalin; dalfampridine; dalfopristin; d-allopyranose; dalteparin; danazol; dansylamide; dansyllysine; dantrolene; dantron; dapagliflozin; dapiprazole; dapoxetine; dapsone; daptomycin; daratumumab; darbepoetin alfa; d-arginine; darifenacin; darodipine; darunavir; darusentan; dasabuvir; dasatinib; d-asparagine; d-aspartic acid; daunorubicin; dazoxiben; dcka, 5,7-dichlorokynurenic acid; d-cysteine; d-dethiobiotin; deacetoxycephalosporin-c; deamido-nad+; deamino-methyl-phenylalanine; debrisoquin; debromohymenialdisine; decamethonium; decane-1-thiol; decanoic acid; decitabine; decyl formate; decyloxy-methanol; deferasirox; deferiprone; deferoxamine; defibrotide; degarelix; deglucobalhimycin; degraded cephaloridine; dehydroascorbic acid; dehydrochloromethyltestosterone; dehydrocholic acid; dehydroepiandrosterone; dehydroepiandrosterone sulfate; delavirdine; delorazepam; delta1-dihydrotestosterone; demecarium; demeclocycline; demexiptiline; dendritic cell therapy; denileukin diftitox; denosumab; denufosol; deoxy-2-fluoro-b-d-cellotrioside; deoxycholic acid; deoxycytidylyl-3′,5′-guanosine; deoxyguanidinoproclavaminic acid; deoxythymidine; deoxyuridine-5′-diphosphate; deoxyuridine-5-triphosphate; dephospho coenzyme a; dequadin; dequalinium; d-eritadenine; descarboxy-nor-n(omega)-hydroxy-1-arginine; deserpidine; desflurane; desipramine; desirudin; deslanoside; desloratadine; desmethylprodine; desmopressin; desmoteplase; desogestrel; desomorphine; desonide; desoximetasone; desoxycorticosterone pivalate; desulfo-coenzyme a; desvancosaminyl vancomycin; desvenlafaxine; dexamethasone; dexbrompheniramine; dexchlorpheniramine maleate; dexetimide; dexfenfluramine; dexibuprofen; dexketoprofen; dexloxiglumide; dexmedetomidine; dexmethylphenidate; dexpanthenol; dexrazoxane; dextran; dextran 40; dextroamphetamine; dextrofloxacine; dextromethorphan; dextromoramide; dextropropoxyphene; dextrothyroxine; dezocine; d-galactohydroximo-1,5-lactam; d-galctopyranosyl-1-on; d-glucitol 6-phosphate; d-gluconhydroximo-1,5-lactam; d-glucose in linear form; d-glucuronic acid; d-glutamic acid; d-glutamine; dha-paclitaxel; di(n-acetyl-d-glucosamine); diacetyldeuteroheme; diampromide; diatrizoate; diazepam; diazoxide; dibenzofuran-4,6-dicarboxylic acid; dibromothymoquinone; dichloralphenazone; dichloroacetic acid; diclofenac; (diaminomethyl-methyl-amino)-acetic acid; (diphosphono)aminophosphonic acid; diclofenamide; diclosan; dicloxacillin; dicoumarol; dicyclomine; didanosine; didecyl-dimethyl-ammonium; dienestrol; dienogest; diethylcarbamazine; diethylcarbamodithioic acid; diethylphosphono group; diethylpropion; diethylstilbestrol; diethylthiambutene; diethyltryptamine; difenoxin; diflorasone; diflunisal; difluocortolone; difluoromethionine; difluprednate; digalactosyl diacyl glycerol (dgdg); digitoxin; digoxin; digoxin immune fab (ovine); diguanosine-5′-triphosphate; dihomo-gamma-linolenic acid; dihydro-acarbose; dihydrocodeine; dihydroergotamine; dihydroetorphine; dihydrofolic acid; dihydrogenphosphate ion; dihydrolipoic acid; dihydromorphine; dihydroorotic acid; dihydroquinidine barbiturate; dihydrotachysterol; dihydrotestosterone; dihydroxyacetone; diiodohydroxyquinoline; diisopropylphosphono group; di-linoleoyl-3-sn-phosphatidylcholine; diloxanide; diltiazem; dimenhydrinate; dimenoxadol; dimercaprol; dimetacrine; dimethyl fumarate; dimethyl propionate ester heme; dimethyl sulfoxide; dimethyl thiophosphate; dimethylallyl diphosphate; dimethylallyl s-thiolodiphosphate; dimethylformamide; dimethylglycine; dimethylthiambutene; dimethyltryptamine; dimetindene; dimetotiazine; diminazene; dinitrophenylene; dinoprost tromethamine; dinoprostone; dinor-n(omega)-hydroxy-l-arginine; dinutuximab; diosmin; dioxaphetyl butyrate; dioxothiomolybdenum(vi) ion; dioxyselenocysteine; diphemanil methylsulfate; diphenhydramine; diphenidol; diphenoxylate; diphenylacetic acid; diphenylpyraline; diphosphate; diphthamide; dipicolinic acid; dipipanone; dipivefrin; dipotassium phosphate; diprenorphine; dipyridamole; dipyrromethane cofactor; dirithromycin; disodium phosphate; disopyramide; d-isovaline; disulfiram; ditazole; dithiane diol; dithioerythritol; diundecyl phosphatidyl choline; diureido-acetate; d-lactic acid; d-leucine; d-limonene 1,2-epoxide; d-lysine; d-mannose 1-phosphate; d-mannuronic acid; d-methionine; dobutamine; docetaxel; docosa-4,7,10,13,16,19-hexaenoic acid; docosanol; dodecane-trimethylamine; dodecyl sulfate; dodecyl-alpha-d-maltoside; dodecyl-coa; dofetilide; dolasetron; dolutegravir; domiphen; domoic acid; domperidone; donepezil; dopamine; doripenem; dornase alfa; dorzolamide; dosulepin; double oxidized cysteine; doxacurium chloride; doxapram; doxazosin; doxepin; doxercalciferol; doxofylline; doxorubicin; doxorubicin transdrug; doxycycline; doxylamine; d-phenylalanine; d-proline; dronabinol; dronedarone; droperidol; drospirenone; drostanolone; drotaverine; drotebanol; drotrecogin alfa; droxicam; droxidopa; d-serine; d-tartaric acid; d-threo-neopterin; d-threonine; d-treitol; d-tryptophan; d-tyrosine; dulaglutide; duloxetine; duramycin; duroquinone; dust mite allergen extracts; dutasteride; duvoglustat; d-xylitol; d-xylulose; dyclonine; dydrogesterone; dyphylline; ecabet; ecallantide; ecamsule; ecgonine; ecgonine methyl ester; echothiophate; econazole; eculizumab; edetic acid; edivoxetine; edotecarin; edoxaban; edrophonium; efalizumab; efavirenz; efinaconazole; eflornithine; efmoroctocog alfa; efonidipine; eftrenonacog alfa; eirna (expressed interfering ma); elacridar; elafin; elaidoylamide; elbasvir; eldecalcitol; elesclomol; eletriptan; eliglustat; ellagic acid; elosulfase alfa; elotuzumab; elsamitrucin; eltrombopag; eluxadoline; elvitegravir; embutramide; emedastine; empagliflozin; emtricitabine; enalapril; enalaprilat; enalkiren; encainide; enclomiphene; enflurane; enfuvirtide; eniluracil; enoxacin; enoxaparin; enoximone; enprofylline; entacapone; entecavir; enviomycin; enzalutamide; eperisone; ephedra; ephedrine; epibatidine; epicept np-1; epigallocatechin; epinastine; epinephrine; epirizole; epirubicin; eplerenone; epoetin zeta; epoprostenol; epothilone b; epothilone d; epratuzumab; eprazinone; eprosartan; eptifibatide; equilenin; equilin; erdosteine; ergocalciferol; ergoloid mesylate; ergonovine; ergosterol; ergotamine; eribulin; eritoran; erlotinib; ertapenem; erythose-4-phosphate; erythrityl tetranitrate; erythromycin; erythropoietin; escitalopram; eslicarbazepine acetate; esmirtazapine; esmolol; esomeprazole; estazolam; estradiol; estramustine; estriol; estrogens, esterified; estrone; estrone sulfate; eszopiclone; etacrynic acid; etamivan; etanercept; eteplirsen; ethambutol; ethanesulfonic acid; ethanol; ethanolamine; ethanolamine oleate; ethchlorvynol; etheno-nad; etheno-nadp; ethinamate; ethinyl estradiol; ethiodized ethionamide; ethoheptazine; ethopropazine; ethosuximide; ethotoin; ethoxzolamide; ethyl biscoumacetate; ethyl carbamate; ethyl dihydrogen diphosphate; ethyl dihydrogen phosphate; ethyl dimethyl ammonio propane sulfonate; ethyl isocyanide; ethyl loflazepate; ethyl oxo(piperidin-1-yl)acetate; ethylaminobenzylmethylcarbonyl group; ethyl-carbamic acid methyl ester; ethylene dichloride; ethylestrenol; ethylisothiourea; ethylmercurithiosalicylic acid; ethylmethylthiambutene; ethylmorphine; ethyl-trimethyl-silane; ethynodiol diacetate; etidocaine; etidronic acid; etifoxine; etilefrine; etiprednol dicloacetate; etizolam; etodolac; etofenamate; etofibrate; etomidate; etonitazene; etonogestrel; etoperidone; etoposide; etoricoxib; etorphine; etoxeridine; etozoline; etravirine; etretinate; eucalyptol; eugenol; everolimus; evolocumab; exemestane; exenatide; ezetimibe; ezogabine; factor iiim; factor ix complex (human); famciclovir; famotidine; famoxadone; farletuzumab; farnesol; farnesyl diphosphate; farnesyl thiopyrophosphate; faropenem medoxomil; febuxostat; felbamate; felodipine; felypressin; fe-mesopone; fenbufen; fencamfamine; fendiline; fenethylline; fenfluramine; fenofibrate; fenoldopam; fenoprofen; fenoterol; fenproporex; fenretinide; fenspiride; fentanyl; fentonium; ferric carboxymaltose; ferric citrate; ferric pyrophosphate; ferricrocin-iron; feruloyl coenzyme a; fesoterodine; fexaramine; fexofenadine; fibrinogen concentrate (human); fibrinolysin; fidarestat; fidaxomicin; filaminast; filgrastim; filgrastim-sndz; fimasartan; finafloxacin; finasteride; fingolimod; firocoxib; flavopiridol; flavoxate; flecainide; fleroxacin; flibanserin; floctafenine; f-loop of vitamin b12; florantyrone; florbetaben (18f); florbetapir (18f); floxuridine; flubendazole; fluclorolone acetonide; flucloxacillin; fluconazole; flucytosine; fludarabine; fludeoxyglucose (18f); fludeoxyglucose f-18; fludiazepam; fludrocortisone; flufenamic acid; flumazenil; flumequine; flumethasone; flunarizine; flunisolide; flunitrazepam; fluocinolone acetonide; fluocinonide; fluocortolone; fluorescein; fluoresceinylthioureido; fluorescin; fluorometholone; fluoro-phosphite ion; fluorotryptophane; fluorouracil; fluoro-willardiine; fluoxetine; fluoxymesterone; flupentixol; fluphenazine; flupirtine; fluprednidene; flurandrenolide; flurazepam; flurbiprofen; flurbiprofen methyl ester; flurothyl; fluspirilene; flutamide; flutemetamol (18f); fluticasone furoate; fluticasone propionate; fluvastatin; fluvoxamine; folic acid; follitropin alpha; follitropin beta; fomepizole; fominoben; fondaparinux sodium; fontolizumab; forasartan; formaldehyde; formebolone; formestane; formic acid; formic acid benzyl ester; formoterol; formycin; formycin b; formycin-5′-monophosphate; fosamprenavir; fosaprepitant; foscarnet; fosfomycin; fosinopril; fosmidomycin; fosphenytoin; fospropofol; fotemustine; framycetin; frovatriptan; fructose; fructose-6-phosphate; fructose-6-phosphate; fucitol; fulvestrant; fumagillin; fumarate; furazabol; furazolidone; furethidine; furo[2,3d]pyrimidine antifolate; furosemide; furoyl-leucine; fursultiamine; fusafungine; fusicoccin; fusidic acid; gabaculine; gabapentin; gabapentin enacarbil; gaboxadol; gadobenic acid; gadobutrol; gadodiamide; gadofosveset trisodium; gadopentetate dimeglumine; gadoteric acid; gadoteridol; gadoversetamide; gadoxetic acid; galactose grease; galactose-uridine-5′-diphosphate; galacturonic acid; galantamine; galiximab; gallamine triethiodide; gallichrome; gallium citrate ga-67; gallium maltolate; gallium nitrate; galsulfase; gamma hydroxybutyric acid; gamma(amino)-butyric acid; gamma-arsono-beta, gamma-methyleneadenosine-5′-diphosphate; gamma-butyrolactone; gamma-carboxy-glutamic acid; gamma-glutamyl[s-(2-iodobenzyl)cysteinyl]glycine; gamma-glutamylcysteine; gamma-phenyl-butyric acid; ganaxolone; ganciclovir; ganirelix; gantacurium chloride; gastric intrinsic factor; gatifloxacin; gavestinel; gefitinib; geldanamycin; gemcabene; gemcitabine; gemeprost; gemfibrozil; gemifloxacin; gemtuzumab ozogamicin; geneticin; genistein; gentamicin; gentamicin c1a; gentian violet; genz-112638; geranyl diphosphate; geranylgeranyl diphosphate; gestodene; gestrinone; ghavamiol; gibberellin a3; gibberellin a4; gimeracil; Ginkgo biloba; ginkgolide-a; ginkgolide-b; ginkgolide-c; ginkgolide-j; ginkgolide-m; ginseng; ginsenoside c; ginsenoside rb1; ginsenoside rg1; glatiramer acetate; glibornuride; gliclazide; glimepiride; glipizide; gliquidone; glisoxepide; glucagon recombinant; glucarate; glucarpidase; gluconic acid; gluconolactone; gluco-phenylimidazole; glucosamine; glucosamine 1-phosphate; glucosamine 4-phosphate; glucosamine 6-phosphate; glucosaminyl-(alpha-6)-d-myo-inositol; glucose; glucose-6-phosphate; glutamine hydroxamate; glutamine t-butyl ester; glutamyl group; glutaric acid; glutathione; glutathione s-(2,4 dinitrobenzene); glutathione sulfinate; glutathione sulfonic acid; glutathionylspermidine; glutathionylspermidine disulfide; glutethimide; glyburide; glyceraldehyde-3-phosphate; glycerin; glycerol; glycerol phenylbutyrate; glycerol-2-phosphate; glycinamid; glycinamide ribonucleotide; glycine; glycine betaine; glycochenodeoxycholic acid; glycodiazine; glycoluril; glycopyrronium; glyoxalate, glyoxylate; glyphosate; gnrh pharmaccine; golimumab; gonadorelin; goserelin; gramicidin d; granisetron; grass pollen extract; grazoprevir; grepafloxacin; griseofulvin; guaifenesin; guanabenz; guanadrel; guanethidine; guanfacine; guanidine; guanidine-3-propanol; guanidinoethylmercaptosuccinic acid; guanine; guanosine; guanosine-2′,3-cyclophosphorothioate; guanosine-2-monophosphate; guanosine-3-monophosphate; guanosine-3-monophosphate-5′-diphosphate; guanosine-5,3-tetraphosphate; guanosine-5′-diphosphate; guanosine-5′-diphosphate-rhamnose; guanosine-5′-monophosphate; guanosine-5′-triphosphate; guvacine; h type trisaccharide; h type ii trisaccharide; hadacidin; halazepam; halcinonide; halofantrine; halofuginone; haloperidol; haloprogin; halothane; haloxazolam; heat-activated liposome technology; helium; heme c; heme d; hemi-babim; hemin; heparin; heparin disaccharide iii-s; heparin disaccharide i-s; hepatitis b immune globulin; heptabarbital; heptamolybdate; heptanamide; heptane-1,2,3-triol; heptanoic acid; heptanyl-p-phenol; heptulose-2-phosphate; heptyl 1-thiohexopyranoside; heptyl-beta-d-glucopyranoside; heroin; hesperetin; hesperidin; hetacillin; hexachlorophene; hexadecanal; hexadecyl octanoate; hexafluoroacetone hydrate; hexafluronium; hexamethonium; hexamethylenetetramine; hexaminolevulinate; hexane-1,6-diol; hexanoyl-coenzyme a; hexatantalum dodecabromide; hexestrol; hexetidine; hexobarbital; hexocyclium; hexoprenaline; hexylcaine; hg9a-9, nonanoyl-n-hydroxyethylglucamide; histamine; histamine dihydrochloride; histamine phosphate; histidinol; histidyl-adenosine monophosphate; histrelin; homatropine methylbromide; homophenylalaninylmethane; homosalate; homoserine lactone; hspe7; hsv-2 theracine; human calcitonin; human Clostridium tetani toxoid immune globulin; human rabies virus immune globulin; human rho(d) immune globulin; human serum albumin; human varicella-zoster immune globulin; humanized smart anti-il-12 antibody; humax-egfr; huperzine a; huperzine b; huperzine-a; hyaluronic acid; hyaluronidase; hyaluronidase (human recombinant); hybrid between b and c type hemes (protoporphyrin ixcontaining fe); hydantocidin-5′-phosphate; hydracarbazine; hydralazine; hydrochlorothiazide; hydrocodone; hydrocortamate; hydrocortisone; hydroflumethiazide; hydrogenobyrinic acid; hydrolyzed cephalothin; hydromorphinol; hydromorphone; hydroquinone; hydroxocobalamin; hydroxyacetic acid; hydroxyaminovaline; hydroxyamphetamine hydrobromide; hydroxychloroquine; hydroxydimethylarsine oxide; hydroxydione; hydroxyethyl cellulose; hydroxyethyl starch; hydroxyethylcysteine; hydroxyfasudil; hydroxyphenyl propionic acid; hydroxyprogesterone caproate; hydroxyproline; hydroxypropyl cellulose; hydroxystilbamidine isethionate; hydroxyurea; hydroxyzine; hymenialdisine; hyoscyamine; hyperforin; hypophosphite; hypoxanthine; i±-methylacetylfentanyl; i±-methylfentanyl; i±-methylthiofentanyl; i²-hydroxythiofentanyl; i²-methylfentanyl; ibandronate; ibritumomab tiuxetan; ibrutinib; ibudilast; ibuprofen; ibuproxam; Ibutilide; icatibant; icodextrin; i-coeleneterazine; icosapent; icosapent ethyl; idarubicin; idarucizumab; idebenone; idelalisib; idoxuridine; idursulfase; ifenprodil; Ifosfamide; iloperidone; iloprost; imatinib; imazaquin; imexon; imidafenacin; imidazole-derived cellobiose; imidazopyridazin 1; imiglucerase; imino-tryptophan; imipenem; imipramine; imiquimod; immucillin-g; immune globulin human; imolamine; implitapide; incadronic acid; indacaterol; indalpine; indane-5-sulfonamide; indapamide; indecainide; indenolol; indinavir; indirubin-3-monoxime; indirubin-5-sulphonate; indium (111in) imciromab; indium in-111 chloride; indium in-111 oxyquinoline; indium in-111 pentetate disodium; indocyanine green; indole; indole naphthyridinone; indole-3-glycerol phosphate; indole-3-propanol phosphate; indolylpropionic acid; indomethacin; indoprofen; indoramin; inecalcitol; infliximab; ingenol mebutate; inhibitor bea322; inhibitor bea369; inhibitor bea388; inhibitor bea403; inhibitor bea409; inhibitor bea425; inhibitor bea428; inhibitor idd 384; inhibitor msa367; inhibitor of p38 kinase; inhibitor q8467 of dupont merck; inosine; inosinic acid; inositol 1,3,4,5-tetrakisphosphate; inositol 1,3-bisphosphate; inositol-(1,3,4,5,6)-pentakisphosphate; insulin aspart; insulin beef; insulin degludec; insulin detemir; insulin glargine; insulin glulisine; insulin human; insulin lispro; insulin pork; interferon alfa-2a, recombinant; interferon alfa-2b, recombinant; interferon alfacon-1; interferon alfa-n1; interferon alfa-n3; interferon beta-1a; interferon beta-1b; interferon gamma-1b; intranasal apomorphine; intranasal morphine; inulin; invert sugar; iobenguane; iobenguane sulfate i-123; iodamide; iodine povacrylex; iodipamide; iodixanol; iodophenyl; iodo-willardiine; ioflupane 123; iohexol; Iopamidol; iopanoic acid; iophendylate; iopodic acid; iopromide; iothalamic acid; ioversol; ioxaglic acid; ioxilan; ipilimumab; ipratropium bromide; iproclozide; iproniazid; irbesartan; irinotecan; iron; iron dextran; iron sucrose; isatin; isatoic anhydride; isatoribine; isavuconazonium; isoaminile; isobutyric acid; isocarboxazid; isochorismic acid; isocitrate calcium complex; isocitric acid; isoconazole; isoetarine; isoflurane; isoflurophate; isoformononetin; isoluminol; isometheptene; isoniazid; isopenicillin n; isopentenyl pyrophosphate; isopentyl pyrophosphate; isoprenaline; isopropamide; isopropyl alcohol; isopropyl beta-d-thiogalactopyranoside; isoquinoline; isosorbide dinitrate; isosorbide mononitrate; isosulfan blue; isothiazolidinone analog; isothipendyl; isotretinoin; isovaleric acid; isoxicam; isoxsuprine; Isradipine; itopride; itraconazole; ivabradine; ivacaftor; ivermectin; ixabepilone; ixazomib; ixekizumab; jaspisamide a; josamycin; kabiramide c; kaempherol; kanamycin; kaolin; kappadione; kava; kebuzone; ketamine; ketazolam; ketobemidone; ketoconazole; ketoprofen; ketorolac; ketotifen; keyhole limpet hemocyanin; kifunensine; kitasamycin; l-[(n-hydroxyamino)carbonyl]phenylalanine; l-2-amino-3-butynoic acid; l-2-amino-4-(guanidinooxy)butyric acid; l-2-amino-4-[2-aminophenyl]-4-oxobutanoic acid; l-2-amino-4-methoxy-cis-but-3-enoic acid; l-2-amino-6-methylene-pimelic acid; labetalol; labetuzumab; lacidipine; lacosamide; lactaldehyde; lactic acid; lactose; lactose sialic acid; lactulose; laevulinic acid; l-alanine; l-alpha-glycerophosphorylserine; lamivudine; lamotrigine; lanosterol; lanreotide; lansoprazole; lanthanum carbonate; lapatinib; laquinimod; l-arginine; laronidase; l-asparagine; l-aspartic acid; latamoxef; latanoprost; latrunculin a; latrunculin b; lauric acid; lauryl dimethylamine-n-oxide; l-benzylsuccinic acid; l-carnitine; l-citrulline; l-cysteine; l-cystine; ledipasvir; leflunomide; lefradafiban; lemuteporfin; lenalidomide; lenvatinib; lepirudin; leptin; lerafaon; lercanidipine; lesinurad; lesopitron; letosteine; letrozole; leucine-reduced carbonyl; leucine phosphonic acid; leucovorin; leuprolide; levallorphan; levamisole; levamlodipine; levetiracetam; levobetaxolol; levobunolol; levobupivacaine; levocabastine; levocetirizine; levodopa; levofloxacin; levoleucovorin; levomethadyl acetate; levomethamphetamine; levomilnacipran; levonordefrin; levonorgestrel; levopropoxyphene; levorphanol; levosimendan; levothyroxine; l-glucuronic acid; l-glutamic acid; l-glutamine; l-glycero-d-manno-heptopyranose; l-guluronic acid 6-phosphate; l-histidine; l-histidine beta naphthylamide; l-homoarginine; l-homoserine; licofelone; lidocaine; lifitegrast; limaprost; linaclotide; linagliptin; lincomycin; lindane; linezolid; lintitript; liothyronine; liotrix; lipoic acid; liposomal prostaglandin el; liraglutide; lisdexamfetamine; lisinopril; l-iso-aspartate; l-isoleucine; lisuride; lithium; lividomycin a; lixisenatide; l-leucine; l-leucyl-hydroxylamine; l-lysine; l-methionine; l-methionine (r)-s-oxide; l-methionine (s)-s-oxide; l-myo-inositol-l-phosphate; lobeglitazone; lobeline; Iodoxamide; lofentanil; lofexidine; lomefloxacin; lomitapide; lomustine; loperamide; lopinavir; loracarbef; loratadine; lorazepam; lorcaserin; l-ornithine; lornoxicam; lorpiprazole; lortalamine; losartan; loteprednol; lovastatin; loxapine; loxoprofen; lpc-ether; l-phenylalanine; l-phenylalaninol; l-phospholactate; l-proline; l-rhamnitol; l-rhamnose; l-serine; l-thiocitrulline; l-thioproline; l-threo-2,3-diamino-butyric acid; l-threonine; I-threonohydroxamate 4-phosphate; l-tryptophan; l-tryptophanamide; l-tyrosinamide; l-tyrosine; lubazodone; lubiprostone; lucanthone; lucinactantluliconazole; lumacaftor; lumateperone; lumefantrine; lumiracoxib; lurasidone; lutropin alfa; l-valine; l-valinol; l-xylitol 5-phosphate; l-xylopyranose; l-xylulose 5-phosphate; ly231514 tetra glu; lymecycline; lymphotoxin beta receptor; lysergic acid diethylamide; lysine nz-carboxylic acid; lysophosphatidylglycerol; lysophosphotidylserine; macitentan; mafenide; magaldrate; magnesium; magnesium acetate tetrahydrate; magnesium carbonate; magnesium chloride; magnesium hydroxide; magnesium oxide; magnesium salicylate; magnesium sulfate; magnesium trisilicate; malachite green; malate ion; malate like intermediate; malathion; maleic acid; malonaldehyde; malonate ion; malonic acid; malonyl-coenzyme a; maltose; maltotetraose; m-aminophenylboronic acid; mangafodipir; manganese; manidipine; mannitol; mant-adp; maprotiline; maraviroc; marimastat; masoprocol; matairesinol; matuzumab; maxy-g34; mazindol; m-cresol; mebanazine; mebendazole; mecamylamine; mecasermin; mechlorethamine; meclizine; meclofenamic acid; medical air; medrogestone; medroxyprogesterone acetate; medrysone; mefenamic acid; mefloquine; megestrol acetate; melatonin; meloxicam; melperone; melphalan; memantine; menadione; menotropins; menthol; mepenzolate; mephentermine; mephenytoin; mepiprazole; mepivacaine; mepolizumab; meprobamate; mepyramine; mequitazine; mercaptocarboxylate inhibitor; mercaptomethyl phosphonate; mercaptopurine; mercuribenzoic acid; mercury acetate ion; mercury diiodide; merimepodib; meropenem; mersalyl; mesalazine; mesenchymal stem cells; mesna; mesobiliverdin iv alpha; meso-erythritol; mesoheme; mesoridazine; mestranol; meta vanadate; metamizole; metanitrophenyl-alpha-d-galactoside; meta-nitro-tyrosine; metaraminol; meta-tyrosine; metaxalone; metformin; methacholine; methacrylyl-coenzyme a; methacycline; methadone; methadyl acetate; methamphetamine; methantheline; methapyrilene; methaqualone; metharbital; methazolamide; methdilazine; methicillin acyl-serine; methimazole; methionine phosphinate; methionine phosphonate; methocarbamol; methohexital; methotrexate; methotrimeprazine; methoxamine; methoxsalen; methoxyflurane; methoxyundecylphosphinic acid; methsuximide; methyclothiazide; methyl alpha-d-mannoside; methyl alpha-galactoside; methyl aminolevulinate; methyl beta-galactoside; methyl cellulose; methyl isocyanide; methyl 1-phenylalaninate; methyl methylsulfinylmethyl sulfide; methyl nonanoate (ester); methyl salicylate; methylamine; methyl-carbamic acid ethyl ester; methylcobalamin; methyldiazene; methyldopa; methylene blue; methylenedioxyethamphetamine; methylergometrine; methylethylamine; methylmalonic acid; methylmalonyl-coenzyme a; methylnaltrexone; methyl-o3-(alpha-d-mannose)-alpha-d-mannose; methylphenidate; methylphenobarbital; methyl-phe-pro-amino-cyclohexylglycine; methylphosphinic acid; methylphosphonic acid diisopropyl ester; methylphosphonic acid ester group; methyl-phosphonic acid mono-(4-nitro-phenyl) ester; methylprednisolone; methylscopolamine bromide; methyltestosterone; methylthioinosine; methyltrienolone; methylumbelliferyl chitotriose; methylumbelliferyl sialic acid; methyprylon; methysergide; metiamide; meticillin; metipranolol; metixene; metoclopramide; metocurine; metocurine iodide; metolazone; metoprine, methodichlorophen; metoprolol; metralindole; metreleptin; metrizamide; metrizoic acid; metronidazole; metyrapone; metyrosine; mevastatin; mexiletine; mezlocillin; mianserin; mibefradil; micafungin; miconazole; microplasmin; midazolam; midodrine; mifepristone; migalastat; miglitol; miglustat; milnacipran; milrinone; miltefosine; mimosine; minaprine; minocycline; minoxidil; mipomersen; mirabegron; mirfentanil; mirtazapine; misoprostol; mitiglinide; mitomycin; mitoquinone; mitotane; mitoxantrone; mivacurium; mmda; moclobemide; modafinil; modified acarbose hexasaccharide; modified acarbose pentasaccharide; modified ribosylated glutamyl ester; moexipril; molecular iodine; molindone; molsidomine; molybdenum cofactor; mometasone; monastrol; monoazido-mu-oxo-diiron; monobenzone; monogalactosyl-diacylglycerol; monoisopropyl ester phosphonic acid group; monoisopropylphosphorylserine; monopotassium phosphate; monothioglycerol; montelukast; moricizine; morniflumate; morphine; motexafin gadolinium; motexafin lutetium; motuporin; moxalactam (hydrolyzed); moxalactam derivative; moxifloxacin; moxisylyte; moxonidine; mt-immucillin-h; mupirocin; muromonab; mycophenolate mofetil; mycophenolic acid; myo-inositol; myricetin; myristic acid; myristoyl-coa; myrrh; myxopyronin b; myxothiazol; n-(1-adamantyl)-n′-(4-guanidinobenzyl)urea; n,n-dimethylarginine; n,n-dimethyl-l-alanine; n,o6-disulfo-glucosamine; n,o-didansyl-l-tyrosine; n-[(4-methoxyphenyl)sulfonyl]-d-alanine; n-[(aminooxy)carbonyl]aniline; n-[4-(benzyloxy)phenyl]glycinamide; n-[amino(imino)methyl]glycine; n˜2˜succinylarginine; n˜2˜-succinylornithine; n˜3˜-benzylpyridine-2,3-diamine; n-1,10-phenanthrolin-5-ylacetamide; n-1-methylheptylformamide; n2-(carboxyethyl)-1-arginine; n3, n4-dimethylarginine; n5-(1-imino-3-butenyl)-1-ornithine; n5-iminoethyl-l-ornithine; n5-methylglutamine; n6-benzyl adenosine-5′-diphosphate; n7-methyl-formycin a; n7-methyl-guanosine-5′-monophosphate; nabilone; nabumetone; n-acetyl serotonin; n-acetylalanine; n-acetyl-alpha-d-glucosamine; n-acetyl-alpha-neuraminic acid; n-acetyl-beta-neuraminic acid; n-acetyl-d-allosamine; n-acetyl-d-galactosamine 6-sulfate; n-acetyl-d-glucosamine; n-acetylhistamine; n-acetyl-1-citrulline; n-acetyl-1-glutamate; n-acetyl-1-glutamine; n-acetylmannosaminitol; n-acetylmethionine; n-acetyl-n′-beta-d-glucopyranosyl urea; n-acetyl-p-nitrophenylserinol; n-acetylproline; n-acetyl-serine; nadh; nadolol; nadroparin; nafarelin; nafcillin; naftifine; nalbuphine; nalidixic acid; n-allyl-aniline; naloxegol; naloxone; n-alpha-acetyl-3,5-diiodotyrosylglycine; n-alpha-1-acetyl-arginine; naltrexone; naltrexone depot; nam napthylaminoalanine; n-aminoethylmorpholine; namn; nanaomycin d; nandrolone decanoate; nandrolone phenpropionate; naphazoline; naphthalen-1-yl-acetic acid; naphthalen-2-yl-3-alanine; naphthalene trisulfonate; naphthalene-1,2,4,5,7-pentol; naphthalene-1,2-diol; naphthalene-2,6-disulfonic acid; naphthyloxyacetic acid; naphthyridine inhibitor; naproxen; naratriptan; naringenin; natalizumab; natamycin; nateglinide; natural alpha interferon; naxifylline; n-benzoyl-d-alanine; n-benzoyl-n′-beta-d-glucopyranosyl urea; n-benzyl-4-[(2r)-pyrrolidin-2-ylmethoxy]aniline; n-benzyl-4-sulfamoyl-benzamide; n-benzylformamide; n-bromoacetyl-aminoethyl phosphate; n-butyl isocyanide; n-butyl-benzenesulfonamide; n-butyl-n′-hydroxyguanidine; n-carbamoyl-alanine; n-carbamoyl-l-aspartate; n-carbamyl-d-methionine; n-carbamyl-d-valine; n-carboxymethionine; n-cholylglycine; n-coeleneterazine; ncs-chromophore; n-cyclohexyl-n′-(4-iodophenyl)urea; n-cyclohexyl-n′-(propyl)phenyl urea; n-cyclohexyl-n′-decylurea; n-cyclohexyltaurine; n-cyclopentyl-n-cyclobutylformamide; nd1-phosphonohistidine; n-dimethyl-lysine; n-dodecanoyl-l-tyrosine; n-dodecyl-n,n-dimethylglycinate; neamine; nebivolol; necitumumab; nedocromil; nefazodone; nelarabine; nelfinavir; neocartilage; neomycin; neostigmine; nepafenac; neramexane; neridronic acid; nesiritide; n-ethyl retinamide; n-ethyl-5′-carboxamido adenosine; n-ethylmaleimide; netilmicin; netoglitazone; netupitant; nevirapine; n-formylmethionine; n-formylpiperidine; n-heptylformamide; n-hexadecanoylglycine; n-hexanoyl-l-homocysteine; n-hexanoyl-l-homoserine; n-hexylphosphonate ethyl ester; n-hydroxy-4-phosphono-butanamide; n-hydroxyguanidine; n-hydroxy-n-isopropyloxamic acid; niacin; nialamide; nicardipine; nicergoline; niclosamide; nicorandil; nicotinamide; nicotinamide mononucleotide; nicotine; nifedipine; niflumic acid; niguldipine; nilotinib; niludipine; nilutamide; nilvadipine; nimesulide; nimodipine; nintedanib; nisoldipine; n-isopropyl-n′-hydroxyguanidine; nisoxetine; nitazoxanide; nitisinone; nitrazepam; nitrendipine; nitric oxide; nitrilotriacetic acid; nitroarginine; nitrocefin; nitrocefin acyl-serine; nitrofural; nitrofurantoin; nitrogen; nitroglycerin; nitromethyldethia coenzyme a; nitroprusside; nitrosoethane; nitrous oxide; nitroxoline; nivolumab; nizatidine; n′-l-seryl-3′-amino-(3′-deoxy)-adenosine; n-methyl-alpha-beta-dehydroalanine; n-methyldehydrobutyrine; n-methylleucine; n-methyl-lysine; n-methylmesoporphyrin; n-methylmesoporphyrin containing copper; n-methyl-n-(methylbenzyl)formamide; n-methylnaloxonium; n-methyl-n-propargyl-1(r)-aminoindan; n-methyl-pyridoxal-5′-phosphate; nocodazole; n-octyl-2-hydroxyethyl sulfoxide; nogalaviketone; nojirimycine tetrazole; n-omega-hydroxy-l-arginine; n-omega-propyl-1-arginine; nomifensine; nonan-1-ol; nonoxynol-9; norcamphor; norelgestromin; norepinephrine; norethisterone; norfloxacin; norgestimate; norgestrel; norleucine; norleucine phosphonate; normethadone; nor-n-omega-hydroxy-l-arginine; nortriptyline; norvaline; novo nordisk a/s compound; novobiocin; n-oxo-2-(phenylsulfonylamino)ethanamide; n-phenyl-1h-pyrazole-3-carboxamide; n-phenyl-1h-pyrrolo[2,3-b]pyridin-3-amine; n-phenylthiourea; n-propargyl-1(s)-aminoindan; n-propyl isocyanide; n-propyl-tartramic acid; n-pyridoxyl-2-methylalanine-5-phosphate; n-pyridoxyl-glycine-5-monophosphate; n′-pyridoxyl-lysine-5′-monophosphate; n-pyridoxyl-threonine-5-monophosphate; n-succinyl methionine; n-succinyl phenylglycine; n-sulfo-flavin mononucleotide; n-tridecanoic acid; n-trimethyllysine; n-valeric acid; nvs antibody; nystatin; nz-(1-carboxyethyl)-lysine; nz-(dicarboxymethyl)lysine; nz2-tryptophan; o1-methyl-4-deoxy-4-thio-alpha-d-glucose; o1-methyl-4-deoxy-4-thio-beta-d-glucose; o1-methyl-glucose; o1-pentyl-mannose; o2-sulfo-glucuronic acid; o3-sulfonylgalactose; o4-sulfonylgalactose; o-acetyl-1-serine; o-benzylsulfonyl-serine; obeticholic acid; obiltoxaximab; obinutuzumab; ocriplasmin; octahydroindole-2-carboxylic acid; octamethylenediamine; octamoxin; octane-1,3,5,7-tetracarboxylic acid; octanoyl-coenzyme a; octinoxate; octisalate; octocrylene; octreotide; octyl alpha-l-altropyranoside; octyl beta-d-galactopyranoside; octylphenoxy polyethoxyethanol; o-decyl hydrogen thiocarbonate; ofatumumab; ofloxacin; oglufanide disodium; ohmefentanyl; olanzapine; olaparib; olaratumab; olcegepant; oleic acid; oleoyl estrone; olive oil; olmesartan; olodaterol; olomoucine; olomoucine ii; olopatadine; olsalazine; omacetaxine mepesuccinate; omalizumab; omapatrilat; ombitasvir; omega interferon; omega-3-acid ethyl esters; omega-3-carboxylic acids; omeprazole; ondansetron; o-phosphoethanolamine; oportuzumab monatox; oprelvekin; orciprenaline; oregon green 488 carboxylate; oregovomab; oritavancin; orlistat; orotic acid; orotidine-5-monophosphate; orphenadrine; osanetant; oseltamivir; osimertinib; ospa lipoprotein; ospemifene; o-succinylbenzoate; o-sulfo-l-serine; oteracil; o-trifluoromethylphenyl anthranilic acid; ouabain; ovalicin; oxacillin; oxalic acid; oxaliplatin; oxaloacetate ion; oxamic acid; oxamniquine; oxandrolone; oxaprotiline; oxaprozin; oxazepam; oxcarbazepine; oxeladin; oxfenicine; oxibendazole; oxiconazole; oxidized acetyl dithranol; oxidized coenzyme a; oxidized glutathione disulfide; oxilofrine; oximinoarylsulfonamide; oxiranpseudoglucose; oxitriptan; oxprenolol; oxtriphylline; oxybenzone; oxybuprocaine; oxybutynin; oxycodone; oxygen; oxymetazoline; oxymetholone; oxymorphone; oxyphenbutazone; oxyphencyclimine; oxyphenisatin; oxyphenonium; oxypurinol; oxytetracycline; oxytocin; paclitaxel; pagoclone; palbociclib; palifermin; paliperidone; palivizumab; palmitic acid; palmitoleic acid; palmitoyl-linoleoyl phosphatidylcholine; palonosetron; pamidronate; p-aminophenyl-alpha-d-galactopyranoside; pancrelipase; pancuronium; p-anisic acid; panitumumab; panobinostat; pantoprazole; pantothenic acid; pantothenoylaminoethenethiol; pantoyl adenylate; papaverine; para-(benzoyl)-phenylalanine; para-bromobenzyl alcohol; para-coumaric acid; para-iodo-d-phenylalanine hydroxamic acid; para-isopropylaniline; paraldehyde; para-mercury-benzenesulfonic acid; paramethadione; paramethasone; parathyroid hormone; para-toluene sulfonate; parecoxib; pargyline; paricalcitol; paritaprevir; parnaparin; paromomycin; paroxetine; pasireotide; patiromer; pazopanib; pcnotaxime group; p-cresol; pefloxacin; pegademase bovine; pegaptanib; pegaspargase; pegfilgrastim; peginesatide; peg-infergen; peginterferon alfa-2a; peginterferon alfa-2b; peginterferon beta-1a; [pterin-6-ylmethanyl]-phosphonophosphate; pegloticase; peg-uricase; pegvisomant; peldesine; pembrolizumab; pemetrexed; pemirolast; pemoline; penbutolol; penciclovir; penicillamine; penicillin g acyl-serine; pentabromophenol; pentagastrin; pentamidine; pentanal; pentane-1,5-diamine; pentanedial; pentastarch; pentasulfide-sulfur; pentazocine; pentobarbital; pentolinium; pentosan polysulfate; pentostatin; pentoxifylline; pentyl trihydrogen diphosphate; peramivir; perampanel; perchlorate ion; perflubron emulsion; perflutren; pergolide; perhexiline; peridinin; perindopril; permethrin; perospirone; perphenazine; persumac; pertuzumab; pethidine; petrolatum; pexelizumab; phenacemide; phenacetin; phenaridine; phenazopyridine; phencyclidine; phendimetrazine; phenelzine; phenformin; phenindamine; phenindione; pheniprazine; pheniramine; phenmetrazine; phenobarbital; phenol; phenolphthalein; phenoxodiol; phenoxybenzamine; phenoxymethylpenicillin; phenoxypropazine; phenprocoumon; phenserine; phensuximide; phentermine; phentolamine; phenyl boronic acid; phenyl ethenesulfonate; phenylacetaldehyde; phenylacetic acid; phenylalanindiol; phenylalanine amide; phenylalanine boronic acid; phenylalanine-n-sulfonamide; phenylalanylmethane; phenylalanylmethylchloride; phenylaminoimidazo(1,2-alpha)pyridine; phenylbutazone; phenyldehydroalanine; phenylephrine; phenylethane boronic acid; phenylferricrocin-iron; phenylphosphate; phenylpropanolamine; phenyl-uridine-5′-diphosphate; phenytoin; pholcodine; phosphatidyl ethanol; phosphatidyl serine; phosphatidylethanolamine; phosphoaspartate; phosphocholine; phosphoenolpyruvate; phosphoglycolohydroxamic acid; phosphonoacetaldehyde; phosphonoacetic acid; phosphonoacetohydroxamic acid; phosphonopyruvate; phosphonoserine; phosphonothreonine; phosphonotyrosine; phosphoramidon; phosphoribosyl atp; phosphoric acid; phosphorylated dihydropteroate; phosphorylisopropane; phthalic acid; p-hydroxybenzaldehyde; p-hydroxybenzoic acid; phylloquinone; physostigmine; piboserod; piceatannol; piclamilast; picoplatin; picosulfuric acid; picrotoxin; pidotimod; pilocarpine; pimagedine hcl; pimavanserin; pimecrolimus; pimelic acid; pimozide; pinaverium; pindolol; pioglitazone; pipamperone; pipazethate; pipecuronium; piperacillin; piperazine; piperonyl butoxide; pipobroman; pipotiazine; piracetam; pirarubicin; pirbuterol; pirenzepine; piretanide; pirfenidone; pirlindole; piroxicam; pitavastatin; pivaloyloxymethyl butyrate; pivampicillin; pivhydrazine; pivmecillinam; pixantrone; plasmin; platelet activating factor; platensimycin; pleconaril; plerixafor; plicamycin; plitidepsin; p-nitrophenol; podofilox; podophyllin; polaprezinc; polidocanol; polyacrylic acid; polycarbophil calcium; polyethylene glycol; polymyxin b sulfate; polystyrene sulfonate; polythiazide; pomalidomide; ponatinib; poractant alfa; porfimer; porphobilinogen; porphyrin fe(iii); posaconazole; posizolid; potassium; potassium alum; potassium chloride; potassium citrate; potassium iodide; povidone-iodine; practolol; pradefovir mesylate; pralatrexate; pralidoxime; pralnacasan; pramipexole; pramlintide; pramocaine; pranlukast; prasugrel; pravastatin; prazepam; praziquantel; prazosin; prednicarbate; prednisolone; prednisone; pregabalin; pregnenolone; prenylamine; prephenic acid; prilocaine; primaquine; primidone; prinomastat; probenecid; probucol; procainamide; procaine; procaine benzylpenicillin; procarbazine; procaterol; prochlorperazine; procyclidine; proellex; proflavine; progabide; progesterone; proguanil; protease-r-hfsh; proline betaine; promazine; promethazine; propacetamol; propafenone; propanoic acid; propantheline; proparacaine; propericiazine; propidium; propiomazine; propionamide; propionyl coenzyme a; propofol; propoxycaine; propoxyphene napsylate; propranolol; propyl acetate; propyl trihydrogen diphosphate; propyl-1-phosphate; propylhexedrine; propylthiouracil; prostaglandin b2; prostaglandin g2; protamine sulfate; protirelin; protoporphyrin ix; protoporphyrin ix containing co; protoporphyrin ix containing zn; protriptyline; prucalopride; prussian blue; pseudoephedrine; pseudotropine; pseudouridine-5′-monophosphate; pteric acid; pterin cytosine dinucleotide; pterin-6-yl-methyl-monophosphate; pteroic acid; pumactant; purine riboside; purine riboside-5′-monophosphate; puromycin; purvalanol; purvalanol a; putrescine; pyoverdine-chromophore; pyrazinamide; pyrazole; pyridin-3-ylmethanol; pyridostigmine; pyridoxal; pyridoxal phosphate; pyridoxal-5′-phosphate-n-oxide; pyridoxamine-5′-phosphate; pyridoxine; pyridoxine-5′-phosphate; pyridoxyl-alanine-5-phosphate; pyridoxyl-glutamic monophosphate; pyrimethamine; pyrithiamine pyrophosphate; pyroglutamate; pyroglutamic acid; pyromellitic acid; pyrrole-2-carboxylate; pyrroloquinoline quinone; pyruvamide; pyruvate; pyruvic acid; pyruvoyl group; pyrvinium; quazepam; quercetin; quetiapine; quinacrine; quinagolide; quinaldic acid; quinapril; quinestrol; quinethazone; quinidine; quinidine barbiturate; quinine; quinolinic acid; quinonoid 7,8-tetrahydrobiopterin; quinupristin; quisqualate; r,3-hydroxybutan-2-one; rabeprazole; radicicol; radium ra 223 dichloride; ragweed pollen extract; raloxifene; raloxifene core; raltegravir; raltitrexed; ramelteon; ramipril; ramoplanin; ramosetron; ramucirumab; ranibizumab; ranitidine; ranolazine; ranpirnase; rapacuronium; rasagiline; rasburicase; raxibacumab; r-azabisabolene; rbt205 inhibitor; reactive red 1 dye; reboxetine; recombinant alpha 1-antitrypsin; recombinant human gm-csf; recombinant human relaxin; reduced threonine; regadenoson; reglixane; regorafenib; reidispongiolide a; reidispongiolide c; remifentanil; remikiren; remoxipride; renzapride; repaglinide; rescinnamine; reserpine; resveratrol; retapamulin; reteplase; reviparin; rhodamine 6g; ribavirin; riboflavin; riboflavin monophosphate; ribose; ribose-1-phosphate; ribose-5-phosphate; ribostamycin; ribulose-5-phosphate; ricinoleic acid; ridogrel; rifabutin; rifalazil; rifampicin; rifamycin cgp 4832; rifapentine; rifaximin; rilapladib; rilonacept; rilpivirine; riluzole; rimantadine; rimexolone; rimonabant; riociguat; risedronate; risperidone; ritodrine; ritonavir; rituximab; rivanicline; rivaroxaban; rivastigmine; rivoglitazone; rizatriptan; rocuronium; rofecoxib; roflumilast; rolapitant; rolicyclidine; rolipram; rolitetracycline; romidepsin; romiplostim; ropinirole; ropivacaine; roquinimex; rosiglitazone; rosoxacin; rosuvastatin; rotigotine; roxatidine acetate; roxithromycin; r-styrene oxide; rubidium chloride rb-82; rufinamide; rupatadine; rutin; ruxolitinib; s-(2-oxo)pentadecylcoa; s-(3-iodobenzyl)glutathione; s-(4-bromobenzyl)cysteine; s-(d-carboxybutyl)-1-homocysteine; s-(dimethylarsenic)cysteine; s-(methylmercury)-1-cysteine; s-(p-nitrobenzyl)glutathione; s,3-hydroxybutan-2-one; s,s-(2-hydroxyethyl)thiocysteine; s,s-propylthiocysteine; s-1,2-propanediol; s-2-(boronoethyl)-1-cysteine; s-4-nitrobutyryl-coa; s-acetonylcysteine; s-acetyl-cysteine; sacrosidase; sacubitril; s-adenosyl-1,8-diamino-3-thiooctane; s-adenosyl-1-homocysteine; s-adenosyl-l-homoselenocysteine; s-adenosylmethionine; safrazine; salbutamol; salicylamide; salicylhydroxamic acid; salicylic acid; salmeterol; salmon calcitonin; salophen iron chelate; salophen-10-carboxylate iron chelate; salophen-10-propionate iron chelate; salsalate; samarium (153sm)lexidronam; samarium sm-153 lexidronam pentasodium; saprisartan; sapropterin; saquinavir; sar9, met (02)11-substance p; sarafloxacin; sargramostim; s-arsonocysteine; satraplatin; s-atrolactic acid; satumomab pendetide; saxagliptin; s-azabisabolene; s-benzyl-glutathione; s-butyryl-cystein; scopolamine; scopolamine butylbromide; s-dioxymethionine; sebacic acid; sebelipase alfa; secobarbital; secretin; secukinumab; se-ethyl-isoselenourea; selegiline; selenium sulfide; selenocysteine; selenoinosine; selenomethionine selenoxide; selexipag; senna glycoside; seocalcitol; seproxetine; serine vanadate; sermorelin; sertaconazole; sertindole; sertraline; serum albumin; serum albumin iodonated; s-ethylisothiourea; s-ethyl-n-phenyl-isothiourea; setiptiline; sevelamer; sevoflurane; s-hexylglutathione; shikimate-3-phosphate; s-hydroxycysteine; s-hydroxymethyl glutathione; sibutramine; sildenafil; silibinin a; silodosin; siltuximab; silver sulfadiazine; simeprevir; simethicone; simoctocog alfa; simvastatin; sinapinate; sinapoyl coenzyme a; sincalide; sinecatechins; sinefungin; sipuleucel-t; siroheme; sirolimus; s-isopropyl-isothiourea; sitagliptin; sitamaquine; sitaxentan; skeletal targeted radiotherapy; s-mercaptocysteine; s-methyl phosphocysteine; s-methyl thiocysteine group; s-methylcysteine; s-methyl-glutathione; s-nonyl-cysteine; s-octylglutathione; sodium acetate; sodium aurothiomalate; sodium bicarbonate; sodium chloride; sodium citrate; sodium ferric gluconate complex; sodium fluoride; sodium fluoride f-18; sodium gluconate; sodium glycerophosphate; sodium iodide i-123; sodium iodide i-131; sodium lauryl sulfate; sodium monofluorophosphate; sodium nitrite; sodium oxybate; sodium phenylbutyrate; sodium phosphate; sodium stibogluconate; sodium sulfate; sodium tetradecyl sulfate; sodium thiosulfate; sofosbuvir; solabegron; solifenacin; solithromycin; somatostatin; somatrem; somatropin recombinant; sonidegib; sorafenib; soraphen a; sorbinil; sorbitol; sotalol; s-oxy cysteine; soybean spaglumic acid; s-palmitoyl-l-cysteine; sparfloxacin; sparfosic acid; sparsomycin; sparteine; spectinomycin; spermidine; spermine; sphingosine; sphinxolide b; s-phosphocysteine; spinosad; spirapril; spironolactone; s-p-nitrobenzyloxycarbonylglutathione; s-propylamine-l-cysteine; s-selanyl cysteine; s-sulphocysteine; st. john's wort; stannous fluoride; stannsoporfin; stanozolol; staurosporine; stavudine; stearic acid; stepronin; stiripentol; streptokinase; streptolydigin; streptomycin; streptozocin; strontium chloride sr-89; strontium malonate; strontium ranelate; succimer; succinamide-coa; succinic acid; succinylcholine; succinyl-coenzyme a; sucralfate; sucroferric oxyhydroxide; sucrose; sucrosofate; sufentanil; sugammadex; sulbactam; sulconazole; sulfacetamide; sulfacytine; sulfadiazine; sulfadimethoxine; sulfadoxine; sulfamerazine; sulfamethazine; sulfamethizole; sulfamethoxazole; sulfametopyrazine; sulfamoxole; sulfanilamide; sulfaphenazole; sulfapyridine; sulfasalazine; sulfathiazole; sulfatide; sulfinpyrazone; sulfisoxazole; sulfopyruvate; sulfoxone; sulfur; sulfur hexafluoride; sulindac; sulodexide; sulpiride; sulthiame; sumatriptan; sunitinib; suprofen; suramin; susoctocog alfa; suvorexant; swainsonine; synephrine; synthetic conjugated estrogens, a; synthetic conjugated estrogens, b; syringate; tacrine; tacrine(8)-4-aminoquinoline; tacrolimus; tadalafil; tafluprost; tagatose; tagetitoxin; talactoferrin alpha; talampanel; talbutal; talc; taliglucerase alfa; talniflumate; talopram; talsupram; tamibarotene; tamoxifen; tamsulosin; tanaproget; tandamine; tannic acid; tapentadol; tartaric acid; tartronate; tasimelteon; tasosartan; tasquinimod; taurocholic acid; tauroursodeoxycholic acid; tavaborole; tazarotene; tazobactam; tazobactam intermediate; tecadenoson; technetium tc 99m mebrofenin; technetium tc 99m oxidronate; technetium tc 99m sulfur colloid; technetium tc-99m disofenin; technetium tc-99m exametazime; technetium tc-99m medronate; technetium tc-99m pyrophosphate; technetium tc-99m sestamibi; technetium tc-99m sodium pertechnetate; technetium tc-99m tetrofosmin; technetium tc-99m tilmanocept; tedizolid phosphate; teduglutide; tegafur; tegafur-uracil; tegaserod; teicoplanin; telaprevir; telavancin; telbivudine; telithromycin; telmisartan; temafloxacin; temazepam; temocapril; temozolomide; temsirolimus; tenecteplase; teniposide; tenocyclidine; tenofovir; tenofovir alafenamide; tenoxicam; terazosin; terbinafine; terbutaline; terconazole; terfenadine; teriflunomide; teriparatide; terlipressin; tert-butyloxycarbonyl group; tesamorelin; tesmilifene; testolactone; testosterone; testosterone hemisuccinate; testosterone propionate; tetra(imidazole)diaquacopper (i); tetra(imidazole)diaquacopper (0; tetrabenazine; tetrabromo-2-benzotriazole; tetrabutylammonium ion; tetracaine; tetracycline; tetraethylammonium; tetrafluoroaluminate ion; tetrahydrodeoxyuridine; tetrahydrofolic acid; tetrahydrofuran-2-carboxylic acid; tetrahydrooxazine; tetrahydropyran; tetramethylammonium ion; tetrathiomolybdate; tetrazolyl histidine; tetrodotoxin; tetryzoline; thalidomide; thallous chloride; thenalidine; thenoyltrifluoroacetone; theobromine; theophylline; thiabendazole; thiamin diphosphate; thiamin phosphate; thiamine; thiamphenicol; thiamylal; thiarsa dihydroxy cysteine; thiarsahydroxy-cysteine; thieno[2,3-b]pyridine-2-carboxamidine; thienylfentanyl; thiethylperazine; thimerosal; thio-atpa; thiocamphor; thiocellobiose; thiocolchicoside; thiocoumarin; thiodigalactoside; thio-maltohexaose; thio-maltopentaose; thionicotinamide-adenine-dinucleotide; thiopental; thioproperazine; thiopyrophosphate; thioridazine; thiorphan; thiotepa; thiothixene; thonzonium bromide; threonine derivative; threonine-aspartic ester; thymalfasin; thymidine-3′,5′-diphosphate; thymidine-5′-diphosphate; thymidine-5′-(dithio)phosphate; thymidine-5′-diphospho-beta-d-xylose; thymidine-5′-phosphate; thymidine-5′-thiophosphate; thymidine-5′-triphosphate; thymine; thymol; thyroglobulin; thyroid, porcine; thyrotropin alfa; tiagabine; tianeptine; tiaprofenic acid; tibolone; ticagrelor; ticarcillin; ticlopidine; ticrynafen; tigecycline; tiludronate; timolol; tinidazole; tinzaparin; tioconazole; tioguanine; tiopronin; tiotropium; tipifarnib; tipiracil; tipranavir; tirapazamine; tirofiban; titanium dioxide; tixocortol; tizanidine; tobramycin; tocainide; tocilizumab; tofacitinib; tofisopam; tolazamide; tolazoline; tolbutamide; tolcapone; tolfenamic acid; tolmetin; tolnaftate; toloxatone; tolrestat; tolterodine; toluene; tolvaptan; topiramate; topotecan; torasemide; toremifene; tositumomab; tosyl-d-proline; trabectedin; tramadol; trametinib; trandolapril; tranexamic acid; tranilast; trans-2-hydroxycinnamic acid; trans-2-phenylcyclopropylamine; trans-o-hydroxy-alpha-methyl cinnamate; trans-urocanic acid; tranylcypromine; trapidil; trastuzumab; trastuzumab emtansine; travoprost; trazeolide; trazodone; trefentanil; trehalose-6-phosphate; trencam-3,2-hopo; treprostinil; tretinoin; triamcinolone; triamterene; triazolam; triazolopyridine; triazolopyrimidine; tribenuron methyl; tribromomethane; tributylstannanyl; tricarballylic acid; trichlormethiazide; tri-chloro-acetaldehyde; triclosan; tricosanoic acid; tricyclazole; tridihexethyl; triethyl phosphate; triethylenetetramine; trifluoperazine; trifluoroacetonyl coenzyme a; trifluoroalanine; trifluoroethanol; trifluorofurnesyl diphosphate; trifluoromethionine; trifluoro-thiamin phosphate; triflupromazine; trifluridine; triflusal; triglu-5-formyl-tetrahydrofolate; trihexyphenidyl; trihydroxyantimonite(iii); trihydroxyarsenite(iii); trilostane; trimazosin; trimebutine; trimetazidine; trimethadione; trimethaphan; trimethobenzamide; trimethoprim; trimethyl glycine; trimetrexate; trimipramine; trinitrotoluene; trioxsalen; tripelennamine; triphospate; triprolidine; triptorelin; tris; tris(hydroxyethyl)aminomethane; trisalicylate-choline; tris-hydroxymethyl-methyl-ammonium; trisodium citrate dihydrate; trivanadate; troglitazone; troleandomycin; tropicamide; tropinone; trospium; trovafloxacin; troxacitabine; trw3-(2-amino-3-hydroxy-propyl)-6-(n′-cyclohexyl-hydrazino)octahydro-indol-7-ol; trypan blue; trypanothione; tryptophanyl-5′amp; tubercidin; tuberculin purified protein derivative; tubocurarine; tungstopterin cofactor; turoctocog alfa; turpentine; tyloxapol; tymazoline; tyramine; tyropanoic acid; tyrosinal; tyrosyladenylate; tyvelose; ubenimex; ubiquinone-1; ubiquinone-2; udenafil; udp-alpha-d-glucuronic acid; udp-alpha-d-xylopyranose; ulapualide a; ularitide; ulipristal; ulobetasol; umeclidinium; undecan-2-one; undecanal; undecylamine-n,n-dimethyl-n-oxide; undecyl-beta-d-maltopyranoside; undecyl-phosphinic acid butyl ester; unoprostone; uracil; uracil arabinose-3′-phosphate; uracil mustard; urea; urea c-13; urea c-14; uric acid; uridine; uridine 5-triphosphate; uridine diphosphate glucose; uridine triacetate; uridine-2′,3-vanadate; uridine-5′-diphosphate; uridine-5′-diphosphate-mannose; uridine-5′-monophosphate; uridine-diphosphate-n-acetylgalactosamine; uridine-diphosphate-n-acetylglucosamine; uriclyl-2′-5′-phospho-adenosine; urofollitropin; urokinase; ursodeoxycholic acid; ustekinumab; valaciclovir; valdecoxib; valganciclovir; valproic acid; valpromide; valrubicin; valsartan; vancomycin; vandetanib; vanillate; vanoxerine; vapitadine dihydrochloride; vapreotide; vardenafil; varenicline; vasopressin; vatalanib; vayarin; vecuronium; vedolizumab; velaglucerase alfa; veliparib; velpatasvir; vemurafenib; venetoclax; venlafaxine; verapamil; verdoheme; verteporfin; vibriolysin; vidarabine; vigabatrin; vilanterol; vilazodone; vildagliptin; viloxazine; vinblastine; vincristine; vindesine; vinorelbine; vinylglycine; vinylsulphonic acid; violaxanthin; viomycin; virginiamycin m1; virginiamycin sl; vismodegib; vitamin a; vitamin c; vitamin e; voacamine; voglibose; vorapaxar; voriconazole; vorinostat; vortioxetine; warfarin; water; willardiine; xanthine; xanthinol; xanthophyll; xenon-133; ximelagatran; xylarohydroxamate; xylometazoline; xylose-derived imidazole; xylose-derived lactam oxime; yohimbine; zafirlukast; z-ala prolinal; zalcitabine; zaleplon; zaltoprofen; zanamivir; zanapezil; z-dehydrobutyrine; zebularine; ziconotide; zidovudine; zileuton; zimelidine; zinc; zinc oxide; zinc substituted heme c; zinc sulfate; zinc trihydroxide; ziprasidone; zk-epothilone; zn(ii)-(2r)-oxo-protoporphyrin ix); zoledronic acid; zolmitriptan; zolpidem; zomepirac; zonisamide; zopiclone; zorubicin; zotepine; z-pro-prolinal; zucapsaicin; zuclopenthixol; (10e,12z)-octadeca-10,12-dienoic acid; (10r)-10-formyl-5,8,10-trideazafolic acid; (10s)-10-formyl-5,8,10-trideazafolic acid; (1r)-2-amino-1-[3-(trifluoromethyl)phenyl]ethanol; chloro-1-phenylpropan-1-ol; (1r,45)-2-azabornane; (1s,2s)-1-amino-1-(1,3-thiazol-2-yl)propan-2-ol; (1s,3r,4r,6s)-1,3,4,6-tetrapkisphosphate; (1s,3s,4s)-1,3,4-triphospho-myo-inositol; (2,6-dimethyl-phenoxy)-acetic acid; (2-[2-ketopropylthio]ethanesulfonate; (2r)-1-(2,6-dimethylphenoxy)propan-2-amine; (2r)-2,3-dihydroxypropanal; (2r)-2-benzyl-3-nitropropanoic acid; (2s)-2-(1h-indol-3-yl)hexanoic acid; (2s)-2-(1h-indol-3-yl)pentanoic acid; (2s)-2-(4-chlorophenoxy)-3-phenylpropanoic acid; (2s)-2-(4-ethylphenoxy)-3-phenylpropanoic acid; (2s)-2-(biphenyl-4-yloxy)-3-phenylpropanoic acid; (2s)-2,8-diaminooctanoic acid; (2s)-2-hydroxyoctanoic acid; (2s)-hydroxy(4-hydroxyphenyl)ethanenitrile; (2s)-hydroxy(4-hydroxyphenyl)ethanoic acid; (2s)-pyrrolidin-2-ylmethylamine; (2s,3r)-1-amino-2-methylbutane-2,3-diol; (2s,3r)-3-(6-amino-9h-purin-9-yl)nonan-2-ol; (2s,3s)-2-azanyl-3-methyl-pentanedioic acid; (2s,3s)-trans-dihydroquercetin; (2s,4s)-alpha-campholinic acid; (2s,5s)-5-carboxymethylproline; (2-sulfanyl-3-phenylpropanoyl)-phe-tyr; (3beta)-cholest-5-ene-3,25-diol; (3beta,20r)-cholest-5-ene-3,20-diol; (3beta,7beta)-cholest-5-ene-3,7-diol; (3-chloro-4-propoxy-phenyl)-acetic acid; (3e)-2,6-dioxo-6-phenylhex-3-enoate; 3[n-morpholino]propane sulfonic acid; 3-isobutyl-1-methyl-7h-xanthine; 3-mercuri-4-aminobenzenesulfonamide; 3-(oxalyl-amino)-naphthalene-2-carboxylic acid; 3-(phosphonomethyl)pyridine-2-carboxylic acid; 3-(prop-2-ene-1-sulfinyl)-propene-1-thiol; 3,4-dihydro-2h-pyrrolium-5-carboxylate; 3,4-methylenedioxyamphetamine; 3,4-methylenedioxymethamphetamine; 3,4-epoxybutyl-alpha-d-glucopyranoside; 3,5,3′,5′-tetrachloro-biphenyl-4,4′-diol; 3,4-dihydro-5-methyl-isoquinolinone; 3,4-dihydroxy-1-methylquinolin-2(1h)-one; 3(s)-amino-4-phenyl-butan-2(r)-ol; 3(s)-amino-4-phenyl-butan-2(s)-ol; 3′,5′-dinitro-n-acetyl-1-thyronine; 3,6,9,12,15,18-hexaoxaicosane; 3,6,9,12,15-pentaoxaheptadecan-1-ol; 3,6,9,12,15-pentaoxatricosan-1-ol; 3,6-anhydro-d-galactose-2-sulfate; 3,6-dihydroxy-xanthene-9-propionic acid; 3,7,11,15-tetramethyl-hexadecan-1-ol; 3,7,3,4′-tetrahydroxyflavone; 3,5-difluorobenzenesulfonamide; 3-[(1s)-1-(dimethylamino)ethyl]phenol; (3-formyl-but-3-enyl)-phosphonic acid; (3r)-1-acetyl-3-methylpiperidine; (3r)-3-hydroxydodecanoic acid; (3s)-2,3,4,5-tetrahydropyridin-3-amine; (4e)-4-aminohex-4-enoic acid; (4-ethylphenyl)sulfamic acid; (4-fluorophenyl)(pyridin-4-yl)methanone; (4-hydroxymaltosephenyl)glycine; (4r)-2-methylpentane-2,4-diol; (4r)-7aza-7,8-dihydrolimonene; (4s)-5-fluoro-1-leucine; (4s,5s)-1,2-dithiane-4,5-diol; (6r)-folinic acid; (6s)-5,6,7,8-tetrahydrofolate; (8ar)-hexahydropyrrolo[1,2-a]pyrazine-1,4-dione; (c8-r)-hydantocidin 5′-phosphate; (c8-s)-hydantocidin 5′-phosphate; (carboxyhydroxyamino)ethanoic acid; (e)-2-fluoro-p-hydroxycinnamate; (e)-imidacloprid; (hydroxyethyloxy)tri(ethyloxy)octane; (molybdopterin-s,s)-dioxo-thio-molybdenum(v); (mu-4-sulfido)-tetra-nuclear copper ion; (p-iodophenylacetylamino)methylphosphinic acid; (r)-1-para-nitro-phenyl-2-azido-ethanol; (r)-1-phenylethanol; (r)-2-hydroxy-3-sulfopropanoic acid; (r)-4-nitrostyrene oxide; (r)-mandelic acid; (r)-mesopram; (r)-mevalonate; (r)-n-(1-methyl-hexyl)-formamide; (r)-n-(3-indol-1-yl-2-methyl-propyl)-4-sulfamoyl-benzamide; (r)-propylene glycol; (r)-pyridin-4-yl[4-(2-pyrrolidin-1-ylethoxy)phenyl]methanol; (r)-rolipram; (r)-tacrine(10)-hupyridone; (r,r)-2,3-butanediol; (s)-4-nitrostyrene oxide; (s)-atpa; (s)-blebbistatin; (s)-des-me-ampa; (s)-hmg-coa; (s)-hydroxy(phenyl)acetonitrile; (s)-mandelic acid; (s)-rolipram; (s)-tacrine(10)-hupyridone; (s)-wiskostatin; (s,r)-fidarestat; (south)-methanocarba-thymidine; (tert-butyloxycarbonyl)-alanyl-alanyl-amine; (z)-2-[2-(4-methylpiperazin-1-yl)benzyl]diazenecarbothioamide; [[4-(aminomethyl)phenyl]amino]oxo-acetic acid; [[n-(benzyloxycarbonyl)amino]methyl]phosphate; [2(formyl-hydroxy-amino)-ethyl]-phosphonic acid; [2(r,$)-2-sulfanylheptanoyl]-phe-ala; [methylseleno]acetate; [methyltelluro]acetate; [methylthio]acetate; 1-(1-phenylcyclopentyl)methylamine; 1-(2,2′-bithiophen-5-yl)methanamine; 1-(2-nitrophenyl)-2,2,2-trifluoroethyl]-arsenocholine; 1-(2-amidinophenyl)-3-(phenoxyphenyl)urea; 1-(4-amidinophenyl)-3-(4-chlorophenyl)urea; 1-(4-hexylphenyl)prop-2-en-1-one; 1-(4-thiophen-2-ylphenyl)methanamine; 1-(9-ethyl-9h-carbazol-3-yl)-n-methylmethanamine; 1-(adamantan-1-yl)-2-(1h-imidazol-1-yl)ethanone; 1-(biphenyl-4-ylmethyl)-1h-imidazole; 1,3,5-benzenetricarboxylic acid; 1,3-dedimethyl-1,3-divinyl heme; 1,4-deoxy-1,4-dithio-beta-d-glucopyranose; 1,4-dideoxy-o2-sulfo-glucuronic acid; 1-[4-(2-oxo-2-phenylethyl)phenyl]guanidine; 1-[4-(hydroxymethyl)phenyl]guanidine; 1-(2-phenylethyl)-4-phenyl-4-acetoxypiperidine; 1,10-phenanthroline; 1,1′-biphenyl-2-sulfinic acid; 1,1′-biphenyl-3,4-diol; 1,1′-hexane-1,6-diylbis(1h-imidazole); 1,2,4-triazole; 1,2,4-triazole-carboxamidine; 1,2-dichloro-propane; 1,2-dihydroxybenzene; 1,2-dimethoxyethane; 1,2-propanediol; 1,3,2-dioxaborolan-2-ol; 1,3,5-trichloro-benzene; 1,3-butanediol; 1,3-dihydroxyacetonephosphate; 1,3-diphenylurea; 1,3-propandiol; 1,3-thiazole-4-carboxylic acid; 1,4-butanediol; 1,4-diethylene dioxide; 1,4-dithio-alpha-d-mannose; 1,4-dithiothreitol; 1,6-diaminohexane; 1,6-dihydroxy naphthalene; 1,6-di-o-phosphono-d-allitol; 1,6-di-o-phosphono-d-mannitol; 1,6-fructose diphosphate (linear form); 1,8-di-hydroxy-4-nitro-anthraquinone; 1,8-di-hydroxy-4-nitro-xanthen-9-one; 1,n6-ethenoadenine; 10-cf3c(oh)2-ddacthf; 10-propargyl-5,8-dideazafolic acid; 11-deoxy-beta-rhodomycin; 11-mercaptoundecanoic acid; 12-bromododecanoic acid; 12-hydroxydodecanoic acid; 12-phenylheme; 1-3 sugar ring of pentamannosyl 6-phosphate; 13-acetylphorbol; 13beta-ethyl-17beta-hydroxygon-4-en-3-one; 16,17-androstene-3-ol; 16-bromoepiandrosterone; 19-nor-4-androstenediol; 19-nor-4-androstenedione; 19-nor-5-androstenediol; 19-nor-5-androstenedione; 19-norandrostenedione; 1-acetyl-2-carboxypiperidine; 1,2,5,8-tetrahydroxyanthracene-9,10-dione; 1,2,5-thiadiazolidin-3-one-1,1-dioxide; 1-amino-1-carbonyl pentane; 1-aminocyclopropanecarboxylic acid; 1-aminocyclopropylphosphonate; 1-androstenediol; 1-androstenedione; 1-anilino-8-naphthalene sulfonate; 1-benzyl-(r)-propylamine; 1-benzylimidazole; 1-beta-ribofuranosyl-1,3-diazepinone; 1-biphenyl-2-ylmethanamine; 1-bromopropane-2-ol; 1-butane boronic acid; 1-deaza-adenosine; 1′-deazo-thiamin diphosphate; 1-decane-sulfonic-acid; 1-deoxy-d-xylulose 5-phosphate; 1-deoxymannojirimycin; 1-deoxy-ribofuranose-5′-phosphate; 1-dodecanol; 1-ethyl-pyrrolidine-2,5-dione; 1-guanidinium-7-aminoheptane; 1h-benoximidazole-2-carboxylic acid; 1-hexadecanosulfonic acid; 1-hexadecanosulfonyl-o-l-serine; 1-hexadecylsulfonyl fluoride; 1h-indol-3-ylacetic acid; 1-hydroxy-1-thio-glycerol; 1-hydroxy-3-methylbutane; 1-methyl-2-quinolone; 1-methylcytosine; 1-methylimidazole; 1-methyloxy-4-sulfone-benzene; 1-monooleoyl-rac-glycerol; 1-octen-3-ol; 1-phenylcyclohexylamine; 1-proponol; 1-thio-beta-d-glucopyranose; 1-ethoxy-2-(2-ethoxyethoxy)ethane; 1-ethoxy-2-(2-methoxyethoxy)ethane; 1-deoxy-1-thio-heptaethylene glycol; 1-hydroxy-2-amino-3-cyclohexylpropane; 1-hydroxyamine-2-isobutylmalonic acid; 1-menaphthyl glutathione conjugate; 1-methoxy-2-(2-methoxyethoxy)ethane; 1-methoxy-2-[2-(2-methoxy-ethoxy]-ethane; 1-n-acetyl-beta-d-glucosamine; 1,2-diacyl-sn-glycero-3-phosphoinositol; 1,2-dipalmitoyl-phosphatidyl-glycerole; 1-piperidinocyclohexanecarbonitrile; 2-(1,1′-biphenyl-4-yl)propanoic acid; 2-(3,5-dimethylphenyl)-1,3-benzoxazole; 2-(3,6-dihydroxyphenyl)acetic acid; 2-(oxalyl-amino)-benzoic acid; 2-(phosphonooxy)butanoic acid; 2-(pyrido[1,2-e]purin-4-yl)amino-ethanol; 2(s)-amino-6-boronohexanoic acid; 2-(thiomethylene)-4-methylpentanoic acid; 2-(trimethylammonium)ethyl thiol; 2,2′:6′,2″-terpyridine platinum(ii); 2,3-anhydro-quinic acid; 2,3,4,5,6-pentafluorobenzyl alcohol; 2,3,5,6-tetrafluoro-4-methoxy-benzamide; 2′,3′-dideoxyadenosine-5′-triphosphate; 2′,3′-dideoxycytidine-5′-monophosphate; 2′,3-dideoxythymidine-5′-monophosphate; 2,3-dihydroxy-5-oxo-hexanedioate; 2,3-dimethyl-1,4-naphthoquinone; 2,3-di-o-sulfo-alpha-d-glucopyranose; 2,3-diphenyl-1h-indole-7-carboxylic acid; 2,4-diamino-4,6-dihydroxypyrimidine; 2,4-dihydroxy-3,3-dimethyl-butyrate; 2,4-dihydroxy-trans cinnamic acid; 2,5-dideoxy-2,5-imino-d-glucitol; 2,5-dimethoxy-4-ethylamphetamine; 2,5-dimethylpyrimidin-4-amine; 2,6-diamino-hexanoic acid amide; 2,6-diaminoquinazolin-4(3h)-one; 2-((4′-hydroxynaphthyl)-azo)benzoic acid; 2((4′-hydroxyphenyl)-azo)benzoic acid; 2-(1,3-thiazol-4-yl)-1h-benzimidazole-5-sulfonamide; 2-(1h-pyrrol-1-ylcarbonyl)benzene-1,3,5-triol; 2-(2-hydroxy-cyclopentyl)-pent-4-enal; 2-(1h-indol-3-yl)acetamide; (2r)-2-ethyl-1-hexanesulfonic acid; (2r)-2-phenyl-n-pyridin-4-ylbutanamide; 2-(1h-indol-3-yl)acetamide; 2-(1h-indol-3-yl)ethanamine; 2-(1h-indol-3-yl)ethanamine; 2-(1h-pyrazol-3-yl)-1h-benzimidazole; 2-(1h-pyrazol-3-yl)-1h-benzimidazole; 2-(3,4-dihydroxyphenyl)acetic acid; 2-(3-nitrophenyl)acetic acid; 2-(4-hydroxy-phenyl)benzofuran-5-ol; 2-(4-methoxyphenyl)acetamide; 2-(4-nitrophenyl)acetic acid; 2-(cyclohexylamino)benzoic acid; 2-(sec-butyl)thiazole; 2,3,-dihydroxybenzoylserine; 2,3-didehydroalanine; 2,3-dideoxyfucose; 2,3-difluorobenzyl alcohol; 2,3-dihydroxy-benzoic acid; 2,3-dihydroxy-valerianic acid; 2,3-dimethylimidazoli urn ion; 2′,4,4′-trihydroxychalcone; 2,4,6-triaminoquinazoline; 2,4,6-tribromophenol; 2,4,6-trinitrophenol; 2,4-diaminobutyric acid; 2,4-dihydroxybenzoic acid; 2,4-dinitrophenol; 2,5,7-trihydroxynaphthoquinone; 2,5-anhydroglucitol-1,6-biphosphate; 2,5-dimethoxyamphetamine; 2,5-xylidine; 2,6-diaminopimelic acid; 2,6-dibromo-4-phenoxyphenol; 2,6-dicarboxynaphthalene; 2′,6′-dichloro-biphenyl-2,6-diol; 2,6-difluorobenzenesulfonamide; 2,6-dimethyl-7-octen-2-ol; 2-[(dioxidophosphino)oxy]benzoate; 2′-5′dideoxyuridine; 2-acetyl-protoporphyrin ix; 2-allyl-6-methyl-phenol; 2-allylphenol; 2-amino-3-ketobutyric acid; 2-amino-4h-1,3-benzoxathiin-4-ol; 2-amino-5-hydroxy-benzimidazole; 2-amino-6-chloropyrazine; 2-amino-6-oxo-hexanoic acid; 2-amino-adenosine; 2-aminobenzoic acid; 2-aminobenzyl alcohol; 2-aminoethanesulfonic acid; 2-aminoethanimidic acid; 2-aminoethyl naphthalen-1-ylacetate; 2-amino-p-cresol; 2-amino-pentanoic acid; 2-aminophenol; 2-aminopimelic acid; 2-aminoprop-2-enamide; 2-aminopropanedioic acid; 2-aminoquinazolin-4(3h)-one; 2-aminothiazoline; 2-amino-vinyl-phosphate; 2-benzyl-3-iodopropanoic acid; 2-bromo-2-propene-1-ol; 2-bromo-6-chloro-purine; 2-bromo-6-hydroxy-purine; 2-bromoacetyl group; 2-bromophenol; 2-butanol; 2-chloro-5-nitro-n-phenylbenzamide; 2-chloro-6-methyl-aniline; 2′-chloro-biphenyl-2,3-diol; 2-chlorodideoxyadenosine; 2-chlorophenol; 2′-cytidylic acid; 2-dehydropantoate; 2-deoxy-2-aminogalactose; 2-deoxy-2-fluoro-i²-d-glucose; 2-deoxy-2-fluoro-i²-d-mannose; 2-deoxy-2-fluoro-i²-d-galactose; 2-deoxy-2-fluoro-i²-d-mannose; 2′-deoxyadenosine 5′-triphosphate; 2-deoxy-beta-d-galactose; 2′-deoxycytidine; 2-deoxyglucose; 2′-deoxyinosine; 2′-deoxymaltose; 2′-deoxyuridine; 2′-deoxyuridylic acid; 2-ethoxyethanol; 2-fluoro-2′-deoxyadenosine; 2-fluoroadenosine; 2-fluoroaniline; 2-formyl-protoporphryn ix; 2h-1-benzopyran-2-one; 2-hydroxyethyl disulfide; 2-hydroxy-tryptophan; 2-iminiopropanoate; 2-iminobiotin; 2-iodobenzylthio group; 2-isobutyl-3-methoxypyrazine; 2-keto-3-deoxygluconate; 2-methoxy-3-isopropylpyrazine; 2-methoxy-4-vinyl-phenol; 2-methoxyestradiol; 2-methoxyethanol; 2-methyl-2-propanol; 2-methylbutanoic acid; 2-methylleucine; 2-(n-morpholino)-ethanesulfonic acid; 2-methylpentane-1,2,4-triol; 2-naphthalenesulfonic acid; 2-nitro-p-cresol; 2′-o-butyl-5-methyluridine; 2-o-methyl fucose; 2-oxalosuccinic acid; 2-oxo-3-pentenoic acid; 2-oxo-4-methylpentanoic acid; 2-oxobutanoic acid; 2-oxoheptylphosphonic acid; 2-oxoquinoline; 2-phenyl-4h-benzo[h]chromen-4-one; 2-phenyl-4h-chromen-4-one; 2-phenylamino-ethanesulfonic acid; 2-phenyl-ethanol; 2-phenylethylamine; 2-phenylheme; 2-phospho-d-glyceric acid; 2-phosphoglyceric acid; 2-phosphoglycolic acid; 2-prolyl-5-tert-butyl-[1,3,4]oxadiazole; 2-propenyl-n-acetyl-neuramic acid; 2-propyl-aniline; 2-pyridinethiol; 2s,3s-3-methylaspartic acid; 2s,4r-4-methylglutamate; 2-tert-butylbenzene-1,4-diol; 2-thioethenamine; 2-thiomethyl-3-phenylpropanoic acid; 2-tridecanoyloxy-pentadecanoic acid; 2-amino-3-mercapto-propionamide; 2-amino-3-oxo-4-sulfo-butyric acid; 2-amino-4-butyl-5-propylselenazole; 2-amino-4-mercapto-butyric acid; 2-amino-n,3,3-trimethylbutanamide; 2-anhydro-3-fluoro-quinic acid; 2-carboxyethylphosphonic acid; 2-carboxypropyl-coenzyme a; 2-cyclopropylmethylenepropanal; 2-decenoyl n-acetyl cysteamine; 2′-deoxycytidine-5′-monophosphate; 2′-deoxycytidine-5′-triphosphate; 2-deoxy-glucitol-6-phosphate; 2-deoxy-glucose-6-phosphate; 2′-deoxyguanosine-5′-diphosphate; 2′-deoxyguanosine-5′-monophosphate; 2′-deoxyguanosine-5′-triphosphate; 2′-deoxy-thymidine-beta-l-rhamnose; 2′-deoxyuridine 3-monophosphate; 2-hydroxy-1,4-naphthoquinone; 2-hydroxy-3,5-diiodobenzoic acid; 3-chloro-4-hydroxyphenylglycine; 3-cyclohexyl-1-propylsulfonic acid; 3-(1,10-phenanthrol-2-yl)-l-alanine; 3-deazo-thiamin diphosphate; 3-(1-aminoethyl)nonanedioic acid; 3-(3,4-dimethoxyphenyl)propionic acid; 3-(4-hydroxy-phenyl)pyruvic acid; 3-(4-nitro-phenoxy)-propan-1-ol; 3-(4-nitrophenyl)-1h-pyrazole; 3-(benzoylamino)-l-alanine; 3-(benzyloxy)pyridin-2-amine; 3-(heptyloxy)benzoic acid; 3-(indol-3-yl) lactate; 3-(mercaptomethylene)pyridine; 3-(p-to1yl)propionic acid; 3,3′,5,5′-tetraiodothyroacetic acid; 3,4,5-trimethoxyamphetamine; 3,4-dichloroisocoumarin; 3,4-dihydrouracil; 3,4-dihydroxybenzoic acid; 3,4-dihydroxycinnamic acid; 3,4-dimethylaniline; 3,4-dimethylphenol; 3,5 dibromotyrosine; 3,5-diaminophthalhydrazide; 3,5-dibromobiphenyl-4-ol; 3,5-difluoroaniline; 3,5-diiodotyrosine; 3,5-dinitrocatechol; 3,6,9,12,15-pentaoxaheptadecane; 3,9-dimethyladenine; 3-acetyl pyridine adenine dinucleotide; 3-acetylpyridine adenine dinucleotide; 3-allylfentanyl; 3-amino-1-chloro-4-phenyl-butanol-2-yl; 3-amino-3-oxopropanoic acid; 3-amino-4-oxybenzyl-2-butanone; 3-amino-5-phenylpentane; 3-amino-6-hydroxy-tyrosine; 3-amino-alanine; 3-aminosuccinimide; 3-bromo-3-buten-1-ol; 3-bromo-7-nitroindazole; 3-butylthiolane 1-oxide; 3-chloroalaninate; 3-chlorophenol; 3-deaza-adenosine; 3-deazacytidine; 3-dehydroquinic acid; 3-dehydroshikimate; 3-deoxy-d-glucosamine; 3-deoxyguanosine; 3-fluoro-2-methyl-aniline; 3-fluorosialic acid; 3-fluorotyrosine; 3h-pyrazolo[4,3-d]pyrimidin-7-ol; 3-hydroxy-3-methyl-glutaric acid; 3-hydroxyanthranilic acid; 3-hydroxybutyryl-coenzyme a; 3-hydroxyglutaric acid; 3-hydroxyhippuric acid; 3-hydroxyimino quinic acid; 3-hydroxyisoxazole-4-carboxylic acid; 3-hydroxy-myristic acid; 3-hydroxyphenylalanine; 3-hydroxy-propanoic acid; 3-hydroxypyruvic acid; 3-indolebutyric acid; 3-iodo-benzyl alcohol; 3-iodo-tyrosine; 3-isopropylmalic acid; 3-methoxybenzamide; 3-methyladenine; 3-methyl-aspartic acid; 3-methyl-benzene-1,2-diol; 3-methylcytosine; 3-methylfentanyl; 3-methylglutamic acid; 3-methylphenylalanine; 3-methylpyridine; 3-methylthiofentanyl; 3-nitrophenylboronic acid; 3-oxiran-2ylalanine; 3′-oxo-adenosine; 3-oxo-pentadecanoic acid; 3-phenyl-1,2-propandiol; 3-phenylpropionic acid; 3-phenylpropylamine; 3-phenylpyruvic acid; 3-phosphoglyceric acid; 3-phosphoglycerol; 3-pyridin-4-yl-1h-indazole; 3r-hydroxydecanoyl-coa; 3-sulfinoalanine; 3-sulfooxy-1h-indole; 3-thiaoctanoyl-coenzyme a; 3′-thio-thymidine-5′-phosphate; 3-trimethylsilylsuccinic acid; 3′-uridinemonophosphate; 3-o-acetylthymidine-5′-diphosphate; 3-o-methylfructose in linear form; 3-phenyl-5-(1h-pyrazol-3-yl)isoxazole; 4-(4-fluorobenzyl)piperidine; 4-(dimethylamino)benzoic acid; 4-(1h-imidazol-1-yl)phenol; 4-(1-methyl-1-phenylethyl)phenol; 4-(2-amino-1,3-thiazol-4-yl)phenol; 4-(2-aminoethyl)-2-cyclohexylphenol; 4-(2-aminoethyl)-2-ethylphenol; 4-(2-thienyl)butyric acid; 4-(4-chlorophenyl)imidazole; 4-(carboxyvin-2-yl)phenylboronic acid; 4-(hydroxymercury)benzoic acid; 4-(hydroxymethyl)benzamidine; 4,4′-biphenyldiboronic acid; 4,4′-cyclohexane-1,1-diyldiphenol; 4,4′-dipyridyl disulfide; 4,4′-propane-2,2-diyldiphenol; 4,5-dehydro-d-glucuronic acid; 4,5-dehydro-l-iduronic acid; 4,6-dideoxy-4-amino-alpha-d-glucose; 4,6-dideoxy-4-amino-beta-d-glucopyranoside; 4,6-dideoxyglucose; 4,7-dimethyl-[1,10]phenanthroline; 4,7-dioxosebacic acid; 4-acetamidobenzoic acid; 4-amido-4-carbamoyl-butyric acid; 4-amino hexanoic acid; 4-aminobenzoic acid; 4-aminohydrocinnamic acid; 4-androstenediol; 4-androstenedione; 4-bromo-2,5-dimethoxyamphetamine; 4-bromo-2,5-dimethoxyphenethylamine; 4-carboxy-4-aminobutanal; 4-carboxycinnamic acid; 4-carboxyphenylboronic acid; 4-chlorobenzoic acid; 4-deoxy-4-amino-beta-d-glucose; 4-deoxy-alpha-d-glucose; 4-deoxy-d-glucuronic acid; 4-deoxy-d-mannuronic acid; 4-deoxyglucarate; 4-deoxylactose; 4-flourobenzenesulfonamide; 4-fluorobenzylamine; 4-fluorofentanyl; 4-fluorophenethyl alcohol; 4-fluorotryptophane; 4-guanidinobenzoic acid; 4-hydroperoxy-2-methoxy-phenol; 4-hydroxy-19-nortestosterone; 4-hydroxy-2-butanone; 4-hydroxy-3-methoxybenzoate; 4-hydroxy-aconitate ion; 4-hydroxybenzoyl coenzyme a; 4-hydroxybenzyl coenzyme a; 4-hydroxybutan-1-aminium; 4-hydroxycoumarin; 4′-hydroxyflavanone; 4-hydroxyphenacyl coenzyme a; 4-hydroxyphenylglycine; 4-hydroxytestosterone; 4-iodo-d-phenylalanine; 4-iodo-1-phenylalanine; 4-iodophenol; 4-iodopyrazole; 4-methoxyamphetamine; 4-methoxy-e-rhodomycin t; 4-methyl valeric acid; 4-methyl-1,2-benzenediol; 4-methyl-2,5-dimethoxyamphetamine; 4-methyl-2h-chromen-2-one; 4-methylaminorex; 4-methyl-histidine; 4-methylidene-5-one; 4-methylimidazole; 4-methylpiperazin-1-ylcarbonyl group; 4-methyl-pyrroline-5-carboxylic acid; 4-methylthio-alpha-d-mannose; 4-methylumbelliferyl chitobiose; 4-methylumbelliferyl-alpha-d-glucose; 4-nitrocatechol; 4-nitro-inden-1-one; 4-nitrophenyl phosphate; 4′-nitrophenyl-3i-thiolaminaritrioside; 4-nitrophenyl-ara; 4-nitrophenyl-beta-d-galactoside; 4-o-methyl-alpha-d-glucuronic acid; 4-o-methyl-beta-d-glucuronic acid; 4-oxoretinol; 4-oxosebacic acid; 4-phenyl-1h-imidazole; 4-phenylbutylamine; 4-phenylfentanyl; 4-phospho-d-erythronate; 4-phospho-d-erythronohydroxamic acid; 4′-phosphopantetheine; 4-piperidin-4-ylbutanal; 4-piperidino-piperidine; 4r-fluoro-n6-ethanimidoyl-1-lysine; 4-(1,3-benzoxazol-2-yl)-2,6-dibromophenol; 4-(1,3-benzoxazol-2-yl)-2,6-dimethylphenol; 4-(2,2,2-trifluoroethyl)-1-phenylalanine; 4-thio-beta-d-glucopyranose; 5-(2-chlorobenzyl)-2-furoic acid; 5-(2-chlorophenyl)-1,3,4-thiadiazole-2-sulfonamide; 5-(2-chlorophenyl)furan-2-carbohydrazide; 5-(2-chlorophenyl)furan-2-carboxylic acid; 5-(2-hydroxyethyl)nonane-1,9-diol; 5-(2-methoxyphenyl)-2-furoic acid; 5-(2-nitrophenyl)-2-furoic acid; 5,10-dideazatetrahydrofolic acid; 5,10-methylene-6-hydrofolic acid; 5,4′-dideoxyflavanone; 5,6-cyclic-tetrahydropteridine; 5,6-diaminouracil; 5,6-dihydroxy-nadp; 5,6-dimethylbenzimidazole; 5,8-di-amino-1,4-dihydroxy-anthraquinone; 5,8-dimethoxy-1,4-dimethylquinolin-2(1h)one; 5-[2-(1h-pyrrol-1-yl)ethoxy]-1h-indole; 5alpha-androstane-3alpha,17beta-diol; 5-alpha-androstane-3-beta,17-alpha-diol; 5-alpha-androstane-3-beta,17beta-diol; 5-amidino-benzimidazole; 5-amino 6-nitro uracil; 5-amino-1h-pyrimidine-2,4-dione; 5-aminoimidazole ribonucleoside; 5-aminoisoquinoline; 5-aminonaphthalene-1-sulfonic acid; 5-androstenedione; 5-benzyl-1,3-thiazol-2-amine; 5-beta-androstane-3,17-done; 5-beta-dihydrotestosterone; 5-bromo-cytidinemonophosphate; 5-bromonicotinamide; 5-bromothienyldeoxyuridine; 5-bromovinyldeoxyuridine; 5-chloryl-2,4,6-quinazolinetriamine; 5′-deoxy-5′-(methylthio)-tubercidin; 5′-deoxy-5′-methylthioadenosine; 5′-deoxy-5′-piperidin-1-ylthymidine; 5-deoxyflavanone; 5-exo-hydroxycamphor; 5′-fluoro-2′,5′-dideoxyadenosine; 5-fluoro-2′-deoxyuridine-5′-monophosphate; 5-fluoro-4-(s)-hydroxy-3,4-dihydropyrimidine; 5′-fluoro-5′-deoxyadenosine; 5-fluoro-beta-l-gulosyl fluoride; 5-fluoroindole propanol phosphate; 5-fluorolevulinic acid; 5-fluorouridine; 5-formyl-6-hydrofolic acid; 5-hydroxy norvaline; 5-hydroxymethyl-chonduritol; 5-hydroxyvaleric acid; 5-iodotubercidin; 5-iodouracil; 5-methoxybenzimidazole; 5-methylbenzimidazole; 5-methylcytidine-5′-monophosphate; 5-methylpyrrole; 5-methyltetrahydrofolate; 5-methyluridine 5-monophosphate; 5-n-allyl-arginine; 5-nitroindazole; 5-oxo-1-norleucine; 5-oxo-pyrrolidine-2-carbaldehyde; 5-pentyl-2-phenoxyphenol; 5-phenyl-1h-indazol-3-amine; 5-phenyl-2-keto-valeric acid; 5-phenylsulfanyl-2,4-quinazolinediamine; 5-phenylvaleric acid; 5-phosphoarabinonic acid; 5′-s-ethyl-5-thioadenosine; 6-(dihydroxy-isobutyl)-thymine; 6-amino-1-methylpurine; 6-aminobenzoic acid; 6-aminohexyl-uridine-c1,5′-diphosphate; 6-aza-ump; 6-bromo-1-hexanol; 6-carboxymethyluracil; 6-chloro-2-fluoropurine; 6-deoxy-alpha-d-glucose; 6-deoxyerythronolide b; 6-deoxyglucose; 6-hydroxy-d-norleucine; 6-hydroxydopa quinone; 6-hydroxy-1-norleucine; 6-hydroxymethyl-7,8-dihydropterin; 6-hydroxymethylpterin; 6-hydroxypropylthymine; 6-hydroxyuridine-5′-phosphate; 6-methylamino-5-nitroisocytosine; 6-methyl-formycin a; 6-methylpurine; 6′-methyl-thiamin diphosphate; 6-morpholin-4-yl-9h-purine; 6-nitroindazole; 6-o-cyclohexylmethyl guanine; 6-phosphogluconic acid; 6s-5,6,7,8-tetrahydrobiopterin; 7,8-diamino-nonanoic acid; 7,8-dihydrobiopterin; 7,8-dihydroneopterin; 7,8-dimethylalloxazine; 7,9-dimethylguanine; 7a-methyl-19-nortestosterone; 7-deaza-7-aminomethyl-guanine; 7-deaza-7-cyano-guanine; 7-deazaguanine; 7-hydroxystaurosporine; 7-iodo-1,2,3,4-tetrahydro-isoquinoline; 7-keto-8-aminopelargonic acid; 7-methyl-gpppa; 7-methylguanosine; 7-methyl-guanosine-5′-triphosphate; 7-nitroindazole; 7-nitroindazole-2-carboxamidine; 8-azaguanine; 8-azaxanthine; 8-bromoadenosine-5′-diphosphate; 8-hydroxy-2′-deoxyguanosine; 8-iodo-guanine; 8-methyl-9-oxoguanine; 99mtc-ciprofloxacin; 9-aminophenanthrene; 9-deazaadenine; 9-deazaguanine; 9-deazahypoxanthine; 9-deazainosine; 9h-carbazole; 9-hydroxypropyladenine, r-isomer; 9-hydroxypropyladenine, s-isomer; 9-methyl uric acid; 9-methylguanine; 9-n-phenylmethylamino-tacrine; 9r,13r-opda; 17alpha-methyl-4-hydroxynandrolone; and/or 17alpha-methyl-delta1-dihydrotestosterone.

[0150] In additional embodiments, at least one of the following compounds may be used as perturbation stimuli: 17-MG (Tanespimycin)/KOS-953, 22S-Hydroxycholesterol, 740 Y-P, A3-HCl, ABT-263, ACEA, Acetaminophen (paracetamol), Acetycholine, Activin, Adapin (doxepin), Afatinib, AICAR, Alvespimycin hydrochloride, AM 580, AMG 337, Amigal (Deoxygalactonojirimycin hydrochloride), Amiodarone, Amlexanox, Amlodipine Besylate, Amuvatinib, Anti mullerian hormone, APS-2-79, ARN-509, AST-1306, atenolol, ATRA, Axitinib, AZD1080, AZD1208, AZD1480, AZD2858, AZD6738, AZD-8055, AZD8931, bafetinib, BAM7, Bardoxolone, baricitinib, BAY 87-2243, BDA-366, Benzbromarone, b-Estradiol, Bethanechol chloride, Bexarotene, BGJ398, BIIB021, BIO, BIRB 796, Bitopertin, BMP2, BMP2, BMP4, BMS 195614, bms189453, BMS-754807, BMS777607, bms833923, bms-986094 (inx-189), Bosutinib, Bryostatint BSI-201, BX795, Cabozantinib (XL184, BMS-907351), Calcitriol, CALP1, CALP3, Captopril, CCCP, CD 2665, Cediranib, cerdulatinib, Ceritinib, CGK733, CH223191, Chloroquine phosphate, CI-4AS-1, Clozapine, CMX001 (Brincidofovir), CO-1686 (Rociletinib), Cobalt chloride, Compound Name, Corticosterone, CP-673451, CP690550 citrate, Crenolanib, Crizotinib, Cryptotanshinone, CZ415, Dacomitinib (PF299804, PF299), Dalcetrapib, Danazol, Darapladib, Dasatinib, Decernotinib, decernotinib, decernotinib, Deferoxamine mesylate, Dexamethasone, Disopyramide, DLPC, dmPGE2, DMXAA, Dopamine, dorsomorphin, Dorsomorphin, DPH, Duvelisib, DY 268, EB1089, Echinomycin, EGF, Eletriptan, entospletinib, Enzastaurin, enzastaurin, Epinephrine, Erlotinib, Etomidate, Evacetrapib, everolimus, EVP-6124 (hydrochloride) (encenicline), EW-7197, Ezutromid, Fexofenadine, FGF, FICZ, Fluoxymesterone, Forskolin, FRAX597, Ganaxolone, GDC-0879, GDC-0941, GDC-0994, GDF10 (BMP3b), GDF2 (BMP9), Glasdegib (PF-04449913), Glimepiride, GLPG0634 analog, GLPG0634/Filgotinib, Glucose, Glycopyrrolate, G06983, GSK1904529A, GSK2126458, GSK2334470, GSK621, GW 7647, GW3965, GW4064, GZD824 Dimesylate, HGF/SF, Histamine, HS-173, HSP-990, Huperzine, Hydrocortisone, ibrutinib, Ibuprofen, idelalisib, IFN-y, IGF-1, imatinib, inhibin A, INK-128, INNO-206 (aldoxorubicin), Insulin, Ipatasertib, IPI-493, Irinotecan Hydrochloride Trihydrate, isoniazid, itacitinib, IWP-2, JANEX-1, JNJ-38877605, K02288, Kartogenin, KU-60019, Laropiprant (tredaptive), Latrepirdine, Latrepirdine (dihydrochloride), LDN193189, LDN193189, LDN-212854, Leucine, LJI308, LRH-1 antagonist, LY 2140023 (Pomaglumetad methionil-LY404039), LY 364947, LY2584702, LY2784544, LY294002, LY303511 HCl, LY404039 (pomaglumetad methionil (mGlu2/3)), LYS2784544, Masitinib, meB10, Merestinib, Mefformin, Methapyrilene, MHY1485, M1-773, Mifepristone, MK-0752, Momelotinib, MRT67307, N-Acetylpurinomycin, nandrolone decanoate, Nefazodone, Netarsudil, nilotinib, nilvadipine, Nitrofurantoin, Nodal, NOV-002 (oxidized L-Glutathione), NSC228155, NVP-AUY922, oclacitinib maleate, Oligomycin A, Omeprazole, 0S1-027, OSU-03012, Otenabant, Oxoglaucine, Pacritinib (SB1518), PAF C-16, Palifosfamide, Papaverine, PCI-32765, PDGF, Penicillamine(D-), Peramivir (trihydrate), Perifosine (KRX-0401), Perphenazine, PF-04691502, PF-04691502, PF-04929113 (SNX-5422), PHA-665752, Phenformin, Phorbo112,13-dibutyrate, Picropodophyllin, Pifithrin-a, Pifithrin-u, PKI-179, PND-1186, Pomalidomide, ponatinib, PP242, prednisone, Preladenant, PRI-724, Propylthiouracil, Purmorphamine, Quizartinib, R406, R788 (fostamatinib, disodium hexahydrate), Ranitidine, rapamycin, Regorafenib, Retaspimycin Hydrochloride, Rifampicin, Rimonabant, RITA (NSC 652287), Ritonavir, R04929097, Rolofylline (KW-3902), Rosiglitazone maleate, RU 28318, ruxolitinib/jakafi, SC75741, SC79, Selumetinib, Semagacestat, Semaxinib, SG1-1776, SH-4-54, Simvastatin, SIS3, SKL2001, SMI-4a, Smoothened Agonist, solcitinib/GSK2586184, Sotrastaurin, SP600125, STA-21, Sulpiride, T0070907, T0901317, TAK-593, TAK-659 HCl, Taladegib, Taltorvic/MK-8669, Deforolimus, Ridaforolimus, Tamibarotene, Tamsulosin hydrochloride, Tandutinib, TC-5214 (R-Mecamylamine hydrochloride), TC-5214 (S-(+)-MecaMylaMine Hydrochloride), TCS 359, Temsirolimus, TFP, TG-101348, TGF-b, TGX-221, TH-302 (Evofosfamide), Thalidomide, Tiagabine, Tipifarnib, Tivozanib, TNF-α, Tofacitinib citrate, Torcetrapib, torin1, TP-434 (Eravacycline), Transferrin, Trifluoperazine, upadacitinib, Valproate, Vanoxerine (dihydrochloride), Varenicline Tartrate, Vicriviroc (maleate), Voxtalisib, XL765, SAR245409, VX-661 (tezacaptor), WAY600, Wnt agonist 1, Wnt3a, WYE-125132, WYE-125132 (WYE-132), Xav939, XL228, XMU-MP-1, Zibotentan, or a-PHP.

### Downstream Targets

[0151] In certain embodiments, a stimulus is administered that targets a downstream product of a gene of a GSN. Alternatively, the stimulus disrupts a GSN that affects downstream expression of at least one downstream target. mRNA

[0152] Perturbation of single or multiple GSNs associated with a single insulated neighborhood or across multiple INs can affect the transcription of a single gene or a multiple set of genes by altering the boundaries of the IN due to loss of anchor sites comprising cohesins. Specifically, perturbation of a GSC may also affect the transcription of a single gene or a multiple set of genes. Perturbation stimuli may result in the modification of the RNA expression and/or the sequences in the primary transcript within the mRNA, i.e., the exons or the RNA sequences between the exons that are removed by splicing, i.e. the introns. Such changes may consequently after the members of the set of signaling molecules/signaling proteins within a GSC of the GSN of a gene, thereby defining a variant of the GSN.

### Proteins

[0153] Perturbation of single or multiple GSNs associated with a single insulated neighborhood or across multiple insulated neighborhoods can affect the translation of a single gene or a multiple set of genes that are part of the single or multiple GSNs, as well as those downstream. Specifically, perturbation of a GSC may affect translation. Perturbation may result in the inhibition of the translated protein. In certain embodiments, the binding profile of a GSC is perturbed to affect translation of a protein.

### Nearest Neighbor Gene

[0154] Perturbation stimuli may cause interactions with signaling molecules/signaling proteins to occur in order to after expression of the nearest primary neighborhood gene that may be located upstream or downstream of the primary neighborhood gene. Neighborhood genes may have any number of upstream or downstream genes along the chromosome. Within any IN, there may be one or more, e.g., one, two, three, four or more, upstream and/or downstream neighborhood genes relative to the primary neighborhood gene. A “primary neighborhood gene” is a gene which is most commonly found within a specific IN along a chromosome. An upstream neighborhood gene of a primary neighborhood gene may be located within the same IN as the primary neighborhood gene. A downstream neighborhood gene of a primary neighborhood gene may be associated the same IN or be regulated by the same GSC as the primary neighborhood gene.

### Canonical Cell Signaling Pathways

[0155] It is understood that there may be some overlap between the canonical pathways detailed in the art and the GSNs defined herein.

[0156] Whereas canonical pathways permit a certain degree of promiscuity of members across pathways (cross talk), GSNs of the invention are defined at the gene level and characterized based on any number of stimuli or perturbation to the cell, tissue, organ or organ system expressing that gene. Hence the nature of a GSN is both structurally (e.g., the gene) and situationally (e.g., the function, e.g., expression profile) defined. And while two different gene signaling networks may share members, they are still unique in that the nature of the perturbation can distinguish them. Hence, the value of GSNs in the elucidation of the function of biological systems in support of therapeutic research and development.

[0157] It should be understood that it is not intended that no connection ever be made between canonical pathways and GSNs; in fact, the opposite is the case. In order to bridge the two signaling paradigms for further scientific insights, it will be instructive to compare the canonical signaling pathway paradigm with the GSNs of the present invention.

[0158] Canonical pathways which may be altered according to the present invention include, but are not limited to the 2-arachidonoylglycerol biosynthesis pathway, 2-oxocarboxylic acid metabolism pathway, 5HT1 type receptor mediated signaling pathway, 5HT2 type receptor mediated signaling pathway, 5HT3 type receptor mediated signaling pathway, 5HT4 type receptor mediated signaling pathway, 5-hydroxytryptamine biosynthesis pathway, 5-hydroxytryptamine degradation pathway, abacavir transport and metabolism pathway, ABC transporters pathway, ABC-family proteins mediated transport pathway, ACE inhibitor pathway, acetate utilization pathway, acetylcholine synthesis pathway, activation of camp-dependent PKA pathway, activin beta signaling pathway, adenine and hypoxanthine salvage pathway, adherens junction pathway, adipocytokine signaling pathway, adipogenesis pathway, adrenaline and noradrenaline biosynthesis pathway, adrenergic signaling in cardiomyocytes pathway, advanced glycation end-products (age/rage) pathway, advanced glycosylation end product receptor signaling pathway, aflatoxin b1 metabolism pathway, age/rage pathway, AHR pathway, AKT signaling pathway, alanine and aspartate metabolism pathway, alanine biosynthesis pathway, aldosterone synthesis and secretion pathway, aldosterone-regulated sodium reabsorption pathway, allantoin degradation pathway, allograft rejection pathway, all-trans-retinoic acid signaling pathway, alp23b signaling pathway, alpha 6 beta 4 signaling pathway, alpha adrenergic receptor signaling pathway, alpha6 beta4 integrin pathway, alpha-linolenic acid metabolism pathway, Alzheimer disease-amyloid secretase pathway, Alzheimer disease-presenilin pathway, amino acid conjugation pathway, amino sugar and nucleotide sugar metabolism pathway, aminoacyl-tRNA biosynthesis pathway, aminobutyrate degradation pathway, AMP-activated protein kinase pathway, AMPK signaling pathway, anandamide biosynthesis pathway, anandamide degradation pathway, androgen receptor signaling pathway, androgen/estrogen/progesterone biosynthesis pathway, angiogenesis pathway, angiopoietin-Tie2 signaling pathway, angiotensin II-stimulated signaling through g proteins and beta-arrestin pathway, antigen processing and presentation by MHC's pathway, apoptosis modulation and signaling pathway, apoptosis modulation by HSP70 pathway, apoptosis signaling pathway, apoptosis through death receptors pathway, apoptotic execution phase pathway, arachidonate epoxygenase/epoxide hydrolase pathway, arachidonic acid metabolism pathway, arginine and proline metabolism pathway, arginine biosynthesis pathway, aripiprazole metabolic pathway, arylamine metabolism pathway, ascorbate and aldarate metabolism pathway, ascorbate degradation pathway, asparagine and aspartate biosynthesis pathway, asparagine N-linked glycosylation pathway, aspartate and glutamate metabolism pathway, assembly of RNA polymerase-II initiation complex pathway, ATM pathway, ATP synthesis pathway, axon guidance pathway, axon guidance mediated by netrin pathway, axon guidance mediated by semaphorins pathway, axon guidance mediated by slit/robo pathway, B cell activation pathway, B cell receptor (BCR) pathway, B cell receptor signaling pathway, bacterial invasion of epithelial cells pathway, basal transcription factors pathway, base excision repair pathway, B-cell development pathway, B-cell receptor pathway, B-cell receptor complex pathway, benzo pathway, betal adrenergic receptor signaling pathway, beta2 adrenergic receptor signaling pathway, beta3 adrenergic receptor signaling pathway, beta-alanine metabolism pathway, bile acid and bile salt metabolism pathway, bile secretion pathway, binding and uptake of ligands by scavenger receptors pathway, biogenic amine synthesis pathway, biosynthesis of amino acids pathway, biosynthesis of unsaturated fatty acids pathway, biotin biosynthesis pathway, blakely network pathway, blood clotting cascade pathway, blood coagulation pathway, bmp/activin signaling-Drosophila pathway, bone morphogenic protein pathway, brain-derived neurotrophic factor (BDNF) pathway, BRCA1 pathway, bupropion degradation pathway, butanoate metabolism pathway, butirosin and neomycin biosynthesis pathway, butyrate-induced histone acetylation pathway, cadherin signaling pathway, caffeine metabolism pathway, calcium regulation in the cardiac cell pathway, calcium signaling pathway, cAMP pathway, carbohydrate digestion and absorption pathway, carbon metabolism pathway, cardiac muscle contraction pathway, cardiac progenitor differentiation pathway, carnitine metabolism pathway, caspase cascade pathway, catalytic cycle of mammalian flavin-containing monooxygenases pathway, CCKR signaling map pathway, CCR5 in macrophages pathway, CD4 and CD8 T-cell lineage pathway, CD40 signaling pathway, CDK5 pathway, cell adhesion molecules (cams) pathway, cell cycle checkpoints pathway, cell cycle pathway, cell differentiation-meta pathway, cell junction organization pathway, cell surface interactions at the vascular wall pathway, CGMP-PKG signaling pathway, chemical carcinogenesis pathway, chemokine signaling pathway, cholesterol biosynthesis pathway, cholinergic synapse pathway, chorismate biosynthesis pathway, chromatin remodeling pathway, circadian clock system pathway, circadian entrainment pathway, citrate cycle (TCA cycle) pathway, c-met pathway, cobalamin biosynthesis pathway, codeine and morphine metabolism pathway, coenzyme A biosynthesis pathway, coenzyme A linked carnitine metabolism pathway, colchicine metabolic pathway, collecting duct acid secretion pathway, complement and coagulation cascades pathway, cori cycle pathway, corticotropin-releasing hormone (CRH) pathway, costimulation by the CD28 family pathway, CREB pathway, CTL mediated apoptosis pathway, CTLA4 signaling pathway, cyanoamino acid metabolism pathway, cyclins and cell cycle regulation pathway, cysteine and methionine metabolism pathway, cysteine biosynthesis pathway, cytokine network pathway, cytokine-cytokine receptor interaction pathway, cytokines and inflammatory response pathway, cytoplasmic ribosomal proteins pathway, cytoskeletal regulation by rho GTPase pathway, cytosolic DNA-sensing pathway, de novo purine biosynthesis pathway, de novo pyrimidine deoxyribonucleotide biosynthesis pathway, de novo pyrimidine ribonucleotides biosynthesis pathway, depolarization of the presynaptic terminal triggers the opening of calcium channels pathway, diclofenac metabolic pathway, differentiation pathway, digestion resistant carbohydrate metabolism pathway, dilated cardiomyopathy pathway, dissolution of fibrin clot pathway, diurnally regulated genes with circadian orthologs pathway, div no colors pathway, div pathway, DNA damage bypass pathway, DNA damage response pathway, DNA damage reversal pathway, DNA methylation and transcriptional repression pathway, DNA repair mechanisms pathway, DNA replication pathway, dopamine metabolism pathway, dopamine receptor mediated signaling pathway, dopaminergic synapse pathway, dorso-ventral axis formation pathway, DPP signaling pathway, DPP-SCW signaling pathway, drug metabolism pathway, drug metabolism-cytochrome p450 pathway, dscam interactions pathway, E2F/MIRHG1 feedback-loop-delete pathway, EBV LMP1 signaling pathway, ECM-receptor interaction pathway, effects of nitric oxide pathway, effects of pip2 hydrolysis pathway, EGF pathway, EGF receptor signaling pathway, eicosanoid synthesis pathway, electron transport chain pathway, endochondral ossification pathway, endocrine and other factor-regulated calcium reabsorption pathway, endocytosis pathway, endoderm differentiation pathway, endogenous cannabinoid signaling pathway, endothelin pathway, endothelin signaling pathway, energy metabolism pathway, enkephalin release pathway, enos signaling pathway, ephrin-EPHR signaling pathway, epidermal growth factor receptor (EGFR) pathway, epithelial cell signaling in Helicobacter pylori infection pathway, epithelial tight junctions pathway, EPO receptor signaling pathway, ERBB signaling pathway, ERK signaling pathway, erythropoietin pathway, estrogen signaling pathway, ether lipid metabolism pathway, eukaryotic transcription initiation pathway, eukaryotic translation elongation pathway, eukaryotic translation initiation pathway, eukaryotic translation termination pathway, FAK1 signaling pathway, Fas signaling pathway, fat digestion and absorption pathway, fatty acid pathway, fatty acid beta oxidation pathway, fatty acid biosynthesis pathway, fatty acid degradation pathway, fatty acid elongation pathway, fatty acid metabolism pathway, fatty acid omega oxidation pathway, FGF pathway, FGF signaling pathway, fibroblast growth factor-1 (FGF1) pathway, flavin biosynthesis pathway, FLT3 signaling pathway, fluoropyrimidine activity pathway, focal adhesion pathway, folate biosynthesis pathway, folate metabolism pathway, follicle stimulating hormone pathway, formation of fibrin clot pathway, formyltetrahydroformate biosynthesis pathway, Foxo signaling pathway, fructose galactose metabolism pathway, G protein signaling pathway, G1 to S cell cycle control pathway, G13 signaling pathway, GABA synthesis pathway, GABA-B receptor II signaling pathway, galactose metabolism pathway, gamma-aminobutyric acid synthesis pathway, ganglio sphingolipid metabolism pathway, gap junction trafficking and regulation pathway, gastric acid secretion pathway, gastrin pathway, GBB signaling pathway, generic transcription pathway, ghrelin pathway, glial cell differentiation pathway, globo sphingolipid metabolism pathway, glucagon signaling pathway, glucocorticoid & mineralcorticoid metabolism pathway, glucocorticoid receptor signaling pathway, glucose homeostasis pathway, glucuronidation pathway, glutamatergic synapse pathway, glutamine glutamate conversion pathway, glutathione metabolism pathway, glycan degradation pathway, glycerolipid metabolism pathway, glycerophospholipid biosynthetic pathway, glycerophospholipid metabolism pathway, glycine metabolism pathway, glycogen metabolism pathway, glycolysis/gluconeogenesis pathway, glycosaminoglycan biosynthesis-heparan sulfate/heparin pathway, glycosaminoglycan biosynthesis-keratan sulfate pathway, glycosaminoglycan degradation pathway, glycosaminoglycan metabolism pathway, glycosphingolipid biosynthesis—ganglio series pathway, glycosphingolipid biosynthesis-globo series pathway, glycosphingolipid biosynthesis—lacto and neolacto series pathway, glyoxylate and dicarboxylate metabolism pathway, gonadotropin-releasing hormone receptor pathway, GP1B-IX-V activation signaling pathway, GPCR pathway, GPCR downstream signaling pathway, GPCR ligand binding pathway, GPVI-mediated activation cascade pathway, granulocyte adhesion and diapedesis pathway, granzyme pathway, growth hormone signaling pathway, GSK 3 signaling pathway, hedgehog signaling pathway, hematopoiesis from pluripotent stem cells pathway, hematopoietic cell lineage pathway, hematopoietic stem cell differentiation pathway, heme biosynthesis pathway, hepatitis B pathway, hepatitis C pathway, heterotrimeric G-protein signaling-Gi alpha and Gs alpha mediated pathway, heterotrimeric g-protein signaling-rod outer segment phototransduction pathway, hexose transport pathway, HGF pathway, HIF-1 signaling pathway, hippo signaling pathway, histamine h1 receptor mediated signaling pathway, histamine h2 receptor mediated signaling pathway, histamine synthesis pathway, histidine biosynthesis pathway, histone modifications pathway, homologous recombination pathway, HTLV-I infection pathway, human complement system pathway, hypoxia response via hif activation pathway, ID signaling pathway, IGF1R signaling pathway, IL1 and megakaryocytes in obesity pathway, IL-1 signaling pathway, IL-10 pathway, IL17 signaling pathway, IL-2 signaling pathway, IL-22 pathway, IL-3 signaling pathway, IL-4 signaling pathway, IL-5 signaling pathway, IL-6 pathway, IL-7 signaling pathway, IL-9 signaling pathway, ILK signaling pathway, inflammation mediated by chemokine and cytokine signaling pathway, inflammatory mediator regulation of Trp channels pathway, inflammatory response pathway, influenza a virus infection pathway, inos signaling pathway, inositol phosphate metabolism pathway, insulin receptor pathway, insulin resistance pathway, insulin secretion pathway, insulin/IGF-protein kinase b signaling cascade pathway, insulin-like growth factor-2 mRNA binding proteins pathway, integrin alphaIIb beta3 signaling pathway, integrin cell signaling pathway, integrin cell surface interactions pathway, integrin-mediated cell adhesion pathway, interferon pathway, interferon alpha/beta signaling pathway, interferon type I signaling pathway, interferon-gamma signaling pathway, interleukin signaling pathway, interleukin-1 (IL-1) pathway, interleukin-1 processing pathway, interleukin-11 signaling pathway, interleukin-2 (IL-2) pathway, interleukin-3 pathway, interleukin-4 (IL-4) pathway, interleukin-5 (IL-5) pathway, interleukin-6 (IL-6) pathway, interleukin-7 (IL-7) pathway, interleukin-9 (i1-9) pathway, intracellular calcium signaling pathway, ionotropic glutamate receptor pathway, IP3 pathway, isoleucine biosynthesis pathway, JAK/STAT pathway, JNK pathway, kinesins pathway, KIT receptor pathway, LDL oxidation in atherogenesis pathway, leptin (lep) pathway, leptin signaling pathway, leucine biosynthesis pathway, leukocyte transendothelial migration pathway, linoleic acid metabolism pathway, lipid digestion pathway, lipoate_biosynthesis pathway, longevity regulating—mammal pathway, longevity regulating—multiple species pathway, long-term potentiation pathway, lysine biosynthesis pathway, lysine degradation pathway, lysosome pathway, mannose metabolism pathway, MAPK cascade pathway, MAPK targets/nuclear events mediated by MAP kinases pathway, matrix metalloproteinases pathway, melatonin metabolism and effects pathway, meta biotransformation pathway, metabolism of carbohydrates pathway, metabolism of nitric oxide pathway, metabolism of nucleotides pathway, metabolism of porphyrins pathway, metabolism of water-soluble vitamins and cofactors pathway, metabolism of xenobiotics by cytochrome p450 pathway, metabotropic glutamate receptor group I pathway, metabotropic glutamate receptor group II pathway, metabotropic glutamate receptor group III pathway, methionine biosynthesis pathway, methylation pathway, methylcitrate cycle pathway, methylmalonyl pathway, mineral absorption pathway, miRNA biogenesis pathway, mismatch repair pathway, mitochondrial apoptosis pathway, mitochondrial gene expression pathway, mitochondrial Ic-fatty acid beta-oxidation pathway, mitotic G1-G1/S phases pathway, mitotic G2-G2/M phases pathway, monoamine GPCRs pathway, monoamine transport pathway, mRNA capping pathway, mRNA editing pathway, mRNA processing pathway, mRNA splicing pathway, mRNA surveillance pathway, mTOR signaling pathway, muscarinic acetylcholine receptor 1 and 3 signaling pathway, muscarinic acetylcholine receptor 2 and 4 signaling pathway, myogenesis pathway, myometrial relaxation and contraction pathway, N-acetylglucosamine metabolism pathway, NAD biosynthesis H pathway, nanomaterial induced apoptosis pathway, nanoparticle triggered autophagic cell death pathway, nanoparticle triggered regulated necrosis pathway, natural killer cell mediated cytotoxicity pathway, ncam signaling for neurite out-growth pathway, nephrin interactions pathway, netrin-1 signaling pathway, neural crest differentiation pathway, neuroactive ligand-receptor interaction pathway, neurotransmitter clearance in the synaptic deft pathway, neurotransmitter release cycle pathway, neurotransmitter uptake and metabolism in glial cells pathway, neurotrophin signaling pathway, NFAT and cardiac hypertrophy pathway, NF-kappa b signaling pathway, NF-kappa b signaling pathway, NGF pathway, NGF signaling via TRKA from the plasma membrane pathway, N-glycan biosynthesis pathway, nicotinate and nicotinamide metabolism pathway, nicotine activity on chromaffin cells pathway, nicotine activity on dopaminergic neurons pathway, nicotine degradation pathway, nicotine metabolism pathway, nicotine pharmacodynamics pathway, nicotinic acetylcholine receptor signaling pathway, nifedipine activity pathway, nitrogen metabolism pathway, NLR proteins pathway, nod-like receptor signaling pathway, non-homologous end joining pathway, notch signaling pathway, Nrf2 pathway, nuclear receptors pathway, nucleosome assembly pathway, nucleotide excision repair pathway, nucleotide GPCRs pathway, nucleotide metabolism pathway, nucleotide-binding oligomerization domain pathway, o-antigen biosynthesis pathway, o-glycan biosynthesis pathway, olfactory transduction pathway, oncostatin m signaling pathway, one carbon metabolism pathway, opioid prodporphin pathway, opioid proenkephalin pathway, opioid proopiomelanocortin pathway, ornithine degradation pathway, osteoblast signaling pathway, osteoclast signaling pathway, osteopontin signaling pathway, ovarian steroidogenesis pathway, oxidation by cytochrome p450 pathway, oxidative phosphorylation pathway, oxidative stress pathway, oxytocin receptor mediated signaling pathway, oxytocin signaling pathway, p38 MAPK signaling pathway, p53 feedback loops 1 pathway, p53 feedback loops 2 pathway, p53 mediated apoptosis pathway, p53 signaling pathway, pak pathway, pancreatic secretion pathway, pantothenate biosynthesis pathway, parkin-ubiquitin proteasomal system pathway, passive transport by aquaporins pathway, PDGF signaling pathway, pentose and glucuronate interconversions pathway, pentose phosphate pathway, peptide GPCRs pathway, peptidoglycan biosynthesis pathway, peroxisomal beta-oxidation of tetracosanoyl-coA pathway, peroxisomal lipid metabolism pathway, pertussis pathway, phagosome pathway, phase 1-functionalization of compounds pathway, phase I biotransformations pathway, phase 11 conjugation pathway, phenylacetate degradation pathway, phenylalanine biosynthesis pathway, phenylalanine metabolism pathway, phenylethylamine degradation pathway, phenylpropionate degradation pathway, phosphatidylinositol signaling system pathway, phospholipase D signaling pathway, phototransduction pathway, PI3 kinase pathway, PI3K signaling in B-lymphocytes pathway, PI3K-AKT signaling pathway, PIP3 activates AKT signaling pathway, plasminogen activating cascade pathway, platelet activation pathway, platelet adhesion to exposed collagen pathway, platelet aggregation pathway, platelet homeostasis pathway, polyol pathway, porphyrin and chlorophyll metabolism pathway, PPAR signaling pathway, primary bile acid biosynthesis pathway, primary focal segmental glomerulosclerosis FSGs pathway, processing of capped intron-containing pre-mRNA pathway, processing of capped intronless pre-mRNA pathway, progesterone-mediated oocyte maturation pathway, prolactin signaling pathway, proline biosynthesis pathway, propanoate metabolism pathway, prostaglandin synthesis and regulation pathway, proteasome pathway, proteasome degradation pathway, protein digestion and absorption pathway, protein export pathway, protein folding pathway, proximal tubule bicarbonate reclamation pathway, PRPP biosynthesis pathway, PTEN pathway, purine metabolism pathway, pyridoxal phosphate salvage pathway, pyridoxal-5-phosphate biosynthesis pathway, pyrimidine metabolism pathway, pyruvate metabolism pathway, racl pathway, rank signaling in osteoclast pathway, rank)/rank pathway, rapl signaling pathway, ras signaling pathway, Ras-RAF-MEK-ERK pathway, receptor activator of nuclear factor kappa-b ligand (RANKL) pathway, regulation of actin cytoskeleton pathway, regulation of apoptosis pathway, regulation of autophagy pathway, regulation of DNA replication pathway, regulation of lipolysis in adipocytes pathway, regulation of microtubule cytoskeleton pathway, regulation of toll-like receptor signaling pathway, remodeling of adherens junctions pathway, renin secretion pathway, renin-angiotensin system pathway, respiratory electron transport pathway, retinol metabolism pathway, retrograde endocannabinoid signaling pathway, Rho family GTPase pathway, Rhoa pathway, ribosome biogenesis in eukaryotes pathway, RIG-I-like receptor signaling pathway, RNA degradation pathway, RNA polymerase 1 pathway, RNA polymerase II transcription pathway, RNA transport pathway, RNAi pathway, s-adenosylmethionine biosynthesis pathway, salivary secretion pathway, salvage pyrimidine deoxyribonucleotides pathway, salvage pyrimidine ribonucleotides pathway, SCW signaling pathway, selenium metabolism and selenoproteins pathway, selenium micronutrient network pathway, selenocompound metabolism pathway, semaphorin interactions pathway, serine and threonine metabolism pathway, serine glycine biosynthesis pathway, serotonergic synapse pathway, serotonin htr1 group and fos pathway, serotonin receptor 2 and ELK-SRF/gata4 signaling pathway, serotonin receptor 2 and STAT3 signaling pathway, serotonin receptor 4/6/7 and NR3C signaling pathway, serotonin transporter activity pathway, signal amplification pathway, signal regulatory protein pathway, signal transduction of S1P receptor pathway, signaling by EGFR pathway, signaling by insulin receptor pathway, signaling by PDGF pathway, signaling by rho GTPases pathway, signaling by robo receptor pathway, signaling by VEGF pathway, signaling in gap junction pathway, signaling of hepatocyte growth factor receptor pathway, signaling regulating pluripotency of stem cells pathway, signaling in glioblastoma pathway, signaling by NGF pathway, SMAD signaling network pathway, small ligand GPCRs pathway, SNARE interactions in vesicular transport pathway, sphingolipid (SM) signaling pathway, sphingolipid metabolism pathway, spliceosome pathway, starch and sucrose metabolism pathway, stat signaling pathway, STAT3 pathway, statin pathway, steroid biosynthesis pathway, steroid hormone biosynthesis pathway, sterol regulatory element-binding proteins pathway, striated muscle contraction pathway, succinate to proprionate conversion pathway, sulfate assimilation pathway, sulfation biotransformation reaction pathway, sulfur metabolism pathway, sulfur relay system pathway, sumo pathway, synaptic vesicle pathway, synthesis and degradation of ketone bodies pathway, synthesis of DNA pathway, T cell receptor (TCR) pathway, tamoxifen metabolism pathway, tarbase pathway, target of rapamycin pathway, taste transduction pathway, taurine and hypotaurine metabolism pathway, TCA and urea cycles pathway, T-cell antigen receptor pathway, T-cell receptor and co-stimulatory signaling pathway, telomere maintenance pathway, terpenoid backbone biosynthesis pathway, tetrahydrofolate biosynthesis pathway, TFS regulate miRNAs related to cardiac hypertrophy pathway, TGF-beta pathway, TGF-beta receptor signaling pathway, THC differentiation pathway, thiamin biosynthesis pathway, thiamin metabolism pathway, threonine biosynthesis pathway, thymic stromal lymphopoietin pathway, thymic stromal lymphopoietin (tslp) pathway, thyroid-stimulating hormone (tsh) pathway, thyrotropin-releasing hormone receptor signaling pathway, tie2/tek signaling pathway, tight junction pathway, TNF alpha signaling pathway, TNF related weak inducer of apoptosis pathway, TNF signaling pathway, TNF superfamily pathway, TNF-related weak inducer of apoptosis (tweak) pathway, toll receptor signaling pathway, toll-like receptors pathway, TP53 network pathway, Traf pathway, trail pathway, transcription regulation by bzip transcription factor pathway, transcriptional activation by Nrf2 pathway, transendothelial migration of leukocytes pathway, transforming growth factor beta (TGF-beta) receptor pathway, translation factors pathway, transmission across electrical synapses pathway, transport of glucose and other sugars pathway, transport of glycerol from adipocytes to the liver by aquaporins pathway, transport of vitamins pathway, trans-sulfuration pathway, trans-sulfuration and one carbon metabolism pathway, triacylglyceride synthesis pathway, triacylglycerol metabolism pathway, tRNA aminoacylation pathway, tryptophan biosynthesis pathway, tryptophan metabolism pathway, tumor necrosis factor (TNF) alpha pathway, tumoricidal effects of hepatic NK cells pathway, tweak pathway, type H diabetes mellitus pathway, type H interferon signaling pathway, type III interferon signaling pathway, tyrosine and tryptophan biosynthesis pathway, tyrosine biosynthesis pathway, tyrosine metabolism pathway, ubiquinone and other terpenoid-quinone biosynthesis pathway, ubiquitin mediated proteolysis pathway, ubiquitin proteasome pathway, unfolded protein response pathway, urea cycle and metabolism of amino groups pathway, valine biosynthesis pathway, vascular smooth muscle contraction pathway, vasopressin synthesis pathway, vasopressin-regulated water reabsorption pathway, VEGF signaling pathway, vitamin a and carotenoid metabolism pathway, vitamin b12 metabolism pathway, vitamin b6 biosynthesis pathway, vitamin b6 metabolism pathway, vitamin d metabolism pathway, vitamin digestion and absorption pathway, Wnt signaling pathway, xanthine and guanine salvage pathway, and/or the zinc homeostasis pathway

### Genome Editing Approaches

[0159] In certain embodiments, altering the chromosomal regions defining INs and their GSCs and genes may be used to treat disease by modulating the production of gene products, such as activating a GSC to increase production of a gene product, eliminating a gene product or targeting any one of the members of the molecules of the GSN or networks associated with the IN. In some embodiments, expression of a wild-type allele may be boosted in a patient suffering from a haploinsufficiency. Similarly, modulation could benefit other types of genetically-based insufficiencies, including those caused by other hetero- and homozygous errors in ORFs and regulatory genetic sequences that control ORF expression.

[0160] Methods of altering the gene expression attendant to an insulated neighborhood include altering the boundaries of the insulated neighborhood or a gene loop and/or the binding site(s) of a genomic signaling center, for example, using CRISPR to make alterations or repair/replace if mutated). In some embodiments, the genome editing tool targets at least one occupancy-dependent signaling center including a nucleic acid sequence comprising SEQ ID NOs: 32,627-71,281. These alterations may results in a variety a results including: activation of cell death pathways prematurely/inappropriately (key to many immune disorders), production of too little/much gene product (also known as the rheostat hypothesis), production of too little/much extracellular secretion of enzymes, prevention lineage differentiation, switch of lineage pathways, promotion of stemness, initiation or interference with auto regulatory feedback loops, initiation of errors in cell metabolism, inappropriate imprinting/gene silencing, and formation flawed chromatin states. Additionally, genome editing approaches well-known in the art to create new boundaries for INs or binding sites of GSCs by altering the cohesin necklace or moving genes and enhancers.

[0161] In certain embodiments, genome editing approaches describe herein may include methods of using site-specific nucleases to introduce single-strand or double-strand DNA breaks at particular locations within the genome. Such breaks can be and regularly are repaired by endogenous cellular processes, such as homology-directed repair (HDR) and non-homologous end joining (NHEJ). HDR is essentially an error-free mechanism that repairs double-strand DNA breaks in the presence of a homologous DNA sequence. The most common form of HDR is homologous recombination. It utilizes a homologous sequence as a template for inserting or replacing a specific DNA sequence at the break point. The template for the homologous DNA sequence can be an endogenous sequence (e.g., a sister chromatid), or an exogenous or supplied sequence (e.g., plasmid or an oligonucleotide). As such, HDR may be utilized to introduce precise alterations such as replacement or insertion at desired regions. In contrast, NHEJ is an error-prone repair mechanism that directly joins the DNA ends resulting from a double-strand break with the possibility of losing, adding or mutating a few nucleotides at the cleavage site. The resulting small deletions or insertions (termed “Indels”) or mutations may disrupt or enhance gene expression. Additionally, if there are two breaks on the same DNA, NHEJ can lead to the deletion or inversion of the intervening segment. Therefore, NHEJ may be utilized to introduce insertions, deletions or mutations at the cleavage site.

### CRISPR

[0162] In certain embodiments, a CRISPR/Cas system may be used to delete CTCF anchor sites to modulate gene expression within the IN associated with that anchor site. See, Hnisz et al., Cell 167, Nov. 17, 2016, which is hereby incorporated by reference in its entirety. Disruption of the boundaries of IN prevents the interactions necessary for proper function of the associated GSCs. Changes in the expression genes that are immediately adjacent to the deleted neighborhood boundary have also been observed due to such disruptions.

[0163] In certain embodiments, a CRISPR/Cas system may be used to modify existing CTCF anchor sites. For example, existing CTCF anchor sites may be mutated or inverted by inducing NHEJ with a CRISPR/Cas nuclease and one or more guide RNAs, or masked by targeted binding with a catalytically inactive CRISPR/Cas enzyme and one or more guide RNAs. Alteration of existing CTCF anchor sites may disrupt the formation of existing INs and after the expression of genes located within these INs.

[0164] In certain embodiments, a CRISPR/Cas system may be used to introduce new CTCF anchor sites. CTCF anchor sites may be introduced by inducing HDR at a selected site with a CRISPR/Cas nuclease, one or more guide RNAs and a donor template containing the sequence of a CTCF anchor site. Introduction of new CTCF anchor sites may create new INs and/or after existing INs, which may affect expression of genes that are located adjacent to these INs.

[0165] In certain embodiments, a CRISPR/Cas system may be used to after the binding sites of a GSC. For example, if the GSC contains a mutation that affects the assembly at the region with associated transcription factors, the mutated site may be repaired by inducing a double strand DNA break at or near the mutation using a CRISPR/Cas nuclease and one or more guide RNAs in the presence of a supplied corrected donor template.

[0166] In certain embodiments, a CRISPR/Cas system may be used to modulate expression of neighborhood genes by binding to a region within an IN (e.g., enhancer) and block transcription. Such binding may prevent recruitment of transcription factors to GSCs and initiation of transcription. The CRISPR/Cas system may be a catalytically inactive CRISPR/Cas system that do not cleave DNA.

[0167] In certain embodiments, a CRISPR/Cas system may be used to knockdown expression of neighborhood genes via introduction of short deletions in coding regions of these genes. When repaired, such deletions would result in frame shifts and/or introduce premature stop codons in mRNA produced by the genes followed by the mRNA degradation via nonsense-mediated decay. In other embodiments, a CRISPR/Cas system may also be used to after cohesion necklace or moving genes and enhancers.

[0168] In certain embodiments, a CRISPR/Cas system may be used to perturb an ODSC. For example, the CRISPR/Cas system may target at least one of SEQ ID NOs: 32,627-71,281.

### CRISPR/Cas Enzymes

[0169] CRISPR/Cas systems are bacterial adaptive immune systems that utilize RNA-guided endonucleases to target specific sequences and degrade target nucleic acids. They have been adapted for use in various applications in the field of genome editing and/or transcription modulation. Any of the enzymes or orthologs known in the art or disclosed herein may be utilized in the methods herein for genome editing.

[0170] In certain embodiments, the CRISPR/Cas system may be a Type II CRISPR/Cas9 system. Cas9 is an endonuclease that functions together with a trans-activating CRISPR RNA (tracrRNA) and a CRISPR RNA (crRNA) to cleave double stranded DNAs. The two RNAs can be engineered to form a single-molecule guide RNA by connecting the 3′ end of the crRNA to the 5′ end of tracrRNA with a linker loop. Jinek et al., Science, 337(6096):816-821 (2012) showed that the CRISPR/Cas9 system is useful for RNA-programmable genome editing, and international patent application WO 2013/176772 provides numerous examples and applications of the CRISPR/Cas endonuclease system for site-specific gene editing, which are incorporated herein by reference in their entirety. Exemplary CRISPR/Cas9 systems include those derived from Streptococcus pyogenes, Streptococcus thermophilus, Neisseria meningitidis, Treponema denticola, Streptococcus aureas, and Francisella tularensis.

[0171] In certain embodiments, the CRISPR/Cas system may be a Type V CRISPR/Cpf1 system. Cpf1 is a single RNA-guided endonuclease that, in contrast to Type II systems, lacks tracrRNA. Cpf1 produces staggered DNA double-stranded break with a 4 or 5 nucleotide 5′ overhang. Zetsche et al. Cell. 2015 Oct. 22; 163(3):759-71 provides examples of Cpf1 endonuclease that can be used in genome editing applications, which is incorporated herein by reference in its entirety. Exemplary CRISPR/Cpf1 systems include those derived from Francisella tularensis, Acidaminococcus sp., and Lachnospiraceae bacterium.

[0172] In certain embodiments, nickase variants of the CRISPR/Cas endonucleases that have one or the other nuclease domain inactivated may be used to increase the specificity of CRISPR-mediated genome editing. Nickases have been shown to promote HDR versus NHEJ. HDR can be directed from individual Cas nickases or using pairs of nickases that flank the target area.

[0173] In certain embodiments, catalytically inactive CRISPR/Cas systems may be used to bind to target regions (e.g., CTCF anchor sites or enhancers) and interfere with their function. Cas nucleases such as Cas9 and Cpf1 encompass two nuclease domains. Mutating critical residues at the catalytic sites creates variants that only bind to target sites but do not result in cleavage. Binding to chromosomal regions (e.g., CTCF anchor sites or enhancers) may disrupt proper formation of INs or GSCs and therefore lead to altered expression of genes located adjacent to the target region. For example, an ODSC is targeted by a catalytically inactive CRISPR/Cas system and thereby disrupted.

[0174] In certain embodiments, a CRISPR/Cas system may include additional functional domain(s) fused to the CRISPR/Cas endonuclease or enzyme. The functional domains may be involved in processes including but not limited to transcription activation, transcription repression, DNA methylation, histone modification, and/or chromatin remodeling. Such functional domains include but are not limited to a transcriptional activation domain (e.g., VP64 or KRAB, SID or SID4×), a transcriptional repressor, a recombinase, a transposase, a histone remodeler, a DNA methyltransferase, a cryptochrome, a light inducible/controllable domain or a chemically inducible/controllable domain.

[0175] In certain embodiments, a CRISPR/Cas endonuclease or enzyme may be administered to a cell or a patient as one or a combination of the following: one or more polypeptides, one or more mRNAs encoding the polypeptide, or one or more DNAs encoding the polypeptide.

### Guide Nucleic Acid

[0176] In certain embodiments, guide nucleic acids may be used to direct the activities of an associated CRISPR/Cas enzymes to a specific target sequence within a target nucleic acid. Guide nucleic acids provide target specificity to the guide nucleic acid and CRISPR/Cas complexes by virtue of their association with the CRISPR/Cas enzymes, and the guide nucleic acids thus can direct the activity of the CRISPR/Cas enzymes.

[0177] In one aspect, guide nucleic acids may be RNA molecules. In one aspect, guide RNAs may be single-molecule guide RNAs. In one aspect, guide RNAs may be chemically modified.

[0178] In certain embodiments, more than one guide RNAs may be provided to mediate multiple CRISPR/Cas-mediated activities at different sites within the genome.

[0179] In certain embodiments, guide RNAs may be administered to a cell or a patient as one or more RNA molecules or one or more DNAs encoding the RNA sequences. In certain embodiments, a guide RNA used herein targets at least a portion of a GSC, for example, an ODSC comprising a nucleic acid sequence of one of SEQ ID NOs: 32,627-71,281.

### Ribonucleoprotein Complexes (RNPs)

[0180] In one embodiment, the CRISPR/Cas enzyme and guide nucleic acid may each be administered separately to a cell or a patient. In another embodiment, the CRISPR/Cas enzyme may be pre-complexed with one or more guide nucleic acids. The pre-complexed material may then be administered to a cell or a patient. Such pre-complexed material is known as a ribonucleoprotein particle (RNP).

### Zinc Finger Nucleases

[0181] In certain embodiments, genome editing approaches of the present invention involve the use of Zinc finger nucleases (ZFNs). ZFNs are modular proteins comprised of an engineered zinc finger DNA binding domain linked to a DNA-cleavage domain. A typical DNA-cleavage domain is the catalytic domain of the type II endonuclease FokI. Because FokI functions only as a dimer, a pair of ZFNs are engineered to bind to cognate target “haft-site” sequences on opposite DNA strands and with precise spacing between them to enable the catalytically active FokI domains to dimerize. Upon dimerization of the FokI domain, which itself has no sequence specificity per se, a DNA double-strand break is generated between the ZFN haft-sites as the initiating step in genome editing. Transcription Activator-Like Effector Nucleases (TALENs)

[0182] In certain embodiments, genome editing approaches of the present invention involve the use of Transcription Activator-Like Effector Nucleases (TALENs). TALENs represent another format of modular nucleases which, similarly to ZFNs, are generated by fusing an engineered DNA binding domain to a nuclease domain, and operate in tandem to achieve targeted DNA cleavage. While the DNA binding domain in ZFN consists of zinc finger motifs, the TALEN DNA binding domain is derived from transcription activator-like effector (TALE) proteins, which were originally described in the plant bacterial pathogen Xanthomonas sp. TALEs are comprised of tandem arrays of 33-35 amino acid repeats, with each repeat recognizing a single basepair in the target DNA sequence that is typically up to 20 bp in length, giving a total target sequence length of up to 40 bp. Nucleotide specificity of each repeat is determined by the repeat variable diresidue (RVD), which includes just two amino acids at positions 12 and 13. The bases guanine, adenine, cytosine and thymine are predominantly recognized by the four RVDs: Asn-Asn, Asn-Ile, His-Asp and Asn-Gly, respectively. This constitutes a much simpler recognition code than for zinc fingers, and thus represents an advantage over the latter for nuclease design. Nevertheless, as with ZFNs, the protein-DNA interactions of TALENs are not absolute in their specificity, and TALENs have also benefitted from the use of obligate heterodimer variants of the FokI domain to reduce off-target activity.

### Other Site-Specific Nucleases

[0183] In certain embodiments, genome editing approaches of the present invention involve the use of homing endonucleases (HEs). HEs are a class of sequence-specific endonucleases that have long recognition sequences and cleave DNA with high specificity. Homing endonuclease recognition sequences are long enough (14-44 base pairs) to occur randomly only with a very low probability. Currently there are at least six known structural families of HEs, including GIY-YIG, His-Cis box, H—N—H, PD-(D/E)xK, and Vsr-like. These HEs are derived from a broad range of hosts, including eukarya, protists, bacteria, archaea, cyanobacteria and phage. HEs can be used to create a DSB at a target locus as the initial step in genome editing similarly to ZFNs and TALENs. Additionally, some natural and engineered HEs cut only a single strand of DNA, thereby functioning as site-specific nickases.

[0184] In further embodiments, genome editing approaches of the present invention involve the use of a variant or a hybrid of the site-specific nucleases described herein, such as MegaTAL/Tev-mTALEN/MegaTev, dCas9-FokI, dCpf1-Fok1 or other nucleases as described in US patent publication 20180021413A1, which is hereby incorporated by reference in its entirety.

### Hybridizing Oligonucleotides

[0185] In some embodiments, oligonucleotides, including those which function via a hybridization mechanism, whether single of double stranded such as antisense molecules, RNAi constructs (including siRNA, saRNA, microRNA, etc.), aptamers and ribozymes may be used to after or as perturbation stimuli of the targeted systems of the invention.

[0186] As such oligonucleotides may also serve as therapeutics, their therapeutic liabilities and treatment outcomes may be ameliorated or predicted, respectively by interrogating the gene signaling networks of the invention. In some embodiments, these stimuli bind a genomic signaling center. In certain embodiments, the oligonucleotide hybridizes to at least a portion of an occupancy-dependent signaling center comprising a nucleic acid sequence of SEQ ID NOs: 32,627-71,281.

### Gene Expression Modulation

[0187] In certain embodiments, perturbation of the systems using at least one stimuli described above results in modulation of gene expression. For example, methods of altering expression of at least one gene selected from any of those in Tables 1-9 with at least one compound selected from those described herein or any others are described herein. In certain embodiments, the gene may be one expressed in liver cells. Alternatively, the gene may be expressed in erythroid cells.

### Alteration of Neighborhood Structures

[0188] Human cell types share the same IN boundaries, although the location and composition of super enhancers is cell type dependent, as described in Hnisz et al., Cell 167, Nov. 17, 2016, which is hereby incorporated by reference in its entirety. Since a majority of RNA Polymerase II-associated interactions occur within an IN, changing the boundaries of an IN will result in inappropriate enhancer-gene interactions and genomic signaling center function, thereby leading to misregulation of local genes. In certain embodiments, at least one perturbation stimuli described herein is applied to a genomic system to after the boundaries of an IN and disrupt GSCs. In some embodiments, disruption of GSCs results in a change in the binding profile. In certain embodiments, alteration of IN structure results in disruption of an ODSC.

### Mutation/Deletion of CTCF Sites

[0189] One element that determines the boundary of an IN is the CTCF-CTCF loop anchors of INs, which have been observed to play important roles in gene regulation, which is described in Hnisz et al., Cell 167, Nov. 17, 2016 and Hnisz et al., Science Reports, 351(6380):1454-1458 (2016), which are hereby incorporated by reference in their entireties. The importance of these sites is supported by the fact that genetic variants rarely occur in CTCF-CTCF anchor regions. Mutations of the anchor sites likely results in disruption of the IN and the associated GSCs. In certain embodiments, at least one genome editing approach described herein is used to mutate or delete CTCF anchor sites to modulate expression of at least one gene in Tables 1-9.

### Methylation/Demethylation

[0190] In certain embodiments, a method of modulating expression of at least one gene in Tables 1-9 includes administering at least one stimuli described herein to after the methylation pattern of DNA. Methylation and demethylation of promoters is important for maintenance of cell-type specific transcriptional programs and regulation of gene expression that modulates phenotype in cells, as described in Stepper et al., Nucleic Acids Research, 2016, di 10.1093/nalgkwl1112, 1-11, which is hereby incorporated by reference in its entirety. DNA methylation has been observed to be a key mechanism in cellular reprogramming processes, including differentiation, senescence, and disease. Further, CTCF has been observed to preferentially bind to hypomethylated DNA, as described in Ji et al., 2016, Cell Stem Cell, 18, 262-275, which is hereby incorporated by reference in its entirety. Mutations resulting in misregulation of the methylation machinery is common in many cancers because methylation is associated with transcriptional silencing. Improper demethylation near a promoter region may result in a change of the binding profile of a GSC leading to a distortion of the chromatin structure including displacement of nucleosomes, thereby preventing proper function of the GSC. In certain embodiments, improper demethylation near a promoter region results in a change of the binding profile of an ODSC.

### Rescue of Disease Phenotype

[0191] GSCs or INs may be modulated to treat any one of the genetic disease associated with genetic mutations. For example, Hemophilia B, also called factor IX deficiency, is caused by reduced production of functional factor IX in the liver. In certain embodiments, at least one stimulus selected from those described herein may be administered to modulate a GSC that controls factor IX expression to increase androgen receptor binding resulting in an increased level of the functional factor IX, whose deficiency causes the phenotype.

[0192] A coding region mutation is also responsible for glycogen storage disease 1b. The mutation results in a partially functional protein. At least one stimulus selected from those described herein that targets the GSC responsible for increasing, although not completely rescuing the level of the protein, may be sufficient to rescue the phenotype of the disease.

Cancers with Therapeutic Potential

[0193] In certain embodiments, a method of modulating expression of at least one gene in Tables 1-9 includes administering at least one stimuli from those described herein to restore the boundary of at least one IN to prevent formation of a gene loop having a GSC that controls expression of a proto-oncogene. The regions of DNA near proto-oncogenes frequently include mutations in IN boundaries that bring transcriptional enhancers into proximity of these genes, as described in Hnisz et al., Science Reports, 351(6280):1454-1458 (2016), which is hereby incorporated by reference herein in its entirety. In fact, previous studies have shown that some INs function to prevent proto-oncogene activation. Even site-specific perturbation of an IN boundary has been shown to result in activation a proto-oncogene in the LMO2 locus. LMO2 encodes a transcription factor that is considered oncogenic when overexpressed. In some embodiments, perturbation of the boundaries of an IN alters the binding profile of a GSC. For example, the perturbation alters the binding profile of an ODSC.

### Treatment of Diseases

[0194] In certain embodiments, modulating GSCs or INs associated with at least one gene in Tables 1-9 may be used for treating a disease selected from Disease/Condition, Abdominal abscess, Abdominal aortic aneurysm, Abdominal cavity inflammation, Abdominal pain, Abdominal surgery, Abnormal labor, Abortion, Abscess, Absence seizure, Achalasia, Acid base imbalance, Acidemia, Acidosis, Acinetobacter baumanii infection, Acne, Acne vulgaris, Acoustic neuroma, Acquired immune deficiency syndrome, Acral erythema, Acromegaly, Actinic keratosis, Acute bronchitis, Acute chest syndrome, Acute coronary syndrome, Acute decompensated heart failure, Acute external otitis, Acute leukemia, Acute liver failure, Acute lung injury, Acute lymphoblastic leukemia, Acute myelogenous leukemia, Acute promyelocytic leukemia, Acute sinusitis, Acute stress disorder, Addisons disease, Adenocarcinoma, Adenoid hypertrophy, Adenoid tumor, Adenoma, Adenomyosis, Adenosine deaminase deficiency, Adenovirus infection, Adhesive capsulitis, Adipose tissue neoplasm, Adrenal cortex disease, Adrenal cortex neoplasm, Adrenal cortical adenoma, Adrenal cortical carcinoma, Adrenal disease, Adrenal gland hypofunction, Adrenal gland tumor, Adrenoleukodystrophy, Adrenomyeloneuropathy, Adult onset Stills disease, Adult respiratory distress syndrome, Adult T-cell lymphoma, Adult varicella zoster virus infection, Advanced solid tumor, Advanced solid tumor, Nasopharyngeal carcinoma, Agammaglobulinemia, Age related macular degeneration, Aggression, Aggressive fibromatosis, Aging, Agitation, Agoraphobia, AIDS related complex, Ar sickness, Akathesia, AL amyloidosis, Alagille syndrome, Albinism, Albuminuria, Alcohol overdose, Alcohol withdrawal delirium, Alcohol withdrawal syndrome, Alcoholic fatty liver disease, Alcoholic hepatitis, Alcoholic liver cirrhosis, Alcoholic liver disease, Alcoholism, Alkalosis, Alkaptonuria, Allergic conjunctivitis, Allergic rhinitis, Allergy, Alopecia, Alopecia areata, Alopecia drug-induced, Alpha mannosidosis, Alpha-1 antitrypsin deficiency, Alport syndrome, Altitude anoxia, Alveolar bone loss, Alzheimers disease, Amblyopia, Amenorrhea, Amino acid and protein metabolism disorder, Amino acid metabolism disorder, Amnesia, Amoeba infection, Amphetamine dependence, Amyloid polyneuropathy, Amyloidosis, Anal disease, Anal dysplasia, Anal fissure, Anal fistula, Anal tumor, Anaplastic astrocytoma, Anaplastic large cell lymphoma, Anaplastic thyroid cancer, Androgen deficiency, Androgen insensitivity syndrome, Anemia, Anesthesia, Aneuploidy, Aneurysm, Angelman syndrome, Angina, Angiodermatitis, Angiodysplasia, Angioedema, Angiogenesis disorder, Angioimmunoblastic T-cell lymphoma, Angiomyolipoma, Angiosarcoma, Angle closure glaucoma, Anhidrosis, Anisometropia, Ankylosing spondylitis, Anorectal disease, Anorexia nervosa, Anovulation, Anticoagulant overdose, Antiphospholipid syndrome, Anus pain, Anxiety disorder, Aortic aneurysm, Aortic disease, Aortic stenosis, Aortic valve disease, Aortic valve insufficiency, Aortic valve stenosis, Aphasia, Aplasia, Aplastic anemia, Apnea, Appendicitis, Appetite loss, Apraxia, Arachnid infection, Arachnoiditis, Arterial hypertension, Arterial occlusive disease, Arterial thrombosis, Arteriosclerosis, Arteriovenous malformation, Artery disease, Artery injury, Arthralgia, Arthritis, Asbestosis, Ascites, Aseptic meningitis, Asperger syndrome, Aspergillus fumigatus infection, Aspergillus infection, Asphyxia, Asplenia, Asthenozoospermia, Asthma, Asthma attack, Astigmatism, Astrocytoma, Ataxia, Ataxia telangiectasia, Atelectasis, Atherosclerosis, Atopic dermatitis, Atrial fibrillation, Atrial flutter, Atrioventricular block, Atrophic vaginitis, Atrophy, Attention deficit hyperactivity disorder, Attention deficit-disruptive behavior disorder, Autism, Autoimmune disease, Autoimmune hemolytic anemia, Autoimmune hepatitis, Autoinflammatory disease, Autonomic nervous system disease, Autosomal disorder, Autosomal dominant disorder, Autosomal dominant polycystic kidney disease, Azoospermia, Bacilli infection, Bacillus anthracis infection, Back pain, Bacterial endocarditis, Bacterial eye infection, Bacterial infection, Bacterial meningitis, Bacterial pneumonia, Bacterial respiratory tract infection, Bacterial skin infection, Bacterial urinary tract infection, Bacterial vaginosis, Bacteriuria, Bacteroides fragilis infection, Bacteroides infection, Bacteroides thetaiotaomicron infection, Balanitis, Barretts esophagus, Bartonella bacilliformis infection, Basal cell carcinoma, Basal cell nevus syndrome, Bassen Kornsweig syndrome, B-cell acute lymphoblastic leukemia, B-cell lymphoma, Becker muscular dystrophy, Behcets disease, Bells palsy, Benign skin tumor, Benign tumor, Berylliosis, Beta thalassemia, Beta-hemolytic Streptococcus infection, Biliary atresia, Biliary cancer, Biliary cirrhosis, Biliary tract disease, Biliary tumor, Binge eating disorder, Bipolar disorder, Bipolar I disorder, Bipolar H disorder, Birt Hogg Dube syndrome, Birth complication, BK virus infection, Bladder cancer, Bladder disease, Bladder pain, Bladder tumor, Bleeding, Blepharitis, Blepharoconjunctivitis, Blepharospasm, Blindness, Blood clotting disorder, Blood clotting factor deficiency, Blood transfusion, Body dysmorphic syndrome, Body weight change, Bone and joint infection, Bone disease, Bone injury, Bone marrow aplasia, Bone marrow depression, Bone marrow disease, Bone marrow failure, Bone marrow transplant rejection, Bone marrow transplantation, Bone metastases, Bone resorption, Bone tumor, Borderline personality disorder, Bordetella pertussis infection, Borrelia burgdorferi infection, Borrelia infection, Bowen disease, Bradycardia, Brain disease, Brain hemorrhage, Brain hypoxia-ischemia, Brain infarction, Brain injury, Brain ischemia, Brain stem infarction, Brain tumor, Breast Cancer, Breast disease, Breast tumor, Brenner tumor, Bronchiectasis, Bronchiolitis, Bronchitis, Bronchospasm, Bronchus disease, Brucella infection, Brugada syndrome, Bruxism, Bulimia nervosa, Bullous pemphigoid, Burkitts lymphoma, Bursitis, Cachexia, Calcification, Calcinosis, Calcium metabolism disorder, Campylobacter infection, Campylobacter jejuni infection, Canavan disease, Cancer, Cancer pain, Candida albicans infection, Candida infection, Candida krusei infection, Cannabis dependence, Capillary disease, Carbamoyl phosphate synthase deficiency, Carbohydrate metabolism disorder, Carcinoid syndrome, Carcinoid tumor, Carcinoma, Carcinosarcoma, Cardiac arrest, Cardiac edema, Cardiac failure, Cardiac hypertrophy, Cardiac reperfusion injury, Cardiac surgical procedure, Cardialgia, Cardiogenic shock, Cardioplegia, Cardiopulmonary bypass surgery, Cardiotoxicity drug-induced, Cardiovascular development disorder, Cardiovascular disease, Cardiovascular inflammation, Cardiovascular injury, Cardiovascular pregnancy complications, Cardiovascular surgical procedure, Cardiovascular symptom, Carditis, Carnitine palmitoyltransferase 2 deficiency, Carotid sinus syndrome, Carotid stenosis, Carpal tunnel syndrome, Carthage disease, Castlemans disease, Cataplexy, Cataract, Catatonic schizophrenia, Causalgia, Celiac disease, Cell transplantation, Cellulitis, Central nervous system disease, Central nervous system tumor, Cerebellar ataxia, Cerebral amyloid angiopathy, Cerebral edema, Cerebral hemorrhage, Cerebral hypoxia, Cerebral infarction, Cerebral palsy, Cerebrotendinous xanthomatosis, Cerebrovascular disease, Cerebrovascular trauma, Cervical dysplasia, Cervical dystonia, Cervicitis, Cervix disease, Cervix infection, Cervix injury, Chagas cardiomyopathy, Chalazion, Charcot Marie Tooth disease, Charcot Marie Tooth type 1 disease, Cheilitis, Chemotherapy induced nausea and vomiting, Chemotherapy-induced emesis, Cheynes Stokes breathing, Chikungunya virus infection, Chills, Chlamydia infection, Chlamydia pneumoniae infection, Chlamydia trachomatis infection, Chlamydiales infection, Cholangiocarcinoma, Cholangitis, Cholecystitis, Cholelithiasis, Cholestasis, Cholesterol metabolism disorder, Chondrocalcinosis, Chondrosarcoma, Chordoma, Chorea, Choriocarcinoma, Chorioretinitis, Choroid disease, Choroidal neovascularization, Choroideremia, Choroiditis, Chromoblastomycosis, Chromosome aberration, Chromosome disorder, Chronic bronchitis, Chronic fatigue syndrome, Chronic granulomatous disease, Chronic inflammatory demyelinating polyneuropathy, Chronic leukemia, Chronic liver failure, Chronic lymphocytic leukemia, Chronic myelocytic leukemia, Chronic myelomonocytic leukemia, Chronic obstructive airway disease, Chronic obstructive pulmonary disease, Chronic sinusitis, Chronic thromboembolic pulmonary hypertension, Churg-Strauss syndrome, Chylothorax, CINCA syndrome, Circadian rhythm sleep disorder, Citrobacter infection, Citrullinuria, Cleft hp, Cleft palate, Climacteric disorder, Clostridium botulinum infection, Clostridium difficile infection, Clostridium infection, Clostridium tetani infection, Cluster headache, CMV retinitis, Cocaine addiction, Coccidioides infection, Cockayne syndrome, Cognitive disorder, Cold agglutinin disease, Colic, Colitis, Colon disease, Colon tumor, Colonoscopy, Colorectal tumor, Combined immunodeficiency, Common cold, Common variable immunodeficiency, Compensated liver cirrhosis, Complex partial seizure, Complex regional pain syndrome, Complicated skin and skin structure infection, Complicated urinary tract infection, Compulsive gambling, Conduct disorder, Condyloma, Confusion, Congenital adrenal hyperplasia, Congenital autonomic control failure, Congenital heart defect, Congenital hemophilia, Congenital ichthyosiform erythroderma, Congenital lung disease, Congestive cardiomyopathy, Congestive heart failure, Conjunctiva disease, Conjunctivitis, Connective tissue disease, Connective tissue disease affecting the skin, Consciousness disorder, Constipation, Constipation predominant irritable bowel syndrome, Contact dermatitis, Contraception, Contracture, Contusion, Conversion disorder, Copper metabolism disorder, Corneal disease, Corneal injury, Corneal pain, Corneal transplant rejection, Corneal transplantation, Corneal ulcer, Coronary arteriosclerosis, Coronary artery disease, Coronary atherosclerosis, Coronary thrombosis, Coronary vasospasm, Corynebacterium diphtheriae infection, Cough, Coxiella infection, Coxsackie virus infection, Cranial nerve tumor, Craniofacial development disorder, Craniosynostosis, Creutzfeldt Jakob disease, Crigler-Najjar syndrome, Crohns disease, Croup, Cryoglobulinemia, Cryopyrin associated periodic syndrome, Cryptococcus infection, Cryptococcus neoformans meningitis, Cryptosporidium infection, Cushings disease, Cushings syndrome, Cutaneous lupus erythematosus, Cutaneous T-cell lymphoma, Cyst, Cystic fibrosis, Cysticercosis, Cystinosis, Cystinuria, Cystitis, Cytomegalovirus infection, Dacryocystitis, Death, Decompensated liver cirrhosis, Decubitus ulcer, Deep vein thrombosis, Degenerative disc disease, Delayed hypersensitivity, Delayed puberty, Delirium, Deltavirus infection, Delusional disorder, Dementia, Demyelinating disease, Dengue virus infection, Dental caries, Dental pulp disease, Dents disease, Depersonalization disorder, Depression, Dermatitis, Dermatofibrosarcoma, Dermatological disease, Dermatomycosis, Dermatomyositis, Dermatophytosis, Diabetes insipidus, Diabetes mellitus, Diabetic angiopathy, Diabetic cardiomyopathy, Diabetic cataract, Diabetic complication, Diabetic foot ulcer, Diabetic gastroparesis, Diabetic hypertension, Diabetic ketoacidosis, Diabetic macular edema, Diabetic nephropathy, Diabetic neuropathy, Diabetic peripheral neuropathy, Diabetic retinopathy, Diamond Blackfan anemia, Diarrhea, Diarrhea predominant irritable bowel syndrome, Diastolic heart failure, Diffuse large B-cell lymphoma, Dilated cardiomyopathy, Diplegia, Discoid lupus erythematosus, Disseminated intravascular coagulation, Dissociative disorder, Diverticulitis, Diverticulosis, Dizziness, DNA virus infection, Down syndrome, Drowsiness, Drug dependence, Drug overdose, Drug withdrawal syndrome, Dry age related macular degeneration, Duchenne dystrophy, Dumping syndrome, Duodenal ulcer, Dupuytren contracture, Dwarfism, Dyschezia, Dyskeratosis congenita, Dyslexia, Dysmenorrhea, Dyspareunia, Dyspepsia, Dysphagia, Dysphoria, Dysplasia, Dysplastic nevus syndrome, Dyspnea, Dysthymic disorder, Dystonia, Dystrophy, Dysuria, Eale disease, Ear disease, Eating disorder, Ebola virus infection, Eclampsia, Ectopic pregnancy, Eczema, Edema, Egg hypersensitivity, Ehlers Danlos syndrome, Eisenmenger syndrome, Electrolyte metabolism disorder, Elephantiasis, Embolism, Embolism and thrombosis, Emesis, Emotional lability, Emphysema, Empyema, Encephalitis, End stage renal disease, Endocarditis, Endocrine disease, Endocrine tumor, Endometrioid carcinoma, Endometriosis, Endophthalmitis, Endotoxic shock, Entamoeba histolytica infection, Enteritis, Enterobacter cloacae infection, Enterobacter infection, Enterobacteriaceae infection, Enterococcus faecalis infection, Enterococcus faecium infection, Enterococcus infection, Enterocolitis, Enterocytozoonidae infection, Enterovirus 71 infection, Enterovirus infection, Enuresis, Enzyme deficiency, Eosinophilia, Eosinophilic esophagitis, Eosinophilic granuloma, Ependymoma, Epicondylitis, Epidermolysis bullosa, Epidermolysis bullosa dystrophica, Epididymitis, Epididymo-orchitis, Epilepsy, Epistaxis, Epstein Barr virus infection, Erectile dysfunction, Erysipelas, Erythema, Erythematosquamous skin disease, Erythrocyte disorder, Erythropoietic protoporphyria, Escherichia coli infection, Esophageal disease, Esophageal function disorder, Esophageal hemorrhage, Esophageal varices, Esophagitis, Esophagus tumor, Essential fatty acid deficiency, Essential hypertension, Essential tremor, Estrogen deficiency, Ethmoiditis, Euthryroid sick syndrome, Ewing sarcoma, Exercise induced asthma, Exocrine pancreatic insufficiency, Exophthalmos, Extrapyramidal syndrome, Extrinsic allergic alveolitis, Eyelid disease, Fabry disease, Facial nerve disease, Facioscapulohumeral muscular dystrophy, Factor I deficiency, Factor II deficiency, Factor IX deficiency, Factor VII deficiency, Factor VIII deficiency, Factor XIII deficiency, Fallopian tube cancer, Fallopian tube disease, Fallopian tube tumor, Familial adenomatous polyposis, Familial amyloid neuropathy, Familial cold autoinflammatory syndrome, Familial dysautonomia, Familial hypercholesterolemia, Familial mediterranean fever, Familial thrombotic microangiopathy, Fanconi anemia, Fatigue, Fatty acid metabolism disorder, Fatty acid oxidation disorder, Fatty liver disease, Febrile neutropenia, Fecal incontinence, Felty syndrome, Female birth control, Female contraception, Female genital tract infection, Female genital tract pain, Female hypogonadism, Female infertility, Female sexual dysfunction, Fetal alcohol syndrome, Fetal growth restriction, Fever, Fibrocystic breast disease, Fibrodysplasia ossificans progressiva, Fibromuscular dyplasia, Fibromyalgia, Fibrosarcoma, Fibrosis, Filariasis, Fistula, Flatulence, Flavivirus infection, Focal segmental glomerulosclerosis, Folic acid deficiency, Follicle center lymphoma, Folliculitis, Foot and mouth disease virus infection, Foot ulcer, Fragile X syndrome, Francisella tularensis infection, Friedreich ataxia, Frontotemporal dementia, Fucosidosis, Functional bowel disorder, Fungal eye infection, Fungal infection, Fungal pneumonia, Fungal respiratory tract infection, Fungal urinary tract infection, Fusarium infection, Fusobacterium infection, Galactorrhea, Gallbladder disease, Gallbladder tumor, Gallstones, Ganglioneuroblastoma, Gastric injury, Gastric motility disorder, Gastritis, Gastroenteritis, Gastroesophageal reflux, Gastrointesinal fistula, Gastrointestinal bleeding, Gastrointestinal disease, Gastrointestinal function disorder, Gastrointestinal infection, Gastrointestinal inflammation, Gastrointestinal investigative surgical procedure, Gastrointestinal motility disorder, Gastrointestinal pain, Gastrointestinal stromal tumor, Gastrointestinal tumor, Gastrointestinal ulcer, Gastroparesis, Gastrospasm, Gaucher disease, Gauchers disease type I, Gauchers disease type II, Gauchers disease type III, General anesthesia, Generalized anxiety disorder, Genetic disorder, Genital herpes, Genital tract infection, Genital tract tumor, Genital ulcer, Genitourinary disease, Genitourinary tract tumor, Germ cell and embryonic cancer, Gestational diabetes, Giant cell bone tumor, Giardia lamblia infection, Gigantism, Gingiva disease, Gingivitis, Gitelman syndrome, Glaucoma, Glaucoma surgical procedure, Glioblastoma, Glioma, Gliosarcoma, Globoid cell leukodystrophy, Glomerular disease, Glomerulonephritis, Glucose intolerance, Glycogen storage disease, GM2 gangliosidosis, Goiter, Gonad tumor, Gout, Graft versus host disease, Gram negative bacterium infection, Gram positive bacterium infection, Granulocytopenia, Granuloma, Granulosa cell tumor, Graves disease, Group A Streptococcus infection, Growth disorder, Growth hormone deficiency, Guillain Barre syndrome, Gynecological disorder, Gynecomastia, Habitual abortion, Haemophilus ducreyi infection, Haemophilus infection, Haemophilus influenzae infection, Haemophilus parainfluenzae infection, Hairy cell leukemia, Halitosis, Hallucination, Hantavirus infection, Hashimotos disease, Head and neck tumor, Head injury, Headache, Healing, Hearing disorder, Hearing loss, Heart arrhythmia, Heart disease, Heart injury, Heart neoplasm, Heart transplant rejection, Heart transplantation, Heart valve disease, Heavy metal poisoning, Hebephrenic schizophrenia, Helicobacter infection, Helicobacter pylori infection, HELLP syndrome, Helminth infection, Hemangioma, Hemangiopericytoma, Hemangiosarcoma, Hematological disease, Hematological neoplasm, Hematoma, Hematopoietic stem cell transplantation, Hematuria, Hemiplegia, Hemochromatosis, Hemoglobinopathy, Hemolytic anemia, Hemolytic uremic syndrome, Hemophilia, Hemorrhagic enteritis, Hemorrhagic shock, Hemorrhagic stroke, Hemorrhoids, Hemosiderosis, Henoch Schonlein purpura, Heparin induced thrombocytopenia, Hepatic cyst, Hepatic edema, Hepatic encephalopathy, Hepatic insufficiency, Hepatic porphyria, Hepatitis, Hepatitis A virus infection, Hepatitis B virus infection, Hepatitis C virus infection, Hepatitis D virus infection, Hepatitis E virus infection, Hepatitis virus infection, Hepatobiliary disease, Hepatobiliary system tumor, Hepatoblastoma, Hepatocellular carcinoma, Hepatomegaly, Hepatorenal syndrome, Hepatotoxicity drug-induced, Hereditary angioedema, Hereditary hemorrhagic telangiectasia, Hereditary inclusion body myositis, Hereditary neoplastic syndrome, Hereditary spastic paraplegia, Hermansky-Pudlak syndrome, Hernia, Herpangina, Herpes simplex virus infection, Herpes virus infection, Herpesvirus infection, Herpesvirus type 8 infection, Herpetic keratitis, Heterotopic ossification, Hiccup, Hidradenitis, Hidradenitis suppurativa, High grade B-cell lymphoma, Hippel Lindau syndrome, Hirsutism, Histiocytoma, Histiocytosis, Histoplasma infection, HIV associated dementia, HIV infection, HIV-1 infection, HIV-2 infection, HIV-associated lipodystrophy, Hoarseness, Hodgkins disease, Homocystinuria, Hookworm infection, Hormone deficiency, Hormone dependent prostate cancer, Hormone refractory prostate cancer, Hot flashes, HSV-1 infection, HSV-2 infection, Human T cell leukemia virus 1 infection, Hunter syndrome, Huntingtons chorea, Hurler syndrome, Hutchinson Gilford progeria syndrome, Hydronephrosis, Hyperactivity, Hyperaldosteronism, Hyperalgesia, Hyperammonemia, Hyperandrogenism, Hyperbilirubinemia, Hypercalcemia, Hypercholesterolemia, Hyperemesis gravidarum, Hyperemia, Hypereosinophilic syndrome, Hypergastrinemia, Hyperglycemia, Hyperhidrosis, Hyperinsulinemia, Hyperkalemia, Hyperlipidemia, Hyperlipoproteinemia, Hyperlipoproteinemia type I, Hyperlipoproteinemia type IIb, Hyperlipoproteinemia type III, Hypermenorrhea, Hypernatremia, Hyperopia, Hyperoxaluria, Hyperoxia, Hyperparathyroidism, Hyperphagia, Hyperphosphatemia, Hyperpigmentation, Hyperplasia, Hyperprolactinemia, Hypersensitivity, Hypersomnia, Hypersplenism, Hypertension, Hyperthermia, Hyperthyroidism, Hypertriglyceridemia, Hypertrophic cardiomyopathy, Hypertrophic skin disease, Hypertrophy, Hyperuricemia, Hypervolemia, Hypoactive sexual desire disorder, Hypoalbuminemia, Hypoalphalipoproteinemia, Hypocalcemia, Hypochondriasis, Hypogalactia, Hypogammaglobulinemia, Hypoglycemia, Hypogonadism, Hypokalemia, Hypomagnesemia, Hypomania, Hyponatremia, Hypoparathyroidism, Hypophosphatasia, Hypophosphatemia, Hypopituitarism, Hypotension, Hypothermia, Hypothyroidism, Hypothyroxinemia, Hypotrichosis, Hypovolemia, Hypoxia, Hypozincemia, Ichthyosis, Idiopathic pulmonary arterial hypertension, Idiopathic pulmonary fibrosis, IgA nephropathy, Ileum disease, Ileus, Illegal drug overdose, Immediate type hypersensitivity, Immune deficiency, Immune disorder, Immune thrombocytopenic purpura, Immunization, Immunoglobulin G deficiency, Impetigo, Impulse control disorder, Inappropriate ADH syndrome, Inborn error of metabolism, Inclusion body myositis, Indigestion, Infant colic, Infantile spasms, Infection by anatomical location, Infectious arthritis, Infectious disease, Infectious meningitis, Infectious mononucleosis, Infertility, Inflammatory bowel disease, Inflammatory breast cancer, Inflammatory disease, Influenza virus A infection, Influenza virus B infection, Influenza virus infection, Injury, Inner ear disease, Insomnia, Insulin dependent diabetes, Insulin resistance, Intellectual impairment, Intermediate uveitis, Intermittent claudication, Intermittent explosive disorder, Interstitial cystitis, Interstitial lung disease, Intervertebral disc disease, Intestine disease, Intestine infection, Intestine injury, Intestine tumor, Intoxication, Intracranial aneurysm, Intracranial hemorrhage, Intracranial hypertension, Intracranial vasospasm, Iodine deficiency, Iris disease, Iron deficiency anemia, Iron metabolism disorder, Iron overload, Irritable bowel syndrome, Ischemia, Ischemic heart disease, Ischemic stroke, Islet cell transplant rejection, Jansky-Bielschowsky disease, Japanese encephalitis virus infection, Jaundice, Jaw disease, Job syndrome, Joint disease, Joint infection, Joint injury, Juvenile myoclonic epilepsy, Juvenile rheumatoid arthritis, Kaposis sarcoma, Kawasaki disease, Keratitis, Keratoconjunctivitis, Keratoconus, Keratosis, Kidney dialysis, Kidney transplant rejection, Kidney transplantation, Klebsiella infection, Klebsiella pneumoniae infection, Kleptomania, Klinefelter syndrome, Knee fracture, Knee injury, Kwashiorkor, Labor complication, Lacrimal gland disease, Lactation disorder, Lactic acidosis, Lactobacillales infection, Lactose intolerance, Lambert-Eaton syndrome, Lamellar ichthyosis, Large cell lung carcinoma, Laron syndrome, Laryngismus, Laryngitis, Laryngopharyngitis, Laryngotonsillitis, Larynx disease, Larynx tumor, Latent autoimmune adult diabetes, Lateral epicondylitis, Lebers hereditary optic atrophy, Left heart disease pulmonary hypertension, Leg ulcer, Legg Calve Perthes disease, Legionella pneumophila infection, Leigh disease, Leiomyosarcoma, Leishmania braziliensis infection, Leishmania donovani infection, Leishmania infection, Leishmania tropica infection, Lennox Gastaut syndrome, Lentiginosis, Lentigo senilis, Leptospiraceae infection, Lesch Nyhan syndrome, Leukemia, Leukocyte disorder, Leukoencephalopathy, Leukopenia, Leukopenia drug induced, Leukoplakia, Lewy body dementia, Lice infestation, Lichen, Limb development disorder, Limb girdle muscular dystrophy, Lipid metabolism disorder, Lipid storage diseases, Lipodystrophy, Lipoma, Lipoprotein deficiency, Lipoprotein metabolism disorder, Liposarcoma, Liver abscess, Liver cirrhosis, Liver disease, Liver failure, Liver fibrosis, Liver infection, Liver injury, Liver transplant rejection, Liver transplantation, Liver tumor, Long QT syndrome, Louse infestation, Lower back pain, Lower limb fracture, Lower respiratory tract infection, Lung abscess, Lung disease, Lung disease pulmonary hypertension, Lung embolism, Lung infection, Lung inflammation, Lung injury, Lung malformation, Lung transplant rejection, Lung transplantation, Lung tumor, Lupus nephritis, Lyme disease, Lymphadenitis, Lymphadenopathy, Lymphangioleiomyomatosis, Lymphangiosarcoma, Lymphangitis, Lymphatic system disease, Lymphedema, Lymphoblastic leukemia, Lymphocele, Lymphocytopenia, Lymphocytosis, Lymphoid leukemia, Lymphoma, Lymphoplasmacytoid lymphoma, Lymphoproliferative disease, Lysosomal acid lipase deficiency, Machado-Joseph disease, Macroadenoma, Macroglobulinemia, Macular degeneration, Macular disease, Macular edema, Major depressive disorder, Malabsorption syndrome, Malassezia infection, Male contraception, Male genital system disease, Male hypogonadism, Male infertility, Male osteoporosis, Male sexual dysfunction, Malignant hyperthermia, Malnutrition, Mandible disease, Mania, Mantle cell lymphoma, Marfan syndrome, Marginal zone B-cell lymphoma, Maroteaux-Lamy syndrome, Mastalgia, Mastitis, Mastocytosis, Mastoiditis, Measles virus infection, Meconium aspiration syndrome, Medial epicondylitis, Medullary thyroid cancer, Medulloblastoma, Melancholia, Melanoma, MELAS syndrome, Melasma, Melioidosis, Membranous glomerulonephritis, Meniere disease, Meningeal neoplasm, Meningioma, Meningitis, Menopause, Menorrhagia, Menstruation disorder, Merkel cell carcinoma, Mesothelioma, Metabolic bone disease, Metabolic brain disease, Metabolic disorder, Metabolic syndrome X, Metachromatic leukodystrophy, Metal intoxication, Metastasis, Metastatic bladder cancer, Metastatic brain cancer, Metastatic breast cancer, Metastatic CNS cancer, Metastatic colon cancer, Metastatic colorectal cancer, Metastatic esophageal cancer, Metastatic gastrointestinal cancer, Metastatic head and neck cancer, Metastatic hepatobiliary cancer, Metastatic liver cancer, Metastatic lung cancer, Metastatic non small cell lung cancer, Metastatic ovary cancer, Metastatic pancreas cancer, Metastatic prostate cancer, Metastatic rectal cancer, Metastatic renal cancer, Metastatic stomach cancer, Metastatic testicular cancer, Metastatic urinary tract cancer, Methylmalonic acidemia, Metrorrhagia, Microalbuminuria, Microangiopathy, Microsporidial infection, Middle ear disease, Migraine, Migraine with aura, Migraine without aura, Mild cognitive impairment, Milk hypersensitivity, Miosis, Mite infection, Mitochondrial disease, Mitochondrial myopathy, Mitochondrial optic neuropathy, Mitral valve disease, Mitral valve insufficiency, Mitral valve stenosis, Mixed urinary incontinence, Molluscum contagiosum infection, Mood disorder, Moraxella catarrhalis infection, Morganella infection, Morning sickness, Morquio syndrome, Motion sickness, Motor neurone disease, Mouth disease, Mouth inflammation, Mouth tumor, Mouth ulcer, Movement disorder, MRSA infection, Muckle Wells syndrome, Mucopolysaccharidosis type I, Mucor infection, Mucositis, Multidrug resistant infection, Multi-infarct dementia, Multiple endocrine neoplasia type 1, Multiple endocrine neoplasia type 2a, Multiple hamartoma syndrome, Multiple myeloma, Multiple organ failure, Multiple sclerosis, Multiple system atrophy, Mumps virus infection, Muscle disease, Muscle hypertonia, Muscle injury, Muscle spasm, Muscle wasting disease, Muscle weakness, Muscular dystrophy, Musculoskeletal disease, Musculoskeletal pain, Myalgia, Myasthenia gravis, Mycobacterium avium infection, Mycobacterium infection, Mycobacterium leprae infection, Mycobacterium tuberculosis infection, Mycoplasma infection, Mycoplasma pneumoniae infection, Mycosis fungoides, Mydriasis, Myelitis, Myelodysplastic syndrome, Myelofibrosis, Myeloid leukemia, Myeloproliferative disorder, Myocardial disease, Myocardial infarction, Myocarditis, Myoclonic seizure, Myoclonus, Myoma, Myopathy, Myopia, Myositis, Myotonic dystrophy, Myotonic dystrophy type 1, N-acetylglutamate synthase deficiency, Nail disease, Narcolepsy, Narcotic dependence, Nasal congestion, Nasal polyps, Nasopharyngeal carcinoma, Nasopharynx tumor, Nausea, Nausea drug-induced, Necrosis, Necrotizing acute pancreatitis, Necrotizing enterocolitis, Neisseria gonorrhoeae infection, Neisseria infection, Neisseria meningitidis infection, Neisseria meningitidis meningitis, Nelson syndrome, Nematode infection, Neonatal respiratory distress syndrome, Neoplasm, Neoplasm by site, Neoplastic meningitis, Nephritis, Nephroblastoma, Nephrocalcinosis, Nephrogenic diabetes insipidus, Nephrogenic fibrosing dermopathy, Nephropathic cystinosis, Nephrosclerosis, Nephrotic syndrome, Nephrotoxicity, Nerve injury, Nerve tumor, Nervous system development disorder, Nervous system inflammation, Neuritis, Neurobehavioral disorder, Neuroblastoma, Neurodegenerative disease, Neuroendocrine tumor, Neurofibromatosis, Neurofibromatosis type I, Neurofibromatosis type II, Neurogenic bladder, Neurological disease, Neuroma, Neuromuscular blockade, Neuromuscular disease, Neuromyelitis optica, Neuropathic pain, Neuropathy, Neurosyphilis, Neurotoxicity drug-induced, Neutropenia, Nevus, Nicotine dependence, Niemann Pick disease, Niemann Pick disease type B, Niemann Pick disease type C, Niemann Pick disease type 01, Niemann Pick disease type C2, Nocturia, Nodular goiter, Noise induced hearing loss, Non alcoholic fatty liver disease, Non segmental vitiligo, Non traumatic brain injury, Non-alcoholic steatohepatitis, Non-Hodgkin lymphoma, Non-Hodgkin lymphoma, B-cell acute lymphoblastic leukemia, Non-insulin dependent diabetes, Non-proliferative diabetic retinopathy, Non-small-cell lung cancer, Noonan syndrome, Norovirus infection, Norwalk virus infection, Nose disease, Nutritional deficiency, Nutritional disorder, Nyctalopia, Nystagmus, Obesity, Obsessive compulsive disorder, Obsessive compulsive disorder; Obstructive intestinal disease, Obstructive sleep apnea, Occlusive coronary artery disease, Ocular disease, Ocular hypertension, Ocular infection, Ocular inflammation, Ocular injury, Ocular melanoma, Ocular neovascular disorder, Ocular pain, Ocular surgical procedure, Ocular tumor, Olfaction disorder, Oligodendroglioma, Oligospermia, Oliguria, Onchocerciasis, Onychomycosis, Open angle glaucoma, Opiate dependence, Opsoclonus myoclonus syndrome, Optic nerve disorder, Optic neuritis, Oral mucositis, Orbital inflammatory disease, Organ transplantation, Ornithine transcarbamylase deficiency, Orthomyxovirus infection, Orthostatic hypotension, Ostealgia, Osteitis, Osteoarthritis, Osteoblastoma, Osteochondritis, Osteodystrophy, Osteogenesis imperfecta, Osteolysis, Osteomyelitis, Osteonecrosis, Osteopenia, Osteopetrosis, Osteoporosis, Osteosarcoma, Otitis, Otitis externa, Otitis media, Otorhinolaryngological disease, Otorhinolaryngological infection, Otosclerosis, Ovarian clear cell carcinoma, Ovarian hyperstimulation syndrome, Ovary cyst, Ovary disease, Ovary tumor, Overactive bladder, Pagets bone disease, Pain, Palpitation, Pancoast syndrome, Pancreas disease, Pancreas islet disease, Pancreas transplant rejection, Pancreas transplantation, Pancreas tumor, Pancreatic cystadenocarcinoma, Pancreatic ductal adenocarcinoma, Pancreatic endocrine tumor, Pancreatic intraductal papillary-mucinous tumor, Pancreatitis, Pancytopenia, Panic disorder, Papillary thyroid tumor, Papillomavirus infection, Papular skin disease, Paracetamol overdose, Paracoccidioidomycosis, Paraganglioma, Parainfluenza virus infection, Paralysis, Paranasal sinus disease, Paranoid schizophrenia, Paraproteinemia, Parapsoriasis, Parasitic infection, Parasomnia, Parathyroid disease, Parathyroid tumor, Paratuberculosis, Paresthesia, Parkinsonism, Parkinsons disease, Parkinsons disease dementia, Paronychia, Paroxysmal nocturnal hemoglobinuria, Paroxysmal supraventricular tachycardia, Paroxysmal tachycardia, Paroxysmal ventricular tachycardia, Partial seizure, Parturition, Parvovirus infection, Patent ductus arteriosus, Peanut hypersensitivity, Pediatric psychiatric disorder, Pediatric varicella zoster virus infection, Pediculosis capitis infestation, Pedophilia, Pelvic inflammatory disease, Pemphigoid, Pemphigus, Penile induration, Penis disease, Penis tumor, Peptic ulcer, Peptostreptococcus infection, Perennial allergic rhinitis, Perianal fistula, Periarthritis, Periarticular joint disease, Pericardial disease, Pericarditis, Periodontal disease, Periodontitis, Peripheral arterial occlusive disease, Peripheral nervous system disease, Peripheral neuropathy, Peripheral T-cell lymphoma, Peripheral vascular disease, Peritoneal disease, Peritoneal tumor, Peritonitis, Peritonsillitis, Periventricular leukomalacia, Peroxisome disease, Persistent pulmonary hypertension of the newborn, Personality disorder, Pervasive child developmental disorder, Peutz Jegher syndrome, Phantom limb, Pharyngitis, Pharynx tumor, Phenylketonuria, Pheochromocytoma, Phimosis, Phlebitis, Phlebothrombosis, Phobia, Picornavirus infection, Pigment disorder, Pituitary adenoma, Pituitary disease, Pituitary tumor, Pityriasis, Pityriasis capitis infection, Placenta disease, Placenta retention, Planned abortion, Plasma cell dyscrasia, Plasmacytoma, Plasmodium falciparum infection, Plasmodium infection, Plasmodium knowlesi infection, Plasmodium malariae infection, Plasmodium vivax infection, Platyhelminth infection, Pleural disease, Pleurisy, Pleuropneumonia, Pneumocystis carinii infection, Pneumonia, POEMS syndrome, Poison intoxication, Poliovirus infection, Polyarteritis nodosa, Polychondritis, Polycystic kidney disease, Polycystic liver disease, Polycystic ovary syndrome, Polycythemia, Polycythemia vera, Polymorphus light eruption, Polymyalgia rheumatica, Polymyositis, Polyneuropathy, Polyomavirus infection, Polyostotic fibrous dysplasia, Polyp, Polypoidal choroidal vasculopathy, Polyuria, Pompes disease, Porphyria, Porphyria cutanea tarda, Port wine stain, Portal hypertension, Post transplant lymphoproliferative disease, Post traumatic stress disorder, Postherpetic neuralgia, Postmenopausal osteoporosis, Postnatal depression, Pouchitis, Prader-Willi syndrome, Precocious puberty, Precursor T-lymphoblastic lymphoma-leukemia, Pre-eclampsia, Pregnancy disorder, Premature ejaculation, Premature labor, Premature ovarian failure, Premedication, Premenstrual syndrome, Presbycusis, Presbyopia, Prevotella infection, Priapism, Primary biliary cirrhosis, Primary hyperparathyroidism, Primary mediastinal large B-cell lymphoma, Primary sclerosing cholangitis, Prion infection, Proctitis, Progestogen deficiency, Progressive multifocal leukoencephalopathy, Progressive supranuclear palsy, Prolactinoma, Proliferative diabetic retinopathy, Prolymphocytic leukemia, Prophylaxis, Propionibacterium acnes infection, Propionic acidemia, Prostate disease, Prostate hyperplasia, Prostate tumor, Prostatectomy, Prostatic intraepithelial neoplasia, Prostatitis, Protein C deficiency, Protein energy deficiency, Proteinosis, Proteinuria, Proteus infection, Proteus mirabilis infection, Protozoal infection, Providencia infection, Prurigo, Prurigo nodularis, Pruritus, Pseudohypoaldosteronism, Pseudomembranous colitis, Pseudomonas aeruginosa infection, Pseudomonas infection, Pseudoobstruction, Pseudotumor cerebri, Pseudoxanthoma elasticum, Psoriasis, Psoriatic arthritis, Psychiatric disorder, Psychomotor disorder, Psychosexual disorder, Psychotic disorder, Pterygium, Pulmonary artery hypertension, Pulmonary edema, Pulmonary eosinophilia, Pulmonary fibrosis, Pulmonary heart disease, Pulmonary hypertension, Pulmonary valve insufficiency, Pulmonary valve stenosis, Pulpitis, Pupil disorder, Purpura, Pyelonephritis, Pyoderma gangrenosum, Pyromania, Pyruvate carboxylase deficiency, Pyuria, Q fever, Quadriplegia, Rabies virus infection, Radiation sickness, Radiotherapy induced emesis, Raynauds disease, Rectal disease, Rectal tumor, Rectosigmoiditis, Refractive error, Reiter syndrome, Renal artery obstruction, Renal cell carcinoma, Renal colic, Renal disease, Renal failure, Renal injury, Renal insufficiency, Renal osteodystrophy, Renal pain, Renal sarcoma, Renal tumor, Renovascular hypertension, Reperfusion injury, Reproductive disorder, Resistant hypertension, Respiratory congestion, Respiratory depression, Respiratory disease, Respiratory disorder, Respiratory distress syndrome, Respiratory failure, Respiratory insufficiency, Respiratory syncytial virus infection, Respiratory tract allergy, Respiratory tract bleeding, Respiratory tract infection, Respiratory tract inflammation, Respiratory tract tumor, Restenosis, Restless legs syndrome, Retinal artery occlusion, Retinal venous occlusion, Retinitis pigmentosa, Retinoblastoma, Retinopathy, Retinopathy of prematurity, Rett syndrome, Rhabdomyolysis, Rhabdomyosarcoma, Rheumatoid arthritis, Rhinitis, Rhinopharyngitis, Rhinorrhea, Rhinovirus infection, Rickets, Rigor, Rosacea, Ross River virus infection, Rotavirus infection, Rubella virus infection, Rubinstein-Taybi syndrome, Saccharomyces infection, Salivary gland disease, Salmonella infection, Salmonella typhi infection, Salmonella typhimurium infection, Sandhoff disease, Sanfilippo syndrome, Santavuori-Haltia disease, Sarcoidosis, Sarcoma, Sarcopenia, SARS coronavirus infection, Scabies infection, Scar tissue, Scedosporium infection, Schistosomiasis, Schizoaffective disorder, Schizophrenia, Schizophreniform disorder, Schizophyllum infection, Sciatica, Scleral disease, Scleritis, Scleroderma, Scoliosis, Seasonal affective disorder, Seasonal allergic rhinitis, Sebaceous gland disease, Seborrheic dermatitis, Seborrheic keratosis, Secondary hyperparathyroidism, Secondary pulmonary arterial hypertension, Seizure disorder, Seminoma, Sensorineural hearing loss, Sepsis, Septic shock, Serratia infection, Serratia marcescens infection, Sertoli-Leydig cell tumor, Severe combined immunodeficiency syndrome, Sexual compulsive disorder, Sexual dysfunction, Sezary syndrome, Shigella boydii infection, Shigella dysenteriae infection, Shigella flexneri infection, Shigella infection, Shigella sonnei infection, Shock, Short bowel syndrome, Shwachman syndrome, Shy Drager syndrome, Sialorrhea, Sickle beta 0 thalassemia, Sickle beta zero thalassemia, Sickle cell anemia, Sickle cell crisis, Sigmoiditis, Sinusitis, Sitosterolemia, Sjoegrens syndrome, Skin allergy, Skin burns, Skin cancer, Skin infection, Skin injury, Skin photosensitivity disorder, Skin rash, Skin transplantation, Skin tumor, Skin ulcer, Sleep apnea, Sleep arousal disorder, Sleep disorder, Sleep maintenance insomnia, Sly syndrome, Small intestine disease, Small-cell lung cancer, Smith Lemli Opitz syndrome, Snoring, Social phobia, Soft tissue sarcoma, Solar urticaria, Solid tumor, Somatostatinoma, Spielmeyer-Vogt disease, Spina bifida, Spinal and bulbar muscular atrophy, Spinal cord compression, Spinal cord disease, Spinal cord injury, Spinal cord tumor, Spinal cord vascular disease, Spinal disease, Spinal injury, Spinal muscular atrophy, Spinal stenosis, Spinocerebellar ataxia, Spinocerebellar degenerations, Splenic marginal zone lymphoma, Splenomegaly, Spondylarthritis, Spondylolisthesis, Spondylosyndesis, Spontaneous abortion, Sporadic inclusion body myositis, Squamous cell carcinoma, Stage II melanoma, Stage III melanoma, Stage IV melanoma, Staphylococcus aureus infection, Staphylococcus epidermidis infection, Staphylococcus infection, Staphylococcus saprophyticus infection, Stargardt disease, Status asthmaticus, Status epilepticus, Steatohepatitis, Steatorrhea, Stem cell transplantation, Stevens Johnson syndrome, Stiff person syndrome, Stomach disease, Stomach infection, Stomach tumor, Stomach ulcer, Stomatitis, Storage disease, Strabismus, Streptococcus agalactiae infection, Streptococcus group B infection, Streptococcus infection, Streptococcus mutans infection, Streptococcus pneumoniae infection, Streptococcus pyogenes infection, Stress urinary incontinence, Stroke, Sturge-Weber syndrome, Stutter, Sudden cardiac death, Suicidal ideation, Suicide, Sunburn, Supraventricular tachycardia, Surgical procedure, Sydenham chorea, Syncope, Syndrome X, Synovitis, Systemic inflammatory response syndrome, Systemic lupus erythematosus, Systemic mastocytosis, Systolic dysfunction, Systolic heart failure, Tachycardia, Tachypnea, Taenia infection, Takayasus arteritis, Tardive dyskinesia, Taste disorder, Tay Sachs disease, T-cell acute lymphoblastic leukemia, T-cell large granular lymphocyte leukemia, T-cell lymphoma, Telangiectasis, Temperature disorder, Temporal arteritis, Temporomandibular joint syndrome, Tendinitis, Tendon disease, Tendon injury, Tenosynovitis, Teratoma, Testis tumor, Testosterone deficiency, Tetralogy of Fallot, Thalassemia, Thalassemia intermedia, Thalassemia major, Thoracic aortic aneurysm, Thoracic outlet syndrome, Throat disease, Thrombasthenia, Thromboangiitis obliterans, Thrombocyte disorder, Thrombocythemia, Thrombocytopenia, Thrombocytopenic purpura, Thrombocytosis, Thromboembolism, Thrombophlebitis, Thrombosis, Thrombotic microangiopathy, Thymoma, Thymus neoplasm, Thyroid associated ophthalmopathy, Thyroid disease, Thyroid tumor, Thyroiditis, Thyrotoxicosis, Tic disorder, Tick borne encephalitis virus infection, Tinea, Tinea capitis, Tinea corporis, Tinea cruris, Tinea pedis, Tinnitus, Tissue adhesions, Tongue disease, Tonic clonic epilepsy, Tonsillitis, Tooth disease, Tooth injury, Tooth loss, Topical anesthesia, Torticollis, Tourette syndrome, Toxic epidermal necrolysis, Toxicity, Toxoplasma gondii infection, Toxoplasma infection, Tracheobronchitis, Trachoma, Transient ischemic attack, Transitional cell carcinoma, Transplant rejection, Transplantation, Transsexualism, Traumatic brain injury, Trematode infection, Tremor, Treponema infection, Treponema pallidum infection, Trichocomaceae infection, Trichomonas infection, Trichotillomania, Tricuspid atresia, Tricuspid insufficiency, Trigeminal nerve disorder, Trigeminal neuralgia, Trismus, Tropical spastic paraparesis, Trypanosoma brucei infection, Trypanosoma cruzi infection, Trypanosomiasis, Tuberous sclerosis, Tumers syndrome, Tumor lysis syndrome, Turners syndrome, Type I complex regional pain syndrome, Type I tyrosinemia, Tyrosinemia, Ulcer, Ulcerative colitis, Ulcerative proctitis, Umbilical cord stem cell transplantation, Unconsciousness, Undifferentiated schizophrenia, Unstable angina, Upper limb fracture, Upper respiratory tract infection, Ureaplasma infection, Uremia, Ureteral colic, Ureteral disease, Urethral cancer, Urethral disease, Urethritis, Urge urinary incontinence, Urinary dysfunction, Urinary incontinence, Urinary retention, Urinary tract disease, Urinary tract infection, Urinary tract tumor, Urogenital tract infection, Urolithiasis, Urticaria, Uterine cervix tumor, Uterine fibroids, Uterine hemorrhage, Uterus disease, Uterus infection, Uterus tumor, Uveal melanoma, Uveitis, Vaccination, Vagina disease, Vaginal cancer, Vaginal infection, Vaginal intraepithelial neoplasia, Vaginitis, Variant angina pectoris, Varicella zoster virus infection, Varices, Varicocele, Varicosis, Varicosis ulcer, Variola virus infection, Vascular dementia, Vascular disease, Vascular disease by process, Vascular eye disease, Vascular fistula, Vascular injury, Vascular neoplasm, Vascular occlusive disease, Vasculitis, Vasospasm, Vein disease, Vein graft failure, Venous insufficiency, Venous occlusive disease, Ventricular arrhythmia, Ventricular fibrillation, Ventricular tachycardia, Verruca vulgaris, Vertebral fracture, Vertigo, Vesicoureteral reflux, Vestibulocochlear nerve disorder, Vibrio cholerae infection, Vibrio infection, Viral encephalitis, Viral hemorrhagic fever, Viral infection, Viral pneumonia, Viral respiratory tract infection, Viridans group Streptococcus infection, Vision disorder, Vitamin B12 deficiency, Vitamin B6 deficiency, Vitamin C deficiency, Vitamin D deficiency, Vitamin deficiency, Vitamin E deficiency, Vitamin K deficiency, Vitelliform macular dystrophy, Vitiligo, Vitreous hemorrhage, Vitreous humor disease, Von Willebrands disease, VRSA infection, Vulva disease, Vulvar intraepithelial neoplasia, Vulvovaginitis, Wegener granulomatosis, Weight gain, Weight loss, West Nile virus infection, Wet age related macular degeneration, Wheat hypersensitivity, Williams-Beuren syndrome, Wilson disease, Wiskott-Aldrich syndrome, Worm infection, Wound healing, X linked dominant hypophosphatemic rickets, Xerophthalmia, Xerosis, Xerostomia, Yellow fever virus infection, Yersinia pestis infection, Zollinger-Ellison syndrome, and Zygomycete infection.

### Mapping of Genomic Signaling Centers to Elucidate Gene Signaling Networks

[0195] The present invention contemplates the mapping of GSN of each gene in the nucleus and those signaling events as they are connected to other genes through GSCs of INs.

[0196] The map may be used to provide a context for multiple INs, and to identify the signaling pathways that may be altered and consequently the creation of a GSN for every gene. Preparing a map including rules and factors may also be used as drug development platform. For example, genetic variants associated with body mass index (BMI), fasting traits, and insulin resistance may be used to in combination with the map to identify genes contributing to liver disease. Modulation of expression of these genes via perturbations of corresponding GSCs can be advantageous in liver disease therapies.

[0197] In certain embodiments, hepatocytes are used to map a healthy cell population. The liver is a source of many known genetic disease and provides homogeneous primary tissue with high availability. Additionally, most toxicology is done in the liver, which provides drug toxicity insights. In some embodiments, different stimuli, such as those described herein, are contacted with a cell to induce various GSC responses in the hepatocytes. For example, small molecules may be administered to identify liver disease genes whose expression is modulated by the small molecules. These responses provide an understanding of GSCs in liver cells: genomic positions, protein composition, and genome architecture. Alternatively, blood or muscle tissue may be mapped as a healthy population, as a disease model, or as primary disease cells. About 20 million cells are generally needed for accurate ChIP (chromatin immunoprecipitation) analysis. Therefore, in some embodiments, erythroid cells may be used to develop a conditionally immortalized cell system to produce a sufficient biomass for ChIP analysis of a cell with a disease phenotype.

[0198] In fact, a gene signaling network map or atlas may be made for any cell type in the human body.

[0199] In some embodiments, ChIP-seq and ATAC-seq (Assay for Transposase-Accessible Chromatin using sequencing) identifies genomic positions and protein compositions within GSCs to identify ODSC. In certain embodiments, the protein composition of the GSCs may also be identified using ChIP-MS. The relationships among the proteins and associated ChIP-seq and ATAC-seq targets may be used to characterize the GSCs for mapping.

[0200] In certain embodiments, cohesin ChIA-PET (Chromatin Interaction Analysis by Paired-End Tag Sequencing) may be used to decipher genome architecture by identifying cohesin-associated loops through interacting regions of chromatin. Cohesin is found at the boundaries of both CTCF-CTCF loops that form insulated neighborhoods and gene loops that include GSCs.

[0201] In some embodiments, the three-dimensional (3D) architecture is analyzed using ChIA-PET data for structural protein SMC1 (structural maintenance of chromosomes protein 1) in primary human hepatocytes. The SMC complex is associated with enhancer-promoter interactions and CTCF binding sites, as described in Ji et al., 2016, Cell Stem Cell, 18, 262-275, which is hereby incorporated by reference in its entirety. In some embodiments, computational models may be used to provide the foundation for deciphering the signaling code based on the observed genome architecture and changes in composition or genomic position.

### Identifying Changes to Genomic Signaling Centers (GSCs) During Development

[0202] The protein compositions of GSCs have been observed to change during differentiation, as described in Trompouki et al., Cell 147, 577-589 (2011), which is hereby incorporated by reference in its entirety. Cell signaling pathways use activated transcription factors associated with specific GSCs to form ODSCs, which use additional transcription factors and chromatin remodeling complexes to change the chromatin architecture and change the accessibility to certain loci. Therefore, disrupting GSCs that regulate expression of genes associated with a progenitor phenotype, may result in forming other GSCs that regulate expression of genes associated with a differentiated phenotype. In certain embodiments, the changes in the binding profile of GSCs during differentiation of erythroid cells is mapped through the process of erythropoiesis. In certain embodiments, the changes in the binding profile of an ODSC are mapped through differentiation.

Identifying Changes in a GSN from Perturbation of a Genomic Signaling Center

[0203] In certain embodiments, changes in a GSC and regulatory responses are mapped in a cell with a disease phenotype. For example, the disease phenotype is DBA in erythroid cells. In certain embodiments, the disease phenotype is present in a conditionally immortalized cell system. For example, the disease phenotype is modeled in healthy cells using a shRNA to knockdown at least one protein associated with the disease.

### Modeling of Disease

[0204] The present invention may be used to model a disease. Once one or more GSNs have been elucidated or IN and GSNs defined, such gene expression patterns can be compared to the expression profiles of cells or tissues from the disease. Any overlap would allow further insights and interrogation of GSNs not known to be associated with such disease. These results could then be used to drive hypothesis testing in other aspects of the disease population, cells, or tissues.

### Producing Gene Regulatory Mans

[0205] Embodiments herein provide a functionalization of the GSCs to treat disease or to create a platform for drug discovery based on genomic bioinformatics. These embodiments may be used to predict how to influence genetic expression with selective signals and molecules to affect diseases associated with genetic mutations. Existing drugs, reformulated drugs, and new compositions of matter are analyzed to identify perturbation stimuli with selective disease impact. For example, small molecules selected from those described herein may be administered. New drugs may be developed for rare diseases by influencing mechanisms of genetic expression. For example, gene modulation for disease prevention and mitigation through the “transmission code” of a GSC.

[0206] A regulatory map would allow the following to be readily assessable from the identification of a single gene: the other genes in that IN, the binding profile of different GSCs that turn those genes on or off, the context of different GSCs, and the signaling pathways that affect the GSC. For a drug that modulates GSCs, the genes and neighborhoods where the drug acts could also be identified, including all of the modulators that synergize or interfere with the GSC. For example, the maps may be used to confirm that a drug changes the binding profile of an ODSC.

### Deciphering the Signaling Code

[0207] In certain embodiments, the relationships among genomic position/protein compositions of the GSCs and genome architecture of cells and transcriptional responses of disease genes and how these are affected by perturbation stimuli targeting the GSCs are analyzed. For example, disease genes whose expression is modulated in the liver are identified. In certain embodiments, relationships are analyzed after targeting an ODSC with a small molecule.

### Conducting Targeted Small Molecule Screen

[0208] A small molecule screen may be performed to identify small molecules that act through GSCs of an insulated neighborhood to after gene signaling networks which may modulate expression of a select group of disease genes, for example, by administering known signaling agonists/antagonists. Databases are compiled of target disease genes whose insufficient expression contributes to a disease phenotype of interest. Credible hits are identified and validated by the small molecules that are known to work through a GSC and modulate expression of target disease genes.

[0209] Among targets whose reduced expression or haplosufficiency contributes to a disease phenotype, additional genes that experience a change in expression are identified. Orthogonal gene expression assay may be used on cell from multiple donors to validate the targets. These results may be used to derive a set of rules, also referred to as a “signaling code” or a “transmission code”, that permits changes in gene expression due to small molecule compounds.

### Personalized Medicine

[0210] In certain embodiments, the platform described here may be used to define molecules that act through GSCs of an IN to after GSNs associated with a risk allele or any genomic mutation. For example, the platform may be used of define molecules that act through an ODSC. In one aspect, the risk allele is in the liver. Identification of risk alleles in an individual may allow a determination of the safe range for them to occur. Further, cohort based dose escalation based on the prevalence of a risk allele in a population may allow for a design of individual dose escalation once risk alleles are identified in the individual.

### Determining Drug Efficacy

[0211] In certain embodiments, identifying the relationship between changes in GSCs of an IN to alter GSNs and risk alleles present in an individual may be used to determine drug efficacy prior to administration of the drug. In certain embodiments, at least one of the GSCs is an ODSC. For example, the “transmission code” of the GSCs is used to simulate the effects of the drug in the individual.

### Patient Stratification

[0212] In certain embodiments of the methods described herein, patients are stratified or selected for treatment with a stimulus based on screening cells of the patient for response to the stimulus to measure differential gene expression.

### Drug Discovery Platform

[0213] A drug screen may be performed by using a drug that is already known to modulate a specific pathway or GSC. Expression of disease-associated genes is measured to prepare a map of factors that regulate each gene.

### II. Bioinformatics Platform

[0214] In certain embodiments, a bioinformatics platform is developed from the GSN maps and “transmission code” described above. The bioinformatics platform provides a process for developing a therapeutic strategy for an individual or a disease. For example, the platform provides automated discovery of treatment for an individual with a particular set of risk alleles.

### Databases

[0215] In certain embodiments, the bioinformatics platform includes databases of compounds and genetic diseases. For example, the compound database includes the name of the compound, the target protein/gene, and affected signaling pathways. The compounds may be identified from at least one of the following databases: Drugbank, PharmGKB, MedChemExpress, and Selleckchem. Alternatively, the compound database may include the stimuli described herein.

[0216] The database may include the causal gene mutation, disease prevalence, syndrome, and pathogenesis. For example, the genetics disease database contains diseases associated with the liver and/or blood. The gene associated with a disease may be selected from one of the following databases: CTD, disease ontology, and disease signature genes. The signaling pathways and functional elements may be selected from the following next generation sequencing databases: ENCODE and GTEx. Comprehensive compound information may be used to identify compounds, annotate disease association genes through published NGS data. Identifying patterns Will allow for predicting how a compound will behave in a subject.

[0217] In some embodiments, a database system of all GSNs is contemplated. Such database system may comprise hardware and software, a user interface and database storage. The database may be connected via any means to the cloud or stored for cloud computing. Such connectivities may be wireless and may be implemented on standard computer hardware such as desktops or laptops but may also be implemented on PDA (personal display devices) such as cell phones and the like.

### Locating Occupancy-Dependent Signaling Centers

[0218] In certain embodiments, locations ODSCs are characterized by region of the genome bound by(i) at least 2 signaling proteins and comprises: (ii) a H3K27 chemical modification, or independently at least one of a bromodomain-containing protein (Brd), a transcriptional coactivator, and at least two master transcription factors bound to the region. The transcriptional coactivator is histone acetyltransferase p300. In additional embodiments, the chemical modification is H3K27ac.

[0219] In certain embodiments, ChIP-seq is used to identify the presence of the characteristics of an ODSC. Alternatively, ATAC-seq is used to identify the presence of the characteristics of an ODSC. Examples of locations of ODSCs include the locations in Tables 43-67. In certain embodiments, the nucleic acid sequence for the region of the genome is selected from one of SEQ ID NO: 32,627-71,281.

### Prioritization of Genome Interactions

[0220] In certain embodiments of the platform described herein, machine learning is used to provide in silico prioritization of genome interactions, estimates of confidence for an interaction, and an iterative/systemic framework for identifying previously unidentified interactions. Determinations established through machine learning have been previously observed to be translatable to other areas. In certain embodiments of the platform described herein, machine learning is used to develop an automated system to identify patterns too complex for naïve observation and answer questions that cannot be tested experimentally.

[0221] In certain embodiments, machine learning may be used to predict how signaling pathways control gene expression levels. For example, a model may be designed to correlate signaling pathways with gene expression based on existing sample datasets. The model is then trained iteratively using sets of training data and validation data. The trained model is used for predicting pathway to gene expression correlations, for example, identifying which pathway controls a targeted set of genes. In certain embodiments, machine learning may also be used to predict how compounds impact signaling pathways.

[0222] In certain embodiments, machine learning may be used to predict similarity of a compound to a profiled library, such as the databases of compounds described herein. For example, features of the new compound may be projected onto a latent space and clustered against the features of the compounds from the profiled library, and the distance between the features is scored. The feature projection process is iterated based on the scoring result until optimal fitness is reached, and then similary is determined.

[0223] In certain embodiments, machine learning may also be used in drug discovery. For example, machine learning may be used to cluster expression data from diseased tissue or drug treatments. In some embodiments, machine learning may be used for patient stratification by segregating a population by response to stimuli or by studying underlying patterns. In some embodiments, machine learning may be used to guide target selection by predicting the genetic sequence variation on expression/phenotype. In certain embodiments, machine learning may be used to determine whether a compound will cause expression change at a particular gene by predicting causal pathway/gene regulation association and predicting a dynamic range of expression change under control of pathways associated with the compound's effects. In certain embodiments, machine learning may be used to determine the direct and indirect effects of compound treatment by predicting a regulatory cascade of pathway perturbation. In certain embodiments, machine learning may be used to identify key assays to perform when mapping new cell types by calculating prediction gain from variable feature selection. In certain embodiments, machine learning may be used to identify treatments that will translate into different organisms by predicting treatment on other model organisms. In certain embodiments, machine learning may be used to predict which pathway controls a targeted set of disease genes.

### III. Formulations and Delivery

### Pharmaceutical Compositions

[0224] According to the present invention the compositions may be prepared as pharmaceutical compositions. It Will be understood that such compositions necessarily comprise one or more active ingredients and, most often, a pharmaceutically acceptable excipient.

[0225] Relative amounts of the active ingredient, a pharmaceutically acceptable excipient, and/or any additional ingredients in a pharmaceutical composition in accordance with the present disclosure may vary, depending upon the identity, size, and/or condition of the subject being treated and further depending upon the route by which the composition is to be administered. For example, the composition may comprise between 0.1% and 99% (w/w) of the active ingredient. By way of example, the composition may comprise between 0.1% and 100%, e.g., between 0.5 and 50%, between 1-30%, between 5-80%, at least 80% (w/w) active ingredient.

[0226] In some embodiments, the pharmaceutical compositions described herein may comprise at least one payload. As a non-limiting example, the pharmaceutical compositions may contain 1, 2, 3, 4 or 5 payloads.

[0227] Although the descriptions of pharmaceutical compositions provided herein are principally directed to pharmaceutical compositions which are suitable for administration to humans, it will be understood by the skilled artisan that such compositions are generally suitable for administration to any other animal, e.g., to non-human animals, e.g. non-human mammals. Modification of pharmaceutical compositions suitable for administration to humans in order to render the compositions suitable for administration to various animals is well understood, and the ordinarily skilled veterinary pharmacologist can design and/or perform such modification with merely ordinary, if any, experimentation. Subjects to which administration of the pharmaceutical compositions is contemplated include, but are not limited to, humans and/or other primates; mammals, including commercially relevant mammals such as cattle, pigs, horses, sheep, cats, dogs, mice, rats, birds, including commercially relevant birds such as poultry, chickens, ducks, geese, and/or turkeys.

[0228] In some embodiments, compositions are administered to humans, human patients or subjects. In some embodiments, compositions are administered to human cells (e.g., hepatocytes, erythroid cells).

### Formulations

[0229] Formulations of the present invention can include, without limitation, saline, liposomes, lipid nanoparticles, polymers, peptides, proteins, cells transduced with viral vectors (e.g., for transfer or transplantation into a subject) and combinations thereof.

[0230] Formulations of the pharmaceutical compositions described herein may be prepared by any method known or hereafter developed in the art of pharmacology. As used herein the term “pharmaceutical composition” refers to compositions comprising at least one active ingredient and optionally one or more pharmaceutically acceptable excipients.

[0231] In general, such preparatory methods include the step of associating the active ingredient with an excipient and/or one or more other accessory ingredients.

[0232] Formulations of the compositions described herein may be prepared by any method known or hereafter developed in the art of pharmacology. In general, such preparatory methods include the step of bringing the active ingredient into association with an excipient and/or one or more other accessory ingredients, and then, if necessary and/or desirable, dividing, shaping and/or packaging the product into a desired single- or multi-dose unit.

[0233] A pharmaceutical composition in accordance with the present disclosure may be prepared, packaged, and/or sold in bulk, as a single unit dose, and/or as a plurality of single unit doses. As used herein, a “unit dose” refers to a discrete amount of the pharmaceutical composition comprising a predetermined amount of the active ingredient. The amount of the active ingredient is generally equal to the dosage of the active ingredient which would be administered to a subject and/or a convenient fraction of such a dosage such as, for example, one-half or one-third of such a dosage.

[0234] Relative amounts of the active ingredient, the pharmaceutically acceptable excipient, and/or any additional ingredients in a pharmaceutical composition in accordance with the present disclosure may vary, depending upon the identity, size, and/or condition of the subject being treated and further depending upon the route by which the composition is to be administered. For example, the composition may comprise between 0.1% and 99% (w/w) of the active ingredient. By way of example, the composition may comprise between 0.1% and 100%, e.g., between 0.5 and 50%, between 1-30%, between 5-80%, at least 80% (w/w) active ingredient.

### Excipients and Diluents

[0235] In some embodiments, a pharmaceutically acceptable excipient may be at least 95%, at least 96%, at least 97%, at least 98%, at least 99%, or 100% pure. In some embodiments, an excipient is approved for use for humans and for veterinary use. In some embodiments, an excipient may be approved by United States Food and Drug Administration. In some embodiments, an excipient may be of pharmaceutical grade. In some embodiments, an excipient may meet the standards of the United States Pharmacopoeia (USP), the European Pharmacopoeia (EP), the British Pharmacopoeia, and/or the International Pharmacopoeia.

[0236] Excipients, as used herein, include, but are not limited to, any and all solvents, dispersion media, diluents, or other liquid vehicles, dispersion or suspension aids, surface active agents, isotonic agents, thickening or emulsifying agents, preservatives, and the like, as suited to the particular dosage form desired. Various excipients for formulating pharmaceutical compositions and techniques for preparing the composition are known in the art (see Remington: The Science and Practice of Pharmacy, 21st Edition, A. R. Gennaro, Lippincott, Whams & Wilkins, Baltimore, Md., 2006; incorporated herein by reference in its entirety). The use of a conventional excipient medium may be contemplated within the scope of the present disclosure, except insofar as any conventional excipient medium may be incompatible with a substance or its derivatives, such as by producing any undesirable biological effect or otherwise interacting in a deleterious manner with any other component(s) of the pharmaceutical composition.

[0237] Exemplary diluents include, but are not limited to, calcium carbonate, sodium carbonate, calcium phosphate, dicalcium phosphate, calcium sulfate, calcium hydrogen phosphate, sodium phosphate lactose, sucrose, cellulose, microcrystalline cellulose, kaolin, mannitol, sorbitol, inositol, sodium chloride, dry starch, cornstarch, powdered sugar, etc., and/or combinations thereof.

### Inactive Ingredients

[0238] In some embodiments, the pharmaceutical compositions formulations may comprise at least one inactive ingredient. As used herein, the term “inactive ingredient” refers to one or more agents that do not contribute to the activity of the active ingredient of the pharmaceutical composition included in formulations. In some embodiments, all, none or some of the inactive ingredients which may be used in the formulations of the present invention may be approved by the US Food and Drug Administration (FDA).

[0239] In one embodiment, the pharmaceutical compositions comprise at least one inactive ingredient such as, but not limited to, 1,2,6-Hexanetriol; 1,2-Dimyristoyl-Sn-Glycero-3-(Phospho-S-(1-Glycerol)); 1,2-Dimyristoyl-Sn-Glycero-3-Phosphocholine; 1,2-Dioleoyl-Sn-Glycero-3-Phosphocholine; 1,2-Dipalmitoyl-Sn-Glycero-3-(Phospho-Rac-(1-Glycerol)); 1,2-Distearoyl-Sn-Glycero-3-(Phospho-Rac-(1-Glycerol)); 1,2-Distearoyl-Sn-Glycero-3-Phosphocholine; 1-O-Tolylbiguanide; 2-Ethyl-1,6-Hexanediol; Acetic Acid; Acetic Acid, Glacial; Acetic Anhydride; Acetone; Acetone Sodium Bisulfite; Acetylated Lanolin Alcohols; Acetylated Monoglycerides; Acetylcysteine; Acetyltryptophan, DL-; Acrylates Copolymer; Acrylic Acid-Isooctyl Acrylate Copolymer; Acrylic Adhesive 788; Activated Charcoal; Adcote 72A103; Adhesive Tape; Adipic Acid; Aerotex Resin 3730; Alanine; Albumin Aggregated; Albumin Colloidal; Albumin Human; Alcohol; Alcohol, Dehydrated; Alcohol, Denatured; Alcohol, Diluted; Alfadex; Alginic Acid; Alkyl Ammonium Sulfonic Acid Betaine; Alkyl Aryl Sodium Sulfonate; Allantoin; Allyl.Alpha.-Ionone; Almond Oil; Alpha-Terpineol; Alpha-Tocopherol; Alpha-Tocopherol Acetate, D1-; Alpha-Tocopherol, DI-; Aluminum Acetate; Aluminum Chlorhydroxy Allantoinate; Aluminum Hydroxide; Aluminum Hydroxide—Sucrose, Hydrated; Aluminum Hydroxide Gel; Aluminum Hydroxide Gel F 500; Aluminum Hydroxide Gel F 5000; Aluminum Monostearate; Aluminum Oxide; Aluminum Polyester; Aluminum Silicate; Aluminum Starch Octenylsuccinate; Aluminum Stearate; Aluminum Subacetate; Aluminum Sulfate Anhydrous; Amerchol C; Amerchol-Cab; Aminomethylpropanol; Ammonia; Ammonia Solution; Ammonia Solution, Strong; Ammonium Acetate; Ammonium Hydroxide; Ammonium Lauryl Sulfate; Ammonium Nonoxynol-4 Sulfate; Ammonium Salt Of C-12-C-15 Linear Primary Alcohol Ethoxylate; Ammonium Sulfate; Ammonyx; Amphoteric-2; Amphoteric-9; Anethole; Anhydrous Citric Acid; Anhydrous Dextrose; Anhydrous Lactose; Anhydrous Trisodium Citrate; Aniseed Oil; Anoxid Sbn; Antifoam; Antipyrine; Apaflurane; Apricot Kernel Oil Peg-6 Esters; Aquaphor; Arginine; Arlacel; Ascorbic Acid; Ascorbyl Palmitate; Aspartic Acid; Balsam Peru; Barium Sulfate; Beeswax; Beeswax, Synthetic; Beheneth-10; Bentonite; Benzalkonium Chloride; Benzenesulfonic Acid; Benzethonium Chloride; Benzododecinium Bromide; Benzoic Acid; Benzyl Alcohol; Benzyl Benzoate; Benzyl Chloride; Betadex; Bibapcitide; Bismuth Subgallate; Boric Acid; Brocrinat; Butane; Butyl Alcohol; Butyl Ester Of Vinyl Methyl Ether/Maleic Anhydride Copolymer (125000 Mw); Butyl Stearate; Butylated Hydroxyanisole; Butylated Hydroxytoluene; Butylene Glycol; Butylparaben; Butyric Acid; C20-40 Pareth-24; Caffeine; Calcium; Calcium Carbonate; Calcium Chloride; Calcium Gluceptate; Calcium Hydroxide; Calcium Lactate; Calcobutrol; Caldiamide Sodium; Caloxetate Trisodium; Calteridol Calcium; Canada Balsam; Caprylic/Capric Triglyceride; Caprylic/Capric/Stearic Triglyceride; Captan; Captisol; Caramel; Carbomer 1342; Carbomer 1382; Carbomer 934; Carbomer 934p; Carbomer 940; Carbomer 941; Carbomer 980; Carbomer 981; Carbomer Homopolymer Type B (Allyl Pentaerythritol Crosslinked); Carbomer Homopolymer Type C (Allyl Pentaerythritol Crosslinked); Carbon Dioxide; Carboxy Vinyl Copolymer; Carboxymethylcellulose; Carboxymethylcellulose Sodium; Carboxypolymethylene; Carrageenan; Carrageenan Salt; Castor Oil; Cedar Leaf Oil; Cellulose; Cellulose, Microcrystalline; Cerasynt-Se; Ceresin; Ceteareth-12; Ceteareth-15; Ceteareth-30; Cetearyl Alcohol/Ceteareth-20; Cetearyl Ethylhexanoate; Ceteth-10; Ceteth-2; Ceteth-20; Ceteth-23; Cetostearyl Alcohol; Cetrimonium Chloride; Cetyl Alcohol; Cetyl Esters Wax; Cetyl Palmitate; Cetylpyridinium Chloride; Chlorobutanol; Chlorobutanol Hemihydrate; Chlorobutanol, Anhydrous; Chlorocresol; Chloroxylenol; Cholesterol; Choleth; Choleth-24; Citrate; Citric Acid; Citric Acid Monohydrate; Citric Acid, Hydrous; Cocamide Ether Sulfate; Cocamine Oxide; Coco Betaine; Coco Diethanolamide; Coco Monoethanolamide; Cocoa Butter; Coco-Glycerides; Coconut Oil; Coconut Oil, Hydrogenated; Coconut Oil/Palm Kernel Oil Glycerides, Hydrogenated; Cocoyl Caprylocaprate; Cola Nitida Seed Extract; Collagen; Coloring Suspension; Corn Oil; Cottonseed Oil; Cream Base; Creatine; Creatinine; Cresol; Croscarmellose Sodium; Crospovidone; Cupric Sulfate; Cupric Sulfate Anhydrous; Cyclomethicone; Cyclomethicone/Dimethicone Copolyol; Cysteine; Cysteine Hydrochloride; Cysteine Hydrochloride Anhydrous; Cysteine, DI-; D&C Red No. 28; D&C Red No. 33; D&C Red No. 36; D&C Red No. 39; D&C Yellow No. 10; Dalfampridine; Daubert 1-5 Pestr (Matte) 164z; Decyl Methyl Sulfoxide; Dehydag Wax Sx; Dehydroacetic Acid; Dehymuls E; Denatonium Benzoate; Deoxycholic Acid; Dextran; Dextran 40; Dextrin; Dextrose; Dextrose Monohydrate; Dextrose Solution; Diatrizoic Acid; Diazolidinyl Urea; Dichlorobenzyl Alcohol; Dichlorodifluoromethane; Dichlorotetrafluoroethane; Diethanolamine; Diethyl Pyrocarbonate; Diethyl Sebacate; Diethylene Glycol Monoethyl Ether; Diethylhexyl Phthalate; Dihydroxyaluminum Aminoacetate; Diisopropanolamine; Diisopropyl Adipate; Diisopropyl Dilinoleate; Dimethicone 350; Dimethicone Copolyol; Dimethicone Mdx4-4210; Dimethicone Medical Ruid 360; Dimethyl Isosorbide; Dimethyl Sulfoxide; Dimethylaminoethyl Methacrylate—Butyl Methacrylate—Methyl Methacrylate Copolymer; Dimethyldioctadecylammonium Bentonite; Dimethylsiloxane/Methylvinylsiloxane Copolymer; Dinoseb Ammonium Salt; Dipalmitoylphosphatilglycerol, DI-; Dipropylene Glycol; Disodium Cocoamphodiacetate; Disodium Laureth Sulfosuccinate; Disodium Lauryl Sulfosuccinate; Disodium Sulfosalicylate; Disofenin; Divinylbenzene Styrene Copolymer; Dmdm Hydantoin; Docosanol; Docusate Sodium; Duro-Tak 280-2516; Duro-Tak 387-2516; Duro-Tak 80-1196; Duro-Tak 87-2070; Duro-Tak 87-2194; Duro-Tak 87-2287; Duro-Tak 87-2296; Duro-Tak 87-2888; Duro-Tak 87-2979; Edetate Calcium Disodium; Edetate Disodium; Edetate Disodium Anhydrous; Edetate Sodium; Edetic Acid; Egg Phospholipids; Entsufon; Entsufon Sodium; Epilactose; Epitetracycline Hydrochloride; Essence Bouquet 9200; Ethanolamine Hydrochloride; Ethyl Acetate; Ethyl Oleate; Ethylcelluloses; Ethylene Glycol; Ethylene Vinyl Acetate Copolymer; Ethylenediamine; Ethylenediamine Dihydrochloride; Ethylene-Propylene Copolymer; Ethylene-Vinyl Acetate Copolymer (28% Vinyl Acetate); Ethylene-Vinyl Acetate Copolymer (9% Vinylacetate); Ethylhexyl Hydroxystearate; Ethylparaben; Eucalyptol; Exametazime; Fat, Edible; Fat, Hard; Fatty Acid Esters; Fatty Acid Pentaerythriol Ester; Fatty Acids; Fatty Alcohol Citrate; Fatty Alcohols; Fd&C Blue No. 1; Fd&C Green No. 3; Fd&C Red No. 4; Fd&C Red No. 40; Fd&C Yellow No. 10 (Delisted); Fd&C Yellow No. 5; Fd&C Yellow No. 6; Ferric Chloride; Ferric Oxide; Flavor 89-186; Flavor 89-259; Flavor Df-119; Flavor Df-1530; Flavor Enhancer; Flavor Fig 827118; Flavor Raspberry Pfc-8407; Flavor Rhodia Pharmaceutical No. Rf 451; Fluorochlorohydrocarbons; Formaldehyde; Formaldehyde Solution; Fractionated Coconut Oil; Fragrance 3949-5; Fragrance 520a; Fragrance 6.007; Fragrance 91-122; Fragrance 9128-Y; Fragrance 93498g; Fragrance Balsam Pine No. 5124; Fragrance Bouquet 10328; Fragrance Chemoderm 6401-B; Fragrance Chemoderm 6411; Fragrance Cream No. 73457; Fragrance Cs-28197; Fragrance Felton 066m; Fragrance Firmenich 47373; Fragrance Givaudan Ess 9090/1c; Fragrance H-6540; Fragrance Herbal 10396; Fragrance Nj-1085; Fragrance P O Fl-147; Fragrance Pa 52805; Fragrance Pera Derm D; Fragrance Rbd-9819; Fragrance Shaw Mudge U-7776; Fragrance Tf 044078; Fragrance Ungerer Honeysuckle K 2771; Fragrance Ungerer N5195; Fructose; Gadolinium Oxide; Galactose; Gamma Cyclodextrin; Gelatin; Gelatin, Crosslinked; Gelfoam Sponge; Gellan Gum (Low Acyl); Gelva 737; Gentisic Acid; Gentisic Acid Ethanolamide; Gluceptate Sodium; Gluceptate Sodium Dihydrate; Gluconolactone; Glucuronic Acid; Glutamic Acid, DI-; Glutathione; Glycerin; Glycerol Ester Of Hydrogenated Rosin; Glyceryl Citrate; Glyceryllsostearate; Glyceryl Laurate; Glyceryl Monostearate; Glyceryl Oleate; Glyceryl Oleate/Propylene Glycol; Glyceryl Palmitate; Glyceryl Ricinoleate; Glyceryl Stearate; Glyceryl Stearate—Laureth-23; Glyceryl Stearate/Peg Stearate; Glyceryl Stearate/Peg-100 Stearate; Glyceryl Stearate/Peg-40 Stearate; Glyceryl Stearate-Stearamidoethyl Diethylamine; Glyceryl Trioleate; Glycine; Glycine Hydrochloride; Glycol Distearate; Glycol Stearate; Guanidine Hydrochloride; Guar Gum; Hair Conditioner (18n195-1m); Heptane; Hetastarch; Hexylene Glycol; High Density Polyethylene; Histidine; Human Albumin Microspheres; Hyaluronate Sodium; Hydrocarbon; Hydrocarbon Gel, Plasticized; Hydrochloric Acid; Hydrochloric Acid, Diluted; Hydrocortisone; Hydrogel Polymer; Hydrogen Peroxide; Hydrogenated Castor Oil; Hydrogenated Palm Oil; Hydrogenated Palm/Palm Kernel Oil Peg-6 Esters; Hydrogenated Polybutene 635-690; Hydroxide Ion; Hydroxyethyl Cellulose; Hydroxyethylpiperazine Ethane Sulfonic Acid; Hydroxymethyl Cellulose; Hydroxyoctacosanyl Hydroxystearate; Hydroxypropyl Cellulose; Hydroxypropyl Methylcellulose 2906; Hydroxypropyl-Beta-cyclodextrin; Hypromellose 2208 (15000 Mpa.S); Hypromellose 2910 (15000 Mpa.S); Hypromelloses; Imidurea; Iodine; Iodoxamic Acid; Iofetamine Hydrochloride; Irish Moss Extract; Isobutane; Isoceteth-20; Isoleucine; Isooctyl Acrylate; Isopropyl Alcohol; Isopropyl Isostearate; Isopropyl Myristate; Isopropyl Myristate—Myristyl Alcohol; Isopropyl Palmitate; Isopropyl Stearate; Isostearic Acid; Isostearyl Alcohol; Isotonic Sodium Chloride Solution; Jelene; Kaolin; Kathon Cg; Kathon Cg II; Lactate; Lactic Acid; Lactic Acid, Dl-; Lactic Acid, L-; Lactobionic Acid; Lactose; Lactose Monohydrate; Lactose, Hydrous; Laneth; Lanolin; Lanolin Alcohol—Mineral Oil; Lanolin Alcohols; Lanolin Anhydrous; Lanolin Cholesterols; Lanolin Nonionic Derivatives; Lanolin, Ethoxylated; Lanolin, Hydrogenated; Lauralkonium Chloride; Lauramine Oxide; Laurdimonium Hydrolyzed Animal Collagen; Laureth Sulfate; Laureth-2; Laureth-23; Laureth-4; Lauric Diethanolamide; Lauric Myristic Diethanolamide; Lauroyl Sarcosine; Lauryl Lactate; Lauryl Sulfate; Lavandula Angustifolia Flowering Top; Lecithin; Lecithin Unbleached; Lecithin, Egg; Lecithin, Hydrogenated; Lecithin, Hydrogenated Soy; Lecithin, Soybean; Lemon Oil; Leucine; Levulinic Acid; Lidofenin; Light Mineral Oil; Light Mineral Oil (85 Ssu); Limonene, (+/−)-; Lipocol Sc-15; Lysine; Lysine Acetate; Lysine Monohydrate; Magnesium Aluminum Silicate; Magnesium Aluminum Silicate Hydrate; Magnesium Chloride; Magnesium Nitrate; Magnesium Stearate; Maleic Acid; Mannitol; Maprofix; Mebrofenin; Medical Adhesive Modified S-15; Medical Antiform A-F Emulsion; Medronate Disodium; Medronic Acid; Meglumine; Menthol; Metacresol; Metaphosphoric Acid; Methanesulfonic Acid; Methionine; Methyl Alcohol; Methyl Gluceth-10; Methyl Gluceth-20; Methyl Gluceth-20 Sesquistearate; Methyl Glucose Sesquistearate; Methyl Laurate; Methyl Pyrrolidone; Methyl Salicylate; Methyl Stearate; Methylboronic Acid; Methylcellulose (4000 Mpa.S); Methylcelluloses; Methylchloroisothiazolinone; Methylene Blue; Methylisothiazolinone; Methylparaben; Microcrystalline Wax; Mineral Oil; Mono And Diglyceride; Monostearyl Citrate; Monothioglycerol; Multisterol Extract; Myristyl Alcohol; Myristyl Lactate; Myristyl-.Gamma.-Picolinium Chloride; N-(Carbamoyl-Methoxy Peg-40)-1,2-Distearoyl-Cephalin Sodium; N,N-Dimethylacetamide; Niacinamide; Nioxime; Nitric Acid; Nitrogen; Nonoxynol Iodine; Nonoxynol-15; Nonoxynol-9; Norflurane; Oatmeal; Octadecene-1/Maleic Acid Copolymer; Octanoic Acid; Octisalate; Octoxynol-1; Octoxynol-40; Octoxynol-9; Octyldodecanol; Octylphenol Polymethylene; Oleic Acid; Oleth-10/01eth-5; Oleth-2; Oleth-20; Oleyl Alcohol; Oleyl Oleate; Olive Oil; Oxidronate Disodium; Oxyquinoline; Palm Kernel Oil; Palmitamine Oxide; Parabens; Paraffin; Paraffin, White Soft; Parfum Creme 45/3; Peanut Oil; Peanut Oil, Refined; Pectin; Peg 6-32 Stearate/Glycol Stearate; Peg Vegetable Oil; Peg-100 Stearate; Peg-12 Glyceryl Laurate; Peg-120 Glyceryl Stearate; Peg-120 Methyl Glucose Dioleate; Peg-15 Cocamine; Peg-150 Distearate; Peg-2 Stearate; Peg-20 Sorbitan Isostearate; Peg-22 Methyl Ether/Dodecyl Glycol Copolymer; Peg-25 Propylene Glycol Stearate; Peg-4 Dilaurate; Peg-4 Laurate; Peg-40 Castor Oil; Peg-40 Sorbitan Diisostearate; Peg-45/Dodecyl Glycol Copolymer; Peg-5 Oleate; Peg-50 Stearate; Peg-54 Hydrogenated Castor Oil; Peg-6 Isostearate; Peg-60 Castor Oil; Peg-60 Hydrogenated Castor Oil; Peg-7 Methyl Ether; Peg-75 Lanolin; Peg-8 Laurate; Peg-8 Stearate; Pegoxol 7 Stearate; Pentadecalactone; Pentaerythritol Cocoate; Pentasodium Pentetate; Pentetate Calcium Trisodium; Pentetic Acid; Peppermint Oil; Perflutren; Perfume 25677; Perfume Bouquet; Perfume E-1991; Perfume Gd 5604; Perfume Tana 90/42 Scba; Perfume W-1952-1; Petrolatum; Petrolatum, White; Petroleum Distillates; Phenol; Phenol, Liquefied; Phenonip; Phenoxyethanol; Phenylalanine; Phenylethyl Alcohol; Phenylmercuric Acetate; Phenylmercuric Nitrate; Phosphatidyl Glycerol, Egg; Phospholipid; Phospholipid, Egg; Phospholipon 90g; Phosphoric Acid; Pine Needle Oil (Pinus Sylvestris); Piperazine Hexahydrate; Plastibase-50w; Polacrilin; Polidronium Chloride; Poloxamer 124; Poloxamer 181; Poloxamer 182; Poloxamer 188; Poloxamer 237; Poloxamer 407; Poly(Bis(P-Carboxyphenoxy)Propane Anhydride):Sebacic Acid; Poly(Dimethylsiloxane/Methylvinylsiloxane/Methylhydrogensiloxane) Dimethylvinyl Or Dimethylhydroxy Or Trimethyl Endblocked; Poly(DI-Lactic-Co-Glycolic Acid), (50:50; Poly(DI-Lactic-Co-Glycolic Acid), Ethyl Ester Terminated, (50:50; Polyacrylic Acid (250000 Mw); Polybutene (1400 Mw); Polycarbophil; Polyester; Polyester Polyamine Copolymer; Polyester Rayon; Polyethylene Glycol 1000; Polyethylene Glycol 1450; Polyethylene Glycol 1500; Polyethylene Glycol 1540; Polyethylene Glycol 200; Polyethylene Glycol 300; Polyethylene Glycol 300-1600; Polyethylene Glycol 3350; Polyethylene Glycol 400; Polyethylene Glycol 4000; Polyethylene Glycol 540; Polyethylene Glycol 600; Polyethylene Glycol 6000; Polyethylene Glycol 8000; Polyethylene Glycol 900; Polyethylene High Density Containing Ferric Oxide Black (<1%); Polyethylene Low Density Containing Barium Sulfate (20-24%); Polyethylene T; Polyethylene Terephthalates; Polyglactin; Polyglyceryl-3 Oleate; Polyglyceryl-4 Oleate; Polyhydroxyethyl Methacrylate; Polyisobutylene; Polyisobutylene (1100000 Mw); Polyisobutylene (35000 Mw); Polyisobutylene 178-236; Polyisobutylene 241-294; Polyisobutylene 35-39; Polyisobutylene Low Molecular Weight; Polyisobutylene Medium Molecular Weight; Polyisobutylene/Polybutene Adhesive; Polylactide; Polyols; Polyoxyethylene—Polyoxypropylene 1800; Polyoxyethylene Alcohols; Polyoxyethylene Fatty Acid Esters; Polyoxyethylene Propylene; Polyoxyl 20 Cetostearyl Ether; Polyoxyl 35 Castor Oil; Polyoxyl 40 Hydrogenated Castor Oil; Polyoxyl 40 Stearate; Polyoxyl 400 Stearate; Polyoxyl 6 And Polyoxyl 32 Palmitostearate; Polyoxyl Distearate; Polyoxyl Glyceryl Stearate; Polyoxyl Lanolin; Polyoxyl Palmitate; Polyoxyl Stearate; Polypropylene; Polypropylene Glycol; Polyquaternium-10; Polyquaternium-7 (70/30 Acrylamide/Dadmac; Polysiloxane; Polysorbate 20; Polysorbate 40; Polysorbate 60; Polysorbate 65; Polysorbate 80; Polyurethane; Polyvinyl Acetate; Polyvinyl Alcohol; Polyvinyl Chloride; Polyvinyl Chloride-Polyvinyl Acetate Copolymer; Polyvinylpyridine; Poppy Seed Oil; Potash; Potassium Acetate; Potassium Alum; Potassium Bicarbonate; Potassium Bisulfite; Potassium Chloride; Potassium Citrate; Potassium Hydroxide; Potassium Metabisulfite; Potassium Phosphate, Dibasic; Potassium Phosphate, Monobasic; Potassium Soap; Potassium Sorbate; Povidone Acrylate Copolymer; Povidone Hydrogel; Povidone K17; Povidone K25; Povidone K29/32; Povidone K30; Povidone K90; Povidone K90f; Povidone/Eicosene Copolymer; Povidones; Ppg-12/Smdi Copolymer; Ppg-15 Stearyl Ether; Ppg-20 Methyl Glucose Ether Distearate; Ppg-26 Oleate; Product Wat; Proline; Promulgen D; Promulgen G; Propane; Propellant A-46; Propyl Gallate; Propylene Carbonate; Propylene Glycol; Propylene Glycol Diacetate; Propylene Glycol Dicaprylate; Propylene Glycol Monolaurate; Propylene Glycol Monopalmitostearate; Propylene Glycol Palmitostearate; Propylene Glycol Ricinoleate; Propylene Glycol/Diazolidinyl Urea/Methylparaben/Propylparben; Propylparaben; Protamine Sulfate; Protein Hydrolysate; Pvm/Ma Copolymer; Quaternium-15; Quaternium-15 Cis-Form; Quaternium-52; Ra-2397; Ra-3011; Saccharin; Saccharin Sodium; Saccharin Sodium Anhydrous; Safflower Oil; Sd Alcohol 3a; Sd Alcohol 40; Sd Alcohol 40-2; Sd Alcohol 40b; Sepineo P 600; Serine; Sesame Oil; Shea Butter; Silastic Brand Medical Grade Tubing; Silastic Medical Adhesive, Silicone Type A; Silica, Dental; Silicon; Silicon Dioxide; Silicon Dioxide, Colloidal; Silicone; Silicone Adhesive 4102; Silicone Adhesive 4502; Silicone Adhesive Bio-Psa Q7-4201; Silicone Adhesive Bio-Psa Q7-4301; Silicone Emulsion; Silicone/Polyester Film Strip; Simethicone; Simethicone Emulsion; Sipon Ls 20np; Soda Ash; Sodium Acetate; Sodium Acetate Anhydrous; Sodium Alkyl Sulfate; Sodium Ascorbate; Sodium Benzoate; Sodium Bicarbonate; Sodium Bisulfate; Sodium Bisulfite; Sodium Borate; Sodium Borate Decahydrate; Sodium Carbonate; Sodium Carbonate Decahydrate; Sodium Carbonate Monohydrate; Sodium Cetostearyl Sulfate; Sodium Chlorate; Sodium Chloride; Sodium Chloride Injection; Sodium Chloride Injection, Bacteriostatic; Sodium Cholesteryl Sulfate; Sodium Citrate; Sodium Cocoyl Sarcosinate; Sodium Desoxycholate; Sodium Dithionite; Sodium Dodecylbenzenesulfonate; Sodium Formaldehyde Sulfoxylate; Sodium Gluconate; Sodium Hydroxide; Sodium Hypochlorite; Sodium Iodide; Sodium Lactate; Sodium Lactate, L-; Sodium Laureth-2 Sulfate; Sodium Laureth-3 Sulfate; Sodium Laureth-5 Sulfate; Sodium Lauroyl Sarcosinate; Sodium Lauryl Sulfate; Sodium Lauryl Sulfoacetate; Sodium Metabisulfite; Sodium Nitrate; Sodium Phosphate; Sodium Phosphate Dihydrate; Sodium Phosphate, Dibasic; Sodium Phosphate, Dibasic, Anhydrous; Sodium Phosphate, Dibasic, Dihydrate; Sodium Phosphate, Dibasic, Dodecahydrate; Sodium Phosphate, Dibasic, Heptahydrate; Sodium Phosphate, Monobasic; Sodium Phosphate, Monobasic, Anhydrous; Sodium Phosphate, Monobasic, Dihydrate; Sodium Phosphate, Monobasic, Monohydrate; Sodium Polyacrylate (2500000 Mw); Sodium Pyrophosphate; Sodium Pyrrolidone Carboxylate; Sodium Starch Glycolate; Sodium Succinate Hexahydrate; Sodium Sulfate; Sodium Sulfate Anhydrous; Sodium Sulfate Decahydrate; Sodium Sulfite; Sodium Sulfosuccinated Undecyclenic Monoalkylolamide; Sodium Tartrate; Sodium Thioglycolate; Sodium Thiomalate; Sodium Thiosulfate; Sodium Thiosulfate Anhydrous; Sodium Trimetaphosphate; Sodium Xylenesulfonate; Somay 44; Sorbic Acid; Sorbitan; Sorbitan Isostearate; Sorbitan Monolaurate; Sorbitan Monooleate; Sorbitan Monopalmitate; Sorbitan Monostearate; Sorbitan Sesquioleate; Sorbitan Trioleate; Sorbitan Tristearate; Sorbitol; Sorbitol Solution; Soybean Flour; Soybean Oil; Spearmint Oil; Spermaceti; Squalane; Stabilized Oxychloro Complex; Stannous 2-Ethylhexanoate; Stannous Chloride; Stannous Chloride Anhydrous; Stannous Fluoride; Stannous Tartrate; Starch; Starch 1500, Pregelatinized; Starch, Corn; Stearalkonium Chloride; Stearalkonium Hectorite/Propylene Carbonate; Stearamidoethyl Diethylamine; Steareth-10; Steareth-100; Steareth-2; Steareth-20; Steareth-21; Steareth-40; Stearic Acid; Stearic Diethanolamide; Stearoxytrimethylsilane; Steartrimonium Hydrolyzed Animal Collagen; Stearyl Alcohol; Sterile Water For Inhalation; Styrene/Isoprene/Styrene Block Copolymer; Succimer; Succinic Acid; Sucralose; Sucrose; Sucrose Distearate; Sucrose Polyesters; Sulfacetamide Sodium; Sulfobutylether.Beta.-Cyclodextrin; Sulfur Dioxide; Sulfuric Acid; Sulfurous Acid; Surfactol Qs; Tagatose, D-; Talc; Tall Oil; Tallow Glycerides; Tartaric Acid; Tartaric Acid, DI-; Tenox; Tenox-2; Tert-Butyl Alcohol; Tert-Butyl Hydroperoxide; Tert-Butylhydroquinone; Tetrakis(2-Methoxyisobutylisocyanide)Copper(I) Tetrafluoroborate; Tetrapropyl Orthosilicate; Tetrofosmin; Theophylline; Thimerosal; Threonine; Thymol; Tin; Titanium Dioxide; Tocopherol; Tocophersolan; Total parenteral nutrition, lipid emulsion; Triacetin; Tricaprylin; Trichloromonofluoromethane; Trideceth-10; Triethanolamine Lauryl Sulfate; Trifluoroacetic Acid; Triglycerides, Medium Chain; Trihydroxystearin; Trilaneth-4 Phosphate; Trilaureth-4 Phosphate; Trisodium Citrate Dihydrate; Trisodium Hedta; Triton 720; Triton X-200; Trolamine; Tromantadine; Tromethamine (TRIS); Tryptophan; Tyloxapol; Tyrosine; Undecylenic Acid; Union 76 Amsco-Res 6038; Urea; Valine; Vegetable Oil; Vegetable Oil Glyceride, Hydrogenated; Vegetable Oil, Hydrogenated; Versetamide; Viscarin; Viscose/Cotton; Vitamin E; Wax, Emulsifying; Wecobee Fs; White Ceresin Wax; White Wax; Xanthan Gum; Zinc; Zinc Acetate; Zinc Carbonate; Zinc Chloride; and Zinc Oxide.

[0240] Pharmaceutical composition formulations disclosed herein may include cations or anions. In one embodiment, the formulations include metal cations such as, but not limited to, Zn2+, Ca2+, Cu2+, Mn2+, Mg+ and combinations thereof. As a non-limiting example, formulations may include polymers and complexes with a metal cation (See e.g., U.S. Pat. Nos. 6,265,389 and 6,555,525, each of which is herein incorporated by reference in its entirety).

[0241] Formulations of the invention may also include one or more pharmaceutically acceptable salts. As used herein, “pharmaceutically acceptable salts” refers to derivatives of the disclosed compounds wherein the parent compound is modified by converting an existing acid or base moiety to its salt form (e.g., by reacting the free base group with a suitable organic acid). Examples of pharmaceutically acceptable salts include, but are not limited to, mineral or organic acid salts of basic residues such as amines; alkali or organic salts of acidic residues such as carboxylic acids; and the like. Representative acid addition salts include acetate, acetic acid, adipate, alginate, ascorbate, aspartate, benzenesulfonate, benzene sulfonic acid, benzoate, bisulfate, borate, butyrate, camphorate, camphorsulfonate, citrate, cyclopentanepropionate, digluconate, dodecylsulfate, ethanesulfonate, fumarate, glucoheptonate, glycerophosphate, hemisulfate, heptonate, hexanoate, hydrobromide, hydrochloride, hydroiodide, 2-hydroxy-ethanesulfonate, lactobionate, lactate, laurate, lauryl sulfate, malate, maleate, malonate, methanesulfonate, 2-naphthalenesulfonate, nicotinate, nitrate, oleate, oxalate, palmitate, pamoate, pectinate, persulfate, 3-phenylpropionate, phosphate, picrate, pivalate, propionate, stearate, succinate, sulfate, tartrate, thiocyanate, toluenesulfonate, undecanoate, valerate salts, and the like. Representative alkali or alkaline earth metal salts include sodium, lithium, potassium, calcium, magnesium, and the like, as well as nontoxic ammonium, quaternary ammonium, and amine cations, including, but not limited to ammonium, tetramethylammonium, tetraethylammonium, methylamine, dimethylamine, trimethylamine, triethylamine, ethylamine, and the like. The pharmaceutically acceptable salts of the present disclosure include the conventional non-toxic salts of the parent compound formed, for example, from non-toxic inorganic or organic acids.

[0242] Solvates may be prepared by crystallization, recrystallization, or precipitation from a solution that includes organic solvents, water, or a mixture thereof. Examples of suitable solvents are ethanol, water (for example, mono-, di-, and tri-hydrates), N-methylpyrrolidinone (NMP), dimethyl sulfoxide (DMSO), N,N′-dimethylformamide (DMF), N,N′-dimethylacetamide (DMAC), 1,3-dimethyl-2-imidazolidinone (DMEU), 1,3-dimethyl-3,4,5,6-tetrahydro-2-(1H)-pyrimidinone (DMPU), acetonitrile (ACN), propylene glycol, ethyl acetate, benzyl alcohol, 2-pyrrolidone, benzyl benzoate, and the like. When water is the solvent, the solvate is referred to as a “hydrate.”

### Vectors

[0243] In some embodiments, perturbation stimulus of the present invention may be encoded in a vector or contained within a vector (e.g., a recombinant expression vector). Such perturbation stimulus may be any nucleic acid or proteinaceous molecule necessary to carry out the aspects of the methods described herein.

[0244] In one embodiment, the nucleic acid encoding a site-specific nuclease (e.g., a CRISPR/Cas enzyme), a guide nucleic acid, and/or a hybridizing oligonucleotide necessary to carry out the aspects of the methods of the disclosure may be encoded in or contained within in a vector.

[0245] The term “vector” refers to a vehicle, preferably a nucleic acid molecule, capable of transporting another nucleic acid to which it has been linked. One type of vector is a “plasmid,” which refers to a circular double-stranded DNA loop into which additional nucleic acid segments can be ligated. Another type of vector is a viral vector, wherein additional nucleic acid segments can be ligated into the viral genome. Certain vectors are capable of autonomous replication in a host cell into which they are introduced (e.g., bacterial vectors having a bacterial origin of replication and episomal mammalian vectors). Other vectors (e.g., non-episomal mammalian vectors) are integrated into the genome of a host cell upon introduction into the host cell, and thereby are replicated along with the host genome.

[0246] In some embodiments, vectors can be capable of directing the expression of nucleic acids to which they are operatively linked. Such vectors are referred to herein as “recombinant expression vectors”, or more simply “expression vectors”, which serve equivalent functions. Expression vectors that may be used to carry out certain aspects of the present invention include, but are not limited to, viral vectors based on vaccinia virus, poliovirus, adenovirus, adeno-associated virus, SV40, herpes simplex virus, human immunodeficiency virus, retrovirus (e.g., Murine Leukemia Virus, spleen necrosis virus, and vectors derived from retroviruses such as Rous Sarcoma Virus, Harvey Sarcoma Virus, avian leukosis virus, a lentivirus, human immunodeficiency virus, myeloproliferative sarcoma virus, and mammary tumor virus) and other recombinant vectors. Additional vectors contemplated for eukaryotic target cells include, but are not limited to, the vectors pXT1, pSG5, pSVK3, pBPV, pMSG, and pSVLSV40 (Pharmacia). Other vectors can be used so long as they are compatible with the host cell.

### IV. Administration and Dosing

### Administration

[0247] In one aspect of the method, the pharmaceutical composition may be administered via a route such as, but not limited to, enteral (into the intestine), gastroenteral, epidural (into the dura matter), oral (by way of the mouth), transdermal, peridural, intracerebral (into the cerebrum), intracerebroventricular (into the cerebral ventricles), epicutaneous (application onto the skin), intradermal, (into the skin itself), subcutaneous (under the skin), nasal administration (through the nose), intravenous (into a vein), intravenous bolus, intravenous drip, intraarterial (into an artery), intramuscular (into a muscle), intracardiac (into the heart), intraosseous infusion (into the bone marrow), intrathecal (into the spinal canal), intraperitoneal, (infusion or injection into the peritoneum), intravesical infusion, intravitreal, (through the eye), intracavernous injection (into a pathologic cavity) intracavitary (into the base of the penis), intravaginal administration, intrauterine, extra-amniotic administration, transdermal (diffusion through the intact skin for systemic distribution), transmucosal (diffusion through a mucous membrane), transvaginal, insufflation (snorting), sublingual, sublabial, enema, eye drops (onto the conjunctiva), in ear drops, auricular (in or by way of the ear), buccal (directed toward the cheek), conjunctival, cutaneous, dental (to a tooth or teeth), electro-osmosis, endocervical, endosinusial, endotracheal, extracorporeal, hemodialysis, infiltration, interstitial, intra-abdominal, intra-amniotic, intra-articular, intrabiliary, intrabronchial, intrabursal, intracartilaginous (within a cartilage), intracaudal (within the cauda equine), intracisternal (within the cisterna magna cerebellomedularis), intracorneal (within the cornea), dental intracornal, intracoronary (within the coronary arteries), intracorporus cavernosum (within the dilatable spaces of the corporus cavernosa of the penis), intradiscal (within a disc), intraductal (within a duct of a gland), intraduodenal (within the duodenum), intradural (within or beneath the dura), intraepidermal (to the epidermis), intraesophageal (to the esophagus), intragastric (within the stomach), intragingival (within the gingivae), intraileal (within the distal portion of the small intestine), intralesional (within or introduced directly to a localized lesion), intraluminal (within a lumen of a tube), intralymphatic (within the lymph), intramedullary (within the marrow cavity of a bone), intrameningeal (within the meninges), intramyocardial (within the myocardium), intraocular (within the eye), intraovarian (within the ovary), intrapericardial (within the pericardium), intrapleural (within the pleura), intraprostatic (within the prostate gland), intrapulmonary (within the lungs or its bronchi), intrasinal (within the nasal or periorbital sinuses), intraspinal (within the vertebral column), intrasynovial (within the synovial cavity of a joint), intratendinous (within a tendon), intratesticular (within the testicle), intrathecal (within the cerebrospinal fluid at any level of the cerebrospinal axis), intrathoracic (within the thorax), intratubular (within the tubules of an organ), intratumor (within a tumor), intratympanic (within the aurus media), intravascular (within a vessel or vessels), intraventricular (within a ventricle), iontophoresis (by means of electric current where ions of soluble salts migrate into the tissues of the body), irrigation (to bathe or flush open wounds or body cavities), laryngeal (directly upon the larynx), nasogastric (through the nose and into the stomach), occlusive dressing technique (topical route administration which is then covered by a dressing which occludes the area), ophthalmic (to the external eye), oropharyngeal (directly to the mouth and pharynx), parenteral, percutaneous, periarticular, peridural, perineural, periodontal, rectal, respiratory (within the respiratory tract by inhaling orally or nasally for local or systemic effect), retrobulbar (behind the pons or behind the eyeball), intramyocardial (entering the myocardium), soft tissue, subarachnoid, subconjunctival, submucosal, topical, transplacental (through or across the placenta), transtracheal (through the wall of the trachea), transtympanic (across or through the tympanic cavity), ureteral (to the ureter), urethral (to the urethra), vaginal, caudal block, diagnostic, nerve block, biliary perfusion, cardiac perfusion, photopheresis and spinal.

[0248] Modes of administration include injection, infusion, instillation, and/or ingestion. “Injection” includes, without limitation, intravenous, intramuscular, intra-arterial, intrathecal, intraventricular, intracapsular, intraorbital, intracardiac, intradermal, intraperitoneal, transtracheal, subcutaneous, subcuticular, intraarticular, sub capsular, subarachnoid, intraspinal, intracerebro spinal, and intrasternal injection and infusion. In some examples, the route is intravenous. For the delivery of cells, administration by injection or infusion can be made.

[0249] The cells can be administered systemically. The phrases “systemic administration”, “administered systemically”, “peripheral administration”, and “administered peripherally” refer to the administration other than directly into a target site, tissue, or organ, such that it enters, instead, the subject's circulatory system and, thus, is subject to metabolism and other like processes.

### Dosing

[0250] The term “effective amount” refers to the amount of the active ingredient needed to prevent or alleviate at least one or more signs or symptoms of a specific disease and/or condition, and relates to a sufficient amount of a composition to provide the desired effect. The term “therapeutically effective amount” therefore refers to an amount of active ingredient or a composition comprising the active ingredient that is sufficient to promote a particular effect when administered to a typical subject. An effective amount would also include an amount sufficient to prevent or delay the development of a symptom of the disease, after the course of a symptom of the disease (for example but not limited to, slow the progression of a symptom of the disease), or reverse a symptom of the disease. It is understood that for any given case, an appropriate “effective amount” can be determined by one of ordinary skill in the art using routine experimentation.

[0251] The pharmaceutical, diagnostic, or prophylactic compositions of the present invention may be administered to a subject using any amount and any route of administration effective for preventing, treating, managing, or diagnosing diseases, disorders and/or conditions. The exact amount required will vary from subject to subject, depending on the species, age, and general condition of the subject, the severity of the disease, the particular composition, its mode of administration, its mode of activity, and the like. The subject may be a human, a mammal, or an animal. Compositions in accordance with the invention are typically formulated in unit dosage form for ease of administration and uniformity of dosage. ft will be understood, however, that the total daily usage of the compositions of the present invention may be decided by the attending physician within the scope of sound medical judgment. The specific therapeutically effective, prophylactically effective, or appropriate diagnostic dose level for any particular individual will depend upon a variety of factors including the disorder being treated and the severity of the disorder; the activity of the specific payload employed; the specific composition employed; the age, body weight, general health, sex and diet of the patient; the time of administration, and route of administration; the duration of the treatment; drugs used in combination or coincidental with the active ingredient; and like factors well known in the medical arts.

[0252] In certain embodiments, pharmaceutical compositions in accordance with the present invention may be administered at dosage levels sufficient to deliver from about 0.01 mg/kg to about 100 mg/kg, from about 0.01 mg/kg to about 0.05 mg/kg, from about 0.05 mg/kg to about 0.5 mg/kg, from about 0.01 mg/kg to about 50 mg/kg, from about 0.1 mg/kg to about 40 mg/kg, from about 0.5 mg/kg to about 30 mg/kg, from about 0.01 mg/kg to about 10 mg/kg, from about 0.1 mg/kg to about 10 mg/kg, or from about 1 mg/kg to about 25 mg/kg, of subject body weight per day, one or more times a day, to obtain the desired therapeutic, diagnostic, or prophylactic, effect.

[0253] The desired dosage of the composition present invention may be delivered only once, three times a day, two times a day, once a day, every other day, every third day, every week, every two weeks, every three weeks, or every four weeks. In certain embodiments, the desired dosage may be delivered using multiple administrations (e.g., two, three, four, five, six, seven, eight, nine, ten, eleven, twelve, thirteen, fourteen, or more administrations). When multiple administrations are employed, split dosing regimens such as those described herein may be used. As used herein, a “split dose” is the division of “single unit dose” or total daily dose into two or more doses, e.g., two or more administrations of the “single unit dose”. As used herein, a “single unit dose” is a dose of any therapeutic administered in one dose/at one time/single route/single point of contact, i.e., single administration event.

### V. Definitions

[0254] The term “biologic”, as used herein, refers to a medical product made from a variety of natural sources such as micro-organism, plant, animal, or human cells.

[0255] The term “binding profile”, as used herein, refers to the context-specific combination of biomolecules or factors identified to bind a GSC that interact to form a three-dimensional macrocomplex. Factors may include master transcription factors, signaling transcription factors, chromatin remodelers, and the like.

[0256] The term “boundary”, as used herein, refers to a point, limit, or range indicating where a feature, element, or property ends or begins. The term “insulated neighborhood boundary” or “IN boundary”, as used herein, refers to a boundary that delimits an insulated neighborhood (IN) on a chromosome. The term “primary downstream boundary”, as used herein, refers to the IN boundary located downstream of a primary neighborhood gene. The term “primary upstream boundary”, as used herein, refers to the IN boundary located upstream of a primary neighborhood gene. The term “secondary downstream boundary”, as used herein, refers to the downstream boundary of a secondary loop within a primary N. The term “secondary upstream boundary”, as used herein, refers to the upstream boundary of a secondary loop within a primary IN.

[0257] The term “borderline product”, as used herein, refers to products that do not fall within or belong to a specific category.

[0258] The term “disease-associated gene”, as used herein, refers to genes, either protein-coding or non-protein coding, including an allele whose mutation has been shown to result in the disease phenotype.

[0259] The term “downstream neighborhood gene”, as used herein, refers to a gene downstream of primary neighborhood gene that may be located within the same IN as the primary neighborhood gene.

[0260] The term “drug”, as used herein, refers to a substance other than food intended for use in the diagnosis, cure, alleviation, treatment, or prevention of disease and intended to affect the structure or any function of the body.

[0261] The term “enhancer”, as used herein, refers to regulatory DNA sequences that, when bound by transcription factors, enhance the transcription of an associated gene.

[0262] The term “gene”, as used herein, refers to a unit or segment of the genomic architecture of an organism, e.g., a chromosome. Genes may be coding or non-coding. Genes may be encoded as contiguous or non-contiguous polynucleotides. Genes may be DNA or RNA.

[0263] Historically, the term “signaling center” has been used to describe a group of cells responding to changes in the cellular environment. See, Guger et al., Developmental Biology 172: 115-125 (1995), which is incorporated by reference herein in its entirety. Similarly, the term “signaling center”, as used herein, refers to a defined region of a living organism interacting with a defined set of biomolecules, such as signaling proteins or signaling molecules (e.g., transcription factors) to regulate gene expression in a context-specific manner.

[0264] Specifically, the term “genomic signaling center” or “GSC”, i.e., a “signaling center”, as used herein, refers to regions within INs that include a context-specific combinatorial assembly of signaling molecules/signaling proteins that participate in the regulation of the genes within that IN or among more than one IN.

[0265] The term “genomic system architecture”, as used herein, refers to the organization of an individual's genome and includes chromosomes, topologically associating domains (TADs), and INs.

[0266] The term “herbal preparation”, as used herein, refers to herbal medicines that contain parts of plants, or other plant materials, or combinations as active ingredients.

[0267] The term “insulated neighborhood” or “IN”, as used herein, refers to chromosome structure formed by the looping of two interacting sites in the chromosome sequence that may comprise CCCTC-binding factor (CTCF) co-occupied by cohesin and affect the expression of genes in the IN as well as those genes in the vicinity of the IN.

[0268] The term “insulator”, as used herein, refers to regulatory elements that block the ability of an enhancer to activate a gene when located between them and contribute to specific enhancer-gene interactions.

[0269] The term “location” refers to a position of interest (i.e., base number or residue number) in a nucleic acid molecule or protein relative to the position in another reference nucleic acid molecule or protein. Corresponding positions can be determined by comparing and aligning sequences to maximize the number of matching nucleotides or residues, for example, such that identity between the sequences is greater than 90%, greater than 95%, greater than 96%, greater than 97%, greater than 98% or greater than 99%. The position of interest is then given the number assigned in the reference nucleic acid molecule. For example, if a particular polymorphism in Gene-X occurs at nucleotide 2073 of SEQ ID No. X, to identify the corresponding nucleotide in another allele or isolate, the sequences are aligned and then the position that lines up with 2073 is identified. Since various alleles may be of different length, the position designated 2073 may not be nucleotide 2073, but instead is at a position that “corresponds” to the position in the reference sequence.

[0270] The term “master transcription factor”, as used herein, refers to signaling molecules/signaling proteins which alter, whether to increase or decrease, the transcription of a target gene, e.g., a neighborhood gene and establish cell-type specific enhancers. Master transcription factors recruit additional signaling proteins, such as other transcription factors to enhancers to form GSCs.

[0271] The term “minimal insulated neighborhood” or “minimal IN”, as used herein, refers to an IN having at least one neighborhood gene and associated regulatory sequence region or regions (RSRs) which facilitate the expression or repression of the neighborhood gene such as promoter and/or enhancer and/or repressor regions, and the like.

[0272] The term “neighborhood gene”, as used herein, refers to a gene localized within an insulated neighborhood.

[0273] The term “occupancy-dependent signaling center” or “ODSC”, as used herein, refers to a RSR in the genome including binding by (i) at least 2 signaling proteins and independently (ii) at least one of a H3K27 chemical modification or binding by at least one of a bromodomain-containing protein (Brd), a transcriptional coactivator, or two or more master transcription factors. Occupancy-dependent signaling centers mediate interactions among genomic regulatory elements.

[0274] The term “penetrance”, as used herein, refers to the proportion of individuals carrying a particular variant of a gene (e.g., mutation, allele or generally a genotype, whether wild type or not) that also exhibits an associated trait (phenotype) of that variant gene and in some situations is measured as the proportion of individuals with the mutation who exhibit clinical symptoms thus existing on a continuum.

[0275] The term “primary neighborhood gene” as used herein, refers to a gene which is most commonly found within a specific IN along a chromosome.

[0276] The term “promoter” as used herein, refers to a DNA sequence that defines where transcription of a gene by RNA polymerase begins and defines the direction of transcription indicating which DNA strand will be transcribed.

[0277] The term “regulatory sequence regions” or “RSRs”, as used herein, include but are not limited to regions, sections or zones along a chromosome whereby interactions with signaling molecules/signaling proteins occur in order to after expression of a neighborhood gene.

[0278] The term “repressor”, as used herein, refers to any protein that binds to DNA and therefore regulates the expression of genes by decreasing the rate of transcription.

[0279] The terms “signaling molecule” or “signaling protein”, as used herein, refers to any entity, whether protein, nucleic acid (DNA or RNA), organic small molecule, lipid, sugar or other biomolecule, which interacts directly, or indirectly, with a RSR on a chromosome.

[0280] The term “signaling transcription factor”, as used herein, refers to signaling molecules/signaling proteins which alter, whether to increase or decrease, the transcription of a target gene, e.g., a neighborhood gene and also act as cell-cell signaling molecules/signaling proteins.

[0281] The term “small molecule”, as used herein, refers to a low molecular weight drug, i.e. <900 Daltons organic compound with a size on the order of 10⁻⁹ m that may help regulate a biological process.

[0282] The term “super-enhancers”, as used herein, refers to are large clusters of transcriptional enhancers that drive expression of genes that define cell identity.

[0283] The term “therapeutic agent”, as used herein, refers to a substance that has the ability to cure a disease or ameliorate the symptoms of the disease.

[0284] The term “therapeutic or treatment outcome”, as used herein, refers to any result or effect (whether positive, negative or null) which arises as a consequence of the perturbation of a GSC or GSN. Examples of therapeutic outcomes include, but are not limited to, improvement or amelioration of the unwanted or negative conditions associated with a disease or disorder, lessening of side effects or symptoms, cure of a disease or disorder, or any improvement associated with the perturbation of a GSC or GSN.

[0285] The term “topologically associating domains” (TADs), as used herein, refers to structures that represent a modular organization of the chromatin and have boundaries that are shared by the different cell types of an organism.

[0286] The term “transcription factors”, as used herein, refers to signaling molecules/signaling proteins which alter, whether to increase or decrease, the transcription of a target gene, e.g., a neighborhood gene.

[0287] The term “therapeutic or treatment liability”, as used herein, refers to a feature or characteristic associated with a treatment or treatment regime which is unwanted, harmful or which mitigates the therapies positive outcomes. Examples of treatment liabilities include for example toxicity, poor half-life, poor bioavailability, lack of or loss of efficacy or pharmacokinetic or pharmacodynamic risks.

[0288] The term “upstream neighborhood gene”, as used herein, refers to a gene upstream of a primary neighborhood gene that may be located within the same insulated neighborhood as the primary neighborhood gene.

[0289] The term “signaling signature”, as used herein, refers to signaling interations within a gene signaling network associated with a genomic signaling center in an insulated neighborhood.

[0290] Described herein are compositions and methods for perturbation of GSCs or entire GSNs. Further described herein are compositions and methods for modulating gene expression in a cell by altering the binding profile of an ODSC. The details of one or more embodiments of the invention are set forth in the accompanying description below. Although any materials and methods similar or equivalent to those described herein can be used in the practice or testing of the present invention, the preferred materials and methods are now described. Other features, objects and advantages of the invention will be apparent from the description. In the description, the singular forms also include the plural unless the context clearly dictates otherwise. Unless defined otherwise, all technical and scientific terms used herein have the same meaning as commonly understood by one of ordinary skill in the art to which this invention belongs. In the case of conflict, the present description will control.

[0291] The present invention is further illustrated by the following non-limiting examples.

### VI. Examples

### Example 1. Experimental Procedures

[0292] A. Erythroid Cell Culture

[0293] CD34⁺ cells were isolated from cord blood and peripheral blood (about 1×10⁶). Cells were expanded over 11 days to collect a total of 100×10⁶ cord blood cells and 25×10⁶ peripheral blood cells. The cells were conditionally immortalized as described below on the third day, differentiated in erythroid medium and collected on the seventh day (about 400×10⁶ cord blood CD34⁺ cells or about 100×10⁶ peripheral blood CD34⁺ cells).

[0294] B. Hepatocyte Cell Culture

[0295] Cryopreserved hepatocytes were cultured in plating media for 16 hours, transferred to maintenance media for 4 hours. Cultured on serum-free media for 2 hours, then a compound was added. The hepatocytes were maintained on the serum-free media for 16 hours prior to gene expression analysis. Primary Human Hepatocytes were stored in the vapor phase of a liquid nitrogen freezer (about −130° C.).

[0296] To seed the primary human hepatocytes, vials of cells were retrieved from the LN₂ freezer, thawed in a 37° C. water bath, and swirled gently until only a shyer of ice remains. Using a 10 ml serological pipet, cells were gently pipetted out of the vial and gently pipetted down the side of 50 mL conical tube containing 20 mL cold thaw medium. The vial was rinsed with about 1 mL of thaw medium, and the rinse was added to the conical tube. Up to 2 vials may be added to one tube of 20 mL thaw medium.

[0297] The conical tube(s) were gently inverted 2-3 times and centrifuged at 100 g for 10 minutes at 4° C. with reduced braking (e.g. 4 out of 9). The thaw medium slowly was slowly aspirated to avoid the pellet. 4 mL cold plating medium was added slowly down the side (8 mL if combined 2 vials to 1 tube), and the vial was inverted gently several times to resuspend cells.

[0298] Cells were kept on ice until 100 μl of well-mixed cells were added to 400 μl diluted Trypan blue and mixed by gentle inversion. They were counted using a hemocytometer (or Cellometer), and viability and viable cells/mL were noted. Cells were diluted to a desired concentration and seeded on collagen 1-coated plates. Cells were pipetted slowly and gently onto plate, only 1-2 wells at a time. The remaining cells were mixed in the tubes frequently by gentle inversion. Cells were seeded at about 8.5×10⁶ cells per plate in 6 mL cold plating medium (10 cm). Alternatively, 1.5×10⁶ per well for a 6-well plate (1 mL medium/well); 7×10⁵ per well for 12-well plate (0.5 mL/well); or 3.75×10⁵ per well fora 24-well plate (0.5 mL/well)

[0299] After all cells and medium were added to the plate, the plate was transferred to an incubator (37° C., 5% CO2, about 90% humidity) and rocked forwards and backwards, then side to side several times each to distribute cells evenly across the plate or wells. The plate(s) were rocked again every 15 minutes for the first hour post-plating. About 4 hours post-plating (or first thing the morning if cells were plated in the evening), cells were washed once with PBS and complete maintenance medium was added. The primary human hepatocytes were maintained in the maintenance medium and transferred to fresh medium daily.

[0300] C. Starvation and Compound Treatment of Hepatocytes

[0301] Two to three hours before treatment, cells cultured as described above were washed with PBS and the medium was changed to either: fresh maintenance medium (complete) or modified maintenance medium 4b.

[0302] Compound stocks were prepared at 1000× final concentration and added in a 2-step dilution to the medium to reduce risk of a compound precipitating out of solution when added to the cells, and to ensure reasonable pipetting volumes. One at a time, each compound was first diluted 10-fold in warm (about 37° C.) modified maintenance medium (initial dilution=1D), mixed by vortexing, and the ID was diluted 100-fold into the cell culture (e.g. 5.1 μl into 1 well of a 24-well plate containing 0.5 mL medium). The plate was mixed by carefully swirling and after all wells were treated and returned to the incubator overnight. If desired, separate plates/wells were treated with vehicle-only controls and/or positive controls. If using multi-well plates, controls were included on each plate. After about 18 hours, cells were harvested for further analysis, e.g., ChIP-seq, RNA-seq, ATAC-seq, etc.

[0303] D. Media Composition

[0304] The thaw medium contained 6 mL isotonic percoll and 14 mL high glucose DMEM (Invitrogen #11965 or similar). The plating medium contained 100 mL Williams E medium (Invitrogen #A1217601, without phenol red) and the supplement pack #CM3000 from ThermoFisher Plating medium containing 5 mL FBS, 10 μl dexamethasone, and 3.6 mL plating/maintenance cocktail. Stock trypan blue (0.4%, Invitrogen #15250) was diluted 1:5 in PBS.

[0305] The ThermoFisher complete maintenance medium contained supplement pack #CM4000 (1 μl dexamethasone and 4 mL maintenance cocktail) and 100 mL Williams E (Invitrogen #A1217601, without phenol red).

[0306] The modified maintenance media had no stimulating factors (dexamethasone, insulin, etc.), and contained 100 mL Williams E (Invitrogen #A1217601, without phenol red), 1 mL L-Glutamine (Sigma #G7513) to 2 mM, 1.5 mL HEPES (VWR #J848) to 15 mM, and 0.5 mL penicillin/streptomycin (Invitrogen #15140) to a final concentration of 50U/mL each.

[0307] E. DNA Purification

[0308] DNA purification was conducted as described in Ji et al., PNAS 112(12):3841-3846 (2015) Supporting Information, which is hereby incorporated by reference in its entirety. One milliliter of 2.5 M glycine was added to each plate of fixed cells and incubated for 5 minutes to quench the formaldehyde. The cells were washed twice with PBS. The cells were pelleted at 1,300 g for 5 minutes at 4° C. Then, 4×10⁷ cells were collected in each tube. The cells were lysed gently with 1 mL of ice-cold Nonidet P-40 lysis buffer containing protease inhibitor on ice for 5 minutes (buffer recipes are provided below). The cell lysate was layered on top of 2.5 volumes of sucrose cushion made up of 24% (wt/vol) sucrose in Nonidet P-40 lysis buffer. This sample was centrifuged at 18,000 g for 10 minutes at 4° C. to isolate the nuclei pellet (the supernatant represented the cytoplasmic fraction). The nuclei pellet was washed once with PBS/1 mM EDTA. The nuclei pellet was resuspended gently with 0.5 mL glycerol buffer followed by incubation for 2 minutes on ice with an equal volume of nuclei lysis buffer. The sample was centrifuged at 16,000 g for 2 minutes at 4° C. to isolate the chromatin pellet (the supernatant represented the nuclear soluble fraction). The chromatin pellet was washed twice with PBS/1 mM EDTA. The chromatin pellet was stored at −80° C.

[0309] The Nonidet P-40 lysis buffer contained 10 mM Tris.HCl (pH 7.5), 150 mM NaCl, and 0.05% Nonidet P-40. The glycerol buffer contained 20 mM Tris.HCl (pH 7.9), 75 mM NaCl, 0.5 mM EDTA, 0.85 mM DTT, and 50% (vol/vol) glycerol. The nuclei lysis buffer contained 10 mM Hepes (pH 7.6), 1 mM DTT, 7.5 mM MgCl2, 0.2 mM EDTA, 0.3 M NaCl, 1 M urea, and 1% Nonidet P-40.

[0310] F. Chromatin Immunoprecipitation Sequencing (ChIP-Seq)

[0311] ChIP-seq was performed using the following protocol for primary hepatocytes, HepG2 cells, and erythroid cells to determine the composition and confirm the location of genomic signaling centers, including occupancy-dependent signaling centers.

[0312] i. Cell Cross-Linking

[0313] 2×10⁷ cells were used for each run of ChIP-seq. Two ml of fresh 11% formaldehyde (FA) solution was added to 20 ml media on 15 cm plates to reach a 1.1% final concentration. Rates were swirled briefly and incubated at room temperature (RT) for 15 minutes. At the end of incubation, the FA was quenched by adding 1 ml of 2.5M Glycine to plates and incubating for 5 minutes at RT. The media was discarded to a 1L beaker, and cells were washed twice with 20 ml ice-cold PBS. PBS (10 ml) was added to plates, and cells were scraped off the plate. The cells were transferred to 15 ml conical tubes, and the tubes were placed on ice. Plates were washed with an additional 4 ml of PBS and combined with cells in 15 ml tubes. Tubes were centrifuged for 5 minutes at 1,500 rpm at 4° C. in a tabletop centrifuge. PBS was aspirated, and the cells were flash frozen in liquid nitrogen. Pellets were stored at −80° C. until ready to use.

[0314] ii. Pre-Block Magnetic Beads

[0315] Thirty μl Protein G beads (per reaction) were added to a 1.5 ml Protein LoBind Eppendorf tube. The beads were collected by magnet separation at RT for 30 seconds. Beads were washed 3 times with 1 ml of blocking solution by incubating beads on a rotator at 4° C. for 10 minutes and collecting the beads with the magnet. Five pg of an antibody was added to the 250 μl of beads in block solution. The mix was transferred to a clean tube, and rotated 0/N at 4° C. On the next day, buffer containing antibodies was removed, and beads were washed 3 times with 1.1 ml blocking solution by incubating beads on a rotator at 4° C. for 10 minutes and collecting the beads with the magnet. Beads were resuspended in 50 μl of block solution and kept on ice until ready to use.

[0316] iii. Cell Lysis, Genomic Fragmentation, and Chromatin Immunoprecipitation

[0317] Complete® protease inhibitor cocktail was added to lysis buffer 1 (LB1) before use. One tablet was dissolved in 1 ml of H₂O for a 50× solution. The cocktail was stored in aliquots at −20° C. Cells were resuspended in each tube in 8 ml of LB1 and incubated on a rotator at 4° C. for 10 minutes. Nuclei were spun down at 1,350 g for 5 minutes at 4° C. LB1 was aspirated, and cells were resuspended in each tube in 8 ml of LB2 and incubated on a rotator at 4° C. for 10 minutes.

[0318] A Covaris® E220evouton™ ultrasonicator was programmed per the manufacturer's recommendations for high cell numbers. HepG2 and erythroid cells were sonicated for 12 minutes, and primary hepatocyte samples were sonicated for 10 minutes. Lysates were transferred to dean 1.5 ml Eppendorf tubes, and the tubes were centrifuged at 20,000 g for 10 minutes at 4° C. to pellet debris. The supernatant was transferred to a 2 ml Protein LoBind Eppendorf tube containing pre-blocked Protein G beads with pre-bound antibodies. Fifty μl of the supernatant was saved as input. Input material was kept at −80° C. until ready to use. Tubes were rotated with beads overnight at 4° C.

[0319] iv. Wash, Elution, and Cross-Link Reversal

[0320] All washing steps were performed by rotating tubes for 5 minutes at 4° C. The beads were transferred to clean Protein LoBind Eppendorf tubes with every washing step. Beads were collected in 1.5 ml Eppendorf tube using a magnet. Beads were washed twice with 1.1 ml of sonication buffer. The magnetic stand was used to collect magnetic beads. Beads were washed twice with 1.1 ml of wash buffer 2, and the magnetic stand was used again to collect magnetic beads. Beads were washed twice with 1.1 ml of wash buffer 3. All residual Wash buffer 3 was removed, and beads were washed once with 1.1 ml TE+0.2% Triton X-100 buffer. Residual TE+0.2% Triton X-100 buffer was removed, and beads were washed twice with TE buffer for 30 seconds each time. Residual TE buffer was removed, and beads were resuspended in 300 μl of ChIP elution buffer. Two hundred fifty μl of ChIP elution buffer was added to 50 μl of input, and the tubes were rotated with beads 1 hour at 65° C. Input sample was incubated overnight at 65° C. oven without rotation. Tubes with beads were placed on a magnet, and the eluate was transferred to a fresh DNA LoBind Eppendorf tube. The eluate was incubated overnight at 65° C. oven without rotation

[0321] v. Chromatin Extraction and Precipitation

[0322] Input and immunoprecipitant (IP) samples were transferred to fresh tubes, and 300 μl of TE buffer was added to IP and Input samples to dilute SDS. RNase A (20 mg/ml) was added to the tubes, and the tubes were incubated at 37° C. for 30 minutes. Following incubation, 3 μl of 1M CaCl2 and 7 μl of 20 mg/ml Proteinase K were added, and incubated 1.5 hours at 55° C. MaXtract High Density 2 ml gel tubes (Qiagen) were prepared by centrifugation at full speed for 30 seconds at RT. Six hundred μl of phenol/chloroform/isoamyl alcohol was added to each proteinase K reaction and transferred in about 1.2 ml mixtures to the MaXtract tubes. Tubes were spun at 16,000 g for 5 minutes at RT. The aqueous phase was transferred to two dean DNA LoBind tubes (300 μl in each tube), and 1.5 μl glycogen, 30 μl of 3M sodium acetate, and 900 μl ethanol were added. The mixture was precipitated overnight at −20° C. or for 1 hour at −80° C., and spun down at maximum speed for 20 minutes at 4° C. The ethanol was removed, and pellets were washed with 1 ml of 75% ethanol by spinning tubes down at maximum speed for 5 minutes at 4° C. Remnants of ethanol were removed, and pellets were dried for 5 min at RT. Twenty-five μl of H₂O was added to each immunoprecipitant (IP) and input pellet, left standing for 5 minutes, and vortexed briefly. DNA from both tubes was combined to obtain 50 μl of IP and 50 μl of input DNA for each sample. One μl of this DNA was used to measure the amount of pulled down DNA using Qubit dsDNA HS assay (ThermoFisher, #Q32854). The total amount of immunoprecipitated material ranged from several ng (for TFs) to several hundred ng (for chromatin modifications). Six μl of DNA was analyzed using qRT-PCR to determine enrichment. The DNA was diluted if necessary. If enrichment was satisfactory, the rest was used for library preparation for DNA sequencing.

[0323] vi. Library Preparation for DNA Sequencing

[0324] Libraries were prepared using NEBNext Ultra 11 DNA library prep kit for Illumina (NEB, #E7645) using NEBNext Multiplex Oligos for Illumina (NEB, #6609S) according to manufacturer's instructions with the following modifications. The remaining ChIP sample (about 43 μl) and 1 μg of input samples for library preparations were brought up the volume of 50 μl before the End Repair portion of the protocol. End Repair reactions were run in a PCR machine with a heated lid in a 96-well semi-skirted PCR plate (ThermoFisher, #AB1400) sealed with adhesive plate seals (ThermoFisher, #AB0558) leaving at least one empty well in-between different samples. Undiluted adapters were used for input samples, 1:10 diluted adapters for 5-100 ng of ChIP material, and 1:25 diluted adapters for less than 5 ng of ChIP material. Ligation reactions were run in a PCR machine with the heated lid off. Adapter ligated DNA was transferred to clean DNA LoBind Eppendorf tubes, and the volume was brought to 96.5 μl using H₂O.

[0325] 200-600 bp ChIP fragments were selected using SPRIselect magnetic beads (Beckman Coulter, #B23317). Thirty μl of the beads were added to 96.5 μl of ChIP sample to bind fragments that are longer than 600 bp. The shorter fragments were transferred to a fresh DNA LoBind Eppendorf tube. Fifteen μl of beads were added to bind the DNA longer than 200 bp, and beads were washed with DNA twice using freshly prepared 75% ethanol. DNA was eluted using 17 μl of 0.1×TE buffer. About 15 μl of DNA was collected.

[0326] Three μl of size-selected Input sample and all (15 μl) of the ChIP sample was used for PCR. The amount of size-selected DNA was measured using a Qubit dsDNA HS assay. PCR was run for 7 cycles of for Input and ChIP samples with about 5-10 ng of size-selected DNA, and 12 cycles with less than 5 ng of size-selected DNA. One-half of the PCR product (25 μl) was purified with 22.5 μl of AMPure XP beads (Beckman Coulter, #A63880) according to the manufacturer's instructions. PCR product was eluted with 17 μl of 0.1×TE buffer, and the amount of PCR product was measured using Qubit dsDNA HS assay. An additional 4 cycles of PCR were run for the second half of samples with less than 5 ng of PCR product, DNA was purified using 22.5 μl of AMPure XP beads. The concentration was measured to determine whether there was an increased yield. Both halves were combined, and the volume was brought up to 50 μl using H₂O.

[0327] A second round of purifications of DNA was run using 45 μl of AMPure XP beads in 17 μl of 0.1×TE, and the final yield was measured using Qubit dsDNA HS assay. This protocol produces from 20 ng to 1 mg of PCR product. The quality of the libraries was verified by diluting 1 μl of each sample with H₂O if necessary using the High Sensitivity BioAnalyzer DNA kit (Agilent, #5067-4626) based on manufacturer's recommendations.

[0328] vii. Reagents

[0329] 11% Formaldehyde Solution (50 mL) contained 14.9 ml of 37% formaldehyde (final conc. 11%), 1 ml of 5M NaCl (final conc. 0.1 M), 100 μl of 0.5M EDTA (pH 8) (final conc. 1 mM), 50 μl of 0.5M EGTA (pH 8) (final conc. 0.5 mM), and 2.5 ml 1M Hepes (pH 7.5) (final conc. 50 mM).

[0330] Block Solution contained 0.5% BSA (w/v) in PBS and 500 mg BSA in 100 ml PBS. Block solution may be prepared up to about 4 days prior to use.

[0331] Lysis buffer 1 (LB1) (500 ml) contained 25 ml of 1 M Hepes-KOH, pH 7.5; 14 ml of 5M NaCl; 1 ml of 0.5M EDTA, pH 8.0; 50 ml of 100% Glycerol solution; 25 ml of 10% NP-40; and 12.5 ml of 10% Triton X-100. The pH was adjusted to 7.5. The buffer was sterile-filtered, and stored at 4° C. The pH was re-checked immediately prior to use.

[0332] Lysis buffer 2 (LB2) (1000 ml) contained 10 ml of 1 M Tris-HCL, pH 8.0; 40 ml of 5 M NaCl; 2 ml of 0.5M EDTA, pH 8.0; and 2 ml of 0.5M EGTA, pH 8.0. The pH was adjusted to 8.0. The buffer was sterile-filtered, and stored at 4° C. The pH was re-checked immediately prior to use.

[0333] Sonication buffer (500 ml) contained 25 ml of 1M Hepes-KOH, pH 7.5; 14 ml of 5M NaCl; 1 ml of 0.5M EDTA, pH 8.0; 50 ml of 10% Triton X-100; 10 ml of 5% Na-deoxycholate; and 5 ml of 10% SDS. The pH was adjusted to 7.5. The buffer was sterile-filtered, and stored at 4° C. The pH was re-checked immediately prior to use.

[0334] Proteinase inhibitors were included in the LB1, LB2, and Sonication buffer.

[0335] Wash Buffer 2 (500 ml) contained 25 ml of 1M Hepes-KOH, pH 7.5; 35 ml of 5M NaCl; 1 ml of 0.5M EDTA, pH 8.0; 50 ml of 10% Triton X-100; 10 ml of 5% Na-deoxycholate; and 5 ml of 10% SDS. The pH was adjusted to 7.5. The buffer was sterile-filtered, and stored at 4° C. The pH was re-checked immediately prior to use.

[0336] Wash Buffer 3 (500 ml) contained 10 ml of 1M Tris-HCL, pH 8.0; 1 ml of 0.5M EDTA, pH 8.0; 125 ml of 1M LiCl solution; 25 ml of 10% NP-40; and 50 ml of 5% Na-deoxycholate. The pH was adjusted to 8.0. The buffer was sterile-filtered, and stored at 4° C. The pH was re-checked immediately prior to use.

[0337] ChIP elution Buffer (500 ml) contained 25 ml of 1 M Tris-HCL, pH 8.0; 10 ml of 0.5M EDTA, pH 8.0; 50 ml of 10% SDS; and 415 ml of ddH2O. The pH was adjusted to 7.5. The buffer was sterile-filtered, and stored at 4° C. The pH was re-checked immediately prior to use.

[0338] G. Analysis of ChIP-Seq Results

[0339] AM obtained reads from each sample were trimmed using trim_galore 0.4.1 requiring a Phred score≥20 and a read length≥30. The trimmed reads were mapped against the human genome (hg19 build) using Bowtie (version 1.1.2) with the parameters: -v 2 -m 1 -S -t. AM unmapped reads, non-uniquely mapped reads and PCR duplicates were removed. AM the ChIP-seq peaks were identified using MACS2 with the parameters: -q 0.01-SPMR. The ChIP-seq signal was visualized in the UCSC genome browser. ChIP-seq peaks that are at least 2 kb away from annotated promoters (RefSeq, Ensemble and UCSC Known Gene databases combined) were selected as distal ChIP-seq peaks.

[0340] H. RNA-Seq

[0341] This protocol is a modified version of the following protocols: MagMAX mirVana Total RNA Isolation Kit User Guide (Applied Biosystems #MAN0011131 Rev B.0), NEBNext Poly(A) mRNA Magnetic Isolation Module (E7490), and NEBNext Ultra Directional RNA Library Prep Kit for Illumina (E7420) (New England Biosystems #E74901).

[0342] The MagMAX mirVana kit instructions (the section titled “Isolate RNA from cells” on pages 14-17) were used for isolation of total RNA from cells in culture. Two hundred μl of Lysis Binding Mix was used per well of the multiwell plate containing adherent cells (usually a 24-well plate).

[0343] For mRNA isolation and library prep, the NEBNext Poly(A) mRNA Magnetic Isolation Module and Directional Prep kit was used. RNA isolated from cells above was quantified, and prepared in 500 μg of each sample in 50 μl of nuclease-free water. This protocol may be run in microfuge tubes or in a 96-well plate.

[0344] The 80% ethanol was prepared fresh, and all elutions are done in 0.1×TE Buffer. For steps requiring Ampure XP beads, beads were at room temperature before use. Sample volumes were measured first and beads were pipetted. Section 1.9B (not 1.9A) was used for NEBNext Multiplex Oligos for Illumina (#E6609). Before starting the PCR enrichment, cDNA was quantified using the Qubit (DNA High Sensitivity Kit, ThermoFisher #Q32854). The PCR reaction was run for 12 cycles.

[0345] After purification of the PCR Reaction (Step 1.10), the libraries were quantified using the Qubit DNA High Sensitivity Kit. 1 μl of each sample were diluted to 1-2 ng/μl to run on the Bioanalyzer (DNA High Sensitivity Kit, Agilent #5067-4626). If Bioanalyzer peaks were not clean (one narrow peak around 300 bp), the AMPure XP bead cleanup step was repeated using a 0.9× or 1.0× beads:sample ratio. Then, the samples were quantified again with the Qubit, and run again on the Bioanalyzer (1-2 ng/μl).

[0346] Nuclear RNA from INTACT-purified nuclei or whole neocortical nuclei was converted to cDNA and amplified with the Nugen Ovation RNA-seq System V2. Libraries were sequenced using the Illumina HiSeq 2500.

[0347] I. RNA-Seq Data Analysis

[0348] All obtained reads from each sample were mapped against the human genome (hg19 build) using STAR_2.5.2 b, which allows mapping across splice sites by reads segmentation (Dobin et al., Bioinformatics (2012) 29 (1):15-21, which is hereby incorporated by reference in its entirety). The uniquely mapped reads were subsequently assembled into transcripts guided by reference annotation (RefSeq gene models) (Pruitt et al., Nucleic Acids Res. 2012 January; 40(Database issue): D130-D135, which is incorporated by reference in its entirety) with Cuffnorm v2.2.1 (Trapnell et al., Nature Protocols 7, 562-578 (2012), which is hereby incorporated by reference in its entirety). The expression level of each gene was quantified with normalized FPKM (fragments per kilobase of exon per million mapped fragments). The differentially expressed genes were called using Cuffdiff v2.2.1 with q value<0.01 and log 2fold change>=1 or <=−1.

[0349] J. ATAC-Seq

[0350] Hepatocytes were seeded overnight, then the serum and other factors were removed. After 2-3 hours, the cells were treated with the compound and incubated overnight. The cells were harvested and the nuclei were prepared for the transposition reaction. 50,000 bead bound nuclei were transposed using Tn5 transposase (Illumina FC-121-1030) as described in Mo et al., 2015, Neuron 86, 1369-1384, which is hereby incorporated by reference in its entirety. After 9-12 cycles of PCR amplification, libraries were sequenced on an Illumina HiSeq 2000. PCR was performed using barcoded primers with extension at 72° C. for 5 minutes, PCR, then the final PCR product was sequenced.

[0351] All obtained reads from each sample were trimmed using trim_galore 0.4.1 requiring Phred score 20 and read length 30 for data analysis. The trimmed reads were mapped against the human genome (hg19 build) using Bowtie2 (version 2.2.9) with the parameters: -t -q -N 1 -L 25 -X 2000 no-mixed no-discordant. All unmapped reads, non-uniquely mapped reads and PCR duplicates were removed. All the ATAC-seq peaks were called using MACS2 with the parameters -nolambda -nomodel -q 0.01 --SPMR. The ATAC-seq signal was visualized in the UCSC genome browser. ATAC-seq peaks that were at least 2 kb away from annotated promoters (RefSeq, Ensemble and UCSC Known Gene databases combined) were selected as distal ATAC-seq peaks.

[0352] K. qRT-PCR

[0353] qRT-PCR was performed as described in North et al., PNAS, 107(40) 17315-17320 (2010), which is hereby incorporated by reference in its entirety. qRT-PCR was performed with cDNA using the iQ5 Multicolor rtPCR Detection system from BioRad with 60° C. annealing.

[0354] Analysis of the fold changes in expression as measured by qRT-PCR were performed using the technique below. The control was DMSO, and the treatment was the selected compound (CPD). The internal control was GAPDH or B-Actin, and the gene of interest is the target. First, the averages of the 4 conditions were calculated for normalization: DMSO:GAPDH, DMSO:Target, CPD: GAPDH, and CPD:Target. Next, the ACT of both control and treatment were calculated to normalize to internal control (GAPDH) using (DMSO:Target)−(DMSO:GAPDH)=ΔCT control and (CPD:Target)−(CPD: GAPDH)=ΔCT experimental. Then, the MOT was calculated by ΔCT experimental−ΔCT control. The Expression Fold Change was calculated by 2-(MOT) (2-fold expression change was shown by RNA-Seq results provided herein).

[0355] L. Conditional Immortalization of Hematopoietic Cells

[0356] Conditional immortalization of hematopoietic cells was performed as described in Hirose et al., 2013, Stem Cell Reports, Vol. 1:499-508, the contents of which are hereby incorporated by reference in their entirety. For the immortalization of hematopoietic cells, human hematopoietic progenitor (CD34+) cells were purchased from commercial vendors as purified cells or isolated from peripheral blood. Hematopoietic progenitor cells, were collected on day 11 of culture, and 5×10⁴ cells were suspended in erythroid differentiation medium (Stemcell Technologies, Canada). Then, the cells were transduced with viral supernatant for DOX-inducible c-MYC, or BCL-XL, or a combination of c-MYC and BCL-XL (multiplicity of infection: MOI=20), E6/E7, hTERT, or SV40T system. Viral transduction was achieved using the retronectin-transduction protocol (Clontech). Cells were cultured in the presence of 1 μg/ml DOX.

[0357] Erythroid cells were cultured in erythroid differentiation media supplemented with antibiotics blasticidin and/or puromycin and 1 μg/ml DOX. The cells were cultivated for an additional 12 days to assure all cells expressed the desired transgenes required for conditional immortalization.

[0358] M. Conditional Immortalization of Hepatocytes

[0359] Cryopreserved hepatocytes were seeded on collagen-coated culture plates at a density of 30,000 cells/cm² in Hepatocyte growth medium (HGM) containing William's E basal medium supplemented with 100 μM dexamethasone, 3.75 g/L Bovine Serum Albumin (BSA), 1× insulin, transferrin and selenium (ITS), 1% penicillin-streptomycin, and 10 ng/mL oncostatin M (OSM) (Sigma-Aldrich, St. Louis, US). After 24 hours, the cells were transduced with viral particles containing HPV E6 and E7 genes. The cells were cultured for an additional 3 to 8 weeks in the presence of OSM. The medium was replaced every 2 to 3 days. Ten days after the transduction, proliferating colonies were observed in the transduced cell cultures. For stabilization of the epithelial phenotype of the cells, cultures were treated with 2 to 10 μM of MEK1/2 inhibitor U0126 (Sigma-Aldrich, St. Louis, US) for 1 to 3 weeks. Colonies of proliferating hepatocytes maintaining their epithelial phenotype were selected by trypsinization and re-seeded at a density of 20,000 cells/cm² and sub-cultured. The number of population doublings (PD) was calculated at each passage. The expression of CYP450, HPV E6, and HPV E7 was evaluated at population doubling number 19. When the colonies were expanded to 120×10⁶ cells, the hepatocytes were cryopreserved in HGM containing 20% FBS and 10% DMSO (See, Levy et al., 2015, Nat Biotechnol; 33(12):1264-1271, the contents of which are hereby incorporated by reference in their entireties).

[0360] N. Generating Stable Knockdown Cell Lines

[0361] 293T cells were transfected over 4 days using pLKO (constitutive, U6 promoter), pTRIPZ (dox inducible, minimal cytomegalovirus, red fluorescent protein [RFP]), or pSMART (dox inducible, EF1alpha RFP, or phosphoglycerate kinase green fluorescent protein [PGK GFP]) plasmids to generate shRNA lentiviruses.

[0362] Conditionally immortalized cord blood CD34+ cells were transduced with the shRNA lentiviruses using the retronectin-transduction protocol (Clontech). Puromycin selection was performed 24-48 hours post-transduction. Cells were counted to monitor cell viability. After 12 days, which allowed for a large biomass, knockdown efficiency was analyzed. qRT-PCR was used to identify changes in mRNA, and Western blot was used to determine levels of protein depletion.

[0363] Cryopreserved CD34+ cells (cord blood, peripheral blood or bone marrow derived) were thawed from cryovials (typically 1×10⁶ or 5×10⁶ cells/vial) at 37° C. until completely thawed. Cells were then grown to a density of 1×10⁶ cells/mL for a period of 11 days in Hematopoietic Stem Cell expansion media DXF (Promocell) for the expansion of hematopoietic progenitor cells. Expanded CD34+ progenitor cells were then grown for an additional 3 days for erythroid differentiation in SFEMII medium (Stem Cell Technologies) supplemented with the Erythroid Expansion supplement (Stem Cell Technologies). Cells can be efficiently cryopreserved at this step and are ready for viral transduction when virus is prepared.

[0364] The vector and the shRNA of interest were selected from the plasmid list of Table 23. The SEQ ID NOs represent the nucleic acid sequence targets of the shRNA.

TABLE 23
Plasmid list

| SEQ ID NO | Vector | Clone ID | Target | Modification |
|---|---|---|---|---|
| 32561 | pZIP-TRE3G-ZsGreen-PURO | 3_2 = sh1 | RPS19 | ULTRA shRNA KD |
| 32562 | pZIP-TRE3G-ZsGreen-PURO | 4_3 = sh2 | RPS19 | ULTRA shRNA KD |
| 32563 | pZIP-TRE3G-ZsGreen-PURO | 5_4 = sh3 | RPS19 | ULTRA shRNA KD |
| 32564 | pZIP-TRE3G-ZsGreen-PURO | 3382846 = sh3 | p53 | ULTRA shRNA KD |
| 32565 | pZIP-TRE3G-ZsGreen-PURO | 3382844 = sh2 | p53 | ULTRA shRNA KD |
| 32566 | pZIP-TRE3G-ZsGreen-PURO | 3382843 = Sh1 | p53 | ULTRA shRNA KD |
| 32567 | pLKO_4 | sh1 | RPL11 | shRNA KD |
| 32568 | pLKO_5 | sh2 | RPL11 | shRNA KD |
| 32569 | pLKO_6 | sh3 | RPL11 | shRNA KD |
| 32570 | pLKO_7 | sh1 | RPS19 | shRNA KD |
| 32571 | pLKO_8 | sh4 | RPL11 | shRNA KD |
| 32572 | pLKO_9 | sh2 | RPS19 | shRNA KD |
| 32573 | pLKO_10 | sh5 | RPL11 | shRNA KD |
| 32574 | pLKO_11 | sh3 | RPS19 | shRNA KD |
| 32575 | pLKO_16 | sh4 | RPS19 | shRNA KD |
| 32576 | pLKO_18 | sh5 | RPS19 | shRNA KD |
| 32577 | gRNA | NA | RPS19_1 | KO |
| 32578 | gRNA | NA | RPS19_2 | KO |
| 32579 | pLVX-TetOne-bla-RPL11_shr | NA | RPL11 | Overexpression |
| 32580 | pLVX-TetOne-bla-RPS19_shr | NA | RPS19 | Overexpression |
| 32569 | pTRIPZ-puro-RPL11_sh1 | NA | RPL11 | shRNA KD |
| 32571 | pTRIPZ-puro-RPL11_sh2 | NA | RPL11 | shRNA KD |
| 32570 | pTRIPZ-puro-RPS19_sh1 | NA | RPS19 | shRNA KD |
| 32581 | pTRIPZ-puro-RPS19_sh2 | NA | RPS19 | shRNA KD |
| 32582 | pTRIPZ-puro-P53_sh1 | NA | p53 | shRNA KD |
| 32583 | pTRIPZ-tGFP.Trad-shNT | NA | NA | NA |
| 32583 | pGIPZ-tGFP.Trad-shNT | NA | NA | NA |
| 32584 | pLKO.1-tGFP.Trad-shNT | NA | NA | NA |
| 32570 | pGIPZ-tGFPtrad-RSP19_sh1 | NA | sh1 in pLKO and pTRIPZ | NA |
| 32570 | pLKO.1-tGFPtrad-RSP19_sh1 | NA | NA | NA |

[0365] Additional vectors that were used include those listed in Table 24. The table provides the Clone ID, Target, Modification, Tag, Inducible or Constitutive (I/C), and Selection method.

TABLE 24
Additional plasmids

| Vector | Target | Modification | Promoter | Tag | I/C | Selection |
|---|---|---|---|---|---|---|
| pTRIPZ-neo | NA | tGFPtrad | CMV | GFP | I | Neo |
| pGIPZ | NA | tGFPtrad | CMV | GFP | I | GFP |
| pGIPZ-tGFP.Trad | NA | tGFPtrad | CMV | GFP | C | GFP |
| pLKO.1-bla | Stuffer | none | U6 | NA | C | Bla |
| pLKO.1-hygrp | stuffer | none | U6 | NA | C | Hygro |
| pLKO.1-nep | Stuffer | none | U6 | NA | C | Neo |
| pLKO.1-purp | stuffer | none | U6 | NA | C | Puro |
| pLKO.1-tGFP.Trad:stuffer | NA | none | U6 | NA | C | GFP |
| pLKO_1 | p53 | shRNA KD | U6 | NA | C | Puro |
| pLKO_12 | p53 | shRNA KD | U6 | NA | C | Puro |
| pLKO_13 | p53 | shRNA KD | U6 | NA | C | Puro |
| pLKO_14 | p53 | shRNA KD | U6 | NA | C | Puro |
| pLKO_15 | GFP | shRNA KD | U6 | NA | C | Puro |
| pLKO_17 | p53 | shRNA KD | U6 | NA | C | Puro |
| pLKO_3 | NT | shRNA KD | U6 | NA | C | Puro |
| PLKO1 | NA | tGFPtrad -sorting | U6 | GFP | C | GFP |
| pLVX-EF1a-IRES-bla | NA | None | EF1a | NA | I | Bla |
| pLVX-EF1a-IRES-bla-DEST | Destination | None | EF1a | NA | I | Bla |
| pLVX-EF1a-IRES-hygro | NA | None | EF1a | NA | I | Hygro |
| pLVX-EF1a-IRES-hygro-DEST | Destination | None | EF1a | NA | I | Hygro |
| pLVX-EF1a-IRES-neo | NA | None | EF1a | NA | I | Neo |
| pLVX-EF1a-IRES-neo-DEST | Destination | None | EF1a | NA | I | Neo |
| pLVX-EF1a-IRES-puro | NA | None | EF1a | NA | I | Puro |
| pLVX-EF1a-IRES-puro-DEST | Destination | None | EF1a | NA | I | Puro |
| pLVX-TetOne | Myc | Overexpression | PGK | NA | I | Puro |
| pLVX-TetOne | BCLXL | Overexpression | PGK | NA | I | Blast |
| pLVX-TetOne | Myc | Overexpression | PGK | NA | I | Blast |
| pLVX-TetOne | BCLXL | Overexpression | PGK | NA | I | Puro |
| pLVX-TetOne-Bla | BCLXL/Myc | IRES | PGK | NA | I | Blast |
| pLVX-TetOne-Bla | eGFP | Control | | GFP | NA | Blast |
| pLVX-TetOne-Bla | BCLXL/Myc | T2A | PGK | NA | NA | Puro |
| pLVX-TetOne-Bla empty | Empty | Control | PGK | NA | NA | Bla |
| pLVX-TetOne-Bla-DEST | Destination | none | PGK | NA | NA | Bla |
| pLVX-TetOne-Bla-HPV16 E6/E7 | NA | HPV16 E6/E7 | PGK | NA | NA | Bla |
| pLVX-TetOne-Bla-hTERT | NA | hTERT | PGK | NA | NA | Bla |
| pLVX-TetOne-Bla-SV40T | NA | SV40T | PGK | NA | NA | Bla |
| pLVX-TetOne-Hygro | NA | none | PGK | NA | NA | Hygro |
| pLVX-TetOne-Hygro-DEST | Destination | none | PGK | NA | NA | Hygro |
| pLVX-TetOne-Puro | NA | none | PGK | NA | NA | Puro |
| pLVX-TetOne-Puro-DEST | Destination | none | PGK | NA | NA | Puro |
| pSMART | RPS19 | shRNA KD | EF1 alpha | RFP | NA | Puro |
| PSMART | RPS19 | shRNA KD | EF1 alpha | RFP | NA | Puro |
| PSMART | RPS19EFP-RFP | shRNA KD | EF1 alpha | RFP | NA | Puro |
| PSMART | NT | shRNA KD | EF1 alpha | RFP | NA | Puro |
| pSMART | NT | shRNA KD | EF1 alpha | GFP | NA | Puro |
| PSMART | RPS19_1 | shRNA KD | pGK | GFP | NA | Puro |
| PSMART | RPS19_2 | shRNA KD | PGK | GFP | NA | Puro |
| PSMART | NT | shRNA KD | pGK | GFP | NA | Puro |
| pTRIPZ-Neo | Empty | NA | CMV | RFP | NA | Neo |
| pTRIPZ-Puro-shNT | NT | NT | CMV | RFP | NA | Puro |
| pTRIPZ-tGFP.Trad | stutter | NA | NA | RFP | NA | NA |

[0366] Table 25 provides additional inserts to be used in any of the plasmids listed in Tables 23 and 24.

TABLE 25
Additional plasmid inserts

| | | Target | Antisense |
|---|---|---|---|
| Target | Plasmid insert | SEQ ID NO. | SEQ ID NO. |
| RPS19 | TRCN0000074913 | 32570 | 32590 |
| RPS19 | TRCN0000074914 | 32571 | 32591 |
| RPS19 | TRCN0000074915 | 32574 | 32592 |
| RPS19 | TRCN0000074916 | 32574 | 32593 |
| RPS19 | TRCN0000074917 | 32576 | 32594 |
| RPL11 | TRCN0000117712 | 32567 | 32595 |
| RPL11 | TRCN0000117713 | 32568 | 32596 |
| RPL11 | TRCN0000117714 | 32569 | 32597 |
| RPL11 | TRCN0000117715 | 32571 | 32598 |
| RPL11 | TRCN0000117716 | 32573 | 32599 |
| RPS14 | TRCN0000008640 | 32585 | 32600 |
| RPS14 | TRCN0000008641 | 32586 | 32601 |
| RPS14 | TRCN0000008642 | 32587 | 32602 |
| RPS14 | TRCN0000008643 | 32588 | 32603 |
| RPS14 | TRCN0000008644 | 32589 | 32604 |

[0367] In additional embodiments, RPS19_sh1 (ctacgatgagaactggttct; SEQ ID NO: 32605) is inserted into one of the plasmids listed in Tables 23 and 24.

[0368] 293FT cells (Clontech) were transfected with 7 μg of pLVX-TetOne-Puro lentiviral vector combined with Lenti-X Packaging Single Shots (VSV-G) plasmids (Clontech). 293FT cells were transfected using the plasmid mixture. For the transfection of 293FT cells with shRNA, 7 μg of combined shRNA lentivector, VSV-G, and packaging plasmids were added to the cells using Fugene reagent and OPTIMEM media.

[0369] For both transgene and shRNA transfection, 48 hours after the transfection, the viral supernatant was collected and filtered through a 0.45 uM PVDF unit. The viral particles were concentrated by adding ⅓ total volume of Lenti-X Concentrator (Clontech). The mixture was mixed well by inversion and incubated for 1-2 hours at 4° C. After precipitation, the tubes were centrifuged at 4° C. for more than 45 minutes at 1,500 g to pellet the virus. Then, the supernatant was aspirated and the pellet was resuspended in PBS to a concentration of 25-50×. Plates were coated with retronectin and incubated for more than 4 hours at room temperature or overnight at 4° C., using the Retronectin-transduction protocol (Clontech) according to the manufacturer's instructions. Following retronectin incubation, the plates were blocked with 2% BSA/PBS for more than 30 minutes, and washed with PBS. Target cells were seeded onto the retronectin-coated plates and the appropriate amount of virus was added. Then the plates were spun at 2,500 rpm for 1-2 hours at RT. Cells were incubated at 37° C. for 72 hours following the infection and prior to selection.

[0370] For selection, antibiotic was added in the cell culture medium (about 5 μg/mL of PURO). Following the death of all the non-resistant cells, the surviving cells were collected for RNA and protein assay. Alternatively, cells were transduced with lentiviral vectors containing a GFP reporter (GFPtrad) expressed in the cell membrane. Cells expressing membrane bound GFP were magnetically enriched using a GFP specific antibody in conjuction with MACS cell separation (Miltenyi Biotec). This approach does not enrich the cell population expressing intracellular GFP; however, it enriched for cells expressing GFP on the cell membrane.

[0371] O. Knockdown Efficiency

[0372] For RNA extraction, 1×10⁶ cells were harvested in 500 μL of TRIZOL reagent (Thermo Scientific), and incubated for 5 minutes at room temperature. Then, 100 μL of chloroform was added to the cells, and the mixture was vortexed and then centrifuged at 12,000× gravity for 15 minutes. The aqueous phase was transferred to fresh tubes and one volume of 70% ethanol was added. The TRIZOL Plus RNA purification Kit (Thermo Scientific) was used for the remaining extraction protocol according to the manufacturer's instructions. For the conversion of RNA to cDNA the High Capacity cDNA RT kit (Thermo Scientific) was used according to the manufacturer's instructions. The cDNA was analyzed with qRT-PCR to determine the fold change of knockdown cells using Taqman Fast PCR mix and Applied Biosystems probes (Thermo Scientific).

[0373] P. Chromatin Interaction Analysis by Paired-End Tag Sequencing (ChIA-PET)

[0374] ChIA-PET is performed as previously described in Chepelev et al. (2012) Cell Res. 22, 490-503; Fullwood et al. (2009) Nature 462, 58-64; Goh et al. (2012) J. Vis. Exp., http://dx.doi.org/10.3791/3770; Li et al. (2012) Cell 148, 84-98; and Dowen et al. (2014) Cell 159, 374-387, which are each hereby incorporated by reference in their entireties. Briefly, embryonic stem (ES) cells (up to 1×10⁸ cells) are treated with 1% formaldehyde at room temperature for 20 minutes and then neutralized using 0.2M glycine. The crosslinked chromatin is fragmented by sonication to size lengths of 300-700 bp. The anti-SMC1 antibody (Bethyl, A300-055A) is used to enrich SMC1-bound chromatin fragments. A portion of ChIP DNA is eluted from antibody-coated beads for concentration quantification and for enrichment analysis using quantitative PCR. For ChIA-PET library construction ChIP DNA fragments are end-repaired using T4 DNA polymerase (NEB). ChIP DNA fragments are divided into two aliquots and either linker A or linker Bis ligated to the fragment ends. The two linkers differ by two nucleotides which are used as a nucleotide barcode (Linker A with CG; Linker B with AT). After linker ligation, the two samples are combined and prepared for proximity ligation by diluting in a 20 ml volume to minimize ligations between different DNA-protein complexes. The proximity ligation reaction is performed with T4 DNA ligase (Fermentas) and incubated without rocking at 22° C. for 20 hours. During the proximity ligation DNA fragments with the same linker sequence are ligated within the same chromatin complex, which generated the ligation products with homodimeric linker composition.

[0375] However, chimeric ligations between DNA fragments from different chromatin complexes could also occur, thus producing ligation products with heterodimeric linker composition. These heterodimeric linker products are used to assess the frequency of nonspecific ligations and were then removed.

[0376] i. Day 1

[0377] The cells are crosslinked as described for ChIP. Frozen cell pellets are stored in the −80° C. freezer until ready to use. This protocol requires at least 3×10⁸ cells frozen in six 15 ml Falcon tubes (50 million cells per tube). Six 100 μl Protein G Dynabeads (for each ChIA-PET sample) are added to six 1.5 ml Eppendorf tubes on ice. Beads are washed three times with 1.5 ml Block solution, and incubated end over end at 4° C. for 10 minutes between each washing step to allow for efficient blocking. Protein G Dynabeads are resuspended in 250 μl of Block solution in each of six tubes and 10 μg of SMC1 antibody (Bethyl A300-055A) is added to each tube. The bead-antibody mixes are incubated at 4° C. end-over-end overnight.

[0378] ii. Day 2

[0379] Beads are washed three times with 1.5 ml Block solution to remove unbound IgG and incubated end-over-end at 4° C. for 10 minutes each time. Smc1-bound beads are resuspended in 100 μl of Block solution and stored at 4° C. Final lysis buffer 1 (8 ml per sample) is prepared by adding 50× Protease inhibitor cocktail solution to Lysis buffer 1 (LB1) (1:50). Eight ml of Final lysis buffer 1 was added to each frozen cell pellet (8 ml per sample×6). The cells are thoroughly resuspended and thawed on ice by pipetting up and down. The cell suspension is incubated again end-over-end for 10 minutes at 4° C. The suspension is centrifuged at 1,350 g for 5 minutes at 4° C. Concurrently, Final lysis buffer 2 (8 ml per sample) is prepared by adding 50× Protease inhibitor cocktail solution to lysis buffer 2 (LB2) (1:50)

[0380] After centrifugation, the supernatant is discarded, and the nuclei are thoroughly resuspended in 8 ml Final lysis buffer 2 by pipetting up and down. The cell suspension is incubated end-over-end for 10 minutes at 4° C. The suspension is centrifuged at 1,350 g for 5 minutes at 4° C. During incubation and centrifugation, the Final sonication buffer (15 ml per sample) is prepared by adding 50× Protease inhibitor cocktail solution to sonication buffer (1:50). The supernatant is discarded, and the nuclei are fully resuspended in 15 ml Final sonication buffer by pipetting up and down. The nuclear extract is extracted to fifteen 1 ml Covaris Evolution E220 sonication tubes on ice. An aliquot of 10 μl is used to check the size of unsonicated chromatin on a gel.

[0381] A Covaris sonicator is programmed according to manufacturer's instructions (12 minutes per 20 million cells=12×15=3 hours). The samples are sequentially sequenced as described above. The goal is to break chromatin DNA to 200-600 bp. If sonication fragments are too big, false positives become more frequent. The sonicated nuclear extract is dispensed into 1.5 ml Eppendorf tubes. 1.5 ml samples are centrifuged at full speed at 4° C. for 10 minutes. Supernatant (SNE) is pooled into a new pre-cooled 50 ml Falcon tube, and brought to a volume of 18 ml with sonication buffer. Two tubes of 50 μl were taken as input and to check the size of fragments. 250 μl of ChIP elution buffer is added and reverse crosslinking occurs at 65° C. overnight in the oven After reversal of crosslinking, the size of sonication fragments is determined on a gel.

[0382] Three ml of sonicated extract is added to 100 μl Protein G beads with SMC1 antibodies in each of six clean 15 ml Falcon tubes. The tubes containing SNE-bead mix are incubated end-over-end at 4° C. overnight (14 to 18 hours)

[0383] iii. Day 3

[0384] Half the volume (1.5 ml) of the SNE-bead mix is added to each of six pre-chilled tubes and SNE is removed using a magnet. The tubes are sequentially washed as follows: 1) 1.5 ml of Sonication buffer is added, the beads are resuspended and rotated for 5 minutes at 4° C. for binding, then the liquid was removed (step performed twice); 2) 1.5 ml of high-salt sonication buffer is added, and the beads are resuspended and rotated for 5 minutes at 4° C. for binding, then the liquid is removed (step performed twice); 3) 1.5 ml of high-salt sonication buffer is added, and the beads are resuspended and rotated for 5 minutes at 4° C. for binding, then the liquid is removed (step performed twice); 4) 1.5 ml of LiCl buffer is added, and the cells are resuspended and incubated end-over-end for 5 minutes for binding, then the liquid is removed (step performed twice); 5) 1.5 ml of 1×TE+0.2% Triton X-100 is used to wash the cells for 5 minutes for binding, then the liquid is removed; and 1.5 ml of ice-cold TE Buffer is used to wash the cells for 30 seconds for binding, then the liquid is removed (step performed twice). Beads from all six tubes are sequentially resuspended in beads in one 1,000 ul tube of 1× ice-cold TE buffer.

[0385] ChIP-DNA is quantified using the following protocol. Ten percent of beads (by volume), or 100 μl, are transferred into a new 1.5 ml tube, using a magnet. Beads are resuspended in 300 μl of ChIP elution buffer and the tube is rotated with beads for 1 hour at 65° C. The tube with beads is placed on a magnet and the eluate was transferred to a fresh DNA LoBind Eppendorf tube. The eluate is incubated overnight at 65° C. oven without rotating. Immuno-precipitated samples are transferred to fresh tubes, and 300 μl of TE buffer is added to the immuno-precipitants and Input samples to dilute. Five μl of RNase A (20 mg/ml) is added, and the tube is incubated at 37° C. for 30 minutes.

[0386] Following incubation, 3 μl of 1M CaCl2 and 7 μl of 20 mg/ml Proteinase K is added to the tube and incubated 1.5 hours at 55° C. MaXtract High Density 2 ml gel tubes (Qiagen) were prepared by centrifuging them at full speed for 30 seconds at RT. 600 μl of phenol/chloroform/isoamyl alcohol is added to each proteinase K reaction. About 1.2 ml of the mixtures is transferred to the MaXtract tubes. Tubes are spun at 16,000 g for 5 minutes at RT. The aqueous phase is transferred to two clean DNA LoBind tubes (300 μl in each tube), and 1 μl glycogen, 30 μl of 3M sodium acetate, and 900 μl ethanol is added. The mixture is allowed to precipitate overnight at −20° C. or for 1 hour at −80° C.

[0387] The mixture is spun down at maximum speed for 20 minutes at 4° C., ethanol is removed, and the pellets are washed with 1 ml of 75% ethanol by spinning tubes down at maximum speed for 5 minutes at 4° C. All remnants of ethanol are removed, and pellets are dried for 5 minutes at RT. H₂O is added to each tube. Each tube is allowed to stand for 5 minutes, and vortexed briefly. DNA from both tubes is combined to obtain 50 μl of IP and 100 μl of Input DNA.

[0388] The amount of DNA collected is quantitated by ChIP using Qubit (Invitrogen #Q32856). One μl intercalating dye is combined with each measure 1 μl of sample. Two standards that come with the kit are used. DNA from only 10% of the beads is being measured. About 400 ng of chromatin in 900 μl of bead suspension is obtained with a good enrichment at enhancers and promoters as measured by qRT-PCR.

[0389] iv. Day 3 or 4

[0390] End-blunting of ChIP-DNA is performed on the beads using the following protocol. The remaining chromatin/beads are split by pipetting, and 450 μl of bead suspension is aliquoted into 2 tubes. Beads are collected on a magnet. Supernatant is removed, and then the beads are resuspended in the following reaction mix: 70 μl 10×NEB buffer 2.1 (NEB, M0203L), 7 μl 10 mM dNTPs, 615.8 μl dH₂O, and 7.2 μl of 3 U/μl T4 DNA Polymerase (NEB, M0203L). The beads are incubated at 37° C. with rotation for 40 minutes. Beads are collected with a magnet, then the beads are washed 3 times with 1 ml ice-cold ChIA-PET Wash Buffer (30 seconds per each wash).

[0391] On-Bead A-tailing was performed by preparing Klenow (3′ to 5′exo-) master mix as stated below: 70 μl 10×NEB buffer 2, 7 μl 10 mM dATP, 616 μl dH20, and 7 μl of 3 U/μl Klenow (3′ to 5″exo-) (NEB, M0212L). The mixture is incubated at 37° C. with rotation for 50 minutes. Beads are collected with a magnet, then beads are washed 3 times with 1 ml of ice-cold ChIA-PET Wash Buffer (30 seconds per each wash).

[0392] Linkers are thawed gently on ice. Linkers are mixed well with water gently by pipetting, then with PEG buffer, then gently vortexed. Then, 1394 μl of master mix and 6 μl of ligase is added per tube and mixed by inversion. Parafilm is put on the tube, and the tube is incubated at 16° C. with rotation overnight (at least 16 hours). The biotinylated linker was ligated to ChIP-DNA on beads by setting up the following reaction mix and adding reagents in order: 1110 μl dH₂O, 4 μl 200 ng/μl biotinylated bridge linker, 280 μl5×T4 DNA ligase buffer with PEG (Invitrogen), and 6 μl 30 U/μl T4 DNA ligase (Fermentas).

[0393] v. Day 5

[0394] Exonuclease lambda/Exonuclease 1 On-Bead digestion was performed using the following protocol. Beads were collected with a magnet and washed 3 times with 1 ml of ice-cold ChIA-PET Wash Buffer (30 seconds per each wash). The Wash buffer is removed from beads, then resuspended in the following reaction mix: 70 μl 10× lambda nuclease buffer (NEB, M0262L), 618 μl nuclease-free dH20, 6 μl 5 U/μl Lambda Exonuclease (NEB, M0262L), and 6 μl Exonuclease I (NEB, M0293L). The reaction is incubated at 37° C. with rotation for 1 hour. Beads are collected with a magnet, and beads are washed 3 times with 1 ml ice-cold ChIA-PET Wash Buffer (30 seconds per each wash).

[0395] Chromatin complexes are eluted off the beads by removing all residual buffer and resuspending the beads in 300 μl of ChIP elution buffer. The tube with beads is rotated 1 hour at 65° C. The tube is placed on a magnet and the eluate is transferred to a fresh DNA LoBind Eppendorf tube. The eluate is incubated overnight at 65° C. in an oven without rotating.

[0396] vi. Day 6

[0397] The eluted sample is transferred to a fresh tube and 300 μl of TE buffer is added to dilute the SDS. Three μl of RNase A (30 mg/ml) is added to the tube, and the mixture is incubated at 37° C. for 30 minutes. Following incubation, 3 μl of 1M CaCl2 and 7 μl of 20 mg/ml Proteinase K is added, and the tube is incubated again for 1.5 hours at 55° C. MaXtract High Density 2 ml gel tubes (Qiagen) are precipitated by centrifuging them at full speed for 30 seconds at RT. Six hundred μl of phenol/chloroform/isoamyl alcohol is added to each proteinase K reaction, and about 1.2 ml of the mixture is transferred to the MaXtract tubes. Tubes are spun at 16,000 g for 5 minutes at RT.

[0398] The aqueous phase is transferred to two clean DNA LoBind tubes (300 μl in each tube), and 1 μl glycogen, 30 μl of 3M sodium acetate, and 900 μl ethanol is added. The mixture is precipitated for 1 hour at −80° C. The tubes are spun down at maximum speed for 30 minutes at 4° C., and the ethanol is removed. The pellets are washed with 1 ml of 75% ethanol by spinning tubes down at maximum speed for 5 minutes at 4° C. Remnants of ethanol are removed, and the pellets are dried for 5 minutes at RT. Thirty μl of H₂O is added to the pellet and allowed to stand for 5 minutes. The pellet mixture is vortexed briefly, and spun down to collect the DNA.

[0399] Qubit and DNA High Sensitivity ChIP are performed to quantify and assess the quality of proximity ligated DNA products. About 120 ng of the product is obtained.

[0400] vii. Day 7

[0401] Components for Nextera tagmentation are then prepared. One hundred ng of DNA is divided into four 25 μl reactions containing 12.5 μl 2× Tagmentation buffer (Nextera), 1 μl nuclease-free dH₂O, 2.5 μl Tn5 enzyme(Nextera), and 9 μl DNA (25 ng). Fragments of each of the reactions are analyzed on a Bioanalyzer for quality control.

[0402] The reactions are incubated at 55° C. for 5 minutes, then at 10° C. for 10 minutes. Twenty-five μl of H₂O is added, and tagmented DNA is purified using Zymo columns. Three hundred fifty μl of Binding Buffer is added to the sample, and the mixture is loaded into a column and spun at 13,000 rpm for 30 seconds. The flow through is re-applied and the columns are spun again. The columns are washed twice with 200 μl of wash buffer and spun for 1 minute to dry the membrane. The column is transferred to a clean Eppendorf tube and 25 μl of Elution buffer is added. The tube is spun down for 1 minute. This step is repeated with another 25 μl of elution buffer. All tagmented DNA is combined into one tube.

[0403] ChIA-PETs are immobilized on Streptavidin beads using the following steps. 2×B&W Buffer (40 ml) is prepared as follows for coupling of nucleic acids: 400 μl 1M Tris-HCl pH 8.0 (10 mM final), 80 μl 1M EDTA (1 mM final), 16 ml 5M NaCl (2M final), and 23.52 ml dH₂O. 1×B&W Buffer (40 ml total) is prepared by adding 20 ml dH₂O to 20 ml of the 2×B&W Buffer.

[0404] MyOne Streptavidin Dynabeads M-280 are allowed to come to room temperature for 30 minutes, and 30 μl of beads are transferred to a new 1.5 ml tube. Beads are washed with 150 μl of 2×B&W Buffer twice. Beads are resuspended in 100 μl of iBlock buffer (Applied Biosystems), and mixed. The mixture is incubated at RT for 45 minutes on a rotator.

[0405] I-BLOCK Reagent is prepared to contain: 0.2% I-Block reagent (0.2 g), 1×PBS or 1×TBS (10 ml 10×PBS or 10×TBS), 0.05% Tween-20 (50 μl), and H₂O to 100 ml. 10×PBS and I-BLOCK reagent is added to H₂O, and the mixture is microwaved for 40 seconds (not allowed to boil), then stirred. Tween-20 is added after the solution is cooled. The solution remains opaque, but particles are dissolved. The solution is coded to RT for use.

[0406] During incubation of beads, 500 ng of sheared genomic DNA is added to 50 μl of H₂O and 50 μl of 2×B&W Buffer. When the beads finish incubating with the iBLOCK buffer, they are washed twice with 200 μl of 1×B&W buffer. The wash buffer is discarded, and 100 μl of the sheared genomic DNA is added. The mixture is incubated with rotation for 30 minutes at RT. The beads are washed twice with 200 μl of 1×B&W buffer. Tagmented DNA is added to the beads with an equal volume of 2×B&W buffer and incubated for 45 minutes at RT with rotation. The beads are washed 5 times with 500 μl of 2×SSC/0.5% SDS buffer (30 seconds each time) followed by 2 washes with 500 ml of 1×B&W Buffer and incubating each after wash for 5 minutes at RT with rotation. The beads are washed once with 100 μl elution buffer (EB) from a Qiagen Kit by resuspending beads gently and putting the tube on a magnet. The supernatant is removed from the beads, and they were resuspended in 30 μl of EB.

[0407] A paired end sequencing library is constructed on beads using the following protocol. Ten μl of beads are tested by PCR with 10 cycles of amplification. The 50 μl of the PCR mixture contains: 10 μl of bead DNA, 15 μl NPM mix (from Illumina Nextera kit), 5 μl of PPC PCR primer, 5 μl of Index Primer 1 (i7), 5 μl of Index Primer 2 (i5), and 10 μl of H20. PCR is performed using the following cycle conditions: denaturing the DNA at 72° C. for 3 minutes, then 10-12 cycles of 98° C. for 10 seconds, 63° C. for 30 seconds, and 72° C. for 50 seconds, and a final extension of 72° C. for 5 minutes. The number of cycles is adjusted to obtain about 300 ng of DNA total with four 25 μl reactions. The PCR product may be held at 4° C. for an indefinite amount of time.

[0408] The PCR product was cleaned-up using AMPure beads. Beads are allowed to come to RT for 30 minutes before using. Fifty μl of the PCR reaction is transferred to a new Low-Bind Tube and (1.8×volume) 90 μl of AMPure beads is added. The mixture is pipetted well and incubated at RT for 5 minutes. A magnet is used for 3 minutes to collect beads and remove the supernatant. Three hundred μl of freshly prepared 80% ethanol is added to the beads on the magnet, and the ethanol is carefully dicarded. The wash is repeated, and then all ethanol is removed. The beads are dried on the magnet rack for 10 minutes. Ten μl EB is added to the beads, mixed well, and incubated for 5 minutes at RT. The eluate is collected, and 1 μl of eluate is used for Qubit and Bioanalyzer.

[0409] The library is cloned to verify complexity using the following protocol. One μl of the library is diluted at 1:10. A PCR reaction is performed as described below. Primers that anneal to Illumina adapters are chosen (Tm=52.2° C.). The PCR reaction mixture (total volume: 50 μl) contains the following: 10 μl of 5×GoTaq buffer, 1 μl of 10 mM dNTP, 5 μl of 10 μM primer mix, 0.25 μl of GoTaq polymerase, 1 μl of diluted template DNA, and 32.75 μl of H20. PCR is performed using the following cycle conditions: denaturing the DNA at 95° C. for 2 minutes and 20 cycles at the following conditions: 95° C. for 60 seconds, 50° C. for 60 seconds, and 72° C. for 30 seconds with a final extension at 72° C. for 5 minutes. The PCR product may be held at 4° C. for an indefinite amount of time.

[0410] The PCR product is ligated with the pGEM® T-Easy vector (Promega) protocol. Five μl of 2×T4 Quick ligase buffer, 1 μl of pGEM®-Easy vector, 1 μl of T4 ligase, 1 μl of PCR product, and 2 μl of H₂O are combined to a total volume of 10 μl. The product is incubated for 1 hour at RT and 2 μl is used to transform Stellar competent cells. Two hundred μl of 500 μl of cells are plated in SOC media. The next day, 20 colonies are selected for Sanger sequencing using a T7 promoter primer. 60% clones had a full adapter, and 15% had a partial adapter.

[0411] viii. Reagents

[0412] Protein G Dynabeads for 10 samples are from Invitrogen Dynal, Cat #10003D. Block solution (50 ml) contains 0.25g BSA dissolved in 50 ml of ddH2O (0.5% BSA, w/v), and is stored at 4° C. for 2 days before use.

[0413] Lysis buffer 1 (LB1) (500 ml) contains 25 ml of 1M Hepes-KOH, pH 7.5; 14 ml of 5M NaCl; 1 ml of 0.5 M EDTA, pH 8.0; 50 ml of 100% Glycerol solution; 25 ml of 10% NP-40; and 12.5 ml of 10% Triton X-100. The pH is adjusted to 7.5. The buffer is sterile-filtered, and stored at 4° C. The pH is re-checked immediately prior to use. Lysis buffer 2 (LB2) (1000 ml) contains 10 ml of 1M Tris-HCL, pH 8.0; 40 ml of 5 M NaCl; 2 ml of 0.5 M EDTA, pH 8.0; and 2 ml of 0.5 M EGTA, pH 8.0. The pH is adjusted to 8.0. The buffer is sterile-filtered, and stored at 4° C. The pH is re-checked immediately prior to use.

[0414] Sonication buffer (500 ml) contains 25 ml of 1M Hepes-KOH, pH 7.5; 14 ml of 5M NaCl; 1 ml of 0.5 M EDTA, pH 8.0; 50 ml of 10% Triton X-100; 10 ml of 5% Na-deoxycholate; and 5 ml of 10% SDS. The buffer is sterile-filtered, and stored at 4° C. The pH is re-checked immediately prior to use. High-salt sonication buffer (500 ml) contains 25 ml of 1M Hepes-KOH, pH 7.5; 35 ml of 5M NaCl; 1 ml of 0.5 M EDTA, pH 8.0; 50 ml of 10% Triton X-100; 10 ml of 5% Na-deoxycholate; and 5 ml of 10% SDS. The buffer is sterile-filtered, and stored at 4° C. The pH is re-checked immediately prior to use.

[0415] LiCl wash buffer (500 ml) contains 10 ml of 1M Tris-HCL, pH 8.0; 1 ml of 0.5M EDTA, pH 8.0; 125 ml of 1M LiCl solution; 25 ml of 10% NP-40; and 50 ml of 5% Na-deoxycholate. The pH is adjusted to 8.0. The buffer is sterile-filtered, and stored at 4° C. The pH is re-checked immediately prior to use.

[0416] Elution buffer (500 ml) used to quantify the amount of ChIP DNA contains 25 ml of 1M Tris-HCL, pH 8.0; 10 ml of 0.5M EDTA, pH 8.0; 50 ml of 10% SDS; and 415 ml of ddH2O. The pH is adjusted to 8.0. The buffer is sterile-filtered, and stored at 4° C. The pH is re-checked immediately prior to use.

[0417] ChIA-PET Wash Buffer (50 ml) contains 500 μl of 1M Tris-HCl, pH 8.0 (final 10 mM); 100 μl of 0.5M EDTA, pH 8.0 (final 1 mM); 5 ml of 5M NaCl (final 500 mM); and 44.4 ml of dH₂O.

[0418] Q. HiChIP

[0419] Alternatively to ChIA-PET, HiChIP was used to analyze chromatin interactions and conformation. HiChIP requires fewer cells than ChIA-PET.

[0420] i. Cell Crosslinking

[0421] Cells were cross-linked as described in the ChIP protocol above. Crosslinked cells were either stored as pellets at −80° C. or used for HiChIP immediately after flash-freezing the cells.

[0422] ii. Lysis and Restriction

[0423] Fifteen million cross-linked cells were resuspended in 500 μL of ice-cold Hi-C Lysis Buffer and rotated at 4° C. for 30 minutes. For cell amounts greater than 15 million, the pellet was split in half for contact generation and then recombined for sonication. Cells were spun down at 2500g for 5 minutes, and the supernatant was discarded. The pelleted nuclei were washed once with 500 μL of ice-cold Hi-C Lysis Buffer. The supernatant was removed, and the pellet was resuspended in 100 μL of 0.5% SDS. The resuspension was incubated at 62° C. for 10 minutes, and then 285 μL of H₂O and 50 μL of 10% Triton X-100 were added to quench the SDS. The resuspension was mixed well, and incubated at 37° C. for 15 minutes. Fifty μL of 10×NEB Buffer 2 and 375 U of Mbol restriction enzyme (NEB, R0147) was added to the mixture to digest chromatin for 2 hours at 37° C. with rotation. For lower starting material, less restriction enzyme is used: 15 μL was used for 10-15 million cells, 8 μL for 5 million cells, and 4 μL for 1 million cells. Heat (62° C. for 20 minutes) was used to inactivate Mbol.

[0424] iii. Biotin Incorporation and Proximity Ligation

[0425] To fill in the restriction fragment overhangs and mark the DNA ends with biotin, 52 μL of fill-in master mix was reacted by combining 37.5 μL of 0.4 mM biotin-dATP (Thermo 19524016); 1.5 μL of 10 mM dCTP, dGTP, and dTTP; and 10 μL of 5U/μL DNA Polymerase 1, Large (Klenow) Fragment (NEB, M0210). The mixture was incubated at 37° C. for 1 hour with rotation.

[0426] Nine hundred forty-eight μL of ligation master mix was added. Ligation Master Mix contains 150 μL of 10×NEB T4 DNA ligase buffer with 10 mM ATP (NEB, B0202); 125 μL of 10% Triton X-100; 3 μL of 50 mg/mL BSA; 10 μL of 400 U/μL T4 DNA Ligase (NEB, M0202); and 660 μL of water. The mixture was incubated at room temperature for 4 hours with rotation. The nuclei were pelleted at 2500g for 5 minutes, and the supernatant was removed.

[0427] iv. Sonication

[0428] For sonication, the pellet was brought up to 1000 μL in Nuclear Lysis Buffer. The sample was transferred to a Covaris millitube, and the DNA was sheared using a Covaris® E220Evouton™ with the manufacturer recommended parameters. Each tube (15 million cells) was sonicated for 4 minutes under the following conditions: Fill Level 5; Duty Cycle 5%; PIP 140; and Cycles/Burst 200.

[0429] v. Preclearing, Immunoprecipitation, IP Bead Capture, and Washes

[0430] The sample was clarified for 15 minutes at 16,100g at 4° C. The sample is split into 2 tubes of about 400 μL each and 750 μL of ChIP Dilution Buffer is added. For the Smc1a antibody (Bethyl A300-055A), the sample is diluted 1:2 in ChIP Dilution Buffer to achieve an SDS concentration of 0.33%. 60 μL of Protein G beads were washed for every 10 million cells in ChIP Dilution Buffer. Amounts of beads (for preclearing and capture) and antibodies were adjusted linearly for different amounts of cell starting material. Protein G beads were resuspended in 50 μL of Dilution Buffer per tube (100 μL per HiChIP). The sample was rotated at 4° C. for 1 hour. The samples were put on a magnet, and the supernatant was transferred into new tubes. 7.5 μg of antibody was added for every 10 million cells, and the mixture was incubated at 4° C. overnight with rotation. Another 60 μL of Protein G beads for every 10 million cells in ChIP Dilution Buffer was added. Protein G beads were resuspended in 50 μL of Dilution Buffer (100 μL per HiChIP), added to the sample, and rotated at 4° C. for 2 hours. The beads were washed three times each with Low Salt Wash Buffer, High Salt Wash Buffer, and LiCl Wash Buffer. Washing was performed at room temperature on a magnet by adding 500 μL of a wash buffer, swishing the beads back and forth twice by moving the sample relative to the magnet, and then removing the supernatant

[0431] vi. ChIP DNA Elution

[0432] ChIP sample beads were resuspended in 100 μL of fresh DNA Elution Buffer. The sample beads were incubated at RT for 10 minutes with rotation, followed by 3 minutes at 37° C. with shaking. ChIP samples were placed on a magnet, and the supernatant was removed to a fresh tube. Another 100 μL of DNA Elution Buffer was added to ChIP samples and incubations were repeated. ChIP sample supernatants were removed again and transferred to a new tube. There was about 200 μL of ChIP sample. Ten μL of Proteinase K (20 mg/ml) was added to each sample and incubated at 55° C. for 45 minutes with shaking. The temperature was increased to 67° C., and the samples were incubated for at least 1.5 hours with shaking. The DNA was Zymo-purified (Zymo Research, #D4014) and eluted into 10 μL of water. Post-ChIP DNA was quantified to estimate the amount of Tn5 needed to generate libraries at the correct size distribution. This assumed that contact libraries were generated properly, samples were not over sonicated, and that material was robustly captured on streptavidin beads. SMC1 HiChIP with 10 million cells had an expected yield of post-ChIP DNA from 15 ng-50 ng. For libraries with greater than 150 ng of post-ChIP DNA, materials were set aside and a maximum of 150 ng was taken into the biotin capture step

[0433] vii. Biotin Pull-Down and Preparation for Illumina Sequencing

[0434] To prepare for biotin pull-down, 5 μL of Streptavidin C-1 beads were washed with Tween Wash Buffer. The beads were resuspended in 10 μL of 2× Biotin Binding Buffer and added to the samples. The beads were incubated at RT for 15 minutes with rotation. The beads were separated on a magnet, and the supernatant was discarded. The beads were washed twice by adding 500 μL of Tween Wash Buffer and incubated at 55° C. for 2 minutes while shaking. The beads were washed in 100 μL of 1× (diluted from 2×) TD Buffer. The beads were resuspended in 25 μL of 2×TD Buffer, 2.5 μL of Tn5 for each 50 ng of post-ChIP DNA, and water to a volume of 50 μL.

[0435] The Tn5 had a maximum amount of 4 μL. For example, for 25 ng of DNA transpose, 1.25 μL of Tn5 was added, while for 125 ng of DNA transpose, 4 μL of Tn5 was used. Using the correct amount of Tn5 resulted in proper size distribution. An over-transposed sample had shorter fragments and exhibited lower alignment rates (when the junction was close to a fragment end). An undertransposed sample has fragments that are too large to duster properly on an Illumina sequencer. The library was amplified in 5 cycles and had enough complexity to be sequenced deeply and achieve proper size distribution regardless of the level of transposition of the library.

[0436] The beads were incubated at 55° C. with interval shaking for 10 minutes. Samples were placed on a magnet, and the supernatant was removed. Fifty mM EDTA was added to samples and incubated at 50° C. for 30 minutes. The samples were then quickly placed on a magnet, and the supernatant was removed. The samples were washed twice with 50 mM EDTA at 50° C. for 3 minutes, then were removed quickly from the magnet. Samples were washed twice in Tween Wash Buffer for 2 minutes at 55° C., then were removed quickly from the magnet. The samples were washed with 10 mM Tris-HCl, pH8.0.

[0437] viii. PCR and Post-PCR Size Selection

[0438] The beads were resuspended in 50 μL of PCR master mix (use Nextera XT DNA library preparation kit from Illumina, #15028212 with dual-Index adapters #15055289). PCR was performed using the following program. The cycle number was estimated using one of two methods: (1) A first run of 5 cycles (72° C. for 5 minutes, 98° C. for 1 minute, 98° C. for 15 seconds, 63° C. for 30 seconds, 72° C. for 1 minute) is performed on a regular PCR and then the product is removed from the beads. Then, 0.25×SYBR green is added, and the sample is run on a qRT-PCR. Samples are pulled out at the beginning of exponential amplification; or (2) Reactions are run on a PCR and the cycle number is estimated based on the amount of material from the post-ChIP Qubit (greater than 50 ng is run in 5 cycles, while approximately 50 ng is run in 6 cycles, 25 ng is run in 7 cycles, 12.5 ng is run in 8 cycles, etc.).

[0439] Libraries were placed on a magnet and eluted into new tubes. The libraries were purified using a kit form Zymo Research and eluted into 10 μL of water. A two-sided size selection was performed with AMPure XP beads. After PCR, the libraries were placed on a magnet and eluted into new tubes. Then, 25 μL of AMPure XP beads were added, and the supernatant was kept to capture fragments less than 700 bp. The supernatant was transferred to a new tube, and 15 μL of fresh beads were added to capture fragments greater than 300 bp. A final elution was performed from the Ampure XP beads into 10 μL of water. The library quality was verified using a Bioanalyzer.

[0440] ix. Buffers

[0441] Hi-C Lysis Buffer (10 mL) contains 100 μL of 1M Tris-HCl pH 8.0; 20 μL of 5M NaCl; 200 μL of 10% NP-40; 200 μL of 50× protease inhibitors; and 9.68 mL of water. Nuclear Lysis Buffer (10 mL) contains 500 μL of 1M Tris-HCl pH 7.5; 200 μL of 0.5M EDTA; 1 mL of 10% SDS; 200 μL of 50× Protease Inhibitor; and 8.3 mL of water. ChIP Dilution Buffer (10 mL) contains 10 μL of 10% SDS; 1.1 mL of 10% Triton X-100; 24 μL of 500 mM EDTA; 167 μL of 1M Tris pH 7.5; 334 μL of 5M NaCl; and 8.365 mL of water. Low Salt Wash Buffer (10 mL) contains 100 μL of 10% SDS; 1 mL of 10% Triton X-100; 40 μL of 0.5M EDTA; 200 μL of 1M Tris-HCl pH 7.5; 300 μL of 5M NaCl; and 8.36 mL of water. High Salt Wash Buffer (10 mL) contains 100 μL of 10% SDS; 1 mL of 10% Triton X-100; 40 μL of 0.5M EDTA; 200 μL of 1M Tris-HCl pH 7.5; 1 mL of 5M NaCl; and 7.66 mL of water. LiCl Wash Buffer (10 mL) contains 100 μL of 1M Tris pH 7.5; 500 μL of 5M LiCl; 1 mL of 10% NP-40; 1 mL of 10% Na-deoxycholate; 20 μL of 0.5M EDTA; and 7.38 mL of water.

[0442] DNA Elution Buffer (5 mL) contains 250 μL of fresh 1M NaHCO₃; 500 μL of 10% SDS; and 4.25 mL of water. Tween Wash Buffer (50 mL) contains 250 μL of 1M Tris-HCl pH 7.5; 50 μL of 0.5M EDTA; 10 mL of 5M NaCl; 250 μL of 10% Tween-20; and 39.45 mL of water. 2× Biotin Binding Buffer (10 mL) contains 100 μL 1M Tris-HCl pH 7.5; 20 μL of 0.5M; 4 mL of 5M NaCl; and 5.88 mL of water. 2×TD Buffer (1 mL) contains 20 μL of 1M Tris-HCl pH 7.5; 10 μL of 1M MgCl₂; 200 μL of 100% Dimethylformamide; and 770 μL of water.

[0443] R. Determining the IC50

[0444] The optimal concentration prior to cell toxicity (IC50) was determined for each compound that mimics or rescues the DBA phenotype. First, the IC50 for 4 different compounds in a TF1 cell line and CB-CI-IRES-CD34+ primary cells were determined. Nutlin 3 is a potent and selective MDM2 (RING finger-dependent ubiquitin protein ligase for itself and p53) antagonist with an IC50 of 90 nM in a cell-free assay. It has also been observed to stabilize p73 in p53-deficient cells. Pifithrin-α is an inhibitor of p53, which inhibits p53-dependent transactivation of p53-responsive genes. Nutlin 3a, an active enantiomer of Nutlin 3, inhibits the p53/MDM2 interaction with an IC50 of 90 nM in a cell-free assay. Cyclic Pifithrin-a was also analyzed. Three 96-well plates were used for analysis of each cell type.

[0445] Three rows were dedicated to each compound, and column 12 contained cells+media/2% DMSO. Compound dilutions were made in 11 tubes containing media+2% DMSO (11×5=55×1.5 ml tubes per cell type). Two conical tubes of media+2% DMSO were prepared for each media type (RPM1-GMCSF or Diff media-dox). Seven ml of media was combined with each drug. Therefore, 35 ml was needed for each cell type, and 50 mL+2% DMSO media was made. The compounds were diluted to 10 mM in DMSO. Cells were seeded at 100K cells/well in 50 μL of media. Cells were diluted to 2M cells/ml. One hundred eight wells were needed for each cell type (72 wells on 2 plates, 36 wells on 1 plate).

[0446] For each drug concentration, 150 μL of each dilution was analyzed in triplicate for each cell type. 0.5 ml of each drug concentration was made resulting in 300 μL extra.

[0447] Drug concentrations analyzed were as shown in Table 26.

TABLE 26
Stock drug concentrations

| | | | |
|---|---|---|---|
| Tube | Conc. | Starting Vol. | End Vol. |

| | | | | | | |
|---|---|---|---|---|---|---|
| 1 | 200 | μM | 1 | mL | 0.5 | ml |
| 2 | 100 | μM | 0.5 | ml | 0.5 | ml |
| 3 | 50 | μM | 0.5 | ml | 0.5 | ml |
| 4 | 25 | μM | 0.5 | ml | 0.5 | ml |
| 5 | 12.5 | μM | 0.5 | ml | 0.5 | ml |
| 6 | 6.25 | μM | 0.5 | ml | 0.5 | ml |
| 7 | 3.125 | μM | 0.5 | ml l | 0.5 | ml |
| 8 | 1.5 | μM | 0.5 | ml | 0.5 | ml |
| 9 | 0.7 | μM | 0.5 | ml | 0.5 | ml |
| 10 | 0.35 | μM | 0.5 | ml | 0.5 | ml |
| 11 | 0.175 | μM | 0.5 | ml | 1 | ml |

| | | | |
|---|---|---|---|
| 12 | Control | Control | Control |

[0448] 0.5 mL of DMSO-media was added to each of 551.5 ml tubes. Twenty μL of 10 mM stock and 480 μL of additional media was added into tube 1. 10.8 million cells were needed in 5.4 ml aliquots for 108 wells with 100,000 cells/well in 50 μL of liquid. Eight ml of cells at 2M/ml were collected for a total of 16 million cells. An additional 5.2 million cells were transferred by 2.6 ml aliquots to 2 sterile reservoirs (for 10 ml of cells). The final titration calculation was as follows: 8 ml of 2 million/cells=16 million cells/8 ml=2,000 cells/μL×50 μL=100,000 cells/50 μL/well.

[0449] S. Biological Activity of Maximal Compound Dosages

[0450] The biological activity of compounds inn TF1 and CI-CB-CD34+ cells was studied by choosing a maximal dose that does not cause cell toxicity.

[0451] The concentration of 10 μM was used for compounds Nutlin 3, TFP, Pifithrin alpha, Nutlin 3a, and cyclic Pifithrin alpha. The stock for each compound was at 10 mM and were diluted to 100 μM with RMPI+GCMSF (2% DMSO). Cells were collected and resuspended in 8 mL of RPMI+GMCSF at a concentration of 1×10⁶ cells/mL. For the TF1 cells, at each well of a 6-well plate were added 1 mL of cells, 300 μL of 100 μM compound dilution, and 1.7 mL of RMPI+GCMSF+1.5% DMSO (1% final DMSO concentration in 3 mL total). One mL of the CI-CB-CD34+ cells, 300 μL of 100 μM compound dilution, and 700 μL of RMPI+GCMSF (0.1% final DMSO concentration in 2 mL total) were added to each well of a 6-well plate.

[0452] T. Dose Titration of Compounds into RPS19 KD TF1 Cells

[0453] The concentration of the compounds needed to observe a rescued DBA phenotype in TF1 RPS19 KD cells was determined via qRT-PCR analysis of p53 levels. The concentrations of drugs used in TF1 cells above that did not result in cell toxicity were 3.125 μM (Dose 3), 6.25 μM (Dose 2), and 25 μM (Dose 1). Nine different cell lines were used. The wild type (WT) TF1 and 8 TF1 KD cell lines transduced with 1 of the following plasmid: A) pSMART PGK GFP shNT-dox inducible; B) pSMART PGK GFP shRSP19_1-dox inducible; C) pSMART PGK GFP shRPS19_2-dox inducible; D) pSMART EF1alpha GFP shNT-dox inducible; 1) pLKO RPS19_sh4-constitutive; J) pLKO RPS19_sh5-constitutive; K) pLKO shNT-constitutive; and L) PLKO RPS19_sh1-constitutive. Cells were collected in separate tubes in a concentration of 1000 cells/μL to reach a concentration of 50,000 cells/50 μL per well. Cell were centrifuged at 1,200 rpm for 5 minutes. Then, the media was aspirated and cells were resuspended in RPMI+GCMSF medium.

[0454] For the preparation of Dose 1 (final concentration on plate 25 μM), a 50 μM solution was made by adding 300 μL of 100 μL stock to 300 μL of RPM1+GCMSF+2% DMSO (final 1% DMSO). The 50 μM solution was further diluted to 2× when added with the cells into a well, resulting in a final concentration of 25 μM. For the preparation of Dose 2 (final concentration on plate 6.125 μM), a 12.25 μM solution was made by adding 75 μL of 100 μL stock to 525 μL of RPM1+GCMSF+2% DMSO. The 1225 μM solution was further diluted 2× when added with the cells into a well, resulting into a final concentration of 6.125 μM. For the preparation of Dose 3 (final concentration on plate 3.125 μM), a 6.25 μM solution was made by adding 37.5 μL of 100 μL stock to 562.5 μL of RPMI+GCMSF+2% DMSO. The 6.25 μM solution was further diluted 2× when added with the cells into a well, resulting in a final concentration of 3.125 μM. DMSO 1% was used for each cell type as DMSO control.

[0455] A 96-well plate was used for analysis of each dose on each cell type. Fifty μL of each cell type and 50 μL of a diluted compound are added to the corresponding wells for a total of 100 μL RPMI+GCMSF+1% DMSO, with 50,000 cells/well. The following day, 50 μL for RNA (25,000 cells) and 50 μL for viability ATP assay (25,000 cells) were collected from each well.

[0456] U. Drug Dilutions for Administration to Hepatocytes

[0457] Prior to compound treatment of hepatocytes, the drugs and bioactive compounds were diluted according to the parameters in Table 27. For the drugs, 100 mM stock drugs in DMSO were diluted to 10 mM by mixing 0.1 mM of the stock drug in DMSO with 0.9 ml of DMSO to a final volume of 1.0 ml. Five μl of the diluted drug was added to each well, and 0.5 ml of media was added per well of drug. Each drug was analyzed in triplicate. Dilution to 1000× was performed by adding 5 μl of drug into 45 μl of media, and the 50 μl being added to 450 μl of media on cells.

[0458] Table 27 provides the weight of the compound for a 100 mM dilution in 1 ml of DMSO, the volume of DMSO in the 100 mM dilution, the amount of added volume, the final concentration, and the storage temperature for the dry compound.

TABLE 27
Dilution values for drug compounds

| Compound | MW (Da) | Weight (mg) | DMSO (ml) | Added vol. (ml) | Final conc. (mM) | Storage | |
|---|---|---|---|---|---|---|---|
| Simvastatin | 418.6 | Net weighed | 1.2 | Not diluted | | 4° | C. |
| Adapin (dexepin) | 315.8 | 31.6 | | 1.0 | 95.7 | RT | |
| Danazol | 337.5 | 33.7 | | 1.0 | 100.0 | RT | |
| Rosiglitazene maleate | 473.5 | 47.4 | | 1.0 | 96.6 | −20° | C. |
| Sulpiride | 341.4 | 34.1 | | 1.1 | 89.6 | 4° | C. |
| Ranitidine | 350.9 | 35.1 | | 1.0 | 100.5 | RT | |
| Metformin | 165.6 | 16.6 | | 1.1 | 92.5 | −20° | C. |
| Imatinib | 589.7 | Not weighed | 1.7 | Not diluted | | 4° | C. |
| Papaverine | 375.9 | 37.6 | | 1.1 | 89.7 | RT | |
| Miodarone | 681.8 | 68.2 | | 1.1 | 91.5 | −20° | C. |
| Nitrofurantoin | 238.2 | 23.8 | | 1.3 | 78.6 | RT | |
| Prednisone | 358.4 | 35.8 | | 1.2 | 84.3 | RT | |
| Penicillamine(D-) | 149.2 | 14.9 | | | | | |
| Rifampicin | 822.9 | 82.3 | | 1.0 | 99.5 | −20° | C. |
| Benzbromarone | 424.1 | 42.4 | | 1.1 | 92.0 | 4° | C. |
| Isoniazid | 137.1 | 13.7 | | 1.5 | 66.9 | RT | |
| Acetaminophen (paracetamol) | 151.2 | 15.1 | | 1.0 | 100.0 | −20° | C. |
| Ritonavir | 720.9 | Not weighed | 1.4 | Not diluted | | RT | |
| SGI-1776 | 405.4 | Not weighed | 1.2 | Not diluted | | | |
| Valproate | 166.2 | 16.6 | | 1.3 | 79.9 | RT | |
| Ibuprofen | 206.3 | 20.6 | | 1.4 | 69.0 | RT | |
| Propylthiouracil | 170.2 | 17.0 | | 1.0 | 100.0 | −20° | C. |
| Rapamycin | 914.2 | Not weighed | 0.5 | Not diluted | | −20° | C. |

[0459] Bioactive compounds were also administered to hepatocytes. To obtain 1000× stock of the bioactive compounds in 1 ml DMSO, 0.1 ml of 10,000× stock was combined with 0.9 ml DMSO. Bioactive compounds as diluted had the characteristics shown in Table 28.

TABLE 28
Dilution values for bioactive compounds

| Compound | MW (Da) | Final conc. | | 1000x conc. | | DMSO (ml) | Drug (ml) | 1000x (mg) | 10000x (mg) |
|---|---|---|---|---|---|---|---|---|---|
| BIO | 356.2 | 2 | μM | 2 | mM | 0.7 | | 0.7 | 7.1 |
| ATRA | 300.4 | 2 | μM | 2 | mM | 8.3 | | 0.6 | 6.0 |
| xav939 | 312.3 | 1 | μM | 1 | mM | 1.6 | | 0.3 | 3.1 |
| bms777607 | 512.9 | 5 | μM | 5 | mM | 0.2 | | 2.6 | 25.6 |
| dmPGE2 | 380.5 | 1 | μM | 1 | mM | 0.3 | | 0.4 | 3.8 |
| MK-0752 | 442.9 | 20 | μM | 20 | mM | None | 0.6 (DMSO) | 8.9 | Not prepared |
| N-Acetylpurinomycin | 513.6 | 100 | ng/ml | 100 | μg/ml | 10.0 | | 0.1 | 1.0 |
| LY 364947 | 272.3 | 3 | μM | 3 | mM | 6.1 | | 0.8 | 8.2 |

[0460] V. Transduction of Hematopoietic Cells with Conditional Immortalization Transgenes

[0461] Cryopreserved CD34+ cells (cord blood, peripheral blood, or bone marrow derived) were thawed from cryovials (typically 1×10⁶ or 5×10⁶ cells/vial) at 37° C. until completely thawed. Cells were then grown at a density of 1×10⁶ cells/mL for a period of 11 days in Hematopoietic Stem Cell expansion media DXF (Promocell) for the expansion of hematopoietic progenitor cells. Expanded CD34+ progenitor cells were then grown for an additional 3 days in SFEMII medium (Stem Cell Technologies) supplemented with the Erythroid Expansion supplement (Stem Cell Technologies). Cells can be efficiently cryopreserved at this step and are ready for viral transduction.

[0462] The Lenti-X Tet-One Inducible Expression System (Puro) (Clontech, Cat. No. 631847) was used for the transfection of 293FT cells. pLVX-TetOne-Puro vector was modified to exchange the Puro cassette with a Blasticidin (BLA), and full length cMYC, BCL-XL, BCL-XL-T2A-MYC and BCL-XL-IRES-MYC were synthesized and cloned into the pLVX-TetOne-Puro and pLVX-TetOne-BLA vectors.

[0463] 293FT cells (Clontech) were transfected with 7 μg of pLVX-TetOne-Puro lentiviral vector combined with Lenti-X Packaging Single Shots (VSV-G) plasmids (Clontech). 293FT cells were transduced using the plasmid mixture. 48 hours after the transduction, the viral supernatant was collected and filtered through a 0.45 μM PVDF unit. The viral particles were concentrated by adding ⅓ of the total volume of Lenti-X Concentrator (Clontech). The mixture was mixed well by inversion and incubated for 1-2 hours at 4° C. After precipitation, the tubes were centrifuged at 4° C. for more than 45 minutes at 1,500 g to pellet the virus. Then, the supernatant was aspirated and the pellet was resuspended in PBS (to a concentration of 25-50×). Plates were coated with retronectin and incubated for more than 4 hours at RT or overnight at 4° C., using the Retronectin-transduction protocol (Clontech) according to the manufacturer's instructions. Following the Retronectin-incubation protocol (Clontech), the plates were blocked with 2% BSA/PBS for more than 30 minutes, and washed with PBS. Target cells were seeded onto the Retronectin-coated plates and the appropriate amount of virus was added. Then the plates were spun at 2,500 rpm for 1-2 hours at room temperature. Cells were incubated at 37° C. for 72 hours following the infection, prior to selection.

[0464] For the selection, antibiotic was added in the cell culture medium (for example 5 μg/mL of PURO). Following the death of all the non-resistant cells, the surviving cells were collected for RNA and protein assays. For RNA extraction, the cells were harvested in 500 μL of TRIZOL reagent (Thermo Scientific), and incubated for 5 minutes at RT. Then, 100 μL of chloroform was added to the cells, and the mixture was vortexed and then centrifuged at 12,000 g for 15 minutes. The aqueous phase was transferred to fresh tubes and one volume of 70% ethanol was added. The TRIZOL Plus RNA purification Kit (Thermo Scientific) was used for the remaining extraction protocol according to the manufacturer's instructions. For the conversion of RNA to cDNA the High Capacity cDNA RT kit (Thermo Scientific) was used according to the manufacturer's instructions. The cDNA was analyzed with qRT-PCR to determine the fold change of knockdown cells using Taqman Fast PCR mix and Applied Biosystems probes (Thermo Scientific).

### Example 2. Gene Expression in Stimulated Hepatocytes

[0465] To identify genes modulated with small molecules, primary human hepatocytes were prepared as a monoculture, and 39 small molecules that are known cell signaling agonists/antagonists were applied to the cells. The 39 compounds chosen as perturbation stimuli were known in the art to modulate at least one canonical cellular pathway. These compounds are listed in Table 29 with their category, DrugBank identifier (DBO), pathway, gene target, and pharmaceutical action. It is noted that the unique identifiers from ENSEMBL for the “Overlapping Gene(s)” have been modified to remove the first five leading zeros (0) of the identifier after the ENSG label (ENSG00000).

TABLE 29
Pathways associated with 39 compounds

| Compound | Category | DB0 | Pathway | Target | ENSG | Action |
|---|---|---|---|---|---|---|
| Valproate | Drug | 0313 | GABAergic synapse | ABAT/HDAC9 | Fusion | inhibitor |
| Atenolol | Drug | 0335 | Adrenergic signaling | ADRB1 | 043591 | antagonist |
| Amiodarone | Drug | 1118 | Adrenergic signaling | ADRB1 | 043591 | antagonist |
| Dorsomorphin | Bioactive | | TGF beta signaling | ALK | 171094 | inhibitor |
| Imatinib | Drug | 0619 | Ras & ErbB signaling | BCR/ABL | Fusion | inhibitor |
| BMP2 | Bioactive | | TGF beta signaling | BMPR1A | 107779 | agonist |
| Penicillamine(D-) | Drug | 0859 | | Copper | NA | chelator |
| Benzbromarone | Drug | | Arachidonic acid metabolism | CYP2C9 | 138109 | inhibitor |
| Sulpiride | Drug | 0391 | cAMP signaling | DRD2 | 149295 | antagonist |
| Danazol | Drug | 1406 | Estrogen signaling | ESR1 | 091831 | agonist |
| Prednisone | Drug | 0635 | Neuroactive ligand-receptor interaction | GR | NA | agonist |
| BIO | Bioactive | 3444 | TGF beta signaling | GSK3B | 082701 | inhibitor |
| Simvastatin | Drug | 0641 | Cholesterol synthesis | HMGCR | 113161 | inhibitor |
| dmPGE2 | Bioactive | | Arachidonic acid metabolism | HPGD | 164120 | inhibitor |
| Ranitidine | Drug | 0863 | Calcium signaling | HRH2 | 113749 | antagonist |
| Adapin (doxepin) | Drug | 1142 | Calcium signaling | HTR2A | 102468 | antagonist |
| Nefazodone | Drug | 1149 | Calcium signaling | HTR2A | 102468 | antagonist |
| bms777607 | Bioactive | | Ras signaling | MET | 105976 | inhibitor |
| Captopril | Drug | 1197 | Estrogen signaling | MMP2 | 087245 | inhibitor |
| Rapamycin | Drug | 0877 | mTOR signaling | mTOR | 198793 | inhibitor |
| Papaverine | Drug | 1113 | cAMP signaling | PDE4B | 184588 | inhibitor |
| SGI-1776 | Drug | | Jak-STAT signaling | PIM1 | 137193 | inhibitor |
| Rifampicin | Drug | 1045 | Antibiotic | Pol | NA | inhibitor |
| ritonavir | Drug | 0503 | Transcription | Pol | NA | inhibitor |
| Rosiglitazone maleate | Drug | 0412 | PPAR signaling | PPARG | 132170 | agonist |
| Metformin | Drug | 0331 | Insulin & AMPK signaling | PRKAB1 | 111725 | agonist |
| Acetaminophen | Drug | 0316 | Arachidonic acid metabolism | PTGS1 | 095303 | inhibitor |
| ibuprofen | Drug | 1050 | NF-κB signaling | PTGS2 | 073756 | inhibitor |
| bms189453 | Bioactive | | Nuclear Receptor transcription | RARB | 077092 | agonist |
| ATRA | Bioactive | 0755 | Nuclear Receptor transcription | RXRB | 204231 | agonist |
| Disopyramide | Drug | 0280 | Adrenergic signaling | SCN5A | 183873 | inhibitor |
| N-Acetylpurinomycin | Bioactive | | TGF beta signaling | SKI and SKIL | 136603 | modulator |
| bms833923 | Bioactive | | Hedgehog signaling | SMO | 128602 | antagonist |
| LY 364947 | Bioactive | | TGF beta signaling | TGFBR1 | 106799 | inhibitor |
| xav939 | Bioactive | | WNT & PARP inhibitor | TNK1 | 174292 | inhibitor |
| Propylthiouracil | Drug | 0550 | Thyroid hormone synthesis | TPO | 115705 | inhibitor |
| Nitrofurantoin | Drug | 0698 | Antibiotic | ydbK | NA | potentiator |
| MK-0752 | Bioactive | | Alzheimer's disease | γ-secretase | NA | inhibitor |
| Isoniazid | Drug | 0951 | Arachidonic acid metabolism | NA | NA | NA |

[0466] Table 30 summarizes the known diseases and genes that are considered to be modulated by each of the 39 small molecules.

TABLE 30
Disease associated genes and modulating compounds

| Gene | Disease | Compound |
|---|---|---|
| COL1A1 | CAFFEY DISEASE | BIO, nitrofurantoin, rifampicin |
| SLC37A4 | GLYCOGEN STORAGE DISEASE Ib; GSD1B | Prednisone |
| SLC2A2 | FANCONI-BICKEL SYNDROME; FBS | Rifampicin, MK-0752, Prednisone |
| AASS | HYPERLYSINEMIA, TYPE I | Rosiglitazone |
| ABCB11 | CHOLESTASIS, PROGRESSIVE FAMILIAL | Prednisone, Ritonavir, Rapamycin |
| | INTRAHEPATIC, 2; PFIC2 | |
| ABCC11 | METABOLIC | Prednisone, Rifampicin, Benzbromarone, |
| | | MK-0752, Rosiglitazone |
| ABCG2 | BLOOD GROUP, JUNIOR SYSTEM; JR | BIO |
| ACACB | METABOLIC | BIO |
| ACADVL | ACYL-CoA DEHYDROGENASE, VERY LONG-CHAIN, | Rosiglitazone |
| | DEFICIENCY OF; ACADVLD | |
| ACAT2 | METABOLIC | Simvastatin |
| ACSL1 | METABOLIC | Rosiglitazone |
| ACSL5 | METABOLIC | Rosiglitazone |
| ACTG2 | VISCERAL MYOPATHY; VSCM | Rapamycin, BIO, ATRA |
| ADAMTSL2 | GELEOPHYSIC DYSPLASIA 1; GPHYSD1 | Prednisone |
| AGTR1 | METABOLIC | Rifampicin |
| AKR1D1 | BILE ACID SYNTHESIS DEFECT, CONGENITAL, | Rapamycin |
| | 2; CBAS2 | |
| ALAS1 | METABOLIC | Rifampicin, Ritonavir, MK-0752 |
| AMACR | BILE ACID SYNTHESIS DEFECT, CONGENITAL, | Prednisone, Benzbromarone |
| | 4; CBAS4 | |
| ANGPTL2 | METABOLIC | Nitrofurantoin, Prednisone |
| AQP7 | METABOLIC | Rosiglitazone |
| ARG1 | ARGININEMIA | Prednisone |
| ASPA | METABOLIC | Rosiglitazone |
| BCO1 | HYPERCAROTENEMIA AND VITAMIN A DEFICIENCY, | Acetaminophen (paracetamol) |
| | AUTOSOMAL DOMINANT | |
| C10orf11 | METABOLIC | BIO |
| CA12 | METABOLIC | Rifampicin, ritonavir |
| CA2 | METABOLIC | Prednisone |
| CDKN1C | INTRAUTERINE GROWTH RETARDATION, | Imatinib, bms777607 |
| | METAPHYSEAL DYSPLASIA, ADRENAL HYPOPLASIA | |
| | CONGENITA, AND GENITAL ANOMALIES | |
| CECR1 | POLYARTERITIS NODOSA, | Nitrofurantoin, Benzbromarone |
| | CHILDHOOD-ONSET; PAN | |
| CIDEC | LIPODYSTROPHY, FAMILIAL PARTIAL, | Rosiglitazone, Nitrofurantoin, Prednisone |
| | TYPE 5; FPLD5 | |
| CLMP | CONGENITAL SHORT BOWEL SYNDROME; CSBS | Metformin, Imatinib, Nitrofurantoin, Simvastatin, |
| | | Isoniazid, Ibuprofen, Propylthiouracil, |
| | | bms777607, dmPGE2, LY 364947, Danazol |
| COL1A1 | CAFFEY DISEASE | BIO |
| COL3A1 | EHLERS-DANLOS SYNDROME, TYPE IV, | Penicillamine(D-), Isoniazid, Ritonavir, Valproate, |
| | AUTOSOMAL DOMINANT | Rapamycin, BIO, Rosiglitazone |
| CPS1 | CARBAMOYL PHOSPHATE SYNTHETASE I | Prednisone |
| | DEFICIENCY, HYPERAMMONEMIA DUE TO | |
| CPT1A | CARNITINE PALMITOYLTRANSFERASE I | Rosiglitazone |
| | DEFICIENCY | |
| CPT2 | CARNITINE PALMITOYLTRANSFERASE II | Rosiglitazone |
| | DEFICIENCY, LATE-ONSET | |
| CYBB | GRANULOMATOUS DISEASE, CHRONIC, | Adapin, Danazol, Penicillamine(D-), Rifampicin, |
| | X-LINKED; CGD | Acetaminophen, xav939 |
| CYP17A1 | METABOLIC | BIO |
| CYP21A2 | ADRENAL HYPERPLASIA, CONGENITAL, | Prednisone |
| | DUE TO isoniazid-HYDROXYLASE DEFICIENCY | |
| CYP27B1 | VITAMIN D HYDROXYLATION-DEFICIENT | Ranitidine, Nitrofurantoin |
| | RICKETS, TYPE 1A; VDDR1A | |
| CYP2C19 | DRUG METABOLISM, POOR, | Rifampicin, MK-0752 |
| | CYP2CRifampicin-RELATED | |
| CYP3A4 | METABOLIC | Prednisone, Rifampicin, Ritonavir, MK-0752, |
| | | Rosiglitazone |
| CYP7A1 | METABOLIC | Rosiglitazone, Imatinib, Prednisone, Rifampicin, |
| | | Simvastatin, Benzbromarone, Ritonavir, Rapamycin, |
| | | ATRA, bms777607, MK-0752 |
| DNAH5 | CILIARY DYSKINESIA, PRIMARY, 3; CILD3 | Prednisone |
| ECH1 | METABOLIC | Rosiglitazone |
| ENG | TELANGIECTASIA, HEREDITARY | Prednisone |
| | HEMORRHAGIC, OF RENDU, | |
| | OSLER, AND WEBER; HHT | |
| ENO3 | METABOLIC | Prednisone, Rifampicin, Ritonavir |
| ENPP3 | METABOLIC | Ritonavir, SGI-1776, N-Acetylpurinomycin |
| ETFDH | METABOLIC | Rosiglitazone |
| FAM111B | POIKILODERMA, HEREDITARY FIBROSING, | Metformin, Rapamycin |
| | WITH TENDON CONTRACTURES, MYOPATHY, | |
| | AND PULMONARY FIBROSIS; POIKTMP | |
| FERMT3 | LEUKOCYTE ADHESION DEFICIENCY, TYPE III; LAD3 | Isoniazid, Valproate |
| FGF19 | METABOLIC | Rifampicin, Ritonavir, ATRA, MK-0752 |
| G6PC | GLYCOGEN STORAGE DISEASE Ia; GSD1A | Prednisone, Rapamycin |
| GALE | GALACTOSE EPIMERASE DEFICIENCY | Ritonavir |
| GHR | LARON SYNDROME | MK-0752 |
| GLA | FABRY DISEASE | Ritonavir |
| GLIS3 | DIABETES MELLITUS, NEONATAL, WITH | Prednisone |
| | CONGENITAL HYPOTHYROIDISM | |
| GYS2 | GLYCOGEN STORAGE DISEASE 0, LIVER; GSD0A | Prednisone |
| HAL | METABOLIC | Prednisone |
| HGD | ALKAPTONURIA; AKU | Prednisone |
| HMGCR | METABOLIC | Simvastatin |
| HMGCS2 | 3-HYDROXY-3-METHYLGLUTARYL-CoASYNTHASE- | Rosiglitazone |
| | 2 DEFICIENCY; HMGCS2D | |
| HMOX1 | HEME OXYGENASE 1 DEFICIENCY; HMOX1D | Nitrofurantoin |
| HOGA1 | METABOLIC | Prednisone |
| HPGD | DIGITAL CLUBBING, ISOLATED CONGENITAL | Prednisone |
| ID1 | METABOLIC | bms777607, MK-0752, imatinib, Nitrofurantoin, |
| IFT80 | SHORT-RIB THORACIC DYSPLASIA2 WITH | Prednisone, Ritonavir |
| | OR WITHOUT POLYDACTYLY; SRTD2 | |
| IGFALS | METABOLIC | Ritonavir |
| LDHA | METABOLIC | Nitrofurantoin |
| LPA | METABOLIC | Rifampicin |
| LPIN2 | MAJEED SYNDROME | Prednisone |
| LRP2 | METABOLIC | Prednisone |
| LRP4 | METABOLIC | Imatinib, Benzbromarone |
| MOGAT2 | METABOLIC | Ritonavir |
| NAGS | N-ACETYLGLUTAMATE SYNTHASE | Prednisone |
| | DEFICIENCY; NAGSD | |
| NCF2 | GRANULOMATOUS DISEASE, CHRONIC, | Prednisone |
| | AUTOSOMAL RECESSIVE, | |
| | CYTOCHROME b-POSITIVE, TYPE II | |
| NOS3 | PREECLAMPSIA/ECLAMPSIA 1; PEE1 | Ranitidine, sulpiride |
| NPHP1 | NEPHRONOPHTHISIS1; NPHP1 | SGI-1776 |
| PCSK9 | METABOLIC | Simvastatin |
| PKHD1 | POLYCYSTIC KIDNEY DISEASE, AUTOSOMAL | Prednisone |
| | RECESSIVE; ARPKD | |
| PKLR | PYRUVATE KINASE DEFICIENCY OF RED CELLS | Benzbromarone, Ritonavir |
| PLA2G6 | METABOLIC | Rinonavir, Rapamycin |
| POR | ANTLEY-BIXLER SYNDROME WITH GENITAL | Prednisone, Rifampicin, Ritonavir, MK-0752, |
| | ANOMALIES AND DISORDERED STEROIDOGENESIS; | Rosiglitazone |
| | ABS1 | |
| PRODH | HYPERPROLINEMIA, TYPE I; HYRPRO1 | Prednisone |
| RMRP | CARTILAGE-HAIR HYPOPLASIA; CHH | Imatinib, Papaverine, Amiodarone, Prednisone, |
| | | Penicillamine (D-), Rifampicin, Benzbromarone, |
| | | Isoniazid, Ibuprofen |
| ROR2 | ROBINOW SYNDROME, AUTOSOMAL | Nitrofurantoin |
| | RECESSIVE; RRS | |
| SLC22A4 | METABOLIC | Rifampicin |
| SLC25A20 | CARNITINE-ACYLCARNITINE TRANSLOCASE | Rosiglitazone |
| | DEFICIENCY; CACTD | |
| SLC29A4 | METABOLIC | Nitrofurantoin |
| SLC2A2 | FANCONI-BICKEL SYNDROME; FBS | Rifampicin, MK-0752 |
| SLC36A2 | METABOLIC | Ibuprofen |
| SLC4A5 | METABOLIC | Rapamycin |
| SLC51B | METABOLIC | Rifampicin |
| SLC6A17 | METABOLIC | Imatinib, Prednisone, Isoniazid, Acetaminephen, |
| | | Rapamycin, ATRA, N-Acetylpurinomycin |
| SLC6A20 | METABOLIC | Rifampicin |
| SLC6A6 | METABOLIC | Rifampicin, BIO |
| SLCO4C1 | METABOLIC | Simvastatin |
| SOAT2 | METABOLIC | Ritonavir, ATRA |
| SORT1 | LOW DENSITY LIPOPROTEIN CHOLESTEROL | Prednisone, Benzbromarone, MK-0752 |
| | LEVEL QUANTITATIVE TRAIT LOCUS; LDLCQ | |
| SPINT2 | DIARRHEA 3, SECRETORY SODIUM, | Prednisone |
| | CONGENITAL, WITH OR WITHOUT OTHER | |
| | CONGENITAL ANOMALIES; DIAR3 | |
| SULT2A1 | METABOLIC | Rosiglitazone |
| TAT | TYROSINEMIA, TYPE II; TYRSN2 | Prednisone |
| TDO2 | METABOLIC | Prednisone |
| TMEM135 | METABOLIC | Rosiglitazone |
| TNFSF11 | OSTEOPETROSIS, AUTOSOMAL | Simvastatin |
| | RECESSIVE 2; OPTB2 | |
| TTPA | VITAMIN E, FAMILIAL ISOLATED | Rosiglitazone |
| | DEFICIENCY OF; VED | |
| VLDLR | METABOLIC | Rosiglitazone, Rifampicin, Ritonavir |
| WAS | WISKOTT-ALDRICH SYNDROME; WAS | xav939, N-Acetylpurinomycin |

[0467] A. Pilot RNA-Seq Results

[0468] To identify genomic signaling centers that were altered by administering the perturbation stimuli, changes in expression of 27,011 genes were measured by RNA-seq after administration of the 39 small molecule compounds in Table 29. Changes in expression having a p-value≤0.05 were considered significant. Table 31 provides the reference numbers used to identify these compounds herein.

TABLE 31
Compound names and reference numbers

| Name | MT | Name | MT | Name | MT |
|---|---|---|---|---|---|
| Simvastatin | MT-51 | Acetaminophen (paracetamol) | MT-922 | Bms777607 | MT-375 |
| Adapin (doxepin) | MT-723 | Ritonavir | MT-372 | Bms833923 | MT-636 |
| Danazol | MT-487 | SGI-1776 inhibitor | MT-254 | DmPGE2 | MT-937 |
| Nefazodone | MT-505 | Valproate | MT-625 | MK-0752 inhibitor | MT-308 |
| Rosiglitazone maleate | MT-361 | Ibuprofen | MT-662 | N-Acetylpurinomycin | MT-993 |
| Sulpiride | MT-277 | Propylthiouracil | MT-127 | LY 364947 inhibitor | MT-740 |
| Captopril | MT-835 | Rapamycin | MT-882 | Nitrofurantoin | MT-152 |
| Atenolol | MT-193 | BIO inhibitor | MT-209 | Prednisone | MT-861 |
| Ranitidine | MT-610 | Tretinoin (ATRA) | MT-603 | Penicillamine(D-) | MT-741 |
| Metformin | MT-117 | Xav939 | MT-713 | Disopyramide | MT-189 |
| Imatinib | MT-182 | Bms189453 agonist | MT-232 | Rifampicin | MT-901 |
| Papaverine | MT-913 | Dorsomorphin | MT-334 | Benzbromarone | MT-220 |
| Amiodarone | MT-641 | BMP2 | MT-543 | Isoniazid | MT-312 |

[0469] Fold change was calculated by dividing the level of expression in the cell system that had been perturbed by the level of expression in an unperturbed system. Expression of 2116 genes was observed to be significantly modulated by at least one of the compounds.

[0470] According to these results, thirty-one of the small molecules were observed to be effective in causing an at least 2-fold expression change in expression of at least one of the 105 disease associated genes (DAGs) of the 2,116 genes. Simvastatin, rosiglitazone, imatinib, nitrofurantoin, prednisone, rifampicin, benzbromarone, ritonovir, rapamycin, BIO, ATRA, MK-0752 were observed to be responsible for at least a 2-fold change in expression for most of the 105 disease associated genes. These genes and associated disease(s) are shown in Table 32.

TABLE 32
Modulated disease associated genes

| Gene | Disease |
|---|---|
| AASS | HYPERLYSINEMIA, TYPE I |
| ABCB11 | CHOLESTASIS, PROGRESSIVE FAMILIAL |
| | INTRAHEPATIC, TYPE 2; PFIC2 |
| ABCC11 | METABOLIC |
| ABCG2 | BLOOD GROUP, JUNIOR SYSTEM; JR |
| ACACB | METABOLIC |
| ACADVL | DEFICIENCY OF ACYL-CoA DEHYDROGENASE, |
| | VERY LONG-CHAIN; ACADVLD |
| ACAT2 | METABOLIC |
| ACSL1 | METABOLIC |
| ACSL5 | METABOLIC |
| ACTG2 | VISCERAL MYOPATHY; VSCM |
| ADAMTSL2 | GELEOPHYSIC DYSPLASIA 1; GPHYSD1 |
| AGTR1 | METABOLIC |
| AKR1D1 | BILE ACID SYNTHESIS DEFECT, CONGENITAL, |
| | TYPE 2; CBAS2 |
| ALAS1 | METABOLIC |
| AMACR | BILE ACID SYNTHESIS DEFECT, CONGENITAL, |
| | 4; CBAS4 |
| ANGPTL2 | METABOLIC |
| AQP7 | METABOLIC |
| ARG1 | ARGININEMIA |
| ASPA | METABOLIC |
| BCO1 | HYPERCAROTENEMIA AND VITAMIN A |
| | DEFICIENCY, AUTOSOMAL DOMINANT |
| C10orf11 | METABOLIC |
| CA12 | METABOLIC |
| CA2 | METABOLIC |
| CDKN1C | INTRAUTERINE GROWTH RETARDATION, |
| | METAPHYSEAL DYSPLASIA, ADRENAL |
| | HYPOPLASIA CONGENITA, AND GENITAL |
| | ANOMALIES |
| CECR1 | POLYARTERITIS NODOSA, CHILDHOOD-ONSET; |
| | PAN |
| CIDEC | LIPODYSTROPHY, FAMILIAL PARTIAL, TYPE 5; |
| | FPLD5 |
| CLMP | CONGENITAL SHORT BOWEL SYNDROME; CSBS |
| COL1A1 | CAFFEY DISEASE |
| COL3A1 | EHLERS-DANLOS SYNDROME, TYPE IV, |
| | AUTOSOMAL DOMINANT |
| CPS1 | CARBAMOYL PHOSPHATE SYNTHETASE I |
| | DEFICIENCY, HYPERAMMONEMIA DUE TO |
| CPT1A | CARNITINE PALMITOYLTRANSFERASE I |
| | DEFICIENCY |
| CPT2 | CARNITINE PALMITOYLTRANSFERASE II |
| | DEFICIENCY, LATE-ONSET |
| CYBB | GRANULOMATOUS DISEASE, CHRONIC, X- |
| | LINKED; CGD |
| CYP17A1 | METABOLIC |
| CYP21A2 | ADRENAL HYPERPLASIA, CONGENITAL, |
| | DUE TO 21-HYDROXYLASE DEFICIENCY |
| CYP27B1 | VITAMIN D HYDROXYLATION-DEFICIENT |
| | RICKETS, TYPE 1A; VDDR1A |
| CYP2C19 | DRUG METABOLISM, POOR, CYP2C19-RELATED |
| CYP3A4 | METABOLIC |
| CYP7A1 | METABOLIC |
| DNAH5 | CILIARY DYSKINESIA, PRIMARY, 3; CILD3 |
| ECH1 | METABOLIC |
| ENG | TELANGIECTASIA, HEREDITARY HEMORRHAGIC, |
| | OF RENDU, OSLER, AND WEBER; HHT |
| ENO3 | METABOLIC |
| ENPP3 | METABOLIC |
| ETFDH | METABOLIC |
| FAM111B | POIKILODERMA, HEREDITARY FIBROSING, |
| | WITH TENDON CONTRACTURES, MYOPATHY, |
| | AND PULMONARY FIBROSIS; POIKTMP |
| FERMT3 | LEUKOCYTE ADHESION DEFICIENCY, |
| | TYPE III; LAD3 |
| FGF19 | METABOLIC |
| G6PC | GLYCOGEN STORAGE DISEASE Ia; GSD1A |
| GALE | GALACTOSE EPIMERASE DEFICIENCY |
| GHR | LARON SYNDROME |
| GLA | FABRY DISEASE |
| GLIS3 | DIABETES MELLITUS, NEONATAL, WITH |
| | CONGENITAL HYPOTHYROIDISM |
| GYS2 | GLYCOGEN STORAGE DISEASE 0; LIVER; |
| | GSD0A |
| HAL | METABOLIC |
| HGD | ALKAPTONURIA; AKU |
| HMGCR | METABOLIC |
| HMGCS2 | 3-HYDROXY-3-METHYLGLUTARYL-CoA |
| | SYNTHASE-2 DEFICIENCY; HMGCS2D |
| HMOX1 | HEME OXYGENASE 1 DEFICIENCY; HMOX1D |
| HOGA1 | METABOLIC |
| HPGD | DIGITAL CLUBBING, ISOLATED CONGENITAL |
| ID1 | METABOLIC |
| IFT80 | SHORT-RIB THORACIC DYSPLASIA 2 |
| | WITH OR WITHOUT POLYDACTYLY; SRTD2 |
| IGFALS | METABOLIC |
| LDHA | METABOLIC |
| LPA | METABOLIC |
| LPIN2 | MAJEED SYNDROME |
| LRP2 | METABOLIC |
| LRP4 | METABOLIC |
| MOGAT2 | METABOLIC |
| NAGS | N-ACETYLGLUTAMATE SYNTHASE |
| | DEFICIENCY; NAGSD |
| NCF2 | GRANULOMATOUS DISEASE, CHRONIC, |
| | AUTOSOMAL RECESSIVE, CYTOCHROME |
| | b-POSITIVE, TYPE II |
| NOS3 | PREECLAMPSIA/ECLAMPSIA 1; PEE1 |
| NPHP1 | NEPHRONOPHTHISIS 1; NPHP1 |
| PCSK9 | METABOLIC |
| PKHD1 | POLYCYSTIC KIDNEY DISEASE, |
| | AUTOSOMAL RECESSIVE; ARPKD |
| PKLR | PYRUVATE KINASE DEFICIENCY OF |
| | RED CELLS |
| PLA2G6 | METABOLIC |
| POR | ANTLEY-BIXLER SYNDROME WITH |
| | GENITAL ANOMALIES AND DISORDERED |
| | STEROIDOGENESIS; ABS1 |
| PRODH | HYPERPROLINEMIA, TYPE I; HYRPRO1 |
| RMRP | CARTILAGE-HAIR HYPOPLASIA; CHH |
| ROR2 | ROBINOW SYNDROME, AUTOSOMAL |
| | RECESSIVE; RRS |
| SLC22A4 | METABOLIC |
| SLC25A20 | CARNITINE-ACYLCARNITINE |
| | TRANSLOCASE DEFICIENCY; CACTD |
| SLC29A4 | METABOLIC |
| SLC2A2 | FANCONI-BICKEL SYNDROME; FBS |
| SLC36A2 | METABOLIC |
| SLC37A4 | GLYCOGEN STORAGE DISEASE Ib; GSD1B |
| SLC4A5 | METABOLIC |
| SLC51B | METABOLIC |
| SLC6A17 | METABOLIC |
| SLC6A20 | METABOLIC |
| SLC6A6 | METABOLIC |
| SLCO4C1 | METABOLIC |
| SOAT2 | METABOLIC |
| SORT1 | LOW DENSITY LIPOPROTEIN |
| | CHOLESTEROL LEVEL QUANTITATIVE |
| | TRAIT LOCUS 6; LDLCQ6 |
| SPINT2 | DIARRHEA 3, SECRETORY SODIUM, |
| | CONGENITAL, WITH |
| | OR WITHOUT OTHER CONGENITAL |
| | ANOMALIES; DIAR3 |
| SULT2A1 | METABOLIC |
| TAT | TYROSINEMIA, TYPE II; |
| | TYRSN2 |
| TDO2 | METABOLIC |
| TMEM135 | METABOLIC |
| TNFSF11 | OSTEOPETROSIS, AUTOSOMAL |
| | RECESSIVE 2; OPTB2 |
| TTPA | VITAMIN E, FAMILIAL ISOLATED |
| | DEFICIENCY OF; VED |
| VLDLR | METABOLIC |
| WAS | WISKOTT-ALDRICH SYNDROME; WAS |

[0471] Ranitidine was observed to significantly (p-value≤0.05) modulate ACAD11, ACTA1, ADGRG6, ADM, AHSG, ALPK2, AMACR, ANGPTL4, APOA4, BNIP3, C11orf96, CAPN13, CHST9, COL4A1, CPS1, CSE1L-AS1, CSRNP3, CYP1A1, CYP1A2, CYP26A1, EFNA1, ENO2, ENO3, EPPK1, F13B, FABP3, FAM69C, FBXO41, FLNA, GAL3ST1, GBAP1, GDF15, GHR, GNAO1, GPER1, HAVCR1, HK2, HMOX1, ID2, IFT80, IGF1, IGFBP1, INSIG1, ITGA7, ITGB6, KCNK5, KRT80, LAMC2, LDHA, LINC00102, LINC00862, LINC00881, LOC100507195, LOC101928401, LOXL4, LRRIQ3, MGAM, MICALCL, MT1E, MT1HL1, MT1X, MYOF, NDRG1, NDUFA4L2, NEXN, NFASC, P4HA1, PAPLN, PBX1, PCK1, PCSK9, PEG10, PFKFB4, PID1, PLIN4, PPP1R27, PROX1, RASD1, RGCC, RNF122, SCN8A, SLC16A7, SLC2A2, SNORD12, SPAG4, SPNS2, TCAF2, TCP10L, TFRC, TGFB2, THBS1, TMCC1, TMEM45A, TNC, TTBK1, UBALD2, and VWCE.

[0472] Metformin was observed to significantly (p-value≤0.05) modulate AHSG, AKAP12, ALAS1, ALPK2, APOA4, ARG1, BNIP3, CCDC152, CES5A, CHST9, CLDN4, CLVS1, CPS1, CXCL11, DCLK1, EFNA3, ELOVL2, ENO2, ENO3, EPO, ETNPPL, F13B, FADS1, FAM13A, FAM69C, FCAMR, FDFT1, FER1L4, FGF2, GADD45B, GDF15, GHR, HES4, HMGCR, HMGCS1, HSPB8, IFT80, IGFBP1, IGLL5, IL18, IL23A, ILDR2, INSIG1, ISM1, ITGB6, JAKMIP3, KCP, KRT7, LAMC2, LAPTM5, LDHA, LOC101929448, LOXL4, LRRIQ3, MATN2, MCM7, MIR210HG, MMP12, MOG, MSMO1, MT1E, MT1HL1, MT1X, MVD, MYOF, NAMPT, NCF2, NDUFA4L2, OXTR, PALMD, PDK1, PEG10, PEX5L, PID1, PLIN4, PRKRIP1, PROX1, PRSS23, RMI1, RMRP, SCGN, SLC2A2, SLC7A5, SNORD49A, SNX22, SORBS1, SPAG4, SPNS2, SPP1, SULT2A1, TCP10L, TDO2, TFRC, TGFB2, THBS1, TLR10, TMEM45A, TNC, TTPA, TUBA4A, UGT2B4, VCAN, and VWCE.

[0473] Imatinib was observed to significantly (p-value≤0.05) modulate expression of A1BG-AS1, ABALON, ABCA10, ABCA7, ABCC11, ABHD2, ABLIM3, ACAA2, ACACB, ACAD11, ACADVL, ACKR2, ACSL1, ACTA1, ACTA2, ADCY5, ADGRV1, ADM, AHRR, AHSG, AKAP12, AKR1B15, AKR1D1, ALAS1, ALDH8A1, ALPK2, AMACR, ANGPTL4, ANGPTL7, ANGPTL8, ANKRD23, ANKRD37, ANO1, ANXA13, APOA1-AS, AQP4, ARG1, ARHGEF26, ARHGEF26-AS1, ARL14, ARL4C, ASB14, ATOH8, ATP6V1C2, B3GNT5, B4GALNT1, BAG3, BATF, BCL2, BMF, BMP2, BRF2, BSPRY, C10orf11, C10orf35, C12orf50, C1orf116, C2CD4A, C2orf82, C4orf19, C5orf45, C9orf173-AS1, C9orf72, CA12, CA2, CACYBP, CADPS2, CAMK2G, CASKIN1, CBLB, CCDC152, CCDC85B, CCL2, CCL20, CCNE2, CD274, CDC6, CDKN1C, CEBPD, CELSR2, CHST9, CLDN2, CNN1, COL10A1, COL1A1, CPA4, CPT1A, CREB3L3, CREB5, CRIP3, CRY2, CRYM, CTAGE8, CUX2, CXCL10, CXCL11, CXCL8, CYP1A1, CYP1A2, CYP26A1, CYP2C19, CYP2C9, CYP3A4, CYP3A5, CYP7A1, CYP8B1, CYTH1, DCX, DDIT4L, DEDD2, DEFB132, DGKG, DNAH5, DNAJA4, DNAJB1, DNAJB4, DNM1, DSG2-AS1, ECM2, EDARADD, EFNA1, EFNA3, ELOVL2, ENO2, EPAS1, ERRFI1, ETNPPL, EVA1A, EVPLL, FA2H, FADS1, FAM134B, FAM13A, FAM219A, FAM222A, FAM47E, FAM49A, FAM69C, FAM83D, FAXC, FBXO30, FBXO41, FER1L4, FGF2, FKBP5, FLNA, FLRT3, FLVCR2, FMO1, FOS, FOSB, FOSL1, FSIP1, FSTL3, G6PC, GADD45B, GALE, GAREM1, GCNT2, GEM, GHR, GIPR, GLA, GPC6, GREM1, GREM2, HAL, HAVCR1, HGD, HHAT, HIVEP2, HKDC1, HMCN1, HMOX1, HOGA1, HSP90AA1, HSPA12A, HSPA1A, HSPA1B, HSPA1L, HSPA4L, HSPA5, HSPA6, HSPB1, HSPH1, ID1, ID2, IDO2, IFT80, IGF1, IGFALS, IGFBP1, IGFBP3, IGFBP5, IGLL5, IL18, IL22RA1, IL6R, IRF7, IRS2, ITGA3, ITGA5, ITIH4-AS1, JDP2, KANK1, KCNJ11, KCNJ8, KCNK5, KDELR3, KDM3A, KIAA0319, KIAA1462, KIF14, KLF5, KLF9, KLHDC7B, KLHL31, KLK4, KRT7, KRT80, KRT81, KSR2, LAMB1, LAMB3, LEFTY1, LGALS4, LHFPL5, LIF, LINC00261, LINC00313, LINC00504, LINC00856, LINC01016, LINC01018, LINC01057, LINC01314, LINC01554, LMCD1, LOC100128494, LOC100129931, LOC100133286, LOC100507195, LOC101929427, LOC101929516, LOC102724050, LOC102724153, LOC104968399, LOC105376575, LOC153910, LOC283585, LOC344887, LPAL2, LPIN2, LRP4, LRP8, LTBP1, MAFB, MAFF, MANF, MAP1B, MAP3K8, MATN2, MED31, MGAM, MIR1282, MIR210HG, MIR6087, MIR6723, MLLT11, MMP24, MMP3, MOGAT2, MSC, MST1R, MT1E, MT1HL1, MT1X, MTRNR2L4, MXD3, MYCL, MYH3, MYL9, MYLIP, MYOF, MYRIP, NAMPT, NAP1L2, NBPF20, NCKAP5, NDRG1, NDRG4, NDUFA4L2, NFASC, NLGN2, NLRP6, NPB, NPPB, NPR3, NPTX2, NPTXR, NR1D1, NR6A1, NRAP, NRBP2, NRG4, NUAK2, NUCB1-AS1, NUCB2, NUDT18, NUGGC, NXN, NYAP1, OLFM2, OSGIN1, OTUD3, OXTR, P4HA1, PABPC3, PALMD, PAPLN, PARK2, PBX1, PCBP2-OT1, PCK1, PCSK9, PDE2A, PDE4D, PDIA4, PDK4, PELI3, PER1, PFKFB3, PFKFB4, PFN1P2, PGM2, PHLDA1, PIGR, PITRM1-AS1, PLA2G6, PLIN2, PLK2, PLXDC1, PLXNA4, PMAIP1, PNLIPRP3, POR, POTEE, POU5F1, PPARGC1A, PPFIA4, PPP1R3C, PPP1R3G, PREX1, PRG4, PROM1, PRR15, PRSS23, PSORS1C3, RAB27B, RARB, RASD1, RASD2, RCL1, RGCC, RGS2, RHCG, RHOB, RHOF, RLF, RMI1, RMRP, RND1, RND3, RNF122, RNVU1-19, RORA, ROS1, RPL17, RPL23P8, RPPH1, RSAD2, RTP3, SALL1, SCGN, SCPEP1, SEC14L2, SEC14L4, SERPINB9, SESN3, SFN, SH3GLB2, SIPA1L2, SIX4, SLC16A3, SLC16A7, SLC17A1, SLC17A2, SLC18A2, SLC22A25, SLC2A10, SLC2A2, SLC30A2, SLC38A2, SLC4A8, SLC6A1, SLC7A5, SLCO2B1, SLITRK3, SMIM3, SMOC1, SNAI1, SNAI2, SNHG9, SNORD17, SNX22, SNX29, SOCS2, SOCS2-AS1, SOGA3, SORBS1, SORBS2, SPAG4, SPARCL1, SPINT1, SPNS2, SPOCD1, SPRN, SPRY1, SPRY2, STAMBPL1, STIP1, STMN1, SUGCT, TBC1D8, TCAF2, TCP10L, TENM3, TEX14, TFCP2L1, TFPI2, TGFB2, THBS1, THRSP, TIPARP, TMCC1, TMEM164, TMEM37, TMPRSS2, TMSB4X, TMTC1, TNFRSF21, TNS3, TP53INP1, TP63, TPRG1, TPRG1-AS1, TRAM2, TRIM31, TRIM55, TSKU, TSPAN5, TTPA, TYRO3, UBALD2, UCHL1, UGT1A7, USP12, VENTX, VLDLR, VWCE, YPEL2, ZBTB16, ZFAND2A, ZFP42, ZMYND8, ZNF292, ZNF485, ZNF608, ZNF703, ZNF793, ZNF837, and ZXDB.

[0474] Papaverine was observed to significantly (p-value≤0.05) modulate expression of A1BG-AS1, ABALON, ABCA10, ABCB11, ABLIM3, ACAA2, ACACB, ACAT2, ACTA1, ADCY7, ADGRG6, ADM, ADRB2, AHSG, AKAP12, AKR1B15, AKR1D1, ALDH8A1, ALPK2, AMACR, ANGPTL8, ANKRD35, ANO1, ANXA1, ANXA13, APOA1-AS, AQP4, AQP7, ARHGEF26-AS1, ARHGEF3, ARL14, ARL4C, ARL5B, ATP5E, ATP6V1C2, BAG3, BMF, BSN, C11orf96, C18orf32, C1orf116, C5orf45, C5orf49, C6orf201, C8orf4, CA12, CACTIN-AS1, CADPS2, CAMK2G, CASKIN1, CAT, CBLB, CBR3, CCDC152, CCDC85B, CCL20, CCL5, CD274, CDKN1C, CEBPB-AS1, CEBPD, CFAP73, CHST9, CLDN4, CLVS1, CNTD1, COL1A1, CPS1, CREB3L3, CRY2, CRYM, CSPG4, CTGF, CX3CL1, CXCL11, CXCL2, CXCL3, CYP1A1, CYP1A2, CYP26A1, CYP2C9, CYP3A4, CYP3A5, CYP7A1, CYTH1, DDIT4L, DEDD2, DERL3, DGKH, DNAH1, DNAJA4, DNAJB1, DNAJC12, EDARADD, EFNA1, EFNA3, ELOVL2, ENO3, ENTPD1, ENTPD7, EPAS1, EPHA4, EPO, ERN1, EXTL3-AS1, F13B, FAM124A, FAM219A, FAM222A, FAM49A, FASN, FAT1, FCAMR, FGF2, FKBP5, FLNA, FLNC, FLVCR2, FOS, FOSB, FOSL1, FSTL3, G6PC, GADD45B, GALNT12, GDF15, GDF9, GHR, GNAO1, GREM1, GREM2, GSG1, HAO2, HAVCR1, HES4, HHAT, HIVEP2, HSDL2, HSPA1A, HSPA1B, HSPA5, HSPA6, HSPB8, HSPH1, ICOSLG, ID2, IFT80, IGF1, IGFALS, IGFBP1, IGFBP3, IL12RB1, IL18, IL22RA1, IL6R, IRS2, ITGA3, ITGA7, ITGB6, ITIH4-AS1, JCHAIN, KCNJ8, KCNK5, KCNQ1OT1, KCNV1, KCP, KDM3A, KIAA1462, KIF12, KLF2, KLF5, KLF9, KLHL31, KLK4, KRT7, LAMB1, LAMB3, LAMC2, LBH, LECT2, LGALS4, LGALS8-AS1, LINC00102, LINC00261, LINC00313, LINC00504, LINC01098, LINC01587, LMCD1, LOC100128494, LOC100129931, LOC100133286, LOC100289473, LOC100506321, LOC101928525, LOC101928595, LOC101928597, LOC101929415, LOC101929516, LOC104968399, LOC153910, LOC440300, LPCAT3, LRRIQ3, LUCAT1, LYPD1, MAFB, MAFF, MAGEA10, MAP3K8, MATN2, MCM7, MED4-AS1, MIR1282, MIR3661, MIR5010, MIR6087, MIR6723, MIR8075, MMP24, MOG, MPHOSPH6, MT1E, MT1HL1, MT1X, MTRNR2L4, MXD3, MXRA8, MYL9, MYLIP, MYRIP, NAMPT, NAV2-AS2, NBPF20, NCF2, NCKAP5, NDRG4, NEURL3, NLGN2, NPTX2, NR1D1, NRAP, NRBP2, NUCB1-AS1, NUDT18, OSGIN1, OTUD3, OXTR, PABPC3, PALMD, PCK1, PCSK9, PDK4, PER1, PEX5L, PFKFB3, PFKFB4, PID1, PIK3CD, PITRM1-AS1, PLCG1-AS1, PLIN2, PLIN4, PLK2, PLPP3, POTEE, PPFIA4, PREX1, PRR15, PRR23C, PRSS23, PSORS1C3, PTPRU, RARB, RASD1, RBP5, RCL1, RDH12, RGS2, RHOB, RHOF, RMRP, RND1, RND3, RNVU1-19, RORA, RPL13AP6, RPL17, RPPH1, RTP3, S100A6, SCARNA10, SCD5, SCGN, SCML4, SCN11A, SEC14L2, SGSM1, SLC16A7, SLC17A1, SLC18A2, SLC25A20, SLC2A2, SLC38A4, SLC4A8, SLC6A1, SLC7A5, SLCO2B1, SMAP2, SMARCA5-AS1, SMG1P3, SNAI1, SNHG9, SNX22, SNX29, SOCS2, SOX9, SPP1, SPRN, SPRY2, SPTBN4, SPX, STAMBPL1, STOM, SULT2A1, TBC1D8, TCP10L, TDO2, TGFB2, TGFBI, THBS1, THRSP, TIPARP, TMPRSS2, TMSB4X, TNC, TNFAIP2, TNFAIP3, TRAM2, TRIM31, TSLP, TTPA, TUBA4A, TUBA4B, UBALD2, UBD, UBXN7, UGDH-AS1, UGT1A4, UGT2B4, USP12, VIM, VIM-AS1, VSIG1, VWCE, YPEL2, ZACN, ZFAND2A, ZFP42, ZHX1-C8orf76, ZNF292, ZNF485, ZNF543, ZNF608, ZNF702P, ZNF703, ZNF793, and ZXDB.

[0475] Xav939 was observed to significantly (p-value≤0.05) modulate expression of ABALON, ABCB11, ABCG2, ABLIM3, ACAA2, AGRN, AHNAK2, ALAS1, AMACR, ANKRD30BL, APOA1-AS, ARL5B, ATP6V1C2, BAG3, BCAT2, BIRC3, BMF, C5orf45, CASKIN1, CBLB, CCDC152, CCL20, CLSTN1, CPS1, CTAGE8, CXCL2, CYBB, CYP1A1, CYP1A2, CYP1B1, CYP3A5, DGKH, DNAJC12, DUSP6, ECH1, ENO3, FAM25A, FBXW10, G0S2, GDF15, GDNF, HAO2, HELZ2, HMGCS1, HSD17B7, HSPA5, HSPB1, HSPB8, ID2, IFITM1, IGFALS, IGFBP1, IGLL5, IL17D, ITGB6, KCNQ1OT1, KCNV1, KCP, KDM3A, KIAA0754, KLHDC7B, KLHL13, KRT7, KRT81, KSR2, LAMB3, LAMC2, LDLRAD4, LINC00102, LINC00504, LINC00886, LINC01104, LMCD1, LOC101929415, LOC101929448, LOC104968399, LOC105369332, LOC729348, LOXL4, LPCAT3, LRP8, LUCAT1, LYPD1, MATN2, MB21D2, METRN, MIR1282, MIR6087, MIR663AHG, MIR6723, MLK7-AS1, MMP24, MSC, MSMO1, MT1HL1, MYL9, MYOF, NCR3LG1, NMB, NRAP, NUDT18, OAS1, OTUD3, OXTR, P4HA1, PALMD, PBXIP1, PDGFB, PDLIM7, PEG10, PHLDA1, PID1, PIGR, PRSS23, RBP5, REEP1, RHCG, RHOF, RLF, RMI1, RMRP, RND3, RNVU1-19, RORA, RPPH1, RRAD, S100A6, SCARNA5, SDS, SERPINE2, SFN, SFRP4, SLC16A6, SLC23A2, SLC2A2, SLC7A11, SNORD100, SNORD12B, SNORD27, SNX22, SORBS2, SYDE2, TBC1D8, TDO2, TGFB2, TGFBI, TIPARP, TLR10, TMSB4X, TNFAIP2, TSPEAR-AS1, TUBA4A, UCN, UGCG, UGDH-AS1, USP12, VIM, ZNF292, ZNF485, and ZNF608.

[0476] Valproate was observed to significantly (p-value≤0.05) modulate expression of ABALON, ACAD11, ACAT2, ACTG2, ADRA1B, AGRN, AHNAK2, ANKRD29, ANKRD36, ANXA8L1, ATAD3C, ATP5E, ATP5EP2, BAHCC1, BMS1P5, C11orf96, C19orf71, CCDC152, CDH12, CHST9, CLEC2D, CLVS1, COX16, CX3CL1, CXCL14, CXCL3, DSG1, EGOT, EIF4EBP3, FAM49A, FAXC, FGFR3, GALNT12, GDF7, HELZ2, HMCN2, HMGCS1, HSD17B7, HSPG2, IFT80, IGFALS, IGLL5, JCHAIN, KIAA0226L, KIAA1462, KRT42P, LAMB3, LAMC2, LILRA5, LINC00102, LINC01057, LOC100128494, LOC100506675, LOC101929148, LPA, LUCAT1, MLK7-AS1, MN1, MRO, MT1E, MT1HL1, MTRNR2L3, NAV2-AS2, NBPF20, NEUROD1, NUAK2, NUDT3, PAPLN, PFDN4, PIGR, PRR23C, RDH5, RNF122, RPL13AP6, RPSAP9, RRAD, SLITRK4, SNHG9, SNORA25, SNORD17, SNORD56, SORL1, SPRR1A, SPRR3, TMEM97, TMSB4X, TNS2, TXNDC5, and ZNF702P.

[0477] Prednisone was observed to significantly (p-value≤0.05) modulate expression of A1BG-AS1, AASS, ABALON, ABCA10, ABCA4, ABCA6, ABCA9, ABCB11, ABCB9, ABCC11, ABCG1, ABCG2, ABHD2, ABLIM3, ACAA2, ACACB, ACADVL, ACAT2, ACKR2, ACMSD, ACSL1, ACSM2A, ACSM2B, ACTA1, ACTA2, ACTBL2, ADAM19, ADAMTSL2, ADGRF4, ADGRG2, ADGRG6, ADGRV1, ADM, ADRA1A, ADRB2, AFAP1L1, AGRN, AHNAK2, AHSG, AKAP12, AKR1B1, AKR1B15, AKR1D1, ALAS1, ALDH1L1, ALDH1L1-AS2, ALDH8A1, ALPK2, AMACR, ANGPTL2, ANGPTL4, ANGPTL8, ANKRD33B, ANKRD37, ANO1, ANO3, ANXA1, AOC4P, APLN, APOA1-AS, APOA4, APOBEC3B, AQP7, ARG1, ARHGEF26, ARHGEF26-AS1, ARID3C, ARL14, ARL5B, ARMC12, ARRDC3, ARSI, ARTS, ASB9, ATAD3C, ATOH8, ATP5E, ATP6V1C2, AZGP1P1, B3GNT5, BAIAP2L2, BATF, BCAS1, BCL2, BCL2A1, BDKRB2, BIRC3, BMP2, BMP8B, BNIP3, BSN, BSPRY, C10orf128, C10orf35, C10orf54, C11orf86, C11orf96, C18orf32, C1orf106, C1orf226, C2CD4A, C2orf82, C4orf47, C5AR1, C5AR2, C5orf45, CA12, CA2, CA9, CACHD1, CACTIN-AS1, CADPS2, CAMK1G, CAMK2B, CAPN8, CASKIN1, CASP16P, CBLB, CBR3, CCBL1, CCDC152, CCDC183, CCDC73, CCDC85B, CCL2, CCL20, CCL5, CCND2, CCNE2, CCR1, CD109, CDH12, CDKL1, CDKL5, CEACAM6, CEBPD, CELSR3, CEP57, CES4A, CES5A, CHST13, CHST3, CIDEC, CIT, CITED2, CLDN2, CLDN4, CLRN3, CLSTN1, CLSTN3, CLVS1, CLVS2, CNN1, CNTLN, COL10A1, COL12A1, COL15A1, COL16A1, COL1A1, COL7A1, CPA4, CPB2-AS1, CPS1, CPT1A, CPT2, CRACR2B, CREB3L3, CREB5, CRIP3, CRY2, CRYAB, CRYM, CSPG4, CTAGE8, CTGF, CUX2, CWH43, CX3CL1, CXCL2, CXCL3, CXCL8, CYB561A3, CYP21A1P, CYP21A2, CYP26A1, CYP2C19, CYP2C9, CYP3A4, CYP3A43, CYP3A5, CYP3A7, CYP3A7-CYP3A51P, CYP7A1, CYP8B1, DCLK1, DDIT4L, DEFB132, DERL3, DGKH, DHRS2, DIO3, DIRAS2, DNAH11, DNAH5, DNAI1, DNAJB4, DOCK10, DOK7, DPPA4, DSG1, DUOX2, DUOXA2, DUSP13, DYNLL1, DZIP1L, EAF2, ECH1, ECM2, EDARADD, EDN1, EFCAB1, EFNA1, EFNA3, EFR3B, EGOT, ELOVL2, EML5, EMP2, ENG, ENO2, ENO3, EPAS1, EPB41L1, EPHB2, EPO, EPPK1, EPSTI1, ERRFI1, ESR1, ESRG, ETNK2, ETNPPL, EVA1A, EXTL3-AS1, F13B, F2RL2, FADS1, FAM110A, FAM129A, FAM134B, FAM13A, FAM150B, FAM151A, FAM162A, FAM219A, FAM222A, FAM25A, FAM47E, FAM69C, FAM83D, FASN, FAT1, FAT3, FBLN5, FBXO41, FCAMR, FCRLA, FDPS, FER1L4, FGF14, FGF2, FIBIN, FKBP5, FLNA, FLNC, FLRT3, FLVCR2, FOSL1, FOXC1, FSTL1, FSTL3, FYB, G0S2, G6PC, GADD45B, GALNT15, GAREM1, GBP4, GBPS, GCNT2, GDF15, GDNF, GEM, GHR, GHRHR, GLIS3, GMNC, GOLGA6L3, GOLGA7B, GP1BA, GP6, GPER1, GPR153, GPR183, GPR88, GREM1, GREM2, GRIA3, GRIN3A, GSTP1, GUCY1B3, GYS2, HAL, HAO2, HAS3, HAVCR1, HBEGF, HELZ2, HGD, HHAT, HIPK2, HK2, HKDC1, HMCN1, HMCN2, HMGB2, HMGCS1, HMOX1, HNF4A-AS1, HOGA1, HOMER1, HPGD, HRCT1, HS1BP3-IT1, HSD3B2, HSDL2, HSP90AA1, HSPA12A, HSPA1A, HSPA1B, HSPA5, HSPB1, HSPB8, HSPH1, ICOSLG, ID1, ID2, IDI1, IER3, IFI35, IFI44L, IFIT1, IFIT2, IFITM1, IFT80, IGF1, IGFALS, IGFBP1, IGFBP3, IGSF23, IHH, IL17RB, IL18, IL22RA1, IL36B, IL6R, IL7R, ILDR2, INHBA, INHBB, INSIG1, IP6K3, IRF4, IRF5, IRF7, IRS2, ISG15, ISM1, ITGA3, ITGA5, ITGA7, ITGAM, ITGB6, ITIH4-AS1, IVL, JDP2, KANK1, KCNE1, KCNJ11, KCNJ3, KCNJ8, KCNK5, KCNQ1OT1, KDELR3, KDM3A, KIAA0895L, KIAA1462, KLF15, KLF2, KLF5, KLF9, KLHDC7B, KLHL13, KLHL31, KLK4, KRT42P, KRT7, KRT80, KRT81, KSR2, LAMA3, LAMA5, LAMB1, LAMB3, LAMB4, LAMC2, LBH, LCN2, LDB3, LDHA, LDLRAD4-AS1, LECT2, LGALS1, LGALS4, LHFPL5, LIF, LINC00102, LINC00152, LINC00261, LINC00504, LINC00595, LINC00661, LINC00862, LINC00880, LINC00881, LINC00886, LINC00987, LINC01012, LINC01016, LINC01018, LINC01126, LINC01151, LINC01314, LINC01537, LINC01554, LINC01559, LINC01587, LMCD1, LOC100128494, LOC100129931, LOC100130111, LOC100133286, LOC100506321, LOC100507283, LOC100507389, LOC101927686, LOC101927843, LOC101927973, LOC101928118, LOC101928858, LOC101929415, LOC101929427, LOC101929516, LOC101929524, LOC101929567, LOC101929574, LOC102724050, LOC102724153, LOC102724539, LOC102724652, LOC104968399, LOC105369486, LOC145694, LOC153910, LOC154761, LOC283731, LOC283887, LOC284454, LOC440300, LOC728752, LOC729348, LOX, LOXL4, LPAL2, LPIN2, LRAT, LRP2, LRP4, LRRC25, LRRC37A3, LRRC8C, LRRN2, LTBP1, LTBP3, LUCAT1, LYPD1, MAFB, MAFF, MAMDC4, MAMLD1, MANEA-AS1, MAOA, MAP1LC3B2, MAPK12, MATN2, MCAM, MCM7, MEGF6, METRN, MFNG, MGC12916, MGC32805, MILR1, MIR1282, MIR210HG, MIR3646, MIR3661, MIR4435-2HG, MIR6087, MIR663A, MIR663AHG, MIR6723, MIR6843, MIR6883, MLK7-AS1, MLLT11, MMP12, MMP24, MMP3, MMP9, MN1, MOGAT1, MOGAT3, MPEG1, MRC1, MSC, MST1R, MT1E, MT1HL1, MT1X, MTRNR2L4, MVD, MXD3, MXRA8, MYEOV, MYL9, MYLIP, MYOF, MYOM1, MYPN, MYRIP, NAGS, NAMPT, NAV3, NBPF10, NBPF20, NBPF25P, NCALD, NCF2, NCKAP1L, NCR3LG1, NDRG1, NDRG4, NDUFA4L2, NEB, NES, NETO2, NEURL3, NFASC, NLRP6, NMB, NOVA1, NPAS2, NPPB, NPR1, NPR3, NR6A1, NRAP, NRBP2, NRG4, NTSM, NTF3, NTN1, NUAK2, NUCB1-AS1, NUCB2, NXPH4, NYAP1, OAS1, OAS2, OAS3, OASL, OR4F13P, OSGIN1, OSR1, OXTR, P4HA1, PABPC3, PADI1, PALMD, PAM, PAPLN, PAQR7, PBX1, PBXIP1, PCA3, PCDH20, PCED1B, PCK1, PDE4D, PDGFB, PDGFRB, PDIA4, PDK1, PDK4, PDLIM7, PEG10, PER1, PFKFB3, PFKFB4, PGD, PGM2, PID1, PIGR, PIK3C2G, PIK3CD, PITRM1-AS1, PKHD1, PLA2G6, PLCE1, PLIN2, PLIN4, PLK2, PLPP3, PLXNA4, PLXND1, PMAIP1, PNLIPRP3, PNPLA5, POR, POTEM, POU5F1, PPARGC1A, PPFIA4, PPL, PPM1L, PPP1R14C, PPP1R3C, PPP1R3G, PRG4, PRODH, PROKR1, PROX1, PRR15, PRR23C, PRSS23, PSD3, PSORS1C3, PTHLH, PTK2B, PTPRC, PTPRU, PWAR5, QPCT, RAB17, RAB27B, RAB3B, RAB3IL1, RASD1, RASL10B, RASSF2, RBP5, RCL1, RCN3, RDH5, REEP1, RGS20, RGS4, RHCG, RHOB, RHOF, RIMKLA, RLF, RMI1, RMRP, RND1, RND3, RNVU1-19, ROBO4, ROR1-AS1, RORA, ROS1, RPGR, RPL13AP6, RPL17, RPPH1, RRAD, RSAD2, RTP3, S100A2, S100A6, SALL1, SCARA3, SCARNA17, SCD5, SCGN, SCN1B, SCN8A, SCPEP1, SDS, SEC14L2, SEC14L4, SELM, SEMA7A, SEPT4-AS1, SERHL2, SERPINA2, SERPINB7, SERPINE2, SESN3, SFN, SFRP4, SH3GLB2, SIPA1L2, SLAMF7, SLC16A12, SLC16A13, SLC16A3, SLC18A2, SLC1A2, SLC22A10, SLC22A25, SLC23A2, SLC25A18, SLC25A30, SLC2A2, SLC30A2, SLC37A4, SLC38A2, SLC38A4, SLC45A2, SLC4A5, SLC4A8, SLC5A11, SLC6A1, SLC6A6, SLC7A11, SLC7A2, SLC7A5, SLED1, SLITRK3, SMAD6, SMAP2, SMCO3, SMG1P1, SMG1P3, SMOC1, SNAI2, SNCG, SNHG9, SNORA71C, SNORD12B, SNORD17, SNORD27, SNORD49A, SOAT2, SOCS1, SOCS2, SOCS2-AS1, SORBS1, SORBS2, SORL1, SOX9, SP5, SPAG4, SPARCL1, SPINT1, SPNS2, SPOCD1, SPP1, SPRR1A, SPRR3, SPRY1, SPRY2, SPTBN4, SPTBN5, SPX, SQLE, SRPX, SSUH2, STC2, STIP1, STMN1, STOM, SUGCT, SULT1B1, SULT1E1, SULT2A1, SUSD3, SYDE2, SYPL2, SYTL2, SYTL4, TAPT1-AS1, TAT, TBC1D8, TBX15, TCAF2, TDO2, TEAD1, TEAD4, TFCP2L1, TFRC, TGFB2, TGFBI, TGFBR3, TH, THBS1, THRSP, TIPARP, TMC7, TMCC1, TMEM100, TMEM138, TMEM164, TMEM217, TMEM229B, TMEM37, TMEM47, TMEM51, TMPRSS2, TMSB4X, TMTC1, TNC, TNFAIP2, TNFAIP3, TNFRSF19, TNFRSF21, TNFSF10, TNIK, TNS2, TNS3, TOX2, TP53INP1, TP63, TPRG1, TPRG1-AS1, TRABD2B, TRAF5, TRAM2, TRIM10, TRIM55, TRIM63, TRPM8, TRPV3, TSC22D3, TSKU, TSLP, TSPAN15, TSPAN2, TSPAN5, TSPAN7, TSPEAR-AS1, TTBK1, TTYH3, TUBA1A, TUBA4A, TUBA4B, TXNIP, UBALD2, UBASH3B, UBD, UBR5-AS1, UBXN7, UGDH-AS1, UGT1A4, UGT2B4, ULBP2, UNC5CL, UPP2, VIM, VIM-AS1, VLDLR, VWCE, WSCD1, XAF1, YPEL1, YPEL2, ZACN, ZBTB16, ZC3HAV1L, ZFP42, ZMIZ1-AS1, ZMYND8, ZNF292, ZNF485, ZNF608, ZNF624, ZNF648, ZNF702P, ZNF793, and ZXDB.

[0478] Penicillamine(D−) was observed to significantly (p-value≤0.05) modulate expression of A1BG-AS1, ABALON, ABCA10, ABCC11, ABLIM3, ACAA2, AKAP12, AKR1B15, AKR1D1, AMACR, ANGPTL2, ANKRD37, ANXA1, APOA1-AS, ARHGEF26-AS1, ARL5B, ATP6V1C2, C5orf45, CACTIN-AS1, CASKIN1, CBR3, CCDC152, CCDC73, CLSTN3, CLVS1, CPS1, CPT2, CREB3L3, CX3CL1, CYB561A3, CYP26A1, CYP2C9, DNAH11, EDARADD, EFNA1, EFNA3, EGOT, ENO2, EPAS1, EPO, ETNPPL, EXTL3-AS1, F13B, FADS1, FAM110A, FAM13A, FAM222A, FAM69C, FASN, FBXO41, FER1L4, FGF2, FLNC, G0S2, G6PC, GDF15, GHR, GREM2, HAO2, HELZ2, HGD, HMGCS1, HSP90AA1, HSPB1, HSPB8, HSPH1, ID2, IGFBP1, IGFBP3, IL18, IRF7, ITGA5, ITGA7, ITIH4-AS1, KANK1, KCNJ8, KCNQ1OT1, LAMB4, LINC00504, LOC100128494, LOC100129931, LOC100133286, LOC100506321, LOC101929516, LOC104968399, LOC284454, LOX, LPIN2, LUCAT1, LYPD1, MAMDC4, MIR1282, MIR3661, MIR6087, MIR6723, MLK7-AS1, MMP24, MT1E, MT1HL1, MT1X, MTRNR2L4, MXD3, NAMPT, NBPF20, NCR3LG1, NDRG1, NDUFA4L2, NRAP, NUCB1-AS1, NXPH4, OAS3, OASL, PCK1, PER1, PFKFB3, PFKFB4, PGD, PID1, PIK3CD, PITRM1-AS1, PPFIA4, PROX1, PRSS23, PWAR5, RASD1, RMRP, RNVU1-19, RPL13AP6, RPL17, RPPH1, RTP3, S100A6, SCD5, SCGN, SCPEP1, SFN, SLC1A2, SLC22A25, SLC2A2, SLC37A4, SLC38A2, SLC38A4, SLC6A1, SLC7A2, SNAI2, SNORD27, SNORD49A, SORBS1, SPAG4, SPINT1, SPP1, STOM, SULT2A1, SYDE2, TBC1D8, TDO2, THBS1, TIPARP, TMCC1, TMEM138, TMSB4X, TNFAIP3, TSLP, TSPEAR-AS1, TUBA4A, UBALD2, UBXN7, UGT2B4, VWCE, XAF1, ZNF292, ZNF485, ZNF702P, ADCY5, BZRAP1-AS1, CBLN3, CEBPB-AS1, CRTAM, CYBB, DNAH1, ERN1, FAXC, HES4, HLA-G, IDI2-AS1, IGLL5, IL12RB1, KCP, KIAA0754, LINC00536, LINC00598, LINC01057, LINC01347, LOC100289473, LOC101928525, MAP2K6, MED4-AS1, MTMR11, NLGN2, NR1D1, PCSK9, PFN1P2, RAET1E, RGS9, RNF122, RNF186, SEC14L3, SLC25A20, SMARCA5-AS1, SNX22, STAMBPL1, USP12, and ZBTB37.

[0479] Disopyramide was observed to significantly (p-value≤0.05) modulate expression of A1BG-AS1, ABALON, ABCC11, ABLIM3, ACAA2, AKAP12, AKR1B15, AKR1D1, AMACR, ANGPTL2, ANKRD37, ANXA1, APOA1-AS, ARHGEF26-AS1, ARL5B, ATP6V1C2, C5orf45, CACTIN-AS1, CASKIN1, CBR3, CCDC152, CLSTN3, CLVS1, CPS1, CYP26A1, CYP2C9, EFNA3, ENO2, EPAS1, ETNPPL, F13B, FAM110A, FAM13A, FAM69C, FBXO41, FER1L4, FGF2, G6PC, GDF15, GHR, GREM2, HAO2, HMGCS1, HSP90AA1, HSPB1, HSPB8, HSPH1, ID2, IGFBP1, IL18, ITGA5, ITGA7, ITIH4-AS1, KANK1, KCNJ8, KCNQ1OT1, LINC00504, LOC100128494, LOC100129931, LOC100133286, LOC101929516, LOC104968399, LOC284454, LPIN2, LUCAT1, LYPD1, MAMDC4, MIR1282, MIR6723, MLK7-AS1, MMP24, MT1E, MT1HL1, MT1X, MTRNR2L4, MXD3, NAMPT, NBPF20, NCR3LG1, NDRG1, NDUFA4L2, NRAP, NUCB1-AS1, PCK1, PER1, PFKFB3, PFKFB4, PID1, PIK3CD, PITRM1-AS1, PPFIA4, PROX1, PRSS23, PWAR5, RASD1, RPL13AP6, RPL17, RTP3, S100A6, SCD5, SCGN, SLC1A2, SLC22A25, SLC2A2, SLC37A4, SLC38A2, SLC6A1, SLC7A2, SNORD27, SORBS1, SPAG4, SPP1, STOM, SULT2A1, SYDE2, TBC1D8, TDO2, THBS1, TIPARP, TMCC1, TMEM138, TMSB4X, TNFAIP3, TSPEAR-AS1, TUBA4A, UBALD2, UBXN7, UGT2B4, VWCE, XAF1, ZNF292, ZNF702P, ADCY5, CEBPB-AS1, DNAH1, ERN1, HES4, IGLL5, KCP, KIAA0754, LINC01347, LOC100289473, LOC101928525, MAP2K6, MED4-AS1, MTMR11, NLGN2, NR1D1, PCSK9, RGS9, RNF122, RNF186, SLC25A20, SNX22, USP12, ZBTB37, ABCB11, ABHD2, ACACB, ACTA2, ADGRV1, ALAS1, ALDH8A1, ALPK2, ANGPTL4, ANO1, APOA4, AQP7, ARG1, ARL14, ATAD3C, BCAS1, BNIP3, BSN, CA9, CADPS2, CBLB, CEBPD, COL1A1, CRYM, CSPG4, CXCL3, CYP2C19, CYP3A4, CYP3A5, CYP8B1, DGKH, ECH1, ELOVL2, ENO3, FAM134B, FAM162A, FAM219A, FAM47E, FKBP5, FOSL1, GADD45B, GALNT15, GPER1, HAVCR1, HK2, HMOX1, HNF4A-AS1, HSPA5, ID1, IFT80, IGFALS, IGSF23, IL22RA1, IL6R, ILDR2, IRS2, ISM1, ITGB6, KCNK5, KDM3A, KIAA0895L, KLF2, KLF5, KLF9, KLHL31, KRT7, KRT80, LAMC2, LDHA, LINC00261, LINC01018, LINC01314, LINC01587, LOC100507389, LOC101929415, LOC154761, LOC440300, LOC729348, LOXL4, LRRC37A3, MAFB, MAFF, MATN2, MCM7, METRN, MIR663A, MOGAT3, MXRA8, MYL9, MYOM1, NEB, NRBP2, NUCB2, OAS1, OXTR, P4HA1, PALMD, PAM, PDGFB, PDIA4, PDK1, PEG10, PLIN4, PLK2, PMAIP1, PPP1R3G, PRR23C, PSD3, PSORS1C3, RAB17, RAB3B, RIMKLA, RLF, RND1, RORA, RRAD, SCARNA17, SDS, SERPINE2, SLC16A3, SLC18A2, SLC23A2, SLC4A8, SLC7A11, SLC7A5, SNHG9, SNORA71C, SOCS2, SPRY2, SPTBN4, TBX15, TCAF2, TEAD1, TFRC, TGFB2, THRSP, TNS3, TRAM2, TUBA4B, UBD, UGDH-AS1, UGT1A4, VIM-AS1, VLDLR, YPEL1, YPEL2, ZC3HAV1L, ZFP42, ZNF608, ZNF793, ANKRD29, ANKRD30BL, APBB3, AQP4, ARL4C, C10orf11, CACYBP, CAMKMT, CCDC189, CDCA2, CHST9, COLCA2, CTDSP1, CXCL11, CYP1A1, CYTH1, DUSP6, EML6, FAM49A, FAM65B, FOS, FOSB, GALNT12, GIPR, HIVEP2, HMGCR, KIF12, LINC00313, LOC100507195, LOC105369332, LOC401554, LPCAT3, LRP1, MAGEA10, MANF, MAP3K8, MEI4, MIR5010, MOG, MPHOSPH6, MSMO1, NIPAL4, OTUD3, PELI2, PHLDA1, PLCG1-AS1, PROCR, RARB, RDH12, S100A9, SLC16A6, SLC16A7, SLCO2B1, SLCO4C1, SOGA3, SPRN, TENM1, TMEM45A, TTPA, UNC93A, ZNF221, ZNF80, and ZNF837.

[0480] Rapamycin was observed to significantly (p-value≤0.05) modulate expression of A1BG-AS1, ABALON, ABCC11, ABLIM3, ACAA2, AKAP12, AKR1D1, AMACR, ANKRD37, ANXA1, APOA1-AS, ARHGEF26-AS1, ARL5B, ATP6V1C2, C5orf45, CASKIN1, CBR3, CCDC152, CLSTN3, CLVS1, CPS1, CYP26A1, CYP2C9, EFNA3, ENO2, EPAS1, ETNPPL, F13B, FAM13A, FAM69C, FGF2, G6PC, GDF15, GHR, GREM2, HAO2, HMGCS1, HSPB1, HSPB8, HSPH1, ID2, IL18, ITGA7, ITIH4-AS1, KANK1, KCNJ8, KCNQ1OT1, LINC00504, LOC100128494, LOC100129931, LOC101929516, LOC104968399, LOC284454, LPIN2, LUCAT1, LYPD1, MAMDC4, MIR1282, MIR6723, MLK7-AS1, MMP24, MT1E, MT1HL1, MT1X, MTRNR2L4, MXD3, NAMPT, NBPF20, NCR3LG1, NDRG1, NRAP, PCK1, PER1, PFKFB3, PFKFB4, PID1, PIK3CD, PITRM1-AS1, PPFIA4, PROX1, PRSS23, RPL13AP6, RPL17, RTP3, S100A6, SCD5, SLC22A25, SLC2A2, SLC6A1, SNORD27, SORBS1, SPAG4, SPP1, STOM, SULT2A1, TBC1D8, TDO2, THBS1, TIPARP, TMCC1, TMSB4X, TNFAIP3, TUBA4A, UBALD2, UBXN7, UGT2B4, VWCE, ZNF292, HES4, KCP, KIAA0754, MAP2K6, MTMR11, NR1D1, PCSK9, RGS9, RNF186, SLC25A20, SNX22, USP12, ZBTB37, ABCB11, ABHD2, ACTA2, ADGRV1, ALAS1, ALDH8A1, ALPK2, ANGPTL4, ANO1, APOA4, ARG1, ARL14, BCAS1, BNIP3, CADPS2, COL1A1, CSPG4, CYP2C19, CYP3A4, CYP3A5, CYP8B1, ELOVL2, ENO3, FAM134B, FAM162A, FAM47E, FOSL1, GADD45B, HK2, HMOX1, IFT80, IGFALS, IGSF23, IL22RA1, IL6R, ILDR2, ITGB6, KCNK5, KDM3A, KLF2, KLF5, KLF9, KLHL31, KRT7, KRT80, LAMC2, LDHA, LINC00261, LINC01018, LINC01314, LOC100507389, LOC101929415, LOC440300, LOC729348, LOXL4, LRRC37A3, MAFF, MATN2, METRN, MIR663A, MOGAT3, MXRA8, MYL9, MYOM1, NUCB2, OAS1, OXTR, P4HA1, PALMD, PAM, PDGFB, PDIA4, PDK1, PEG10, PLIN4, PLK2, PPP1R3G, PSD3, PSORS1C3, RAB17, RAB3B, RIMKLA, RLF, RND1, RORA, RRAD, SDS, SERPINE2, SLC23A2, SLC4A8, SLC7A11, SOCS2, SPTBN4, TCAF2, TFRC, TGFB2, THRSP, TNS3, TRAM2, TUBA4B, UGDH-AS1, UGT1A4, VIM-AS1, VLDLR, YPEL2, ZC3HAV1L, ZFP42, AQP4, ARL4C, CHST9, CXCL11, CYP1A1, CYTH1, DUSP6, EML6, FOSB, HIVEP2, HMGCR, KIF12, LOC100507195, LRP1, MAP3K8, MIR5010, MSMO1, NIPAL4, PELI2, PHLDA1, RARB, SLC16A6, SLCO2B1, SLCO4C1, SPRN, TENM1, TTPA, UNC93A, ZNF80, CCDC73, CPT2, CX3CL1, EFNA1, EPO, EXTL3-AS1, FADS1, FAM222A, FASN, FLNC, HGD, IGFBP3, MIR3661, MIR6087, OASL, PGD, RMRP, RNVU1-19, RPPH1, SFN, SLC38A4, SNAI2, TSLP, ZNF485, BZRAP1-AS1, CYBB, IL12RB1, LINC01057, PFN1P2, STAMBPL1, ABCA4, ABCA9, ABCG2, ACKR2, ACSL1, ACTA1, ACTBL2, ADAM19, ADGRF4, ADGRG6, ADM, ADRB2, AFAP1L1, AGRN, AHNAK2, AHSG, AKR1B1, ALDH1L1, ANGPTL8, ARID3C, ATP5E, AZGP1P1, BAIAP2L2, BIRC3, BMP2, BMP8B, C10orf128, C11orf96, C1orf106, C2orf82, CA12, CA2, CACHD1, CAPN8, CCL2, CCL20, CD109, CES4A, CES5A, CHST13, CHST3, CITED2, CLDN4, CLSTN1, CNN1, CNTLN, COL16A1, COL7A1, CPB2-AS1, CPT1A, CRACR2B, CREB5, CRY2, CRYAB, CTGF, CUX2, CXCL2, CYP21A2, CYP3A43, CYP3A7, CYP3A7-CYP3A51P, CYP7A1, DDIT4L, DHRS2, DNAH5, DNAJB4, DOK7, DSG1, DUSP13, DZIP1L, ECM2, EDN1, EML5, EMP2, EPHB2, EPPK1, ERRFI1, EVA1A, F2RL2, FAM151A, FAT1, FAT3, FCAMR, FDPS, FLNA, FLRT3, FLVCR2, FSTL3, GCNT2, GEM, GLIS3, GOLGA7B, GP1BA, GRIA3, GRIN3A, HAL, HAS3, HIPK2, HKDC1, HMGB2, HPGD, HRCT1, HSPA1A, ICOSLG, IDI1, IER3, IFI35, IFIT2, IGF1, IL17RB, IL7R, INHBA, INSIG1, ISG15, ITGA3, IVL, JDP2, KCNE1, KLHDC7B, KLHL13, KRT81, KSR2, LAMA5, LAMB3, LBH, LCN2, LECT2, LGALS1, LGALS4, LHFPL5, LIF, LINC00152, LINC00862, LINC00880, LINC01151, LMCD1, LOC101928118, LOC101929567, LOC283731, LPAL2, LRAT, LRRC8C, LRRN2, LTBP1, LTBP3, MAMLD1, MCAM, MGC12916, MILR1, MIR210HG, MMP12, MMP3, MN1, MOGAT1, MSC, MST1R, MVD, MYLIP, MYOF, MYRIP, NAGS, NCALD, NDRG4, NES, NETO2, NEURL3, NMB, NPAS2, NPR3, NR6A1, NUAK2, OSGIN1, PAPLN, PAQR7, PBXIP1, PCDH20, PCED1B, PDLIM7, PGM2, PIGR, PKHD1, PLPP3, PNLIPRP3, POR, PPARGC1A, PPL, PPM1L, PRR15, QPCT, RAB27B, RAB3IL1, RBP5, RCL1, RDH5, RHOF, RMI1, ROBO4, ROR1-AS1, ROS1, RSAD2, SCARA3, SCN8A, SEC14L4, SEMA7A, SESN3, SFRP4, SIPA1L2, SLC16A12, SLC22A10, SLC25A18, SLC5A11, SLC6A6, SLITRK3, SMCO3, SMG1P3, SMOC1, SORBS2, SORL1, SOX9, SPOCD1, SPX, SQLE, STC2, SUGCT, SYTL2, SYTL4, TAPT1-AS1, TAT, TFCP2L1, TGFBI, TMC7, TMEM37, TMPRSS2, TNC, TNFAIP2, TNFRSF19, TNFRSF21, TNS2, TP53INP1, TP63, TRPM8, TRPV3, TSKU, TSPAN2, TSPAN5, TSPAN7, UBASH3B, UNC5CL, VIM, ZMIZ1-AS1, ZNF648, ZXDB, AADAC, ABLIM2, ACSL5, ACSS2, ADCY7, ADRA1B, ADRB1, AGTR1, AKR1C8P, ALOX5, ANGPTL1, ANGPTL7, ANXA13, ARL4D, ATG9B, ATP6V0D2, AVPR1A, BMF, C19orf71, C1QTNF1-AS1, C2orf54, C4orf19, C4orf32, C8orf4, C9orf72, CAMK2G, CD274, CDRT1, CNTD1, COL4A2, COL4A4, CPVL, CSRNP3, CXCL12, CYP1B1, CYP24A1, CYTH4, DCX, DGKG, DNAJB1, DNAJC12, DSG2-AS1, EGLN3, ENPP2, ENTPD7, EPHA4, ERICH5, ESRRG, FABP3, FADS2, FAM124A, FAM43A, FAM46C, FBXO30, FBXW10, FBXW4P1, FDFT1, FGF13, FGF19, FGF21, FGFR3, FGR, FMO1, GAL3ST1, GBP6, GLA, GLRA2, GNAO1, GPC6, GPCPD1, HCAR2, HCAR3, HDC, HIST3H2A, HMGCS2, HSPG2, IGF2BP3, IGFBP6, IGFN1, IL12RB2, IL23A, INHBE, KIAA0226L, KIAA0319, KIF5A, KIRREL, LAG3, LDLRAD4, LEFTY1, LGALS9, LILRA5, LINC00266-3, LINC00704, LOC100505635, LOC101927630, LOC101929448, LOC101930114, LOC105371795, LOC105372833, LOC105373051, LOC254028, LOC284344, LOC344887, LPA, LRFN2, LRP8, LRRIQ3, MAATS1, MAB2IL2, MAP1B, MAP6, MCHR1, MIR4645, MMP19, MOGAT2, MPV17L, MSX1, MYH3, MYH4, NDUFA6-AS1, NECTIN4, NEFM, NEXN, NOS2, NUDT18, NUGGC, P2RY1, P4HA3, PCSK5, PFDN4, PGAM4, PKD1L2, PKD2L1, PKLR, PLAU, PLCH1, PMEPA1, PRAMEF2, PRDM7, PREX1, PROM1, RAPGEF4, RGCC, SEC14L6, SEC31B, SERPINB9, SGK2, SH3TC2, SHC4, SIX4, SLC16A14, SLC17A2, SLC29A4, SLC2A10, SLC51B, SLC6A20, SMAD5-AS1, SMIM3, SNORD33, SPOCK1, STK39, STRA6, SUSD1, TAC1, TCP10L, TFPI2, TGFB1I1, TGFB3, TLE2, TLE6, TLR10, TMEM105, TMEM156, TMEM25, TMEM97, TOX3, TPM2, TRAF3IP3, TREM1, TREML3P, TREML4, TRIM31, TUSC3, UBE2D1, UCHL1, UGCG, UGT1A3, UGT1A5, VENTX, VLDLR-AS1, VWA3B, ZFAND2A, ZNF192P1, ZNF543, and ZNF703.

[0481] Simvastatin was observed to significantly (p-value≤0.05) modulate expression of ABLIM3, AKAP12, AMACR, ARL5B, CPS1, CYP2C9, ENO2, EPAS1, F13B, GDF15, HAO2, HMGCS1, KANK1, KCNJ8, LYPD1, MMP24, MT1E, MT1HL1, MT1X, NDRG1, PFKFB4, PID1, PIK3CD, PPFIA4, PROX1, PRSS23, RTP3, S100A6, SLC2A2, SLC6A1, SPP1, STOM, SULT2A1, TDO2, THBS1, TIPARP, TMCC1, TUBA4A, UBALD2, UGT2B4, KCP, MAP2K6, MTMR11, PCSK9, RGS9, RNF186, SNX22, USP12, ABHD2, ACTA2, ALDH8A1, ALPK2, ANGPTL4, APOA4, BCAS1, COL1A1, CYP8B1, FAM134B, FAM162A, FAM47E, FOSL1, GADD45B, HMOX1, IGFALS, IGSF23, IL22RA1, KCNK5, KDM3A, KLF2, KLF5, KLF9, KLHL31, LAMC2, LINC00261, LINC01314, LOXL4, LRRC37A3, MAFF, MATN2, METRN, MOGAT3, MYL9, MYOM1, P4HA1, PALMD, PDGFB, PDIA4, PLIN4, PLK2, RAB3B, RND1, SDS, SLC7A11, SOCS2, TGFB2, THRSP, YPEL2, CHST9, CXCL11, CYTH1, DUSP6, FOSB, HMGCR, LOC100507195, MSMO1, PHLDA1, RARB, SLCO2B1, SLCO4C1, TENM1, TTPA, UNC93A, ZNF80, FADS1, FASN, HGD, IGFBP3, OASL, PGD, SFN, SLC38A4, ACSL1, AHNAK2, ALDH1L1, ARID3C, ATP5E, BMP2, BMP8B, C11orf96, C1orf106, C2orf82, CHST13, CHST3, CLDN4, CLSTN1, COL16A1, CREB5, CRYAB, CUX2, CYP7A1, DNAH5, DSG1, EDN1, EPPK1, ERRFI1, FAM151A, FDPS, FLNA, FLVCR2, GRIA3, HPGD, HRCT1, HSPA1A, IDI1, IER3, IFIT2, IGF1, IL17RB, INSIG1, IVL, KLHDC7B, KSR2, LBH, LGALS1, LGALS4, LIF, LINC01151, LMCD1, MVD, MYOF, NUAK2, PAPLN, PDLIM7, PIGR, PKHD1, RAB27B, RBP5, RHOF, SCN8A, SEMA7A, SIPA1L2, SMC03, SORBS2, SPOCD1, SQLE, STC2, TMC7, TMPRSS2, TNC, TNS2, TSKU, UBASH3B, UNC5CL, VIM, ZXDB, ACSS2, C4orf32, CYP1B1, CYP24A1, DNAJB1, FABP3, FADS2, FDFT1, FGFR3, FMO1, GLRA2, GNAO1, GPC6, HMGCS2, IL23A, LPA, LRP8, MAP1B, MMP19, MOGAT2, MPV17L, NDUFA6-AS1, NECTIN4, NUGGC, PCSK5, PKD2L1, PMEPA1, RGCC, SGK2, SLC17A2, TMEM97, TPM2, UBE2D1, UGCG, ZFAND2A, ZNF703, ANGPTL2, HSP90AA1, IGFBP1, ITGA5, NDUFA4L2, RASD1, SCGN, SLC38A2, TMEM138, ADCY5, RNF122, CBLB, CRYM, FKBP5, GPER1, MAFB, NEB, PMAIP1, SLC16A3, TBX15, ZNF608, APBB3, CAMKMT, GALNT12, LPCAT3, MEI4, SLC16A7, SOGA3, CYB561A3, EGOT, IRF7, RAET1E, ABCG1, ACAT2, ACSM2A, ACSM2B, B3GNT5, CPA4, CRIP3, DUOX2, DYNLL1, ESR1, FCRLA, HBEGF, HMCN1, HOGA1, HSPA1B, IRF4, KCNJ3, KIAA1462, KLF15, LAMB1, LINC01554, LINC01559, MEGF6, NFASC, PIK3C2G, PPP1R14C, PPP1R3C, RHCG, RHOB, RND3, S100A2, SEC14L2, SLC16A13, SPRR1A, SPRR3, SYPL2, TMEM217, TOX2, TSC22D3, TTYH3, TUBA1A, TXNIP, UPP2, ACAD11, ACOT1, AHRR, AK7, ANXA3, ARHGDIB, ATP2B2, BAG3, BCAT2, C1orf116, CACNA1D, CAPN13, CDHR1, COL4A1, DBH-AS1, DEDD2, DPY19L2, EME2, FAM198A, GBAP1, GNAZ, HSD17B7, HSPA6, KANK4, KIF3C, LBHD1, LOC100190940, LOC100506258, LOC100507002, LOC101928865, LOC105376575, LOC728040, MED31, MGAM, MRO, NCKAP5, NPTX2, PIGZ, PLCH2, PLOD1, S1PR1, SH2D3C, SLC25A42, SMIM10L2B, SMO, SNORD97, TEAD2, TENM2, TNFSF11, USP2, and VWF.

[0482] DmPGE2 was observed to significantly (p-value≤0.05) modulate expression of A1BG-AS1, ACAD11, ADGRG6, AGRN, AHSG, AKAP12, ALPK2, ANGPTL4, ANKRD30BL, APOA1-AS, ATAD3C, ATP6V1C2, C5orf45, CASKIN1, CCDC152, CDH12, CLVS1, CYP3A5, DNAJC12, DSG1, DSG2-AS1, DUOX2, ELOVL2, ERRFI1, ETNPPL, FADS1, FAM13A, FAM69C, FAT1, FBXO41, FDFT1, FDPS, FGF2, G6PC, GADD45B, GALNT12, GDF15, GDNF, GHR, GLIS3, GREM2, HAO2, HES4, HHAT, HIPK2, HKDC1, HSD17B7, HSPA1B, ID2, IFIT2, IGFBP1, IGLL5, IL23A, ISM1, ITGB6, KCNQ10T1, KCP, KIAA0895L, KIAA1462, KLHL13, KRT81, LAMC2, LINC00102, LINC00886, LINC01012, LOC104968399, LOC284454, LRRC39, LYPD1, MAMDC4, MCM7, MIR6723, MLK7-AS1, MMP12, MT1E, MT1HL1, MT1X, MYH3, NRAP, OAS1, OAS3, PER1, PEX5L, PHLDA1, PID1, PROX1, PSD3, RASD1, RASSF2, REEP1, RHOF, RND3, RPL13AP6, SCARNA7, SLC2A2, SLC37A4, SLC38A4, SLC7A2, SNORD15B, SNORD33, SNX22, SPAG4, TBC1D8, TMPRSS2, TPM2, TUBA4A, UCN, UGT2B4, VENTX, VIM, VWCE, XAF1, and ZNF485.

[0483] ATRA was observed to significantly (p-value≤0.05) modulate expression of A1BG-AS1, AADAC, ABALON, ABCA6, ABCA9, ABCB11, ABCC11, ABCG1, ABCG2, ABLIM3, ACAA2, ACSM2A, ACTG2, ADAM19, ADGRG6, ADGRV1, ADRB2, AGRN, AHNAK2, AHSG, AKR1B15, AKR1D1, ALAS1, ALDH8A1, ALPK2, AMACR, ANGPTL8, ANKRD29, ANKRD30BL, ANO1, ANXA13, AOC4P, APOA1-AS, APOBEC3A, APOBEC3B, AQP4, ARHGEF26-AS1, ARHGEF3, ARL14, ARRDC3, ARSI, ASB14, ATAD3C, ATOH8, ATP5E, ATP5EP2, ATP6V0E2-AS1, ATP6V1C2, BCAS1, BCL2A1, BIRC3, BMF, BNIP3, BSN, C10orf54, C18orf32, C1orf226, C1QTNF1-AS1, C2orf54, C2orf91, C4orf19, C4orf32, C5orf45, C8orf4, CA12, CACHD1, CACNA1D, CACYBP, CADPS2, CAMK2G, CAMKMT, CASKIN1, CAT, CBLB, CBR3, CBWD3, CCDC152, CCDC28B, CCDC73, CCDC85B, CCL2, CCL5, CD109, CD274, CDH12, CDKL1, CDKL5, CEBPB-AS1, CECR1, CELSR3, CEP57, CFAP73, CHST13, CHST9, CIITA, CLEC2D, CLEC7A, CLSTN1, CLVS1, CNN1, COL7A1, COLCA2, CPS1, CREB3L3, CREB5, CRIP3, CRYAB, CRYM, CSNK1E, CSPG4, CTAGE8, CX3CL1, CXCL2, CYP1A1, CYP1A2, CYP21A2, CYP24A1, CYP26A1, CYP3A5, CYP7A1, CYP8B1, DAND5, DCLK1, DGKH, DHRS2, DNAH1, DNAJB1, DNAJB4, DNAJC12, DSG2-AS1, DUSP6, DYNLL1, DZIP1L, ECH1, ECM2, EDARADD, EDN1, EFNA1, EFR3B, EMP2, ENO3, ENPP2, ENTPD1, EPAS1, EPB41L1, ERI3-IT1, ERN1, ERRFI1, ESRG, ESRRG, ETNPPL, EVA1A, F13B, FADS1, FAM13A, FAM162A, FAM198A, FAM219A, FAM227B, FAM25A, FAM43A, FAM47E, FASN, FBXO41, FCAMR, FGF19, FGF2, FGFR3, FHL3, FLJ43879, FLNC, FLRT3, FLVCR2, FMO1, FOSB, FSTL3, FTX, GOS2, GALNT12, GALNT15, GBP4, GDF15, GEM, GNAZ, GOLGA6L3, GPC6, GPM6A, GPRIN3, GRIA3, GSG1, GSTP1, GYS2, HAO2, HAS3, HBEGF, HELZ2, HHAT, HIPK2, HIST3H2A, HIST3H2BB, HIVEP2, HK2, HKDC1, HLA-G, HOGA1, HPGD, HSP90AA1, HSPA1A, HSPA1B, HSPA5, HSPB1, HSPB8, HSPH1, ID2, IDI1, IER3, IFIT1, IFT80, IGF1, IGFBP3, IGFBP6, IL12RB1, IL17RB, IL18, INHBB, ISG15, ITGA3, ITGA5, ITGA7, ITGB6, ITIH4-AS1, IVL, KCNB1, KCNJ11, KCNJ8, KCNK5, KCNMB4, KCNQ1OT1, KIAA0754, KIR3DX1, KLF15, KLHL13, KRT42P, KRT81, LAMA3, LAMA4, LAMA5, LAMB4, LAMC2, LECT2, LGALS1, LGALS4, LGALS9, LHFPL5, LIF, LILRA5, LINC00102, LINC00261, LINC00504, LINC00661, LINC00862, LINC00880, LINC01012, LINC01057, LINC01314, LINC01347, LINC01587, LMCD1, LOC100128494, LOC100133286, LOC100506675, LOC100507002, LOC100507389, LOC101927809, LOC101928118, LOC101928514, LOC101929148, LOC104968399, LOC153910, LOC284454, LOC401554, LOC440311, LOC728752, LOC729348, LOXL4, LPA, LPIN2, LRAT, LRFN2, LRP1, LRP8, LRRC8C, LTBP3, LYPD1, MAGEA10, MANF, MAP1LC3C, MAP3K8, MCAM, MIR1282, MIR3661, MIR4435-2HG, MIR4523, MIR6087, MIR663A, MIR663AHG, MIR6723, MIR8075, MKNK1-AS1, MLK7-AS1, MLLT1, MLLT11, MMP19, MMP3, MOGAT1, MOGAT2, MPHOSPH6, MPP2, MPV17L, MSC, MT1E, MT1HL1, MT1X, MTMR11, MTRNR2L4, MXD3, MXRA8, MYRIP, NAMPT, NBPF10, NBPF20, NBPF25P, NCF2, NCR3LG1, NEB, NEURL3, NEXN, NFATC4, NIPAL4, NLGN2, NMB, NPAS2, NPTXR, NR6A1, NRAP, NRG4, NRP2, NUCB2, NUDT18, OAS1, OR2A7, OSGIN1, OXTR, PALMD, PCDH9, PCDHGA8, PCK1, PDIA4, PDK4, PDLIM7, PEG10, PELI2, PER1, PFDN4, PGM2, PID1, PIGR, PITRM1-AS1, PKHD1, PKLR, PLA2G6, PLCXD2, PLIN2, PLPP3, PLXND1, PPFIA4, PPL, PPM1L, PPP1R3C, PREX1, PROX1, PRR15, PRSS23, PSD3, PTPRU, PTPRVP, PWAR5, RAB27B, RAB3B, RAET1E, RARB, RBP5, RCL1, RDH12, RGS9, RMRP, RNVU1-19, RPL17, RPL22L1, RPLP0P2, RPPH1, RPSAP9, RRAD, RSAD2, RTP3, S100A6, S1PR1, SCDS, SCGN, SCPEP1, SCUBE1, SDS, SEC14L2, SEMA7A, SERPINA2, SERPINB9, SERPINE2, SFN, SGK2, SH3TC2, SLC22A10, SLC22A25, SLC23A2, SLC29A4, SLC2A2, SLC38A2, SLC44A5, SLC4A8, SLC7A11, SLC7A2, SLC7A5, SLCO2B1, SLITRK4, SMC2-AS1, SMG1P1, SMG1P3, SMPD3, SNHG9, SNORD12, SNORD12B, SNORD12C, SNORD49A, SNX22, SOAT2, SOCS2, SORBS1, SORBS2, SORL1, SOX9, SPARCL1, SPOCD1, SPP1, SQLE, STIP1, STOM, SYPL2, SYTL3, SYTL4, TBC1D8, TCAF2, TDO2, TEAD1, TEKT5, TENM1, TGFB1I1, TH, THBS1, TMEM164, TMEM217, TMEM45A, TMEM47, TMPPE, TMSB4X, TNFAIP2, TNFRSF21, TNFSF10, TNRC6C-AS1, TNS2, TNS3, TPM2, TRAM2, TRIM31, TSKU, TSLP, TSPAN5, TSPO2, TTYH3, TUBA4A, TUBA4B, TXNDC5, UBD, UBE2D1, UBXN7, UCHL1, UGT1A4, UGT2B4, ULBP2, UNC5CL, UPK3B, USP2, VENTX, VIM, VIM-AS1, ZBTB37, ZC3HAV1L, ZFP42, ZMYND8, ZNF221, ZNF292, ZNF385C, ZNF702P, ZNF793, ZNF827, and ZXDB.

[0484] Isoniazid was observed to significantly (p-value≤0.05) modulate expression of A1BG-AS1, ABALON, ABCA10, ABCA9, ABCB11, ABCC11, ABHD16B, ABHD2, ABLIM3, ACAA2, ACTA1, ACTA2, ADM, AKAP12, AKR1B15, ALAS1, ALPK2, AMACR, ANGPTL2, ANGPTL8, ANXA13, APOA1-AS, APOA4, APOBEC3B, ARG1, ARHGEF26-AS1, ARL5B, ARRDC3, ATP5E, ATP6V1C2, BCAT2, BIRC3, BNIP3, C2orf91, C5orf45, CA2, CACTIN-AS1, CASKIN1, CBLB, CBR3, CCDC152, CCDC85B, CCL5, CD274, CD4, CDKL1, CEBPB-AS1, CHST13, CHST9, CLEC7A, CLVS1, CNN1, COX16, CRYM, CSPG4, CTAGE8, CXCL8, CYB561A3, CYP2C9, CYP3A5, CYTH1, DGKH, DNAH11, DOK7, DUSP6, ECH1, EDARADD, EFNA1, ENO2, ENO3, EPO, EPPK1, ETNPPL, FAM134B, FAM13A, FAM162A, FAM69C, FCAMR, FGFR3, FLNA, GBP4, GBP5, GCNT2, GNAO1, GREM2, HAO2, HGD, HHAT, HIVEP2, HK2, HMGCR, HMGCS1, HMOX1, HSD3B2, HSPA1A, HSPA1B, HSPB1, HSPB8, HSPH1, ID2, IDI2-AS1, IFIT2, IGFALS, IGFBP1, IGFBP5, IGLL5, IL18, IL23A, IL6R, INSIG1, ISM1, ITGA3, ITGA7, ITGB6, ITIH4-AS1, KANK1, KCNJ8, KCNK5, KCNQ1OT1, KDM3A, KIAA0754, KIF12, KISS1R, KRT7, KRT80, KRT81, LAMA5, LAMC2, LDHA, LGALS1, LHFPL5, LINC00102, LINC00504, LOC100128494, LOC100129931, LOC100133286, LOC100506321, LOC101927973, LOC101928504, LOC101928525, LOC101928865, LOC101929415, LOC101929516, LOC104968399, LOC440300, LOXL4, LPCAT3, LPIN2, LRAT, LRRC24, LRRIQ3, LTBP3, LUCAT1, LYPD1, MAFB, MAP3K8, MATN2, MCAM, MED31, METRN, MIR1282, MIR3661, MIR6087, MIR6723, MLK7-AS1, MMP24, MSC, MSMO1, MT1E, MT1HL1, MT1X, MTMR11, MTRNR2L4, MXD3, MXRA8, MYL9, NAV2-AS2, NBPF20, NCF2, NCR3LG1, NDRG1, NDUFA4L2, NFASC, NLRP11, NME2, NRAP, NTN1, NUAK2, NUCB1-AS1, OSGIN1, OTUD3, P4HA1, PAM, PAPLN, PDIA4, PDK1, PFKFB3, PHLDA1, PID1, PIK3C2G, PITRM1-AS1, PLCG1-AS1, PLIN4, POR, POTEE, PPFIA4, PPL, PRKRIP1, PRSS23, PSORS1C3, PWAR5, RAB3B, RARB, RGCC, RGS9, RHCG, RIMKLA, RLF, RMI1, RMRP, RND3, RNF122, RNVU1-19, ROR1-AS1, RORA, ROS1, RPL13AP6, RPL17, RPPH1, RRAD, RTP3, S100A6, S1PR1, SDS, SERPINE2, SFN, SLC1A2, SLC25A20, SLC25A42, SLC2A2, SLC37A4, SLC7A11, SLC7A2, SLCO2B1, SLCO4C1, SMARCA5-AS1, SNHG9, SNORD27, SNX22, SOCS2, SORBS1, SPAG4, SPRN, SPRY1, SPRY2, SQLE, TBC1D8, TBX15, TCAF2, TCP10L, TFRC, THBS1, TIPARP, TMCC1, TMEM138, TMEM45A, TMEM47, TMSB4X, TNC, TNFAIP3, TNFSF10, TNFSF11, TP53INP1, TRO, TSKU, TSLP, TSPEAR-AS1, TUBA4A, TUSC3, UBXN7, UGDH-AS1, USP12, VIM, VIM-AS1, VLDLR, VWCE, XAF1, YJEFN3, YPEL2, ZACN, ZBTB37, ZFP42, ZNF192P1, ZNF292, ZNF485, ZNF608, and ZNF702P.

[0485] Acetaminophen was observed to significantly (p-value≤0.05) modulate expression of ABLIM3, ACAA2, ACAD11, AHSG, AKR1B15, ALPK2, ARL14, ATAD3C, ATP5EP2, C18orf32, CBR3, CLEC2D, CSRNP3, CTDSP1, CXCL14, CYBB, CYP1A2, CYP2C9, DNAJC12, EDARADD, ERRFI1, EXTL3-AS1, FAM218A, FAM219A, FAM69C, FASN, FBXO41, FGF2, FSTL3, GADD45B, GDF15, GPR85, GREM2, HES4, HSD17B7, HSP90AA1, HSPA1A, HSPA1B, HSPA5, HSPA6, IFT80, IL7R, KCP, KIAA0895L, KIAA1462, KRT42P, LAMC2, LOC100506675, LOC728752, MIR6087, MIR663AHG, MT1E, MT1HL1, MT1X, MTRNR2L4, NEUROD1, NEUROD2, NLGN2, NLRP11, NR1D1, OSGIN1, PDLIM7, PEG10, PFDN4, PID1, PIGR, PLOD1, POU2AF1, RASD1, RHOB, RNVU1-19, RPL17, RPL22L1, RPLP0P2, RPSAP9, S100A6, S1PR1, SLC37A4, SLC4A8, SLITRK4, SNHG9, SNORA50C, SNORD56, TBC1D8, TMEM238, TMEM97, TMSB4X, TNFAIP2, TREH, TRIM69, TSLP, TTPA, TXNDC5, UBALD2, UBE2D1, UGT2B4, USP2, VENTX, and ZNF702P.

[0486] Ritonavir was observed to significantly (p-value≤0.05) modulate expression of ABALON, ABCA4, ABCA6, ABCA7, ABCA9, ABCB11, ABCG1, ABLIM2, ABLIM3, ACAA2, ACAD11, ACADVL, ACAT2, ACOT1, ACSL1, ACSL5, ACSM2A, ACSS2, ACTA1, ACTA2, ACTG2, ADCY10P1, ADCY7, ADGRG2, ADGRG6, ADGRV1, ADM, ADRB2, AFAP1L1, AGRN, AGTR1, AHNAK2, AHRR, AHSG, AKAP12, AKR1B1, AKR1B15, AKR1C8P, AKR1D1, ALAS1, ALDH1L1, ALDH8A1, ALOX5, ALPK2, AMACR, ANGPTL1, ANGPTL2, ANGPTL4, ANGPTL8, ANKRD23, ANO1, ANXA13, APOA1-AS, APOA4, APOBEC3A, AQP4, ARC, ARHGAP28, ARHGEF26, ARHGEF26-AS1, ARL14, ARL4C, ARL4D, ARL5B, ARRDC3, ATAD3C, ATG9B, ATOH8, ATP5E, ATP5EP2, ATP6V0D2, ATP6V1C2, AVPR1A, AZGP1P1, AZU1, B3GNT5, B4GALNT1, BAG3, BAHCC1, BCL2, BEX4, BIK, BIRC3, BMP2, BMP3, BMP6, BMP8B, BRF2, BSPRY, C10orf11, C10orf128, C10orf35, C10orf54, C11orf96, C19orf71, C1orf105, C1orf116, C1orf226, C1orf53, C2orf54, C2orf82, C2orf91, C4orf32, C5orf45, C8orf4, C9orf152, C9orf173-AS1, C9orf24, C9orf72, CA12, CA2, CACHD1, CACNA1D, CACYBP, CADPS2, CAMK2G, CAPN8, CASKIN1, CASP16P, CAT, CBLB, CBLN3, CBR3, CCBL1, CCDC102B, CCDC114, CCDC152, CCDC189, CCDC28B, CCDC73, CCDC85B, CCL2, CCL26, CCL5, CCNE2, CCR1, CD274, CD300LB, CDC6, CDKN1C, CEBPD, CELSR2, CELSR3, CFAP47, CHI3L2, CHST13, CHST9, CIITA, CLDN16, CLDN2, CLDN4, CLEC2D, CLRN3, CLSTN3, CLVS1, CNN1, CNTLN, CNTN2, COL12A1, COL4A1, COL4A4, COL7A1, CPB2-AS1, CPEB1, CPS1, CPT1A, CRACR2B, CREB3L3, CREB5, CRY2, CRYAB, CRYM, CSNK1E, CSPG4, CSRNP3, CTAGE8, CTDSP1, CUX2, CX3CL1, CXCL1, CXCL11, CXCL14, CXCL2, CXCL3, CXCL8, CYP1A1, CYP1A2, CYP21A2, CYP24A1, CYP26A1, CYP2C19, CYP2C9, CYP3A4, CYP3A43, CYP3A5, CYP3A7, CYP3A7-CYP3A51P, CYP7A1, CYP8B1, CYTH1, DAND5, DBH-AS1, DCX, DDIT4L, DEDD2, DEFB132, DGKG, DNAH12, DNAH5, DNAH7, DNAI1, DNAJA4, DNAJB1, DNAJB4, DNAJB5-AS1, DNAJC12, DNM1, DNMT3L, DSC1, DSG1, DSG2-AS1, DUOX2, DUOXA2, DUSP13, DUSP6, ECH1, ECM2, EDARADD, EDN1, EFCAB5, EFNA1, EFNA3, EGOT, EIF4EBP3, ELMOD1, ELOVL2, EML6, EMP2, ENO3, ENTPD7, EPAS1, EPB41L1, EPHA4, EPHB2, EPPK1, EPSTI1, ERICH5, ERN1, ETNK2, ETNPPL, EVA1A, EVPLL, F2RL2, FADS1, FADS2, FAM105A, FAM124A, FAM129A, FAM13A, FAM151A, FAM162A, FAM167A, FAM171B, FAM198A, FAM219A, FAM222A, FAM227B, FAM25A, FAM26F, FAM47E, FAM49A, FAM65B, FAM83D, FASN, FAT1, FBXO30, FBXO41, FBXW4P1, FDFT1, FDPS, FER1L4, FEZ1, FGF19, FGF2, FGFR3, FGR, FKBP5, FLNA, FLNC, FLRT3, FLVCR2, FMO1, FOS, FOSB, FOSL1, FSTL3, FYB, G0S2, G6PC, GADD45B, GAL3ST1, GALE, GALNT12, GALNT15, GAREM1, GBAP1, GBGT1, GBP6, GCNT2, GDF15, GHR, GIPR, GLA, GNAZ, GOLGA7B, GPM6A, GPRASP1, GRIA3, GSDMC, GXYLT2, HAGHL, HAL, HAO2, HAS3, HAVCR1, HBEGF, HCAR3, HELZ2, HES2, HGD, HHAT, HIPK2, HIVEP2, HKDC1, HMCN1, HMGCS1, HOMER1, HPGD, HRAT92, HRCT1, HSDL2, HSP90AA1, HSPA12A, HSPA1A, HSPA1B, HSPA1L, HSPA2, HSPA4L, HSPA5, HSPA6, HSPB8, HSPH1, HYAL3, ICOSLG, ID2, IDI1, IER3, IFI27, IFI44L, IFIT1, IFT80, IGF1, IGFALS, IGFBP1, IGFBP3, IGFBP6, IGFN1, IL10RA, IL12RB1, IL12RB2, IL17RB, IL18, IL36B, IL6R, IL7R, INHBE, INSIG1, IQSEC3, IRS2, ISG15, ITGA3, ITGB1BP2, ITGB6, JAKMIP3, JDP2, KCNJ11, KCNJ8, KCNQ1OT1, KIAA0125, KIAA0226L, KIAA0319, KIAA0754, KIF12, KIF14, KIF1A, KIRREL, KLF15, KLF2, KLF5, KLF9, KLHDC7B, KLHL13, KLHL3, KLHL31, KLHL32, KLK4, KRT42P, KRT7, KRT80, KRT81, KSR2, LAG3, LAMA3, LAMB3, LAMC2, LBH, LCN2, LDB2, LDLRAD4, LECT2, LEFTY1, LGALS1, LGALS4, LGALS9C, LIF, LILRA5, LINC00102, LINC00261, LINC00324, LINC00504, LINC00862, LINC00880, LINC01018, LINC01057, LINC01151, LINC01296, LINC01314, LINC01554, LOC100128494, LOC100130111, LOC100379224, LOC100506675, LOC100507195, LOC101927686, LOC101927809, LOC101927843, LOC101927973, LOC101928118, LOC101928371, LOC101928595, LOC101928837, LOC101928865, LOC101929148, LOC101929415, LOC101929427, LOC101929448, LOC101929516, LOC101929567, LOC101930114, LOC102724153, LOC104968399, LOC105371795, LOC105373051, LOC153910, LOC284344, LOC284454, LOC285629, LOC344887, LOC440300, LOC728040, LOC728752, LOC729348, LPAL2, LPCAT3, LRP8, LRRC19, LRRC24, LRRC37A3, LRRC74B, LRRIQ3, LRRN2, LTBP1, LTBP3, LYPD1, MAATS1, MAB2IL2, MAFF, MAMLD1, MANF, MAOA, MAP1B, MAP2, MAP3K8, MAP4K2, MATN2, MED31, MEGF6, MIR1282, MIR5010, MIR6087, MIR663AHG, MIR6723, MKNK1-AS1, MLK7-AS1, MLLT11, MMP12, MMP19, MMP3, MMP7, MN1, MOGAT1, MOGAT2, MOGAT3, MPPED1, MPV17L, MSC, MSMO1, MST1R, MSX1, MT1E, MT1HL1, MT1X, MTMR11, MTRNR2L3, MTRNR2L4, MVD, MXD3, MYCL, MYH4, MYL9, MYO7B, MYRIP, NAMPT, NAP1L2, NBPF10, NBPF20, NCALD, NCKAP5, NDUFA4L2, NEB, NEFM, NES, NEURL3, NEUROD1, NFATC4, NFE2L3, NLGN2, NMB, NPAS2, NPTX2, NR6A1, NRAP, NRBP2, NRG4, NRIP3, NTN1, NUAK2, NUCB2, NUDT18, NUGGC, NWD2, NYAP1, OAS1, OAS2, OAS3, OASL, OR4F13P, OSGIN1, OTUD3, OXTR, P2RY1, P4HA3, PALMD, PAPLN, PARD6G-AS1, PCAT5, PCED1B, PCK1, PDGFB, PDGFRB, PDGFRL, PDIA4, PDK4, PDLIM7, PDZK1IP1, PEG10, PELI2, PELI3, PER1, PFDN4, PFKFB3, PGD, PGF, PGM2, PHLDA1, PID1, PIK3C2G, PIK3CD, PITRM1-AS1, PKD1L2, PKHD1, PKLR, PLA2G6, PLAU, PLK2, PLPP3, PLPPR1, PLXDC1, PLXNA4, PLXND1, PNLIPRP3, PNPLA5, POC1A, POR, PPARGC1A, PPM1L, PPP1R3C, PRAMEF2, PRDM7, PREX1, PRG4, PRKD1, PROKR1, PROX1, PRR15, PRR23C, PRSS23, PSD3, PTPRB, PTPRU, RAB17, RAB39A, RAB3B, RAB3IL1, RARB, RBM11, RBP5, RCL1, RDH12, RDH5, REEP1, RGS2, RGS9, RHCG, RHOB, RHOF, RLF, RMI1, RND1, RND3, RNF122, RNVU1-19, ROBO4, ROM1, ROR1-AS1, RORA, ROS1, RPL13AP6, RPL17, RPL22L1, RPLP0P2, RPSAP9, RRAD, RTP3, RUFY4, S100A2, S100A3, S100A6, S1PR1, SALL1, SCARA3, SCART1, SCPEP1, SCUBE1, SDHAF4, SDS, SEC14L2, SEC14L4, SEMA7A, SERPINB7, SERPINB9, SESN3, SFRP4, SGK2, SH2D3C, SH3TC2, SKAP1, SLC16A13, SLC17A1, SLC17A2, SLC18A2, SLC22A10, SLC23A2, SLC25A18, SLC25A20, SLC25A30, SLC2A10, SLC2A2, SLC30A2, SLC30A8, SLC37A4, SLC38A2, SLC51B, SLC5A11, SLC6A1, SLC6A10P, SLC6A6, SLC7A11, SLC7A5, SLCO2B1, SLCO4C1, SLITRK3, SLITRK4, SMAD5-AS1, SMAD6, SMCO3, SMIM3, SMO, SMOC1, SNAI1, SNAI2, SNHG9, SNORD100, SNORD16, SNORD33, SNORD43, SNORD56, SNX22, SNX29, SOAT2, SOCS2, SOCS2-AS1, SOGA3, SORBS2, SORL1, SOX9, SPARCL1, SPINT1, SPNS2, SPOCD1, SPOCK1, SPP1, SPRR1A, SPRR3, SPTBN4, SQLE, SRPX2, SRRM3, STAMBPL1, STIP1, STK39, STOM, STOX2, SUGCT, SULT2A1, SYNGR1, SYPL2, SYTL2, SYTL5, TACSTD2, TAT, TBC1D8, TCP10L, TDO2, TEAD1, TEAD2, TENM4, TEX14, TFCP2L1, TGFB2, TGFBI, TGM3, THBS1, THRSP, TIPARP, TLE2, TMC7, TMEM135, TMEM138, TMEM156, TMEM164, TMEM25, TMEM45A, TMEM47, TMEM97, TMPPE, TMPRSS2, TMSB4X, TMTC1, TNC, TNFRSF19, TNFRSF21, TNFRSF25, TNFSF10, TNFSF11, TNFSF9, TNRC6C-AS1, TNS3, TP53INP1, TP63, TPM2, TPRG1, TPRG1-AS1, TRAF3IP3, TRAF5, TRAM2, TREML3P, TRIM10, TRIM31, TRIM55, TRPM8, TRPV3, TSC22D3, TSKU, TSLP, TSPAN15, TSPAN2, TSPAN5, TSPAN7, TSPEAR-AS1, TSPO2, TTPA, TUBA4B, TUSC3, TXNIP, TYRO3, UBALD2, UBASH3B, UBD, UBE2D1, UBR5-AS1, UBXN7, UCHL1, UGCG, UGDH-AS1, UGT1A3, UGT1A4, UGT2B4, UNC5CL, UNC93A, UPP2, UQCRHL, USP2, VEGFB, VIM, VIM-AS1, VLDLR, VLDLR-AS1, VSNL1, VWA3B, XAF1, ZBTB16, ZC3HAV1L, ZFAND2A, ZFP42, ZHX1-C8orf76, ZMYND8, ZNF485, ZNF702P, ZNF703, ZNF837, and ZXDB.

[0487] SGI-1776 was observed to significantly (p-value≤0.05) modulate expression of AASS, ABCA6, ABHD2, ABLIM3, ACAA2, ACACB, ACAD11, ACSM2A, ACSM2B, ACTA1, ACTA2, ACTG2, ADCY5, ADGRG6, ADGRV1, ADM, ADRA1A, AHNAK2, AHSG, AKAP12, AKR1B15, AKR1C8P, AKR1D1, ALAS1, ALDH1L1, ALDH3B1, ALDH8A1, ALPK2, AMACR, ANGPTL4, ANGPTL8, ANKRD33B, ANXA1, ANXA13, ANXA3, AOC4P, APOA1-AS, APOA4, APOBEC3B, AQP4, AQP7, ARHGEF26-AS1, ARID3C, ARL14, ARL4A, ASB9, ATOH8, ATP5E, ATP6V0D2, ATP6V1C2, BCAS1, BCL2, BMF, BMP2, BNIP3, BRF2, BSPRY, C10orf11, C11orf96, C19orf71, C2CD4A, C2orf91, C5orf45, C6orf222, C8orf4, CA12, CACNA1D, CACYBP, CADPS2, CAMKMT, CAPN13, CAPN8, CASKIN1, CAT, CBLB, CBLN3, CCDC152, CCL2, CCL20, CCNE2, CD109, CD163, CD36, CDC6, CDC7, CDKL1, CEACAM6, CEBPD, CECR1, CES4A, CFAP44, CHST9, CITED2, CLEC2D, CLVS1, COL10A1, COL16A1, COL7A1, COTL1, CPA4, CPB2-AS1, CPS1, CPT1A, CPVL, CREB3L3, CREB5, CRIP3, CRY2, CRYM, CSRNP3, CTDSP1, CX3CL1, CXCL1, CXCL10, CXCL11, CXCL14, CXCL6, CXCL8, CYP17A1, CYP1A1, CYP1A2, CYP1B1, CYP26A1, CYP3A4, CYP3A5, CYP7A1, CYTH1, DCDC5, DEDD2, DERL3, DHRS2, DIRAS2, DNAH5, DNAH7, DNAJB1, DNAJB4, DSG1, DUOXA2, DUSP6, DYNLL1, ECH1, ECM2, EFNA1, EFR3B, EGR2, ELOVL2, ENO2, ENO3, ENTPD7, EPB41L1, EPPK1, ERN1, ERRFI1, ERV3-1, ESR1, ETFDH, ETNPPL, EVA1B, F13B, FADS1, FADS2, FAM110A, FAM13A, FAM162A, FAM198A, FAM47E, FASN, FBXO30, FBXO41, FCAMR, FCRLA, FER1L4, FGF14, FGF2, FGFR3, FGR, FLNA, FLNC, FLRT3, FLT4, FLVCR2, FMO1, FOSB, FSIP1, FSTL3, FYB, G6PC, GADD45B, GALE, GALNT15, GAREM1, GBP4, GDF15, GHR, GNAO1, GPC6, GPCPD1, GPRIN3, HES2, HGD, HHAT, HIST1H2BG, HIVEP2, HKDC1, HMCN1, HMGCR, HMGCS2, HMGN5, HMOX1, HOGA1, HOMER1, HPGD, HSDL2, HSP90AA1, HSPA1A, HSPA1B, HSPA4L, HSPA5, HSPB1, HSPB8, HSPH1, ICOSLG, IER3, IFI35, IFIT2, IFT80, IGF1, IGFBP1, IGFBP3, IGFBP6, IL12RB1, IL17RB, IL18, IL1RL1, IL22RA1, IL6R, ILDR2, INHBB, INHBE, INSIG1, IRF5, IRS2, ITGA3, ITGA7, ITGB1BP2, ITGB6, KANK1, KCNJ11, KCNJ8, KCNK5, KCNQ1OT1, KDELR3, KIAA0895L, KIF3C, KIR3DX1, KLF2, KLF5, KLF9, KLHDC7B, KLHL13, KLHL31, KLK4, KRT42P, KRT80, KRT81, KSR2, LAMB1, LAMB3, LAMC2, LCN2, LDB2, LDHA, LECT2, LGALS1, LGALS4, LGALS8-AS1, LIF, LINC00102, LINC00261, LINC00504, LINC00862, LINC00880, LINC00933, LINC01018, LINC01057, LINC01136, LINC01151, LINC01537, LINC01587, LL22NC03-63E9.3, LMCD1, LOC100506675, LOC100507002, LOC100507487, LOC101927973, LOC101928504, LOC101928539, LOC101928858, LOC101929148, LOC101929415, LOC104968399, LOC105369486, LOC105371795, LOC105372833, LOC105376575, LOC153910, LOC440300, LOXL4, LPCAT3, LPIN2, LRP1, LRRC39, LRRIQ3, LTBP1, LUCAT1, LYPD1, MAFF, MANF, MAOA, MAP2K6, MAP3K8, MAPT, MATN2, MCM7, MEI4, MGAM, MGC12916, MIR1282, MIR663AHG, MIR6723, MIR8075, MLLT11, MMP19, MMP24, MMP3, MMP9, MOGAT2, MOGAT3, MPHOSPH6, MRO, MS4A2, MST1R, MT1E, MT1HL1, MT1JP, MT1X, MTRNR2L3, MTRNR2L4, MVD, MYCL, MYH3, MYL9, MYOM1, NBPF20, NCF2, NCKAP5, NCR3LG1, NDRG4, NDUFA4L2, NEB, NEUROD1, NEXN, NFASC, NFATC4, NIPAL4, NLRP11, NPBWR1, NPHP1, NR1D1, NRAV, NRBP2, NUCB2, OAS1, OSGIN1, PADI1, PALMD, PAM, PBX1, PCDH9, PCK1, PCSK5, PCSK9, PDIA4, PDK1, PDK4, PDLIM7, PEG10, PELI2, PELI3, PER1, PFDN4, PFKFB3, PID1, PIGR, PIP5KL1, PKHD1, PLA2G6, PLAU, PLIN2, PLIN4, PLOD1, PLPP3, PMEPA1, PNPLA5, PRG4, PROCR, PROM1, PROX1, PRR23C, PRSS23, QPCT, RAB27B, RAB3B, RAB9B, RAET1E, RAPGEF4, RARB, RASD1, RASL12, RBP5, RCL1, RDH5, REEP1, RGS9, RHOF, RIMKLA, RLF, RMI1, RND1, RND3, RNF122, ROBO4, RORA, ROS1, RPL17, RPLP0P2, RPSAP9, RRAD, RSAD2, RTP3, S100A2, S100A6, S100A9, SALL1, SCARA3, SCGN, SCN8A, SERPINB9, SESN3, SFN, SGK2, SIPA1L2, SLAMF7, SLC16A12, SLC16A13, SLC16A7, SLC17A1, SLC17A2, SLC23A2, SLC25A20, SLC25A42, SLC2A10, SLC2A2, SLC30A2, SLC44A5, SLC45A2, SLC4A8, SLC6A1, SLC7A2, SLC7A5, SLCO2B1, SLITRK4, SMAP2, SMG1P1, SMG1P3, SMIM5, SNAI2, SNHG9, SNORA25, SNORA71C, SNORD16, SNORD33, SOCS2, SOCS2-AS1, SOGA3, SORBS1, SORBS2, SORL1, SPINT1, SPNS2, SPOCD1, SPP1, SPRY1, SPRY2, SRPX2, STAMBPL1, STOX2, SUGCT, SULT2A1, SYDE2, SYTL2, SYTL5, TAAR3, TBC1D8, TBX15, TDO2, TEAD1, TEAD2, TECTB, TENM1, TEX41, TFPI2, TFRC, TGFB2, TGFBI, THRSP, TIPARP, TLR10, TLR9, TMEM45A, TMEM51, TMEM97, TMPRSS2, TMSB4X, TMTC1, TNC, TNFAIP2, TNFAIP3, TNFSF10, TNIK, TNRC6C-AS1, TNS3, TP53INP1, TP63, TRAF5, TRAM2, TRERF1, TRIM31, TRIM55, TRPM8, TSC22D3, TSKU, TSLP, TSPAN5, TSPEAR-AS1, TSPO2, TTYH3, TUBA4A, TUBA4B, UBALD2, UBXN7, UGCG, UGT2B4, UNC5CL, UNC93A, UQCRHL, USP12, VENTX, VIM, VLDLR, VWCE, YPEL2, ZBTB16, ZBTB37, ZC3HAV1L, ZFAND2A, ZNF292, ZNF295-AS1, ZNF543, ZNF608, ZNF702P, ZSWIM5, and ZXDB.

[0488] Nefazodone was observed to significantly (p-value≤0.05) modulate expression of AADAC, AASS, ABCB11, ACAD11, ACMSD, ACTA1, ACTA2, ADGRV1, ADM, ADRB2, AGRN, AHNAK2, AHRR, AHSG, AKAP12, AKR1B15, AKR1C8P, AKR1D1, ALPK2, AMACR, ANGPTL4, ANGPTL8, ANO9, ANXA13, ARC, ARG1, ARHGDIB, ARHGEF26, ARID3C, ARL14, ARL4C, ARL4D, ASB3, ATP5E, ATP6V0D2, B4GALNT1, BAG3, BAHCC1, BMP2, BNIP3, BRF2, C10orf35, C19orf71, C1orf116, C1QTNF1-AS1, C2orf82, C4orf19, C9orf72, CACYBP, CASKIN1, CBLB, CCL2, CCL5, CCNE2, CDKL1, CDKL5, CHST9, CLSTN3, CLVS2, CNN1, COL4A1, COL7A1, CPA4, CREB5, CRY2, CRYAB, CRYM, CX3CL1, CXCL8, CYB561A3, CYP1A1, CYP26A1, CYP3A4, CYP3A5, DCX, DDIT4L, DEDD2, DERL3, DNAH1, DNAH5, DNAJA4, DNAJB1, DNAJB4, DOCK10, DSG1, DUOX2, DUOXA2, DUSP13, EFNA1, EFNA3, EGOT, ELOVL2, EME2, ENO2, ENO3, EPO, EPPK1, ERN1, ESR1, EVA1A, FAM105A, FAM134B, FAM13A, FAM151A, FAM219A, FAM46C, FAM83D, FAT1, FAXC, FCAMR, FGF2, FGFR3, FKBP5, FLNA, FLVCR2, FOS, FOSB, G6PC, GADD45B, GALE, GAREM1, GCNT2, GHR, GLA, GPC6, GREM1, GREM2, HELZ2, HK2, HKDC1, HMCN1, HMGB2, HMOX1, HOMER1, HSP90AA1, HSPA12A, HSPA1A, HSPA1B, HSPA1L, HSPA4L, HSPA5, HSPA6, HSPH1, ID1, ID2, IFI44L, IFIT1, IGF1, IGFALS, IGFBP3, IL6R, IL7R, IRS2, ITGA3, ITGA7, JDP2, KANK1, KDM3A, KIAA0319, KIAA0754, KLF9, KLHDC7B, KLHL31, KRT80, KRT81, LAMB1, LAMB3, LAMC2, LAPTM5, LGALS4, LIF, LINC00261, LINC00862, LINC01314, LINC01347, LINC01554, LOC100507195, LOC101928595, LOC101929427, LOC101929448, LOC153910, LOC154761, LPCAT3, LPIN2, LTBP1, LYPD1, MAFF, MAMLD1, MAP3K8, MATN2, MDH1B, MED31, MGAM, MICALCL, MIR210HG, MLLT11, MMP1, MMP24, MOGAT2, MSC, MST1R, MT1E, MT1HL1, MT1X, MTMR11, MVD, MYCL, MYL9, MYRIP, NAP1L2, NCKAP5, NCR3LG1, NDRG1, NEB, NFASC, NPEPL1, NPTX2, NRBP2, NRG4, NUAK2, NUDT18, OAS1, OAS2, OAS3, OPRM1, OXTR, P4HA1, PAPLN, PCK1, PDF, PDGFB, PDGFRB, PDK4, PEG10, PELI3, PER1, PFDN4, PFKFB4, PHLDA1, PID1, PIGR, PLIN2, PLK2, PMAIP1, PNLIPRP3, PPFIA4, PPP1R3C, PPP1R3G, PRG4, PRKRIP1, PRSS23, PSD3, RAB27B, RAB3B, RARB, RASD1, RBP5, RCL1, RDH5, RGCC, RGS2, RLF, RMI1, RMRP, RND1, RND3, RNF122, RNVU1-19, ROM1, RPL13AP6, RPPH1, RTP3, S100A2, S100A6, S1PR1, SCARA3, SCN8A, SCPEP1, SH3GLB2, SLC17A2, SLC1A2, SLC23A2, SLC2A10, SLC2A2, SLC30A2, SLC38A2, SLC6A1, SLCO2B1, SLITRK3, SNORA25, SOCS2, SOCS2-AS1, SORL1, SOX9, SPOCD1, SPRY1, SPRY2, STIP1, SYNGR1, SYPL2, TACSTD2, TCAF2, TGFB2, TGFBI, THBS1, TIPARP, TMCC1, TMTC1, TNC, TNFAIP2, TNFRSF21, TP53INP1, TPRG1-AS1, TRIM31, TSC22D3, TTYH3, UCHL1, UNC5CL, UNC93A, VIM, VLDLR, YPEL2, ZFAND2A, ZNF485, and ZXDB.

[0489] Bms833923 was observed to significantly (p-value≤0.05) modulate expression of A1BG-AS1, ACKR4, ACSL1, ADAM19, ADCY5, AKR1B15, AKR1D1, ALAS1, ALPK2, ANGPTL8, ARHGEF26-AS1, ARHGEF3, ARL4A, ARRDC3, ATAD3C, ATOH8, ATP6V1C2, C10orf128, C12orf50, C19orf71, C1orf105, C2orf82, C5orf45, CADPS2, CAMK2B, CCDC152, CCL5, CD274, CEBPD, CLDN4, CLVS1, COL7A1, CPS1, CREB3L3, CTAGE8, CX3CL1, CXCL9, CYP1A1, CYP26A1, CYP7A1, DCX, DNAJB1, DNAJC12, DSG1, DUOX2, ECM2, EFNA1, EPHA4, EXTL3-AS1, FADS1, FAM222A, FASN, FAT1, FDFT1, FGF2, FLJ31356, FLNC, FLRT3, FOS, FOSB, FOSL1, FSTL3, G6PC, GADD45B, GBP4, GDF15, GREM1, HES4, HSPA1A, HSPA1B, HSPA5, HSPA6, HSPB8, ID2, IFI27, IFIT2, IFT80, IGSF23, IL18, IL23A, IL6R, IRF7, IVL, JAKMIP3, KCNK5, KLHL13, KRT81, LAMB3, LAMC2, LGALS4, LINC00102, LINC00261, LINC01136, LOC101929148, LOC101929516, LOC104968399, LOC105376575, LRRIQ3, LTBP1, MANF, MAP2K6, MATN2, MCM7, MIR1282, MIR6723, MKNK1-AS1, MLK7-AS1, MOG, MOGAT2, MT1HL1, MTMR11, MYH3, MYLIP, NAMPT, NR6A1, NRAP, NUCB2, OSGIN1, OXTR, PALMD, PCK1, PDGFB, PDIA4, PDK4, PFKFB3, PHLDA1, PLIN2, PLIN4, PLK2, PLOD1, PROX1, PRSS23, PTPRG-AS1, RARB, RASD1, RBP5, RND3, RPL13AP6, RSAD2, S100A2, S100A6, S100A9, SCD5, SDS, SH3TC2, SLC16A6, SLC2A10, SLC2A2, SLC6A1, SLC7A2, SLCO2B1, SNAI1, SNORD27, SNORD33, SORBS2, SOX9, THBS1, TNFAIP2, TRIM31, TRIM69, TTPA, UBD, UCN, UGT2B4, XAF1, ZFP42, ZHX1-C8orf76, and ZNF292.

[0490] Benzbromarone was observed to significantly (p-value≤0.05) modulate expression of A1BG-AS1, AADAC, ABALON, ABCA9, ABCB11, ABCC11, ABCG1, ABHD16B, ABHD2, ABLIM2, ACAA2, ACADVL, ACAT2, ACMSD, ACOT1, ACSL1, ACSL5, ACTA1, ACTA2, ACTBL2, ADCY10P1, ADGRG6, ADGRV1, ADM, ADRA1B, ADRB2, AGAP1-IT1, AGRN, AHNAK2, AHSG, AKAP12, AKR1B15, AKR1C8P, AKR1D1, ALAS1, ALDH3B1, ALDH8A1, ALPK2, AMACR, ANGPTL2, ANGPTL4, ANGPTL7, ANGPTL8, ANKRD30B, ANKRD33B, ANKRD35, ANKRD37, ANO1, ANXA13, ANXA3, APLN, APOA1-AS, APOA4, APOBEC3B, AQP4, AQP7, ARG1, ARHGDIB, ARHGEF3, ARID3C, ARL14, ARL2, ARL4A, ARL4C, ARL5B, ARRDC3, ARTS, ASB9, ASCL1, ATOH8, ATP5E, ATP6V1C2, AVPR1A, B3GNT5, B4GALNT1, BAHCC1, BCAT2, BCL2, BIRC3, BMF, BMP2, BMP8B, BSN, C10orf11, C10orf54, C19orf71, C1orf116, C1orf162, C1orf226, C2orf54, C2orf82, C4orf19, C4orf32, C4orf47, C5orf45, C9orf153, C9orf72, CA12, CA2, CACTIN-AS1, CADPS2, CAMK2G, CAMKK1, CAMKMT, CAPN13, CASKIN1, CBLB, CCBL1, CCDC103, CCDC152, CCDC85B, CCL2, CCL20, CCL5, CCNE2, CD109, CD163, CD274, CD4, CD83, CDC6, CDCA2, CDKL1, CEBPB-AS1, CEBPD, CECR1, CES4A, CFAP73, CHAD, CHST13, CHST9, CIDEC, CLDN4, CLSTN1, CLSTN3, CLVS1, CNN1, CNTLN, COL16A1, COL28A1, COL4A1, COL4A2, COX16, CPA4, CPS1, CPVL, CRACR2B, CREB5, CRIP3, CRY2, CRYAB, CRYM, CSE1L-AS1, CSPG4, CTDSP1, CTGF, CX3CL1, CXCL1, CXCL10, CXCL11, CXCL2, CXCL3, CYB561A3, CYP1A1, CYP1A2, CYP26A1, CYP2C19, CYP2C9, CYP3A4, CYP3A43, CYP3A5, CYP3A7, CYP4A22, CYP7A1, DAND5, DBH-AS1, DCX, DDIT4L, DERL3, DGKG, DGKH, DNAH1, DNAH5, DNAJB1, DNAJB4, DUOX2, DUOXA2, DUSP6, DYNLL1, ECH1, ECM2, EDARADD, EFNA1, EFNA3, EFNB2, ELOVL2, EME2, EML5, EML6, ENO2, ENO3, ENTPD7, EPAS1, EPHA4, EPHB2, EPO, EPPK1, EPSTI1, ERN1, EVA1A, EVA1B, F13B, FADS1, FADS2, FAM105A, FAM124A, FAM134B, FAM13A, FAM151A, FAM162A, FAM198A, FAM222A, FAM25A, FAM46C, FAM47E, FAM69C, FAT1, FBXO30, FBXW10, FCAMR, FDFT1, FDPS, FES, FGF13, FGF2, FGF21, FGFR3, FGL2, FKBP5, FLNA, FLNC, FLRT3, FLVCR2, FMO1, FOS, FOSB, FOSL1, FZD7, G0S2, G6PC, GADD45B, GALE, GALNT15, GBAP1, GBP4, GDF9, GEM, GHR, GJD3, GLRA2, GNAO1, GPC6, GPER1, GPR183, GPRIN3, GREM1, GREM2, GRIA3, HAL, HAO2, HAS3, HAVCR1, HELZ2, HIPK2, HIST1H3D, HIVEP2, HK2, HKDC1, HMCN1, HMGB2, HMGCR, HMGCS1, HMGCS2, HMOX1, HOGA1, HOMER1, HORMAD1, HSDL2, HSPA5, HSPB1, HSPB8, HSPH1, HTR3A, HYAL3, ICOSLG, ID1, ID2, IFI35, IFI44L, IFIT1, IFIT2, IFITM1, IFT80, IGF1, IGFALS, IGFBP1, IGSF23, IL17RB, IL18, IL22RA1, IL23A, IL36G, IL6R, ILDR2, INHBA, INHBA-AS1, INHBB, INHBE, INSIG1, INTS6-AS1, IRS2, ISG15, ITGA3, ITGA5, ITGA7, ITGB6, ITIH4-AS1, ITPKA, JAKMIP3, JMJD1C-AS1, KANK1, KCNJ8, KCNK5, KCNQ10T1, KDELR3, KDM3A, KIAA0754, KIAA1462, KIF12, KIF14, KLF15, KLF5, KLF9, KLHDC7B, KLHL31, KRT19, KRT7, KRT80, KRT81, KSR2, LAG3, LAMA3, LAMA5, LAMB1, LAMB3, LAMB4, LAMC2, LAPTM5, LDHA, LECT2, LGALS1, LGALS4, LINC00102, LINC00152, LINC00261, LINC00266-3, LINC00269, LINC00313, LINC00324, LINC00477, LINC00504, LINC00535, LINC00536, LINC00704, LINC00862, LINC01012, LINC01018, LINC01314, LINC01554, LINC01587, LOC100128494, LOC100129931, LOC100133286, LOC100506085, LOC100506321, LOC100507002, LOC100996291, LOC101927189, LOC101927587, LOC101928445, LOC101928504, LOC101928725, LOC101929415, LOC101929448, LOC101929516, LOC102724919, LOC104968399, LOC105371795, LOC105372833, LOC105373051, LOC153910, LOC154761, LOC344887, LOC440300, LOC440311, LOC644656, LOC728040, LOC729348, LOXL4, LPAL2, LPCAT3, LPIN2, LRP4, LRRC37A3, LRRN2, LTBP1, LTBP2, LTBP3, LUCAT1, LYPD1, MAFB, MAFF, MANF, MAP3K8, MAP4K2, MATN1, MATN2, MCAM, MCHR1, MCM7, METRN, MGAM, MGC12916, MIR1282, MIR210HG, MIR3661, MIR4435-2HG, MIR6087, MIR6723, MIR6753, MKNK1-AS1, MLK7-AS1, MMP24, MN1, MOGAT1, MOGAT2, MOGAT3, MPV17L, MRO, MSC, MST1R, MT1E, MT1HL1, MT1X, MTRNR2L4, MVD, MXD3, MXRA8, MYB, MYH3, MYL9, MYLIP, MYO15A, MYOF, MYOM1, MYRIP, NAV2-AS2, NBPF10, NBPF20, NCF2, NCKAP5, NCR3LG1, NDRG1, NEB, NEURL3, NEXN, NFASC, NFATC4, NIPAL4, NLRP12, NMB, NME5, NPAS2, NPB, NPEPL1, NPPB, NPR3, NPTX2, NR1D1, NR6A1, NRAP, NRARP, NRBP2, NTN1, NUAK2, NUCB1-AS1, NUCB2, NUDT18, OAS1, OAS2, OAS3, OASL, OTUD3, OXTR, P3H2, P4HA1, PABPC3, PALMD, PAM, PAPLN, PBX1, PBXIP1, PCDH9, PCK1, PDGFB, PDIA4, PDK1, PDK4, PDLIM7, PEG10, PELI2, PER1, PFKFB3, PFKFB4, PFN1P2, PHKG1, PHLDA1, PID1, PIGR, PIGZ, PIK3CD, PITRM1-AS1, PKHD1, PKLR, PKP3, PLCG1-AS1, PLIN2, PLIN4, PLK2, PLOD1, PLPP3, PMAIP1, PNLIPRP3, PNPLA5, PNPLA7, POTEE, PPFIA4, PPL, PPP1R3C, PPP1R3G, PRG4, PROCR, PROX1, PRR15, PRR23C, PRSS23, PSD3, PSORS1C3, PTRH1, PWAR5, PYCARD, RAB27B, RAB3B, RAB6B, RAB9B, RARB, RASD1, RASD2, RASIP1, RBP5, RCL1, RDH12, RDH5, RGCC, RGS2, RGS4, RHCG, RHOF, RLF, RMI1, RMRP, RND1, RND3, RNF122, RNF186, RNVU1-19, RORA, RPL13AP6, RPL17, RPL22L1, RPL23P8, RPLP0P2, RPPH1, RPSAP9, RTP3, S100A6, S1PR1, SCAMP5, SCARA3, SCD5, SCGN, SCIN, SCN8A, SCPEP1, SELM, SERPINB7, SERPINB9, SERPINE2, SESN3, SFN, SGSM1, SH3GLB2, SIPA1L2, SLC16A12, SLC16A13, SLC16A7, SLC17A1, SLC17A2, SLC18A2, SLC1A2, SLC23A2, SLC25A20, SLC25A30, SLC25A42, SLC2A10, SLC2A2, SLC45A2, SLC4A8, SLC5A11, SLC6A1, SLC6A10P, SLC7A11, SLC7A2, SLC7A5, SLC8A2, SLC9B1, SLCO2B1, SLCO4C1, SLITRK3, SMAP2, SMARCA5- AS1, SMC2-AS1, SMG1P1, SMG1P3, SMO, SMOC1, SNCG, SNHG9, SNORA19, SNORA50C, SNORD17, SNORD27, SNORD49A, SNX22, SOCS2, SOCS2-AS1, SOGA3, SORBS1, SORBS2, SORL1, SOX9, SPNS2, SPOCD1, SPP1, SPRN, SPRR1A, SPRR3, SPRY1, SPRY2, SPTBN4, SPX, SQLE, SRPX2, STAMBPL1, STIP1, STMN1, STOM, STOX2, SUCNR1, SUGCT, SULT2A1, SUSD1, SUSD3, SYDE2, SYPL2, SYTL5, TACSTD2, TAT, TBC1D8, TBX15, TBX6, TCAF2, TCP10L, TDO2, TEAD1, TEAD2, TENM1, TFCP2L1, TG, TGFB1I1, TGFB2, TGFBI, THBS1, THRSP, TIPARP, TLR10, TLR9, TMCC1, TMEM138, TMEM238, TMEM45A, TMPRSS2, TMSB4X, TNC, TNFAIP2, TNFAIP3, TNFSF10, TNFSF11, TNS2, TNS3, TOX3, TP53INP1, TPM2, TRAF3IP3, TRAF5, TRAM2, TRIM31, TRIM55, TRIM69, TRPC1, TRPV3, TSC22D3, TSLP, TSPAN15, TSPAN5, TSPO2, TTPA, TTYH3, TUBA4A, TUBA4B, TXNDC5, UBALD2, UBASH3B, UBD, UBE2D1, UBXN11, UBXN7, UCHL1, UGCG, UGDH-AS1, UGT1A4, UGT2B4, ULBP2, UNC5CL, USP12, VCAN, VENTX, VIM, VIM-AS1, VLDLR, VSIG1, VSIG4, VWCE, WTAPP1, YPEL1, YPEL2, ZC3HAV1L, ZFAND2A, ZMYND8, ZNF292, ZNF341-AS1, ZNF485, ZNF543, ZNF608, ZNF703, ZNF793, ZNF836, ZNF837, and ZXDB.

[0491] Propylthiouracil was observed to significantly (p-value≤0.05) modulate expression of A1BG-AS1, ABALON, ACAA2, APOA1-AS, ARL4A, ATAD3C, ATP5E, C18orf32, C5orf45, CASKIN1, CCDC152, CCL2, CPS1, CXCL8, CYB561A3, CYP8B1, ECH1, EIF4EBP3, ETNPPL, HAO2, ITIH4-AS1, JCHAIN, KCNQ1OT1, KLHDC7B, KLHL31, LAMB4, LGALS4, LINC00102, LOC101928504, LOC728752, MIR1282, MIR6723, MOG, MSMO1, MT1E, MT1HL1, MT1X, NMB, PFDN4, PITRM1-AS1, PTGES3L, RBP5, RND3, SAA3P, SCARNA2, SCARNA7, SCD5, SLC38A2, SLCO2B1, SNHG9, SNORD27, SNORD97, SNX22, SNX29, SOX9, TMSB4X, and VCAN.

[0492] Rapamycin was observed to significantly (p-value≤0.05) modulate expression of A1BG-AS1, ABALON, ABCA7, ABCB11, ABCG2, ABHD2, ABLIM3, ACAA2, ACACB, ACAD11, ACAT2, ACKR2, ACSL5, ACTA1, ACTG2, ADAM19, ADAMTS10, ADCY10P1, ADCY7, ADGRF2, ADGRG2, ADGRG6, ADGRV1, ADM, ADRB2, AGAP1-IT1, AHNAK2, AHSG, AKAP12, AKR1B15, AKR1C8P, AKR1D1, ALAS1, ALDH1L1, ALDH8A1, ALPK2, AMACR, ANGPTL4, ANGPTL7, ANGPTL8, ANKRD23, ANKRD36, ANO1, ANXA1, APOA1-AS, APOA4, AQP4, ARC, ARHGEF26, ARHGEF26-AS1, ARID3C, ARL14, ARL4A, ARL4C, ARL4D, ARL5B, ARRDC3, ASB14, ATAD3C, ATG9B, ATOH8, ATP5E, ATP5EP2, ATP6V1C2, AZGP1P1, B3GNT5, B4GALNT1, BAG3, BCAS1, BCAT2, BCL2, BEX4, BIK, BMF, BMP2, BMP8B, BNIP3, BRF2, BSN, BZRAP1-AS1, C10orf11, C10orf128, C10orf35, C10orf54, C11orf96, C18orf32, C1orf116, C1orf226, C1QTNF1-AS1, C2CD4A, C2orf82, C2orf91, C4orf19, C4orf32, C5orf45, C5orf49, C6orf222, C9orf152, C9orf72, CA12, CACHD1, CACYBP, CADPS2, CAMK1G, CAMK2G, CAPN13, CAPN8, CASKIN1, CAT, CBLB, CBR3, CBWD3, CCBL1, CCDC102A, CCDC152, CCDC28B, CCDC73, CCDC85B, CCL2, CCL26, CCL5, CCNE2, CCR1, CD109, CD28, CD300LB, CD83, CDC6, CDC7, CDKL1, CDKL5, CDKN1C, CEBPD, CELSR2, CENPW, CERCAM, CES4A, CES5A, CFAP47, CHST9, CITED2, CLDN2, CLDN4, CLEC2D, CLEC7A, CLSTN3, CLVS1, CNN1, CNTLN, COL1A1, COL4A1, COL4A4, COL7A1, CPA4, CPT1A, CREB3L3, CREB5, CREG2, CRIP3, CRY2, CRYAB, CRYM, CSPG4, CTGF, CUX2, CX3CL1, CXCL1, CXCL10, CXCL11, CXCL14, CXCL2, CXCL8, CYB561A3, CYP1A1, CYP1A2, CYP1B1, CYP26A1, CYP2C19, CYP2C9, CYP3A4, CYP3A43, CYP3A5, CYP7A1, CYP8B1, CYTH1, DAND5, DBH-AS1, DCX, DDIT4L, DEDD2, DEFB132, DERL3, DGKH, DNAH1, DNAH11, DNAH5, DNAH7, DNAJA4, DNAJB1, DNAJB4, DNAJC12, DNAJC22, DNM1, DOCK10, DUOXA2, DUSP13, DUSP6, DYNLL1, ECH1, ECM2, EFNA1, EFNA3, EIF4EBP3, ELOVL2, EMP2, ENO3, ENTPD1, ENTPD7, EPAS1, EPSTI1, ERC2-IT1, ERICH5, ERN1, ERRFI1, ETFDH, ETNK2, ETNPPL, EVPLL, EXTL3-AS1, F13B, F2RL2, FADS1, FADS2, FAM105A, FAM134B, FAM13A, FAM151A, FAM162A, FAM219A, FAM26F, FAM83D, FASN, FAT1, FBXO30, FBXO41, FCAMR, FCRLA, FDFT1, FDPS, FEZ1, FGF2, FKBP5, FLJ43879, FLNA, FLNC, FLVCR2, FMO1, FOS, FOSB, FOSL1, FSIP1, FSTL3, FTX, GOS2, G6PC, GADD45B, GALE, GALNT15, GAREM1, GBP4, GBPS, GCNT2, GDF7, GHR, GIPR, GLA, GLIS3, GNG4, GOLGA6L3, GOLGA7B, GP1BA, GPC6, GPM6A, GPR183, GPRASP1, GPRIN3, GREM1, GRIA3, GSG1, HAL, HBEGF, HCN2, HES4, HEYL, HIF3A, HIPK2, HIST1H4K, HIVEP2, HKDC1, HMGN5, HSD3B2, HSDL2, HSP90AA1, HSPA12A, HSPA1A, HSPA1B, HSPA1L, HSPA2, HSPA4L, HSPA6, HSPB8, HSPG2, HSPH1, ID1, ID2, IDI1, IER3, IFI35, IFI44L, IFIT1, IFT80, IGF1, IGF2BP3, IGFALS, IGFBP1, IGFBP3, IGSF23, IL12RB1, IL17RB, IL21R-AS1, IL22RA1, IL6R, IL7R, ILDR2, INHBA, INHBB, INHBE, INSIG1, IP6K3, IRF4, IRS2, ISG15, ITGA3, ITGA5, ITIH4-AS1, ITPKA, JDP2, KANK1, KCNJ11, KCNMB4, KCNQ1OT1, KDM3A, KIAA0319, KIAA1462, KIF12, KIF14, KIR3DX1, KLF2, KLF9, KLHDC7B, KLHL3, KLHL31, KLK4, KRT42P, LAMA3, LAMA5, LAMB1, LAMB3, LAMB4, LCN2, LDHA, LECT2, LGALS1, LGALS4, LGALS9, LIF, LILRA5, LINC00102, LINC00261, LINC00313, LINC00504, LINC00704, LINC00862, LINC00886, LINC01012, LINC01016, LINC01018, LINC01057, LINC01087, LINC01098, LINC01136, LINC01151, LINC01314, LINC01347, LINC01531, LINC01554, LIX1, LMCD1, LOC100128494, LOC100129931, LOC100506675, LOC100507195, LOC101927843, LOC101927973, LOC101928118, LOC101928514, LOC101928539, LOC101928597, LOC101928855, LOC101929148, LOC101929224, LOC101929227, LOC101929415, LOC101929516, LOC102724153, LOC104968399, LOC105369332, LOC153910, LOC283575, LOC283585, LOC283731, LOC349160, LOC401554, LOC440300, LOC728752, LOC729348, LOXL4, LPAL2, LPCAT3, LPIN2, LRP1, LRP8, LRRC24, LRRC74B, LRRIQ3, LRRN2, LTBP1, LYPD1, MAB2IL2, MAFB, MAFF, MAGEA10, MAMLD1, MANF, MAOA, MAP3K8, MATN2, MCM7, MED31, MEI4, METRN, MIR1282, MIR3661, MIR6087, MIR6723, MIR6732, MIR6845, MIR8075, MKNK1-AS1, MLK7-AS1, MLLT1, MLLT11, MMP12, MMP3, MMP7, MMP9, MOG, MOGAT2, MPHOSPH6, MPPED1, MS4A7, MT1E, MT1HL1, MT1X, MTRNR2L4, MXD3, MXRA8, MYCL, MYOF, MYOM1, MYRIP, NAMPT, NAP1L2, NBPF10, NBPF20, NBPF25P, NCALD, NCF2, NCKAP5, NCR3LG1, NDRG4, NEB, NEURL3, NFATC4, NIPAL4, NLGN2, NLRP6, NMB, NPR1, NPR3, NPTN-IT1, NPTX2, NR1D1, NRAP, NRBP2, NRG4, NRIP3, NTN1, NUCB1-AS1, NUCB2, NUGGC, NWD2, NYAP1, OAS1, OAS2, OAS3, OLFM2, OSGIN1, OXTR, PALMD, PAM, PAPLN, PARD6G-AS1, PBXIP1, PCA3, PCAT5, PCBP2-OT1, PCK1, PCSK5, PDGFRB, PDIA4, PDK4, PEG10, PELI2, PELI3, PER1, PFDN4, PFKFB3, PGD, PGF, PHLDA1, PID1, PIGR, PIK3CD, PIP5KL1, PITRM1-AS1, PKHD1, PLA2G6, PLCXD2, PLIN4, PLK2, PLOD1, PLPPR1, PLXND1, PNLIPRP3, POR, POU2AF1, PPARGC1A, PPL, PPM1L, PPP1R3C, PPP1R3G, PREX1, PRG4, PRICKLE2-AS3, PROX1, PRR15, PRR23C, PRSS23, PSORS1C3, PTGES3L, PTK2B, PTPRU, PWAR5, PYCARD, QPCT, RAB17, RAB27B, RAB3IL1, RASD1, RAVER2, RBP5, RCL1, RDH12, RFPL2, RGS2, RGS9, RHOB, RHOF, RLF, RMI1, RMRP, RND1, RND3, RNVU1-19, ROBO4, RORA, ROS1, RPL17, RPL22L1, RPLP0P2, RPPH1, RPSAP9, RRAD, RSAD2, RTP3, S100A2, S100A3, S100A6, S100A9, S1PR1, SALL1, SCARA3, SCD5, SCML4, SCPEP1, SCUBE1, SEC14L2, SEC14L3, SEC14L4, SERHL2, SERPINB7, SERPINB9, SERPINE2, SESN3, SGSM1, SH2D3C, SH3TC2, SIPA1L2, SLC16A13, SLC17A2, SLC1A2, SLC22A25, SLC23A2, SLC25A20, SLC29A4, SLC2A10, SLC2A2, SLC30A2, SLC30A8, SLC38A2, SLC44A5, SLC45A2, SLC4A5, SLC5A5, SLC6A1, SLC6A10P, SLC6A6, SLC7A11, SLC7A2, SLC7A5, SLCO2B1, SLITRK3, SLITRK4, SMG1P1, SMG1P3, SMO, SMOC1, SNAI1, SNHG9, SNORA71C, SNORA72, SNORD33, SNORD45B, SNX22, SNX29, SOCS2, SOCS2-AS1, SPARCL1, SPNS2, SPOCD1, SPP1, SPRR3, SPRY1, SPRY2, SPTBN4, SPX, SQLE, SRPX2, SSUH2, ST8SIA4, STAMBPL1, STC2, STIP1, STOM, STOX2, SUGCT, SULT2A1, SYDE2, SYNGR1, SYPL2, SYTL2, SYTL5, TBC1D8, TDO2, TEAD1, TEAD4, TET1, TEX41, TFCP2L1, TFPI2, TFRC, TGFBI, TGFBR3, THRSP, TIPARP, TLE2, TMC6, TMEM135, TMEM164, TMEM25, TMEM37, TMEM45A, TMEM97, TMPPE, TMPRSS2, TMSB4X, TMTC1, TNFAIP3, TNFSF10, TNRC6C-AS1, TNS2, TNS3, TP53INP1, TPRG1-AS1, TRABD2B, TRAF5, TRAM2, TRIM55, TRPM8, TSC22D3, TSKU, TSLP, TSPAN15, TTPA, TUBA4A, TXNIP, TYRO3, UBALD2, UBD, UBXN7, UCHL1, UGCG, UGDH-AS1, UGT1A4, UGT2B4, UNC5CL, UNC93A, UPP2, UQCRHL, USP12, USP2, VCAN, VENTX, VIM, VIM-AS1, VSIG1, WDR97, XAF1, YPEL2, ZBTB16, ZBTB37, ZC3H12B, ZDHHC1, ZFAND2A, ZFP42, ZHX1-C8orf76, ZMYND8, ZNF154, ZNF543, ZNF608, ZNF702P, ZNF793, ZNF827, ZNF837, and ZXDB.

[0493] BIO was observed to significantly (p-value≤0.05) modulate expression of AADAC, ABALON, ABCA10, ABCA9, ABCB11, ABCG2, ABLIM3, ACAA2, ACACB, ACAD11, ACADVL, ACAT2, ACSL5, ACSM2A, ACSM2B, ACTA1, ACTA2, ACTG2, ADAM3A, ADAMTS10, ADGRF4, ADGRG6, ADGRV1, ADM, ADRA1B, AFAP1L1, AGAP1-IT1, AHNAK2, AHSG, AK8, AKAP12, AKR1D1, ALAS1, ALDH1A3, ALDH3A1, ALOX5, ALPK2, AMACR, ANGPTL7, ANKRD29, ANKRD30BL, ANKRD33B, ANKRD36, ANO1, ANXA1, ANXA13, ANXA3, AOC4P, AP3B2, APBB3, APOA1-AS, APOBEC3B, AQP4, ARHGAP44, ARHGDIB, ARHGEF26-AS1, ARL14, ARL4C, ARL4D, ARL5B, ARTS, ASB9, ATAD3C, ATG9B, ATOH8, ATP10B, ATP5E, ATP5EP2, ATP6V1C2, AZGP1P1, B4GALNT1, BCAS1, BEST1, BIK, BIRC3, BMF, BMP2, BMP6, BRF2, BSN, C10orf11, C10orf128, C11orf96, C18orf32, C1orf105, C1QTNF1-AS1, C2orf54, C2orf82, C2orf91, C4orf19, C5orf45, C8orf4, C9orf72, CA12, CA2, CADPS2, CAMK1G, CAPN13, CAPN8, CASKIN1, CAT, CBLN3, CCBL1, CCDC152, CCDC28B, CCDC65, CCDC85B, CCL20, CD274, CDC6, CDCA2, CDKL5, CELSR3, CENPW, CEP57, CHAD, CHST13, CHST9, CITED2, CLDN4, CLEC2D, CLRN3, CLSTN1, CLSTN3, CLVS1, CNN1, CNTLN, COL16A1, COL1A1, COL28A1, COL4A1, COL7A1, CORO2B, COTL1, CPA4, CPT1A, CRACR2B, CREB3L3, CREB5, CRIP3, CRTAM, CRY2, CRYAB, CRYM, CSPG4, CUX2, CX3CL1, CXCL1, CXCL10, CXCL11, CXCL14, CXCL3, CXCL8, CXXC4, CYB561A3, CYGB, CYP17A1, CYP1A1, CYP1A2, CYP1B1, CYP1B1-AS1, CYP26A1, CYP2C19, CYP2C9, CYP3A5, CYP7A1, CYSRT1, CYTH1, DAAM2, DBH-AS1, DDIT4L, DEDD2, DGKG, DGKH, DHRS2, DNAH1, DNAH5, DNAJC12, DNAJC22, DNMT3L, DOCK10, DOK7, DPPA4, DTX1, DUSP6, DYNLL1, ECH1, ECM2, EDN1, EFNA1, EFR3B, EGFR-AS1, EML6, ENO3, ENTPD1, ENTPD7, EPAS1, EPB41L1, EPHB2, ERICH5, ERN1, ESRRG, ETNK2, ETNPPL, F2RL2, FADS1, FADS2, FAM129A, FAM134B, FAM162A, FAM198A, FAM219A, FAM25A, FAM46C, FAM47E, FAM65B, FASN, FAT1, FBXO30, FCRLA, FGF21, FGFR3, FHL3, FIBIN, FLJ31356, FLJ43879, FLNA, FLNC, FLRT3, FLVCR2, FMO1, FOSB, FOSL1, FSTL3, FTX, GOS2, G6PC, GAD1, GADD45B, GAREM1, GAS1, GBPS, GCNT2, GDF15, GEM, GHR, GLA, GLIS3, GNAZ, GOLGA7B, GPC6, GPER1, GPM6A, GPRIN3, GREM1, GREM2, GRIA3, GRMS-AS1, HAO2, HAS3, HCAR2, HCAR3, HELZ2, HES2, HES4, HGD, HHAT, HIF3A, HIPK2, HJURP, HK2, HKDC1, HMCN2, HMOX1, HOGA1, HPGD, HS3ST2, HSDL2, HSPA1A, HSPA5, HSPB1, HSPB8, ICOSLG, ID2, IFIT1, IFIT2, IFT80, IGF1, IGFALS, IGFBP1, IGFBP3, IGFBP5, IGFBP6, IGFL1, IGLL5, IGSF23, IL12RB1, IL17RB, IL18, IL1RL1, IL36B, IL6R, IL7R, INSIG1, IP6K3, IRF4, IRF5, IRF7, IRS2, ISM1, ITGA3, ITGA5, ITGA7, ITGB6, ITGB8, ITPKA, JDP2, KANK1, KANK4, KCNJ8, KCNK5, KCNMB4, KCNQ1OT1, KCP, KDELR3, KDM3A, KIAA0754, KIAA0895L, KIF12, KLF5, KLHDC7B, KLHL13, KLHL31, KLK4, KRT42P, KRT7, KRT80, KRT81, KSR2, LAG3, LAMA3, LAMA4, LAMA5, LAMB1, LAMB3, LAMB4, LAMC2, LBH, LCN2, LDLRAD4, LECT2, LGALS1, LGALS4, LGALS8-AS1, LGALS9, LGI3, LGR5, LILRA5, LINC00152, LINC00261, LINC00313, LINC00504, LINC00862, LINC00864, LINC00880, LINC00881, LINC00886, LINC00923, LINC01012, LINC01018, LINC01057, LINC01087, LINC01151, LINC01296, LINC01314, LINC01347, LIX1, LMCD1, LOC100129931, LOC100130111, LOC100506675, LOC100507002, LOC101927686, LOC101927973, LOC101928725, LOC101928855, LOC101929148, LOC101929227, LOC101929516, LOC101929631, LOC102724652, LOC104968399, LOC105369332, LOC105371795, LOC105372833, LOC283575, LOC284454, LOC285629, LOC344887, LOC349160, LOC401554, LOC644656, LOC728752, LOC729348, LOXL4, LRAT, LRCOL1, LRP8, LRRC25, LRRC37A3, LRRC74B, LRRC8C, LRRN2, LTBP1, LTBP3, LYPD1, MAFF, MAMLD1, MANF, MAOA, MAP1B, MAP2K6, MAP3K5, MATN2, MB21D2, MEGF6, MEOX2, METRN, MGAM, MGC12916, MIR1282, MIR4435-2HG, MIR6087, MIR663AHG, MIR6723, MIR8075, MLLT1, MLLT11, MMP1, MMP12, MMP19, MMP24, MOG, MPPED1, MPV17L, MST1R, MT1E, MT1HL1, MT1X, MTRNR2L4, MUC13, MXD3, MYCL, MYH3, MYL9, MYOF, MYOM1, MYPN, MYRIP, NAALADL2, NAGS, NAV3, NBPF20, NCCRP1, NCR3LG1, NDRG4, NES, NEURL3, NEUROD1, NEUROD2, NEXN, NFASC, NFATC4, NKAIN1, NMB, NPAS2, NPR1, NPTX2, NRAP, NRAV, NUAK2, NUCB2, OAS1, OAS2, OAS3, OASL, OLFM2, OSGIN1, OXTR, P4HA3, PALMD, PAM, PAPLN, PBX1, PBX1P1, PCDHA9, PCED1B, PCP4L1, PCSK5, PDGFB, PDGFRB, PDIA4, PDK4, PDLIM7, PDZK11P1, PEG10, PELI2, PFDN4, PGD, PHLDA1, PID1, PIK3CD, PITRM1-AS1, PLA2G7, PLCG1-AS1, PLCXD2, PLIN2, PLIN4, PLK2, PLOD1, PLPP3, PLXND1, PMEPA1, PNPLA7, POR, PPL, PPM1L, PPP1R3C, PRDM7, PRDM8, PROX1, PRR15, PRSS23, PTPRG-AS1, PTTG1, PWAR5, PYCARD, QPCT, RAB27B, RAB38, RAB3B, RARB, RASD1, RASD2, RASSF2, RBP5, RCL1, RGS9, RHCG, RHOF, RLF, RMRP, RND1, RND3, RNF122, RNVU1-19, ROBO4, ROR1-AS1, RORA, ROS1, RPL17, RPL22L1, RPLP0P2, RPPH1, RPSAP9, RRAD, RSAD2, RTP3, RUNX2, S100A2, S100A3, S100A6, S100A9, S1PR1, SALL1, SARDH, SCARA3, SCGN, SCPEP1, SCUBE1, SEC14L2, SEC14L3, SEC14L4, SECTM1, SEMA3E, SEMA6A, SEMA7A, SERPINB2, SERPINB9, SERPINE2, SESN3, SFN, SFRP4, SGCA, SIPA1L2, SKAP1, SLC16A12, SLC16A14, SLC17A2, SLC18A2, SLC22A10, SLC23A2, SLC25A18, SLC25A30, SLC25A42, SLC2A2, SLC30A8, SLC38A2, SLC38A4, SLC45A2, SLC4A8, SLC6A20, SLC6A6, SLC7A11, SLC7A2, SLC7A5, SLCO2B1, SLITRK4, SMAD5-AS1, SMAD6, SMAP2, SMIM3, SMOC1, SNHG9, SNORA50C, SNORD12B, SNX22, SOAT2, SOGA3, SOX9, SPARCL1, SPINT1, SPNS2, SPTBN4, SPX, STC2, STK39, STOM, SUGCT, SUSD1, SYPL2, SYTL2, SYTL4, SYTL5, TAAR3, TAC1, TAT, TBC1D8, TCAF2, TDO2, TEKT5, TFPI2, TGFB2, TGFBI, TGFBR3, TGM3, THBS1, TIPARP, TMC7, TMCC1, TMEM100, TMEM138, TMEM156, TMEM164, TMEM25, TMEM37, TMEM45A, TMEM51, TMPRSS2, TMSB4X, TNC, TNFAIP2, TNFRSF21, TNIK, TNRC6C-AS1, TNS2, TNS3, TP53INP1, TP63, TPM2, TRAM2, TREML3P, TRIM55, TSKU, TSLP, TSPAN15, TSPAN2, TSPAN5, TSPAN7, TSPO2, TTYH3, TUBA4A, UBASH3B, UBE2QL1, UBXN7, UCHL1, UGCG, UGT1A3, UGT1A4, UGT2B4, UNC5CL, UNC93A, UPP2, UQCRHL, USP12, VDR, VEGFB, VIM, VIM-AS1, VLDLR, VSNL1, VWCE, WSCD1, ZBTB37, ZC3HAV1L, ZFAND2A, ZFP42, ZMIZ1-AS1, ZNF221, ZNF292, ZNF295-AS1, ZNF608, ZNF702P, ZNF793, and ZNF827.

[0494] Adapin (doxepin) was observed to significantly (p-value≤0.05) modulate expression of ABCG2, ACAA2, ACTA2, AGRN, AHNAK2, ALPK2, ANXA1, ARL4C, ATP5E, ATP6V0D2, BSN, C19orf71, C8orf4, CA12, CASKIN1, CCL2, CD274, CDC6, COL7A1, CREB5, CX3CL1, CYBB, CYP1A1, CYP1A2, CYP3A4, CYP3A5, DERL3, DNAJC12, DSG1, EGOT, EML6, EPHA4, ETNPPL, FADS1, FADS2, FAM47E, FGF21, FLNC, HAO2, HSPA5, IFT80, IGFALS, IGFBP3, IGFBP5, IL36B, IL6R, KCP, KLHDC7B, KRT7, KRT81, KSR2, LAMC2, LECT2, LGALS1, LINC00261, LMCD1, LOC101928865, LOX, LOXL4, LRRC8C, MAMDC4, MANF, MAP6, MMP24, MT1HL1, NPEPL1, NUAK2, NUCB2, OXTR, PALMD, PDIA4, PIGR, POR, PPFIA4, PROX1, PRSS23, RAB3B, RBP5, RCL1, RRAD, S100A6, SERPINE2, SLC4A8, SYTL2, TCP10L, TDO2, TGFBI, TLR10, TMSB4X, TUBA4A, UNC5CL, and VIM.

[0495] Ibuprofen was observed to significantly (p-value≤0.05) modulate expression of AASS, ABCA9, ABCB11, ABCB9, ABLIM3, ACAA2, ACACB, ACAT2, ACSL5, ACSS2, ACTA1, ACTG2, AGRN, AHSG, AKR1B15, AMACR, ANKRD30BL, ARG1, ARHGEF26-AS1, ARL14, ARL5B, ARTS, ATAD3C, ATP5E, ATP5EP2, BIRC3, BTBD19, C11orf96, C1QTNF1-AS1, C2orf82, C2orf91, CADPS2, CBLB, CBR3, CCDC85B, CCL2, CCL20, CD274, CEBPD, CHST13, CLEC2D, CRI P3, CRTAM, CTAGE8, CXCL14, CXCL2, CYB561A3, CYP1A2, CYP2C19, CYP2C9, CYP3A5, CYP8B1, DGKH, DNAJB1, DNAJC12, DOK7, DZIP1, ECH1, EFR3B, ENO3, EPHB2, EPPK1, ERRFI1, FAM134B, FAM219A, FASN, FBXL8, FGFR3, FLRT3, G0S2, GNAO1, GPM6A, HAO2, HES2, HES4, HKDC1, HMGCR, HMGCS1, HSPA5, HSPB1, HSPB8, HYAL3, ICA1L, IER3, IFI35, IFIT1, IFIT2, IFT80, IGFALS, IGLL5, IL18, IP6K3, IRF7, ITGA7, ITGB6, ITPKA, KCNQ1OT1, KCNV1, KCP, KIAA0754, KLF2, KLF5, KRT42P, KRT7, KRT81, KSR2, LAMA5, LAMB3, LAMC2, LGALS1, LINC00102, LINC00504, LINC00886, LINC01057, LINC01296, LMCD1, LOC100130111, LOC100506675, LOC101927973, LOC101929148, LOC102724652, LOC349160, LOC728752, LOXL4, LPA, LRRC19, LTBP3, MANF, MATN2, METRN, MIR6087, MIR663A, MIR663AHG, MLLT1, MMP12, MMP3, MOG, MSC, MSMO1, MT1E, MT1HL1, MT1X, MTRNR2L4, NBPF20, NCF2, NCR3LG1, NEURL3, NEUROD1, NMB, NPHP4, NUAK2, NUDT3, OAS3, OXTR, PAPLN, PCK1, PDF, PDIA4, PDLIM7, PEG10, PFDN4, PGAM4, PID1, PIGR, PLPP3, PLXDC1, POR, PPM1L, PRG4, PRR15, PRR23C, PRSS23, PYCARD, PYGO1, RAB3B, RARB, REEP1, RHCG, RHOF, RIMKLA, RLF, RMI1, RMRP, RND3, RNVU1-19, ROR1-AS1, RPL17, RPLP0P2, RPPH1, RPSAP9, RRAD, RSAD2, S100A6, S1PR1, SDS, SEMA7A, SERPINA2, SFN, SH3TC2, SKAP1, SLC1A2, SLC22A25, SLC2A10, SLC36A2, SLC37A4, SLC7A11, SLITRK4, SNHG9, SPAG4, SPOCD1, TBC1D8, TEAD1, TGFBI, TMEM97, TMSB4X, TNC, TNFAIP3, TP53INP1, TSPAN5, TUBA4A, TXNDC5, UGCG, UGT2B4, UNC5CL, UQCRHL, USP12, VENTX, VIM, VLDLR, WBSCR27, XAF1, ZNF292, and ZNF702P.

[0496] Rosiglitazone maleate was observed to significantly (p-value≤0.05) modulate expression of AADAC, AASS, ABCC11, ACAA2, ACADVL, ACKR4, ACSL1, ACSL5, ACTBL2, ADCY5, ADGRG2, AKR1B1, AKR1C8P, ALAS1, ALDH8A1, ANGPTL4, ANKRD30BL, ANXA1, ANXA3, AQP7, ARL4A, ASPA, B3GNT5, BMF, C11orf86, C1orf116, CAT, CCL2, CCL5, CHST9, CIDEC, CNN1, COL12A1, COL15A1, COTL1, CPA4, CPT1A, CPT2, CREB3L3, CRYAB, CXCL11, CYP24A1, CYP2C19, CYP3A4, CYP3A5, CYP7A1, DHRS2, DNAH5, DRP2, DYNLL1, ECH1, EDN1, ELOVL2, EME2, ERICH5, ERV3-1, ESR1, ETFDH, ETNPPL, F13B, F2RL2, FABP3, FABP4, FAM222A, FAM69C, FGF13, FGF21, FGR, FLNA, FLRT3, GAL3ST1, GALNT15, GBAP1, GHR, GNAO1, HMGCS2, HSDL2, HSPB8, IFI44L, IFIT2, IFT80, IGF1, IGF2BP3, IGLL5, IL18, IL1RL1, IL22RA1, ILDR2, INHBB, IRF7, ITGA7, JAKMIP3, KANK1, KCNJ3, KCNJ8, KCNK3, KIAA1462, KIF3C, KLF15, KRT7, KRT80, LAMA3, LAMA4, LEFTY1, LGALS4, LINC00261, LINC00313, LINC00862, LINC01554, LMCD1, LOC100128494, LOC100507002, LOC101927755, LOC101929448, LOC145694, LPCAT3, LRRC31, MAMLD1, MAP3K8, MCAM, MGAM, MGARP, MIR6087, MIR663A, MIR663AHG, MIR663B, MIR6843, MLK7-AS1, MMP12, MMP19, MMP24, MMP3, MN1, MRGPRF, MYOF, MYRIP, NCF2, NCKAP5, NDRG1, NEB, NEURL3, NEXN, NFASC, NRAV, OAS2, OASL, OXTR, PCDH9, PCK1, PDK4, PFKFB4, PKD2L1, PKHD1, PLIN2, PLIN4, PLK2, POR, PPFIA4, PRAMEF2, PRSS23, RAPGEF4, RASD2, RDH12, RHOF, RMRP, RNF122, RNF186, RNVU1-19, RPPH1, RRAD, SCARA3, SCARNA5, SCARNA7, SECTM1, SEMA7A, SERPINB7, SGK2, SLC16A13, SLC16A7, SLC22A25, SLC25A18, SLC25A20, SLC25A42, SLC2A2, SLC6A20, SLC9B1, SNORD15B, SNORD45B, SOCS2, SOCS2-AS1, SORBS2, SPINT1, SPINT2, SPOCD1, SPX, SRPX2, STC2, SUCNR1, SULT2A1, SYNGR1, SYTL2, SYTL4, TBX15, TCP10L, TEKT5, TGFB2, TGFBR3, TH, THRSP, TMEM135, TMEM37, TNFRSF21, TNIK, TRIM31, TRIM55, TSKU, TSPAN5, TTPA, TXNIP, TYRO3, UNC93A, VLDLR, VLDLR-AS1, VSIG4, VWA3B, WSCD1, ZNF341-AS1, ZNF485, and ZNF703.

[0497] Amiodarone was observed to significantly (p-value≤0.05) modulate expression of A1BG-AS1, ABALON, ABCB11, ABCC11, ABCG2, ABHD2, ABLIM3, ACAA2, ACAD11, ACADVL, ACSL1, ACSL5, ACTA2, ADM, AKAP12, AKR1B15, AKR1D1, ALDH1L1, ALPK2, APOA1-AS, APOBEC3B, AQP4, AQP7, ARG1, ARHGEF26-AS1, ARL14, ARRDC3, ASB14, ATP5E, ATP6V1C2, BAG3, BIRC3, BMF, C18orf32, C19orf71, C2CD4A, C2orf82, C5orf45, C8orf4, CA12, CA2, CACYBP, CADPS2, CASKIN1, CBLB, CBR3, CCDC152, CCL5, CD109, CD274, CDKL1, CEBPB-AS1, CEBPD, CHST9, CLDN4, CLVS1, CNN1, CNTD1, COL7A1, CPA4, CPT1A, CREB3L3, CREB5, CRY2, CRYAB, CSPG4, CTBP1-AS, CUX2, CX3CL1, CYP1A1, CYP1A2, CYP26A1, CYP2C19, CYP2C9, CYP3A4, CYP3A5, CYP8B1, CYTH1, DAND5, DCX, DGKH, DHRS2, DNAH1, DNAJB1, DNAJB4, DYNLL1, EDARADD, EFNA1, EMP2, ENO3, EPHA4, EPO, EPPK1, ERRFI1, ETNPPL, EVA1A, FABP3, FADS1, FAM110A, FAM13A, FAM47E, FASN, FGF2, FGFR3, FKBP5, FLJ43879, FLNA, FLRT3, FLVCR2, FMO1, FOSB, FSTL3, G6PC, GADD45B, GCNT2, GDF15, GHR, GXYLT2, HBEGF, HES4, HHAT, HIPK2, HIVEP2, HKDC1, HLA-G, HSP90AA1, HSPA1A, HSPA1B, HSPA4L, HSPA5, HSPA6, HSPB1, HSPB8, HSPH1, ICOSLG, IFT80, IGF1, IGFBP1, IGFBP3, IGLL5, IL17RB, IL18, IL22RA1, IL6R, INHBA, INHBE, INSIG1, IRF7, ITGA7, ITGB6, ITIH4-AS1, JCHAIN, KCNJ8, KCNK5, KCNQ1OT1, KCP, KDELR3, KIAA0754, KLF9, KLHDC7B, KLHL13, KRT7, KRT80, KRT81, KSR2, LAMB1, LAMC2, LAPTM5, LECT2, LGALS1, LGALS4, LGALS8-AS1, LINC00261, LINC00504, LINC00862, LINC01018, LOC100128494, LOC100133286, LOC100289473, LOC101928525, LOC101929415, LOC101929516, LOC104968399, LOC105372833, LOC153910, LOC728752, LOC729348, LOXL4, LPA, LPIN2, LRRIQ3, LTBP1, LTBP3, LYPD1, MAFF, MANF, MATN2, MCM7, MIR1282, MIR6087, MIR663AHG, MIR6723, MLK7-AS1, MLLT11, MMP24, MMP3, MOGAT2, MPHOSPH6, MPV17L, MT1E, MT1HL1, MT1X, MTRNR2L4, MXD3, MXRA8, MYL9, MYLIP, NAP1L2, NBPF20, NCALD, NCF2, NCR3LG1, NEB, NR1D1, NRAP, NRAV, NRBP2, NUCB2, NUDT18, OSGIN1, OTUD3, OXTR, PABPC3, PALMD, PAPLN, PCK1, PCSK9, PDIA4, PDK4, PER1, PFN1P2, PID1, PITRM1-AS1, PLA2G6, PLIN4, PLK2, PLPP3, POR, POU2AF1, PPFIA4, PRG4, PROX1, PRR15, PRSS23, PSORS1C3, PTPRU, RAB27B, RARB, RBP5, REEP1, RHCG, RHOB, RMRP, RNVU1-19, RORA, RPL13AP6, RPL17, RPPH1, RRAD, RTP3, S100A6, S100A9, SALL1, SDS, SEMA6A, SEMA7A, SEPT4-AS1, SERPINE2, SESN3, SFN, SIPA1L2, SLC16A7, SLC22A25, SLC23A2, SLC2A2, SLC38A2, SLC4A8, SLC7A11, SLCO2B1, SMG1P1, SNHG9, SNORD17, SNORD27, SNX22, SOCS1, SOCS2, SOX9, SPOCD1, SPP1, SPRN, SPRY2, SPTBN4, SSUH2, STAMBPL1, STIP1, SUGCT, SYNGR1, SYTL2, TBC1D8, TCAF2, TGFB2, TGFBI, THBS1, THRSP, TIPARP, TMEM45A, TMPRSS2, TMSB4X, TNC, TNFAIP2, TNFAIP3, TNFRSF21, TNS2, TNS3, TP53INP1, TPRG1, TPRG1-AS1, TRAM2, TRIM31, TSKU, TSLP, TTYH3, TUBA4A, TUBA4B, TXNDC5, UBASH3B, UCHL1, UGCG, UGDH-AS1, UGT1A4, UPP2, USP12, VENTX, VIM, VIM-AS1, VWCE, ZC3HAV1L, ZNF292, ZNF485, and ZNF793.

[0498] Bms189453 was observed to significantly (p-value≤0.05) modulate expression of ABALON, ABCC11, ABCG1, ABCG2, ABLIM3, ACAA2, ACAD11, ACSS2, ADRB2, AHNAK2, AKR1D1, ALAS1, ALPK2, AMACR, ANGPTL8, ANKRD29, ANO1, APOA1-AS, ARID3C, ARRDC3, BMF, BMP8B, C5orf45, CADPS2, CASKIN1, CBLB, CBR3, CCDC152, CDKL1, CLVS1, COL4A1, CPS1, CREB3L3, CREB5, CTAGE8, CYP26A1, CYP3A5, CYP7A1, CYP8B1, DGKH, DNAH1, DNAJB1, DNAJC12, DTX1, DUSP6, EMP2, ENO3, EPO, EPPK1, ETNPPL, F13B, FADS1, FAM134B, FAM13A, FAM162A, FAM49A, FAM69C, FASN, FAT1, FCAMR, FDFT1, FDPS, FER1L4, FGF2, FGFR3, FLNA, FLRT3, FLVCR2, FSTL3, GAL3ST1, GALNT12, GBAP1, GDF15, GREM2, GYS2, HAO2, HIST3H2A, HMCN1, HMGCR, HMGCS1, HSD17B7, HSPA5, HSPA6, HSPB1, HSPB8, IFI44L, IGF1, IGFBP3, IGLL5, IL17RB, IL18, ILDR2, INHBA, INSIG1, ITGA3, KCNJ8, KCNQ1OT1, KCP, KLF2, KRT81, LAMA3, LAMC2, LDHA, LGALS1, LGALS9, LINC00102, LINC00261, LINC00504, LINC01012, LINC01587, LOC100128494, LOC100507195, LOC101929148, LOC104968399, LOC441666, LOC81691, LPA, LRAT, LRRIQ3, LTBP3, LUCAT1, LYPD1, MAMDC4, MANF, MAP2K6, MAP3K8, MCM7, MILR1, MIR663AHG, MIR6723, MLK7-AS1, MMP24, MOGAT1, MOGAT2, MSMO1, MT1HL1, NCF2, NDUFA6-AS1, NEB, NRAP, OAS1, OAS3, OTUD3, PALMD, PCDH9, PDIA4, PEG10, PFKFB3, PID1, PIGR, PKHD1, PLIN2, PLIN4, PPFIA4, PROX1, PRR15, PRSS23, PTPRU, RAB27B, RAB3B, RAET1E, RAPGEF4, RARB, RBP5, RHCG, RMRP, RRAD, RTP3, S100A6, S1PR1, SCARA3, SCN8A, SDS, SESN3, SFN, SGK2, SH2D3C, SH3TC2, SLC23A2, SLC2A10, SLC2A2, SLC4A8, SLC7A2, SLCO2B1, SNORD27, SNX22, SOAT2, SORL1, SOX9, SPAG4, STOM, TBC1D8, TCP10L, TDO2, TEKT5, TGFBI, TGFBR3, TLR10, TNFAIP2, TNFRSF21, TRIM31, TTYH3, TUBA4A, UBD, UGT2B4, USP12, USP2, VENTX, VIM, VSIG1, XAF1, and ZNF292.

[0499] Dorsomorphin was observed to significantly (p-value≤0.05) modulate expression of ABCC11, ABLIM3, ACAA2, ACACB, ACADVL, ACKR4, ACSL5, ACSM2A, ACSS2, ACTA1, ACTG2, ADGRG6, ADGRV1, ADM, AHNAK2, AKAP12, AKR1D1, ALPK2, AMACR, ANGPTL4, ANGPTL8, ANKRD30BL, ANO1, APOA1-AS, APOA4, APOBEC3B, AQP7, ARG1, ARID3C, ARL14, ASB9, ATAD3C, ATP6V1C2, AZGP1P1, BAG3, BCAT2, BMP8B, BNIP3, BRF2, C11orf96, C2CD4A, C2orf82, C5orf45, CA2, CADPS2, CAPN13, CASKIN1, CBLB, CBLN3, CCDC152, CCL2, CCL20, CD109, CDKL1, CEACAM6, CEBPD, CHST9, CLDN4, CLEC2D, CLSTN1, CLVS1, CNN1, COL12A1, COL16A1, COL4A1, CREB3L3, CREB5, CRIP3, CRY2, CRYAB, CX3CL1, CXCL1, CXCL2, CXCL3, CXCL8, CYB561A3, CYP1A1, CYP1A2, CYP1B1, CYP26A1, CYP2C19, CYP2C9, CYP3A5, CYP7A1, CYP8B1, CYTH1, DAAM2, DDIT4L, DGKH, DHRS2, DNAJB4, DOK3, DOK7, DUOX2, DUOXA2, DUSP6, EFNA1, EFNA3, EGOT, ELOVL2, ENO2, ENO3, EPAS1, EPO, EPPK1, ETNPPL, EVA1A, F13B, F2RL2, FADS1, FAM134B, FAM13A, FAM198A, FAM219A, FAM25A, FAM47E, FAM69C, FASN, FAT1, FCAMR, FDPS, FER1L4, FES, FGF2, FGL2, FKBP5, FLNA, FLNC, FLRT3, FLVCR2, FMO1, FOS, FOSB, FSTL3, G6PC, GADD45B, GALNT15, GAREM1, GBAP1, GBP4, GDF15, GHR, GLA, GLIS3, GNAO1, GREM2, HAL, HAO2, HBEGF, HES4, HK2, HSPA1A, HSPA1B, HSPB1, HSPB8, HSPH1, ICOSLG, IDI1, IFIT2, IFT80, IGF1, IGFBP1, IGFBP3, IGLL5, IGSF23, IL12RB1, IL17RB, IL18, IL22RA1, IL6R, ILDR2, INHBE, INSIG1, IRF7, ITGA3, ITGA5, ITGA7, ITGB6, KANK1, KCNE1, KCNJ8, KCNK5, KCNQ1OT1, KCNV1, KDM3A, KLF9, KLHDC7B, KLHL13, KLHL31, KRT42P, KRT7, KRT80, KRT81, KSR2, LAMA5, LAMB1, LAMC2, LDHA, LDLRAD4, LECT2, LINC00862, LINC01012, LINC01237, LOC101928725, LOC101929148, LOC104968399, LOXL4, LPA, LPCAT3, LPIN2, LRAT, LRRC37A3, LYPD1, MAMDC4, MAP2K6, MAP3K8, MATN2, MCM7, MEI4, MGC12916, MIR1282, MIR4435-2HG, MIR6087, MIR663A, MIR663AHG, MIR6723, MLK7-AS1, MMP24, MMP3, MOGAT1, MT1HL1, MT1X, MVD, MXRA8, MYH3, MYL9, NAGS, NAMPT, NCF2, NDRG1, NDUFA4L2, NEURL3, NEXN, NFASC, NPAS2, NR1D1, NRAP, NRBP2, NUAK2, NUDT3, NUGGC, OAS3, OSGIN1, OTUD3, OXTR, P4HA1, PALMD, PAPLN, PBX1, PCA3, PCDH9, PCK1, PCSK9, PDIA4, PDK1, PDK4, PEG10, PER1, PFKFB3, PFKFB4, PID1, PIGR, PITRM1-AS1, PLIN4, PLK2, PLPP3, PLXND1, POR, POTEM, PPFIA4, PPL, PPP1R3C, PRG4, PROX1, PRR15, PRSS23, PSORS1C3, QPCT, RAB17, RAB27B, RAB3B, RARB, RASD1, RBP5, RCL1, RDH5, RHOF, RLF, RMRP, RND1, RND3, RNVU1-19, RORA, RPL17, RPL22L1, RPPH1, RRAD, RTP3, S100A2, S100A6, SALL1, SCARA3, SCARNA2, SCN8A, SDS, SEC14L2, SEC14L4, SEMA7A, SEPT4-AS1, SERPINB9, SERPINE2, SESN3, SFN, SFRP4, SH3GLB2, SLC16A3, SLC16A7, SLC1A2, SLC2A2, SLC37A4, SLC45A2, SLC6A1, SLC7A11, SLC7A2, SLCO2B1, SNHG9, SNX22, SOCS2, SORL1, SOX9, SPAG4, SPP1, SPRY2, SPTBN4, STAMBPL1, STIP1, STOM, SULT2A1, SYPL2, TBC1D8, TCAF2, TDO2, TECTB, TFRC, TGFB2, TGFBI, TGFBR3, THBS1, TIPARP, TMC7, TMCC1, TMEM138, TMEM45A, TMPRSS2, TMSB4X, TNFAIP2, TNFAIP3, TNFRSF21, TNFSF10, TNS3, TP53INP1, TRIM10, TRIM31, TSC22D3, TSKU, TSPAN5, TSPEAR-AS1, TTPA, TUBA4A, TUBA4B, UCN, UGDH-AS1, UGT1A4, UGT2B4, USP12, VCAN, VIM, VIM-AS1, VWCE, XAF1, YPEL1, ZFAND2A, ZFP42, and ZNF485.

[0500] BMP2 was observed to significantly (p-value≤0.05) modulate expression of ABCA10, ABCC11, ACSL5, ADCY5, ADGRG6, ADM, AHNAK2, AHSG, ALAS1, ALDH8A1, ALPK2, AMACR, ANGPTL4, ANGPTL8, ANKRD35, ANO1, APOA1-AS, APOA4, AQP4, ARG1, ARID3C, ARRDC3, ASB9, ATAD3C, ATOH8, BCAT2, BMP2, BNIP3, CA9, CADPS2, CBLN3, CCDC152, CCL20, CD274, CDKL1, CEACAM22P, CEBPD, CHST9, CITED2, CLDN2, CLEC2D, CLSTN1, CREB3L3, CRYM, CX3CL1, CXCL2, CXCL3, CXCL6, CYB561A3, CYP1A1, CYP1A2, CYP26A1, CYP2C9, CYP3A5, CYP8B1, DOCK10, DUOX2, DUOXA2, DUSP6, EDN1, EFNA1, EFNA3, EFR3B, EGFR-AS1, ELOVL2, ENO2, ENO3, EPO, EPPK1, EVA1A, FADS1, FAM134B, FAM13A, FAM162A, FAM219A, FAM69C, FAT1, FCAMR, FDFT1, FER1L4, FGF2, FLNA, FOSB, GADD45B, GALE, GBP4, GDF15, GHR, GNAO1, GREM2, HK2, HKDC1, HMGCR, HMGCS1, HMOX1, HSD17B7, HSPA5, HSPB8, ID2, IDI1, IDO2, IFI35, IFIT2, IGFBP1, IGFBP3, IGLL5, IL18, ILDR2, INHBB, INHBE, INSIG1, ITGA3, ITGA5, ITGA7, ITGB6, KANK1, KCNK5, KCP, KDM3A, KIF12, KRT7, KRT80, KSR2, LAMA3, LAMB1, LAMC2, LAPTM5, LCN2, LDHA, LHFPL5, LINC00102, LINC00661, LINC00862, LINC01012, LINC01098, LINC01314, LINC01554, LINC01587, LOC100507389, LOC101928725, LOC104968399, LOC153910, LOC344887, LOXL4, LPA, LPCAT3, LRRC19, LRRIQ3, LYPD1, MAP1LC3B2, MAP3K8, MATN2, MCAM, MCM7, METRN, MGC12916, MIR210HG, MIR6723, MMP24, MN1, MOGAT3, MSC, MSMO1, MT1HL1, MT1X, MXD3, MYB, MYH3, NAGS, NCF2, NDRG1, NDUFA4L2, NR1D1, OAS1, OXTR, P4HA1, PAPLN, PBX1, PCK1, PCSK9, PDIA4, PDK1, PEG10, PER1, PFKFB4, PHLDA1, PID1, PIGR, PLIN4, PLPP3, PPFIA4, PPP1R3C, PPP1R3G, PROX1, PRSS23, PSORS1C3, RAB17, RAB27B, RAB3B, RARB, RASD1, RGS9, RHCG, RIMKLA, RND1, RND3, RNF122, RNF186, RPL13AP6, RPL22L1, S100A2, S100A6, S1PR1, SEPT4-AS1, SERPINE2, SESN3, SH2D3C, SLC16A3, SLC16A6, SLC1A2, SLC25A20, SLC2A10, SLC2A2, SLC37A4, SNORD27, SPAG4, SPNS2, SPOCD1, SPRY1, SPRY2, SPTBN4, TBC1D8, TBX15, TCAF2, TCP10L, TFRC, TGFB2, TH, TIPARP, TLR10, TMC7, TMCC1, TMEM138, TMEM217, TMEM45A, TNC, TNFAIP2, TNFAIP3, TNFSF10, TRIM31, TSKU, TSPAN5, TTPA, TUBA4A, UGCG, UGT2B4, UNC93A, UPP2, VCAN, VIM, VLDLR, VWA3B, VWCE, XAF1, ZFAND2A, ZNF295-AS1, and ZNF608.

[0501] Bms777607 was observed to significantly (p-value≤0.05) modulate expression of ABCB9, ABCC11, ACAD11, ACADVL, ACAT2, ACMSD, ACSL1, ACSL5, ACTA2, ADCY10P1, ADGRG6, ADM, ADRB2, AGAP1-IT1, AGRN, AHNAK2, AHRR, AKR1D1, ALDH3B1, ALPK2, AMACR, ANGPTL4, ANGPTL8, ANKRD30BL, ANKRD37, ANO1, ANXA3, AOC4P, AP3B2, APBB3, APOA4, AQP4, AQP7, ARG1, ARHGEF3, ARID3C, ARL4A, ARL4C, ARL4D, ARRDC3, ASB9, ATAD3C, ATOH8, ATP5E, ATP6V0D2, ATP6V1C2, AVPR1A, AZGP1P1, B3GNT5, BAHCC1, BCAR4, BCAT2, BMF, BMP2, BMP8B, C10orf11, C11orf96, C12orf50, C19orf71, C1orf116, C1orf162, C2orf54, C2orf82, C5orf45, CA12, CACHD1, CADPS2, CAMKK1, CAMKMT, CAPN13, CASKIN1, CBLB, CCDC103, CCDC152, CCDC183, CCL2, CCL20, CCNE2, CD109, CD274, CD4, CDC6, CDCA2, CDKL1, CDKN1C, CEBPD, CEP57, CES4A, CHST9, CITED2, CNN1, CNTD1, COL7A1, COLCA2, CPA4, CREB3L3, CREB5, CRIP3, CRY2, CRYAB, CRYM, CTGF, CX3CL1, CXCL11, CXCL2, CXCL3, CYP1A1, CYP1A2, CYP26A1, CYP2C19, CYP2C9, CYP3A4, CYP3A5, CYP4A22, CYP7A1, DCX, DDIT4L, DNAH5, DNAJB4, DNAJC12, DUSP6, ECM2, EFNA1, EFNA3, EFNB2, EGOT, ELOVL2, EML6, ENO3, EPAS1, EPHA4, EPHB2, EPO, EPPK1, ETNK2, EVA1A, F13B, FADS1, FADS2, FAM105A, FAM110A, FAM13A, FAM151A, FAM162A, FAM222A, FAM25A, FAM46C, FAM47E, FAM69C, FBXW10, FCAMR, FGF13, FGF2, FHL3, FKBP5, FLJ31104, FLNA, FMO1, FOS, FOSB, FOSL1, FSTL3, G0S2, G6PC, GADD45B, GALNT15, GDF15, GHR, GLIS3, GNAO1, GPC6, GPER1, GREM1, GREM2, GSTP1, HAL, HAO2, HAS3, HAVCR1, HCG9, HES4, HESS, HHAT, HIST1H2BG, HIST1H3D, HIVEP2, HK2, HMCN1, HMGB2, HMGCS2, HMOX1, HOMER1, HSDL2, HSPA2, HSPA5, HSPB1, HSPB8, HSPH1, ICOSLG, ID1, ID2, IDI1, IDI2, IDO2, IFI35, IFIT1, IFIT2, IFT80, IGF1, IL18, IL1RL1, IL22RA1, IL23A, IL6R, ILDR2, INHBB, INTS6-AS1, IRF7, IRS2, ITGA3, ITGA5, ITGA7, ITGB6, JAKMIP3, KANK1, KANK4, KCNE1, KCNJ8, KCNK5, KDELR3, KDF1, KDM3A, KIAA0226L, KIAA1462, KIF3C, KLF15, KLF2, KLF5, KLHDC7B, KLHL31, KLK4, KRT80, KRT81, KSR2, LAMA3, LAMA5, LAMB1, LAMB3, LAMC2, LAPTM5, LDLRAD4, LGALS1, LGALS4, LGALS8-AS1, LGALS9, LGR5, LHFPL5, LINC00261, LINC00324, LINC00862, LINC00864, LINC00880, LINC01018, LINC01314, LINC01554, LINC01587, LOC101928445, LOC101928597, LOC101929448, LOC102724450, LOC102724652, LOC105372833, LOC105376575, LOC153910, LOC344887, LOC644656, LOXL4, LPA, LRCOL1, LRRC37A3, LRRC4, LRRC66, LRRIQ3, LTBP1, LUADT1, LYPD1, MAFB, MAFF, MANF, MAP3K8, MAP7D2, MATN2, MCM7, METRN, METRNL, MGAM, MGC12916, MICALCL, MIR210HG, MIR4435-2HG, MIR663A, MIR663AHG, MIR6723, MMP24, MMP3, MOG, MPEG1, MPPED1, MRO, MSC, MST1R, MT1E, MT1HL1, MUC13, MXD3, MYCL, MYH3, MYL9, MYLIP, MYO15A, MYOF, MYOM1, MYRIP, NAMPT, NCF2, NCKAP5, NDRG1, NECAB2, NETO2, NEURL3, NFASC, NIPAL4, NLRP6, NPTX2, NR1D1, NR6A1, NTF3, NUAK2, NUCB2, NUDT18, OAS1, OAS2, OAS3, OSGIN1, OTUD3, OXTR, P4HA1, PABPC3, PAPLN, PBX1, PCK1, PDGFRB, PDIA4, PDK4, PEG10, PELI2, PER1, PFKFB3, PFKFB4, PHKG1, PHLDA1, PID1, PLIN2, PLOD1, PLPP3, PMAIP1, POR, PPFIA4, PPL, PPM1L, PPP1R3C, PPP1R3G, PROCR, PROX1, PRR15, PRSS23, PSORS1C3, RAB17, RAB27B, RAB3IL1, RARB, RASD1, RBP5, RCL1, RCN3, RDH12, RDH5, RGCC, RGS2, RHCG, RHOF, RLF, RND1, RND3, RNF122, RNF186, RPL13AP6, RPL17, RPL22L1, RSAD2, RTP3, S100A2, S100A6, SALL1, SCARA3, SCGN, SCN8A, SCPEP1, SEC14L2, SECTM1, SEMA3E, SEMA6A, SERPINE2, SFN, SFRP4, SH2D6, SH3GLB2, SIX4, SLC16A12, SLC16A13, SLC16A7, SLC17A2, SLC2A10, SLC2A2, SLC37A4, SLC38A4, SLC45A2, SLC4A8, SLC6A1, SLC6A10P, SLC6A6, SLC8A2, SLC9A5, SLC9B1, SLCO2B1, SLED1, SLITRK3, SMPD3, SNAI1, SNORA25, SNORD27, SOCS2, SOCS2-AS1, SORBS2, SOX9, SPAG4, SPINT1, SPP1, SPRY1, SPRY2, SPTBN4, STMN1, STOM, STOX2, SUCNR1, SYPL2, TAT, TBC1D8, TBX15, TCAF2, TEX26, TGFB2, TGFBI, TIPARP, TLE2, TLR10, TMC7, TMCC1, TMPRSS2, TMSB4X, TNC, TNFAIP2, TNFAIP3, TNFSF10, TOX3, TP53INP1, TRAF3IP3, TRAF5, TRIM31, TRIM69, TRPM8, TSC22D3, TSLP, TSPAN5, TTPA, TUBA4A, TUBA4B, UBALD2, UBE2D1, UCHL1, UGCG, UGT1A4, UGT2B4, USP12, VCAN, VIM, VIM-AS1, VSIG4, VWA3B, VWCE, YPEL1, YPEL2, ZFP42, ZNF292, ZNF543, ZNF703, ZNF793, ZNF827, and ZNF837.

[0502] Captopril was observed to significantly (p-value≤0.05) modulate expression of ADAMTS10, AHNAK2, AKAP12, AKR1B15, AMACR, APOBEC3B, AQP7, ARHGEF26-AS1, ARL4A, CDH12, CEBPB-AS1, CHST13, CSE1L-AS1, ELOVL2, ENO3, EPO, ETNPPL, FADS1, FDFT1, FGF2, GALNT12, GREM2, HMGCS1, ID2, IFI27, INTS6-AS1, KCNJ3, KCNJ8, LAMA5, LAMC2, LOC101929148, LOXL4, MAP1LC3B2, MMP3, MSMO1, MT1E, MT1HL1, MT1X, PCK1, PIGR, PPFIA4, PROX1, PRSS23, RARB, RASD1, RND3, SCARNA7, SESN3, SH2D3C, SLC2A2, SLC4A8, SNORD27, SNORD33, SNORD49A, SPNS2, TMEM135, TMEM37, TSKU, TUBA4A, UGT2B4, and USP12.

[0503] Atenolol was observed to significantly (p-value≤0.05) modulate expression of ABCC11, ADM, ALPK2, ARG1, C11orf96, CCL20, CEBPD, CHST9, CXCL10, CXCL2, CXCL3, CYP1A1, EFNA1, EFNA3, ELOVL2, EPO, ESR1, FADS1, FAM110A, FAM162A, FAM69C, FAT1, FLNA, GALNT12, GDF15, GNAO1, HAVCR1, HMCN1, HMOX1, HSPB8, IFT80, IGF1, INSIG1, ITGA3, ITGB6, JCHAIN, KCNJ3, KCNK5, KSR2, LAMA5, LAMC2, LHFPL5, LOC105376575, LOXL4, LPCAT3, MATN2, MIR6087, MIR663A, MIR663AHG, MMP24, MRO, MSMO1, MT1E, MT1HL1, MT1X, MYOF, OXTR, PAPLN, PCK1, PEG10, PKHD1, PROX1, RAET1E, RASD1, RMRP, RNF122, RNVU1-19, RPPH1, SCN8A, SLC16A7, SLC2A2, SLC6A1, SPRY2, TCP10L, TFRC, TGFB2, THBS1, TLR10, TMEM45A, TNC, TTPA, WBSCR27, ZFAND2A, ZHX1-C8orf76, ZNF485, and ZNF793.

[0504] Nitrofurantoin was observed to significantly (p-value≤0.05) modulate expression of A1BG-AS1, AASS, ABALON, ABCA6, ABCB11, ABCB9, ABCC11, ABCG1, ABHD2, ABLIM3, ACAA2, ACACB, ACADVL, ACAT2, ACSL1, ACSL5, ACSM2A, ACSM2B, ACSS2, ACTA1, ACTA2, ADAMTS4, ADCY1, ADCY7, ADGRF4, ADGRG2, ADGRG6, ADGRV1, ADM, ADRA1B, ADRB2, AGRN, AGTR1, AHRR, AHSG, AKAP12, AKR1B15, AKR1C8P, ALAS1, ALDH1L1, ALDH8A1, ALOX5, ALPK2, AMACR, ANGPTL2, ANO9, ANXA1, ANXA13, ANXA3, APOA1-AS, APOA4, APOBEC3B, AQP4, ARC, ARG1, ARHGEF26-AS1, ARL14, ARL4C, ARL4D, ARRDC3, ARTS, ASB9, ATAD3C, ATP5E, ATP6V0D2, ATP6V0E2-AS1, ATP6V1C2, ATP8B4, B3GNT5, BAG3, BMF, BMP8B, BNIP3, BRF2, C10orf11, C10orf54, C11orf96, C19orf71, C1orf106, C1orf116, C1QTNF1-AS1, C2CD4A, C2orf82, C4orf19, C5orf45, C5orf52, C6orf222, C9orf72, CA9, CACHD1, CACYBP, CADPS2, CAMKMT, CAPN13, CASKIN1, CASP16P, CBR3, CCBL1, CCDC152, CCL2, CCL20, CCL5, CD274, CD300LB, CDC6, CDC7, CDH12, CDH3, CDKL1, CDKL5, CDR2L, CEBPB-AS1, CEBPD, CECR1, CELSR2, CES4A, CFAP73, CHAD, CHST13, CHST3, CHST9, CIDEC, CITED2, CLDN4, CLIP2, CLRN3, CLSTN1, CLSTN3, CLVS1, CNTD1, CNTN2, COL10A1, COL16A1, COL1A1, COL7A1, COLCA2, COTL1, CPA4, CPT2, CREB3L3, CREB5, CRTAM, CRYAB, CRYM, CSPG4, CTDSP1, CX3CL1, CXCL1, CXCL2, CXCL3, CXCL8, CYB561A3, CYP1A1, CYP1B1, CYP26A1, CYP2C9, CYP3A4, CYP8B1, DDIT4L, DEFB132, DERL3, DGKG, DGKH, DNAH1, DNAH7, DNAJA4, DNAJB1, DNAJB4, DNAJC12, DOK3, DOK7, DSG1, DSG2-AS1, DUOX2, DUOXA2, DUSP13, DUSP6, DYNLL1, ECH1, ECM2, EDARADD, EDN1, EEF1A2, EFNA1, ELOVL2, EME2, EML5, EML6, EMP2, ENO2, ENO3, EPAS1, EPHB2, ERN1, ERRFI1, ESRRG, ETNPPL, EVPLL, EXTL3-AS1, FABP3, FADS1, FADS2, FAM105A, FAM124A, FAM13A, FAM162A, FAM171B, FAM222A, FAM26F, FAM47E, FAM83D, FAT3, FBXO30, FDPS, FER1L4, FGF2, FGFR3, FHL3, FLJ38576, FLNA, FLNC, FLRT3, FMO1, FOS, FOSB, FOSL1, FOXQ1, FSTL3, FTX, G6PC, GADD45B, GAL3ST1, GALNT12, GALNT15, GBP4, GBP6, GDF15, GEM, GGT3P, GHR, GLA, GNAO1, GNAZ, GPC6, GPCPD1, GPER1, GPRIN3, GREM1, HAO2, HAS3, HCAR2, HCAR3, HELZ2, HES4, HESX1, HIPK2, HIST1H2BG, HMCN1, HMGB2, HMGCR, HMGCS1, HMGCS2, HMOX1, HOMER1, HRCT1, HS1BP3-IT1, HSD17B7, HSP90AA1, HSPA1A, HSPA1L, HSPA5, HSPA6, HSPH1, HYAL3, ICA1L, ID1, ID2, IDI1, IDI2-AS1, IFI35, IFIT1, IFT80, IGF1, IGF2BP3, IGFALS, IGFBP1, IGFBP3, IGFBP5, IGLL5, IGSF23, IGSF9, IL17RB, IL18, IL1RL1, IL22RA1, IL7R, INCA1, INHBA, INHBA-AS1, INHBB, INHBE, INSIG1, INTS6-AS1, IRF7, IRS2, ISG15, ITGA3, ITGAM, ITGB1BP2, ITGB6, ITIH4-AS1, ITPKA, KANK4, KCNE1, KCNJ11, KCNJ8, KCNQ1OT1, KCP, KIAA0754, KIAA1462, KIF12, KIF14, KIF3C, KLF5, KLF9, KLHDC7B, KRT42P, KRT7, KRT80, KRT81, KSR2, LAG3, LAMA3, LAMB1, LAMB3, LAMB4, LAYN, LCN2, LDB3, LDHA, LDLRAD4, LECT2, LGALS1, LGALS4, LGALS8-AS1, LGALS9, LINC00102, LINC00261, LINC00504, LINC00536, LINC00661, LINC00704, LINC00862, LINC00880, LINC00987, LINC01018, LINC01136, LINC01151, LINC01314, LINC01347, LINC01559, LINC01587, LINGO1, LMCD1, LOC100128239, LOC100128494, LOC100129931, LOC100130111, LOC100133286, LOC100287042, LOC100507195, LOC100507389, LOC100996291, LOC101927973, LOC101928504, LOC101928525, LOC101929516, LOC104968399, LOC105369332, LOC105371795, LOC105372833, LOC105373051, LOC105376575, LOC105377763, LOC145694, LOC153910, LOC344887, LOC401554, LOC440300, LOC81691, LOX, LOXL4, LPCAT3, LPIN2, LRAT, LRP1, LRP8, LRRC24, LRRC31, LRRIQ3, LTBP1, LUCAT1, LYPD1, MACC1, MAFB, MAFF, MAMDC4, MANF, MAP1B, MAP1LC3B2, MAP2, MAP3K5, MAP3K8, MATN1-AS1, MATN2, MCHR1, MCM7, MEGF6, METRN, MGAM, MGC12916, MIR1282, MIR210HG, MIR3661, MIR4435-2HG, M1R5010, MIR6087, MIR663AHG, MIR6723, MLF1, MLLT11, MMP1, MMP12, MMP24, MMP3, MN1, MOG, MOGAT1, MOGAT2, MOGAT3, MPPED1, MPV17L, MSC, MSMO1, MST1R, MT1E, MT1HL1, MT1X, MTMR11, MTRNR2L4, MUC13, MVD, MXD3, MXRA8, MYCL, MYL9, MYOM1, MYPN, MYRIP, NAP1L2, NBPF10, NBPF20, NBPF25P, NCF2, NCKAP5, NCR3LG1, NDRG1, NDRG4, NDUFA4L2, NEB, NEURL3, NFASC, NFATC4, NIPAL4, NLGN2, NLRP6, NPAS2, NPHP4, NPR3, NPTN-IT1, NR1D1, NRAP, NRAV, NT5M, NUAK2, NUCB1-AS1, NUCB2, NUGGC, NXPH4, OAS1, OAS3, OASL, OSGIN1, OTUD3, OXTR, PABPC3, PADI1, PALMD, PAM, PAPLN, PAQR7, PBX1P1, PCA3, PCBP2-OT1, PCK1, PCSK5, PDE4B, PDGFB, PDGFRB, PDIA4, PDK1, PDK4, PDLIM7, PDZK11P1, PELI2, PELI3, PER1, PFDN4, PFKFB3, PFKFB4, PFN1P2, PGAM4, PGD, PGM2, PID1, PIK3C2G, PITRM1-AS1, PKD2L1, PKHD1, PLCG1-AS1, PLCH2, PLIN2, PLIN4, PLOD1, PLPP3, PLXNA4, PNPLA7, POLQ, POTEM, POU2AF1, PPFIA4, PPL, PPP1R27, PPP1R3C, PRG4, PRKRIP1, PRODH, PROM1, PROX1, PRR15, PRR23C, PRSS23, PSD3, PSORS1C3, PWAR5, PYCARD, RAB17, RAB3B, RAET1E, RAPGEF4, RARB, RASD1, RASL12, RBP5, RCL1, RCN3, RDH5, RGCC, RGS2, RGS4, RHOB, RLF, RMI1, RMRP, RND1, RND3, RNVU1-19, ROBO4, ROR1-AS1, ROR2, RORA, ROS1, RPL13AP3, RPL13AP6, RPL17, RPL22L1, RPPH1, RRAD, RSAD2, RTP3, S1PR1, SCARNA17, SCART1, SCD5, SCGN, SCML4, SCN8A, SDS, SERPINA2, SERPINB9, SERPINE2, SESN3, SFN, SFRP4, SGK2, SHC4, SLAMF7, SLC16A14, SLC16A3, SLC16A6, SLC17A1, SLC17A2, SLC18A2, SLC1A2, SLC22A25, SLC25A42, SLC29A4, SLC2A10, SLC2A2, SLC37A4, SLC38A2, SLC38A4, SLC45A2, SLC4A8, SLC6A1, SLC6A20, SLC7A11, SLC7A2, SLC7A5, SLCO2B1, SLED1, SLITRK3, SMARCA5-AS1, SMG1P1, SMG1P3, SMIM5, SMOC1, SNAI1, SNHG9, SNORA71C, SNORD100, SNORD12, SNORD12B, SNORD27, SNORD33, SNORD49A, SNX22, SOCS2, SORBS1, SORBS2, SORL1, SOX9, SP2-AS1, SPAG4, SPINT1, SPNS2, SPOCD1, SPP1, SPRN, SPRR3, SPRY1, SPRY2, SPTBN5, SPX, SQLE, SRPX2, SSUH2, STIP1, STOM, SUGCT, SULT2A1, SUSD1, SYDE2, SYTL2, TAC1, TBC1D8, TBX15, TDO2, TEAD1, TEAD2, TECTB, TFPI2, TFRC, TGFB2, TGFBI, THBS1, THRSP, TIPARP, TMED8, TMEM37, TMEM45A, TMEM47, TMEM97, TMSB4X, TMTC1, TNC, TNFAIP3, TNFRSF19, TNFSF10, TNFSF11, TNS2, TP53INP1, TRAF5, TREML3P, TRIM31, TRIM55, TSLP, TSPAN5, TSPAN7, TSPEAR-AS1, TTLL3, TTPA, TTYH3, TUBA1A, TUBA4A, TUBA4B, TXNIP, UBASH3B, UBE2D1, UBXN7, UCHL1, UGCG, UGDH-AS1, UGT1A4, UGT2B4, UNC5CL, UNC93A, UPP2, USP12, VDR, VEGFB, VIM, VIM-AS1, VLDLR, VWA3B, VWCE, WDR54, WTAPP1, XAF1, YJEFN3, YPEL1, ZACN, ZBTB37, ZFAND2A, ZFP42, ZMIZ1-AS1, ZMYND8, ZNF292, ZNF365, ZNF703, and ZNF837.

[0505] MK-0752 inhibitor was observed to significantly (p-value≤0.05) modulate expression of ABALON, ABCA10, ABCA6, ABCA9, ABCC11, ABCG1, ABLIM3, ACADVL, ACKR2, ACSL1, ACSL5, ACTA1, ACTA2, ADAM19, ADGRG6, ADGRV1, ADM, ADRA1A, ADRB2, AFAP1L1, AGRN, AGTR1, AHNAK2, AHSG, AKAP12, AKR1B1, AKR1C8P, ALAS1, ALDH8A1, ALPK2, AMACR, ANGPTL4, ANGPTL7, ANGPTL8, ANKRD30BL, ANKRD33B, ANKRD37, ANO1, ANXA13, APOA4, AQP4, ARG1, ARHGEF26-AS1, ARHGEF3, ARL14, ARL4A, ARL4C, ARL4D, ASB9, ATG9B, ATOH8, ATP6V0A4, ATP6V0D2, ATP6V1C2, AVPR1A, AZGP1P1, B4GALNT1, BAG3, BAHCC1, BCAS1, BIRC3, BMP2, BMP8B, BNIP3, C2orf54, C4orf32, C4orf47, C5orf45, C5orf49, C6orf222, C8orf4, C9orf72, CA12, CA2, CA9, CACHD1, CADPS2, CAMK2G, CAPN13, CAPN8, CCDC152, CCL2, CCL20, CCL5, CD274, CDCA2, CES4A, CHST13, CHST9, CITED2, CLDN2, CLDN4, CLSTN1, CLSTN3, CNN1, CNTLN, COL4A1, COL4A2, CPB2-AS1, CPS1, CREB3L3, CRY2, CRYAB, CTGF, CX3CL1, CXCL1, CXCL10, CXCL11, CXCL12, CXCL8, CYP1A1, CYP21A2, CYP24A1, CYP26A1, CYP2C19, CYP2C9, CYP3A4, CYP3A43, CYP3A5, CYP3A7, CYP3A7-CYP3A51P, CYP7A1, CYP8B1, CYTH1, DCX, DDIT4L, DEDD2, DERL3, DNAH5, DNAH7, DNAJB1, DNAJB4, DNAJC12, DOCK10, DOK3, DOK7, DSG1, DSG2-AS1, DUOX2, DUOXA2, ECH1, ECM2, EDN1, EFNA1, EFNA3, ELOVL2, EML6, ENO2, ENO3, ENPP2, EPAS1, EPHA4, EPHB2, EPPK1, EPSTI1, ESRRG, ETNPPL, EVA1A, EVPLL, F13B, F2RL2, FABP3, FADS1, FADS2, FAM13A, FAM151A, FAM198A, FAM219A, FAM49A, FAM69C, FASN, FBXO30, FBXW10, FBXW4P1, FCAMR, FER1L4, FES, FGF13, FGF19, FGFR3, FGR, FKBP5, FLNA, FLNC, FLRT3, FLVCR2, FMO1, FOS, FOSB, FOSL1, FYB, G6PC, GADD45B, GAL3ST1, GALNT12, GBP4, GCNT2, GDF15, GHR, GLA, GNAO1, GOLGA6L10, GREM2, GRIA3, HAL, HAO2, HAVCR1, HCAR2, HCAR3, HELZ2, HIST3H2A, HIVEP2, HK2, HKDC1, HMCN1, HMGB2, HMOX1, HPGD, HSD17B7, HSPA12A, HSPA1A, HSPA1B, HSPA5, HSPA6, HSPB1, HSPB8, ID2, IFI35, IFI44L, IFIT1, IFT80, IGF1, IGFALS, IGFN1, IL17RB, IL18, IL22RA1, IL23A, IL6R, IL7R, ILDR2, INSIG1, ITGA3, ITGA7, ITGAM, ITGB6, IVL, KANK1, KCNJ3, KCNJ8, KCNK5, KCP, KDM3A, KIAA0226L, KIAA0319, KLF5, KLF9, KLHL31, KRT7, KRT80, KRT81, KSR2, LAMA5, LAMB3, LAMC2, LBH, LDHA, LDLRAD4, LECT2, LEFTY1, LGALS4, LIF, LINC00261, LINC00504, LINC00535, LINC00704, LINC00862, LINC01057, LINC01151, LINC01314, LINC01554, LOC100507389, LOC101927686, LOC101928837, LOC101929415, LOC101929427, LOC101929448, LOC101929567, LOC104968399, LOC153910, LOC283731, LOC284344, LOC284454, LOC344887, LOC388942, LOC440300, LOC728040, LOXL4, LPA, LPAL2, LPIN2, LRAT, LRFN2, LRRN2, LTBP1, LUCAT1, LYPD1, MAB2IL2, MAFF, MAMLD1, MAP3K8, MCAM, MCHR1, MCM7, MED31, METRN, MGAM, MGC12916, MIR1282, MIR210HG, MIR663AHG, MIR6723, MLK7-AS1, MMP19, MMP24, MMP3, MMP7, MN1, MOGAT1, MOGAT2, MPPED1, MPV17L, MSC, MSMO1, MST1R, MT1E, MT1HL1, MTMR11, MVD, MYH3, MYH4, MYL9, MYOF, MYOM1, MYRIP, NCALD, NCKAP5, NDRG1, NDRG4, NEB, NECAB2, NEFM, NPTX2, NR1D1, NR6A1, NRAP, NUAK2, NUDT18, NUGGC, OAS1, OAS2, OAS3, OSGIN1, OTUD3, OXTR, P4HA1, PALMD, PAM, PAPLN, PCDH9, PCED1B, PCK1, PCSK9, PDE4D, PDGFB, PDGFRB, PDK1, PDK4, PDLIM7, PEG10, PELI2, PER1, PFDN4, PFKFB3, PFKFB4, PGD, PGM2, PHLDA1, PID1, PITRM1-AS1, PKD2L1, PKLR, PLAU, PLIN2, PLIN4, PLK2, PNLIPRP3, POR, PPARGC1A, PPFIA4, PPP1R3G, PRAMEF2, PRDM7, PREX1, PROM1, PROX1, PRR15, PRSS23, PSORS1C3, RAB17, RAET1E, RAPGEF4, RARB, RASD1, RASD2, RASSF2, RBP5, RCN3, RGS2, RHCG, RHOF, RIMKLA, RLF, RMI1, RMRP, RND3, RNF122, RNF186, ROR1-AS1, RORA, ROS1, RRAD, RTP3, S100A3, S100A6, SCARA3, SCGN, SCN8A, SDS, SEC14L4, SEC31B, SEMA7A, SERPINB9, SESN3, SFN, SFRP4, SGK2, SH3TC2, SHC4, SLC16A3, SLC16A5, SLC16A7, SLC17A1, SLC17A2, SLC1A2, SLC22A10, SLC25A18, SLC25A20, SLC29A4, SLC2A2, SLC38A4, SLC45A2, SLC51B, SLC6A1, SLC6A20, SLC6A6, SLC7A11, SLC7A2, SLC7A5, SLCO2B1, SLED1, SMIM3, SMOC1, SNAI1, SNX22, SOCS2, SORBS1, SORBS2, SORL1, SOX9, SPAG4, SPARCL1, SPOCK1, SPRY2, SPTBN4, SPX, SSUH2, STAMBPL1, STC2, STK39, STOM, STRA6, SUSD1, SYPL2, SYTL2, SYTL5, TBC1D8, TCAF2, TCP10L, TDO2, TEKT5, TENM2, TFCP2L1, TGFB2, TGFBI, TGFBR3, THBS1, THRSP, TIPARP, TLE6, TMC7, TMCC1, TMEM156, TMEM45A, TMEM97, TMPRSS2, TMSB4X, TNC, TNFRSF19, TNFRSF21, TNS2, TOX3, TP63, TPRG1, TRAF3IP3, TREM1, TREML3P, TRIM31, TRPM8, TRPV3, TSKU, TSPAN15, TSPAN2, TSPAN5, TSPAN7, TSPEAR-AS1, TTPA, TUBA4A, TUBA4B, UBALD2, UBASH3B, UBE2D1, UCHL1, UGCG, UGT1A3, UGT1A4, UGT1A5, UGT2B4, UNC5CL, UNC93A, USP12, VENTX, VIM, VIM-AS1, VLDLR, VLDLR-AS1, VWA3B, VWCE, XAF1, YPEL1, ZMIZ1-AS1, ZMYND8, ZNF192P1, ZNF292, ZNF341-AS1, ZNF485, ZNF703, and ZNF793.

[0506] N-Acetylpurinomycin was observed to significantly (p-value≤0.05) modulate expression of AASS, ABALON, ADGRV1, AKAP12, APOA1-AS, AQP7, ARHGEF3, ATP6V1C2, BMF, C5orf45, CASKIN1, CBR3, CCDC152, CD274, CDKL1, CLVS1, CTAGE8, CX3CL1, CYP3A5, DCLK1, DNAJC12, DSG1, DUOX2, DUOXA2, DUSP6, EDARADD, ENO3, ETNPPL, FADS1, FAM134B, FAM13A, FAM65B, FAM69C, FGF2, FLNC, FLRT3, G0S2, GDF15, GDF9, HAO2, HES4, HHAT, HKDC1, HMGCS1, HS1BP3-IT1, HSPA1B, HSPB1, ICA1L, IDI2-AS1, IGFBP1, KCNQ1OT1, KIAA1462, KLHL13, KSR2, LAMB3, LAMC2, LAPTM5, LGALS1, LGALS4, LINC00102, LINC00504, LINC01057, LINC01296, LMCD1, LOC100128494, LOC101929415, LOC104968399, LOC729348, LOXL4, LUCAT1, MAP1LC3B2, MIR1282, MIR6723, MMP3, MT1E, MT1HL1, MXD3, NCR3LG1, NRAP, PEG10, PFN1P2, PHLDA1, PID1, PITRM1-AS1, POTEM, PRKRIP1, RAB3B, RAET1E, RHOF, RLF, RMI1, RND1, RND3, RPL13AP6, RRAD, S100A6, SCD5, SLC16A6, SLC25A42, SLC2A2, SLC7A2, SNORD12B, SNORD27, SNX22, SORBS1, SORT1, SPINT1, SQLE, TBC1D8, TIPARP, TMSB4X, TNFAIP3, TRIM69, TUBA4A, TUBA4B, UBD, UGDH-AS1, UGT2B4, VENTX, and ZNF793.

[0507] LY 364947 was observed to significantly (p-value≤0.05) modulate expression of AGRN, AKAP12, ANXA3, ATAD3C, ATP6V1C2, BMF, C18orf32, C4orf19, C5orf45, CASKIN1, CAT, CCDC152, CLDN4, CLVS1, CNTD1, DNAJC12, DSG1, ELOVL2, ENO3, FAM13A, FAM49A, FAM69C, FASN, FGF2, FSTL3, GDF15, HAO2, HES4, HKDC1, HPGD, HSPB1, IFI27, IFIT2, IGFBP1, IGLL5, KRT7, LAMB4, LINC00102, LINC01012, LINC01057, LOC104968399, LRRIQ3, MAP1LC3B2, MIR6723, MT1E, MT1HL1, MXD3, NCF2, NRAP, OAS1, OAS2, OAS3, PCK1, PEG10, PIGR, PLIN2, POR, PRR23C, RAET1E, RDH12, RHOF, RND3, S100A6, SLC25A42, SLC38A2, SLC4A8, SNX22, SOX9, TLR10, TNFAIP2, TNFAIP3, TP53INP1, TRIM69, TSLP, TUBA4A, UBE2D1, UCN, UGT2B4, VIM, and XAF1.

[0508] Danazol was observed to significantly (p-value≤0.05) modulate expression of ACAA2, ACADVL, ACSM2A, ACTA1, ACTA2, ACTG2, ADGRG6, ADGRV1, ADM, AGRN, AHNAK2, AHSG, AKAP12, AKR1C8P, AKR1D1, ALDH8A1, ALPK2, AMACR, ANGPTL4, ANGPTL8, ANXA1, AQP4, ARG1, ARL14, ARL5B, ATP5E, B4GALNT1, BAG3, BCAT2, BMP2, BMP8B, BNIP3, C1orf116, C8orf4, CA12, CA2, CACYBP, CADPS2, CAPN13, CASKIN1, CBLB, CCL2, CCL20, CD109, CDKL1, CEBPD, CHST9, CLSTN3, COL7A1, CPA4, CREB5, CRY2, CUX2, CXCL3, CYBB, CYP1A1, CYP21A1P, CYP21A2, CYP26A1, CYP2C9, CYP3A4, CYP3A5, CYP7A1, DEDD2, DEFB132, DNAH7, DNAJB1, ECM2, EFNA1, EFNA3, ELOVL2, ENO2, ENO3, EPHA4, EPO, EPPK1, ERRFI1, EVA1A, F13B, FADS1, FAM134B, FAM13A, FAM219A, FAM49A, FAT1, FBXO41, FGF2, FGFR3, FLNA, FLRT3, FLVCR2, FOSB, FOSL1, FSTL3, G6PC, GADD45B, GCNT2, GDF15, GHR, GLA, GNAO1, GOLGA6L3, GPC6, HAO2, HK2, HKDC1, HMCN1, HMCN2, HMOX1, HSP90AA1, HSPA1A, HSPA1B, HSPA6, HSPB1, HSPB8, HSPH1, ID1, ID2, IFIT2, IFT80, IGF1, IGFALS, IGFBP3,1L17RB, IL18, IL6R, IL7R, INHBE, ISM1, ITGA3, ITGA7, ITGB6, KANK1, KCNJ8, KCNK5, KCP, KDM3A, KIAA0319, KLF9, KLHL31, KRT7, KRT81, LAMA3, LAMB1, LAMC2, LCN2, LDHA, LGALS4, LIF, LINC00102, LINC00261, LINC00862, LINC00880, LINC00881, LINC01314, LINC01587, LOC100507195, LOC153910, LPIN2, LRAT, LTBP1, LYPD1, MAFF, MANEA-AS1, MATN2, MGAM, MMP24, MN1, MOGAT2, MSC, MSMO1, MST1R, MT1E, MT1HL1, MTMR11, MXD3, MYL9, MYOF, MYOM1, NAMPT, NCF2, NDRG1, NEB, NES, NR1D1, NRBP2, NUAK2, OSGIN1, P4HA1, PALMD, PAPLN, PCDH9, PCK1, PDK1, PDK4, PDLIM7, PEG10, PELI3, PER1, PFKFB3, PFKFB4, PID1, PLIN4, PLK2, POTEE, PPFIA4, PPP1R3C, PPP1R3G, PROX1, PRR15, PRSS23, PSD3, PSORS1C3, PTPRU, RAB27B, RAB3B, RAET1E, RARB, RASD1, RBP5, RGS2, RHCG, RMI1, RRAD, RTP3, S100A6, SCN8A, SDS, SEC14L2, SEMA7A, SERPINB9, SERPINE2, SESN3, SHC4, SLC16A7, SLC17A1, SLC1A2, SLC25A20, SLC2A2, SLC38A4, SLC6A1, SLC7A11, SLC7A2, SLCO2B1, SMOC1, SNAI2, SOCS2, SORBS1, SORBS2, SORL1, SP2-AS1, SPNS2, SPOCD1, SPRY2, SPTBN4, STIP1, SULT2A1, SYPL2, SYTL2, TCAF2, TDO2, TGFB2, TGFBI, THBS1, TIPARP, TMCC1, TMEM135, TMEM138, TMEM45A, TMPRSS2, TMSB4X, TNC, TNFRSF21, TNS2, TP53INP1, TP63, TPRG1-AS1, TRAM2, TRPM8, TSKU, TSLP, TSPAN5, TUBA4A, TUBA4B, UBALD2, UCHL1, UCN, UNC5CL, USP12, VIM, VLDLR, VWCE, YPEL1, ZFAND2A, ZHX1-C8orf76, ZNF543, ZNF80, and ZXDB.

[0509] Sulpiride was observed to significantly (p-value≤0.05) modulate expression of ACADVL, ADGRG6, AGRN, AKAP12, ALPK2, ANGPTL4, ANKRD30BL, APOA4, APOBEC3B, BLACE, C1orf105, CASKIN1, EPPK1, FADS1, FAM162A, FAM69C, FAT1, FAXC, FDFT1, GBAP1, GDF15, GLRA2, HAO2, HES4, HSPA1A, HSPA6, ID2, IFT80, IGFBP1, IL18, IRF7, KCNV1, KLHL13, LINC00102, LINC00261, LOC101928401, LPCAT3, MAMDC4, MAP3K5, MIR663AHG, MMP24, MT1E, MT1HL1, MT1X, NCR3LG1, OAS3, P4HA1, PCK1, PMEPA1, PROX1, RAET1E, RBP5, RNVU1-19, SCAMP5, SCARNA2, SCGN, SERPINB7, SLC6A1, SLCO2B1, SNORD15B, SYNGR1, TCAF2, TLR10, TMEM164, TMEM47, TP53INP1, TTLL6, UBAP1L, VIM, ZFP42, and ZNF543.

[0510] B. RNA-Seq Result Validation

[0511] Genes ACADVL, ACAT2, ACSL1, ACSL5, AGPAT2, AGTR1, AHSG, ALAS1, AMACR, ARG1, CA12, CA2, CIDEC, COL1A1, CPS1, CPT1A, CPT2, CYP21A2, CYP2C19, CYP3A4, ECH1, ENO3, ETFDH, FABP1, G6PC, GHR, GLA, HGD, HMGCR, HMGCS2, HMOX1, HOGA1, HPGD, IFT27, LDHA, LPIN2, MOGAT2, NCF2, PCSK9, POR, RMRP, SLC25A20, SLC2A2, SLC37A4, SLC51B, SLC6A6, SULT2A1, TAT, TDO2, TMEM135, TNFSF11, and VLDLR were chosen for validation, because the genes are associated with diseases of the liver and were observed to result in an at least 2-fold change in expression in the RNA-seq pilot results. Table 31 provides a key for the reference numbers assigned to each of the 39 compounds.

[0512] The RNA of the cells was purified as described in Example 1, and gene expression changes were analyzed in duplicates using RNA-seq. The log 2 of fold changes in gene expression after administration of the compounds in Table 31 above measured by RNA-seq for disease associated genes are shown in Table 33.

TABLE 33
Log2 fold changes in gene expression

| | Compounds (MT-) | | | | | | | | | | |
|---|---|---|---|---|---|---|---|---|---|---|---|
| Gene | 51 | 723 | 487 | 505 | 361 | 277 | 835 | 193 | 610 | 117 | 182 |
| ACADVL | −0.05 | 0 | 0.02 | 0.05 | 1.38 | 0.04 | −0.02 | 0.02 | 0.05 | −0.02 | 0.07 |
| ACAT2 | 1.22 | −0.03 | −0.08 | −0.26 | −0.07 | 0.03 | 0.03 | 0.09 | 0.14 | 0 | −0.33 |
| ACSL1 | 0.39 | 0.04 | −0.01 | 0.06 | 1.55 | 0.08 | 0.01 | 0 | 0.03 | 0.01 | 0.29 |
| ACSL5 | 0.1 | 0.03 | 0.01 | −0.05 | 1.04 | 0 | 0.06 | 0.04 | 0.05 | 0 | −0.04 |
| AGPAT2 | 0.18 | −0.05 | −0.03 | −0.14 | 1.08 | −0.05 | −0.11 | 0.02 | 0.21 | 0.03 | −0.1 |
| AGTR1 | 0.12 | 0.03 | 0 | 0.25 | 0.16 | 0.04 | 0.01 | 0.01 | 0.06 | −0.04 | 0.02 |
| AHSG | −0.14 | −0.07 | 0.36 | −0.49 | −0.31 | −0.05 | 0.03 | 0.09 | 0.22 | 0.09 | −0.54 |
| ALAS1 | 0.01 | −0.01 | 0.04 | 0.21 | 0.62 | 0.01 | −0.13 | −0.06 | −0.02 | −0.12 | 0.38 |
| AMACR | −0.32 | −0.11 | −0.48 | −0.37 | −0.29 | −0.09 | −0.18 | −0.13 | −0.17 | −0.21 | −0.4 |
| ARG1 | 0.07 | 0.07 | 0.29 | 0.35 | 0.23 | 0.02 | 0.08 | 0.14 | 0.23 | 0.14 | 0.06 |
| CA12 | 0.1 | 0.29 | 0.18 | 0.16 | 0.43 | −0.02 | 0.01 | 0.03 | 0.07 | 0.03 | 0.43 |
| CA2 | −0.18 | −0.08 | −0.32 | −0.13 | 0.12 | 0.01 | −0.07 | −0.06 | 0.06 | −0.09 | −0.39 |
| CIDEC | −0.24 | 0.09 | −0.15 | −0.32 | 1.21 | −0.18 | −0.19 | −0.03 | −0.14 | −0.27 | 0.27 |
| COL1A1 | 0.55 | −0.14 | −0.12 | 0.02 | 0.1 | 0.09 | 0.03 | 0.05 | −0.02 | 0.08 | 0.37 |
| CPS1 | −0.37 | −0.04 | 0.03 | 0.02 | −0.26 | −0.03 | −0.08 | −0.06 | −0.13 | −0.1 | −0.05 |
| CPT1A | 0.02 | 0.06 | 0.05 | −0.01 | 1.43 | −0.1 | −0.04 | −0.08 | 0.06 | −0.05 | 0.21 |
| CPT2 | −0.15 | −0.09 | −0.01 | −0.13 | 1.07 | −0.03 | −0.09 | −0.09 | −0.08 | −0.15 | −0.07 |
| CYP21A2 | 0.15 | 0.08 | −0.17 | −0.18 | 0.66 | 0.16 | −0.04 | 0 | 0.18 | 0.12 | 0.33 |
| CYP2C19 | 0.1 | 0.18 | −0.03 | −0.03 | 0.61 | 0.04 | 0.07 | 0.05 | 0.02 | −0.03 | 0.22 |
| CYP3A4 | 0.03 | 0.14 | 0.11 | 0.4 | 1.02 | 0 | 0.02 | 0.06 | 0.18 | 0 | 0.46 |
| ECH1 | −0.08 | −0.04 | −0.01 | −0.22 | 1.38 | −0.03 | −0.03 | 0.02 | 0.14 | −0.05 | −0.27 |
| ENO3 | 0.1 | −0.21 | −0.37 | −0.37 | 0.25 | 0.03 | −0.26 | −0.11 | −0.24 | −0.23 | −0.12 |
| ETFDH | 0.04 | 0.05 | −0.02 | 0.09 | 1.09 | 0.06 | −0.07 | 0.05 | 0.05 | −0.05 | −0.12 |
| FABP1 | −0.04 | −0.08 | −0.02 | 0.02 | 1.58 | −0.05 | 0.02 | 0.13 | 0.21 | −0.02 | 0.04 |
| G6PC | 0.13 | 0.03 | 0.34 | 0.3 | 0.05 | −0.06 | −0.05 | −0.03 | 0.03 | 0.07 | 0.7 |
| GHR | −0.01 | −0.05 | −0.32 | −0.24 | −0.54 | −0.03 | −0.15 | −0.14 | −0.17 | −0.13 | −0.39 |
| GLA | −0.01 | 0.01 | 0.13 | 0.27 | 0.09 | 0 | −0.03 | −0.06 | 0.02 | −0.02 | 0.3 |
| HGD | −0.18 | 0 | 0.04 | 0.16 | −0.05 | 0.03 | −0.01 | −0.01 | −0.03 | −0.07 | 0.22 |
| HMGCR | 1.26 | 0.02 | 0.05 | 0.11 | 0 | 0.05 | 0.09 | 0.12 | 0.13 | 0.11 | 0.02 |
| HMGCS2 | −0.24 | −0.04 | 0.02 | 0.08 | 1.24 | −0.04 | −0.03 | 0.03 | 0.15 | −0.01 | 0.05 |
| HMOX1 | 0.21 | 0.22 | 0.31 | 0.55 | 0.6 | 0.03 | 0.09 | 0.22 | 0.38 | 0.14 | 0.24 |
| HOGA1 | −0.38 | 0.03 | 0.06 | −0.25 | −0.17 | −0.09 | −0.14 | 0.06 | 0.16 | −0.22 | −0.54 |
| HPGD | 0.35 | 0.05 | −0.09 | 0.22 | 0.32 | −0.03 | −0.01 | 0.06 | −0.03 | −0.13 | 0.08 |
| IFT27 | −0.15 | 0 | −0.02 | 0.09 | 0.38 | −0.12 | 0.07 | 0.05 | 0.25 | −0.08 | −0.11 |
| LDHA | 0.04 | −0.09 | 0.16 | 0.25 | 0.19 | 0.07 | 0.16 | 0.09 | 0.26 | 0.13 | 0.11 |
| LPIN2 | 0.14 | 0.03 | 0.19 | 0.37 | −0.11 | 0 | 0.1 | 0.05 | 0.14 | 0.04 | 0.55 |
| MOGAT2 | −0.51 | 0.01 | −0.18 | −0.51 | 0.11 | −0.11 | −0.06 | −0.08 | −0.13 | 0.01 | −0.47 |
| NCF2 | 0.19 | −0.21 | −0.34 | −0.11 | −0.62 | −0.11 | −0.24 | −0.28 | −0.18 | −0.32 | −0.01 |
| PCSK9 | 1.07 | 0.11 | 0.16 | −0.18 | 0.4 | 0 | 0.08 | 0.16 | 0.35 | 0.14 | 0.21 |
| POR | −0.04 | 0.1 | 0.02 | 0.17 | 1.62 | 0.02 | −0.11 | −0.04 | 0.04 | −0.04 | 0.36 |
| RMRP | 1.5 | −0.14 | 0.5 | 1.02 | 2.18 | 1.55 | 1.96 | 1.27 | 0.18 | −0.37 | −1.74 |
| SLC25A20 | −0.24 | −0.1 | −0.37 | −0.09 | 1.22 | −0.21 | −0.23 | −0.19 | −0.07 | −0.21 | −0.25 |
| SLC2A2 | −0.52 | −0.04 | −0.44 | −0.24 | −0.67 | −0.15 | −0.38 | −0.22 | −0.43 | −0.35 | −0.46 |
| SLC37A4 | −0.23 | −0.17 | 0.01 | −0.07 | 0.07 | 0.09 | 0.02 | 0.1 | 0.27 | 0.03 | −0.02 |
| SLC51B | 0.14 | −0.26 | 0.2 | 0.35 | 0.63 | 0.1 | −0.06 | 0.14 | −0.12 | −0.19 | −0.1 |
| SLC6A6 | 0 | 0.17 | 0 | −0.3 | 0.03 | 0.03 | −0.19 | −0.08 | −0.18 | −0.14 | −0.12 |
| SULT2A1 | −0.45 | 0.03 | −0.2 | −0.03 | 1.1 | −0.16 | −0.11 | −0.05 | −0.05 | −0.16 | −0.15 |
| TAT | 0 | −0.1 | −0.07 | 0.06 | 0.28 | −0.09 | 0 | −0.01 | 0.11 | 0.04 | −0.04 |
| TDO2 | −0.57 | −0.14 | −0.12 | 0 | −0.09 | −0.04 | −0.02 | 0.02 | −0.06 | −0.16 | 0 |
| TMEM135 | 0.09 | 0.05 | −0.17 | 0.08 | 1.02 | −0.08 | −0.19 | −0.02 | 0.03 | −0.03 | −0.03 |
| TNFSF11 | 1.09 | −0.11 | 0.03 | 0.01 | 0.02 | 0.09 | −0.05 | 0.14 | 0.2 | −0.09 | 0.03 |
| VLDLR | −0.03 | 0.01 | 0.2 | 0.28 | 1.41 | 0.13 | 0.06 | 0.06 | 0.17 | 0.14 | 0.31 |
| | Compounds (MT-) | | | | | | | | | | |
| Gene | 913 | 641 | 152 | 861 | 741 | 189 | 901 | 220 | 312 | 922 | 372 |
| ACADVL | −0.02 | 0.02 | −0.26 | 0.11 | −0.04 | −0.06 | −0.09 | 0.15 | −0.13 | −0.07 | 0.07 |
| ACAT2 | −0.22 | −0.04 | 0.12 | −0.18 | −0.05 | −0.01 | 0.06 | −0.44 | 0.08 | −0.01 | −0.48 |
| ACSL1 | −0.04 | 0.26 | −0.24 | 0.6 | 0 | −0.03 | 0.71 | 0.27 | 0.03 | −0.05 | 0.34 |
| ACSL5 | −0.08 | 0.18 | −0.21 | −0.01 | −0.05 | −0.01 | 0.65 | 0.39 | 0.05 | −0.1 | 0.19 |
| AGPAT2 | −0.19 | −0.05 | −0.73 | −0.2 | −0.11 | −0.15 | −0.46 | −0.53 | −0.22 | −0.01 | −0.51 |
| AGTR1 | −0.01 | −0.03 | 0.37 | −0.05 | −0.04 | −0.11 | 1.1 | 0.05 | −0.03 | 0.02 | 0.96 |
| AHSG | −0.37 | −0.2 | −1.08 | −0.29 | 0.03 | 0.07 | −0.57 | −0.63 | 0.04 | 0.15 | −1.23 |
| ALAS1 | 0 | 0.03 | 0.31 | −0.25 | −0.11 | −0.17 | 1.45 | 0.23 | −0.23 | 0.03 | 1.87 |
| AMACR | −0.37 | −0.22 | −0.81 | −1.4 | −0.24 | −0.4 | −0.62 | −1.05 | −0.32 | −0.16 | −0.81 |
| ARG1 | −0.04 | 0.04 | −0.72 | 1.48 | 0.01 | 0.2 | 0.63 | 0.27 | 0.16 | −0.05 | 0.25 |
| CA12 | 0.14 | 0.36 | 0.01 | 0.2 | −0.02 | 0.07 | 1.53 | 0.46 | 0.03 | 0.05 | 1.15 |
| CA2 | −0.25 | −0.22 | −0.03 | −1.05 | −0.18 | −0.25 | 0.74 | −0.32 | −0.24 | −0.12 | 0.75 |
| CIDEC | −0.35 | −0.35 | −1.22 | 1.02 | −0.24 | −0.44 | −0.36 | −0.71 | −0.44 | −0.25 | −0.04 |
| COL1A1 | 0.35 | −0.05 | −0.97 | −0.57 | 0.14 | 0.3 | −0.61 | −0.08 | 0.07 | 0 | −0.09 |
| CPS1 | −0.21 | −0.04 | −0.11 | 2.14 | −0.12 | −0.14 | −0.25 | 0.24 | −0.04 | −0.02 | −0.12 |
| CPT1A | 0.01 | 0.2 | −0.13 | 0.27 | 0.04 | −0.05 | 0.22 | 0.07 | 0.02 | 0.07 | 0.32 |
| CPT2 | −0.15 | 0 | −0.34 | 0.14 | −0.22 | −0.2 | −0.23 | −0.25 | −0.11 | −0.03 | −0.23 |
| CYP21A2 | 0.16 | 0.16 | −0.02 | −1.35 | 0.04 | 0.28 | 0.72 | 0.12 | −0.02 | 0.11 | 0.5 |
| CYP2C19 | 0.09 | 0.16 | −0.01 | 0.3 | 0.04 | 0.18 | 1.75 | 0.57 | 0.07 | 0.08 | 0.69 |
| CYP3A4 | 0.06 | 0.33 | 0.13 | 1.98 | −0.08 | 0.03 | 3.21 | 0.87 | 0.03 | −0.09 | 2.6 |
| ECH1 | −0.21 | −0.08 | −0.45 | −0.29 | −0.14 | −0.3 | −0.03 | −0.29 | −0.3 | −0.17 | −0.34 |
| ENO3 | −0.33 | −0.48 | −0.67 | −1.24 | −0.17 | −0.35 | −1.13 | −0.53 | −0.31 | −0.18 | −1.09 |
| ETFDH | −0.14 | −0.06 | −0.07 | −0.04 | −0.12 | −0.13 | −0.09 | −0.08 | −0.07 | −0.15 | −0.04 |
| FABP1 | −0.13 | −0.07 | 0.05 | −0.02 | −0.22 | −0.17 | −0.02 | 0.27 | −0.19 | −0.06 | −0.11 |
| G6PC | 0.32 | 0.5 | −0.63 | 1.02 | 0.14 | 0.13 | 0.27 | 0.22 | 0.11 | −0.1 | 0.46 |
| GHR | −0.19 | −0.18 | −0.67 | −0.42 | −0.13 | −0.32 | −0.81 | −0.6 | −0.14 | 0.01 | −0.94 |
| GLA | −0.04 | −0.06 | 0.14 | −0.25 | −0.06 | −0.1 | 0.52 | −0.11 | −0.16 | −0.02 | 1.15 |
| HGD | −0.11 | 0.04 | −0.08 | 1.23 | −0.16 | −0.16 | 0.33 | −0.08 | −0.19 | 0 | 0.41 |
| HMGCR | 0.02 | 0.08 | 0.47 | 0 | 0.05 | 0.12 | 0.2 | 0.17 | 0.13 | −0.02 | 0.12 |
| HMGCS2 | 0.05 | 0.03 | 0.26 | 0.07 | −0.03 | 0.01 | 0.11 | 0.8 | 0.01 | 0.03 | 0 |
| HMOX1 | 0.1 | −0.06 | 1.66 | −0.44 | 0.05 | 0.29 | 0.35 | 0.76 | 0.08 | −0.08 | 0.12 |
| HOGA1 | −0.16 | 0.1 | 0.05 | 1 | 0 | −0.15 | 0.19 | −0.42 | −0.11 | −0.12 | 0.01 |
| HPGD | −0.1 | −0.08 | −0.09 | 2.07 | −0.06 | −0.17 | −0.52 | 0.05 | 0 | −0.24 | −0.59 |
| IFT27 | −0.16 | −0.14 | −0.34 | −0.3 | −0.01 | −0.16 | −0.16 | −1.05 | −0.34 | 0.03 | −0.1 |
| LDHA | −0.03 | −0.06 | −1.49 | 0.39 | 0.08 | 0.2 | 0.19 | −0.05 | 0.22 | −0.04 | −0.34 |
| LPIN2 | 0.16 | 0.43 | −0.31 | 1.93 | 0.17 | 0.2 | −0.26 | 0.5 | 0.21 | −0.03 | 0.15 |
| MOGAT2 | −0.13 | −0.11 | −0.72 | 0.04 | 0.13 | 0 | −0.35 | −0.17 | 0 | −0.03 | −1.14 |
| NCF2 | −0.27 | −0.56 | −0.5 | −1.71 | −0.19 | −0.26 | 0.24 | −0.94 | −0.26 | −0.11 | 0.1 |
| PCSK9 | 0.2 | 0.24 | −0.02 | 0.11 | 0.17 | 0.28 | 0.59 | 0.04 | 0.12 | 0.07 | −0.37 |
| POR | −0.07 | 0.16 | −0.17 | 0.87 | −0.14 | −0.05 | 1.13 | −0.03 | −0.28 | 0.01 | 1.44 |
| RMRP | −0.98 | −1.59 | −0.63 | −1.43 | −1.45 | 1.05 | −1.29 | −1.74 | −2.27 | −0.73 | 0.11 |
| SLC25A20 | −0.42 | −0.11 | −0.29 | −0.08 | −0.31 | −0.37 | −0.46 | −0.36 | −0.38 | −0.02 | −0.42 |
| SLC2A2 | −0.45 | −0.31 | −0.55 | 0.41 | −0.22 | −0.43 | −0.99 | −0.74 | −0.24 | −0.18 | −0.85 |
| SLC37A4 | −0.01 | 0.02 | −0.8 | 1.16 | 0.09 | 0.15 | −0.06 | −0.04 | 0.12 | 0.13 | −0.4 |
| SLC51B | −0.02 | 0.36 | −0.22 | 0.08 | −0.08 | −0.14 | 1.02 | 0.4 | −0.22 | −0.2 | 0.96 |
| SLC6A6 | −0.11 | 0.09 | −0.34 | −0.8 | −0.35 | −0.18 | 1.28 | −0.44 | −0.26 | −0.09 | 0.47 |
| SULT2A1 | −0.3 | −0.12 | −0.25 | 0.39 | −0.18 | −0.25 | 0.38 | −0.45 | −0.19 | −0.18 | 0.21 |
| TAT | 0.01 | −0.15 | −0.27 | 2.37 | 0.09 | 0.1 | −0.3 | 0.32 | 0.05 | −0.08 | −0.42 |
| TDO2 | −0.31 | −0.03 | −0.72 | 1.05 | −0.14 | −0.29 | −0.42 | −0.24 | −0.07 | −0.16 | −0.71 |
| TMEM135 | −0.17 | −0.02 | −0.15 | −0.08 | −0.16 | −0.16 | 0.14 | −0.13 | 0.04 | −0.15 | −0.35 |
| TNFSF11 | 0.1 | −0.15 | 0.59 | −0.27 | 0.04 | 0.02 | 0.06 | 0.43 | 0.31 | 0.01 | −0.5 |
| VLDLR | 0.05 | 0.06 | −0.53 | 0.55 | 0.09 | 0.16 | 1.69 | 0.54 | 0.14 | −0.07 | 1.23 |

[0513] In the validation, p-values for each change in expression were 0.05 and were all considered statistically significant. Bms833923 (MT-636), dmPGE2 (MT-937), N-Acetylpurinomycin (MT-993), and LY 364947 (MT-740) were not observed to cause a greater than 2-fold change in expression in any gene.

### Example 3. Validating Gene Expression Results

[0514] qRT-PCR was performed on samples of primary human hepatocytes from a second donor. The hepatocytes were stimulated with simvastatin, rosiglitazone maleate, sulpiride, imatinib, amiodarone, nitrofurantoin, prednisone, penicillamine (D-), rifampicin, isoniazid, ritonavir, ibuprofen, propylthiouracil, BIO, xav939, or MK-0752, which were observed to cause at least a 2-fold change in the expression level of at least one DAG in Table 29 for 58 genes associated with liver disease. Benzbromarone was observed to be cytotoxic, and was not further analyzed after the pilot RNA-seq. The 58 liver disease associated genes analyzed were ACADVL, ACAT2, ACSL1, ACSL5, AGPAT2, AGTR1, AHSG, ALAS1, AMACR, ANGPTL2, ARG1, CA12, CA2, CIDEC, COL1A1, CPS1, CPT1A, CPT2, CYP21A2, CYP2C19, CYP3A4, CYP7A1, ECH1, ENO3, ETFDH, FABP1, FABP6, G6PC, GHR, GLA, GYS2, HGD, HMGCR, HMGCS2, HMOX1, HOGA1, HPGD, IFT27, LDHA, LPIN2, MOGAT2, NCF2, PCSK9, POR, RMRP, SLC25A20, SLC2A2, SLC37A4, SLC51B, SLC6A20, SLC6A6, SOAT2, SULT2A1, TAT, TDO2, TMEM135, TNFSF11, and VLDLR as shown in Example 2.

[0515] Table 34 compares results of qRT-PCR for genes that were observed to have an at least 2-fold change in expression in the RNA-seq results in Table 33.

TABLE 34
Comparison of fold change in gene expression measured by RNA-seq and qRT-PCR

| Cmpd | | | RNA-seq fold Δ | Expected fold | Cmpd | | | RNA-seq fold Δ | Expected fold |
|---|---|---|---|---|---|---|---|---|---|
| (MT-) | Gene | Fold Δ | (Log2) | Δ | (MT-) | Gene | Fold Δ | (Log2) | A |
| 51 | ACAT2 | 2.87 | 1.22 | 2.33 | 861 | HPGD | 1.28 | 2.07 | 4.20 |
| 51 | CYP7A1 | 0.85 | −1.42 | 0.37 | 861 | NCF2 | 0.76 | −1.71 | 0.31 |
| 51 | HMGCR | 4.02 | 1.26 | 2.39 | 861 | RMRP | 0.79 | −1.43 | 0.37 |
| 51 | PCSK9 | 5.76 | 1.07 | 2.10 | 861 | SLC37A4 | 1.99 | 1.16 | 2.23 |
| 51 | TNFS11 | 1.01 | 1.09 | 2.13 | 861 | TAT | 9.55 | 2.37 | 5.17 |
| 361 | ACADVL | 2.05 | 1.38 | 2.60 | 861 | TDO2 | 2.66 | 1.05 | 2.07 |
| 361 | ACSL1 | 4.06 | 1.55 | 2.93 | 861 | ANGPTL2 | 1.00 | −1.22 | 0.43 |
| 361 | CIDEC | 0.77 | 1.21 | 2.31 | 861 | LPIN2 | 1.45 | 1.93 | 3.81 |
| 361 | CPT1A | 2.19 | 1.43 | 2.69 | 741 | RMRP | 0.71 | −1.45 | 0.37 |
| 361 | CPT2 | 13.5 | 1.07 | 2.10 | 901 | AGTR1 | 0.78 | 1.10 | 2.14 |
| 361 | CYP3A4 | 2.13 | 1.02 | 2.03 | 901 | ALAS1 | 1.23 | 1.45 | 2.73 |
| 361 | ECH1 | 1.41 | 1.38 | 2.60 | 901 | CA12 | 1.44 | 1.53 | 2.89 |
| 361 | ETFDH | 1.64 | 1.09 | 2.13 | 901 | CYP2C19 | 0.77 | 1.75 | 3.36 |
| 361 | FABP1 | 1.92 | 1.58 | 2.99 | 901 | CYP3A4 | 2.83 | 3.21 | 9.25 |
| 361 | HMGCS2 | 1.14 | 1.24 | 2.36 | 901 | CYP7A1 | 0.32 | −1.27 | 0.41 |
| 361 | POR | 3.17 | 1.62 | 3.07 | 901 | ENO3 | 0.96 | −1.13 | 0.46 |
| 361 | SLC25A20 | 1.17 | 1.22 | 2.33 | 901 | POR | 1.11 | 1.13 | 2.19 |
| 361 | SULT2A1 | 5.09 | 1.10 | 2.14 | 901 | SLC51B | 3.28 | 1.02 | 2.03 |
| 361 | TMEM135 | 2.06 | 1.02 | 2.03 | 901 | SLC6A20 | 0.89 | 1.03 | 2.04 |
| 361 | VLDLR | 4.12 | 1.41 | 2.66 | 901 | SLC6A6 | 0.91 | 1.28 | 2.43 |
| 361 | AGPAT2 | 0.23 | 1.08 | 2.11 | 901 | VLDLR | 1.54 | 1.69 | 3.23 |
| 361 | ACSL5 | 1.70 | 1.04 | 2.06 | 312 | RMRP | 0.43 | −2.27 | 0.21 |
| 277 | RMRP | 2.55 | 1.55 | 2.93 | 372 | ALAS1 | 1.53 | 1.87 | 3.66 |
| 277 | CYP7A1 | 0.65 | −1.24 | 0.42 | 372 | CA12 | 2.00 | 1.15 | 2.22 |
| 277 | RMRP | 2.35 | −1.74 | 0.30 | 372 | CYP3A4 | 2.08 | 2.60 | 6.06 |
| 641 | RMRP | 1.21 | −1.59 | 0.33 | 372 | CYP7A1 | 0.34 | −1.60 | 0.33 |
| 152 | CIDEC | 0.50 | −1.22 | 0.43 | 372 | ENO3 | 0.91 | −1.09 | 0.47 |
| 152 | HMOX1 | 6.16 | 1.66 | 3.16 | 372 | GLA | 1.00 | 1.15 | 2.22 |
| 152 | LDHA | 0.82 | −1.49 | 0.36 | 372 | MOGAT2 | 0.28 | −1.14 | 0.45 |
| 152 | AHSG | 1.28 | −1.08 | 0.47 | 372 | POR | 1.52 | 1.44 | 2.71 |
| 152 | ANGPTL2 | 1.16 | −1.36 | 0.39 | 372 | VLDLR | 2.40 | 1.23 | 2.35 |
| 861 | AMACR | 0.78 | −1.40 | 0.38 | 372 | AHSG | 1.18 | −1.23 | 0.43 |
| 861 | ARG1 | 2.88 | 1.48 | 2.79 | 662 | RMRP | 1.18 | −1.04 | 0.49 |
| 861 | CA2 | 0.93 | −1.05 | 0.48 | 127 | RMRP | 0.88 | 2.44 | 5.43 |
| 861 | CIDEC | 2.15 | 1.02 | 2.03 | 209 | SLC6A6 | 2.02 | 1.45 | 2.73 |
| 861 | CSP1 | 1.52 | 2.14 | 4.41 | 713 | RMRP | 1.28 | 1.57 | 2.97 |
| 861 | CYP21A1 | 0.93 | −1.35 | 0.39 | 308 | ALAS1 | 2.30 | 1.27 | 2.41 |
| 861 | CYP3A4 | 2.46 | 1.98 | 3.94 | 308 | CYP2C19 | 1.17 | 1.00 | 2.00 |
| 861 | ENO3 | 0.98 | −1.24 | 0.42 | 308 | CYP3A4 | 2.26 | 2.65 | 6.28 |
| 861 | G6PC | 1.69 | 1.02 | 2.03 | 308 | CYP7A1 | 0.42 | −1.21 | 0.43 |
| 861 | GYS2 | 1.64 | 2.21 | 4.63 | 308 | GHR | 0.70 | −1.07 | 0.48 |
| 861 | HGD | 1.41 | 1.23 | 2.35 | 308 | POR | 3.01 | 1.44 | 2.71 |
| 861 | HOGA1 | 2.77 | 1.00 | 2.00 | 308 | SLC2A2 | 0.58 | −1.02 | 0.49 |

| | | | | |
|---|---|---|---|---|
| 308 | VLDLR | 2.48 | 1.47 | 2.77 |

[0516] FIG. 9 shows a comparison between DAG expression measured by RNA-seq and qRT-PCR. The scatterplot showed a correlation of 0.61 among the values.

### Example 4. Perturbing Genomic Signaling Centers (GSCs) of Hepatocytes with Failed Phase III Compounds

[0517] Forty-five compounds were identified that faded in clinical evaluation due to lack of efficacy as additional perturbation stimuli for hepatocytes. Table 35 shows the targets and associated pathway for each Phase III failure compound.

TABLE 35
Analyzed Phase III failure compounds

| ID | Compound | Target | Pathway |
|---|---|---|---|
| 41 | Enzastaurin | PKC | Epigenetics TGF-beta/Smad |
| 42 | DMXAA | Unclear | Tumor necrosis |
| 43 | BSI-201 | PARP | Cell Cycle/DNA Damage Epigenetics |
| 44 | Darapladib | Phospholipase | Others |
| 45 | Selumetinib | MEK | MAPK/ERK Pathway |
| 46 | Peramivir (trihydrate) | Influenza Virus | Anti-infecticn |
| 47 | Palifosfamide | DNA alkylator/crosslinker | Cell Cycle/DNA Damage |
| 48 | Evacetrapib | CETP | Others |
| 49 | Cediranib | VEGFR | Protein Tyrosine Kinase/RTK |
| 50 | R788 (fostamatinib, disodium | Syk | Protein Tyrosine Kinase/RTK |
| | hexahydrate) | | |
| 51 | Torcetrapib | CETP | Others |
| 52 | Tivozanib | VEGFR | Protein Tyrosine Kinase/RTK |
| 53 | 17-AAG (Tanespimycin) | HSP | Cell Cycle/DNA Damage Metabolic |
| | | | Enzyme/Protease |
| 54 | Zibotentan | Endothelin Receptor | GPCR/G protein |
| 55 | Semagacestat | γ-secretase | Neuronal Signaling Stem Cells/Wnt |
| 56 | Dalcetrapib | CETP | Others |
| 57 | Latrepirdine (dihydrochleride) | AMPK | Epigenetics PI3K/Akt/mTOR |
| 58 | CMX001 (Brincidofovir) | CMV | Anti-infecticn |
| 59 | Vicriviroc (maleate) | CCR | GPCR/G protein Immunology/Inflammation |
| 60 | Temsirolimus | mTOR | PI3K/Akt/mTOR |
| 61 | Preladenant | Adenosine Receptor | GPCR/G protein |
| 62 | EVP-6124 (hydrochloride) | nAChR | Membrane Transporter/Ion Channel |
| | (encenicline) | | |
| 63 | Bitopertin | GlyT1 | Membrane Transporter/Ion Channel |
| 64 | Latrepirdine (dihydrochloride) | AMPK | Epigenetics PI3K/Akt/mTOR |
| 65 | Vanoxerine (dihydrochloride) | Dopamine Reuptake Inhibitor | Neuronal Signaling |
| 66 | CO-1686 (Rociletinib) | EGFR | JAK/STAT Signaling Protein |
| | | | Tyrosine Kinase/RTK |
| 67 | Laropiprant (tredaptive) | Prostaglandin Receptor | GPCR/G protein |
| 68 | Bardoxolone | Keap1-Nrf2 | NF-κB |
| 69 | VX-661 (tezacaptor) | CFTR | Membrane Transporter/Ion Channel |
| 70 | INNO-206 (aldoxorubicin) | Topoisomerase | Cell Cycle/DNA Damage |
| 71 | LY404039 (pomaglumetad | mGluR | GPCR/G protein |
| | methionil (mGlu2/3)) | | |
| 72 | Perifosine (KRX-0401) | AKT | Akt |
| 73 | Cabozantinib (XL184, BMS-907351) | VEGFR2, MET, Ret, Kit, | MET |
| | | Flt-1/3/4, Tie2, and AXL | |
| 74 | Dacomitinib (PF299804, PF299) | EGFR, ErbB2, ErbB4 | AKT/ERK, HER |
| 75 | Pacritinib (SB1518) | FLT3, JAK2, TYK2, JAK3, JAK1 | JAK-STAT |
| 76 | TH-302 (Evofosfamide) | hypoxic regions | Unclear |
| 77 | α-PHP | Unclear | Unclear |
| 78 | LY 2140023 (Pomaglumetad | mGlu₂ & mGlu₃ | Gαi/o protein-dependent |
| | methionil-LY404039) | | |
| 79 | TP-434 (Eravacycline) | Antibiotic resistance mechanisms | Tetracycline-specific efflux |
| 80 | TC-5214 (S-(+)-MecaMylaMine | Nicotinic acetylcholine receptors | Base excision repair and |
| | Hydrochloride) | | homologous recombination repair |
| 81 | Rolofylline (KW-3902) | A1 adenosine receptor | Unclear |
| 82 | Amigal (Deoxygalactonojirimycin | a-galactosidase | Stress signaling |
| | hydrochloride) | | |
| 83 | NOV-002 (oxidized L-Glutathione) | gamma-glutamyl-transpeptidase (GGT) | Glutathione pathway |
| 84 | bms-986094 (inx-189) | NS5B | Unclear |
| 85 | TC-5214 (R-Mecamylamine | Nicotinic receptors | Base excision repair and |
| | hydrochloride) | | homologous recombination repair |

[0518] A. RNA-Seq Results

[0519] RNA-seq was performed to determine the effects of the compounds on hepatocytes. RNA-seq results were observed to have a 0.99 Pearson correlation for the replicates for each compound having at least 20 million reads each. The mapping ratio was greater than 80% for these reads. Table 36 contains the RNA-seq results for these compounds.

TABLE 36
RNA-seq results for Phase III failure compounds

| Gene | 41 | 43 | 44 | 45 | 46 | 47 | 49 | 50 | 51 | 52 | 53 |
|---|---|---|---|---|---|---|---|---|---|---|---|
| A1BG | 0.13 | −0.21 | 0.01 | 0.00 | 0.02 | −0.13 | 0.15 | 0.01 | −0.38 | 0.51 | −0.10 |
| AARS2 | 0.03 | 0.04 | −0.22 | 0.03 | 0.27 | 0.26 | −0.35 | 0.16 | 0.09 | −0.79 | 0.38 |
| AASS | −0.71 | 0.00 | −0.16 | −0.20 | −0.12 | −0.02 | −0.64 | 0.56 | 0.00 | −1.09 | 0.67 |
| ABAT | −0.94 | −0.22 | −0.63 | −0.26 | −0.09 | −0.13 | −1.60 | −0.28 | 0.30 | −1.69 | −0.05 |
| ABCA1 | −0.31 | −0.05 | −0.69 | 0.21 | −0.04 | 0.07 | −1.68 | 0.15 | 0.73 | −1.14 | 0.71 |
| ABCB11 | −1.34 | 0.49 | −0.47 | 0.41 | 0.20 | 0.04 | −1.44 | 0.21 | 0.51 | −1.28 | 3.63 |
| ABCB4 | −0.92 | −0.15 | −0.13 | −0.02 | 0.01 | −0.22 | −1.21 | 0.29 | 0.38 | −0.14 | 0.90 |
| ABCC2 | −0.06 | 0.34 | −0.08 | 0.08 | 0.02 | −0.02 | −0.57 | 0.31 | 0.60 | −1.42 | 1.54 |
| ABCC3 | −0.02 | 0.30 | −0.11 | 0.29 | 0.32 | 0.18 | −0.68 | −0.32 | 0.23 | −1.31 | −0.57 |
| ABCC6 | −0.86 | 0.07 | −0.13 | 0.69 | 0.47 | 0.18 | −0.59 | 1.23 | 0.36 | −0.60 | 0.52 |
| ABCD1 | −0.68 | −0.12 | −0.45 | 0.15 | 0.25 | 0.26 | −0.75 | −0.10 | 0.12 | −1.52 | −0.16 |
| ABCD3 | −0.96 | −0.21 | −0.73 | −0.26 | −0.28 | −0.23 | −0.83 | 0.17 | 0.01 | −1.27 | 0.74 |
| ABCG5 | −0.76 | 0.14 | −0.07 | 0.04 | 0.09 | 0.03 | −0.49 | 0.59 | −0.02 | −0.77 | −0.46 |
| ABCG8 | −1.08 | −0.02 | −0.49 | −0.09 | 0.06 | 0.02 | −0.93 | 0.96 | −0.02 | −1.36 | 0.68 |
| ABHD5 | 0.25 | −0.15 | 0.39 | 0.13 | −0.22 | −0.12 | 0.97 | −0.35 | 0.09 | 1.29 | 1.17 |
| ACACA | 0.61 | 0.11 | 0.48 | −0.15 | 0.04 | 0.07 | −0.50 | 0.42 | 0.58 | −0.95 | 0.97 |
| ACACB | −0.80 | 0.06 | 0.30 | 0.43 | 0.36 | 0.02 | 0.06 | 1.01 | 0.12 | 0.62 | 1.54 |
| ACAD9 | 0.04 | −0.13 | −0.09 | −0.03 | 0.00 | −0.05 | −0.28 | 0.24 | 0.05 | −1.12 | −0.22 |
| ACADSB | −0.67 | −0.21 | −0.54 | −0.33 | −0.29 | −0.14 | −0.74 | 0.74 | 0.27 | −0.38 | 1.23 |
| ACADVL | −0.14 | 0.22 | 0.10 | 0.38 | 0.30 | 0.19 | −0.03 | 0.13 | −0.44 | −0.87 | −1.05 |
| ACOT8 | −0.46 | −0.21 | −0.10 | −0.20 | −0.13 | −0.19 | 0.11 | −0.09 | −0.50 | −0.03 | −0.43 |
| ACOX2 | −1.42 | −0.30 | −0.48 | −0.46 | −0.03 | −0.29 | −1.23 | 0.52 | −0.29 | −0.35 | 0.95 |
| ACOX3 | −0.13 | −0.10 | −0.60 | 0.31 | −0.01 | −0.04 | −0.22 | −0.58 | 0.14 | −0.39 | −0.81 |
| ACSF3 | 0.02 | −0.04 | 0.00 | −0.04 | 0.08 | 0.01 | −0.06 | 0.13 | −0.22 | −0.16 | −0.12 |
| ACSL1 | 0.30 | −0.10 | 0.45 | 0.24 | −0.03 | 0.00 | −0.03 | 0.76 | 0.33 | −0.03 | 1.10 |
| ACSL3 | −0.04 | −0.13 | 0.24 | −0.12 | −0.34 | −0.18 | −0.12 | 0.23 | 0.16 | 0.01 | 1.02 |
| ACTG2 | −1.22 | −1.12 | −1.36 | −1.48 | −1.66 | −1.64 | 1.03 | 1.20 | 2.16 | 0.67 | 1.83 |
| ACTN1 | −0.08 | 0.03 | −0.16 | 0.23 | −0.03 | 0.01 | −0.27 | −0.57 | 0.51 | −0.86 | −0.55 |
| ADA | −0.56 | −0.17 | −0.07 | −0.18 | 0.16 | −0.02 | −0.38 | −0.70 | −0.03 | −0.30 | −0.13 |
| ADCK3 | −1.19 | −0.07 | −0.42 | −0.25 | −0.02 | −0.03 | −0.37 | 0.71 | 0.00 | −0.48 | 1.04 |
| ADK | −0.07 | −0.33 | −0.44 | −0.42 | −0.46 | −0.35 | −0.32 | −0.28 | −0.38 | −0.22 | 0.06 |
| ADSL | −0.34 | −0.28 | −0.49 | −0.46 | −0.36 | −0.25 | −0.27 | −0.39 | −0.24 | −0.67 | −0.56 |
| AFP | −0.72 | −0.26 | −1.26 | −0.08 | −0.31 | −0.29 | 0.11 | −1.06 | −0.95 | −1.03 | 0.26 |
| AGK | 0.05 | −0.11 | −0.45 | −0.22 | −0.24 | −0.21 | −0.54 | −0.14 | 0.04 | −0.88 | 0.15 |
| AGL | −0.25 | −0.04 | −0.28 | −0.11 | −0.20 | −0.04 | −0.42 | 0.57 | 0.21 | −0.58 | 0.49 |
| AGPAT2 | −0.33 | −0.08 | 0.33 | 0.52 | 0.36 | 0.33 | 0.50 | −0.55 | −0.55 | 0.27 | −0.98 |
| AGPS | −0.81 | −0.21 | −0.38 | −0.33 | −0.31 | −0.19 | −0.86 | −0.19 | 0.32 | −1.03 | 0.20 |
| AGT | −0.05 | −0.24 | −0.20 | 0.03 | −0.08 | −0.13 | −0.34 | 0.27 | −0.30 | 0.03 | 0.08 |
| AGTR1 | −0.76 | −0.22 | −0.18 | −0.55 | −0.40 | −0.67 | −0.32 | 0.25 | −0.45 | −0.47 | −0.03 |
| AGXT | −0.27 | −0.06 | −0.38 | 0.22 | 0.44 | 0.30 | −0.23 | 0.45 | −0.25 | 0.04 | 0.27 |
| AHI1 | 0.25 | 0.33 | 0.12 | 0.01 | −0.18 | 0.06 | −0.17 | 0.39 | 0.19 | 0.24 | 0.39 |
| AHSG | −0.31 | −0.31 | −0.23 | −0.20 | 0.03 | −0.17 | −0.40 | 0.14 | −0.25 | 0.09 | 0.07 |
| AK1 | −0.71 | −0.22 | −0.25 | 0.01 | −0.06 | −0.02 | 0.26 | −0.42 | −0.58 | −0.10 | −1.12 |
| AKR1C1 | −1.80 | −0.12 | −0.30 | −0.09 | −0.24 | −0.16 | −0.29 | −0.46 | −0.53 | −0.90 | 0.55 |
| AKR1C2 | −1.87 | −0.05 | −0.22 | 0.17 | 0.07 | 0.05 | −0.53 | −0.30 | −0.34 | −1.14 | 0.87 |
| AKR1C4 | −2.28 | −0.34 | −1.37 | −0.30 | −0.41 | −0.56 | −0.89 | 0.84 | −0.68 | −1.22 | 0.94 |
| AKR1D1 | 1.94 | −0.11 | 1.24 | 0.62 | −0.04 | −0.12 | 0.36 | 1.67 | 0.14 | 0.98 | 2.91 |
| ALAD | −1.41 | −0.24 | −0.73 | 0.24 | 0.07 | −0.09 | −0.68 | 1.41 | 0.17 | −0.88 | 2.04 |
| ALAS1 | −0.37 | −0.03 | −0.27 | −0.07 | −0.13 | −0.04 | −0.19 | 0.60 | 0.30 | −0.82 | 2.49 |
| ALDH1B1 | −0.26 | −0.12 | −0.27 | 0.17 | 0.10 | 0.06 | 0.42 | 0.38 | 0.32 | −0.05 | 0.18 |
| ALDH2 | −0.39 | −0.20 | −0.21 | 0.10 | 0.07 | −0.01 | −0.11 | 0.26 | −0.28 | 0.18 | 0.22 |
| ALDH6A1 | −0.94 | −0.44 | −0.43 | −0.51 | −0.48 | −0.48 | −0.50 | 0.56 | −0.02 | 0.14 | 0.80 |
| ALDOA | 0.06 | 0.01 | 0.02 | 0.02 | 0.01 | 0.09 | −0.02 | −0.05 | −0.41 | −1.36 | −0.23 |
| ALDOB | 0.22 | −0.24 | −0.14 | 0.29 | −0.08 | −0.20 | −0.15 | 3.35 | −0.01 | 0.36 | 1.99 |
| ALG12 | −0.21 | −0.07 | −0.03 | −0.03 | 0.02 | 0.00 | −0.48 | 0.38 | −0.06 | −1.02 | 0.22 |
| ALMS1 | −0.07 | 0.03 | 0.18 | 0.02 | −0.05 | −0.11 | −0.42 | 0.03 | 0.80 | −0.65 | 0.99 |
| ALPL | −1.25 | 0.11 | 0.28 | 0.40 | −0.08 | −0.07 | −0.12 | 0.83 | −0.14 | −0.04 | 1.83 |
| AMACR | 0.90 | −0.32 | 0.06 | 0.18 | −0.17 | −0.11 | 0.84 | 0.47 | −0.05 | 0.00 | 0.36 |
| AMPD3 | −0.35 | 0.19 | 0.42 | 0.22 | 0.13 | −0.01 | −0.52 | −0.90 | 0.28 | −0.18 | 1.15 |
| AMT | −0.42 | −0.04 | −0.35 | 0.29 | 0.24 | 0.13 | −0.23 | −0.28 | −0.11 | 0.50 | 0.31 |
| ANGPTL3 | −2.31 | −0.14 | −1.20 | −0.67 | −0.42 | −0.28 | −1.40 | 0.24 | −0.46 | −1.56 | 0.06 |
| ANKS4B | −0.71 | −0.24 | −0.52 | −0.06 | −0.06 | −0.16 | −0.31 | 0.49 | −0.02 | −0.68 | 1.12 |
| ANKS6 | 0.10 | 0.04 | 0.11 | −0.02 | 0.15 | 0.12 | 0.09 | 0.03 | 0.19 | −0.21 | −0.15 |
| ANPEP | −0.52 | −0.09 | 0.11 | 0.04 | 0.07 | −0.12 | −0.85 | 0.49 | −0.19 | −1.04 | −0.06 |
| AOC2 | 0.11 | 0.36 | 0.28 | 0.28 | 0.42 | 0.34 | −0.47 | 0.64 | 0.53 | −0.20 | 0.24 |
| AP3B1 | −0.31 | −0.21 | −0.13 | −0.21 | −0.40 | −0.31 | −0.75 | −0.01 | 0.04 | −1.15 | 0.27 |
| APC | −0.11 | 0.04 | 0.11 | −0.04 | −0.20 | −0.05 | −0.11 | 0.35 | 0.47 | −0.32 | 0.58 |
| APOA1 | −0.02 | −0.26 | −0.16 | −0.05 | −0.02 | −0.13 | 0.41 | −0.18 | −0.67 | 0.73 | −0.47 |
| APOA2 | −0.48 | −0.52 | −0.33 | −0.45 | −0.52 | −0.53 | 0.16 | −0.31 | −0.76 | 0.31 | −0.64 |
| APOA5 | −0.04 | −0.17 | −0.19 | 0.13 | 0.13 | 0.00 | −0.08 | 0.97 | −0.36 | −0.09 | 0.07 |
| APOB | −0.19 | 0.03 | 0.54 | −0.10 | −0.10 | −0.23 | −0.99 | 1.87 | 0.90 | −0.40 | 2.13 |
| APOC2 | −0.56 | −0.28 | −0.28 | −0.12 | −0.17 | −0.25 | −0.17 | 0.14 | −0.85 | 0.11 | −0.59 |
| APOC3 | −0.15 | −0.42 | −0.41 | −0.10 | −0.06 | −0.18 | 0.16 | 0.49 | −0.56 | 0.50 | −0.21 |
| APOE | −0.02 | −0.24 | 0.00 | 0.04 | 0.04 | −0.13 | 0.42 | 0.11 | −0.78 | 0.68 | −0.32 |
| APRT | 0.06 | −0.04 | −0.23 | 0.06 | 0.23 | 0.26 | 0.19 | −0.41 | −0.55 | 0.00 | −1.15 |
| AQP7 | −1.99 | −0.17 | 0.16 | 0.14 | −0.41 | −0.35 | 0.82 | 1.66 | 0.64 | 0.50 | 1.89 |
| AQP9 | 0.08 | −0.22 | 0.41 | −0.06 | −0.29 | −0.25 | 0.06 | 0.21 | 0.23 | 0.56 | 0.36 |
| ARG1 | −0.26 | −0.20 | −0.64 | 0.17 | 0.02 | −0.13 | −0.34 | 3.76 | −0.20 | 0.74 | 1.93 |
| ARG2 | −0.79 | −0.10 | 0.33 | −0.64 | −0.34 | −0.35 | −0.69 | −0.23 | −0.03 | 0.47 | 0.98 |
| ARL13B | −0.40 | −0.06 | −0.10 | −0.19 | −0.24 | −0.10 | −0.21 | −0.40 | 0.01 | 0.16 | −0.51 |
| ARSA | 0.15 | 0.30 | 0.33 | 0.44 | 0.49 | 0.41 | 0.11 | 0.02 | −0.18 | −0.57 | −1.20 |
| ARSB | −0.15 | −0.11 | 0.09 | −0.35 | 0.03 | 0.05 | −0.93 | −0.13 | 0.16 | −1.00 | 0.05 |
| ASL | −0.20 | 0.01 | 0.27 | 0.01 | 0.25 | 0.17 | 0.03 | −0.02 | −0.27 | 0.18 | −0.43 |
| ASNS | 0.71 | −0.26 | 0.50 | 0.11 | −0.22 | −0.11 | 0.59 | −0.58 | 0.01 | 1.24 | 1.26 |
| ASPA | −1.73 | −0.02 | −0.59 | 0.56 | −0.10 | −0.25 | 0.67 | 1.23 | 0.05 | 0.69 | 0.76 |
| ASXL1 | −0.41 | 0.15 | −0.08 | 0.08 | 0.09 | 0.11 | −0.33 | −0.08 | 0.08 | −0.79 | 0.61 |
| ATG7 | −0.05 | −0.04 | −0.11 | −0.03 | −0.05 | 0.03 | −0.27 | −0.11 | −0.05 | −0.54 | −0.10 |
| ATIC | −0.17 | −0.15 | −0.48 | −0.39 | −0.26 | −0.18 | −0.46 | −0.25 | −0.19 | −0.83 | −0.42 |
| ATM | 0.35 | 0.17 | 0.12 | 0.13 | 0.16 | 0.15 | −0.30 | 0.52 | 0.66 | −0.13 | 0.54 |
| ATP7A | 0.13 | 0.02 | −0.02 | 0.05 | −0.27 | 0.00 | −0.20 | 0.10 | 0.35 | −0.61 | 0.45 |
| ATP7B | −0.16 | −0.04 | −0.19 | 0.01 | 0.00 | −0.02 | −0.83 | 0.66 | 0.43 | −1.57 | 0.52 |
| ATP8B1 | −0.33 | −0.13 | −0.03 | −0.16 | −0.26 | −0.18 | −0.32 | −0.63 | 0.51 | −0.59 | 0.28 |
| B2M | −0.26 | −0.51 | −0.16 | −0.36 | −0.52 | −0.48 | 0.04 | −0.13 | −0.32 | 0.13 | −0.56 |
| B9D2 | −0.61 | 0.25 | −0.32 | −0.16 | 0.35 | 0.39 | 0.51 | 0.04 | −0.17 | −0.21 | 0.27 |
| BAAT | 0.38 | −0.20 | 0.22 | 0.02 | −0.23 | −0.12 | 0.29 | 1.23 | 0.03 | −0.63 | 1.09 |
| BBOX1 | 0.24 | −0.42 | −0.66 | −0.15 | −0.71 | −0.57 | −0.62 | −0.52 | −0.82 | −0.31 | 1.23 |
| BBS10 | −0.41 | −0.24 | −0.41 | −0.24 | −0.36 | −0.16 | −0.88 | 0.09 | 0.27 | −0.81 | 0.28 |
| BCHE | −0.54 | −0.37 | −0.64 | −0.38 | −0.32 | −0.38 | −1.14 | 0.37 | −0.14 | −0.60 | 0.82 |
| BCKDHB | −0.29 | −0.11 | −0.57 | −0.13 | −0.10 | −0.03 | −0.47 | 0.43 | −0.12 | −0.42 | 0.08 |
| BCKDK | −0.10 | 0.01 | −0.13 | −0.20 | −0.14 | −0.05 | −0.35 | 0.20 | −0.17 | −1.15 | −0.42 |
| BCO1 | 0.19 | −0.20 | −0.24 | −0.14 | −0.07 | −0.05 | −0.71 | 0.33 | −0.43 | −1.83 | 0.69 |
| BCR | −0.26 | −0.10 | 0.03 | −0.13 | −0.02 | −0.02 | −0.45 | −0.25 | −0.01 | −0.96 | −0.12 |
| BLNK | 0.15 | −0.01 | 0.58 | 0.01 | −0.02 | −0.05 | 0.51 | 0.94 | 0.07 | 0.96 | 0.72 |
| BLOC1S3 | 0.20 | −0.12 | 0.30 | 0.17 | 0.01 | 0.11 | 0.00 | 0.45 | 0.09 | 0.04 | 0.27 |
| BMPR1A | −0.20 | −0.20 | −0.22 | −0.01 | −0.14 | −0.25 | −0.29 | 0.17 | 0.52 | −0.61 | 0.61 |
| BRAF | 0.09 | 0.00 | 0.05 | 0.07 | −0.13 | −0.25 | −0.36 | 0.19 | 0.39 | −0.45 | 1.19 |
| BSCL2 | −1.67 | −1.20 | −1.17 | −1.11 | −1.57 | −1.59 | 0.41 | 0.14 | −2.88 | 0.60 | −3.35 |
| BTD | −1.04 | −0.20 | −0.47 | −0.28 | −0.14 | −0.29 | −0.61 | 0.50 | 0.08 | −0.51 | 1.00 |
| C10orf10 | −1.11 | −0.30 | 0.08 | −0.01 | 0.08 | 0.00 | −0.19 | 0.17 | −0.33 | −0.70 | −0.55 |
| C10orf11 | 0.13 | −0.13 | 0.04 | 0.10 | −0.18 | −0.37 | 0.27 | −0.54 | −0.22 | 0.64 | −0.19 |
| C15orf41 | −0.17 | −0.39 | −0.35 | −0.38 | −0.25 | −0.26 | −0.16 | −0.11 | 0.16 | −0.44 | 0.62 |
| C4A | 0.43 | 0.22 | 0.27 | 0.72 | 0.79 | 0.40 | −1.01 | 0.58 | 0.68 | −1.15 | 0.09 |
| C9 | −0.58 | −0.42 | −0.46 | −0.44 | −0.57 | −0.55 | −0.71 | 0.24 | −0.01 | −0.63 | 0.34 |
| CA12 | −0.32 | −0.03 | 0.76 | 0.05 | −0.29 | −0.24 | 0.50 | −0.03 | 0.29 | 0.01 | 2.47 |
| CA2 | 1.28 | −0.29 | 0.46 | 0.04 | −0.12 | −0.18 | 1.36 | 1.51 | 0.28 | 0.82 | 1.63 |
| CA5A | −0.19 | −0.04 | −0.20 | 0.07 | 0.03 | 0.03 | −0.04 | 1.68 | −0.10 | −0.37 | 1.86 |
| CAV1 | −1.59 | −0.29 | −0.91 | −0.18 | −0.36 | −0.26 | −0.40 | −0.62 | 0.19 | −0.36 | −0.27 |
| CCND1 | 0.55 | 0.07 | −0.46 | −0.89 | −0.01 | 0.07 | −2.40 | −1.92 | 0.40 | −1.69 | −2.47 |
| CD320 | −0.15 | −0.14 | −0.13 | −0.27 | −0.01 | 0.09 | −0.15 | −0.66 | −0.62 | −0.41 | −1.02 |
| CD46 | −0.11 | −0.16 | 0.09 | −0.36 | −0.29 | −0.22 | −0.21 | 0.26 | 0.16 | 0.28 | 0.45 |
| CD81 | −0.10 | −0.24 | −0.16 | −0.16 | −0.08 | −0.17 | −0.06 | −0.24 | −0.41 | −0.05 | −0.42 |
| CDAN1 | −0.06 | 0.03 | 0.06 | 0.05 | 0.23 | 0.22 | −0.37 | 0.04 | 0.43 | −0.88 | 0.36 |
| CDH1 | −1.52 | −0.15 | −0.34 | −0.13 | 0.05 | −0.23 | −0.87 | 0.60 | 0.34 | −0.22 | 0.67 |
| CEP164 | 0.27 | 0.30 | 0.13 | 0.31 | 0.39 | 0.32 | −0.09 | −0.10 | 0.03 | −0.74 | −0.77 |
| CEP19 | −0.44 | −0.08 | −0.17 | −0.38 | −0.09 | −0.18 | −0.36 | −0.30 | −0.31 | −0.17 | −0.96 |
| CEP290 | 0.50 | 0.08 | −0.15 | −0.18 | −0.30 | −0.14 | −0.02 | −0.36 | −0.07 | 0.31 | 0.11 |
| CEP83 | 0.74 | −0.05 | −0.18 | −0.23 | −0.20 | −0.26 | −0.10 | 0.29 | 0.20 | −0.27 | −0.07 |
| CFB | −0.12 | −0.22 | 0.09 | −0.01 | −0.13 | −0.26 | −0.47 | 0.30 | −0.08 | −0.15 | 0.05 |
| CFHR2 | −0.65 | −0.53 | −0.70 | −0.30 | −0.38 | −0.35 | −0.41 | 0.35 | −0.57 | 0.17 | 0.14 |
| CHRM3 | 0.93 | 0.16 | 0.31 | −0.37 | −0.12 | −0.22 | −0.35 | 0.13 | −0.27 | −0.94 | 0.76 |
| CIDEC | −1.60 | −0.27 | −0.87 | 0.45 | −0.45 | 0.05 | −0.44 | −0.66 | −0.44 | −1.36 | 0.12 |
| CLDN1 | −1.33 | −0.17 | −0.72 | −0.62 | −0.36 | −0.33 | −1.35 | −0.58 | −0.06 | −1.39 | −1.24 |
| COG1 | −0.20 | 0.03 | −0.15 | −0.14 | −0.10 | −0.08 | −0.60 | 0.08 | 0.06 | −1.16 | 0.26 |
| COG5 | −0.13 | −0.02 | −0.19 | −0.25 | −0.36 | −0.14 | −0.41 | −0.05 | 0.19 | −0.38 | 0.44 |
| COG6 | −0.43 | −0.22 | −0.13 | −0.42 | −0.54 | −0.34 | −0.32 | 0.32 | 0.25 | 0.09 | 1.17 |
| COL1A1 | −0.30 | 0.04 | 0.63 | 1.13 | 0.33 | 0.17 | −0.59 | −0.31 | 0.07 | −1.24 | 0.13 |
| COX6A1 | −0.13 | −0.31 | −0.13 | 0.18 | 0.39 | 0.18 | 0.12 | −0.26 | −0.83 | 0.24 | −0.78 |
| CP | −0.08 | 0.00 | 0.92 | −0.06 | −0.09 | −0.32 | −0.76 | 0.74 | 0.46 | −0.02 | 1.25 |
| CPS1 | 0.00 | −0.26 | −0.80 | 0.21 | 0.01 | −0.23 | −0.88 | 5.91 | 0.23 | −0.46 | 3.68 |
| CPT1A | −1.00 | 0.15 | 0.21 | 0.12 | −0.10 | −0.21 | 0.08 | 0.15 | −0.41 | −0.82 | −1.07 |
| CPT2 | −0.31 | −0.13 | −0.30 | −0.10 | −0.19 | −0.14 | −0.16 | 0.47 | −0.28 | −0.46 | −0.31 |
| CROT | −1.01 | −0.23 | −0.73 | −0.09 | −0.25 | −0.11 | −0.63 | −0.09 | −0.01 | −0.70 | 0.14 |
| CSPP1 | 0.38 | 0.21 | 0.30 | 0.04 | −0.06 | 0.03 | −0.13 | −0.09 | −0.17 | −0.16 | 0.08 |
| CTC1 | 0.47 | 0.08 | 0.14 | 0.01 | 0.10 | 0.08 | −0.12 | 0.51 | 0.53 | −0.59 | −0.17 |
| CTDSP2 | −1.09 | −0.21 | 0.11 | 0.08 | 0.00 | −0.07 | −0.45 | 0.46 | 0.20 | −0.52 | 0.81 |
| CTH | 0.54 | −0.07 | 0.71 | 0.24 | 0.06 | 0.03 | 0.61 | 0.64 | −0.16 | 1.68 | 2.18 |
| CTNS | 0.65 | 0.15 | 0.59 | −0.17 | −0.25 | −0.14 | 0.52 | 0.21 | 0.14 | 0.03 | −0.32 |
| CTSF | −0.60 | −0.08 | 0.26 | 0.15 | 0.21 | 0.09 | 0.15 | 0.05 | −0.28 | 0.50 | 0.31 |
| CTSK | −0.08 | 0.09 | 0.31 | 0.14 | 0.28 | 0.10 | 0.25 | 0.66 | 0.38 | −0.60 | −0.60 |
| CYB5A | −0.08 | −0.14 | −0.35 | 0.08 | 0.01 | −0.04 | 0.07 | 0.95 | 0.13 | 0.37 | 0.84 |
| CYB5R3 | −0.31 | −0.15 | 0.08 | 0.07 | 0.00 | 0.05 | −0.38 | 0.23 | 0.00 | −1.02 | −0.08 |
| CYP27A1 | −0.56 | −0.28 | −0.17 | −0.03 | −0.21 | −0.30 | −0.23 | 0.71 | −0.02 | 0.13 | 0.29 |
| CYP2B6 | 0.42 | 0.07 | −0.12 | 0.38 | 0.07 | 0.03 | −0.46 | 0.55 | 0.36 | 0.16 | 1.32 |
| CYP2C19 | 0.47 | 0.30 | −0.01 | 0.76 | 0.25 | 0.12 | −0.80 | 0.61 | 0.61 | −1.36 | 0.34 |
| CYP2D6 | −0.28 | −0.15 | −0.21 | 0.03 | 0.24 | 0.10 | −0.12 | 0.31 | −0.16 | 0.21 | 0.06 |
| CYP39A1 | −1.39 | −0.20 | −0.23 | −0.27 | −0.20 | −0.43 | −0.61 | 1.11 | 0.03 | 0.94 | 1.38 |
| CYP3A4 | 0.22 | −0.46 | −0.47 | 0.08 | −0.53 | −0.49 | −0.75 | 3.59 | 1.87 | 0.50 | 2.50 |
| CYP7B1 | 0.06 | 0.03 | −0.03 | −0.15 | −0.16 | −0.21 | −0.93 | 0.59 | 0.26 | −1.02 | 0.43 |
| DAO | −0.27 | −0.34 | 0.04 | −0.34 | 0.00 | −0.04 | −0.61 | 0.69 | −0.33 | −0.04 | 0.33 |
| DBT | −0.39 | −0.21 | −0.22 | −0.18 | −0.24 | −0.13 | −0.39 | 0.41 | 0.34 | 0.00 | 1.12 |
| DCDC2 | −0.58 | −0.59 | −1.41 | −0.56 | −0.04 | −0.18 | −1.44 | −0.45 | 0.27 | −2.42 | −0.55 |
| DCXR | −0.48 | −0.32 | −0.59 | −0.29 | −0.20 | −0.24 | 0.06 | 0.06 | −0.63 | 0.36 | −0.31 |
| DDC | −0.14 | −0.22 | −0.97 | −0.28 | −0.41 | −0.24 | −1.20 | 0.24 | −0.52 | −0.99 | 0.41 |
| DDO | 0.14 | −0.22 | −0.36 | −0.08 | 0.12 | −0.04 | −0.55 | 0.41 | −0.12 | −1.46 | 0.40 |
| DENR | −0.25 | −0.18 | −0.37 | −0.37 | −0.36 | −0.18 | −0.16 | −0.59 | −0.24 | −0.33 | −0.35 |
| DHCR24 | −0.48 | −0.14 | 0.32 | −0.42 | −0.16 | −0.20 | −0.51 | −0.05 | 0.24 | −0.94 | 1.34 |
| DHCR7 | 0.60 | 0.01 | 1.00 | −0.02 | 0.04 | 0.05 | 0.49 | 0.07 | 0.15 | 0.23 | 1.21 |
| DHODH | 0.36 | 0.01 | −0.35 | −0.03 | 0.27 | 0.20 | −0.38 | −0.04 | −0.20 | −0.52 | −0.39 |
| DIS3L2 | −0.05 | −0.13 | −0.37 | −0.22 | −0.14 | −0.14 | −0.59 | 0.10 | 0.27 | −1.20 | 0.49 |
| DKC1 | 0.17 | −0.04 | −0.40 | −0.29 | −0.11 | −0.05 | −0.27 | −0.45 | −0.21 | −0.39 | −0.57 |
| DLAT | 0.17 | −0.09 | −0.10 | −0.02 | −0.15 | −0.01 | 0.15 | −0.13 | −0.01 | −0.64 | −0.08 |
| DLD | −0.67 | −0.23 | −0.35 | −0.25 | −0.35 | −0.20 | −0.48 | 0.04 | −0.01 | −1.04 | 0.00 |
| DMGDH | −0.58 | −0.15 | −0.59 | −0.13 | −0.11 | −0.16 | −0.80 | 0.68 | 0.20 | −0.39 | 1.01 |
| DNAH5 | −0.76 | 0.11 | −0.06 | −0.11 | −0.05 | −0.12 | −0.46 | −0.59 | 0.53 | −0.02 | −0.41 |
| DNM1L | −0.54 | −0.15 | −0.26 | −0.20 | −0.28 | −0.18 | −0.37 | 0.00 | 0.19 | −1.03 | 0.24 |
| DOLK | −0.05 | −0.03 | 0.04 | −0.05 | 0.09 | 0.06 | −0.22 | 0.06 | −0.09 | −0.83 | −0.66 |
| DPM3 | −0.02 | −0.33 | 0.02 | −0.05 | −0.11 | −0.18 | 0.91 | −0.35 | −0.65 | 1.21 | −0.43 |
| DPYD | −0.66 | −0.17 | −0.29 | −0.08 | −0.21 | −0.22 | −0.89 | 0.63 | 0.43 | −0.45 | 1.00 |
| DPYS | −1.05 | −0.12 | −0.65 | −0.10 | −0.01 | −0.18 | −1.15 | 0.87 | −0.15 | −0.68 | 0.89 |
| EARS2 | 0.28 | 0.12 | −0.24 | 0.04 | 0.04 | 0.15 | −0.56 | −0.01 | 0.34 | −0.90 | 1.07 |
| EDA | 0.59 | 0.00 | 0.72 | −0.28 | −0.03 | 0.01 | 0.24 | 0.37 | 0.72 | 0.92 | 1.35 |
| EHHADH | −0.36 | −0.21 | −0.50 | −0.02 | −0.10 | −0.14 | −0.60 | 1.17 | 0.11 | −0.55 | 0.67 |
| ELAC2 | −0.29 | −0.08 | −0.29 | −0.25 | −0.15 | −0.09 | −0.36 | 0.06 | −0.18 | −1.27 | −0.29 |
| ENO3 | −0.53 | −0.03 | −0.11 | 0.64 | 0.30 | 0.20 | −0.63 | −0.61 | −0.44 | −0.94 | −1.63 |
| ENPP1 | 0.16 | −0.13 | −0.16 | 0.06 | −0.28 | −0.33 | −0.21 | 0.83 | 0.31 | 0.00 | 1.38 |
| EPG5 | 0.33 | 0.05 | 0.65 | 0.11 | 0.13 | 0.09 | 0.12 | 0.38 | 0.63 | −0.40 | 1.37 |
| EPHX1 | −0.34 | −0.10 | −0.36 | −0.03 | −0.26 | −0.30 | −0.54 | 0.55 | −0.07 | −0.62 | 1.45 |
| ERCC4 | 0.13 | −0.01 | 0.06 | −0.13 | −0.23 | −0.11 | −0.08 | −0.05 | 0.21 | 0.02 | 0.02 |
| ERCC6 | −0.23 | 0.01 | 0.07 | 0.12 | 0.05 | 0.07 | −0.41 | 0.38 | 0.42 | −0.49 | 1.24 |
| ETFB | −0.63 | −0.11 | −0.24 | 0.02 | 0.23 | 0.13 | 0.04 | −0.35 | −0.56 | 0.16 | −0.56 |
| ETHE1 | 0.54 | −0.18 | 0.10 | 0.12 | 0.31 | 0.03 | −0.19 | 0.15 | −0.34 | 0.14 | −0.86 |
| F2 | −0.23 | −0.18 | 0.14 | 0.22 | 0.11 | −0.02 | −0.48 | −0.07 | −0.15 | −0.30 | 0.01 |
| F2RL1 | −0.16 | −0.47 | 0.00 | −0.79 | −0.53 | −0.49 | −0.29 | −0.87 | −0.34 | −0.03 | −0.23 |
| F5 | −0.13 | 0.01 | 0.10 | 0.06 | −0.08 | −0.16 | −1.17 | 0.83 | 0.36 | −0.68 | 1.01 |
| F9 | −0.62 | −0.33 | −0.46 | −0.40 | −0.53 | −0.40 | −0.77 | 0.32 | 0.11 | −0.51 | 0.54 |
| FABP1 | −0.85 | −0.36 | −0.59 | 0.48 | 0.73 | 0.44 | 0.31 | −0.14 | −0.84 | 0.71 | −0.51 |
| FADD | −0.35 | −0.16 | −0.16 | −0.27 | −0.14 | −0.16 | −0.13 | −0.69 | −0.49 | −0.29 | −1.26 |
| FAM111A | 0.44 | 0.05 | 0.02 | 0.05 | −0.08 | −0.03 | 0.17 | 0.54 | 0.47 | −0.20 | 0.55 |
| FAM111B | 0.70 | 0.78 | −0.81 | −1.74 | 0.11 | 1.01 | −2.18 | −1.87 | −0.29 | −2.22 | −2.06 |
| FAN1 | 0.28 | 0.07 | −0.25 | −0.20 | −0.06 | 0.08 | −0.32 | 0.46 | 0.47 | −0.43 | 0.02 |
| FARS2 | −0.30 | −0.13 | −0.16 | −0.28 | −0.22 | −0.16 | −0.29 | −0.29 | −0.30 | −0.41 | −0.44 |
| FASLG | 0.02 | 0.55 | 0.02 | 0.45 | 1.15 | 0.91 | −0.64 | −1.35 | 0.07 | −1.93 | 1.73 |
| FGA | −1.25 | −0.40 | −0.74 | −0.34 | −0.25 | −0.37 | −1.10 | 2.03 | −0.25 | −1.19 | 1.39 |
| FGD1 | −0.89 | −0.16 | −0.39 | −0.18 | −0.25 | −0.14 | −0.21 | −0.60 | 0.10 | −1.11 | 1.43 |
| FGFR2 | −2.50 | −0.50 | −0.53 | −0.45 | −0.13 | −0.50 | −1.14 | 0.76 | 0.14 | 0.08 | 1.21 |
| FIG4 | 0.00 | −0.18 | 0.19 | −0.21 | −0.30 | −0.26 | 0.05 | 0.09 | 0.13 | −0.59 | 0.69 |
| FIS1 | −0.10 | −0.09 | −0.01 | 0.14 | 0.44 | 0.35 | 0.14 | −0.33 | −0.59 | −0.16 | −0.68 |
| FTCD | 0.20 | 0.22 | 0.40 | 0.31 | 0.58 | 0.30 | 0.29 | −0.25 | −0.26 | −0.24 | −0.18 |
| FTH1 | −0.08 | 0.00 | 0.59 | 0.00 | −0.04 | −0.02 | 0.58 | −0.29 | −0.76 | 0.39 | 0.09 |
| FUCA1 | −0.42 | −0.31 | −0.29 | −0.30 | −0.23 | −0.27 | −0.53 | 0.26 | −0.29 | −0.59 | 0.22 |
| FXN | −0.56 | −0.24 | −0.61 | −0.70 | −0.69 | −0.54 | −0.41 | −0.27 | −0.48 | −0.02 | −0.38 |
| G6PC | −1.03 | −0.02 | 0.44 | 0.50 | 0.23 | −0.33 | −0.35 | 4.61 | 0.35 | 0.14 | 3.65 |
| G6PC3 | −0.04 | 0.17 | −0.32 | −0.08 | 0.06 | 0.04 | −0.29 | −0.48 | −0.32 | −0.99 | −1.43 |
| G6PD | 0.63 | 0.31 | 0.29 | 0.07 | 0.08 | −0.04 | −0.38 | 0.01 | −0.26 | −1.72 | −0.71 |
| GALK1 | −0.18 | 0.02 | 0.11 | 0.00 | 0.18 | 0.15 | 0.08 | −0.33 | −0.51 | 0.43 | −1.11 |
| GALK2 | −0.16 | −0.18 | 0.02 | −0.17 | −0.13 | −0.21 | 0.33 | 0.26 | −0.24 | 0.30 | −0.06 |
| GALT | −0.21 | 0.07 | 0.35 | 0.11 | 0.15 | −0.09 | 0.36 | 0.75 | −0.25 | −0.36 | −0.36 |
| GATA6 | −0.49 | −0.15 | −0.10 | 0.31 | −0.08 | −0.01 | −0.20 | −0.60 | −0.30 | −0.65 | −1.04 |
| GATM | −0.91 | −0.33 | −0.72 | 0.09 | −0.37 | −0.33 | −0.46 | 0.19 | 0.03 | −0.42 | 0.15 |
| GBA | 0.14 | −0.11 | 0.36 | −0.11 | −0.19 | −0.18 | −0.36 | 0.03 | −0.01 | −1.35 | −0.10 |
| GBE1 | −0.47 | −0.05 | 0.19 | 0.01 | −0.20 | −0.09 | 0.62 | −0.38 | −0.05 | −0.21 | 0.98 |
| GCH1 | −0.65 | −0.14 | −0.14 | −0.33 | −0.27 | −0.19 | −0.10 | 0.85 | −0.07 | −0.15 | −0.57 |
| GCKR | 0.42 | 0.32 | 0.74 | −0.03 | 0.29 | 0.21 | −0.40 | 0.04 | −0.09 | −0.70 | 1.55 |
| GCLC | −0.60 | −0.13 | −0.17 | −0.02 | −0.18 | −0.12 | 0.26 | 0.14 | −0.06 | −0.22 | 1.20 |
| GOSH | −0.07 | −0.27 | −0.75 | −0.25 | −0.17 | 0.14 | −0.32 | −0.60 | −0.65 | −0.14 | −0.86 |
| GGCX | −0.67 | −0.06 | −0.31 | 0.07 | 0.10 | 0.00 | −1.01 | 0.58 | 0.13 | −1.08 | −0.02 |
| GHR | −1.85 | −0.41 | −0.90 | −0.20 | −0.27 | −0.40 | −1.33 | 0.58 | 0.07 | −1.23 | 0.41 |
| GJB2 | −0.88 | −0.11 | −0.28 | −0.29 | −0.37 | −0.34 | −0.26 | 0.25 | −0.03 | −0.63 | −0.67 |
| GLDC | −0.31 | −0.11 | −0.76 | −0.30 | 0.02 | −0.20 | −1.67 | −0.33 | −0.42 | −2.07 | −0.84 |
| GLIS3 | −0.57 | 0.03 | −0.19 | 0.00 | −0.13 | −0.05 | −0.52 | −0.49 | 0.50 | 0.06 | 1.10 |
| GLS2 | −0.29 | −0.07 | −0.29 | −0.39 | −0.24 | −0.23 | −0.51 | 0.28 | −0.16 | −0.28 | 0.29 |
| GLYCTK | −0.78 | 0.01 | −0.20 | 0.22 | 0.32 | 0.18 | −0.29 | 0.73 | −0.20 | 0.54 | 0.79 |
| GNE | −0.38 | −0.13 | 0.16 | −0.06 | −0.21 | −0.10 | 0.10 | 0.54 | 0.12 | −0.30 | 1.29 |
| GNPTAB | −0.68 | −0.30 | −0.33 | −0.40 | −0.49 | −0.39 | −0.67 | 0.39 | 0.46 | −0.78 | 0.78 |
| GPC3 | 0.27 | −0.07 | −0.01 | −0.42 | −0.45 | −0.40 | −0.46 | 0.25 | −0.02 | 0.04 | 0.04 |
| GPD1 | 0.74 | −0.04 | −0.60 | 0.29 | 0.37 | 0.37 | −0.80 | 0.33 | −0.11 | −1.12 | −0.49 |
| GPHN | 0.53 | 0.02 | −0.04 | −0.10 | −0.14 | −0.08 | −0.41 | 0.50 | 0.25 | −0.43 | 0.59 |
| GTPBP3 | 0.19 | 0.22 | 0.06 | 0.23 | 0.32 | 0.29 | −0.20 | 0.13 | 0.03 | −0.59 | −0.97 |
| GUSB | −0.23 | −0.29 | −0.12 | −0.38 | −0.26 | −0.38 | −0.27 | −0.01 | −0.27 | −0.01 | −0.34 |
| GYG1 | −0.31 | −0.28 | −0.35 | −0.40 | −0.32 | −0.28 | −0.03 | −0.42 | −0.35 | −0.67 | −0.45 |
| GYS1 | 0.48 | 0.09 | −0.03 | 0.03 | 0.05 | 0.08 | −0.02 | −0.21 | 0.09 | −1.87 | −0.46 |
| GYS2 | −0.17 | −0.20 | 0.22 | 0.19 | −0.03 | −0.07 | −0.89 | 1.58 | −0.51 | −0.11 | 1.21 |
| H19 | −0.18 | −0.23 | −0.29 | −0.15 | −0.21 | −0.19 | −0.20 | 0.35 | −0.15 | −0.15 | 0.75 |
| H6PD | −1.53 | −0.01 | −0.40 | 0.44 | 0.18 | −0.06 | −0.81 | 0.32 | 0.45 | −0.62 | −1.20 |
| HAL | −2.10 | −0.41 | −0.62 | −0.71 | −0.09 | −0.42 | −1.21 | 0.81 | −0.14 | −0.16 | −0.24 |
| HAX1 | 0.05 | −0.26 | −0.01 | −0.17 | −0.12 | −0.14 | 0.19 | −0.13 | −0.33 | −0.07 | −0.09 |
| HBA1 | 1.42 | 0.00 | 0.00 | 1.10 | 1.07 | 0.57 | 0.89 | −0.98 | −0.94 | 0.98 | −1.43 |
| HBB | 1.60 | −0.56 | 0.56 | 0.21 | 0.07 | 1.13 | 1.94 | 0.56 | 0.48 | 1.33 | 0.75 |
| HGD | −0.76 | 0.04 | −0.90 | 0.03 | −0.10 | −0.14 | −0.60 | 2.00 | −0.17 | −1.31 | 1.09 |
| HLA-B | −0.24 | −0.33 | −0.03 | 0.03 | 0.05 | −0.09 | −0.12 | −0.45 | −0.39 | −0.27 | −1.01 |
| HMBS | −0.30 | −0.06 | −0.27 | −0.19 | −0.09 | −0.02 | −0.06 | 0.02 | −0.48 | −0.34 | −0.58 |
| HMGCR | 0.35 | −0.03 | 1.05 | −0.08 | −0.11 | −0.18 | 0.59 | 0.06 | 0.12 | 0.31 | 2.15 |
| HMGCS2 | −2.07 | −0.40 | −0.19 | 0.70 | −0.21 | −0.49 | 0.71 | 3.80 | −0.67 | 0.24 | 1.75 |
| HMOX1 | 0.49 | −0.04 | −0.11 | 0.65 | 0.22 | −0.56 | 0.45 | −0.38 | −0.04 | −0.12 | 2.76 |
| HNF1A | −0.27 | 0.17 | −0.10 | 0.20 | 0.33 | 0.19 | −0.11 | 0.28 | −0.16 | −0.30 | 0.44 |
| HNF1B | −1.15 | −0.03 | −0.05 | −0.12 | −0.02 | −0.21 | −0.64 | −0.34 | −0.12 | −0.60 | −0.26 |
| HNF4A | −0.51 | −0.04 | −0.14 | 0.55 | 0.30 | 0.23 | −0.66 | 0.50 | 0.19 | −0.60 | 0.93 |
| HOGA1 | −0.21 | 0.27 | 0.08 | 0.15 | 0.80 | 0.38 | −0.63 | −0.04 | 0.27 | −0.72 | 1.16 |
| HPD | −0.37 | −0.02 | −0.18 | −0.05 | 0.10 | 0.05 | −0.77 | −0.10 | −0.35 | −0.74 | 0.50 |
| HPGD | −1.62 | −0.47 | −0.76 | −0.17 | −0.69 | −0.53 | −0.52 | 0.86 | −0.40 | −0.54 | −0.26 |
| HPS4 | 0.55 | 0.06 | 0.26 | −0.07 | −0.04 | −0.08 | 0.12 | 0.12 | 0.29 | 0.03 | 0.35 |
| HPS5 | 0.02 | 0.05 | 0.12 | −0.15 | −0.12 | −0.02 | −0.54 | 0.51 | 0.35 | −0.72 | 0.65 |
| HPS6 | −0.52 | −0.03 | −0.01 | 0.09 | 0.31 | 0.26 | −0.30 | −0.25 | −0.41 | −0.94 | −1.21 |
| HPX | −0.12 | −0.27 | −0.10 | −0.07 | −0.17 | −0.23 | −0.21 | 0.14 | −0.30 | 0.18 | −0.02 |
| HRAS | −0.26 | −0.22 | −0.12 | −0.24 | −0.15 | −0.08 | 0.63 | −0.45 | −0.56 | 0.21 | −1.10 |
| HRSP12 | −0.86 | −0.52 | −0.83 | −0.42 | −0.47 | −0.37 | −0.37 | 0.39 | −0.54 | 0.32 | −0.05 |
| HSD17B10 | −0.26 | −0.25 | −0.29 | −0.20 | −0.09 | −0.10 | 0.22 | −0.54 | −0.70 | −0.09 | −0.91 |
| HSD3B7 | 0.20 | −0.11 | 0.30 | −0.11 | −0.05 | −0.04 | 0.05 | −0.18 | −0.03 | −0.35 | −1.24 |
| HTT | −0.02 | 0.02 | −0.04 | 0.01 | 0.02 | 0.05 | −0.55 | 0.16 | 0.39 | −1.06 | 0.18 |
| HYAL1 | −0.04 | −0.14 | −0.17 | −0.27 | −0.20 | −0.25 | −0.29 | 0.36 | −0.55 | −1.00 | −0.52 |
| HYLS1 | −0.58 | −0.12 | −0.34 | −0.39 | −0.60 | −0.30 | −0.23 | −0.24 | −0.33 | −0.80 | 0.10 |
| ID1 | −2.97 | −0.59 | −1.26 | −0.69 | 0.13 | −0.28 | −2.79 | −2.43 | −1.77 | −4.50 | −5.82 |
| IDH1 | −0.52 | −0.14 | 0.27 | −0.16 | −0.29 | −0.28 | 0.32 | 0.29 | −0.09 | 0.86 | 1.43 |
| IDH2 | −1.22 | −0.32 | −0.54 | 0.09 | −0.11 | −0.21 | −0.60 | −0.30 | −0.23 | −0.74 | −0.29 |
| IDUA | 0.56 | 0.19 | 0.34 | 0.14 | 0.23 | 0.15 | 0.44 | −0.10 | −0.32 | 0.20 | −1.63 |
| IFIH1 | −0.52 | −0.21 | −0.45 | −0.12 | −0.40 | −0.32 | −0.59 | 0.01 | 0.13 | −0.50 | −0.56 |
| IFNAR2 | −1.04 | −0.29 | −0.45 | −0.17 | −0.51 | −0.42 | −0.75 | −0.43 | 0.19 | −0.84 | −1.19 |
| IFT122 | −0.32 | 0.10 | −0.36 | −0.12 | −0.15 | −0.11 | −0.72 | −0.10 | −0.12 | −1.01 | −0.64 |
| IFT140 | 0.00 | 0.43 | 0.10 | 0.34 | 0.44 | 0.33 | −0.30 | 0.44 | 0.29 | −0.77 | −0.22 |
| IFT172 | −0.21 | 0.14 | −0.12 | 0.23 | 0.36 | 0.13 | −0.29 | 0.39 | 0.26 | −0.19 | 0.51 |
| IFT27 | −0.56 | −0.27 | −0.35 | 0.02 | −0.11 | −0.18 | −0.22 | −0.19 | −0.54 | 0.19 | −0.71 |
| IFT80 | −0.78 | 0.04 | −0.19 | −0.09 | 0.00 | 0.06 | −0.43 | 0.09 | 0.31 | −1.43 | 0.14 |
| IGFALS | −0.06 | −0.06 | −0.34 | 0.31 | 0.33 | 0.23 | −0.13 | 0.03 | 0.02 | 0.15 | −1.44 |
| IKBKG | 0.11 | 0.24 | 0.02 | 0.33 | 0.48 | 0.40 | −0.19 | −0.65 | 0.00 | −0.80 | 1.04 |
| IL1RN | −0.94 | 0.06 | 1.46 | −0.16 | −0.20 | −0.24 | −0.75 | −0.34 | −0.08 | 1.00 | 0.22 |
| IL2RG | 0.13 | −0.28 | −0.69 | −0.88 | −0.08 | −0.39 | −0.34 | −0.32 | −0.13 | −0.78 | 0.15 |
| INSR | −0.54 | −0.06 | 0.62 | 0.13 | 0.01 | −0.14 | 0.13 | 0.52 | 0.51 | 0.16 | 1.53 |
| INVS | 0.04 | −0.01 | −0.13 | 0.00 | −0.15 | −0.20 | −0.40 | 0.10 | 0.24 | −0.69 | 0.60 |
| ISYNA1 | −0.21 | 0.20 | 0.44 | 0.19 | 0.20 | 0.22 | −0.26 | −0.19 | −0.39 | −1.04 | −0.32 |
| ITGB3 | −0.64 | 0.13 | 0.52 | 0.48 | 0.02 | 0.03 | 0.10 | −1.16 | 0.95 | −0.60 | 0.77 |
| IYD | −1.08 | −0.12 | −0.25 | 0.02 | −0.15 | −0.05 | −0.56 | 0.46 | 0.48 | −0.18 | 1.41 |
| JAG1 | 0.89 | 0.14 | 0.13 | 0.26 | 0.14 | 0.07 | 0.00 | −0.86 | 0.68 | 0.27 | 0.33 |
| JAK2 | 0.01 | 0.02 | 0.24 | −0.40 | −0.26 | −0.06 | −0.01 | 0.22 | 0.54 | 0.38 | 0.31 |
| KCTD11 | −0.21 | 0.08 | 0.07 | 0.40 | 0.53 | 0.41 | −0.60 | −0.16 | −0.11 | −1.26 | −1.21 |
| KCTD7 | 0.84 | 0.01 | 0.41 | 0.27 | 0.26 | 0.20 | 0.11 | 0.60 | 0.70 | 0.10 | 1.22 |
| KHK | −0.09 | −0.22 | −0.44 | 0.01 | 0.13 | 0.03 | −0.13 | 0.44 | −0.38 | −0.18 | −0.33 |
| KIAA0586 | −0.01 | −0.06 | −0.17 | −0.06 | −0.32 | −0.11 | −0.75 | 0.06 | 0.60 | −1.05 | −0.06 |
| KMT2D | 0.44 | 0.45 | 0.42 | 0.46 | 0.57 | 0.55 | −0.35 | 0.27 | 1.06 | −0.82 | 1.28 |
| KPTN | −0.48 | −0.07 | −0.07 | 0.12 | 0.03 | 0.27 | 0.28 | 0.04 | −0.38 | −0.50 | −0.37 |
| KRIT1 | −0.04 | −0.04 | 0.01 | −0.16 | −0.32 | −0.22 | −0.17 | 0.11 | 0.41 | −0.26 | 0.49 |
| KRT18 | −1.11 | −0.03 | −0.13 | −0.14 | 0.14 | 0.11 | −0.82 | −0.93 | −0.36 | −1.64 | −0.86 |
| KYNU | −1.31 | 0.10 | 0.17 | −0.54 | −0.28 | −0.08 | −0.44 | −0.75 | −0.37 | −1.45 | 0.03 |
| LAMB2 | −0.50 | 0.02 | 0.06 | 0.11 | 0.14 | 0.05 | −0.44 | −0.04 | 0.06 | −1.40 | −0.78 |
| LCAT | −0.38 | −0.02 | −0.28 | 0.06 | 0.18 | 0.01 | −0.50 | −0.06 | −0.37 | −0.79 | −0.55 |
| LDHB | 0.24 | 0.12 | −0.18 | −0.30 | −0.23 | −0.02 | −0.79 | −0.73 | −0.65 | −1.06 | 0.89 |
| LDLR | 0.11 | 0.22 | 2.08 | 0.00 | 0.23 | 0.04 | 1.18 | −0.09 | 0.30 | 0.74 | 1.45 |
| LDLRAP1 | −0.60 | 0.02 | −0.07 | −0.06 | 0.03 | 0.06 | −0.44 | −0.14 | −0.21 | −0.86 | −0.28 |
| LIPC | −1.95 | −0.23 | −0.87 | −0.46 | −0.23 | −0.34 | −1.77 | −0.03 | −0.13 | −1.85 | −0.55 |
| LIPT1 | −0.53 | −0.39 | −0.56 | −0.69 | −0.63 | −0.42 | −0.13 | −0.04 | −0.54 | 0.18 | −0.47 |
| LMNB2 | 0.11 | 0.10 | −0.21 | 0.18 | 0.36 | 0.37 | −0.52 | −0.40 | 0.11 | −1.06 | −0.36 |
| LPA | −0.19 | −0.04 | −0.04 | −0.20 | 0.04 | −0.35 | −0.37 | 0.20 | −0.25 | −0.08 | 0.19 |
| LPIN1 | 0.64 | 0.04 | 0.99 | 0.04 | −0.08 | −0.03 | 1.16 | −0.08 | 0.22 | 0.94 | 1.44 |
| LPIN2 | −0.95 | −0.01 | 0.59 | 0.28 | 0.08 | −0.03 | −0.01 | 1.74 | 0.49 | 0.25 | 0.01 |
| LRBA | −0.17 | −0.07 | −0.12 | −0.20 | −0.14 | −0.17 | −0.85 | 0.51 | 0.75 | −0.88 | 0.75 |
| LRP5 | −0.10 | 0.04 | −0.15 | 0.08 | 0.14 | 0.04 | −0.64 | 0.06 | 0.43 | −0.96 | 0.46 |
| LYRM4 | −0.40 | −0.37 | −0.29 | −0.38 | −0.40 | −0.39 | −0.03 | −0.60 | −0.55 | −0.19 | −0.40 |
| LYST | 0.84 | 0.18 | 0.54 | 0.09 | −0.05 | 0.08 | 0.02 | 0.12 | 0.64 | −0.21 | 0.36 |
| MAN1A1 | −0.16 | −0.28 | −0.15 | −0.26 | −0.36 | −0.31 | −0.52 | 0.60 | 0.14 | −0.79 | 0.56 |
| MAN2B1 | −0.06 | −0.01 | −0.02 | 0.06 | 0.14 | 0.08 | −0.49 | −0.01 | −0.04 | −1.04 | −0.35 |
| MAOB | −0.74 | −0.25 | −0.46 | 0.03 | −0.07 | −0.13 | −0.47 | 0.54 | 0.17 | −0.30 | 0.74 |
| MAT1A | 0.40 | 0.12 | 0.27 | 0.40 | 0.14 | 0.05 | 0.41 | 0.58 | 0.08 | 0.70 | 0.84 |
| MBL2 | −1.09 | −0.20 | −1.05 | −0.16 | −0.25 | −0.31 | −1.30 | 1.22 | 0.14 | −0.65 | 1.47 |
| MCCC1 | 0.23 | −0.13 | 0.13 | −0.29 | −0.27 | −0.20 | −0.28 | 0.08 | 0.11 | −0.75 | 0.44 |
| MCCC2 | −0.40 | −0.18 | −0.40 | −0.35 | −0.31 | −0.22 | −0.77 | 0.18 | 0.18 | −1.20 | 0.25 |
| MCM6 | −0.34 | −0.17 | −0.29 | −0.47 | −0.34 | −0.17 | −0.77 | −0.26 | −0.06 | −0.77 | −0.09 |
| MEN1 | −0.06 | 0.14 | 0.11 | 0.04 | 0.18 | 0.21 | −0.45 | 0.00 | 0.15 | −1.14 | −0.09 |
| MET | −0.53 | −0.15 | 0.03 | −0.67 | −0.27 | −0.24 | −1.00 | −0.47 | 0.38 | −0.72 | −0.01 |
| MGAT2 | −0.41 | −0.17 | −0.21 | 0.06 | −0.09 | −0.05 | −0.13 | 0.29 | −0.07 | 0.16 | −1.16 |
| MKS1 | −0.16 | −0.15 | −0.22 | −0.02 | 0.23 | 0.08 | −0.21 | −0.24 | −0.06 | −0.57 | −0.33 |
| MLH1 | −0.22 | −0.16 | −0.19 | −0.14 | −0.18 | −0.05 | −0.18 | 0.15 | −0.06 | −0.64 | 0.43 |
| MMAA | −1.07 | −0.08 | −0.32 | −0.21 | −0.25 | −0.15 | −0.50 | 0.05 | −0.15 | −0.70 | −0.40 |
| MMAB | 0.81 | −0.16 | 0.20 | −0.09 | −0.09 | −0.01 | 0.90 | −0.02 | −0.41 | 1.11 | 0.85 |
| MMADHC | −0.93 | −0.32 | −0.50 | −0.47 | −0.38 | −0.26 | −0.18 | 0.01 | −0.23 | −0.40 | 0.34 |
| MOCS1 | 0.23 | 0.01 | 0.23 | −0.30 | 0.03 | 0.09 | −0.08 | 0.36 | −0.05 | −0.51 | 1.01 |
| MOGAT2 | −0.69 | 0.28 | −0.61 | 0.85 | 0.66 | 0.41 | −1.21 | 0.31 | 0.60 | −1.01 | 0.29 |
| MOGS | 0.15 | 0.06 | 0.11 | 0.07 | 0.33 | 0.27 | −0.60 | −0.10 | −0.09 | −1.05 | −0.60 |
| MPZ | −0.09 | 0.00 | 0.07 | −0.05 | 0.37 | 0.18 | −0.56 | −0.86 | −0.24 | −1.00 | 1.76 |
| MRPL3 | −0.23 | −0.23 | −0.53 | −0.52 | −0.47 | −0.31 | −0.62 | −0.23 | −0.27 | −0.99 | −0.09 |
| MTHFR | 0.23 | 0.25 | 0.65 | 0.31 | 0.37 | 0.40 | 0.49 | 0.49 | 0.20 | 0.03 | 0.45 |
| MTM1 | −0.26 | −0.12 | 0.12 | −0.06 | −0.29 | −0.09 | −0.02 | 0.08 | 0.08 | −0.29 | 0.41 |
| MTO1 | 0.09 | −0.04 | −0.09 | −0.07 | −0.13 | −0.04 | 0.04 | 0.20 | −0.07 | −0.24 | 0.36 |
| MTR | 0.20 | 0.16 | 0.16 | 0.07 | 0.10 | 0.08 | −0.39 | 0.45 | 0.67 | −0.48 | 0.87 |
| MTRR | −0.27 | 0.01 | −0.21 | −0.33 | −0.43 | −0.17 | −0.47 | 0.00 | 0.08 | −0.78 | 0.21 |
| MTTP | −1.98 | −0.24 | −0.64 | 0.43 | −0.18 | −0.23 | −1.42 | 0.15 | −0.17 | −1.15 | 0.43 |
| MVK | 1.16 | −0.07 | 0.79 | 0.07 | 0.07 | 0.10 | 1.22 | 0.10 | −0.08 | 0.45 | 1.56 |
| MYH9 | 0.18 | 0.09 | −0.08 | 0.33 | 0.20 | 0.18 | −0.33 | −0.33 | 0.58 | −0.73 | −0.08 |
| MYO5B | 0.02 | −0.06 | 0.59 | −0.05 | −0.08 | −0.06 | −0.29 | −0.43 | 0.33 | −0.05 | 0.62 |
| NAGS | 1.90 | 0.26 | 1.08 | 0.21 | 0.31 | 0.21 | 0.01 | 0.20 | −0.32 | 0.70 | 0.26 |
| NARS2 | −0.36 | −0.20 | −0.42 | −0.41 | −0.42 | −0.27 | −0.49 | 0.00 | −0.03 | −0.50 | −0.19 |
| NAT2 | −0.49 | −0.29 | −0.41 | −0.29 | −0.40 | −0.32 | −0.48 | 0.08 | −0.59 | −0.81 | −0.27 |
| NBAS | −0.17 | −0.13 | −0.22 | −0.16 | −0.22 | −0.15 | −0.59 | 0.29 | 0.46 | −0.63 | 0.73 |
| NCF2 | −0.41 | 0.02 | 0.36 | 0.22 | −0.20 | 0.13 | 0.09 | −3.37 | −0.18 | −0.57 | 0.26 |
| NEK1 | 0.03 | −0.16 | 0.14 | −0.06 | −0.22 | −0.15 | 0.04 | −0.17 | 0.16 | 0.22 | 0.17 |
| NEK8 | 0.38 | 0.23 | 0.30 | 0.03 | 0.47 | 0.26 | 0.00 | 0.46 | 0.19 | −0.62 | 0.11 |
| NEU1 | 0.91 | −0.31 | 0.86 | −0.03 | −0.25 | −0.22 | 0.59 | 0.08 | −0.20 | −0.05 | −0.17 |
| NFKB2 | 0.10 | 0.11 | −0.05 | 0.25 | 0.30 | 0.35 | −0.12 | 0.55 | −0.02 | −0.94 | −2.33 |
| NFKBIA | −0.26 | −0.18 | −0.16 | −0.11 | −0.19 | −0.22 | −0.30 | 0.19 | −0.28 | −0.35 | −3.28 |
| NFU1 | −0.73 | −0.27 | −0.28 | −0.40 | −0.52 | −0.32 | −0.03 | −0.28 | −0.43 | 0.00 | −0.48 |
| NGLY1 | −0.23 | −0.23 | −0.15 | −0.30 | −0.40 | −0.21 | −0.15 | −0.11 | −0.15 | −0.34 | 0.06 |
| NHP2 | 0.25 | 0.17 | 0.13 | 0.31 | 0.65 | 0.57 | 0.09 | −0.46 | −0.58 | −0.27 | −0.90 |
| NME1 | 0.01 | −0.23 | −0.48 | −0.31 | 0.00 | 0.01 | −0.15 | −0.68 | −0.57 | −0.49 | −0.91 |
| NOD2 | 1.83 | 0.14 | 1.20 | 0.50 | 0.30 | 0.12 | 0.63 | −1.05 | 0.28 | 0.45 | −1.01 |
| NOP10 | 0.12 | −0.09 | 0.18 | −0.07 | 0.03 | 0.11 | −0.03 | −0.53 | −0.73 | −0.33 | −1.02 |
| NOTCH1 | 0.24 | 0.28 | 0.27 | 0.26 | 0.23 | 0.28 | −0.36 | −0.17 | 0.43 | −0.48 | 0.43 |
| NOTCH2 | −0.38 | 0.02 | 0.33 | 0.23 | 0.01 | 0.05 | −0.75 | −0.18 | 0.74 | −1.02 | 0.31 |
| NPC1 | 0.82 | 0.03 | 1.25 | 0.02 | −0.09 | −0.09 | 0.01 | 0.19 | 0.35 | −0.25 | 1.02 |
| NR1H4 | 0.95 | −0.25 | 1.61 | 0.02 | 0.00 | −0.19 | 0.99 | 1.02 | 0.02 | 1.01 | 1.37 |
| NUBPL | −0.36 | −0.30 | −0.54 | −0.32 | −0.11 | −0.17 | −0.64 | 0.01 | 0.16 | −0.35 | 0.25 |
| NUDT12 | −0.02 | −0.22 | −0.15 | −0.32 | −0.32 | −0.31 | 0.20 | 0.31 | 0.03 | 0.11 | 0.36 |
| NUDT7 | −1.48 | −0.56 | −0.69 | −0.44 | −0.70 | −0.65 | −0.47 | 0.65 | −0.47 | 0.05 | −1.30 |
| OAT | −0.86 | −0.20 | −0.27 | −0.49 | −0.40 | −0.33 | −0.06 | 0.65 | −0.21 | −0.04 | −0.12 |
| OPA3 | 0.01 | −0.11 | 0.06 | 0.13 | 0.14 | 0.04 | −0.08 | 0.30 | 0.12 | −0.61 | −0.04 |
| OTC | −0.94 | −0.50 | −0.84 | −0.22 | −0.33 | −0.40 | −0.62 | 0.47 | −0.26 | 0.27 | 0.59 |
| PAF1 | −0.48 | −0.12 | −0.04 | −0.06 | −0.04 | 0.01 | 0.01 | −0.30 | −0.45 | −0.86 | −0.09 |
| PAH | 1.19 | −0.15 | 0.65 | −0.07 | −0.22 | −0.30 | 0.47 | 2.09 | 0.17 | −0.23 | 1.89 |
| PANK2 | −0.05 | −0.12 | 0.04 | −0.03 | −0.22 | −0.09 | −0.16 | −0.06 | −0.18 | −0.21 | −0.21 |
| PAOX | −0.55 | −0.49 | −0.01 | −0.01 | −0.04 | −0.17 | −0.11 | 0.01 | −0.38 | −0.59 | −1.45 |
| PC | −0.34 | 0.11 | 0.13 | −0.01 | 0.27 | 0.17 | −0.71 | 0.51 | 0.12 | −0.87 | 0.77 |
| PCCA | −0.12 | −0.37 | 0.20 | −0.34 | −0.23 | −0.33 | −0.22 | 0.01 | 0.08 | 0.18 | 0.23 |
| PCK2 | 0.48 | −0.09 | 0.48 | 0.36 | 0.18 | 0.06 | 0.61 | −0.02 | −0.23 | 1.10 | −0.48 |
| PCSK9 | 0.90 | 0.08 | 1.41 | 0.28 | 0.46 | 0.14 | 0.99 | 0.29 | 0.00 | 0.75 | 2.33 |
| PCYT1A | −0.01 | 0.05 | −0.05 | −0.02 | −0.07 | 0.05 | −0.33 | −0.16 | 0.30 | −1.43 | 0.53 |
| PDGFRA | −1.50 | −0.29 | −0.23 | −0.20 | −0.06 | −0.27 | −1.74 | −0.81 | −0.10 | −1.29 | −1.12 |
| PDP1 | 0.23 | −0.25 | 0.52 | −0.15 | −0.30 | −0.11 | 0.12 | −0.34 | 0.53 | 0.04 | −0.25 |
| PEPD | 0.33 | −0.20 | 0.48 | 0.02 | 0.03 | −0.03 | 0.13 | 0.66 | −0.14 | −0.35 | −0.15 |
| PEX11A | −0.32 | −0.15 | −0.28 | −0.03 | −0.27 | −0.31 | 0.18 | 0.43 | −0.41 | −0.17 | 0.50 |
| PEX12 | 0.11 | −0.22 | −0.20 | −0.29 | −0.20 | −0.20 | 0.01 | 0.13 | 0.05 | 0.13 | 0.33 |
| PEX14 | 0.08 | −0.02 | 0.00 | −0.03 | 0.19 | 0.13 | −0.33 | 0.04 | −0.13 | −0.69 | 0.38 |
| PFKM | 0.00 | 0.23 | −0.23 | 0.14 | 0.45 | 0.52 | −1.25 | 0.25 | −0.23 | −1.66 | 0.12 |
| PGM1 | −1.00 | −0.16 | −0.16 | −0.09 | −0.24 | −0.21 | −0.48 | 0.47 | −0.13 | −0.64 | 0.18 |
| PHGDH | 0.64 | −0.05 | 0.39 | 0.52 | 0.38 | 0.16 | 0.62 | 0.06 | −0.11 | 1.54 | 1.33 |
| PHKA1 | 0.80 | −0.01 | 0.47 | −0.04 | −0.18 | −0.12 | 0.03 | 0.48 | 0.10 | −0.16 | 1.27 |
| PHKA2 | −0.34 | 0.15 | −0.10 | 0.05 | 0.11 | 0.03 | −0.41 | 0.42 | 0.13 | −0.57 | 0.30 |
| PHKB | −0.47 | −0.22 | −0.14 | −0.26 | −0.39 | −0.31 | −0.25 | −0.11 | 0.24 | −0.45 | 0.52 |
| PHYH | −0.65 | −0.31 | −0.16 | −0.27 | −0.26 | −0.25 | −0.19 | 0.21 | −0.32 | 0.12 | 0.08 |
| PIEZO1 | −0.15 | 0.15 | −0.14 | 0.58 | 0.30 | 0.24 | −0.53 | −0.77 | 0.41 | −0.76 | −1.07 |
| PIGA | −0.72 | −0.16 | 0.52 | −0.26 | −0.37 | −0.18 | 0.50 | −0.10 | −0.11 | 1.36 | 0.14 |
| PIGM | −0.06 | −0.07 | −0.39 | −0.29 | −0.35 | −0.22 | −0.27 | −0.06 | −0.08 | −0.80 | −0.83 |
| PKD1 | 0.73 | 0.15 | 0.49 | 0.57 | 0.61 | 0.39 | 0.15 | 0.25 | 0.39 | 0.05 | 0.32 |
| PKD2 | 0.02 | 0.37 | 0.29 | 0.22 | 0.28 | 0.28 | −0.62 | −0.01 | 0.49 | −1.14 | 0.71 |
| PKHD1 | −2.34 | 0.19 | −0.92 | −0.23 | 0.34 | 0.13 | −1.31 | −0.57 | 0.74 | −1.45 | 0.49 |
| PKLR | −0.17 | −0.16 | −0.20 | 0.52 | 0.35 | 0.18 | −0.59 | 1.28 | −0.07 | 0.11 | 0.65 |
| PLA2G6 | −1.06 | 0.51 | 0.42 | 0.63 | 0.59 | 0.39 | −0.40 | 0.32 | 0.07 | −0.67 | 0.25 |
| PLEKHM1 | 1.11 | 0.04 | 1.28 | −0.07 | 0.10 | 0.12 | 0.70 | −0.15 | 0.01 | −0.28 | 0.46 |
| PMVK | −0.10 | −0.16 | −0.21 | 0.06 | 0.39 | 0.32 | 0.48 | −0.33 | −0.63 | 0.53 | −1.31 |
| PNP | −0.13 | −0.23 | −0.17 | −0.39 | −0.40 | −0.27 | −0.44 | −0.35 | −0.18 | −1.35 | −0.53 |
| PNPLA2 | −1.42 | 0.05 | 0.07 | 0.33 | 0.02 | −0.06 | −0.11 | 0.16 | −0.20 | −0.71 | −0.32 |
| POLD1 | 0.17 | 0.08 | −0.12 | −0.05 | 0.30 | 0.28 | −0.29 | 0.09 | −0.13 | −1.16 | −0.37 |
| POLG | −0.13 | −0.07 | −0.03 | −0.03 | 0.10 | 0.10 | −0.43 | 0.15 | 0.16 | −1.19 | 0.06 |
| POLG2 | 0.40 | 0.18 | −0.14 | 0.04 | 0.22 | 0.27 | 0.18 | −0.08 | −0.33 | 0.02 | −0.78 |
| POR | 0.97 | 0.10 | 0.43 | 0.40 | 0.16 | 0.03 | 0.31 | 1.21 | 0.28 | 0.50 | 0.97 |
| PPAPDC2 | −0.42 | −0.13 | −0.29 | −0.26 | −0.14 | −0.09 | −0.29 | −0.05 | 0.10 | −0.85 | −0.56 |
| PPARA | −0.10 | 0.03 | 0.22 | −0.06 | −0.14 | −0.11 | −0.21 | 0.68 | 0.61 | 0.25 | 2.22 |
| PPARG | −1.02 | −0.26 | 0.06 | −0.84 | −0.47 | −0.55 | −0.56 | −1.28 | −0.55 | 0.12 | −0.62 |
| PPM1K | −0.38 | −0.05 | −0.25 | −0.34 | −0.24 | −0.18 | −0.30 | −0.12 | −0.14 | −0.51 | 0.51 |
| PRKCD | −0.05 | −0.12 | 0.35 | 0.27 | 0.06 | 0.07 | −0.02 | −0.04 | 0.01 | −0.74 | −0.21 |
| PRODH | −0.25 | −0.39 | −0.28 | −0.19 | −0.14 | −0.29 | −0.15 | 4.62 | 0.61 | 0.60 | 0.07 |
| PROS1 | −0.44 | −0.24 | −0.01 | −0.07 | −0.20 | −0.18 | −0.77 | 0.16 | 0.17 | −1.07 | 0.33 |
| PROZ | −0.77 | −0.19 | 0.10 | 0.30 | 0.10 | −0.02 | −0.15 | 0.61 | 0.11 | −0.39 | 0.15 |
| PSAT1 | 0.47 | −0.19 | 0.10 | −0.09 | −0.18 | −0.15 | 0.69 | −0.50 | −0.08 | 1.32 | 1.24 |
| PSMB8 | −0.36 | −0.30 | −0.49 | −0.08 | 0.08 | −0.03 | 0.06 | −0.60 | −0.52 | 0.34 | −1.21 |
| PSPH | 0.40 | −0.23 | 0.16 | −0.21 | −0.12 | −0.17 | 0.25 | 0.04 | 0.09 | 0.54 | 0.17 |
| PTCH1 | −1.05 | 0.17 | 0.28 | 0.04 | 0.20 | −0.09 | −0.78 | −0.30 | 0.53 | −0.94 | 0.06 |
| PTRF | −0.89 | −0.06 | −0.21 | 0.03 | 0.25 | 0.29 | −0.01 | −0.83 | −0.08 | −1.22 | −1.09 |
| PTRH2 | −0.07 | −0.23 | −0.32 | −0.55 | −0.47 | −0.35 | −0.09 | −0.60 | −0.58 | −0.48 | −0.93 |
| PUS1 | 0.57 | 0.11 | 0.09 | 0.05 | 0.29 | 0.21 | 0.16 | −0.42 | −0.32 | −0.05 | −1.50 |
| PXMP2 | −0.33 | −0.32 | −0.33 | −0.29 | −0.29 | −0.29 | −0.29 | 0.64 | −0.45 | 0.01 | −0.25 |
| PXMP4 | −0.36 | −0.13 | −0.10 | −0.18 | −0.05 | −0.03 | 0.23 | 0.84 | 0.27 | 0.42 | 1.27 |
| RAI1 | 0.19 | 0.27 | 0.21 | 0.23 | 0.38 | 0.44 | −0.46 | −0.50 | 0.18 | −0.75 | −0.03 |
| RANBP2 | −0.07 | −0.04 | −0.11 | −0.11 | −0.16 | −0.05 | −0.58 | 0.20 | 0.42 | −0.94 | 0.38 |
| RASA1 | −0.42 | −0.15 | −0.12 | −0.21 | −0.26 | −0.23 | −0.14 | −0.04 | 0.28 | 0.12 | 0.73 |
| RBCK1 | 0.94 | 0.11 | 1.08 | 0.27 | 0.26 | 0.18 | 0.65 | −0.31 | −0.05 | 0.59 | 0.37 |
| RBM10 | −0.13 | 0.05 | −0.04 | 0.04 | 0.11 | 0.12 | −0.16 | 0.00 | −0.21 | −1.06 | 0.05 |
| REN | 1.05 | 0.64 | 0.13 | −0.30 | 0.46 | 0.61 | −1.03 | −1.57 | −0.44 | −1.03 | −0.93 |
| RMND1 | −0.11 | −0.27 | −0.36 | −0.58 | −0.47 | −0.28 | −0.40 | 0.28 | −0.07 | −0.25 | 0.11 |
| RMRP | −3.71 | −2.97 | −2.28 | −2.09 | −1.76 | −2.32 | 1.54 | −0.60 | −0.89 | 1.80 | −0.58 |
| RNASEH2A | −0.23 | 0.05 | 0.10 | −0.21 | −0.19 | 0.09 | 0.25 | −0.34 | −0.66 | 0.22 | −0.88 |
| RORC | 1.29 | −0.02 | 0.13 | 0.71 | 0.58 | 0.16 | 0.47 | 2.25 | 0.31 | 1.38 | 3.17 |
| RPGRIP1L | 0.19 | 0.06 | −0.54 | −0.19 | −0.12 | −0.27 | −0.78 | −0.47 | −0.06 | −0.68 | −0.03 |
| RRM2B | −0.08 | −0.28 | −0.49 | −0.30 | −0.34 | −0.21 | −0.75 | 0.45 | 0.48 | −0.32 | 1.19 |
| RSAD1 | 0.26 | −0.02 | −0.13 | −0.06 | 0.11 | 0.12 | 0.13 | 0.22 | −0.11 | 0.01 | −0.23 |
| SAMHD1 | −0.34 | −0.24 | −0.48 | −0.29 | −0.43 | −0.34 | −1.05 | −0.22 | 0.25 | −1.92 | −0.05 |
| SC5D | 0.23 | −0.29 | 0.37 | −0.23 | −0.56 | −0.37 | 0.51 | 0.22 | −0.01 | 0.47 | 1.56 |
| SCARB1 | −0.02 | −0.03 | −0.07 | 0.08 | 0.11 | 0.05 | −0.30 | −0.40 | −0.17 | −0.67 | −0.35 |
| SCN9A | −1.60 | 0.10 | −0.42 | 0.14 | −0.09 | −0.07 | −0.39 | −0.97 | 0.25 | −0.32 | −0.22 |
| SDCCAG8 | 0.08 | −0.06 | −0.06 | −0.25 | −0.10 | −0.12 | −0.30 | 0.11 | −0.03 | −0.50 | 0.11 |
| SEPN1 | −0.51 | −0.11 | −0.10 | −0.10 | −0.02 | 0.00 | −0.85 | −0.18 | 0.28 | −1.37 | −0.07 |
| SERAC1 | −0.28 | −0.22 | −0.02 | −0.29 | −0.34 | −0.07 | −0.14 | −0.05 | 0.29 | −0.31 | 0.26 |
| SERPINA1 | 0.21 | −0.17 | −0.05 | 0.01 | −0.16 | −0.19 | −0.19 | 0.31 | −0.19 | 0.12 | −0.05 |
| SERPING1 | 0.06 | −0.16 | 0.21 | −0.11 | −0.27 | −0.31 | −0.29 | 0.27 | −0.11 | 0.14 | 0.28 |
| SERPINI1 | −0.50 | −0.41 | −0.42 | −0.36 | −0.37 | −0.28 | −0.73 | 0.67 | −0.19 | −0.06 | 0.22 |
| SETBP1 | 0.08 | 0.06 | −0.10 | 0.22 | 0.05 | 0.11 | −0.30 | −0.46 | −0.14 | −0.38 | 0.54 |
| SFXN4 | 0.11 | −0.19 | −0.38 | −0.33 | −0.17 | −0.14 | −0.01 | 0.01 | −0.46 | 0.25 | −0.14 |
| SLC10A1 | −0.60 | −0.31 | −0.68 | 0.00 | −0.14 | −0.40 | −0.88 | 0.97 | −0.03 | −0.16 | 1.13 |
| SLC10A3 | 0.28 | 0.33 | 0.47 | 0.23 | 0.57 | 0.53 | −0.50 | −0.64 | 0.11 | −0.82 | −1.25 |
| SLC10A5 | −0.77 | 0.19 | −0.54 | 0.63 | 0.46 | −0.06 | −0.90 | 1.23 | 0.18 | −1.06 | 2.20 |
| SLC10A7 | −0.46 | −0.38 | −0.22 | −0.35 | −0.54 | −0.46 | −0.52 | −0.12 | 0.23 | −0.12 | 0.55 |
| SLC11A2 | 0.16 | −0.02 | 0.39 | −0.26 | 0.04 | −0.01 | −0.59 | −0.54 | 0.32 | −0.44 | 0.65 |
| SLC19A1 | 0.09 | 0.05 | −0.26 | −0.42 | 0.05 | −0.10 | −0.45 | −0.37 | −0.21 | −0.33 | −0.71 |
| SLC19A2 | 0.28 | 0.00 | 0.54 | 0.22 | −0.17 | −0.05 | −0.03 | −0.01 | 0.32 | −0.15 | 0.62 |
| SLC19A3 | −0.67 | −0.03 | −0.22 | 0.00 | −0.16 | −0.26 | −0.68 | 0.18 | −0.31 | −0.16 | 0.68 |
| SLC22A1 | −0.34 | −0.32 | −0.28 | −0.07 | −0.12 | −0.18 | −0.13 | 0.16 | −0.22 | 0.24 | 0.08 |
| SLC22A5 | 0.26 | 0.05 | −0.23 | 0.32 | −0.16 | 0.03 | 0.06 | −0.46 | −0.06 | −0.38 | −0.72 |
| SLC25A1 | −0.20 | 0.08 | 0.24 | 0.11 | 0.33 | 0.36 | −0.09 | −0.04 | −0.33 | −0.61 | −0.29 |
| SLC25A10 | −0.01 | −0.16 | −0.48 | −0.12 | 0.12 | 0.09 | −0.40 | 0.24 | −0.31 | −0.64 | −0.45 |
| SLC25A12 | 0.10 | 0.23 | −0.22 | −0.11 | 0.27 | 0.10 | −0.41 | −0.27 | −0.27 | −0.97 | −0.06 |
| SLC25A13 | 0.11 | −0.13 | 0.20 | −0.15 | −0.17 | −0.06 | −0.29 | 0.22 | 0.25 | −0.53 | 0.72 |
| SLC25A15 | −0.31 | 0.02 | −0.28 | −0.21 | 0.03 | 0.04 | −0.47 | 1.61 | −0.09 | −0.18 | 0.58 |
| SLC25A19 | −0.01 | −0.15 | 0.03 | −0.35 | −0.19 | −0.02 | 0.26 | 0.07 | −0.43 | −0.47 | −0.70 |
| SLC25A20 | −0.96 | −0.16 | −0.62 | −0.28 | −0.32 | −0.21 | −0.32 | 0.62 | −0.35 | −1.32 | −0.52 |
| SLC25A29 | −0.13 | 0.09 | 0.92 | 0.25 | 0.65 | 0.39 | −0.11 | −0.40 | −0.13 | −0.54 | −1.07 |
| SLC25A32 | 0.18 | −0.05 | −0.21 | −0.44 | −0.32 | −0.19 | −0.13 | −0.06 | −0.10 | −0.47 | −0.50 |
| SLC27A2 | −0.77 | −0.25 | −0.90 | 0.24 | −0.36 | −0.29 | −1.10 | −0.76 | −0.20 | −1.67 | −0.79 |
| SLC27A5 | −0.39 | −0.15 | −0.21 | 0.02 | 0.13 | 0.08 | −0.24 | 0.13 | −0.23 | 0.03 | −0.04 |
| SLC29A3 | −1.50 | −0.27 | −0.39 | −0.01 | −0.02 | −0.12 | −0.87 | −0.38 | −0.06 | −1.19 | 0.25 |
| SLC2A1 | 0.55 | 0.07 | 0.35 | 0.22 | 0.08 | 0.12 | 0.30 | −0.87 | 0.07 | −0.31 | 0.11 |
| SLC2A2 | −1.36 | −0.27 | −0.87 | −1.17 | −0.24 | −0.30 | −3.21 | −0.72 | −0.08 | −3.04 | −0.83 |
| SLC2A9 | 0.11 | −0.08 | 0.44 | 0.09 | 0.16 | 0.47 | −0.07 | 0.69 | 0.54 | 0.66 | 1.37 |
| SLC33A1 | 0.12 | −0.10 | 0.18 | −0.16 | −0.02 | −0.03 | −0.31 | 0.21 | 0.22 | 0.27 | 0.11 |
| SLC35C1 | −0.09 | 0.00 | 0.28 | −0.18 | 0.07 | 0.04 | −0.40 | −0.12 | −0.03 | −1.16 | −0.75 |
| SLC39A4 | 0.35 | 0.26 | 0.41 | 0.06 | 0.32 | 0.24 | −0.01 | −0.40 | −0.86 | −0.13 | −1.05 |
| SLC40A1 | −0.68 | −0.10 | −0.02 | 0.31 | −0.18 | −0.28 | 0.01 | 0.38 | 0.08 | −0.33 | 3.16 |
| SLC46A1 | 0.10 | 0.06 | −0.40 | 0.12 | 0.17 | 0.12 | −0.59 | 0.47 | 0.25 | −0.60 | 0.39 |
| SLC4A4 | 0.05 | −0.03 | −0.18 | −0.43 | −0.30 | −0.25 | −0.88 | 0.06 | 0.43 | −1.02 | 0.92 |
| SLC51A | −1.09 | −0.04 | −0.44 | −0.25 | −0.03 | −0.18 | −0.60 | −0.47 | −0.73 | −0.72 | 0.23 |
| SLC51B | −0.66 | −0.71 | 0.29 | −0.35 | 0.08 | −0.20 | 0.45 | 0.45 | −0.50 | 0.86 | 1.63 |
| SLC6A20 | 0.06 | −0.43 | 0.00 | −0.16 | −0.44 | −0.21 | −0.23 | 0.77 | 0.14 | −1.50 | 0.01 |
| SLC6A6 | 0.08 | 0.19 | 0.52 | 0.17 | −0.29 | 0.11 | 0.29 | −1.63 | 0.23 | −1.49 | 1.47 |
| SLC6A8 | 0.16 | −0.05 | 0.18 | 0.35 | 0.27 | 0.22 | 0.02 | −0.29 | −0.28 | −0.95 | −0.17 |
| SLC7A7 | −0.75 | 0.40 | −0.20 | 0.88 | 0.03 | 0.30 | 0.26 | −1.19 | −0.24 | −0.88 | −1.16 |
| SLCO1B1 | −1.50 | −0.12 | −0.83 | 0.10 | −0.23 | −0.26 | −1.01 | 0.33 | 0.03 | −1.43 | 1.42 |
| SLCO4C1 | 0.08 | −0.01 | 0.73 | 0.09 | −0.05 | −0.38 | 0.24 | 1.18 | −0.12 | 0.39 | 2.16 |
| SMAD4 | −0.48 | −0.15 | −0.12 | −0.09 | −0.17 | −0.15 | −0.03 | 0.10 | 0.05 | 0.23 | 0.49 |
| SMARCB1 | −0.73 | −0.19 | −0.28 | −0.20 | −0.19 | −0.11 | −0.64 | −0.28 | −0.31 | −0.93 | −0.22 |
| SNX10 | −0.75 | −0.21 | 0.26 | −0.57 | −0.57 | −0.43 | −0.26 | −0.06 | 0.11 | 0.06 | −0.20 |
| SORT1 | −0.93 | −0.19 | −0.12 | −0.03 | −0.12 | −0.19 | −0.67 | 0.17 | 0.27 | −1.36 | 0.36 |
| SPP2 | −0.38 | −0.21 | −0.47 | −0.19 | −0.17 | −0.12 | −0.32 | −0.09 | −0.61 | 0.38 | −0.12 |
| SPRTN | 0.00 | −0.02 | −0.33 | −0.18 | −0.18 | 0.06 | −0.35 | −0.04 | 0.09 | −0.59 | −0.07 |
| ST3GAL5 | −0.54 | −0.05 | 0.08 | −0.50 | −0.11 | −0.25 | −0.88 | 0.25 | −0.12 | −0.40 | −0.61 |
| STAT1 | −0.96 | −0.21 | −0.51 | −0.37 | −0.45 | −0.34 | −0.94 | −0.77 | 0.15 | −1.44 | −0.38 |
| STEAP3 | −0.13 | −0.09 | −0.14 | −0.05 | 0.03 | 0.01 | −0.96 | −0.37 | 0.15 | −1.00 | −0.38 |
| STIM1 | −0.35 | −0.13 | 0.02 | −0.12 | −0.07 | −0.11 | −0.61 | 0.20 | 0.05 | −0.67 | 0.60 |
| SULT2A1 | −0.21 | −0.09 | 0.59 | 0.62 | −0.07 | −0.28 | 1.85 | 2.57 | 0.32 | 2.33 | 2.98 |
| SUOX | −0.90 | −0.12 | −0.54 | −0.26 | −0.01 | −0.13 | −0.62 | 0.42 | −0.21 | −1.40 | −0.03 |
| TARS2 | −0.32 | −0.07 | −0.28 | −0.14 | −0.08 | −0.07 | −0.29 | −0.09 | −0.05 | −0.83 | −0.16 |
| TAT | −1.21 | 0.02 | −0.52 | 0.16 | 0.16 | 0.04 | −0.81 | 4.01 | −0.09 | −0.49 | 2.69 |
| TCIRG1 | −0.09 | 0.14 | 0.09 | 0.57 | 0.39 | 0.19 | 0.07 | −0.13 | −0.09 | −0.37 | −1.03 |
| TCTN3 | −0.05 | −0.22 | −0.43 | −0.45 | −0.34 | −0.30 | −0.67 | 0.09 | −0.22 | −1.17 | 0.07 |
| TDO2 | −1.40 | −0.35 | −0.15 | −0.38 | −0.14 | −0.44 | −1.56 | 0.92 | −0.23 | −1.42 | −0.37 |
| TF | −0.34 | −0.25 | −0.17 | −0.07 | −0.09 | −0.17 | −0.46 | 0.29 | −0.19 | −0.03 | 0.18 |
| TFR2 | 0.06 | −0.09 | 0.04 | 0.06 | 0.07 | −0.08 | −0.71 | 0.74 | 0.24 | −0.64 | 0.71 |
| TGFB1 | −0.99 | −0.15 | 0.27 | −0.57 | −0.16 | −0.16 | −1.01 | −1.15 | −0.25 | −2.69 | −0.86 |
| THPO | 0.22 | 0.23 | 0.11 | −0.23 | 0.03 | 0.06 | −0.66 | −0.01 | −0.37 | −2.04 | −1.39 |
| THRB | −1.03 | −0.06 | −0.11 | −0.13 | −0.18 | −0.18 | −0.01 | 0.22 | 0.08 | 0.46 | 0.63 |
| TK2 | −0.29 | −0.09 | 0.00 | −0.20 | 0.15 | 0.06 | −0.89 | −0.07 | 0.41 | −0.66 | −0.89 |
| TMEM135 | −0.06 | −0.16 | 0.19 | −0.25 | −0.41 | −0.27 | 0.30 | 0.69 | 0.01 | 0.49 | 0.81 |
| TMEM165 | −0.19 | −0.15 | −0.24 | −0.21 | −0.17 | −0.13 | −0.46 | −0.15 | −0.05 | −1.22 | −0.56 |
| TMEM67 | 0.11 | 0.14 | 0.08 | −0.29 | 0.04 | −0.01 | −0.84 | −0.69 | 0.24 | −1.17 | −0.09 |
| TMLHE | −0.37 | −0.14 | −0.26 | 0.00 | −0.50 | −0.46 | −0.75 | 0.38 | 0.14 | −0.81 | 0.64 |
| TMPRSS6 | 0.04 | 0.01 | 0.03 | 0.43 | 0.34 | 0.07 | −0.25 | 0.32 | −0.16 | 0.08 | −0.04 |
| TNFRSF1A | −0.42 | −0.06 | 0.04 | −0.17 | −0.13 | −0.12 | −0.50 | −0.30 | −0.14 | −1.11 | 0.41 |
| TNFSF11 | −1.97 | −0.07 | 0.11 | −0.79 | −0.28 | −0.24 | −2.52 | −1.44 | −0.07 | −1.50 | −2.99 |
| TP53 | −0.40 | −0.07 | −0.34 | −0.07 | 0.04 | −0.01 | −0.70 | −0.03 | 0.27 | −0.68 | 0.35 |
| TTC21B | −0.76 | −0.14 | −0.21 | −0.28 | −0.28 | −0.29 | −0.43 | 0.15 | 0.12 | −0.58 | 0.87 |
| TTPA | −1.19 | −0.23 | −0.97 | −0.14 | −0.20 | −0.23 | −1.18 | 0.92 | 0.00 | −0.53 | 0.80 |
| TTR | −0.44 | −0.31 | −0.18 | −0.03 | −0.23 | −0.32 | −0.25 | 0.14 | −0.59 | −0.01 | −0.36 |
| TYMP | −0.08 | −0.09 | 0.12 | 0.38 | 0.37 | 0.27 | 0.60 | −0.20 | −0.65 | 0.33 | −1.81 |
| UBR1 | −0.04 | 0.00 | −0.15 | −0.11 | −0.15 | −0.01 | −0.70 | 0.20 | 0.51 | −1.04 | 0.80 |
| UGT1A1 | 0.08 | −0.35 | −0.68 | −0.42 | −0.38 | −0.41 | −1.71 | 1.35 | 0.80 | −1.38 | 0.30 |
| UGT2B28 | −0.44 | 0.25 | −0.14 | 0.52 | 0.41 | 0.45 | −1.21 | 0.05 | −0.71 | −1.78 | 0.19 |
| UNC13D | 0.15 | 0.25 | 0.24 | 0.71 | 0.44 | 0.38 | 0.47 | −0.13 | −0.07 | −0.13 | −0.71 |
| UPB1 | −0.12 | 0.09 | −0.25 | 0.12 | 0.19 | −0.04 | 0.40 | 0.69 | −0.04 | −0.41 | 1.31 |
| UQCRB | −0.34 | −0.41 | −0.29 | −0.19 | −0.18 | −0.17 | −0.09 | −0.18 | −0.83 | −0.05 | −0.64 |
| UROC1 | −0.74 | −0.47 | −0.37 | −0.23 | −0.26 | −0.17 | −0.76 | 0.31 | −0.02 | −0.70 | −0.03 |
| UTRN | −0.86 | −0.12 | −0.21 | −0.07 | −0.06 | −0.08 | −0.99 | 0.20 | 1.12 | −0.64 | 1.18 |
| VIPAS39 | −0.03 | −0.05 | −0.07 | −0.02 | −0.08 | −0.03 | −0.32 | 0.01 | 0.11 | −0.60 | 0.74 |
| VLDLR | 0.19 | −0.22 | 0.37 | 0.16 | −0.30 | −0.27 | 0.12 | −0.34 | 0.60 | 0.39 | 1.44 |
| VPS13A | 0.12 | 0.31 | 0.28 | 0.24 | 0.08 | 0.11 | −0.22 | 0.33 | 0.82 | −0.35 | 0.13 |
| VPS33B | 0.26 | 0.08 | −0.15 | 0.03 | 0.13 | 0.11 | −0.31 | −0.06 | 0.04 | −1.01 | 0.07 |
| WAS | 0.12 | −0.30 | −0.36 | 0.16 | 0.03 | −0.29 | −0.57 | 0.87 | −0.05 | −0.24 | 0.11 |
| WDR35 | 0.05 | 0.20 | −0.28 | −0.29 | −0.03 | −0.06 | −0.71 | 0.08 | 0.35 | −1.06 | −0.02 |
| XDH | 0.42 | −0.22 | 0.39 | 0.12 | 0.17 | −0.08 | 0.05 | 1.10 | 0.58 | 1.31 | 1.49 |
| YARS2 | −0.30 | −0.25 | −0.38 | −0.40 | −0.36 | −0.30 | −0.66 | −0.53 | −0.30 | −0.90 | −0.40 |
| Gene | 54 | 55 | 61 | 62 | 65 | 66 | 70 | 76 | 79 | 83 | 84 |
| A1BG | −0.89 | 0.01 | 0.12 | 0.21 | 0.33 | 0.48 | 0.84 | 0.06 | 0.51 | −0.47 | −0.1 |
| AARS2 | 0.01 | −0.01 | −0.65 | −0.36 | 0.25 | −0.15 | −1.37 | 0.14 | −0.21 | −0.11 | 0.13 |
| AASS | 0.26 | −0.07 | −0.86 | −0.15 | −0.5 | −0.93 | −0.6 | −0.14 | −0.59 | 0.06 | −0.77 |
| ABAT | 0.38 | −0.12 | −1.25 | −0.5 | −0.44 | −1.12 | −0.97 | −0.22 | −1.07 | 0.02 | −1.42 |
| ABCA1 | 0.94 | 0.05 | −0.23 | −0.41 | −0.59 | −0.97 | 0.25 | −0.12 | −0.36 | −0.08 | −0.43 |
| ABCB11 | 0.89 | 0.13 | −0.32 | −0.25 | 0 | 0.3 | −0.27 | 0.21 | −0.77 | 0.13 | −0.76 |
| ABCB4 | 0.65 | 0.09 | 0.41 | −0.09 | −0.11 | 0.16 | −0.12 | −0.35 | −0.22 | 0.19 | −0.43 |
| ABCC2 | 0.67 | 0.56 | −0.58 | −0.1 | 0.25 | 0.2 | −0.54 | 0.15 | −0.51 | −0.03 | −1.34 |
| ABCC3 | 0.40 | 0.03 | 0.14 | −0.29 | 0.09 | −0.03 | −0.57 | −0.31 | −0.06 | −0.05 | −0.96 |
| ABCC6 | 0.29 | 0.12 | 0.26 | −0.04 | 0.02 | 0.49 | −0.79 | −0.48 | −0.16 | −0.01 | −1.45 |
| ABCD1 | 0.12 | −0.10 | −0.74 | −0.11 | 0.12 | −0.13 | 1.15 | 0.23 | −0.21 | −0.48 | 0.08 |
| ABCD3 | 0.09 | 0.07 | −0.39 | −0.44 | −0.41 | −0.56 | −0.42 | −0.04 | −0.12 | 0.04 | −0.4 |
| ABCG5 | 0.13 | 0.15 | 0.27 | −0.24 | 0.06 | 0.56 | −0.59 | −0.29 | −0.03 | 0.19 | −0.11 |
| ABCG8 | 0.24 | 0.29 | −0.37 | −0.4 | −0.15 | −0.21 | 0.36 | −0.07 | −0.46 | 0.04 | −0.11 |
| ABHD5 | 0.05 | 0.05 | 1.08 | 0.5 | 0.26 | 1.41 | 0.4 | 0.14 | 1.56 | 0.12 | 0.25 |
| ACACA | 0.70 | 0.03 | −0.1 | 0.24 | −0.38 | −0.5 | −1.13 | −0.23 | −0.2 | −0.17 | −2.09 |
| ACACB | 0.57 | 0.17 | 0.28 | 0.49 | −0.1 | 0.31 | −1.47 | −0.42 | −0.36 | 0.06 | −1.86 |
| ACAD9 | 0.01 | −0.03 | −0.5 | −0.16 | 0.07 | −0.27 | −0.35 | 0.07 | −0.09 | −0.13 | −0.83 |
| ACADSB | 0.26 | 0.07 | −0.71 | −0.14 | −0.31 | −0.21 | 0.39 | 0.14 | −0.23 | 0.05 | −0.04 |
| ACADVL | −0.33 | −0.09 | −0.35 | −0.15 | 0.14 | 0.41 | 0.31 | −0.11 | −0.19 | −0.06 | 0.11 |
| ACOT8 | −1.01 | 0.03 | −0.27 | 0.05 | 0.13 | −0.28 | −0.04 | 0.14 | 0.45 | −0.12 | −0.33 |
| ACOX2 | 0.06 | 0.12 | −0.48 | −0.13 | 0.05 | −0.18 | −0.89 | −0.22 | −0.41 | 0.26 | −0.97 |
| ACOX3 | −0.10 | −0.20 | 0.2 | −0.44 | −0.08 | 0.07 | −1.17 | −0.15 | 0.01 | −0.15 | −1.75 |
| ACSF3 | −0.47 | −0.02 | −0.32 | 0 | 0.14 | 0.16 | −1.03 | 0.07 | 0.29 | −0.22 | −0.6 |
| ACSL1 | 0.30 | 0.24 | 0.11 | 0.81 | 0.16 | 0.36 | 0.06 | 0 | 0.11 | 0.03 | −0.12 |
| ACSL3 | 0.09 | 0.02 | 0.44 | 0.44 | 0.01 | −0.18 | 0.95 | 0.27 | 0.15 | −0.06 | 0.16 |
| ACTG2 | 0.15 | 0.28 | −0.53 | −0.31 | −0.72 | −1.5 | 0.31 | −0.17 | −0.43 | −0.07 | −0.13 |
| ACTN1 | 0.44 | −0.21 | 0.03 | −0.36 | −0.05 | −0.29 | −0.44 | −0.29 | −0.28 | −0.21 | −2.21 |
| ADA | −0.29 | −0.03 | −0.24 | −0.48 | −0.02 | −0.7 | 0.46 | 0.2 | −0.36 | −0.16 | −0.72 |
| ADCK3 | −0.21 | 0.12 | −0.36 | −0.45 | 0.05 | 0.17 | 0.18 | 0.15 | −0.2 | −0.11 | 0.18 |
| ADK | −0.52 | −0.07 | −0.45 | −0.18 | −0.18 | −0.5 | 0.41 | −0.07 | 0.45 | 0.04 | −1.7 |
| ADSL | −0.41 | −0.01 | −0.49 | −0.27 | −0.09 | −0.53 | −0.79 | 0.19 | 0.22 | −0.05 | −0.96 |
| AFP | −0.98 | −0.28 | −0.77 | −0.31 | −0.14 | −0.98 | −1.03 | 0.43 | −0.12 | −0.23 | −0.16 |
| AGK | 0.17 | 0.06 | −0.47 | −0.23 | 0.07 | −0.36 | −1.12 | 0.11 | 0.06 | 0.03 | −0.43 |
| AGL | 0.36 | −0.05 | −0.67 | −0.29 | −0.47 | −0.46 | −0.48 | 0 | −0.27 | −0.05 | −0.97 |
| AGPAT2 | −0.97 | −0.09 | 0.04 | 0.53 | 0.39 | 0.28 | 1.3 | 0.13 | 0.45 | −0.59 | −1.09 |
| AGPS | 0.43 | −0.04 | −0.15 | −0.33 | −0.45 | −0.42 | −0.83 | 0.07 | 0.1 | −0.06 | −1.61 |
| AGT | −0.44 | −0.05 | −0.13 | 0 | 0.06 | 0.08 | 0.72 | 0.09 | 0.32 | 0.03 | 0.27 |
| AGTR1 | −0.13 | −0.08 | 0.32 | 0.01 | −0.28 | −0.38 | −0.58 | −0.2 | 0.18 | 0.18 | −0.07 |
| AGXT | −0.66 | 0.04 | −0.55 | −0.24 | 0.1 | −0.04 | 0.21 | 0.02 | 0.2 | −0.28 | −0.66 |
| AHI1 | 0.36 | 0.12 | 0.17 | −0.33 | −0.3 | 0 | −0.81 | −0.14 | −0.01 | 0.3 | −0.61 |
| AHSG | −0.42 | 0.06 | −0.27 | −0.06 | −0.06 | 0.43 | 0.17 | −0.28 | 0.53 | 0.29 | −0.32 |
| AK1 | −0.92 | −0.04 | −0.43 | −0.09 | 0.1 | −0.48 | 0.96 | 0.31 | 0.37 | −0.09 | 0.62 |
| AKR1C1 | −0.83 | 0.02 | −0.13 | 0.06 | 0.15 | 0.17 | −0.52 | 0.49 | 0.35 | −0.07 | −0.96 |
| AKR1C2 | −0.41 | 0.04 | −0.33 | 0.09 | 0.44 | 0.25 | −0.75 | 0.51 | 0.13 | −0.06 | −1.2 |
| AKR1C4 | −0.38 | 0.38 | −0.39 | −0.68 | −0.21 | 0.04 | −1.13 | −0.11 | 0.24 | 0.34 | −1.68 |
| AKR1D1 | −0.10 | 0.35 | 0.07 | 1.24 | 0.48 | 1.48 | 0.5 | −0.03 | 1.16 | 0.39 | 0.17 |
| ALAD | 0.28 | 0.05 | −0.5 | −0.27 | −0.03 | 0.58 | −1.12 | −0.24 | −0.66 | 0.12 | −0.69 |
| ALAS1 | 0.04 | 0.68 | 0.02 | −0.11 | 0.29 | −0.37 | −1.01 | 0.01 | −0.04 | 0.02 | 0.11 |
| ALDH1B1 | −0.06 | −0.07 | −0.02 | −0.23 | 0.13 | −0.07 | −1.28 | −0.08 | −0.06 | −0.08 | −0.86 |
| ALDH2 | −0.60 | 0.05 | 0.06 | 0.04 | 0.09 | 0.55 | 0.62 | 0.08 | 0.54 | −0.08 | −0.04 |
| ALDH6A1 | 0.01 | 0.12 | −0.17 | −0.2 | −0.23 | −0.04 | 0.47 | 0.03 | −0.02 | 0.05 | −0.08 |
| ALDOA | −0.54 | −0.12 | −0.71 | 0.11 | 0.13 | −0.29 | −0.1 | 0.23 | −0.37 | −0.16 | −0.48 |
| ALDOB | 0.00 | 0.05 | 0.48 | 0.08 | 0.02 | 0.89 | −0.23 | −0.1 | 0.18 | 0.27 | −0.27 |
| ALG12 | −0.09 | 0.14 | −0.4 | −0.01 | 0.22 | 0.12 | 0.02 | −0.01 | −0.29 | −0.2 | −0.76 |
| ALMS1 | 0.98 | 0.16 | 0.46 | −0.15 | 0 | 0.29 | −1.13 | −0.05 | −0.54 | 0.06 | −1.35 |
| ALPL | −0.16 | 0.27 | 0.48 | 0.58 | 0.61 | 1.5 | −0.4 | −0.27 | 0.14 | −0.18 | −1.05 |
| AMACR | −0.02 | −0.16 | −0.71 | 0.43 | −0.09 | −0.35 | −0.43 | 0.12 | −0.35 | −0.08 | 0.28 |
| AMPD3 | 0.18 | 0.06 | −0.1 | 0 | 0.35 | 0.54 | 1.1 | 0 | −0.23 | −0.16 | 0.57 |
| AMT | −0.52 | 0.13 | −0.5 | 0.1 | 0.08 | −0.38 | 0.39 | 0.04 | 0.03 | 0 | −0.61 |
| ANGPTL3 | −0.15 | −0.18 | −0.79 | −0.65 | −0.77 | −0.71 | −0.73 | 0.15 | 0.13 | 0.19 | −0.73 |
| ANKS4B | 0.10 | 0.10 | −0.52 | 0.32 | 0.08 | 0.11 | −2.67 | 0.04 | −0.24 | 0.02 | −0.39 |
| ANKS6 | 0.13 | 0.05 | −0.18 | 0.06 | 0.28 | 0.08 | −0.66 | 0.05 | −0.01 | −0.09 | −0.13 |
| ANPEP | 0.18 | 0.05 | −0.61 | 0.11 | 0.1 | 0.05 | −0.09 | −0.11 | −0.4 | 0.09 | −0.47 |
| AOC2 | 0.62 | 0.00 | 0.04 | −0.18 | −0.23 | 0.09 | 0.27 | 0.03 | 0.15 | −0.05 | 0.32 |
| AP3B1 | 0.23 | 0.00 | 0 | −0.09 | −0.15 | −0.34 | −0.65 | −0.12 | −0.13 | 0.15 | −1.36 |
| APC | 0.84 | −0.06 | −0.2 | −0.1 | −0.34 | −0.25 | −0.37 | 0.05 | −0.51 | −0.02 | −0.04 |
| APOA1 | −1.33 | −0.08 | −0.06 | 0.09 | 0.18 | 0.25 | 0.86 | 0.1 | 0.63 | −0.34 | −0.05 |
| APOA2 | −1.19 | −0.02 | −0.44 | 0.18 | 0.12 | −0.2 | 0.61 | 0.16 | 0.46 | 0.11 | 0.31 |
| APOA5 | −0.90 | −0.09 | −0.4 | 0.14 | 0.32 | 0.32 | 0.86 | 0.11 | 0.43 | −0.4 | −0.18 |
| APOB | 1.25 | 0.30 | 0.02 | 0.23 | −0.21 | 0.65 | −0.24 | −0.45 | −0.64 | 0.08 | −0.78 |
| APOC2 | −0.91 | 0.05 | −0.4 | 0 | 0.03 | −0.37 | 0.37 | 0.08 | 0.4 | 0.21 | 0 |
| APOC3 | −0.89 | 0.04 | −0.16 | 0.08 | 0.22 | 0.08 | 0.7 | 0.22 | 0.55 | 0.11 | 0.42 |
| APOE | −1.21 | 0.01 | −0.1 | 0.17 | 0.41 | 0.46 | 0.72 | 0.05 | 0.65 | −0.89 | −0.56 |
| APRT | −1.19 | −0.06 | −0.39 | −0.25 | 0.08 | −0.28 | 0.04 | 0.17 | 0.45 | −0.35 | −0.42 |
| AQP7 | 0.49 | 0.03 | −0.07 | 0.37 | 0.29 | 2.12 | 0.36 | −0.53 | −0.42 | −0.02 | −0.35 |
| AQP9 | 0.09 | 0.11 | 0.01 | 0.74 | 0.42 | 0.19 | 0.33 | −0.04 | −0.2 | 0.09 | −0.05 |
| ARG1 | −0.13 | 0.09 | −0.03 | −0.47 | −0.29 | 0.35 | −0.28 | −0.28 | −1.05 | 0.45 | −1.7 |
| ARG2 | −0.10 | −0.41 | −0.15 | 0.39 | −0.14 | 0.49 | 3.36 | 0.15 | 0.7 | −0.31 | 0.62 |
| ARL13B | −0.37 | 0.00 | 0.14 | −0.14 | −0.17 | −0.34 | −0.68 | 0.18 | 0.31 | 0.2 | −0.67 |
| ARSA | −0.40 | −0.08 | −0.14 | 0.27 | 0.34 | 0.24 | 1.26 | −0.18 | −0.02 | −0.38 | 0.27 |
| ARSB | 0.35 | 0.07 | −0.34 | 0.08 | 0.21 | −0.14 | 0.4 | −0.3 | −0.15 | −0.25 | −0.25 |
| ASL | −0.66 | −0.06 | −0.3 | 0.24 | 0.23 | 0 | −0.25 | 0 | 0.32 | −0.16 | −0.24 |
| ASNS | 0.04 | 0.22 | 1.81 | 0.96 | 0.89 | 2.23 | −0.25 | 0.29 | 3.2 | 0.28 | 1.61 |
| ASPA | 0.72 | −0.33 | 0.63 | −0.99 | −0.08 | 1.18 | 0.81 | −0.05 | −0.01 | 0.14 | 1.55 |
| ASXL1 | 0.28 | −0.09 | −0.08 | −0.33 | −0.13 | 0.09 | −0.58 | −0.11 | −0.31 | −0.1 | −1.04 |
| ATG7 | −0.25 | 0.10 | −0.04 | −0.25 | −0.05 | −0.16 | −0.26 | −0.12 | 0.35 | −0.02 | −1.54 |
| ATIC | −0.16 | 0.01 | −0.46 | −0.48 | −0.13 | −0.69 | −1.49 | 0.08 | 0.09 | 0.06 | −0.74 |
| ATM | 0.91 | 0.09 | 0.3 | −0.16 | −0.21 | −0.07 | −1.12 | −0.19 | −0.28 | 0.1 | −0.5 |
| ATP7A | 0.44 | 0.12 | −0.33 | −0.09 | −0.29 | −0.36 | −0.65 | −0.07 | −0.55 | −0.04 | −0.03 |
| ATP7B | 0.48 | 0.04 | −0.58 | −0.11 | −0.06 | −0.19 | −0.23 | −0.05 | −0.43 | −0.07 | −0.8 |
| ATP8B1 | 0.46 | −0.05 | −0.48 | 0.05 | −0.16 | −0.49 | −0.61 | −0.04 | −0.48 | −0.19 | −2.3 |
| B2M | −0.49 | −0.06 | 0.09 | 0.16 | −0.07 | −0.08 | 0.38 | 0.16 | 0.56 | 0.15 | 0.23 |
| B9D2 | −0.43 | 0.10 | −0.56 | −0.55 | 0.29 | −0.29 | 0.04 | −0.2 | 0.16 | −0.49 | −0.83 |
| BAAT | 0.17 | 0.02 | −0.58 | 0.61 | 0.01 | 0.22 | −1.32 | 0.12 | −0.52 | 0.13 | −1.93 |
| BBOX1 | −0.45 | −0.39 | −0.56 | −0.14 | 0.01 | −0.45 | −1.19 | 0.35 | −0.06 | 0 | −0.77 |
| BBS10 | 0.26 | −0.12 | −0.21 | −0.33 | −0.41 | −0.28 | −0.06 | 0.24 | 0.05 | 0.02 | 0.59 |
| BCHE | 0.02 | −0.07 | −0.63 | −0.41 | −0.5 | −0.79 | −0.69 | −0.07 | 0.12 | 0.13 | −0.67 |
| BCKDHB | −0.16 | 0.07 | −0.78 | −0.31 | −0.06 | −0.38 | 0 | −0.17 | 0.04 | 0.05 | −1.21 |
| BCKDK | −0.21 | 0.00 | −0.48 | −0.23 | 0.02 | −0.45 | −0.91 | 0.04 | −0.23 | −0.37 | −0.42 |
| BCO1 | −0.38 | −0.09 | −1.07 | 0.24 | 0.08 | −0.53 | −0.28 | −0.28 | −0.13 | −0.08 | 0.72 |
| BCR | 0.14 | −0.04 | −0.62 | −0.06 | 0.04 | −0.26 | −0.83 | −0.01 | −0.17 | −0.3 | −1.54 |
| BLNK | 0.09 | −0.03 | 0.53 | 0.39 | 0.18 | 0.75 | 1.32 | −0.2 | −0.18 | 0.06 | 1.31 |
| BLOC1S3 | 0.15 | −0.02 | 0.3 | 0.46 | 0.46 | 0.76 | −0.26 | 0.04 | 0.32 | −0.06 | 0.01 |
| BMPR1A | 0.51 | 0.01 | 0.11 | 0.09 | 0 | 0.07 | −0.33 | −0.05 | −0.06 | −0.02 | −0.9 |
| BRAF | 0.82 | 0.30 | 0.46 | 0.04 | 0.2 | 0.32 | −0.34 | −0.01 | 0.03 | 0.14 | −0.44 |
| BSCL2 | −3.20 | 0.05 | −0.26 | −0.54 | −0.45 | −0.58 | 0.84 | −0.03 | 1.5 | 0.24 | 0.07 |
| BTD | 0.19 | −0.02 | −0.16 | −0.08 | −0.16 | 0.25 | −0.48 | −0.16 | −0.25 | 0.08 | −0.53 |
| C10orf10 | −0.49 | 0.01 | 0.14 | −0.31 | 0.02 | 0.81 | 1.26 | −0.2 | −0.02 | −0.01 | 0.23 |
| C10orf11 | −0.62 | −0.27 | −0.32 | 0.1 | 0.18 | 0.1 | −1.44 | −0.71 | 0.56 | 0.14 | −2.08 |
| C15orf41 | 0.50 | −0.28 | −0.17 | −0.2 | 0.13 | 0.03 | −1.28 | 0.08 | 0.12 | −0.45 | −1.68 |
| C4A | 0.20 | 0.16 | 0.16 | 0.24 | 0.05 | 0.16 | 0.4 | −0.36 | −0.38 | −0.2 | 0.29 |
| C9 | −0.13 | −0.11 | −0.38 | −0.11 | −0.2 | −0.21 | 1.1 | 0.16 | 0.21 | 0.15 | 0.55 |
| CA12 | 0.06 | 0.80 | 0.43 | 0.58 | 0.77 | 0.59 | 0.43 | 0.32 | 0.2 | 0.02 | 0.58 |
| CA2 | −0.44 | 0.59 | 0.76 | 0.6 | 0.53 | 0.48 | 1.36 | 0.11 | 0.71 | 0.15 | 0.9 |
| CA5A | 0.23 | −0.22 | −0.56 | 0.1 | 0.24 | −0.02 | −0.64 | −0.1 | 0.32 | 0.04 | −1.34 |
| CAV1 | 0.15 | −0.21 | −0.02 | −0.81 | −0.47 | −0.47 | 0.02 | 0.13 | 0.34 | 0.02 | −0.74 |
| CCND1 | 0.25 | −0.14 | −0.89 | −0.9 | −0.33 | −2.24 | 0.26 | 0.16 | −0.7 | −0.25 | −0.78 |
| CD320 | −0.95 | −0.04 | −0.95 | −0.04 | 0.17 | −0.58 | −0.9 | 0.17 | 0.3 | −0.29 | −0.96 |
| CD46 | 0.05 | −0.05 | 0.34 | 0.24 | −0.14 | −0.02 | 1.34 | 0.08 | 0.23 | 0.15 | 0.43 |
| CD81 | −0.76 | −0.02 | −0.26 | 0.27 | 0.3 | 0.02 | 0.46 | 0.09 | 0.17 | −0.11 | 0.03 |
| CDAN1 | 0.10 | −0.07 | −0.32 | −0.04 | 0.25 | 0.02 | −0.23 | 0.11 | −0.27 | −0.08 | 0.38 |
| CDH1 | 0.50 | 0.01 | −0.29 | −0.12 | −0.29 | −0.25 | −0.12 | −0.56 | −0.59 | 0.06 | −1.79 |
| CEP164 | 0.05 | −0.01 | −0.48 | −0.12 | 0.12 | −0.32 | 1.34 | −0.03 | −0.21 | −0.1 | 0.23 |
| CEP19 | −0.43 | −0.22 | −0.54 | −0.06 | −0.07 | −0.43 | 0.44 | −0.02 | 0.1 | −0.07 | −0.28 |
| CEP290 | 0.01 | 0.06 | 0.41 | −0.26 | −0.14 | −0.17 | −1.26 | 0.16 | 0.55 | 0.44 | 0.21 |
| CEP83 | 0.33 | −0.04 | 0.05 | −0.3 | −0.12 | −0.13 | −1.24 | −0.06 | −0.15 | 0.11 | −0.39 |
| CFB | −0.28 | −0.07 | 0.26 | 0.1 | 0.02 | 0.17 | 0.72 | 0.01 | 0.23 | 0.1 | 0.29 |
| CFHR2 | −0.93 | 0.01 | −0.22 | −0.08 | −0.46 | −0.16 | 1.2 | 0.13 | 0.4 | 0.35 | 0.7 |
| CHRM3 | 0.20 | 0.08 | 0.06 | 0.28 | −0.06 | −0.14 | −0.08 | −0.58 | −0.27 | −0.17 | −2.02 |
| CIDEC | −0.40 | 0.28 | −1.38 | −0.13 | 0.1 | 0.24 | −0.39 | −0.06 | −0.79 | 0.08 | −0.6 |
| CLDN1 | 0.16 | −0.05 | −0.26 | −0.46 | −0.37 | −0.71 | −0.93 | −0.05 | 0.09 | −0.01 | −0.83 |
| COG1 | 0.25 | 0.17 | −0.08 | −0.19 | 0.06 | −0.28 | 0.38 | 0.12 | −0.37 | −0.19 | 0.5 |
| COG5 | 0.35 | −0.06 | 0.11 | −0.14 | −0.22 | −0.03 | −0.45 | −0.12 | 0.24 | −0.02 | −1.94 |
| COG6 | 0.23 | −0.01 | −0.09 | 0.1 | −0.08 | 0.08 | −0.46 | 0.18 | 0.29 | −0.09 | −0.28 |
| COL1A1 | 0.34 | −0.34 | 0.18 | 0.41 | 0.09 | 0.48 | −0.72 | −0.09 | −0.43 | −0.35 | 0.45 |
| COX6A1 | −1.30 | −0.13 | −0.08 | 0.02 | −0.01 | −0.07 | 0.16 | 0.29 | 0.62 | −0.05 | 0.27 |
| CP | 0.80 | 0.11 | 0.77 | 0.26 | −0.27 | 0.16 | 0.53 | −0.16 | −0.27 | 0.36 | 0.19 |
| CPS1 | 0.69 | 0.09 | −0.89 | 0.52 | −0.63 | 0.84 | −0.28 | −0.56 | −0.75 | 0.2 | −0.79 |
| CPT1A | −0.10 | −0.18 | 0.11 | 0.19 | 0.13 | 1.06 | 0.16 | −0.03 | −0.4 | 0.08 | −1.18 |
| CPT2 | −0.15 | 0.10 | −0.16 | −0.2 | 0.05 | 0.33 | 1.26 | 0.28 | −0.1 | 0.07 | 1.3 |
| CROT | −0.21 | −0.04 | −0.49 | −0.4 | −0.4 | −0.69 | 0.55 | 0.19 | −0.33 | −0.02 | 0.23 |
| CSPP1 | −0.22 | −0.07 | 0.24 | −0.14 | −0.05 | 0.17 | −0.7 | −0.09 | 0.17 | 0.35 | −0.45 |
| CTC1 | 0.46 | −0.08 | −0.01 | 0.03 | 0.2 | 0.2 | −0.9 | 0.04 | −0.2 | −0.04 | 0.65 |
| CTDSP2 | 0.44 | 0.10 | 0.52 | −0.14 | −0.07 | 0.56 | −0.18 | −0.06 | 0.03 | 0 | −0.36 |
| CTH | −0.17 | 0.23 | 1.17 | 0.67 | 0.6 | 1.87 | 0.66 | 0.15 | 2.52 | 0.11 | 1.32 |
| CTNS | 0.16 | 0.08 | −0.11 | 0.69 | 0.65 | 0.42 | −1.18 | 0.1 | −0.12 | −0.16 | −0.39 |
| CTSF | −0.63 | 0.10 | 0.25 | 0.19 | 0.3 | 0.68 | 0.6 | 0.07 | 0.3 | −0.1 | 0.01 |
| CTSK | 0.47 | −0.15 | 0.31 | 0.08 | 0.04 | −0.49 | 0.02 | −0.13 | 0 | 0.32 | 1.01 |
| CYB5A | −0.56 | 0.73 | −0.12 | −0.09 | 0.34 | 0.43 | −0.16 | −0.01 | 0.21 | 0.09 | −0.54 |
| CYB5R3 | 0.02 | 0.04 | −0.21 | 0.1 | 0.13 | 0.05 | 0.14 | 0.05 | 0.07 | −0.25 | −0.57 |
| CYP27A1 | −0.43 | 0.04 | −0.18 | 0.14 | 0.28 | 0.51 | 0.51 | −0.03 | 0.12 | 0.02 | −0.12 |
| CYP2B6 | 0.34 | 0.48 | 0.25 | −0.08 | 0.12 | 0.58 | 0.41 | −0.04 | 0.09 | 0.24 | 0.2 |
| CYP2C19 | 1.62 | 0.24 | 0.54 | 0.1 | −0.31 | 0.2 | −1 | −0.79 | −0.14 | 0.27 | −1.4 |
| CYP2D6 | −0.62 | 0.11 | −0.06 | 0.16 | 0.22 | 0.47 | 0.79 | −0.01 | 0.24 | −0.3 | 0.27 |
| CYP39A1 | −0.08 | 0.43 | −0.07 | 0.08 | −0.11 | 0.62 | −0.24 | −0.23 | 0 | 0.06 | −0.62 |
| CYP3A4 | 0.01 | 3.12 | 0.07 | 0.11 | 0.77 | 2.11 | 1.58 | 0.18 | 0.49 | 0.18 | 0.96 |
| CYP7B1 | 0.26 | 0.05 | −0.46 | −0.3 | −0.34 | 0.28 | −0.02 | −0.27 | −0.44 | −0.17 | −1.05 |
| DAO | −0.01 | −0.04 | −1.06 | −0.11 | 0.13 | −1.2 | 0.23 | −0.06 | −0.72 | 0.02 | −0.79 |
| DBT | 0.28 | 0.04 | −0.13 | −0.16 | −0.32 | −0.43 | −0.33 | −0.01 | 0 | 0.18 | −0.27 |
| DCDC2 | 0.20 | 0.01 | −1.43 | −1.04 | −0.6 | −2.5 | −1.25 | −0.57 | −0.51 | 0.25 | −2.14 |
| DCXR | −1.16 | −0.01 | −0.74 | 0.01 | 0.16 | −0.23 | 0.96 | 0.23 | 0.37 | −0.35 | −0.21 |
| DDC | −0.51 | 0.11 | −1.21 | −0.6 | −0.25 | −0.66 | −0.43 | 0.14 | 0.14 | −0.04 | −0.74 |
| DDO | 0.06 | −0.03 | −0.47 | 0.15 | 0.12 | −0.59 | −0.11 | −0.21 | −0.06 | 0.21 | 0.12 |
| DENR | −0.42 | −0.05 | −0.26 | −0.08 | −0.13 | −0.46 | −0.22 | 0.13 | 0.35 | 0.07 | −0.2 |
| DHCR24 | 0.26 | 0.12 | −0.12 | 0.17 | −0.14 | −0.22 | −0.36 | −0.04 | −0.25 | −0.09 | −1.07 |
| DHCR7 | 0.15 | −0.01 | 0.08 | 1.4 | 0.32 | −0.42 | −0.23 | 0.02 | −0.18 | −0.11 | −0.04 |
| DHODH | −0.39 | 0.00 | −0.3 | −0.14 | 0.22 | −0.12 | −1.41 | −0.06 | 0.16 | 0.1 | −0.64 |
| DIS3L2 | 0.23 | −0.11 | −0.39 | −0.37 | −0.14 | −0.44 | −0.92 | −0.36 | −0.23 | −0.05 | −2.21 |
| DKC1 | −0.28 | −0.03 | −0.37 | −0.23 | −0.05 | −0.42 | −1.33 | 0.26 | 0.58 | 0.05 | −0.34 |
| DLAT | 0.02 | −0.09 | 0.01 | 0.16 | −0.21 | −0.77 | −1.1 | 0.07 | 0.04 | −0.1 | −0.67 |
| DLD | −0.10 | 0.00 | −0.33 | −0.21 | −0.3 | −0.52 | −0.51 | 0.08 | 0.04 | 0.07 | −0.63 |
| DMGDH | 0.17 | 0.15 | −0.21 | −0.14 | −0.15 | −0.16 | 0.24 | 0.2 | −0.02 | 0.16 | −0.14 |
| DNAH5 | 0.70 | −0.03 | 0.66 | −0.29 | −0.1 | 0.34 | −1 | −0.23 | −0.39 | 0.05 | −1.27 |
| DNM1L | 0.30 | −0.08 | −0.19 | −0.13 | −0.12 | −0.41 | −0.49 | 0.22 | −0.06 | 0 | −0.51 |
| DOLK | −0.21 | −0.04 | −0.2 | 0.09 | 0.33 | −0.26 | 0.19 | 0.1 | −0.06 | −0.16 | 0.71 |
| DPM3 | −1.37 | −0.06 | −0.1 | 0.29 | 0.68 | 0.19 | 0.16 | 0.24 | 0.52 | −0.42 | −0.19 |
| DPYD | 0.34 | 0.17 | −0.24 | −0.11 | −0.43 | −0.18 | −0.61 | −0.96 | 0 | 0.02 | −2.58 |
| DPYS | 0.12 | 0.23 | −0.95 | −0.39 | −0.27 | −0.23 | −0.34 | −0.13 | −0.21 | 0.06 | −1.22 |
| EARS2 | 0.29 | 0.09 | −0.5 | −0.29 | −0.01 | −0.42 | −0.63 | 0.03 | −0.26 | −0.08 | −0.77 |
| EDA | 0.29 | −0.02 | 0.1 | 0.61 | 0.3 | 0.48 | 0.91 | −0.77 | −0.33 | −0.18 | −1.29 |
| EHHADH | 0.23 | 0.05 | −0.49 | −0.25 | −0.3 | −0.31 | −0.33 | −0.09 | −0.43 | 0.17 | −0.33 |
| ELAC2 | −0.14 | 0.02 | −0.53 | −0.35 | −0.13 | −0.4 | −0.76 | 0.21 | −0.08 | −0.17 | −0.41 |
| ENO3 | −0.48 | −0.27 | −0.1 | 0.02 | −0.12 | −0.85 | 1.32 | 0.05 | −0.16 | −0.01 | −0.09 |
| ENPP1 | 0.67 | 0.01 | 0.15 | 0.02 | −0.21 | 0.17 | −0.45 | −0.1 | 0.16 | 0.18 | −0.49 |
| EPG5 | 0.72 | 0.20 | 0.27 | 0.24 | 0 | 0.24 | −0.41 | −0.12 | −0.43 | −0.03 | −0.69 |
| EPHX1 | −0.33 | 0.35 | −0.14 | −0.26 | 0.16 | 0.26 | 0.78 | 0.12 | 0 | 0.04 | 0.08 |
| ERCC4 | 0.36 | −0.05 | −0.13 | −0.05 | −0.18 | −0.2 | −0.31 | −0.02 | 0.01 | 0.02 | 0.4 |
| ERCC6 | 0.61 | 0.16 | 0.24 | −0.2 | −0.09 | 0.08 | 0.09 | 0.04 | −0.12 | 0 | 0.03 |
| ETFB | −1.19 | −0.07 | −0.38 | −0.02 | 0.14 | 0.03 | −0.1 | 0.14 | 0.42 | −0.11 | −0.55 |
| ETHE1 | −0.57 | −0.15 | −0.03 | 0.02 | 0.31 | 0.18 | 0.03 | 0.02 | 0.42 | −0.13 | −0.36 |
| F2 | −0.40 | −0.03 | 0.13 | 0.27 | 0.31 | 0.29 | 0.3 | −0.03 | 0.24 | −0.05 | −0.09 |
| F2RL1 | −0.05 | 0.01 | −0.14 | 0.35 | 0.01 | 0.29 | 0.55 | 0.2 | 0.24 | −0.11 | 1.17 |
| F5 | 0.68 | 0.09 | −0.04 | −0.35 | −0.44 | 0.35 | 0.21 | −0.24 | −0.52 | 0.12 | −0.05 |
| F9 | 0.08 | 0.05 | −0.14 | −0.12 | −0.17 | −0.25 | 0.92 | 0.16 | 0.17 | 0.04 | 0.29 |
| FABP1 | −0.93 | −0.25 | 0.07 | 0.06 | −0.05 | −0.17 | 0.4 | −0.33 | 0.58 | 0.25 | −0.95 |
| FADD | −0.53 | −0.08 | −0.45 | −0.08 | 0.13 | −0.29 | −0.23 | 0.17 | 0.43 | −0.32 | −0.41 |
| FAM111A | 0.49 | 0.07 | 0.1 | 0.12 | −0.05 | −0.05 | −0.68 | −0.14 | −0.26 | 0.18 | 0.93 |
| FAM111B | 0.47 | 0.03 | −2.15 | −1.27 | −0.44 | −2.02 | −0.13 | 1.04 | −1.74 | 0.01 | −1.24 |
| FAN1 | 0.43 | 0.05 | −0.03 | −0.37 | −0.14 | −0.36 | −1.14 | 0.11 | 0.14 | 0.06 | 0.32 |
| FARS2 | −0.55 | −0.14 | −0.42 | −0.21 | −0.04 | −0.34 | −0.84 | −0.7 | 0.06 | −0.06 | −3 |
| FASLG | 0.35 | −0.21 | −1.32 | −0.55 | −0.66 | −1.44 | −1.48 | −0.31 | −1.19 | −0.16 | −1.15 |
| FGA | −0.10 | 0.16 | −0.32 | 0.07 | −0.37 | 0.12 | 0.87 | −0.24 | −0.25 | 0.15 | 0.46 |
| FGD1 | 0.29 | −0.07 | −0.46 | −0.4 | 0.14 | −0.27 | −0.22 | 0.24 | −0.63 | −0.42 | −1.37 |
| FGFR2 | 0.75 | 0.07 | −0.13 | −0.97 | −0.42 | −0.22 | −0.16 | −1.3 | 0.15 | 0.36 | −2.48 |
| FIG4 | 0.08 | −0.12 | −0.07 | 0.29 | 0.3 | 0.06 | −0.45 | −0.09 | 0 | 0.29 | −0.69 |
| FIS1 | −1.07 | −0.06 | −0.35 | −0.06 | 0.25 | −0.18 | −0.27 | 0.19 | 0.52 | 0.01 | −0.22 |
| FTCD | −0.35 | 0.31 | −0.56 | 0.18 | 0.43 | 0.32 | −0.68 | −0.37 | −0.05 | −0.28 | −1.66 |
| FTH1 | −0.84 | 0.06 | 0.44 | 0.45 | 0.7 | 0.48 | −0.17 | 0.34 | 0.6 | −0.33 | −0.49 |
| FUCA1 | −0.37 | −0.11 | −0.13 | 0.02 | 0.07 | 0.24 | 1.44 | 0.04 | 0.01 | 0.06 | 0.43 |
| FXN | −0.10 | 0.23 | −0.22 | −0.33 | 0.12 | −0.02 | −1.56 | −0.11 | −0.17 | −0.37 | −1.04 |
| G6PC | 0.69 | 0.12 | 0.6 | 1.05 | 0.01 | 3.27 | 0.32 | −0.55 | −0.17 | −0.01 | −0.03 |
| G6PC3 | −0.60 | 0.02 | −0.52 | −0.17 | 0.29 | −0.25 | −0.89 | 0.11 | −0.07 | −0.21 | −0.38 |
| G6PD | −0.23 | 0.13 | −0.41 | 0.7 | 0.59 | 0.13 | 1.51 | 0.55 | −0.05 | −0.09 | 1.7 |
| GALK1 | −0.94 | −0.03 | −0.61 | 0.05 | 0.34 | −0.37 | −0.27 | 0.19 | 0.4 | −0.45 | −0.7 |
| GALK2 | −0.51 | 0.00 | −0.14 | 0.08 | −0.11 | −0.25 | 0.04 | 0.04 | 0.22 | −0.06 | −1.47 |
| GALT | −0.13 | 0.01 | −0.58 | 0.37 | 0.26 | 0.41 | −0.02 | −0.13 | −0.21 | 0 | −0.43 |
| GATA6 | −0.26 | −0.07 | 0 | −0.01 | −0.02 | 0.11 | −0.1 | −0.12 | 0.17 | −0.71 | −0.77 |
| GATM | 0.12 | −0.15 | −0.52 | −0.21 | −0.37 | −0.46 | −0.66 | −0.13 | −0.33 | −0.01 | −1.11 |
| GBA | 0.04 | 0.02 | −0.23 | 0.33 | 0.27 | −0.11 | −0.06 | 0.02 | −0.07 | 0.02 | −0.38 |
| GBE1 | −0.07 | −0.15 | −0.11 | 0.06 | −0.08 | 0.2 | −0.62 | −0.01 | 0.39 | −0.06 | −2.25 |
| GCH1 | −0.12 | −0.06 | −0.19 | 0.02 | −0.25 | −0.38 | 1.49 | 0.04 | 0.23 | −0.12 | 0.43 |
| GCKR | 0.17 | 0.23 | −0.06 | 0.43 | 0.32 | −0.08 | −1.15 | −0.15 | −0.19 | 0.14 | −0.16 |
| GCLC | 0.11 | −0.04 | −0.02 | 0.07 | −0.14 | 0.14 | 0.3 | 0.18 | 0.13 | −0.06 | −0.18 |
| GOSH | −1.35 | 0.46 | −1.21 | −0.26 | 0.44 | −0.4 | −0.39 | 0.18 | 0.22 | −1.23 | −1.49 |
| GGCX | 0.17 | 0.19 | 0.04 | −0.27 | −0.22 | −0.26 | 0.29 | −0.22 | −0.1 | 0.08 | −0.17 |
| GHR | 0.73 | 0.10 | 0.05 | −0.23 | −0.6 | −0.7 | −0.71 | −0.53 | −0.67 | 0.29 | −2.23 |
| GJB2 | −0.07 | 0.03 | −0.28 | 0 | 0.1 | 0.06 | 0.44 | 0.02 | 0.04 | 0 | −0.9 |
| GLDC | −0.17 | −0.04 | −1.74 | −0.51 | −0.33 | −1.49 | 0.19 | −0.09 | −0.7 | 0.06 | −1.1 |
| GLIS3 | 0.79 | −0.01 | 0.25 | −0.55 | −0.41 | 0.13 | −1.26 | −0.45 | 0.04 | −0.18 | −2.76 |
| GLS2 | −0.27 | −0.02 | −0.47 | −0.25 | −0.06 | −0.58 | 2.8 | 0.34 | 0 | −0.01 | 1.76 |
| GLYCTK | −0.44 | −0.01 | 0.05 | 0.06 | 0.43 | 0.67 | −0.45 | −0.35 | 0.13 | −0.24 | −1.52 |
| GNE | 0.19 | −0.03 | 0.53 | 0.41 | −0.11 | 0.06 | −0.52 | 0.19 | −0.03 | 0.02 | −0.04 |
| GNPTAB | 0.69 | −0.09 | −0.01 | −0.03 | −0.13 | −0.31 | 0.01 | 0.03 | −0.63 | 0.1 | −0.07 |
| GPC3 | −0.26 | 0.38 | 0.47 | 0.12 | 0.06 | 0 | 1.26 | −0.14 | 0.22 | 0.23 | 0.77 |
| GPD1 | −0.27 | −0.19 | −1.54 | −0.2 | 0 | −1.08 | −0.82 | 0.17 | −0.18 | 0.01 | −0.44 |
| GPHN | 0.30 | 0.06 | −0.14 | −0.11 | 0.06 | 0.05 | −0.43 | −0.66 | −0.11 | −0.01 | −2.77 |
| GTPBP3 | 0.06 | −0.07 | −0.65 | −0.14 | 0.07 | 0.04 | −1.15 | 0.01 | 0 | −0.59 | −0.26 |
| GUSB | −0.55 | −0.06 | 0.08 | 0.17 | 0.23 | 0.29 | 0.34 | −0.05 | 0.23 | 0.02 | 0.11 |
| GYG1 | −0.38 | −0.08 | 0.13 | 0 | 0.02 | −0.16 | 0.33 | 0.2 | 0.09 | 0.02 | 0.25 |
| GYS1 | 0.31 | −0.01 | −0.68 | −0.14 | 0.12 | −0.4 | −0.29 | −0.01 | −0.66 | −0.11 | −0.66 |
| GYS2 | 0.10 | −0.21 | −0.25 | 0.32 | −0.13 | 0.73 | 1.46 | −0.28 | −0.25 | −0.09 | 0.02 |
| H19 | −0.22 | 0.25 | −0.34 | −0.07 | 0.34 | −0.21 | 0.79 | 0.25 | 0.3 | −0.33 | −0.17 |
| H6PD | 0.35 | −0.02 | 0.17 | −0.29 | −0.01 | 0.38 | −1.02 | −0.41 | −0.52 | 0 | −1.09 |
| HAL | 0.20 | 0.32 | −0.24 | −0.35 | −0.17 | 0.27 | 1.58 | −0.47 | −0.39 | 0.39 | 0.4 |
| HAX1 | −0.51 | 0.00 | 0.13 | 0.19 | 0.15 | 0.2 | −0.67 | 0.28 | 1.11 | −0.01 | 0.37 |
| HBA1 | −1.50 | 1.05 | 1.89 | −0.09 | 0.04 | 0.84 | −0.27 | −0.51 | −0.14 | −0.75 | −0.49 |
| HBB | −0.64 | 2.16 | 1.45 | 1 | −0.54 | 1.65 | 1.03 | −0.82 | 0.32 | 0.93 | 1.54 |
| HGD | 0.00 | 0.05 | −1.1 | −0.45 | −0.18 | −0.1 | −0.83 | 0.09 | −0.18 | 0.04 | −0.74 |
| HLA-B | −0.68 | −0.08 | −0.1 | 0.06 | 0.18 | 0.02 | 0.5 | −0.03 | 0.42 | −0.19 | 0.03 |
| HMBS | −0.71 | −0.11 | −0.71 | −0.2 | 0 | −0.46 | −1.06 | 0.16 | 0.37 | −0.09 | −0.92 |
| HMGCR | 0.16 | −0.03 | 0.35 | 1.24 | −0.29 | −0.37 | 0.1 | 0.13 | −0.29 | 0.04 | 0.37 |
| HMGCS2 | 0.02 | 0.26 | −1.02 | 0.55 | −0.28 | 3.01 | 0.71 | −0.58 | −1.26 | 0.41 | −1.16 |
| HMOX1 | −0.30 | −0.04 | 0.01 | 0.81 | 1.28 | 0.6 | −0.96 | 0.53 | 0.74 | −0.16 | −1.07 |
| HNF1A | −0.09 | 0.13 | −0.58 | −0.19 | 0.11 | 0.15 | −1.07 | 0 | −0.15 | −0.26 | −0.99 |
| HNF1B | 0.41 | −0.08 | −0.14 | −0.51 | −0.15 | 0.01 | −0.61 | −0.29 | −0.54 | −0.03 | −1.34 |
| HNF4A | 0.31 | −0.05 | −0.02 | 0.14 | −0.01 | 0.34 | −1.28 | −0.16 | −0.45 | −0.04 | −1.65 |
| HOGA1 | 0.00 | 0.27 | −1.24 | −0.26 | 0.01 | −0.56 | −0.39 | −0.49 | −0.48 | −0.03 | −1.87 |
| HPD | −0.36 | 0.01 | −0.32 | −0.23 | 0.06 | −0.42 | 0.13 | 0.14 | −0.14 | 0 | −0.59 |
| HPGD | −0.15 | −0.23 | −0.93 | −0.09 | −0.7 | −0.58 | −0.28 | −0.08 | −0.44 | −0.03 | −0.84 |
| HPS4 | 0.24 | −0.10 | −0.03 | 0.21 | 0.26 | 0.4 | −0.71 | 0.04 | 0.15 | 0.13 | 0.35 |
| HPS5 | 0.32 | −0.06 | −0.53 | 0.06 | −0.18 | 0.33 | 0.13 | 0.14 | −0.04 | −0.01 | 0.11 |
| HPS6 | −0.60 | 0.03 | −0.61 | 0.06 | 0.23 | 0.03 | 0.12 | 0.26 | −0.12 | −0.29 | 0.24 |
| HPX | −0.65 | −0.02 | 0.16 | 0.13 | 0.2 | 0.32 | 0.79 | 0.09 | 0.48 | 0.05 | 0.29 |
| HRAS | −1.09 | −0.18 | −0.1 | 0.36 | 0.31 | 0.17 | 1.72 | 0.3 | 0.58 | −0.17 | 0.67 |
| HRSP12 | −0.87 | −0.06 | −0.39 | −0.24 | −0.3 | −0.57 | 0.6 | 0.31 | 0.54 | 0.09 | 0.1 |
| HSD17B10 | −1.14 | −0.02 | −0.4 | −0.04 | 0.15 | −0.34 | 0.25 | 0.17 | 0.36 | −0.01 | −0.32 |
| HSD3B7 | −0.26 | −0.05 | −1.05 | 0.36 | 0.26 | −0.32 | −0.86 | 0.12 | −0.12 | −0.31 | −0.75 |
| HTT | 0.52 | 0.03 | −0.66 | −0.22 | −0.21 | −0.43 | −0.24 | −0.13 | −0.59 | −0.18 | −1.44 |
| HYAL1 | −0.38 | −0.03 | −0.31 | 0.26 | 0.06 | −0.59 | 0.68 | 0.03 | −0.11 | 0.04 | −0.03 |
| HYLS1 | −0.02 | −0.23 | −0.41 | −0.27 | −0.16 | −0.52 | −0.68 | 0.45 | 0.44 | −0.01 | 0.53 |
| ID1 | −0.99 | −0.12 | −2.21 | −0.49 | −0.69 | −4.39 | −0.52 | −0.37 | −1.8 | −0.19 | −3.64 |
| IDH1 | −0.11 | 0.15 | 0.19 | 0.79 | 0.19 | 0.56 | −0.37 | 0.11 | 0.61 | 0.12 | −0.49 |
| IDH2 | −0.31 | 0.02 | −0.13 | −0.2 | 0 | −0.38 | 0.55 | 0 | −0.2 | −0.04 | −0.68 |
| IDUA | −0.38 | 0.09 | −0.07 | −0.01 | 0.34 | 0.28 | 0.77 | −0.25 | 0.16 | −0.74 | −0.46 |
| IFIH1 | 0.05 | −0.07 | −0.16 | −0.21 | −0.06 | −0.12 | 0.21 | 0.08 | 0.1 | −0.04 | 0.03 |
| IFNAR2 | 0.18 | −0.01 | 0.19 | −0.21 | 0.01 | −0.33 | −1.17 | −0.15 | −0.18 | 0.02 | −1.15 |
| IFT122 | 0.01 | 0.02 | −0.11 | −0.53 | −0.16 | −0.22 | −1.33 | −0.16 | −0.41 | 0.02 | −1.03 |
| IFT140 | 0.40 | −0.06 | 0.17 | −0.16 | 0.27 | 0.53 | −0.1 | −0.35 | −0.19 | 0 | −1.16 |
| IFT172 | 0.43 | 0.11 | 0.03 | −0.09 | 0.16 | 0.28 | −1.65 | −0.55 | −0.48 | 0.12 | −0.84 |
| IFT27 | −0.99 | −0.02 | −0.25 | 0.11 | 0.27 | −0.14 | −0.54 | 0.13 | 0.53 | 0.01 | −0.01 |
| IFT80 | 0.46 | −0.06 | −0.05 | 0.01 | −0.41 | −0.71 | −0.15 | −0.13 | −0.26 | 0.19 | −0.95 |
| IGFALS | −0.36 | −0.02 | −0.78 | −0.2 | 0.11 | −0.36 | −0.05 | −0.04 | −0.37 | −1.04 | −1.57 |
| IKBKG | −0.26 | −0.09 | −0.53 | 0.12 | 0.3 | 0.06 | −0.44 | 0.26 | −0.02 | −0.22 | −1.45 |
| IL1RN | 0.27 | 0.02 | 0.58 | 0.68 | 0.21 | 1.53 | −0.59 | −0.16 | 0.51 | −0.06 | −1.41 |
| IL2RG | 0.38 | −0.04 | −0.41 | 0.45 | 0.6 | 0.14 | −1 | −0.06 | 0.27 | −0.24 | 0.52 |
| INSR | 0.56 | 0.11 | 0.38 | 0.63 | 0.28 | 1.16 | −0.67 | −0.18 | −0.29 | 0.04 | −1.23 |
| INVS | 0.54 | 0.12 | 0.04 | −0.05 | −0.03 | 0.05 | −0.5 | −0.27 | −0.3 | 0.05 | −1.08 |
| ISYNA1 | −0.41 | −0.10 | −0.3 | −0.04 | −0.17 | 0.22 | 2.78 | 0.17 | 0.29 | −0.48 | 0.16 |
| ITGB3 | 0.85 | −0.40 | 0.29 | 0.38 | 0.27 | 0.7 | −0.86 | −0.14 | 0.14 | −0.23 | −1.94 |
| IYD | 0.71 | 0.09 | −0.67 | −0.25 | −0.02 | −0.25 | −0.8 | −0.11 | −0.25 | 0.19 | −0.59 |
| JAG1 | 0.41 | −0.23 | −0.11 | −0.2 | −0.1 | −0.55 | 0.68 | −0.16 | −0.34 | −0.15 | −0.06 |
| JAK2 | 0.54 | −0.11 | 0.23 | 0.24 | −0.14 | 0.09 | −0.15 | 0.1 | −0.13 | 0 | 0.15 |
| KCTD11 | −0.27 | −0.04 | −0.04 | −0.29 | −0.21 | −0.33 | 1.23 | 0.1 | −0.24 | −0.14 | 0.68 |
| KCTD7 | 0.47 | −0.19 | 0.12 | 0.41 | 0.11 | 0.27 | 0.63 | 0.28 | −0.2 | 0.02 | 0.76 |
| KHK | −0.69 | −0.09 | −1.25 | 0.08 | 0.03 | −0.62 | −0.28 | 0.05 | −0.08 | −0.02 | −0.99 |
| KIAA0586 | 0.87 | 0.02 | 0.02 | −0.2 | −0.2 | −0.23 | −0.56 | 0.03 | −0.35 | 0.03 | −0.49 |
| KMT2D | 1.26 | 0.06 | −0.33 | −0.15 | −0.05 | 0.24 | 0.01 | 0.05 | −0.66 | −0.31 | −0.32 |
| KPTN | −0.53 | −0.16 | −0.57 | 0.08 | 0.22 | 0.2 | 0.39 | 0.13 | 0.24 | −0.1 | −0.41 |
| KRIT1 | 0.61 | 0.08 | 0.18 | −0.14 | −0.1 | −0.1 | −0.43 | 0.02 | 0.04 | 0.2 | 0.08 |
| KRT18 | −0.57 | −0.28 | −0.53 | −0.3 | −0.47 | −0.74 | −1.04 | 0 | −0.05 | −0.2 | −0.99 |
| KYNU | −0.39 | −0.03 | 0.09 | 0.32 | 0.16 | −0.31 | 0.07 | 0.46 | 0.28 | 0.1 | −1.33 |
| LAMB2 | 0.00 | −0.07 | −0.57 | −0.04 | 0.01 | 0.07 | −0.6 | −0.11 | −0.4 | −0.19 | −0.54 |
| LCAT | −0.33 | −0.14 | −0.24 | −0.19 | 0.11 | −0.14 | 0.84 | −0.04 | 0.05 | −0.08 | 0.07 |
| LDHB | −0.90 | 0.37 | −0.98 | −0.5 | −0.34 | −1.09 | −0.86 | 0.49 | 0.42 | −0.15 | −0.42 |
| LDLR | 0.29 | 0.02 | 1.03 | 1.31 | 0.24 | 0.44 | −0.07 | −0.34 | 0.24 | −0.04 | −0.84 |
| LDLRAP1 | −0.15 | −0.01 | −0.35 | −0.06 | 0.2 | −0.13 | 0.55 | 0.23 | −0.13 | −0.05 | −0.06 |
| LIPC | −0.18 | −0.02 | −0.76 | −0.59 | −0.29 | −0.61 | −1.61 | −0.44 | −0.11 | −0.03 | −2.13 |
| LIPT1 | −0.54 | 0.20 | 0.36 | −0.12 | −0.12 | −0.06 | −0.01 | 0.26 | 0.49 | 0.34 | 0.9 |
| LMNB2 | −0.04 | −0.08 | −0.64 | −0.32 | 0.14 | −0.54 | −0.77 | 0.04 | −0.24 | −0.48 | −0.87 |
| LPA | −0.23 | −0.06 | 0.41 | 0.17 | 0.07 | −0.08 | 0.63 | −0.17 | 0.17 | 0.14 | 0.01 |
| LPIN1 | 0.21 | 0.07 | 0.23 | 1.25 | 0.22 | 0.08 | −0.24 | 0.01 | −0.11 | 0.09 | −0.35 |
| LPIN2 | 0.43 | 0.10 | 0.35 | 0.3 | 0.1 | 1.34 | −0.58 | −0.12 | 0.04 | 0.2 | −0.23 |
| LRBA | 0.89 | −0.04 | −0.21 | −0.21 | −0.32 | −0.3 | −1.11 | −0.69 | −0.44 | −0.07 | −2.98 |
| LRP5 | 0.28 | 0.03 | −0.54 | −0.14 | 0.15 | −0.03 | −0.53 | −0.26 | −0.35 | −0.39 | −1.72 |
| LYRM4 | −0.70 | −0.07 | 0.02 | 0.04 | 0.19 | −0.11 | −0.3 | 0.13 | 0.62 | 0.02 | −1.07 |
| LYST | 0.65 | −0.16 | −0.13 | 0.13 | −0.14 | −0.25 | 0 | −0.01 | −0.33 | −0.18 | −0.84 |
| MAN1A1 | 0.34 | 0.05 | −0.38 | 0.1 | −0.26 | 0.02 | −0.21 | −0.04 | −0.03 | −0.18 | −1.28 |
| MAN2B1 | −0.19 | −0.05 | −0.31 | −0.15 | 0.13 | −0.15 | −0.02 | 0 | −0.13 | −0.24 | −0.38 |
| MAOB | 0.15 | −0.02 | −0.14 | −0.28 | −0.16 | −0.2 | −0.14 | −0.17 | −0.09 | 0.1 | −1.27 |
| MAT1A | −0.16 | 0.12 | −0.82 | 0.15 | 0.3 | 0.72 | −1.09 | 0.07 | 0.16 | 0.02 | −1.39 |
| MBL2 | 0.24 | 0.22 | −0.91 | −0.6 | −0.47 | −1.06 | 0.4 | −0.29 | −0.71 | 0.23 | −0.11 |
| MCCC1 | 0.03 | 0.09 | −0.44 | −0.08 | 0.01 | −0.1 | −0.27 | −0.09 | 0.07 | 0.02 | −1.13 |
| MCCC2 | 0.26 | 0.09 | −0.48 | −0.36 | −0.2 | −0.45 | −0.45 | 0.07 | −0.15 | 0.02 | −0.43 |
| MCM6 | −0.12 | −0.11 | −0.84 | −0.22 | −0.05 | −0.55 | −1.06 | 0.32 | −0.3 | 0.02 | −0.84 |
| MEN1 | 0.21 | −0.03 | −0.46 | −0.14 | 0.15 | 0 | −0.18 | 0.09 | −0.21 | −0.25 | −0.01 |
| MET | 0.51 | 0.08 | −0.19 | −0.1 | −0.2 | −0.53 | −0.62 | 0 | −0.28 | 0.02 | −0.72 |
| MGAT2 | −0.34 | 0.00 | 0.14 | 0.03 | 0.09 | 0.12 | 0.07 | 0.11 | 0.14 | −0.23 | 0.27 |
| MKS1 | −0.15 | 0.06 | −0.32 | −0.24 | 0.17 | −0.26 | −1.9 | 0.04 | −0.09 | −0.11 | 0.1 |
| MLH1 | −0.13 | 0.05 | 0 | −0.03 | −0.06 | −0.39 | 0.33 | 0.01 | 0.25 | 0.12 | −0.24 |
| MMAA | −0.06 | 0.09 | −0.12 | −0.38 | −0.35 | −0.34 | −0.86 | 0.06 | −0.06 | 0.16 | −0.52 |
| MMAB | −0.69 | 0.04 | 0 | 0.85 | 0.27 | −0.35 | −0.52 | 0.02 | 0.2 | 0.07 | −0.68 |
| MMADHC | −0.34 | −0.06 | −0.08 | −0.13 | −0.24 | −0.23 | −0.78 | 0.22 | 0.42 | 0.12 | −0.12 |
| MOCS1 | −0.09 | 0.14 | −0.39 | 0.03 | 0.13 | 0.02 | −0.68 | 0.26 | 0.18 | 0.02 | 0.23 |
| MOGAT2 | 0.86 | −0.07 | −0.93 | −0.53 | −0.04 | −0.53 | −0.66 | −0.21 | −0.98 | 0 | −0.79 |
| MOGS | −0.23 | −0.04 | −0.19 | 0.04 | 0.24 | −0.12 | −0.48 | −0.01 | −0.15 | −0.14 | −0.2 |
| MPZ | −0.09 | 0.03 | −0.67 | 0 | 0.41 | −0.04 | −1.66 | 0.26 | −0.16 | 0.15 | −0.65 |
| MRPL3 | −0.10 | 0.00 | −0.28 | −0.29 | −0.06 | −0.6 | −1.32 | 0.38 | 0.36 | −0.03 | −0.68 |
| MTHFR | 0.16 | −0.04 | 0.34 | 0.61 | 0.35 | 0.59 | 0.87 | 0.04 | 0.22 | −0.12 | 1.05 |
| MTM1 | 0.15 | −0.11 | −0.02 | 0.04 | −0.13 | 0 | −0.02 | 0.06 | −0.08 | 0.09 | 0.09 |
| MTO1 | 0.00 | 0.05 | −0.1 | 0.17 | −0.03 | 0.07 | 0.22 | 0.07 | 0.43 | 0.08 | 0.19 |
| MTR | 0.75 | 0.15 | 0.23 | −0.16 | −0.08 | 0.25 | −0.87 | −0.12 | −0.39 | −0.02 | −0.79 |
| MTRR | 0.34 | −0.12 | −0.24 | −0.24 | −0.2 | −0.42 | −0.11 | 0.16 | 0.25 | 0.02 | −0.06 |
| MTTP | 0.29 | −0.04 | −0.17 | −0.04 | −0.29 | −0.16 | −1.29 | −0.15 | −0.54 | 0.17 | −1.04 |
| MVK | −0.58 | −0.01 | −0.27 | 1.44 | 0.29 | −0.28 | −0.94 | 0.05 | −0.02 | −0.01 | −1.29 |
| MYH9 | 0.45 | −0.09 | 0.17 | −0.28 | 0.02 | 0.16 | −0.82 | −0.36 | −0.1 | −0.17 | −2.29 |
| MYO5B | 0.43 | −0.06 | 0.25 | 0.39 | 0.2 | 0.08 | −0.18 | −0.09 | −0.01 | −0.08 | −1.08 |
| NAGS | −0.20 | 0.01 | 0.1 | 0.68 | 0.46 | 0.94 | 1.38 | 0.33 | 1.53 | −0.41 | −0.27 |
| NARS2 | −0.20 | 0.03 | −0.49 | −0.28 | −0.14 | −0.37 | −1.15 | −0.02 | 0.32 | −0.01 | −1.34 |
| NAT2 | −0.55 | 0.04 | −0.33 | −0.23 | −0.1 | −0.59 | −1.21 | 0.12 | 0.14 | 0.04 | 0.25 |
| NBAS | 0.41 | 0.01 | −0.07 | −0.25 | −0.22 | −0.21 | −0.79 | −0.34 | −0.32 | −0.07 | −2.46 |
| NCF2 | −0.18 | −0.11 | 0.85 | 0.51 | 0.47 | 0.17 | −1.74 | 0.79 | 0.59 | −0.04 | −1.06 |
| NEK1 | 0.01 | −0.04 | 0.14 | 0.19 | 0.1 | 0.15 | −0.67 | 0.11 | 0.29 | 0.18 | −0.75 |
| NEK8 | 0.35 | 0.08 | −0.22 | 0.2 | 0.29 | 0.3 | 1.71 | −0.15 | −0.04 | 0.04 | 0.41 |
| NEU1 | −0.55 | 0.03 | −0.35 | 1.01 | 0.51 | 0.18 | 0.72 | 0.25 | 0.04 | −0.11 | 0.62 |
| NFKB2 | −0.25 | 0.02 | −0.34 | −0.32 | 0.12 | 0.09 | −0.09 | 0.07 | −0.03 | −0.25 | −0.28 |
| NFKBIA | −0.38 | 0.08 | −0.37 | −0.57 | −0.06 | −0.27 | −1.35 | −0.2 | −0.22 | −0.08 | −0.62 |
| NFU1 | −0.61 | 0.00 | −0.11 | −0.05 | −0.04 | −0.45 | −0.12 | 0.1 | 0.5 | 0.2 | −0.37 |
| NGLY1 | −0.25 | −0.05 | −0.05 | −0.06 | −0.07 | −0.26 | −0.9 | 0.16 | 0.21 | −0.01 | −0.31 |
| NHP2 | −1.09 | −0.01 | −0.35 | −0.2 | 0.21 | −0.31 | −0.57 | 0.14 | 0.51 | −0.06 | −0.46 |
| NME1 | −1.01 | −0.15 | −0.83 | −0.19 | 0.06 | −0.81 | −0.18 | 0.31 | 0.59 | −0.07 | −0.17 |
| NOD2 | 0.33 | −0.10 | 0.31 | 0.15 | 0.33 | 0.16 | −0.58 | 0.07 | 0.2 | 0.12 | 0.12 |
| NOP10 | −0.83 | 0.04 | −0.32 | 0.1 | 0.2 | −0.37 | −0.58 | 0.24 | 0.43 | 0.03 | 0.26 |
| NOTCH1 | 0.55 | 0.03 | −0.31 | −0.06 | 0.16 | 0.15 | 1.73 | 0.12 | −0.35 | −0.74 | −0.27 |
| NOTCH2 | 0.92 | −0.06 | −0.11 | 0.06 | −0.03 | 0.03 | −0.61 | −0.14 | −0.67 | −0.14 | −1.28 |
| NPC1 | 0.40 | 0.01 | 0.46 | 0.89 | 0.3 | 0.47 | 0.15 | −0.1 | −0.1 | 0.03 | 0.16 |
| NR1H4 | 0.03 | 0.17 | −0.24 | 1.18 | 0.22 | 0.17 | −2.63 | −0.38 | 0.69 | 0.12 | −1.31 |
| NUBPL | 0.18 | 0.00 | −0.18 | −0.09 | −0.06 | −0.34 | −0.86 | −0.32 | 0.19 | 0.11 | −1.36 |
| NUDT12 | −0.03 | −0.01 | −0.25 | 0.19 | −0.17 | −0.08 | −1.1 | 0.17 | 0.13 | 0.15 | −0.01 |
| NUDT7 | −0.68 | 0.11 | −0.04 | −0.22 | −0.23 | 0.42 | −1.85 | −0.12 | 0.04 | 0.16 | −0.68 |
| OAT | −0.47 | 0.02 | 0.22 | 0 | 0.1 | 0.12 | 1.52 | 0.32 | 0.34 | −0.17 | 0.52 |
| OPA3 | 0.02 | −0.01 | −0.36 | −0.05 | 0.03 | −0.07 | −0.73 | −0.05 | −0.05 | −0.03 | −0.42 |
| OTC | −0.07 | −0.13 | −1.22 | −0.1 | −0.18 | −0.6 | 0.7 | 0.08 | −0.09 | 0.14 | −0.33 |
| PAF1 | −0.34 | −0.04 | −0.23 | −0.03 | 0.09 | −0.1 | −0.27 | 0.16 | −0.05 | −0.08 | 0.17 |
| PAH | 0.44 | 0.47 | −0.23 | 0.58 | 0.05 | 0.14 | −0.66 | −0.3 | 0.23 | 0.29 | −1.03 |
| PANK2 | −0.30 | 0.00 | 0.02 | −0.01 | −0.22 | −0.23 | 1.01 | 0.31 | 0.31 | 0.14 | 0.45 |
| PAOX | −0.38 | 0.04 | −0.37 | 0.07 | 0.16 | 0.07 | 0.54 | −0.18 | −0.3 | −0.54 | −1.01 |
| PC | 0.03 | 0.04 | −0.55 | 0.29 | 0.17 | 0.17 | 0.16 | −0.19 | −0.02 | −0.25 | −1.3 |
| PCCA | −0.09 | 0.11 | 0.19 | 0.36 | 0.13 | 0.13 | −0.09 | −0.34 | 0.37 | 0.05 | −1.26 |
| PCK2 | −0.68 | 0.06 | 0.58 | 0.51 | 0.46 | 1.32 | 0.57 | 0.06 | 1.77 | −0.06 | 0.68 |
| PCSK9 | 0.03 | −0.10 | 0.18 | 1.71 | 0.26 | −0.45 | 0.4 | −0.21 | −0.57 | −0.38 | −0.93 |
| PCYT1A | 0.37 | −0.05 | −0.25 | −0.19 | 0.09 | −0.06 | −0.42 | 0.16 | −0.18 | 0.01 | −0.25 |
| PDGFRA | 0.59 | −0.13 | 0.23 | −0.45 | −0.43 | −1.53 | 0.82 | 0.07 | −0.96 | 0.21 | −0.51 |
| PDP1 | 0.32 | −0.19 | −0.01 | 0.51 | −0.04 | −0.13 | 0.36 | −0.19 | −0.16 | −0.04 | −0.06 |
| PEPD | −0.47 | 0.02 | −0.7 | 0.48 | 0.32 | 0.04 | 0.01 | −0.02 | 0.17 | −0.29 | −1.36 |
| PEX11A | −0.15 | 0.00 | 0.24 | −0.13 | 0.02 | 0.39 | −0.79 | 0.24 | 0.06 | 0.15 | 0.28 |
| PEX12 | −0.09 | −0.06 | 0.3 | 0.03 | 0.11 | 0.04 | −1.18 | −0.12 | 0.34 | 0.04 | 0.5 |
| PEX14 | −0.23 | −0.03 | −0.21 | −0.32 | 0.15 | −0.16 | −0.85 | −0.23 | 0.27 | −0.32 | −1.12 |
| PFKM | −0.23 | 0.01 | −0.79 | −0.26 | 0.02 | −0.54 | 1.07 | 0.07 | −0.2 | −0.07 | −0.15 |
| PGM1 | −0.17 | 0.01 | 0.06 | −0.05 | 0.01 | 0.28 | −0.37 | 0.01 | 0.11 | −0.04 | −1.09 |
| PHGDH | −0.36 | 0.16 | 0.69 | 0.64 | 0.67 | 1.84 | −0.22 | 0.14 | 2.13 | −0.02 | 0.65 |
| PHKA1 | 0.02 | 0.02 | −0.43 | 0.34 | 0.42 | −0.07 | −0.14 | 0.26 | −0.06 | 0.13 | 0.4 |
| PHKA2 | 0.41 | 0.00 | −0.52 | −0.34 | −0.03 | −0.17 | −0.77 | −0.17 | −0.77 | 0.02 | −1.02 |
| PHKB | 0.23 | 0.09 | 0.21 | −0.07 | −0.06 | −0.11 | −0.83 | −0.05 | 0.01 | 0.01 | −1.4 |
| PHYH | −0.56 | −0.04 | −0.33 | 0.15 | −0.05 | −0.06 | 0.79 | 0.15 | 0.21 | 0.08 | 0.42 |
| PIEZO1 | 0.34 | −0.14 | 0.01 | −0.38 | 0.08 | 0.17 | −0.44 | −0.34 | −0.4 | −0.59 | −1.54 |
| PIGA | −0.07 | 0.21 | 0.98 | 0.24 | −0.01 | 0.23 | −0.47 | 0.11 | 0.59 | 0.13 | 0.51 |
| PIGM | −0.09 | −0.07 | −0.28 | −0.04 | 0.04 | −0.38 | −0.41 | 0.14 | 0.17 | 0.06 | 0.3 |
| PKD1 | 0.35 | 0.15 | 0.02 | 0.45 | 0.39 | 1.12 | 0 | −0.11 | 0.84 | −0.73 | −0.66 |
| PKD2 | 0.68 | −0.03 | 0.09 | −0.18 | −0.13 | 0.01 | −0.28 | −0.12 | −0.35 | −0.05 | 0.21 |
| PKHD1 | 1.14 | −0.20 | −0.65 | −1.1 | −0.79 | −0.21 | −1.8 | −1.08 | −1.08 | 0.06 | −2.91 |
| PKLR | −0.15 | −0.09 | −0.85 | 0.19 | 0.01 | −0.63 | −0.7 | −0.44 | −0.86 | 0.36 | −1.78 |
| PLA2G6 | 0.35 | 0.29 | 0.53 | 0.18 | 0.31 | 0.95 | 0.68 | −0.33 | 0.06 | 0.02 | −0.21 |
| PLEKHM1 | −0.03 | 0.08 | −0.47 | 0.77 | 0.52 | 0.39 | −0.08 | 0.33 | −0.03 | −0.11 | 0.1 |
| PMVK | −1.29 | 0.01 | −0.27 | 0.19 | 0.33 | −0.24 | −0.11 | 0.18 | 0.58 | −0.09 | −0.26 |
| PNP | −0.24 | −0.12 | −0.28 | 0.03 | 0.05 | −0.45 | 2.1 | 0.34 | 0.03 | −0.11 | 1.12 |
| PNPLA2 | −0.26 | 0.10 | 0.45 | −0.09 | 0.19 | 1.04 | 0.78 | 0 | 0.55 | −0.54 | −0.84 |
| POLD1 | −0.25 | −0.02 | −0.76 | −0.14 | 0.24 | −0.11 | −1.37 | 0.01 | −0.17 | −0.59 | −1.5 |
| POLG | 0.11 | −0.10 | −0.51 | −0.1 | 0.03 | −0.21 | 0.3 | 0.24 | −0.13 | −0.27 | 0.18 |
| POLG2 | −0.35 | 0.02 | −0.17 | −0.12 | 0.19 | 0.04 | 1.45 | −0.03 | −0.15 | 0.02 | 0.46 |
| POR | −0.48 | 0.82 | 0.28 | 0.46 | 0.82 | 1.32 | 0.36 | 0.08 | 0.31 | −0.24 | −0.32 |
| PPAPDC2 | 0.01 | 0.08 | −0.01 | 0.05 | −0.01 | −0.42 | 0.42 | 0.12 | 0.07 | −0.12 | 0.78 |
| PPARA | 0.80 | 0.07 | −0.12 | 0.33 | 0.09 | 0.44 | −0.47 | −0.01 | −0.35 | −0.06 | −0.8 |
| PPARG | −0.35 | −0.08 | 0.31 | 0.24 | 0.16 | −0.14 | −0.29 | −0.11 | 0.52 | 0.01 | −0.85 |
| PPM1K | −0.28 | −0.19 | −0.47 | 0.26 | 0.13 | −0.47 | 0.16 | 0.15 | 0 | 0.14 | −0.19 |
| PRKCD | 0.07 | 0.04 | −0.17 | −0.16 | 0.03 | 0.14 | 1.15 | 0.1 | −0.44 | −0.08 | 0.17 |
| PRODH | 0.19 | −0.41 | −1.33 | 0.22 | 0.2 | −0.2 | 3.9 | −0.01 | −0.57 | −0.12 | 2.13 |
| PROS1 | 0.17 | −0.14 | −0.3 | 0.07 | −0.19 | −0.33 | −0.04 | −0.09 | −0.22 | 0.05 | −0.65 |
| PROZ | −0.21 | 0.01 | −0.15 | 0.39 | 0.28 | 0.29 | 0.41 | −0.33 | −0.23 | 0.1 | 0.11 |
| PSAT1 | −0.01 | 0.15 | 0.7 | 0.52 | 0.26 | 1.13 | 0 | 0.28 | 2.35 | 0.15 | 0.14 |
| PSMB8 | −1.16 | −0.13 | −0.62 | −0.11 | 0.02 | −0.58 | 0.05 | 0.18 | 0.55 | 0.01 | 0.14 |
| PSPH | −0.08 | −0.07 | −0.44 | 0.56 | 0.05 | −0.23 | −0.62 | 0.09 | 0.89 | −0.06 | −0.55 |
| PTCH1 | 0.64 | −0.07 | −0.14 | 0.04 | 0.28 | 0.47 | 0.69 | 0.08 | −0.5 | 0.06 | −0.05 |
| PTRF | −0.21 | −0.25 | −0.58 | −0.32 | −0.15 | −0.65 | 0.32 | 0.26 | −0.07 | −0.4 | −0.67 |
| PTRH2 | −0.74 | 0.00 | −0.32 | −0.12 | 0.15 | −0.53 | −0.71 | 0.34 | 0.37 | 0.05 | 0.08 |
| PUS1 | −0.50 | −0.11 | −0.37 | −0.1 | 0.16 | −0.14 | −0.68 | 0.01 | 0.42 | −0.25 | −0.23 |
| PXMP2 | −0.64 | 0.12 | −0.23 | 0.09 | 0.19 | 0.13 | 0.16 | 0.03 | 0.36 | −0.12 | −0.43 |
| PXMP4 | 0.15 | −0.04 | −0.04 | 0.13 | 0.22 | 0.1 | −0.44 | 0.02 | −0.17 | 0.05 | −0.46 |
| RAI1 | 0.27 | −0.01 | −0.62 | −0.2 | 0.12 | −0.34 | −0.55 | −0.1 | −0.27 | −0.49 | −1.67 |
| RANBP2 | 0.53 | −0.01 | −0.06 | −0.2 | −0.29 | −0.31 | −0.43 | 0.16 | −0.28 | 0.02 | −0.06 |
| RASA1 | 0.34 | 0.00 | 0.42 | −0.11 | −0.13 | 0.07 | −0.17 | −0.14 | 0.12 | 0.02 | −0.5 |
| RBCK1 | −0.07 | 0.06 | 0.38 | 1.03 | 0.64 | 0.8 | −0.02 | 0 | 1.14 | −0.32 | 0.32 |
| RBM10 | −0.16 | 0.02 | −0.24 | −0.15 | 0.13 | 0.07 | −0.69 | 0.12 | −0.02 | −0.23 | −0.24 |
| REN | −0.46 | 0.07 | −0.26 | −0.39 | 0 | −0.91 | 1.98 | 0.36 | −0.37 | 0.02 | 0.57 |
| RMND1 | −0.03 | −0.06 | −0.26 | −0.14 | −0.07 | −0.5 | −1.31 | 0.23 | 0.03 | 0.19 | −0.35 |
| RMRP | −1.72 | −0.21 | −0.35 | 0.06 | 0.54 | 0.54 | 2.53 | 1.51 | −0.02 | −0.5 | −0.79 |
| RNASEH2A | −1.07 | 0.02 | −0.58 | 0.14 | 0.54 | 0.13 | −0.86 | 0.36 | 0.31 | −0.08 | −0.42 |
| RORC | 0.54 | 0.45 | 1.09 | −0.1 | 0.4 | 1.08 | −1.98 | −0.17 | 0.01 | 0.32 | −0.84 |
| RPGRIP1L | 0.41 | 0.11 | −0.03 | −0.52 | −0.2 | −0.55 | −1.64 | 0.12 | −0.23 | 0.17 | −0.44 |
| RRM2B | 0.33 | −0.01 | −0.22 | −0.3 | −0.53 | −0.67 | 1.48 | 0.26 | 0.2 | 0.02 | 0.79 |
| RSAD1 | −0.45 | 0.03 | −0.24 | −0.03 | 0.1 | 0.07 | −1.11 | 0.28 | 0.24 | −0.09 | 0.57 |
| SAMHD1 | 0.58 | −0.05 | −0.58 | −0.26 | −0.29 | −0.96 | 0.27 | 0.13 | −0.44 | −0.13 | −0.24 |
| SC5D | 0.08 | 0.02 | 0.5 | 1.03 | 0.05 | 0 | 0.1 | 0.15 | 0.21 | 0.09 | 0.89 |
| SCARB1 | −0.16 | 0.05 | −0.47 | −0.03 | 0.12 | −0.31 | 0.23 | −0.07 | −0.2 | −0.21 | −1.09 |
| SCN9A | 0.48 | −0.25 | 0.1 | −0.3 | −0.56 | −0.47 | −1.75 | −0.11 | −0.43 | −0.03 | −1.59 |
| SDCCAG8 | −0.03 | 0.11 | 0.27 | −0.11 | −0.12 | 0.02 | −0.55 | −0.19 | 0.35 | 0 | −1.32 |
| SEPN1 | 0.40 | 0.10 | −0.25 | −0.14 | 0.26 | −0.23 | −0.01 | −0.06 | −0.4 | −0.09 | −0.15 |
| SERAC1 | 0.19 | 0.17 | 0.01 | 0.06 | −0.1 | −0.2 | −0.39 | 0.01 | −0.21 | −0.1 | −0.66 |
| SERPINA1 | −0.30 | −0.01 | 0.41 | −0.06 | −0.03 | −0.03 | 0.63 | 0.05 | 0.31 | 0.17 | 0.31 |
| SERPING1 | −0.08 | 0.09 | 0.67 | −0.03 | 0.12 | 0.45 | 0.53 | −0.05 | 0.25 | 0.18 | 0.35 |
| SERPINI1 | −0.18 | −0.16 | 0.02 | 0.06 | −0.33 | −0.01 | 0.65 | 0.22 | 0.03 | 0.05 | 1.24 |
| SETBP1 | 0.46 | 0.02 | 0.23 | −0.23 | −0.1 | −0.11 | −0.08 | −0.32 | −0.44 | −0.17 | −1.3 |
| SFXN4 | −0.71 | 0.07 | −0.03 | −0.09 | 0.09 | −0.02 | −1.39 | 0.08 | 0.57 | 0.02 | −0.66 |
| SLC10A1 | 0.04 | 0.08 | −0.36 | −0.19 | −0.05 | −0.18 | 0.28 | −0.3 | −0.43 | 0.17 | −0.35 |
| SLC10A3 | −0.11 | 0.02 | −0.31 | −0.05 | 0.11 | −0.04 | 0.56 | 0.2 | 0 | −0.22 | 0.27 |
| SLC10A5 | 0.69 | −0.24 | −0.73 | −0.45 | −0.66 | 0.83 | −1.78 | −0.3 | −1.06 | 0.21 | −0.97 |
| SLC10A7 | 0.32 | −0.02 | 0.29 | −0.08 | −0.13 | 0 | −1.11 | −0.27 | 0.03 | −0.05 | −1.39 |
| SLC11A2 | 0.33 | 0.04 | 0.31 | 0.26 | 0.08 | 0.15 | −1.12 | −0.19 | −0.19 | 0.08 | −0.51 |
| SLC19A1 | −0.13 | 0.27 | −0.72 | −0.29 | 0.2 | −0.09 | −2.23 | 0.06 | 0.33 | −0.52 | −1.57 |
| SLC19A2 | 0.19 | −0.07 | 0.49 | 0.55 | 0.09 | 0.58 | 0.29 | 0.31 | 0.12 | −0.02 | 1.03 |
| SLC19A3 | −0.14 | 0.15 | −0.34 | −0.29 | 0 | −0.4 | −1.47 | −0.32 | −0.47 | 0.14 | −0.66 |
| SLC22A1 | −0.57 | 0.03 | −0.16 | −0.04 | 0.13 | 0.06 | 0.72 | 0.16 | 0.29 | −0.02 | 0.18 |
| SLC22A5 | 0.01 | −0.02 | −0.21 | 0.06 | 0.12 | −0.08 | −0.75 | 0.12 | 0 | −0.14 | −0.01 |
| SLC25A1 | −0.53 | −0.01 | −0.65 | 0.38 | 0.16 | −0.3 | 0.04 | 0.03 | −0.08 | −0.38 | −1.11 |
| SLC25A10 | −0.56 | 0.20 | −0.98 | −0.39 | 0.09 | −0.73 | −1.29 | 0.07 | −0.06 | −0.37 | −1.97 |
| SLC25A12 | −0.04 | −0.61 | −0.39 | −0.12 | 0.29 | −0.38 | −1.52 | −0.29 | 0.39 | 0.26 | −1.06 |
| SLC25A13 | 0.26 | 0.04 | −0.14 | 0.17 | 0.11 | −0.03 | −0.86 | −0.04 | −0.01 | 0.08 | −1.47 |
| SLC25A15 | −0.15 | 0.06 | −0.25 | 0.1 | −0.01 | −0.17 | −0.03 | 0.34 | 0.09 | 0.05 | 1.09 |
| SLC25A19 | −0.55 | 0.06 | −0.44 | −0.25 | −0.01 | −0.17 | 0.81 | 0.62 | 0.4 | −0.28 | 0.83 |
| SLC25A20 | −0.18 | −0.04 | −0.39 | −0.22 | −0.1 | 0.1 | 0.49 | 0.17 | 0.13 | 0.03 | −0.16 |
| SLC25A29 | −0.23 | 0.29 | −0.23 | 0.3 | 0.22 | 0.02 | 0.25 | −0.36 | −0.24 | −0.28 | −1.45 |
| SLC25A32 | −0.02 | −0.05 | −0.17 | −0.26 | −0.09 | −0.46 | −0.66 | 0.21 | 0.42 | −0.13 | −0.34 |
| SLC27A2 | −0.34 | 0.14 | 0.19 | −0.27 | −0.21 | −0.31 | −0.26 | −0.08 | 0.08 | −0.23 | −0.86 |
| SLC27A5 | −0.81 | 0.12 | −0.34 | 0.11 | 0.25 | 0.28 | 0.93 | 0.19 | 0.51 | −0.31 | 0.03 |
| SLC29A3 | 0.05 | 0.14 | −0.04 | −0.17 | 0.07 | −0.36 | −0.56 | −0.16 | −0.53 | 0.02 | −0.33 |
| SLC2A1 | −0.24 | −0.24 | −0.38 | 0.43 | 0.56 | −0.04 | 0.76 | 0.27 | 0.33 | −0.26 | −0.04 |
| SLC2A2 | 0.40 | 0.06 | −1.68 | −0.19 | −0.62 | −1.8 | −1.18 | −0.35 | −0.66 | 0.11 | −2.2 |
| SLC2A9 | 0.31 | 0.30 | −0.21 | 0.27 | 0.24 | 0.19 | 0.96 | −0.13 | 0.31 | −0.03 | −0.39 |
| SLC33A1 | 0.29 | 0.17 | 0.48 | 0.12 | 0.02 | −0.04 | −0.39 | 0.08 | 0.09 | −0.13 | −0.09 |
| SLC35C1 | −0.08 | 0.04 | −0.14 | 0.42 | 0.17 | 0.02 | −0.61 | 0.05 | 0 | −0.15 | −0.28 |
| SLC39A4 | −1.07 | 0.13 | −0.04 | 0.18 | 0.31 | −0.12 | −0.35 | 0.05 | 0.61 | −0.73 | −1.11 |
| SLC40A1 | 0.36 | 0.08 | 0.13 | 0.82 | 0.39 | 0.8 | −0.78 | 0.47 | −0.2 | 0.11 | −0.45 |
| SLC46A1 | 0.06 | 0.08 | −0.53 | −0.23 | 0.08 | −0.1 | −1.13 | 0.01 | −0.18 | −0.17 | −0.41 |
| SLC4A4 | 0.70 | 0.13 | −0.57 | −0.09 | −0.08 | −0.78 | −1.07 | −0.36 | −0.69 | 0 | −1.69 |
| SLC51A | −0.61 | −0.03 | −0.57 | −0.29 | 0.08 | −0.22 | −0.71 | 0.02 | −0.38 | 0.03 | −0.68 |
| SLC51B | −0.60 | 0.66 | −0.08 | 0.02 | 0.29 | −0.29 | 0.29 | 0.02 | −0.3 | 0.26 | 1.7 |
| SLC6A20 | −0.12 | 0.52 | −1.18 | 0.31 | 0.4 | −0.48 | 0.14 | −0.13 | −0.32 | 0.1 | −0.9 |
| SLC6A6 | −0.14 | 0.07 | −1.6 | 0.34 | 0.1 | −0.56 | −0.83 | 0.42 | −0.79 | −0.36 | −0.33 |
| SLC6A8 | −0.46 | −0.01 | −0.16 | 0.41 | 0.26 | 0.1 | 3.89 | 0.35 | −0.11 | −0.23 | 1 |
| SLC7A7 | −0.41 | −0.18 | −0.37 | −0.24 | −0.01 | −0.04 | −0.27 | −0.39 | −0.01 | −0.5 | −0.86 |
| SLCO1B1 | 0.09 | 0.10 | −0.1 | −0.19 | −0.33 | −0.03 | −1.05 | 0.19 | −0.18 | 0.06 | −1.71 |
| SLCO4C1 | 0.41 | 0.22 | 0.12 | 0.72 | −0.39 | −0.5 | −0.41 | −0.2 | −0.56 | 0.13 | −0.04 |
| SMAD4 | 0.10 | −0.06 | 0.05 | −0.02 | −0.2 | 0.01 | −0.4 | 0.04 | 0.03 | −0.01 | −0.19 |
| SMARCB1 | −0.36 | 0.06 | −0.58 | −0.3 | 0.11 | −0.37 | −1.3 | 0.06 | −0.03 | −0.07 | −0.83 |
| SNX10 | 0.19 | −0.08 | −0.04 | 0.21 | −0.36 | −0.19 | −1.26 | 0 | −0.02 | 0.11 | −1.48 |
| SORT1 | 0.42 | −0.13 | −0.15 | 0.13 | −0.15 | −0.32 | −0.4 | −0.09 | −0.43 | −0.09 | −1.05 |
| SPP2 | −0.92 | −0.24 | −0.24 | 0.01 | −0.12 | −0.26 | 1.13 | 0.23 | 0.58 | 0.11 | 0.4 |
| SPRTN | −0.04 | −0.10 | −0.42 | −0.21 | −0.17 | −0.55 | 0.59 | 0.26 | 0.01 | −0.12 | 0.52 |
| ST3GAL5 | −0.10 | 0.01 | −0.51 | 0.14 | −0.19 | −0.84 | −0.64 | −0.29 | −0.26 | −0.02 | −0.95 |
| STAT1 | 0.24 | −0.14 | −0.52 | −0.19 | −0.31 | −1.13 | 0.11 | 0.18 | −0.38 | −0.05 | −0.5 |
| STEAP3 | 0.12 | −0.07 | −0.22 | −0.21 | 0.03 | −0.56 | −0.16 | −0.01 | −0.42 | −0.13 | −0.66 |
| STIM1 | 0.13 | 0.02 | −0.22 | 0.13 | 0.1 | 0.17 | 0.52 | −0.19 | −0.04 | −0.11 | −1.09 |
| SULT2A1 | −0.10 | 0.44 | 0.29 | 0.85 | 0.65 | 1.88 | −0.14 | −0.35 | −0.13 | 0.39 | −1.07 |
| SUOX | −0.13 | 0.09 | −0.42 | −0.37 | −0.18 | −0.7 | −1.25 | −0.03 | −0.56 | 0.12 | −0.25 |
| TARS2 | −0.28 | 0.18 | −0.29 | −0.14 | 0.2 | −0.04 | −1.61 | 0.08 | 0.01 | 0.1 | −0.29 |
| TAT | 0.29 | 0.07 | 0.11 | −0.55 | −0.56 | 1.5 | −0.2 | −0.42 | 1.81 | 0.23 | −0.54 |
| TCIRG1 | −0.37 | −0.05 | −0.38 | 0.12 | 0.29 | 0.16 | −0.44 | −0.23 | −0.18 | −0.5 | −0.53 |
| TCTN3 | −0.07 | 0.04 | −0.24 | −0.27 | −0.04 | −0.28 | −0.15 | 0.03 | −0.01 | 0.13 | 0.18 |
| TDO2 | 0.08 | 0.09 | −1.49 | 0.89 | −0.58 | −1.61 | −0.77 | −0.78 | −0.6 | 0.36 | −2.8 |
| TF | −0.47 | −0.04 | 0.09 | 0.11 | 0.02 | 0.17 | 0.94 | 0.09 | 0.25 | 0.11 | 0.45 |
| TFR2 | 0.12 | −0.02 | −0.04 | 0 | 0.21 | 0.44 | 0.66 | 0.04 | 0.07 | −0.27 | −0.11 |
| TGFB1 | −0.17 | −0.22 | −0.2 | −0.37 | −0.25 | −0.88 | −0.06 | −0.21 | −0.24 | −0.35 | −1.52 |
| THPO | 0.07 | 0.09 | −0.46 | −0.06 | −0.03 | −0.48 | −0.03 | −0.03 | −0.03 | 0.09 | −0.3 |
| THRB | 0.43 | 0.00 | −0.11 | −0.18 | −0.28 | 0.34 | −0.27 | −0.2 | 0.44 | 0.11 | −1.33 |
| TK2 | 0.03 | 0.01 | −0.04 | 0.03 | 0.12 | −0.14 | −0.98 | −0.25 | −0.12 | 0.06 | −1.04 |
| TMEM135 | 0.11 | −0.10 | 0.25 | 0.38 | −0.13 | 0.04 | −0.62 | −0.33 | 0.07 | 0.16 | −1.74 |
| TMEM165 | −0.11 | −0.06 | −0.24 | −0.08 | −0.14 | −0.43 | 0.09 | 0.14 | 0.1 | −0.3 | −0.41 |
| TMEM67 | 0.04 | −0.18 | 0.18 | −0.29 | −0.01 | −0.51 | −1.04 | −0.1 | −0.14 | 0.08 | −0.44 |
| TMLHE | 0.33 | −0.06 | −0.25 | −0.38 | −0.03 | −0.12 | −0.51 | 0.01 | 0.04 | −0.09 | −1.31 |
| TMPRSS6 | −0.28 | 0.04 | −0.21 | −0.07 | 0.1 | 0.07 | 0.06 | −0.12 | 0.01 | −0.19 | −0.65 |
| TNFRSF1A | −0.16 | 0.05 | −0.5 | 0.04 | 0.25 | 0.05 | −0.17 | 0.12 | 0 | −0.16 | −0.44 |
| TNFSF11 | −0.46 | −0.06 | −0.63 | −0.39 | −0.54 | −0.9 | −1.71 | −0.08 | −0.57 | −0.34 | −1.42 |
| TP53 | 0.29 | 0.02 | −0.09 | −0.39 | −0.02 | −0.06 | −0.19 | 0.07 | 0.07 | 0.05 | 0.16 |
| TTC21B | 0.23 | −0.15 | 0.12 | −0.18 | −0.14 | 0.13 | 0.1 | 0.07 | −0.21 | 0.04 | −0.08 |
| TTPA | 0.32 | 0.12 | −0.6 | −0.51 | −0.46 | −0.39 | −1.46 | −0.23 | −0.69 | 0.16 | −1.43 |
| TTR | −0.78 | 0.00 | −0.16 | 0.04 | 0.19 | 0.05 | 0.55 | 0.12 | 0.41 | 0.15 | 0.25 |
| TYMP | −1.13 | −0.04 | −0.05 | 0.2 | 0.37 | 0.23 | −0.17 | 0.06 | 0.64 | −0.86 | −1.39 |
| UBR1 | 0.59 | 0.03 | −0.1 | −0.29 | −0.38 | −0.38 | −0.04 | 0.01 | −0.15 | −0.07 | −0.93 |
| UGT1A1 | 0.12 | 1.13 | −0.2 | −0.77 | −0.06 | 0.11 | −0.12 | −0.16 | −0.27 | 0.15 | −0.17 |
| UGT2B28 | −0.35 | 0.14 | −0.99 | −0.24 | 0.09 | −0.48 | 1.38 | 0.45 | −0.27 | 0.35 | 0.69 |
| UNC13D | −0.02 | 0.13 | 0.4 | −0.14 | 0.05 | 0.51 | −0.29 | −0.33 | −0.02 | −0.11 | 0.32 |
| UPB1 | −0.20 | 0.03 | −0.04 | 0.11 | 0.33 | 0.14 | 0.5 | −0.14 | −0.07 | 0.23 | −0.74 |
| UQCRB | −1.05 | 0.06 | −0.4 | −0.03 | 0.17 | −0.42 | 0.16 | 0.26 | 0.61 | 0.21 | 0.33 |
| UROC1 | −0.46 | 0.02 | −0.6 | −0.11 | −0.25 | −0.61 | 0.57 | 0.05 | 0.05 | −0.04 | −0.16 |
| UTRN | 1.01 | 0.28 | −0.11 | −0.29 | −0.35 | −0.29 | −0.58 | −0.64 | −0.51 | −0.09 | −3.47 |
| VIPAS39 | 0.15 | −0.01 | 0.05 | −0.07 | 0.05 | 0.1 | −0.64 | 0.16 | −0.05 | 0.14 | −0.04 |
| VLDLR | 0.11 | 0.59 | 0.88 | 0.57 | 0.62 | 0.68 | −0.75 | 0.06 | 1.33 | −0.08 | −0.47 |
| VPS13A | 1.19 | −0.03 | 0.21 | −0.08 | −0.28 | 0.09 | −0.65 | −0.28 | −0.49 | −0.04 | −1.79 |
| VPS33B | −0.21 | −0.25 | −0.86 | −0.1 | 0.18 | −0.44 | −0.4 | 0.06 | −0.05 | −0.11 | −0.11 |
| WAS | −0.09 | 0.13 | 0.08 | −0.22 | 0.19 | 0.26 | 0.4 | 0.21 | 0.18 | 0.48 | 1.27 |
| WDR35 | 0.62 | 0.06 | −0.28 | −0.46 | −0.19 | −0.23 | −1.05 | −0.06 | −0.12 | 0.01 | −0.7 |
| XDH | 0.49 | 0.46 | 1.07 | 0.53 | 0.28 | 0.66 | −0.01 | −0.25 | −0.13 | 0.19 | −0.19 |
| YARS2 | −0.34 | −0.16 | −0.56 | −0.18 | 0 | −0.42 | −0.36 | 0.23 | 0.17 | −0.21 | −0.08 |

[0520] Enzastaurin (41) was observed to significantly (q≤0.05) modulate expression of the following genes: ABCB11, ABCG8, ACOX2, ACTG2, ADCK3, AKR1C1, AKR1C2, AKR1C4, AKR1D1, ALAD, ALPL, ANGPTL3, AQP7, ASPA, BTD, C10orf10, CA2, CAV1, CDH1, CIDEC, CLDN1, CPT1A, CROT, CTDSP2, CYP39A1, DPYS, FGA, FGFR2, G6PC, GHR, H6PD, HAL, HMGCS2, HNF1B, HPGD, ID1, IDH2, IFNAR2, IYD, KRT18, KYNU, LIPC, MBL2, MMM, MTTP, MVK, NAGS, NOD2, NUDT7, PAH, PDGFRA, PGM1, PKHD1, PLA2G6, PLEKHM1, PNPLA2, PPARG, PTCH1, RMRP, RORC, SCN9A, SLC29A3, SLC2A2, SLC51A, SLCO1B1, TAT, TDO2, THRB, and TNFSF11.

[0521] BSI-201 (43) and peramivir (trihydrate) (46) were observed to significantly (q≤0.05) modulate expression of RMRP. Selumetinib (45) was observed to significantly (q≤0.05) modulate expression of the following genes: RMRP, SLC2A2, COL1A1, and FAM111B. Palifosfamide (47) was observed to significantly (q≤0.05) modulate expression of RMRP and FAM111B.

[0522] R788 (fostamatinib, disodium hexahydrate) (50) was observed to significantly (q≤0.05) modulate expression of the following genes: ABCC6, ACACB, AFP, AKR1D1, ALAD, ALDOB, APOB, AQP7, ARG1, ASPA, BMT, CA2, CA5A, CCND1, CPS1, CYP39A1, CYP3A4, EHHADH, FGA, G6PC, GYS2, HGD, HMGCS2, ID1, ITGB3, LPIN2, MBL2, NCF2, NOD2, NR1H4, PAH, PKLR, POR, PPARG, PRODH, RORC, SLC10A5, SLC25A15, SLC6A6, SLC7A7, SLCO4C1, SULT2A1, TAT, TGFB1, TNFSF11, and XDH. Torcetrapib (51) was observed to significantly (q≤0.05) modulate expression of the following genes: ACTG2, CYP3A4, ID1, KMT2D, and UTRN.

[0523] Tivozanib (52) was observed to significantly (q≤0.05) modulate expression of the following genes: AASS, ABAT, ABCA1, ABCB11, ABCC2, ABCC3, ABCD1, ABCD3, ABCG8, ABHD5, ACAD9, AFP, AGPS, AKR1C2, AKR1C4, ALDOA, ALG12, ANGPTL3, ANPEP, AP3B1, ARSB, ASNS, ATP7B, BCKDK, BCO1, C4A, CCND1, CIDEC, CLDN1, COL1A1, CTH, CYB5R3, CYP2C19, CYP7B1, DCDC2, DDO, DIS3L2, DLD, DNM1L, DPM3, ELAC2, FGA, FGD1, GBA, GGCX, GHR, GLDC, GPD1, GYS1, HGD, HTT, HYAL1, ID1, IL1RN, KCTD11, KRT18, KYNU, LAMB2, LDHB, LIPC, LMNB2, MAN2B1, MCCC2, MEN1, MMAB, MOGAT2, MOGS, MPZ, MTTP, NOTCH2, NR1H4, PCK2, PCYT1A, PDGFRA, PHGDH, PIGA, PKD2, PNP, POLD1, POLG, PROS1, PSAT1, PTRF, RBM10, RMRP, RORC, SAMHD1, SEPN1, SLC25A20, SLC27A2, SLC29A3, SLC2A2, SLC35C1, SLC4A4, SLC6A20, SLC6A6, SLCO1B1, SORT1, STAT1, STEAP3, SULT2A1, SUOX, TCTN3, TDO2, TGFB1, THPO, TMEM165, TMEM67, TNFRSF1A, TNFSF11, UBR1, UGT2B28, VPS33B, WDR35, and XDH.

[0524] 17-MG (Tanespimycin) (53) was observed to significantly (q≤0.05) modulate expression of the following genes: ABCB11, ABCC2, ABHD5, ACACB, ACADSB, ACADVL, ACSL1, ACSL3, ADCK3, AK1, AKR1D1, ALAD, ALAS1, ALDOB, ALPL, AMPD3, ANKS4B, APOB, APRT, AQP7, ARG1, ARSA, ASNS, BMT, BBOX1, BRAF, CA12, CA2, CA5A, CCND1, CD320, CLDN1, COG6, CP, CPS1, CPT1A, CTH, CYP2B6, CYP39A1, CYP3A4, DBT, DHCR24, DHCR7, DMGDH, DPYD, EARS2, EDA, ENO3, ENPP1, EPGS, EPHX1, ERCC6, F5, FADD, FASLG, FGA, FGD1, FGFR2, G6PC, G6PC3, GALK1, GATA6, GCKR, GCLC, GLIS3, GNE, GYS2, H6PD, HGD, HLA-B, HMGCR, HMGCS2, HMOX1, HOGA1, HPS6, HRAS, HSD3B7, ID1, IDH1, IDUA, IFNAR2, IGFALS, IKBKG, INSR, IYD, KCTD11, KCTD7, KMT2D, LDLR, LPIN1, MBL2, MGAT2, MOCS1, MPZ, MVK, NFKB2, NFKBIA, NOD2, NOP10, NR1H4, NUDT7, PAH, PAOX, PCSK9, PDGFRA, PHGDH, PHKA1, PIEZO1, PMVK, PPARA, PSAT1, PSMB8, PTRF, PUS1, PXMP4, RORC, RRM2B, SC5D, SLC10A1, SLC10A3, SLC10A5, SLC25A29, SLC2A9, SLC39A4, SLC40A1, SLC6A6, SLC7A7, SLCO1B1, SLCO4C1, SULT2A1, TAT, TCIRG1, THPO, TNFSF11, TYMP, UPB1, UTRN, VLDLR, XDH

[0525] Zibotentan (54) was observed to significantly (q≤0.05) modulate expression of the following genes: ACOT8, APOA1, APOA2, APOB, APOE, APRT, COX6A1, CYP2C19, DCXR, DPM3, ETFB, FIS1, GCSH, HRAS, HSD17B10, KMT2D, NHP2, NME1, PKHD1, PMVK, PSMB8, RMRP, RNASEH2A, SLC39A4, TYMP, UQCRB, UTRN, and VPS13A. Semagacestat (55) was observed to significantly (q≤0.05) modulate expression of CYP3A4. Dalcetrapib (56) was observed to significantly (q≤0.05) modulate expression of CYP3A4 and GOSH. Preladenant (61) was observed to significantly (q≤0.05) modulate expression of the following genes: ABAT, ABHD5, ASNS, BCO1, CIDEC, CTH, DAO, DCDC2, DDC, FASLG, GCSH, GLDC, GPD1, HGD, HMGCS2, HOGA1, HSD3B7, ID1, KHK, LDLR, OTC, PRODH, RORC, SLC2A2, SLC6A6, TDO2, and XDH.

[0526] EVP-6124 (hydrochloride) (encenicline) (62) was observed to significantly (q≤0.05) modulate expression of the following genes: AKR1D1, DCDC2, DHCR7, G6PC, HMGCR, LDLR, LPIN1, MVK, NEU1, NR1H4, PCSK9, PKHD1, RBCK1, and SC5D. Vanoxerine (dihydrochloride) (65) was observed to significantly (q≤0.05) modulate expression of HMOX1. CO-1686 (Rociletinib) (66) was observed to significantly (q≤0.05) modulate expression of the following genes: ABAT, ABHD5, AKR1D1, ALPL, AQP7, ASNS, ASPA, CCND1, CPT1A, CTH, CYP3A4, DAO, DCDC2, G6PC, GLDC, GPD1, HBB, HMGCS2, ID1, IL1RN, INSR, LDHB, LPIN2, MBL2, PCK2, PDGFRA, PHGDH, PKD1, PNPLA2, POR, PSAT1, RORC, SLC2A2, STAT1, SULT2A1, TAT, and TDO2.

[0527] INNO-206 (aldoxorubicin) (70) was observed to significantly (q≤0.05) modulate expression of the following genes: AARS2, ABCD1, ACACA, ACACB, ACOX3, ACSF3, AFP, AGK, AGPAT2, AKR1C4, ALAD, ALAS1, ALDH1B1, ALMS1, AMPD3, ANKS4B, ARG2, ARSA, ATIC, ATM, BMT, BBOX1, BLNK, C10orf10, C10orf11, C15orf41, C9, CA2, CD46, CEP164, CEP290, CEP83, CFHR2, CPT2, CTNS, CYP2C19, CYP3A4, DCDC2, DHODH, DKC1, DLAT, DNAH5, ENO3, FAN1, FUCA1, FXN, G6PD, GCH1, GCKR, GLIS3, GLS2, GPC3, GTPBP3, GYS2, H6PD, HAL, HBB, HMBS, HNF1A, HNF4A, HRAS, IFNAR2, IFT122, IFT172, IL2RG, ISYNA1, KCTD11, LIPC, LRBA, MAT1A, MCM6, MKS1, MPZ, MRPL3, MTTP, NAGS, NARS2, NAT2, NCF2, NEK8, NFKBIA, NOTCH1, NR1H4, NUDT12, NUDT7, OAT, PANK2, PEX12, PFKM, PKHD1, PNP, POLD1, POLG2, PRKCD, PRODH, REN, RMND1, RMRP, RORC, RPGRIP1L, RRM2B, RSAD1, SCN9A, SFXN4, SLC10A5, SLC10A7, SLC11A2, SLC19A1, SLC19A3, SLC25A10, SLC25A12, SLC2A2, SLC46A1, SLC4A4, SLC6A8, SLCO1B1, SMARCB1, SNX10, SPP2, SUOX, TARS2, TMEM67, TNFSF11, TTPA, UGT2B28, and WDR35.

[0528] Pacritinib (SB1518) (75) was observed to significantly (q≤0.05) modulate expression of the following genes: A1BG, AARS2, ABCA1, ABCD1, ABCG5, ABCG8, ACADSB, ACOX2, ACTG2, ADA, ADSL, AGL, AGT, AGTR1, AGXT, AHI1, AHSG, AKR1D1, ALDH2, ALDH6A1, ALDOA, ALDOB, ALMS1, AMACR, AMPD3, AMT, ANKS4B, ANKS6, AOC2, AP3B1, APC, APOA1, APOA2, APOA5, APOC2, APOC3, APOE, AQP9, ARG1, ARL13B, ASL, ASPA, ATP7A, ATP7B, B2M, B9D2, BMT, BBS10, BCO1, BCR, BLOC1S3, BMPR1A, BRAF, BSCL2, C10orf10, C9, CA2, CCND1, CD81, CDAN1, CEP19, CEP290, CEP83, CFB, CFHR2, CHRM3, COG1, COGS, COG6, COL1A1, COX6A1, CP, CPT1A, CROT, CSPP1, CTC1, CTH, CTSF, CTSK, CYB5A, CYP27A1, CYP2B6, CYP2C19, CYP2D6, CYP3A4, CYP7B1, DCDC2, DCXR, DDO, DENR, DIS3L2, DLAT, DMGDH, DNM1L, DOLK, DPM3, ERCC4, ERCC6, ETHE1, F2, F9, FABP1, FADD, FAM111A, FAN1, FGA, FGD1, FGFR2, FIG4, FTH1, FXN, G6PC, G6PC3, G6PD, GALT, GATA6, GCH1, GHR, GJB2, GLDC, GNE, GNPTAB, GPC3, GPD1, GPHN, GTPBP3, GUSB, GYG1, GYS1, GYS2, H19, HBA1, HBB, HMBS, HMGCR, HNF1A, HNF1B, HNF4A, HPD, HPS4, HPS5, HPS6, HPX, HRAS, HRSP12, HYLS1, ID1, IFIH1, IFT140, IFT27, IFT80, ISYNA1, JAG1, JAK2, KCTD11, KIAA0586, KPTN, KRIT1, LCAT, LDLR, LDLRAP1, LIPC, LIPT1, LPA, LRBA, LYST, MEN1, MKS1, MLH1, MMM, MMADHC, MOCS1, MOGAT2, MOGS, MTM1, MTO1, MTR, MTRR, NAGS, NAT2, NCF2, NEK1, NFU1, NGLY1, NR1H4, NUDT7, OPA3, OTC, PAF1, PAOX, PCK2, PCSK9, PCYT1A, PDGFRA, PDP1, PEX11A, PHKA1, PHYH, PIGM, PKD2, PKHD1, PPAPDC2, PPARG, PPM1K, PRKCD, PROZ, PSPH, PTCH1, PTRH2, PXMP2, PXMP4, RAH, RANBP2, RASA1, RMND1, RMRP, RPGRIP1L, SCN9A, SERAC1, SERPINA1, SERPING1, SLC10A1, SLC10A3, SLC10A7, SLC19A1, SLC19A3, SLC22A1, SLC22A5, SLC25A12, SLC25A19, SLC25A32, SLC27A5, SLC29A3, SLC2A1, SLC2A2, SLC2A9, SLC33A1, SLC6A20, SMAD4, SMARCB1, SPP2, SPRTN, ST3GAL5, SUOX, TARS2, TAT, TDO2, TF, TFR2, THPO, TK2, TMPRSS6, TNFRSF1A, TNFSF11, TP53, TTC21B, TTR, UBR1, UGT1A1, UNC13D, UROC1, UTRN, VIPAS39, VLDLR, VPS13A, VPS33B, WDR35, XDH, and YARS2.

[0529] TH-302 (Evofosfamide) (76) was observed to significantly (q≤0.05) modulate expression of the following genes: FAM111B, FGFR2, PKHD1, and RMRP. TP-434 (Eravacycline) (79) was observed to significantly (q≤0.05) modulate expression of the following genes: ABAT, ABHD5, AKR1D1, ASNS, CTH, HAX1, HMGCS2, ID1, NAGS, PCK2, PHGDH, PKHD1, PSAT1, RBCK1, SLC10A5, TAT, and VLDLR. NOV-002 (oxidized L-Glutathione) (83) was observed to significantly (q≤0.05) modulate expression of GOSH and IGFALS.

[0530] Bms-986094 (inx-189) (84) was observed to significantly (q≤0.05) modulate expression of the following genes: ABAT, ABCC2, ABCC6, ACACA, ACACB, ACOX3, ACTN1, ADK, AGPAT2, AGPS, AKR1C2, AKR1C4, ALMS1, ALPL, AP3B1, ARG1, ASNS, ASPA, ASXL1, ATG7, ATP8B1, BMT, BCKDHB, BCR, BLNK, C10orf11, C15orf41, CA5A, CDH1, CHRM3, COG5, CPT1A, CPT2, CTH, CTSK, CYP2C19, CYP7B1, DCDC2, DHCR24, DIS3L2, DNAH5, DPYD, DPYS, EDA, F2RL1, FARS2, FGD1, FGFR2, FTCD, FXN, G6PD, GALK2, GATM, GBE1, GCSH, GHR, GLDC, GLIS3, GLS2, GLYCTK, GPHN, H6PD, HBB, HMGCS2, HMOX1, HNF1B, HNF4A, HOGA1, HTT, ID1, IFNAR2, IFT122, IFT140, IGFALS, IKBKG, IL1RN, INSR, INVS, ITGB3, KYNU, LIPC, LRBA, LRP5, LYRM4, MAN1A1, MAOB, MAT1A, MCCC1, MTHFR, MTTP, MVK, MYH9, MYO5B, NARS2, NBAS, NCF2, NOTCH2, NR1H4, NUBPL, PAH, PAOX, PC, PCCA, PEPD, PEX14, PGM1, PHKA2, PHKB, PIEZO1, PKHD1, PKLR, PNP, POLD1, PRODH, RAI1, SCARB1, SCN9A, SDCCAG8, SERPINI1, SETBP1, SLC10A7, SLC19A1, SLC19A2, SLC25A1, SLC25A10, SLC25A12, SLC25A13, SLC25A15, SLC25A29, SLC2A2, SLC39A4, SLC4A4, SLC51B, SLC6A8, SLCO1B1, SNX10, SORT1, STIM1, SULT2A1, TDO2, TGFB1, THRB, TK2, TMEM135, TMLHE, TNFSF11, TTPA, TYMP, UTRN, VPS13A, and WAS. TC-5214 (R-Mecamylamine hydrochloride) (85) was observed to significantly (q≤0.05) modulate expression of GCSH, which had a log 2 fold change in expression of −1.31.

[0531] The following compounds were observed to have no effect on any disease gene expressional) DMXAA (42), which targets DT-diaphorase, a potent tumor blood vessel-disrupting agent; 2) dalcetrapib (56), which targets cholesteryl ester transfer protein increasing plasma HDL; 3) latrepirdine (57), which is a potent activator of AMPK that promotes the removal of α-synuclein; 4) CMX001 (58), which targets certain herpesviruses, adenoviruses, and orthopoxviruses; and 5) temsirolimus (60), which targets mTOR to suppress proliferation of a broad panel of tumor cells.

[0532] In fact, DMXAA (42), Evacetrapib (48), Latrepirdine (dihydrochloride) (57), CMX001 (Brincidofovir) (58), Vicriviroc (maleate) (59), Temsirolimus (60), Bitopertin (63), Latrepirdine (dihydrochloride) (64), Laropiprant (tredaptive) (67), Bardoxolone (68), VX-661 (tezacaptor) (69), LY404039 (pomaglumetad methionil (mGlu2/3) (71), Perifosine (KRX-0401) (72), Cabozantinib (XL184, BMS-907351) (73), Dacomitinib (PF299804, PF299) (74), a-PHP (77), LY 2140023 (Pomaglumetad methionil-LY404039) (78), TC-5214 (S-(+)-MecaMylaMine Hydrochloride) (80), Rolofylline (KW-3902) (81), and Amigal (Deoxygalactonojirimycin hydrochloride) (82) were not observed to significantly modulate expression (p≤0.05) of any of the genes analyzed.

[0533] B. Conclusions

[0534] Darapladib (44) was observed to significantly (q≤0.05) modulate expression of the following genes: RMRP, AKR1C4, AKR1D1, ANGPTL3, ID1, MBL2, NAGS, NOD2, PLEKHM1, AFP, DCDC2, DHCR7, HMGCR, IL1RN, LDLR, NPC1, NR1H4, PCSK9, and RBCK1. Darapladib was used as a positive control. Darapladib inhibits Lp-PLA2 and was considered as a possible add-on treatment for atherosclerosis. In a clinical trial, darapladib failed to reduce the risk of coronary heart disease death, myocardial infarction, and urgent coronary revascularization. The RNA-seq results herein show that the compound up-regulated genes: LDLR, PCSK9, and HMGCR (Hypercholesterolemia). HMGCR is a target of statins to reduce LDL concentration in plasma. The upregulation of HMGCR may explain the compound's lack of efficacy. ANGPTL3 was observed to be down-regulated, which is known to reduce plasma LDL levels.

[0535] Cediranib (49) was observed to significantly (q≤0.05) modulate expression of the following genes: RMRP, SLC2A2, ANGPTL3, ID1, MBL2, DCDC2, LDLR, ABCB11, ACOX2, CA2, CLDN1, DPYS, FGA, FGFR2, GHR, HAL, LIPC, MTTP, MVK, PDGFRA, SLCO1B1, TDO2, TNFSF11, TTPA, ABAT, ABCA1, ABCB4, BCHE, CCND1, DDC, F5, GLDC, LPIN1, MET, SAMHD1, SLC27A2, and SULT2A1.

[0536] Cediranib is known to inhibit VEGFR2, which inhibits VEGF-stimulated proliferation of tumor cells. In a clinical trial, the compound faded to meet its primary endpoint and survival of glioblastoma patients was not extended. Cediranib was observed to down-regulate Factor V levels in the RNA-seq results herein although VEGFR2 is not expressed in hepatocytes.

[0537] Factor V Leiden Thrombophilia is an autosomal dominant disease affecting between 3-8% of the Caucasian population, who carry one copy of the mutation. The presence of one copy of the Factor V Leiden mutation increases disease risk two-fold. About 1 in 5,000 mostly Caucasian people have two copies of the mutation, which raises the risk of disease 21-fold. Results herein show that Cediranib may be potentially effective to treat Factor V Leiden Thrombophilia.

[0538] Five compounds were observed to have an effect on expression of too many disease genes: 1) enzastaurin (41), which targets PKC resulting in a pro-apoptotic and anti-proliferative effect on tumor cells; 2) fostamatinib (50), which targets SYK resulting in an anti-proliferative effect on blood tumor cells; 3) tivozanib (52), which targets VGFR1/2/3 to block tumor growth in xenograft models; 4) cediranib (49), which targets VGFR2 resulting in an anti-proliferative effect on tumor cells; and 5) 17-MG (53), which targets HSP90 resulting in a pro-apoptotic and anti-proliferative effect on tumor cells.

### Example 5. Significant Effects of Phase III Failure Compounds on Gene Expression

[0539] In the RNA-seq results of Table 36, 15 compounds did not cause significant changes in gene expression. Significance was determined by the criteria of FPKM≥0.5, a log 2(fold-change)≥1, and a q-value≥0.05. Table 37 shows the number of expression significantly genes resulting from administration of the 45 Phase III failures chosen for analysis herein.

TABLE 37
Number (#) of genes having significantly changed expression

| Compound | # of genes | Compound | # of genes | Compound | # of genes |
|---|---|---|---|---|---|
| Enzstaurin | 971 | Zibotentan | 505 | TH-302 | 28 |
| BSI-201 | 7 | Semagacestat | 9 | TP-434 | 232 |
| Darapladib | 264 | Dalcetrapib | 43 | NOV-002 | 54 |
| Selumetinib | 60 | Latrepirdine | 12 | bms-986094 | 2079 |
| Peramivir | 23 | Temsirolimus | 34 | TC-5214 | 30 |
| Palifosfamide | 15 | Preladenant | 317 | | |
| Cediranib | 349 | EVP-6124 | 141 | | |
| Fostamatinib | 560 | Vanoxerine | 17 | | |
| Torcetrapib | 78 | CO-1686 | 391 | | |
| Tivozanib | 1510 | INNO-206 | 1944 | | |
| 17-AAG | 1558 | Pacritinib | 4114 | | |

[0540] DMXAA (42), evacetrapib, CMX001 (brincidofovir), vicriviroc (maleate), bitopertin, latrepirdine (dihydrochloride), laropiprant (tredaptive), VX-661 (tezacaptor), LY404039 (pomaglumetad methionil (mGlu2/3)), cabozantinib (XL184, BMS-907351), a-PHP, LY 2140023 (Pomaglumetad methionil-LY404039), TC-5214 (S-(+)-MecaMylaMine Hydrochloride), rolofylline (KW-3902), Amigal (Deoxygalactonojirimycin hydrochloride), and TC-5214 (R-Mecamylamine hydrochloride) were not observed to cause any significant changes in gene expression.

[0541] Table 38 shows the number of genes having significantly changed expression for each compound in the pilot RNA-seq study described in Example 2. Significance is defined as an FPKM≥0.5 a log 2(fold change)≥1, and a q-value of ≤0.05.

TABLE 38
Number (#) of genes having significantly changed expression

| Compound | # of genes | Compound | # of genes | Compound | # of genes |
|---|---|---|---|---|---|
| Simvastatin | 26 | Prednisone | 247 | Ibuprofen | 18 |
| Danazol | 5 | Penicillamine(D-) | 9 | Propylthiouracil | 8 |
| Nefazodone | 18 | Disopyramide | 7 | Rapamycin | 67 |
| Rosiglitazone maleate | 78 | Rifampicin | 90 | BIO | 82 |
| Sulpiride | 8 | Benzbromarone | 119 | ATRA | 30 |
| Captopril | 12 | Isoniazid | 14 | Xav939 | 8 |
| Imatinib | 31 | Acetaminophen | 3 | Bms189453 | 1 |
| Papaverine | 12 | Ritonavir | 183 | Dorsomorphin | 15 |
| Amiodarone | 19 | SGI-1776 | 64 | BMP2 | 5 |
| Nitrofurantoin | 107 | Valproate | 4 | Bms777607 | 19 |
| | | | | Bms833923 | 66 |

[0542] About 64% of the Phase III failure compounds were observed to significantly affect gene expression compared to about 80% of the first 39 compounds analyzed in the pilot RNA-seq analysis. The RNA-seq also showed that more genes (7597 vs. 703) were significantly affected by the Phase III failure compounds than the pilot compounds. Several of the Phase III failure compounds significantly affected more than 1000 genes, such as HSP90 inhibitor, FLT3 and JAK2 inhibitor, and NS5B RNA polymerase inhibitor. Five hundred forty-three of 1150 liver disease genes showed significant changes in gene expression in response to at least one Phase III failure compound.

### Example 6. Analyzing the Frequency of Identifying Features of Enhancers

[0543] Enhancers have previously been defined by the following annotations: H3K27ac+ and/or H3K4me1+(Active), H3Kme1+/H3K27ac−(Poised), p300, Brd4, super enhancers, and a cluster of master transcription factors (e.g., HNF3b, HNF4a, HNF6, HNF4, ATFS, 002, SMC, and YY1). The counts of these features in hepatocytes as determined by ChIP-seq are shown in Table 39.

TABLE 39
Feature counts in hepatocytes

| Type | Total | Non-promoter | Type | Total | Non-promoter |
|---|---|---|---|---|---|
| SP clusters | 102,345 | 85,990 | p300 | 9,217 | 7,770 |
| H3K27ac | 37,733 | 24,474 | Brd4 | 49,315 | 37,377 |
| H3K27ac+/H3K4me1+ | 9,997 | 8,442 | SuperEnhancers | 461 | 215 |
| H3K27ac−/H3K4me1+ | 21,353 | 21,153 | masterTF clusters | 206,548 | 188,516 |

[0544] As shown above, the majority of enhancers were observed in non-promoter regions indicating the importance of the three-dimensional architecture of the genome to interactions between enhancers and promoters.

### Example 7. Identifying Overlap Between Signaling Proteins and Enhancers

[0545] Signaling proteins bind to an enhancer to after the three-dimensional architecture of the genome and mediate gene looping resulting in the interaction between enhancers and promoters.

[0546] Table 40 shows the ChIP-seq results in hepatocytes showing naïve overlap of signaling proteins and enhancers.

TABLE 40
Naïve overlap between signaling proteins and enhancers

| Number of distinct | Overlap | Enhancers without | |
|---|---|---|---|
| signaling proteins | sites | signaling proteins | Annotation |
| 69,034 | 24,466 | 3,636 | H3k27ac |
| 88,163 | 9,456 | 437 | H3k27ac+/ |
| | | | H3K4me1+ |
| 91,307 | 9,751 | 9,953 | H3k27ac−/ |
| | | | H3Kme1+ |
| 93,883 | 8,421 | 294 | p300 |
| 56,949 | 39,053 | 8,093 | Brd4 |
| 98,171 | 461 | 0 | Super enhancers |
| 27,176 | 68,168 | 134,155 | Master |
| | | | transcription |
| | | | factor |
| | | | clusters |

[0547] Nearly all regions with H3k27ac, H3k27ac+/H3k4me1+, and p300 were also observed to have bound signaling proteins. No clear bias was observed for regions with H3K27ac-/H3K4me1+. Regions bound with Brd4 often were observed to also have at least one signaling protein. AM regions with super enhancers were observed to also have signaling proteins. Signaling proteins were observed to generally bind regions containing master transcription factor (TF) clusters. Insulated neighborhoods (INs) that did not contain a gene were also identified. The results herein show that an occupancy-dependent signaling center (ODSC) is defined by a region of the genome bound by signaling proteins and a H3K27 chemical modification, and independently includes at least one of a bromodomain-containing protein (Brd), a transcriptional coactivator (e.g. p300), and master transcription factors bound to the region.

### Example 8. Determining Genomic Position and Composition of GSCs

[0548] A multilayered approach is used herein to identify locations or the “footprint” of GSCs. The linear proximity of genes and enhancers is not always instructive to determine the 3D conformation of the genomic signaling centers.

[0549] ChIP-seq was used to determine the genomic position and composition of GSCs. Antibodies specific to 57 targets, including transcription factors, signaling proteins, and chromatin modifications, were selected for validation in HepG2 cells using ChIP-seq. These validated antibodies were used in ChIP-seq for hepatocytes to create a two-dimensional (2D) map. These antibody targets are shown in Table 41.

TABLE 41
ChIP-seq targets for primary human hepatocytes

| Chromatin Markers | Transcription factors | | Signaling proteins | |
|---|---|---|---|---|
| H3K4me3 | ATF5 | RNA Pol II | STAT1 - JAK/STAT | NR3C1 (glucocorticoid receptor, GR) |
| H3K27Ac | FOXA1 | ONECUT2 | STAT3 - JAK/STAT | ATR - DNA damage response |
| H3K4me1 | HNF4A | PROX1 | p53 - p53, mTOR, AMPK | ESR1 (estrogen receptor, ERa) |
| H3K27me3 | NROB2 | MLXIPL | TEAD 1/2 - Hippo | NR1H3 (liver X receptor, LXRa) |
| p300 | FOXA2 | YY1 | NF-κB (RelA/p65) - NF-κB | NR1H4 (farnesoid X receptor, FXR) |
| BRD4 | CUX2 | CTCF | CREB1 - MAPK | AHR (aryl hydrocarbon receptor) |
| SMC1 | HHEX | HNF6 (ONECUT1) | NR5A2 (LRH-1) | WWTR1 - Hippo |
| | ZGPAT | HNF1A | c-JUN - TLR, MAPK | HIF1a (hypoxia inducible factor) |
| | NR113 | C-MYC | c-FOS - TLR, MAPK | TCF7L2 (TCF4) - WNT |
| | | | ELK1 - MAPK | NR1I2 (pregnane X receptor, PXR) |
| | | | SMAD2/3 - TGFβ | RBPJK - NOTCH |
| | | | SMAD4 -TGFβ | SREBP1 - sterol |
| | | | SMAD1/5/8 - TGFβ | SREBP2 - sterol |
| | | | MTOR - mTOR | STAT5 - JAK/STAT |
| | | | RARalpha - RA pathway | RXR - RA pathway |
| | | | NR1I1 (VDR) | YAP1 - Hippo |

[0550] In the signaling proteins column, the associated canonical pathway is included after the “-”.

[0551] A. Binding Profiles and Gene Expression in Non-Perturbed Cell Systems

[0552] ChIP-seq and RNA-seq were performed as described in Example 1 on primary human hepatocytes. Results are shown in FIG. 10A for an insulated neighborhood containing the DNMBP gene. Transcription start sites for two neighboring genes ABCC2 and CPN1 were located outside of the insulated neighborhood boundary. Therefore, these two genes did not belong to the same insulated neighborhood as DNMBP. The RNA-seq signal peaks on the gene tracks reflect expression levels for the three genes.

[0553] Positions of the six GSCs within the IN were determined partially based on presence of H3K27Ac chromatin modification. Transcription factor HNF4A and signaling proteins SMAD2/3, TP53, STAT1, TEAD1, and NF-kB were all observed to bind the highlighted genomic signaling center adjacent to the CPN1 gene. SNP disease variant rs10883437 was also observed to be located in the highlighted GSC.

[0554] Eleven GSCs in the insulated neighborhood containing GADD45A gene were occupied cumulatively by transcription factors HNF4A, FOXA2, and HNF6, and signaling proteins HIF1A, SMAD2/3, TP53, STAT1, TEAD1, TCF7L2, and NF-kB, as shown in FIG. 10B. Positions of the GSCs within the neighborhood were determined partially based on presence of H3K27Ac chromatin modification. RNA-seq signal on the tracks reflects expression levels for the GADD45A gene. Known disease variants are shown below the RNA-seq tracks in FIG. 10B.

[0555] FIG. 10C shows an insulated neighborhood containing the POC1A gene as well as liver disease gene ALAS1. The seven genomic signaling centers in the neighborhood were occupied cumulatively by transcription factors HNF4A, FOXA2, and HNF6, and signaling proteins HIF1A, SMAD2/3, STAT1, TEAD1, TCF7L2, and NF-κB. The RNA-seq signal on the gene tracks reflects expression levels for the ALAS1 gene.

[0556] B. Binding Profiles and Gene Expression in Perturbed Cell Systems

[0557] As shown in Table 33, prednisone, an immunosuppressant, was observed to upregulate the SLC37A4 gene, which is associated with glycogen storage disease 1b. ChIP-seq and RNA-seq results are shown in FIG. 8 for an insulated neighborhood containing FOXR1, CCDC84, RPS95, TRAPPC4, SLC37A4, and HYOU1 genes. The five genomic signaling centers in the neighborhood were observed to be occupied cumulatively by transcription factor HNF4A and signaling protein Glucocorticoid Receptor (GR). Positions of the GSCs within the neighborhood were determined based on presence of H3K27Ac chromatin modification and an ATAC-seq. RNA-seq signal on the tracks reflects changes in expression levels for all the genes in the IN.

[0558] The RNA-seq results in FIG. 8 and in Table 33 confirm that SLC37A4 was significantly upregulated in cells treated with prednisone compared to cells treated with a vehicle control. Known disease variants are shown below the RNA-seq tracks in FIG. 8. The steroid drug, prednisone, was also observed to also upregulate FKPP5, a gene associated with immunosuppression, in a different IN than the neighborhood including SLC37A4, as shown in FIG. 11A. Known disease variants are shown below the RNA-seq tracks in FIG. 11A.

[0559] FIG. 11B also shows that BIO, a Wnt pathway agonist, upregulated expression of the COL1A1 gene implicated in liver fibrosis. The three GSCs in the IN containing COL1A1 are occupied cumulatively by transcription factor HNF4A and signaling protein TCF7L2. Positions of the three GSCs within the IN were determined partially based on presence of H3K27Ac chromatin modification and ATAC-seq signal. RNA-seq signal on the gene tracks reflects expression levels for the COL1A1 gene. The RNA-seq results shown on the gene tracks in FIG. 11B and in Table 33 confirm that COL1A1 was significantly up-regulated in cells treated with BIO in comparison to cells treated with vehicle control. Known disease variants are shown below the RNA-seq tracks in FIG. 11B.

[0560] Simvastatin, an inhibitor of HMG-CoA reductase and a key enzyme in cholesterol biosynthesis pathway, up-regulated PCSK9, a gene implicated in familial hypercholesterolemia. The four GSCs in the IN containing the PCSK9 and USP24 genes are occupied cumulatively by transcription factor HNF4A and signaling protein SREBP1. Positions of the four GSCs within the IN were determined partially based on presence of H3K27Ac chromatin modification and ATAC-seq signal. RNA-seq signal on the gene tracks reflects expression levels for PCSK9 and USP24 genes. The RNA-seq results shown on the gene tracks in FIG. 11C and in Table 33 confirm that PCSK9 was significantly up-regulated in cells treated with simvastatin in comparison to cells treated with a vehicle control. Known disease variants are shown below the RNA-seq tracks in FIG. 11C.

[0561] Table 33 shows that HMOX1, a gene implicated in liver fibrosis, was upregulated by BIO (MT-209), a Wnt signaling pathway agonist. FIG. 12A shows an insulated neighborhood containing HMOX1, MSM5, and RASD2 genes. The four GSCs in the IN are occupied cumulatively by transcription factors HNF4A, FOXA2, and ONECUT1, and signaling proteins GR, TCF7L2, SREBP1, SMAD2/3, TP53, STAT1, TEAD1, and NF-kB. Positions of the GSCs within the IN were determined partially based on presence of H3K27Ac chromatin modification. RNA-seq signal on the tracks reflects expression levels for the three genes. Known disease variants are shown below the RNA-seq tracks in FIG. 12A.

[0562] FIG. 12B shows an IN containing the FOXA2 gene. The seven GSCs in the IN are occupied cumulatively by transcription factors HNF4A, FOXA2, and HNF6 (ONECUT1), and genomic signaling proteins SMAD2/3, TP53, STAT1, TEAD1, NF-kB, and TCF7L2. Positions of the GSCs within the neighborhood were determined partially based on presence of H3K27Ac chromatin modification. RNA-seq signal on the tracks reflects expression levels for FOXA2. Known disease variants are shown below the RNA-seq tracks in FIG. 12B. Transcription factors HNF4A, FOXA2, and HNF6 (ONECUT1) are master transcription factors in human hepatocytes.

### Example 9. Predicting Expression Changes in Response to Compound

[0563] FIG. 13 shows the binding profile of the IN containing PCSK9 when samples were treated with prednisone (MT-861). SREBP1, associated with a sterol synthesis pathway, was observed to bind the GSC of PCSK9 and correspond to expression of PCSK9. PCSK9 was observed to be upregulated in Table 33 in response to simvastatin, which is a cholesterol biosynthesis signaling agonist. Therefore, the expression changes of PCSK9 in response to simvastatin may be predicted partially from the relationships between the ChIP-seq binding profile and the RNA-seq results in Table 33.

[0564] Assigning predictive values to the relationships among the experimental data herein depends on whether identifying the TF(s) or signaling protein(s) binding to a GSC is sufficient to predict changes in transcriptional output when the corresponding signaling pathway is perturbed. There is a signaling code, e.g., a set of rules beyond simply occupancy that determines transcriptional output.

### Example 10. Quality Control for ChIP-Seq

[0565] Quantitative metrics are used to evaluate genomic signaling center/gene expression correlations. Hypotheses to apply to positive controls include: whether GSCs contain target TF motifs, other TF motifs that are found in the GSCs, spatial relationship of TF occupancy, IN nesting, and combinations of SCs/motifs within IN. Temporal response, dose response, linkage weighting, and permutation complexity are also considered.

[0566] The results shown in the RNA-seq gene tracks were analyzed to determine whether the antibodies that were chosen to be specific to each of the ChIP-seq targets binds a region of the genome with a known binding motif. GSCs containing the associated motif were observed to be predictive for signaling. Table 42 provides metrics to measure the quality of the ChIP-seq results.

TABLE 42
Quality control (QC) for ChIP-seq targets

| | Peak | Most enriched | | Fraction of target | Motif | Quality |
|---|---|---|---|---|---|---|
| Target | number | motif | p-value | sequences w/Motif | rank | control |
| HNF4A | 88711 | HNF4A | 1E−6572 | 21.25% | 1 | Positive |
| FOXA2 | 73594 | FOXA2 | 1E−10960 | 45.02% | 1 | Positive |
| HNF1A | 13089 | HNF1A | 1E−738 | 7.86% | 1 | Positive |
| TCF7L2 | 8785 | TCF7L2 | 1E−1023 | 22.81% | 1 | Positive |
| NFκB-p65 | 42000 | NF-kB | 1E−2784 | 22.09% | 1 | Positive |
| SREBP1 | 180 | SREBP1 | 1E−18 | 19.13% | 1 | Positive |
| SMAD2/3 | 27571 | HNF4A | 1E−1305 | 16.22% | 1 | Positive |
| GRp20 | 5766 | CTCF | 1E−207 | 8.43% | 1 | Negative |
| ZGPAT | 36642 | FOXA1 | 1E−956 | 17.10% | 1 | Negative |
| CREB1 | 250035 | FOXA2 | 1E−850 | 20.53% | 1 | Negative |

### Example 11. Locating Occupancy-Dependent Signaling Centers (ODSCs) on Each Chromosome

[0567] Due to the diffuse binding patterns of signaling proteins, results were further limited to multi-footprint regions. ChIP-seq was performed to identify determine factors that may be used to identify an ODSC, such as a threshold number of signaling proteins, bound master transcription factors, and chromatin modifications. Master transcription factors for hepatocytes are defined in D'Alessio et al., Stem Cell Reports, Vol. 5; 763-775 (2015).

[0568] Signaling proteins and master transcription factors were grouped into dusters based on whether the called ChIP-seq peak overlap in linear genomic space. FIG. 19A shows a density plot of the log number of signaling protein binding events in each signaling protein cluster. Approximately half of clusters contain only one signaling protein binding event. FIG. 19B shows a density plot of the log number of master transcription factor binding event in each master transcription factor cluster in hepatocytes. More than half of all dusters was observed to contain only one master transcription factor binding event. From the results in FIG. 19A and FIG. 19B, a threshold value of at least 2 signaling proteins and at least 2 master transcription factors per each cluster was selected to define an occupancy dependent signaling center. ChIP-seq results for H3K27ac, Brd4, and p300 were combined with the results in FIG. 19A and FIG. 19B to further establish criteria for an ODSC.

[0569] Criteria were established that a region having at least one of H3K27ac or Brd4 or p300 or at least 2 master transcription factors and at least 2 signaling proteins ((H3K27ac or Brd4 or p300 or at least 2 master transcription factors)+at least 2 signaling proteins) is an ODSC. Using this definition, 38,656 ODSCs were identified. The locations of the ODSCs on Chromosome 1 are shown in Table 43. It is noted that the unique identifiers from ENSEMBL for the “Overlapping Gene(s)” have been modified to remove the first five leading zeros (0) of the identifier after the ENSG label (ENSG00000). The “Start” and “End” boundaries are in reference to nucleic acid positions in the hg19 genome of the UCSC Genome Browser Gateway.

TABLE 43
ODSC Locations on Chromosome 1

| SEQ ID NO. | Start | End | Overlapping Gene(s) |
|---|---|---|---|
| 32627 | 713857 | 714284 | 237491, 228327 |
| 32628 | 859081 | 859882 | |
| 32629 | 893725 | 894868 | 188976 |
| 32630 | 901414 | 902636 | 187583 |
| 32631 | 934902 | 937696 | 188290 |
| 32632 | 940118 | 942798 | |
| 32633 | 948209 | 949702 | 187608, 224969 |
| 32634 | 954620 | 956823 | 188157 |
| 32635 | 959883 | 960817 | 188157 |
| 32636 | 994398 | 995462 | 217801 |
| 32637 | 998954 | 1000393 | 217801 |
| 32638 | 1014613 | 1016031 | |
| 32639 | 1051393 | 1052182 | 131591 |
| 32640 | 1059974 | 1060984 | |
| 32641 | 1099803 | 1101365 | |
| 32642 | 1166019 | 1168675 | 176022, 078808 |
| 32643 | 1174938 | 1175933 | |
| 32644 | 1207524 | 1210311 | 160087 |
| 32645 | 1216361 | 1218351 | 162572 |
| 32646 | 1239959 | 1240566 | 131584 |
| 32647 | 1242087 | 1245155 | 169972, 131584 |
| 32648 | 1259153 | 1261364 | 224051, 127054 |
| 32649 | 1278643 | 1285594 | 107404 |
| 32650 | 1309507 | 1311757 | 175756 |
| 32651 | 1333596 | 1336815 | 224870, 221978 |
| 32652 | 1337276 | 1338146 | 242485, 224870 |
| 32653 | 1341543 | 1343821 | 242485 |
| 32654 | 1364978 | 1366597 | 225285 |
| 32655 | 1366604 | 1369554 | 225285 |
| 32656 | 1373362 | 1374320 | 179403 |
| 32657 | 1406328 | 1407232 | 160072 |
| 32658 | 1446485 | 1447630 | 197785 |
| 32659 | 1489904 | 1490911 | 160075 |
| 32660 | 1509070 | 1511629 | 215014, 160075 |
| 32661 | 1550584 | 1552276 | 197530, 272106 |
| 32662 | 1610112 | 1610664 | 189339 |
| 32663 | 1655573 | 1656167 | 227775, 008128, 268575 |
| 32664 | 1684695 | 1685510 | 008130 |
| 32665 | 1688757 | 1691274 | 008130 |
| 32666 | 1695074 | 1696041 | 008130 |
| 32667 | 1708474 | 1711165 | 008130 |
| 32668 | 1713795 | 1714807 | |
| 32669 | 1820929 | 1823640 | 231050, 078369 |
| 32670 | 1839462 | 1841569 | |
| 32671 | 1859400 | 1859915 | 142609 |
| 32672 | 1975926 | 1976713 | |
| 32673 | 1977878 | 1979421 | |
| 32674 | 1981106 | 1983066 | 067606, 226969 |
| 32675 | 2120804 | 2122810 | 269554, 162585 |
| 32676 | 2125554 | 2127163 | 162585 |
| 32677 | 2138288 | 2140518 | 162585 |
| 32678 | 2157992 | 2159433 | |
| 32679 | 2160223 | 2162241 | 157933 |
| 32680 | 2162469 | 2164678 | 157933 |
| 32681 | 2165082 | 2166440 | 157933 |
| 32682 | 2179076 | 2180445 | 157933 |
| 32683 | 2181472 | 2183525 | 157933 |
| 32684 | 2186944 | 2187790 | 157933 |
| 32685 | 2201505 | 2202588 | 157933 |
| 32686 | 2245704 | 2246958 | |
| 32687 | 2322267 | 2324538 | 157916, 116151 |
| 32688 | 2342905 | 2346387 | 157911 |
| 32689 | 2406408 | 2407027 | 149527 |
| 32690 | 2425699 | 2426060 | 229393, 149527 |
| 32691 | 2456557 | 2459220 | 157881 |
| 32692 | 2459508 | 2461364 | 197921 |
| 32693 | 2477557 | 2480991 | 272449 |
| 32694 | 2487017 | 2489200 | 157873, 238164 |
| 32695 | 2507231 | 2508062 | |
| 32696 | 2509578 | 2510609 | |
| 32697 | 2516493 | 2518599 | 157870 |
| 32698 | 2573477 | 2574898 | 215912 |
| 32699 | 2986219 | 2986762 | 142611 |
| 32700 | 3209528 | 3210155 | 142611 |
| 32701 | 3236643 | 3237647 | 142611 |
| 32702 | 3370576 | 3372262 | 130762 |
| 32703 | 3376396 | 3377249 | 130762 |
| 32704 | 3396394 | 3397583 | 130762 |
| 32705 | 3445753 | 3446391 | 162591 |
| 32706 | 3540401 | 3542579 | 158109, 238260 |
| 32707 | 3565899 | 3566958 | 116213 |
| 32708 | 3585220 | 3585777 | 227589, 078900 |
| 32709 | 3656537 | 3657040 | 227372 |
| 32710 | 3663146 | 3664121 | 227372 |
| 32711 | 3689174 | 3689791 | 235169 |
| 32712 | 3711928 | 3713827 | 130764 |
| 32713 | 3772894 | 3774861 | 169598, 116198 |
| 32714 | 3815920 | 3818154 | 236423, 198912 |
| 32715 | 4143549 | 4144569 | |
| 32716 | 4440619 | 4441092 | |
| 32717 | 5490837 | 5491374 | |
| 32718 | 5975830 | 5976457 | 131697 |
| 32719 | 5993639 | 5994358 | 131697 |
| 32720 | 6051538 | 6052630 | 131697, 069424 |
| 32721 | 6085988 | 6086471 | 069424 |
| 32722 | 6258636 | 6260608 | 116251 |
| 32723 | 6265111 | 6267058 | 158286, 226944, 116251 |
| 32724 | 6295039 | 6296332 | 225077, 116237 |
| 32725 | 6305086 | 6305721 | 173673 |
| 32726 | 6319432 | 6320436 | 158292 |
| 32727 | 6413250 | 6414827 | 097021 |
| 32728 | 6416318 | 6416806 | 097021 |
| 32729 | 6418789 | 6420993 | 097021 |
| 32730 | 6452636 | 6454818 | 271746, 097021 |
| 32731 | 6510907 | 6511710 | 187017 |
| 32732 | 6524255 | 6524926 | 215788 |
| 32733 | 6532074 | 6532809 | 171680 |
| 32734 | 6550203 | 6551906 | 171680 |
| 32735 | 6613708 | 6614984 | 162408 |
| 32736 | 6639121 | 6641206 | 204859, 173662 |
| 32737 | 6641999 | 6643107 | 204859 |
| 32738 | 6660162 | 6665440 | 162413 |
| 32739 | 6672646 | 6675958 | 116273, 162413 |
| 32740 | 6684927 | 6686117 | 041988 |
| 32741 | 6760651 | 6762692 | 007923 |
| 32742 | 6784559 | 6785120 | 228750 |
| 32743 | 6822095 | 6822990 | |
| 32744 | 6843552 | 6846644 | 171735, 237436 |
| 32745 | 6867631 | 6868607 | 171735 |
| 32746 | 6919307 | 6921013 | 171735 |
| 32747 | 7157903 | 7159085 | 171735 |
| 32748 | 7208581 | 7210426 | 171735 |
| 32749 | 7218993 | 7219774 | 171735 |
| 32750 | 7325087 | 7328694 | 171735 |
| 32751 | 7406455 | 7407752 | 171735 |
| 32752 | 7630241 | 7630855 | 171735 |
| 32753 | 7632711 | 7633509 | 171735 |
| 32754 | 7634118 | 7635164 | 171735 |
| 32755 | 7740204 | 7741216 | 171735 |
| 32756 | 7830913 | 7832475 | 049245 |
| 32757 | 7843743 | 7845272 | 049246 |
| 32758 | 8000619 | 8001301 | 049249 |
| 32759 | 8020585 | 8022813 | 116288 |
| 32760 | 8063335 | 8063885 | |
| 32761 | 8063915 | 8067250 | 116285 |
| 32762 | 8067874 | 8068391 | 116285 |
| 32763 | 8069705 | 8071594 | 116285 |
| 32764 | 8077372 | 8090318 | 238290, 116285 |
| 32765 | 8099140 | 8101568 | 238290 |
| 32766 | 8120825 | 8123294 | 238290 |
| 32767 | 8130301 | 8132101 | 238290 |
| 32768 | 8149435 | 8159312 | 238290 |
| 32769 | 8176000 | 8178054 | 238290 |
| 32770 | 8180456 | 8182472 | 238290 |
| 32771 | 8201116 | 8202191 | |
| 32772 | 8228962 | 8232922 | |
| 32773 | 8233833 | 8235332 | |
| 32774 | 8241522 | 8245276 | |
| 32775 | 8248458 | 8251154 | 229305 |
| 32776 | 8253640 | 8255849 | |
| 32777 | 8256053 | 8258915 | |
| 32778 | 8259998 | 8264186 | |
| 32779 | 8271233 | 8272850 | 227634 |
| 32780 | 8276508 | 8278363 | 233645 |
| 32781 | 8284669 | 8285851 | |
| 32782 | 8298106 | 8300290 | |
| 32783 | 8307103 | 8308643 | |
| 32784 | 8317066 | 8321901 | |
| 32785 | 8323050 | 8323689 | |
| 32786 | 8456020 | 8458074 | 142599 |
| 32787 | 8467998 | 8468691 | 142599 |
| 32788 | 8480118 | 8481361 | 142599 |
| 32789 | 8482342 | 8485254 | 232912, 142599 |
| 32790 | 8557458 | 8558186 | 142599 |
| 32791 | 8585054 | 8586425 | 142599 |
| 32792 | 8623558 | 8624829 | 142599 |
| 32793 | 8631260 | 8632640 | 142599 |
| 32794 | 8685692 | 8687291 | 142599 |
| 32795 | 8703267 | 8704607 | 142599 |
| 32796 | 8728136 | 8728701 | 142599 |
| 32797 | 8730330 | 8731182 | 142599 |
| 32798 | 8762105 | 8763757 | 142599 |
| 32799 | 8771984 | 8773420 | 142599 |
| 32800 | 8801981 | 8802615 | 142599 |
| 32801 | 8814962 | 8815494 | 142599 |
| 32802 | 8876418 | 8878755 | 142599 |
| 32803 | 8908688 | 8909356 | |
| 32804 | 8929733 | 8932388 | 074800 |
| 32805 | 8932818 | 8934618 | 074800 |
| 32806 | 8937076 | 8941437 | 230679, 074800, 236269 |
| 32807 | 8950027 | 8950658 | |
| 32808 | 8959839 | 8960606 | |
| 32809 | 8962777 | 8964460 | |
| 32810 | 9170654 | 9171274 | 180758 |
| 32811 | 9172422 | 9174108 | 180758 |
| 32812 | 9187639 | 9189801 | 180758 |
| 32813 | 9221802 | 9225824 | |
| 32814 | 9241243 | 9243591 | 234546, 228526 |
| 32815 | 9253872 | 9254924 | 228526 |
| 32816 | 9256288 | 9257339 | 228526 |
| 32817 | 9292849 | 9296301 | 049239 |
| 32818 | 9297627 | 9303507 | 049239 |
| 32819 | 9307965 | 9308820 | 049239 |
| 32820 | 9309209 | 9310926 | 049239 |
| 32821 | 9335562 | 9336657 | |
| 32822 | 9348952 | 9351363 | |
| 32823 | 9351400 | 9355734 | 171621 |
| 32824 | 9360014 | 9360804 | 171621 |
| 32825 | 9461435 | 9462756 | |
| 32826 | 9488312 | 9489871 | |
| 32827 | 9493900 | 9503319 | 252956 |
| 32828 | 9506472 | 9507947 | |
| 32829 | 9512550 | 9513121 | |
| 32830 | 9519859 | 9520529 | |
| 32831 | 9525115 | 9528127 | |
| 32832 | 9552002 | 9552788 | |
| 32833 | 9560878 | 9561969 | 235263 |
| 32834 | 9562807 | 9564048 | 235263 |
| 32835 | 9597781 | 9598720 | |
| 32836 | 9599088 | 9600628 | 171612 |
| 32837 | 9610103 | 9611162 | 171612 |
| 32838 | 9613593 | 9616588 | 171612 |
| 32839 | 9648436 | 9649981 | 188807 |
| 32840 | 9746741 | 9748896 | 231789, 171608 |
| 32841 | 9748973 | 9750336 | 171608 |
| 32842 | 9883263 | 9884131 | 171603 |
| 32843 | 9884898 | 9885957 | |
| 32844 | 9928117 | 9928711 | 178585 |
| 32845 | 9960451 | 9961038 | 178585 |
| 32846 | 9969389 | 9971505 | 178585 |
| 32847 | 10002279 | 10004326 | 228150, 173614, 162441 |
| 32848 | 10092253 | 10094085 | 130939 |
| 32849 | 10125150 | 10126008 | 130939 |
| 32850 | 10269529 | 10272664 | 054523 |
| 32851 | 10352078 | 10352665 | 054523 |
| 32852 | 10446959 | 10449280 | |
| 32853 | 10458455 | 10460868 | 142657 |
| 32854 | 10490112 | 10491351 | 251503, 175279, 271989 |
| 32855 | 10519084 | 10519785 | 203469, 160049 |
| 32856 | 10531506 | 10533000 | 142655, 160049 |
| 32857 | 10534619 | 10536169 | 142655 |
| 32858 | 10564262 | 10564830 | 142655 |
| 32859 | 10569235 | 10572405 | 142655 |
| 32860 | 10587512 | 10590811 | 142655 |
| 32861 | 10614249 | 10614731 | 142655 |
| 32862 | 10615563 | 10616648 | 142655 |
| 32863 | 10658281 | 10660554 | 142655 |
| 32864 | 10688626 | 10689378 | 142655 |
| 32865 | 10725888 | 10726401 | 130940 |
| 32866 | 10753406 | 10754713 | 130940 |
| 32867 | 10791105 | 10791415 | 130940 |
| 32868 | 10856096 | 10857015 | 130940 |
| 32869 | 10927032 | 10927798 | |
| 32870 | 11072145 | 11073609 | 120948 |
| 32871 | 11105644 | 11107700 | 009724 |
| 32872 | 11118713 | 11121250 | 116649 |
| 32873 | 11158844 | 11160668 | 230337, 171824 |
| 32874 | 11194179 | 11194843 | 198793 |
| 32875 | 11211705 | 11213642 | 253086, 198793 |
| 32876 | 11217265 | 11219652 | 198793 |
| 32877 | 11236295 | 11237129 | 198793 |
| 32878 | 11321625 | 11323626 | 198793 |
| 32879 | 11327210 | 11328430 | |
| 32880 | 11332701 | 11334539 | 120942 |
| 32881 | 11708453 | 11711096 | 116661 |
| 32882 | 11714220 | 11715445 | 132879, 116661 |
| 32883 | 11723935 | 11725355 | 116663 |
| 32884 | 11731201 | 11732070 | 116663 |
| 32885 | 11734855 | 11737322 | 116670 |
| 32886 | 11740476 | 11742013 | 116670 |
| 32887 | 11795901 | 11798581 | 177674 |
| 32888 | 11837451 | 11838376 | 177553, 215910 |
| 32889 | 11860769 | 11861251 | 177000 |
| 32890 | 11864394 | 11867634 | 011021, 177000 |
| 32891 | 11899536 | 11901111 | 242349, 011021 |
| 32892 | 11902102 | 11903251 | 011021, 242349 |
| 32893 | 11967495 | 11970502 | 201801, 199347 |
| 32894 | 11984452 | 11985361 | 116685 |
| 32895 | 11987826 | 11988820 | |
| 32896 | 11993950 | 11995476 | 083444 |
| 32897 | 12039320 | 12041545 | 116688 |
| 32898 | 12049224 | 12053091 | 116688 |
| 32899 | 12079100 | 12080535 | 116691 |
| 32900 | 12190466 | 12191316 | 120949 |
| 32901 | 12206678 | 12207767 | |
| 32902 | 12208096 | 12208919 | |
| 32903 | 12219675 | 12220453 | |
| 32904 | 12221327 | 12222281 | |
| 32905 | 12226710 | 12228198 | 028137 |
| 32906 | 12230116 | 12230760 | 028137 |
| 32907 | 12240230 | 12241339 | 028137 |
| 32908 | 12244067 | 12247040 | 028137 |
| 32909 | 12266564 | 12267768 | 028137 |
| 32910 | 12280834 | 12281554 | 225196, 252969 |
| 32911 | 12289729 | 12291849 | 048707 |
| 32912 | 12406417 | 12407486 | 048707 |
| 32913 | 12415258 | 12419170 | 048707 |
| 32914 | 12446195 | 12446796 | 048707 |
| 32915 | 12465338 | 12466172 | 048707 |
| 32916 | 12492909 | 12494639 | 048707 |
| 32917 | 12497006 | 12498957 | 048707 |
| 32918 | 12513098 | 12514840 | 048707 |
| 32919 | 12537705 | 12538907 | 048707 |
| 32920 | 12584815 | 12586642 | |
| 32921 | 12587208 | 12589842 | 229484 |
| 32922 | 12609670 | 12610292 | |
| 32923 | 12650986 | 12652358 | 162496 |
| 32924 | 12653593 | 12658285 | 162496 |
| 32925 | 12660261 | 12665352 | 162496 |
| 32926 | 12667960 | 12670336 | 162496 |
| 32927 | 12673974 | 12680593 | 272482, 162496 |
| 32928 | 13977734 | 13978281 | |
| 32929 | 14074906 | 14076929 | 116731 |
| 32930 | 14084013 | 14084520 | 116731 |
| 32931 | 14125327 | 14125734 | 116731 |
| 32932 | 14125963 | 14126500 | 116731 |
| 32933 | 15478765 | 15479423 | 171729, 175147 |
| 32934 | 15528381 | 15528988 | 171729 |
| 32935 | 15678669 | 15680002 | 142621 |
| 32936 | 15692730 | 15693489 | 142621 |
| 32937 | 15735742 | 15737587 | 142634, 228140 |
| 32938 | 15747496 | 15748460 | 142634 |
| 32939 | 15850024 | 15852020 | 132906 |
| 32940 | 15852724 | 15854096 | 116138, 132906 |
| 32941 | 15885642 | 15886461 | 116138 |
| 32942 | 15901287 | 15901774 | 116771, 116138 |
| 32943 | 15910558 | 15912163 | 116771, 116138 |
| 32944 | 15929674 | 15930760 | 237301 |
| 32945 | 15942981 | 15945997 | 197312 |
| 32946 | 16009315 | 16011944 | 271742, 264048, 116786 |
| 32947 | 16044763 | 16045426 | 116786 |
| 32948 | 16061720 | 16063736 | 162461, 237938 |
| 32949 | 16068629 | 16069679 | 162460, 224459 |
| 32950 | 16105950 | 16108296 | 162458 |
| 32951 | 16121485 | 16125021 | |
| 32952 | 16125125 | 16128137 | |
| 32953 | 16158212 | 16164396 | 179743 |
| 32954 | 16173248 | 16177312 | 065526, 179743 |
| 32955 | 16211610 | 16213389 | 065526 |
| 32956 | 16301749 | 16302926 | 116809 |
| 32957 | 16309118 | 16309836 | |
| 32958 | 16338751 | 16340132 | |
| 32959 | 16393147 | 16394262 | 185519 |
| 32960 | 16439349 | 16440036 | |
| 32961 | 16469783 | 16474039 | 142627 |
| 32962 | 16479943 | 16483681 | 227959, 142627 |
| 32963 | 16490616 | 16492011 | |
| 32964 | 16501674 | 16503536 | |
| 32965 | 16504009 | 16506220 | |
| 32966 | 16507294 | 16511947 | |
| 32967 | 16553183 | 16553827 | 237276 |
| 32968 | 16574413 | 16575703 | 037637 |
| 32969 | 16579824 | 16581964 | 037637 |
| 32970 | 16597285 | 16597868 | 037637 |
| 32971 | 16676059 | 16676940 | 037637 |
| 32972 | 16677183 | 16679788 | 055070, 037637 |
| 32973 | 16693036 | 16695098 | 055070 |
| 32974 | 16766827 | 16768149 | 157191 |
| 32975 | 16839993 | 16841033 | 206652 |
| 32976 | 16921681 | 16922179 | 219481 |
| 32977 | 16934316 | 16935754 | 219481 |
| 32978 | 16938943 | 16940490 | 219481 |
| 32979 | 16970438 | 16971442 | 215908 |
| 32980 | 17023367 | 17024335 | 268869 |
| 32981 | 17035156 | 17035897 | 268869 |
| 32982 | 17215253 | 17216535 | 235241, 238142, 058453 |
| 32983 | 17222412 | 17223908 | 207005, 058453 |
| 32984 | 17230140 | 17232387 | 272426, 058453 |
| 32985 | 17240350 | 17241303 | 058453 |
| 32986 | 17287025 | 17287735 | 058453 |
| 32987 | 17337490 | 17338632 | 159363 |
| 32988 | 17379588 | 17381086 | 117118 |
| 32989 | 17389891 | 17390794 | |
| 32990 | 17407866 | 17408345 | 117115 |
| 32991 | 17424590 | 17425480 | 117115 |
| 32992 | 17559353 | 17560895 | 142623 |
| 32993 | 17563328 | 17564572 | 142623 |
| 32994 | 17763652 | 17767407 | 179051 |
| 32995 | 17767420 | 17768428 | |
| 32996 | 17842924 | 17843864 | |
| 32997 | 17853487 | 17854510 | |
| 32998 | 17864412 | 17865127 | |
| 32999 | 17865157 | 17867452 | 074964 |
| 33000 | 17878018 | 17879138 | 074964 |
| 33001 | 17884907 | 17887194 | 074964 |
| 33002 | 17887236 | 17888504 | 074964 |
| 33003 | 17890417 | 17891723 | 074964 |
| 33004 | 17895449 | 17897391 | 074964 |
| 33005 | 17902147 | 17903200 | 074964 |
| 33006 | 17905984 | 17910546 | 074964 |
| 33007 | 17911583 | 17913143 | 074964 |
| 33008 | 17913757 | 17915419 | 074964 |
| 33009 | 17918081 | 17921040 | 074964 |
| 33010 | 17950626 | 17951894 | 074964 |
| 33011 | 17958857 | 17960073 | 074964 |
| 33012 | 17960147 | 17960696 | 074964 |
| 33013 | 18320340 | 18320965 | |
| 33014 | 18454461 | 18455585 | 117154 |
| 33015 | 18509027 | 18510277 | 117154 |
| 33016 | 18790674 | 18791608 | |
| 33017 | 18805872 | 18808372 | 179023 |
| 33018 | 19208866 | 19209387 | 255275, 159423 |
| 33019 | 19212538 | 19213176 | 255275, 159423 |
| 33020 | 19217094 | 19218106 | 255275, 159423 |
| 33021 | 19221039 | 19222181 | 255275, 159423 |
| 33022 | 19225887 | 19229978 | 159423, 255275 |
| 33023 | 19248509 | 19249350 | 169991 |
| 33024 | 19274929 | 19276643 | 169991 |
| 33025 | 19278156 | 19278858 | 169991 |
| 33026 | 19280153 | 19280562 | 169991 |
| 33027 | 19281487 | 19283398 | 169991 |
| 33028 | 19335875 | 19339458 | |
| 33029 | 19339968 | 19340999 | |
| 33030 | 19355739 | 19356302 | |
| 33031 | 19371653 | 19373248 | |
| 33032 | 19391929 | 19395488 | |
| 33033 | 19405827 | 19408172 | 127481 |
| 33034 | 19412436 | 19414948 | 127481 |
| 33035 | 19528657 | 19529341 | 127481 |
| 33036 | 19535294 | 19537871 | 230424, 127481 |
| 33037 | 19577073 | 19579111 | 053372, 127463 |
| 33038 | 19597956 | 19601577 | 211454 |
| 33039 | 19613744 | 19615980 | 162482 |
| 33040 | 19637770 | 19639918 | 040487, 053371 |
| 33041 | 19664568 | 19665536 | 077549 |
| 33042 | 19751865 | 19752716 | 077549 |
| 33043 | 19756677 | 19757139 | 077549 |
| 33044 | 19763139 | 19763750 | 077549 |
| 33045 | 19766926 | 19767296 | 077549 |
| 33046 | 19772307 | 19772907 | 077549 |
| 33047 | 19777171 | 19777700 | 077549 |
| 33048 | 19810501 | 19813484 | 077549 |
| 33049 | 19831280 | 19831850 | |
| 33050 | 19922515 | 19924980 | 270136, 173436, 235185 |
| 33051 | 19949768 | 19950591 | 270136, 173436 |
| 33052 | 20061577 | 20063588 | 162542 |
| 33053 | 20080717 | 20081395 | 162542 |
| 33054 | 20125457 | 20127390 | 162542 |
| 33055 | 20141462 | 20143161 | 178828, 235434 |
| 33056 | 20208516 | 20209761 | 169914 |
| 33057 | 20314090 | 20314633 | |
| 33058 | 20478284 | 20481908 | 227066 |
| 33059 | 20509514 | 20511052 | 225986 |
| 33060 | 20512002 | 20513307 | 162543, 225986 |
| 33061 | 20537916 | 20538411 | |
| 33062 | 20539174 | 20539883 | |
| 33063 | 20802338 | 20803780 | |
| 33064 | 20803839 | 20805139 | |
| 33065 | 20806081 | 20808696 | |
| 33066 | 20810115 | 20813903 | 162545 |
| 33067 | 20833286 | 20835486 | 090432 |
| 33068 | 20913425 | 20917814 | 158825 |
| 33069 | 20927163 | 20932186 | 158825 |
| 33070 | 20939056 | 20941609 | 158825 |
| 33071 | 20959273 | 20961711 | 158828 |
| 33072 | 20987036 | 20988931 | 244038 |
| 33073 | 21022669 | 21024027 | 117245 |
| 33074 | 21057818 | 21061162 | 233069, 189410 |
| 33075 | 21064337 | 21066823 | |
| 33076 | 21112011 | 21114971 | 127483 |
| 33077 | 21140142 | 21141078 | 075151 |
| 33078 | 21173886 | 21174640 | 075151 |
| 33079 | 21223041 | 21224059 | 075151 |
| 33080 | 21347891 | 21349987 | 075151 |
| 33081 | 21385472 | 21386180 | 075151 |
| 33082 | 21441240 | 21442261 | 075151 |
| 33083 | 21449761 | 21450459 | 075151 |
| 33084 | 21500925 | 21504341 | 266867, 075151 |
| 33085 | 21538546 | 21539041 | |
| 33086 | 21578291 | 21579607 | 117298 |
| 33087 | 21587477 | 21590075 | 117298 |
| 33088 | 21594709 | 21595752 | 117298 |
| 33089 | 21616082 | 21617514 | 117298 |
| 33090 | 21625387 | 21626418 | 231105, 117298 |
| 33091 | 21650351 | 21653173 | 117298 |
| 33092 | 21655419 | 21656836 | 117298 |
| 33093 | 21663928 | 21666321 | 117298 |
| 33094 | 21670639 | 21672925 | 117298 |
| 33095 | 21864052 | 21865113 | 162551 |
| 33096 | 21872198 | 21873506 | 162551 |
| 33097 | 21876406 | 21878561 | 162551 |
| 33098 | 21913268 | 21913887 | 233431 |
| 33099 | 21948136 | 21950675 | 076864 |
| 33100 | 21964951 | 21966715 | 076864 |
| 33101 | 21995251 | 21996699 | 076864 |
| 33102 | 22091057 | 22091855 | 090686 |
| 33103 | 22108320 | 22110620 | 090686 |
| 33104 | 22263629 | 22264521 | 142798 |
| 33105 | 22265613 | 22266691 | |
| 33106 | 22351090 | 22352884 | 218510, 228397 |
| 33107 | 22374887 | 22375329 | |
| 33108 | 22378871 | 22380741 | 070831 |
| 33109 | 22453833 | 22454182 | 162552 |
| 33110 | 22555716 | 22556444 | |
| 33111 | 22586012 | 22586868 | |
| 33112 | 22665576 | 22666282 | |
| 33113 | 22674596 | 22675399 | |
| 33114 | 22739573 | 22741670 | |
| 33115 | 22773528 | 22774571 | |
| 33116 | 22777582 | 22779291 | 184677 |
| 33117 | 22799124 | 22799577 | 184677 |
| 33118 | 22829695 | 22830966 | 184677 |
| 33119 | 23036990 | 23037378 | 133216 |
| 33120 | 23071976 | 23074349 | 133216 |
| 33121 | 23075761 | 23078489 | 133216 |
| 33122 | 23302348 | 23303710 | |
| 33123 | 23344942 | 23347124 | 240553, 004487 |
| 33124 | 23425730 | 23429824 | 169641 |
| 33125 | 23475500 | 23476167 | 169641 |
| 33126 | 23493695 | 23495570 | 169641 |
| 33127 | 23503601 | 23504801 | 169641 |
| 33128 | 23514033 | 23514648 | |
| 33129 | 23608825 | 23611147 | 261326 |
| 33130 | 23669080 | 23672170 | 125944 |
| 33131 | 23693776 | 23696292 | 249087, 125945 |
| 33132 | 23703397 | 23704380 | |
| 33133 | 23730222 | 23730977 | 204219 |
| 33134 | 23749891 | 23751935 | 204219 |
| 33135 | 23770411 | 23771292 | 088280 |
| 33136 | 23801248 | 23802086 | 088280 |
| 33137 | 23805019 | 23806606 | 088280 |
| 33138 | 23809624 | 23811278 | 088280 |
| 33139 | 23866184 | 23866790 | |
| 33140 | 23880590 | 23883579 | |
| 33141 | 23885723 | 23886497 | 117318 |
| 33142 | 23888677 | 23889084 | |
| 33143 | 23902982 | 23904583 | |
| 33144 | 23999584 | 24000640 | 229239 |
| 33145 | 24017907 | 24019603 | 142676 |
| 33146 | 24047009 | 24047615 | |
| 33147 | 24053389 | 24054469 | |
| 33148 | 24054950 | 24055905 | |
| 33149 | 24058688 | 24059365 | |
| 33150 | 24061378 | 24062204 | |
| 33151 | 24069139 | 24071843 | 011007 |
| 33152 | 24104435 | 24105961 | 057757, 236810 |
| 33153 | 24116729 | 24118702 | 011009 |
| 33154 | 24125233 | 24128666 | 117305, 117308 |
| 33155 | 24136116 | 24136818 | 117305 |
| 33156 | 24150987 | 24152338 | 117305 |
| 33157 | 24165035 | 24165778 | 117305 |
| 33158 | 24193988 | 24195532 | 179163 |
| 33159 | 24246403 | 24247648 | 188822 |
| 33160 | 24277903 | 24278625 | 188822 |
| 33161 | 24285004 | 24287510 | 189266, 188822 |
| 33162 | 24305904 | 24307619 | 188529 |
| 33163 | 24345147 | 24345845 | |
| 33164 | 24373595 | 24374089 | 225315 |
| 33165 | 24446223 | 24447271 | 142677 |
| 33166 | 24454109 | 24454819 | 142677 |
| 33167 | 24469077 | 24469998 | 142677 |
| 33168 | 24476365 | 24477993 | |
| 33169 | 24481383 | 24482099 | 185436 |
| 33170 | 24513197 | 24514561 | 185436 |
| 33171 | 24562430 | 24564250 | |
| 33172 | 24619940 | 24622465 | |
| 33173 | 24647767 | 24649477 | 232298, 158055 |
| 33174 | 24652537 | 24652990 | 158055 |
| 33175 | 24717545 | 24719306 | 001460 |
| 33176 | 24739542 | 24740725 | 001460 |
| 33177 | 24741558 | 24743783 | 001461, 001460 |
| 33178 | 24828336 | 24830042 | 117602 |
| 33179 | 24866313 | 24868748 | 117602, 264443 |
| 33180 | 24881804 | 24883031 | 184454, 264443 |
| 33181 | 24893815 | 24895518 | 184454 |
| 33182 | 24967752 | 24970881 | 133226 |
| 33183 | 25031649 | 25032613 | |
| 33184 | 25044062 | 25045932 | |
| 33185 | 25062187 | 25063305 | |
| 33186 | 25071202 | 25073790 | 169504 |
| 33187 | 25093669 | 25094364 | 169504 |
| 33188 | 25095529 | 25097843 | 169504 |
| 33189 | 25106206 | 25107509 | 169504 |
| 33190 | 25110197 | 25110919 | 169504 |
| 33191 | 25112477 | 25113118 | 169504 |
| 33192 | 25174321 | 25175634 | |
| 33193 | 25205225 | 25205660 | |
| 33194 | 25494416 | 25495563 | |
| 33195 | 25557951 | 25559976 | 117614 |
| 33196 | 25565653 | 25567487 | |
| 33197 | 25572325 | 25574912 | 272432, 117616 |
| 33198 | 25664697 | 25666232 | 117616, 183726 |
| 33199 | 25751462 | 25753033 | 188672 |
| 33200 | 25755874 | 25758829 | 204178, 188672 |
| 33201 | 25785113 | 25785979 | 204178 |
| 33202 | 25869715 | 25871298 | 157978 |
| 33203 | 25897924 | 25898719 | |
| 33204 | 25899375 | 25900873 | |
| 33205 | 25927252 | 25927990 | |
| 33206 | 25942529 | 25943849 | |
| 33207 | 25998278 | 25999097 | 117643 |
| 33208 | 26008264 | 26009119 | 117643 |
| 33209 | 26021219 | 26022662 | 117643 |
| 33210 | 26099763 | 26100949 | 117643 |
| 33211 | 26125941 | 26127630 | 162430 |
| 33212 | 26145745 | 26148030 | 223474, 228172, 255054, |
| | | | 117640 |
| 33213 | 26193652 | 26194448 | 182749 |
| 33214 | 26199475 | 26200055 | |
| 33215 | 26201361 | 26202759 | |
| 33216 | 26216034 | 26217528 | 117632 |
| 33217 | 26231248 | 26232388 | 117632 |
| 33218 | 26232448 | 26233479 | 264021, 117632 |
| 33219 | 26249409 | 26250384 | |
| 33220 | 26323114 | 26325364 | 158006 |
| 33221 | 26361832 | 26363874 | 158014, 158008 |
| 33222 | 26398631 | 26399442 | |
| 33223 | 26401717 | 26403212 | |
| 33224 | 26406432 | 26407211 | |
| 33225 | 26437038 | 26439046 | 175087 |
| 33226 | 26440421 | 26441667 | 175087 |
| 33227 | 26495914 | 26497428 | 142684, 236782 |
| 33228 | 26551433 | 26552693 | 236155 |
| 33229 | 26559950 | 26561856 | 130695 |
| 33230 | 26602286 | 26607691 | 142669, 130695 |
| 33231 | 26629227 | 26629843 | 158062 |
| 33232 | 26657449 | 26658866 | 176092 |
| 33233 | 26662811 | 26663693 | 176092 |
| 33234 | 26676513 | 26679089 | 176092 |
| 33235 | 26685035 | 26686206 | |
| 33236 | 26734992 | 26735489 | |
| 33237 | 26758054 | 26759722 | 117682 |
| 33238 | 26798641 | 26800271 | 198830 |
| 33239 | 26826312 | 26828388 | |
| 33240 | 26855622 | 26858144 | 117676 |
| 33241 | 26945555 | 26948843 | |
| 33242 | 27014272 | 27014691 | |
| 33243 | 27018449 | 27025554 | 260063, 117713 |
| 33244 | 27031924 | 27033797 | 117713 |
| 33245 | 27049896 | 27050597 | 117713 |
| 33246 | 27066350 | 27067176 | 117713 |
| 33247 | 27097400 | 27100380 | 117713 |
| 33248 | 27110369 | 27111102 | |
| 33249 | 27112214 | 27116338 | 060642 |
| 33250 | 27125199 | 27128125 | |
| 33251 | 27135913 | 27137095 | |
| 33252 | 27152371 | 27154420 | 204160 |
| 33253 | 27158059 | 27158734 | 204160 |
| 33254 | 27174236 | 27177929 | 204160 |
| 33255 | 27178573 | 27181019 | 204160 |
| 33256 | 27189638 | 27193077 | 175793 |
| 33257 | 27215601 | 27217632 | 198746, 142751 |
| 33258 | 27225428 | 27227750 | 090273, 198746 |
| 33259 | 27236727 | 27242639 | 131910, 090273 |
| 33260 | 27247709 | 27250478 | 090273 |
| 33261 | 27264319 | 27265544 | 090273 |
| 33262 | 27286136 | 27287131 | 175707 |
| 33263 | 27316915 | 27318754 | |
| 33264 | 27319319 | 27321532 | 253368 |
| 33265 | 27323715 | 27327709 | 253368 |
| 33266 | 27328140 | 27328979 | |
| 33267 | 27329243 | 27329725 | |
| 33268 | 27437258 | 27439278 | 090020 |
| 33269 | 27449093 | 27449628 | 090020 |
| 33270 | 27480362 | 27482703 | 090020 |
| 33271 | 27517864 | 27519663 | |
| 33272 | 27560702 | 27562313 | 142784, 224311 |
| 33273 | 27648350 | 27649621 | 186501 |
| 33274 | 27691909 | 27693652 | 142733 |
| 33275 | 27814959 | 27817607 | 158195 |
| 33276 | 27845717 | 27846840 | |
| 33277 | 27868191 | 27870286 | 126705 |
| 33278 | 27871661 | 27872939 | 126705 |
| 33279 | 27875525 | 27876510 | 126705 |
| 33280 | 27889615 | 27891813 | 126705 |
| 33281 | 27901733 | 27902830 | 126705 |
| 33282 | 27929370 | 27930987 | 126705 |
| 33283 | 27934973 | 27936004 | |
| 33284 | 27995694 | 27996348 | 225886, 126709 |
| 33285 | 27998489 | 27999545 | 126709 |
| 33286 | 28051828 | 28053337 | 009780 |
| 33287 | 28098440 | 28100748 | 269971, 117758 |
| 33288 | 28143467 | 28144278 | 117758 |
| 33289 | 28156626 | 28158523 | 117751 |
| 33290 | 28240054 | 28241688 | 117748 |
| 33291 | 28278593 | 28279085 | 227050, 130768 |
| 33292 | 28285869 | 28287138 | 158156, 227050 |
| 33293 | 28413967 | 28415602 | 158161 |
| 33294 | 28481297 | 28481812 | 169403 |
| 33295 | 28558672 | 28559756 | 126698 |
| 33296 | 28561886 | 28563980 | 130770 |
| 33297 | 28572846 | 28574141 | 271398, 130770 |
| 33298 | 28574400 | 28577249 | |
| 33299 | 28584578 | 28588391 | 130766 |
| 33300 | 28608613 | 28610042 | 130766 |
| 33301 | 28616981 | 28618034 | |
| 33302 | 28622296 | 28624265 | |
| 33303 | 28639612 | 28641022 | |
| 33304 | 28654705 | 28656748 | 130772 |
| 33305 | 28668015 | 28668655 | |
| 33306 | 28669795 | 28670305 | |
| 33307 | 28680060 | 28681610 | |
| 33308 | 28695394 | 28697309 | 204138 |
| 33309 | 28763777 | 28764970 | 204138 |
| 33310 | 28831518 | 28838009 | 200087, 242125, 180198 |
| 33311 | 28838633 | 28839460 | 180198 |
| 33312 | 28843975 | 28845724 | 238821, 180198 |
| 33313 | 28878908 | 28880566 | 180098 |
| 33314 | 28907436 | 28908858 | 197989 |
| 33315 | 28968602 | 28970650 | 229388, 120656 |
| 33316 | 28974205 | 28975997 | 270103, 229388 |
| 33317 | 28994511 | 28996716 | 162419 |
| 33318 | 29062332 | 29064822 | 198492 |
| 33319 | 29210734 | 29215180 | 159023 |
| 33320 | 29240759 | 29241443 | 159023 |
| 33321 | 29292605 | 29293774 | 159023 |
| 33322 | 29297788 | 29301366 | 159023 |
| 33323 | 29309895 | 29311195 | 159023 |
| 33324 | 29432390 | 29433085 | 159023 |
| 33325 | 29447782 | 29448896 | 253304 |
| 33326 | 29448920 | 29449654 | 253304 |
| 33327 | 29449777 | 29451658 | 253304 |
| 33328 | 29471610 | 29473782 | 225750 |
| 33329 | 29492680 | 29493233 | 116350 |
| 33330 | 29506780 | 29509660 | 116350 |
| 33331 | 29556599 | 29558183 | 116353 |
| 33332 | 29562660 | 29565306 | 060656 |
| 33333 | 29584906 | 29586712 | 060656 |
| 33334 | 30041889 | 30044380 | |
| 33335 | 30445163 | 30448318 | |
| 33336 | 30457217 | 30458323 | |
| 33337 | 30481566 | 30482621 | |
| 33338 | 30994218 | 30997194 | |
| 33339 | 30998090 | 31000060 | |
| 33340 | 31191353 | 31192706 | 186056, 162510 |
| 33341 | 31217966 | 31219924 | 162511 |
| 33342 | 31294402 | 31295464 | |
| 33343 | 31296149 | 31297579 | 223382 |
| 33344 | 31439517 | 31440077 | 134644 |
| 33345 | 31537003 | 31539079 | 134644 |
| 33346 | 31584065 | 31584570 | |
| 33347 | 31627363 | 31628755 | |
| 33348 | 31635456 | 31636021 | |
| 33349 | 31643371 | 31644208 | |
| 33350 | 31669420 | 31669951 | 084628 |
| 33351 | 31768799 | 31770589 | 121766, 060688 |
| 33352 | 31841244 | 31842156 | 121769 |
| 33353 | 31885641 | 31892495 | 168528 |
| 33354 | 31894093 | 31896220 | 168528 |
| 33355 | 31916613 | 31919025 | |
| 33356 | 31921833 | 31923233 | |
| 33357 | 31943183 | 31945623 | |
| 33358 | 31956106 | 31956704 | |
| 33359 | 31974283 | 31975668 | |
| 33360 | 31976671 | 31978259 | |
| 33361 | 31987724 | 31990619 | 223907 |
| 33362 | 32013774 | 32015945 | |
| 33363 | 32039378 | 32040136 | 229167 |
| 33364 | 32040911 | 32042049 | 229167 |
| 33365 | 32053246 | 32053878 | 142910 |
| 33366 | 32109286 | 32111520 | 264078, 235790, 162517 |
| 33367 | 32166147 | 32167475 | 084636 |
| 33368 | 32169966 | 32171119 | |
| 33369 | 32376523 | 32377109 | 269967, 184007 |
| 33370 | 32402201 | 32406152 | 184007 |
| 33371 | 32419623 | 32422496 | |
| 33372 | 32478747 | 32480737 | 121774 |
| 33373 | 32537399 | 32539207 | 121775, 203325 |
| 33374 | 32559776 | 32561772 | 121775 |
| 33375 | 32569748 | 32570171 | |
| 33376 | 32573174 | 32575075 | 025800 |
| 33377 | 32599060 | 32599517 | 025800 |
| 33378 | 32624799 | 32625180 | 025800 |
| 33379 | 32643657 | 32646642 | 084652 |
| 33380 | 32687049 | 32689128 | 084623, 160055 |
| 33381 | 32705884 | 32707410 | 220785 |
| 33382 | 32756756 | 32758696 | 116478 |
| 33383 | 32786691 | 32788817 | 116478 |
| 33384 | 32816471 | 32818263 | 162526 |
| 33385 | 32827119 | 32828239 | 162526, 225828 |
| 33386 | 32858694 | 32861303 | 160058 |
| 33387 | 32871302 | 32873883 | |
| 33388 | 32965643 | 32966835 | 254553 |
| 33389 | 33004755 | 33005739 | 160062, 254553 |
| 33390 | 33115320 | 33117935 | 162521, 176261 |
| 33391 | 33177710 | 33178296 | |
| 33392 | 33182073 | 33182689 | |
| 33393 | 33202206 | 33203664 | |
| 33394 | 33206477 | 33209157 | 162522 |
| 33395 | 33223923 | 33228279 | 162522 |
| 33396 | 33254103 | 33255379 | 134684 |
| 33397 | 33279644 | 33280379 | 134684 |
| 33398 | 33281587 | 33284301 | 116497, 134684 |
| 33399 | 33329874 | 33330690 | 160097 |
| 33400 | 33366325 | 33367759 | 121900 |
| 33401 | 33377777 | 33378934 | |
| 33402 | 33385432 | 33387141 | |
| 33403 | 33398992 | 33400196 | |
| 33404 | 33401231 | 33403101 | 116514 |
| 33405 | 33413851 | 33414957 | 116514 |
| 33406 | 33429199 | 33431029 | 116514 |
| 33407 | 33446392 | 33447622 | |
| 33408 | 33454341 | 33455282 | 236065 |
| 33409 | 33462173 | 33464002 | 236065 |
| 33410 | 33476606 | 33477231 | 004455, 236065 |
| 33411 | 33487287 | 33488949 | 004455, 236065 |
| 33412 | 33492728 | 33493130 | 004455, 236065 |
| 33413 | 33501587 | 33503040 | 004455 |
| 33414 | 33513467 | 33514211 | 004455 |
| 33415 | 33520649 | 33521857 | 004455 |
| 33416 | 33546566 | 33547484 | 142920, 004455 |
| 33417 | 33591843 | 33594044 | |
| 33418 | 33722063 | 33724863 | 160094 |
| 33419 | 33761023 | 33762920 | 160094 |
| 33420 | 33803536 | 33809027 | 134686 |
| 33421 | 33810558 | 33816566 | 233246, 134686 |
| 33422 | 33895724 | 33896825 | 134686 |
| 33423 | 33899300 | 33899751 | |
| 33424 | 33938048 | 33938981 | 121903 |
| 33425 | 34367963 | 34370018 | 121904 |
| 33426 | 34664711 | 34666607 | 142698 |
| 33427 | 35228277 | 35229713 | 189433, 163866, 255811 |
| 33428 | 35246533 | 35247547 | 188910, 163866, 255811 |
| 33429 | 35290847 | 35291692 | 163866 |
| 33430 | 35317156 | 35317711 | 230163, 163866 |
| 33431 | 35324208 | 35326260 | 163866 |
| 33432 | 35330860 | 35332796 | 116544 |
| 33433 | 35449583 | 35451613 | 243749, 241014, 163867, |
| | | | 271741 |
| 33434 | 35544328 | 35545924 | 197056 |
| 33435 | 35627618 | 35628527 | |
| 33436 | 35644100 | 35645835 | 116560 |
| 33437 | 35657260 | 35659142 | 116560 |
| 33438 | 35733759 | 35735395 | 146463 |
| 33439 | 35810907 | 35812086 | 146463 |
| 33440 | 35820284 | 35820783 | 146463 |
| 33441 | 35913301 | 35914512 | 142687 |
| 33442 | 35919393 | 35920969 | 142687 |
| 33443 | 36020840 | 36024292 | 020129, 142687 |
| 33444 | 36102624 | 36104180 | 126067 |
| 33445 | 36105810 | 36108426 | 126067 |
| 33446 | 36183630 | 36185346 | 142686 |
| 33447 | 36234747 | 36235212 | 092853 |
| 33448 | 36273200 | 36275399 | 134698 |
| 33449 | 36348575 | 36349628 | 092847 |
| 33450 | 36395315 | 36397764 | 271914, 126070 |
| 33451 | 36499574 | 36501014 | 126070 |
| 33452 | 36553669 | 36555959 | 116863, 092850 |
| 33453 | 36614074 | 36617554 | 054116 |
| 33454 | 36620560 | 36623181 | 116871 |
| 33455 | 36668709 | 36670410 | |
| 33456 | 36688845 | 36691175 | 054118 |
| 33457 | 36705558 | 36706294 | 054118 |
| 33458 | 36709378 | 36710511 | 054118 |
| 33459 | 36711037 | 36711813 | 054118 |
| 33460 | 36713183 | 36714819 | 054118 |
| 33461 | 36734644 | 36735864 | 054118 |
| 33462 | 36744678 | 36745420 | 054118 |
| 33463 | 36756353 | 36756861 | 054118 |
| 33464 | 36765450 | 36767378 | 054118 |
| 33465 | 36771885 | 36772907 | 214193 |
| 33466 | 36788458 | 36789795 | 116883, 142694, 214193 |
| 33467 | 36839353 | 36840790 | 196182 |
| 33468 | 36849999 | 36854135 | 196182 |
| 33469 | 36862687 | 36863833 | 181817 |
| 33470 | 36915773 | 36917011 | 116885 |
| 33471 | 36928871 | 36930871 | 116898 |
| 33472 | 36951924 | 36953061 | |
| 33473 | 37936892 | 37937841 | 233621 |
| 33474 | 37939664 | 37946412 | 163874, 233621 |
| 33475 | 37951665 | 37953213 | |
| 33476 | 37964582 | 37965144 | 163875 |
| 33477 | 37979431 | 37981438 | 163875 |
| 33478 | 37998087 | 38003657 | 163877 |
| 33479 | 38019041 | 38020183 | 163877 |
| 33480 | 38060643 | 38061779 | 134697 |
| 33481 | 38155176 | 38156461 | 116922 |
| 33482 | 38157274 | 38158368 | 134690, 116922 |
| 33483 | 38259327 | 38260167 | 185090 |
| 33484 | 38272660 | 38275073 | 196449, 197982 |
| 33485 | 38324254 | 38326435 | 230955, 204084, 188786 |
| 33486 | 38327706 | 38329057 | 204084 |
| 33487 | 38405596 | 38406657 | 204084 |
| 33488 | 38411022 | 38413517 | 204084 |
| 33489 | 38454680 | 38456364 | 183431 |
| 33490 | 38464936 | 38466947 | 183386 |
| 33491 | 38470520 | 38471487 | 183386 |
| 33492 | 38477777 | 38479232 | 183520 |
| 33493 | 38582917 | 38583965 | 224592 |
| 33494 | 38604136 | 38605157 | |
| 33495 | 38712241 | 38713325 | |
| 33496 | 38752613 | 38753731 | |
| 33497 | 39324447 | 39326523 | 228436, 116954 |
| 33498 | 39338356 | 39339597 | 214114, 228436, 131233 |
| 33499 | 39424483 | 39425104 | 235549 |
| 33500 | 39427131 | 39427687 | |
| 33501 | 39451013 | 39452788 | |
| 33502 | 39455911 | 39458574 | 174574 |
| 33503 | 39491269 | 39492837 | 168653 |
| 33504 | 39569935 | 39573137 | 127603 |
| 33505 | 39576111 | 39576671 | 127603 |
| 33506 | 39582428 | 39583430 | 127603 |
| 33507 | 39597754 | 39599504 | 127603 |
| 33508 | 39608381 | 39608774 | 127603 |
| 33509 | 39618630 | 39621563 | 222378, 127603 |
| 33510 | 39622923 | 39626236 | 127603 |
| 33511 | 39633408 | 39634054 | 127603 |
| 33512 | 39642066 | 39646728 | 127603 |
| 33513 | 39648354 | 39653539 | 127603 |
| 33514 | 39656809 | 39659890 | 127603 |
| 33515 | 39686448 | 39687297 | 127603 |
| 33516 | 39836130 | 39837471 | 127603 |
| 33517 | 39853123 | 39853592 | 127603 |
| 33518 | 39857187 | 39859005 | 127603 |
| 33519 | 39860090 | 39861625 | 127603 |
| 33520 | 39872777 | 39875372 | 127603 |
| 33521 | 39916365 | 39917996 | 127603 |
| 33522 | 40032139 | 40033258 | 201457, 090621, 228060 |
| 33523 | 40040976 | 40042851 | 090621 |
| 33524 | 40204122 | 40205446 | 084072 |
| 33525 | 40264635 | 40266752 | |
| 33526 | 40290881 | 40291789 | |
| 33527 | 40317741 | 40318652 | 043514 |
| 33528 | 40348363 | 40349494 | 043514 |
| 33529 | 40364679 | 40365135 | 236546, 116990 |
| 33530 | 40366238 | 40368364 | 116990 |
| 33531 | 40391892 | 40394095 | |
| 33532 | 40394215 | 40395525 | |
| 33533 | 40399187 | 40401067 | |
| 33534 | 40419984 | 40422559 | 168389 |
| 33535 | 40425261 | 40426538 | 168389 |
| 33536 | 40504515 | 40507624 | 131236 |
| 33537 | 40562289 | 40563100 | 131238 |
| 33538 | 40626505 | 40628697 | 117000 |
| 33539 | 40722414 | 40724716 | 084073, 259943 |
| 33540 | 40733384 | 40734158 | 084073 |
| 33541 | 40839180 | 40840637 | 084070 |
| 33542 | 40845442 | 40845995 | 084070 |
| 33543 | 40854866 | 40856409 | 084070 |
| 33544 | 40887223 | 40888016 | 084070 |
| 33545 | 40915342 | 40916407 | 187801 |
| 33546 | 40942344 | 40943671 | 187815 |
| 33547 | 40973931 | 40975114 | 164002, 238287 |
| 33548 | 40996466 | 40997952 | 117010 |
| 33549 | 41004993 | 41005685 | 117010 |
| 33550 | 41112019 | 41112506 | 117016 |
| 33551 | 41156961 | 41158962 | 066136, 272145 |
| 33552 | 41174669 | 41178574 | 066136 |
| 33553 | 41181212 | 41181747 | 066136 |
| 33554 | 41201417 | 41202358 | 066136 |
| 33555 | 41204809 | 41206650 | 066136 |
| 33556 | 41214452 | 41215920 | 066136 |
| 33557 | 41220473 | 41221244 | 066136 |
| 33558 | 41224142 | 41224813 | 066136 |
| 33559 | 41249140 | 41249717 | 117013 |
| 33560 | 41324705 | 41328820 | 179862 |
| 33561 | 41333923 | 41334564 | 229528 |
| 33562 | 41340721 | 41342137 | 229528 |
| 33563 | 41342509 | 41344366 | |
| 33564 | 41361975 | 41362824 | |
| 33565 | 41384987 | 41385667 | |
| 33566 | 41395740 | 41396276 | |
| 33567 | 41405109 | 41406090 | 228940 |
| 33568 | 41409500 | 41411926 | |
| 33569 | 41413982 | 41415172 | |
| 33570 | 41432876 | 41434177 | |
| 33571 | 41444427 | 41447283 | 171793 |
| 33572 | 41450931 | 41455223 | 171793 |
| 33573 | 41509761 | 41510764 | 010803 |
| 33574 | 41573808 | 41576838 | 010803 |
| 33575 | 41588774 | 41589212 | 010803 |
| 33576 | 41614086 | 41624778 | 010803 |
| 33577 | 41703111 | 41708677 | 235358, 010803 |
| 33578 | 41826676 | 41827079 | |
| 33579 | 41897909 | 41899030 | |
| 33580 | 41933744 | 41934288 | |
| 33581 | 41941036 | 41943251 | |
| 33582 | 41947428 | 41948927 | 127129 |
| 33583 | 41960985 | 41963166 | |
| 33584 | 41964332 | 41965250 | |
| 33585 | 41979941 | 41980428 | 127124 |
| 33586 | 41981679 | 41982424 | 127124 |
| 33587 | 42083690 | 42084128 | 127124 |
| 33588 | 42132868 | 42133357 | 127124 |
| 33589 | 42204601 | 42205244 | 127124 |
| 33590 | 42238494 | 42239413 | 127124 |
| 33591 | 42356348 | 42357669 | 127124 |
| 33592 | 42383609 | 42384614 | 127124 |
| 33593 | 42392658 | 42393346 | 127124 |
| 33594 | 42401633 | 42402393 | 127124 |
| 33595 | 42470362 | 42470984 | 127124 |
| 33596 | 42500754 | 42502463 | 127124 |
| 33597 | 42512255 | 42512845 | |
| 33598 | 42546925 | 42547807 | |
| 33599 | 42612326 | 42613147 | |
| 33600 | 42617400 | 42618935 | |
| 33601 | 42678993 | 42680829 | 198815 |
| 33602 | 42790556 | 42791302 | 198815 |
| 33603 | 42799562 | 42802389 | 227527, 198815 |
| 33604 | 42805610 | 42806277 | |
| 33605 | 42833782 | 42834620 | |
| 33606 | 42897040 | 42897613 | 066185 |
| 33607 | 42919328 | 42921036 | 066185 |
| 33608 | 42921059 | 42923190 | 127125, 066185 |
| 33609 | 42994933 | 42996024 | 186409 |
| 33610 | 43123147 | 43124691 | 171960 |
| 33611 | 43146557 | 43149480 | 065978, 234917 |
| 33612 | 43205797 | 43206635 | 164007 |
| 33613 | 43231368 | 43233705 | 164008, 117385 |
| 33614 | 43282093 | 43283374 | 164010, 177868 |
| 33615 | 43311369 | 43313299 | 164011, 228192 |
| 33616 | 43401423 | 43405988 | 117394 |
| 33617 | 43406150 | 43408716 | 117394 |
| 33618 | 43423364 | 43425418 | 227533, 117394 |
| 33619 | 43700444 | 43702310 | 117395, 243710 |
| 33620 | 43707043 | 43708178 | 117395, 243710 |
| 33621 | 43712291 | 43714331 | 117395, 243710 |
| 33622 | 43715653 | 43716585 | 117395, 243710 |
| 33623 | 43722092 | 43723822 | 117395 |
| 33624 | 43732884 | 43733626 | 117395 |
| 33625 | 43742052 | 43743756 | |
| 33626 | 43778036 | 43778793 | 066056 |
| 33627 | 43810826 | 43811596 | 117400 |
| 33628 | 43813726 | 43815452 | 117400 |
| 33629 | 43823639 | 43824775 | 117399, 234694 |
| 33630 | 43832047 | 43835046 | 066322 |
| 33631 | 43837793 | 43840170 | |
| 33632 | 43854516 | 43856045 | 198198, 229431, 159479 |
| 33633 | 43913529 | 43915135 | 229372, 198198 |
| 33634 | 43917939 | 43920777 | 229348, 178922, 198198 |
| 33635 | 43937328 | 43940373 | |
| 33636 | 43940996 | 43943572 | |
| 33637 | 43959345 | 43960153 | |
| 33638 | 43987924 | 43989842 | |
| 33639 | 43995673 | 43998399 | 142949 |
| 33640 | 44002892 | 44003788 | 142949 |
| 33641 | 44010894 | 44012451 | 142949 |
| 33642 | 44013125 | 44015368 | 142949 |
| 33643 | 44015412 | 44016561 | 142949 |
| 33644 | 44018131 | 44018997 | 142949 |
| 33645 | 44113719 | 44116824 | 066135 |
| 33646 | 44172104 | 44174346 | 236200, 126091 |
| 33647 | 44248578 | 44250300 | 126091 |
| 33648 | 44395259 | 44396344 | 126091 |
| 33649 | 44411337 | 44413648 | 117408, 237950 |
| 33650 | 44435479 | 44436591 | 132768 |
| 33651 | 44439727 | 44441906 | 117410 |
| 33652 | 44443789 | 44446566 | 117411, 117410 |
| 33653 | 44456421 | 44457992 | 159214, 196517, 117411 |
| 33654 | 44495030 | 44497466 | 196517 |
| 33655 | 44508983 | 44510791 | 230615 |
| 33656 | 44532628 | 44533995 | 230615 |
| 33657 | 44678372 | 44679890 | 178028 |
| 33658 | 44683140 | 44684187 | 178028 |
| 33659 | 44748943 | 44750072 | 117419 |
| 33660 | 44759343 | 44760006 | 117419 |
| 33661 | 44762857 | 44764185 | 117419 |
| 33662 | 44792490 | 44794058 | 117419 |
| 33663 | 44820156 | 44821455 | 117419 |
| 33664 | 45096758 | 45098931 | 187147 |
| 33665 | 45111067 | 45111946 | 187147, 126106 |
| 33666 | 45125805 | 45126366 | 126106 |
| 33667 | 45138972 | 45140794 | 198520, 126106 |
| 33668 | 45142164 | 45143296 | 198520 |
| 33669 | 45143990 | 45144816 | 198520 |
| 33670 | 45147029 | 45148588 | 198520 |
| 33671 | 45195784 | 45197304 | 200169 |
| 33672 | 45204842 | 45205586 | 142945 |
| 33673 | 45240262 | 45242517 | 264294, 200913, 142937, |
| | | | 225721 |
| 33674 | 45264961 | 45266916 | 173846 |
| 33675 | 45271830 | 45275601 | 222009, 188396 |
| 33676 | 45278310 | 45280010 | 222009 |
| 33677 | 45284734 | 45286458 | 117425, 202444 |
| 33678 | 45412333 | 45413224 | 070785 |
| 33679 | 45450885 | 45452682 | 070785 |
| 33680 | 45476193 | 45479281 | 126088, 126107 |
| 33681 | 45600109 | 45600437 | 162415 |
| 33682 | 45637596 | 45638304 | 162415 |
| 33683 | 45768578 | 45770689 | 162415 |
| 33684 | 45801380 | 45802093 | 132781 |
| 33685 | 45804775 | 45807020 | 132773, 132781 |
| 33686 | 45813536 | 45815141 | 070759 |
| 33687 | 45868893 | 45869488 | 070759 |
| 33688 | 45955550 | 45957402 | 070759 |
| 33689 | 45965301 | 45966980 | 132763, 236624 |
| 33690 | 45967458 | 45968301 | 132763 |
| 33691 | 45986358 | 45988902 | 117450 |
| 33692 | 46007954 | 46009030 | |
| 33693 | 46009252 | 46009987 | |
| 33694 | 46010589 | 46011775 | |
| 33695 | 46015608 | 46017572 | 117448 |
| 33696 | 46022559 | 46023781 | 117448 |
| 33697 | 46049114 | 46051188 | 132780 |
| 33698 | 46123657 | 46124255 | 159592 |
| 33699 | 46139453 | 46140583 | 159592 |
| 33700 | 46150081 | 46155060 | 159596, 159592 |
| 33701 | 46215311 | 46217138 | 197429 |
| 33702 | 46267758 | 46270816 | 086015 |
| 33703 | 46336348 | 46338497 | 086015 |
| 33704 | 46357125 | 46359109 | 086015 |
| 33705 | 46419864 | 46420703 | 086015 |
| 33706 | 46440394 | 46441139 | 086015 |
| 33707 | 46444459 | 46445427 | 086015 |
| 33708 | 46527620 | 46529124 | 117461 |
| 33709 | 46549748 | 46551288 | 117461 |
| 33710 | 46597389 | 46599487 | 117461 |
| 33711 | 46648201 | 46650208 | 117472 |
| 33712 | 46662970 | 46664991 | 085998 |
| 33713 | 46712707 | 46713142 | |
| 33714 | 46766528 | 46770163 | 173660, 132128 |
| 33715 | 46805432 | 46807579 | 117481 |
| 33716 | 46859465 | 46860872 | 117480 |
| 33717 | 46867073 | 46868175 | 117480 |
| 33718 | 46907969 | 46908957 | 232022 |
| 33719 | 46992323 | 46994236 | |
| 33720 | 47069051 | 47070320 | 079277 |
| 33721 | 47081584 | 47082850 | 142961, 079277 |
| 33722 | 47133038 | 47134751 | 186118, 123472, 159658 |
| 33723 | 47183842 | 47185286 | 159658 |
| 33724 | 47201370 | 47201879 | |
| 33725 | 47407742 | 47408188 | |
| 33726 | 47413712 | 47415303 | |
| 33727 | 47478393 | 47478919 | 186377 |
| 33728 | 47593942 | 47595097 | 225506 |
| 33729 | 47644427 | 47645483 | 224805, 225506 |
| 33730 | 47655051 | 47659097 | 162366 |
| 33731 | 47779474 | 47780811 | 123473 |
| 33732 | 47798417 | 47801202 | 162368 |
| 33733 | 47902069 | 47904174 | 186564 |
| 33734 | 47942693 | 47944710 | |
| 33735 | 47973426 | 47974943 | |
| 33736 | 47988433 | 47989128 | |
| 33737 | 48024146 | 48025387 | |
| 33738 | 48025689 | 48026705 | |
| 33739 | 48026785 | 48028036 | |
| 33740 | 48035298 | 48035930 | |
| 33741 | 48162543 | 48163235 | 227947 |
| 33742 | 48174674 | 48176828 | |
| 33743 | 48194037 | 48194813 | |
| 33744 | 48197941 | 48199070 | |
| 33745 | 48341493 | 48342438 | 269113 |
| 33746 | 48359683 | 48361599 | 269113 |
| 33747 | 48378743 | 48379788 | 269113 |
| 33748 | 48406863 | 48409106 | 269113 |
| 33749 | 48428422 | 48430859 | 269113 |
| 33750 | 48434716 | 48436154 | 269113 |
| 33751 | 48462222 | 48463743 | 269113 |
| 33752 | 48472669 | 48473290 | |
| 33753 | 48688060 | 48688883 | 117834 |
| 33754 | 49137234 | 49137779 | 186094 |
| 33755 | 49383294 | 49384416 | 186094 |
| 33756 | 50646621 | 50647359 | 162374 |
| 33757 | 50680215 | 50681260 | 233407 |
| 33758 | 50940497 | 50941037 | 185104 |
| 33759 | 50992946 | 50993604 | 185104 |
| 33760 | 51294958 | 51295615 | 185104 |
| 33761 | 51424790 | 51426875 | 123080, 185104 |
| 33762 | 51433627 | 51436665 | 123080 |
| 33763 | 51442114 | 51446332 | |
| 33764 | 51681211 | 51683159 | 203356 |
| 33765 | 51700906 | 51704450 | 123091 |
| 33766 | 51749616 | 51750455 | |
| 33767 | 51779295 | 51781277 | 085831 |
| 33768 | 51795781 | 51797596 | 085831, 261664 |
| 33769 | 51983426 | 51985406 | 227070, 085832 |
| 33770 | 52026167 | 52027068 | 227070 |
| 33771 | 52029414 | 52030465 | 227742 |
| 33772 | 52034586 | 52036028 | 227742 |
| 33773 | 52082435 | 52083771 | 117859 |
| 33774 | 52085915 | 52089714 | 117859 |
| 33775 | 52101963 | 52104011 | 117859 |
| 33776 | 52154983 | 52156831 | 117859 |
| 33777 | 52158216 | 52160166 | 117859 |
| 33778 | 52192161 | 52192917 | 117859 |
| 33779 | 52194478 | 52196273 | 117859 |
| 33780 | 52343448 | 52345683 | 078618 |
| 33781 | 52433476 | 52436584 | 169213 |
| 33782 | 52442563 | 52443375 | 169213 |
| 33783 | 52498332 | 52499882 | 223390, 198841, 117862 |
| 33784 | 52520076 | 52522887 | 134717, 117862 |
| 33785 | 52606567 | 52608801 | 157077 |
| 33786 | 52810820 | 52811465 | 154222, 157077 |
| 33787 | 52829952 | 52832090 | 154222 |
| 33788 | 52869387 | 52870997 | 134748, 085840 |
| 33789 | 53017658 | 53019878 | 134744 |
| 33790 | 53067630 | 53068922 | 116157 |
| 33791 | 53117083 | 53118533 | 182183 |
| 33792 | 53124357 | 53124846 | 182183 |
| 33793 | 53130874 | 53131826 | 182183 |
| 33794 | 53163176 | 53164857 | 162377 |
| 33795 | 53166225 | 53167048 | |
| 33796 | 53168042 | 53169759 | |
| 33797 | 53172713 | 53174910 | 233664 |
| 33798 | 53191948 | 53193450 | 162378 |
| 33799 | 53280091 | 53280571 | 162378 |
| 33800 | 53308176 | 53309398 | 203995 |
| 33801 | 53371475 | 53373747 | 121310 |
| 33802 | 53378417 | 53379612 | 121310 |
| 33803 | 53381620 | 53382838 | 121310 |
| 33804 | 53384416 | 53387852 | 230953, 121310 |
| 33805 | 53391017 | 53391919 | 231866, 121310 |
| 33806 | 53392256 | 53394138 | 116171, 121310 |
| 33807 | 53490577 | 53491693 | 116171 |
| 33808 | 53554784 | 53555946 | 162383 |
| 33809 | 53577820 | 53578539 | 162383 |
| 33810 | 53611381 | 53612579 | |
| 33811 | 53631030 | 53631584 | |
| 33812 | 53642188 | 53642932 | |
| 33813 | 53647625 | 53649573 | |
| 33814 | 53655889 | 53656559 | |
| 33815 | 53661004 | 53664523 | 157184 |
| 33816 | 53684950 | 53687204 | 259818, 162384 |
| 33817 | 53703372 | 53704849 | 226754, 162385 |
| 33818 | 54302828 | 54304763 | 058804 |
| 33819 | 54348571 | 54349943 | 058799 |
| 33820 | 54354746 | 54356629 | 058799 |
| 33821 | 54359375 | 54360252 | 211452 |
| 33822 | 54360363 | 54360729 | 211452 |
| 33823 | 54362390 | 54363302 | 211452 |
| 33824 | 54364301 | 54366024 | 211452 |
| 33825 | 54372950 | 54373408 | 211452 |
| 33826 | 54375346 | 54376137 | 211452 |
| 33827 | 54410557 | 54412809 | 116212, 081870 |
| 33828 | 54422263 | 54423581 | 116212 |
| 33829 | 54432950 | 54434212 | 116212 |
| 33830 | 54446795 | 54447395 | |
| 33831 | 54447629 | 54449012 | |
| 33832 | 54481799 | 54482681 | 203985 |
| 33833 | 54517617 | 54519990 | 264208, 116205, 116209 |
| 33834 | 54546094 | 54546920 | 116205 |
| 33835 | 54547141 | 54547749 | 116205 |
| 33836 | 54586791 | 54587678 | |
| 33837 | 54589938 | 54590788 | |
| 33838 | 54665044 | 54667021 | 215883, 256407, 116221 |
| 33839 | 54737807 | 54741898 | 157216 |
| 33840 | 54742588 | 54745037 | 157216 |
| 33841 | 54813305 | 54814345 | 157216 |
| 33842 | 54830675 | 54831110 | 157216 |
| 33843 | 54842389 | 54843315 | 157216 |
| 33844 | 54849053 | 54849400 | 157216 |
| 33845 | 54870868 | 54871793 | 157216 |
| 33846 | 54871907 | 54874671 | 157216 |
| 33847 | 54890606 | 54891223 | |
| 33848 | 54949481 | 54950020 | |
| 33849 | 54953072 | 54955501 | |
| 33850 | 55046857 | 55047773 | 162390 |
| 33851 | 55088999 | 55089683 | 162391, 162390, 230728 |
| 33852 | 55117175 | 55117680 | 271723, 184313 |
| 33853 | 55180824 | 55183133 | 243725, 271723 |
| 33854 | 55259198 | 55261863 | 237453, 006555 |
| 33855 | 55263736 | 55265715 | 006555 |
| 33856 | 55265788 | 55267532 | 006555 |
| 33857 | 55269133 | 55271782 | 162398 |
| 33858 | 55321173 | 55324551 | 116133 |
| 33859 | 55330116 | 55331855 | 116133 |
| 33860 | 55332033 | 55333845 | 116133 |
| 33861 | 55334508 | 55335557 | 116133 |
| 33862 | 55339836 | 55342233 | 116133 |
| 33863 | 55347871 | 55354650 | 233203, 242396, 116133 |
| 33864 | 55384950 | 55386398 | |
| 33865 | 55388405 | 55389172 | |
| 33866 | 55400221 | 55401390 | |
| 33867 | 55415788 | 55416932 | |
| 33868 | 55501256 | 55502060 | |
| 33869 | 55504441 | 55507101 | 169174 |
| 33870 | 55518288 | 55519788 | 169174 |
| 33871 | 55530277 | 55531106 | 169174 |
| 33872 | 55593664 | 55595282 | 162402 |
| 33873 | 55670529 | 55671153 | 162402 |
| 33874 | 55679483 | 55682070 | 162402 |
| 33875 | 55698793 | 55699922 | 231090 |
| 33876 | 55893681 | 55896270 | |
| 33877 | 55908573 | 55912104 | |
| 33878 | 56149551 | 56150384 | 234810 |
| 33879 | 56183273 | 56185919 | 234810 |
| 33880 | 56279206 | 56279864 | |
| 33881 | 56750413 | 56751394 | |
| 33882 | 56794769 | 56799124 | |
| 33883 | 56840098 | 56841348 | |
| 33884 | 56874106 | 56878551 | |
| 33885 | 56878801 | 56882730 | 223956 |
| 33886 | 56897743 | 56898803 | |
| 33887 | 56910496 | 56911493 | |
| 33888 | 56911594 | 56916400 | |
| 33889 | 56916790 | 56919711 | |
| 33890 | 56921966 | 56922941 | |
| 33891 | 56926839 | 56927594 | |
| 33892 | 56935628 | 56936569 | |
| 33893 | 56938410 | 56940408 | |
| 33894 | 56941201 | 56945713 | |
| 33895 | 56955887 | 56957436 | |
| 33896 | 56972444 | 56975271 | 162407 |
| 33897 | 57009317 | 57010194 | 162407 |
| 33898 | 57011033 | 57012057 | 162407 |
| 33899 | 57026961 | 57027763 | 162407 |
| 33900 | 57029024 | 57029718 | 162407 |
| 33901 | 57031437 | 57032574 | 162407 |
| 33902 | 57035122 | 57035848 | 162407 |
| 33903 | 57042521 | 57045828 | 162407 |
| 33904 | 57056262 | 57056586 | 162407 |
| 33905 | 57153769 | 57155235 | 162409 |
| 33906 | 57221339 | 57222070 | 187889 |
| 33907 | 57238032 | 57241015 | 187889 |
| 33908 | 57242203 | 57242554 | 187889 |
| 33909 | 57245886 | 57246470 | 187889 |
| 33910 | 57253790 | 57254719 | 187889 |
| 33911 | 57262886 | 57264684 | 187889 |
| 33912 | 57276586 | 57277510 | 187889 |
| 33913 | 57282199 | 57285698 | 187889 |
| 33914 | 57297444 | 57299550 | |
| 33915 | 57319981 | 57323141 | 157131 |
| 33916 | 57362554 | 57364095 | 157131 |
| 33917 | 57367302 | 57368055 | 157131 |
| 33918 | 57372997 | 57375118 | 157131 |
| 33919 | 57375550 | 57378433 | 157131 |
| 33920 | 57384894 | 57386705 | |
| 33921 | 57387223 | 57388137 | |
| 33922 | 57390331 | 57391821 | |
| 33923 | 57423741 | 57425197 | 021852 |
| 33924 | 57428588 | 57435763 | 236341, 221591, 021852 |
| 33925 | 57701067 | 57702033 | 173406 |
| 33926 | 57719511 | 57720265 | 173406 |
| 33927 | 57744098 | 57744897 | 173406 |
| 33928 | 57744975 | 57749121 | 173406 |
| 33929 | 58860866 | 58861775 | 173406 |
| 33930 | 58898888 | 58899516 | 162600, 173406 |
| 33931 | 58911844 | 58913549 | 162600, 173406 |
| 33932 | 58922139 | 58923363 | 162600, 173406 |
| 33933 | 59011053 | 59012874 | 162600, 173406 |
| 33934 | 59039165 | 59040015 | |
| 33935 | 59049552 | 59051546 | |
| 33936 | 59057719 | 59059192 | |
| 33937 | 59125757 | 59126261 | 162601 |
| 33938 | 59164461 | 59166023 | 162601 |
| 33939 | 59180737 | 59181088 | |
| 33940 | 59218108 | 59222482 | |
| 33941 | 59227489 | 59231044 | 264081 |
| 33942 | 59244624 | 59252001 | 177606, 234807 |
| 33943 | 59276833 | 59277308 | 234807 |
| 33944 | 59280080 | 59282883 | 234807 |
| 33945 | 59346371 | 59350070 | 232453, 234807 |
| 33946 | 59350790 | 59351542 | 232453, 234807 |
| 33947 | 59364736 | 59365320 | 234807 |
| 33948 | 59368675 | 59370440 | |
| 33949 | 59430628 | 59431345 | |
| 33950 | 59433905 | 59434874 | |
| 33951 | 59436586 | 59437975 | |
| 33952 | 59448075 | 59448812 | |
| 33953 | 59480924 | 59482021 | |
| 33954 | 59485237 | 59486783 | 230812 |
| 33955 | 59509334 | 59509940 | 230812 |
| 33956 | 59517734 | 59518315 | |
| 33957 | 59602148 | 59603262 | 224609 |
| 33958 | 59608009 | 59609544 | 224609 |
| 33959 | 59611897 | 59613192 | 224609 |
| 33960 | 59616238 | 59617800 | 224609 |
| 33961 | 59669542 | 59670314 | |
| 33962 | 59680288 | 59681167 | |
| 33963 | 59684167 | 59684719 | |
| 33964 | 59758138 | 59759298 | |
| 33965 | 59761199 | 59765232 | 172456 |
| 33966 | 59781406 | 59783818 | 172456 |
| 33967 | 59858412 | 59860020 | 172456 |
| 33968 | 59888462 | 59889711 | 172456 |
| 33969 | 59891563 | 59894201 | 172456 |
| 33970 | 59896199 | 59900273 | 172456 |
| 33971 | 59945563 | 59946623 | 172456 |
| 33972 | 59964221 | 59967052 | 172456 |
| 33973 | 59967873 | 59968523 | 172456 |
| 33974 | 59972355 | 59973232 | 172456 |
| 33975 | 59982417 | 59982903 | 172456 |
| 33976 | 60008379 | 60009869 | 172456 |
| 33977 | 60015322 | 60016581 | 172456 |
| 33978 | 60137560 | 60140982 | 172456 |
| 33979 | 60162840 | 60163370 | 172456 |
| 33980 | 60195320 | 60197978 | 172456 |
| 33981 | 60279856 | 60281409 | 134709 |
| 33982 | 60322126 | 60323037 | 134709 |
| 33983 | 60374104 | 60374937 | 134716 |
| 33984 | 60391768 | 60393317 | 134716 |
| 33985 | 60401107 | 60403353 | |
| 33986 | 60730964 | 60732469 | |
| 33987 | 60739937 | 60741133 | |
| 33988 | 60746986 | 60747720 | |
| 33989 | 61038114 | 61040502 | 226476 |
| 33990 | 61273762 | 61274972 | 231252 |
| 33991 | 61294484 | 61295104 | |
| 33992 | 61332260 | 61333121 | 162599 |
| 33993 | 61508361 | 61509655 | 162599 |
| 33994 | 61515384 | 61517364 | 162599 |
| 33995 | 61519239 | 61520207 | 162599 |
| 33996 | 61522428 | 61523889 | 162599 |
| 33997 | 61524156 | 61524566 | 162599 |
| 33998 | 61542152 | 61544107 | 162599 |
| 33999 | 61545248 | 61545979 | 162599 |
| 34000 | 61547029 | 61550704 | 263380, 162599 |
| 34001 | 61580053 | 61580634 | 162599 |
| 34002 | 61584153 | 61585493 | 162599 |
| 34003 | 61585699 | 61587802 | 162599 |
| 34004 | 61587856 | 61588664 | 162599 |
| 34005 | 61604856 | 61605427 | 162599 |
| 34006 | 61606075 | 61609223 | 162599 |
| 34007 | 61617528 | 61619042 | 162599 |
| 34008 | 61648984 | 61651067 | 162599 |
| 34009 | 61668344 | 61669624 | 162599 |
| 34010 | 61678270 | 61682626 | 162599 |
| 34011 | 61718452 | 61719594 | 237853, 162599 |
| 34012 | 61766490 | 61768414 | 162599 |
| 34013 | 61802814 | 61805100 | 162599 |
| 34014 | 61918268 | 61919546 | 162599 |
| 34015 | 62190005 | 62191979 | 162604 |
| 34016 | 62207308 | 62209364 | 271200, 132849 |
| 34017 | 62302672 | 62307084 | 132849 |
| 34018 | 62438732 | 62440752 | 132849 |
| 34019 | 62558730 | 62559418 | 132849 |
| 34020 | 62664141 | 62664875 | 240563 |
| 34021 | 62707080 | 62707718 | 132854 |
| 34022 | 62783774 | 62785301 | 132854 |
| 34023 | 62900959 | 62903750 | 162607 |
| 34024 | 63051117 | 63051565 | 116641 |
| 34025 | 63059416 | 63060144 | 116641 |
| 34026 | 63062187 | 63065725 | 132855, 116641 |
| 34027 | 63087412 | 63088244 | 116641 |
| 34028 | 63153011 | 63154962 | 235545, 116641 |
| 34029 | 63155046 | 63157338 | 235545 |
| 34030 | 63199204 | 63202035 | |
| 34031 | 63249159 | 63250045 | 125703 |
| 34032 | 63782525 | 63783287 | 224209 |
| 34033 | 63832705 | 63834009 | 088035 |
| 34034 | 63988522 | 63989446 | 203965, 142856 |
| 34035 | 64057979 | 64060536 | 079739, 142856 |
| 34036 | 64065658 | 64066334 | 079739 |
| 34037 | 64076405 | 64077341 | 079739 |
| 34038 | 64078273 | 64078766 | 079739 |
| 34039 | 64106393 | 64107397 | 079739 |
| 34040 | 64127812 | 64129789 | |
| 34041 | 64139800 | 64141070 | |
| 34042 | 64239352 | 64240394 | 185483 |
| 34043 | 64636930 | 64638846 | 223949, 185483 |
| 34044 | 64886651 | 64887885 | |
| 34045 | 64935309 | 64936632 | 158966 |
| 34046 | 64944498 | 64944991 | 158966 |
| 34047 | 65001727 | 65003125 | 158966 |
| 34048 | 65362144 | 65365911 | 162434 |
| 34049 | 65375376 | 65378906 | 162434 |
| 34050 | 65380450 | 65384557 | 234784, 162434 |
| 34051 | 65398164 | 65401178 | 162434 |
| 34052 | 65401398 | 65402381 | 162434 |
| 34053 | 65402579 | 65403148 | 162434 |
| 34054 | 65430541 | 65432972 | 162434 |
| 34055 | 65452808 | 65453946 | 226891 |
| 34056 | 65455136 | 65455580 | 226891 |
| 34057 | 65467421 | 65469711 | 272506, 226891 |
| 34058 | 65505107 | 65505720 | |
| 34059 | 65531678 | 65535015 | 231485 |
| 34060 | 65555849 | 65556476 | |
| 34061 | 65612726 | 65615445 | 162433 |
| 34062 | 65624014 | 65626309 | 162433 |
| 34063 | 65634552 | 65635321 | 162433 |
| 34064 | 65635340 | 65636783 | 162433 |
| 34065 | 65665969 | 65666725 | 162433 |
| 34066 | 65719439 | 65720977 | 116675 |
| 34067 | 65861542 | 65862463 | 116675 |
| 34068 | 65873479 | 65874058 | 116675 |
| 34069 | 65883295 | 65884059 | |
| 34070 | 65886083 | 65892396 | 213625, 116678 |
| 34071 | 65936350 | 65938096 | 116678 |
| 34072 | 65941847 | 65942552 | 116678 |
| 34073 | 65978004 | 65980428 | 116678 |
| 34074 | 65990724 | 65992308 | 116678 |
| 34075 | 66062473 | 66062871 | 116678 |
| 34076 | 66153021 | 66153944 | |
| 34077 | 66612648 | 66613380 | 184588 |
| 34078 | 66635143 | 66635516 | 184588 |
| 34079 | 66736205 | 66738496 | 184588 |
| 34080 | 66758555 | 66761347 | 184588 |
| 34081 | 66765692 | 66767681 | 184588 |
| 34082 | 66814706 | 66815977 | 184588 |
| 34083 | 66878171 | 66878782 | |
| 34084 | 66985698 | 66986121 | |
| 34085 | 67008027 | 67009763 | 118473 |
| 34086 | 67390087 | 67391807 | 198160, 152763 |
| 34087 | 67395332 | 67397556 | 198160 |
| 34088 | 67409160 | 67411994 | 198160 |
| 34089 | 67518355 | 67520557 | 116704 |
| 34090 | 67635519 | 67635996 | 162594, 203963 |
| 34091 | 67833082 | 67833991 | 081985 |
| 34092 | 67894443 | 67897738 | 142864 |
| 34093 | 67962004 | 67962368 | |
| 34094 | 67987493 | 67988886 | |
| 34095 | 67997846 | 67999704 | 235200 |
| 34096 | 68000055 | 68004001 | |
| 34097 | 68005257 | 68006822 | 207504 |
| 34098 | 68017744 | 68018925 | |
| 34099 | 68026354 | 68028657 | 238139 |
| 34100 | 68035073 | 68039934 | |
| 34101 | 68040411 | 68042609 | |
| 34102 | 68043931 | 68044959 | |
| 34103 | 68079965 | 68080817 | |
| 34104 | 68083996 | 68085366 | |
| 34105 | 68095076 | 68095884 | |
| 34106 | 68096114 | 68096860 | |
| 34107 | 68097204 | 68099413 | |
| 34108 | 68110946 | 68113554 | |
| 34109 | 68147455 | 68158355 | 116717 |
| 34110 | 68165845 | 68167026 | |
| 34111 | 68183069 | 68184128 | 172380 |
| 34112 | 68189405 | 68192279 | 172380 |
| 34113 | 68213354 | 68216948 | 172380 |
| 34114 | 68224782 | 68227054 | 172380 |
| 34115 | 68279426 | 68280908 | 172380 |
| 34116 | 68284399 | 68285244 | 172380 |
| 34117 | 68295130 | 68299766 | 232284, 172380 |
| 34118 | 68304116 | 68307343 | 232284 |
| 34119 | 68315645 | 68317102 | 232284 |
| 34120 | 68355420 | 68356480 | 232284 |
| 34121 | 68611162 | 68612159 | 116729, 232284 |
| 34122 | 68639090 | 68639574 | 116729, 232284 |
| 34123 | 68639754 | 68640117 | 116729, 232284 |
| 34124 | 68662498 | 68665497 | 116729, 232284 |
| 34125 | 68670290 | 68672270 | 116729 |
| 34126 | 68696686 | 68698673 | 116729 |
| 34127 | 68735325 | 68735953 | |
| 34128 | 68808235 | 68808847 | |
| 34129 | 68835915 | 68836731 | |
| 34130 | 68849189 | 68851571 | |
| 34131 | 69637732 | 69638425 | 223883 |
| 34132 | 69734658 | 69739256 | |
| 34133 | 70621600 | 70622649 | 066557 |
| 34134 | 70670392 | 70672614 | 116754, 066557 |
| 34135 | 70686641 | 70688244 | 228988, 116754 |
| 34136 | 70785323 | 70785867 | 118454 |
| 34137 | 70804560 | 70805024 | 118454 |
| 34138 | 70818887 | 70821133 | 197568, 118454 |
| 34139 | 70875653 | 70879511 | 116761 |
| 34140 | 70969810 | 70970775 | |
| 34141 | 71545683 | 71547739 | 229956, 132485 |
| 34142 | 72383953 | 72384930 | 172260 |
| 34143 | 72748579 | 72751282 | |
| 34144 | 72832033 | 72832553 | |
| 34145 | 72875704 | 72876509 | |
| 34146 | 74663373 | 74664390 | 259030, 254685, 116783, |
| | | | 162620 |
| 34147 | 75194747 | 75199828 | 162623, 116791 |
| 34148 | 75214249 | 75215315 | 162623 |
| 34149 | 76189399 | 76192238 | 117054, 178193 |
| 34150 | 76251032 | 76253074 | 206620, 137955, 117054 |
| 34151 | 76256723 | 76257126 | 137955 |
| 34152 | 76320562 | 76321052 | 057468 |
| 34153 | 77139413 | 77140718 | |
| 34154 | 77496623 | 77497617 | 117069 |
| 34155 | 77586617 | 77587672 | 142892 |
| 34156 | 77599692 | 77600487 | 142892 |
| 34157 | 77684407 | 77685538 | 142892 |
| 34158 | 78001898 | 78003511 | 154027 |
| 34159 | 78004340 | 78006095 | 154027 |
| 34160 | 78147239 | 78150197 | 036549 |
| 34161 | 78222956 | 78223849 | 077254 |
| 34162 | 78224183 | 78225709 | 077254 |
| 34163 | 78227588 | 78228109 | |
| 34164 | 78241924 | 78242309 | |
| 34165 | 78244711 | 78246121 | 180488, 222849 |
| 34166 | 78289451 | 78290304 | 180488 |
| 34167 | 78353743 | 78355095 | 162614, 235927 |
| 34168 | 78365254 | 78365792 | 162614 |
| 34169 | 78443678 | 78446017 | 162616, 137960, 162613 |
| 34170 | 78469502 | 78472228 | 273338, 162616, 137960 |
| 34171 | 78510499 | 78513695 | 137960 |
| 34172 | 78534359 | 78535246 | 137960 |
| 34173 | 78535469 | 78537548 | 137960 |
| 34174 | 78544604 | 78545740 | 137960 |
| 34175 | 78554624 | 78555283 | 251958, 137960 |
| 34176 | 78566539 | 78568125 | 137960 |
| 34177 | 78607708 | 78611384 | |
| 34178 | 78687517 | 78690060 | |
| 34179 | 78693128 | 78693899 | |
| 34180 | 78750001 | 78750783 | 237413 |
| 34181 | 78769252 | 78769832 | 122420, 237413 |
| 34182 | 78804664 | 78807491 | 122420, 237413 |
| 34183 | 78937168 | 78940781 | 122420 |
| 34184 | 78956441 | 78957759 | 122420 |
| 34185 | 79115272 | 79116202 | 137965 |
| 34186 | 80578961 | 80579590 | |
| 34187 | 81121602 | 81123851 | |
| 34188 | 81348029 | 81349092 | |
| 34189 | 81607778 | 81608774 | |
| 34190 | 81639617 | 81641815 | |
| 34191 | 81644833 | 81645555 | |
| 34192 | 82048081 | 82048666 | 117114 |
| 34193 | 82265581 | 82269907 | 117114 |
| 34194 | 82273820 | 82275119 | 117114 |
| 34195 | 82564674 | 82565496 | |
| 34196 | 82787359 | 82787903 | |
| 34197 | 82929980 | 82931053 | |
| 34198 | 82981262 | 82982183 | |
| 34199 | 83577876 | 83578857 | 230817 |
| 34200 | 83966261 | 83967212 | |
| 34201 | 83974256 | 83975390 | |
| 34202 | 84158008 | 84160351 | 233008 |
| 34203 | 84284065 | 84285164 | 233008 |
| 34204 | 84325947 | 84327060 | 233008 |
| 34205 | 84366343 | 84368611 | 137941 |
| 34206 | 84450462 | 84451392 | 137941 |
| 34207 | 84464193 | 84465412 | 137941 |
| 34208 | 84542636 | 84544507 | 142875, 271576 |
| 34209 | 84555071 | 84557318 | 142875 |
| 34210 | 84568250 | 84570102 | 142875 |
| 34211 | 84719204 | 84720236 | |
| 34212 | 84726278 | 84727118 | |
| 34213 | 84763900 | 84765056 | 203943 |
| 34214 | 84831109 | 84832364 | 240520, 203943 |
| 34215 | 84944592 | 84946115 | 117133 |
| 34216 | 84958256 | 84958961 | 117133 |
| 34217 | 84970213 | 84973146 | 122432, 174021 |
| 34218 | 85037916 | 85040430 | 117151 |
| 34219 | 85086195 | 85087153 | |
| 34220 | 85155366 | 85156928 | 117155 |
| 34221 | 85163590 | 85164936 | |
| 34222 | 85170511 | 85171688 | |
| 34223 | 85184551 | 85187578 | |
| 34224 | 85189982 | 85190674 | |
| 34225 | 85299710 | 85301310 | 171517 |
| 34226 | 85305133 | 85305836 | 171517 |
| 34227 | 85353066 | 85353654 | 171517 |
| 34228 | 85600818 | 85601210 | |
| 34229 | 85603310 | 85603938 | |
| 34230 | 85665421 | 85668593 | 097096 |
| 34231 | 85724410 | 85725871 | 162642 |
| 34232 | 85740444 | 85742820 | 223653, 142867 |
| 34233 | 85778849 | 85781091 | 223653 |
| 34234 | 85785895 | 85789675 | 153904, 223653 |
| 34235 | 85790191 | 85796691 | 153904, 223653 |
| 34236 | 85804687 | 85805866 | 153904, 223653 |
| 34237 | 85835016 | 85836118 | 153904, 223653 |
| 34238 | 85836513 | 85837323 | 153904, 223653 |
| 34239 | 85838336 | 85838992 | 153904, 223653 |
| 34240 | 85839772 | 85840328 | 153904, 223653 |
| 34241 | 85851337 | 85852411 | 153904, 223653 |
| 34242 | 85868610 | 85869219 | 153904, 223653 |
| 34243 | 85872180 | 85874086 | 153904, 223653 |
| 34244 | 85903813 | 85904622 | 153904, 223653 |
| 34245 | 85925939 | 85926831 | 153904 |
| 34246 | 85928802 | 85931595 | 153904 |
| 34247 | 86010267 | 86011033 | 153904 |
| 34248 | 86041580 | 86044820 | 272691, 153904 |
| 34249 | 86045017 | 86052212 | 142871 |
| 34250 | 86064530 | 86065150 | 230285 |
| 34251 | 86070743 | 86075290 | |
| 34252 | 86076511 | 86079624 | |
| 34253 | 86088614 | 86089192 | |
| 34254 | 86093988 | 86095687 | |
| 34255 | 86173038 | 86174890 | 117174 |
| 34256 | 87169161 | 87171753 | 261737, 097033 |
| 34257 | 87238373 | 87241338 | |
| 34258 | 87253994 | 87255313 | |
| 34259 | 87258357 | 87259375 | |
| 34260 | 87277219 | 87277679 | |
| 34261 | 87289379 | 87289969 | |
| 34262 | 87325590 | 87327688 | |
| 34263 | 87379016 | 87381954 | 153936, 183291 |
| 34264 | 87403849 | 87404685 | 153936 |
| 34265 | 87597371 | 87598228 | 153936, 267561, 267272 |
| 34266 | 87691329 | 87692534 | |
| 34267 | 87793202 | 87795996 | 143013 |
| 34268 | 87796513 | 87798502 | 143013 |
| 34269 | 87800186 | 87801725 | 143013 |
| 34270 | 87828158 | 87829017 | 227290 |
| 34271 | 88149049 | 88150721 | |
| 34272 | 88186266 | 88186778 | |
| 34273 | 88260265 | 88262613 | |
| 34274 | 88394223 | 88394829 | |
| 34275 | 88466563 | 88467707 | |
| 34276 | 88569680 | 88570889 | |
| 34277 | 88578744 | 88579582 | |
| 34278 | 88640536 | 88642503 | |
| 34279 | 88645255 | 88647068 | |
| 34280 | 88877938 | 88878444 | |
| 34281 | 89112775 | 89113884 | 237505 |
| 34282 | 89148807 | 89151290 | 065243, 237505 |
| 34283 | 89356385 | 89358320 | 137947 |
| 34284 | 89412899 | 89413587 | 137944 |
| 34285 | 89457002 | 89459817 | 213516, 137944 |
| 34286 | 89487306 | 89489390 | 117226 |
| 34287 | 89510555 | 89511743 | |
| 34288 | 89529670 | 89531986 | 117228 |
| 34289 | 89535367 | 89536338 | |
| 34290 | 89591059 | 89592739 | 162645 |
| 34291 | 89594332 | 89595608 | 162645 |
| 34292 | 89638129 | 89639310 | 213512 |
| 34293 | 89640787 | 89643031 | 213512 |
| 34294 | 89664049 | 89665072 | 162654 |
| 34295 | 89739888 | 89740953 | |
| 34296 | 89775364 | 89777939 | |
| 34297 | 89989268 | 89991348 | 197147 |
| 34298 | 90018010 | 90019144 | 197147 |
| 34299 | 90286015 | 90289038 | 171492, 272931, 271949 |
| 34300 | 90292120 | 90292629 | 271949, 171492 |
| 34301 | 90301638 | 90303116 | 271949, 171492 |
| 34302 | 90308213 | 90310078 | 271949, 171492 |
| 34303 | 90330772 | 90332795 | 271949, 171492 |
| 34304 | 90336512 | 90338717 | 271949, 171492 |
| 34305 | 90372003 | 90372994 | 271949, 171492 |
| 34306 | 90415486 | 90416385 | |
| 34307 | 90459712 | 90461699 | 162664, 228175 |
| 34308 | 90590619 | 90591277 | |
| 34309 | 91244981 | 91245635 | |
| 34310 | 91315846 | 91317389 | 225446, 233593 |
| 34311 | 91384597 | 91385311 | 122482 |
| 34312 | 91480719 | 91482302 | 122482 |
| 34313 | 91486144 | 91488648 | 122482 |
| 34314 | 91530718 | 91531692 | |
| 34315 | 91586367 | 91587617 | |
| 34316 | 91852644 | 91853268 | 162669 |
| 34317 | 91966226 | 91967128 | 097046 |
| 34318 | 92018650 | 92019149 | |
| 34319 | 92190822 | 92192000 | 069702 |
| 34320 | 92196202 | 92198133 | 069702 |
| 34321 | 92200616 | 92201379 | 069702 |
| 34322 | 92202102 | 92203018 | 069702 |
| 34323 | 92222946 | 92224290 | 069702 |
| 34324 | 92230778 | 92231202 | 069702 |
| 34325 | 92241596 | 92242253 | 069702 |
| 34326 | 92293071 | 92294051 | 069702 |
| 34327 | 92309923 | 92312051 | 069702 |
| 34328 | 92351112 | 92352239 | 069702 |
| 34329 | 92504277 | 92504820 | 172031 |
| 34330 | 92763740 | 92765398 | 122484, 174842 |
| 34331 | 92970452 | 92971515 | |
| 34332 | 93002262 | 93004262 | 067208 |
| 34333 | 93249413 | 93251285 | 067208 |
| 34334 | 93270160 | 93271296 | |
| 34335 | 93297225 | 93299020 | 122406 |
| 34336 | 93352199 | 93353117 | 154511 |
| 34337 | 93387299 | 93388889 | 154511 |
| 34338 | 93400296 | 93401811 | 154511 |
| 34339 | 93415881 | 93417889 | 154511 |
| 34340 | 93425399 | 93428446 | 154511 |
| 34341 | 93481575 | 93482185 | |
| 34342 | 93543813 | 93545921 | 143033 |
| 34343 | 93643699 | 93644653 | 117500 |
| 34344 | 93644931 | 93646506 | 122483, 117500 |
| 34345 | 93720559 | 93721337 | 122483 |
| 34346 | 93723090 | 93723696 | 122483 |
| 34347 | 93740465 | 93742199 | 122483, 223745 |
| 34348 | 93789591 | 93790798 | 223745 |
| 34349 | 93810386 | 93813177 | 117505, 223745 |
| 34350 | 93912636 | 93915228 | 137942 |
| 34351 | 93964931 | 93965526 | 137942 |
| 34352 | 94049845 | 94051533 | 137936 |
| 34353 | 94056979 | 94058928 | 224093, 137936 |
| 34354 | 94078819 | 94084481 | 137936 |
| 34355 | 94087453 | 94088608 | 137936 |
| 34356 | 94129807 | 94130820 | 137936 |
| 34357 | 94146201 | 94148207 | 137936 |
| 34358 | 94166133 | 94172495 | 137936 |
| 34359 | 94224016 | 94225461 | 137936, 230439 |
| 34360 | 94234299 | 94234936 | 137936, 230439 |
| 34361 | 94278323 | 94280047 | 137936 |
| 34362 | 94311144 | 94314165 | 211575, 260464, 137936 |
| 34363 | 94343866 | 94345790 | 067334 |
| 34364 | 94370812 | 94371796 | 023909 |
| 34365 | 94373267 | 94376299 | 023909 |
| 34366 | 94412118 | 94413273 | |
| 34367 | 94423725 | 94424246 | |
| 34368 | 94427852 | 94432643 | |
| 34369 | 94445221 | 94446535 | |
| 34370 | 94480108 | 94481661 | 198691 |
| 34371 | 94487932 | 94489097 | 198691 |
| 34372 | 94511014 | 94511737 | 198691 |
| 34373 | 94526721 | 94529321 | 198691 |
| 34374 | 94532966 | 94535478 | 198691 |
| 34375 | 94591366 | 94591917 | |
| 34376 | 94674747 | 94675628 | 137962 |
| 34377 | 94700955 | 94703520 | 137962 |
| 34378 | 94711866 | 94714141 | 231363, 137962 |
| 34379 | 94723642 | 94726934 | 137962 |
| 34380 | 94764298 | 94767164 | |
| 34381 | 94775296 | 94777182 | |
| 34382 | 94781097 | 94783752 | |
| 34383 | 94789734 | 94792569 | 236098 |
| 34384 | 94795352 | 94795961 | |
| 34385 | 94815357 | 94816376 | |
| 34386 | 94820805 | 94821695 | |
| 34387 | 94845057 | 94845717 | |
| 34388 | 94847753 | 94848114 | |
| 34389 | 94848911 | 94851513 | |
| 34390 | 94882946 | 94885262 | 117528 |
| 34391 | 94891191 | 94891996 | 117528 |
| 34392 | 94904096 | 94904955 | 117528 |
| 34393 | 95006559 | 95008310 | 117525 |
| 34394 | 95123321 | 95124378 | 224081 |
| 34395 | 95285257 | 95288002 | 143036, 224081 |
| 34396 | 95319767 | 95320841 | 237416, 143036 |
| 34397 | 95390188 | 95394365 | 235501, 117519 |
| 34398 | 95407185 | 95409811 | 235501 |
| 34399 | 95415209 | 95416402 | 235501 |
| 34400 | 95416672 | 95417610 | 235501 |
| 34401 | 95421245 | 95422182 | 235501 |
| 34402 | 95427118 | 95429224 | 235501 |
| 34403 | 95479350 | 95480035 | 172339 |
| 34404 | 95508777 | 95509636 | 172339 |
| 34405 | 95515345 | 95516028 | 172339 |
| 34406 | 95532570 | 95533124 | 230427, 172339 |
| 34407 | 95534148 | 95535410 | 172339 |
| 34408 | 95537385 | 95539434 | 172339 |
| 34409 | 95552213 | 95553850 | |
| 34410 | 95561206 | 95562542 | |
| 34411 | 95581265 | 95584196 | 271092, 152078 |
| 34412 | 95587361 | 95588369 | 231992, 271092, 152078 |
| 34413 | 95599074 | 95599870 | 231992, 271092, 152078 |
| 34414 | 95633259 | 95636050 | 271092, 152078, 226026 |
| 34415 | 95663176 | 95663930 | 271092, 226026 |
| 34416 | 95698078 | 95700651 | 122481, 226026, 271092 |
| 34417 | 95722668 | 95724109 | 228852 |
| 34418 | 96775358 | 96775773 | 231987 |
| 34419 | 96827415 | 96829638 | 231987 |
| 34420 | 96890819 | 96891487 | |
| 34421 | 96937779 | 96938445 | |
| 34422 | 97024840 | 97026941 | |
| 34423 | 97187002 | 97188519 | 117569 |
| 34424 | 97237825 | 97238387 | 117569 |
| 34425 | 97255767 | 97256802 | 117569 |
| 34426 | 97331129 | 97332083 | |
| 34427 | 97428439 | 97429082 | |
| 34428 | 97430205 | 97431109 | |
| 34429 | 97655833 | 97656301 | 232878, 188641 |
| 34430 | 97717548 | 97718195 | 232878, 188641 |
| 34431 | 97742696 | 97744596 | 232878, 188641 |
| 34432 | 97803225 | 97803519 | 188641 |
| 34433 | 97829791 | 97830941 | 188641 |
| 34434 | 97849889 | 97850162 | 188641 |
| 34435 | 97966246 | 97966934 | 188641 |
| 34436 | 97967685 | 97968440 | 188641 |
| 34437 | 98384496 | 98387121 | 188641 |
| 34438 | 98395448 | 98396625 | |
| 34439 | 98513747 | 98514259 | 225206 |
| 34440 | 98519044 | 98520272 | |
| 34441 | 98552204 | 98552778 | |
| 34442 | 98895382 | 98896058 | |
| 34443 | 99126519 | 99128413 | 162627 |
| 34444 | 99142726 | 99143476 | 162627 |
| 34445 | 99575487 | 99576864 | 232825 |
| 34446 | 99635702 | 99637437 | |
| 34447 | 100002971 | 100004999 | |
| 34448 | 100030279 | 100033189 | |
| 34449 | 100065139 | 100065685 | |
| 34450 | 100069042 | 100070094 | |
| 34451 | 100110640 | 100114303 | 099260 |
| 34452 | 100115377 | 100116594 | 099260 |
| 34453 | 100128093 | 100128587 | 099260 |
| 34454 | 100137919 | 100138858 | 099260 |
| 34455 | 100151089 | 100151774 | 099260 |
| 34456 | 100192381 | 100192918 | 156869 |
| 34457 | 100204057 | 100205267 | 156869 |
| 34458 | 100213305 | 100215476 | 156869 |
| 34459 | 100224785 | 100225985 | 156869 |
| 34460 | 100314798 | 100316531 | 162688 |
| 34461 | 100428375 | 100429418 | |
| 34462 | 100434608 | 100436367 | 117620, 228084 |
| 34463 | 100502376 | 100505229 | 156875 |
| 34464 | 100597938 | 100599346 | 122435, 156876 |
| 34465 | 100653391 | 100654485 | 137992 |
| 34466 | 100714545 | 100716083 | 230287, 137992 |
| 34467 | 100731242 | 100732844 | 137996, 224616 |
| 34468 | 100816428 | 100818918 | 079335 |
| 34469 | 100918206 | 100918745 | 079335 |
| 34470 | 100951137 | 100951927 | 228086, 079335 |
| 34471 | 100980681 | 100982048 | 079335 |
| 34472 | 101004458 | 101005846 | 181656 |
| 34473 | 101048451 | 101049000 | |
| 34474 | 101050436 | 101050983 | |
| 34475 | 101087520 | 101088640 | |
| 34476 | 101123192 | 101124910 | |
| 34477 | 101359907 | 101362608 | 273204, 162695, 162694 |
| 34478 | 101490392 | 101492514 | 233184, 117543 |
| 34479 | 101571300 | 101571899 | |
| 34480 | 101573243 | 101574138 | |
| 34481 | 101615166 | 101617273 | |
| 34482 | 101658737 | 101660246 | |
| 34483 | 101665988 | 101666556 | |
| 34484 | 101701018 | 101704764 | 170989, 225938 |
| 34485 | 101723104 | 101726859 | |
| 34486 | 101730039 | 101730664 | |
| 34487 | 101836708 | 101837132 | 231671 |
| 34488 | 104068111 | 104069472 | 185946 |
| 34489 | 109126793 | 109127461 | 162636 |
| 34490 | 109234033 | 109236331 | 134186 |
| 34491 | 109288826 | 109290384 | 116266 |
| 34492 | 109371680 | 109372830 | 162641 |
| 34493 | 109505161 | 109506383 | 121940, 162641 |
| 34494 | 109583859 | 109584896 | 085433 |
| 34495 | 109617668 | 109619335 | 197780 |
| 34496 | 109632647 | 109635043 | 273382, 215717 |
| 34497 | 109642425 | 109643856 | 270066 |
| 34498 | 109647393 | 109647814 | |
| 34499 | 109723721 | 109724696 | 116299 |
| 34500 | 109739760 | 109741377 | 116299 |
| 34501 | 109756130 | 109758527 | 031698 |
| 34502 | 109806038 | 109806867 | 143126 |
| 34503 | 109816459 | 109819013 | 143126 |
| 34504 | 109825780 | 109826854 | 134222 |
| 34505 | 109913186 | 109914351 | 134243 |
| 34506 | 109934979 | 109936261 | 134243 |
| 34507 | 109939781 | 109940724 | 134243 |
| 34508 | 109967423 | 109970257 | 143106 |
| 34509 | 109980670 | 109981996 | |
| 34510 | 110008787 | 110010144 | 143028 |
| 34511 | 110026295 | 110027259 | 162650 |
| 34512 | 110036340 | 110037335 | 174151 |
| 34513 | 110051839 | 110052593 | 181754 |
| 34514 | 110088798 | 110091951 | 065135, 156097 |
| 34515 | 110161174 | 110163936 | 116337 |
| 34516 | 110171002 | 110171472 | 228703, 116337 |
| 34517 | 110185749 | 110186695 | |
| 34518 | 110198093 | 110199362 | 168765 |
| 34519 | 110306281 | 110306993 | 198758, 241720, 134201 |
| 34520 | 110366286 | 110367157 | |
| 34521 | 110415882 | 110416686 | |
| 34522 | 110419414 | 110420634 | |
| 34523 | 110435018 | 110435560 | |
| 34524 | 110438355 | 110438871 | 261055 |
| 34525 | 110443417 | 110444893 | |
| 34526 | 110446208 | 110447499 | |
| 34527 | 110452538 | 110456548 | 184371 |
| 34528 | 110459240 | 110461846 | 184371 |
| 34529 | 110468922 | 110472703 | 184371 |
| 34530 | 110473493 | 110474821 | 184371 |
| 34531 | 110476009 | 110479206 | |
| 34532 | 110490299 | 110491352 | |
| 34533 | 110501773 | 110503583 | |
| 34534 | 110503888 | 110504583 | |
| 34535 | 110518082 | 110519342 | |
| 34536 | 110520855 | 110522264 | |
| 34537 | 110526017 | 110528685 | 168710 |
| 34538 | 110545923 | 110547525 | 168710 |
| 34539 | 110576418 | 110578447 | 143093 |
| 34540 | 110591701 | 110592283 | 143093 |
| 34541 | 110814684 | 110815172 | 200536, 116396 |
| 34542 | 110878945 | 110883286 | 162775, 227963 |
| 34543 | 110898940 | 110900163 | |
| 34544 | 110935651 | 110937647 | 224699 |
| 34545 | 110949438 | 110951322 | 134248, 224699 |
| 34546 | 110976405 | 110977367 | |
| 34547 | 111019516 | 111020896 | |
| 34548 | 111505558 | 111507260 | 273010, 121931 |
| 34549 | 111587746 | 111588270 | |
| 34550 | 111681775 | 111683922 | 134255, 156171 |
| 34551 | 111684257 | 111685599 | 134255 |
| 34552 | 111733428 | 111734427 | 162777 |
| 34553 | 111735284 | 111737046 | 162777 |
| 34554 | 111745357 | 111747665 | 162777, 064886 |
| 34555 | 111770983 | 111771409 | 064886 |
| 34556 | 111888638 | 111889202 | 173947 |
| 34557 | 111906459 | 111908703 | 234020 |
| 34558 | 111948675 | 111949230 | |
| 34559 | 111960193 | 111960815 | 085465 |
| 34560 | 111965456 | 111966079 | 085465 |
| 34561 | 111990795 | 111993163 | 116459, 116455 |
| 34562 | 112050145 | 112052711 | 121933 |
| 34563 | 112077720 | 112079134 | 121933 |
| 34564 | 112081036 | 112081785 | 121933 |
| 34565 | 112084051 | 112085211 | 116473, 121933 |
| 34566 | 112102313 | 112102845 | 121933, 116473 |
| 34567 | 112103971 | 112104462 | 121933, 116473 |
| 34568 | 112106152 | 112107269 | 121933, 116473 |
| 34569 | 112135234 | 112136527 | 116473 |
| 34570 | 112161728 | 112163841 | 116473 |
| 34571 | 112246904 | 112247808 | 197852, 116473 |
| 34572 | 112280976 | 112282822 | 227811, 197852 |
| 34573 | 112297468 | 112299590 | 064703, 197852 |
| 34574 | 112405047 | 112406116 | 171385 |
| 34575 | 112420268 | 112423314 | 171385 |
| 34576 | 112423616 | 112424570 | 171385 |
| 34577 | 112429264 | 112431018 | 171385 |
| 34578 | 112518128 | 112520254 | 171385 |
| 34579 | 112530978 | 112534470 | 231437, 171385 |
| 34580 | 112902883 | 112903318 | 231246 |
| 34581 | 112933386 | 112934218 | |
| 34582 | 112937967 | 112939621 | 143079 |
| 34583 | 113086086 | 113087918 | 007341 |
| 34584 | 113160654 | 113163612 | 116489, 007341 |
| 34585 | 113216107 | 113218589 | 155363 |
| 34586 | 113240953 | 113242191 | 155363 |
| 34587 | 113242373 | 113244451 | 155366, 155363 |
| 34588 | 113246640 | 113250420 | 155366, 271810 |
| 34589 | 113257454 | 113258253 | 155367 |
| 34590 | 113477475 | 113480119 | 155380 |
| 34591 | 113497450 | 113499664 | 226419, 155380 |
| 34592 | 113536680 | 113537899 | 226419 |
| 34593 | 113569607 | 113570505 | 238198, 236066 |
| 34594 | 113572061 | 113572846 | 238198, 236066 |
| 34595 | 113574002 | 113574450 | 238198, 236066 |
| 34596 | 113614618 | 113616908 | 198799, 238198 |
| 34597 | 113797821 | 113798479 | |
| 34598 | 113834716 | 113835692 | |
| 34599 | 113930859 | 113934754 | 081026 |
| 34600 | 113936282 | 113937737 | 081026 |
| 34601 | 113998820 | 114001116 | 081026 |
| 34602 | 114022668 | 114023402 | 081026 |
| 34603 | 114076639 | 114077316 | 081026 |
| 34604 | 114217138 | 114217747 | 081026 |
| 34605 | 114219710 | 114220993 | 081026 |
| 34606 | 114300754 | 114303034 | 116793 |
| 34607 | 114347302 | 114348018 | 081019 |
| 34608 | 114353713 | 114355477 | 231128, 081019 |
| 34609 | 114446635 | 114448660 | 118655, 134262 |
| 34610 | 114470772 | 114473585 | 163349, 235527 |
| 34611 | 114888397 | 114889713 | |
| 34612 | 114977245 | 114978403 | 197323 |
| 34613 | 114995900 | 114996641 | 197323 |
| 34614 | 115052616 | 115054945 | 197323 |
| 34615 | 115123400 | 115125180 | 116752 |
| 34616 | 115129820 | 115132098 | 175984 |
| 34617 | 115211536 | 115213850 | 175984 |
| 34618 | 115258441 | 115260196 | 009307, 213281 |
| 34619 | 115262876 | 115263818 | 009307 |
| 34620 | 115298911 | 115301696 | 009307 |
| 34621 | 115322441 | 115323634 | 052723 |
| 34622 | 115676385 | 115680384 | |
| 34623 | 115681354 | 115682039 | |
| 34624 | 115710823 | 115712999 | |
| 34625 | 116087759 | 116089602 | |
| 34626 | 116184251 | 116185612 | 173218 |
| 34627 | 116270347 | 116270866 | 118729 |
| 34628 | 116423777 | 116424380 | |
| 34629 | 116518482 | 116521214 | 163393 |
| 34630 | 116652074 | 116654778 | 173212 |
| 34631 | 116665322 | 116667247 | 173212 |
| 34632 | 116681263 | 116682217 | |
| 34633 | 116694522 | 116695189 | |
| 34634 | 116695440 | 116696742 | |
| 34635 | 116721511 | 116722713 | |
| 34636 | 116810885 | 116811292 | |
| 34637 | 116815681 | 116816597 | |
| 34638 | 116831731 | 116832407 | |
| 34639 | 116876501 | 116877696 | |
| 34640 | 116914951 | 116917087 | 269279, 163399 |
| 34641 | 116917995 | 116923944 | 269279, 163399 |
| 34642 | 116931444 | 116932116 | 163399 |
| 34643 | 116960290 | 116961924 | 203865 |
| 34644 | 117031472 | 117032889 | |
| 34645 | 117035918 | 117039638 | 224950 |
| 34646 | 117046540 | 117047567 | |
| 34647 | 117051193 | 117052718 | |
| 34648 | 117080987 | 117081731 | 116815 |
| 34649 | 117112517 | 117114125 | 116815 |
| 34650 | 117190935 | 117191371 | 143061 |
| 34651 | 117209535 | 117210732 | 143061 |
| 34652 | 117229696 | 117230751 | |
| 34653 | 117320369 | 117321352 | |
| 34654 | 117396172 | 117397257 | |
| 34655 | 117452212 | 117453783 | 134247 |
| 34656 | 117463501 | 117464842 | 134247 |
| 34657 | 117539389 | 117540386 | |
| 34658 | 117602815 | 117603799 | 116830 |
| 34659 | 117704492 | 117705308 | 134258 |
| 34660 | 117714200 | 117715064 | 134258 |
| 34661 | 117908501 | 117911409 | 198162 |
| 34662 | 118087032 | 118088106 | |
| 34663 | 118134779 | 118135297 | |
| 34664 | 118147949 | 118149848 | 183508, 236866 |
| 34665 | 118172549 | 118173598 | |
| 34666 | 118277576 | 118278659 | |
| 34667 | 118301170 | 118301968 | |
| 34668 | 118360273 | 118360998 | |
| 34669 | 118368308 | 118369856 | |
| 34670 | 118389612 | 118390478 | |
| 34671 | 118471528 | 118473590 | 065183, 196505 |
| 34672 | 118653936 | 118654478 | 155761 |
| 34673 | 118659171 | 118659947 | 155761 |
| 34674 | 118660700 | 118661940 | 155761 |
| 34675 | 119357788 | 119359086 | |
| 34676 | 119455086 | 119458036 | 092607 |
| 34677 | 119502285 | 119507736 | 092607 |
| 34678 | 119682413 | 119684050 | 231365, 116874 |
| 34679 | 119808916 | 119809447 | 227712, 231365 |
| 34680 | 119821809 | 119823143 | 227712 |
| 34681 | 119868884 | 119871007 | 232650, 227712 |
| 34682 | 119883084 | 119884944 | 232650 |
| 34683 | 119915038 | 119918045 | 116882 |
| 34684 | 119921443 | 119924564 | 116882 |
| 34685 | 120081765 | 120086662 | 249798 |
| 34686 | 120173422 | 120174981 | 143067 |
| 34687 | 120187784 | 120191829 | 143067 |
| 34688 | 120217365 | 120219613 | 092621 |
| 34689 | 120254471 | 120256584 | 092621 |
| 34690 | 120271555 | 120272213 | 092621 |
| 34691 | 120308179 | 120309804 | 134240 |
| 34692 | 120311291 | 120311916 | 134240 |
| 34693 | 120316177 | 120316954 | |
| 34694 | 120321872 | 120323365 | |
| 34695 | 120326670 | 120327526 | |
| 34696 | 120332813 | 120333879 | |
| 34697 | 120358582 | 120359870 | |
| 34698 | 120435827 | 120438076 | 134249 |
| 34699 | 120445576 | 120446737 | |
| 34700 | 120449306 | 120450389 | |
| 34701 | 120500524 | 120501336 | 134250 |
| 34702 | 120516438 | 120517062 | 134250 |
| 34703 | 120529045 | 120531186 | 134250 |
| 34704 | 121252978 | 121253816 | |
| 34705 | 121260449 | 121261746 | 231752, 272583 |
| 34706 | 121263474 | 121264295 | 231752 |
| 34707 | 121484147 | 121485604 | |
| 34708 | 144009590 | 144011508 | 196369 |
| 34709 | 144533439 | 144534491 | 201699 |
| 34710 | 144921448 | 144922181 | 178104 |
| 34711 | 144930257 | 144933431 | 178104 |
| 34712 | 144987908 | 144990573 | 268172, 178104 |
| 34713 | 145039048 | 145040193 | 178104 |
| 34714 | 145042645 | 145043285 | 178104 |
| 34715 | 145096033 | 145097470 | 223380 |
| 34716 | 145113361 | 145115560 | 223380 |
| 34717 | 145382146 | 145383564 | 201558, 233396 |
| 34718 | 145390014 | 145391215 | |
| 34719 | 145396492 | 145398218 | |
| 34720 | 145412767 | 145415819 | 168509 |
| 34721 | 145434994 | 145435730 | |
| 34722 | 145437412 | 145439452 | 117289 |
| 34723 | 145448432 | 145449253 | |
| 34724 | 145462105 | 145462620 | 121851 |
| 34725 | 145469883 | 145471430 | 181039, 121851 |
| 34726 | 145473701 | 145474629 | 181039 |
| 34727 | 145476852 | 145478358 | 152022, 234222 |
| 34728 | 145506731 | 145508704 | 131795, 234222 |
| 34729 | 145515080 | 145517378 | 131779, 211451 |
| 34730 | 145541892 | 145543925 | 244619, 143127 |
| 34731 | 145575103 | 145576674 | 131788 |
| 34732 | 145588444 | 145589843 | 186364 |
| 34733 | 145609985 | 145611642 | 121848, 186141 |
| 34734 | 145649109 | 145654057 | 121848 |
| 34735 | 145668933 | 145669780 | 121848 |
| 34736 | 145703988 | 145705204 | 117281 |
| 34737 | 145713137 | 145714600 | 117281 |
| 34738 | 145719772 | 145720801 | |
| 34739 | 145722886 | 145724054 | |
| 34740 | 145726481 | 145729712 | 174827 |
| 34741 | 145742271 | 145745724 | 174827 |
| 34742 | 146555569 | 146557394 | 227242 |
| 34743 | 146581278 | 146581897 | 227242 |
| 34744 | 146582395 | 146583116 | 227242 |
| 34745 | 146637961 | 146645595 | 273071, 237188, 131791 |
| 34746 | 146696344 | 146697476 | 273071, 131781 |
| 34747 | 146708803 | 146710455 | 273071, 131781 |
| 34748 | 146713147 | 146715431 | 131778, 131781, 273071 |
| 34749 | 146744971 | 146745826 | 131778 |
| 34750 | 146763205 | 146765887 | 131778 |
| 34751 | 146944333 | 146945511 | |
| 34752 | 146951315 | 146952684 | |
| 34753 | 146986828 | 146988084 | 234610 |
| 34754 | 147010216 | 147011388 | |
| 34755 | 147011875 | 147013925 | 116128 |
| 34756 | 147070862 | 147072861 | 116128 |
| 34757 | 147141252 | 147143055 | 162836 |
| 34758 | 147280079 | 147280691 | |
| 34759 | 147322930 | 147323862 | |
| 34760 | 147735471 | 147736325 | 199879 |
| 34761 | 147806323 | 147807486 | 202408, 224481 |
| 34762 | 148241254 | 148241864 | 207501 |
| 34763 | 149214772 | 149215898 | 252826 |
| 34764 | 149222762 | 149225490 | 206737 |
| 34765 | 149230178 | 149231488 | 232721 |
| 34766 | 149235393 | 149235937 | |
| 34767 | 149856459 | 149860750 | 178096, 184270, 184260, |
| | | | 184678 |
| 34768 | 149870866 | 149872259 | 178096 |
| 34769 | 149898948 | 149900818 | 014914, 143368 |
| 34770 | 149910720 | 149911982 | 163113 |
| 34771 | 149950265 | 149950976 | 163113 |
| 34772 | 149953009 | 149953385 | 163113 |
| 34773 | 149967875 | 149968493 | 163113 |
| 34774 | 149979639 | 149983507 | 163113 |
| 34775 | 149992420 | 149994850 | |
| 34776 | 150038421 | 150040513 | 136631 |
| 34777 | 150121423 | 150123120 | 023902 |
| 34778 | 150145162 | 150146210 | |
| 34779 | 150157732 | 150160036 | |
| 34780 | 150163840 | 150165016 | |
| 34781 | 150179515 | 150180082 | |
| 34782 | 150185526 | 150186380 | |
| 34783 | 150206605 | 150208743 | 143401 |
| 34784 | 150227682 | 150229838 | 118298, 271845 |
| 34785 | 150239979 | 150242206 | 118292, 117362 |
| 34786 | 150250599 | 150251189 | 118292 |
| 34787 | 150252298 | 150255225 | 159208, 118292 |
| 34788 | 150265566 | 150267132 | 187145 |
| 34789 | 150293026 | 150295087 | 117360 |
| 34790 | 150335341 | 150339421 | 163125 |
| 34791 | 150359601 | 150360226 | 163125 |
| 34792 | 150381874 | 150383832 | 163125 |
| 34793 | 150445936 | 150446701 | 163125 |
| 34794 | 150458952 | 150460683 | 143374 |
| 34795 | 150487451 | 150488657 | 228126 |
| 34796 | 150504412 | 150505670 | |
| 34797 | 150508453 | 150508961 | |
| 34798 | 150516111 | 150517368 | |
| 34799 | 150520887 | 150522954 | 225996, 143382, 237781 |
| 34800 | 150532206 | 150537516 | 203804, 143382 |
| 34801 | 150539288 | 150541783 | 264584, 264508 |
| 34802 | 150546592 | 150553239 | 143384 |
| 34803 | 150573225 | 150573698 | 143420 |
| 34804 | 150575493 | 150578408 | 143420 |
| 34805 | 150583622 | 150587468 | 143420 |
| 34806 | 150593897 | 150594453 | 143420 |
| 34807 | 150600624 | 150603080 | 143420 |
| 34808 | 150669206 | 150670538 | 143452, 143457 |
| 34809 | 150736980 | 150738648 | 163131 |
| 34810 | 150793160 | 150793645 | 143437 |
| 34811 | 150824637 | 150825188 | 143437 |
| 34812 | 150847126 | 150850266 | 143437 |
| 34813 | 150853871 | 150854807 | 224800 |
| 34814 | 150894860 | 150895486 | |
| 34815 | 150898069 | 150899751 | 143379 |
| 34816 | 150943178 | 150948252 | 231073, 143418 |
| 34817 | 150949217 | 150950715 | |
| 34818 | 150951313 | 150952451 | |
| 34819 | 150953416 | 150955063 | 143412 |
| 34820 | 150957642 | 150958127 | 143412 |
| 34821 | 150980298 | 150981941 | 143363, 143409 |
| 34822 | 150985195 | 150986262 | 143363 |
| 34823 | 151019976 | 151021642 | 143443, 163141 |
| 34824 | 151030855 | 151033477 | 197622, 213190 |
| 34825 | 151035106 | 151036127 | 197622, 213190 |
| 34826 | 151042371 | 151044298 | 143458, 197622 |
| 34827 | 151137215 | 151139510 | 163155, 163156 |
| 34828 | 151161474 | 151163319 | 163159 |
| 34829 | 151167594 | 151169249 | 163159 |
| 34830 | 151169802 | 151173100 | 143398 |
| 34831 | 151226646 | 151228365 | 159352 |
| 34832 | 151237300 | 151239516 | 159352 |
| 34833 | 151246165 | 151246982 | |
| 34834 | 151253488 | 151256172 | 143373, 232671 |
| 34835 | 151281467 | 151285468 | 143393 |
| 34836 | 151285707 | 151287291 | 143393 |
| 34837 | 151298807 | 151301335 | 273481, 143393 |
| 34838 | 151318964 | 151320335 | 237976, 143390 |
| 34839 | 151340554 | 151341551 | 143416 |
| 34840 | 151343711 | 151344493 | 143416 |
| 34841 | 151344536 | 151345430 | 143416 |
| 34842 | 151371458 | 151373221 | 159377 |
| 34843 | 151430380 | 151432747 | 143442 |
| 34844 | 151445299 | 151446608 | |
| 34845 | 151466797 | 151468266 | |
| 34846 | 151481989 | 151483175 | 143375 |
| 34847 | 151483445 | 151487459 | 143375 |
| 34848 | 151488488 | 151489194 | 143375 |
| 34849 | 151511416 | 151514284 | 232536, 143367 |
| 34850 | 151518772 | 151521773 | 232536, 143367 |
| 34851 | 151540868 | 151543339 | 143367 |
| 34852 | 151568376 | 151570365 | |
| 34853 | 151578959 | 151579775 | |
| 34854 | 151580842 | 151581392 | |
| 34855 | 151583638 | 151585478 | 250734, 143376 |
| 34856 | 151611100 | 151612329 | 143376 |
| 34857 | 151734981 | 151737015 | 249602, 143450, 143436 |
| 34858 | 151762438 | 151764301 | 203288, 182134 |
| 34859 | 151791426 | 151793801 | 143365 |
| 34860 | 151803011 | 151804682 | 143365 |
| 34861 | 151804890 | 151805586 | |
| 34862 | 151810314 | 151811971 | 225556 |
| 34863 | 151859260 | 151859871 | 159445 |
| 34864 | 151881171 | 151882994 | 159445 |
| 34865 | 151891054 | 151892152 | |
| 34866 | 151913184 | 151914207 | |
| 34867 | 151918178 | 151919223 | |
| 34868 | 151960241 | 151967952 | 229021, 197747 |
| 34869 | 151970406 | 151972509 | 229021 |
| 34870 | 151973923 | 151974682 | 229021 |
| 34871 | 152008410 | 152009846 | 163191, 229021 |
| 34872 | 152019544 | 152021601 | 163191 |
| 34873 | 152161005 | 152162929 | 237975 |
| 34874 | 152489325 | 152490903 | |
| 34875 | 152901043 | 152901653 | |
| 34876 | 153329981 | 153330514 | 163220 |
| 34877 | 153462772 | 153463205 | |
| 34878 | 153478689 | 153480442 | |
| 34879 | 153506290 | 153509204 | 197956, 238279 |
| 34880 | 153521576 | 153522347 | 188015, 196154 |
| 34881 | 153537577 | 153542044 | 196754 |
| 34882 | 153579753 | 153586406 | 188643 |
| 34883 | 153588437 | 153590503 | 189334 |
| 34884 | 153605831 | 153607498 | 160679, 271853, 189171, |
| | | | 272030 |
| 34885 | 153630619 | 153631890 | 143553 |
| 34886 | 153642596 | 153644707 | 143621 |
| 34887 | 153671605 | 153672129 | |
| 34888 | 153699652 | 153701589 | 143624 |
| 34889 | 153713394 | 153716699 | 143624 |
| 34890 | 153740563 | 153742102 | 143624 |
| 34891 | 153747549 | 153748647 | 143554 |
| 34892 | 153749751 | 153750461 | 143554 |
| 34893 | 153752186 | 153753023 | 143554 |
| 34894 | 153755385 | 153756606 | |
| 34895 | 153868658 | 153869480 | 143614 |
| 34896 | 153894202 | 153896906 | 143614 |
| 34897 | 153917772 | 153919673 | 198837 |
| 34898 | 153929908 | 153931286 | 160741 |
| 34899 | 153934531 | 153937168 | 143570 |
| 34900 | 153939092 | 153940594 | 143578, 273026, 143570 |
| 34901 | 153948997 | 153951221 | 272654, 143543 |
| 34902 | 153962693 | 153964537 | 177954 |
| 34903 | 153978636 | 153979036 | 143552 |
| 34904 | 154154399 | 154156220 | 143549 |
| 34905 | 154191871 | 154194784 | 143569, 143612 |
| 34906 | 154209471 | 154210870 | 143569 |
| 34907 | 154244406 | 154245870 | 143575 |
| 34908 | 154306502 | 154307985 | 143515 |
| 34909 | 154324525 | 154326512 | |
| 34910 | 154376532 | 154383565 | 160712, 228013 |
| 34911 | 154388849 | 154397310 | 160712 |
| 34912 | 154399260 | 154401607 | 160712 |
| 34913 | 154411918 | 154412964 | 160712 |
| 34914 | 154425862 | 154427049 | 160712 |
| 34915 | 154473924 | 154474839 | 163239, 169291 |
| 34916 | 154520407 | 154521197 | 160714, 163239 |
| 34917 | 154530267 | 154532513 | 160714 |
| 34918 | 154579387 | 154581549 | 160710 |
| 34919 | 154599113 | 154601142 | 160710 |
| 34920 | 154670261 | 154671599 | 143603 |
| 34921 | 154757292 | 154758021 | 143603 |
| 34922 | 154849140 | 154851474 | |
| 34923 | 154903964 | 154905310 | 163344 |
| 34924 | 154908309 | 154910859 | 270361, 163344 |
| 34925 | 154917158 | 154917689 | 163346 |
| 34926 | 154933453 | 154935329 | 160691, 271380, 163348 |
| 34927 | 154942999 | 154949064 | 264349, 173207, 160691 |
| 34928 | 154955516 | 154956884 | 160688 |
| 34929 | 154971594 | 154979316 | 160685 |
| 34930 | 154989096 | 154990446 | 160685 |
| 34931 | 154997600 | 154998031 | 163354 |
| 34932 | 154999032 | 154999548 | 163354 |
| 34933 | 155016983 | 155017779 | 232093, 163357 |
| 34934 | 155022149 | 155024983 | 143537, 163357 |
| 34935 | 155035895 | 155036682 | 251246, 143590, 243364 |
| 34936 | 155056531 | 155057706 | 251246, 143590 |
| 34937 | 155058044 | 155058970 | 251246, 143590 |
| 34938 | 155077895 | 155078981 | |
| 34939 | 155079059 | 155081398 | |
| 34940 | 155096809 | 155104848 | 169242 |
| 34941 | 155105619 | 155109122 | 169241, 169242 |
| 34942 | 155111826 | 155113390 | 179085 |
| 34943 | 155144783 | 155146066 | 163462, 163463, 273088 |
| 34944 | 155162834 | 155163790 | |
| 34945 | 155177723 | 155179769 | 173171, 169231 |
| 34946 | 155194368 | 155195058 | 160766 |
| 34947 | 155196178 | 155197375 | 160766 |
| 34948 | 155213528 | 155214940 | 177628 |
| 34949 | 155224426 | 155226054 | 116521, 160767 |
| 34950 | 155230836 | 155232934 | 176444, 116521 |
| 34951 | 155242363 | 155243717 | 176444 |
| 34952 | 155246987 | 155248546 | 143630, 176444 |
| 34953 | 155269795 | 155271361 | 143627 |
| 34954 | 155277747 | 155279923 | 160752 |
| 34955 | 155292676 | 155295293 | 225855, 160753 |
| 34956 | 155435684 | 155437247 | 116539 |
| 34957 | 155468867 | 155470032 | 116539 |
| 34958 | 155531684 | 155534073 | 235919, 116539 |
| 34959 | 155618303 | 155618926 | 246203, 125459, 203761 |
| 34960 | 155657606 | 155659497 | 132676, 163374, 125459, |
| | | | 203761 |
| 34961 | 155668109 | 155668731 | 132676, 125459, 203761 |
| 34962 | 155826151 | 155827340 | 116580 |
| 34963 | 155879980 | 155881456 | 143622 |
| 34964 | 155903169 | 155905223 | 132680 |
| 34965 | 155947256 | 155949235 | 273002, 116584 |
| 34966 | 155951289 | 155954718 | 273002, 116584 |
| 34967 | 155958576 | 155961941 | 224276, 116584 |
| 34968 | 155989841 | 155991142 | 163479 |
| 34969 | 156022768 | 156025496 | 116586, 160803 |
| 34970 | 156039369 | 156040853 | 132698 |
| 34971 | 156045653 | 156047183 | 222611, 254726 |
| 34972 | 156051724 | 156053314 | 160789, 254726 |
| 34973 | 156055792 | 156056553 | 160789 |
| 34974 | 156075677 | 156077191 | 160789 |
| 34975 | 156083069 | 156086575 | 160789 |
| 34976 | 156088085 | 156088745 | 160789 |
| 34977 | 156091800 | 156094500 | 160789 |
| 34978 | 156098894 | 156100679 | 160789 |
| 34979 | 156134755 | 156135679 | 196189 |
| 34980 | 156153708 | 156154401 | |
| 34981 | 156162830 | 156164929 | 160785 |
| 34982 | 156182365 | 156184155 | 260238, 160783, 160785 |
| 34983 | 156186117 | 156186767 | 260238, 160783 |
| 34984 | 156187594 | 156188315 | 260238, 160783 |
| 34985 | 156232081 | 156233728 | 198952 |
| 34986 | 156246822 | 156247216 | 198952 |
| 34987 | 156251526 | 156253424 | 163472, 198952 |
| 34988 | 156260838 | 156262433 | 198715, 163472 |
| 34989 | 156264593 | 156265790 | 198715 |
| 34990 | 156271336 | 156272076 | |
| 34991 | 156307124 | 156309212 | 163468, 163467 |
| 34992 | 156363793 | 156364299 | 237390 |
| 34993 | 156425705 | 156428443 | 236947 |
| 34994 | 156441216 | 156441903 | 116604 |
| 34995 | 156465449 | 156468033 | 116604 |
| 34996 | 156468207 | 156471943 | 116604 |
| 34997 | 156472230 | 156475879 | |
| 34998 | 156560978 | 156562417 | 163382 |
| 34999 | 156570411 | 156572061 | 160818 |
| 35000 | 156629684 | 156631612 | 229953 |
| 35001 | 156647636 | 156648241 | |
| 35002 | 156697258 | 156699440 | 143303, 143319 |
| 35003 | 156709689 | 156711679 | 143314 |
| 35004 | 156715747 | 156722609 | 143294, 143321 |
| 35005 | 156736201 | 156738476 | 143321, 143294 |
| 35006 | 156821835 | 156822782 | 198400, 027644 |
| 35007 | 156882679 | 156883101 | 187800 |
| 35008 | 157014647 | 157016580 | 132694 |
| 35009 | 157107141 | 157109495 | 117036 |
| 35010 | 157124501 | 157125247 | |
| 35011 | 157210080 | 157211141 | |
| 35012 | 157281939 | 157282529 | |
| 35013 | 157282880 | 157283641 | |
| 35014 | 157409048 | 157409683 | |
| 35015 | 157411454 | 157412563 | |
| 35016 | 157931610 | 157933434 | |
| 35017 | 157934736 | 157936964 | |
| 35018 | 157989025 | 157990188 | 183853 |
| 35019 | 158118972 | 158119891 | |
| 35020 | 158147533 | 158148355 | 227295 |
| 35021 | 158150248 | 158151424 | 158473 |
| 35022 | 158155479 | 158156324 | |
| 35023 | 158496896 | 158497467 | |
| 35024 | 158969273 | 158970576 | 163565 |
| 35025 | 158979235 | 158980664 | 163565 |
| 35026 | 159198643 | 159199940 | |
| 35027 | 159251724 | 159253103 | |
| 35028 | 159411887 | 159413544 | 228560 |
| 35029 | 159478420 | 159481901 | |
| 35030 | 159526226 | 159527606 | 231100 |
| 35031 | 159528463 | 159528983 | |
| 35032 | 159550384 | 159551754 | 271890 |
| 35033 | 159557039 | 159561531 | 132703 |
| 35034 | 159566240 | 159569468 | 158731 |
| 35035 | 159674972 | 159676518 | 223603 |
| 35036 | 159681287 | 159684912 | 132693 |
| 35037 | 159721199 | 159723966 | |
| 35038 | 159725360 | 159726742 | |
| 35039 | 159749983 | 159751731 | 158716 |
| 35040 | 159885895 | 159886721 | |
| 35041 | 159891312 | 159896739 | 158710 |
| 35042 | 159927724 | 159928218 | |
| 35043 | 159940397 | 159941691 | 224259 |
| 35044 | 159961148 | 159962130 | |
| 35045 | 160000679 | 160002176 | 143315 |
| 35046 | 160063684 | 160064365 | 162729 |
| 35047 | 160067427 | 160069605 | 162729 |
| 35048 | 160093783 | 160095936 | 018625 |
| 35049 | 160174052 | 160174653 | 227741 |
| 35050 | 160174856 | 160176613 | 162734, 265381, 227741 |
| 35051 | 160216735 | 160217379 | 132716, 258465 |
| 35052 | 160230895 | 160233479 | 228606, 132716, 258465 |
| 35053 | 160253719 | 160255255 | 132716, 258465, 162735 |
| 35054 | 160309905 | 160310289 | 122218 |
| 35055 | 160312157 | 160314196 | 162736, 122218 |
| 35056 | 160508411 | 160511118 | 066294, 234425 |
| 35057 | 160607498 | 160608322 | 117090 |
| 35058 | 160608536 | 160609265 | 117090 |
| 35059 | 160931051 | 160931601 | |
| 35060 | 160959524 | 160960539 | |
| 35061 | 160978659 | 160979289 | 158769, 270149 |
| 35062 | 160982650 | 160984667 | 158769, 270149 |
| 35063 | 160989632 | 160992442 | 158769, 270149 |
| 35064 | 161008282 | 161008886 | 215845, 270149 |
| 35065 | 161014628 | 161016712 | 158773 |
| 35066 | 161052479 | 161054158 | 143217 |
| 35067 | 161067211 | 161068956 | 162755 |
| 35068 | 161086674 | 161089943 | 158793, 143256 |
| 35069 | 161101416 | 161103747 | 158796 |
| 35070 | 161123184 | 161124560 | 224985, 143222 |
| 35071 | 161128663 | 161130182 | 143258, 224985 |
| 35072 | 161135593 | 161137152 | 143224 |
| 35073 | 161146412 | 161148307 | 158850, 143224 |
| 35074 | 161162252 | 161164380 | 158859 |
| 35075 | 161170558 | 161173455 | 158864 |
| 35076 | 161186025 | 161190832 | 268387, 158869 |
| 35077 | 161191705 | 161198525 | 263548, 158882, 158874, |
| | | | 268387 |
| 35078 | 161207376 | 161208456 | 143257 |
| 35079 | 161214518 | 161215213 | |
| 35080 | 161283264 | 161285496 | 143252 |
| 35081 | 161351752 | 161353170 | |
| 35082 | 161358731 | 161360344 | |
| 35083 | 161368426 | 161370733 | |
| 35084 | 161409714 | 161410802 | |
| 35085 | 161500580 | 161501461 | 273112 |
| 35086 | 161509785 | 161510412 | 273112 |
| 35087 | 161646568 | 161647188 | 072694 |
| 35088 | 161675752 | 161677028 | 132185 |
| 35089 | 161695688 | 161697882 | 162746 |
| 35090 | 161719177 | 161720315 | 081721 |
| 35091 | 161734954 | 161737302 | 226889, 118217 |
| 35092 | 161785384 | 161786550 | 118217 |
| 35093 | 161879922 | 161880820 | 118217 |
| 35094 | 161882668 | 161885263 | 118217 |
| 35095 | 161993513 | 161994565 | 162745 |
| 35096 | 162038835 | 162041070 | 198929 |
| 35097 | 162044092 | 162044768 | 198929 |
| 35098 | 162050580 | 162051538 | 198929 |
| 35099 | 162061761 | 162062525 | 198929 |
| 35100 | 162101025 | 162102265 | 198929 |
| 35101 | 162106029 | 162107939 | 198929 |
| 35102 | 162110750 | 162112461 | 198929 |
| 35103 | 162121987 | 162122987 | 198929 |
| 35104 | 162161296 | 162161712 | 198929 |
| 35105 | 162164175 | 162164811 | 198929 |
| 35106 | 162166168 | 162167866 | 198929 |
| 35107 | 162176912 | 162177469 | 198929 |
| 35108 | 162183024 | 162183768 | 198929 |
| 35109 | 162204190 | 162205787 | 198929 |
| 35110 | 162210231 | 162210784 | 198929 |
| 35111 | 162217007 | 162217559 | 198929 |
| 35112 | 162262010 | 162262791 | 198929 |
| 35113 | 162275736 | 162276223 | 198929 |
| 35114 | 162330001 | 162331713 | 198929 |
| 35115 | 162333399 | 162337075 | 239887, 254706, 198929 |
| 35116 | 162340673 | 162345339 | 171722, 198929, 239887, |
| | | | 254706 |
| 35117 | 162350156 | 162352887 | 254706, 198929, 239887 |
| 35118 | 162357762 | 162360111 | |
| 35119 | 162467194 | 162468460 | 152332 |
| 35120 | 162530236 | 162532816 | 117143, 259788 |
| 35121 | 162566337 | 162567256 | 117143 |
| 35122 | 162582290 | 162583056 | |
| 35123 | 162647872 | 162648972 | 162733 |
| 35124 | 162650791 | 162652492 | 162733 |
| 35125 | 162656895 | 162658624 | 162733 |
| 35126 | 162710302 | 162711207 | 162733 |
| 35127 | 163290632 | 163292238 | 143248, 232995, 143228 |
| 35128 | 164604833 | 164607367 | 185630 |
| 35129 | 164717027 | 164718609 | 185630 |
| 35130 | 165121310 | 165121967 | |
| 35131 | 165203356 | 165203843 | 162761 |
| 35132 | 165204426 | 165205759 | 162761 |
| 35133 | 165227069 | 165227612 | 162761 |
| 35134 | 165228157 | 165228889 | 162761 |
| 35135 | 165256695 | 165257349 | 162761 |
| 35136 | 165257443 | 165258639 | 162761 |
| 35137 | 165395770 | 165396612 | 143171 |
| 35138 | 165566563 | 165568467 | 236206 |
| 35139 | 165599135 | 165601778 | 143198 |
| 35140 | 165605830 | 165607837 | 143198 |
| 35141 | 165614761 | 165615638 | 143198 |
| 35142 | 165665184 | 165666994 | 143149 |
| 35143 | 165667062 | 165668273 | 215838, 143149 |
| 35144 | 165716642 | 165717389 | 143183 |
| 35145 | 165737345 | 165739387 | 224358, 143183 |
| 35146 | 165741726 | 165743106 | 143183, 224358 |
| 35147 | 165796165 | 165799043 | 143179, 143183 |
| 35148 | 165825542 | 165828896 | 143179 |
| 35149 | 165840538 | 165841216 | 143179 |
| 35150 | 165852343 | 165852703 | 143179 |
| 35151 | 165867843 | 165868514 | 143179, 236364 |
| 35152 | 165879895 | 165881438 | 143179 |
| 35153 | 166055179 | 166055917 | 188859, 203307 |
| 35154 | 166080641 | 166081260 | 188859 |
| 35155 | 166135144 | 166136788 | 188859 |
| 35156 | 166439352 | 166440181 | |
| 35157 | 166457000 | 166459973 | 234142 |
| 35158 | 166783819 | 166784350 | |
| 35159 | 166807449 | 166809731 | 143157 |
| 35160 | 166844517 | 166845989 | 152382 |
| 35161 | 166944210 | 166945506 | 143195 |
| 35162 | 166949791 | 166950621 | |
| 35163 | 166980757 | 166981159 | 143194 |
| 35164 | 167013021 | 167014089 | |
| 35165 | 167188743 | 167192179 | 143190, 272205 |
| 35166 | 167236920 | 167237659 | 143190 |
| 35167 | 167266172 | 167267185 | 143190 |
| 35168 | 167355927 | 167357294 | 143190 |
| 35169 | 167423649 | 167425713 | 198821 |
| 35170 | 167501507 | 167502064 | 143162 |
| 35171 | 167508031 | 167509106 | 143162 |
| 35172 | 167511488 | 167512309 | 143162 |
| 35173 | 167517019 | 167518721 | 143162 |
| 35174 | 167522187 | 167523399 | 143162 |
| 35175 | 167569220 | 167569899 | |
| 35176 | 167682692 | 167685846 | |
| 35177 | 167690067 | 167692519 | 197965 |
| 35178 | 167721422 | 167722732 | 197965 |
| 35179 | 167766133 | 167766824 | |
| 35180 | 167772416 | 167773784 | |
| 35181 | 167789092 | 167789944 | 250762, 232194, 143199 |
| 35182 | 167868062 | 167869062 | 143199 |
| 35183 | 167873808 | 167875141 | 143199 |
| 35184 | 167879240 | 167880044 | 143199 |
| 35185 | 167882950 | 167883908 | 143199 |
| 35186 | 167885832 | 167886974 | 143158 |
| 35187 | 167895619 | 167896382 | 143158 |
| 35188 | 167903053 | 167903372 | 143158 |
| 35189 | 167903661 | 167907150 | 143164, 143158 |
| 35190 | 167963449 | 167964574 | 143164 |
| 35191 | 168147630 | 168149727 | 143155 |
| 35192 | 168194474 | 168196182 | 213064 |
| 35193 | 168199112 | 168201347 | 213064 |
| 35194 | 168204497 | 168205756 | 213064 |
| 35195 | 168337145 | 168337958 | |
| 35196 | 168348174 | 168348893 | |
| 35197 | 168464407 | 168465313 | 237658 |
| 35198 | 168605320 | 168607071 | |
| 35199 | 168662343 | 168662841 | |
| 35200 | 168768988 | 168771067 | |
| 35201 | 168803461 | 168804117 | |
| 35202 | 168889515 | 168890336 | 203601 |
| 35203 | 168892574 | 168893389 | 203601 |
| 35204 | 169074350 | 169084218 | 143153 |
| 35205 | 169084961 | 169086263 | 143153 |
| 35206 | 169114014 | 169114921 | 143156 |
| 35207 | 169116784 | 169118534 | 143156 |
| 35208 | 169203933 | 169205370 | 143156 |
| 35209 | 169208533 | 169210918 | 143156 |
| 35210 | 169336815 | 169338160 | 117475, 143156 |
| 35211 | 169452609 | 169456916 | 213062, 117479 |
| 35212 | 169463753 | 169465876 | |
| 35213 | 169478334 | 169482286 | |
| 35214 | 169497853 | 169499426 | 198734 |
| 35215 | 169515128 | 169516010 | 198734 |
| 35216 | 169539044 | 169540209 | 198734 |
| 35217 | 169540623 | 169542428 | 198734 |
| 35218 | 169552754 | 169556670 | 198734 |
| 35219 | 169557045 | 169558601 | 174175 |
| 35220 | 169693083 | 169693867 | 000460, 007908 |
| 35221 | 169714218 | 169715077 | 000460, 007908 |
| 35222 | 169750140 | 169750952 | 000460 |
| 35223 | 169763020 | 169764635 | 171806, 000460 |
| 35224 | 169861711 | 169864154 | 000457 |
| 35225 | 170036285 | 170037253 | 075945 |
| 35226 | 170042983 | 170044347 | 075945 |
| 35227 | 170500399 | 170502057 | 120370, 231407 |
| 35228 | 170506987 | 170508592 | 120370 |
| 35229 | 171051813 | 171052811 | 226552 |
| 35230 | 171053031 | 171054382 | 226552 |
| 35231 | 171059353 | 171061559 | 007933 |
| 35232 | 171110690 | 171112241 | 117507 |
| 35233 | 171129054 | 171130976 | 117507 |
| 35234 | 171164674 | 171165701 | 094963 |
| 35235 | 171179432 | 171180040 | 094963, 225243 |
| 35236 | 171225835 | 171226809 | 010932 |
| 35237 | 171282580 | 171284416 | 076258 |
| 35238 | 171312685 | 171314988 | 225704, 268062 |
| 35239 | 171320823 | 171321721 | |
| 35240 | 171453968 | 171455696 | 117523 |
| 35241 | 171614021 | 171614583 | 034971 |
| 35242 | 171710421 | 171713197 | 117533 |
| 35243 | 171786197 | 171787258 | |
| 35244 | 171974832 | 171975858 | 197959 |
| 35245 | 172326856 | 172328644 | 197959 |
| 35246 | 172328678 | 172329303 | 197959 |
| 35247 | 172384932 | 172388270 | 197959, 135845 |
| 35248 | 172412235 | 172414113 | 135845, 180999 |
| 35249 | 172417051 | 172420895 | 180999 |
| 35250 | 172421130 | 172422994 | 180999 |
| 35251 | 172434404 | 172438263 | 180999 |
| 35252 | 172438665 | 172440124 | |
| 35253 | 172445069 | 172446136 | |
| 35254 | 172467791 | 172471156 | |
| 35255 | 172500649 | 172503519 | 094975 |
| 35256 | 172591677 | 172592091 | |
| 35257 | 172685366 | 172689197 | |
| 35258 | 172714757 | 172715975 | |
| 35259 | 172792592 | 172793124 | 224228 |
| 35260 | 172886834 | 172887928 | 224228 |
| 35261 | 172901812 | 172904079 | 224228 |
| 35262 | 172920792 | 172921366 | 224228 |
| 35263 | 172944767 | 172946290 | 224228 |
| 35264 | 173021633 | 173022417 | 224228 |
| 35265 | 173091544 | 173093296 | |
| 35266 | 173096324 | 173097909 | |
| 35267 | 173159002 | 173161089 | 117586 |
| 35268 | 173398504 | 173399583 | 203739 |
| 35269 | 173421043 | 173421599 | 203739 |
| 35270 | 173442660 | 173443711 | |
| 35271 | 173444370 | 173448185 | 117592 |
| 35272 | 173472554 | 173473912 | 162753 |
| 35273 | 173476510 | 173477385 | 162753 |
| 35274 | 173492271 | 173493338 | 162753 |
| 35275 | 173496177 | 173496858 | 162753 |
| 35276 | 173683569 | 173685408 | 076321 |
| 35277 | 173722581 | 173723590 | 076321 |
| 35278 | 173793001 | 173794814 | 117593, 120334 |
| 35279 | 173835692 | 173838474 | 185278, 234741 |
| 35280 | 173883389 | 173884190 | 117601 |
| 35281 | 173885562 | 173887360 | 117601 |
| 35282 | 173894231 | 173896411 | |
| 35283 | 173990260 | 173992474 | 224977, 135870 |
| 35284 | 174127894 | 174129781 | 152061, 227373 |
| 35285 | 174236275 | 174236873 | 152061 |
| 35286 | 174695079 | 174696275 | 152061 |
| 35287 | 174781611 | 174782381 | 152061 |
| 35288 | 174922825 | 174923552 | 229531, 152061 |
| 35289 | 174958890 | 174960485 | 152061 |
| 35290 | 174967413 | 174970220 | 116161 |
| 35291 | 174991668 | 174993415 | 120333, 206659 |
| 35292 | 174998184 | 174999581 | |
| 35293 | 175065139 | 175065838 | 120332 |
| 35294 | 175160949 | 175162708 | 235750 |
| 35295 | 175177983 | 175178840 | |
| 35296 | 175604123 | 175604772 | 116147 |
| 35297 | 176175223 | 176177691 | 236021, 143207 |
| 35298 | 176483644 | 176485661 | 116183 |
| 35299 | 176485815 | 176487773 | 116183 |
| 35300 | 176491447 | 176492287 | 116183 |
| 35301 | 176499827 | 176501010 | 116183 |
| 35302 | 176501678 | 176502673 | 116183 |
| 35303 | 176528760 | 176529605 | 116183 |
| 35304 | 176736776 | 176737547 | 116183 |
| 35305 | 177882099 | 177882645 | |
| 35306 | 177930268 | 177930842 | 254154, 120341 |
| 35307 | 177937286 | 177940176 | 254154, 120341 |
| 35308 | 177992337 | 177992875 | 242193, 254154 |
| 35309 | 178003479 | 178004337 | 242193, 254154 |
| 35310 | 178006448 | 178008093 | 242193, 254154 |
| 35311 | 178029860 | 178030750 | |
| 35312 | 178062251 | 178064489 | 075391, 224687 |
| 35313 | 178070500 | 178071725 | 075391 |
| 35314 | 178094185 | 178098019 | 075391 |
| 35315 | 178193178 | 178194474 | 075391 |
| 35316 | 178206870 | 178209929 | 075391 |
| 35317 | 178386482 | 178387637 | 075391 |
| 35318 | 178497911 | 178500348 | 240021 |
| 35319 | 178501099 | 178502193 | 240021 |
| 35320 | 178505073 | 178509052 | 240021 |
| 35321 | 178509517 | 178512851 | 213057, 184909, 240021 |
| 35322 | 178613212 | 178613793 | |
| 35323 | 178621723 | 178623201 | |
| 35324 | 178624806 | 178625805 | |
| 35325 | 178643574 | 178644339 | |
| 35326 | 178652255 | 178655031 | |
| 35327 | 178693523 | 178696956 | 116191, 273062 |
| 35328 | 178708393 | 178708883 | 116191 |
| 35329 | 178836602 | 178838745 | 116191, 116194 |
| 35330 | 178840688 | 178841378 | 116191 |
| 35331 | 178919537 | 178920539 | |
| 35332 | 178971527 | 178972662 | |
| 35333 | 178994657 | 178997163 | 116199 |
| 35334 | 179000458 | 179001597 | 116199 |
| 35335 | 179050342 | 179052384 | 186283 |
| 35336 | 179058868 | 179059574 | 186283 |
| 35337 | 179060502 | 179061880 | 186283 |
| 35338 | 179095317 | 179095962 | 143322 |
| 35339 | 179097567 | 179099259 | 143322 |
| 35340 | 179120650 | 179121699 | 143322 |
| 35341 | 179143856 | 179145304 | 143322 |
| 35342 | 179197946 | 179199468 | 143322 |
| 35343 | 179262502 | 179264047 | 057252 |
| 35344 | 179334290 | 179335852 | 162779 |
| 35345 | 179842467 | 179843292 | 169905 |
| 35346 | 179844576 | 179847523 | 169905 |
| 35347 | 179850178 | 179853106 | 143337, 272906 |
| 35348 | 179922973 | 179924918 | 135837, 260360 |
| 35349 | 179996981 | 179997745 | 135837 |
| 35350 | 180123103 | 180124165 | 116260 |
| 35351 | 180125953 | 180127310 | 116260 |
| 35352 | 180221473 | 180222432 | 121454 |
| 35353 | 180260091 | 180261240 | 135847 |
| 35354 | 180278376 | 180279762 | 135847 |
| 35355 | 180470751 | 180472893 | 135847 |
| 35356 | 180484847 | 180485975 | |
| 35357 | 180490612 | 180492274 | |
| 35358 | 180496339 | 180496950 | |
| 35359 | 180499223 | 180500228 | |
| 35360 | 180567603 | 180568312 | |
| 35361 | 180600953 | 180602339 | 143324 |
| 35362 | 180831253 | 180831813 | 143324 |
| 35363 | 180922578 | 180924588 | 232586, 243155 |
| 35364 | 180990906 | 180992387 | 135823 |
| 35365 | 181013437 | 181014320 | 153029 |
| 35366 | 181057307 | 181060304 | 272198, 162783 |
| 35367 | 181061905 | 181062595 | 272198 |
| 35368 | 181073641 | 181074812 | |
| 35369 | 181080844 | 181082104 | |
| 35370 | 181095534 | 181096709 | |
| 35371 | 181102749 | 181105640 | |
| 35372 | 181109735 | 181112160 | |
| 35373 | 181224485 | 181225182 | |
| 35374 | 182089605 | 182090397 | |
| 35375 | 182257553 | 182261500 | 228918 |
| 35376 | 182262091 | 182262917 | 228918 |
| 35377 | 182358524 | 182361970 | 135821 |
| 35378 | 182366969 | 182367340 | 203730 |
| 35379 | 182379443 | 182380163 | 203729 |
| 35380 | 182428975 | 182429462 | 121446 |
| 35381 | 182544430 | 182545319 | 135828 |
| 35382 | 182557393 | 182558749 | 135828 |
| 35383 | 182573211 | 182573920 | 143333 |
| 35384 | 182583786 | 182584939 | 261504 |
| 35385 | 182758115 | 182759623 | 135838 |
| 35386 | 182808204 | 182809604 | 135829 |
| 35387 | 182931315 | 182932663 | |
| 35388 | 182988222 | 182989467 | |
| 35389 | 182990792 | 182995981 | 135862 |
| 35390 | 182997847 | 183000031 | 135862 |
| 35391 | 183029585 | 183030294 | 135862 |
| 35392 | 183038898 | 183040014 | 135862 |
| 35393 | 183049514 | 183049901 | 135862 |
| 35394 | 183106067 | 183110139 | 224468, 135862 |
| 35395 | 183148854 | 183150681 | |
| 35396 | 183154546 | 183156289 | 058085 |
| 35397 | 183174241 | 183174845 | 058085 |
| 35398 | 183178182 | 183179457 | 058085 |
| 35399 | 183287269 | 183288049 | 157064 |
| 35400 | 183435955 | 183438028 | 232860 |
| 35401 | 183438475 | 183442792 | 116698, 232860 |
| 35402 | 183483404 | 183484792 | 116698 |
| 35403 | 183537642 | 183538736 | 116701, 116698 |
| 35404 | 183569205 | 183569719 | |
| 35405 | 183572212 | 183572804 | |
| 35406 | 183601097 | 183606463 | 143344, 162704 |
| 35407 | 183609056 | 183610089 | 143344 |
| 35408 | 183645556 | 183646280 | 143344 |
| 35409 | 183667911 | 183669791 | 143344 |
| 35410 | 183703542 | 183704190 | 143344 |
| 35411 | 183722275 | 183723006 | 143344 |
| 35412 | 183773897 | 183774503 | 143344 |
| 35413 | 183850585 | 183851257 | 143344 |
| 35414 | 183861407 | 183862012 | 143344 |
| 35415 | 183884573 | 183885590 | 143344 |
| 35416 | 184006251 | 184007067 | 198756 |
| 35417 | 184019600 | 184021744 | 198860 |
| 35418 | 184377210 | 184377706 | 230470, 116667 |
| 35419 | 184460546 | 184462011 | 116667 |
| 35420 | 184462938 | 184463576 | 116667 |
| 35421 | 184559191 | 184560103 | 116667 |
| 35422 | 184591440 | 184592113 | 116667 |
| 35423 | 184594878 | 184597312 | 116667 |
| 35424 | 184598525 | 184599798 | |
| 35425 | 184601221 | 184603881 | |
| 35426 | 184721188 | 184721939 | 116406 |
| 35427 | 184722730 | 184725172 | 116406 |
| 35428 | 184761181 | 184762859 | 135842 |
| 35429 | 184942201 | 184943976 | 135842 |
| 35430 | 185013924 | 185015573 | 121481 |
| 35431 | 185124951 | 185127078 | 116668, 121486 |
| 35432 | 185284426 | 185287328 | 273004, 116679 |
| 35433 | 185446929 | 185447361 | |
| 35434 | 185503879 | 185504370 | |
| 35435 | 185554812 | 185555452 | 228309 |
| 35436 | 185614999 | 185615881 | |
| 35437 | 185662709 | 185663897 | |
| 35438 | 185702882 | 185703552 | |
| 35439 | 185849412 | 185850891 | 143341 |
| 35440 | 185903031 | 185904512 | 143341 |
| 35441 | 186002921 | 186003434 | 143341 |
| 35442 | 186028422 | 186029806 | 143341 |
| 35443 | 186264690 | 186266017 | 116690 |
| 35444 | 186267943 | 186268460 | 116690 |
| 35445 | 186343673 | 186345814 | 157181, 047410 |
| 35446 | 187902325 | 187903440 | |
| 35447 | 192454725 | 192456159 | |
| 35448 | 192599763 | 192600504 | |
| 35449 | 192669293 | 192672248 | |
| 35450 | 192777115 | 192778494 | 116741 |
| 35451 | 193027498 | 193030260 | 116747, 116750 |
| 35452 | 193073250 | 193075583 | 023572 |
| 35453 | 193080153 | 193081816 | |
| 35454 | 193082984 | 193085908 | |
| 35455 | 193090156 | 193092446 | 134371 |
| 35456 | 193323958 | 193325144 | 232077 |
| 35457 | 193377813 | 193378695 | |
| 35458 | 193386688 | 193388464 | |
| 35459 | 193441791 | 193442712 | |
| 35460 | 193527447 | 193528316 | |
| 35461 | 193598840 | 193600145 | |
| 35462 | 193623596 | 193625067 | |
| 35463 | 193995410 | 193996096 | |
| 35464 | 195297224 | 195297681 | |
| 35465 | 196329836 | 196330907 | 162687 |
| 35466 | 196369822 | 196371011 | 162687 |
| 35467 | 196406535 | 196408348 | 162687 |
| 35468 | 196414716 | 196415382 | 162687 |
| 35469 | 196526660 | 196528790 | 162687 |
| 35470 | 196553567 | 196554441 | 162687 |
| 35471 | 196576952 | 196579166 | 162687 |
| 35472 | 196620614 | 196621706 | 000971 |
| 35473 | 196621875 | 196625154 | 000971 |
| 35474 | 196686565 | 196687507 | 000971 |
| 35475 | 196846746 | 196847527 | 134365, 080910 |
| 35476 | 196856283 | 196857561 | 134365, 080910 |
| 35477 | 196944870 | 196948784 | 134389 |
| 35478 | 196960922 | 196962132 | 134389 |
| 35479 | 197035226 | 197037011 | 143278 |
| 35480 | 197099783 | 197100531 | 066279 |
| 35481 | 197115278 | 197115917 | 066279 |
| 35482 | 197142636 | 197144358 | 177888 |
| 35483 | 197169496 | 197171709 | 134376, 177888 |
| 35484 | 197526295 | 197527009 | 213047 |
| 35485 | 197589605 | 197590435 | 213047 |
| 35486 | 197644408 | 197645598 | 213047 |
| 35487 | 197743555 | 197745987 | 213047 |
| 35488 | 197853282 | 197853703 | |
| 35489 | 197870863 | 197872491 | 203724 |
| 35490 | 197923906 | 197925449 | |
| 35491 | 197963396 | 197964817 | |
| 35492 | 197977225 | 197977971 | |
| 35493 | 197999571 | 198000602 | |
| 35494 | 198056865 | 198057964 | |
| 35495 | 198125124 | 198127465 | 151414 |
| 35496 | 198127526 | 198128972 | 151414 |
| 35497 | 198130965 | 198131794 | 151414 |
| 35498 | 198849764 | 198850901 | 229989 |
| 35499 | 199417021 | 199418874 | |
| 35500 | 199615270 | 199616586 | |
| 35501 | 199653653 | 199655043 | |
| 35502 | 199673292 | 199673821 | |
| 35503 | 199720461 | 199722092 | 231984 |
| 35504 | 199727432 | 199729259 | |
| 35505 | 199763244 | 199763772 | |
| 35506 | 199820217 | 199821355 | |
| 35507 | 199834176 | 199835445 | |
| 35508 | 199945514 | 199946537 | |
| 35509 | 199990523 | 199992661 | |
| 35510 | 199996113 | 199999132 | 116833 |
| 35511 | 200007762 | 200012660 | 116833 |
| 35512 | 200045208 | 200045872 | 116833 |
| 35513 | 200059356 | 200059961 | 116833 |
| 35514 | 200087742 | 200088507 | 116833 |
| 35515 | 200099719 | 200101222 | 116833 |
| 35516 | 200119692 | 200120301 | 116833 |
| 35517 | 200148703 | 200150460 | |
| 35518 | 200200354 | 200202140 | |
| 35519 | 200244505 | 200246005 | |
| 35520 | 200265071 | 200266121 | |
| 35521 | 200270458 | 200272573 | |
| 35522 | 200282874 | 200286575 | 273093 |
| 35523 | 200305390 | 200306054 | |
| 35524 | 200320905 | 200321705 | 203721 |
| 35525 | 200334488 | 200336293 | 203721 |
| 35526 | 200336755 | 200339646 | 203721 |
| 35527 | 200340051 | 200344736 | 203721 |
| 35528 | 200344853 | 200347069 | |
| 35529 | 200347232 | 200350779 | |
| 35530 | 200377695 | 200386691 | 162702 |
| 35531 | 200394307 | 200394821 | |
| 35532 | 200411665 | 200412294 | |
| 35533 | 200446639 | 200448049 | 230623 |
| 35534 | 200448706 | 200449546 | |
| 35535 | 200451874 | 200454159 | |
| 35536 | 200608630 | 200610688 | 118197 |
| 35537 | 200637814 | 200640297 | 260088, 118197 |
| 35538 | 200707454 | 200709856 | 118200 |
| 35539 | 200863811 | 200868505 | 163362 |
| 35540 | 200892353 | 200893239 | 233217 |
| 35541 | 200988232 | 200989316 | 116852 |
| 35542 | 200997046 | 200998174 | 229191 |
| 35543 | 201083131 | 201084387 | 232237 |
| 35544 | 201122610 | 201124313 | 116857 |
| 35545 | 201138612 | 201141458 | 116857 |
| 35546 | 201144036 | 201144796 | |
| 35547 | 201153782 | 201154482 | |
| 35548 | 201278280 | 201279001 | 081277 |
| 35549 | 201364834 | 201369518 | 159166 |
| 35550 | 201372747 | 201375112 | 159173 |
| 35551 | 201429070 | 201431464 | |
| 35552 | 201436974 | 201438938 | 174307 |
| 35553 | 201449361 | 201450278 | |
| 35554 | 201450927 | 201452322 | |
| 35555 | 201457447 | 201459366 | 159176 |
| 35556 | 201469738 | 201477501 | 224536, 159176 |
| 35557 | 201481835 | 201482541 | 224536 |
| 35558 | 201507841 | 201508643 | |
| 35559 | 201681703 | 201684261 | 231871, 134369 |
| 35560 | 201797921 | 201799172 | 198700, 231871 |
| 35561 | 201817138 | 201820240 | 198700 |
| 35562 | 201854319 | 201855095 | |
| 35563 | 201857438 | 201858633 | 198892 |
| 35564 | 201864933 | 201865464 | 223774 |
| 35565 | 201923663 | 201925627 | 134375 |
| 35566 | 201951583 | 201952917 | 176393 |
| 35567 | 201975053 | 201975541 | 176393, 234678 |
| 35568 | 201978469 | 201980861 | 249007, 234678, 163435 |
| 35569 | 201985025 | 201985742 | 163435 |
| 35570 | 201986487 | 201988795 | |
| 35571 | 201991629 | 201992693 | |
| 35572 | 202002975 | 202004815 | |
| 35573 | 202006788 | 202007363 | |
| 35574 | 202012396 | 202012787 | |
| 35575 | 202014891 | 202017221 | |
| 35576 | 202025541 | 202028296 | |
| 35577 | 202075567 | 202077851 | |
| 35578 | 202081612 | 202083294 | |
| 35579 | 202087106 | 202088572 | |
| 35580 | 202111813 | 202114501 | 143862 |
| 35581 | 202124262 | 202124909 | 143851 |
| 35582 | 202317402 | 202318788 | 077157 |
| 35583 | 202522736 | 202523199 | 077157 |
| 35584 | 202541580 | 202542534 | 077157 |
| 35585 | 202548311 | 202549791 | 077157 |
| 35586 | 202554669 | 202560409 | 143858, 077157 |
| 35587 | 202757657 | 202758452 | 117139 |
| 35588 | 202775947 | 202777969 | 117139 |
| 35589 | 202779274 | 202780507 | 228288, 260021 |
| 35590 | 202829800 | 202831525 | 234996, 214796 |
| 35591 | 202857166 | 202858532 | 183155 |
| 35592 | 202895228 | 202897018 | 117153 |
| 35593 | 202926624 | 202928141 | 159346 |
| 35594 | 202935647 | 202937392 | 159348 |
| 35595 | 202975208 | 202977466 | 163444 |
| 35596 | 203071189 | 203071732 | 163485 |
| 35597 | 203155693 | 203156681 | 133048 |
| 35598 | 203213868 | 203214365 | 133063 |
| 35599 | 203273764 | 203276272 | 159388, 233791 |
| 35600 | 203504612 | 203508605 | |
| 35601 | 203526508 | 203529057 | |
| 35602 | 203619304 | 203620144 | 058668 |
| 35603 | 203725742 | 203726186 | |
| 35604 | 203738398 | 203739273 | 122188 |
| 35605 | 203764376 | 203766187 | 058673, 257315 |
| 35606 | 203827090 | 203827576 | |
| 35607 | 203829172 | 203832007 | 182004 |
| 35608 | 204042005 | 204045105 | 143842 |
| 35609 | 204049275 | 204050110 | 143842 |
| 35610 | 204053244 | 204053903 | 143842 |
| 35611 | 204061457 | 204063339 | 143842 |
| 35612 | 204095807 | 204097242 | 143842 |
| 35613 | 204097811 | 204100884 | 143845, 261065 |
| 35614 | 204113555 | 204114847 | 143845 |
| 35615 | 204115739 | 204116601 | 143845 |
| 35616 | 204119031 | 204122002 | 143845 |
| 35617 | 204140664 | 204142064 | |
| 35618 | 204182171 | 204183923 | 174567 |
| 35619 | 204194862 | 204195953 | 143850 |
| 35620 | 204223049 | 204223777 | 143850 |
| 35621 | 204235427 | 204236174 | 143850 |
| 35622 | 204255934 | 204257845 | 143850 |
| 35623 | 204263376 | 204263984 | 143850 |
| 35624 | 204264509 | 204265441 | 143850 |
| 35625 | 204345762 | 204348625 | 226330, 143850 |
| 35626 | 204379235 | 204381694 | 158615, 226330 |
| 35627 | 204385380 | 204389940 | 226330 |
| 35628 | 204391461 | 204392839 | 133056, 226330 |
| 35629 | 204394819 | 204396175 | 226330, 133056 |
| 35630 | 204404501 | 204405613 | 226330, 133056 |
| 35631 | 204408870 | 204409683 | 133056 |
| 35632 | 204419581 | 204420770 | 133056 |
| 35633 | 204462478 | 204464433 | 133056 |
| 35634 | 204475240 | 204476732 | |
| 35635 | 204484827 | 204486581 | 198625 |
| 35636 | 204534577 | 204535594 | 198625 |
| 35637 | 204560060 | 204561910 | |
| 35638 | 204572254 | 204572689 | 240710 |
| 35639 | 204592326 | 204592914 | 170382 |
| 35640 | 204653778 | 204655048 | 170382 |
| 35641 | 204677478 | 204678249 | |
| 35642 | 204685716 | 204686407 | |
| 35643 | 204694351 | 204696608 | |
| 35644 | 204775877 | 204776900 | |
| 35645 | 204777082 | 204777754 | |
| 35646 | 204851430 | 204853491 | 163531 |
| 35647 | 204854188 | 204858827 | 163531 |
| 35648 | 204892363 | 204894186 | 163531 |
| 35649 | 204963691 | 204964901 | 163531 |
| 35650 | 204972297 | 204973268 | 163531 |
| 35651 | 205006480 | 205008045 | |
| 35652 | 205089914 | 205092263 | 117222 |
| 35653 | 205113768 | 205114474 | 133059 |
| 35654 | 205119586 | 205120287 | 133059 |
| 35655 | 205160333 | 205161459 | 133059 |
| 35656 | 205179698 | 205181180 | 133059 |
| 35657 | 205241845 | 205244947 | 133069 |
| 35658 | 205252864 | 205254914 | |
| 35659 | 205262251 | 205268627 | |
| 35660 | 205270005 | 205271789 | 163545 |
| 35661 | 205285695 | 205291565 | 163545 |
| 35662 | 205293552 | 205295019 | |
| 35663 | 205461264 | 205461862 | |
| 35664 | 205473346 | 205474602 | 117266 |
| 35665 | 205480811 | 205482185 | 117266 |
| 35666 | 205599365 | 205602150 | 158711 |
| 35667 | 205632701 | 205634780 | 158715 |
| 35668 | 205638590 | 205639179 | 158715 |
| 35669 | 205639230 | 205640548 | 158715 |
| 35670 | 205640909 | 205642676 | 158715 |
| 35671 | 205647681 | 205649906 | 158715 |
| 35672 | 205677896 | 205678545 | |
| 35673 | 205683258 | 205683786 | 268313, 069275 |
| 35674 | 205695498 | 205696229 | 069275 |
| 35675 | 205698086 | 205699326 | 069275 |
| 35676 | 205717566 | 205720235 | 069275 |
| 35677 | 205743617 | 205744760 | 117280 |
| 35678 | 205781506 | 205783146 | 133065 |
| 35679 | 205914081 | 205914618 | |
| 35680 | 206228144 | 206228617 | 198049 |
| 35681 | 206259116 | 206259642 | 196533 |
| 35682 | 206289999 | 206290775 | 240754 |
| 35683 | 206292083 | 206293181 | 240754 |
| 35684 | 206311207 | 206311837 | |
| 35685 | 206643459 | 206644737 | 143466 |
| 35686 | 206654423 | 206654981 | 143466 |
| 35687 | 206669561 | 206670644 | 143466, 162888 |
| 35688 | 206671944 | 206672683 | |
| 35689 | 206674330 | 206675214 | |
| 35690 | 206677005 | 206677900 | 261000 |
| 35691 | 206679036 | 206682698 | 136653 |
| 35692 | 206690947 | 206692072 | 136653 |
| 35693 | 206699335 | 206700308 | 136653 |
| 35694 | 206713547 | 206714244 | 136653 |
| 35695 | 206728552 | 206730768 | 136653 |
| 35696 | 206751598 | 206754447 | 143486, 136653 |
| 35697 | 206784694 | 206786226 | 143486 |
| 35698 | 206806623 | 206809814 | 237605, 143479 |
| 35699 | 206832125 | 206833464 | 143479 |
| 35700 | 206840191 | 206840919 | 143479 |
| 35701 | 206857961 | 206860270 | 162889 |
| 35702 | 206864907 | 206867541 | 162889 |
| 35703 | 206872631 | 206874448 | 162889 |
| 35704 | 206882149 | 206883989 | 162889 |
| 35705 | 206887526 | 206888460 | 162889 |
| 35706 | 206890798 | 206891191 | 162889 |
| 35707 | 206896561 | 206898200 | 162889 |
| 35708 | 207062927 | 207065104 | |
| 35709 | 207115133 | 207115778 | 162896 |
| 35710 | 207122461 | 207123278 | |
| 35711 | 207124572 | 207126203 | |
| 35712 | 207128584 | 207129480 | |
| 35713 | 207142105 | 207142907 | 162897 |
| 35714 | 207143431 | 207144621 | 162897 |
| 35715 | 207198292 | 207199912 | 182795 |
| 35716 | 207223158 | 207227386 | 180667, 123836 |
| 35717 | 207261585 | 207265299 | 123843 |
| 35718 | 207276698 | 207277957 | 123838 |
| 35719 | 207301722 | 207302397 | 123838 |
| 35720 | 207378399 | 207379277 | |
| 35721 | 207412826 | 207415471 | |
| 35722 | 207494055 | 207496133 | 196352 |
| 35723 | 207777059 | 207777681 | 203710, 236911 |
| 35724 | 207880213 | 207881336 | 197721 |
| 35725 | 207923919 | 207926458 | 117335 |
| 35726 | 207979154 | 207980045 | 203709 |
| 35727 | 207985117 | 207986376 | 203709 |
| 35728 | 207996074 | 207998378 | 203709 |
| 35729 | 207998630 | 208001346 | 203709 |
| 35730 | 208041737 | 208043029 | 203709 |
| 35731 | 208063396 | 208064317 | 174059 |
| 35732 | 208136015 | 208137873 | |
| 35733 | 208232387 | 208233426 | 076356 |
| 35734 | 208275071 | 208275962 | 076356 |
| 35735 | 208289270 | 208289733 | 076356 |
| 35736 | 208293052 | 208294396 | 076356 |
| 35737 | 208308812 | 208309234 | 076356 |
| 35738 | 208331938 | 208332793 | 076356 |
| 35739 | 208345260 | 208346558 | 076356 |
| 35740 | 208347306 | 208352461 | 076356 |
| 35741 | 208356143 | 208356793 | 076356 |
| 35742 | 208357560 | 208358908 | 076356 |
| 35743 | 208374350 | 208375190 | 076356 |
| 35744 | 208409280 | 208409926 | 076356 |
| 35745 | 208412100 | 208413023 | 076356 |
| 35746 | 208413026 | 208413873 | 076356 |
| 35747 | 208416000 | 208419145 | 076356 |
| 35748 | 208425456 | 208426612 | |
| 35749 | 208465428 | 208466891 | |
| 35750 | 208505220 | 208506046 | |
| 35751 | 208649616 | 208650579 | |
| 35752 | 209247962 | 209248681 | |
| 35753 | 209269178 | 209270010 | |
| 35754 | 209341287 | 209341983 | |
| 35755 | 209571746 | 209573181 | |
| 35756 | 209576676 | 209577721 | |
| 35757 | 209701347 | 209702018 | 224260 |
| 35758 | 209779300 | 209784635 | 008118 |
| 35759 | 209800392 | 209801903 | 196878 |
| 35760 | 209821485 | 209831883 | 196878 |
| 35761 | 209835658 | 209838112 | 227591 |
| 35762 | 209843955 | 209844648 | 227591 |
| 35763 | 209845539 | 209849696 | 123689, 227591 |
| 35764 | 209877702 | 209879251 | 227591, 117594 |
| 35765 | 209893456 | 209895846 | 227591, 117594 |
| 35766 | 209897321 | 209898298 | 227591, 117594 |
| 35767 | 209914360 | 209917580 | |
| 35768 | 209920506 | 209921718 | |
| 35769 | 209957238 | 209958828 | 162757 |
| 35770 | 209960698 | 209961511 | 232222, 117595 |
| 35771 | 209974368 | 209976115 | 117595 |
| 35772 | 209981412 | 209981924 | |
| 35773 | 210000913 | 210002121 | 117597 |
| 35774 | 210011341 | 210014784 | 117597 |
| 35775 | 210501755 | 210503137 | 054392 |
| 35776 | 210520139 | 210521393 | 054392 |
| 35777 | 210532355 | 210533071 | 054392 |
| 35778 | 210545239 | 210548338 | 200972, 054392 |
| 35779 | 210618536 | 210619223 | 054392 |
| 35780 | 210770362 | 210772069 | 054392 |
| 35781 | 210879317 | 210880241 | 143473 |
| 35782 | 211072975 | 211073590 | 143473 |
| 35783 | 211431499 | 211434619 | 117625 |
| 35784 | 211478218 | 211479328 | 117625 |
| 35785 | 211499604 | 211500844 | 082512 |
| 35786 | 211555674 | 211557207 | 153363 |
| 35787 | 211643238 | 211643816 | |
| 35788 | 211687908 | 211689527 | |
| 35789 | 211689626 | 211690306 | |
| 35790 | 211694610 | 211695313 | |
| 35791 | 211747716 | 211748804 | 170385 |
| 35792 | 211749344 | 211754053 | 170385 |
| 35793 | 211769508 | 211770218 | |
| 35794 | 211781294 | 211782106 | |
| 35795 | 211782435 | 211783279 | |
| 35796 | 211786616 | 211787296 | |
| 35797 | 211805767 | 211807393 | |
| 35798 | 211809301 | 211810620 | 228792 |
| 35799 | 211812787 | 211814082 | 227764, 228792 |
| 35800 | 211816609 | 211817781 | 227764 |
| 35801 | 211820743 | 211824693 | 227764 |
| 35802 | 211848878 | 211849615 | 231057, 117650 |
| 35803 | 212002238 | 212004866 | 229258, 123684 |
| 35804 | 212059103 | 212060124 | |
| 35805 | 212060266 | 212061986 | |
| 35806 | 212076344 | 212078000 | |
| 35807 | 212081957 | 212084700 | |
| 35808 | 212090345 | 212094997 | |
| 35809 | 212101334 | 212103307 | |
| 35810 | 212117497 | 212118669 | 143493 |
| 35811 | 212124681 | 212125901 | 143493 |
| 35812 | 212158625 | 212159495 | 143493 |
| 35813 | 212185222 | 212186093 | 143493 |
| 35814 | 212203668 | 212204769 | 143493 |
| 35815 | 212207667 | 212209459 | 143476, 143493 |
| 35816 | 212332161 | 212332988 | |
| 35817 | 212401744 | 212402712 | 226251 |
| 35818 | 212410739 | 212412476 | 226251 |
| 35819 | 212414960 | 212416874 | |
| 35820 | 212427919 | 212430927 | |
| 35821 | 212433869 | 212435490 | |
| 35822 | 212458052 | 212460566 | 066027 |
| 35823 | 212489622 | 212490323 | 066027, 234915 |
| 35824 | 212587383 | 212588338 | 065600 |
| 35825 | 212605840 | 212607045 | 117691 |
| 35826 | 212658059 | 212658633 | |
| 35827 | 212661607 | 212663048 | |
| 35828 | 212691399 | 212692415 | |
| 35829 | 212730906 | 212733337 | 260805 |
| 35830 | 212768353 | 212771661 | 162772 |
| 35831 | 212779475 | 212783748 | 162772 |
| 35832 | 212838412 | 212839342 | 237980 |
| 35833 | 212872531 | 212873592 | 123685 |
| 35834 | 212894698 | 212895501 | |
| 35835 | 212964250 | 212966284 | 203705, 117697 |
| 35836 | 212989794 | 212990709 | 203705 |
| 35837 | 213006516 | 213007695 | 185523 |
| 35838 | 213030701 | 213032424 | 162769, 198468 |
| 35839 | 213104090 | 213104996 | |
| 35840 | 213188073 | 213189767 | 174606 |
| 35841 | 213223831 | 213225462 | 136643 |
| 35842 | 213296384 | 213297437 | 136643 |
| 35843 | 213374734 | 213375401 | 136643 |
| 35844 | 213449143 | 213450786 | |
| 35845 | 213457932 | 213458374 | |
| 35846 | 213545053 | 213546112 | |
| 35847 | 213743011 | 213744344 | |
| 35848 | 213898445 | 213898826 | |
| 35849 | 213902086 | 213902938 | |
| 35850 | 213932907 | 213933674 | 228255 |
| 35851 | 214031724 | 214032386 | 230461 |
| 35852 | 214107772 | 214108526 | 230461 |
| 35853 | 214129400 | 214130225 | 230461 |
| 35854 | 214131647 | 214132266 | 230461 |
| 35855 | 214149903 | 214151404 | 230461 |
| 35856 | 214155571 | 214164335 | 117707, 230461 |
| 35857 | 214200157 | 214204569 | 272167, 117707 |
| 35858 | 214215851 | 214219842 | |
| 35859 | 214222542 | 214225821 | |
| 35860 | 214241672 | 214242784 | |
| 35861 | 214248666 | 214249503 | |
| 35862 | 214295954 | 214297276 | |
| 35863 | 214299847 | 214300730 | |
| 35864 | 214385974 | 214388658 | |
| 35865 | 214389309 | 214391531 | |
| 35866 | 214453453 | 214455703 | 143499 |
| 35867 | 214458068 | 214458532 | 143499 |
| 35868 | 214485666 | 214486775 | 143499 |
| 35869 | 214488839 | 214491469 | 143499 |
| 35870 | 214611969 | 214613912 | 152104 |
| 35871 | 214724081 | 214726048 | 152104 |
| 35872 | 215038058 | 215038605 | |
| 35873 | 215196644 | 215197310 | 082482 |
| 35874 | 215716418 | 215717157 | |
| 35875 | 215739848 | 215742083 | 136636 |
| 35876 | 215756448 | 215757191 | 136636 |
| 35877 | 215804112 | 215805346 | 042781 |
| 35878 | 215808871 | 215811818 | 042781 |
| 35879 | 215813719 | 215815280 | 042781 |
| 35880 | 215816945 | 215818054 | 042781 |
| 35881 | 215833253 | 215834040 | 042781 |
| 35882 | 215834276 | 215834984 | 042781 |
| 35883 | 216038332 | 216038908 | 042781 |
| 35884 | 216593380 | 216594442 | 042781 |
| 35885 | 216672744 | 216673591 | |
| 35886 | 216773627 | 216775106 | 196482 |
| 35887 | 217803770 | 217805104 | 162814, 092978 |
| 35888 | 218457677 | 218459498 | 067533 |
| 35889 | 218518025 | 218522843 | 092969, 232480 |
| 35890 | 218552776 | 218554808 | 092969 |
| 35891 | 218570701 | 218571898 | 092969 |
| 35892 | 218632807 | 218633620 | |
| 35893 | 218646720 | 218655390 | |
| 35894 | 218660074 | 218664136 | |
| 35895 | 218667272 | 218673672 | |
| 35896 | 218809554 | 218810609 | |
| 35897 | 218819685 | 218820271 | |
| 35898 | 218878064 | 218881935 | |
| 35899 | 218883683 | 218886798 | |
| 35900 | 218908366 | 218909221 | |
| 35901 | 219038846 | 219039543 | |
| 35902 | 219247235 | 219249075 | |
| 35903 | 219260413 | 219266158 | 228063 |
| 35904 | 219346421 | 219351143 | 143353, 228063 |
| 35905 | 219352485 | 219353152 | 143353 |
| 35906 | 219360226 | 219364477 | 143353 |
| 35907 | 219410095 | 219411555 | |
| 35908 | 219483417 | 219484100 | |
| 35909 | 220090347 | 220092325 | 196660 |
| 35910 | 220099066 | 220102954 | 196660 |
| 35911 | 220113592 | 220115862 | 196660 |
| 35912 | 220128016 | 220129014 | 196660 |
| 35913 | 220166821 | 220167455 | 136628 |
| 35914 | 220180383 | 220181207 | 136628 |
| 35915 | 220218834 | 220220455 | 136628 |
| 35916 | 220262474 | 220263747 | 162813 |
| 35917 | 220266643 | 220268218 | 067704 |
| 35918 | 220444683 | 220446503 | 118873 |
| 35919 | 220473769 | 220474238 | |
| 35920 | 220854383 | 220855459 | |
| 35921 | 220863263 | 220864930 | 162817 |
| 35922 | 220871919 | 220872577 | 162817 |
| 35923 | 220879136 | 220879586 | |
| 35924 | 220905400 | 220908897 | |
| 35925 | 220920704 | 220922879 | 117791 |
| 35926 | 220924164 | 220925380 | 117791 |
| 35927 | 220935093 | 220935844 | 117791 |
| 35928 | 220940311 | 220942065 | 117791 |
| 35929 | 220959338 | 220961086 | 186205 |
| 35930 | 220961220 | 220961943 | 186205 |
| 35931 | 220963068 | 220963493 | 186205 |
| 35932 | 220982295 | 220984693 | 186205 |
| 35933 | 220997760 | 220998457 | |
| 35934 | 221000785 | 221001998 | |
| 35935 | 221045388 | 221046191 | 257551 |
| 35936 | 221051553 | 221055158 | 136630, 257551 |
| 35937 | 221079274 | 221080988 | |
| 35938 | 221094091 | 221095370 | |
| 35939 | 221133215 | 221137997 | |
| 35940 | 221139139 | 221141225 | |
| 35941 | 221214096 | 221214817 | |
| 35942 | 221290331 | 221292459 | |
| 35943 | 221390155 | 221390833 | |
| 35944 | 221403568 | 221404500 | |
| 35945 | 221488487 | 221490847 | |
| 35946 | 221508513 | 221510081 | 234754 |
| 35947 | 221521034 | 221521508 | |
| 35948 | 221539852 | 221540514 | |
| 35949 | 221611999 | 221614602 | |
| 35950 | 221661093 | 221661613 | |
| 35951 | 221721698 | 221723324 | 227585 |
| 35952 | 221734965 | 221737818 | |
| 35953 | 221740673 | 221741956 | |
| 35954 | 221776109 | 221776690 | |
| 35955 | 221793043 | 221795621 | |
| 35956 | 221840852 | 221841678 | |
| 35957 | 221849099 | 221850201 | |
| 35958 | 221870917 | 221873431 | |
| 35959 | 221881417 | 221882991 | 143507 |
| 35960 | 221888370 | 221892555 | 143507 |
| 35961 | 221912221 | 221917722 | 143507 |
| 35962 | 221947929 | 221949158 | |
| 35963 | 221996429 | 221999146 | |
| 35964 | 222012249 | 222015164 | 227925 |
| 35965 | 222018340 | 222020686 | |
| 35966 | 222059196 | 222061673 | 238042 |
| 35967 | 222110902 | 222111291 | 238042 |
| 35968 | 222134482 | 222136068 | 238042 |
| 35969 | 222138065 | 222139382 | 238042 |
| 35970 | 222199421 | 222200135 | |
| 35971 | 222212255 | 222212727 | |
| 35972 | 222231208 | 222232085 | 232679 |
| 35973 | 222234602 | 222236505 | 232679 |
| 35974 | 222244555 | 222245314 | |
| 35975 | 222278645 | 222279258 | 236230 |
| 35976 | 222628332 | 222629381 | |
| 35977 | 222638097 | 222640015 | |
| 35978 | 222694219 | 222696780 | 143512 |
| 35979 | 222729329 | 222730254 | |
| 35980 | 222754850 | 222756086 | 143498 |
| 35981 | 222762321 | 222764246 | 225265, 143498 |
| 35982 | 222790280 | 222792335 | 154305 |
| 35983 | 222816508 | 222818464 | 154305 |
| 35984 | 222884478 | 222887493 | 162819, 186063 |
| 35985 | 222950803 | 222951763 | |
| 35986 | 222987416 | 222989408 | 228106, 154309 |
| 35987 | 223101372 | 223102062 | 154309 |
| 35988 | 223173743 | 223174729 | 154309 |
| 35989 | 223180339 | 223181164 | |
| 35990 | 223184459 | 223185058 | |
| 35991 | 223213369 | 223213957 | |
| 35992 | 223218885 | 223220003 | |
| 35993 | 223221196 | 223221884 | |
| 35994 | 223254141 | 223255287 | |
| 35995 | 223350916 | 223352096 | |
| 35996 | 223353525 | 223355443 | 226601 |
| 35997 | 223421509 | 223422899 | 143502 |
| 35998 | 223423166 | 223424061 | 143502 |
| 35999 | 223485427 | 223486230 | 143502 |
| 36000 | 223537029 | 223537984 | 143502 |
| 36001 | 223575061 | 223576734 | |
| 36002 | 223590722 | 223591437 | |
| 36003 | 223808618 | 223811154 | 203697 |
| 36004 | 223822800 | 223823361 | 203697 |
| 36005 | 223826956 | 223830955 | 203697 |
| 36006 | 223840987 | 223844095 | 203697 |
| 36007 | 223894678 | 223896366 | 162909 |
| 36008 | 223899513 | 223902065 | 162909 |
| 36009 | 223908520 | 223909800 | 162909 |
| 36010 | 224002303 | 224004896 | 143514 |
| 36011 | 224031619 | 224035105 | 143514 |
| 36012 | 224072821 | 224076871 | |
| 36013 | 224253091 | 224253526 | |
| 36014 | 224294118 | 224295234 | 252484 |
| 36015 | 224301423 | 224303131 | 143756 |
| 36016 | 224356445 | 224357216 | |
| 36017 | 224370216 | 224372218 | 143753 |
| 36018 | 224400145 | 224400682 | 232628 |
| 36019 | 224517029 | 224519031 | 143748 |
| 36020 | 224544388 | 224545749 | 143771 |
| 36021 | 224618187 | 224619550 | 162923 |
| 36022 | 224620745 | 224623598 | 143786, 162923 |
| 36023 | 224626439 | 224627132 | 143786 |
| 36024 | 224644151 | 224645678 | 143786 |
| 36025 | 224690673 | 224692060 | 143786 |
| 36026 | 224693040 | 224694414 | 143786 |
| 36027 | 224700268 | 224700857 | 143786 |
| 36028 | 224895331 | 224896533 | 143786 |
| 36029 | 224917885 | 224922110 | 229400, 143786 |
| 36030 | 224969380 | 224970137 | |
| 36031 | 225116874 | 225118306 | 185842 |
| 36032 | 225600316 | 225601248 | 203691, 143815 |
| 36033 | 225614709 | 225617132 | 143815 |
| 36034 | 225627973 | 225630272 | |
| 36035 | 225632508 | 225633371 | |
| 36036 | 225641675 | 225643046 | 234476 |
| 36037 | 225695499 | 225697982 | 154380 |
| 36038 | 225839463 | 225842422 | 154380 |
| 36039 | 225842699 | 225843986 | |
| 36040 | 225858756 | 225859850 | |
| 36041 | 225878849 | 225880078 | |
| 36042 | 225880729 | 225881314 | |
| 36043 | 225881758 | 225882515 | |
| 36044 | 225922769 | 225925513 | 226349, 227496 |
| 36045 | 225934018 | 225935351 | 227496 |
| 36046 | 225942506 | 225943546 | |
| 36047 | 225964969 | 225966648 | 143742 |
| 36048 | 225997559 | 225999716 | 143819 |
| 36049 | 226001030 | 226001784 | 143819 |
| 36050 | 226004039 | 226006777 | 143819 |
| 36051 | 226008245 | 226009058 | 143819 |
| 36052 | 226012402 | 226013275 | 143819 |
| 36053 | 226014052 | 226014805 | 143819 |
| 36054 | 226065780 | 226067651 | 196187 |
| 36055 | 226068761 | 226071222 | 196187 |
| 36056 | 226073702 | 226074546 | 255835, 243709 |
| 36057 | 226077348 | 226079388 | 255835, 243709 |
| 36058 | 226084631 | 226085329 | 255835, 243709 |
| 36059 | 226111000 | 226112851 | 143811, 255835 |
| 36060 | 226186008 | 226187655 | 143751 |
| 36061 | 226216507 | 226217815 | |
| 36062 | 226221883 | 226222876 | |
| 36063 | 226233876 | 226234398 | |
| 36064 | 226249078 | 226251609 | 163041, 272562 |
| 36065 | 226270471 | 226271916 | 225518 |
| 36066 | 226297274 | 226298738 | |
| 36067 | 226308976 | 226310937 | |
| 36068 | 226315180 | 226316151 | |
| 36069 | 226322435 | 226323715 | |
| 36070 | 226373215 | 226375212 | 182827 |
| 36071 | 226495992 | 226497421 | 183814 |
| 36072 | 226593626 | 226596472 | 143799 |
| 36073 | 226675481 | 226676538 | |
| 36074 | 226729701 | 226730872 | |
| 36075 | 226890567 | 226891983 | 143772 |
| 36076 | 226898720 | 226899349 | 143772 |
| 36077 | 227051492 | 227055035 | |
| 36078 | 227055110 | 227055814 | |
| 36079 | 227057451 | 227060120 | 143801 |
| 36080 | 227064336 | 227065868 | 143801 |
| 36081 | 227069815 | 227071195 | 143801 |
| 36082 | 227125904 | 227129171 | 163050 |
| 36083 | 227132191 | 227135116 | 163050 |
| 36084 | 227152399 | 227153081 | 163050 |
| 36085 | 227155298 | 227155807 | 163050 |
| 36086 | 227161508 | 227163003 | 163050 |
| 36087 | 227177763 | 227178393 | 143776 |
| 36088 | 227430733 | 227432300 | 143776 |
| 36089 | 227503323 | 227507075 | 143776 |
| 36090 | 227510223 | 227511378 | |
| 36091 | 227531644 | 227532211 | |
| 36092 | 227729304 | 227730930 | |
| 36093 | 227750966 | 227752052 | 181450 |
| 36094 | 227915710 | 227917109 | 143740 |
| 36095 | 227922057 | 227924273 | 081692, 143740 |
| 36096 | 228122345 | 228123720 | 143816 |
| 36097 | 228269124 | 228272228 | 143761 |
| 36098 | 228290236 | 228291268 | 143793 |
| 36099 | 228295855 | 228298159 | 162910 |
| 36100 | 228318614 | 228319189 | |
| 36101 | 228327329 | 228329586 | 143774 |
| 36102 | 228352868 | 228354994 | 181873, 203684 |
| 36103 | 228593197 | 228595233 | 231563, 154370 |
| 36104 | 228611040 | 228611707 | |
| 36105 | 228639906 | 228640883 | |
| 36106 | 228673730 | 228676996 | 168159 |
| 36107 | 228859395 | 228860292 | |
| 36108 | 228870235 | 228874002 | 116574 |
| 36109 | 228918394 | 228919787 | |
| 36110 | 228939153 | 228939651 | |
| 36111 | 228945422 | 228946236 | |
| 36112 | 228956952 | 228957863 | |
| 36113 | 228966728 | 228967455 | |
| 36114 | 228972108 | 228975716 | |
| 36115 | 228977339 | 228978841 | |
| 36116 | 228996377 | 228997814 | |
| 36117 | 229002190 | 229002694 | |
| 36118 | 229038607 | 229039278 | |
| 36119 | 229070448 | 229072350 | |
| 36120 | 229099164 | 229101016 | |
| 36121 | 229162784 | 229163883 | |
| 36122 | 229234466 | 229235345 | |
| 36123 | 229238443 | 229239272 | |
| 36124 | 229244367 | 229245349 | |
| 36125 | 229248521 | 229249418 | |
| 36126 | 229252961 | 229254014 | |
| 36127 | 229260487 | 229260932 | |
| 36128 | 229265631 | 229266502 | |
| 36129 | 229267142 | 229268145 | |
| 36130 | 229283685 | 229284501 | |
| 36131 | 229326729 | 229329116 | |
| 36132 | 229355874 | 229358363 | |
| 36133 | 229358740 | 229359801 | 233920 |
| 36134 | 229360129 | 229361586 | 233920 |
| 36135 | 229365046 | 229365992 | |
| 36136 | 229405550 | 229408246 | 240524, 168118, 177788 |
| 36137 | 229409361 | 229409994 | 168118 |
| 36138 | 229415720 | 229416182 | 168118 |
| 36139 | 229431410 | 229433917 | 168118 |
| 36140 | 229433988 | 229435281 | 168118 |
| 36141 | 229446507 | 229447202 | |
| 36142 | 229477678 | 229479099 | 154429 |
| 36143 | 229643414 | 229645802 | 223635, 069248 |
| 36144 | 229693164 | 229695442 | 135776 |
| 36145 | 229761563 | 229762807 | 135763, 135801 |
| 36146 | 230023008 | 230025537 | |
| 36147 | 230040690 | 230042026 | |
| 36148 | 230146628 | 230148348 | |
| 36149 | 230202043 | 230206711 | 143641 |
| 36150 | 230208289 | 230210218 | 143641 |
| 36151 | 230218475 | 230222445 | 143641 |
| 36152 | 230225721 | 230228084 | 143641 |
| 36153 | 230239254 | 230242976 | 143641 |
| 36154 | 230248331 | 230250793 | 143641 |
| 36155 | 230256663 | 230257153 | 143641 |
| 36156 | 230266961 | 230267566 | 143641 |
| 36157 | 230269506 | 230270058 | 143641 |
| 36158 | 230289700 | 230290133 | 143641 |
| 36159 | 230294178 | 230295868 | 143641 |
| 36160 | 230296590 | 230297837 | 143641 |
| 36161 | 230320999 | 230322403 | 143641 |
| 36162 | 230462338 | 230464039 | 177614 |
| 36163 | 230485998 | 230486994 | 177614 |
| 36164 | 230487203 | 230487790 | 177614 |
| 36165 | 230516575 | 230518853 | 177614 |
| 36166 | 230561674 | 230562683 | |
| 36167 | 230777885 | 230779277 | 135775 |
| 36168 | 230815761 | 230816893 | 135775 |
| 36169 | 230843537 | 230845244 | 135744 |
| 36170 | 230846777 | 230850791 | 135744, 244137 |
| 36171 | 230860961 | 230861771 | 244137 |
| 36172 | 230864163 | 230865200 | 244137 |
| 36173 | 230886510 | 230887837 | 135773, 244137 |
| 36174 | 230960157 | 230962428 | 225656 |
| 36175 | 230984507 | 230986492 | 119280 |
| 36176 | 231002331 | 231005273 | 119280 |
| 36177 | 231113504 | 231115598 | 173409, 143643 |
| 36178 | 231174992 | 231176242 | 182118 |
| 36179 | 231189131 | 231189983 | |
| 36180 | 231297666 | 231298375 | 119283 |
| 36181 | 231330553 | 231331817 | 119283 |
| 36182 | 231346884 | 231347937 | 119283 |
| 36183 | 231355322 | 231356138 | 119283 |
| 36184 | 231368779 | 231370608 | 143633 |
| 36185 | 231371751 | 231372448 | 143633 |
| 36186 | 231375911 | 231377991 | 116906, 143633 |
| 36187 | 231472504 | 231474927 | 010072, 116903 |
| 36188 | 231518865 | 231522940 | 135766 |
| 36189 | 231528103 | 231532499 | 135766 |
| 36190 | 231555705 | 231559994 | 135766 |
| 36191 | 231663437 | 231665307 | 116918, 270106, 233461 |
| 36192 | 232673859 | 232674747 | 116991 |
| 36193 | 232764763 | 232766944 | |
| 36194 | 232814035 | 232814659 | |
| 36195 | 232817930 | 232818382 | |
| 36196 | 232822870 | 232823555 | |
| 36197 | 232839712 | 232841780 | |
| 36198 | 232844944 | 232845715 | |
| 36199 | 232900155 | 232903657 | |
| 36200 | 232940346 | 232942039 | 212916 |
| 36201 | 232980354 | 232981226 | |
| 36202 | 233004463 | 233005260 | |
| 36203 | 233085382 | 233087079 | 135778 |
| 36204 | 233396721 | 233398173 | 135749 |
| 36205 | 233462713 | 233464501 | 143674 |
| 36206 | 233495144 | 233495751 | 143674 |
| 36207 | 233748972 | 233751738 | 135750 |
| 36208 | 233789864 | 233793345 | 135750 |
| 36209 | 233808200 | 233810427 | 135750 |
| 36210 | 233856470 | 233858522 | |
| 3621 1 | 234044679 | 234045781 | 183780 |
| 36212 | 234321317 | 234322606 | 183780 |
| 36213 | 234456273 | 234456708 | 183780 |
| 36214 | 234508280 | 234510298 | 231663, 168275, 273367 |
| 36215 | 234594078 | 234594627 | 059588 |
| 36216 | 234613323 | 234615270 | 059588 |
| 36217 | 234634194 | 234638140 | |
| 36218 | 234638321 | 234639395 | |
| 36219 | 234640698 | 234641954 | |
| 36220 | 234644980 | 234646438 | |
| 36221 | 234652817 | 234654006 | |
| 36222 | 234657963 | 234659932 | |
| 36223 | 234666776 | 234671169 | 231768 |
| 36224 | 234671722 | 234675308 | |
| 36225 | 234676488 | 234682402 | |
| 36226 | 234699533 | 234702021 | 230404 |
| 36227 | 234734176 | 234750505 | 168264, 228830 |
| 36228 | 234752036 | 234757534 | |
| 36229 | 234767275 | 234767991 | 224939 |
| 36230 | 234774036 | 234776210 | |
| 36231 | 234778583 | 234779948 | |
| 36232 | 234792170 | 234794843 | 228044 |
| 36233 | 234819590 | 234820606 | 230628 |
| 36234 | 234851211 | 234861800 | 227630, 224037 |
| 36235 | 234908056 | 234908606 | |
| 36236 | 234971587 | 234972339 | |
| 36237 | 235009650 | 235013253 | |
| 36238 | 235033732 | 235036583 | |
| 36239 | 235057045 | 235057953 | |
| 36240 | 235060677 | 235062609 | |
| 36241 | 235068624 | 235069723 | |
| 36242 | 235089984 | 235101564 | 238005, 237520 |
| 36243 | 235104835 | 235107659 | 238005 |
| 36244 | 235108315 | 235117588 | 258082 |
| 36245 | 235121995 | 235124340 | |
| 36246 | 235132028 | 235135011 | |
| 36247 | 235152849 | 235155319 | |
| 36248 | 235241889 | 235244005 | |
| 36249 | 235246066 | 235247946 | |
| 36250 | 235291088 | 235292664 | 207181, 173726 |
| 36251 | 235323701 | 235325301 | 188739, 054267 |
| 36252 | 235489881 | 235493167 | 152904, 054267 |
| 36253 | 235530348 | 235531793 | 116957 |
| 36254 | 235565167 | 235567139 | 116957 |
| 36255 | 235571900 | 235573212 | 116957 |
| 36256 | 235574941 | 235575493 | 116957 |
| 36257 | 235592434 | 235593043 | 116957 |
| 36258 | 235666303 | 235669133 | 162885 |
| 36259 | 235871335 | 235873292 | 143669 |
| 36260 | 235876786 | 235878180 | 143669 |
| 36261 | 235883768 | 235884538 | 143669 |
| 36262 | 235945824 | 235946957 | 143669 |
| 36263 | 236028683 | 236031553 | 143669 |
| 36264 | 236046102 | 236047303 | 143669 |
| 36265 | 236055622 | 236057807 | |
| 36266 | 236063886 | 236064673 | |
| 36267 | 236071527 | 236075150 | |
| 36268 | 236080034 | 236084688 | |
| 36269 | 236095370 | 236096237 | |
| 36270 | 236105437 | 236106080 | 237845 |
| 36271 | 236108850 | 236110307 | |
| 36272 | 236147695 | 236148237 | 116962 |
| 36273 | 236179105 | 236180498 | 116962 |
| 36274 | 236181392 | 236182762 | 116962 |
| 36275 | 236202715 | 236203414 | 116962 |
| 36276 | 236221135 | 236221957 | 116962 |
| 36277 | 236221970 | 236223008 | 116962 |
| 36278 | 236226671 | 236229268 | 116962 |
| 36279 | 236305630 | 236306424 | 077585 |
| 36280 | 236332049 | 236332643 | 077585 |
| 36281 | 236339676 | 236340741 | 077585 |
| 36282 | 236444464 | 236445733 | 086619 |
| 36283 | 236496482 | 236496933 | |
| 36284 | 236562780 | 236563292 | 186197 |
| 36285 | 236653101 | 236654710 | |
| 36286 | 236665750 | 236667064 | |
| 36287 | 236670515 | 236671043 | |
| 36288 | 236686129 | 236688731 | 223776, 116977 |
| 36289 | 236694915 | 236696086 | 116977 |
| 36290 | 236766961 | 236768527 | 119285 |
| 36291 | 236924706 | 236925216 | 077522 |
| 36292 | 236957929 | 236960261 | 116984 |
| 36293 | 237025017 | 237026579 | 116984 |
| 36294 | 237068281 | 237069142 | |
| 36295 | 237841116 | 237841873 | 198626 |
| 36296 | 237914305 | 237914931 | 198626 |
| 36297 | 237957040 | 237957775 | 198626 |
| 36298 | 238027514 | 238028543 | 237250 |
| 36299 | 238038482 | 238039221 | 237250 |
| 36300 | 238508203 | 238510064 | |
| 36301 | 238533728 | 238534349 | |
| 36302 | 239327903 | 239328629 | |
| 36303 | 239342147 | 239342912 | |
| 36304 | 239391626 | 239392546 | |
| 36305 | 239396797 | 239397472 | |
| 36306 | 239410475 | 239411128 | 259776 |
| 36307 | 239549400 | 239550415 | 133019 |
| 36308 | 239721864 | 239722512 | 133019 |
| 36309 | 239820406 | 239821098 | 133019 |
| 36310 | 239975824 | 239976292 | 133019 |
| 36311 | 239979041 | 239980289 | 133019 |
| 36312 | 240061229 | 240061910 | 234601, 133019 |
| 36313 | 240075787 | 240078717 | 133019 |
| 36314 | 240637297 | 240637764 | 268365, 155816 |
| 36315 | 240662081 | 240663011 | 180875 |
| 36316 | 240685098 | 240686612 | 180875 |
| 36317 | 240724809 | 240726238 | 180875 |
| 36318 | 240739068 | 240740681 | 180875 |
| 36319 | 240759189 | 240761482 | 180875 |
| 36320 | 240774204 | 240777095 | 180875 |
| 36321 | 240813044 | 240813816 | |
| 36322 | 241090994 | 241091653 | 182901 |
| 36323 | 241319659 | 241320952 | 182901 |
| 36324 | 241354839 | 241355837 | 182901 |
| 36325 | 241645257 | 241647285 | |
| 36326 | 241681811 | 241684082 | 091483 |
| 36327 | 241694373 | 241697227 | 117009 |
| 36328 | 241721557 | 241722242 | 117009 |
| 36329 | 241723499 | 241724440 | 117009 |
| 36330 | 241746170 | 241746875 | 117009 |
| 36331 | 241753711 | 241757477 | 054277, 117009 |
| 36332 | 241766914 | 241767962 | 054277 |
| 36333 | 241773289 | 241773907 | 054277 |
| 36334 | 241774155 | 241777154 | 054277 |
| 36335 | 241777431 | 241779896 | 054277 |
| 36336 | 241802515 | 241806326 | 054277 |
| 36337 | 242010850 | 242011761 | 174371 |
| 36338 | 242161628 | 242162284 | 197769 |
| 36339 | 242998827 | 243000192 | |
| 36340 | 243416411 | 243420302 | 054282, 143702 |
| 36341 | 243443591 | 243444394 | 054282 |
| 36342 | 243517660 | 243518364 | 054282 |
| 36343 | 243616886 | 243618548 | 054282 |
| 36344 | 243618781 | 243620143 | 054282 |
| 36345 | 243646314 | 243647804 | 054282 |
| 36346 | 243669019 | 243669849 | 117020 |
| 36347 | 243894506 | 243895245 | 117020, 232184 |
| 36348 | 243902787 | 243903775 | 117020, 232184 |
| 36349 | 243905999 | 243907127 | 117020 |
| 36350 | 244011755 | 244012657 | 117020 |
| 36351 | 244013187 | 244014669 | 117020 |
| 36352 | 244080718 | 244081130 | 226828 |
| 36353 | 244107340 | 244108077 | 226828 |
| 36354 | 244210011 | 244211871 | 226828 |
| 36355 | 244212036 | 244214048 | |
| 36356 | 244227910 | 244229806 | 268146 |
| 36357 | 244230982 | 244231712 | 268146 |
| 36358 | 244252480 | 244253661 | 229960 |
| 36359 | 244255049 | 244256857 | 229960 |
| 36360 | 244257785 | 244259299 | |
| 36361 | 244267015 | 244268630 | 244066 |
| 36362 | 244371038 | 244371748 | |
| 36363 | 244394163 | 244395785 | |
| 36364 | 244435392 | 244438329 | |
| 36365 | 244466103 | 244467239 | |
| 36366 | 244485934 | 244486798 | |
| 36367 | 244613991 | 244616070 | 035687 |
| 36368 | 244624002 | 244625680 | 179397 |
| 36369 | 244815777 | 244817643 | 121644 |
| 36370 | 244822953 | 244823384 | 121644 |
| 36371 | 244893293 | 244894365 | |
| 36372 | 244955417 | 244956081 | |
| 36373 | 244957586 | 244958361 | |
| 36374 | 244964459 | 244964970 | |
| 36375 | 244996740 | 245000396 | 203667 |
| 36376 | 245025296 | 245028953 | 273175, 153187 |
| 36377 | 245132116 | 245135680 | 203666, 272195 |
| 36378 | 245158721 | 245159415 | 203666 |
| 36379 | 245205664 | 245206536 | 203666 |
| 36380 | 245223850 | 245224612 | 203666 |
| 36381 | 245270188 | 245271141 | 203666 |
| 36382 | 245316197 | 245318354 | 162849 |
| 36383 | 245421519 | 245422245 | 162849 |
| 36384 | 246116640 | 246118164 | 185420 |
| 36385 | 246302027 | 246304203 | 185420 |
| 36386 | 246669919 | 246670743 | 185420 |
| 36387 | 246728595 | 246730825 | 162852, 162851 |
| 36388 | 246745687 | 246747446 | 162852 |
| 36389 | 246771906 | 246772609 | 162852 |
| 36390 | 246858943 | 246860227 | |
| 36391 | 246861862 | 246862907 | |
| 36392 | 246870694 | 246871518 | |
| 36393 | 246872523 | 246873781 | |
| 36394 | 246886977 | 246890874 | 143653 |
| 36395 | 246932296 | 246933124 | |
| 36396 | 246990493 | 246991316 | 223519 |
| 36397 | 247093871 | 247095623 | 153207 |
| 36398 | 247240918 | 247242597 | 135747 |
| 36399 | 247266719 | 247268043 | 188295 |
| 36400 | 247274158 | 247275992 | 221953 |
| 36401 | 247276016 | 247277253 | |
| 36402 | 247373315 | 247374383 | 232347, 227671 |
| 36403 | 247493916 | 247496168 | 162714 |
| 36404 | 249114016 | 249123703 | 264500, 175137 |
| 36405 | 249131667 | 249133959 | 171161 |
| 36406 | 249143360 | 249143985 | 171161 |
| 36407 | 249151482 | 249154032 | 227237, 171163 |
| 36408 | 249166861 | 249169025 | |
| 36409 | 249199674 | 249201418 | 185220 |

[0570] The locations of ODSCs on Chromosome 2 are shown in Table 44.

TABLE 44
ODSC Locations on Chromosome 2

| SEQ ID NO. | Start | End | Overlapping Gene(s) |
|---|---|---|---|
| 36410 | 40436 | 40982 | 184731 |
| 36411 | 44533 | 48253 | 184731 |
| 36412 | 260531 | 261378 | 035115 |
| 36413 | 263772 | 265744 | 143727, 035115 |
| 36414 | 284937 | 285343 | 189292 |
| 36415 | 676878 | 678178 | 233296, 151353 |
| 36416 | 1553628 | 1554465 | 228613 |
| 36417 | 1821058 | 1821679 | 186487 |
| 36418 | 2000877 | 2001737 | 186487 |
| 36419 | 3306277 | 3307667 | 032389 |
| 36420 | 3328288 | 3329113 | 032389 |
| 36421 | 3380996 | 3382646 | 032389 |
| 36422 | 3382843 | 3385123 | 171853 |
| 36423 | 3469464 | 3470825 | 171853 |
| 36424 | 3520335 | 3524138 | 235078, 182551 |
| 36425 | 3526708 | 3529222 | 235078 |
| 36426 | 3582750 | 3585261 | 242282, 255767 |
| 36427 | 3604728 | 3606996 | 234171, 171865 |
| 36428 | 3622201 | 3624163 | 171863 |
| 36429 | 3632553 | 3633963 | |
| 36430 | 3699169 | 3700128 | |
| 36431 | 6326454 | 6327482 | |
| 36432 | 6897184 | 6897830 | 205837 |
| 36433 | 7005225 | 7006998 | 134321, 134326 |
| 36434 | 7017068 | 7018489 | 134321 |
| 36435 | 7057269 | 7058255 | 151692, 228203 |
| 36436 | 7171781 | 7172322 | 151692 |
| 36437 | 7932177 | 7932916 | |
| 36438 | 8144352 | 8145500 | 235665 |
| 36439 | 8241797 | 8243991 | 236790, 235665 |
| 36440 | 8258587 | 8263004 | 236790, 235665 |
| 36441 | 8265567 | 8267354 | 236790, 235665 |
| 36442 | 8278177 | 8283702 | 229740, 236790, 235665 |
| 36443 | 8286244 | 8287133 | 236790, 235665 |
| 36444 | 8287759 | 8289534 | 236790, 235665 |
| 36445 | 8333612 | 8334742 | 236790, 235665 |
| 36446 | 8378898 | 8379655 | 236790, 235665 |
| 36447 | 8382617 | 8383592 | 236790, 235665 |
| 36448 | 8389158 | 8389889 | 236790, 235665 |
| 36449 | 8445106 | 8446132 | 236790 |
| 36450 | 8446427 | 8447503 | 236790 |
| 36451 | 8459288 | 8459924 | 236790 |
| 36452 | 8504322 | 8505484 | 236790 |
| 36453 | 8543943 | 8544488 | |
| 36454 | 8551550 | 8554520 | |
| 36455 | 8587717 | 8588281 | |
| 36456 | 8597639 | 8598234 | |
| 36457 | 8598767 | 8599377 | |
| 36458 | 8615325 | 8618033 | |
| 36459 | 8633187 | 8634027 | |
| 36460 | 8665552 | 8666749 | |
| 36461 | 8674980 | 8675895 | |
| 36462 | 8693541 | 8694833 | 231435 |
| 36463 | 8737491 | 8738787 | |
| 36464 | 8749218 | 8750429 | 231083 |
| 36465 | 8764206 | 8766416 | |
| 36466 | 8766743 | 8768270 | |
| 36467 | 8773007 | 8775348 | |
| 36468 | 8796221 | 8797994 | |
| 36469 | 8798499 | 8800764 | |
| 36470 | 8802562 | 8803085 | |
| 36471 | 8815614 | 8821874 | 115738, 235092 |
| 36472 | 8822030 | 8824115 | 115738 |
| 36473 | 8824409 | 8826816 | 115738 |
| 36474 | 8961403 | 8961839 | 134313 |
| 36475 | 8976715 | 8977985 | 134313 |
| 36476 | 9282583 | 9283417 | 240980 |
| 36477 | 9285126 | 9285823 | 240980 |
| 36478 | 9346167 | 9348337 | 151693 |
| 36479 | 9374080 | 9376362 | 151693 |
| 36480 | 9449259 | 9452301 | 151693 |
| 36481 | 9474767 | 9477517 | 151693 |
| 36482 | 9562335 | 9564730 | 119203, 119185 |
| 36483 | 9613938 | 9615854 | 134330 |
| 36484 | 9691962 | 9693315 | 151694 |
| 36485 | 9694927 | 9697089 | 271855, 151694 |
| 36486 | 9768533 | 9771632 | 134308 |
| 36487 | 9843554 | 9844390 | 244260 |
| 36488 | 9976899 | 9977607 | |
| 36489 | 9982825 | 9984510 | 115750 |
| 36490 | 10084306 | 10085021 | |
| 36491 | 10085271 | 10086192 | 134317 |
| 36492 | 10090566 | 10092663 | 134317 |
| 36493 | 10115860 | 10116585 | 134317 |
| 36494 | 10124887 | 10125741 | 134317 |
| 36495 | 10149465 | 10151118 | |
| 36496 | 10159091 | 10159812 | |
| 36497 | 10175279 | 10177557 | |
| 36498 | 10182252 | 10186224 | 172059 |
| 36499 | 10260208 | 10261684 | 272524 |
| 36500 | 10400087 | 10400964 | |
| 36501 | 10410682 | 10411498 | |
| 36502 | 10425386 | 10427154 | |
| 36503 | 10437114 | 10439200 | |
| 36504 | 10440070 | 10444995 | 115756 |
| 36505 | 10470234 | 10471280 | 115756 |
| 36506 | 10508496 | 10509851 | 115756 |
| 36507 | 10542265 | 10543602 | 115756 |
| 36508 | 10544800 | 10549721 | 115756 |
| 36509 | 10554061 | 10554873 | 115756 |
| 36510 | 10587332 | 10591030 | 257135, 115758 |
| 36511 | 10592091 | 10592829 | 217258 |
| 36512 | 10714686 | 10718088 | 115761 |
| 36513 | 10730806 | 10732013 | 234818, 115761 |
| 36514 | 10799953 | 10800470 | 115761 |
| 36515 | 10829110 | 10830959 | 243819, 115761 |
| 36516 | 10923431 | 10924018 | 143870, 143882 |
| 36517 | 10951430 | 10953527 | 143870 |
| 36518 | 10970299 | 10970794 | 143870 |
| 36519 | 11076166 | 11077708 | |
| 36520 | 11272623 | 11273356 | 150873, 145063 |
| 36521 | 11294437 | 11296317 | 162976 |
| 36522 | 11380143 | 11380609 | 134318 |
| 36523 | 11450217 | 11450802 | 134318 |
| 36524 | 11482579 | 11486066 | 134318 |
| 36525 | 11488225 | 11488819 | 134318 |
| 36526 | 11492744 | 11493450 | |
| 36527 | 11497318 | 11498100 | 230952 |
| 36528 | 11510645 | 11512438 | |
| 36529 | 11525416 | 11527522 | |
| 36530 | 11527929 | 11528877 | 231403 |
| 36531 | 11529663 | 11530858 | 231403 |
| 36532 | 11536297 | 11537039 | 224177 |
| 36533 | 11551765 | 11552721 | |
| 36534 | 11605229 | 11607035 | 269074, 169016 |
| 36535 | 11622432 | 11624165 | |
| 36536 | 11638263 | 11639854 | |
| 36537 | 11640574 | 11641534 | |
| 36538 | 11645814 | 11647308 | |
| 36539 | 11679480 | 11680330 | 196208 |
| 36540 | 11816249 | 11816671 | |
| 36541 | 11832957 | 11833800 | 134324 |
| 36542 | 11850285 | 11850941 | 134324 |
| 36543 | 11855966 | 11857793 | 134324 |
| 36544 | 11879111 | 11879541 | 134324 |
| 36545 | 11882567 | 11885593 | 230790, 134324 |
| 36546 | 11885721 | 11887779 | 134324 |
| 36547 | 11969305 | 11971148 | |
| 36548 | 12012682 | 12013470 | 224184 |
| 36549 | 12146733 | 12147944 | 224184 |
| 36550 | 12596384 | 12597882 | 224184 |
| 36551 | 12618716 | 12619345 | 224184 |
| 36552 | 12855898 | 12858159 | 071575, 261117 |
| 36553 | 12865503 | 12866197 | 071575 |
| 36554 | 12958700 | 12959678 | |
| 36555 | 13275382 | 13276489 | |
| 36556 | 14774451 | 14776007 | 265629, 162981 |
| 36557 | 15700242 | 15702243 | 151779 |
| 36558 | 15731201 | 15733170 | 079785 |
| 36559 | 15814028 | 15814874 | 224194 |
| 36560 | 15870408 | 15871231 | 231031 |
| 36561 | 15906042 | 15907013 | |
| 36562 | 15916513 | 15917089 | |
| 36563 | 15920249 | 15923844 | |
| 36564 | 16014549 | 16016114 | |
| 36565 | 16079548 | 16081118 | 134323, 233718 |
| 36566 | 16145994 | 16147775 | 226764 |
| 36567 | 16155632 | 16156089 | 226764 |
| 36568 | 16237063 | 16237479 | 236989 |
| 36569 | 16240051 | 16240690 | 236989 |
| 36570 | 16244212 | 16244885 | 236989 |
| 36571 | 16254924 | 16255680 | |
| 36572 | 16606842 | 16607745 | 224400 |
| 36573 | 16794650 | 16795921 | 197872 |
| 36574 | 16918786 | 16919882 | 223536 |
| 36575 | 16921099 | 16922054 | 223536 |
| 36576 | 16938105 | 16939072 | 223536 |
| 36577 | 16944377 | 16945211 | 223536 |
| 36578 | 16956186 | 16957468 | |
| 36579 | 17223989 | 17225052 | |
| 36580 | 17389740 | 17390475 | |
| 36581 | 17536548 | 17537858 | |
| 36582 | 17660868 | 17661552 | |
| 36583 | 17699080 | 17700277 | 214842 |
| 36584 | 17719656 | 17720792 | 163032 |
| 36585 | 17721134 | 17723347 | 163032 |
| 36586 | 17827294 | 17827788 | 163032 |
| 36587 | 17934122 | 17936169 | 178295, 163029 |
| 36588 | 17936172 | 17939972 | 178295, 163029 |
| 36589 | 17944618 | 17945681 | 178295, 163029 |
| 36590 | 17946541 | 17947211 | 178295, 163029 |
| 36591 | 18059458 | 18059846 | 170745 |
| 36592 | 18480580 | 18481421 | 170745 |
| 36593 | 18490578 | 18491551 | 170745 |
| 36594 | 18526851 | 18528147 | 170745 |
| 36595 | 18699479 | 18702024 | |
| 36596 | 18740539 | 18742542 | 240857, 250741, 185013 |
| 36597 | 18777919 | 18779276 | |
| 36598 | 18804062 | 18806416 | |
| 36599 | 18811320 | 18812565 | |
| 36600 | 18933186 | 18934292 | |
| 36601 | 18981536 | 18982312 | |
| 36602 | 19005382 | 19006334 | |
| 36603 | 19009880 | 19014246 | |
| 36604 | 19014304 | 19016566 | |
| 36605 | 19107846 | 19109439 | |
| 36606 | 19151332 | 19153594 | |
| 36607 | 19171751 | 19173899 | 236204 |
| 36608 | 19248467 | 19249080 | 236204 |
| 36609 | 19258630 | 19259250 | 236204 |
| 36610 | 19340222 | 19341351 | 236204 |
| 36611 | 19518770 | 19519375 | 236204 |
| 36612 | 19546929 | 19548697 | 266738 |
| 36613 | 19561840 | 19563685 | |
| 36614 | 19687403 | 19688487 | 237992 |
| 36615 | 19704106 | 19706049 | |
| 36616 | 19737838 | 19739637 | |
| 36617 | 19740133 | 19741536 | |
| 36618 | 19743364 | 19744102 | |
| 36619 | 19810655 | 19812781 | |
| 36620 | 19849427 | 19849978 | |
| 36621 | 19873022 | 19873501 | |
| 36622 | 19985443 | 19987461 | |
| 36623 | 20055219 | 20057266 | |
| 36624 | 20099750 | 20102851 | 271991, 183891 |
| 36625 | 20133074 | 20133764 | 118965 |
| 36626 | 20189399 | 20190298 | 227210, 118965 |
| 36627 | 20227014 | 20227509 | |
| 36628 | 20249864 | 20252962 | 223734, 068697 |
| 36629 | 20328793 | 20329991 | |
| 36630 | 20335383 | 20335960 | |
| 36631 | 20340364 | 20342286 | |
| 36632 | 20356614 | 20357419 | |
| 36633 | 20378302 | 20381254 | |
| 36634 | 20381293 | 20387280 | |
| 36635 | 20394939 | 20397250 | |
| 36636 | 20405412 | 20411095 | 115884 |
| 36637 | 20411514 | 20418688 | 115884 |
| 36638 | 20420308 | 20426473 | 115884 |
| 36639 | 20491579 | 20492116 | 055917 |
| 36640 | 20548552 | 20551919 | 055917 |
| 36641 | 20555726 | 20556397 | |
| 36642 | 20598829 | 20601193 | |
| 36643 | 20620509 | 20622697 | |
| 36644 | 20629109 | 20632344 | |
| 36645 | 20636652 | 20640904 | |
| 36646 | 20642477 | 20654264 | 228950, 143878 |
| 36647 | 20674495 | 20675798 | |
| 36648 | 20724143 | 20726043 | |
| 36649 | 20735168 | 20735715 | |
| 36650 | 20735904 | 20740987 | |
| 36651 | 20776820 | 20785707 | 118960 |
| 36652 | 20791443 | 20800252 | 231948, 118960 |
| 36653 | 20810712 | 20811557 | 118960 |
| 36654 | 20813289 | 20818700 | 118960 |
| 36655 | 20833569 | 20834500 | 118960 |
| 36656 | 20834950 | 20837391 | 118960 |
| 36657 | 20840989 | 20842370 | 118960 |
| 36658 | 20849778 | 20851903 | 118960 |
| 36659 | 20865428 | 20868112 | 143869 |
| 36660 | 20875152 | 20877601 | 260396 |
| 36661 | 20889357 | 20890107 | 118961 |
| 36662 | 20927566 | 20928669 | 118961 |
| 36663 | 20945542 | 20947233 | 118961 |
| 36664 | 20957166 | 20957999 | 118961 |
| 36665 | 20996007 | 20996674 | 118961 |
| 36666 | 21021569 | 21023503 | 118961 |
| 36667 | 21261454 | 21262662 | 084674 |
| 36668 | 21263528 | 21268445 | 084674 |
| 36669 | 21269727 | 21271442 | |
| 36670 | 21274596 | 21275876 | |
| 36671 | 21289476 | 21290566 | |
| 36672 | 21292338 | 21294805 | |
| 36673 | 21315223 | 21316189 | |
| 36674 | 21319052 | 21321242 | |
| 36675 | 21553278 | 21554468 | 231204, 233005 |
| 36676 | 21618975 | 21619584 | 231204, 233005 |
| 36677 | 21645451 | 21646239 | 231204, 233005 |
| 36678 | 21690624 | 21691317 | 231204, 233005 |
| 36679 | 22278416 | 22279979 | 231200 |
| 36680 | 23289164 | 23290186 | 232451 |
| 36681 | 23291931 | 23292672 | 232451 |
| 36682 | 23341504 | 23342305 | 232451 |
| 36683 | 23344690 | 23346585 | 232451 |
| 36684 | 23349994 | 23351285 | 232451 |
| 36685 | 23354319 | 23355561 | 232451 |
| 36686 | 23355788 | 23356609 | 232451 |
| 36687 | 23368266 | 23369254 | 232451 |
| 36688 | 23420586 | 23424767 | 232451 |
| 36689 | 23429190 | 23432884 | |
| 36690 | 23469557 | 23474193 | |
| 36691 | 23490812 | 23492788 | |
| 36692 | 23507912 | 23510557 | |
| 36693 | 23580691 | 23584938 | 223634 |
| 36694 | 23602142 | 23605353 | 235497 |
| 36695 | 23607287 | 23610164 | 119771 |
| 36696 | 23624801 | 23625551 | 119771 |
| 36697 | 23703246 | 23704415 | 119771 |
| 36698 | 23968473 | 23969108 | |
| 36699 | 24007746 | 24008386 | 119778 |
| 36700 | 24011706 | 24012747 | 119778 |
| 36701 | 24024300 | 24024599 | 119778 |
| 36702 | 24148549 | 24151085 | 173960, 119778 |
| 36703 | 24162785 | 24164228 | 173960 |
| 36704 | 24232356 | 24233857 | 205639 |
| 36705 | 24238142 | 24240293 | 205639 |
| 36706 | 24268836 | 24269295 | 205639, 163026 |
| 36707 | 24269595 | 24270415 | 205639, 163026 |
| 36708 | 24272244 | 24273467 | 119782, 163026, 205639 |
| 36709 | 24298349 | 24299713 | 219626, 115128 |
| 36710 | 24306083 | 24308475 | 219626, 115129 |
| 36711 | 24345639 | 24347197 | 176732, 219626 |
| 36712 | 24490890 | 24493266 | 198399 |
| 36713 | 24526818 | 24527404 | 198399 |
| 36714 | 24540291 | 24541009 | 198399 |
| 36715 | 24562554 | 24563203 | 198399 |
| 36716 | 24582080 | 24584348 | 198399 |
| 36717 | 24713003 | 24715488 | 084676 |
| 36718 | 24944141 | 24944959 | 084676 |
| 36719 | 25015241 | 25016735 | 138092, 184924 |
| 36720 | 25193686 | 25196254 | 224165, 115137 |
| 36721 | 25473920 | 25476076 | 119772 |
| 36722 | 25562599 | 25565728 | 119772 |
| 36723 | 25584759 | 25585586 | |
| 36724 | 25599521 | 25600082 | 138101 |
| 36725 | 25841277 | 25842036 | 138101 |
| 36726 | 25895000 | 25897557 | 138101 |
| 36727 | 26009756 | 26010472 | 143970 |
| 36728 | 26051965 | 26053356 | 143970 |
| 36729 | 26100162 | 26102404 | 143970 |
| 36730 | 26220071 | 26221531 | |
| 36731 | 26222039 | 26223234 | |
| 36732 | 26223278 | 26223892 | |
| 36733 | 26231298 | 26232295 | |
| 36734 | 26234209 | 26236001 | |
| 36735 | 26240097 | 26241809 | |
| 36736 | 26255756 | 26258896 | 084733 |
| 36737 | 26266985 | 26267684 | 084733 |
| 36738 | 26303116 | 26303713 | 084733 |
| 36739 | 26401577 | 26402935 | 157833 |
| 36740 | 26463515 | 26464291 | 084754 |
| 36741 | 26466555 | 26468912 | 084754, 138029 |
| 36742 | 26496512 | 26497582 | 138029 |
| 36743 | 26567184 | 26569938 | 173567, 138018 |
| 36744 | 26586171 | 26586808 | 138018 |
| 36745 | 26634337 | 26635841 | 157856 |
| 36746 | 26678469 | 26680331 | 115155, 157856 |
| 36747 | 26684785 | 26686732 | 115155 |
| 36748 | 26714400 | 26714946 | 115155 |
| 36749 | 26943107 | 26945369 | 171303 |
| 36750 | 26946868 | 26947595 | 171303 |
| 36751 | 26980394 | 26982338 | |
| 36752 | 26986123 | 26989062 | 115163, 213699 |
| 36753 | 26990702 | 26991262 | 115163, 213699 |
| 36754 | 26993392 | 26996472 | 115163, 213699 |
| 36755 | 27193133 | 27195824 | 084764, 230286 |
| 36756 | 27199043 | 27199686 | 084764, 230286 |
| 36757 | 27214113 | 27215212 | 084764, 230286, 205500 |
| 36758 | 27231295 | 27234851 | 230286, 084764, 205500 |
| 36759 | 27234944 | 27240259 | 205500, 084764 |
| 36760 | 27240848 | 27241531 | 084764 |
| 36761 | 27243116 | 27243783 | 084764 |
| 36762 | 27255038 | 27256698 | 119777 |
| 36763 | 27272354 | 27275301 | 231636, 084693 |
| 36764 | 27293294 | 27295690 | 228474, 084693 |
| 36765 | 27303897 | 27304708 | 138080 |
| 36766 | 27308338 | 27309900 | 138030, 138080 |
| 36767 | 27315539 | 27317450 | 138030 |
| 36768 | 27318475 | 27318994 | 138030 |
| 36769 | 27348869 | 27349806 | 143994 |
| 36770 | 27384473 | 27386092 | |
| 36771 | 27403207 | 27404014 | |
| 36772 | 27408199 | 27409100 | |
| 36773 | 27417625 | 27418281 | |
| 36774 | 27433888 | 27436300 | 138085, 138074 |
| 36775 | 27440049 | 27441156 | 084774 |
| 36776 | 27515623 | 27516966 | 138100 |
| 36777 | 27543749 | 27547029 | 115204 |
| 36778 | 27578671 | 27580694 | 234072, 115207 |
| 36779 | 27592161 | 27594789 | 115234, 115211 |
| 36780 | 27602341 | 27604650 | 115241, 163795 |
| 36781 | 27631413 | 27633310 | 115241 |
| 36782 | 27650559 | 27652681 | 115216 |
| 36783 | 27712298 | 27712924 | 138002 |
| 36784 | 27716034 | 27720834 | 084734, 115226 |
| 36785 | 27723900 | 27724388 | 084734 |
| 36786 | 27805280 | 27807090 | 259080, 243943, 221843 |
| 36787 | 27850746 | 27851367 | 198522, 176714, 259080, |
| | | | 243943 |
| 36788 | 27851687 | 27852935 | 176714, 198522, 259080, |
| | | | 243943 |
| 36789 | 27885464 | 27887584 | 163798, 119760 |
| 36790 | 27903426 | 27907616 | 163798 |
| 36791 | 27927659 | 27930610 | 205334 |
| 36792 | 27932819 | 27933690 | 205334 |
| 36793 | 27933694 | 27934472 | 205334 |
| 36794 | 27942243 | 27945525 | |
| 36795 | 27946115 | 27948893 | |
| 36796 | 27957573 | 27962441 | |
| 36797 | 27974948 | 27978352 | |
| 36798 | 27983734 | 27984799 | |
| 36799 | 27985782 | 27986832 | |
| 36800 | 27993604 | 27995679 | 243147 |
| 36801 | 28021062 | 28023228 | 171174, 243147 |
| 36802 | 28076843 | 28079672 | 171174, 243147 |
| 36803 | 28112304 | 28115025 | 158019, 171174, 243147 |
| 36804 | 28139151 | 28139582 | 158019, 243147 |
| 36805 | 28154336 | 28156328 | 158019, 243147 |
| 36806 | 28176671 | 28179141 | 158019, 243147 |
| 36807 | 28200351 | 28201152 | 158019, 243147 |
| 36808 | 28215783 | 28216455 | 158019 |
| 36809 | 28357022 | 28357751 | 158019 |
| 36810 | 28455402 | 28457411 | 158019 |
| 36811 | 28491844 | 28492610 | 158019 |
| 36812 | 28497649 | 28500043 | 158019 |
| 36813 | 28556478 | 28558056 | 158019 |
| 36814 | 28561212 | 28561664 | 158019 |
| 36815 | 28564691 | 28568768 | |
| 36816 | 28578200 | 28579849 | |
| 36817 | 28612568 | 28620126 | 075426, 270640, 229951 |
| 36818 | 28631082 | 28631842 | 075426 |
| 36819 | 28657410 | 28658336 | |
| 36820 | 28658424 | 28659278 | |
| 36821 | 28664860 | 28665867 | |
| 36822 | 28668543 | 28669769 | |
| 36823 | 28789470 | 28790580 | 163803 |
| 36824 | 28805129 | 28809222 | 163803 |
| 36825 | 28843853 | 28845250 | 163803 |
| 36826 | 28856129 | 28858903 | 230730, 163803 |
| 36827 | 28862518 | 28864162 | 230730, 163803 |
| 36828 | 28865900 | 28867172 | 163803, 230730 |
| 36829 | 28884439 | 28885730 | 230730 |
| 36830 | 28890924 | 28891510 | |
| 36831 | 28905875 | 28906633 | |
| 36832 | 28931786 | 28932433 | 226833 |
| 36833 | 28939048 | 28940648 | 226833 |
| 36834 | 28958761 | 28959335 | 226833 |
| 36835 | 28973044 | 28976655 | 213639 |
| 36836 | 29092139 | 29094023 | 171103 |
| 36837 | 29117122 | 29118919 | 163811 |
| 36838 | 29174664 | 29175817 | |
| 36839 | 29345742 | 29347386 | 115295 |
| 36840 | 29352344 | 29353699 | 115295 |
| 36841 | 29741914 | 29742751 | 171094 |
| 36842 | 29946034 | 29947065 | 171094 |
| 36843 | 29947932 | 29949436 | 171094 |
| 36844 | 30369259 | 30371032 | 119801 |
| 36845 | 30378585 | 30379571 | 119801 |
| 36846 | 30456987 | 30457720 | 213626 |
| 36847 | 30496958 | 30498552 | 213626 |
| 36848 | 30669820 | 30671013 | 172954 |
| 36849 | 30672525 | 30673455 | 172954 |
| 36850 | 30944493 | 30945371 | |
| 36851 | 31305966 | 31306866 | 158089 |
| 36852 | 31546453 | 31548118 | |
| 36853 | 31601141 | 31601885 | 158125 |
| 36854 | 31628853 | 31630117 | 158125 |
| 36855 | 31635831 | 31636505 | 158125 |
| 36856 | 31760776 | 31761191 | 228563, 049319 |
| 36857 | 31772207 | 31773068 | 228563, 049319 |
| 36858 | 31781132 | 31787598 | 228563, 049319 |
| 36859 | 31803287 | 31804214 | 049319 |
| 36860 | 31891858 | 31892372 | |
| 36861 | 31928316 | 31931082 | |
| 36862 | 31934869 | 31935673 | |
| 36863 | 31953347 | 31955518 | |
| 36864 | 32036721 | 32037838 | |
| 36865 | 32217024 | 32217561 | 162959, 162961 |
| 36866 | 32233973 | 32235290 | 162959, 162961 |
| 36867 | 32235522 | 32236952 | 162959, 162961 |
| 36868 | 32264381 | 32265566 | 162961 |
| 36869 | 32288085 | 32289821 | 021574 |
| 36870 | 32360471 | 32361242 | 021574 |
| 36871 | 32389901 | 32391954 | 152683, 272716 |
| 36872 | 32502102 | 32503962 | 119820 |
| 36873 | 32554138 | 32554760 | |
| 36874 | 32581106 | 32583337 | 115760 |
| 36875 | 32652824 | 32654028 | 115760 |
| 36876 | 32678674 | 32679171 | 115760 |
| 36877 | 32852747 | 32854029 | 018699 |
| 36878 | 33030199 | 33030802 | 018699 |
| 36879 | 33089608 | 33091785 | 230876 |
| 36880 | 33141117 | 33141656 | 230876 |
| 36881 | 33171153 | 33173369 | 049323 |
| 36882 | 33225882 | 33226532 | 049323 |
| 36883 | 33226797 | 33227579 | 049323 |
| 36884 | 33229984 | 33231538 | 049323 |
| 36885 | 33238814 | 33241735 | 049323 |
| 36886 | 33266750 | 33269225 | 049323 |
| 36887 | 33275892 | 33278152 | 049323 |
| 36888 | 33293068 | 33296901 | 049323 |
| 36889 | 33319227 | 33319956 | 049323 |
| 36890 | 33358093 | 33360443 | 049323 |
| 36891 | 33422511 | 33423096 | 049323 |
| 36892 | 33435078 | 33438096 | 049323 |
| 36893 | 33441512 | 33442711 | 049323 |
| 36894 | 33444081 | 33446082 | 049323 |
| 36895 | 33464965 | 33466171 | 049323 |
| 36896 | 33516221 | 33517108 | 049323 |
| 36897 | 33650126 | 33652123 | |
| 36898 | 33682759 | 33683971 | 152689 |
| 36899 | 33700193 | 33703661 | 152689 |
| 36900 | 33709287 | 33709761 | 152689 |
| 36901 | 33777779 | 33778556 | 152689 |
| 36902 | 33823389 | 33824899 | 119812 |
| 36903 | 34134969 | 34135500 | 203386 |
| 36904 | 34467138 | 34468081 | 203386 |
| 36905 | 34930208 | 34931774 | 228262 |
| 36906 | 35076569 | 35077437 | 226994 |
| 36907 | 36713196 | 36714511 | 150938 |
| 36908 | 36729070 | 36729516 | 150938 |
| 36909 | 36788038 | 36791299 | 171055 |
| 36910 | 36824585 | 36825552 | 171055 |
| 36911 | 36877150 | 36877845 | |
| 36912 | 37048189 | 37048746 | |
| 36913 | 37192901 | 37195151 | 115808 |
| 36914 | 37310787 | 37311888 | 152133, 008869 |
| 36915 | 37330621 | 37331486 | 055332 |
| 36916 | 37383277 | 37385031 | 055332 |
| 36917 | 37398608 | 37399108 | 138068 |
| 36918 | 37423190 | 37424744 | 218739, 138068 |
| 36919 | 37457629 | 37459626 | 003509, 115816 |
| 36920 | 37551059 | 37553257 | 232028, 115825 |
| 36921 | 37616867 | 37618631 | |
| 36922 | 37699163 | 37700509 | |
| 36923 | 37750098 | 37752057 | |
| 36924 | 37897950 | 37900177 | 163171 |
| 36925 | 38013541 | 38015055 | |
| 36926 | 38145737 | 38146417 | |
| 36927 | 38151336 | 38153651 | 115841 |
| 36928 | 38285031 | 38285561 | 235848, 115841 |
| 36929 | 38303060 | 38305158 | 138061, 232973 |
| 36930 | 38325341 | 38326137 | 138061, 232973 |
| 36931 | 38336079 | 38338333 | 138061, 232973 |
| 36932 | 38373040 | 38374963 | 199603, 232973 |
| 36933 | 38375252 | 38376630 | 232973 |
| 36934 | 38401606 | 38402432 | 232973 |
| 36935 | 38443031 | 38443720 | 227292 |
| 36936 | 38602619 | 38605340 | 119787 |
| 36937 | 38633316 | 38635070 | 231367 |
| 36938 | 38635520 | 38636051 | 231367 |
| 36939 | 38659811 | 38661882 | 235009, 231367 |
| 36940 | 38723900 | 38725173 | 231367 |
| 36941 | 38762760 | 38764166 | 271443 |
| 36942 | 38828805 | 38831055 | 143889, 235586 |
| 36943 | 38892793 | 38894701 | 143891 |
| 36944 | 38912265 | 38913317 | 143891 |
| 36945 | 38917371 | 38918424 | 143891 |
| 36946 | 38958730 | 38959328 | 143891 |
| 36947 | 38961985 | 38963171 | 143891 |
| 36948 | 38977204 | 38979016 | 152147, 115875 |
| 36949 | 38998723 | 38999896 | 152147 |
| 36950 | 39004634 | 39006133 | 152147 |
| 36951 | 39011626 | 39012306 | 152147 |
| 36952 | 39020423 | 39022196 | |
| 36953 | 39102266 | 39103663 | 188010, 163214 |
| 36954 | 39229009 | 39230047 | 115904 |
| 36955 | 39346696 | 39349317 | 115904 |
| 36956 | 39350731 | 39352629 | 115904 |
| 36957 | 39368756 | 39369388 | |
| 36958 | 39663068 | 39666015 | 231312, 011566 |
| 36959 | 39694911 | 39695391 | 231312 |
| 36960 | 39696807 | 39697420 | 231312 |
| 36961 | 39718614 | 39720405 | 231312 |
| 36962 | 39730895 | 39734661 | 231312 |
| 36963 | 39738825 | 39741256 | 231312 |
| 36964 | 39749173 | 39749685 | 231312 |
| 36965 | 39777536 | 39778424 | 231312 |
| 36966 | 39795492 | 39796191 | 231312 |
| 36967 | 39798221 | 39798814 | 231312 |
| 36968 | 39835646 | 39836695 | 231312 |
| 36969 | 39869290 | 39869904 | 231312 |
| 36970 | 40005287 | 40006850 | 138050 |
| 36971 | 42067778 | 42068830 | |
| 36972 | 42073851 | 42076334 | |
| 36973 | 42086301 | 42088384 | |
| 36974 | 42121720 | 42123349 | |
| 36975 | 42134846 | 42135380 | |
| 36976 | 42192756 | 42194112 | |
| 36977 | 42274284 | 42276450 | 162878 |
| 36978 | 42319024 | 42320481 | |
| 36979 | 42328153 | 42330678 | |
| 36980 | 42343595 | 42344614 | |
| 36981 | 42345046 | 42345878 | |
| 36982 | 42359403 | 42361107 | |
| 36983 | 42368683 | 42370192 | |
| 36984 | 42374486 | 42375527 | 224875 |
| 36985 | 42396091 | 42397875 | 143924, 224875 |
| 36986 | 42418283 | 42419379 | 143924 |
| 36987 | 42422536 | 42423257 | 143924 |
| 36988 | 42568700 | 42570983 | 115944 |
| 36989 | 42586646 | 42589558 | 115944 |
| 36990 | 42795250 | 42796944 | 057935 |
| 36991 | 43014374 | 43015686 | 162882 |
| 36992 | 43018655 | 43022024 | 162882 |
| 36993 | 43022260 | 43024064 | |
| 36994 | 43036308 | 43038690 | |
| 36995 | 43081108 | 43081893 | |
| 36996 | 43151211 | 43156096 | |
| 36997 | 43184227 | 43185679 | |
| 36998 | 43201972 | 43202837 | |
| 36999 | 43206229 | 43207417 | |
| 37000 | 43232290 | 43233406 | 224739 |
| 37001 | 43279297 | 43279934 | |
| 37002 | 43382487 | 43383670 | |
| 37003 | 43384516 | 43387501 | |
| 37004 | 43405078 | 43407062 | 115970 |
| 37005 | 43420504 | 43422688 | 115970 |
| 37006 | 43445502 | 43457102 | 152518, 234936, 115970 |
| 37007 | 43503159 | 43504618 | 115970 |
| 37008 | 43519254 | 43522496 | 115970 |
| 37009 | 43532165 | 43532635 | 115970 |
| 37010 | 43538371 | 43538956 | 115970 |
| 37011 | 43569277 | 43570053 | 115970 |
| 37012 | 43653379 | 43654836 | 115970 |
| 37013 | 43682357 | 43687032 | 115970 |
| 37014 | 43720830 | 43721779 | 115970 |
| 37015 | 43742473 | 43743684 | 115970 |
| 37016 | 43746259 | 43747722 | 115970 |
| 37017 | 43765501 | 43769285 | 115970 |
| 37018 | 43822187 | 43824209 | 115970 |
| 37019 | 43861651 | 43862324 | |
| 37020 | 44001015 | 44001914 | 138036 |
| 37021 | 44033180 | 44034083 | 138036 |
| 37022 | 44035215 | 44036044 | 138036 |
| 37023 | 44045761 | 44046724 | 138075 |
| 37024 | 44051586 | 44052840 | 138075 |
| 37025 | 44061627 | 44062179 | 138075 |
| 37026 | 44064916 | 44067928 | 143921, 138075 |
| 37027 | 44071213 | 44072170 | 143921 |
| 37028 | 44074104 | 44074763 | 143921 |
| 37029 | 44222187 | 44223967 | 138095 |
| 37030 | 44283090 | 44285758 | |
| 37031 | 44287783 | 44289784 | |
| 37032 | 44302304 | 44303639 | |
| 37033 | 44313749 | 44315418 | |
| 37034 | 44394431 | 44398870 | 138032, 273106 |
| 37035 | 44471052 | 44473072 | 138032 |
| 37036 | 44505551 | 44506035 | 138079 |
| 37037 | 44513915 | 44515386 | 138079 |
| 37038 | 44517346 | 44519977 | 138079 |
| 37039 | 44587662 | 44590117 | 143919, 138078 |
| 37040 | 44750706 | 44752986 | 143919 |
| 37041 | 44770843 | 44772078 | 143919 |
| 37042 | 44843623 | 44844452 | 143919 |
| 37043 | 44865643 | 44866226 | 143919 |
| 37044 | 44986713 | 44987406 | 143919 |
| 37045 | 45013341 | 45013878 | |
| 37046 | 45260254 | 45260912 | |
| 37047 | 45346183 | 45346720 | |
| 37048 | 45465140 | 45465826 | 205054 |
| 37049 | 45483336 | 45484936 | 205054 |
| 37050 | 45500390 | 45505178 | 205054 |
| 37051 | 45557810 | 45558922 | |
| 37052 | 45595888 | 45596458 | |
| 37053 | 45686035 | 45686793 | 068784 |
| 37054 | 45696311 | 45697414 | 068784 |
| 37055 | 45837618 | 45839448 | 068784 |
| 37056 | 45870019 | 45871773 | |
| 37057 | 45876269 | 45880024 | 171132 |
| 37058 | 46005582 | 46006311 | 171132 |
| 37059 | 46042541 | 46043965 | 171132 |
| 37060 | 46048179 | 46051460 | 171132 |
| 37061 | 46099037 | 46099895 | 171132 |
| 37062 | 46139122 | 46139632 | 171132 |
| 37063 | 46162618 | 46164047 | 171132 |
| 37064 | 46164773 | 46166908 | 171132 |
| 37065 | 46186510 | 46192049 | 171132 |
| 37066 | 46196141 | 46196904 | 171132 |
| 37067 | 46218210 | 46221915 | 171132 |
| 37068 | 46226895 | 46237092 | 233829, 171132 |
| 37069 | 46258916 | 46261680 | 171132 |
| 37070 | 46264536 | 46265991 | 171132 |
| 37071 | 46267044 | 46270018 | 171132 |
| 37072 | 46344374 | 46345370 | 171132 |
| 37073 | 46369707 | 46370881 | 171132 |
| 37074 | 46451868 | 46453731 | |
| 37075 | 46456098 | 46457965 | |
| 37076 | 46510636 | 46511295 | |
| 37077 | 46523409 | 46528468 | 116016 |
| 37078 | 46532504 | 46535533 | 116016 |
| 37079 | 46540973 | 46543625 | 116016 |
| 37080 | 46551414 | 46555631 | 116016 |
| 37081 | 46556037 | 46564151 | 116016 |
| 37082 | 46567022 | 46567667 | 116016 |
| 37083 | 46635354 | 46637460 | |
| 37084 | 46669104 | 46669896 | 187600 |
| 37085 | 46715052 | 46715793 | |
| 37086 | 46726501 | 46727799 | 253515, 250565 |
| 37087 | 46767586 | 46770019 | 119729, 250565 |
| 37088 | 46770185 | 46771663 | 119729 |
| 37089 | 46843124 | 46845037 | 119878, 151665 |
| 37090 | 46875194 | 46875667 | |
| 37091 | 46924510 | 46927517 | 171150 |
| 37092 | 46943818 | 46944985 | 171150 |
| 37093 | 46997009 | 46998212 | |
| 37094 | 47073951 | 47075272 | 239332 |
| 37095 | 47093602 | 47094421 | |
| 37096 | 47103947 | 47104663 | |
| 37097 | 47115940 | 47116662 | |
| 37098 | 47136636 | 47138020 | 180398 |
| 37099 | 47140524 | 47143906 | 068724, 180398 |
| 37100 | 47167318 | 47169835 | 180398, 068724 |
| 37101 | 47181679 | 47184837 | 272814, 068724 |
| 37102 | 47191979 | 47193092 | 068724 |
| 37103 | 47194009 | 47196353 | 068724 |
| 37104 | 47196799 | 47199091 | 068724 |
| 37105 | 47212568 | 47213143 | 068724 |
| 37106 | 47214001 | 47215781 | 068724 |
| 37107 | 47256992 | 47257675 | 068724 |
| 37108 | 47260032 | 47263530 | 233845, 068724 |
| 37109 | 47267516 | 47268709 | 233845, 068724 |
| 37110 | 47269454 | 47272007 | 068724 |
| 37111 | 47292445 | 47293731 | 273269, 239605, 068724 |
| 37112 | 47296222 | 47297606 | 239605, 068724, 273269, |
| | | | 225187 |
| 37113 | 47302466 | 47307789 | 068724, 239605, 273269 |
| 37114 | 47336687 | 47337271 | 239605, 273269 |
| 37115 | 47370593 | 47373867 | 239605, 273269 |
| 37116 | 47399137 | 47404937 | 273269, 143933 |
| 37117 | 47416464 | 47418040 | |
| 37118 | 47418409 | 47422919 | 234690 |
| 37119 | 47435536 | 47436523 | 234690 |
| 37120 | 47438239 | 47439385 | 234690 |
| 37121 | 47442767 | 47443672 | 234690 |
| 37122 | 47446149 | 47446846 | 234690 |
| 37123 | 47451919 | 47454263 | 226087, 234690 |
| 37124 | 47492017 | 47492894 | 234690 |
| 37125 | 47496080 | 47498144 | 234690 |
| 37126 | 47498583 | 47500701 | 234690 |
| 37127 | 47994361 | 47995621 | 116062 |
| 37128 | 47998238 | 47999044 | 116062 |
| 37129 | 48009171 | 48010857 | 116062 |
| 37130 | 48131084 | 48135049 | 233230, 138081 |
| 37131 | 48333104 | 48335250 | 230773 |
| 37132 | 48338140 | 48342935 | 230773 |
| 37133 | 48374893 | 48375997 | 230773 |
| 37134 | 48445300 | 48445708 | 230773 |
| 37135 | 48446300 | 48448208 | 230773 |
| 37136 | 48448869 | 48449610 | 230773 |
| 37137 | 48473946 | 48477802 | |
| 37138 | 48505342 | 48506126 | |
| 37139 | 48540620 | 48543697 | 170802 |
| 37140 | 48570843 | 48574319 | 170802 |
| 37141 | 48580185 | 48580768 | 170802 |
| 37142 | 48641242 | 48641793 | |
| 37143 | 48641829 | 48643773 | |
| 37144 | 48645103 | 48648464 | |
| 37145 | 48666819 | 48668895 | 272663, 162869 |
| 37146 | 48735268 | 48736362 | 162869 |
| 37147 | 51000328 | 51001262 | 179915 |
| 37148 | 51240074 | 51240893 | 179915 |
| 37149 | 51464614 | 51465377 | 231918 |
| 37150 | 51470783 | 51472168 | 231918 |
| 37151 | 52623696 | 52625007 | 231918 |
| 37152 | 52727579 | 52728495 | 236837 |
| 37153 | 53146833 | 53147359 | |
| 37154 | 53160499 | 53163269 | |
| 37155 | 53675493 | 53676323 | |
| 37156 | 53725320 | 53725857 | |
| 37157 | 53994010 | 53995816 | 143942, 115239, 270898 |
| 37158 | 54013206 | 54015101 | 068912, 115239, 270898 |
| 37159 | 54053593 | 54054476 | 115239, 270898 |
| 37160 | 54078081 | 54078787 | 115239, 270898 |
| 37161 | 54195415 | 54199220 | 170634, 068878 |
| 37162 | 54214366 | 54215055 | 170634 |
| 37163 | 54341741 | 54343790 | 170634 |
| 37164 | 54370798 | 54371327 | 170634 |
| 37165 | 54439508 | 54440047 | 170634 |
| 37166 | 54556728 | 54558083 | 177994 |
| 37167 | 54681679 | 54685178 | 115306 |
| 37168 | 54698497 | 54699122 | 115306 |
| 37169 | 54719408 | 54719959 | 115306 |
| 37170 | 54759191 | 54761694 | 228108, 115306 |
| 37171 | 54771077 | 54774646 | 234943, 115306 |
| 37172 | 54781967 | 54789648 | 115306 |
| 37173 | 54792263 | 54793095 | 115306 |
| 37174 | 54795790 | 54803416 | 115306 |
| 37175 | 54803600 | 54804601 | 115306 |
| 37176 | 54816102 | 54818319 | 115306 |
| 37177 | 54822928 | 54830941 | 115306 |
| 37178 | 54840188 | 54841509 | 115306 |
| 37179 | 54856267 | 54863355 | 115306 |
| 37180 | 54867930 | 54869760 | 115306 |
| 37181 | 54892524 | 54894564 | 115306 |
| 37182 | 54896782 | 54897596 | 115306 |
| 37183 | 54902775 | 54903376 | |
| 37184 | 54935685 | 54937238 | |
| 37185 | 54949665 | 54951154 | 214595 |
| 37186 | 54977024 | 54977605 | 214595 |
| 37187 | 55085174 | 55085929 | 214595 |
| 37188 | 55107065 | 55107739 | 214595 |
| 37189 | 55130355 | 55132886 | 214595 |
| 37190 | 55135565 | 55136520 | 214595 |
| 37191 | 55275817 | 55279952 | 115310 |
| 37192 | 55360343 | 55362005 | |
| 37193 | 55458728 | 55460837 | 143947, 162994 |
| 37194 | 55495390 | 55497245 | 085760 |
| 37195 | 55508588 | 55510290 | 162997 |
| 37196 | 55645748 | 55647851 | 115355 |
| 37197 | 55746146 | 55747623 | 163001 |
| 37198 | 55782973 | 55783561 | 138041 |
| 37199 | 55836709 | 55837855 | 138041 |
| 37200 | 55843025 | 55846267 | 272606, 138041 |
| 37201 | 55920261 | 55921421 | 138035 |
| 37202 | 56066204 | 56067015 | |
| 37203 | 56102564 | 56103397 | 115380 |
| 37204 | 56112719 | 56113218 | 115380 |
| 37205 | 56674892 | 56677265 | |
| 37206 | 56701381 | 56702340 | |
| 37207 | 56749609 | 56750513 | |
| 37208 | 56990704 | 56991226 | |
| 37209 | 57540696 | 57541333 | |
| 37210 | 58108406 | 58110485 | |
| 37211 | 58273079 | 58274919 | 028116 |
| 37212 | 58467781 | 58468895 | 273063, 115392 |
| 37213 | 58856307 | 58857690 | 233723 |
| 37214 | 60542940 | 60544519 | |
| 37215 | 60592571 | 60593145 | 223929 |
| 37216 | 60642806 | 60644734 | |
| 37217 | 60776797 | 60777903 | 119866 |
| 37218 | 60983098 | 60984374 | 115421 |
| 37219 | 61107449 | 61109800 | 162924, 228414 |
| 37220 | 61153063 | 61153640 | 162924, 267520 |
| 37221 | 61242879 | 61246037 | 162928, 162927 |
| 37222 | 61292781 | 61294018 | 162929 |
| 37223 | 61371856 | 61372765 | 237651, 212978, 162929 |
| 37224 | 61403758 | 61405682 | 173209 |
| 37225 | 61437350 | 61438460 | 115464 |
| 37226 | 61658161 | 61658723 | 115464 |
| 37227 | 61666305 | 61666786 | 115464 |
| 37228 | 61670309 | 61671758 | 115464 |
| 37229 | 61696946 | 61699414 | 270820, 115464 |
| 37230 | 61723712 | 61724335 | 082898 |
| 37231 | 61762765 | 61766613 | 082898 |
| 37232 | 61847522 | 61848310 | |
| 37233 | 61856441 | 61857666 | |
| 37234 | 61885884 | 61887333 | |
| 37235 | 61897142 | 61899633 | |
| 37236 | 61917116 | 61917745 | |
| 37237 | 61921418 | 61922236 | |
| 37238 | 61934905 | 61935665 | |
| 37239 | 61990372 | 61992330 | |
| 37240 | 62080692 | 62082717 | 170264 |
| 37241 | 62114390 | 62116438 | 173163, 115484 |
| 37242 | 62131809 | 62133562 | 173163 |
| 37243 | 62241150 | 62241711 | 173163 |
| 37244 | 62422266 | 62425128 | 170340 |
| 37245 | 62443776 | 62444262 | 170340 |
| 37246 | 62519165 | 62519762 | |
| 37247 | 62520564 | 62521396 | |
| 37248 | 62677441 | 62678683 | |
| 37249 | 62683244 | 62686042 | |
| 37250 | 62687732 | 62690670 | 228541 |
| 37251 | 62694093 | 62695608 | |
| 37252 | 62712361 | 62713907 | |
| 37253 | 62722793 | 62723552 | |
| 37254 | 62728164 | 62728705 | 186889 |
| 37255 | 62732103 | 62734494 | 186889 |
| 37256 | 62795179 | 62799019 | |
| 37257 | 62803357 | 62807800 | |
| 37258 | 62822874 | 62824079 | 226622 |
| 37259 | 62880552 | 62882785 | 226622 |
| 37260 | 62925449 | 62926712 | 115504 |
| 37261 | 62931365 | 62934135 | 115504 |
| 37262 | 63016630 | 63017616 | 115504 |
| 37263 | 63277674 | 63278188 | 115507 |
| 37264 | 63814824 | 63817204 | 014641, 143951 |
| 37265 | 63885303 | 63886126 | 143951 |
| 37266 | 63889491 | 63891128 | 143951 |
| 37267 | 63900868 | 63901687 | 143951 |
| 37268 | 63922665 | 63927335 | 221085, 143951 |
| 37269 | 63939478 | 63940362 | 143951 |
| 37270 | 63950755 | 63951465 | 143951 |
| 37271 | 63956483 | 63957387 | 143951 |
| 37272 | 63961113 | 63966057 | 143951 |
| 37273 | 63967867 | 63969533 | 143951 |
| 37274 | 63982965 | 63983841 | 143951 |
| 37275 | 64015257 | 64020342 | 143951 |
| 37276 | 64046483 | 64049162 | 143951 |
| 37277 | 64053137 | 64056074 | 143951 |
| 37278 | 64066482 | 64071042 | 169764 |
| 37279 | 64080613 | 64081368 | 169764 |
| 37280 | 64089186 | 64093128 | 169764 |
| 37281 | 64098023 | 64099454 | 169764 |
| 37282 | 64220217 | 64220634 | 143952 |
| 37283 | 64244862 | 64248093 | 143952 |
| 37284 | 64250904 | 64252386 | |
| 37285 | 64289969 | 64290561 | |
| 37286 | 64370490 | 64371830 | 197329, 225889 |
| 37287 | 64384902 | 64385503 | 225889 |
| 37288 | 64419958 | 64420295 | 225889, 230923 |
| 37289 | 64470090 | 64471428 | 225889 |
| 37290 | 64487691 | 64490504 | |
| 37291 | 64499830 | 64501796 | |
| 37292 | 64617866 | 64620093 | |
| 37293 | 64627240 | 64627731 | 223935 |
| 37294 | 64630420 | 64632290 | 223935 |
| 37295 | 64632735 | 64634098 | 223935 |
| 37296 | 64680152 | 64682444 | 119862, 223935 |
| 37297 | 64749663 | 64752796 | 119844, 260101 |
| 37298 | 64819580 | 64823628 | 119844 |
| 37299 | 64832835 | 64834671 | 233694 |
| 37300 | 64835889 | 64837410 | 233694 |
| 37301 | 64861390 | 64861938 | 179833 |
| 37302 | 64873228 | 64874144 | 226756, 179833 |
| 37303 | 64878572 | 64883510 | 179833 |
| 37304 | 64902813 | 64903556 | 179833 |
| 37305 | 64912352 | 64913981 | 179833 |
| 37306 | 64915830 | 64916774 | 179833 |
| 37307 | 64924059 | 64927550 | 179833 |
| 37308 | 64956995 | 64959755 | 179833 |
| 37309 | 64976559 | 64979583 | 179833 |
| 37310 | 64993721 | 64996222 | |
| 37311 | 65058221 | 65059763 | |
| 37312 | 65086193 | 65087494 | 234572 |
| 37313 | 65091697 | 65093252 | |
| 37314 | 65115982 | 65116453 | |
| 37315 | 65125882 | 65127204 | |
| 37316 | 65149648 | 65150585 | |
| 37317 | 65164538 | 65165671 | |
| 37318 | 65170671 | 65171421 | |
| 37319 | 65201793 | 65203038 | |
| 37320 | 65214760 | 65217510 | 115902 |
| 37321 | 65233637 | 65234203 | 115902 |
| 37322 | 65255361 | 65256192 | |
| 37323 | 65282874 | 65284505 | 011523 |
| 37324 | 65291888 | 65292671 | 011523 |
| 37325 | 65296791 | 65298687 | 138069, 011523 |
| 37326 | 65307857 | 65308838 | 011523, 138069 |
| 37327 | 65355541 | 65358587 | 138069 |
| 37328 | 65397682 | 65398196 | |
| 37329 | 65453710 | 65456185 | 138071 |
| 37330 | 65527250 | 65528068 | |
| 37331 | 65543070 | 65544303 | 198369 |
| 37332 | 65546022 | 65548604 | 198369 |
| 37333 | 65590251 | 65591834 | 198369 |
| 37334 | 65600049 | 65601362 | 232693, 198369 |
| 37335 | 65604612 | 65605600 | 198369, 232693 |
| 37336 | 65606610 | 65607649 | 198369, 232693 |
| 37337 | 65609706 | 65611102 | 198369 |
| 37338 | 65617173 | 65617700 | 198369 |
| 37339 | 65622873 | 65624600 | 198369 |
| 37340 | 65629432 | 65630306 | 198369 |
| 37341 | 65644026 | 65644600 | 198369 |
| 37342 | 65656957 | 65660499 | 198369 |
| 37343 | 65662478 | 65665219 | 204929 |
| 37344 | 65754616 | 65755802 | 204929 |
| 37345 | 65772344 | 65773701 | 243029, 204929 |
| 37346 | 65803235 | 65805279 | 204929 |
| 37347 | 65831143 | 65832448 | 235725, 204929 |
| 37348 | 66149806 | 66150528 | 204929 |
| 37349 | 66659824 | 66663516 | 143995, 226819 |
| 37350 | 66721768 | 66724212 | 143995 |
| 37351 | 66758210 | 66758718 | 143995 |
| 37352 | 66788886 | 66789964 | 143995 |
| 37353 | 66790517 | 66791095 | 143995 |
| 37354 | 66801613 | 66803093 | 232046 |
| 37355 | 67264787 | 67265336 | |
| 37356 | 67267076 | 67267977 | 223859 |
| 37357 | 67616185 | 67617277 | |
| 37358 | 67624184 | 67625509 | 143971 |
| 37359 | 67627630 | 67628931 | 143971 |
| 37360 | 68289249 | 68290910 | 197223 |
| 37361 | 68342925 | 68343773 | |
| 37362 | 68348144 | 68348716 | |
| 37363 | 68383738 | 68385924 | 115946, 243667, 273398 |
| 37364 | 68477708 | 68480937 | 273064, 221823, 273398 |
| 37365 | 68653631 | 68656000 | |
| 37366 | 68658163 | 68659280 | |
| 37367 | 68667652 | 68669305 | |
| 37368 | 68694019 | 68695523 | 169621, 204923 |
| 37369 | 68821184 | 68822759 | 169621 |
| 37370 | 69056280 | 69056756 | |
| 37371 | 69134402 | 69136870 | |
| 37372 | 69144032 | 69145092 | |
| 37373 | 69147231 | 69148461 | |
| 37374 | 69163250 | 69163969 | |
| 37375 | 69289287 | 69290112 | 169604 |
| 37376 | 69404899 | 69405801 | 169604 |
| 37377 | 69518286 | 69518932 | |
| 37378 | 69613302 | 69615182 | 198380 |
| 37379 | 69663425 | 69665479 | 169599 |
| 37380 | 69727130 | 69727572 | 115977 |
| 37381 | 69765849 | 69767000 | 115977 |
| 37382 | 69808635 | 69809417 | 115977 |
| 37383 | 69815722 | 69816522 | 115977 |
| 37384 | 69869072 | 69872244 | 196975, 115977 |
| 37385 | 69900939 | 69901850 | 115977, 196975 |
| 37386 | 69902465 | 69902918 | 196975 |
| 37387 | 69922268 | 69923218 | 196975 |
| 37388 | 69967774 | 69970217 | 196975 |
| 37389 | 69983118 | 69983886 | 196975 |
| 37390 | 69995969 | 69998247 | 196975 |
| 37391 | 70005864 | 70009869 | 196975 |
| 37392 | 70010819 | 70012113 | 196975 |
| 37393 | 70016213 | 70016746 | 196975 |
| 37394 | 70024979 | 70025627 | 196975 |
| 37395 | 70042733 | 70044671 | 196975 |
| 37396 | 70055728 | 70057911 | 087338 |
| 37397 | 70120338 | 70122251 | 124380 |
| 37398 | 70140655 | 70143293 | 059728 |
| 37399 | 70145007 | 70145883 | 059728 |
| 37400 | 70205598 | 70206207 | 179818 |
| 37401 | 70207426 | 70207874 | 179818 |
| 37402 | 70294818 | 70297314 | 179818 |
| 37403 | 70309882 | 70317146 | 169564, 233060, 179818 |
| 37404 | 70324815 | 70325866 | 226505 |
| 37405 | 70334907 | 70336459 | |
| 37406 | 70350876 | 70353030 | 231327 |
| 37407 | 70362860 | 70363774 | |
| 37408 | 70367691 | 70371154 | |
| 37409 | 70415102 | 70416563 | 115998 |
| 37410 | 70416675 | 70418580 | 115998 |
| 37411 | 70474231 | 70476796 | 116001, 115998 |
| 37412 | 70485047 | 70486091 | 116005 |
| 37413 | 70496667 | 70497317 | 116005 |
| 37414 | 70519692 | 70521617 | 143977 |
| 37415 | 70528071 | 70529494 | 233849, 035141 |
| 37416 | 70530908 | 70531397 | |
| 37417 | 70741771 | 70742345 | 163235 |
| 37418 | 70751349 | 70752693 | 163235 |
| 37419 | 70779817 | 70782080 | 163235 |
| 37420 | 71221018 | 71222931 | 228384, 144043, 258881 |
| 37421 | 71294382 | 71296393 | 272735, 124357 |
| 37422 | 71356521 | 71358544 | 124383, 124370 |
| 37423 | 71452986 | 71454833 | 124374 |
| 37424 | 71503645 | 71504270 | 075292 |
| 37425 | 71504525 | 71505229 | 075292 |
| 37426 | 71558437 | 71559956 | 075292 |
| 37427 | 71563836 | 71564559 | 075292 |
| 37428 | 71605694 | 71606725 | 075292 |
| 37429 | 71612027 | 71612539 | 075292 |
| 37430 | 71615108 | 71615798 | 075292 |
| 37431 | 71679713 | 71681745 | 135636 |
| 37432 | 71683031 | 71684208 | 135636 |
| 37433 | 71693279 | 71694520 | 135636 |
| 37434 | 71704413 | 71705056 | 135636 |
| 37435 | 71757896 | 71759296 | 135636 |
| 37436 | 71782794 | 71783826 | 135636 |
| 37437 | 71842195 | 71843091 | 135636 |
| 37438 | 71943849 | 71944836 | |
| 37439 | 72011455 | 72012586 | |
| 37440 | 72057612 | 72059218 | |
| 37441 | 72107752 | 72109188 | |
| 37442 | 72109803 | 72111983 | |
| 37443 | 72161634 | 72162826 | |
| 37444 | 72167344 | 72168519 | |
| 37445 | 72175630 | 72176682 | |
| 37446 | 72177334 | 72178891 | |
| 37447 | 72179424 | 72180426 | |
| 37448 | 72304584 | 72305503 | |
| 37449 | 72365383 | 72366030 | 003137 |
| 37450 | 72463048 | 72464050 | 144036 |
| 37451 | 72482552 | 72483178 | 144036 |
| 37452 | 72775021 | 72775664 | 144036 |
| 37453 | 72921871 | 72922667 | 144036 |
| 37454 | 72949735 | 72951420 | 144036 |
| 37455 | 72982526 | 72985026 | 144036 |
| 37456 | 73005498 | 73006543 | 144036 |
| 37457 | 73052221 | 73053503 | 144036 |
| 37458 | 73113746 | 73115430 | 116096 |
| 37459 | 73142994 | 73143936 | 135638 |
| 37460 | 73206858 | 73210455 | 144040 |
| 37461 | 73212884 | 73213833 | 144040 |
| 37462 | 73226524 | 73229541 | 144040 |
| 37463 | 73257964 | 73260286 | 144040 |
| 37464 | 73260438 | 73261477 | 144040 |
| 37465 | 73296423 | 73299743 | 144040 |
| 37466 | 73316442 | 73317198 | 135631 |
| 37467 | 73338309 | 73341022 | 272702, 135631 |
| 37468 | 73402691 | 73405145 | |
| 37469 | 73441064 | 73442301 | 135632 |
| 37470 | 73459887 | 73462704 | 135624, 135617 |
| 37471 | 73612573 | 73614143 | 116127 |
| 37472 | 73671190 | 73671779 | 116127 |
| 37473 | 73852519 | 73853343 | |
| 37474 | 73869554 | 73870251 | |
| 37475 | 73912868 | 73913779 | |
| 37476 | 73963754 | 73965410 | 144034 |
| 37477 | 74006251 | 74007580 | 144048 |
| 37478 | 74086818 | 74087728 | 124356 |
| 37479 | 74153545 | 74155351 | 114956 |
| 37480 | 74207874 | 74209341 | 237883 |
| 37481 | 74210477 | 74213572 | 235499 |
| 37482 | 74374099 | 74375420 | 225439, 163170 |
| 37483 | 74405061 | 74406551 | 114978 |
| 37484 | 74494214 | 74494749 | 264324, 188687 |
| 37485 | 74610218 | 74610815 | 204843 |
| 37486 | 74618112 | 74619840 | 204843, 237737 |
| 37487 | 74651827 | 74652331 | 005448 |
| 37488 | 74656405 | 74657810 | 114993 |
| 37489 | 74667134 | 74669955 | 114993 |
| 37490 | 74671209 | 74671853 | |
| 37491 | 74674223 | 74675435 | |
| 37492 | 74681572 | 74682862 | 115274 |
| 37493 | 74684156 | 74686544 | 239779, 115274 |
| 37494 | 74691360 | 74693145 | 115275 |
| 37495 | 74698539 | 74700631 | 204822, 135637 |
| 37496 | 74709044 | 74711013 | 115282, 135637 |
| 37497 | 74715286 | 74716739 | 115282 |
| 37498 | 74718984 | 74719655 | 115282 |
| 37499 | 74728886 | 74731939 | 257702, 179528, 272183 |
| 37500 | 74733669 | 74735708 | 115289 |
| 37501 | 74755691 | 74758049 | 115317, 115307 |
| 37502 | 74775776 | 74776464 | 115325, 115318 |
| 37503 | 75185125 | 75186332 | 115350 |
| 37504 | 75743314 | 75744575 | 115363 |
| 37505 | 75744623 | 75747253 | 115363 |
| 37506 | 75748500 | 75749090 | 115363 |
| 37507 | 75749575 | 75751281 | 231172, 115363 |
| 37508 | 75787078 | 75788980 | 115363 |
| 37509 | 75792085 | 75793897 | 115363 |
| 37510 | 75867602 | 75868902 | |
| 37511 | 75873235 | 75875162 | 115364 |
| 37512 | 75935943 | 75938799 | 005436 |
| 37513 | 76092149 | 76092672 | |
| 37514 | 76744571 | 76745049 | |
| 37515 | 77792930 | 77795366 | 176204 |
| 37516 | 78336343 | 78336822 | 229494 |
| 37517 | 83016194 | 83018583 | |
| 37518 | 83478086 | 83479004 | |
| 37519 | 83509286 | 83510184 | |
| 37520 | 83704936 | 83705767 | |
| 37521 | 83750038 | 83750457 | 232548 |
| 37522 | 84520835 | 84521945 | |
| 37523 | 84685523 | 84687510 | 163541 |
| 37524 | 84859038 | 84859551 | 115423 |
| 37525 | 85107609 | 85108568 | 186854 |
| 37526 | 85131862 | 85133836 | 034510, 186854 |
| 37527 | 85146299 | 85148148 | |
| 37528 | 85152716 | 85153546 | |
| 37529 | 85172693 | 85174008 | |
| 37530 | 85184624 | 85187380 | |
| 37531 | 85189732 | 85192401 | |
| 37532 | 85196122 | 85200935 | 176407 |
| 37533 | 85359825 | 85361708 | 152284 |
| 37534 | 85370361 | 85371392 | 152284 |
| 37535 | 85496864 | 85497935 | 152284 |
| 37536 | 85521445 | 85522192 | 152284 |
| 37537 | 85533836 | 85534825 | 152284 |
| 37538 | 85551429 | 85552598 | 152291 |
| 37539 | 85552630 | 85556051 | 152291 |
| 37540 | 85580577 | 85582790 | 115459, 042445 |
| 37541 | 85644901 | 85647358 | 152292, 042493 |
| 37542 | 85647446 | 85650070 | 152292 |
| 37543 | 85652618 | 85653264 | 152292 |
| 37544 | 85663465 | 85666512 | 152292 |
| 37545 | 85671753 | 85674936 | |
| 37546 | 85694851 | 85696687 | |
| 37547 | 85697697 | 85698640 | |
| 37548 | 85702952 | 85703795 | |
| 37549 | 85726110 | 85726811 | |
| 37550 | 85726974 | 85727713 | |
| 37551 | 85743643 | 85744624 | |
| 37552 | 85764534 | 85767951 | 168906 |
| 37553 | 85772389 | 85775242 | 168906, 115486 |
| 37554 | 85786493 | 85789521 | 118640, 115486 |
| 37555 | 85804369 | 85806088 | 118640 |
| 37556 | 85810647 | 85813316 | 168899 |
| 37557 | 85821748 | 85823960 | 168894 |
| 37558 | 85828680 | 85830792 | 168883, 168890 |
| 37559 | 85838198 | 85839681 | 168887, 168883 |
| 37560 | 85842988 | 85844036 | 168883 |
| 37561 | 85889640 | 85890281 | 168878 |
| 37562 | 85907236 | 85909295 | |
| 37563 | 85931769 | 85939156 | |
| 37564 | 85939250 | 85941798 | |
| 37565 | 85955608 | 85956791 | |
| 37566 | 85963588 | 85966084 | |
| 37567 | 85967711 | 85972238 | |
| 37568 | 85980780 | 85983466 | 168874 |
| 37569 | 85983792 | 85984674 | 168874 |
| 37570 | 85997494 | 86000672 | 168874 |
| 37571 | 86006570 | 86007201 | 168874 |
| 37572 | 86019662 | 86022632 | |
| 37573 | 86025844 | 86027307 | |
| 37574 | 86033334 | 86034407 | |
| 37575 | 86114672 | 86118086 | 232504, 115525 |
| 37576 | 86138897 | 86140386 | |
| 37577 | 86140892 | 86142449 | |
| 37578 | 86162547 | 86165052 | |
| 37579 | 86172038 | 86172995 | |
| 37580 | 86176025 | 86177088 | |
| 37581 | 86178747 | 86180322 | |
| 37582 | 86244946 | 86245610 | |
| 37583 | 86249993 | 86250537 | 068654 |
| 37584 | 86288840 | 86290086 | 068654 |
| 37585 | 86299360 | 86300051 | 068654 |
| 37586 | 86306914 | 86308148 | 068654 |
| 37587 | 86332522 | 86334390 | 132300, 068654 |
| 37588 | 86421725 | 86423603 | 273080, 132305 |
| 37589 | 86425993 | 86427519 | 132313 |
| 37590 | 86620709 | 86621510 | |
| 37591 | 86623273 | 86624020 | |
| 37592 | 86667354 | 86669866 | 115548 |
| 37593 | 86673158 | 86673637 | 115548 |
| 37594 | 86703935 | 86704942 | 115548 |
| 37595 | 86789279 | 86791458 | 249884, 228363, 115561 |
| 37596 | 86842701 | 86843095 | 249884, 228363, 239305, |
| | | | 115561 |
| 37597 | 86849008 | 86851794 | 239305, 249884, 115561 |
| 37598 | 86854934 | 86856001 | 249884, 115561 |
| 37599 | 86858714 | 86860834 | 249884, 115561 |
| 37600 | 86864290 | 86864864 | 249884, 115561 |
| 37601 | 86876121 | 86877059 | 249884, 115561 |
| 37602 | 86898340 | 86899853 | 249884, 115561 |
| 37603 | 86931331 | 86932372 | 249884, 115561 |
| 37604 | 87034664 | 87036006 | 153563 |
| 37605 | 88315149 | 88317006 | 222724 |
| 37606 | 88353950 | 88356231 | 172086 |
| 37607 | 88399809 | 88400515 | 115593 |
| 37608 | 88426674 | 88428680 | 163586 |
| 37609 | 88429613 | 88430623 | |
| 37610 | 88436015 | 88436911 | |
| 37611 | 88438154 | 88439848 | |
| 37612 | 88443989 | 88445625 | |
| 37613 | 88469350 | 88471221 | 144115 |
| 37614 | 88478380 | 88479527 | 144115 |
| 37615 | 88620971 | 88621576 | |
| 37616 | 88899212 | 88901088 | 172071 |
| 37617 | 88926017 | 88928379 | 234028, 172071 |
| 37618 | 88957886 | 88959566 | |
| 37619 | 88965764 | 88967519 | |
| 37620 | 88968068 | 88969593 | |
| 37621 | 88990342 | 88992111 | 153574 |
| 37622 | 91669804 | 91671231 | |
| 37623 | 95786687 | 95788126 | 144029 |
| 37624 | 95830508 | 95832466 | 163067, 144026 |
| 37625 | 95872749 | 95873938 | 233757 |
| 37626 | 95933488 | 95934108 | |
| 37627 | 95971210 | 95972257 | 115041 |
| 37628 | 96011165 | 96012391 | 115041 |
| 37629 | 96055844 | 96057193 | |
| 37630 | 96057371 | 96058078 | |
| 37631 | 96067800 | 96069214 | 115042 |
| 37632 | 96191931 | 96193317 | 272913, 229689 |
| 37633 | 96343108 | 96343709 | |
| 37634 | 96347482 | 96350074 | |
| 37635 | 96360796 | 96362078 | |
| 37636 | 96810353 | 96811444 | 228873, 158050 |
| 37637 | 96872718 | 96875366 | 204685, 084090 |
| 37638 | 96917331 | 96917810 | 135956 |
| 37639 | 96925076 | 96927864 | 135956 |
| 37640 | 96930542 | 96932628 | 144021, 135956 |
| 37641 | 96970370 | 96972310 | 144028 |
| 37642 | 96986842 | 96987867 | 230747 |
| 37643 | 97007580 | 97008696 | 121152 |
| 37644 | 97075262 | 97076163 | |
| 37645 | 97088947 | 97089943 | |
| 37646 | 97093024 | 97094244 | |
| 37647 | 97151174 | 97152594 | |
| 37648 | 97170474 | 97172045 | 163121 |
| 37649 | 97173686 | 97174306 | 163121 |
| 37650 | 97197599 | 97198079 | 235480 |
| 37651 | 97202287 | 97203602 | 196843 |
| 37652 | 97215616 | 97217827 | 196843 |
| 37653 | 97221879 | 97224727 | |
| 37654 | 97267261 | 97268698 | 114982 |
| 37655 | 97270734 | 97275539 | 114982 |
| 37656 | 97281838 | 97285938 | 114982 |
| 37657 | 97296212 | 97298836 | 114982 |
| 37658 | 97301511 | 97305017 | 114982 |
| 37659 | 97330519 | 97331310 | 249715 |
| 37660 | 97426153 | 97427584 | 158158 |
| 37661 | 97452571 | 97453370 | 158158 |
| 37662 | 97453626 | 97454949 | 158158 |
| 37663 | 97480965 | 97483091 | 168763 |
| 37664 | 97484662 | 97485551 | 168763 |
| 37665 | 97498361 | 97499171 | 168763, 163126 |
| 37666 | 97520444 | 97520992 | 213337, 163126 |
| 37667 | 97522774 | 97525138 | 213337, 163126 |
| 37668 | 97527263 | 97528542 | 168758 |
| 37669 | 97533431 | 97536379 | 168758 |
| 37670 | 98261540 | 98263339 | 135940 |
| 37671 | 98278673 | 98281604 | 201806, 228486, 115073 |
| 37672 | 98461598 | 98462743 | 075568 |
| 37673 | 98485641 | 98488180 | 075568 |
| 37674 | 98552051 | 98552503 | 075568 |
| 37675 | 98611066 | 98613192 | 075568 |
| 37676 | 98701196 | 98701847 | |
| 37677 | 99060864 | 99062471 | 040933 |
| 37678 | 99073078 | 99074722 | 040933 |
| 37679 | 99224131 | 99226606 | 115446, 183513 |
| 37680 | 99317513 | 99319517 | 071073 |
| 37681 | 99321087 | 99321975 | 071073 |
| 37682 | 99346564 | 99348904 | 071073 |
| 37683 | 99420028 | 99421076 | 196872 |
| 37684 | 99459010 | 99459737 | 196872 |
| 37685 | 99756835 | 99758350 | 273045, 241962, 135951 |
| 37686 | 99770068 | 99772680 | 273155, 144182, 135951, |
| | | | 241962 |
| 37687 | 99796667 | 99798806 | 185414, 158411, 241962, |
| | | | 273155 |
| 37688 | 99951664 | 99955113 | 158417, 115514 |
| 37689 | 100019492 | 100020465 | 135945 |
| 37690 | 100104889 | 100107315 | 135945 |
| 37691 | 100252777 | 100253603 | 144218 |
| 37692 | 100466531 | 100468026 | 144218 |
| 37693 | 100468072 | 100470223 | 144218 |
| 37694 | 100515227 | 100516614 | 144218 |
| 37695 | 100629533 | 100631487 | 144218 |
| 37696 | 100684127 | 100685162 | 144218 |
| 37697 | 100685690 | 100687090 | 144218 |
| 37698 | 100721247 | 100722268 | 230393, 144218 |
| 37699 | 100740680 | 100742054 | 144218 |
| 37700 | 100830057 | 100831736 | 232084 |
| 37701 | 100901988 | 100903760 | 170500 |
| 37702 | 100907570 | 100908911 | 170500 |
| 37703 | 100937870 | 100939048 | 170500 |
| 37704 | 101178713 | 101180377 | 115539 |
| 37705 | 101204483 | 101204986 | |
| 37706 | 101349688 | 101350959 | |
| 37707 | 101358398 | 101359797 | |
| 37708 | 101360919 | 101362783 | |
| 37709 | 101368405 | 101372291 | |
| 37710 | 101396563 | 101397622 | |
| 37711 | 101407783 | 101408796 | |
| 37712 | 101430753 | 101431651 | |
| 37713 | 101434629 | 101438262 | 170485 |
| 37714 | 101438370 | 101439867 | 232034, 170485 |
| 37715 | 101449275 | 101450087 | 232034, 170485 |
| 37716 | 101459366 | 101460373 | 232034, 170485 |
| 37717 | 101491516 | 101493100 | 170485 |
| 37718 | 101499040 | 101501053 | 170485 |
| 37719 | 101539928 | 101542477 | 170485 |
| 37720 | 101557094 | 101558241 | 170485 |
| 37721 | 101574399 | 101574920 | 170485 |
| 37722 | 101614588 | 101615385 | 223947 |
| 37723 | 101617778 | 101620030 | 071082, 223947 |
| 37724 | 101680411 | 101682131 | 204634 |
| 37725 | 101703225 | 101704005 | 204634 |
| 37726 | 101705796 | 101706320 | 204634 |
| 37727 | 101722933 | 101723561 | 204634 |
| 37728 | 101726816 | 101727664 | 204634 |
| 37729 | 101730030 | 101730842 | 204634 |
| 37730 | 101733313 | 101734274 | 204634 |
| 37731 | 101735359 | 101738469 | 204634 |
| 37732 | 101739738 | 101743244 | 204634 |
| 37733 | 101751843 | 101752549 | 204634 |
| 37734 | 101766056 | 101769782 | 272902, 204634 |
| 37735 | 101792401 | 101793038 | 204634 |
| 37736 | 101846581 | 101849357 | 204634 |
| 37737 | 101868209 | 101870509 | 158435, 204634 |
| 37738 | 101903740 | 101904211 | 163162 |
| 37739 | 101922729 | 101926022 | 264857, 163162 |
| 37740 | 102085953 | 102087039 | 196460 |
| 37741 | 102132774 | 102135999 | |
| 37742 | 102183059 | 102183833 | |
| 37743 | 102212486 | 102213418 | |
| 37744 | 102213572 | 102215166 | |
| 37745 | 102241655 | 102242474 | |
| 37746 | 102246592 | 102247280 | |
| 37747 | 102305720 | 102306584 | |
| 37748 | 102312957 | 102317246 | 071054 |
| 37749 | 102351330 | 102352140 | 071054 |
| 37750 | 102352264 | 102355612 | 071054 |
| 37751 | 102388344 | 102388771 | 071054 |
| 37752 | 102405003 | 102406418 | 071054 |
| 37753 | 102419592 | 102420136 | 071054 |
| 37754 | 102420171 | 102420989 | 071054 |
| 37755 | 102432168 | 102432969 | 071054 |
| 37756 | 102443609 | 102444606 | 071054 |
| 37757 | 102473715 | 102476060 | 071054 |
| 37758 | 102505306 | 102506637 | 071054 |
| 37759 | 102577006 | 102579308 | |
| 37760 | 102603398 | 102604040 | |
| 37761 | 102614577 | 102619448 | 115590 |
| 37762 | 102643007 | 102645453 | 115590 |
| 37763 | 102647104 | 102648223 | |
| 37764 | 102665846 | 102667812 | |
| 37765 | 102672029 | 102673287 | |
| 37766 | 102673420 | 102675342 | |
| 37767 | 102678926 | 102682863 | 115594 |
| 37768 | 102685462 | 102687684 | 115594 |
| 37769 | 102711347 | 102712410 | 115594 |
| 37770 | 102715711 | 102718992 | 115594 |
| 37771 | 102720216 | 102727957 | 115594 |
| 37772 | 102742967 | 102745641 | 115594 |
| 37773 | 102758354 | 102759990 | 115594 |
| 37774 | 102771501 | 102773083 | 115594 |
| 37775 | 102803204 | 102804973 | 115598 |
| 37776 | 102806423 | 102807341 | 115598 |
| 37777 | 102808640 | 102810010 | 115598 |
| 37778 | 102843148 | 102845132 | 115598 |
| 37779 | 102856649 | 102857803 | |
| 37780 | 102867412 | 102868475 | |
| 37781 | 102874187 | 102876010 | |
| 37782 | 102971931 | 102973267 | 115604 |
| 37783 | 103352029 | 103353604 | 170417, 135953 |
| 37784 | 103417669 | 103419206 | 170417 |
| 37785 | 104389790 | 104391328 | |
| 37786 | 104404618 | 104405388 | |
| 37787 | 104405408 | 104406635 | |
| 37788 | 105029920 | 105030858 | 225765, 227157 |
| 37789 | 105036842 | 105037432 | |
| 37790 | 105042179 | 105043919 | |
| 37791 | 105110197 | 105110732 | 235597, 234781 |
| 37792 | 105556021 | 105556639 | 224509 |
| 37793 | 105653876 | 105655401 | 135972, 224509 |
| 37794 | 105945054 | 105947197 | 135966, 235319 |
| 37795 | 105952923 | 105955012 | 135974, 272994 |
| 37796 | 106012503 | 106013832 | 115641 |
| 37797 | 106014126 | 106016168 | 115641 |
| 37798 | 106019872 | 106021649 | 115641 |
| 37799 | 106025976 | 106027504 | 115641 |
| 37800 | 106037442 | 106038039 | 115641 |
| 37801 | 106070986 | 106073099 | |
| 37802 | 106076541 | 106077417 | |
| 37803 | 106106206 | 106107079 | |
| 37804 | 106107193 | 106108180 | |
| 37805 | 106134160 | 106134953 | |
| 37806 | 106328442 | 106330629 | |
| 37807 | 106361327 | 106362246 | 071051 |
| 37808 | 106543314 | 106544023 | |
| 37809 | 106646942 | 106648069 | |
| 37810 | 106743420 | 106744477 | 115652 |
| 37811 | 106809119 | 106811431 | 115652 |
| 37812 | 106885831 | 106887462 | |
| 37813 | 106921006 | 106921737 | 233939 |
| 37814 | 107196096 | 107196721 | |
| 37815 | 108815905 | 108816685 | 225328 |
| 37816 | 108883670 | 108884876 | |
| 37817 | 109039702 | 109040355 | 271284 |
| 37818 | 109064610 | 109066672 | 135968 |
| 37819 | 109108719 | 109109303 | 135968 |
| 37820 | 109149469 | 109152044 | 169756, 214184 |
| 37821 | 109252738 | 109254160 | 169756 |
| 37822 | 109335041 | 109336477 | 153201 |
| 37823 | 109402762 | 109403632 | 163006 |
| 37824 | 109521050 | 109522390 | 135960 |
| 37825 | 109573511 | 109574243 | 135960 |
| 37826 | 109637952 | 109638731 | |
| 37827 | 109647505 | 109648634 | |
| 37828 | 109834588 | 109835811 | 172985 |
| 37829 | 109858610 | 109860200 | 172985 |
| 37830 | 110069796 | 110070418 | 172985 |
| 37831 | 110314647 | 110320949 | 186522 |
| 37832 | 110362245 | 110362669 | 230696, 186522 |
| 37833 | 110370274 | 110374122 | 198142, 186522 |
| 37834 | 110387621 | 110390521 | |
| 37835 | 110393560 | 110394396 | |
| 37836 | 110395392 | 110396347 | |
| 37837 | 110401773 | 110402971 | |
| 37838 | 110448076 | 110449597 | |
| 37839 | 110451533 | 110452378 | |
| 37840 | 110459171 | 110461128 | |
| 37841 | 110962273 | 110962909 | 144061 |
| 37842 | 110969244 | 110970450 | 175701 |
| 37843 | 111474465 | 111475647 | |
| 37844 | 111477839 | 111478647 | |
| 37845 | 111789197 | 111791828 | 153093 |
| 37846 | 111877373 | 111881395 | 153094 |
| 37847 | 111917645 | 111920051 | 153094 |
| 37848 | 111933234 | 111937834 | |
| 37849 | 111942271 | 111943991 | |
| 37850 | 111979292 | 111979712 | 172965 |
| 37851 | 111984813 | 111985939 | 172965 |
| 37852 | 112279646 | 112281157 | |
| 37853 | 112374861 | 112376790 | |
| 37854 | 112416319 | 112418463 | |
| 37855 | 112428848 | 112429689 | |
| 37856 | 112430920 | 112431626 | |
| 37857 | 112455436 | 112457704 | |
| 37858 | 112463382 | 112464943 | |
| 37859 | 112473501 | 112473993 | |
| 37860 | 112640949 | 112642684 | 153107 |
| 37861 | 112655352 | 112657045 | 153208 |
| 37862 | 112666243 | 112666946 | 153208 |
| 37863 | 112670106 | 112670677 | 153208 |
| 37864 | 112677112 | 112678802 | 153208 |
| 37865 | 112688420 | 112688847 | 153208 |
| 37866 | 112703487 | 112704878 | 153208 |
| 37867 | 112730356 | 112731712 | 153208 |
| 37868 | 112812610 | 112814257 | 153214 |
| 37869 | 113011633 | 113012836 | 144161 |
| 37870 | 113016800 | 113017558 | |
| 37871 | 113032234 | 113034760 | 188177 |
| 37872 | 113072051 | 113073016 | 188177 |
| 37873 | 113073934 | 113075991 | 188177 |
| 37874 | 113238486 | 113241603 | 114999 |
| 37875 | 113298972 | 113301002 | 125630, 114999 |
| 37876 | 113336816 | 113337301 | 207383 |
| 37877 | 113341033 | 113343294 | 125611 |
| 37878 | 113357509 | 113358430 | 243389 |
| 37879 | 113363712 | 113364863 | 243389 |
| 37880 | 113379866 | 113380499 | |
| 37881 | 113401029 | 113404936 | 144136, 237753 |
| 37882 | 113438169 | 113438907 | |
| 37883 | 113448339 | 113451176 | |
| 37884 | 113494398 | 113495829 | 169607, 144130 |
| 37885 | 113547783 | 113548297 | |
| 37886 | 113550892 | 113552985 | |
| 37887 | 113568937 | 113570297 | |
| 37888 | 113575526 | 113576279 | |
| 37889 | 113581668 | 113582679 | |
| 37890 | 113591896 | 113592441 | 125538 |
| 37891 | 113696518 | 113697717 | |
| 37892 | 113715942 | 113717049 | |
| 37893 | 113845751 | 113846745 | |
| 37894 | 113881447 | 113886278 | 136689 |
| 37895 | 113913658 | 113917649 | 125637 |
| 37896 | 113921930 | 113923255 | 125637 |
| 37897 | 113924247 | 113926425 | 125637 |
| 37898 | 113942902 | 113943584 | 125637 |
| 37899 | 113955529 | 113958506 | 125637 |
| 37900 | 113963853 | 113965013 | 125637 |
| 37901 | 113975067 | 113977255 | 125618, 189223 |
| 37902 | 113996776 | 114000607 | 258395, 125618, 189223 |
| 37903 | 114002675 | 114003770 | 125618, 189223 |
| 37904 | 114006556 | 114007696 | 125618, 189223 |
| 37905 | 114038954 | 114042861 | |
| 37906 | 114081555 | 114088909 | |
| 37907 | 114093523 | 114098138 | |
| 37908 | 114127715 | 114128582 | |
| 37909 | 114464682 | 114465139 | 115084 |
| 37910 | 114512991 | 114515084 | 115084 |
| 37911 | 114646471 | 114649628 | 115091, 270019 |
| 37912 | 114651808 | 114652551 | 115091 |
| 37913 | 114917705 | 114918567 | |
| 37914 | 117207217 | 117209567 | |
| 37915 | 118571847 | 118573456 | 088205 |
| 37916 | 118593383 | 118593980 | 236255 |
| 37917 | 118613945 | 118614478 | |
| 37918 | 118674753 | 118675528 | 125633, 125631 |
| 37919 | 118737338 | 118739671 | 125633 |
| 37920 | 118770344 | 118772774 | 125633 |
| 37921 | 118842189 | 118843758 | |
| 37922 | 118845016 | 118848149 | 125629 |
| 37923 | 118869453 | 118872123 | |
| 37924 | 118879428 | 118882645 | |
| 37925 | 118903301 | 118905220 | 226856 |
| 37926 | 118936948 | 118937486 | 226856 |
| 37927 | 118942538 | 118944793 | 226856 |
| 37928 | 119076703 | 119077413 | |
| 37929 | 119079112 | 119079732 | |
| 37930 | 119187597 | 119189445 | |
| 37931 | 119612866 | 119613723 | |
| 37932 | 119625623 | 119626518 | |
| 37933 | 119636096 | 119636655 | |
| 37934 | 119951939 | 119953197 | |
| 37935 | 119975294 | 119976854 | |
| 37936 | 119979103 | 119979722 | |
| 37937 | 119979896 | 119983453 | 115107 |
| 37938 | 119997534 | 119999238 | 115107 |
| 37939 | 120013332 | 120013961 | 115107 |
| 37940 | 120040917 | 120042550 | |
| 37941 | 120123412 | 120125841 | 155368, 186132 |
| 37942 | 120144805 | 120145725 | |
| 37943 | 120160137 | 120160954 | |
| 37944 | 120183307 | 120185124 | |
| 37945 | 120188414 | 120193683 | 171227 |
| 37946 | 120239734 | 120241912 | 231013, 080293 |
| 37947 | 120242243 | 120250985 | 231013, 080293 |
| 37948 | 120301496 | 120303273 | 163075 |
| 37949 | 120310727 | 120312306 | 163075 |
| 37950 | 120336923 | 120338125 | 163075 |
| 37951 | 120435290 | 120437729 | 144120 |
| 37952 | 120478601 | 120479867 | |
| 37953 | 120501710 | 120502443 | |
| 37954 | 120514211 | 120514999 | |
| 37955 | 120516570 | 120518731 | 088179 |
| 37956 | 120566530 | 120567672 | 088179 |
| 37957 | 120708463 | 120709067 | 088179 |
| 37958 | 120770225 | 120771805 | 115109 |
| 37959 | 120824098 | 120825209 | 115109 |
| 37960 | 120979900 | 120981841 | 226479 |
| 37961 | 121010224 | 121011623 | 144118 |
| 37962 | 121100598 | 121103220 | |
| 37963 | 121156695 | 121157339 | |
| 37964 | 121199410 | 121200195 | |
| 37965 | 121226913 | 121229195 | |
| 37966 | 121230093 | 121232598 | |
| 37967 | 121238536 | 121239987 | |
| 37968 | 121242629 | 121243312 | |
| 37969 | 121244180 | 121245057 | |
| 37970 | 121261161 | 121262284 | |
| 37971 | 121273885 | 121275605 | |
| 37972 | 121282179 | 121283480 | |
| 37973 | 121297382 | 121299038 | |
| 37974 | 121306074 | 121306765 | |
| 37975 | 121310115 | 121311129 | |
| 37976 | 121383336 | 121383956 | |
| 37977 | 121426702 | 121427211 | |
| 37978 | 121671999 | 121673692 | 074047 |
| 37979 | 121691380 | 121694115 | 074047 |
| 37980 | 121832728 | 121833269 | |
| 37981 | 121968202 | 121969104 | |
| 37982 | 122040332 | 122040979 | 115112 |
| 37983 | 122118153 | 122118539 | 074054 |
| 37984 | 122120548 | 122122356 | 074054 |
| 37985 | 122175846 | 122176676 | 074054 |
| 37986 | 122246468 | 122247348 | 074054 |
| 37987 | 122287285 | 122289053 | 265451, 264229, 074054 |
| 37988 | 122289312 | 122289897 | 265451, 074054 |
| 37989 | 122333259 | 122333891 | 074054 |
| 37990 | 122405379 | 122408724 | 236859, 074054 |
| 37991 | 122456925 | 122457858 | 236859 |
| 37992 | 122493683 | 122494887 | 211460, 155438 |
| 37993 | 122512286 | 122514262 | 211460 |
| 37994 | 122524171 | 122524860 | 211460 |
| 37995 | 122536775 | 122537171 | |
| 37996 | 122567107 | 122567696 | |
| 37997 | 122993756 | 122994459 | |
| 37998 | 123123920 | 123124409 | |
| 37999 | 123190658 | 123191352 | |
| 38000 | 123331569 | 123332247 | |
| 38001 | 123391661 | 123393011 | |
| 38002 | 123408250 | 123412011 | |
| 38003 | 123454706 | 123455986 | |
| 38004 | 123462469 | 123467392 | |
| 38005 | 123467481 | 123468060 | |
| 38006 | 123505652 | 123506895 | |
| 38007 | 125091297 | 125091840 | 155052 |
| 38008 | 125101241 | 125102226 | 155052 |
| 38009 | 125323862 | 125324596 | 155052 |
| 38010 | 125843492 | 125844834 | |
| 38011 | 126808543 | 126809349 | |
| 38012 | 127205919 | 127207022 | |
| 38013 | 127413274 | 127414119 | 136732 |
| 38014 | 127534344 | 127535476 | |
| 38015 | 127728912 | 127730045 | |
| 38016 | 127754157 | 127755216 | |
| 38017 | 127810988 | 127812210 | 136717 |
| 38018 | 127818055 | 127818547 | 136717 |
| 38019 | 127821576 | 127823483 | 136717 |
| 38020 | 127825133 | 127826205 | 136717 |
| 38021 | 127841327 | 127842050 | 136717 |
| 38022 | 127862962 | 127865538 | 136717 |
| 38023 | 127872976 | 127873832 | |
| 38024 | 127886163 | 127886682 | |
| 38025 | 127951086 | 127952740 | 186684 |
| 38026 | 127984031 | 127984822 | |
| 38027 | 127988641 | 127989507 | |
| 38028 | 128050950 | 128052485 | 163161 |
| 38029 | 128083906 | 128084564 | 169967 |
| 38030 | 128104492 | 128105232 | 169967 |
| 38031 | 128115434 | 128116088 | 169967 |
| 38032 | 128143600 | 128146541 | 169967 |
| 38033 | 128155302 | 128156197 | 236682 |
| 38034 | 128164742 | 128167052 | |
| 38035 | 128167482 | 128170235 | |
| 38036 | 128170902 | 128174800 | |
| 38037 | 128175659 | 128178362 | 115718 |
| 38038 | 128195344 | 128196561 | 163166 |
| 38039 | 128211678 | 128213691 | 163166 |
| 38040 | 128266041 | 128266698 | 163166 |
| 38041 | 128282673 | 128285638 | 163166 |
| 38042 | 128421472 | 128423697 | 072163 |
| 38043 | 128431728 | 128433946 | 072163 |
| 38044 | 128457554 | 128460746 | 173349, 136709 |
| 38045 | 128492866 | 128494177 | 136709 |
| 38046 | 128495363 | 128495955 | 136709 |
| 38047 | 128567766 | 128569886 | 136709 |
| 38048 | 128614697 | 128616202 | 144231 |
| 38049 | 128784076 | 128786250 | 136715 |
| 38050 | 128847977 | 128849592 | 136731 |
| 38051 | 128944422 | 128945498 | 136731 |
| 38052 | 128990229 | 128991566 | |
| 38053 | 129063510 | 129064344 | 136720 |
| 38054 | 129066904 | 129067746 | 136720 |
| 38055 | 129079292 | 129080630 | |
| 38056 | 129083163 | 129083723 | |
| 38057 | 129292300 | 129292816 | |
| 38058 | 129350891 | 129352291 | |
| 38059 | 129352398 | 129353227 | |
| 38060 | 129827311 | 129827925 | 238277 |
| 38061 | 129832020 | 129832574 | |
| 38062 | 130634406 | 130635673 | 229536 |
| 38063 | 130938543 | 130940050 | 152082, 136699 |
| 38064 | 131099221 | 131101293 | 136718, 136710 |
| 38065 | 131112551 | 131114518 | 072135 |
| 38066 | 131148718 | 131150112 | |
| 38067 | 131554941 | 131556080 | |
| 38068 | 131774648 | 131775162 | 136002 |
| 38069 | 131834221 | 131835440 | 152102 |
| 38070 | 131849965 | 131852956 | 152102 |
| 38071 | 131861327 | 131864413 | 115762 |
| 38072 | 132249715 | 132251398 | 152117, 173272 |
| 38073 | 133011740 | 133012179 | 163046 |
| 38074 | 133012570 | 133013079 | 163046 |
| 38075 | 133104545 | 133105434 | 272769 |
| 38076 | 133172625 | 133175256 | 183840 |
| 38077 | 133181872 | 133183537 | 183840 |
| 38078 | 133300485 | 133301414 | 183840 |
| 38079 | 133317830 | 133319966 | 183840 |
| 38080 | 133378660 | 133379766 | 183840 |
| 38081 | 133389321 | 133390556 | 183840 |
| 38082 | 133427352 | 133429502 | 176771, 150551 |
| 38083 | 133915485 | 133916535 | 176771 |
| 38084 | 133951418 | 133953166 | 176771 |
| 38085 | 133956126 | 133956825 | 176771 |
| 38086 | 133957402 | 133959695 | 176771 |
| 38087 | 134023027 | 134024533 | 176771, 226953 |
| 38088 | 134104231 | 134104762 | 176771 |
| 38089 | 134178727 | 134179780 | 176771 |
| 38090 | 134252678 | 134253285 | 176771 |
| 38091 | 134260825 | 134261399 | 176771 |
| 38092 | 134262515 | 134263100 | 176771 |
| 38093 | 134323909 | 134326680 | 176771 |
| 38094 | 134333655 | 134335205 | |
| 38095 | 134336277 | 134337426 | |
| 38096 | 134356475 | 134357556 | |
| 38097 | 134424003 | 134425858 | |
| 38098 | 134429977 | 134433088 | |
| 38099 | 134475982 | 134476803 | |
| 38100 | 134523110 | 134523971 | |
| 38101 | 134534544 | 134535248 | |
| 38102 | 134877147 | 134879366 | 152127 |
| 38103 | 134881428 | 134882626 | 152127 |
| 38104 | 134888956 | 134889755 | 152127 |
| 38105 | 134897127 | 134898466 | 152127 |
| 38106 | 134945948 | 134947220 | 152127 |
| 38107 | 135159848 | 135160385 | 152127 |
| 38108 | 135188945 | 135191680 | 152127 |
| 38109 | 135208084 | 135209072 | 152127 |
| 38110 | 135441009 | 135441890 | 152128 |
| 38111 | 135580894 | 135582237 | 224043 |
| 38112 | 135593776 | 135598556 | 153086, 224043 |
| 38113 | 135618816 | 135621706 | 224043, 153086 |
| 38114 | 135622043 | 135625315 | 224043, 153086 |
| 38115 | 135627622 | 135628991 | 224043, 153086 |
| 38116 | 135674583 | 135677659 | 082258, 224043 |
| 38117 | 135690300 | 135692695 | 082258 |
| 38118 | 135809305 | 135811072 | 115839 |
| 38119 | 135849075 | 135849774 | 115839 |
| 38120 | 136287556 | 136290332 | 048991, 121988 |
| 38121 | 136392312 | 136393414 | 048991 |
| 38122 | 136498666 | 136501038 | 144224 |
| 38123 | 136532806 | 136533362 | 144224 |
| 38124 | 136633223 | 136634197 | 076003 |
| 38125 | 136705578 | 136707528 | 115866 |
| 38126 | 136741538 | 136744014 | 231890, 115866 |
| 38127 | 137667294 | 137667811 | 144229 |
| 38128 | 138686189 | 138687424 | |
| 38129 | 138698904 | 138701320 | |
| 38130 | 138709370 | 138711292 | |
| 38131 | 138720823 | 138724825 | 150540 |
| 38132 | 138835768 | 138836117 | |
| 38133 | 138838735 | 138840206 | |
| 38134 | 138867824 | 138868999 | |
| 38135 | 139024245 | 139026199 | |
| 38136 | 139032065 | 139035020 | |
| 38137 | 139113627 | 139114168 | |
| 38138 | 139152739 | 139154812 | |
| 38139 | 139177871 | 139180418 | 228043 |
| 38140 | 139200881 | 139201323 | 228043 |
| 38141 | 139258293 | 139260633 | 144228, 228043 |
| 38142 | 139272395 | 139273352 | 144228 |
| 38143 | 139273630 | 139274813 | 144228 |
| 38144 | 139339389 | 139340367 | |
| 38145 | 142087208 | 142089092 | 168702 |
| 38146 | 142468074 | 142468637 | 168702 |
| 38147 | 143172867 | 143173965 | |
| 38148 | 143229829 | 143230439 | |
| 38149 | 143344125 | 143345065 | |
| 38150 | 143503108 | 143503834 | |
| 38151 | 143629944 | 143639059 | 115919 |
| 38152 | 143708866 | 143709628 | 115919 |
| 38153 | 144955413 | 144956347 | 121964 |
| 38154 | 144987758 | 144988490 | 121964 |
| 38155 | 145077633 | 145078503 | 121964 |
| 38156 | 145089031 | 145090949 | 121964 |
| 38157 | 145115265 | 145116924 | |
| 38158 | 145128549 | 145129360 | |
| 38159 | 145161508 | 145161986 | 169554 |
| 38160 | 146512535 | 146513464 | |
| 38161 | 146518083 | 146519375 | |
| 38162 | 146557633 | 146558413 | |
| 38163 | 146971338 | 146973022 | |
| 38164 | 147020015 | 147020718 | |
| 38165 | 147844307 | 147844784 | |
| 38166 | 148139643 | 148140614 | |
| 38167 | 148173065 | 148174664 | |
| 38168 | 148182384 | 148183711 | |
| 38169 | 148187477 | 148188540 | |
| 38170 | 148191213 | 148191945 | |
| 38171 | 148257026 | 148258009 | |
| 38172 | 148334886 | 148335312 | |
| 38173 | 148601066 | 148603572 | 121989 |
| 38174 | 148684539 | 148685248 | 121989 |
| 38175 | 148777402 | 148779699 | 204406, 115947 |
| 38176 | 148887960 | 148888559 | 204406 |
| 38177 | 149013371 | 149014304 | 204406 |
| 38178 | 149017007 | 149017654 | 204406 |
| 38179 | 149030461 | 149031327 | 204406 |
| 38180 | 149266620 | 149267575 | 204406 |
| 38181 | 149401654 | 149403682 | 135999 |
| 38182 | 150186150 | 150187523 | 187123 |
| 38183 | 150276381 | 150277497 | 187123 |
| 38184 | 150278803 | 150279827 | 187123 |
| 38185 | 150418701 | 150419512 | |
| 38186 | 150443060 | 150445012 | 231969, 168288 |
| 38187 | 150507708 | 150508301 | 231969 |
| 38188 | 150510144 | 150511053 | 231969 |
| 38189 | 150733813 | 150735110 | |
| 38190 | 150741712 | 150742498 | |
| 38191 | 150842415 | 150843112 | |
| 38192 | 150845061 | 150847217 | |
| 38193 | 150850837 | 150851383 | |
| 38194 | 150857754 | 150858845 | |
| 38195 | 150954416 | 150955255 | |
| 38196 | 150981310 | 150983712 | |
| 38197 | 150989842 | 150992652 | |
| 38198 | 151021155 | 151027020 | |
| 38199 | 151035101 | 151035718 | 230645 |
| 38200 | 151044649 | 151046150 | 230645 |
| 38201 | 151071072 | 151071663 | 230645 |
| 38202 | 151111951 | 151112778 | 231420, 230645 |
| 38203 | 151139300 | 151140028 | 230645 |
| 38204 | 151152919 | 151154125 | 230645 |
| 38205 | 151175138 | 151177610 | |
| 38206 | 151177638 | 151178408 | |
| 38207 | 151214044 | 151215009 | |
| 38208 | 151227578 | 151228431 | |
| 38209 | 151232987 | 151233625 | |
| 38210 | 151267245 | 151268032 | |
| 38211 | 151328697 | 151329371 | 115963 |
| 38212 | 151332730 | 151334479 | 115963 |
| 38213 | 151335659 | 151337304 | 115963 |
| 38214 | 151340747 | 151344657 | 115963 |
| 38215 | 151347909 | 151349593 | 115963 |
| 38216 | 151385115 | 151386558 | 115963 |
| 38217 | 151408778 | 151410347 | 236049 |
| 38218 | 151412167 | 151412971 | 236049 |
| 38219 | 151443149 | 151445701 | |
| 38220 | 151446100 | 151447565 | |
| 38221 | 151454818 | 151455365 | 232359 |
| 38222 | 151457655 | 151459034 | 232359 |
| 38223 | 151469273 | 151470223 | 232359, 224048 |
| 38224 | 151474134 | 151475776 | 232359, 224048 |
| 38225 | 151475888 | 151479324 | 232359, 224048 |
| 38226 | 151486911 | 151488205 | 224048 |
| 38227 | 151503469 | 151504218 | |
| 38228 | 151542872 | 151543493 | |
| 38229 | 151767740 | 151768968 | |
| 38230 | 151905961 | 151907992 | |
| 38231 | 152116933 | 152118812 | 184898 |
| 38232 | 152120638 | 152121228 | |
| 38233 | 152145541 | 152147475 | 123609 |
| 38234 | 152148593 | 152149298 | |
| 38235 | 152266069 | 152267493 | 080345 |
| 38236 | 152486783 | 152487355 | 183091 |
| 38237 | 152494727 | 152495587 | 183091 |
| 38238 | 152683982 | 152685560 | 162980 |
| 38239 | 153028090 | 153028738 | 115145 |
| 38240 | 153031333 | 153033350 | 115145 |
| 38241 | 153191221 | 153192862 | 157827 |
| 38242 | 153261634 | 153262194 | 157827 |
| 38243 | 153278021 | 153279087 | 157827 |
| 38244 | 153288552 | 153289210 | 157827 |
| 38245 | 153302090 | 153302976 | 157827 |
| 38246 | 153550714 | 153551522 | 196504 |
| 38247 | 153572827 | 153575958 | 177917, 196504 |
| 38248 | 155306254 | 155307210 | 224675, 144278 |
| 38249 | 155457310 | 155458118 | |
| 38250 | 155553892 | 155554792 | 235949 |
| 38251 | 155555149 | 155556515 | 162989 |
| 38252 | 156832175 | 156832757 | |
| 38253 | 157176272 | 157177313 | |
| 38254 | 157188366 | 157189050 | 153234 |
| 38255 | 157189065 | 157192597 | 153234 |
| 38256 | 157197545 | 157199910 | 153234 |
| 38257 | 157255449 | 157258141 | |
| 38258 | 157262000 | 157262921 | |
| 38259 | 157291473 | 157293520 | 115159 |
| 38260 | 157515791 | 157516824 | |
| 38261 | 157659329 | 157660561 | |
| 38262 | 158039127 | 158040208 | |
| 38263 | 158102413 | 158104145 | |
| 38264 | 158186070 | 158186897 | |
| 38265 | 158223973 | 158224753 | |
| 38266 | 158336598 | 158337520 | 115165 |
| 38267 | 158345169 | 158345898 | 115165 |
| 38268 | 158484857 | 158486157 | 123612 |
| 38269 | 158589040 | 158589535 | 234584 |
| 38270 | 158598222 | 158599198 | 115170 |
| 38271 | 158602724 | 158603587 | 115170 |
| 38272 | 158603975 | 158604941 | 115170 |
| 38273 | 158620698 | 158621567 | 115170 |
| 38274 | 158640569 | 158641849 | 115170 |
| 38275 | 158678036 | 158679343 | 115170 |
| 38276 | 158686607 | 158689336 | 115170 |
| 38277 | 158692942 | 158696161 | 115170 |
| 38278 | 158696590 | 158698417 | 115170 |
| 38279 | 158698554 | 158699493 | 115170 |
| 38280 | 158730750 | 158733985 | 007001, 115170 |
| 38281 | 158737232 | 158737933 | 007001 |
| 38282 | 158788031 | 158788551 | 007001 |
| 38283 | 158794364 | 158795680 | 007001 |
| 38284 | 158796425 | 158797051 | 007001 |
| 38285 | 158899437 | 158900160 | 007001 |
| 38286 | 158913203 | 158913921 | 007001 |
| 38287 | 158955452 | 158958366 | 007001 |
| 38288 | 158984634 | 158985745 | 007001, 237327 |
| 38289 | 158986866 | 158989152 | 007001, 237327 |
| 38290 | 159047542 | 159048642 | 227480, 153237 |
| 38291 | 159250777 | 159252655 | 153237 |
| 38292 | 159312826 | 159315434 | 144283, 153237 |
| 38293 | 159315987 | 159316597 | 144283 |
| 38294 | 159353939 | 159354402 | 144283 |
| 38295 | 159395625 | 159396167 | 144283 |
| 38296 | 159475264 | 159476495 | 144283 |
| 38297 | 159552267 | 159552809 | 204380, 228586 |
| 38298 | 159684957 | 159685606 | 163331 |
| 38299 | 159810268 | 159811321 | |
| 38300 | 159824266 | 159826747 | 115183 |
| 38301 | 159851361 | 159852177 | 115183 |
| 38302 | 159954909 | 159956352 | 115183 |
| 38303 | 160059036 | 160059603 | 115183 |
| 38304 | 160142399 | 160144265 | 196151 |
| 38305 | 160362740 | 160363750 | 123636 |
| 38306 | 160470589 | 160474019 | 224152, 123636 |
| 38307 | 160474152 | 160474993 | |
| 38308 | 160567944 | 160570615 | 136536, 226266 |
| 38309 | 160653624 | 160655512 | 241399, 248672, 054219 |
| 38310 | 161060986 | 161067886 | 115221 |
| 38311 | 161070442 | 161071810 | 115221 |
| 38312 | 161077514 | 161090484 | 115221 |
| 38313 | 161097731 | 161099398 | 115221 |
| 38314 | 161107992 | 161111148 | 115221 |
| 38315 | 161124357 | 161128073 | 115221 |
| 38316 | 161262739 | 161264442 | 263948, 153250 |
| 38317 | 161289016 | 161289654 | 153250 |
| 38318 | 161348559 | 161350703 | 153250 |
| 38319 | 161826446 | 161827099 | |
| 38320 | 161886880 | 161887441 | |
| 38321 | 161979163 | 161980676 | 224467 |
| 38322 | 162015804 | 162017936 | 224467, 136560 |
| 38323 | 162100629 | 162102397 | 227403, 235724 |
| 38324 | 162107208 | 162107990 | 235724 |
| 38325 | 162113520 | 162114755 | |
| 38326 | 162164151 | 162166368 | 115233 |
| 38327 | 162878650 | 162879505 | 197635 |
| 38328 | 162883983 | 162884813 | 197635 |
| 38329 | 162885685 | 162886533 | 197635 |
| 38330 | 162906879 | 162907559 | 197635 |
| 38331 | 162929499 | 162932761 | 230918, 197635 |
| 38332 | 162941017 | 162943844 | |
| 38333 | 162944619 | 162950101 | 224674, 233397 |
| 38334 | 162956909 | 162957571 | |
| 38335 | 162974955 | 162975638 | |
| 38336 | 163041045 | 163041982 | 078098 |
| 38337 | 163174067 | 163176188 | 115271, 115267 |
| 38338 | 163200197 | 163201355 | 115271 |
| 38339 | 163430868 | 163432531 | 184611 |
| 38340 | 163436415 | 163436884 | 184611 |
| 38341 | 163438686 | 163439770 | 184611 |
| 38342 | 163442649 | 163443180 | 184611 |
| 38343 | 163464077 | 163465383 | 184611 |
| 38344 | 163544762 | 163545412 | 184611 |
| 38345 | 163566660 | 163567649 | 184611 |
| 38346 | 164066909 | 164067667 | |
| 38347 | 164521637 | 164525249 | 182263 |
| 38348 | 164564584 | 164565521 | 182263 |
| 38349 | 164591226 | 164593782 | 182263 |
| 38350 | 164630646 | 164631938 | 237844 |
| 38351 | 164636464 | 164637017 | 237844 |
| 38352 | 164651087 | 164651783 | 237844 |
| 38353 | 165370857 | 165371757 | 115290 |
| 38354 | 165423702 | 165424537 | 115290 |
| 38355 | 165477233 | 165479803 | 115290 |
| 38356 | 165511284 | 165512489 | 082438 |
| 38357 | 165516959 | 165518341 | 082438 |
| 38358 | 165550634 | 165551498 | 082438 |
| 38359 | 165567071 | 165569020 | 082438 |
| 38360 | 165596376 | 165597107 | 082438 |
| 38361 | 165622601 | 165623109 | 082438 |
| 38362 | 165638718 | 165639212 | 082438 |
| 38363 | 165667243 | 165667726 | 082438 |
| 38364 | 165695514 | 165699241 | 233255, 082438 |
| 38365 | 165732149 | 165732824 | |
| 38366 | 165734997 | 165735795 | |
| 38367 | 165743771 | 165744593 | |
| 38368 | 165753048 | 165754272 | 169507 |
| 38369 | 165776238 | 165778152 | 169507 |
| 38370 | 165793912 | 165795043 | 169507 |
| 38371 | 165864887 | 165867096 | 236283 |
| 38372 | 165912813 | 165913537 | 236283 |
| 38373 | 166430037 | 166431546 | 178662 |
| 38374 | 166809294 | 166810995 | 123607 |
| 38375 | 167086094 | 167087801 | 169432, 236107 |
| 38376 | 167227702 | 167233505 | 169432 |
| 38377 | 167324485 | 167325295 | 136546 |
| 38378 | 168604733 | 168606557 | |
| 38379 | 168617955 | 168618632 | |
| 38380 | 168621187 | 168621958 | |
| 38381 | 168671436 | 168672484 | 235335 |
| 38382 | 168683400 | 168684699 | 172318, 235335 |
| 38383 | 169066845 | 169069746 | 198648 |
| 38384 | 169206616 | 169207334 | |
| 38385 | 169261125 | 169261863 | |
| 38386 | 169311939 | 169313969 | 172292 |
| 38387 | 169334536 | 169335339 | 172292 |
| 38388 | 169415361 | 169416226 | 172292 |
| 38389 | 169637021 | 169637788 | 227617 |
| 38390 | 169706054 | 169706472 | 163072, 152253 |
| 38391 | 169746760 | 169747330 | 152253 |
| 38392 | 169769846 | 169770534 | 152253 |
| 38393 | 169817992 | 169818678 | 073734 |
| 38394 | 169848418 | 169850129 | 073734 |
| 38395 | 169867378 | 169872010 | 073734 |
| 38396 | 169884564 | 169888811 | 073734 |
| 38397 | 169925073 | 169926594 | 073737 |
| 38398 | 169928153 | 169931909 | 073737 |
| 38399 | 170114528 | 170115046 | 081479 |
| 38400 | 170220462 | 170221418 | |
| 38401 | 170242860 | 170243768 | |
| 38402 | 170335635 | 170336684 | 163093, 251569 |
| 38403 | 170429512 | 170430707 | 138399 |
| 38404 | 170440148 | 170442866 | 138398 |
| 38405 | 170550462 | 170551763 | 144362, 213160, 154479 |
| 38406 | 170571714 | 170572560 | 213160 |
| 38407 | 170584929 | 170585399 | 213160 |
| 38408 | 170589617 | 170591496 | 213160 |
| 38409 | 170618056 | 170618549 | 213160 |
| 38410 | 170624649 | 170625749 | 231550, 213160 |
| 38411 | 170655073 | 170656457 | 138385 |
| 38412 | 170680612 | 170681796 | 138382 |
| 38413 | 170683713 | 170685016 | 144357 |
| 38414 | 170708480 | 170709174 | 144357 |
| 38415 | 170886394 | 170886987 | 144357 |
| 38416 | 171281752 | 171282423 | 071909 |
| 38417 | 171311895 | 171313125 | 071909 |
| 38418 | 171321611 | 171322534 | 071909 |
| 38419 | 171341556 | 171342394 | 071909 |
| 38420 | 171381469 | 171382674 | 071909 |
| 38421 | 171386603 | 171387560 | 071909 |
| 38422 | 171410643 | 171411447 | 071909 |
| 38423 | 171570309 | 171572466 | 204335, 222033 |
| 38424 | 171600255 | 171601392 | 234350 |
| 38425 | 171626670 | 171628143 | 239467, 234350 |
| 38426 | 171729512 | 171730342 | |
| 38427 | 171751497 | 171752431 | |
| 38428 | 171784652 | 171787254 | 115806 |
| 38429 | 171829185 | 171831140 | |
| 38430 | 172015486 | 172018470 | 198586 |
| 38431 | 172022686 | 172023535 | 198586 |
| 38432 | 172128224 | 172129070 | |
| 38433 | 172239597 | 172240135 | 123600 |
| 38434 | 172289331 | 172291669 | 115827, 123600 |
| 38435 | 172379938 | 172380344 | 071967 |
| 38436 | 172543678 | 172545186 | 077380 |
| 38437 | 172585625 | 172586614 | 077380 |
| 38438 | 172694081 | 172694804 | 115840 |
| 38439 | 172750392 | 172751243 | 115840 |
| 38440 | 172778489 | 172779786 | 128708, 115840 |
| 38441 | 172864229 | 172865928 | 172878, 115840 |
| 38442 | 172872967 | 172874073 | 172878 |
| 38443 | 172916804 | 172917543 | 172878 |
| 38444 | 173117806 | 173118944 | |
| 38445 | 173203752 | 173206258 | |
| 38446 | 173213088 | 173214131 | |
| 38447 | 173215649 | 173216880 | |
| 38448 | 173238957 | 173240396 | |
| 38449 | 173244878 | 173246190 | |
| 38450 | 173291674 | 173294982 | 091409, 226963 |
| 38451 | 173301643 | 173304417 | 091409 |
| 38452 | 173306762 | 173307771 | 091409 |
| 38453 | 173329812 | 173330897 | 232788, 091409 |
| 38454 | 173419840 | 173421998 | 152256, 225205 |
| 38455 | 173536241 | 173539087 | 230104 |
| 38456 | 173590437 | 173591908 | 228016 |
| 38457 | 173599997 | 173601295 | 091428, 228016 |
| 38458 | 173721042 | 173721747 | 091428 |
| 38459 | 173786120 | 173786913 | 091428 |
| 38460 | 173792368 | 173793205 | 091428 |
| 38461 | 173831377 | 173834144 | 091428 |
| 38462 | 173849594 | 173851529 | 091428 |
| 38463 | 173860456 | 173861461 | 091428 |
| 38464 | 173907659 | 173909068 | 091428 |
| 38465 | 173912467 | 173916269 | 091428 |
| 38466 | 173916313 | 173919943 | 091428 |
| 38467 | 173922702 | 173924203 | |
| 38468 | 173924330 | 173925377 | |
| 38469 | 173939242 | 173944244 | 091436 |
| 38470 | 173951157 | 173951681 | 091436 |
| 38471 | 173965650 | 173967354 | 091436 |
| 38472 | 174024416 | 174026683 | 091436 |
| 38473 | 174095738 | 174096698 | 091436, 238133 |
| 38474 | 174292446 | 174293699 | |
| 38475 | 174409308 | 174410466 | |
| 38476 | 174715671 | 174716687 | |
| 38477 | 174719164 | 174720178 | |
| 38478 | 174827333 | 174831990 | 172845 |
| 38479 | 174850883 | 174852162 | |
| 38480 | 174855658 | 174857563 | |
| 38481 | 174868263 | 174870222 | |
| 38482 | 174904020 | 174905194 | |
| 38483 | 175039045 | 175040048 | 138430 |
| 38484 | 175112451 | 175114412 | 138430 |
| 38485 | 175259515 | 175261338 | 144306, 138433 |
| 38486 | 175307302 | 175308001 | 163328 |
| 38487 | 175350792 | 175352978 | 226853, 163328 |
| 38488 | 175383137 | 175383539 | |
| 38489 | 175425826 | 175426636 | 115935, 236449 |
| 38490 | 175449843 | 175450336 | 237798, 115935, 236449 |
| 38491 | 175481618 | 175482253 | 115935, 236449 |
| 38492 | 175628015 | 175628563 | 138435, 236449 |
| 38493 | 175832365 | 175832971 | 128656 |
| 38494 | 175895096 | 175896162 | |
| 38495 | 176031828 | 176033295 | 229750, 215973, 115966 |
| 38496 | 176045259 | 176047171 | 154518 |
| 38497 | 176464607 | 176465597 | |
| 38498 | 176470350 | 176471897 | |
| 38499 | 176495468 | 176496174 | |
| 38500 | 176650778 | 176651542 | |
| 38501 | 176654800 | 176655447 | |
| 38502 | 176865848 | 176867856 | 144320 |
| 38503 | 176961237 | 176962764 | |
| 38504 | 177133726 | 177135168 | 128654 |
| 38505 | 177248573 | 177249416 | |
| 38506 | 177447573 | 177448138 | |
| 38507 | 177453943 | 177454595 | |
| 38508 | 177678893 | 177679892 | 230552 |
| 38509 | 177943102 | 177943584 | 236501 |
| 38510 | 178029112 | 178031816 | 236501, 229337 |
| 38511 | 178032384 | 178038088 | 229337 |
| 38512 | 178051768 | 178053952 | 229337 |
| 38513 | 178075544 | 178078728 | 263721, 170144, 229337 |
| 38514 | 178106547 | 178108373 | 116044 |
| 38515 | 178115867 | 178118111 | 116044 |
| 38516 | 178127633 | 178130984 | 222043, 116044 |
| 38517 | 178132818 | 178133580 | 116044 |
| 38518 | 178137924 | 178138794 | 116044 |
| 38519 | 178146043 | 178147320 | 116044 |
| 38520 | 178181149 | 178182983 | 213963, 116044 |
| 38521 | 178187211 | 178188257 | 213963, 116044 |
| 38522 | 178189705 | 178190921 | 213963, 116044 |
| 38523 | 178202247 | 178204074 | 213963, 116044 |
| 38524 | 178256680 | 178258725 | 018510, 213963, 116044 |
| 38525 | 178261368 | 178261764 | 018510 |
| 38526 | 178262330 | 178263496 | 018510 |
| 38527 | 178265226 | 178265646 | 018510 |
| 38528 | 178417266 | 178418444 | 196659 |
| 38529 | 178483186 | 178484328 | 197557, 237655 |
| 38530 | 178556777 | 178559069 | 128655 |
| 38531 | 178588946 | 178589898 | 128655 |
| 38532 | 178648663 | 178650152 | 128655 |
| 38533 | 178720172 | 178720702 | 128655 |
| 38534 | 178738300 | 178739492 | 128655 |
| 38535 | 178753260 | 178753716 | 128655 |
| 38536 | 178853395 | 178854743 | 236664, 128655 |
| 38537 | 178935424 | 178936183 | 128655 |
| 38538 | 178936756 | 178938563 | 128655 |
| 38539 | 178976794 | 178978361 | 155636 |
| 38540 | 179058106 | 179060371 | 079156 |
| 38541 | 179106923 | 179108104 | 079156 |
| 38542 | 179136741 | 179137308 | 079156 |
| 38543 | 179163451 | 179163879 | 079156 |
| 38544 | 179314774 | 179316900 | 204311, 180228 |
| 38545 | 179333976 | 179334844 | 079150 |
| 38546 | 179342484 | 179344151 | 079150 |
| 38547 | 179344707 | 179345376 | 116095 |
| 38548 | 179387540 | 179388578 | 237298 |
| 38549 | 179971189 | 179972099 | 187231 |
| 38550 | 179972173 | 179973281 | 187231 |
| 38551 | 180103683 | 180104322 | 187231 |
| 38552 | 180127681 | 180128142 | 187231 |
| 38553 | 180128150 | 180130284 | 187231 |
| 38554 | 180136745 | 180137983 | |
| 38555 | 180324666 | 180326537 | 144331 |
| 38556 | 180386599 | 180387051 | 144331 |
| 38557 | 180422776 | 180423759 | 144331 |
| 38558 | 180438278 | 180439510 | 144331 |
| 38559 | 180444291 | 180445700 | 144331 |
| 38560 | 180701540 | 180703374 | 144331 |
| 38561 | 180724980 | 180726667 | 221240, 144331 |
| 38562 | 180781950 | 180782482 | |
| 38563 | 180871032 | 180872433 | 163510 |
| 38564 | 181383265 | 181387357 | |
| 38565 | 181509427 | 181509907 | 225258 |
| 38566 | 181519966 | 181522914 | 225258 |
| 38567 | 181524418 | 181525451 | 225258 |
| 38568 | 181540614 | 181543771 | 225258 |
| 38569 | 181587269 | 181587682 | |
| 38570 | 181606779 | 181608590 | |
| 38571 | 181612161 | 181613035 | |
| 38572 | 181625901 | 181626404 | |
| 38573 | 181843960 | 181846994 | 236153, 170035 |
| 38574 | 182655228 | 182656548 | |
| 38575 | 182755873 | 182758395 | 138434, 260742 |
| 38576 | 182774526 | 182775356 | 138434 |
| 38577 | 182808484 | 182809564 | |
| 38578 | 182818584 | 182820770 | 150722 |
| 38579 | 182903333 | 182903943 | 150722 |
| 38580 | 182931328 | 182932508 | 150722 |
| 38581 | 182941757 | 182942967 | 150722 |
| 38582 | 183579741 | 183581796 | 077232 |
| 38583 | 183755512 | 183756712 | |
| 38584 | 183776450 | 183777322 | 061676 |
| 38585 | 183779777 | 183781534 | 061676 |
| 38586 | 183901173 | 183903891 | 061676 |
| 38587 | 183942709 | 183944342 | 162999 |
| 38588 | 183988309 | 183990322 | 163002 |
| 38589 | 185126097 | 185127316 | |
| 38590 | 186447444 | 186449087 | |
| 38591 | 186686007 | 186686686 | 188738 |
| 38592 | 187243541 | 187244234 | |
| 38593 | 187349936 | 187352276 | 065548 |
| 38594 | 187398142 | 187399021 | |
| 38595 | 187408014 | 187411347 | |
| 38596 | 187434867 | 187436044 | |
| 38597 | 187439204 | 187441924 | |
| 38598 | 187453477 | 187459004 | 138448 |
| 38599 | 188296444 | 188297069 | 224063, 064989 |
| 38600 | 188364857 | 188367455 | 224063, 003436 |
| 38601 | 188391911 | 188392399 | 224063, 003436 |
| 38602 | 188393852 | 188396460 | 224063, 003436 |
| 38603 | 188404521 | 188420213 | 224063, 003436 |
| 38604 | 188712005 | 188712747 | 231689 |
| 38605 | 188847187 | 188847780 | 231689 |
| 38606 | 188850671 | 188851065 | 231689 |
| 38607 | 189299649 | 189300565 | 144366 |
| 38608 | 189914882 | 189915643 | 204262 |
| 38609 | 189969565 | 189970359 | 204262 |
| 38610 | 189974391 | 189975297 | 204262 |
| 38611 | 190014685 | 190015175 | 204262 |
| 38612 | 190028476 | 190029848 | 204262 |
| 38613 | 190042421 | 190043783 | 204262 |
| 38614 | 190234275 | 190234785 | |
| 38615 | 190305109 | 190307191 | 115368 |
| 38616 | 190331266 | 190332837 | 115368 |
| 38617 | 190386244 | 190388368 | |
| 38618 | 190391929 | 190393463 | |
| 38619 | 190397754 | 190401177 | |
| 38620 | 190406327 | 190407635 | |
| 38621 | 190413110 | 190414792 | |
| 38622 | 190416135 | 190418713 | |
| 38623 | 190419445 | 190421094 | |
| 38624 | 190435215 | 190435825 | 138449 |
| 38625 | 190439388 | 190440625 | 138449 |
| 38626 | 190443969 | 190446643 | 138449 |
| 38627 | 190476933 | 190478928 | |
| 38628 | 190525552 | 190527182 | 138381 |
| 38629 | 190538844 | 190540327 | 151687 |
| 38630 | 190626719 | 190628601 | 273240, 253559, 128694 |
| 38631 | 190647680 | 190650141 | 064933, 128699 |
| 38632 | 190934671 | 190935533 | 187699 |
| 38633 | 191044577 | 191046166 | 187699 |
| 38634 | 191131896 | 191132912 | 198130 |
| 38635 | 191143251 | 191145356 | 198130 |
| 38636 | 191183395 | 191185292 | 198130 |
| 38637 | 191197969 | 191200277 | 198130 |
| 38638 | 191207641 | 191209593 | 151689, 198130 |
| 38639 | 191217345 | 191218193 | 151689 |
| 38640 | 191272792 | 191273671 | 151690 |
| 38641 | 191398189 | 191400288 | 233654, 189362 |
| 38642 | 191501050 | 191501587 | |
| 38643 | 191512490 | 191515865 | 138386 |
| 38644 | 191580565 | 191581626 | |
| 38645 | 191583325 | 191584064 | |
| 38646 | 191673793 | 191674966 | |
| 38647 | 191677518 | 191678032 | |
| 38648 | 191744913 | 191747259 | 235852, 115419 |
| 38649 | 191877775 | 191879727 | 115415 |
| 38650 | 191884797 | 191886879 | 231858, 115415 |
| 38651 | 191906373 | 191906866 | 138378 |
| 38652 | 191914477 | 191915321 | 138378 |
| 38653 | 192015102 | 192015907 | 138378 |
| 38654 | 192029748 | 192038300 | |
| 38655 | 192041083 | 192046599 | |
| 38656 | 192047389 | 192050109 | |
| 38657 | 192051649 | 192052822 | |
| 38658 | 192066468 | 192068422 | |
| 38659 | 192077901 | 192078498 | |
| 38660 | 192080226 | 192080821 | |
| 38661 | 192081716 | 192085480 | |
| 38662 | 192109046 | 192113079 | 128641, 227542 |
| 38663 | 192127283 | 192128324 | 128641 |
| 38664 | 192129594 | 192131470 | 128641 |
| 38665 | 192175713 | 192177452 | 128641 |
| 38666 | 192223039 | 192223898 | 128641 |
| 38667 | 192241067 | 192243019 | 128641 |
| 38668 | 192247471 | 192248092 | 128641 |
| 38669 | 192261388 | 192261943 | 128641 |
| 38670 | 192282540 | 192283414 | 128641 |
| 38671 | 192435733 | 192436583 | |
| 38672 | 192446892 | 192447610 | |
| 38673 | 192458175 | 192459273 | |
| 38674 | 192500510 | 192504100 | |
| 38675 | 192520916 | 192522027 | |
| 38676 | 192531119 | 192532196 | |
| 38677 | 192541345 | 192546194 | 173559 |
| 38678 | 192553419 | 192556621 | 173559 |
| 38679 | 192623491 | 192624073 | |
| 38680 | 192731074 | 192732843 | 233766 |
| 38681 | 193967609 | 193968239 | |
| 38682 | 194292527 | 194294117 | |
| 38683 | 194331828 | 194332969 | |
| 38684 | 194385182 | 194386752 | |
| 38685 | 196408921 | 196409947 | |
| 38686 | 196440543 | 196441334 | 196950 |
| 38687 | 196520708 | 196523627 | 196950 |
| 38688 | 197035351 | 197036627 | 081320 |
| 38689 | 197456832 | 197458475 | 138411 |
| 38690 | 197503815 | 197504756 | 144395 |
| 38691 | 197583294 | 197584678 | 144395 |
| 38692 | 197594003 | 197594759 | 144395 |
| 38693 | 197613348 | 197613975 | 144395 |
| 38694 | 197663587 | 197665034 | 119041 |
| 38695 | 197790884 | 197792310 | 197121 |
| 38696 | 197971636 | 197974461 | 065413 |
| 38697 | 198022451 | 198026107 | 065413 |
| 38698 | 198043981 | 198046039 | 065413 |
| 38699 | 198046921 | 198049139 | 065413 |
| 38700 | 198049246 | 198050825 | 065413 |
| 38701 | 198151673 | 198152438 | 065413, 236977 |
| 38702 | 198171138 | 198171721 | 065413 |
| 38703 | 198174365 | 198176370 | 225979, 065413 |
| 38704 | 198298744 | 198301262 | 115524 |
| 38705 | 198317204 | 198319706 | 115520 |
| 38706 | 198363319 | 198366320 | 270757, 115541, 144381 |
| 38707 | 198379674 | 198381643 | 115540, 144381, 270757 |
| 38708 | 198436110 | 198437454 | 162944 |
| 38709 | 198440829 | 198442031 | 162944 |
| 38710 | 198477949 | 198478763 | 162944 |
| 38711 | 198569301 | 198571371 | 247626, 222017 |
| 38712 | 198668971 | 198670073 | 115896 |
| 38713 | 199173220 | 199174971 | 115896, 236653 |
| 38714 | 199480078 | 199481232 | 225421 |
| 38715 | 200320201 | 200321181 | 119042 |
| 38716 | 200321754 | 200326199 | 225953, 119042 |
| 38717 | 200389541 | 200390319 | |
| 38718 | 200603228 | 200604077 | |
| 38719 | 200714829 | 200716809 | 226124 |
| 38720 | 200775610 | 200776948 | 178074, 232732 |
| 38721 | 200819173 | 200821406 | 162972, 162971, 178074 |
| 38722 | 200836716 | 200837414 | 162972 |
| 38723 | 200841863 | 200845403 | 162972 |
| 38724 | 200914693 | 200916784 | |
| 38725 | 200941209 | 200943073 | |
| 38726 | 200968751 | 200969280 | |
| 38727 | 200992496 | 200993671 | |
| 38728 | 200993794 | 200997963 | |
| 38729 | 201020853 | 201021685 | |
| 38730 | 201023990 | 201024563 | |
| 38731 | 201081915 | 201082517 | |
| 38732 | 201083686 | 201086745 | |
| 38733 | 201123548 | 201124780 | |
| 38734 | 201136932 | 201137639 | |
| 38735 | 201153367 | 201154038 | |
| 38736 | 201165331 | 201168858 | |
| 38737 | 201169803 | 201176234 | 196141 |
| 38738 | 201183562 | 201186286 | 196141 |
| 38739 | 201186567 | 201187509 | 196141 |
| 38740 | 201217288 | 201217977 | 196141 |
| 38741 | 201231779 | 201232663 | 196141 |
| 38742 | 201238088 | 201239320 | 196141 |
| 38743 | 201240729 | 201243611 | 196141 |
| 38744 | 201269248 | 201272180 | 196141 |
| 38745 | 201272285 | 201274009 | 196141 |
| 38746 | 201320046 | 201320961 | 196141 |
| 38747 | 201326592 | 201327355 | 196141 |
| 38748 | 201337497 | 201338368 | 196141 |
| 38749 | 201343859 | 201345694 | 196141 |
| 38750 | 201346032 | 201346533 | 196141 |
| 38751 | 201373762 | 201375483 | 163535, 155729 |
| 38752 | 201390542 | 201391261 | 163535 |
| 38753 | 201450035 | 201453812 | 138356 |
| 38754 | 201457069 | 201457771 | 138356 |
| 38755 | 201467431 | 201470267 | 138356 |
| 38756 | 201472942 | 201475653 | 138356 |
| 38757 | 201477757 | 201484559 | 138356 |
| 38758 | 201487849 | 201491331 | 138356 |
| 38759 | 201513386 | 201514134 | 138356 |
| 38760 | 201542506 | 201543524 | 244301 |
| 38761 | 201567252 | 201568880 | 244301, 243478 |
| 38762 | 201577494 | 201579047 | 237166, 244301, 243478 |
| 38763 | 201611881 | 201615119 | 243478 |
| 38764 | 201619134 | 201622662 | 243478 |
| 38765 | 201629629 | 201631622 | 243478 |
| 38766 | 201640954 | 201644284 | 243478 |
| 38767 | 201651014 | 201652141 | 243478, 230408 |
| 38768 | 201661884 | 201662592 | 230408 |
| 38769 | 201674903 | 201678121 | 082153, 230408 |
| 38770 | 201727284 | 201730409 | 252759, 013441 |
| 38771 | 201731491 | 201732535 | |
| 38772 | 201752830 | 201755091 | 196290, 240344 |
| 38773 | 201808968 | 201810482 | 115942 |
| 38774 | 201827339 | 201828927 | 183308, 115942 |
| 38775 | 201923389 | 201924420 | 155744 |
| 38776 | 201933925 | 201934547 | 155744 |
| 38777 | 201935414 | 201937575 | 119013, 155744 |
| 38778 | 201980325 | 201984840 | 003402 |
| 38779 | 201989725 | 201991026 | 003402 |
| 38780 | 201991092 | 201995142 | 003402 |
| 38781 | 202008904 | 202009640 | 003402, 226312 |
| 38782 | 202012585 | 202018520 | 003402, 226312 |
| 38783 | 202047212 | 202048154 | 003400 |
| 38784 | 202096594 | 202097444 | |
| 38785 | 202097949 | 202099210 | 064012 |
| 38786 | 202122430 | 202123957 | 064012 |
| 38787 | 202271001 | 202272359 | 082146, 115993 |
| 38788 | 202315452 | 202317835 | 115993, 082146 |
| 38789 | 202332327 | 202332907 | 082146 |
| 38790 | 202506799 | 202508207 | 155755 |
| 38791 | 202644503 | 202646939 | 003393 |
| 38792 | 203050374 | 203051260 | 182329 |
| 38793 | 203052281 | 203052836 | 182329 |
| 38794 | 203102373 | 203103874 | 116030 |
| 38795 | 203130112 | 203131471 | 055044 |
| 38796 | 203142608 | 203143579 | 212309, 055044 |
| 38797 | 203239686 | 203243422 | 204217, 273456 |
| 38798 | 203315440 | 203315961 | 204217 |
| 38799 | 203499219 | 203501221 | 138439 |
| 38800 | 203551676 | 203552808 | 138439 |
| 38801 | 203583260 | 203583731 | 138439 |
| 38802 | 203735902 | 203736634 | 163596 |
| 38803 | 203775408 | 203777469 | 138380, 138442 |
| 38804 | 203878354 | 203880370 | 144426, 138442 |
| 38805 | 203880899 | 203881862 | 144426 |
| 38806 | 203886977 | 203888159 | 144426 |
| 38807 | 204103186 | 204104841 | 119004 |
| 38808 | 204192035 | 204193929 | 138443, 256458 |
| 38809 | 204398233 | 204401287 | 173166 |
| 38810 | 204416435 | 204417067 | |
| 38811 | 204443328 | 204444988 | |
| 38812 | 204469867 | 204470664 | |
| 38813 | 204491773 | 204492560 | |
| 38814 | 204495716 | 204496344 | |
| 38815 | 204496788 | 204498121 | |
| 38816 | 204501411 | 204503051 | |
| 38817 | 204512340 | 204513525 | |
| 38818 | 204514424 | 204516682 | |
| 38819 | 204521020 | 204521915 | |
| 38820 | 204547339 | 204549258 | |
| 38821 | 204675912 | 204678023 | |
| 38822 | 205051795 | 205052883 | |
| 38823 | 205063862 | 205064498 | |
| 38824 | 205179676 | 205180402 | |
| 38825 | 205272363 | 205273001 | |
| 38826 | 205343810 | 205345083 | 237843 |
| 38827 | 205398244 | 205398940 | |
| 38828 | 205407704 | 205408504 | |
| 38829 | 205409549 | 205411070 | 116117 |
| 38830 | 205475520 | 205477157 | 116117 |
| 38831 | 205519760 | 205520215 | 116117 |
| 38832 | 205528890 | 205530613 | 116117 |
| 38833 | 205532362 | 205535634 | 116117 |
| 38834 | 205556500 | 205557133 | 116117 |
| 38835 | 205659757 | 205660493 | 116117 |
| 38836 | 205765143 | 205766295 | 116117 |
| 38837 | 205889637 | 205890388 | 116117 |
| 38838 | 205896629 | 205897356 | 116117 |
| 38839 | 206374905 | 206375536 | 116117 |
| 38840 | 206591155 | 206592547 | 118257 |
| 38841 | 206595280 | 206597054 | 118257 |
| 38842 | 206598056 | 206599696 | 118257 |
| 38843 | 206608472 | 206609892 | 118257 |
| 38844 | 206613235 | 206614469 | 118257 |
| 38845 | 206619441 | 206620128 | 118257 |
| 38846 | 206670770 | 206671619 | |
| 38847 | 206793959 | 206795259 | |
| 38848 | 206839272 | 206840877 | |
| 38849 | 206896733 | 206897356 | 114933 |
| 38850 | 206949009 | 206951686 | 227946, 114933 |
| 38851 | 206979417 | 206980461 | 023228, 231955 |
| 38852 | 207022844 | 207025627 | 114942, 023228 |
| 38853 | 207138975 | 207140456 | 204186 |
| 38854 | 207629260 | 207631208 | 118246, 138400 |
| 38855 | 207832819 | 207834015 | 144410 |
| 38856 | 207993540 | 207994283 | 118263 |
| 38857 | 207997984 | 207999309 | 118263 |
| 38858 | 208021020 | 208021654 | 118263 |
| 38859 | 208026566 | 208032712 | 118263 |
| 38860 | 208198969 | 208199831 | 223725 |
| 38861 | 208280757 | 208281394 | 223725 |
| 38862 | 208393483 | 208396032 | 118260, 223725 |
| 38863 | 208421455 | 208422180 | 118260 |
| 38864 | 208488638 | 208491506 | 144401 |
| 38865 | 208497218 | 208498360 | |
| 38866 | 208541762 | 208542374 | |
| 38867 | 208547973 | 208549905 | |
| 38868 | 208574890 | 208577322 | 163249 |
| 38869 | 208598929 | 208600308 | 163249 |
| 38870 | 208629963 | 208630968 | 163251 |
| 38871 | 208630992 | 208636516 | 163251 |
| 38872 | 208639852 | 208640909 | |
| 38873 | 208646295 | 208647865 | |
| 38874 | 208656682 | 208657819 | |
| 38875 | 208661192 | 208662372 | |
| 38876 | 208663862 | 208664864 | |
| 38877 | 208665622 | 208666909 | |
| 38878 | 208667026 | 208667846 | |
| 38879 | 208669852 | 208672028 | |
| 38880 | 208674763 | 208677505 | |
| 38881 | 208683756 | 208685737 | |
| 38882 | 208692941 | 208695060 | 178385 |
| 38883 | 208697627 | 208698386 | 178385 |
| 38884 | 208701193 | 208701723 | 178385 |
| 38885 | 208709421 | 208714951 | 178385 |
| 38886 | 208729787 | 208730370 | 178385 |
| 38887 | 208732241 | 208736670 | 225111, 178385 |
| 38888 | 208743743 | 208745031 | 178385 |
| 38889 | 208762082 | 208763286 | 178385 |
| 38890 | 208790000 | 208792153 | 178385 |
| 38891 | 208794291 | 208796328 | 178385 |
| 38892 | 208798596 | 208801314 | 178385 |
| 38893 | 208802534 | 208803132 | 178385 |
| 38894 | 208804069 | 208804587 | 178385 |
| 38895 | 208857128 | 208858297 | 178385 |
| 38896 | 208878274 | 208879101 | 178385 |
| 38897 | 208880121 | 208880713 | 178385 |
| 38898 | 208889315 | 208891056 | 178385 |
| 38899 | 209111693 | 209112308 | 138413 |
| 38900 | 209114991 | 209116052 | 138413 |
| 38901 | 209116722 | 209120642 | 231908, 138413 |
| 38902 | 209130381 | 209131908 | 115020, 138413 |
| 38903 | 209213149 | 209213941 | 115020 |
| 38904 | 209219325 | 209220440 | 115020 |
| 38905 | 209223454 | 209224074 | 115020 |
| 38906 | 209233495 | 209236752 | 265454, 144407 |
| 38907 | 210232754 | 210234662 | |
| 38908 | 210247685 | 210248809 | |
| 38909 | 210256177 | 210257950 | |
| 38910 | 210288256 | 210291870 | 078018 |
| 38911 | 210338387 | 210339138 | 078018 |
| 38912 | 210359267 | 210362544 | 078018 |
| 38913 | 210866842 | 210868339 | 197713 |
| 38914 | 211031875 | 211032421 | 144445 |
| 38915 | 211033567 | 211036678 | 263530, 231294, 144445 |
| 38916 | 211054224 | 211055473 | 231294, 115361 |
| 38917 | 211058605 | 211059638 | 231294, 115361 |
| 38918 | 211086265 | 211086959 | 231294, 115361 |
| 38919 | 211088818 | 211091746 | 115361, 231294 |
| 38920 | 211095120 | 211096246 | |
| 38921 | 211340835 | 211341669 | 115365 |
| 38922 | 211403850 | 211406532 | 021826 |
| 38923 | 211411198 | 211412025 | 021826 |
| 38924 | 211412565 | 211414628 | 021826 |
| 38925 | 211420998 | 211428863 | 021826 |
| 38926 | 211526954 | 211527787 | 021826 |
| 38927 | 212272988 | 212273676 | 178568 |
| 38928 | 213316347 | 213317272 | 178568 |
| 38929 | 213776627 | 213777663 | 273118, 223373 |
| 38930 | 213779157 | 213780516 | 273118, 223373 |
| 38931 | 213787931 | 213788502 | 273118 |
| 38932 | 213793230 | 213794217 | 273118 |
| 38933 | 213804663 | 213805360 | 273118 |
| 38934 | 213930617 | 213931166 | 030419 |
| 38935 | 213950674 | 213951678 | 030419 |
| 38936 | 214013894 | 214014710 | 030419 |
| 38937 | 214015015 | 214018064 | 270659, 030419 |
| 38938 | 214018123 | 214018901 | 270659 |
| 38939 | 214028459 | 214029506 | 236193 |
| 38940 | 214051936 | 214053563 | |
| 38941 | 214102339 | 214104451 | |
| 38942 | 214148535 | 214149615 | 144451, 196096 |
| 38943 | 214170981 | 214171916 | 144451 |
| 38944 | 214180068 | 214182162 | 144451 |
| 38945 | 215458410 | 215459001 | 197585 |
| 38946 | 215673715 | 215675167 | 229267, 138376 |
| 38947 | 216176094 | 216177833 | 138363 |
| 38948 | 216275514 | 216276251 | 115414 |
| 38949 | 216278451 | 216284939 | 115414 |
| 38950 | 216285115 | 216285701 | 115414 |
| 38951 | 216296940 | 216302334 | 230695, 115414 |
| 38952 | 216325003 | 216326087 | 225166 |
| 38953 | 216369169 | 216371895 | |
| 38954 | 216545400 | 216546825 | 235770, 237525 |
| 38955 | 216556947 | 216558924 | 235770, 237525 |
| 38956 | 216591735 | 216593702 | 235770 |
| 38957 | 216611200 | 216616327 | 235770 |
| 38958 | 216657927 | 216659449 | 235770 |
| 38959 | 216691068 | 216692220 | 235770 |
| 38960 | 216693248 | 216693664 | 235770 |
| 38961 | 216693847 | 216695806 | 235770 |
| 38962 | 216695892 | 216698081 | 235770 |
| 38963 | 216759019 | 216761087 | |
| 38964 | 216764106 | 216766578 | |
| 38965 | 216767957 | 216769825 | |
| 38966 | 216817466 | 216818525 | 118242 |
| 38967 | 216838665 | 216839737 | 118242 |
| 38968 | 216845990 | 216848821 | 118242 |
| 38969 | 216876473 | 216878681 | 115425, 118242 |
| 38970 | 216921418 | 216923229 | 115425 |
| 38971 | 216936130 | 216936660 | 115425 |
| 38972 | 216942801 | 216944079 | 115425 |
| 38973 | 216945706 | 216947206 | 163449, 115425 |
| 38974 | 216973516 | 216975199 | 079246 |
| 38975 | 216979424 | 216980488 | 079246 |
| 38976 | 216994982 | 216995711 | 079246 |
| 38977 | 217052421 | 217054069 | 079246 |
| 38978 | 217276618 | 217277961 | 138375, 235042 |
| 38979 | 217362532 | 217364912 | 197756, 232485 |
| 38980 | 217387778 | 217388406 | 197756 |
| 38981 | 217403160 | 217405165 | 197756 |
| 38982 | 217435544 | 217438539 | 197756 |
| 38983 | 217480247 | 217481457 | |
| 38984 | 217484249 | 217485149 | |
| 38985 | 217496903 | 217499782 | 115457 |
| 38986 | 217501412 | 217502274 | 115457 |
| 38987 | 217515483 | 217516625 | 115457 |
| 38988 | 217517174 | 217518136 | 115457 |
| 38989 | 217578266 | 217579792 | 236886 |
| 38990 | 217694113 | 217694813 | 236886 |
| 38991 | 217874764 | 217875405 | |
| 38992 | 218195787 | 218197111 | 231672, 233143 |
| 38993 | 218203071 | 218203649 | 231672 |
| 38994 | 218394880 | 218396096 | 231672 |
| 38995 | 218486376 | 218487776 | 231672 |
| 38996 | 218515086 | 218515912 | 231672 |
| 38997 | 218549876 | 218550393 | 231672 |
| 38998 | 218556521 | 218557401 | 231672 |
| 38999 | 218761948 | 218762458 | 079308 |
| 39000 | 218762619 | 218769920 | 079308 |
| 39001 | 218780181 | 218788255 | 079308 |
| 39002 | 218792145 | 218796545 | 079308 |
| 39003 | 218797442 | 218803047 | 079308 |
| 39004 | 218806185 | 218809288 | 079308 |
| 39005 | 218843040 | 218844117 | 223923, 079308 |
| 39006 | 218852408 | 218853738 | 079308, 223923 |
| 39007 | 219080846 | 219083197 | 163466 |
| 39008 | 219133870 | 219135905 | 127838, 127837 |
| 39009 | 219148842 | 219149500 | 127838, 135926 |
| 39010 | 219149733 | 219152359 | 127838, 135926 |
| 39011 | 219154000 | 219159086 | 135926, 127838 |
| 39012 | 219186697 | 219189699 | 127838 |
| 39013 | 219231770 | 219233222 | 225062, 158428 |
| 39014 | 219260204 | 219266383 | 273361, 144579, 018280 |
| 39015 | 219270368 | 219272303 | 144579 |
| 39016 | 219283496 | 219284555 | 127831 |
| 39017 | 219309275 | 219309984 | 127831 |
| 39018 | 219313549 | 219314347 | 127831 |
| 39019 | 219401536 | 219402288 | 135913 |
| 39020 | 219432540 | 219434917 | 144580, 135913 |
| 39021 | 219523260 | 219525105 | 074582, 115568 |
| 39022 | 219536134 | 219537589 | 163482, 163481 |
| 39023 | 219575167 | 219576544 | 135912 |
| 39024 | 219596122 | 219599784 | 135912 |
| 39025 | 219619967 | 219620931 | 135912 |
| 39026 | 219645517 | 219647869 | 135929 |
| 39027 | 219670672 | 219671548 | 135929 |
| 39028 | 219757411 | 219758000 | 135925 |
| 39029 | 219760947 | 219761584 | 135925 |
| 39030 | 219773310 | 219774061 | 228135 |
| 39031 | 219844583 | 219845149 | |
| 39032 | 219866575 | 219868186 | 224090, 181378 |
| 39033 | 219922570 | 219924169 | 264755, 163501 |
| 39034 | 219925281 | 219926052 | |
| 39035 | 219976206 | 219977059 | 213901, 187736 |
| 39036 | 219981455 | 219982076 | 213901, 187736 |
| 39037 | 219989087 | 219992527 | 213901, 187736 |
| 39038 | 220014341 | 220014916 | 213901, 187736 |
| 39039 | 220040259 | 220043787 | 144567, 115649 |
| 39040 | 220070518 | 220073444 | 158552 |
| 39041 | 220082362 | 220083849 | 115657, 198925 |
| 39042 | 220093236 | 220095526 | 163516, 198925 |
| 39043 | 220109388 | 220111273 | 115661, 163521 |
| 39044 | 220113274 | 220115379 | 127824, 115661 |
| 39045 | 220117540 | 220119848 | 243910, 127824 |
| 39046 | 220133957 | 220135442 | 243910, 127824 |
| 39047 | 220136924 | 220140269 | 127824 |
| 39048 | 220142142 | 220145414 | 135924, 127824 |
| 39049 | 220251715 | 220253810 | 229525, 123992 |
| 39050 | 220263396 | 220264169 | 229525, 123992 |
| 39051 | 220271286 | 220272549 | |
| 39052 | 220362601 | 220364229 | 144591, 072195, 268603, |
| | | | 227432 |
| 39053 | 220407352 | 220408961 | 188760, 123989 |
| 39054 | 220435236 | 220436840 | 124006, 123999 |
| 39055 | 220461413 | 220463652 | 144589 |
| 39056 | 221141785 | 221143066 | 239498 |
| 39057 | 221415753 | 221416429 | 236451 |
| 39058 | 222437952 | 222438744 | 272944, 116106 |
| 39059 | 223519066 | 223521906 | 116120 |
| 39060 | 223534858 | 223537385 | 124003 |
| 39061 | 223571615 | 223573561 | 124003 |
| 39062 | 223617952 | 223618620 | |
| 39063 | 223660741 | 223661884 | |
| 39064 | 223702263 | 223702979 | |
| 39065 | 223707201 | 223707673 | |
| 39066 | 223724484 | 223727774 | 123983 |
| 39067 | 223728816 | 223729609 | 123983 |
| 39068 | 223743498 | 223743978 | 123983 |
| 39069 | 223836304 | 223836884 | |
| 39070 | 224330527 | 224331005 | |
| 39071 | 224466874 | 224467344 | 171951 |
| 39072 | 224590263 | 224590710 | |
| 39073 | 224599896 | 224601294 | |
| 39074 | 224623783 | 224626032 | 152056 |
| 39075 | 224663822 | 224664804 | 152056 |
| 39076 | 224679150 | 224680243 | 152056 |
| 39077 | 224701623 | 224702937 | 152056 |
| 39078 | 224720661 | 224721141 | 085449 |
| 39079 | 224724933 | 224727179 | 085449 |
| 39080 | 224759632 | 224760745 | 085449 |
| 39081 | 224772893 | 224774807 | 085449 |
| 39082 | 224781752 | 224782282 | 085449 |
| 39083 | 224794129 | 224796569 | 085449 |
| 39084 | 224805768 | 224807054 | 085449 |
| 39085 | 224807710 | 224810357 | 085449 |
| 39086 | 224821152 | 224823209 | 135900 |
| 39087 | 224859652 | 224861346 | 135919 |
| 39088 | 224873102 | 224874352 | 135919 |
| 39089 | 224887190 | 224888508 | 135919 |
| 39090 | 225015157 | 225016579 | |
| 39091 | 225136732 | 225137593 | |
| 39092 | 225243816 | 225245530 | 124019 |
| 39093 | 225306554 | 225307975 | |
| 39094 | 225313652 | 225314928 | |
| 39095 | 225349804 | 225350570 | 036257 |
| 39096 | 225448662 | 225450601 | 036257 |
| 39097 | 225748863 | 225749400 | 135905 |
| 39098 | 225881741 | 225882628 | 135905 |
| 39099 | 225886768 | 225887480 | 135905 |
| 39100 | 225965642 | 225966157 | |
| 39101 | 226758407 | 226760412 | |
| 39102 | 226859471 | 226860099 | |
| 39103 | 226895688 | 226896452 | |
| 39104 | 226951852 | 226953873 | |
| 39105 | 226978908 | 226981159 | |
| 39106 | 226982590 | 226984825 | |
| 39107 | 227024406 | 227025078 | |
| 39108 | 227032895 | 227033959 | |
| 39109 | 227275663 | 227277736 | |
| 39110 | 227292702 | 227294140 | |
| 39111 | 227304498 | 227306265 | |
| 39112 | 227309338 | 227310722 | |
| 39113 | 227311616 | 227314047 | |
| 39114 | 227342474 | 227343815 | |
| 39115 | 227354515 | 227355252 | |
| 39116 | 227379416 | 227382232 | |
| 39117 | 227388044 | 227391406 | |
| 39118 | 227404467 | 227405893 | |
| 39119 | 227443223 | 227444130 | |
| 39120 | 227445556 | 227446402 | |
| 39121 | 227447601 | 227450463 | |
| 39122 | 227475806 | 227477194 | |
| 39123 | 227483398 | 227484269 | |
| 39124 | 227521782 | 227522928 | |
| 39125 | 227525070 | 227525710 | |
| 39126 | 227597200 | 227599257 | 169047 |
| 39127 | 227602698 | 227604540 | 169047 |
| 39128 | 227618704 | 227621343 | 169047 |
| 39129 | 227624621 | 227626102 | 169047 |
| 39130 | 227654693 | 227666967 | 272622, 169047 |
| 39131 | 227699886 | 227702040 | 144468 |
| 39132 | 227703279 | 227703982 | 144468 |
| 39133 | 227821359 | 227821886 | 144468 |
| 39134 | 227860136 | 227860820 | 144468 |
| 39135 | 227997619 | 227998189 | 081052 |
| 39136 | 228029112 | 228030181 | 169031 |
| 39137 | 228048724 | 228049339 | 169031 |
| 39138 | 228189061 | 228191176 | 168958, 236432 |
| 39139 | 228267426 | 228268212 | |
| 39140 | 228270723 | 228272194 | |
| 39141 | 228280243 | 228280790 | |
| 39142 | 228295074 | 228296207 | |
| 39143 | 228314284 | 228317125 | |
| 39144 | 228330783 | 228332368 | |
| 39145 | 228336474 | 228338727 | 173744, 266382 |
| 39146 | 228368095 | 228368943 | 173744 |
| 39147 | 228517344 | 228521339 | |
| 39148 | 228567688 | 228569320 | 135917 |
| 39149 | 228581928 | 228583344 | 135917 |
| 39150 | 228625785 | 228627316 | |
| 39151 | 228630411 | 228631682 | |
| 39152 | 228660864 | 228661586 | |
| 39153 | 228677518 | 228681036 | 115009 |
| 39154 | 228681257 | 228687036 | 115009 |
| 39155 | 228726982 | 228729269 | |
| 39156 | 228746401 | 228747568 | 123977 |
| 39157 | 229552565 | 229553983 | |
| 39158 | 229703413 | 229707174 | |
| 39159 | 229922330 | 229923316 | 153823 |
| 39160 | 229954646 | 229955884 | 153823 |
| 39161 | 229994454 | 229995112 | 153823 |
| 39162 | 230024276 | 230026035 | 153823 |
| 39163 | 230027992 | 230029944 | 153823 |
| 39164 | 230045303 | 230045826 | 153823 |
| 39165 | 230130350 | 230130912 | 153823 |
| 39166 | 230133365 | 230136404 | 153823 |
| 39167 | 230137807 | 230138967 | |
| 39168 | 230272882 | 230273662 | 187957 |
| 39169 | 230309640 | 230310122 | 187957 |
| 39170 | 230784562 | 230788587 | 153832, 153827 |
| 39171 | 230845364 | 230845934 | 153832 |
| 39172 | 230931662 | 230933398 | 163053 |
| 39173 | 231083937 | 231085309 | 079263, 135899 |
| 39174 | 231191151 | 231192748 | 185404, 079263 |
| 39175 | 231275857 | 231277284 | |
| 39176 | 231280268 | 231281987 | 067066 |
| 39177 | 231288426 | 231289230 | 067066 |
| 39178 | 231289940 | 231290650 | 067066 |
| 39179 | 231367256 | 231368284 | 067066 |
| 39180 | 231368421 | 231369202 | 067066 |
| 39181 | 231376854 | 231378818 | 067066 |
| 39182 | 231383494 | 231387149 | 235419, 067066 |
| 39183 | 231570512 | 231571629 | |
| 39184 | 231577186 | 231579398 | 135932 |
| 39185 | 231712575 | 231713049 | |
| 39186 | 231729282 | 231730366 | 135916 |
| 39187 | 231851420 | 231852396 | 238062 |
| 39188 | 231898528 | 231899532 | |
| 39189 | 231902048 | 231903363 | 204128 |
| 39190 | 231913165 | 231914284 | 204128 |
| 39191 | 231914349 | 231916224 | 204128 |
| 39192 | 231916529 | 231918062 | 261829 |
| 39193 | 231921005 | 231922830 | 173692 |
| 39194 | 231932574 | 231933781 | 173692 |
| 39195 | 231988039 | 231988660 | 135914, 173692 |
| 39196 | 231997923 | 231998839 | 201574, 173692 |
| 39197 | 232046397 | 232046977 | |
| 39198 | 232054705 | 232056053 | |
| 39199 | 232091898 | 232092786 | 135931 |
| 39200 | 232264632 | 232265576 | 156966 |
| 39201 | 232276471 | 232277692 | |
| 39202 | 232278589 | 232279336 | |
| 39203 | 232327936 | 232330478 | 115053 |
| 39204 | 232378423 | 232379954 | 181798 |
| 39205 | 232468752 | 232469841 | |
| 39206 | 232476563 | 232479836 | |
| 39207 | 232526445 | 232527826 | |
| 39208 | 232545041 | 232546865 | |
| 39209 | 232566061 | 232567221 | |
| 39210 | 232570438 | 232576464 | 187514, 269363 |
| 39211 | 232578373 | 232578989 | |
| 39212 | 232645224 | 232646870 | 144524, 156973 |
| 39213 | 232650442 | 232651869 | 156973, 144524 |
| 39214 | 232655747 | 232656373 | 144524 |
| 39215 | 232822515 | 232823097 | |
| 39216 | 232825586 | 232827255 | 144535 |
| 39217 | 232839577 | 232840154 | 144535 |
| 39218 | 233100799 | 233101478 | 144535 |
| 39219 | 233104278 | 233105539 | 144535 |
| 39220 | 233172474 | 233173080 | 144535 |
| 39221 | 233308530 | 233309675 | 223788 |
| 39222 | 233311779 | 233313364 | 223788 |
| 39223 | 233414430 | 233416197 | 135930, 266620, 221944 |
| 39224 | 233453434 | 233454433 | 237126 |
| 39225 | 233457397 | 233458795 | 237126 |
| 39226 | 233470479 | 233471336 | 115468, 237126 |
| 39227 | 233561435 | 233563040 | 204120 |
| 39228 | 233646317 | 233647106 | 204120 |
| 39229 | 233702374 | 233703816 | 204120 |
| 39230 | 233710273 | 233711596 | 204120 |
| 39231 | 233717842 | 233726831 | 182600, 204120 |
| 39232 | 233738247 | 233743355 | 182600 |
| 39233 | 233765963 | 233767153 | 066248 |
| 39234 | 233851888 | 233854292 | 066248 |
| 39235 | 233876225 | 233878637 | 222001, 066248 |
| 39236 | 234159586 | 234162942 | 085978 |
| 39237 | 234257368 | 234258595 | |
| 39238 | 234259156 | 234259942 | 259793 |
| 39239 | 234261614 | 234263474 | 077044, 243637, 259793 |
| 39240 | 234296202 | 234297272 | 077044, 243637 |
| 39241 | 234321096 | 234324648 | 077044 |
| 39242 | 234394379 | 234397921 | 085982 |
| 39243 | 234451037 | 234451980 | 085982 |
| 39244 | 234473917 | 234475751 | 085982 |
| 39245 | 234516698 | 234518562 | |
| 39246 | 234572580 | 234572993 | 242515, 241635 |
| 39247 | 234577157 | 234583671 | 241119, 242515, 241635 |
| 39248 | 234598972 | 234599472 | 242515, 241119, 244122, |
| | | | 241635 |
| 39249 | 234600892 | 234609587 | 224814, 242515, 241119, |
| | | | 167165, 244122, 241635 |
| 39250 | 234613775 | 234616170 | 242515, 241119, 224814, |
| | | | 167165, 244122, 241635 |
| 39251 | 234636840 | 234637732 | 242515, 241119, 167165, |
| | | | 244474, 244122, 241635, |
| | | | 240224 |
| 39252 | 234653937 | 234654850 | 242515, 243135, 241119, |
| | | | 167165, 244474, 244122, |
| | | | 241635, 240224 |
| 39253 | 234665173 | 234665956 | 242515, 243135, 241119, |
| | | | 167165, 244474, 244122, |
| | | | 241635, 240224 |
| 39254 | 234668546 | 234674043 | 242366, 242515, 243135, |
| | | | 241119, 167165, 244474, |
| | | | 244122, 241635, 240224 |
| 39255 | 234726522 | 234727486 | 185038 |
| 39256 | 234731736 | 234732444 | 185038 |
| 39257 | 234776659 | 234777252 | 224287 |
| 39258 | 234874798 | 234875497 | 144481 |
| 39259 | 234881528 | 234892314 | 144481 |
| 39260 | 234898108 | 234899369 | 144481 |
| 39261 | 234990395 | 234991667 | |
| 39262 | 234999861 | 235001192 | |
| 39263 | 235111365 | 235113300 | |
| 39264 | 235197465 | 235198573 | |
| 39265 | 235271491 | 235272085 | |
| 39266 | 235330634 | 235331621 | |
| 39267 | 235404825 | 235405816 | 188042 |
| 39268 | 235464390 | 235466311 | |
| 39269 | 235582438 | 235584278 | |
| 39270 | 235584717 | 235585361 | |
| 39271 | 235586407 | 235586904 | |
| 39272 | 235587699 | 235589672 | |
| 39273 | 235596780 | 235598466 | |
| 39274 | 235602958 | 235603678 | |
| 39275 | 235675409 | 235680845 | |
| 39276 | 235731573 | 235733791 | |
| 39277 | 235747745 | 235749909 | 235726 |
| 39278 | 235751484 | 235753064 | 235726 |
| 39279 | 235753642 | 235755420 | 235726 |
| 39280 | 235767094 | 235769022 | 235726 |
| 39281 | 235770551 | 235774267 | 235726 |
| 39282 | 235779510 | 235780796 | 235726 |
| 39283 | 235787652 | 235791697 | 235726 |
| 39284 | 235859709 | 235864333 | 130147 |
| 39285 | 235887051 | 235893757 | 130147 |
| 39286 | 235904733 | 235911715 | 130147 |
| 39287 | 235916767 | 235918242 | 130147 |
| 39288 | 235929107 | 235932130 | 130147 |
| 39289 | 235933126 | 235937680 | 130147 |
| 39290 | 235957017 | 235960947 | 130147 |
| 39291 | 236007352 | 236008134 | |
| 39292 | 236290816 | 236292576 | |
| 39293 | 236302882 | 236303789 | |
| 39294 | 236401879 | 236403263 | 157985 |
| 39295 | 236403372 | 236404273 | 157985 |
| 39296 | 236419588 | 236420371 | 157985 |
| 39297 | 236423160 | 236423830 | 157985 |
| 39298 | 236577956 | 236578462 | 157985 |
| 39299 | 236617089 | 236619248 | 157985 |
| 39300 | 237476158 | 237477775 | 144476 |
| 39301 | 237477791 | 237478912 | 144476 |
| 39302 | 237637031 | 237638295 | |
| 39303 | 237639989 | 237641580 | |
| 39304 | 237654317 | 237654944 | 232328 |
| 39305 | 237666880 | 237667574 | |
| 39306 | 237690684 | 237692369 | |
| 39307 | 237737053 | 237738109 | |
| 39308 | 237741937 | 237742766 | |
| 39309 | 237744628 | 237745193 | |
| 39310 | 237881046 | 237881927 | |
| 39311 | 237897045 | 237898140 | |
| 39312 | 237932948 | 237936606 | |
| 39313 | 237984410 | 237985294 | 227252 |
| 39314 | 237993389 | 237995376 | 198612, 227252 |
| 39315 | 238036301 | 238037350 | |
| 39316 | 238383237 | 238384719 | |
| 39317 | 238390733 | 238392397 | |
| 39318 | 238395532 | 238396812 | 115648 |
| 39319 | 238410285 | 238411948 | 115648 |
| 39320 | 238421437 | 238422839 | 115648 |
| 39321 | 238448866 | 238450589 | 115648 |
| 39322 | 238459347 | 238460459 | 115648 |
| 39323 | 238490221 | 238491713 | 124839 |
| 39324 | 238497824 | 238500247 | 234949, 124839 |
| 39325 | 238503556 | 238504324 | 234949, 124839 |
| 39326 | 238535413 | 238537669 | 124831 |
| 39327 | 238560767 | 238561294 | 124831 |
| 39328 | 238578113 | 238579299 | 124831 |
| 39329 | 238591775 | 238592644 | 124831 |
| 39330 | 238599801 | 238603092 | 124831 |
| 39331 | 238640214 | 238643287 | 124831 |
| 39332 | 238650408 | 238654133 | 124831 |
| 39333 | 238674948 | 238675263 | 124831 |
| 39334 | 238769386 | 238770387 | 132329 |
| 39335 | 238796981 | 238797468 | 132329 |
| 39336 | 238875061 | 238876817 | 258984, 184182 |
| 39337 | 238968550 | 238970500 | 132330, 258984 |
| 39338 | 238972001 | 238973530 | 258984, 132330 |
| 39339 | 238985921 | 238986599 | 258984, 132330 |
| 39340 | 238988337 | 238989082 | 258984, 132330 |
| 39341 | 239015405 | 239016577 | 144488 |
| 39342 | 239045125 | 239046408 | |
| 39343 | 239052233 | 239052695 | 168427 |
| 39344 | 239076729 | 239079887 | 132323, 178752 |
| 39345 | 239110801 | 239113104 | 132323 |
| 39346 | 239148318 | 239148842 | 225057, 144485 |
| 39347 | 239165032 | 239165797 | 132326 |
| 39348 | 239175732 | 239177281 | 132326 |
| 39349 | 239182470 | 239183761 | 132326 |
| 39350 | 239193085 | 239198489 | 132326 |
| 39351 | 239203003 | 239203891 | |
| 39352 | 239206234 | 239206762 | |
| 39353 | 239208467 | 239209553 | 232306 |
| 39354 | 239214585 | 239215733 | |
| 39355 | 239228832 | 239230212 | 204104 |
| 39356 | 239279258 | 239279908 | 204104 |
| 39357 | 239334331 | 239336949 | 229915, 065802 |
| 39358 | 239346988 | 239351349 | 065802 |
| 39359 | 239505773 | 239506329 | |
| 39360 | 239592871 | 239593573 | |
| 39361 | 239772741 | 239773599 | 233608 |
| 39362 | 240143474 | 240144439 | 068024 |
| 39363 | 240145145 | 240146241 | 068024 |
| 39364 | 240148328 | 240149729 | 068024 |
| 39365 | 240160331 | 240161177 | 068024 |
| 39366 | 240179016 | 240179740 | 068024 |
| 39367 | 240217729 | 240219729 | 068024 |
| 39368 | 240240655 | 240241588 | 068024 |
| 39369 | 240249964 | 240252772 | 068024 |
| 39370 | 240321551 | 240322590 | 068024 |
| 39371 | 240322719 | 240324279 | 222020, 068024 |
| 39372 | 240366663 | 240367346 | |
| 39373 | 240963492 | 240965586 | 130414 |
| 39374 | 241074527 | 241076544 | 172428 |
| 39375 | 241171668 | 241173782 | 227479 |
| 39376 | 241176504 | 241178756 | 227479 |
| 39377 | 241189407 | 241192390 | 227479 |
| 39378 | 241195012 | 241195920 | 227479 |
| 39379 | 241308029 | 241309110 | |
| 39380 | 241309281 | 241310133 | |
| 39381 | 241362128 | 241362783 | |
| 39382 | 241372729 | 241376974 | 063660 |
| 39383 | 241499516 | 241501427 | 188542, 144504 |
| 39384 | 241505170 | 241508951 | 142327, 144504 |
| 39385 | 241518469 | 241520400 | 142327 |
| 39386 | 241524604 | 241527009 | 142330, 260942 |
| 39387 | 241732978 | 241734316 | 130294 |
| 39388 | 241795656 | 241798224 | |
| 39389 | 241807375 | 241809915 | 172482 |
| 39390 | 241813094 | 241814621 | 172482 |
| 39391 | 241815528 | 241816531 | 172482 |
| 39392 | 241828354 | 241829910 | 172478 |
| 39393 | 241925402 | 241927307 | 223991, 226321 |
| 39394 | 241936242 | 241938940 | 162804 |
| 39395 | 242032578 | 242033557 | 122085, 162804 |
| 39396 | 242041293 | 242042811 | 122085 |
| 39397 | 242063221 | 242063694 | 115687 |
| 39398 | 242088401 | 242090650 | 115685, 115687 |
| 39399 | 242156596 | 242157384 | 146205 |
| 39400 | 242157449 | 242158321 | 146205 |
| 39401 | 242194148 | 242195447 | 115677 |
| 39402 | 242210491 | 242213018 | 115677 |
| 39403 | 242224574 | 242225377 | 115677 |
| 39404 | 242253494 | 242256585 | 168385, 115677 |
| 39405 | 242290748 | 242291506 | 223374, 168385 |
| 39406 | 242295410 | 242296648 | 006607 |
| 39407 | 242446564 | 242449194 | 115694 |
| 39408 | 242491698 | 242492656 | 234235 |
| 39409 | 242497790 | 242500801 | 176720, 234235 |
| 39410 | 242549031 | 242550521 | 176946 |
| 39411 | 242575146 | 242577827 | 168397, 176946 |
| 39412 | 242620156 | 242620887 | 168393 |
| 39413 | 242625727 | 242627929 | 168393 |
| 39414 | 242640493 | 242642772 | 168395 |
| 39415 | 242673717 | 242675226 | 180902, 215692 |
| 39416 | 242675363 | 242676024 | 180902 |
| 39417 | 242680359 | 242680882 | 180902 |
| 39418 | 242709302 | 242710417 | |
| 39419 | 242749500 | 242751404 | 204099, 224272 |
| 39420 | 242759943 | 242760674 | |
| 39421 | 242786220 | 242786976 | 235151 |
| 39422 | 242823511 | 242825304 | 233806 |
| 39423 | 242837825 | 242838824 | 233806, 216921 |
| 39424 | 242877501 | 242878156 | 233806 |
| 39425 | 243022993 | 243023388 | 232002 |

[0571] The locations of the ODSCs on Chromosome 3 are shown in Table 45.

TABLE 45
ODSC Locations on Chromosome 3

| SEQ ID NO. | Start | End | Overlapping Gene(s) |
|---|---|---|---|
| 39426 | 104708 | 105397 | |
| 39427 | 534265 | 535267 | |
| 39428 | 2893003 | 2894049 | 144619 |
| 39429 | 2903732 | 2905038 | 144619 |
| 39430 | 2911343 | 2915351 | 144619 |
| 39431 | 2937901 | 2938645 | 144619 |
| 39432 | 3167665 | 3169753 | 072756, 091181 |
| 39433 | 3220318 | 3221774 | 113851 |
| 39434 | 4344667 | 4346000 | 170364, 144455 |
| 39435 | 4397099 | 4397758 | 144455 |
| 39436 | 4507863 | 4509571 | 144455 |
| 39437 | 4533776 | 4535667 | 150995, 231249 |
| 39438 | 4575146 | 4576114 | 150995 |
| 39439 | 4607309 | 4608903 | 150995 |
| 39440 | 4761779 | 4763010 | 150995 |
| 39441 | 4764714 | 4767012 | 150995 |
| 39442 | 4770687 | 4771591 | 150995 |
| 39443 | 4782642 | 4784478 | 150995 |
| 39444 | 4790342 | 4794859 | 235947, 150995 |
| 39445 | 4865949 | 4868938 | 235978, 150995 |
| 39446 | 4897738 | 4898539 | 235978 |
| 39447 | 4908049 | 4911242 | 235978 |
| 39448 | 4985242 | 4985640 | 235831 |
| 39449 | 5017643 | 5029840 | 134107, 235831 |
| 39450 | 5034911 | 5038220 | |
| 39451 | 5057429 | 5060621 | |
| 39452 | 5062791 | 5066643 | |
| 39453 | 5067367 | 5069163 | |
| 39454 | 5163632 | 5166019 | 134108 |
| 39455 | 5178105 | 5180623 | 134108 |
| 39456 | 5228228 | 5231461 | 268509, 134109, 233912 |
| 39457 | 5291992 | 5292970 | |
| 39458 | 6969563 | 6970795 | 196277 |
| 39459 | 7545917 | 7547201 | 196277 |
| 39460 | 7660219 | 7660788 | 196277 |
| 39461 | 7682450 | 7683079 | 196277 |
| 39462 | 7688348 | 7689185 | 196277 |
| 39463 | 7692053 | 7692605 | 196277 |
| 39464 | 7781994 | 7782838 | 196277 |
| 39465 | 8018338 | 8020140 | 227110 |
| 39466 | 8483805 | 8487568 | 227110 |
| 39467 | 8501638 | 8503396 | 227110 |
| 39468 | 8523830 | 8527174 | 227110 |
| 39469 | 8529940 | 8533296 | 227110 |
| 39470 | 8538506 | 8541384 | 227110 |
| 39471 | 8541661 | 8544001 | 071282, 227110 |
| 39472 | 8544107 | 8545918 | 227110, 071282 |
| 39473 | 8570808 | 8572841 | 227110, 071282 |
| 39474 | 8573312 | 8574821 | 227110, 071282 |
| 39475 | 8671156 | 8672119 | 125046 |
| 39476 | 8705110 | 8705569 | 125046 |
| 39477 | 8910249 | 8912464 | 070950 |
| 39478 | 8920913 | 8921864 | 070950 |
| 39479 | 8977449 | 8980747 | 070950 |
| 39480 | 9004843 | 9007746 | 070950 |
| 39481 | 9394780 | 9395644 | 196220, 206573, 254485 |
| 39482 | 9403872 | 9405811 | 134077, 196220, 254485, |
| | | | 206573 |
| 39483 | 9436991 | 9441959 | 168137, 206573 |
| 39484 | 9444451 | 9444883 | 168137 |
| 39485 | 9463891 | 9465483 | 168137 |
| 39486 | 9690646 | 9691929 | 163719 |
| 39487 | 9711672 | 9712303 | 163719 |
| 39488 | 9723097 | 9723903 | 163719 |
| 39489 | 9772830 | 9774538 | 156983 |
| 39490 | 9791107 | 9793120 | 114026 |
| 39491 | 9810922 | 9812917 | 134072, 114026 |
| 39492 | 9833342 | 9835743 | 241553, 250151, 171148 |
| 39493 | 9851012 | 9852479 | 214021, 250151 |
| 39494 | 9884852 | 9886524 | 156990, 214021 |
| 39495 | 9903981 | 9905119 | |
| 39496 | 9919866 | 9921753 | 187288 |
| 39497 | 9925595 | 9927208 | |
| 39498 | 9931491 | 9933768 | 171135 |
| 39499 | 9935033 | 9936286 | 171135 |
| 39500 | 9938597 | 9941024 | |
| 39501 | 9942682 | 9943212 | |
| 39502 | 9950771 | 9951764 | 163701 |
| 39503 | 9954011 | 9954631 | 163701 |
| 39504 | 9955722 | 9960551 | 163702, 163701 |
| 39505 | 9974095 | 9976493 | 163703, 163702 |
| 39506 | 9987864 | 9989844 | 230082, 163704 |
| 39507 | 10017600 | 10020235 | 125037 |
| 39508 | 10027569 | 10028760 | 180385, 125037 |
| 39509 | 10052151 | 10052991 | 206567, 125037 |
| 39510 | 10156923 | 10158301 | 254999 |
| 39511 | 10183228 | 10184357 | 134086 |
| 39512 | 10206294 | 10207454 | 134070 |
| 39513 | 10214635 | 10216622 | 134070 |
| 39514 | 10230590 | 10231809 | 134070 |
| 39515 | 10232741 | 10238850 | 134070 |
| 39516 | 10239650 | 10241811 | 134070 |
| 39517 | 10243046 | 10249386 | 134070 |
| 39518 | 10263567 | 10265790 | 134070 |
| 39519 | 10266334 | 10267245 | 134070 |
| 39520 | 10289808 | 10291287 | 272410, 157014 |
| 39521 | 10337793 | 10338784 | 157020 |
| 39522 | 10361762 | 10362998 | 157020 |
| 39523 | 10512175 | 10512744 | 157087 |
| 39524 | 10532286 | 10532912 | 157087 |
| 39525 | 10535871 | 10538144 | 157087 |
| 39526 | 10545764 | 10548273 | 157087 |
| 39527 | 10550037 | 10550876 | 157087 |
| 39528 | 10640614 | 10641790 | 157087 |
| 39529 | 10710761 | 10711900 | 157087 |
| 39530 | 10712892 | 10713488 | 157087 |
| 39531 | 10730292 | 10731015 | 157087 |
| 39532 | 11023706 | 11024293 | |
| 39533 | 11024459 | 11025447 | |
| 39534 | 11029545 | 11030304 | |
| 39535 | 11033740 | 11034840 | 157103 |
| 39536 | 11040106 | 11040863 | 157103 |
| 39537 | 11042679 | 11044771 | 157103 |
| 39538 | 11063201 | 11064182 | 157103 |
| 39539 | 11313801 | 11315013 | 197548 |
| 39540 | 11329845 | 11332398 | 226621, 197548 |
| 39541 | 11487288 | 11487821 | 197548 |
| 39542 | 11539884 | 11540948 | 197548 |
| 39543 | 11683148 | 11685948 | 144560 |
| 39544 | 11701652 | 11702929 | 144560 |
| 39545 | 11732435 | 11733153 | 144560 |
| 39546 | 11760025 | 11762821 | 244030, 144560 |
| 39547 | 11811963 | 11812956 | |
| 39548 | 11887156 | 11888834 | 144559 |
| 39549 | 12179343 | 12180043 | 157152 |
| 39550 | 12197323 | 12197808 | 157152, 157150 |
| 39551 | 12234217 | 12236794 | |
| 39552 | 12266134 | 12266798 | |
| 39553 | 12308685 | 12309859 | |
| 39554 | 12328613 | 12330682 | 132170 |
| 39555 | 12386541 | 12387147 | 132170 |
| 39556 | 12391572 | 12393462 | 132170 |
| 39557 | 12395198 | 12395712 | 132170 |
| 39558 | 12412892 | 12413634 | 132170 |
| 39559 | 12435385 | 12436044 | 132170 |
| 39560 | 12446409 | 12448261 | 132170 |
| 39561 | 12450313 | 12452965 | 132170 |
| 39562 | 12504884 | 12505610 | |
| 39563 | 12525577 | 12527106 | 154743 |
| 39564 | 12594992 | 12595783 | 225526 |
| 39565 | 12597766 | 12599764 | 075975, 225526 |
| 39566 | 12633278 | 12634222 | 132155 |
| 39567 | 12688798 | 12690412 | 132155 |
| 39568 | 12704075 | 12706791 | 132155 |
| 39569 | 12712007 | 12712922 | |
| 39570 | 12804718 | 12805333 | 088726 |
| 39571 | 12881936 | 12883785 | 144713, 207496, 144712 |
| 39572 | 13006137 | 13006933 | 144711 |
| 39573 | 13008380 | 13009659 | 144711 |
| 39574 | 13035817 | 13036960 | 144711 |
| 39575 | 13152925 | 13154530 | |
| 39576 | 13257278 | 13258481 | |
| 39577 | 13258698 | 13262198 | |
| 39578 | 13292659 | 13293657 | |
| 39579 | 13303327 | 13306611 | |
| 39580 | 13318001 | 13318699 | |
| 39581 | 13318900 | 13320007 | |
| 39582 | 13323109 | 13324626 | |
| 39583 | 13405511 | 13406121 | 132182 |
| 39584 | 13454825 | 13455995 | 132182 |
| 39585 | 13460464 | 13462531 | 132182 |
| 39586 | 13512279 | 13512903 | |
| 39587 | 13520729 | 13521839 | 163517, 244502 |
| 39588 | 13526359 | 13527306 | 163517 |
| 39589 | 14160028 | 14160817 | 163528 |
| 39590 | 14164811 | 14167591 | 170876, 163528 |
| 39591 | 14178368 | 14180258 | 170876, 268279 |
| 39592 | 14185107 | 14187293 | 228242, 154767, 170876, |
| | | | 268279 |
| 39593 | 14219211 | 14221043 | 170860, 154767 |
| 39594 | 14243057 | 14244605 | |
| 39595 | 14244702 | 14245633 | |
| 39596 | 14245779 | 14246868 | |
| 39597 | 14294652 | 14295249 | |
| 39598 | 14377753 | 14378490 | |
| 39599 | 14432480 | 14433031 | |
| 39600 | 14629357 | 14630006 | |
| 39601 | 14658905 | 14659491 | |
| 39602 | 14692300 | 14694186 | 154781 |
| 39603 | 14719449 | 14720033 | 131379 |
| 39604 | 14832642 | 14833471 | |
| 39605 | 14843659 | 14846319 | 260902 |
| 39606 | 14856023 | 14856529 | |
| 39607 | 14918370 | 14918946 | 154783 |
| 39608 | 14941504 | 14942413 | 154783 |
| 39609 | 14942667 | 14943411 | 154783 |
| 39610 | 14984347 | 14985028 | 225733 |
| 39611 | 14987874 | 14990576 | 177463, 225733 |
| 39612 | 15031551 | 15032402 | 177463 |
| 39613 | 15090825 | 15091650 | 177463, 131368 |
| 39614 | 15105735 | 15107270 | 131368 |
| 39615 | 15124792 | 15125278 | 131381 |
| 39616 | 15139951 | 15141402 | 131381 |
| 39617 | 15143600 | 15144723 | |
| 39618 | 15148819 | 15150056 | |
| 39619 | 15212466 | 15213169 | 230524 |
| 39620 | 15245456 | 15246019 | 230524 |
| 39621 | 15246769 | 15248984 | 131375, 230524 |
| 39622 | 15340563 | 15343706 | 131370 |
| 39623 | 15361827 | 15362796 | 131370 |
| 39624 | 15364432 | 15365103 | 131370 |
| 39625 | 15366692 | 15367246 | 131370 |
| 39626 | 15367295 | 15368583 | 131370 |
| 39627 | 15372990 | 15374350 | 131370 |
| 39628 | 15428480 | 15429448 | 206562 |
| 39629 | 15450626 | 15451362 | 206562 |
| 39630 | 15468233 | 15470481 | 144597, 206562 |
| 39631 | 15632759 | 15634088 | 131373 |
| 39632 | 15642360 | 15644444 | 169814, 131373 |
| 39633 | 15647589 | 15648673 | 169814 |
| 39634 | 15649274 | 15649888 | 169814 |
| 39635 | 15651392 | 15652302 | 169814 |
| 39636 | 15671574 | 15673633 | 169814 |
| 39637 | 15675486 | 15676157 | 169814 |
| 39638 | 15793610 | 15796497 | 206560 |
| 39639 | 15809208 | 15812020 | 206560 |
| 39640 | 15822575 | 15825069 | 206560 |
| 39641 | 15900065 | 15902610 | 206560 |
| 39642 | 15935181 | 15935729 | |
| 39643 | 15944264 | 15945980 | |
| 39644 | 16096462 | 16098326 | |
| 39645 | 16099744 | 16103622 | |
| 39646 | 16109255 | 16111501 | |
| 39647 | 16131455 | 16132279 | |
| 39648 | 16142239 | 16145633 | |
| 39649 | 16215927 | 16216356 | 131386 |
| 39650 | 16280361 | 16282829 | |
| 39651 | 16305206 | 16307503 | 154814, 154813 |
| 39652 | 16345448 | 16347629 | 154814 |
| 39653 | 16365669 | 16376319 | 154814, 131378 |
| 39654 | 16379735 | 16380929 | 272498, 154814, 131378 |
| 39655 | 16468410 | 16469366 | 131378 |
| 39656 | 16479126 | 16479406 | 131378 |
| 39657 | 16515669 | 16516238 | 131378 |
| 39658 | 16531441 | 16532133 | 131378 |
| 39659 | 16552397 | 16555934 | 131378 |
| 39660 | 16575480 | 16575947 | |
| 39661 | 16655600 | 16656711 | 092345 |
| 39662 | 16876767 | 16877892 | 154822 |
| 39663 | 16879871 | 16880631 | 154822 |
| 39664 | 16905910 | 16906692 | 154822 |
| 39665 | 16925380 | 16927762 | 154822 |
| 39666 | 16948112 | 16949039 | 154822 |
| 39667 | 16958085 | 16961042 | 154822 |
| 39668 | 17034680 | 17035188 | 154822 |
| 39669 | 17055397 | 17056924 | 154822 |
| 39670 | 17068722 | 17070027 | 154822 |
| 39671 | 17080019 | 17082706 | 154822 |
| 39672 | 17216383 | 17217695 | 131374 |
| 39673 | 17414109 | 17414761 | 131374 |
| 39674 | 17426031 | 17426757 | 131374 |
| 39675 | 17462123 | 17462802 | 131374 |
| 39676 | 17519953 | 17520773 | 131374 |
| 39677 | 17679844 | 17682243 | 131374 |
| 39678 | 17782352 | 17785124 | 131374 |
| 39679 | 17790899 | 17791883 | 131374 |
| 39680 | 17794746 | 17795490 | 131374 |
| 39681 | 18464614 | 18468522 | 182568, 131374 |
| 39682 | 18486108 | 18486972 | 228956, 131374, 182568 |
| 39683 | 18510868 | 18511896 | 228956 |
| 39684 | 19258182 | 19258668 | 183960 |
| 39685 | 19943440 | 19943957 | 163576 |
| 39686 | 19986942 | 19989842 | 144566, 163576 |
| 39687 | 20080502 | 20083260 | 114166 |
| 39688 | 20095893 | 20100075 | 114166 |
| 39689 | 20102414 | 20103362 | 114166 |
| 39690 | 20109915 | 20110544 | 114166 |
| 39691 | 20122447 | 20123182 | 114166 |
| 39692 | 20150378 | 20150747 | 114166 |
| 39693 | 20227355 | 20228742 | 129810, 237485 |
| 39694 | 20277655 | 20278625 | |
| 39695 | 20902246 | 20904039 | |
| 39696 | 21662531 | 21663496 | 151789 |
| 39697 | 21686090 | 21688231 | 151789 |
| 39698 | 21713585 | 21715940 | 151789 |
| 39699 | 21746456 | 21748091 | 151789 |
| 39700 | 21759353 | 21760349 | 151789 |
| 39701 | 21942948 | 21943427 | 151789 |
| 39702 | 21961616 | 21962278 | 151789 |
| 39703 | 21996149 | 21997495 | 151789, 223351 |
| 39704 | 22147468 | 22148451 | 151789 |
| 39705 | 22162387 | 22163290 | 151789 |
| 39706 | 22200829 | 22201234 | 151789 |
| 39707 | 23203183 | 23204135 | |
| 39708 | 23213482 | 23213990 | |
| 39709 | 23243765 | 23245865 | 182247, 233153 |
| 39710 | 23708843 | 23710591 | |
| 39711 | 23726970 | 23727999 | |
| 39712 | 23780550 | 23783035 | |
| 39713 | 23846738 | 23848814 | 170142, 223791 |
| 39714 | 23851580 | 23853120 | 170142 |
| 39715 | 23918659 | 23919284 | 170142 |
| 39716 | 23956368 | 23959923 | 174748, 197885 |
| 39717 | 23968902 | 23969501 | 197885 |
| 39718 | 23985893 | 23989413 | 174738, 197885 |
| 39719 | 24005018 | 24005417 | 174738 |
| 39720 | 24009971 | 24010519 | 174738 |
| 39721 | 24088962 | 24089848 | |
| 39722 | 24141791 | 24143320 | 224074 |
| 39723 | 24160705 | 24161128 | 151090 |
| 39724 | 24178495 | 24180087 | 151090 |
| 39725 | 24186506 | 24187834 | 151090 |
| 39726 | 24222528 | 24223246 | 151090 |
| 39727 | 24276589 | 24277274 | 151090 |
| 39728 | 24313652 | 24316191 | 151090 |
| 39729 | 24340997 | 24342112 | 151090 |
| 39730 | 24357572 | 24359285 | 151090 |
| 39731 | 24360053 | 24360963 | 151090 |
| 39732 | 24393120 | 24394087 | 151090 |
| 39733 | 24404623 | 24405372 | 151090 |
| 39734 | 24406316 | 24407306 | 151090 |
| 39735 | 24414642 | 24415177 | 151090 |
| 39736 | 24417339 | 24419793 | 151090 |
| 39737 | 24491410 | 24494497 | 151090 |
| 39738 | 24517461 | 24517884 | 151090 |
| 39739 | 24519894 | 24520531 | 151090 |
| 39740 | 24535047 | 24538556 | 228791, 272554, 151090 |
| 39741 | 24562446 | 24564243 | 265028 |
| 39742 | 24586982 | 24588467 | |
| 39743 | 24589190 | 24590437 | |
| 39744 | 24591770 | 24592737 | |
| 39745 | 24639689 | 24641245 | |
| 39746 | 24745865 | 24746856 | 237838 |
| 39747 | 25463205 | 25463677 | 077092 |
| 39748 | 25468470 | 25470848 | 077092 |
| 39749 | 25499382 | 25500154 | 077092 |
| 39750 | 25661606 | 25662462 | 077097 |
| 39751 | 25704416 | 25706878 | 264219, 077097 |
| 39752 | 25823930 | 25825916 | 151093, 151092 |
| 39753 | 25830153 | 25832548 | 151092, 151093 |
| 39754 | 26479104 | 26481541 | |
| 39755 | 26493737 | 26494301 | |
| 39756 | 26755699 | 26756669 | |
| 39757 | 27180036 | 27180482 | 163491 |
| 39758 | 27319809 | 27321074 | 163491 |
| 39759 | 27401704 | 27402675 | 163491 |
| 39760 | 27467491 | 27468226 | 033867 |
| 39761 | 27472536 | 27473084 | 033867 |
| 39762 | 27490791 | 27491828 | 033867 |
| 39763 | 27524602 | 27526528 | 033867 |
| 39764 | 27562645 | 27563485 | |
| 39765 | 27574279 | 27578083 | |
| 39766 | 27585092 | 27587571 | |
| 39767 | 27626326 | 27626904 | |
| 39768 | 27664525 | 27665246 | |
| 39769 | 27722413 | 27723223 | |
| 39770 | 28282225 | 28284036 | 187118 |
| 39771 | 28389018 | 28391387 | 206559, 163512 |
| 39772 | 28709087 | 28710112 | 228214 |
| 39773 | 28768174 | 28768817 | 228214 |
| 39774 | 28785274 | 28786005 | 228214 |
| 39775 | 29332560 | 29333383 | 144642 |
| 39776 | 29566675 | 29567612 | 144642 |
| 39777 | 29734471 | 29738793 | 144642 |
| 39778 | 29797985 | 29802082 | 144642 |
| 39779 | 30268957 | 30270260 | |
| 39780 | 30275360 | 30276418 | |
| 39781 | 30300150 | 30300908 | |
| 39782 | 30327337 | 30328398 | |
| 39783 | 30553094 | 30553596 | |
| 39784 | 30559395 | 30560721 | |
| 39785 | 30569170 | 30569674 | |
| 39786 | 30580259 | 30581606 | |
| 39787 | 30619073 | 30621093 | |
| 39788 | 30625186 | 30625939 | |
| 39789 | 30638109 | 30639947 | |
| 39790 | 30646577 | 30649396 | 163513 |
| 39791 | 30666609 | 30669295 | 224618, 163513 |
| 39792 | 30685997 | 30686436 | 163513 |
| 39793 | 30699706 | 30701959 | 163513 |
| 39794 | 30761419 | 30764074 | |
| 39795 | 30811884 | 30812408 | 144644 |
| 39796 | 31288926 | 31290185 | |
| 39797 | 31316435 | 31317392 | |
| 39798 | 31418549 | 31419004 | |
| 39799 | 31545655 | 31546228 | |
| 39800 | 31572695 | 31575691 | 163527 |
| 39801 | 31633759 | 31635083 | 163527 |
| 39802 | 32086354 | 32087580 | 252398, 144645 |
| 39803 | 32146014 | 32148940 | 152642 |
| 39804 | 32218514 | 32219872 | |
| 39805 | 32227370 | 32228041 | |
| 39806 | 32257096 | 32258379 | |
| 39807 | 32279055 | 32282211 | 170293, 261572 |
| 39808 | 32290121 | 32291923 | 170293 |
| 39809 | 32390260 | 32391379 | 170293 |
| 39810 | 32432901 | 32434384 | 153551 |
| 39811 | 32442558 | 32443728 | 153551 |
| 39812 | 32511115 | 32511731 | 153551 |
| 39813 | 32535232 | 32536181 | 091317 |
| 39814 | 32543234 | 32544576 | 091317 |
| 39815 | 32611080 | 32613402 | 144635 |
| 39816 | 32671693 | 32672297 | |
| 39817 | 32726277 | 32727516 | 182973 |
| 39818 | 32822292 | 32823406 | |
| 39819 | 32881260 | 32882090 | 206557 |
| 39820 | 33077110 | 33077721 | 170266 |
| 39821 | 33137453 | 33139678 | 170266, 188167 |
| 39822 | 33155188 | 33156232 | 170275 |
| 39823 | 33222678 | 33223211 | 173705 |
| 39824 | 33228316 | 33228805 | 173705 |
| 39825 | 33480631 | 33484104 | 153560 |
| 39826 | 33523641 | 33524392 | |
| 39827 | 33758180 | 33760334 | 163539 |
| 39828 | 33832345 | 33833707 | |
| 39829 | 33839218 | 33841300 | 170248 |
| 39830 | 34052819 | 34054514 | |
| 39831 | 35053182 | 35054264 | |
| 39832 | 35083565 | 35084579 | |
| 39833 | 35226228 | 35226716 | |
| 39834 | 35304761 | 35305337 | |
| 39835 | 35565818 | 35566969 | |
| 39836 | 35569762 | 35571291 | |
| 39837 | 35657761 | 35658545 | |
| 39838 | 35680372 | 35682062 | 172995 |
| 39839 | 35701226 | 35702377 | 172995 |
| 39840 | 35704710 | 35705555 | 172995 |
| 39841 | 35711907 | 35712422 | 172995 |
| 39842 | 35715980 | 35717580 | 172995 |
| 39843 | 35822968 | 35824327 | 172995 |
| 39844 | 35841777 | 35843122 | |
| 39845 | 35985923 | 35987802 | |
| 39846 | 36298542 | 36299179 | |
| 39847 | 36404245 | 36404896 | |
| 39848 | 36934386 | 36935145 | 168016 |
| 39849 | 36949015 | 36951105 | 168016 |
| 39850 | 36953841 | 36954381 | 168016 |
| 39851 | 36960949 | 36962442 | 168016 |
| 39852 | 36973588 | 36976422 | 168016 |
| 39853 | 36984900 | 36986821 | 168016 |
| 39854 | 36995943 | 36996841 | |
| 39855 | 36997879 | 37000699 | |
| 39856 | 37033705 | 37036145 | 076242, 178567 |
| 39857 | 37056136 | 37056534 | 076242 |
| 39858 | 37070495 | 37070956 | 076242 |
| 39859 | 37168736 | 37169273 | 093167 |
| 39860 | 37187147 | 37187506 | 093167 |
| 39861 | 37215212 | 37219233 | 093167 |
| 39862 | 37254449 | 37255061 | |
| 39863 | 37262841 | 37263399 | |
| 39864 | 37270988 | 37271746 | |
| 39865 | 37283847 | 37286817 | 144674, 270194, 176354 |
| 39866 | 37314206 | 37314814 | 144674 |
| 39867 | 37379837 | 37380355 | 144674 |
| 39868 | 37458501 | 37459568 | 198590 |
| 39869 | 37648598 | 37651843 | 144668 |
| 39870 | 37710429 | 37711042 | 144668 |
| 39871 | 37892862 | 37894002 | 235257 |
| 39872 | 37901454 | 37903531 | 144677, 235257 |
| 39873 | 37964030 | 37965022 | 144677 |
| 39874 | 37977688 | 37978219 | 144677 |
| 39875 | 37987375 | 37987883 | 144677 |
| 39876 | 38003484 | 38006779 | 144677 |
| 39877 | 38071745 | 38073758 | |
| 39878 | 38127962 | 38128390 | 008226 |
| 39879 | 38158847 | 38159957 | 008226, 060971 |
| 39880 | 38166358 | 38167561 | 201965, 060971 |
| 39881 | 38169140 | 38169743 | 060971 |
| 39882 | 38173855 | 38176111 | 060971 |
| 39883 | 38177642 | 38181047 | 172936, 060971 |
| 39884 | 38205712 | 38208070 | 172939 |
| 39885 | 38288785 | 38289301 | 172939 |
| 39886 | 38387682 | 38389831 | 093217 |
| 39887 | 38494722 | 38497545 | 114739, 229589 |
| 39888 | 38510147 | 38510838 | 114739 |
| 39889 | 38512531 | 38513457 | 114739 |
| 39890 | 38537521 | 38538544 | 157036 |
| 39891 | 39092631 | 39094389 | 114742 |
| 39892 | 39147851 | 39149751 | 168026, 114745 |
| 39893 | 39160458 | 39161199 | 168026 |
| 39894 | 39167247 | 39167759 | 168026 |
| 39895 | 39187419 | 39190279 | 144655 |
| 39896 | 39191168 | 39196412 | 144655 |
| 39897 | 39207903 | 39209074 | |
| 39898 | 39218340 | 39220238 | |
| 39899 | 39221529 | 39222653 | |
| 39900 | 39328596 | 39330291 | 270367 |
| 39901 | 39333046 | 39334871 | |
| 39902 | 39358420 | 39360869 | |
| 39903 | 39420428 | 39421300 | |
| 39904 | 39424164 | 39426160 | 144659 |
| 39905 | 39447447 | 39449289 | 168028 |
| 39906 | 39573051 | 39573907 | |
| 39907 | 39680487 | 39681327 | |
| 39908 | 39789393 | 39790808 | |
| 39909 | 39793163 | 39794440 | |
| 39910 | 39822982 | 39823535 | |
| 39911 | 39836314 | 39836945 | |
| 39912 | 39850096 | 39852275 | 170011 |
| 39913 | 39941589 | 39942534 | 170011 |
| 39914 | 39951628 | 39953838 | 170011 |
| 39915 | 40128697 | 40129708 | 170011 |
| 39916 | 40308979 | 40310474 | |
| 39917 | 40350253 | 40352279 | 114784 |
| 39918 | 40493555 | 40495401 | 223797 |
| 39919 | 40497976 | 40499837 | 188846 |
| 39920 | 40517770 | 40519325 | 177873 |
| 39921 | 40545863 | 40548108 | 177842 |
| 39922 | 40565434 | 40567317 | 172888 |
| 39923 | 40625131 | 40625701 | |
| 39924 | 40841723 | 40842399 | 231873 |
| 39925 | 40919097 | 40920181 | |
| 39926 | 40952720 | 40954534 | |
| 39927 | 40979989 | 40981688 | |
| 39928 | 41012539 | 41014413 | 233096 |
| 39929 | 41143315 | 41144058 | |
| 39930 | 41239878 | 41242810 | 168036 |
| 39931 | 41281934 | 41282850 | 168036 |
| 39932 | 41309313 | 41310108 | 168038 |
| 39933 | 41316017 | 41317000 | 168038 |
| 39934 | 41668614 | 41669704 | 168038 |
| 39935 | 41722940 | 41723509 | 168038 |
| 39936 | 41729277 | 41730924 | 252409, 168038 |
| 39937 | 41735246 | 41735731 | 168038 |
| 39938 | 42002744 | 42004090 | 168038 |
| 39939 | 42054309 | 42058043 | 182606 |
| 39940 | 42060645 | 42062825 | 182606 |
| 39941 | 42066949 | 42067765 | 182606 |
| 39942 | 42073997 | 42074823 | 182606 |
| 39943 | 42076620 | 42079280 | 182606 |
| 39944 | 42086947 | 42087859 | 182606 |
| 39945 | 42096723 | 42097151 | 182606 |
| 39946 | 42103115 | 42103878 | 182606 |
| 39947 | 42121113 | 42122567 | 182606 |
| 39948 | 42142450 | 42143382 | 182606 |
| 39949 | 42156574 | 42157732 | 182606 |
| 39950 | 42162255 | 42162874 | 182606 |
| 39951 | 42170364 | 42172717 | 182606 |
| 39952 | 42220594 | 42221533 | 182606 |
| 39953 | 42271104 | 42272972 | |
| 39954 | 42585957 | 42587025 | |
| 39955 | 42622681 | 42624370 | 008324, 093183 |
| 39956 | 42632107 | 42633110 | 008324, 093183 |
| 39957 | 42641114 | 42643467 | 114857, 230084, 093183 |
| 39958 | 42673511 | 42674067 | 114857, 230084 |
| 39959 | 42694921 | 42696993 | 114853, 230084 |
| 39960 | 42725414 | 42725840 | |
| 39961 | 42797042 | 42798602 | 244607 |
| 39962 | 42819463 | 42823370 | 181061 |
| 39963 | 42842067 | 42847588 | 235288, 144648, 181061 |
| 39964 | 42856302 | 42857546 | 273328, 235288, 273291, |
| | | | 144648, 240747 |
| 39965 | 42860630 | 42861844 | 273328, 235288, 273291, |
| | | | 144648, 240747 |
| 39966 | 42864234 | 42865841 | 273328, 235288, 273291, |
| | | | 144648, 240747 |
| 39967 | 42867275 | 42873390 | 273328, 235288, 273291, |
| | | | 144648, 240747 |
| 39968 | 42884956 | 42886491 | 273328, 235288, 273291, |
| | | | 144648, 240747 |
| 39969 | 42892555 | 42895116 | 235288, 273328, 273291, |
| | | | 144648, 240747 |
| 39970 | 42895207 | 42898493 | 180432, 273328, 273291, |
| | | | 144648, 240747 |
| 39971 | 42912792 | 42918943 | 180432, 273328, 273291, |
| | | | 144648, 240747 |
| 39972 | 42947122 | 42948626 | 182983, 273328, 273291, |
| | | | 240747 |
| 39973 | 43020357 | 43021660 | 144649, 273291 |
| 39974 | 43042049 | 43043488 | 273291, 144649 |
| 39975 | 43060502 | 43061651 | 273291, 144649 |
| 39976 | 43146912 | 43148058 | 144647 |
| 39977 | 43196957 | 43197762 | |
| 39978 | 43219987 | 43223518 | |
| 39979 | 43249113 | 43249582 | |
| 39980 | 43251206 | 43252662 | 222331 |
| 39981 | 43254631 | 43256096 | |
| 39982 | 43327478 | 43329580 | 163788 |
| 39983 | 43329757 | 43330763 | 163788 |
| 39984 | 43339687 | 43340505 | 163788 |
| 39985 | 43359321 | 43359966 | 163788 |
| 39986 | 43395345 | 43395935 | 163788 |
| 39987 | 43496480 | 43497222 | 160746 |
| 39988 | 43564042 | 43565966 | 160746 |
| 39989 | 43572510 | 43574578 | 160746 |
| 39990 | 43662615 | 43664642 | 160746 |
| 39991 | 43666071 | 43666722 | 160746 |
| 39992 | 43670502 | 43674587 | 160746 |
| 39993 | 43679988 | 43681058 | 160746 |
| 39994 | 43682247 | 43684288 | 160746 |
| 39995 | 43730772 | 43733566 | 011198, 160746 |
| 39996 | 43750513 | 43750986 | 011198 |
| 39997 | 43778088 | 43779224 | |
| 39998 | 43779538 | 43780251 | |
| 39999 | 43793726 | 43797010 | |
| 40000 | 43798664 | 43802018 | |
| 40001 | 43810156 | 43813430 | |
| 40002 | 43925227 | 43926504 | |
| 40003 | 44158732 | 44159365 | 261786 |
| 40004 | 44378802 | 44381612 | 271937, 179152 |
| 40005 | 44397111 | 44397626 | 179152 |
| 40006 | 44400451 | 44401312 | 179152 |
| 40007 | 44480808 | 44482466 | 185219 |
| 40008 | 44518534 | 44519762 | 185219 |
| 40009 | 44551627 | 44553098 | 178917 |
| 40010 | 44666043 | 44667292 | 233509, 236869, 186448 |
| 40011 | 44689936 | 44690957 | 169981, 186448, 236869 |
| 40012 | 44802409 | 44803580 | 163808, 163807 |
| 40013 | 44902695 | 44904656 | 169964, 207783, 163808 |
| 40014 | 44927753 | 44929326 | 163810 |
| 40015 | 44996481 | 44996944 | 163812 |
| 40016 | 45016599 | 45018658 | 075914, 163812 |
| 40017 | 45038016 | 45038627 | 075914 |
| 40018 | 45043597 | 45044194 | 163815, 075914 |
| 40019 | 45241398 | 45242495 | |
| 40020 | 45265357 | 45266008 | 249992 |
| 40021 | 45266460 | 45268163 | 178550, 249992 |
| 40022 | 45429701 | 45430869 | 011376 |
| 40023 | 45521257 | 45522330 | 011376 |
| 40024 | 45528826 | 45529497 | 232455, 011376 |
| 40025 | 45550716 | 45551558 | 232455, 011376 |
| 40026 | 45579517 | 45580613 | 011376 |
| 40027 | 45585262 | 45590466 | 011376 |
| 40028 | 45592737 | 45596202 | |
| 40029 | 45624529 | 45624960 | 144791 |
| 40030 | 45634455 | 45638144 | 144791 |
| 40031 | 45640835 | 45641924 | 144791 |
| 40032 | 45650277 | 45650754 | 144791 |
| 40033 | 45658728 | 45660153 | 144791 |
| 40034 | 45676999 | 45678246 | 144791 |
| 40035 | 45680278 | 45681069 | 144791 |
| 40036 | 45688506 | 45689013 | 144791 |
| 40037 | 45698172 | 45698790 | 144791 |
| 40038 | 45700796 | 45701967 | 144791 |
| 40039 | 45709442 | 45709955 | 144791 |
| 40040 | 45718038 | 45719142 | 144791 |
| 40041 | 45729456 | 45731896 | 211456, 230530 |
| 40042 | 45803506 | 45804369 | 163817 |
| 40043 | 45858933 | 45861118 | |
| 40044 | 45862435 | 45863055 | |
| 40045 | 45867442 | 45868778 | 163818 |
| 40046 | 45883131 | 45884027 | 163818 |
| 40047 | 45902245 | 45903266 | 163818 |
| 40048 | 45994900 | 45995607 | 163820 |
| 40049 | 46026475 | 46031711 | 163820 |
| 40050 | 46035316 | 46037741 | 163820 |
| 40051 | 46048095 | 46048679 | |
| 40052 | 46150516 | 46151144 | |
| 40053 | 46152124 | 46152518 | |
| 40054 | 46155354 | 46157161 | |
| 40055 | 46530069 | 46530886 | |
| 40056 | 46531008 | 46533788 | |
| 40057 | 46537120 | 46543050 | 163825 |
| 40058 | 46599495 | 46601385 | 268324, 163827 |
| 40059 | 46606919 | 46608574 | 163827 |
| 40060 | 46620170 | 46621155 | 241186, 163827 |
| 40061 | 46624866 | 46625323 | 241186 |
| 40062 | 46626500 | 46628916 | 241186 |
| 40063 | 46674192 | 46674795 | |
| 40064 | 46733249 | 46736009 | 178038 |
| 40065 | 46736943 | 46738313 | |
| 40066 | 46886203 | 46888539 | |
| 40067 | 46908191 | 46909542 | 160808 |
| 40068 | 46910402 | 46910913 | 160808 |
| 40069 | 46971614 | 46974148 | 160799 |
| 40070 | 46975308 | 46978524 | 160799 |
| 40071 | 46984152 | 46987212 | 160799 |
| 40072 | 46987324 | 46991393 | 160799 |
| 40073 | 47009777 | 47010913 | 160799 |
| 40074 | 47011860 | 47012904 | 160799 |
| 40075 | 47017240 | 47018858 | 160799 |
| 40076 | 47020270 | 47022205 | 160796, 160799 |
| 40077 | 47057533 | 47058170 | 181555 |
| 40078 | 47138286 | 47139221 | 181555 |
| 40079 | 47181911 | 47183090 | 181555 |
| 40080 | 47204190 | 47206898 | 227398, 181555 |
| 40081 | 47291731 | 47292859 | 239128, 088727 |
| 40082 | 47323056 | 47325159 | 114648, 088727 |
| 40083 | 47420776 | 47423812 | 076201, 260236 |
| 40084 | 47426508 | 47427051 | 076201 |
| 40085 | 47462359 | 47464409 | 114650 |
| 40086 | 47483135 | 47486358 | 114650 |
| 40087 | 47516210 | 47518247 | 114650 |
| 40088 | 47553991 | 47555852 | 163832 |
| 40089 | 47652992 | 47654618 | 173473 |
| 40090 | 47821704 | 47824501 | 173473 |
| 40091 | 47843343 | 47845652 | 132153 |
| 40092 | 47865612 | 47867449 | 132153 |
| 40093 | 47952169 | 47952826 | 047849 |
| 40094 | 48025607 | 48026016 | 047849 |
| 40095 | 48026876 | 48027380 | 047849 |
| 40096 | 48054736 | 48055544 | 047849 |
| 40097 | 48060119 | 48060752 | 047849 |
| 40098 | 48080469 | 48082013 | 270285, 047849 |
| 40099 | 48128090 | 48131101 | 047849 |
| 40100 | 48282238 | 48283394 | 164048 |
| 40101 | 48342101 | 48344075 | 172113 |
| 40102 | 48469787 | 48472113 | 164050 |
| 40103 | 48481167 | 48482701 | 232112, 244380, 164051 |
| 40104 | 48487445 | 48489001 | 164053, 244380 |
| 40105 | 48506545 | 48508533 | 164053, 213689 |
| 40106 | 48509444 | 48510389 | 164054 |
| 40107 | 48513630 | 48515411 | 164054 |
| 40108 | 48541143 | 48542381 | 164054 |
| 40109 | 48594086 | 48594792 | 114268 |
| 40110 | 48646139 | 48647425 | 010256 |
| 40111 | 48672382 | 48673298 | 225697 |
| 40112 | 48700233 | 48701833 | 213672, 228350, 008300 |
| 40113 | 48722548 | 48723754 | 213672 |
| 40114 | 48753795 | 48755087 | 068745 |
| 40115 | 48776702 | 48778566 | 068745 |
| 40116 | 48792009 | 48792525 | 114302 |
| 40117 | 48883958 | 48886108 | 224424, 114302 |
| 40118 | 48901648 | 48902077 | 178537 |
| 40119 | 48934258 | 48936921 | 178537 |
| 40120 | 48955495 | 48957693 | 177479, 221883 |
| 40121 | 49026583 | 49028905 | 178467, 223343 |
| 40122 | 49043771 | 49045619 | 178252, 178467 |
| 40123 | 49051365 | 49051920 | 178252 |
| 40124 | 49055226 | 49056517 | 178149 |
| 40125 | 49057669 | 49060545 | 207605, 178057, 178149 |
| 40126 | 49066100 | 49067046 | 272434, 178035 |
| 40127 | 49130309 | 49132622 | 198218 |
| 40128 | 49141236 | 49142536 | 172053 |
| 40129 | 49157019 | 49159112 | 172037, 172046 |
| 40130 | 49169362 | 49171767 | 172037 |
| 40131 | 49202541 | 49205031 | 177352 |
| 40132 | 49208267 | 49209677 | 185909 |
| 40133 | 49255858 | 49256473 | 173421 |
| 40134 | 49313903 | 49315271 | 114316, 188315 |
| 40135 | 49376516 | 49378272 | 114316 |
| 40136 | 49388312 | 49390491 | |
| 40137 | 49394768 | 49397047 | 067560, 233276 |
| 40138 | 49447747 | 49451385 | 145022, 067560 |
| 40139 | 49456121 | 49457122 | 145020 |
| 40140 | 49457671 | 49460832 | 145029, 235261, 145020 |
| 40141 | 49464988 | 49467451 | 145029 |
| 40142 | 49493721 | 49494331 | |
| 40143 | 49498814 | 49499861 | |
| 40144 | 49506360 | 49508815 | 173402 |
| 40145 | 49535163 | 49539990 | 173402 |
| 40146 | 49557205 | 49557825 | 173402 |
| 40147 | 49572217 | 49573066 | 173402 |
| 40148 | 49573129 | 49574730 | |
| 40149 | 49591089 | 49592592 | 164061, 226913 |
| 40150 | 49703892 | 49704532 | 164061 |
| 40151 | 49705814 | 49706740 | 164061 |
| 40152 | 49710388 | 49712741 | 164062 |
| 40153 | 49760371 | 49762504 | 176095, 176020, 173540 |
| 40154 | 49787661 | 49788743 | 176095 |
| 40155 | 49850519 | 49851999 | 182179 |
| 40156 | 49937248 | 49939861 | 230698, 164078 |
| 40157 | 49942822 | 49944174 | 228008 |
| 40158 | 49965934 | 49967899 | 164077 |
| 40159 | 49977189 | 49978880 | 004534 |
| 40160 | 50125910 | 50127362 | 003756, 004534 |
| 40161 | 50192310 | 50192966 | 001617, 235016 |
| 40162 | 50208811 | 50209714 | 001617 |
| 40163 | 50214711 | 50215203 | 001617 |
| 40164 | 50231632 | 50234153 | 114349 |
| 40165 | 50238907 | 50239665 | |
| 40166 | 50242406 | 50244011 | 188338 |
| 40167 | 50247392 | 50249825 | 188338 |
| 40168 | 50264385 | 50265459 | 114353 |
| 40169 | 50273070 | 50276592 | 114353 |
| 40170 | 50280475 | 50281309 | 114353 |
| 40171 | 50290991 | 50292691 | 114353 |
| 40172 | 50297270 | 50298695 | 230454 |
| 40173 | 50310239 | 50311248 | 012171 |
| 40174 | 50327950 | 50330989 | 186792, 214706 |
| 40175 | 50335973 | 50338995 | 114378, 243477, 186792 |
| 40176 | 50339312 | 50341414 | 114378 |
| 40177 | 50357790 | 50359903 | 068001, 114383 |
| 40178 | 50364481 | 50365907 | 114383 |
| 40179 | 50372951 | 50376005 | 068028 |
| 40180 | 50387824 | 50389502 | 114395, 272104, 114388 |
| 40181 | 50395716 | 50397215 | 114395, 126062, 272104 |
| 40182 | 50604752 | 50605698 | 088543 |
| 40183 | 50606288 | 50607863 | 114735, 088543 |
| 40184 | 50620916 | 50622919 | 114735 |
| 40185 | 50623492 | 50624524 | |
| 40186 | 50624894 | 50626926 | |
| 40187 | 50637542 | 50640589 | |
| 40188 | 50641578 | 50644611 | 114737 |
| 40189 | 50648009 | 50650381 | 114738, 114737 |
| 40190 | 50653297 | 50655456 | 114738 |
| 40191 | 50661810 | 50662493 | 114738 |
| 40192 | 51377577 | 51378513 | 088538 |
| 40193 | 51421143 | 51424464 | 145050, 088538 |
| 40194 | 51428227 | 51430079 | 179837 |
| 40195 | 51532999 | 51534647 | 145041 |
| 40196 | 51569591 | 51570662 | |
| 40197 | 51571822 | 51574151 | |
| 40198 | 51576572 | 51577326 | 164080 |
| 40199 | 51578039 | 51578465 | 164080 |
| 40200 | 51584148 | 51584714 | 164080 |
| 40201 | 51655249 | 51656052 | 164080 |
| 40202 | 51704987 | 51706236 | 164081 |
| 40203 | 51753053 | 51753663 | |
| 40204 | 51975053 | 51977881 | 041880, 114767 |
| 40205 | 51989700 | 51990886 | 180929 |
| 40206 | 52000844 | 52002655 | 114779, 090097, 272762, |
| | | | 254782 |
| 40207 | 52007312 | 52009713 | 243989, 114786, 272762, |
| | | | 254782, 114779, 248487 |
| 40208 | 52015050 | 52019158 | 114779, 248487, 243989, |
| | | | 114786 |
| 40209 | 52019817 | 52020627 | 243989, 114786 |
| 40210 | 52028600 | 52030179 | 162244 |
| 40211 | 52090449 | 52091800 | 164086 |
| 40212 | 52121731 | 52122772 | 164087 |
| 40213 | 52132853 | 52133722 | 164087 |
| 40214 | 52188162 | 52189740 | 164087 |
| 40215 | 52204556 | 52206913 | |
| 40216 | 52208201 | 52213167 | |
| 40217 | 52215044 | 52217407 | |
| 40218 | 52226874 | 52227552 | 242849 |
| 40219 | 52229834 | 52230479 | |
| 40220 | 52231606 | 52233672 | 023330 |
| 40221 | 52238328 | 52239311 | 023330 |
| 40222 | 52239706 | 52240239 | 023330 |
| 40223 | 52244188 | 52245226 | 023330 |
| 40224 | 52245302 | 52246096 | 023330 |
| 40225 | 52250613 | 52251650 | |
| 40226 | 52270258 | 52274012 | 243224, 247596, 239732 |
| 40227 | 52279308 | 52280395 | 164088 |
| 40228 | 52311372 | 52313823 | 164091 |
| 40229 | 52315887 | 52317719 | 164091 |
| 40230 | 52320321 | 52322701 | 242797, 168237, 164091 |
| 40231 | 52323201 | 52326373 | 242797, 168237 |
| 40232 | 52347353 | 52348420 | |
| 40233 | 52357719 | 52358644 | 114841 |
| 40234 | 52443119 | 52445676 | 010318, 163930 |
| 40235 | 52488825 | 52490586 | 010322 |
| 40236 | 52505312 | 52506496 | 010322 |
| 40237 | 52570025 | 52572382 | 168273 |
| 40238 | 52640713 | 52641156 | 163939 |
| 40239 | 52715226 | 52716878 | 163938, 163939 |
| 40240 | 52719199 | 52721000 | 163939, 163938 |
| 40241 | 52738446 | 52741062 | 114902, 016864 |
| 40242 | 52758128 | 52759136 | 114904 |
| 40243 | 52804288 | 52805700 | 114904 |
| 40244 | 52809186 | 52810748 | |
| 40245 | 52811102 | 52814624 | 055957 |
| 40246 | 52827246 | 52829930 | 162267 |
| 40247 | 52847745 | 52848411 | 243696, 055955 |
| 40248 | 52860708 | 52862853 | 243696, 055955 |
| 40249 | 52863220 | 52866834 | 055955, 243696 |
| 40250 | 52878255 | 52880054 | 248592, 213533 |
| 40251 | 52927607 | 52928187 | 248592, 213533 |
| 40252 | 52938036 | 52939035 | 163935 |
| 40253 | 53068876 | 53069635 | 272305, 163935 |
| 40254 | 53072725 | 53073691 | 272305, 163935 |
| 40255 | 53074194 | 53074843 | 272305, 163935 |
| 40256 | 53078364 | 53080948 | 163935, 272305 |
| 40257 | 53106436 | 53107773 | 272305 |
| 40258 | 53118304 | 53119493 | 272305 |
| 40259 | 53126720 | 53127581 | 272305, 163933 |
| 40260 | 53163501 | 53165678 | 163933 |
| 40261 | 53184002 | 53185197 | |
| 40262 | 53193266 | 53195907 | 163932 |
| 40263 | 53253794 | 53254336 | |
| 40264 | 53269261 | 53271369 | 163931 |
| 40265 | 53271959 | 53273118 | 163931 |
| 40266 | 53288271 | 53290541 | 163931 |
| 40267 | 53303189 | 53305177 | |
| 40268 | 53337753 | 53338627 | 162290 |
| 40269 | 53376080 | 53376917 | 162290 |
| 40270 | 53380254 | 53382478 | 162290 |
| 40271 | 53456918 | 53457718 | |
| 40272 | 53498181 | 53499669 | |
| 40273 | 53511984 | 53513612 | |
| 40274 | 53528021 | 53528712 | 157388 |
| 40275 | 53532813 | 53533875 | 157388 |
| 40276 | 53539555 | 53541564 | 157388 |
| 40277 | 53578332 | 53578878 | 157388 |
| 40278 | 53667195 | 53667880 | 157388 |
| 40279 | 53741851 | 53742572 | 157388 |
| 40280 | 53839829 | 53841519 | 157388 |
| 40281 | 53875269 | 53875726 | 016391 |
| 40282 | 53876038 | 53881224 | 056736, 016391 |
| 40283 | 53914779 | 53916692 | 222888, 113812 |
| 40284 | 53919132 | 53920064 | 113811 |
| 40285 | 53924688 | 53927001 | 113811 |
| 40286 | 54356269 | 54356943 | 157445 |
| 40287 | 54390289 | 54390723 | 157445 |
| 40288 | 54393175 | 54393755 | 157445 |
| 40289 | 55436793 | 55437868 | |
| 40290 | 55479617 | 55479987 | |
| 40291 | 55518922 | 55520793 | 114251 |
| 40292 | 55520807 | 55522640 | 244586, 114251 |
| 40293 | 55531179 | 55531981 | 242317 |
| 40294 | 55560318 | 55561029 | 187672 |
| 40295 | 55631210 | 55632267 | 187672 |
| 40296 | 55659825 | 55660310 | 187672 |
| 40297 | 56389427 | 56390875 | 187672 |
| 40298 | 56590376 | 56592086 | 180376 |
| 40299 | 56701860 | 56702673 | 163946 |
| 40300 | 56715903 | 56717691 | 163946 |
| 40301 | 56792492 | 56793225 | 163947 |
| 40302 | 56835576 | 56836879 | 163947 |
| 40303 | 57260795 | 57263208 | 157500 |
| 40304 | 57436119 | 57437176 | 174844 |
| 40305 | 57540843 | 57543325 | 174840 |
| 40306 | 57581823 | 57584643 | 272146, 168374 |
| 40307 | 57677812 | 57679339 | 241933, 174839 |
| 40308 | 57691819 | 57692809 | |
| 40309 | 57737384 | 57738946 | |
| 40310 | 57740930 | 57744108 | 163681 |
| 40311 | 57783427 | 57784431 | 163681 |
| 40312 | 57789170 | 57789985 | 163681 |
| 40313 | 57812530 | 57813691 | 163681 |
| 40314 | 57935346 | 57939389 | |
| 40315 | 57955080 | 57956527 | |
| 40316 | 57959391 | 57961698 | |
| 40317 | 57962192 | 57964807 | |
| 40318 | 57968051 | 57970703 | |
| 40319 | 57993346 | 57997660 | 136068 |
| 40320 | 58011792 | 58012707 | 136068 |
| 40321 | 58025785 | 58026247 | 136068 |
| 40322 | 58033426 | 58040177 | 136068 |
| 40323 | 58043116 | 58047549 | 136068 |
| 40324 | 58050939 | 58053313 | 136068 |
| 40325 | 58053394 | 58054279 | 136068 |
| 40326 | 58056728 | 58057973 | 136068 |
| 40327 | 58087166 | 58089255 | 136068 |
| 40328 | 58096973 | 58097999 | 136068 |
| 40329 | 58103077 | 58103981 | 136068 |
| 40330 | 58120040 | 58120656 | 136068 |
| 40331 | 58129114 | 58129909 | 136068 |
| 40332 | 58140289 | 58140921 | 136068 |
| 40333 | 58141308 | 58142136 | 136068 |
| 40334 | 58146527 | 58151428 | 244161, 136068 |
| 40335 | 58153755 | 58154820 | 244161, 136068 |
| 40336 | 58159637 | 58160426 | |
| 40337 | 58160729 | 58162245 | |
| 40338 | 58166685 | 58167378 | |
| 40339 | 58173275 | 58175822 | |
| 40340 | 58178788 | 58180080 | 163687 |
| 40341 | 58190710 | 58194291 | 163687 |
| 40342 | 58199667 | 58201536 | 163687 |
| 40343 | 58202815 | 58203705 | |
| 40344 | 58216565 | 58217436 | |
| 40345 | 58222385 | 58224517 | 163686 |
| 40346 | 58227098 | 58227851 | 163686 |
| 40347 | 58231557 | 58232922 | 163686 |
| 40348 | 58235093 | 58236252 | 163686 |
| 40349 | 58257430 | 58259057 | 163686 |
| 40350 | 58291664 | 58293274 | 163684 |
| 40351 | 58310906 | 58311769 | |
| 40352 | 58318294 | 58319770 | 168297 |
| 40353 | 58319807 | 58322243 | 168297 |
| 40354 | 58374190 | 58374916 | 168297 |
| 40355 | 58418442 | 58421559 | 168291 |
| 40356 | 58449356 | 58449840 | |
| 40357 | 58456254 | 58458147 | |
| 40358 | 58460527 | 58461352 | |
| 40359 | 58472154 | 58474170 | |
| 40360 | 58477404 | 58478891 | 168301 |
| 40361 | 58505385 | 58506309 | 168306 |
| 40362 | 58507710 | 58509242 | 168306 |
| 40363 | 58512309 | 58512854 | 168306 |
| 40364 | 58518350 | 58519262 | 168306 |
| 40365 | 58521332 | 58523937 | 168306 |
| 40366 | 58549186 | 58551197 | 168309 |
| 40367 | 58653899 | 58654651 | |
| 40368 | 59002591 | 59003863 | 242428, 163689 |
| 40369 | 59026555 | 59027082 | 163689 |
| 40370 | 59034935 | 59036283 | 163689 |
| 40371 | 59305670 | 59306434 | |
| 40372 | 59320240 | 59320949 | |
| 40373 | 59650003 | 59650631 | |
| 40374 | 59842959 | 59843954 | 189283 |
| 40375 | 60071361 | 60072682 | 189283 |
| 40376 | 60406796 | 60408398 | 189283 |
| 40377 | 60584299 | 60584895 | 189283 |
| 40378 | 60826815 | 60827528 | 189283 |
| 40379 | 61141326 | 61141917 | 189283 |
| 40380 | 61159332 | 61159868 | 189283 |
| 40381 | 61180259 | 61181278 | 189283 |
| 40382 | 61207083 | 61208133 | 189283 |
| 40383 | 61235435 | 61236189 | 189283 |
| 40384 | 61236267 | 61237691 | 189283 |
| 40385 | 61249768 | 61250616 | |
| 40386 | 61424009 | 61425031 | |
| 40387 | 61433789 | 61434654 | |
| 40388 | 61503953 | 61504843 | |
| 40389 | 61545743 | 61549119 | 144724 |
| 40390 | 61597790 | 61598628 | 144724 |
| 40391 | 61612902 | 61613968 | 144724 |
| 40392 | 61620251 | 61620875 | 144724 |
| 40393 | 61622743 | 61623902 | 144724 |
| 40394 | 61671976 | 61672613 | 144724 |
| 40395 | 61693687 | 61694254 | 144724 |
| 40396 | 61833557 | 61834497 | 144724 |
| 40397 | 61862901 | 61864175 | 144724 |
| 40398 | 61921424 | 61922432 | 144724 |
| 40399 | 62214098 | 62214702 | 144724 |
| 40400 | 62304432 | 62305329 | 114405, 241472 |
| 40401 | 63848173 | 63851091 | 163635, 163634 |
| 40402 | 63872420 | 63873046 | 163635 |
| 40403 | 63896651 | 63899480 | 163635 |
| 40404 | 63953361 | 63954959 | 163635 |
| 40405 | 63962269 | 63962704 | 163635 |
| 40406 | 64008141 | 64009626 | 163636 |
| 40407 | 64172115 | 64175464 | 226017, 163637 |
| 40408 | 64236345 | 64237619 | 163637 |
| 40409 | 64251905 | 64254079 | 163637 |
| 40410 | 64519202 | 64520124 | 163638 |
| 40411 | 64537256 | 64538354 | 163638 |
| 40412 | 64539813 | 64540372 | 163638 |
| 40413 | 64598636 | 64599520 | 163638 |
| 40414 | 64613383 | 64614043 | 163638 |
| 40415 | 64651551 | 64652289 | 163638 |
| 40416 | 64670552 | 64673177 | 241684, 163638 |
| 40417 | 64673404 | 64674858 | 163638, 241684 |
| 40418 | 64901344 | 64902504 | 241684 |
| 40419 | 64962625 | 64963865 | 241684 |
| 40420 | 65003946 | 65005905 | |
| 40421 | 65131599 | 65132196 | |
| 40422 | 65276949 | 65277624 | |
| 40423 | 65388243 | 65388775 | 151276 |
| 40424 | 65391557 | 65392618 | 151276 |
| 40425 | 65591659 | 65592240 | 151276 |
| 40426 | 65645344 | 65646339 | 151276 |
| 40427 | 65656613 | 65657043 | 151276 |
| 40428 | 65699712 | 65700281 | 151276 |
| 40429 | 65715057 | 65715694 | 151276 |
| 40430 | 65821039 | 65822173 | 151276 |
| 40431 | 65840093 | 65841051 | 151276 |
| 40432 | 65841358 | 65841787 | 151276 |
| 40433 | 65857018 | 65857492 | 151276 |
| 40434 | 65913661 | 65914531 | 272610, 151276 |
| 40435 | 65931357 | 65932662 | 272610, 151276 |
| 40436 | 65938591 | 65940904 | 272610, 151276 |
| 40437 | 65941151 | 65942336 | 151276 |
| 40438 | 65949329 | 65950923 | 151276 |
| 40439 | 65983411 | 65984112 | 151276 |
| 40440 | 65985049 | 65986147 | 151276 |
| 40441 | 65995942 | 65997340 | 151276 |
| 40442 | 66021764 | 66026104 | 151276 |
| 40443 | 66038840 | 66039966 | |
| 40444 | 66059262 | 66059915 | |
| 40445 | 66101164 | 66102510 | |
| 40446 | 66270817 | 66272450 | 144741 |
| 40447 | 66426774 | 66427718 | 144741 |
| 40448 | 66478370 | 66480192 | 144749 |
| 40449 | 66492494 | 66493271 | 144749 |
| 40450 | 66500808 | 66501464 | 144749 |
| 40451 | 66522620 | 66523845 | 144749 |
| 40452 | 66531075 | 66532484 | 144749 |
| 40453 | 66533196 | 66534218 | 144749 |
| 40454 | 66550198 | 66552395 | 144749 |
| 40455 | 66555073 | 66556200 | |
| 40456 | 66644346 | 66644876 | |
| 40457 | 66648522 | 66649378 | |
| 40458 | 66762469 | 66763151 | |
| 40459 | 66858740 | 66860525 | |
| 40460 | 66870235 | 66870853 | |
| 40461 | 66872498 | 66874227 | |
| 40462 | 66902404 | 66903213 | |
| 40463 | 67048441 | 67049573 | 163376 |
| 40464 | 67094493 | 67095375 | |
| 40465 | 67342834 | 67344355 | |
| 40466 | 67345922 | 67347210 | 241884 |
| 40467 | 67452313 | 67452853 | 172340 |
| 40468 | 67566835 | 67567426 | 172340 |
| 40469 | 67590264 | 67591089 | 172340 |
| 40470 | 67643987 | 67644799 | 172340 |
| 40471 | 67674309 | 67675986 | 172340 |
| 40472 | 67684770 | 67686937 | 172340 |
| 40473 | 67694917 | 67701017 | 172340 |
| 40474 | 67702382 | 67705877 | 241316, 172340 |
| 40475 | 67833460 | 67834732 | 241316 |
| 40476 | 67903141 | 67907349 | 241316 |
| 40477 | 67907518 | 67910500 | 241316 |
| 40478 | 67923575 | 67928819 | 241316 |
| 40479 | 67987845 | 67988540 | 241316 |
| 40480 | 67990602 | 67991963 | 241316 |
| 40481 | 68082924 | 68083477 | 183662 |
| 40482 | 68108677 | 68109844 | 183662 |
| 40483 | 69061591 | 69063792 | 244513, 163378 |
| 40484 | 69100380 | 69101892 | 144747, 244513 |
| 40485 | 69128512 | 69130003 | 144744 |
| 40486 | 69131919 | 69132508 | |
| 40487 | 69132998 | 69136219 | 144746 |
| 40488 | 69226952 | 69230276 | 114541 |
| 40489 | 69230769 | 69231761 | 114541 |
| 40490 | 69248318 | 69250576 | 114541 |
| 40491 | 69261502 | 69263011 | 114541 |
| 40492 | 69291488 | 69292933 | 114541 |
| 40493 | 69295653 | 69296178 | 114541 |
| 40494 | 69297306 | 69298271 | 114541 |
| 40495 | 69298402 | 69299651 | 114541 |
| 40496 | 69305001 | 69305626 | 114541 |
| 40497 | 69355180 | 69356290 | 114541 |
| 40498 | 69788062 | 69789368 | 187098 |
| 40499 | 69818508 | 69820852 | 241665, 187098 |
| 40500 | 69836409 | 69837371 | 187098 |
| 40501 | 70313136 | 70314135 | 242120 |
| 40502 | 70931142 | 70931674 | |
| 40503 | 71031751 | 71032371 | 114861 |
| 40504 | 71060465 | 71061386 | 114861 |
| 40505 | 71074642 | 71077121 | 114861 |
| 40506 | 71109683 | 71110119 | 114861 |
| 40507 | 71111593 | 71116530 | 114861 |
| 40508 | 71125060 | 71126999 | 114861 |
| 40509 | 71132700 | 71133323 | 114861 |
| 40510 | 71135558 | 71138854 | 114861 |
| 40511 | 71156787 | 71157677 | 114861 |
| 40512 | 71159604 | 71162689 | 114861 |
| 40513 | 71177440 | 71181251 | 114861 |
| 40514 | 71188798 | 71192871 | 114861 |
| 40515 | 71201701 | 71202461 | 114861 |
| 40516 | 71212444 | 71213800 | 114861 |
| 40517 | 71221878 | 71222713 | 114861 |
| 40518 | 71257479 | 71260412 | 114861 |
| 40519 | 71295061 | 71296834 | 114861 |
| 40520 | 71303554 | 71304340 | 114861 |
| 40521 | 71311452 | 71312658 | 114861 |
| 40522 | 71421243 | 71422176 | 114861 |
| 40523 | 71428911 | 71429699 | 114861 |
| 40524 | 71477333 | 71478907 | 114861 |
| 40525 | 71544405 | 71546239 | 114861 |
| 40526 | 71552185 | 71554713 | 114861 |
| 40527 | 71596823 | 71597463 | 114861 |
| 40528 | 71630133 | 71634169 | 270562, 114861 |
| 40529 | 71744044 | 71745024 | 163412 |
| 40530 | 71773628 | 71774995 | 163412 |
| 40531 | 72103824 | 72104750 | 241163 |
| 40532 | 72149796 | 72150440 | 241163 |
| 40533 | 72172178 | 72174201 | 241163 |
| 40534 | 72176312 | 72177666 | 241163 |
| 40535 | 72193731 | 72195459 | 241163 |
| 40536 | 72199636 | 72201091 | 243083, 241163 |
| 40537 | 72201504 | 72206292 | 243083, 241163 |
| 40538 | 72238530 | 72239957 | 241163 |
| 40539 | 72248685 | 72250077 | 241163 |
| 40540 | 72318426 | 72320432 | |
| 40541 | 72323438 | 72324248 | |
| 40542 | 72355829 | 72357031 | |
| 40543 | 72386551 | 72389434 | |
| 40544 | 72495234 | 72497181 | 163602 |
| 40545 | 72510816 | 72512515 | |
| 40546 | 72531482 | 72532933 | |
| 40547 | 72616454 | 72617713 | |
| 40548 | 72639622 | 72640904 | |
| 40549 | 72642847 | 72643527 | |
| 40550 | 72674303 | 72675311 | |
| 40551 | 72710164 | 72710809 | |
| 40552 | 72839976 | 72840744 | 144736 |
| 40553 | 72869624 | 72871900 | 144736 |
| 40554 | 72896519 | 72897740 | 144736 |
| 40555 | 72956508 | 72957782 | 172986 |
| 40556 | 73002630 | 73003198 | 172986 |
| 40557 | 73016685 | 73017141 | 172986 |
| 40558 | 73021805 | 73022992 | 172986 |
| 40559 | 73045185 | 73047256 | 163605, 172986 |
| 40560 | 73078362 | 73079120 | 163605 |
| 40561 | 73948381 | 73949175 | 242741 |
| 40562 | 74115357 | 74116246 | |
| 40563 | 74457310 | 74459941 | 113805 |
| 40564 | 74461730 | 74464070 | 113805 |
| 40565 | 74484607 | 74485708 | 113805 |
| 40566 | 74595441 | 74596298 | |
| 40567 | 74631990 | 74632538 | |
| 40568 | 74639908 | 74640276 | |
| 40569 | 74648639 | 74649232 | |
| 40570 | 74662159 | 74664686 | |
| 40571 | 74683919 | 74684415 | |
| 40572 | 74692231 | 74693558 | |
| 40573 | 76180543 | 76182241 | 185008 |
| 40574 | 76922061 | 76923473 | 185008 |
| 40575 | 76991970 | 76992722 | 185008 |
| 40576 | 78556142 | 78556989 | |
| 40577 | 78887664 | 78888361 | 169855 |
| 40578 | 78892969 | 78894176 | 169855 |
| 40579 | 78897400 | 78898984 | 169855 |
| 40580 | 78960570 | 78961031 | 169855 |
| 40581 | 78967503 | 78969019 | 169855 |
| 40582 | 79295899 | 79297571 | 169855 |
| 40583 | 79366628 | 79367717 | 169855 |
| 40584 | 79415126 | 79417293 | 169855 |
| 40585 | 79454329 | 79454986 | 169855 |
| 40586 | 79462382 | 79464491 | 169855 |
| 40587 | 81042121 | 81044495 | 243694 |
| 40588 | 81046329 | 81047824 | 243694 |
| 40589 | 81154134 | 81155853 | |
| 40590 | 81298579 | 81299527 | 241593 |
| 40591 | 81491649 | 81494633 | |
| 40592 | 81499605 | 81503438 | |
| 40593 | 81579290 | 81581470 | 114480 |
| 40594 | 81765885 | 81766926 | 114480 |
| 40595 | 81777679 | 81778343 | 114480 |
| 40596 | 81783374 | 81785847 | 114480 |
| 40597 | 81791285 | 81795205 | 114480 |
| 40598 | 81808156 | 81815109 | 242190, 114480 |
| 40599 | 81865644 | 81866534 | |
| 40600 | 81872788 | 81874743 | |
| 40601 | 81918403 | 81918971 | 242009 |
| 40602 | 85055915 | 85057013 | 175161 |
| 40603 | 86842569 | 86844052 | |
| 40604 | 87137745 | 87139238 | |
| 40605 | 87254857 | 87256359 | |
| 40606 | 87275486 | 87278089 | 083937 |
| 40607 | 87317255 | 87317842 | 064835 |
| 40608 | 87553025 | 87553579 | |
| 40609 | 88079213 | 88081391 | |
| 40610 | 88106983 | 88109499 | 229729, 163320 |
| 40611 | 88198279 | 88200112 | 179021, 163320 |
| 40612 | 90183835 | 90186548 | |
| 40613 | 93632102 | 93633396 | 184500 |
| 40614 | 93679989 | 93680956 | 184500 |
| 40615 | 93688172 | 93689189 | 184500 |
| 40616 | 93691370 | 93693377 | 184500 |
| 40617 | 93698750 | 93699526 | 169379 |
| 40618 | 93780989 | 93782783 | 178694, 178700 |
| 40619 | 94159864 | 94160487 | |
| 40620 | 94243052 | 94244281 | |
| 40621 | 95020667 | 95021739 | |
| 40622 | 95985187 | 95986151 | |
| 40623 | 97482913 | 97484043 | 113966 |
| 40624 | 97540173 | 97542007 | 233280 |
| 40625 | 97620239 | 97621175 | 080200 |
| 40626 | 97636588 | 97637256 | 080200 |
| 40627 | 97671065 | 97671578 | 170854 |
| 40628 | 97676362 | 97677047 | 170854 |
| 40629 | 97689910 | 97691692 | 170854 |
| 40630 | 97700615 | 97701584 | |
| 40631 | 97712798 | 97713897 | 183185 |
| 40632 | 98240423 | 98242177 | 248839, 080822, 080819 |
| 40633 | 98293780 | 98294348 | 080819 |
| 40634 | 98311492 | 98312968 | 080819 |
| 40635 | 98411550 | 98412778 | |
| 40636 | 98450404 | 98453554 | 064225, 239445 |
| 40637 | 98460178 | 98461152 | 064225 |
| 40638 | 98468241 | 98470383 | 064225 |
| 40639 | 98496020 | 98496606 | 064225 |
| 40640 | 98502659 | 98505985 | 064225 |
| 40641 | 98529724 | 98530438 | 064225, 057019 |
| 40642 | 98610938 | 98611969 | 057019 |
| 40643 | 98619757 | 98621493 | 239462, 057019 |
| 40644 | 98632517 | 98634084 | 239462 |
| 40645 | 98641551 | 98642115 | 239462 |
| 40646 | 99535712 | 99537717 | 184220 |
| 40647 | 99565189 | 99565928 | 168386, 184220 |
| 40648 | 99593282 | 99597185 | 168386, 184220 |
| 40649 | 99619503 | 99620978 | 168386, 184220 |
| 40650 | 99627095 | 99629911 | 168386, 184220 |
| 40651 | 99638326 | 99640887 | 168386, 184220 |
| 40652 | 99654232 | 99654745 | 168386, 184220 |
| 40653 | 99720517 | 99723199 | 168386, 184220 |
| 40654 | 99759122 | 99762141 | 168386, 184220 |
| 40655 | 99816733 | 99817611 | 168386, 184220 |
| 40656 | 99822446 | 99823353 | 168386, 184220 |
| 40657 | 99827431 | 99827957 | 168386, 184220 |
| 40658 | 99978706 | 99981197 | 036054 |
| 40659 | 100035321 | 100036201 | 036054 |
| 40660 | 100052856 | 100054961 | 114021 |
| 40661 | 100070948 | 100073562 | 114021 |
| 40662 | 100077114 | 100078330 | |
| 40663 | 100118966 | 100121056 | 206535, 154174 |
| 40664 | 100173395 | 100174199 | 206535 |
| 40665 | 100210439 | 100212682 | 181458 |
| 40666 | 100214542 | 100216984 | 181458 |
| 40667 | 100239377 | 100242170 | 181458 |
| 40668 | 100253449 | 100255976 | 181458 |
| 40669 | 100264223 | 100266053 | 181458 |
| 40670 | 100272731 | 100273486 | 181458 |
| 40671 | 100279979 | 100281158 | 181458 |
| 40672 | 100281953 | 100282660 | 181458 |
| 40673 | 100308780 | 100311171 | |
| 40674 | 100321140 | 100323065 | |
| 40675 | 100332602 | 100333427 | 144820 |
| 40676 | 100353414 | 100354743 | 144820 |
| 40677 | 100356010 | 100356586 | 144820 |
| 40678 | 100368314 | 100370739 | 144820 |
| 40679 | 100427627 | 100430018 | 114354 |
| 40680 | 100436452 | 100437411 | 114354 |
| 40681 | 100444751 | 100445381 | 114354 |
| 40682 | 100475186 | 100476028 | 154175 |
| 40683 | 100754899 | 100755808 | |
| 40684 | 100789078 | 100790084 | |
| 40685 | 100796397 | 100797062 | |
| 40686 | 101230969 | 101232929 | 138468 |
| 40687 | 101280228 | 101281454 | 174173 |
| 40688 | 101291841 | 101294559 | 081154 |
| 40689 | 101394584 | 101396749 | 256628, 066422 |
| 40690 | 101403939 | 101406793 | 114391 |
| 40691 | 101442954 | 101444786 | 182504 |
| 40692 | 101545853 | 101548520 | 144802, 144815 |
| 40693 | 101566488 | 101571601 | 144802 |
| 40694 | 101586177 | 101588103 | |
| 40695 | 101597245 | 101599001 | |
| 40696 | 101608607 | 101611310 | |
| 40697 | 101620029 | 101622845 | |
| 40698 | 101647589 | 101648734 | |
| 40699 | 101831554 | 101833528 | 170044 |
| 40700 | 101843050 | 101845216 | 170044 |
| 40701 | 101848446 | 101849950 | 170044 |
| 40702 | 101875214 | 101875935 | 170044 |
| 40703 | 101881823 | 101882398 | 170044 |
| 40704 | 101892979 | 101894095 | 170044 |
| 40705 | 101898198 | 101902062 | 170044 |
| 40706 | 101913602 | 101915487 | 170044 |
| 40707 | 102389610 | 102390527 | 241754 |
| 40708 | 102391785 | 102393420 | 241754 |
| 40709 | 102475383 | 102475969 | |
| 40710 | 102778224 | 102779282 | |
| 40711 | 102796605 | 102797302 | |
| 40712 | 102804233 | 102804903 | |
| 40713 | 103695305 | 103696203 | |
| 40714 | 103845418 | 103847204 | |
| 40715 | 103847317 | 103848176 | |
| 40716 | 105083909 | 105089770 | 170017 |
| 40717 | 105105381 | 105106791 | 170017 |
| 40718 | 105147199 | 105148849 | 170017 |
| 40719 | 105167287 | 105168078 | 170017 |
| 40720 | 105221087 | 105223006 | 170017 |
| 40721 | 105257240 | 105257884 | 170017 |
| 40722 | 105375326 | 105375960 | 114423 |
| 40723 | 105509340 | 105512800 | 114423 |
| 40724 | 105525174 | 105526178 | 114423 |
| 40725 | 105539754 | 105543928 | 114423 |
| 40726 | 105546793 | 105547409 | 114423 |
| 40727 | 105552507 | 105556490 | 114423 |
| 40728 | 105586607 | 105589135 | 114423 |
| 40729 | 105681185 | 105682513 | |
| 40730 | 105716551 | 105717343 | |
| 40731 | 105724800 | 105725798 | |
| 40732 | 105802024 | 105802467 | |
| 40733 | 107139966 | 107140471 | |
| 40734 | 107148657 | 107149100 | |
| 40735 | 107149499 | 107151484 | 273125 |
| 40736 | 107241067 | 107245110 | 114439 |
| 40737 | 107317759 | 107319018 | 114439 |
| 40738 | 107705753 | 107706735 | |
| 40739 | 107718056 | 107718638 | |
| 40740 | 107724919 | 107725833 | |
| 40741 | 107808966 | 107810862 | 196776 |
| 40742 | 107940477 | 107941825 | 114446 |
| 40743 | 108273104 | 108274722 | 163507 |
| 40744 | 108307897 | 108309698 | 198919, 163507 |
| 40745 | 108800600 | 108801376 | 114487 |
| 40746 | 108844527 | 108845425 | |
| 40747 | 108850060 | 108853724 | |
| 40748 | 108873639 | 108875371 | |
| 40749 | 108880211 | 108881133 | |
| 40750 | 109057011 | 109058645 | |
| 40751 | 109080891 | 109083632 | 241257 |
| 40752 | 109362357 | 109362832 | |
| 40753 | 110062054 | 110065091 | |
| 40754 | 110115877 | 110116473 | |
| 40755 | 110131969 | 110134658 | |
| 40756 | 110138801 | 110139645 | |
| 40757 | 110295235 | 110296881 | |
| 40758 | 110342137 | 110342908 | |
| 40759 | 110373169 | 110374618 | |
| 40760 | 110529604 | 110530415 | |
| 40761 | 110789399 | 110792205 | 242242, 177707 |
| 40762 | 110870253 | 110870857 | 177707 |
| 40763 | 110955832 | 110956818 | 177707 |
| 40764 | 111304047 | 111304695 | 153283 |
| 40765 | 111393026 | 111394358 | 240891 |
| 40766 | 111394615 | 111396631 | 240766, 240891 |
| 40767 | 111439390 | 111439966 | 240891 |
| 40768 | 111450974 | 111459659 | 144824, 240891 |
| 40769 | 111481933 | 111484839 | 240891, 144824 |
| 40770 | 111486711 | 111488720 | 240891, 144824 |
| 40771 | 111501393 | 111502521 | 240891, 144824 |
| 40772 | 111519593 | 111523500 | 240891, 144824 |
| 40773 | 111525947 | 111528219 | 240891, 144824 |
| 40774 | 111577309 | 111580895 | 144824 |
| 40775 | 111581608 | 111585104 | 144824 |
| 40776 | 111593114 | 111593853 | 144824 |
| 40777 | 111620846 | 111624814 | 144824 |
| 40778 | 111640953 | 111643883 | 144824 |
| 40779 | 111697335 | 111698714 | 144827 |
| 40780 | 111792793 | 111795017 | 176040 |
| 40781 | 111803659 | 111807200 | 114529 |
| 40782 | 111815533 | 111816849 | 114529 |
| 40783 | 111820068 | 111821866 | 114529 |
| 40784 | 112279382 | 112281714 | 138459, 144848 |
| 40785 | 112709458 | 112710915 | 163607, 272844 |
| 40786 | 112737369 | 112739289 | 240057, 163608 |
| 40787 | 112950427 | 112951233 | 144857 |
| 40788 | 113005640 | 113007416 | 206530, 144857 |
| 40789 | 113224449 | 113225566 | 163611 |
| 40790 | 113232888 | 113234746 | 163611 |
| 40791 | 113251120 | 113251530 | 072858 |
| 40792 | 113345563 | 113346240 | 072858 |
| 40793 | 113381711 | 113383188 | 176542 |
| 40794 | 113404834 | 113405417 | 176542 |
| 40795 | 113414263 | 113416751 | 176542 |
| 40796 | 113417718 | 113418261 | |
| 40797 | 113463868 | 113467039 | 242659, 114573, 121579 |
| 40798 | 113502289 | 113502754 | 114573 |
| 40799 | 113553741 | 113554579 | 178075 |
| 40800 | 113557372 | 113558614 | 178075 |
| 40801 | 113566063 | 113567352 | 178075 |
| 40802 | 113592308 | 113593970 | 178075 |
| 40803 | 113612189 | 113613008 | 178075 |
| 40804 | 113666248 | 113667764 | 184307, 273394 |
| 40805 | 113687787 | 113688237 | 163617 |
| 40806 | 113774608 | 113776683 | 163617, 151576 |
| 40807 | 113871239 | 113872199 | 151577 |
| 40808 | 114084718 | 114085228 | 241560, 181722 |
| 40809 | 114130786 | 114131743 | 181722 |
| 40810 | 114137487 | 114138434 | 181722 |
| 40811 | 114185121 | 114186191 | 242290, 181722 |
| 40812 | 114214681 | 114216593 | 242290, 181722 |
| 40813 | 114223120 | 114226023 | 242290, 181722 |
| 40814 | 114263500 | 114263974 | 181722 |
| 40815 | 114287776 | 114288678 | 181722 |
| 40816 | 114342454 | 114345029 | 181722 |
| 40817 | 114367023 | 114370630 | 181722 |
| 40818 | 114399093 | 114399566 | 181722 |
| 40819 | 114424447 | 114427165 | 181722 |
| 40820 | 114436790 | 114438915 | 181722 |
| 40821 | 114459293 | 114460750 | 181722 |
| 40822 | 114462431 | 114466282 | 181722 |
| 40823 | 114475354 | 114478631 | 181722 |
| 40824 | 114482704 | 114483555 | 181722 |
| 40825 | 114528449 | 114529302 | 181722 |
| 40826 | 114565125 | 114567366 | 181722 |
| 40827 | 114580066 | 114581360 | 181722 |
| 40828 | 114582262 | 114583252 | 181722 |
| 40829 | 114610980 | 114612589 | 181722 |
| 40830 | 114617654 | 114620328 | 181722 |
| 40831 | 114621418 | 114622406 | 181722 |
| 40832 | 114660232 | 114661089 | 181722 |
| 40833 | 114796123 | 114797426 | 181722 |
| 40834 | 114817660 | 114819457 | 242767, 181722 |
| 40835 | 114859740 | 114860557 | 181722 |
| 40836 | 114864713 | 114867715 | 181722 |
| 40837 | 114957974 | 114959061 | |
| 40838 | 115376787 | 115378218 | 241596, 172020 |
| 40839 | 115502290 | 115503829 | |
| 40840 | 115507698 | 115512653 | |
| 40841 | 116936528 | 116937176 | 185565 |
| 40842 | 116937345 | 116938108 | 185565 |
| 40843 | 116970939 | 116972201 | 185565 |
| 40844 | 116980506 | 116981494 | 185565 |
| 40845 | 116996973 | 116998710 | 185565 |
| 40846 | 117572480 | 117573162 | 185565, 239268 |
| 40847 | 117881602 | 117882037 | 243276 |
| 40848 | 118023060 | 118024205 | 243276 |
| 40849 | 118119738 | 118120181 | 243276 |
| 40850 | 118461420 | 118462056 | |
| 40851 | 118536283 | 118537835 | |
| 40852 | 118958587 | 118960783 | 121578, 240254 |
| 40853 | 119012669 | 119014035 | 031081 |
| 40854 | 119041237 | 119042898 | 241155, 031081 |
| 40855 | 119051356 | 119052003 | 031081 |
| 40856 | 119181472 | 119183367 | 176142 |
| 40857 | 119186956 | 119188722 | 163389, 176142 |
| 40858 | 119216359 | 119218261 | 272662, 113845 |
| 40859 | 119297836 | 119299572 | 272967, 144843 |
| 40860 | 119356518 | 119358770 | 121577 |
| 40861 | 119364369 | 119365348 | 121577 |
| 40862 | 119394893 | 119397097 | 138495 |
| 40863 | 119418575 | 119419807 | |
| 40864 | 119420977 | 119422185 | 183833 |
| 40865 | 119422751 | 119423387 | 183833 |
| 40866 | 119435652 | 119436545 | 183833 |
| 40867 | 119499919 | 119502138 | 144852 |
| 40868 | 119512352 | 119516124 | 144852 |
| 40869 | 119544545 | 119545399 | 082701 |
| 40870 | 119646037 | 119646445 | 082701 |
| 40871 | 119811901 | 119815597 | 242622, 082701 |
| 40872 | 119821210 | 119821947 | 242622 |
| 40873 | 119863073 | 119863668 | |
| 40874 | 119878826 | 119879396 | |
| 40875 | 119895843 | 119896685 | 175697 |
| 40876 | 119921758 | 119922263 | 175697 |
| 40877 | 119993466 | 119994037 | 175697 |
| 40878 | 120019719 | 120020502 | |
| 40879 | 120067164 | 120069995 | 240661, 163428 |
| 40880 | 120135746 | 120136942 | 163430 |
| 40881 | 120137670 | 120138264 | 163430 |
| 40882 | 120167432 | 120170123 | 163430 |
| 40883 | 120215189 | 120218296 | |
| 40884 | 120268562 | 120270325 | |
| 40885 | 120270671 | 120272141 | |
| 40886 | 120272397 | 120279015 | |
| 40887 | 120314744 | 120315937 | 065518 |
| 40888 | 120355581 | 120356258 | 113924 |
| 40889 | 120379927 | 120380668 | 113924 |
| 40890 | 120396903 | 120402460 | 113924 |
| 40891 | 120424627 | 120425161 | 144840 |
| 40892 | 120460601 | 120462768 | 153767, 144840 |
| 40893 | 121150819 | 121151479 | 051341 |
| 40894 | 121433929 | 121434398 | 173230 |
| 40895 | 121467449 | 121469510 | 173230 |
| 40896 | 121552854 | 121554079 | 145088, 173226 |
| 40897 | 121715980 | 121716855 | 145103 |
| 40898 | 121717069 | 121717593 | 145103 |
| 40899 | 121937880 | 121938757 | 036828 |
| 40900 | 121974611 | 121975367 | 036828 |
| 40901 | 122071950 | 122072361 | |
| 40902 | 122075267 | 122075884 | |
| 40903 | 122082439 | 122086388 | 160124 |
| 40904 | 122100959 | 122103917 | 114023, 160124 |
| 40905 | 122124725 | 122125672 | 114023 |
| 40906 | 122174548 | 122175668 | 114030 |
| 40907 | 122180438 | 122181406 | 114030 |
| 40908 | 122229613 | 122230206 | 114030 |
| 40909 | 122232343 | 122234112 | 114030 |
| 40910 | 122271910 | 122272628 | 138496 |
| 40911 | 122273952 | 122275261 | 138496 |
| 40912 | 122281616 | 122284229 | 163840, 138496 |
| 40913 | 122291699 | 122292544 | 163840 |
| 40914 | 122328218 | 122329510 | 173200 |
| 40915 | 122387955 | 122389195 | |
| 40916 | 122397756 | 122400945 | 173193 |
| 40917 | 122408424 | 122409269 | 173193 |
| 40918 | 122464122 | 122464623 | 169087 |
| 40919 | 122511996 | 122514764 | 138463, 169087 |
| 40920 | 122661543 | 122662265 | 082684 |
| 40921 | 122755205 | 122755971 | |
| 40922 | 122763783 | 122764766 | |
| 40923 | 122785208 | 122788258 | 065485 |
| 40924 | 122789330 | 122789734 | 065485 |
| 40925 | 122802942 | 122804950 | 065485 |
| 40926 | 122808295 | 122809174 | 065485 |
| 40927 | 122821158 | 122822678 | 065485 |
| 40928 | 122822798 | 122823809 | 065485 |
| 40929 | 122841378 | 122842247 | 065485 |
| 40930 | 122847959 | 122849764 | 065485 |
| 40931 | 122862366 | 122862964 | 065485 |
| 40932 | 122875869 | 122877021 | 065485 |
| 40933 | 122919968 | 122921814 | 121542, 065485 |
| 40934 | 123129924 | 123130830 | 173175 |
| 40935 | 123302822 | 123305288 | 239523, 206527 |
| 40936 | 123321097 | 123321504 | 239523 |
| 40937 | 123322386 | 123325983 | 239523 |
| 40938 | 123370845 | 123373249 | 065534 |
| 40939 | 123404904 | 123409161 | 250174, 065534 |
| 40940 | 123450671 | 123454331 | 065534 |
| 40941 | 123463913 | 123464750 | 065534 |
| 40942 | 123468015 | 123471777 | 065534 |
| 40943 | 123473070 | 123477900 | 065534 |
| 40944 | 123484554 | 123486183 | 065534 |
| 40945 | 123507340 | 123508413 | 065534 |
| 40946 | 123516464 | 123519636 | 065534 |
| 40947 | 123526603 | 123527346 | 065534 |
| 40948 | 123602466 | 123603631 | 065534 |
| 40949 | 123679234 | 123680408 | 175455 |
| 40950 | 123751452 | 123752236 | |
| 40951 | 123882191 | 123883019 | 160145 |
| 40952 | 123966603 | 123968444 | 160145 |
| 40953 | 124081179 | 124084106 | 160145 |
| 40954 | 124100310 | 124100806 | 160145 |
| 40955 | 124114324 | 124115339 | 160145 |
| 40956 | 124248702 | 124249438 | 160145 |
| 40957 | 124270989 | 124271752 | 160145 |
| 40958 | 124303098 | 124304306 | 160145 |
| 40959 | 124311367 | 124312370 | 160145 |
| 40960 | 124317923 | 124320535 | 160145 |
| 40961 | 124325905 | 124326419 | 160145 |
| 40962 | 124338654 | 124340298 | 160145 |
| 40963 | 124353650 | 124354829 | 160145 |
| 40964 | 124373213 | 124374049 | 160145 |
| 40965 | 124383549 | 124384152 | 160145 |
| 40966 | 124388049 | 124388754 | 160145 |
| 40967 | 124417804 | 124420233 | 160145 |
| 40968 | 124448364 | 124450221 | 114491 |
| 40969 | 124492813 | 124494029 | 082781 |
| 40970 | 124499716 | 124500570 | 244286, 082781 |
| 40971 | 124529687 | 124535291 | 082781 |
| 40972 | 124551889 | 124558207 | 082781 |
| 40973 | 124577102 | 124580200 | 082781 |
| 40974 | 124596089 | 124599418 | 082781 |
| 40975 | 124604160 | 124607019 | 082781 |
| 40976 | 124710732 | 124711362 | 173706 |
| 40977 | 124720605 | 124721259 | 173706 |
| 40978 | 124773212 | 124777352 | 252642, 173706 |
| 40979 | 124781008 | 124783145 | |
| 40980 | 124919327 | 124920123 | 221955 |
| 40981 | 124930239 | 124932746 | 221955 |
| 40982 | 125010901 | 125011387 | 163848 |
| 40983 | 125029338 | 125030087 | 229048, 163848 |
| 40984 | 125092736 | 125095610 | 163848 |
| 40985 | 125100403 | 125101494 | |
| 40986 | 125156009 | 125157785 | |
| 40987 | 125238142 | 125239642 | 114520 |
| 40988 | 125312867 | 125315790 | 144909 |
| 40989 | 125340555 | 125341779 | |
| 40990 | 125342829 | 125343859 | |
| 40991 | 125362988 | 125363648 | |
| 40992 | 125366129 | 125366865 | |
| 40993 | 125381430 | 125382080 | |
| 40994 | 125802161 | 125803751 | 250012, 114544 |
| 40995 | 125888773 | 125889845 | 144908 |
| 40996 | 125897549 | 125900763 | 246022, 144908 |
| 40997 | 125902846 | 125904460 | 246022, 144908 |
| 40998 | 125914965 | 125917944 | 144908, 246022 |
| 40999 | 125927295 | 125928392 | 246022 |
| 41000 | 125931453 | 125932744 | |
| 41001 | 125978066 | 125980735 | |
| 41002 | 125984972 | 125987486 | 250934 |
| 41003 | 125988494 | 125990229 | 250934 |
| 41004 | 126005796 | 126007462 | 250934 |
| 41005 | 126019524 | 126020677 | |
| 41006 | 126058923 | 126059474 | |
| 41007 | 126059907 | 126061212 | |
| 41008 | 126069753 | 126077475 | 163884 |
| 41009 | 126085138 | 126087297 | |
| 41010 | 126107575 | 126109000 | |
| 41011 | 126168251 | 126169088 | 070476 |
| 41012 | 126177987 | 126178427 | 070476 |
| 41013 | 126185560 | 126186233 | 070476 |
| 41014 | 126186449 | 126188233 | 070476 |
| 41015 | 126190844 | 126195907 | 070476 |
| 41016 | 126235420 | 126236924 | 159650 |
| 41017 | 126240988 | 126241606 | |
| 41018 | 126242053 | 126244245 | 180767 |
| 41019 | 126246992 | 126250204 | 180767, 180697 |
| 41020 | 126255913 | 126257547 | 180767, 180697 |
| 41021 | 126259259 | 126260276 | 180767, 180697 |
| 41022 | 126372887 | 126374244 | 197763 |
| 41023 | 126422653 | 126423523 | 159685 |
| 41024 | 126700813 | 126702037 | |
| 41025 | 126860520 | 126861206 | |
| 41026 | 127261198 | 127261865 | |
| 41027 | 127262858 | 127264003 | |
| 41028 | 127265270 | 127267172 | |
| 41029 | 127307948 | 127311162 | 163870 |
| 41030 | 127317103 | 127317596 | 073111 |
| 41031 | 127331787 | 127332792 | 073111 |
| 41032 | 127390680 | 127392529 | 114626, 114631 |
| 41033 | 127420588 | 127421560 | 074416 |
| 41034 | 127464903 | 127469519 | 074416 |
| 41035 | 127485010 | 127488793 | 074416 |
| 41036 | 127489446 | 127490067 | 074416 |
| 41037 | 127498378 | 127499610 | 074416 |
| 41038 | 127503471 | 127504900 | 074416 |
| 41039 | 127520494 | 127524226 | 074416 |
| 41040 | 127532977 | 127542784 | 074416 |
| 41041 | 127550491 | 127551204 | |
| 41042 | 127553969 | 127554644 | |
| 41043 | 127680434 | 127681185 | 187715 |
| 41044 | 127728891 | 127729966 | |
| 41045 | 127769519 | 127773452 | 058262 |
| 41046 | 127794102 | 127795614 | 239608, 175792 |
| 41047 | 127798145 | 127801647 | 175792 |
| 41048 | 127802946 | 127803857 | 175792 |
| 41049 | 127812843 | 127814614 | 175792 |
| 41050 | 127817993 | 127818545 | 175792 |
| 41051 | 127841831 | 127843564 | 175792 |
| 41052 | 127870173 | 127871331 | 175792 |
| 41053 | 127871993 | 127872959 | 132394, 175792 |
| 41054 | 127886410 | 127887512 | 132394 |
| 41055 | 128043519 | 128044062 | 132394 |
| 41056 | 128104059 | 128104763 | 132394 |
| 41057 | 128324100 | 128324566 | |
| 41058 | 128326424 | 128327609 | |
| 41059 | 128336311 | 128337997 | |
| 41060 | 128367687 | 128370346 | 163902 |
| 41061 | 128398750 | 128400774 | 163902 |
| 41062 | 128426632 | 128427311 | |
| 41063 | 128444232 | 128446683 | 075785 |
| 41064 | 128596967 | 128599494 | 177646 |
| 41065 | 128639342 | 128640269 | 187695, 114656 |
| 41066 | 128772092 | 128772870 | |
| 41067 | 128795942 | 128796577 | |
| 41068 | 128834997 | 128835978 | 261796, 172780 |
| 41069 | 128837684 | 128841023 | 261796, 172780 |
| 41070 | 128841902 | 128843007 | 273174, 261796 |
| 41071 | 128849873 | 128850861 | 261796, 240682 |
| 41072 | 128879117 | 128882177 | 261796, 240682 |
| 41073 | 128900380 | 128904157 | 169714 |
| 41074 | 128913912 | 128916070 | |
| 41075 | 128930329 | 128931741 | |
| 41076 | 128942792 | 128944829 | |
| 41077 | 128963776 | 128965037 | |
| 41078 | 128967415 | 128969532 | 181789 |
| 41079 | 128976423 | 128976890 | 181789 |
| 41080 | 128997009 | 128999145 | 183624 |
| 41081 | 129000738 | 129002161 | 183624 |
| 41082 | 129028818 | 129029295 | |
| 41083 | 129032562 | 129033339 | |
| 41084 | 129033678 | 129036043 | 206417, 184897 |
| 41085 | 129117481 | 129119363 | 251474 |
| 41086 | 129120929 | 129121594 | 172771 |
| 41087 | 129131202 | 129134462 | 172771 |
| 41088 | 129150843 | 129151478 | 129071 |
| 41089 | 129152078 | 129153144 | 129071 |
| 41090 | 129158008 | 129160137 | 163913, 129071 |
| 41091 | 129160666 | 129161137 | 163913 |
| 41092 | 129180210 | 129181792 | 163913 |
| 41093 | 129253129 | 129254173 | 163914 |
| 41094 | 129344020 | 129347399 | |
| 41095 | 129370321 | 129371685 | 172765 |
| 41096 | 129374350 | 129377928 | 172765 |
| 41097 | 129381676 | 129384297 | 172765 |
| 41098 | 129405690 | 129406186 | 172765 |
| 41099 | 129441284 | 129443798 | 172765 |
| 41100 | 129611273 | 129613409 | 271270, 172765 |
| 41101 | 130421746 | 130422290 | 196455 |
| 41102 | 130445811 | 130446441 | 196455 |
| 41103 | 130451368 | 130452934 | 196455 |
| 41104 | 130464804 | 130466170 | 196455 |
| 41105 | 130466615 | 130467732 | |
| 41106 | 130611657 | 130614166 | 017260 |
| 41107 | 130745026 | 130746340 | 114670, 034533 |
| 41108 | 131068566 | 131069775 | 114670, 250608 |
| 41109 | 131080213 | 131081743 | 246082, 250608 |
| 41110 | 131100089 | 131101653 | 198585, 250608 |
| 41111 | 131220746 | 131222312 | 114686 |
| 41112 | 131262567 | 131263034 | 196353 |
| 41113 | 132135184 | 132137959 | 138246 |
| 41114 | 132140406 | 132141178 | 138246 |
| 41115 | 132355583 | 132357129 | 240303, 113971 |
| 41116 | 132376473 | 132380204 | 240303, 113971, 081307 |
| 41117 | 132440109 | 132441466 | 248724, 113971 |
| 41118 | 132441584 | 132442301 | 248724 |
| 41119 | 133100312 | 133100976 | 144868 |
| 41120 | 133162831 | 133163406 | 170819, 249993 |
| 41121 | 133187836 | 133189014 | 170819 |
| 41122 | 133228171 | 133228781 | |
| 41123 | 133254789 | 133255843 | |
| 41124 | 133259432 | 133260786 | |
| 41125 | 133265669 | 133267646 | |
| 41126 | 133286902 | 133290289 | |
| 41127 | 133291245 | 133294670 | 091527 |
| 41128 | 133380073 | 133381607 | 242337, 163781 |
| 41129 | 133387532 | 133388137 | 242337 |
| 41130 | 133388783 | 133390157 | 242337 |
| 41131 | 133394429 | 133395083 | 242337 |
| 41132 | 133449561 | 133450716 | 242337 |
| 41133 | 133451767 | 133452640 | 242337 |
| 41134 | 133461059 | 133462264 | 242337 |
| 41135 | 133464344 | 133466353 | 091513, 242337 |
| 41136 | 133488273 | 133488787 | 091513 |
| 41137 | 133524170 | 133525690 | 144867 |
| 41138 | 133540560 | 133541213 | 144867 |
| 41139 | 133956256 | 133957016 | 163785 |
| 41140 | 133961172 | 133962378 | 163785 |
| 41141 | 133968411 | 133970089 | 163785 |
| 41142 | 134026914 | 134027904 | |
| 41143 | 134028568 | 134029360 | |
| 41144 | 134029630 | 134034536 | 240006 |
| 41145 | 134044486 | 134047722 | |
| 41146 | 134053091 | 134054138 | |
| 41147 | 134066171 | 134068242 | 260633 |
| 41148 | 134070910 | 134074049 | 214289 |
| 41149 | 134091478 | 134094882 | 114019 |
| 41150 | 134203410 | 134205888 | 182923, 129055 |
| 41151 | 134236043 | 134237433 | 182923 |
| 41152 | 134513564 | 134514473 | 154928 |
| 41153 | 135684389 | 135685712 | 073711 |
| 41154 | 135860084 | 135862218 | 073711 |
| 41155 | 135912688 | 135916728 | 174579 |
| 41156 | 135956845 | 135957540 | |
| 41157 | 135968836 | 135970719 | 114054 |
| 41158 | 136112175 | 136113195 | 118007 |
| 41159 | 136295362 | 136296014 | 118007 |
| 41160 | 136343233 | 136345103 | 118007 |
| 41161 | 136430452 | 136431035 | 118007 |
| 41162 | 136468721 | 136472752 | 261758, 118007 |
| 41163 | 136505185 | 136506776 | |
| 41164 | 136537138 | 136539282 | 168917 |
| 41165 | 136580061 | 136582831 | 158092, 239213 |
| 41166 | 136612036 | 136613907 | 158092 |
| 41167 | 136656731 | 136657614 | 158092 |
| 41168 | 136673995 | 136675879 | 174564 |
| 41169 | 136732314 | 136733925 | |
| 41170 | 136738915 | 136739540 | |
| 41171 | 136800119 | 136801051 | |
| 41172 | 137833919 | 137834884 | 158163 |
| 41173 | 137893135 | 137894221 | 138231 |
| 41174 | 137905726 | 137907921 | 114098 |
| 41175 | 138047857 | 138048924 | 181322 |
| 41176 | 138063475 | 138064002 | |
| 41177 | 138066474 | 138068120 | 158186 |
| 41178 | 138100261 | 138101476 | 158186 |
| 41179 | 138108581 | 138110275 | 158186 |
| 41180 | 138117837 | 138118447 | 158186 |
| 41181 | 138312187 | 138313988 | 114107 |
| 41182 | 138326984 | 138328688 | 158234 |
| 41183 | 138405576 | 138406077 | 051382 |
| 41184 | 138407603 | 138408248 | 051382 |
| 41185 | 138413203 | 138413701 | 051382 |
| 41186 | 138493184 | 138493835 | 051382 |
| 41187 | 138542185 | 138543741 | 051382 |
| 41188 | 138552259 | 138554791 | 051382 |
| 41189 | 138580796 | 138583199 | |
| 41190 | 138633580 | 138635501 | |
| 41191 | 138640500 | 138641098 | |
| 41192 | 138824594 | 138825270 | 175110, 232416 |
| 41193 | 138840257 | 138841543 | 175110, 232416 |
| 41194 | 138845756 | 138846546 | 175110 |
| 41195 | 138892206 | 138893173 | 175110 |
| 41196 | 138969882 | 138970940 | 175110 |
| 41197 | 138985934 | 138987417 | 175110 |
| 41198 | 139016470 | 139017098 | 175110 |
| 41199 | 139021179 | 139021495 | 175110 |
| 41200 | 139062415 | 139063876 | 175110 |
| 41201 | 139107580 | 139109943 | 248932, 184432 |
| 41202 | 139133120 | 139133928 | 248932 |
| 41203 | 139191767 | 139192440 | 248932, 114113 |
| 41204 | 139257640 | 139259229 | 114115, 248932 |
| 41205 | 139396181 | 139397075 | 163864 |
| 41206 | 139625169 | 139625663 | |
| 41207 | 139904787 | 139906314 | 158258 |
| 41208 | 140675576 | 140676442 | 114120 |
| 41209 | 140949788 | 140951566 | 155893 |
| 41210 | 140954395 | 140955348 | 155893 |
| 41211 | 141011556 | 141012112 | 249417, 155893 |
| 41212 | 141012733 | 141014146 | 155893, 249417 |
| 41213 | 141027312 | 141027956 | 249417 |
| 41214 | 141049005 | 141052976 | 249417, 177311 |
| 41215 | 141079507 | 141080542 | 249417, 177311 |
| 41216 | 141085270 | 141088567 | 249417, 177311 |
| 41217 | 141120147 | 141122217 | 177311 |
| 41218 | 141125031 | 141126951 | 177311 |
| 41219 | 141128330 | 141132563 | 177311 |
| 41220 | 141150229 | 141151225 | 177311 |
| 41221 | 141204106 | 141207208 | 155903 |
| 41222 | 141456631 | 141458819 | 114125 |
| 41223 | 141594221 | 141596458 | 069849 |
| 41224 | 141678359 | 141679521 | 114126 |
| 41225 | 141806483 | 141807834 | 114126 |
| 41226 | 141867212 | 141868689 | 114126 |
| 41227 | 141932150 | 141932498 | 175066 |
| 41228 | 141943521 | 141944958 | 175066 |
| 41229 | 141998529 | 141999419 | |
| 41230 | 142037758 | 142038506 | 114127 |
| 41231 | 142118962 | 142120031 | 114127 |
| 41232 | 142165673 | 142167795 | 114127 |
| 41233 | 142178674 | 142179206 | 175054 |
| 41234 | 142296503 | 142298605 | 175054 |
| 41235 | 142305514 | 142306292 | |
| 41236 | 142313885 | 142315986 | 120756 |
| 41237 | 142364060 | 142365285 | 120756 |
| 41238 | 142366626 | 142367125 | 120756 |
| 41239 | 142382694 | 142384079 | 120756 |
| 41240 | 142565543 | 142566205 | 163710 |
| 41241 | 142571733 | 142573087 | 163710 |
| 41242 | 142606957 | 142608513 | 163710 |
| 41243 | 142623210 | 142624401 | |
| 41244 | 142658506 | 142661860 | 243818 |
| 41245 | 142680872 | 142683738 | 163714, 241570, 188582 |
| 41246 | 142695127 | 142696820 | 163714, 241570 |
| 41247 | 142718841 | 142721991 | 268129, 241570, 163714 |
| 41248 | 142783465 | 142784105 | |
| 41249 | 142788922 | 142790505 | |
| 41250 | 143024949 | 143025766 | 181804 |
| 41251 | 143026254 | 143027157 | 181804 |
| 41252 | 143327720 | 143328559 | 181804 |
| 41253 | 143372085 | 143372888 | 181804 |
| 41254 | 143689424 | 143692859 | 181744 |
| 41255 | 143774376 | 143774899 | |
| 41256 | 143823460 | 143824908 | |
| 41257 | 143880547 | 143881645 | |
| 41258 | 143948069 | 143948561 | |
| 41259 | 145236288 | 145236959 | |
| 41260 | 145810038 | 145810470 | 152952, 243415 |
| 41261 | 145811720 | 145812339 | 152952, 243415 |
| 41262 | 145833246 | 145834219 | 152952 |
| 41263 | 145843700 | 145844308 | 152952 |
| 41264 | 145875499 | 145885782 | 152952 |
| 41265 | 145938996 | 145941633 | 114698 |
| 41266 | 145946694 | 145947361 | 114698 |
| 41267 | 145968169 | 145969678 | 114698 |
| 41268 | 145995114 | 145996109 | |
| 41269 | 146025787 | 146027007 | |
| 41270 | 146030948 | 146032209 | |
| 41271 | 146224233 | 146225346 | |
| 41272 | 146228571 | 146229965 | |
| 41273 | 146231179 | 146231924 | |
| 41274 | 146257140 | 146258540 | 188313 |
| 41275 | 146261085 | 146263314 | 188313 |
| 41276 | 146372838 | 146373622 | |
| 41277 | 146902320 | 146903587 | 243620 |
| 41278 | 147109851 | 147113139 | 152977, 174963 |
| 41279 | 148318206 | 148320991 | |
| 41280 | 148414960 | 148417166 | 144891 |
| 41281 | 148427199 | 148428013 | 144891 |
| 41282 | 148444859 | 148445654 | 144891 |
| 41283 | 148453027 | 148456132 | 144891 |
| 41284 | 148628738 | 148629442 | 240521 |
| 41285 | 148661141 | 148661863 | 240521 |
| 41286 | 148692484 | 148693417 | |
| 41287 | 148708970 | 148710471 | 163754 |
| 41288 | 148803627 | 148804752 | 239718, 071794 |
| 41289 | 148846505 | 148848399 | 163755 |
| 41290 | 148895988 | 148899733 | 047457 |
| 41291 | 148931902 | 148937339 | 047457 |
| 41292 | 148937575 | 148945091 | 047457 |
| 41293 | 148953531 | 148954276 | 240216 |
| 41294 | 148961394 | 148966641 | 240216 |
| 41295 | 149015505 | 149018933 | 244468 |
| 41296 | 149028337 | 149028966 | 244468 |
| 41297 | 149032685 | 149035160 | 244468 |
| 41298 | 149056948 | 149059611 | |
| 41299 | 149069318 | 149071021 | |
| 41300 | 149084168 | 149085356 | |
| 41301 | 149090915 | 149092772 | 169908 |
| 41302 | 149092940 | 149096919 | 240541, 169908 |
| 41303 | 149103660 | 149107440 | 240541 |
| 41304 | 149110961 | 149111897 | |
| 41305 | 149117927 | 149122890 | |
| 41306 | 149185746 | 149187475 | |
| 41307 | 149189609 | 149190877 | |
| 41308 | 149191067 | 149196622 | 169903 |
| 41309 | 149254143 | 149255199 | 018408 |
| 41310 | 149260097 | 149260848 | 018408 |
| 41311 | 149265099 | 149266927 | 018408 |
| 41312 | 149269083 | 149269749 | 018408 |
| 41313 | 149298462 | 149300763 | 018408 |
| 41314 | 149339175 | 149339813 | 018408 |
| 41315 | 149374560 | 149377303 | 241313, 018408 |
| 41316 | 149469532 | 149470735 | 114744 |
| 41317 | 149501157 | 149502442 | 206199 |
| 41318 | 149529518 | 149532057 | 082996, 206199 |
| 41319 | 149561252 | 149562475 | 206199, 082996 |
| 41320 | 149686534 | 149689748 | 268175, 070087 |
| 41321 | 149898033 | 149898766 | 243944 |
| 41322 | 149901529 | 149902810 | 243944 |
| 41323 | 149955252 | 149956010 | |
| 41324 | 149968762 | 149970858 | |
| 41325 | 149972460 | 149973828 | |
| 41326 | 149977252 | 149977764 | |
| 41327 | 149985053 | 149988113 | 243550 |
| 41328 | 149996299 | 149997245 | 243550 |
| 41329 | 150034674 | 150036320 | |
| 41330 | 150037425 | 150038781 | |
| 41331 | 150062365 | 150063926 | |
| 41332 | 150065387 | 150067600 | |
| 41333 | 150080278 | 150081417 | |
| 41334 | 150086528 | 150091192 | |
| 41335 | 150093091 | 150094935 | |
| 41336 | 150124580 | 150130131 | 196428 |
| 41337 | 150130168 | 150131067 | 196428 |
| 41338 | 150157403 | 150158044 | 196428 |
| 41339 | 150186826 | 150188502 | |
| 41340 | 150215736 | 150216250 | |
| 41341 | 150262600 | 150265843 | 144895, 120742 |
| 41342 | 150317437 | 150318683 | 120742 |
| 41343 | 150320178 | 150322427 | 198843, 120742 |
| 41344 | 150420853 | 150422317 | 240137, 163645 |
| 41345 | 150453967 | 150458144 | |
| 41346 | 150458465 | 150463301 | 181788 |
| 41347 | 150477725 | 150482516 | 244265, 181788 |
| 41348 | 150483637 | 150484606 | |
| 41349 | 150487276 | 150490203 | |
| 41350 | 150491284 | 150491878 | |
| 41351 | 150802791 | 150803677 | 144893 |
| 41352 | 150863624 | 150864597 | 144893 |
| 41353 | 150915036 | 150917602 | 174946, 144893 |
| 41354 | 150927941 | 150929813 | 144893 |
| 41355 | 151022728 | 151024081 | 138271, 144893 |
| 41356 | 151151658 | 151152728 | 152580, 144893 |
| 41357 | 151347590 | 151350388 | |
| 41358 | 151483415 | 151484763 | 242908 |
| 41359 | 151487611 | 151489188 | 240602, 242908 |
| 41360 | 151531296 | 151534856 | 114771, 242908 |
| 41361 | 151554661 | 151555870 | 242908 |
| 41362 | 151576610 | 151578869 | 242908 |
| 41363 | 151582354 | 151583109 | 242908 |
| 41364 | 151693607 | 151694884 | |
| 41365 | 151976133 | 151977277 | 152601 |
| 41366 | 151985774 | 151988889 | 229619, 152601 |
| 41367 | 152016173 | 152022044 | 152601 |
| 41368 | 152024637 | 152026475 | 152601 |
| 41369 | 152032500 | 152033239 | 152601 |
| 41370 | 152045900 | 152047644 | 152601 |
| 41371 | 152184483 | 152185092 | 243305 |
| 41372 | 152363572 | 152364273 | |
| 41373 | 152367766 | 152369246 | 244545 |
| 41374 | 152675096 | 152675700 | |
| 41375 | 152678373 | 152679551 | |
| 41376 | 152855477 | 152857747 | |
| 41377 | 152857917 | 152859058 | |
| 41378 | 152877415 | 152881395 | 181467, 244268 |
| 41379 | 153317172 | 153318074 | 238755 |
| 41380 | 153838809 | 153842059 | 243069, 114790 |
| 41381 | 153843240 | 153844031 | 114790 |
| 41382 | 153846745 | 153848044 | 114790 |
| 41383 | 153852800 | 153854011 | 114790 |
| 41384 | 153857532 | 153858314 | 114790 |
| 41385 | 153960380 | 153962662 | 114790 |
| 41386 | 153968968 | 153970156 | 114790 |
| 41387 | 154041165 | 154043044 | 174953 |
| 41388 | 154797391 | 154798901 | 196549 |
| 41389 | 154867131 | 154867817 | 196549 |
| 41390 | 154949513 | 154952118 | |
| 41391 | 155020116 | 155021134 | |
| 41392 | 155289688 | 155290361 | 114805 |
| 41393 | 155323070 | 155324394 | 114805 |
| 41394 | 155455424 | 155456046 | 114805 |
| 41395 | 155466601 | 155467213 | |
| 41396 | 155523268 | 155524393 | 174928 |
| 41397 | 155570765 | 155573449 | 169359 |
| 41398 | 155587488 | 155589610 | 163655 |
| 41399 | 155663905 | 155664402 | |
| 41400 | 156252177 | 156253701 | 169282 |
| 41401 | 156271758 | 156273949 | 114850 |
| 41402 | 156304471 | 156305257 | |
| 41403 | 156316126 | 156316708 | |
| 41404 | 156323250 | 156324899 | |
| 41405 | 156345844 | 156346565 | |
| 41406 | 156382921 | 156383483 | |
| 41407 | 156385743 | 156387208 | |
| 41408 | 156391288 | 156394108 | 243926, 163659 |
| 41409 | 156530155 | 156531497 | 240875 |
| 41410 | 156533149 | 156537244 | 240875 |
| 41411 | 156542998 | 156545505 | 197980 |
| 41412 | 156787475 | 156788953 | |
| 41413 | 156804168 | 156808490 | 241135, 241544, 243629 |
| 41414 | 156837192 | 156841779 | 243629 |
| 41415 | 156844091 | 156855628 | |
| 41416 | 156876276 | 156879630 | 163660 |
| 41417 | 156891470 | 156894354 | 222675, 243176 |
| 41418 | 157216847 | 157217637 | 197415 |
| 41419 | 157827390 | 157828847 | 174891 |
| 41420 | 157885920 | 157886307 | 174891 |
| 41421 | 158138491 | 158139223 | 174891 |
| 41422 | 158189293 | 158190094 | 174891 |
| 41423 | 158361928 | 158363188 | 168827 |
| 41424 | 158429560 | 158430224 | 118849 |
| 41425 | 158443086 | 158444069 | 118849 |
| 41426 | 158449568 | 158450922 | 240207, 118855, 118849 |
| 41427 | 158518529 | 158520816 | 272247, 118855 |
| 41428 | 158884621 | 158885419 | 214216, 250588 |
| 41429 | 158904707 | 158905966 | 214216, 250588 |
| 41430 | 159168341 | 159169770 | 250588 |
| 41431 | 159338641 | 159339019 | 250588 |
| 41432 | 159339742 | 159340323 | 250588 |
| 41433 | 159352614 | 159353184 | 250588 |
| 41434 | 159386712 | 159387305 | 250588 |
| 41435 | 159479181 | 159484677 | 241211, 250588 |
| 41436 | 159500696 | 159501244 | 250588 |
| 41437 | 159504344 | 159506614 | 250588 |
| 41438 | 159506766 | 159508536 | 250588 |
| 41439 | 159516561 | 159517702 | 250588 |
| 41440 | 159535967 | 159536946 | 250588 |
| 41441 | 159540936 | 159543581 | 250588 |
| 41442 | 159546006 | 159547976 | 250588 |
| 41443 | 159570485 | 159571578 | 151967, 250588 |
| 41444 | 159571589 | 159573809 | 151967, 250588 |
| 41445 | 159589349 | 159591675 | 151967, 250588 |
| 41446 | 159631285 | 159632227 | 244040 |
| 41447 | 159645830 | 159648024 | 244040 |
| 41448 | 159681908 | 159682524 | 244040 |
| 41449 | 159706085 | 159707356 | 168811, 244040 |
| 41450 | 159770044 | 159771280 | 244040 |
| 41451 | 159824786 | 159825919 | 244040 |
| 41452 | 159846665 | 159848535 | 244040 |
| 41453 | 159928611 | 159929175 | 244040 |
| 41454 | 160008677 | 160009878 | 068885, 248710 |
| 41455 | 160090463 | 160094128 | 068885, 248710 |
| 41456 | 160116299 | 160119801 | 113810, 068885, 248710 |
| 41457 | 160281905 | 160284962 | 229320, 186432 |
| 41458 | 160317819 | 160318256 | |
| 41459 | 160334539 | 160336629 | |
| 41460 | 160340093 | 160340952 | |
| 41461 | 160383230 | 160384429 | |
| 41462 | 160384912 | 160385790 | |
| 41463 | 160389850 | 160392072 | |
| 41464 | 160394021 | 160396876 | 179674 |
| 41465 | 160415638 | 160416215 | |
| 41466 | 160472081 | 160474418 | 163590, 260572 |
| 41467 | 160513699 | 160515638 | 163590 |
| 41468 | 160518593 | 160519997 | 163590 |
| 41469 | 160525711 | 160527104 | 163590 |
| 41470 | 160527922 | 160528843 | 163590 |
| 41471 | 160653102 | 160653651 | 163590 |
| 41472 | 160665832 | 160666632 | 163590 |
| 41473 | 160759887 | 160760624 | 163590 |
| 41474 | 160822311 | 160823343 | 169251, 169255 |
| 41475 | 160881046 | 160881535 | 169251 |
| 41476 | 160888737 | 160889332 | 169251 |
| 41477 | 160935070 | 160935798 | 169251 |
| 41478 | 160938254 | 160940397 | 169251 |
| 41479 | 160942428 | 160943072 | 169251 |
| 41480 | 160982234 | 160983489 | |
| 41481 | 161124529 | 161125259 | |
| 41482 | 161132427 | 161134790 | |
| 41483 | 161138402 | 161139415 | |
| 41484 | 161161740 | 161162537 | 240567 |
| 41485 | 161193522 | 161194368 | |
| 41486 | 161510954 | 161511514 | |
| 41487 | 161538825 | 161539733 | 240354 |
| 41488 | 163291074 | 163291568 | |
| 41489 | 164203761 | 164204293 | |
| 41490 | 164216642 | 164217167 | |
| 41491 | 164702317 | 164703483 | 090402 |
| 41492 | 164850948 | 164851814 | |
| 41493 | 164930042 | 164930872 | 244128 |
| 41494 | 165241667 | 165242074 | 244128 |
| 41495 | 165353719 | 165354944 | 244128 |
| 41496 | 165355626 | 165356418 | 244128 |
| 41497 | 165360182 | 165362025 | 244128 |
| 41498 | 165467363 | 165468331 | |
| 41499 | 165470478 | 165471869 | |
| 41500 | 165500895 | 165501786 | 114200 |
| 41501 | 165522965 | 165524599 | 114200 |
| 41502 | 165554059 | 165555477 | 114200 |
| 41503 | 166547465 | 166548351 | |
| 41504 | 167021627 | 167022323 | 169064 |
| 41505 | 167097756 | 167098455 | 169064 |
| 41506 | 167434624 | 167435305 | 114209 |
| 41507 | 167451718 | 167453775 | 163536, 114209 |
| 41508 | 167766817 | 167767557 | 173905 |
| 41509 | 167812219 | 167814771 | 173905 |
| 41510 | 167835455 | 167836234 | |
| 41511 | 167904237 | 167905833 | |
| 41512 | 167967130 | 167968079 | 206120 |
| 41513 | 168234701 | 168236176 | 206120 |
| 41514 | 168744338 | 168745352 | |
| 41515 | 169480463 | 169481360 | |
| 41516 | 169481789 | 169483646 | 270141 |
| 41517 | 169486947 | 169488151 | 269889, 184378 |
| 41518 | 169489326 | 169492121 | 085274, 269889 |
| 41519 | 169587335 | 169588237 | 114248 |
| 41520 | 169631973 | 169632614 | 187033 |
| 41521 | 169683840 | 169685885 | 008952, 239219 |
| 41522 | 169697140 | 169698376 | 008952, 240373 |
| 41523 | 169716456 | 169717461 | |
| 41524 | 169755327 | 169756245 | 173890 |
| 41525 | 169898158 | 169900067 | 173889 |
| 41526 | 169939404 | 169941133 | 163558 |
| 41527 | 169975961 | 169977181 | 163558 |
| 41528 | 170027858 | 170028885 | |
| 41529 | 170047977 | 170049768 | |
| 41530 | 170073398 | 170077536 | 136603 |
| 41531 | 170183135 | 170184537 | 013293, 013297 |
| 41532 | 170211198 | 170212426 | 013293, 013297 |
| 41533 | 170458762 | 170460353 | 239739, 013297 |
| 41534 | 170462342 | 170464489 | 013297 |
| 41535 | 170468691 | 170470599 | 013297 |
| 41536 | 170477219 | 170478977 | 013297 |
| 41537 | 170482513 | 170485522 | 013297 |
| 41538 | 170498241 | 170499348 | 013297 |
| 41539 | 170529020 | 170530244 | 013297 |
| 41540 | 170586961 | 170588474 | 163584 |
| 41541 | 170715516 | 170720768 | 163581 |
| 41542 | 170731467 | 170732444 | 163581 |
| 41543 | 170736013 | 170736772 | 163581 |
| 41544 | 170740100 | 170748119 | 163581 |
| 41545 | 170761970 | 170764156 | |
| 41546 | 170806467 | 170807843 | 154310 |
| 41547 | 170810068 | 170811053 | 154310 |
| 41548 | 170888636 | 170889503 | 154310 |
| 41549 | 171004336 | 171004804 | 154310 |
| 41550 | 171051770 | 171052769 | 154310 |
| 41551 | 171071080 | 171075172 | 154310 |
| 41552 | 171076401 | 171077411 | 154310 |
| 41553 | 171108239 | 171108814 | 154310 |
| 41554 | 171135475 | 171136178 | 154310 |
| 41555 | 171176932 | 171179153 | 154310 |
| 41556 | 171358040 | 171358717 | 075651 |
| 41557 | 171389360 | 171390291 | 075651 |
| 41558 | 171393909 | 171395119 | 075651 |
| 41559 | 171398552 | 171399384 | 075651 |
| 41560 | 171517151 | 171517902 | 183657, 075651 |
| 41561 | 171519528 | 171521116 | 183657, 075651 |
| 41562 | 171526768 | 171529700 | 183657, 075651 |
| 41563 | 171542939 | 171543710 | |
| 41564 | 171555878 | 171556999 | |
| 41565 | 171596564 | 171597037 | 234717, 186329 |
| 41566 | 171600911 | 171602438 | 234717, 186329 |
| 41567 | 171677315 | 171677890 | |
| 41568 | 171683927 | 171686665 | |
| 41569 | 171689744 | 171690126 | |
| 41570 | 171690751 | 171691356 | |
| 41571 | 171752832 | 171753523 | |
| 41572 | 171756966 | 171760117 | 075420 |
| 41573 | 171779372 | 171780095 | 075420 |
| 41574 | 171799511 | 171801130 | 075420 |
| 41575 | 171814698 | 171815346 | 075420 |
| 41576 | 171818634 | 171819408 | 075420 |
| 41577 | 171845633 | 171850321 | 075420 |
| 41578 | 171851400 | 171854735 | 075420 |
| 41579 | 171855326 | 171861272 | 075420 |
| 41580 | 171873061 | 171874744 | 075420 |
| 41581 | 171887045 | 171887615 | 075420 |
| 41582 | 171897143 | 171898843 | 075420 |
| 41583 | 171918834 | 171920242 | 075420 |
| 41584 | 171920324 | 171922209 | 075420 |
| 41585 | 171927339 | 171928261 | 075420 |
| 41586 | 171973494 | 171974481 | 075420 |
| 41587 | 171978718 | 171979403 | 075420 |
| 41588 | 171997995 | 171998789 | 075420 |
| 41589 | 172022489 | 172025014 | 075420 |
| 41590 | 172041573 | 172043199 | 075420 |
| 41591 | 172050149 | 172050759 | 075420 |
| 41592 | 172065637 | 172066725 | 075420 |
| 41593 | 172194198 | 172195536 | |
| 41594 | 172233979 | 172235858 | 121858 |
| 41595 | 172240841 | 172241638 | 121858 |
| 41596 | 172258773 | 172260242 | |
| 41597 | 172266656 | 172267358 | |
| 41598 | 172271113 | 172272127 | |
| 41599 | 172275065 | 172276493 | |
| 41600 | 172277859 | 172278432 | |
| 41601 | 172279557 | 172281802 | 223387 |
| 41602 | 172303992 | 172304696 | 223387 |
| 41603 | 172312076 | 172314650 | 223387 |
| 41604 | 172318615 | 172320145 | |
| 41605 | 172408668 | 172410383 | 144959 |
| 41606 | 172427742 | 172430342 | 144959 |
| 41607 | 172466258 | 172469368 | 114346 |
| 41608 | 172574842 | 172575574 | |
| 41609 | 174126773 | 174128170 | |
| 41610 | 174157594 | 174159779 | 177694 |
| 41611 | 174249123 | 174249979 | 177694 |
| 41612 | 174527984 | 174528528 | 177694 |
| 41613 | 174576999 | 174578148 | 177694 |
| 41614 | 174809342 | 174809843 | 230292, 177694 |
| 41615 | 174828683 | 174829434 | 230292, 177694 |
| 41616 | 174896627 | 174897668 | 177694 |
| 41617 | 175024833 | 175026478 | 177694 |
| 41618 | 175056503 | 175057602 | 177694 |
| 41619 | 175074529 | 175075422 | 177694 |
| 41620 | 175148724 | 175150026 | 177694 |
| 41621 | 175243929 | 175245137 | 177694 |
| 41622 | 175650278 | 175650836 | |
| 41623 | 176144068 | 176144569 | |
| 41624 | 176590132 | 176591055 | |
| 41625 | 176644843 | 176645780 | |
| 41626 | 176671071 | 176672022 | |
| 41627 | 176913077 | 176917157 | 177565 |
| 41628 | 176928680 | 176930608 | |
| 41629 | 177003308 | 177004620 | |
| 41630 | 177017703 | 177018589 | 203645 |
| 41631 | 177055393 | 177057008 | 226782 |
| 41632 | 177062859 | 177064492 | 226782 |
| 41633 | 177074684 | 177078619 | |
| 41634 | 177161160 | 177161787 | 228221 |
| 41635 | 177166974 | 177168197 | 228221 |
| 41636 | 177169989 | 177170619 | 228221 |
| 41637 | 177195391 | 177197767 | 228221 |
| 41638 | 177217343 | 177218430 | 228221 |
| 41639 | 177241473 | 177242417 | 228221 |
| 41640 | 177291883 | 177292700 | 228221 |
| 41641 | 177314647 | 177316231 | 228221 |
| 41642 | 177324594 | 177325445 | 228221 |
| 41643 | 177332658 | 177333390 | 228221 |
| 41644 | 177336853 | 177337384 | 228221 |
| 41645 | 177527491 | 177529036 | |
| 41646 | 177530787 | 177532142 | |
| 41647 | 177533742 | 177536000 | 231574 |
| 41648 | 177541440 | 177543236 | 231574 |
| 41649 | 177543905 | 177549490 | 231574 |
| 41650 | 177622767 | 177623322 | |
| 41651 | 177623829 | 177624719 | |
| 41652 | 177690943 | 177691892 | |
| 41653 | 178085335 | 178086150 | 223930, 197584 |
| 41654 | 178786715 | 178790450 | 172667 |
| 41655 | 178864849 | 178867749 | 121879, 229102 |
| 41656 | 178968721 | 178969440 | 171121 |
| 41657 | 178978820 | 178979434 | 240429, 171121 |
| 41658 | 179039346 | 179042177 | 121864 |
| 41659 | 179064316 | 179066486 | 171109 |
| 41660 | 179280250 | 179281765 | 136518 |
| 41661 | 179321458 | 179323460 | 136521, 136522 |
| 41662 | 179361589 | 179362750 | |
| 41663 | 179370252 | 179372432 | 058056 |
| 41664 | 179450486 | 179453394 | 058056 |
| 41665 | 179457611 | 179458186 | 058056 |
| 41666 | 179529336 | 179530214 | 114757 |
| 41667 | 180319178 | 180320803 | 145075, 163728, 239774 |
| 41668 | 180629754 | 180631735 | 114416 |
| 41669 | 180706736 | 180708057 | 242808, 205981 |
| 41670 | 181444583 | 181446682 | 242808 |
| 41671 | 181500027 | 181500822 | 242808 |
| 41672 | 181930069 | 181930958 | |
| 41673 | 181959870 | 181960623 | |
| 41674 | 181962171 | 181962929 | |
| 41675 | 182323435 | 182325176 | |
| 41676 | 182399994 | 182401827 | |
| 41677 | 182428828 | 182430062 | |
| 41678 | 182448071 | 182448651 | |
| 41679 | 182478358 | 182479115 | |
| 41680 | 182510343 | 182513075 | 058063, 240063 |
| 41681 | 182607097 | 182608344 | 058063 |
| 41682 | 182612938 | 182614822 | 058063 |
| 41683 | 182639300 | 182639931 | 058063, 273261 |
| 41684 | 182688373 | 182689025 | 043093 |
| 41685 | 182697160 | 182699368 | 043093 |
| 41686 | 182756540 | 182757273 | 078070 |
| 41687 | 182816079 | 182817799 | 078070 |
| 41688 | 182825564 | 182826435 | 078070 |
| 41689 | 182880066 | 182880792 | 078081 |
| 41690 | 182929156 | 182929892 | 053524 |
| 41691 | 182970789 | 182972930 | 176597, 053524 |
| 41692 | 182982849 | 182984724 | 176597, 053524 |
| 41693 | 182995805 | 182997022 | 176597, 053524 |
| 41694 | 183002327 | 183005885 | 176597, 053524 |
| 41695 | 183009356 | 183009981 | 176597, 053524 |
| 41696 | 183012906 | 183013438 | 176597, 053524 |
| 41697 | 183024166 | 183026157 | 053524 |
| 41698 | 183087399 | 183090074 | 053524 |
| 41699 | 183165061 | 183166180 | 240024 |
| 41700 | 183185971 | 183187707 | |
| 41701 | 183200916 | 183201911 | |
| 41702 | 183270382 | 183271194 | 172578 |
| 41703 | 183344551 | 183345061 | |
| 41704 | 183352683 | 183355522 | 114796 |
| 41705 | 183371350 | 183372012 | 114796 |
| 41706 | 183415068 | 183416614 | 163872 |
| 41707 | 183463170 | 183463769 | 163872 |
| 41708 | 183601580 | 183603170 | 234371, 175193 |
| 41709 | 183702757 | 183703532 | 114770 |
| 41710 | 183705816 | 183706485 | 114770 |
| 41711 | 183735025 | 183736455 | 114770 |
| 41712 | 183851337 | 183852301 | 272721, 273181 |
| 41713 | 183852431 | 183854234 | 145191, 272721 |
| 41714 | 183872542 | 183875137 | 161202, 145191 |
| 41715 | 183892224 | 183893541 | 161203, 145191 |
| 41716 | 183902809 | 183905145 | 161204, 145191 |
| 41717 | 183959407 | 183960105 | 214160, 145198, 145191 |
| 41718 | 183965784 | 183968409 | 145194, 214160, 145191 |
| 41719 | 184016512 | 184018462 | 145191, 175166 |
| 41720 | 184031964 | 184034443 | 114867, 145191 |
| 41721 | 184037493 | 184038784 | 145191, 114867 |
| 41722 | 184049468 | 184055114 | 175182, 114867, 145191 |
| 41723 | 184069592 | 184070641 | 145191, 114859 |
| 41724 | 184078857 | 184081902 | 163882, 114859, 145191 |
| 41725 | 184094892 | 184098672 | 090539, 090534, 145191 |
| 41726 | 184298756 | 184300216 | 182580, 145191 |
| 41727 | 184363080 | 184363612 | 145191 |
| 41728 | 184428720 | 184430243 | 177383 |
| 41729 | 184529646 | 184530681 | 156931 |
| 41730 | 184933646 | 184934721 | 113790 |
| 41731 | 184943148 | 184944356 | 113790 |
| 41732 | 184968010 | 184972316 | 264614, 113790 |
| 41733 | 184999957 | 185001592 | 073803 |
| 41734 | 185033932 | 185036921 | 073803 |
| 41735 | 185045853 | 185048975 | 073803 |
| 41736 | 185049602 | 185051372 | 073803 |
| 41737 | 185053516 | 185054130 | 073803 |
| 41738 | 185054233 | 185056015 | 073803 |
| 41739 | 185079230 | 185080776 | 073803 |
| 41740 | 185138478 | 185138979 | 073803 |
| 41741 | 185140984 | 185142078 | 073803 |
| 41742 | 185206886 | 185208036 | 073803, 163900 |
| 41743 | 185215837 | 185217213 | 163900 |
| 41744 | 185255110 | 185255576 | 163898 |
| 41745 | 185276012 | 185276694 | |
| 41746 | 185303438 | 185304840 | 163904 |
| 41747 | 185375693 | 185377377 | 073792 |
| 41748 | 185514270 | 185514900 | 073792 |
| 41749 | 185617985 | 185618387 | |
| 41750 | 185653772 | 185656234 | 136527 |
| 41751 | 185826611 | 185828251 | 244405, 058866 |
| 41752 | 185959375 | 185960806 | 058866 |
| 41753 | 186130741 | 186132788 | |
| 41754 | 186258046 | 186258948 | 213139 |
| 41755 | 186284072 | 186286207 | 090520, 113838 |
| 41756 | 186287875 | 186289739 | 113838, 090520 |
| 41757 | 186306178 | 186309027 | 090520 |
| 41758 | 186311258 | 186313502 | 090520 |
| 41759 | 186315644 | 186319005 | |
| 41760 | 186322241 | 186325215 | |
| 41761 | 186330260 | 186334332 | 145192 |
| 41762 | 186334509 | 186335406 | 145192 |
| 41763 | 186351187 | 186351715 | |
| 41764 | 186352001 | 186352507 | |
| 41765 | 186357802 | 186362605 | 236524, 090512 |
| 41766 | 186383288 | 186384649 | 236524, 113905 |
| 41767 | 186434470 | 186435502 | 197099, 113889 |
| 41768 | 186436004 | 186440696 | 197099, 113889 |
| 41769 | 186459866 | 186464636 | 113889, 197099 |
| 41770 | 186470526 | 186472666 | 197099 |
| 41771 | 186478148 | 186478992 | 226652, 197099 |
| 41772 | 186489930 | 186491345 | 230951 |
| 41773 | 186500030 | 186503106 | 156976, 238942, 263826 |
| 41774 | 186503238 | 186503649 | 156976 |
| 41775 | 186507609 | 186509413 | 163918, 156976 |
| 41776 | 186523508 | 186525272 | 163918 |
| 41777 | 186648235 | 186650182 | 073849 |
| 41778 | 186665646 | 186666155 | 073849 |
| 41779 | 186692450 | 186693135 | 073849 |
| 41780 | 186694520 | 186695821 | 073849 |
| 41781 | 186708236 | 186710010 | 073849 |
| 41782 | 186710266 | 186711117 | 073849 |
| 41783 | 186756200 | 186763054 | 073849 |
| 41784 | 186780216 | 186782796 | 073849 |
| 41785 | 186819350 | 186820339 | |
| 41786 | 186847713 | 186848958 | 163923 |
| 41787 | 186857041 | 186857798 | 163923 |
| 41788 | 186891403 | 186892488 | 163923 |
| 41789 | 186904476 | 186905044 | |
| 41790 | 186981640 | 186983206 | 127241 |
| 41791 | 187003219 | 187007868 | 127241 |
| 41792 | 187008611 | 187010491 | 127241 |
| 41793 | 187036345 | 187038093 | |
| 41794 | 187453158 | 187464888 | 223401, 113916 |
| 41795 | 187467557 | 187468913 | |
| 41796 | 187512947 | 187513854 | |
| 41797 | 187517398 | 187518253 | 224049 |
| 41798 | 187526785 | 187527445 | |
| 41799 | 187557246 | 187557644 | |
| 41800 | 187570473 | 187571568 | |
| 41801 | 187596546 | 187597327 | |
| 41802 | 187664838 | 187665336 | |
| 41803 | 187671894 | 187674070 | |
| 41804 | 187681496 | 187683065 | 224187 |
| 41805 | 187685845 | 187687859 | 224187 |
| 41806 | 187720208 | 187721543 | 236412, 225058 |
| 41807 | 187753882 | 187755520 | |
| 41808 | 187778855 | 187779504 | |
| 41809 | 187782273 | 187782962 | |
| 41810 | 187870295 | 187873683 | 145012, 270959 |
| 41811 | 187875432 | 187876520 | 145012 |
| 41812 | 187881904 | 187882632 | 145012 |
| 41813 | 187888319 | 187889385 | 145012 |
| 41814 | 187923767 | 187924677 | 145012 |
| 41815 | 187929599 | 187931178 | 145012 |
| 41816 | 187937400 | 187940323 | 145012 |
| 41817 | 187951037 | 187952114 | 145012 |
| 41818 | 187980089 | 187985314 | 145012 |
| 41819 | 187987891 | 187988968 | 145012 |
| 41820 | 188003053 | 188004538 | 145012 |
| 41821 | 188008070 | 188009144 | 145012 |
| 41822 | 188011758 | 188016474 | 145012 |
| 41823 | 188034090 | 188034677 | 145012 |
| 41824 | 188065902 | 188068233 | 145012 |
| 41825 | 188080188 | 188080671 | 145012 |
| 41826 | 188114589 | 188116325 | 145012 |
| 41827 | 188186283 | 188187595 | 145012 |
| 41828 | 188236159 | 188237216 | 145012 |
| 41829 | 188296829 | 188297230 | 145012 |
| 41830 | 188300683 | 188303162 | 145012 |
| 41831 | 188341864 | 188342693 | 145012 |
| 41832 | 188400082 | 188401776 | 145012 |
| 41833 | 188401795 | 188402554 | 145012 |
| 41834 | 188406428 | 188407482 | 207651, 145012 |
| 41835 | 188429951 | 188430751 | 145012 |
| 41836 | 188437701 | 188439666 | 145012 |
| 41837 | 188457652 | 188458412 | 145012 |
| 41838 | 188460581 | 188462707 | 145012 |
| 41839 | 188463475 | 188465146 | 145012 |
| 41840 | 188490564 | 188491229 | 145012 |
| 41841 | 188498123 | 188498932 | 145012 |
| 41842 | 188598068 | 188600847 | 145012 |
| 41843 | 188632299 | 188633464 | |
| 41844 | 188650163 | 188650815 | |
| 41845 | 188662480 | 188670031 | 188001, 234076 |
| 41846 | 188816411 | 188817638 | 188001 |
| 41847 | 188840933 | 188841783 | 188001 |
| 41848 | 189042323 | 189043180 | 188001 |
| 41849 | 189073000 | 189073763 | |
| 41850 | 189339655 | 189340230 | |
| 41851 | 189347290 | 189349111 | |
| 41852 | 189408187 | 189409084 | 073282 |
| 41853 | 189427372 | 189431342 | 073282 |
| 41854 | 189566457 | 189566995 | 073282 |
| 41855 | 189577943 | 189578810 | 073282 |
| 41856 | 189580504 | 189581197 | 073282 |
| 41857 | 189616305 | 189616746 | |
| 41858 | 189699307 | 189699875 | 090530 |
| 41859 | 189729559 | 189731187 | 090530 |
| 41860 | 189793557 | 189795730 | 090530 |
| 41861 | 189934869 | 189935329 | |
| 41862 | 189946685 | 189951336 | |
| 41863 | 189998854 | 189999644 | |
| 41864 | 190016364 | 190018922 | |
| 41865 | 190019324 | 190027834 | 163347 |
| 41866 | 190034597 | 190041873 | 113946, 163347 |
| 41867 | 190047879 | 190049643 | 113946 |
| 41868 | 190053692 | 190054958 | 113946 |
| 41869 | 190061953 | 190065522 | 113946 |
| 41870 | 190083331 | 190084863 | 113946 |
| 41871 | 190095640 | 190096894 | 113946 |
| 41872 | 190098627 | 190101555 | 113946 |
| 41873 | 190222453 | 190223649 | |
| 41874 | 190230972 | 190233126 | 196083 |
| 41875 | 190244820 | 190245614 | 196083 |
| 41876 | 190265914 | 190266784 | 196083 |
| 41877 | 190283465 | 190286229 | 196083 |
| 41878 | 190302345 | 190305377 | 196083 |
| 41879 | 190308412 | 190311258 | 196083 |
| 41880 | 190332270 | 190333209 | 196083 |
| 41881 | 190359019 | 190359878 | 196083 |
| 41882 | 190418563 | 190419667 | |
| 41883 | 190525400 | 190526005 | |
| 41884 | 190529421 | 190530853 | |
| 41885 | 190543084 | 190544129 | |
| 41886 | 190579963 | 190581564 | 205835 |
| 41887 | 190583054 | 190583928 | 205835 |
| 41888 | 190783040 | 190785465 | |
| 41889 | 190978282 | 190979352 | 188729 |
| 41890 | 191037920 | 191038544 | 188958 |
| 41891 | 191046337 | 191050629 | 152492, 188958 |
| 41892 | 191055367 | 191056794 | 152492 |
| 41893 | 191073766 | 191075571 | 152492 |
| 41894 | 191147452 | 191150382 | |
| 41895 | 191445060 | 191445565 | |
| 41896 | 191458720 | 191460651 | |
| 41897 | 191493216 | 191494539 | |
| 41898 | 191512923 | 191513398 | |
| 41899 | 192001544 | 192003423 | 114279 |
| 41900 | 192293541 | 192294317 | 114279 |
| 41901 | 192569554 | 192570247 | 180611 |
| 41902 | 192646413 | 192647239 | |
| 41903 | 193310192 | 193312168 | 198836, 236297, 127249 |
| 41904 | 193380271 | 193381477 | 198836 |
| 41905 | 193450001 | 193451186 | |
| 41906 | 193460493 | 193463567 | |
| 41907 | 193551792 | 193553042 | |
| 41908 | 193589837 | 193590572 | |
| 41909 | 193720620 | 193723380 | 230102, 214146, 238043 |
| 41910 | 193749258 | 193750599 | 230102 |
| 41911 | 193752067 | 193752985 | 230102 |
| 41912 | 193764913 | 193765702 | 230102 |
| 41913 | 193775390 | 193777189 | 230102 |
| 41914 | 193787474 | 193789754 | 230102 |
| 41915 | 193793093 | 193794743 | |
| 41916 | 193806990 | 193808278 | |
| 41917 | 193814600 | 193816239 | 229964 |
| 41918 | 193818469 | 193820059 | 229964 |
| 41919 | 193829881 | 193831369 | |
| 41920 | 193839597 | 193840316 | |
| 41921 | 193847262 | 193848109 | |
| 41922 | 193848445 | 193849671 | 232874 |
| 41923 | 193850685 | 193856384 | 114315 |
| 41924 | 193856686 | 193860814 | |
| 41925 | 193867956 | 193868760 | |
| 41926 | 193921784 | 193922211 | 225742 |
| 41927 | 193964852 | 193966416 | 238097, 225742 |
| 41928 | 193967808 | 193968748 | 225742, 238097 |
| 41929 | 193987041 | 193989811 | |
| 41930 | 193994347 | 193996077 | 228271 |
| 41931 | 194014064 | 194015690 | 214145 |
| 41932 | 194032623 | 194033976 | |
| 41933 | 194051203 | 194052388 | |
| 41934 | 194052911 | 194055038 | |
| 41935 | 194067302 | 194067941 | 178772 |
| 41936 | 194070928 | 194072606 | 178772 |
| 41937 | 194167431 | 194168444 | 133657 |
| 41938 | 194205666 | 194210779 | 233058, 133657 |
| 41939 | 194214354 | 194216321 | 133657, 233058 |
| 41940 | 194216774 | 194217574 | 244675, 133657, 233058 |
| 41941 | 194238864 | 194240079 | 233058 |
| 41942 | 194241964 | 194244442 | |
| 41943 | 194256959 | 194259174 | |
| 41944 | 194292061 | 194297414 | |
| 41945 | 194303925 | 194305944 | 231770 |
| 41946 | 194341761 | 194342342 | 145014 |
| 41947 | 194353401 | 194354696 | 229334, 145014 |
| 41948 | 194391987 | 194394109 | 041802 |
| 41949 | 194403033 | 194403978 | |
| 41950 | 194489649 | 194490267 | 237222 |
| 41951 | 194538127 | 194538724 | |
| 41952 | 194590646 | 194593754 | |
| 41953 | 194696612 | 194697129 | |
| 41954 | 194752038 | 194752883 | |
| 41955 | 194754033 | 194755177 | |
| 41956 | 194825918 | 194827708 | 173950 |
| 41957 | 194907995 | 194909392 | 173950 |
| 41958 | 194979543 | 194981370 | 173950 |
| 41959 | 194991196 | 194992953 | 173950 |
| 41960 | 195162164 | 195163909 | 114331 |
| 41961 | 195269308 | 195270537 | 184203 |
| 41962 | 195442007 | 195444638 | 242086 |
| 41963 | 195542219 | 195542652 | |
| 41964 | 195573771 | 195575144 | 223783 |
| 41965 | 195577586 | 195578282 | 223783 |
| 41966 | 195579110 | 195579699 | 223783 |
| 41967 | 195616354 | 195617231 | 061938 |
| 41968 | 195636211 | 195636928 | 224614, 061938 |
| 41969 | 195641234 | 195642357 | |
| 41970 | 195807359 | 195809864 | 072274 |
| 41971 | 195862674 | 195863752 | |
| 41972 | 195941669 | 195942563 | 163959, 161217 |
| 41973 | 195943066 | 195944235 | 163959, 161217 |
| 41974 | 196006077 | 196007385 | 272741, 161217 |
| 41975 | 196013637 | 196015601 | 161217, 272741 |
| 41976 | 196044254 | 196045792 | 235897, 272741, 213123, |
| | | | 273331 |
| 41977 | 196158146 | 196159834 | 225822, 163960 |
| 41978 | 196227666 | 196231109 | 163961 |
| 41979 | 196294541 | 196296510 | 174013, 185798 |
| 41980 | 196358573 | 196360261 | 232065 |
| 41981 | 196438665 | 196440044 | 174007, 163964 |
| 41982 | 196466323 | 196469025 | 180370 |
| 41983 | 196500498 | 196502226 | 180370 |
| 41984 | 196519327 | 196520725 | 180370 |
| 41985 | 196594146 | 196595712 | 119231 |
| 41986 | 196668111 | 196670493 | 270170, 225578, 114503 |
| 41987 | 196695306 | 196697175 | 119227 |
| 41988 | 196729257 | 196731084 | 228109, 163975 |
| 41989 | 196755855 | 196759541 | 163975 |
| 41990 | 196997302 | 196997927 | 075711 |
| 41991 | 197023864 | 197026983 | 227375, 075711 |
| 41992 | 197033226 | 197033735 | |
| 41993 | 197036459 | 197037194 | |
| 41994 | 197079145 | 197079697 | |
| 41995 | 197082388 | 197083059 | |
| 41996 | 197182458 | 197184372 | 229912, 235126 |
| 41997 | 197192794 | 197194046 | 237167 |
| 41998 | 197194845 | 197196727 | |
| 41999 | 197198178 | 197199560 | |
| 42000 | 197205145 | 197208180 | |
| 42001 | 197214646 | 197215763 | |
| 42002 | 197243313 | 197244498 | 161267 |
| 42003 | 197246971 | 197249245 | 161267 |
| 42004 | 197286377 | 197287007 | 161267 |
| 42005 | 197299754 | 197300794 | 161267 |
| 42006 | 197316830 | 197317913 | 214135 |
| 42007 | 197324169 | 197324891 | 214135 |
| 42008 | 197330765 | 197331537 | 214135 |
| 42009 | 197444926 | 197446451 | 145016 |
| 42010 | 197462818 | 197464731 | 122068, 145016 |
| 42011 | 197476311 | 197478464 | 145016, 122068 |
| 42012 | 197517521 | 197519395 | 186001 |
| 42013 | 197521978 | 197522557 | 186001 |
| 42014 | 197546944 | 197548788 | 186001 |
| 42015 | 197574616 | 197575462 | 186001 |
| 42016 | 197676391 | 197678298 | 182899, 114473 |
| 42017 | 197686076 | 197688410 | 185621, 114473 |
| 42018 | 197807337 | 197808161 | 226435 |

[0572] The locations of ODSCs on Chromosome 4 are shown in Table 46.

TABLE 46
ODSC Locations on Chromosome 4

| SEQ ID NO. | Start | End | Overlapping Gene(s) |
|---|---|---|---|
| 42019 | 52932 | 54026 | 197701 |
| 42020 | 124147 | 125159 | 250312, 256143 |
| 42021 | 330409 | 332349 | 131127, 248564, 251535 |
| 42022 | 492167 | 494088 | 174227, 182903 |
| 42023 | 667076 | 669403 | 215375, 169020 |
| 42024 | 680594 | 682475 | 169026 |
| 42025 | 698953 | 700552 | 185619 |
| 42026 | 774238 | 776809 | 249592 |
| 42027 | 782425 | 783348 | 168993 |
| 42028 | 924828 | 927091 | 127419, 178950 |
| 42029 | 978048 | 979536 | 145217, 145214 |
| 42030 | 980058 | 982297 | 127415, 145214, 145217 |
| 42031 | 985178 | 988341 | 145217, 127415 |
| 42032 | 1004462 | 1005463 | 127418 |
| 42033 | 1005477 | 1006620 | 127418 |
| 42034 | 1037205 | 1038781 | |
| 42035 | 1066486 | 1067025 | 178222 |
| 42036 | 1161003 | 1161620 | 273179, 159674 |
| 42037 | 1165448 | 1168170 | 159674 |
| 42038 | 1170641 | 1171832 | 159674 |
| 42039 | 1185273 | 1186907 | 159674 |
| 42040 | 1197993 | 1199462 | 159674 |
| 42041 | 1234944 | 1235902 | 159692 |
| 42042 | 1240418 | 1244389 | 196810, 159692 |
| 42043 | 1283160 | 1284956 | 090316 |
| 42044 | 1330243 | 1332616 | 090316 |
| 42045 | 1339631 | 1342484 | 163945 |
| 42046 | 1580405 | 1582247 | 244459 |
| 42047 | 1685129 | 1686579 | 207009, 174137 |
| 42048 | 1712723 | 1715367 | 270195, 163950 |
| 42049 | 1719693 | 1720943 | 168936 |
| 42050 | 1721548 | 1723507 | 013810, 168936 |
| 42051 | 1768768 | 1769840 | |
| 42052 | 1794829 | 1796190 | 068078 |
| 42053 | 1796494 | 1798492 | 068078 |
| 42054 | 1817863 | 1818556 | 168924 |
| 42055 | 1856645 | 1858927 | 168924 |
| 42056 | 1871918 | 1874341 | 109685 |
| 42057 | 1880024 | 1880740 | 109685 |
| 42058 | 1881765 | 1882588 | 109685 |
| 42059 | 2009589 | 2012559 | 185049 |
| 42060 | 2085494 | 2085918 | 130997 |
| 42061 | 2242899 | 2244308 | 130997, 214367 |
| 42062 | 2262238 | 2264975 | 123933 |
| 42063 | 2335044 | 2335533 | 159733 |
| 42064 | 2364910 | 2365592 | 159733 |
| 42065 | 2469609 | 2472316 | 063978 |
| 42066 | 2536748 | 2539653 | 063978 |
| 42067 | 2585163 | 2585643 | 063978 |
| 42068 | 2699475 | 2700289 | 125386 |
| 42069 | 2746736 | 2749512 | 168884 |
| 42070 | 2756968 | 2758330 | 168884 |
| 42071 | 2792384 | 2797377 | 087266 |
| 42072 | 2804651 | 2806967 | 087266 |
| 42073 | 2811241 | 2811845 | 087266 |
| 42074 | 2844278 | 2846599 | 087274 |
| 42075 | 2859857 | 2860806 | 087274 |
| 42076 | 2871365 | 2872151 | 087274 |
| 42077 | 2911225 | 2911852 | 087274 |
| 42078 | 2935277 | 2939571 | 249673, 109736 |
| 42079 | 2948395 | 2950276 | 249673, 087269 |
| 42080 | 2964115 | 2966409 | 125388, 087269 |
| 42081 | 3042746 | 3044068 | |
| 42082 | 3075102 | 3075966 | 251075 |
| 42083 | 3076089 | 3077533 | 197386, 251075 |
| 42084 | 3108201 | 3108742 | 197386 |
| 42085 | 3180551 | 3182047 | 197386 |
| 42086 | 3204645 | 3205654 | 197386 |
| 42087 | 3209187 | 3209798 | 197386 |
| 42088 | 3293301 | 3295768 | 159788 |
| 42089 | 3355490 | 3357612 | 159788 |
| 42090 | 3385847 | 3388827 | 159788 |
| 42091 | 3409572 | 3410867 | 159788 |
| 42092 | 3437447 | 3439926 | 159788 |
| 42093 | 3443154 | 3445828 | 109758 |
| 42094 | 3463109 | 3465650 | 175920 |
| 42095 | 3533183 | 3534851 | 163956 |
| 42096 | 3786173 | 3786981 | |
| 42097 | 3787856 | 3788471 | |
| 42098 | 3820629 | 3821512 | |
| 42099 | 3828052 | 3828632 | |
| 42100 | 3828865 | 3830257 | |
| 42101 | 4249018 | 4251086 | 132406 |
| 42102 | 4261081 | 4262445 | |
| 42103 | 4291832 | 4292925 | 168826, 145220 |
| 42104 | 4432203 | 4433274 | 168818 |
| 42105 | 4498689 | 4499226 | 168818 |
| 42106 | 4542703 | 4544766 | 247708, 168818 |
| 42107 | 4576533 | 4577693 | 247708 |
| 42108 | 5039335 | 5040379 | |
| 42109 | 5748525 | 5749536 | 072840 |
| 42110 | 5759556 | 5761657 | 072840, 072832 |
| 42111 | 6073723 | 6074483 | 152969 |
| 42112 | 6271140 | 6272956 | 109501 |
| 42113 | 6576381 | 6577383 | 013288 |
| 42114 | 6577994 | 6578888 | 013288 |
| 42115 | 6641560 | 6643768 | 179010 |
| 42116 | 6675007 | 6676675 | 170846, 251580 |
| 42117 | 6690765 | 6691707 | 246526 |
| 42118 | 6697234 | 6697971 | 163993 |
| 42119 | 6710228 | 6712515 | 178988 |
| 42120 | 6717436 | 6719196 | 186222 |
| 42121 | 6733700 | 6736138 | |
| 42122 | 6748647 | 6750048 | |
| 42123 | 6750662 | 6753199 | |
| 42124 | 6753215 | 6754022 | |
| 42125 | 6754272 | 6755650 | |
| 42126 | 6756234 | 6757459 | |
| 42127 | 6775832 | 6776272 | |
| 42128 | 6783543 | 6785724 | 170871 |
| 42129 | 6841755 | 6842303 | 170871 |
| 42130 | 6887170 | 6888399 | |
| 42131 | 6893070 | 6896946 | |
| 42132 | 6910041 | 6913586 | 132405 |
| 42133 | 6918693 | 6919909 | 132405 |
| 42134 | 6928550 | 6929230 | 132405 |
| 42135 | 6949289 | 6949871 | 132405 |
| 42136 | 6987636 | 6990243 | 132405 |
| 42137 | 7009588 | 7010124 | 132405 |
| 42138 | 7016292 | 7017163 | 132405 |
| 42139 | 7030744 | 7031359 | 132405 |
| 42140 | 7036264 | 7037055 | 245748 |
| 42141 | 7038021 | 7038371 | 245748 |
| 42142 | 7044373 | 7046444 | 173013, 245748, 173011 |
| 42143 | 7068526 | 7071119 | 109519 |
| 42144 | 7104762 | 7106183 | 245468 |
| 42145 | 7126786 | 7127404 | |
| 42146 | 7207751 | 7209444 | 184985 |
| 42147 | 7211355 | 7211999 | 184985 |
| 42148 | 7219036 | 7220845 | 184985 |
| 42149 | 7516929 | 7517865 | 184985 |
| 42150 | 7548340 | 7549839 | 184985 |
| 42151 | 7559113 | 7560795 | 184985 |
| 42152 | 7561397 | 7562636 | 184985 |
| 42153 | 7565410 | 7567270 | 184985 |
| 42154 | 7632217 | 7632969 | 184985 |
| 42155 | 7640628 | 7641154 | 184985 |
| 42156 | 7649754 | 7650868 | 184985 |
| 42157 | 7751327 | 7751880 | |
| 42158 | 7807134 | 7807941 | 196526 |
| 42159 | 8114723 | 8115808 | 163995 |
| 42160 | 8145905 | 8147766 | 163995 |
| 42161 | 8159981 | 8161158 | 163995 |
| 42162 | 8200603 | 8202427 | 125089 |
| 42163 | 8216735 | 8217202 | 125089 |
| 42164 | 8229319 | 8231334 | 125089 |
| 42165 | 8239653 | 8240972 | 125089 |
| 42166 | 8304661 | 8306280 | 170801 |
| 42167 | 8421028 | 8422237 | 087008 |
| 42168 | 8428924 | 8430478 | 087008 |
| 42169 | 8440902 | 8443601 | 087008, 155275 |
| 42170 | 8535615 | 8536429 | |
| 42171 | 8538257 | 8541647 | |
| 42172 | 10000892 | 10004586 | 109667 |
| 42173 | 10007678 | 10010255 | 250413, 109667 |
| 42174 | 10018459 | 10019370 | 109667 |
| 42175 | 10021264 | 10022002 | 109667 |
| 42176 | 10022215 | 10023667 | 109667 |
| 42177 | 10033688 | 10035279 | 109667 |
| 42178 | 10046902 | 10047560 | 109667 |
| 42179 | 10106987 | 10109140 | 071127 |
| 42180 | 10116858 | 10119783 | 223086, 071127 |
| 42181 | 10163692 | 10164744 | |
| 42182 | 10187342 | 10188225 | |
| 42183 | 10206134 | 10207384 | |
| 42184 | 12853753 | 12854905 | |
| 42185 | 12934974 | 12936106 | |
| 42186 | 12949957 | 12952744 | 250098 |
| 42187 | 13485249 | 13486586 | 157869 |
| 42188 | 13627957 | 13630452 | 266240, 038219 |
| 42189 | 13679540 | 13680931 | 250634 |
| 42190 | 13702464 | 13704874 | 250634 |
| 42191 | 13705438 | 13708671 | 250634 |
| 42192 | 13857767 | 13858655 | 250634 |
| 42193 | 13908263 | 13910030 | 250634 |
| 42194 | 13921405 | 13923274 | 250634 |
| 42195 | 13992344 | 13993348 | |
| 42196 | 14182425 | 14183408 | 249988 |
| 42197 | 14831366 | 14831878 | 248360 |
| 42198 | 14854749 | 14855854 | 248360 |
| 42199 | 14857513 | 14858614 | 248360 |
| 42200 | 14890365 | 14891109 | |
| 42201 | 14893756 | 14894763 | |
| 42202 | 14896446 | 14897132 | |
| 42203 | 14910094 | 14911173 | |
| 42204 | 14911767 | 14912888 | 247624 |
| 42205 | 14917671 | 14919682 | 247624 |
| 42206 | 14959032 | 14960638 | 247624 |
| 42207 | 15002040 | 15007737 | 249252, 137449, 247624 |
| 42208 | 15078675 | 15081345 | 249252 |
| 42209 | 15102604 | 15103258 | 249252 |
| 42210 | 15107507 | 15109030 | 249252 |
| 42211 | 15111073 | 15112299 | 249252 |
| 42212 | 15133117 | 15133599 | 249252 |
| 42213 | 15150700 | 15152473 | 249252 |
| 42214 | 15480503 | 15481772 | 048342 |
| 42215 | 15553392 | 15554080 | 048342 |
| 42216 | 15655830 | 15658438 | 118564 |
| 42217 | 15678580 | 15679805 | 118564 |
| 42218 | 15682657 | 15684423 | 237765, 118564 |
| 42219 | 15691740 | 15693635 | 237765 |
| 42220 | 15742283 | 15743025 | |
| 42221 | 15780196 | 15781687 | 004468 |
| 42222 | 15906885 | 15908744 | |
| 42223 | 15921748 | 15923921 | |
| 42224 | 16027674 | 16029762 | 007062 |
| 42225 | 16034676 | 16037604 | 007062 |
| 42226 | 16224495 | 16225235 | 169762 |
| 42227 | 16225915 | 16229761 | 263327, 169762 |
| 42228 | 16251071 | 16253355 | 263327 |
| 42229 | 16254212 | 16256438 | 263327 |
| 42230 | 16723095 | 16724101 | 169744 |
| 42231 | 16825758 | 16826717 | 169744 |
| 42232 | 16837176 | 16838547 | 169744 |
| 42233 | 16839819 | 16840607 | 169744 |
| 42234 | 17331681 | 17332365 | |
| 42235 | 17491211 | 17500524 | 151552 |
| 42236 | 17512306 | 17518324 | 249581, 151552 |
| 42237 | 17550557 | 17551688 | |
| 42238 | 17560234 | 17561642 | |
| 42239 | 17578385 | 17580106 | 002549 |
| 42240 | 17615164 | 17616979 | 118579, 249502 |
| 42241 | 17811628 | 17813049 | 109805, 163257 |
| 42242 | 18022325 | 18024662 | 178177 |
| 42243 | 18690969 | 18691476 | |
| 42244 | 20590698 | 20591575 | 145147 |
| 42245 | 20647769 | 20648481 | |
| 42246 | 20701583 | 20702396 | 163138 |
| 42247 | 22239582 | 22240699 | 250039 |
| 42248 | 22437190 | 22437771 | 152990 |
| 42249 | 22476597 | 22477000 | 152990 |
| 42250 | 22501779 | 22503457 | 152990 |
| 42251 | 22515444 | 22518499 | 152990 |
| 42252 | 22694185 | 22696193 | 249948 |
| 42253 | 22697445 | 22699230 | 249948 |
| 42254 | 22713636 | 22714873 | 249948 |
| 42255 | 22741479 | 22742074 | 249948 |
| 42256 | 23374783 | 23376785 | |
| 42257 | 23384463 | 23384955 | |
| 42258 | 23631590 | 23632265 | 250137 |
| 42259 | 23820909 | 23821502 | 109819 |
| 42260 | 23875753 | 23876705 | 109819 |
| 42261 | 23879164 | 23880025 | 109819 |
| 42262 | 23882668 | 23884006 | 109819 |
| 42263 | 23889465 | 23893673 | 109819 |
| 42264 | 23905619 | 23906246 | 109819 |
| 42265 | 23923597 | 23925188 | |
| 42266 | 23931710 | 23933876 | |
| 42267 | 23936385 | 23937085 | |
| 42268 | 23982982 | 23983384 | |
| 42269 | 24009172 | 24010147 | |
| 42270 | 24056888 | 24057948 | |
| 42271 | 24068786 | 24070496 | |
| 42272 | 24075151 | 24076326 | |
| 42273 | 24106270 | 24107884 | |
| 42274 | 24138981 | 24140340 | |
| 42275 | 24161970 | 24162690 | |
| 42276 | 24193736 | 24194467 | |
| 42277 | 24204048 | 24204685 | |
| 42278 | 24210335 | 24213739 | |
| 42279 | 24219678 | 24222051 | |
| 42280 | 24225290 | 24227136 | |
| 42281 | 24229559 | 24230965 | |
| 42282 | 24231315 | 24233552 | |
| 42283 | 24236061 | 24238706 | |
| 42284 | 24279956 | 24282672 | |
| 42285 | 24313858 | 24314682 | |
| 42286 | 24382342 | 24384571 | |
| 42287 | 24430296 | 24431096 | |
| 42288 | 24474228 | 24475107 | |
| 42289 | 24519568 | 24520643 | 109606 |
| 42290 | 24558542 | 24559042 | 109606 |
| 42291 | 24584982 | 24586955 | 109606 |
| 42292 | 24644286 | 24645257 | |
| 42293 | 24659672 | 24660344 | 249256 |
| 42294 | 24796500 | 24797180 | 109610 |
| 42295 | 24913767 | 24915188 | 181982 |
| 42296 | 25155063 | 25157386 | 109618 |
| 42297 | 25160624 | 25163644 | 038210, 109618 |
| 42298 | 25180217 | 25180916 | 038210 |
| 42299 | 25214314 | 25215993 | 038210 |
| 42300 | 25222954 | 25223419 | 038210 |
| 42301 | 25235017 | 25237566 | 038210 |
| 42302 | 25253727 | 25255865 | 038210 |
| 42303 | 25260771 | 25261239 | 038210 |
| 42304 | 25313925 | 25315259 | 168228 |
| 42305 | 25378129 | 25379659 | 053900 |
| 42306 | 25426098 | 25426912 | |
| 42307 | 25789139 | 25790305 | 091490 |
| 42308 | 25815188 | 25815782 | 091490 |
| 42309 | 25863485 | 25865458 | 091490, 250317 |
| 42310 | 25915556 | 25916893 | 250317 |
| 42311 | 26320399 | 26323492 | 168214 |
| 42312 | 26414270 | 26415036 | 168214 |
| 42313 | 26584768 | 26586426 | 109680 |
| 42314 | 26755124 | 26755697 | 109680 |
| 42315 | 26788971 | 26790749 | |
| 42316 | 26822837 | 26824754 | |
| 42317 | 26858291 | 26859978 | 109689 |
| 42318 | 26861148 | 26863869 | 240005, 109689 |
| 42319 | 26880142 | 26881140 | 109689 |
| 42320 | 27007534 | 27008269 | 109689 |
| 42321 | 27644739 | 27645103 | |
| 42322 | 28289088 | 28290371 | |
| 42323 | 28315473 | 28316445 | |
| 42324 | 29306180 | 29306683 | |
| 42325 | 32477325 | 32477757 | |
| 42326 | 32842067 | 32843420 | |
| 42327 | 32866368 | 32867001 | |
| 42328 | 33075148 | 33075943 | |
| 42329 | 33950397 | 33950963 | 250723, 250954 |
| 42330 | 34182226 | 34184389 | 248685 |
| 42331 | 34201870 | 34202687 | 248685 |
| 42332 | 34733855 | 34735510 | |
| 42333 | 36038674 | 36039222 | 047365 |
| 42334 | 36244512 | 36246937 | 247193, 047365 |
| 42335 | 36350043 | 36350823 | 251438 |
| 42336 | 36364511 | 36365084 | 251438 |
| 42337 | 37431799 | 37433455 | 174145 |
| 42338 | 37442552 | 37444366 | 174145 |
| 42339 | 37454478 | 37456666 | 154274 |
| 42340 | 37457045 | 37457958 | 154274 |
| 42341 | 37529538 | 37530504 | 154274 |
| 42342 | 37630410 | 37631242 | 181826 |
| 42343 | 37642934 | 37644138 | 181826 |
| 42344 | 37646292 | 37648169 | 181826 |
| 42345 | 37649294 | 37650798 | 181826 |
| 42346 | 37664174 | 37665541 | 181826 |
| 42347 | 37666213 | 37666844 | 181826 |
| 42348 | 37667698 | 37669262 | 181826 |
| 42349 | 37684070 | 37685328 | 181826 |
| 42350 | 37686693 | 37688846 | 181826 |
| 42351 | 37734937 | 37735598 | |
| 42352 | 37759738 | 37760284 | |
| 42353 | 37814018 | 37814786 | |
| 42354 | 37823672 | 37824349 | |
| 42355 | 37827711 | 37829340 | 169299 |
| 42356 | 37874901 | 37875508 | |
| 42357 | 37891843 | 37893578 | 065882 |
| 42358 | 37972071 | 37972773 | 065882 |
| 42359 | 37977891 | 37980480 | 065882 |
| 42360 | 38076862 | 38077537 | 065882 |
| 42361 | 38089338 | 38090687 | 065882 |
| 42362 | 38129950 | 38131601 | 065882 |
| 42363 | 38132793 | 38136257 | 065882 |
| 42364 | 38142326 | 38143055 | |
| 42365 | 38146490 | 38148713 | |
| 42366 | 38161525 | 38165031 | |
| 42367 | 38171108 | 38172109 | |
| 42368 | 38189669 | 38191673 | |
| 42369 | 38207811 | 38208538 | |
| 42370 | 38224730 | 38227292 | |
| 42371 | 38238594 | 38239247 | |
| 42372 | 38280844 | 38281876 | |
| 42373 | 38309858 | 38311582 | |
| 42374 | 38315155 | 38316851 | |
| 42375 | 38319703 | 38322525 | |
| 42376 | 38385262 | 38385822 | 248227 |
| 42377 | 38386643 | 38389379 | 248227 |
| 42378 | 38492456 | 38493155 | 249534 |
| 42379 | 38576281 | 38577232 | |
| 42380 | 38602902 | 38603581 | |
| 42381 | 38607329 | 38608181 | |
| 42382 | 38664218 | 38667834 | 109787, 196355, 231160 |
| 42383 | 38668011 | 38669989 | 109787 |
| 42384 | 38674594 | 38677668 | 109787 |
| 42385 | 38789114 | 38791250 | |
| 42386 | 38866963 | 38867666 | |
| 42387 | 38868506 | 38870633 | 207944, 197712 |
| 42388 | 38873918 | 38875333 | 197712 |
| 42389 | 38890711 | 38893548 | 197712 |
| 42390 | 38898641 | 38900005 | 197712 |
| 42391 | 38905455 | 38906532 | 197712 |
| 42392 | 38931843 | 38932580 | 197712 |
| 42393 | 38949900 | 38953441 | |
| 42394 | 38966823 | 38970237 | 121895 |
| 42395 | 38991671 | 38992418 | 121895 |
| 42396 | 39033874 | 39034718 | 121895 |
| 42397 | 39044066 | 39048073 | 109790 |
| 42398 | 39183372 | 39184714 | 157796 |
| 42399 | 39233248 | 39234229 | 157796 |
| 42400 | 39326221 | 39327389 | 035928 |
| 42401 | 39339015 | 39340310 | 035928 |
| 42402 | 39342350 | 39343388 | 035928 |
| 42403 | 39350009 | 39351407 | 035928 |
| 42404 | 39367097 | 39369476 | 035928 |
| 42405 | 39408189 | 39409159 | 134962 |
| 42406 | 39411190 | 39412984 | 134962 |
| 42407 | 39413802 | 39416021 | 134962 |
| 42408 | 39417254 | 39417936 | 134962 |
| 42409 | 39435527 | 39436210 | 134962 |
| 42410 | 39451969 | 39452723 | 134962 |
| 42411 | 39459340 | 39461881 | 121897, 163682 |
| 42412 | 39470839 | 39471881 | 121897 |
| 42413 | 39497088 | 39498001 | |
| 42414 | 39515664 | 39518254 | 109814 |
| 42415 | 39527170 | 39531706 | 249348, 109814 |
| 42416 | 39543732 | 39544676 | 249348 |
| 42417 | 39566593 | 39568632 | 163683, 249348 |
| 42418 | 39569925 | 39571536 | 163683, 249348 |
| 42419 | 39610662 | 39611881 | 163683 |
| 42420 | 39622098 | 39624778 | 252796, 163683 |
| 42421 | 39638059 | 39642186 | 255458, 163683 |
| 42422 | 39649871 | 39650206 | 255458 |
| 42423 | 39651024 | 39652405 | 255458 |
| 42424 | 39666028 | 39667267 | 255458 |
| 42425 | 39698528 | 39700962 | 078140 |
| 42426 | 39935194 | 39935724 | 121892 |
| 42427 | 39972046 | 39972740 | 121892 |
| 42428 | 39977901 | 39980104 | 121892 |
| 42429 | 40047558 | 40048528 | 205794 |
| 42430 | 40056954 | 40060333 | 078177, 205794 |
| 42431 | 40256855 | 40258024 | |
| 42432 | 40318931 | 40319631 | 249241 |
| 42433 | 40369336 | 40370452 | |
| 42434 | 40370919 | 40372524 | |
| 42435 | 40377005 | 40377571 | |
| 42436 | 40397584 | 40398452 | |
| 42437 | 40419845 | 40422256 | |
| 42438 | 40448758 | 40449816 | 163694 |
| 42439 | 40456774 | 40458319 | 163694 |
| 42440 | 40459474 | 40461623 | 163694 |
| 42441 | 40475154 | 40476922 | 163694 |
| 42442 | 40488483 | 40489116 | 163694 |
| 42443 | 40493660 | 40494705 | 242197, 163694 |
| 42444 | 40506734 | 40507458 | 163694 |
| 42445 | 40515785 | 40518289 | 163694 |
| 42446 | 40527386 | 40528998 | 163694 |
| 42447 | 40548317 | 40549747 | 163694 |
| 42448 | 40552780 | 40554135 | 163694 |
| 42449 | 40560761 | 40562858 | 163694 |
| 42450 | 40578335 | 40580998 | 163694 |
| 42451 | 40593968 | 40594420 | 163694 |
| 42452 | 40596746 | 40597216 | 163694 |
| 42453 | 40622846 | 40624701 | 163694 |
| 42454 | 40629890 | 40633589 | 163694 |
| 42455 | 40664772 | 40665687 | |
| 42456 | 40689639 | 40691036 | |
| 42457 | 40985978 | 40986954 | 163697 |
| 42458 | 40991769 | 40994357 | 201736, 163697 |
| 42459 | 41079611 | 41080129 | 163697 |
| 42460 | 41112079 | 41112568 | 163697 |
| 42461 | 41122049 | 41123174 | 163697 |
| 42462 | 41134146 | 41134838 | 163697 |
| 42463 | 41144188 | 41148026 | 163697 |
| 42464 | 41148169 | 41150719 | 163697 |
| 42465 | 41177760 | 41179882 | 163697 |
| 42466 | 41206526 | 41207366 | 163697 |
| 42467 | 41214266 | 41217291 | 163697 |
| 42468 | 41217706 | 41219727 | 163697 |
| 42469 | 41320061 | 41323423 | |
| 42470 | 41360383 | 41364178 | 064042 |
| 42471 | 41428542 | 41429006 | 064042 |
| 42472 | 41446251 | 41447068 | 064042 |
| 42473 | 41477324 | 41478167 | 064042 |
| 42474 | 41489903 | 41490308 | 064042 |
| 42475 | 41650326 | 41651000 | 064042 |
| 42476 | 41867260 | 41868182 | |
| 42477 | 41885827 | 41886524 | 249771 |
| 42478 | 41911237 | 41911571 | |
| 42479 | 41935503 | 41938423 | 109133 |
| 42480 | 41940953 | 41941505 | 109133 |
| 42481 | 41992291 | 41993655 | 014824 |
| 42482 | 42658250 | 42660002 | 260519, 124406 |
| 42483 | 44679938 | 44681468 | 151806, 177752 |
| 42484 | 44727840 | 44729062 | 163281 |
| 42485 | 45878217 | 45878863 | |
| 42486 | 46427539 | 46428431 | 151834, 249330 |
| 42487 | 46447742 | 46448437 | 151834 |
| 42488 | 47465084 | 47465982 | 169019 |
| 42489 | 47486836 | 47488622 | 145246 |
| 42490 | 47526936 | 47528082 | 145246 |
| 42491 | 47533249 | 47533975 | 145246 |
| 42492 | 47705600 | 47707390 | 145244 |
| 42493 | 47717803 | 47718767 | 145244 |
| 42494 | 47838338 | 47840117 | 145244 |
| 42495 | 47915143 | 47917191 | 163293, 170448 |
| 42496 | 48017904 | 48019927 | 198515, 163293 |
| 42497 | 48033853 | 48035705 | 163293 |
| 42498 | 48049440 | 48050351 | |
| 42499 | 48095572 | 48096584 | 074966 |
| 42500 | 48110096 | 48112100 | 253050, 074966 |
| 42501 | 48129188 | 48130820 | 074966 |
| 42502 | 48175110 | 48176275 | 135605 |
| 42503 | 48212582 | 48213392 | 135605 |
| 42504 | 48256263 | 48257009 | 135605 |
| 42505 | 48270950 | 48272974 | 135605 |
| 42506 | 48333097 | 48334625 | |
| 42507 | 48342044 | 48344873 | 109171 |
| 42508 | 48377597 | 48378310 | 109171 |
| 42509 | 48636433 | 48637824 | 075539 |
| 42510 | 48780887 | 48783238 | 075539 |
| 42511 | 48832701 | 48834375 | 109180 |
| 42512 | 48906592 | 48909668 | 145247 |
| 42513 | 48911649 | 48912151 | |
| 42514 | 48941706 | 48942460 | |
| 42515 | 52708693 | 52711415 | 109184 |
| 42516 | 52718643 | 52720360 | 109184 |
| 42517 | 52745920 | 52747372 | 109184 |
| 42518 | 52761831 | 52762464 | 109184 |
| 42519 | 52774953 | 52776272 | 109184 |
| 42520 | 52903117 | 52905213 | 163069 |
| 42521 | 52917320 | 52919005 | 163071 |
| 42522 | 53524502 | 53526662 | 248866, 109189 |
| 42523 | 53578148 | 53579987 | 212588, 226950, 264585 |
| 42524 | 53588038 | 53589104 | 226887 |
| 42525 | 53779989 | 53780911 | 184178 |
| 42526 | 53801336 | 53801869 | 184178 |
| 42527 | 53884554 | 53887446 | 184178 |
| 42528 | 53988367 | 53989020 | 184178 |
| 42529 | 54054092 | 54055008 | 184178 |
| 42530 | 54188675 | 54189313 | 184178 |
| 42531 | 54231104 | 54232943 | 184178 |
| 42532 | 54243370 | 54244777 | 145216 |
| 42533 | 54321847 | 54322703 | 145216 |
| 42534 | 54325516 | 54326459 | 145216, 072201 |
| 42535 | 54345127 | 54346171 | 145216, 072201 |
| 42536 | 54372911 | 54375079 | 145216, 072201, 250930 |
| 42537 | 54510682 | 54511846 | 145216, 072201 |
| 42538 | 54519487 | 54520995 | 145216, 072201 |
| 42539 | 54568367 | 54569846 | 145216, 249341 |
| 42540 | 54647114 | 54648880 | 145216 |
| 42541 | 54699165 | 54700108 | 145216 |
| 42542 | 54706839 | 54707318 | 145216 |
| 42543 | 54774519 | 54775583 | 145216, 249706 |
| 42544 | 54794953 | 54795418 | 145216 |
| 42545 | 54802007 | 54802329 | 145216 |
| 42546 | 54928551 | 54932140 | 109220, 145216 |
| 42547 | 54947591 | 54949546 | 145216 |
| 42548 | 54950570 | 54952727 | 145216 |
| 42549 | 54956706 | 54958891 | 145216 |
| 42550 | 55031245 | 55032447 | 145216 |
| 42551 | 55083472 | 55084450 | 145216 |
| 42552 | 55093613 | 55094724 | 145216 |
| 42553 | 55099020 | 55101276 | 145216, 134853 |
| 42554 | 55162639 | 55163389 | 134853 |
| 42555 | 56211939 | 56213783 | 128039 |
| 42556 | 56261356 | 56263702 | 134851, 249700 |
| 42557 | 56334878 | 56335409 | 134852 |
| 42558 | 56411349 | 56414170 | 272969, 134852 |
| 42559 | 56719715 | 56720704 | 090989 |
| 42560 | 56731688 | 56733611 | 090989 |
| 42561 | 56814637 | 56815845 | 174799 |
| 42562 | 57252755 | 57254340 | 269921, 157426 |
| 42563 | 57300780 | 57301704 | 128059 |
| 42564 | 57302004 | 57303708 | 128050 |
| 42565 | 57332250 | 57334911 | 174780 |
| 42566 | 57666090 | 57666734 | |
| 42567 | 57773880 | 57776182 | 084093 |
| 42568 | 57842570 | 57844206 | 047315, 084092 |
| 42569 | 57844459 | 57845801 | 084092, 047315 |
| 42570 | 57848061 | 57848360 | 047315 |
| 42571 | 60418690 | 60419691 | 249392 |
| 42572 | 65879788 | 65880537 | |
| 42573 | 66282430 | 66283019 | 145242 |
| 42574 | 68410292 | 68411858 | 145241 |
| 42575 | 68566046 | 68568535 | 248049, 033178 |
| 42576 | 68579723 | 68580405 | 248049 |
| 42577 | 68590821 | 68591321 | 270292, 248049 |
| 42578 | 69214300 | 69216040 | 083896 |
| 42579 | 69447087 | 69448644 | |
| 42580 | 69463038 | 69463592 | |
| 42581 | 69583173 | 69585589 | |
| 42582 | 69598351 | 69600133 | |
| 42583 | 69616350 | 69617368 | |
| 42584 | 69662506 | 69663773 | |
| 42585 | 69729735 | 69731827 | |
| 42586 | 69743819 | 69744272 | 251529 |
| 42587 | 69769763 | 69775087 | 249985, 272626 |
| 42588 | 69813689 | 69818318 | 135220 |
| 42589 | 69828636 | 69829795 | |
| 42590 | 69898463 | 69899905 | 250919 |
| 42591 | 69922618 | 69925076 | 171234 |
| 42592 | 69932302 | 69933700 | 248763, 171234 |
| 42593 | 69934309 | 69935826 | 248763, 171234 |
| 42594 | 69938373 | 69941701 | 171234 |
| 42595 | 69960454 | 69969050 | 171234 |
| 42596 | 70018813 | 70019459 | |
| 42597 | 70032145 | 70036193 | |
| 42598 | 70324079 | 70324723 | |
| 42599 | 70359014 | 70363062 | 156096 |
| 42600 | 70383322 | 70385062 | 248886, 156096 |
| 42601 | 70410376 | 70412907 | |
| 42602 | 70506041 | 70506455 | 173610, 270386 |
| 42603 | 70579162 | 70580214 | |
| 42604 | 70591733 | 70593588 | 173597 |
| 42605 | 70620314 | 70622220 | 173597 |
| 42606 | 70624676 | 70625563 | 173597 |
| 42607 | 70698042 | 70698803 | 109193 |
| 42608 | 70726241 | 70727019 | |
| 42609 | 71048304 | 71049001 | |
| 42610 | 71450012 | 71450686 | |
| 42611 | 71497012 | 71499071 | 132464 |
| 42612 | 71553100 | 71555343 | 132467 |
| 42613 | 71569341 | 71572666 | 272986, 018189 |
| 42614 | 71578788 | 71581182 | 018189 |
| 42615 | 71704030 | 71705857 | 132463 |
| 42616 | 71767327 | 71769050 | 173542 |
| 42617 | 71858610 | 71860077 | 173542, 156136 |
| 42618 | 72051858 | 72054231 | 080493 |
| 42619 | 72074519 | 72075940 | 080493 |
| 42620 | 72076644 | 72078461 | 080493 |
| 42621 | 72081806 | 72082994 | 080493 |
| 42622 | 72094869 | 72098156 | 080493 |
| 42623 | 72105024 | 72106346 | 080493 |
| 42624 | 72169545 | 72171243 | 080493 |
| 42625 | 72282792 | 72283323 | 080493 |
| 42626 | 72296014 | 72296843 | 080493 |
| 42627 | 72312277 | 72312874 | 080493 |
| 42628 | 72321992 | 72323045 | 080493 |
| 42629 | 72352285 | 72353593 | 080493 |
| 42630 | 72415386 | 72417005 | 080493 |
| 42631 | 72425233 | 72426998 | 080493 |
| 42632 | 72464784 | 72466133 | |
| 42633 | 72473279 | 72475098 | |
| 42634 | 72635043 | 72636831 | 145321 |
| 42635 | 72636981 | 72640276 | 145321 |
| 42636 | 72647343 | 72649129 | 145321 |
| 42637 | 72650516 | 72651184 | 145321 |
| 42638 | 72651410 | 72652402 | 145321 |
| 42639 | 72773306 | 72773944 | |
| 42640 | 72950290 | 72951360 | 056291 |
| 42641 | 72978128 | 72978739 | 056291 |
| 42642 | 73177443 | 73178531 | 156140 |
| 42643 | 73185473 | 73186627 | 156140 |
| 42644 | 73724123 | 73724630 | |
| 42645 | 73761700 | 73762825 | |
| 42646 | 73785474 | 73786221 | |
| 42647 | 73790242 | 73791002 | |
| 42648 | 73933621 | 73936586 | 163626 |
| 42649 | 73969239 | 73971080 | 132466 |
| 42650 | 74122826 | 74126029 | 250220, 132466 |
| 42651 | 74140361 | 74141571 | 250220 |
| 42652 | 74208238 | 74212494 | |
| 42653 | 74240435 | 74242151 | |
| 42654 | 74244526 | 74246312 | |
| 42655 | 74254010 | 74255128 | |
| 42656 | 74262030 | 74267311 | 163631 |
| 42657 | 74269172 | 74276140 | 163631 |
| 42658 | 74281291 | 74282232 | 163631 |
| 42659 | 74287982 | 74292165 | |
| 42660 | 74315704 | 74316928 | 081051 |
| 42661 | 74318653 | 74320190 | 081051 |
| 42662 | 74346543 | 74349313 | 079557 |
| 42663 | 74365354 | 74366865 | 079557 |
| 42664 | 74373188 | 74373742 | |
| 42665 | 74399313 | 74399991 | 250436 |
| 42666 | 74454641 | 74456938 | 169435 |
| 42667 | 74464431 | 74465531 | 169435 |
| 42668 | 74468672 | 74470357 | 169435 |
| 42669 | 74474163 | 74475840 | 169435 |
| 42670 | 74542583 | 74543106 | |
| 42671 | 74569377 | 74571328 | |
| 42672 | 74599859 | 74601025 | |
| 42673 | 74605647 | 74608263 | 169429 |
| 42674 | 74609260 | 74610377 | 169429 |
| 42675 | 74641289 | 74642651 | |
| 42676 | 74698445 | 74699126 | |
| 42677 | 74702130 | 74703558 | 124875 |
| 42678 | 74713798 | 74714772 | 250550, 124875 |
| 42679 | 74721112 | 74723024 | |
| 42680 | 74904133 | 74905196 | 163734 |
| 42681 | 74961041 | 74966651 | 081041 |
| 42682 | 74969674 | 74970882 | |
| 42683 | 74973900 | 74976815 | |
| 42684 | 74982415 | 74983766 | 163738 |
| 42685 | 74988148 | 74989650 | 163738 |
| 42686 | 75022771 | 75025124 | 269559, 163738 |
| 42687 | 75404394 | 75405613 | |
| 42688 | 75410467 | 75411622 | |
| 42689 | 75533324 | 75534301 | |
| 42690 | 75549067 | 75551940 | |
| 42691 | 75552636 | 75553209 | |
| 42692 | 75557115 | 75558391 | |
| 42693 | 75577998 | 75581343 | |
| 42694 | 75584743 | 75586607 | |
| 42695 | 75718914 | 75720219 | 174808 |
| 42696 | 76438575 | 76440668 | 174796, 163743 |
| 42697 | 76467969 | 76468472 | 174796 |
| 42698 | 76596874 | 76599634 | 138757 |
| 42699 | 76627984 | 76628747 | 138757 |
| 42700 | 76648266 | 76651402 | 138768, 138757 |
| 42701 | 76764989 | 76766003 | |
| 42702 | 76816880 | 76817487 | 156194 |
| 42703 | 76840892 | 76841563 | 138744 |
| 42704 | 76843709 | 76844238 | 138744 |
| 42705 | 76860967 | 76862468 | 198301, 138744 |
| 42706 | 76910771 | 76912478 | 198301, 245928 |
| 42707 | 76927460 | 76929083 | 138755 |
| 42708 | 76932713 | 76933720 | 156219 |
| 42709 | 76934404 | 76935210 | 156219 |
| 42710 | 76944490 | 76945291 | 169245, 156219 |
| 42711 | 76949166 | 76950173 | 156219 |
| 42712 | 76956920 | 76957650 | 169248, 156219 |
| 42713 | 77004444 | 77004961 | 156219 |
| 42714 | 77068382 | 77070463 | 138750 |
| 42715 | 77114396 | 77118083 | 138760 |
| 42716 | 77121391 | 77122784 | 138760 |
| 42717 | 77128930 | 77130496 | 138760 |
| 42718 | 77132705 | 77136020 | 189157, 138760 |
| 42719 | 77139809 | 77141416 | 189157 |
| 42720 | 77156756 | 77157641 | 189157 |
| 42721 | 77171983 | 77173476 | 272414, 118804, 189157 |
| 42722 | 77193195 | 77203111 | 272414, 118804, 189157 |
| 42723 | 77213778 | 77214287 | 272414, 118804 |
| 42724 | 77221669 | 77224629 | 272414, 118804 |
| 42725 | 77224695 | 77230350 | 272414, 118804 |
| 42726 | 77232635 | 77234628 | 163749, 118804 |
| 42727 | 77295007 | 77296146 | 163749 |
| 42728 | 77297651 | 77299656 | 163749 |
| 42729 | 77307929 | 77308553 | 163749 |
| 42730 | 77308982 | 77310215 | 163749 |
| 42731 | 77341593 | 77343334 | 163749 |
| 42732 | 77370620 | 77372613 | 138771 |
| 42733 | 77406393 | 77409266 | 138771 |
| 42734 | 77415005 | 77417856 | 138771 |
| 42735 | 77418924 | 77421862 | 138771 |
| 42736 | 77432358 | 77434395 | 138771 |
| 42737 | 77446735 | 77448458 | 138771 |
| 42738 | 77456842 | 77457824 | 138771 |
| 42739 | 77467336 | 77468732 | 138771 |
| 42740 | 77469693 | 77470417 | 138771 |
| 42741 | 77483077 | 77485503 | 138771 |
| 42742 | 77489885 | 77493577 | 138771 |
| 42743 | 77506305 | 77508160 | 138771 |
| 42744 | 77510679 | 77511938 | 138771 |
| 42745 | 77521522 | 77522169 | 138771 |
| 42746 | 77558059 | 77560355 | 231335, 138771 |
| 42747 | 77585757 | 77587376 | 138771 |
| 42748 | 77609790 | 77612364 | 138771 |
| 42749 | 77612774 | 77614289 | 138771 |
| 42750 | 77617328 | 77618028 | 138771 |
| 42751 | 77623267 | 77629612 | 138771 |
| 42752 | 77646124 | 77646647 | 138771 |
| 42753 | 77702576 | 77703906 | 138771, 224218 |
| 42754 | 77730847 | 77731536 | |
| 42755 | 77751458 | 77753882 | |
| 42756 | 77771004 | 77771724 | |
| 42757 | 77777055 | 77778828 | |
| 42758 | 77818036 | 77820724 | 186212 |
| 42759 | 77823467 | 77824513 | |
| 42760 | 77852449 | 77853378 | |
| 42761 | 77864275 | 77864751 | |
| 42762 | 77869374 | 77872532 | 138758 |
| 42763 | 77883709 | 77884237 | 138758 |
| 42764 | 77905726 | 77906734 | 138758 |
| 42765 | 77944659 | 77945454 | 138758 |
| 42766 | 77964893 | 77965281 | |
| 42767 | 77995706 | 77998233 | 118816 |
| 42768 | 78077854 | 78079790 | 138764 |
| 42769 | 78459305 | 78460715 | 156234 |
| 42770 | 78485201 | 78486464 | 156234 |
| 42771 | 78500617 | 78501193 | 156234 |
| 42772 | 78552315 | 78553002 | |
| 42773 | 78571344 | 78572600 | |
| 42774 | 78619008 | 78619944 | |
| 42775 | 78737610 | 78738245 | 138767 |
| 42776 | 78738450 | 78743091 | 138767 |
| 42777 | 78782852 | 78784855 | 169288 |
| 42778 | 78842678 | 78843269 | 169288 |
| 42779 | 79490325 | 79490941 | 138772 |
| 42780 | 79566292 | 79568020 | 251442 |
| 42781 | 79570651 | 79572531 | 251442 |
| 42782 | 79582408 | 79583625 | 251442 |
| 42783 | 79695855 | 79698590 | 138756, 260278 |
| 42784 | 79783025 | 79784148 | 138756 |
| 42785 | 79859719 | 79861080 | 163291 |
| 42786 | 80214988 | 80215824 | 249307, 156269 |
| 42787 | 80926964 | 80927657 | 163297 |
| 42788 | 80992923 | 80994605 | 163297 |
| 42789 | 81973125 | 81974075 | 152785 |
| 42790 | 82085061 | 82086416 | 251059, 138669 |
| 42791 | 82388123 | 82394235 | 138670 |
| 42792 | 82414762 | 82415934 | 138670 |
| 42793 | 82484815 | 82488609 | 138670 |
| 42794 | 82497794 | 82500959 | 138670 |
| 42795 | 82517272 | 82517774 | 138670 |
| 42796 | 82540735 | 82545128 | 138670, 251331 |
| 42797 | 82545337 | 82547855 | 138670, 251331 |
| 42798 | 82548165 | 82550795 | 138670, 251331 |
| 42799 | 82552014 | 82554621 | 138670, 251331 |
| 42800 | 82555428 | 82557710 | 138670, 251331 |
| 42801 | 82571461 | 82573691 | 138670, 251331 |
| 42802 | 82644344 | 82646911 | 138670, 251331 |
| 42803 | 82659079 | 82660459 | 138670, 251331 |
| 42804 | 82760735 | 82761272 | 138670, 251331 |
| 42805 | 83293818 | 83296704 | 272677, 138668 |
| 42806 | 83349855 | 83352665 | 145293, 152795 |
| 42807 | 83440087 | 83440597 | 249242 |
| 42808 | 83452728 | 83453564 | 249242 |
| 42809 | 83482271 | 83483858 | 249242 |
| 42810 | 83755071 | 83755467 | 138674 |
| 42811 | 83810744 | 83812792 | 138674 |
| 42812 | 83820599 | 83823132 | 168152, 251022, 138674 |
| 42813 | 83930948 | 83932629 | 189308 |
| 42814 | 83933272 | 83935380 | 189308 |
| 42815 | 83955351 | 83957191 | 138663 |
| 42816 | 84030658 | 84032061 | 145287 |
| 42817 | 84176639 | 84178643 | |
| 42818 | 84205281 | 84206659 | 173085 |
| 42819 | 84278347 | 84278758 | |
| 42820 | 84375971 | 84378193 | 163319, 163312 |
| 42821 | 84405620 | 84406974 | 163322 |
| 42822 | 84456307 | 84458479 | 138678 |
| 42823 | 84464700 | 84465249 | 138678 |
| 42824 | 84468641 | 84470733 | 138678 |
| 42825 | 84482471 | 84483101 | 138678 |
| 42826 | 84495372 | 84495920 | 138678 |
| 42827 | 84503387 | 84504095 | 138678 |
| 42828 | 84539375 | 84540633 | |
| 42829 | 85734913 | 85736717 | 163625 |
| 42830 | 85872871 | 85873665 | 163625 |
| 42831 | 85886678 | 85888910 | 180769, 163625 |
| 42832 | 86396051 | 86396605 | 138639 |
| 42833 | 86430999 | 86431538 | 138639 |
| 42834 | 86699318 | 86700311 | 138639 |
| 42835 | 86707756 | 86708775 | 138639 |
| 42836 | 86747205 | 86747897 | 138639 |
| 42837 | 86748356 | 86750049 | 138639 |
| 42838 | 86849891 | 86851783 | 138639 |
| 42839 | 87812479 | 87814160 | 163633 |
| 42840 | 87839652 | 87840450 | 163633 |
| 42841 | 87845424 | 87846400 | 163633 |
| 42842 | 87847592 | 87850700 | 163633 |
| 42843 | 87855067 | 87858978 | 172493, 163633 |
| 42844 | 87862764 | 87863947 | 172493 |
| 42845 | 87884720 | 87885214 | 172493 |
| 42846 | 87894883 | 87895327 | 172493 |
| 42847 | 87898624 | 87899368 | 172493 |
| 42848 | 87915021 | 87916000 | 172493 |
| 42849 | 87927255 | 87929483 | 172493 |
| 42850 | 87933651 | 87934239 | 172493 |
| 42851 | 87954351 | 87955420 | 172493 |
| 42852 | 87962240 | 87962682 | 172493 |
| 42853 | 88013635 | 88016271 | 172493 |
| 42854 | 88029103 | 88029902 | 172493 |
| 42855 | 88038208 | 88038972 | 172493 |
| 42856 | 88041252 | 88043833 | 172493 |
| 42857 | 88086874 | 88087702 | 145332 |
| 42858 | 88109289 | 88110729 | 145332 |
| 42859 | 88140608 | 88142294 | 145332 |
| 42860 | 88156346 | 88157795 | 145332 |
| 42861 | 88199277 | 88200099 | |
| 42862 | 88238275 | 88239191 | 255723, 170509 |
| 42863 | 88277791 | 88279087 | 198189 |
| 42864 | 88310543 | 88313366 | 198189 |
| 42865 | 88329713 | 88331200 | |
| 42866 | 88337749 | 88338794 | |
| 42867 | 88340048 | 88345207 | 170502 |
| 42868 | 88411947 | 88412699 | 152583 |
| 42869 | 88413596 | 88414626 | 152583 |
| 42870 | 88510443 | 88511226 | 249001 |
| 42871 | 88786044 | 88788230 | |
| 42872 | 88831602 | 88833104 | |
| 42873 | 88833192 | 88834477 | |
| 42874 | 88883060 | 88883962 | |
| 42875 | 88895924 | 88896573 | |
| 42876 | 88928532 | 88929832 | 118762 |
| 42877 | 88938947 | 88939456 | 118762 |
| 42878 | 88983723 | 88984464 | 118762 |
| 42879 | 89027491 | 89030082 | 118777 |
| 42880 | 89031904 | 89032548 | 118777 |
| 42881 | 89079467 | 89080759 | 118777 |
| 42882 | 89083619 | 89084270 | 118777 |
| 42883 | 89204401 | 89206440 | 246375, 163644 |
| 42884 | 89299764 | 89300821 | 138642 |
| 42885 | 89377725 | 89378770 | 138646 |
| 42886 | 89387734 | 89388328 | 138646 |
| 42887 | 89443704 | 89445720 | 145337, 138641 |
| 42888 | 89512483 | 89514727 | 138641 |
| 42889 | 89532264 | 89535269 | 138641 |
| 42890 | 89543452 | 89545162 | 138641 |
| 42891 | 89626912 | 89628252 | 138641 |
| 42892 | 89654150 | 89657747 | 138640 |
| 42893 | 89657768 | 89659036 | 138640 |
| 42894 | 89673718 | 89676421 | 138640 |
| 42895 | 89686892 | 89687495 | 138640 |
| 42896 | 89713025 | 89714423 | 138640 |
| 42897 | 89730501 | 89731477 | 138640 |
| 42898 | 89744112 | 89745225 | 138640 |
| 42899 | 89930235 | 89930686 | 138640 |
| 42900 | 90031652 | 90033893 | 271359, 138640 |
| 42901 | 90034444 | 90035669 | 180346 |
| 42902 | 90043564 | 90045260 | |
| 42903 | 90117723 | 90118455 | |
| 42904 | 90194751 | 90196239 | 185477 |
| 42905 | 90196514 | 90197282 | 185477 |
| 42906 | 90204259 | 90204897 | 185477 |
| 42907 | 90214240 | 90215044 | 185477 |
| 42908 | 90217262 | 90218351 | 185477 |
| 42909 | 90219842 | 90220813 | 185477 |
| 42910 | 92835235 | 92835891 | |
| 42911 | 93889790 | 93892088 | 152208 |
| 42912 | 93909462 | 93910009 | 152208 |
| 42913 | 93913051 | 93913598 | 152208 |
| 42914 | 95128319 | 95129827 | 163104, 246541 |
| 42915 | 95219932 | 95220538 | 163106 |
| 42916 | 95330918 | 95332903 | |
| 42917 | 95333082 | 95334693 | |
| 42918 | 95340944 | 95341546 | |
| 42919 | 95372220 | 95377292 | 163110 |
| 42920 | 95393267 | 95395266 | 163110 |
| 42921 | 95427823 | 95430028 | 163110 |
| 42922 | 95436097 | 95439127 | 163110 |
| 42923 | 95468795 | 95470721 | 163110 |
| 42924 | 95485347 | 95485889 | 163110 |
| 42925 | 95562245 | 95564476 | 163110 |
| 42926 | 98396516 | 98397112 | 251620, 163116, 254044 |
| 42927 | 98414829 | 98415814 | 163116, 254044 |
| 42928 | 98417111 | 98418712 | 163116, 254044 |
| 42929 | 98419967 | 98420642 | 163116, 254044 |
| 42930 | 98787953 | 98788612 | 163116 |
| 42931 | 99063824 | 99065356 | 163116 |
| 42932 | 99087283 | 99088391 | |
| 42933 | 99174316 | 99175228 | 214559 |
| 42934 | 99180712 | 99184180 | 138698, 214559 |
| 42935 | 99547370 | 99547764 | 168785 |
| 42936 | 99564181 | 99564805 | 168785 |
| 42937 | 99699241 | 99699868 | |
| 42938 | 99849024 | 99852122 | 238449, 263923, 151247 |
| 42939 | 99858963 | 99859932 | 263923 |
| 42940 | 99915781 | 99918051 | 164024, 263923 |
| 42941 | 100007986 | 100010985 | 246090, 197894 |
| 42942 | 100064823 | 100066014 | 198099, 246090 |
| 42943 | 100077417 | 100079157 | 198099, 246090 |
| 42944 | 100125952 | 100127162 | 172955, 246090 |
| 42945 | 100139766 | 100141323 | 172955, 246090 |
| 42946 | 100212018 | 100212833 | 187758, 246090 |
| 42947 | 100244644 | 100245568 | |
| 42948 | 100273702 | 100274573 | 248144 |
| 42949 | 100301698 | 100306467 | |
| 42950 | 100323726 | 100327122 | |
| 42951 | 100334153 | 100334828 | 196344 |
| 42952 | 100335354 | 100336088 | 196344 |
| 42953 | 100380476 | 100381376 | |
| 42954 | 100382652 | 100383486 | |
| 42955 | 100483879 | 100485523 | 138823, 145331 |
| 42956 | 100493044 | 100494519 | 138823 |
| 42957 | 100494832 | 100497831 | 138823 |
| 42958 | 100507337 | 100509828 | 138823 |
| 42959 | 100533334 | 100534353 | 138823, 248676 |
| 42960 | 100563888 | 100565566 | 248713 |
| 42961 | 100600125 | 100601604 | |
| 42962 | 100643312 | 100645655 | |
| 42963 | 100684746 | 100685532 | |
| 42964 | 100814525 | 100815900 | 109270 |
| 42965 | 100866642 | 100868671 | 164031 |
| 42966 | 100869946 | 100871169 | 245322, 164032 |
| 42967 | 100871186 | 100872492 | 164032, 245322 |
| 42968 | 101744611 | 101745210 | 164035 |
| 42969 | 101760722 | 101761437 | 164035 |
| 42970 | 101816293 | 101817517 | |
| 42971 | 101850126 | 101850937 | |
| 42972 | 101898624 | 101899344 | |
| 42973 | 101907030 | 101908236 | |
| 42974 | 101957821 | 101959647 | 138814 |
| 42975 | 102090003 | 102090996 | 138814 |
| 42976 | 102104655 | 102105316 | 138814 |
| 42977 | 102112293 | 102113210 | 138814 |
| 42978 | 102120098 | 102120726 | 138814 |
| 42979 | 102132207 | 102132728 | 138814 |
| 42980 | 102206589 | 102207190 | 138814 |
| 42981 | 102266749 | 102270322 | 254531, 138814 |
| 42982 | 102276921 | 102279356 | |
| 42983 | 102314218 | 102314872 | |
| 42984 | 103264758 | 103267242 | 138821 |
| 42985 | 103277662 | 103278512 | 138821 |
| 42986 | 103348451 | 103349785 | 138821, 248161 |
| 42987 | 103350280 | 103351232 | 138821, 248161 |
| 42988 | 103359507 | 103361862 | 248161 |
| 42989 | 103362899 | 103364429 | 248161 |
| 42990 | 103421224 | 103423804 | 260651, 109320 |
| 42991 | 103540487 | 103543948 | |
| 42992 | 103608754 | 103610093 | 109323 |
| 42993 | 103633894 | 103635369 | 109323 |
| 42994 | 103637798 | 103639813 | 109323 |
| 42995 | 103681020 | 103682872 | 109323 |
| 42996 | 103699887 | 103700382 | |
| 42997 | 103701481 | 103702564 | |
| 42998 | 103745420 | 103750715 | 246560, 109332 |
| 42999 | 103789140 | 103791490 | 145354, 109332 |
| 43000 | 103799418 | 103800978 | 145354 |
| 43001 | 103939792 | 103941714 | 164038, 164037 |
| 43002 | 103988489 | 103990291 | 164038 |
| 43003 | 103995886 | 103998727 | 164038 |
| 43004 | 104018293 | 104019419 | 164039 |
| 43005 | 104020005 | 104021443 | 164039 |
| 43006 | 104119284 | 104120138 | 138778 |
| 43007 | 104343470 | 104344905 | 248740 |
| 43008 | 104345882 | 104347098 | 248740 |
| 43009 | 105049059 | 105050891 | |
| 43010 | 105411527 | 105413821 | 245384, 272082, 168772 |
| 43011 | 105414957 | 105416818 | 168772, 245384 |
| 43012 | 105516904 | 105517774 | 245384 |
| 43013 | 105648158 | 105650590 | 248242 |
| 43014 | 105668404 | 105669444 | 248242 |
| 43015 | 105836423 | 105837439 | 248242, 248373 |
| 43016 | 106067152 | 106069428 | 168769 |
| 43017 | 106079953 | 106080451 | 168769 |
| 43018 | 106100439 | 106101797 | 168769 |
| 43019 | 106107818 | 106108474 | 168769 |
| 43020 | 106338539 | 106339314 | 138777 |
| 43021 | 106343376 | 106343837 | 138777 |
| 43022 | 106392662 | 106395598 | 138777 |
| 43023 | 106507014 | 106508345 | 236699 |
| 43024 | 106514434 | 106516789 | 236699 |
| 43025 | 106519211 | 106520311 | 236699 |
| 43026 | 106526456 | 106527209 | 236699 |
| 43027 | 106541805 | 106542579 | 236699 |
| 43028 | 106545079 | 106546396 | 236699 |
| 43029 | 106591735 | 106592354 | 236699 |
| 43030 | 106628790 | 106630422 | 138780, 236699, 138785 |
| 43031 | 107208329 | 107209108 | 145348 |
| 43032 | 107236215 | 107238873 | 164022, 145348 |
| 43033 | 107286703 | 107287411 | 250298 |
| 43034 | 107342755 | 107344145 | |
| 43035 | 108104142 | 108104920 | 155011 |
| 43036 | 108554182 | 108554817 | 138801 |
| 43037 | 108604975 | 108605433 | 138801 |
| 43038 | 108610685 | 108611749 | 138801 |
| 43039 | 108640734 | 108642034 | 138801 |
| 43040 | 108744670 | 108748127 | 164023 |
| 43041 | 108759022 | 108760442 | 164023 |
| 43042 | 108774091 | 108775083 | 164023 |
| 43043 | 108783859 | 108786051 | 245293, 164023 |
| 43044 | 108816617 | 108818549 | 245293, 164023 |
| 43045 | 108851875 | 108853492 | 155016, 245293 |
| 43046 | 108909303 | 108912251 | 138796 |
| 43047 | 108928954 | 108931362 | 138796 |
| 43048 | 109540983 | 109543044 | 109475, 234492 |
| 43049 | 109615100 | 109616036 | |
| 43050 | 109651625 | 109652331 | |
| 43051 | 109682853 | 109686236 | 164089 |
| 43052 | 109686926 | 109687877 | |
| 43053 | 109695813 | 109696563 | |
| 43054 | 109712321 | 109712961 | |
| 43055 | 109715131 | 109715880 | |
| 43056 | 109749812 | 109750400 | 188517 |
| 43057 | 110353965 | 110357429 | 138802, 247950 |
| 43058 | 110481081 | 110482699 | 005059 |
| 43059 | 110623511 | 110625292 | 138794 |
| 43060 | 110649845 | 110652090 | 123739 |
| 43061 | 110722003 | 110724069 | 205403 |
| 43062 | 110736448 | 110737911 | 109534, 272795 |
| 43063 | 110866217 | 110866663 | 138798 |
| 43064 | 110929503 | 110930248 | 138798 |
| 43065 | 110975679 | 110977583 | 170522 |
| 43066 | 111027386 | 111029055 | 170522 |
| 43067 | 111052915 | 111055099 | 170522 |
| 43068 | 111079938 | 111081729 | 170522 |
| 43069 | 111083613 | 111087720 | 170522 |
| 43070 | 111114712 | 111116082 | 170522 |
| 43071 | 111116551 | 111121139 | 170522 |
| 43072 | 111170862 | 111171552 | |
| 43073 | 111268787 | 111269833 | |
| 43074 | 111269952 | 111270694 | |
| 43075 | 111315909 | 111316462 | 138792 |
| 43076 | 111370903 | 111371678 | 138792 |
| 43077 | 111396985 | 111398358 | 138792 |
| 43078 | 111408905 | 111409392 | 138792 |
| 43079 | 111436821 | 111437983 | 250511, 138792 |
| 43080 | 111454599 | 111455649 | 138792 |
| 43081 | 111461613 | 111462947 | 138792 |
| 43082 | 111790976 | 111791513 | |
| 43083 | 113004055 | 113005728 | |
| 43084 | 113033454 | 113035308 | |
| 43085 | 113061593 | 113062110 | |
| 43086 | 113066382 | 113068182 | 174749 |
| 43087 | 113151554 | 113154083 | 138660, 260526 |
| 43088 | 113171473 | 113172561 | 138660 |
| 43089 | 113177963 | 113178732 | 138660 |
| 43090 | 113205929 | 113207797 | 073331, 145365 |
| 43091 | 113218123 | 113219188 | 073331 |
| 43092 | 113557968 | 113559298 | 174720, 138658 |
| 43093 | 113990249 | 113991386 | 145362, 248152 |
| 43094 | 114030173 | 114031023 | 145362 |
| 43095 | 114062915 | 114063657 | 145362 |
| 43096 | 114066784 | 114067622 | 145362 |
| 43097 | 114067829 | 114069415 | 145362 |
| 43098 | 114325044 | 114326741 | |
| 43099 | 114327250 | 114328507 | |
| 43100 | 114331786 | 114333184 | |
| 43101 | 114354340 | 114356390 | |
| 43102 | 114366344 | 114368557 | |
| 43103 | 114388145 | 114391757 | 145349 |
| 43104 | 114420822 | 114421246 | 145349 |
| 43105 | 114468567 | 114469282 | 145349 |
| 43106 | 114495629 | 114496104 | 145349 |
| 43107 | 114561908 | 114562785 | 145349 |
| 43108 | 114566826 | 114567558 | 145349 |
| 43109 | 114580009 | 114580767 | 145349 |
| 43110 | 114587829 | 114588450 | 145349 |
| 43111 | 114680487 | 114684985 | 145349 |
| 43112 | 114705439 | 114706499 | |
| 43113 | 114822709 | 114823598 | 180801 |
| 43114 | 114879483 | 114884241 | 180801 |
| 43115 | 114892492 | 114893311 | 180801 |
| 43116 | 114896626 | 114897477 | 180801 |
| 43117 | 114899619 | 114901774 | 180801 |
| 43118 | 114926838 | 114927804 | |
| 43119 | 114940795 | 114941335 | |
| 43120 | 114978234 | 114979597 | |
| 43121 | 115208294 | 115208867 | |
| 43122 | 116765042 | 116766142 | |
| 43123 | 117783663 | 117784255 | |
| 43124 | 119198047 | 119204554 | 269893, 164099 |
| 43125 | 119506598 | 119508266 | |
| 43126 | 119605892 | 119607356 | 145388 |
| 43127 | 119639729 | 119640402 | |
| 43128 | 119678376 | 119679566 | 150961 |
| 43129 | 119731710 | 119733576 | 150961 |
| 43130 | 119741950 | 119745101 | 150961 |
| 43131 | 119747508 | 119749331 | 150961 |
| 43132 | 119755942 | 119758504 | 150961 |
| 43133 | 119778886 | 119779395 | |
| 43134 | 119805840 | 119806379 | |
| 43135 | 119838636 | 119840709 | 172403 |
| 43136 | 119889594 | 119890903 | 172403 |
| 43137 | 119969512 | 119970210 | 172403 |
| 43138 | 120001198 | 120002894 | |
| 43139 | 120023820 | 120025482 | |
| 43140 | 120132368 | 120134942 | 145390, 178636 |
| 43141 | 120219931 | 120222578 | 164096 |
| 43142 | 120399635 | 120400453 | 245958 |
| 43143 | 120438595 | 120439949 | 245958, 138735 |
| 43144 | 120445604 | 120447746 | 245958, 138735 |
| 43145 | 120548160 | 120549454 | 138735 |
| 43146 | 120549676 | 120550875 | 138735 |
| 43147 | 120569479 | 120570068 | |
| 43148 | 120604640 | 120605212 | |
| 43149 | 120628281 | 120629141 | |
| 43150 | 120650128 | 120652019 | |
| 43151 | 120652201 | 120652722 | |
| 43152 | 120987836 | 120989545 | 250938, 164109 |
| 43153 | 121955196 | 121955646 | |
| 43154 | 122610149 | 122613815 | 164111 |
| 43155 | 122615897 | 122619722 | 164111 |
| 43156 | 122632227 | 122633533 | |
| 43157 | 122721650 | 122722805 | 123737 |
| 43158 | 122744679 | 122745537 | 145386 |
| 43159 | 123072837 | 123074460 | 138688 |
| 43160 | 123653307 | 123654803 | 181004, 224786 |
| 43161 | 123684936 | 123689036 | |
| 43162 | 123702699 | 123709693 | |
| 43163 | 123717511 | 123720436 | |
| 43164 | 123740427 | 123742259 | |
| 43165 | 123747406 | 123750001 | 138685, 253069 |
| 43166 | 123763648 | 123764552 | 138685 |
| 43167 | 123794943 | 123796418 | 138685 |
| 43168 | 123819402 | 123820007 | 170917 |
| 43169 | 123830683 | 123831254 | 170917 |
| 43170 | 123841120 | 123844852 | 145375, 170917 |
| 43171 | 123985532 | 123986074 | 145375 |
| 43172 | 124272659 | 124274084 | |
| 43173 | 124317543 | 124321221 | 164056 |
| 43174 | 124333999 | 124335079 | |
| 43175 | 124399881 | 124401391 | |
| 43176 | 124466452 | 124467912 | |
| 43177 | 124475674 | 124477805 | |
| 43178 | 124520030 | 124521634 | |
| 43179 | 125451205 | 125452396 | 261083 |
| 43180 | 125632584 | 125634940 | 151458 |
| 43181 | 126235301 | 126237206 | |
| 43182 | 126242671 | 126246030 | 196159 |
| 43183 | 126289627 | 126290146 | 196159 |
| 43184 | 126310618 | 126311832 | 196159 |
| 43185 | 126640791 | 126641678 | 250149 |
| 43186 | 128454400 | 128454910 | |
| 43187 | 128553650 | 128554756 | 164066 |
| 43188 | 128630068 | 128630591 | 164066 |
| 43189 | 128702648 | 128705460 | 164070 |
| 43190 | 128801623 | 128802975 | 142731 |
| 43191 | 128885664 | 128887428 | 164074, 164073 |
| 43192 | 128896199 | 128897047 | 164074 |
| 43193 | 128981123 | 128984208 | 138709 |
| 43194 | 128986696 | 128987305 | 138709 |
| 43195 | 129083157 | 129086044 | 138709 |
| 43196 | 129161746 | 129163760 | |
| 43197 | 129205452 | 129210652 | 164040 |
| 43198 | 129219977 | 129220643 | 251432 |
| 43199 | 129231259 | 129232014 | 251432 |
| 43200 | 129240921 | 129241421 | 251432 |
| 43201 | 129270808 | 129271486 | 251432 |
| 43202 | 129307982 | 129308705 | 251432 |
| 43203 | 129348906 | 129349646 | 251432 |
| 43204 | 129374733 | 129376910 | 251432 |
| 43205 | 129437765 | 129440172 | 251432 |
| 43206 | 129441788 | 129443404 | |
| 43207 | 129448715 | 129451205 | |
| 43208 | 129472301 | 129476746 | 273077 |
| 43209 | 129491013 | 129496530 | 248187 |
| 43210 | 129505053 | 129506109 | 248802 |
| 43211 | 129521813 | 129523865 | 248802 |
| 43212 | 129556273 | 129557273 | |
| 43213 | 129703201 | 129705049 | |
| 43214 | 129714608 | 129715799 | |
| 43215 | 129717829 | 129719209 | |
| 43216 | 129730124 | 129734355 | 077684 |
| 43217 | 129744083 | 129744916 | 077684 |
| 43218 | 130013896 | 130015071 | 151470, 151466 |
| 43219 | 130017002 | 130017878 | 151470 |
| 43220 | 130110573 | 130111783 | |
| 43221 | 130114029 | 130115254 | |
| 43222 | 130159836 | 130160837 | |
| 43223 | 130263323 | 130265812 | |
| 43224 | 130993935 | 130994954 | |
| 43225 | 137846969 | 137849468 | 248869 |
| 43226 | 139120390 | 139121572 | 151012 |
| 43227 | 139818807 | 139819568 | 250195 |
| 43228 | 139860849 | 139861832 | 250195 |
| 43229 | 139874945 | 139875738 | 250195 |
| 43230 | 139888421 | 139889057 | 250195 |
| 43231 | 139902941 | 139903833 | 250195 |
| 43232 | 139934549 | 139938373 | 151014 |
| 43233 | 139938597 | 139939418 | 264953, 151014 |
| 43234 | 139948796 | 139949989 | 109381, 151014 |
| 43235 | 140003261 | 140006500 | 109381 |
| 43236 | 140096805 | 140100030 | 109381 |
| 43237 | 140163838 | 140165588 | |
| 43238 | 140187511 | 140188434 | 109390, 137463 |
| 43239 | 140215897 | 140217369 | 109390 |
| 43240 | 140221294 | 140223659 | 164134, 109390 |
| 43241 | 140373975 | 140376033 | 172007, 273247 |
| 43242 | 140377016 | 140378973 | 172007 |
| 43243 | 140417668 | 140418522 | 145391 |
| 43244 | 140476063 | 140480786 | 272717, 145391 |
| 43245 | 140513743 | 140514910 | 145391 |
| 43246 | 140520791 | 140521509 | 145391 |
| 43247 | 140561920 | 140563040 | |
| 43248 | 140577610 | 140579373 | |
| 43249 | 140586341 | 140588754 | 085871 |
| 43250 | 140597618 | 140598813 | 085871 |
| 43251 | 140609511 | 140611187 | 085871 |
| 43252 | 140613043 | 140614483 | 085871 |
| 43253 | 140655178 | 140657529 | 196782, 085871 |
| 43254 | 140660868 | 140662264 | 085871, 196782 |
| 43255 | 140719489 | 140720206 | 196782 |
| 43256 | 140735450 | 140736303 | 196782 |
| 43257 | 140762520 | 140763666 | 196782 |
| 43258 | 140828129 | 140828952 | 196782 |
| 43259 | 140896798 | 140897602 | 196782 |
| 43260 | 140939871 | 140943305 | 196782 |
| 43261 | 140958469 | 140958790 | 196782 |
| 43262 | 140982126 | 140983193 | 196782 |
| 43263 | 141071085 | 141076168 | 196782 |
| 43264 | 141148360 | 141148883 | |
| 43265 | 141149699 | 141150944 | |
| 43266 | 141159081 | 141160392 | |
| 43267 | 141172089 | 141174805 | |
| 43268 | 141176720 | 141179346 | 153130 |
| 43269 | 141283857 | 141284646 | 196951, 153130 |
| 43270 | 141293837 | 141295722 | 196951, 153130 |
| 43271 | 141347637 | 141349662 | 153132 |
| 43272 | 141444587 | 141446191 | 179387 |
| 43273 | 141556694 | 141557251 | 109436 |
| 43274 | 141562240 | 141563523 | 249661, 109436 |
| 43275 | 141566737 | 141567864 | 109436 |
| 43276 | 141587971 | 141588705 | 109436 |
| 43277 | 141645418 | 141646594 | 109436 |
| 43278 | 141647517 | 141648831 | 109436 |
| 43279 | 141649096 | 141649850 | 109436 |
| 43280 | 141663546 | 141664113 | 109436 |
| 43281 | 141676582 | 141678799 | 273472, 109436 |
| 43282 | 141927551 | 141927959 | 170153 |
| 43283 | 142116238 | 142116863 | 170153 |
| 43284 | 142141702 | 142142985 | 109445 |
| 43285 | 142254852 | 142255478 | |
| 43286 | 142268837 | 142269787 | |
| 43287 | 142271016 | 142272002 | |
| 43288 | 142557180 | 142558842 | 164136 |
| 43289 | 142563173 | 142565728 | 164136 |
| 43290 | 142599626 | 142600910 | 164136 |
| 43291 | 142634979 | 142635685 | 164136 |
| 43292 | 142770504 | 142771374 | |
| 43293 | 142774435 | 142775007 | |
| 43294 | 143186472 | 143187694 | 109452 |
| 43295 | 143516335 | 143517221 | 109452, 249806 |
| 43296 | 144104762 | 144108628 | 170185, 250326 |
| 43297 | 144146134 | 144146867 | |
| 43298 | 144256550 | 144259866 | 109458, 178972 |
| 43299 | 144276687 | 144277340 | 109458 |
| 43300 | 144307914 | 144308437 | 109458 |
| 43301 | 144310607 | 144311646 | 109458 |
| 43302 | 144433822 | 144436306 | 153147, 245112 |
| 43303 | 146018454 | 146020693 | 164163, 164162 |
| 43304 | 146098360 | 146102623 | 164164 |
| 43305 | 146260196 | 146261045 | 272727 |
| 43306 | 146338776 | 146339441 | |
| 43307 | 146341291 | 146342710 | |
| 43308 | 146360407 | 146361144 | |
| 43309 | 146361265 | 146362058 | |
| 43310 | 146402185 | 146404779 | 170365 |
| 43311 | 146418706 | 146419326 | 250582, 170365 |
| 43312 | 146428549 | 146429897 | 170365 |
| 43313 | 146466309 | 146467470 | 170365 |
| 43314 | 146539306 | 146542189 | 151611 |
| 43315 | 146561388 | 146561827 | 151611 |
| 43316 | 146584218 | 146584713 | |
| 43317 | 146653452 | 146658237 | 237136 |
| 43318 | 146706521 | 146707344 | 151612 |
| 43319 | 146724995 | 146727422 | 151612 |
| 43320 | 146728789 | 146730515 | 151612 |
| 43321 | 146857374 | 146858601 | 151612 |
| 43322 | 146858966 | 146860334 | 151612 |
| 43323 | 147096507 | 147097824 | 164167 |
| 43324 | 147300819 | 147301278 | 120519 |
| 43325 | 147416339 | 147417130 | 120519 |
| 43326 | 147441844 | 147444278 | 120519 |
| 43327 | 148604314 | 148606680 | 164169 |
| 43328 | 148652463 | 148654454 | 071205 |
| 43329 | 148657514 | 148658027 | 071205 |
| 43330 | 148752415 | 148754010 | 071205 |
| 43331 | 148785713 | 148786207 | 071205 |
| 43332 | 148850981 | 148851451 | 071205 |
| 43333 | 149124209 | 149125079 | 250354, 151623 |
| 43334 | 149174833 | 149175620 | 151623 |
| 43335 | 149191695 | 149192431 | 151623 |
| 43336 | 149362574 | 149364315 | 151623 |
| 43337 | 149364676 | 149367045 | 151623 |
| 43338 | 149770765 | 149772220 | |
| 43339 | 149775236 | 149775935 | |
| 43340 | 150325170 | 150325836 | 234828 |
| 43341 | 150330082 | 150330975 | 234828 |
| 43342 | 150414241 | 150415510 | 234828 |
| 43343 | 150452814 | 150453437 | 234828 |
| 43344 | 150918985 | 150919773 | |
| 43345 | 151040424 | 151041192 | 170390 |
| 43346 | 151223620 | 151224139 | 198589 |
| 43347 | 151422083 | 151422538 | 198589 |
| 43348 | 151435789 | 151436637 | 198589 |
| 43349 | 151438898 | 151440140 | 198589 |
| 43350 | 151504118 | 151505589 | 181541, 198589 |
| 43351 | 151644040 | 151644659 | 198589 |
| 43352 | 151689168 | 151691864 | 198589 |
| 43353 | 151936108 | 151938221 | 198589 |
| 43354 | 152020043 | 152021961 | 145425 |
| 43355 | 152105668 | 152106697 | 109686 |
| 43356 | 152126214 | 152126716 | 109686 |
| 43357 | 152146784 | 152147758 | 109686 |
| 43358 | 152169411 | 152170148 | 109686 |
| 43359 | 152172975 | 152173575 | 109686 |
| 43360 | 152234249 | 152238431 | 109686 |
| 43361 | 152244732 | 152247615 | 109686 |
| 43362 | 152329662 | 152331233 | 164142, 251611 |
| 43363 | 152338612 | 152340833 | 164142 |
| 43364 | 152355520 | 152356231 | 164142 |
| 43365 | 152405695 | 152407354 | 164142 |
| 43366 | 152665509 | 152666411 | 059691 |
| 43367 | 152681249 | 152682605 | 059691 |
| 43368 | 153277468 | 153278064 | 109670 |
| 43369 | 153402069 | 153402472 | 109670 |
| 43370 | 153406230 | 153407646 | 109670 |
| 43371 | 153407996 | 153408838 | 109670 |
| 43372 | 153455693 | 153458929 | 268471, 109670 |
| 43373 | 153500225 | 153500773 | |
| 43374 | 153600531 | 153601338 | 170006 |
| 43375 | 153700440 | 153701986 | 164144, 169989 |
| 43376 | 153732003 | 153732387 | 164144 |
| 43377 | 153770769 | 153772905 | 164144 |
| 43378 | 153878126 | 153879228 | 137460 |
| 43379 | 153988397 | 153989221 | 249022 |
| 43380 | 154036096 | 154037614 | |
| 43381 | 154064010 | 154065429 | |
| 43382 | 154143344 | 154144969 | 109654 |
| 43383 | 154154784 | 154155456 | 109654 |
| 43384 | 154170129 | 154170815 | 109654 |
| 43385 | 154190694 | 154191166 | 109654 |
| 43386 | 154195709 | 154196681 | 109654 |
| 43387 | 154265405 | 154267236 | 121211 |
| 43388 | 154353859 | 154355373 | |
| 43389 | 154386580 | 154389011 | 121210 |
| 43390 | 154392308 | 154393429 | 121210 |
| 43391 | 154407106 | 154408430 | 121210 |
| 43392 | 154418266 | 154418867 | 121210 |
| 43393 | 154434004 | 154435706 | 121210 |
| 43394 | 154439005 | 154440721 | 121210 |
| 43395 | 154444260 | 154445634 | 121210 |
| 43396 | 154450623 | 154451475 | 121210 |
| 43397 | 154453525 | 154454145 | 121210 |
| 43398 | 154485392 | 154486796 | 121210 |
| 43399 | 154487012 | 154488695 | 121210 |
| 43400 | 154575964 | 154577667 | 250771 |
| 43401 | 154582633 | 154583080 | 250771 |
| 43402 | 154597751 | 154598645 | 250771 |
| 43403 | 154605068 | 154606075 | |
| 43404 | 154965170 | 154965856 | |
| 43405 | 155337802 | 155338500 | 197410 |
| 43406 | 155470744 | 155472392 | 171566 |
| 43407 | 155480434 | 155487531 | 171564 |
| 43408 | 155490032 | 155490946 | 171564 |
| 43409 | 155493910 | 155495488 | |
| 43410 | 155498132 | 155499506 | |
| 43411 | 155506370 | 155513558 | 171560 |
| 43412 | 155516880 | 155517570 | |
| 43413 | 155517845 | 155520050 | |
| 43414 | 155532118 | 155534803 | 171557 |
| 43415 | 155538542 | 155540364 | |
| 43416 | 155546936 | 155547510 | |
| 43417 | 155547833 | 155549103 | 121207 |
| 43418 | 155579888 | 155580627 | 121207 |
| 43419 | 155580719 | 155581922 | 121207 |
| 43420 | 155604908 | 155605743 | 121207 |
| 43421 | 156587839 | 156589101 | 164116 |
| 43422 | 156624314 | 156626082 | 164116 |
| 43423 | 156679807 | 156680658 | 061918 |
| 43424 | 156699154 | 156700286 | 061918 |
| 43425 | 156770230 | 156770726 | 256394 |
| 43426 | 156775410 | 156776694 | 151790, 256394 |
| 43427 | 156802492 | 156803541 | 151790 |
| 43428 | 156804867 | 156805511 | 151790 |
| 43429 | 156809856 | 156811308 | 151790 |
| 43430 | 156824557 | 156825087 | 151790 |
| 43431 | 156826362 | 156828987 | 151790 |
| 43432 | 156845396 | 156846275 | 256043 |
| 43433 | 156873210 | 156876882 | 256043 |
| 43434 | 157111017 | 157113603 | |
| 43435 | 157250573 | 157252131 | |
| 43436 | 157691739 | 157697499 | 145431 |
| 43437 | 157700882 | 157701401 | 145431 |
| 43438 | 157851816 | 157852901 | 145431 |
| 43439 | 157866555 | 157869244 | 145431 |
| 43440 | 157869335 | 157871985 | 145431 |
| 43441 | 157872045 | 157874057 | 145431 |
| 43442 | 157889403 | 157894177 | 250622, 145431 |
| 43443 | 157897078 | 157897834 | |
| 43444 | 157919711 | 157921280 | |
| 43445 | 157924364 | 157926681 | |
| 43446 | 159131014 | 159132923 | 164124 |
| 43447 | 159220529 | 159221047 | |
| 43448 | 159592354 | 159594419 | 171503, 205208 |
| 43449 | 159643244 | 159645310 | 171497 |
| 43450 | 159689068 | 159691203 | 052795 |
| 43451 | 159703455 | 159704864 | 052795 |
| 43452 | 159713546 | 159715076 | 052795 |
| 43453 | 159716013 | 159723495 | 052795 |
| 43454 | 159730546 | 159733223 | 052795 |
| 43455 | 159735306 | 159736128 | 052795 |
| 43456 | 159744331 | 159748936 | 052795 |
| 43457 | 159779118 | 159780456 | 052795 |
| 43458 | 159823748 | 159824290 | 164123, 052795 |
| 43459 | 159866717 | 159867358 | 164123 |
| 43460 | 159916011 | 159917303 | 164123 |
| 43461 | 159917581 | 159918893 | 164123 |
| 43462 | 159931190 | 159932818 | 164123 |
| 43463 | 159935859 | 159936585 | 164123 |
| 43464 | 159967862 | 159968932 | |
| 43465 | 159969051 | 159970011 | |
| 43466 | 159981194 | 159981665 | |
| 43467 | 159992356 | 159993371 | |
| 43468 | 160023272 | 160026585 | 109756 |
| 43469 | 160062267 | 160062832 | 109756 |
| 43470 | 160092421 | 160092831 | 109756 |
| 43471 | 160140858 | 160141803 | 109756 |
| 43472 | 160145472 | 160146127 | 109756 |
| 43473 | 160148878 | 160149492 | 109756 |
| 43474 | 160169690 | 160170660 | 109756 |
| 43475 | 160179690 | 160180969 | 109756 |
| 43476 | 160216653 | 160218822 | 216089, 109756 |
| 43477 | 160219134 | 160220088 | 109756 |
| 43478 | 160419547 | 160420693 | |
| 43479 | 160782023 | 160782611 | |
| 43480 | 162103870 | 162104687 | |
| 43481 | 163603645 | 163607052 | |
| 43482 | 164086913 | 164088753 | 145414 |
| 43483 | 164415001 | 164417048 | 198498 |
| 43484 | 165383018 | 165383966 | |
| 43485 | 166033170 | 166034764 | 170088 |
| 43486 | 166079691 | 166080526 | 170088 |
| 43487 | 166128042 | 166130002 | 109466, 170088 |
| 43488 | 166143135 | 166144122 | 109466 |
| 43489 | 166246222 | 166250770 | 052802 |
| 43490 | 166288218 | 166288581 | 109472 |
| 43491 | 166290601 | 166291148 | 109472 |
| 43492 | 166299919 | 166300715 | 109472 |
| 43493 | 166423494 | 166425005 | |
| 43494 | 166427086 | 166428012 | |
| 43495 | 167942431 | 167945753 | 196104 |
| 43496 | 167945839 | 167947788 | 196104 |
| 43497 | 167952033 | 167956674 | 196104 |
| 43498 | 168117410 | 168118474 | 196104 |
| 43499 | 169085479 | 169087281 | 109511 |
| 43500 | 169239029 | 169240388 | 137628 |
| 43501 | 169360878 | 169362683 | 181381 |
| 43502 | 169372071 | 169373498 | 181381 |
| 43503 | 169400865 | 169403523 | 181381 |
| 43504 | 169407531 | 169409615 | 181381 |
| 43505 | 169419336 | 169419818 | 181381, 129116 |
| 43506 | 169422397 | 169423122 | 181381, 129116 |
| 43507 | 169510031 | 169510948 | 129116 |
| 43508 | 169533433 | 169534367 | 129116 |
| 43509 | 169552558 | 169553508 | 129116 |
| 43510 | 169600512 | 169601341 | 129116 |
| 43511 | 169620212 | 169620968 | 129116 |
| 43512 | 169716475 | 169719566 | 129116 |
| 43513 | 169736827 | 169739163 | 129116 |
| 43514 | 169752378 | 169755302 | 249609, 129116 |
| 43515 | 169798751 | 169800056 | 129116, 145439 |
| 43516 | 169840688 | 169841493 | 129116, 145439 |
| 43517 | 169926280 | 169927452 | 201818, 145439 |
| 43518 | 169929399 | 169932262 | 251445, 145439 |
| 43519 | 169935424 | 169937591 | |
| 43520 | 169961603 | 169962143 | |
| 43521 | 169972832 | 169973516 | |
| 43522 | 169983411 | 169984189 | |
| 43523 | 170025052 | 170025712 | 154447 |
| 43524 | 170067640 | 170068820 | 154447 |
| 43525 | 170164756 | 170165384 | 154447 |
| 43526 | 170170170 | 170176406 | 154447 |
| 43527 | 170188097 | 170189417 | 154447 |
| 43528 | 170189510 | 170193268 | 154447 |
| 43529 | 170230379 | 170231042 | |
| 43530 | 170235424 | 170237174 | |
| 43531 | 170338170 | 170339528 | 137601 |
| 43532 | 170358918 | 170359904 | 137601 |
| 43533 | 170532543 | 170534363 | 109572, 137601 |
| 43534 | 170540583 | 170542908 | 109572 |
| 43535 | 170571265 | 170572063 | 109572 |
| 43536 | 170580937 | 170581935 | 109572 |
| 43537 | 170662642 | 170663067 | 056050 |
| 43538 | 170678753 | 170679314 | 056050 |
| 43539 | 170827063 | 170828124 | |
| 43540 | 170828731 | 170829229 | |
| 43541 | 170836592 | 170837121 | |
| 43542 | 170889503 | 170891444 | 248319 |
| 43543 | 170896190 | 170897639 | 248319 |
| 43544 | 170946568 | 170949110 | 198948 |
| 43545 | 171010383 | 171011784 | 109576 |
| 43546 | 173645667 | 173648004 | 174473 |
| 43547 | 173903074 | 173904482 | 174473 |
| 43548 | 174254525 | 174256672 | 164104 |
| 43549 | 174290921 | 174292484 | 164105, 272870 |
| 43550 | 175181222 | 175182614 | 164117 |
| 43551 | 175204067 | 175206297 | 164118, 164117 |
| 43552 | 175381302 | 175383955 | |
| 43553 | 175411417 | 175412317 | 164120 |
| 43554 | 175442690 | 175444714 | 164120 |
| 43555 | 175459114 | 175459988 | 251584, 250596 |
| 43556 | 175476813 | 175478247 | |
| 43557 | 175788698 | 175789736 | 168594 |
| 43558 | 176191277 | 176192897 | |
| 43559 | 176194988 | 176196398 | |
| 43560 | 176458788 | 176459374 | |
| 43561 | 176460216 | 176463253 | |
| 43562 | 177240428 | 177242592 | 129128, 248980 |
| 43563 | 178332928 | 178333687 | |
| 43564 | 178362216 | 178364713 | 038002 |
| 43565 | 178608146 | 178608756 | 251416 |
| 43566 | 179243624 | 179244475 | |
| 43567 | 179331918 | 179332749 | |
| 43568 | 179334364 | 179335640 | |
| 43569 | 183133428 | 183134090 | 218336 |
| 43570 | 183145292 | 183145754 | 218336 |
| 43571 | 183267825 | 183268602 | 218336 |
| 43572 | 183369716 | 183370458 | 218336 |
| 43573 | 183727441 | 183728063 | |
| 43574 | 183818763 | 183820073 | 129187 |
| 43575 | 183837356 | 183839633 | 129187 |
| 43576 | 183843543 | 183844322 | |
| 43577 | 183995431 | 183996357 | |
| 43578 | 184001447 | 184002793 | |
| 43579 | 184015699 | 184016540 | 272784 |
| 43580 | 184018550 | 184021732 | 151718, 251359 |
| 43581 | 184023080 | 184023740 | 151718 |
| 43582 | 184028432 | 184029056 | 151718 |
| 43583 | 184031539 | 184033303 | 151718 |
| 43584 | 184039190 | 184040737 | 151718 |
| 43585 | 184070844 | 184071687 | 151718 |
| 43586 | 184075858 | 184076621 | 151718 |
| 43587 | 184091934 | 184093712 | 151718 |
| 43588 | 184181504 | 184182183 | 151718 |
| 43589 | 184254894 | 184256058 | |
| 43590 | 184319231 | 184320228 | |
| 43591 | 184364416 | 184367020 | 168564 |
| 43592 | 184389144 | 184390914 | |
| 43593 | 184424522 | 184427813 | 168556, 232648 |
| 43594 | 184492405 | 184493035 | |
| 43595 | 184538335 | 184540972 | |
| 43596 | 184557508 | 184559438 | |
| 43597 | 184579510 | 184581277 | 168538, 182552 |
| 43598 | 184621355 | 184621957 | 168538 |
| 43599 | 184642174 | 184643306 | |
| 43600 | 184643519 | 184644380 | |
| 43601 | 184826119 | 184828681 | 173320 |
| 43602 | 184848039 | 184848522 | 173320 |
| 43603 | 184861029 | 184861897 | 173320 |
| 43604 | 184909229 | 184909877 | 248206, 173320 |
| 43605 | 184985749 | 184986538 | |
| 43606 | 184987893 | 184988729 | |
| 43607 | 185025335 | 185026464 | 164303 |
| 43608 | 185088910 | 185090146 | 164303 |
| 43609 | 185123795 | 185124154 | 164303 |
| 43610 | 185153156 | 185154601 | |
| 43611 | 185185209 | 185185806 | |
| 43612 | 185208507 | 185209437 | |
| 43613 | 185268522 | 185270835 | 180712 |
| 43614 | 185302548 | 185306785 | 249096 |
| 43615 | 185321450 | 185322939 | 168310 |
| 43616 | 185338173 | 185339450 | 168310 |
| 43617 | 185353736 | 185355632 | 168310 |
| 43618 | 185366025 | 185366489 | 168310 |
| 43619 | 185392865 | 185396974 | 270426, 271646, 168310 |
| 43620 | 185400194 | 185401267 | |
| 43621 | 185457874 | 185460078 | 271538 |
| 43622 | 185462436 | 185464047 | |
| 43623 | 185468094 | 185469175 | |
| 43624 | 185568876 | 185571514 | 164306, 164305 |
| 43625 | 185587613 | 185588402 | 164306 |
| 43626 | 185654655 | 185655891 | 151725 |
| 43627 | 185666853 | 185669040 | |
| 43628 | 185696924 | 185697717 | 151726 |
| 43629 | 185713280 | 185716705 | 151726 |
| 43630 | 185722758 | 185725691 | 151726 |
| 43631 | 185726337 | 185727824 | 151726 |
| 43632 | 185728983 | 185729923 | 151726 |
| 43633 | 185732648 | 185735463 | 251139, 151726 |
| 43634 | 185735620 | 185737557 | 151726, 251139 |
| 43635 | 185740644 | 185741756 | 151726, 251139 |
| 43636 | 185745291 | 185748453 | 151726 |
| 43637 | 185805537 | 185806503 | |
| 43638 | 185817760 | 185821657 | 249173 |
| 43639 | 185881441 | 185882137 | |
| 43640 | 186029578 | 186030203 | |
| 43641 | 186033057 | 186033850 | |
| 43642 | 186036990 | 186037639 | |
| 43643 | 186063368 | 186064955 | 151729 |
| 43644 | 186124315 | 186125512 | 109762, 164323 |
| 43645 | 186316354 | 186318600 | 186352, 109771 |
| 43646 | 186346186 | 186347886 | 205129, 109775 |
| 43647 | 186392400 | 186392981 | 249679, 168491 |
| 43648 | 186424884 | 186426631 | 154553 |
| 43649 | 186428998 | 186429670 | 154553 |
| 43650 | 186434576 | 186435771 | 154553 |
| 43651 | 186512759 | 186513369 | 233110, 154556 |
| 43652 | 186572348 | 186572817 | 154556 |
| 43653 | 186602642 | 186605205 | 154556 |
| 43654 | 186620737 | 186622644 | 154556 |
| 43655 | 186628077 | 186635971 | 207497, 154556 |
| 43656 | 186639241 | 186644335 | 154556 |
| 43657 | 186658671 | 186660506 | 154556 |
| 43658 | 186662576 | 186664422 | 154556 |
| 43659 | 186693384 | 186697748 | 154556 |
| 43660 | 186721403 | 186722096 | 154556 |
| 43661 | 186729571 | 186735374 | 154556 |
| 43662 | 186738315 | 186739182 | 154556 |
| 43663 | 186751306 | 186755536 | 154556 |
| 43664 | 186757202 | 186759734 | 154556 |
| 43665 | 186760060 | 186761096 | 154556 |
| 43666 | 186786506 | 186787925 | 154556 |
| 43667 | 186795415 | 186796981 | 154556 |
| 43668 | 186823683 | 186824345 | 154556 |
| 43669 | 186950375 | 186951284 | |
| 43670 | 186988939 | 186991145 | 164342 |
| 43671 | 187025568 | 187026974 | 109794 |
| 43672 | 187064872 | 187066984 | 109794 |
| 43673 | 187082304 | 187082771 | 109794 |
| 43674 | 187087865 | 187088805 | 109794 |
| 43675 | 187111109 | 187114243 | 269302, 145476 |
| 43676 | 187147868 | 187150386 | 164344 |
| 43677 | 187180052 | 187184264 | |
| 43678 | 187186621 | 187189007 | 088926 |
| 43679 | 187564331 | 187566753 | 083857 |
| 43680 | 187587343 | 187589313 | 083857 |
| 43681 | 187606012 | 187607770 | 083857 |
| 43682 | 187644000 | 187651466 | 083857 |
| 43683 | 187654807 | 187658242 | |
| 43684 | 187676803 | 187677558 | |
| 43685 | 187686230 | 187687816 | |
| 43686 | 187691312 | 187692891 | |
| 43687 | 187711845 | 187712390 | |
| 43688 | 187726027 | 187727974 | |
| 43689 | 187734353 | 187735044 | |
| 43690 | 187750814 | 187751419 | |
| 43691 | 187821726 | 187822785 | 249539 |
| 43692 | 187822839 | 187826649 | |
| 43693 | 187831366 | 187832294 | |
| 43694 | 187857310 | 187858668 | |
| 43695 | 190861142 | 190862789 | 109536, 245685, 145332 |

[0573] The locations of ODSCs on Chromosome 5 are shown in Table 47.

TABLE 47
ODSC Locations on Chromosome 5

| SEQ ID NO. | Start | End | Overlapping Gene(s) |
|---|---|---|---|
| 43696 | 217722 | 219541 | 073578, 164366 |
| 43697 | 263509 | 264250 | |
| 43698 | 271008 | 272507 | 249915, 248925 |
| 43699 | 442207 | 444390 | 180104, 221990 |
| 43700 | 472050 | 474287 | 225138, 066230, 188242, |
| | | | 180104 |
| 43701 | 611711 | 613154 | 112877, 249650 |
| 43702 | 671373 | 672378 | 171368 |
| 43703 | 693299 | 693931 | 171368 |
| 43704 | 891753 | 893177 | 071539, 028310 |
| 43705 | 956830 | 958485 | |
| 43706 | 958573 | 959632 | |
| 43707 | 1004370 | 1005439 | 272347, 221244 |
| 43708 | 1089400 | 1090973 | 113504 |
| 43709 | 1098849 | 1099852 | 113504 |
| 43710 | 1101622 | 1104904 | 113504 |
| 43711 | 1105505 | 1112420 | 113504 |
| 43712 | 1119383 | 1120121 | |
| 43713 | 1129093 | 1130278 | |
| 43714 | 1140324 | 1141137 | |
| 43715 | 1174439 | 1174910 | 249201 |
| 43716 | 1181539 | 1182392 | |
| 43717 | 1182625 | 1183697 | |
| 43718 | 1185758 | 1186454 | |
| 43719 | 1315577 | 1316721 | |
| 43720 | 1337109 | 1337720 | 049656 |
| 43721 | 1344207 | 1346188 | 049656 |
| 43722 | 1385719 | 1386808 | |
| 43723 | 1515298 | 1518255 | 153395 |
| 43724 | 1522207 | 1525076 | 153395 |
| 43725 | 1535845 | 1537631 | |
| 43726 | 1568232 | 1568828 | 185986 |
| 43727 | 1594137 | 1595076 | 271119, 185986 |
| 43728 | 1633469 | 1634775 | 188002 |
| 43729 | 1799006 | 1802354 | 145494, 171421 |
| 43730 | 5063541 | 5064303 | 215231 |
| 43731 | 5135560 | 5136738 | 250579 |
| 43732 | 5363049 | 5363454 | |
| 43733 | 5421274 | 5423779 | 164151 |
| 43734 | 5795151 | 5795668 | |
| 43735 | 6158280 | 6161038 | |
| 43736 | 6162109 | 6163285 | |
| 43737 | 6274839 | 6275661 | |
| 43738 | 6280395 | 6281296 | |
| 43739 | 6377579 | 6378992 | 133398 |
| 43740 | 6470741 | 6471221 | 215218 |
| 43741 | 6472935 | 6473617 | 215218 |
| 43742 | 6495503 | 6497171 | |
| 43743 | 6508939 | 6509587 | |
| 43744 | 6583004 | 6583780 | 250056 |
| 43745 | 6590103 | 6591332 | |
| 43746 | 6591654 | 6594631 | |
| 43747 | 6595406 | 6596064 | |
| 43748 | 6632203 | 6635562 | 145545, 037474 |
| 43749 | 6636206 | 6637081 | 145545 |
| 43750 | 6659454 | 6661332 | 145545 |
| 43751 | 6711641 | 6713776 | |
| 43752 | 6714394 | 6715033 | 112941 |
| 43753 | 6736063 | 6738279 | 112941 |
| 43754 | 6759290 | 6760298 | |
| 43755 | 6765666 | 6766204 | 251365 |
| 43756 | 6766644 | 6767334 | 251365 |
| 43757 | 7851538 | 7852164 | 215217, 124275 |
| 43758 | 7868412 | 7870191 | 124279, 124275 |
| 43759 | 7877887 | 7879680 | 124275 |
| 43760 | 7887008 | 7887663 | 124275 |
| 43761 | 8456598 | 8458734 | 245729, 249159, 250037, |
| | | | 247516 |
| 43762 | 9059844 | 9060568 | 112902 |
| 43763 | 9197718 | 9198648 | 112902 |
| 43764 | 9376736 | 9377303 | 248537, 112902 |
| 43765 | 9380272 | 9380642 | 248537, 112902 |
| 43766 | 9389024 | 9389515 | 248537, 112902 |
| 43767 | 9402103 | 9402595 | 248537, 112902 |
| 43768 | 9408600 | 9410321 | 248537, 112902 |
| 43769 | 9523408 | 9524097 | 112902 |
| 43770 | 9546199 | 9547039 | 250786 |
| 43771 | 10249368 | 10251740 | 150753, 150756, 248968 |
| 43772 | 10263008 | 10264175 | 150753 |
| 43773 | 10265911 | 10268652 | 150753, 271980 |
| 43774 | 10272603 | 10273454 | |
| 43775 | 10288345 | 10290621 | 164237 |
| 43776 | 10306915 | 10308477 | 164237 |
| 43777 | 10310092 | 10311128 | |
| 43778 | 10331211 | 10332051 | |
| 43779 | 10333006 | 10334546 | |
| 43780 | 10352004 | 10355008 | 145495, 259802 |
| 43781 | 10460712 | 10461026 | 145491 |
| 43782 | 10461909 | 10462702 | 145491 |
| 43783 | 10550816 | 10553196 | |
| 43784 | 10563433 | 10564740 | 164236 |
| 43785 | 10595261 | 10596423 | 164236 |
| 43786 | 10601071 | 10602959 | 164236 |
| 43787 | 10611192 | 10611953 | 164236 |
| 43788 | 10627857 | 10628423 | 250106, 164236 |
| 43789 | 10663192 | 10664317 | |
| 43790 | 10671093 | 10672251 | |
| 43791 | 10691836 | 10692835 | 112977 |
| 43792 | 10701683 | 10703681 | 112977 |
| 43793 | 10712908 | 10713713 | 112977 |
| 43794 | 10719949 | 10720488 | 112977 |
| 43795 | 10733031 | 10733939 | 112977 |
| 43796 | 10746900 | 10749279 | 112977 |
| 43797 | 10759810 | 10762316 | 272324, 112977 |
| 43798 | 10833133 | 10833589 | |
| 43799 | 10962085 | 10962796 | |
| 43800 | 11324922 | 11325405 | 169862 |
| 43801 | 11733513 | 11734045 | 169862 |
| 43802 | 13566363 | 13568096 | |
| 43803 | 13640084 | 13640729 | |
| 43804 | 13695104 | 13695858 | 039139 |
| 43805 | 13910603 | 13911680 | 039139 |
| 43806 | 13985648 | 13986909 | |
| 43807 | 14008582 | 14010088 | |
| 43808 | 14010902 | 14012710 | |
| 43809 | 14034802 | 14040305 | |
| 43810 | 14105140 | 14111465 | |
| 43811 | 14141664 | 14150037 | 038382 |
| 43812 | 14156687 | 14157645 | 038382 |
| 43813 | 14165345 | 14166202 | 038382 |
| 43814 | 14203749 | 14206081 | 038382 |
| 43815 | 14207539 | 14210749 | 038382 |
| 43816 | 14212359 | 14214674 | 038382 |
| 43817 | 14217079 | 14218248 | 038382 |
| 43818 | 14233789 | 14234956 | 038382 |
| 43819 | 14263507 | 14272185 | 038382 |
| 43820 | 14569998 | 14570745 | |
| 43821 | 14660038 | 14660774 | |
| 43822 | 14663415 | 14666900 | 154124, 261360 |
| 43823 | 14667422 | 14669225 | 154124 |
| 43824 | 14669967 | 14673190 | 154124 |
| 43825 | 14684253 | 14686279 | 154124 |
| 43826 | 14727369 | 14729168 | 154122 |
| 43827 | 14760386 | 14761413 | 154122 |
| 43828 | 14809235 | 14811806 | 154122 |
| 43829 | 14816343 | 14818236 | 154122 |
| 43830 | 14824032 | 14825500 | 154122 |
| 43831 | 14829711 | 14831191 | 154122 |
| 43832 | 14870899 | 14873682 | 272057, 154122 |
| 43833 | 15008210 | 15010656 | |
| 43834 | 15014717 | 15015491 | |
| 43835 | 15018536 | 15019184 | |
| 43836 | 15031232 | 15031937 | |
| 43837 | 15366588 | 15367702 | |
| 43838 | 15376723 | 15377421 | |
| 43839 | 15474038 | 15474932 | |
| 43840 | 15499679 | 15501024 | 183580 |
| 43841 | 15510776 | 15511413 | 183580 |
| 43842 | 15992362 | 15994040 | |
| 43843 | 16454733 | 16457110 | 173545 |
| 43844 | 16461858 | 16462317 | 173545 |
| 43845 | 16464769 | 16468863 | 173545 |
| 43846 | 16507365 | 16510282 | 154153 |
| 43847 | 16520659 | 16522781 | 154153 |
| 43848 | 16538095 | 16541765 | 154153 |
| 43849 | 16546562 | 16547674 | 154153 |
| 43850 | 16585145 | 16585744 | 154153 |
| 43851 | 16588141 | 16589441 | 154153 |
| 43852 | 16593001 | 16594226 | 154153 |
| 43853 | 18179204 | 18180175 | |
| 43854 | 18745274 | 18746870 | 248693 |
| 43855 | 18792111 | 18792640 | |
| 43856 | 21152653 | 21153367 | |
| 43857 | 21813838 | 21814644 | 154162 |
| 43858 | 23012589 | 23014120 | 249404 |
| 43859 | 23461573 | 23462389 | |
| 43860 | 23466202 | 23467410 | |
| 43861 | 23631251 | 23631767 | |
| 43862 | 24510159 | 24511428 | 040731 |
| 43863 | 25881475 | 25882171 | |
| 43864 | 25963642 | 25965731 | |
| 43865 | 25970896 | 25971633 | |
| 43866 | 26388437 | 26389581 | 249099 |
| 43867 | 30504328 | 30506616 | |
| 43868 | 30538913 | 30539922 | |
| 43869 | 30605605 | 30606323 | |
| 43870 | 31027042 | 31029043 | |
| 43871 | 31532020 | 31533190 | 082213, 113360 |
| 43872 | 31604660 | 31605400 | |
| 43873 | 32067800 | 32068732 | 133401 |
| 43874 | 32093206 | 32093798 | 133401 |
| 43875 | 32172463 | 32175724 | 272086, 113384 |
| 43876 | 32193496 | 32194210 | |
| 43877 | 32200171 | 32202953 | |
| 43878 | 32210919 | 32211825 | |
| 43879 | 32224038 | 32224669 | |
| 43880 | 32225439 | 32226160 | |
| 43881 | 32232337 | 32234749 | 150712 |
| 43882 | 32249640 | 32250331 | 150712 |
| 43883 | 32302769 | 32303316 | 150712 |
| 43884 | 32312033 | 32313786 | 150712 |
| 43885 | 32443169 | 32445117 | 056097 |
| 43886 | 32531443 | 32532812 | 113387 |
| 43887 | 32566336 | 32567160 | 113387 |
| 43888 | 32574359 | 32576175 | 113387 |
| 43889 | 32584943 | 32587092 | 113387 |
| 43890 | 32599840 | 32600580 | 113387 |
| 43891 | 32627726 | 32629288 | |
| 43892 | 32630758 | 32631994 | |
| 43893 | 32639999 | 32641153 | |
| 43894 | 32642200 | 32643428 | |
| 43895 | 32686929 | 32688405 | |
| 43896 | 32709592 | 32711588 | 113389 |
| 43897 | 32766856 | 32769684 | 113389 |
| 43898 | 32935344 | 32935931 | 250697 |
| 43899 | 33146317 | 33149286 | 250697 |
| 43900 | 33205130 | 33206662 | 250697 |
| 43901 | 33223439 | 33224649 | 250697 |
| 43902 | 33229196 | 33229932 | 251443, 250697 |
| 43903 | 33439695 | 33442559 | 113407, 249572 |
| 43904 | 33582398 | 33582976 | 151388 |
| 43905 | 34001292 | 34002096 | 273294, 242110 |
| 43906 | 34006935 | 34009790 | 242110, 273294 |
| 43907 | 34025908 | 34026993 | 273294, 082196 |
| 43908 | 34039448 | 34041704 | 273294, 082196 |
| 43909 | 34045154 | 34047110 | 273294 |
| 43910 | 34062075 | 34062497 | 273294 |
| 43911 | 34483996 | 34490045 | |
| 43912 | 34498431 | 34500279 | |
| 43913 | 34500282 | 34504490 | |
| 43914 | 34511132 | 34511554 | |
| 43915 | 34519155 | 34520335 | |
| 43916 | 34525261 | 34526578 | |
| 43917 | 34585057 | 34589857 | |
| 43918 | 34598157 | 34600094 | |
| 43919 | 34655199 | 34658151 | 250234, 039560 |
| 43920 | 34685681 | 34687784 | 039560 |
| 43921 | 34721380 | 34721964 | 039560 |
| 43922 | 34731363 | 34732524 | 039560 |
| 43923 | 34736526 | 34737330 | 039560 |
| 43924 | 34756786 | 34757700 | 039560 |
| 43925 | 34838777 | 34840059 | 205838, 272323 |
| 43926 | 34914736 | 34916710 | 113460, 113456 |
| 43927 | 34929226 | 34931322 | 168724 |
| 43928 | 34957224 | 34957966 | 168724 |
| 43929 | 35026233 | 35026905 | 113492 |
| 43930 | 35046865 | 35048886 | 113494, 113492 |
| 43931 | 35050393 | 35051456 | 269027, 113494 |
| 43932 | 35059896 | 35061682 | 113494 |
| 43933 | 35062815 | 35064009 | 113494 |
| 43934 | 35081226 | 35081665 | 250886, 113494 |
| 43935 | 35088136 | 35088669 | 113494 |
| 43936 | 35129364 | 35130606 | 113494 |
| 43937 | 35197699 | 35198666 | 113494 |
| 43938 | 35229191 | 35230971 | 113494 |
| 43939 | 35237680 | 35238396 | |
| 43940 | 35416307 | 35417333 | |
| 43941 | 35457885 | 35459589 | |
| 43942 | 35479014 | 35480536 | |
| 43943 | 35617529 | 35618676 | 152582 |
| 43944 | 35741049 | 35741835 | 248969, 152582 |
| 43945 | 35990365 | 35991989 | 145626 |
| 43946 | 35999210 | 36000432 | 145626 |
| 43947 | 36151072 | 36152433 | 145604, 164187 |
| 43948 | 36180108 | 36181987 | 145604 |
| 43949 | 36207101 | 36207453 | 152620 |
| 43950 | 36227878 | 36228545 | 152620 |
| 43951 | 36239317 | 36240400 | 152620 |
| 43952 | 36240655 | 36244185 | 152620 |
| 43953 | 36271998 | 36272892 | 164188 |
| 43954 | 36305537 | 36306443 | |
| 43955 | 36324176 | 36325102 | |
| 43956 | 36363057 | 36363790 | |
| 43957 | 36373463 | 36374634 | |
| 43958 | 36403056 | 36404076 | |
| 43959 | 36417728 | 36418937 | |
| 43960 | 36441860 | 36443309 | |
| 43961 | 36528797 | 36529175 | |
| 43962 | 36657572 | 36658703 | 079215 |
| 43963 | 36739405 | 36741707 | |
| 43964 | 36743942 | 36745447 | |
| 43965 | 36875895 | 36878302 | 164190 |
| 43966 | 37064420 | 37065143 | 164190 |
| 43967 | 37248771 | 37250033 | 197603 |
| 43968 | 37370345 | 37371957 | 113569 |
| 43969 | 37494167 | 37495937 | 082068 |
| 43970 | 37662505 | 37663330 | 082068 |
| 43971 | 37667279 | 37670099 | 082068 |
| 43972 | 37695491 | 37697260 | 082068 |
| 43973 | 37717992 | 37718611 | 082068 |
| 43974 | 37722308 | 37723984 | 082068 |
| 43975 | 37769227 | 37770394 | |
| 43976 | 37799852 | 37800771 | |
| 43977 | 37839601 | 37840984 | 248587, 168621 |
| 43978 | 37847029 | 37849370 | 248587 |
| 43979 | 38069338 | 38070468 | 250003 |
| 43980 | 38463692 | 38465004 | 164318, 251257 |
| 43981 | 38556843 | 38557554 | 244968, 113594 |
| 43982 | 38830535 | 38831080 | 249740 |
| 43983 | 38845271 | 38847382 | 145623, 249740 |
| 43984 | 38871051 | 38873697 | 145623 |
| 43985 | 39013642 | 39017189 | 164327 |
| 43986 | 39072976 | 39077537 | 164327 |
| 43987 | 39100895 | 39103501 | |
| 43988 | 39255363 | 39258516 | 082074 |
| 43989 | 39353622 | 39354508 | 113600 |
| 43990 | 39360027 | 39364181 | 113600 |
| 43991 | 39368164 | 39370188 | 113600 |
| 43992 | 39370455 | 39371807 | 153071, 113600 |
| 43993 | 39373776 | 39374926 | 153071, 113600 |
| 43994 | 39398943 | 39401259 | 153071, 113600 |
| 43995 | 39424296 | 39425476 | 113600, 153071 |
| 43996 | 39436973 | 39438294 | 153071 |
| 43997 | 39624440 | 39625984 | |
| 43998 | 39638994 | 39640516 | |
| 43999 | 39648669 | 39649363 | |
| 44000 | 40547760 | 40549080 | |
| 44001 | 40679407 | 40680274 | 171522 |
| 44002 | 40717326 | 40717912 | 113638 |
| 44003 | 40733840 | 40736953 | 113638 |
| 44004 | 40755091 | 40756356 | 113638 |
| 44005 | 40783973 | 40784951 | 132356 |
| 44006 | 40797306 | 40799147 | 132356 |
| 44007 | 40833860 | 40836971 | 145592 |
| 44008 | 40988620 | 40992639 | |
| 44009 | 41156793 | 41157359 | 039537 |
| 44010 | 41193572 | 41195841 | 039537 |
| 44011 | 41201306 | 41201920 | 039537 |
| 44012 | 41638540 | 41639520 | |
| 44013 | 41903796 | 41905551 | 205765 |
| 44014 | 41924668 | 41926310 | 151876 |
| 44015 | 42108345 | 42109234 | |
| 44016 | 42423104 | 42425392 | 112964 |
| 44017 | 42500270 | 42500927 | 112964 |
| 44018 | 42502945 | 42503637 | 112964 |
| 44019 | 42515593 | 42517842 | 112964 |
| 44020 | 42543317 | 42546016 | 112964 |
| 44021 | 42547172 | 42558476 | 112964 |
| 44022 | 42561301 | 42562725 | 112964 |
| 44023 | 42570282 | 42574072 | 112964 |
| 44024 | 42579346 | 42579802 | 112964 |
| 44025 | 42582674 | 42584339 | 112964 |
| 44026 | 42590631 | 42592503 | 112964 |
| 44027 | 42596299 | 42599660 | 112964 |
| 44028 | 42606230 | 42607170 | 112964 |
| 44029 | 42614370 | 42615031 | 112964 |
| 44030 | 42620535 | 42621299 | 112964 |
| 44031 | 42641101 | 42642145 | 112964 |
| 44032 | 42644918 | 42646225 | 112964 |
| 44033 | 42655403 | 42657176 | 112964 |
| 44034 | 42689387 | 42689894 | 112964 |
| 44035 | 42807964 | 42808656 | 250722 |
| 44036 | 42810829 | 42813501 | 250722 |
| 44037 | 42840331 | 42840951 | 250722 |
| 44038 | 42854631 | 42856468 | 250722 |
| 44039 | 42874496 | 42875598 | 250722 |
| 44040 | 42950751 | 42951703 | |
| 44041 | 43041509 | 43043479 | 215068, 177721, 177738 |
| 44042 | 43064849 | 43068180 | 172262, 177738 |
| 44043 | 43105321 | 43106597 | 172262 |
| 44044 | 43120329 | 43122687 | 172262 |
| 44045 | 43312405 | 43315797 | 112972 |
| 44046 | 43396661 | 43397594 | 151882 |
| 44047 | 43421716 | 43423052 | |
| 44048 | 43425578 | 43429564 | |
| 44049 | 43432399 | 43433136 | |
| 44050 | 43482501 | 43485451 | 249492, 151881 |
| 44051 | 43514922 | 43516199 | 248240, 172244, 248554 |
| 44052 | 43555902 | 43557957 | 172239 |
| 44053 | 43581882 | 43582991 | 248092 |
| 44054 | 43601479 | 43604678 | 112992, 248092 |
| 44055 | 43615422 | 43616314 | 112992 |
| 44056 | 43616638 | 43617030 | 112992 |
| 44057 | 43619314 | 43621084 | 112992 |
| 44058 | 43691109 | 43691857 | 112992 |
| 44059 | 43772961 | 43774016 | |
| 44060 | 43973241 | 43973934 | |
| 44061 | 43997416 | 43998543 | |
| 44062 | 44000840 | 44003200 | |
| 44063 | 44808559 | 44810719 | 112996, 251141 |
| 44064 | 45491480 | 45491924 | 164588 |
| 44065 | 49962076 | 49964192 | 151883 |
| 44066 | 50013432 | 50013867 | 151883 |
| 44067 | 50521489 | 50522545 | |
| 44068 | 51320039 | 51320877 | 248789 |
| 44069 | 52079106 | 52079655 | 248898 |
| 44070 | 52082116 | 52085227 | 152684, 213949, 248898 |
| 44071 | 52090311 | 52090986 | 152684, 213949 |
| 44072 | 52094703 | 52097712 | 152684, 213949 |
| 44073 | 52120122 | 52120736 | 213949 |
| 44074 | 52165968 | 52167166 | 213949 |
| 44075 | 52184132 | 52184897 | 213949 |
| 44076 | 52187998 | 52189699 | 213949 |
| 44077 | 52210743 | 52211673 | 213949 |
| 44078 | 52218116 | 52218787 | 213949 |
| 44079 | 52282635 | 52286368 | 164171, 249899 |
| 44080 | 52325518 | 52328790 | 164171 |
| 44081 | 52404817 | 52406501 | 247796, 164172 |
| 44082 | 52460252 | 52461106 | |
| 44083 | 52728805 | 52729624 | |
| 44084 | 52770989 | 52779562 | 134363 |
| 44085 | 52785693 | 52787725 | |
| 44086 | 52856083 | 52857232 | 164258 |
| 44087 | 53303898 | 53304694 | 185305 |
| 44088 | 53340873 | 53342033 | 185305 |
| 44089 | 53515967 | 53517388 | 185305 |
| 44090 | 53605461 | 53607089 | 185305 |
| 44091 | 53812874 | 53814983 | 178996 |
| 44092 | 53843185 | 53844311 | |
| 44093 | 53863664 | 53864322 | |
| 44094 | 53911783 | 53912319 | |
| 44095 | 53915259 | 53917505 | |
| 44096 | 53923480 | 53924707 | |
| 44097 | 53946829 | 53948374 | |
| 44098 | 53959575 | 53960135 | |
| 44099 | 54038163 | 54038951 | |
| 44100 | 54056843 | 54057610 | |
| 44101 | 54130143 | 54130767 | 232517 |
| 44102 | 54133478 | 54135256 | 232517 |
| 44103 | 54439133 | 54440061 | 164287 |
| 44104 | 54522723 | 54523662 | 234602 |
| 44105 | 54602375 | 54604701 | 039123, 067248 |
| 44106 | 54686189 | 54686731 | 039123 |
| 44107 | 54733269 | 54735394 | 067113 |
| 44108 | 54766999 | 54767753 | 067113 |
| 44109 | 54829853 | 54831824 | 067113 |
| 44110 | 54873107 | 54873740 | |
| 44111 | 54892471 | 54894287 | |
| 44112 | 54894886 | 54898111 | |
| 44113 | 54899767 | 54901053 | |
| 44114 | 54915820 | 54916529 | |
| 44115 | 54924992 | 54926396 | 177058 |
| 44116 | 54928221 | 54933555 | 177058 |
| 44117 | 54986885 | 54988153 | 177058 |
| 44118 | 55007173 | 55008970 | 177058 |
| 44119 | 55163770 | 55165142 | 164509 |
| 44120 | 55195038 | 55195638 | 164509 |
| 44121 | 55227208 | 55228544 | |
| 44122 | 55228840 | 55231261 | 134352 |
| 44123 | 55288581 | 55294517 | 227908, 134352 |
| 44124 | 55298231 | 55300087 | 227908 |
| 44125 | 55320387 | 55321987 | |
| 44126 | 55324938 | 55326373 | |
| 44127 | 55339279 | 55340107 | |
| 44128 | 55354037 | 55355405 | 249236 |
| 44129 | 55384866 | 55385694 | |
| 44130 | 55392743 | 55394698 | |
| 44131 | 55412299 | 55413152 | 164512 |
| 44132 | 55418793 | 55420328 | 164512 |
| 44133 | 55438331 | 55439011 | 164512 |
| 44134 | 55496335 | 55497528 | 164512 |
| 44135 | 55498226 | 55498758 | 164512 |
| 44136 | 55506880 | 55508360 | 164512 |
| 44137 | 55575141 | 55576825 | |
| 44138 | 55596669 | 55597278 | |
| 44139 | 55620552 | 55621341 | |
| 44140 | 55623548 | 55626192 | |
| 44141 | 55646112 | 55647005 | |
| 44142 | 55651368 | 55652708 | |
| 44143 | 55653933 | 55655909 | |
| 44144 | 55776398 | 55777340 | 248727 |
| 44145 | 55803101 | 55803835 | |
| 44146 | 55818580 | 55819490 | 225940 |
| 44147 | 55932196 | 55934826 | |
| 44148 | 56109986 | 56113042 | 095015 |
| 44149 | 56154587 | 56155330 | 237705, 095015 |
| 44150 | 56204690 | 56206763 | 155542, 225230 |
| 44151 | 56213288 | 56214252 | 155542 |
| 44152 | 56246174 | 56246777 | 155545 |
| 44153 | 56246817 | 56248618 | 155545 |
| 44154 | 56327897 | 56328502 | |
| 44155 | 56328956 | 56329372 | |
| 44156 | 56398037 | 56399616 | |
| 44157 | 56468180 | 56471760 | 062194 |
| 44158 | 56505167 | 56505974 | 062194 |
| 44159 | 56515165 | 56515660 | 062194 |
| 44160 | 56593895 | 56595210 | |
| 44161 | 56597903 | 56598510 | |
| 44162 | 56623051 | 56624744 | |
| 44163 | 56630401 | 56633270 | |
| 44164 | 56703505 | 56705156 | 250961 |
| 44165 | 56707753 | 56708465 | 250961 |
| 44166 | 56731131 | 56732588 | 250961 |
| 44167 | 56790218 | 56791381 | 250961 |
| 44168 | 56945996 | 56950099 | |
| 44169 | 56980279 | 56981346 | |
| 44170 | 56988067 | 56995621 | |
| 44171 | 57011055 | 57015240 | |
| 44172 | 57030081 | 57034604 | |
| 44173 | 57070981 | 57076003 | |
| 44174 | 57111148 | 57113772 | |
| 44175 | 57130550 | 57132330 | |
| 44176 | 57132404 | 57135609 | |
| 44177 | 57335812 | 57336316 | |
| 44178 | 57479155 | 57488044 | |
| 44179 | 57553728 | 57556566 | |
| 44180 | 57742271 | 57758989 | 145632 |
| 44181 | 57841595 | 57842460 | 250127 |
| 44182 | 57878372 | 57879136 | 152932 |
| 44183 | 57925490 | 57926293 | 152932 |
| 44184 | 58055414 | 58056189 | 152932, 248475 |
| 44185 | 58145705 | 58146597 | 152932, 248733 |
| 44186 | 58334897 | 58336044 | 247345, 113448 |
| 44187 | 58423466 | 58423906 | 113448 |
| 44188 | 58592091 | 58593979 | 113448 |
| 44189 | 58711609 | 58712865 | 113448 |
| 44190 | 58718038 | 58718828 | 113448 |
| 44191 | 58725783 | 58726695 | 113448 |
| 44192 | 58728976 | 58729437 | 113448 |
| 44193 | 58742223 | 58742700 | 113448 |
| 44194 | 58762089 | 58762570 | 113448 |
| 44195 | 58778834 | 58780993 | 113448 |
| 44196 | 58781118 | 58781903 | 113448 |
| 44197 | 58838771 | 58840357 | 113448 |
| 44198 | 58844475 | 58845565 | 113448 |
| 44199 | 58858657 | 58859319 | 113448 |
| 44200 | 58878832 | 58879636 | 113448 |
| 44201 | 58957603 | 58958521 | 113448 |
| 44202 | 59051864 | 59053004 | 113448 |
| 44203 | 59055186 | 59056207 | 113448 |
| 44204 | 59062016 | 59062723 | 113448 |
| 44205 | 59063492 | 59065104 | 113448 |
| 44206 | 59088882 | 59089341 | 113448 |
| 44207 | 59968442 | 59969146 | 035499 |
| 44208 | 59995368 | 59997121 | 035499 |
| 44209 | 60106324 | 60107011 | 164181 |
| 44210 | 60240092 | 60242111 | 164182, 049167 |
| 44211 | 60457297 | 60459797 | 251279, 188725 |
| 44212 | 60596923 | 60598823 | |
| 44213 | 60609812 | 60610319 | |
| 44214 | 60623917 | 60625243 | |
| 44215 | 60625753 | 60628521 | 130449 |
| 44216 | 60628569 | 60630401 | 130449 |
| 44217 | 60642817 | 60643383 | 251682, 130449 |
| 44218 | 60704138 | 60706110 | 130449 |
| 44219 | 60895495 | 60896109 | |
| 44220 | 60921247 | 60922321 | |
| 44221 | 60963249 | 60963911 | 178722, 248529 |
| 44222 | 61031619 | 61032100 | 178722 |
| 44223 | 61086354 | 61087350 | |
| 44224 | 61212945 | 61213347 | |
| 44225 | 61215567 | 61216293 | |
| 44226 | 61601329 | 61603462 | 068796 |
| 44227 | 61698734 | 61700287 | 086200, 086189, 068796 |
| 44228 | 61708310 | 61709252 | 086200, 068796 |
| 44229 | 61884435 | 61885044 | 086200 |
| 44230 | 62037651 | 62038674 | |
| 44231 | 62233216 | 62235142 | |
| 44232 | 62348575 | 62349841 | |
| 44233 | 62351165 | 62351865 | |
| 44234 | 62426804 | 62428310 | |
| 44235 | 62449539 | 62451606 | |
| 44236 | 62460217 | 62461757 | |
| 44237 | 62538811 | 62539460 | |
| 44238 | 62557131 | 62559257 | |
| 44239 | 63461027 | 63462413 | 164197 |
| 44240 | 63506500 | 63507303 | 164197 |
| 44241 | 64061712 | 64062362 | 153006 |
| 44242 | 64063410 | 64065515 | 153015, 153006 |
| 44243 | 64235521 | 64236428 | 153015 |
| 44244 | 64330033 | 64332397 | |
| 44245 | 64398187 | 64399721 | |
| 44246 | 64407774 | 64408344 | |
| 44247 | 64660571 | 64661315 | 049192 |
| 44248 | 64689732 | 64690419 | 049192 |
| 44249 | 64775615 | 64776784 | 049192 |
| 44250 | 64777367 | 64780052 | 049192 |
| 44251 | 64858526 | 64860007 | 113593, 123219 |
| 44252 | 64906933 | 64908695 | 113595 |
| 44253 | 64919334 | 64922001 | 113597, 253251, 113595 |
| 44254 | 65017819 | 65019378 | 123213, 197860 |
| 44255 | 65220490 | 65223895 | 112851, 269961 |
| 44256 | 65439063 | 65441816 | 253744, 153914 |
| 44257 | 65543034 | 65543442 | |
| 44258 | 65891612 | 65892678 | 069020 |
| 44259 | 65910753 | 65911349 | 069020 |
| 44260 | 65985034 | 65987350 | 069020 |
| 44261 | 66023057 | 66024104 | 069020 |
| 44262 | 66037056 | 66037649 | 069020 |
| 44263 | 66144723 | 66146165 | 069020 |
| 44264 | 66180410 | 66181143 | 069020 |
| 44265 | 66186554 | 66188768 | 069020 |
| 44266 | 66254816 | 66256060 | 069020 |
| 44267 | 66256194 | 66256684 | 069020 |
| 44268 | 66259013 | 66260052 | 069020 |
| 44269 | 66263389 | 66264384 | 069020 |
| 44270 | 66283667 | 66284304 | 069020 |
| 44271 | 66299029 | 66301649 | 229666, 069020 |
| 44272 | 66310203 | 66312126 | 069020 |
| 44273 | 66339429 | 66340352 | 069020 |
| 44274 | 66381308 | 66381887 | 069020 |
| 44275 | 66390236 | 66391817 | 069020 |
| 44276 | 66510551 | 66512484 | |
| 44277 | 66530085 | 66532218 | |
| 44278 | 66562687 | 66565747 | 251206 |
| 44279 | 66668791 | 66670222 | |
| 44280 | 66844104 | 66845432 | 249364 |
| 44281 | 66876284 | 66877735 | 249364 |
| 44282 | 66901613 | 66902966 | 249364 |
| 44283 | 67047663 | 67048458 | 250421, 249364 |
| 44284 | 67065807 | 67067609 | 250421, 249364 |
| 44285 | 67088528 | 67092543 | 250421, 249364 |
| 44286 | 67095544 | 67096130 | 250421, 249364 |
| 44287 | 67110332 | 67113876 | 250421, 249894 |
| 44288 | 67266988 | 67268204 | |
| 44289 | 67293850 | 67295729 | |
| 44290 | 67342185 | 67342773 | |
| 44291 | 67376159 | 67376894 | |
| 44292 | 67429210 | 67431605 | |
| 44293 | 67435752 | 67438159 | |
| 44294 | 67462640 | 67463600 | |
| 44295 | 67465108 | 67468657 | |
| 44296 | 67509981 | 67513258 | 145675 |
| 44297 | 67515041 | 67515733 | 145675 |
| 44298 | 67520824 | 67522286 | 145675 |
| 44299 | 67535061 | 67536187 | 145675 |
| 44300 | 67559256 | 67561991 | 145675 |
| 44301 | 67581911 | 67586910 | 145675 |
| 44302 | 67614386 | 67617222 | |
| 44303 | 67628567 | 67630541 | |
| 44304 | 67638609 | 67641091 | |
| 44305 | 67672817 | 67673252 | |
| 44306 | 67691462 | 67693199 | |
| 44307 | 67700858 | 67701262 | |
| 44308 | 67715340 | 67716133 | |
| 44309 | 67744969 | 67745857 | |
| 44310 | 67752022 | 67753066 | |
| 44311 | 67801254 | 67802588 | |
| 44312 | 67829709 | 67831245 | |
| 44313 | 67853002 | 67853928 | |
| 44314 | 67858083 | 67858602 | |
| 44315 | 67888835 | 67890169 | |
| 44316 | 67968670 | 67970130 | |
| 44317 | 67976295 | 67976874 | |
| 44318 | 67977657 | 67980323 | |
| 44319 | 68025487 | 68027701 | |
| 44320 | 68035875 | 68037159 | |
| 44321 | 68039406 | 68043588 | |
| 44322 | 68048868 | 68049541 | |
| 44323 | 68053358 | 68054480 | |
| 44324 | 68220042 | 68220797 | 249335 |
| 44325 | 68343957 | 68345658 | |
| 44326 | 68374732 | 68376184 | |
| 44327 | 68389449 | 68390978 | 145740 |
| 44328 | 68462335 | 68463047 | 134057 |
| 44329 | 68484742 | 68485981 | 153044 |
| 44330 | 68502310 | 68503012 | 153044 |
| 44331 | 68513365 | 68514375 | 134056 |
| 44332 | 68530185 | 68531588 | 134058 |
| 44333 | 68534673 | 68535015 | 134058 |
| 44334 | 68627383 | 68629325 | 183323 |
| 44335 | 68663953 | 68666430 | 152942, 085231 |
| 44336 | 68710534 | 68712267 | 152939, 152942 |
| 44337 | 68739346 | 68741085 | 152939 |
| 44338 | 68747011 | 68748802 | |
| 44339 | 68749843 | 68751261 | |
| 44340 | 68787561 | 68790255 | 197822, 253203, 249295 |
| 44341 | 68796874 | 68799847 | 249295, 197822, 253203 |
| 44342 | 68812246 | 68814823 | 197822, 253203 |
| 44343 | 70751151 | 70752603 | 145734 |
| 44344 | 70777899 | 70780509 | 145734 |
| 44345 | 70882420 | 70884068 | 131844 |
| 44346 | 71146563 | 71147125 | |
| 44347 | 71218328 | 71219353 | |
| 44348 | 71226925 | 71230016 | |
| 44349 | 71603048 | 71604731 | 113048 |
| 44350 | 71615281 | 71616873 | 049883, 113048 |
| 44351 | 71641938 | 71642736 | 049883 |
| 44352 | 71658403 | 71659744 | 272093 |
| 44353 | 71683840 | 71684415 | |
| 44354 | 71748124 | 71749299 | 178175 |
| 44355 | 72111368 | 72113971 | 083312, 249085 |
| 44356 | 72143671 | 72145256 | 083312 |
| 44357 | 72233780 | 72234594 | |
| 44358 | 72250465 | 72253212 | 157107, 272081 |
| 44359 | 72414581 | 72417272 | 157111 |
| 44360 | 72511712 | 72512413 | 249743 |
| 44361 | 72793395 | 72795502 | 145741, 272525 |
| 44362 | 72860306 | 72862621 | 164338, 164331 |
| 44363 | 72910905 | 72911356 | |
| 44364 | 72921028 | 72923366 | 214944 |
| 44365 | 72949721 | 72951463 | 214944 |
| 44366 | 72968378 | 72970731 | 214944 |
| 44367 | 72973754 | 72975094 | 214944 |
| 44368 | 73024264 | 73025601 | 214944 |
| 44369 | 73058658 | 73061373 | 214944 |
| 44370 | 73091862 | 73093218 | 214944 |
| 44371 | 73118763 | 73119980 | 214944 |
| 44372 | 73157345 | 73157794 | 214944 |
| 44373 | 73197033 | 73197894 | 214944 |
| 44374 | 73213155 | 73213577 | 214944 |
| 44375 | 73584265 | 73585589 | |
| 44376 | 73611148 | 73612979 | |
| 44377 | 73720081 | 73720740 | 248673 |
| 44378 | 73789148 | 73789842 | 248673 |
| 44379 | 73795395 | 73796822 | 248673 |
| 44380 | 73833435 | 73834612 | |
| 44381 | 73871504 | 73873488 | |
| 44382 | 73876606 | 73877828 | |
| 44383 | 73890187 | 73891890 | |
| 44384 | 73894730 | 73895903 | |
| 44385 | 73927791 | 73928482 | 171617 |
| 44386 | 73935537 | 73938676 | 049860, 171617 |
| 44387 | 73980735 | 73982049 | 049860 |
| 44388 | 73983204 | 73983546 | 049860 |
| 44389 | 74056979 | 74058003 | 164347 |
| 44390 | 74058376 | 74059315 | 164347 |
| 44391 | 74062032 | 74063830 | 164346, 164347 |
| 44392 | 74147142 | 74148866 | 198780 |
| 44393 | 74161187 | 74162948 | 271714, 198780 |
| 44394 | 74191498 | 74192130 | |
| 44395 | 74212136 | 74213234 | |
| 44396 | 74213370 | 74214645 | 249856 |
| 44397 | 74230480 | 74231777 | 249856 |
| 44398 | 74242078 | 74243133 | 249856 |
| 44399 | 74244306 | 74246074 | 249856 |
| 44400 | 74249526 | 74251007 | 249856 |
| 44401 | 74253187 | 74254549 | 249856 |
| 44402 | 74339838 | 74340833 | |
| 44403 | 74346934 | 74347800 | 250889 |
| 44404 | 74348048 | 74350784 | 250889 |
| 44405 | 74391217 | 74391523 | 145700 |
| 44406 | 74531727 | 74533293 | 145700 |
| 44407 | 74620867 | 74621518 | 247372 |
| 44408 | 74631421 | 74634121 | 113161, 247372 |
| 44409 | 74659444 | 74660005 | 271815 |
| 44410 | 74806116 | 74808302 | 122008, 113163 |
| 44411 | 74906959 | 74908008 | 189045 |
| 44412 | 74916276 | 74917100 | 189045 |
| 44413 | 74918137 | 74919025 | 189045 |
| 44414 | 74919415 | 74920330 | 189045 |
| 44415 | 74964629 | 74965693 | 189045 |
| 44416 | 74976500 | 74977543 | 152359 |
| 44417 | 75012248 | 75013510 | 152359 |
| 44418 | 75016651 | 75017628 | |
| 44419 | 75565780 | 75566429 | 122012 |
| 44420 | 75569188 | 75569874 | 122012 |
| 44421 | 75599076 | 75600841 | 250348, 122012 |
| 44422 | 75627411 | 75628864 | 266045, 122012 |
| 44423 | 75667659 | 75669251 | |
| 44424 | 75681909 | 75683068 | |
| 44425 | 75685513 | 75686084 | |
| 44426 | 75697853 | 75701185 | 145703 |
| 44427 | 75717339 | 75718572 | 145703 |
| 44428 | 75748344 | 75748914 | 145703 |
| 44429 | 75753553 | 75754757 | 145703 |
| 44430 | 75766821 | 75769352 | 145703 |
| 44431 | 75788674 | 75790572 | 145703 |
| 44432 | 75799788 | 75800257 | 145703 |
| 44433 | 75823441 | 75824647 | 145703 |
| 44434 | 75832513 | 75833738 | 145703 |
| 44435 | 75997020 | 75997540 | 225407, 145703 |
| 44436 | 76011606 | 76012355 | 181104, 225407 |
| 44437 | 76080962 | 76082132 | |
| 44438 | 76082907 | 76083609 | |
| 44439 | 76085459 | 76087689 | |
| 44440 | 76114416 | 76116717 | 164251 |
| 44441 | 76126737 | 76127375 | 164251 |
| 44442 | 76318497 | 76319320 | |
| 44443 | 76325780 | 76327295 | 164252 |
| 44444 | 76382044 | 76383997 | 250802, 132846 |
| 44445 | 76399211 | 76399757 | 250802 |
| 44446 | 76686325 | 76687370 | 113231 |
| 44447 | 76721696 | 76723481 | 164253, 113231 |
| 44448 | 76786992 | 76788675 | 164253 |
| 44449 | 77053886 | 77054777 | 171530 |
| 44450 | 77065992 | 77066915 | 171530 |
| 44451 | 77070702 | 77074329 | 171530 |
| 44452 | 77147476 | 77148266 | 171530 |
| 44453 | 77175695 | 77176251 | |
| 44454 | 77305882 | 77306642 | 132842 |
| 44455 | 77589743 | 77590986 | 132842 |
| 44456 | 77655348 | 77657487 | 085365, 245556 |
| 44457 | 77716330 | 77716824 | 085365 |
| 44458 | 77800520 | 77801122 | 145685 |
| 44459 | 77805811 | 77806609 | 145685 |
| 44460 | 77814008 | 77815759 | 145685 |
| 44461 | 77825506 | 77826767 | 145685 |
| 44462 | 77886883 | 77888164 | 145685 |
| 44463 | 77890073 | 77891445 | 145685 |
| 44464 | 77943832 | 77945325 | 145685 |
| 44465 | 78023168 | 78024576 | 145685 |
| 44466 | 78091563 | 78092110 | 113273 |
| 44467 | 78277076 | 78277878 | 113273 |
| 44468 | 78279965 | 78282650 | 113273 |
| 44469 | 78326429 | 78328863 | 132837 |
| 44470 | 78346237 | 78346846 | 132837 |
| 44471 | 78364395 | 78367613 | 132840, 132837 |
| 44472 | 78369762 | 78374182 | 132840, 132837 |
| 44473 | 78376423 | 78378971 | 132840, 132837 |
| 44474 | 78389432 | 78390208 | 132837 |
| 44475 | 78407074 | 78407875 | 145692, 132837 |
| 44476 | 78439499 | 78440269 | 132837 |
| 44477 | 78489443 | 78489933 | 132837 |
| 44478 | 78530565 | 78533664 | 152409, 132837 |
| 44479 | 78614781 | 78615254 | 152409 |
| 44480 | 78808983 | 78811089 | 152413 |
| 44481 | 78907412 | 78909421 | 164329 |
| 44482 | 78949047 | 78950398 | 164329 |
| 44483 | 78985309 | 78986310 | 164309 |
| 44484 | 79049512 | 79052519 | 164309 |
| 44485 | 79286058 | 79287630 | 113296, 177034 |
| 44486 | 79477144 | 79478112 | 164300 |
| 44487 | 79478493 | 79481362 | 164300 |
| 44488 | 79488357 | 79489366 | 164300 |
| 44489 | 79500483 | 79501378 | 164300 |
| 44490 | 79503543 | 79504467 | 164300 |
| 44491 | 79510730 | 79512716 | 164300 |
| 44492 | 79524738 | 79528107 | 164300 |
| 44493 | 79542219 | 79544512 | 164300 |
| 44494 | 79547258 | 79547877 | 164300 |
| 44495 | 79548626 | 79553482 | 164300 |
| 44496 | 79702636 | 79704805 | 039319 |
| 44497 | 79783526 | 79784753 | 152380, 249042 |
| 44498 | 79919418 | 79920259 | |
| 44499 | 79949611 | 79951807 | 113318, 228716 |
| 44500 | 79963871 | 79965094 | 113318 |
| 44501 | 80042954 | 80043339 | 113318 |
| 44502 | 80180750 | 80182083 | |
| 44503 | 80262716 | 80264761 | 113319 |
| 44504 | 80564481 | 80565613 | 247572 |
| 44505 | 80596407 | 80598274 | 131732, 247572 |
| 44506 | 80605759 | 80606911 | 131732 |
| 44507 | 80611092 | 80611802 | |
| 44508 | 80646363 | 80646993 | 172497 |
| 44509 | 80648584 | 80650801 | 172497 |
| 44510 | 80658836 | 80659930 | 172497 |
| 44511 | 80688951 | 80691373 | 172497 |
| 44512 | 80717517 | 80719911 | 145687 |
| 44513 | 80922224 | 80922823 | 145687 |
| 44514 | 81031863 | 81032350 | 145687 |
| 44515 | 81046288 | 81048370 | 145687 |
| 44516 | 81051082 | 81051711 | |
| 44517 | 81069195 | 81070220 | |
| 44518 | 81074265 | 81076066 | |
| 44519 | 81147052 | 81148553 | 249483 |
| 44520 | 81266726 | 81269040 | 152348 |
| 44521 | 81368782 | 81369545 | 248192, 152348 |
| 44522 | 81401243 | 81401741 | 152348 |
| 44523 | 81443104 | 81444401 | 152348 |
| 44524 | 81458631 | 81462432 | 152348 |
| 44525 | 81572924 | 81574811 | 186468 |
| 44526 | 81661390 | 81662181 | 205464 |
| 44527 | 81682716 | 81683539 | 205464 |
| 44528 | 81844682 | 81845838 | |
| 44529 | 81880235 | 81880920 | |
| 44530 | 81918254 | 81919482 | |
| 44531 | 81930553 | 81932113 | |
| 44532 | 82372296 | 82374049 | 152422, 174695 |
| 44533 | 82859179 | 82860393 | 249835, 038427 |
| 44534 | 82872363 | 82873708 | 249835, 038427 |
| 44535 | 83122860 | 83123379 | |
| 44536 | 84588462 | 84589823 | |
| 44537 | 84691070 | 84691861 | |
| 44538 | 85012015 | 85013293 | |
| 44539 | 85756240 | 85757660 | |
| 44540 | 85913071 | 85914820 | 127184 |
| 44541 | 86563174 | 86564771 | 145715 |
| 44542 | 86688257 | 86690193 | 134480 |
| 44543 | 86707427 | 86708949 | 134480 |
| 44544 | 87124298 | 87125360 | |
| 44545 | 87195135 | 87195957 | |
| 44546 | 87436706 | 87437671 | |
| 44547 | 87563788 | 87565763 | 247828, 164180 |
| 44548 | 87733484 | 87734647 | 271904, 250156 |
| 44549 | 87763983 | 87764982 | 271904 |
| 44550 | 87765940 | 87767151 | 271904 |
| 44551 | 87770079 | 87770893 | 271904 |
| 44552 | 87797921 | 87799099 | |
| 44553 | 87812197 | 87812739 | 245526 |
| 44554 | 88610671 | 88611863 | 248309 |
| 44555 | 89633333 | 89634051 | |
| 44556 | 89704538 | 89706819 | 255647, 153140 |
| 44557 | 89768822 | 89771060 | 176055, 113356 |
| 44558 | 89824379 | 89826339 | 164199, 176018 |
| 44559 | 90161724 | 90164528 | 164199 |
| 44560 | 90172138 | 90172700 | 164199 |
| 44561 | 90184276 | 90185389 | 164199 |
| 44562 | 90193321 | 90195872 | 164199 |
| 44563 | 90210577 | 90211946 | 164199 |
| 44564 | 90225736 | 90228425 | 164199 |
| 44565 | 90234920 | 90236208 | 164199 |
| 44566 | 90302457 | 90304559 | 164199 |
| 44567 | 90313788 | 90315142 | 164199 |
| 44568 | 90323255 | 90325000 | 164199 |
| 44569 | 90325542 | 90328349 | 249514, 164199 |
| 44570 | 90344895 | 90345993 | 164199 |
| 44571 | 90353709 | 90355676 | 164199 |
| 44572 | 90397337 | 90398144 | 164199 |
| 44573 | 90428271 | 90429606 | 164199 |
| 44574 | 90431971 | 90432610 | 164199 |
| 44575 | 90442094 | 90442478 | 164199 |
| 44576 | 90458412 | 90459188 | 164199 |
| 44577 | 90531020 | 90531769 | |
| 44578 | 90574976 | 90577695 | 234292 |
| 44579 | 90606700 | 90610598 | 271762, 248323 |
| 44580 | 90674576 | 90681204 | 113369 |
| 44581 | 90731950 | 90732571 | |
| 44582 | 91688495 | 91690536 | 250049 |
| 44583 | 91705303 | 91708887 | 250049 |
| 44584 | 91887992 | 91888995 | 249776 |
| 44585 | 91976630 | 91977736 | 249776 |
| 44586 | 92867905 | 92868901 | 237187 |
| 44587 | 92916797 | 92917464 | 237187 |
| 44588 | 92918368 | 92919259 | 175745, 237187 |
| 44589 | 92973148 | 92974068 | 113391 |
| 44590 | 93446417 | 93448075 | 113391 |
| 44591 | 93552903 | 93554662 | 185261 |
| 44592 | 93574308 | 93578592 | 185261 |
| 44593 | 93767989 | 93770024 | 185261 |
| 44594 | 93953586 | 93954887 | 133302, 270133, 185261 |
| 44595 | 94304045 | 94304642 | 175471 |
| 44596 | 94889816 | 94891586 | 164291, 198677 |
| 44597 | 94931189 | 94931643 | 164291 |
| 44598 | 94955972 | 94957623 | 178015 |
| 44599 | 94976462 | 94978581 | |
| 44600 | 94982139 | 94983425 | 175449 |
| 44601 | 95004608 | 95006188 | 145757, 175449 |
| 44602 | 95006212 | 95007191 | 145757, 175449 |
| 44603 | 95066355 | 95068379 | 250240, 164292 |
| 44604 | 95106781 | 95107435 | 173221, 164292 |
| 44605 | 95120136 | 95120896 | 173221, 164292 |
| 44606 | 95138891 | 95140406 | 173221, 164292 |
| 44607 | 95145060 | 95145750 | 173221, 164292 |
| 44608 | 95145879 | 95147010 | 173221, 164292 |
| 44609 | 95157037 | 95160988 | 173221, 164292 |
| 44610 | 95162547 | 95163882 | |
| 44611 | 95170002 | 95172773 | 251000, 251409 |
| 44612 | 95176644 | 95179938 | 251409 |
| 44613 | 95185522 | 95186782 | 272021, 251409 |
| 44614 | 95191896 | 95199865 | 250362, 236882 |
| 44615 | 95208161 | 95209931 | 250362 |
| 44616 | 95215622 | 95216542 | |
| 44617 | 95260348 | 95260898 | 118985 |
| 44618 | 95293485 | 95300384 | 251314, 118985 |
| 44619 | 95304601 | 95306323 | 250955, 251314 |
| 44620 | 95322230 | 95324306 | 251314 |
| 44621 | 95336789 | 95337488 | 251314 |
| 44622 | 95359173 | 95359967 | 251314 |
| 44623 | 95372188 | 95373773 | 251314 |
| 44624 | 95413472 | 95417818 | 207578, 250551, 251314 |
| 44625 | 95419805 | 95421844 | 250551, 251314 |
| 44626 | 95427696 | 95431240 | 250551, 251314 |
| 44627 | 95446242 | 95447550 | 250551, 251314 |
| 44628 | 95449140 | 95451549 | 250551, 251314 |
| 44629 | 95453101 | 95455079 | 250551, 251314 |
| 44630 | 95458926 | 95462382 | 250551, 251314 |
| 44631 | 95534516 | 95536448 | 250551, 251314 |
| 44632 | 95549830 | 95551109 | 249746, 250551, 251314 |
| 44633 | 95562480 | 95564010 | 251314 |
| 44634 | 95580849 | 95581877 | 251314 |
| 44635 | 95590605 | 95591205 | 250158, 251314 |
| 44636 | 95593394 | 95596258 | 250158, 251314 |
| 44637 | 95601548 | 95602392 | 250158, 251314 |
| 44638 | 95627519 | 95629478 | 251314 |
| 44639 | 95632769 | 95634762 | 251314 |
| 44640 | 95651931 | 95652847 | 251314 |
| 44641 | 95667323 | 95669709 | 251314 |
| 44642 | 95670956 | 95677118 | 251314 |
| 44643 | 95683463 | 95684080 | 251314 |
| 44644 | 95996992 | 95999311 | 153113 |
| 44645 | 96000361 | 96000801 | 153113 |
| 44646 | 96004316 | 96004954 | 153113 |
| 44647 | 96006054 | 96007005 | 153113 |
| 44648 | 96026864 | 96028893 | 153113 |
| 44649 | 96035919 | 96040200 | 153113 |
| 44650 | 96050321 | 96051320 | 153113 |
| 44651 | 96123747 | 96124618 | 164307 |
| 44652 | 96137403 | 96137859 | 164307 |
| 44653 | 96142441 | 96144513 | 164307 |
| 44654 | 96190814 | 96191617 | 247121 |
| 44655 | 96211440 | 96213024 | 164308, 247121 |
| 44656 | 96269601 | 96273000 | 113441, 247121 |
| 44657 | 96298820 | 96299536 | 113441 |
| 44658 | 96518010 | 96520218 | 251513, 058729, 251606 |
| 44659 | 98104589 | 98106749 | 246763, 174136 |
| 44660 | 98108642 | 98110617 | 246763, 174136 |
| 44661 | 98115089 | 98115776 | 174136 |
| 44662 | 98208296 | 98208910 | 153922 |
| 44663 | 98263536 | 98266118 | 248489 |
| 44664 | 98360782 | 98361927 | |
| 44665 | 98367899 | 98369973 | |
| 44666 | 101631898 | 101632460 | 173930 |
| 44667 | 102090166 | 102091974 | 145730 |
| 44668 | 102124405 | 102125119 | 145730 |
| 44669 | 102131534 | 102132591 | 145730 |
| 44670 | 102454144 | 102456935 | 145725, 145723 |
| 44671 | 102473991 | 102474651 | 145725 |
| 44672 | 102594024 | 102595424 | 181751 |
| 44673 | 102858983 | 102859395 | 226926 |
| 44674 | 102897237 | 102899251 | 112874 |
| 44675 | 102904410 | 102906304 | |
| 44676 | 102937796 | 102938647 | |
| 44677 | 102959715 | 102960755 | |
| 44678 | 103521396 | 103522288 | |
| 44679 | 106877734 | 106879223 | 184349 |
| 44680 | 107338450 | 107339372 | 145743 |
| 44681 | 107715895 | 107719028 | 145743 |
| 44682 | 107991640 | 107992525 | |
| 44683 | 107996699 | 107998001 | |
| 44684 | 108063257 | 108064722 | 272523 |
| 44685 | 108082981 | 108085325 | 151422 |
| 44686 | 108654054 | 108654905 | 249476 |
| 44687 | 108743782 | 108747535 | 198961 |
| 44688 | 109024165 | 109027613 | 112893 |
| 44689 | 109044506 | 109045512 | 112893 |
| 44690 | 109078152 | 109081001 | 112893 |
| 44691 | 109140971 | 109142097 | 112893 |
| 44692 | 109236501 | 109238018 | |
| 44693 | 109323361 | 109324082 | |
| 44694 | 109324616 | 109325328 | |
| 44695 | 109325898 | 109327080 | |
| 44696 | 109335711 | 109337384 | |
| 44697 | 109419561 | 109420110 | |
| 44698 | 109422122 | 109423888 | |
| 44699 | 109440988 | 109441825 | |
| 44700 | 109442126 | 109443321 | |
| 44701 | 109445396 | 109445872 | |
| 44702 | 109682297 | 109683300 | 186952 |
| 44703 | 110074102 | 110075709 | 186952, 164209 |
| 44704 | 110245521 | 110246296 | |
| 44705 | 110251336 | 110253399 | |
| 44706 | 110303022 | 110305692 | |
| 44707 | 110339112 | 110339813 | 248428 |
| 44708 | 110408284 | 110411567 | 145777 |
| 44709 | 110427629 | 110429481 | 253613, 134987 |
| 44710 | 110847108 | 110849500 | 246859, 164211 |
| 44711 | 110970841 | 110972016 | 246859 |
| 44712 | 110990550 | 110991544 | 246859 |
| 44713 | 111016281 | 111017349 | 134986, 246859 |
| 44714 | 111073311 | 111074483 | 134986, 246859 |
| 44715 | 111077979 | 111079066 | 134986 |
| 44716 | 111082556 | 111085179 | 134986 |
| 44717 | 111092379 | 111094231 | 134986 |
| 44718 | 111145514 | 111146180 | 134986 |
| 44719 | 111495952 | 111497684 | 224032, 238363, 129595 |
| 44720 | 111564079 | 111565148 | 129595, 251076 |
| 44721 | 111674135 | 111675018 | 129595 |
| 44722 | 111753439 | 111754350 | 129595 |
| 44723 | 111868881 | 111869793 | |
| 44724 | 112042786 | 112044284 | 134982 |
| 44725 | 112097798 | 112098297 | 134982 |
| 44726 | 112196172 | 112198198 | 272869, 153037, 258864 |
| 44727 | 112248979 | 112249588 | 129625 |
| 44728 | 112256027 | 112258356 | 129625 |
| 44729 | 112293955 | 112294640 | |
| 44730 | 112311824 | 112313478 | 172795 |
| 44731 | 112417334 | 112418523 | 171444 |
| 44732 | 112476745 | 112477481 | 171444 |
| 44733 | 112497833 | 112500337 | 171444 |
| 44734 | 112512100 | 112513388 | 171444 |
| 44735 | 112529542 | 112530456 | 171444 |
| 44736 | 112535131 | 112535786 | 171444 |
| 44737 | 112537416 | 112540985 | 171444 |
| 44738 | 112541058 | 112542024 | 171444 |
| 44739 | 112553408 | 112554522 | 171444 |
| 44740 | 112599742 | 112600386 | 171444 |
| 44741 | 112628805 | 112631172 | 171444 |
| 44742 | 112648526 | 112649286 | 171444 |
| 44743 | 112655358 | 112657369 | 171444 |
| 44744 | 112665595 | 112667201 | 171444, 232633 |
| 44745 | 112824077 | 112824785 | 171444 |
| 44746 | 112824915 | 112825437 | |
| 44747 | 112848820 | 112850592 | 047188 |
| 44748 | 112855876 | 112856764 | 047188 |
| 44749 | 113696520 | 113699170 | 080709 |
| 44750 | 113747038 | 113747527 | 080709 |
| 44751 | 114386310 | 114387062 | |
| 44752 | 114404033 | 114405478 | |
| 44753 | 114504638 | 114506264 | 152503 |
| 44754 | 114530095 | 114531224 | |
| 44755 | 114597582 | 114599548 | 271797, 164219 |
| 44756 | 114631520 | 114632555 | 164221 |
| 44757 | 114659689 | 114660248 | |
| 44758 | 114673364 | 114674295 | |
| 44759 | 114678700 | 114680870 | |
| 44760 | 114683358 | 114686761 | |
| 44761 | 114711069 | 114712462 | |
| 44762 | 114761903 | 114762673 | |
| 44763 | 114786083 | 114786930 | |
| 44764 | 114794973 | 114798413 | |
| 44765 | 114877791 | 114881043 | 145780 |
| 44766 | 114891509 | 114892556 | |
| 44767 | 114892603 | 114896947 | |
| 44768 | 114937203 | 114938449 | 249249, 243414, 251201 |
| 44769 | 114960846 | 114962662 | 243414, 251201, 134970 |
| 44770 | 114969863 | 114971116 | |
| 44771 | 115044172 | 115046406 | |
| 44772 | 115074227 | 115075233 | |
| 44773 | 115084016 | 115085535 | |
| 44774 | 115132227 | 115132727 | |
| 44775 | 115133661 | 115134574 | |
| 44776 | 115150972 | 115153287 | 129596 |
| 44777 | 115176308 | 115178716 | 177879, 145782 |
| 44778 | 115419900 | 115421791 | 145781, 271918 |
| 44779 | 115608170 | 115608877 | 145781 |
| 44780 | 115609147 | 115609578 | 145781 |
| 44781 | 115706433 | 115707859 | 145781 |
| 44782 | 115860532 | 115861029 | 092421 |
| 44783 | 118323106 | 118324723 | 169570 |
| 44784 | 118344570 | 118345929 | 250678, 249494 |
| 44785 | 118371332 | 118372548 | 249494 |
| 44786 | 118372721 | 118373873 | 172869, 249494 |
| 44787 | 118390481 | 118391544 | 172869, 249494 |
| 44788 | 118405375 | 118407999 | 249494, 172869 |
| 44789 | 118554460 | 118555603 | 172869 |
| 44790 | 118603581 | 118605425 | 145779 |
| 44791 | 118609771 | 118611439 | 145779 |
| 44792 | 118637617 | 118640394 | 145779 |
| 44793 | 118658722 | 118661144 | 145779 |
| 44794 | 118670490 | 118671122 | 145779 |
| 44795 | 118691352 | 118691976 | 145779 |
| 44796 | 118732720 | 118736098 | 145779 |
| 44797 | 118787711 | 118789359 | 133835 |
| 44798 | 119474656 | 119475374 | |
| 44799 | 121296906 | 121298756 | 151304 |
| 44800 | 121498493 | 121501915 | 164185, 250803 |
| 44801 | 121814208 | 121816259 | 250328 |
| 44802 | 122110322 | 122111710 | 205302 |
| 44803 | 122180174 | 122182339 | 064652 |
| 44804 | 122371251 | 122373370 | 249996, 168938 |
| 44805 | 122718005 | 122718376 | 168944 |
| 44806 | 122758013 | 122760392 | 168944 |
| 44807 | 122764292 | 122766096 | |
| 44808 | 122791863 | 122792394 | |
| 44809 | 122795854 | 122796456 | |
| 44810 | 122841254 | 122841762 | |
| 44811 | 122846942 | 122849300 | 151292 |
| 44812 | 123862746 | 123863829 | 248296 |
| 44813 | 123916719 | 123917381 | |
| 44814 | 123932333 | 123933227 | |
| 44815 | 123934557 | 123935853 | |
| 44816 | 123991399 | 123992237 | 168916 |
| 44817 | 123996122 | 123998729 | 168916 |
| 44818 | 124019418 | 124020199 | 168916 |
| 44819 | 124071908 | 124073086 | 168916 |
| 44820 | 124078498 | 124080737 | 168916 |
| 44821 | 124081311 | 124085495 | 168916 |
| 44822 | 124119313 | 124119813 | |
| 44823 | 124223215 | 124224300 | |
| 44824 | 124242241 | 124243075 | |
| 44825 | 124268248 | 124269197 | |
| 44826 | 124346800 | 124347751 | |
| 44827 | 124376481 | 124377402 | 250411 |
| 44828 | 124379189 | 124380874 | |
| 44829 | 124385736 | 124386455 | |
| 44830 | 124613113 | 124613786 | |
| 44831 | 124652759 | 124653784 | |
| 44832 | 124744242 | 124745515 | |
| 44833 | 124746181 | 124747398 | |
| 44834 | 125337737 | 125338641 | |
| 44835 | 125693242 | 125694171 | |
| 44836 | 125698859 | 125702139 | 155324 |
| 44837 | 125705122 | 125708091 | 155324 |
| 44838 | 125758491 | 125759704 | 155324 |
| 44839 | 125805432 | 125806213 | 155324, 250602 |
| 44840 | 125807097 | 125808613 | 155324, 250602 |
| 44841 | 125878926 | 125880297 | 164904 |
| 44842 | 125930450 | 125931465 | 164904 |
| 44843 | 125935976 | 125937652 | 164902 |
| 44844 | 125959579 | 125960799 | 164902 |
| 44845 | 125984714 | 125986620 | |
| 44846 | 126111815 | 126113949 | 113368, 251072 |
| 44847 | 126365651 | 126367085 | 173926 |
| 44848 | 126408328 | 126409788 | 164241 |
| 44849 | 126852590 | 126854394 | 164244 |
| 44850 | 127270314 | 127271154 | 230561 |
| 44851 | 127314404 | 127315135 | 245937 |
| 44852 | 127417914 | 127420590 | 064651, 245937 |
| 44853 | 127534623 | 127535270 | |
| 44854 | 128429817 | 128431558 | 066583 |
| 44855 | 128434215 | 128434784 | 066583 |
| 44856 | 128437357 | 128438125 | 066583 |
| 44857 | 128461370 | 128462735 | |
| 44858 | 129103475 | 129104048 | 251680 |
| 44859 | 129239454 | 129241551 | 198108, 251680 |
| 44860 | 129241681 | 129242694 | 198108 |
| 44861 | 130498740 | 130501355 | 169567 |
| 44862 | 130505691 | 130507346 | 186687, 169567 |
| 44863 | 130598680 | 130601552 | 158985 |
| 44864 | 130616995 | 130618296 | 158985 |
| 44865 | 130639168 | 130639583 | 158985 |
| 44866 | 130714749 | 130715831 | 158985 |
| 44867 | 130729056 | 130730812 | 158985 |
| 44868 | 130742717 | 130743423 | |
| 44869 | 130834098 | 130835135 | 158987, 273217 |
| 44870 | 130969979 | 130972539 | 158987, 273217 |
| 44871 | 131007425 | 131008418 | 273217, 217128 |
| 44872 | 131020075 | 131020858 | 273217, 217128 |
| 44873 | 131131381 | 131133917 | 273217, 217128 |
| 44874 | 131332304 | 131332918 | 164398 |
| 44875 | 131429471 | 131430888 | |
| 44876 | 131438295 | 131439929 | |
| 44877 | 131562583 | 131564344 | 072682 |
| 44878 | 131628441 | 131630311 | 197208, 072682 |
| 44879 | 131698320 | 131701513 | 263597, 233006 |
| 44880 | 131703683 | 131706853 | 197375, 233006 |
| 44881 | 131722144 | 131724569 | 197375 |
| 44882 | 131745483 | 131748071 | 197536 |
| 44883 | 131750098 | 131751366 | 197536 |
| 44884 | 131752527 | 131753146 | 197536 |
| 44885 | 131760487 | 131763701 | 238160, 197536 |
| 44886 | 131770241 | 131771567 | 197536 |
| 44887 | 131791697 | 131797263 | 197536 |
| 44888 | 131798951 | 131800775 | 197536 |
| 44889 | 131802294 | 131803558 | 197536 |
| 44890 | 131810225 | 131812975 | 197536 |
| 44891 | 131816423 | 131817626 | 125347 |
| 44892 | 131824278 | 131827582 | 125347 |
| 44893 | 131830749 | 131838806 | |
| 44894 | 131891886 | 131894047 | 113525, 113522 |
| 44895 | 131897293 | 131897952 | 113522 |
| 44896 | 132072615 | 132073580 | 131437 |
| 44897 | 132112102 | 132113694 | 164402 |
| 44898 | 132142681 | 132143559 | 164402 |
| 44899 | 132155577 | 132156810 | |
| 44900 | 132164790 | 132167390 | 164403 |
| 44901 | 132172746 | 132177622 | |
| 44902 | 132188096 | 132191000 | |
| 44903 | 132201157 | 132203509 | 164405, 164404 |
| 44904 | 132206400 | 132212503 | 164406, 072364 |
| 44905 | 132241610 | 132242451 | 072364 |
| 44906 | 132297467 | 132300418 | 272023, 072364 |
| 44907 | 132342011 | 132342998 | 155329 |
| 44908 | 132351833 | 132353195 | 155329 |
| 44909 | 132361203 | 132362577 | 155329 |
| 44910 | 132384568 | 132385934 | |
| 44911 | 132385988 | 132388936 | 170606 |
| 44912 | 132556739 | 132557376 | 248245, 053108 |
| 44913 | 132560573 | 132562535 | 053108 |
| 44914 | 132567671 | 132568588 | 053108 |
| 44915 | 132620699 | 132621806 | 053108 |
| 44916 | 132759296 | 132760020 | 053108 |
| 44917 | 132792508 | 132793329 | 053108 |
| 44918 | 132818876 | 132819909 | 053108 |
| 44919 | 132841873 | 132843074 | 053108 |
| 44920 | 132845186 | 132845728 | 053108 |
| 44921 | 132946553 | 132947235 | 053108 |
| 44922 | 133078354 | 133078811 | |
| 44923 | 133152874 | 133155110 | |
| 44924 | 133156669 | 133157569 | |
| 44925 | 133160203 | 133160978 | |
| 44926 | 133288111 | 133289819 | |
| 44927 | 133303351 | 133306457 | 113583 |
| 44928 | 133338445 | 133342312 | 271737, 213585 |
| 44929 | 133353640 | 133356355 | |
| 44930 | 133428480 | 133429104 | |
| 44931 | 133430316 | 133430912 | |
| 44932 | 133434123 | 133435443 | |
| 44933 | 133450097 | 133450882 | 081059 |
| 44934 | 133488959 | 133489819 | 113558 |
| 44935 | 133511196 | 133513688 | 113558, 272772 |
| 44936 | 133560538 | 133563174 | 266751, 270177, 113575, |
| | | | 272772, 006837, 273345 |
| 44937 | 133582898 | 133584151 | 006837, 273345 |
| 44938 | 133588345 | 133588999 | 006837, 273345 |
| 44939 | 133635077 | 133635951 | 006837, 273345 |
| 44940 | 133702156 | 133703709 | 006837, 273345 |
| 44941 | 133705897 | 133708582 | 119048, 006837, 273345 |
| 44942 | 133746530 | 133748743 | 237190 |
| 44943 | 133751570 | 133752739 | |
| 44944 | 133770566 | 133775490 | 250994, 250564 |
| 44945 | 133800634 | 133803242 | 250994 |
| 44946 | 133838351 | 133840459 | |
| 44947 | 133841405 | 133843560 | 251169 |
| 44948 | 133844184 | 133848884 | 251169 |
| 44949 | 133859415 | 133863962 | 043143 |
| 44950 | 133889881 | 133891173 | 043143 |
| 44951 | 133926484 | 133929034 | |
| 44952 | 133944253 | 133945609 | 152700 |
| 44953 | 133961951 | 133962624 | 152700 |
| 44954 | 133967625 | 133969194 | 152700 |
| 44955 | 133974164 | 133975006 | 152700 |
| 44956 | 133983094 | 133986189 | 113615, 152700 |
| 44957 | 134073199 | 134075394 | 164615 |
| 44958 | 134093927 | 134095257 | 145833 |
| 44959 | 134142424 | 134143173 | 145833 |
| 44960 | 134172708 | 134174763 | 145833 |
| 44961 | 134177896 | 134179148 | 145833 |
| 44962 | 134180709 | 134183624 | 181904, 145833 |
| 44963 | 134209293 | 134211130 | 113621 |
| 44964 | 134239732 | 134241820 | 132570 |
| 44965 | 134349916 | 134350449 | |
| 44966 | 134646016 | 134646958 | 224186 |
| 44967 | 134733704 | 134735822 | 270021, 113648 |
| 44968 | 135288189 | 135291053 | 145826 |
| 44969 | 135308390 | 135310764 | |
| 44970 | 135312401 | 135314311 | |
| 44971 | 135351697 | 135357772 | |
| 44972 | 135364100 | 135366326 | 120708 |
| 44973 | 135371500 | 135371927 | 120708 |
| 44974 | 135387634 | 135391191 | 120708 |
| 44975 | 135391661 | 135396343 | 120708 |
| 44976 | 135401967 | 135403577 | |
| 44977 | 135415858 | 135418929 | 270123 |
| 44978 | 135428360 | 135432842 | |
| 44979 | 135458354 | 135460324 | |
| 44980 | 135467537 | 135469737 | 113658, 164621 |
| 44981 | 135485505 | 135486052 | 113658 |
| 44982 | 135763189 | 135763578 | |
| 44983 | 136957249 | 136958935 | 146021 |
| 44984 | 137001937 | 137002635 | 146021 |
| 44985 | 137002804 | 137004710 | 146021 |
| 44986 | 137028858 | 137029578 | 146021 |
| 44987 | 137069427 | 137070221 | 146021 |
| 44988 | 137088178 | 137091278 | 177733 |
| 44989 | 137094276 | 137095080 | |
| 44990 | 137169019 | 137169565 | 250159 |
| 44991 | 137335073 | 137337214 | 031003 |
| 44992 | 137367888 | 137369948 | 246323, 031003 |
| 44993 | 137513605 | 137514987 | 112984, 112983 |
| 44994 | 137548245 | 137549462 | 094880 |
| 44995 | 137558421 | 137559010 | |
| 44996 | 137577321 | 137578122 | |
| 44997 | 137606795 | 137607525 | 146013 |
| 44998 | 137670471 | 137671017 | 158402, 120709 |
| 44999 | 137672501 | 137674958 | 158402, 120709 |
| 45000 | 137688059 | 137689691 | 120733 |
| 45001 | 137798992 | 137802572 | 120738 |
| 45002 | 137805775 | 137807024 | |
| 45003 | 137827373 | 137829640 | |
| 45004 | 137840380 | 137840956 | |
| 45005 | 137877435 | 137880613 | 120705 |
| 45006 | 137909630 | 137912318 | 113013 |
| 45007 | 137919332 | 137920578 | |
| 45008 | 138061374 | 138062181 | 044115 |
| 45009 | 138066592 | 138067252 | 044115 |
| 45010 | 138087943 | 138090400 | 253404, 044115 |
| 45011 | 138263399 | 138264157 | 044115 |
| 45012 | 138350141 | 138351218 | 249593, 120725 |
| 45013 | 138396381 | 138398821 | 120725 |
| 45014 | 138400088 | 138400757 | 120725 |
| 45015 | 138411113 | 138411789 | 120725 |
| 45016 | 138477165 | 138478202 | 120725 |
| 45017 | 138523594 | 138524663 | 120725 |
| 45018 | 138532951 | 138534514 | 120725 |
| 45019 | 138608986 | 138610681 | 015479, 120725 |
| 45020 | 138628947 | 138631149 | 120725, 015479 |
| 45021 | 138709089 | 138709946 | 170482 |
| 45022 | 138718109 | 138719383 | 170482 |
| 45023 | 138739275 | 138740476 | 170469 |
| 45024 | 138774354 | 138775494 | 170464 |
| 45025 | 138896923 | 138898309 | |
| 45026 | 138940061 | 138942571 | 131508 |
| 45027 | 139016563 | 139019044 | |
| 45028 | 139022248 | 139024323 | 272255 |
| 45029 | 139027131 | 139030523 | 250635, 171604 |
| 45030 | 139030588 | 139033900 | 171604 |
| 45031 | 139034530 | 139036310 | 171604 |
| 45032 | 139038464 | 139040686 | 171604 |
| 45033 | 139043749 | 139045628 | 171604 |
| 45034 | 139047330 | 139048872 | 171604 |
| 45035 | 139054401 | 139055606 | 171604 |
| 45036 | 139063967 | 139065374 | 249526 |
| 45037 | 139066175 | 139067764 | 249526 |
| 45038 | 139080358 | 139081199 | 249526 |
| 45039 | 139088496 | 139089178 | 249526 |
| 45040 | 139104329 | 139105192 | 249526 |
| 45041 | 139126567 | 139127971 | |
| 45042 | 139166944 | 139168329 | |
| 45043 | 139225319 | 139226405 | 158458 |
| 45044 | 139409287 | 139410063 | 158458 |
| 45045 | 139486391 | 139488032 | 185129, 245146 |
| 45046 | 139492624 | 139494708 | 185129 |
| 45047 | 139525224 | 139525778 | |
| 45048 | 139536273 | 139537320 | 254363 |
| 45049 | 139553965 | 139556377 | 120306 |
| 45050 | 139598167 | 139602982 | 120306 |
| 45051 | 139604856 | 139605444 | 120306 |
| 45052 | 139620374 | 139621384 | 120306 |
| 45053 | 139640771 | 139642401 | 113068, 120306 |
| 45054 | 139674339 | 139675596 | 113068 |
| 45055 | 139676996 | 139678807 | 113068 |
| 45056 | 139681704 | 139683684 | 113068 |
| 45057 | 139702684 | 139703370 | |
| 45058 | 139724208 | 139725134 | 113070 |
| 45059 | 139725336 | 139726701 | 113070 |
| 45060 | 139737010 | 139737718 | 253965 |
| 45061 | 139742707 | 139743327 | 113073 |
| 45062 | 139779854 | 139782471 | 254996, 131503, 249637 |
| 45063 | 139788428 | 139788972 | 254996, 131503 |
| 45064 | 139847617 | 139848187 | 254996, 131503 |
| 45065 | 139859354 | 139860381 | 254996, 131503 |
| 45066 | 139877316 | 139877995 | 254996, 131503 |
| 45067 | 139926003 | 139928559 | 243056, 254996, 213523, |
| | | | 131503 |
| 45068 | 139936054 | 139938176 | 113108, 213523 |
| 45069 | 139939691 | 139940350 | 113108 |
| 45070 | 139943089 | 139945782 | 176087, 113108 |
| 45071 | 139953524 | 139954367 | 113108 |
| 45072 | 139975087 | 139977482 | |
| 45073 | 139981509 | 139983724 | |
| 45074 | 139986414 | 139987072 | |
| 45075 | 140011038 | 140013256 | 170458 |
| 45076 | 140018430 | 140019909 | 113119, 131495 |
| 45077 | 140022383 | 140022820 | 131495, 113119 |
| 45078 | 140026462 | 140027920 | 264052, 113141, 131495 |
| 45079 | 140043678 | 140045197 | 120314 |
| 45080 | 140070003 | 140072132 | 112855, 170445 |
| 45081 | 140079635 | 140081085 | 146007 |
| 45082 | 140090045 | 140091278 | 199990 |
| 45083 | 140105305 | 140106133 | 202515 |
| 45084 | 140356049 | 140358641 | 204967, 204965, 204963, |
| | | | 204962, 204961, 204969, |
| | | | 081842, 204970, 239389, |
| | | | 255408, 243232, 249158, |
| | | | 251664, 248383, 250120 |
| 45085 | 140699667 | 140701067 | 178913, 255729 |
| 45086 | 140855250 | 140856280 | 240184, 253537, 081853, |
| | | | 254221, 262209, 253873, |
| | | | 204956, 261934, 253485, |
| | | | 253159, 253731, 253846, |
| | | | 254122, 254245, 253767, |
| | | | 262576, 253305, 253953, |
| | | | 253910 |
| 45087 | 140900585 | 140901768 | 131504 |
| 45088 | 140904146 | 140905901 | 131504 |
| 45089 | 140939586 | 140941027 | 246422, 131504 |
| 45090 | 140943632 | 140944743 | 246422, 131504 |
| 45091 | 140969383 | 140970516 | 131504 |
| 45092 | 140983778 | 140984234 | 131504 |
| 45093 | 140996733 | 140999262 | 228737, 131504 |
| 45094 | 141015370 | 141017569 | 164620, 171720 |
| 45095 | 141081598 | 141082833 | |
| 45096 | 141220838 | 141221651 | |
| 45097 | 141227748 | 141231005 | |
| 45098 | 141253372 | 141254928 | 156453 |
| 45099 | 141255042 | 141256929 | 156453 |
| 45100 | 141257186 | 141259223 | 156453 |
| 45101 | 141298599 | 141299684 | |
| 45102 | 141302435 | 141304026 | 081791 |
| 45103 | 141347819 | 141350234 | 254099, 113555, 013561 |
| 45104 | 141365661 | 141366035 | 013561 |
| 45105 | 141376981 | 141377730 | 113552 |
| 45106 | 141391584 | 141396033 | 113552 |
| 45107 | 141487623 | 141489669 | 131507 |
| 45108 | 141512266 | 141513652 | 131507 |
| 45109 | 141625462 | 141626435 | |
| 45110 | 141629382 | 141630246 | |
| 45111 | 141698642 | 141700242 | 187678 |
| 45112 | 141702099 | 141704989 | 231185, 187678 |
| 45113 | 141735710 | 141737708 | 231185 |
| 45114 | 141739977 | 141741023 | 231185 |
| 45115 | 141742176 | 141742861 | 231185 |
| 45116 | 141879109 | 141879897 | 231185 |
| 45117 | 141890787 | 141893023 | 231185 |
| 45118 | 141901055 | 141901920 | 231185 |
| 45119 | 141909096 | 141910406 | 231185 |
| 45120 | 142059558 | 142061126 | 113578 |
| 45121 | 142092247 | 142093379 | |
| 45122 | 142096456 | 142097697 | |
| 45123 | 142149191 | 142150972 | 145819 |
| 45124 | 142187037 | 142187515 | 145819 |
| 45125 | 142197325 | 142198155 | 145819 |
| 45126 | 142200825 | 142202165 | 145819 |
| 45127 | 142254002 | 142254674 | 145819 |
| 45128 | 142300185 | 142301057 | 145819 |
| 45129 | 142338970 | 142342319 | 145819 |
| 45130 | 142361248 | 142362352 | 145819 |
| 45131 | 142430896 | 142431716 | 145819 |
| 45132 | 142485649 | 142486165 | 145819 |
| 45133 | 142487887 | 142488823 | 145819 |
| 45134 | 142520142 | 142520929 | 145819 |
| 45135 | 142545820 | 142547008 | 145819 |
| 45136 | 142562057 | 142563533 | 145819 |
| 45137 | 142579405 | 142580900 | 145819 |
| 45138 | 142599133 | 142599741 | 145819 |
| 45139 | 142608149 | 142610482 | 145819 |
| 45140 | 142610515 | 142612110 | |
| 45141 | 142612692 | 142615752 | |
| 45142 | 142619061 | 142620738 | |
| 45143 | 142623389 | 142624472 | |
| 45144 | 142624799 | 142626529 | |
| 45145 | 142628054 | 142630495 | |
| 45146 | 142659125 | 142659682 | 113580 |
| 45147 | 142696544 | 142697195 | 113580 |
| 45148 | 142727118 | 142727846 | 113580 |
| 45149 | 142735280 | 142736012 | 113580 |
| 45150 | 142756506 | 142757088 | 113580 |
| 45151 | 142779844 | 142780791 | 113580 |
| 45152 | 142781245 | 142785933 | 113580 |
| 45153 | 142791374 | 142792640 | 113580 |
| 45154 | 142797476 | 142798615 | 113580 |
| 45155 | 142811605 | 142815476 | 113580 |
| 45156 | 142861388 | 142862274 | |
| 45157 | 142870965 | 142872284 | 249429 |
| 45158 | 142873247 | 142876374 | 249429 |
| 45159 | 142885736 | 142888168 | 249429 |
| 45160 | 142893167 | 142893780 | 249429 |
| 45161 | 142913721 | 142914429 | |
| 45162 | 142915427 | 142916916 | |
| 45163 | 142923147 | 142923891 | |
| 45164 | 142933091 | 142935284 | |
| 45165 | 142939954 | 142943080 | 251205 |
| 45166 | 142949470 | 142950540 | |
| 45167 | 142973658 | 142977094 | |
| 45168 | 142979884 | 142981402 | |
| 45169 | 143008787 | 143010349 | 249881 |
| 45170 | 143032718 | 143033308 | 249881 |
| 45171 | 143053403 | 143054078 | 249881 |
| 45172 | 143059266 | 143059846 | 266478, 249881 |
| 45173 | 143062343 | 143063606 | 249881 |
| 45174 | 143129320 | 143129932 | 249881 |
| 45175 | 143549359 | 143550591 | 183775, 145817 |
| 45176 | 143830588 | 143832186 | 183775 |
| 45177 | 145213835 | 145215926 | 186314 |
| 45178 | 145304570 | 145305784 | |
| 45179 | 145315473 | 145318697 | 156463 |
| 45180 | 145323718 | 145327441 | 156463 |
| 45181 | 145345425 | 145346064 | 156463 |
| 45182 | 145353932 | 145357548 | 156463 |
| 45183 | 145357774 | 145360124 | 156463 |
| 45184 | 145360904 | 145362704 | 156463 |
| 45185 | 145561384 | 145562807 | 133706 |
| 45186 | 145581753 | 145584247 | 091009 |
| 45187 | 145593095 | 145593413 | 091009 |
| 45188 | 145662994 | 145664132 | 091009 |
| 45189 | 145826250 | 145828267 | 113649 |
| 45190 | 146130406 | 146131264 | 156475 |
| 45191 | 146547960 | 146550775 | |
| 45192 | 146554919 | 146555839 | |
| 45193 | 146557069 | 146557826 | |
| 45194 | 146833103 | 146833969 | 113657 |
| 45195 | 146992788 | 146993381 | 176049 |
| 45196 | 147024456 | 147025562 | 176049 |
| 45197 | 147050763 | 147051653 | 176049 |
| 45198 | 147152712 | 147153669 | 176049 |
| 45199 | 147180992 | 147181411 | |
| 45200 | 147214642 | 147216928 | |
| 45201 | 147217519 | 147218826 | |
| 45202 | 147285713 | 147286644 | 178776 |
| 45203 | 147365622 | 147366218 | |
| 45204 | 147391208 | 147391628 | |
| 45205 | 147525365 | 147527902 | |
| 45206 | 147762358 | 147764508 | 145868, 247199 |
| 45207 | 148061028 | 148061804 | |
| 45208 | 148205158 | 148206856 | 169252 |
| 45209 | 148220957 | 148222050 | |
| 45210 | 148294195 | 148295466 | |
| 45211 | 148340858 | 148342035 | 169247 |
| 45212 | 148344663 | 148346768 | 169247 |
| 45213 | 148346815 | 148348363 | 169247 |
| 45214 | 148363247 | 148364910 | 169247 |
| 45215 | 148381454 | 148382270 | 169247 |
| 45216 | 148384503 | 148385266 | 169247 |
| 45217 | 148398331 | 148399610 | 169247 |
| 45218 | 148416403 | 148417123 | 169247 |
| 45219 | 148493226 | 148493816 | |
| 45220 | 148509699 | 148511073 | |
| 45221 | 148511699 | 148517208 | |
| 45222 | 148520229 | 148524730 | 173210 |
| 45223 | 148528250 | 148537024 | 173210 |
| 45224 | 148538646 | 148543378 | 173210 |
| 45225 | 148553527 | 148554943 | 248647, 173210 |
| 45226 | 148574567 | 148576113 | 248647, 173210 |
| 45227 | 148582676 | 148586823 | 248647, 173210 |
| 45228 | 148606697 | 148609974 | 248647, 173210, 253406 |
| 45229 | 148641694 | 148642165 | 248647, 253406 |
| 45230 | 148650681 | 148651913 | 157510, 248647, 253406 |
| 45231 | 148724175 | 148725866 | 164284 |
| 45232 | 148862311 | 148862818 | |
| 45233 | 148865282 | 148866670 | |
| 45234 | 148928604 | 148932015 | 183111, 113712 |
| 45235 | 148960765 | 148961302 | 183111 |
| 45236 | 149019937 | 149021292 | |
| 45237 | 149102493 | 149104985 | |
| 45238 | 149109274 | 149113290 | 155846, 199047 |
| 45239 | 149126760 | 149127917 | 155846 |
| 45240 | 149128139 | 149130031 | 155846 |
| 45241 | 149177743 | 149179235 | 155846 |
| 45242 | 149207717 | 149208494 | 155846 |
| 45243 | 149237032 | 149237425 | |
| 45244 | 149339330 | 149341209 | 155850 |
| 45245 | 149379331 | 149381715 | 113716, 164296 |
| 45246 | 149516130 | 149520670 | 113721 |
| 45247 | 149521143 | 149523868 | 113721 |
| 45248 | 149564312 | 149565453 | |
| 45249 | 149643462 | 149644228 | 070808 |
| 45250 | 149696122 | 149697472 | 183876 |
| 45251 | 149736631 | 149738482 | 070814 |
| 45252 | 149791904 | 149792849 | 019582 |
| 45253 | 149807358 | 149808634 | |
| 45254 | 149827479 | 149829941 | 164587 |
| 45255 | 149838017 | 149839651 | |
| 45256 | 149843734 | 149844609 | |
| 45257 | 149851894 | 149853124 | |
| 45258 | 149864396 | 149869485 | 070614, 254333 |
| 45259 | 149871120 | 149872644 | 070614 |
| 45260 | 149889796 | 149890763 | 070614 |
| 45261 | 149891156 | 149892528 | 070614 |
| 45262 | 149894201 | 149896146 | 070614 |
| 45263 | 149896757 | 149898308 | 070614 |
| 45264 | 149900140 | 149903771 | 070614 |
| 45265 | 149919343 | 149923544 | 239191, 070614 |
| 45266 | 149927617 | 149928145 | 070614 |
| 45267 | 149938761 | 149941061 | |
| 45268 | 149961536 | 149962721 | |
| 45269 | 149979440 | 149980379 | |
| 45270 | 149989257 | 149990082 | 253852, 171992 |
| 45271 | 149993645 | 149994303 | 253852, 171992 |
| 45272 | 149994717 | 149996274 | 253852, 171992 |
| 45273 | 150003958 | 150005168 | 171992 |
| 45274 | 150017001 | 150023214 | 171992 |
| 45275 | 150024231 | 150025043 | 171992 |
| 45276 | 150035533 | 150036809 | 171992 |
| 45277 | 150036902 | 150039370 | 171992 |
| 45278 | 150079727 | 150081381 | 086589 |
| 45279 | 150137183 | 150139382 | 132912 |
| 45280 | 150142115 | 150143552 | |
| 45281 | 150383962 | 150385083 | |
| 45282 | 150396155 | 150396686 | |
| 45283 | 150399632 | 150401455 | 211445 |
| 45284 | 150414321 | 150423040 | 145901 |
| 45285 | 150438830 | 150440743 | 145901 |
| 45286 | 150441531 | 150444281 | 145901 |
| 45287 | 150446959 | 150449066 | 145901 |
| 45288 | 150452051 | 150452651 | 145901 |
| 45289 | 150455096 | 150456775 | 145901 |
| 45290 | 150456993 | 150466193 | 145901 |
| 45291 | 150472166 | 150476157 | 145901 |
| 45292 | 150479658 | 150480224 | |
| 45293 | 150480302 | 150482110 | 197043 |
| 45294 | 150483602 | 150485104 | 197043 |
| 45295 | 150487613 | 150488410 | 197043 |
| 45296 | 150535513 | 150537592 | 197043 |
| 45297 | 150544010 | 150544804 | |
| 45298 | 150588124 | 150589095 | 198624 |
| 45299 | 150602946 | 150604125 | 198624, 196743 |
| 45300 | 150614147 | 150614825 | 196743 |
| 45301 | 150629694 | 150631169 | 196743 |
| 45302 | 150631664 | 150632947 | 196743 |
| 45303 | 150649595 | 150650923 | 196743 |
| 45304 | 150826592 | 150828088 | 123643 |
| 45305 | 150997422 | 150998093 | |
| 45306 | 151134563 | 151135529 | 177556, 253921 |
| 45307 | 151137084 | 151138581 | 177556, 253921 |
| 45308 | 151149569 | 151152904 | 145907, 177556 |
| 45309 | 152286546 | 152287905 | 249484 |
| 45310 | 152336757 | 152337198 | 249484 |
| 45311 | 152373532 | 152374024 | 249484 |
| 45312 | 152825445 | 152826281 | |
| 45313 | 152934913 | 152935858 | 155511 |
| 45314 | 153417622 | 153419483 | 037749, 055147 |
| 45315 | 153456984 | 153458218 | 037749 |
| 45316 | 153568978 | 153570983 | 164574, 037749 |
| 45317 | 153665198 | 153667245 | 164574 |
| 45318 | 153667590 | 153668362 | 164574 |
| 45319 | 153747210 | 153748695 | 164574, 245275 |
| 45320 | 153824205 | 153826784 | 164576, 245275 |
| 45321 | 154024082 | 154024934 | |
| 45322 | 154026317 | 154028066 | |
| 45323 | 154028181 | 154028676 | |
| 45324 | 154032788 | 154034385 | |
| 45325 | 154061726 | 154063611 | |
| 45326 | 154080651 | 154081176 | |
| 45327 | 154081303 | 154081815 | |
| 45328 | 154088424 | 154089013 | |
| 45329 | 154092685 | 154093783 | 155506 |
| 45330 | 154093858 | 154094674 | 155506 |
| 45331 | 154119992 | 154120753 | 155506 |
| 45332 | 154132962 | 154138191 | 155506 |
| 45333 | 154158389 | 154159222 | 155506 |
| 45334 | 154195346 | 154196061 | 155506 |
| 45335 | 154213544 | 154215207 | 170271 |
| 45336 | 154216888 | 154217607 | 170271 |
| 45337 | 154229916 | 154230549 | 170271 |
| 45338 | 154236558 | 154239274 | 155508, 170271 |
| 45339 | 154316877 | 154318150 | 082516 |
| 45340 | 154319958 | 154321747 | 082515 |
| 45341 | 154798487 | 154799304 | |
| 45342 | 154835301 | 154836171 | |
| 45343 | 154839351 | 154840660 | |
| 45344 | 155613388 | 155614709 | 170624 |
| 45345 | 155794445 | 155795275 | 170624 |
| 45346 | 156472545 | 156473770 | 113249 |
| 45347 | 156476573 | 156477429 | 113249 |
| 45348 | 156485252 | 156487610 | 113249 |
| 45349 | 156526812 | 156527859 | 135077 |
| 45350 | 156568898 | 156571138 | 113263, 135077, 155868 |
| 45351 | 156692562 | 156694424 | 055163, 253653 |
| 45352 | 156713641 | 156714777 | 055163 |
| 45353 | 156716258 | 156719412 | 055163 |
| 45354 | 156727439 | 156728331 | 055163 |
| 45355 | 156906151 | 156907491 | 135074 |
| 45356 | 156911852 | 156912772 | 135074 |
| 45357 | 156937925 | 156939851 | 135074 |
| 45358 | 156947847 | 156949472 | 135074 |
| 45359 | 156974405 | 156978008 | 135074 |
| 45360 | 156981267 | 156982701 | 135074 |
| 45361 | 156986207 | 156986786 | 135074 |
| 45362 | 156990333 | 156992002 | 135074 |
| 45363 | 157001746 | 157003302 | 135074 |
| 45364 | 157158053 | 157158951 | 113272 |
| 45365 | 157170166 | 157171845 | 155858 |
| 45366 | 157229755 | 157230279 | 113282 |
| 45367 | 157249358 | 157249932 | 113282 |
| 45368 | 157272851 | 157273337 | 113282 |
| 45369 | 157284696 | 157286503 | 113282 |
| 45370 | 157297056 | 157299651 | |
| 45371 | 157353223 | 157354099 | |
| 45372 | 157369527 | 157370047 | |
| 45373 | 157375634 | 157376981 | |
| 45374 | 157477852 | 157478606 | |
| 45375 | 157511116 | 157512074 | |
| 45376 | 157580116 | 157581904 | |
| 45377 | 157878233 | 157878972 | 254350 |
| 45378 | 157883582 | 157884712 | |
| 45379 | 157888149 | 157888900 | |
| 45380 | 157890082 | 157891453 | |
| 45381 | 157897623 | 157899305 | |
| 45382 | 157970793 | 157971405 | |
| 45383 | 158081296 | 158081957 | |
| 45384 | 158122310 | 158123616 | 164330 |
| 45385 | 158157841 | 158158564 | 164330 |
| 45386 | 158180915 | 158181772 | 164330 |
| 45387 | 158202340 | 158202924 | 164330 |
| 45388 | 158369695 | 158370844 | 164330 |
| 45389 | 158402807 | 158403472 | 164330 |
| 45390 | 158461114 | 158462148 | 164330 |
| 45391 | 158634604 | 158637075 | 253256, 145860 |
| 45392 | 158689306 | 158691114 | 164332 |
| 45393 | 158890796 | 158891478 | 253298 |
| 45394 | 158937284 | 158939816 | |
| 45395 | 158945016 | 158945765 | |
| 45396 | 159291867 | 159293409 | 253311 |
| 45397 | 159300701 | 159301910 | |
| 45398 | 159337429 | 159340646 | |
| 45399 | 159342704 | 159344183 | 170214 |
| 45400 | 159361042 | 159361530 | 170214 |
| 45401 | 159363660 | 159364091 | 170214 |
| 45402 | 159374627 | 159375700 | 170214 |
| 45403 | 159401993 | 159403058 | |
| 45404 | 159435676 | 159436855 | 113312 |
| 45405 | 159545581 | 159547100 | 170234 |
| 45406 | 159742924 | 159743501 | 135083 |
| 45407 | 159845313 | 159847002 | 164609 |
| 45408 | 159894497 | 159895383 | 253522 |
| 45409 | 162806401 | 162807055 | 250061 |
| 45410 | 162861318 | 162861860 | 250061 |
| 45411 | 162863100 | 162866010 | 113328, 250061 |
| 45412 | 162886220 | 162888056 | 072571, 170584 |
| 45413 | 162916131 | 162917512 | 251018, 072571 |
| 45414 | 162930786 | 162934035 | 038274 |
| 45415 | 162936176 | 162936915 | 038274 |
| 45416 | 163076275 | 163076906 | |
| 45417 | 163187319 | 163187983 | |
| 45418 | 163365665 | 163366010 | |
| 45419 | 163785781 | 163786750 | 241956 |
| 45420 | 165054722 | 165055348 | 253693 |
| 45421 | 166143827 | 166144527 | |
| 45422 | 166146773 | 166147764 | |
| 45423 | 166149295 | 166151822 | |
| 45424 | 166721597 | 166722727 | 145934 |
| 45425 | 166805850 | 166806830 | 145934 |
| 45426 | 166869667 | 166870418 | 145934 |
| 45427 | 167080547 | 167081303 | 254187, 145934 |
| 45428 | 167126516 | 167127232 | 145934 |
| 45429 | 167412308 | 167412952 | 145934 |
| 45430 | 167563150 | 167563857 | 253925, 145934 |
| 45431 | 167590701 | 167591275 | 253925, 145934 |
| 45432 | 167696235 | 167697331 | |
| 45433 | 167714695 | 167720689 | 113645 |
| 45434 | 167722440 | 167723048 | 113645 |
| 45435 | 167728696 | 167731475 | 113645 |
| 45436 | 167731983 | 167733216 | 113645 |
| 45437 | 167735040 | 167736979 | 113645 |
| 45438 | 167739158 | 167740359 | 113645 |
| 45439 | 167740366 | 167745665 | 113645 |
| 45440 | 167751460 | 167753039 | 113645 |
| 45441 | 167755759 | 167756766 | 113645 |
| 45442 | 167776934 | 167777658 | 113645 |
| 45443 | 167780533 | 167781053 | 113645 |
| 45444 | 167789080 | 167790319 | 113645 |
| 45445 | 167791926 | 167793512 | 113645 |
| 45446 | 167912962 | 167914839 | 113643 |
| 45447 | 168004969 | 168007737 | 120137 |
| 45448 | 168018676 | 168019526 | |
| 45449 | 168027283 | 168028220 | |
| 45450 | 168037951 | 168038983 | |
| 45451 | 168051717 | 168052621 | |
| 45452 | 168073993 | 168074412 | |
| 45453 | 168078372 | 168079579 | |
| 45454 | 168108576 | 168109204 | 184347 |
| 45455 | 168304437 | 168305141 | 184347 |
| 45456 | 168416742 | 168417194 | 184347 |
| 45457 | 169009878 | 169011742 | 040275 |
| 45458 | 169577879 | 169578861 | |
| 45459 | 170288226 | 170289862 | 204764 |
| 45460 | 170292250 | 170293179 | 204764 |
| 45461 | 170813543 | 170816194 | 264249, 181163 |
| 45462 | 171164435 | 171164983 | |
| 45463 | 171372007 | 171373223 | 072803 |
| 45464 | 171380249 | 171382748 | 072803 |
| 45465 | 171383060 | 171384230 | 072803 |
| 45466 | 171399671 | 171400150 | 072803 |
| 45467 | 171423847 | 171424477 | 072803 |
| 45468 | 171431653 | 171434880 | 072803 |
| 45469 | 171591246 | 171591950 | 072786 |
| 45470 | 171614020 | 171616232 | 072786 |
| 45471 | 171709459 | 171711970 | 168246 |
| 45472 | 171781510 | 171782537 | 174705 |
| 45473 | 171787916 | 171790217 | 174705 |
| 45474 | 171809872 | 171810830 | 174705 |
| 45475 | 171845204 | 171845708 | 174705 |
| 45476 | 171847068 | 171848019 | 174705 |
| 45477 | 171870304 | 171870989 | 174705 |
| 45478 | 171880506 | 171882074 | 174705 |
| 45479 | 172086715 | 172088214 | 214357 |
| 45480 | 172141005 | 172144739 | |
| 45481 | 172158178 | 172159521 | |
| 45482 | 172190177 | 172210527 | 206741, 120129, 253736, |
| | | | 213386 |
| 45483 | 172215145 | 172217495 | |
| 45484 | 172220715 | 172222020 | |
| 45485 | 172224107 | 172230603 | |
| 45486 | 172232710 | 172235748 | |
| 45487 | 172257197 | 172265009 | 113719 |
| 45488 | 172266648 | 172267382 | 113719 |
| 45489 | 172274718 | 172290262 | 113719 |
| 45490 | 172293839 | 172299592 | 113719 |
| 45491 | 172312390 | 172317015 | 113719 |
| 45492 | 172317672 | 172334295 | 113719 |
| 45493 | 172337012 | 172337435 | 113719 |
| 45494 | 172337563 | 172339400 | 113719 |
| 45495 | 172340072 | 172340937 | 113719 |
| 45496 | 172357536 | 172360359 | 113719 |
| 45497 | 172380186 | 172384946 | 254295, 204758 |
| 45498 | 172385007 | 172387827 | 037241, 204758 |
| 45499 | 172410359 | 172412095 | 113732 |
| 45500 | 172443175 | 172444259 | 113732 |
| 45501 | 172482745 | 172485133 | 164463 |
| 45502 | 172520528 | 172521776 | 164463 |
| 45503 | 172571105 | 172572260 | 113734, 253172 |
| 45504 | 172592178 | 172592854 | |
| 45505 | 172754011 | 172757438 | 113739 |
| 45506 | 172768969 | 172770261 | |
| 45507 | 172877752 | 172883528 | 253968 |
| 45508 | 172899161 | 172900441 | 253141 |
| 45509 | 172924736 | 172927501 | |
| 45510 | 173042593 | 173044324 | 145919 |
| 45511 | 173054965 | 173055587 | |
| 45512 | 173097109 | 173099117 | |
| 45513 | 173115548 | 173117952 | 253428 |
| 45514 | 173146345 | 173147229 | 253686 |
| 45515 | 173148490 | 173149077 | 253686 |
| 45516 | 173189809 | 173196472 | |
| 45517 | 173197774 | 173199085 | |
| 45518 | 173208161 | 173210400 | |
| 45519 | 173215163 | 173219421 | 254211 |
| 45520 | 173229568 | 173230555 | 254211 |
| 45521 | 173233293 | 173234261 | 254211 |
| 45522 | 173250314 | 173252535 | |
| 45523 | 173252834 | 173254483 | |
| 45524 | 173309035 | 173311981 | |
| 45525 | 173314294 | 173320211 | 113742 |
| 45526 | 173359231 | 173360560 | 113742 |
| 45527 | 173380305 | 173381279 | 113742 |
| 45528 | 173395819 | 173397692 | |
| 45529 | 173399409 | 173401187 | 185056 |
| 45530 | 173616514 | 173617161 | 170091 |
| 45531 | 174441598 | 174442617 | |
| 45532 | 174873398 | 174873793 | |
| 45533 | 174894814 | 174895628 | |
| 45534 | 174901927 | 174903245 | |
| 45535 | 174904181 | 174906925 | 164466 |
| 45536 | 174999868 | 175000476 | |
| 45537 | 175281056 | 175282496 | 145920 |
| 45538 | 175294508 | 175295977 | 145920 |
| 45539 | 175316342 | 175317837 | |
| 45540 | 175348900 | 175350164 | 051596, 250820 |
| 45541 | 175779013 | 175779715 | 122203, 250909 |
| 45542 | 175787779 | 175789243 | 122203 |
| 45543 | 175814430 | 175817089 | 146066, 048162, 175414 |
| 45544 | 175842298 | 175844117 | 175416 |
| 45545 | 175873861 | 175876392 | 113194 |
| 45546 | 175893231 | 175893839 | 113194 |
| 45547 | 175928370 | 175928810 | 113194 |
| 45548 | 175960762 | 175965762 | 146083 |
| 45549 | 175969363 | 175971439 | 074276 |
| 45550 | 175972208 | 175973656 | 074276 |
| 45551 | 176073759 | 176075145 | 048140 |
| 45552 | 176432677 | 176434376 | 087206 |
| 45553 | 176448638 | 176450721 | 113761, 087206 |
| 45554 | 176513861 | 176515178 | 160867 |
| 45555 | 176559174 | 176562462 | 165671 |
| 45556 | 176727270 | 176732238 | 169230, 169228, 213347 |
| 45557 | 176752825 | 176753579 | |
| 45558 | 176762253 | 176762717 | 169223 |
| 45559 | 176777857 | 176779694 | 169223 |
| 45560 | 176781060 | 176783040 | |
| 45561 | 176784640 | 176785785 | 169220 |
| 45562 | 176793397 | 176794803 | 169220 |
| 45563 | 176795437 | 176796072 | 169220 |
| 45564 | 176797709 | 176798753 | 169220 |
| 45565 | 176800830 | 176801262 | |
| 45566 | 176804964 | 176806960 | 131183 |
| 45567 | 176835775 | 176836929 | 131187, 198055 |
| 45568 | 176852379 | 176854715 | 198055 |
| 45569 | 176873507 | 176875561 | 246334, 131188 |
| 45570 | 176881303 | 176883762 | 113758, 131188 |
| 45571 | 176921042 | 176921851 | 196923 |
| 45572 | 176924148 | 176925234 | 196923, 248996 |
| 45573 | 176942939 | 176944880 | 183258 |
| 45574 | 176964014 | 176965806 | 146067 |
| 45575 | 176972156 | 176974308 | 146067 |
| 45576 | 176979794 | 176982162 | 272459, 146067 |
| 45577 | 177018956 | 177020053 | 184840 |
| 45578 | 177026765 | 177028099 | 027847 |
| 45579 | 177557178 | 177559049 | 145916 |
| 45580 | 177579792 | 177581246 | 145912 |
| 45581 | 177630869 | 177634010 | 197451 |
| 45582 | 177640023 | 177641379 | 175309 |
| 45583 | 177654704 | 177656052 | 175309 |
| 45584 | 177657379 | 177660498 | 175309 |
| 45585 | 177663593 | 177664193 | |
| 45586 | 177757784 | 177760775 | 050767 |
| 45587 | 177762256 | 177763264 | 050767 |
| 45588 | 177764568 | 177766173 | 050767 |
| 45589 | 177887826 | 177888471 | 050767 |
| 45590 | 178052518 | 178054934 | 113240 |
| 45591 | 178156956 | 178158211 | 169131 |
| 45592 | 178286476 | 178287773 | 178338 |
| 45593 | 178322681 | 178323349 | 198939 |
| 45594 | 178450608 | 178451089 | 234284 |
| 45595 | 178487026 | 178488092 | 177932 |
| 45596 | 178976434 | 178978899 | 176783 |
| 45597 | 179049380 | 179052231 | 169045 |
| 45598 | 179104741 | 179106437 | 225051, 204659, 127022 |
| 45599 | 179107084 | 179108969 | 204659, 225051, 127022 |
| 45600 | 179124643 | 179127839 | 127022 |
| 45601 | 179158986 | 179160946 | 161021 |
| 45602 | 179181634 | 179182567 | 161021 |
| 45603 | 179222498 | 179223935 | 161021, 213316 |
| 45604 | 179228784 | 179234841 | 161011, 161013 |
| 45605 | 179240127 | 179240685 | 161011 |
| 45606 | 179243418 | 179253296 | 161011 |
| 45607 | 179255772 | 179256750 | 161011 |
| 45608 | 179259139 | 179261477 | 161010, 161011 |
| 45609 | 179263317 | 179265291 | 161011, 161010 |
| 45610 | 179265675 | 179267122 | 161010 |
| 45611 | 179267202 | 179269471 | 161010 |
| 45612 | 179285120 | 179286790 | 245317, 161010 |
| 45613 | 179333699 | 179335294 | 197226 |
| 45614 | 179386869 | 179387605 | 113269 |
| 45615 | 179453329 | 179453794 | 113269 |
| 45616 | 179461497 | 179461981 | 113269 |
| 45617 | 179497608 | 179499735 | 113269 |
| 45618 | 179502612 | 179503148 | |
| 45619 | 179516952 | 179517897 | |
| 45620 | 179718143 | 179719930 | 050748 |
| 45621 | 179891277 | 179892044 | |
| 45622 | 179893924 | 179894924 | |
| 45623 | 179921000 | 179922338 | 113300 |
| 45624 | 180228751 | 180230565 | 131446 |
| 45625 | 180234142 | 180236280 | 131446 |
| 45626 | 180236390 | 180238857 | 131446 |
| 45627 | 180256923 | 180259307 | 245060 |
| 45628 | 180287472 | 180289122 | 196670 |
| 45629 | 180600421 | 180601358 | |
| 45630 | 180614397 | 180616286 | |
| 45631 | 180617899 | 180619921 | 250222, 248473 |
| 45632 | 180633521 | 180635333 | |
| 45633 | 180644399 | 180645960 | |
| 45634 | 180648453 | 180651527 | 146063, 264732 |
| 45635 | 180668668 | 180675346 | 264549, 272296, 233937, |
| | | | 204628 |
| 45636 | 180686719 | 180689449 | 248275, 183718, 233937 |

[0574] The locations of ODSCs on Chromosome 6 are shown in Table 48.

TABLE 48
ODSC Locations on Chromosome 6

| SEQ ID NO. | Start | End | Overlapping Gene(s) |
|---|---|---|---|
| 45637 | 290777 | 293934 | 112679 |
| 45638 | 385835 | 388940 | |
| 45639 | 421959 | 424457 | |
| 45640 | 692265 | 693619 | 112685 |
| 45641 | 710419 | 711806 | 271727, 272463 |
| 45642 | 743716 | 744149 | 271727 |
| 45643 | 834860 | 838369 | |
| 45644 | 900181 | 902028 | |
| 45645 | 1183156 | 1183839 | |
| 45646 | 1228105 | 1228503 | |
| 45647 | 1311068 | 1312615 | |
| 45648 | 1322253 | 1323587 | |
| 45649 | 1324770 | 1326588 | |
| 45650 | 1334851 | 1337085 | |
| 45651 | 1481445 | 1481945 | |
| 45652 | 1609792 | 1610750 | 54598 |
| 45653 | 1679195 | 1679857 | 112699 |
| 45654 | 1797955 | 1798473 | 112699 |
| 45655 | 1820283 | 1820883 | 112699 |
| 45656 | 1832940 | 1833654 | 112699 |
| 45657 | 2016732 | 2017596 | 112699 |
| 45658 | 2225701 | 2226434 | 112699 |
| 45659 | 2245314 | 2247071 | 250903, 112699 |
| 45660 | 2515152 | 2515821 | |
| 45661 | 2634009 | 2635156 | 164385 |
| 45662 | 2715943 | 2716508 | 145949 |
| 45663 | 2765035 | 2767401 | 124535 |
| 45664 | 2791236 | 2791999 | |
| 45665 | 2838860 | 2842941 | 21355 |
| 45666 | 2846342 | 2847873 | |
| 45667 | 2850887 | 2851508 | |
| 45668 | 2853208 | 2855990 | 266750, 230438 |
| 45669 | 2866543 | 2867300 | 230438 |
| 45670 | 2875081 | 2878206 | 230438 |
| 45671 | 2902376 | 2903857 | 170542 |
| 45672 | 2952683 | 2953298 | 124570 |
| 45673 | 2970824 | 2972649 | 124570 |
| 45674 | 2980034 | 2981055 | |
| 45675 | 2988032 | 2991540 | 124588, 224846, 244041 |
| 45676 | 2998837 | 3001142 | 224846, 124588 |
| 45677 | 3001301 | 3002526 | 124588 |
| 45678 | 3053377 | 3054549 | |
| 45679 | 3063891 | 3064850 | 137275 |
| 45680 | 3068185 | 3070242 | 272277, 137275 |
| 45681 | 3075690 | 3076317 | 137275 |
| 45682 | 3118140 | 3120024 | 137274 |
| 45683 | 3126452 | 3127061 | 137274 |
| 45684 | 3135114 | 3136570 | 137274 |
| 45685 | 3136773 | 3140432 | 228170, 137274 |
| 45686 | 3156747 | 3158799 | 137267 |
| 45687 | 3162280 | 3164003 | |
| 45688 | 3231266 | 3232344 | 180822, 137285 |
| 45689 | 3258931 | 3260573 | 180822 |
| 45690 | 3295659 | 3296845 | 180822, 137266 |
| 45691 | 3324659 | 3325140 | 137266 |
| 45692 | 3334546 | 3335687 | 137266 |
| 45693 | 3340531 | 3341983 | 137266 |
| 45694 | 3356711 | 3357699 | 137266 |
| 45695 | 3363416 | 3365271 | 137266 |
| 45696 | 3366724 | 3368230 | 137266 |
| 45697 | 3372440 | 3374436 | 137266 |
| 45698 | 3376667 | 3377599 | 137266 |
| 45699 | 3377769 | 3378754 | 137266 |
| 45700 | 3380315 | 3384189 | 137266 |
| 45701 | 3389482 | 3391241 | 137266 |
| 45702 | 3403134 | 3404234 | 137266 |
| 45703 | 3405635 | 3407656 | 137266 |
| 45704 | 3409844 | 3411587 | 137266 |
| 45705 | 3418324 | 3421518 | 137266 |
| 45706 | 3454492 | 3458368 | 137266 |
| 45707 | 3517544 | 3518699 | |
| 45708 | 3522119 | 3524353 | |
| 45709 | 3591938 | 3593103 | |
| 45710 | 3742445 | 3744779 | 168994 |
| 45711 | 3747471 | 3753937 | 270504, 168994 |
| 45712 | 3787452 | 3791144 | |
| 45713 | 3796715 | 3799690 | |
| 45714 | 3803168 | 3804909 | |
| 45715 | 3808435 | 3809700 | |
| 45716 | 3825042 | 3827708 | |
| 45717 | 3834851 | 3836612 | 238158 |
| 45718 | 3839089 | 3845037 | 238158 |
| 45719 | 3847602 | 3850624 | 145945, 238158 |
| 45720 | 3869989 | 3871301 | |
| 45721 | 3871745 | 3873657 | |
| 45722 | 3884142 | 3885200 | |
| 45723 | 3909110 | 3915154 | 218472, 260604 |
| 45724 | 3919222 | 3919919 | |
| 45725 | 4007893 | 4009114 | |
| 45726 | 4017544 | 4019200 | 272248, 230648 |
| 45727 | 4020752 | 4022689 | 1 12739, 230648 |
| 45728 | 4058270 | 4060735 | 1 12739, 145975 |
| 45729 | 4066546 | 4067157 | 145975 |
| 45730 | 4125172 | 4127266 | 185689, 198721 |
| 45731 | 4130677 | 4131354 | 185689, 198721 |
| 45732 | 4133987 | 4136849 | 234817, 254821, 198721 |
| 45733 | 4212729 | 4213317 | |
| 45734 | 4271063 | 4271662 | |
| 45735 | 4358677 | 4360291 | |
| 45736 | 4647512 | 4648227 | |
| 45737 | 4775528 | 4777756 | 236336, 153046 |
| 45738 | 4810200 | 4811096 | 153046 |
| 45739 | 4848674 | 4849407 | 153046 |
| 45740 | 4941886 | 4944395 | 153046 |
| 45741 | 5003685 | 5005132 | 124787 |
| 45742 | 5059383 | 5060069 | |
| 45743 | 5061355 | 5061910 | |
| 45744 | 5068191 | 5068917 | |
| 45745 | 5084598 | 5085636 | |
| 45746 | 5115330 | 5115887 | 214113 |
| 45747 | 5118810 | 5119709 | 214113 |
| 45748 | 5121615 | 5122295 | 214113 |
| 45749 | 5190695 | 5191328 | 214113 |
| 45750 | 5205934 | 5206644 | 214113 |
| 45751 | 5260113 | 5262578 | 145982, 214113 |
| 45752 | 5333801 | 5334411 | 145982 |
| 45753 | 5456766 | 5458849 | 269985, 145982 |
| 45754 | 5892431 | 5893251 | |
| 45755 | 6152211 | 6152942 | 124491 |
| 45756 | 6409831 | 6410280 | 216863 |
| 45757 | 6686904 | 6687898 | |
| 45758 | 6711965 | 6714009 | |
| 45759 | 6723922 | 6726651 | |
| 45760 | 6748575 | 6749405 | |
| 45761 | 6810017 | 6812823 | |
| 45762 | 6823683 | 6824686 | |
| 45763 | 6851048 | 6851845 | |
| 45764 | 6856360 | 6857929 | |
| 45765 | 6956707 | 6958758 | |
| 45766 | 6975612 | 6976082 | |
| 45767 | 6998350 | 6998770 | |
| 45768 | 7041681 | 7043869 | |
| 45769 | 7051026 | 7053280 | |
| 45770 | 7058029 | 7059507 | |
| 45771 | 7106306 | 7110177 | 124782 |
| 45772 | 7121683 | 7122349 | 124782 |
| 45773 | 7129207 | 7130877 | 124782 |
| 45774 | 7139758 | 7143507 | 124782 |
| 45775 | 7159768 | 7160950 | 124782 |
| 45776 | 7161032 | 7162012 | 124782 |
| 45777 | 7165803 | 7167680 | 124782 |
| 45778 | 7170980 | 7172227 | 124782 |
| 45779 | 7201047 | 7201840 | 124782 |
| 45780 | 7214311 | 7218167 | 124782 |
| 45781 | 7235856 | 7237303 | 124782 |
| 45782 | 7238921 | 7240238 | 124782 |
| 45783 | 7260795 | 7262795 | |
| 45784 | 7267679 | 7268719 | 124783 |
| 45785 | 7270872 | 7271612 | 124783 |
| 45786 | 7312152 | 7314117 | 124783 |
| 45787 | 7389138 | 7391063 | 124784, 164304 |
| 45788 | 7463920 | 7464478 | |
| 45789 | 7505447 | 7506573 | 219993 |
| 45790 | 7541072 | 7544723 | 096696, 261189 |
| 45791 | 7548549 | 7549402 | 96696 |
| 45792 | 7550423 | 7551326 | 96696 |
| 45793 | 7561177 | 7562405 | 96696 |
| 45794 | 7581275 | 7582162 | 96696 |
| 45795 | 7590050 | 7591146 | 168566 |
| 45796 | 7697307 | 7699277 | |
| 45797 | 7701692 | 7702821 | |
| 45798 | 7899170 | 7899890 | 239264, 259040 |
| 45799 | 7909266 | 7911879 | 239264, 259040 |
| 45800 | 7975093 | 7976159 | 239264, 259040 |
| 45801 | 8047176 | 8048860 | 265818, 259040, 188428 |
| 45802 | 8063559 | 8065882 | 259040, 188428, 265818 |
| 45803 | 8079953 | 8081628 | 124802, 265818 |
| 45804 | 8082619 | 8086073 | 124802, 265818 |
| 45805 | 8101806 | 8103123 | 124802, 265818 |
| 45806 | 8434886 | 8436495 | 124786 |
| 45807 | 8555739 | 8558335 | |
| 45808 | 8633752 | 8634698 | |
| 45809 | 8639998 | 8640968 | |
| 45810 | 8652067 | 8653690 | 251164 |
| 45811 | 8655701 | 8657183 | |
| 45812 | 8664283 | 8665593 | |
| 45813 | 8707689 | 8708981 | |
| 45814 | 8743258 | 8744070 | |
| 45815 | 8905759 | 8907330 | |
| 45816 | 8908639 | 8909310 | |
| 45817 | 9139985 | 9142285 | 225775 |
| 45818 | 9704995 | 9705681 | 181355 |
| 45819 | 10033140 | 10034105 | 181355 |
| 45820 | 10403872 | 10405584 | 137203 |
| 45821 | 10426175 | 10427355 | 228478 |
| 45822 | 10441187 | 10441986 | 229401 |
| 45823 | 10510552 | 10512040 | 237685, 111846 |
| 45824 | 10527943 | 10530253 | 111846 |
| 45825 | 10693666 | 10696181 | 111845, 137434 |
| 45826 | 10722786 | 10723639 | 111843 |
| 45827 | 10734867 | 10735798 | |
| 45828 | 10747304 | 10748687 | 137210, 272162, 153157, |
| | | | 272097 |
| 45829 | 10758839 | 10760828 | 137210, 272162, 153157 |
| 45830 | 10801017 | 10801986 | 111837, 137210, 272162, |
| | | | 153157 |
| 45831 | 10838031 | 10839305 | 111837, 137210, 272162, |
| | | | 153157 |
| 45832 | 11011428 | 11013166 | 197977 |
| 45833 | 11043560 | 11045090 | 230314, 197977 |
| 45834 | 11054582 | 11056374 | 230314 |
| 45835 | 11066809 | 11068096 | 230314 |
| 45836 | 11093037 | 11095971 | 224531 |
| 45837 | 11098193 | 11098657 | 224531 |
| 45838 | 11143269 | 11145223 | |
| 45839 | 11187066 | 11189382 | 111859, 247925 |
| 45840 | 11206334 | 11211888 | 111859, 247925 |
| 45841 | 11226181 | 11226702 | 111859, 247925 |
| 45842 | 11228906 | 11234295 | 111859, 247925 |
| 45843 | 11236460 | 11237127 | 111859, 247925 |
| 45844 | 11262499 | 11264932 | 111859 |
| 45845 | 11275747 | 11276313 | 111859 |
| 45846 | 11317869 | 11319100 | 111859 |
| 45847 | 11341288 | 11347234 | 111859 |
| 45848 | 11350145 | 11352060 | 111859 |
| 45849 | 11362262 | 11369768 | 111859 |
| 45850 | 11392715 | 11394308 | |
| 45851 | 11398152 | 11399747 | |
| 45852 | 11411880 | 11415849 | |
| 45853 | 11423588 | 11425253 | 233656 |
| 45854 | 11425461 | 11427031 | 233656 |
| 45855 | 11428280 | 11430289 | 233656 |
| 45856 | 11431639 | 11436580 | 233656 |
| 45857 | 11472958 | 11474282 | 233656 |
| 45858 | 11535870 | 11536418 | |
| 45859 | 11537042 | 11539072 | 205269 |
| 45860 | 11585573 | 11587243 | |
| 45861 | 11592304 | 11593463 | |
| 45862 | 11598658 | 11599627 | |
| 45863 | 11684982 | 11686675 | |
| 45864 | 11761885 | 11762625 | 111863 |
| 45865 | 11764942 | 11769938 | 111863 |
| 45866 | 11785650 | 11786244 | 111863 |
| 45867 | 11794624 | 11796302 | 111863 |
| 45868 | 11803301 | 11804088 | 111863 |
| 45869 | 11810073 | 11810891 | 234427 |
| 45870 | 11853524 | 11856266 | |
| 45871 | 11867876 | 11869380 | |
| 45872 | 11869835 | 11870536 | |
| 45873 | 12000771 | 12002628 | |
| 45874 | 12007761 | 12013994 | 229896, 095951 |
| 45875 | 12045029 | 12045669 | 95951 |
| 45876 | 12119196 | 12119846 | 95951 |
| 45877 | 12289466 | 12293087 | 78401 |
| 45878 | 12295996 | 12297545 | 78401 |
| 45879 | 12322964 | 12325871 | |
| 45880 | 12331224 | 12333020 | |
| 45881 | 12335912 | 12337033 | |
| 45882 | 12339644 | 12341129 | |
| 45883 | 12342811 | 12344653 | |
| 45884 | 12348615 | 12349851 | |
| 45885 | 12363638 | 12367068 | |
| 45886 | 12368197 | 12369012 | |
| 45887 | 12369542 | 12372693 | |
| 45888 | 12383390 | 12384044 | |
| 45889 | 12472388 | 12475430 | |
| 45890 | 12483485 | 12485252 | |
| 45891 | 12491443 | 12493335 | |
| 45892 | 12538828 | 12539898 | |
| 45893 | 12573019 | 12574248 | |
| 45894 | 12592532 | 12593942 | |
| 45895 | 12958181 | 12958506 | 112137 |
| 45896 | 13256704 | 13257238 | 112137 |
| 45897 | 13269332 | 13269932 | 112137, 145979, 215022 |
| 45898 | 13289841 | 13290775 | 272379, 145979, 215022 |
| 45899 | 13327748 | 13329718 | 145979 |
| 45900 | 13383512 | 13384311 | 145990 |
| 45901 | 13406252 | 13409216 | 145990 |
| 45902 | 13412539 | 13415403 | 145990 |
| 45903 | 13417821 | 13418662 | 145990 |
| 45904 | 13456688 | 13458289 | 145990 |
| 45905 | 13461923 | 13462605 | 145990 |
| 45906 | 13474530 | 13475633 | 187461, 145990 |
| 45907 | 13477045 | 13478069 | 187461, 145990 |
| 45908 | 13479493 | 13482507 | 187461, 145990 |
| 45909 | 13483733 | 13488481 | 237786, 187461, 145990 |
| 45910 | 13548489 | 13549562 | |
| 45911 | 13558718 | 13560029 | |
| 45912 | 13561671 | 13563015 | |
| 45913 | 13566579 | 13567154 | |
| 45914 | 13573229 | 13575995 | 124523 |
| 45915 | 13614218 | 13616392 | 225921, 261071, 268059, |
| | | | 124523 |
| 45916 | 13678048 | 13678979 | 10017 |
| 45917 | 13710195 | 13713076 | 10017 |
| 45918 | 13811460 | 13812556 | 50393 |
| 45919 | 13813499 | 13815592 | 50393 |
| 45920 | 13863821 | 13864526 | |
| 45921 | 14035140 | 14036495 | |
| 45922 | 14074979 | 14076295 | |
| 45923 | 14117503 | 14118329 | 112149 |
| 45924 | 14148099 | 14148540 | |
| 45925 | 14210649 | 14212651 | |
| 45926 | 14311193 | 14311702 | |
| 45927 | 14366739 | 14367609 | |
| 45928 | 14477081 | 14477963 | |
| 45929 | 14560311 | 14560943 | |
| 45930 | 14758523 | 14759873 | |
| 45931 | 14761993 | 14764315 | |
| 45932 | 14889315 | 14890231 | |
| 45933 | 15026967 | 15027636 | 234261 |
| 45934 | 15036910 | 15037553 | 234261 |
| 45935 | 15133152 | 15133593 | |
| 45936 | 15244754 | 15247779 | 008083, 271888 |
| 45937 | 15247954 | 15249549 | 235488, 008083 |
| 45938 | 15256093 | 15256732 | 8083 |
| 45939 | 15266547 | 15267308 | 8083 |
| 45940 | 15274899 | 15275678 | 8083 |
| 45941 | 15282063 | 15282516 | 8083 |
| 45942 | 15284947 | 15285508 | 8083 |
| 45943 | 15330848 | 15331790 | 8083 |
| 45944 | 15396926 | 15397824 | 8083 |
| 45945 | 15431772 | 15432389 | 8083 |
| 45946 | 15504733 | 15505586 | 8083 |
| 45947 | 15662458 | 15663434 | 47579 |
| 45948 | 15755879 | 15756471 | |
| 45949 | 15761086 | 15761854 | |
| 45950 | 15763607 | 15764841 | |
| 45951 | 15897351 | 15897970 | |
| 45952 | 16128817 | 16130133 | 7944 |
| 45953 | 16239159 | 16240206 | 137198 |
| 45954 | 16244732 | 16245822 | 137198 |
| 45955 | 16333739 | 16334198 | 124788 |
| 45956 | 16334895 | 16335910 | 124788 |
| 45957 | 16345558 | 16346230 | 124788 |
| 45958 | 16356085 | 16356780 | 124788 |
| 45959 | 16472003 | 16473079 | 124788 |
| 45960 | 16539126 | 16540229 | 124788 |
| 45961 | 16582379 | 16584455 | 124788 |
| 45962 | 16585548 | 16587367 | 124788 |
| 45963 | 16676916 | 16678186 | 124788 |
| 45964 | 16681792 | 16682211 | 124788 |
| 45965 | 16683275 | 16685206 | 124788 |
| 45966 | 16685339 | 16686018 | 124788 |
| 45967 | 16698521 | 16700908 | 124788 |
| 45968 | 16712332 | 16714165 | 124788 |
| 45969 | 16759243 | 16765312 | 229931, 272341, 124788 |
| 45970 | 16769276 | 16770229 | |
| 45971 | 16819309 | 16820323 | |
| 45972 | 16821685 | 16823066 | |
| 45973 | 16823227 | 16824602 | |
| 45974 | 16910987 | 16911815 | |
| 45975 | 16985948 | 16987187 | |
| 45976 | 16999690 | 17000341 | |
| 45977 | 17042988 | 17043573 | |
| 45978 | 17101897 | 17102501 | 230873 |
| 45979 | 17115974 | 17116509 | 230873 |
| 45980 | 17159457 | 17159965 | |
| 45981 | 17179596 | 17180410 | |
| 45982 | 17278084 | 17279415 | |
| 45983 | 17280863 | 17282536 | 112183 |
| 45984 | 17310553 | 17313377 | |
| 45985 | 17354702 | 17355756 | |
| 45986 | 17392814 | 17395461 | 112186 |
| 45987 | 17397955 | 17398464 | 112186 |
| 45988 | 17405313 | 17406181 | 112186 |
| 45989 | 17472639 | 17473640 | 112186 |
| 45990 | 17492490 | 17493000 | 112186 |
| 45991 | 17584065 | 17584511 | |
| 45992 | 17599815 | 17602955 | 137414 |
| 45993 | 17603178 | 17603644 | 137414 |
| 45994 | 17703038 | 17703993 | 124789 |
| 45995 | 17704595 | 17707919 | 272269, 124789 |
| 45996 | 17864037 | 17867243 | 137177 |
| 45997 | 17868035 | 17868525 | 137177 |
| 45998 | 17905441 | 17909060 | 137177 |
| 45999 | 17929979 | 17931520 | 137177 |
| 46000 | 17986539 | 17989022 | 137177 |
| 46001 | 18034917 | 18035468 | |
| 46002 | 18043265 | 18043935 | |
| 46003 | 18056961 | 18057670 | |
| 46004 | 18081021 | 18082322 | |
| 46005 | 18118422 | 18119154 | |
| 46006 | 18122052 | 18123389 | 187566 |
| 46007 | 18146859 | 18149149 | 137364 |
| 46008 | 18152505 | 18153981 | 137364 |
| 46009 | 18154215 | 18156742 | 165097, 137364 |
| 46010 | 18263101 | 18265836 | 124795 |
| 46011 | 18386462 | 18390589 | 137393 |
| 46012 | 18405745 | 18406830 | 137393 |
| 46013 | 18432027 | 18433527 | 137393 |
| 46014 | 18468344 | 18468850 | 137393 |
| 46015 | 18471267 | 18471882 | |
| 46016 | 18501788 | 18502587 | |
| 46017 | 18584880 | 18585880 | |
| 46018 | 18598892 | 18599587 | |
| 46019 | 18632617 | 18633432 | |
| 46020 | 19804699 | 19806106 | 228412, 226786 |
| 46021 | 20126856 | 20127779 | 172197 |
| 46022 | 20129498 | 20131720 | 172197 |
| 46023 | 20168912 | 20169929 | 172197 |
| 46024 | 20181165 | 20181572 | 172197 |
| 46025 | 20200754 | 20203627 | 172197 |
| 46026 | 20212096 | 20213858 | 227803, 172197 |
| 46027 | 20400731 | 20405168 | 112242 |
| 46028 | 20424779 | 20425340 | 112242 |
| 46029 | 20442622 | 20443454 | 112242 |
| 46030 | 20447759 | 20448469 | 112242 |
| 46031 | 20448925 | 20449548 | 112242 |
| 46032 | 20534075 | 20535570 | 145996 |
| 46033 | 20542981 | 20543659 | 145996 |
| 46034 | 20631156 | 20631571 | 145996 |
| 46035 | 20773955 | 20774485 | 233848, 145996 |
| 46036 | 20865990 | 20868237 | 145996 |
| 46037 | 20875570 | 20879092 | 145996 |
| 46038 | 20952870 | 20953387 | 145996 |
| 46039 | 21022472 | 21023873 | 145996 |
| 46040 | 21043831 | 21047007 | 145996 |
| 46041 | 21061961 | 21062998 | 145996 |
| 46042 | 21103809 | 21104812 | 145996 |
| 46043 | 21109765 | 21110747 | 145996 |
| 46044 | 21110894 | 21112170 | 145996 |
| 46045 | 21138177 | 21139825 | 145996 |
| 46046 | 21141223 | 21144458 | 145996 |
| 46047 | 21149596 | 21150323 | 145996 |
| 46048 | 21306114 | 21306463 | |
| 46049 | 21587016 | 21590463 | |
| 46050 | 21593595 | 21597645 | 124766 |
| 46051 | 21731673 | 21732516 | 272168 |
| 46052 | 21738485 | 21739360 | 272168 |
| 46053 | 22236017 | 22238015 | |
| 46054 | 22247977 | 22250438 | |
| 46055 | 22250600 | 22252489 | |
| 46056 | 22366340 | 22367068 | |
| 46057 | 22467731 | 22468355 | |
| 46058 | 22827189 | 22829856 | 233358 |
| 46059 | 22880908 | 22882084 | 233358 |
| 46060 | 22888187 | 22889129 | 233358 |
| 46061 | 23414137 | 23414864 | |
| 46062 | 23435674 | 23437042 | |
| 46063 | 23560064 | 23560830 | |
| 46064 | 23584279 | 23584977 | |
| 46065 | 23890485 | 23891447 | |
| 46066 | 24283061 | 24284160 | 146038 |
| 46067 | 24341082 | 24342145 | 146038 |
| 46068 | 24382082 | 24384080 | |
| 46069 | 24385732 | 24386379 | |
| 46070 | 24402913 | 24404243 | 124532 |
| 46071 | 24488621 | 24490562 | 112293 |
| 46072 | 24494497 | 24496151 | 112294, 112293 |
| 46073 | 24504588 | 24505993 | 112294 |
| 46074 | 24665938 | 24669772 | 112304, 111802 |
| 46075 | 24672924 | 24673538 | 112304 |
| 46076 | 24718802 | 24722779 | 112308 |
| 46077 | 24743320 | 24744475 | 224164 |
| 46078 | 24774680 | 24776278 | 112312 |
| 46079 | 25006592 | 25007776 | 111913 |
| 46080 | 25083882 | 25084819 | 168405 |
| 46081 | 25138278 | 25140049 | 168405 |
| 46082 | 25278744 | 25281350 | 79691 |
| 46083 | 25366945 | 25367583 | 79691 |
| 46084 | 25369742 | 25370434 | 79691 |
| 46085 | 25659781 | 25661941 | 79689 |
| 46086 | 25755515 | 25757722 | 146039 |
| 46087 | 25770179 | 25770681 | 146039 |
| 46088 | 25831691 | 25832540 | 124568 |
| 46089 | 25874346 | 25874713 | 124564 |
| 46090 | 25875016 | 25877292 | 124564 |
| 46091 | 25880784 | 25881558 | 124564 |
| 46092 | 25881576 | 25882968 | 242387, 124564 |
| 46093 | 25883570 | 25884826 | |
| 46094 | 25899359 | 25901603 | |
| 46095 | 25903681 | 25904201 | |
| 46096 | 25910360 | 25910999 | |
| 46097 | 25927384 | 25932433 | 112337 |
| 46098 | 25968862 | 25969867 | 112343 |
| 46099 | 25970725 | 25972666 | 112343 |
| 46100 | 25991799 | 25993711 | 272462, 272558 |
| 46101 | 26016207 | 26018144 | 224447, 124610 |
| 46102 | 26020500 | 26022717 | 196176, 198366 |
| 46103 | 26025237 | 26028046 | 124529 |
| 46104 | 26031948 | 26032751 | 124693 |
| 46105 | 26033464 | 26034473 | 137259 |
| 46106 | 26043897 | 26045529 | 234816 |
| 46107 | 26054476 | 26057647 | 187837 |
| 46108 | 26066011 | 26066676 | |
| 46109 | 26087213 | 26088946 | 10704 |
| 46110 | 26102877 | 26105826 | 197061 |
| 46111 | 26119984 | 26126480 | 180573, 180596 |
| 46112 | 26155578 | 26160079 | 168298, 158373 |
| 46113 | 26188090 | 26189665 | 188987 |
| 46114 | 26204250 | 26206821 | 198518 |
| 46115 | 26216483 | 26217982 | 168274, 187990 |
| 46116 | 26284662 | 26287250 | 158406 |
| 46117 | 26305299 | 26306083 | |
| 46118 | 26311018 | 26312374 | |
| 46119 | 26312546 | 26314117 | |
| 46120 | 26322674 | 26323729 | |
| 46121 | 26330247 | 26330938 | |
| 46122 | 26331415 | 26332652 | |
| 46123 | 26351150 | 26352782 | |
| 46124 | 26383186 | 26384174 | 124508 |
| 46125 | 26388185 | 26389165 | 124508 |
| 46126 | 26421497 | 26422335 | 124549 |
| 46127 | 26432888 | 26433412 | |
| 46128 | 26440307 | 26441198 | 111801 |
| 46129 | 26457302 | 26458890 | 112763 |
| 46130 | 26515064 | 26515659 | |
| 46131 | 26520326 | 26521869 | |
| 46132 | 26532736 | 26533855 | |
| 46133 | 26536839 | 26539571 | 182952 |
| 46134 | 26544504 | 26545156 | 182952 |
| 46135 | 26553414 | 26555886 | |
| 46136 | 26556511 | 26557453 | |
| 46137 | 26571675 | 26573250 | |
| 46138 | 26596050 | 26598257 | 146109 |
| 46139 | 26986833 | 26988547 | 238621, 224843 |
| 46140 | 27112850 | 27114377 | 197903 |
| 46141 | 27125173 | 27126421 | |
| 46142 | 27129603 | 27130512 | |
| 46143 | 27144626 | 27146454 | |
| 46144 | 27155629 | 27156994 | |
| 46145 | 27247710 | 27248359 | |
| 46146 | 27356262 | 27357020 | 124613 |
| 46147 | 27440094 | 27441485 | 96654 |
| 46148 | 27446251 | 27447802 | |
| 46149 | 27463318 | 27464061 | |
| 46150 | 27470445 | 27471860 | |
| 46151 | 27473156 | 27473969 | |
| 46152 | 27486042 | 27487645 | |
| 46153 | 27559338 | 27559913 | |
| 46154 | 27560101 | 27560938 | |
| 46155 | 27636089 | 27636879 | |
| 46156 | 27652012 | 27652767 | |
| 46157 | 27655704 | 27656548 | |
| 46158 | 27719927 | 27721539 | |
| 46159 | 27758775 | 27761117 | |
| 46160 | 27763342 | 27764097 | |
| 46161 | 27792054 | 27792743 | 197238 |
| 46162 | 27797460 | 27799234 | 197914 |
| 46163 | 27804016 | 27807035 | 184348, 233822 |
| 46164 | 27807290 | 27807822 | 233822 |
| 46165 | 27839638 | 27841787 | 198558, 182572 |
| 46166 | 27862844 | 27863777 | |
| 46167 | 27869962 | 27871576 | |
| 46168 | 27884994 | 27885601 | |
| 46169 | 28047857 | 28049557 | 197279, 272009 |
| 46170 | 28071990 | 28073354 | |
| 46171 | 28103822 | 28105846 | 261839, 269293 |
| 46172 | 28109233 | 28110546 | 198315 |
| 46173 | 28186136 | 28187245 | 176933 |
| 46174 | 28192242 | 28193932 | 137185 |
| 46175 | 28219321 | 28221094 | 187626 |
| 46176 | 28234292 | 28236308 | 197062 |
| 46177 | 28248920 | 28249698 | 137338 |
| 46178 | 28302453 | 28305166 | 235109 |
| 46179 | 28317183 | 28318708 | 189298, 235109 |
| 46180 | 28366809 | 28368011 | 158691 |
| 46181 | 28410842 | 28411596 | 187987 |
| 46182 | 28510329 | 28511236 | |
| 46183 | 28521101 | 28523158 | |
| 46184 | 28554195 | 28555839 | 246350, 232040 |
| 46185 | 28574641 | 28575390 | 232040 |
| 46186 | 28696808 | 28697734 | |
| 46187 | 28784710 | 28785265 | |
| 46188 | 28805116 | 28807044 | 225173 |
| 46189 | 28830904 | 28832308 | 225595 |
| 46190 | 28848861 | 28849509 | |
| 46191 | 28862858 | 28865715 | 224157 |
| 46192 | 28889179 | 28892650 | 204713 |
| 46193 | 28907852 | 28909797 | |
| 46194 | 28920738 | 28922023 | |
| 46195 | 28948785 | 28951107 | |
| 46196 | 28952725 | 28954178 | 227214 |
| 46197 | 29184196 | 29184786 | |
| 46198 | 29200386 | 29201027 | 232505 |
| 46199 | 29495690 | 29496696 | |
| 46200 | 29526918 | 29528162 | 213886, 204681 |
| 46201 | 29528642 | 29529576 | 204681 |
| 46202 | 29617101 | 29618170 | |
| 46203 | 29690729 | 29691589 | 225864, 204642 |
| 46204 | 29716320 | 29717197 | 214922, 273340 |
| 46205 | 29719763 | 29721340 | 272236 |
| 46206 | 29732622 | 29733047 | |
| 46207 | 29759378 | 29760923 | 176998, 181126 |
| 46208 | 29812247 | 29813738 | |
| 46209 | 29854512 | 29856389 | 230521, 206341 |
| 46210 | 29875291 | 29876680 | 235963 |
| 46211 | 29877583 | 29878224 | |
| 46212 | 29892054 | 29895167 | 230795, 227262 |
| 46213 | 29909463 | 29911195 | 227766, 206503 |
| 46214 | 29931929 | 29936268 | |
| 46215 | 29943841 | 29945597 | 204625 |
| 46216 | 29973833 | 29974516 | 204622, 237669, 204623 |
| 46217 | 30001057 | 30002341 | 204623 |
| 46218 | 30012274 | 30012729 | 204623 |
| 46219 | 30027933 | 30030189 | 204623, 066379 |
| 46220 | 30033936 | 30035774 | 204619 |
| 46221 | 30069635 | 30070485 | |
| 46222 | 30079987 | 30081958 | 204616, 231226 |
| 46223 | 30098430 | 30099293 | |
| 46224 | 30103302 | 30104153 | 204614 |
| 46225 | 30122414 | 30125097 | 204613 |
| 46226 | 30130109 | 30132491 | 204610 |
| 46227 | 30168109 | 30169433 | 234127 |
| 46228 | 30173388 | 30175908 | 234127 |
| 46229 | 30179599 | 30182678 | 234127 |
| 46230 | 30293390 | 30295735 | 204599, 231074, 270604 |
| 46231 | 30312384 | 30313660 | 241370, 248167 |
| 46232 | 30433842 | 30434648 | 229068 |
| 46233 | 30456655 | 30458187 | 204592 |
| 46234 | 30483435 | 30484776 | 235781 |
| 46235 | 30495113 | 30498192 | |
| 46236 | 30501161 | 30502215 | |
| 46237 | 30523186 | 30526000 | 204576, 204590 |
| 46238 | 30530567 | 30531149 | 204576 |
| 46239 | 30538111 | 30540191 | 204574 |
| 46240 | 30582077 | 30586770 | 204568, 222894, 204569 |
| 46241 | 30594301 | 30595540 | 137343 |
| 46242 | 30614670 | 30616239 | 204564 |
| 46243 | 30640018 | 30641217 | 204560 |
| 46244 | 30646579 | 30648314 | 146112 |
| 46245 | 30649757 | 30652015 | 146112 |
| 46246 | 30653777 | 30656497 | 137404, 146112 |
| 46247 | 30663017 | 30663541 | |
| 46248 | 30677161 | 30677692 | 137337, 224328 |
| 46249 | 30684406 | 30685931 | 137337 |
| 46250 | 30687035 | 30689971 | 196230 |
| 46251 | 30707548 | 30712792 | 272273, 137331, 137312 |
| 46252 | 30726522 | 30727919 | |
| 46253 | 30730935 | 30732529 | |
| 46254 | 30736227 | 30739232 | 228022 |
| 46255 | 30748588 | 30751039 | 228022 |
| 46256 | 30795492 | 30796792 | 214894 |
| 46257 | 30874956 | 30876630 | 137411, 213780 |
| 46258 | 30880894 | 30883565 | 213780, 137411 |
| 46259 | 30894291 | 30895001 | |
| 46260 | 30910262 | 30910890 | 168631 |
| 46261 | 30922495 | 30923020 | 233529 |
| 46262 | 30928648 | 30929145 | |
| 46263 | 31090382 | 31091184 | 204540 |
| 46264 | 31125180 | 31126498 | 137310, 204536 |
| 46265 | 31164692 | 31166631 | 206344, 272501 |
| 46266 | 31169803 | 31173077 | 206344 |
| 46267 | 31239158 | 31240406 | 204525 |
| 46268 | 31324159 | 31325332 | 271581, 234745 |
| 46269 | 31334506 | 31335112 | 228432 |
| 46270 | 31367283 | 31371708 | 199332, 206337, 204520 |
| 46271 | 31430031 | 31431521 | 233902, 206337 |
| 46272 | 31508695 | 31510773 | 234006, 265236, 198563, |
| | | | 254870 |
| 46273 | 31514363 | 31516046 | 204498, 254870, 213760 |
| 46274 | 31528009 | 31528666 | |
| 46275 | 31545874 | 31546924 | 232810 |
| 46276 | 31548536 | 31549590 | 227507 |
| 46277 | 31587651 | 31589814 | 204469 |
| 46278 | 31619145 | 31621688 | 204444, 204463 |
| 46279 | 31627121 | 31628761 | 227198, 204439 |
| 46280 | 31631850 | 31634848 | 204435, 263020, 204438 |
| 46281 | 31648423 | 31649488 | 204428 |
| 46282 | 31650429 | 31651200 | 204428 |
| 46283 | 31658022 | 31658542 | 204422, 204427 |
| 46284 | 31669965 | 31671943 | 204427, 204422 |
| 46285 | 31696954 | 31698177 | 213722 |
| 46286 | 31701734 | 31704610 | 213719 |
| 46287 | 31705721 | 31708045 | 204410, 255152, 213719 |
| 46288 | 31743746 | 31745456 | 204394, 204396 |
| 46289 | 31762122 | 31764168 | 204394 |
| 46290 | 31773813 | 31775212 | 204392 |
| 46291 | 31781335 | 31783691 | 204389, 204390 |
| 46292 | 31788850 | 31791103 | |
| 46293 | 31794257 | 31795880 | 204388 |
| 46294 | 31801657 | 31804983 | 204387, 201823, 201754 |
| 46295 | 31829784 | 31831066 | 204385, 204386 |
| 46296 | 31864538 | 31866387 | 166278, 204371 |
| 46297 | 31869310 | 31871024 | 204366, 166278 |
| 46298 | 31878974 | 31879526 | 166278 |
| 46299 | 31894482 | 31897503 | 244255, 243649, 166278 |
| 46300 | 31907916 | 31908501 | 244255, 243649, 166278 |
| 46301 | 31913093 | 31917033 | 166278, 244255, 243649 |
| 46302 | 31925812 | 31927755 | 204351, 204356 |
| 46303 | 31938329 | 31941479 | 204344, 204348 |
| 46304 | 31946687 | 31948004 | 204344 |
| 46305 | 32094837 | 32096410 | 213676 |
| 46306 | 32097369 | 32098455 | 204315 |
| 46307 | 32121464 | 32122783 | 258388, 204314, 221988 |
| 46308 | 32142924 | 32144770 | 204310 |
| 46309 | 32144779 | 32146995 | 204308, 204310 |
| 46310 | 32156910 | 32159252 | 213654, 204304 |
| 46311 | 32162709 | 32164861 | 213654, 204301 |
| 46312 | 32394977 | 32395465 | |
| 46313 | 32764657 | 32765395 | |
| 46314 | 32805371 | 32806906 | 250264, 204267 |
| 46315 | 32811000 | 32812689 | 240065, 204261, 204264 |
| 46316 | 32820369 | 32822870 | 168394, 240065 |
| 46317 | 32828767 | 32829686 | |
| 46318 | 32861527 | 32863224 | |
| 46319 | 32920750 | 32921402 | 248993, 204257 |
| 46320 | 32934739 | 32942568 | 263756, 204256, 223837, |
| | | | 204257 |
| 46321 | 33020891 | 33021511 | |
| 46322 | 33129026 | 33130070 | |
| 46323 | 33162964 | 33163822 | 204231 |
| 46324 | 33167177 | 33169462 | 202441, 112473, 204231 |
| 46325 | 33172170 | 33173615 | 204228, 112473 |
| 46326 | 33174957 | 33176912 | 204227, 199036 |
| 46327 | 33215944 | 33218213 | 232940, 223501 |
| 46328 | 33238621 | 33241035 | 231500, 223501 |
| 46329 | 33256017 | 33258425 | 204220, 227057 |
| 46330 | 33264568 | 33268334 | 231925, 237441, 204220 |
| 46331 | 33280158 | 33282673 | 236104, 231925 |
| 46332 | 33285206 | 33285890 | 236104 |
| 46333 | 33287248 | 33289395 | 204209 |
| 46334 | 33289617 | 33291568 | 204209 |
| 46335 | 33358312 | 33359635 | 237649 |
| 46336 | 33377350 | 33379521 | 112511, 237649 |
| 46337 | 33384872 | 33387098 | 112514 |
| 46338 | 33392681 | 33394217 | 197283 |
| 46339 | 33398066 | 33398608 | 197283 |
| 46340 | 33421202 | 33422942 | 213588, 197283 |
| 46341 | 33538470 | 33539694 | |
| 46342 | 33547072 | 33548444 | 30110 |
| 46343 | 33556828 | 33559726 | 197251 |
| 46344 | 33640388 | 33641586 | 96433 |
| 46345 | 33684077 | 33685507 | |
| 46346 | 33688071 | 33689149 | |
| 46347 | 33706480 | 33709168 | 161896 |
| 46348 | 33711513 | 33715620 | 161896 |
| 46349 | 33717959 | 33719400 | |
| 46350 | 33728628 | 33730539 | |
| 46351 | 33755207 | 33757749 | 161904 |
| 46352 | 33807709 | 33808529 | |
| 46353 | 33874112 | 33876266 | 233183 |
| 46354 | 34163926 | 34164766 | |
| 46355 | 34191495 | 34192842 | |
| 46356 | 34202920 | 34206403 | 137309 |
| 46357 | 34210307 | 34212720 | 137309 |
| 46358 | 34214690 | 34217440 | 186577 |
| 46359 | 34273901 | 34274524 | 272325, 270800 |
| 46360 | 34358718 | 34361200 | 272325, 270800 |
| 46361 | 34382224 | 34383541 | 270800 |
| 46362 | 34392886 | 34394262 | 270800, 124614 |
| 46363 | 34430173 | 34430714 | |
| 46364 | 34494584 | 34495524 | 124507 |
| 46365 | 34570121 | 34571000 | 196821 |
| 46366 | 34577263 | 34578861 | 196821 |
| 46367 | 34623797 | 34626353 | 196821 |
| 46368 | 34626510 | 34627431 | 196821 |
| 46369 | 34631490 | 34633093 | 196821 |
| 46370 | 34635066 | 34635815 | 196821 |
| 46371 | 34640594 | 34642853 | 196821 |
| 46372 | 34648192 | 34649810 | 196821 |
| 46373 | 34662006 | 34665627 | 272288, 196821 |
| 46374 | 34707389 | 34709265 | |
| 46375 | 34709822 | 34710453 | |
| 46376 | 34710919 | 34711743 | |
| 46377 | 34724160 | 34726116 | 124562 |
| 46378 | 34758683 | 34761680 | 65060 |
| 46379 | 34763575 | 34764202 | 65060 |
| 46380 | 34778503 | 34779969 | 65060 |
| 46381 | 34854988 | 34856503 | 64995 |
| 46382 | 34856680 | 34858006 | 64999 |
| 46383 | 34869405 | 34870416 | 64999 |
| 46384 | 34889872 | 34890458 | 64999 |
| 46385 | 34921025 | 34922434 | 64999 |
| 46386 | 34984016 | 34985719 | 64999 |
| 46387 | 35129499 | 35130689 | |
| 46388 | 35132564 | 35134793 | |
| 46389 | 35152434 | 35154065 | |
| 46390 | 35211000 | 35212097 | 146197 |
| 46391 | 35226629 | 35228833 | 65029 |
| 46392 | 35230343 | 35230716 | 65029 |
| 46393 | 35232349 | 35233770 | 65029 |
| 46394 | 35309721 | 35312052 | 112033 |
| 46395 | 35326906 | 35329648 | 112033 |
| 46396 | 35335226 | 35340166 | 112033 |
| 46397 | 35358443 | 35362485 | 112033 |
| 46398 | 35367525 | 35371539 | 112033 |
| 46399 | 35382385 | 35384899 | 112033 |
| 46400 | 35419970 | 35420884 | 112039 |
| 46401 | 35435644 | 35437531 | 198755 |
| 46402 | 35463057 | 35465959 | 112041, 007866 |
| 46403 | 35568636 | 35571977 | 96060 |
| 46404 | 35655294 | 35657327 | 96060 |
| 46405 | 35689599 | 35690967 | 96060 |
| 46406 | 35691041 | 35692476 | 96060 |
| 46407 | 35692631 | 35698086 | 96060 |
| 46408 | 35698492 | 35701071 | |
| 46409 | 35707348 | 35708258 | 157343 |
| 46410 | 35799147 | 35799798 | 197753 |
| 46411 | 35886841 | 35889638 | 96063 |
| 46412 | 35940952 | 35942458 | 112053 |
| 46413 | 35995055 | 35997704 | 112062 |
| 46414 | 36032544 | 36033098 | 112062 |
| 46415 | 36043346 | 36043929 | 112062 |
| 46416 | 36061862 | 36064774 | 112062 |
| 46417 | 36163445 | 36165249 | 096070, 246982 |
| 46418 | 36354108 | 36355002 | 224666, 010030 |
| 46419 | 36381808 | 36383016 | 179165 |
| 46420 | 36390656 | 36391589 | 179165 |
| 46421 | 36408388 | 36412004 | 112078, 179165 |
| 46422 | 36482167 | 36483136 | 112079 |
| 46423 | 36490778 | 36492318 | 112079 |
| 46424 | 36514071 | 36515504 | 112079 |
| 46425 | 36545197 | 36545632 | |
| 46426 | 36560889 | 36563666 | 112081 |
| 46427 | 36576787 | 36577399 | |
| 46428 | 36584068 | 36585468 | |
| 46429 | 36591066 | 36592445 | |
| 46430 | 36609164 | 36609742 | |
| 46431 | 36610125 | 36612257 | |
| 46432 | 36633812 | 36635946 | |
| 46433 | 36643507 | 36649261 | 124762 |
| 46434 | 36649355 | 36652641 | 124762 |
| 46435 | 36655916 | 36657009 | |
| 46436 | 36797624 | 36798265 | 124772 |
| 46437 | 36841326 | 36843270 | 137168, 198663 |
| 46438 | 36853176 | 36854572 | 198663 |
| 46439 | 36881541 | 36882510 | 198663 |
| 46440 | 36887670 | 36888434 | 198663 |
| 46441 | 36952626 | 36954927 | 137409 |
| 46442 | 36990998 | 36991894 | 146192 |
| 46443 | 37001073 | 37002072 | |
| 46444 | 37023619 | 37028306 | |
| 46445 | 37028963 | 37030040 | |
| 46446 | 37050667 | 37052065 | |
| 46447 | 37069633 | 37072067 | |
| 46448 | 37095487 | 37097311 | |
| 46449 | 37097556 | 37100015 | |
| 46450 | 37101337 | 37103574 | |
| 46451 | 37111518 | 37113203 | |
| 46452 | 37114317 | 37114976 | |
| 46453 | 37115839 | 37116594 | |
| 46454 | 37123030 | 37123864 | |
| 46455 | 37136427 | 37140551 | 137193 |
| 46456 | 37172101 | 37172733 | |
| 46457 | 37207126 | 37213726 | 172738 |
| 46458 | 37225192 | 37227743 | 065491, 172738 |
| 46459 | 37251549 | 37252057 | 65491 |
| 46460 | 37400224 | 37401928 | 137200 |
| 46461 | 37441127 | 37441766 | 137200 |
| 46462 | 37466836 | 37467802 | 198937 |
| 46463 | 37483582 | 37485309 | 204110 |
| 46464 | 37587890 | 37588974 | |
| 46465 | 37664510 | 37666417 | 112139 |
| 46466 | 37685507 | 37686172 | |
| 46467 | 37709585 | 37710370 | |
| 46468 | 37729596 | 37730314 | |
| 46469 | 37758827 | 37759745 | |
| 46470 | 37762485 | 37762974 | |
| 46471 | 37766430 | 37768000 | |
| 46472 | 37785685 | 37789006 | 156639, 225945 |
| 46473 | 37856872 | 37858035 | 156639 |
| 46474 | 38046299 | 38047447 | 156639 |
| 46475 | 38062694 | 38063276 | 156639 |
| 46476 | 38099241 | 38099877 | 156639 |
| 46477 | 38229646 | 38230395 | 183826 |
| 46478 | 38372051 | 38373284 | 183826 |
| 46479 | 38606754 | 38608374 | 183826 |
| 46480 | 38669798 | 38671317 | 124767 |
| 46481 | 38813701 | 38815008 | 124721 |
| 46482 | 38874887 | 38875542 | 124721 |
| 46483 | 38877003 | 38877702 | 124721 |
| 46484 | 38942336 | 38942845 | 124721 |
| 46485 | 38943289 | 38943911 | 124721 |
| 46486 | 39082102 | 39083675 | 112167 |
| 46487 | 39152683 | 39153820 | |
| 46488 | 39173717 | 39174684 | 164626 |
| 46489 | 39181726 | 39183797 | 164626 |
| 46490 | 39192021 | 39194160 | 164626 |
| 46491 | 39196623 | 39197715 | 164626 |
| 46492 | 39246734 | 39249952 | |
| 46493 | 39261410 | 39262911 | |
| 46494 | 39342911 | 39343634 | 164627 |
| 46495 | 39674544 | 39677186 | 164627 |
| 46496 | 39692466 | 39693721 | 164627 |
| 46497 | 39887837 | 39888287 | 124615 |
| 46498 | 39901195 | 39902434 | 124615 |
| 46499 | 39906623 | 39907382 | |
| 46500 | 39915493 | 39916588 | |
| 46501 | 39948698 | 39949732 | |
| 46502 | 40493707 | 40494370 | 156564 |
| 46503 | 40495364 | 40496318 | 156564 |
| 46504 | 40555159 | 40556047 | 156564 |
| 46505 | 40682346 | 40683238 | 237947 |
| 46506 | 40689837 | 40691146 | |
| 46507 | 40786654 | 40787955 | |
| 46508 | 40874326 | 40875688 | |
| 46509 | 40924841 | 40931776 | |
| 46510 | 40963671 | 40966785 | |
| 46511 | 40967124 | 40967787 | |
| 46512 | 40980670 | 40981998 | |
| 46513 | 41004198 | 41009544 | 124602, 124596 |
| 46514 | 41013563 | 41014269 | 124596 |
| 46515 | 41031447 | 41034055 | 124701, 124596 |
| 46516 | 41038755 | 41042106 | 001167, 124596 |
| 46517 | 41336490 | 41337151 | |
| 46518 | 41395111 | 41396299 | |
| 46519 | 41417278 | 41418461 | |
| 46520 | 41513197 | 41515965 | 137166, 234753 |
| 46521 | 41526060 | 41526588 | 137166 |
| 46522 | 41536216 | 41536877 | 137166 |
| 46523 | 41545699 | 41547239 | 137166 |
| 46524 | 41552512 | 41553233 | 137166 |
| 46525 | 41570254 | 41571447 | |
| 46526 | 41649657 | 41650406 | |
| 46527 | 41680251 | 41681747 | 112561 |
| 46528 | 41701744 | 41703038 | 231 102, 112561 |
| 46529 | 41703130 | 41703572 | 112561 |
| 46530 | 41746922 | 41749105 | 124593, 137218 |
| 46531 | 41753879 | 41756122 | 214736, 137218, 124593 |
| 46532 | 41862406 | 41864355 | 164663 |
| 46533 | 41885126 | 41886218 | 207371, 124641 |
| 46534 | 41887591 | 41889995 | 112578, 124641 |
| 46535 | 41908883 | 41909982 | 112576 |
| 46536 | 42012976 | 42013859 | 112576 |
| 46537 | 42015675 | 42017002 | 112576 |
| 46538 | 42017720 | 42019003 | 137413, 112576 |
| 46539 | 42055912 | 42056319 | |
| 46540 | 42084888 | 42086953 | 188112 |
| 46541 | 42134058 | 42135185 | 48545 |
| 46542 | 42166854 | 42169412 | |
| 46543 | 42171457 | 42173803 | |
| 46544 | 42178363 | 42179001 | 48544 |
| 46545 | 42184635 | 42186051 | 48544 |
| 46546 | 42191751 | 42196056 | 124496 |
| 46547 | 42531267 | 42533225 | 24048 |
| 46548 | 42688490 | 42689130 | 112619 |
| 46549 | 42712718 | 42715771 | 124659 |
| 46550 | 42748757 | 42752921 | 112624 |
| 46551 | 42812271 | 42813769 | 112624 |
| 46552 | 42844864 | 42846284 | |
| 46553 | 42846371 | 42848654 | 146223 |
| 46554 | 42857647 | 42859014 | 221821, 146223 |
| 46555 | 42896172 | 42898139 | 137161 |
| 46556 | 42907141 | 42907717 | |
| 46557 | 42938536 | 42939673 | 124587 |
| 46558 | 42945617 | 42947598 | 124587 |
| 46559 | 42980762 | 42981842 | 124733 |
| 46560 | 42988468 | 42990048 | 124541, 124702 |
| 46561 | 43026461 | 43028808 | 112651, 137171 |
| 46562 | 43137765 | 43141067 | 112658 |
| 46563 | 43141092 | 43142747 | 112658 |
| 46564 | 43149180 | 43150559 | 112659, 112658 |
| 46565 | 43196323 | 43197514 | 112667 |
| 46566 | 43214795 | 43215609 | 146216 |
| 46567 | 43234705 | 43239223 | 146216 |
| 46568 | 43241572 | 43247558 | 146216 |
| 46569 | 43254682 | 43255998 | 146216 |
| 46570 | 43258169 | 43259307 | |
| 46571 | 43265162 | 43267915 | 146215, 137204 |
| 46572 | 43273648 | 43274645 | 146215 |
| 46573 | 43275403 | 43277250 | 146215, 171467 |
| 46574 | 43296148 | 43297272 | 220614, 171467 |
| 46575 | 43336062 | 43337953 | 171467 |
| 46576 | 43394897 | 43396416 | 124574 |
| 46577 | 43404236 | 43404920 | 124574 |
| 46578 | 43445010 | 43446235 | 137221 |
| 46579 | 43449043 | 43450106 | 137221 |
| 46580 | 43477835 | 43478757 | 204052, 171453 |
| 46581 | 43483749 | 43485752 | 137207, 171453 |
| 46582 | 43542770 | 43544776 | 170734, 124571 |
| 46583 | 43593552 | 43598505 | 124688, 172432 |
| 46584 | 43603001 | 43604588 | 124688 |
| 46585 | 43654583 | 43655835 | 96080 |
| 46586 | 43736904 | 43742962 | 112715, 272114 |
| 46587 | 43765531 | 43769996 | |
| 46588 | 43770502 | 43775854 | |
| 46589 | 43778818 | 43779456 | |
| 46590 | 43790967 | 43792762 | |
| 46591 | 43805912 | 43806992 | |
| 46592 | 43823777 | 43824718 | |
| 46593 | 43878450 | 43886912 | |
| 46594 | 43958494 | 43959093 | |
| 46595 | 43960636 | 43961268 | |
| 46596 | 43969662 | 43970696 | 181577, 237686 |
| 46597 | 44010104 | 44012212 | 237686 |
| 46598 | 44026031 | 44027992 | 237686 |
| 46599 | 44040368 | 44041328 | 237686 |
| 46600 | 44062173 | 44063250 | |
| 46601 | 44093858 | 44096792 | 137216, 180992 |
| 46602 | 44184963 | 44186206 | 262179 |
| 46603 | 44186708 | 44188130 | 112759 |
| 46604 | 44188924 | 44192419 | 112759 |
| 46605 | 44196195 | 44197724 | 112759 |
| 46606 | 44201671 | 44204385 | 112759 |
| 46607 | 44204391 | 44207687 | |
| 46608 | 44213148 | 44216585 | 96384 |
| 46609 | 44223774 | 44226151 | 146232, 157593 |
| 46610 | 44230543 | 44233706 | 146232 |
| 46611 | 44280345 | 44281561 | 124608, 272442 |
| 46612 | 44349398 | 44349857 | |
| 46613 | 44354082 | 44356195 | 96401 |
| 46614 | 44364629 | 44365195 | 96401 |
| 46615 | 44383833 | 44384304 | 96401 |
| 46616 | 44432302 | 44432761 | |
| 46617 | 44457144 | 44459483 | |
| 46618 | 44460734 | 44463474 | |
| 46619 | 44705745 | 44706922 | |
| 46620 | 44888540 | 44889939 | 196284 |
| 46621 | 44907990 | 44908715 | 196284 |
| 46622 | 44927794 | 44929529 | 196284 |
| 46623 | 44933446 | 44935589 | 196284 |
| 46624 | 45344281 | 45346884 | 196284, 124813 |
| 46625 | 45412889 | 45414443 | 124813 |
| 46626 | 45516345 | 45517179 | 124813 |
| 46627 | 45742471 | 45743416 | |
| 46628 | 45811264 | 45813815 | |
| 46629 | 45932907 | 45934177 | 112782 |
| 46630 | 46012853 | 46013495 | 112782 |
| 46631 | 46020927 | 46021728 | 112782 |
| 46632 | 46029793 | 46030726 | 112782 |
| 46633 | 46097046 | 46098509 | 001561, 231769 |
| 46634 | 46346572 | 46347265 | 172348 |
| 46635 | 46359900 | 46361598 | 172348 |
| 46636 | 46616503 | 46617706 | 146233 |
| 46637 | 46618680 | 46619299 | 146233 |
| 46638 | 46619810 | 46621687 | 153291, 146233 |
| 46639 | 46789063 | 46790045 | 112818 |
| 46640 | 46893305 | 46894286 | 69122 |
| 46641 | 47014889 | 47015776 | |
| 46642 | 47079316 | 47080150 | |
| 46643 | 47093829 | 47095335 | |
| 46644 | 47102253 | 47104028 | |
| 46645 | 47114690 | 47115599 | |
| 46646 | 47128809 | 47129309 | |
| 46647 | 47135383 | 47137142 | |
| 46648 | 47155214 | 47157194 | |
| 46649 | 47276257 | 47278286 | 146072 |
| 46650 | 47330250 | 47332109 | |
| 46651 | 47371181 | 47373499 | |
| 46652 | 47381544 | 47383286 | |
| 46653 | 47386700 | 47388952 | |
| 46654 | 47427495 | 47428649 | |
| 46655 | 47431751 | 47432428 | |
| 46656 | 47444329 | 47447152 | 198087, 270761 |
| 46657 | 47709377 | 47710144 | |
| 46658 | 48733853 | 48734731 | |
| 46659 | 49430035 | 49431322 | 031691, 146085 |
| 46660 | 49480992 | 49481811 | 203972 |
| 46661 | 49490498 | 49491486 | 203972 |
| 46662 | 49491555 | 49492081 | 203972 |
| 46663 | 49508196 | 49510164 | |
| 46664 | 49518011 | 49522134 | 197261 |
| 46665 | 49523284 | 49524780 | 197261 |
| 46666 | 49734253 | 49735123 | |
| 46667 | 50059322 | 50059818 | |
| 46668 | 50060275 | 50062296 | 226733 |
| 46669 | 51065895 | 51066785 | |
| 46670 | 51179737 | 51180229 | |
| 46671 | 51543623 | 51544713 | 170927 |
| 46672 | 51569682 | 51570410 | 170927 |
| 46673 | 51602264 | 51603045 | 170927 |
| 46674 | 51928276 | 51928989 | 170927 |
| 46675 | 51941768 | 51943386 | 170927 |
| 46676 | 51951857 | 51952894 | 170927 |
| 46677 | 51989276 | 51990531 | |
| 46678 | 52136454 | 52137162 | 112118 |
| 46679 | 52149113 | 52150388 | 112118 |
| 46680 | 52216985 | 52217815 | |
| 46681 | 52236375 | 52236774 | 170915 |
| 46682 | 52253883 | 52256009 | 170915 |
| 46683 | 52284263 | 52286516 | 96093 |
| 46684 | 52288541 | 52289654 | 96093 |
| 46685 | 52291312 | 52292141 | 96093 |
| 46686 | 52368497 | 52369481 | 065308, 096093 |
| 46687 | 52378696 | 52380340 | 065308, 096093 |
| 46688 | 52382237 | 52383860 | 065308, 096093 |
| 46689 | 52386385 | 52388356 | 096093, 065308 |
| 46690 | 52406846 | 52410764 | 65308 |
| 46691 | 52415444 | 52417593 | 65308 |
| 46692 | 52430721 | 52433190 | 65308 |
| 46693 | 52440521 | 52443052 | 225791, 065308 |
| 46694 | 52453277 | 52454499 | |
| 46695 | 52454714 | 52455774 | |
| 46696 | 52475558 | 52476233 | |
| 46697 | 52527865 | 52530177 | 216775 |
| 46698 | 52530264 | 52531281 | 216775 |
| 46699 | 52535134 | 52536786 | 96092 |
| 46700 | 52588425 | 52591982 | |
| 46701 | 52599501 | 52600512 | |
| 46702 | 52606609 | 52607869 | 237674 |
| 46703 | 52609862 | 52613095 | |
| 46704 | 52652178 | 52655871 | |
| 46705 | 52667682 | 52668242 | 243955 |
| 46706 | 52684862 | 52685597 | |
| 46707 | 52793941 | 52795236 | |
| 46708 | 52858847 | 52861058 | 202198, 170899 |
| 46709 | 52906801 | 52907588 | 112144 |
| 46710 | 52920702 | 52921670 | 112146, 112144 |
| 46711 | 52925487 | 52927488 | 112144, 112146 |
| 46712 | 52984290 | 52985274 | |
| 46713 | 53032832 | 53034375 | |
| 46714 | 53051376 | 53052185 | |
| 46715 | 53161784 | 53162418 | 12660 |
| 46716 | 53164032 | 53164599 | 12660 |
| 46717 | 53165455 | 53167754 | 12660 |
| 46718 | 53171286 | 53172755 | 12660 |
| 46719 | 53173861 | 53174378 | 12660 |
| 46720 | 53212365 | 53214802 | 12660 |
| 46721 | 53223162 | 53226009 | |
| 46722 | 53241243 | 53242934 | |
| 46723 | 53276056 | 53277192 | |
| 46724 | 53296286 | 53299222 | |
| 46725 | 53301652 | 53303256 | |
| 46726 | 53304137 | 53305675 | |
| 46727 | 53329192 | 53331417 | |
| 46728 | 53360631 | 53362067 | |
| 46729 | 53395026 | 53395598 | 1084 |
| 46730 | 53408237 | 53410266 | 1084 |
| 46731 | 53411892 | 53413882 | 1084 |
| 46732 | 53430655 | 53431145 | 231683, 001084 |
| 46733 | 53478027 | 53482850 | 231683, 001084 |
| 46734 | 53494638 | 53495172 | 235899 |
| 46735 | 53498016 | 53500708 | |
| 46736 | 53515207 | 53517694 | 124743 |
| 46737 | 53537340 | 53539609 | |
| 46738 | 53599262 | 53599810 | |
| 46739 | 53605681 | 53606205 | 227885 |
| 46740 | 53657765 | 53658904 | 228614 |
| 46741 | 53658930 | 53660335 | 137269, 228614 |
| 46742 | 53719264 | 53720358 | 137269 |
| 46743 | 53791402 | 53792087 | |
| 46744 | 53793753 | 53794631 | |
| 46745 | 53862922 | 53864857 | 236996, 146147 |
| 46746 | 53874782 | 53876968 | 146147 |
| 46747 | 53902190 | 53902962 | 146147, 235050 |
| 46748 | 53962533 | 53963011 | 146147 |
| 46749 | 53999733 | 54001391 | 146147 |
| 46750 | 54062803 | 54063425 | 146147 |
| 46751 | 54284180 | 54285570 | |
| 46752 | 54880940 | 54881656 | |
| 46753 | 56252189 | 56253664 | 124749 |
| 46754 | 56263776 | 56265900 | |
| 46755 | 56305332 | 56306129 | |
| 46756 | 56340692 | 56341193 | 151914 |
| 46757 | 56346217 | 56349781 | 151914 |
| 46758 | 56375630 | 56376237 | 151914 |
| 46759 | 56381927 | 56382672 | 151914 |
| 46760 | 56405774 | 56406616 | 151914 |
| 46761 | 56406892 | 56408074 | 151914 |
| 46762 | 56506725 | 56508946 | 151914 |
| 46763 | 56513328 | 56515992 | 151914 |
| 46764 | 56547240 | 56550317 | 151914 |
| 46765 | 56550513 | 56559868 | 151914 |
| 46766 | 56577358 | 56580859 | 151914 |
| 46767 | 56583711 | 56584663 | 151914 |
| 46768 | 56593240 | 56596568 | 151914 |
| 46769 | 56604996 | 56607504 | 151914 |
| 46770 | 56628565 | 56629497 | 151914 |
| 46771 | 56636114 | 56636875 | 151914 |
| 46772 | 56672137 | 56672552 | 151914 |
| 46773 | 56727803 | 56729292 | 231441, 151914 |
| 46774 | 56740302 | 56741527 | 151914 |
| 46775 | 56803223 | 56803808 | 151914 |
| 46776 | 56910997 | 56911691 | 168116 |
| 46777 | 56954511 | 56955153 | 112200 |
| 46778 | 57036455 | 57039388 | 112208, 226803 |
| 46779 | 57085879 | 57087683 | 112210 |
| 46780 | 57181289 | 57183085 | 146143 |
| 46781 | 57365048 | 57365871 | 146143 |
| 46782 | 58776533 | 58779338 | |
| 46783 | 64056947 | 64058540 | |
| 46784 | 64061848 | 64063988 | |
| 46785 | 64092727 | 64095869 | |
| 46786 | 64101305 | 64101929 | |
| 46787 | 64120437 | 64122005 | |
| 46788 | 64128548 | 64129073 | |
| 46789 | 64156976 | 64159255 | |
| 46790 | 64161453 | 64164600 | |
| 46791 | 64167442 | 64170601 | |
| 46792 | 64175003 | 64177604 | |
| 46793 | 64185138 | 64186848 | |
| 46794 | 64187293 | 64188726 | |
| 46795 | 64214474 | 64215559 | |
| 46796 | 64219197 | 64221129 | |
| 46797 | 64222474 | 64228107 | |
| 46798 | 64228282 | 64230089 | |
| 46799 | 64231631 | 64233665 | 112245 |
| 46800 | 64236827 | 64238764 | 112245 |
| 46801 | 64246847 | 64248154 | 112245 |
| 46802 | 64270607 | 64271863 | 112245 |
| 46803 | 64273747 | 64276721 | 112245 |
| 46804 | 64280230 | 64286491 | 266680, 112245 |
| 46805 | 64299709 | 64300533 | |
| 46806 | 64307574 | 64309026 | |
| 46807 | 64345420 | 64347524 | 118482 |
| 46808 | 64359248 | 64360580 | 118482 |
| 46809 | 64373335 | 64374158 | 118482 |
| 46810 | 64384408 | 64385584 | 118482 |
| 46811 | 64386801 | 64387928 | 118482 |
| 46812 | 64514141 | 64517517 | 236345, 188107 |
| 46813 | 64646062 | 64646732 | 188107 |
| 46814 | 70441909 | 70442269 | 168216 |
| 46815 | 70490200 | 70491598 | 168216 |
| 46816 | 70505687 | 70507307 | 168216 |
| 46817 | 70535510 | 70536268 | |
| 46818 | 70576472 | 70577553 | 82293 |
| 46819 | 71083749 | 71085901 | |
| 46820 | 71106651 | 71110076 | 237643 |
| 46821 | 71122297 | 71124439 | 082269, 224349 |
| 46822 | 71276420 | 71277506 | 154079 |
| 46823 | 71376912 | 71379049 | 112305 |
| 46824 | 71434023 | 71434657 | 112305 |
| 46825 | 71548277 | 71550067 | 112305 |
| 46826 | 71558829 | 71560165 | 112305 |
| 46827 | 71997811 | 71999467 | 119900, 232295 |
| 46828 | 72009539 | 72010741 | 119900, 269966, 232295 |
| 46829 | 72042570 | 72045185 | 269966 |
| 46830 | 72094907 | 72095634 | 269966, 233237 |
| 46831 | 72103069 | 72104353 | 269966, 233237 |
| 46832 | 72113310 | 72116805 | 207827, 269966, 233237 |
| 46833 | 72122934 | 72124703 | 269966, 233237 |
| 46834 | 72128960 | 72131298 | 233237 |
| 46835 | 72209284 | 72209842 | |
| 46836 | 72211505 | 72212305 | |
| 46837 | 73123472 | 73124371 | |
| 46838 | 74161096 | 74162300 | 164430 |
| 46839 | 74170714 | 74172846 | 135297 |
| 46840 | 74222760 | 74223738 | |
| 46841 | 74224190 | 74227316 | 156508 |
| 46842 | 74228731 | 74234437 | 229862, 156508 |
| 46843 | 74258291 | 74258834 | 229862 |
| 46844 | 74275804 | 74278369 | 229862 |
| 46845 | 74288709 | 74291327 | |
| 46846 | 74295031 | 74296733 | |
| 46847 | 74362770 | 74365482 | 119899 |
| 46848 | 74413843 | 74414445 | 156535 |
| 46849 | 74483975 | 74484825 | 156535 |
| 46850 | 74508164 | 74509566 | 156535 |
| 46851 | 74510716 | 74514629 | 156535 |
| 46852 | 74753766 | 74755054 | |
| 46853 | 75243375 | 75245320 | 272243, 223786 |
| 46854 | 75808402 | 75808869 | 111799 |
| 46855 | 75892723 | 75893296 | 111799 |
| 46856 | 75933637 | 75934612 | |
| 46857 | 75952607 | 75954412 | 112695 |
| 46858 | 75993331 | 75995697 | 225793, 112697 |
| 46859 | 76233952 | 76234647 | |
| 46860 | 76310576 | 76313229 | 112701 |
| 46861 | 76445260 | 76446392 | |
| 46862 | 76458030 | 76459907 | 196586 |
| 46863 | 76463110 | 76464212 | 196586 |
| 46864 | 77499506 | 77500805 | |
| 46865 | 77595056 | 77596104 | |
| 46866 | 77727212 | 77727758 | |
| 46867 | 77782485 | 77783447 | |
| 46868 | 78544201 | 78544827 | 269964 |
| 46869 | 79093665 | 79094164 | |
| 46870 | 79099535 | 79100860 | |
| 46871 | 79519887 | 79521580 | 229495 |
| 46872 | 79576749 | 79577875 | 146243 |
| 46873 | 79786275 | 79787284 | 146247 |
| 46874 | 79787376 | 79789289 | 146247 |
| 46875 | 79868429 | 79869260 | |
| 46876 | 79880555 | 79881272 | |
| 46877 | 79924882 | 79925340 | 118418 |
| 46878 | 79943110 | 79944616 | 270362, 118418 |
| 46879 | 80246544 | 80247833 | 135338 |
| 46880 | 80279824 | 80281074 | |
| 46881 | 80314198 | 80314984 | |
| 46882 | 80339958 | 80341861 | 198478 |
| 46883 | 80342308 | 80342839 | 198478 |
| 46884 | 80386465 | 80387446 | 198478 |
| 46885 | 80487323 | 80488495 | |
| 46886 | 80581885 | 80583087 | 233835 |
| 46887 | 80584308 | 80585040 | 233835 |
| 46888 | 80587741 | 80588541 | |
| 46889 | 80713449 | 80714706 | 112742 |
| 46890 | 80815679 | 80817157 | 83123 |
| 46891 | 80872766 | 80876065 | 83123 |
| 46892 | 80907179 | 80907815 | 83123 |
| 46893 | 80964323 | 80964864 | 83123 |
| 46894 | 81166791 | 81167437 | 233967 |
| 46895 | 81236995 | 81238357 | |
| 46896 | 81250608 | 81251749 | |
| 46897 | 81317427 | 81318108 | |
| 46898 | 81332366 | 81332858 | |
| 46899 | 81581592 | 81582428 | |
| 46900 | 81974503 | 81975772 | |
| 46901 | 82201083 | 82201898 | 112773 |
| 46902 | 82270719 | 82273267 | 112773 |
| 46903 | 82346386 | 82347381 | 112773 |
| 46904 | 82406135 | 82406683 | 112773 |
| 46905 | 82409878 | 82410664 | 112773 |
| 46906 | 82437412 | 82438226 | 112773, 232031 |
| 46907 | 82453219 | 82453836 | 112773 |
| 46908 | 82459924 | 82464351 | 112773 |
| 46909 | 82468875 | 82470353 | |
| 46910 | 82496342 | 82499464 | |
| 46911 | 82526010 | 82526685 | |
| 46912 | 82530195 | 82531522 | |
| 46913 | 82541004 | 82541407 | |
| 46914 | 82607339 | 82608410 | 226453 |
| 46915 | 82618567 | 82619694 | 226453 |
| 46916 | 82642760 | 82644554 | 226453 |
| 46917 | 82645936 | 82650255 | |
| 46918 | 82691141 | 82692067 | |
| 46919 | 82726977 | 82727465 | |
| 46920 | 82732062 | 82733019 | |
| 46921 | 82853273 | 82854570 | |
| 46922 | 82956132 | 82959119 | 5700 |
| 46923 | 83774778 | 83775857 | 118420 |
| 46924 | 83776994 | 83778588 | 83097 |
| 46925 | 83892260 | 83894385 | 13375 |
| 46926 | 83902223 | 83904316 | 013392, 013375 |
| 46927 | 83908766 | 83910131 | |
| 46928 | 84112888 | 84113241 | 65833 |
| 46929 | 84139851 | 84141502 | 65833 |
| 46930 | 84190083 | 84190588 | |
| 46931 | 84568848 | 84570158 | 65615 |
| 46932 | 84881681 | 84882754 | 135315 |
| 46933 | 84936756 | 84938134 | 135315 |
| 46934 | 84979334 | 84980798 | |
| 46935 | 85125850 | 85126359 | |
| 46936 | 85126931 | 85127390 | |
| 46937 | 85158910 | 85159537 | 231776 |
| 46938 | 85483717 | 85485042 | |
| 46939 | 85577098 | 85578303 | |
| 46940 | 86069922 | 86072203 | |
| 46941 | 86114410 | 86116032 | |
| 46942 | 86159143 | 86162461 | 135318 |
| 46943 | 86177408 | 86179798 | 135318 |
| 46944 | 86225745 | 86226355 | 135317 |
| 46945 | 86289103 | 86290976 | 271793, 135317 |
| 46946 | 86302644 | 86304652 | 135317, 271793 |
| 46947 | 86322616 | 86323338 | 271793, 135316 |
| 46948 | 86351194 | 86354727 | 135316 |
| 46949 | 86386946 | 86389412 | 203875 |
| 46950 | 86456997 | 86457971 | |
| 46951 | 87861148 | 87862550 | 188994, 272008 |
| 46952 | 87864228 | 87866335 | 272008, 188994 |
| 46953 | 88031982 | 88033087 | 226524, 111850, 164411 |
| 46954 | 88117473 | 88118638 | 213204, 272514 |
| 46955 | 88182022 | 88183827 | 213204, 164414 |
| 46956 | 88298786 | 88300675 | 135336, 146282 |
| 46957 | 88369735 | 88370326 | 135336 |
| 46958 | 88381045 | 88382287 | |
| 46959 | 88409863 | 88412649 | 135334 |
| 46960 | 88432052 | 88433778 | |
| 46961 | 88439909 | 88442868 | |
| 46962 | 88498681 | 88499763 | |
| 46963 | 88530108 | 88530520 | |
| 46964 | 89011924 | 89012642 | 234426 |
| 46965 | 89069556 | 89071003 | 234426 |
| 46966 | 89371650 | 89373044 | 111880 |
| 46967 | 89419466 | 89420161 | 111880 |
| 46968 | 89524444 | 89525743 | 111880 |
| 46969 | 89550499 | 89551135 | 111880 |
| 46970 | 89672406 | 89673782 | 111880 |
| 46971 | 89694966 | 89696265 | |
| 46972 | 89731487 | 89734368 | |
| 46973 | 89743057 | 89747725 | |
| 46974 | 89759823 | 89761095 | |
| 46975 | 89776934 | 89777996 | |
| 46976 | 89780490 | 89781280 | |
| 46977 | 89788733 | 89794286 | 146278, 271931 |
| 46978 | 89795893 | 89797685 | |
| 46979 | 89809687 | 89810469 | 154548 |
| 46980 | 89826795 | 89827886 | 154548 |
| 46981 | 89829980 | 89830446 | |
| 46982 | 89849978 | 89850644 | |
| 46983 | 89855275 | 89857028 | 146281 |
| 46984 | 90061291 | 90063294 | 198833 |
| 46985 | 90121233 | 90122796 | 25039 |
| 46986 | 90142510 | 90144198 | 135299 |
| 46987 | 90153238 | 90154263 | 135299 |
| 46988 | 90252527 | 90253097 | 135299 |
| 46989 | 90277176 | 90278092 | 083099, 135299 |
| 46990 | 90347399 | 90348943 | 83099 |
| 46991 | 90417847 | 90418786 | 112159 |
| 46992 | 90486412 | 90487060 | 112159 |
| 46993 | 90490655 | 90491474 | 112159 |
| 46994 | 90528532 | 90530329 | 112159 |
| 46995 | 90539146 | 90539982 | 118412 |
| 46996 | 90650065 | 90651604 | 112182 |
| 46997 | 90661341 | 90661928 | 226455, 112182 |
| 46998 | 90665930 | 90666446 | 112182 |
| 46999 | 90680273 | 90681272 | 112182 |
| 47000 | 90797726 | 90798256 | 112182 |
| 47001 | 90806727 | 90809104 | 112182 |
| 47002 | 90813120 | 90813589 | 112182 |
| 47003 | 90858773 | 90859450 | 112182 |
| 47004 | 90877241 | 90878942 | 112182 |
| 47005 | 90896374 | 90898034 | 112182 |
| 47006 | 90909610 | 90910062 | 112182 |
| 47007 | 90913230 | 90913885 | 112182 |
| 47008 | 90927261 | 90929797 | 112182 |
| 47009 | 90931576 | 90933273 | 112182 |
| 47010 | 90948180 | 90949983 | 112182 |
| 47011 | 90994073 | 90995801 | 112182 |
| 47012 | 90998114 | 90998707 | 112182 |
| 47013 | 91001185 | 91002099 | 112182 |
| 47014 | 91003113 | 91006948 | 112182 |
| 47015 | 91067431 | 91068535 | 260271 |
| 47016 | 91077642 | 91080060 | |
| 47017 | 91107295 | 91108193 | |
| 47018 | 91115648 | 91117158 | |
| 47019 | 91118458 | 91119442 | |
| 47020 | 91120785 | 91121465 | |
| 47021 | 91185448 | 91185918 | |
| 47022 | 91212313 | 91213344 | |
| 47023 | 91295949 | 91297331 | 135341 |
| 47024 | 92522291 | 92523055 | |
| 47025 | 93520533 | 93520967 | |
| 47026 | 94628658 | 94629593 | |
| 47027 | 96022594 | 96023366 | 261366 |
| 47028 | 96024803 | 96026413 | 172469, 261366 |
| 47029 | 96263240 | 96263758 | |
| 47030 | 96968817 | 96970880 | 014123, 233797 |
| 47031 | 97344856 | 97347409 | 123545 |
| 47032 | 97371536 | 97373072 | 186231 |
| 47033 | 98395713 | 98396289 | 271860 |
| 47034 | 99284502 | 99285357 | 184486 |
| 47035 | 99394727 | 99396252 | 112234 |
| 47036 | 99841188 | 99842493 | 132423 |
| 47037 | 99872424 | 99874323 | 228506, 132424 |
| 47038 | 99880703 | 99881123 | 123552 |
| 47039 | 99962545 | 99964490 | 123552 |
| 47040 | 99968608 | 99969996 | 123552, 228439 |
| 47041 | 100015220 | 100016976 | 272017, 112237 |
| 47042 | 100546844 | 100547762 | |
| 47043 | 100623706 | 100624319 | |
| 47044 | 100682338 | 100683115 | |
| 47045 | 100731094 | 100731731 | |
| 47046 | 100747759 | 100748798 | |
| 47047 | 100903066 | 100903924 | 112246 |
| 47048 | 100930482 | 100931041 | |
| 47049 | 100932161 | 100932894 | |
| 47050 | 100950371 | 100953448 | |
| 47051 | 101065848 | 101066494 | 112249 |
| 47052 | 101075450 | 101076095 | 112249 |
| 47053 | 101327992 | 101329970 | 260000, 112249 |
| 47054 | 101349207 | 101350243 | |
| 47055 | 101448264 | 101448693 | |
| 47056 | 102208915 | 102209696 | 164418 |
| 47057 | 102355194 | 102356029 | 164418 |
| 47058 | 103127666 | 103128179 | |
| 47059 | 103792483 | 103793197 | |
| 47060 | 104040723 | 104041165 | |
| 47061 | 105158747 | 105159745 | |
| 47062 | 105773909 | 105774453 | 85377 |
| 47063 | 105849544 | 105851762 | 85377 |
| 47064 | 105880577 | 105881206 | |
| 47065 | 106240939 | 106244595 | |
| 47066 | 106253429 | 106254914 | |
| 47067 | 106340659 | 106341133 | |
| 47068 | 106343981 | 106345003 | |
| 47069 | 106416415 | 106416898 | |
| 47070 | 106442524 | 106443466 | |
| 47071 | 106708936 | 106710261 | 57663 |
| 47072 | 106757754 | 106758326 | 57663 |
| 47073 | 106772423 | 106774516 | 57663 |
| 47074 | 106959450 | 106961323 | 112297 |
| 47075 | 106972631 | 106973895 | 112297 |
| 47076 | 106993614 | 106995031 | 112297 |
| 47077 | 107039212 | 107039728 | 130347 |
| 47078 | 107076496 | 107078589 | 130348, 130347 |
| 47079 | 107139850 | 107140903 | |
| 47080 | 107149702 | 107151716 | |
| 47081 | 107172594 | 107173391 | 235142 |
| 47082 | 107178535 | 107179895 | 235142 |
| 47083 | 107187056 | 107188843 | 235142 |
| 47084 | 107211672 | 107214179 | 235142 |
| 47085 | 107229895 | 107236466 | 207577, 235142 |
| 47086 | 107245821 | 107247907 | |
| 47087 | 107349091 | 107350323 | 130349 |
| 47088 | 107434997 | 107437528 | 178409 |
| 47089 | 107551129 | 107552357 | 220237, 164494 |
| 47090 | 107585441 | 107586063 | 164494 |
| 47091 | 107652700 | 107653453 | 164494 |
| 47092 | 107779645 | 107781896 | 164494 |
| 47093 | 107811092 | 107812126 | 112320 |
| 47094 | 107827297 | 107827663 | 112320 |
| 47095 | 107859599 | 107862852 | 112320 |
| 47096 | 107945370 | 107946301 | 112320 |
| 47097 | 107996088 | 107997007 | |
| 47098 | 108132746 | 108134219 | 146285 |
| 47099 | 108136959 | 108138782 | 146285 |
| 47100 | 108139238 | 108140385 | 146285 |
| 47101 | 108143440 | 108146035 | 146285 |
| 47102 | 108273763 | 108274356 | 25796 |
| 47103 | 108277961 | 108279910 | 272476, 025796 |
| 47104 | 108395043 | 108396849 | 81087 |
| 47105 | 108448937 | 108449742 | 225174, 081087 |
| 47106 | 108454598 | 108455742 | 225174, 081087 |
| 47107 | 108514376 | 108514728 | |
| 47108 | 108521828 | 108522476 | |
| 47109 | 108524332 | 108525344 | |
| 47110 | 108562514 | 108563094 | 112335 |
| 47111 | 108580969 | 108583541 | 112335 |
| 47112 | 108615152 | 108617407 | 135537 |
| 47113 | 108685202 | 108685717 | 135537 |
| 47114 | 108784007 | 108784669 | 135537 |
| 47115 | 108876493 | 108877104 | |
| 47116 | 108878390 | 108882319 | 118689 |
| 47117 | 108882697 | 108884752 | 118689 |
| 47118 | 108885208 | 108887875 | 118689 |
| 47119 | 108899683 | 108900282 | 118689 |
| 47120 | 108902324 | 108902870 | 118689 |
| 47121 | 108915714 | 108916262 | 118689 |
| 47122 | 108944326 | 108945844 | 118689 |
| 47123 | 108949192 | 108949795 | 118689 |
| 47124 | 109010171 | 109011193 | |
| 47125 | 109085037 | 109086246 | 203801 |
| 47126 | 109114418 | 109115199 | |
| 47127 | 109115949 | 109117004 | |
| 47128 | 109118915 | 109119882 | |
| 47129 | 109171427 | 109172622 | 118690 |
| 47130 | 109217161 | 109219591 | 118690 |
| 47131 | 109292141 | 109293342 | 118690 |
| 47132 | 109329108 | 109331716 | 80546 |
| 47133 | 109380331 | 109380753 | 199944, 080546 |
| 47134 | 109414695 | 109417425 | 183137, 080546 |
| 47135 | 109438255 | 109439263 | 183137 |
| 47136 | 109441934 | 109442987 | 183137 |
| 47137 | 109573331 | 109573978 | 243587 |
| 47138 | 109628825 | 109630379 | 203799 |
| 47139 | 109639265 | 109640146 | 203799 |
| 47140 | 109657404 | 109658541 | 203799 |
| 47141 | 109702355 | 109704885 | 260273, 135535 |
| 47142 | 109705402 | 109706040 | |
| 47143 | 109761420 | 109763116 | 135587, 185250 |
| 47144 | 109776192 | 109778955 | 135596 |
| 47145 | 109803728 | 109804846 | 112365 |
| 47146 | 110008253 | 110008930 | 155085 |
| 47147 | 110011820 | 110013008 | 112367, 155085 |
| 47148 | 110111346 | 110111901 | 112367 |
| 47149 | 110114129 | 110115338 | 112367 |
| 47150 | 110174800 | 110175618 | |
| 47151 | 110417931 | 110418490 | |
| 47152 | 110499689 | 110502514 | 168438, 112290 |
| 47153 | 110650470 | 110651765 | 53328 |
| 47154 | 110678623 | 110679911 | 53328 |
| 47155 | 110735809 | 110737276 | 203797 |
| 47156 | 110740297 | 110741151 | |
| 47157 | 110830752 | 110831599 | |
| 47158 | 110837960 | 110839283 | |
| 47159 | 110858201 | 110858914 | |
| 47160 | 110876144 | 110876782 | |
| 47161 | 110885595 | 110888605 | |
| 47162 | 111002333 | 111004128 | 155111 |
| 47163 | 111025053 | 111025676 | 155111 |
| 47164 | 111059925 | 111060794 | 155111 |
| 47165 | 111135563 | 111137270 | 155111 |
| 47166 | 111143262 | 111144121 | |
| 47167 | 111147444 | 111148586 | |
| 47168 | 111194995 | 111198807 | 123505 |
| 47169 | 111272907 | 111274693 | |
| 47170 | 111279015 | 111281071 | 155115 |
| 47171 | 111302484 | 111304316 | 197498 |
| 47172 | 111351115 | 111352155 | |
| 47173 | 111408169 | 111409245 | 112394 |
| 47174 | 111426578 | 111427262 | 112394 |
| 47175 | 111497328 | 111498312 | 112394 |
| 47176 | 111508867 | 111509447 | 112394 |
| 47177 | 111551521 | 111552175 | 231046, 112394 |
| 47178 | 111580006 | 111581315 | 173214, 231046 |
| 47179 | 111599924 | 111600342 | 230177 |
| 47180 | 111628467 | 111628960 | 9413 |
| 47181 | 111677724 | 111678142 | 9413 |
| 47182 | 111784169 | 111785470 | 9413 |
| 47183 | 111802518 | 111806617 | 231889, 009413 |
| 47184 | 111872846 | 111873989 | 231889 |
| 47185 | 111875904 | 111876875 | 231889 |
| 47186 | 111880208 | 111881328 | 231889, 056972 |
| 47187 | 111909949 | 111913406 | 231889, 056972 |
| 47188 | 111918776 | 111919786 | 231889, 056972 |
| 47189 | 111923143 | 111924429 | 255389, 056972 |
| 47190 | 111925454 | 111927760 | 56972 |
| 47191 | 111931596 | 111932509 | |
| 47192 | 111963501 | 111964245 | |
| 47193 | 111978081 | 111979393 | |
| 47194 | 112004267 | 112006149 | 10810 |
| 47195 | 112007408 | 112008322 | 10810 |
| 47196 | 112013094 | 112014674 | 10810 |
| 47197 | 112339333 | 112340557 | |
| 47198 | 112351916 | 112352715 | |
| 47199 | 112364039 | 112365363 | |
| 47200 | 112407731 | 112409283 | 203778, 074935 |
| 47201 | 112519812 | 112520383 | 112769 |
| 47202 | 112523848 | 112527525 | 112769 |
| 47203 | 112535872 | 112536864 | 112769 |
| 47204 | 112539627 | 112540428 | 112769, 270661 |
| 47205 | 112543052 | 112544109 | 112769 |
| 47206 | 112574663 | 112576088 | 226440, 112769 |
| 47207 | 112652168 | 112653093 | 226440 |
| 47208 | 113672295 | 113675007 | |
| 47209 | 113754631 | 113755262 | |
| 47210 | 113950758 | 113954871 | 230943 |
| 47211 | 113955002 | 113957202 | 230943 |
| 47212 | 113957320 | 113958339 | 230943 |
| 47213 | 113963294 | 113965060 | 230943 |
| 47214 | 113970300 | 113971203 | 230943 |
| 47215 | 113974640 | 113976477 | |
| 47216 | 114011813 | 114012285 | |
| 47217 | 114039748 | 114041840 | |
| 47218 | 114084020 | 114085616 | |
| 47219 | 114175868 | 114176525 | |
| 47220 | 114177097 | 114182026 | 155130 |
| 47221 | 114193851 | 114195201 | 227502 |
| 47222 | 114291206 | 114293202 | 196591, 228624 |
| 47223 | 115934420 | 115935155 | |
| 47224 | 116088079 | 116088646 | |
| 47225 | 116104727 | 116105205 | |
| 47226 | 116142908 | 116143472 | |
| 47227 | 116151514 | 116152817 | |
| 47228 | 116268842 | 116269659 | 111816 |
| 47229 | 116290167 | 116291721 | 111816 |
| 47230 | 116331744 | 116335233 | 111816 |
| 47231 | 116355420 | 116356488 | 111816 |
| 47232 | 116356665 | 116358473 | 111816 |
| 47233 | 116362074 | 116362558 | 111816 |
| 47234 | 116380605 | 116383124 | 111816 |
| 47235 | 116393506 | 116394065 | |
| 47236 | 116408479 | 116408948 | |
| 47237 | 116421291 | 116422774 | 178425 |
| 47238 | 116531283 | 116532690 | 178425 |
| 47239 | 116574153 | 116577112 | 111817, 237021, 187189 |
| 47240 | 116599798 | 116601636 | 240050, 189241, 111817 |
| 47241 | 116691882 | 116693039 | 111817 |
| 47242 | 116891540 | 116893776 | 111832 |
| 47243 | 116988859 | 116990129 | 153975 |
| 47244 | 117269568 | 117270167 | |
| 47245 | 117275945 | 117276446 | |
| 47246 | 117708507 | 117709038 | 047932, 047936 |
| 47247 | 117710440 | 117711551 | 047932, 047936 |
| 47248 | 117712459 | 117713830 | 047932, 047936 |
| 47249 | 117761518 | 117763525 | 47932 |
| 47250 | 117802930 | 117805576 | 047932, 164465 |
| 47251 | 117836197 | 117837108 | 047932, 164465 |
| 47252 | 117865323 | 117866982 | 047932, 164465 |
| 47253 | 117922836 | 117924546 | 47932 |
| 47254 | 117995799 | 117996845 | 153989 |
| 47255 | 118894862 | 118896193 | 111860 |
| 47256 | 118971241 | 118973175 | 111860 |
| 47257 | 119029996 | 119030925 | 111860 |
| 47258 | 119213937 | 119218102 | 111875, 111877 |
| 47259 | 119254737 | 119256679 | 253194, 111877 |
| 47260 | 119356005 | 119356616 | 111879 |
| 47261 | 119392604 | 119393392 | 111879 |
| 47262 | 119398647 | 119400790 | 111879 |
| 47263 | 119450171 | 119452011 | 111879 |
| 47264 | 119467753 | 119470565 | 111879 |
| 47265 | 119491450 | 119492927 | |
| 47266 | 119493780 | 119494443 | |
| 47267 | 119530430 | 119531193 | 111885 |
| 47268 | 119558414 | 119558870 | 111885 |
| 47269 | 119580190 | 119580636 | 111885 |
| 47270 | 119582333 | 119582983 | 111885 |
| 47271 | 119628342 | 119629823 | 111885 |
| 47272 | 119667170 | 119672597 | 111885 |
| 47273 | 119908612 | 119909118 | |
| 47274 | 119949294 | 119949961 | |
| 47275 | 120532723 | 120533909 | |
| 47276 | 121313368 | 121314024 | |
| 47277 | 121314982 | 121316152 | |
| 47278 | 121655248 | 121656811 | 146350 |
| 47279 | 121751460 | 121751991 | |
| 47280 | 122720257 | 122721684 | 25156 |
| 47281 | 122791770 | 122793243 | 135549, 111897 |
| 47282 | 122930927 | 122932400 | 135549 |
| 47283 | 123092027 | 123092762 | |
| 47284 | 123109660 | 123113871 | 172594 |
| 47285 | 123118519 | 123120748 | 172594 |
| 47286 | 123376771 | 123379441 | 146352 |
| 47287 | 123411013 | 123414322 | |
| 47288 | 124277529 | 124278422 | 188580 |
| 47289 | 124283419 | 124284036 | 188580 |
| 47290 | 124692731 | 124693311 | 188580 |
| 47291 | 125282200 | 125286304 | 146373, 236548 |
| 47292 | 125295802 | 125296603 | 146373 |
| 47293 | 125298058 | 125298774 | 146373 |
| 47294 | 125316882 | 125317441 | 146373 |
| 47295 | 125378923 | 125379549 | 146373 |
| 47296 | 125420414 | 125421361 | |
| 47297 | 125443707 | 125446003 | 111907 |
| 47298 | 125474574 | 125476422 | 111907 |
| 47299 | 125490149 | 125490627 | 111907 |
| 47300 | 125495729 | 125496234 | 111907 |
| 47301 | 125518682 | 125519773 | 111907 |
| 47302 | 125522296 | 125525111 | 111907 |
| 47303 | 125621872 | 125623597 | 111906 |
| 47304 | 125628375 | 125629052 | |
| 47305 | 125632977 | 125634299 | |
| 47306 | 125832781 | 125833587 | |
| 47307 | 125906513 | 125907708 | 237742 |
| 47308 | 126067431 | 126071603 | 135547, 237742 |
| 47309 | 126101107 | 126103218 | 111912 |
| 47310 | 126110978 | 126113204 | 111912 |
| 47311 | 126220248 | 126222433 | 111912 |
| 47312 | 126227651 | 126228212 | 111912 |
| 47313 | 126239044 | 126241326 | 111912 |
| 47314 | 126252082 | 126252750 | 111912 |
| 47315 | 126263785 | 126264645 | |
| 47316 | 126264965 | 126268062 | |
| 47317 | 126277610 | 126279582 | 111911 |
| 47318 | 126306616 | 126308976 | 66651 |
| 47319 | 126309921 | 126311992 | 66651 |
| 47320 | 126316206 | 126316744 | 66651 |
| 47321 | 126361193 | 126363049 | |
| 47322 | 126375331 | 126376107 | |
| 47323 | 126501677 | 126505144 | 231842 |
| 47324 | 126658309 | 126658924 | |
| 47325 | 126700889 | 126702102 | |
| 47326 | 126858520 | 126860864 | |
| 47327 | 127422615 | 127424012 | |
| 47328 | 127536600 | 127537697 | |
| 47329 | 127587039 | 127589792 | 118518 |
| 47330 | 127663232 | 127665544 | 93144 |
| 47331 | 127686986 | 127688443 | |
| 47332 | 127741549 | 127742067 | |
| 47333 | 127779116 | 127780224 | 214338, 189367, 255330 |
| 47334 | 127802176 | 127803970 | 214338, 255330 |
| 47335 | 127804158 | 127806802 | 214338, 255330 |
| 47336 | 127843785 | 127844303 | 184530 |
| 47337 | 128326101 | 128326674 | 152894 |
| 47338 | 128383719 | 128386140 | 152894, 227945 |
| 47339 | 128445768 | 128446325 | 152894 |
| 47340 | 128529868 | 128530470 | 152894 |
| 47341 | 128660613 | 128661992 | 152894 |
| 47342 | 128679318 | 128680578 | 152894 |
| 47343 | 128686676 | 128687206 | 152894 |
| 47344 | 128785099 | 128785633 | 152894 |
| 47345 | 128799455 | 128800304 | 152894 |
| 47346 | 128816903 | 128817566 | 152894 |
| 47347 | 128819768 | 128822487 | 224733, 152894 |
| 47348 | 128825043 | 128827625 | 227112, 152894 |
| 47349 | 128828090 | 128834319 | 152894 |
| 47350 | 128839424 | 128842903 | 152894 |
| 47351 | 128976410 | 128978638 | |
| 47352 | 129814488 | 129815332 | 196569 |
| 47353 | 129896352 | 129896849 | |
| 47354 | 129962343 | 129962934 | 146376 |
| 47355 | 129992888 | 129995861 | 146376 |
| 47356 | 130068943 | 130070648 | 211996 |
| 47357 | 130116149 | 130116927 | |
| 47358 | 130341108 | 130341941 | 198945 |
| 47359 | 130341986 | 130342622 | 198945 |
| 47360 | 130364453 | 130365028 | 198945 |
| 47361 | 130499816 | 130500235 | 164483 |
| 47362 | 130628937 | 130629535 | 164483 |
| 47363 | 131136426 | 131137298 | |
| 47364 | 131147851 | 131150465 | 256162 |
| 47365 | 131171912 | 131172510 | 79819 |
| 47366 | 131174288 | 131176042 | 79819 |
| 47367 | 131184299 | 131185339 | 79819 |
| 47368 | 131359909 | 131360718 | 79819 |
| 47369 | 131383311 | 131385206 | 79819 |
| 47370 | 131422637 | 131424945 | |
| 47371 | 131428177 | 131428821 | |
| 47372 | 131450816 | 131451622 | |
| 47373 | 131455646 | 131457738 | 118507 |
| 47374 | 131537062 | 131538211 | 118507 |
| 47375 | 131602387 | 131604283 | 118507 |
| 47376 | 131682683 | 131684226 | |
| 47377 | 131688114 | 131690213 | |
| 47378 | 131715241 | 131717776 | |
| 47379 | 131868889 | 131870305 | |
| 47380 | 131872915 | 131874210 | |
| 47381 | 131894931 | 131897415 | 112282, 118520 |
| 47382 | 131948448 | 131949829 | 154269, 112282 |
| 47383 | 131972825 | 131973312 | 154269 |
| 47384 | 132087974 | 132088672 | |
| 47385 | 132128565 | 132129907 | 197594 |
| 47386 | 132140228 | 132141352 | 219532, 197594 |
| 47387 | 132142965 | 132143928 | 197594 |
| 47388 | 132146930 | 132147592 | 237115, 197594 |
| 47389 | 132157388 | 132158145 | 197594 |
| 47390 | 132165181 | 132166616 | 197594 |
| 47391 | 132166845 | 132168138 | 197594 |
| 47392 | 132169738 | 132171370 | 197594 |
| 47393 | 132215586 | 132216789 | 197594 |
| 47394 | 132258673 | 132260377 | |
| 47395 | 132270594 | 132273459 | 227220, 118523 |
| 47396 | 132279435 | 132281140 | 227220 |
| 47397 | 132301741 | 132302828 | 227220 |
| 47398 | 132436708 | 132437436 | |
| 47399 | 132654236 | 132656442 | 79931 |
| 47400 | 132833442 | 132835384 | 79950 |
| 47401 | 132916903 | 132918201 | |
| 47402 | 132919550 | 132920133 | |
| 47403 | 132928587 | 132929359 | |
| 47404 | 132933720 | 132934906 | |
| 47405 | 133007584 | 133009173 | 112299 |
| 47406 | 133014418 | 133015333 | 112299 |
| 47407 | 133032873 | 133036001 | 112299 |
| 47408 | 133036944 | 133037876 | |
| 47409 | 133040239 | 133041575 | |
| 47410 | 133050373 | 133053049 | 93134 |
| 47411 | 133054655 | 133058580 | 93134 |
| 47412 | 133062329 | 133063080 | |
| 47413 | 133071962 | 133072419 | 112303 |
| 47414 | 133084804 | 133086155 | 271488 |
| 47415 | 133118824 | 133120684 | 146409 |
| 47416 | 133133412 | 133137109 | 206754, 112306 |
| 47417 | 133258511 | 133259151 | |
| 47418 | 133284004 | 133286046 | |
| 47419 | 133755199 | 133757198 | 223542, 112319 |
| 47420 | 134126909 | 134127945 | 227954 |
| 47421 | 134135831 | 134136376 | 227954 |
| 47422 | 134260646 | 134261717 | |
| 47423 | 134268451 | 134269764 | |
| 47424 | 134272869 | 134275183 | 28839 |
| 47425 | 134299990 | 134301154 | 28839 |
| 47426 | 134312144 | 134312738 | 146411 |
| 47427 | 134347639 | 134348337 | 146411 |
| 47428 | 134370197 | 134370719 | 146411 |
| 47429 | 134373001 | 134374038 | 146411 |
| 47430 | 134378332 | 134379254 | |
| 47431 | 134379725 | 134382069 | |
| 47432 | 134482151 | 134482711 | |
| 47433 | 134494775 | 134498031 | 118515 |
| 47434 | 134498828 | 134500253 | 118515 |
| 47435 | 134520916 | 134521579 | 118515 |
| 47436 | 134567925 | 134569002 | 118515 |
| 47437 | 134570910 | 134571623 | 118515 |
| 47438 | 134616865 | 134617663 | 118515 |
| 47439 | 134693779 | 134694902 | |
| 47440 | 134816754 | 134817512 | 236700, 231971 |
| 47441 | 134823567 | 134825215 | 236700, 231971 |
| 47442 | 134838214 | 134838985 | 231971 |
| 47443 | 134850915 | 134851592 | 232310 |
| 47444 | 134872431 | 134873098 | 232310 |
| 47445 | 134951494 | 134952434 | 232310 |
| 47446 | 134979179 | 134980180 | 232310 |
| 47447 | 134992624 | 134993646 | |
| 47448 | 135108150 | 135109053 | |
| 47449 | 135143108 | 135144683 | |
| 47450 | 135147966 | 135148823 | |
| 47451 | 135152027 | 135152554 | |
| 47452 | 135161259 | 135162141 | |
| 47453 | 135170946 | 135171634 | |
| 47454 | 135184168 | 135186194 | |
| 47455 | 135229123 | 135231457 | |
| 47456 | 135254825 | 135255960 | 118514 |
| 47457 | 135269630 | 135271526 | 118514 |
| 47458 | 135304907 | 135305865 | 112339 |
| 47459 | 135375161 | 135376877 | 232876, 112339 |
| 47460 | 135409696 | 135410684 | 112339 |
| 47461 | 135443425 | 135444066 | |
| 47462 | 135466038 | 135467167 | |
| 47463 | 135572543 | 135573439 | |
| 47464 | 135818121 | 135820272 | 231028, 135541 |
| 47465 | 135844170 | 135844946 | 231028 |
| 47466 | 135948250 | 135948989 | 231028 |
| 47467 | 136002179 | 136003091 | 231028 |
| 47468 | 136043336 | 136044824 | |
| 47469 | 136134891 | 136136035 | |
| 47470 | 136151116 | 136152042 | |
| 47471 | 136172555 | 136173908 | 171408 |
| 47472 | 136225708 | 136226355 | 171408 |
| 47473 | 136230768 | 136231493 | 171408 |
| 47474 | 136243094 | 136244135 | 171408 |
| 47475 | 136256498 | 136258795 | 171408 |
| 47476 | 136388369 | 136389569 | 171408, 227844 |
| 47477 | 136479457 | 136480058 | 171408, 237596 |
| 47478 | 136494893 | 136495924 | 171408, 237596 |
| 47479 | 136546628 | 136548773 | 237596 |
| 47480 | 136571028 | 136571992 | 146410 |
| 47481 | 136609346 | 136612411 | 29363 |
| 47482 | 136810342 | 136811192 | 135525 |
| 47483 | 136828579 | 136831129 | 135525 |
| 47484 | 136831222 | 136834063 | 135525 |
| 47485 | 136845388 | 136847039 | 135525 |
| 47486 | 136870561 | 136872381 | 272189, 135525 |
| 47487 | 136928078 | 136928990 | 197442 |
| 47488 | 136948078 | 136948944 | 197442 |
| 47489 | 136964864 | 136965956 | 234263, 197442 |
| 47490 | 136990263 | 136991112 | 197442 |
| 47491 | 137058736 | 137060237 | 197442 |
| 47492 | 137095286 | 137096670 | 197442 |
| 47493 | 137112453 | 137114973 | 197442 |
| 47494 | 137143234 | 137144500 | 112357 |
| 47495 | 137437964 | 137438346 | |
| 47496 | 137440082 | 137441299 | |
| 47497 | 137443038 | 137444942 | |
| 47498 | 137466539 | 137467065 | 164485 |
| 47499 | 137469211 | 137470469 | 164485 |
| 47500 | 137537181 | 137541427 | 27697 |
| 47501 | 137554907 | 137555780 | |
| 47502 | 137557828 | 137559738 | |
| 47503 | 137562058 | 137563544 | |
| 47504 | 137568565 | 137569585 | |
| 47505 | 137582226 | 137583060 | |
| 47506 | 137630264 | 137631033 | |
| 47507 | 137673009 | 137675582 | |
| 47508 | 137736226 | 137737159 | |
| 47509 | 137980968 | 137982093 | |
| 47510 | 138001921 | 138003269 | |
| 47511 | 138010196 | 138011146 | |
| 47512 | 138018470 | 138019239 | |
| 47513 | 138028528 | 138029552 | |
| 47514 | 138030268 | 138032150 | |
| 47515 | 138043121 | 138046624 | |
| 47516 | 138049506 | 138050765 | |
| 47517 | 138053082 | 138053773 | 234956 |
| 47518 | 138055952 | 138056291 | 234956 |
| 47519 | 138059165 | 138060188 | 234956 |
| 47520 | 138128553 | 138130888 | |
| 47521 | 138131481 | 138133744 | |
| 47522 | 138133793 | 138135243 | |
| 47523 | 138186139 | 138190234 | 118503, 237499 |
| 47524 | 138192987 | 138197136 | 118503 |
| 47525 | 138222286 | 138223181 | |
| 47526 | 138225586 | 138226805 | |
| 47527 | 138407564 | 138410332 | 112378 |
| 47528 | 138426293 | 138429576 | 112378 |
| 47529 | 138482409 | 138483522 | 112379 |
| 47530 | 138618951 | 138619509 | 112379 |
| 47531 | 138692203 | 138693358 | |
| 47532 | 138708603 | 138709198 | |
| 47533 | 138724208 | 138726741 | 051620, 215878 |
| 47534 | 138732389 | 138732934 | 51620 |
| 47535 | 138742499 | 138743322 | 135540, 051620 |
| 47536 | 138760592 | 138761123 | 135540 |
| 47537 | 138818724 | 138821058 | 135540 |
| 47538 | 138821183 | 138821692 | 135540 |
| 47539 | 138824322 | 138826492 | 135540 |
| 47540 | 138828455 | 138829928 | 135540 |
| 47541 | 138862545 | 138863031 | 135540 |
| 47542 | 138864655 | 138865210 | 135540 |
| 47543 | 138870867 | 138872132 | 135540 |
| 47544 | 138876516 | 138877195 | 135540 |
| 47545 | 138881317 | 138882023 | 135540 |
| 47546 | 138913724 | 138915860 | 135540 |
| 47547 | 138918292 | 138919423 | 135540 |
| 47548 | 138964150 | 138964858 | 135540 |
| 47549 | 138982562 | 138984519 | 135540 |
| 47550 | 139012179 | 139015188 | 225177, 135540 |
| 47551 | 139045081 | 139045751 | |
| 47552 | 139094209 | 139095466 | 24862 |
| 47553 | 139278500 | 139279087 | 135597 |
| 47554 | 139308067 | 139310769 | 135597 |
| 47555 | 139315554 | 139316346 | |
| 47556 | 139317198 | 139318392 | |
| 47557 | 139336038 | 139336757 | |
| 47558 | 139348191 | 139351616 | 146386 |
| 47559 | 139456628 | 139457547 | 112406 |
| 47560 | 139629908 | 139630760 | |
| 47561 | 139657592 | 139658259 | |
| 47562 | 139690095 | 139693067 | |
| 47563 | 139693186 | 139698674 | 164442 |
| 47564 | 139699079 | 139700879 | |
| 47565 | 139709454 | 139709978 | |
| 47566 | 139801337 | 139802040 | |
| 47567 | 139806792 | 139807717 | |
| 47568 | 139811414 | 139812262 | |
| 47569 | 139908522 | 139909752 | |
| 47570 | 139918061 | 139920031 | |
| 47571 | 139947634 | 139948198 | |
| 47572 | 139975108 | 139977669 | |
| 47573 | 139997734 | 139998511 | |
| 47574 | 140000423 | 140001216 | |
| 47575 | 140007285 | 140008074 | |
| 47576 | 140019676 | 140021520 | |
| 47577 | 140029663 | 140030420 | |
| 47578 | 140051410 | 140052063 | |
| 47579 | 140063647 | 140065912 | |
| 47580 | 140069646 | 140070425 | |
| 47581 | 140074421 | 140075573 | |
| 47582 | 140075730 | 140077035 | |
| 47583 | 140083641 | 140084653 | |
| 47584 | 140084866 | 140087703 | |
| 47585 | 140154586 | 140155247 | |
| 47586 | 140174351 | 140175250 | |
| 47587 | 140204054 | 140205056 | |
| 47588 | 140224798 | 140226140 | |
| 47589 | 140231017 | 140231741 | |
| 47590 | 140263853 | 140265553 | |
| 47591 | 140276476 | 140277486 | |
| 47592 | 140298866 | 140299512 | |
| 47593 | 140332536 | 140333445 | |
| 47594 | 140364481 | 140366101 | |
| 47595 | 140370519 | 140374964 | |
| 47596 | 140392267 | 140393375 | 236013 |
| 47597 | 140426755 | 140427499 | |
| 47598 | 140639259 | 140640967 | |
| 47599 | 140663644 | 140666464 | |
| 47600 | 140701061 | 140702464 | |
| 47601 | 140766419 | 140767727 | |
| 47602 | 140781352 | 140782172 | |
| 47603 | 140783083 | 140787069 | |
| 47604 | 140857499 | 140860736 | |
| 47605 | 141046613 | 141047281 | |
| 47606 | 141242472 | 141243194 | |
| 47607 | 141347381 | 141348233 | |
| 47608 | 141586495 | 141587904 | |
| 47609 | 141647499 | 141648757 | |
| 47610 | 141701820 | 141703227 | |
| 47611 | 141870089 | 141870627 | |
| 47612 | 141873011 | 141874873 | |
| 47613 | 141882947 | 141884963 | |
| 47614 | 142195957 | 142196633 | |
| 47615 | 142198394 | 142199041 | |
| 47616 | 142277292 | 142278482 | |
| 47617 | 142289670 | 142290487 | |
| 47618 | 142467851 | 142469174 | 9844 |
| 47619 | 142579803 | 142581380 | 237494 |
| 47620 | 142600160 | 142601637 | |
| 47621 | 142606193 | 142607267 | |
| 47622 | 142618294 | 142620060 | |
| 47623 | 142621036 | 142625655 | 112414 |
| 47624 | 142656162 | 142657186 | 112414 |
| 47625 | 142693486 | 142698086 | 112414 |
| 47626 | 142726953 | 142727895 | 112414 |
| 47627 | 142733828 | 142735725 | 112414 |
| 47628 | 142891032 | 142892032 | 236366 |
| 47629 | 142955543 | 142957035 | 236366 |
| 47630 | 143016217 | 143018654 | |
| 47631 | 143122561 | 143124500 | 10818 |
| 47632 | 143140567 | 143144415 | 10818 |
| 47633 | 143158655 | 143161633 | 10818 |
| 47634 | 143165862 | 143169597 | 10818 |
| 47635 | 143170919 | 143173782 | 10818 |
| 47636 | 143174836 | 143175464 | 10818 |
| 47637 | 143192493 | 143194425 | 10818 |
| 47638 | 143205873 | 143207042 | 10818 |
| 47639 | 143223668 | 143224178 | 10818 |
| 47640 | 143246601 | 143249415 | 10818 |
| 47641 | 143264708 | 143269708 | 224460, 010818 |
| 47642 | 143380234 | 143383697 | 146416 |
| 47643 | 143428212 | 143429455 | 146416 |
| 47644 | 143481130 | 143482345 | 146416 |
| 47645 | 143544599 | 143546246 | 146416 |
| 47646 | 143588881 | 143589408 | 146416 |
| 47647 | 143717775 | 143719608 | |
| 47648 | 143729386 | 143730924 | |
| 47649 | 143770832 | 143773117 | 034693, 223203, 189007 |
| 47650 | 143831959 | 143833522 | 1036 |
| 47651 | 143856243 | 143856762 | |
| 47652 | 143857671 | 143859138 | 112419 |
| 47653 | 143903166 | 143903672 | 112419 |
| 47654 | 143997072 | 143997562 | 112419 |
| 47655 | 143998672 | 144000380 | 112419 |
| 47656 | 144066280 | 144067137 | 112419 |
| 47657 | 144163639 | 144165700 | 135521, 257065 |
| 47658 | 144384702 | 144386272 | 118495 |
| 47659 | 144415605 | 144417657 | 169976 |
| 47660 | 144470982 | 144473010 | 135604 |
| 47661 | 144479315 | 144479777 | 135604 |
| 47662 | 144536532 | 144538180 | |
| 47663 | 144584849 | 144587879 | |
| 47664 | 144605083 | 144608702 | 152818 |
| 47665 | 144618867 | 144619869 | 152818 |
| 47666 | 144670684 | 144671338 | 152818 |
| 47667 | 144696320 | 144697138 | 152818 |
| 47668 | 144736144 | 144738096 | 152818 |
| 47669 | 144869585 | 144870262 | 152818 |
| 47670 | 145241386 | 145243280 | |
| 47671 | 145336615 | 145337856 | |
| 47672 | 145340780 | 145342541 | |
| 47673 | 145346205 | 145348927 | |
| 47674 | 145355934 | 145356363 | |
| 47675 | 145372678 | 145373347 | |
| 47676 | 145469309 | 145469926 | |
| 47677 | 145588019 | 145588845 | |
| 47678 | 145693531 | 145694554 | |
| 47679 | 145803586 | 145805732 | |
| 47680 | 146055387 | 146057642 | 270638, 112425 |
| 47681 | 146070656 | 146071284 | |
| 47682 | 146134376 | 146137516 | 235652, 118496 |
| 47683 | 146224675 | 146225303 | 146414 |
| 47684 | 146269431 | 146269945 | 146414 |
| 47685 | 146284456 | 146285991 | 146414 |
| 47686 | 146864009 | 146868598 | 118508 |
| 47687 | 147178465 | 147179289 | 233452 |
| 47688 | 147181647 | 147182364 | 227748, 233452 |
| 47689 | 147189769 | 147190365 | 233452 |
| 47690 | 147271283 | 147272143 | 272397, 233452 |
| 47691 | 147523617 | 147526230 | 164506, 233452 |
| 47692 | 147827467 | 147832674 | 203727 |
| 47693 | 147851149 | 147852916 | 203727 |
| 47694 | 148295349 | 148295956 | |
| 47695 | 148449205 | 148449658 | |
| 47696 | 148512854 | 148513502 | |
| 47697 | 148663207 | 148664829 | 111961 |
| 47698 | 148762037 | 148763330 | 111961 |
| 47699 | 149352793 | 149355036 | 236591, 111962 |
| 47700 | 149451307 | 149452114 | |
| 47701 | 149553660 | 149554980 | 055208, 228408 |
| 47702 | 149637618 | 149641357 | 55208 |
| 47703 | 149655361 | 149659149 | 55208 |
| 47704 | 149775356 | 149776098 | 178199 |
| 47705 | 149806135 | 149806901 | 178199 |
| 47706 | 149866219 | 149867620 | 131013 |
| 47707 | 149886612 | 149888497 | 55211 |
| 47708 | 149968907 | 149970205 | 186625 |
| 47709 | 150037741 | 150040113 | 131023 |
| 47710 | 150067205 | 150068034 | 120253 |
| 47711 | 150070575 | 150071616 | 120265, 120253 |
| 47712 | 150073740 | 150074198 | 120265 |
| 47713 | 150160904 | 150162335 | 120256 |
| 47714 | 150168050 | 150169152 | 120256 |
| 47715 | 150183672 | 150186562 | 268592, 120256 |
| 47716 | 150189096 | 150190152 | 268592 |
| 47717 | 150206155 | 150209820 | 223701, 164520, 268592 |
| 47718 | 150216420 | 150219382 | 164520, 223701, 268592 |
| 47719 | 150325837 | 150326754 | 218358 |
| 47720 | 150346392 | 150347081 | 155918 |
| 47721 | 150389606 | 150390654 | 131019 |
| 47722 | 150689710 | 150691039 | 9765 |
| 47723 | 150698383 | 150699168 | 9765 |
| 47724 | 150712338 | 150715430 | 9765 |
| 47725 | 150724763 | 150725445 | 9765 |
| 47726 | 150730463 | 150732986 | |
| 47727 | 150733140 | 150733747 | |
| 47728 | 150738558 | 150741024 | |
| 47729 | 150778080 | 150779048 | |
| 47730 | 150812307 | 150813228 | |
| 47731 | 150856407 | 150857345 | |
| 47732 | 150894034 | 150894910 | |
| 47733 | 150920102 | 150922340 | 120278, 232891 |
| 47734 | 150949406 | 150950446 | 120278 |
| 47735 | 150952907 | 150953927 | 120278 |
| 47736 | 150961462 | 150963504 | 120278 |
| 47737 | 150989450 | 150990700 | 120278 |
| 47738 | 151007548 | 151009336 | 120278 |
| 47739 | 151032596 | 151034061 | 120278 |
| 47740 | 151177546 | 151179419 | |
| 47741 | 151186132 | 151188263 | 120254 |
| 47742 | 151355971 | 151358923 | 120254 |
| 47743 | 151361131 | 151363863 | 120254 |
| 47744 | 151363934 | 151367781 | 120254 |
| 47745 | 151373078 | 151374035 | 120254 |
| 47746 | 151376786 | 151378530 | 232290, 120254 |
| 47747 | 151379582 | 151383262 | 120254 |
| 47748 | 151388036 | 151392987 | 120254 |
| 47749 | 151406286 | 151406759 | 120254 |
| 47750 | 151416941 | 151417729 | 223598, 120254 |
| 47751 | 151439369 | 151440395 | 223598 |
| 47752 | 151457312 | 151458025 | 223598 |
| 47753 | 151644635 | 151648043 | 131016 |
| 47754 | 151710214 | 151713695 | 181472 |
| 47755 | 151767109 | 151768287 | 155906 |
| 47756 | 151772214 | 151774582 | 146476, 155906 |
| 47757 | 151815013 | 151816047 | 120262 |
| 47758 | 151935861 | 151939400 | 207422, 120262 |
| 47759 | 151948166 | 151950132 | |
| 47760 | 151950918 | 151951994 | |
| 47761 | 151954542 | 151955474 | |
| 47762 | 151960772 | 151961311 | |
| 47763 | 151961874 | 151962856 | |
| 47764 | 151972680 | 151974269 | |
| 47765 | 151983041 | 151988087 | 91831 |
| 47766 | 151988163 | 151991707 | 91831 |
| 47767 | 152020636 | 152021391 | 91831 |
| 47768 | 152022525 | 152024209 | 91831 |
| 47769 | 152037462 | 152038183 | 91831 |
| 47770 | 152078372 | 152079467 | 91831 |
| 47771 | 152105660 | 152105993 | 91831 |
| 47772 | 152222209 | 152223158 | 91831 |
| 47773 | 152234937 | 152239775 | 91831 |
| 47774 | 152366993 | 152367621 | 91831 |
| 47775 | 152375386 | 152376162 | 91831 |
| 47776 | 152415363 | 152417334 | 91831 |
| 47777 | 152431869 | 152432942 | 91831 |
| 47778 | 152616473 | 152617719 | 131018 |
| 47779 | 152622307 | 152623708 | 131018 |
| 47780 | 152634431 | 152636337 | 131018 |
| 47781 | 152701026 | 152703135 | 234577, 131018 |
| 47782 | 152896644 | 152897658 | 131018 |
| 47783 | 153067361 | 153067853 | |
| 47784 | 153304181 | 153306289 | 227627, 112029 |
| 47785 | 153322865 | 153324977 | 112031 |
| 47786 | 153487664 | 153488774 | |
| 47787 | 154485494 | 154486004 | 112038, 074706 |
| 47788 | 154613798 | 154614625 | 74706 |
| 47789 | 154688962 | 154689439 | |
| 47790 | 154708372 | 154709116 | 153721 |
| 47791 | 154731357 | 154732451 | 153721 |
| 47792 | 154751456 | 154752375 | 153721 |
| 47793 | 154760929 | 154761998 | 153721 |
| 47794 | 154762118 | 154763522 | 153721 |
| 47795 | 154778748 | 154780131 | 153721 |
| 47796 | 154780671 | 154782721 | 153721 |
| 47797 | 154795621 | 154796976 | 153721 |
| 47798 | 154808267 | 154810505 | 153721 |
| 47799 | 154828359 | 154833334 | 153721 |
| 47800 | 154858557 | 154860149 | |
| 47801 | 155053823 | 155055962 | 213079 |
| 47802 | 155337118 | 155337573 | 146426 |
| 47803 | 155345653 | 155346183 | 146426 |
| 47804 | 155347224 | 155347974 | 146426 |
| 47805 | 155634863 | 155637206 | 29639 |
| 47806 | 156720701 | 156721305 | |
| 47807 | 156742892 | 156743573 | |
| 47808 | 157007283 | 157009921 | |
| 47809 | 157040347 | 157042946 | |
| 47810 | 157073714 | 157074413 | |
| 47811 | 157097503 | 157101930 | 271899, 049618, 270487, |
| | | | 271551 |
| 47812 | 157112368 | 157112980 | 49618 |
| 47813 | 157115782 | 157116842 | 49618 |
| 47814 | 157143845 | 157144403 | 49618 |
| 47815 | 157149034 | 157149931 | 49618 |
| 47816 | 157210427 | 157211079 | 49618 |
| 47817 | 157270123 | 157270915 | 49618 |
| 47818 | 157276625 | 157277540 | 49618 |
| 47819 | 157284634 | 157285876 | 49618 |
| 47820 | 157341541 | 157343768 | 49618 |
| 47821 | 157417346 | 157418219 | 49618 |
| 47822 | 157502705 | 157503238 | 49618 |
| 47823 | 157508125 | 157509158 | 49618 |
| 47824 | 157695588 | 157696715 | |
| 47825 | 157723624 | 157724534 | 215712 |
| 47826 | 157726180 | 157726792 | 215712 |
| 47827 | 157743545 | 157745835 | 271040, 215712 |
| 47828 | 157745962 | 157746755 | |
| 47829 | 157747503 | 157748426 | |
| 47830 | 157800963 | 157803964 | 175048 |
| 47831 | 157845367 | 157846046 | 175048 |
| 47832 | 157849649 | 157851202 | 175048 |
| 47833 | 157855048 | 157856592 | 175048 |
| 47834 | 157881774 | 157882600 | 175048 |
| 47835 | 157935747 | 157936470 | 175048 |
| 47836 | 157942517 | 157942980 | 175048 |
| 47837 | 157950929 | 157953813 | 175048 |
| 47838 | 157956028 | 157957864 | 175048 |
| 47839 | 157960334 | 157961820 | 175048 |
| 47840 | 157977568 | 157978618 | 175048 |
| 47841 | 158000300 | 158001863 | 175048, 219448 |
| 47842 | 158007662 | 158008666 | 175048 |
| 47843 | 158033141 | 158035439 | 175048 |
| 47844 | 158103831 | 158104284 | |
| 47845 | 158184236 | 158185007 | |
| 47846 | 158207921 | 158208749 | |
| 47847 | 158243269 | 158245952 | 130340 |
| 47848 | 158374591 | 158376531 | |
| 47849 | 158401732 | 158404196 | 78269 |
| 47850 | 158414454 | 158414889 | 78269 |
| 47851 | 158429107 | 158429519 | 78269 |
| 47852 | 158446922 | 158448559 | 78269 |
| 47853 | 158454476 | 158456076 | 78269 |
| 47854 | 158460410 | 158464053 | 78269 |
| 47855 | 158464647 | 158465594 | 78269 |
| 47856 | 158480681 | 158483150 | 78269 |
| 47857 | 158488984 | 158490431 | 78269 |
| 47858 | 158588476 | 158590121 | 272047, 122335 |
| 47859 | 158604437 | 158605181 | 272047 |
| 47860 | 158626147 | 158626916 | |
| 47861 | 158652259 | 158654576 | |
| 47862 | 158743610 | 158745214 | 130338 |
| 47863 | 158980405 | 158982316 | 146433 |
| 47864 | 158984487 | 158984905 | 146433 |
| 47865 | 159052436 | 159054520 | 146433 |
| 47866 | 159064653 | 159066334 | 146425 |
| 47867 | 159105731 | 159106465 | 164674 |
| 47868 | 159124736 | 159126027 | 164674 |
| 47869 | 159158346 | 159159693 | 164674 |
| 47870 | 159220062 | 159220793 | 92820 |
| 47871 | 159238996 | 159241192 | 233893, 092820 |
| 47872 | 159242346 | 159242759 | |
| 47873 | 159250663 | 159251527 | |
| 47874 | 159379300 | 159380182 | |
| 47875 | 159415922 | 159416810 | 271913, 130363 |
| 47876 | 159419990 | 159422033 | 130363, 271913 |
| 47877 | 159676324 | 159677514 | 164694 |
| 47878 | 159835620 | 159836207 | |
| 47879 | 160015115 | 160016734 | |
| 47880 | 160097644 | 160099292 | 112096 |
| 47881 | 160099549 | 160100323 | 112096 |
| 47882 | 160100382 | 160101318 | 112096 |
| 47883 | 160101914 | 160104304 | 112096 |
| 47884 | 160104503 | 160105269 | 112096 |
| 47885 | 160105647 | 160106311 | 112096 |
| 47886 | 160106564 | 160107406 | 112096 |
| 47887 | 160109034 | 160110945 | 112096 |
| 47888 | 160111127 | 160116482 | 112096 |
| 47889 | 160119936 | 160124060 | 112096 |
| 47890 | 160135394 | 160140401 | 112096 |
| 47891 | 160146773 | 160149880 | 146457, 112096 |
| 47892 | 160181718 | 160184392 | 112096, 120437 |
| 47893 | 160209279 | 160212625 | 112110, 120438 |
| 47894 | 160228213 | 160228858 | 146453 |
| 47895 | 160321361 | 160322139 | 236823 |
| 47896 | 160335513 | 160336000 | |
| 47897 | 160337633 | 160338924 | |
| 47898 | 160363332 | 160365125 | |
| 47899 | 160388860 | 160391855 | 197081 |
| 47900 | 160395053 | 160395833 | 197081 |
| 47901 | 160401973 | 160403753 | 197081 |
| 47902 | 160451162 | 160451584 | 197081 |
| 47903 | 160462402 | 160465526 | 197081 |
| 47904 | 160479500 | 160480219 | 197081 |
| 47905 | 160486106 | 160486824 | 197081 |
| 47906 | 160513610 | 160514486 | 213073, 197081 |
| 47907 | 160542478 | 160546643 | 175003 |
| 47908 | 160558123 | 160558891 | 175003 |
| 47909 | 160558989 | 160561248 | 175003 |
| 47910 | 160561924 | 160563930 | 175003 |
| 47911 | 160577799 | 160578397 | 175003 |
| 47912 | 160581306 | 160582007 | |
| 47913 | 160584260 | 160585440 | 216516 |
| 47914 | 160619478 | 160620224 | 112499 |
| 47915 | 160658100 | 160661394 | 112499 |
| 47916 | 160668490 | 160670760 | 112499 |
| 47917 | 160673698 | 160677950 | 112499 |
| 47918 | 160768285 | 160772057 | 146477 |
| 47919 | 160798483 | 160802694 | 146477 |
| 47920 | 160806890 | 160814175 | 146477 |
| 47921 | 160819597 | 160822007 | 146477 |
| 47922 | 160848056 | 160848726 | 146477 |
| 47923 | 160928324 | 160928965 | 213071 |
| 47924 | 160940831 | 160942131 | |
| 47925 | 161339223 | 161341350 | 224371 |
| 47926 | 161411884 | 161414174 | 085511, 272841 |
| 47927 | 161583695 | 161584227 | 26652 |
| 47928 | 161855844 | 161856434 | 185345 |
| 47929 | 162058651 | 162059161 | 185345 |
| 47930 | 162171468 | 162172837 | 185345 |
| 47931 | 162342726 | 162346341 | 185345 |
| 47932 | 162479043 | 162480344 | 185345 |
| 47933 | 162519830 | 162521598 | 185345 |
| 47934 | 162671154 | 162671768 | 185345 |
| 47935 | 162794121 | 162794768 | 185345 |
| 47936 | 163095352 | 163095892 | 185345 |
| 47937 | 163147720 | 163149206 | 112530, 185345 |
| 47938 | 163275060 | 163275874 | 112530 |
| 47939 | 163277778 | 163278577 | 112530 |
| 47940 | 163303593 | 163304836 | 112530 |
| 47941 | 163309071 | 163310074 | 112530 |
| 47942 | 163601428 | 163603355 | 225683, 112530 |
| 47943 | 163617148 | 163618109 | 112530 |
| 47944 | 163745227 | 163746876 | |
| 47945 | 163826450 | 163827666 | |
| 47946 | 163829512 | 163830092 | |
| 47947 | 163833327 | 163838417 | 112531, 270419 |
| 47948 | 163878830 | 163879306 | 112531 |
| 47949 | 163950251 | 163951228 | 112531 |
| 47950 | 163954336 | 163954972 | 112531 |
| 47951 | 163960109 | 163960754 | 112531 |
| 47952 | 164004639 | 164005142 | |
| 47953 | 164166770 | 164167653 | 235538 |
| 47954 | 164519722 | 164520403 | |
| 47955 | 164527998 | 164531247 | 230627 |
| 47956 | 166254417 | 166255279 | 112541 |
| 47957 | 166679356 | 166680415 | |
| 47958 | 166700253 | 166701143 | |
| 47959 | 166715105 | 166716035 | |
| 47960 | 166720984 | 166722343 | 176381 |
| 47961 | 166743959 | 166744589 | 198818 |
| 47962 | 166754930 | 166757303 | 198818 |
| 47963 | 166760791 | 166762466 | |
| 47964 | 166773670 | 166775081 | |
| 47965 | 166779050 | 166779961 | 60762 |
| 47966 | 166793203 | 166793865 | 60762 |
| 47967 | 166794434 | 166797779 | 261420, 060762 |
| 47968 | 166800974 | 166801946 | |
| 47969 | 166969708 | 166971439 | 71242 |
| 47970 | 167033408 | 167034003 | 71242 |
| 47971 | 167039662 | 167041973 | 71242 |
| 47972 | 167091929 | 167092462 | 71242 |
| 47973 | 167368963 | 167370137 | 249141, 026297 |
| 47974 | 167412417 | 167414217 | 213066, 272980, 227598 |
| 47975 | 167444781 | 167445911 | 213066, 272980 |
| 47976 | 167624379 | 167624874 | |
| 47977 | 167682227 | 167683187 | |
| 47978 | 167690563 | 167691292 | 112494 |
| 47979 | 167698525 | 167699855 | 112494 |
| 47980 | 167721575 | 167723241 | 112494 |
| 47981 | 167754853 | 167756208 | 120440 |
| 47982 | 167764109 | 167765260 | 120440 |
| 47983 | 167834767 | 167835312 | |
| 47984 | 167904835 | 167905301 | |
| 47985 | 167907531 | 167910139 | |
| 47986 | 167914093 | 167914793 | |
| 47987 | 168061705 | 168062842 | |
| 47988 | 168068345 | 168069838 | 272549 |
| 47989 | 168071181 | 168072102 | 272549 |
| 47990 | 168074579 | 168075091 | 272549 |
| 47991 | 168076346 | 168077484 | 272549 |
| 47992 | 168078951 | 168079709 | 272549 |
| 47993 | 168082570 | 168084903 | 203688 |
| 47994 | 168134516 | 168135215 | |
| 47995 | 168135603 | 168136695 | |
| 47996 | 168151495 | 168152081 | |
| 47997 | 168161622 | 168162607 | |
| 47998 | 168162831 | 168163523 | |
| 47999 | 168179099 | 168179719 | |
| 48000 | 168191018 | 168193136 | 146521 |
| 48001 | 168196687 | 168198322 | 146521, 269155 |
| 48002 | 168206239 | 168207638 | |
| 48003 | 168225747 | 168227570 | 198221 |
| 48004 | 168227715 | 168228994 | 130396 |
| 48005 | 168250346 | 168251523 | 130396 |
| 48006 | 168332542 | 168335472 | 130396 |
| 48007 | 168338429 | 168339453 | 130396 |
| 48008 | 168357270 | 168358577 | 130396 |
| 48009 | 168363426 | 168367120 | 130396 |
| 48010 | 168408049 | 168409279 | 125337 |
| 48011 | 168424607 | 168425793 | 125337 |
| 48012 | 168517562 | 168518330 | |
| 48013 | 168596757 | 168597964 | 234768 |
| 48014 | 168600835 | 168602511 | 234768 |
| 48015 | 168647920 | 168649020 | 234647 |
| 48016 | 168661855 | 168663324 | 234647 |
| 48017 | 168664774 | 168666269 | |
| 48018 | 168674857 | 168675624 | |
| 48019 | 168702331 | 168703118 | 224417, 164488 |
| 48020 | 168726976 | 168727482 | |
| 48021 | 169284577 | 169285225 | |
| 48022 | 169612858 | 169613646 | 226445 |
| 48023 | 169692140 | 169693112 | |
| 48024 | 169868951 | 169869716 | 184465 |
| 48025 | 169873118 | 169874206 | 184465 |
| 48026 | 169929187 | 169930805 | 184465 |
| 48027 | 170101036 | 170103595 | 185127, 184465 |
| 48028 | 170122660 | 170125759 | 232640, 227704, 130024 |
| 48029 | 170150681 | 170153050 | 130023, 184786 |
| 48030 | 170189288 | 170191409 | 231690, 229214 |
| 48031 | 170199604 | 170201923 | 231690 |
| 48032 | 170231542 | 170233522 | |
| 48033 | 170364977 | 170365309 | |
| 48034 | 170444918 | 170446022 | |
| 48035 | 170459371 | 170461497 | |
| 48036 | 170493513 | 170495758 | 273100 |
| 48037 | 170534616 | 170535973 | |
| 48038 | 170567966 | 170568849 | 230960 |
| 48039 | 170574613 | 170575517 | |
| 48040 | 170615076 | 170616922 | 112584 |
| 48041 | 170653986 | 170654584 | 112584 |
| 48042 | 170861299 | 170864485 | 112592, 008018 |
| 48043 | 170892799 | 170894592 | 71994 |

[0575] The locations of ODSCs on Chromosome 7 are shown in Table 49.

TABLE 49
ODSC Locations on Chromosome 7

| SEQ ID NO. | Start | End | Overlapping Gene(s) |
|---|---|---|---|
| 48044 | 141973 | 143586 | 242474 |
| 48045 | 191831 | 195429 | 177706, 240093 |
| 48046 | 214225 | 215251 | 177706 |
| 48047 | 358806 | 359344 | |
| 48048 | 366736 | 367568 | |
| 48049 | 372422 | 373497 | |
| 48050 | 381500 | 382737 | |
| 48051 | 514155 | 514874 | |
| 48052 | 543086 | 544975 | 197461 |
| 48053 | 556044 | 557918 | 197461 |
| 48054 | 557999 | 559308 | 197461 |
| 48055 | 765545 | 767792 | 164818, 188191 |
| 48056 | 771763 | 772602 | 164818 |
| 48057 | 852122 | 853937 | |
| 48058 | 855770 | 857604 | 164828 |
| 48059 | 861114 | 861794 | 164828 |
| 48060 | 895567 | 896137 | 164828 |
| 48061 | 900441 | 901536 | 164828 |
| 48062 | 905776 | 907802 | 164828 |
| 48063 | 915181 | 918045 | 239857, 164828 |
| 48064 | 1013643 | 1015463 | 240230 |
| 48065 | 1032429 | 1033316 | |
| 48066 | 1067191 | 1068851 | 225146, 146540 |
| 48067 | 1082865 | 1085347 | 164849, 225146, 146540 |
| 48068 | 1126076 | 1129006 | 146540, 164850 |
| 48069 | 1131946 | 1133974 | 164850, 146540 |
| 48070 | 1135211 | 1136779 | 146540 |
| 48071 | 1141134 | 1142301 | 146540 |
| 48072 | 1177177 | 1178262 | 146540 |
| 48073 | 1195023 | 1200900 | 229043, 178381 |
| 48074 | 1215448 | 1217048 | |
| 48075 | 1497786 | 1499368 | 164877 |
| 48076 | 1499437 | 1501972 | 225981 |
| 48077 | 1506249 | 1506829 | 273230 |
| 48078 | 1542884 | 1544484 | 164880 |
| 48079 | 1546434 | 1546999 | |
| 48080 | 1556218 | 1556673 | |
| 48081 | 1559662 | 1560808 | |
| 48082 | 1569976 | 1574620 | 198517 |
| 48083 | 1576082 | 1578019 | 198517 |
| 48084 | 1581828 | 1583263 | 164855, 198517 |
| 48085 | 1594060 | 1596487 | 164855 |
| 48086 | 1608915 | 1610787 | 230487, 157778 |
| 48087 | 1704068 | 1705291 | |
| 48088 | 1705359 | 1705869 | |
| 48089 | 1706951 | 1708714 | |
| 48090 | 1709562 | 1710738 | |
| 48091 | 1753032 | 1754463 | 225968 |
| 48092 | 1760611 | 1761226 | 225968 |
| 48093 | 1881835 | 1882326 | 002822, 176349 |
| 48094 | 1911745 | 1912868 | 002822 |
| 48095 | 1935159 | 1936787 | 002822 |
| 48096 | 1962782 | 1963768 | 002822 |
| 48097 | 1968154 | 1968656 | 002822 |
| 48098 | 2271750 | 2273138 | 002822 |
| 48099 | 2281001 | 2282208 | 106268, 122687 |
| 48100 | 2353106 | 2354635 | 106266 |
| 48101 | 2393055 | 2395784 | 106263, 106266 |
| 48102 | 2442538 | 2444310 | 136213 |
| 48103 | 2594560 | 2595738 | 106009 |
| 48104 | 2598190 | 2599539 | 106012 |
| 48105 | 2669268 | 2670610 | |
| 48106 | 2671382 | 2673470 | 136295 |
| 48107 | 2675346 | 2676657 | 136295 |
| 48108 | 2676708 | 2679334 | 136295 |
| 48109 | 2680515 | 2681811 | 136295 |
| 48110 | 2701582 | 2704288 | 136295 |
| 48111 | 2733318 | 2734173 | 174945 |
| 48112 | 2796875 | 2798741 | 174945, 146535 |
| 48113 | 2850231 | 2851886 | 146535 |
| 48114 | 2858544 | 2862456 | 146535 |
| 48115 | 2882898 | 2884525 | 146535 |
| 48116 | 2903070 | 2904183 | |
| 48117 | 3340213 | 3341104 | 146555, 236708 |
| 48118 | 4228311 | 4229804 | 146555 |
| 48119 | 4318786 | 4319468 | |
| 48120 | 4671211 | 4671832 | |
| 48121 | 4681149 | 4682681 | |
| 48122 | 4721401 | 4724280 | 164916 |
| 48123 | 4755069 | 4755382 | 164916 |
| 48124 | 4764176 | 4766022 | 164916 |
| 48125 | 4778193 | 4779711 | 164916 |
| 48126 | 4784377 | 4786316 | 164916 |
| 48127 | 4813975 | 4816392 | 242802 |
| 48128 | 5013483 | 5014333 | 196204 |
| 48129 | 5085036 | 5086056 | 146587, 272968 |
| 48130 | 5216561 | 5217161 | |
| 48131 | 5229427 | 5230734 | 157954 |
| 48132 | 5258586 | 5258995 | 157954 |
| 48133 | 5279704 | 5280836 | |
| 48134 | 5436028 | 5437883 | 182095 |
| 48135 | 5450851 | 5451214 | 182095 |
| 48136 | 5458068 | 5470621 | 272953, 241269, 188365, |
| | | | 273084, 234432, 182095 |
| 48137 | 5526371 | 5526995 | 155034 |
| 48138 | 5534094 | 5536072 | 207973, 155034 |
| 48139 | 5552550 | 5554807 | 155034 |
| 48140 | 5560877 | 5561414 | |
| 48141 | 5562625 | 5563377 | |
| 48142 | 5564773 | 5566981 | 075624 |
| 48143 | 5568084 | 5572198 | 075624 |
| 48144 | 5592298 | 5592875 | 075624 |
| 48145 | 5594268 | 5598157 | 272719, 075624 |
| 48146 | 5598194 | 5599009 | 075624 |
| 48147 | 5730846 | 5734390 | 011275 |
| 48148 | 5740559 | 5741283 | 011275 |
| 48149 | 5820479 | 5821541 | 011275 |
| 48150 | 5861982 | 5862993 | 235944 |
| 48151 | 5908501 | 5909033 | |
| 48152 | 6048009 | 6049716 | 106305, 122512 |
| 48153 | 6051989 | 6053000 | 106305 |
| 48154 | 6095001 | 6095472 | 086232 |
| 48155 | 6097258 | 6099042 | 086232 |
| 48156 | 6116813 | 6117445 | |
| 48157 | 6120146 | 6121611 | 231704 |
| 48158 | 6143635 | 6146400 | 106346 |
| 48159 | 6311524 | 6312708 | 008256 |
| 48160 | 6322686 | 6323437 | |
| 48161 | 6345997 | 6346618 | |
| 48162 | 6388050 | 6389014 | 178397 |
| 48163 | 6413693 | 6415813 | 136238 |
| 48164 | 6416270 | 6417474 | 136238 |
| 48165 | 6424129 | 6426116 | 136238 |
| 48166 | 6458907 | 6459443 | 164535 |
| 48167 | 6483006 | 6483803 | 164535 |
| 48168 | 6486581 | 6488424 | 136240, 164535 |
| 48169 | 6521822 | 6524291 | 269781, 136240, 164535 |
| 48170 | 6616736 | 6618612 | 136247, 232581 |
| 48171 | 6629267 | 6630404 | 146576 |
| 48172 | 6676032 | 6677962 | 205903 |
| 48173 | 6745474 | 6747131 | 164631, 228010 |
| 48174 | 6749316 | 6749960 | 187953 |
| 48175 | 6768997 | 6770176 | 187953 |
| 48176 | 7138973 | 7139665 | |
| 48177 | 7215959 | 7217726 | 244167, 106392 |
| 48178 | 7220791 | 7223488 | 106392 |
| 48179 | 7477889 | 7479785 | 215018 |
| 48180 | 7529131 | 7533743 | 215018 |
| 48181 | 7603239 | 7604255 | 272894 |
| 48182 | 7605861 | 7607493 | 164654, 272894 |
| 48183 | 7679285 | 7681520 | 219545, 106399 |
| 48184 | 7734830 | 7737628 | 219545, 106399 |
| 48185 | 7747278 | 7748095 | 219545, 106399 |
| 48186 | 7790222 | 7791857 | 219545 |
| 48187 | 7800694 | 7802597 | 219545 |
| 48188 | 7838671 | 7839411 | 219545 |
| 48189 | 7847336 | 7848278 | 219545 |
| 48190 | 7888473 | 7889024 | 219545 |
| 48191 | 7900751 | 7901367 | 219545 |
| 48192 | 8007945 | 8010082 | 106415, 233108, 219545 |
| 48193 | 8035927 | 8036796 | 219545, 106415 |
| 48194 | 8180727 | 8181185 | 003147 |
| 48195 | 8229750 | 8230964 | 003147 |
| 48196 | 8300478 | 8302502 | 229970, 244239, 003147 |
| 48197 | 8962315 | 8963146 | |
| 48198 | 10276853 | 10277388 | |
| 48199 | 10694505 | 10695125 | |
| 48200 | 10978894 | 10981118 | 271185, 189043 |
| 48201 | 11012464 | 11014445 | 106443 |
| 48202 | 11121599 | 11123189 | 106443 |
| 48203 | 11232750 | 11234602 | 230333 |
| 48204 | 11277166 | 11277977 | 230333 |
| 48205 | 11287571 | 11288292 | 230333 |
| 48206 | 11475594 | 11476666 | 230333, 005108 |
| 48207 | 11501268 | 11502099 | 230333, 005108 |
| 48208 | 11609812 | 11610830 | 005108 |
| 48209 | 11660405 | 11661164 | 005108 |
| 48210 | 11745598 | 11747597 | 005108 |
| 48211 | 11870200 | 11872037 | 005108 |
| 48212 | 12249692 | 12252143 | 106460 |
| 48213 | 12714400 | 12714995 | |
| 48214 | 12725562 | 12727735 | 122644, 271253 |
| 48215 | 12759038 | 12760186 | |
| 48216 | 12962673 | 12964641 | |
| 48217 | 12981854 | 12982680 | |
| 48218 | 13017766 | 13019661 | |
| 48219 | 13028874 | 13029427 | |
| 48220 | 13056510 | 13057403 | |
| 48221 | 13952573 | 13953049 | 006468 |
| 48222 | 14028253 | 14029816 | 006468 |
| 48223 | 14030322 | 14030946 | 006468 |
| 48224 | 14231404 | 14231971 | 233167, 136267 |
| 48225 | 14245916 | 14248234 | 136267 |
| 48226 | 14257458 | 14259560 | 136267 |
| 48227 | 14276059 | 14278345 | 136267 |
| 48228 | 14291794 | 14292641 | 136267 |
| 48229 | 14342926 | 14343613 | 136267 |
| 48230 | 14375782 | 14376498 | 136267 |
| 48231 | 14535183 | 14535964 | 136267 |
| 48232 | 14675103 | 14676143 | 136267 |
| 48233 | 14753623 | 14755116 | 136267 |
| 48234 | 15039046 | 15040267 | |
| 48235 | 15344473 | 15345532 | 187546 |
| 48236 | 15415657 | 15417493 | 187546 |
| 48237 | 15593542 | 15595761 | 187546 |
| 48238 | 15596225 | 15598102 | 187546 |
| 48239 | 15600346 | 15602119 | 187546 |
| 48240 | 15620059 | 15621672 | |
| 48241 | 15724781 | 15726123 | 106511 |
| 48242 | 16065773 | 16066520 | |
| 48243 | 16459721 | 16462181 | 214960 |
| 48244 | 16684112 | 16686795 | 136261, 106524 |
| 48245 | 16700334 | 16701112 | 136261 |
| 48246 | 16792846 | 16793717 | 106537 |
| 48247 | 16967534 | 16968134 | |
| 48248 | 17017861 | 17019156 | |
| 48249 | 17029369 | 17030101 | |
| 48250 | 17060687 | 17062038 | |
| 48251 | 17066818 | 17067493 | |
| 48252 | 17125984 | 17126371 | |
| 48253 | 17137707 | 17140272 | |
| 48254 | 17169862 | 17170920 | |
| 48255 | 17181710 | 17185304 | |
| 48256 | 17224412 | 17224899 | |
| 48257 | 17251630 | 17252444 | |
| 48258 | 17278897 | 17280310 | |
| 48259 | 17314783 | 17316558 | |
| 48260 | 17337028 | 17339985 | 106546, 237773 |
| 48261 | 17343819 | 17345498 | 106546 |
| 48262 | 17346007 | 17348400 | 106546 |
| 48263 | 17410459 | 17412458 | |
| 48264 | 17442429 | 17443101 | 236318 |
| 48265 | 17445320 | 17447397 | 236318 |
| 48266 | 17447665 | 17448875 | 236318 |
| 48267 | 17484152 | 17484754 | 236039, 236318 |
| 48268 | 17545616 | 17546311 | 226598 |
| 48269 | 17562963 | 17565009 | 226598 |
| 48270 | 17582027 | 17582723 | 226598 |
| 48271 | 17639249 | 17640344 | |
| 48272 | 17658075 | 17658791 | |
| 48273 | 17672606 | 17673029 | |
| 48274 | 17719454 | 17721053 | 228675 |
| 48275 | 17854874 | 17855389 | 071189 |
| 48276 | 17978625 | 17981145 | 071189 |
| 48277 | 18002813 | 18003393 | |
| 48278 | 18547894 | 18549786 | 048052 |
| 48279 | 19747769 | 19749044 | 105849 |
| 48280 | 19997706 | 19998637 | 243004 |
| 48281 | 20009030 | 20010479 | 243004 |
| 48282 | 20777050 | 20778926 | 004846 |
| 48283 | 20837348 | 20838347 | |
| 48284 | 21104309 | 21105255 | |
| 48285 | 21290771 | 21291751 | |
| 48286 | 21405845 | 21406224 | |
| 48287 | 21447579 | 21448211 | |
| 48288 | 21466430 | 21468524 | 105866 |
| 48289 | 21605189 | 21606219 | 105877 |
| 48290 | 21618814 | 21620873 | 105877 |
| 48291 | 21650445 | 21651449 | 105877 |
| 48292 | 21656048 | 21658906 | 105877 |
| 48293 | 21678988 | 21679511 | 105877 |
| 48294 | 21797776 | 21798392 | 105877 |
| 48295 | 21984096 | 21986302 | 164649 |
| 48296 | 22000393 | 22000858 | |
| 48297 | 22121963 | 22123819 | |
| 48298 | 22255710 | 22256358 | 136237 |
| 48299 | 22280639 | 22281343 | 136237 |
| 48300 | 22379284 | 22381575 | 136237 |
| 48301 | 22383111 | 22387562 | 136237 |
| 48302 | 22390089 | 22391866 | 136237 |
| 48303 | 22395580 | 22398220 | 136237 |
| 48304 | 22398308 | 22399606 | |
| 48305 | 22400891 | 22401905 | |
| 48306 | 22417662 | 22418802 | |
| 48307 | 22616845 | 22617779 | 105889, 225541 |
| 48308 | 22825856 | 22826526 | |
| 48309 | 22861391 | 22863344 | 196683 |
| 48310 | 22893394 | 22895436 | 228649 |
| 48311 | 22899111 | 22899916 | 228649 |
| 48312 | 22904787 | 22905455 | 226329 |
| 48313 | 23052424 | 23054146 | 122591 |
| 48314 | 23144526 | 23146390 | 122550, 230658 |
| 48315 | 23220896 | 23222492 | 136243, 214871 |
| 48316 | 23312566 | 23313669 | 136235 |
| 48317 | 23337392 | 23339996 | 156928 |
| 48318 | 23372663 | 23374752 | 136231 |
| 48319 | 23396428 | 23397997 | 136231 |
| 48320 | 23570328 | 23572314 | 164548 |
| 48321 | 23636489 | 23638325 | 169193 |
| 48322 | 23662062 | 23662516 | 227436, 169193 |
| 48323 | 23719463 | 23721193 | 234286, 188732 |
| 48324 | 23799604 | 23800176 | 196335 |
| 48325 | 23996227 | 23997199 | |
| 48326 | 24114284 | 24115325 | |
| 48327 | 24495379 | 24497736 | |
| 48328 | 24612068 | 24614405 | 105926 |
| 48329 | 24708082 | 24709799 | 105926 |
| 48330 | 24796343 | 24797935 | 105928 |
| 48331 | 24826479 | 24827051 | |
| 48332 | 24859740 | 24861557 | 070882 |
| 48333 | 24865662 | 24866433 | 070882 |
| 48334 | 24944442 | 24944911 | 070882 |
| 48335 | 25018973 | 25021433 | 070882 |
| 48336 | 25064484 | 25065968 | |
| 48337 | 25067549 | 25069154 | |
| 48338 | 25163762 | 25165954 | 172115 |
| 48339 | 25219269 | 25220575 | 153790 |
| 48340 | 25353846 | 25355228 | |
| 48341 | 25469171 | 25470027 | |
| 48342 | 25607996 | 25608882 | |
| 48343 | 25637395 | 25638132 | 223561 |
| 48344 | 25888726 | 25890146 | |
| 48345 | 25989285 | 25992903 | 199085 |
| 48346 | 26195321 | 26196477 | 050344 |
| 48347 | 26198635 | 26199303 | 050344 |
| 48348 | 26237587 | 26242554 | 122565, 122566 |
| 48349 | 26330967 | 26332295 | 086300 |
| 48350 | 26344470 | 26345842 | 086300 |
| 48351 | 26346139 | 26347199 | 086300 |
| 48352 | 26382796 | 26383749 | 086300 |
| 48353 | 26385077 | 26389246 | 086300 |
| 48354 | 26406337 | 26407705 | 086300 |
| 48355 | 26725948 | 26726654 | 005020 |
| 48356 | 26738226 | 26740347 | 005020 |
| 48357 | 26745116 | 26745889 | 005020 |
| 48358 | 26903475 | 26905142 | 005020 |
| 48359 | 27161759 | 27162471 | 253552, 105997 |
| 48360 | 27249867 | 27250769 | |
| 48361 | 27317098 | 27317841 | |
| 48362 | 27385873 | 27386928 | |
| 48363 | 27403666 | 27405039 | 224322 |
| 48364 | 27458899 | 27459853 | |
| 48365 | 27644752 | 27647303 | 106049 |
| 48366 | 27656342 | 27658132 | 106049 |
| 48367 | 27680206 | 27682489 | 106049 |
| 48368 | 27701155 | 27704183 | 106049 |
| 48369 | 27716678 | 27719282 | |
| 48370 | 27774701 | 27775287 | 229893 |
| 48371 | 27779056 | 27781003 | 229893, 106052 |
| 48372 | 27784219 | 27785353 | 106052 |
| 48373 | 27913380 | 27914301 | 153814 |
| 48374 | 27936898 | 27937697 | 153814 |
| 48375 | 28044899 | 28045693 | 153814 |
| 48376 | 28073866 | 28074811 | 153814 |
| 48377 | 28075700 | 28078153 | 153814 |
| 48378 | 28123249 | 28123685 | 153814 |
| 48379 | 28188720 | 28189924 | 153814 |
| 48380 | 28195328 | 28196110 | 153814 |
| 48381 | 28208454 | 28209366 | 153814 |
| 48382 | 28218574 | 28220749 | 234336, 153814 |
| 48383 | 28269522 | 28270334 | 234336 |
| 48384 | 28447423 | 28449926 | 146592 |
| 48385 | 28725127 | 28726292 | 146592 |
| 48386 | 28894897 | 28897323 | |
| 48387 | 29139602 | 29140701 | 106066 |
| 48388 | 29233416 | 29235684 | 106066, 106069 |
| 48389 | 29243899 | 29244922 | 106069, 235669 |
| 48390 | 29253577 | 29255012 | 106069 |
| 48391 | 29267969 | 29268863 | 106069 |
| 48392 | 29270351 | 29271152 | 106069 |
| 48393 | 29286653 | 29287830 | 106069 |
| 48394 | 29288273 | 29289455 | 106069 |
| 48395 | 29294358 | 29297196 | 106069 |
| 48396 | 29304313 | 29305104 | 106069 |
| 48397 | 29310261 | 29311670 | 106069 |
| 48398 | 29313554 | 29314805 | 106069 |
| 48399 | 29326344 | 29327406 | 106069 |
| 48400 | 29331233 | 29332551 | 106069 |
| 48401 | 29367518 | 29369344 | 106069 |
| 48402 | 29369643 | 29370452 | 106069 |
| 48403 | 29414994 | 29416768 | 106069 |
| 48404 | 29452343 | 29453210 | 106069 |
| 48405 | 29473343 | 29475690 | 106069 |
| 48406 | 29487372 | 29488355 | 106069 |
| 48407 | 29488956 | 29490270 | 106069 |
| 48408 | 29502948 | 29503840 | 106069 |
| 48409 | 29510575 | 29512354 | 106069 |
| 48410 | 29522740 | 29523592 | 106069 |
| 48411 | 29527507 | 29529334 | 106069 |
| 48412 | 29533887 | 29534411 | 106069 |
| 48413 | 29535782 | 29536733 | 106069 |
| 48414 | 29845588 | 29847678 | 122574 |
| 48415 | 29904778 | 29905746 | 122574 |
| 48416 | 30027347 | 30027983 | 136193 |
| 48417 | 30065424 | 30069155 | 106086, 106080 |
| 48418 | 30085754 | 30086438 | 106086 |
| 48419 | 30107635 | 30108225 | 106086 |
| 48420 | 30130988 | 30131461 | 106086 |
| 48421 | 30161074 | 30161813 | 106086 |
| 48422 | 30174177 | 30175943 | 180354 |
| 48423 | 30208789 | 30212352 | |
| 48424 | 30278285 | 30279097 | |
| 48425 | 30292655 | 30293459 | |
| 48426 | 30293641 | 30296088 | |
| 48427 | 30302317 | 30303341 | |
| 48428 | 30323626 | 30325261 | 180233 |
| 48429 | 30325362 | 30325932 | 180233 |
| 48430 | 30417846 | 30419187 | 180233 |
| 48431 | 30452438 | 30453187 | |
| 48432 | 30517735 | 30519424 | 106100 |
| 48433 | 30543722 | 30545487 | 006625 |
| 48434 | 30632964 | 30636493 | 106105, 196295 |
| 48435 | 30809691 | 30811962 | 106125, 254959 |
| 48436 | 30836837 | 30837309 | 254959, 229263, 106125 |
| 48437 | 30906408 | 30907668 | 240583, 254959, 250424, |
| | | | 106125 |
| 48438 | 30935605 | 30936013 | 240583, 250424 |
| 48439 | 30936912 | 30937477 | 240583, 250424 |
| 48440 | 31014230 | 31014898 | 106128 |
| 48441 | 31357586 | 31358774 | |
| 48442 | 31375209 | 31376854 | |
| 48443 | 31504194 | 31504557 | |
| 48444 | 32529272 | 32530865 | 106355 |
| 48445 | 32534230 | 32536080 | 105778, 106355 |
| 48446 | 32555306 | 32555998 | 105778 |
| 48447 | 32707919 | 32708487 | 229358, 105778 |
| 48448 | 32709410 | 32710632 | 229358, 105778 |
| 48449 | 32929785 | 32933045 | 105778, 170852 |
| 48450 | 32981432 | 32983146 | 205763, 105778 |
| 48451 | 32996662 | 32998123 | 122642, 105778 |
| 48452 | 33073641 | 33075286 | 105778, 122643 |
| 48453 | 33079002 | 33081017 | 122643 |
| 48454 | 33083516 | 33084410 | 122643 |
| 48455 | 33101477 | 33103427 | 122643 |
| 48456 | 33148110 | 33149372 | 164610 |
| 48457 | 33168252 | 33169419 | 228015, 122507 |
| 48458 | 33716472 | 33719633 | |
| 48459 | 33972332 | 33974447 | 164619 |
| 48460 | 34037289 | 34038921 | 164619 |
| 48461 | 34075427 | 34076565 | 164619 |
| 48462 | 34103163 | 34105602 | 164619 |
| 48463 | 34127634 | 34128298 | 164619 |
| 48464 | 34147511 | 34148111 | 164619 |
| 48465 | 34149459 | 34150004 | 164619 |
| 48466 | 34787208 | 34789405 | 197085, 187258 |
| 48467 | 34798959 | 34799619 | 197085, 187258 |
| 48468 | 34978679 | 34979147 | 173852 |
| 48469 | 35054947 | 35055767 | 173852 |
| 48470 | 35075108 | 35077955 | 173852 |
| 48471 | 35440815 | 35441682 | |
| 48472 | 35575690 | 35577539 | |
| 48473 | 35596168 | 35597360 | |
| 48474 | 35686255 | 35688630 | 122557 |
| 48475 | 35733526 | 35735630 | 271122, 122557 |
| 48476 | 35736592 | 35737510 | 271122 |
| 48477 | 35772177 | 35772911 | 227544 |
| 48478 | 35775605 | 35776800 | |
| 48479 | 35839379 | 35842292 | 122545, 228878 |
| 48480 | 35870798 | 35871286 | 122545 |
| 48481 | 35891716 | 35892175 | 122545 |
| 48482 | 36027280 | 36028625 | |
| 48483 | 36033261 | 36033924 | |
| 48484 | 36119035 | 36119851 | 205745 |
| 48485 | 36154974 | 36159436 | |
| 48486 | 36167468 | 36169735 | |
| 48487 | 36191111 | 36195151 | 122547 |
| 48488 | 36195386 | 36196422 | 122547 |
| 48489 | 36196681 | 36198572 | 122547 |
| 48490 | 36201578 | 36202011 | 122547 |
| 48491 | 36204631 | 36205158 | 122547 |
| 48492 | 36245085 | 36248753 | 122547 |
| 48493 | 36272080 | 36273518 | 122547 |
| 48494 | 36312043 | 36313852 | 122547 |
| 48495 | 36320400 | 36321903 | 122547 |
| 48496 | 36329135 | 36332772 | 122547 |
| 48497 | 36342772 | 36344012 | |
| 48498 | 36406029 | 36407231 | 164542 |
| 48499 | 36428982 | 36430331 | 011426, 164542 |
| 48500 | 36500277 | 36501076 | |
| 48501 | 36510526 | 36511489 | 237400 |
| 48502 | 36527237 | 36527845 | 237400 |
| 48503 | 36566302 | 36567313 | 136250 |
| 48504 | 36640541 | 36641362 | 136250 |
| 48505 | 36644053 | 36645334 | 136250 |
| 48506 | 36690974 | 36691674 | 136250 |
| 48507 | 36697924 | 36699223 | 136250 |
| 48508 | 36725622 | 36726623 | 136250 |
| 48509 | 36749977 | 36751411 | 136250 |
| 48510 | 36782370 | 36782892 | |
| 48511 | 36784819 | 36790624 | 229424 |
| 48512 | 36799644 | 36802161 | 229424 |
| 48513 | 36820906 | 36821503 | 235728 |
| 48514 | 36834054 | 36837272 | |
| 48515 | 36860011 | 36861214 | |
| 48516 | 36918545 | 36919151 | 155849 |
| 48517 | 36936063 | 36937490 | 155849 |
| 48518 | 36937510 | 36938248 | 155849 |
| 48519 | 36989249 | 36989728 | 155849 |
| 48520 | 37010536 | 37012215 | 155849 |
| 48521 | 37026214 | 37027200 | 155849 |
| 48522 | 37055148 | 37056110 | 155849 |
| 48523 | 37070464 | 37072893 | 155849 |
| 48524 | 37113832 | 37114405 | 155849 |
| 48525 | 37129444 | 37130551 | 155849 |
| 48526 | 37231340 | 37231846 | 155849 |
| 48527 | 37336990 | 37337557 | 155849 |
| 48528 | 37359833 | 37360959 | 155849 |
| 48529 | 37393545 | 37394914 | 155849 |
| 48530 | 37407648 | 37408620 | 155849 |
| 48531 | 37447616 | 37449310 | 155849 |
| 48532 | 37452752 | 37456125 | 155849 |
| 48533 | 37461435 | 37461919 | 155849 |
| 48534 | 37487112 | 37489246 | 155849 |
| 48535 | 37527529 | 37530176 | |
| 48536 | 37940752 | 37942636 | 086289 |
| 48537 | 37955907 | 37957087 | 106483, 086289 |
| 48538 | 37959845 | 37961893 | 106483, 086289 |
| 48539 | 37982239 | 37983794 | 106483, 086289 |
| 48540 | 38217332 | 38218626 | 010270 |
| 48541 | 38623778 | 38624608 | 078053 |
| 48542 | 38742654 | 38743052 | |
| 48543 | 38783831 | 38785438 | 006715 |
| 48544 | 38872823 | 38873362 | 006715 |
| 48545 | 38902921 | 38905423 | 006715 |
| 48546 | 38912716 | 38913828 | 006715 |
| 48547 | 38947961 | 38949066 | 006715 |
| 48548 | 38981947 | 38982981 | |
| 48549 | 39445786 | 39446480 | 224122, 106536 |
| 48550 | 39453506 | 39454453 | 106536 |
| 48551 | 39504367 | 39505395 | 106536 |
| 48552 | 39605061 | 39606650 | 241127, 227172 |
| 48553 | 39662113 | 39664789 | 006451 |
| 48554 | 39667473 | 39667919 | 006451 |
| 48555 | 39772521 | 39773800 | 188185 |
| 48556 | 39935910 | 39936573 | |
| 48557 | 39959066 | 39959906 | |
| 48558 | 39970425 | 39971286 | |
| 48559 | 39987798 | 39992319 | 065883, 259826 |
| 48560 | 40133502 | 40133924 | 065883 |
| 48561 | 40134685 | 40135611 | 065883 |
| 48562 | 40145261 | 40145995 | |
| 48563 | 40161469 | 40162682 | |
| 48564 | 40172772 | 40175441 | 175600, 168303 |
| 48565 | 40409036 | 40410466 | 175600 |
| 48566 | 40411430 | 40412743 | 175600 |
| 48567 | 40442375 | 40444103 | 175600 |
| 48568 | 40453965 | 40455246 | 175600 |
| 48569 | 40475752 | 40478733 | 175600 |
| 48570 | 40508751 | 40511064 | 175600 |
| 48571 | 40794762 | 40795450 | 175600 |
| 48572 | 40799639 | 40801281 | 175600 |
| 48573 | 41025154 | 41027234 | |
| 48574 | 41042359 | 41048086 | |
| 48575 | 41094524 | 41095175 | |
| 48576 | 41142678 | 41143707 | 224017 |
| 48577 | 41146295 | 41149098 | 224017 |
| 48578 | 41149272 | 41150496 | 224017 |
| 48579 | 41355904 | 41356490 | |
| 48580 | 41454345 | 41456257 | |
| 48581 | 41476579 | 41478227 | |
| 48582 | 41486811 | 41489861 | |
| 48583 | 41498947 | 41500166 | |
| 48584 | 41503456 | 41504211 | |
| 48585 | 41504512 | 41507028 | |
| 48586 | 41548172 | 41549057 | |
| 48587 | 41730419 | 41732207 | 236310, 122641 |
| 48588 | 41732305 | 41733701 | 224116, 236310, 122641 |
| 48589 | 41734565 | 41737105 | 224116, 236310, 122641 |
| 48590 | 41742378 | 41743034 | 122641, 224116, 236310 |
| 48591 | 41743553 | 41750351 | 236310, 224116 |
| 48592 | 41750840 | 41751837 | 224116 |
| 48593 | 41981729 | 41983542 | |
| 48594 | 42896592 | 42896987 | |
| 48595 | 42927239 | 42929364 | |
| 48596 | 42950634 | 42952189 | 136197, 256646 |
| 48597 | 42970285 | 42973055 | 106591, 256646, 106588 |
| 48598 | 43522214 | 43522993 | 002746 |
| 48599 | 43526246 | 43527547 | 002746 |
| 48600 | 43528235 | 43530105 | 002746 |
| 48601 | 43541506 | 43541972 | 002746 |
| 48602 | 43622138 | 43624424 | 164543 |
| 48603 | 43679149 | 43680117 | 106603 |
| 48604 | 43686494 | 43688764 | 106603 |
| 48605 | 43697955 | 43700309 | 106603 |
| 48606 | 43713246 | 43715128 | 106603 |
| 48607 | 43732568 | 43734279 | 106603 |
| 48608 | 43768298 | 43770076 | 106603 |
| 48609 | 43804027 | 43804967 | 106605 |
| 48610 | 43821549 | 43822484 | 106605 |
| 48611 | 43873736 | 43874932 | |
| 48612 | 43878342 | 43878758 | |
| 48613 | 43908227 | 43909817 | 062582, 270617 |
| 48614 | 43912358 | 43913436 | 270617 |
| 48615 | 43943257 | 43946838 | 270617, 106608 |
| 48616 | 43965318 | 43966960 | 078967, 106608 |
| 48617 | 43973538 | 43974045 | 078967 |
| 48618 | 43977894 | 43978975 | 078967 |
| 48619 | 44083313 | 44085407 | 136279 |
| 48620 | 44115469 | 44116314 | 122678 |
| 48621 | 44121390 | 44122805 | 122678 |
| 48622 | 44161881 | 44163670 | 106628 |
| 48623 | 44196781 | 44197468 | 106633 |
| 48624 | 44201584 | 44202289 | 106633 |
| 48625 | 44240222 | 44241684 | 106636 |
| 48626 | 44362217 | 44362829 | 058404 |
| 48627 | 44512327 | 44513356 | 015676 |
| 48628 | 44516732 | 44517454 | 015676 |
| 48629 | 44529290 | 44531088 | 015676 |
| 48630 | 44577567 | 44578683 | 015520 |
| 48631 | 44578974 | 44584420 | 015520 |
| 48632 | 44587102 | 44588103 | |
| 48633 | 44601503 | 44602526 | |
| 48634 | 44602836 | 44603461 | |
| 48635 | 44612350 | 44614338 | 136271 |
| 48636 | 44620776 | 44622883 | 158604 |
| 48637 | 44645294 | 44647010 | 105953 |
| 48638 | 44661889 | 44662818 | 105953 |
| 48639 | 44673132 | 44674665 | 105953 |
| 48640 | 44677723 | 44679996 | 105953 |
| 48641 | 44717501 | 44719360 | 105953 |
| 48642 | 44787231 | 44789585 | 122515 |
| 48643 | 44804109 | 44804985 | 122515 |
| 48644 | 44809296 | 44809918 | 122515 |
| 48645 | 44835079 | 44837870 | 196262 |
| 48646 | 44844426 | 44845090 | 196262 |
| 48647 | 44850552 | 44851271 | 196262 |
| 48648 | 44886709 | 44888739 | 234183, 105968 |
| 48649 | 44905955 | 44907733 | |
| 48650 | 44923685 | 44926391 | 272768, 146676 |
| 48651 | 44933255 | 44933928 | |
| 48652 | 45025339 | 45027013 | 232956 |
| 48653 | 45038764 | 45040776 | 136280 |
| 48654 | 45054862 | 45055395 | 136280 |
| 48655 | 45150130 | 45152050 | 136270 |
| 48656 | 45728350 | 45730587 | 164742 |
| 48657 | 45730639 | 45731373 | 164742 |
| 48658 | 45734514 | 45735525 | 164742 |
| 48659 | 45741100 | 45742126 | 164742 |
| 48660 | 45919904 | 45923573 | |
| 48661 | 45923673 | 45925892 | |
| 48662 | 45926219 | 45929298 | 146678 |
| 48663 | 45960584 | 45961227 | 146674 |
| 48664 | 45961680 | 45964680 | |
| 48665 | 46016872 | 46019059 | 237471 |
| 48666 | 46063866 | 46064576 | |
| 48667 | 46177109 | 46179184 | |
| 48668 | 46182983 | 46186748 | 224547 |
| 48669 | 46191892 | 46196188 | |
| 48670 | 46320123 | 46322817 | 229459 |
| 48671 | 46531993 | 46532542 | |
| 48672 | 46563816 | 46566357 | |
| 48673 | 46583241 | 46586778 | |
| 48674 | 46588889 | 46590634 | |
| 48675 | 46694042 | 46695274 | |
| 48676 | 46719075 | 46720076 | 233539 |
| 48677 | 46734424 | 46735485 | 233539 |
| 48678 | 46744738 | 46745722 | 233539 |
| 48679 | 46753147 | 46754802 | 233539 |
| 48680 | 46755035 | 46755727 | 233539 |
| 48681 | 46802868 | 46804713 | |
| 48682 | 46971786 | 46973283 | 232072 |
| 48683 | 47186794 | 47187329 | |
| 48684 | 47221430 | 47221984 | |
| 48685 | 47293312 | 47294423 | |
| 48686 | 47305686 | 47306976 | |
| 48687 | 47322193 | 47323351 | 136205 |
| 48688 | 47445007 | 47446291 | 136205 |
| 48689 | 47485888 | 47487144 | 136205 |
| 48690 | 47491119 | 47495785 | 136205 |
| 48691 | 47496754 | 47498782 | 136205 |
| 48692 | 47500678 | 47501469 | 136205 |
| 48693 | 47509683 | 47511348 | 136205 |
| 48694 | 47513649 | 47515655 | 136205 |
| 48695 | 47520456 | 47522754 | 136205 |
| 48696 | 47524536 | 47525792 | 136205 |
| 48697 | 47536666 | 47539590 | 136205 |
| 48698 | 47539624 | 47540142 | 136205 |
| 48699 | 47542781 | 47543936 | 136205 |
| 48700 | 47547032 | 47550435 | 136205 |
| 48701 | 47550832 | 47554597 | 136205 |
| 48702 | 47556502 | 47561690 | 136205 |
| 48703 | 47569450 | 47570123 | 136205 |
| 48704 | 47575874 | 47577576 | 136205 |
| 48705 | 47578228 | 47579599 | 136205 |
| 48706 | 47610195 | 47614790 | 136205 |
| 48707 | 47615381 | 47616433 | 136205 |
| 48708 | 47619531 | 47622283 | 136205 |
| 48709 | 47639318 | 47642913 | |
| 48710 | 47643460 | 47647190 | |
| 48711 | 47649392 | 47651214 | |
| 48712 | 47674813 | 47675715 | |
| 48713 | 47730627 | 47731091 | |
| 48714 | 47801673 | 47803990 | 146666, 136273 |
| 48715 | 47822911 | 47824508 | 158683, 136273 |
| 48716 | 47825827 | 47826880 | 158683, 136273 |
| 48717 | 47844474 | 47845904 | 158683, 136275, 136273 |
| 48718 | 47885488 | 47886790 | 158683, 136273 |
| 48719 | 48018247 | 48019613 | 136273 |
| 48720 | 48031140 | 48032007 | 164744 |
| 48721 | 48123843 | 48129821 | 183696 |
| 48722 | 48134535 | 48135137 | 183696 |
| 48723 | 48149635 | 48150325 | |
| 48724 | 48179428 | 48180530 | |
| 48725 | 48183636 | 48184508 | |
| 48726 | 50517370 | 50518963 | 132436 |
| 48727 | 50523906 | 50524599 | |
| 48728 | 50541752 | 50543487 | 132437 |
| 48729 | 50569393 | 50571373 | 132437 |
| 48730 | 50598039 | 50600461 | 226122, 132437 |
| 48731 | 50601995 | 50603500 | 132437, 226122 |
| 48732 | 50623874 | 50624632 | 132437 |
| 48733 | 50628373 | 50629100 | 132437 |
| 48734 | 50631790 | 50633655 | 132437 |
| 48735 | 50682293 | 50683542 | 106070 |
| 48736 | 50700435 | 50701133 | 106070 |
| 48737 | 50724952 | 50725703 | 106070 |
| 48738 | 50734879 | 50736097 | 106070 |
| 48739 | 50744546 | 50745823 | 106070 |
| 48740 | 50749607 | 50750390 | 106070 |
| 48741 | 50751632 | 50752605 | 106070 |
| 48742 | 50764346 | 50765266 | 106070 |
| 48743 | 50838828 | 50839657 | 106070 |
| 48744 | 50845662 | 50846549 | 106070 |
| 48745 | 50859209 | 50862114 | 106070 |
| 48746 | 50880407 | 50881069 | |
| 48747 | 50933051 | 50933609 | |
| 48748 | 51190528 | 51191757 | 106078 |
| 48749 | 51207420 | 51208008 | 106078 |
| 48750 | 51292967 | 51295721 | 106078 |
| 48751 | 51316790 | 51317825 | 106078 |
| 48752 | 51318934 | 51319560 | 106078 |
| 48753 | 51331134 | 51331815 | 106078 |
| 48754 | 51332909 | 51334023 | 106078 |
| 48755 | 51382369 | 51385806 | 106078 |
| 48756 | 51386733 | 51387665 | |
| 48757 | 51391724 | 51394107 | |
| 48758 | 51395800 | 51397063 | |
| 48759 | 51407780 | 51408552 | |
| 48760 | 51411938 | 51413610 | |
| 48761 | 51424421 | 51425948 | |
| 48762 | 52085679 | 52086515 | |
| 48763 | 52214394 | 52215177 | |
| 48764 | 53486489 | 53487287 | |
| 48765 | 54825720 | 54828240 | 234707, 132432 |
| 48766 | 54856190 | 54857242 | 234707 |
| 48767 | 54907177 | 54907855 | |
| 48768 | 54946867 | 54949231 | |
| 48769 | 54955840 | 54956902 | |
| 48770 | 54971539 | 54972851 | |
| 48771 | 54975967 | 54976976 | |
| 48772 | 54985070 | 54986264 | |
| 48773 | 55000349 | 55001486 | 218586 |
| 48774 | 55034820 | 55036185 | |
| 48775 | 55055259 | 55056567 | |
| 48776 | 55085826 | 55090796 | 146648 |
| 48777 | 55098055 | 55102126 | 146648 |
| 48778 | 55115454 | 55116875 | 146648 |
| 48779 | 55123398 | 55125814 | 146648 |
| 48780 | 55131687 | 55135140 | 146648 |
| 48781 | 55140614 | 55143730 | 146648 |
| 48782 | 55144911 | 55146019 | 146648 |
| 48783 | 55159268 | 55160108 | 146648 |
| 48784 | 55166614 | 55167505 | 146648 |
| 48785 | 55175593 | 55176256 | 146648 |
| 48786 | 55186139 | 55190132 | 146648 |
| 48787 | 55196902 | 55203132 | 146648 |
| 48788 | 55207929 | 55209164 | 146648 |
| 48789 | 55246035 | 55247055 | 146648 |
| 48790 | 55321806 | 55323941 | 146648 |
| 48791 | 55432621 | 55435236 | 132434 |
| 48792 | 55479210 | 55480057 | 132434 |
| 48793 | 55482816 | 55483305 | 132434 |
| 48794 | 55600261 | 55603155 | 154978 |
| 48795 | 55613605 | 55615419 | 154978 |
| 48796 | 55638486 | 55641270 | 223475, 154978 |
| 48797 | 55641346 | 55642638 | 223475 |
| 48798 | 55661260 | 55661896 | 231394 |
| 48799 | 55954720 | 55955653 | 178665, 249773 |
| 48800 | 56019309 | 56020316 | 239789, 146729, 249773 |
| 48801 | 56031825 | 56033296 | 146729 |
| 48802 | 56064628 | 56065174 | 146729 |
| 48803 | 56067611 | 56068264 | 146729 |
| 48804 | 56074205 | 56075207 | |
| 48805 | 56096754 | 56097760 | 146733 |
| 48806 | 56101263 | 56102216 | 146733 |
| 48807 | 56118130 | 56120478 | 146731, 146733 |
| 48808 | 56131163 | 56133154 | 129103, 146731 |
| 48809 | 56141748 | 56142517 | 129103 |
| 48810 | 56147072 | 56148053 | 129103 |
| 48811 | 56173210 | 56174903 | 106153 |
| 48812 | 57410498 | 57411426 | |
| 48813 | 57411465 | 57412514 | |
| 48814 | 57437606 | 57439026 | |
| 48815 | 57927486 | 57929063 | |
| 48816 | 61968767 | 61969587 | |
| 48817 | 63360698 | 63361422 | 226581, 236299 |
| 48818 | 63385439 | 63387480 | 265017, 227910 |
| 48819 | 63767431 | 63768681 | 234444 |
| 48820 | 63774126 | 63775173 | 234444 |
| 48821 | 64022587 | 64024025 | 173041 |
| 48822 | 64059382 | 64060257 | |
| 48823 | 64088097 | 64089473 | |
| 48824 | 64804133 | 64804868 | |
| 48825 | 64838597 | 64839409 | 146757 |
| 48826 | 65215440 | 65216886 | 228409 |
| 48827 | 65337687 | 65338599 | 196715 |
| 48828 | 65372393 | 65373255 | 196715 |
| 48829 | 65389981 | 65390377 | 196715 |
| 48830 | 65411887 | 65412283 | 196715 |
| 48831 | 65417055 | 65417688 | 196715 |
| 48832 | 65420481 | 65421332 | 196715 |
| 48833 | 65425538 | 65426697 | 169919 |
| 48834 | 65426986 | 65427515 | 169919 |
| 48835 | 65446392 | 65447961 | 169919 |
| 48836 | 65508544 | 65509736 | |
| 48837 | 65515833 | 65516452 | |
| 48838 | 65540539 | 65542501 | 126522 |
| 48839 | 65564500 | 65565903 | 249319 |
| 48840 | 65578646 | 65581051 | 241258, 249319 |
| 48841 | 65590175 | 65591547 | 249319, 241258, 234185 |
| 48842 | 65606589 | 65609559 | 249319, 241258, 234185 |
| 48843 | 65610700 | 65614869 | 249319, 241258, 234185 |
| 48844 | 65615163 | 65616671 | 249319, 241258, 234185 |
| 48845 | 65617530 | 65618491 | 241258, 234185 |
| 48846 | 65627411 | 65628915 | 234185 |
| 48847 | 65648149 | 65650292 | |
| 48848 | 65652313 | 65653471 | |
| 48849 | 65654753 | 65656023 | |
| 48850 | 65669647 | 65671667 | 169902 |
| 48851 | 65688984 | 65689810 | 169902 |
| 48852 | 65711510 | 65713637 | 169902 |
| 48853 | 65732137 | 65732872 | 169902 |
| 48854 | 65747718 | 65749574 | 169902 |
| 48855 | 65761266 | 65762632 | 169902 |
| 48856 | 65772262 | 65773867 | 169902 |
| 48857 | 65957873 | 65959413 | 237310, 223473 |
| 48858 | 66000379 | 66001662 | 229180, 234500 |
| 48859 | 66056333 | 66057808 | 232559 |
| 48860 | 66092675 | 66094881 | 243335 |
| 48861 | 66118628 | 66120536 | 226824, 243335 |
| 48862 | 66146338 | 66147932 | 154710, 243335 |
| 48863 | 66204899 | 66206631 | 272831, 154710, 243335 |
| 48864 | 66309151 | 66310812 | 230583 |
| 48865 | 66385637 | 66387196 | 106609 |
| 48866 | 66459739 | 66460915 | 198874, 126524 |
| 48867 | 66767032 | 66768448 | 106610, 067601 |
| 48868 | 67157039 | 67157929 | 233423 |
| 48869 | 67203889 | 67204666 | |
| 48870 | 67229294 | 67229888 | |
| 48871 | 67319455 | 67320430 | |
| 48872 | 67641965 | 67642495 | 226829 |
| 48873 | 68713090 | 68714050 | 225718 |
| 48874 | 68715891 | 68716400 | 225718 |
| 48875 | 68807136 | 68807883 | 225718 |
| 48876 | 68877430 | 68878064 | 225718 |
| 48877 | 69061794 | 69064573 | 158321, 234215 |
| 48878 | 69265052 | 69265882 | 158321 |
| 48879 | 69335841 | 69337875 | 158321 |
| 48880 | 69839795 | 69840776 | 158321 |
| 48881 | 69927934 | 69928987 | 158321 |
| 48882 | 69939601 | 69943141 | 158321 |
| 48883 | 69984923 | 69986634 | 158321 |
| 48884 | 70033277 | 70037965 | 158321 |
| 48885 | 70060726 | 70061829 | 158321 |
| 48886 | 70061841 | 70062763 | 158321 |
| 48887 | 70063897 | 70064585 | 158321 |
| 48888 | 70067013 | 70068126 | 158321 |
| 48889 | 70079439 | 70080087 | 158321 |
| 48890 | 70133345 | 70134244 | 158321 |
| 48891 | 70146454 | 70148044 | 158321 |
| 48892 | 70158487 | 70161863 | 158321 |
| 48893 | 70177862 | 70178424 | 158321 |
| 48894 | 70186166 | 70187005 | 158321 |
| 48895 | 70246362 | 70246944 | 158321 |
| 48896 | 72385301 | 72386080 | 196313 |
| 48897 | 72394777 | 72396474 | 272843, 196313 |
| 48898 | 72722178 | 72723169 | 130305 |
| 48899 | 72771858 | 72772785 | 077800 |
| 48900 | 72935243 | 72937323 | 009954 |
| 48901 | 72970939 | 72972926 | 106635 |
| 48902 | 72973753 | 72975314 | |
| 48903 | 72991886 | 72993337 | 106638 |
| 48904 | 73001895 | 73002774 | |
| 48905 | 73026856 | 73029180 | 009950 |
| 48906 | 73036572 | 73039025 | 009950 |
| 48907 | 73050666 | 73051107 | |
| 48908 | 73061477 | 73063179 | |
| 48909 | 73078575 | 73080848 | |
| 48910 | 73081601 | 73082981 | 176428 |
| 48911 | 73096529 | 73098760 | 071462, 176410 |
| 48912 | 73135714 | 73136489 | |
| 48913 | 73152125 | 73154209 | 106077 |
| 48914 | 73156509 | 73157839 | |
| 48915 | 73184098 | 73185130 | 165215 |
| 48916 | 73188502 | 73189009 | |
| 48917 | 73256066 | 73257386 | 165171 |
| 48918 | 73265001 | 73266635 | |
| 48919 | 73269658 | 73270571 | |
| 48920 | 73284280 | 73286322 | |
| 48921 | 73294337 | 73295283 | |
| 48922 | 73393244 | 73393862 | |
| 48923 | 73475901 | 73476934 | 232415, 049540 |
| 48924 | 73587754 | 73589897 | 106682 |
| 48925 | 73634591 | 73636213 | 086730 |
| 48926 | 73654682 | 73655299 | 049541 |
| 48927 | 73668129 | 73669572 | 049541 |
| 48928 | 73683970 | 73684574 | |
| 48929 | 73693793 | 73694596 | |
| 48930 | 73699005 | 73699678 | |
| 48931 | 73703378 | 73704374 | 106665 |
| 48932 | 73794444 | 73795603 | 106665 |
| 48933 | 73867148 | 73870150 | 006704 |
| 48934 | 73891417 | 73896283 | 006704 |
| 48935 | 73896444 | 73897591 | 006704 |
| 48936 | 73897855 | 73898862 | 006704 |
| 48937 | 73915130 | 73916190 | 006704 |
| 48938 | 73983037 | 73983694 | 006704 |
| 48939 | 73993936 | 73996075 | 006704 |
| 48940 | 74020129 | 74021742 | 273069 |
| 48941 | 74024559 | 74025121 | |
| 48942 | 74041774 | 74042833 | |
| 48943 | 74070154 | 74073421 | 077809 |
| 48944 | 74074126 | 74075732 | 077809 |
| 48945 | 74106555 | 74107021 | 232729, 077809 |
| 48946 | 74488551 | 74489924 | 174374 |
| 48947 | 75156743 | 75157856 | 127957 |
| 48948 | 75240551 | 75241676 | 127946 |
| 48949 | 75267511 | 75269017 | 127946 |
| 48950 | 75278707 | 75279754 | 127946 |
| 48951 | 75305193 | 75305842 | 127946 |
| 48952 | 75321115 | 75321831 | 127946 |
| 48953 | 75367650 | 75369387 | 127946 |
| 48954 | 75471974 | 75472662 | 005486 |
| 48955 | 75507826 | 75509466 | 005486 |
| 48956 | 75534942 | 75537538 | 127948 |
| 48957 | 75543249 | 75552946 | 265020, 235090, 127948 |
| 48958 | 75554592 | 75557166 | 127948 |
| 48959 | 75566794 | 75568881 | 127948 |
| 48960 | 75572603 | 75575818 | 201643, 127948 |
| 48961 | 75580754 | 75581310 | 127948 |
| 48962 | 75585241 | 75586345 | 127948 |
| 48963 | 75587660 | 75589164 | 127948 |
| 48964 | 75609101 | 75610583 | 127948 |
| 48965 | 75618394 | 75619698 | 189077 |
| 48966 | 75620342 | 75620716 | 189077 |
| 48967 | 75622460 | 75624923 | 189077 |
| 48968 | 75666501 | 75667276 | 127952 |
| 48969 | 75676319 | 75678757 | 146701, 127952 |
| 48970 | 75686240 | 75687597 | 146701 |
| 48971 | 75698511 | 75698882 | |
| 48972 | 75735435 | 75737206 | 227038 |
| 48973 | 75795830 | 75796678 | |
| 48974 | 75807306 | 75807998 | |
| 48975 | 75920221 | 75921988 | |
| 48976 | 75923479 | 75924629 | |
| 48977 | 75929454 | 75930035 | |
| 48978 | 75931227 | 75935519 | 106211 |
| 48979 | 75935583 | 75937256 | |
| 48980 | 75939585 | 75940491 | |
| 48981 | 75946501 | 75948488 | |
| 48982 | 75962978 | 75963557 | 170027 |
| 48983 | 75986737 | 75989455 | 170027 |
| 48984 | 76008585 | 76010370 | |
| 48985 | 76021771 | 76023692 | 146700 |
| 48986 | 76637225 | 76637689 | 186704, 265479, 243566 |
| 48987 | 76873701 | 76875731 | 250990, 135205 |
| 48988 | 76945388 | 76946325 | 135205, 186088 |
| 48989 | 77012487 | 77013452 | 186088 |
| 48990 | 77021824 | 77022899 | 186088 |
| 48991 | 77037863 | 77041016 | 186088 |
| 48992 | 77044315 | 77046513 | 273341, 186088 |
| 48993 | 77165373 | 77168406 | 127947 |
| 48994 | 77314427 | 77315042 | 214293 |
| 48995 | 77320897 | 77322310 | 214293 |
| 48996 | 77324877 | 77327165 | 187257, 214293 |
| 48997 | 77395026 | 77396476 | 187257 |
| 48998 | 77426842 | 77428976 | 006576, 135211 |
| 48999 | 77647876 | 77650083 | 187391 |
| 49000 | 77755063 | 77755712 | 187391 |
| 49001 | 78066481 | 78067056 | 187391 |
| 49002 | 78840479 | 78841455 | 187391 |
| 49003 | 78937318 | 78938039 | 187391 |
| 49004 | 78946769 | 78947638 | 187391 |
| 49005 | 79049666 | 79050555 | 187391 |
| 49006 | 79063464 | 79064645 | 187391 |
| 49007 | 79080969 | 79084219 | 234456, 187391 |
| 49008 | 79090807 | 79091447 | 234456 |
| 49009 | 79763070 | 79766324 | 127955 |
| 49010 | 79776911 | 79777663 | 127955 |
| 49011 | 79779939 | 79781165 | 127955 |
| 49012 | 79839678 | 79840233 | 127955 |
| 49013 | 79847928 | 79848498 | 127955 |
| 49014 | 79851161 | 79851702 | |
| 49015 | 80014517 | 80015766 | 135218 |
| 49016 | 80078898 | 80080692 | 135218 |
| 49017 | 80240841 | 80241646 | 135218 |
| 49018 | 80263810 | 80264196 | 135218 |
| 49019 | 80547874 | 80548810 | 075223 |
| 49020 | 80570594 | 80572232 | |
| 49021 | 81232998 | 81235314 | 233491 |
| 49022 | 83097254 | 83098097 | 170381 |
| 49023 | 85158306 | 85158953 | |
| 49024 | 85183474 | 85184363 | |
| 49025 | 86475294 | 86476803 | 198822 |
| 49026 | 86780809 | 86783126 | 135164, 224046 |
| 49027 | 86848577 | 86849896 | 135185 |
| 49028 | 86865939 | 86866653 | |
| 49029 | 86940013 | 86940661 | |
| 49030 | 86973593 | 86975704 | 005469, 182165 |
| 49031 | 87042525 | 87045542 | 005471 |
| 49032 | 87092958 | 87093863 | 005471 |
| 49033 | 87102139 | 87105869 | 005471 |
| 49034 | 87108979 | 87112014 | 005471 |
| 49035 | 87124588 | 87126329 | |
| 49036 | 87126579 | 87127438 | |
| 49037 | 87157845 | 87158971 | 085563 |
| 49038 | 87177772 | 87178332 | 085563 |
| 49039 | 87193290 | 87194830 | 085563 |
| 49040 | 87197553 | 87201555 | 085563 |
| 49041 | 87202744 | 87205783 | 085563 |
| 49042 | 87228383 | 87230767 | 085563 |
| 49043 | 87237545 | 87238660 | 085563 |
| 49044 | 87257139 | 87258874 | 085563, 105784 |
| 49045 | 87504819 | 87506670 | 006634, 075303 |
| 49046 | 87674493 | 87675646 | 008277 |
| 49047 | 87848562 | 87850211 | 228113, 075142 |
| 49048 | 87855527 | 87857132 | 075142, 228113 |
| 49049 | 87918762 | 87919372 | 127954, 228113 |
| 49050 | 87940686 | 87941993 | |
| 49051 | 87968399 | 87969092 | |
| 49052 | 87987179 | 87988239 | |
| 49053 | 88435560 | 88436312 | 182348 |
| 49054 | 89792707 | 89793423 | 227646, 164647 |
| 49055 | 89802142 | 89803114 | 227646, 157214 |
| 49056 | 89807375 | 89810288 | 227646, 157214 |
| 49057 | 89824101 | 89825291 | 227646, 157214 |
| 49058 | 89840071 | 89841784 | 227646, 157214 |
| 49059 | 89845484 | 89846591 | 157214 |
| 49060 | 89873947 | 89875136 | 105792 |
| 49061 | 89895727 | 89897506 | 234459, 105792 |
| 49062 | 89900860 | 89901453 | 105792 |
| 49063 | 89974604 | 89977103 | 105793 |
| 49064 | 90031957 | 90035409 | 273299, 157224 |
| 49065 | 90038704 | 90039733 | 273299, 157224 |
| 49066 | 90040189 | 90041868 | 273299, 157224 |
| 49067 | 90193200 | 90194547 | 058091 |
| 49068 | 90221318 | 90222112 | 058091, 223969 |
| 49069 | 90224159 | 90226922 | 223969, 058091 |
| 49070 | 90254518 | 90255909 | 058091 |
| 49071 | 90346607 | 90347555 | 058091 |
| 49072 | 90350064 | 90350991 | 058091 |
| 49073 | 90395545 | 90398098 | 058091 |
| 49074 | 90445434 | 90446763 | 058091 |
| 49075 | 90523457 | 90523791 | 058091 |
| 49076 | 90893444 | 90894497 | 157240 |
| 49077 | 91479724 | 91480174 | 127989 |
| 49078 | 91509151 | 91510700 | 127989 |
| 49079 | 91569374 | 91571045 | 127914 |
| 49080 | 91653900 | 91655703 | 127914 |
| 49081 | 91671005 | 91673912 | 127914 |
| 49082 | 91705803 | 91706357 | 127914 |
| 49083 | 91762686 | 91765156 | 188693, 001630, 240720 |
| 49084 | 91808154 | 91808804 | 188693, 240720 |
| 49085 | 91874352 | 91876371 | 001629, 001631 |
| 49086 | 92053492 | 92054314 | 230927 |
| 49087 | 92076300 | 92078662 | 157259 |
| 49088 | 92156731 | 92158858 | 127993, 127980 |
| 49089 | 92218664 | 92219942 | 234545 |
| 49090 | 92261847 | 92265694 | 105810 |
| 49091 | 92284639 | 92285275 | 105810 |
| 49092 | 92324521 | 92325813 | 105810 |
| 49093 | 92380856 | 92382884 | 105810 |
| 49094 | 92392684 | 92393445 | 105810 |
| 49095 | 92394449 | 92398533 | 105810 |
| 49096 | 92410315 | 92411194 | 105810 |
| 49097 | 92426698 | 92427488 | 105810 |
| 49098 | 92438226 | 92439590 | 105810 |
| 49099 | 92460920 | 92466486 | 237819, 105810 |
| 49100 | 92860759 | 92862442 | 004766 |
| 49101 | 93207807 | 93208572 | |
| 49102 | 93609982 | 93610994 | 236861, 105829 |
| 49103 | 93632463 | 93634012 | 105829, 236861 |
| 49104 | 93930156 | 93931095 | |
| 49105 | 94138349 | 94140410 | 127995 |
| 49106 | 94208880 | 94210924 | |
| 49107 | 94213222 | 94214410 | |
| 49108 | 94223957 | 94224880 | 127990 |
| 49109 | 94249948 | 94251137 | 127990 |
| 49110 | 94284382 | 94286339 | 242265, 127990 |
| 49111 | 94325905 | 94327990 | |
| 49112 | 94536530 | 94538002 | 158528 |
| 49113 | 94696275 | 94696977 | 158528 |
| 49114 | 94870125 | 94870679 | 158528 |
| 49115 | 94946901 | 94951137 | 005421 |
| 49116 | 94951703 | 94954533 | 005421 |
| 49117 | 94964274 | 94965062 | 005421 |
| 49118 | 95024746 | 95026738 | 105852, 005421 |
| 49119 | 95060072 | 95060665 | 105854 |
| 49120 | 95063247 | 95065215 | 105854 |
| 49121 | 95068987 | 95071353 | |
| 49122 | 95174209 | 95175376 | |
| 49123 | 95175860 | 95176466 | |
| 49124 | 95178627 | 95180448 | |
| 49125 | 95189310 | 95190570 | |
| 49126 | 95224415 | 95226413 | 231170, 004799 |
| 49127 | 95237375 | 95239468 | 231170 |
| 49128 | 95755723 | 95756221 | 004864 |
| 49129 | 95818394 | 95818980 | 004864 |
| 49130 | 95848653 | 95849165 | 208025, 004864 |
| 49131 | 95877444 | 95878348 | 004864 |
| 49132 | 95895167 | 95896983 | 004864 |
| 49133 | 95932185 | 95933153 | 004864 |
| 49134 | 95937440 | 95938461 | 004864 |
| 49135 | 95950008 | 95952194 | 004864 |
| 49136 | 95988616 | 95989752 | |
| 49137 | 96030365 | 96031015 | |
| 49138 | 96043887 | 96045490 | |
| 49139 | 96131909 | 96133349 | 197851, 127922 |
| 49140 | 96137279 | 96138047 | 127922 |
| 49141 | 96163156 | 96164362 | 127922 |
| 49142 | 96175735 | 96179257 | 127922 |
| 49143 | 96228538 | 96229485 | 127922 |
| 49144 | 96234335 | 96235102 | 127922 |
| 49145 | 96338190 | 96339774 | 127922 |
| 49146 | 96347792 | 96348279 | |
| 49147 | 96429350 | 96430681 | |
| 49148 | 96455382 | 96455836 | |
| 49149 | 96462910 | 96463559 | |
| 49150 | 96578966 | 96579620 | |
| 49151 | 96746440 | 96747883 | 196636 |
| 49152 | 97600801 | 97602347 | 243554 |
| 49153 | 97650748 | 97651753 | |
| 49154 | 97714719 | 97716852 | |
| 49155 | 97735027 | 97737450 | 164715 |
| 49156 | 97739841 | 97740671 | 164715 |
| 49157 | 97746243 | 97750696 | 164715 |
| 49158 | 97760057 | 97764612 | 164715 |
| 49159 | 97797758 | 97798381 | 164715 |
| 49160 | 97803534 | 97804184 | 164715 |
| 49161 | 97840465 | 97841668 | 180535 |
| 49162 | 97880937 | 97882411 | 164713, 205356 |
| 49163 | 97909895 | 97917071 | 164713 |
| 49164 | 97929811 | 97930823 | 006453, 164713 |
| 49165 | 97977518 | 97978749 | 006453 |
| 49166 | 97983178 | 97984482 | 006453 |
| 49167 | 97986546 | 97987798 | 006453 |
| 49168 | 97989629 | 97990425 | 006453 |
| 49169 | 98000153 | 98001349 | 006453 |
| 49170 | 98021476 | 98022153 | 006453 |
| 49171 | 98023681 | 98024174 | 006453 |
| 49172 | 98027801 | 98031086 | 006453 |
| 49173 | 98045882 | 98049933 | |
| 49174 | 98050213 | 98050759 | |
| 49175 | 98248999 | 98249691 | 106236 |
| 49176 | 98475655 | 98477625 | 196367 |
| 49177 | 98519555 | 98521313 | 196367 |
| 49178 | 98648094 | 98649463 | 198742 |
| 49179 | 98664870 | 98665376 | 198742 |
| 49180 | 98688735 | 98691012 | 198742 |
| 49181 | 98692910 | 98697590 | 198742 |
| 49182 | 98738602 | 98740599 | 198742 |
| 49183 | 98740604 | 98742533 | 198742 |
| 49184 | 98759905 | 98760486 | |
| 49185 | 98767691 | 98768979 | |
| 49186 | 98787981 | 98788778 | 185467 |
| 49187 | 98797693 | 98799868 | 185467 |
| 49188 | 98804291 | 98810812 | 185467 |
| 49189 | 98821375 | 98823921 | |
| 49190 | 98922680 | 98924567 | 241685 |
| 49191 | 98969965 | 98970866 | 241685 |
| 49192 | 98971691 | 98973599 | 130429, 241685 |
| 49193 | 98978227 | 98979092 | 241685, 130429 |
| 49194 | 98979163 | 98979784 | 241685, 130429 |
| 49195 | 99004977 | 99007638 | 106245, 106244 |
| 49196 | 99035771 | 99037325 | 160917, 248919, 106246 |
| 49197 | 99062545 | 99064471 | 241468, 248919, 106246 |
| 49198 | 99069299 | 99069793 | |
| 49199 | 99070043 | 99071190 | 198556 |
| 49200 | 99096901 | 99098176 | 160908, 198556 |
| 49201 | 99101885 | 99103642 | 196652 |
| 49202 | 99148743 | 99150039 | 221909 |
| 49203 | 99155066 | 99157419 | 197343, 272647, 221909 |
| 49204 | 99159052 | 99161429 | 197343, 272647 |
| 49205 | 99213745 | 99215339 | 197037 |
| 49206 | 99249023 | 99251842 | 106258 |
| 49207 | 99267336 | 99267798 | 106258 |
| 49208 | 99273494 | 99276415 | 106258 |
| 49209 | 99276534 | 99278236 | 106258 |
| 49210 | 99282894 | 99283457 | |
| 49211 | 99291036 | 99293214 | |
| 49212 | 99327450 | 99327997 | 160870 |
| 49213 | 99337234 | 99341414 | |
| 49214 | 99387534 | 99393679 | |
| 49215 | 99421612 | 99428402 | 021461 |
| 49216 | 99441445 | 99441880 | 021461 |
| 49217 | 99457662 | 99458716 | 021461 |
| 49218 | 99516073 | 99517934 | 146833 |
| 49219 | 99550406 | 99553807 | |
| 49220 | 99571494 | 99572037 | 160862 |
| 49221 | 99572042 | 99574919 | 160862 |
| 49222 | 99594624 | 99596161 | |
| 49223 | 99601140 | 99602471 | |
| 49224 | 99612927 | 99615469 | 106261 |
| 49225 | 99620297 | 99620702 | 106261 |
| 49226 | 99621361 | 99622146 | 106261 |
| 49227 | 99634153 | 99635309 | 106261 |
| 49228 | 99642283 | 99642792 | |
| 49229 | 99646590 | 99648533 | 166529 |
| 49230 | 99662880 | 99663808 | 166526 |
| 49231 | 99678395 | 99680747 | 166526 |
| 49232 | 99685853 | 99687451 | 168090 |
| 49233 | 99697561 | 99699795 | 221838, 166508 |
| 49234 | 99723727 | 99726385 | 214309, 242798 |
| 49235 | 99727888 | 99729079 | 235077 |
| 49236 | 99746274 | 99747305 | 188186 |
| 49237 | 99754857 | 99756648 | 146826 |
| 49238 | 100025232 | 100028524 | 146834, 078487 |
| 49239 | 100032621 | 100034477 | 160813, 240211, 241357 |
| 49240 | 100041560 | 100043123 | |
| 49241 | 100047769 | 100048787 | |
| 49242 | 100075868 | 100077406 | 166925 |
| 49243 | 100080562 | 100081595 | 166924, 266372 |
| 49244 | 100132354 | 100132870 | |
| 49245 | 100136193 | 100138431 | 106351 |
| 49246 | 100141500 | 100146176 | 106351 |
| 49247 | 100164960 | 100166399 | 106351 |
| 49248 | 100166859 | 100169562 | 184414 |
| 49249 | 100182566 | 100184647 | 077454, 106336 |
| 49250 | 100199670 | 100199974 | 106333, 224729 |
| 49251 | 100201601 | 100202630 | 224729, 106333 |
| 49252 | 100202882 | 100203670 | 106333 |
| 49253 | 100209442 | 100210859 | 106330 |
| 49254 | 100219133 | 100220062 | 106327 |
| 49255 | 100237976 | 100240400 | 106327 |
| 49256 | 100270678 | 100274493 | 172354 |
| 49257 | 100290766 | 100292800 | |
| 49258 | 100302813 | 100304931 | 172336 |
| 49259 | 100324901 | 100325529 | |
| 49260 | 100424288 | 100425866 | 146828, 196411 |
| 49261 | 100429092 | 100429852 | 146828 |
| 49262 | 100434392 | 100435465 | 236305, 146828 |
| 49263 | 100449378 | 100450706 | 236305, 146828 |
| 49264 | 100464172 | 100466703 | 087077, 146828 |
| 49265 | 100471669 | 100473584 | 087087 |
| 49266 | 100486227 | 100488934 | 176125, 087085, 087087 |
| 49267 | 100492153 | 100495511 | 087085 |
| 49268 | 100510097 | 100511148 | |
| 49269 | 100511458 | 100513490 | |
| 49270 | 100514009 | 100514474 | |
| 49271 | 100546687 | 100547883 | 169894, 228273 |
| 49272 | 100608846 | 100609854 | 169894, 225946 |
| 49273 | 100660317 | 100661101 | 227053, 205277 |
| 49274 | 100727723 | 100729848 | 169871 |
| 49275 | 100742169 | 100748981 | |
| 49276 | 100751510 | 100752743 | |
| 49277 | 100759640 | 100762399 | |
| 49278 | 100764305 | 100776491 | 106366 |
| 49279 | 100776580 | 100778350 | 106366 |
| 49280 | 100778507 | 100779492 | 106366 |
| 49281 | 100780178 | 100785240 | 106366 |
| 49282 | 100787105 | 100787977 | |
| 49283 | 100797501 | 100798826 | 106367 |
| 49284 | 100843774 | 100844772 | 106384 |
| 49285 | 100859450 | 100862442 | 106400, 106397 |
| 49286 | 100863367 | 100864277 | 106400 |
| 49287 | 100880859 | 100881391 | 106404 |
| 49288 | 100886908 | 100888662 | 214253 |
| 49289 | 100894832 | 100896081 | 214253 |
| 49290 | 100964407 | 100966117 | 128581 |
| 49291 | 100995472 | 100996369 | |
| 49292 | 101006219 | 101007667 | 160963 |
| 49293 | 101029781 | 101030461 | 160963 |
| 49294 | 101178621 | 101181125 | 160963 |
| 49295 | 101228134 | 101228626 | |
| 49296 | 101331164 | 101332205 | |
| 49297 | 101335030 | 101336089 | |
| 49298 | 101360852 | 101361337 | |
| 49299 | 101376713 | 101377580 | |
| 49300 | 101397690 | 101398307 | |
| 49301 | 101457326 | 101459869 | 257923 |
| 49302 | 101459873 | 101461630 | 257923 |
| 49303 | 101482013 | 101482560 | 257923 |
| 49304 | 101499674 | 101500708 | 257923 |
| 49305 | 101501998 | 101503777 | 257923 |
| 49306 | 101524823 | 101527302 | 257923 |
| 49307 | 101555306 | 101555978 | 257923 |
| 49308 | 101578444 | 101580804 | 257923 |
| 49309 | 101584645 | 101586444 | 257923 |
| 49310 | 101595506 | 101597480 | 257923 |
| 49311 | 101667526 | 101668783 | 257923 |
| 49312 | 101764706 | 101766233 | 257923 |
| 49313 | 101875713 | 101876564 | 257923 |
| 49314 | 101877011 | 101877971 | 257923 |
| 49315 | 101901119 | 101902151 | 257923 |
| 49316 | 101929427 | 101929948 | 160999 |
| 49317 | 102035908 | 102037914 | 128563 |
| 49318 | 102104581 | 102106150 | 161036, 160993 |
| 49319 | 102110149 | 102111370 | 161036 |
| 49320 | 102452373 | 102452938 | |
| 49321 | 102513759 | 102517537 | 161040 |
| 49322 | 102631594 | 102634370 | 161040 |
| 49323 | 102714466 | 102716575 | 170632, 161040 |
| 49324 | 102753600 | 102754019 | 161048 |
| 49325 | 102788659 | 102790796 | 161048 |
| 49326 | 102937472 | 102938759 | 105819 |
| 49327 | 102983941 | 102985939 | 161057, 105821 |
| 49328 | 102987481 | 102988824 | 161057 |
| 49329 | 103028980 | 103030090 | 170615 |
| 49330 | 103300170 | 103304697 | 189056 |
| 49331 | 103449896 | 103451230 | 189056 |
| 49332 | 103576962 | 103577483 | 189056 |
| 49333 | 103630328 | 103631055 | |
| 49334 | 103636758 | 103637934 | |
| 49335 | 103650306 | 103651401 | |
| 49336 | 103847716 | 103849245 | 164815 |
| 49337 | 104563239 | 104563924 | 225329 |
| 49338 | 104612046 | 104612632 | 228393 |
| 49339 | 104623221 | 104625793 | 228393 |
| 49340 | 104629371 | 104630980 | 228393 |
| 49341 | 104651598 | 104657038 | 005483, 239569, 228393 |
| 49342 | 104685247 | 104685663 | 005483 |
| 49343 | 104686848 | 104687343 | 005483 |
| 49344 | 104771876 | 104772849 | 135250 |
| 49345 | 104776661 | 104777021 | 135250 |
| 49346 | 104818957 | 104819982 | 135250 |
| 49347 | 105028345 | 105030062 | 135250 |
| 49348 | 105079542 | 105080528 | 091127 |
| 49349 | 105161388 | 105163191 | 091127 |
| 49350 | 105172264 | 105173643 | 135249 |
| 49351 | 105221585 | 105222360 | 185055 |
| 49352 | 105288088 | 105291016 | 146776 |
| 49353 | 105305254 | 105305685 | 146776 |
| 49354 | 105313614 | 105315645 | 146776 |
| 49355 | 105316134 | 105316877 | 146776 |
| 49356 | 105317091 | 105318142 | 146776 |
| 49357 | 105318440 | 105320365 | 146776 |
| 49358 | 105320969 | 105321458 | 146776 |
| 49359 | 105358708 | 105359741 | 146776 |
| 49360 | 105410320 | 105411182 | 146776 |
| 49361 | 105434859 | 105436615 | 146776 |
| 49362 | 105442784 | 105444121 | 146776 |
| 49363 | 105451007 | 105452788 | 146776 |
| 49364 | 105466553 | 105467274 | 146776 |
| 49365 | 105470042 | 105471873 | 146776 |
| 49366 | 105516034 | 105518760 | 128536, 146776 |
| 49367 | 105637529 | 105638095 | 128536 |
| 49368 | 105649702 | 105650420 | 128536 |
| 49369 | 105705086 | 105706756 | |
| 49370 | 105710273 | 105711174 | |
| 49371 | 105751380 | 105753615 | 008282 |
| 49372 | 105780098 | 105780804 | |
| 49373 | 105816913 | 105817667 | |
| 49374 | 105818692 | 105821427 | |
| 49375 | 105836649 | 105837608 | |
| 49376 | 105847184 | 105848110 | |
| 49377 | 105856131 | 105858586 | |
| 49378 | 105879718 | 105880431 | |
| 49379 | 105896488 | 105897206 | 105835 |
| 49380 | 105923548 | 105926953 | 273320, 105835 |
| 49381 | 105953299 | 105955058 | |
| 49382 | 105966715 | 105968992 | |
| 49383 | 105969544 | 105971452 | |
| 49384 | 106018152 | 106018987 | 243797 |
| 49385 | 106056879 | 106059660 | 243797 |
| 49386 | 106064305 | 106067222 | 243797 |
| 49387 | 106088824 | 106090479 | 243797 |
| 49388 | 106096406 | 106097370 | 243797 |
| 49389 | 106124788 | 106128063 | 243797 |
| 49390 | 106144586 | 106144986 | 243797 |
| 49391 | 106170659 | 106171018 | 243797 |
| 49392 | 106182489 | 106183815 | 243797 |
| 49393 | 106208316 | 106210218 | 243797 |
| 49394 | 106251158 | 106253336 | 243797 |
| 49395 | 106261157 | 106262746 | 243797 |
| 49396 | 106263040 | 106265465 | 243797 |
| 49397 | 106280038 | 106281819 | 243797 |
| 49398 | 106298700 | 106302295 | 177820, 253276, 243797 |
| 49399 | 106358319 | 106359146 | 243797 |
| 49400 | 106410596 | 106411221 | 243797 |
| 49401 | 106413070 | 106414279 | |
| 49402 | 106762744 | 106763402 | 005249, 243193 |
| 49403 | 106807493 | 106810787 | 105856 |
| 49404 | 107200363 | 107201005 | 164597 |
| 49405 | 107203430 | 107205700 | 105865, 164597 |
| 49406 | 107219768 | 107221625 | 272854, 075790 |
| 49407 | 107383121 | 107385484 | 105879, 241764 |
| 49408 | 107476697 | 107477229 | |
| 49409 | 107500132 | 107501106 | |
| 49410 | 107501281 | 107502215 | |
| 49411 | 107530792 | 107532806 | 091140 |
| 49412 | 107589196 | 107590293 | 091136 |
| 49413 | 107607120 | 107608372 | 091136 |
| 49414 | 107612162 | 107613665 | 091136 |
| 49415 | 107644710 | 107645285 | |
| 49416 | 107652682 | 107653700 | |
| 49417 | 107851669 | 107852694 | 091129 |
| 49418 | 107885357 | 107888055 | 091129 |
| 49419 | 107939564 | 107940170 | 091129 |
| 49420 | 107998790 | 107999732 | 266112, 091 129 |
| 49421 | 108165680 | 108167547 | 135241 |
| 49422 | 108208909 | 108212143 | 128590, 177683, 135241 |
| 49423 | 108248968 | 108249887 | 225647 |
| 49424 | 108249991 | 108250556 | 225647 |
| 49425 | 108253501 | 108255276 | 225647 |
| 49426 | 108293790 | 108294604 | |
| 49427 | 109724241 | 109725044 | |
| 49428 | 110162259 | 110163364 | 226965 |
| 49429 | 110174032 | 110175377 | 226965 |
| 49430 | 110748130 | 110749191 | 184903, 173114 |
| 49431 | 110753142 | 110754878 | 184903, 173114 |
| 49432 | 110832424 | 110833293 | 184903 |
| 49433 | 110872215 | 110873318 | 184903 |
| 49434 | 111020651 | 111021678 | 184903 |
| 49435 | 111064600 | 111065480 | 184903 |
| 49436 | 111138991 | 111139541 | 184903 |
| 49437 | 111156990 | 111158155 | 184903 |
| 49438 | 111177158 | 111177601 | 184903 |
| 49439 | 111201246 | 111202888 | 184903 |
| 49440 | 111405903 | 111406509 | 128512 |
| 49441 | 111443063 | 111443917 | 128512 |
| 49442 | 111593480 | 111594182 | 222346, 128512 |
| 49443 | 111649123 | 111649653 | 128512 |
| 49444 | 111653084 | 111653775 | 128512 |
| 49445 | 111692770 | 111693477 | 128512 |
| 49446 | 111695765 | 111697866 | 128512 |
| 49447 | 111719826 | 111721834 | 128512 |
| 49448 | 111726229 | 111727222 | 128512 |
| 49449 | 111752855 | 111753436 | 128512 |
| 49450 | 111769841 | 111770420 | 128512 |
| 49451 | 111802223 | 111803010 | 128512 |
| 49452 | 111833821 | 111834754 | 128512 |
| 49453 | 111838866 | 111840577 | 128512 |
| 49454 | 111843829 | 111847891 | 198839, 128512 |
| 49455 | 111851397 | 111852317 | 198839 |
| 49456 | 111863274 | 111863840 | 198839 |
| 49457 | 111872720 | 111873827 | 198839 |
| 49458 | 111878259 | 111879965 | 198839 |
| 49459 | 112031783 | 112032875 | 226851 |
| 49460 | 112089287 | 112092724 | 006652 |
| 49461 | 112093508 | 112094570 | 006652 |
| 49462 | 112102197 | 112102688 | 006652 |
| 49463 | 112429328 | 112430891 | 146802 |
| 49464 | 112579234 | 112580949 | 164603 |
| 49465 | 112758253 | 112759198 | 214194, 225457 |
| 49466 | 113721781 | 113728530 | 128573 |
| 49467 | 113749259 | 113750005 | 128573 |
| 49468 | 113798287 | 113798741 | 128573 |
| 49469 | 113822770 | 113823964 | 128573 |
| 49470 | 113882842 | 113884105 | 128573 |
| 49471 | 113895498 | 113896003 | 128573 |
| 49472 | 114045433 | 114045941 | 128573 |
| 49473 | 114054180 | 114057078 | 224595, 128573 |
| 49474 | 114561536 | 114563811 | 135272 |
| 49475 | 114619273 | 114620618 | 135272 |
| 49476 | 114645769 | 114646762 | 135272 |
| 49477 | 114653351 | 114654468 | 135272 |
| 49478 | 114695945 | 114696457 | |
| 49479 | 114726543 | 114727967 | 233607, 225535 |
| 49480 | 114728867 | 114729438 | 233607, 225535 |
| 49481 | 114739866 | 114740447 | 233607, 225535 |
| 49482 | 114750443 | 114751222 | 233607, 225535 |
| 49483 | 114753600 | 114754344 | 233607, 225535 |
| 49484 | 114785421 | 114786237 | 233607 |
| 49485 | 115318032 | 115318929 | |
| 49486 | 115809068 | 115809909 | |
| 49487 | 115850177 | 115852080 | 135269 |
| 49488 | 115858020 | 115858756 | 135269 |
| 49489 | 115879261 | 115880100 | 243243, 237813, 135269 |
| 49490 | 115901543 | 115902570 | 243243, 237813 |
| 49491 | 115910975 | 115914476 | 243243, 237813 |
| 49492 | 115923661 | 115924640 | 237870, 243243, 237813 |
| 49493 | 115955253 | 115958604 | 243243, 105971, 237813 |
| 49494 | 115976988 | 115981179 | 105971, 237813 |
| 49495 | 115993610 | 115997560 | 105971, 237813 |
| 49496 | 116034658 | 116035939 | 105971, 237813 |
| 49497 | 116066441 | 116067041 | 105971, 237813 |
| 49498 | 116081494 | 116084390 | 105971, 237813 |
| 49499 | 116104816 | 116107115 | 105971, 237813 |
| 49500 | 116138828 | 116143775 | 237813, 105971 |
| 49501 | 116150939 | 116153451 | |
| 49502 | 116164141 | 116167368 | 105974 |
| 49503 | 116176128 | 116176689 | 105974 |
| 49504 | 116268892 | 116271979 | |
| 49505 | 116272887 | 116274693 | |
| 49506 | 116292664 | 116293872 | |
| 49507 | 116310720 | 116315527 | 105976 |
| 49508 | 116319611 | 116320062 | 105976 |
| 49509 | 116326883 | 116329277 | 105976 |
| 49510 | 116345906 | 116347899 | 105976 |
| 49511 | 116350579 | 116351787 | 105976 |
| 49512 | 116356573 | 116357683 | 105976 |
| 49513 | 116377098 | 116377897 | 105976 |
| 49514 | 116381143 | 116382481 | 105976 |
| 49515 | 116411259 | 116414140 | 105976 |
| 49516 | 116415819 | 116418123 | 105976 |
| 49517 | 116420678 | 116421457 | 105976 |
| 49518 | 116442824 | 116443266 | |
| 49519 | 116444188 | 116446402 | |
| 49520 | 116449430 | 116453326 | 198898 |
| 49521 | 116502265 | 116503916 | 198898 |
| 49522 | 116592660 | 116595162 | 004866, 214188, 227199 |
| 49523 | 116655427 | 116656027 | 004866, 214188 |
| 49524 | 116687639 | 116688117 | 004866, 214188 |
| 49525 | 116716107 | 116717293 | 004866, 214188, 226367 |
| 49526 | 116764396 | 116765341 | 004866, 226367 |
| 49527 | 116792475 | 116793379 | 004866 |
| 49528 | 116797243 | 116798431 | 004866 |
| 49529 | 116809684 | 116811187 | 004866 |
| 49530 | 117129782 | 117130660 | 001626 |
| 49531 | 117207909 | 117208326 | 001626 |
| 49532 | 117221770 | 117222869 | 001626 |
| 49533 | 117245661 | 117246272 | 083622, 001626 |
| 49534 | 117512773 | 117513983 | 077063 |
| 49535 | 117577401 | 117578548 | |
| 49536 | 117823097 | 117825039 | 128534 |
| 49537 | 118981805 | 118982512 | |
| 49538 | 119154374 | 119154897 | |
| 49539 | 120382231 | 120384176 | 184408 |
| 49540 | 120496919 | 120498789 | 106025 |
| 49541 | 120590318 | 120592114 | 071243 |
| 49542 | 120627529 | 120631429 | 106034 |
| 49543 | 120644163 | 120644876 | 106034 |
| 49544 | 120709381 | 120709874 | 106034 |
| 49545 | 120719313 | 120720429 | 106034 |
| 49546 | 120722416 | 120726995 | 212628, 106034 |
| 49547 | 120777817 | 120780543 | 106034 |
| 49548 | 120797113 | 120798074 | 106034 |
| 49549 | 120945004 | 120945561 | |
| 49550 | 120983200 | 120984519 | |
| 49551 | 121034545 | 121035251 | 196937 |
| 49552 | 121035492 | 121037317 | 196937 |
| 49553 | 121037959 | 121038680 | 213310 |
| 49554 | 121354312 | 121355359 | |
| 49555 | 121783252 | 121785314 | 008311 |
| 49556 | 121838960 | 121839783 | |
| 49557 | 121857076 | 121857643 | 234418 |
| 49558 | 121944504 | 121945258 | 128610, 230316 |
| 49559 | 121956770 | 121957620 | |
| 49560 | 122155302 | 122155910 | 081803 |
| 49561 | 122525803 | 122527247 | 081803 |
| 49562 | 122830369 | 122832402 | 081800 |
| 49563 | 123174453 | 123175351 | 164675 |
| 49564 | 123196922 | 123198452 | 128609 |
| 49565 | 123238425 | 123239563 | 146809, 230442 |
| 49566 | 123262380 | 123263471 | 146809, 230442 |
| 49567 | 123283527 | 123284793 | |
| 49568 | 123309460 | 123310041 | |
| 49569 | 123314811 | 123315539 | |
| 49570 | 123319533 | 123320074 | |
| 49571 | 123320938 | 123322127 | 106299 |
| 49572 | 123387324 | 123390234 | 272686, 106299 |
| 49573 | 123409334 | 123409881 | |
| 49574 | 123410525 | 123410920 | |
| 49575 | 123437520 | 123438597 | |
| 49576 | 123516412 | 123517209 | 106302 |
| 49577 | 124129084 | 124131082 | |
| 49578 | 124175938 | 124176933 | |
| 49579 | 124357990 | 124358729 | |
| 49580 | 124360249 | 124360694 | |
| 49581 | 124361797 | 124363579 | |
| 49582 | 124364271 | 124365534 | |
| 49583 | 124402447 | 124403865 | 170775 |
| 49584 | 124403907 | 124405094 | 170775 |
| 49585 | 124405139 | 124406430 | 170775 |
| 49586 | 124569168 | 124570537 | 224897, 128513 |
| 49587 | 126214042 | 126215233 | 179603 |
| 49588 | 126297507 | 126298307 | 179603 |
| 49589 | 126577077 | 126578141 | 179603 |
| 49590 | 126580374 | 126581865 | 179603 |
| 49591 | 126675174 | 126675948 | 179603 |
| 49592 | 126681755 | 126682515 | 179603 |
| 49593 | 126891248 | 126894362 | 179603 |
| 49594 | 126987571 | 126988397 | 048405 |
| 49595 | 127031276 | 127034212 | 048405 |
| 49596 | 127224570 | 127226369 | 179562 |
| 49597 | 127227738 | 127229304 | 004059, 179562 |
| 49598 | 127233160 | 127234170 | 179562, 106328 |
| 49599 | 127234346 | 127235073 | 106328 |
| 49600 | 127290929 | 127293191 | 197157, 240790 |
| 49601 | 127347551 | 127348016 | 197157 |
| 49602 | 127399270 | 127400999 | 197157 |
| 49603 | 127547493 | 127548220 | 197157 |
| 49604 | 127640494 | 127641381 | 197157 |
| 49605 | 127645299 | 127646456 | 197157 |
| 49606 | 127775230 | 127776170 | |
| 49607 | 127950471 | 127950906 | 106344 |
| 49608 | 127983103 | 127984417 | 238750, 106344 |
| 49609 | 128023637 | 128024198 | |
| 49610 | 128094293 | 128096261 | 240758, 135245, 273184 |
| 49611 | 128170949 | 128171918 | 242588, 273270 |
| 49612 | 128378241 | 128380752 | 128595 |
| 49613 | 128399101 | 128400363 | 128595 |
| 49614 | 128469590 | 128470507 | 128591 |
| 49615 | 128502507 | 128504275 | 128524, 242902, 135253 |
| 49616 | 128524165 | 128524708 | 135253 |
| 49617 | 128577616 | 128579197 | 128604 |
| 49618 | 128602861 | 128603833 | 064419 |
| 49619 | 128693587 | 128695912 | 064419 |
| 49620 | 128740379 | 128741455 | |
| 49621 | 128742428 | 128743338 | |
| 49622 | 128784314 | 128785168 | 158457 |
| 49623 | 128828128 | 128829614 | 128602 |
| 49624 | 128864081 | 128866181 | 158467 |
| 49625 | 129027236 | 129027892 | 158467 |
| 49626 | 129141993 | 129142920 | 240204 |
| 49627 | 129170425 | 129172188 | |
| 49628 | 129209308 | 129210226 | |
| 49629 | 129248980 | 129252901 | 106459, 273329 |
| 49630 | 129419589 | 129420500 | |
| 49631 | 129464610 | 129466643 | |
| 49632 | 129469283 | 129472572 | 186591 |
| 49633 | 129491146 | 129494848 | 186591 |
| 49634 | 129516752 | 129518471 | 186591 |
| 49635 | 129526008 | 129526865 | 186591 |
| 49636 | 129546076 | 129547713 | 186591 |
| 49637 | 129588554 | 129593423 | 244036, 186591 |
| 49638 | 129598275 | 129599644 | 244036 |
| 49639 | 129648137 | 129651193 | 244036 |
| 49640 | 129690325 | 129691735 | 091732 |
| 49641 | 129703416 | 129704862 | |
| 49642 | 129705482 | 129706068 | |
| 49643 | 129709017 | 129711428 | 128607 |
| 49644 | 129844369 | 129845902 | 240571, 146842 |
| 49645 | 130080349 | 130081523 | 106477 |
| 49646 | 130125310 | 130127091 | 106484, 272701 |
| 49647 | 130352783 | 130354085 | 213265, 158623 |
| 49648 | 130568983 | 130570742 | 226380, 233559 |
| 49649 | 130570833 | 130573546 | 226380, 233559 |
| 49650 | 130574903 | 130576741 | 226380, 233559 |
| 49651 | 130577262 | 130580047 | 226380, 233559 |
| 49652 | 130583530 | 130591919 | 226380, 233559 |
| 49653 | 130593399 | 130604714 | 226380, 233559 |
| 49654 | 130606884 | 130611284 | 233559 |
| 49655 | 130614920 | 130615582 | 271204 |
| 49656 | 130623710 | 130629483 | 231721, 273319 |
| 49657 | 130632330 | 130633037 | 231721 |
| 49658 | 130679051 | 130679793 | 231721 |
| 49659 | 130680909 | 130682047 | 231721 |
| 49660 | 130696769 | 130697804 | 231721 |
| 49661 | 130741844 | 130742662 | 231721 |
| 49662 | 130746541 | 130746929 | 231721 |
| 49663 | 130772879 | 130774357 | 231721 |
| 49664 | 130790114 | 130796602 | 128585, 231721 |
| 49665 | 130848590 | 130849621 | 128585 |
| 49666 | 130872134 | 130873839 | 128585 |
| 49667 | 130903882 | 130904999 | 128585 |
| 49668 | 130910198 | 130911850 | 128585 |
| 49669 | 130922882 | 130923994 | 128585 |
| 49670 | 130933619 | 130934477 | 128585 |
| 49671 | 131011585 | 131014414 | 236753, 128585 |
| 49672 | 131085271 | 131086298 | 128585 |
| 49673 | 131103302 | 131103881 | 128585 |
| 49674 | 131198094 | 131198641 | 128567 |
| 49675 | 132351274 | 132351843 | 183470 |
| 49676 | 132765769 | 132767458 | 106554 |
| 49677 | 132937571 | 132938736 | 131558 |
| 49678 | 133455175 | 133456404 | 131558 |
| 49679 | 133859482 | 133859970 | 155530 |
| 49680 | 134000326 | 134002258 | 205060 |
| 49681 | 134038133 | 134038991 | |
| 49682 | 134040337 | 134041338 | |
| 49683 | 134046652 | 134053148 | |
| 49684 | 134053372 | 134054727 | |
| 49685 | 134106837 | 134107917 | 273297 |
| 49686 | 134117214 | 134118040 | |
| 49687 | 134247383 | 134248332 | 227471 |
| 49688 | 134277931 | 134279570 | |
| 49689 | 134327242 | 134328590 | |
| 49690 | 134330514 | 134332405 | 172331 |
| 49691 | 134387739 | 134389527 | |
| 49692 | 134528821 | 134530744 | 122786 |
| 49693 | 134570440 | 134572430 | 122786 |
| 49694 | 134575095 | 134579060 | 122786 |
| 49695 | 134583826 | 134588628 | 122786 |
| 49696 | 134594332 | 134596448 | 122786 |
| 49697 | 134625874 | 134627128 | 122786 |
| 49698 | 134670847 | 134672153 | 146856 |
| 49699 | 134676350 | 134677925 | 146856 |
| 49700 | 134831629 | 134834068 | 229974, 146859, 146856, |
| | | | 122783 |
| 49701 | 134844427 | 134845895 | 146859, 122783 |
| 49702 | 134853090 | 134857402 | 272941, 122783 |
| 49703 | 134895396 | 134897174 | 105875 |
| 49704 | 134902488 | 134903270 | |
| 49705 | 134938134 | 134939726 | 146857 |
| 49706 | 135126497 | 135126910 | 080802 |
| 49707 | 135193142 | 135195536 | 080802 |
| 49708 | 135242084 | 135243610 | 155561 |
| 49709 | 135346519 | 135348342 | 243317 |
| 49710 | 135458222 | 135459612 | |
| 49711 | 135661224 | 135662600 | 105887 |
| 49712 | 136928434 | 136929111 | 105894 |
| 49713 | 137524994 | 137525587 | 157680 |
| 49714 | 137633116 | 137634867 | 182158 |
| 49715 | 137684771 | 137687511 | 122787, 182158 |
| 49716 | 137714934 | 137716432 | 122787 |
| 49717 | 137734200 | 137735121 | 122787 |
| 49718 | 137749478 | 137750407 | 122787 |
| 49719 | 137751714 | 137753063 | 122787 |
| 49720 | 137758704 | 137759506 | 122787 |
| 49721 | 137770911 | 137772499 | 122787 |
| 49722 | 137773951 | 137775085 | 122787 |
| 49723 | 137780943 | 137781606 | 122787 |
| 49724 | 137782030 | 137782544 | 122787 |
| 49725 | 137843320 | 137844069 | |
| 49726 | 137919215 | 137920642 | |
| 49727 | 137922574 | 137923232 | |
| 49728 | 137927807 | 137928880 | |
| 49729 | 137929510 | 137930932 | |
| 49730 | 138000898 | 138001889 | |
| 49731 | 138073355 | 138074461 | |
| 49732 | 138140259 | 138140717 | |
| 49733 | 138144217 | 138146448 | 122779 |
| 49734 | 138162922 | 138163832 | 122779 |
| 49735 | 138197537 | 138198143 | 122779 |
| 49736 | 138247866 | 138251550 | 122779 |
| 49737 | 138412178 | 138412935 | 105929 |
| 49738 | 138437159 | 138437952 | 105929 |
| 49739 | 138575057 | 138576247 | 122778 |
| 49740 | 138645768 | 138646313 | 122778 |
| 49741 | 138665679 | 138666704 | 122778 |
| 49742 | 138760549 | 138761295 | 105939 |
| 49743 | 138792504 | 138795450 | 105939 |
| 49744 | 138802787 | 138803540 | |
| 49745 | 138818110 | 138818642 | 105948 |
| 49746 | 138915177 | 138918004 | 157741 |
| 49747 | 138926759 | 138929062 | 157741 |
| 49748 | 139024470 | 139027415 | 269955, 146963, 164898 |
| 49749 | 139043241 | 139046157 | 273391, 269955, 146963 |
| 49750 | 139156574 | 139157259 | 188883 |
| 49751 | 139325997 | 139326834 | 064393 |
| 49752 | 139333738 | 139334714 | 064393 |
| 49753 | 139343548 | 139344127 | 064393 |
| 49754 | 139344521 | 139345677 | 064393 |
| 49755 | 139356657 | 139361196 | 064393 |
| 49756 | 139364010 | 139368811 | 064393 |
| 49757 | 139375836 | 139376656 | 064393 |
| 49758 | 139423048 | 139424192 | 064393 |
| 49759 | 139424694 | 139427777 | 064393 |
| 49760 | 139429895 | 139439212 | 064393 |
| 49761 | 139439420 | 139442116 | 064393 |
| 49762 | 139443093 | 139445965 | 064393 |
| 49763 | 139452205 | 139454217 | 064393 |
| 49764 | 139457544 | 139458513 | 064393 |
| 49765 | 139471125 | 139472566 | 064393 |
| 49766 | 139472747 | 139479097 | 059377, 064393 |
| 49767 | 139575663 | 139576418 | 059377 |
| 49768 | 139614937 | 139617766 | 059377 |
| 49769 | 139748693 | 139750514 | 059378 |
| 49770 | 139759028 | 139763718 | 059378 |
| 49771 | 139873946 | 139874461 | 006459 |
| 49772 | 139874889 | 139878014 | 260231, 006459 |
| 49773 | 140097498 | 140098643 | 157800 |
| 49774 | 140103492 | 140104188 | 146955, 157800 |
| 49775 | 140177918 | 140179635 | 133606 |
| 49776 | 140266939 | 140267835 | 146966 |
| 49777 | 140327657 | 140328520 | 146966 |
| 49778 | 140372390 | 140373647 | 133597, 146966 |
| 49779 | 140396029 | 140398084 | 240889, 133597, 090266 |
| 49780 | 140612916 | 140613361 | 157764 |
| 49781 | 140622877 | 140625454 | 157764 |
| 49782 | 140675579 | 140676335 | |
| 49783 | 140713976 | 140715198 | 090263 |
| 49784 | 140741772 | 140742935 | |
| 49785 | 140744647 | 140746119 | |
| 49786 | 141062304 | 141062870 | 261115 |
| 49787 | 141069015 | 141069728 | 261115 |
| 49788 | 141162669 | 141163316 | 261115 |
| 49789 | 141250585 | 141251868 | 006530, 261570 |
| 49790 | 141285150 | 141286807 | 006530 |
| 49791 | 141362099 | 141364147 | 270157, 257093 |
| 49792 | 141385323 | 141386068 | 257093 |
| 49793 | 141395380 | 141396396 | 257093 |
| 49794 | 141401155 | 141402575 | 257093 |
| 49795 | 141437027 | 141439184 | 106028, 228775 |
| 49796 | 141675487 | 141676581 | 257335 |
| 49797 | 141729836 | 141730938 | 257335 |
| 49798 | 141787490 | 141788451 | 257335 |
| 49799 | 142190915 | 142191482 | 211739 |
| 49800 | 142551779 | 142552903 | 106123 |
| 49801 | 142606758 | 142607764 | 127412 |
| 49802 | 142936870 | 142938220 | |
| 49803 | 142945671 | 142946748 | 197448 |
| 49804 | 142955799 | 142956595 | 231840, 197448 |
| 49805 | 142956675 | 142957399 | 231840, 197448 |
| 49806 | 142960149 | 142961676 | 231840, 197448 |
| 49807 | 142981546 | 142983031 | 231840, 178826 |
| 49808 | 142984850 | 142986437 | 106144, 178826 |
| 49809 | 143015561 | 143016346 | 188037 |
| 49810 | 143076525 | 143080214 | 232533, 159840 |
| 49811 | 143088363 | 143089230 | 146904 |
| 49812 | 143090228 | 143091199 | 146904 |
| 49813 | 143092218 | 143094589 | 146904 |
| 49814 | 143131649 | 143132238 | 229153 |
| 49815 | 143133161 | 143135176 | 234066, 229153 |
| 49816 | 143184462 | 143185260 | 229153 |
| 49817 | 143188974 | 143189534 | 229153 |
| 49818 | 143209772 | 143210411 | 229153 |
| 49819 | 143578962 | 143580435 | 198420 |
| 49820 | 143596721 | 143599736 | 198420 |
| 49821 | 143603949 | 143604387 | |
| 49822 | 143675875 | 143678888 | 270729, 273377, 243583 |
| 49823 | 144531816 | 144533796 | 196511 |
| 49824 | 147850510 | 147851214 | 174469 |
| 49825 | 148024296 | 148025086 | 174469 |
| 49826 | 148036273 | 148036991 | 174469 |
| 49827 | 148077555 | 148079556 | 174469 |
| 49828 | 148125601 | 148126054 | |
| 49829 | 148139989 | 148140680 | |
| 49830 | 148144296 | 148145629 | |
| 49831 | 148177868 | 148178900 | |
| 49832 | 148224606 | 148225376 | |
| 49833 | 148253694 | 148254717 | |
| 49834 | 148263000 | 148264592 | |
| 49835 | 148312088 | 148313040 | 170279 |
| 49836 | 148317210 | 148319244 | |
| 49837 | 148319695 | 148321488 | |
| 49838 | 148394843 | 148398180 | 055130, 273314 |
| 49839 | 148580118 | 148582745 | 106462 |
| 49840 | 148637084 | 148639626 | 252310 |
| 49841 | 148723664 | 148726288 | 155660 |
| 49842 | 148762035 | 148763389 | |
| 49843 | 148787327 | 148789049 | 197362 |
| 49844 | 148822325 | 148824737 | 240877, 197024, 204947 |
| 49845 | 148843321 | 148846074 | 197024 |
| 49846 | 148857421 | 148859026 | 197024 |
| 49847 | 148892157 | 148894231 | 170265 |
| 49848 | 148936174 | 148937816 | 170260 |
| 49849 | 148958278 | 148960230 | 204946 |
| 49850 | 149119015 | 149121034 | 261842 |
| 49851 | 149156197 | 149158731 | 196453 |
| 49852 | 149193660 | 149195426 | 181220 |
| 49853 | 149320777 | 149322680 | 133624 |
| 49854 | 149411481 | 149412689 | 133619 |
| 49855 | 149416994 | 149417980 | 133619 |
| 49856 | 149468454 | 149469414 | 181444 |
| 49857 | 149535109 | 149536278 | 106479 |
| 49858 | 149569450 | 149571439 | 171130, 204934 |
| 49859 | 149582095 | 149583373 | |
| 49860 | 150013211 | 150013761 | 106526 |
| 49861 | 150017439 | 150018554 | 106526 |
| 49862 | 150018619 | 150022771 | 127399, 106526 |
| 49863 | 150036960 | 150039286 | 261305, 106538 |
| 49864 | 150052260 | 150053159 | |
| 49865 | 150064442 | 150068135 | 214022, 196456, 240449 |
| 49866 | 150074783 | 150077256 | 239377, 196456 |
| 49867 | 150085271 | 150086819 | 196456 |
| 49868 | 150101293 | 150103073 | 196456 |
| 49869 | 150103622 | 150104815 | 196456 |
| 49870 | 150382277 | 150383531 | 106560 |
| 49871 | 150424235 | 150425174 | 196329 |
| 49872 | 150435750 | 150436561 | 196329 |
| 49873 | 150474969 | 150476461 | 241134 |
| 49874 | 150476793 | 150478801 | 241134 |
| 49875 | 150480528 | 150483535 | 241134 |
| 49876 | 150484573 | 150486531 | 241134 |
| 49877 | 150495642 | 150498979 | 002933, 106565 |
| 49878 | 150522967 | 150523886 | 002726 |
| 49879 | 150725052 | 150726511 | 243433, 197150 |
| 49880 | 150755041 | 150757925 | 164885, 164889 |
| 49881 | 150759325 | 150760811 | 164889 |
| 49882 | 150777023 | 150781136 | 164897, 164896 |
| 49883 | 150782668 | 150787072 | 133612 |
| 49884 | 150923384 | 150924973 | 033050 |
| 49885 | 150929061 | 150931204 | 033100 |
| 49886 | 150945166 | 150946586 | 243018, 082014 |
| 49887 | 151038655 | 151039835 | 013374 |
| 49888 | 151042836 | 151043863 | 013374 |
| 49889 | 151046331 | 151047742 | 013374 |
| 49890 | 151101117 | 151101875 | 187260 |
| 49891 | 151112745 | 151113296 | |
| 49892 | 151145196 | 151146203 | |
| 49893 | 151156325 | 151158085 | |
| 49894 | 151188770 | 151189359 | 106615 |
| 49895 | 151191772 | 151192794 | 106615 |
| 49896 | 151201026 | 151201779 | 106615 |
| 49897 | 151214723 | 151218480 | 106615 |
| 49898 | 151249422 | 151250015 | |
| 49899 | 151296857 | 151297454 | 106617 |
| 49900 | 151328026 | 151330455 | 106617 |
| 49901 | 151337123 | 151338498 | 106617 |
| 49902 | 151344726 | 151345684 | 106617 |
| 49903 | 151347274 | 151349582 | 106617 |
| 49904 | 151383940 | 151385992 | 106617 |
| 49905 | 151391502 | 151394351 | 106617 |
| 49906 | 151402709 | 151403432 | 106617 |
| 49907 | 151407403 | 151410011 | 106617 |
| 49908 | 151414324 | 151415318 | 106617 |
| 49909 | 151433391 | 151434048 | 106617 |
| 49910 | 151439579 | 151447152 | 106617 |
| 49911 | 151451042 | 151454069 | 106617 |
| 49912 | 151486451 | 151487156 | 106617 |
| 49913 | 151489669 | 151500288 | 106617 |
| 49914 | 151502665 | 151504779 | 242048, 106617 |
| 49915 | 151505023 | 151506295 | 242048, 106617 |
| 49916 | 151515199 | 151517550 | 106617 |
| 49917 | 151517727 | 151521720 | 106617 |
| 49918 | 151540417 | 151543337 | 106617 |
| 49919 | 151547950 | 151549383 | 106617 |
| 49920 | 151551446 | 151551939 | 106617 |
| 49921 | 151564682 | 151568965 | 106617 |
| 49922 | 151571910 | 151575749 | 239911, 106617 |
| 49923 | 151594124 | 151595078 | |
| 49924 | 151614302 | 151616304 | |
| 49925 | 151620083 | 151624103 | |
| 49926 | 151722021 | 151723767 | 178234 |
| 49927 | 151751893 | 151752407 | 178234 |
| 49928 | 152038200 | 152038967 | 055609 |
| 49929 | 152133268 | 152133665 | |
| 49930 | 152133758 | 152134195 | 241735 |
| 49931 | 152160041 | 152162317 | 261455 |
| 49932 | 152219642 | 152220130 | |
| 49933 | 152373173 | 152373916 | 196584 |
| 49934 | 152456317 | 152459389 | 133627 |
| 49935 | 152596392 | 152597490 | |
| 49936 | 154636548 | 154637232 | 236408, 130226 |
| 49937 | 154705182 | 154705911 | |
| 49938 | 154719202 | 154721203 | 214106 |
| 49939 | 154751482 | 154752488 | 157212 |
| 49940 | 154793534 | 154796656 | 273344, 157212 |
| 49941 | 154861607 | 154862107 | 157219, 220575 |
| 49942 | 155011569 | 155012107 | |
| 49943 | 155013566 | 155014125 | |
| 49944 | 155025228 | 155028700 | |
| 49945 | 155043138 | 155046621 | |
| 49946 | 155048665 | 155050371 | |
| 49947 | 155061298 | 155062468 | |
| 49948 | 155067604 | 155069711 | |
| 49949 | 155082035 | 155083992 | |
| 49950 | 155087395 | 155091681 | 273117, 186480 |
| 49951 | 155094667 | 155095386 | 186480 |
| 49952 | 155098368 | 155099807 | 186480 |
| 49953 | 155136990 | 155138268 | |
| 49954 | 155288716 | 155289309 | 146910 |
| 49955 | 155339435 | 155340741 | |
| 49956 | 155387538 | 155388261 | |
| 49957 | 155389750 | 155391054 | |
| 49958 | 155410897 | 155413394 | 216895 |
| 49959 | 155436085 | 155438295 | 184863, 216895 |
| 49960 | 155444297 | 155447173 | 184863 |
| 49961 | 155474487 | 155475881 | 184863 |
| 49962 | 155508035 | 155508653 | 184863 |
| 49963 | 155599745 | 155603194 | 164690 |
| 49964 | 155604284 | 155604643 | 164690 |
| 49965 | 155651319 | 155652250 | |
| 49966 | 155653045 | 155655254 | |
| 49967 | 155709409 | 155712962 | |
| 49968 | 155742860 | 155746002 | |
| 49969 | 155902644 | 155903067 | |
| 49970 | 155939588 | 155940496 | |
| 49971 | 156160568 | 156161513 | |
| 49972 | 156172187 | 156173801 | |
| 49973 | 156249263 | 156249851 | |
| 49974 | 156265893 | 156267282 | 182648 |
| 49975 | 156268392 | 156268948 | 182648 |
| 49976 | 156307753 | 156310332 | 182648 |
| 49977 | 156319484 | 156321025 | 182648 |
| 49978 | 156337561 | 156338201 | 182648 |
| 49979 | 156401488 | 156402209 | 182648 |
| 49980 | 156407172 | 156409928 | 182648 |
| 49981 | 156432425 | 156434452 | 105982, 182648, 244291 |
| 49982 | 156517672 | 156518279 | 105983 |
| 49983 | 156582693 | 156583425 | 105983 |
| 49984 | 156684635 | 156686984 | 105983 |
| 49985 | 156741957 | 156743621 | 146909 |
| 49986 | 156930940 | 156933075 | 009335 |
| 49987 | 157046533 | 157046945 | 009335 |
| 49988 | 157063863 | 157066657 | |
| 49989 | 157128629 | 157131037 | 105993 |
| 49990 | 157646923 | 157647403 | 233038, 155093 |
| 49991 | 158056129 | 158057348 | 155093 |
| 49992 | 158441497 | 158442523 | 146918 |
| 49993 | 158497078 | 158498460 | 146918 |
| 49994 | 158594647 | 158596142 | 117868 |
| 49995 | 158609900 | 158612651 | 117868 |
| 49996 | 158620713 | 158623525 | 117868 |
| 49997 | 158648895 | 158649774 | 126870 |
| 49998 | 158656003 | 158657401 | 126870 |

[0576] The locations of ODSCs on Chromosome 8 are shown in Table 50.

TABLE 50
ODSC Locations on Chromosome 8

| SEQ ID NO. | Start | End | Overlapping Gene(s) |
|---|---|---|---|
| 49999 | 438143 | 439346 | |
| 50000 | 440302 | 440785 | 180190 |
| 50001 | 493920 | 496229 | 180190 |
| 50002 | 680314 | 682098 | 104714 |
| 50003 | 1649097 | 1649926 | 198010 |
| 50004 | 1710756 | 1711662 | 253982, 182372 |
| 50005 | 1711748 | 1713471 | 253982, 182372 |
| 50006 | 1842978 | 1843536 | 104728 |
| 50007 | 1894890 | 1895931 | 104728 |
| 50008 | 1907611 | 1909034 | |
| 50009 | 1921211 | 1922997 | 176595, 270988, 253764, |
| | | | 253696 |
| 50010 | 1948980 | 1950324 | 176595 |
| 50011 | 3844944 | 3845731 | 183117 |
| 50012 | 3958218 | 3959577 | 183117 |
| 50013 | 3961140 | 3961933 | 183117 |
| 50014 | 4188716 | 4189746 | 183117 |
| 50015 | 4195700 | 4196519 | 183117 |
| 50016 | 4680206 | 4680774 | 183117 |
| 50017 | 4783679 | 4784667 | 183117 |
| 50018 | 6263133 | 6265190 | 147316, 246089 |
| 50019 | 6373722 | 6374441 | 147316, 091879 |
| 50020 | 6565450 | 6567203 | 155189, 249898 |
| 50021 | 6698084 | 6699240 | 245857 |
| 50022 | 6734556 | 6736547 | 164825, 245857 |
| 50023 | 6757809 | 6759232 | |
| 50024 | 6766578 | 6768179 | |
| 50025 | 8100670 | 8101213 | 253981, 173295 |
| 50026 | 8126010 | 8128427 | |
| 50027 | 8145784 | 8147286 | |
| 50028 | 8153057 | 8154162 | |
| 50029 | 8168099 | 8168710 | |
| 50030 | 8242680 | 8244972 | 182319 |
| 50031 | 8284813 | 8287277 | |
| 50032 | 8313195 | 8314189 | |
| 50033 | 8324239 | 8325581 | |
| 50034 | 8388078 | 8388859 | |
| 50035 | 8456880 | 8459318 | |
| 50036 | 8537633 | 8538288 | |
| 50037 | 8558611 | 8560312 | 176305, 253958 |
| 50038 | 8608060 | 8609041 | 254367 |
| 50039 | 8621186 | 8622052 | 254367 |
| 50040 | 8629674 | 8631070 | 254367 |
| 50041 | 8632633 | 8633168 | 254367 |
| 50042 | 8662948 | 8664713 | 147324 |
| 50043 | 8700856 | 8702737 | 147324 |
| 50044 | 8729491 | 8730144 | 147324 |
| 50045 | 8745491 | 8747033 | 147324 |
| 50046 | 8749409 | 8752101 | 147324 |
| 50047 | 8774864 | 8775727 | |
| 50048 | 8852120 | 8852973 | |
| 50049 | 8855990 | 8856459 | |
| 50050 | 8859495 | 8861275 | 104626 |
| 50051 | 8864041 | 8864622 | 104626 |
| 50052 | 8869256 | 8870696 | 104626 |
| 50053 | 8880622 | 8881309 | 104626 |
| 50054 | 8931780 | 8933530 | 104626 |
| 50055 | 8953152 | 8954227 | 104626 |
| 50056 | 8991473 | 8994493 | 173281 |
| 50057 | 9004959 | 9006782 | 173281 |
| 50058 | 9006819 | 9010941 | 253426, 173281 |
| 50059 | 9045364 | 9045985 | |
| 50060 | 9104886 | 9106855 | |
| 50061 | 9169508 | 9170295 | 254235 |
| 50062 | 9174382 | 9178903 | 254235 |
| 50063 | 9181040 | 9185480 | 254235 |
| 50064 | 9195211 | 9196281 | 254235 |
| 50065 | 9204048 | 9205641 | 254235 |
| 50066 | 9211456 | 9212647 | 254235, 253735 |
| 50067 | 9304691 | 9309367 | |
| 50068 | 9369613 | 9371001 | |
| 50069 | 9413132 | 9414400 | 173273, 272267 |
| 50070 | 9638745 | 9640538 | 173273 |
| 50071 | 9903545 | 9904622 | |
| 50072 | 9911346 | 9913370 | 175806, 260093 |
| 50073 | 9944555 | 9945586 | 221320, 175806 |
| 50074 | 9995898 | 9997088 | 175806 |
| 50075 | 10008793 | 10011336 | 175806 |
| 50076 | 10122545 | 10123395 | 175806 |
| 50077 | 10167934 | 10168771 | 175806 |
| 50078 | 10191938 | 10192822 | 175806 |
| 50079 | 10253022 | 10253405 | 175806 |
| 50080 | 10275235 | 10275715 | 175806 |
| 50081 | 10427434 | 10428283 | |
| 50082 | 10437066 | 10437951 | |
| 50083 | 10487848 | 10488584 | 183638 |
| 50084 | 10510454 | 10510914 | 183638 |
| 50085 | 10538243 | 10538945 | 183638, 171060 |
| 50086 | 10548329 | 10549359 | 183638, 171060 |
| 50087 | 10617263 | 10618893 | 258724, 248896, 171056 |
| 50088 | 10656086 | 10659393 | 258724, 254093, 171056 |
| 50089 | 10673311 | 10674551 | 258724, 254093, 171056 |
| 50090 | 10696195 | 10697759 | 258724, 254093, 171056 |
| 50091 | 11141168 | 11143108 | 104643 |
| 50092 | 11314391 | 11316393 | 154319 |
| 50093 | 11323617 | 11324676 | 154319 |
| 50094 | 11331480 | 11332965 | 154319 |
| 50095 | 11471858 | 11472805 | |
| 50096 | 11485901 | 11487121 | |
| 50097 | 11488941 | 11489478 | |
| 50098 | 11499397 | 11500077 | |
| 50099 | 11520116 | 11520573 | |
| 50100 | 11528673 | 11529261 | |
| 50101 | 11560081 | 11563241 | 136574 |
| 50102 | 11568474 | 11568964 | 136574 |
| 50103 | 11574646 | 11577198 | 136574 |
| 50104 | 11587709 | 11588692 | 136574 |
| 50105 | 11599722 | 11600578 | 136574 |
| 50106 | 11626903 | 11628013 | 154328 |
| 50107 | 11657448 | 11662117 | 255046, 079459 |
| 50108 | 11664842 | 11666851 | 079459 |
| 50109 | 11670884 | 11672099 | 079459 |
| 50110 | 11709991 | 11711915 | 164733 |
| 50111 | 11719901 | 11726520 | 164733 |
| 50112 | 11753956 | 11756439 | 255144 |
| 50113 | 12583079 | 12584941 | 266206, 154359 |
| 50114 | 12610863 | 12614092 | 154359 |
| 50115 | 12808501 | 12809651 | 250305 |
| 50116 | 12850887 | 12851290 | 250305 |
| 50117 | 12885477 | 12886178 | 250305 |
| 50118 | 12988758 | 12989731 | 164741 |
| 50119 | 12989807 | 12991831 | 164741 |
| 50120 | 13015356 | 13017652 | 164741 |
| 50121 | 13050229 | 13052702 | 164741 |
| 50122 | 13067535 | 13068242 | 164741 |
| 50123 | 13078087 | 13079057 | 164741 |
| 50124 | 13088623 | 13089005 | 164741 |
| 50125 | 13097042 | 13097556 | 164741 |
| 50126 | 13103788 | 13106128 | 164741 |
| 50127 | 13123155 | 13123804 | 164741 |
| 50128 | 13127818 | 13129743 | 164741 |
| 50129 | 13132177 | 13134989 | 164741 |
| 50130 | 13187208 | 13188493 | 164741 |
| 50131 | 13210203 | 13212247 | 253257, 164741 |
| 50132 | 13214728 | 13215422 | 164741 |
| 50133 | 13223697 | 13225223 | 164741 |
| 50134 | 13229691 | 13231158 | 164741 |
| 50135 | 13315626 | 13316602 | 164741 |
| 50136 | 15513242 | 15514505 | 104723 |
| 50137 | 16683446 | 16684009 | 253496 |
| 50138 | 16688951 | 16690151 | 253496 |
| 50139 | 16883634 | 16885988 | 155970 |
| 50140 | 16889427 | 16890844 | 155970 |
| 50141 | 16906694 | 16907417 | 155970 |
| 50142 | 16908706 | 16909580 | 155970 |
| 50143 | 17012901 | 17014996 | 104219 |
| 50144 | 17058114 | 17058703 | 104219 |
| 50145 | 17082393 | 17085455 | 271948 |
| 50146 | 17103737 | 17105511 | 155975, 198791 |
| 50147 | 17178618 | 17179652 | 003987 |
| 50148 | 17185494 | 17187326 | 003987 |
| 50149 | 17191603 | 17196284 | 003987 |
| 50150 | 17198432 | 17199148 | 003987 |
| 50151 | 17204690 | 17209709 | 003987 |
| 50152 | 17323038 | 17325616 | |
| 50153 | 17347132 | 17347777 | |
| 50154 | 17350996 | 17357361 | 003989 |
| 50155 | 17364038 | 17364487 | 003989 |
| 50156 | 17382261 | 17384368 | 003989 |
| 50157 | 17433958 | 17435379 | 104213 |
| 50158 | 17465631 | 17466163 | 104213 |
| 50159 | 17471714 | 17472841 | 104213 |
| 50160 | 17517987 | 17520105 | 129422 |
| 50161 | 17520190 | 17520949 | 129422 |
| 50162 | 17523173 | 17523767 | 129422 |
| 50163 | 17532237 | 17532837 | 129422 |
| 50164 | 17533314 | 17534439 | 129422 |
| 50165 | 17623417 | 17625919 | 129422 |
| 50166 | 17644106 | 17645172 | 129422 |
| 50167 | 17645801 | 17647381 | 129422 |
| 50168 | 17652072 | 17653015 | 129422 |
| 50169 | 17657476 | 17663904 | 253944, 129422 |
| 50170 | 17676577 | 17679263 | 253671, 253944 |
| 50171 | 17706843 | 17708938 | 253944 |
| 50172 | 17752564 | 17754680 | 104760 |
| 50173 | 17779247 | 17782077 | 078674 |
| 50174 | 17833903 | 17834373 | 078674 |
| 50175 | 17940553 | 17943181 | 245281, 104763 |
| 50176 | 18027415 | 18029871 | 171428 |
| 50177 | 18041879 | 18043392 | 171428 |
| 50178 | 18237978 | 18238803 | |
| 50179 | 18244318 | 18245555 | 271654 |
| 50180 | 18248449 | 18249383 | 156006 |
| 50181 | 18500390 | 18501354 | 156011 |
| 50182 | 18518040 | 18519074 | 156011 |
| 50183 | 18523189 | 18524581 | 156011 |
| 50184 | 18574824 | 18579146 | 187229, 156011 |
| 50185 | 18611102 | 18611598 | 156011 |
| 50186 | 18662065 | 18662502 | 156011 |
| 50187 | 18703864 | 18704990 | 156011 |
| 50188 | 18745500 | 18746439 | 156011 |
| 50189 | 18811662 | 18813239 | 156011 |
| 50190 | 18813323 | 18816261 | 156011 |
| 50191 | 18824941 | 18825657 | 156011 |
| 50192 | 18828539 | 18829023 | 156011 |
| 50193 | 18834787 | 18837355 | 201157, 156011 |
| 50194 | 18865460 | 18866175 | 156011 |
| 50195 | 18867249 | 18869101 | 156011 |
| 50196 | 18869281 | 18872547 | 156011 |
| 50197 | 18924783 | 18925677 | 156011 |
| 50198 | 18950683 | 18952164 | 253557, 254242 |
| 50199 | 18984128 | 18986521 | 253557 |
| 50200 | 19041461 | 19042107 | 253557 |
| 50201 | 19124752 | 19125791 | |
| 50202 | 19128617 | 19129722 | |
| 50203 | 19131092 | 19131806 | |
| 50204 | 19135591 | 19136931 | |
| 50205 | 19148802 | 19149693 | |
| 50206 | 19169902 | 19172285 | 104611 |
| 50207 | 19175798 | 19177159 | 104611 |
| 50208 | 19177879 | 19178706 | 104611 |
| 50209 | 19226193 | 19227290 | 104611 |
| 50210 | 19246468 | 19247434 | 104611 |
| 50211 | 19247745 | 19248646 | 104611 |
| 50212 | 19518393 | 19519242 | 147408 |
| 50213 | 19520917 | 19521695 | 147408 |
| 50214 | 19522299 | 19523493 | 147408 |
| 50215 | 19535236 | 19536751 | 253270, 147408 |
| 50216 | 19674185 | 19676021 | 104613 |
| 50217 | 20054472 | 20056296 | 147416 |
| 50218 | 20058267 | 20058687 | 147416 |
| 50219 | 20079767 | 20080414 | 147416 |
| 50220 | 20125599 | 20126864 | 061337 |
| 50221 | 21349384 | 21350454 | |
| 50222 | 21423880 | 21424430 | |
| 50223 | 21541427 | 21543059 | |
| 50224 | 21776105 | 21778243 | 130227 |
| 50225 | 21867071 | 21868682 | |
| 50226 | 21905698 | 21907463 | 158856, 158815 |
| 50227 | 21910965 | 21912042 | 158856 |
| 50228 | 21916334 | 21917089 | 158856 |
| 50229 | 21917898 | 21918406 | 158856 |
| 50230 | 21923620 | 21924867 | 158856 |
| 50231 | 21946104 | 21948224 | 158863 |
| 50232 | 21965898 | 21968229 | 173566 |
| 50233 | 21998256 | 21999694 | 168476 |
| 50234 | 22000905 | 22001651 | |
| 50235 | 22021851 | 22023708 | 168487, 168484 |
| 50236 | 22027193 | 22028222 | 177725, 168487 |
| 50237 | 22036030 | 22037039 | 168487 |
| 50238 | 22042101 | 22042676 | 168487 |
| 50239 | 22051584 | 22052357 | 168487 |
| 50240 | 22062993 | 22063956 | 168487 |
| 50241 | 22077495 | 22078219 | 168490 |
| 50242 | 22085118 | 22085722 | 168490 |
| 50243 | 22100930 | 22103675 | 208037, 168495 |
| 50244 | 22131558 | 22132092 | 254064 |
| 50245 | 22144622 | 22146160 | 197181 |
| 50246 | 22213555 | 22217607 | 197181 |
| 50247 | 22221534 | 22226198 | 104635 |
| 50248 | 22227001 | 22228957 | 104635 |
| 50249 | 22240306 | 22242393 | 104635 |
| 50250 | 22242415 | 22243370 | 104635 |
| 50251 | 22244470 | 22247811 | 241026, 104635 |
| 50252 | 22248313 | 22251362 | 104635 |
| 50253 | 22268170 | 22270262 | 104635 |
| 50254 | 22297448 | 22300807 | 120910 |
| 50255 | 22373781 | 22374432 | 120910 |
| 50256 | 22413798 | 22414646 | 120896 |
| 50257 | 22417222 | 22418784 | 120896 |
| 50258 | 22421982 | 22424126 | 254230, 120896 |
| 50259 | 22436347 | 22441056 | 120913 |
| 50260 | 22443862 | 22444894 | 120913 |
| 50261 | 22445876 | 22447538 | 248235, 120913 |
| 50262 | 22452444 | 22453223 | 248235, 120913 |
| 50263 | 22453792 | 22456784 | 120913, 248235 |
| 50264 | 22461442 | 22463554 | 158941, 241852 |
| 50265 | 22493965 | 22494807 | 147439 |
| 50266 | 22525682 | 22527402 | 147439 |
| 50267 | 22542985 | 22543814 | |
| 50268 | 22772263 | 22774452 | 134020 |
| 50269 | 22851210 | 22853470 | 008853, 134020, 245025 |
| 50270 | 22856611 | 22857917 | 134020, 008853, 245025 |
| 50271 | 22871345 | 22872627 | 008853, 245025 |
| 50272 | 22921207 | 22923541 | 120889 |
| 50273 | 22924622 | 22927509 | 246130, 120889 |
| 50274 | 22931190 | 22933002 | 253616, 246130 |
| 50275 | 23019043 | 23019732 | 173530 |
| 50276 | 23019910 | 23021769 | 173530 |
| 50277 | 23038761 | 23040636 | |
| 50278 | 23075186 | 23076116 | 104689 |
| 50279 | 23081657 | 23083238 | 250714, 246582, 104689 |
| 50280 | 23103384 | 23104705 | 147457 |
| 50281 | 23145198 | 23146494 | 104679 |
| 50282 | 23211403 | 23211967 | 134013, 253837 |
| 50283 | 23314578 | 23315543 | 197217 |
| 50284 | 23364084 | 23364822 | |
| 50285 | 23385945 | 23387848 | 147454 |
| 50286 | 23395823 | 23397035 | 147454 |
| 50287 | 23405118 | 23405714 | 147454 |
| 50288 | 23407861 | 23409355 | 147454 |
| 50289 | 23410959 | 23412560 | 268085, 147454 |
| 50290 | 23417791 | 23419970 | 268085, 147454 |
| 50291 | 23450861 | 23451807 | |
| 50292 | 23539134 | 23540789 | 167034 |
| 50293 | 23618322 | 23620623 | 253471 |
| 50294 | 23896577 | 23897251 | |
| 50295 | 24206389 | 24207234 | 253535, 042980 |
| 50296 | 24228650 | 24229211 | 253535 |
| 50297 | 24244990 | 24245760 | 253535, 134028 |
| 50298 | 24387010 | 24388601 | 253535 |
| 50299 | 24424969 | 24426105 | 253535 |
| 50300 | 24430381 | 24431270 | 253535 |
| 50301 | 24432312 | 24435005 | 253535 |
| 50302 | 24579351 | 24580783 | 253535 |
| 50303 | 24856473 | 24858571 | 253832 |
| 50304 | 25041062 | 25046664 | 147459 |
| 50305 | 25052349 | 25053699 | 147459 |
| 50306 | 25055895 | 25057573 | 147459 |
| 50307 | 25071817 | 25073412 | 147459 |
| 50308 | 25087519 | 25088082 | 147459 |
| 50309 | 25165473 | 25166935 | 147459 |
| 50310 | 25175894 | 25178622 | 147459 |
| 50311 | 25186114 | 25186847 | 147459 |
| 50312 | 25275242 | 25276274 | 147459 |
| 50313 | 25314491 | 25317015 | 184661, 104756 |
| 50314 | 25991048 | 25992219 | |
| 50315 | 26007396 | 26010095 | |
| 50316 | 26013780 | 26015574 | |
| 50317 | 26148466 | 26151070 | 221914 |
| 50318 | 26152358 | 26153172 | 221914 |
| 50319 | 26153486 | 26154066 | 221914 |
| 50320 | 26186893 | 26187722 | 221914 |
| 50321 | 26239666 | 26242067 | 104765, 228451 |
| 50322 | 26305828 | 26308220 | 104765 |
| 50323 | 26308622 | 26309151 | 104765 |
| 50324 | 26315271 | 26315826 | 104765 |
| 50325 | 26339170 | 26340074 | 104765 |
| 50326 | 26428506 | 26430983 | 092964 |
| 50327 | 26433741 | 26436414 | 092964 |
| 50328 | 26438166 | 26438779 | 092964 |
| 50329 | 26438947 | 26439694 | 092964 |
| 50330 | 26472151 | 26472807 | 092964 |
| 50331 | 26473067 | 26474241 | 092964 |
| 50332 | 26493306 | 26493744 | 092964 |
| 50333 | 26505703 | 26506846 | 092964 |
| 50334 | 26557049 | 26559746 | |
| 50335 | 26563551 | 26564230 | |
| 50336 | 26611777 | 26612606 | 120907 |
| 50337 | 26621547 | 26622222 | 120907 |
| 50338 | 26696767 | 26699422 | 120907 |
| 50339 | 26699609 | 26701476 | 120907 |
| 50340 | 26718368 | 26718957 | 120907 |
| 50341 | 26721364 | 26725066 | 120907 |
| 50342 | 26935762 | 26937321 | |
| 50343 | 26941962 | 26943320 | |
| 50344 | 26946096 | 26948333 | |
| 50345 | 26948360 | 26949226 | |
| 50346 | 27029574 | 27030205 | |
| 50347 | 27107048 | 27108416 | 015592 |
| 50348 | 27131370 | 27132961 | |
| 50349 | 27137427 | 27140958 | |
| 50350 | 27155928 | 27158408 | 104228 |
| 50351 | 27165501 | 27170283 | 120899, 104228 |
| 50352 | 27180038 | 27182297 | 120899 |
| 50353 | 27190269 | 27193788 | 120899 |
| 50354 | 27197907 | 27198522 | 120899 |
| 50355 | 27218633 | 27221635 | 120899 |
| 50356 | 27297834 | 27298512 | 120899 |
| 50357 | 27316564 | 27317297 | 120903, 120899 |
| 50358 | 27345527 | 27346881 | |
| 50359 | 27347145 | 27349793 | 120915 |
| 50360 | 27440599 | 27443193 | 234770 |
| 50361 | 27452006 | 27454101 | |
| 50362 | 27454541 | 27455128 | 120885 |
| 50363 | 27460372 | 27461389 | 120885 |
| 50364 | 27467701 | 27475343 | 120885 |
| 50365 | 27477789 | 27478477 | |
| 50366 | 27490946 | 27491758 | 168077 |
| 50367 | 27559230 | 27561364 | 265075 |
| 50368 | 27607634 | 27608551 | 147419, 253875 |
| 50369 | 27629052 | 27631009 | 171320, 147419 |
| 50370 | 27631351 | 27632251 | 171320 |
| 50371 | 27695197 | 27695758 | 168078 |
| 50372 | 27729956 | 27730536 | 168079 |
| 50373 | 27859217 | 27859751 | |
| 50374 | 27927134 | 27927984 | 189233 |
| 50375 | 27929107 | 27930734 | 189233 |
| 50376 | 27934469 | 27936068 | 189233 |
| 50377 | 27949877 | 27951479 | 134014 |
| 50378 | 28112148 | 28113154 | 253690 |
| 50379 | 28198451 | 28199425 | 168081 |
| 50380 | 28222155 | 28225666 | 186918, 214050 |
| 50381 | 28226555 | 28227855 | 186918, 214050 |
| 50382 | 28230726 | 28231743 | 186918, 214050 |
| 50383 | 28235928 | 28237764 | 186918, 214050 |
| 50384 | 28238962 | 28240532 | 186918, 214050 |
| 50385 | 28241747 | 28244991 | 186918, 214050 |
| 50386 | 28259188 | 28260509 | 186918, 214050 |
| 50387 | 28268559 | 28270376 | 214050 |
| 50388 | 28347455 | 28348630 | 214050 |
| 50389 | 28351086 | 28352476 | 104290 |
| 50390 | 28479163 | 28480914 | 012232 |
| 50391 | 28482408 | 28482970 | 012232 |
| 50392 | 28514884 | 28516090 | 012232 |
| 50393 | 28526659 | 28528508 | 012232 |
| 50394 | 28558177 | 28561386 | 246339, 012232 |
| 50395 | 28584794 | 28585653 | 012232 |
| 50396 | 28657483 | 28658205 | 104299 |
| 50397 | 28746504 | 28749397 | 147421, 104299 |
| 50398 | 28843287 | 28843699 | 147421 |
| 50399 | 28845356 | 28846145 | 147421 |
| 50400 | 28860479 | 28860983 | 147421 |
| 50401 | 28874675 | 28875630 | 147421 |
| 50402 | 28974061 | 28974995 | 197892, 254129 |
| 50403 | 28982321 | 28984921 | 197892, 254129 |
| 50404 | 29027322 | 29028547 | 197892 |
| 50405 | 29082608 | 29083672 | 197892 |
| 50406 | 29087499 | 29088443 | 197892 |
| 50407 | 29119289 | 29121131 | 197892 |
| 50408 | 29140372 | 29141074 | |
| 50409 | 29208166 | 29209259 | 120875 |
| 50410 | 29316597 | 29317495 | |
| 50411 | 29355575 | 29356197 | |
| 50412 | 29594785 | 29596429 | 251191 |
| 50413 | 29614216 | 29614785 | 253490 |
| 50414 | 29624574 | 29625644 | 253490 |
| 50415 | 29626425 | 29629815 | 253490 |
| 50416 | 29630261 | 29632039 | 253490 |
| 50417 | 29832303 | 29833823 | |
| 50418 | 29876982 | 29878148 | |
| 50419 | 29909973 | 29910443 | |
| 50420 | 29939562 | 29941053 | 272256, 133872 |
| 50421 | 29946743 | 29947094 | |
| 50422 | 29952088 | 29954036 | 104660 |
| 50423 | 29957092 | 29957817 | 104660 |
| 50424 | 29970439 | 29971056 | 104660 |
| 50425 | 29994275 | 29995256 | 177669, 104660 |
| 50426 | 30012679 | 30015516 | 271869, 104671, 104660 |
| 50427 | 30085002 | 30085948 | |
| 50428 | 30086856 | 30087420 | |
| 50429 | 30109775 | 30111106 | |
| 50430 | 30111358 | 30113493 | |
| 50431 | 30113537 | 30115617 | |
| 50432 | 30140274 | 30140882 | |
| 50433 | 30169130 | 30169997 | |
| 50434 | 30171892 | 30172486 | |
| 50435 | 30172810 | 30173639 | |
| 50436 | 30239559 | 30244905 | 157110, 254109 |
| 50437 | 30248523 | 30249214 | 157110 |
| 50438 | 30271459 | 30272717 | 157110 |
| 50439 | 30314256 | 30315111 | 157110 |
| 50440 | 30357862 | 30362339 | 157110 |
| 50441 | 30366728 | 30367188 | 157110 |
| 50442 | 30385761 | 30386326 | 157110 |
| 50443 | 30388834 | 30390028 | 157110 |
| 50444 | 30404683 | 30405279 | 157110 |
| 50445 | 30407924 | 30409151 | 157110 |
| 50446 | 30428747 | 30429601 | 157110 |
| 50447 | 30440008 | 30440550 | 197265 |
| 50448 | 30458119 | 30458854 | 197265 |
| 50449 | 30473839 | 30474643 | 197265 |
| 50450 | 30514455 | 30516257 | 197265 |
| 50451 | 30568265 | 30568932 | 104687 |
| 50452 | 30583248 | 30586159 | 104687 |
| 50453 | 30600725 | 30602881 | 104691 |
| 50454 | 30659924 | 30663263 | 104695 |
| 50455 | 30664186 | 30665922 | 104695 |
| 50456 | 30668714 | 30670736 | 104695 |
| 50457 | 30747840 | 30748837 | 133863 |
| 50458 | 30890912 | 30892161 | 165392, 172733 |
| 50459 | 30932993 | 30933874 | 165392 |
| 50460 | 31976801 | 31977754 | 157168, 253974 |
| 50461 | 32176347 | 32176753 | 157168 |
| 50462 | 32191618 | 32192262 | 157168 |
| 50463 | 32284164 | 32284765 | 157168 |
| 50464 | 32290118 | 32290874 | 157168 |
| 50465 | 32403727 | 32407391 | 157168 |
| 50466 | 32409730 | 32410561 | 157168 |
| 50467 | 32410979 | 32412795 | 157168 |
| 50468 | 32572661 | 32573072 | 157168 |
| 50469 | 32582377 | 32583012 | 157168 |
| 50470 | 32610496 | 32611371 | 157168 |
| 50471 | 32732399 | 32733725 | |
| 50472 | 32741496 | 32744069 | |
| 50473 | 32830238 | 32830985 | |
| 50474 | 32863034 | 32864067 | 247134 |
| 50475 | 32891929 | 32893758 | 247134 |
| 50476 | 32947229 | 32950845 | |
| 50477 | 32955214 | 32957765 | |
| 50478 | 32961109 | 32964700 | |
| 50479 | 32970301 | 32971291 | |
| 50480 | 33099926 | 33102675 | |
| 50481 | 33171365 | 33173485 | |
| 50482 | 33193166 | 33194282 | |
| 50483 | 33209747 | 33212203 | |
| 50484 | 33265766 | 33266274 | 172728 |
| 50485 | 33328954 | 33331451 | 129696, 172728 |
| 50486 | 33341573 | 33343737 | 198042, 129696 |
| 50487 | 33369396 | 33372492 | 239039, 129696 |
| 50488 | 33423615 | 33424866 | 133874 |
| 50489 | 34783054 | 34783664 | |
| 50490 | 34870499 | 34872598 | |
| 50491 | 34879377 | 34881890 | |
| 50492 | 34899894 | 34901881 | |
| 50493 | 34963839 | 34964971 | |
| 50494 | 35344271 | 35345673 | 156687 |
| 50495 | 37002153 | 37002687 | |
| 50496 | 37311908 | 37312558 | 253161 |
| 50497 | 37373380 | 37374411 | 253414, 253161 |
| 50498 | 37451685 | 37452322 | |
| 50499 | 37548705 | 37549303 | |
| 50500 | 37552103 | 37554324 | 183779 |
| 50501 | 37593568 | 37595591 | 147475, 183154 |
| 50502 | 37619317 | 37621084 | 147471 |
| 50503 | 37638032 | 37640331 | |
| 50504 | 37706527 | 37707942 | 104221 |
| 50505 | 37756200 | 37757442 | 156675 |
| 50506 | 37760625 | 37762666 | |
| 50507 | 37773333 | 37774109 | |
| 50508 | 37853592 | 37854590 | |
| 50509 | 37887093 | 37890773 | 187840 |
| 50510 | 37894477 | 37894904 | 187840 |
| 50511 | 37901074 | 37901913 | 187840 |
| 50512 | 37914446 | 37916902 | 187840 |
| 50513 | 37924505 | 37925691 | |
| 50514 | 37961859 | 37963846 | 129691 |
| 50515 | 38033064 | 38035698 | 156735, 175324 |
| 50516 | 38035727 | 38037180 | 156735 |
| 50517 | 38088267 | 38090454 | 085788 |
| 50518 | 38125216 | 38127055 | 147535, 085788 |
| 50519 | 38135650 | 38136170 | 147548 |
| 50520 | 38171880 | 38172428 | 147548 |
| 50521 | 38238917 | 38241219 | 272092, 147548 |
| 50522 | 38243462 | 38244890 | 165046 |
| 50523 | 38259012 | 38259985 | 254981, 165046 |
| 50524 | 38264073 | 38265526 | 165046 |
| 50525 | 38266185 | 38267320 | 165046, 272159 |
| 50526 | 38383873 | 38387230 | 196166 |
| 50527 | 38578442 | 38579362 | |
| 50528 | 38585415 | 38586674 | 147526 |
| 50529 | 38591663 | 38593819 | 147526 |
| 50530 | 38598722 | 38600350 | 147526 |
| 50531 | 38613985 | 38615452 | 147526 |
| 50532 | 38624239 | 38624808 | 147526 |
| 50533 | 38644094 | 38645575 | 147526 |
| 50534 | 38650536 | 38651840 | 147526 |
| 50535 | 38749327 | 38750036 | |
| 50536 | 38757989 | 38759742 | 169499 |
| 50537 | 38781891 | 38784086 | 169499 |
| 50538 | 38792810 | 38796382 | 169499 |
| 50539 | 38853149 | 38857649 | 168615, 169490 |
| 50540 | 38894830 | 38897042 | 168615 |
| 50541 | 38899363 | 38900074 | 168615 |
| 50542 | 39809178 | 39810031 | 188676, 253939 |
| 50543 | 39899094 | 39899817 | |
| 50544 | 39911659 | 39913657 | |
| 50545 | 39916763 | 39918131 | |
| 50546 | 39976305 | 39977462 | 253665 |
| 50547 | 39977583 | 39978361 | 253665 |
| 50548 | 40009767 | 40014985 | 176907 |
| 50549 | 40015813 | 40017398 | |
| 50550 | 40019797 | 40020354 | 254143 |
| 50551 | 40028866 | 40033861 | 254143 |
| 50552 | 40230506 | 40231485 | 253354 |
| 50553 | 40304727 | 40305612 | |
| 50554 | 41347111 | 41349054 | 147533 |
| 50555 | 41365410 | 41366432 | 147533 |
| 50556 | 41386085 | 41387445 | 147536 |
| 50557 | 41419278 | 41420786 | 253133 |
| 50558 | 41426837 | 41427670 | 253133 |
| 50559 | 41434881 | 41436774 | 253133, 158669 |
| 50560 | 41461602 | 41463017 | 158669 |
| 50561 | 41467496 | 41468126 | 264578, 158669 |
| 50562 | 41542856 | 41543265 | 029534 |
| 50563 | 41685635 | 41686853 | 260588, 029534 |
| 50564 | 41862693 | 41863275 | 083168 |
| 50565 | 41908227 | 41910618 | 083168 |
| 50566 | 41934830 | 41936076 | |
| 50567 | 42009507 | 42011290 | 070718, 261449 |
| 50568 | 42127886 | 42130065 | 104365, 253408 |
| 50569 | 42173488 | 42175869 | 104365 |
| 50570 | 42183108 | 42184842 | 104365 |
| 50571 | 42195316 | 42196785 | 070501 |
| 50572 | 42223763 | 42224637 | 070501 |
| 50573 | 42248573 | 42250308 | 078668 |
| 50574 | 42330429 | 42331437 | 168575 |
| 50575 | 42333573 | 42335407 | 168575 |
| 50576 | 42342025 | 42342910 | 254131, 168575 |
| 50577 | 42354112 | 42355215 | 168575 |
| 50578 | 42365042 | 42365498 | 168575 |
| 50579 | 42372782 | 42374396 | 168575 |
| 50580 | 42381001 | 42381548 | 168575 |
| 50581 | 42395531 | 42400693 | 176209, 168575 |
| 50582 | 42450944 | 42451681 | |
| 50583 | 42669339 | 42669753 | |
| 50584 | 42697175 | 42698901 | 131931 |
| 50585 | 42750475 | 42753332 | 168172, 266044, 120925 |
| 50586 | 42769793 | 42770738 | 168172 |
| 50587 | 42910510 | 42912896 | 168522, 254673 |
| 50588 | 42947731 | 42949583 | 185900 |
| 50589 | 42979829 | 42980451 | |
| 50590 | 42994680 | 42997440 | 165102 |
| 50591 | 43046348 | 43046885 | 165102 |
| 50592 | 48100067 | 48101125 | 254348, 248347 |
| 50593 | 48172772 | 48174137 | 164808 |
| 50594 | 48227482 | 48228436 | 164808 |
| 50595 | 48252791 | 48253886 | 164808 |
| 50596 | 48264908 | 48267541 | 164808 |
| 50597 | 48271060 | 48272353 | 164808 |
| 50598 | 48281730 | 48282744 | 164808 |
| 50599 | 48343712 | 48344560 | 164808 |
| 50600 | 48384596 | 48385860 | 164808 |
| 50601 | 48410611 | 48412295 | 164808 |
| 50602 | 48424261 | 48427722 | 253330, 164808 |
| 50603 | 48434807 | 48438524 | 164808 |
| 50604 | 48438568 | 48439601 | 164808 |
| 50605 | 48531245 | 48532615 | 164808 |
| 50606 | 48556371 | 48557352 | 164808 |
| 50607 | 48564426 | 48566606 | 164808 |
| 50608 | 48570795 | 48573635 | 164808 |
| 50609 | 48580802 | 48582127 | 164808 |
| 50610 | 48646839 | 48651915 | 221869, 164808 |
| 50611 | 48872021 | 48873118 | 104738, 253729 |
| 50612 | 48873262 | 48874281 | 104738 |
| 50613 | 48905306 | 48906010 | |
| 50614 | 48920198 | 48921894 | 169139 |
| 50615 | 48979624 | 48980211 | |
| 50616 | 48987440 | 48988279 | |
| 50617 | 49059195 | 49060269 | |
| 50618 | 49062029 | 49064871 | |
| 50619 | 49087859 | 49089314 | |
| 50620 | 49308655 | 49309313 | |
| 50621 | 49406294 | 49406746 | |
| 50622 | 49426338 | 49428007 | |
| 50623 | 49549268 | 49550780 | 253608 |
| 50624 | 49561802 | 49562755 | 253608 |
| 50625 | 49647910 | 49648879 | |
| 50626 | 49686135 | 49686975 | |
| 50627 | 49700065 | 49702901 | |
| 50628 | 49728395 | 49729119 | |
| 50629 | 49730210 | 49732887 | |
| 50630 | 49811669 | 49812603 | |
| 50631 | 49814417 | 49815885 | |
| 50632 | 49830992 | 49835125 | 019549 |
| 50633 | 50754725 | 50755344 | |
| 50634 | 50822049 | 50822947 | 147481 |
| 50635 | 50869495 | 50870087 | 147481 |
| 50636 | 50892525 | 50894248 | 147481 |
| 50637 | 50924247 | 50924706 | 147481 |
| 50638 | 51052153 | 51052764 | 147481 |
| 50639 | 51350892 | 51351580 | 147481 |
| 50640 | 51483711 | 51484303 | 147481 |
| 50641 | 51578359 | 51579458 | 147481 |
| 50642 | 51593741 | 51597044 | 147481 |
| 50643 | 52809643 | 52813340 | 228801, 168300 |
| 50644 | 52874409 | 52875725 | 253844 |
| 50645 | 53293960 | 53294445 | 147488 |
| 50646 | 53302348 | 53303967 | 147488 |
| 50647 | 53541464 | 53542416 | 023287 |
| 50648 | 53606441 | 53609131 | 023287 |
| 50649 | 53625598 | 53628316 | 023287 |
| 50650 | 53676234 | 53677737 | |
| 50651 | 53732553 | 53734009 | |
| 50652 | 53752308 | 53752884 | |
| 50653 | 54570132 | 54570904 | |
| 50654 | 54640071 | 54640779 | 047249 |
| 50655 | 54644730 | 54645548 | 047249 |
| 50656 | 54754612 | 54756685 | 047249 |
| 50657 | 54857248 | 54858543 | 147509 |
| 50658 | 54888420 | 54889038 | 187735 |
| 50659 | 54932105 | 54935676 | 187735 |
| 50660 | 55013068 | 55015171 | 120992 |
| 50661 | 55046627 | 55049051 | 137547 |
| 50662 | 55058293 | 55058857 | 137547 |
| 50663 | 55078227 | 55079111 | |
| 50664 | 55084024 | 55084749 | |
| 50665 | 55290792 | 55291256 | |
| 50666 | 55305131 | 55305727 | |
| 50667 | 55334836 | 55335408 | |
| 50668 | 56684593 | 56687209 | 137574, 167904 |
| 50669 | 56791774 | 56793503 | 254087 |
| 50670 | 56805501 | 56806338 | 254325, 254087 |
| 50671 | 56850664 | 56851485 | 254087 |
| 50672 | 56857558 | 56859123 | 254087 |
| 50673 | 56859789 | 56861987 | 254087 |
| 50674 | 56900529 | 56902710 | 254087 |
| 50675 | 56985956 | 56987900 | 238650, 253603, 008988 |
| 50676 | 57123256 | 57124972 | 170791, 181690 |
| 50677 | 57904797 | 57907547 | 104331 |
| 50678 | 58456688 | 58457483 | 253821 |
| 50679 | 58462871 | 58463399 | 253821 |
| 50680 | 58475917 | 58478025 | 253821 |
| 50681 | 58492442 | 58495000 | 253821 |
| 50682 | 58500766 | 58501467 | 253821 |
| 50683 | 58563023 | 58563729 | 253322 |
| 50684 | 58615387 | 58617051 | 253322 |
| 50685 | 58652726 | 58654718 | 253322 |
| 50686 | 58714610 | 58716003 | 253322 |
| 50687 | 58716491 | 58717573 | 253322 |
| 50688 | 58767807 | 58768560 | |
| 50689 | 58773119 | 58774098 | |
| 50690 | 58900703 | 58901544 | |
| 50691 | 58906798 | 58908596 | 169122 |
| 50692 | 58928356 | 58930729 | 169122 |
| 50693 | 58944047 | 58945110 | 169122, 253523 |
| 50694 | 58969990 | 58971286 | 169122 |
| 50695 | 58978329 | 58981815 | 169122 |
| 50696 | 58991339 | 58992447 | 169122 |
| 50697 | 58999256 | 59000674 | 169122 |
| 50698 | 59290708 | 59293305 | |
| 50699 | 59323490 | 59324944 | 215114 |
| 50700 | 59333844 | 59334699 | 215114 |
| 50701 | 59385190 | 59385646 | |
| 50702 | 59390301 | 59391549 | |
| 50703 | 59392792 | 59393363 | |
| 50704 | 59398029 | 59399093 | |
| 50705 | 59465443 | 59467231 | 137575 |
| 50706 | 59469905 | 59470527 | 137575 |
| 50707 | 59476214 | 59476818 | 137575 |
| 50708 | 59571162 | 59573230 | 035681 |
| 50709 | 59754514 | 59755259 | 198846 |
| 50710 | 59942805 | 59943666 | 198846 |
| 50711 | 59946406 | 59947057 | 198846 |
| 50712 | 60973616 | 60974548 | 254775 |
| 50713 | 61393263 | 61394101 | 251396 |
| 50714 | 61405733 | 61406127 | 251396 |
| 50715 | 61428572 | 61431024 | 104388, 251396 |
| 50716 | 61453417 | 61453949 | 104388 |
| 50717 | 61563590 | 61565447 | 254869 |
| 50718 | 61565974 | 61566778 | 254869 |
| 50719 | 61590119 | 61593773 | 171316 |
| 50720 | 61625969 | 61627859 | 171316 |
| 50721 | 61644518 | 61645169 | 171316 |
| 50722 | 61656336 | 61657135 | 171316 |
| 50723 | 61708271 | 61709143 | 171316 |
| 50724 | 61858087 | 61858642 | 254777 |
| 50725 | 61861562 | 61863008 | 254777 |
| 50726 | 61864820 | 61865856 | 254777 |
| 50727 | 61873377 | 61874704 | 254777 |
| 50728 | 61896092 | 61896683 | |
| 50729 | 61897537 | 61898424 | |
| 50730 | 61935080 | 61936885 | |
| 50731 | 62011028 | 62012689 | 177182 |
| 50732 | 62220128 | 62225823 | 177182 |
| 50733 | 62381150 | 62381919 | 177182 |
| 50734 | 62408601 | 62409159 | 177182 |
| 50735 | 62623242 | 62628485 | 264408, 198363 |
| 50736 | 62633288 | 62635209 | |
| 50737 | 62671705 | 62674199 | 251127 |
| 50738 | 62678298 | 62680890 | 251127 |
| 50739 | 62695083 | 62696431 | |
| 50740 | 62698420 | 62699403 | 254119 |
| 50741 | 63009571 | 63010358 | |
| 50742 | 63435710 | 63436845 | 185942 |
| 50743 | 63441724 | 63443155 | 185942 |
| 50744 | 63920220 | 63923688 | |
| 50745 | 63923988 | 63925009 | |
| 50746 | 63927817 | 63929060 | 137563 |
| 50747 | 63936995 | 63939331 | 253121, 137563 |
| 50748 | 63950917 | 63952736 | 137563 |
| 50749 | 63996572 | 63999516 | 137561 |
| 50750 | 64004792 | 64005747 | |
| 50751 | 64080023 | 64082846 | 185728, 270673 |
| 50752 | 64112263 | 64113052 | 185728 |
| 50753 | 64132381 | 64133842 | |
| 50754 | 64534134 | 64535028 | |
| 50755 | 65351930 | 65352766 | |
| 50756 | 65610391 | 65611685 | 172817 |
| 50757 | 65668473 | 65670629 | 172817 |
| 50758 | 65710640 | 65712213 | 172817 |
| 50759 | 65876832 | 65877999 | |
| 50760 | 66064015 | 66065635 | |
| 50761 | 66095225 | 66096191 | |
| 50762 | 66097802 | 66098443 | |
| 50763 | 66545562 | 66548038 | 104442 |
| 50764 | 66555611 | 66557847 | 066855 |
| 50765 | 66629257 | 66630301 | 205268, 066855 |
| 50766 | 66685261 | 66685771 | 205268 |
| 50767 | 66718593 | 66719473 | 205268 |
| 50768 | 66752973 | 66755557 | 272192, 205268 |
| 50769 | 66938638 | 66939253 | 147570 |
| 50770 | 67002756 | 67004916 | 147570 |
| 50771 | 67024343 | 67028046 | 253190 |
| 50772 | 67035174 | 67038079 | |
| 50773 | 67042003 | 67042781 | 147573 |
| 50774 | 67064253 | 67064637 | 147573 |
| 50775 | 67088687 | 67090106 | 147571 |
| 50776 | 67227877 | 67228840 | |
| 50777 | 67340134 | 67342999 | 147576, 179041, 246145 |
| 50778 | 67343885 | 67345985 | 147576 |
| 50779 | 67374362 | 67377029 | 147576, 169085 |
| 50780 | 67378848 | 67380797 | 147576, 169085 |
| 50781 | 67382332 | 67385042 | 147576, 169085 |
| 50782 | 67385415 | 67386632 | 169085 |
| 50783 | 67419086 | 67420294 | 169085 |
| 50784 | 67424310 | 67425198 | 169085 |
| 50785 | 67432098 | 67432651 | |
| 50786 | 67433822 | 67435918 | |
| 50787 | 67446776 | 67449173 | |
| 50788 | 67525058 | 67526868 | 185697 |
| 50789 | 67578507 | 67580687 | 213865, 270024, 175073 |
| 50790 | 67624158 | 67625740 | 104205, 270024 |
| 50791 | 67687051 | 67687929 | 270024, 104205 |
| 50792 | 67836400 | 67838410 | 245910 |
| 50793 | 67973358 | 67975610 | 104218, 121022 |
| 50794 | 67976255 | 67977624 | 121022, 104218 |
| 50795 | 68084997 | 68085520 | 104218 |
| 50796 | 68145601 | 68147311 | 066777 |
| 50797 | 68254872 | 68256937 | 271966, 066777 |
| 50798 | 69560596 | 69561042 | 165084 |
| 50799 | 69643617 | 69644904 | 165084 |
| 50800 | 69645155 | 69647509 | 165084 |
| 50801 | 70032715 | 70033402 | |
| 50802 | 70506613 | 70507374 | 137573 |
| 50803 | 70517040 | 70518338 | 137573 |
| 50804 | 70637853 | 70638523 | 137571 |
| 50805 | 70745123 | 70747444 | 246528, 137571 |
| 50806 | 71000509 | 71001367 | |
| 50807 | 71018775 | 71019595 | |
| 50808 | 71060074 | 71061080 | 140396 |
| 50809 | 71064564 | 71065335 | 140396 |
| 50810 | 71092793 | 71093341 | 140396 |
| 50811 | 71105783 | 71107439 | 140396 |
| 50812 | 71242687 | 71245961 | 140396 |
| 50813 | 71313792 | 71317218 | 140396 |
| 50814 | 71369201 | 71369976 | |
| 50815 | 71518694 | 71525850 | 246366, 067167 |
| 50816 | 71577820 | 71581842 | 221947, 147592 |
| 50817 | 71682842 | 71686517 | 221947 |
| 50818 | 71959185 | 71959861 | |
| 50819 | 71971036 | 71971911 | |
| 50820 | 72023930 | 72024888 | |
| 50821 | 72042384 | 72043862 | |
| 50822 | 72741991 | 72746484 | 264576, 235531 |
| 50823 | 72754238 | 72755918 | 178860, 235531 |
| 50824 | 73315787 | 73316306 | |
| 50825 | 73920780 | 73921937 | 147601 |
| 50826 | 74086313 | 74087027 | |
| 50827 | 74204786 | 74208729 | 121039, 147604 |
| 50828 | 74209010 | 74209870 | 121039 |
| 50829 | 74253311 | 74253749 | 250295 |
| 50830 | 74270489 | 74271977 | 253339 |
| 50831 | 74276345 | 74277671 | |
| 50832 | 74320388 | 74320972 | |
| 50833 | 74332116 | 74332719 | 040341, 253302 |
| 50834 | 74456738 | 74457642 | 040341 |
| 50835 | 74473084 | 74473807 | 040341 |
| 50836 | 74658018 | 74660111 | 040341, 258677 |
| 50837 | 74789759 | 74792911 | 104343, 258677 |
| 50838 | 74883215 | 74885858 | 175606, 154582 |
| 50839 | 74888024 | 74889402 | 175606 |
| 50840 | 75080145 | 75080889 | |
| 50841 | 75086138 | 75086613 | |
| 50842 | 75179124 | 75180366 | 104369 |
| 50843 | 75189355 | 75189982 | 104369 |
| 50844 | 75262340 | 75263206 | 104381 |
| 50845 | 75318330 | 75318858 | 104381 |
| 50846 | 75547693 | 75548332 | 254349 |
| 50847 | 75572196 | 75573000 | 254349 |
| 50848 | 75648396 | 75649087 | 254349 |
| 50849 | 75825623 | 75826238 | |
| 50850 | 76178788 | 76179726 | 249395 |
| 50851 | 76242498 | 76243544 | |
| 50852 | 76305871 | 76306814 | |
| 50853 | 76307530 | 76309017 | |
| 50854 | 76316038 | 76317524 | |
| 50855 | 76318341 | 76321753 | 164749 |
| 50856 | 76370515 | 76371434 | 164749 |
| 50857 | 76417312 | 76418341 | 164749 |
| 50858 | 77585016 | 77587527 | 253661 |
| 50859 | 77589344 | 77590998 | 253661 |
| 50860 | 77592566 | 77596618 | 091656, 253661 |
| 50861 | 77631427 | 77631837 | 091656 |
| 50862 | 77724336 | 77724780 | 091656 |
| 50863 | 77890260 | 77891199 | |
| 50864 | 77911456 | 77913580 | 164751 |
| 50865 | 78311201 | 78312735 | 254366 |
| 50866 | 78319440 | 78320022 | 254366 |
| 50867 | 78519537 | 78520092 | |
| 50868 | 79715734 | 79717868 | 104432 |
| 50869 | 79746648 | 79747069 | |
| 50870 | 79761319 | 79763113 | |
| 50871 | 79932892 | 79933854 | |
| 50872 | 79975751 | 79976387 | |
| 50873 | 79985530 | 79986771 | |
| 50874 | 80679090 | 80681799 | 249328, 272138, 164683 |
| 50875 | 80695679 | 80697035 | 249328, 272138 |
| 50876 | 80705384 | 80707391 | 249328, 272138 |
| 50877 | 80742173 | 80743130 | 249328 |
| 50878 | 80802495 | 80804597 | |
| 50879 | 80941126 | 80943005 | 147586, 076554 |
| 50880 | 80995678 | 80998544 | 076554 |
| 50881 | 81003823 | 81004338 | 076554 |
| 50882 | 81019417 | 81020045 | 076554 |
| 50883 | 81061676 | 81062231 | 076554 |
| 50884 | 81082698 | 81084208 | 076554 |
| 50885 | 81119110 | 81119635 | 076554 |
| 50886 | 81152581 | 81153764 | 265588 |
| 50887 | 81168964 | 81170976 | |
| 50888 | 81210277 | 81210876 | 253238 |
| 50889 | 81227221 | 81227794 | 253238 |
| 50890 | 81278977 | 81280025 | |
| 50891 | 81347595 | 81348734 | |
| 50892 | 81397360 | 81400705 | 205189, 251867 |
| 50893 | 81477754 | 81479369 | |
| 50894 | 81488947 | 81492477 | |
| 50895 | 81589753 | 81590346 | 164684 |
| 50896 | 81639533 | 81640330 | 164684 |
| 50897 | 81786529 | 81787366 | 164684 |
| 50898 | 81820411 | 81821738 | |
| 50899 | 81830143 | 81831613 | |
| 50900 | 81837424 | 81839994 | |
| 50901 | 81849541 | 81850115 | |
| 50902 | 81876877 | 81878310 | |
| 50903 | 81903876 | 81904761 | 076641 |
| 50904 | 81940707 | 81942505 | 076641 |
| 50905 | 81945425 | 81946712 | 076641 |
| 50906 | 81962149 | 81964184 | 076641 |
| 50907 | 82023352 | 82024759 | 076641 |
| 50908 | 82069120 | 82070040 | 253214 |
| 50909 | 82105327 | 82106875 | |
| 50910 | 82123700 | 82124756 | |
| 50911 | 82178637 | 82179164 | |
| 50912 | 82192083 | 82193165 | 164687, 254027 |
| 50913 | 82469733 | 82470657 | |
| 50914 | 82597772 | 82598796 | 133731 |
| 50915 | 82606112 | 82608224 | 253598 |
| 50916 | 82632297 | 82634098 | 104231 |
| 50917 | 82643879 | 82645682 | 164695, 104231 |
| 50918 | 82753754 | 82755372 | 104497 |
| 50919 | 82770617 | 82771506 | |
| 50920 | 85169677 | 85170112 | 184672 |
| 50921 | 85201176 | 85201845 | 184672 |
| 50922 | 85206641 | 85207287 | 184672 |
| 50923 | 85391345 | 85393710 | 184672 |
| 50924 | 85514109 | 85514538 | 184672 |
| 50925 | 86019178 | 86019982 | 133739 |
| 50926 | 86088881 | 86090832 | 254208, 133740, 260493 |
| 50927 | 86100497 | 86101112 | 133740 |
| 50928 | 86131989 | 86134634 | 185015, 176731 |
| 50929 | 86157043 | 86158775 | 257962, 258256, 185015 |
| 50930 | 86322770 | 86323355 | 164879 |
| 50931 | 86375300 | 86377044 | 104267, 253549 |
| 50932 | 86447235 | 86448760 | 254380 |
| 50933 | 86458274 | 86460206 | |
| 50934 | 86848073 | 86848662 | |
| 50935 | 86937107 | 86938216 | 253154 |
| 50936 | 87130531 | 87131653 | 147614, 253675 |
| 50937 | 87267595 | 87268748 | 164893 |
| 50938 | 87302173 | 87303441 | 164893 |
| 50939 | 87331914 | 87334196 | 164893 |
| 50940 | 87353901 | 87357001 | 123124, 254231 |
| 50941 | 87426442 | 87427167 | 123124 |
| 50942 | 87496094 | 87496731 | 176623 |
| 50943 | 87519990 | 87521405 | 085719, 176623 |
| 50944 | 87526230 | 87527660 | 176623, 085719 |
| 50945 | 87715477 | 87716028 | 170289 |
| 50946 | 87840111 | 87841198 | |
| 50947 | 90732590 | 90733588 | 251136 |
| 50948 | 90741094 | 90741651 | 251136 |
| 50949 | 90742011 | 90742710 | 251136 |
| 50950 | 90769104 | 90772458 | 104312, 251136 |
| 50951 | 90808413 | 90814832 | |
| 50952 | 90894450 | 90895363 | |
| 50953 | 90898055 | 90899016 | |
| 50954 | 90900915 | 90902774 | |
| 50955 | 90913674 | 90916017 | 164823 |
| 50956 | 90995505 | 90997217 | 104320 |
| 50957 | 91012387 | 91014993 | 104325, 104320 |
| 50958 | 91020533 | 91021555 | 104325 |
| 50959 | 91024787 | 91025350 | 104325 |
| 50960 | 91479190 | 91480770 | 253394 |
| 50961 | 91589949 | 91590781 | 254180 |
| 50962 | 91655486 | 91656211 | 180694 |
| 50963 | 91656777 | 91659080 | 246792, 180694 |
| 50964 | 91842204 | 91843106 | 254251, 123119 |
| 50965 | 91889161 | 91889694 | 123119 |
| 50966 | 91899871 | 91901821 | 123119 |
| 50967 | 92052922 | 92053472 | 155099 |
| 50968 | 92081546 | 92083298 | 155100, 253738 |
| 50969 | 93976601 | 93978835 | 253197, 205133 |
| 50970 | 94039144 | 94039934 | |
| 50971 | 94341301 | 94343465 | 246662 |
| 50972 | 94364861 | 94365963 | 246662 |
| 50973 | 94547130 | 94548995 | 246662 |
| 50974 | 94576662 | 94577940 | 246662 |
| 50975 | 94590403 | 94593018 | 246662 |
| 50976 | 94593281 | 94595609 | 246662 |
| 50977 | 94605985 | 94607682 | 246662 |
| 50978 | 94667587 | 94668197 | 246662 |
| 50979 | 94678150 | 94679228 | 246662 |
| 50980 | 94706025 | 94706783 | 246662 |
| 50981 | 94710694 | 94711944 | 188343, 246662 |
| 50982 | 94712285 | 94713502 | 246662, 188343 |
| 50983 | 94751915 | 94753522 | 253848, 212998, 183808 |
| 50984 | 94760820 | 94761377 | |
| 50985 | 94766555 | 94767633 | 164953 |
| 50986 | 94886009 | 94886698 | 164951 |
| 50987 | 94928520 | 94929927 | 264448, 164951 |
| 50988 | 94948088 | 94948695 | |
| 50989 | 95231170 | 95232173 | |
| 50990 | 95252742 | 95255729 | |
| 50991 | 95270492 | 95275422 | 164949 |
| 50992 | 95429671 | 95430403 | 265817, 197275 |
| 50993 | 95534659 | 95535226 | 164944 |
| 50994 | 95564781 | 95566944 | 253704, 164944 |
| 50995 | 95731284 | 95733179 | 156162 |
| 50996 | 95835303 | 95836449 | 164941 |
| 50997 | 95907306 | 95908250 | 156170, 175305 |
| 50998 | 95908485 | 95909317 | 175305, 156170 |
| 50999 | 95917416 | 95919211 | 238791, 156170 |
| 51000 | 95958933 | 95964907 | 253878, 164938, 156170 |
| 51001 | 95971117 | 95974774 | 156170 |
| 51002 | 95975235 | 95976516 | 156170 |
| 51003 | 95979397 | 95982073 | 156170 |
| 51004 | 96000229 | 96000885 | 156170 |
| 51005 | 96022787 | 96025487 | 156170 |
| 51006 | 96032600 | 96033521 | 156170 |
| 51007 | 96036229 | 96038494 | 156170 |
| 51008 | 96076560 | 96080331 | 245080, 156170 |
| 51009 | 96081058 | 96081579 | 156170, 245080 |
| 51010 | 96083502 | 96084416 | 254248, 156170, 245080 |
| 51011 | 96086641 | 96087710 | 156170, 254248 |
| 51012 | 96111381 | 96115365 | 156170 |
| 51013 | 96124197 | 96125969 | 156170 |
| 51014 | 96145534 | 96147548 | 175895 |
| 51015 | 96181712 | 96182793 | |
| 51016 | 96186744 | 96187709 | |
| 51017 | 96212389 | 96213101 | |
| 51018 | 96237446 | 96238805 | 253773 |
| 51019 | 96280517 | 96282951 | 156172, 253773 |
| 51020 | 96690559 | 96691379 | 223297, 253773 |
| 51021 | 96705293 | 96706117 | 253773 |
| 51022 | 96714310 | 96715571 | 253773 |
| 51023 | 96804942 | 96806084 | 253773 |
| 51024 | 97246845 | 97248117 | 254224, 156467 |
| 51025 | 97272881 | 97275246 | 156471, 156469 |
| 51026 | 97280374 | 97281324 | 156471 |
| 51027 | 97351353 | 97352015 | |
| 51028 | 97353750 | 97354212 | |
| 51029 | 97365152 | 97365887 | |
| 51030 | 97455804 | 97457022 | |
| 51031 | 97460763 | 97461802 | |
| 51032 | 97505351 | 97509508 | 169439 |
| 51033 | 97526162 | 97527302 | 169439 |
| 51034 | 97535938 | 97537135 | 169439 |
| 51035 | 97582300 | 97583966 | 169439 |
| 51036 | 97601027 | 97604902 | 169439 |
| 51037 | 97612252 | 97613628 | 169439 |
| 51038 | 97629136 | 97629781 | |
| 51039 | 97630255 | 97630885 | |
| 51040 | 97656646 | 97659052 | 104324 |
| 51041 | 97659385 | 97659750 | 104324 |
| 51042 | 97743456 | 97744573 | 104324 |
| 51043 | 97801488 | 97806195 | 104324 |
| 51044 | 97841105 | 97842712 | 104324 |
| 51045 | 97845127 | 97845979 | 104324 |
| 51046 | 97853699 | 97854166 | 104324 |
| 51047 | 97861340 | 97862000 | 104324 |
| 51048 | 97864398 | 97866267 | 104324 |
| 51049 | 97940570 | 97941172 | 104324 |
| 51050 | 98073564 | 98075017 | 104324 |
| 51051 | 98076265 | 98078861 | 104324 |
| 51052 | 98102280 | 98103952 | 104324 |
| 51053 | 98126900 | 98128058 | 104324 |
| 51054 | 98130292 | 98131261 | 104324 |
| 51055 | 98147004 | 98147497 | 104324 |
| 51056 | 98160181 | 98161440 | 104324 |
| 51057 | 98175400 | 98176620 | |
| 51058 | 98289871 | 98290262 | 180543 |
| 51059 | 98336615 | 98337546 | |
| 51060 | 98375619 | 98376372 | |
| 51061 | 98556122 | 98557652 | |
| 51062 | 98564898 | 98566782 | |
| 51063 | 98572108 | 98572848 | |
| 51064 | 98630490 | 98630948 | |
| 51065 | 98655583 | 98658640 | 147649 |
| 51066 | 98787233 | 98788660 | 104341 |
| 51067 | 98830356 | 98831102 | 104341 |
| 51068 | 98861418 | 98862237 | 104341 |
| 51069 | 98880600 | 98882505 | 132561 |
| 51070 | 98917259 | 98918331 | 132561 |
| 51071 | 98927173 | 98928456 | 132561 |
| 51072 | 98929378 | 98931809 | 132561 |
| 51073 | 98937483 | 98939396 | 132561 |
| 51074 | 98940545 | 98942338 | 132561 |
| 51075 | 98945558 | 98946673 | 132561 |
| 51076 | 99056426 | 99059150 | 156482 |
| 51077 | 99080370 | 99082514 | 177459 |
| 51078 | 99083491 | 99084005 | 177459 |
| 51079 | 99103407 | 99104149 | 177459 |
| 51080 | 99108632 | 99109452 | |
| 51081 | 99120292 | 99120851 | 132541 |
| 51082 | 99124447 | 99126153 | 132541 |
| 51083 | 99128704 | 99130758 | 104356, 132541 |
| 51084 | 99305308 | 99307155 | 104361 |
| 51085 | 99309866 | 99310541 | |
| 51086 | 99449433 | 99450261 | 104375, 272321 |
| 51087 | 99737898 | 99738633 | 104375 |
| 51088 | 99837229 | 99838105 | 104375 |
| 51089 | 100024480 | 100026384 | 132549, 253948 |
| 51090 | 100318202 | 100319371 | 132549 |
| 51091 | 100332838 | 100333526 | 132549 |
| 51092 | 100510805 | 100511388 | 132549 |
| 51093 | 100649483 | 100649950 | 132549 |
| 51094 | 100694653 | 100695091 | 132549 |
| 51095 | 100709890 | 100710327 | 235683, 132549 |
| 51096 | 100717471 | 100719382 | 132549 |
| 51097 | 100786940 | 100787638 | 132549 |
| 51098 | 100886135 | 100886709 | 164919, 132549 |
| 51099 | 100904599 | 100906292 | 164919 |
| 51100 | 101162201 | 101163774 | 147669 |
| 51101 | 101169892 | 101171019 | 104450 |
| 51102 | 101175555 | 101176312 | 104450 |
| 51103 | 101224933 | 101226123 | 104450 |
| 51104 | 101314971 | 101316557 | 034677 |
| 51105 | 101319533 | 101323330 | 034677 |
| 51106 | 101371398 | 101374166 | |
| 51107 | 101456072 | 101456522 | |
| 51108 | 101469356 | 101474447 | |
| 51109 | 101474498 | 101478880 | |
| 51110 | 101478929 | 101481410 | |
| 51111 | 101483702 | 101489859 | 253666 |
| 51112 | 101493911 | 101495789 | 253666 |
| 51113 | 101498908 | 101501218 | 253666 |
| 51114 | 101501731 | 101505310 | 254364, 253666 |
| 51115 | 101555986 | 101556675 | 186106 |
| 51116 | 101570835 | 101572452 | 186106 |
| 51117 | 101675119 | 101676368 | 174226 |
| 51118 | 101732637 | 101735612 | 070756 |
| 51119 | 101836772 | 101837833 | |
| 51120 | 101880562 | 101882398 | |
| 51121 | 101911618 | 101913578 | |
| 51122 | 101961938 | 101966526 | 164924 |
| 51123 | 102063443 | 102064650 | 248599 |
| 51124 | 102110654 | 102111106 | |
| 51125 | 102137881 | 102140090 | 253395 |
| 51126 | 102166619 | 102168524 | |
| 51127 | 102170003 | 102172903 | |
| 51128 | 102180423 | 102180921 | 261087 |
| 51129 | 102216031 | 102220451 | 271882, 120963 |
| 51130 | 102299590 | 102300712 | 253282 |
| 51131 | 102371257 | 102372069 | |
| 51132 | 102372511 | 102373929 | |
| 51133 | 102387493 | 102389061 | |
| 51134 | 102462429 | 102468053 | 254084 |
| 51135 | 102478880 | 102480342 | 254024 |
| 51136 | 102594906 | 102597589 | 083307 |
| 51137 | 102598695 | 102600938 | 083307 |
| 51138 | 102647426 | 102648415 | 083307 |
| 51139 | 102769040 | 102770021 | 104490 |
| 51140 | 102979783 | 102980328 | 104490 |
| 51141 | 103248086 | 103252359 | 246263, 048392 |
| 51142 | 103343265 | 103343881 | 104517 |
| 51143 | 103415771 | 103416171 | 104517 |
| 51144 | 103422917 | 103425739 | 104517 |
| 51145 | 103596096 | 103598394 | |
| 51146 | 103612628 | 103614321 | |
| 51147 | 103625749 | 103626415 | |
| 51148 | 103640658 | 103641447 | |
| 51149 | 103665517 | 103670009 | 155090 |
| 51150 | 103697571 | 103698640 | |
| 51151 | 103714553 | 103715357 | |
| 51152 | 103781982 | 103783176 | |
| 51153 | 103788559 | 103789470 | |
| 51154 | 103794641 | 103795839 | |
| 51155 | 103799680 | 103803436 | |
| 51156 | 103809526 | 103810565 | |
| 51157 | 103816470 | 103821863 | 253669 |
| 51158 | 103822003 | 103823885 | 253669 |
| 51159 | 103874630 | 103877848 | 253320, 155096 |
| 51160 | 103906382 | 103907337 | 253320 |
| 51161 | 103914911 | 103916481 | 253320 |
| 51162 | 103918010 | 103919707 | 253320 |
| 51163 | 103921753 | 103923277 | 253320 |
| 51164 | 103929545 | 103930541 | 253320 |
| 51165 | 103930616 | 103933818 | 253320 |
| 51166 | 103933965 | 103934618 | 253320 |
| 51167 | 104032497 | 104034264 | 155097, 254236 |
| 51168 | 104081992 | 104082776 | 155097 |
| 51169 | 104219486 | 104222162 | 164929, 247081 |
| 51170 | 104282345 | 104283440 | 247081 |
| 51171 | 104310652 | 104311728 | 164930, 247081 |
| 51172 | 104426313 | 104428695 | 164934, 164933 |
| 51173 | 105270465 | 105271178 | |
| 51174 | 105289496 | 105292095 | |
| 51175 | 105335366 | 105335948 | |
| 51176 | 105337590 | 105338714 | |
| 51177 | 105385354 | 105386235 | 147647 |
| 51178 | 105471236 | 105473246 | 147647 |
| 51179 | 105475773 | 105476689 | 147647 |
| 51180 | 105477776 | 105479621 | 147647 |
| 51181 | 105600800 | 105601867 | 147650 |
| 51182 | 106908885 | 106909813 | 251003 |
| 51183 | 107135195 | 107135970 | |
| 51184 | 107618852 | 107619683 | 253582, 164830 |
| 51185 | 107629798 | 107631472 | 253582, 164830 |
| 51186 | 107635967 | 107638281 | 253582, 164830 |
| 51187 | 107640731 | 107641843 | 253582, 164830 |
| 51188 | 107669413 | 107671172 | 253582, 164830 |
| 51189 | 107875925 | 107877430 | |
| 51190 | 109151805 | 109152427 | |
| 51191 | 109218876 | 109219464 | 104408 |
| 51192 | 109259697 | 109261418 | 104408 |
| 51193 | 109454813 | 109456429 | 104412 |
| 51194 | 109596191 | 109597718 | 253949 |
| 51195 | 109799232 | 109800008 | 164841 |
| 51196 | 109817215 | 109818216 | |
| 51197 | 109873229 | 109874042 | |
| 51198 | 109892795 | 109893610 | |
| 51199 | 110240410 | 110242713 | |
| 51200 | 110345363 | 110347096 | 120533, 120526 |
| 51201 | 110551789 | 110553643 | 147654 |
| 51202 | 110594058 | 110595068 | 147642 |
| 51203 | 110605152 | 110608429 | 147642 |
| 51204 | 110608707 | 110611036 | 147642 |
| 51205 | 110613010 | 110616331 | 147642 |
| 51206 | 110618280 | 110620504 | 147642 |
| 51207 | 110651788 | 110653157 | 147642 |
| 51208 | 110655196 | 110658440 | 248050, 147642 |
| 51209 | 111173118 | 111174247 | |
| 51210 | 111860245 | 111861549 | |
| 51211 | 113469712 | 113470912 | 164796 |
| 51212 | 113471927 | 113472616 | 164796 |
| 51213 | 115981949 | 115983686 | |
| 51214 | 116680345 | 116682027 | 104447 |
| 51215 | 116786506 | 116787609 | 104447 |
| 51216 | 116973803 | 116974894 | 249917 |
| 51217 | 116981545 | 116982279 | 249917 |
| 51218 | 117006747 | 117007358 | 249917 |
| 51219 | 117068749 | 117070988 | 249917 |
| 51220 | 117124692 | 117126355 | 249917 |
| 51221 | 117185719 | 117186414 | 249917 |
| 51222 | 117767134 | 117769025 | 147677 |
| 51223 | 117777651 | 117779506 | 147679, 147677 |
| 51224 | 117885699 | 117887400 | 253327, 264875, 164754 |
| 51225 | 118316229 | 118316816 | |
| 51226 | 118532515 | 118533788 | 164758 |
| 51227 | 118622533 | 118623177 | |
| 51228 | 118627097 | 118628021 | |
| 51229 | 118630974 | 118632502 | |
| 51230 | 118662333 | 118663029 | |
| 51231 | 118675484 | 118676264 | |
| 51232 | 118681365 | 118685499 | |
| 51233 | 118724632 | 118726129 | |
| 51234 | 118878463 | 118880847 | 182197 |
| 51235 | 118897752 | 118899146 | 182197 |
| 51236 | 118918948 | 118919432 | 182197 |
| 51237 | 118922292 | 118922703 | 182197 |
| 51238 | 118938539 | 118941552 | 182197 |
| 51239 | 118946266 | 118947278 | 182197 |
| 51240 | 118949371 | 118950230 | 182197 |
| 51241 | 118958042 | 118960754 | 182197 |
| 51242 | 118989579 | 118991560 | 182197 |
| 51243 | 118992173 | 118993944 | 182197 |
| 51244 | 119000597 | 119002683 | 182197 |
| 51245 | 119012434 | 119013261 | 182197 |
| 51246 | 119016843 | 119018157 | 182197 |
| 51247 | 119020569 | 119025548 | 182197 |
| 51248 | 119029059 | 119032259 | 182197 |
| 51249 | 119037278 | 119037869 | 182197 |
| 51250 | 119041729 | 119042942 | 182197 |
| 51251 | 119067927 | 119069604 | 182197 |
| 51252 | 119115686 | 119116777 | 182197 |
| 51253 | 119119454 | 119125470 | 182197 |
| 51254 | 119202154 | 119204112 | 177570 |
| 51255 | 119207868 | 119208818 | 177570 |
| 51256 | 119356061 | 119357275 | 225885, 177570 |
| 51257 | 119368324 | 119369376 | 225885, 177570 |
| 51258 | 119391683 | 119392716 | 225885, 177570 |
| 51259 | 119393623 | 119396738 | 225885, 177570 |
| 51260 | 119398423 | 119399513 | 225885, 177570 |
| 51261 | 119402550 | 119403273 | 225885, 177570 |
| 51262 | 119451677 | 119452453 | 177570 |
| 51263 | 119480641 | 119481695 | 177570 |
| 51264 | 119516777 | 119518318 | 177570 |
| 51265 | 119518600 | 119519626 | 177570 |
| 51266 | 119529024 | 119529903 | 177570 |
| 51267 | 119558737 | 119559429 | 177570 |
| 51268 | 119633670 | 119634766 | 177570 |
| 51269 | 119915833 | 119917034 | |
| 51270 | 119963625 | 119964998 | 164761 |
| 51271 | 119974054 | 119974660 | |
| 51272 | 120065996 | 120066818 | 184374 |
| 51273 | 120188915 | 120190387 | 147676 |
| 51274 | 120217085 | 120217748 | 147676 |
| 51275 | 120220369 | 120222345 | 147676 |
| 51276 | 120254001 | 120254575 | 147676, 253972 |
| 51277 | 120647818 | 120648488 | 136960 |
| 51278 | 120650922 | 120651861 | 136960 |
| 51279 | 120662326 | 120664089 | 136960 |
| 51280 | 120667057 | 120667865 | 136960 |
| 51281 | 120684272 | 120686292 | 136960 |
| 51282 | 120712975 | 120713407 | |
| 51283 | 120734018 | 120734853 | |
| 51284 | 120779674 | 120780406 | 064313 |
| 51285 | 120844293 | 120845935 | 064313 |
| 51286 | 120856917 | 120857749 | 136982 |
| 51287 | 120867555 | 120869021 | 136982 |
| 51288 | 120885323 | 120887463 | 155792, 245330 |
| 51289 | 120907808 | 120908939 | 155792 |
| 51290 | 120924385 | 120925172 | 155792 |
| 51291 | 120927516 | 120928423 | 155792 |
| 51292 | 120931183 | 120933357 | 155792 |
| 51293 | 121072865 | 121073318 | 187955 |
| 51294 | 121079517 | 121081279 | 187955 |
| 51295 | 121082058 | 121082611 | 187955 |
| 51296 | 121094622 | 121095923 | 187955 |
| 51297 | 121096706 | 121097607 | 187955 |
| 51298 | 121415917 | 121417280 | 172172 |
| 51299 | 121456441 | 121458059 | 172167, 172172 |
| 51300 | 121597486 | 121598143 | 172164 |
| 51301 | 121631365 | 121632458 | 172164 |
| 51302 | 121667612 | 121669413 | 172164 |
| 51303 | 121681052 | 121681526 | 172164 |
| 51304 | 121682682 | 121683680 | 172164 |
| 51305 | 121757451 | 121757864 | 172164 |
| 51306 | 121771528 | 121773070 | 172164 |
| 51307 | 121790150 | 121790900 | 172164 |
| 51308 | 121791677 | 121793697 | 172164 |
| 51309 | 121797912 | 121798343 | 172164 |
| 51310 | 121820590 | 121825449 | 272502, 172164 |
| 51311 | 121827302 | 121828058 | |
| 51312 | 121838589 | 121840998 | |
| 51313 | 121851288 | 121851974 | |
| 51314 | 121857665 | 121859142 | |
| 51315 | 121873510 | 121874076 | |
| 51316 | 122109552 | 122110285 | 253619 |
| 51317 | 122117490 | 122118392 | 253619 |
| 51318 | 122176292 | 122176783 | |
| 51319 | 122252669 | 122253232 | |
| 51320 | 122755168 | 122755677 | |
| 51321 | 122782400 | 122782953 | |
| 51322 | 122940240 | 122941187 | |
| 51323 | 122970320 | 122971355 | 254303 |
| 51324 | 123093897 | 123094948 | 254303 |
| 51325 | 123312336 | 123313044 | |
| 51326 | 123564572 | 123565750 | |
| 51327 | 123580027 | 123582247 | |
| 51328 | 123599941 | 123600297 | |
| 51329 | 123607957 | 123608600 | |
| 51330 | 123671367 | 123671951 | |
| 51331 | 123701324 | 123703762 | 253819 |
| 51332 | 123704888 | 123707329 | 253819 |
| 51333 | 123733869 | 123734535 | |
| 51334 | 123745703 | 123746482 | |
| 51335 | 123769103 | 123769808 | |
| 51336 | 123770304 | 123771098 | |
| 51337 | 123771984 | 123773470 | |
| 51338 | 123791928 | 123795902 | 272043, 178764, 272384 |
| 51339 | 123829100 | 123829657 | 178764 |
| 51340 | 123899496 | 123900948 | 178764 |
| 51341 | 123971144 | 123973417 | 178764 |
| 51342 | 123981694 | 123983378 | 178764 |
| 51343 | 124000327 | 124002014 | |
| 51344 | 124049664 | 124051815 | 136986 |
| 51345 | 124053401 | 124055426 | 156787, 136986 |
| 51346 | 124068973 | 124071316 | 156787 |
| 51347 | 124084470 | 124085714 | 156787 |
| 51348 | 124168765 | 124170533 | |
| 51349 | 124172467 | 124174036 | |
| 51350 | 124179308 | 124180411 | |
| 51351 | 124217006 | 124218020 | 147689 |
| 51352 | 124228766 | 124230353 | |
| 51353 | 124252540 | 124253877 | 189376, 259305 |
| 51354 | 124284483 | 124288094 | 165156 |
| 51355 | 124386387 | 124387502 | 156802 |
| 51356 | 124407641 | 124409266 | 156802 |
| 51357 | 124428198 | 124429655 | 156795, 156802 |
| 51358 | 124465512 | 124466471 | 156795 |
| 51359 | 124528772 | 124530179 | 156804 |
| 51360 | 124539812 | 124541516 | 156804 |
| 51361 | 124552360 | 124553925 | 156804 |
| 51362 | 124593114 | 124593927 | |
| 51363 | 124623951 | 124627045 | 253286 |
| 51364 | 124637433 | 124637839 | 253286 |
| 51365 | 124641370 | 124644005 | 253286 |
| 51366 | 124647404 | 124647875 | 253286 |
| 51367 | 124682872 | 124684302 | |
| 51368 | 124692019 | 124693191 | 104537 |
| 51369 | 124731921 | 124733057 | 104537 |
| 51370 | 124751729 | 124752191 | |
| 51371 | 124780126 | 124782346 | 176853 |
| 51372 | 124907047 | 124907619 | 214814 |
| 51373 | 124934010 | 124935193 | 214814 |
| 51374 | 125029803 | 125030467 | 214814, 181171 |
| 51375 | 125115988 | 125116953 | 214814, 253868 |
| 51376 | 125212204 | 125213011 | 214803 |
| 51377 | 125214071 | 125214996 | 214803 |
| 51378 | 125281833 | 125284804 | 253227 |
| 51379 | 125383517 | 125385779 | 164983 |
| 51380 | 125485078 | 125489027 | 170881, 245149 |
| 51381 | 125550176 | 125552209 | 147684, 147687 |
| 51382 | 125575509 | 125576668 | 147684, 170873 |
| 51383 | 125589935 | 125590503 | 170873 |
| 51384 | 125612789 | 125614429 | 170873 |
| 51385 | 125628354 | 125633202 | 170873 |
| 51386 | 125640309 | 125644481 | 170873 |
| 51387 | 125661204 | 125662237 | 170873 |
| 51388 | 125685569 | 125686343 | 170873 |
| 51389 | 125704560 | 125705271 | 170873 |
| 51390 | 125726225 | 125728443 | 170873 |
| 51391 | 125731963 | 125733741 | 170873 |
| 51392 | 125733978 | 125735618 | 170873 |
| 51393 | 125735709 | 125741481 | 170873 |
| 51394 | 125752800 | 125753522 | |
| 51395 | 125755270 | 125756150 | |
| 51396 | 125763472 | 125764177 | |
| 51397 | 125783593 | 125785274 | |
| 51398 | 125878740 | 125879256 | 249816 |
| 51399 | 125971483 | 125972365 | |
| 51400 | 125973559 | 125974148 | |
| 51401 | 125985043 | 125986400 | 180938 |
| 51402 | 126009501 | 126012091 | 104549, 253513 |
| 51403 | 126043106 | 126045090 | 164961 |
| 51404 | 126103012 | 126104842 | 156831, 164961 |
| 51405 | 126122344 | 126124282 | 156831 |
| 51406 | 126130376 | 126132418 | 156831 |
| 51407 | 126137164 | 126139266 | 156831 |
| 51408 | 126140213 | 126143503 | 156831 |
| 51409 | 126163808 | 126164997 | 156831 |
| 51410 | 126179118 | 126182765 | 156831 |
| 51411 | 126185942 | 126188212 | 156831 |
| 51412 | 126193734 | 126194701 | 156831 |
| 51413 | 126203886 | 126204765 | 156831 |
| 51414 | 126230804 | 126234027 | 156831 |
| 51415 | 126236849 | 126238417 | 156831 |
| 51416 | 126244784 | 126245563 | 156831 |
| 51417 | 126283048 | 126284258 | 242170, 156831 |
| 51418 | 126285059 | 126286917 | 156831 |
| 51419 | 126290205 | 126291132 | 156831 |
| 51420 | 126314283 | 126315233 | 156831 |
| 51421 | 126321485 | 126324200 | 156831 |
| 51422 | 126347106 | 126349068 | 156831 |
| 51423 | 126353780 | 126355761 | 156831 |
| 51424 | 126374316 | 126376009 | 156831 |
| 51425 | 126383421 | 126384592 | |
| 51426 | 126398306 | 126399143 | |
| 51427 | 126422319 | 126423530 | |
| 51428 | 126424167 | 126425134 | |
| 51429 | 126436277 | 126437005 | |
| 51430 | 126437969 | 126438490 | |
| 51431 | 126441038 | 126448270 | 173334 |
| 51432 | 126463653 | 126464947 | |
| 51433 | 126474873 | 126476832 | |
| 51434 | 126497709 | 126498434 | 253111 |
| 51435 | 126503400 | 126504330 | 253111 |
| 51436 | 126506419 | 126508071 | 253111 |
| 51437 | 126509442 | 126511924 | 253111 |
| 51438 | 126513371 | 126515045 | 253111 |
| 51439 | 126523548 | 126527428 | 253111 |
| 51440 | 126536840 | 126542286 | 253111 |
| 51441 | 126556119 | 126560004 | |
| 51442 | 126574636 | 126576310 | |
| 51443 | 126587168 | 126589825 | |
| 51444 | 126590192 | 126592825 | |
| 51445 | 126605873 | 126606855 | |
| 51446 | 126649039 | 126651954 | |
| 51447 | 126653492 | 126654591 | |
| 51448 | 126654830 | 126655704 | |
| 51449 | 126656003 | 126657777 | |
| 51450 | 126675106 | 126677762 | |
| 51451 | 126697812 | 126700233 | |
| 51452 | 126708891 | 126711345 | |
| 51453 | 126798052 | 126799355 | |
| 51454 | 127466024 | 127466845 | |
| 51455 | 127543473 | 127544944 | |
| 51456 | 127568429 | 127571712 | 254286, 254010, 168672 |
| 51457 | 127583616 | 127585002 | 254286 |
| 51458 | 127766608 | 127767523 | |
| 51459 | 128047042 | 128048831 | |
| 51460 | 128064460 | 128065351 | |
| 51461 | 128088847 | 128089969 | 253264 |
| 51462 | 128217639 | 128220074 | |
| 51463 | 128221405 | 128233441 | 247844 |
| 51464 | 128233994 | 128238580 | |
| 51465 | 128319579 | 128320272 | 246228 |
| 51466 | 128745975 | 128752288 | 136997, 249375 |
| 51467 | 128752562 | 128757128 | 136997 |
| 51468 | 128805876 | 128808803 | 249859 |
| 51469 | 128845132 | 128845724 | 249859 |
| 51470 | 128863081 | 128868060 | 249859 |
| 51471 | 128901965 | 128904955 | 249859 |
| 51472 | 128905896 | 128907749 | 249859 |
| 51473 | 128910419 | 128912298 | 249859 |
| 51474 | 128930667 | 128931806 | 249859 |
| 51475 | 128961690 | 128963335 | 249859 |
| 51476 | 128979405 | 128984128 | 249859 |
| 51477 | 129043359 | 129043748 | 249859 |
| 51478 | 129046466 | 129048407 | 249859 |
| 51479 | 129082151 | 129083671 | 249859 |
| 51480 | 129099483 | 129100115 | 249859 |
| 51481 | 129103031 | 129103869 | 249859 |
| 51482 | 129120865 | 129121662 | |
| 51483 | 129129590 | 129130248 | |
| 51484 | 129138746 | 129141096 | |
| 51485 | 129153606 | 129155345 | |
| 51486 | 129163754 | 129166741 | |
| 51487 | 129168268 | 129171705 | |
| 51488 | 129178300 | 129183762 | |
| 51489 | 129184044 | 129193096 | |
| 51490 | 129193534 | 129198852 | |
| 51491 | 129204963 | 129206704 | |
| 51492 | 129207359 | 129211548 | |
| 51493 | 129270335 | 129271751 | |
| 51494 | 129338533 | 129340005 | |
| 51495 | 129439660 | 129441653 | 254275 |
| 51496 | 129441862 | 129442613 | 254275 |
| 51497 | 129511708 | 129512907 | 254275 |
| 51498 | 129551255 | 129554024 | 254275 |
| 51499 | 129565584 | 129570030 | 254275 |
| 51500 | 129594687 | 129598094 | |
| 51501 | 129602965 | 129604360 | |
| 51502 | 129638247 | 129639168 | |
| 51503 | 129664885 | 129666085 | |
| 51504 | 129746342 | 129747103 | |
| 51505 | 129806212 | 129807168 | |
| 51506 | 130562134 | 130563054 | 229140 |
| 51507 | 130694086 | 130694771 | 254223 |
| 51508 | 130696739 | 130698888 | |
| 51509 | 130722729 | 130723308 | |
| 51510 | 130764930 | 130766416 | 147697 |
| 51511 | 130890663 | 130891203 | 153310 |
| 51512 | 130950991 | 130953168 | 253720, 153310 |
| 51513 | 130993731 | 130995074 | 153310 |
| 51514 | 130996496 | 130997006 | 153310 |
| 51515 | 130997549 | 130998208 | 153310 |
| 51516 | 131008439 | 131009506 | 153310 |
| 51517 | 131027012 | 131029391 | 153310 |
| 51518 | 131074095 | 131075110 | 153317 |
| 51519 | 131226331 | 131226797 | 153317 |
| 51520 | 131305342 | 131306305 | 153317 |
| 51521 | 131369532 | 131371210 | 153317 |
| 51522 | 131440167 | 131440573 | 153317 |
| 51523 | 131453978 | 131456984 | 153317 |
| 51524 | 131495351 | 131495954 | |
| 51525 | 131526454 | 131527078 | |
| 51526 | 131687616 | 131688266 | |
| 51527 | 131772073 | 131776735 | |
| 51528 | 131790569 | 131791209 | |
| 51529 | 132531152 | 132533140 | |
| 51530 | 132594302 | 132595622 | |
| 51531 | 132723783 | 132724638 | |
| 51532 | 132828015 | 132829043 | |
| 51533 | 132852662 | 132858567 | |
| 51534 | 132868252 | 132872187 | |
| 51535 | 132915324 | 132919320 | 132294 |
| 51536 | 132928071 | 132929320 | 132294 |
| 51537 | 133687159 | 133688317 | 129295 |
| 51538 | 133786809 | 133788596 | 129292 |
| 51539 | 133857742 | 133858434 | 129292 |
| 51540 | 134142921 | 134143762 | 042832 |
| 51541 | 134194589 | 134195390 | |
| 51542 | 134228570 | 134229382 | 104415 |
| 51543 | 134230021 | 134230610 | 104415 |
| 51544 | 134259405 | 134260670 | 104419 |
| 51545 | 134261607 | 134262483 | 104419 |
| 51546 | 134305487 | 134311199 | 104419 |
| 51547 | 134331821 | 134334576 | |
| 51548 | 134340701 | 134342166 | |
| 51549 | 134352897 | 134354387 | |
| 51550 | 134356168 | 134356861 | |
| 51551 | 134362419 | 134363269 | |
| 51552 | 134371891 | 134373143 | |
| 51553 | 134380512 | 134381967 | |
| 51554 | 134386879 | 134389638 | |
| 51555 | 134418791 | 134419567 | |
| 51556 | 134440630 | 134441866 | |
| 51557 | 134460593 | 134462262 | |
| 51558 | 134467767 | 134468387 | 008513 |
| 51559 | 134523488 | 134524043 | 008513 |
| 51560 | 134528949 | 134529678 | 008513 |
| 51561 | 134552159 | 134552993 | 008513 |
| 51562 | 134554500 | 134555221 | 008513 |
| 51563 | 134557917 | 134558783 | 008513 |
| 51564 | 134574611 | 134575593 | 008513 |
| 51565 | 134580197 | 134588110 | 261220, 008513 |
| 51566 | 134591575 | 134594061 | |
| 51567 | 134595138 | 134596694 | |
| 51568 | 135033348 | 135033985 | |
| 51569 | 135528212 | 135528779 | 066827 |
| 51570 | 135540188 | 135540736 | 066827 |
| 51571 | 135626287 | 135626852 | 066827 |
| 51572 | 135642723 | 135644399 | 066827 |
| 51573 | 135652989 | 135653496 | 066827 |
| 51574 | 135697427 | 135698479 | 066827 |
| 51575 | 135724100 | 135726306 | 066827 |
| 51576 | 135732121 | 135733247 | |
| 51577 | 135752622 | 135753429 | |
| 51578 | 135766030 | 135766816 | |
| 51579 | 135777497 | 135778740 | |
| 51580 | 135789814 | 135793645 | |
| 51581 | 135806231 | 135808101 | 259820 |
| 51582 | 135814026 | 135815281 | |
| 51583 | 135842779 | 135845898 | 254028 |
| 51584 | 135852759 | 135853835 | 253433 |
| 51585 | 136468060 | 136471443 | 254372, 131773 |
| 51586 | 136477945 | 136479197 | 131773 |
| 51587 | 136499738 | 136500329 | 131773 |
| 51588 | 136527585 | 136528994 | 131773 |
| 51589 | 136550392 | 136552410 | 131773 |
| 51590 | 136579551 | 136580367 | 131773 |
| 51591 | 136591722 | 136594481 | 131773 |
| 51592 | 136595375 | 136597133 | 131773 |
| 51593 | 136613962 | 136614733 | 131773 |
| 51594 | 137801541 | 137802501 | 254101 |
| 51595 | 137806517 | 137807475 | 254101 |
| 51596 | 137980276 | 137980811 | 254101 |
| 51597 | 138546328 | 138547573 | |
| 51598 | 138590879 | 138591426 | |
| 51599 | 139279664 | 139280637 | 147724 |
| 51600 | 139360898 | 139361719 | 147724 |
| 51601 | 139613797 | 139614991 | 169436 |
| 51602 | 140208701 | 140209485 | |
| 51603 | 140718002 | 140718544 | |
| 51604 | 140867045 | 140868018 | 167632 |
| 51605 | 140980434 | 140981815 | 167632 |
| 51606 | 141163690 | 141164840 | 167632 |
| 51607 | 141466930 | 141469025 | 167632 |
| 51608 | 141474133 | 141475721 | |
| 51609 | 141520279 | 141522969 | 104472 |
| 51610 | 141538335 | 141539252 | 259758 |
| 51611 | 141643959 | 141646614 | 123908 |
| 51612 | 141669335 | 141670073 | 169398 |
| 51613 | 141783731 | 141784642 | 169398 |
| 51614 | 141800262 | 141801842 | 169398 |
| 51615 | 141890033 | 141890738 | 169398 |
| 51616 | 141983060 | 141983751 | 169398 |
| 51617 | 142010103 | 142013174 | 169398 |
| 51618 | 142163737 | 142164672 | 105339 |
| 51619 | 142205963 | 142206457 | |
| 51620 | 142238392 | 142239119 | 022567 |
| 51621 | 142300295 | 142300929 | 254197, 022567 |
| 51622 | 142635166 | 142635564 | |
| 51623 | 142735906 | 142736477 | |
| 51624 | 142868667 | 142869404 | |
| 51625 | 142869866 | 142870604 | |
| 51626 | 143110293 | 143111834 | |
| 51627 | 143190294 | 143191268 | |
| 51628 | 143395210 | 143396092 | 171045 |
| 51629 | 143480515 | 143481682 | 171045 |
| 51630 | 143483433 | 143485493 | 261693, 171045 |
| 51631 | 143750139 | 143752223 | 167653, 234616 |
| 51632 | 143807201 | 143809351 | 130193, 253806, 253741 |
| 51633 | 143819980 | 143821751 | |
| 51634 | 143844099 | 143844839 | 253196 |
| 51635 | 143858188 | 143859716 | 180155 |
| 51636 | 144033482 | 144034435 | |
| 51637 | 144094374 | 144096007 | 247317 |
| 51638 | 144097314 | 144097860 | 247317 |
| 51639 | 144099593 | 144100639 | 247317, 160932 |
| 51640 | 144328255 | 144330285 | 264668, 181638 |
| 51641 | 144348559 | 144350561 | 250571, 264668 |
| 51642 | 144358478 | 144359480 | 264668, 250571 |
| 51643 | 144362358 | 144364172 | 253716 |
| 51644 | 144372365 | 144373932 | 272172, 185730 |
| 51645 | 144416247 | 144418239 | 184428 |
| 51646 | 144450075 | 144451162 | 158106, 254389 |
| 51647 | 144471156 | 144473052 | |
| 51648 | 144536644 | 144537180 | 014164 |
| 51649 | 144609422 | 144610786 | 014164 |
| 51650 | 144622880 | 144624560 | 254859, 254144, 014164 |
| 51651 | 144629292 | 144629901 | 254859 |
| 51652 | 144634121 | 144636483 | 104518 |
| 51653 | 144639941 | 144641571 | 104518 |
| 51654 | 144646914 | 144647708 | |
| 51655 | 144659278 | 144661548 | 255050, 147813 |
| 51656 | 144678713 | 144680875 | 179886, 104529 |
| 51657 | 144690422 | 144692245 | 104524 |
| 51658 | 144698795 | 144700884 | 104522 |
| 51659 | 144717361 | 144719151 | 183309 |
| 51660 | 144766241 | 144767474 | 181135 |
| 51661 | 144814425 | 144816705 | 265660, 203499, 180921 |
| 51662 | 144896712 | 144898728 | 179950, 180900 |
| 51663 | 144906012 | 144907221 | 179950 |
| 51664 | 144910064 | 144913412 | 179950 |
| 51665 | 144914686 | 144919186 | 255343, 185189 |
| 51666 | 144921857 | 144923497 | 185189 |
| 51667 | 144952534 | 144953068 | 227184 |
| 51668 | 144973272 | 144974961 | |
| 51669 | 145010450 | 145012539 | 178209 |
| 51670 | 145016134 | 145018592 | 178209 |
| 51671 | 145026094 | 145027452 | 178209 |
| 51672 | 145030425 | 145031572 | 178209 |
| 51673 | 145043118 | 145048020 | 178209 |
| 51674 | 145048832 | 145049620 | 178209 |
| 51675 | 145050189 | 145051715 | 178685, 178209 |
| 51676 | 145059577 | 145061480 | 178685 |
| 51677 | 145063992 | 145066088 | 178719, 178685 |
| 51678 | 145076847 | 145077963 | 178685 |
| 51679 | 145114670 | 145116390 | 178814 |
| 51680 | 145117658 | 145119021 | 178814 |
| 51681 | 145132551 | 145134588 | 178896, 255224 |
| 51682 | 145136690 | 145138422 | 197858 |
| 51683 | 145149632 | 145151406 | 179091 |
| 51684 | 145157672 | 145160462 | 179632, 179526 |
| 51685 | 145514350 | 145516409 | 185122, 170727 |
| 51686 | 145549411 | 145551162 | 185000 |
| 51687 | 145581133 | 145583283 | 182325, 185803 |
| 51688 | 145596674 | 145598721 | 173137 |
| 51689 | 145633792 | 145635635 | 272115, 147804, 071894 |
| 51690 | 145652641 | 145655984 | 160949, 160948 |
| 51691 | 145669565 | 145670705 | 160949 |
| 51692 | 145680849 | 145683821 | 187954 |
| 51693 | 145686820 | 145689081 | 187954 |
| 51694 | 145690031 | 145691215 | 187954, 254578 |
| 51695 | 145691573 | 145692690 | 167702 |
| 51696 | 145702722 | 145704614 | 160972 |
| 51697 | 145726078 | 145730851 | 167701, 160972, 255182 |
| 51698 | 145732710 | 145735524 | 167700 |
| 51699 | 145743068 | 145744162 | 160959, 160957 |
| 51700 | 145747179 | 145748957 | 254402, 160959 |
| 51701 | 145753756 | 145755164 | 147799, 213563 |
| 51702 | 145910690 | 145912152 | 147799 |
| 51703 | 145979914 | 145981777 | 198169 |
| 51704 | 146011562 | 146013553 | 196378 |
| 51705 | 146016614 | 146018891 | 161016 |
| 51706 | 146023639 | 146025294 | 197363 |
| 51707 | 146051954 | 146053832 | 147789 |
| 51708 | 146077356 | 146079302 | 263640, 170619, 196150 |
| 51709 | 146125424 | 146128778 | 196150 |
| 51710 | 146175485 | 146176666 | 170631 |
| 51711 | 146227660 | 146229315 | 255559, 196922 |
| 51712 | 146277168 | 146277535 | |
| 51713 | 146277601 | 146278878 | 182307 |

[0577] The locations of ODSCs on Chromosome 9 are shown in Table 51.

TABLE 51
ODSC Locations on Chromosome 9

| SEQ ID NO. | Start | End | Overlapping Gene(s) |
|---|---|---|---|
| 51714 | 463634 | 464365 | 107099, 227155 |
| 51715 | 489027 | 490094 | 107104, 228115, 227155 |
| 51716 | 682175 | 688135 | 227914, 107104 |
| 51717 | 692770 | 698825 | 107104 |
| 51718 | 703884 | 704660 | 107104 |
| 51719 | 705442 | 707829 | 107104 |
| 51720 | 708017 | 710686 | 107104 |
| 51721 | 737681 | 739554 | 107104 |
| 51722 | 742700 | 743456 | 107104 |
| 51723 | 744399 | 745577 | 107104 |
| 51724 | 745679 | 746331 | 107104 |
| 51725 | 755639 | 756483 | |
| 51726 | 761439 | 761902 | |
| 51727 | 1172904 | 1173799 | |
| 51728 | 1200685 | 1201924 | |
| 51729 | 1232189 | 1233005 | |
| 51730 | 1978884 | 1980868 | |
| 51731 | 2013845 | 2019070 | 080503 |
| 51732 | 2025213 | 2025997 | 080503 |
| 51733 | 2414436 | 2414956 | |
| 51734 | 2427059 | 2428148 | 236404 |
| 51735 | 2465701 | 2467367 | 236404 |
| 51736 | 2559223 | 2559935 | 236404 |
| 51737 | 2568151 | 2569162 | 236404 |
| 51738 | 2570286 | 2571452 | 236404 |
| 51739 | 2602721 | 2603105 | 236404 |
| 51740 | 2621292 | 2624520 | 147852, 236404 |
| 51741 | 2720150 | 2720819 | 080608, 168263 |
| 51742 | 2727643 | 2728678 | 168263, 080608 |
| 51743 | 2802450 | 2802967 | 080608 |
| 51744 | 2808901 | 2811141 | 080608 |
| 51745 | 2842803 | 2845282 | 080608 |
| 51746 | 3359275 | 3360762 | 080298 |
| 51747 | 3508284 | 3509466 | 080298 |
| 51748 | 3525093 | 3528105 | 232104, 080298 |
| 51749 | 3959934 | 3963851 | 107249 |
| 51750 | 3992814 | 3993299 | 107249 |
| 51751 | 4065997 | 4067063 | 107249 |
| 51752 | 4068067 | 4069028 | 107249 |
| 51753 | 4126200 | 4127207 | 107249 |
| 51754 | 4127894 | 4128373 | 107249 |
| 51755 | 4136124 | 4139235 | 107249 |
| 51756 | 4141220 | 4141789 | 107249 |
| 51757 | 4143498 | 4148639 | 107249 |
| 51758 | 4154395 | 4156907 | 107249 |
| 51759 | 4174566 | 4175796 | 107249 |
| 51760 | 4235597 | 4237033 | 107249 |
| 51761 | 4257940 | 4259977 | 107249 |
| 51762 | 4261548 | 4263839 | 107249 |
| 51763 | 4292245 | 4294524 | 107249 |
| 51764 | 4296158 | 4300509 | 228322, 107249 |
| 51765 | 4301092 | 4303368 | 107249, 228322 |
| 51766 | 4304559 | 4307578 | 228322, 107249 |
| 51767 | 4318244 | 4319492 | 107249 |
| 51768 | 4334250 | 4335064 | 107249 |
| 51769 | 4339087 | 4339771 | 107249 |
| 51770 | 4339894 | 4340687 | 107249 |
| 51771 | 4417496 | 4418592 | |
| 51772 | 4420214 | 4420879 | |
| 51773 | 4430444 | 4431380 | |
| 51774 | 4489188 | 4492512 | 106688 |
| 51775 | 4503955 | 4504715 | 106688 |
| 51776 | 4507140 | 4511556 | 106688 |
| 51777 | 4549126 | 4551604 | 106688 |
| 51778 | 4553876 | 4554545 | 106688, 106686 |
| 51779 | 4578964 | 4579553 | 106688, 106686 |
| 51780 | 4584297 | 4585126 | 106688, 106686 |
| 51781 | 4596061 | 4597009 | 106686 |
| 51782 | 4657734 | 4658268 | 106686 |
| 51783 | 4661187 | 4664329 | 205808, 106686 |
| 51784 | 4665301 | 4667214 | 106686 |
| 51785 | 4677199 | 4681870 | 106993, 273061 |
| 51786 | 4699853 | 4700468 | 106993 |
| 51787 | 4738823 | 4742566 | 147853 |
| 51788 | 4742949 | 4744007 | |
| 51789 | 4792276 | 4794334 | 120158 |
| 51790 | 4828552 | 4835870 | 120158 |
| 51791 | 4835914 | 4843690 | 120158 |
| 51792 | 4861788 | 4862552 | 120158 |
| 51793 | 4983824 | 4986708 | 096968 |
| 51794 | 5436013 | 5438536 | 107020 |
| 51795 | 5449546 | 5451348 | 120217 |
| 51796 | 5608663 | 5609396 | |
| 51797 | 5628152 | 5630583 | 107036 |
| 51798 | 5633204 | 5633581 | 107036 |
| 51799 | 5783958 | 5784408 | 099219 |
| 51800 | 5815359 | 5815856 | 099219 |
| 51801 | 5817826 | 5818397 | 099219 |
| 51802 | 5832011 | 5833312 | 099219 |
| 51803 | 5838594 | 5840214 | |
| 51804 | 5879506 | 5879989 | |
| 51805 | 5893756 | 5894382 | 183354, 120215 |
| 51806 | 6007333 | 6008877 | 263575, 183354 |
| 51807 | 6014729 | 6016051 | 137040 |
| 51808 | 6080089 | 6080753 | |
| 51809 | 6141930 | 6144043 | |
| 51810 | 6271353 | 6272811 | |
| 51811 | 6412579 | 6414747 | 147854 |
| 51812 | 6590696 | 6591251 | 178445 |
| 51813 | 6628731 | 6629217 | 178445 |
| 51814 | 6640018 | 6642363 | 178445 |
| 51815 | 6645578 | 6646929 | 236924, 178445 |
| 51816 | 6663919 | 6665454 | 236924 |
| 51817 | 6676154 | 6676944 | |
| 51818 | 6680135 | 6682478 | |
| 51819 | 6703257 | 6704561 | 229611 |
| 51820 | 6715115 | 6717176 | 225489 |
| 51821 | 6756766 | 6759819 | 107077 |
| 51822 | 6787345 | 6789272 | 107077 |
| 51823 | 6902341 | 6902932 | 224972, 107077 |
| 51824 | 6931151 | 6933045 | 107077, 224972 |
| 51825 | 6943371 | 6945354 | 107077, 224972 |
| 51826 | 7153598 | 7153966 | 107077 |
| 51827 | 7185457 | 7186040 | |
| 51828 | 7799110 | 7800158 | 137038 |
| 51829 | 8600867 | 8601754 | 153707 |
| 51830 | 8660165 | 8660827 | 153707 |
| 51831 | 8821487 | 8823986 | 153707 |
| 51832 | 8856862 | 8858343 | 225706, 153707 |
| 51833 | 8870509 | 8871418 | 153707 |
| 51834 | 8958019 | 8959162 | 153707, 234021 |
| 51835 | 8959822 | 8963232 | 234021, 153707 |
| 51836 | 9054505 | 9055077 | 153707 |
| 51837 | 9752531 | 9753221 | 153707 |
| 51838 | 10146239 | 10147260 | 153707 |
| 51839 | 10250802 | 10252678 | 153707 |
| 51840 | 12759683 | 12760207 | 235448 |
| 51841 | 12774511 | 12779191 | 153714, 235448 |
| 51842 | 12783092 | 12786511 | 153714, 235448 |
| 51843 | 12793888 | 12794867 | 153714, 235448 |
| 51844 | 12796748 | 12799218 | 153714, 235448 |
| 51845 | 12811377 | 12820051 | 235448, 153714 |
| 51846 | 13033120 | 13035318 | |
| 51847 | 13102635 | 13103177 | |
| 51848 | 13140755 | 13141966 | 107186 |
| 51849 | 13149412 | 13149936 | 107186 |
| 51850 | 13174534 | 13176512 | 107186 |
| 51851 | 13189475 | 13190656 | 107186 |
| 51852 | 13203105 | 13203913 | 107186 |
| 51853 | 13278547 | 13280119 | 234740, 107186 |
| 51854 | 14178647 | 14181641 | 147862 |
| 51855 | 14198795 | 14199636 | 147862 |
| 51856 | 14202907 | 14204282 | 234982, 147862 |
| 51857 | 14204821 | 14206780 | 234982, 147862 |
| 51858 | 14211349 | 14214422 | 147862 |
| 51859 | 14220976 | 14222683 | 147862 |
| 51860 | 14238018 | 14238988 | 147862 |
| 51861 | 14250793 | 14252131 | 147862 |
| 51862 | 14291975 | 14292773 | 147862 |
| 51863 | 14294473 | 14295612 | 147862 |
| 51864 | 14301627 | 14303215 | 147862 |
| 51865 | 14311895 | 14316800 | 147862 |
| 51866 | 14319977 | 14321486 | 225472, 147862 |
| 51867 | 14321532 | 14323434 | 225472, 147862 |
| 51868 | 14372705 | 14373285 | 147862 |
| 51869 | 14692553 | 14694055 | 175893 |
| 51870 | 15295427 | 15297257 | 155158 |
| 51871 | 15305969 | 15307699 | 155158 |
| 51872 | 15329665 | 15330936 | |
| 51873 | 15333134 | 15333953 | |
| 51874 | 15421990 | 15424280 | 164975 |
| 51875 | 15510108 | 15511568 | 164985 |
| 51876 | 15551983 | 15553261 | 164989 |
| 51877 | 15974866 | 15976238 | 164989 |
| 51878 | 16133573 | 16134409 | |
| 51879 | 16213600 | 16214497 | 205549 |
| 51880 | 16241215 | 16241758 | 205549 |
| 51881 | 16245637 | 16248527 | 205549 |
| 51882 | 16266619 | 16268447 | 205549 |
| 51883 | 16275535 | 16276917 | 205549 |
| 51884 | 16335355 | 16338736 | |
| 51885 | 16385558 | 16386848 | |
| 51886 | 16412283 | 16415569 | 173068 |
| 51887 | 16444869 | 16446689 | 173068 |
| 51888 | 16653476 | 16654333 | 173068 |
| 51889 | 17134788 | 17136128 | 044459 |
| 51890 | 17138357 | 17139086 | 044459 |
| 51891 | 17230349 | 17231251 | 044459 |
| 51892 | 17366890 | 17367466 | 044459 |
| 51893 | 17422933 | 17424041 | 044459 |
| 51894 | 17436222 | 17437404 | 044459 |
| 51895 | 18002358 | 18003732 | |
| 51896 | 18207984 | 18208643 | |
| 51897 | 18452005 | 18453000 | |
| 51898 | 18456269 | 18457255 | |
| 51899 | 18605643 | 18606301 | 178031 |
| 51900 | 19048408 | 19050449 | 155876 |
| 51901 | 19102088 | 19103734 | 147874 |
| 51902 | 19113564 | 19115354 | 147872 |
| 51903 | 19118559 | 19119789 | 147872 |
| 51904 | 19125756 | 19128467 | 147872 |
| 51905 | 19141930 | 19143496 | 147872 |
| 51906 | 19151274 | 19152642 | |
| 51907 | 19153213 | 19156953 | |
| 51908 | 19160827 | 19163309 | |
| 51909 | 19173382 | 19174738 | |
| 51910 | 19229675 | 19231956 | 137145 |
| 51911 | 19378975 | 19381227 | 137154 |
| 51912 | 19925831 | 19926621 | 261402 |
| 51913 | 20550698 | 20551805 | 171843 |
| 51914 | 20611669 | 20612517 | 171843 |
| 51915 | 20621615 | 20622693 | 171843 |
| 51916 | 20624523 | 20625237 | |
| 51917 | 20683886 | 20685754 | 227071, 188352 |
| 51918 | 20835323 | 20836282 | 188352 |
| 51919 | 21292833 | 21295824 | |
| 51920 | 21334295 | 21335985 | 198642 |
| 51921 | 21591564 | 21592714 | |
| 51922 | 21801564 | 21803931 | 264545, 099810 |
| 51923 | 21812416 | 21814588 | 264545, 099810 |
| 51924 | 21831548 | 21834057 | 264545, 099810 |
| 51925 | 21835605 | 21837441 | 264545, 099810 |
| 51926 | 21852660 | 21855896 | 264545, 099810 |
| 51927 | 21856172 | 21857261 | 264545, 099810 |
| 51928 | 21872144 | 21874376 | 264545, 099810 |
| 51929 | 21964953 | 21965951 | 264545 |
| 51930 | 21994038 | 21996126 | 266446, 240498, 147889, |
| | | | 264545 |
| 51931 | 22007983 | 22009913 | 147883, 264545, 240498 |
| 51932 | 22030215 | 22030694 | 264545, 240498 |
| 51933 | 22079420 | 22080877 | 240498 |
| 51934 | 22084095 | 22085262 | 240498 |
| 51935 | 22088302 | 22089279 | 240498 |
| 51936 | 22098382 | 22099594 | 240498 |
| 51937 | 22101885 | 22104819 | 240498 |
| 51938 | 22106495 | 22109534 | 240498 |
| 51939 | 22158883 | 22159415 | |
| 51940 | 22237597 | 22239397 | |
| 51941 | 22342539 | 22343150 | |
| 51942 | 22446461 | 22449448 | 176399 |
| 51943 | 22453574 | 22454388 | 176399 |
| 51944 | 22462789 | 22463865 | |
| 51945 | 22530936 | 22531503 | |
| 51946 | 22683072 | 22684666 | 234840 |
| 51947 | 23058232 | 23058657 | |
| 51948 | 23172943 | 23173652 | |
| 51949 | 23309001 | 23310152 | |
| 51950 | 23318958 | 23319589 | |
| 51951 | 23326040 | 23327773 | |
| 51952 | 23341315 | 23344118 | |
| 51953 | 23431331 | 23432253 | |
| 51954 | 23438345 | 23439072 | |
| 51955 | 23537149 | 23537739 | |
| 51956 | 25207289 | 25207887 | |
| 51957 | 25676847 | 25679073 | 198680 |
| 51958 | 26869766 | 26870783 | 120159 |
| 51959 | 26891272 | 26893662 | 120159 |
| 51960 | 26946084 | 26948540 | 096872, 137055 |
| 51961 | 26955065 | 26957166 | 234676, 096872 |
| 51962 | 27379536 | 27380843 | 120162 |
| 51963 | 27436064 | 27436947 | 120162 |
| 51964 | 27462268 | 27462980 | 120162 |
| 51965 | 27527979 | 27530071 | 120162 |
| 51966 | 27536889 | 27537560 | |
| 51967 | 27538754 | 27541433 | |
| 51968 | 27565885 | 27566628 | 147894 |
| 51969 | 27571923 | 27574624 | 147894 |
| 51970 | 27851667 | 27852313 | |
| 51971 | 27864642 | 27865938 | |
| 51972 | 27869507 | 27871257 | |
| 51973 | 28779194 | 28779746 | |
| 51974 | 30628868 | 30629627 | |
| 51975 | 31136295 | 31138683 | |
| 51976 | 31303597 | 31305040 | |
| 51977 | 31824811 | 31825429 | |
| 51978 | 32304357 | 32305359 | |
| 51979 | 32383765 | 32385523 | 122729 |
| 51980 | 32393806 | 32397075 | 122729 |
| 51981 | 32401458 | 32401876 | 122729 |
| 51982 | 32425385 | 32427937 | 122729 |
| 51983 | 32486673 | 32487898 | 107201 |
| 51984 | 32525141 | 32526905 | 107201 |
| 51985 | 32550638 | 32552912 | 235453, 197579 |
| 51986 | 32572166 | 32573546 | 165264 |
| 51987 | 32741740 | 32742320 | |
| 51988 | 32954462 | 32955451 | |
| 51989 | 33000764 | 33001987 | 137074 |
| 51990 | 33024044 | 33026295 | 086061, 137074 |
| 51991 | 33029103 | 33030156 | 086061 |
| 51992 | 33043669 | 33045227 | 122692 |
| 51993 | 33075459 | 33077395 | 122692 |
| 51994 | 33081116 | 33081833 | |
| 51995 | 33101091 | 33102742 | |
| 51996 | 33106720 | 33107678 | 086062 |
| 51997 | 33139399 | 33140594 | 086062 |
| 51998 | 33156691 | 33157346 | 086062 |
| 51999 | 33158220 | 33168489 | 233554, 086062 |
| 52000 | 33170354 | 33173767 | 233554 |
| 52001 | 33185600 | 33187503 | |
| 52002 | 33263407 | 33265844 | 086065, 107262 |
| 52003 | 33289180 | 33291832 | 086102 |
| 52004 | 33293535 | 33294814 | 086102 |
| 52005 | 33300312 | 33301531 | 086102 |
| 52006 | 33304932 | 33306721 | 086102 |
| 52007 | 33320263 | 33321375 | 086102 |
| 52008 | 33327985 | 33331050 | 086102 |
| 52009 | 33391193 | 33391988 | 165269 |
| 52010 | 33415417 | 33416100 | |
| 52011 | 33424980 | 33425605 | |
| 52012 | 33442778 | 33443948 | 165272 |
| 52013 | 33445252 | 33448579 | 165272 |
| 52014 | 33458484 | 33459073 | |
| 52015 | 33473064 | 33474326 | 165271 |
| 52016 | 33510585 | 33511466 | 226823 |
| 52017 | 33813564 | 33819508 | 107341, 235481 |
| 52018 | 33931961 | 33932475 | 137073 |
| 52019 | 34035682 | 34036134 | 137073 |
| 52020 | 34047677 | 34050008 | 222259, 137073 |
| 52021 | 34072309 | 34073604 | |
| 52022 | 34125415 | 34127633 | 198876 |
| 52023 | 34178110 | 34181097 | 165006 |
| 52024 | 34185053 | 34187157 | 165006 |
| 52025 | 34226219 | 34227076 | 165006 |
| 52026 | 34329171 | 34330360 | 164978, 186638 |
| 52027 | 34343060 | 34344069 | 164978 |
| 52028 | 34352149 | 34352749 | |
| 52029 | 34374831 | 34377661 | 164976 |
| 52030 | 34380365 | 34381153 | 164972 |
| 52031 | 34403438 | 34404261 | 164970 |
| 52032 | 34457447 | 34458731 | 164970, 122735 |
| 52033 | 34543824 | 34544706 | |
| 52034 | 34606498 | 34607533 | |
| 52035 | 34611063 | 34613299 | 164967 |
| 52036 | 34630058 | 34631331 | |
| 52037 | 34636574 | 34638784 | 213930, 147955 |
| 52038 | 34641244 | 34641883 | 213930 |
| 52039 | 34644391 | 34645351 | 213930 |
| 52040 | 34646061 | 34648353 | 258728, 213930 |
| 52041 | 34650886 | 34652559 | 213930, 258728, 137070 |
| 52042 | 34659366 | 34660081 | 137070 |
| 52043 | 34664205 | 34666700 | 230074, 261215, 187186 |
| 52044 | 34688475 | 34689080 | |
| 52045 | 34701125 | 34702659 | |
| 52046 | 34717843 | 34718768 | |
| 52047 | 34961711 | 34962232 | 122733 |
| 52048 | 34988292 | 34990988 | 137094 |
| 52049 | 34991591 | 34996157 | 137094 |
| 52050 | 34996382 | 34997952 | 137094 |
| 52051 | 34998017 | 34998447 | 137094 |
| 52052 | 35025971 | 35027925 | |
| 52053 | 35041670 | 35043500 | 269510, 174038 |
| 52054 | 35070732 | 35073273 | 165280 |
| 52055 | 35079776 | 35080684 | 221829 |
| 52056 | 35095585 | 35097011 | 234181, 165282 |
| 52057 | 35101837 | 35103744 | 165283 |
| 52058 | 35110042 | 35113269 | 005238 |
| 52059 | 35114340 | 35116509 | 005238 |
| 52060 | 35161596 | 35163299 | 198722 |
| 52061 | 35229352 | 35230298 | 198722 |
| 52062 | 35257733 | 35259346 | 198722 |
| 52063 | 35470184 | 35471625 | 179766 |
| 52064 | 35488677 | 35493328 | 198853 |
| 52065 | 35509283 | 35513232 | 198853 |
| 52066 | 35515069 | 35527990 | 198853 |
| 52067 | 35529273 | 35529901 | 198853 |
| 52068 | 35603262 | 35606166 | 107140 |
| 52069 | 35646095 | 35647610 | 227933, 137101 |
| 52070 | 35656923 | 35659444 | 159884, 269900, 137135 |
| 52071 | 35668973 | 35670124 | 137135 |
| 52072 | 35688562 | 35689198 | 198467 |
| 52073 | 35690302 | 35691612 | 198467 |
| 52074 | 35727216 | 35729250 | 137076 |
| 52075 | 35730613 | 35733473 | 107175, 137076 |
| 52076 | 35746347 | 35747271 | 070610 |
| 52077 | 35747903 | 35750813 | 107185, 070610 |
| 52078 | 35756236 | 35758105 | 228843, 215183, 107185 |
| 52079 | 35790144 | 35800225 | 159899, 227388 |
| 52080 | 35801146 | 35801779 | 159899 |
| 52081 | 35811923 | 35812559 | 137098 |
| 52082 | 35813353 | 35815639 | 137103, 137133 |
| 52083 | 35828471 | 35830226 | 204930, 137103 |
| 52084 | 35833806 | 35836345 | 137103 |
| 52085 | 35905237 | 35909408 | 196196 |
| 52086 | 35910610 | 35911459 | 235387 |
| 52087 | 35923001 | 35925758 | |
| 52088 | 35929028 | 35929709 | |
| 52089 | 36008669 | 36009906 | |
| 52090 | 36036436 | 36037949 | 122707 |
| 52091 | 36090160 | 36092360 | 122707 |
| 52092 | 36092997 | 36093911 | 122707 |
| 52093 | 36101412 | 36103743 | 122707 |
| 52094 | 36166247 | 36167001 | |
| 52095 | 36189761 | 36192059 | 122705 |
| 52096 | 36257787 | 36259486 | 122705, 159921 |
| 52097 | 36319105 | 36320732 | |
| 52098 | 36331226 | 36332411 | |
| 52099 | 36399702 | 36401745 | 137075 |
| 52100 | 36401849 | 36402408 | 137075 |
| 52101 | 36419457 | 36420463 | 137075 |
| 52102 | 36486389 | 36488861 | 137075 |
| 52103 | 36493513 | 36494391 | |
| 52104 | 36572058 | 36573367 | 165304 |
| 52105 | 37079050 | 37080799 | 233137, 260100 |
| 52106 | 37119764 | 37121399 | 147905 |
| 52107 | 37414778 | 37415896 | |
| 52108 | 37416702 | 37419358 | |
| 52109 | 37421906 | 37423568 | 137106 |
| 52110 | 37429218 | 37430276 | 137106 |
| 52111 | 37430769 | 37431538 | 137106 |
| 52112 | 37464155 | 37467236 | 168795 |
| 52113 | 37471764 | 37473287 | |
| 52114 | 37485014 | 37487612 | 137054 |
| 52115 | 37507912 | 37509664 | 234160 |
| 52116 | 37575564 | 37576979 | 147912, 256966 |
| 52117 | 37591403 | 37592946 | 175768, 256966, 255872 |
| 52118 | 37602672 | 37603378 | 255872 |
| 52119 | 37753371 | 37754806 | 165275, 255872 |
| 52120 | 37784120 | 37785717 | 255872, 107371 |
| 52121 | 37800080 | 37802112 | 122741, 107371, 255872 |
| 52122 | 37902667 | 37905161 | 122696, 255872 |
| 52123 | 37907949 | 37909814 | 255872 |
| 52124 | 37913411 | 37914734 | 255872 |
| 52125 | 37921994 | 37923290 | 255872, 107338 |
| 52126 | 37951116 | 37955269 | 255872, 107338 |
| 52127 | 37963890 | 37964951 | 255872, 107338 |
| 52128 | 37966327 | 37970197 | 255872, 107338 |
| 52129 | 38007455 | 38010347 | 255872, 107338 |
| 52130 | 38015011 | 38019951 | 255872, 107338 |
| 52131 | 38023479 | 38024663 | 255872, 107338 |
| 52132 | 38025398 | 38027180 | 255872, 107338 |
| 52133 | 38031494 | 38033129 | 255872, 107338 |
| 52134 | 38035168 | 38037764 | 255872, 107338 |
| 52135 | 38045741 | 38049554 | 255872, 107338 |
| 52136 | 38057366 | 38060460 | 255872, 107338 |
| 52137 | 38062317 | 38063756 | 255872, 107338 |
| 52138 | 38065401 | 38070130 | 255872, 107338 |
| 52139 | 38226248 | 38228237 | |
| 52140 | 38380439 | 38383561 | |
| 52141 | 38385778 | 38387299 | |
| 52142 | 38388015 | 38389878 | |
| 52143 | 38392011 | 38393914 | 137124 |
| 52144 | 38434868 | 38435323 | |
| 52145 | 38436468 | 38438493 | |
| 52146 | 38442132 | 38444133 | |
| 52147 | 38619714 | 38621459 | 204860, 180071 |
| 52148 | 38682153 | 38683198 | |
| 52149 | 38713305 | 38714037 | |
| 52150 | 68455223 | 68455928 | 215548 |
| 52151 | 71115616 | 71115946 | 154330 |
| 52152 | 71123311 | 71123848 | 154330 |
| 52153 | 71130286 | 71130843 | 154330 |
| 52154 | 71145444 | 71146181 | 154330 |
| 52155 | 71394106 | 71396098 | 187866, 107242 |
| 52156 | 71649947 | 71652100 | 165060 |
| 52157 | 71693345 | 71694065 | 165060 |
| 52158 | 71708393 | 71709053 | 165060 |
| 52159 | 71735145 | 71738102 | 119139 |
| 52160 | 71768514 | 71769553 | 119139 |
| 52161 | 71770180 | 71770857 | 119139 |
| 52162 | 71783746 | 71784280 | 119139 |
| 52163 | 71788047 | 71796624 | 119139 |
| 52164 | 71991278 | 71991989 | 135063 |
| 52165 | 72083277 | 72083662 | 107282 |
| 52166 | 72084723 | 72086849 | 107282 |
| 52167 | 72188389 | 72189748 | 107282 |
| 52168 | 72194750 | 72196383 | 107282 |
| 52169 | 72247575 | 72248116 | 107282 |
| 52170 | 72271193 | 72273386 | 107282 |
| 52171 | 72285796 | 72288607 | 261447, 107282 |
| 52172 | 72362667 | 72364471 | 188647 |
| 52173 | 72373267 | 72375742 | 188647 |
| 52174 | 72472766 | 72473251 | 204711 |
| 52175 | 72500220 | 72501088 | 204711 |
| 52176 | 72509168 | 72510952 | 204711 |
| 52177 | 72560921 | 72562642 | |
| 52178 | 72872429 | 72875032 | 198887, 268364 |
| 52179 | 73021677 | 73022505 | 119138 |
| 52180 | 73024828 | 73030548 | 119138 |
| 52181 | 73032824 | 73037112 | |
| 52182 | 73084593 | 73086629 | |
| 52183 | 73089299 | 73097099 | |
| 52184 | 73098423 | 73101074 | |
| 52185 | 73539595 | 73540396 | 083067 |
| 52186 | 73657332 | 73657993 | 083067 |
| 52187 | 73660713 | 73661080 | 083067 |
| 52188 | 73711135 | 73712172 | 083067 |
| 52189 | 73893990 | 73894929 | 083067 |
| 52190 | 74202012 | 74204049 | |
| 52191 | 74223683 | 74224687 | |
| 52192 | 74242375 | 74242935 | |
| 52193 | 74292069 | 74297314 | |
| 52194 | 74307128 | 74307671 | 135048 |
| 52195 | 74330903 | 74331806 | 135048 |
| 52196 | 74340741 | 74341954 | 135048 |
| 52197 | 74373037 | 74374831 | 135048 |
| 52198 | 74381295 | 74385615 | 135048 |
| 52199 | 74392922 | 74393773 | 135048 |
| 52200 | 74407427 | 74409457 | 135048 |
| 52201 | 74524981 | 74527554 | 155621, 107362 |
| 52202 | 74655958 | 74659646 | |
| 52203 | 74742219 | 74749337 | 119125 |
| 52204 | 74755004 | 74756121 | 119125 |
| 52205 | 74763235 | 74766540 | 119125 |
| 52206 | 74768825 | 74771879 | 119125 |
| 52207 | 74828830 | 74829297 | 119125 |
| 52208 | 74908817 | 74910957 | |
| 52209 | 74912198 | 74913190 | |
| 52210 | 74913838 | 74914542 | |
| 52211 | 74976899 | 74981990 | 107372 |
| 52212 | 75010983 | 75012140 | |
| 52213 | 75075075 | 75076892 | |
| 52214 | 75087789 | 75089681 | |
| 52215 | 75092850 | 75093690 | |
| 52216 | 75168682 | 75170026 | 165091 |
| 52217 | 75171668 | 75173470 | 165091 |
| 52218 | 75191692 | 75193915 | 165091 |
| 52219 | 75201042 | 75202093 | 165091 |
| 52220 | 75471903 | 75474873 | |
| 52221 | 75540122 | 75541193 | 165092 |
| 52222 | 75548951 | 75550034 | 165092 |
| 52223 | 75561702 | 75568874 | 165092 |
| 52224 | 75593242 | 75594143 | 165092 |
| 52225 | 75596436 | 75600562 | 165092 |
| 52226 | 75611010 | 75613558 | 165092 |
| 52227 | 75637541 | 75638632 | 165092 |
| 52228 | 75652507 | 75654146 | 165092 |
| 52229 | 75665032 | 75667864 | 165092, 228024 |
| 52230 | 75667942 | 75669390 | 165092, 228024 |
| 52231 | 75688113 | 75690100 | 165092 |
| 52232 | 75698148 | 75698835 | |
| 52233 | 75764378 | 75764796 | |
| 52234 | 75885961 | 75886474 | |
| 52235 | 76160409 | 76160934 | |
| 52236 | 76298539 | 76300037 | |
| 52237 | 76639959 | 76641268 | |
| 52238 | 76722521 | 76723069 | |
| 52239 | 77375295 | 77375668 | 119121 |
| 52240 | 77566496 | 77568161 | 203321, 135045 |
| 52241 | 77641888 | 77643869 | 156017 |
| 52242 | 77701489 | 77704407 | 134996, 106733 |
| 52243 | 77796636 | 77797122 | |
| 52244 | 77844352 | 77845882 | |
| 52245 | 77850249 | 77851076 | |
| 52246 | 77882480 | 77883438 | |
| 52247 | 78504587 | 78507648 | 099139 |
| 52248 | 78518768 | 78519910 | 099139 |
| 52249 | 78522110 | 78523692 | 099139 |
| 52250 | 78565591 | 78566533 | 099139 |
| 52251 | 78567988 | 78568724 | 099139 |
| 52252 | 78589224 | 78589653 | 099139 |
| 52253 | 78611403 | 78612442 | 099139 |
| 52254 | 78712213 | 78713013 | 099139 |
| 52255 | 78870789 | 78871509 | 099139 |
| 52256 | 78959974 | 78960486 | 099139 |
| 52257 | 78979951 | 78980379 | |
| 52258 | 78986840 | 78990854 | |
| 52259 | 79008323 | 79010434 | 135002 |
| 52260 | 79017981 | 79019514 | |
| 52261 | 79186458 | 79186959 | 241781 |
| 52262 | 79785774 | 79786664 | |
| 52263 | 79791563 | 79794320 | 197969, 232998 |
| 52264 | 80081510 | 80082520 | 231373, 156049 |
| 52265 | 80127619 | 80128315 | 231373, 156049 |
| 52266 | 80161223 | 80161812 | 156049 |
| 52267 | 80263024 | 80265131 | 156049 |
| 52268 | 80278452 | 80279230 | |
| 52269 | 80292809 | 80293902 | |
| 52270 | 80294070 | 80295466 | |
| 52271 | 80322145 | 80324065 | |
| 52272 | 80421584 | 80424821 | 156052 |
| 52273 | 80576256 | 80576898 | 156052 |
| 52274 | 80600715 | 80601406 | 156052 |
| 52275 | 80618714 | 80620075 | 156052 |
| 52276 | 80637737 | 80638556 | 156052 |
| 52277 | 80644993 | 80648191 | 156052 |
| 52278 | 80748679 | 80749204 | |
| 52279 | 80836149 | 80836806 | |
| 52280 | 80850159 | 80851802 | 148019 |
| 52281 | 80893267 | 80894060 | 148019 |
| 52282 | 80910832 | 80913653 | 135069 |
| 52283 | 81021568 | 81022393 | |
| 52284 | 82186348 | 82186992 | 106829 |
| 52285 | 82187030 | 82189188 | 106829 |
| 52286 | 82285435 | 82286061 | 106829 |
| 52287 | 83167757 | 83168291 | |
| 52288 | 83740273 | 83741346 | |
| 52289 | 83920529 | 83921463 | |
| 52290 | 83929035 | 83930123 | |
| 52291 | 84003710 | 84005991 | |
| 52292 | 84008534 | 84010301 | |
| 52293 | 84136543 | 84137585 | |
| 52294 | 84137658 | 84138715 | |
| 52295 | 84144236 | 84145654 | |
| 52296 | 84148709 | 84152770 | |
| 52297 | 84164248 | 84165518 | |
| 52298 | 84172872 | 84175472 | |
| 52299 | 84176895 | 84179022 | |
| 52300 | 84179295 | 84180858 | |
| 52301 | 84202032 | 84204655 | 196781 |
| 52302 | 84241259 | 84241908 | 196781 |
| 52303 | 84243021 | 84244850 | 196781 |
| 52304 | 84270928 | 84272281 | 196781 |
| 52305 | 84300801 | 84303380 | 196781 |
| 52306 | 84304224 | 84305728 | 233926 |
| 52307 | 84351909 | 84354026 | 233926 |
| 52308 | 84402239 | 84403477 | |
| 52309 | 84434691 | 84435639 | |
| 52310 | 84457432 | 84458170 | |
| 52311 | 84634641 | 84637940 | |
| 52312 | 84928304 | 84929209 | 228430 |
| 52313 | 84946575 | 84948040 | 228430 |
| 52314 | 84982751 | 84985309 | 228430 |
| 52315 | 85024883 | 85026582 | 228430 |
| 52316 | 85069374 | 85070648 | 232749, 228430 |
| 52317 | 85103347 | 85104226 | 228430 |
| 52318 | 85173227 | 85174661 | 228430 |
| 52319 | 85175210 | 85175824 | 228430 |
| 52320 | 85212104 | 85213299 | |
| 52321 | 85219582 | 85220807 | |
| 52322 | 85221164 | 85222144 | |
| 52323 | 85549458 | 85551288 | |
| 52324 | 85676178 | 85678196 | 165105 |
| 52325 | 85734377 | 85735742 | |
| 52326 | 85744454 | 85749575 | |
| 52327 | 85761104 | 85761693 | |
| 52328 | 85769069 | 85770209 | |
| 52329 | 85834065 | 85835079 | 229109 |
| 52330 | 86046544 | 86047748 | 172159 |
| 52331 | 86153082 | 86154001 | 172159 |
| 52332 | 86226399 | 86227137 | |
| 52333 | 86235593 | 86236646 | |
| 52334 | 86237281 | 86239427 | 148057 |
| 52335 | 86244394 | 86245382 | 148057 |
| 52336 | 86252275 | 86252663 | 148057 |
| 52337 | 86321502 | 86324354 | 254473, 135018 |
| 52338 | 86500445 | 86500885 | 165115 |
| 52339 | 86535128 | 86536894 | 165115 |
| 52340 | 86548512 | 86550506 | |
| 52341 | 86570221 | 86572511 | 165118 |
| 52342 | 86576968 | 86577845 | |
| 52343 | 86593400 | 86596793 | 178966, 165119 |
| 52344 | 86601138 | 86602687 | 178966 |
| 52345 | 86607141 | 86607982 | 202523, 178966 |
| 52346 | 86911003 | 86911605 | 197506 |
| 52347 | 86986311 | 86987045 | |
| 52348 | 87096685 | 87097289 | |
| 52349 | 87127023 | 87128958 | |
| 52350 | 88355652 | 88357895 | 135049 |
| 52351 | 88555152 | 88557395 | 135040 |
| 52352 | 88677665 | 88678699 | 135052 |
| 52353 | 88708587 | 88709656 | 135052 |
| 52354 | 88713706 | 88715291 | 135052 |
| 52355 | 88721729 | 88722266 | |
| 52356 | 88742128 | 88742863 | |
| 52357 | 88822471 | 88822970 | |
| 52358 | 88896166 | 88898733 | 135070 |
| 52359 | 88954343 | 88957482 | 083223 |
| 52360 | 88963033 | 88965994 | 083223 |
| 52361 | 88966325 | 88970453 | 083223 |
| 52362 | 88983337 | 88985458 | |
| 52363 | 89011317 | 89012842 | |
| 52364 | 89018605 | 89023479 | |
| 52365 | 89067001 | 89067688 | |
| 52366 | 89561179 | 89562815 | 180447 |
| 52367 | 89763197 | 89763534 | |
| 52368 | 89989535 | 89990982 | |
| 52369 | 89995961 | 89996565 | |
| 52370 | 90010865 | 90011540 | |
| 52371 | 90037633 | 90039879 | 228373 |
| 52372 | 90055662 | 90056894 | |
| 52373 | 90094562 | 90095323 | |
| 52374 | 90112233 | 90115364 | 196730 |
| 52375 | 90120464 | 90121691 | 196730 |
| 52376 | 90128976 | 90129439 | 196730 |
| 52377 | 90178792 | 90180105 | 196730 |
| 52378 | 90183824 | 90185743 | 196730 |
| 52379 | 90206742 | 90208246 | 196730 |
| 52380 | 90227995 | 90229200 | 196730 |
| 52381 | 90255324 | 90255825 | 196730 |
| 52382 | 90299346 | 90300012 | 196730 |
| 52383 | 90318258 | 90319922 | 196730 |
| 52384 | 90326096 | 90329394 | |
| 52385 | 90329684 | 90330186 | |
| 52386 | 90340516 | 90342105 | 135047 |
| 52387 | 90407642 | 90408709 | |
| 52388 | 90569032 | 90569736 | |
| 52389 | 90574788 | 90576083 | |
| 52390 | 90588798 | 90590052 | 156345 |
| 52391 | 90690693 | 90692515 | |
| 52392 | 90704897 | 90705861 | |
| 52393 | 91001990 | 91004524 | 106723 |
| 52394 | 91532170 | 91532718 | |
| 52395 | 91750359 | 91751055 | 148082 |
| 52396 | 91794366 | 91795818 | |
| 52397 | 91924595 | 91926336 | 123975 |
| 52398 | 91932154 | 91934197 | 187742 |
| 52399 | 91938132 | 91938865 | 187742 |
| 52400 | 91965886 | 91966741 | 187742 |
| 52401 | 92001552 | 92002435 | 187764 |
| 52402 | 92002929 | 92003552 | 187764 |
| 52403 | 92134062 | 92134885 | |
| 52404 | 92170467 | 92172319 | |
| 52405 | 92212948 | 92214485 | |
| 52406 | 92217808 | 92222265 | 130222 |
| 52407 | 92262786 | 92264425 | |
| 52408 | 92268862 | 92269607 | |
| 52409 | 92270064 | 92271436 | |
| 52410 | 92276424 | 92277570 | |
| 52411 | 92282613 | 92283385 | |
| 52412 | 92284175 | 92284783 | |
| 52413 | 92290891 | 92291615 | |
| 52414 | 92300387 | 92302382 | |
| 52415 | 92311537 | 92312571 | |
| 52416 | 92314260 | 92315253 | |
| 52417 | 92458147 | 92459128 | |
| 52418 | 92479442 | 92480717 | |
| 52419 | 92494863 | 92495733 | |
| 52420 | 92685996 | 92686759 | |
| 52421 | 92755732 | 92758782 | |
| 52422 | 92761475 | 92763778 | |
| 52423 | 92775034 | 92775643 | |
| 52424 | 92787609 | 92788560 | 227555 |
| 52425 | 92817070 | 92817485 | |
| 52426 | 92826202 | 92828072 | |
| 52427 | 92869256 | 92869822 | |
| 52428 | 92931779 | 92932404 | |
| 52429 | 93093879 | 93095464 | 231107 |
| 52430 | 93204129 | 93204560 | |
| 52431 | 93220501 | 93221404 | |
| 52432 | 93370017 | 93370961 | |
| 52433 | 93683406 | 93683962 | |
| 52434 | 93687985 | 93688464 | |
| 52435 | 93752609 | 93755678 | |
| 52436 | 93761530 | 93764542 | 260454 |
| 52437 | 93799229 | 93801004 | |
| 52438 | 93821993 | 93823730 | |
| 52439 | 93833762 | 93834863 | |
| 52440 | 93862139 | 93863919 | |
| 52441 | 93944579 | 93945085 | 229694 |
| 52442 | 93954462 | 93957194 | |
| 52443 | 93957214 | 93960863 | |
| 52444 | 93969418 | 93972085 | 273381 |
| 52445 | 93972318 | 93975141 | 273381 |
| 52446 | 94065037 | 94065453 | 148090 |
| 52447 | 94122857 | 94124654 | 148090 |
| 52448 | 94157209 | 94157973 | |
| 52449 | 94178592 | 94187862 | 165030 |
| 52450 | 94876879 | 94878337 | 090054 |
| 52451 | 94909363 | 94910426 | 225511 |
| 52452 | 94959033 | 94959682 | |
| 52453 | 95003951 | 95005565 | 196305 |
| 52454 | 95054505 | 95057221 | 239183, 196305 |
| 52455 | 95086594 | 95088684 | 188312, 198000 |
| 52456 | 95146789 | 95149272 | 188312, 106809 |
| 52457 | 95229315 | 95229944 | 188312, 106819 |
| 52458 | 95268229 | 95269698 | 106823, 188312 |
| 52459 | 95296957 | 95301339 | 225551, 106823, 188312 |
| 52460 | 95378059 | 95379847 | 188312, 127080 |
| 52461 | 95386890 | 95387417 | 127080 |
| 52462 | 95431196 | 95433519 | 127080 |
| 52463 | 95468546 | 95469106 | |
| 52464 | 95526185 | 95528168 | 185963 |
| 52465 | 95811264 | 95812378 | |
| 52466 | 95820325 | 95821736 | 157303 |
| 52467 | 95822892 | 95823761 | 157303 |
| 52468 | 95853659 | 95854409 | |
| 52469 | 95857053 | 95859751 | 223446, 165233 |
| 52470 | 95877895 | 95879426 | |
| 52471 | 95881556 | 95883431 | |
| 52472 | 95894530 | 95897627 | 131669 |
| 52473 | 96074979 | 96075780 | 165238 |
| 52474 | 96212815 | 96216279 | 048828, 188938 |
| 52475 | 96228870 | 96230157 | 048828 |
| 52476 | 96328525 | 96330134 | |
| 52477 | 96337592 | 96340671 | 197724 |
| 52478 | 96792382 | 96793864 | 158079 |
| 52479 | 96927836 | 96930292 | 269946 |
| 52480 | 97021358 | 97022337 | 175787 |
| 52481 | 97316302 | 97317596 | 231806 |
| 52482 | 97370236 | 97371284 | 165140 |
| 52483 | 97393677 | 97394402 | 165140 |
| 52484 | 97400455 | 97402903 | 165140 |
| 52485 | 97428024 | 97430321 | |
| 52486 | 97430790 | 97432017 | |
| 52487 | 97454627 | 97455524 | |
| 52488 | 97488521 | 97489932 | 148120 |
| 52489 | 97505586 | 97506367 | 148120 |
| 52490 | 97542663 | 97543287 | 148120 |
| 52491 | 97545034 | 97546432 | 148120 |
| 52492 | 97574600 | 97575052 | 148120 |
| 52493 | 97589597 | 97590656 | 148120 |
| 52494 | 97595995 | 97596779 | 148120 |
| 52495 | 97616058 | 97617193 | 148120 |
| 52496 | 97622820 | 97625378 | 148120 |
| 52497 | 97628472 | 97632294 | 148120 |
| 52498 | 97661968 | 97663652 | 236095, 148120 |
| 52499 | 97674358 | 97677523 | 148120 |
| 52500 | 97683585 | 97685859 | 148120 |
| 52501 | 97699373 | 97700323 | 148120 |
| 52502 | 97702698 | 97704763 | 148120 |
| 52503 | 97707049 | 97709092 | 148120 |
| 52504 | 97712970 | 97713933 | 148120 |
| 52505 | 97733060 | 97739083 | 148120 |
| 52506 | 97739217 | 97740308 | 148120 |
| 52507 | 97745572 | 97746315 | 148120 |
| 52508 | 97751818 | 97752948 | 148120 |
| 52509 | 97753151 | 97759450 | 148120 |
| 52510 | 97764890 | 97772175 | 148120 |
| 52511 | 97779696 | 97781699 | 148120 |
| 52512 | 97784847 | 97789110 | 148120 |
| 52513 | 97790181 | 97791095 | 148120 |
| 52514 | 97810459 | 97811465 | 148120 |
| 52515 | 97826482 | 97828663 | 148120 |
| 52516 | 97852330 | 97853064 | |
| 52517 | 97861579 | 97863747 | 158169 |
| 52518 | 97896314 | 97897408 | 158169 |
| 52519 | 97904569 | 97907365 | 251884, 158169 |
| 52520 | 97909631 | 97910486 | 158169 |
| 52521 | 97959597 | 97961002 | 158169 |
| 52522 | 98078975 | 98080432 | 158169 |
| 52523 | 98188225 | 98189976 | 237857 |
| 52524 | 98248318 | 98249085 | 185920 |
| 52525 | 98267936 | 98270840 | 271155, 185920 |
| 52526 | 98272931 | 98274105 | 185920 |
| 52527 | 98636833 | 98639286 | 182150, 175611 |
| 52528 | 98770740 | 98771623 | 182150 |
| 52529 | 98810262 | 98812176 | |
| 52530 | 99101202 | 99103052 | 130958 |
| 52531 | 99106232 | 99107418 | 130958 |
| 52532 | 99139641 | 99140372 | 130958 |
| 52533 | 99144650 | 99147467 | 130958 |
| 52534 | 99153190 | 99154872 | 165244 |
| 52535 | 99178790 | 99183951 | 165244 |
| 52536 | 99212206 | 99213733 | 130956 |
| 52537 | 99253023 | 99254793 | 130956, 081377 |
| 52538 | 99328255 | 99330146 | 081377 |
| 52539 | 99336741 | 99337691 | 081377 |
| 52540 | 99365843 | 99366753 | 081377 |
| 52541 | 99373054 | 99375471 | 081377 |
| 52542 | 99380365 | 99382259 | 081377 |
| 52543 | 99416584 | 99418297 | 158122 |
| 52544 | 99540035 | 99540681 | 081386 |
| 52545 | 99616025 | 99617177 | 196597 |
| 52546 | 99618552 | 99619676 | 196597 |
| 52547 | 99636394 | 99638591 | 196597 |
| 52548 | 99824615 | 99825250 | |
| 52549 | 100144327 | 100145604 | |
| 52550 | 100146839 | 100147441 | |
| 52551 | 100149081 | 100149901 | 228957 |
| 52552 | 100161177 | 100161849 | |
| 52553 | 100166901 | 100167459 | |
| 52554 | 100168760 | 100169365 | |
| 52555 | 100173853 | 100175159 | 196116 |
| 52556 | 100240525 | 100241228 | 196116 |
| 52557 | 100263312 | 100264865 | 136842 |
| 52558 | 100265970 | 100267676 | 136842 |
| 52559 | 100273028 | 100274181 | 136842 |
| 52560 | 100276768 | 100277323 | 228174, 136842 |
| 52561 | 100319843 | 100320497 | 136842 |
| 52562 | 100389784 | 100390485 | 136925 |
| 52563 | 100394111 | 100396914 | 136937, 231521, 136925 |
| 52564 | 100458506 | 100460450 | 136936 |
| 52565 | 100465290 | 100467059 | |
| 52566 | 100503317 | 100504098 | |
| 52567 | 100521172 | 100522881 | |
| 52568 | 100551308 | 100552244 | |
| 52569 | 100565490 | 100566208 | |
| 52570 | 100639020 | 100640035 | |
| 52571 | 100683811 | 100686457 | 136932 |
| 52572 | 100744454 | 100748079 | 136938 |
| 52573 | 100818065 | 100820158 | 095380 |
| 52574 | 100837071 | 100838900 | 095380, 106785 |
| 52575 | 100843041 | 100844316 | 095380, 106785 |
| 52576 | 100845362 | 100845860 | 106785 |
| 52577 | 100859352 | 100860551 | 106785 |
| 52578 | 100880247 | 100882149 | 106785 |
| 52579 | 100904149 | 100905767 | 106789 |
| 52580 | 100908197 | 100908882 | 106789 |
| 52581 | 100945248 | 100946077 | 106789 |
| 52582 | 100954133 | 100955960 | 106789 |
| 52583 | 100979048 | 100980052 | 095383 |
| 52584 | 100980779 | 100982909 | 095383 |
| 52585 | 100985183 | 100986008 | 095383 |
| 52586 | 100987330 | 100993802 | 095383 |
| 52587 | 101017250 | 101019417 | 095383 |
| 52588 | 101077687 | 101078438 | 136928 |
| 52589 | 101242180 | 101243095 | 136928 |
| 52590 | 101253076 | 101254474 | 136928 |
| 52591 | 101537013 | 101537820 | 165138 |
| 52592 | 101553352 | 101553862 | 165138 |
| 52593 | 101558015 | 101559577 | 165138 |
| 52594 | 101864704 | 101868638 | 106799 |
| 52595 | 101983142 | 101985712 | 106803, 119523 |
| 52596 | 102021021 | 102022447 | |
| 52597 | 102112100 | 102113743 | |
| 52598 | 102115523 | 102116718 | |
| 52599 | 102117942 | 102120604 | 271086 |
| 52600 | 102195708 | 102196971 | |
| 52601 | 102581161 | 102584570 | 119508, 237461 |
| 52602 | 102668187 | 102670004 | 136874, 255145 |
| 52603 | 102692717 | 102694598 | 136874 |
| 52604 | 102728919 | 102729517 | 136874 |
| 52605 | 102860391 | 102862962 | 119509, 023318 |
| 52606 | 102873384 | 102873991 | 119509 |
| 52607 | 103114081 | 103115556 | 136891 |
| 52608 | 103187990 | 103193111 | 066697 |
| 52609 | 103790538 | 103791579 | 148123 |
| 52610 | 103824806 | 103825728 | 148123 |
| 52611 | 103924443 | 103925105 | 148123 |
| 52612 | 103963335 | 103964424 | 148123 |
| 52613 | 104017259 | 104017896 | 148123 |
| 52614 | 104077392 | 104078620 | 148123 |
| 52615 | 104085404 | 104090251 | 148123 |
| 52616 | 104094395 | 104095446 | |
| 52617 | 104112483 | 104113107 | |
| 52618 | 104115372 | 104118410 | |
| 52619 | 104137567 | 104138964 | 234502, 136881 |
| 52620 | 104143303 | 104147605 | 136881 |
| 52621 | 104159708 | 104162078 | 136870, 136897 |
| 52622 | 104183911 | 104184522 | 136872 |
| 52623 | 104190080 | 104190905 | 136872 |
| 52624 | 104193805 | 104198703 | 136872 |
| 52625 | 104199212 | 104201693 | |
| 52626 | 104202553 | 104208709 | |
| 52627 | 104211155 | 104212092 | 270982 |
| 52628 | 104248224 | 104250187 | 165152 |
| 52629 | 104295192 | 104296996 | 155827, 165152 |
| 52630 | 104401491 | 104403090 | 198785 |
| 52631 | 104467323 | 104467987 | 198785 |
| 52632 | 104468422 | 104469658 | 198785 |
| 52633 | 104500314 | 104501326 | 198785 |
| 52634 | 104832184 | 104832867 | |
| 52635 | 104904653 | 104905242 | |
| 52636 | 105629769 | 105630384 | |
| 52637 | 106836895 | 106837675 | |
| 52638 | 106855558 | 106857209 | 136824 |
| 52639 | 107032497 | 107033411 | 242111 |
| 52640 | 107509297 | 107511284 | 136783 |
| 52641 | 107526027 | 107526967 | 165028 |
| 52642 | 107572530 | 107573831 | 165029 |
| 52643 | 107579092 | 107580362 | 165029 |
| 52644 | 107603797 | 107604382 | 165029 |
| 52645 | 107618485 | 107619319 | 165029 |
| 52646 | 107625352 | 107626093 | 165029 |
| 52647 | 107626205 | 107627706 | 165029 |
| 52648 | 107630578 | 107632057 | 165029 |
| 52649 | 107633414 | 107636929 | 165029 |
| 52650 | 107651578 | 107652742 | 165029 |
| 52651 | 107661469 | 107662893 | 165029 |
| 52652 | 107665288 | 107672612 | 165029 |
| 52653 | 107688066 | 107690931 | 226334, 165029 |
| 52654 | 107730360 | 107731436 | |
| 52655 | 107752984 | 107754795 | 230013 |
| 52656 | 107814797 | 107817488 | |
| 52657 | 107824120 | 107825398 | |
| 52658 | 107825483 | 107828144 | |
| 52659 | 107913544 | 107914038 | |
| 52660 | 107949975 | 107950493 | |
| 52661 | 107953427 | 107954794 | |
| 52662 | 107967951 | 107970312 | |
| 52663 | 108000588 | 108001269 | |
| 52664 | 108006046 | 108008330 | 070214 |
| 52665 | 108040955 | 108041559 | 070214 |
| 52666 | 108042311 | 108044632 | 070214 |
| 52667 | 108052898 | 108054721 | 070214 |
| 52668 | 108058488 | 108060135 | 070214 |
| 52669 | 108080830 | 108082550 | 070214 |
| 52670 | 108180580 | 108181427 | 070214 |
| 52671 | 108209910 | 108211202 | 106701 |
| 52672 | 108320206 | 108321141 | 106692, 228317 |
| 52673 | 108418222 | 108418974 | |
| 52674 | 108441442 | 108442760 | |
| 52675 | 108456525 | 108457977 | 095209 |
| 52676 | 108801470 | 108802164 | |
| 52677 | 109162396 | 109163913 | 234323 |
| 52678 | 109559201 | 109560637 | |
| 52679 | 109561253 | 109561885 | |
| 52680 | 109630556 | 109631732 | 148143 |
| 52681 | 109654920 | 109656848 | 148143 |
| 52682 | 109678471 | 109680116 | 148143 |
| 52683 | 109682840 | 109684271 | 148143 |
| 52684 | 109693789 | 109696233 | 148143 |
| 52685 | 109899786 | 109901346 | |
| 52686 | 109937008 | 109938439 | |
| 52687 | 109938710 | 109941975 | |
| 52688 | 109949474 | 109953789 | |
| 52689 | 109975519 | 109976492 | |
| 52690 | 109976888 | 109978131 | |
| 52691 | 110005789 | 110006719 | |
| 52692 | 110010729 | 110012481 | |
| 52693 | 110022259 | 110023451 | |
| 52694 | 110030776 | 110033383 | |
| 52695 | 110036813 | 110037655 | |
| 52696 | 110043241 | 110048860 | 119318 |
| 52697 | 110058187 | 110058915 | 119318 |
| 52698 | 110103138 | 110103924 | |
| 52699 | 110151456 | 110152547 | |
| 52700 | 110187157 | 110187932 | 226825 |
| 52701 | 110242668 | 110243192 | |
| 52702 | 110249684 | 110253153 | 136826 |
| 52703 | 110266270 | 110267674 | |
| 52704 | 110309030 | 110311847 | |
| 52705 | 110331138 | 110332253 | |
| 52706 | 110349308 | 110350840 | |
| 52707 | 110407160 | 110408158 | |
| 52708 | 110469760 | 110470818 | |
| 52709 | 110473568 | 110474359 | |
| 52710 | 110494976 | 110496303 | |
| 52711 | 110511564 | 110515865 | |
| 52712 | 110516811 | 110518156 | |
| 52713 | 110661480 | 110662104 | |
| 52714 | 110751397 | 110752220 | |
| 52715 | 110800873 | 110805058 | 213557 |
| 52716 | 110855851 | 110857632 | |
| 52717 | 110870720 | 110871900 | |
| 52718 | 111229375 | 111230958 | |
| 52719 | 111231824 | 111232490 | |
| 52720 | 111235366 | 111236544 | |
| 52721 | 111314693 | 111315277 | |
| 52722 | 111342239 | 111342944 | |
| 52723 | 111509197 | 111509768 | |
| 52724 | 111631151 | 111632236 | 070061 |
| 52725 | 111647657 | 111649508 | 070061 |
| 52726 | 111695238 | 111697564 | 119328, 070061 |
| 52727 | 111763518 | 111764113 | 119326 |
| 52728 | 111773925 | 111776379 | 119326 |
| 52729 | 111797273 | 111800019 | 106771 |
| 52730 | 111876276 | 111877430 | 106771 |
| 52731 | 111879521 | 111882723 | 106771 |
| 52732 | 112009670 | 112011069 | 095203 |
| 52733 | 112012639 | 112018133 | 095203 |
| 52734 | 112039029 | 112040507 | 095203 |
| 52735 | 112069536 | 112070210 | 095203 |
| 52736 | 112075528 | 112076775 | 095203 |
| 52737 | 112078265 | 112079205 | 095203 |
| 52738 | 112081212 | 112082953 | 095203 |
| 52739 | 112083019 | 112084186 | 095203 |
| 52740 | 112202845 | 112204073 | 070159 |
| 52741 | 112214544 | 112216739 | 070159 |
| 52742 | 112237769 | 112242053 | 070159 |
| 52743 | 112259722 | 112261487 | 070159 |
| 52744 | 112261574 | 112262886 | |
| 52745 | 112268342 | 112268824 | |
| 52746 | 112268926 | 112270721 | |
| 52747 | 112280151 | 112280802 | |
| 52748 | 112365071 | 112365842 | |
| 52749 | 112395035 | 112395547 | |
| 52750 | 112402322 | 112403472 | 243444 |
| 52751 | 112461302 | 112461837 | 243444 |
| 52752 | 112467723 | 112468522 | 243444 |
| 52753 | 112495857 | 112496648 | 243444 |
| 52754 | 112502018 | 112502592 | 243444 |
| 52755 | 112528003 | 112529006 | 243444, 232939 |
| 52756 | 112541557 | 112544644 | 157654, 241978, 243444 |
| 52757 | 112553152 | 112558579 | 157654, 243444, 241978 |
| 52758 | 112568754 | 112569663 | 157654, 243444, 241978 |
| 52759 | 112573977 | 112581324 | 157654, 243444, 241978 |
| 52760 | 112664513 | 112666506 | 157654, 243444, 241978 |
| 52761 | 112669239 | 112670947 | 157654, 243444, 241978 |
| 52762 | 112672649 | 112674423 | 157654, 243444, 241978 |
| 52763 | 112683794 | 112686299 | 157654, 243444, 241978 |
| 52764 | 112687510 | 112689267 | 157654, 243444, 241978 |
| 52765 | 112736163 | 112736876 | 157654, 241978 |
| 52766 | 112748361 | 112749608 | 157654, 241978 |
| 52767 | 112753708 | 112756258 | 157654, 241978 |
| 52768 | 112777866 | 112779586 | 157654, 241978 |
| 52769 | 112788591 | 112796825 | 157654, 241978 |
| 52770 | 112801504 | 112804345 | 157654, 241978 |
| 52771 | 112805807 | 112807439 | 157654, 241978 |
| 52772 | 112811544 | 112815355 | 157654, 241978 |
| 52773 | 112821422 | 112822344 | 157654, 241978 |
| 52774 | 112835661 | 112836340 | 157654, 241978 |
| 52775 | 112877666 | 112879388 | 157654, 241978 |
| 52776 | 112885170 | 112889908 | 157654, 241978 |
| 52777 | 112902798 | 112905490 | 157654, 241978 |
| 52778 | 112956319 | 112957003 | 188959 |
| 52779 | 112975615 | 112976638 | |
| 52780 | 112982825 | 112983704 | |
| 52781 | 113004715 | 113005360 | |
| 52782 | 113016787 | 113020710 | 136810 |
| 52783 | 113040308 | 113040714 | |
| 52784 | 113318112 | 113318748 | 165124 |
| 52785 | 114243989 | 114247384 | 136813 |
| 52786 | 114320409 | 114322500 | 173258, 106853 |
| 52787 | 114323506 | 114324506 | 173258, 106853 |
| 52788 | 114347768 | 114349126 | 106853 |
| 52789 | 114351049 | 114351924 | 106853 |
| 52790 | 114359226 | 114365829 | 106853, 204173 |
| 52791 | 114366460 | 114368416 | 204173 |
| 52792 | 114375399 | 114376361 | 204173 |
| 52793 | 114384111 | 114385845 | 204173 |
| 52794 | 114388930 | 114390353 | 204173 |
| 52795 | 114392635 | 114395210 | 244115, 059769, 204173 |
| 52796 | 114395355 | 114396274 | 244115, 059769 |
| 52797 | 114397018 | 114397751 | 244115, 059769 |
| 52798 | 114408662 | 114409101 | 244115, 059769 |
| 52799 | 114423469 | 114424900 | 242616, 244115, 059769 |
| 52800 | 114440307 | 114441175 | |
| 52801 | 114560917 | 114561544 | |
| 52802 | 114658140 | 114661241 | 148154 |
| 52803 | 114679314 | 114680614 | 148154 |
| 52804 | 114721065 | 114724781 | |
| 52805 | 114726920 | 114730195 | |
| 52806 | 114773783 | 114776247 | |
| 52807 | 114782407 | 114784993 | |
| 52808 | 114792130 | 114792889 | |
| 52809 | 114795434 | 114796398 | 259953 |
| 52810 | 114803595 | 114805400 | 106868 |
| 52811 | 114811446 | 114813491 | 106868 |
| 52812 | 114820994 | 114824760 | 106868 |
| 52813 | 114827125 | 114830049 | 106868 |
| 52814 | 114830924 | 114833342 | 106868 |
| 52815 | 114836653 | 114837358 | 106868 |
| 52816 | 114880952 | 114882879 | 106868 |
| 52817 | 114888140 | 114888853 | 106868 |
| 52818 | 114936739 | 114938350 | 106868 |
| 52819 | 115033837 | 115034934 | 243911, 119314 |
| 52820 | 115061646 | 115062673 | 119314 |
| 52821 | 115094563 | 115097459 | 119314 |
| 52822 | 115099164 | 115100628 | |
| 52823 | 115103336 | 115104866 | |
| 52824 | 115109925 | 115112351 | |
| 52825 | 115140218 | 115143476 | 119471 |
| 52826 | 115248322 | 115250337 | 165185, 230185 |
| 52827 | 115293603 | 115295060 | 165185 |
| 52828 | 115318268 | 115319135 | 165185 |
| 52829 | 115332873 | 115333737 | 165185 |
| 52830 | 115479364 | 115480831 | 148153 |
| 52831 | 115494054 | 115494970 | |
| 52832 | 115512131 | 115514318 | 148158, 226609 |
| 52833 | 115579354 | 115580132 | 148158 |
| 52834 | 115598602 | 115599356 | 148158 |
| 52835 | 115818339 | 115819873 | 136866 |
| 52836 | 115899674 | 115900508 | |
| 52837 | 115912829 | 115914562 | 136867 |
| 52838 | 115914824 | 115915492 | 136867 |
| 52839 | 115948864 | 115951711 | 119321 |
| 52840 | 115982521 | 115985697 | 136868, 119321 |
| 52841 | 116000568 | 116001720 | 136868 |
| 52842 | 116024073 | 116025248 | 176386, 136868 |
| 52843 | 116036637 | 116038905 | 136875, 176386 |
| 52844 | 116102306 | 116102981 | 148225 |
| 52845 | 116131643 | 116132344 | 119411 |
| 52846 | 116137235 | 116140155 | 119431 |
| 52847 | 116144201 | 116144827 | |
| 52848 | 116149795 | 116150555 | 148218 |
| 52849 | 116151006 | 116151622 | 148218 |
| 52850 | 116157374 | 116158162 | 148218 |
| 52851 | 116160192 | 116161402 | 148218 |
| 52852 | 116163095 | 116164097 | 148218 |
| 52853 | 116171626 | 116174005 | 157653, 148229 |
| 52854 | 116217019 | 116218421 | 138835 |
| 52855 | 116225763 | 116226542 | 138835 |
| 52856 | 116266707 | 116268171 | 138835 |
| 52857 | 116273126 | 116273966 | 138835 |
| 52858 | 116281706 | 116283020 | 138835 |
| 52859 | 116310131 | 116310931 | 138835 |
| 52860 | 116321160 | 116321908 | 138835 |
| 52861 | 116333324 | 116333904 | 138835, 237073 |
| 52862 | 116342525 | 116344677 | 138835, 237073 |
| 52863 | 116355893 | 116358299 | 138835 |
| 52864 | 116364305 | 116365421 | |
| 52865 | 116371616 | 116372874 | |
| 52866 | 116377189 | 116377714 | |
| 52867 | 116381560 | 116384163 | 233817 |
| 52868 | 116384630 | 116386727 | 233817 |
| 52869 | 116412219 | 116413459 | 227482 |
| 52870 | 116413584 | 116415816 | 227482 |
| 52871 | 116417548 | 116417965 | 227482 |
| 52872 | 116444404 | 116445052 | 227482 |
| 52873 | 116468092 | 116469038 | |
| 52874 | 116474071 | 116474796 | |
| 52875 | 116615514 | 116616081 | |
| 52876 | 116637713 | 116640079 | 157657 |
| 52877 | 116668229 | 116670087 | 157657 |
| 52878 | 116672378 | 116672922 | 157657 |
| 52879 | 116727968 | 116729415 | 157657 |
| 52880 | 116751308 | 116752172 | 157657 |
| 52881 | 116754280 | 116755404 | 157657 |
| 52882 | 116838990 | 116841774 | 106927 |
| 52883 | 116842048 | 116845249 | |
| 52884 | 116860984 | 116862428 | 136883 |
| 52885 | 116872416 | 116873052 | |
| 52886 | 116880370 | 116881284 | |
| 52887 | 116915842 | 116916606 | |
| 52888 | 116917249 | 116919318 | 196739 |
| 52889 | 116925457 | 116927161 | 196739 |
| 52890 | 116936408 | 116939588 | 196739 |
| 52891 | 116939937 | 116940475 | 196739 |
| 52892 | 116985286 | 116987118 | 196739 |
| 52893 | 117050360 | 117051228 | 196739 |
| 52894 | 117069586 | 117071594 | 196739 |
| 52895 | 117076548 | 117079657 | |
| 52896 | 117079699 | 117081148 | |
| 52897 | 117090061 | 117091952 | |
| 52898 | 117110754 | 117112395 | 106948 |
| 52899 | 117126317 | 117127437 | 106948 |
| 52900 | 117128731 | 117129305 | 106948 |
| 52901 | 117147199 | 117148991 | 106948 |
| 52902 | 117154632 | 117155320 | 106948 |
| 52903 | 117159814 | 117160983 | 235119 |
| 52904 | 117255642 | 117256510 | 095397 |
| 52905 | 117267048 | 117268223 | 095397 |
| 52906 | 117348967 | 117352222 | 136888 |
| 52907 | 117353373 | 117354636 | 136888 |
| 52908 | 117368097 | 117369567 | |
| 52909 | 117372914 | 117374755 | 157693 |
| 52910 | 117384175 | 117384665 | 157693 |
| 52911 | 117483767 | 117484618 | |
| 52912 | 117540863 | 117542236 | |
| 52913 | 117646850 | 117648146 | |
| 52914 | 117655036 | 117658666 | 106952 |
| 52915 | 117670054 | 117671669 | 106952 |
| 52916 | 117673198 | 117673949 | 106952 |
| 52917 | 117715951 | 117716653 | |
| 52918 | 117764755 | 117765433 | |
| 52919 | 117867447 | 117870461 | 041982 |
| 52920 | 117918791 | 117920266 | 173077 |
| 52921 | 117921204 | 117921794 | 173077 |
| 52922 | 117971161 | 117977381 | 173077 |
| 52923 | 117996020 | 117996993 | 173077 |
| 52924 | 118135138 | 118136987 | 173077 |
| 52925 | 118257124 | 118258216 | |
| 52926 | 118353736 | 118354355 | |
| 52927 | 118412181 | 118412777 | |
| 52928 | 118703666 | 118709591 | |
| 52929 | 118758672 | 118759219 | |
| 52930 | 118764594 | 118765392 | |
| 52931 | 118937853 | 118938467 | 182752 |
| 52932 | 118964590 | 118965006 | 182752 |
| 52933 | 118966246 | 118967096 | 182752 |
| 52934 | 119308656 | 119314453 | 148219, 229105 |
| 52935 | 119328556 | 119331698 | 230894, 148219 |
| 52936 | 119336254 | 119337061 | 148219, 230894 |
| 52937 | 119448663 | 119450613 | 119401, 148219 |
| 52938 | 120249662 | 120250830 | |
| 52939 | 120253314 | 120254388 | |
| 52940 | 120406381 | 120407604 | |
| 52941 | 120424585 | 120425419 | |
| 52942 | 120434553 | 120435130 | |
| 52943 | 120482740 | 120483866 | |
| 52944 | 121067363 | 121070421 | |
| 52945 | 121080054 | 121082353 | |
| 52946 | 121092669 | 121100866 | |
| 52947 | 121216609 | 121218737 | |
| 52948 | 121339036 | 121340124 | |
| 52949 | 121357871 | 121359566 | |
| 52950 | 121402836 | 121404148 | |
| 52951 | 121405182 | 121406298 | |
| 52952 | 121512633 | 121515891 | |
| 52953 | 121755591 | 121756126 | |
| 52954 | 121765956 | 121767881 | |
| 52955 | 122318253 | 122318893 | |
| 52956 | 123128753 | 123129459 | |
| 52957 | 123145851 | 123147779 | |
| 52958 | 123148318 | 123149684 | |
| 52959 | 123149798 | 123150406 | |
| 52960 | 123152870 | 123153717 | 136861 |
| 52961 | 123155518 | 123157149 | 136861 |
| 52962 | 123165389 | 123166505 | 136861 |
| 52963 | 123242958 | 123243914 | 136861 |
| 52964 | 123284330 | 123285100 | 136861 |
| 52965 | 123300315 | 123301194 | 136861 |
| 52966 | 123333090 | 123334776 | 136861 |
| 52967 | 123341537 | 123343233 | 136861 |
| 52968 | 123346039 | 123346733 | |
| 52969 | 123379526 | 123380866 | 106780 |
| 52970 | 123402551 | 123403132 | 106780 |
| 52971 | 123409159 | 123410014 | 106780 |
| 52972 | 123446037 | 123447551 | 106780 |
| 52973 | 123474503 | 123478201 | 106780 |
| 52974 | 123488209 | 123488701 | |
| 52975 | 123491868 | 123494790 | |
| 52976 | 123495101 | 123496368 | |
| 52977 | 123497007 | 123498477 | |
| 52978 | 123502392 | 123502780 | |
| 52979 | 123505200 | 123505661 | |
| 52980 | 123540851 | 123541577 | 119402 |
| 52981 | 123545814 | 123546470 | 119402 |
| 52982 | 123554742 | 123556601 | 214654, 119402 |
| 52983 | 123604395 | 123606028 | 095261, 226752 |
| 52984 | 123638136 | 123640120 | 119403 |
| 52985 | 123655373 | 123657594 | |
| 52986 | 123658177 | 123660009 | |
| 52987 | 123675828 | 123676403 | 056558 |
| 52988 | 123685402 | 123692260 | 056558 |
| 52989 | 123693015 | 123695144 | |
| 52990 | 123697536 | 123699319 | |
| 52991 | 123704378 | 123705304 | |
| 52992 | 123744937 | 123745754 | 106804 |
| 52993 | 123788493 | 123789725 | 106804 |
| 52994 | 123812145 | 123813129 | 106804 |
| 52995 | 123813957 | 123814685 | |
| 52996 | 123815369 | 123816273 | |
| 52997 | 123817668 | 123818482 | |
| 52998 | 123836405 | 123837835 | 119397 |
| 52999 | 123883700 | 123884327 | 119397 |
| 53000 | 123962894 | 123964886 | 119396 |
| 53001 | 124043514 | 124044861 | 148180, 239593, 235865 |
| 53002 | 124048658 | 124049925 | 148180 |
| 53003 | 124079759 | 124080553 | 148180 |
| 53004 | 124082198 | 124086347 | 148180 |
| 53005 | 124086798 | 124090176 | 148180 |
| 53006 | 124124938 | 124125693 | 148175 |
| 53007 | 124129689 | 124133229 | 148175 |
| 53008 | 124134468 | 124136528 | |
| 53009 | 124261901 | 124262331 | 204136 |
| 53010 | 124360516 | 124362886 | 136848 |
| 53011 | 124369683 | 124370246 | 136848 |
| 53012 | 124371945 | 124372864 | 136848 |
| 53013 | 124374507 | 124375379 | 136848 |
| 53014 | 124384325 | 124385482 | 136848 |
| 53015 | 124400067 | 124400494 | 136848 |
| 53016 | 124412499 | 124414332 | 136848 |
| 53017 | 124416826 | 124417384 | 136848 |
| 53018 | 124505668 | 124507582 | 136848 |
| 53019 | 124535854 | 124536388 | 136848 |
| 53020 | 124604756 | 124605293 | 175764 |
| 53021 | 124623675 | 124624217 | 175764 |
| 53022 | 124734748 | 124740159 | 175764 |
| 53023 | 124760745 | 124761700 | 175764 |
| 53024 | 124763369 | 124764962 | 175764 |
| 53025 | 124854501 | 124856045 | 175764 |
| 53026 | 124921322 | 124922251 | 185681, 119421 |
| 53027 | 124952721 | 124953441 | 185681 |
| 53028 | 125025836 | 125028548 | 148187, 119446 |
| 53029 | 125087401 | 125087980 | 269979 |
| 53030 | 125108520 | 125109977 | |
| 53031 | 125540085 | 125541090 | |
| 53032 | 125590103 | 125591453 | 136940 |
| 53033 | 125666586 | 125668073 | 056586 |
| 53034 | 125674602 | 125676458 | 186130 |
| 53035 | 125693009 | 125694685 | 171448 |
| 53036 | 125703001 | 125704562 | 011454 |
| 53037 | 125774397 | 125774806 | 011454 |
| 53038 | 125811971 | 125812547 | 011454 |
| 53039 | 125821059 | 125821500 | 011454 |
| 53040 | 125849483 | 125850186 | 011454 |
| 53041 | 125861658 | 125863365 | 011454 |
| 53042 | 125864817 | 125865633 | 011454 |
| 53043 | 125871361 | 125872535 | 236901, 165209 |
| 53044 | 126029755 | 126031038 | 165209 |
| 53045 | 126086946 | 126087587 | |
| 53046 | 126227196 | 126228139 | 119522 |
| 53047 | 126229766 | 126230458 | 119522 |
| 53048 | 126232065 | 126233145 | 119522 |
| 53049 | 126241158 | 126242316 | 119522 |
| 53050 | 126246014 | 126247094 | 119522 |
| 53051 | 126300125 | 126300618 | 119522 |
| 53052 | 126304460 | 126305203 | 119522 |
| 53053 | 126369669 | 126370374 | 119522 |
| 53054 | 126413530 | 126414057 | 119522 |
| 53055 | 126523962 | 126524879 | 119522 |
| 53056 | 126629599 | 126631298 | 119522 |
| 53057 | 126683890 | 126685453 | 119522 |
| 53058 | 126691111 | 126692862 | 119522 |
| 53059 | 126695581 | 126697058 | |
| 53060 | 126758926 | 126759370 | |
| 53061 | 126802956 | 126803911 | |
| 53062 | 126807338 | 126808410 | |
| 53063 | 126839939 | 126841967 | |
| 53064 | 126906975 | 126907712 | |
| 53065 | 126979503 | 126981861 | |
| 53066 | 126982501 | 126984938 | |
| 53067 | 126985170 | 126986269 | |
| 53068 | 127019586 | 127024700 | 119408, 235204 |
| 53069 | 127025967 | 127027058 | 119408, 227200 |
| 53070 | 127029017 | 127030585 | 119408 |
| 53071 | 127033154 | 127033931 | 119408 |
| 53072 | 127041780 | 127043004 | 119408 |
| 53073 | 127044326 | 127050649 | 119408 |
| 53074 | 127059332 | 127060315 | 119408 |
| 53075 | 127071904 | 127072882 | 119408 |
| 53076 | 127147933 | 127149343 | 136930 |
| 53077 | 127152916 | 127153621 | 136930 |
| 53078 | 127176500 | 127178162 | 136930 |
| 53079 | 127272879 | 127273533 | |
| 53080 | 127313749 | 127315071 | 148200 |
| 53081 | 127315209 | 127317063 | 148200 |
| 53082 | 127357444 | 127358901 | 148200 |
| 53083 | 127379634 | 127381393 | 148200 |
| 53084 | 127420336 | 127423092 | 224020, 148200 |
| 53085 | 127486779 | 127487879 | 148200 |
| 53086 | 127531212 | 127534872 | 236643, 148200 |
| 53087 | 127539218 | 127540120 | 185585 |
| 53088 | 127580354 | 127581546 | |
| 53089 | 127614955 | 127615964 | 136918 |
| 53090 | 127619276 | 127620003 | 136918 |
| 53091 | 127622541 | 127624988 | 136950, 136942 |
| 53092 | 127630107 | 127633199 | 136950 |
| 53093 | 127702433 | 127704860 | 136935 |
| 53094 | 127709946 | 127710625 | 136935, 173611 |
| 53095 | 127712123 | 127713188 | 173611 |
| 53096 | 127904992 | 127906329 | 173611 |
| 53097 | 127912585 | 127913475 | 232630, 119414 |
| 53098 | 127951133 | 127953050 | 119414 |
| 53099 | 127962025 | 127963783 | 136933 |
| 53100 | 128002364 | 128005308 | 239705, 044574 |
| 53101 | 128005495 | 128006475 | 239705 |
| 53102 | 128023467 | 128025306 | 165219 |
| 53103 | 128034862 | 128035447 | 165219 |
| 53104 | 128059113 | 128059853 | 165219 |
| 53105 | 128091278 | 128091882 | 165219 |
| 53106 | 128170117 | 128171351 | |
| 53107 | 128190140 | 128191090 | |
| 53108 | 128222280 | 128224308 | 119487 |
| 53109 | 128230757 | 128231618 | 119487 |
| 53110 | 128237709 | 128238304 | 119487 |
| 53111 | 128246922 | 128249444 | 119487 |
| 53112 | 128255047 | 128257665 | 119487 |
| 53113 | 128275227 | 128277000 | 243845, 119487 |
| 53114 | 128299578 | 128301563 | 119487 |
| 53115 | 128341217 | 128341984 | 119487 |
| 53116 | 128347617 | 128348662 | 119487 |
| 53117 | 128393517 | 128396793 | 119487 |
| 53118 | 128436522 | 128438717 | 119487 |
| 53119 | 128468263 | 128470310 | 119487 |
| 53120 | 128508425 | 128511473 | 167081, 229582 |
| 53121 | 128558038 | 128558973 | 167081 |
| 53122 | 128908258 | 128909780 | 232413 |
| 53123 | 128912791 | 128914463 | 232413 |
| 53124 | 129089131 | 129090184 | 196814 |
| 53125 | 129096450 | 129099398 | 196814 |
| 53126 | 129157610 | 129158546 | 196814 |
| 53127 | 129183146 | 129183852 | 196814 |
| 53128 | 129553714 | 129554803 | |
| 53129 | 129564541 | 129565420 | |
| 53130 | 129566979 | 129569289 | 169155 |
| 53131 | 129622269 | 129623826 | 177125 |
| 53132 | 129647351 | 129647962 | 177125 |
| 53133 | 129920857 | 129923327 | 136828 |
| 53134 | 129957527 | 129958262 | 136828 |
| 53135 | 129986768 | 129987225 | 136895 |
| 53136 | 129987278 | 129988447 | 136895 |
| 53137 | 130007007 | 130008826 | 136895 |
| 53138 | 130065983 | 130066487 | 136895 |
| 53139 | 130069334 | 130072397 | 136895 |
| 53140 | 130073429 | 130074900 | 136895 |
| 53141 | 130098420 | 130100231 | 136895 |
| 53142 | 130158803 | 130161462 | 136856 |
| 53143 | 130185575 | 130187792 | 196152 |
| 53144 | 130207610 | 130208072 | 196152 |
| 53145 | 130212347 | 130215392 | 148356, 197958 |
| 53146 | 130307513 | 130308096 | 136830 |
| 53147 | 130330290 | 130331457 | 136830 |
| 53148 | 130331503 | 130332316 | 136830 |
| 53149 | 130399677 | 130400255 | 136854 |
| 53150 | 130461339 | 130461838 | 187024 |
| 53151 | 130477190 | 130478290 | 160401, 187024 |
| 53152 | 130496627 | 130498001 | 160404 |
| 53153 | 130502219 | 130503582 | 095370 |
| 53154 | 130546992 | 130549538 | 266070, 136807 |
| 53155 | 130550397 | 130552328 | 136807 |
| 53156 | 130555118 | 130557331 | 136877 |
| 53157 | 130557802 | 130559399 | 136877 |
| 53158 | 130563213 | 130563695 | 136877 |
| 53159 | 130564381 | 130567156 | 136877 |
| 53160 | 130590463 | 130591209 | 106991 |
| 53161 | 130600142 | 130602022 | 106991 |
| 53162 | 130639127 | 130640850 | 106992, 257524 |
| 53163 | 130659376 | 130659850 | 160408 |
| 53164 | 130660667 | 130662193 | 160408 |
| 53165 | 130678610 | 130679491 | 136840 |
| 53166 | 130680410 | 130682200 | |
| 53167 | 130699343 | 130701080 | 136908, 227218 |
| 53168 | 130714202 | 130715177 | 167106 |
| 53169 | 130716129 | 130718964 | 167106 |
| 53170 | 130724591 | 130732445 | 167106 |
| 53171 | 130734389 | 130736728 | 167106 |
| 53172 | 130739226 | 130744515 | 167106 |
| 53173 | 130748585 | 130752221 | |
| 53174 | 130752698 | 130753859 | |
| 53175 | 130763478 | 130764544 | |
| 53176 | 130797179 | 130797926 | |
| 53177 | 130817663 | 130820625 | 230848 |
| 53178 | 130828530 | 130832053 | 148339, 171169 |
| 53179 | 130834396 | 130835168 | 148339 |
| 53180 | 130835201 | 130836012 | 148339 |
| 53181 | 130859802 | 130867308 | 148339 |
| 53182 | 130877016 | 130878415 | 234771 |
| 53183 | 130889399 | 130891398 | 232850, 148334 |
| 53184 | 130911051 | 130912750 | 148346 |
| 53185 | 130953117 | 130955562 | 148337 |
| 53186 | 131037409 | 131039618 | 175854, 167110 |
| 53187 | 131057477 | 131059892 | |
| 53188 | 131083729 | 131086369 | 167113, 167112 |
| 53189 | 131101660 | 131104047 | 167114 |
| 53190 | 131132403 | 131134741 | 167118 |
| 53191 | 131218310 | 131219176 | 136811 |
| 53192 | 131266170 | 131267775 | 119392 |
| 53193 | 131285083 | 131286390 | 119392 |
| 53194 | 131313830 | 131316120 | 197694, 228395 |
| 53195 | 131317113 | 131317960 | 197694 |
| 53196 | 131319372 | 131319994 | 197694 |
| 53197 | 131320761 | 131321646 | 197694 |
| 53198 | 131369725 | 131370494 | 197694 |
| 53199 | 131396836 | 131399043 | 119333 |
| 53200 | 131418469 | 131419859 | 119333 |
| 53201 | 131445445 | 131447458 | 119335 |
| 53202 | 131450445 | 131453186 | 119335 |
| 53203 | 131464566 | 131465567 | 160447 |
| 53204 | 131486042 | 131487163 | 223478, 160446 |
| 53205 | 131524573 | 131525928 | 160445 |
| 53206 | 131527267 | 131528202 | 160445 |
| 53207 | 131532683 | 131535159 | 160445 |
| 53208 | 131548948 | 131550334 | 107021 |
| 53209 | 131580318 | 131581778 | 167136 |
| 53210 | 131591098 | 131592230 | 198917 |
| 53211 | 131624771 | 131625325 | 171097 |
| 53212 | 131636543 | 131638939 | 171097 |
| 53213 | 131639362 | 131646070 | 136802, 171097 |
| 53214 | 131654070 | 131655758 | 136802 |
| 53215 | 131673117 | 131676829 | 136802 |
| 53216 | 131677645 | 131680259 | 136802 |
| 53217 | 131681191 | 131683585 | 175287 |
| 53218 | 131683627 | 131685418 | 175287 |
| 53219 | 131708833 | 131711018 | 095319, 175283, 251184 |
| 53220 | 131789747 | 131790614 | 148341 |
| 53221 | 131798299 | 131799443 | 148343 |
| 53222 | 131826653 | 131827308 | 148343 |
| 53223 | 131831146 | 131832562 | 148343 |
| 53224 | 131838307 | 131838754 | |
| 53225 | 131842812 | 131844340 | 167130 |
| 53226 | 131851492 | 131852077 | 167130 |
| 53227 | 131871768 | 131874696 | 119383, 095321 |
| 53228 | 131900076 | 131904552 | 119383 |
| 53229 | 131908013 | 131908712 | 119383 |
| 53230 | 131935881 | 131941142 | 188483, 204055, 268050 |
| 53231 | 132077169 | 132078798 | |
| 53232 | 132085566 | 132086975 | 179082 |
| 53233 | 132089756 | 132090486 | |
| 53234 | 132095580 | 132097742 | 233901 |
| 53235 | 132144959 | 132146529 | |
| 53236 | 132174800 | 132177542 | |
| 53237 | 132199444 | 132199950 | 230676 |
| 53238 | 132221384 | 132223814 | |
| 53239 | 132238960 | 132240093 | |
| 53240 | 132243747 | 132247264 | 204054, 261334 |
| 53241 | 132247658 | 132254151 | 204054 |
| 53242 | 132255078 | 132256211 | 204054 |
| 53243 | 132256243 | 132260737 | 204054 |
| 53244 | 132269086 | 132269672 | 239353, 204054 |
| 53245 | 132320821 | 132321707 | |
| 53246 | 132323011 | 132324541 | |
| 53247 | 132330559 | 132331916 | |
| 53248 | 132359138 | 132360277 | |
| 53249 | 132371629 | 132373922 | 148335 |
| 53250 | 132388118 | 132390316 | 148335 |
| 53251 | 132403225 | 132405045 | 234789, 148331 |
| 53252 | 132499753 | 132500846 | 148344, 255824 |
| 53253 | 132565049 | 132566398 | 136816 |
| 53254 | 132573042 | 132574176 | 136816 |
| 53255 | 132585267 | 132587051 | 136827 |
| 53256 | 132596693 | 132598744 | 136878, 136819 |
| 53257 | 132647215 | 132648701 | |
| 53258 | 132743236 | 132744485 | 187239 |
| 53259 | 132772390 | 132773978 | 187239 |
| 53260 | 132778872 | 132779693 | 187239 |
| 53261 | 132784778 | 132788393 | 187239 |
| 53262 | 132789565 | 132791509 | 187239 |
| 53263 | 132793161 | 132793914 | 187239 |
| 53264 | 132803932 | 132806599 | 187239 |
| 53265 | 132815356 | 132817183 | 148358 |
| 53266 | 132879376 | 132881195 | 148358 |
| 53267 | 133004909 | 133005889 | |
| 53268 | 133025574 | 133026920 | |
| 53269 | 133307634 | 133309916 | 148357 |
| 53270 | 133319424 | 133323267 | 130707 |
| 53271 | 133325514 | 133327933 | 130707 |
| 53272 | 133333915 | 133335729 | 130707 |
| 53273 | 133341616 | 133342658 | 130707 |
| 53274 | 133373627 | 133376459 | 130707 |
| 53275 | 133402304 | 133402886 | |
| 53276 | 133406299 | 133406738 | |
| 53277 | 133453620 | 133456047 | 107164 |
| 53278 | 133472482 | 133474114 | 107164 |
| 53279 | 133556055 | 133557857 | 130711 |
| 53280 | 133568249 | 133569900 | 130713 |
| 53281 | 133587731 | 133589457 | 097007 |
| 53282 | 133615274 | 133616524 | 097007 |
| 53283 | 133616880 | 133618450 | 097007 |
| 53284 | 133709409 | 133711668 | 097007 |
| 53285 | 133722053 | 133723602 | 097007 |
| 53286 | 133733682 | 133734118 | 097007 |
| 53287 | 133747947 | 133749008 | 097007 |
| 53288 | 133803319 | 133804874 | 130720 |
| 53289 | 134000022 | 134001953 | 126883 |
| 53290 | 134192489 | 134192972 | |
| 53291 | 134225151 | 134225904 | |
| 53292 | 134233148 | 134233722 | |
| 53293 | 134258528 | 134259086 | |
| 53294 | 134268303 | 134270824 | 130723 |
| 53295 | 134277620 | 134278755 | 130723 |
| 53296 | 134297635 | 134298784 | 130723 |
| 53297 | 134322618 | 134323567 | 130723 |
| 53298 | 134378133 | 134379406 | 130714 |
| 53299 | 134404979 | 134407380 | 130717 |
| 53300 | 134420516 | 134421319 | |
| 53301 | 134466323 | 134467316 | 107263 |
| 53302 | 134481086 | 134482298 | 107263 |
| 53303 | 134483519 | 134484470 | 107263 |
| 53304 | 134510045 | 134511546 | 107263 |
| 53305 | 134525118 | 134527418 | 107263 |
| 53306 | 134529998 | 134531113 | 107263 |
| 53307 | 134533179 | 134534702 | 107263 |
| 53308 | 134567422 | 134568477 | 107263 |
| 53309 | 134580920 | 134584528 | 107263 |
| 53310 | 134593169 | 134593953 | 107263 |
| 53311 | 134606277 | 134612204 | 107263 |
| 53312 | 134614110 | 134615954 | 107263 |
| 53313 | 134954187 | 134955587 | 160563 |
| 53314 | 135039804 | 135040964 | 196358 |
| 53315 | 135089308 | 135090040 | 196358 |
| 53316 | 135144075 | 135146755 | 107290 |
| 53317 | 135229146 | 135231085 | 107290 |
| 53318 | 135281821 | 135282521 | 125482 |
| 53319 | 135544415 | 135546986 | 125484, 125485 |
| 53320 | 135644340 | 135646238 | 224992, 165695 |
| 53321 | 135753447 | 135754401 | 165695, 165698 |
| 53322 | 135818962 | 135821027 | 165702, 165699 |
| 53323 | 135821790 | 135822493 | 233800, 165702 |
| 53324 | 135904883 | 135907078 | 148308 |
| 53325 | 135988080 | 135990196 | 160271 |
| 53326 | 135995761 | 135997041 | 160271 |
| 53327 | 136001444 | 136003767 | 160271 |
| 53328 | 136008915 | 136010468 | 160271 |
| 53329 | 136019059 | 136020749 | 160271 |
| 53330 | 136023786 | 136025331 | 160271 |
| 53331 | 136202186 | 136203923 | 148296 |
| 53332 | 136213304 | 136216260 | 148303, 206611, 148297 |
| 53333 | 136222383 | 136224388 | 148291, 148290 |
| 53334 | 136241441 | 136243952 | 198870, 148248 |
| 53335 | 136282354 | 136283993 | 148300, 160323 |
| 53336 | 136313461 | 136314156 | 160323 |
| 53337 | 136324752 | 136326667 | 160325 |
| 53338 | 136343351 | 136344232 | 160326 |
| 53339 | 136371460 | 136372760 | |
| 53340 | 136374535 | 136375371 | |
| 53341 | 136385540 | 136387149 | 187616 |
| 53342 | 136523415 | 136524522 | 123454 |
| 53343 | 136579913 | 136580437 | 123453 |
| 53344 | 136602932 | 136603965 | 123453 |
| 53345 | 136604146 | 136605505 | 123453 |
| 53346 | 136633840 | 136634665 | 160293 |
| 53347 | 136654211 | 136655125 | 160293 |
| 53348 | 136683297 | 136684238 | 160293 |
| 53349 | 136719990 | 136722374 | 160293 |
| 53350 | 136744459 | 136745353 | 160293 |
| 53351 | 136745412 | 136748842 | 160293 |
| 53352 | 136749086 | 136751484 | 160293 |
| 53353 | 136751734 | 136755909 | 160293 |
| 53354 | 136757172 | 136759005 | 160293 |
| 53355 | 136779788 | 136780632 | 160293 |
| 53356 | 136838758 | 136840391 | 160293 |
| 53357 | 136843474 | 136845776 | 160293 |
| 53358 | 136855505 | 136860559 | 160293 |
| 53359 | 136875682 | 136876257 | |
| 53360 | 136890064 | 136891193 | 235106 |
| 53361 | 136893735 | 136894348 | 235106 |
| 53362 | 136914047 | 136914808 | 169925 |
| 53363 | 136920161 | 136922222 | 169925, 235138 |
| 53364 | 136930701 | 136933694 | 169925 |
| 53365 | 136987994 | 136988449 | |
| 53366 | 136995883 | 136996622 | |
| 53367 | 136999724 | 137002466 | 196363, 273249 |
| 53368 | 137028007 | 137030869 | 221676 |
| 53369 | 137040268 | 137041359 | |
| 53370 | 137102617 | 137103528 | |
| 53371 | 137110601 | 137114482 | |
| 53372 | 137117936 | 137118433 | |
| 53373 | 137150356 | 137151554 | |
| 53374 | 137155981 | 137157713 | |
| 53375 | 137159458 | 137160371 | |
| 53376 | 137174706 | 137175647 | |
| 53377 | 137214502 | 137218192 | 186350 |
| 53378 | 137218426 | 137222799 | 186350 |
| 53379 | 137224695 | 137226042 | 186350 |
| 53380 | 137226164 | 137228794 | 186350 |
| 53381 | 137252748 | 137254170 | 186350 |
| 53382 | 137256401 | 137257160 | 186350 |
| 53383 | 137261576 | 137273529 | 263897, 186350 |
| 53384 | 137274031 | 137275287 | 186350 |
| 53385 | 137310016 | 137310883 | 186350 |
| 53386 | 137326532 | 137327544 | 186350 |
| 53387 | 137334076 | 137335801 | |
| 53388 | 138370652 | 138372828 | 196422, 225361 |
| 53389 | 138380969 | 138384224 | |
| 53390 | 138391485 | 138393728 | 122140, 160345 |
| 53391 | 138797954 | 138800596 | 238058, 130559 |
| 53392 | 138851988 | 138853467 | 130560 |
| 53393 | 138884063 | 138885436 | |
| 53394 | 138885821 | 138886493 | |
| 53395 | 138899429 | 138901311 | 148411 |
| 53396 | 138985794 | 138987891 | 148411 |
| 53397 | 139000704 | 139002029 | 260193 |
| 53398 | 139008993 | 139012279 | 238227 |
| 53399 | 139136458 | 139138057 | 165661 |
| 53400 | 139257537 | 139258610 | 213221, 187796 |
| 53401 | 139290310 | 139290976 | 165684 |
| 53402 | 139293429 | 139295042 | |
| 53403 | 139303940 | 139306349 | 165688, 165689 |
| 53404 | 139312371 | 139313207 | 165688 |
| 53405 | 139332967 | 139335086 | 148396, 148384 |
| 53406 | 139335800 | 139337093 | 148396 |
| 53407 | 139376696 | 139380503 | 196366 |
| 53408 | 139414532 | 139414938 | 148400 |
| 53409 | 139439029 | 139442037 | 265181, 237886, 148400 |
| 53410 | 139444312 | 139446251 | 237886 |
| 53411 | 139452333 | 139453291 | |
| 53412 | 139461676 | 139462880 | |
| 53413 | 139470459 | 139471230 | |
| 53414 | 139513264 | 139514959 | |
| 53415 | 139519444 | 139522213 | |
| 53416 | 139560014 | 139560731 | 172889 |
| 53417 | 139580376 | 139582974 | 169692 |
| 53418 | 139584449 | 139585829 | |
| 53419 | 139587496 | 139591173 | 221693 |
| 53420 | 139591403 | 139593658 | |
| 53421 | 139621110 | 139623924 | 233016 |
| 53422 | 139685297 | 139686627 | 272896, 244187 |
| 53423 | 139694307 | 139695149 | 272679, 272896, 213213, |
| | | | 273066 |
| 53424 | 139701625 | 139703482 | 196642, 213213, 228544, |
| | | | 272679, 273066 |
| 53425 | 139735627 | 139736067 | 196642 |
| 53426 | 139742116 | 139744999 | 054148 |
| 53427 | 139752807 | 139754767 | 177943 |
| 53428 | 139758930 | 139761596 | 107223 |
| 53429 | 139776064 | 139778265 | 127191 |
| 53430 | 139779996 | 139782175 | 266507, 127191 |
| 53431 | 139794925 | 139798398 | 127191 |
| 53432 | 139828504 | 139829426 | |
| 53433 | 139831888 | 139833250 | 260190 |
| 53434 | 139833886 | 139835628 | 159069 |
| 53435 | 139837161 | 139840880 | 176919, 159069 |
| 53436 | 139841053 | 139843031 | 176919 |
| 53437 | 139843294 | 139845516 | 184925 |
| 53438 | 139886336 | 139887951 | 148362 |
| 53439 | 139916513 | 139918452 | 107331 |
| 53440 | 139949539 | 139950743 | |
| 53441 | 139979843 | 139982343 | 268996, 177239 |
| 53442 | 140008526 | 140009547 | 176978 |
| 53443 | 140023467 | 140025009 | |
| 53444 | 140082151 | 140084474 | 176101, 176248 |
| 53445 | 140091844 | 140093626 | 176058 |
| 53446 | 140094782 | 140095905 | 176058 |
| 53447 | 140099125 | 140100896 | 188566, 187713 |
| 53448 | 140115856 | 140116967 | 212864 |
| 53449 | 140117711 | 140118889 | |
| 53450 | 140134362 | 140137102 | 188229 |
| 53451 | 140148416 | 140149245 | |
| 53452 | 140149348 | 140150770 | 188986 |
| 53453 | 140316384 | 140319051 | 188747, 187609 |
| 53454 | 140349063 | 140350106 | 165802 |
| 53455 | 140352805 | 140354115 | 165802 |
| 53456 | 140376482 | 140377468 | 130653 |
| 53457 | 140444525 | 140445093 | 130653 |
| 53458 | 140445504 | 140447339 | 182154 |
| 53459 | 140472525 | 140474174 | 148399 |
| 53460 | 140483926 | 140485659 | 165724 |
| 53461 | 140499399 | 140499952 | |
| 53462 | 140500019 | 140501631 | 197070 |
| 53463 | 140505887 | 140508041 | 197070 |
| 53464 | 140511930 | 140514901 | 181090, 203993 |
| 53465 | 140564571 | 140565818 | 181090 |
| 53466 | 140583918 | 140585010 | 181090 |

[0578] The locations of ODSCs on Chromosome 10 are shown in Table 52.

TABLE 52
ODSC Locations on Chromosome 10

| SEQ ID NO. | Start | End | Overlapping Gene(s) |
|---|---|---|---|
| 53467 | 179204 | 182776 | 015171 |
| 53468 | 353978 | 355174 | 151240 |
| 53469 | 384000 | 384894 | 151240 |
| 53470 | 418654 | 420218 | 151240 |
| 53471 | 500831 | 501304 | 151240 |
| 53472 | 639283 | 640713 | 151240 |
| 53473 | 695044 | 697425 | 180525, 151240 |
| 53474 | 734126 | 736298 | 151240 |
| 53475 | 758001 | 758859 | |
| 53476 | 976120 | 978786 | 107929 |
| 53477 | 1016190 | 1016993 | |
| 53478 | 1033383 | 1035278 | 107937, 205740 |
| 53479 | 1093950 | 1096338 | 047056, 067064 |
| 53480 | 1101485 | 1103610 | 047056 |
| 53481 | 2121201 | 2122610 | 226694 |
| 53482 | 3087701 | 3088575 | |
| 53483 | 3109593 | 3111560 | 067057 |
| 53484 | 3132949 | 3134817 | 067057 |
| 53485 | 3136017 | 3139219 | 067057 |
| 53486 | 3144414 | 3146277 | 067057 |
| 53487 | 3148711 | 3150931 | 067057 |
| 53488 | 3153767 | 3154494 | 067057 |
| 53489 | 3213699 | 3215270 | 107959 |
| 53490 | 3239047 | 3240945 | |
| 53491 | 3407834 | 3408286 | |
| 53492 | 3506858 | 3508080 | |
| 53493 | 3510275 | 3512007 | |
| 53494 | 3710202 | 3711395 | |
| 53495 | 3762503 | 3763796 | |
| 53496 | 3768718 | 3771200 | |
| 53497 | 3780331 | 3784068 | |
| 53498 | 3790063 | 3791714 | |
| 53499 | 3814413 | 3830769 | 067082 |
| 53500 | 3844282 | 3856632 | |
| 53501 | 3889583 | 3896832 | |
| 53502 | 3909236 | 3912169 | |
| 53503 | 3928092 | 3930902 | |
| 53504 | 3931548 | 3933296 | |
| 53505 | 3944105 | 3945541 | |
| 53506 | 4283861 | 4286820 | 233117 |
| 53507 | 4501622 | 4502275 | |
| 53508 | 4583311 | 4584301 | |
| 53509 | 4700124 | 4702333 | 225269, 231298 |
| 53510 | 4702468 | 4707546 | 225269, 231298 |
| 53511 | 4718017 | 4721584 | 231298 |
| 53512 | 4763937 | 4765070 | |
| 53513 | 4767084 | 4769209 | |
| 53514 | 4893301 | 4894989 | |
| 53515 | 4944118 | 4945417 | 187134 |
| 53516 | 4957669 | 4958943 | 187134 |
| 53517 | 4981357 | 4992252 | 187134 |
| 53518 | 4998541 | 4999786 | 187134 |
| 53519 | 5005999 | 5008949 | 187134 |
| 53520 | 5023611 | 5028567 | 187134 |
| 53521 | 5028622 | 5029139 | |
| 53522 | 5051060 | 5052318 | 151632 |
| 53523 | 5057070 | 5063514 | 151632 |
| 53524 | 5074993 | 5076676 | |
| 53525 | 5082333 | 5085465 | 196139 |
| 53526 | 5085687 | 5086593 | 196139 |
| 53527 | 5111861 | 5115407 | 196139 |
| 53528 | 5134969 | 5140627 | 239142, 196139 |
| 53529 | 5145528 | 5146349 | 196139 |
| 53530 | 5146741 | 5148617 | 196139 |
| 53531 | 5149468 | 5152037 | 196139 |
| 53532 | 5188839 | 5191795 | |
| 53533 | 5224245 | 5227657 | 196326 |
| 53534 | 5229785 | 5230962 | 196326 |
| 53535 | 5237022 | 5241925 | 251909, 198610, 196326 |
| 53536 | 5258570 | 5259236 | 198610 |
| 53537 | 5275987 | 5276499 | 231039 |
| 53538 | 5285355 | 5285927 | 231039 |
| 53539 | 5323830 | 5327618 | 215267 |
| 53540 | 5333157 | 5334766 | |
| 53541 | 5454064 | 5455943 | 173848 |
| 53542 | 5487985 | 5492310 | 173848 |
| 53543 | 5560019 | 5560605 | 205488 |
| 53544 | 5570261 | 5570942 | |
| 53545 | 5571404 | 5572203 | |
| 53546 | 5588711 | 5591367 | |
| 53547 | 5616542 | 5617087 | |
| 53548 | 5650647 | 5651115 | 231483 |
| 53549 | 5651378 | 5653611 | 231483 |
| 53550 | 5668045 | 5668975 | |
| 53551 | 5673114 | 5675565 | 240577 |
| 53552 | 5686660 | 5688658 | 196372 |
| 53553 | 5693858 | 5694667 | 196372 |
| 53554 | 5701562 | 5702880 | 196372 |
| 53555 | 5707298 | 5709029 | 196372 |
| 53556 | 5710261 | 5710789 | |
| 53557 | 5725948 | 5728035 | 108021 |
| 53558 | 5734351 | 5735506 | 108021 |
| 53559 | 5793626 | 5795246 | 108021 |
| 53560 | 5854073 | 5856694 | 272764, 057608 |
| 53561 | 5924776 | 5925646 | 134461 |
| 53562 | 5930980 | 5932956 | 134452, 134461 |
| 53563 | 5972151 | 5972672 | 134452 |
| 53564 | 5992149 | 5993557 | 134470 |
| 53565 | 6007080 | 6007693 | 134470 |
| 53566 | 6009900 | 6011359 | 134470 |
| 53567 | 6013009 | 6014332 | 134470 |
| 53568 | 6017781 | 6020557 | 134470 |
| 53569 | 6050618 | 6051854 | |
| 53570 | 6092424 | 6093492 | 134460 |
| 53571 | 6095579 | 6096622 | 134460 |
| 53572 | 6130494 | 6132425 | 134453 |
| 53573 | 6156230 | 6157277 | 134453 |
| 53574 | 6186118 | 6187948 | 170525 |
| 53575 | 6205383 | 6206790 | 170525 |
| 53576 | 6233914 | 6234745 | 170525 |
| 53577 | 6244401 | 6246742 | 213994, 170525 |
| 53578 | 6316566 | 6318291 | |
| 53579 | 6320508 | 6322997 | 215244 |
| 53580 | 6339594 | 6342959 | 215244 |
| 53581 | 6407219 | 6407924 | |
| 53582 | 6443289 | 6444229 | |
| 53583 | 6622021 | 6623123 | 237943, 065675 |
| 53584 | 7737842 | 7740549 | |
| 53585 | 7741056 | 7743791 | |
| 53586 | 7743875 | 7750898 | 151655 |
| 53587 | 7757071 | 7757870 | 151655 |
| 53588 | 7829144 | 7831421 | 165629, 151657 |
| 53589 | 7859721 | 7861351 | 165632 |
| 53590 | 7950652 | 7951350 | 165632 |
| 53591 | 8092187 | 8093310 | 197308 |
| 53592 | 8223282 | 8224088 | |
| 53593 | 8225116 | 8225738 | |
| 53594 | 8407950 | 8409077 | |
| 53595 | 8953915 | 8954637 | 234752 |
| 53596 | 8955596 | 8956092 | 234752 |
| 53597 | 11564639 | 11565448 | 148429 |
| 53598 | 11575156 | 11575858 | 148429 |
| 53599 | 11580695 | 11582379 | 148429 |
| 53600 | 11593285 | 11595299 | 148429 |
| 53601 | 11636763 | 11637642 | 148429 |
| 53602 | 11644849 | 11645379 | 148429 |
| 53603 | 11651928 | 11654466 | 271360, 148429 |
| 53604 | 11681953 | 11683032 | |
| 53605 | 11739608 | 11740494 | |
| 53606 | 11740927 | 11741922 | |
| 53607 | 11757531 | 11759119 | |
| 53608 | 11783924 | 11786072 | 134463 |
| 53609 | 11798814 | 11800441 | 134463 |
| 53610 | 11824713 | 11825458 | |
| 53611 | 11835351 | 11837072 | |
| 53612 | 11863395 | 11868740 | 148426 |
| 53613 | 11872358 | 11875030 | 148426 |
| 53614 | 11883128 | 11883922 | 148426 |
| 53615 | 11888394 | 11888951 | 148426 |
| 53616 | 11906371 | 11907272 | 148426, 225778 |
| 53617 | 11916075 | 11919871 | 225778 |
| 53618 | 11921950 | 11925633 | 225778 |
| 53619 | 11938633 | 11942027 | |
| 53620 | 11942074 | 11944748 | |
| 53621 | 12000965 | 12001389 | 151461 |
| 53622 | 12083701 | 12086211 | 151461 |
| 53623 | 12087372 | 12088094 | |
| 53624 | 12094943 | 12096542 | |
| 53625 | 12110350 | 12114941 | 181192 |
| 53626 | 12170797 | 12172255 | 065665 |
| 53627 | 12198309 | 12199448 | 065665 |
| 53628 | 12234539 | 12236064 | 165609 |
| 53629 | 12236167 | 12239114 | 151465, 165609 |
| 53630 | 12307460 | 12308161 | |
| 53631 | 12341349 | 12342677 | |
| 53632 | 12364347 | 12365037 | |
| 53633 | 12370841 | 12371632 | |
| 53634 | 12374959 | 12376801 | |
| 53635 | 12390321 | 12393219 | 183049 |
| 53636 | 12446719 | 12448594 | 183049 |
| 53637 | 12487235 | 12488133 | 183049 |
| 53638 | 12498411 | 12499189 | 252118, 183049 |
| 53639 | 12512810 | 12513687 | 183049 |
| 53640 | 12572829 | 12573922 | 183049 |
| 53641 | 12647364 | 12648686 | 183049 |
| 53642 | 12661588 | 12662254 | 183049 |
| 53643 | 12670743 | 12672302 | 183049 |
| 53644 | 12672543 | 12674760 | 183049 |
| 53645 | 12691946 | 12692515 | 183049 |
| 53646 | 12700475 | 12700953 | 183049 |
| 53647 | 12741000 | 12742293 | 183049 |
| 53648 | 12742460 | 12743088 | 183049 |
| 53649 | 12744902 | 12750513 | 183049 |
| 53650 | 12759798 | 12763904 | 183049 |
| 53651 | 12886603 | 12887687 | |
| 53652 | 12908356 | 12908774 | |
| 53653 | 12914683 | 12915628 | |
| 53654 | 13035551 | 13036154 | 151468 |
| 53655 | 13141048 | 13144853 | 123240, 151468 |
| 53656 | 13149310 | 13150416 | 123240 |
| 53657 | 13190127 | 13190850 | |
| 53658 | 13202899 | 13203752 | 065328 |
| 53659 | 13215478 | 13216115 | 065328 |
| 53660 | 13312607 | 13314636 | |
| 53661 | 13324911 | 13325955 | 107537 |
| 53662 | 13340843 | 13342907 | 107537 |
| 53663 | 13343004 | 13344933 | 107537 |
| 53664 | 13388290 | 13391548 | 086475 |
| 53665 | 13491397 | 13493251 | 165626 |
| 53666 | 13557418 | 13557835 | 165626 |
| 53667 | 13568760 | 13572156 | 227175, 165626 |
| 53668 | 13628567 | 13629633 | 165630 |
| 53669 | 13720463 | 13720982 | 151474 |
| 53670 | 13721490 | 13722258 | 151474 |
| 53671 | 13743117 | 13744067 | 151474 |
| 53672 | 13745344 | 13745819 | 151474 |
| 53673 | 13748623 | 13750013 | 151474 |
| 53674 | 13759708 | 13760581 | 151474 |
| 53675 | 13807403 | 13808132 | 151474 |
| 53676 | 14026427 | 14027114 | 151474 |
| 53677 | 14090688 | 14092234 | 151474 |
| 53678 | 14116259 | 14116927 | 235410, 151474 |
| 53679 | 14574717 | 14575544 | 065809 |
| 53680 | 14577582 | 14578806 | 065809 |
| 53681 | 14585040 | 14585886 | 065809 |
| 53682 | 14592147 | 14593089 | 065809 |
| 53683 | 14597400 | 14599492 | 065809 |
| 53684 | 14604568 | 14607285 | 065809 |
| 53685 | 14611609 | 14612516 | 065809 |
| 53686 | 14612808 | 14614572 | 065809 |
| 53687 | 14619679 | 14621933 | 065809 |
| 53688 | 14628803 | 14631134 | 065809 |
| 53689 | 14633871 | 14634431 | 065809 |
| 53690 | 14643845 | 14644974 | 065809 |
| 53691 | 14645088 | 14648802 | 065809 |
| 53692 | 14653619 | 14654881 | 065809 |
| 53693 | 14738442 | 14739269 | 065809 |
| 53694 | 14778240 | 14779382 | 065809 |
| 53695 | 14790476 | 14792156 | 065809 |
| 53696 | 14824457 | 14825432 | |
| 53697 | 14879262 | 14881501 | 187522, 185267 |
| 53698 | 14919686 | 14921917 | 272853, 152455 |
| 53699 | 14995661 | 14996648 | 152457 |
| 53700 | 15000918 | 15002750 | 197889 |
| 53701 | 15138533 | 15140469 | 152464, 176236 |
| 53702 | 15150207 | 15151278 | 152464, 152465 |
| 53703 | 15178785 | 15180013 | 152464, 152465 |
| 53704 | 15193843 | 15194931 | 152465 |
| 53705 | 15209313 | 15210880 | 152465 |
| 53706 | 15218200 | 15218823 | |
| 53707 | 15222654 | 15223247 | |
| 53708 | 15241446 | 15245122 | |
| 53709 | 15376075 | 15376707 | 148468 |
| 53710 | 15377359 | 15378128 | 148468 |
| 53711 | 15412083 | 15413755 | 148468 |
| 53712 | 15859402 | 15860034 | 148481 |
| 53713 | 15878763 | 15879257 | 148481 |
| 53714 | 15900741 | 15902992 | 148481 |
| 53715 | 16422935 | 16423741 | |
| 53716 | 16478785 | 16479760 | 165983 |
| 53717 | 16482175 | 16483226 | 165983 |
| 53718 | 16858487 | 16860329 | 148484 |
| 53719 | 17103772 | 17106253 | 107611 |
| 53720 | 17157652 | 17158159 | 107611 |
| 53721 | 17242581 | 17244234 | 107614 |
| 53722 | 17270253 | 17271267 | 026025, 229124 |
| 53723 | 17658309 | 17659758 | 165996 |
| 53724 | 17684764 | 17688464 | 136738, 260589 |
| 53725 | 18550587 | 18551541 | 165995 |
| 53726 | 18601566 | 18602099 | 165995 |
| 53727 | 18614782 | 18615605 | 165995 |
| 53728 | 18899064 | 18901712 | 241058 |
| 53729 | 18904445 | 18905662 | 241058 |
| 53730 | 18909794 | 18910399 | 241058 |
| 53731 | 18916084 | 18916872 | 241058 |
| 53732 | 18925967 | 18929693 | 241058 |
| 53733 | 18938323 | 18941420 | 152487, 241058, 271786 |
| 53734 | 18946046 | 18949977 | 165997, 152487 |
| 53735 | 18956908 | 18957813 | 165997 |
| 53736 | 18970701 | 18972513 | |
| 53737 | 18988748 | 18989571 | |
| 53738 | 19674669 | 19675339 | 204740 |
| 53739 | 19926861 | 19928734 | 204740 |
| 53740 | 19945141 | 19946395 | 204740 |
| 53741 | 19947182 | 19948314 | 204740 |
| 53742 | 20126000 | 20126845 | 120594 |
| 53743 | 20161529 | 20162176 | 120594 |
| 53744 | 20211180 | 20212214 | 120594 |
| 53745 | 20217912 | 20219458 | 120594 |
| 53746 | 20220028 | 20222088 | 120594 |
| 53747 | 20292582 | 20293306 | 120594 |
| 53748 | 21274754 | 21275584 | 078114 |
| 53749 | 21277062 | 21277950 | 078114 |
| 53750 | 21350769 | 21351309 | 078114 |
| 53751 | 21381970 | 21382890 | 078114 |
| 53752 | 21386335 | 21387620 | 078114 |
| 53753 | 21461207 | 21463880 | 231920, 078114 |
| 53754 | 21473002 | 21473742 | |
| 53755 | 21483173 | 21484787 | |
| 53756 | 21581559 | 21582304 | |
| 53757 | 21625119 | 21626631 | |
| 53758 | 21652772 | 21654167 | 230109 |
| 53759 | 21687460 | 21688220 | |
| 53760 | 21783237 | 21786675 | 222071, 204682 |
| 53761 | 21794587 | 21795251 | |
| 53762 | 21798138 | 21801647 | |
| 53763 | 21805354 | 21806740 | 180592 |
| 53764 | 21807469 | 21808210 | 180592 |
| 53765 | 21808803 | 21809761 | 180592 |
| 53766 | 21813836 | 21817321 | 180592 |
| 53767 | 21821862 | 21824774 | 078403 |
| 53768 | 21873743 | 21874170 | 078403 |
| 53769 | 21876956 | 21877509 | 078403 |
| 53770 | 22215553 | 22216437 | 136770 |
| 53771 | 22291306 | 22293333 | 136770 |
| 53772 | 22517734 | 22518825 | |
| 53773 | 22604420 | 22606341 | 269897, 148444 |
| 53774 | 22608729 | 22611651 | 168283, 148444, 269897 |
| 53775 | 22613899 | 22615014 | 269897, 168283 |
| 53776 | 22629038 | 22630561 | 272366 |
| 53777 | 22716036 | 22717503 | 077327 |
| 53778 | 22722401 | 22724076 | 077327 |
| 53779 | 22725105 | 22727372 | 077327 |
| 53780 | 22755460 | 22756308 | |
| 53781 | 22757401 | 22758221 | |
| 53782 | 22843295 | 22844127 | 150867 |
| 53783 | 22912929 | 22913792 | 150867 |
| 53784 | 22944445 | 22945105 | 150867 |
| 53785 | 22969626 | 22973390 | 150867 |
| 53786 | 23000886 | 23003877 | 150867 |
| 53787 | 23007475 | 23008127 | |
| 53788 | 23068273 | 23068858 | |
| 53789 | 23354157 | 23355061 | |
| 53790 | 23384097 | 23385517 | 148450 |
| 53791 | 23388569 | 23389435 | 148450 |
| 53792 | 23626940 | 23627675 | 179133 |
| 53793 | 23727473 | 23729483 | 165312 |
| 53794 | 23794388 | 23795440 | |
| 53795 | 23800804 | 23802331 | |
| 53796 | 24496333 | 24498679 | 120549 |
| 53797 | 24581656 | 24582771 | 120549 |
| 53798 | 24716186 | 24718373 | 120549 |
| 53799 | 24721585 | 24722325 | 120549 |
| 53800 | 24751934 | 24756345 | 120549 |
| 53801 | 24771928 | 24773123 | 120549 |
| 53802 | 24931700 | 24932654 | 107863 |
| 53803 | 24995343 | 24997651 | 107863 |
| 53804 | 25011160 | 25014445 | 107863 |
| 53805 | 25051113 | 25052546 | |
| 53806 | 25190809 | 25191670 | 099256 |
| 53807 | 25240859 | 25242567 | 273107, 099256 |
| 53808 | 25246444 | 25247961 | |
| 53809 | 25251243 | 25253182 | |
| 53810 | 25282169 | 25282736 | 151023 |
| 53811 | 25305155 | 25306731 | 185875 |
| 53812 | 25347976 | 25354021 | |
| 53813 | 25367011 | 25370493 | |
| 53814 | 26623731 | 26624932 | |
| 53815 | 26654094 | 26655246 | |
| 53816 | 26726037 | 26730396 | 077420 |
| 53817 | 26756123 | 26758686 | 077420 |
| 53818 | 26771852 | 26773394 | 077420 |
| 53819 | 26773496 | 26778492 | 077420 |
| 53820 | 26780132 | 26781516 | 077420 |
| 53821 | 26844744 | 26845352 | 077420 |
| 53822 | 26860379 | 26861597 | |
| 53823 | 26900922 | 26901848 | |
| 53824 | 26910696 | 26912036 | |
| 53825 | 26985501 | 26987569 | 148459 |
| 53826 | 27022861 | 27023547 | 148459 |
| 53827 | 27069240 | 27071629 | 136754 |
| 53828 | 27147844 | 27150590 | 136754 |
| 53829 | 27388603 | 27390132 | 107890 |
| 53830 | 27442273 | 27444910 | 120539, 136758 |
| 53831 | 27528730 | 27532842 | 262412, 107897 |
| 53832 | 27541289 | 27542254 | 230445 |
| 53833 | 27554756 | 27555357 | 238021 |
| 53834 | 27608269 | 27609500 | |
| 53835 | 27672704 | 27673399 | |
| 53836 | 27792713 | 27794472 | 099246 |
| 53837 | 28030459 | 28032804 | 150051 |
| 53838 | 28400291 | 28401455 | 150054 |
| 53839 | 28408232 | 28410249 | 150054 |
| 53840 | 28459919 | 28461382 | 150054 |
| 53841 | 28504780 | 28505221 | 150054 |
| 53842 | 28591190 | 28592441 | 150054 |
| 53843 | 28654734 | 28655280 | |
| 53844 | 28820620 | 28823832 | 095787, 254635 |
| 53845 | 28858546 | 28859160 | 095787 |
| 53846 | 28876206 | 28877323 | 095787 |
| 53847 | 28881742 | 28882211 | 095787 |
| 53848 | 28922612 | 28923161 | |
| 53849 | 28965453 | 28968434 | 095739 |
| 53850 | 29023857 | 29024538 | |
| 53851 | 29043523 | 29044357 | |
| 53852 | 29058057 | 29058639 | |
| 53853 | 29086030 | 29087469 | 232624 |
| 53854 | 29096425 | 29097766 | 232624, 271220 |
| 53855 | 29127630 | 29129030 | |
| 53856 | 29162199 | 29162955 | 204365 |
| 53857 | 29227932 | 29229818 | |
| 53858 | 29271721 | 29272244 | |
| 53859 | 29273116 | 29273759 | |
| 53860 | 29280420 | 29281323 | |
| 53861 | 29393317 | 29394966 | |
| 53862 | 29418714 | 29419846 | |
| 53863 | 29429580 | 29431381 | |
| 53864 | 29431529 | 29432017 | |
| 53865 | 29438777 | 29439462 | |
| 53866 | 29452406 | 29453200 | |
| 53867 | 29528706 | 29529373 | |
| 53868 | 29555516 | 29556132 | |
| 53869 | 29606011 | 29609330 | 120563 |
| 53870 | 29611392 | 29612699 | |
| 53871 | 29612793 | 29613990 | |
| 53872 | 29615220 | 29617123 | |
| 53873 | 29617736 | 29618809 | |
| 53874 | 29663712 | 29664450 | |
| 53875 | 29697823 | 29699596 | 224597 |
| 53876 | 29907498 | 29908927 | 197321 |
| 53877 | 29912776 | 29913130 | 197321 |
| 53878 | 29937053 | 29938203 | 197321 |
| 53879 | 29947541 | 29949277 | 197321 |
| 53880 | 30002537 | 30003740 | 197321 |
| 53881 | 30023327 | 30026269 | 197321 |
| 53882 | 30050694 | 30051265 | |
| 53883 | 30091969 | 30096708 | |
| 53884 | 30099553 | 30101912 | |
| 53885 | 30119607 | 30120636 | |
| 53886 | 30129305 | 30130629 | |
| 53887 | 30130725 | 30131278 | |
| 53888 | 30142784 | 30143354 | |
| 53889 | 30215410 | 30216399 | |
| 53890 | 30235063 | 30239942 | |
| 53891 | 30243993 | 30247572 | |
| 53892 | 30288315 | 30291866 | |
| 53893 | 30449270 | 30449827 | |
| 53894 | 30471306 | 30472183 | |
| 53895 | 30474854 | 30476387 | |
| 53896 | 30636894 | 30639054 | 107951 |
| 53897 | 30721767 | 30724161 | 107968 |
| 53898 | 30781904 | 30784845 | |
| 53899 | 30792566 | 30793468 | |
| 53900 | 30799450 | 30800358 | |
| 53901 | 30826566 | 30827639 | |
| 53902 | 30830553 | 30832684 | |
| 53903 | 30842401 | 30843914 | 228800 |
| 53904 | 30846516 | 30847469 | |
| 53905 | 30872393 | 30873037 | |
| 53906 | 30876157 | 30877141 | |
| 53907 | 30894088 | 30895949 | |
| 53908 | 30900665 | 30901467 | 151033 |
| 53909 | 30905907 | 30906384 | 151033 |
| 53910 | 30927006 | 30927441 | |
| 53911 | 31072984 | 31074658 | |
| 53912 | 31269746 | 31270770 | 183621 |
| 53913 | 31272675 | 31275687 | 183621 |
| 53914 | 31279749 | 31281336 | 183621 |
| 53915 | 31287569 | 31290354 | 183621 |
| 53916 | 31319795 | 31321764 | 183621 |
| 53917 | 31422367 | 31424253 | |
| 53918 | 31531751 | 31532259 | 237036, 272381 |
| 53919 | 31606546 | 31610795 | 148516, 237036 |
| 53920 | 31632490 | 31633095 | 148516 |
| 53921 | 31641957 | 31643407 | 148516 |
| 53922 | 32043406 | 32045202 | 222412 |
| 53923 | 32046831 | 32049989 | |
| 53924 | 32153666 | 32154336 | 165322 |
| 53925 | 32170001 | 32171068 | 165322 |
| 53926 | 32177018 | 32177994 | 165322 |
| 53927 | 32216258 | 32220139 | 165322 |
| 53928 | 32228319 | 32234224 | |
| 53929 | 32236059 | 32237232 | |
| 53930 | 32343814 | 32345806 | 206660, 170759 |
| 53931 | 32400930 | 32401376 | |
| 53932 | 32583640 | 32584608 | 120616 |
| 53933 | 32634856 | 32637063 | 233825, 222309, 229327, |
| | | | 120616 |
| 53934 | 32665444 | 32668998 | 120616 |
| 53935 | 32734262 | 32736341 | 216937 |
| 53936 | 33076983 | 33077839 | 150076 |
| 53937 | 33243721 | 33248812 | 229656, 150093 |
| 53938 | 33260330 | 33260985 | 229656, 150093 |
| 53939 | 33268686 | 33275966 | 229656, 150093 |
| 53940 | 33292729 | 33296006 | 150093, 229656 |
| 53941 | 33296925 | 33300462 | 229656 |
| 53942 | 33417348 | 33420395 | |
| 53943 | 33422200 | 33427009 | |
| 53944 | 33431042 | 33433626 | |
| 53945 | 33433769 | 33435590 | |
| 53946 | 33443549 | 33447403 | |
| 53947 | 33482069 | 33483610 | 099250 |
| 53948 | 33484280 | 33486686 | 099250 |
| 53949 | 33526648 | 33527854 | 099250 |
| 53950 | 33551782 | 33555021 | 099250 |
| 53951 | 33561343 | 33563586 | 099250 |
| 53952 | 33564971 | 33566096 | 099250 |
| 53953 | 33579850 | 33580680 | 099250 |
| 53954 | 33613453 | 33614380 | 099250 |
| 53955 | 33622190 | 33626678 | 099250 |
| 53956 | 33765750 | 33766765 | |
| 53957 | 33796637 | 33797342 | |
| 53958 | 33798064 | 33798562 | |
| 53959 | 33860453 | 33860952 | |
| 53960 | 33901020 | 33902021 | |
| 53961 | 34087963 | 34089060 | |
| 53962 | 34090345 | 34091338 | |
| 53963 | 34165231 | 34166528 | |
| 53964 | 34188600 | 34189578 | |
| 53965 | 34409995 | 34411348 | 148498 |
| 53966 | 34413072 | 34414192 | 148498 |
| 53967 | 34473881 | 34474439 | 148498 |
| 53968 | 34569261 | 34569982 | 148498 |
| 53969 | 34579586 | 34580158 | 148498 |
| 53970 | 34652847 | 34654378 | 148498 |
| 53971 | 34826289 | 34827650 | 148498 |
| 53972 | 34840152 | 34840753 | 148498 |
| 53973 | 34986332 | 34989121 | 148498 |
| 53974 | 34998476 | 35001278 | 148498 |
| 53975 | 35002689 | 35003807 | 148498 |
| 53976 | 35006009 | 35006719 | 148498 |
| 53977 | 35016366 | 35017100 | 148498 |
| 53978 | 35020674 | 35023246 | 148498 |
| 53979 | 35025709 | 35027155 | 148498 |
| 53980 | 35035046 | 35035634 | 148498 |
| 53981 | 35046602 | 35048632 | 148498 |
| 53982 | 35102737 | 35105049 | 226386, 148498 |
| 53983 | 35283396 | 35284065 | |
| 53984 | 35324439 | 35324928 | 108094 |
| 53985 | 35378507 | 35380057 | 108094 |
| 53986 | 35414932 | 35417270 | 095794, 230534 |
| 53987 | 35483934 | 35485416 | 095794 |
| 53988 | 35497503 | 35497839 | 095794 |
| 53989 | 35500011 | 35500913 | 095794 |
| 53990 | 35505284 | 35505924 | |
| 53991 | 35508682 | 35510178 | 233200 |
| 53992 | 35535015 | 35535651 | |
| 53993 | 35556023 | 35557122 | 108100 |
| 53994 | 35619940 | 35622851 | 271335, 108100 |
| 53995 | 35622974 | 35626874 | 271335, 108100 |
| 53996 | 35653514 | 35654439 | 108100 |
| 53997 | 35708993 | 35712344 | 108100 |
| 53998 | 35712400 | 35715051 | 108100 |
| 53999 | 35736055 | 35738050 | 108100 |
| 54000 | 35740424 | 35741053 | 108100 |
| 54001 | 35742751 | 35743790 | 108100 |
| 54002 | 35751227 | 35751983 | 108100 |
| 54003 | 35784377 | 35784795 | 108100 |
| 54004 | 35831031 | 35831584 | 108100 |
| 54005 | 35930076 | 35931922 | 264780, 177283 |
| 54006 | 35974197 | 35974888 | |
| 54007 | 36053757 | 36054731 | |
| 54008 | 36056663 | 36057294 | |
| 54009 | 36398184 | 36399763 | |
| 54010 | 36403457 | 36404677 | |
| 54011 | 36970578 | 36971059 | |
| 54012 | 38145333 | 38147650 | 236514, 198105 |
| 54013 | 38149282 | 38150450 | |
| 54014 | 38264543 | 38266042 | 226447, 175395 |
| 54015 | 38299167 | 38300484 | 189180 |
| 54016 | 38382773 | 38384424 | 075407 |
| 54017 | 42384976 | 42385764 | |
| 54018 | 43047858 | 43048782 | 234420 |
| 54019 | 43125672 | 43126671 | 272373, 196693 |
| 54020 | 43132537 | 43134564 | 272373, 196693 |
| 54021 | 43277305 | 43279029 | 165733 |
| 54022 | 43447307 | 43448263 | |
| 54023 | 43521483 | 43522544 | |
| 54024 | 43549211 | 43549910 | |
| 54025 | 43555697 | 43556269 | |
| 54026 | 43600412 | 43601678 | 165731 |
| 54027 | 43632666 | 43635090 | 169826, 273008 |
| 54028 | 43757147 | 43757689 | 198915 |
| 54029 | 43800041 | 43800701 | |
| 54030 | 43804331 | 43804933 | |
| 54031 | 43878615 | 43879302 | |
| 54032 | 43890850 | 43893657 | 169813 |
| 54033 | 43894582 | 43895301 | 169813 |
| 54034 | 43901573 | 43905997 | 169813 |
| 54035 | 43915316 | 43917311 | 230555 |
| 54036 | 43931297 | 43932833 | 243660 |
| 54037 | 43950238 | 43951915 | 243660 |
| 54038 | 44069377 | 44070313 | 196793 |
| 54039 | 44101586 | 44102826 | 198298, 232004 |
| 54040 | 44143525 | 44144704 | 169740, 223910 |
| 54041 | 44184861 | 44186000 | |
| 54042 | 44357515 | 44358491 | 226808 |
| 54043 | 44358650 | 44360167 | 226808 |
| 54044 | 44503524 | 44504644 | |
| 54045 | 44690795 | 44691716 | |
| 54046 | 44732195 | 44732776 | |
| 54047 | 44886006 | 44886517 | |
| 54048 | 45360163 | 45360898 | 224812 |
| 54049 | 45406485 | 45407181 | 187783, 224812, 234504 |
| 54050 | 45422579 | 45423186 | 224812, 187783 |
| 54051 | 45430611 | 45431842 | 224812, 187783 |
| 54052 | 45435151 | 45435921 | 224812, 223462 |
| 54053 | 45453492 | 45455947 | 107551, 273363, 224812 |
| 54054 | 45461298 | 45462360 | 107551 |
| 54055 | 45469665 | 45471978 | 107551, 165507 |
| 54056 | 45472200 | 45478393 | 165507, 107551 |
| 54057 | 45485437 | 45486227 | 107551 |
| 54058 | 45490898 | 45492872 | 107551 |
| 54059 | 45494924 | 45497783 | 165512, 226937, 165511 |
| 54060 | 45914539 | 45915304 | 012779 |
| 54061 | 45946591 | 45947505 | 231964 |
| 54062 | 45965616 | 45966554 | 165406 |
| 54063 | 45966867 | 45967685 | 165406 |
| 54064 | 46089360 | 46090679 | 165406 |
| 54065 | 46122832 | 46123368 | 172671 |
| 54066 | 46167339 | 46169342 | 172671 |
| 54067 | 47008991 | 47009734 | |
| 54068 | 47074222 | 47074664 | 223477 |
| 54069 | 47092053 | 47093880 | 223477 |
| 54070 | 48354393 | 48355185 | 165388 |
| 54071 | 48398413 | 48398842 | |
| 54072 | 49514176 | 49515789 | 107643 |
| 54073 | 49517664 | 49518491 | 107643 |
| 54074 | 49571508 | 49574879 | 107643 |
| 54075 | 49732253 | 49732650 | 128805 |
| 54076 | 49863057 | 49864804 | 128805 |
| 54077 | 50236598 | 50237182 | 165633 |
| 54078 | 50257624 | 50258216 | 165633 |
| 54079 | 50279213 | 50279737 | 165633 |
| 54080 | 50284438 | 50285803 | 165633 |
| 54081 | 50287979 | 50290297 | 165633 |
| 54082 | 50315104 | 50315704 | 165633 |
| 54083 | 50322759 | 50323997 | 165633 |
| 54084 | 50384703 | 50386746 | 204161 |
| 54085 | 50397958 | 50398450 | |
| 54086 | 50570175 | 50571496 | |
| 54087 | 50746347 | 50748034 | 243251, 258838, 225830 |
| 54088 | 50967873 | 50968441 | 197444 |
| 54089 | 50968610 | 50970709 | 197444 |
| 54090 | 51044699 | 51046986 | 227345 |
| 54091 | 51561706 | 51562647 | 138294 |
| 54092 | 51563064 | 51567588 | 138293 |
| 54093 | 51571900 | 51574039 | 138293 |
| 54094 | 51574295 | 51576825 | 138293 |
| 54095 | 51580376 | 51581454 | 138293 |
| 54096 | 51592828 | 51593682 | 138297 |
| 54097 | 52009763 | 52010778 | |
| 54098 | 52145329 | 52145752 | 198964 |
| 54099 | 52151962 | 52156461 | 269700, 198964 |
| 54100 | 52156560 | 52157164 | 198964 |
| 54101 | 52177186 | 52178907 | 198964 |
| 54102 | 52257402 | 52258381 | 198964 |
| 54103 | 52270796 | 52272506 | 198964 |
| 54104 | 52274551 | 52275823 | 198964 |
| 54105 | 52298203 | 52299344 | 198964 |
| 54106 | 52309595 | 52310440 | 198964 |
| 54107 | 52323604 | 52324329 | 198964 |
| 54108 | 52325667 | 52326465 | 198964 |
| 54109 | 52331434 | 52332543 | 198964 |
| 54110 | 52342269 | 52343157 | 198964 |
| 54111 | 52352434 | 52354724 | 198964 |
| 54112 | 52364026 | 52365738 | 198964 |
| 54113 | 52366239 | 52366747 | 198964 |
| 54114 | 52381550 | 52386123 | 226200, 198964 |
| 54115 | 52499069 | 52500375 | 204147 |
| 54116 | 52567729 | 52569884 | 204147, 148584 |
| 54117 | 52611199 | 52612581 | 148584 |
| 54118 | 52614673 | 52616537 | 148584 |
| 54119 | 52641593 | 52646063 | 148584 |
| 54120 | 52653383 | 52653795 | |
| 54121 | 53458637 | 53460116 | 177613, 185532 |
| 54122 | 53972340 | 53973542 | 185532 |
| 54123 | 54527615 | 54528731 | 165471 |
| 54124 | 54530457 | 54532984 | 165471 |
| 54125 | 54533924 | 54535657 | |
| 54126 | 54643732 | 54644493 | |
| 54127 | 54766399 | 54767561 | |
| 54128 | 55120973 | 55121525 | |
| 54129 | 55163413 | 55163914 | |
| 54130 | 55646259 | 55647020 | 150275 |
| 54131 | 58120656 | 58121520 | 122952 |
| 54132 | 59388202 | 59389691 | |
| 54133 | 59453951 | 59457903 | |
| 54134 | 59463166 | 59464043 | |
| 54135 | 59536708 | 59537313 | |
| 54136 | 59624181 | 59625707 | |
| 54137 | 59719294 | 59719871 | |
| 54138 | 59752139 | 59752889 | |
| 54139 | 59782758 | 59783872 | |
| 54140 | 59788344 | 59789201 | |
| 54141 | 59874987 | 59875733 | |
| 54142 | 60025486 | 60028003 | 151151 |
| 54143 | 60028259 | 60030059 | 122873 |
| 54144 | 60040482 | 60041676 | 122873 |
| 54145 | 60082126 | 60082997 | |
| 54146 | 60094546 | 60095854 | 072401 |
| 54147 | 60144158 | 60145937 | 108064 |
| 54148 | 60227160 | 60229421 | |
| 54149 | 60412566 | 60413341 | 122870 |
| 54150 | 60421873 | 60422752 | 122870 |
| 54151 | 60514898 | 60516773 | 122870 |
| 54152 | 60572925 | 60574118 | 122870 |
| 54153 | 60577086 | 60578116 | 122870 |
| 54154 | 60580903 | 60582044 | 122870 |
| 54155 | 60583569 | 60584339 | 122870 |
| 54156 | 60615207 | 60617473 | |
| 54157 | 60654703 | 60655278 | |
| 54158 | 60656043 | 60656765 | |
| 54159 | 60702394 | 60703856 | |
| 54160 | 60727150 | 60727934 | |
| 54161 | 60753290 | 60755520 | |
| 54162 | 60758569 | 60761292 | 237949 |
| 54163 | 60765675 | 60768801 | |
| 54164 | 60796210 | 60797604 | |
| 54165 | 60821657 | 60822204 | |
| 54166 | 60833229 | 60833805 | |
| 54167 | 60935941 | 60937550 | 165443 |
| 54168 | 61075246 | 61075706 | 148541 |
| 54169 | 61081710 | 61082247 | 148541 |
| 54170 | 61082450 | 61083390 | 148541 |
| 54171 | 61096289 | 61097463 | 148541 |
| 54172 | 61121401 | 61123065 | 148541 |
| 54173 | 61370729 | 61371142 | 235140 |
| 54174 | 61631755 | 61634988 | 108091 |
| 54175 | 61664743 | 61668557 | 108091 |
| 54176 | 61709296 | 61709814 | |
| 54177 | 61724847 | 61725697 | |
| 54178 | 61731392 | 61732326 | |
| 54179 | 61848606 | 61849593 | 151150 |
| 54180 | 61856383 | 61857437 | 151150 |
| 54181 | 61907484 | 61908546 | 151150 |
| 54182 | 61931025 | 61931866 | 151150 |
| 54183 | 61946059 | 61946976 | 151150 |
| 54184 | 62042403 | 62043153 | 151150 |
| 54185 | 62144170 | 62145498 | 151150 |
| 54186 | 62162791 | 62163364 | 151150 |
| 54187 | 62182436 | 62183189 | 151150 |
| 54188 | 62185150 | 62187298 | 151150 |
| 54189 | 62331629 | 62333028 | 151150 |
| 54190 | 62387353 | 62388546 | 151150 |
| 54191 | 62537655 | 62538392 | 170312 |
| 54192 | 62698058 | 62698418 | 072422 |
| 54193 | 62702772 | 62705167 | 072422 |
| 54194 | 62715646 | 62716366 | 072422 |
| 54195 | 62723024 | 62725658 | 072422 |
| 54196 | 62760628 | 62761934 | 072422 |
| 54197 | 62822541 | 62823238 | |
| 54198 | 63594673 | 63598110 | |
| 54199 | 63656604 | 63657870 | |
| 54200 | 63659230 | 63665145 | 150347 |
| 54201 | 63702489 | 63703932 | 150347 |
| 54202 | 63723866 | 63725256 | 150347 |
| 54203 | 63777900 | 63778708 | 150347 |
| 54204 | 63781399 | 63782993 | 150347 |
| 54205 | 63797174 | 63799037 | 150347 |
| 54206 | 63805022 | 63806551 | 150347 |
| 54207 | 63807897 | 63811216 | 150347 |
| 54208 | 63836168 | 63837115 | 150347 |
| 54209 | 63990236 | 63992257 | 182010 |
| 54210 | 64192091 | 64194075 | 138311 |
| 54211 | 64319851 | 64320507 | 138311 |
| 54212 | 64322789 | 64325739 | 138311 |
| 54213 | 64563569 | 64565943 | 181915, 238280 |
| 54214 | 64576604 | 64578155 | 122877 |
| 54215 | 64873708 | 64875232 | |
| 54216 | 64875343 | 64876533 | |
| 54217 | 64892404 | 64894838 | 148572 |
| 54218 | 64896969 | 64897564 | 148572 |
| 54219 | 64995980 | 64996568 | 171988 |
| 54220 | 65025703 | 65029971 | 171988 |
| 54221 | 65190010 | 65190532 | 171988 |
| 54222 | 65224117 | 65226652 | 272767, 171988 |
| 54223 | 65280398 | 65282451 | 165476 |
| 54224 | 65388118 | 65391610 | |
| 54225 | 65459276 | 65461206 | 228566 |
| 54226 | 65461213 | 65462503 | 228566 |
| 54227 | 65466935 | 65468933 | 228566 |
| 54228 | 65469955 | 65473830 | 228566 |
| 54229 | 65478222 | 65480341 | 228566 |
| 54230 | 65497771 | 65498939 | 228566 |
| 54231 | 65814098 | 65814603 | |
| 54232 | 65835274 | 65835888 | |
| 54233 | 66129542 | 66130906 | |
| 54234 | 66792235 | 66793719 | |
| 54235 | 66870875 | 66871147 | |
| 54236 | 67260861 | 67261486 | |
| 54237 | 67278205 | 67279012 | |
| 54238 | 67709617 | 67710261 | 183230 |
| 54239 | 68043588 | 68044163 | 183230 |
| 54240 | 68080951 | 68082884 | 183230 |
| 54241 | 69048238 | 69048910 | 183230 |
| 54242 | 69523595 | 69525409 | |
| 54243 | 69559984 | 69560724 | 108176 |
| 54244 | 69563036 | 69563771 | 108176 |
| 54245 | 69579439 | 69580588 | 108176 |
| 54246 | 69587299 | 69588052 | 108176 |
| 54247 | 69608965 | 69610365 | 272892 |
| 54248 | 69643521 | 69645243 | 096717 |
| 54249 | 69649218 | 69649904 | 096717 |
| 54250 | 69719560 | 69720046 | 148634 |
| 54251 | 69833148 | 69835497 | 148634 |
| 54252 | 69845674 | 69848899 | |
| 54253 | 69856281 | 69857958 | |
| 54254 | 69872163 | 69873323 | 138347 |
| 54255 | 69894496 | 69897624 | 138347 |
| 54256 | 69910476 | 69916708 | 138347 |
| 54257 | 69923366 | 69924127 | 138347 |
| 54258 | 69990638 | 69991708 | 179774 |
| 54259 | 70061497 | 70062373 | 108187 |
| 54260 | 70063232 | 70064393 | 108187 |
| 54261 | 70065512 | 70066384 | 108187 |
| 54262 | 70087861 | 70088579 | 108187 |
| 54263 | 70090366 | 70093494 | 096746, 108187 |
| 54264 | 70165924 | 70167501 | 204130 |
| 54265 | 70286114 | 70287925 | 122912 |
| 54266 | 70301872 | 70303229 | |
| 54267 | 70319742 | 70320841 | 138336 |
| 54268 | 70359586 | 70360744 | 138336 |
| 54269 | 70407351 | 70408815 | 138336 |
| 54270 | 70480317 | 70482076 | 060339 |
| 54271 | 70659962 | 70661976 | 107625 |
| 54272 | 70714973 | 70717510 | 165732 |
| 54273 | 70748401 | 70749171 | 198954 |
| 54274 | 70882831 | 70884882 | 122958 |
| 54275 | 70920480 | 70921397 | 233163, 122958 |
| 54276 | 70938823 | 70941411 | 156502 |
| 54277 | 70962020 | 70962639 | 156502 |
| 54278 | 70975733 | 70978113 | 229261 |
| 54279 | 70979204 | 70980817 | 156510, 229261 |
| 54280 | 70981958 | 70982976 | 156510, 229261 |
| 54281 | 71074768 | 71075162 | 156515 |
| 54282 | 71168182 | 71169399 | 075073 |
| 54283 | 71389669 | 71390620 | 171224 |
| 54284 | 71443800 | 71447124 | 235645 |
| 54285 | 71455357 | 71456257 | |
| 54286 | 71528966 | 71529538 | |
| 54287 | 71650116 | 71650720 | 197467 |
| 54288 | 71812106 | 71814325 | 099284 |
| 54289 | 71845458 | 71846214 | 099284 |
| 54290 | 71850475 | 71851151 | 099284 |
| 54291 | 71868647 | 71869865 | 042286, 099284 |
| 54292 | 71890605 | 71893428 | 042286 |
| 54293 | 71904777 | 71907175 | 079332, 156521 |
| 54294 | 71914951 | 71915712 | 079332 |
| 54295 | 71929341 | 71931107 | 079332 |
| 54296 | 71991393 | 71994227 | 180817 |
| 54297 | 72082288 | 72084666 | 172731 |
| 54298 | 72090943 | 72092583 | 172731 |
| 54299 | 72112016 | 72112850 | 172731 |
| 54300 | 72141758 | 72142734 | 172731 |
| 54301 | 72147059 | 72147840 | |
| 54302 | 72163651 | 72165724 | 148730 |
| 54303 | 72190250 | 72190764 | |
| 54304 | 72475476 | 72476175 | 138316 |
| 54305 | 72575283 | 72576716 | 166224 |
| 54306 | 72595626 | 72596138 | 166224 |
| 54307 | 72613315 | 72614269 | 166224 |
| 54308 | 72645511 | 72646207 | 166228 |
| 54309 | 72647070 | 72648595 | 166228 |
| 54310 | 72976994 | 72977742 | 107731, 237512 |
| 54311 | 73006990 | 73007725 | 107731 |
| 54312 | 73025235 | 73028470 | 107731 |
| 54313 | 73052302 | 73053286 | 107731 |
| 54314 | 73067255 | 73069973 | |
| 54315 | 73078545 | 73080329 | 198246 |
| 54316 | 73093847 | 73094660 | 198246 |
| 54317 | 73096264 | 73098299 | 198246 |
| 54318 | 73098469 | 73101449 | 198246 |
| 54319 | 73102018 | 73104397 | 198246 |
| 54320 | 73106881 | 73108800 | 198246 |
| 54321 | 73136529 | 73137861 | |
| 54322 | 73233470 | 73234131 | 107736 |
| 54323 | 73356971 | 73358236 | 107736 |
| 54324 | 73372875 | 73373809 | 107736 |
| 54325 | 73394802 | 73395785 | 107736 |
| 54326 | 73397379 | 73399176 | 107736 |
| 54327 | 73524461 | 73528101 | 107738, 107736 |
| 54328 | 73559652 | 73560328 | 107736 |
| 54329 | 73605728 | 73606150 | 197746 |
| 54330 | 73609902 | 73611834 | 197746 |
| 54331 | 73619384 | 73621535 | |
| 54332 | 73630802 | 73631642 | |
| 54333 | 73647921 | 73650267 | |
| 54334 | 73734210 | 73737063 | 122863 |
| 54335 | 73828532 | 73829250 | 107742 |
| 54336 | 73855885 | 73859286 | 138303 |
| 54337 | 73867025 | 73867794 | 138303 |
| 54338 | 73975071 | 73977058 | 166295, 138303 |
| 54339 | 73989110 | 73989828 | 166295 |
| 54340 | 74007938 | 74008937 | |
| 54341 | 74014336 | 74015659 | |
| 54342 | 74019287 | 74021743 | |
| 54343 | 74023009 | 74023859 | |
| 54344 | 74031633 | 74038245 | 168209, 269926 |
| 54345 | 74057030 | 74058826 | |
| 54346 | 74066739 | 74071232 | |
| 54347 | 74074607 | 74077490 | |
| 54348 | 74077760 | 74083444 | |
| 54349 | 74087385 | 74097413 | 148719 |
| 54350 | 74112726 | 74115381 | 148719 |
| 54351 | 74262352 | 74263506 | 226163, 107745 |
| 54352 | 74283387 | 74284833 | 107745 |
| 54353 | 74384930 | 74386078 | 107745 |
| 54354 | 74397066 | 74397646 | |
| 54355 | 74398221 | 74399121 | |
| 54356 | 74447677 | 74448637 | |
| 54357 | 74451648 | 74452960 | 156026 |
| 54358 | 74500204 | 74500722 | 156026 |
| 54359 | 74712001 | 74715371 | 138308 |
| 54360 | 74848131 | 74848550 | 122884 |
| 54361 | 74854601 | 74857299 | 122884 |
| 54362 | 74873320 | 74873696 | 166321 |
| 54363 | 74877079 | 74878828 | 166321 |
| 54364 | 74891665 | 74892577 | 122882 |
| 54365 | 74895633 | 74897238 | 122882 |
| 54366 | 74926832 | 74928799 | 138286, 122882 |
| 54367 | 75006333 | 75007970 | 236756, 182180, 213551 |
| 54368 | 75011387 | 75013490 | 227540, 182180, 236756 |
| 54369 | 75118124 | 75118902 | 156042 |
| 54370 | 75172504 | 75174721 | 138279 |
| 54371 | 75254267 | 75256397 | 221817, 107758 |
| 54372 | 75335970 | 75336409 | 166348 |
| 54373 | 75337435 | 75338062 | 166348 |
| 54374 | 75346103 | 75346887 | 166348 |
| 54375 | 75385476 | 75386641 | 268584, 166348 |
| 54376 | 75408619 | 75409116 | 166317 |
| 54377 | 75489646 | 75490754 | 250959, 242338, 271816, |
| | | | 242288 |
| 54378 | 75502929 | 75505006 | 176986 |
| 54379 | 75510543 | 75511038 | 176986 |
| 54380 | 75531443 | 75533128 | 196968, 267964, 176986 |
| 54381 | 75541062 | 75542629 | 172586 |
| 54382 | 75544887 | 75546831 | 214655 |
| 54383 | 75570468 | 75571838 | 166507, 272916 |
| 54384 | 75576661 | 75577413 | 148660 |
| 54385 | 75579045 | 75580105 | 148660 |
| 54386 | 75599946 | 75600890 | 148660 |
| 54387 | 75613828 | 75614746 | 148660 |
| 54388 | 75633503 | 75635015 | 148660 |
| 54389 | 75647193 | 75647975 | |
| 54390 | 75757429 | 75759888 | 035403 |
| 54391 | 75777975 | 75778470 | 035403, 225761 |
| 54392 | 75786287 | 75787123 | 035403, 225761 |
| 54393 | 75815682 | 75817080 | 035403 |
| 54394 | 75909696 | 75912527 | 156110, 185009 |
| 54395 | 75935339 | 75937857 | 156110 |
| 54396 | 75949499 | 75950813 | 156110 |
| 54397 | 76308288 | 76309175 | 156110 |
| 54398 | 76584740 | 76587111 | 156650 |
| 54399 | 76600225 | 76601086 | 156650 |
| 54400 | 76676768 | 76678168 | 156650 |
| 54401 | 76683232 | 76685187 | 156650 |
| 54402 | 76735998 | 76736786 | 156650 |
| 54403 | 76870789 | 76872611 | 156671 |
| 54404 | 76897196 | 76898249 | 156671 |
| 54405 | 76951522 | 76952334 | |
| 54406 | 76960520 | 76963782 | |
| 54407 | 76969110 | 76972212 | 165637 |
| 54408 | 76994049 | 76996268 | 165644 |
| 54409 | 77054256 | 77055411 | 226051, 270087 |
| 54410 | 77156013 | 77157268 | 270087 |
| 54411 | 77159511 | 77164051 | 237149, 165655, 270087 |
| 54412 | 77168295 | 77169711 | 273248, 272692, 237149 |
| 54413 | 77190726 | 77192369 | 236842 |
| 54414 | 77197924 | 77198574 | |
| 54415 | 77352349 | 77353298 | |
| 54416 | 77365703 | 77366998 | 148655 |
| 54417 | 77423092 | 77425064 | 148655 |
| 54418 | 77440816 | 77441699 | 148655 |
| 54419 | 77492836 | 77493506 | 148655 |
| 54420 | 77515226 | 77515787 | 148655 |
| 54421 | 77530768 | 77534574 | 148655 |
| 54422 | 77547587 | 77549619 | 148655 |
| 54423 | 77718991 | 77719319 | 148655 |
| 54424 | 77783790 | 77787211 | 148655 |
| 54425 | 77792480 | 77794470 | 148655 |
| 54426 | 77795751 | 77797896 | 148655 |
| 54427 | 77810390 | 77811505 | 148655 |
| 54428 | 78044111 | 78045522 | 148655 |
| 54429 | 78083671 | 78084387 | 148655 |
| 54430 | 78087865 | 78088549 | 148655 |
| 54431 | 78095652 | 78096799 | 148655 |
| 54432 | 78153883 | 78154998 | 148655 |
| 54433 | 78191587 | 78193683 | 148655 |
| 54434 | 78251656 | 78252855 | 148655 |
| 54435 | 78670368 | 78671494 | 156113, 236467 |
| 54436 | 78832781 | 78833528 | 156113 |
| 54437 | 78838016 | 78839220 | 156113 |
| 54438 | 78921542 | 78925884 | 156113 |
| 54439 | 79006407 | 79007384 | 156113 |
| 54440 | 79009649 | 79010413 | 156113 |
| 54441 | 79047432 | 79048070 | 156113 |
| 54442 | 79055427 | 79057678 | 156113 |
| 54443 | 79093263 | 79094468 | 156113 |
| 54444 | 79109687 | 79111642 | 156113 |
| 54445 | 79132045 | 79132801 | 225652, 156113 |
| 54446 | 79136751 | 79137358 | 156113 |
| 54447 | 79165438 | 79166323 | 156113 |
| 54448 | 79190878 | 79191386 | 156113 |
| 54449 | 79239490 | 79240394 | 156113 |
| 54450 | 79245537 | 79246540 | 156113 |
| 54451 | 79257774 | 79259019 | 156113 |
| 54452 | 79260962 | 79262765 | 156113 |
| 54453 | 79290846 | 79291894 | 156113 |
| 54454 | 79292751 | 79294168 | 156113 |
| 54455 | 79314581 | 79316010 | 156113 |
| 54456 | 79323589 | 79325164 | 156113 |
| 54457 | 79339994 | 79341035 | 156113 |
| 54458 | 79361023 | 79361824 | 156113 |
| 54459 | 79397132 | 79398036 | 156113 |
| 54460 | 79497008 | 79498900 | |
| 54461 | 79641327 | 79641910 | 151208 |
| 54462 | 79658051 | 79659141 | 151208 |
| 54463 | 79661698 | 79662334 | 151208 |
| 54464 | 79667712 | 79671990 | 151208 |
| 54465 | 79680329 | 79681160 | 151208 |
| 54466 | 79685224 | 79687389 | 233871, 151208 |
| 54467 | 79748745 | 79749597 | 148606 |
| 54468 | 79788305 | 79790214 | 148606 |
| 54469 | 79793064 | 79794988 | 138326 |
| 54470 | 79806996 | 79807575 | 138326 |
| 54471 | 79925102 | 79925862 | |
| 54472 | 80014136 | 80019037 | 230417 |
| 54473 | 80062164 | 80063490 | 227136, 230417 |
| 54474 | 80198547 | 80199048 | 230417 |
| 54475 | 80205841 | 80207933 | 230417 |
| 54476 | 80216264 | 80220510 | 230417 |
| 54477 | 80272969 | 80273532 | 230417 |
| 54478 | 80288432 | 80289436 | 230417 |
| 54479 | 80298791 | 80299867 | 230417 |
| 54480 | 80311028 | 80311488 | 230417 |
| 54481 | 80383511 | 80385101 | 230417 |
| 54482 | 80388882 | 80390287 | 230417 |
| 54483 | 80502178 | 80503220 | |
| 54484 | 80515624 | 80516999 | |
| 54485 | 80534262 | 80535794 | |
| 54486 | 80538457 | 80539937 | |
| 54487 | 80575185 | 80576432 | |
| 54488 | 80731244 | 80735229 | 224596 |
| 54489 | 80736462 | 80738623 | 224596 |
| 54490 | 80757451 | 80758429 | 224596 |
| 54491 | 80818599 | 80820231 | 224596 |
| 54492 | 80826045 | 80831826 | 108175, 224596 |
| 54493 | 80833551 | 80834022 | 108175 |
| 54494 | 80853143 | 80854548 | 108175 |
| 54495 | 80856853 | 80857630 | 108175 |
| 54496 | 80871115 | 80873916 | 108175 |
| 54497 | 80886759 | 80887424 | 108175 |
| 54498 | 80908618 | 80911855 | 108175 |
| 54499 | 80913474 | 80913997 | 108175 |
| 54500 | 80915058 | 80919178 | 108175 |
| 54501 | 80922147 | 80923068 | 108175 |
| 54502 | 80943254 | 80944420 | 108175 |
| 54503 | 81005089 | 81008206 | 108175 |
| 54504 | 81033360 | 81034316 | 108175 |
| 54505 | 81057908 | 81060544 | 108175 |
| 54506 | 81079906 | 81081990 | |
| 54507 | 81090391 | 81092497 | |
| 54508 | 81094618 | 81096279 | |
| 54509 | 81106897 | 81109475 | 108179 |
| 54510 | 81138495 | 81143058 | 235426, 165424 |
| 54511 | 81158308 | 81159646 | 235426, 165424 |
| 54512 | 81168746 | 81169239 | 235426, 165424 |
| 54513 | 81183804 | 81184841 | 165424 |
| 54514 | 81203280 | 81206998 | 165424 |
| 54515 | 81232673 | 81233172 | |
| 54516 | 81388706 | 81389659 | 226676 |
| 54517 | 81664013 | 81665289 | 242600 |
| 54518 | 81686600 | 81687491 | 242600 |
| 54519 | 81741223 | 81742526 | 235924, 133661 |
| 54520 | 81837824 | 81839744 | 133678, 230091 |
| 54521 | 81955727 | 81957354 | 122359 |
| 54522 | 81962707 | 81968255 | 237523, 122359 |
| 54523 | 82029145 | 82029528 | |
| 54524 | 82031291 | 82034173 | 151224 |
| 54525 | 82040152 | 82044009 | 151224 |
| 54526 | 82047777 | 82051563 | 151224 |
| 54527 | 82052326 | 82052896 | |
| 54528 | 82081684 | 82085400 | |
| 54529 | 82093562 | 82094217 | 235858 |
| 54530 | 82166566 | 82169102 | 122378 |
| 54531 | 82175471 | 82176190 | 122378 |
| 54532 | 82212267 | 82215475 | 108219 |
| 54533 | 82215664 | 82216428 | 108219 |
| 54534 | 82236592 | 82238713 | 108219 |
| 54535 | 82254716 | 82255359 | 108219 |
| 54536 | 82258287 | 82260028 | 108219 |
| 54537 | 82261242 | 82261945 | 108219 |
| 54538 | 82263898 | 82266707 | 108219 |
| 54539 | 82295090 | 82296759 | 226659 |
| 54540 | 82311621 | 82312463 | 178217 |
| 54541 | 82660518 | 82660961 | |
| 54542 | 82977746 | 82978577 | |
| 54543 | 83359863 | 83360288 | |
| 54544 | 84013941 | 84014401 | 185737 |
| 54545 | 84026250 | 84026914 | 185737 |
| 54546 | 85898361 | 85900699 | 165678, 271933 |
| 54547 | 86087371 | 86089494 | 107771 |
| 54548 | 86175749 | 86176239 | 107771 |
| 54549 | 86527654 | 86528537 | |
| 54550 | 86584860 | 86585521 | |
| 54551 | 86620334 | 86621117 | |
| 54552 | 86905638 | 86906174 | |
| 54553 | 86952778 | 86954117 | 237267 |
| 54554 | 87039703 | 87040819 | |
| 54555 | 87044257 | 87045279 | |
| 54556 | 87316778 | 87317310 | |
| 54557 | 87362131 | 87363913 | 182771 |
| 54558 | 87400773 | 87405613 | 270002, 182771 |
| 54559 | 87501121 | 87502073 | 182771 |
| 54560 | 87647660 | 87648302 | 182771 |
| 54561 | 87752876 | 87754711 | 182771 |
| 54562 | 87755050 | 87756010 | 182771 |
| 54563 | 87922615 | 87924788 | 182771 |
| 54564 | 88120925 | 88121792 | 182771 |
| 54565 | 88125327 | 88127384 | 182771 |
| 54566 | 88159279 | 88163533 | |
| 54567 | 88168947 | 88171949 | |
| 54568 | 88195737 | 88203691 | 062650 |
| 54569 | 88280051 | 88283038 | 227896, 062650 |
| 54570 | 88294608 | 88296594 | |
| 54571 | 88352074 | 88353321 | |
| 54572 | 88353985 | 88354872 | |
| 54573 | 88361667 | 88362494 | |
| 54574 | 88470253 | 88472553 | 122367 |
| 54575 | 88514881 | 88518154 | 107779, 272631 |
| 54576 | 88534619 | 88535326 | 107779 |
| 54577 | 88691594 | 88692079 | 107779 |
| 54578 | 88730336 | 88732033 | 271880, 273413, 272734, |
| | | | 148671 |
| 54579 | 88852126 | 88855977 | 122376, 148672 |
| 54580 | 88902331 | 88902875 | 122376 |
| 54581 | 89260339 | 89260970 | |
| 54582 | 89263784 | 89266030 | 107789 |
| 54583 | 89338197 | 89339738 | |
| 54584 | 89345383 | 89346482 | |
| 54585 | 89350665 | 89351949 | 223761 |
| 54586 | 89358380 | 89358901 | 223761 |
| 54587 | 89378262 | 89379122 | 196566, 225913 |
| 54588 | 89394987 | 89396805 | 196566, 225913 |
| 54589 | 89405934 | 89407058 | 196566, 225913 |
| 54590 | 89415931 | 89417438 | 196566, 225913 |
| 54591 | 89418900 | 89421412 | 198682, 196566, 225913 |
| 54592 | 89445502 | 89446513 | 198682 |
| 54593 | 89460902 | 89463918 | 198682 |
| 54594 | 89576849 | 89579078 | 223820, 138138 |
| 54595 | 89601881 | 89603972 | 223820 |
| 54596 | 89621155 | 89624999 | 171862, 227268 |
| 54597 | 89712263 | 89712817 | 171862 |
| 54598 | 89715334 | 89716535 | 171862 |
| 54599 | 89719684 | 89720882 | 171862 |
| 54600 | 89732809 | 89734100 | |
| 54601 | 89735834 | 89736538 | |
| 54602 | 89787680 | 89789159 | |
| 54603 | 89821894 | 89824075 | |
| 54604 | 89824257 | 89824908 | |
| 54605 | 89839826 | 89840469 | |
| 54606 | 89855071 | 89856554 | |
| 54607 | 89869733 | 89871100 | |
| 54608 | 89878095 | 89879382 | |
| 54609 | 90002767 | 90004768 | |
| 54610 | 90013637 | 90014492 | |
| 54611 | 90145096 | 90147789 | 184719 |
| 54612 | 90188031 | 90188816 | 184719 |
| 54613 | 90234207 | 90234671 | 184719 |
| 54614 | 90248465 | 90249552 | 184719 |
| 54615 | 90342088 | 90343740 | 184719 |
| 54616 | 90378157 | 90378605 | 237205 |
| 54617 | 90552212 | 90553024 | |
| 54618 | 90587935 | 90588828 | 152766 |
| 54619 | 90599151 | 90601845 | 152766 |
| 54620 | 90608327 | 90608717 | 152766 |
| 54621 | 90639394 | 90641490 | 138134 |
| 54622 | 90694479 | 90695820 | 107796, 138134, 180139 |
| 54623 | 90709628 | 90712491 | 138134, 107796 |
| 54624 | 90734022 | 90735769 | 138134, 107796 |
| 54625 | 90738715 | 90739595 | 107796 |
| 54626 | 90748971 | 90752076 | 026103, 107796 |
| 54627 | 90923377 | 90923829 | |
| 54628 | 91001265 | 91002463 | 107798 |
| 54629 | 91010609 | 91012192 | 107798 |
| 54630 | 91029284 | 91030676 | 107798 |
| 54631 | 91037030 | 91039546 | 107798 |
| 54632 | 91060766 | 91063142 | 119922, 107798 |
| 54633 | 91086378 | 91088713 | 119917, 107798 |
| 54634 | 91091560 | 91093562 | 119917, 107798 |
| 54635 | 91105838 | 91106993 | 107798 |
| 54636 | 91110553 | 91112956 | 107798 |
| 54637 | 91133027 | 91135136 | 107798 |
| 54638 | 91151594 | 91152474 | 185745, 107798 |
| 54639 | 91173432 | 91175757 | 152778, 107798 |
| 54640 | 91184660 | 91186203 | |
| 54641 | 91191460 | 91192174 | 152779 |
| 54642 | 91228156 | 91228793 | 152779 |
| 54643 | 91234017 | 91242854 | 152779 |
| 54644 | 91275327 | 91276734 | 152779 |
| 54645 | 91295015 | 91296177 | 152779 |
| 54646 | 91312148 | 91315198 | 152779 |
| 54647 | 91350872 | 91352434 | 152782 |
| 54648 | 91361438 | 91362525 | 152782 |
| 54649 | 91392416 | 91393041 | 152782 |
| 54650 | 91403352 | 91406065 | 232936, 249962, 225836, |
| | | | 152782 |
| 54651 | 91415321 | 91415719 | |
| 54652 | 91459115 | 91459864 | 235100 |
| 54653 | 91460546 | 91461619 | 138182 |
| 54654 | 91681102 | 91681716 | 226159 |
| 54655 | 92630902 | 92632560 | 148688 |
| 54656 | 92647267 | 92648583 | 148688 |
| 54657 | 92669379 | 92670759 | |
| 54658 | 92671215 | 92682484 | 148677 |
| 54659 | 92719055 | 92721808 | |
| 54660 | 92765756 | 92766603 | 225519 |
| 54661 | 92802845 | 92803425 | |
| 54662 | 92921365 | 92924743 | |
| 54663 | 92958262 | 92958894 | |
| 54664 | 92979195 | 92981438 | 180628 |
| 54665 | 93057832 | 93058689 | |
| 54666 | 93108374 | 93112006 | |
| 54667 | 93113809 | 93114396 | |
| 54668 | 93168583 | 93171018 | 165338 |
| 54669 | 93271483 | 93272265 | 165338 |
| 54670 | 93285612 | 93287275 | |
| 54671 | 93315861 | 93317773 | |
| 54672 | 93349990 | 93351485 | |
| 54673 | 93363387 | 93364402 | |
| 54674 | 93367491 | 93369621 | |
| 54675 | 93388835 | 93394450 | 119938 |
| 54676 | 93401370 | 93404044 | |
| 54677 | 93411748 | 93412698 | |
| 54678 | 93449348 | 93451593 | |
| 54679 | 93460068 | 93461251 | |
| 54680 | 93465639 | 93467718 | |
| 54681 | 93469062 | 93469561 | |
| 54682 | 93547630 | 93548907 | 228701 |
| 54683 | 93556739 | 93559733 | 107854, 228701 |
| 54684 | 93651052 | 93651758 | |
| 54685 | 93660844 | 93662158 | |
| 54686 | 93667982 | 93669571 | 272817, 174721 |
| 54687 | 93682797 | 93684676 | 095564 |
| 54688 | 93786718 | 93787347 | 095564 |
| 54689 | 93860491 | 93862016 | 107864 |
| 54690 | 93863138 | 93863972 | 107864 |
| 54691 | 93881440 | 93883377 | 107864 |
| 54692 | 93883801 | 93885348 | 107864 |
| 54693 | 93949303 | 93949963 | 107864 |
| 54694 | 93982187 | 93983537 | 107864 |
| 54695 | 93997926 | 94001239 | 107864 |
| 54696 | 94049981 | 94052676 | 198060, 107864 |
| 54697 | 94087324 | 94090165 | 198060 |
| 54698 | 94332397 | 94335047 | 119912 |
| 54699 | 94350331 | 94353405 | 138160 |
| 54700 | 94404156 | 94404637 | 138160 |
| 54701 | 94448459 | 94452635 | 152804 |
| 54702 | 94454211 | 94458472 | 152804 |
| 54703 | 94458897 | 94460192 | |
| 54704 | 94607068 | 94609150 | 138190 |
| 54705 | 94651783 | 94652801 | 138190 |
| 54706 | 94731672 | 94732400 | 138190 |
| 54707 | 94791654 | 94793246 | 138190 |
| 54708 | 94831145 | 94832594 | |
| 54709 | 94837545 | 94838401 | 095596 |
| 54710 | 94865792 | 94866859 | 232805 |
| 54711 | 94941059 | 94941617 | |
| 54712 | 94942415 | 94943137 | |
| 54713 | 94958401 | 94959894 | |
| 54714 | 94980365 | 94980796 | |
| 54715 | 94985398 | 94986768 | |
| 54716 | 94995097 | 94996787 | |
| 54717 | 95146413 | 95147120 | 138119 |
| 54718 | 95225156 | 95226956 | 138119 |
| 54719 | 95230025 | 95231907 | 138119 |
| 54720 | 95241298 | 95242957 | 138119 |
| 54721 | 95325901 | 95326629 | 186188 |
| 54722 | 95338779 | 95339202 | 186188 |
| 54723 | 95348591 | 95350742 | 186188 |
| 54724 | 95357381 | 95364078 | 138207, 186188 |
| 54725 | 95412384 | 95413433 | 095464 |
| 54726 | 95431365 | 95433120 | 148690 |
| 54727 | 95461444 | 95463412 | 148690 |
| 54728 | 95532671 | 95533966 | 108231 |
| 54729 | 95534963 | 95535834 | 108231 |
| 54730 | 95652912 | 95654772 | 176273 |
| 54731 | 95676294 | 95677252 | 176273 |
| 54732 | 95751370 | 95752346 | |
| 54733 | 95753448 | 95754007 | 138193 |
| 54734 | 95766591 | 95767330 | 138193 |
| 54735 | 95824925 | 95825752 | 138193 |
| 54736 | 95835960 | 95836628 | 138193 |
| 54737 | 95882351 | 95884240 | 138193 |
| 54738 | 95892906 | 95893609 | 138193 |
| 54739 | 95972263 | 95974002 | 138193 |
| 54740 | 95992418 | 95993208 | 138193 |
| 54741 | 96075651 | 96076415 | 173145, 138193 |
| 54742 | 96121788 | 96123475 | 173145 |
| 54743 | 96161803 | 96164059 | 108239 |
| 54744 | 96304673 | 96306290 | 119969 |
| 54745 | 96430144 | 96448598 | 108242, 165841 |
| 54746 | 96492049 | 96493086 | 108242, 165841 |
| 54747 | 96493937 | 96495647 | 108242, 165841 |
| 54748 | 96507466 | 96508207 | 165841 |
| 54749 | 96661443 | 96663547 | |
| 54750 | 96695987 | 96697032 | |
| 54751 | 96750259 | 96753021 | |
| 54752 | 96794300 | 96796315 | |
| 54753 | 96825307 | 96826185 | 138115 |
| 54754 | 96828926 | 96829901 | 138115 |
| 54755 | 96876456 | 96877579 | |
| 54756 | 96892550 | 96893240 | |
| 54757 | 96942324 | 96943897 | 225533 |
| 54758 | 96989305 | 96991139 | 234026 |
| 54759 | 97002512 | 97003180 | 107438 |
| 54760 | 97019500 | 97021742 | 107438 |
| 54761 | 97025956 | 97027490 | 107438 |
| 54762 | 97032498 | 97034787 | 107438 |
| 54763 | 97037591 | 97042346 | 107438 |
| 54764 | 97046303 | 97047712 | 107438 |
| 54765 | 97047931 | 97051403 | 107438 |
| 54766 | 97054478 | 97055595 | |
| 54767 | 97068287 | 97069098 | |
| 54768 | 97089584 | 97091409 | 095637 |
| 54769 | 97109944 | 97110645 | 095637 |
| 54770 | 97147982 | 97148804 | 095637 |
| 54771 | 97195452 | 97196236 | 095637 |
| 54772 | 97200414 | 97201562 | 095637 |
| 54773 | 97204439 | 97206242 | 095637 |
| 54774 | 97216382 | 97218818 | 095637 |
| 54775 | 97233204 | 97236675 | 095637 |
| 54776 | 97238106 | 97241019 | 095637 |
| 54777 | 97241865 | 97243290 | 095637 |
| 54778 | 97244704 | 97245920 | 095637 |
| 54779 | 97261009 | 97263299 | 095637 |
| 54780 | 97272617 | 97275241 | 095637 |
| 54781 | 97276408 | 97278755 | 095637 |
| 54782 | 97288660 | 97289823 | 095637 |
| 54783 | 97312235 | 97313500 | 095637 |
| 54784 | 97320146 | 97321759 | 095637 |
| 54785 | 97415497 | 97416960 | 059573 |
| 54786 | 97452829 | 97454406 | 119977 |
| 54787 | 97666803 | 97668089 | 173088, 226688, 270099 |
| 54788 | 97802869 | 97804379 | 107443, 226688 |
| 54789 | 97848978 | 97850673 | 226688 |
| 54790 | 97884072 | 97885109 | |
| 54791 | 97889084 | 97891053 | 177853 |
| 54792 | 97995027 | 97995558 | 095585 |
| 54793 | 98003918 | 98004584 | 095585 |
| 54794 | 98029378 | 98032716 | 095585 |
| 54795 | 98035602 | 98036153 | |
| 54796 | 98046943 | 98048400 | |
| 54797 | 98273250 | 98273969 | 095587 |
| 54798 | 98345293 | 98348171 | 077147 |
| 54799 | 98397239 | 98398154 | 155629 |
| 54800 | 98423450 | 98424001 | 155629 |
| 54801 | 98432729 | 98434636 | 155629 |
| 54802 | 98435187 | 98437630 | 155629 |
| 54803 | 98454892 | 98455614 | 155629 |
| 54804 | 98478840 | 98481453 | 155629 |
| 54805 | 98590146 | 98594315 | 196233 |
| 54806 | 98595228 | 98596625 | 196233 |
| 54807 | 98600647 | 98601040 | 196233 |
| 54808 | 98602652 | 98603574 | 196233 |
| 54809 | 98610239 | 98611395 | 196233 |
| 54810 | 98623176 | 98624394 | 196233 |
| 54811 | 98757778 | 98758684 | 269891, 187122 |
| 54812 | 98783461 | 98784585 | 269891, 187122 |
| 54813 | 99051885 | 99052741 | 269891, 213390 |
| 54814 | 99057227 | 99058350 | |
| 54815 | 99067570 | 99068560 | |
| 54816 | 99078359 | 99081587 | 165879 |
| 54817 | 99087203 | 99089414 | |
| 54818 | 99091759 | 99095253 | 181274, 225850 |
| 54819 | 99185013 | 99188023 | 171314, 224474 |
| 54820 | 99204930 | 99206578 | 171307, 171311 |
| 54821 | 99226451 | 99226861 | 155229 |
| 54822 | 99257308 | 99259913 | 165886, 155229 |
| 54823 | 99331596 | 99333338 | 165887 |
| 54824 | 99333857 | 99335532 | 165887 |
| 54825 | 99343611 | 99345658 | 241935, 155252, 249967, |
| | | | 165887 |
| 54826 | 99354452 | 99358142 | 241935, 155252, 249967 |
| 54827 | 99392401 | 99393822 | 171160, 155252, 249967 |
| 54828 | 99400130 | 99402156 | 155252, 249967 |
| 54829 | 99407306 | 99407706 | 155252, 249967 |
| 54830 | 99423941 | 99424777 | 155252, 249967 |
| 54831 | 99446071 | 99448413 | 119986 |
| 54832 | 99473148 | 99474802 | 155254 |
| 54833 | 99478360 | 99478877 | |
| 54834 | 99496332 | 99498035 | 155256 |
| 54835 | 99621672 | 99622137 | 155265 |
| 54836 | 99628906 | 99629683 | 155265, 269783, 095713 |
| 54837 | 99641789 | 99643173 | 095713 |
| 54838 | 99893792 | 99896200 | 166024 |
| 54839 | 99930289 | 99930660 | 166024 |
| 54840 | 100022086 | 100023149 | 138131 |
| 54841 | 100027247 | 100030536 | 138131 |
| 54842 | 100032757 | 100033224 | |
| 54843 | 100034294 | 100034769 | |
| 54844 | 100082883 | 100083481 | |
| 54845 | 100178764 | 100181452 | 107521 |
| 54846 | 100193651 | 100195356 | 107521 |
| 54847 | 100205473 | 100207496 | 107521 |
| 54848 | 100209861 | 100210973 | |
| 54849 | 100219991 | 100221823 | 172987 |
| 54850 | 100226905 | 100228142 | 172987 |
| 54851 | 100229287 | 100229834 | 172987 |
| 54852 | 100443686 | 100444570 | 172987 |
| 54853 | 101051507 | 101052386 | |
| 54854 | 101062856 | 101066259 | |
| 54855 | 101098727 | 101099360 | 119946 |
| 54856 | 101132386 | 101132772 | 119946 |
| 54857 | 101135142 | 101135599 | 119946 |
| 54858 | 101155388 | 101156449 | |
| 54859 | 101171287 | 101172280 | 120053 |
| 54860 | 101180886 | 101181735 | 120053 |
| 54861 | 101188936 | 101191643 | 224934, 120053 |
| 54862 | 101378800 | 101382263 | 260475, 155287 |
| 54863 | 101407186 | 101408011 | |
| 54864 | 101418229 | 101421694 | 198018 |
| 54865 | 101426752 | 101427823 | 198018 |
| 54866 | 101432968 | 101433951 | 198018 |
| 54867 | 101490968 | 101493229 | 014919, 119929 |
| 54868 | 101513854 | 101515521 | 119929 |
| 54869 | 101534996 | 101546403 | 023839 |
| 54870 | 101546909 | 101549417 | 227351, 023839 |
| 54871 | 101609066 | 101609777 | 023839 |
| 54872 | 101686179 | 101688480 | 227695, 107554 |
| 54873 | 101689704 | 101692008 | 107554, 227695 |
| 54874 | 101704388 | 101705519 | 107554, 227695 |
| 54875 | 101741084 | 101742004 | 107554 |
| 54876 | 101765309 | 101767597 | 107554 |
| 54877 | 101768438 | 101770633 | 107554 |
| 54878 | 101803042 | 101804308 | 120054 |
| 54879 | 101860186 | 101862088 | |
| 54880 | 101906613 | 101909427 | |
| 54881 | 101923401 | 101924505 | 107566 |
| 54882 | 101938886 | 101940096 | 107566 |
| 54883 | 101944771 | 101946778 | 107566 |
| 54884 | 101988364 | 101989747 | 227492, 213341 |
| 54885 | 102026497 | 102028214 | 095485 |
| 54886 | 102044862 | 102047640 | 196072 |
| 54887 | 102050608 | 102052597 | 107593 |
| 54888 | 102100070 | 102102566 | 231188 |
| 54889 | 102104929 | 102107998 | 099194, 231188 |
| 54890 | 102118491 | 102120083 | 099194 |
| 54891 | 102124511 | 102125345 | 099194 |
| 54892 | 102130198 | 102131845 | |
| 54893 | 102132221 | 102135334 | 235823 |
| 54894 | 102152016 | 102152659 | |
| 54895 | 102241835 | 102242762 | 075290 |
| 54896 | 102278475 | 102279592 | 075826, 255339, 166136 |
| 54897 | 102288519 | 102290221 | 166135, 075826, 255339, |
| | | | 166136 |
| 54898 | 102295212 | 102296147 | 166135 |
| 54899 | 102490285 | 102491438 | |
| 54900 | 102635406 | 102635944 | |
| 54901 | 102672157 | 102673332 | 119906, 272572 |
| 54902 | 102689980 | 102690776 | 119906 |
| 54903 | 102728569 | 102730336 | 095539, 055950 |
| 54904 | 102730810 | 102731585 | 095539, 055950 |
| 54905 | 102746275 | 102748375 | 107815, 055950 |
| 54906 | 102756444 | 102759813 | 107816 |
| 54907 | 102791553 | 102792889 | 107819 |
| 54908 | 102802311 | 102803591 | |
| 54909 | 102820272 | 102821454 | 273162 |
| 54910 | 102825727 | 102828053 | 107821 |
| 54911 | 102872601 | 102873529 | 236311 |
| 54912 | 102880434 | 102881700 | 236311 |
| 54913 | 102973317 | 102974187 | |
| 54914 | 103051353 | 103052295 | |
| 54915 | 103112972 | 103114810 | 166167 |
| 54916 | 103123629 | 103124523 | 166167 |
| 54917 | 103126866 | 103128289 | 166167 |
| 54918 | 103346921 | 103348506 | 166169, 166171 |
| 54919 | 103453264 | 103455320 | 107829 |
| 54920 | 103576469 | 103579442 | 226009, 198408 |
| 54921 | 103657249 | 103657763 | 120029 |
| 54922 | 103755441 | 103755862 | 120029 |
| 54923 | 103769361 | 103770034 | 120029 |
| 54924 | 103814967 | 103816572 | 120029 |
| 54925 | 103824560 | 103826453 | 166189 |
| 54926 | 103873756 | 103875042 | 198728 |
| 54927 | 103879349 | 103880618 | 198728 |
| 54928 | 103891962 | 103894129 | 148840 |
| 54929 | 103910862 | 103913438 | 166197 |
| 54930 | 104004650 | 104006563 | 107862 |
| 54931 | 104043523 | 104044088 | 107862 |
| 54932 | 104070291 | 104071071 | 107862 |
| 54933 | 104153192 | 104156787 | 077150 |
| 54934 | 104158997 | 104159708 | 077150 |
| 54935 | 104180372 | 104182973 | 059915, 107872 |
| 54936 | 104191364 | 104192702 | 107874 |
| 54937 | 104194351 | 104195010 | |
| 54938 | 104195116 | 104196662 | 202569 |
| 54939 | 104209466 | 104211149 | 269609, 120055 |
| 54940 | 104212416 | 104213169 | 269609 |
| 54941 | 104220578 | 104221812 | 138111, 269609 |
| 54942 | 104260968 | 104262519 | 138107 |
| 54943 | 104263271 | 104264771 | 107882 |
| 54944 | 104356820 | 104357928 | 107882 |
| 54945 | 104386807 | 104388521 | 107882 |
| 54946 | 104401236 | 104407084 | 272933, 171206 |
| 54947 | 104473288 | 104474065 | 138175 |
| 54948 | 104474074 | 104474821 | 156398, 138175 |
| 54949 | 104502739 | 104505107 | 166272, 156398 |
| 54950 | 104529041 | 104531077 | 166272 |
| 54951 | 104534708 | 104537553 | 166272 |
| 54952 | 104539252 | 104541210 | 166272 |
| 54953 | 104541455 | 104544167 | 166272 |
| 54954 | 104561254 | 104561836 | 166272 |
| 54955 | 104573799 | 104574310 | 166272 |
| 54956 | 104609121 | 104610566 | |
| 54957 | 104613400 | 104616010 | 166275, 270316 |
| 54958 | 104629112 | 104630146 | 214435, 270316 |
| 54959 | 104675861 | 104679413 | 148842 |
| 54960 | 104748362 | 104749305 | 148842 |
| 54961 | 104780885 | 104782056 | 148842 |
| 54962 | 104880791 | 104881643 | 076685 |
| 54963 | 104905703 | 104906228 | 076685 |
| 54964 | 104951730 | 104953403 | 076685 |
| 54965 | 104956654 | 104957441 | |
| 54966 | 104990362 | 104991564 | |
| 54967 | 105001056 | 105001822 | |
| 54968 | 105109968 | 105110596 | 156374 |
| 54969 | 105127290 | 105128585 | 148835 |
| 54970 | 105155160 | 105157256 | 148843, 173915 |
| 54971 | 105173344 | 105173747 | 148843 |
| 54972 | 105408571 | 105409523 | 107957 |
| 54973 | 105411443 | 105413062 | 107957 |
| 54974 | 105419121 | 105422173 | 107957 |
| 54975 | 105553780 | 105554497 | 107957 |
| 54976 | 105571458 | 105572742 | 107957 |
| 54977 | 105615615 | 105616511 | |
| 54978 | 105667967 | 105668948 | 107960 |
| 54979 | 105677176 | 105678741 | 107960 |
| 54980 | 105726028 | 105727992 | 065613 |
| 54981 | 105852705 | 105854916 | |
| 54982 | 105858579 | 105859343 | |
| 54983 | 105869064 | 105870569 | |
| 54984 | 105878966 | 105882682 | 156384 |
| 54985 | 105957009 | 105958022 | 197748 |
| 54986 | 105991583 | 105992932 | 197748 |
| 54987 | 106012535 | 106017304 | 148834 |
| 54988 | 106028484 | 106029293 | 065621 |
| 54989 | 106096489 | 106100265 | 148841 |
| 54990 | 106108887 | 106111206 | |
| 54991 | 106334329 | 106335070 | |
| 54992 | 106567733 | 106570528 | 156395 |
| 54993 | 107734373 | 107735715 | |
| 54994 | 107746237 | 107747106 | |
| 54995 | 107752644 | 107754651 | |
| 54996 | 107770903 | 107771508 | |
| 54997 | 107870964 | 107871462 | |
| 54998 | 108657067 | 108658099 | 108018 |
| 54999 | 108690750 | 108691759 | 108018 |
| 55000 | 108730947 | 108731839 | 108018 |
| 55001 | 108813881 | 108814827 | 108018 |
| 55002 | 108815412 | 108816447 | 108018 |
| 55003 | 108854786 | 108855447 | 108018 |
| 55004 | 109731543 | 109732158 | 229981 |
| 55005 | 110118540 | 110119127 | |
| 55006 | 110221644 | 110222202 | |
| 55007 | 110319781 | 110322624 | 203434 |
| 55008 | 110337596 | 110338614 | |
| 55009 | 110341669 | 110344122 | |
| 55010 | 110357516 | 110359575 | |
| 55011 | 110389345 | 110390259 | |
| 55012 | 111674587 | 111675452 | 108039 |
| 55013 | 111681929 | 111683695 | 108039 |
| 55014 | 111766469 | 111768633 | 148700 |
| 55015 | 111896625 | 111897365 | |
| 55016 | 111900769 | 111901566 | |
| 55017 | 111967183 | 111967849 | 119950, 228417 |
| 55018 | 111968610 | 111971698 | 119950 |
| 55019 | 111981490 | 111982181 | 119950 |
| 55020 | 111985281 | 111987238 | 119950 |
| 55021 | 112028681 | 112029998 | 119950 |
| 55022 | 112063210 | 112066460 | 119953 |
| 55023 | 112118860 | 112119370 | |
| 55024 | 112123265 | 112124281 | |
| 55025 | 112154503 | 112160704 | |
| 55026 | 112169607 | 112172195 | |
| 55027 | 112172336 | 112173100 | |
| 55028 | 112215880 | 112216770 | 273143 |
| 55029 | 112219390 | 112221035 | 273143 |
| 55030 | 112255967 | 112259674 | 138166 |
| 55031 | 112260297 | 112261616 | 138166 |
| 55032 | 112263547 | 112264698 | 138166 |
| 55033 | 112326740 | 112328458 | 108055 |
| 55034 | 112431690 | 112432761 | 203867 |
| 55035 | 112484548 | 112485374 | 203867 |
| 55036 | 112495367 | 112495878 | 203867 |
| 55037 | 112533223 | 112535638 | 203867 |
| 55038 | 112542335 | 112542912 | 203867 |
| 55039 | 112552333 | 112553814 | 203867 |
| 55040 | 112605289 | 112606330 | |
| 55041 | 112611336 | 112613126 | |
| 55042 | 112616925 | 112618320 | |
| 55043 | 112630817 | 112633356 | 150593, 232470, 203497 |
| 55044 | 112645658 | 112646154 | 150593 |
| 55045 | 112677543 | 112680654 | 108061, 214413 |
| 55046 | 112722833 | 112723391 | 108061 |
| 55047 | 113235457 | 113235943 | |
| 55048 | 113316219 | 113317492 | |
| 55049 | 113731772 | 113732325 | |
| 55050 | 113884375 | 113885268 | |
| 55051 | 113936910 | 113937668 | 119927 |
| 55052 | 113972165 | 113976507 | 119927 |
| 55053 | 113982063 | 113991805 | |
| 55054 | 114001451 | 114005984 | |
| 55055 | 114020234 | 114022833 | |
| 55056 | 114024945 | 114026105 | |
| 55057 | 114031040 | 114032759 | |
| 55058 | 114033716 | 114037400 | |
| 55059 | 114037878 | 114041334 | |
| 55060 | 114055317 | 114058686 | 119913 |
| 55061 | 114060642 | 114065821 | 119913 |
| 55062 | 114092171 | 114092895 | 243316 |
| 55063 | 114107599 | 114108416 | 243316 |
| 55064 | 114111433 | 114112268 | 243316 |
| 55065 | 114119666 | 114123649 | |
| 55066 | 114123779 | 114125628 | |
| 55067 | 114133128 | 114137209 | 197142 |
| 55068 | 114138272 | 114141131 | 197142 |
| 55069 | 114142889 | 114143633 | 197142 |
| 55070 | 114154075 | 114154762 | 197142 |
| 55071 | 114205677 | 114207788 | 151532, 023041 |
| 55072 | 114398383 | 114399363 | 151532 |
| 55073 | 114475457 | 114477647 | 151532 |
| 55074 | 114487675 | 114489081 | 151532 |
| 55075 | 114499211 | 114500072 | 151532 |
| 55076 | 114501559 | 114502297 | 151532 |
| 55077 | 114510327 | 114511137 | 151532 |
| 55078 | 114563187 | 114565313 | 151532 |
| 55079 | 114571442 | 114572051 | 151532 |
| 55080 | 114574782 | 114576820 | 151532 |
| 55081 | 114580193 | 114582457 | |
| 55082 | 114599527 | 114600318 | |
| 55083 | 114602170 | 114603107 | |
| 55084 | 114612064 | 114612518 | |
| 55085 | 114635258 | 114636070 | |
| 55086 | 114655818 | 114656796 | 225292 |
| 55087 | 114657848 | 114660013 | 225292 |
| 55088 | 114673443 | 114676442 | |
| 55089 | 114708422 | 114713964 | 233547, 148737 |
| 55090 | 114715065 | 114716361 | 148737 |
| 55091 | 114766989 | 114767489 | 148737 |
| 55092 | 114778326 | 114778808 | 148737 |
| 55093 | 114780483 | 114782153 | 148737 |
| 55094 | 114790902 | 114791374 | 148737 |
| 55095 | 114795193 | 114796284 | 148737 |
| 55096 | 114801671 | 114802773 | 148737 |
| 55097 | 114832269 | 114835160 | 148737 |
| 55098 | 114845926 | 114848600 | 148737 |
| 55099 | 114852580 | 114854245 | 148737 |
| 55100 | 114858959 | 114859776 | 148737 |
| 55101 | 114866601 | 114867192 | 148737 |
| 55102 | 114871627 | 114874061 | 148737 |
| 55103 | 114882408 | 114883378 | 148737 |
| 55104 | 114885811 | 114886923 | 148737 |
| 55105 | 114890710 | 114893678 | 148737 |
| 55106 | 115085793 | 115086987 | |
| 55107 | 115144662 | 115146652 | |
| 55108 | 115193317 | 115196098 | |
| 55109 | 115206544 | 115206975 | |
| 55110 | 115215684 | 115216214 | |
| 55111 | 115239026 | 115241438 | |
| 55112 | 115264197 | 115264590 | |
| 55113 | 115283490 | 115284833 | |
| 55114 | 115297642 | 115302335 | |
| 55115 | 115309435 | 115316007 | 148702 |
| 55116 | 115316733 | 115318660 | 148702 |
| 55117 | 115320921 | 115322260 | 148702 |
| 55118 | 115322439 | 115323672 | 148702 |
| 55119 | 115326003 | 115327096 | 148702 |
| 55120 | 115345578 | 115346188 | 148702 |
| 55121 | 115390619 | 115391324 | 197893 |
| 55122 | 115404008 | 115404612 | 197893 |
| 55123 | 115438472 | 115441036 | 165806 |
| 55124 | 115506035 | 115506927 | |
| 55125 | 115612895 | 115615483 | 196865, 198924 |
| 55126 | 115693686 | 115694252 | |
| 55127 | 115697332 | 115698023 | |
| 55128 | 115700762 | 115701380 | |
| 55129 | 115704734 | 115705286 | |
| 55130 | 115717849 | 115720885 | |
| 55131 | 115823986 | 115824594 | |
| 55132 | 115910569 | 115911666 | 165813 |
| 55133 | 115932942 | 115934917 | 238742, 165813 |
| 55134 | 116149083 | 116149633 | 169129 |
| 55135 | 116230984 | 116231712 | 099204 |
| 55136 | 116246406 | 116248551 | 099204 |
| 55137 | 116264691 | 116265352 | 099204 |
| 55138 | 116277853 | 116280652 | 099204 |
| 55139 | 116285294 | 116287001 | 099204 |
| 55140 | 116308366 | 116308878 | 099204 |
| 55141 | 116316304 | 116317377 | 099204 |
| 55142 | 116334791 | 116338343 | 099204 |
| 55143 | 116363811 | 116368185 | 099204 |
| 55144 | 116371340 | 116373833 | 099204 |
| 55145 | 116383466 | 116385998 | 099204 |
| 55146 | 116388653 | 116395565 | 099204 |
| 55147 | 116406635 | 116411450 | 099204 |
| 55148 | 116411972 | 116413108 | 099204 |
| 55149 | 116414482 | 116415135 | 099204 |
| 55150 | 116424944 | 116425908 | 099204 |
| 55151 | 116438367 | 116439038 | 099204 |
| 55152 | 116440935 | 116446280 | 099204 |
| 55153 | 116478845 | 116479653 | |
| 55154 | 116483785 | 116484535 | |
| 55155 | 116513652 | 116515384 | |
| 55156 | 116526835 | 116528757 | 228484 |
| 55157 | 116580785 | 116583422 | 151553 |
| 55158 | 116585047 | 116586034 | 151553 |
| 55159 | 116615614 | 116617439 | 151553 |
| 55160 | 116697735 | 116699117 | 165832 |
| 55161 | 117325749 | 117326864 | 107518 |
| 55162 | 117705436 | 117709389 | 107518 |
| 55163 | 117764743 | 117765309 | |
| 55164 | 117797651 | 117798220 | |
| 55165 | 117804030 | 117804688 | |
| 55166 | 117805411 | 117805843 | |
| 55167 | 117814981 | 117817727 | 151892 |
| 55168 | 117839313 | 117841049 | 151892 |
| 55169 | 117842251 | 117842745 | 151892 |
| 55170 | 117943267 | 117943722 | 151892 |
| 55171 | 117953543 | 117954350 | 151892 |
| 55172 | 117966452 | 117967272 | 151892 |
| 55173 | 117970407 | 117971656 | 151892 |
| 55174 | 118030618 | 118034172 | 151892 |
| 55175 | 118230359 | 118231021 | 203837 |
| 55176 | 118501564 | 118502876 | 165868 |
| 55177 | 118530722 | 118531421 | |
| 55178 | 118608247 | 118609392 | 188316, 225302 |
| 55179 | 118626120 | 118627465 | 188316 |
| 55180 | 118640376 | 118641007 | 188316 |
| 55181 | 118647167 | 118649585 | 188316, 187164 |
| 55182 | 118762686 | 118765811 | 187164 |
| 55183 | 118766344 | 118767155 | 187164 |
| 55184 | 118927479 | 118928114 | 234474 |
| 55185 | 118934121 | 118934900 | |
| 55186 | 118946346 | 118946740 | |
| 55187 | 118975950 | 118977256 | |
| 55188 | 119123006 | 119126126 | 165650 |
| 55189 | 119131936 | 119132543 | 165650 |
| 55190 | 119133262 | 119135865 | 165650 |
| 55191 | 119151116 | 119152152 | |
| 55192 | 119163715 | 119165075 | |
| 55193 | 119173382 | 119174321 | |
| 55194 | 119198841 | 119199303 | 258114 |
| 55195 | 119255730 | 119256626 | 229847 |
| 55196 | 119805468 | 119807244 | 177640, 107560 |
| 55197 | 120070195 | 120070890 | 165669 |
| 55198 | 120081077 | 120082219 | 165669 |
| 55199 | 120101034 | 120102227 | 165669 |
| 55200 | 120183187 | 120183809 | |
| 55201 | 120489917 | 120490855 | 151893 |
| 55202 | 120501296 | 120502321 | 151893 |
| 55203 | 120503761 | 120504236 | 151893 |
| 55204 | 120513503 | 120514905 | 151893 |
| 55205 | 120522813 | 120523703 | |
| 55206 | 120538078 | 120538671 | |
| 55207 | 120553026 | 120553623 | |
| 55208 | 120630044 | 120630905 | |
| 55209 | 120699909 | 120700392 | |
| 55210 | 120718360 | 120719246 | |
| 55211 | 120766203 | 120766965 | |
| 55212 | 120784571 | 120785731 | |
| 55213 | 120788755 | 120789691 | 188613 |
| 55214 | 120789785 | 120790510 | 188613 |
| 55215 | 120838839 | 120841404 | 107581 |
| 55216 | 120863453 | 120864703 | 119979 |
| 55217 | 120872582 | 120874440 | 119979 |
| 55218 | 120879362 | 120881201 | 119979 |
| 55219 | 120895015 | 120895376 | 119979 |
| 55220 | 120923975 | 120926080 | 183605 |
| 55221 | 120937172 | 120938834 | 165672 |
| 55222 | 120965291 | 120968154 | 228485, 198873 |
| 55223 | 121000450 | 121001169 | 198873 |
| 55224 | 121002719 | 121003530 | 198873 |
| 55225 | 121011299 | 121014669 | 198873 |
| 55226 | 121030224 | 121031920 | 198873 |
| 55227 | 121075108 | 121077529 | 198873 |
| 55228 | 121100446 | 121101299 | 198873 |
| 55229 | 121121467 | 121122103 | 198873 |
| 55230 | 121209798 | 121211444 | 198873 |
| 55231 | 121354531 | 121357012 | 151923 |
| 55232 | 121410047 | 121412339 | 151929 |
| 55233 | 121417696 | 121418919 | 151929 |
| 55234 | 121425243 | 121425808 | 151929 |
| 55235 | 121484575 | 121486438 | 198825 |
| 55236 | 121502575 | 121503339 | 198825 |
| 55237 | 121631245 | 121633816 | 197771 |
| 55238 | 121651286 | 121653023 | 107651, 197771 |
| 55239 | 122610057 | 122611994 | 120008, 227165 |
| 55240 | 122823146 | 122823934 | |
| 55241 | 122851703 | 122852376 | |
| 55242 | 122954298 | 122955568 | |
| 55243 | 122976048 | 122977084 | |
| 55244 | 123062588 | 123063273 | |
| 55245 | 123084157 | 123085811 | |
| 55246 | 123177423 | 123178583 | |
| 55247 | 123290294 | 123290972 | 066468 |
| 55248 | 123295730 | 123296322 | 066468 |
| 55249 | 123301902 | 123302806 | 066468 |
| 55250 | 123367958 | 123368796 | |
| 55251 | 123670118 | 123671281 | 107669 |
| 55252 | 123674162 | 123674714 | 107669 |
| 55253 | 123685653 | 123688840 | 226864, 107669 |
| 55254 | 123695074 | 123695749 | 226864 |
| 55255 | 123733782 | 123735319 | 107672 |
| 55256 | 123749572 | 123750291 | 138162 |
| 55257 | 123754453 | 123755190 | 138162 |
| 55258 | 123772884 | 123773413 | 138162 |
| 55259 | 123778159 | 123779637 | 138162 |
| 55260 | 123803616 | 123804916 | 138162 |
| 55261 | 123822049 | 123823276 | 138162 |
| 55262 | 123871205 | 123873985 | 138162 |
| 55263 | 123886751 | 123887208 | 138162 |
| 55264 | 123899716 | 123902339 | 138162 |
| 55265 | 123903618 | 123904800 | 138162 |
| 55266 | 123905737 | 123907692 | 138162 |
| 55267 | 123907924 | 123908881 | 138162 |
| 55268 | 123922265 | 123922873 | 138162 |
| 55269 | 123935672 | 123936229 | 138162 |
| 55270 | 123941905 | 123944134 | 138162 |
| 55271 | 124060150 | 124061804 | 138152 |
| 55272 | 124066233 | 124068923 | 138152 |
| 55273 | 124069263 | 124071449 | 138152 |
| 55274 | 124103940 | 124104924 | |
| 55275 | 124132508 | 124135962 | 107679 |
| 55276 | 124220167 | 124222705 | 166033 |
| 55277 | 124227758 | 124229721 | 166033 |
| 55278 | 124263957 | 124264552 | 166033 |
| 55279 | 124620347 | 124622027 | 138161, 213185 |
| 55280 | 124712878 | 124714212 | 179988, 119965 |
| 55281 | 124716611 | 124717454 | 179988 |
| 55282 | 124739225 | 124740523 | 179988 |
| 55283 | 124743297 | 124743829 | 179988 |
| 55284 | 124767326 | 124769911 | 196177, 095574 |
| 55285 | 124779480 | 124780458 | 196177 |
| 55286 | 124798816 | 124799304 | 196177 |
| 55287 | 124888289 | 124890044 | |
| 55288 | 124898868 | 124899410 | |
| 55289 | 124913390 | 124914960 | 154473 |
| 55290 | 124930236 | 124930882 | |
| 55291 | 124961928 | 124964681 | |
| 55292 | 125137285 | 125138035 | 230131 |
| 55293 | 125733781 | 125734319 | |
| 55294 | 126042781 | 126044061 | |
| 55295 | 126077549 | 126079075 | |
| 55296 | 126106619 | 126107910 | 065154 |
| 55297 | 126113882 | 126114542 | |
| 55298 | 126123327 | 126124161 | |
| 55299 | 126149756 | 126150930 | 107902 |
| 55300 | 126158918 | 126160094 | 107902 |
| 55301 | 126163964 | 126165346 | 107902 |
| 55302 | 126285162 | 126286219 | 107902 |
| 55303 | 126320437 | 126321182 | 258539, 189319 |
| 55304 | 126396566 | 126397380 | 258539, 233334, 189319 |
| 55305 | 126424718 | 126425994 | 258539, 189319 |
| 55306 | 126428837 | 126430322 | 258539, 189319 |
| 55307 | 126431645 | 126433751 | 189319, 258539 |
| 55308 | 126479516 | 126481289 | 258539, 203791 |
| 55309 | 126489975 | 126491373 | 165660 |
| 55310 | 126551965 | 126554650 | |
| 55311 | 126591489 | 126592215 | |
| 55312 | 126594535 | 126595824 | |
| 55313 | 126596192 | 126596806 | |
| 55314 | 126597661 | 126598637 | |
| 55315 | 126604159 | 126607715 | 249456 |
| 55316 | 126609802 | 126610372 | 249456 |
| 55317 | 126612835 | 126613802 | 249456 |
| 55318 | 126641842 | 126642473 | 019995 |
| 55319 | 126676398 | 126676719 | 175029, 019995 |
| 55320 | 126772786 | 126773893 | 175029 |
| 55321 | 127407259 | 127409163 | 107938, 234134, 224023 |
| 55322 | 127511063 | 127513210 | 107949, 188690 |
| 55323 | 127583926 | 127585315 | 203780, 089876 |
| 55324 | 127600483 | 127600984 | 203780 |
| 55325 | 127661635 | 127662305 | 233409, 203780 |
| 55326 | 128423212 | 128423894 | |
| 55327 | 128593318 | 128595142 | 150760 |
| 55328 | 128606749 | 128607347 | 150760 |
| 55329 | 128770645 | 128771725 | 150760 |
| 55330 | 128949864 | 128951116 | 150760, 188916 |
| 55331 | 129025675 | 129027050 | 150760 |
| 55332 | 129098273 | 129098912 | 150760 |
| 55333 | 129664459 | 129665487 | |
| 55334 | 129684576 | 129685634 | 180745 |
| 55335 | 129687692 | 129688775 | 180745 |
| 55336 | 129690324 | 129691564 | 180745 |
| 55337 | 129704874 | 129705710 | 132334 |
| 55338 | 129835434 | 129835932 | 132334 |
| 55339 | 129923429 | 129925051 | 148773 |
| 55340 | 129948034 | 129948808 | |
| 55341 | 129954618 | 129956278 | |
| 55342 | 129970952 | 129973194 | |
| 55343 | 130008352 | 130009409 | |
| 55344 | 130725615 | 130726136 | |
| 55345 | 130894083 | 130896211 | |
| 55346 | 130900444 | 130902867 | |
| 55347 | 131184548 | 131185449 | |
| 55348 | 131264450 | 131267020 | 170430 |
| 55349 | 131268352 | 131269183 | 170430 |
| 55350 | 131298799 | 131299834 | 170430 |
| 55351 | 131329041 | 131331230 | 170430 |
| 55352 | 131358524 | 131359155 | 170430 |
| 55353 | 131439990 | 131441778 | 170430 |
| 55354 | 131507936 | 131509247 | 170430 |
| 55355 | 131553181 | 131553958 | 170430 |
| 55356 | 131555329 | 131556144 | 170430 |
| 55357 | 131651779 | 131652253 | 108001 |
| 55358 | 131908029 | 131909814 | 237489 |
| 55359 | 131933689 | 131937165 | 108010 |
| 55360 | 132098336 | 132099570 | |
| 55361 | 133274265 | 133277448 | |
| 55362 | 133462992 | 133463742 | |
| 55363 | 133646686 | 133647319 | |
| 55364 | 133792994 | 133796605 | 176171 |
| 55365 | 133809943 | 133810778 | |
| 55366 | 133810919 | 133811925 | |
| 55367 | 133836453 | 133837583 | |
| 55368 | 133878748 | 133879687 | |
| 55369 | 133996381 | 133997104 | 188385, 235010 |
| 55370 | 134133522 | 134134584 | 165752 |
| 55371 | 134144570 | 134146446 | 148814, 165752 |
| 55372 | 134208962 | 134212051 | 171813 |
| 55373 | 134330062 | 134331674 | 226900 |
| 55374 | 134331722 | 134333166 | |
| 55375 | 134349814 | 134352621 | 068383 |
| 55376 | 134403239 | 134405978 | 068383 |
| 55377 | 134489397 | 134490257 | 068383 |
| 55378 | 134778046 | 134778503 | 232903 |
| 55379 | 134974902 | 134976710 | 171798 |
| 55380 | 135074764 | 135075694 | |
| 55381 | 135091496 | 135092295 | |
| 55382 | 135121275 | 135122947 | 198546, 130640 |
| 55383 | 135131951 | 135132571 | 198546 |
| 55384 | 135160508 | 135162385 | 165828, 226699, 198546 |
| 55385 | 135163762 | 135165108 | 226699, 198546, 165828 |
| 55386 | 135166692 | 135167581 | |
| 55387 | 135170032 | 135171771 | 148803 |
| 55388 | 135172886 | 135174014 | |
| 55389 | 135185973 | 135187689 | 127884 |
| 55390 | 135191399 | 135193600 | 268882, 148832 |
| 55391 | 135207440 | 135208709 | 148824, 254536 |
| 55392 | 135325190 | 135326058 | 214279, 203772 |
| 55393 | 135333514 | 135334795 | 130649, 214279, 203772 |
| 55394 | 135340153 | 135342787 | 268925, 130649, 203772 |

[0579] The locations of ODSCs on Chromosome 11 are shown in Table 53.

TABLE 53
ODSC Locations on Chromosome 11

| SEQ ID NO. | Start | End | Overlapping Gene(s) |
|---|---|---|---|
| 55395 | 206069 | 211090 | 177963, 177951 |
| 55396 | 235591 | 238075 | 185627, 142082 |
| 55397 | 279756 | 280758 | 174885 |
| 55398 | 288256 | 289889 | 142102, 255026 |
| 55399 | 314950 | 315462 | 185885, 185201 |
| 55400 | 315755 | 316896 | |
| 55401 | 326671 | 327921 | 255328, 142089 |
| 55402 | 352704 | 354405 | |
| 55403 | 354776 | 356700 | |
| 55404 | 406150 | 407547 | 185187 |
| 55405 | 416552 | 417342 | 185187 |
| 55406 | 447959 | 449057 | 174915 |
| 55407 | 449832 | 451235 | 174915 |
| 55408 | 469243 | 470600 | 174915 |
| 55409 | 505767 | 507532 | 023191 |
| 55410 | 518436 | 519084 | |
| 55411 | 534474 | 535782 | 174775 |
| 55412 | 559642 | 562256 | 099849, 185522, 254815 |
| 55413 | 567781 | 570051 | 199038, 247095 |
| 55414 | 575563 | 577692 | 070047 |
| 55415 | 577991 | 578918 | 070047 |
| 55416 | 579954 | 580900 | 070047 |
| 55417 | 586339 | 586801 | 070047 |
| 55418 | 587261 | 588989 | 070047 |
| 55419 | 606180 | 606785 | 070047 |
| 55420 | 612037 | 613488 | 185507, 070047 |
| 55421 | 614411 | 616207 | 185507 |
| 55422 | 623875 | 625657 | 099834 |
| 55423 | 647571 | 648145 | 177030 |
| 55424 | 655059 | 655824 | 177030 |
| 55425 | 657593 | 658200 | 177030 |
| 55426 | 679439 | 680154 | 177030 |
| 55427 | 693944 | 696813 | 177042, 177106, 177030 |
| 55428 | 704169 | 708995 | 269915, 177030, 177042, |
| | | | 177106 |
| 55429 | 712449 | 713461 | 269915, 177106 |
| 55430 | 746337 | 748767 | 177156 |
| 55431 | 755346 | 755947 | 177156 |
| 55432 | 776243 | 779235 | 255284, 177225 |
| 55433 | 794616 | 798592 | 177542 |
| 55434 | 808466 | 811032 | 177600, 177595 |
| 55435 | 818537 | 821906 | 177666 |
| 55436 | 825210 | 825930 | 177666, 255108 |
| 55437 | 832145 | 835522 | 177697, 255108 |
| 55438 | 841762 | 845458 | 214063, 177700 |
| 55439 | 910001 | 912450 | 177830 |
| 55440 | 914008 | 915931 | 177830 |
| 55441 | 925091 | 926924 | 183020 |
| 55442 | 952257 | 952901 | 183020 |
| 55443 | 959305 | 960038 | 183020 |
| 55444 | 1073057 | 1074003 | |
| 55445 | 1144683 | 1146887 | |
| 55446 | 1146998 | 1148789 | |
| 55447 | 1283279 | 1284084 | 117983 |
| 55448 | 1318158 | 1320936 | 078902 |
| 55449 | 1323618 | 1327094 | 078902 |
| 55450 | 1328807 | 1331952 | 255153, 078902 |
| 55451 | 1579377 | 1581299 | 184545 |
| 55452 | 1591981 | 1594744 | 233930, 184545 |
| 55453 | 1594851 | 1596366 | 233930 |
| 55454 | 1673752 | 1674845 | |
| 55455 | 1688814 | 1689614 | 205866, 256528 |
| 55456 | 1695074 | 1698335 | |
| 55457 | 1699854 | 1700588 | |
| 55458 | 1711684 | 1712854 | |
| 55459 | 1714183 | 1715690 | |
| 55460 | 1780914 | 1782587 | 235027, 117984 |
| 55461 | 1782932 | 1786069 | 229512, 265587, 117984, |
| | | | 235027 |
| 55462 | 1851854 | 1852585 | 149043 |
| 55463 | 1853426 | 1854292 | 149043 |
| 55464 | 1920267 | 1920877 | |
| 55465 | 1968047 | 1970075 | 214026 |
| 55466 | 1973845 | 1975334 | 214026 |
| 55467 | 2177587 | 2178956 | 129965 |
| 55468 | 2179285 | 2180904 | 129965 |
| 55469 | 2187125 | 2188424 | 180176 |
| 55470 | 2346249 | 2347678 | |
| 55471 | 2390627 | 2391788 | 238184 |
| 55472 | 2398529 | 2400002 | 238184, 110651 |
| 55473 | 2401978 | 2403039 | 110651 |
| 55474 | 2419803 | 2423031 | 184281 |
| 55475 | 2720010 | 2722904 | 269821, 053918 |
| 55476 | 2800216 | 2800720 | 053918 |
| 55477 | 2881471 | 2882433 | 229414 |
| 55478 | 2922603 | 2925406 | 254827, 110628 |
| 55479 | 2949518 | 2952416 | 181649 |
| 55480 | 2961210 | 2963238 | |
| 55481 | 3011431 | 3014153 | 205531, 183562 |
| 55482 | 3062761 | 3065787 | 110619 |
| 55483 | 3070744 | 3071714 | 110619 |
| 55484 | 3077416 | 3079283 | 110619 |
| 55485 | 3399617 | 3400953 | 005801 |
| 55486 | 3663301 | 3664147 | 167311 |
| 55487 | 3695407 | 3696386 | 110713 |
| 55488 | 3802533 | 3803153 | 238304, 110713 |
| 55489 | 3817837 | 3819916 | 148985, 110713 |
| 55490 | 3829034 | 3830851 | 148985 |
| 55491 | 3861351 | 3863340 | 177105 |
| 55492 | 3875877 | 3878393 | 263421, 229368, 228661, |
| | | | 167323 |
| 55493 | 3886580 | 3888000 | 167323 |
| 55494 | 3888071 | 3889497 | 167323 |
| 55495 | 3900706 | 3902758 | 167323 |
| 55496 | 3925353 | 3927847 | 167323 |
| 55497 | 3934807 | 3935656 | 167323 |
| 55498 | 3936958 | 3937743 | 167323 |
| 55499 | 3950475 | 3951315 | 167323 |
| 55500 | 4065104 | 4065987 | 167323 |
| 55501 | 4114940 | 4117491 | 167325 |
| 55502 | 4156028 | 4156623 | 167325 |
| 55503 | 4414123 | 4415222 | 132109 |
| 55504 | 4501734 | 4503185 | |
| 55505 | 4567819 | 4568735 | |
| 55506 | 4628899 | 4629985 | 167333 |
| 55507 | 5617331 | 5618648 | 121236, 258588, 239920, |
| | | | 196565 |
| 55508 | 5641972 | 5642919 | 239920, 196565, 258659, |
| | | | 258588 |
| 55509 | 5643910 | 5644487 | 239920, 196565, 258659, |
| | | | 258588 |
| 55510 | 5645304 | 5646409 | 239920, 196565, 258659, |
| | | | 258588 |
| 55511 | 5705231 | 5707068 | 132256 |
| 55512 | 5710552 | 5712513 | 132274, 132256 |
| 55513 | 6250700 | 6251759 | 051009 |
| 55514 | 6255074 | 6256789 | 132259, 051009 |
| 55515 | 6341070 | 6341928 | 170955 |
| 55516 | 6386554 | 6387558 | |
| 55517 | 6409038 | 6410030 | |
| 55518 | 6410123 | 6412362 | 166311 |
| 55519 | 6439779 | 6440968 | 166313 |
| 55520 | 6460109 | 6465028 | 110169 |
| 55521 | 6494374 | 6496046 | 110171 |
| 55522 | 6501637 | 6503869 | 132286, 265264, 132254 |
| 55523 | 6623839 | 6626294 | 166333, 254400, 132275 |
| 55524 | 6627405 | 6628931 | 166337, 166333 |
| 55525 | 6632335 | 6634840 | 166340, 166337 |
| 55526 | 6659000 | 6659595 | 166341 |
| 55527 | 7040778 | 7042320 | 158077, 149050 |
| 55528 | 7272848 | 7274583 | 170743 |
| 55529 | 7278061 | 7278618 | 170743 |
| 55530 | 7281940 | 7283852 | 170743 |
| 55531 | 7470541 | 7471412 | 251364, 170743 |
| 55532 | 7532587 | 7536031 | 166387, 251364, 183801 |
| 55533 | 7545477 | 7547343 | 166387 |
| 55534 | 7551871 | 7552796 | 166387 |
| 55535 | 7572431 | 7573440 | 166387 |
| 55536 | 7592751 | 7594010 | 254864, 166387 |
| 55537 | 7594276 | 7595613 | 166387 |
| 55538 | 7597022 | 7597974 | 166387 |
| 55539 | 7613261 | 7615368 | 166387 |
| 55540 | 7621316 | 7622011 | 166387 |
| 55541 | 7626644 | 7627250 | 166387 |
| 55542 | 7633283 | 7635487 | 166387 |
| 55543 | 7652239 | 7652875 | 166387 |
| 55544 | 7669279 | 7670177 | 166387 |
| 55545 | 7693806 | 7695512 | 166394 |
| 55546 | 7715782 | 7716473 | 183378 |
| 55547 | 8008021 | 8009286 | 175390 |
| 55548 | 8089765 | 8090970 | 248332, 166402 |
| 55549 | 8350300 | 8350862 | |
| 55550 | 8692577 | 8694256 | 166436 |
| 55551 | 8696353 | 8697162 | |
| 55552 | 8702983 | 8706781 | 166441, 200983 |
| 55553 | 8709437 | 8711638 | 166441 |
| 55554 | 8730475 | 8731439 | 166441, 166444 |
| 55555 | 8738436 | 8743521 | 166444 |
| 55556 | 8753178 | 8755831 | 166444 |
| 55557 | 8778376 | 8779412 | 166444 |
| 55558 | 8786524 | 8791685 | 255159, 166444 |
| 55559 | 8815576 | 8816898 | 166444, 255159 |
| 55560 | 8932548 | 8933462 | 166452 |
| 55561 | 8984840 | 8987215 | 254860, 175348 |
| 55562 | 9159275 | 9160933 | 184014, 175356 |
| 55563 | 9285264 | 9287598 | 184014 |
| 55564 | 9335076 | 9337135 | 166471 |
| 55565 | 9384790 | 9386933 | |
| 55566 | 9405799 | 9407424 | 205339 |
| 55567 | 9480968 | 9484164 | 166478, 268403 |
| 55568 | 9585972 | 9591959 | |
| 55569 | 9594078 | 9598629 | 166483 |
| 55570 | 9616042 | 9616621 | |
| 55571 | 9632305 | 9633179 | |
| 55572 | 9633272 | 9636873 | |
| 55573 | 9684860 | 9686467 | 133789 |
| 55574 | 9761673 | 9762266 | 133789 |
| 55575 | 9779030 | 9782299 | 246273, 245522 |
| 55576 | 9927914 | 9928621 | 255476, 133812 |
| 55577 | 9965253 | 9965739 | 133812 |
| 55578 | 10065487 | 10066869 | 133812 |
| 55579 | 10139535 | 10140185 | 133812 |
| 55580 | 10303507 | 10304226 | 133812 |
| 55581 | 10306654 | 10307480 | 133812 |
| 55582 | 10314417 | 10316702 | 133812 |
| 55583 | 10323555 | 10332048 | 254554, 133805, 148926 |
| 55584 | 10344025 | 10345639 | 133805 |
| 55585 | 10347456 | 10349231 | 133805 |
| 55586 | 10369834 | 10370937 | 133805 |
| 55587 | 10372643 | 10374534 | 133805 |
| 55588 | 10387688 | 10389070 | 133805 |
| 55589 | 10415696 | 10416751 | 133805 |
| 55590 | 10427481 | 10430175 | 133805 |
| 55591 | 10471591 | 10473146 | 133805 |
| 55592 | 10509979 | 10513253 | 133805 |
| 55593 | 10561589 | 10563205 | 177112, 110315 |
| 55594 | 10571807 | 10572749 | 177112 |
| 55595 | 10678905 | 10679486 | 072952 |
| 55596 | 10680698 | 10681810 | 072952 |
| 55597 | 10756731 | 10758587 | |
| 55598 | 10771790 | 10774035 | 198730 |
| 55599 | 10792838 | 10793461 | 198730 |
| 55600 | 10828739 | 10831759 | 246308, 110321 |
| 55601 | 10878176 | 10880890 | 247271, 236287 |
| 55602 | 10907005 | 10907869 | 247271, 250041 |
| 55603 | 10914819 | 10916690 | 247271, 250041 |
| 55604 | 10946587 | 10950414 | |
| 55605 | 10951783 | 10953662 | |
| 55606 | 11169516 | 11170370 | 254401 |
| 55607 | 11334171 | 11336716 | 110328 |
| 55608 | 11458022 | 11458853 | 110328 |
| 55609 | 11462604 | 11463855 | 110328 |
| 55610 | 11470779 | 11474647 | 110328 |
| 55611 | 11601174 | 11602760 | 110328 |
| 55612 | 11641422 | 11644214 | 110328 |
| 55613 | 11834168 | 11836722 | |
| 55614 | 11862278 | 11865997 | 170242 |
| 55615 | 11967486 | 11971446 | 170242 |
| 55616 | 11994444 | 11995439 | 050165 |
| 55617 | 11997725 | 11999781 | 050165 |
| 55618 | 12013225 | 12014817 | 050165 |
| 55619 | 12051429 | 12052252 | |
| 55620 | 12063713 | 12067118 | 254486 |
| 55621 | 12068128 | 12073220 | 254486 |
| 55622 | 12075275 | 12075793 | 254486 |
| 55623 | 12086674 | 12090344 | 254991 |
| 55624 | 12092330 | 12093762 | 254991 |
| 55625 | 12101004 | 12102591 | |
| 55626 | 12106591 | 12110300 | 255400 |
| 55627 | 12110503 | 12114178 | 255400 |
| 55628 | 12127172 | 12127722 | 133816 |
| 55629 | 12131180 | 12133402 | 133816 |
| 55630 | 12187674 | 12189824 | 133816 |
| 55631 | 12203973 | 12204690 | 133816 |
| 55632 | 12274746 | 12276153 | 133816 |
| 55633 | 12308324 | 12310518 | 133808 |
| 55634 | 12398396 | 12400477 | 197702 |
| 55635 | 12694823 | 12698004 | 187079 |
| 55636 | 12713107 | 12717783 | 187079 |
| 55637 | 12727374 | 12727976 | 187079 |
| 55638 | 12790942 | 12792471 | 187079 |
| 55639 | 12823899 | 12824995 | 187079 |
| 55640 | 12873312 | 12876838 | 187079 |
| 55641 | 12889784 | 12890382 | 187079 |
| 55642 | 12893331 | 12893953 | 187079 |
| 55643 | 13029413 | 13030082 | 254670 |
| 55644 | 13161530 | 13163031 | |
| 55645 | 13204525 | 13205477 | |
| 55646 | 13229209 | 13230233 | |
| 55647 | 13298266 | 13300718 | 133794 |
| 55648 | 13336480 | 13337604 | 133794 |
| 55649 | 13350535 | 13351754 | 133794 |
| 55650 | 13354196 | 13357464 | 133794 |
| 55651 | 13358917 | 13361788 | 133794 |
| 55652 | 13472573 | 13473195 | 148925 |
| 55653 | 13482892 | 13485936 | 148925 |
| 55654 | 13497300 | 13498306 | |
| 55655 | 13986662 | 13987587 | 152268 |
| 55656 | 14037147 | 14037703 | 152268 |
| 55657 | 14051306 | 14051893 | 152268 |
| 55658 | 14135610 | 14136369 | 152268 |
| 55659 | 14211372 | 14212023 | 152268 |
| 55660 | 14279013 | 14280679 | 152268 |
| 55661 | 14309505 | 14310767 | 133818 |
| 55662 | 14357194 | 14359729 | 133818 |
| 55663 | 14378557 | 14381339 | 133818 |
| 55664 | 14394834 | 14397557 | |
| 55665 | 14397846 | 14399174 | |
| 55666 | 14401905 | 14403776 | |
| 55667 | 14409049 | 14411281 | |
| 55668 | 14432994 | 14434212 | |
| 55669 | 14442474 | 14446683 | |
| 55670 | 14464838 | 14471335 | 129083 |
| 55671 | 14520503 | 14522435 | 129083, 129084, 256206 |
| 55672 | 14540115 | 14542630 | 256206, 129084 |
| 55673 | 14562636 | 14563333 | 129084 |
| 55674 | 14604440 | 14606875 | 129084 |
| 55675 | 14639137 | 14640168 | 129084 |
| 55676 | 14640969 | 14642327 | 129084 |
| 55677 | 14664131 | 14666914 | 152270, 129084 |
| 55678 | 14912207 | 14914239 | 186104 |
| 55679 | 14925802 | 14927405 | 175868 |
| 55680 | 14996207 | 14998036 | 175868 |
| 55681 | 15096063 | 15096933 | 175868 |
| 55682 | 15141283 | 15142030 | 188487 |
| 55683 | 15144285 | 15146650 | 188487 |
| 55684 | 15215630 | 15218716 | 188487 |
| 55685 | 15221038 | 15221832 | 188487 |
| 55686 | 15503151 | 15504011 | 253072 |
| 55687 | 15515292 | 15516404 | |
| 55688 | 15518811 | 15519617 | |
| 55689 | 15671278 | 15672729 | 254695 |
| 55690 | 15683010 | 15689337 | 254695 |
| 55691 | 15694689 | 15695317 | 254695 |
| 55692 | 15696569 | 15698309 | 254695 |
| 55693 | 15709742 | 15710483 | 254695 |
| 55694 | 15725622 | 15726039 | 254695, 254645 |
| 55695 | 15728928 | 15730109 | 254645 |
| 55696 | 15968787 | 15970568 | |
| 55697 | 15989679 | 15991849 | 110693 |
| 55698 | 16115271 | 16116886 | 110693 |
| 55699 | 16135798 | 16137623 | 110693 |
| 55700 | 16175031 | 16180686 | 110693 |
| 55701 | 16203481 | 16209187 | 110693 |
| 55702 | 16356855 | 16357707 | 110693 |
| 55703 | 16625456 | 16629584 | 110693 |
| 55704 | 16759146 | 16761370 | 110693, 110696 |
| 55705 | 16796260 | 16797659 | |
| 55706 | 16806912 | 16811122 | 166689 |
| 55707 | 16812049 | 16813771 | 166689 |
| 55708 | 16825660 | 16826578 | 166689 |
| 55709 | 16836614 | 16837120 | 166689 |
| 55710 | 16839786 | 16840307 | 166689 |
| 55711 | 16865603 | 16866533 | 166689 |
| 55712 | 16902832 | 16903533 | 166689 |
| 55713 | 17017539 | 17018169 | 166689 |
| 55714 | 17018901 | 17019880 | 166689 |
| 55715 | 17033256 | 17037102 | 184669, 166689 |
| 55716 | 17098054 | 17100199 | 011405, 110700 |
| 55717 | 17218676 | 17219738 | 011405 |
| 55718 | 17228558 | 17230503 | 070081, 011405 |
| 55719 | 17297706 | 17299205 | 070081 |
| 55720 | 17372818 | 17374028 | 188211 |
| 55721 | 17374166 | 17376137 | 188211 |
| 55722 | 17410133 | 17411594 | 187486 |
| 55723 | 17426342 | 17428597 | 006071 |
| 55724 | 17435155 | 17435798 | 006071 |
| 55725 | 17704783 | 17706133 | |
| 55726 | 17772033 | 17773005 | 129159 |
| 55727 | 17791436 | 17792064 | 129159 |
| 55728 | 17975846 | 17976656 | 129158 |
| 55729 | 18033723 | 18035683 | 129158, 255448 |
| 55730 | 18126948 | 18127901 | 166788 |
| 55731 | 18245354 | 18246213 | |
| 55732 | 18256431 | 18259604 | 148965, 255071 |
| 55733 | 18270108 | 18270753 | 255071, 134339 |
| 55734 | 18280443 | 18281789 | |
| 55735 | 18287050 | 18287890 | 173432 |
| 55736 | 18330650 | 18333049 | 110756 |
| 55737 | 18342608 | 18344977 | 110768, 110756 |
| 55738 | 18404194 | 18406745 | |
| 55739 | 18415177 | 18417942 | 134333 |
| 55740 | 18478779 | 18479441 | 166800 |
| 55741 | 18547249 | 18549587 | 074319 |
| 55742 | 18609382 | 18611306 | 151116 |
| 55743 | 18654902 | 18657033 | 179119 |
| 55744 | 18719783 | 18721151 | 151117 |
| 55745 | 19049414 | 19050185 | |
| 55746 | 19138541 | 19139379 | 177054 |
| 55747 | 19262272 | 19262702 | 255308, 129173 |
| 55748 | 19297727 | 19299946 | 255308 |
| 55749 | 19367122 | 19368587 | |
| 55750 | 19386399 | 19393258 | 166833 |
| 55751 | 19393670 | 19397918 | 166833 |
| 55752 | 19400175 | 19403936 | 255270, 166833 |
| 55753 | 19411051 | 19411896 | 166833 |
| 55754 | 19419767 | 19421209 | 166833 |
| 55755 | 19440451 | 19442426 | 166833 |
| 55756 | 19449954 | 19451343 | 166833 |
| 55757 | 19459253 | 19460426 | 166833 |
| 55758 | 19463264 | 19464851 | 166833 |
| 55759 | 19468326 | 19469734 | 166833 |
| 55760 | 19528958 | 19530857 | 166833 |
| 55761 | 19531739 | 19534590 | 254622, 166833 |
| 55762 | 19544969 | 19548066 | 166833 |
| 55763 | 19559277 | 19560244 | 166833 |
| 55764 | 19576674 | 19577404 | 166833 |
| 55765 | 19617314 | 19619047 | 166833 |
| 55766 | 19680852 | 19682729 | 166833 |
| 55767 | 19689150 | 19691349 | 166833 |
| 55768 | 19700872 | 19702746 | 166833 |
| 55769 | 19704813 | 19706945 | 166833 |
| 55770 | 19718904 | 19721431 | 166833 |
| 55771 | 19732662 | 19738442 | 270607, 166833 |
| 55772 | 19744835 | 19746230 | 166833 |
| 55773 | 19746676 | 19747887 | 166833 |
| 55774 | 19788280 | 19788942 | 166833 |
| 55775 | 19797652 | 19799592 | 166833 |
| 55776 | 19811350 | 19811882 | 166833 |
| 55777 | 19822207 | 19823402 | 166833 |
| 55778 | 19842837 | 19843556 | 166833 |
| 55779 | 19850695 | 19851406 | 166833 |
| 55780 | 19885910 | 19886591 | 166833 |
| 55781 | 19911751 | 19912365 | 166833 |
| 55782 | 19974596 | 19975980 | 166833 |
| 55783 | 19976284 | 19976894 | 166833 |
| 55784 | 19997995 | 19998558 | 166833 |
| 55785 | 19999440 | 20003559 | 254542, 166833 |
| 55786 | 20015882 | 20018322 | 166833 |
| 55787 | 20021505 | 20026674 | 166833 |
| 55788 | 20029978 | 20035972 | 166833 |
| 55789 | 20041617 | 20042760 | 166833 |
| 55790 | 20043173 | 20047017 | 166833 |
| 55791 | 20054595 | 20059627 | 166833 |
| 55792 | 20062937 | 20064125 | 166833 |
| 55793 | 20078653 | 20079825 | 166833 |
| 55794 | 20081158 | 20081757 | 166833 |
| 55795 | 20132953 | 20135162 | 166833 |
| 55796 | 20384505 | 20386631 | 109854 |
| 55797 | 20408297 | 20410577 | 185238 |
| 55798 | 20539659 | 20540342 | |
| 55799 | 21930263 | 21931749 | |
| 55800 | 22097982 | 22098555 | |
| 55801 | 22213770 | 22215531 | 171714 |
| 55802 | 22645958 | 22648247 | 229387, 148935, 183161 |
| 55803 | 22656329 | 22657061 | 148935 |
| 55804 | 22687638 | 22689070 | 148935 |
| 55805 | 22695308 | 22699657 | 148935 |
| 55806 | 22701227 | 22703969 | 148935 |
| 55807 | 22723986 | 22725466 | 148935 |
| 55808 | 22850715 | 22851942 | 246225, 198168 |
| 55809 | 22971552 | 22972198 | |
| 55810 | 22997693 | 22998407 | |
| 55811 | 23032400 | 23032922 | |
| 55812 | 23134348 | 23134952 | |
| 55813 | 25086318 | 25088300 | 187398 |
| 55814 | 25115227 | 25116293 | |
| 55815 | 26164682 | 26166450 | |
| 55816 | 26208664 | 26210730 | 255243 |
| 55817 | 26931030 | 26931490 | |
| 55818 | 26966256 | 26970769 | |
| 55819 | 26971375 | 26972856 | |
| 55820 | 27013266 | 27014466 | |
| 55821 | 27015392 | 27016564 | 176971 |
| 55822 | 27046741 | 27047463 | |
| 55823 | 27076362 | 27077775 | 129151, 254560 |
| 55824 | 27079986 | 27080403 | 129151, 254560 |
| 55825 | 27109756 | 27110525 | 129151, 254560 |
| 55826 | 27115524 | 27116304 | 129151, 254560 |
| 55827 | 27119018 | 27119826 | 129151, 254560 |
| 55828 | 27222857 | 27223933 | 254560 |
| 55829 | 27229926 | 27231663 | 254560 |
| 55830 | 27303649 | 27304751 | |
| 55831 | 27313081 | 27314573 | |
| 55832 | 27333594 | 27334301 | |
| 55833 | 27395712 | 27396347 | 205213 |
| 55834 | 27402418 | 27403185 | 205213 |
| 55835 | 27413138 | 27414375 | 205213 |
| 55836 | 27416186 | 27418739 | 205213 |
| 55837 | 27422796 | 27424605 | 205213 |
| 55838 | 27442598 | 27443959 | 205213 |
| 55839 | 27444405 | 27445237 | 205213 |
| 55840 | 27477028 | 27478259 | 205213 |
| 55841 | 27489046 | 27495152 | 254862, 205213 |
| 55842 | 27527215 | 27529323 | 245573, 148943 |
| 55843 | 27535586 | 27536668 | 245573 |
| 55844 | 28131514 | 28132623 | 169519 |
| 55845 | 28167582 | 28168221 | 169519 |
| 55846 | 28190091 | 28190996 | 169519 |
| 55847 | 28778350 | 28779635 | 249867 |
| 55848 | 29282292 | 29283870 | 254526 |
| 55849 | 29303513 | 29304704 | |
| 55850 | 29314486 | 29316402 | |
| 55851 | 29317500 | 29319273 | |
| 55852 | 29342441 | 29344137 | |
| 55853 | 29837769 | 29838633 | 254734 |
| 55854 | 30344173 | 30345748 | 152219 |
| 55855 | 30566844 | 30567754 | 066382 |
| 55856 | 30607331 | 30608222 | 066382, 254489 |
| 55857 | 30822310 | 30823782 | |
| 55858 | 31005976 | 31006707 | 170959 |
| 55859 | 31012017 | 31015157 | 170959 |
| 55860 | 31390880 | 31392095 | 170946, 170959 |
| 55861 | 31530249 | 31532621 | 109911, 148950 |
| 55862 | 31667060 | 31668305 | 109911, 228061 |
| 55863 | 31676943 | 31677479 | 109911, 228061 |
| 55864 | 31924774 | 31925593 | 049449 |
| 55865 | 32109445 | 32110367 | 049449 |
| 55866 | 32111916 | 32113870 | 049449 |
| 55867 | 32604853 | 32606144 | 149100 |
| 55868 | 32720024 | 32720594 | 186714 |
| 55869 | 32728049 | 32729810 | 186714 |
| 55870 | 32850601 | 32852499 | 135378 |
| 55871 | 32913041 | 32916189 | 060749 |
| 55872 | 33032886 | 33033893 | |
| 55873 | 33035263 | 33035708 | |
| 55874 | 33036724 | 33040111 | 121690 |
| 55875 | 33060328 | 33062255 | 176148 |
| 55876 | 33081672 | 33084480 | 176148 |
| 55877 | 33181333 | 33183367 | 247151, 176102 |
| 55878 | 33278029 | 33281121 | 110422 |
| 55879 | 33499402 | 33500013 | |
| 55880 | 33709775 | 33715533 | 255202 |
| 55881 | 33715808 | 33717688 | 255202 |
| 55882 | 33720446 | 33726158 | 205177, 085063 |
| 55883 | 33729473 | 33730020 | 085063 |
| 55884 | 33756047 | 33758904 | 085063 |
| 55885 | 33795052 | 33796548 | 254508, 110429 |
| 55886 | 33801443 | 33802219 | |
| 55887 | 34049052 | 34050563 | |
| 55888 | 34057786 | 34058456 | |
| 55889 | 34072112 | 34075893 | 135387 |
| 55890 | 34126179 | 34128518 | 135372 |
| 55891 | 34195889 | 34196704 | 166016 |
| 55892 | 34214608 | 34215082 | 166016 |
| 55893 | 34230018 | 34230903 | 166016 |
| 55894 | 34234118 | 34238126 | 166016 |
| 55895 | 34255408 | 34256410 | 166016 |
| 55896 | 34259610 | 34260560 | 166016 |
| 55897 | 34263227 | 34266745 | 166016 |
| 55898 | 34284904 | 34286489 | 166016 |
| 55899 | 34296144 | 34297009 | 166016 |
| 55900 | 34329471 | 34331906 | 166016 |
| 55901 | 34337610 | 34341533 | 166016 |
| 55902 | 34366165 | 34368420 | 166016 |
| 55903 | 34371394 | 34371954 | 166016 |
| 55904 | 34375760 | 34377038 | 166016 |
| 55905 | 34377557 | 34381561 | 166016 |
| 55906 | 34392182 | 34393421 | |
| 55907 | 34424884 | 34425504 | |
| 55908 | 34427381 | 34428450 | |
| 55909 | 34429855 | 34430664 | |
| 55910 | 34436688 | 34437813 | |
| 55911 | 34448303 | 34449853 | |
| 55912 | 34459983 | 34461942 | 121691 |
| 55913 | 34522990 | 34524153 | 135374 |
| 55914 | 34621962 | 34622853 | |
| 55915 | 34652859 | 34654577 | 135373 |
| 55916 | 34661173 | 34662458 | 135373 |
| 55917 | 34674662 | 34677851 | 135373 |
| 55918 | 34702551 | 34703328 | |
| 55919 | 34706719 | 34707506 | |
| 55920 | 34804712 | 34806853 | |
| 55921 | 34931373 | 34932018 | 149089 |
| 55922 | 34936691 | 34939311 | 110435, 149089 |
| 55923 | 34951045 | 34951966 | 110435 |
| 55924 | 35257456 | 35258039 | |
| 55925 | 35324546 | 35327421 | 110436 |
| 55926 | 35357794 | 35362532 | 110436 |
| 55927 | 35379326 | 35380241 | 110436 |
| 55928 | 35380603 | 35382386 | 110436 |
| 55929 | 35385053 | 35386448 | 110436 |
| 55930 | 35394506 | 35395670 | 110436 |
| 55931 | 35412351 | 35414233 | 110436 |
| 55932 | 35639302 | 35642281 | 179431 |
| 55933 | 35650795 | 35652755 | |
| 55934 | 35683023 | 35685960 | 166326 |
| 55935 | 35756110 | 35756810 | 166326 |
| 55936 | 35771805 | 35772351 | 166326 |
| 55937 | 35819813 | 35821100 | 166326 |
| 55938 | 35948418 | 35949816 | |
| 55939 | 35964993 | 35966218 | 179241 |
| 55940 | 36169561 | 36173395 | 179241 |
| 55941 | 36287254 | 36289108 | |
| 55942 | 36310210 | 36311524 | 110442 |
| 55943 | 36521353 | 36522868 | 175104 |
| 55944 | 36530177 | 36532657 | 166349, 175104 |
| 55945 | 36615723 | 36616807 | 166352, 175097 |
| 55946 | 37269571 | 37270149 | |
| 55947 | 37343999 | 37344902 | |
| 55948 | 37521351 | 37527919 | |
| 55949 | 40349866 | 40351895 | 148948 |
| 55950 | 40381689 | 40382290 | 148948 |
| 55951 | 40408528 | 40410966 | 148948 |
| 55952 | 40424676 | 40425962 | 148948 |
| 55953 | 40456733 | 40457484 | 148948 |
| 55954 | 40535507 | 40536089 | 148948 |
| 55955 | 40711326 | 40711804 | 148948 |
| 55956 | 40737803 | 40738912 | 148948 |
| 55957 | 41120993 | 41122048 | 148948 |
| 55958 | 41143128 | 41143668 | 148948 |
| 55959 | 41399042 | 41399999 | 148948 |
| 55960 | 41404420 | 41405021 | 148948 |
| 55961 | 43333111 | 43334462 | 166181 |
| 55962 | 43379814 | 43381767 | 052841, 254907 |
| 55963 | 43424749 | 43426526 | 052841 |
| 55964 | 43665091 | 43666694 | 149084 |
| 55965 | 43701725 | 43703726 | 149084 |
| 55966 | 43852182 | 43853624 | 149084, 246250 |
| 55967 | 43890457 | 43891018 | 246250 |
| 55968 | 43901972 | 43903250 | 166199, 246250 |
| 55969 | 43941267 | 43943520 | 254409, 244926, 166199 |
| 55970 | 44006071 | 44007062 | 254409 |
| 55971 | 44008817 | 44009600 | 254409 |
| 55972 | 44087017 | 44088667 | 110455 |
| 55973 | 44116991 | 44118564 | 151348 |
| 55974 | 44265119 | 44265807 | 151348 |
| 55975 | 44326688 | 44327803 | 052850 |
| 55976 | 44585586 | 44587656 | 085117 |
| 55977 | 44589691 | 44591300 | 085117 |
| 55978 | 44605914 | 44606948 | 085117 |
| 55979 | 44655831 | 44657002 | |
| 55980 | 44730314 | 44731346 | |
| 55981 | 45000316 | 45000952 | |
| 55982 | 45001324 | 45002083 | |
| 55983 | 45110665 | 45111289 | |
| 55984 | 45167363 | 45169562 | 019485 |
| 55985 | 45201436 | 45203217 | 019485 |
| 55986 | 45412876 | 45413366 | 255041 |
| 55987 | 45415280 | 45416387 | 255041 |
| 55988 | 45757230 | 45759365 | 255426, 254519 |
| 55989 | 45792633 | 45793998 | 205106 |
| 55990 | 45798579 | 45799543 | |
| 55991 | 45812917 | 45813703 | |
| 55992 | 45820124 | 45821393 | |
| 55993 | 45822899 | 45824909 | |
| 55994 | 45825199 | 45827901 | 181830 |
| 55995 | 45864639 | 45865988 | |
| 55996 | 45868437 | 45871027 | 121671 |
| 55997 | 45873381 | 45874010 | 121671 |
| 55998 | 45879744 | 45882302 | 121671 |
| 55999 | 45906637 | 45907588 | 121653 |
| 56000 | 45921115 | 45921930 | 121653 |
| 56001 | 45934858 | 45935581 | 121680 |
| 56002 | 45938412 | 45940500 | 121680 |
| 56003 | 46140727 | 46144902 | 135365 |
| 56004 | 46263842 | 46265733 | |
| 56005 | 46270057 | 46271249 | |
| 56006 | 46295209 | 46296062 | 255007 |
| 56007 | 46368807 | 46370059 | 149091 |
| 56008 | 46401931 | 46403483 | 110492, 149091 |
| 56009 | 46532881 | 46533369 | 110497 |
| 56010 | 46574630 | 46576943 | 110497 |
| 56011 | 46614524 | 46616434 | 110497 |
| 56012 | 46637915 | 46640258 | 175224, 180423 |
| 56013 | 46655185 | 46655832 | 175224 |
| 56014 | 46695738 | 46698027 | 175224 |
| 56015 | 46704731 | 46705114 | 175220 |
| 56016 | 46717296 | 46718260 | 175220 |
| 56017 | 46721198 | 46723662 | 175213, 175220 |
| 56018 | 46731859 | 46733888 | |
| 56019 | 46734038 | 46737319 | |
| 56020 | 46739221 | 46743624 | 180210 |
| 56021 | 46766470 | 46767209 | 175216 |
| 56022 | 46847764 | 46848639 | 175216 |
| 56023 | 46867131 | 46868054 | 247675, 175216 |
| 56024 | 46957961 | 46958949 | 149179 |
| 56025 | 47026166 | 47026774 | 149179 |
| 56026 | 47120858 | 47121462 | 149179 |
| 56027 | 47197373 | 47199950 | 165912, 149182 |
| 56028 | 47206099 | 47209702 | 165912 |
| 56029 | 47210451 | 47211576 | |
| 56030 | 47235577 | 47238469 | 134574 |
| 56031 | 47254291 | 47257566 | 134574 |
| 56032 | 47262681 | 47265502 | 134575 |
| 56033 | 47265997 | 47267869 | 134575 |
| 56034 | 47269289 | 47271484 | 025434, 134575 |
| 56035 | 47276418 | 47277153 | 025434 |
| 56036 | 47278541 | 47280472 | 025434 |
| 56037 | 47290403 | 47292301 | 110514, 256746 |
| 56038 | 47328938 | 47329301 | 110514 |
| 56039 | 47376236 | 47377358 | 066336 |
| 56040 | 47428726 | 47431508 | 255197, 165915 |
| 56041 | 47446859 | 47449332 | 165916 |
| 56042 | 47452186 | 47453751 | |
| 56043 | 47455556 | 47456788 | |
| 56044 | 47520073 | 47520981 | 149187 |
| 56045 | 47544839 | 47545841 | 149187 |
| 56046 | 47569063 | 47569655 | 149187 |
| 56047 | 47573334 | 47575297 | 149187 |
| 56048 | 47586313 | 47588023 | 213619, 110536, 149187 |
| 56049 | 47594232 | 47594714 | 123444, 213619, 110536 |
| 56050 | 47599693 | 47601501 | 123444, 231880, 213619 |
| 56051 | 47663073 | 47664669 | 109919 |
| 56052 | 47735932 | 47737072 | 165923 |
| 56053 | 47745453 | 47746367 | 109920 |
| 56054 | 47787093 | 47790280 | 109920 |
| 56055 | 47869003 | 47870748 | 030066 |
| 56056 | 47945656 | 47946475 | |
| 56057 | 47958885 | 47960311 | |
| 56058 | 47963601 | 47964316 | |
| 56059 | 47967959 | 47969223 | |
| 56060 | 48000873 | 48004080 | 149177 |
| 56061 | 48010896 | 48013900 | 149177 |
| 56062 | 48014802 | 48015515 | 149177 |
| 56063 | 48018469 | 48021627 | 149177 |
| 56064 | 48034698 | 48035505 | 149177 |
| 56065 | 48082806 | 48083419 | 149177 |
| 56066 | 48084869 | 48086198 | 149177 |
| 56067 | 48102281 | 48103702 | 149177 |
| 56068 | 48114841 | 48116500 | 149177 |
| 56069 | 48122308 | 48124416 | 149177 |
| 56070 | 48125144 | 48125959 | 149177 |
| 56071 | 49229342 | 49230307 | 086205 |
| 56072 | 56391960 | 56393021 | |
| 56073 | 56934528 | 56935183 | |
| 56074 | 57007199 | 57007927 | |
| 56075 | 57044554 | 57045108 | |
| 56076 | 57045157 | 57046251 | |
| 56077 | 57056316 | 57057195 | |
| 56078 | 57060276 | 57060924 | |
| 56079 | 57073703 | 57074364 | 149115 |
| 56080 | 57077397 | 57079947 | 149115 |
| 56081 | 57088577 | 57090581 | 149115 |
| 56082 | 57091093 | 57094052 | 149136, 254662, 149115 |
| 56083 | 57102400 | 57104070 | 149136 |
| 56084 | 57117021 | 57117742 | 109991 |
| 56085 | 57191483 | 57196165 | 254979, 134802 |
| 56086 | 57201938 | 57202782 | |
| 56087 | 57205871 | 57206687 | |
| 56088 | 57209096 | 57209723 | |
| 56089 | 57220827 | 57221745 | |
| 56090 | 57224605 | 57228910 | 186907 |
| 56091 | 57243182 | 57244931 | 255301, 186907 |
| 56092 | 57247463 | 57248815 | |
| 56093 | 57264709 | 57266487 | 149150 |
| 56094 | 57269320 | 57270828 | 149150 |
| 56095 | 57281372 | 57283917 | 149150 |
| 56096 | 57297467 | 57299238 | 134809 |
| 56097 | 57333300 | 57336194 | 156587 |
| 56098 | 57336530 | 57337250 | |
| 56099 | 57363913 | 57368252 | 149131 |
| 56100 | 57383831 | 57384596 | |
| 56101 | 57385679 | 57386917 | |
| 56102 | 57405477 | 57406620 | 254602 |
| 56103 | 57406935 | 57407783 | 254602 |
| 56104 | 57424575 | 57425819 | 172409 |
| 56105 | 57433801 | 57436657 | 156599 |
| 56106 | 57447219 | 57447683 | 156599 |
| 56107 | 57479191 | 57480976 | 213593, 254462, 156603 |
| 56108 | 57508382 | 57510130 | 254732, 211450, 213593, |
| | | | 254462 |
| 56109 | 57528542 | 57531132 | 254732, 198561, 254462 |
| 56110 | 57544804 | 57547116 | 254732, 198561, 254462 |
| 56111 | 57560268 | 57561211 | 254732, 198561 |
| 56112 | 57566264 | 57567358 | 198561 |
| 56113 | 57568006 | 57568718 | 198561 |
| 56114 | 57826134 | 57826961 | 255146, 186509 |
| 56115 | 58340507 | 58348230 | 255073, 186660, 110031 |
| 56116 | 58394576 | 58396240 | |
| 56117 | 58421420 | 58422687 | 149124 |
| 56118 | 58426942 | 58427314 | 149124 |
| 56119 | 58498935 | 58499970 | 149124 |
| 56120 | 58529699 | 58531067 | |
| 56121 | 58555170 | 58556380 | |
| 56122 | 58647876 | 58648792 | 254717, 156689 |
| 56123 | 58673351 | 58674281 | 166840, 224130 |
| 56124 | 58690583 | 58691242 | 166840, 255523 |
| 56125 | 58693568 | 58696991 | 255523, 166840 |
| 56126 | 58706576 | 58708513 | 255240, 166840 |
| 56127 | 58708983 | 58709921 | 255240, 166840 |
| 56128 | 58712875 | 58714234 | 255240, 166840 |
| 56129 | 58766183 | 58767995 | 254786, 255240, 166840 |
| 56130 | 58780245 | 58780933 | 255240, 166840 |
| 56131 | 58792338 | 58793287 | 255240, 166840 |
| 56132 | 58909711 | 58910996 | 166801, 245571, 255381 |
| 56133 | 58938784 | 58944931 | 110042 |
| 56134 | 58958352 | 58959668 | 110042 |
| 56135 | 58968675 | 58969298 | 110042 |
| 56136 | 59304349 | 59305867 | |
| 56137 | 59317607 | 59319618 | |
| 56138 | 59323266 | 59324489 | |
| 56139 | 59324532 | 59325292 | |
| 56140 | 59327436 | 59328560 | |
| 56141 | 59333132 | 59334242 | 255008 |
| 56142 | 59378876 | 59380070 | 110048 |
| 56143 | 59381736 | 59384614 | 255139, 110048 |
| 56144 | 59410844 | 59411510 | 166889 |
| 56145 | 59435088 | 59438209 | 255355, 166889 |
| 56146 | 59441662 | 59442293 | 255355 |
| 56147 | 59443461 | 59444120 | 255355 |
| 56148 | 59521316 | 59524351 | 254477, 166900 |
| 56149 | 59543840 | 59546344 | 166900 |
| 56150 | 59554306 | 59554965 | 166900 |
| 56151 | 59577536 | 59578685 | 166902 |
| 56152 | 59936512 | 59937547 | |
| 56153 | 60425834 | 60426435 | 181995 |
| 56154 | 60608777 | 60610974 | 256813, 110104, 255959 |
| 56155 | 60619332 | 60620691 | 183134 |
| 56156 | 60639028 | 60640234 | 149506 |
| 56157 | 60672408 | 60674484 | 257052, 110107 |
| 56158 | 60685651 | 60686528 | 256196, 110108 |
| 56159 | 60691481 | 60692820 | 006118, 256196 |
| 56160 | 60718645 | 60720526 | 110446 |
| 56161 | 60764057 | 60764814 | 013725 |
| 56162 | 60919770 | 60921740 | 167987 |
| 56163 | 60925576 | 60930010 | 167987 |
| 56164 | 61061252 | 61063063 | 167992 |
| 56165 | 61065059 | 61065716 | |
| 56166 | 61099558 | 61103332 | 149476, 167986 |
| 56167 | 61114883 | 61116571 | 162144, 149476 |
| 56168 | 61128418 | 61130519 | 149483, 162144 |
| 56169 | 61136711 | 61137723 | 149483 |
| 56170 | 61146115 | 61146600 | |
| 56171 | 61159219 | 61160886 | 187049 |
| 56172 | 61196326 | 61198387 | 256591, 167985, 149532 |
| 56173 | 61213559 | 61214119 | 256591, 167985 |
| 56174 | 61256140 | 61256872 | 162148 |
| 56175 | 61296740 | 61298368 | 011347 |
| 56176 | 61298398 | 61298810 | 011347 |
| 56177 | 61311226 | 61311960 | 011347 |
| 56178 | 61343465 | 61344168 | 011347 |
| 56179 | 61347729 | 61349205 | 011347 |
| 56180 | 61519706 | 61521606 | 124920, 124915 |
| 56181 | 61522841 | 61525823 | 124915, 124920 |
| 56182 | 61532320 | 61535006 | 124920 |
| 56183 | 61558932 | 61561119 | 207601, 134824, 168496, |
| | | | 134825 |
| 56184 | 61582054 | 61585212 | 222326, 149485, 134824 |
| 56185 | 61587026 | 61589393 | 149485, 134824 |
| 56186 | 61594251 | 61597413 | 149485, 134824 |
| 56187 | 61655292 | 61656241 | 221968 |
| 56188 | 61657938 | 61659739 | 221968 |
| 56189 | 61722310 | 61723725 | 167995 |
| 56190 | 61728791 | 61732223 | 167995, 167996 |
| 56191 | 61732480 | 61745414 | 269089, 167995, 167996 |
| 56192 | 61748060 | 61749236 | |
| 56193 | 61762508 | 61762953 | |
| 56194 | 61767949 | 61769707 | |
| 56195 | 61792338 | 61793924 | |
| 56196 | 62165487 | 62166531 | |
| 56197 | 62192741 | 62193330 | 255446 |
| 56198 | 62200102 | 62200838 | |
| 56199 | 62216446 | 62217514 | 124942 |
| 56200 | 62309646 | 62315889 | 257058, 124942 |
| 56201 | 62319901 | 62322803 | 124942 |
| 56202 | 62327782 | 62328596 | 254772, 255508 |
| 56203 | 62340190 | 62342953 | 149016, 254772, 255508 |
| 56204 | 62354449 | 62356566 | 149016, 255508 |
| 56205 | 62358085 | 62360300 | 149016, 255508 |
| 56206 | 62368005 | 62369514 | 149480 |
| 56207 | 62379153 | 62380855 | 149489, 149499 |
| 56208 | 62388491 | 62390768 | 149541 |
| 56209 | 62408149 | 62408629 | 089597 |
| 56210 | 62413107 | 62414556 | 185085, 089597 |
| 56211 | 62419854 | 62421401 | 185085, 255432 |
| 56212 | 62431876 | 62434268 | 206597, 214756, 255432, |
| | | | 162194 |
| 56213 | 62438382 | 62440103 | 162194, 204922 |
| 56214 | 62445689 | 62447178 | 162191 |
| 56215 | 62476143 | 62478087 | 162188, 168000, 234857 |
| 56216 | 62479956 | 62482462 | 214753, 234857 |
| 56217 | 62493277 | 62494869 | 234857, 214753 |
| 56218 | 62495315 | 62496944 | 162222 |
| 56219 | 62528833 | 62529831 | 168002 |
| 56220 | 62538160 | 62539621 | 267811, 168569, 162227 |
| 56221 | 62553872 | 62555850 | 185475, 269176, 162227, |
| | | | 168569 |
| 56222 | 62558420 | 62559718 | 162231, 168569 |
| 56223 | 62571974 | 62573420 | 162231 |
| 56224 | 62597955 | 62600856 | 133316, 256690, 162236 |
| 56225 | 62606164 | 62610524 | 222328, 133316 |
| 56226 | 62622419 | 62624527 | 168003, 255717 |
| 56227 | 62647346 | 62651205 | 168003 |
| 56228 | 63008125 | 63009384 | 184999 |
| 56229 | 63013047 | 63015874 | 184999 |
| 56230 | 63017363 | 63018455 | 184999 |
| 56231 | 63056836 | 63058043 | 184999 |
| 56232 | 63136617 | 63138322 | 149742, 184999 |
| 56233 | 63171841 | 63172990 | 149742 |
| 56234 | 63272330 | 63272883 | |
| 56235 | 63277761 | 63278302 | 133317 |
| 56236 | 63303818 | 63305236 | 133321 |
| 56237 | 63334442 | 63335904 | |
| 56238 | 63341944 | 63342982 | 176485 |
| 56239 | 63376379 | 63377760 | 176485 |
| 56240 | 63380751 | 63382378 | 176485 |
| 56241 | 63437366 | 63439553 | 184743 |
| 56242 | 63448584 | 63450238 | 133318 |
| 56243 | 63530103 | 63533148 | 188070 |
| 56244 | 63535043 | 63537038 | 255651, 188070 |
| 56245 | 63580515 | 63581652 | 168005 |
| 56246 | 63605845 | 63607862 | 072518 |
| 56247 | 63612650 | 63613198 | 072518 |
| 56248 | 63626084 | 63626574 | 072518 |
| 56249 | 63639391 | 63640127 | 072518 |
| 56250 | 63655672 | 63657281 | 072518 |
| 56251 | 63685356 | 63685916 | |
| 56252 | 63706154 | 63707324 | 110583 |
| 56253 | 63741748 | 63742881 | 256100, 176340 |
| 56254 | 63753425 | 63754875 | 256100, 167770 |
| 56255 | 63852519 | 63853298 | 133315, 256481, 256824 |
| 56256 | 63932281 | 63934507 | 133315 |
| 56257 | 63952143 | 63954583 | 168439 |
| 56258 | 63992888 | 63994547 | 149761, 149743 |
| 56259 | 63997672 | 63998809 | 110011, 149761, 256116 |
| 56260 | 64004851 | 64005462 | 173511 |
| 56261 | 64007506 | 64010378 | 173486 |
| 56262 | 64012336 | 64015500 | 256940, 257086, 173457 |
| 56263 | 64018499 | 64019221 | 149782 |
| 56264 | 64026901 | 64027667 | 149782 |
| 56265 | 64035850 | 64038566 | 002330, 173264, 149782 |
| 56266 | 64038626 | 64039766 | 002330, 173264 |
| 56267 | 64040751 | 64041454 | 002330, 173264 |
| 56268 | 64051456 | 64053463 | 002330, 173264 |
| 56269 | 64068038 | 64068870 | 219435, 257069 |
| 56270 | 64071489 | 64074877 | 173153, 219435, 257069 |
| 56271 | 64077366 | 64077884 | 173153 |
| 56272 | 64084358 | 64087132 | 126432, 173113 |
| 56273 | 64099089 | 64100426 | |
| 56274 | 64102413 | 64103198 | |
| 56275 | 64122499 | 64123439 | 168071 |
| 56276 | 64125428 | 64127434 | 162302 |
| 56277 | 64321994 | 64323515 | 168065 |
| 56278 | 64333762 | 64334400 | 168065 |
| 56279 | 64545140 | 64547429 | 269038, 168066 |
| 56280 | 64577320 | 64578745 | 133895 |
| 56281 | 64616076 | 64617169 | |
| 56282 | 64621456 | 64625738 | 110047 |
| 56283 | 64630924 | 64633431 | 110047 |
| 56284 | 64636278 | 64639028 | 110047 |
| 56285 | 64640034 | 64640821 | 110047 |
| 56286 | 64644314 | 64647546 | 110047 |
| 56287 | 64655067 | 64657204 | 110047 |
| 56288 | 64658199 | 64659504 | 207648, 229719, 267804 |
| 56289 | 64659741 | 64662210 | 110046, 229719 |
| 56290 | 64682895 | 64685053 | 068971, 110046 |
| 56291 | 64691334 | 64692918 | 068971 |
| 56292 | 64763776 | 64765096 | 168062 |
| 56293 | 64780842 | 64782640 | 213465, 273003 |
| 56294 | 64794574 | 64795657 | 110025, 273003 |
| 56295 | 64808234 | 64809673 | 168061 |
| 56296 | 64836658 | 64837441 | 146670 |
| 56297 | 64851154 | 64852660 | 162300, 187066, 146670 |
| 56298 | 64863133 | 64864899 | 149823 |
| 56299 | 64869402 | 64870305 | 149823 |
| 56300 | 64877678 | 64878406 | 254501, 149823 |
| 56301 | 64879068 | 64881633 | 149809, 254501, 149823 |
| 56302 | 64883566 | 64885651 | 174276, 255173, 149809 |
| 56303 | 64888547 | 64890419 | 149792, 162298, 149806 |
| 56304 | 64900780 | 64903544 | 162298 |
| 56305 | 64909391 | 64910059 | |
| 56306 | 64918034 | 64919191 | |
| 56307 | 64932623 | 64934799 | |
| 56308 | 64948074 | 64950456 | 254614, 014216 |
| 56309 | 64993004 | 64993659 | 197847 |
| 56310 | 65028465 | 65030081 | 014138 |
| 56311 | 65042445 | 65043783 | 014138 |
| 56312 | 65047091 | 65047707 | 014138 |
| 56313 | 65081778 | 65083568 | 149798 |
| 56314 | 65100972 | 65102402 | 133884 |
| 56315 | 65125100 | 65125944 | |
| 56316 | 65137929 | 65139199 | 255478 |
| 56317 | 65147969 | 65151198 | 162241 |
| 56318 | 65153186 | 65155043 | 126391 |
| 56319 | 65183756 | 65201046 | 245532 |
| 56320 | 65201104 | 65206569 | 245532 |
| 56321 | 65208647 | 65210098 | 245532 |
| 56322 | 65210458 | 65215211 | 245532 |
| 56323 | 65215554 | 65217160 | |
| 56324 | 65221974 | 65222952 | 173727 |
| 56325 | 65243496 | 65247365 | |
| 56326 | 65258707 | 65262521 | |
| 56327 | 65263934 | 65275567 | 270117, 251562 |
| 56328 | 65292279 | 65293857 | 142186 |
| 56329 | 65307470 | 65308805 | 168056 |
| 56330 | 65312979 | 65314375 | 168056 |
| 56331 | 65323135 | 65323731 | 168056 |
| 56332 | 65324533 | 65326909 | 168056 |
| 56333 | 65336406 | 65338935 | 260233, 173465 |
| 56334 | 65339274 | 65341044 | 176973, 173465 |
| 56335 | 65341472 | 65342476 | 176973 |
| 56336 | 65342483 | 65344122 | 173442 |
| 56337 | 65344572 | 65345186 | 173442 |
| 56338 | 65380496 | 65384261 | 197136, 173327 |
| 56339 | 65414211 | 65415422 | 213445 |
| 56340 | 65419656 | 65421464 | 173039 |
| 56341 | 65428949 | 65431598 | 173039 |
| 56342 | 65478682 | 65480404 | 172977 |
| 56343 | 65487411 | 65488522 | 172922 |
| 56344 | 65547315 | 65548827 | 175827, 254470 |
| 56345 | 65585002 | 65586298 | |
| 56346 | 65623921 | 65629446 | 172732, 172803, 172757 |
| 56347 | 65640823 | 65641528 | 172638 |
| 56348 | 65655158 | 65656946 | 172500 |
| 56349 | 65657721 | 65659143 | 175602 |
| 56350 | 65665684 | 65668293 | 175592 |
| 56351 | 65669606 | 65671096 | |
| 56352 | 65679959 | 65681239 | |
| 56353 | 65682009 | 65684938 | 175573 |
| 56354 | 65685292 | 65688116 | 175550, 175573 |
| 56355 | 65728201 | 65730339 | 175467 |
| 56356 | 65768993 | 65770775 | 175334, 175376 |
| 56357 | 65818811 | 65820836 | 238752, 087365 |
| 56358 | 65822890 | 65823636 | 087365 |
| 56359 | 65836253 | 65838579 | 175115, 087365, 255038 |
| 56360 | 65847514 | 65848298 | 175115 |
| 56361 | 65880050 | 65881146 | 175115 |
| 56362 | 65886138 | 65887881 | 175115 |
| 56363 | 65903563 | 65905616 | 175115 |
| 56364 | 65909561 | 65910972 | 175115 |
| 56365 | 65989842 | 65990582 | 175115 |
| 56366 | 66024618 | 66026200 | 174996 |
| 56367 | 66034957 | 66037123 | 174903, 254762, 174996 |
| 56368 | 66045032 | 66045788 | 174871, 245156 |
| 56369 | 66055583 | 66057504 | 174851 |
| 56370 | 66103907 | 66104911 | 174744, 174791, 254756 |
| 56371 | 66111629 | 66113031 | 174684, 174744 |
| 56372 | 66115242 | 66116221 | 255468 |
| 56373 | 66118284 | 66119373 | 255468 |
| 56374 | 66188964 | 66189561 | 174576 |
| 56375 | 66205300 | 66206894 | 174547 |
| 56376 | 66246347 | 66248540 | 254986, 255517 |
| 56377 | 66277717 | 66278702 | 174483, 256349 |
| 56378 | 66312706 | 66313962 | 248746, 174165 |
| 56379 | 66360064 | 66361181 | 173992, 182791 |
| 56380 | 66374179 | 66375561 | |
| 56381 | 66383111 | 66385600 | 248643, 239306, 173933 |
| 56382 | 66405137 | 66407181 | 248643, 173933 |
| 56383 | 66418398 | 66419214 | 173933 |
| 56384 | 66444698 | 66446368 | 173914 |
| 56385 | 66477189 | 66477690 | 173898 |
| 56386 | 66485888 | 66486351 | 173898 |
| 56387 | 66494088 | 66496525 | 173898 |
| 56388 | 66511742 | 66513208 | 173715 |
| 56389 | 66609567 | 66611817 | 173653, 173715 |
| 56390 | 66658784 | 66661135 | 173599 |
| 56391 | 66669242 | 66670025 | 173599 |
| 56392 | 66672918 | 66676103 | 173599 |
| 56393 | 66702235 | 66702709 | 173599 |
| 56394 | 66703852 | 66704312 | 173599 |
| 56395 | 66717444 | 66718992 | 173599 |
| 56396 | 66724076 | 66726490 | 173599 |
| 56397 | 66734730 | 66739863 | |
| 56398 | 66770057 | 66771020 | |
| 56399 | 66789671 | 66790776 | 173227 |
| 56400 | 66820068 | 66825778 | 173156 |
| 56401 | 66826820 | 66828752 | 173156 |
| 56402 | 66881940 | 66883193 | |
| 56403 | 66884914 | 66888360 | 173120 |
| 56404 | 66957863 | 66958172 | 173120 |
| 56405 | 67007023 | 67009276 | 173120 |
| 56406 | 67015721 | 67016748 | 173120 |
| 56407 | 67033070 | 67035556 | 173020 |
| 56408 | 67055160 | 67056646 | 172932 |
| 56409 | 67069749 | 67071937 | 172830, 172932 |
| 56410 | 67118610 | 67119136 | 256514, 175482 |
| 56411 | 67119767 | 67124840 | 175482, 256514 |
| 56412 | 67139230 | 67143292 | 175505, 256514 |
| 56413 | 67158596 | 67159816 | 172613 |
| 56414 | 67168346 | 67169592 | 172531 |
| 56415 | 67187948 | 67188759 | 172531, 172508 |
| 56416 | 67195016 | 67196976 | 175634 |
| 56417 | 67210015 | 67211510 | 172725 |
| 56418 | 67231071 | 67233294 | 172663 |
| 56419 | 67235550 | 67237275 | 172663 |
| 56420 | 67249911 | 67251055 | 110711 |
| 56421 | 67271929 | 67274120 | 167797, 110697 |
| 56422 | 67274494 | 67276508 | 167797 |
| 56423 | 67330448 | 67332261 | |
| 56424 | 67346474 | 67347644 | |
| 56425 | 67373535 | 67375358 | 167792, 255119, 184224 |
| 56426 | 67396159 | 67398764 | 167799 |
| 56427 | 67399450 | 67400544 | 167800 |
| 56428 | 67417403 | 67419217 | 227834, 132744 |
| 56429 | 67770784 | 67771835 | 110057 |
| 56430 | 67777209 | 67778751 | 006534 |
| 56431 | 67797628 | 67799078 | 110717, 255306 |
| 56432 | 67800217 | 67802212 | 266737, 110717 |
| 56433 | 67803633 | 67808820 | 110719, 110717 |
| 56434 | 67866821 | 67867515 | 110721 |
| 56435 | 67887467 | 67891655 | 255236, 110721 |
| 56436 | 67894192 | 67896690 | 255236 |
| 56437 | 67905055 | 67905978 | |
| 56438 | 67911866 | 67915489 | |
| 56439 | 67979962 | 67982471 | 110066 |
| 56440 | 68024782 | 68026179 | |
| 56441 | 68036877 | 68044996 | 171067 |
| 56442 | 68064220 | 68067056 | |
| 56443 | 68069987 | 68070992 | |
| 56444 | 68079671 | 68083960 | 162337 |
| 56445 | 68088699 | 68090217 | 162337 |
| 56446 | 68093966 | 68094771 | 162337 |
| 56447 | 68111338 | 68111963 | 162337 |
| 56448 | 68121587 | 68122486 | 162337 |
| 56449 | 68144686 | 68145577 | 162337 |
| 56450 | 68153675 | 68154662 | 162337 |
| 56451 | 68154862 | 68155756 | 162337 |
| 56452 | 68223119 | 68223971 | |
| 56453 | 68227241 | 68229723 | 110075 |
| 56454 | 68236275 | 68237059 | 110075 |
| 56455 | 68265178 | 68265630 | 110075 |
| 56456 | 68309452 | 68310751 | 110075 |
| 56457 | 68313871 | 68314447 | 110075 |
| 56458 | 68518414 | 68519226 | 132749 |
| 56459 | 68584657 | 68585487 | 110090 |
| 56460 | 68605774 | 68607422 | 110090 |
| 56461 | 68607433 | 68609493 | 110090 |
| 56462 | 68610687 | 68611874 | 110090 |
| 56463 | 68612744 | 68613487 | |
| 56464 | 68624352 | 68626004 | |
| 56465 | 68645094 | 68645996 | |
| 56466 | 68670591 | 68672507 | 132740, 197345 |
| 56467 | 68768204 | 68768639 | 261625 |
| 56468 | 68774958 | 68776652 | 172935 |
| 56469 | 68815917 | 68817867 | 162341 |
| 56470 | 68822292 | 68823464 | 162341 |
| 56471 | 68882336 | 68882955 | |
| 56472 | 68890045 | 68891486 | |
| 56473 | 68898875 | 68899772 | |
| 56474 | 68933770 | 68934604 | 261070 |
| 56475 | 69041938 | 69042601 | |
| 56476 | 69063984 | 69067010 | 172927 |
| 56477 | 69067035 | 69070469 | 172927 |
| 56478 | 69073206 | 69074080 | 172927 |
| 56479 | 69165382 | 69169442 | 172927 |
| 56480 | 69171504 | 69172199 | 172927 |
| 56481 | 69174288 | 69176400 | 172927 |
| 56482 | 69242009 | 69242675 | 255980 |
| 56483 | 69245234 | 69245847 | |
| 56484 | 69251669 | 69252592 | |
| 56485 | 69284905 | 69285619 | |
| 56486 | 69294009 | 69296284 | 255774 |
| 56487 | 69299081 | 69301125 | |
| 56488 | 69311275 | 69312574 | |
| 56489 | 69355554 | 69357155 | |
| 56490 | 69451179 | 69458744 | 110092 |
| 56491 | 69469238 | 69470155 | 110092, 149716 |
| 56492 | 69489132 | 69490529 | 149716 |
| 56493 | 69502625 | 69505317 | |
| 56494 | 69515244 | 69516129 | 162344 |
| 56495 | 69681622 | 69684568 | |
| 56496 | 69705723 | 69708289 | |
| 56497 | 69714820 | 69715799 | |
| 56498 | 69720421 | 69721662 | |
| 56499 | 69793819 | 69797473 | |
| 56500 | 69814479 | 69817801 | |
| 56501 | 69824887 | 69826475 | |
| 56502 | 69831415 | 69833254 | 255191 |
| 56503 | 69845656 | 69846429 | 255191 |
| 56504 | 69875312 | 69876356 | |
| 56505 | 69880765 | 69881491 | |
| 56506 | 69923951 | 69925323 | 131620 |
| 56507 | 69926857 | 69927353 | 131620 |
| 56508 | 69932046 | 69932938 | 131620 |
| 56509 | 69973992 | 69975712 | 255143, 131620 |
| 56510 | 70005619 | 70006489 | 131620 |
| 56511 | 70048931 | 70051253 | 168040 |
| 56512 | 70058270 | 70059076 | |
| 56513 | 70066254 | 70066617 | |
| 56514 | 70115866 | 70117889 | 131626 |
| 56515 | 70172324 | 70173002 | 131626, 254604, 255539 |
| 56516 | 70243743 | 70246318 | 085733, 246889 |
| 56517 | 70327662 | 70329626 | 162105 |
| 56518 | 70502419 | 70502886 | 162105 |
| 56519 | 70890677 | 70891507 | 162105 |
| 56520 | 70913277 | 70914231 | 162105 |
| 56521 | 70918335 | 70919163 | 162105 |
| 56522 | 70952005 | 70953238 | 162105 |
| 56523 | 70961452 | 70965364 | 162105 |
| 56524 | 70997916 | 70999001 | |
| 56525 | 71009442 | 71011185 | |
| 56526 | 71017314 | 71017829 | |
| 56527 | 71143698 | 71145336 | 172893 |
| 56528 | 71158118 | 71160683 | 254682, 172893 |
| 56529 | 71163016 | 71165144 | 172890, 172893, 254682 |
| 56530 | 71200254 | 71200854 | 172890 |
| 56531 | 71236219 | 71238243 | |
| 56532 | 71638737 | 71641102 | 137522, 254469 |
| 56533 | 71655117 | 71660566 | 137522 |
| 56534 | 71723705 | 71724485 | 137497 |
| 56535 | 71751219 | 71753577 | 137497 |
| 56536 | 71780129 | 71781832 | 137497 |
| 56537 | 71790955 | 71792640 | 184154, 137497 |
| 56538 | 71802137 | 71802748 | 149357, 184154 |
| 56539 | 71813118 | 71815290 | 238768, 149357, 184154 |
| 56540 | 71934002 | 71936725 | 165458 |
| 56541 | 72144587 | 72145873 | 162129 |
| 56542 | 72186381 | 72187056 | |
| 56543 | 72353373 | 72355596 | 255808, 186642 |
| 56544 | 72431812 | 72434286 | 186635 |
| 56545 | 72459697 | 72460674 | 186635 |
| 56546 | 72462852 | 72464289 | 186635 |
| 56547 | 72477254 | 72477770 | 186635, 214530 |
| 56548 | 72486861 | 72489728 | 186635, 214530 |
| 56549 | 72489841 | 72493780 | 186635, 214530 |
| 56550 | 72498204 | 72499006 | 186635, 214530 |
| 56551 | 72500456 | 72501217 | 186635, 214530 |
| 56552 | 72503496 | 72505480 | 186635, 214530 |
| 56553 | 72518196 | 72518966 | |
| 56554 | 72523826 | 72526239 | 168010 |
| 56555 | 72538970 | 72539803 | 168010 |
| 56556 | 72661975 | 72662918 | 137478 |
| 56557 | 72710504 | 72711246 | 137478 |
| 56558 | 72766721 | 72767230 | 137478 |
| 56559 | 72850683 | 72854962 | 137478 |
| 56560 | 72858585 | 72859839 | |
| 56561 | 72884672 | 72885390 | |
| 56562 | 72886609 | 72887192 | |
| 56563 | 72909436 | 72910182 | |
| 56564 | 72916567 | 72917231 | |
| 56565 | 72928224 | 72930245 | 175591 |
| 56566 | 72999729 | 73000963 | 171631 |
| 56567 | 73087085 | 73088557 | 054967 |
| 56568 | 73204864 | 73205786 | 054965 |
| 56569 | 73265739 | 73266598 | 054965 |
| 56570 | 73308430 | 73310318 | 054965 |
| 56571 | 73470674 | 73473139 | 256034, 175582 |
| 56572 | 73489617 | 73491881 | |
| 56573 | 73497933 | 73499904 | 175581 |
| 56574 | 73529961 | 73530503 | 175581 |
| 56575 | 73576976 | 73578733 | |
| 56576 | 73586678 | 73588842 | 175575, 181924 |
| 56577 | 73618224 | 73618743 | 175575 |
| 56578 | 73625224 | 73625831 | 175575 |
| 56579 | 73729331 | 73730773 | 168014 |
| 56580 | 73795855 | 73796511 | 168014 |
| 56581 | 73849552 | 73850479 | 168014 |
| 56582 | 73881320 | 73883533 | 214517, 168014 |
| 56583 | 73988341 | 73991214 | 149380 |
| 56584 | 74108689 | 74110302 | 264402, 165434, 254631 |
| 56585 | 74129171 | 74130084 | 254631 |
| 56586 | 74204184 | 74205045 | 077514, 254837, 175536 |
| 56587 | 74303275 | 74304409 | 077514 |
| 56588 | 74320858 | 74321278 | 077514 |
| 56589 | 74373615 | 74374745 | 077514 |
| 56590 | 74382418 | 74385477 | |
| 56591 | 74407316 | 74409781 | 185162, 054938 |
| 56592 | 74459490 | 74461172 | 166439 |
| 56593 | 74465767 | 74466567 | 166439 |
| 56594 | 74606819 | 74607798 | 166435, 241170 |
| 56595 | 74659400 | 74661534 | 118363, 166435 |
| 56596 | 74695103 | 74695635 | |
| 56597 | 74699323 | 74700914 | 162139 |
| 56598 | 74811178 | 74811883 | 137491, 255395 |
| 56599 | 74862533 | 74863903 | 137491 |
| 56600 | 74865682 | 74867777 | 137491 |
| 56601 | 74869631 | 74872173 | 137491 |
| 56602 | 74872296 | 74874390 | 137491 |
| 56603 | 74875078 | 74876475 | 137491 |
| 56604 | 74879258 | 74880150 | 137491 |
| 56605 | 74901577 | 74902960 | 137491 |
| 56606 | 74905941 | 74907213 | 137491 |
| 56607 | 74914855 | 74916870 | 137491 |
| 56608 | 74952227 | 74953221 | 261594 |
| 56609 | 75053811 | 75054508 | 137486 |
| 56610 | 75061997 | 75063160 | 137486 |
| 56611 | 75083237 | 75083817 | |
| 56612 | 75110318 | 75111900 | 206941, 149273 |
| 56613 | 75133046 | 75134288 | 149243, 149273 |
| 56614 | 75193815 | 75194501 | 158555 |
| 56615 | 75236211 | 75237473 | 158555 |
| 56616 | 75272587 | 75275067 | 149257 |
| 56617 | 75293705 | 75295145 | 255326 |
| 56618 | 75298758 | 75299826 | 171533, 255326 |
| 56619 | 75408935 | 75409777 | |
| 56620 | 75429247 | 75431582 | 166391 |
| 56621 | 75432541 | 75434011 | 166391 |
| 56622 | 75434151 | 75435323 | 166391 |
| 56623 | 75443944 | 75446849 | 166391 |
| 56624 | 75448151 | 75449149 | |
| 56625 | 75454638 | 75455864 | |
| 56626 | 75473822 | 75474439 | 247867, 062282 |
| 56627 | 75478716 | 75481074 | 247867, 062282 |
| 56628 | 75482644 | 75483509 | 062282 |
| 56629 | 75483818 | 75485664 | 062282 |
| 56630 | 75493210 | 75495647 | 062282 |
| 56631 | 75504034 | 75504600 | 062282 |
| 56632 | 75506335 | 75507522 | 062282 |
| 56633 | 75523770 | 75525034 | 255507 |
| 56634 | 75525040 | 75527310 | 198382, 255507 |
| 56635 | 75677825 | 75678477 | 198382 |
| 56636 | 75919355 | 75922219 | 255362, 085741 |
| 56637 | 75938751 | 75940224 | |
| 56638 | 75946251 | 75947682 | |
| 56639 | 75976572 | 75978436 | |
| 56640 | 75979993 | 75981483 | |
| 56641 | 76090960 | 76092851 | 179240, 137492 |
| 56642 | 76096875 | 76097530 | 179240 |
| 56643 | 76154769 | 76156915 | 158636, 255135 |
| 56644 | 76476715 | 76485913 | 254632 |
| 56645 | 76491911 | 76500793 | 182704, 255100 |
| 56646 | 76507182 | 76508823 | 182704 |
| 56647 | 76509974 | 76511109 | |
| 56648 | 76511200 | 76513306 | 261578 |
| 56649 | 76571409 | 76572782 | 078124 |
| 56650 | 76771909 | 76772838 | |
| 56651 | 76776831 | 76778457 | 149260 |
| 56652 | 76797311 | 76798697 | 149260 |
| 56653 | 76806475 | 76807913 | 149260 |
| 56654 | 76816927 | 76820023 | 149260 |
| 56655 | 76837983 | 76840237 | 137474 |
| 56656 | 76840807 | 76842805 | 137474 |
| 56657 | 76847197 | 76848505 | 137474 |
| 56658 | 76855583 | 76856578 | 137474 |
| 56659 | 76889860 | 76890583 | 137474 |
| 56660 | 76953918 | 76955318 | 178795 |
| 56661 | 76963670 | 76965040 | 178795 |
| 56662 | 77170112 | 77170907 | 149269 |
| 56663 | 77183879 | 77186233 | 268635, 149269 |
| 56664 | 77270329 | 77272751 | 074201 |
| 56665 | 77299760 | 77302277 | 178301, 074201 |
| 56666 | 77312233 | 77314830 | 178301, 074201 |
| 56667 | 77341752 | 77342498 | 074201 |
| 56668 | 77347838 | 77349647 | 074201 |
| 56669 | 77530458 | 77532994 | 087884, 048649 |
| 56670 | 77705422 | 77706473 | 149262 |
| 56671 | 77749586 | 77751724 | 259112, 151364 |
| 56672 | 77756654 | 77757705 | 151364, 259112 |
| 56673 | 77768216 | 77769172 | 259112 |
| 56674 | 77771810 | 77773364 | 259112 |
| 56675 | 77774288 | 77775706 | 151365, 259112 |
| 56676 | 77789744 | 77791649 | 259112, 151366 |
| 56677 | 77801600 | 77802151 | |
| 56678 | 77849705 | 77851556 | 246174, 159063 |
| 56679 | 77867186 | 77868217 | 246174 |
| 56680 | 77879064 | 77882543 | 188997, 246174 |
| 56681 | 77890722 | 77891146 | 188997 |
| 56682 | 77896007 | 77897313 | 188997 |
| 56683 | 77898019 | 77900572 | 118369, 188997 |
| 56684 | 77988333 | 77989137 | 033327 |
| 56685 | 78000772 | 78002251 | 033327 |
| 56686 | 78022621 | 78023559 | 033327 |
| 56687 | 78117418 | 78118287 | 254420, 033327 |
| 56688 | 78127193 | 78130160 | 033327, 254420 |
| 56689 | 78130266 | 78130922 | 254420 |
| 56690 | 78260957 | 78261616 | 255084, 137513 |
| 56691 | 78285147 | 78286105 | 137513 |
| 56692 | 78618482 | 78619244 | 149256 |
| 56693 | 78717745 | 78718372 | 149256 |
| 56694 | 78755697 | 78757367 | 149256 |
| 56695 | 78760517 | 78761491 | 149256 |
| 56696 | 78797918 | 78799049 | 149256 |
| 56697 | 79199288 | 79199718 | |
| 56698 | 82610761 | 82612851 | 165490, 137509 |
| 56699 | 82762716 | 82763293 | 137502 |
| 56700 | 82781385 | 82784495 | 246067, 255503, 137502 |
| 56701 | 82803224 | 82804703 | 246067, 255503 |
| 56702 | 82866726 | 82870185 | 165494 |
| 56703 | 82903290 | 82905575 | 137494, 247137 |
| 56704 | 82968873 | 82969302 | 137494 |
| 56705 | 82995312 | 82997958 | 255234, 137500 |
| 56706 | 83219677 | 83220526 | 150672 |
| 56707 | 83359759 | 83361277 | 255311, 150672 |
| 56708 | 83371858 | 83374327 | 255311, 150672 |
| 56709 | 83402411 | 83402880 | 255311, 150672 |
| 56710 | 83412786 | 83413937 | 255311, 150672 |
| 56711 | 83421574 | 83422844 | 255311, 150672 |
| 56712 | 83424626 | 83425404 | 255311, 150672 |
| 56713 | 83428444 | 83428948 | 255311, 150672 |
| 56714 | 83434892 | 83436016 | 255311, 150672 |
| 56715 | 83562759 | 83565879 | 150672 |
| 56716 | 83575113 | 83577721 | 150672 |
| 56717 | 83632651 | 83633316 | 150672 |
| 56718 | 83767582 | 83768111 | 150672 |
| 56719 | 83955418 | 83955969 | 150672 |
| 56720 | 83960311 | 83962718 | 150672 |
| 56721 | 84269085 | 84270021 | 150672 |
| 56722 | 85194828 | 85195402 | 150672 |
| 56723 | 85337468 | 85340605 | 171204, 150672 |
| 56724 | 85358274 | 85359951 | 171202 |
| 56725 | 85374176 | 85377234 | 137504 |
| 56726 | 85434139 | 85434565 | 137501 |
| 56727 | 85555229 | 85556382 | |
| 56728 | 85565471 | 85566489 | 150676, 215504 |
| 56729 | 85658903 | 85659582 | |
| 56730 | 85758214 | 85758689 | 073921 |
| 56731 | 85776893 | 85781894 | 073921 |
| 56732 | 85799732 | 85800435 | |
| 56733 | 85812131 | 85813650 | |
| 56734 | 85826549 | 85829580 | |
| 56735 | 85884428 | 85888575 | |
| 56736 | 85955019 | 85957315 | 074266 |
| 56737 | 86002401 | 86003444 | |
| 56738 | 86013010 | 86014428 | 149196 |
| 56739 | 86166992 | 86172289 | 254733, 151376 |
| 56740 | 86194470 | 86197044 | 254733, 151376 |
| 56741 | 86210580 | 86212094 | 254733, 151376 |
| 56742 | 86217892 | 86223244 | 254733, 151376 |
| 56743 | 86233338 | 86236808 | 254733, 151376 |
| 56744 | 86262005 | 86264069 | 254733, 151376 |
| 56745 | 86288728 | 86290872 | 254733, 151376 |
| 56746 | 86302737 | 86306261 | 254733, 151376 |
| 56747 | 86317516 | 86319881 | 254733, 151376 |
| 56748 | 86381859 | 86384638 | 151376 |
| 56749 | 86406472 | 86407844 | |
| 56750 | 86428830 | 86429619 | |
| 56751 | 86430159 | 86433412 | |
| 56752 | 86436282 | 86437942 | |
| 56753 | 86448904 | 86455713 | 255250 |
| 56754 | 86510770 | 86514191 | 150687 |
| 56755 | 86522277 | 86523904 | 150687 |
| 56756 | 86650527 | 86653673 | 150687 |
| 56757 | 86665403 | 86667956 | 246523, 174804 |
| 56758 | 86694111 | 86694577 | 246523 |
| 56759 | 86747842 | 86749986 | 166575 |
| 56760 | 86792195 | 86793151 | 166575 |
| 56761 | 86808403 | 86809438 | 166575 |
| 56762 | 86884263 | 86885139 | 166575 |
| 56763 | 87063666 | 87064470 | |
| 56764 | 87130247 | 87130999 | |
| 56765 | 87148551 | 87149637 | |
| 56766 | 87835686 | 87839197 | 255241 |
| 56767 | 88070122 | 88071808 | 109861 |
| 56768 | 88547175 | 88547699 | 168959 |
| 56769 | 88560091 | 88561297 | 168959 |
| 56770 | 89955191 | 89957119 | 110172 |
| 56771 | 90019710 | 90020220 | 261645 |
| 56772 | 90455841 | 90456505 | 261645 |
| 56773 | 91129405 | 91130505 | |
| 56774 | 91406614 | 91407560 | |
| 56775 | 91655125 | 91655678 | |
| 56776 | 91679441 | 91680035 | |
| 56777 | 91699532 | 91700681 | |
| 56778 | 91705890 | 91706513 | |
| 56779 | 91714226 | 91718491 | |
| 56780 | 91768544 | 91769565 | |
| 56781 | 91874135 | 91874744 | |
| 56782 | 91999495 | 92000769 | |
| 56783 | 92001012 | 92003531 | |
| 56784 | 92089857 | 92092393 | 165323 |
| 56785 | 92757896 | 92760520 | |
| 56786 | 92767081 | 92768189 | |
| 56787 | 92787116 | 92789327 | |
| 56788 | 92930126 | 92931601 | 180773 |
| 56789 | 93220140 | 93220798 | 166002 |
| 56790 | 93225609 | 93226951 | 166002 |
| 56791 | 93237172 | 93238216 | 166002 |
| 56792 | 93258056 | 93259233 | 166002 |
| 56793 | 93259238 | 93260335 | 166002 |
| 56794 | 93270140 | 93271880 | 166002 |
| 56795 | 93274921 | 93277388 | 166002 |
| 56796 | 93285786 | 93286794 | |
| 56797 | 93300496 | 93301518 | |
| 56798 | 93303703 | 93304785 | |
| 56799 | 93394451 | 93395875 | 166004 |
| 56800 | 93472456 | 93476249 | 182919, 166012 |
| 56801 | 93517213 | 93518440 | 042429, 166012 |
| 56802 | 93849311 | 93849997 | |
| 56803 | 93861041 | 93865123 | 110218 |
| 56804 | 93867537 | 93869523 | 110218 |
| 56805 | 93883470 | 93887457 | 110218 |
| 56806 | 93887477 | 93888090 | 110218 |
| 56807 | 93926443 | 93927615 | |
| 56808 | 93929370 | 93930563 | |
| 56809 | 93934084 | 93934705 | |
| 56810 | 94181651 | 94183220 | 020922 |
| 56811 | 94226214 | 94227917 | 168876, 020922 |
| 56812 | 94276426 | 94278373 | 196371, 134627 |
| 56813 | 94316826 | 94317916 | 255929, 134627 |
| 56814 | 94335390 | 94336512 | 255929, 134627 |
| 56815 | 94527123 | 94530224 | 166025 |
| 56816 | 94546585 | 94548178 | 166025 |
| 56817 | 94565733 | 94566407 | 166025 |
| 56818 | 94578615 | 94579300 | 166025 |
| 56819 | 94799523 | 94802133 | 180771, 271885 |
| 56820 | 94822409 | 94823800 | 149218 |
| 56821 | 94883318 | 94885482 | 245552 |
| 56822 | 94962977 | 94966346 | 149212, 245552 |
| 56823 | 94999739 | 95000525 | |
| 56824 | 95002308 | 95003144 | |
| 56825 | 95015187 | 95016203 | |
| 56826 | 95070566 | 95072975 | |
| 56827 | 95091564 | 95093124 | |
| 56828 | 95097263 | 95098317 | |
| 56829 | 95111287 | 95111718 | |
| 56830 | 95255958 | 95256588 | |
| 56831 | 95374584 | 95375120 | |
| 56832 | 95413630 | 95414379 | |
| 56833 | 95521971 | 95525089 | 166037, 077458 |
| 56834 | 95528462 | 95529484 | 166037 |
| 56835 | 95656462 | 95658622 | 087053 |
| 56836 | 95831934 | 95832328 | 184384 |
| 56837 | 96075441 | 96076918 | 184384 |
| 56838 | 96121937 | 96124079 | 183340, 149231 |
| 56839 | 98706060 | 98706470 | |
| 56840 | 99127586 | 99128475 | 149972 |
| 56841 | 100456374 | 100456905 | |
| 56842 | 100501357 | 100502609 | |
| 56843 | 100503402 | 100504435 | |
| 56844 | 100538069 | 100538635 | |
| 56845 | 100557199 | 100559337 | 165895, 248027 |
| 56846 | 100590242 | 100591040 | 165895 |
| 56847 | 100610235 | 100610826 | 165895 |
| 56848 | 100645261 | 100648875 | 165895 |
| 56849 | 100655984 | 100656983 | 165895 |
| 56850 | 100659488 | 100661187 | 165895 |
| 56851 | 100701883 | 100704584 | 165895 |
| 56852 | 100719484 | 100720895 | 165895 |
| 56853 | 100721921 | 100723056 | 165895 |
| 56854 | 100746534 | 100748543 | 165895 |
| 56855 | 100773276 | 100774535 | 165895 |
| 56856 | 100851936 | 100852500 | 165895 |
| 56857 | 101124282 | 101125520 | |
| 56858 | 101736644 | 101739155 | 137672 |
| 56859 | 101877472 | 101879095 | |
| 56860 | 101980223 | 101983864 | 137693, 260008 |
| 56861 | 101986001 | 101986709 | 137693 |
| 56862 | 102041818 | 102043651 | 137693 |
| 56863 | 102048374 | 102050146 | 137693 |
| 56864 | 102112785 | 102113248 | |
| 56865 | 102138824 | 102140380 | |
| 56866 | 102150232 | 102150881 | |
| 56867 | 102176190 | 102177929 | 270868 |
| 56868 | 102183010 | 102185335 | 212466 |
| 56869 | 102186643 | 102189762 | 023445 |
| 56870 | 102215806 | 102219310 | 110330 |
| 56871 | 102321802 | 102324518 | 255337, 152558 |
| 56872 | 102327020 | 102327617 | 152558, 255337 |
| 56873 | 102329134 | 102329742 | 152558, 255337 |
| 56874 | 102331578 | 102334038 | 255337, 152558 |
| 56875 | 102339481 | 102340418 | 255482, 152558 |
| 56876 | 102346368 | 102348325 | 255482 |
| 56877 | 102355463 | 102357357 | 255482 |
| 56878 | 102364229 | 102366562 | 255482 |
| 56879 | 102423146 | 102423610 | |
| 56880 | 102469158 | 102471726 | 137674 |
| 56881 | 102473687 | 102474254 | 137674 |
| 56882 | 102511182 | 102512418 | |
| 56883 | 102702056 | 102703200 | 255282 |
| 56884 | 102800543 | 102801176 | |
| 56885 | 102914585 | 102915275 | |
| 56886 | 102961978 | 102963764 | 137692 |
| 56887 | 102979655 | 102980582 | 187240 |
| 56888 | 104827163 | 104827755 | 196954 |
| 56889 | 104838312 | 104840402 | 196954 |
| 56890 | 104875387 | 104876305 | 137757 |
| 56891 | 104905573 | 104906464 | 137752 |
| 56892 | 104917814 | 104918492 | 137752, 204397 |
| 56893 | 105892016 | 105893689 | 170903 |
| 56894 | 105946848 | 105949302 | 182359, 149313 |
| 56895 | 107028061 | 107028983 | |
| 56896 | 107067311 | 107068321 | |
| 56897 | 107327689 | 107329072 | 152404 |
| 56898 | 107420005 | 107420912 | 137760 |
| 56899 | 107435607 | 107437062 | 137760 |
| 56900 | 107480179 | 107481204 | 110675 |
| 56901 | 107662238 | 107662885 | 110660 |
| 56902 | 107879293 | 107880932 | 166266 |
| 56903 | 107940653 | 107941110 | 166266 |
| 56904 | 107985690 | 107986859 | 255467 |
| 56905 | 107991296 | 107995011 | 075239, 255467 |
| 56906 | 107995146 | 107996168 | 075239 |
| 56907 | 108092277 | 108095064 | 149311, 149308 |
| 56908 | 108104298 | 108104788 | 149311 |
| 56909 | 108337114 | 108338808 | 166323 |
| 56910 | 108345438 | 108346422 | 178202 |
| 56911 | 108367675 | 108369782 | 178202 |
| 56912 | 108382359 | 108383154 | 110723 |
| 56913 | 108438164 | 108439532 | 110723 |
| 56914 | 108463141 | 108464951 | 110723 |
| 56915 | 108517785 | 108519730 | |
| 56916 | 108535244 | 108536622 | 178105 |
| 56917 | 108646016 | 108646436 | 178105 |
| 56918 | 108956314 | 108957185 | |
| 56919 | 109816623 | 109818048 | |
| 56920 | 109962583 | 109965260 | 149289 |
| 56921 | 109996319 | 109996937 | 149289 |
| 56922 | 110066172 | 110069103 | 137710 |
| 56923 | 110122469 | 110123131 | 137710 |
| 56924 | 110165828 | 110169592 | 137710 |
| 56925 | 110215652 | 110217510 | |
| 56926 | 110225536 | 110229537 | 254416 |
| 56927 | 110233190 | 110234614 | 254416 |
| 56928 | 110243274 | 110244580 | 254416 |
| 56929 | 110247221 | 110248748 | 254416 |
| 56930 | 110300023 | 110302777 | 137714 |
| 56931 | 110582203 | 110584329 | 137727 |
| 56932 | 110633816 | 110635019 | |
| 56933 | 110860390 | 110860847 | |
| 56934 | 111101159 | 111101959 | |
| 56935 | 111169368 | 111170943 | 214290, 196167 |
| 56936 | 111172105 | 111172974 | 196167, 214290 |
| 56937 | 111174049 | 111174672 | 196167, 214290 |
| 56938 | 111178568 | 111179601 | 214290 |
| 56939 | 111191393 | 111192189 | |
| 56940 | 111205081 | 111206498 | |
| 56941 | 111229965 | 111232411 | 110777 |
| 56942 | 111232494 | 111232887 | 110777 |
| 56943 | 111233426 | 111234170 | 110777 |
| 56944 | 111472581 | 111476271 | 170145 |
| 56945 | 111477198 | 111478329 | 170145 |
| 56946 | 111494101 | 111494859 | 170145 |
| 56947 | 111503858 | 111504489 | 170145 |
| 56948 | 111547030 | 111549207 | 170145 |
| 56949 | 111558378 | 111559777 | 170145 |
| 56950 | 111591727 | 111592415 | 170145 |
| 56951 | 111596625 | 111599057 | 137713, 170145 |
| 56952 | 111599656 | 111610690 | 170145, 137713 |
| 56953 | 111616048 | 111616814 | 137713 |
| 56954 | 111635547 | 111638145 | 137713 |
| 56955 | 111645538 | 111646546 | 254990 |
| 56956 | 111647431 | 111649499 | 254990 |
| 56957 | 111656510 | 111657331 | 258529, 086848 |
| 56958 | 111658652 | 111659545 | 086848, 258529 |
| 56959 | 111660773 | 111661433 | 086848, 258529 |
| 56960 | 111664430 | 111668951 | 086848, 258529 |
| 56961 | 111669972 | 111672727 | 086848, 258529 |
| 56962 | 111677069 | 111677576 | 086848, 258529 |
| 56963 | 111694178 | 111694904 | 254450, 086848, 258529 |
| 56964 | 111710596 | 111711559 | 086848, 258529 |
| 56965 | 111741391 | 111742846 | 086848, 258529 |
| 56966 | 111748792 | 111751011 | 137720, 258529, 255561 |
| 56967 | 111782287 | 111783251 | 170276, 109846 |
| 56968 | 111789082 | 111790187 | 170276, 149300, 109846, |
| | | | 254445 |
| 56969 | 111796803 | 111797978 | 150764, 149300, 254445 |
| 56970 | 111801156 | 111801506 | 150764 |
| 56971 | 111805808 | 111806517 | 150764 |
| 56972 | 111807250 | 111808483 | 150764 |
| 56973 | 111831036 | 111833089 | 150764 |
| 56974 | 111847539 | 111848701 | 150764 |
| 56975 | 111852635 | 111854509 | 150764 |
| 56976 | 111858663 | 111860532 | 150764 |
| 56977 | 111867154 | 111868531 | 150764 |
| 56978 | 111883366 | 111884067 | 150764 |
| 56979 | 111886510 | 111890195 | 255334, 150764 |
| 56980 | 111894798 | 111897248 | 150768 |
| 56981 | 111944461 | 111946027 | 150776, 150773 |
| 56982 | 111956312 | 111958483 | 255292, 204370, 150779 |
| 56983 | 111971185 | 111971751 | 255292, 204370 |
| 56984 | 112026783 | 112032298 | 255292, 150782 |
| 56985 | 112032378 | 112035763 | 150782, 255292 |
| 56986 | 112036380 | 112038263 | 150783, 254638, 255292 |
| 56987 | 112045479 | 112048791 | 197580, 272790, 255292 |
| 56988 | 112084375 | 112085226 | 197580 |
| 56989 | 112087040 | 112088074 | 197580 |
| 56990 | 112091352 | 112093132 | 197580 |
| 56991 | 112096336 | 112098287 | 150787 |
| 56992 | 112137803 | 112138371 | 213234, 150787 |
| 56993 | 112139450 | 112140516 | 150787 |
| 56994 | 112150456 | 112151895 | 250303 |
| 56995 | 112160142 | 112162148 | 250303 |
| 56996 | 112172802 | 112173581 | 250303 |
| 56997 | 112191390 | 112193604 | 250303 |
| 56998 | 112234169 | 112234747 | |
| 56999 | 112434972 | 112435867 | 254968 |
| 57000 | 113184794 | 113186045 | 149292, 255129 |
| 57001 | 113643588 | 113645058 | 086827 |
| 57002 | 113648524 | 113649449 | |
| 57003 | 113652304 | 113653418 | |
| 57004 | 113745375 | 113747155 | 048028 |
| 57005 | 113888422 | 113888854 | |
| 57006 | 113906683 | 113908218 | |
| 57007 | 113911317 | 113911968 | |
| 57008 | 113928168 | 113933081 | 109906 |
| 57009 | 113934720 | 113935714 | 109906 |
| 57010 | 113942385 | 113943347 | 109906 |
| 57011 | 113949036 | 113949772 | 109906 |
| 57012 | 113950010 | 113950625 | 109906 |
| 57013 | 113950892 | 113952732 | 109906 |
| 57014 | 113952854 | 113954125 | 109906 |
| 57015 | 113956687 | 113957238 | 109906 |
| 57016 | 113969307 | 113970682 | 109906 |
| 57017 | 113981068 | 113982969 | 109906 |
| 57018 | 113992348 | 113993310 | 109906 |
| 57019 | 114005453 | 114006720 | 109906 |
| 57020 | 114017985 | 114018978 | 109906 |
| 57021 | 114019549 | 114022960 | 109906 |
| 57022 | 114023322 | 114026895 | 109906 |
| 57023 | 114028593 | 114039972 | 109906 |
| 57024 | 114040081 | 114052088 | 109906 |
| 57025 | 114066882 | 114070002 | 109906 |
| 57026 | 114079920 | 114081079 | 109906 |
| 57027 | 114127924 | 114129490 | 166741, 256947 |
| 57028 | 114136121 | 114136834 | 256947, 166741 |
| 57029 | 114148195 | 114149502 | 256947, 166741 |
| 57030 | 114161509 | 114164438 | 256947, 166741 |
| 57031 | 114165058 | 114169688 | 256947, 166741 |
| 57032 | 114174273 | 114175351 | 256947, 166741 |
| 57033 | 114177577 | 114180482 | 256947, 166741 |
| 57034 | 114186272 | 114187287 | 256947 |
| 57035 | 114216295 | 114216959 | 256947 |
| 57036 | 114269766 | 114272667 | 076053, 255663, 180425 |
| 57037 | 114309902 | 114311325 | 076043, 255663 |
| 57038 | 115096395 | 115098095 | 182985 |
| 57039 | 115150830 | 115151580 | 182985 |
| 57040 | 115247890 | 115249650 | 255580, 182985 |
| 57041 | 115309997 | 115310490 | 182985 |
| 57042 | 115341940 | 115343070 | 182985 |
| 57043 | 115358940 | 115360731 | 182985 |
| 57044 | 115372598 | 115376539 | 182985 |
| 57045 | 115393837 | 115395219 | |
| 57046 | 115419121 | 115420879 | |
| 57047 | 115462790 | 115463717 | 255689 |
| 57048 | 115481556 | 115482390 | |
| 57049 | 115482876 | 115483755 | |
| 57050 | 115493625 | 115494219 | |
| 57051 | 115497069 | 115497757 | |
| 57052 | 115526795 | 115528271 | |
| 57053 | 115529518 | 115530713 | 256717 |
| 57054 | 115787332 | 115787851 | |
| 57055 | 115789432 | 115791268 | |
| 57056 | 115791548 | 115792646 | |
| 57057 | 115834624 | 115835242 | |
| 57058 | 116282763 | 116283972 | |
| 57059 | 116290787 | 116291617 | |
| 57060 | 116342273 | 116343019 | |
| 57061 | 116433751 | 116434951 | |
| 57062 | 116447024 | 116448373 | |
| 57063 | 116505987 | 116506453 | |
| 57064 | 116531644 | 116532443 | |
| 57065 | 116558102 | 116558710 | |
| 57066 | 116642277 | 116644853 | 226645, 137656 |
| 57067 | 116657761 | 116659639 | 109917 |
| 57068 | 116661838 | 116664084 | 110243 |
| 57069 | 116678100 | 116681582 | |
| 57070 | 116683324 | 116685801 | 236267 |
| 57071 | 116695684 | 116698971 | |
| 57072 | 116699023 | 116701866 | 110245 |
| 57073 | 116702757 | 116705255 | 110245 |
| 57074 | 116705688 | 116707284 | 235910, 118137 |
| 57075 | 116707334 | 116710443 | 118137, 235910 |
| 57076 | 116734801 | 116735801 | 160584 |
| 57077 | 116799702 | 116800763 | 160584 |
| 57078 | 116857084 | 116857935 | 160584 |
| 57079 | 116860493 | 116861419 | 160584 |
| 57080 | 116890312 | 116892861 | 160584 |
| 57081 | 116915597 | 116916385 | 160584 |
| 57082 | 116916629 | 116917124 | 160584 |
| 57083 | 116941961 | 116942795 | 160584 |
| 57084 | 116943103 | 116944347 | 160584 |
| 57085 | 116947611 | 116949066 | 160584 |
| 57086 | 116966516 | 116967742 | 160584 |
| 57087 | 116967776 | 116970617 | 224077, 160584 |
| 57088 | 117001559 | 117002165 | |
| 57089 | 117014127 | 117016349 | 168092, 254678 |
| 57090 | 117049195 | 117050821 | 149577 |
| 57091 | 117101693 | 117104348 | 167257, 160613 |
| 57092 | 117169797 | 117171515 | 186318 |
| 57093 | 117186146 | 117187713 | 250699, 186318, 110274 |
| 57094 | 117198149 | 117199522 | 250699, 110274 |
| 57095 | 117687639 | 117689940 | 254844, 177103, 137731 |
| 57096 | 118015814 | 118016823 | 177098 |
| 57097 | 118045111 | 118046487 | 149575 |
| 57098 | 118064465 | 118066558 | 160593 |
| 57099 | 118073042 | 118073875 | 160593 |
| 57100 | 118082761 | 118083623 | 160593 |
| 57101 | 118117328 | 118118445 | 160588 |
| 57102 | 118121786 | 118123565 | 160588 |
| 57103 | 118134223 | 118135385 | 149573 |
| 57104 | 118185584 | 118186360 | 198851 |
| 57105 | 118192112 | 118192665 | |
| 57106 | 118229694 | 118231319 | 110344 |
| 57107 | 118271116 | 118273357 | 167283, 254873 |
| 57108 | 118304889 | 118306235 | 255384 |
| 57109 | 118306282 | 118308325 | 118058 |
| 57110 | 118397136 | 118398334 | 172425, 118058, 255435 |
| 57111 | 118400869 | 118402217 | 149582, 255435, 172425 |
| 57112 | 118404204 | 118405121 | 149582 |
| 57113 | 118436405 | 118437069 | 118096 |
| 57114 | 118442048 | 118444288 | 095139, 118096 |
| 57115 | 118478186 | 118479584 | 019144 |
| 57116 | 118540691 | 118541222 | 118094 |
| 57117 | 118549698 | 118550936 | 118094 |
| 57118 | 118560354 | 118561445 | 255239 |
| 57119 | 118612944 | 118613490 | 255422 |
| 57120 | 118618752 | 118619335 | 255422 |
| 57121 | 118628529 | 118629248 | 110367 |
| 57122 | 118660178 | 118663913 | 110367 |
| 57123 | 118691106 | 118691913 | |
| 57124 | 118709534 | 118710167 | |
| 57125 | 118712408 | 118713031 | |
| 57126 | 118740370 | 118742028 | |
| 57127 | 118779967 | 118785226 | 264211, 186174 |
| 57128 | 118786177 | 118797145 | 110375, 186174 |
| 57129 | 118797568 | 118801435 | 110375 |
| 57130 | 118888063 | 118891201 | 266398, 196655, 118181 |
| 57131 | 118891634 | 118892963 | 196655 |
| 57132 | 118892998 | 118893641 | 196655 |
| 57133 | 118898573 | 118901939 | 137700 |
| 57134 | 118927013 | 118928573 | 149428 |
| 57135 | 118955096 | 118956128 | 256269 |
| 57136 | 118964637 | 118966567 | 188486 |
| 57137 | 118971523 | 118973709 | 172375, 172269 |
| 57138 | 118977619 | 118979015 | 172269, 172375 |
| 57139 | 118991378 | 118992988 | 172273 |
| 57140 | 119039050 | 119040699 | 160703 |
| 57141 | 119076203 | 119077953 | 110395 |
| 57142 | 119186159 | 119186823 | 076706 |
| 57143 | 119204810 | 119206802 | 173456 |
| 57144 | 119210257 | 119211585 | 223953, 235718, 259159 |
| 57145 | 119231192 | 119233680 | 036672 |
| 57146 | 119233699 | 119236020 | 036672 |
| 57147 | 119238393 | 119242287 | 036672 |
| 57148 | 119246183 | 119247595 | 036672, 254740 |
| 57149 | 119251429 | 119252811 | 245248, 036672, 254740 |
| 57150 | 119351864 | 119352600 | 245248 |
| 57151 | 119404518 | 119405511 | |
| 57152 | 119486205 | 119486893 | 254561 |
| 57153 | 119569744 | 119570497 | 110400 |
| 57154 | 119598439 | 119601196 | 254854, 110400 |
| 57155 | 119630263 | 119631050 | |
| 57156 | 119635010 | 119635553 | |
| 57157 | 119777588 | 119778359 | |
| 57158 | 119995520 | 119996216 | 137699 |
| 57159 | 120039151 | 120040411 | 176984, 137699 |
| 57160 | 120053484 | 120054145 | 137699 |
| 57161 | 120054776 | 120058802 | 137699 |
| 57162 | 120063393 | 120064546 | |
| 57163 | 120078357 | 120084091 | 184232 |
| 57164 | 120086055 | 120087390 | 184232 |
| 57165 | 120165648 | 120166118 | 137709 |
| 57166 | 120170355 | 120171233 | 137709 |
| 57167 | 120195570 | 120196970 | 181264 |
| 57168 | 120201602 | 120202838 | 181264 |
| 57169 | 120205442 | 120209440 | 196914 |
| 57170 | 120262006 | 120262653 | 196914 |
| 57171 | 120268749 | 120269244 | 196914 |
| 57172 | 120270844 | 120272596 | 196914 |
| 57173 | 120302407 | 120303351 | 196914 |
| 57174 | 120312314 | 120313236 | 196914 |
| 57175 | 120352776 | 120353228 | 196914 |
| 57176 | 120418515 | 120419068 | 149403 |
| 57177 | 120479516 | 120479955 | 149403 |
| 57178 | 120482884 | 120484330 | 149403 |
| 57179 | 120545211 | 120545730 | 149403 |
| 57180 | 120797145 | 120797788 | 149403 |
| 57181 | 120823244 | 120824145 | 149403 |
| 57182 | 120856585 | 120857429 | 149403 |
| 57183 | 120894510 | 120895735 | 154114 |
| 57184 | 120902808 | 120903934 | 154114 |
| 57185 | 120906025 | 120906456 | 154114 |
| 57186 | 120962041 | 120963396 | |
| 57187 | 121101948 | 121103089 | |
| 57188 | 121162236 | 121164613 | 109929 |
| 57189 | 121227291 | 121229087 | |
| 57190 | 121318947 | 121320022 | 246790 |
| 57191 | 121321761 | 121325342 | 137642, 246790 |
| 57192 | 121331247 | 121332980 | 137642 |
| 57193 | 121333653 | 121336060 | 137642 |
| 57194 | 121336302 | 121339224 | 137642 |
| 57195 | 121340231 | 121343423 | 137642 |
| 57196 | 121346602 | 121347538 | 137642 |
| 57197 | 121423349 | 121426403 | 137642 |
| 57198 | 121435121 | 121436521 | 137642 |
| 57199 | 121445816 | 121447470 | 137642 |
| 57200 | 121456365 | 121458695 | 137642 |
| 57201 | 121465652 | 121467461 | 137642 |
| 57202 | 121525583 | 121527917 | |
| 57203 | 121802243 | 121803771 | |
| 57204 | 121806439 | 121808209 | |
| 57205 | 122007197 | 122008748 | |
| 57206 | 122010847 | 122012434 | |
| 57207 | 122032758 | 122033729 | 255090 |
| 57208 | 122057068 | 122058226 | 255090 |
| 57209 | 122058539 | 122061224 | 255090 |
| 57210 | 122077705 | 122079250 | 255090 |
| 57211 | 122079340 | 122082006 | 255090 |
| 57212 | 122238453 | 122239404 | 255090 |
| 57213 | 122253807 | 122254270 | 255090 |
| 57214 | 122310270 | 122312477 | |
| 57215 | 122451197 | 122452244 | |
| 57216 | 122512933 | 122514513 | |
| 57217 | 122526243 | 122527334 | 154127 |
| 57218 | 122931787 | 122935009 | 109971 |
| 57219 | 122954075 | 122954817 | 166250 |
| 57220 | 123611414 | 123613068 | 166261 |
| 57221 | 123669109 | 123669700 | |
| 57222 | 123985802 | 123986438 | 110002 |
| 57223 | 124272271 | 124272728 | |
| 57224 | 124491980 | 124493634 | 154144 |
| 57225 | 124542880 | 124544289 | 064199, 110013 |
| 57226 | 124616021 | 124617375 | 019102, 154146, 255045 |
| 57227 | 124639249 | 124640622 | 120458 |
| 57228 | 124669277 | 124671425 | 245498, 120458 |
| 57229 | 124706290 | 124706661 | |
| 57230 | 124745568 | 124747119 | 154134 |
| 57231 | 124752056 | 124753252 | |
| 57232 | 124799069 | 124799575 | 165478 |
| 57233 | 124803960 | 124805501 | 165478 |
| 57234 | 124823118 | 124824461 | 149548 |
| 57235 | 124932136 | 124933572 | 134955 |
| 57236 | 124980802 | 124982314 | 150433 |
| 57237 | 124993052 | 124994510 | 187686 |
| 57238 | 125438627 | 125440648 | 149547, 254671 |
| 57239 | 125461131 | 125463889 | 134910, 254671 |
| 57240 | 125495023 | 125496085 | 149554, 134910 |
| 57241 | 125757161 | 125758349 | 198331 |
| 57242 | 125771312 | 125773745 | 109832, 255027, 110060 |
| 57243 | 125837698 | 125838818 | 064309 |
| 57244 | 125853547 | 125854519 | 064309 |
| 57245 | 125896526 | 125897208 | 064309 |
| 57246 | 125930692 | 125933915 | 064309 |
| 57247 | 125949621 | 125951200 | |
| 57248 | 125961792 | 125962355 | |
| 57249 | 125983273 | 125984475 | |
| 57250 | 125985562 | 125986252 | |
| 57251 | 126017497 | 126018765 | |
| 57252 | 126060604 | 126061146 | |
| 57253 | 126066501 | 126068546 | |
| 57254 | 126072265 | 126073317 | 165526 |
| 57255 | 126080703 | 126082655 | 197798, 165526 |
| 57256 | 126137245 | 126139848 | 110074, 182934 |
| 57257 | 126146405 | 126148389 | 243607, 110074 |
| 57258 | 126152023 | 126154288 | 150455 |
| 57259 | 126173262 | 126174508 | 110063, 255062 |
| 57260 | 126195860 | 126199567 | 110063 |
| 57261 | 126204509 | 126205825 | 110063 |
| 57262 | 126225201 | 126227499 | 110080 |
| 57263 | 126496001 | 126496954 | 149571 |
| 57264 | 126524680 | 126526165 | 254607, 149571 |
| 57265 | 126975998 | 126976616 | |
| 57266 | 127510820 | 127511461 | |
| 57267 | 127518592 | 127519651 | |
| 57268 | 127521072 | 127522458 | |
| 57269 | 127891122 | 127892176 | |
| 57270 | 127895681 | 127898080 | |
| 57271 | 127898135 | 127900347 | |
| 57272 | 127952475 | 127953004 | |
| 57273 | 128005262 | 128006036 | |
| 57274 | 128027445 | 128028393 | |
| 57275 | 128031699 | 128032339 | |
| 57276 | 128034084 | 128034723 | |
| 57277 | 128075167 | 128081562 | 272575 |
| 57278 | 128206036 | 128206527 | |
| 57279 | 128229467 | 128229921 | |
| 57280 | 128317556 | 128320166 | |
| 57281 | 128321375 | 128324439 | |
| 57282 | 128325325 | 128328939 | 134954 |
| 57283 | 128336584 | 128338688 | 134954 |
| 57284 | 128342085 | 128342560 | 134954 |
| 57285 | 128358148 | 128359562 | 134954 |
| 57286 | 128360761 | 128363339 | 134954 |
| 57287 | 128365639 | 128368402 | 134954 |
| 57288 | 128376088 | 128379580 | 134954 |
| 57289 | 128390728 | 128394486 | 134954 |
| 57290 | 128401849 | 128402653 | 134954 |
| 57291 | 128405126 | 128406228 | 134954 |
| 57292 | 128418075 | 128419260 | 134954 |
| 57293 | 128449658 | 128450211 | 134954 |
| 57294 | 128493902 | 128495005 | |
| 57295 | 128577900 | 128579874 | 151702 |
| 57296 | 128764227 | 128765294 | 120457 |
| 57297 | 128985467 | 128986041 | 134909 |
| 57298 | 129013030 | 129014216 | 134909 |
| 57299 | 129145282 | 129146217 | 134909 |
| 57300 | 129148291 | 129150431 | 134909 |
| 57301 | 129154667 | 129155027 | |
| 57302 | 129172241 | 129173624 | |
| 57303 | 129178000 | 129178915 | |
| 57304 | 129193449 | 129196070 | |
| 57305 | 129233600 | 129234595 | |
| 57306 | 129309819 | 129310601 | 043039 |
| 57307 | 129572912 | 129573562 | |
| 57308 | 129601133 | 129601696 | |
| 57309 | 129723227 | 129724155 | 151715 |
| 57310 | 129731597 | 129732693 | |
| 57311 | 129764549 | 129765716 | 170322 |
| 57312 | 129829665 | 129831123 | 170325 |
| 57313 | 129835986 | 129836707 | 170325 |
| 57314 | 129868753 | 129874332 | 233220, 170325 |
| 57315 | 129938212 | 129941187 | 084234, 267981 |
| 57316 | 129993269 | 129995105 | 084234 |
| 57317 | 130013803 | 130014744 | 084234 |
| 57318 | 130016104 | 130016948 | |
| 57319 | 130033329 | 130034299 | 149418 |
| 57320 | 130048124 | 130050619 | 149418 |
| 57321 | 130050635 | 130052390 | 149418 |
| 57322 | 130183388 | 130185665 | 175773, 196323 |
| 57323 | 130188102 | 130189059 | 175773 |
| 57324 | 130266803 | 130267380 | |
| 57325 | 130304257 | 130305501 | |
| 57326 | 130505663 | 130507409 | |
| 57327 | 130522783 | 130523253 | |
| 57328 | 130523654 | 130524321 | |
| 57329 | 130731636 | 130732560 | 254842 |
| 57330 | 130734800 | 130736668 | 255455, 254842 |
| 57331 | 130751487 | 130753987 | 120451 |
| 57332 | 130760809 | 130762327 | 120451 |
| 57333 | 130766414 | 130768761 | 120451 |
| 57334 | 130785457 | 130786849 | 120451 |
| 57335 | 132574604 | 132575163 | 183715 |
| 57336 | 132585845 | 132586390 | 183715 |
| 57337 | 132764197 | 132765074 | 183715 |
| 57338 | 132767670 | 132768608 | 183715 |
| 57339 | 132795552 | 132796507 | 183715 |
| 57340 | 132922330 | 132923110 | 183715 |
| 57341 | 132933740 | 132934952 | 183715 |
| 57342 | 132952553 | 132953147 | 183715 |
| 57343 | 133390267 | 133391442 | 183715 |
| 57344 | 134093669 | 134095643 | 151502, 151503 |
| 57345 | 134120558 | 134120949 | 151500 |
| 57346 | 134122308 | 134124260 | 151498, 151500 |
| 57347 | 134267300 | 134268449 | 109956 |
| 57348 | 134611734 | 134612545 | 251226 |

[0580] The locations of ODSCs on Chromosome 12 are shown in Table 54.

TABLE 54
ODSC Locations on Chromosome 12

| SEQ ID NO. | Start | End | Overlapping Gene(s) |
|---|---|---|---|
| 57349 | 275696 | 276481 | 256540, 120645 |
| 57350 | 285451 | 287055 | 256540, 120645 |
| 57351 | 319281 | 320162 | 111181 |
| 57352 | 321727 | 323997 | 111181 |
| 57353 | 345453 | 347461 | 010379 |
| 57354 | 366764 | 367921 | 010379 |
| 57355 | 397701 | 398366 | 073614 |
| 57356 | 497326 | 499532 | 120647, 073614 |
| 57357 | 596921 | 597425 | 139044 |
| 57358 | 678828 | 681409 | 171840 |
| 57359 | 684631 | 686167 | 171840 |
| 57360 | 692251 | 693283 | 171840 |
| 57361 | 694436 | 695357 | 256020, 171840 |
| 57362 | 718850 | 720182 | 171840 |
| 57363 | 736778 | 737971 | 171840 |
| 57364 | 740792 | 743419 | 171840, 177406 |
| 57365 | 751227 | 756411 | 171840, 177406 |
| 57366 | 781991 | 782602 | |
| 57367 | 860104 | 863937 | 060237 |
| 57368 | 887767 | 889783 | 060237 |
| 57369 | 915047 | 915934 | 060237 |
| 57370 | 956430 | 958126 | 060237 |
| 57371 | 1057293 | 1059466 | 002016 |
| 57372 | 1098378 | 1101473 | 082805, 250132, 002016 |
| 57373 | 1123291 | 1123760 | 082805 |
| 57374 | 1163233 | 1164129 | 082805 |
| 57375 | 1239368 | 1239843 | 082805 |
| 57376 | 1240876 | 1241455 | 082805 |
| 57377 | 1628367 | 1628865 | |
| 57378 | 1702736 | 1704617 | 171823, 111186 |
| 57379 | 1714315 | 1715958 | 111186 |
| 57380 | 1738425 | 1739660 | 111186 |
| 57381 | 1768645 | 1771565 | 266043 |
| 57382 | 1775325 | 1780195 | |
| 57383 | 1799235 | 1801387 | 006831 |
| 57384 | 1869095 | 1871028 | 006831 |
| 57385 | 1893282 | 1894348 | 006831 |
| 57386 | 1904733 | 1906897 | 151062 |
| 57387 | 1913720 | 1914184 | 151062 |
| 57388 | 2101881 | 2104428 | 151065, 151067 |
| 57389 | 2112497 | 2114448 | 203593, 151065, 151067 |
| 57390 | 2272393 | 2273215 | 151067 |
| 57391 | 2277390 | 2279728 | 151067 |
| 57392 | 2375895 | 2376656 | 151067 |
| 57393 | 2903097 | 2905358 | 004478, 256030 |
| 57394 | 2921334 | 2923069 | 111203, 258325 |
| 57395 | 2958721 | 2959531 | 206044, 111203 |
| 57396 | 2985738 | 2987222 | 078246, 111206, 171792 |
| 57397 | 2999251 | 3001272 | 078246 |
| 57398 | 3067461 | 3069556 | 197905 |
| 57399 | 3185424 | 3188192 | 011105 |
| 57400 | 3192338 | 3196306 | 011105 |
| 57401 | 3206081 | 3207877 | 011105 |
| 57402 | 3213596 | 3214532 | 011105 |
| 57403 | 3350687 | 3351520 | 011105 |
| 57404 | 3408989 | 3410363 | 250770 |
| 57405 | 3866331 | 3867048 | 130038 |
| 57406 | 3901769 | 3902417 | 111224 |
| 57407 | 3981404 | 3983373 | 111224, 256862 |
| 57408 | 4067371 | 4069985 | |
| 57409 | 4124081 | 4125496 | |
| 57410 | 4139739 | 4141633 | |
| 57411 | 4385774 | 4386538 | 118971 |
| 57412 | 4429509 | 4431395 | 078237 |
| 57413 | 4647018 | 4648274 | 111247, 047621 |
| 57414 | 4713765 | 4714665 | 272921, 010219 |
| 57415 | 4757430 | 4759341 | 139180, 111254, 272921 |
| 57416 | 5282402 | 5283363 | |
| 57417 | 5541487 | 5543066 | 185652 |
| 57418 | 5605872 | 5608109 | 185652 |
| 57419 | 6167657 | 6168836 | 110799 |
| 57420 | 6179569 | 6180143 | 110799 |
| 57421 | 6274681 | 6275141 | |
| 57422 | 6289255 | 6290462 | |
| 57423 | 6291136 | 6293515 | |
| 57424 | 6308653 | 6310929 | 010278 |
| 57425 | 6325040 | 6325886 | 010278 |
| 57426 | 6376081 | 6376830 | |
| 57427 | 6386915 | 6390733 | |
| 57428 | 6401606 | 6402518 | |
| 57429 | 6419121 | 6420354 | 008323 |
| 57430 | 6443692 | 6447191 | 067182 |
| 57431 | 6448730 | 6451978 | 067182 |
| 57432 | 6454356 | 6455813 | |
| 57433 | 6469095 | 6470282 | 111319 |
| 57434 | 6470852 | 6471387 | 111319 |
| 57435 | 6472140 | 6473713 | 111319 |
| 57436 | 6478997 | 6479603 | 111319 |
| 57437 | 6485252 | 6486296 | 111319, 111321 |
| 57438 | 6492122 | 6494860 | 111321 |
| 57439 | 6560039 | 6562472 | 139192, 215039, 139193 |
| 57440 | 6579013 | 6581000 | 139190 |
| 57441 | 6601636 | 6603213 | 010292, 111639 |
| 57442 | 6640922 | 6645522 | 111640, 255966, 010292 |
| 57443 | 6650957 | 6652480 | 010295 |
| 57444 | 6676558 | 6678125 | 111641 |
| 57445 | 6713781 | 6714215 | 111642 |
| 57446 | 6714863 | 6716810 | 111642 |
| 57447 | 6722646 | 6724356 | |
| 57448 | 6771614 | 6773006 | 219410, 111653 |
| 57449 | 6797296 | 6799679 | 126746 |
| 57450 | 6832386 | 6834227 | 111652, 270068 |
| 57451 | 6861436 | 6863842 | 089693 |
| 57452 | 6874216 | 6877886 | 159335, 089693 |
| 57453 | 6880663 | 6881287 | |
| 57454 | 6884963 | 6885524 | 089692 |
| 57455 | 6887452 | 6889491 | 089692 |
| 57456 | 6960698 | 6962659 | 111667, 111665 |
| 57457 | 6975865 | 6977877 | 111669 |
| 57458 | 6981230 | 6983226 | 010626, 240370, 111671 |
| 57459 | 6989264 | 6990170 | 010626, 111671, 240370 |
| 57460 | 6999378 | 7001254 | 010626 |
| 57461 | 7034255 | 7035843 | 111676 |
| 57462 | 7036221 | 7038622 | 111676 |
| 57463 | 7046110 | 7047666 | 111676 |
| 57464 | 7052401 | 7056173 | 111679, 272173, 238923, |
| | | | 111678 |
| 57465 | 7069912 | 7071960 | 111679 |
| 57466 | 7078707 | 7081084 | 215021, 126749 |
| 57467 | 7089743 | 7090905 | 126749, 111684 |
| 57468 | 7103986 | 7104529 | 126749, 111684, 182326 |
| 57469 | 7106647 | 7107284 | 111684, 182326 |
| 57470 | 7124756 | 7126753 | 111684, 182326 |
| 57471 | 7166988 | 7170689 | 182326 |
| 57472 | 7175406 | 7177019 | 182326 |
| 57473 | 7178773 | 7180314 | |
| 57474 | 7186290 | 7187699 | 159403 |
| 57475 | 7242116 | 7246055 | 139178, 159403 |
| 57476 | 7260255 | 7262209 | 205885, 139178 |
| 57477 | 7274889 | 7277246 | 139194, 205885 |
| 57478 | 7280095 | 7284246 | 256967, 139182, 139194 |
| 57479 | 7304069 | 7304485 | 139182 |
| 57480 | 7341053 | 7343163 | 139197, 255572 |
| 57481 | 7526976 | 7527742 | 177675 |
| 57482 | 7585873 | 7586322 | 177675 |
| 57483 | 7644905 | 7647361 | 177575 |
| 57484 | 7664928 | 7665858 | |
| 57485 | 7741268 | 7741888 | |
| 57486 | 8043176 | 8044420 | 173262 |
| 57487 | 8059599 | 8060159 | |
| 57488 | 8178444 | 8180235 | |
| 57489 | 8184591 | 8186355 | 065970 |
| 57490 | 8233769 | 8235677 | 089818 |
| 57491 | 8850177 | 8851409 | 166532 |
| 57492 | 9101169 | 9103481 | 139187, 003056 |
| 57493 | 9215999 | 9218238 | 245105, 214851 |
| 57494 | 9225576 | 9226114 | 175899 |
| 57495 | 9267513 | 9269115 | 175899 |
| 57496 | 9279518 | 9281534 | 211542, 256937 |
| 57497 | 9284389 | 9286053 | |
| 57498 | 9297393 | 9297791 | |
| 57499 | 9373671 | 9374723 | |
| 57500 | 9396183 | 9398179 | 256069 |
| 57501 | 9741262 | 9741944 | |
| 57502 | 10021856 | 10023283 | 110852, 255882 |
| 57503 | 10078187 | 10078942 | 188393 |
| 57504 | 10305701 | 10307034 | |
| 57505 | 10320275 | 10320719 | 173391 |
| 57506 | 10344445 | 10345058 | |
| 57507 | 10364093 | 10368476 | 255958, 139112 |
| 57508 | 10372836 | 10373363 | 139112 |
| 57509 | 10516576 | 10518548 | 245648 |
| 57510 | 10765227 | 10767153 | 111196 |
| 57511 | 10892710 | 10893166 | |
| 57512 | 10902497 | 10903347 | 256888 |
| 57513 | 11019887 | 11020691 | 111215 |
| 57514 | 11044394 | 11045110 | 111215 |
| 57515 | 11092899 | 11093799 | 212127, 111215 |
| 57516 | 11121335 | 11121852 | 212127, 111215 |
| 57517 | 11323293 | 11325343 | 256537, 212127, 256712, |
| | | | 111215 |
| 57518 | 11334721 | 11335710 | |
| 57519 | 11760224 | 11761292 | |
| 57520 | 11775623 | 11776789 | |
| 57521 | 11801242 | 11804364 | 139083 |
| 57522 | 11857804 | 11858395 | 139083 |
| 57523 | 11921458 | 11921951 | 139083 |
| 57524 | 11974812 | 11976022 | 139083 |
| 57525 | 11986336 | 11987772 | 139083 |
| 57526 | 12037616 | 12039379 | 139083 |
| 57527 | 12185377 | 12186965 | |
| 57528 | 12223970 | 12224605 | 121380 |
| 57529 | 12240829 | 12241921 | 121380 |
| 57530 | 12245414 | 12246458 | 121380 |
| 57531 | 12359550 | 12360352 | 121380, 070018 |
| 57532 | 12365458 | 12366347 | 070018 |
| 57533 | 12368716 | 12370416 | 070018 |
| 57534 | 12374226 | 12374779 | 070018 |
| 57535 | 12418513 | 12420920 | 070018 |
| 57536 | 12461314 | 12462097 | |
| 57537 | 12466703 | 12467523 | |
| 57538 | 12472402 | 12473794 | |
| 57539 | 12502473 | 12504525 | 111261 |
| 57540 | 12509161 | 12511900 | 165714, 205791 |
| 57541 | 12529435 | 12530573 | 165714 |
| 57542 | 12549737 | 12554417 | 165714 |
| 57543 | 12555113 | 12560609 | 165714 |
| 57544 | 12569841 | 12570344 | 165714 |
| 57545 | 12590101 | 12599464 | 165714 |
| 57546 | 12601481 | 12605045 | 271370, 165714 |
| 57547 | 12638787 | 12641597 | 255670, 111266 |
| 57548 | 12641696 | 12643057 | 255670, 111266 |
| 57549 | 12658268 | 12659848 | 111266 |
| 57550 | 12710534 | 12717292 | 111266 |
| 57551 | 12737826 | 12739011 | |
| 57552 | 12745785 | 12746205 | |
| 57553 | 12763878 | 12765752 | 111269 |
| 57554 | 12848923 | 12851108 | 183150 |
| 57555 | 12857287 | 12858042 | |
| 57556 | 12868764 | 12872552 | 111276 |
| 57557 | 12876408 | 12879272 | 178878, 256658 |
| 57558 | 12932400 | 12932992 | 178878 |
| 57559 | 12939083 | 12941076 | 178878 |
| 57560 | 12956811 | 12957789 | 178878 |
| 57561 | 12965898 | 12967056 | 213782, 178878 |
| 57562 | 12972388 | 12973091 | 213782, 178878 |
| 57563 | 12975955 | 12976742 | 213782, 178878 |
| 57564 | 13043229 | 13045206 | 013588 |
| 57565 | 13052423 | 13055432 | 013588 |
| 57566 | 13152194 | 13154914 | 255621, 183935, 013583 |
| 57567 | 13197090 | 13197939 | 084444 |
| 57568 | 13250443 | 13252498 | 084444, 111305 |
| 57569 | 13339269 | 13340932 | |
| 57570 | 13348253 | 13350308 | 134531 |
| 57571 | 13375332 | 13377030 | |
| 57572 | 13394562 | 13395431 | |
| 57573 | 13408505 | 13409357 | |
| 57574 | 13430968 | 13431498 | |
| 57575 | 13543185 | 13543824 | |
| 57576 | 13589331 | 13590385 | |
| 57577 | 13595687 | 13597437 | |
| 57578 | 14094394 | 14095199 | 273079 |
| 57579 | 14103124 | 14104301 | 273079 |
| 57580 | 14106482 | 14107490 | 273079 |
| 57581 | 14373793 | 14374424 | 256084 |
| 57582 | 14392167 | 14393313 | |
| 57583 | 14409295 | 14411753 | |
| 57584 | 14518129 | 14520861 | 171681, 244573 |
| 57585 | 14537081 | 14538979 | 171681 |
| 57586 | 14594921 | 14595768 | 171681 |
| 57587 | 14713793 | 14714521 | 121316 |
| 57588 | 14720107 | 14721383 | 256751, 121316 |
| 57589 | 14803552 | 14804170 | 070019 |
| 57590 | 14921779 | 14924447 | 197837 |
| 57591 | 14926573 | 14928865 | 246705 |
| 57592 | 14955530 | 14957657 | 179256, 182993, 084463 |
| 57593 | 14986256 | 14997344 | 256339, 111339, 182993 |
| 57594 | 15780710 | 15783362 | 151491 |
| 57595 | 15865040 | 15866933 | 151491 |
| 57596 | 15885533 | 15885958 | 151491 |
| 57597 | 15910811 | 15911861 | 151491 |
| 57598 | 15940830 | 15943647 | 151491 |
| 57599 | 15948588 | 15951865 | 151491 |
| 57600 | 15972647 | 15973354 | 256953, 151491 |
| 57601 | 15976340 | 15977008 | 256953, 151491 |
| 57602 | 15983006 | 15984000 | 151491 |
| 57603 | 16015609 | 16016620 | 151491 |
| 57604 | 16034361 | 16036518 | 023734, 151491 |
| 57605 | 16063427 | 16065489 | 023697 |
| 57606 | 16080699 | 16082583 | 023697 |
| 57607 | 16084228 | 16085386 | 023697 |
| 57608 | 16108779 | 16109810 | 023697 |
| 57609 | 16114897 | 16117475 | 023697 |
| 57610 | 16131072 | 16133448 | 023697 |
| 57611 | 16183593 | 16184170 | 023697 |
| 57612 | 16391571 | 16392758 | 188991 |
| 57613 | 16433355 | 16434921 | |
| 57614 | 16496787 | 16498923 | |
| 57615 | 16499148 | 16504564 | 008394 |
| 57616 | 16645621 | 16646976 | 008394 |
| 57617 | 17092544 | 17093401 | |
| 57618 | 18081648 | 18082529 | |
| 57619 | 18261334 | 18262113 | 111404 |
| 57620 | 18298863 | 18299769 | 111404 |
| 57621 | 18301665 | 18302588 | 111404 |
| 57622 | 18318140 | 18319142 | 111404 |
| 57623 | 18392028 | 18393018 | 111404 |
| 57624 | 18395066 | 18398678 | 111404 |
| 57625 | 18412531 | 18413687 | 139144, 111404 |
| 57626 | 18472647 | 18473464 | 111404, 139144 |
| 57627 | 18535749 | 18537221 | 139144 |
| 57628 | 18555855 | 18556789 | 139144 |
| 57629 | 18581236 | 18582041 | 139144 |
| 57630 | 18632097 | 18632603 | 139144 |
| 57631 | 18699339 | 18699802 | 139144 |
| 57632 | 18900329 | 18901570 | |
| 57633 | 18906668 | 18907542 | |
| 57634 | 19218908 | 19220057 | |
| 57635 | 19281452 | 19285163 | 052126 |
| 57636 | 19339423 | 19341073 | 052126 |
| 57637 | 19373725 | 19374852 | 052126 |
| 57638 | 19426151 | 19427455 | 052126 |
| 57639 | 19534189 | 19535944 | |
| 57640 | 19584024 | 19585719 | 139154 |
| 57641 | 19592005 | 19593956 | 139154 |
| 57642 | 19682232 | 19684669 | 139154 |
| 57643 | 19799349 | 19800031 | 139154 |
| 57644 | 20098802 | 20099773 | 255910 |
| 57645 | 20122747 | 20123606 | 255910 |
| 57646 | 20141204 | 20141896 | 255910 |
| 57647 | 20150545 | 20153779 | 255910 |
| 57648 | 20164044 | 20164547 | |
| 57649 | 20341868 | 20342706 | |
| 57650 | 20618709 | 20619299 | 172572 |
| 57651 | 20704205 | 20704675 | 256663, 172572 |
| 57652 | 20782308 | 20783199 | 172572 |
| 57653 | 20983344 | 20983943 | 257046, 111700, 205754 |
| 57654 | 21036938 | 21037997 | 257046, 111700, 205754 |
| 57655 | 21282025 | 21284836 | 134538, 257062 |
| 57656 | 21308507 | 21309447 | 134538, 257062 |
| 57657 | 21503818 | 21504562 | 084453 |
| 57658 | 21589826 | 21591678 | 121350 |
| 57659 | 21653598 | 21655549 | 111711, 004700 |
| 57660 | 21679709 | 21681200 | 134548 |
| 57661 | 21699558 | 21700228 | 111713 |
| 57662 | 21712742 | 21714682 | 111713 |
| 57663 | 21718650 | 21720360 | 111713 |
| 57664 | 21751118 | 21752999 | 111713 |
| 57665 | 21757077 | 21758296 | 111713 |
| 57666 | 21909618 | 21911199 | 111716, 256615 |
| 57667 | 21925780 | 21928936 | 121361 |
| 57668 | 21941076 | 21941900 | |
| 57669 | 21952936 | 21953492 | 069431 |
| 57670 | 21967187 | 21968018 | 069431 |
| 57671 | 21971265 | 21973794 | 069431 |
| 57672 | 21975578 | 21977071 | 069431 |
| 57673 | 21981102 | 21982262 | 069431, 257022 |
| 57674 | 22032198 | 22033767 | 069431, 257022 |
| 57675 | 22046171 | 22048470 | 069431 |
| 57676 | 22093384 | 22095765 | 069431 |
| 57677 | 22198889 | 22200965 | 111726 |
| 57678 | 22696131 | 22698070 | 111731 |
| 57679 | 22751638 | 22752127 | |
| 57680 | 22777276 | 22780010 | 139163, 257023 |
| 57681 | 22882167 | 22883682 | 256995 |
| 57682 | 22896960 | 22897671 | 256995 |
| 57683 | 23127829 | 23128262 | 256995 |
| 57684 | 23646501 | 23646988 | |
| 57685 | 23678412 | 23678976 | |
| 57686 | 23923994 | 23925455 | 134532 |
| 57687 | 24102192 | 24104747 | 134532 |
| 57688 | 24190586 | 24192773 | |
| 57689 | 24197533 | 24199601 | |
| 57690 | 24219600 | 24220280 | |
| 57691 | 24222332 | 24223186 | |
| 57692 | 24224685 | 24225246 | |
| 57693 | 24231114 | 24232327 | |
| 57694 | 24233235 | 24234374 | |
| 57695 | 24354147 | 24354986 | |
| 57696 | 24421524 | 24422222 | 255864 |
| 57697 | 24512878 | 24514436 | 255864 |
| 57698 | 24580531 | 24581324 | 255864 |
| 57699 | 24649273 | 24650338 | 255864 |
| 57700 | 24651852 | 24654054 | 255864 |
| 57701 | 24687805 | 24689182 | 255864 |
| 57702 | 24690906 | 24691840 | 255864 |
| 57703 | 24703833 | 24704910 | 255864 |
| 57704 | 24713580 | 24717336 | 255864 |
| 57705 | 24814441 | 24815198 | |
| 57706 | 25347912 | 25349243 | 205707, 118307 |
| 57707 | 25361388 | 25362288 | 205707, 133703 |
| 57708 | 25395689 | 25396940 | 133703 |
| 57709 | 25402822 | 25404732 | 133703 |
| 57710 | 25410496 | 25411218 | |
| 57711 | 25425701 | 25426663 | |
| 57712 | 25428756 | 25430192 | |
| 57713 | 25439475 | 25440349 | |
| 57714 | 25480833 | 25481799 | |
| 57715 | 25486595 | 25487612 | |
| 57716 | 25537386 | 25540857 | |
| 57717 | 25648412 | 25649276 | 152936 |
| 57718 | 25674445 | 25675549 | 152936 |
| 57719 | 25768007 | 25768379 | 152936 |
| 57720 | 26110183 | 26113209 | 123094, 246695 |
| 57721 | 26145190 | 26145833 | 123094 |
| 57722 | 26150455 | 26151099 | 123094 |
| 57723 | 26208044 | 26209719 | 123094 |
| 57724 | 26249922 | 26250870 | |
| 57725 | 26266241 | 26268280 | |
| 57726 | 26277358 | 26280143 | 256894, 123095, 123096 |
| 57727 | 26305309 | 26307936 | 123096 |
| 57728 | 26427359 | 26428569 | 255750, 123096, 256234 |
| 57729 | 26451609 | 26452677 | 123096, 255750, 256234 |
| 57730 | 26470411 | 26472904 | 255968, 255750, 255858, |
| | | | 256234 |
| 57731 | 26514839 | 26515367 | 123104, 255968 |
| 57732 | 26522448 | 26523575 | 123104, 255968 |
| 57733 | 26608749 | 26609591 | 123104 |
| 57734 | 26646578 | 26647131 | 123104 |
| 57735 | 26676532 | 26677119 | 123104 |
| 57736 | 26782061 | 26785101 | 123104, 234428 |
| 57737 | 26789453 | 26790795 | 123104, 234428 |
| 57738 | 26800365 | 26802514 | 234428, 123104 |
| 57739 | 26821747 | 26822275 | 123104 |
| 57740 | 26876697 | 26877416 | 123104 |
| 57741 | 26889106 | 26890573 | 123104 |
| 57742 | 26897855 | 26898390 | 123104 |
| 57743 | 26903821 | 26904541 | 123104 |
| 57744 | 26921610 | 26922665 | 123104 |
| 57745 | 26939888 | 26940744 | 123104 |
| 57746 | 26983700 | 26984553 | 123104 |
| 57747 | 26984681 | 26987181 | 123104 |
| 57748 | 27006377 | 27007349 | |
| 57749 | 27090263 | 27092559 | 111790, 064102 |
| 57750 | 27164968 | 27168268 | 064115 |
| 57751 | 27174924 | 27176370 | 152944 |
| 57752 | 27315772 | 27317024 | |
| 57753 | 27329362 | 27335434 | |
| 57754 | 27341948 | 27348223 | |
| 57755 | 27360381 | 27361580 | |
| 57756 | 27367213 | 27368049 | |
| 57757 | 27396467 | 27399902 | 211455 |
| 57758 | 27430597 | 27431251 | 211455 |
| 57759 | 27484020 | 27489224 | 029153 |
| 57760 | 27490177 | 27491591 | 029153 |
| 57761 | 27495704 | 27497848 | 029153 |
| 57762 | 27675970 | 27678479 | 110841 |
| 57763 | 27700085 | 27704040 | 248100, 110841 |
| 57764 | 27849888 | 27850841 | 174236, 256377 |
| 57765 | 27862606 | 27864729 | 061794, 256377 |
| 57766 | 27893476 | 27895199 | 061794 |
| 57767 | 27900412 | 27902243 | 061794 |
| 57768 | 27907692 | 27908160 | 061794 |
| 57769 | 27932334 | 27934270 | 087448, 256747 |
| 57770 | 28019574 | 28020093 | |
| 57771 | 28342591 | 28345049 | 247934, 123106 |
| 57772 | 28355274 | 28356201 | 123106 |
| 57773 | 28492900 | 28493854 | 123106 |
| 57774 | 28722071 | 28723840 | 123106 |
| 57775 | 28727396 | 28729160 | 123106 |
| 57776 | 28931884 | 28933733 | |
| 57777 | 29394733 | 29395562 | 064763 |
| 57778 | 29472962 | 29474186 | 064763 |
| 57779 | 29533006 | 29535130 | 087502 |
| 57780 | 29581079 | 29582308 | 257599, 187950 |
| 57781 | 29591709 | 29592751 | 257599, 187950 |
| 57782 | 29735572 | 29736266 | 133687 |
| 57783 | 29792667 | 29794415 | 133687 |
| 57784 | 29935222 | 29937582 | 133687 |
| 57785 | 29949537 | 29950147 | |
| 57786 | 30178154 | 30178616 | |
| 57787 | 30178917 | 30180353 | |
| 57788 | 30570493 | 30572549 | |
| 57789 | 30847915 | 30849512 | 133704 |
| 57790 | 30907119 | 30909037 | 246331, 110888 |
| 57791 | 30948543 | 30949505 | 235884 |
| 57792 | 30975063 | 30976477 | |
| 57793 | 31381931 | 31383077 | |
| 57794 | 31476325 | 31479575 | 177340, 139146 |
| 57795 | 31629334 | 31629739 | 170456 |
| 57796 | 31644505 | 31645135 | 170456 |
| 57797 | 31741914 | 31745059 | 255867, 170456 |
| 57798 | 31805776 | 31806783 | 139160 |
| 57799 | 31811705 | 31813475 | 139160 |
| 57800 | 31816433 | 31817664 | 139160 |
| 57801 | 31821138 | 31821666 | 139160 |
| 57802 | 31880957 | 31883206 | 151743 |
| 57803 | 31885593 | 31886449 | |
| 57804 | 31899547 | 31900229 | |
| 57805 | 31901730 | 31902953 | |
| 57806 | 31925961 | 31927129 | |
| 57807 | 31967987 | 31968589 | |
| 57808 | 32006203 | 32007520 | 256372 |
| 57809 | 32013287 | 32014817 | |
| 57810 | 32021948 | 32022536 | |
| 57811 | 32101662 | 32102401 | 242314 |
| 57812 | 32111165 | 32113270 | 174718 |
| 57813 | 32259162 | 32260656 | 151746, 257530 |
| 57814 | 32268588 | 32269191 | 151746 |
| 57815 | 32424076 | 32424820 | 151746 |
| 57816 | 32551833 | 32554033 | 139132 |
| 57817 | 32588897 | 32590936 | 139132 |
| 57818 | 32597327 | 32601298 | 139132 |
| 57819 | 32606807 | 32607863 | 139132 |
| 57820 | 32655063 | 32656357 | 139132 |
| 57821 | 32686672 | 32687601 | 139132 |
| 57822 | 32694902 | 32696679 | 139132 |
| 57823 | 32701469 | 32702180 | 139132 |
| 57824 | 32830610 | 32831392 | |
| 57825 | 32831839 | 32833405 | 087470 |
| 57826 | 32907336 | 32909716 | 139131 |
| 57827 | 33018400 | 33019581 | 057294 |
| 57828 | 33030364 | 33030987 | 057294 |
| 57829 | 33044690 | 33045298 | 057294 |
| 57830 | 33046382 | 33046814 | 057294 |
| 57831 | 33048315 | 33051008 | 057294 |
| 57832 | 33054303 | 33055425 | |
| 57833 | 33059244 | 33059844 | |
| 57834 | 34371099 | 34372058 | 255652 |
| 57835 | 38518185 | 38518881 | |
| 57836 | 38532009 | 38532741 | |
| 57837 | 38710035 | 38710927 | 175548 |
| 57838 | 39273796 | 39274660 | 139117 |
| 57839 | 39277533 | 39277976 | 139117 |
| 57840 | 39279576 | 39280421 | 139117 |
| 57841 | 39283205 | 39284396 | 139117 |
| 57842 | 39285552 | 39287258 | 139117 |
| 57843 | 39298537 | 39301149 | 257718, 139117 |
| 57844 | 39630389 | 39631291 | |
| 57845 | 39734807 | 39735665 | 139116 |
| 57846 | 39742037 | 39743441 | 139116 |
| 57847 | 39813796 | 39814494 | 139116 |
| 57848 | 39820537 | 39821602 | 139116 |
| 57849 | 39835192 | 39838603 | 252974, 139116 |
| 57850 | 39884229 | 39885117 | |
| 57851 | 39986004 | 39986781 | 173208 |
| 57852 | 40040671 | 40041240 | 180116 |
| 57853 | 40218148 | 40219113 | 180116, 151229 |
| 57854 | 40224410 | 40226838 | 180116, 151229 |
| 57855 | 40395808 | 40397071 | 151229 |
| 57856 | 40498751 | 40500210 | 151229 |
| 57857 | 40543665 | 40544132 | |
| 57858 | 40617588 | 40619606 | 225342, 188906 |
| 57859 | 42103131 | 42104038 | |
| 57860 | 42528786 | 42529433 | 151233 |
| 57861 | 42537517 | 42539363 | 151233 |
| 57862 | 42611499 | 42611849 | 015153 |
| 57863 | 42628551 | 42629667 | 015153 |
| 57864 | 42630757 | 42632806 | 134283, 015153 |
| 57865 | 42719111 | 42720800 | 139168, 134283 |
| 57866 | 42877691 | 42878345 | 139174 |
| 57867 | 44152125 | 44153616 | 198001, 129317 |
| 57868 | 44199085 | 44201189 | 151239 |
| 57869 | 44229269 | 44230777 | 139173 |
| 57870 | 44690179 | 44690956 | 139173 |
| 57871 | 45342236 | 45342895 | |
| 57872 | 45586011 | 45586499 | 134297 |
| 57873 | 45594023 | 45594810 | 257738, 134297 |
| 57874 | 45597429 | 45598076 | 134297 |
| 57875 | 45598562 | 45599093 | 134297 |
| 57876 | 45608598 | 45611900 | 177119, 134297 |
| 57877 | 45624878 | 45630209 | 177119 |
| 57878 | 45653534 | 45654799 | 177119 |
| 57879 | 45662454 | 45663540 | 177119 |
| 57880 | 45675984 | 45676720 | 177119 |
| 57881 | 45677325 | 45678794 | 177119 |
| 57882 | 45689910 | 45690419 | 177119 |
| 57883 | 45722912 | 45723469 | 177119 |
| 57884 | 45736846 | 45737556 | 177119 |
| 57885 | 45800977 | 45802645 | 177119 |
| 57886 | 45809064 | 45810197 | 177119 |
| 57887 | 45815354 | 45815875 | 177119 |
| 57888 | 46041456 | 46042461 | |
| 57889 | 46054023 | 46054541 | |
| 57890 | 46102009 | 46103394 | |
| 57891 | 46119401 | 46125309 | 273015, 189079 |
| 57892 | 46360159 | 46360834 | 139218 |
| 57893 | 46382875 | 46386528 | 139218 |
| 57894 | 46573434 | 46573819 | |
| 57895 | 46660701 | 46664051 | 111371 |
| 57896 | 46749646 | 46752788 | 134294 |
| 57897 | 46758417 | 46768980 | 258096, 134294 |
| 57898 | 46775857 | 46782168 | 257496, 257261 |
| 57899 | 46782593 | 46783393 | 257261 |
| 57900 | 46804354 | 46804751 | 257261 |
| 57901 | 46823410 | 46825191 | 257261 |
| 57902 | 46825206 | 46826506 | 257261 |
| 57903 | 46835453 | 46840824 | 257261 |
| 57904 | 46849470 | 46850378 | 257261 |
| 57905 | 46860938 | 46863685 | |
| 57906 | 46865805 | 46868444 | |
| 57907 | 46877059 | 46878218 | |
| 57908 | 46884885 | 46889256 | |
| 57909 | 46947040 | 46952279 | 272369 |
| 57910 | 46955969 | 46957146 | 272369 |
| 57911 | 46970748 | 46971877 | 272369 |
| 57912 | 47010326 | 47011430 | 272369 |
| 57913 | 47058030 | 47059218 | |
| 57914 | 47164112 | 47165826 | 139209 |
| 57915 | 47167709 | 47168384 | 139209 |
| 57916 | 47171377 | 47171879 | 139209 |
| 57917 | 47193955 | 47194564 | 139209 |
| 57918 | 47200652 | 47203910 | 139209 |
| 57919 | 47219261 | 47220204 | 139209 |
| 57920 | 47233610 | 47234271 | |
| 57921 | 47315135 | 47316372 | |
| 57922 | 47331514 | 47332780 | |
| 57923 | 47336382 | 47336965 | |
| 57924 | 47351456 | 47353803 | |
| 57925 | 47357512 | 47359532 | |
| 57926 | 47398290 | 47399856 | |
| 57927 | 47400241 | 47401499 | |
| 57928 | 47411560 | 47412130 | |
| 57929 | 47417424 | 47418151 | |
| 57930 | 47606012 | 47606743 | 247774, 179715 |
| 57931 | 47614429 | 47615842 | 179715 |
| 57932 | 47616289 | 47618338 | 179715 |
| 57933 | 47622536 | 47623049 | 179715 |
| 57934 | 47641106 | 47641648 | 257925 |
| 57935 | 47670253 | 47671211 | 257925 |
| 57936 | 47704710 | 47705250 | |
| 57937 | 47706479 | 47707269 | |
| 57938 | 47710268 | 47711470 | |
| 57939 | 47740085 | 47741168 | |
| 57940 | 47770431 | 47773176 | |
| 57941 | 48099067 | 48101176 | 257433, 005175 |
| 57942 | 48108965 | 48109825 | 257433, 111405 |
| 57943 | 48152075 | 48153697 | 079337, 211584 |
| 57944 | 48166611 | 48168213 | 211584 |
| 57945 | 48212801 | 48215496 | 061273 |
| 57946 | 48245878 | 48246377 | 111424 |
| 57947 | 48298291 | 48299478 | 111424 |
| 57948 | 48498710 | 48500885 | 152556, 079387 |
| 57949 | 48743796 | 48745620 | 257735, 167528 |
| 57950 | 49075107 | 49076515 | 139620 |
| 57951 | 49109358 | 49111588 | 129315 |
| 57952 | 49181637 | 49183897 | 257660, 174233 |
| 57953 | 49207870 | 49209722 | 167535 |
| 57954 | 49245131 | 49246966 | 174243 |
| 57955 | 49257242 | 49261784 | 172602 |
| 57956 | 49272330 | 49272829 | |
| 57957 | 49275548 | 49278474 | |
| 57958 | 49318159 | 49319885 | 255863, 139537, 134285, |
| | | | 272822 |
| 57959 | 49349934 | 49351654 | 134287, 272822 |
| 57960 | 49390589 | 49390951 | 181418 |
| 57961 | 49411318 | 49413797 | 167548, 257913, 181929 |
| 57962 | 49452673 | 49455481 | 167548 |
| 57963 | 49503467 | 49505084 | 139636 |
| 57964 | 49523433 | 49525742 | 123416, 258017 |
| 57965 | 49657855 | 49660127 | 258232, 258101, 167553 |
| 57966 | 49660856 | 49663330 | 258232, 167553 |
| 57967 | 49716414 | 49717107 | 135451, 258334 |
| 57968 | 49738504 | 49742770 | 178401 |
| 57969 | 49759878 | 49761861 | 123352 |
| 57970 | 49875863 | 49877026 | 123352 |
| 57971 | 49908882 | 49909513 | 123352 |
| 57972 | 49960908 | 49962843 | 110844, 187778 |
| 57973 | 49976592 | 49977103 | 135436, 110844 |
| 57974 | 50016008 | 50017830 | 110844 |
| 57975 | 50124274 | 50124950 | 139644 |
| 57976 | 50134759 | 50137358 | 139644 |
| 57977 | 50143500 | 50145887 | 139644 |
| 57978 | 50194153 | 50195327 | 167566 |
| 57979 | 50221376 | 50223163 | 258057, 167566 |
| 57980 | 50235909 | 50238143 | 186666 |
| 57981 | 50356673 | 50357354 | 257588, 161798 |
| 57982 | 50410812 | 50411459 | 161800 |
| 57983 | 50418755 | 50419980 | 161800 |
| 57984 | 50450849 | 50451600 | 110881 |
| 57985 | 50468847 | 50470030 | 110881 |
| 57986 | 50477966 | 50479809 | 066117 |
| 57987 | 50496279 | 50496975 | |
| 57988 | 50497578 | 50498142 | 167588 |
| 57989 | 50502958 | 50507079 | 178449, 272368, 167588 |
| 57990 | 50560293 | 50561931 | 139624 |
| 57991 | 50618096 | 50618526 | 050405, 257256 |
| 57992 | 50640125 | 50641550 | 050405 |
| 57993 | 50642599 | 50643747 | 050405 |
| 57994 | 50664900 | 50666297 | 050405 |
| 57995 | 50676701 | 50678191 | 050405 |
| 57996 | 50697664 | 50698804 | 203426, 203427 |
| 57997 | 50705355 | 50706503 | 196082, 203425 |
| 57998 | 50719544 | 50721261 | 185958 |
| 57999 | 50747728 | 50749170 | 185958 |
| 58000 | 50783247 | 50785044 | 185958 |
| 58001 | 50793824 | 50797572 | 161813 |
| 58002 | 50898348 | 50901328 | 066084 |
| 58003 | 50919822 | 50921492 | 066084 |
| 58004 | 50924983 | 50929141 | 066084 |
| 58005 | 50941638 | 50944692 | 066084 |
| 58006 | 50950604 | 50951647 | 066084 |
| 58007 | 50966053 | 50966403 | 066084 |
| 58008 | 51000392 | 51000958 | 066084 |
| 58009 | 51007894 | 51008809 | 066084 |
| 58010 | 51052716 | 51053979 | 066084 |
| 58011 | 51156778 | 51159478 | 123268 |
| 58012 | 51179413 | 51181681 | 123268 |
| 58013 | 51316253 | 51324257 | 185432 |
| 58014 | 51324458 | 51325371 | 185432 |
| 58015 | 51325475 | 51329588 | 185432 |
| 58016 | 51374195 | 51375055 | 110911 |
| 58017 | 51378251 | 51380067 | 110911 |
| 58018 | 51417392 | 51420570 | 110911 |
| 58019 | 51441043 | 51443218 | 050426 |
| 58020 | 51459273 | 51459863 | 110925 |
| 58021 | 51476567 | 51477743 | 110925 |
| 58022 | 51565889 | 51567604 | 135457 |
| 58023 | 51610711 | 51613113 | 184271 |
| 58024 | 51632304 | 51633636 | 183283 |
| 58025 | 51634690 | 51635196 | 183283 |
| 58026 | 51663108 | 51665668 | 183283, 170545 |
| 58027 | 51764577 | 51766852 | 139629 |
| 58028 | 51984011 | 51985431 | 196876 |
| 58029 | 52014883 | 52015422 | 196876 |
| 58030 | 52019464 | 52020430 | 196876 |
| 58031 | 52056167 | 52057997 | 196876 |
| 58032 | 52065844 | 52066560 | 196876 |
| 58033 | 52076770 | 52078294 | 196876 |
| 58034 | 52152951 | 52154051 | 196876 |
| 58035 | 52166636 | 52168584 | 196876 |
| 58036 | 52171211 | 52172297 | 196876 |
| 58037 | 52207342 | 52209305 | |
| 58038 | 52212654 | 52213151 | 261586 |
| 58039 | 52241582 | 52243745 | 259887 |
| 58040 | 52249553 | 52250441 | |
| 58041 | 52257103 | 52258067 | |
| 58042 | 52277281 | 52281076 | |
| 58043 | 52314689 | 52317507 | 139567 |
| 58044 | 52344852 | 52346966 | 135503 |
| 58045 | 52348141 | 52349342 | 135503 |
| 58046 | 52365223 | 52368389 | 135503 |
| 58047 | 52369287 | 52371558 | 135503 |
| 58048 | 52416626 | 52417903 | 123358 |
| 58049 | 52419129 | 52420175 | 123358 |
| 58050 | 52429977 | 52431624 | 123358 |
| 58051 | 52443854 | 52445644 | 123358 |
| 58052 | 52463177 | 52464731 | 123395 |
| 58053 | 52487035 | 52487704 | 257989, 257542 |
| 58054 | 52539515 | 52543363 | |
| 58055 | 52557483 | 52558254 | |
| 58056 | 52561880 | 52562490 | |
| 58057 | 52584175 | 52587634 | 167767 |
| 58058 | 52595892 | 52598027 | |
| 58059 | 52609126 | 52610300 | 258279 |
| 58060 | 52624263 | 52625211 | |
| 58061 | 52637279 | 52638829 | 135480 |
| 58062 | 52640730 | 52644311 | 135477, 170442, 257671, |
| | | | 135480 |
| 58063 | 52671152 | 52676084 | 257830, 170442 |
| 58064 | 52721133 | 52721771 | |
| 58065 | 52729164 | 52730105 | |
| 58066 | 52836146 | 52836885 | |
| 58067 | 52976736 | 52977416 | |
| 58068 | 53273128 | 53274298 | |
| 58069 | 53277831 | 53279349 | 241146 |
| 58070 | 53288824 | 53289816 | |
| 58071 | 53296728 | 53299676 | 170421 |
| 58072 | 53300850 | 53302624 | 170421 |
| 58073 | 53318269 | 53322009 | 170421 |
| 58074 | 53338810 | 53344634 | 111057, 170421 |
| 58075 | 53345007 | 53345895 | 265039, 111057 |
| 58076 | 53386330 | 53387791 | |
| 58077 | 53399011 | 53401810 | 063046 |
| 58078 | 53439790 | 53446722 | 111077, 257337 |
| 58079 | 53446730 | 53448483 | 257337, 111077 |
| 58080 | 53455089 | 53455923 | 111077 |
| 58081 | 53473039 | 53474065 | 167778 |
| 58082 | 53491230 | 53491846 | 167779 |
| 58083 | 53493025 | 53493721 | 167779 |
| 58084 | 53538937 | 53539959 | |
| 58085 | 53551585 | 53552133 | 139631 |
| 58086 | 53563104 | 53564604 | 139631 |
| 58087 | 53565242 | 53565804 | 139631 |
| 58088 | 53568431 | 53569707 | 139631 |
| 58089 | 53573317 | 53575483 | 139651, 139631 |
| 58090 | 53591026 | 53591942 | 139626 |
| 58091 | 53614488 | 53616128 | 172819 |
| 58092 | 53644988 | 53646814 | 182544 |
| 58093 | 53692932 | 53694718 | 139637, 257605, 123349 |
| 58094 | 53714810 | 53715782 | 094914 |
| 58095 | 53717961 | 53719897 | 094914 |
| 58096 | 53738454 | 53739363 | 170374 |
| 58097 | 53764019 | 53766791 | |
| 58098 | 53772196 | 53776053 | 185591 |
| 58099 | 53815133 | 53815850 | |
| 58100 | 53820598 | 53823207 | 135409 |
| 58101 | 53834454 | 53836268 | 257379, 197111, 205352 |
| 58102 | 53845271 | 53847307 | 257379, 197111 |
| 58103 | 53886418 | 53887380 | 139625 |
| 58104 | 53893647 | 53895727 | 139546, 270175, 139625 |
| 58105 | 53931764 | 53932520 | 267281, 170653 |
| 58106 | 53955302 | 53956354 | 267281, 170653 |
| 58107 | 54018997 | 54020667 | 267281, 170653 |
| 58108 | 54052224 | 54053806 | 135390 |
| 58109 | 54068750 | 54071253 | 135390 |
| 58110 | 54119527 | 54122253 | 012822 |
| 58111 | 54201695 | 54202515 | |
| 58112 | 54218909 | 54219622 | |
| 58113 | 54261296 | 54261759 | |
| 58114 | 54582218 | 54583233 | 123415 |
| 58115 | 54652369 | 54654048 | 094916 |
| 58116 | 54672627 | 54675882 | 135486, 094916, 257596, |
| | | | 258344 |
| 58117 | 54717995 | 54719944 | 111481, 258344 |
| 58118 | 54746651 | 54747905 | 258086, 258137 |
| 58119 | 54752048 | 54755031 | 258086, 258137 |
| 58120 | 54772650 | 54773055 | 258086, 258137, 161642 |
| 58121 | 54773354 | 54773919 | 258086, 258137, 161642 |
| 58122 | 54804536 | 54809984 | 258086, 161638, 258137 |
| 58123 | 54810308 | 54814182 | 161638, 258086, 258137 |
| 58124 | 54980960 | 54981557 | 135447 |
| 58125 | 54981840 | 54982779 | 135447 |
| 58126 | 55078539 | 55079510 | 257634 |
| 58127 | 55082166 | 55082883 | |
| 58128 | 55285704 | 55286421 | |
| 58129 | 55326643 | 55330313 | |
| 58130 | 55644687 | 55645174 | |
| 58131 | 56013295 | 56014159 | |
| 58132 | 56039887 | 56040613 | 272837, 258921 |
| 58133 | 56074252 | 56077226 | 170439 |
| 58134 | 56103171 | 56103911 | 135424 |
| 58135 | 56105339 | 56108075 | 135424 |
| 58136 | 56108916 | 56112852 | 135441, 258311, 135424 |
| 58137 | 56112999 | 56115511 | 135437, 135441, 258311 |
| 58138 | 56120647 | 56124199 | 258056, 135404 |
| 58139 | 56210524 | 56212788 | 123353, 205323, 257390 |
| 58140 | 56223089 | 56224722 | 182796, 135392 |
| 58141 | 56240877 | 56242009 | |
| 58142 | 56302311 | 56303479 | 170473 |
| 58143 | 56312641 | 56313289 | 170473 |
| 58144 | 56320084 | 56322426 | 065357, 170473 |
| 58145 | 56333779 | 56334471 | 065357 |
| 58146 | 56359799 | 56361123 | 123374, 258554, 185664 |
| 58147 | 56365891 | 56366306 | 123374, 185664 |
| 58148 | 56366321 | 56369162 | 111540, 123374, 185664 |
| 58149 | 56389808 | 56391759 | 139531 |
| 58150 | 56400616 | 56401877 | 123411 |
| 58151 | 56434816 | 56436947 | 197728, 257449 |
| 58152 | 56472606 | 56476830 | 065361 |
| 58153 | 56497636 | 56499757 | 170515, 257553, 257411 |
| 58154 | 56509273 | 56511430 | 229117 |
| 58155 | 56511595 | 56514155 | 135482, 258345, 139641, |
| | | | 258317, 229117 |
| 58156 | 56514754 | 56515653 | 135482, 139641, 258317 |
| 58157 | 56519765 | 56520421 | 139641, 258317 |
| 58158 | 56521491 | 56523444 | 258317, 139641 |
| 58159 | 56544339 | 56544864 | 257809 |
| 58160 | 56545339 | 56546704 | 196465, 257809 |
| 58161 | 56550981 | 56553832 | 092841, 257809, 196465 |
| 58162 | 56582388 | 56584857 | 258199, 139613 |
| 58163 | 56614675 | 56616775 | 139579, 181852 |
| 58164 | 56617715 | 56618945 | 139579 |
| 58165 | 56623634 | 56624883 | 139540, 139579 |
| 58166 | 56651411 | 56652997 | 139645 |
| 58167 | 56655453 | 56656089 | |
| 58168 | 56660048 | 56661881 | 258260, 135469 |
| 58169 | 56674411 | 56675158 | 062485 |
| 58170 | 56685145 | 56685806 | 144785, 062485 |
| 58171 | 56692955 | 56695394 | 257303, 062485, 144785 |
| 58172 | 56695511 | 56696663 | 144785, 257303 |
| 58173 | 56708431 | 56710981 | 135473, 144785, 257727, |
| | | | 257303 |
| 58174 | 56726391 | 56728968 | 135473 |
| 58175 | 56753461 | 56755955 | 175336, 170581 |
| 58176 | 56756126 | 56756924 | 175336 |
| 58177 | 56857949 | 56858474 | 135517 |
| 58178 | 56861657 | 56863701 | 176422, 135517 |
| 58179 | 56870673 | 56871476 | 135423 |
| 58180 | 56881138 | 56882472 | 135423 |
| 58181 | 56920156 | 56921308 | 076067 |
| 58182 | 57022624 | 57024614 | 076108 |
| 58183 | 57028387 | 57031299 | 076108 |
| 58184 | 57038787 | 57040687 | 207031, 110955 |
| 58185 | 57080243 | 57083326 | 110958 |
| 58186 | 57117585 | 57120162 | 196531 |
| 58187 | 57145556 | 57146444 | 025423, 198056 |
| 58188 | 57152522 | 57154073 | 025423 |
| 58189 | 57156762 | 57158975 | 025423 |
| 58190 | 57162133 | 57162867 | 025423 |
| 58191 | 57195217 | 57196703 | |
| 58192 | 57197319 | 57197780 | |
| 58193 | 57233570 | 57235633 | 258679 |
| 58194 | 57270335 | 57272538 | |
| 58195 | 57277335 | 57279415 | |
| 58196 | 57291512 | 57292331 | |
| 58197 | 57347929 | 57351951 | 139547 |
| 58198 | 57384838 | 57385705 | |
| 58199 | 57395024 | 57396003 | 166860 |
| 58200 | 57399189 | 57400732 | 166860 |
| 58201 | 57402530 | 57403164 | |
| 58202 | 57480304 | 57484050 | 166886, 166881 |
| 58203 | 57495508 | 57496917 | 166888 |
| 58204 | 57503893 | 57506506 | 166888 |
| 58205 | 57520323 | 57525617 | 123384, 166888 |
| 58206 | 57525655 | 57528297 | 166888, 123384 |
| 58207 | 57531398 | 57533387 | 123384 |
| 58208 | 57542282 | 57544184 | 123384 |
| 58209 | 57622469 | 57625420 | 182199 |
| 58210 | 57632405 | 57634548 | 185633 |
| 58211 | 57638758 | 57639682 | 185482 |
| 58212 | 57652542 | 57656296 | 179912, 258830 |
| 58213 | 57672415 | 57675266 | 179912, 258830 |
| 58214 | 57761973 | 57763078 | 179912 |
| 58215 | 57822937 | 57825864 | 258001, 179912 |
| 58216 | 57827487 | 57829809 | 175189, 258001 |
| 58217 | 57832356 | 57834125 | 175189 |
| 58218 | 57843832 | 57847187 | 139269, 175189 |
| 58219 | 57847761 | 57856876 | 111087, 139269 |
| 58220 | 57881215 | 57883040 | 123329, 166986 |
| 58221 | 57912563 | 57917640 | 166987, 208028, 175197 |
| 58222 | 57939653 | 57941340 | 175203 |
| 58223 | 57984247 | 57985662 | 166908 |
| 58224 | 58026130 | 58027144 | 135454 |
| 58225 | 58138009 | 58139691 | 135452 |
| 58226 | 58144936 | 58146567 | 135446 |
| 58227 | 58165296 | 58167273 | 257921, 037897, 123427 |
| 58228 | 58176253 | 58177451 | 123297, 123427, 257921 |
| 58229 | 58187615 | 58188697 | 123297 |
| 58230 | 58238316 | 58241172 | 175215 |
| 58231 | 58258546 | 58259891 | |
| 58232 | 58289546 | 58291175 | 245651 |
| 58233 | 58298870 | 58299589 | |
| 58234 | 58334483 | 58335899 | 166896 |
| 58235 | 58703725 | 58705572 | |
| 58236 | 59157563 | 59160662 | 258231, 257259 |
| 58237 | 59270836 | 59271529 | 139263 |
| 58238 | 59280793 | 59282345 | 139263 |
| 58239 | 59310765 | 59311682 | 139263 |
| 58240 | 59312677 | 59314744 | 257443, 139263 |
| 58241 | 59318465 | 59319527 | 257443 |
| 58242 | 59434863 | 59435797 | 257443 |
| 58243 | 59448573 | 59450180 | 257443 |
| 58244 | 59989289 | 59991814 | 118596 |
| 58245 | 60044343 | 60046699 | 118596 |
| 58246 | 60091916 | 60092993 | 118596 |
| 58247 | 60093352 | 60094163 | 118596 |
| 58248 | 60108460 | 60109858 | 118596 |
| 58249 | 60117943 | 60118573 | 118596 |
| 58250 | 60252262 | 60252816 | |
| 58251 | 60844723 | 60845947 | |
| 58252 | 61239403 | 61240193 | |
| 58253 | 61243339 | 61244157 | |
| 58254 | 61676552 | 61677449 | |
| 58255 | 61695003 | 61696492 | |
| 58256 | 62287882 | 62288543 | 198673 |
| 58257 | 62296144 | 62296635 | 198673 |
| 58258 | 62308875 | 62309832 | 198673 |
| 58259 | 62652687 | 62655155 | 135655, 198673 |
| 58260 | 62685553 | 62686065 | 135655 |
| 58261 | 62859962 | 62861822 | 061987 |
| 58262 | 62926912 | 62928020 | 061987 |
| 58263 | 62995505 | 62998303 | 257354, 199179, 221949 |
| 58264 | 63025393 | 63026469 | |
| 58265 | 63118689 | 63119080 | 111110 |
| 58266 | 63154250 | 63155126 | 111110 |
| 58267 | 63240916 | 63243275 | 111110 |
| 58268 | 63259968 | 63261308 | 111110 |
| 58269 | 63327261 | 63329250 | 111110 |
| 58270 | 63543283 | 63545230 | 166148 |
| 58271 | 63545593 | 63546356 | |
| 58272 | 63600260 | 63601094 | |
| 58273 | 64173321 | 64174733 | 118600, 249753 |
| 58274 | 64199532 | 64200380 | 118600 |
| 58275 | 64236933 | 64240553 | 196935 |
| 58276 | 64255635 | 64257699 | 196935 |
| 58277 | 64283018 | 64284730 | 196935 |
| 58278 | 64294403 | 64296316 | 196935 |
| 58279 | 64310247 | 64313097 | 196935 |
| 58280 | 64349024 | 64350741 | 196935 |
| 58281 | 64481379 | 64484073 | 255886, 196935 |
| 58282 | 64570737 | 64577180 | |
| 58283 | 64614767 | 64616809 | 243024, 174206 |
| 58284 | 64797259 | 64799679 | 184575 |
| 58285 | 64844956 | 64847685 | 183735 |
| 58286 | 64855341 | 64856131 | 183735 |
| 58287 | 65003432 | 65006095 | 153179 |
| 58288 | 65012812 | 65013352 | 153179 |
| 58289 | 65018467 | 65021790 | 153179 |
| 58290 | 65027229 | 65029071 | 153179 |
| 58291 | 65047176 | 65051174 | 256314, 153179 |
| 58292 | 65063122 | 65063950 | 153179 |
| 58293 | 65073210 | 65074808 | 153179 |
| 58294 | 65140444 | 65141445 | 135677 |
| 58295 | 65152368 | 65154316 | 215159, 135677 |
| 58296 | 65174059 | 65174950 | 111490 |
| 58297 | 65189771 | 65191506 | 111490 |
| 58298 | 65204389 | 65205184 | 111490 |
| 58299 | 65562619 | 65565245 | 174106 |
| 58300 | 65575819 | 65576573 | 174106 |
| 58301 | 65728589 | 65729769 | 174099 |
| 58302 | 65803726 | 65805067 | 174099 |
| 58303 | 65889012 | 65889403 | 250748 |
| 58304 | 65903730 | 65904916 | 250748 |
| 58305 | 66442808 | 66443384 | |
| 58306 | 66523706 | 66525346 | 239335, 139233, 228144, |
| | | | 155957 |
| 58307 | 66538765 | 66539360 | 228144, 155957 |
| 58308 | 66562517 | 66564401 | 228144, 155957 |
| 58309 | 66695679 | 66696948 | 127311 |
| 58310 | 67661750 | 67664572 | 111530 |
| 58311 | 67668828 | 67669877 | 111530 |
| 58312 | 67804085 | 67805008 | |
| 58313 | 67828359 | 67829241 | |
| 58314 | 67986474 | 67987133 | |
| 58315 | 68041041 | 68044458 | 127334 |
| 58316 | 68104271 | 68104939 | 255970 |
| 58317 | 68110482 | 68111128 | 255970 |
| 58318 | 68140900 | 68143858 | |
| 58319 | 68221702 | 68222219 | |
| 58320 | 68726071 | 68726742 | 251301, 111554 |
| 58321 | 68758531 | 68759599 | 251301 |
| 58322 | 68799052 | 68799598 | 251301 |
| 58323 | 68799771 | 68800521 | 251301 |
| 58324 | 68803709 | 68804326 | 251301 |
| 58325 | 68833696 | 68834355 | 251301 |
| 58326 | 68924718 | 68925258 | |
| 58327 | 68925886 | 68927304 | |
| 58328 | 69003417 | 69006918 | 127314 |
| 58329 | 69079471 | 69081744 | 111581, 247363, 241825 |
| 58330 | 69139234 | 69140994 | 175782 |
| 58331 | 69178722 | 69183639 | 175782 |
| 58332 | 69198150 | 69204039 | 256678, 135679 |
| 58333 | 69229194 | 69229807 | 135679 |
| 58334 | 69244010 | 69245039 | 135678 |
| 58335 | 69291125 | 69293984 | 135678 |
| 58336 | 69325679 | 69327614 | 135678 |
| 58337 | 69332490 | 69333797 | 135678 |
| 58338 | 69366151 | 69366954 | |
| 58339 | 69369695 | 69371405 | |
| 58340 | 69417383 | 69419616 | |
| 58341 | 69439895 | 69441056 | |
| 58342 | 69446128 | 69450033 | |
| 58343 | 69460197 | 69461582 | |
| 58344 | 69461598 | 69463247 | |
| 58345 | 69495164 | 69495893 | |
| 58346 | 69632869 | 69634715 | 111605 |
| 58347 | 69677920 | 69678500 | 257818 |
| 58348 | 69724367 | 69726322 | |
| 58349 | 69726588 | 69727212 | |
| 58350 | 69799201 | 69799697 | |
| 58351 | 69809472 | 69810678 | |
| 58352 | 69811226 | 69812271 | |
| 58353 | 69863716 | 69865426 | 166225 |
| 58354 | 69867820 | 69868324 | 166225 |
| 58355 | 69868958 | 69869652 | 166225 |
| 58356 | 69886900 | 69887389 | 166225 |
| 58357 | 69978840 | 69980224 | 166226 |
| 58358 | 70049246 | 70050128 | 127325 |
| 58359 | 70087865 | 70088519 | 127325 |
| 58360 | 70132195 | 70133947 | 127328, 247131 |
| 58361 | 70234287 | 70235334 | 166268, 258052 |
| 58362 | 70381307 | 70382142 | 257815 |
| 58363 | 70446669 | 70447319 | 257815 |
| 58364 | 70635734 | 70638508 | 111596, 257815 |
| 58365 | 71105523 | 71106079 | 153233 |
| 58366 | 71439712 | 71440381 | 257454 |
| 58367 | 71551545 | 71554316 | 127324 |
| 58368 | 71556257 | 71558269 | 127324 |
| 58369 | 71791152 | 71791913 | 127324 |
| 58370 | 71832681 | 71833170 | 127324 |
| 58371 | 71834351 | 71835230 | 139292, 127324 |
| 58372 | 71946736 | 71947400 | 139292 |
| 58373 | 72055836 | 72059026 | 173451, 133858 |
| 58374 | 72075868 | 72076805 | 258064 |
| 58375 | 72079151 | 72080507 | 139291, 258064 |
| 58376 | 72120135 | 72121053 | |
| 58377 | 72148169 | 72150296 | 080371 |
| 58378 | 72232765 | 72234864 | 121749 |
| 58379 | 72340990 | 72341927 | 139287 |
| 58380 | 72348253 | 72349408 | 139287 |
| 58381 | 72350813 | 72353360 | 139287 |
| 58382 | 72668767 | 72669269 | 072657 |
| 58383 | 72905188 | 72906099 | 072657 |
| 58384 | 73470460 | 73471674 | |
| 58385 | 73505171 | 73506875 | |
| 58386 | 73618732 | 73621731 | |
| 58387 | 73746489 | 73747039 | |
| 58388 | 73777336 | 73778487 | |
| 58389 | 73924600 | 73925921 | |
| 58390 | 74930939 | 74932734 | 257386, 253719 |
| 58391 | 75283259 | 75284363 | |
| 58392 | 75357091 | 75358516 | |
| 58393 | 75377634 | 75378024 | |
| 58394 | 75723580 | 75724583 | 180881 |
| 58395 | 75727940 | 75728573 | 173401, 180881 |
| 58396 | 75783681 | 75785963 | 180481, 180881 |
| 58397 | 75873062 | 75876519 | 139278 |
| 58398 | 75904501 | 75906045 | 111615 |
| 58399 | 76044351 | 76045534 | 258077 |
| 58400 | 76049545 | 76051454 | 258077 |
| 58401 | 76059618 | 76061257 | 258077 |
| 58402 | 76118435 | 76119659 | 258077 |
| 58403 | 76129544 | 76130237 | 258077 |
| 58404 | 76144391 | 76146239 | 258077 |
| 58405 | 76178180 | 76178837 | 258077 |
| 58406 | 76255576 | 76258424 | 258077 |
| 58407 | 76302621 | 76303465 | 258077 |
| 58408 | 76327639 | 76329116 | 258077 |
| 58409 | 76337204 | 76339794 | 258077 |
| 58410 | 76344947 | 76348384 | 258077 |
| 58411 | 76369723 | 76374141 | 258077 |
| 58412 | 76375991 | 76377742 | 258077 |
| 58413 | 76379809 | 76380644 | |
| 58414 | 76383940 | 76384732 | |
| 58415 | 76422278 | 76427512 | 257839, 257453, 139289 |
| 58416 | 76477083 | 76479563 | 187109 |
| 58417 | 76659820 | 76661304 | 257219 |
| 58418 | 76670171 | 76670994 | 257219 |
| 58419 | 76678925 | 76679591 | 257219 |
| 58420 | 76693072 | 76694465 | 257219 |
| 58421 | 76741087 | 76742999 | 179941 |
| 58422 | 76849315 | 76849973 | 091039 |
| 58423 | 76952485 | 76954681 | 091039 |
| 58424 | 76977081 | 76978228 | 257526 |
| 58425 | 77157125 | 77159013 | 186908 |
| 58426 | 77271845 | 77273606 | 257910, 175183 |
| 58427 | 77459351 | 77460197 | 165891 |
| 58428 | 78235983 | 78236852 | 067798 |
| 58429 | 78287115 | 78288751 | 067798 |
| 58430 | 78333067 | 78334820 | 067798 |
| 58431 | 78683872 | 78685780 | |
| 58432 | 78685996 | 78688542 | |
| 58433 | 79160912 | 79161672 | |
| 58434 | 79813600 | 79815523 | 067715, 257894 |
| 58435 | 79816719 | 79819323 | 067715, 257894 |
| 58436 | 79939035 | 79944600 | 257474 |
| 58437 | 79948832 | 79949931 | |
| 58438 | 79952760 | 79955035 | 257956 |
| 58439 | 79959586 | 79961176 | |
| 58440 | 80028746 | 80029577 | 177425 |
| 58441 | 80078763 | 80087042 | 258048, 177425 |
| 58442 | 80327550 | 80330035 | 257557, 058272 |
| 58443 | 80580347 | 80580950 | |
| 58444 | 80866586 | 80867433 | 139304 |
| 58445 | 81090643 | 81091758 | |
| 58446 | 81095786 | 81098759 | |
| 58447 | 81170544 | 81173374 | |
| 58448 | 81231073 | 81231719 | 111052 |
| 58449 | 81231774 | 81233104 | 111052 |
| 58450 | 81288421 | 81290356 | 111052 |
| 58451 | 81330032 | 81333041 | 111058, 111052 |
| 58452 | 81471031 | 81474255 | 111058 |
| 58453 | 81479658 | 81480565 | 111058 |
| 58454 | 81514332 | 81515312 | 111058, 258026 |
| 58455 | 81534735 | 81535391 | 111058 |
| 58456 | 81536679 | 81537391 | 111058 |
| 58457 | 81540473 | 81541078 | 111058 |
| 58458 | 81602870 | 81604215 | 111058 |
| 58459 | 82751162 | 82753148 | 127720, 133773 |
| 58460 | 82961473 | 82962264 | |
| 58461 | 83002212 | 83003647 | |
| 58462 | 83044230 | 83044770 | |
| 58463 | 83079363 | 83082121 | 179104 |
| 58464 | 83869718 | 83871591 | |
| 58465 | 87105334 | 87107289 | 258185, 182050 |
| 58466 | 87833642 | 87834423 | |
| 58467 | 87993130 | 87993742 | |
| 58468 | 88055451 | 88056202 | |
| 58469 | 88080402 | 88081713 | |
| 58470 | 88122592 | 88123463 | |
| 58471 | 88149152 | 88150441 | |
| 58472 | 88172520 | 88174422 | |
| 58473 | 88195322 | 88197163 | 257912 |
| 58474 | 88205512 | 88210760 | 257940 |
| 58475 | 88212035 | 88212861 | |
| 58476 | 88214085 | 88215966 | 258179 |
| 58477 | 88220711 | 88222451 | |
| 58478 | 88428737 | 88430485 | 133641 |
| 58479 | 88477007 | 88477877 | 198707 |
| 58480 | 88534986 | 88536913 | 139324, 198707 |
| 58481 | 88641049 | 88641477 | |
| 58482 | 88699163 | 88699879 | |
| 58483 | 88813979 | 88814765 | |
| 58484 | 88973407 | 88974624 | 049130 |
| 58485 | 89140975 | 89141723 | |
| 58486 | 89145690 | 89146586 | |
| 58487 | 89169491 | 89170232 | |
| 58488 | 89319620 | 89320451 | |
| 58489 | 89466183 | 89467881 | 257156 |
| 58490 | 89550575 | 89551946 | 257156 |
| 58491 | 89553704 | 89557931 | 257156 |
| 58492 | 89573740 | 89574210 | 257156 |
| 58493 | 89736651 | 89739188 | |
| 58494 | 89743301 | 89750464 | 139318 |
| 58495 | 89750958 | 89751786 | |
| 58496 | 89766333 | 89770004 | |
| 58497 | 89772666 | 89773732 | |
| 58498 | 89776318 | 89779106 | |
| 58499 | 89779525 | 89780807 | |
| 58500 | 89782671 | 89785922 | |
| 58501 | 89844737 | 89845117 | 139323 |
| 58502 | 89917798 | 89920339 | 270344, 259075, 257594, |
| | | | 139323 |
| 58503 | 90100808 | 90104318 | 271614, 070961 |
| 58504 | 91195522 | 91196107 | |
| 58505 | 91245461 | 91246461 | |
| 58506 | 92171420 | 92173183 | |
| 58507 | 92210864 | 92213283 | |
| 58508 | 92320487 | 92321147 | |
| 58509 | 92428353 | 92429422 | 257242 |
| 58510 | 92456946 | 92460243 | 257242 |
| 58511 | 92463334 | 92465655 | 257242 |
| 58512 | 92529668 | 92532163 | 257242 |
| 58513 | 92536882 | 92540705 | 245904, 133639 |
| 58514 | 92582265 | 92583039 | 245904 |
| 58515 | 92619902 | 92620595 | |
| 58516 | 92833074 | 92833839 | 266923 |
| 58517 | 92895689 | 92901021 | |
| 58518 | 92909813 | 92910626 | |
| 58519 | 92923140 | 92925668 | 258262 |
| 58520 | 92932414 | 92934401 | |
| 58521 | 92939595 | 92942522 | |
| 58522 | 92943865 | 92948669 | |
| 58523 | 92954024 | 92956603 | |
| 58524 | 92961856 | 92969741 | |
| 58525 | 92986150 | 92993014 | |
| 58526 | 92996165 | 92999040 | |
| 58527 | 93017880 | 93019096 | |
| 58528 | 93096479 | 93097586 | 214215 |
| 58529 | 93292380 | 93294844 | 102189 |
| 58530 | 93320957 | 93324516 | 102189 |
| 58531 | 93339483 | 93340174 | |
| 58532 | 93364135 | 93367074 | |
| 58533 | 93367188 | 93368440 | |
| 58534 | 93409552 | 93410350 | 257345, 257322 |
| 58535 | 93481060 | 93481804 | 257322 |
| 58536 | 93515932 | 93516956 | 257322 |
| 58537 | 93520876 | 93522137 | 257322 |
| 58538 | 93528230 | 93529679 | 257322 |
| 58539 | 93591148 | 93592366 | 257322 |
| 58540 | 93637819 | 93638449 | |
| 58541 | 93707802 | 93708931 | 257512 |
| 58542 | 93770759 | 93774136 | 173598, 257252 |
| 58543 | 93834525 | 93836731 | 177889 |
| 58544 | 93860754 | 93862249 | 198015 |
| 58545 | 93878106 | 93878944 | 198015 |
| 58546 | 93920178 | 93921013 | |
| 58547 | 93935443 | 93936035 | |
| 58548 | 93957237 | 93958749 | 246985 |
| 58549 | 93963180 | 93968079 | 120833, 246985 |
| 58550 | 94017803 | 94020173 | |
| 58551 | 94056873 | 94057770 | |
| 58552 | 94070294 | 94074123 | 169372 |
| 58553 | 94075497 | 94077936 | 169372 |
| 58554 | 94094676 | 94096955 | 169372 |
| 58555 | 94099846 | 94102803 | 258274, 169372 |
| 58556 | 94120866 | 94122126 | 169372, 258274 |
| 58557 | 94133296 | 94137076 | 169372 |
| 58558 | 94152768 | 94154288 | 169372 |
| 58559 | 94159856 | 94160653 | 169372 |
| 58560 | 94177383 | 94180830 | 169372 |
| 58561 | 94207398 | 94208704 | 169372 |
| 58562 | 94494949 | 94496633 | |
| 58563 | 94545062 | 94545955 | 136040 |
| 58564 | 94546000 | 94546923 | 136040 |
| 58565 | 94576701 | 94578059 | 136040, 258035 |
| 58566 | 94593855 | 94595436 | 136040 |
| 58567 | 94670279 | 94671569 | 258365, 258172, 136040 |
| 58568 | 94852917 | 94854720 | 173588 |
| 58569 | 94894295 | 94895149 | |
| 58570 | 94928161 | 94929692 | |
| 58571 | 94965171 | 94965805 | 057704 |
| 58572 | 94980366 | 94981011 | 057704 |
| 58573 | 95008741 | 95010534 | 057704 |
| 58574 | 95014715 | 95016767 | 057704 |
| 58575 | 95037312 | 95038751 | 057704 |
| 58576 | 95042381 | 95044600 | 057704 |
| 58577 | 95083933 | 95084599 | |
| 58578 | 95230502 | 95231390 | |
| 58579 | 95396563 | 95397995 | 184752 |
| 58580 | 95466070 | 95467706 | 120798 |
| 58581 | 95479253 | 95479930 | 180263 |
| 58582 | 95490337 | 95492623 | 180263 |
| 58583 | 95508105 | 95513649 | 180263 |
| 58584 | 95563029 | 95563534 | 180263 |
| 58585 | 95592546 | 95593578 | 180263 |
| 58586 | 95610231 | 95613085 | 028203, 180263 |
| 58587 | 95633028 | 95633484 | 028203 |
| 58588 | 95711722 | 95712808 | |
| 58589 | 95790071 | 95791125 | 257583 |
| 58590 | 95839559 | 95841046 | |
| 58591 | 95866693 | 95868917 | 111142 |
| 58592 | 95998794 | 95999289 | |
| 58593 | 96001703 | 96003081 | |
| 58594 | 96005229 | 96006201 | |
| 58595 | 96017151 | 96017802 | |
| 58596 | 96026116 | 96029500 | |
| 58597 | 96046974 | 96048418 | 257150 |
| 58598 | 96155693 | 96156315 | 074527 |
| 58599 | 96182317 | 96185621 | 074527 |
| 58600 | 96189884 | 96191000 | 258343 |
| 58601 | 96195346 | 96201421 | 258292, 258343 |
| 58602 | 96222794 | 96223591 | 258343 |
| 58603 | 96231799 | 96232335 | 258343 |
| 58604 | 96252429 | 96253842 | 139343, 258343 |
| 58605 | 96334252 | 96335015 | 165972 |
| 58606 | 96335735 | 96338196 | 139344, 165972 |
| 58607 | 96359883 | 96361054 | 139344 |
| 58608 | 96369954 | 96370910 | 084110 |
| 58609 | 96388880 | 96390569 | 257878, 084110 |
| 58610 | 96391510 | 96392894 | 257878 |
| 58611 | 96428596 | 96430211 | 111144 |
| 58612 | 96587436 | 96590055 | 111145 |
| 58613 | 96591200 | 96593764 | 111145 |
| 58614 | 96619803 | 96620415 | 111145 |
| 58615 | 96622856 | 96623420 | 111145 |
| 58616 | 96656898 | 96657699 | 111145 |
| 58617 | 96792393 | 96795948 | 059758 |
| 58618 | 96883099 | 96883779 | 188596 |
| 58619 | 96894763 | 96895827 | 188596 |
| 58620 | 97113339 | 97114557 | 188596 |
| 58621 | 97300571 | 97301627 | 139350 |
| 58622 | 97961050 | 97964066 | |
| 58623 | 97965651 | 97966738 | |
| 58624 | 97969089 | 97970101 | |
| 58625 | 98107797 | 98108342 | 257501 |
| 58626 | 98293026 | 98294410 | |
| 58627 | 98306647 | 98307135 | |
| 58628 | 98884313 | 98885542 | 245017 |
| 58629 | 98886141 | 98886821 | 245017 |
| 58630 | 98893126 | 98895577 | 245017 |
| 58631 | 98896694 | 98898362 | 245017 |
| 58632 | 98908555 | 98910599 | 120802, 257167 |
| 58633 | 98967532 | 98969340 | |
| 58634 | 98972206 | 98973158 | |
| 58635 | 98986452 | 98989329 | 075415 |
| 58636 | 99037844 | 99040333 | 120868, 166130 |
| 58637 | 100353173 | 100353887 | 185046 |
| 58638 | 100534955 | 100536965 | 257696, 111647 |
| 58639 | 100548541 | 100549151 | |
| 58640 | 100593038 | 100595284 | 257489, 075089 |
| 58641 | 100607059 | 100607715 | 075089, 166153 |
| 58642 | 100645641 | 100646217 | 166153 |
| 58643 | 100660183 | 100662088 | 136021, 166153 |
| 58644 | 100673318 | 100674064 | 136021 |
| 58645 | 100820378 | 100821696 | |
| 58646 | 100829766 | 100831759 | |
| 58647 | 100838628 | 100839802 | |
| 58648 | 100867296 | 100867929 | 012504 |
| 58649 | 100868322 | 100871032 | 012504 |
| 58650 | 100895646 | 100898197 | 012504 |
| 58651 | 100898480 | 100899078 | 012504 |
| 58652 | 100922299 | 100923756 | 012504 |
| 58653 | 100949308 | 100950197 | 012504 |
| 58654 | 101062626 | 101063178 | |
| 58655 | 101673626 | 101674854 | 120800 |
| 58656 | 101800271 | 101802745 | 257543, 120805 |
| 58657 | 101993640 | 101994387 | 196091 |
| 58658 | 101997834 | 101998680 | 196091 |
| 58659 | 102011920 | 102012824 | 196091 |
| 58660 | 102090245 | 102093109 | 111666 |
| 58661 | 102106885 | 102107902 | 111666 |
| 58662 | 102163635 | 102164070 | 111670 |
| 58663 | 102223472 | 102225130 | 111670 |
| 58664 | 102270296 | 102272676 | 136048 |
| 58665 | 102454907 | 102456038 | 120860 |
| 58666 | 102513088 | 102514519 | 185480, 075188 |
| 58667 | 102566181 | 102566960 | 185480 |
| 58668 | 102736301 | 102736748 | |
| 58669 | 102737096 | 102737897 | |
| 58670 | 102801072 | 102803066 | 017427 |
| 58671 | 102803847 | 102805029 | 017427 |
| 58672 | 102810535 | 102811752 | 017427 |
| 58673 | 102848067 | 102849565 | 017427 |
| 58674 | 102856406 | 102857925 | 017427 |
| 58675 | 102868123 | 102868827 | 017427 |
| 58676 | 102872064 | 102875931 | 017427 |
| 58677 | 102877590 | 102878897 | |
| 58678 | 102904954 | 102906078 | |
| 58679 | 102932886 | 102934309 | |
| 58680 | 102960819 | 102961372 | |
| 58681 | 103046309 | 103046923 | |
| 58682 | 103201876 | 103202825 | |
| 58683 | 103239877 | 103242338 | 171759 |
| 58684 | 103243270 | 103244849 | 171759 |
| 58685 | 103291462 | 103295377 | 171759 |
| 58686 | 103295485 | 103299895 | 171759 |
| 58687 | 103304271 | 103306347 | 171759 |
| 58688 | 103306909 | 103312308 | 171759 |
| 58689 | 103313944 | 103315465 | 171759 |
| 58690 | 103343652 | 103345561 | 171759 |
| 58691 | 103349930 | 103350561 | 171759 |
| 58692 | 103350968 | 103352098 | 139352, 171759 |
| 58693 | 103358540 | 103358989 | |
| 58694 | 103470852 | 103471817 | |
| 58695 | 103487069 | 103488143 | 257703 |
| 58696 | 103508428 | 103509057 | 257703 |
| 58697 | 103521987 | 103523782 | 257703 |
| 58698 | 103555295 | 103555958 | 257703, 257860 |
| 58699 | 103565873 | 103567188 | 257703 |
| 58700 | 103569177 | 103569899 | 257703 |
| 58701 | 103663506 | 103664323 | 179088 |
| 58702 | 103666691 | 103668291 | 179088 |
| 58703 | 103697187 | 103697831 | 179088 |
| 58704 | 103953594 | 103956056 | 257762 |
| 58705 | 103968987 | 103969688 | |
| 58706 | 104066163 | 104067110 | 136011 |
| 58707 | 104178406 | 104180002 | 111696 |
| 58708 | 104193424 | 104194791 | 111696 |
| 58709 | 104198665 | 104199537 | 111696 |
| 58710 | 104234195 | 104236112 | 257327, 111696 |
| 58711 | 104248909 | 104249586 | 214198 |
| 58712 | 104322702 | 104325106 | 265072, 166598, 214198 |
| 58713 | 104349888 | 104351782 | 204954 |
| 58714 | 104358539 | 104361224 | 139372, 204954 |
| 58715 | 104362700 | 104363789 | 139372 |
| 58716 | 104457228 | 104459513 | 111727, 120820 |
| 58717 | 104508254 | 104510227 | |
| 58718 | 104514443 | 104515535 | 120837 |
| 58719 | 104525346 | 104526031 | 120837 |
| 58720 | 104530537 | 104532487 | 120837 |
| 58721 | 104571041 | 104572126 | 257193 |
| 58722 | 104574808 | 104577934 | |
| 58723 | 104580766 | 104582447 | |
| 58724 | 104609213 | 104611171 | 198431 |
| 58725 | 104611941 | 104615171 | 198431 |
| 58726 | 104669261 | 104671846 | 198431, 257732 |
| 58727 | 104672491 | 104675419 | 257732, 198431 |
| 58728 | 104678753 | 104685173 | 198431 |
| 58729 | 104685423 | 104687316 | 198431 |
| 58730 | 104693739 | 104694221 | 198431 |
| 58731 | 104748906 | 104750975 | |
| 58732 | 104802296 | 104802764 | |
| 58733 | 105063479 | 105067031 | 171310 |
| 58734 | 105289192 | 105290830 | 136052 |
| 58735 | 105297752 | 105298299 | 136052 |
| 58736 | 105322919 | 105325690 | 136052 |
| 58737 | 105337867 | 105338989 | 136052 |
| 58738 | 105342312 | 105342858 | 136052 |
| 58739 | 105350984 | 105354284 | 136052 |
| 58740 | 105379735 | 105380928 | 151131 |
| 58741 | 105408189 | 105409136 | 151131 |
| 58742 | 105500596 | 105502712 | 136051, 257999 |
| 58743 | 105514335 | 105514763 | 136051 |
| 58744 | 105588671 | 105589409 | 136044 |
| 58745 | 105606047 | 105606958 | 136044 |
| 58746 | 105608027 | 105609602 | 136044 |
| 58747 | 105628974 | 105630755 | 235162, 136044 |
| 58748 | 105647059 | 105648486 | 235162 |
| 58749 | 105671757 | 105672491 | 235162 |
| 58750 | 105686150 | 105687516 | 235162 |
| 58751 | 105710755 | 105713570 | 257642, 235162 |
| 58752 | 105746576 | 105747197 | 235162 |
| 58753 | 105793336 | 105794342 | |
| 58754 | 106199085 | 106200597 | |
| 58755 | 106415878 | 106417494 | |
| 58756 | 106489515 | 106491261 | 074590 |
| 58757 | 106492091 | 106493376 | 074590 |
| 58758 | 106513529 | 106516577 | 074590 |
| 58759 | 106519034 | 106521688 | 074590 |
| 58760 | 106525377 | 106530618 | 074590 |
| 58761 | 106530846 | 106534500 | 074590 |
| 58762 | 106589202 | 106589835 | |
| 58763 | 106620528 | 106621866 | |
| 58764 | 106640279 | 106642775 | 258355, 136026 |
| 58765 | 106667877 | 106669036 | 136026 |
| 58766 | 106675581 | 106676866 | 238609, 136026 |
| 58767 | 106694363 | 106697644 | 166046, 136026 |
| 58768 | 106700812 | 106701484 | 166046 |
| 58769 | 106736329 | 106737025 | 166046 |
| 58770 | 106751082 | 106753114 | 013503 |
| 58771 | 106763065 | 106764200 | 013503 |
| 58772 | 106811857 | 106813383 | 013503 |
| 58773 | 107025715 | 107028223 | 257545, 111783 |
| 58774 | 107111087 | 107112121 | 257545, 111783, 257918 |
| 58775 | 107158326 | 107159013 | 257545 |
| 58776 | 107159697 | 107164215 | 257545 |
| 58777 | 107164414 | 107166392 | 257545 |
| 58778 | 107166489 | 107169347 | 111785, 257545 |
| 58779 | 107233918 | 107234670 | 111785 |
| 58780 | 107348753 | 107351111 | 151135, 260329 |
| 58781 | 107369786 | 107370847 | 151135 |
| 58782 | 107380129 | 107381461 | 120832 |
| 58783 | 107420070 | 107423061 | 008405 |
| 58784 | 107485410 | 107488826 | 257548, 008405 |
| 58785 | 107495464 | 107496036 | 257548 |
| 58786 | 107737272 | 107740035 | 151136 |
| 58787 | 107741623 | 107746649 | 151136 |
| 58788 | 107773378 | 107774561 | 151136 |
| 58789 | 107908660 | 107909826 | 151136 |
| 58790 | 107914210 | 107915304 | 151136 |
| 58791 | 108025362 | 108026242 | 151136 |
| 58792 | 108078210 | 108080551 | 136045 |
| 58793 | 108152540 | 108155514 | 110851, 258136 |
| 58794 | 108908783 | 108910519 | 198855 |
| 58795 | 108953521 | 108957778 | 136003, 075856 |
| 58796 | 108959681 | 108960780 | 136003 |
| 58797 | 109005604 | 109006207 | |
| 58798 | 109037558 | 109038401 | |
| 58799 | 109058019 | 109059896 | 110880 |
| 58800 | 109059935 | 109060487 | 110880 |
| 58801 | 109084336 | 109086720 | 110880 |
| 58802 | 109122535 | 109126856 | 110880 |
| 58803 | 109127451 | 109129260 | |
| 58804 | 109167577 | 109168324 | |
| 58805 | 109226336 | 109228040 | 084112 |
| 58806 | 109231614 | 109233437 | 084112 |
| 58807 | 109249448 | 109252180 | 084112 |
| 58808 | 109273136 | 109274373 | 110887 |
| 58809 | 109275639 | 109276663 | 110887 |
| 58810 | 109280110 | 109281651 | 110887 |
| 58811 | 109490196 | 109492061 | 256262, 135093 |
| 58812 | 109503100 | 109503776 | 135093 |
| 58813 | 109522083 | 109522822 | 135093 |
| 58814 | 109524785 | 109525603 | 135093 |
| 58815 | 109530251 | 109531657 | 189046 |
| 58816 | 109535623 | 109536346 | 076248 |
| 58817 | 109548586 | 109550216 | 256139, 076248 |
| 58818 | 109553188 | 109555006 | 076555, 256139 |
| 58819 | 109568401 | 109570173 | 076555 |
| 58820 | 109571850 | 109572594 | 076555 |
| 58821 | 109581893 | 109584577 | 076555 |
| 58822 | 109585413 | 109587005 | 076555 |
| 58823 | 109589149 | 109589806 | 076555 |
| 58824 | 109591492 | 109592715 | 076555 |
| 58825 | 109629188 | 109630545 | 076555 |
| 58826 | 109634318 | 109639678 | 076555 |
| 58827 | 109685783 | 109686711 | 076555 |
| 58828 | 109715351 | 109716926 | 139445 |
| 58829 | 109740463 | 109741062 | 139445 |
| 58830 | 109900476 | 109901348 | 110906 |
| 58831 | 109914145 | 109916405 | 151148, 110906 |
| 58832 | 109994956 | 109995443 | 139428 |
| 58833 | 110009446 | 110010051 | 139428 |
| 58834 | 110010290 | 110012070 | 110921, 139428 |
| 58835 | 110016146 | 110016687 | 110921 |
| 58836 | 110024047 | 110025239 | 110921 |
| 58837 | 110026131 | 110027483 | 110921 |
| 58838 | 110035308 | 110036269 | |
| 58839 | 110053441 | 110054220 | |
| 58840 | 110144430 | 110145657 | |
| 58841 | 110148228 | 110149024 | |
| 58842 | 110151252 | 110153352 | 139438 |
| 58843 | 110158915 | 110159772 | 139438 |
| 58844 | 110159789 | 110160477 | 139438 |
| 58845 | 110160968 | 110161770 | 139438 |
| 58846 | 110260337 | 110261805 | 111199 |
| 58847 | 110268085 | 110268688 | 111199 |
| 58848 | 110302030 | 110303135 | 139433 |
| 58849 | 110317239 | 110319075 | 249094, 139433 |
| 58850 | 110337347 | 110339123 | 139437 |
| 58851 | 110386149 | 110387634 | 139436, 139437 |
| 58852 | 110388512 | 110390560 | 139436, 139437 |
| 58853 | 110433107 | 110434827 | 139436 |
| 58854 | 110436440 | 110438498 | 076513 |
| 58855 | 110448688 | 110449313 | 076513 |
| 58856 | 110449687 | 110450481 | 076513 |
| 58857 | 110460979 | 110462973 | 076513 |
| 58858 | 110475857 | 110478112 | 076513, 174456 |
| 58859 | 110479388 | 110481328 | 174456 |
| 58860 | 110485444 | 110486960 | 174456 |
| 58861 | 110528524 | 110529532 | |
| 58862 | 110545666 | 110548339 | |
| 58863 | 110561809 | 110563003 | 122970 |
| 58864 | 110683201 | 110686556 | |
| 58865 | 110717986 | 110720799 | 174437 |
| 58866 | 110750448 | 110751335 | 174437 |
| 58867 | 110840426 | 110842509 | 196510, 258210 |
| 58868 | 110887006 | 110888974 | 111229 |
| 58869 | 110905286 | 110907480 | 204856, 111231 |
| 58870 | 110938986 | 110940461 | 151164, 111237 |
| 58871 | 110971325 | 110971868 | 196850 |
| 58872 | 110974502 | 110976215 | 196850 |
| 58873 | 110981176 | 110981909 | 196850 |
| 58874 | 110989756 | 110990510 | 196850 |
| 58875 | 111012502 | 111013736 | 196850 |
| 58876 | 111015326 | 111017309 | 196850 |
| 58877 | 111019174 | 111022218 | 196850 |
| 58878 | 111028593 | 111030140 | |
| 58879 | 111051487 | 111052401 | 204852 |
| 58880 | 111179261 | 111183073 | 186298 |
| 58881 | 111325561 | 111326247 | 173093 |
| 58882 | 111372090 | 111372776 | |
| 58883 | 111500385 | 111502159 | 111249 |
| 58884 | 111504219 | 111506240 | 111249 |
| 58885 | 111511699 | 111513607 | 221259, 111249 |
| 58886 | 111513969 | 111515781 | 111249 |
| 58887 | 111539615 | 111540516 | 111249 |
| 58888 | 111545086 | 111546252 | 111249 |
| 58889 | 111800650 | 111802442 | 198324 |
| 58890 | 111804997 | 111807250 | 257595, 198324 |
| 58891 | 111834749 | 111835851 | 257595 |
| 58892 | 111841914 | 111845326 | 111252 |
| 58893 | 111850938 | 111852121 | 111252 |
| 58894 | 111863220 | 111864093 | 111252 |
| 58895 | 111867941 | 111870855 | 111252 |
| 58896 | 111872042 | 111873033 | 111252 |
| 58897 | 112034924 | 112038834 | 258099, 204842 |
| 58898 | 112053931 | 112054539 | |
| 58899 | 112074044 | 112074703 | |
| 58900 | 112122769 | 112124812 | 111271, 089234 |
| 58901 | 112190903 | 112191524 | 111271 |
| 58902 | 112203955 | 112206432 | 111275, 257767 |
| 58903 | 112210843 | 112213955 | 257767, 111275 |
| 58904 | 112214563 | 112216366 | 257767, 111275 |
| 58905 | 112218355 | 112219495 | 257767, 111275 |
| 58906 | 112225837 | 112226642 | 257767, 111275 |
| 58907 | 112228734 | 112231122 | 257767, 111275 |
| 58908 | 112279476 | 112281047 | 089022, 234608 |
| 58909 | 112439673 | 112440286 | 198270 |
| 58910 | 112443692 | 112444309 | 198270 |
| 58911 | 112449959 | 112452408 | 089248, 198270 |
| 58912 | 112533903 | 112535365 | 111300 |
| 58913 | 112545070 | 112547432 | 111300 |
| 58914 | 112562872 | 112564531 | 135148 |
| 58915 | 112568063 | 112568938 | 135148 |
| 58916 | 112689846 | 112690449 | 173064 |
| 58917 | 112723260 | 112724194 | 173064 |
| 58918 | 112756861 | 112757716 | 173064 |
| 58919 | 112819015 | 112820617 | 173064 |
| 58920 | 112846279 | 112847941 | 089009 |
| 58921 | 112855899 | 112858124 | 179295, 089009 |
| 58922 | 112903716 | 112904472 | 179295 |
| 58923 | 112908244 | 112909385 | 179295 |
| 58924 | 113037585 | 113038188 | 089169 |
| 58925 | 113276436 | 113277987 | 089169 |
| 58926 | 113343870 | 113345907 | 089127, 257452 |
| 58927 | 113362471 | 113363248 | 089127, 257452 |
| 58928 | 113375563 | 113377038 | 111331, 257452 |
| 58929 | 113415405 | 113417507 | 111335, 257452 |
| 58930 | 113494327 | 113495463 | 135144 |
| 58931 | 113500220 | 113500849 | 135144 |
| 58932 | 113501624 | 113502677 | 135144 |
| 58933 | 113508881 | 113510539 | 135144 |
| 58934 | 113535870 | 113536783 | 111344 |
| 58935 | 113622530 | 113625097 | 257286, 139405, 123064 |
| 58936 | 113631594 | 113632395 | |
| 58937 | 113658870 | 113661989 | 166578, 186815 |
| 58938 | 113667009 | 113670738 | 186815 |
| 58939 | 113673883 | 113675165 | 186815 |
| 58940 | 113678575 | 113680926 | 186815 |
| 58941 | 113683552 | 113685278 | 186815 |
| 58942 | 113697109 | 113697854 | 186815 |
| 58943 | 113709168 | 113710491 | 186815 |
| 58944 | 113771945 | 113773517 | 089060 |
| 58945 | 113795591 | 113797493 | 151176, 089060 |
| 58946 | 113840126 | 113842953 | 135094 |
| 58947 | 113850698 | 113852959 | 135094 |
| 58948 | 113853023 | 113857321 | 135094 |
| 58949 | 113858056 | 113861457 | 139410, 135094 |
| 58950 | 114203580 | 114204526 | 249550 |
| 58951 | 114207962 | 114208821 | 249550 |
| 58952 | 114403175 | 114405019 | 122965 |
| 58953 | 114702749 | 114703398 | |
| 58954 | 114917145 | 114918698 | |
| 58955 | 115049128 | 115050041 | |
| 58956 | 115105502 | 115108023 | |
| 58957 | 115119020 | 115123464 | 135111 |
| 58958 | 115129572 | 115131084 | |
| 58959 | 115174262 | 115174922 | 257817 |
| 58960 | 115237118 | 115238170 | |
| 58961 | 115263972 | 115264640 | |
| 58962 | 115267369 | 115268008 | |
| 58963 | 115355771 | 115357828 | |
| 58964 | 115362879 | 115363601 | |
| 58965 | 115370525 | 115372369 | |
| 58966 | 115447579 | 115448886 | |
| 58967 | 115515911 | 115516794 | 257958 |
| 58968 | 115525925 | 115528014 | |
| 58969 | 115531805 | 115532442 | |
| 58970 | 115573556 | 115574215 | |
| 58971 | 115664983 | 115665507 | |
| 58972 | 115699432 | 115700490 | |
| 58973 | 115751452 | 115752736 | |
| 58974 | 115762987 | 115764461 | |
| 58975 | 115775311 | 115776599 | |
| 58976 | 115778195 | 115780286 | |
| 58977 | 115791267 | 115793089 | |
| 58978 | 115812424 | 115813569 | |
| 58979 | 115861126 | 115862111 | |
| 58980 | 115889450 | 115890152 | |
| 58981 | 116381008 | 116382418 | |
| 58982 | 116391113 | 116391805 | |
| 58983 | 116491289 | 116492173 | 123066 |
| 58984 | 116561258 | 116561788 | 123066 |
| 58985 | 116570834 | 116571838 | 123066 |
| 58986 | 116713837 | 116716326 | 123066 |
| 58987 | 116806329 | 116806630 | 258346 |
| 58988 | 116823423 | 116824041 | 258346 |
| 58989 | 116842673 | 116843856 | |
| 58990 | 116844310 | 116844883 | |
| 58991 | 116874489 | 116875137 | |
| 58992 | 116962605 | 116963803 | |
| 58993 | 117074590 | 117075135 | |
| 58994 | 117096221 | 117096981 | |
| 58995 | 117100214 | 117101240 | 257883 |
| 58996 | 117101308 | 117101767 | 257883 |
| 58997 | 117114434 | 117115170 | 257883 |
| 58998 | 117130663 | 117131661 | 257883 |
| 58999 | 117173950 | 117174517 | 111412 |
| 59000 | 117174761 | 117176201 | 135119, 111412 |
| 59001 | 117256220 | 117257659 | 135119 |
| 59002 | 117348486 | 117349574 | 174989 |
| 59003 | 117536251 | 117537290 | 258285, 088992 |
| 59004 | 117567897 | 117569108 | 258285 |
| 59005 | 117580242 | 117582186 | 135108 |
| 59006 | 117596041 | 117597287 | 135108 |
| 59007 | 117626692 | 117628683 | 135108 |
| 59008 | 117845825 | 117846358 | 089250 |
| 59009 | 117904249 | 117905616 | 171435 |
| 59010 | 117922965 | 117925994 | 171435 |
| 59011 | 117932433 | 117933282 | 171435 |
| 59012 | 117935758 | 117936282 | 171435 |
| 59013 | 117956164 | 117957666 | 171435 |
| 59014 | 118453673 | 118455158 | 111445 |
| 59015 | 118489432 | 118492161 | 176871 |
| 59016 | 118497014 | 118500955 | 176871 |
| 59017 | 118539689 | 118542367 | 176834 |
| 59018 | 118558439 | 118559247 | 176834 |
| 59019 | 118561959 | 118562913 | 176834 |
| 59020 | 118573264 | 118575598 | 089220, 176834 |
| 59021 | 118576495 | 118577428 | 089220 |
| 59022 | 118809182 | 118815411 | 111707, 270482, 135090 |
| 59023 | 119616219 | 119618763 | 152137 |
| 59024 | 120026849 | 120028173 | 248636 |
| 59025 | 120031194 | 120033381 | 224982, 248636 |
| 59026 | 120105275 | 120106888 | 111725, 248636 |
| 59027 | 120118853 | 120119495 | 111725 |
| 59028 | 120153185 | 120155289 | 122966 |
| 59029 | 120426227 | 120427330 | |
| 59030 | 120427563 | 120427977 | 135127 |
| 59031 | 120478921 | 120479821 | 135127 |
| 59032 | 120493054 | 120493897 | 135127 |
| 59033 | 120524048 | 120525430 | 135127 |
| 59034 | 120553908 | 120557210 | 111737 |
| 59035 | 120557260 | 120557873 | |
| 59036 | 120619778 | 120621332 | 089154 |
| 59037 | 120631446 | 120633516 | 089154 |
| 59038 | 120637242 | 120640154 | 255857, 089157 |
| 59039 | 120665371 | 120671227 | 089159 |
| 59040 | 120671781 | 120674018 | 089159 |
| 59041 | 120702519 | 120704594 | 089159 |
| 59042 | 120728366 | 120731659 | 200795, 202538 |
| 59043 | 120739949 | 120740556 | 089163 |
| 59044 | 120754317 | 120755862 | |
| 59045 | 120759141 | 120759574 | |
| 59046 | 120763180 | 120764038 | 170890 |
| 59047 | 120883124 | 120885045 | 257218, 170855, 111780 |
| 59048 | 120906312 | 120908349 | 088986, 111786 |
| 59049 | 120933383 | 120935048 | 248008, 088986 |
| 59050 | 120966046 | 120967986 | 110871 |
| 59051 | 120971855 | 120973350 | 110871, 022840 |
| 59052 | 120975919 | 120977520 | 022840 |
| 59053 | 120987739 | 120988625 | 022840 |
| 59054 | 121018742 | 121019649 | 167272 |
| 59055 | 121124184 | 121127179 | 110917 |
| 59056 | 121129862 | 121130683 | 110917 |
| 59057 | 121147801 | 121149307 | 175970 |
| 59058 | 121163458 | 121164394 | 122971 |
| 59059 | 121263094 | 121263578 | 157837 |
| 59060 | 121340597 | 121342763 | 157837 |
| 59061 | 121382317 | 121383023 | |
| 59062 | 121398343 | 121400903 | |
| 59063 | 121415345 | 121419826 | 135100, 241388 |
| 59064 | 121421449 | 121422921 | 135100 |
| 59065 | 121462728 | 121464834 | 135114 |
| 59066 | 121476277 | 121477354 | 135114 |
| 59067 | 121554520 | 121555185 | |
| 59068 | 121561596 | 121563183 | |
| 59069 | 121564016 | 121564499 | |
| 59070 | 121566538 | 121567516 | |
| 59071 | 121581721 | 121582895 | 089041 |
| 59072 | 121628197 | 121629440 | |
| 59073 | 121647237 | 121649131 | 135124 |
| 59074 | 121651547 | 121653700 | 135124 |
| 59075 | 121665012 | 121665472 | 135124 |
| 59076 | 121722283 | 121722907 | 110931 |
| 59077 | 121733244 | 121735810 | 110931 |
| 59078 | 121789149 | 121791138 | 089053 |
| 59079 | 121814587 | 121815122 | 089053 |
| 59080 | 121837019 | 121839039 | 170633, 089053, 258435 |
| 59081 | 121884557 | 121885033 | 089094 |
| 59082 | 121904309 | 121905508 | 089094 |
| 59083 | 121954126 | 121954929 | 089094 |
| 59084 | 121956116 | 121957081 | 089094 |
| 59085 | 121973734 | 121974590 | 089094 |
| 59086 | 121974730 | 121976923 | 089094 |
| 59087 | 121988726 | 121989294 | 089094 |
| 59088 | 122016971 | 122018737 | 256742, 089094 |
| 59089 | 122063873 | 122065894 | 182500 |
| 59090 | 122124467 | 122125421 | |
| 59091 | 122147543 | 122148126 | |
| 59092 | 122149517 | 122151604 | 188735 |
| 59093 | 122191649 | 122192336 | 188735 |
| 59094 | 122221537 | 122223438 | 139725 |
| 59095 | 122223780 | 122225763 | 139725 |
| 59096 | 122227617 | 122244061 | 272849, 212694, 139718, |
| | | | 139725 |
| 59097 | 122249571 | 122251476 | 139718 |
| 59098 | 122293952 | 122298852 | 256811, 158104 |
| 59099 | 122313969 | 122314984 | |
| 59100 | 122325531 | 122327544 | 110801, 256950 |
| 59101 | 122362530 | 122362993 | 158023 |
| 59102 | 122459422 | 122462678 | 110987 |
| 59103 | 122478400 | 122478985 | 110987 |
| 59104 | 122488677 | 122490613 | 110987 |
| 59105 | 122500371 | 122501895 | 256546 |
| 59106 | 122509818 | 122510989 | |
| 59107 | 122515607 | 122520478 | 175727 |
| 59108 | 122582142 | 122583790 | 175727 |
| 59109 | 122598620 | 122599622 | 175727 |
| 59110 | 122609763 | 122612289 | 175727 |
| 59111 | 122617305 | 122618081 | 175727 |
| 59112 | 122661520 | 122662198 | 158113 |
| 59113 | 122709742 | 122711270 | 184047, 256861 |
| 59114 | 122720256 | 122720704 | 139719, 256861 |
| 59115 | 122750261 | 122751763 | 139719, 256861 |
| 59116 | 122850777 | 122853747 | 130779 |
| 59117 | 122879125 | 122880281 | 257097, 130779 |
| 59118 | 122882655 | 122886343 | 257097, 130779 |
| 59119 | 122889517 | 122892434 | 130779 |
| 59120 | 122903620 | 122908535 | 130779 |
| 59121 | 122948030 | 122949687 | |
| 59122 | 122973359 | 122974426 | 033030 |
| 59123 | 122984323 | 122985911 | 033030 |
| 59124 | 123010362 | 123012136 | 184445, 111011 |
| 59125 | 123163017 | 123164839 | 196917 |
| 59126 | 123210334 | 123210998 | 270134, 196917 |
| 59127 | 123236297 | 123238487 | 139726 |
| 59128 | 123310201 | 123311477 | 130783 |
| 59129 | 123318793 | 123323516 | 130787 |
| 59130 | 123324273 | 123328027 | 130787 |
| 59131 | 123344575 | 123345898 | 130787 |
| 59132 | 123347326 | 123348434 | 130787 |
| 59133 | 123349593 | 123353425 | 256152, 139722 |
| 59134 | 123371401 | 123374095 | 139722 |
| 59135 | 123379280 | 123381217 | 139722 |
| 59136 | 123382640 | 123383914 | |
| 59137 | 123401827 | 123402605 | |
| 59138 | 123429112 | 123432678 | 150967 |
| 59139 | 123458364 | 123461607 | 256028, 111325, 150967 |
| 59140 | 123464424 | 123466673 | 182196, 150967, 111325, |
| | | | 256028 |
| 59141 | 123469015 | 123470002 | 090975 |
| 59142 | 123479571 | 123481468 | 090975 |
| 59143 | 123503057 | 123504874 | 090975 |
| 59144 | 123533705 | 123535822 | 090975 |
| 59145 | 123540431 | 123541008 | 090975 |
| 59146 | 123546382 | 123549836 | 090975 |
| 59147 | 123553797 | 123555636 | 090975 |
| 59148 | 123569398 | 123571150 | 090975 |
| 59149 | 123572965 | 123576363 | 090975 |
| 59150 | 123576737 | 123577279 | 090975 |
| 59151 | 123578049 | 123579887 | 090975 |
| 59152 | 123610395 | 123612377 | 090975 |
| 59153 | 123623826 | 123628215 | 090975 |
| 59154 | 123633852 | 123636708 | 090975 |
| 59155 | 123648814 | 123650686 | 051825 |
| 59156 | 123716547 | 123719193 | 130921, 051825 |
| 59157 | 123754944 | 123757146 | 111328 |
| 59158 | 123777897 | 123778516 | 139697 |
| 59159 | 123847742 | 123850638 | 256092, 139697 |
| 59160 | 123867953 | 123868751 | 183955 |
| 59161 | 123872962 | 123875156 | 183955 |
| 59162 | 123920440 | 123921612 | 150977 |
| 59163 | 123942129 | 123943791 | 184209 |
| 59164 | 124017385 | 124018224 | 188026 |
| 59165 | 124018293 | 124019006 | |
| 59166 | 124055824 | 124056332 | |
| 59167 | 124068537 | 124070085 | 086598, 247373 |
| 59168 | 124080287 | 124080805 | 086598 |
| 59169 | 124085839 | 124087623 | 111364 |
| 59170 | 124117380 | 124119552 | 111358, 111361 |
| 59171 | 124196409 | 124197990 | 185344 |
| 59172 | 124433389 | 124434674 | 119242 |
| 59173 | 124456141 | 124458882 | 178882, 179195, 119242, |
| | | | 270095 |
| 59174 | 124475883 | 124476551 | 178882, 179195 |
| 59175 | 124492623 | 124493235 | 178882, 179195 |
| 59176 | 124495920 | 124496861 | 178882, 179195 |
| 59177 | 124672875 | 124673494 | 178882 |
| 59178 | 124844210 | 124847048 | 196498 |
| 59179 | 124853438 | 124855392 | 196498 |
| 59180 | 124866139 | 124867004 | 196498 |
| 59181 | 124873290 | 124875271 | 196498 |
| 59182 | 124906815 | 124908365 | 196498 |
| 59183 | 124975236 | 124976163 | 196498 |
| 59184 | 125001619 | 125005502 | 196498 |
| 59185 | 125022391 | 125023523 | 196498 |
| 59186 | 125050862 | 125052821 | 196498 |
| 59187 | 125163920 | 125167408 | |
| 59188 | 125205253 | 125205634 | |
| 59189 | 125210947 | 125212787 | |
| 59190 | 125214878 | 125215496 | |
| 59191 | 125230184 | 125232496 | |
| 59192 | 125234575 | 125235059 | |
| 59193 | 125239634 | 125240252 | |
| 59194 | 125258344 | 125260385 | |
| 59195 | 125261647 | 125262947 | 073060 |
| 59196 | 125288672 | 125289495 | 073060 |
| 59197 | 125305575 | 125307304 | 073060 |
| 59198 | 125311918 | 125315054 | 073060 |
| 59199 | 125315798 | 125316953 | 073060 |
| 59200 | 125322366 | 125323615 | 073060 |
| 59201 | 125336390 | 125339225 | 073060 |
| 59202 | 125347136 | 125349361 | 073060 |
| 59203 | 125351297 | 125352823 | 073060 |
| 59204 | 125360047 | 125360668 | 073060 |
| 59205 | 125384541 | 125385875 | |
| 59206 | 125388963 | 125389807 | |
| 59207 | 125393641 | 125396453 | 150991 |
| 59208 | 125398072 | 125403346 | 265345, 150991 |
| 59209 | 125411613 | 125412901 | |
| 59210 | 125422053 | 125425803 | |
| 59211 | 125472876 | 125473965 | 150990 |
| 59212 | 125478215 | 125479484 | 184992 |
| 59213 | 125549437 | 125550880 | 081760 |
| 59214 | 125871351 | 125872349 | 139364 |
| 59215 | 126118001 | 126118887 | 139364 |
| 59216 | 126119366 | 126119747 | 139364 |
| 59217 | 126345852 | 126346780 | |
| 59218 | 126466071 | 126466948 | 249267 |
| 59219 | 126466994 | 126469195 | 256276, 249267 |
| 59220 | 126480943 | 126481511 | |
| 59221 | 126518175 | 126518906 | |
| 59222 | 126751892 | 126752970 | |
| 59223 | 126796711 | 126797444 | |
| 59224 | 127066700 | 127067724 | |
| 59225 | 127091973 | 127093481 | |
| 59226 | 127256489 | 127257856 | 256128 |
| 59227 | 127420889 | 127421884 | 249345 |
| 59228 | 127491367 | 127492131 | 249345 |
| 59229 | 127493389 | 127494165 | 249345 |
| 59230 | 127567335 | 127568755 | |
| 59231 | 127609618 | 127616661 | |
| 59232 | 127649856 | 127651164 | 239776 |
| 59233 | 127714307 | 127716912 | |
| 59234 | 127722667 | 127727340 | |
| 59235 | 127727992 | 127731519 | |
| 59236 | 129237305 | 129240940 | |
| 59237 | 129298081 | 129298923 | 139370 |
| 59238 | 129301697 | 129303425 | 139370 |
| 59239 | 129307292 | 129309725 | 139370 |
| 59240 | 129337535 | 129339247 | 151948 |
| 59241 | 129345226 | 129346715 | 151948 |
| 59242 | 129355431 | 129356518 | 151948 |
| 59243 | 129389368 | 129391590 | 151948 |
| 59244 | 129394051 | 129394924 | 151948 |
| 59245 | 129405019 | 129405514 | 151948 |
| 59246 | 129423371 | 129423879 | 151948 |
| 59247 | 130015501 | 130016104 | 151952 |
| 59248 | 131322725 | 131324213 | 111450 |
| 59249 | 131355392 | 131357766 | 132341 |
| 59250 | 131438264 | 131439395 | 111452 |
| 59251 | 131455992 | 131457391 | 111452 |
| 59252 | 131495894 | 131497819 | 111452 |
| 59253 | 131574726 | 131576084 | 111452 |
| 59254 | 132194544 | 132196730 | 061936 |
| 59255 | 132344619 | 132346984 | 256955 |
| 59256 | 132354457 | 132354915 | |
| 59257 | 132378436 | 132381738 | 177169 |
| 59258 | 132396829 | 132397373 | 177169 |
| 59259 | 132412868 | 132415300 | 177192, 255992 |
| 59260 | 132434039 | 132435767 | 183495 |
| 59261 | 132568352 | 132570099 | 185684 |
| 59262 | 132627712 | 132629944 | 184967, 185163 |
| 59263 | 132646963 | 132647700 | |
| 59264 | 132673828 | 132675257 | 256312, 256576 |
| 59265 | 133066972 | 133068157 | 112787 |
| 59266 | 133136260 | 133137359 | 112787 |
| 59267 | 133184236 | 133186042 | 204583 |
| 59268 | 133248690 | 133249973 | 177084 |
| 59269 | 133263261 | 133264962 | 256632, 176894, 177084 |
| 59270 | 133265511 | 133266804 | 256632, 176894 |
| 59271 | 133286352 | 133288521 | 247077, 256632, 176894 |
| 59272 | 133335898 | 133339533 | 176915 |
| 59273 | 133404306 | 133406080 | 090615, 072609 |
| 59274 | 133442798 | 133443471 | 072609 |
| 59275 | 133463305 | 133465268 | 236617, 072609 |
| 59276 | 133531552 | 133533508 | 072609, 196458 |
| 59277 | 133562494 | 133564039 | 198393 |
| 59278 | 133613537 | 133614922 | 198040, 246394 |
| 59279 | 133656480 | 133658370 | 196387 |
| 59280 | 133706009 | 133708043 | 256825, 090612, 256223, |
| | | | 214029 |
| 59281 | 133757677 | 133758944 | 256825, 090612 |

[0581] The locations of ODSCs on Chromosome 13 are shown in Table 55.

TABLE 55
ODSC Locations on Chromosome 13

| SEQ ID NO. | Start | End | Overlapping Gene(s) |
|---|---|---|---|
| 59282 | 19568043 | 19568589 | 226057 |
| 59283 | 19569173 | 19571163 | 226057 |
| 59284 | 20170967 | 20171518 | |
| 59285 | 20192993 | 20193730 | |
| 59286 | 20206816 | 20208494 | 196199 |
| 59287 | 20259026 | 20259911 | 121390 |
| 59288 | 20355765 | 20357498 | 121390 |
| 59289 | 20419843 | 20421018 | 132950 |
| 59290 | 20436157 | 20439326 | 132950 |
| 59291 | 20531412 | 20534763 | 121741 |
| 59292 | 20692288 | 20693569 | |
| 59293 | 20694082 | 20695610 | |
| 59294 | 20701488 | 20703198 | |
| 59295 | 20765607 | 20767686 | 165474 |
| 59296 | 21066639 | 21067241 | 165475 |
| 59297 | 21069093 | 21070771 | 165475 |
| 59298 | 21077170 | 21078394 | 165475 |
| 59299 | 21094046 | 21094611 | 165475 |
| 59300 | 21098734 | 21101475 | 165475 |
| 59301 | 21131208 | 21135180 | |
| 59302 | 21139512 | 21142972 | 032742 |
| 59303 | 21154448 | 21154883 | 032742 |
| 59304 | 21278021 | 21278536 | 172458 |
| 59305 | 21346859 | 21348519 | 150456 |
| 59306 | 21387629 | 21390067 | 132953 |
| 59307 | 21475775 | 21477678 | 132953 |
| 59308 | 21513894 | 21514699 | 233780 |
| 59309 | 21527492 | 21528050 | |
| 59310 | 21596327 | 21597017 | 150457 |
| 59311 | 21606680 | 21609025 | 150457 |
| 59312 | 21634110 | 21636410 | 150457 |
| 59313 | 21643653 | 21644285 | |
| 59314 | 21649599 | 21650656 | |
| 59315 | 21713733 | 21715681 | 252128, 150459 |
| 59316 | 21750384 | 21751776 | 173141, 165480 |
| 59317 | 21976144 | 21977535 | 180776 |
| 59318 | 22009565 | 22010384 | 180776 |
| 59319 | 22032458 | 22033790 | 180776 |
| 59320 | 22115061 | 22115974 | 165487 |
| 59321 | 22177482 | 22178702 | 165487 |
| 59322 | 22681551 | 22682152 | |
| 59323 | 23948794 | 23949907 | 151835 |
| 59324 | 24001275 | 24002261 | 229558, 151835 |
| 59325 | 24040098 | 24041495 | 232977 |
| 59326 | 24172755 | 24174915 | 127863 |
| 59327 | 24194716 | 24195960 | 127863 |
| 59328 | 24353046 | 24353574 | 027001 |
| 59329 | 24462727 | 24463915 | 205861, 027001 |
| 59330 | 24605041 | 24608990 | 273167, 228741, 182957 |
| 59331 | 24627635 | 24628442 | 273167, 182957 |
| 59332 | 24637990 | 24639251 | 273167, 182957 |
| 59333 | 24648570 | 24650792 | 273167, 182957 |
| 59334 | 24671169 | 24671786 | 273167, 182957 |
| 59335 | 24680675 | 24680993 | 273167, 182957 |
| 59336 | 24721281 | 24724447 | 273167, 182957 |
| 59337 | 24734042 | 24736525 | 273167, 182957 |
| 59338 | 24742442 | 24744079 | 273167, 182957 |
| 59339 | 24756385 | 24760340 | 273167, 182957 |
| 59340 | 24782460 | 24782973 | 273167, 182957 |
| 59341 | 24786422 | 24787514 | 273167, 182957 |
| 59342 | 24789686 | 24790444 | 273167, 182957 |
| 59343 | 24791557 | 24792826 | 273167, 182957 |
| 59344 | 24792980 | 24793500 | 273167, 182957 |
| 59345 | 24793660 | 24796209 | 273167, 182957 |
| 59346 | 24844418 | 24845422 | 273167, 182957 |
| 59347 | 24880623 | 24881208 | 273167, 182957 |
| 59348 | 25085497 | 25087616 | 102699, 205822 |
| 59349 | 25496556 | 25498163 | 151849 |
| 59350 | 25499651 | 25500354 | 253771 |
| 59351 | 25860677 | 25861981 | 139505 |
| 59352 | 25874768 | 25876770 | 139496, 260509 |
| 59353 | 26759698 | 26761818 | 127870 |
| 59354 | 26795090 | 26797295 | 127870 |
| 59355 | 26827535 | 26829644 | 132964 |
| 59356 | 27131609 | 27132845 | 132970 |
| 59357 | 27195854 | 27196639 | 237001, 132970 |
| 59358 | 27530534 | 27531255 | |
| 59359 | 27535955 | 27536931 | |
| 59360 | 27556479 | 27558374 | |
| 59361 | 27561582 | 27562975 | |
| 59362 | 27565111 | 27566324 | |
| 59363 | 27592585 | 27593245 | |
| 59364 | 27703826 | 27706469 | 152484 |
| 59365 | 27744472 | 27747238 | 230641, 152484 |
| 59366 | 27756282 | 27759677 | 230641 |
| 59367 | 27762110 | 27762867 | |
| 59368 | 27768382 | 27770291 | |
| 59369 | 27773778 | 27777168 | |
| 59370 | 27824574 | 27827199 | 122026 |
| 59371 | 27844557 | 27845543 | 122035 |
| 59372 | 27941557 | 27942380 | |
| 59373 | 27953898 | 27954686 | |
| 59374 | 27976801 | 27980850 | |
| 59375 | 27997916 | 28001370 | 122034 |
| 59376 | 28023222 | 28026017 | 122033 |
| 59377 | 28029233 | 28030310 | |
| 59378 | 28051199 | 28052323 | |
| 59379 | 28123203 | 28124464 | 139517 |
| 59380 | 28173908 | 28174628 | 139517 |
| 59381 | 28181155 | 28182108 | 139517 |
| 59382 | 28191103 | 28196958 | 186184, 139517 |
| 59383 | 28215741 | 28216811 | 186184 |
| 59384 | 28235062 | 28235901 | 186184 |
| 59385 | 28403955 | 28404663 | |
| 59386 | 28442731 | 28443687 | 247381 |
| 59387 | 28526862 | 28529363 | 260704 |
| 59388 | 28534185 | 28535501 | |
| 59389 | 28597292 | 28598021 | 122025 |
| 59390 | 28633283 | 28633839 | 122025 |
| 59391 | 28711515 | 28713850 | 152520, 261485 |
| 59392 | 28735196 | 28736434 | 152520 |
| 59393 | 29212028 | 29212456 | |
| 59394 | 29232285 | 29234635 | 132963 |
| 59395 | 29291681 | 29293866 | 139508 |
| 59396 | 29303664 | 29304008 | |
| 59397 | 29321918 | 29322569 | |
| 59398 | 29327342 | 29328585 | |
| 59399 | 29393259 | 29395039 | |
| 59400 | 29417699 | 29418255 | |
| 59401 | 29557637 | 29559628 | |
| 59402 | 29697529 | 29698547 | 132938 |
| 59403 | 29709474 | 29711896 | 132938 |
| 59404 | 29713903 | 29715270 | 132938 |
| 59405 | 30168305 | 30170110 | 139514 |
| 59406 | 30250706 | 30251170 | |
| 59407 | 30421507 | 30422483 | 122042 |
| 59408 | 30422576 | 30425192 | 122042 |
| 59409 | 30479877 | 30480341 | |
| 59410 | 30492302 | 30495976 | 224405 |
| 59411 | 30496116 | 30500118 | 224405 |
| 59412 | 30514896 | 30515296 | 122043 |
| 59413 | 30528529 | 30529661 | |
| 59414 | 30682089 | 30683835 | 224511 |
| 59415 | 30686785 | 30690173 | |
| 59416 | 30699724 | 30700176 | |
| 59417 | 30715724 | 30717937 | |
| 59418 | 30880460 | 30882065 | 102781 |
| 59419 | 30908339 | 30909746 | |
| 59420 | 30912348 | 30913729 | |
| 59421 | 30913865 | 30917252 | 238121 |
| 59422 | 30945017 | 30946835 | 238121 |
| 59423 | 30957029 | 30957766 | |
| 59424 | 30962839 | 30964394 | |
| 59425 | 30968629 | 30971134 | |
| 59426 | 30972391 | 30973906 | |
| 59427 | 30977739 | 30979137 | |
| 59428 | 30982279 | 30983558 | |
| 59429 | 30995141 | 30997167 | 225039 |
| 59430 | 31003545 | 31006468 | |
| 59431 | 31015387 | 31015917 | |
| 59432 | 31037441 | 31040496 | 189403 |
| 59433 | 31146424 | 31147509 | 189403 |
| 59434 | 31150472 | 31151993 | 189403 |
| 59435 | 31189880 | 31194695 | 132952, 189403 |
| 59436 | 31247528 | 31249065 | |
| 59437 | 31366643 | 31367337 | |
| 59438 | 31376908 | 31378014 | 237879 |
| 59439 | 31734666 | 31737630 | 120694 |
| 59440 | 31746342 | 31747333 | |
| 59441 | 31773655 | 31775870 | 187676 |
| 59442 | 32280228 | 32280763 | |
| 59443 | 32500515 | 32501779 | 229715 |
| 59444 | 32501932 | 32502557 | 229715 |
| 59445 | 32519382 | 32520419 | 229715 |
| 59446 | 32556400 | 32557125 | |
| 59447 | 32605186 | 32606242 | 073910, 237637 |
| 59448 | 32716891 | 32717510 | 073910 |
| 59449 | 32827871 | 32831061 | 073910 |
| 59450 | 32834913 | 32836037 | 073910 |
| 59451 | 32872511 | 32873467 | 230633 |
| 59452 | 32888885 | 32890759 | 139618, 189167 |
| 59453 | 32983113 | 32984737 | 139597 |
| 59454 | 33000220 | 33003832 | 139597, 270008 |
| 59455 | 33027242 | 33028449 | 244754 |
| 59456 | 33089272 | 33089878 | 244754 |
| 59457 | 33111716 | 33113929 | 244754 |
| 59458 | 33159698 | 33162033 | 083642 |
| 59459 | 33412920 | 33413602 | |
| 59460 | 33543350 | 33544315 | |
| 59461 | 33627528 | 33628504 | 133116 |
| 59462 | 33698954 | 33701903 | 133121 |
| 59463 | 33702876 | 33703611 | 133121 |
| 59464 | 33808707 | 33810860 | 133121 |
| 59465 | 33824504 | 33826082 | 133121 |
| 59466 | 33832661 | 33833376 | 133121 |
| 59467 | 33834424 | 33839269 | 133121 |
| 59468 | 33845199 | 33849643 | 236581, 133121 |
| 59469 | 33851966 | 33861039 | 236581, 133121 |
| 59470 | 34067665 | 34069490 | 230490 |
| 59471 | 34098172 | 34098993 | 230490 |
| 59472 | 34115768 | 34118701 | 230490 |
| 59473 | 34134655 | 34135304 | 230490 |
| 59474 | 34184245 | 34186297 | 234535, 230490 |
| 59475 | 34202760 | 34203471 | 230490 |
| 59476 | 34212133 | 34218431 | 230490 |
| 59477 | 34249941 | 34251240 | 230490 |
| 59478 | 34252499 | 34254621 | |
| 59479 | 34296903 | 34298462 | |
| 59480 | 34302390 | 34303308 | |
| 59481 | 34391532 | 34392903 | 133119 |
| 59482 | 34444310 | 34444846 | 133119 |
| 59483 | 34445427 | 34446485 | 133119 |
| 59484 | 34492470 | 34493232 | 133119 |
| 59485 | 34542703 | 34543961 | |
| 59486 | 34585608 | 34586375 | |
| 59487 | 34593683 | 34594890 | |
| 59488 | 34775359 | 34776729 | |
| 59489 | 34781247 | 34782997 | |
| 59490 | 35923822 | 35924666 | 172915 |
| 59491 | 36500780 | 36502861 | 133083 |
| 59492 | 36919077 | 36921229 | 120664, 133104 |
| 59493 | 37393167 | 37394149 | 133111 |
| 59494 | 37572527 | 37576240 | 120699, 120697 |
| 59495 | 37632858 | 37634211 | 102710 |
| 59496 | 38922355 | 38925041 | 120686 |
| 59497 | 39337745 | 39339073 | 150893 |
| 59498 | 39422320 | 39423565 | 150893 |
| 59499 | 39452900 | 39454306 | 150893 |
| 59500 | 39611165 | 39613713 | 188811, 120685 |
| 59501 | 40176859 | 40178179 | 183722 |
| 59502 | 40229304 | 40230643 | 133103 |
| 59503 | 40637928 | 40638910 | |
| 59504 | 40755450 | 40756089 | 230710 |
| 59505 | 40795360 | 40795912 | |
| 59506 | 40810109 | 40810993 | |
| 59507 | 40910103 | 40911647 | |
| 59508 | 40917859 | 40919496 | 230058 |
| 59509 | 40919552 | 40921030 | 230058 |
| 59510 | 40976141 | 40977363 | |
| 59511 | 41015162 | 41016126 | |
| 59512 | 41050315 | 41051320 | 215483 |
| 59513 | 41051614 | 41053368 | 215483 |
| 59514 | 41076115 | 41079754 | |
| 59515 | 41082110 | 41082935 | |
| 59516 | 41091680 | 41093962 | |
| 59517 | 41110497 | 41111993 | 269120 |
| 59518 | 41114251 | 41115249 | |
| 59519 | 41137453 | 41137850 | 150907 |
| 59520 | 41138167 | 41139191 | 150907 |
| 59521 | 41225940 | 41226482 | 150907 |
| 59522 | 41231637 | 41232825 | 150907 |
| 59523 | 41234116 | 41234797 | 150907 |
| 59524 | 41236723 | 41241887 | 150907 |
| 59525 | 41344512 | 41346175 | 102738 |
| 59526 | 41360225 | 41361482 | |
| 59527 | 41362637 | 41365595 | 102743 |
| 59528 | 41368332 | 41369863 | 102743 |
| 59529 | 41372386 | 41373626 | 102743 |
| 59530 | 41375368 | 41376840 | 102743 |
| 59531 | 41581860 | 41583058 | 120690 |
| 59532 | 41591272 | 41594076 | 120690 |
| 59533 | 41598993 | 41600552 | 120690 |
| 59534 | 41626281 | 41628893 | 120690 |
| 59535 | 41633092 | 41637217 | 120688, 120690 |
| 59536 | 41638702 | 41639765 | 120688 |
| 59537 | 41706481 | 41707356 | 165572 |
| 59538 | 41767973 | 41769012 | 120696 |
| 59539 | 41793070 | 41793994 | 120662 |
| 59540 | 41837097 | 41838180 | 120662 |
| 59541 | 41884919 | 41887008 | 172766 |
| 59542 | 42151464 | 42152190 | 102763 |
| 59543 | 42162240 | 42165094 | 102763 |
| 59544 | 42180746 | 42181229 | 102763 |
| 59545 | 42196201 | 42197101 | 102763 |
| 59546 | 42213859 | 42214758 | 102763 |
| 59547 | 42219479 | 42219978 | 102763 |
| 59548 | 42268116 | 42271981 | 102763 |
| 59549 | 42293442 | 42296037 | 102763 |
| 59550 | 42376532 | 42377958 | 102763 |
| 59551 | 42401799 | 42403027 | 102763 |
| 59552 | 42516829 | 42517863 | 102763 |
| 59553 | 42529707 | 42530264 | 102763 |
| 59554 | 42533373 | 42536746 | 102763 |
| 59555 | 42556088 | 42556947 | |
| 59556 | 42601852 | 42603373 | |
| 59557 | 42613608 | 42616341 | 102780 |
| 59558 | 42621529 | 42623747 | 102780 |
| 59559 | 42679196 | 42680842 | 102780 |
| 59560 | 42845621 | 42847309 | 023516 |
| 59561 | 42893958 | 42894972 | 023516 |
| 59562 | 42920938 | 42921401 | |
| 59563 | 43061103 | 43061756 | |
| 59564 | 43097445 | 43100875 | |
| 59565 | 43127265 | 43128503 | |
| 59566 | 43168689 | 43169602 | 120659 |
| 59567 | 43406455 | 43407338 | |
| 59568 | 43559477 | 43560407 | 133106 |
| 59569 | 43565560 | 43567418 | 133106 |
| 59570 | 43597007 | 43598558 | 120675 |
| 59571 | 43628711 | 43630150 | 120675 |
| 59572 | 43661912 | 43663018 | 120675 |
| 59573 | 43843151 | 43843868 | 120658 |
| 59574 | 43881916 | 43882611 | 120658 |
| 59575 | 43894155 | 43894710 | 120658 |
| 59576 | 44422363 | 44422847 | 151773 |
| 59577 | 44452511 | 44454849 | 179630, 151773 |
| 59578 | 44677896 | 44678511 | |
| 59579 | 44681461 | 44683854 | 226519 |
| 59580 | 44714971 | 44718709 | 139656, 227258 |
| 59581 | 44765446 | 44766305 | 227258 |
| 59582 | 44792730 | 44793502 | 227258 |
| 59583 | 44794100 | 44794837 | 227258 |
| 59584 | 44805514 | 44806737 | 227258 |
| 59585 | 44855593 | 44856241 | |
| 59586 | 44873188 | 44877164 | |
| 59587 | 44879762 | 44881567 | |
| 59588 | 44885982 | 44888815 | |
| 59589 | 44896982 | 44897689 | |
| 59590 | 44938024 | 44939427 | |
| 59591 | 44947198 | 44948906 | 151778 |
| 59592 | 44970955 | 44971929 | 151778 |
| 59593 | 44977618 | 44980207 | 237361 |
| 59594 | 45007951 | 45012801 | 225727, 102804 |
| 59595 | 45022246 | 45023226 | 225727, 102804 |
| 59596 | 45024272 | 45024946 | 225727, 102804 |
| 59597 | 45097212 | 45097879 | 102804 |
| 59598 | 45150787 | 45152731 | 102804 |
| 59599 | 45389600 | 45390169 | |
| 59600 | 45491527 | 45493558 | |
| 59601 | 45562757 | 45564539 | 133114, 083635, 223732 |
| 59602 | 45694127 | 45695959 | 188342 |
| 59603 | 45742349 | 45742775 | 188342 |
| 59604 | 45780175 | 45782419 | 188342 |
| 59605 | 45792681 | 45795083 | 188342 |
| 59606 | 45810141 | 45810608 | 188342 |
| 59607 | 45890167 | 45891238 | |
| 59608 | 45909659 | 45910341 | |
| 59609 | 45914403 | 45916804 | 170919, 273149, 133112 |
| 59610 | 45988414 | 45989528 | 174032 |
| 59611 | 45991009 | 45993083 | 251015, 174032 |
| 59612 | 46006871 | 46008266 | |
| 59613 | 46014297 | 46016627 | |
| 59614 | 46021124 | 46021980 | |
| 59615 | 46038102 | 46040039 | 136152 |
| 59616 | 46101290 | 46102452 | 136152 |
| 59617 | 46381499 | 46382111 | 215475 |
| 59618 | 46605856 | 46606486 | 123200 |
| 59619 | 46626133 | 46627255 | 235903, 123200 |
| 59620 | 46670952 | 46672923 | 080618, 235903 |
| 59621 | 46674228 | 46676675 | 080618, 235903 |
| 59622 | 46678440 | 46679562 | 080618, 235903 |
| 59623 | 46694319 | 46694783 | |
| 59624 | 46695824 | 46698060 | |
| 59625 | 46700458 | 46702161 | 136167 |
| 59626 | 46716738 | 46717895 | 136167 |
| 59627 | 46869207 | 46871959 | 261097 |
| 59628 | 47126422 | 47129578 | 136141 |
| 59629 | 47149744 | 47151026 | 136141 |
| 59630 | 47174129 | 47175680 | 136141 |
| 59631 | 47180876 | 47182694 | 136141 |
| 59632 | 47207279 | 47207993 | 136141 |
| 59633 | 47229774 | 47231278 | 136141 |
| 59634 | 47233558 | 47234244 | 136141 |
| 59635 | 47234444 | 47235515 | 136141 |
| 59636 | 47249330 | 47250743 | 136141 |
| 59637 | 47253285 | 47254634 | 136141 |
| 59638 | 47258642 | 47259147 | 136141 |
| 59639 | 47261669 | 47262569 | 136141 |
| 59640 | 47333716 | 47334643 | |
| 59641 | 47369916 | 47373641 | 139684 |
| 59642 | 47420620 | 47421344 | 102468 |
| 59643 | 47468134 | 47468686 | 102468 |
| 59644 | 47789674 | 47790987 | |
| 59645 | 48564686 | 48565671 | 136143 |
| 59646 | 48574595 | 48576219 | 227848, 136143 |
| 59647 | 48583277 | 48584006 | 136143 |
| 59648 | 48611475 | 48612893 | 136159, 136143 |
| 59649 | 48668314 | 48669583 | 136146 |
| 59650 | 48775120 | 48775565 | |
| 59651 | 48796460 | 48797357 | |
| 59652 | 48806682 | 48810247 | 136156 |
| 59653 | 48836319 | 48838395 | 136156 |
| 59654 | 48876860 | 48879058 | 139687, 231473 |
| 59655 | 49105811 | 49107824 | 136161 |
| 59656 | 49121815 | 49122341 | |
| 59657 | 49322681 | 49324887 | |
| 59658 | 49356731 | 49357877 | |
| 59659 | 49382468 | 49383302 | |
| 59660 | 49476491 | 49477110 | |
| 59661 | 49482558 | 49483419 | |
| 59662 | 49549050 | 49552332 | 102531 |
| 59663 | 49671194 | 49673869 | 102531 |
| 59664 | 49683917 | 49685446 | 102531 |
| 59665 | 49788604 | 49789727 | |
| 59666 | 49821055 | 49823044 | 102543 |
| 59667 | 49887473 | 49889148 | 102547 |
| 59668 | 49900032 | 49901440 | 102547 |
| 59669 | 49930016 | 49931132 | 102547 |
| 59670 | 50017175 | 50020042 | 136169, 102547, 215462 |
| 59671 | 50039181 | 50039586 | 136169 |
| 59672 | 50040154 | 50041223 | 136169 |
| 59673 | 50069431 | 50071141 | 136147 |
| 59674 | 50158681 | 50162452 | 136144 |
| 59675 | 50198921 | 50200738 | |
| 59676 | 50264215 | 50266485 | 123179 |
| 59677 | 50285454 | 50286023 | 102753 |
| 59678 | 50307542 | 50308140 | 102753 |
| 59679 | 50365126 | 50367503 | 102753 |
| 59680 | 50384072 | 50386570 | |
| 59681 | 50431059 | 50435439 | |
| 59682 | 50509342 | 50511411 | 123178 |
| 59683 | 50512680 | 50514002 | |
| 59684 | 50569929 | 50572415 | 204977, 264864 |
| 59685 | 50654498 | 50657391 | 176124, 231607 |
| 59686 | 50697117 | 50700917 | 231607, 176124 |
| 59687 | 50734977 | 50735758 | 176124 |
| 59688 | 50796429 | 50797816 | 176124 |
| 59689 | 50804008 | 50805029 | 176124 |
| 59690 | 50818196 | 50820428 | 176124 |
| 59691 | 50841888 | 50842615 | 176124 |
| 59692 | 50893472 | 50895461 | 176124 |
| 59693 | 50897696 | 50898220 | 176124 |
| 59694 | 50931000 | 50933336 | 176124 |
| 59695 | 50939659 | 50941100 | 176124 |
| 59696 | 50960565 | 50961911 | 176124 |
| 59697 | 50964799 | 50965553 | 176124 |
| 59698 | 51086326 | 51088041 | 176124 |
| 59699 | 51092331 | 51093390 | 176124 |
| 59700 | 51095693 | 51096503 | 229323, 176124 |
| 59701 | 51101937 | 51105300 | 176124 |
| 59702 | 51483530 | 51485482 | 136104, 233672 |
| 59703 | 51708643 | 51709332 | 226792 |
| 59704 | 51725383 | 51726068 | 226792 |
| 59705 | 52024627 | 52029150 | 236778, 224892, 102786 |
| 59706 | 52050098 | 52054200 | 236778 |
| 59707 | 52092272 | 52096266 | 236778 |
| 59708 | 52096782 | 52100883 | 236778 |
| 59709 | 52157542 | 52159839 | 139668 |
| 59710 | 52164487 | 52165540 | 139668 |
| 59711 | 52210233 | 52211443 | 139668 |
| 59712 | 52217180 | 52218633 | 139668 |
| 59713 | 52242554 | 52243846 | 139668 |
| 59714 | 52300224 | 52303530 | 139668 |
| 59715 | 52303564 | 52305597 | 139668 |
| 59716 | 52338135 | 52339036 | |
| 59717 | 52356339 | 52357008 | 102796 |
| 59718 | 52367029 | 52368697 | 102796 |
| 59719 | 52375438 | 52379259 | 231856, 102796 |
| 59720 | 52388947 | 52389901 | |
| 59721 | 52419122 | 52420115 | |
| 59722 | 52552955 | 52553571 | 123191 |
| 59723 | 52569585 | 52570331 | 123191 |
| 59724 | 52571537 | 52572651 | 123191 |
| 59725 | 52585088 | 52587272 | 253710, 123191 |
| 59726 | 52599257 | 52600273 | 253710, 253797 |
| 59727 | 52701422 | 52703642 | 197168 |
| 59728 | 52732564 | 52734508 | 136098 |
| 59729 | 52768296 | 52769994 | 243406, 217576 |
| 59730 | 52979620 | 52980719 | 136114 |
| 59731 | 52985651 | 52986770 | 136100 |
| 59732 | 52988541 | 52989863 | 136100 |
| 59733 | 53023508 | 53025192 | 136100 |
| 59734 | 53029033 | 53030271 | 136108 |
| 59735 | 53191024 | 53191947 | 250299, 139675 |
| 59736 | 53225556 | 53227869 | 165416 |
| 59737 | 53405001 | 53405427 | |
| 59738 | 53542146 | 53542654 | |
| 59739 | 57619855 | 57620980 | |
| 59740 | 57697531 | 57698193 | |
| 59741 | 57995398 | 57995874 | |
| 59742 | 58198776 | 58199431 | |
| 59743 | 60265006 | 60266128 | 139734 |
| 59744 | 60738008 | 60739209 | 139734 |
| 59745 | 60969867 | 60972592 | 083544 |
| 59746 | 61146509 | 61147097 | 083544 |
| 59747 | 61989075 | 61989793 | 197991 |
| 59748 | 62239426 | 62240042 | |
| 59749 | 62369652 | 62370141 | |
| 59750 | 67483845 | 67485156 | 184226, 228842 |
| 59751 | 67567548 | 67569807 | 233840, 184226 |
| 59752 | 67650518 | 67652020 | 184226 |
| 59753 | 67657928 | 67658867 | 184226 |
| 59754 | 67675541 | 67677406 | 184226 |
| 59755 | 67692070 | 67696646 | 184226 |
| 59756 | 67711153 | 67715219 | 184226 |
| 59757 | 67721417 | 67723000 | 184226 |
| 59758 | 67795786 | 67798873 | 184226 |
| 59759 | 67804384 | 67805726 | 184226 |
| 59760 | 67957492 | 67957961 | |
| 59761 | 68620789 | 68621450 | |
| 59762 | 68631145 | 68631716 | |
| 59763 | 70965611 | 70966328 | |
| 59764 | 71031425 | 71032084 | |
| 59765 | 71864454 | 71866355 | |
| 59766 | 73301095 | 73301755 | 204899 |
| 59767 | 73354962 | 73357148 | 083535, 083520 |
| 59768 | 73366086 | 73367280 | 083535 |
| 59769 | 73425145 | 73425898 | 220981, 083535 |
| 59770 | 73632644 | 73634922 | 102554 |
| 59771 | 73664033 | 73665353 | |
| 59772 | 73768313 | 73769427 | |
| 59773 | 73910764 | 73912085 | |
| 59774 | 73912502 | 73912990 | |
| 59775 | 74181926 | 74182710 | 224853 |
| 59776 | 74246459 | 74247190 | |
| 59777 | 74339435 | 74340891 | 118922 |
| 59778 | 74383643 | 74384108 | 118922 |
| 59779 | 74546511 | 74547153 | 118922 |
| 59780 | 74648867 | 74649334 | 118922 |
| 59781 | 74702143 | 74702794 | 118922 |
| 59782 | 74706351 | 74710885 | 118922 |
| 59783 | 74727317 | 74727767 | |
| 59784 | 74736296 | 74737144 | |
| 59785 | 74742075 | 74743007 | |
| 59786 | 74761363 | 74762352 | |
| 59787 | 74795795 | 74796748 | |
| 59788 | 74801288 | 74802465 | |
| 59789 | 74860743 | 74863151 | |
| 59790 | 75739649 | 75740390 | |
| 59791 | 75903790 | 75904308 | 136111 |
| 59792 | 75913579 | 75914574 | 136111 |
| 59793 | 75989477 | 75990540 | 136111 |
| 59794 | 76014122 | 76014987 | 136111 |
| 59795 | 76026504 | 76027279 | 136111 |
| 59796 | 76032810 | 76033751 | 136111 |
| 59797 | 76054775 | 76057130 | 136111 |
| 59798 | 76063888 | 76064542 | |
| 59799 | 76110954 | 76112642 | 188243 |
| 59800 | 76118913 | 76119608 | 188243 |
| 59801 | 76123277 | 76124738 | 118939, 261553, 188243 |
| 59802 | 76209848 | 76210807 | 261105, 136153, 261553 |
| 59803 | 76334300 | 76337573 | 136153, 261553 |
| 59804 | 76344202 | 76348625 | 136153, 261553 |
| 59805 | 76366523 | 76367745 | 136153, 261553 |
| 59806 | 76368717 | 76369240 | 136153, 261553 |
| 59807 | 76410182 | 76411065 | 136153 |
| 59808 | 77565424 | 77567397 | 005812, 102805 |
| 59809 | 77600193 | 77602216 | 005812 |
| 59810 | 77717355 | 77718108 | 005810 |
| 59811 | 77899614 | 77901682 | 005810 |
| 59812 | 77902875 | 77904612 | |
| 59813 | 77930208 | 77930845 | |
| 59814 | 77960946 | 77961929 | |
| 59815 | 78051914 | 78053017 | |
| 59816 | 78266732 | 78267421 | |
| 59817 | 78271378 | 78273311 | 139737, 266325 |
| 59818 | 79010213 | 79010948 | 234377 |
| 59819 | 79232380 | 79233608 | 152193 |
| 59820 | 79483945 | 79484982 | 230584 |
| 59821 | 79856574 | 79857671 | |
| 59822 | 79979066 | 79981522 | 227354, 139746 |
| 59823 | 80054644 | 80056583 | 102471, 232132 |
| 59824 | 80059058 | 80059896 | 102471 |
| 59825 | 80108101 | 80108618 | 102471 |
| 59826 | 80411574 | 80412458 | |
| 59827 | 80604482 | 80605252 | |
| 59828 | 80648186 | 80649531 | |
| 59829 | 80706734 | 80707667 | |
| 59830 | 80833175 | 80833784 | |
| 59831 | 80910473 | 80910849 | 136158 |
| 59832 | 80912223 | 80917718 | 136158 |
| 59833 | 80946115 | 80946723 | |
| 59834 | 80953088 | 80954020 | |
| 59835 | 81018297 | 81019323 | |
| 59836 | 81037671 | 81038333 | |
| 59837 | 81042561 | 81046406 | |
| 59838 | 81131530 | 81132975 | |
| 59839 | 82865865 | 82866538 | |
| 59840 | 90052848 | 90056452 | |
| 59841 | 90165490 | 90168754 | |
| 59842 | 91999570 | 92002132 | 215417 |
| 59843 | 92013681 | 92014753 | |
| 59844 | 92787274 | 92788431 | 179399 |
| 59845 | 93821335 | 93823393 | |
| 59846 | 93876475 | 93883343 | 183098 |
| 59847 | 93883794 | 93885145 | 183098 |
| 59848 | 93885918 | 93886920 | 183098 |
| 59849 | 93900493 | 93902998 | 183098 |
| 59850 | 93912673 | 93913565 | 183098 |
| 59851 | 93981005 | 93981804 | 183098 |
| 59852 | 94118564 | 94119603 | 183098 |
| 59853 | 94187360 | 94187939 | 183098 |
| 59854 | 94254972 | 94256325 | 183098 |
| 59855 | 94410225 | 94411909 | 183098 |
| 59856 | 94418979 | 94421036 | 183098 |
| 59857 | 94427177 | 94429676 | 183098 |
| 59858 | 94498904 | 94499892 | 183098 |
| 59859 | 94608175 | 94609485 | 183098 |
| 59860 | 94615357 | 94617091 | 183098 |
| 59861 | 94764411 | 94764995 | 183098 |
| 59862 | 94771468 | 94772329 | 183098 |
| 59863 | 94780153 | 94781979 | 183098 |
| 59864 | 94806624 | 94807087 | 236520, 183098 |
| 59865 | 94809764 | 94810614 | 236520, 183098 |
| 59866 | 94901762 | 94902389 | 183098 |
| 59867 | 94943050 | 94945878 | 183098 |
| 59868 | 94955573 | 94958728 | 183098 |
| 59869 | 94962204 | 94963676 | 183098 |
| 59870 | 94981221 | 94983066 | 183098 |
| 59871 | 94994689 | 94995922 | 183098 |
| 59872 | 94996291 | 94998389 | 183098 |
| 59873 | 95200636 | 95202729 | |
| 59874 | 95237944 | 95238476 | 088451 |
| 59875 | 95246996 | 95248844 | 088451 |
| 59876 | 95251944 | 95252595 | |
| 59877 | 95253709 | 95254881 | 152749 |
| 59878 | 95432660 | 95433281 | |
| 59879 | 95775607 | 95776819 | 125257 |
| 59880 | 95948601 | 95949339 | 125257 |
| 59881 | 95949615 | 95950415 | 125257 |
| 59882 | 95952856 | 95954301 | 125257 |
| 59883 | 95966601 | 95967290 | |
| 59884 | 96030828 | 96031188 | |
| 59885 | 96187188 | 96188447 | 134873 |
| 59886 | 96255796 | 96257026 | 134874 |
| 59887 | 96327809 | 96330695 | 102580, 247400 |
| 59888 | 96366442 | 96367787 | 251901, 102580 |
| 59889 | 96704904 | 96706275 | 102595 |
| 59890 | 97761868 | 97762737 | |
| 59891 | 97793509 | 97794348 | |
| 59892 | 97794598 | 97795303 | |
| 59893 | 97874187 | 97878002 | 139793 |
| 59894 | 97881664 | 97883621 | 139793 |
| 59895 | 97901238 | 97901898 | 139793 |
| 59896 | 97906686 | 97914778 | 139793 |
| 59897 | 97926315 | 97929733 | 139793 |
| 59898 | 97940279 | 97941337 | 139793 |
| 59899 | 97941909 | 97942502 | 139793 |
| 59900 | 97948155 | 97949941 | 139793 |
| 59901 | 97958880 | 97961888 | 139793 |
| 59902 | 97980320 | 97980814 | 139793 |
| 59903 | 98021256 | 98022296 | 139793 |
| 59904 | 98084884 | 98086879 | 125249 |
| 59905 | 98627433 | 98630117 | 065150 |
| 59906 | 98678440 | 98679690 | |
| 59907 | 98793949 | 98797721 | 152767 |
| 59908 | 98813514 | 98814198 | 152767 |
| 59909 | 98823449 | 98827154 | 152767 |
| 59910 | 98841982 | 98843767 | 152767 |
| 59911 | 98847172 | 98847892 | 152767 |
| 59912 | 98854037 | 98855027 | 152767 |
| 59913 | 98858490 | 98860358 | 152767 |
| 59914 | 98880714 | 98881703 | 152767 |
| 59915 | 98905263 | 98905850 | 152767 |
| 59916 | 98907689 | 98908484 | 152767 |
| 59917 | 98918157 | 98918995 | 152767 |
| 59918 | 98927541 | 98928500 | 152767 |
| 59919 | 98945275 | 98946471 | 152767 |
| 59920 | 98960237 | 98960836 | 152767 |
| 59921 | 98976301 | 98976818 | 152767 |
| 59922 | 99106499 | 99107487 | 102572 |
| 59923 | 99118750 | 99120385 | 102572 |
| 59924 | 99125311 | 99126717 | 102572 |
| 59925 | 99128118 | 99129913 | 102572 |
| 59926 | 99134634 | 99137632 | 102572 |
| 59927 | 99155204 | 99156667 | 102572 |
| 59928 | 99158331 | 99159960 | 102572 |
| 59929 | 99187620 | 99188583 | 102572 |
| 59930 | 99221326 | 99222513 | 102572 |
| 59931 | 99227493 | 99230910 | 224418, 102572 |
| 59932 | 99251526 | 99252374 | |
| 59933 | 99305429 | 99306092 | |
| 59934 | 99316153 | 99318988 | |
| 59935 | 99324590 | 99326664 | |
| 59936 | 99398859 | 99399920 | 088386 |
| 59937 | 99403656 | 99405568 | 088386 |
| 59938 | 99407910 | 99408442 | |
| 59939 | 99412955 | 99414450 | |
| 59940 | 99427890 | 99428795 | |
| 59941 | 99454764 | 99455277 | 088387 |
| 59942 | 99461473 | 99462068 | 088387 |
| 59943 | 99473135 | 99476106 | 088387 |
| 59944 | 99476267 | 99477077 | 088387 |
| 59945 | 99479792 | 99482745 | 088387 |
| 59946 | 99636304 | 99636867 | 088387 |
| 59947 | 99683091 | 99684876 | 088387 |
| 59948 | 99685971 | 99687013 | 088387 |
| 59949 | 99718820 | 99720822 | 088387 |
| 59950 | 99737829 | 99740680 | 260992, 088387 |
| 59951 | 99852030 | 99854723 | 134882, 228889 |
| 59952 | 99933984 | 99934491 | 134882 |
| 59953 | 99937925 | 99938477 | 134882 |
| 59954 | 99991952 | 99992657 | 134882 |
| 59955 | 100119888 | 100120446 | |
| 59956 | 100150182 | 100151993 | 203441 |
| 59957 | 100152854 | 100154837 | 125304, 203441 |
| 59958 | 100178743 | 100179176 | 125304 |
| 59959 | 100230246 | 100231359 | 234168 |
| 59960 | 100257761 | 100259846 | 125246 |
| 59961 | 100302760 | 100303723 | 125246 |
| 59962 | 100306694 | 100309132 | 125246 |
| 59963 | 100309860 | 100311521 | 125246 |
| 59964 | 100403760 | 100404523 | 125246 |
| 59965 | 100408375 | 100409067 | 125246 |
| 59966 | 100461899 | 100466388 | 125246 |
| 59967 | 100560272 | 100561258 | |
| 59968 | 100632424 | 100633834 | |
| 59969 | 100634130 | 100634732 | 043355 |
| 59970 | 100740711 | 100742865 | 175198 |
| 59971 | 100750375 | 100753818 | 175198 |
| 59972 | 100764363 | 100765037 | 175198 |
| 59973 | 100849741 | 100850743 | 270632, 175198 |
| 59974 | 100882338 | 100883065 | 175198 |
| 59975 | 101033860 | 101034603 | 175198 |
| 59976 | 101044074 | 101046160 | 175198 |
| 59977 | 101086142 | 101086907 | 175198 |
| 59978 | 101088234 | 101088836 | 175198 |
| 59979 | 101092353 | 101093959 | 175198 |
| 59980 | 101095310 | 101096126 | 175198 |
| 59981 | 101168835 | 101169940 | 175198 |
| 59982 | 101175626 | 101176712 | 175198 |
| 59983 | 101177305 | 101178272 | 175198 |
| 59984 | 101185700 | 101186298 | 134864 |
| 59985 | 101196058 | 101197911 | 224356, 134864 |
| 59986 | 101213995 | 101214507 | 224356, 134864 |
| 59987 | 101240235 | 101241422 | 134864 |
| 59988 | 101326027 | 101328088 | 125247 |
| 59989 | 101386234 | 101387075 | 233009 |
| 59990 | 101527325 | 101529040 | 233009 |
| 59991 | 101677902 | 101680256 | 233009 |
| 59992 | 102166788 | 102167605 | 198542 |
| 59993 | 102222100 | 102223418 | 198542 |
| 59994 | 102242462 | 102243412 | 198542 |
| 59995 | 102278768 | 102280512 | 198542 |
| 59996 | 102300738 | 102303026 | 198542 |
| 59997 | 102359005 | 102359745 | 198542 |
| 59998 | 102390480 | 102391154 | 102466 |
| 59999 | 102391427 | 102393108 | 102466 |
| 60000 | 102398819 | 102399951 | 102466 |
| 60001 | 102425367 | 102425921 | 102466 |
| 60002 | 102527978 | 102529093 | 102466 |
| 60003 | 102788803 | 102790078 | 102466 |
| 60004 | 102835348 | 102837320 | 102466 |
| 60005 | 102842573 | 102846106 | 102466 |
| 60006 | 102850452 | 102851889 | 102466 |
| 60007 | 102885826 | 102886538 | 102466 |
| 60008 | 102887724 | 102889299 | 102466 |
| 60009 | 102937402 | 102939646 | 102466 |
| 60010 | 102943620 | 102944735 | 243319, 102466 |
| 60011 | 102946933 | 102948474 | 243319, 102466 |
| 60012 | 103046041 | 103048071 | 272143, 243319, 102466 |
| 60013 | 103052166 | 103053825 | 270581, 102466 |
| 60014 | 103244215 | 103245056 | |
| 60015 | 103247996 | 103250471 | 134900 |
| 60016 | 103377131 | 103377751 | |
| 60017 | 103422692 | 103423326 | 151287 |
| 60018 | 103424752 | 103426999 | 151287 |
| 60019 | 103441028 | 103441660 | 134901 |
| 60020 | 103450809 | 103453582 | 134897, 134901 |
| 60021 | 103482852 | 103483480 | 270181, 134897 |
| 60022 | 103491543 | 103492165 | 270181, 134897 |
| 60023 | 103497395 | 103500390 | 270181, 134899 |
| 60024 | 103515783 | 103516382 | 270181, 134899 |
| 60025 | 103529258 | 103530178 | |
| 60026 | 103549697 | 103550821 | |
| 60027 | 103552459 | 103553156 | |
| 60028 | 103554996 | 103555615 | |
| 60029 | 103560094 | 103561235 | |
| 60030 | 104169566 | 104170430 | |
| 60031 | 104183535 | 104184173 | |
| 60032 | 104316214 | 104316783 | |
| 60033 | 104383679 | 104384715 | |
| 60034 | 104535121 | 104536793 | |
| 60035 | 104967608 | 104969080 | |
| 60036 | 105605820 | 105607100 | |
| 60037 | 107187980 | 107188554 | |
| 60038 | 107219011 | 107220861 | 134884 |
| 60039 | 107569391 | 107570825 | |
| 60040 | 107638230 | 107640175 | |
| 60041 | 108806362 | 108808381 | |
| 60042 | 108869815 | 108871775 | 139826, 174405 |
| 60043 | 108956415 | 108957298 | 102524 |
| 60044 | 109566636 | 109570299 | 041515 |
| 60045 | 109597003 | 109597713 | 041515 |
| 60046 | 109609748 | 109610494 | 041515 |
| 60047 | 109613691 | 109614526 | 041515 |
| 60048 | 109632314 | 109633130 | 041515 |
| 60049 | 109895585 | 109896754 | |
| 60050 | 109908562 | 109911558 | |
| 60051 | 109926360 | 109927470 | |
| 60052 | 109961762 | 109962955 | 236053 |
| 60053 | 110041254 | 110043301 | |
| 60054 | 110045290 | 110045823 | |
| 60055 | 110047487 | 110050118 | |
| 60056 | 110052563 | 110053557 | 229792 |
| 60057 | 110055308 | 110055838 | |
| 60058 | 110060565 | 110061998 | |
| 60059 | 110238999 | 110239936 | |
| 60060 | 110245046 | 110245965 | |
| 60061 | 110246780 | 110247396 | |
| 60062 | 110337053 | 110338768 | |
| 60063 | 110339639 | 110341055 | |
| 60064 | 110356592 | 110358480 | |
| 60065 | 110367483 | 110369156 | |
| 60066 | 110372852 | 110373875 | |
| 60067 | 110430176 | 110431017 | 185950 |
| 60068 | 110433100 | 110434768 | 185950 |
| 60069 | 110436165 | 110440419 | 185950 |
| 60070 | 110455130 | 110456088 | |
| 60071 | 110468310 | 110469350 | |
| 60072 | 110488859 | 110489989 | |
| 60073 | 110519979 | 110523617 | |
| 60074 | 110525910 | 110528852 | |
| 60075 | 110650946 | 110651638 | |
| 60076 | 110658627 | 110659318 | |
| 60077 | 110669712 | 110670477 | |
| 60078 | 110699490 | 110700427 | |
| 60079 | 110713633 | 110717356 | |
| 60080 | 110746387 | 110748623 | |
| 60081 | 110778586 | 110779222 | |
| 60082 | 110789765 | 110791840 | |
| 60083 | 110849091 | 110849823 | 187498 |
| 60084 | 110999793 | 111000392 | 134871 |
| 60085 | 111048284 | 111050698 | 134871 |
| 60086 | 111063935 | 111066012 | 134871 |
| 60087 | 111158666 | 111160911 | 232814, 134871 |
| 60088 | 111172451 | 111174218 | |
| 60089 | 111176122 | 111180572 | 139832 |
| 60090 | 111193183 | 111194339 | 139832 |
| 60091 | 111208058 | 111208627 | 139832 |
| 60092 | 111211563 | 111214728 | 139832 |
| 60093 | 111227794 | 111228954 | |
| 60094 | 111228968 | 111229573 | |
| 60095 | 111267098 | 111270325 | 213995 |
| 60096 | 111357085 | 111359098 | 134905 |
| 60097 | 111363787 | 111366675 | 153487, 134905 |
| 60098 | 111367435 | 111369003 | 153487 |
| 60099 | 111461990 | 111462866 | 259831 |
| 60100 | 111522243 | 111523044 | |
| 60101 | 111564655 | 111569115 | 088448 |
| 60102 | 111617526 | 111618110 | |
| 60103 | 111719555 | 111720633 | |
| 60104 | 111805071 | 111807318 | 102606 |
| 60105 | 112154416 | 112155400 | |
| 60106 | 112186157 | 112187074 | |
| 60107 | 112194766 | 112196024 | |
| 60108 | 112220375 | 112221223 | |
| 60109 | 112266831 | 112267433 | 215881, 204398 |
| 60110 | 112324321 | 112325127 | 204398 |
| 60111 | 112330483 | 112331371 | |
| 60112 | 112867336 | 112868735 | |
| 60113 | 112884185 | 112885364 | |
| 60114 | 112902333 | 112903278 | |
| 60115 | 113127862 | 113128648 | |
| 60116 | 113130948 | 113131897 | |
| 60117 | 113241547 | 113243518 | 126216 |
| 60118 | 113260094 | 113261716 | |
| 60119 | 113298077 | 113298746 | |
| 60120 | 113342950 | 113345707 | 068650 |
| 60121 | 113352022 | 113353056 | 068650 |
| 60122 | 113365687 | 113367319 | 068650 |
| 60123 | 113376687 | 113377582 | 068650 |
| 60124 | 113547631 | 113548829 | 126217 |
| 60125 | 113581257 | 113581929 | 126217 |
| 60126 | 113583043 | 113583861 | 126217 |
| 60127 | 113622502 | 113624112 | 235280, 126217 |
| 60128 | 113638834 | 113640200 | 126217 |
| 60129 | 113759485 | 113760913 | 057593 |
| 60130 | 113776493 | 113778083 | 126218 |
| 60131 | 113791822 | 113792708 | 126218 |
| 60132 | 113803983 | 113805431 | |
| 60133 | 113805994 | 113808478 | |
| 60134 | 113812181 | 113814212 | 126231 |
| 60135 | 113841413 | 113843642 | 126226 |
| 60136 | 113861927 | 113864924 | 139842, 126226 |
| 60137 | 113873390 | 113874973 | 139842 |
| 60138 | 113950624 | 113953137 | 185896 |
| 60139 | 113953953 | 113954791 | 185896 |
| 60140 | 114017329 | 114018648 | 139835 |
| 60141 | 114047782 | 114048781 | |
| 60142 | 114144293 | 114146420 | 150403, 150401 |
| 60143 | 114147014 | 114149149 | 150403 |
| 60144 | 114239068 | 114239881 | 198176 |
| 60145 | 114301504 | 114302271 | |
| 60146 | 114534862 | 114536675 | 233695, 183087 |
| 60147 | 114539100 | 114541508 | 233695, 183087 |
| 60148 | 114541703 | 114544123 | 233695, 183087 |
| 60149 | 114547715 | 114549347 | 183087 |
| 60150 | 114565550 | 114567667 | 272695, 183087 |
| 60151 | 114739688 | 114741430 | |
| 60152 | 114746223 | 114746753 | |
| 60153 | 114829449 | 114831738 | 185989 |
| 60154 | 114880362 | 114881832 | 185989 |
| 60155 | 114884100 | 114885127 | 185989 |
| 60156 | 114917067 | 114917714 | |
| 60157 | 114993383 | 114994759 | |
| 60158 | 115000013 | 115001466 | 130177 |
| 60159 | 115045618 | 115048411 | 169062 |
| 60160 | 115078971 | 115080844 | 198824 |

[0582] The locations of ODSCs on Chromosome 14 are shown in Table 56.

TABLE 56
ODSC Locations on Chromosome 14

| SEQ ID NO. | Start | End | Overlapping Gene(s) |
|---|---|---|---|
| 60161 | 20773699 | 20774374 | 258459, 136319 |
| 60162 | 20794997 | 20796059 | 100814 |
| 60163 | 20799180 | 20799839 | 100814 |
| 60164 | 20800355 | 20802464 | 100814 |
| 60165 | 20810085 | 20812806 | 259001, 254846, 129484 |
| 60166 | 20868232 | 20870407 | 129566 |
| 60167 | 20876808 | 20877855 | 129566 |
| 60168 | 20879581 | 20882904 | 129566 |
| 60169 | 20922063 | 20924709 | 100823, 092094 |
| 60170 | 20928865 | 20930439 | 165782 |
| 60171 | 20936778 | 20939295 | 198805 |
| 60172 | 20940592 | 20941281 | 198805 |
| 60173 | 21077176 | 21078957 | 259060, 173464 |
| 60174 | 21081110 | 21082337 | |
| 60175 | 21100917 | 21101736 | |
| 60176 | 21130847 | 21131752 | |
| 60177 | 21148997 | 21157418 | 259171, 214274, 258818 |
| 60178 | 21158906 | 21159788 | 259171, 214274, 258818 |
| 60179 | 21315907 | 21318003 | |
| 60180 | 21438975 | 21440041 | |
| 60181 | 21457155 | 21458953 | 165792 |
| 60182 | 21482783 | 21483779 | |
| 60183 | 21491934 | 21494118 | 258604, 179636, 165795 |
| 60184 | 21506622 | 21508823 | 165795 |
| 60185 | 21509178 | 21512916 | 165799, 165795 |
| 60186 | 21515433 | 21516020 | 165795 |
| 60187 | 21522070 | 21523208 | 165795 |
| 60188 | 21528581 | 21532438 | 165795 |
| 60189 | 21537593 | 21540523 | 165801, 165795 |
| 60190 | 21552966 | 21554141 | 165801 |
| 60191 | 21565120 | 21567334 | 232070, 165804 |
| 60192 | 21571407 | 21573669 | 232070, 165804 |
| 60193 | 21731679 | 21732991 | 092199 |
| 60194 | 21735735 | 21738762 | 092199 |
| 60195 | 21776190 | 21777991 | 092200 |
| 60196 | 21850223 | 21850699 | 092201 |
| 60197 | 21851090 | 21852853 | 260830, 092201 |
| 60198 | 21904615 | 21906387 | 100888 |
| 60199 | 21923080 | 21925290 | 100888 |
| 60200 | 21944583 | 21946299 | 092203, 129472 |
| 60201 | 21978405 | 21980441 | 165819 |
| 60202 | 21994087 | 21994856 | 165821 |
| 60203 | 22025376 | 22026535 | |
| 60204 | 22383067 | 22386581 | 211791 |
| 60205 | 22641133 | 22643142 | |
| 60206 | 22801682 | 22803752 | 256221 |
| 60207 | 22838233 | 22839960 | |
| 60208 | 22859119 | 22859961 | 251002 |
| 60209 | 22896709 | 22897251 | 251002 |
| 60210 | 23039154 | 23039911 | 129562 |
| 60211 | 23041460 | 23041984 | 129562 |
| 60212 | 23056931 | 23059076 | 129562 |
| 60213 | 23066809 | 23069006 | 100439, 228313 |
| 60214 | 23082686 | 23083840 | |
| 60215 | 23122172 | 23122755 | |
| 60216 | 23137275 | 23138963 | |
| 60217 | 23235008 | 23236890 | 155463, 258458 |
| 60218 | 23290932 | 23292853 | 215306, 155465 |
| 60219 | 23293857 | 23294590 | 155465 |
| 60220 | 23298308 | 23300027 | 172590, 155465 |
| 60221 | 23305573 | 23307317 | 157227 |
| 60222 | 23321913 | 23323101 | 212335 |
| 60223 | 23339702 | 23342799 | 197324 |
| 60224 | 23372246 | 23373373 | 100461 |
| 60225 | 23386439 | 23388860 | 237054, 100461 |
| 60226 | 23397607 | 23400266 | 257285, 100462 |
| 60227 | 23424912 | 23426636 | 265037, 092036, 259132 |
| 60228 | 23435718 | 23436218 | 259132 |
| 60229 | 23443227 | 23444403 | 259132, 129474 |
| 60230 | 23445153 | 23452913 | 258457, 259132, 129474 |
| 60231 | 23475280 | 23477292 | 100802 |
| 60232 | 23478682 | 23480143 | 100802 |
| 60233 | 23503144 | 23505319 | 100804 |
| 60234 | 23526614 | 23527705 | 139880 |
| 60235 | 23531025 | 23532269 | 100813 |
| 60236 | 23539559 | 23541138 | 100813 |
| 60237 | 23547015 | 23548833 | 100813 |
| 60238 | 23563585 | 23565713 | 179933, 100813 |
| 60239 | 23714376 | 23714961 | 215277 |
| 60240 | 23754361 | 23756360 | 215271 |
| 60241 | 23769678 | 23771085 | 129473, 235194 |
| 60242 | 23775212 | 23776925 | 258643, 129473 |
| 60243 | 23789419 | 23792103 | 100836, 268702, 258643 |
| 60244 | 23937867 | 23939748 | 129460 |
| 60245 | 24019784 | 24021538 | 136367, 157306 |
| 60246 | 24024732 | 24026644 | 259431, 136367, 157306 |
| 60247 | 24070791 | 24072480 | |
| 60248 | 24077533 | 24079826 | |
| 60249 | 24082566 | 24083155 | |
| 60250 | 24405232 | 24406224 | |
| 60251 | 24422520 | 24423763 | 157326, 215256 |
| 60252 | 24505172 | 24506356 | 225766 |
| 60253 | 24520839 | 24521449 | 186648 |
| 60254 | 24530348 | 24531278 | 186648 |
| 60255 | 24533262 | 24533830 | 186648 |
| 60256 | 24543621 | 24545401 | 100884 |
| 60257 | 24550102 | 24551283 | 129535 |
| 60258 | 24561950 | 24565516 | 100889, 129535 |
| 60259 | 24577844 | 24578514 | 100889, 129535 |
| 60260 | 24582378 | 24585225 | 100897, 129535 |
| 60261 | 24604550 | 24606371 | 092010 |
| 60262 | 24610076 | 24611262 | 100908 |
| 60263 | 24615004 | 24616409 | 092098, 100911 |
| 60264 | 24616440 | 24617625 | 100911, 092098 |
| 60265 | 24629908 | 24631696 | 213928, 259529 |
| 60266 | 24648902 | 24649902 | 196497, 259522, 100918 |
| 60267 | 24657209 | 24658438 | 254692, 100926, 196497, |
| | | | 259522 |
| 60268 | 24663905 | 24666286 | 254692, 100926 |
| 60269 | 24681812 | 24683454 | 213920, 255526, 254692, |
| | | | 254505, 100926, 260669 |
| 60270 | 24684538 | 24685542 | 213920, 260669, 255526 |
| 60271 | 24700460 | 24702873 | 100938, 129559, 255526 |
| 60272 | 24710954 | 24713232 | 092330 |
| 60273 | 24740005 | 24741592 | 100949 |
| 60274 | 24768036 | 24769904 | 196943, 157379 |
| 60275 | 24776099 | 24778151 | 196943, 213906, 136305 |
| 60276 | 24779815 | 24780574 | 213906, 136305, 272658 |
| 60277 | 24801162 | 24802259 | 258973, 129467 |
| 60278 | 24802711 | 24803580 | 258973, 129467 |
| 60279 | 24812919 | 24813868 | |
| 60280 | 24822359 | 24823987 | |
| 60281 | 24855881 | 24856415 | |
| 60282 | 24872532 | 24872968 | 205978 |
| 60283 | 24887429 | 24888284 | 205978 |
| 60284 | 24894621 | 24895278 | |
| 60285 | 24895811 | 24896639 | 139899 |
| 60286 | 24898275 | 24900763 | 100441, 139899 |
| 60287 | 24910874 | 24913042 | 100445 |
| 60288 | 25278333 | 25278693 | |
| 60289 | 25279210 | 25280236 | 168952 |
| 60290 | 25284678 | 25288355 | 168952 |
| 60291 | 25307731 | 25310104 | 168952 |
| 60292 | 25330294 | 25331011 | 168952 |
| 60293 | 25666886 | 25667478 | |
| 60294 | 26750586 | 26751350 | |
| 60295 | 27233989 | 27236139 | 257842 |
| 60296 | 27244286 | 27246510 | 257845, 257842 |
| 60297 | 27277444 | 27278086 | 257845 |
| 60298 | 27309649 | 27312713 | 258081 |
| 60299 | 29226324 | 29226767 | 257126 |
| 60300 | 29497958 | 29498977 | 258028 |
| 60301 | 30054134 | 30054586 | 184304 |
| 60302 | 30315787 | 30316500 | 184304 |
| 60303 | 30692445 | 30693649 | 248975 |
| 60304 | 30858260 | 30859310 | |
| 60305 | 31027601 | 31028887 | 092140, 257636 |
| 60306 | 31090428 | 31092453 | 092108 |
| 60307 | 31317699 | 31318472 | |
| 60308 | 31463857 | 31464583 | 196792 |
| 60309 | 31494134 | 31496771 | 100478, 196792 |
| 60310 | 31500212 | 31503808 | 100478 |
| 60311 | 31528630 | 31529335 | 100478 |
| 60312 | 31559073 | 31561536 | 100478 |
| 60313 | 31634239 | 31635408 | 092148 |
| 60314 | 31664194 | 31664761 | 092148 |
| 60315 | 31675009 | 31678350 | 092148 |
| 60316 | 31697430 | 31700168 | |
| 60317 | 31726970 | 31727928 | 199291, 257831 |
| 60318 | 31730667 | 31732472 | 257831 |
| 60319 | 31732714 | 31733803 | 257831 |
| 60320 | 31734916 | 31735530 | 257831 |
| 60321 | 31830157 | 31831143 | 129493, 203546 |
| 60322 | 31888657 | 31890467 | 250365, 129493, 203546 |
| 60323 | 31925774 | 31928013 | 129480, 203546 |
| 60324 | 32030252 | 32031643 | 257155, 151413 |
| 60325 | 32324353 | 32324986 | 151413 |
| 60326 | 32349590 | 32351612 | |
| 60327 | 32403780 | 32408031 | |
| 60328 | 32413063 | 32414667 | 258474 |
| 60329 | 32434672 | 32437717 | |
| 60330 | 32462023 | 32463400 | |
| 60331 | 32544598 | 32548662 | 258655, 100852 |
| 60332 | 32669927 | 32673674 | 201654, 202337 |
| 60333 | 32689957 | 32690553 | |
| 60334 | 32698439 | 32700891 | |
| 60335 | 32725571 | 32727220 | |
| 60336 | 32728653 | 32729374 | |
| 60337 | 32772981 | 32773623 | |
| 60338 | 32776831 | 32778011 | |
| 60339 | 32848544 | 32849026 | 151320, 258580 |
| 60340 | 32937150 | 32939081 | 151320 |
| 60341 | 32941011 | 32943184 | 151320 |
| 60342 | 32976252 | 32977831 | 151320 |
| 60343 | 32978430 | 32979608 | 151320 |
| 60344 | 32982677 | 32984500 | 151320 |
| 60345 | 33027643 | 33030081 | 151320 |
| 60346 | 33104143 | 33104891 | 151320 |
| 60347 | 33365889 | 33367265 | |
| 60348 | 33407293 | 33409237 | 151322 |
| 60349 | 34407678 | 34408175 | 129521 |
| 60350 | 34458288 | 34459754 | 129521 |
| 60351 | 34504488 | 34505869 | 129521 |
| 60352 | 34512626 | 34513443 | 258897, 129521 |
| 60353 | 34529036 | 34530243 | 129521 |
| 60354 | 34550326 | 34551803 | 129521 |
| 60355 | 34719354 | 34720659 | 129521 |
| 60356 | 34726598 | 34728100 | 129521 |
| 60357 | 34766413 | 34767836 | 129521 |
| 60358 | 34893322 | 34896455 | 129521 |
| 60359 | 34930031 | 34932353 | 165389, 129521 |
| 60360 | 35007580 | 35009289 | 129518 |
| 60361 | 35098376 | 35099532 | 129515 |
| 60362 | 35156527 | 35157261 | |
| 60363 | 35168597 | 35169834 | |
| 60364 | 35182132 | 35184778 | 165410 |
| 60365 | 35187063 | 35189001 | |
| 60366 | 35312053 | 35313006 | 198604 |
| 60367 | 35342688 | 35345260 | 258738, 198604 |
| 60368 | 35449822 | 35453146 | 100883, 258704 |
| 60369 | 35514501 | 35516853 | 151327 |
| 60370 | 35519324 | 35520462 | 151327 |
| 60371 | 35547102 | 35547695 | 151327 |
| 60372 | 35586278 | 35586840 | 092020 |
| 60373 | 35590131 | 35592522 | 100890, 258790, 092020 |
| 60374 | 35625073 | 35625992 | 100890, 258790 |
| 60375 | 35628455 | 35631262 | 100890, 258790 |
| 60376 | 35682190 | 35685103 | 100890, 258790 |
| 60377 | 35756597 | 35757424 | 100902, 258790 |
| 60378 | 35760988 | 35762604 | 100902, 258790 |
| 60379 | 35804431 | 35807634 | |
| 60380 | 35810078 | 35812065 | |
| 60381 | 35821594 | 35823560 | |
| 60382 | 35824835 | 35826277 | |
| 60383 | 35833860 | 35836715 | |
| 60384 | 35843304 | 35843997 | |
| 60385 | 35866329 | 35868038 | |
| 60386 | 35868054 | 35875546 | 100906 |
| 60387 | 36277853 | 36278783 | 266264, 174373 |
| 60388 | 36295129 | 36296552 | 100916, 258938 |
| 60389 | 36345079 | 36349262 | 100916 |
| 60390 | 36523399 | 36524365 | 257720, 258342 |
| 60391 | 36526924 | 36527324 | 258342 |
| 60392 | 36537845 | 36539348 | |
| 60393 | 36560149 | 36560890 | 257585 |
| 60394 | 36769270 | 36770160 | 151332 |
| 60395 | 36786796 | 36787748 | 151332 |
| 60396 | 36788457 | 36790380 | 151332 |
| 60397 | 36899200 | 36900625 | |
| 60398 | 36923740 | 36924390 | |
| 60399 | 37585991 | 37586952 | 183032 |
| 60400 | 37640978 | 37642295 | 258708, 183032 |
| 60401 | 37666259 | 37667859 | 151338 |
| 60402 | 37758747 | 37759444 | 151338 |
| 60403 | 37798389 | 37799015 | 151338 |
| 60404 | 37935155 | 37936352 | 151338 |
| 60405 | 37949783 | 37950917 | 151338 |
| 60406 | 38015185 | 38016747 | 151338 |
| 60407 | 38035457 | 38036834 | 259087, 258414 |
| 60408 | 38048768 | 38050564 | |
| 60409 | 38051968 | 38054001 | |
| 60410 | 38054922 | 38066016 | 129514, 139865 |
| 60411 | 38068337 | 38069608 | 129514, 139865 |
| 60412 | 38071669 | 38072767 | 139865 |
| 60413 | 38166164 | 38167293 | 139865 |
| 60414 | 38260345 | 38261258 | 139865 |
| 60415 | 38334075 | 38334901 | 139865 |
| 60416 | 38343692 | 38344613 | 139865 |
| 60417 | 38676693 | 38679009 | 139874 |
| 60418 | 38759722 | 38760328 | 259072 |
| 60419 | 38860253 | 38861270 | |
| 60420 | 39337623 | 39338440 | 259070 |
| 60421 | 39492511 | 39493855 | |
| 60422 | 39519537 | 39520075 | 100934 |
| 60423 | 39570937 | 39573436 | 258651, 100934 |
| 60424 | 39638179 | 39640391 | 182400 |
| 60425 | 39643281 | 39645882 | 259083, 100941 |
| 60426 | 39702750 | 39703960 | 258941, 150526 |
| 60427 | 39734247 | 39737391 | 258940, 150527, 258941 |
| 60428 | 39845782 | 39846664 | 150527 |
| 60429 | 39900179 | 39902785 | 165355 |
| 60430 | 41704459 | 41705240 | |
| 60431 | 43641975 | 43642941 | |
| 60432 | 44247726 | 44248951 | |
| 60433 | 44450464 | 44451241 | |
| 60434 | 44478814 | 44480278 | 258969 |
| 60435 | 44897299 | 44898261 | |
| 60436 | 45365808 | 45367545 | 179476, 258633 |
| 60437 | 45430147 | 45432164 | 198718, 179454 |
| 60438 | 45552733 | 45554258 | 185246, 249163 |
| 60439 | 45602759 | 45605529 | 187790, 100442 |
| 60440 | 45721236 | 45723892 | 129534 |
| 60441 | 46956796 | 46958156 | 258700 |
| 60442 | 47959436 | 47960912 | 272781, 139915 |
| 60443 | 48802283 | 48803563 | |
| 60444 | 49432208 | 49433092 | |
| 60445 | 49946052 | 49946602 | |
| 60446 | 50016539 | 50017846 | |
| 60447 | 50051856 | 50054034 | 258486, 213741 |
| 60448 | 50064292 | 50066598 | 165501, 253459, 213741 |
| 60449 | 50086223 | 50091553 | 258377, 168282, 165502 |
| 60450 | 50099678 | 50102546 | 165506 |
| 60451 | 50107452 | 50109142 | |
| 60452 | 50154424 | 50155395 | 100479 |
| 60453 | 50159476 | 50160692 | 197776 |
| 60454 | 50233556 | 50237783 | 165516 |
| 60455 | 50318512 | 50320822 | 266037, 165525 |
| 60456 | 50327792 | 50331185 | 265150 |
| 60457 | 50334114 | 50335824 | |
| 60458 | 50358441 | 50361179 | 165527 |
| 60459 | 50431705 | 50434469 | |
| 60460 | 50438613 | 50440121 | |
| 60461 | 50452569 | 50455965 | 214900 |
| 60462 | 50458311 | 50460816 | 214900 |
| 60463 | 50465819 | 50471293 | 214900 |
| 60464 | 50484634 | 50486681 | 258929 |
| 60465 | 50504427 | 50507962 | 273065, 258929 |
| 60466 | 50510278 | 50513227 | 273307, 273065 |
| 60467 | 50526729 | 50529991 | 273307, 273065 |
| 60468 | 50582580 | 50584115 | 100485, 100483 |
| 60469 | 50691755 | 50693029 | 100485 |
| 60470 | 50696953 | 50699429 | 100485 |
| 60471 | 50770455 | 50770942 | 087299 |
| 60472 | 50778080 | 50780036 | 125375, 087299 |
| 60473 | 50808953 | 50809997 | 100490 |
| 60474 | 50856416 | 50857006 | 100490 |
| 60475 | 50862861 | 50864111 | 258857, 100490 |
| 60476 | 50908234 | 50909136 | 012983 |
| 60477 | 50913281 | 50914638 | 012983 |
| 60478 | 50996379 | 51000192 | 198513, 012983 |
| 60479 | 51133540 | 51135956 | 151748 |
| 60480 | 51283146 | 51283599 | 100503 |
| 60481 | 51296695 | 51298479 | 100503 |
| 60482 | 51386117 | 51386600 | 100504 |
| 60483 | 51401992 | 51402964 | 100504 |
| 60484 | 51403912 | 51404538 | 100504 |
| 60485 | 51409455 | 51412436 | 100504 |
| 60486 | 51421688 | 51422901 | |
| 60487 | 51470412 | 51474656 | 100505 |
| 60488 | 51495279 | 51497079 | 100505 |
| 60489 | 51543960 | 51545115 | 100505 |
| 60490 | 51561815 | 51563101 | 100505 |
| 60491 | 51613915 | 51614388 | |
| 60492 | 51706712 | 51707682 | 139921 |
| 60493 | 51759715 | 51760653 | |
| 60494 | 51808087 | 51809976 | 258479 |
| 60495 | 51897127 | 51900204 | |
| 60496 | 51908632 | 51910546 | |
| 60497 | 51914473 | 51916887 | |
| 60498 | 51999216 | 52002617 | 139926, 258537 |
| 60499 | 52005022 | 52008361 | 139926, 258537 |
| 60500 | 52011933 | 52015689 | 139926, 258537 |
| 60501 | 52018783 | 52023164 | 139926, 258537 |
| 60502 | 52083541 | 52084293 | 139926 |
| 60503 | 52104594 | 52105779 | 139926 |
| 60504 | 52117084 | 52120488 | 139926 |
| 60505 | 52455727 | 52457054 | 087302 |
| 60506 | 52474308 | 52474909 | 087303 |
| 60507 | 52924497 | 52926020 | 087301 |
| 60508 | 53018822 | 53020957 | 180998, 087301 |
| 60509 | 53160689 | 53163472 | 197930 |
| 60510 | 53166996 | 53168557 | |
| 60511 | 53172921 | 53174940 | 100519 |
| 60512 | 53196587 | 53197880 | 198252 |
| 60513 | 53256837 | 53259440 | 100522 |
| 60514 | 53288241 | 53289088 | |
| 60515 | 53372426 | 53374232 | 073712 |
| 60516 | 53392848 | 53393389 | 073712 |
| 60517 | 53414532 | 53415275 | 073712 |
| 60518 | 53416220 | 53418769 | 073712 |
| 60519 | 53465234 | 53465890 | |
| 60520 | 53498733 | 53499600 | |
| 60521 | 53509105 | 53509734 | |
| 60522 | 53618587 | 53620717 | 258731, 266552, 100523 |
| 60523 | 54080125 | 54081456 | 225680, 237356 |
| 60524 | 54181936 | 54182505 | |
| 60525 | 54309313 | 54310638 | 235269 |
| 60526 | 54317216 | 54319138 | 235269 |
| 60527 | 54321497 | 54322655 | |
| 60528 | 54347870 | 54348606 | |
| 60529 | 54357228 | 54357951 | |
| 60530 | 54413307 | 54413943 | |
| 60531 | 54419246 | 54421067 | 125378 |
| 60532 | 54446706 | 54447267 | |
| 60533 | 54600450 | 54601103 | |
| 60534 | 54604748 | 54605901 | |
| 60535 | 54663941 | 54664646 | |
| 60536 | 54820764 | 54821249 | |
| 60537 | 54831073 | 54832359 | |
| 60538 | 54863377 | 54863910 | 100526 |
| 60539 | 54906378 | 54908798 | 100528 |
| 60540 | 54913232 | 54914631 | |
| 60541 | 54954761 | 54956540 | 197045 |
| 60542 | 54975998 | 54977384 | 100532 |
| 60543 | 55030604 | 55035484 | 020577 |
| 60544 | 55036549 | 55038512 | 020577 |
| 60545 | 55044598 | 55045169 | 020577 |
| 60546 | 55069982 | 55070506 | 020577 |
| 60547 | 55116674 | 55121548 | 020577 |
| 60548 | 55150909 | 55151348 | 020577 |
| 60549 | 55152315 | 55154664 | 020577 |
| 60550 | 55185559 | 55186870 | 020577 |
| 60551 | 55196854 | 55197763 | 020577 |
| 60552 | 55239366 | 55240494 | 020577 |
| 60553 | 55250140 | 55252429 | 020577 |
| 60554 | 55301448 | 55302527 | |
| 60555 | 55304156 | 55307852 | |
| 60556 | 55311126 | 55311652 | 131979 |
| 60557 | 55347927 | 55349115 | 131979 |
| 60558 | 55367042 | 55370271 | 131979 |
| 60559 | 55493131 | 55494732 | 180008, 198554 |
| 60560 | 55517488 | 55519810 | 168175 |
| 60561 | 55569776 | 55571138 | |
| 60562 | 55596062 | 55597286 | 131981 |
| 60563 | 55737608 | 55739239 | 178974, 258413 |
| 60564 | 55768284 | 55768875 | 178974 |
| 60565 | 55847614 | 55848825 | 126775 |
| 60566 | 55877480 | 55879459 | 126775 |
| 60567 | 56045856 | 56048345 | 186615, 126777 |
| 60568 | 56065750 | 56067879 | 126777 |
| 60569 | 56072331 | 56073127 | 126777 |
| 60570 | 56269648 | 56270799 | |
| 60571 | 56273138 | 56274710 | |
| 60572 | 56298179 | 56299502 | |
| 60573 | 56584607 | 56586509 | 139946 |
| 60574 | 56806610 | 56807280 | 259719 |
| 60575 | 57045959 | 57047652 | 070269 |
| 60576 | 57050431 | 57051149 | 070269 |
| 60577 | 57116583 | 57117463 | 070269, 259133 |
| 60578 | 57524114 | 57525094 | 248550 |
| 60579 | 57526846 | 57527684 | 248550 |
| 60580 | 57734565 | 57736775 | 053770, 070367 |
| 60581 | 57856331 | 57858867 | 139977 |
| 60582 | 57868391 | 57869940 | 139977 |
| 60583 | 57953634 | 57955401 | 100557 |
| 60584 | 57958088 | 57961818 | 100557 |
| 60585 | 57967835 | 57968226 | |
| 60586 | 58548688 | 58550008 | 139971 |
| 60587 | 58637144 | 58638122 | 139971 |
| 60588 | 58666376 | 58667793 | 131966, 139971 |
| 60589 | 58705335 | 58707312 | 139971 |
| 60590 | 58710233 | 58713025 | 100567, 139971 |
| 60591 | 58738936 | 58739907 | 257621, 139971 |
| 60592 | 58747291 | 58750896 | 257621, 139971 |
| 60593 | 58754006 | 58755697 | 268466, 257621, 139971 |
| 60594 | 58762937 | 58766789 | 032219, 257621, 139971 |
| 60595 | 58861936 | 58863321 | 196860, 258658 |
| 60596 | 58893012 | 58895590 | 100578, 258378, 100575 |
| 60597 | 59130320 | 59131068 | |
| 60598 | 59212689 | 59213455 | |
| 60599 | 59219482 | 59220121 | |
| 60600 | 59275441 | 59275928 | |
| 60601 | 59296200 | 59296908 | 258583 |
| 60602 | 59603894 | 59604492 | |
| 60603 | 59654564 | 59656596 | 100592 |
| 60604 | 59682011 | 59682759 | 100592 |
| 60605 | 59741548 | 59746247 | 100592 |
| 60606 | 59747657 | 59751243 | 100592 |
| 60607 | 59763316 | 59764486 | 100592 |
| 60608 | 59781696 | 59783136 | 100592 |
| 60609 | 59800396 | 59800881 | 100592 |
| 60610 | 59824248 | 59825337 | 100592 |
| 60611 | 59827542 | 59828290 | 100592 |
| 60612 | 59873249 | 59874333 | |
| 60613 | 59947875 | 59952198 | 050130, 126790, 258782 |
| 60614 | 60174471 | 60175607 | 139970 |
| 60615 | 60254578 | 60255637 | 139970 |
| 60616 | 60315094 | 60316688 | 139970 |
| 60617 | 60386112 | 60387509 | 261120, 131951 |
| 60618 | 60470500 | 60471124 | 131951, 258553 |
| 60619 | 60557673 | 60560075 | 126773, 258553 |
| 60620 | 60628382 | 60628949 | 100612, 126773 |
| 60621 | 60630379 | 60632651 | 100612, 126773 |
| 60622 | 60645818 | 60646547 | 258563 |
| 60623 | 60714384 | 60717412 | 254718, 100614 |
| 60624 | 61091773 | 61092887 | |
| 60625 | 61123371 | 61124741 | 126778 |
| 60626 | 61157977 | 61158469 | |
| 60627 | 61189152 | 61189515 | 100625 |
| 60628 | 61201169 | 61202221 | 020426 |
| 60629 | 61286185 | 61287020 | 020426 |
| 60630 | 61446932 | 61448932 | 139974, 126814, 258892 |
| 60631 | 61568868 | 61571772 | |
| 60632 | 61644335 | 61646975 | |
| 60633 | 61655684 | 61656303 | 027075 |
| 60634 | 61727305 | 61728333 | 027075 |
| 60635 | 61744422 | 61745806 | 027075, 182107 |
| 60636 | 61746891 | 61748440 | 027075, 182107 |
| 60637 | 61754810 | 61755503 | 027075 |
| 60638 | 61788087 | 61788819 | 027075, 247287 |
| 60639 | 61833901 | 61834389 | 027075 |
| 60640 | 61905247 | 61906438 | 027075 |
| 60641 | 61927125 | 61929047 | 027075 |
| 60642 | 61931965 | 61934593 | 027075 |
| 60643 | 61937309 | 61940552 | 027075 |
| 60644 | 61941841 | 61945330 | 027075 |
| 60645 | 61946145 | 61947368 | 027075 |
| 60646 | 61955891 | 61959085 | 027075 |
| 60647 | 61984080 | 61985398 | 027075 |
| 60648 | 61990404 | 61994647 | 027075 |
| 60649 | 62002484 | 62006044 | 258926, 258989, 027075 |
| 60650 | 62009729 | 62010742 | 258989, 027075, 258926 |
| 60651 | 62018050 | 62023124 | 250548, 258989 |
| 60652 | 62026406 | 62032236 | 258989, 250548 |
| 60653 | 62040141 | 62041888 | 258989, 232774 |
| 60654 | 62161243 | 62165843 | 100644, 258777 |
| 60655 | 62219724 | 62223157 | 258964 |
| 60656 | 63158171 | 63160190 | |
| 60657 | 63162885 | 63163933 | |
| 60658 | 63902398 | 63903301 | 154001 |
| 60659 | 63904609 | 63905362 | 154001 |
| 60660 | 63934850 | 63935462 | 154001 |
| 60661 | 63937654 | 63938964 | 154001 |
| 60662 | 64008780 | 64011223 | 261242, 154001 |
| 60663 | 64107585 | 64109448 | 140006 |
| 60664 | 64193094 | 64195585 | 126821 |
| 60665 | 64318986 | 64320970 | 054654 |
| 60666 | 64330886 | 64331567 | 054654 |
| 60667 | 64360609 | 64361135 | 054654 |
| 60668 | 64389689 | 64390308 | 054654 |
| 60669 | 64536202 | 64537574 | 054654 |
| 60670 | 64576210 | 64577157 | 054654, 140009 |
| 60671 | 64579448 | 64581299 | 054654, 140009 |
| 60672 | 64583670 | 64586205 | 054654, 140009 |
| 60673 | 64589571 | 64590713 | 054654, 140009 |
| 60674 | 64804693 | 64806164 | 140009, 214770 |
| 60675 | 64853894 | 64856334 | 100714 |
| 60676 | 64867403 | 64868118 | 100714 |
| 60677 | 64868534 | 64869176 | 100714 |
| 60678 | 64871713 | 64872443 | 100714 |
| 60679 | 64876798 | 64877726 | 100714 |
| 60680 | 64904826 | 64905428 | 100714, 258824 |
| 60681 | 64967628 | 64968957 | 089775 |
| 60682 | 64969236 | 64972749 | 126804, 089775 |
| 60683 | 65005833 | 65008132 | 259116, 126803 |
| 60684 | 65078179 | 65079144 | |
| 60685 | 65106154 | 65106712 | |
| 60686 | 65114958 | 65117095 | |
| 60687 | 65120536 | 65122200 | |
| 60688 | 65123493 | 65124236 | |
| 60689 | 65170130 | 65176387 | 126822 |
| 60690 | 65177360 | 65178195 | 126822 |
| 60691 | 65184114 | 65189082 | 126822 |
| 60692 | 65190443 | 65194270 | 126822 |
| 60693 | 65380917 | 65382179 | 125954, 257365, 258289 |
| 60694 | 65404090 | 65406315 | 176153, 125954, 257365, |
| | | | 258289 |
| 60695 | 65408724 | 65409904 | 176153, 125954, 257365, |
| | | | 258289 |
| 60696 | 65414787 | 65415631 | 125954, 257365, 139998 |
| 60697 | 65437995 | 65439750 | 139998, 125954, 257365 |
| 60698 | 65453293 | 65454799 | 125954, 257365 |
| 60699 | 65501635 | 65502307 | 125952, 125954, 257365 |
| 60700 | 65568079 | 65570562 | 125952 |
| 60701 | 65646531 | 65647771 | |
| 60702 | 65878137 | 65880319 | 033170 |
| 60703 | 66845501 | 66846815 | 258561 |
| 60704 | 66949802 | 66950669 | 258561 |
| 60705 | 66962048 | 66964167 | 258561, 196553 |
| 60706 | 66967378 | 66968796 | 258561 |
| 60707 | 66973534 | 66976451 | 171723, 258561 |
| 60708 | 67080002 | 67080623 | 171723 |
| 60709 | 67224579 | 67225327 | 171723 |
| 60710 | 67238818 | 67239274 | 171723 |
| 60711 | 67397797 | 67400727 | 171723 |
| 60712 | 67706571 | 67709961 | 072415 |
| 60713 | 67729848 | 67730685 | 072415 |
| 60714 | 67825385 | 67828347 | 134001, 100554 |
| 60715 | 67878131 | 67879500 | 100558 |
| 60716 | 67895138 | 67895963 | |
| 60717 | 67999170 | 68000600 | 054690, 198133 |
| 60718 | 68066167 | 68067611 | 100564 |
| 60719 | 68086084 | 68086777 | 081181 |
| 60720 | 68140207 | 68142446 | 100568, 258466 |
| 60721 | 68161449 | 68162708 | 072042 |
| 60722 | 68195495 | 68196450 | 139988, 072121 |
| 60723 | 68204884 | 68206512 | 072121 |
| 60724 | 68282387 | 68284195 | 072121 |
| 60725 | 68400675 | 68401294 | 182185 |
| 60726 | 68407053 | 68412254 | 182185 |
| 60727 | 68571031 | 68571762 | 182185 |
| 60728 | 68603839 | 68609130 | 182185 |
| 60729 | 68630621 | 68633021 | 182185 |
| 60730 | 68636691 | 68641660 | 182185 |
| 60731 | 68647858 | 68649382 | 182185 |
| 60732 | 68655060 | 68655591 | 182185 |
| 60733 | 68656878 | 68662330 | 182185 |
| 60734 | 68664768 | 68667015 | 182185 |
| 60735 | 68676870 | 68678967 | 182185 |
| 60736 | 68695558 | 68701184 | 182185 |
| 60737 | 68712270 | 68718126 | 182185 |
| 60738 | 68773278 | 68775570 | 182185 |
| 60739 | 68924184 | 68951144 | 182185 |
| 60740 | 68951255 | 68955699 | 182185 |
| 60741 | 68984944 | 68991157 | 182185 |
| 60742 | 68992054 | 68995500 | 182185 |
| 60743 | 69010487 | 69016149 | 182185 |
| 60744 | 69016606 | 69017685 | 182185 |
| 60745 | 69026124 | 69033369 | 182185 |
| 60746 | 69036037 | 69038238 | 182185 |
| 60747 | 69042774 | 69045745 | 182185 |
| 60748 | 69086115 | 69088085 | 182185 |
| 60749 | 69091486 | 69098406 | 259038, 182185 |
| 60750 | 69138755 | 69140088 | 182185 |
| 60751 | 69146338 | 69150796 | 258623, 182185 |
| 60752 | 69189923 | 69191134 | 182185 |
| 60753 | 69245306 | 69246177 | |
| 60754 | 69249255 | 69263886 | 185650 |
| 60755 | 69273744 | 69274362 | |
| 60756 | 69280735 | 69284862 | |
| 60757 | 69285813 | 69293152 | |
| 60758 | 69350354 | 69353020 | 072110 |
| 60759 | 69390176 | 69392161 | 072110 |
| 60760 | 69402327 | 69409000 | 258531, 072110 |
| 60761 | 69411984 | 69413875 | 072110 |
| 60762 | 69417308 | 69419680 | 072110 |
| 60763 | 69442283 | 69447320 | 259062, 072110 |
| 60764 | 69468798 | 69469189 | |
| 60765 | 69472429 | 69472951 | |
| 60766 | 69504354 | 69506770 | |
| 60767 | 69509548 | 69510534 | |
| 60768 | 69516259 | 69516936 | |
| 60769 | 69544154 | 69548999 | 139990 |
| 60770 | 69595906 | 69596506 | 139990 |
| 60771 | 69599679 | 69600730 | 139990 |
| 60772 | 69617585 | 69620961 | 139990 |
| 60773 | 69657616 | 69659195 | 081177, 258957 |
| 60774 | 69727797 | 69728842 | 100626 |
| 60775 | 69864096 | 69866309 | 029364, 100632 |
| 60776 | 70003454 | 70004008 | |
| 60777 | 70006401 | 70007162 | |
| 60778 | 70046521 | 70047763 | |
| 60779 | 70072555 | 70074119 | |
| 60780 | 70077343 | 70079959 | 100647 |
| 60781 | 70104065 | 70105160 | 100647 |
| 60782 | 70109463 | 70111352 | 100647 |
| 60783 | 70114568 | 70116236 | 100647 |
| 60784 | 70158977 | 70159898 | 100647 |
| 60785 | 70193217 | 70194271 | 100650 |
| 60786 | 70207294 | 70208317 | 100650 |
| 60787 | 70216647 | 70217406 | 100650 |
| 60788 | 70232920 | 70235270 | 100650 |
| 60789 | 70246617 | 70247304 | 100652 |
| 60790 | 70258887 | 70264991 | 100652 |
| 60791 | 70275696 | 70276467 | |
| 60792 | 70312445 | 70313027 | |
| 60793 | 70316577 | 70318099 | |
| 60794 | 70343204 | 70344859 | 198732 |
| 60795 | 70345620 | 70347597 | 198732 |
| 60796 | 70352724 | 70357049 | 242071, 198732 |
| 60797 | 70403962 | 70404938 | 198732 |
| 60798 | 70408639 | 70409591 | 198732 |
| 60799 | 70471522 | 70472688 | 198732 |
| 60800 | 70499124 | 70499617 | |
| 60801 | 70524171 | 70524785 | 100678 |
| 60802 | 70527660 | 70528435 | 100678 |
| 60803 | 70784066 | 70785823 | |
| 60804 | 70825289 | 70827071 | 133983, 258644 |
| 60805 | 70882530 | 70884241 | 258644, 213463 |
| 60806 | 70915229 | 70916346 | 257759 |
| 60807 | 71066803 | 71068367 | 133997, 259115 |
| 60808 | 71098478 | 71099188 | 259115, 245466 |
| 60809 | 71107582 | 71109580 | 133985, 259115, 245466 |
| 60810 | 71128920 | 71133716 | 133985 |
| 60811 | 71183192 | 71184026 | |
| 60812 | 71219247 | 71223358 | 006432 |
| 60813 | 71246357 | 71246865 | 006432 |
| 60814 | 71275214 | 71277235 | 259153, 006432 |
| 60815 | 71288219 | 71289306 | |
| 60816 | 71293929 | 71295249 | |
| 60817 | 71373166 | 71375772 | 100731 |
| 60818 | 71583026 | 71587156 | |
| 60819 | 71610136 | 71611218 | |
| 60820 | 71786687 | 71789037 | 197555, 259146 |
| 60821 | 71802850 | 71804073 | 197555 |
| 60822 | 71838579 | 71839755 | 197555 |
| 60823 | 72021517 | 72023905 | 197555 |
| 60824 | 72930019 | 72930535 | 182732 |
| 60825 | 73034991 | 73035945 | 258871 |
| 60826 | 73049327 | 73050869 | 258871 |
| 60827 | 73079834 | 73080427 | |
| 60828 | 73131472 | 73133679 | 205683 |
| 60829 | 73267836 | 73268439 | 205683 |
| 60830 | 73278956 | 73280152 | 205683 |
| 60831 | 73295024 | 73295985 | 205683 |
| 60832 | 73316657 | 73317684 | 205683 |
| 60833 | 73359339 | 73362202 | 205683 |
| 60834 | 73392638 | 73394234 | 119599 |
| 60835 | 73492925 | 73494299 | 165861 |
| 60836 | 73524177 | 73526377 | 119707, 258813 |
| 60837 | 73570750 | 73571628 | 119707 |
| 60838 | 73602924 | 73604392 | 080815 |
| 60839 | 73628169 | 73628758 | 080815 |
| 60840 | 73646939 | 73647545 | 080815 |
| 60841 | 73676308 | 73677551 | 080815 |
| 60842 | 73694442 | 73696327 | |
| 60843 | 73736624 | 73737379 | 100767 |
| 60844 | 73763011 | 73763630 | 133961 |
| 60845 | 73894742 | 73895620 | 133961 |
| 60846 | 73923805 | 73926208 | 133961 |
| 60847 | 73928125 | 73930617 | 251393, 133961 |
| 60848 | 73957318 | 73958700 | 255242, 170468, 187105 |
| 60849 | 73992637 | 73993933 | 258695, 187105 |
| 60850 | 74034904 | 74037341 | 119673 |
| 60851 | 74058136 | 74059443 | 177465 |
| 60852 | 74078920 | 74080359 | 205669 |
| 60853 | 74099941 | 74101471 | 258603 |
| 60854 | 74110740 | 74111805 | 119661 |
| 60855 | 74129102 | 74129561 | 119661 |
| 60856 | 74179723 | 74181391 | 176903 |
| 60857 | 74189535 | 74192113 | 156030 |
| 60858 | 74195227 | 74195934 | 156030 |
| 60859 | 74207599 | 74208914 | 156030 |
| 60860 | 74220096 | 74222732 | 156030 |
| 60861 | 74224317 | 74230002 | 264741, 156030 |
| 60862 | 74230992 | 74232189 | 156030 |
| 60863 | 74238466 | 74239350 | 156030 |
| 60864 | 74249748 | 74250458 | 156030 |
| 60865 | 74251664 | 74255363 | 259065, 156030 |
| 60866 | 74261251 | 74263748 | 259065 |
| 60867 | 74291810 | 74292739 | 258586 |
| 60868 | 74303257 | 74303888 | |
| 60869 | 74317494 | 74319911 | 258653, 140043 |
| 60870 | 74352473 | 74354708 | 119725, 140043, 258653 |
| 60871 | 74409731 | 74410178 | 156050 |
| 60872 | 74442744 | 74443348 | 187097 |
| 60873 | 74455318 | 74455722 | 187097 |
| 60874 | 74461648 | 74464684 | 187097 |
| 60875 | 74480841 | 74481484 | 187097 |
| 60876 | 74484583 | 74486768 | 119636, 187097 |
| 60877 | 74529280 | 74529898 | 259114, 119711, 119636 |
| 60878 | 74550373 | 74552268 | 205659, 119711 |
| 60879 | 74600236 | 74601624 | 205659 |
| 60880 | 74606832 | 74607661 | 205659 |
| 60881 | 74608131 | 74609835 | 205659 |
| 60882 | 74684304 | 74684962 | |
| 60883 | 74723881 | 74725055 | 119614 |
| 60884 | 74768791 | 74770212 | 133980, 119688 |
| 60885 | 74905107 | 74905599 | |
| 60886 | 74959344 | 74961137 | 165898, 119655 |
| 60887 | 75078726 | 75079685 | 119681 |
| 60888 | 75084900 | 75085830 | |
| 60889 | 75179080 | 75180576 | 119616, 119682, 214670 |
| 60890 | 75229064 | 75231261 | 119596 |
| 60891 | 75301245 | 75301865 | 119596 |
| 60892 | 75347613 | 75349849 | 119689 |
| 60893 | 75364985 | 75366056 | 119689 |
| 60894 | 75372110 | 75372962 | 198208 |
| 60895 | 75389134 | 75390217 | 198208 |
| 60896 | 75411812 | 75412879 | 119630 |
| 60897 | 75469095 | 75470558 | 119718 |
| 60898 | 75507893 | 75509637 | 119684 |
| 60899 | 75517169 | 75518495 | 119684 |
| 60900 | 75534878 | 75537243 | 119640, 119703 |
| 60901 | 75592533 | 75595131 | 259138, 119638 |
| 60902 | 75625780 | 75626315 | 170348 |
| 60903 | 75642437 | 75643973 | 170348 |
| 60904 | 75683088 | 75683575 | |
| 60905 | 75720860 | 75722024 | 258740 |
| 60906 | 75743395 | 75744356 | |
| 60907 | 75744731 | 75745881 | 170345 |
| 60908 | 75760245 | 75763272 | 259687, 119660 |
| 60909 | 75866366 | 75867816 | |
| 60910 | 75885986 | 75886504 | |
| 60911 | 75893595 | 75896193 | 140044, 259319 |
| 60912 | 75907359 | 75908172 | 140044 |
| 60913 | 75916227 | 75917883 | 140044 |
| 60914 | 75918964 | 75920270 | 140044 |
| 60915 | 75985945 | 75990815 | 156127 |
| 60916 | 75997354 | 75999327 | 156127 |
| 60917 | 75999773 | 76004883 | 156127 |
| 60918 | 76005962 | 76007341 | 156127 |
| 60919 | 76008266 | 76011118 | 156127 |
| 60920 | 76013904 | 76015966 | |
| 60921 | 76024408 | 76029410 | |
| 60922 | 76043640 | 76047144 | 119686, 224721 |
| 60923 | 76086702 | 76087953 | 119686 |
| 60924 | 76089526 | 76090278 | 119686 |
| 60925 | 76092548 | 76094549 | 119686 |
| 60926 | 76112311 | 76118535 | 133935, 119685, 119686 |
| 60927 | 76126698 | 76128556 | 133935, 119685, 119686 |
| 60928 | 76177371 | 76179515 | 119685 |
| 60929 | 76183893 | 76184721 | 119685 |
| 60930 | 76317668 | 76318337 | 119685 |
| 60931 | 76447744 | 76449417 | 119699, 119650 |
| 60932 | 76450870 | 76451595 | 119650 |
| 60933 | 76451824 | 76453336 | 119650 |
| 60934 | 76454891 | 76456568 | 119650 |
| 60935 | 76617824 | 76619104 | 089916 |
| 60936 | 76669788 | 76670477 | 089916 |
| 60937 | 76733631 | 76734718 | |
| 60938 | 77106640 | 77108097 | 259124 |
| 60939 | 77153560 | 77154827 | 259124 |
| 60940 | 77277806 | 77279973 | 013523 |
| 60941 | 77298937 | 77299662 | 100565 |
| 60942 | 77384219 | 77386820 | |
| 60943 | 77411322 | 77412361 | |
| 60944 | 77412690 | 77415034 | |
| 60945 | 77419489 | 77420920 | |
| 60946 | 77421968 | 77424129 | |
| 60947 | 77427588 | 77429238 | 258602 |
| 60948 | 77470338 | 77471567 | |
| 60949 | 77474199 | 77474872 | |
| 60950 | 77489456 | 77496085 | 119669 |
| 60951 | 77498458 | 77501096 | |
| 60952 | 77505838 | 77512326 | 246548 |
| 60953 | 77542446 | 77543183 | 258819, 258473 |
| 60954 | 77563047 | 77566200 | 259164, 198894 |
| 60955 | 77768342 | 77771645 | 009830 |
| 60956 | 77773335 | 77774059 | 009830 |
| 60957 | 77786517 | 77787933 | 100577, 009830 |
| 60958 | 77842404 | 77844117 | 100583, 100580 |
| 60959 | 77923121 | 77925586 | 100591, 151445 |
| 60960 | 78082030 | 78083725 | 100596 |
| 60961 | 78147769 | 78148987 | 100601 |
| 60962 | 78173428 | 78175452 | 119705, 100601 |
| 60963 | 78226541 | 78228622 | 197734, 268208, 100603, |
| | | | 119705 |
| 60964 | 78261804 | 78263024 | |
| 60965 | 78265958 | 78267391 | 063761 |
| 60966 | 78283492 | 78284106 | 063761 |
| 60967 | 79879128 | 79879818 | 021645 |
| 60968 | 80291290 | 80292309 | 021645 |
| 60969 | 80307293 | 80309351 | 021645 |
| 60970 | 80469355 | 80470455 | |
| 60971 | 81397119 | 81397628 | 100629 |
| 60972 | 81407509 | 81408816 | 100629 |
| 60973 | 81420997 | 81422013 | 165409, 100629 |
| 60974 | 81462376 | 81463214 | 165409 |
| 60975 | 81593633 | 81594598 | 258999, 165409 |
| 60976 | 81603601 | 81604723 | 258999, 165409 |
| 60977 | 81627333 | 81632082 | 258999 |
| 60978 | 81635715 | 81637619 | 258999 |
| 60979 | 81685441 | 81688817 | 165417 |
| 60980 | 81769370 | 81771184 | 140022 |
| 60981 | 81864606 | 81865492 | 140022 |
| 60982 | 81901690 | 81902262 | 140022 |
| 60983 | 81977656 | 81978275 | 071537 |
| 60984 | 81982066 | 81986598 | 071537 |
| 60985 | 81999183 | 82001759 | 071537 |
| 60986 | 82003516 | 82003967 | |
| 60987 | 82121776 | 82123044 | |
| 60988 | 82285686 | 82286196 | 259035 |
| 60989 | 82452181 | 82452976 | 259035 |
| 60990 | 86345151 | 86345685 | |
| 60991 | 86400534 | 86401336 | 258733 |
| 60992 | 86469842 | 86471072 | 258733 |
| 60993 | 87174846 | 87176186 | |
| 60994 | 87243534 | 87245393 | |
| 60995 | 87248301 | 87248857 | |
| 60996 | 87264228 | 87266136 | |
| 60997 | 87363514 | 87364796 | |
| 60998 | 88458581 | 88460295 | 054983 |
| 60999 | 88509850 | 88512661 | 258867 |
| 61000 | 88654880 | 88656297 | 100433 |
| 61001 | 88766673 | 88767713 | 100433 |
| 61002 | 88851379 | 88852846 | 042317 |
| 61003 | 88855009 | 88855574 | 042317 |
| 61004 | 88983114 | 88983785 | 070778 |
| 61005 | 88988160 | 88988552 | 070778 |
| 61006 | 89001507 | 89002013 | 070778 |
| 61007 | 89016938 | 89018124 | 258789, 070778 |
| 61008 | 89020300 | 89022166 | 070778 |
| 61009 | 89029147 | 89030280 | 100722 |
| 61010 | 89079717 | 89081465 | 100722, 165521 |
| 61011 | 89148349 | 89149364 | 165521 |
| 61012 | 89257938 | 89259663 | 165521 |
| 61013 | 89290395 | 89291792 | 165533 |
| 61014 | 89295034 | 89296820 | 165533 |
| 61015 | 89450164 | 89450741 | |
| 61016 | 89460144 | 89460862 | |
| 61017 | 89461186 | 89463721 | |
| 61018 | 89465621 | 89468407 | |
| 61019 | 89493126 | 89494342 | |
| 61020 | 89506639 | 89508109 | |
| 61021 | 89627748 | 89628404 | 053254 |
| 61022 | 89637333 | 89637988 | 053254 |
| 61023 | 89680334 | 89681104 | 053254 |
| 61024 | 89714002 | 89714530 | 053254 |
| 61025 | 89796414 | 89797311 | 053254 |
| 61026 | 89804214 | 89804652 | 053254 |
| 61027 | 89806054 | 89807152 | 053254 |
| 61028 | 89817674 | 89818726 | 258752, 053254 |
| 61029 | 89834676 | 89835982 | 053254 |
| 61030 | 89844421 | 89844999 | 053254 |
| 61031 | 89874320 | 89875510 | 258380, 053254 |
| 61032 | 89881867 | 89885133 | 258920, 053254, 259053 |
| 61033 | 89894715 | 89897872 | 053254, 259053 |
| 61034 | 89924974 | 89925748 | 053254, 259053 |
| 61035 | 89940249 | 89941210 | 053254, 259053 |
| 61036 | 89959742 | 89960722 | 053254, 259053 |
| 61037 | 89966511 | 89967110 | 053254, 259053 |
| 61038 | 89973207 | 89975150 | 053254, 259053 |
| 61039 | 90010915 | 90011587 | 053254, 259053 |
| 61040 | 90083841 | 90086241 | 053254, 259053 |
| 61041 | 90107684 | 90108836 | 259053, 258792 |
| 61042 | 90125499 | 90127427 | 259053 |
| 61043 | 90167842 | 90168528 | 259053 |
| 61044 | 90212240 | 90212933 | 259053 |
| 61045 | 90377055 | 90377988 | 259053, 140025 |
| 61046 | 90390523 | 90391042 | 259053, 140025 |
| 61047 | 90420631 | 90423142 | 042088, 259053, 140025 |
| 61048 | 90553799 | 90554358 | 152315 |
| 61049 | 90722509 | 90723936 | 100764 |
| 61050 | 90744502 | 90745380 | 119720 |
| 61051 | 90797172 | 90798864 | 119720 |
| 61052 | 90835572 | 90836192 | |
| 61053 | 90848096 | 90851024 | |
| 61054 | 90862541 | 90865033 | 198668 |
| 61055 | 90875352 | 90875970 | |
| 61056 | 91112228 | 91112859 | 259163, 165914 |
| 61057 | 91163698 | 91164531 | 165914, 258716 |
| 61058 | 91224408 | 91225827 | 165914 |
| 61059 | 91246720 | 91247832 | 165914 |
| 61060 | 91274006 | 91274875 | 165914 |
| 61061 | 91278289 | 91278809 | 165914 |
| 61062 | 91281385 | 91281975 | 165914 |
| 61063 | 91287068 | 91287785 | |
| 61064 | 91294279 | 91295513 | 258884 |
| 61065 | 91337876 | 91338568 | 100784 |
| 61066 | 91436399 | 91436898 | 100784 |
| 61067 | 91488578 | 91489598 | 100784 |
| 61068 | 91526011 | 91527620 | 133943, 100784 |
| 61069 | 91564918 | 91565762 | 133943 |
| 61070 | 91579974 | 91582168 | 133943 |
| 61071 | 91615716 | 91616310 | 133943 |
| 61072 | 91622594 | 91623110 | 133943 |
| 61073 | 91630887 | 91631549 | 133943 |
| 61074 | 91883782 | 91885548 | 258798, 015133 |
| 61075 | 91974439 | 91978066 | 100796 |
| 61076 | 91985768 | 91986549 | |
| 61077 | 92040261 | 92041501 | 268657 |
| 61078 | 92221879 | 92222662 | 133962 |
| 61079 | 92246567 | 92247450 | 133962, 165929 |
| 61080 | 92354922 | 92356622 | 140092 |
| 61081 | 92363565 | 92364174 | 140092 |
| 61082 | 92424132 | 92424624 | |
| 61083 | 92462855 | 92464632 | 100815 |
| 61084 | 92476910 | 92477413 | 100815 |
| 61085 | 92505325 | 92507432 | 100815 |
| 61086 | 92571840 | 92573526 | 066427 |
| 61087 | 92587471 | 92589481 | 165934, 183648 |
| 61088 | 92938206 | 92938784 | 140090 |
| 61089 | 92938949 | 92940880 | 140090 |
| 61090 | 92947134 | 92948042 | 140090 |
| 61091 | 92969464 | 92971962 | |
| 61092 | 92977226 | 92978318 | |
| 61093 | 92979402 | 92981869 | 100599 |
| 61094 | 92995572 | 92996526 | 100599 |
| 61095 | 93004709 | 93007531 | 100599 |
| 61096 | 93160283 | 93160825 | |
| 61097 | 93190669 | 93191545 | 100600 |
| 61098 | 93213926 | 93215423 | 100600 |
| 61099 | 93259543 | 93261662 | 066455 |
| 61100 | 93264294 | 93265160 | 066455 |
| 61101 | 93344116 | 93344986 | |
| 61102 | 93439493 | 93441653 | 100605 |
| 61103 | 93450540 | 93453922 | 100605 |
| 61104 | 93459097 | 93460224 | 100605 |
| 61105 | 93483533 | 93485003 | 100605 |
| 61106 | 93501525 | 93504342 | 100605 |
| 61107 | 93508175 | 93511955 | 100605 |
| 61108 | 93521908 | 93524319 | 100605 |
| 61109 | 93579060 | 93580354 | 100605 |
| 61110 | 93580377 | 93583276 | 100605 |
| 61111 | 93598692 | 93599349 | |
| 61112 | 93601676 | 93602767 | |
| 61113 | 93617342 | 93617953 | |
| 61114 | 93650191 | 93652457 | 259066, 153485, 165943 |
| 61115 | 93672777 | 93674347 | 012963, 170270, 259066 |
| 61116 | 93798278 | 93800568 | 133958, 011114 |
| 61117 | 94424717 | 94427371 | 100628 |
| 61118 | 94492497 | 94493463 | 089723 |
| 61119 | 94743485 | 94744045 | 119698 |
| 61120 | 94753112 | 94754028 | 140093 |
| 61121 | 94754507 | 94760995 | 140093 |
| 61122 | 94761265 | 94763275 | |
| 61123 | 94772064 | 94772901 | 170099 |
| 61124 | 94778480 | 94781502 | 170099 |
| 61125 | 94783497 | 94784599 | 170099 |
| 61126 | 94786274 | 94790123 | 170099 |
| 61127 | 94796777 | 94798152 | |
| 61128 | 94803581 | 94804197 | |
| 61129 | 94806745 | 94810014 | |
| 61130 | 94811607 | 94812502 | |
| 61131 | 94821041 | 94822431 | |
| 61132 | 94830349 | 94830964 | 258597 |
| 61133 | 94842479 | 94844918 | 197249 |
| 61134 | 94845980 | 94847954 | 197249 |
| 61135 | 94850584 | 94859245 | 197249 |
| 61136 | 94859295 | 94862853 | |
| 61137 | 94877531 | 94878473 | |
| 61138 | 94918826 | 94919406 | 186910, 256357 |
| 61139 | 94929289 | 94930027 | 170054, 256357 |
| 61140 | 94947037 | 94948663 | |
| 61141 | 94952195 | 94953424 | |
| 61142 | 94967985 | 94968985 | 165953 |
| 61143 | 95025951 | 95028700 | 100665, 188488 |
| 61144 | 95035754 | 95036453 | 100665, 188488 |
| 61145 | 95047432 | 95048995 | 188488 |
| 61146 | 95049106 | 95049665 | 188488 |
| 61147 | 95059671 | 95061536 | 273259 |
| 61148 | 95063417 | 95069047 | 273259 |
| 61149 | 95075739 | 95089142 | 196136, 273259 |
| 61150 | 95146209 | 95148172 | |
| 61151 | 95622310 | 95625011 | 235706, 100697 |
| 61152 | 95647303 | 95648104 | |
| 61153 | 95649391 | 95650497 | 165959 |
| 61154 | 95688492 | 95689953 | 165959 |
| 61155 | 95703353 | 95704367 | 165959 |
| 61156 | 95714586 | 95716176 | 165959 |
| 61157 | 95727655 | 95728926 | 165959 |
| 61158 | 95730401 | 95732949 | 165959 |
| 61159 | 95757371 | 95759007 | 165959 |
| 61160 | 95760815 | 95762337 | 165959 |
| 61161 | 95766408 | 95768243 | 165959 |
| 61162 | 95773268 | 95774736 | 165959 |
| 61163 | 95775377 | 95776344 | 165959 |
| 61164 | 95779628 | 95782246 | 165959 |
| 61165 | 95784437 | 95787055 | 165959 |
| 61166 | 95805319 | 95808039 | |
| 61167 | 95831052 | 95832156 | |
| 61168 | 95865127 | 95865840 | |
| 61169 | 95900431 | 95900996 | 176438 |
| 61170 | 95910279 | 95911066 | 176438 |
| 61171 | 95949023 | 95949935 | |
| 61172 | 95955426 | 95956065 | |
| 61173 | 95973567 | 95974636 | |
| 61174 | 95982257 | 95983848 | 258572 |
| 61175 | 95989036 | 95994324 | |
| 61176 | 95999711 | 96002945 | 182512, 252481, 247092 |
| 61177 | 96003548 | 96004404 | 182512 |
| 61178 | 96013829 | 96014524 | |
| 61179 | 96016447 | 96017211 | |
| 61180 | 96561504 | 96563123 | |
| 61181 | 96566685 | 96567580 | |
| 61182 | 96570272 | 96572941 | |
| 61183 | 96633660 | 96634217 | |
| 61184 | 96660883 | 96662394 | |
| 61185 | 96670880 | 96671415 | 258691, 168398 |
| 61186 | 96734292 | 96736200 | 100739, 258793 |
| 61187 | 96739368 | 96739809 | |
| 61188 | 96741613 | 96742493 | 258729 |
| 61189 | 96750328 | 96751321 | 066739 |
| 61190 | 96768471 | 96769047 | 066739 |
| 61191 | 96775392 | 96776125 | 066739 |
| 61192 | 96828309 | 96830923 | 100744, 066739 |
| 61193 | 96857356 | 96859359 | 140057 |
| 61194 | 96928065 | 96929271 | 140057 |
| 61195 | 96934581 | 96935607 | 140057 |
| 61196 | 96967202 | 96969963 | 090060, 260806 |
| 61197 | 96978200 | 96979617 | 090060 |
| 61198 | 97004233 | 97005767 | 090060 |
| 61199 | 97263356 | 97264322 | 100749 |
| 61200 | 97736411 | 97737384 | |
| 61201 | 99782280 | 99783455 | |
| 61202 | 99851086 | 99851854 | |
| 61203 | 99946182 | 99948571 | 090061, 183576 |
| 61204 | 99984563 | 99985819 | 090061, 205476 |
| 61205 | 100018248 | 100019799 | 205476 |
| 61206 | 100020524 | 100022003 | 205476 |
| 61207 | 100027464 | 100028083 | 205476 |
| 61208 | 100031218 | 100032126 | 205476 |
| 61209 | 100035424 | 100039267 | 205476 |
| 61210 | 100040347 | 100042346 | 205476 |
| 61211 | 100056985 | 100057543 | 205476 |
| 61212 | 100060758 | 100061924 | 205476 |
| 61213 | 100062933 | 100063633 | 205476 |
| 61214 | 100067575 | 100069333 | 205476 |
| 61215 | 100070536 | 100072291 | 247970 |
| 61216 | 100137999 | 100138607 | 182218 |
| 61217 | 100148966 | 100150958 | 036530 |
| 61218 | 100222433 | 100223024 | 066629 |
| 61219 | 100250660 | 100251244 | 066629 |
| 61220 | 100259426 | 100260316 | 066629 |
| 61221 | 100410158 | 100411239 | |
| 61222 | 100411996 | 100412764 | |
| 61223 | 100414046 | 100414430 | |
| 61224 | 100437436 | 100439086 | 196405 |
| 61225 | 100484717 | 100485413 | 196405 |
| 61226 | 100495551 | 100499529 | 196405 |
| 61227 | 100508554 | 100509284 | 196405 |
| 61228 | 100658454 | 100660340 | |
| 61229 | 100670614 | 100671333 | |
| 61230 | 100679938 | 100681385 | 258982 |
| 61231 | 100703892 | 100707685 | 100811, 258982 |
| 61232 | 100751435 | 100752617 | 259052 |
| 61233 | 100771778 | 100773753 | 197119 |
| 61234 | 100786669 | 100787251 | |
| 61235 | 100789063 | 100792859 | 263519, 140107 |
| 61236 | 100806717 | 100809053 | 258521, 258666, 140105 |
| 61237 | 100841394 | 100843607 | 176473, 140105 |
| 61238 | 100844027 | 100844604 | 176473 |
| 61239 | 100855796 | 100856346 | 176473 |
| 61240 | 100863834 | 100865186 | 176473 |
| 61241 | 100872234 | 100873321 | 258620, 176473 |
| 61242 | 100904832 | 100907395 | 176473 |
| 61243 | 101000343 | 101001039 | |
| 61244 | 101083222 | 101083681 | |
| 61245 | 101114688 | 101116268 | |
| 61246 | 101131408 | 101132393 | 196273 |
| 61247 | 101800669 | 101802119 | 258460 |
| 61248 | 101871564 | 101872361 | 259023 |
| 61249 | 101878949 | 101879492 | |
| 61250 | 101910310 | 101910875 | 259082 |
| 61251 | 101941895 | 101943975 | |
| 61252 | 101946438 | 101948122 | |
| 61253 | 102197435 | 102198788 | 258404, 258512 |
| 61254 | 102228033 | 102228953 | 078304 |
| 61255 | 102275376 | 102277619 | 259088, 078304 |
| 61256 | 102413594 | 102416113 | 271780 |
| 61257 | 102430572 | 102432444 | 197102 |
| 61258 | 102438064 | 102440009 | 197102 |
| 61259 | 102446242 | 102447658 | 197102 |
| 61260 | 102500618 | 102500964 | 197102 |
| 61261 | 102552356 | 102554882 | 080824 |
| 61262 | 102605370 | 102607343 | 140153, 080824 |
| 61263 | 102656925 | 102657874 | 140153 |
| 61264 | 102746003 | 102746531 | 080823 |
| 61265 | 102770769 | 102771843 | 080823 |
| 61266 | 102780070 | 102780967 | |
| 61267 | 102782867 | 102784354 | 022976 |
| 61268 | 102785333 | 102787273 | 022976 |
| 61269 | 102828317 | 102830436 | 196663, 100865 |
| 61270 | 102946125 | 102946726 | 196663 |
| 61271 | 102974784 | 102976221 | 156381 |
| 61272 | 102982738 | 102984124 | |
| 61273 | 102990547 | 102992142 | |
| 61274 | 103020862 | 103022245 | 259230 |
| 61275 | 103057536 | 103060400 | 089902 |
| 61276 | 103092196 | 103092709 | 089902 |
| 61277 | 103121071 | 103122202 | 089902 |
| 61278 | 103149346 | 103151310 | 089902 |
| 61279 | 103162651 | 103163312 | 089902 |
| 61280 | 103242448 | 103245308 | 131323 |
| 61281 | 103261344 | 103261971 | 131323 |
| 61282 | 103315691 | 103316417 | 131323 |
| 61283 | 103337140 | 103338567 | 131323 |
| 61284 | 103339765 | 103340508 | 131323 |
| 61285 | 103359669 | 103360353 | 131323 |
| 61286 | 103388605 | 103389918 | 166126 |
| 61287 | 103406562 | 103406993 | 198752 |
| 61288 | 103470420 | 103471094 | 198752 |
| 61289 | 103517012 | 103517734 | 198752 |
| 61290 | 103522479 | 103524917 | 198752 |
| 61291 | 103540405 | 103542539 | |
| 61292 | 103557460 | 103558920 | |
| 61293 | 103560265 | 103562009 | 259444 |
| 61294 | 103564526 | 103567272 | 205436, 259444 |
| 61295 | 103569729 | 103572540 | 205436 |
| 61296 | 103573535 | 103579591 | 205436 |
| 61297 | 103581936 | 103582679 | |
| 61298 | 103587456 | 103590508 | 185215, 259717 |
| 61299 | 103621284 | 103621825 | |
| 61300 | 103627198 | 103627988 | |
| 61301 | 103664230 | 103666124 | |
| 61302 | 103671284 | 103676209 | 270705 |
| 61303 | 103679269 | 103680245 | |
| 61304 | 103709710 | 103712897 | |
| 61305 | 103726119 | 103727518 | |
| 61306 | 103750540 | 103751810 | |
| 61307 | 103762374 | 103762865 | |
| 61308 | 103780862 | 103782777 | |
| 61309 | 103796001 | 103796794 | |
| 61310 | 103798548 | 103802065 | 100664, 259775 |
| 61311 | 103851302 | 103853658 | 075413 |
| 61312 | 103994459 | 103996435 | 166166, 260285 |
| 61313 | 104018308 | 104019161 | |
| 61314 | 104024354 | 104024926 | 166170, 258851 |
| 61315 | 104027831 | 104029886 | 126214, 256053, 256500, |
| | | | 166170, 258851 |
| 61316 | 104043009 | 104043443 | 126214, 256053, 256500 |
| 61317 | 104094111 | 104096949 | 126214, 256500 |
| 61318 | 104181465 | 104182977 | 100711, 126215 |
| 61319 | 104211659 | 104212196 | 088808 |
| 61320 | 104312915 | 104315265 | 258735, 088808 |
| 61321 | 104338046 | 104339488 | 258534 |
| 61322 | 104345571 | 104348552 | 258534 |
| 61323 | 104354459 | 104354981 | |
| 61324 | 104355428 | 104359099 | |
| 61325 | 104360153 | 104361576 | |
| 61326 | 104363256 | 104364158 | |
| 61327 | 104387075 | 104388099 | 156411 |
| 61328 | 104544163 | 104544816 | |
| 61329 | 104554196 | 104555198 | 166183 |
| 61330 | 104582611 | 104583940 | 207568 |
| 61331 | 104747189 | 104747705 | 258913 |
| 61332 | 105120370 | 105120806 | 258736 |
| 61333 | 105146053 | 105148490 | 256050 |
| 61334 | 105153825 | 105157270 | 203485, 258858 |
| 61335 | 105160402 | 105161593 | 203485 |
| 61336 | 105189799 | 105192143 | 185100 |
| 61337 | 105192537 | 105193836 | 185100 |
| 61338 | 105198086 | 105200680 | 185100 |
| 61339 | 105200901 | 105203543 | 185100 |
| 61340 | 105215336 | 105216252 | |
| 61341 | 105218643 | 105220220 | 184990 |
| 61342 | 105255518 | 105256301 | 142208 |
| 61343 | 105258296 | 105258929 | 142208 |
| 61344 | 105260734 | 105263112 | 142208 |
| 61345 | 105266381 | 105268027 | 179627 |
| 61346 | 105281428 | 105283472 | |
| 61347 | 105292379 | 105294305 | |
| 61348 | 105330163 | 105333114 | 099814 |
| 61349 | 105338876 | 105339610 | 099814 |
| 61350 | 105399527 | 105400103 | 166428 |
| 61351 | 105442297 | 105443031 | 185567 |
| 61352 | 105444055 | 105444772 | 185567 |
| 61353 | 105446304 | 105447172 | |
| 61354 | 105451713 | 105453196 | 140104 |
| 61355 | 105486513 | 105488757 | 170779 |
| 61356 | 105511908 | 105512574 | |
| 61357 | 105553005 | 105555135 | |
| 61358 | 105556724 | 105560493 | 257556 |
| 61359 | 105646876 | 105647862 | 257622, 183828 |
| 61360 | 105670779 | 105671406 | |
| 61361 | 105714471 | 105715537 | 184887, 185024 |
| 61362 | 105765990 | 105768026 | 179364, 185024 |
| 61363 | 105779957 | 105781954 | 185024, 179364 |
| 61364 | 105804286 | 105804869 | 179364 |
| 61365 | 105863845 | 105865836 | 226174, 179364 |
| 61366 | 105881278 | 105881669 | 226174 |
| 61367 | 105885357 | 105887384 | 182979, 251602, 226174 |
| 61368 | 105897853 | 105898561 | 182979, 226174 |
| 61369 | 105899480 | 105900125 | 182979, 226174 |
| 61370 | 105941124 | 105943206 | 182809 |
| 61371 | 105947123 | 105948556 | |
| 61372 | 105955842 | 105958939 | 185347, 257341 |
| 61373 | 105994203 | 105995295 | 184986 |
| 61374 | 107251818 | 107253961 | |

[0583] The locations of ODSCs on Chromosome 15 are shown in Table 57.

TABLE 57
ODSC Locations on Chromosome 15

| SEQ ID NO. | Start | End | Overlapping Gene(s) |
|---|---|---|---|
| 61375 | 22832929 | 22834332 | 153575 |
| 61376 | 22891634 | 22894164 | 068793 |
| 61377 | 23033218 | 23034934 | 140157 |
| 61378 | 23085523 | 23087423 | 170113 |
| 61379 | 25200014 | 25202025 | 214265, 273173, 128739 |
| 61380 | 25682717 | 25685233 | 114062 |
| 61381 | 26327001 | 26328372 | |
| 61382 | 28282768 | 28284124 | 104044 |
| 61383 | 28327727 | 28328668 | 104044 |
| 61384 | 29561142 | 29562895 | 185115, 104059 |
| 61385 | 29731187 | 29732041 | 104059 |
| 61386 | 29762035 | 29764109 | 104059 |
| 61387 | 29961475 | 29968684 | 256802 |
| 61388 | 29982987 | 29983903 | |
| 61389 | 29989375 | 29991564 | |
| 61390 | 30004276 | 30005448 | 104067 |
| 61391 | 30027102 | 30029665 | 104067 |
| 61392 | 30048749 | 30049483 | 104067 |
| 61393 | 30112909 | 30115930 | 259523, 104067 |
| 61394 | 30216857 | 30218480 | 104067 |
| 61395 | 30234319 | 30235186 | 104067 |
| 61396 | 30260266 | 30261513 | 104067 |
| 61397 | 30330904 | 30331895 | 259647 |
| 61398 | 30357272 | 30358119 | 229389 |
| 61399 | 31195534 | 31197064 | 198690 |
| 61400 | 31248382 | 31248888 | 212526, 166912 |
| 61401 | 31281049 | 31285071 | 166912 |
| 61402 | 31361492 | 31362029 | 134160 |
| 61403 | 31391440 | 31392189 | 134160 |
| 61404 | 31449441 | 31450576 | 134160 |
| 61405 | 31451112 | 31452678 | 134160 |
| 61406 | 31455875 | 31457090 | |
| 61407 | 31506794 | 31509502 | 259448 |
| 61408 | 31528346 | 31529163 | |
| 61409 | 31554721 | 31558493 | |
| 61410 | 31571525 | 31572728 | |
| 61411 | 31588389 | 31590108 | |
| 61412 | 31617259 | 31621668 | 169926 |
| 61413 | 31636468 | 31637487 | 169926 |
| 61414 | 31637947 | 31638825 | 169926 |
| 61415 | 31645366 | 31646576 | 169926 |
| 61416 | 31657197 | 31659130 | 169926 |
| 61417 | 31683560 | 31684779 | 169926 |
| 61418 | 31689027 | 31689930 | 169926 |
| 61419 | 31732522 | 31733888 | |
| 61420 | 31735828 | 31736695 | |
| 61421 | 31779838 | 31781618 | 169918 |
| 61422 | 32951506 | 32952168 | 166922, 241818 |
| 61423 | 32968879 | 32970733 | 166922 |
| 61424 | 32973820 | 32977127 | 166922 |
| 61425 | 33492428 | 33493300 | |
| 61426 | 33493447 | 33494462 | |
| 61427 | 33585668 | 33586424 | |
| 61428 | 34329992 | 34331994 | 169857, 184984 |
| 61429 | 34393156 | 34394954 | 182405, 134153 |
| 61430 | 34446992 | 34448032 | 134152 |
| 61431 | 34501430 | 34502792 | 134152 |
| 61432 | 34516063 | 34518035 | 128463 |
| 61433 | 34629462 | 34630629 | 140199 |
| 61434 | 34634545 | 34635662 | 184507, 182117 |
| 61435 | 34658949 | 34660702 | 176454 |
| 61436 | 34806252 | 34807666 | 175265 |
| 61437 | 34874875 | 34876996 | 175265, 215252 |
| 61438 | 34880048 | 34880940 | 175265, 215252 |
| 61439 | 35011887 | 35012458 | |
| 61440 | 35260908 | 35262364 | 021776 |
| 61441 | 35279044 | 35281444 | 198146 |
| 61442 | 35400635 | 35401295 | 259336 |
| 61443 | 35410784 | 35411634 | 259336 |
| 61444 | 35433752 | 35434459 | 259336 |
| 61445 | 35501831 | 35502929 | 259516 |
| 61446 | 35584744 | 35586601 | 134146 |
| 61447 | 35593195 | 35593873 | 134146 |
| 61448 | 35596899 | 35600079 | 134146 |
| 61449 | 35600540 | 35602971 | 134146 |
| 61450 | 35604499 | 35604958 | 134146 |
| 61451 | 35742474 | 35743263 | 134146 |
| 61452 | 35837019 | 35839344 | 248079, 134146 |
| 61453 | 35848995 | 35850688 | 248079 |
| 61454 | 35922406 | 35923494 | 248079 |
| 61455 | 35989703 | 35990365 | 248079 |
| 61456 | 36045451 | 36046549 | 248079 |
| 61457 | 36166425 | 36166855 | |
| 61458 | 36469916 | 36470694 | 259639 |
| 61459 | 36720137 | 36721563 | |
| 61460 | 36798913 | 36799447 | |
| 61461 | 36871283 | 36872530 | 186073 |
| 61462 | 37076410 | 37078067 | 186073 |
| 61463 | 37090488 | 37090966 | 223518, 186073 |
| 61464 | 37097467 | 37098261 | 186073, 223518 |
| 61465 | 37100231 | 37101549 | 186073, 223518 |
| 61466 | 37106257 | 37106788 | 223518 |
| 61467 | 37106837 | 37107283 | 223518 |
| 61468 | 37301494 | 37302250 | 134138 |
| 61469 | 37390546 | 37394483 | 259460, 134138 |
| 61470 | 37508545 | 37512270 | |
| 61471 | 38050441 | 38051509 | |
| 61472 | 38056484 | 38057879 | |
| 61473 | 38068962 | 38069872 | |
| 61474 | 38079888 | 38083438 | |
| 61475 | 38116796 | 38117947 | |
| 61476 | 38152964 | 38153682 | |
| 61477 | 38164486 | 38165925 | |
| 61478 | 38177657 | 38178479 | |
| 61479 | 38192440 | 38194272 | |
| 61480 | 38342433 | 38343164 | 259225 |
| 61481 | 38364772 | 38365964 | 236914 |
| 61482 | 38543436 | 38545675 | 166068 |
| 61483 | 38746031 | 38747176 | 171262 |
| 61484 | 38856133 | 38857075 | 172575 |
| 61485 | 39160459 | 39161440 | 259345 |
| 61486 | 39166567 | 39167703 | 259345 |
| 61487 | 39169580 | 39170165 | 259345 |
| 61488 | 39172072 | 39172359 | 259345 |
| 61489 | 39186536 | 39187151 | 259345 |
| 61490 | 39419212 | 39421566 | 259345 |
| 61491 | 39445845 | 39446840 | 259345 |
| 61492 | 39481031 | 39481474 | 259345, 259450 |
| 61493 | 39565525 | 39566843 | 259345 |
| 61494 | 39645299 | 39646070 | 259345 |
| 61495 | 39650323 | 39653927 | 259345 |
| 61496 | 39655022 | 39657306 | 259345 |
| 61497 | 39871623 | 39874302 | 137801 |
| 61498 | 40074796 | 40075848 | 150667, 259580, 261136 |
| 61499 | 40079539 | 40080157 | 259580 |
| 61500 | 40096025 | 40096670 | 166073 |
| 61501 | 40120705 | 40121213 | 166073 |
| 61502 | 40152344 | 40153408 | 166073 |
| 61503 | 40177509 | 40177953 | 166073 |
| 61504 | 40210672 | 40214000 | 246863, 166073 |
| 61505 | 40225115 | 40227285 | 128829 |
| 61506 | 40227600 | 40228778 | 128829 |
| 61507 | 40268582 | 40269301 | 128829 |
| 61508 | 40294121 | 40296411 | 128829 |
| 61509 | 40302861 | 40303295 | 128829 |
| 61510 | 40330133 | 40333615 | 248508, 140319 |
| 61511 | 40347136 | 40347880 | 248508 |
| 61512 | 40361033 | 40362325 | |
| 61513 | 40380516 | 40381749 | 259409, 104081 |
| 61514 | 40384459 | 40385497 | 104081 |
| 61515 | 40390013 | 40394020 | 104081 |
| 61516 | 40394573 | 40396409 | 104081 |
| 61517 | 40400722 | 40401587 | 104081 |
| 61518 | 40452672 | 40454103 | 156970 |
| 61519 | 40574103 | 40575255 | 230778, 137841 |
| 61520 | 40583350 | 40583681 | 137841 |
| 61521 | 40615447 | 40616914 | |
| 61522 | 40630759 | 40633513 | 188549 |
| 61523 | 40659122 | 40659557 | 140323 |
| 61524 | 40659926 | 40660784 | 140323 |
| 61525 | 40671929 | 40672569 | |
| 61526 | 40674366 | 40675953 | 128944 |
| 61527 | 40704098 | 40705406 | 128928 |
| 61528 | 40732498 | 40733116 | 140320 |
| 61529 | 40733152 | 40734806 | 140320 |
| 61530 | 40762901 | 40764243 | 169105 |
| 61531 | 40785053 | 40786576 | 259536 |
| 61532 | 40803228 | 40804774 | 259536 |
| 61533 | 40841943 | 40842526 | 128891, 259536 |
| 61534 | 40856164 | 40857475 | 128891 |
| 61535 | 40861111 | 40862516 | 166133 |
| 61536 | 40885725 | 40886858 | 137812 |
| 61537 | 40941971 | 40943291 | 137812 |
| 61538 | 40986267 | 40987547 | 051180, 245849 |
| 61539 | 41034936 | 41039116 | 137824 |
| 61540 | 41046297 | 41048138 | 137824 |
| 61541 | 41055383 | 41057950 | 137880 |
| 61542 | 41063246 | 41063843 | 188277, 104129 |
| 61543 | 41085302 | 41086565 | 104129 |
| 61544 | 41098617 | 41100466 | 166140, 104129 |
| 61545 | 41137761 | 41139755 | 166145 |
| 61546 | 41185718 | 41187508 | 104142 |
| 61547 | 41198156 | 41199672 | 251161 |
| 61548 | 41201654 | 41202712 | |
| 61549 | 41232897 | 41234953 | |
| 61550 | 41241880 | 41242742 | |
| 61551 | 41244284 | 41246430 | 128965 |
| 61552 | 41293364 | 41294417 | 128908, 259617 |
| 61553 | 41335394 | 41336131 | 128908 |
| 61554 | 41406826 | 41409736 | 128908 |
| 61555 | 41453043 | 41453965 | |
| 61556 | 41522561 | 41524466 | 187446, 178997 |
| 61557 | 41525502 | 41525998 | 187446 |
| 61558 | 41533360 | 41534533 | 187446 |
| 61559 | 41541884 | 41542488 | 187446 |
| 61560 | 41547803 | 41549969 | 187446 |
| 61561 | 41550545 | 41552799 | 187446 |
| 61562 | 41568794 | 41569558 | 187446 |
| 61563 | 41571257 | 41571713 | 187446 |
| 61564 | 41575160 | 41577524 | 247556 |
| 61565 | 41623884 | 41625384 | 137804, 104147 |
| 61566 | 41660558 | 41660992 | 137804 |
| 61567 | 41693626 | 41695418 | 137806 |
| 61568 | 41708335 | 41710542 | 137815 |
| 61569 | 41787400 | 41789178 | 137825 |
| 61570 | 41799989 | 41800670 | 062524 |
| 61571 | 41835538 | 41836717 | 103932 |
| 61572 | 41850849 | 41852220 | 092445 |
| 61573 | 41912813 | 41914578 | 174197 |
| 61574 | 41953355 | 41954407 | 174197 |
| 61575 | 42065990 | 42067609 | 137802 |
| 61576 | 42082583 | 42083643 | 137802 |
| 61577 | 42091218 | 42091948 | 137802 |
| 61578 | 42119677 | 42121032 | 168970, 243789, 243708, |
| | | | 137802, 250379 |
| 61579 | 42176534 | 42177191 | 137877 |
| 61580 | 42218478 | 42219590 | 259883, 103966 |
| 61581 | 42220005 | 42223320 | 259883, 103966 |
| 61582 | 42235562 | 42237160 | 103966 |
| 61583 | 42251733 | 42255067 | 103966 |
| 61584 | 42261903 | 42262574 | 103966 |
| 61585 | 42263679 | 42265494 | 246740, 103966 |
| 61586 | 42300567 | 42304948 | 257797, 188089 |
| 61587 | 42348607 | 42351085 | |
| 61588 | 42352964 | 42353482 | |
| 61589 | 42376400 | 42377683 | 159337 |
| 61590 | 42499675 | 42500724 | 261002, 166887 |
| 61591 | 42564391 | 42568259 | 214013, 103978 |
| 61592 | 42578316 | 42579500 | 214013 |
| 61593 | 42698240 | 42698798 | 258461, 092529 |
| 61594 | 42782363 | 42784204 | 092531, 103994 |
| 61595 | 42786622 | 42788542 | 092531 |
| 61596 | 42791373 | 42791892 | 092531 |
| 61597 | 42840245 | 42841732 | 137814, 180979 |
| 61598 | 42867099 | 42868288 | 159433 |
| 61599 | 42883582 | 42884171 | 159433 |
| 61600 | 42999270 | 42999678 | 159433 |
| 61601 | 43011040 | 43011697 | 159433 |
| 61602 | 43028489 | 43030203 | 140326 |
| 61603 | 43212129 | 43213872 | 128881 |
| 61604 | 43378109 | 43378557 | 159459 |
| 61605 | 43397501 | 43399027 | 166947, 159459 |
| 61606 | 43424937 | 43426836 | 137842, 166947 |
| 61607 | 43477378 | 43478858 | 166946, 166947 |
| 61608 | 43566327 | 43566652 | |
| 61609 | 43621507 | 43623627 | 168803, 168806 |
| 61610 | 43662433 | 43664100 | 140265, 137822 |
| 61611 | 43732977 | 43733653 | 067369 |
| 61612 | 43784601 | 43786061 | 067369 |
| 61613 | 43802357 | 43803354 | 166963, 067369 |
| 61614 | 44037957 | 44039465 | 167004, 205771 |
| 61615 | 44041768 | 44042499 | 167004 |
| 61616 | 44069264 | 44070395 | 140264, 128886, 262560 |
| 61617 | 44083407 | 44085817 | 140264, 262560 |
| 61618 | 44091916 | 44093575 | 184716, 140264, 242028 |
| 61619 | 44115749 | 44117129 | 140259 |
| 61620 | 44579859 | 44581313 | 166734 |
| 61621 | 44718930 | 44720880 | 137770, 259595 |
| 61622 | 44827931 | 44830569 | 104131, 179523 |
| 61623 | 44954287 | 44956678 | 104133 |
| 61624 | 45002805 | 45005722 | 166710, 229474 |
| 61625 | 45018832 | 45022402 | 185880 |
| 61626 | 45075822 | 45077043 | |
| 61627 | 45103580 | 45105079 | |
| 61628 | 45174667 | 45175180 | 259479 |
| 61629 | 45315118 | 45316620 | 140263 |
| 61630 | 45375366 | 45376022 | |
| 61631 | 45383275 | 45383814 | |
| 61632 | 45423520 | 45424364 | 137857 |
| 61633 | 45454519 | 45455945 | 137857, 259539 |
| 61634 | 45458420 | 45460013 | 138606, 259539 |
| 61635 | 45478735 | 45480278 | 138606, 259519 |
| 61636 | 45490464 | 45493801 | 259932, 260035, 138606, |
| | | | 259519 |
| 61637 | 45570710 | 45572403 | 259520 |
| 61638 | 45635018 | 45638107 | |
| 61639 | 45659407 | 45660130 | 171766 |
| 61640 | 45667699 | 45668163 | 171766 |
| 61641 | 45669333 | 45672007 | 171766 |
| 61642 | 45678544 | 45680216 | 171766 |
| 61643 | 45693336 | 45696728 | 171763, 171766 |
| 61644 | 45722246 | 45723179 | 166920, 259342 |
| 61645 | 45736827 | 45738696 | 252285, 166920 |
| 61646 | 45740018 | 45742059 | 259354, 166920 |
| 61647 | 45748464 | 45749227 | 259354 |
| 61648 | 45813775 | 45815392 | 104154, 179362 |
| 61649 | 45878248 | 45880833 | 260170, 104164, 179362 |
| 61650 | 45926264 | 45935452 | 260170, 137767 |
| 61651 | 45937579 | 45938228 | 260170, 137767 |
| 61652 | 45940093 | 45941948 | 260170, 137767 |
| 61653 | 45951213 | 45953636 | 260170, 137767 |
| 61654 | 45996459 | 45998555 | 259200 |
| 61655 | 46211983 | 46212734 | 259200 |
| 61656 | 47416530 | 47417177 | |
| 61657 | 47585969 | 47586402 | 137872 |
| 61658 | 48104302 | 48105219 | 259572 |
| 61659 | 48622925 | 48624657 | 128951, 259488 |
| 61660 | 48937768 | 48938655 | 259705, 166147 |
| 61661 | 48975103 | 48975636 | |
| 61662 | 49073549 | 49074297 | 103995 |
| 61663 | 49076980 | 49078042 | 103995 |
| 61664 | 49086631 | 49087586 | 103995 |
| 61665 | 49147778 | 49148553 | 185634 |
| 61666 | 49169728 | 49171100 | 255302, 235883, 185634 |
| 61667 | 49267795 | 49268505 | |
| 61668 | 49337690 | 49339440 | 138593 |
| 61669 | 49446635 | 49448600 | 156958, 259467, 166200 |
| 61670 | 49462040 | 49463356 | 156958 |
| 61671 | 49784320 | 49785578 | 166262 |
| 61672 | 49912305 | 49914407 | 104047, 166262 |
| 61673 | 50147958 | 50148469 | |
| 61674 | 50238846 | 50239410 | 104043 |
| 61675 | 50336979 | 50337664 | 104043 |
| 61676 | 50426189 | 50429200 | 104043 |
| 61677 | 50436893 | 50439316 | 104043 |
| 61678 | 50455027 | 50459765 | 104043 |
| 61679 | 50460336 | 50461223 | 104043 |
| 61680 | 50473263 | 50476237 | 140284, 104043 |
| 61681 | 50502617 | 50503458 | 140284 |
| 61682 | 50518028 | 50518595 | 140284 |
| 61683 | 50519069 | 50519719 | 140284 |
| 61684 | 50530106 | 50530884 | |
| 61685 | 50539638 | 50540460 | 140287 |
| 61686 | 50540860 | 50541712 | 140287 |
| 61687 | 50644634 | 50648467 | 244879, 104064 |
| 61688 | 50715758 | 50717268 | 138592 |
| 61689 | 50977691 | 50979972 | 092439 |
| 61690 | 50989375 | 50990053 | |
| 61691 | 51010438 | 51011473 | 138600 |
| 61692 | 51056631 | 51058710 | 138600 |
| 61693 | 51059447 | 51060411 | |
| 61694 | 51070165 | 51070788 | |
| 61695 | 51149376 | 51150744 | |
| 61696 | 51165787 | 51166628 | |
| 61697 | 51176576 | 51178682 | |
| 61698 | 51199052 | 51201804 | 081014 |
| 61699 | 51321864 | 51323925 | |
| 61700 | 51494818 | 51498135 | 259240 |
| 61701 | 51580574 | 51581295 | 259240, 137869 |
| 61702 | 51785847 | 51786921 | 104093, 259678 |
| 61703 | 51868670 | 51869619 | 104093 |
| 61704 | 51914090 | 51916081 | 104093 |
| 61705 | 52018475 | 52019074 | 140280 |
| 61706 | 52023359 | 52024338 | 140280 |
| 61707 | 52028818 | 52030579 | 140280 |
| 61708 | 52043831 | 52044399 | 128872 |
| 61709 | 52108692 | 52109270 | |
| 61710 | 52121524 | 52123042 | 138594 |
| 61711 | 52135067 | 52136211 | 138594 |
| 61712 | 52160848 | 52161806 | 138594 |
| 61713 | 52166432 | 52167868 | 138594 |
| 61714 | 52199117 | 52200159 | 272337, 138594 |
| 61715 | 52263114 | 52264880 | 166477, 069956 |
| 61716 | 52273439 | 52275030 | 069956 |
| 61717 | 52310494 | 52314713 | 259438, 069956 |
| 61718 | 52344669 | 52345630 | 069956 |
| 61719 | 52360373 | 52362714 | 259712 |
| 61720 | 52368288 | 52371628 | 259712 |
| 61721 | 52385868 | 52386599 | 259712 |
| 61722 | 52403759 | 52405390 | 137875 |
| 61723 | 52407861 | 52409152 | 259327 |
| 61724 | 52425695 | 52428204 | 259709, 069966 |
| 61725 | 52429059 | 52430393 | 259709, 069966 |
| 61726 | 52448113 | 52449247 | 069966 |
| 61727 | 52470716 | 52472641 | 259577, 069966 |
| 61728 | 52491384 | 52491953 | 128833, 259577 |
| 61729 | 52579877 | 52581559 | 128833 |
| 61730 | 52586999 | 52588280 | 128833 |
| 61731 | 52820797 | 52822294 | 197535 |
| 61732 | 52858938 | 52861687 | 128989 |
| 61733 | 52866637 | 52867364 | |
| 61734 | 52969784 | 52972084 | 047346 |
| 61735 | 53001077 | 53002860 | 047346 |
| 61736 | 53038056 | 53039130 | |
| 61737 | 53072595 | 53073262 | 169856 |
| 61738 | 53075250 | 53079994 | 169856 |
| 61739 | 53080037 | 53083778 | 169856 |
| 61740 | 53089817 | 53091689 | |
| 61741 | 53091758 | 53092988 | |
| 61742 | 53094370 | 53099774 | 259203 |
| 61743 | 53325833 | 53328266 | |
| 61744 | 53351067 | 53352468 | |
| 61745 | 53364167 | 53364847 | |
| 61746 | 53489054 | 53490464 | |
| 61747 | 53738482 | 53742429 | |
| 61748 | 53744464 | 53748696 | |
| 61749 | 53825628 | 53827329 | 166415 |
| 61750 | 53851443 | 53852216 | 166415 |
| 61751 | 53872481 | 53872975 | 166415 |
| 61752 | 53917428 | 53918083 | 166415 |
| 61753 | 53967754 | 53968932 | 166415 |
| 61754 | 54013473 | 54014384 | 166415 |
| 61755 | 54051771 | 54052225 | 166415 |
| 61756 | 54202076 | 54202808 | |
| 61757 | 55487978 | 55490098 | 137876 |
| 61758 | 55513151 | 55513846 | 069974 |
| 61759 | 55541973 | 55543056 | 069974 |
| 61760 | 55548526 | 55549468 | 069974 |
| 61761 | 55571749 | 55572751 | 069974 |
| 61762 | 55580893 | 55583140 | 069974 |
| 61763 | 55610521 | 55612152 | 069943, 225973, 069974 |
| 61764 | 55694273 | 55696868 | 261771, 260916 |
| 61765 | 55699439 | 55701225 | 261652, 260916, 261771 |
| 61766 | 56160801 | 56161958 | 069869 |
| 61767 | 56243855 | 56245422 | 069869 |
| 61768 | 56284979 | 56286888 | 069869 |
| 61769 | 56331385 | 56333936 | |
| 61770 | 56534968 | 56538667 | 151575, 181827 |
| 61771 | 56657170 | 56658071 | 151575 |
| 61772 | 56945884 | 56947214 | 137871 |
| 61773 | 57024430 | 57026500 | 137871 |
| 61774 | 57064989 | 57066460 | 137871 |
| 61775 | 57074350 | 57075183 | 137871 |
| 61776 | 57123832 | 57125141 | 137871 |
| 61777 | 57163302 | 57163874 | 137871 |
| 61778 | 57178457 | 57180560 | 137871 |
| 61779 | 57209696 | 57212738 | 140262, 137871 |
| 61780 | 57257628 | 57258150 | 140262 |
| 61781 | 57307266 | 57309144 | 140262 |
| 61782 | 57410004 | 57410979 | 140262 |
| 61783 | 57598323 | 57599326 | 247982 |
| 61784 | 57668291 | 57670113 | 128849 |
| 61785 | 57670801 | 57672432 | 128849 |
| 61786 | 57672859 | 57673576 | 128849 |
| 61787 | 57697885 | 57699203 | 128849 |
| 61788 | 57710596 | 57712029 | 128849 |
| 61789 | 57718823 | 57720429 | 128849 |
| 61790 | 57729308 | 57730640 | 128849 |
| 61791 | 57732876 | 57733555 | 128849 |
| 61792 | 57768887 | 57771583 | 261489, 128849 |
| 61793 | 57777073 | 57779415 | 128849 |
| 61794 | 57789134 | 57789798 | 128849 |
| 61795 | 57851903 | 57852694 | |
| 61796 | 57911579 | 57912534 | 137878, 255529, 263155 |
| 61797 | 57959207 | 57960099 | 137878, 255529, 263155 |
| 61798 | 57998007 | 58000111 | 137878, 255529 |
| 61799 | 58170503 | 58171374 | |
| 61800 | 58213094 | 58214202 | |
| 61801 | 58214885 | 58216297 | |
| 61802 | 58409738 | 58410439 | 128918 |
| 61803 | 58428318 | 58435468 | 103569, 128918 |
| 61804 | 58437677 | 58441922 | 128918, 103569 |
| 61805 | 58524483 | 58526710 | 128918 |
| 61806 | 58540003 | 58540824 | 128918 |
| 61807 | 58574350 | 58574924 | 128918 |
| 61808 | 58575507 | 58578910 | 128918 |
| 61809 | 58598218 | 58600963 | 128918 |
| 61810 | 58621066 | 58626675 | 128918 |
| 61811 | 58693814 | 58694917 | 128918 |
| 61812 | 58712074 | 58713837 | 128918, 166035 |
| 61813 | 58715083 | 58718427 | 128918, 166035 |
| 61814 | 58722354 | 58726769 | 128918, 166035 |
| 61815 | 58729820 | 58735964 | 128918, 259293, 166035 |
| 61816 | 58736074 | 58738236 | 128918, 259293, 166035 |
| 61817 | 58749874 | 58752345 | 128918, 259293, 166035 |
| 61818 | 58756959 | 58769860 | 128918, 259293, 166035 |
| 61819 | 58816443 | 58817056 | 166035 |
| 61820 | 58819058 | 58822147 | 166035 |
| 61821 | 58837783 | 58840831 | 166035 |
| 61822 | 58865327 | 58865834 | |
| 61823 | 59040475 | 59042537 | 137845 |
| 61824 | 59062232 | 59064667 | 128923, 245975 |
| 61825 | 59224085 | 59226955 | 137776, 157450 |
| 61826 | 59279033 | 59281146 | 157450 |
| 61827 | 59327137 | 59327982 | 157450 |
| 61828 | 59457315 | 59459199 | 157483 |
| 61829 | 59547451 | 59549983 | 157483 |
| 61830 | 59563638 | 59567304 | 157483 |
| 61831 | 59575818 | 59576658 | 157483 |
| 61832 | 59586493 | 59588464 | 157483 |
| 61833 | 59631266 | 59632035 | 157483 |
| 61834 | 59641693 | 59643286 | 157483, 259735 |
| 61835 | 59662877 | 59666160 | 157470, 157483 |
| 61836 | 59702355 | 59703280 | 157470 |
| 61837 | 59903346 | 59904701 | 140297 |
| 61838 | 59948884 | 59949995 | 140307, 227161 |
| 61839 | 59980210 | 59982460 | 259238, 140299 |
| 61840 | 59989805 | 59990712 | |
| 61841 | 60030653 | 60032862 | |
| 61842 | 60298292 | 60299268 | 171956 |
| 61843 | 60383211 | 60384029 | 259223 |
| 61844 | 60385653 | 60386367 | 259223 |
| 61845 | 60419596 | 60420623 | |
| 61846 | 60631997 | 60633300 | |
| 61847 | 60663478 | 60664079 | 182718 |
| 61848 | 60682948 | 60691308 | 182718 |
| 61849 | 60694751 | 60695441 | 182718 |
| 61850 | 60699003 | 60701725 | |
| 61851 | 60761998 | 60762616 | 128915 |
| 61852 | 60769746 | 60772283 | 245534, 128915 |
| 61853 | 60773000 | 60773392 | 245534 |
| 61854 | 60848031 | 60848478 | 245534, 069667 |
| 61855 | 60860352 | 60861196 | 245534, 069667 |
| 61856 | 60867480 | 60868632 | 245534, 069667 |
| 61857 | 60874451 | 60875090 | 245534, 069667 |
| 61858 | 60882631 | 60885742 | 245534, 069667 |
| 61859 | 60886006 | 60887082 | 245534, 069667 |
| 61860 | 60973376 | 60976161 | 259482, 069667 |
| 61861 | 61027061 | 61028385 | 069667 |
| 61862 | 61032034 | 61033866 | 069667 |
| 61863 | 61043877 | 61046073 | 069667 |
| 61864 | 61090837 | 61091918 | 069667 |
| 61865 | 61191377 | 61192621 | 069667 |
| 61866 | 61205090 | 61206942 | 069667 |
| 61867 | 61208184 | 61210423 | 069667 |
| 61868 | 61341903 | 61343340 | 069667 |
| 61869 | 61361546 | 61363333 | 069667 |
| 61870 | 61387724 | 61388718 | 069667 |
| 61871 | 61389166 | 61389763 | 069667 |
| 61872 | 61519052 | 61522427 | 069667 |
| 61873 | 61618522 | 61619937 | 259616 |
| 61874 | 61666648 | 61667562 | 259616 |
| 61875 | 61674990 | 61675963 | 259616 |
| 61876 | 61686115 | 61686801 | 259616 |
| 61877 | 61694345 | 61695078 | 259616 |
| 61878 | 61695648 | 61697345 | 259616 |
| 61879 | 61703990 | 61704757 | 259616 |
| 61880 | 61713585 | 61715335 | 259616 |
| 61881 | 61771716 | 61772376 | 259616 |
| 61882 | 62199146 | 62200615 | 129003 |
| 61883 | 62351676 | 62353252 | 259251, 129003 |
| 61884 | 62401618 | 62406555 | |
| 61885 | 62407766 | 62408789 | |
| 61886 | 62410596 | 62412930 | |
| 61887 | 62415652 | 62417627 | |
| 61888 | 62427408 | 62428510 | |
| 61889 | 62580397 | 62581275 | |
| 61890 | 62594375 | 62595135 | |
| 61891 | 62681866 | 62684883 | 171914 |
| 61892 | 62797655 | 62799388 | 171914 |
| 61893 | 62862141 | 62862953 | 171914 |
| 61894 | 62895752 | 62896330 | 171914 |
| 61895 | 63049383 | 63051693 | 171914 |
| 61896 | 63074060 | 63075195 | 171914 |
| 61897 | 63104308 | 63105082 | 171914 |
| 61898 | 63127071 | 63128735 | 259370, 171914 |
| 61899 | 63133986 | 63134543 | 259370, 171914 |
| 61900 | 63142063 | 63143822 | 259370 |
| 61901 | 63144327 | 63146904 | 259370 |
| 61902 | 63177472 | 63178278 | |
| 61903 | 63178305 | 63183289 | |
| 61904 | 63186340 | 63193103 | 259727 |
| 61905 | 63227128 | 63228691 | |
| 61906 | 63248634 | 63249903 | |
| 61907 | 63249970 | 63251343 | |
| 61908 | 63264584 | 63265883 | |
| 61909 | 63268125 | 63268990 | |
| 61910 | 63279082 | 63279690 | |
| 61911 | 63287027 | 63287563 | |
| 61912 | 63302482 | 63304795 | |
| 61913 | 63306521 | 63309272 | |
| 61914 | 63333077 | 63344600 | 259498, 140416 |
| 61915 | 63344836 | 63347810 | 140416 |
| 61916 | 63399959 | 63402437 | 259672 |
| 61917 | 63413242 | 63414990 | 103642 |
| 61918 | 63447920 | 63450725 | 185088 |
| 61919 | 63481100 | 63482638 | 166128 |
| 61920 | 63490767 | 63491369 | 166128 |
| 61921 | 63503954 | 63505920 | 166128 |
| 61922 | 63509573 | 63512023 | 166128 |
| 61923 | 63513379 | 63514624 | 166128 |
| 61924 | 63521204 | 63522459 | 166128 |
| 61925 | 63539165 | 63539774 | 166128 |
| 61926 | 63568676 | 63570457 | 138613 |
| 61927 | 63640561 | 63641161 | 074410 |
| 61928 | 63663809 | 63664994 | 074410 |
| 61929 | 63673539 | 63674477 | 074410 |
| 61930 | 63736733 | 63737340 | |
| 61931 | 63741522 | 63743083 | |
| 61932 | 63765064 | 63769482 | |
| 61933 | 63789814 | 63790668 | |
| 61934 | 63792436 | 63798148 | 140455 |
| 61935 | 63801650 | 63803562 | 140455 |
| 61936 | 63806298 | 63807358 | 140455 |
| 61937 | 63815295 | 63816019 | 140455 |
| 61938 | 63891567 | 63894565 | 259248, 197361 |
| 61939 | 64007943 | 64008450 | 103657 |
| 61940 | 64009856 | 64012689 | 103657 |
| 61941 | 64020340 | 64021247 | 103657 |
| 61942 | 64125178 | 64127035 | 103657 |
| 61943 | 64174749 | 64175474 | |
| 61944 | 64180234 | 64180980 | |
| 61945 | 64188300 | 64189767 | |
| 61946 | 64259842 | 64260785 | 035664 |
| 61947 | 64261647 | 64267005 | 035664 |
| 61948 | 64296699 | 64297613 | 035664 |
| 61949 | 64307819 | 64312441 | 035664 |
| 61950 | 64319613 | 64320303 | 035664 |
| 61951 | 64337777 | 64339301 | 035664 |
| 61952 | 64342564 | 64343211 | 035664 |
| 61953 | 64362346 | 64365964 | 166797, 035664 |
| 61954 | 64384404 | 64386943 | 028528, 166797 |
| 61955 | 64387923 | 64389759 | 028528 |
| 61956 | 64397305 | 64397832 | 028528 |
| 61957 | 64403676 | 64405980 | 201071, 028528 |
| 61958 | 64454037 | 64456525 | 166794 |
| 61959 | 64509064 | 64509738 | 169118, 259316 |
| 61960 | 64539638 | 64540770 | 169118, 259316 |
| 61961 | 64541679 | 64542095 | 169118, 259316 |
| 61962 | 64647545 | 64649135 | 169118, 259316 |
| 61963 | 64679335 | 64680769 | 103671, 166803 |
| 61964 | 64735438 | 64737342 | 206781, 103671 |
| 61965 | 64752348 | 64754616 | 180357 |
| 61966 | 64828377 | 64828809 | 180357 |
| 61967 | 64943599 | 64944276 | 180357 |
| 61968 | 64985130 | 64986016 | 180304 |
| 61969 | 64994554 | 64996358 | 180304, 259635 |
| 61970 | 64996572 | 64997854 | 259635 |
| 61971 | 65023081 | 65025320 | |
| 61972 | 65066839 | 65068687 | 166831 |
| 61973 | 65101969 | 65102682 | |
| 61974 | 65133463 | 65134552 | 249240, 241839 |
| 61975 | 65230289 | 65230877 | 166839 |
| 61976 | 65273995 | 65274640 | 090487 |
| 61977 | 65281104 | 65282638 | 090487 |
| 61978 | 65321113 | 65322312 | 103707 |
| 61979 | 65325116 | 65326707 | |
| 61980 | 65336455 | 65338373 | 186198 |
| 61981 | 65346557 | 65348744 | 103710 |
| 61982 | 65348775 | 65350339 | 103710 |
| 61983 | 65376362 | 65377636 | |
| 61984 | 65378623 | 65382371 | |
| 61985 | 65425073 | 65426587 | 090470 |
| 61986 | 65465979 | 65466529 | 166855 |
| 61987 | 65475840 | 65478650 | 166855 |
| 61988 | 65567288 | 65568958 | 138617 |
| 61989 | 65578006 | 65579510 | 138617 |
| 61990 | 65587600 | 65589095 | 199568, 138617 |
| 61991 | 65595564 | 65597988 | 200156 |
| 61992 | 65604602 | 65605335 | |
| 61993 | 65677711 | 65678526 | 103742 |
| 61994 | 65808867 | 65810295 | 074603 |
| 61995 | 65822342 | 65823733 | 074696 |
| 61996 | 65824319 | 65825625 | 074696 |
| 61997 | 65902636 | 65904915 | 074621, 138614 |
| 61998 | 65947306 | 65947988 | 074621 |
| 61999 | 65958528 | 65959484 | 174485 |
| 62000 | 66079875 | 66080501 | 103769, 174485 |
| 62001 | 66082818 | 66085519 | 174485, 103769 |
| 62002 | 66088823 | 66089393 | 103769 |
| 62003 | 66093533 | 66094193 | 103769 |
| 62004 | 66124656 | 66126428 | 103769 |
| 62005 | 66161139 | 66163897 | 103769 |
| 62006 | 66585085 | 66588031 | 166938, 261318 |
| 62007 | 66648230 | 66649384 | 075131 |
| 62008 | 66662072 | 66663127 | 075131 |
| 62009 | 66678320 | 66680569 | 169032, 075131 |
| 62010 | 66746445 | 66746846 | 169032 |
| 62011 | 66764562 | 66765839 | 169032 |
| 62012 | 66773030 | 66776287 | 169032 |
| 62013 | 66781290 | 66782107 | 261351, 269999, 169032 |
| 62014 | 66789139 | 66790900 | 266589, 174444, 174446 |
| 62015 | 66795492 | 66798266 | 200623, 174442, 174444 |
| 62016 | 66882728 | 66883336 | 259471 |
| 62017 | 66903416 | 66904106 | 259471 |
| 62018 | 66909280 | 66910680 | 259471 |
| 62019 | 66942102 | 66943369 | 259471 |
| 62020 | 66944437 | 66945059 | 259471 |
| 62021 | 66992796 | 66996242 | 137834 |
| 62022 | 67041721 | 67045049 | 137834 |
| 62023 | 67057947 | 67059131 | 137834 |
| 62024 | 67071534 | 67072634 | 137834 |
| 62025 | 67095006 | 67095976 | |
| 62026 | 67133004 | 67136098 | |
| 62027 | 67143223 | 67144078 | |
| 62028 | 67175476 | 67176539 | |
| 62029 | 67219631 | 67220046 | 259437 |
| 62030 | 67223212 | 67225008 | 259289, 259437 |
| 62031 | 67237840 | 67239579 | 259289 |
| 62032 | 67286158 | 67286912 | 259347 |
| 62033 | 67315984 | 67318718 | 259347 |
| 62034 | 67336440 | 67337233 | 259347 |
| 62035 | 67339812 | 67342918 | 259347 |
| 62036 | 67349565 | 67352463 | 259347 |
| 62037 | 67354329 | 67361477 | 166949 |
| 62038 | 67374251 | 67374979 | 166949 |
| 62039 | 67396664 | 67403001 | 166949 |
| 62040 | 67406975 | 67411037 | 166949 |
| 62041 | 67417965 | 67421285 | 166949 |
| 62042 | 67426458 | 67428689 | 166949 |
| 62043 | 67438484 | 67443295 | 259202, 166949 |
| 62044 | 67460042 | 67460973 | 166949 |
| 62045 | 67466489 | 67468574 | 166949 |
| 62046 | 67545798 | 67547930 | 103599, 103591 |
| 62047 | 67650817 | 67652270 | 103599 |
| 62048 | 67812575 | 67814973 | 189227, 259673 |
| 62049 | 67833871 | 67836251 | 137764, 270964 |
| 62050 | 67842537 | 67843332 | 137764 |
| 62051 | 68131180 | 68131750 | 245719, 259410 |
| 62052 | 68131833 | 68133323 | 206625, 259410 |
| 62053 | 68176533 | 68177951 | |
| 62054 | 68207219 | 68208629 | |
| 62055 | 68334435 | 68335347 | |
| 62056 | 68346281 | 68348284 | 033800 |
| 62057 | 68398718 | 68399399 | 033800 |
| 62058 | 68497362 | 68498103 | 260007, 129007 |
| 62059 | 68521041 | 68522940 | 264779, 260007, 128973 |
| 62060 | 68548560 | 68550304 | 128973 |
| 62061 | 68563349 | 68571913 | 169018, 260657 |
| 62062 | 68577557 | 68578098 | 169018 |
| 62063 | 68592503 | 68593401 | 261425 |
| 62064 | 68601322 | 68602086 | 137809 |
| 62065 | 68692341 | 68692848 | 137809 |
| 62066 | 68834706 | 68836391 | |
| 62067 | 69085288 | 69086171 | 140350 |
| 62068 | 69108319 | 69114232 | 258484, 140350 |
| 62069 | 69366332 | 69367549 | 212766 |
| 62070 | 69418122 | 69419159 | |
| 62071 | 69420745 | 69421855 | |
| 62072 | 69452327 | 69454354 | 266374, 138604 |
| 62073 | 69498249 | 69498974 | 138604 |
| 62074 | 69516625 | 69517326 | 138604 |
| 62075 | 69597588 | 69598394 | 137819 |
| 62076 | 69706680 | 69707799 | 259426, 137807 |
| 62077 | 69743710 | 69746346 | 137818 |
| 62078 | 69754515 | 69756080 | 245750 |
| 62079 | 69758258 | 69758758 | 245750 |
| 62080 | 69845749 | 69847739 | 245750 |
| 62081 | 69848454 | 69851400 | 245750 |
| 62082 | 69853006 | 69855482 | 245750 |
| 62083 | 69871099 | 69873677 | |
| 62084 | 69884061 | 69884819 | 259641 |
| 62085 | 69886572 | 69887665 | 259641 |
| 62086 | 69920010 | 69920713 | 259641 |
| 62087 | 70357266 | 70357937 | 140332 |
| 62088 | 70371753 | 70372643 | 207965, 140332 |
| 62089 | 70387768 | 70394285 | 140332 |
| 62090 | 70413905 | 70415258 | |
| 62091 | 70419354 | 70420794 | |
| 62092 | 70432394 | 70433900 | |
| 62093 | 70451500 | 70453758 | |
| 62094 | 70457164 | 70458695 | |
| 62095 | 70487469 | 70490698 | 259252 |
| 62096 | 70563018 | 70564224 | |
| 62097 | 70577150 | 70577590 | |
| 62098 | 70641117 | 70641872 | |
| 62099 | 70669160 | 70670019 | |
| 62100 | 70725350 | 70727532 | |
| 62101 | 70752263 | 70753071 | |
| 62102 | 70766609 | 70768289 | |
| 62103 | 70800147 | 70800726 | |
| 62104 | 70877024 | 70878366 | |
| 62105 | 70909306 | 70910287 | |
| 62106 | 71006315 | 71007701 | 137831 |
| 62107 | 71007813 | 71009207 | 137831 |
| 62108 | 71033285 | 71034593 | 137831 |
| 62109 | 71054276 | 71056705 | 137831 |
| 62110 | 71058083 | 71058793 | |
| 62111 | 71063010 | 71063566 | 259624 |
| 62112 | 71066907 | 71068807 | 259624 |
| 62113 | 71079329 | 71082164 | |
| 62114 | 71085783 | 71088200 | |
| 62115 | 71092252 | 71092804 | 235420 |
| 62116 | 71099145 | 71100431 | |
| 62117 | 71118376 | 71119800 | |
| 62118 | 71122885 | 71123734 | 267539 |
| 62119 | 71127632 | 71128308 | 166173 |
| 62120 | 71145301 | 71147342 | 137821, 166173 |
| 62121 | 71148223 | 71150173 | 137821 |
| 62122 | 71167143 | 71168376 | 137821 |
| 62123 | 71183899 | 71185507 | 129028, 137821 |
| 62124 | 71371670 | 71372287 | |
| 62125 | 71406462 | 71409503 | 225362, 187720 |
| 62126 | 71428658 | 71429826 | 187720 |
| 62127 | 71435596 | 71436761 | 187720 |
| 62128 | 71437756 | 71440852 | 259964, 187720 |
| 62129 | 71441772 | 71442873 | 259964, 187720 |
| 62130 | 71447023 | 71447596 | 259964, 187720 |
| 62131 | 71529018 | 71533159 | 187720 |
| 62132 | 71543925 | 71545175 | 187720 |
| 62133 | 71570359 | 71573743 | 187720 |
| 62134 | 71585794 | 71589374 | 187720 |
| 62135 | 71612102 | 71612832 | 187720 |
| 62136 | 71620037 | 71622569 | 187720 |
| 62137 | 71640746 | 71641690 | 260586, 187720 |
| 62138 | 71658751 | 71659707 | 187720 |
| 62139 | 71672108 | 71673279 | 187720 |
| 62140 | 71736317 | 71738217 | 187720 |
| 62141 | 71739681 | 71741664 | 187720 |
| 62142 | 71793688 | 71794099 | 187720 |
| 62143 | 71901461 | 71903097 | 187720 |
| 62144 | 71946230 | 71947628 | 187720 |
| 62145 | 71948627 | 71950282 | 187720 |
| 62146 | 71951067 | 71953907 | 187720 |
| 62147 | 71969057 | 71970677 | 187720 |
| 62148 | 71983952 | 71984584 | 187720 |
| 62149 | 71999760 | 72000371 | 187720 |
| 62150 | 72024867 | 72025567 | 187720 |
| 62151 | 72038938 | 72041933 | 187720 |
| 62152 | 72044056 | 72046624 | 187720 |
| 62153 | 72053032 | 72055022 | 187720 |
| 62154 | 72084878 | 72085242 | 031544 |
| 62155 | 72402652 | 72403241 | 066933 |
| 62156 | 72409519 | 72411433 | 066933, 166192 |
| 62157 | 72502976 | 72503534 | 067225 |
| 62158 | 72522017 | 72523099 | 067225 |
| 62159 | 72523154 | 72524522 | 067225 |
| 62160 | 72564257 | 72565487 | 137817, 273025 |
| 62161 | 72667480 | 72669455 | 260339, 260729, 213614 |
| 62162 | 72754089 | 72755041 | 261423 |
| 62163 | 72765314 | 72768111 | 166233, 261423 |
| 62164 | 72963053 | 72963746 | |
| 62165 | 72977618 | 72979663 | 140463, 175202 |
| 62166 | 73074808 | 73077431 | 260898, 159322 |
| 62167 | 73089074 | 73089916 | 260898 |
| 62168 | 73250868 | 73251417 | |
| 62169 | 73343369 | 73345961 | 067141 |
| 62170 | 73457568 | 73459196 | 067141 |
| 62171 | 73585856 | 73586778 | 067141 |
| 62172 | 73680016 | 73681249 | |
| 62173 | 73832436 | 73832923 | 183324 |
| 62174 | 73892273 | 73894387 | 156642 |
| 62175 | 73921082 | 73922936 | 156642 |
| 62176 | 73924650 | 73927445 | 156642 |
| 62177 | 73928752 | 73929474 | |
| 62178 | 73975781 | 73979406 | 103855 |
| 62179 | 74273955 | 74274643 | |
| 62180 | 74279657 | 74282227 | 067221 |
| 62181 | 74283461 | 74284906 | 067221 |
| 62182 | 74286659 | 74288142 | 140464, 067221 |
| 62183 | 74302665 | 74304547 | 140464 |
| 62184 | 74492563 | 74493833 | 137868 |
| 62185 | 74532288 | 74532813 | 140481 |
| 62186 | 74657650 | 74658790 | 261821, 140459 |
| 62187 | 74687340 | 74690730 | |
| 62188 | 74710627 | 74711833 | 138623 |
| 62189 | 74725292 | 74726314 | 138623 |
| 62190 | 74735342 | 74736402 | |
| 62191 | 74736952 | 74737667 | |
| 62192 | 74752627 | 74754059 | 247240, 138629 |
| 62193 | 74817356 | 74818766 | |
| 62194 | 74832536 | 74834412 | 179361 |
| 62195 | 74838260 | 74838985 | 179361 |
| 62196 | 74890421 | 74891600 | 179335, 179361 |
| 62197 | 74906978 | 74909226 | 260919, 179335 |
| 62198 | 74943491 | 74944062 | 179151 |
| 62199 | 74956074 | 74957324 | 179151 |
| 62200 | 74987446 | 74988765 | 179151 |
| 62201 | 75017506 | 75019817 | 140465 |
| 62202 | 75022723 | 75024543 | |
| 62203 | 75042007 | 75042715 | 140505 |
| 62204 | 75044725 | 75045362 | 140505 |
| 62205 | 75072068 | 75072745 | |
| 62206 | 75073152 | 75075506 | 103653 |
| 62207 | 75091825 | 75093101 | 103653 |
| 62208 | 75108944 | 75110083 | 261606, 140506 |
| 62209 | 75135122 | 75136429 | 140497, 140474 |
| 62210 | 75165111 | 75166432 | 140497 |
| 62211 | 75182112 | 75183260 | 178802 |
| 62212 | 75183345 | 75184310 | 178802 |
| 62213 | 75198125 | 75199940 | 178761 |
| 62214 | 75229258 | 75231115 | 178741 |
| 62215 | 75248503 | 75249812 | 198794, 178718 |
| 62216 | 75250836 | 75251448 | 198794 |
| 62217 | 75276089 | 75276653 | 198794 |
| 62218 | 75287544 | 75288735 | 198794 |
| 62219 | 75315379 | 75316898 | 138621, 260483 |
| 62220 | 75321501 | 75322653 | 138621 |
| 62221 | 75493749 | 75496088 | 167173 |
| 62222 | 75497028 | 75497596 | 167173 |
| 62223 | 75628088 | 75629138 | 140365 |
| 62224 | 75639270 | 75641063 | 140398 |
| 62225 | 75660010 | 75662029 | 260274, 169375, 140400 |
| 62226 | 75742799 | 75748912 | 169375 |
| 62227 | 75752721 | 75753622 | |
| 62228 | 75824721 | 75825265 | 169410, 260269 |
| 62229 | 75869799 | 75872471 | 169410, 260269 |
| 62230 | 75917266 | 75919123 | 169371, 260235 |
| 62231 | 75931198 | 75933416 | 177971, 260206 |
| 62232 | 75939025 | 75941305 | 173548, 177971 |
| 62233 | 75943501 | 75944263 | 173548 |
| 62234 | 75953415 | 75954215 | 173548 |
| 62235 | 75956043 | 75956925 | |
| 62236 | 76010723 | 76011080 | |
| 62237 | 76013104 | 76013748 | |
| 62238 | 76016050 | 76016783 | 182950 |
| 62239 | 76050544 | 76051619 | 260288 |
| 62240 | 76067578 | 76069670 | 187812 |
| 62241 | 76134936 | 76136814 | 140367 |
| 62242 | 76195467 | 76197200 | 167196 |
| 62243 | 76601918 | 76606725 | 140374 |
| 62244 | 76646198 | 76646567 | 140386 |
| 62245 | 76869040 | 76869584 | 140386 |
| 62246 | 77196580 | 77198412 | 140386 |
| 62247 | 77223531 | 77224796 | 117906 |
| 62248 | 77355400 | 77358169 | 140391 |
| 62249 | 77361778 | 77363662 | 140391 |
| 62250 | 77710653 | 77714618 | 140382, 173517 |
| 62251 | 77715931 | 77718537 | 140382 |
| 62252 | 77756634 | 77757380 | 140382 |
| 62253 | 77789027 | 77789681 | |
| 62254 | 77861159 | 77862474 | 259420 |
| 62255 | 78236284 | 78237214 | 214646 |
| 62256 | 78283823 | 78285003 | 261143, 167202 |
| 62257 | 78295822 | 78298145 | 167202 |
| 62258 | 78298970 | 78301274 | 167202 |
| 62259 | 78302337 | 78302935 | 167202 |
| 62260 | 78304277 | 78305753 | 167202 |
| 62261 | 78309704 | 78312050 | 167202 |
| 62262 | 78348294 | 78350268 | 167202 |
| 62263 | 78356485 | 78358873 | 167202 |
| 62264 | 78367617 | 78370330 | 183476, 167202 |
| 62265 | 78423494 | 78424658 | 166411, 136425 |
| 62266 | 78440851 | 78442680 | 166411 |
| 62267 | 78508897 | 78509627 | 103740 |
| 62268 | 78584026 | 78584916 | 140395 |
| 62269 | 78591013 | 78592652 | 140395 |
| 62270 | 78666508 | 78667918 | |
| 62271 | 78689202 | 78689876 | |
| 62272 | 78729428 | 78731805 | 136381 |
| 62273 | 78799454 | 78800697 | 188266 |
| 62274 | 78832033 | 78834167 | 041357 |
| 62275 | 78943240 | 78943985 | 117971 |
| 62276 | 79151899 | 79153294 | 185787 |
| 62277 | 79164509 | 79167024 | 185787 |
| 62278 | 79197337 | 79199882 | |
| 62279 | 79223097 | 79224514 | 103811 |
| 62280 | 79236528 | 79237679 | 103811 |
| 62281 | 79242284 | 79245077 | |
| 62282 | 79262216 | 79263142 | 058335 |
| 62283 | 79927042 | 79930021 | |
| 62284 | 79931376 | 79934064 | |
| 62285 | 79937816 | 79938768 | |
| 62286 | 79947200 | 79949261 | |
| 62287 | 79949964 | 79951246 | |
| 62288 | 80061251 | 80061952 | |
| 62289 | 80138632 | 80139774 | 136371, 259332 |
| 62290 | 80145745 | 80146426 | 136371, 259332 |
| 62291 | 80164373 | 80167121 | 136371, 259332 |
| 62292 | 80174003 | 80174508 | 136371, 259332 |
| 62293 | 80178071 | 80179134 | 136371, 259332 |
| 62294 | 80187586 | 80191703 | 180953, 136371, 259332 |
| 62295 | 80214689 | 80217083 | 259642, 257028, 180953, |
| | | | 259332 |
| 62296 | 80248433 | 80249340 | |
| 62297 | 80252641 | 80253758 | 140379 |
| 62298 | 80257866 | 80259348 | 140379 |
| 62299 | 80265172 | 80265704 | |
| 62300 | 80351261 | 80353234 | 086666 |
| 62301 | 80364430 | 80365127 | 086666 |
| 62302 | 80444147 | 80447236 | 103876 |
| 62303 | 80451905 | 80456170 | 103876 |
| 62304 | 80463852 | 80465242 | 103876 |
| 62305 | 80465501 | 80467739 | 103876 |
| 62306 | 80471358 | 80472622 | 103876 |
| 62307 | 80487241 | 80487759 | |
| 62308 | 80499777 | 80500933 | 259417 |
| 62309 | 80501616 | 80503837 | 259417 |
| 62310 | 80521458 | 80522100 | 259417 |
| 62311 | 80543220 | 80545070 | 259417 |
| 62312 | 80552137 | 80553297 | |
| 62313 | 80711400 | 80712451 | 172379 |
| 62314 | 80966354 | 80967298 | |
| 62315 | 80986712 | 80988274 | 136379 |
| 62316 | 80988353 | 80989163 | 136379 |
| 62317 | 81068653 | 81069362 | |
| 62318 | 81142649 | 81144579 | 103888 |
| 62319 | 81149248 | 81149819 | 103888 |
| 62320 | 81281123 | 81282998 | 117899 |
| 62321 | 81292023 | 81295115 | 140406 |
| 62322 | 81330774 | 81332253 | 156206 |
| 62323 | 81405400 | 81406015 | 156206 |
| 62324 | 81565873 | 81566698 | 172349 |
| 62325 | 81567074 | 81568786 | 172349 |
| 62326 | 81677537 | 81678355 | |
| 62327 | 81691056 | 81691992 | |
| 62328 | 82337729 | 82339874 | 183496 |
| 62329 | 82415105 | 82415480 | |
| 62330 | 82419855 | 82421576 | |
| 62331 | 82438521 | 82439818 | 140598 |
| 62332 | 82555669 | 82556929 | 188659 |
| 62333 | 83378025 | 83378673 | 103723 |
| 62334 | 83418106 | 83420137 | 250988, 259442 |
| 62335 | 83477966 | 83480091 | 156232 |
| 62336 | 83496753 | 83497244 | 156232 |
| 62337 | 83501201 | 83502564 | 156232 |
| 62338 | 83525172 | 83525861 | 103942 |
| 62339 | 83587248 | 83588725 | 103942 |
| 62340 | 83604549 | 83606998 | 259805, 103942 |
| 62341 | 83610402 | 83612530 | 259805, 103942 |
| 62342 | 83620092 | 83622408 | 259805, 103942 |
| 62343 | 83627109 | 83627899 | 259805, 103942 |
| 62344 | 83653923 | 83655945 | 169612, 103942, 259805 |
| 62345 | 83679554 | 83681262 | 169609, 259805 |
| 62346 | 83734838 | 83736624 | 263643, 064726, 260351, |
| | | | 259805 |
| 62347 | 84321835 | 84324400 | 156218 |
| 62348 | 84325432 | 84326930 | 156218 |
| 62349 | 84366362 | 84368034 | 156218 |
| 62350 | 84401215 | 84403155 | 156218 |
| 62351 | 84513060 | 84514467 | 156218 |
| 62352 | 84516840 | 84517549 | 156218 |
| 62353 | 84599352 | 84600046 | 156218 |
| 62354 | 85112998 | 85114668 | 259728, 189136 |
| 62355 | 85143082 | 85145163 | 176371 |
| 62356 | 85149329 | 85151087 | 176371 |
| 62357 | 85174306 | 85175749 | 176700, 254414 |
| 62358 | 85176469 | 85177677 | 254779, 254414, 176700 |
| 62359 | 85194440 | 85195022 | 177082 |
| 62360 | 85196668 | 85198553 | 197696, 177082 |
| 62361 | 85200832 | 85202223 | 197696 |
| 62362 | 85214757 | 85215553 | 140612 |
| 62363 | 85228268 | 85229080 | 140612 |
| 62364 | 85258449 | 85260749 | 140612 |
| 62365 | 85290468 | 85293292 | 166716 |
| 62366 | 85302020 | 85302714 | 166716 |
| 62367 | 85305900 | 85307214 | 166716 |
| 62368 | 85342659 | 85344270 | 166716 |
| 62369 | 85359767 | 85363136 | 136383 |
| 62370 | 85367321 | 85368045 | 136383 |
| 62371 | 85377868 | 85379055 | 136383 |
| 62372 | 85382073 | 85386233 | 136383 |
| 62373 | 85388141 | 85389381 | 136383 |
| 62374 | 85426561 | 85428709 | 156222 |
| 62375 | 85429052 | 85430479 | 156222 |
| 62376 | 85453725 | 85457255 | 156222 |
| 62377 | 85457394 | 85459013 | 156222 |
| 62378 | 85466973 | 85468307 | 156222 |
| 62379 | 85470871 | 85471826 | 156222 |
| 62380 | 85472931 | 85473824 | 156222 |
| 62381 | 85523347 | 85526929 | 073417 |
| 62382 | 85534983 | 85536696 | 073417 |
| 62383 | 85550999 | 85551627 | 073417 |
| 62384 | 85553771 | 85554838 | 073417 |
| 62385 | 85567740 | 85568932 | 073417 |
| 62386 | 85839760 | 85840539 | 218052 |
| 62387 | 85873882 | 85875464 | |
| 62388 | 85878547 | 85879230 | |
| 62389 | 85879801 | 85880933 | |
| 62390 | 85896841 | 85898412 | |
| 62391 | 85900566 | 85901759 | |
| 62392 | 85922687 | 85924971 | 170776 |
| 62393 | 85950585 | 85951745 | 170776 |
| 62394 | 85955343 | 85958009 | 170776 |
| 62395 | 85986951 | 85987640 | 170776 |
| 62396 | 86046594 | 86047425 | 170776 |
| 62397 | 86106012 | 86107534 | 170776 |
| 62398 | 86122253 | 86127725 | 259375, 170776 |
| 62399 | 86131205 | 86134290 | 170776 |
| 62400 | 86150097 | 86151482 | 170776 |
| 62401 | 86192551 | 86193162 | 259367, 170776 |
| 62402 | 86211023 | 86211713 | 259367, 170776 |
| 62403 | 86215732 | 86216896 | 170776 |
| 62404 | 86250137 | 86253028 | 170776 |
| 62405 | 86265438 | 86266090 | 170776 |
| 62406 | 86295811 | 86296279 | 259762 |
| 62407 | 86305531 | 86306398 | 183655 |
| 62408 | 86313268 | 86316393 | 259195, 221634, 183655 |
| 62409 | 86323801 | 86324830 | 183655 |
| 62410 | 86328246 | 86330413 | 183655 |
| 62411 | 86336620 | 86338740 | 183655 |
| 62412 | 86343389 | 86344074 | |
| 62413 | 86380020 | 86381037 | |
| 62414 | 86383219 | 86384387 | |
| 62415 | 86515861 | 86517180 | |
| 62416 | 86553531 | 86554200 | |
| 62417 | 87315645 | 87316324 | 166748 |
| 62418 | 89008646 | 89011907 | 181991, 259494, 173867 |
| 62419 | 89089122 | 89090462 | 140543 |
| 62420 | 89158135 | 89159487 | |
| 62421 | 89164141 | 89168101 | 181026 |
| 62422 | 89180942 | 89183712 | 172183 |
| 62423 | 89191462 | 89192859 | 172183 |
| 62424 | 89447797 | 89448460 | 140545 |
| 62425 | 89600573 | 89601274 | 260123 |
| 62426 | 89630306 | 89637803 | 140526, 261407 |
| 62427 | 89643205 | 89650682 | 140526 |
| 62428 | 89654309 | 89668137 | 239151, 140526 |
| 62429 | 89668234 | 89673911 | 140526 |
| 62430 | 89675568 | 89677246 | 140526 |
| 62431 | 89679250 | 89684270 | 259699, 140526 |
| 62432 | 89684856 | 89685831 | 140526 |
| 62433 | 89708722 | 89712680 | 140526 |
| 62434 | 89786012 | 89787621 | 140525 |
| 62435 | 89864622 | 89865218 | 140521 |
| 62436 | 89877003 | 89879177 | 261441, 140521 |
| 62437 | 89899577 | 89900341 | |
| 62438 | 89951743 | 89952733 | |
| 62439 | 89979763 | 89980328 | |
| 62440 | 90002251 | 90003754 | 140519 |
| 62441 | 90005437 | 90006750 | 140519 |
| 62442 | 90041471 | 90042633 | |
| 62443 | 90217631 | 90218514 | 166819 |
| 62444 | 90223471 | 90224359 | 166821 |
| 62445 | 90233301 | 90234133 | 140527, 166821 |
| 62446 | 90293249 | 90294615 | 166823 |
| 62447 | 90324352 | 90326015 | |
| 62448 | 90328093 | 90329358 | 166825 |
| 62449 | 90337566 | 90339153 | 166825 |
| 62450 | 90346980 | 90347817 | 166825 |
| 62451 | 90348324 | 90350600 | 166825 |
| 62452 | 90354988 | 90356291 | 166825 |
| 62453 | 90357040 | 90358662 | 166825 |
| 62454 | 90371161 | 90372219 | |
| 62455 | 90388057 | 90389789 | 157823, 250021 |
| 62456 | 90400069 | 90402498 | 157823, 250021 |
| 62457 | 90436151 | 90438067 | 157823, 250021 |
| 62458 | 90455451 | 90456533 | 242498, 250021 |
| 62459 | 90541257 | 90542040 | |
| 62460 | 90544056 | 90546227 | 140548 |
| 62461 | 90546231 | 90548912 | 140548 |
| 62462 | 90561645 | 90562422 | 140548 |
| 62463 | 90571771 | 90572961 | 140548 |
| 62464 | 90578256 | 90579535 | 140548 |
| 62465 | 90579942 | 90582422 | 140548 |
| 62466 | 90618700 | 90619586 | 140548, 259291 |
| 62467 | 90633075 | 90634908 | 182054 |
| 62468 | 90640891 | 90641674 | 182054 |
| 62469 | 90643688 | 90646241 | 259685, 182054 |
| 62470 | 90649641 | 90650510 | 259685 |
| 62471 | 90669350 | 90670427 | 259685 |
| 62472 | 90686281 | 90687111 | |
| 62473 | 90692278 | 90693505 | |
| 62474 | 90696744 | 90699321 | |
| 62475 | 90700676 | 90702893 | |
| 62476 | 90708198 | 90710080 | 240470, 185033 |
| 62477 | 90717471 | 90718787 | 185033 |
| 62478 | 90727079 | 90728964 | 185033 |
| 62479 | 90734989 | 90735855 | 185033 |
| 62480 | 90744253 | 90745546 | 185033 |
| 62481 | 90773288 | 90773858 | 185043 |
| 62482 | 90775756 | 90778195 | 183208, 185043 |
| 62483 | 90805091 | 90805583 | 213471, 261147 |
| 62484 | 90807437 | 90809826 | 182768, 213471, 261147 |
| 62485 | 90863162 | 90863778 | |
| 62486 | 90886365 | 90887060 | |
| 62487 | 90895152 | 90896330 | 196391 |
| 62488 | 90930937 | 90932449 | 140575 |
| 62489 | 90945373 | 90945949 | 140575 |
| 62490 | 91072488 | 91074382 | 140577 |
| 62491 | 91100670 | 91102071 | 140577 |
| 62492 | 91103256 | 91104062 | 140577 |
| 62493 | 91128951 | 91129697 | 140577 |
| 62494 | 91135396 | 91136114 | 140577 |
| 62495 | 91137413 | 91138249 | 140577 |
| 62496 | 91208046 | 91209617 | 245479, 259736 |
| 62497 | 91259984 | 91260630 | 197299, 259736 |
| 62498 | 91402333 | 91405045 | |
| 62499 | 91405910 | 91407974 | |
| 62500 | 91412881 | 91417992 | 140564 |
| 62501 | 91445015 | 91447137 | 196547 |
| 62502 | 91472454 | 91474714 | 140553, 184508 |
| 62503 | 91474874 | 91476027 | 224441, 184508, 140553 |
| 62504 | 91478368 | 91479488 | 140553 |
| 62505 | 91536842 | 91538350 | 198901 |
| 62506 | 91564992 | 91566415 | 214432, 184056 |
| 62507 | 91950420 | 91951195 | |
| 62508 | 91951461 | 91952715 | 258551 |
| 62509 | 91999492 | 92000095 | 258551 |
| 62510 | 92039764 | 92040939 | 258551 |
| 62511 | 92078501 | 92082402 | 258551 |
| 62512 | 92237387 | 92238672 | |
| 62513 | 92395759 | 92397228 | 176463 |
| 62514 | 92485830 | 92486707 | 176463 |
| 62515 | 92660343 | 92660955 | 176463 |
| 62516 | 92707797 | 92708700 | 258761, 176463, 260661 |
| 62517 | 92713741 | 92714944 | 258761, 176463, 260661 |
| 62518 | 93160129 | 93161734 | 185442, 271763 |
| 62519 | 93208395 | 93209013 | 185442 |
| 62520 | 93209979 | 93211059 | 185442 |
| 62521 | 93224309 | 93224887 | 185442 |
| 62522 | 93225877 | 93226491 | 185442 |
| 62523 | 93346344 | 93349376 | 258922, 185442 |
| 62524 | 93350831 | 93355811 | 258922, 185442 |
| 62525 | 93374268 | 93375947 | |
| 62526 | 93424625 | 93429020 | 173575, 272888 |
| 62527 | 93442787 | 93453130 | 264173, 173575 |
| 62528 | 93457003 | 93458602 | 173575 |
| 62529 | 93460704 | 93462219 | 173575 |
| 62530 | 93463082 | 93466362 | 173575 |
| 62531 | 93571147 | 93572559 | 173575 |
| 62532 | 94773595 | 94774903 | 140563 |
| 62533 | 94791106 | 94792307 | 140563 |
| 62534 | 95075379 | 95076380 | |
| 62535 | 96100398 | 96101887 | |
| 62536 | 96163798 | 96164702 | |
| 62537 | 96196667 | 96197298 | |
| 62538 | 96207594 | 96208213 | |
| 62539 | 96223078 | 96223702 | |
| 62540 | 96227466 | 96228829 | |
| 62541 | 96569415 | 96569946 | |
| 62542 | 96596219 | 96597748 | 259702 |
| 62543 | 96705324 | 96706253 | 247809 |
| 62544 | 96713949 | 96716095 | 259359, 247809 |
| 62545 | 96724465 | 96725704 | 247809 |
| 62546 | 96726288 | 96728257 | 247809 |
| 62547 | 96752528 | 96753324 | 247809 |
| 62548 | 96804795 | 96805482 | 247809 |
| 62549 | 96813573 | 96814393 | 247809 |
| 62550 | 96864161 | 96866036 | 247809 |
| 62551 | 96872891 | 96877488 | 222651, 185551 |
| 62552 | 96883277 | 96884975 | 185551 |
| 62553 | 96894609 | 96896022 | |
| 62554 | 96897099 | 96898627 | 259275 |
| 62555 | 96899964 | 96901227 | 259275 |
| 62556 | 96971672 | 96972593 | |
| 62557 | 97432964 | 97433751 | |
| 62558 | 98234450 | 98235593 | |
| 62559 | 98503354 | 98506508 | 140450 |
| 62560 | 98521380 | 98523424 | |
| 62561 | 98524830 | 98525472 | |
| 62562 | 98527210 | 98527931 | 259478 |
| 62563 | 98541263 | 98542375 | |
| 62564 | 98545876 | 98547390 | |
| 62565 | 98552745 | 98554254 | |
| 62566 | 98561873 | 98562832 | |
| 62567 | 98571451 | 98572415 | |
| 62568 | 98578117 | 98579402 | |
| 62569 | 98971457 | 98972322 | |
| 62570 | 99191185 | 99191982 | |
| 62571 | 99602281 | 99602765 | 259475 |
| 62572 | 99619801 | 99620705 | 259475 |
| 62573 | 99671313 | 99672635 | 261054, 182253 |
| 62574 | 99683425 | 99684439 | 261616, 103852 |
| 62575 | 99694213 | 99695041 | 103852 |
| 62576 | 99788803 | 99790119 | 103852 |
| 62577 | 99790123 | 99792433 | 168904, 103852 |
| 62578 | 99797349 | 99798065 | 259706, 264771, 168904 |
| 62579 | 99845990 | 99847668 | 168904 |
| 62580 | 99855747 | 99856389 | 168904 |
| 62581 | 99860386 | 99861635 | 168904 |
| 62582 | 99866515 | 99869356 | 168904 |
| 62583 | 99924875 | 99926666 | 168904 |
| 62584 | 100104872 | 100107940 | 068305 |
| 62585 | 100132109 | 100132661 | 068305 |
| 62586 | 100154319 | 100155458 | 068305 |
| 62587 | 100161981 | 100162545 | 068305 |
| 62588 | 100168455 | 100169334 | 068305 |
| 62589 | 100242795 | 100245245 | 068305 |
| 62590 | 100246914 | 100249723 | 068305 |
| 62591 | 100272419 | 100274474 | 183060 |
| 62592 | 100289228 | 100290395 | |
| 62593 | 100671490 | 100672541 | 140470 |
| 62594 | 100752007 | 100753073 | 140470 |
| 62595 | 100756095 | 100757319 | 140470 |
| 62596 | 100781217 | 100783148 | 140470 |
| 62597 | 100793198 | 100793858 | 140470 |
| 62598 | 100824394 | 100825443 | 140470 |
| 62599 | 100881314 | 100882863 | 140470 |
| 62600 | 100885438 | 100888216 | 189419 |
| 62601 | 100888885 | 100892516 | 189419 |
| 62602 | 100912919 | 100914201 | 259430 |
| 62603 | 101008344 | 101008959 | 154227 |
| 62604 | 101056922 | 101058035 | 154227 |
| 62605 | 101099543 | 101099982 | 140471, 259540 |
| 62606 | 101141336 | 101143685 | 183475, 140471 |
| 62607 | 101255142 | 101256864 | 259579 |
| 62608 | 101260390 | 101263668 | 259579 |
| 62609 | 101548379 | 101549010 | 154237 |
| 62610 | 101791863 | 101793094 | 131873 |
| 62611 | 101816537 | 101818070 | 131871 |
| 62612 | 101834197 | 101836779 | 259172, 131876 |
| 62613 | 101864526 | 101866092 | 140479 |
| 62614 | 101976993 | 101981174 | 140479 |
| 62615 | 101983551 | 101988637 | 140479 |
| 62616 | 101990544 | 101992374 | 140479 |
| 62617 | 101995007 | 101997239 | 140479 |
| 62618 | 102017913 | 102018428 | 140479 |
| 62619 | 102028109 | 102030709 | 140479 |
| 62620 | 102040091 | 102042223 | 140479 |
| 62621 | 102066959 | 102069468 | |
| 62622 | 102153357 | 102155174 | |
| 62623 | 102156024 | 102157138 | |
| 62624 | 102191133 | 102193699 | 184277 |
| 62625 | 102263812 | 102264929 | 185418 |

[0584] The locations of ODSCs on Chromosome 16 are shown in Table 58.

TABLE 58
ODSC Locations on Chromosome 16

| SEQ ID NO. | Start | End | Overlapping Gene(s) |
|---|---|---|---|
| 62626 | 102786 | 103908 | 161981, 161980 |
| 62627 | 121815 | 123353 | 007384 |
| 62628 | 127253 | 129287 | 103152 |
| 62629 | 148787 | 149545 | 103148 |
| 62630 | 163041 | 163900 | 103148 |
| 62631 | 187604 | 189118 | 103148 |
| 62632 | 231253 | 232080 | |
| 62633 | 278554 | 279784 | 007392 |
| 62634 | 284321 | 285684 | 167930 |
| 62635 | 377005 | 378231 | 103126 |
| 62636 | 401534 | 402586 | 103126 |
| 62637 | 420488 | 421349 | 129925, 086504 |
| 62638 | 430905 | 432847 | 236829, 129925 |
| 62639 | 446902 | 447787 | 103202 |
| 62640 | 451394 | 453082 | 242612, 103202 |
| 62641 | 455026 | 456688 | 242612, 103202 |
| 62642 | 473670 | 476976 | 090565 |
| 62643 | 551939 | 553769 | 090565 |
| 62644 | 576001 | 579567 | 103326 |
| 62645 | 583460 | 584689 | 103326 |
| 62646 | 585074 | 586508 | 266124, 103326 |
| 62647 | 592911 | 594033 | 266235, 103326 |
| 62648 | 619236 | 621676 | 257108, 007541 |
| 62649 | 637638 | 641287 | 197562 |
| 62650 | 641845 | 643923 | 197562 |
| 62651 | 685579 | 687101 | 130731 |
| 62652 | 691148 | 693569 | 172366, 197727 |
| 62653 | 695213 | 700217 | 161996, 228201, 172366 |
| 62654 | 717530 | 719029 | 140983, 161996 |
| 62655 | 725474 | 726203 | 103269 |
| 62656 | 730061 | 731375 | 103266 |
| 62657 | 733343 | 735074 | 127580, 161999 |
| 62658 | 739462 | 740693 | 127580, 261659 |
| 62659 | 762519 | 763162 | |
| 62660 | 765014 | 766551 | 103260 |
| 62661 | 769858 | 771683 | 103254 |
| 62662 | 789828 | 791520 | 103245 |
| 62663 | 837720 | 838678 | 127586, 007376 |
| 62664 | 856942 | 858587 | 167945 |
| 62665 | 1019966 | 1021159 | 103227 |
| 62666 | 1128441 | 1128959 | 261713, 162009 |
| 62667 | 1202419 | 1203010 | |
| 62668 | 1203802 | 1204996 | 196557 |
| 62669 | 1209790 | 1210863 | 259910, 196557 |
| 62670 | 1224402 | 1225365 | 196557 |
| 62671 | 1231837 | 1233192 | 196557 |
| 62672 | 1234398 | 1234951 | 196557 |
| 62673 | 1340777 | 1342029 | |
| 62674 | 1346821 | 1350515 | 260710 |
| 62675 | 1358249 | 1361242 | 103275 |
| 62676 | 1393018 | 1393689 | 007516 |
| 62677 | 1400966 | 1402945 | 090581, 007520 |
| 62678 | 1427903 | 1430349 | 265529, 059145 |
| 62679 | 1463582 | 1464905 | 059145 |
| 62680 | 1469739 | 1471885 | 174109 |
| 62681 | 1524118 | 1526025 | 103249 |
| 62682 | 1542487 | 1544275 | 100726 |
| 62683 | 1660007 | 1661620 | 260989, 187535 |
| 62684 | 1661853 | 1663302 | 007545, 187535 |
| 62685 | 1663634 | 1665420 | 007545 |
| 62686 | 1700888 | 1702265 | 261732, 007545 |
| 62687 | 1727908 | 1729664 | 206053, 007545, 261732 |
| 62688 | 1737244 | 1743051 | 206053 |
| 62689 | 1755245 | 1757307 | 138834 |
| 62690 | 1772101 | 1772571 | 138834 |
| 62691 | 1820402 | 1824237 | 197774, 074071, 103024 |
| 62692 | 1831038 | 1833845 | 095906, 197774, 162032 |
| 62693 | 1843192 | 1845230 | 099769, 162032 |
| 62694 | 1875250 | 1879718 | 180185, 063854 |
| 62695 | 1880021 | 1880915 | 180185 |
| 62696 | 1919686 | 1921584 | 162039 |
| 62697 | 1979153 | 1980211 | |
| 62698 | 1990166 | 1993684 | 198736 |
| 62699 | 2009096 | 2010443 | 140990 |
| 62700 | 2013711 | 2016047 | 255198, 255513, 140988 |
| 62701 | 2021040 | 2023041 | 183751 |
| 62702 | 2033466 | 2035207 | 127554, 261790, 196408 |
| 62703 | 2058141 | 2061005 | 183971, 167962 |
| 62704 | 2076711 | 2078694 | 065054 |
| 62705 | 2082506 | 2084433 | 065054 |
| 62706 | 2084653 | 2086701 | 065054 |
| 62707 | 2088043 | 2091576 | 065057, 065054 |
| 62708 | 2097086 | 2098908 | 103197, 065057 |
| 62709 | 2197344 | 2200212 | 167964 |
| 62710 | 2202512 | 2208950 | 131653, 206630, 260260, |
| | | | 167964 |
| 62711 | 2210543 | 2212222 | 131653 |
| 62712 | 2254813 | 2256606 | 252958, 167965 |
| 62713 | 2263668 | 2265935 | 184207 |
| 62714 | 2273018 | 2274496 | 167967 |
| 62715 | 2276259 | 2276917 | 167967 |
| 62716 | 2300085 | 2302628 | 167969 |
| 62717 | 2317604 | 2319033 | 207715, 260778, 205937 |
| 62718 | 2389544 | 2391397 | 167972, 238098 |
| 62719 | 2438760 | 2439392 | 238098 |
| 62720 | 2479204 | 2479920 | 162063 |
| 62721 | 2517779 | 2519617 | 259895 |
| 62722 | 2521136 | 2522754 | 162068 |
| 62723 | 2523715 | 2526217 | 162065, 162068 |
| 62724 | 2547079 | 2547889 | 260272, 162065 |
| 62725 | 2563432 | 2565504 | 259784, 185883, 260272 |
| 62726 | 2570056 | 2571271 | 162066, 185883, 260272, |
| | | | 259784 |
| 62727 | 2581230 | 2583702 | 266232, 162066, 205923 |
| 62728 | 2586990 | 2588303 | 140992 |
| 62729 | 2652953 | 2654331 | 215154, 140992 |
| 62730 | 2723165 | 2724095 | 260565 |
| 62731 | 2731588 | 2733359 | 167977 |
| 62732 | 2768783 | 2769886 | 172382 |
| 62733 | 2770535 | 2771931 | 172382 |
| 62734 | 2801359 | 2804068 | 167978, 205913 |
| 62735 | 2825855 | 2828648 | 103363 |
| 62736 | 2885171 | 2887169 | 162078 |
| 62737 | 2917496 | 2918873 | 263280 |
| 62738 | 2932869 | 2933990 | 162076 |
| 62739 | 2954070 | 2955817 | |
| 62740 | 2961613 | 2962983 | 059122 |
| 62741 | 3027278 | 3027895 | 127564 |
| 62742 | 3030407 | 3031376 | 127564 |
| 62743 | 3053711 | 3057933 | 272079, 262362 |
| 62744 | 3069962 | 3074692 | 131652, 103145, 184697, |
| | | | 006327 |
| 62745 | 3108074 | 3110694 | 261971, 008516 |
| 62746 | 3114363 | 3116944 | 008517 |
| 62747 | 3117009 | 3118263 | 008517 |
| 62748 | 3149430 | 3150900 | |
| 62749 | 3155681 | 3157026 | 263011 |
| 62750 | 3162046 | 3163570 | 122386, 263214 |
| 62751 | 3183771 | 3185856 | 263072, 085644 |
| 62752 | 3193496 | 3194424 | 228146 |
| 62753 | 3199653 | 3201337 | 228146 |
| 62754 | 3202337 | 3203375 | |
| 62755 | 3206942 | 3209451 | 261889 |
| 62756 | 3221830 | 3222641 | |
| 62757 | 3284212 | 3285731 | 010539 |
| 62758 | 3309040 | 3309789 | |
| 62759 | 3313279 | 3315154 | 006194 |
| 62760 | 3332111 | 3334446 | 006194 |
| 62761 | 3354580 | 3356431 | 162086, 140993 |
| 62762 | 3414640 | 3415529 | 262621 |
| 62763 | 3450123 | 3452125 | 103343, 140987, 262621 |
| 62764 | 3492981 | 3494371 | 122390, 167981, 262621 |
| 62765 | 3506924 | 3509666 | 263212, 122390, 262621 |
| 62766 | 3550640 | 3551723 | 103351, 263212 |
| 62767 | 3660844 | 3662454 | 213918, 188827 |
| 62768 | 3696152 | 3696816 | 213918 |
| 62769 | 3744737 | 3747335 | 126602 |
| 62770 | 3766511 | 3768577 | 126602 |
| 62771 | 3907223 | 3907860 | 005339 |
| 62772 | 3929184 | 3931704 | 005339 |
| 62773 | 4009203 | 4009704 | 162104 |
| 62774 | 4010048 | 4011254 | 162104 |
| 62775 | 4061865 | 4062892 | 162104 |
| 62776 | 4064850 | 4065893 | 162104 |
| 62777 | 4069295 | 4069788 | 162104 |
| 62778 | 4103071 | 4104808 | 162104 |
| 62779 | 4109825 | 4110781 | 162104 |
| 62780 | 4114508 | 4115800 | 162104 |
| 62781 | 4141342 | 4142159 | 162104 |
| 62782 | 4143964 | 4144607 | 162104 |
| 62783 | 4165258 | 4167093 | 162104 |
| 62784 | 4189871 | 4192021 | |
| 62785 | 4232774 | 4234880 | 263105 |
| 62786 | 4262361 | 4266268 | 185739 |
| 62787 | 4303119 | 4304447 | 262468 |
| 62788 | 4321049 | 4324219 | 090447 |
| 62789 | 4340183 | 4341265 | |
| 62790 | 4356574 | 4358274 | |
| 62791 | 4363814 | 4368478 | 126603 |
| 62792 | 4377915 | 4378779 | 262686, 126603 |
| 62793 | 4378843 | 4379322 | 126603 |
| 62794 | 4395672 | 4396545 | 103426, 217930 |
| 62795 | 4400320 | 4402234 | 103426, 217930 |
| 62796 | 4420856 | 4428142 | 168140, 103426, 262246 |
| 62797 | 4465165 | 4467140 | 103426, 262246 |
| 62798 | 4474519 | 4477061 | 103423, 262246 |
| 62799 | 4524459 | 4524963 | 103415, 153406 |
| 62800 | 4526061 | 4527341 | 153406, 103415 |
| 62801 | 4538036 | 4538683 | 153406, 103415 |
| 62802 | 4586609 | 4589162 | 089486 |
| 62803 | 4663490 | 4665586 | 153443 |
| 62804 | 4665922 | 4667426 | 102858 |
| 62805 | 4668675 | 4669752 | 102858 |
| 62806 | 4670439 | 4671071 | 102858 |
| 62807 | 4674119 | 4676719 | 102858 |
| 62808 | 4703636 | 4705197 | 102858 |
| 62809 | 4713186 | 4715649 | 102858 |
| 62810 | 4724958 | 4726354 | 102858 |
| 62811 | 4728775 | 4731290 | 102858 |
| 62812 | 4733640 | 4735233 | 102858 |
| 62813 | 4738107 | 4738598 | 102858 |
| 62814 | 4742756 | 4744423 | 168101 |
| 62815 | 4752178 | 4752898 | 168096 |
| 62816 | 4783657 | 4784604 | 166246, 168096, 266994 |
| 62817 | 4816398 | 4817641 | 103199 |
| 62818 | 4818085 | 4819406 | |
| 62819 | 4896297 | 4898593 | 118900, 140632 |
| 62820 | 4912530 | 4913071 | 118900 |
| 62821 | 4956092 | 4956986 | 118898 |
| 62822 | 4974792 | 4975548 | 118898 |
| 62823 | 4985097 | 4985891 | 118898 |
| 62824 | 4985896 | 4988104 | 118898 |
| 62825 | 4994172 | 4996518 | 118898 |
| 62826 | 5007377 | 5008541 | 103184, 118898 |
| 62827 | 5082628 | 5084678 | 033011, 103174, 267072 |
| 62828 | 5121096 | 5122908 | 033011 |
| 62829 | 8223044 | 8223695 | |
| 62830 | 8420565 | 8421108 | 259819 |
| 62831 | 8715173 | 8716774 | 067365 |
| 62832 | 8717487 | 8718052 | 067365 |
| 62833 | 8767595 | 8770101 | 183044 |
| 62834 | 8772416 | 8773984 | 183044 |
| 62835 | 8823940 | 8824844 | 183044 |
| 62836 | 8833981 | 8835319 | 183044 |
| 62837 | 8845642 | 8846827 | 183044 |
| 62838 | 8890580 | 8893074 | 184857, 140650 |
| 62839 | 8943735 | 8944942 | 260276 |
| 62840 | 8953858 | 8954540 | 260276, 153048 |
| 62841 | 8955901 | 8958457 | 153048 |
| 62842 | 8961280 | 8963341 | 261481, 153048 |
| 62843 | 8972044 | 8972890 | |
| 62844 | 9055676 | 9057370 | 260979, 187555 |
| 62845 | 9057516 | 9058570 | 187555, 260979 |
| 62846 | 9080864 | 9081704 | |
| 62847 | 9140726 | 9142841 | |
| 62848 | 9184027 | 9187549 | 182831 |
| 62849 | 9192204 | 9193586 | 182831 |
| 62850 | 9206047 | 9206818 | 182831, 263244 |
| 62851 | 9208515 | 9209675 | 182831 |
| 62852 | 9217704 | 9218495 | |
| 62853 | 9221208 | 9222372 | |
| 62854 | 9334991 | 9335441 | |
| 62855 | 9352998 | 9354863 | |
| 62856 | 9401913 | 9402879 | |
| 62857 | 9444523 | 9446575 | |
| 62858 | 9458081 | 9460653 | 261617 |
| 62859 | 9472445 | 9473317 | 261617 |
| 62860 | 9516429 | 9517167 | |
| 62861 | 9532695 | 9533279 | |
| 62862 | 9635362 | 9636843 | |
| 62863 | 9638880 | 9640584 | |
| 62864 | 9741868 | 9742632 | |
| 62865 | 10215102 | 10216090 | 183454 |
| 62866 | 10350551 | 10351501 | |
| 62867 | 10359612 | 10360290 | |
| 62868 | 10363482 | 10364658 | |
| 62869 | 10406449 | 10407599 | |
| 62870 | 10427053 | 10430069 | 166669 |
| 62871 | 10434986 | 10437050 | 166669 |
| 62872 | 10460268 | 10461172 | 166669 |
| 62873 | 10461227 | 10462122 | 166669 |
| 62874 | 10479433 | 10481018 | 166669 |
| 62875 | 10603044 | 10603951 | |
| 62876 | 10608191 | 10609330 | 260468 |
| 62877 | 10613377 | 10615142 | 260468 |
| 62878 | 10630523 | 10631182 | 213853 |
| 62879 | 10652055 | 10653473 | 213853 |
| 62880 | 10673648 | 10674766 | 213853 |
| 62881 | 10695443 | 10696179 | |
| 62882 | 10710189 | 10711298 | |
| 62883 | 10740470 | 10740945 | 153060 |
| 62884 | 10741450 | 10742225 | 153060 |
| 62885 | 10823508 | 10823912 | |
| 62886 | 10830301 | 10833008 | |
| 62887 | 10837099 | 10838391 | 103274 |
| 62888 | 10921371 | 10923650 | |
| 62889 | 10972500 | 10973520 | 262151, 179583 |
| 62890 | 11009499 | 11010409 | 179583 |
| 62891 | 11012437 | 11013066 | 179583 |
| 62892 | 11014582 | 11016782 | 179583 |
| 62893 | 11017011 | 11018152 | 179583 |
| 62894 | 11032166 | 11033501 | 263013, 182108 |
| 62895 | 11034466 | 11035518 | 262222, 182108 |
| 62896 | 11038086 | 11039266 | 038532 |
| 62897 | 11059172 | 11059889 | 038532 |
| 62898 | 11073656 | 11074386 | 038532 |
| 62899 | 11085509 | 11086085 | 038532 |
| 62900 | 11117460 | 11119128 | 038532 |
| 62901 | 11161351 | 11162055 | 038532, 262020 |
| 62902 | 11173181 | 11173759 | 038532 |
| 62903 | 11198604 | 11199704 | 038532 |
| 62904 | 11226610 | 11227561 | 038532 |
| 62905 | 11298692 | 11300942 | 263033 |
| 62906 | 11349218 | 11351383 | 185338, 175643 |
| 62907 | 11352498 | 11353724 | 175643 |
| 62908 | 11373223 | 11373853 | 175643 |
| 62909 | 11438880 | 11439911 | 263080, 175643 |
| 62910 | 11456939 | 11457647 | 188897 |
| 62911 | 11588671 | 11590407 | 188897 |
| 62912 | 11590671 | 11592295 | 188897 |
| 62913 | 11627850 | 11630356 | |
| 62914 | 11644410 | 11645328 | 189067 |
| 62915 | 11647886 | 11648533 | 189067 |
| 62916 | 11679585 | 11681628 | 189067 |
| 62917 | 11705790 | 11707128 | 189067 |
| 62918 | 11733261 | 11735667 | |
| 62919 | 11762242 | 11763074 | 184602 |
| 62920 | 11769208 | 11770250 | 184602 |
| 62921 | 11794022 | 11795073 | 153066 |
| 62922 | 11835177 | 11838188 | 262420, 153066 |
| 62923 | 11841992 | 11843041 | |
| 62924 | 11876737 | 11878205 | 122299 |
| 62925 | 11889852 | 11892711 | 122299 |
| 62926 | 11927867 | 11929276 | 171490 |
| 62927 | 11944183 | 11946444 | 263307, 171490 |
| 62928 | 11961190 | 11961722 | 263307 |
| 62929 | 11963377 | 11964318 | 103342, 263307 |
| 62930 | 12008257 | 12010982 | 266163, 103342 |
| 62931 | 12069494 | 12071845 | 048471, 260488, 234719 |
| 62932 | 12118288 | 12118847 | 048471 |
| 62933 | 12156503 | 12157117 | 048471 |
| 62934 | 12191214 | 12191929 | 048471 |
| 62935 | 12235577 | 12236937 | 048471 |
| 62936 | 12280178 | 12283239 | 048471 |
| 62937 | 12304638 | 12306765 | 048471 |
| 62938 | 12351761 | 12352501 | 048471 |
| 62939 | 12408894 | 12410060 | 048471 |
| 62940 | 12500712 | 12501735 | 048471 |
| 62941 | 12625198 | 12626640 | 048471 |
| 62942 | 12664025 | 12664637 | 048471, 259899 |
| 62943 | 12703187 | 12710151 | 259899 |
| 62944 | 12736865 | 12742238 | |
| 62945 | 12742338 | 12748076 | |
| 62946 | 12846793 | 12849253 | 260378, 103381 |
| 62947 | 12850932 | 12852233 | 260378, 103381 |
| 62948 | 12864635 | 12865939 | 103381 |
| 62949 | 12896330 | 12898153 | 103381 |
| 62950 | 13177875 | 13178700 | 237515 |
| 62951 | 13202737 | 13206097 | 237515 |
| 62952 | 13338966 | 13341815 | 262801 |
| 62953 | 13363142 | 13364429 | 262801 |
| 62954 | 13400627 | 13401873 | 262801 |
| 62955 | 13557395 | 13558319 | 262801 |
| 62956 | 13887885 | 13888590 | |
| 62957 | 13888854 | 13889605 | |
| 62958 | 13959842 | 13960535 | |
| 62959 | 14003393 | 14005519 | |
| 62960 | 14007087 | 14007947 | |
| 62961 | 14029817 | 14032490 | 175595 |
| 62962 | 14050694 | 14052749 | |
| 62963 | 14088172 | 14089520 | |
| 62964 | 14107205 | 14108307 | 262097 |
| 62965 | 14144161 | 14145289 | |
| 62966 | 14164324 | 14166222 | 186260 |
| 62967 | 14181736 | 14182961 | 186260 |
| 62968 | 14199725 | 14200794 | 186260 |
| 62969 | 14206005 | 14206616 | 186260 |
| 62970 | 14245188 | 14245994 | 186260 |
| 62971 | 14266150 | 14266832 | 186260 |
| 62972 | 14334057 | 14334868 | 186260 |
| 62973 | 14378722 | 14380650 | |
| 62974 | 14394638 | 14398598 | 207639, 262454 |
| 62975 | 14400386 | 14402620 | 262454 |
| 62976 | 14403994 | 14404833 | 262454 |
| 62977 | 14431279 | 14432006 | |
| 62978 | 14438715 | 14440097 | |
| 62979 | 14493255 | 14494304 | |
| 62980 | 14579755 | 14582244 | 140694 |
| 62981 | 14591954 | 14592905 | 140694 |
| 62982 | 14594301 | 14601083 | 140694 |
| 62983 | 14601476 | 14606538 | 140694 |
| 62984 | 14620209 | 14623822 | 140694 |
| 62985 | 14638823 | 14640277 | 140694 |
| 62986 | 14642820 | 14644174 | 140694 |
| 62987 | 14650106 | 14650702 | 140694 |
| 62988 | 14653347 | 14654832 | 140694 |
| 62989 | 14656147 | 14659332 | 140694 |
| 62990 | 14670190 | 14670934 | 140694 |
| 62991 | 14720808 | 14721406 | 140694 |
| 62992 | 14723299 | 14724514 | 140694 |
| 62993 | 14725689 | 14728345 | 103429, 140694 |
| 62994 | 15145851 | 15146391 | 179889, 157045 |
| 62995 | 15148918 | 15150516 | 157045, 179889 |
| 62996 | 15489587 | 15490096 | 156968, 261130 |
| 62997 | 15492198 | 15493476 | 156968, 261130 |
| 62998 | 15498644 | 15499149 | 156968, 261130 |
| 62999 | 15528272 | 15529985 | 166780, 261130 |
| 63000 | 15537681 | 15538396 | 166780, 261130 |
| 63001 | 15549496 | 15549950 | 166780, 261130 |
| 63002 | 15575747 | 15576818 | 166780, 261130 |
| 63003 | 15582562 | 15584865 | 166780, 261130 |
| 63004 | 15587009 | 15589100 | 166780, 261130 |
| 63005 | 15669813 | 15672407 | 166780 |
| 63006 | 15684035 | 15685180 | 166780 |
| 63007 | 15701124 | 15703015 | 257769, 166783, 166780 |
| 63008 | 15722722 | 15723442 | 166783 |
| 63009 | 15735760 | 15738522 | 272213, 072864, 166783 |
| 63010 | 15743776 | 15744781 | 072864 |
| 63011 | 15766446 | 15767236 | 072864 |
| 63012 | 15981410 | 15983037 | 133393 |
| 63013 | 15993498 | 15994210 | |
| 63014 | 16090239 | 16091106 | 103222 |
| 63015 | 16108533 | 16109141 | 103222 |
| 63016 | 16113269 | 16113790 | 103222 |
| 63017 | 16115605 | 16117137 | 103222 |
| 63018 | 16119446 | 16120008 | 103222 |
| 63019 | 16153607 | 16154389 | 103222 |
| 63020 | 16237536 | 16238778 | |
| 63021 | 16243232 | 16244702 | 091262 |
| 63022 | 16951593 | 16952313 | |
| 63023 | 17265014 | 17265905 | 103489 |
| 63024 | 17266716 | 17268098 | 103489 |
| 63025 | 17862124 | 17862945 | |
| 63026 | 18010428 | 18012283 | |
| 63027 | 18040035 | 18042268 | 259929 |
| 63028 | 18800577 | 18802097 | 134419, 260342 |
| 63029 | 18811827 | 18813550 | 260342, 170540 |
| 63030 | 18957076 | 18958076 | |
| 63031 | 18994922 | 18996026 | 170537 |
| 63032 | 19008931 | 19010553 | 170537 |
| 63033 | 19078532 | 19079990 | 167186, 261465 |
| 63034 | 19097597 | 19098351 | 260430 |
| 63035 | 19118900 | 19119427 | |
| 63036 | 19122114 | 19123005 | |
| 63037 | 19124372 | 19126425 | 205730, 261427 |
| 63038 | 19134485 | 19135515 | 261427 |
| 63039 | 19178802 | 19180480 | 103528, 261427 |
| 63040 | 19193639 | 19196836 | 103528 |
| 63041 | 19201672 | 19202789 | 103528 |
| 63042 | 19214410 | 19215952 | 103528 |
| 63043 | 19246953 | 19249056 | 103528 |
| 63044 | 19295007 | 19296241 | |
| 63045 | 19341207 | 19343037 | |
| 63046 | 19532661 | 19533647 | 006007 |
| 63047 | 19535064 | 19536207 | 103540 |
| 63048 | 19553330 | 19553801 | 103540 |
| 63049 | 19566026 | 19567935 | 103544 |
| 63050 | 19711491 | 19712499 | 103544 |
| 63051 | 19728604 | 19730230 | 103550, 174628 |
| 63052 | 19818831 | 19824563 | 174628 |
| 63053 | 19828044 | 19828959 | 174628 |
| 63054 | 19847074 | 19848162 | 174628 |
| 63055 | 19894512 | 19898081 | 167191 |
| 63056 | 20396952 | 20398248 | 263237, 169340 |
| 63057 | 20420525 | 20422704 | 183549 |
| 63058 | 20449233 | 20449915 | 183549 |
| 63059 | 20622589 | 20623490 | 005187 |
| 63060 | 20684745 | 20685528 | 005187, 166743 |
| 63061 | 20751890 | 20753608 | 066654, 005187 |
| 63062 | 20774804 | 20775578 | 260510, 005187 |
| 63063 | 20778781 | 20779868 | 005187 |
| 63064 | 20817041 | 20818841 | 005189, 196678 |
| 63065 | 20862041 | 20863825 | 196678 |
| 63066 | 20876295 | 20878965 | 188215, 196678 |
| 63067 | 20889735 | 20891435 | 188215, 196678 |
| 63068 | 20894833 | 20895377 | 188215, 196678 |
| 63069 | 20908533 | 20913251 | 102897, 188215, 196678 |
| 63070 | 20916997 | 20918758 | 102897 |
| 63071 | 20922076 | 20923716 | 102897 |
| 63072 | 20929969 | 20930606 | 102897 |
| 63073 | 21071235 | 21071812 | 158486 |
| 63074 | 21199713 | 21200387 | |
| 63075 | 21244462 | 21246183 | 175311 |
| 63076 | 21271732 | 21273870 | 103316 |
| 63077 | 21275008 | 21277890 | 103316 |
| 63078 | 21289294 | 21290141 | 103316 |
| 63079 | 21311681 | 21313653 | 189149, 103316 |
| 63080 | 21609747 | 21612074 | 197006 |
| 63081 | 21831446 | 21832146 | 248124 |
| 63082 | 21963610 | 21965650 | 140740 |
| 63083 | 22012198 | 22012883 | 155714 |
| 63084 | 22018457 | 22020524 | 185716 |
| 63085 | 22022292 | 22022896 | 185716 |
| 63086 | 22025699 | 22026351 | 185716 |
| 63087 | 22037769 | 22038436 | 185716 |
| 63088 | 22199421 | 22200431 | 183921 |
| 63089 | 22201174 | 22204555 | 183921 |
| 63090 | 22206661 | 22207891 | |
| 63091 | 22216639 | 22219016 | 103319 |
| 63092 | 22243797 | 22244918 | 103319 |
| 63093 | 22308158 | 22310168 | 058600 |
| 63094 | 22364395 | 22365951 | 140743 |
| 63095 | 22379791 | 22381344 | 260635, 140743 |
| 63096 | 22382366 | 22383935 | 140743 |
| 63097 | 22384839 | 22386437 | 260790, 140743 |
| 63098 | 23115158 | 23117065 | 103404 |
| 63099 | 23156348 | 23158657 | 103404 |
| 63100 | 23159139 | 23161797 | 103404 |
| 63101 | 23463385 | 23464894 | 260136, 168434 |
| 63102 | 23480737 | 23481778 | 103365 |
| 63103 | 23508425 | 23509495 | 103365 |
| 63104 | 23515871 | 23516609 | 103365 |
| 63105 | 23521070 | 23522070 | 103365 |
| 63106 | 23549347 | 23551083 | 103356 |
| 63107 | 23567896 | 23570056 | 103353, 103356 |
| 63108 | 23606384 | 23607928 | 004779 |
| 63109 | 23651718 | 23653566 | 166847, 083093 |
| 63110 | 24545471 | 24546510 | |
| 63111 | 24550264 | 24553104 | 122257 |
| 63112 | 24657206 | 24658685 | |
| 63113 | 24679749 | 24681279 | 224310 |
| 63114 | 24711457 | 24713719 | |
| 63115 | 24717053 | 24718334 | |
| 63116 | 24740091 | 24742403 | 090905 |
| 63117 | 24742581 | 24743963 | 090905 |
| 63118 | 24747359 | 24749510 | 090905 |
| 63119 | 24855226 | 24856396 | |
| 63120 | 24986107 | 24988338 | 140750 |
| 63121 | 24988504 | 24989770 | 140750 |
| 63122 | 24990966 | 24992606 | 140750 |
| 63123 | 24997798 | 24998992 | 140750 |
| 63124 | 24999045 | 25001246 | 140750 |
| 63125 | 25004848 | 25007140 | 140750 |
| 63126 | 25017557 | 25018529 | 140750 |
| 63127 | 25023860 | 25024398 | 140750 |
| 63128 | 25025114 | 25027296 | 140750 |
| 63129 | 25117270 | 25119257 | 260448 |
| 63130 | 25120810 | 25121632 | 260448 |
| 63131 | 25121749 | 25123842 | 205629, 260448 |
| 63132 | 25188717 | 25190198 | 205629 |
| 63133 | 25268549 | 25270362 | 155592 |
| 63134 | 25644651 | 25645298 | |
| 63135 | 26541738 | 26542479 | |
| 63136 | 27190727 | 27191264 | |
| 63137 | 27200379 | 27201268 | |
| 63138 | 27214423 | 27216303 | 155666 |
| 63139 | 27219481 | 27220855 | 155666 |
| 63140 | 27224817 | 27229663 | 259940, 155666 |
| 63141 | 27233478 | 27234852 | |
| 63142 | 27264249 | 27265180 | 169189 |
| 63143 | 27269606 | 27270071 | 169189 |
| 63144 | 27272824 | 27273464 | 169189 |
| 63145 | 27279260 | 27280954 | 245888, 169189 |
| 63146 | 27284513 | 27286074 | 245888 |
| 63147 | 27324507 | 27328188 | 077238 |
| 63148 | 27333809 | 27335015 | 077238 |
| 63149 | 27337539 | 27339355 | 077238 |
| 63150 | 27375017 | 27377369 | 077238 |
| 63151 | 27560427 | 27562178 | 047578, 077235 |
| 63152 | 27589198 | 27591254 | 047578 |
| 63153 | 28192231 | 28193378 | 169180 |
| 63154 | 28222157 | 28224069 | 169180 |
| 63155 | 28288831 | 28289935 | |
| 63156 | 28303201 | 28303893 | 188322, 246465 |
| 63157 | 28502079 | 28504253 | 261832, 188603 |
| 63158 | 28535182 | 28536924 | |
| 63159 | 28537255 | 28538726 | |
| 63160 | 28543082 | 28544136 | |
| 63161 | 28548314 | 28551046 | 176046 |
| 63162 | 28552183 | 28552752 | |
| 63163 | 28564913 | 28565765 | 176476 |
| 63164 | 28607704 | 28608676 | 197165 |
| 63165 | 28620841 | 28621867 | 196502 |
| 63166 | 28833024 | 28836691 | 168488, 260796 |
| 63167 | 28856783 | 28858811 | 178188, 178952 |
| 63168 | 28874116 | 28876331 | 261766, 178188 |
| 63169 | 28936079 | 28937741 | 177548 |
| 63170 | 28956710 | 28957402 | |
| 63171 | 28961745 | 28963487 | 176953 |
| 63172 | 28985148 | 28987415 | 260367, 169682, 261067 |
| 63173 | 29125984 | 29127061 | 103472 |
| 63174 | 29689832 | 29691586 | 103485 |
| 63175 | 29705504 | 29706562 | 103485 |
| 63176 | 29769214 | 29769806 | |
| 63177 | 29776481 | 29777446 | |
| 63178 | 29801045 | 29802747 | 079616 |
| 63179 | 29815797 | 29817620 | 103495, 079616 |
| 63180 | 29817694 | 29819094 | 259952, 103495 |
| 63181 | 29822345 | 29823727 | 167371, 103495, 238045, |
| | | | 261962 |
| 63182 | 29826776 | 29828894 | 263136, 185928, 167371, |
| | | | 261962 |
| 63183 | 29831572 | 29834124 | 013364, 261962, 261690, |
| | | | 185928 |
| 63184 | 29840357 | 29841436 | 013364, 185928 |
| 63185 | 29872158 | 29873137 | 103502 |
| 63186 | 29873579 | 29875321 | 214725, 103502 |
| 63187 | 29936959 | 29938496 | 247735, 174943 |
| 63188 | 29972860 | 29974453 | 149932 |
| 63189 | 29984765 | 29986240 | 149930 |
| 63190 | 30006535 | 30008304 | 169592, 149929 |
| 63191 | 30074803 | 30078835 | 149925 |
| 63192 | 30086444 | 30089906 | 149923 |
| 63193 | 30106781 | 30108429 | 250616, 090238 |
| 63194 | 30133475 | 30135318 | 102882 |
| 63195 | 30135557 | 30136020 | |
| 63196 | 30363233 | 30364076 | 169217 |
| 63197 | 30365524 | 30368639 | 169221, 260219, 169217 |
| 63198 | 30379570 | 30382433 | 180209, 169221 |
| 63199 | 30388729 | 30390042 | 180096, 180035, 270466, |
| | | | 180209 |
| 63200 | 30405857 | 30407578 | 180096, 180035 |
| 63201 | 30411735 | 30412315 | |
| 63202 | 30418082 | 30419329 | 179965 |
| 63203 | 30420677 | 30421341 | 179965 |
| 63204 | 30428407 | 30430327 | 179965 |
| 63205 | 30440857 | 30442098 | 179958, 179965 |
| 63206 | 30454772 | 30458547 | 179918 |
| 63207 | 30458695 | 30459560 | |
| 63208 | 30500040 | 30500827 | 261346, 005844 |
| 63209 | 30533395 | 30534033 | 005844 |
| 63210 | 30536950 | 30538921 | 169955, 261459, 169957 |
| 63211 | 30545089 | 30547600 | 235560, 260869, 169955, |
| | | | 261459 |
| 63212 | 30568898 | 30570335 | 169951, 260869 |
| 63213 | 30578440 | 30579021 | |
| 63214 | 30582074 | 30583824 | 239791, 229809 |
| 63215 | 30596015 | 30597859 | 260167, 197162 |
| 63216 | 30614713 | 30616333 | 260167, 156853 |
| 63217 | 30620381 | 30622149 | 156853 |
| 63218 | 30644759 | 30646838 | |
| 63219 | 30661072 | 30663583 | 156858 |
| 63220 | 30668184 | 30672098 | 156860 |
| 63221 | 30708713 | 30711389 | 261840, 080603 |
| 63222 | 30724837 | 30725382 | 080603 |
| 63223 | 30751604 | 30754047 | 260899, 080603 |
| 63224 | 30756102 | 30757007 | 260899 |
| 63225 | 30758701 | 30760304 | 156873, 260899 |
| 63226 | 30786200 | 30787826 | 103549 |
| 63227 | 30797598 | 30799397 | 102870 |
| 63228 | 30816187 | 30818267 | |
| 63229 | 30825038 | 30826025 | |
| 63230 | 30855666 | 30856882 | 099385 |
| 63231 | 30885601 | 30887958 | 260083, 262721, 265991, |
| | | | 099385 |
| 63232 | 30904608 | 30905960 | 211591, 260083, 262721, |
| | | | 099385 |
| 63233 | 30912937 | 30914310 | 150281 |
| 63234 | 30932889 | 30935718 | 099364, 260852 |
| 63235 | 30959597 | 30962513 | 261487, 175938, 099364 |
| 63236 | 30967723 | 30970095 | 099381, 261487, 175938 |
| 63237 | 30996102 | 30998387 | 099377, 268863, 099381 |
| 63238 | 31005766 | 31011309 | 099365 |
| 63239 | 31043752 | 31045877 | 103496 |
| 63240 | 31063258 | 31064604 | |
| 63241 | 31083745 | 31086647 | 167395, 167394 |
| 63242 | 31104441 | 31106383 | 255439, 167397 |
| 63243 | 31116935 | 31117876 | 103507 |
| 63244 | 31119325 | 31120560 | 252809, 103507 |
| 63245 | 31121899 | 31122393 | 103507 |
| 63246 | 31128341 | 31130211 | 262766, 103510 |
| 63247 | 31146016 | 31147231 | 052344 |
| 63248 | 31152664 | 31154265 | 178226 |
| 63249 | 31190542 | 31192333 | 089280 |
| 63250 | 31213403 | 31214415 | 261359, 103490 |
| 63251 | 31276135 | 31277891 | 169896 |
| 63252 | 31280766 | 31281375 | 169896 |
| 63253 | 31396867 | 31398369 | |
| 63254 | 31438754 | 31440166 | 156885 |
| 63255 | 31453679 | 31454792 | 176723 |
| 63256 | 31463587 | 31464376 | 261474 |
| 63257 | 31464618 | 31465456 | 261474 |
| 63258 | 31468853 | 31471607 | 140691, 260267 |
| 63259 | 31473268 | 31474282 | 140691 |
| 63260 | 31487794 | 31489704 | 140682 |
| 63261 | 31512786 | 31513581 | 140688 |
| 63262 | 31518673 | 31520614 | 260625, 140688 |
| 63263 | 31711556 | 31712968 | 131797, 260568 |
| 63264 | 31724315 | 31725630 | 197302 |
| 63265 | 31884546 | 31887591 | 185947 |
| 63266 | 31887914 | 31890356 | 185947 |
| 63267 | 33963004 | 33963580 | |
| 63268 | 33963714 | 33964328 | |
| 63269 | 33964674 | 33965179 | |
| 63270 | 34793790 | 34794710 | |
| 63271 | 34795747 | 34796492 | |
| 63272 | 46722346 | 46723369 | 069329 |
| 63273 | 46745113 | 46745518 | 140795 |
| 63274 | 46823393 | 46824358 | 260782, 140795 |
| 63275 | 46843891 | 46844195 | 155330 |
| 63276 | 46863097 | 46865644 | 155330 |
| 63277 | 46873403 | 46874672 | |
| 63278 | 46897359 | 46898869 | |
| 63279 | 46910264 | 46911095 | |
| 63280 | 46916106 | 46920665 | 166123 |
| 63281 | 46952641 | 46953500 | 166123 |
| 63282 | 46954334 | 46955046 | 166123 |
| 63283 | 46982283 | 46983770 | |
| 63284 | 47006431 | 47009008 | 261173, 069345 |
| 63285 | 47010240 | 47011547 | 261173 |
| 63286 | 47071205 | 47072489 | |
| 63287 | 47493838 | 47496307 | 102893, 129636 |
| 63288 | 47533427 | 47533962 | 102893 |
| 63289 | 47667900 | 47668401 | 102893 |
| 63290 | 48192208 | 48192736 | |
| 63291 | 48198559 | 48200516 | 261538 |
| 63292 | 48237871 | 48241548 | 121270 |
| 63293 | 48268130 | 48270561 | 121270 |
| 63294 | 48277006 | 48279830 | 102910, 121270 |
| 63295 | 48309964 | 48310455 | 102910 |
| 63296 | 48333377 | 48335307 | 102910 |
| 63297 | 48399561 | 48400856 | 196470 |
| 63298 | 48416754 | 48420290 | 196470 |
| 63299 | 48439132 | 48440418 | 196470 |
| 63300 | 48443435 | 48444658 | 196470 |
| 63301 | 48468747 | 48469318 | 196470 |
| 63302 | 48513829 | 48514388 | |
| 63303 | 48526042 | 48526488 | 239013 |
| 63304 | 48533141 | 48534394 | |
| 63305 | 48558283 | 48559093 | |
| 63306 | 48559750 | 48561308 | |
| 63307 | 48593428 | 48595065 | 261267, 102921 |
| 63308 | 48595979 | 48596476 | 261267, 102921 |
| 63309 | 48625851 | 48626345 | 102921 |
| 63310 | 48642016 | 48644906 | 102921 |
| 63311 | 48657008 | 48658147 | 260086 |
| 63312 | 49682684 | 49684103 | 102935 |
| 63313 | 49889030 | 49892310 | 102935 |
| 63314 | 49917006 | 49918828 | |
| 63315 | 50058472 | 50060021 | 205423 |
| 63316 | 50069271 | 50069960 | 205423 |
| 63317 | 50099668 | 50100920 | 155393, 259843 |
| 63318 | 50186079 | 50189559 | 121274 |
| 63319 | 50218499 | 50220041 | 121274 |
| 63320 | 50227536 | 50228206 | 121274 |
| 63321 | 50236557 | 50237784 | 121274 |
| 63322 | 50278629 | 50280991 | 121281 |
| 63323 | 50401747 | 50403409 | 261393, 166164 |
| 63324 | 50564279 | 50564996 | |
| 63325 | 50581096 | 50582844 | 140807 |
| 63326 | 50625565 | 50626556 | 140807 |
| 63327 | 50650714 | 50651755 | 140807 |
| 63328 | 50698753 | 50699729 | |
| 63329 | 50729437 | 50732569 | 167207 |
| 63330 | 50732817 | 50734854 | 167207 |
| 63331 | 50774084 | 50780011 | 083799, 264947, 260929, |
| | | | 261644 |
| 63332 | 50839891 | 50840903 | 261703 |
| 63333 | 50876259 | 50877475 | |
| 63334 | 50877869 | 50879076 | |
| 63335 | 50913695 | 50914448 | 263082 |
| 63336 | 50958465 | 50961052 | |
| 63337 | 51091562 | 51092754 | |
| 63338 | 51128472 | 51130967 | |
| 63339 | 51141509 | 51142067 | 261282 |
| 63340 | 51145810 | 51147027 | |
| 63341 | 51153377 | 51155284 | |
| 63342 | 51181693 | 51192261 | 261238, 103449 |
| 63343 | 51244923 | 51245870 | |
| 63344 | 51277431 | 51278890 | 261047 |
| 63345 | 51393195 | 51394020 | |
| 63346 | 51415844 | 51416979 | |
| 63347 | 51435459 | 51440082 | |
| 63348 | 51440433 | 51444491 | |
| 63349 | 51464912 | 51466523 | |
| 63350 | 51479030 | 51479701 | |
| 63351 | 51556658 | 51559739 | |
| 63352 | 52013188 | 52014505 | |
| 63353 | 52028408 | 52028823 | |
| 63354 | 52084042 | 52084921 | 261190 |
| 63355 | 52225361 | 52226192 | |
| 63356 | 52227254 | 52227858 | |
| 63357 | 52330481 | 52331632 | |
| 63358 | 52380607 | 52381124 | |
| 63359 | 52417387 | 52418503 | |
| 63360 | 52441229 | 52444441 | |
| 63361 | 52522600 | 52523234 | 103460 |
| 63362 | 52526454 | 52527425 | 103460 |
| 63363 | 52530084 | 52530827 | 103460 |
| 63364 | 52578589 | 52581351 | 103460 |
| 63365 | 52586461 | 52587477 | 249231 |
| 63366 | 52598739 | 52599462 | 249231 |
| 63367 | 52611932 | 52612856 | 249231 |
| 63368 | 52644988 | 52647131 | 260963, 249231 |
| 63369 | 52776472 | 52777049 | |
| 63370 | 52846268 | 52847514 | |
| 63371 | 53081916 | 53083179 | 261550 |
| 63372 | 53085600 | 53091010 | 177200, 261550 |
| 63373 | 53095700 | 53096313 | 177200 |
| 63374 | 53114271 | 53115543 | 177200 |
| 63375 | 53118847 | 53119920 | 177200 |
| 63376 | 53123220 | 53126238 | 177200 |
| 63377 | 53127052 | 53128591 | 177200 |
| 63378 | 53132348 | 53135132 | 177200 |
| 63379 | 53145264 | 53146010 | 177200 |
| 63380 | 53163130 | 53166748 | 177200 |
| 63381 | 53467917 | 53470521 | 103479 |
| 63382 | 53532668 | 53533365 | 166971 |
| 63383 | 53536134 | 53539163 | 166971 |
| 63384 | 53543464 | 53546481 | |
| 63385 | 53737386 | 53738366 | 140718, 103494 |
| 63386 | 53795792 | 53796513 | 140718 |
| 63387 | 53809433 | 53810650 | 140718 |
| 63388 | 53814996 | 53815723 | 140718 |
| 63389 | 53855408 | 53857118 | 140718 |
| 63390 | 54208923 | 54211075 | |
| 63391 | 54214365 | 54215842 | |
| 63392 | 54300194 | 54300889 | 259517 |
| 63393 | 54454997 | 54455430 | |
| 63394 | 54477578 | 54478272 | |
| 63395 | 54662695 | 54663308 | |
| 63396 | 54691155 | 54692178 | |
| 63397 | 55656910 | 55657497 | |
| 63398 | 55670662 | 55671366 | |
| 63399 | 55794066 | 55794919 | 228695 |
| 63400 | 55866084 | 55867688 | 198848 |
| 63401 | 55869128 | 55870860 | |
| 63402 | 55905206 | 55906302 | 159398 |
| 63403 | 55983279 | 55983796 | 159398 |
| 63404 | 56223980 | 56226595 | 087258, 261439, 246379 |
| 63405 | 56228013 | 56228792 | 261439, 087258 |
| 63406 | 56244775 | 56247387 | 087258 |
| 63407 | 56267303 | 56268843 | 087258 |
| 63408 | 56279098 | 56280841 | 265281, 087258 |
| 63409 | 56297099 | 56298640 | 087258 |
| 63410 | 56303047 | 56304695 | 087258 |
| 63411 | 56328677 | 56329522 | 087258 |
| 63412 | 56390018 | 56392055 | 087258 |
| 63413 | 56404507 | 56405216 | 159461 |
| 63414 | 56410364 | 56410955 | 159461 |
| 63415 | 56416216 | 56418035 | 159461 |
| 63416 | 56441402 | 56444033 | 260621, 159461 |
| 63417 | 56445496 | 56446042 | 260621, 159461 |
| 63418 | 56458178 | 56459893 | 159461 |
| 63419 | 56484547 | 56486728 | 087263, 167005 |
| 63420 | 56553209 | 56554146 | 125124 |
| 63421 | 56573991 | 56574468 | |
| 63422 | 56585615 | 56586193 | |
| 63423 | 56638714 | 56649675 | 260823, 125148 |
| 63424 | 56658351 | 56661605 | 169715 |
| 63425 | 56665850 | 56667317 | 205364, 268317 |
| 63426 | 56671681 | 56672761 | 205362 |
| 63427 | 56691174 | 56692468 | 198417 |
| 63428 | 56701207 | 56705215 | 205358, 125144 |
| 63429 | 56712894 | 56714214 | |
| 63430 | 56715046 | 56717916 | 259827, 187193 |
| 63431 | 56718118 | 56719550 | 259827 |
| 63432 | 56763556 | 56764928 | 102900, 261302 |
| 63433 | 56834106 | 56835306 | 102900 |
| 63434 | 56890476 | 56891443 | |
| 63435 | 56919630 | 56920213 | 070915 |
| 63436 | 56964821 | 56967532 | 051108 |
| 63437 | 56979712 | 56980738 | |
| 63438 | 56998511 | 56999253 | 087237 |
| 63439 | 57001656 | 57002022 | 087237 |
| 63440 | 57022530 | 57024491 | 140853 |
| 63441 | 57033086 | 57035420 | 140853 |
| 63442 | 57094810 | 57096138 | 140853 |
| 63443 | 57118017 | 57118822 | |
| 63444 | 57125947 | 57127550 | 140848, 260148 |
| 63445 | 57212714 | 57213840 | 172775 |
| 63446 | 57218639 | 57222181 | 159579, 172775 |
| 63447 | 57226692 | 57229707 | 159579 |
| 63448 | 57272449 | 57273507 | 159579 |
| 63449 | 57278492 | 57280093 | 102931 |
| 63450 | 57285346 | 57287770 | 102931, 260946 |
| 63451 | 57318249 | 57319108 | 102934 |
| 63452 | 57332889 | 57335276 | |
| 63453 | 57336646 | 57340296 | |
| 63454 | 57347732 | 57349590 | |
| 63455 | 57349900 | 57351698 | |
| 63456 | 57405619 | 57408581 | 006210 |
| 63457 | 57413261 | 57414218 | 006210 |
| 63458 | 57450497 | 57452280 | |
| 63459 | 57480337 | 57482220 | 088682, 005194 |
| 63460 | 57496192 | 57497546 | 102978, 260345 |
| 63461 | 57503904 | 57507239 | 125170, 102978 |
| 63462 | 57513352 | 57515035 | 125170 |
| 63463 | 57519279 | 57521162 | 125170 |
| 63464 | 57534511 | 57535247 | |
| 63465 | 57569622 | 57571009 | 135736 |
| 63466 | 57624535 | 57625720 | 159618 |
| 63467 | 57640089 | 57641408 | |
| 63468 | 57661330 | 57663092 | 261633, 205336 |
| 63469 | 57700400 | 57702511 | 182885 |
| 63470 | 57711265 | 57712018 | 182885 |
| 63471 | 57768191 | 57771174 | 140854 |
| 63472 | 57815204 | 57817188 | 140859 |
| 63473 | 57830550 | 57832769 | 187185, 140859 |
| 63474 | 57834660 | 57836685 | 140859, 187185 |
| 63475 | 57840936 | 57842367 | 140859, 187185 |
| 63476 | 57843086 | 57845347 | 140859, 187185 |
| 63477 | 57858821 | 57859618 | 140859 |
| 63478 | 57859636 | 57862195 | 140859 |
| 63479 | 57863405 | 57864139 | 140859 |
| 63480 | 57864678 | 57865207 | 140859 |
| 63481 | 57896001 | 57898294 | 140859 |
| 63482 | 57904495 | 57906740 | |
| 63483 | 57922962 | 57925485 | 070729 |
| 63484 | 57925741 | 57930265 | 070729 |
| 63485 | 58033474 | 58035993 | 166188, 103005 |
| 63486 | 58056071 | 58057264 | |
| 63487 | 58058063 | 58061792 | 102996 |
| 63488 | 58064316 | 58065910 | 102996 |
| 63489 | 58066524 | 58067421 | 102996 |
| 63490 | 58154834 | 58156198 | 070761 |
| 63491 | 58161836 | 58164114 | 260927, 070761 |
| 63492 | 58230882 | 58231851 | 260867, 070770 |
| 63493 | 58231936 | 58232482 | 260867 |
| 63494 | 58255911 | 58257091 | |
| 63495 | 58283665 | 58284222 | 103021 |
| 63496 | 58362855 | 58363444 | 181938 |
| 63497 | 58370470 | 58371288 | 181938 |
| 63498 | 58426078 | 58426819 | 181938 |
| 63499 | 58492269 | 58495363 | 260186 |
| 63500 | 58548519 | 58550291 | 103037 |
| 63501 | 58638114 | 58638530 | 125107 |
| 63502 | 58662397 | 58664761 | 125107 |
| 63503 | 58667960 | 58668971 | |
| 63504 | 58717201 | 58719409 | 103042 |
| 63505 | 58754674 | 58755519 | 125166 |
| 63506 | 58764579 | 58765109 | 125166 |
| 63507 | 58766416 | 58768597 | 245768, 125166 |
| 63508 | 58881683 | 58882564 | 261638, 245768 |
| 63509 | 59244719 | 59245422 | |
| 63510 | 61629340 | 61630091 | |
| 63511 | 63370879 | 63371639 | 260658 |
| 63512 | 64194882 | 64195548 | |
| 63513 | 64216814 | 64217571 | |
| 63514 | 65104574 | 65105328 | 140937 |
| 63515 | 65910533 | 65911017 | |
| 63516 | 65930434 | 65931284 | |
| 63517 | 65943258 | 65943714 | |
| 63518 | 65956775 | 65957360 | |
| 63519 | 65979174 | 65980050 | |
| 63520 | 65999425 | 65999975 | |
| 63521 | 66231726 | 66232325 | |
| 63522 | 66304218 | 66304813 | |
| 63523 | 66535995 | 66537897 | 260851 |
| 63524 | 66543061 | 66548294 | 260755, 166548, 260851 |
| 63525 | 66549002 | 66552569 | 260851, 166548 |
| 63526 | 66582696 | 66584564 | 261519, 166548 |
| 63527 | 66585501 | 66586850 | 217555, 254788, 166548 |
| 63528 | 66729571 | 66730931 | 183723 |
| 63529 | 66774075 | 66776396 | 135720 |
| 63530 | 66784386 | 66786353 | 246777, 135720 |
| 63531 | 66864061 | 66865332 | 159593 |
| 63532 | 66913699 | 66915332 | 172840 |
| 63533 | 66932702 | 66935022 | |
| 63534 | 66958758 | 66963140 | 166592 |
| 63535 | 66963831 | 66965144 | |
| 63536 | 66967028 | 66971473 | 172831, 166595 |
| 63537 | 66995708 | 66996510 | 172828, 265408 |
| 63538 | 66997743 | 66998439 | 172828 |
| 63539 | 67029782 | 67031682 | 172824 |
| 63540 | 67056464 | 67057225 | |
| 63541 | 67062171 | 67064347 | 067955 |
| 63542 | 67142909 | 67145557 | 125149 |
| 63543 | 67147843 | 67148358 | 125149 |
| 63544 | 67193010 | 67195071 | 135722, 102871 |
| 63545 | 67198398 | 67198934 | 135722, 102878, 265690 |
| 63546 | 67203524 | 67205505 | 140939, 102878 |
| 63547 | 67207394 | 67209063 | 140939 |
| 63548 | 67217373 | 67218389 | 179044, 196123 |
| 63549 | 67225710 | 67227238 | 205250 |
| 63550 | 67232831 | 67233289 | 102890 |
| 63551 | 67260131 | 67261872 | 168701, 237102, 125122 |
| 63552 | 67449645 | 67450694 | 159714 |
| 63553 | 67464090 | 67466072 | 176387, 261320 |
| 63554 | 67477009 | 67477611 | 159720 |
| 63555 | 67479280 | 67480529 | 159720 |
| 63556 | 67504165 | 67504638 | 159720 |
| 63557 | 67513952 | 67515881 | 270049, 159720 |
| 63558 | 67554892 | 67555799 | 039523 |
| 63559 | 67561321 | 67565033 | 039523 |
| 63560 | 67571047 | 67572664 | 261396, 039523 |
| 63561 | 67580582 | 67581341 | 039523 |
| 63562 | 67595247 | 67598140 | 259804, 102974, 261386 |
| 63563 | 67675551 | 67676587 | |
| 63564 | 67693404 | 67694967 | 102981, 102977 |
| 63565 | 67699859 | 67702015 | 159761, 124074 |
| 63566 | 67706178 | 67709123 | 141098 |
| 63567 | 67751967 | 67755185 | 141098 |
| 63568 | 67758924 | 67761568 | 141084 |
| 63569 | 67803493 | 67808812 | 141084 |
| 63570 | 67813059 | 67815345 | 141084 |
| 63571 | 67838577 | 67841314 | 102904, 141084 |
| 63572 | 67866961 | 67868104 | 102901 |
| 63573 | 67875247 | 67877281 | 168286, 102901 |
| 63574 | 67879869 | 67881870 | 102898, 102901 |
| 63575 | 67891436 | 67892140 | 102898 |
| 63576 | 67906477 | 67907820 | 038358 |
| 63577 | 67926655 | 67928761 | 159792 |
| 63578 | 67949840 | 67952695 | 159792 |
| 63579 | 67968855 | 67971586 | 261884, 205220 |
| 63580 | 67976728 | 67977661 | 124067, 267660, 213398 |
| 63581 | 67987936 | 67988823 | 124067 |
| 63582 | 67995293 | 67996054 | 124067 |
| 63583 | 67999270 | 68001116 | 124067 |
| 63584 | 68001213 | 68003430 | 124067 |
| 63585 | 68026974 | 68028045 | 167261, 167264 |
| 63586 | 68055707 | 68058207 | 182810, 167264 |
| 63587 | 68113425 | 68114317 | 261864 |
| 63588 | 68118037 | 68120900 | 072736, 261864 |
| 63589 | 68125376 | 68126247 | 072736, 261864 |
| 63590 | 68130811 | 68131567 | 072736, 261864 |
| 63591 | 68267916 | 68272482 | 261469, 103067 |
| 63592 | 68273577 | 68274162 | |
| 63593 | 68278309 | 68279784 | 103066 |
| 63594 | 68297440 | 68300120 | 103064 |
| 63595 | 68343537 | 68345975 | 132600, 103061 |
| 63596 | 68365764 | 68366783 | 132600 |
| 63597 | 68430148 | 68431037 | 103056 |
| 63598 | 68440352 | 68441229 | 103056 |
| 63599 | 68442117 | 68442869 | 103056 |
| 63600 | 68460124 | 68460791 | 103056 |
| 63601 | 68482040 | 68482880 | 103056 |
| 63602 | 68503486 | 68504601 | |
| 63603 | 68507367 | 68508034 | |
| 63604 | 68515469 | 68515991 | |
| 63605 | 68554451 | 68555052 | |
| 63606 | 68738115 | 68738706 | 062038 |
| 63607 | 68766005 | 68766939 | |
| 63608 | 68771092 | 68772889 | 039068 |
| 63609 | 68773758 | 68777444 | 200558, 039068 |
| 63610 | 68778004 | 68779314 | 039068 |
| 63611 | 68789234 | 68791088 | 039068 |
| 63612 | 68794149 | 68796293 | 039068 |
| 63613 | 68812190 | 68814208 | 039068 |
| 63614 | 68820371 | 68821317 | 039068 |
| 63615 | 68823978 | 68825409 | 039068 |
| 63616 | 68826060 | 68827961 | 039068 |
| 63617 | 68877135 | 68878706 | 103047 |
| 63618 | 68907486 | 68908350 | 103047 |
| 63619 | 68926002 | 68926516 | 103047 |
| 63620 | 68933861 | 68934355 | 103047 |
| 63621 | 68935858 | 68937203 | 103047 |
| 63622 | 68942801 | 68943597 | 103047 |
| 63623 | 68959532 | 68960143 | 103047 |
| 63624 | 68970541 | 68971365 | 103047, 266801, 260999 |
| 63625 | 68982183 | 68982815 | 103047 |
| 63626 | 69025624 | 69029625 | 103047 |
| 63627 | 69050828 | 69051802 | 103047 |
| 63628 | 69065632 | 69066247 | 103047 |
| 63629 | 69073572 | 69075309 | 103047 |
| 63630 | 69090806 | 69092968 | 103047 |
| 63631 | 69107291 | 69107655 | 103047 |
| 63632 | 69122914 | 69123938 | |
| 63633 | 69139094 | 69140793 | 103044 |
| 63634 | 69165402 | 69167391 | 168802, 141076 |
| 63635 | 69217619 | 69218116 | 141076 |
| 63636 | 69220368 | 69222364 | 168807, 141076 |
| 63637 | 69251277 | 69252166 | 141076, 168807 |
| 63638 | 69255876 | 69256566 | 141076, 168807 |
| 63639 | 69332608 | 69333126 | 168807 |
| 63640 | 69344577 | 69346541 | 132612, 260914 |
| 63641 | 69349183 | 69350910 | 132612, 260914 |
| 63642 | 69359847 | 69361027 | 213380 |
| 63643 | 69362662 | 69365342 | 258429, 213380, 272617 |
| 63644 | 69372685 | 69374816 | 132603, 213380, 260371, |
| | | | 259900 |
| 63645 | 69385066 | 69385973 | 259900, 157315, 260371 |
| 63646 | 69418703 | 69420199 | 132604 |
| 63647 | 69429790 | 69431063 | 132604 |
| 63648 | 69457968 | 69459326 | 103018 |
| 63649 | 69482411 | 69483310 | 103018 |
| 63650 | 69564419 | 69565068 | |
| 63651 | 69595763 | 69596251 | |
| 63652 | 69598694 | 69601665 | 102908, 223109 |
| 63653 | 69787978 | 69789266 | 141101 |
| 63654 | 69795501 | 69797417 | 198373 |
| 63655 | 69856075 | 69856648 | 198373 |
| 63656 | 69864603 | 69865391 | 198373 |
| 63657 | 69892619 | 69893366 | 198373 |
| 63658 | 69975358 | 69976159 | 198373 |
| 63659 | 70185716 | 70187472 | 090857 |
| 63660 | 70284809 | 70286189 | 223496 |
| 63661 | 70322138 | 70324425 | 157349, 090861 |
| 63662 | 70332465 | 70334136 | 260537, 157349 |
| 63663 | 70379744 | 70381862 | 168872, 261777, 260537 |
| 63664 | 70413825 | 70416261 | 260111, 157350 |
| 63665 | 70444462 | 70445010 | 157350 |
| 63666 | 70461291 | 70463543 | 157350 |
| 63667 | 70472013 | 70473946 | 157350 |
| 63668 | 70487836 | 70489244 | 157353 |
| 63669 | 70546035 | 70547386 | 103051 |
| 63670 | 70556761 | 70558632 | 189091, 103051 |
| 63671 | 70715389 | 70717817 | 132613 |
| 63672 | 70718613 | 70720323 | 132613 |
| 63673 | 70727325 | 70728960 | 103043 |
| 63674 | 70729146 | 70730047 | 103043 |
| 63675 | 70735602 | 70736418 | 103043 |
| 63676 | 70743043 | 70744218 | 103043 |
| 63677 | 70745130 | 70745703 | 103043 |
| 63678 | 70748318 | 70750789 | 103043 |
| 63679 | 70757860 | 70760583 | 103043 |
| 63680 | 70771379 | 70772935 | 103043 |
| 63681 | 70779205 | 70783512 | 260156, 103043 |
| 63682 | 70784904 | 70786255 | 103043 |
| 63683 | 70793983 | 70795290 | 103043, 214353 |
| 63684 | 70834220 | 70835377 | 103043 |
| 63685 | 71322203 | 71324090 | 180917 |
| 63686 | 71371914 | 71372829 | |
| 63687 | 71385064 | 71385737 | |
| 63688 | 71460217 | 71461189 | 261348 |
| 63689 | 71495032 | 71496804 | 247324, 261611, 167377 |
| 63690 | 71507765 | 71510027 | 261611, 157429 |
| 63691 | 71517873 | 71518825 | 261611, 157429 |
| 63692 | 71548795 | 71549510 | 260520, 157429 |
| 63693 | 71589298 | 71589856 | 157429 |
| 63694 | 71591995 | 71592618 | 157429 |
| 63695 | 71597742 | 71601044 | 260886, 198650, 157429 |
| 63696 | 71605188 | 71608192 | 260886, 198650 |
| 63697 | 71609105 | 71611339 | 198650, 260886 |
| 63698 | 71614927 | 71616598 | |
| 63699 | 71618571 | 71620188 | |
| 63700 | 71623985 | 71629036 | |
| 63701 | 71634415 | 71635419 | |
| 63702 | 71642049 | 71642703 | |
| 63703 | 71659775 | 71660787 | 140832, 260593 |
| 63704 | 71700201 | 71701786 | 040199 |
| 63705 | 71743023 | 71743928 | 040199 |
| 63706 | 71756548 | 71758333 | 261513, 040199 |
| 63707 | 71760542 | 71761393 | 260612 |
| 63708 | 71815562 | 71816150 | 166747 |
| 63709 | 71841385 | 71844260 | 166747 |
| 63710 | 71878896 | 71880938 | 224470, 182149 |
| 63711 | 71892558 | 71893112 | 224470, 182149 |
| 63712 | 71917308 | 71918801 | 224470, 102984, 182149 |
| 63713 | 71927937 | 71930509 | 102984, 182149 |
| 63714 | 71961219 | 71961693 | 182149 |
| 63715 | 72042054 | 72043495 | 102967 |
| 63716 | 72050811 | 72051460 | 102967 |
| 63717 | 72057112 | 72059274 | 102967 |
| 63718 | 72061535 | 72062443 | |
| 63719 | 72075769 | 72077449 | |
| 63720 | 72084703 | 72085473 | 140830 |
| 63721 | 72087592 | 72088547 | 257017, 261701, 140830 |
| 63722 | 72126642 | 72128605 | 140829, 140830 |
| 63723 | 72845042 | 72845685 | 140836 |
| 63724 | 72870063 | 72870747 | 140836 |
| 63725 | 72881559 | 72883883 | 140836 |
| 63726 | 72910405 | 72912861 | 140836 |
| 63727 | 72979898 | 72982733 | 140836 |
| 63728 | 73008160 | 73008748 | 140836 |
| 63729 | 73012079 | 73012609 | 140836 |
| 63730 | 73049460 | 73050248 | 140836 |
| 63731 | 73053354 | 73055538 | 140836 |
| 63732 | 73061473 | 73062270 | 140836 |
| 63733 | 73081113 | 73083171 | 140836 |
| 63734 | 73086566 | 73089201 | 140836 |
| 63735 | 73089214 | 73093567 | 140836 |
| 63736 | 73103738 | 73105722 | |
| 63737 | 73236080 | 73236954 | |
| 63738 | 73238391 | 73239463 | |
| 63739 | 73265673 | 73267084 | 261227 |
| 63740 | 73299220 | 73300117 | |
| 63741 | 73385053 | 73385458 | |
| 63742 | 74107327 | 74107795 | 261404 |
| 63743 | 74141591 | 74142174 | 261404 |
| 63744 | 74187249 | 74188188 | 261404 |
| 63745 | 74324967 | 74326718 | 261404 |
| 63746 | 74329365 | 74331796 | 103035, 261404 |
| 63747 | 74604198 | 74606310 | 090863 |
| 63748 | 74639765 | 74641843 | 090863 |
| 63749 | 74660902 | 74662935 | 168411 |
| 63750 | 74669285 | 74669630 | 168411 |
| 63751 | 74700070 | 74701274 | 168411 |
| 63752 | 74733785 | 74735504 | 168404 |
| 63753 | 74743195 | 74743817 | |
| 63754 | 74776827 | 74778713 | 103089 |
| 63755 | 74957759 | 74958339 | 103091 |
| 63756 | 75018090 | 75019388 | 103091 |
| 63757 | 75025312 | 75026721 | 103091 |
| 63758 | 75031895 | 75034124 | 186187, 103091 |
| 63759 | 75045043 | 75046405 | 186187 |
| 63760 | 75082369 | 75083115 | 186187 |
| 63761 | 75087540 | 75088638 | 186187 |
| 63762 | 75103814 | 75104726 | 186187 |
| 63763 | 75142264 | 75145721 | 247033, 186187 |
| 63764 | 75149665 | 75150945 | 166816 |
| 63765 | 75182206 | 75183206 | 184517 |
| 63766 | 75267521 | 75268715 | 050820 |
| 63767 | 75277964 | 75280704 | 050820 |
| 63768 | 75283866 | 75286002 | 050820 |
| 63769 | 75295835 | 75300822 | 050820 |
| 63770 | 75301624 | 75302258 | 050820 |
| 63771 | 75322965 | 75323513 | |
| 63772 | 75338209 | 75341344 | 153774 |
| 63773 | 75351663 | 75352432 | 153774 |
| 63774 | 75385122 | 75385666 | 153774 |
| 63775 | 75410308 | 75411015 | 153774 |
| 63776 | 75466460 | 75468474 | 153774, 261717 |
| 63777 | 75497647 | 75499058 | 261717, 166822 |
| 63778 | 75550415 | 75551612 | |
| 63779 | 75561752 | 75562292 | |
| 63780 | 75584081 | 75584689 | 259992, 205084 |
| 63781 | 75599728 | 75601106 | 034713, 259992 |
| 63782 | 75656067 | 75657543 | 065457 |
| 63783 | 75680698 | 75683500 | 166848, 065427 |
| 63784 | 76255781 | 76256816 | |
| 63785 | 76462464 | 76463244 | 152910 |
| 63786 | 76562625 | 76567205 | 152910 |
| 63787 | 76608026 | 76609292 | 261833 |
| 63788 | 76913225 | 76913945 | 259995 |
| 63789 | 76931400 | 76932576 | 259995 |
| 63790 | 76933243 | 76936157 | 259995 |
| 63791 | 76944761 | 76945366 | 259995 |
| 63792 | 76959853 | 76960915 | 259995 |
| 63793 | 76980618 | 76981660 | |
| 63794 | 76998167 | 76998996 | |
| 63795 | 77003724 | 77005072 | |
| 63796 | 77223773 | 77226075 | 103111 |
| 63797 | 77745412 | 77746450 | |
| 63798 | 77755817 | 77757581 | 140876 |
| 63799 | 77783308 | 77783797 | |
| 63800 | 77797652 | 77798845 | |
| 63801 | 77808773 | 77812650 | |
| 63802 | 77813695 | 77815734 | |
| 63803 | 78132898 | 78134126 | 186153 |
| 63804 | 78274391 | 78274911 | 260969, 186153 |
| 63805 | 78276079 | 78276597 | 186153 |
| 63806 | 78286255 | 78287134 | 186153 |
| 63807 | 78318386 | 78319433 | 186153 |
| 63808 | 78326629 | 78327570 | 186153 |
| 63809 | 78477183 | 78478312 | 186153 |
| 63810 | 78517119 | 78518077 | 186153 |
| 63811 | 78539165 | 78540791 | 260733, 186153 |
| 63812 | 78630762 | 78631424 | 186153 |
| 63813 | 78717628 | 78718621 | 186153 |
| 63814 | 78739528 | 78741029 | 186153 |
| 63815 | 78850505 | 78851313 | 186153 |
| 63816 | 79021314 | 79021901 | 186153 |
| 63817 | 79071494 | 79072625 | 186153 |
| 63818 | 79286367 | 79287548 | |
| 63819 | 79328384 | 79328928 | |
| 63820 | 79575864 | 79576599 | |
| 63821 | 79598197 | 79599228 | |
| 63822 | 79631468 | 79633038 | 178573 |
| 63823 | 79633288 | 79637102 | 178573 |
| 63824 | 79757117 | 79758242 | 260876, 261390 |
| 63825 | 79803992 | 79804871 | 261390, 260876 |
| 63826 | 79931132 | 79932342 | |
| 63827 | 80004264 | 80004867 | |
| 63828 | 80057534 | 80058510 | |
| 63829 | 80060810 | 80061570 | |
| 63830 | 80207389 | 80209327 | 259867 |
| 63831 | 80231483 | 80231977 | 259867 |
| 63832 | 80299427 | 80300161 | 259867 |
| 63833 | 80334207 | 80335211 | 259867 |
| 63834 | 80409786 | 80410348 | 259867 |
| 63835 | 80438749 | 80439227 | 259867 |
| 63836 | 80441090 | 80441778 | 259867 |
| 63837 | 80493096 | 80493735 | 259867 |
| 63838 | 80574036 | 80575158 | 168589, 259867 |
| 63839 | 80577871 | 80578643 | 168589, 259867 |
| 63840 | 80751493 | 80752197 | 166446 |
| 63841 | 80793043 | 80794190 | 166446 |
| 63842 | 80837094 | 80837923 | 166446 |
| 63843 | 80837931 | 80838318 | 166446 |
| 63844 | 80965395 | 80967074 | |
| 63845 | 81014642 | 81015189 | 103121 |
| 63846 | 81026040 | 81027486 | 103121 |
| 63847 | 81030699 | 81031603 | 103121 |
| 63848 | 81039693 | 81042002 | 166451, 103121 |
| 63849 | 81068906 | 81070801 | 166454, 260213 |
| 63850 | 81110264 | 81111494 | 245059, 166455, 260643 |
| 63851 | 81129065 | 81130659 | 140905 |
| 63852 | 81156559 | 81157683 | 166473 |
| 63853 | 81207969 | 81209783 | 166473 |
| 63854 | 81232057 | 81232714 | 166473 |
| 63855 | 81271806 | 81272689 | 135697 |
| 63856 | 81348076 | 81349815 | 261609 |
| 63857 | 81434575 | 81435408 | |
| 63858 | 81438878 | 81439908 | |
| 63859 | 81477388 | 81482637 | 153815 |
| 63860 | 81485355 | 81486550 | 153815 |
| 63861 | 81489080 | 81492542 | 153815 |
| 63862 | 81496263 | 81496772 | 153815 |
| 63863 | 81498544 | 81501231 | 153815 |
| 63864 | 81506734 | 81508056 | 153815 |
| 63865 | 81512447 | 81512961 | 153815 |
| 63866 | 81525098 | 81528561 | 153815 |
| 63867 | 81546511 | 81547949 | 153815 |
| 63868 | 81556949 | 81557552 | 153815 |
| 63869 | 81566167 | 81566984 | 153815 |
| 63870 | 81567459 | 81568117 | 153815 |
| 63871 | 81582483 | 81583744 | 153815 |
| 63872 | 81584511 | 81587694 | 153815 |
| 63873 | 81601524 | 81602534 | 153815 |
| 63874 | 81616177 | 81617275 | 153815 |
| 63875 | 81658512 | 81659920 | 153815 |
| 63876 | 81670000 | 81670347 | 153815 |
| 63877 | 81763696 | 81764231 | |
| 63878 | 81812200 | 81813728 | 197943 |
| 63879 | 81907368 | 81908059 | 197943 |
| 63880 | 81921990 | 81924406 | 197943 |
| 63881 | 81990012 | 81990599 | 197943 |
| 63882 | 82030966 | 82031773 | 184860 |
| 63883 | 82044249 | 82045720 | 184860 |
| 63884 | 82060319 | 82061888 | |
| 63885 | 82064574 | 82066030 | |
| 63886 | 82066267 | 82070085 | 086696 |
| 63887 | 82077325 | 82078555 | 261235, 086696 |
| 63888 | 82084175 | 82084992 | 086696, 261235 |
| 63889 | 82088912 | 82090569 | 086696, 261235 |
| 63890 | 82093368 | 82094306 | 086696, 261235 |
| 63891 | 82095187 | 82098259 | 086696, 261235 |
| 63892 | 82115542 | 82118196 | 086696, 261235 |
| 63893 | 82121931 | 82122645 | 086696, 261235 |
| 63894 | 82169417 | 82169920 | 261235 |
| 63895 | 82203135 | 82204772 | 261029, 135698 |
| 63896 | 82685911 | 82689467 | 140945 |
| 63897 | 82794787 | 82796026 | 140945 |
| 63898 | 83170861 | 83171576 | 140945 |
| 63899 | 83841350 | 83842681 | 230989, 260228 |
| 63900 | 83859565 | 83860248 | |
| 63901 | 83932066 | 83933947 | 103150 |
| 63902 | 83960156 | 83961697 | 260300 |
| 63903 | 83976446 | 83977282 | 260300 |
| 63904 | 83979877 | 83981965 | 140961, 260300 |
| 63905 | 83985909 | 83989491 | 140961 |
| 63906 | 83990095 | 83990891 | 140961 |
| 63907 | 84149280 | 84151585 | 260018, 140943 |
| 63908 | 84177829 | 84179096 | 154099, 103160 |
| 63909 | 84208580 | 84212910 | 103168, 154099 |
| 63910 | 84219912 | 84221068 | 103168 |
| 63911 | 84537136 | 84539179 | 140950 |
| 63912 | 84676550 | 84677120 | |
| 63913 | 84681519 | 84683449 | 135686 |
| 63914 | 84732788 | 84734869 | 103194 |
| 63915 | 84763122 | 84764439 | 103194 |
| 63916 | 84773183 | 84775754 | 103194 |
| 63917 | 84865994 | 84867157 | 103196 |
| 63918 | 84884108 | 84886509 | 103196 |
| 63919 | 84927170 | 84928269 | 103196 |
| 63920 | 84946817 | 84947701 | 103196 |
| 63921 | 84966804 | 84968487 | 260340 |
| 63922 | 85027263 | 85029472 | 153786 |
| 63923 | 85031722 | 85035181 | 153786 |
| 63924 | 85037768 | 85038495 | 153786 |
| 63925 | 85044022 | 85046157 | 153786 |
| 63926 | 85060361 | 85062547 | 135709 |
| 63927 | 85148436 | 85149269 | |
| 63928 | 85182460 | 85183878 | |
| 63929 | 85185331 | 85185842 | |
| 63930 | 85192732 | 85194590 | |
| 63931 | 85200240 | 85202168 | |
| 63932 | 85205743 | 85208816 | 262601 |
| 63933 | 85215302 | 85215873 | 262601 |
| 63934 | 85233037 | 85235152 | |
| 63935 | 85246902 | 85247524 | |
| 63936 | 85253447 | 85254485 | |
| 63937 | 85319120 | 85321728 | 179219 |
| 63938 | 85322423 | 85323178 | |
| 63939 | 85339685 | 85340151 | 266307 |
| 63940 | 85341106 | 85341738 | |
| 63941 | 85355084 | 85356390 | |
| 63942 | 85368100 | 85369507 | |
| 63943 | 85372330 | 85373310 | |
| 63944 | 85384618 | 85384976 | |
| 63945 | 85392009 | 85396177 | 261567 |
| 63946 | 85409647 | 85410587 | |
| 63947 | 85423639 | 85424813 | |
| 63948 | 85449830 | 85450281 | |
| 63949 | 85455885 | 85456838 | |
| 63950 | 85482246 | 85483421 | |
| 63951 | 85494468 | 85495066 | |
| 63952 | 85499471 | 85499915 | |
| 63953 | 85525368 | 85526466 | |
| 63954 | 85547603 | 85550442 | |
| 63955 | 85556846 | 85559879 | |
| 63956 | 85560467 | 85561633 | |
| 63957 | 85568767 | 85570104 | |
| 63958 | 85571218 | 85572319 | |
| 63959 | 85573122 | 85573764 | |
| 63960 | 85586390 | 85592326 | |
| 63961 | 85596621 | 85598466 | |
| 63962 | 85643799 | 85649691 | 131149 |
| 63963 | 85669424 | 85670344 | 131149 |
| 63964 | 85675040 | 85676077 | 131149 |
| 63965 | 85684789 | 85685498 | 131149 |
| 63966 | 85707529 | 85708189 | 131149 |
| 63967 | 85714733 | 85715397 | 131153 |
| 63968 | 85751319 | 85752037 | 154102 |
| 63969 | 85753570 | 85754372 | 154102 |
| 63970 | 85815271 | 85816019 | 252311, 131148 |
| 63971 | 85831979 | 85834473 | 131143, 131148 |
| 63972 | 85854729 | 85855628 | |
| 63973 | 85881156 | 85882387 | |
| 63974 | 85883680 | 85884855 | |
| 63975 | 85921636 | 85923362 | |
| 63976 | 85924481 | 85925432 | |
| 63977 | 85932005 | 85933207 | 140968 |
| 63978 | 85935396 | 85935961 | 140968 |
| 63979 | 85949577 | 85950683 | 140968 |
| 63980 | 85973087 | 85974538 | |
| 63981 | 86007997 | 86009781 | |
| 63982 | 86553462 | 86554218 | 270020 |
| 63983 | 86588028 | 86589789 | 103248 |
| 63984 | 86697606 | 86699268 | 261161 |
| 63985 | 87202954 | 87203679 | 260456 |
| 63986 | 87350323 | 87352616 | 270006, 260456, 131152 |
| 63987 | 87372653 | 87373212 | 103264 |
| 63988 | 87408939 | 87409814 | 103264 |
| 63989 | 87412776 | 87413309 | 103264 |
| 63990 | 87415781 | 87418685 | 140941, 103264 |
| 63991 | 87421199 | 87423670 | 103264, 140941 |
| 63992 | 87424419 | 87427503 | 103264, 140941 |
| 63993 | 87489994 | 87491706 | 140948 |
| 63994 | 87494932 | 87495969 | 140948 |
| 63995 | 87497313 | 87499904 | 140948 |
| 63996 | 87517768 | 87518982 | 140948 |
| 63997 | 87526246 | 87527068 | 260750 |
| 63998 | 87575124 | 87575782 | |
| 63999 | 87588225 | 87589689 | |
| 64000 | 87668992 | 87670445 | 154118 |
| 64001 | 87798637 | 87800592 | 104731 |
| 64002 | 87811127 | 87813365 | 260498 |
| 64003 | 87818347 | 87818953 | 260177 |
| 64004 | 87822382 | 87825693 | 260177 |
| 64005 | 87870258 | 87877164 | 260466, 103257 |
| 64006 | 87878775 | 87880557 | 103257 |
| 64007 | 87880959 | 87881889 | 103257 |
| 64008 | 87884071 | 87886240 | 103257 |
| 64009 | 87886294 | 87889323 | 103257 |
| 64010 | 87981457 | 87986435 | 172530 |
| 64011 | 88016191 | 88016786 | 172530 |
| 64012 | 88454579 | 88455139 | |
| 64013 | 88519074 | 88519507 | |
| 64014 | 88519511 | 88523109 | 179588 |
| 64015 | 88539598 | 88541145 | 179588 |
| 64016 | 88553882 | 88555332 | 179588 |
| 64017 | 88564923 | 88565749 | 179588 |
| 64018 | 88566194 | 88567116 | 179588 |
| 64019 | 88570856 | 88572559 | 179588 |
| 64020 | 88635841 | 88638089 | 158545 |
| 64021 | 88684574 | 88685532 | 158545 |
| 64022 | 88728635 | 88730363 | 260630, 167508 |
| 64023 | 88731408 | 88731937 | 260630 |
| 64024 | 88752587 | 88753499 | 185669, 260630 |
| 64025 | 88771816 | 88773799 | 174177, 158717 |
| 64026 | 88825521 | 88826323 | 103335 |
| 64027 | 88829623 | 88830985 | 103335 |
| 64028 | 88831098 | 88832004 | 103335 |
| 64029 | 88848916 | 88852290 | 103335 |
| 64030 | 88853709 | 88854594 | |
| 64031 | 88869343 | 88870297 | 167513 |
| 64032 | 88876787 | 88879018 | 198931 |
| 64033 | 88922721 | 88924528 | 141012, 167515 |
| 64034 | 88946555 | 88948314 | 259881, 129993 |
| 64035 | 88949308 | 88949902 | 259881, 129993 |
| 64036 | 89159770 | 89161193 | 176715 |
| 64037 | 89184702 | 89185110 | 176715 |
| 64038 | 89282823 | 89284875 | 170100, 259877 |
| 64039 | 89298438 | 89298994 | |
| 64040 | 89307052 | 89308579 | |
| 64041 | 89313251 | 89314059 | |
| 64042 | 89322779 | 89324503 | 260637 |
| 64043 | 89385259 | 89387910 | 261253, 167522 |
| 64044 | 89404909 | 89405925 | 167522 |
| 64045 | 89411671 | 89412707 | 167522 |
| 64046 | 89430245 | 89431870 | 167522 |
| 64047 | 89461413 | 89462113 | 167522, 261574 |
| 64048 | 89477055 | 89477652 | 167522, 261574 |
| 64049 | 89484604 | 89485503 | 167522 |
| 64050 | 89508175 | 89510271 | 252887, 167522 |
| 64051 | 89540181 | 89540976 | 167522 |
| 64052 | 89544935 | 89545998 | 167522 |
| 64053 | 89555011 | 89558198 | 197912, 167522 |
| 64054 | 89568338 | 89569540 | 261118, 197912 |
| 64055 | 89571196 | 89573065 | 197912 |
| 64056 | 89573273 | 89575695 | 197912 |
| 64057 | 89625765 | 89628468 | 167526, 200084 |
| 64058 | 89631871 | 89632770 | |
| 64059 | 89648361 | 89649444 | 178773 |
| 64060 | 89723181 | 89725216 | 167523, 131165 |
| 64061 | 89752787 | 89754726 | 260259, 185324 |
| 64062 | 89766284 | 89768167 | 158792 |
| 64063 | 89772287 | 89772804 | |
| 64064 | 89786321 | 89789443 | 158805, 075399 |
| 64065 | 89830587 | 89832210 | 187741 |
| 64066 | 89883190 | 89883491 | |
| 64067 | 89893827 | 89895455 | 204991 |
| 64068 | 89903550 | 89904633 | 204991 |
| 64069 | 89939247 | 89940918 | 141002 |
| 64070 | 90014900 | 90015269 | 140995 |
| 64071 | 90037922 | 90040124 | 223959, 261317, 177946 |
| 64072 | 90062001 | 90063580 | 223959 |
| 64073 | 90085208 | 90087059 | 141013, 003249 |
| 64074 | 90088515 | 90089861 | 141013 |
| 64075 | 90112828 | 90114419 | 222019 |
| 64076 | 90124016 | 90124777 | 126856 |

[0585] The locations of ODSCs on Chromosome 17 are shown in Table 59.

TABLE 59
ODSC Locations on Chromosome 17

| SEQ ID NO. | Start | End | Overlapping Gene(s) |
|---|---|---|---|
| 64077 | 49580 | 50460 | |
| 64078 | 82884 | 83707 | 181031 |
| 64079 | 188555 | 189161 | 181031 |
| 64080 | 198044 | 199730 | 181031 |
| 64081 | 200373 | 204093 | 262294, 181031 |
| 64082 | 234802 | 236593 | 181031 |
| 64083 | 243321 | 244183 | |
| 64084 | 462502 | 465025 | 141252 |
| 64085 | 531544 | 532857 | 141252 |
| 64086 | 617238 | 619348 | 141252 |
| 64087 | 635293 | 636590 | 167695 |
| 64088 | 654637 | 656349 | 231784, 179409 |
| 64089 | 684461 | 686603 | 171861, 167699 |
| 64090 | 899650 | 901668 | 177370 |
| 64091 | 990708 | 991489 | 159842 |
| 64092 | 1012101 | 1012994 | 159842 |
| 64093 | 1162364 | 1163371 | |
| 64094 | 1170952 | 1172233 | |
| 64095 | 1293571 | 1294074 | 108953 |
| 64096 | 1301828 | 1303927 | 108953 |
| 64097 | 1315952 | 1317049 | |
| 64098 | 1357906 | 1361474 | 167193 |
| 64099 | 1363346 | 1364002 | 167193 |
| 64100 | 1371026 | 1371672 | 197879 |
| 64101 | 1372239 | 1372898 | 197879 |
| 64102 | 1387998 | 1390068 | 197879 |
| 64103 | 1391118 | 1392484 | 197879 |
| 64104 | 1393735 | 1395658 | 197879 |
| 64105 | 1418882 | 1420487 | 236618, 132376 |
| 64106 | 1448877 | 1449301 | 174238 |
| 64107 | 1449455 | 1450122 | 174238 |
| 64108 | 1464819 | 1466412 | 174238 |
| 64109 | 1480422 | 1481276 | 167703 |
| 64110 | 1493050 | 1494009 | 167703 |
| 64111 | 1531508 | 1533553 | 167703 |
| 64112 | 1551888 | 1554671 | 174231, 167705 |
| 64113 | 1572612 | 1573307 | 174231 |
| 64114 | 1587317 | 1588600 | 174231 |
| 64115 | 1612581 | 1614624 | 185561 |
| 64116 | 1616804 | 1622249 | 167716, 186594 |
| 64117 | 1627158 | 1629007 | 167716 |
| 64118 | 1638852 | 1641845 | 262791, 167716 |
| 64119 | 1647623 | 1648851 | 167711 |
| 64120 | 1664958 | 1668215 | 132386 |
| 64121 | 1673249 | 1673802 | 132386 |
| 64122 | 1676225 | 1677011 | 132386 |
| 64123 | 1686170 | 1687842 | 186532 |
| 64124 | 1689722 | 1691841 | 186532 |
| 64125 | 1713587 | 1714643 | 186532 |
| 64126 | 1732380 | 1733642 | 132383, 265504, 186532 |
| 64127 | 1755295 | 1756094 | 132383 |
| 64128 | 1813221 | 1813840 | |
| 64129 | 1849015 | 1849698 | 185924 |
| 64130 | 1898339 | 1902598 | 262445, 185924 |
| 64131 | 1927018 | 1929781 | 185924 |
| 64132 | 1933105 | 1934304 | 108963 |
| 64133 | 1944770 | 1946380 | 262664, 262533, 108963 |
| 64134 | 1952982 | 1954037 | 267195, 267200 |
| 64135 | 1998070 | 1998870 | 070366, 262810 |
| 64136 | 2060995 | 2061713 | 070366 |
| 64137 | 2075088 | 2076692 | 070366 |
| 64138 | 2077354 | 2078683 | 070366 |
| 64139 | 2080660 | 2081098 | 070366 |
| 64140 | 2115420 | 2118644 | 236838, 070366 |
| 64141 | 2125888 | 2127397 | 070366 |
| 64142 | 2205896 | 2207610 | 167720, 070366 |
| 64143 | 2212785 | 2213501 | 167720 |
| 64144 | 2238858 | 2241595 | 141258, 167721 |
| 64145 | 2251047 | 2251595 | 141258 |
| 64146 | 2286735 | 2287445 | 070444 |
| 64147 | 2295867 | 2297517 | 070444 |
| 64148 | 2301748 | 2305911 | 070444 |
| 64149 | 2388830 | 2389667 | 127804 |
| 64150 | 2413957 | 2415635 | 127804 |
| 64151 | 2448634 | 2449288 | |
| 64152 | 2496117 | 2498499 | 007168 |
| 64153 | 2553957 | 2554658 | 007168 |
| 64154 | 2612302 | 2616138 | 262050, 132361 |
| 64155 | 2907236 | 2908457 | 132359 |
| 64156 | 3377161 | 3378212 | 108381, 141255 |
| 64157 | 3378613 | 3380053 | 108381, 141255 |
| 64158 | 3415224 | 3417145 | 141255, 167723 |
| 64159 | 3465921 | 3466942 | |
| 64160 | 3537843 | 3538479 | 262304, 197417 |
| 64161 | 3538584 | 3540719 | 040531, 262304, 197417 |
| 64162 | 3550281 | 3551536 | 040531 |
| 64163 | 3562940 | 3564015 | 040531 |
| 64164 | 3570346 | 3573087 | 127774, 213977, 257950 |
| 64165 | 3626216 | 3627709 | 177602, 083457 |
| 64166 | 3705065 | 3708526 | 262194 |
| 64167 | 3748636 | 3749842 | 074356 |
| 64168 | 3879736 | 3880504 | 263312 |
| 64169 | 4045030 | 4048226 | 167740, 074755 |
| 64170 | 4050996 | 4051416 | 167740 |
| 64171 | 4112874 | 4113348 | 185722 |
| 64172 | 4123993 | 4124904 | 185722 |
| 64173 | 4166135 | 4167590 | 185722 |
| 64174 | 4213572 | 4214114 | 132388 |
| 64175 | 4268286 | 4270560 | 132388 |
| 64176 | 4357490 | 4357965 | 182557 |
| 64177 | 4385686 | 4387563 | 262823, 182557 |
| 64178 | 4399708 | 4402542 | 183018, 229782 |
| 64179 | 4424323 | 4424834 | 183018 |
| 64180 | 4437218 | 4438173 | 183018 |
| 64181 | 4457400 | 4459572 | 132382 |
| 64182 | 4476817 | 4477489 | |
| 64183 | 4568129 | 4568860 | |
| 64184 | 4582712 | 4583403 | 141456, 235085 |
| 64185 | 4606674 | 4608082 | 244184, 141456 |
| 64186 | 4612880 | 4614726 | 141480 |
| 64187 | 4615023 | 4616384 | 141480 |
| 64188 | 4622670 | 4625910 | 141480 |
| 64189 | 4633555 | 4635457 | 161920, 261898 |
| 64190 | 4639193 | 4640190 | 161921 |
| 64191 | 4642023 | 4643435 | 141497, 161921 |
| 64192 | 4662898 | 4663811 | |
| 64193 | 4674589 | 4676121 | 142484 |
| 64194 | 4690520 | 4694076 | 182327 |
| 64195 | 4698635 | 4700292 | 142507 |
| 64196 | 4709742 | 4711178 | 129219, 262165 |
| 64197 | 4736270 | 4737690 | 141503 |
| 64198 | 4801639 | 4803595 | 205710, 108556 |
| 64199 | 4811589 | 4813041 | |
| 64200 | 4817006 | 4817808 | |
| 64201 | 4822809 | 4824827 | |
| 64202 | 4842082 | 4845100 | 108523, 108528 |
| 64203 | 4847569 | 4854768 | 108515, 108518, 108523 |
| 64204 | 4869493 | 4874339 | 262429, 108509, 091640 |
| 64205 | 4889739 | 4891886 | 262227, 262678, 196388, |
| | | | 203562, 108509 |
| 64206 | 4900130 | 4902920 | 129250, 196388 |
| 64207 | 4934742 | 4935368 | |
| 64208 | 5014358 | 5015992 | 234327, 167840 |
| 64209 | 5094363 | 5095731 | 261879, 180626 |
| 64210 | 5124054 | 5125468 | 161929, 261879 |
| 64211 | 5185047 | 5186315 | 029725 |
| 64212 | 5217110 | 5217590 | 029725 |
| 64213 | 5308103 | 5309380 | 108559 |
| 64214 | 5321841 | 5324346 | 129197, 108559 |
| 64215 | 5341258 | 5342980 | 108561 |
| 64216 | 5371252 | 5372922 | 262099, 005100 |
| 64217 | 5388440 | 5390864 | 167842, 072849 |
| 64218 | 5419032 | 5420592 | 091592 |
| 64219 | 5723478 | 5725050 | 179314 |
| 64220 | 5740228 | 5740720 | 179314 |
| 64221 | 6542701 | 6545273 | 129235, 198920 |
| 64222 | 6554435 | 6556045 | 256806, 212734, 108590 |
| 64223 | 6603200 | 6604583 | 141485 |
| 64224 | 6613378 | 6617758 | 141485 |
| 64225 | 6619893 | 6620453 | |
| 64226 | 6654795 | 6657507 | |
| 64227 | 6658465 | 6660478 | 132530 |
| 64228 | 6679028 | 6679857 | 177294 |
| 64229 | 6699083 | 6702236 | 177294, 167858 |
| 64230 | 6725813 | 6726985 | 167858 |
| 64231 | 6756780 | 6758881 | 262943 |
| 64232 | 6770994 | 6772874 | 262943 |
| 64233 | 6810495 | 6810960 | 262943, 215067 |
| 64234 | 6830254 | 6831439 | 262503, 262943, 215067 |
| 64235 | 6914980 | 6919180 | 267532, 219200, 269871, |
| | | | 161939, 258315, 215067, |
| | | | 267047 |
| 64236 | 6922581 | 6924267 | 267532, 267047 |
| 64237 | 6924950 | 6926163 | |
| 64238 | 6938114 | 6940631 | 174327 |
| 64239 | 6940839 | 6942847 | 174327 |
| 64240 | 6945677 | 6947609 | 174326 |
| 64241 | 6963662 | 6964218 | |
| 64242 | 7001224 | 7001853 | |
| 64243 | 7016850 | 7019919 | 161944 |
| 64244 | 7035815 | 7036548 | |
| 64245 | 7038709 | 7040230 | |
| 64246 | 7059353 | 7060347 | |
| 64247 | 7067998 | 7068842 | |
| 64248 | 7070796 | 7071863 | |
| 64249 | 7080134 | 7083492 | 141505 |
| 64250 | 7122538 | 7124903 | 132535, 072778 |
| 64251 | 7136992 | 7138849 | 040633, 004975 |
| 64252 | 7140830 | 7143501 | 170296, 040633 |
| 64253 | 7144361 | 7147160 | 175826, 170296, 262526 |
| 64254 | 7153662 | 7156704 | 170291, 175826, 262302 |
| 64255 | 7161825 | 7165839 | 181885, 170291, 262302 |
| 64256 | 7166257 | 7167075 | 181885 |
| 64257 | 7183731 | 7185657 | 181856 |
| 64258 | 7197866 | 7198419 | 006047 |
| 64259 | 7199521 | 7200169 | |
| 64260 | 7209604 | 7212596 | 132507 |
| 64261 | 7217732 | 7219734 | 215041, 132522, 261915 |
| 64262 | 7231875 | 7233261 | 215041 |
| 64263 | 7253198 | 7256146 | 213859, 263171, 072818 |
| 64264 | 7283715 | 7284739 | 174292 |
| 64265 | 7297446 | 7298950 | 262481, 187838 |
| 64266 | 7306336 | 7308401 | 169992, 262481, 187838, |
| | | | 205544 |
| 64267 | 7338126 | 7340938 | 181284, 262624, 262880 |
| 64268 | 7343132 | 7344588 | 263301, 161958, 262880, |
| | | | 272884 |
| 64269 | 7348100 | 7349427 | 170175, 161958, 272884 |
| 64270 | 7359041 | 7360067 | 170175 |
| 64271 | 7370001 | 7370843 | 174282 |
| 64272 | 7382003 | 7383716 | 174282 |
| 64273 | 7386489 | 7388598 | 181222, 174282 |
| 64274 | 7461176 | 7462373 | 161955, 248871, 239697 |
| 64275 | 7463713 | 7466229 | 161956, 248871, 161955, |
| | | | 239697 |
| 64276 | 7475110 | 7477870 | 161960, 264772, 161956, |
| | | | 265500 |
| 64277 | 7482049 | 7484041 | 129226, 161960, 264772 |
| 64278 | 7485898 | 7488258 | 129255, 233223 |
| 64279 | 7516938 | 7519005 | 268503, 129214, 129245 |
| 64280 | 7529790 | 7531626 | 141504, 129214 |
| 64281 | 7534675 | 7535573 | 129214 |
| 64282 | 7588622 | 7592473 | 141499, 141510, 262251 |
| 64283 | 7620430 | 7620946 | 183914 |
| 64284 | 7736615 | 7742978 | 183914 |
| 64285 | 7743425 | 7749215 | 132510 |
| 64286 | 7759442 | 7762270 | 183011, 182224 |
| 64287 | 7788134 | 7789333 | 183011, 170004 |
| 64288 | 7818544 | 7819652 | 179859 |
| 64289 | 7834462 | 7835920 | 170037, 170043 |
| 64290 | 7893245 | 7893944 | |
| 64291 | 7919552 | 7921071 | 132518 |
| 64292 | 7922870 | 7923453 | 132518 |
| 64293 | 7935192 | 7935616 | |
| 64294 | 7962246 | 7963066 | |
| 64295 | 8020674 | 8024637 | 179111, 179148 |
| 64296 | 8028766 | 8029465 | |
| 64297 | 8054356 | 8060998 | 179094, 263620 |
| 64298 | 8065055 | 8067974 | 220205, 263620 |
| 64299 | 8076182 | 8077631 | 200463, 179029 |
| 64300 | 8079551 | 8080426 | 266824, 179029 |
| 64301 | 8089188 | 8091547 | 266638 |
| 64302 | 8092413 | 8093884 | 196544 |
| 64303 | 8113852 | 8114923 | 178999 |
| 64304 | 8123678 | 8128035 | 178977 |
| 64305 | 8140344 | 8141027 | 178971 |
| 64306 | 8150663 | 8153646 | 178921, 178971 |
| 64307 | 8191588 | 8192615 | 108961, 125434 |
| 64308 | 8198206 | 8199569 | 125434 |
| 64309 | 8279037 | 8280286 | 184619, 265749, 263809 |
| 64310 | 8285392 | 8287687 | 161970, 263809 |
| 64311 | 8288043 | 8288762 | |
| 64312 | 8323230 | 8324388 | 166579 |
| 64313 | 8333793 | 8335218 | 166579 |
| 64314 | 8338361 | 8340507 | 166579 |
| 64315 | 8380857 | 8381536 | 133026, 166579 |
| 64316 | 8435212 | 8436003 | 133026 |
| 64317 | 8445799 | 8447417 | 133026 |
| 64318 | 8533917 | 8535347 | 133026 |
| 64319 | 8615645 | 8616449 | |
| 64320 | 8648036 | 8649737 | 161973 |
| 64321 | 8924281 | 8926123 | 065320 |
| 64322 | 8959940 | 8961165 | 065320 |
| 64323 | 8964092 | 8965256 | 065320 |
| 64324 | 8983672 | 8985363 | 065320 |
| 64325 | 9007653 | 9008491 | 065320 |
| 64326 | 9073455 | 9074951 | 262966, 065320 |
| 64327 | 9109711 | 9110914 | 065320 |
| 64328 | 9120422 | 9121797 | 065320 |
| 64329 | 9143018 | 9144778 | 065320 |
| 64330 | 9201098 | 9202097 | 170310, 263708 |
| 64331 | 9263612 | 9265041 | 170310 |
| 64332 | 9292306 | 9292887 | 170310 |
| 64333 | 9478260 | 9479452 | 170310 |
| 64334 | 9547594 | 9549605 | 154914, 265349 |
| 64335 | 9551005 | 9552222 | 154914 |
| 64336 | 9580059 | 9581521 | 154914 |
| 64337 | 9745425 | 9746201 | 065325 |
| 64338 | 9989432 | 9989980 | 007237 |
| 64339 | 10523941 | 10524593 | 214970, 272975 |
| 64340 | 10599851 | 10602451 | 187824, 170222, 133028 |
| 64341 | 10627665 | 10629128 | 187824 |
| 64342 | 10631907 | 10635009 | 263400, 187824 |
| 64343 | 10640127 | 10641589 | 263400 |
| 64344 | 10647608 | 10648209 | 263400, 264016 |
| 64345 | 10659100 | 10661087 | 263400, 264016 |
| 64346 | 10702744 | 10703259 | 263400, 263429 |
| 64347 | 10747873 | 10749087 | |
| 64348 | 11511624 | 11512563 | 007174 |
| 64349 | 11608098 | 11608988 | 007174 |
| 64350 | 11899763 | 11901645 | 154957 |
| 64351 | 11923909 | 11925355 | 065559, 241185 |
| 64352 | 11926831 | 11928650 | 065559 |
| 64353 | 12886975 | 12888730 | 006740 |
| 64354 | 12893218 | 12894274 | 263707, 006740 |
| 64355 | 12920125 | 12922368 | 006744 |
| 64356 | 13307354 | 13308155 | |
| 64357 | 13309041 | 13309789 | |
| 64358 | 13313991 | 13315028 | |
| 64359 | 13318838 | 13319889 | |
| 64360 | 13323256 | 13324678 | |
| 64361 | 13628276 | 13629409 | |
| 64362 | 13660108 | 13660534 | 236088 |
| 64363 | 13679389 | 13679960 | 236088 |
| 64364 | 13717084 | 13717662 | 236088 |
| 64365 | 13909271 | 13910267 | 236088 |
| 64366 | 13914615 | 13915416 | 236088 |
| 64367 | 13956034 | 13957373 | 236088 |
| 64368 | 13972092 | 13973700 | 006695, 236088 |
| 64369 | 14108554 | 14110370 | 006695 |
| 64370 | 14111849 | 14113798 | 006695 |
| 64371 | 14200333 | 14201334 | 262786 |
| 64372 | 14202256 | 14208339 | 266709, 125430 |
| 64373 | 14210146 | 14213000 | 125430 |
| 64374 | 14224224 | 14225337 | 125430 |
| 64375 | 14228814 | 14229585 | 125430 |
| 64376 | 14233566 | 14235059 | 125430 |
| 64377 | 14275517 | 14279697 | 230647 |
| 64378 | 14373651 | 14374817 | |
| 64379 | 14639638 | 14643339 | |
| 64380 | 14659711 | 14660547 | |
| 64381 | 14663434 | 14664757 | |
| 64382 | 14778976 | 14779717 | 238212 |
| 64383 | 15336370 | 15337147 | |
| 64384 | 15337480 | 15338246 | |
| 64385 | 15339599 | 15340665 | 239704, 259024 |
| 64386 | 15553163 | 15553797 | 221926, 251537 |
| 64387 | 15901738 | 15904099 | 011295, 214941 |
| 64388 | 15930372 | 15932603 | 141027, 011295 |
| 64389 | 15940756 | 15941964 | 141027, 011295 |
| 64390 | 15943281 | 15944788 | 227782, 141027, 011295 |
| 64391 | 16117854 | 16119912 | 141027 |
| 64392 | 16120097 | 16121360 | 108474, 141027 |
| 64393 | 16158474 | 16159445 | 108474 |
| 64394 | 16188416 | 16191748 | 108474 |
| 64395 | 16199857 | 16202299 | 108474 |
| 64396 | 16216427 | 16217274 | 108474 |
| 64397 | 16255474 | 16257270 | 166582 |
| 64398 | 16281129 | 16282874 | |
| 64399 | 16283706 | 16285252 | 170315 |
| 64400 | 16310233 | 16310836 | |
| 64401 | 16341230 | 16344058 | 266651, 175061 |
| 64402 | 16438607 | 16440689 | |
| 64403 | 16496966 | 16497431 | |
| 64404 | 16556335 | 16557393 | 264765, 197566 |
| 64405 | 16944070 | 16945831 | |
| 64406 | 16945874 | 16947453 | 133030 |
| 64407 | 16954799 | 16956042 | 133030 |
| 64408 | 16980797 | 16983785 | 225442, 133030 |
| 64409 | 16990126 | 16991885 | 133030 |
| 64410 | 17054349 | 17056270 | 133030 |
| 64411 | 17058598 | 17060695 | 133030 |
| 64412 | 17108571 | 17110346 | 179598, 264187, 133030 |
| 64413 | 17138775 | 17141593 | 266498, 154803, 264187 |
| 64414 | 17183858 | 17185005 | 141030 |
| 64415 | 17206393 | 17207313 | 205309 |
| 64416 | 17290760 | 17291467 | |
| 64417 | 17308749 | 17312860 | |
| 64418 | 17318837 | 17323247 | |
| 64419 | 17343073 | 17344971 | |
| 64420 | 17346443 | 17351296 | |
| 64421 | 17380043 | 17383632 | 141026 |
| 64422 | 17395854 | 17400718 | 108551, 141026 |
| 64423 | 17432428 | 17433315 | 133027 |
| 64424 | 17438806 | 17442997 | 133027 |
| 64425 | 17462589 | 17466105 | 133027 |
| 64426 | 17471682 | 17472668 | 133027 |
| 64427 | 17472961 | 17476192 | 133027 |
| 64428 | 17483600 | 17486294 | 133027 |
| 64429 | 17493714 | 17496113 | 264666, 133027 |
| 64430 | 17584250 | 17587055 | 108557 |
| 64431 | 17596474 | 17598971 | 108557 |
| 64432 | 17614064 | 17614809 | 108557 |
| 64433 | 17713174 | 17714497 | 072310, 108557 |
| 64434 | 17722910 | 17724383 | 072310 |
| 64435 | 17726506 | 17729444 | 072310 |
| 64436 | 17733252 | 17734931 | 072310 |
| 64437 | 17738210 | 17742059 | 072310 |
| 64438 | 17742540 | 17744864 | |
| 64439 | 17763176 | 17764021 | 175662 |
| 64440 | 17780347 | 17781754 | 175662 |
| 64441 | 17803734 | 17804891 | 175662 |
| 64442 | 17824156 | 17826648 | 175662 |
| 64443 | 17838848 | 17839565 | 175662 |
| 64444 | 17875065 | 17876353 | 171962, 175662 |
| 64445 | 17886414 | 17886972 | 171953, 171962 |
| 64446 | 17941645 | 17944788 | 141034, 171953 |
| 64447 | 17990555 | 17992311 | 108591 |
| 64448 | 18018798 | 18019977 | 091536 |
| 64449 | 18020392 | 18021716 | 091536 |
| 64450 | 18063037 | 18063687 | 091536 |
| 64451 | 18084625 | 18085038 | 266677 |
| 64452 | 18085326 | 18089507 | 091542, 266677 |
| 64453 | 18106202 | 18107512 | 091542 |
| 64454 | 18128838 | 18129746 | 131899 |
| 64455 | 18160487 | 18162690 | 177731 |
| 64456 | 18163667 | 18165613 | 177427 |
| 64457 | 18217564 | 18219551 | 176994, 177302 |
| 64458 | 18259819 | 18261491 | 176974 |
| 64459 | 18265037 | 18267123 | 176974 |
| 64460 | 18761059 | 18762416 | 141127 |
| 64461 | 18770260 | 18771182 | 141127 |
| 64462 | 18822952 | 18825810 | 141127 |
| 64463 | 18883322 | 18886793 | 188522, 154025 |
| 64464 | 18890406 | 18894153 | 188522, 154025 |
| 64465 | 18903102 | 18905084 | 188522, 154025 |
| 64466 | 18905375 | 18909713 | 188522, 154025 |
| 64467 | 19140563 | 19141952 | 072134 |
| 64468 | 19241002 | 19242270 | 108641 |
| 64469 | 19248581 | 19251448 | 108641 |
| 64470 | 19264906 | 19266734 | 108641 |
| 64471 | 19280237 | 19282650 | 166484, 108641 |
| 64472 | 19410670 | 19411932 | 142494 |
| 64473 | 19417073 | 19418236 | 142494 |
| 64474 | 19429141 | 19430321 | 142494 |
| 64475 | 19436722 | 19438407 | 142494 |
| 64476 | 19441522 | 19442802 | 142494 |
| 64477 | 19453030 | 19453627 | 142494 |
| 64478 | 19548600 | 19553292 | 072210, 264932 |
| 64479 | 19553763 | 19555796 | 072210 |
| 64480 | 19555858 | 19556479 | 072210 |
| 64481 | 19559429 | 19560232 | 072210 |
| 64482 | 19560463 | 19561014 | 072210 |
| 64483 | 19563483 | 19564370 | 072210 |
| 64484 | 19574781 | 19576314 | 072210 |
| 64485 | 19607176 | 19607898 | 180638 |
| 64486 | 19621468 | 19622245 | 180638 |
| 64487 | 19622417 | 19622993 | 262681 |
| 64488 | 19623996 | 19624630 | 262681 |
| 64489 | 19630338 | 19632081 | |
| 64490 | 19651247 | 19652203 | 108602 |
| 64491 | 19655421 | 19657610 | |
| 64492 | 19669603 | 19670683 | |
| 64493 | 19769842 | 19771580 | 083290 |
| 64494 | 19806352 | 19809348 | 108599 |
| 64495 | 19843941 | 19844618 | 108599 |
| 64496 | 19858982 | 19859579 | 108599 |
| 64497 | 19861264 | 19861805 | 108599 |
| 64498 | 19880042 | 19882033 | 108599 |
| 64499 | 20059291 | 20060407 | 128487 |
| 64500 | 20811489 | 20812770 | 233098 |
| 64501 | 20932297 | 20933559 | 124422 |
| 64502 | 20944686 | 20947451 | 124422 |
| 64503 | 21029691 | 21031379 | 109016 |
| 64504 | 21064928 | 21066082 | 109016 |
| 64505 | 21116588 | 21118915 | 235530, 178307 |
| 64506 | 21155728 | 21157177 | 154035 |
| 64507 | 21178779 | 21179701 | |
| 64508 | 21187494 | 21193707 | 034152 |
| 64509 | 21219687 | 21220619 | |
| 64510 | 21414327 | 21415516 | |
| 64511 | 25571280 | 25572830 | |
| 64512 | 25574096 | 25575113 | |
| 64513 | 25592270 | 25592821 | |
| 64514 | 25620303 | 25622890 | 109046, 263583 |
| 64515 | 25658779 | 25661275 | 266313 |
| 64516 | 25666870 | 25667665 | 266313 |
| 64517 | 25675606 | 25676677 | |
| 64518 | 25679533 | 25681929 | 265683 |
| 64519 | 25689411 | 25690423 | |
| 64520 | 25782778 | 25784010 | 141068 |
| 64521 | 25787059 | 25787841 | 141068 |
| 64522 | 25821093 | 25822673 | 141068 |
| 64523 | 25867338 | 25868091 | 141068 |
| 64524 | 25878577 | 25880505 | 141068 |
| 64525 | 25885471 | 25886690 | 141068 |
| 64526 | 25935193 | 25935727 | 141068 |
| 64527 | 26127444 | 26128115 | 007171, 266202 |
| 64528 | 26132352 | 26133369 | 266202 |
| 64529 | 26172302 | 26173273 | 266202 |
| 64530 | 26187848 | 26190049 | 266202 |
| 64531 | 26219671 | 26220800 | 266202, 232859 |
| 64532 | 26368368 | 26369736 | 087095 |
| 64533 | 26384803 | 26385386 | 087095 |
| 64534 | 26460459 | 26461128 | 087095 |
| 64535 | 26578346 | 26579092 | |
| 64536 | 26585259 | 26586131 | 264486 |
| 64537 | 26609526 | 26610738 | 265480 |
| 64538 | 26651202 | 26651728 | 109084 |
| 64539 | 26661833 | 26664282 | 109079, 109083 |
| 64540 | 26672194 | 26675418 | 004142, 109079 |
| 64541 | 26683346 | 26685527 | 244045, 258924, 004142 |
| 64542 | 26694870 | 26698995 | 273171, 244045, 109072, |
| | | | 004139, 258924 |
| 64543 | 26725020 | 26726177 | 076351, 004139 |
| 64544 | 26731515 | 26733625 | 265254, 076351 |
| 64545 | 26880449 | 26881251 | 258472, 087111 |
| 64546 | 26897742 | 26898995 | 087111, 258472 |
| 64547 | 26971002 | 26973079 | 007202 |
| 64548 | 26988214 | 26990321 | 109111, 132581 |
| 64549 | 27024477 | 27026501 | 109111 |
| 64550 | 27037480 | 27038643 | 167525 |
| 64551 | 27046307 | 27048326 | 198242, 238423 |
| 64552 | 27051904 | 27056518 | 267729, 160602, 160606 |
| 64553 | 27069869 | 27074344 | 265474, 076604, 265073, |
| | | | 160602 |
| 64554 | 27134885 | 27135369 | 173065 |
| 64555 | 27139108 | 27139950 | 173065 |
| 64556 | 27168857 | 27170065 | 173065 |
| 64557 | 27181419 | 27182728 | 132591, 173065 |
| 64558 | 27223378 | 27225678 | 167536, 266642, 132589 |
| 64559 | 27229213 | 27230488 | 167536 |
| 64560 | 27235761 | 27236255 | 109118 |
| 64561 | 27264339 | 27264775 | 109118, 265845 |
| 64562 | 27275393 | 27279831 | 179761, 109118 |
| 64563 | 27318656 | 27319443 | 063015, 179761 |
| 64564 | 27319874 | 27321424 | 063015, 179761 |
| 64565 | 27369427 | 27371156 | 179761 |
| 64566 | 27372100 | 27373888 | 179761 |
| 64567 | 27434937 | 27436371 | 196535 |
| 64568 | 27459070 | 27461162 | 196535 |
| 64569 | 27475169 | 27477460 | 196535, 263709 |
| 64570 | 27480837 | 27484010 | 263709, 196535 |
| 64571 | 27484230 | 27484877 | 196535 |
| 64572 | 27485576 | 27486181 | 196535 |
| 64573 | 27493447 | 27493915 | 196535 |
| 64574 | 27502997 | 27508193 | 196535 |
| 64575 | 27564809 | 27566223 | |
| 64576 | 27567055 | 27568647 | |
| 64577 | 27618314 | 27622200 | 108256 |
| 64578 | 27716846 | 27718824 | 160551, 263719, 264808, |
| | | | 266111 |
| 64579 | 27777008 | 27777960 | 160551 |
| 64580 | 27882710 | 27883357 | |
| 64581 | 27884058 | 27884924 | |
| 64582 | 27892667 | 27896477 | 167543, 168792, 264031 |
| 64583 | 27899286 | 27900284 | 167543, 264031 |
| 64584 | 27901596 | 27902501 | 108262, 264031 |
| 64585 | 27915678 | 27917347 | 198720, 108262, 264031 |
| 64586 | 27940261 | 27941254 | 264031, 198720 |
| 64587 | 27966105 | 27966900 | 263370, 141298, 264031 |
| 64588 | 28071569 | 28072238 | 141298 |
| 64589 | 28087897 | 28088726 | 263657, 141298 |
| 64590 | 28246132 | 28246822 | 141298 |
| 64591 | 28255851 | 28258846 | 176927, 141298 |
| 64592 | 28439987 | 28440861 | 265394 |
| 64593 | 28443081 | 28444856 | 266919, 199071, 265394, |
| | | | 126653 |
| 64594 | 28583664 | 28584258 | 108578 |
| 64595 | 28589991 | 28592593 | 108578 |
| 64596 | 28663240 | 28664152 | |
| 64597 | 28671204 | 28672436 | 207132 |
| 64598 | 28705204 | 28707302 | 108582 |
| 64599 | 28777217 | 28778226 | 108582 |
| 64600 | 28803842 | 28805286 | 108587 |
| 64601 | 28926917 | 28928361 | 248121, 214719 |
| 64602 | 29150977 | 29152516 | 176390 |
| 64603 | 29158528 | 29159390 | 176208 |
| 64604 | 29232454 | 29234132 | 184060, 172171 |
| 64605 | 29298017 | 29298623 | 181481 |
| 64606 | 29379180 | 29380181 | 265798, 266865 |
| 64607 | 29394545 | 29395572 | 266865 |
| 64608 | 29421447 | 29423241 | 196712, 264107 |
| 64609 | 29596635 | 29597249 | 196712 |
| 64610 | 29600951 | 29602500 | 126861, 196712 |
| 64611 | 29752059 | 29753128 | 131242 |
| 64612 | 29802205 | 29803270 | 131242 |
| 64613 | 29814626 | 29816027 | 131242 |
| 64614 | 29816567 | 29817366 | 131242 |
| 64615 | 29826830 | 29827526 | 131242 |
| 64616 | 29875734 | 29877758 | |
| 64617 | 29885566 | 29890173 | 207614 |
| 64618 | 29891443 | 29893076 | |
| 64619 | 29894613 | 29896149 | |
| 64620 | 29897947 | 29899423 | 228768 |
| 64621 | 29907127 | 29909248 | |
| 64622 | 29922799 | 29925019 | 266877 |
| 64623 | 29925194 | 29926842 | 266877 |
| 64624 | 29958529 | 29959634 | 266877 |
| 64625 | 30081026 | 30082101 | |
| 64626 | 30130280 | 30132955 | |
| 64627 | 30134845 | 30135299 | |
| 64628 | 30168847 | 30170588 | |
| 64629 | 30185311 | 30186516 | 172301 |
| 64630 | 30227915 | 30229290 | 108651 |
| 64631 | 30334159 | 30335197 | 185158 |
| 64632 | 30450815 | 30452908 | |
| 64633 | 30468226 | 30470624 | 126858, 214708 |
| 64634 | 30667864 | 30669667 | 108666, 265794 |
| 64635 | 30676069 | 30678949 | 010244, 207928, 108666, |
| | | | 265794 |
| 64636 | 30771126 | 30773248 | 108671 |
| 64637 | 30813114 | 30814004 | 176749 |
| 64638 | 31121360 | 31122320 | 176658 |
| 64639 | 31149389 | 31150058 | 176658 |
| 64640 | 31203217 | 31204789 | 226377, 176658 |
| 64641 | 31254504 | 31255781 | 006042 |
| 64642 | 31841281 | 31841847 | 108684 |
| 64643 | 32561769 | 32563952 | |
| 64644 | 32575155 | 32577232 | |
| 64645 | 32578829 | 32580590 | |
| 64646 | 32581645 | 32583331 | 108691, 268024 |
| 64647 | 33287546 | 33289576 | 198783, 132141 |
| 64648 | 33306562 | 33308910 | 005156, 132141 |
| 64649 | 33348823 | 33350183 | 267618, 092871 |
| 64650 | 33389321 | 33392427 | 267618, 092871 |
| 64651 | 33401395 | 33403089 | 267618, 092871 |
| 64652 | 33408145 | 33410587 | 267618, 092871 |
| 64653 | 33412499 | 33417337 | 092871, 267618 |
| 64654 | 33445977 | 33447234 | 267618, 185379 |
| 64655 | 33468164 | 33469588 | 073536 |
| 64656 | 33477942 | 33478535 | 141161 |
| 64657 | 33568609 | 33573429 | 166750, 266947 |
| 64658 | 33581205 | 33581885 | 166750 |
| 64659 | 33759717 | 33760981 | 172123 |
| 64660 | 33894574 | 33895885 | 267321 |
| 64661 | 33904704 | 33906578 | 006125, 108733 |
| 64662 | 33913480 | 33915391 | 006125 |
| 64663 | 34039596 | 34040747 | 006125 |
| 64664 | 34043808 | 34045071 | 006125 |
| 64665 | 34110348 | 34111156 | 129270 |
| 64666 | 34135099 | 34137477 | 172660, 267578 |
| 64667 | 34216938 | 34217886 | |
| 64668 | 34239649 | 34241305 | 266972 |
| 64669 | 34242140 | 34242600 | 266972 |
| 64670 | 34299007 | 34301885 | |
| 64671 | 34302366 | 34303354 | |
| 64672 | 34304527 | 34309604 | 161573 |
| 64673 | 34327094 | 34329624 | 267566, 161574, 267596, |
| | | | 213494 |
| 64674 | 34333827 | 34334536 | 267566 |
| 64675 | 34842095 | 34843302 | 108278 |
| 64676 | 34889947 | 34892162 | 184886, 141140 |
| 64677 | 34899653 | 34902676 | 005955 |
| 64678 | 34940114 | 34940795 | 005955 |
| 64679 | 34947720 | 34949450 | 108272 |
| 64680 | 34957182 | 34959317 | 129282, 108272 |
| 64681 | 35305456 | 35307076 | 108270 |
| 64682 | 35381400 | 35382200 | 108270 |
| 64683 | 35388704 | 35389494 | 108270 |
| 64684 | 35424715 | 35425588 | |
| 64685 | 35464147 | 35464919 | 132142 |
| 64686 | 35504184 | 35504920 | 132142 |
| 64687 | 35596537 | 35597596 | 132142 |
| 64688 | 35715143 | 35717417 | 132142 |
| 64689 | 35759164 | 35759940 | 132142 |
| 64690 | 35766023 | 35768089 | 108264, 267613, 132142 |
| 64691 | 35836378 | 35837491 | 108264 |
| 64692 | 35847890 | 35851162 | 161326 |
| 64693 | 35861989 | 35862693 | 161326 |
| 64694 | 35968587 | 35970323 | 141141, 267542, 006114 |
| 64695 | 35989228 | 35989744 | 141141 |
| 64696 | 36003968 | 36004370 | 267668 |
| 64697 | 36031086 | 36033310 | 267668 |
| 64698 | 36035233 | 36036616 | 267668 |
| 64699 | 36043345 | 36044013 | 267668 |
| 64700 | 36057538 | 36060049 | 108753 |
| 64701 | 36068027 | 36069385 | 108753 |
| 64702 | 36072461 | 36074252 | 108753 |
| 64703 | 36076278 | 36079226 | 108753 |
| 64704 | 36101493 | 36106240 | 259549, 108753 |
| 64705 | 36183945 | 36184926 | |
| 64706 | 36506967 | 36508836 | 174111 |
| 64707 | 36713286 | 36714859 | 017373 |
| 64708 | 36740461 | 36742072 | 017373 |
| 64709 | 36761733 | 36763947 | 017373 |
| 64710 | 36769978 | 36770822 | |
| 64711 | 36830344 | 36831756 | 179294 |
| 64712 | 36832692 | 36833784 | |
| 64713 | 36849944 | 36850816 | |
| 64714 | 36856387 | 36862677 | 108292, 265930, 261005, |
| | | | 266040 |
| 64715 | 36886068 | 36887903 | 230055 |
| 64716 | 36903658 | 36906506 | 227450, 056661 |
| 64717 | 36907229 | 36909841 | 108294 |
| 64718 | 36954800 | 36956612 | 141720 |
| 64719 | 36980695 | 36982720 | 263791, 108296 |
| 64720 | 37008848 | 37010753 | 199293, 125691 |
| 64721 | 37023585 | 37024399 | |
| 64722 | 37024945 | 37029510 | 002834 |
| 64723 | 37029821 | 37030418 | 002834 |
| 64724 | 37035885 | 37037145 | 002834 |
| 64725 | 37041485 | 37042231 | 002834 |
| 64726 | 37053337 | 37055355 | 002834 |
| 64727 | 37056820 | 37057650 | 002834 |
| 64728 | 37308758 | 37311045 | 161381 |
| 64729 | 37353377 | 37354286 | 067191 |
| 64730 | 37355656 | 37357845 | 108298 |
| 64731 | 37394664 | 37395289 | 265460 |
| 64732 | 37404538 | 37405224 | 265460 |
| 64733 | 37412360 | 37413586 | |
| 64734 | 37481664 | 37482219 | 108306 |
| 64735 | 37556425 | 37558861 | 266469, 108306 |
| 64736 | 37606691 | 37608450 | 125686 |
| 64737 | 37609820 | 37610580 | |
| 64738 | 37617210 | 37619909 | 167258 |
| 64739 | 37773428 | 37774818 | |
| 64740 | 37792549 | 37794418 | 131748, 131771 |
| 64741 | 37843179 | 37845295 | 141736, 161395 |
| 64742 | 37851407 | 37852373 | 161395, 141736 |
| 64743 | 37855878 | 37857478 | 141736 |
| 64744 | 37858946 | 37860387 | 141736 |
| 64745 | 37861385 | 37862763 | 141736 |
| 64746 | 37885741 | 37887215 | 141741, 141736 |
| 64747 | 37893455 | 37897671 | 141738 |
| 64748 | 37905942 | 37907261 | |
| 64749 | 37909730 | 37911748 | |
| 64750 | 37984401 | 37985216 | 161405 |
| 64751 | 38020042 | 38020838 | 161405 |
| 64752 | 38060735 | 38061614 | 073605 |
| 64753 | 38077689 | 38087342 | 264968, 172057 |
| 64754 | 38089809 | 38091206 | 264968 |
| 64755 | 38095068 | 38097321 | 264968 |
| 64756 | 38099658 | 38101263 | 204913 |
| 64757 | 38106813 | 38107565 | |
| 64758 | 38108446 | 38110274 | |
| 64759 | 38136104 | 38138680 | 108344 |
| 64760 | 38188488 | 38189338 | 008838 |
| 64761 | 38194997 | 38195538 | 008838 |
| 64762 | 38218811 | 38220023 | 126351 |
| 64763 | 38231615 | 38232421 | 126351 |
| 64764 | 38253700 | 38258628 | 126368 |
| 64765 | 38263690 | 38265500 | |
| 64766 | 38266152 | 38271847 | |
| 64767 | 38277173 | 38280228 | 188895 |
| 64768 | 38295384 | 38297726 | 108349 |
| 64769 | 38333481 | 38334556 | 108352 |
| 64770 | 38375057 | 38376302 | 171475 |
| 64771 | 38407501 | 38408212 | 171475 |
| 64772 | 38443611 | 38444273 | 094804 |
| 64773 | 38465441 | 38466145 | 131759 |
| 64774 | 38467863 | 38472231 | 131759 |
| 64775 | 38472441 | 38475175 | 131759 |
| 64776 | 38482295 | 38483532 | 131759 |
| 64777 | 38486263 | 38489120 | 131759 |
| 64778 | 38497224 | 38503496 | 265666, 131759 |
| 64779 | 38507299 | 38510221 | 131759 |
| 64780 | 38518729 | 38520186 | 183153, 266208 |
| 64781 | 38574043 | 38574716 | 131747 |
| 64782 | 38598941 | 38602522 | 141753 |
| 64783 | 38602759 | 38605976 | 141753 |
| 64784 | 38606784 | 38610926 | 141753 |
| 64785 | 38632055 | 38632849 | 131746 |
| 64786 | 38666235 | 38666848 | |
| 64787 | 38674312 | 38675904 | 266088 |
| 64788 | 38689208 | 38690230 | |
| 64789 | 38693916 | 38695886 | |
| 64790 | 38698193 | 38700325 | |
| 64791 | 38703593 | 38709334 | |
| 64792 | 38754131 | 38755581 | |
| 64793 | 38803283 | 38805534 | 073584, 264058 |
| 64794 | 38974493 | 38976301 | 167920, 186395 |
| 64795 | 39010373 | 39010882 | 265359 |
| 64796 | 39056966 | 39060290 | |
| 64797 | 39070497 | 39073072 | |
| 64798 | 39108605 | 39112064 | 234477 |
| 64799 | 39112114 | 39114810 | 196859, 234477 |
| 64800 | 39572020 | 39573011 | 234859 |
| 64801 | 39801635 | 39802550 | 173801 |
| 64802 | 39821521 | 39823825 | 173801 |
| 64803 | 39834522 | 39835745 | 173801 |
| 64804 | 39843629 | 39846845 | 173812, 173801 |
| 64805 | 39853505 | 39853989 | 173801 |
| 64806 | 39928112 | 39930710 | 173801 |
| 64807 | 39933449 | 39934902 | 173801 |
| 64808 | 39941461 | 39943229 | 173801 |
| 64809 | 39967291 | 39968457 | 141696 |
| 64810 | 39991726 | 39992792 | 161594, 141698 |
| 64811 | 40020742 | 40022072 | 178502 |
| 64812 | 40025560 | 40026470 | 131473 |
| 64813 | 40050888 | 40052424 | 131473 |
| 64814 | 40064274 | 40064846 | 131473 |
| 64815 | 40070331 | 40071185 | 131473 |
| 64816 | 40074088 | 40076755 | 131473 |
| 64817 | 40086032 | 40086938 | 204815, 131473 |
| 64818 | 40094041 | 40094910 | 204815 |
| 64819 | 40117619 | 40119857 | 173786, 204815 |
| 64820 | 40124594 | 40125510 | 173786 |
| 64821 | 40141546 | 40142228 | 168259 |
| 64822 | 40154486 | 40155748 | 168259 |
| 64823 | 40168429 | 40170605 | 168259, 168256 |
| 64824 | 40171867 | 40172848 | 168259, 168256 |
| 64825 | 40175199 | 40177435 | 168256 |
| 64826 | 40201809 | 40203254 | 187595 |
| 64827 | 40274488 | 40275560 | 197723, 267261 |
| 64828 | 40287060 | 40288885 | 108774, 267261 |
| 64829 | 40305489 | 40307607 | 267658, 108774, 267261 |
| 64830 | 40335642 | 40336580 | 161610 |
| 64831 | 40400439 | 40401146 | 173757 |
| 64832 | 40421377 | 40421888 | 267758, 173757 |
| 64833 | 40427400 | 40429495 | 173757 |
| 64834 | 40439756 | 40441183 | 126561 |
| 64835 | 40463524 | 40464625 | 126561 |
| 64836 | 40476472 | 40478263 | 168610 |
| 64837 | 40480598 | 40481989 | 168610 |
| 64838 | 40530897 | 40531410 | 168610 |
| 64839 | 40538841 | 40541606 | 168610 |
| 64840 | 40549945 | 40551107 | 221020 |
| 64841 | 40573674 | 40575439 | 177469 |
| 64842 | 40580296 | 40580944 | |
| 64843 | 40610227 | 40612659 | 033627 |
| 64844 | 40615297 | 40616406 | 033627 |
| 64845 | 40636373 | 40636820 | 033627 |
| 64846 | 40670036 | 40673231 | 033627 |
| 64847 | 40679192 | 40680287 | |
| 64848 | 40681746 | 40682477 | |
| 64849 | 40682512 | 40683311 | |
| 64850 | 40683662 | 40684469 | |
| 64851 | 40687353 | 40689759 | 266929, 108784 |
| 64852 | 40692681 | 40694245 | 266929, 108784 |
| 64853 | 40696607 | 40697433 | 266929 |
| 64854 | 40705752 | 40707635 | 266962, 108786, 266929 |
| 64855 | 40713341 | 40716086 | 068120, 266929 |
| 64856 | 40718685 | 40720364 | 108788 |
| 64857 | 40729381 | 40730925 | 131470 |
| 64858 | 40760119 | 40762194 | 131462, 141699 |
| 64859 | 40810850 | 40812151 | 037042 |
| 64860 | 40818779 | 40820547 | 068137, 037042 |
| 64861 | 40827109 | 40832240 | 267042, 184451, 068137 |
| 64862 | 40895821 | 40897332 | 108799 |
| 64863 | 40924868 | 40926878 | 131475 |
| 64864 | 40949394 | 40951005 | 176563, 183978 |
| 64865 | 40961282 | 40961797 | 176563 |
| 64866 | 40975364 | 40976688 | 131467, 126581 |
| 64867 | 40984404 | 40986649 | 126581, 131467 |
| 64868 | 41001240 | 41002266 | 131480 |
| 64869 | 41007242 | 41007654 | 131471 |
| 64870 | 41016082 | 41017021 | |
| 64871 | 41017474 | 41019467 | 260105 |
| 64872 | 41030184 | 41030686 | 213373 |
| 64873 | 41038020 | 41039465 | 213373 |
| 64874 | 41045782 | 41047776 | 213373 |
| 64875 | 41052206 | 41054470 | 131482 |
| 64876 | 41055638 | 41056528 | 131482 |
| 64877 | 41070659 | 41071528 | |
| 64878 | 41080324 | 41081745 | |
| 64879 | 41115771 | 41117237 | 266967, 108825 |
| 64880 | 41132259 | 41134035 | 198863, 108825, 267060 |
| 64881 | 41149765 | 41151947 | 131469, 200127 |
| 64882 | 41158518 | 41159414 | 068079 |
| 64883 | 41173034 | 41174591 | 108828 |
| 64884 | 41176288 | 41177369 | 108830, 108828 |
| 64885 | 41192627 | 41193121 | |
| 64886 | 41220557 | 41221742 | 012048 |
| 64887 | 41236333 | 41237264 | 012048 |
| 64888 | 41277296 | 41278675 | 198496, 012048 |
| 64889 | 41321665 | 41324662 | 188554, 267340, 267002 |
| 64890 | 41392211 | 41393790 | |
| 64891 | 41437620 | 41439346 | |
| 64892 | 41444905 | 41447694 | 188825 |
| 64893 | 41465830 | 41466503 | 188825 |
| 64894 | 41476020 | 41477722 | 175906 |
| 64895 | 41478113 | 41480347 | 175906 |
| 64896 | 41486903 | 41487618 | |
| 64897 | 41506479 | 41507283 | |
| 64898 | 41521485 | 41522752 | 267151 |
| 64899 | 41526727 | 41527651 | 267151 |
| 64900 | 41533457 | 41535825 | |
| 64901 | 41543219 | 41544277 | |
| 64902 | 41553000 | 41553631 | 237888 |
| 64903 | 41557080 | 41557805 | |
| 64904 | 41560086 | 41562308 | 067596 |
| 64905 | 41621680 | 41622537 | 267747, 067596, 175832 |
| 64906 | 41622673 | 41623679 | 267747, 175832 |
| 64907 | 41797379 | 41799483 | 267253 |
| 64908 | 41801306 | 41801781 | |
| 64909 | 41849219 | 41851105 | 108861 |
| 64910 | 41854934 | 41857100 | 108861 |
| 64911 | 41892058 | 41892458 | 161647 |
| 64912 | 41909495 | 41910858 | 161647 |
| 64913 | 41916776 | 41917847 | |
| 64914 | 42071928 | 42072667 | 131096 |
| 64915 | 42078134 | 42080805 | 131096 |
| 64916 | 42081229 | 42084626 | 161653, 131096 |
| 64917 | 42091216 | 42092741 | 091947 |
| 64918 | 42143114 | 42144835 | 161654 |
| 64919 | 42147219 | 42149096 | 141349 |
| 64920 | 42174552 | 42175594 | 108840 |
| 64921 | 42185420 | 42187062 | 108840 |
| 64922 | 42187624 | 42188970 | 108840 |
| 64923 | 42200091 | 42201968 | 108840 |
| 64924 | 42214916 | 42215943 | |
| 64925 | 42218877 | 42219962 | 125319 |
| 64926 | 42263262 | 42265271 | 168591, 267080 |
| 64927 | 42275589 | 42278644 | 267394, 087152 |
| 64928 | 42295203 | 42300387 | 260793, 108312 |
| 64929 | 42300624 | 42301699 | 260793 |
| 64930 | 42401162 | 42403245 | 013306 |
| 64931 | 42404223 | 42404652 | |
| 64932 | 42408485 | 42409358 | 267211 |
| 64933 | 42422166 | 42423448 | 030582 |
| 64934 | 42579791 | 42581842 | 186566 |
| 64935 | 42664630 | 42665296 | |
| 64936 | 42766196 | 42768102 | 180329, 180336 |
| 64937 | 42785072 | 42786220 | 161692 |
| 64938 | 42900082 | 42900621 | 182963 |
| 64939 | 42976077 | 42977486 | 167131, 214447, 108883 |
| 64940 | 42993235 | 42994788 | 131095 |
| 64941 | 43017392 | 43018538 | 186185 |
| 64942 | 43056843 | 43060060 | 267788 |
| 64943 | 43093270 | 43094623 | |
| 64944 | 43095957 | 43097080 | |
| 64945 | 43098580 | 43099998 | |
| 64946 | 43127793 | 43129155 | 136448, 172992 |
| 64947 | 43137409 | 43139601 | 172992, 136448 |
| 64948 | 43169362 | 43169804 | 136448 |
| 64949 | 43170085 | 43171721 | 136448 |
| 64950 | 43206729 | 43207760 | 161714 |
| 64951 | 43209072 | 43210895 | 181513, 161714 |
| 64952 | 43212581 | 43214051 | 181513 |
| 64953 | 43214828 | 43215870 | 181513 |
| 64954 | 43221176 | 43222774 | 181513 |
| 64955 | 43223656 | 43228586 | 186834, 224505 |
| 64956 | 43237369 | 43240238 | 168517, 224505 |
| 64957 | 43247505 | 43250812 | 267288 |
| 64958 | 43274721 | 43275779 | 267121 |
| 64959 | 43278965 | 43279764 | 267121 |
| 64960 | 43324227 | 43325895 | 267278, 184922, 233483 |
| 64961 | 43343142 | 43343578 | 006062, 267278 |
| 64962 | 43350526 | 43352150 | 006062 |
| 64963 | 43354499 | 43355482 | 006062 |
| 64964 | 43361345 | 43362119 | 006062 |
| 64965 | 43367208 | 43367820 | 006062 |
| 64966 | 43369784 | 43372409 | 006062 |
| 64967 | 43383274 | 43386148 | 006062 |
| 64968 | 43387964 | 43391863 | 006062 |
| 64969 | 43393058 | 43394906 | 006062 |
| 64970 | 43448077 | 43450343 | 267446 |
| 64971 | 43502436 | 43503541 | 159314 |
| 64972 | 43782696 | 43783242 | 120088, 263715 |
| 64973 | 43971045 | 43972070 | 186868, 264589 |
| 64974 | 44004438 | 44005083 | 186868 |
| 64975 | 44019390 | 44020501 | 186868 |
| 64976 | 44267357 | 44272735 | 214401, 120071 |
| 64977 | 44279645 | 44280464 | 120071 |
| 64978 | 44343918 | 44345365 | 261575 |
| 64979 | 44835897 | 44836781 | |
| 64980 | 44847799 | 44850784 | 108379 |
| 64981 | 44913070 | 44914304 | 158955 |
| 64982 | 44928533 | 44929124 | 158955 |
| 64983 | 44999848 | 45001512 | 262633, 108433, 261886 |
| 64984 | 45061551 | 45062652 | 262879, 262633, 108433, |
| | | | 263142 |
| 64985 | 45144030 | 45145240 | 262879 |
| 64986 | 45176937 | 45177898 | 262879 |
| 64987 | 45265720 | 45267712 | 004897 |
| 64988 | 45301971 | 45303612 | |
| 64989 | 45306464 | 45309374 | |
| 64990 | 45329368 | 45330420 | |
| 64991 | 45330596 | 45332376 | 259753, 259207 |
| 64992 | 45342348 | 45345399 | 259753, 259207 |
| 64993 | 45382430 | 45383653 | 263293, 259753, 259207 |
| 64994 | 45391723 | 45395185 | 263293, 259753, 259207 |
| 64995 | 45400050 | 45402039 | 178852, 263293, 259753, |
| | | | 259207 |
| 64996 | 45697611 | 45698455 | 141279, 263766 |
| 64997 | 45726085 | 45728885 | 108424, 263766 |
| 64998 | 45770947 | 45772394 | 198933 |
| 64999 | 45908167 | 45909104 | 141294, 159111 |
| 65000 | 45917701 | 45919770 | 141295 |
| 65001 | 45939713 | 45940904 | 264243 |
| 65002 | 45972264 | 45974735 | 234494, 167182, 264920 |
| 65003 | 46018091 | 46020252 | 108439, 234494 |
| 65004 | 46022529 | 46024792 | 263798, 264019, 108439 |
| 65005 | 46025484 | 46027731 | 264019, 108439, 263798 |
| 65006 | 46029386 | 46029962 | 263798, 167183 |
| 65007 | 46101092 | 46104354 | 005243 |
| 65008 | 46114098 | 46115481 | 207947, 005243 |
| 65009 | 46124291 | 46127753 | 082641, 263412 |
| 65010 | 46127799 | 46129725 | 082641 |
| 65011 | 46130004 | 46131678 | 082641 |
| 65012 | 46145671 | 46146530 | |
| 65013 | 46177959 | 46179162 | 108468 |
| 65014 | 46184221 | 46185936 | 002919 |
| 65015 | 46204601 | 46205422 | |
| 65016 | 46230921 | 46232092 | 141293 |
| 65017 | 46238719 | 46241862 | 141293 |
| 65018 | 46342179 | 46343692 | 141293 |
| 65019 | 46662465 | 46663108 | 120093, 233101 |
| 65020 | 46868246 | 46869992 | 170703 |
| 65021 | 46871925 | 46874082 | 170703 |
| 65022 | 46876545 | 46877282 | 170703 |
| 65023 | 46882156 | 46882529 | 170703 |
| 65024 | 46907989 | 46909067 | 136436 |
| 65025 | 46948586 | 46949929 | |
| 65026 | 46968789 | 46971191 | 159199, 248278 |
| 65027 | 46975358 | 46975659 | 248278 |
| 65028 | 46985009 | 46987590 | 159202, 248278 |
| 65029 | 46992177 | 46993621 | 159202 |
| 65030 | 47021340 | 47022924 | 159210 |
| 65031 | 47049602 | 47050229 | |
| 65032 | 47183982 | 47184643 | |
| 65033 | 47268942 | 47271183 | |
| 65034 | 47436912 | 47440013 | 248714, 198740 |
| 65035 | 47491472 | 47492758 | 167085, 262039 |
| 65036 | 47591873 | 47593458 | 064300, 249906 |
| 65037 | 47628742 | 47629187 | 249906, 250310 |
| 65038 | 47645001 | 47646204 | 249906, 250310 |
| 65039 | 47646923 | 47647947 | 249906, 250310 |
| 65040 | 47688402 | 47688974 | 121067 |
| 65041 | 47723179 | 47724845 | 121067 |
| 65042 | 47754109 | 47755897 | 121067 |
| 65043 | 47784284 | 47786086 | 250751, 121073 |
| 65044 | 47807346 | 47808665 | 121104 |
| 65045 | 47822512 | 47823315 | 121104 |
| 65046 | 47840510 | 47841548 | 121104 |
| 65047 | 47841552 | 47841963 | 121104 |
| 65048 | 47865076 | 47866740 | 136504, 121104 |
| 65049 | 48105577 | 48106580 | |
| 65050 | 48132863 | 48133400 | 005884, 246640 |
| 65051 | 48172347 | 48173450 | 005882 |
| 65052 | 48178553 | 48180205 | 250282, 005882 |
| 65053 | 48222065 | 48222771 | 108819, 236472 |
| 65054 | 48224087 | 48229927 | 108819 |
| 65055 | 48254866 | 48256327 | 188662 |
| 65056 | 48276750 | 48278820 | 108821 |
| 65057 | 48295976 | 48296561 | |
| 65058 | 48349567 | 48351468 | 167105 |
| 65059 | 48358925 | 48359663 | 251179 |
| 65060 | 48366642 | 48368601 | |
| 65061 | 48422418 | 48424289 | 015532 |
| 65062 | 48448477 | 48450907 | 154920, 108826 |
| 65063 | 48473521 | 48475260 | 253102, 108829 |
| 65064 | 48502485 | 48504121 | 167107 |
| 65065 | 48506051 | 48507050 | 167107 |
| 65066 | 48517574 | 48518188 | 167107 |
| 65067 | 48536146 | 48536908 | 167107 |
| 65068 | 48543656 | 48544865 | 167107, 136457 |
| 65069 | 48553767 | 48554247 | |
| 65070 | 48555224 | 48557128 | 136444 |
| 65071 | 48559730 | 48560782 | 136444 |
| 65072 | 48592485 | 48593118 | 136449 |
| 65073 | 48624114 | 48625376 | 006282 |
| 65074 | 48705123 | 48705916 | 251239 |
| 65075 | 48711302 | 48720341 | 108846 |
| 65076 | 48737262 | 48741910 | 108846 |
| 65077 | 48744601 | 48746728 | 108846 |
| 65078 | 48747982 | 48748915 | 108846 |
| 65079 | 48750065 | 48751086 | 108846 |
| 65080 | 48752749 | 48753700 | 108846 |
| 65081 | 48761723 | 48765527 | 108846 |
| 65082 | 48768635 | 48773515 | 262967, 154945, 108846 |
| 65083 | 48783982 | 48786737 | 154945 |
| 65084 | 48796167 | 48798028 | 108848 |
| 65085 | 48842703 | 48844300 | 167117 |
| 65086 | 48863141 | 48863861 | |
| 65087 | 48882866 | 48884063 | |
| 65088 | 48929123 | 48931298 | |
| 65089 | 48940369 | 48941255 | 141232 |
| 65090 | 48941608 | 48945987 | 229980, 141232 |
| 65091 | 48961301 | 48962306 | 229980 |
| 65092 | 48966679 | 48967739 | 229980 |
| 65093 | 48968037 | 48969412 | 229980 |
| 65094 | 48981464 | 48983984 | 229980 |
| 65095 | 48986425 | 48988411 | 262006, 229980 |
| 65096 | 48992257 | 48993893 | |
| 65097 | 48996922 | 48997496 | |
| 65098 | 49008111 | 49011263 | |
| 65099 | 49012436 | 49013794 | 247011 |
| 65100 | 49017069 | 49018032 | 247011 |
| 65101 | 49020614 | 49022821 | 251665, 247011 |
| 65102 | 49026365 | 49028687 | |
| 65103 | 49171132 | 49171607 | 008294 |
| 65104 | 49175315 | 49176151 | 238815, 008294 |
| 65105 | 49180332 | 49180918 | 008294 |
| 65106 | 49189879 | 49190467 | 008294 |
| 65107 | 49195474 | 49196122 | 008294 |
| 65108 | 49196799 | 49200402 | 008294 |
| 65109 | 49229770 | 49232240 | 239672, 011052, 243678 |
| 65110 | 49242821 | 49245301 | 011052, 243678 |
| 65111 | 49309241 | 49310069 | 011258 |
| 65112 | 49336417 | 49338668 | 011260, 011258 |
| 65113 | 49500713 | 49501632 | |
| 65114 | 49512858 | 49513688 | 267452 |
| 65115 | 49636755 | 49637849 | |
| 65116 | 49722180 | 49723103 | 154975 |
| 65117 | 49780355 | 49781574 | 154975 |
| 65118 | 49784607 | 49785420 | 154975 |
| 65119 | 49787160 | 49788340 | 154975 |
| 65120 | 50310643 | 50311987 | |
| 65121 | 50321754 | 50322554 | |
| 65122 | 50496394 | 50497258 | 263317 |
| 65123 | 50901794 | 50902278 | |
| 65124 | 51539619 | 51540103 | |
| 65125 | 52001781 | 52002521 | |
| 65126 | 52958249 | 52960197 | |
| 65127 | 52977603 | 52979833 | 141198 |
| 65128 | 52980591 | 52981294 | 141198 |
| 65129 | 53045004 | 53047247 | 166263, 166260 |
| 65130 | 53140382 | 53140746 | 166263 |
| 65131 | 53234351 | 53234908 | 166263 |
| 65132 | 53315167 | 53316753 | |
| 65133 | 53341734 | 53343778 | 108924 |
| 65134 | 53344330 | 53346862 | 108924 |
| 65135 | 53350020 | 53352533 | 263096, 108924 |
| 65136 | 53353662 | 53354471 | 108924 |
| 65137 | 53360175 | 53365671 | 108924 |
| 65138 | 53379390 | 53380071 | 108924 |
| 65139 | 53484726 | 53486089 | 108960 |
| 65140 | 53487961 | 53489382 | 108960 |
| 65141 | 53497486 | 53499600 | 108960 |
| 65142 | 53509760 | 53512411 | |
| 65143 | 53522032 | 53523251 | |
| 65144 | 53523512 | 53524669 | |
| 65145 | 53529036 | 53530919 | |
| 65146 | 53532118 | 53533318 | 262395 |
| 65147 | 53535560 | 53537573 | 262395 |
| 65148 | 53572505 | 53574356 | 261873 |
| 65149 | 53608147 | 53609278 | 236319 |
| 65150 | 53617858 | 53618599 | 236319 |
| 65151 | 53660959 | 53662141 | |
| 65152 | 53727237 | 53728008 | |
| 65153 | 53737662 | 53738429 | |
| 65154 | 53770506 | 53771361 | |
| 65155 | 53803660 | 53804479 | 166292 |
| 65156 | 53807712 | 53810617 | 166292 |
| 65157 | 53823789 | 53824394 | |
| 65158 | 53824519 | 53825018 | |
| 65159 | 53828176 | 53829526 | 141179 |
| 65160 | 53839317 | 53840377 | 141179 |
| 65161 | 53891406 | 53892271 | 141179 |
| 65162 | 54185949 | 54186549 | |
| 65163 | 54219703 | 54220353 | 153930 |
| 65164 | 54225584 | 54226524 | 153930 |
| 65165 | 54226911 | 54229144 | 153930 |
| 65166 | 54896907 | 54897735 | 214226 |
| 65167 | 54900038 | 54900625 | 214226 |
| 65168 | 54910175 | 54912159 | 153933, 214226 |
| 65169 | 54945311 | 54945834 | 153933 |
| 65170 | 54987050 | 54988257 | 121060 |
| 65171 | 54989019 | 54994139 | 121060 |
| 65172 | 55015052 | 55015618 | 121058 |
| 65173 | 55037678 | 55038724 | 121058 |
| 65174 | 55055182 | 55055758 | 121064 |
| 65175 | 55112503 | 55114096 | |
| 65176 | 55131364 | 55132090 | |
| 65177 | 55150913 | 55151581 | |
| 65178 | 55161685 | 55164249 | 121057, 263004 |
| 65179 | 55185692 | 55187379 | 121057 |
| 65180 | 55332919 | 55334964 | 153944 |
| 65181 | 55356032 | 55356594 | 153944 |
| 65182 | 55447466 | 55448093 | 153944 |
| 65183 | 55449494 | 55450935 | 153944 |
| 65184 | 55454500 | 55455016 | 153944 |
| 65185 | 55535685 | 55537180 | 153944 |
| 65186 | 55593484 | 55597255 | 153944 |
| 65187 | 55599691 | 55603592 | 266100, 153944 |
| 65188 | 55608632 | 55610008 | 153944 |
| 65189 | 55910338 | 55911280 | 265542 |
| 65190 | 55926436 | 55928360 | 181610 |
| 65191 | 55969702 | 55971357 | 180891 |
| 65192 | 55979910 | 55981030 | 180891 |
| 65193 | 56024268 | 56024884 | 180891 |
| 65194 | 56025956 | 56027037 | 180891 |
| 65195 | 56031747 | 56033206 | 180891 |
| 65196 | 56052332 | 56052990 | 136451 |
| 65197 | 56064161 | 56066628 | 264112, 266086, 136451 |
| 65198 | 56083222 | 56085428 | 136450 |
| 65199 | 56159927 | 56162422 | 264364, 266290 |
| 65200 | 56295817 | 56297528 | 167419, 011143 |
| 65201 | 56428740 | 56430885 | 108375, 213246, 265148 |
| 65202 | 56441827 | 56442850 | 265148, 108375 |
| 65203 | 56458246 | 56459005 | 265148, 108375 |
| 65204 | 56461273 | 56462137 | 265148, 108375 |
| 65205 | 56468629 | 56469309 | 265148, 108375 |
| 65206 | 56490277 | 56492429 | 265148, 108375 |
| 65207 | 56494057 | 56495535 | 108375 |
| 65208 | 56583731 | 56586083 | 108389 |
| 65209 | 56591258 | 56592938 | 108389 |
| 65210 | 56594179 | 56597371 | 264672, 108389 |
| 65211 | 56612072 | 56613490 | 108387, 264672 |
| 65212 | 56654000 | 56655330 | 121101 |
| 65213 | 56707941 | 56710224 | 212195, 121101 |
| 65214 | 56716884 | 56718138 | 121101 |
| 65215 | 56736045 | 56737197 | 202077, 121101 |
| 65216 | 56769174 | 56771135 | 108384, 121101 |
| 65217 | 56818392 | 56818988 | |
| 65218 | 56832864 | 56833655 | 175175 |
| 65219 | 56883209 | 56884107 | 175175 |
| 65220 | 56990624 | 56992062 | 175175 |
| 65221 | 57068498 | 57071592 | 108395 |
| 65222 | 57078835 | 57079372 | 108395 |
| 65223 | 57081509 | 57082780 | 108395 |
| 65224 | 57086074 | 57086464 | 108395 |
| 65225 | 57183519 | 57184770 | 224738, 108395 |
| 65226 | 57231888 | 57233032 | 068489, 182628 |
| 65227 | 57287044 | 57288264 | 265303, 167447 |
| 65228 | 57297726 | 57298950 | 153982 |
| 65229 | 57374047 | 57375108 | |
| 65230 | 57403745 | 57411077 | 175155 |
| 65231 | 57434180 | 57436226 | 175155 |
| 65232 | 57442271 | 57446467 | 263857, 175155 |
| 65233 | 57448814 | 57449776 | 175155 |
| 65234 | 57498029 | 57503607 | |
| 65235 | 57503718 | 57513481 | 265313 |
| 65236 | 57516655 | 57519569 | 265313 |
| 65237 | 57542244 | 57543568 | 265313 |
| 65238 | 57591574 | 57592286 | 265313 |
| 65239 | 57598616 | 57599411 | 265313 |
| 65240 | 57642522 | 57643730 | 108406 |
| 65241 | 57694516 | 57698725 | 141367 |
| 65242 | 57783831 | 57786560 | 062716, 141378 |
| 65243 | 57803027 | 57803493 | 062716 |
| 65244 | 57806672 | 57807091 | 062716 |
| 65245 | 57827120 | 57835454 | 062716 |
| 65246 | 57859885 | 57865585 | 267637, 062716 |
| 65247 | 57904938 | 57909520 | 062716 |
| 65248 | 57910249 | 57910847 | 062716 |
| 65249 | 57913102 | 57919310 | 199004, 062716 |
| 65250 | 57919360 | 57927419 | 201524, 062716 |
| 65251 | 57928579 | 57932570 | |
| 65252 | 57932684 | 57934608 | |
| 65253 | 57969304 | 57971504 | 108443, 108423 |
| 65254 | 58041025 | 58042949 | 267302, 189050, 267318, |
| | | | 267104 |
| 65255 | 58114320 | 58114978 | |
| 65256 | 58155430 | 58156594 | 068097 |
| 65257 | 58219966 | 58220993 | |
| 65258 | 58379616 | 58380484 | 170832 |
| 65259 | 58402779 | 58403907 | 170832 |
| 65260 | 58433092 | 58433880 | 170832 |
| 65261 | 58450029 | 58450829 | 170832 |
| 65262 | 58467541 | 58470822 | 141371, 170832 |
| 65263 | 58498479 | 58499585 | 170832, 141371 |
| 65264 | 58602370 | 58604543 | 259349, 062725 |
| 65265 | 58637220 | 58637825 | |
| 65266 | 58676678 | 58679800 | 170836 |
| 65267 | 58682149 | 58682807 | 170836 |
| 65268 | 58719178 | 58719633 | 170836 |
| 65269 | 58754520 | 58755984 | 141376 |
| 65270 | 58807294 | 58808186 | 141376 |
| 65271 | 59142344 | 59143495 | 267207, 141376 |
| 65272 | 59153590 | 59154674 | 141376 |
| 65273 | 59278483 | 59279124 | 141376 |
| 65274 | 59413213 | 59414207 | 141376 |
| 65275 | 59487994 | 59490741 | 187013, 267280 |
| 65276 | 59566492 | 59567300 | |
| 65277 | 59940198 | 59941805 | 136492 |
| 65278 | 60004271 | 60005722 | 108506 |
| 65279 | 60107577 | 60107984 | 108510 |
| 65280 | 60141597 | 60143927 | 108510 |
| 65281 | 60167415 | 60168121 | |
| 65282 | 60169914 | 60172079 | |
| 65283 | 60178517 | 60179469 | |
| 65284 | 60266004 | 60266546 | |
| 65285 | 60555634 | 60556309 | 146872 |
| 65286 | 60729511 | 60730823 | 011028 |
| 65287 | 60780463 | 60781982 | 265702, 173838 |
| 65288 | 60896824 | 60897717 | 265000 |
| 65289 | 61043001 | 61044514 | 266411, 263931 |
| 65290 | 61522732 | 61524665 | 008283 |
| 65291 | 61626741 | 61628929 | 136485 |
| 65292 | 61677388 | 61679885 | 136463 |
| 65293 | 61698779 | 61701092 | 198909 |
| 65294 | 61758723 | 61759214 | 198909 |
| 65295 | 61818023 | 61820311 | 266173, 125695 |
| 65296 | 61849838 | 61852820 | 198231, 108588 |
| 65297 | 61903559 | 61906026 | 087191, 108592 |
| 65298 | 61915879 | 61916294 | 108604 |
| 65299 | 61918759 | 61921229 | 108604 |
| 65300 | 61926302 | 61926911 | 240280 |
| 65301 | 62133686 | 62134454 | 178607 |
| 65302 | 62134775 | 62136345 | 178607 |
| 65303 | 62151195 | 62153623 | 178607 |
| 65304 | 62158431 | 62163553 | 178607 |
| 65305 | 62191997 | 62194462 | 178607 |
| 65306 | 62205273 | 62207834 | 178607 |
| 65307 | 62221947 | 62226578 | 199753, 266402, 136478 |
| 65308 | 62227311 | 62228296 | 136478 |
| 65309 | 62233238 | 62234003 | 136478 |
| 65310 | 62255168 | 62256055 | 136478 |
| 65311 | 62263821 | 62265326 | 136478 |
| 65312 | 62337258 | 62337628 | 136478 |
| 65313 | 62339214 | 62341397 | 136478 |
| 65314 | 62492424 | 62494626 | 256525 |
| 65315 | 62501039 | 62503934 | 258890, 108654 |
| 65316 | 62530933 | 62531510 | 258890 |
| 65317 | 62657610 | 62658841 | 108854 |
| 65318 | 62700237 | 62701396 | |
| 65319 | 62701980 | 62704173 | |
| 65320 | 62737135 | 62737626 | |
| 65321 | 62970463 | 62972894 | 214174 |
| 65322 | 62988376 | 62989304 | |
| 65323 | 63009953 | 63010352 | 120063 |
| 65324 | 63049893 | 63055229 | 120063 |
| 65325 | 63057517 | 63061876 | |
| 65326 | 63070754 | 63071470 | |
| 65327 | 63083724 | 63084287 | |
| 65328 | 63087853 | 63089674 | |
| 65329 | 63095006 | 63097746 | 263470 |
| 65330 | 63118437 | 63120454 | |
| 65331 | 63126313 | 63131019 | |
| 65332 | 63132519 | 63133730 | 108370 |
| 65333 | 63150966 | 63151699 | 108370 |
| 65334 | 63186864 | 63191636 | 108370 |
| 65335 | 63542683 | 63544020 | 266076, 168646 |
| 65336 | 63555854 | 63558351 | 168646, 266076 |
| 65337 | 63746690 | 63747260 | 154240 |
| 65338 | 63779896 | 63780589 | 154240 |
| 65339 | 63781101 | 63781811 | 154240 |
| 65340 | 64223897 | 64224891 | 091583 |
| 65341 | 64225116 | 64226561 | 091583 |
| 65342 | 64228931 | 64229740 | 091583 |
| 65343 | 64231421 | 64232124 | 091583 |
| 65344 | 64271728 | 64273146 | |
| 65345 | 64297711 | 64301301 | 154229 |
| 65346 | 64320708 | 64321166 | 154229 |
| 65347 | 64337559 | 64338128 | 154229 |
| 65348 | 64339174 | 64340929 | 154229 |
| 65349 | 64344198 | 64346039 | 154229 |
| 65350 | 64411280 | 64412375 | 154229, 264630 |
| 65351 | 64413264 | 64413838 | 154229 |
| 65352 | 64417956 | 64418572 | 154229 |
| 65353 | 64447363 | 64448530 | 154229 |
| 65354 | 64455271 | 64457315 | 154229 |
| 65355 | 64461845 | 64465655 | 154229 |
| 65356 | 64499073 | 64499747 | 154229 |
| 65357 | 64502767 | 64506004 | 154229 |
| 65358 | 64513170 | 64514713 | 154229 |
| 65359 | 64657230 | 64658146 | 154229 |
| 65360 | 64900014 | 64901998 | |
| 65361 | 64947530 | 64949075 | |
| 65362 | 65091132 | 65092070 | 198265 |
| 65363 | 65146710 | 65148411 | 198265 |
| 65364 | 65174600 | 65175165 | 198265 |
| 65365 | 65240353 | 65243497 | 266473, 198265 |
| 65366 | 65256236 | 65257102 | |
| 65367 | 65276022 | 65276974 | |
| 65368 | 65285457 | 65286111 | |
| 65369 | 65360369 | 65363087 | 197170 |
| 65370 | 65373146 | 65375852 | 154217 |
| 65371 | 65386358 | 65387587 | 154217 |
| 65372 | 65397892 | 65399187 | 154217 |
| 65373 | 65416789 | 65419959 | 154217 |
| 65374 | 65483619 | 65484835 | 154217 |
| 65375 | 65524875 | 65525604 | 154217 |
| 65376 | 65713076 | 65715030 | 130935 |
| 65377 | 65775085 | 65775871 | |
| 65378 | 65820853 | 65822522 | 171634 |
| 65379 | 65988481 | 65991727 | 266176, 186665 |
| 65380 | 66015478 | 66017201 | |
| 65381 | 66031228 | 66032665 | 182481 |
| 65382 | 66097426 | 66098578 | 237854, 265055 |
| 65383 | 66201342 | 66202462 | |
| 65384 | 66243244 | 66245174 | 196704, 265100 |
| 65385 | 66287174 | 66288594 | 108932, 141337 |
| 65386 | 66373272 | 66375563 | 141337 |
| 65387 | 66378856 | 66381626 | 141337 |
| 65388 | 66387229 | 66388204 | 141337 |
| 65389 | 66452783 | 66454614 | 070540, 267009 |
| 65390 | 66470270 | 66470956 | 267009 |
| 65391 | 66507268 | 66509700 | 108946, 267009 |
| 65392 | 66527229 | 66528313 | 108946 |
| 65393 | 66575319 | 66577456 | 108950, 267461 |
| 65394 | 66580853 | 66581579 | 108950 |
| 65395 | 66581638 | 66582297 | 108950 |
| 65396 | 66591272 | 66593016 | 267659, 108950 |
| 65397 | 66593819 | 66598284 | 108950, 267659 |
| 65398 | 66609790 | 66610547 | 267659 |
| 65399 | 66657752 | 66658747 | 267659 |
| 65400 | 66755077 | 66756529 | 267659 |
| 65401 | 66788859 | 66791626 | 267250 |
| 65402 | 66815563 | 66816264 | |
| 65403 | 66816593 | 66818514 | |
| 65404 | 66820846 | 66821238 | |
| 65405 | 66839525 | 66840103 | |
| 65406 | 66934020 | 66934806 | 141338 |
| 65407 | 67043360 | 67043974 | 154258 |
| 65408 | 67117642 | 67119255 | 154262 |
| 65409 | 67126816 | 67128175 | 154262 |
| 65410 | 67136425 | 67139187 | 154262 |
| 65411 | 67264106 | 67265941 | 154265 |
| 65412 | 67321595 | 67324354 | 154265 |
| 65413 | 67386986 | 67387826 | |
| 65414 | 67602904 | 67604706 | 227517 |
| 65415 | 67757415 | 67759053 | 227517 |
| 65416 | 67759644 | 67761477 | 227517 |
| 65417 | 68683382 | 68684093 | |
| 65418 | 68859237 | 68860893 | |
| 65419 | 68867254 | 68868317 | |
| 65420 | 68934283 | 68935214 | |
| 65421 | 69038813 | 69039941 | |
| 65422 | 69081248 | 69081897 | |
| 65423 | 69159294 | 69160261 | 260785 |
| 65424 | 70026378 | 70027082 | 256124, 228639 |
| 65425 | 70072063 | 70072644 | 226101, 234899 |
| 65426 | 70075590 | 70076373 | 226101, 234899 |
| 65427 | 70088582 | 70089432 | 226101, 234899 |
| 65428 | 70115248 | 70116985 | 234899 |
| 65429 | 70122613 | 70123892 | 234899 |
| 65430 | 70132766 | 70133901 | 234899 |
| 65431 | 70147410 | 70148548 | 234899 |
| 65432 | 70179220 | 70179968 | 234899 |
| 65433 | 70334996 | 70335846 | 227036 |
| 65434 | 70417217 | 70419844 | 227036 |
| 65435 | 70441026 | 70441973 | 227036 |
| 65436 | 70679499 | 70681016 | 133195 |
| 65437 | 71025971 | 71027708 | 133195 |
| 65438 | 71088180 | 71089181 | 133195 |
| 65439 | 71187535 | 71189940 | 166685, 264860 |
| 65440 | 71197100 | 71198054 | 166685 |
| 65441 | 71227090 | 71229730 | 141219, 133193 |
| 65442 | 71284558 | 71285942 | 179604 |
| 65443 | 71286758 | 71290660 | 179604 |
| 65444 | 71294348 | 71295122 | 179604 |
| 65445 | 71300821 | 71302059 | 179604 |
| 65446 | 71303776 | 71305015 | 179604 |
| 65447 | 71305353 | 71309041 | 179604 |
| 65448 | 71653533 | 71654278 | |
| 65449 | 71714737 | 71715598 | |
| 65450 | 71743425 | 71744344 | 263574 |
| 65451 | 71765514 | 71767189 | 177338 |
| 65452 | 71791159 | 71795953 | 234721, 177338 |
| 65453 | 71796255 | 71796942 | 234721, 177338 |
| 65454 | 72188882 | 72189921 | |
| 65455 | 72199446 | 72201077 | 172809 |
| 65456 | 72206319 | 72206920 | 172809, 246731 |
| 65457 | 72208283 | 72209952 | 141540, 246731 |
| 65458 | 72369633 | 72370580 | |
| 65459 | 72375434 | 72376159 | |
| 65460 | 72422652 | 72424332 | 170412 |
| 65461 | 72425506 | 72430409 | 170412 |
| 65462 | 72438581 | 72441371 | 170412 |
| 65463 | 72442710 | 72444268 | 170412 |
| 65464 | 72449121 | 72451422 | |
| 65465 | 72732352 | 72734113 | 172794 |
| 65466 | 72744402 | 72748903 | 264624, 109062, 266036 |
| 65467 | 72753637 | 72757490 | 109062 |
| 65468 | 72759851 | 72760546 | 109062 |
| 65469 | 72762960 | 72767762 | 109065, 109062 |
| 65470 | 72769181 | 72770631 | 109065 |
| 65471 | 72771629 | 72773461 | 109066, 109065 |
| 65472 | 72868494 | 72870521 | 161513 |
| 65473 | 72889386 | 72890249 | 172782 |
| 65474 | 72977850 | 72978792 | |
| 65475 | 73007836 | 73009573 | 167862 |
| 65476 | 73029678 | 73032048 | 180901 |
| 65477 | 73042272 | 73044248 | 167863, 180901 |
| 65478 | 73072819 | 73076154 | 232724 |
| 65479 | 73079825 | 73080829 | |
| 65480 | 73081667 | 73082149 | |
| 65481 | 73092204 | 73092764 | 170190 |
| 65482 | 73105869 | 73106801 | 125449 |
| 65483 | 73119765 | 73121696 | 125449 |
| 65484 | 73126520 | 73128221 | 125458 |
| 65485 | 73148908 | 73150895 | 189159 |
| 65486 | 73177509 | 73179738 | 188612 |
| 65487 | 73200398 | 73202528 | 125450 |
| 65488 | 73256713 | 73258882 | 125445, 125447 |
| 65489 | 73265884 | 73268031 | 263843, 125457 |
| 65490 | 73284817 | 73286607 | 125454 |
| 65491 | 73304669 | 73306016 | |
| 65492 | 73389521 | 73390801 | 265342, 177885 |
| 65493 | 73400171 | 73402599 | 264511, 177885 |
| 65494 | 73422344 | 73422988 | |
| 65495 | 73451524 | 73453714 | 177728 |
| 65496 | 73510756 | 73513060 | 182173, 177303 |
| 65497 | 73521530 | 73522600 | 073350 |
| 65498 | 73552944 | 73554114 | 073350 |
| 65499 | 73557898 | 73558505 | 073350 |
| 65500 | 73584575 | 73586171 | 266714 |
| 65501 | 73606080 | 73607650 | 266714 |
| 65502 | 73641607 | 73643198 | 259120, 108469 |
| 65503 | 73662373 | 73664247 | 161526, 108469 |
| 65504 | 73749409 | 73751142 | 132470, 108479 |
| 65505 | 73760082 | 73761789 | 108479 |
| 65506 | 73765520 | 73766291 | |
| 65507 | 73772164 | 73773039 | 132475 |
| 65508 | 73774599 | 73776327 | 132475 |
| 65509 | 73779093 | 73782825 | 132478, 263565, 132475 |
| 65510 | 73840491 | 73841704 | 092929 |
| 65511 | 73846576 | 73848308 | 132471 |
| 65512 | 73848976 | 73852988 | 132471 |
| 65513 | 73868371 | 73869682 | |
| 65514 | 73871496 | 73875236 | 267801, 132481 |
| 65515 | 73891387 | 73893356 | 267342, 141569 |
| 65516 | 73900106 | 73902215 | 267426, 204316 |
| 65517 | 73936383 | 73937572 | 188878 |
| 65518 | 73971794 | 73973162 | 161533 |
| 65519 | 73974380 | 73976535 | 261408, 257949, 161533 |
| 65520 | 73977772 | 73978793 | 261408, 257949 |
| 65521 | 73989133 | 73989988 | 261408, 257949 |
| 65522 | 73992709 | 73995163 | 261408, 257949 |
| 65523 | 73995899 | 73996481 | 261408, 257949 |
| 65524 | 73999222 | 73999838 | 250506, 261408 |
| 65525 | 74067819 | 74069455 | 186919, 167881 |
| 65526 | 74098943 | 74100736 | 182473 |
| 65527 | 74143606 | 74144218 | 267128, 141576 |
| 65528 | 74178098 | 74178700 | 141576 |
| 65529 | 74192776 | 74193127 | 141576 |
| 65530 | 74200217 | 74200774 | 141576 |
| 65531 | 74236677 | 74237280 | |
| 65532 | 74247242 | 74249115 | |
| 65533 | 74254470 | 74256602 | |
| 65534 | 74258763 | 74259486 | |
| 65535 | 74260114 | 74263133 | 185262 |
| 65536 | 74264217 | 74264654 | 185262 |
| 65537 | 74347641 | 74350613 | 161542 |
| 65538 | 74365829 | 74369369 | 161542 |
| 65539 | 74378410 | 74382231 | 161542, 176170 |
| 65540 | 74442600 | 74444560 | 175931 |
| 65541 | 74448407 | 74449468 | 129673, 175931 |
| 65542 | 74492520 | 74492930 | 129667 |
| 65543 | 74493615 | 74497951 | 129667 |
| 65544 | 74520740 | 74521320 | |
| 65545 | 74546284 | 74548438 | 272386, 161544, 267543, |
| | | | 214140, 267546 |
| 65546 | 74552451 | 74555050 | 163597, 267546 |
| 65547 | 74561298 | 74562326 | 163597, 070731 |
| 65548 | 74581758 | 74582572 | 070731 |
| 65549 | 74584129 | 74584927 | |
| 65550 | 74592660 | 74593853 | |
| 65551 | 74721637 | 74723944 | 181038, 070495 |
| 65552 | 74731762 | 74734977 | 092931, 207556, 161547, |
| | | | 267168 |
| 65553 | 74998167 | 74998651 | |
| 65554 | 75084108 | 75085838 | 234912, 129657 |
| 65555 | 75117773 | 75119006 | 129657 |
| 65556 | 75135811 | 75137878 | 129657 |
| 65557 | 75141741 | 75142469 | 129657 |
| 65558 | 75142972 | 75143644 | 129657 |
| 65559 | 75251375 | 75251968 | |
| 65560 | 75276694 | 75279052 | 263718, 184640 |
| 65561 | 75280816 | 75285354 | 184640 |
| 65562 | 75302290 | 75304269 | 184640 |
| 65563 | 75311535 | 75313186 | 184640 |
| 65564 | 75318290 | 75322763 | 184640 |
| 65565 | 75323064 | 75324196 | 184640 |
| 65566 | 75329061 | 75330088 | 184640 |
| 65567 | 75350038 | 75351693 | 184640 |
| 65568 | 75379805 | 75381177 | 184640 |
| 65569 | 75381666 | 75383007 | 184640 |
| 65570 | 75383780 | 75386568 | 184640 |
| 65571 | 75386579 | 75389836 | 184640 |
| 65572 | 75416481 | 75421256 | 184640 |
| 65573 | 75422823 | 75424787 | 184640 |
| 65574 | 75425506 | 75427261 | 184640 |
| 65575 | 75445659 | 75448660 | 184640 |
| 65576 | 75449563 | 75451698 | 184640 |
| 65577 | 75832404 | 75833201 | |
| 65578 | 75953612 | 75955872 | |
| 65579 | 76147567 | 76148021 | 187997 |
| 65580 | 76163964 | 76165816 | 108639 |
| 65581 | 76169935 | 76172038 | 167900 |
| 65582 | 76180327 | 76181597 | 167900 |
| 65583 | 76182548 | 76184687 | 183077, 167900 |
| 65584 | 76210110 | 76210566 | 268310, 089685 |
| 65585 | 76249934 | 76250925 | 267676 |
| 65586 | 76261767 | 76262214 | 204277 |
| 65587 | 76287927 | 76288780 | |
| 65588 | 76309562 | 76313291 | 267737 |
| 65589 | 76326756 | 76327277 | 267737 |
| 65590 | 76337181 | 76339065 | 267737 |
| 65591 | 76347421 | 76350309 | |
| 65592 | 76353200 | 76354132 | 184557 |
| 65593 | 76355040 | 76357345 | 266970, 184557 |
| 65594 | 76371695 | 76372767 | |
| 65595 | 76373989 | 76375845 | 087157 |
| 65596 | 76417507 | 76418543 | 087157 |
| 65597 | 76553672 | 76555387 | 187775 |
| 65598 | 76587834 | 76589148 | |
| 65599 | 76702393 | 76703018 | 108669 |
| 65600 | 76704432 | 76705097 | 108669 |
| 65601 | 76712798 | 76714902 | 108669 |
| 65602 | 76730952 | 76734001 | 108669 |
| 65603 | 76742002 | 76745600 | 108669 |
| 65604 | 76747492 | 76748384 | 108669 |
| 65605 | 76775952 | 76779514 | 108669 |
| 65606 | 76785804 | 76786332 | 055483 |
| 65607 | 76835411 | 76838125 | 055483 |
| 65608 | 76929345 | 76929949 | |
| 65609 | 77004684 | 77006721 | 171302 |
| 65610 | 77022318 | 77024481 | 265096, 173918 |
| 65611 | 77070570 | 77071942 | 167280 |
| 65612 | 77220062 | 77221729 | 167281 |
| 65613 | 77268173 | 77269837 | 167281 |
| 65614 | 77704554 | 77705187 | 182156 |
| 65615 | 77706247 | 77708015 | 182156 |
| 65616 | 77770283 | 77772372 | 141570 |
| 65617 | 77786277 | 77787779 | |
| 65618 | 77805224 | 77807334 | 141582 |
| 65619 | 77809776 | 77814631 | 141582 |
| 65620 | 77817115 | 77819455 | |
| 65621 | 77871354 | 77871963 | |
| 65622 | 77892480 | 77893362 | 262188, 262585 |
| 65623 | 77905007 | 77905985 | |
| 65624 | 77960300 | 77963485 | 167291 |
| 65625 | 77963514 | 77964532 | 167291 |
| 65626 | 77964730 | 77968499 | 262172, 167291 |
| 65627 | 77981958 | 77982737 | 167291 |
| 65628 | 77992985 | 77993965 | 167291 |
| 65629 | 77997320 | 77998060 | 261978, 167291 |
| 65630 | 78002779 | 78005096 | 167291 |
| 65631 | 78008882 | 78011012 | 141519, 167291 |
| 65632 | 78042483 | 78043076 | 141519 |
| 65633 | 78044380 | 78045748 | 141519 |
| 65634 | 78074613 | 78076379 | 171298 |
| 65635 | 78104892 | 78105249 | |
| 65636 | 78120108 | 78122146 | 141543 |
| 65637 | 78169386 | 78170022 | 141527 |
| 65638 | 78193105 | 78194929 | 181045, 181523 |
| 65639 | 78228416 | 78229162 | |
| 65640 | 78233141 | 78236368 | 173821 |
| 65641 | 78236625 | 78238584 | 173821 |
| 65642 | 78388446 | 78389955 | 173818, 263069 |
| 65643 | 78427213 | 78429648 | 260369 |
| 65644 | 78518209 | 78519834 | 141564 |
| 65645 | 78700631 | 78701618 | 141564 |
| 65646 | 78717094 | 78717602 | 141564 |
| 65647 | 78806025 | 78807303 | 141564 |
| 65648 | 78962725 | 78963510 | |
| 65649 | 78964866 | 78966775 | 176108 |
| 65650 | 79008240 | 79010003 | 175866, 226137 |
| 65651 | 79010453 | 79012492 | 175866 |
| 65652 | 79017577 | 79018261 | 175866 |
| 65653 | 79018464 | 79019068 | 175866 |
| 65654 | 79039198 | 79040294 | 175866 |
| 65655 | 79042745 | 79043701 | 175866 |
| 65656 | 79055357 | 79057954 | 175866 |
| 65657 | 79058392 | 79059158 | 175866 |
| 65658 | 79070637 | 79072249 | 175866 |
| 65659 | 79075271 | 79076117 | 175866 |
| 65660 | 79196801 | 79197555 | |
| 65661 | 79211985 | 79214219 | 224877, 167302 |
| 65662 | 79218819 | 79219640 | 157637 |
| 65663 | 79230282 | 79230912 | 157637 |
| 65664 | 79267986 | 79270042 | 157637 |
| 65665 | 79277696 | 79278435 | 185168 |
| 65666 | 79282481 | 79283988 | 185168 |
| 65667 | 79300508 | 79301374 | 185332 |
| 65668 | 79302226 | 79305222 | 185332 |
| 65669 | 79313343 | 79314190 | |
| 65670 | 79314235 | 79320863 | |
| 65671 | 79359738 | 79362110 | 262877 |
| 65672 | 79366399 | 79368233 | |
| 65673 | 79368941 | 79371914 | 263053 |
| 65674 | 79372309 | 79374946 | 266392, 171282, 263053 |
| 65675 | 79396449 | 79397572 | 171282 |
| 65676 | 79451148 | 79451998 | |
| 65677 | 79454706 | 79456094 | |
| 65678 | 79475699 | 79477136 | 184009 |
| 65679 | 79478558 | 79482629 | 229848, 229947, 184009 |
| 65680 | 79486038 | 79487384 | 184009, 229848 |
| 65681 | 79516111 | 79516563 | 185504 |
| 65682 | 79518350 | 79520443 | 185504 |
| 65683 | 79523048 | 79523797 | |
| 65684 | 79533738 | 79534403 | 182446 |
| 65685 | 79562024 | 79562425 | 182446 |
| 65686 | 79602470 | 79604527 | 182612, 182446 |
| 65687 | 79632614 | 79634595 | 185298, 204237 |
| 65688 | 79649998 | 79652506 | 185359, 214087 |
| 65689 | 79669243 | 79671780 | 183048, 262814, 262660, |
| | | | 262049, 185359 |
| 65690 | 79677562 | 79681832 | 183048, 262660 |
| 65691 | 79689072 | 79690128 | |
| 65692 | 79694188 | 79695052 | |
| 65693 | 79700702 | 79701782 | |
| 65694 | 79702086 | 79703532 | |
| 65695 | 79762074 | 79763663 | 215644 |
| 65696 | 79779263 | 79780628 | 225663, 215621 |
| 65697 | 79790079 | 79792091 | 182676, 225663 |
| 65698 | 79798591 | 79799788 | |
| 65699 | 79800447 | 79801597 | 262831, 185624 |
| 65700 | 79812777 | 79813351 | 185624 |
| 65701 | 79816399 | 79820030 | 185624 |
| 65702 | 79820586 | 79821543 | |
| 65703 | 79823013 | 79830611 | 141522, 262413 |
| 65704 | 79842996 | 79844408 | |
| 65705 | 79848143 | 79850413 | 141552, 183684 |
| 65706 | 79860053 | 79861169 | 183979, 185813 |
| 65707 | 79867842 | 79869780 | 185813 |
| 65708 | 79875017 | 79876317 | 197063, 187531 |
| 65709 | 79880691 | 79882297 | 264769, 197063 |
| 65710 | 79882629 | 79883199 | 197063 |
| 65711 | 79883776 | 79886032 | 265688, 197063 |
| 65712 | 79895166 | 79895587 | 183010 |
| 65713 | 79911902 | 79912392 | 185269 |
| 65714 | 79916903 | 79918509 | 185269 |
| 65715 | 79925487 | 79926275 | |
| 65716 | 79934116 | 79937879 | 169696 |
| 65717 | 79948840 | 79950396 | 169696 |
| 65718 | 79958101 | 79959117 | 169696 |
| 65719 | 79979144 | 79980923 | 169689 |
| 65720 | 79983777 | 79984570 | 169683 |
| 65721 | 79988042 | 79989268 | 169683 |
| 65722 | 79993918 | 79996165 | 264569, 169738 |
| 65723 | 79997457 | 79998156 | |
| 65724 | 80008384 | 80011190 | 169727, 169733 |
| 65725 | 80022342 | 80024556 | 169718 |
| 65726 | 80053249 | 80054455 | 169710 |
| 65727 | 80054763 | 80063345 | 176155, 169710 |
| 65728 | 80063572 | 80066957 | 176155 |
| 65729 | 80068032 | 80068827 | 176155 |
| 65730 | 80070110 | 80071259 | 176155 |
| 65731 | 80075559 | 80076106 | 176155 |
| 65732 | 80091240 | 80092391 | 176155 |
| 65733 | 80169969 | 80171738 | 176155 |
| 65734 | 80173298 | 80173799 | 264548 |
| 65735 | 80174228 | 80176338 | 264548 |
| 65736 | 80188572 | 80190120 | 141526 |
| 65737 | 80199388 | 80200399 | 141526, 141551 |
| 65738 | 80223981 | 80227666 | 141551 |
| 65739 | 80230155 | 80231968 | 141551 |
| 65740 | 80249857 | 80251410 | 265692 |
| 65741 | 80253293 | 80253953 | |
| 65742 | 80255010 | 80256993 | |
| 65743 | 80283669 | 80284214 | 141574 |
| 65744 | 80285810 | 80287186 | 141574 |
| 65745 | 80292273 | 80293424 | |
| 65746 | 80328338 | 80328785 | |
| 65747 | 80341889 | 80343882 | |
| 65748 | 80370406 | 80371004 | 181396 |
| 65749 | 80375969 | 80376965 | 169660, 181396 |
| 65750 | 80402180 | 80402789 | 178927 |
| 65751 | 80407936 | 80409240 | 178927 |
| 65752 | 80415315 | 80417385 | 141562, 265458 |
| 65753 | 80440883 | 80441941 | 266236, 141562 |
| 65754 | 80451979 | 80452905 | |
| 65755 | 80454525 | 80456148 | |
| 65756 | 80460096 | 80460571 | |
| 65757 | 80465513 | 80466190 | |
| 65758 | 80475101 | 80475522 | |
| 65759 | 80476674 | 80478875 | 141568 |
| 65760 | 80483248 | 80483890 | 141568 |
| 65761 | 80486435 | 80487083 | 141568 |
| 65762 | 80509590 | 80510129 | 141568 |
| 65763 | 80526160 | 80527013 | 141568 |
| 65764 | 80535753 | 80536212 | 262652, 141568 |
| 65765 | 80605305 | 80606603 | 141580 |
| 65766 | 80642062 | 80643107 | 141542 |
| 65767 | 80644162 | 80646125 | 141542 |
| 65768 | 80655475 | 80656570 | 141542 |
| 65769 | 80656602 | 80657205 | 141542 |
| 65770 | 80674116 | 80675398 | 141560, 263063 |
| 65771 | 80692862 | 80694321 | 167363 |
| 65772 | 80695557 | 80696718 | 167363 |
| 65773 | 80698830 | 80700061 | 167363 |
| 65774 | 80709356 | 80710603 | 141556 |
| 65775 | 80729805 | 80730600 | 141556 |
| 65776 | 80794562 | 80795809 | 141579, 141556 |
| 65777 | 80796180 | 80796767 | 141579, 141556 |
| 65778 | 80846794 | 80847895 | 141556 |
| 65779 | 81008693 | 81010555 | 175711 |
| 65780 | 81036801 | 81037532 | |
| 65781 | 81066645 | 81067614 | |

[0586] The locations of ODSCs on Chromosome 18 are shown in Table 60.

TABLE 60
ODSC Locations on Chromosome 18

| SEQ ID NO. | Start | End | Overlapping Gene(s) |
|---|---|---|---|
| 65782 | 108036 | 108579 | |
| 65783 | 108968 | 109526 | 263006 |
| 65784 | 158009 | 159759 | 101557 |
| 65785 | 267057 | 269864 | 263884, 079134 |
| 65786 | 657215 | 658602 | 176890, 263727, 176912 |
| 65787 | 682794 | 683996 | 132199 |
| 65788 | 702604 | 703801 | 132199 |
| 65789 | 711037 | 713451 | 132199 |
| 65790 | 811218 | 813265 | 176105 |
| 65791 | 824012 | 824725 | |
| 65792 | 847822 | 849203 | |
| 65793 | 1269972 | 1270525 | 132204 |
| 65794 | 1391977 | 1392691 | 132204 |
| 65795 | 1513369 | 1514013 | 266602 |
| 65796 | 2570201 | 2571944 | 080986, 101574 |
| 65797 | 2592627 | 2593140 | 080986 |
| 65798 | 2654757 | 2657315 | 101596, 266405 |
| 65799 | 2939189 | 2940278 | 101577 |
| 65800 | 2968497 | 2969060 | 101577, 266397 |
| 65801 | 2969956 | 2971168 | 101577, 266397 |
| 65802 | 2978119 | 2987047 | 266397, 101577 |
| 65803 | 3002576 | 3003460 | 101577 |
| 65804 | 3012148 | 3014569 | 101577 |
| 65805 | 3037193 | 3038252 | |
| 65806 | 3051574 | 3052703 | |
| 65807 | 3060493 | 3061245 | |
| 65808 | 3117137 | 3121000 | 101605 |
| 65809 | 3152646 | 3154587 | 101605 |
| 65810 | 3155461 | 3155983 | 101605 |
| 65811 | 3194766 | 3195784 | 101605, 265399 |
| 65812 | 3207430 | 3208549 | 101605, 265399 |
| 65813 | 3209535 | 3210209 | 101605, 265399 |
| 65814 | 3217835 | 3220383 | 101605, 265399 |
| 65815 | 3233074 | 3234560 | 265399 |
| 65816 | 3244821 | 3253523 | 101608, 272688, 265399 |
| 65817 | 3256020 | 3259684 | 101608, 264235 |
| 65818 | 3260461 | 3264998 | 118680, 264235 |
| 65819 | 3265364 | 3266597 | 118680 |
| 65820 | 3269098 | 3269803 | 118680 |
| 65821 | 3368008 | 3368847 | |
| 65822 | 3384116 | 3385887 | |
| 65823 | 3446686 | 3457479 | 177426 |
| 65824 | 3459166 | 3459930 | |
| 65825 | 3592726 | 3598162 | 177337, 170579 |
| 65826 | 3601791 | 3606740 | 262001, 170579 |
| 65827 | 3618010 | 3618797 | 170579 |
| 65828 | 3621576 | 3626462 | 170579 |
| 65829 | 3634153 | 3634827 | 170579 |
| 65830 | 3648974 | 3651072 | 170579 |
| 65831 | 3652048 | 3653976 | 266401, 170579 |
| 65832 | 3665359 | 3666948 | 170579 |
| 65833 | 3710610 | 3711475 | 170579 |
| 65834 | 3771097 | 3772084 | 266513, 170579 |
| 65835 | 3816207 | 3818150 | 170579 |
| 65836 | 3966294 | 3967843 | 170579, 263878 |
| 65837 | 5236927 | 5239493 | 264575, 265091, 263753 |
| 65838 | 5253747 | 5254400 | |
| 65839 | 5294467 | 5297252 | 198081 |
| 65840 | 5908919 | 5910644 | 264449 |
| 65841 | 5966234 | 5967387 | 154655 |
| 65842 | 5998429 | 5998983 | 154655 |
| 65843 | 6052403 | 6052827 | 154655, 266846 |
| 65844 | 6159160 | 6160833 | 154655 |
| 65845 | 6209941 | 6211781 | 154655 |
| 65846 | 6215672 | 6216274 | 154655 |
| 65847 | 6281748 | 6282313 | 154655 |
| 65848 | 6315518 | 6316331 | 154655 |
| 65849 | 6355115 | 6356923 | 154655 |
| 65850 | 6370316 | 6371899 | 154655 |
| 65851 | 6373738 | 6377351 | 154655 |
| 65852 | 6405213 | 6407760 | 154655 |
| 65853 | 6413178 | 6415930 | 154655 |
| 65854 | 6482253 | 6483228 | |
| 65855 | 6900938 | 6902118 | 088756 |
| 65856 | 7566162 | 7569447 | 173482 |
| 65857 | 7576166 | 7578183 | 173482 |
| 65858 | 7617500 | 7618351 | 173482 |
| 65859 | 7625911 | 7628027 | 173482 |
| 65860 | 7637247 | 7637921 | 173482 |
| 65861 | 7657767 | 7658336 | 173482 |
| 65862 | 7754141 | 7756441 | 266767, 173482 |
| 65863 | 7812343 | 7812969 | 173482 |
| 65864 | 7829537 | 7830100 | 173482 |
| 65865 | 7870884 | 7873978 | 173482 |
| 65866 | 7876520 | 7879986 | 173482 |
| 65867 | 7898957 | 7899569 | 173482 |
| 65868 | 7914631 | 7915661 | 173482 |
| 65869 | 7920448 | 7924423 | 173482 |
| 65870 | 7945307 | 7947237 | 173482 |
| 65871 | 8115279 | 8118538 | 173482 |
| 65872 | 8124239 | 8125896 | 173482 |
| 65873 | 8176471 | 8178002 | 173482 |
| 65874 | 8283885 | 8284403 | 173482 |
| 65875 | 8288843 | 8289322 | 173482 |
| 65876 | 8298844 | 8299539 | 173482 |
| 65877 | 8301209 | 8301899 | 173482 |
| 65878 | 8339164 | 8343267 | 173482 |
| 65879 | 8413096 | 8413858 | 266613 |
| 65880 | 8608629 | 8610893 | 206418 |
| 65881 | 8704284 | 8707067 | 168502, 265962 |
| 65882 | 8707861 | 8708295 | 168502 |
| 65883 | 8730064 | 8730847 | 168502 |
| 65884 | 8799782 | 8801583 | 168502 |
| 65885 | 8858876 | 8859795 | |
| 65886 | 8889740 | 8892220 | |
| 65887 | 8959308 | 8962734 | |
| 65888 | 8989372 | 8991205 | |
| 65889 | 8998312 | 8999727 | |
| 65890 | 9054745 | 9055822 | |
| 65891 | 9067500 | 9068926 | |
| 65892 | 9073207 | 9074835 | |
| 65893 | 9091853 | 9093152 | |
| 65894 | 9093602 | 9095987 | |
| 65895 | 9101544 | 9105425 | 265257, 178127 |
| 65896 | 9116169 | 9119449 | 265257, 178127 |
| 65897 | 9135610 | 9138550 | 101745, 266053, 265257 |
| 65898 | 9153145 | 9153721 | 101745, 265257 |
| 65899 | 9333988 | 9335341 | 128791, 264964 |
| 65900 | 9474225 | 9476569 | 017797 |
| 65901 | 9557246 | 9557893 | 154845 |
| 65902 | 9608648 | 9609334 | 154845 |
| 65903 | 9613392 | 9615998 | 263627, 154845 |
| 65904 | 9643388 | 9644003 | |
| 65905 | 9672611 | 9674191 | |
| 65906 | 9779150 | 9780292 | 168461 |
| 65907 | 9869843 | 9870496 | |
| 65908 | 9898667 | 9899569 | |
| 65909 | 9913362 | 9915855 | 101558 |
| 65910 | 10525636 | 10526975 | 134265 |
| 65911 | 10927048 | 10928242 | 154864 |
| 65912 | 11003680 | 11006048 | 154864 |
| 65913 | 11118463 | 11122829 | 154864 |
| 65914 | 11125525 | 11126072 | 154864 |
| 65915 | 11146495 | 11147309 | 154864 |
| 65916 | 11148697 | 11150261 | |
| 65917 | 11273906 | 11274775 | |
| 65918 | 11283443 | 11284058 | |
| 65919 | 11323289 | 11324008 | |
| 65920 | 11500288 | 11501133 | 267252 |
| 65921 | 11688855 | 11689355 | 141404 |
| 65922 | 11849768 | 11852475 | 267165, 255112, 141404 |
| 65923 | 11856532 | 11858129 | 272703, 141404 |
| 65924 | 11872399 | 11873153 | 141404 |
| 65925 | 11885122 | 11885821 | 141404, 154889 |
| 65926 | 11887514 | 11888243 | 154889 |
| 65927 | 11907699 | 11910102 | 273141, 154889 |
| 65928 | 11946278 | 11948434 | |
| 65929 | 11979787 | 11982457 | 141401 |
| 65930 | 11994331 | 11995123 | 266955, 141401 |
| 65931 | 12008227 | 12008699 | 141401 |
| 65932 | 12015287 | 12016126 | 141401 |
| 65933 | 12017061 | 12017656 | 141401 |
| 65934 | 12026420 | 12027655 | 141401 |
| 65935 | 12038327 | 12039559 | |
| 65936 | 12255656 | 12256019 | 176194 |
| 65937 | 12307998 | 12309153 | 176014 |
| 65938 | 12336841 | 12337298 | 176014, 141385 |
| 65939 | 12375786 | 12378370 | 141385 |
| 65940 | 12657318 | 12658311 | 215527, 134278 |
| 65941 | 12702023 | 12703871 | 101624, 128789 |
| 65942 | 12837053 | 12839286 | 175354 |
| 65943 | 12882498 | 12884774 | 175354 |
| 65944 | 12946454 | 12949056 | 085415 |
| 65945 | 12990814 | 12992896 | 101639, 266969 |
| 65946 | 13136437 | 13139076 | |
| 65947 | 13174861 | 13177718 | |
| 65948 | 13179139 | 13180360 | |
| 65949 | 13215885 | 13219388 | 168675, 267239 |
| 65950 | 13312888 | 13313827 | 168675 |
| 65951 | 13337492 | 13338953 | 168675 |
| 65952 | 13417617 | 13419195 | 168675 |
| 65953 | 13433004 | 13434233 | 168675 |
| 65954 | 13434457 | 13438877 | 168675 |
| 65955 | 13445976 | 13448584 | 168675 |
| 65956 | 13465115 | 13465892 | 267694, 168675 |
| 65957 | 13499888 | 13503282 | 267366, 168675 |
| 65958 | 13512757 | 13513455 | 168675 |
| 65959 | 13539694 | 13542742 | 168675 |
| 65960 | 13725376 | 13727671 | 101654, 177150 |
| 65961 | 18518717 | 18519520 | |
| 65962 | 18632608 | 18634120 | 067900 |
| 65963 | 18690257 | 18692779 | 067900 |
| 65964 | 18763607 | 18764298 | |
| 65965 | 18821147 | 18823750 | 141449, 265984 |
| 65966 | 18844444 | 18845344 | 141449 |
| 65967 | 18909797 | 18910858 | 141449 |
| 65968 | 19018865 | 19021054 | 265751, 141449 |
| 65969 | 19032726 | 19034382 | 141449 |
| 65970 | 19036249 | 19037494 | 141449 |
| 65971 | 19117820 | 19118664 | 141446 |
| 65972 | 19129591 | 19132130 | 141446 |
| 65973 | 19179078 | 19181416 | 141446 |
| 65974 | 19217670 | 19219155 | |
| 65975 | 19248033 | 19250263 | 158201 |
| 65976 | 19251906 | 19254391 | 265656, 158201 |
| 65977 | 19277717 | 19278131 | 158201 |
| 65978 | 19282751 | 19285210 | 101752, 158201 |
| 65979 | 19320331 | 19322568 | 101752 |
| 65980 | 19545577 | 19546105 | |
| 65981 | 19560501 | 19561454 | 265758 |
| 65982 | 19600121 | 19600921 | 265758 |
| 65983 | 19601528 | 19601883 | 265758 |
| 65984 | 19611651 | 19613461 | 265758 |
| 65985 | 19637873 | 19638530 | |
| 65986 | 19664027 | 19665899 | |
| 65987 | 19667581 | 19668892 | 263588 |
| 65988 | 19686200 | 19687230 | |
| 65989 | 19693075 | 19693949 | |
| 65990 | 19744792 | 19751349 | 141448, 266010 |
| 65991 | 19790037 | 19790862 | |
| 65992 | 19802969 | 19804041 | 264825 |
| 65993 | 19865141 | 19866119 | |
| 65994 | 19866305 | 19866994 | |
| 65995 | 19925081 | 19929540 | 273348 |
| 65996 | 19979574 | 19980676 | |
| 65997 | 20002702 | 20005178 | |
| 65998 | 20007670 | 20009772 | |
| 65999 | 20012444 | 20013508 | |
| 66000 | 20045327 | 20049289 | |
| 66001 | 20067935 | 20070978 | |
| 66002 | 20104635 | 20105243 | |
| 66003 | 20121057 | 20122924 | |
| 66004 | 20130471 | 20133069 | |
| 66005 | 20135828 | 20137630 | |
| 66006 | 20138631 | 20140951 | |
| 66007 | 20142760 | 20143966 | |
| 66008 | 20159340 | 20161065 | |
| 66009 | 20164377 | 20166143 | |
| 66010 | 20183978 | 20185798 | |
| 66011 | 20217541 | 20219898 | |
| 66012 | 20253214 | 20253703 | |
| 66013 | 20253869 | 20255428 | |
| 66014 | 20262289 | 20265081 | |
| 66015 | 20283997 | 20284820 | 265943 |
| 66016 | 20289717 | 20292658 | 265943 |
| 66017 | 20411309 | 20412120 | 266850, 101773, 265943 |
| 66018 | 20452750 | 20453726 | 266850, 101773, 265943 |
| 66019 | 20494386 | 20495237 | 101773, 265943 |
| 66020 | 20512427 | 20514174 | 264817, 265943, 101773 |
| 66021 | 20553604 | 20555993 | 101773 |
| 66022 | 20557610 | 20558929 | 101773 |
| 66023 | 20694394 | 20696089 | |
| 66024 | 20713539 | 20717200 | 134508, 222999 |
| 66025 | 20721007 | 20723576 | 134508 |
| 66026 | 20769454 | 20770361 | 134508 |
| 66027 | 20816956 | 20819022 | 134508, 134490 |
| 66028 | 20839448 | 20840918 | 266495, 134508, 134490 |
| 66029 | 20863897 | 20865309 | 134490 |
| 66030 | 20871348 | 20872791 | 134490 |
| 66031 | 20891667 | 20893561 | 134490 |
| 66032 | 20935966 | 20939229 | 134490 |
| 66033 | 20957357 | 20959296 | 134490 |
| 66034 | 20959385 | 20960915 | 134490 |
| 66035 | 20981269 | 20982288 | 134490 |
| 66036 | 21001918 | 21003910 | 134490 |
| 66037 | 21031984 | 21034665 | 101782 |
| 66038 | 21040189 | 21041717 | 101782 |
| 66039 | 21066436 | 21067293 | 101782 |
| 66040 | 21082430 | 21085034 | 141452 |
| 66041 | 21094853 | 21096301 | 141452, 141458 |
| 66042 | 21108910 | 21110694 | 141452, 141458 |
| 66043 | 21126244 | 21126812 | 141458 |
| 66044 | 21164755 | 21167972 | 141458 |
| 66045 | 21197568 | 21200197 | 154065 |
| 66046 | 21205781 | 21208766 | 154065 |
| 66047 | 21209141 | 21210072 | 154065 |
| 66048 | 21241997 | 21243102 | 154065 |
| 66049 | 21264332 | 21264996 | |
| 66050 | 21269078 | 21270471 | 053747 |
| 66051 | 21275111 | 21275946 | 053747 |
| 66052 | 21297698 | 21301228 | 053747 |
| 66053 | 21404410 | 21405340 | 053747 |
| 66054 | 21427166 | 21427887 | 053747 |
| 66055 | 21437113 | 21438345 | 053747 |
| 66056 | 21439313 | 21440349 | 053747 |
| 66057 | 21462978 | 21464295 | 053747 |
| 66058 | 21561818 | 21563002 | 265752 |
| 66059 | 21593671 | 21596143 | 264745, 168234 |
| 66060 | 21630630 | 21632753 | 168234 |
| 66061 | 21643004 | 21643464 | 168234 |
| 66062 | 21691679 | 21696125 | 264924, 168234 |
| 66063 | 21718578 | 21719540 | 154040 |
| 66064 | 21775249 | 21775951 | 141447 |
| 66065 | 21791507 | 21792224 | 141447 |
| 66066 | 21811235 | 21812616 | 141447 |
| 66067 | 21851181 | 21852451 | 141447 |
| 66068 | 21977040 | 21978332 | 141447 |
| 66069 | 22005926 | 22008157 | 154059 |
| 66070 | 22126030 | 22126725 | |
| 66071 | 23669476 | 23671600 | 141380 |
| 66072 | 23965940 | 23966406 | 141384 |
| 66073 | 24127761 | 24129498 | 134504 |
| 66074 | 24155216 | 24155880 | 134504 |
| 66075 | 24159765 | 24160533 | 134504 |
| 66076 | 24235583 | 24237684 | 260372, 134504 |
| 66077 | 24322160 | 24323040 | 260372 |
| 66078 | 24324953 | 24328050 | 260372 |
| 66079 | 24332223 | 24332945 | 260372 |
| 66080 | 24333567 | 24334822 | 260372 |
| 66081 | 24336536 | 24338643 | 260372 |
| 66082 | 24372549 | 24373111 | 260372 |
| 66083 | 24443100 | 24443731 | 260372, 171885 |
| 66084 | 24454880 | 24456045 | 260372 |
| 66085 | 24637276 | 24638288 | 260372, 154080 |
| 66086 | 24715359 | 24717433 | 260372, 154080 |
| 66087 | 24721710 | 24724989 | 260372, 154080 |
| 66088 | 24764990 | 24765960 | 154080, 260372 |
| 66089 | 24813070 | 24813551 | 265374 |
| 66090 | 24958183 | 24958871 | 264151 |
| 66091 | 25201005 | 25201837 | |
| 66092 | 25236057 | 25236843 | |
| 66093 | 25241202 | 25242049 | |
| 66094 | 25329884 | 25330505 | |
| 66095 | 25576771 | 25577168 | 170558 |
| 66096 | 25599515 | 25600276 | 170558 |
| 66097 | 25653112 | 25654302 | 170558 |
| 66098 | 25666739 | 25667875 | 170558 |
| 66099 | 25670670 | 25672177 | 170558 |
| 66100 | 25690899 | 25696940 | 170558 |
| 66101 | 25706958 | 25708688 | 170558 |
| 66102 | 25743131 | 25743540 | 170558 |
| 66103 | 25747633 | 25748218 | 170558 |
| 66104 | 25753127 | 25759140 | 170558 |
| 66105 | 25763026 | 25764536 | |
| 66106 | 26743319 | 26745774 | |
| 66107 | 28591133 | 28592065 | 134762 |
| 66108 | 28622276 | 28622873 | 134762 |
| 66109 | 28680478 | 28682972 | 265888, 134755 |
| 66110 | 28813601 | 28814492 | |
| 66111 | 28821776 | 28822898 | |
| 66112 | 28823039 | 28825436 | |
| 66113 | 28827196 | 28828308 | |
| 66114 | 28847521 | 28849944 | |
| 66115 | 28854710 | 28855984 | |
| 66116 | 28882770 | 28883451 | |
| 66117 | 28904671 | 28905563 | 134760 |
| 66118 | 28979502 | 28982707 | 175065, 266729 |
| 66119 | 29077250 | 29079485 | 046604 |
| 66120 | 29085972 | 29086821 | 046604 |
| 66121 | 29091743 | 29093956 | 046604 |
| 66122 | 29161318 | 29162157 | |
| 66123 | 29171135 | 29173185 | 118271 |
| 66124 | 29258361 | 29260811 | 118276 |
| 66125 | 29264184 | 29265601 | 118276 |
| 66126 | 29303625 | 29304953 | 265158 |
| 66127 | 29318056 | 29320857 | |
| 66128 | 29353817 | 29354957 | |
| 66129 | 29372241 | 29373198 | |
| 66130 | 29521574 | 29524271 | 263823, 153339 |
| 66131 | 29534105 | 29534961 | |
| 66132 | 29562818 | 29563920 | |
| 66133 | 29598016 | 29600161 | 101695, 263917 |
| 66134 | 29671410 | 29673953 | 134758, 265008, 263917 |
| 66135 | 29675694 | 29676395 | 134758, 263917 |
| 66136 | 29787885 | 29788416 | 141441, 141434 |
| 66137 | 29793482 | 29794132 | 141441, 141434 |
| 66138 | 29858042 | 29859066 | 141441 |
| 66139 | 29881285 | 29882689 | 141441 |
| 66140 | 29897134 | 29898384 | 141441 |
| 66141 | 29929011 | 29931620 | 141441 |
| 66142 | 29938510 | 29939059 | 141441 |
| 66143 | 29945843 | 29948578 | 141441 |
| 66144 | 29951094 | 29954377 | 141441 |
| 66145 | 29957646 | 29959677 | 141441 |
| 66146 | 29962079 | 29964275 | 141441 |
| 66147 | 30006942 | 30007701 | 141441 |
| 66148 | 30049027 | 30051889 | 141441 |
| 66149 | 31157649 | 31158251 | 267642 |
| 66150 | 31158386 | 31159265 | 141431 |
| 66151 | 31335905 | 31336812 | |
| 66152 | 31400540 | 31402202 | |
| 66153 | 31446283 | 31447145 | 101746 |
| 66154 | 31449692 | 31452322 | 101746 |
| 66155 | 31608141 | 31608820 | 101746 |
| 66156 | 31618917 | 31619816 | 101746 |
| 66157 | 31701034 | 31701985 | 101746 |
| 66158 | 32072532 | 32074752 | 134769 |
| 66159 | 32094060 | 32096155 | 134769 |
| 66160 | 32206592 | 32207218 | 134769 |
| 66161 | 32239550 | 32240172 | 134769 |
| 66162 | 32306068 | 32306856 | 134769 |
| 66163 | 32507886 | 32510491 | |
| 66164 | 32527350 | 32528478 | |
| 66165 | 32556515 | 32559809 | 166974 |
| 66166 | 32620472 | 32622075 | 166974 |
| 66167 | 32639922 | 32640776 | 166974 |
| 66168 | 32642313 | 32642847 | 166974 |
| 66169 | 32664516 | 32665198 | 166974 |
| 66170 | 32810879 | 32811468 | |
| 66171 | 32819964 | 32822085 | 186812 |
| 66172 | 32869241 | 32871130 | 257267, 186814, 268573 |
| 66173 | 32923351 | 32926036 | 172466 |
| 66174 | 32956459 | 32957463 | 186496 |
| 66175 | 33037926 | 33039548 | 267583, 267140, 153391 |
| 66176 | 33057320 | 33063285 | 267140, 153391 |
| 66177 | 33076666 | 33078425 | 267140, 153391 |
| 66178 | 33160490 | 33162684 | 141429 |
| 66179 | 33551604 | 33553433 | 141428 |
| 66180 | 33625496 | 33626038 | 141425 |
| 66181 | 33646475 | 33647973 | 141425 |
| 66182 | 33708506 | 33710778 | 134759, 141424 |
| 66183 | 33732318 | 33734374 | 134759 |
| 66184 | 33735619 | 33738564 | 134759 |
| 66185 | 33755329 | 33756801 | 134759 |
| 66186 | 33766540 | 33769437 | 075643, 260552 |
| 66187 | 33877093 | 33877702 | 134775 |
| 66188 | 34407671 | 34409787 | 150477, 134779 |
| 66189 | 34879422 | 34880040 | 101489 |
| 66190 | 34943832 | 34944598 | 101489 |
| 66191 | 36520011 | 36522238 | |
| 66192 | 36531071 | 36532216 | |
| 66193 | 36560329 | 36560769 | |
| 66194 | 36986834 | 36987526 | 267374 |
| 66195 | 37102969 | 37104031 | 267374 |
| 66196 | 37525909 | 37527618 | |
| 66197 | 39159026 | 39159635 | 267313 |
| 66198 | 39674769 | 39675249 | |
| 66199 | 39750936 | 39751834 | 267586 |
| 66200 | 39772030 | 39773181 | 267586 |
| 66201 | 39918196 | 39921247 | 267586 |
| 66202 | 39991604 | 39998430 | 267586 |
| 66203 | 40006201 | 40007044 | 267586 |
| 66204 | 40024038 | 40027512 | 267586 |
| 66205 | 40064417 | 40065127 | 267586 |
| 66206 | 40097256 | 40098958 | 267586 |
| 66207 | 40104952 | 40106812 | 267586 |
| 66208 | 40158096 | 40159679 | 267586 |
| 66209 | 40162456 | 40164036 | 267586 |
| 66210 | 40215429 | 40216187 | 267586 |
| 66211 | 40818254 | 40818947 | |
| 66212 | 42231329 | 42231869 | |
| 66213 | 42258737 | 42261645 | 152217, 267414 |
| 66214 | 42276477 | 42277932 | 152217 |
| 66215 | 42287787 | 42290275 | 152217 |
| 66216 | 42304909 | 42306661 | 152217 |
| 66217 | 42312186 | 42314720 | 152217 |
| 66218 | 42351552 | 42352795 | 152217 |
| 66219 | 42368907 | 42370245 | 152217 |
| 66220 | 42378427 | 42379219 | 152217 |
| 66221 | 42387377 | 42388359 | 152217 |
| 66222 | 42399689 | 42403210 | 152217 |
| 66223 | 42432615 | 42433461 | 152217 |
| 66224 | 42464320 | 42464880 | 152217 |
| 66225 | 42465062 | 42465923 | 152217 |
| 66226 | 42466855 | 42468255 | 152217 |
| 66227 | 42495788 | 42498831 | 152217 |
| 66228 | 42506305 | 42508128 | 152217 |
| 66229 | 42517681 | 42520307 | 152217 |
| 66230 | 42640981 | 42641858 | 152217 |
| 66231 | 42748829 | 42750017 | 267101 |
| 66232 | 42853922 | 42854461 | 132874 |
| 66233 | 42900151 | 42901141 | 132874 |
| 66234 | 42902177 | 42902764 | 132874 |
| 66235 | 42904489 | 42905349 | 132874 |
| 66236 | 42964132 | 42964898 | 132874 |
| 66237 | 43231217 | 43231590 | 132874 |
| 66238 | 43355037 | 43355937 | |
| 66239 | 43372502 | 43374201 | |
| 66240 | 43381524 | 43384139 | |
| 66241 | 43418489 | 43419873 | 197046 |
| 66242 | 43436442 | 43436920 | 152223 |
| 66243 | 43515503 | 43516144 | 152223 |
| 66244 | 43530950 | 43531833 | 152223 |
| 66245 | 43541819 | 43543629 | 152223 |
| 66246 | 43546324 | 43547733 | 152223 |
| 66247 | 43553957 | 43554704 | |
| 66248 | 43607976 | 43608780 | 267293, 152229 |
| 66249 | 43631230 | 43633084 | 152229 |
| 66250 | 43648658 | 43650634 | 152229 |
| 66251 | 43650980 | 43653045 | 152229 |
| 66252 | 43677159 | 43679393 | 152234 |
| 66253 | 43683986 | 43685232 | 152240, 152234 |
| 66254 | 43753157 | 43755098 | 152242 |
| 66255 | 43772861 | 43773475 | 152242 |
| 66256 | 43779412 | 43779941 | 152242 |
| 66257 | 43913328 | 43914111 | 141622 |
| 66258 | 43914290 | 43914758 | 141622 |
| 66259 | 43923251 | 43924394 | 141622 |
| 66260 | 43998585 | 43999866 | 141622 |
| 66261 | 44496680 | 44498153 | 167216, 078043 |
| 66262 | 44675820 | 44678056 | 167220, 267228 |
| 66263 | 44701946 | 44703053 | 267228, 134049 |
| 66264 | 45298791 | 45299372 | |
| 66265 | 45456047 | 45458328 | 175387 |
| 66266 | 45528851 | 45530583 | |
| 66267 | 45534416 | 45535209 | |
| 66268 | 45657477 | 45657928 | 184828 |
| 66269 | 45662482 | 45663670 | 184828 |
| 66270 | 45678863 | 45681492 | 184828 |
| 66271 | 45687106 | 45688746 | 184828 |
| 66272 | 45710038 | 45711014 | 184828 |
| 66273 | 45718552 | 45719691 | 184828 |
| 66274 | 45938522 | 45939237 | |
| 66275 | 46014498 | 46015981 | |
| 66276 | 46064759 | 46068452 | 134030 |
| 66277 | 46073900 | 46075692 | 134030 |
| 66278 | 46078537 | 46078964 | 134030 |
| 66279 | 46079368 | 46080016 | 134030 |
| 66280 | 46080691 | 46082236 | 134030 |
| 66281 | 46089409 | 46089857 | 134030 |
| 66282 | 46092443 | 46094502 | 134030 |
| 66283 | 46101081 | 46103757 | 134030 |
| 66284 | 46107112 | 46108402 | 134030 |
| 66285 | 46116206 | 46118069 | 134030 |
| 66286 | 46161247 | 46161797 | 134030 |
| 66287 | 46193607 | 46194676 | 134030 |
| 66288 | 46201533 | 46203610 | 134030, 267762 |
| 66289 | 46307045 | 46309478 | 134030 |
| 66290 | 46326804 | 46329394 | 134030 |
| 66291 | 46452676 | 46453451 | 101665 |
| 66292 | 46455124 | 46457644 | 101665 |
| 66293 | 46467152 | 46471469 | 101665 |
| 66294 | 46472167 | 46479957 | 101665 |
| 66295 | 46501350 | 46503380 | |
| 66296 | 46516942 | 46517704 | |
| 66297 | 46598390 | 46599841 | 141627 |
| 66298 | 46780965 | 46781675 | 141627 |
| 66299 | 46985719 | 46987736 | 141627 |
| 66300 | 47012534 | 47014076 | 265496, 177576, 215472 |
| 66301 | 47017765 | 47019149 | 271982, 265681, 215472, |
| | | | 265496 |
| 66302 | 47040659 | 47041543 | |
| 66303 | 47074577 | 47074943 | |
| 66304 | 47086750 | 47091306 | 101670 |
| 66305 | 47135633 | 47136671 | |
| 66306 | 47151411 | 47152317 | |
| 66307 | 47154506 | 47158377 | |
| 66308 | 47164267 | 47167953 | |
| 66309 | 47176696 | 47178429 | 267444 |
| 66310 | 47208537 | 47209431 | |
| 66311 | 47211522 | 47212121 | |
| 66312 | 47254336 | 47255309 | |
| 66313 | 47283230 | 47283914 | |
| 66314 | 47328953 | 47329476 | 167315, 266997 |
| 66315 | 47338267 | 47341531 | 267322, 251992, 252139, |
| | | | 167315, 266997 |
| 66316 | 47358358 | 47366284 | 266997, 267322, 167306 |
| 66317 | 47492460 | 47494013 | 167306 |
| 66318 | 47519659 | 47521776 | 167306 |
| 66319 | 47550590 | 47551423 | 167306 |
| 66320 | 47602126 | 47602589 | 167306 |
| 66321 | 47605844 | 47606717 | 167306 |
| 66322 | 47625609 | 47627877 | 167306 |
| 66323 | 47641581 | 47642040 | 167306 |
| 66324 | 47653948 | 47655692 | 167306 |
| 66325 | 47680470 | 47681372 | 167306 |
| 66326 | 47719915 | 47721910 | 167306 |
| 66327 | 47794178 | 47795196 | 141644 |
| 66328 | 47806732 | 47808846 | 154832, 141644 |
| 66329 | 47813260 | 47815064 | 154832 |
| 66330 | 47834041 | 47835431 | 267695 |
| 66331 | 47837712 | 47838750 | 267695 |
| 66332 | 47900450 | 47901535 | 154839 |
| 66333 | 47937005 | 47937929 | |
| 66334 | 47951407 | 47952071 | |
| 66335 | 47984796 | 47985705 | 239780 |
| 66336 | 47995171 | 47996091 | |
| 66337 | 48086081 | 48086492 | 141639 |
| 66338 | 48087011 | 48087743 | 141639 |
| 66339 | 48141081 | 48141610 | 141639 |
| 66340 | 48345434 | 48346893 | 134042 |
| 66341 | 48362792 | 48363400 | |
| 66342 | 48379456 | 48381620 | |
| 66343 | 48404528 | 48406447 | 082212 |
| 66344 | 48493655 | 48495735 | 267699, 141646, 141642 |
| 66345 | 48498634 | 48500860 | 267699, 141646, 141642 |
| 66346 | 48512707 | 48513541 | 267699, 141646, 141642 |
| 66347 | 48555668 | 48558060 | 267699, 141646 |
| 66348 | 48563791 | 48566721 | 267699, 141646 |
| 66349 | 48660023 | 48660659 | |
| 66350 | 48676290 | 48677320 | |
| 66351 | 48721378 | 48724933 | 176624 |
| 66352 | 49417137 | 49417739 | |
| 66353 | 49434052 | 49435299 | |
| 66354 | 51322221 | 51322955 | |
| 66355 | 51517469 | 51518018 | |
| 66356 | 51674863 | 51676904 | |
| 66357 | 51749343 | 51751501 | 134046 |
| 66358 | 51780271 | 51781653 | |
| 66359 | 51795307 | 51797097 | 101751 |
| 66360 | 51914629 | 51915520 | |
| 66361 | 52274499 | 52275980 | |
| 66362 | 52280046 | 52281221 | |
| 66363 | 52433300 | 52435406 | 041353 |
| 66364 | 52442762 | 52444850 | 041353 |
| 66365 | 52468514 | 52470264 | 041353 |
| 66366 | 52495507 | 52496158 | 041353 |
| 66367 | 52540838 | 52541677 | 041353 |
| 66368 | 52612927 | 52614273 | 166510 |
| 66369 | 52625943 | 52627016 | 166510 |
| 66370 | 53695615 | 53696232 | 206129 |
| 66371 | 53696997 | 53697789 | 206129 |
| 66372 | 54069570 | 54070748 | |
| 66373 | 54238095 | 54238676 | |
| 66374 | 54282945 | 54283425 | 091164 |
| 66375 | 54304655 | 54306806 | 091164 |
| 66376 | 54318042 | 54319475 | 091157, 091164 |
| 66377 | 54557194 | 54559277 | 091157 |
| 66378 | 54653909 | 54654883 | 091157 |
| 66379 | 54717542 | 54718510 | |
| 66380 | 54799011 | 54799745 | |
| 66381 | 54808145 | 54810086 | 267789 |
| 66382 | 54877457 | 54878639 | |
| 66383 | 55089443 | 55090146 | |
| 66384 | 55094080 | 55098804 | |
| 66385 | 55099530 | 55106418 | 119547, 266636 |
| 66386 | 55112496 | 55114735 | 119547 |
| 66387 | 55136928 | 55137884 | 119547 |
| 66388 | 55200194 | 55202450 | |
| 66389 | 55252937 | 55254618 | 066926 |
| 66390 | 55288140 | 55289518 | 134440 |
| 66391 | 55296908 | 55298438 | 267040 |
| 66392 | 55360645 | 55362089 | 267787, 267040, 081923 |
| 66393 | 55379249 | 55380390 | 267787, 267040, 081923 |
| 66394 | 55404708 | 55406206 | 267787, 267040, 081923 |
| 66395 | 55408432 | 55410291 | 081923 |
| 66396 | 55447434 | 55448650 | 081923 |
| 66397 | 55455318 | 55457866 | 081923 |
| 66398 | 55464179 | 55464918 | 081923 |
| 66399 | 55469119 | 55472778 | 081923 |
| 66400 | 55473537 | 55476498 | |
| 66401 | 55478294 | 55482089 | |
| 66402 | 55486414 | 55488247 | |
| 66403 | 55500173 | 55501491 | |
| 66404 | 55513340 | 55513858 | |
| 66405 | 55567947 | 55570578 | |
| 66406 | 55592279 | 55593914 | |
| 66407 | 55594709 | 55595379 | |
| 66408 | 55641991 | 55642747 | |
| 66409 | 55680500 | 55681398 | |
| 66410 | 55710418 | 55714983 | 049759 |
| 66411 | 55721514 | 55721917 | 049759 |
| 66412 | 55724412 | 55725136 | 049759 |
| 66413 | 55753955 | 55756595 | 049759 |
| 66414 | 55757856 | 55758999 | 049759 |
| 66415 | 55763957 | 55764996 | 049759 |
| 66416 | 55770063 | 55771613 | 049759 |
| 66417 | 55784570 | 55786733 | 049759 |
| 66418 | 55795814 | 55796517 | 049759 |
| 66419 | 55888492 | 55894327 | 049759 |
| 66420 | 55897390 | 55898810 | 049759 |
| 66421 | 55898973 | 55900456 | 049759 |
| 66422 | 55901880 | 55902938 | 049759 |
| 66423 | 55906909 | 55907753 | 049759 |
| 66424 | 55951835 | 55955940 | 049759 |
| 66425 | 55980615 | 55983539 | 049759 |
| 66426 | 56028414 | 56032752 | 049759 |
| 66427 | 56065886 | 56066855 | 267396, 049759 |
| 66428 | 56073882 | 56077508 | |
| 66429 | 56079860 | 56086303 | 267675 |
| 66430 | 56110397 | 56123421 | 267391, 207778 |
| 66431 | 56193294 | 56195239 | 198796 |
| 66432 | 56205548 | 56206775 | 267257, 198796 |
| 66433 | 56207262 | 56210228 | 198796 |
| 66434 | 56217040 | 56217627 | 198796 |
| 66435 | 56218716 | 56220510 | 198796 |
| 66436 | 56233496 | 56238334 | 267579, 198796 |
| 66437 | 56243878 | 56247938 | 198796 |
| 66438 | 56259630 | 56260402 | 198796 |
| 66439 | 56267456 | 56270053 | 252284, 198796 |
| 66440 | 56338249 | 56339801 | 172175, 267226 |
| 66441 | 56349612 | 56350386 | 172175, 267476 |
| 66442 | 56391040 | 56391514 | 172175, 267476 |
| 66443 | 56451462 | 56453703 | |
| 66444 | 56455613 | 56457253 | |
| 66445 | 56529881 | 56531620 | 074657 |
| 66446 | 56619996 | 56620836 | 074657 |
| 66447 | 56658902 | 56661665 | |
| 66448 | 56689422 | 56690269 | 224367 |
| 66449 | 56806496 | 56808051 | 166562 |
| 66450 | 57025188 | 57026947 | 074695 |
| 66451 | 57182985 | 57184740 | 183287 |
| 66452 | 57548939 | 57549904 | |
| 66453 | 57566361 | 57567217 | 141682 |
| 66454 | 59316073 | 59316711 | 267175 |
| 66455 | 59324170 | 59324810 | 267175 |
| 66456 | 59357319 | 59358379 | 267175 |
| 66457 | 59399810 | 59402320 | 267175 |
| 66458 | 59402521 | 59403844 | 267175 |
| 66459 | 59405113 | 59406689 | 267175 |
| 66460 | 59479986 | 59480731 | 176641 |
| 66461 | 59490025 | 59490599 | 176641 |
| 66462 | 59521819 | 59522271 | 176641 |
| 66463 | 59532681 | 59533114 | 176641 |
| 66464 | 59559838 | 59562514 | 176641 |
| 66465 | 59563879 | 59564940 | |
| 66466 | 59565397 | 59566863 | |
| 66467 | 59626618 | 59627818 | |
| 66468 | 59658609 | 59661114 | |
| 66469 | 59740982 | 59741849 | 197563 |
| 66470 | 59853256 | 59855567 | 134444, 197563 |
| 66471 | 60087199 | 60088468 | |
| 66472 | 60092142 | 60093860 | |
| 66473 | 60103625 | 60106619 | |
| 66474 | 60117302 | 60120357 | |
| 66475 | 60127693 | 60128919 | |
| 66476 | 60153413 | 60154104 | |
| 66477 | 60172794 | 60174573 | |
| 66478 | 60176821 | 60177750 | |
| 66479 | 60188179 | 60190721 | 141664 |
| 66480 | 60190737 | 60194968 | 141664 |
| 66481 | 60206035 | 60207760 | 141664 |
| 66482 | 60299980 | 60300614 | |
| 66483 | 60301815 | 60302546 | |
| 66484 | 60381782 | 60385404 | 081913 |
| 66485 | 60408250 | 60409712 | 081913 |
| 66486 | 60433974 | 60435690 | 081913 |
| 66487 | 60445055 | 60450317 | 081913 |
| 66488 | 60463395 | 60464099 | 081913 |
| 66489 | 60467717 | 60468303 | 081913 |
| 66490 | 60478701 | 60479933 | 081913 |
| 66491 | 60506969 | 60508563 | 081913 |
| 66492 | 60666316 | 60667381 | |
| 66493 | 60702907 | 60703376 | |
| 66494 | 60767217 | 60767691 | |
| 66495 | 60814955 | 60816959 | 171791 |
| 66496 | 60822379 | 60823142 | 171791 |
| 66497 | 60828459 | 60829611 | 171791 |
| 66498 | 60904383 | 60906357 | 171791 |
| 66499 | 60908512 | 60909458 | 171791 |
| 66500 | 60986452 | 60988553 | 171791 |
| 66501 | 61002611 | 61004351 | 119537 |
| 66502 | 61016033 | 61016319 | 119537 |
| 66503 | 61032925 | 61035409 | 267390, 119537 |
| 66504 | 61073235 | 61073616 | 119541 |
| 66505 | 61074793 | 61075627 | 119541 |
| 66506 | 61077942 | 61078472 | 119541 |
| 66507 | 61088719 | 61090787 | 119541 |
| 66508 | 61546949 | 61547406 | 197632 |
| 66509 | 61631931 | 61632672 | 221887 |
| 66510 | 61636322 | 61638744 | 166401, 221887 |
| 66511 | 61641959 | 61642681 | 221887, 166401 |
| 66512 | 61648887 | 61649699 | 221887, 166401 |
| 66513 | 61921077 | 61923131 | 267134, 266952 |
| 66514 | 61939197 | 61940363 | 267134 |
| 66515 | 61954658 | 61956674 | 267134 |
| 66516 | 63601948 | 63602559 | |
| 66517 | 63608273 | 63609867 | |
| 66518 | 64391734 | 64392378 | |
| 66519 | 64584030 | 64584865 | |
| 66520 | 64771771 | 64772683 | |
| 66521 | 64800144 | 64800550 | |
| 66522 | 64812652 | 64813550 | |
| 66523 | 65183011 | 65184580 | 265533, 171451 |
| 66524 | 65192431 | 65192949 | 265533 |
| 66525 | 65266264 | 65268130 | 265533 |
| 66526 | 65288089 | 65289332 | 265533 |
| 66527 | 66381218 | 66382888 | 150636, 166479 |
| 66528 | 66651315 | 66652165 | 150636 |
| 66529 | 66675728 | 66676422 | 150636 |
| 66530 | 66738878 | 66739470 | |
| 66531 | 67067358 | 67068455 | 206052 |
| 66532 | 67848201 | 67848761 | 176225 |
| 66533 | 67872232 | 67873624 | 176225 |
| 66534 | 67947284 | 67948276 | |
| 66535 | 67949802 | 67950492 | |
| 66536 | 67955333 | 67958499 | 170677 |
| 66537 | 67989995 | 67990585 | 170677 |
| 66538 | 67999521 | 68005558 | 266304, 266258 |
| 66539 | 68030597 | 68031987 | |
| 66540 | 68043196 | 68045896 | |
| 66541 | 68053565 | 68055428 | |
| 66542 | 68086315 | 68088517 | |
| 66543 | 68088570 | 68091203 | |
| 66544 | 68097736 | 68099266 | 214255 |
| 66545 | 68131866 | 68132494 | |
| 66546 | 68156510 | 68158097 | |
| 66547 | 69665527 | 69666271 | |
| 66548 | 69782096 | 69782992 | |
| 66549 | 70985766 | 70986945 | |
| 66550 | 71007019 | 71008858 | 261780 |
| 66551 | 71814429 | 71816671 | 075336, 141665 |
| 66552 | 71863131 | 71864705 | |
| 66553 | 71864812 | 71865653 | |
| 66554 | 71883766 | 71885502 | 260569 |
| 66555 | 71886212 | 71887562 | 260569 |
| 66556 | 71892170 | 71894573 | 260569 |
| 66557 | 71895015 | 71899677 | 243856, 260569 |
| 66558 | 71899933 | 71903497 | 260569 |
| 66559 | 71907453 | 71910956 | 260569 |
| 66560 | 71914911 | 71918029 | |
| 66561 | 71918389 | 71920171 | |
| 66562 | 71932391 | 71936245 | 166347 |
| 66563 | 71945149 | 71945966 | 166347 |
| 66564 | 71948687 | 71951373 | 166347 |
| 66565 | 71953321 | 71960113 | 166347 |
| 66566 | 71966893 | 71967709 | |
| 66567 | 71983828 | 71985066 | 206043 |
| 66568 | 72034910 | 72035653 | |
| 66569 | 72035699 | 72037013 | |
| 66570 | 72146763 | 72148703 | |
| 66571 | 72162513 | 72164771 | 133313 |
| 66572 | 72165627 | 72167746 | 133313 |
| 66573 | 72180823 | 72181334 | 133313 |
| 66574 | 72183201 | 72185045 | 133313 |
| 66575 | 72208501 | 72210464 | 150656 |
| 66576 | 72263530 | 72266463 | 215421, 264247 |
| 66577 | 72418596 | 72419505 | 215421 |
| 66578 | 72427600 | 72428808 | 215421 |
| 66579 | 72508745 | 72510857 | 215421 |
| 66580 | 72514951 | 72517086 | 215421 |
| 66581 | 72517881 | 72519782 | 215421 |
| 66582 | 72551798 | 72553566 | 215421 |
| 66583 | 72662993 | 72663634 | 215421 |
| 66584 | 72919746 | 72922412 | 180011 |
| 66585 | 72924405 | 72924781 | 179981 |
| 66586 | 72925505 | 72926040 | 179981 |
| 66587 | 72926371 | 72928141 | 179981 |
| 66588 | 72938264 | 72939460 | 179981 |
| 66589 | 72953634 | 72954437 | 179981 |
| 66590 | 72958323 | 72960766 | 179981 |
| 66591 | 74060263 | 74061590 | |
| 66592 | 74171121 | 74173033 | 101493 |
| 66593 | 74187697 | 74190492 | 101493 |
| 66594 | 74202705 | 74208791 | 220032, 265778, 101493 |
| 66595 | 74275532 | 74277876 | 263812 |
| 66596 | 74284509 | 74286834 | 263812 |
| 66597 | 74328328 | 74328713 | 266256 |
| 66598 | 74330938 | 74332342 | 266256 |
| 66599 | 74333037 | 74334686 | 266256 |
| 66600 | 74532945 | 74535630 | 130856, 264278 |
| 66601 | 74556153 | 74558006 | 130856 |
| 66602 | 74647846 | 74648339 | 130856 |
| 66603 | 74665488 | 74665960 | 130856 |
| 66604 | 74667585 | 74668330 | 130856 |
| 66605 | 74693604 | 74694159 | 266844, 197971 |
| 66606 | 74766546 | 74768380 | 197971 |
| 66607 | 74795982 | 74797295 | 197971 |
| 66608 | 74815486 | 74816768 | 197971 |
| 66609 | 74825483 | 74828061 | 197971 |
| 66610 | 74838792 | 74840987 | 197971 |
| 66611 | 74842811 | 74845545 | 197971 |
| 66612 | 74919421 | 74919985 | 265844 |
| 66613 | 75033662 | 75034829 | |
| 66614 | 76828299 | 76830203 | 166377 |
| 66615 | 76915982 | 76917275 | 166377 |
| 66616 | 76964834 | 76965688 | 166377 |
| 66617 | 77012863 | 77013841 | 267628, 166377 |
| 66618 | 77153361 | 77155480 | |
| 66619 | 77159793 | 77160783 | 131196 |
| 66620 | 77267364 | 77268382 | 131196 |
| 66621 | 77437951 | 77440698 | 060069, 178412 |
| 66622 | 77693728 | 77695527 | 122490 |
| 66623 | 77696478 | 77697575 | 122490 |
| 66624 | 77700139 | 77703274 | 122490 |
| 66625 | 77707449 | 77708815 | 122490 |
| 66626 | 77710632 | 77712789 | 122490 |
| 66627 | 77724233 | 77725974 | 226742 |
| 66628 | 77747357 | 77749705 | 141759 |
| 66629 | 77770064 | 77771031 | 141759 |
| 66630 | 77792996 | 77794934 | 267127, 101546, 141759 |
| 66631 | 77866607 | 77868165 | 101544 |

[0587] The locations of ODSCs on Chromosome 19 are shown in Table 61.

TABLE 61
ODSC Locations on Chromosome 19

| SEQ ID NO. | Start | End | Overlapping Gene(s) |
|---|---|---|---|
| 66632 | 266938 | 267697 | |
| 66633 | 344195 | 345079 | 105556 |
| 66634 | 409944 | 410682 | |
| 66635 | 459720 | 462465 | 129946 |
| 66636 | 488196 | 490251 | 266933, 099866 |
| 66637 | 506162 | 508134 | 141933, 266933 |
| 66638 | 530430 | 534404 | 099804 |
| 66639 | 534860 | 536303 | 099804 |
| 66640 | 555753 | 556309 | |
| 66641 | 571039 | 574090 | 172270, 267751 |
| 66642 | 584191 | 584942 | |
| 66643 | 632252 | 633843 | 099821 |
| 66644 | 659012 | 664141 | 267666, 070423 |
| 66645 | 674070 | 682156 | 070404 |
| 66646 | 778795 | 779833 | |
| 66647 | 781916 | 783464 | 267530 |
| 66648 | 784382 | 784947 | 267530 |
| 66649 | 796323 | 799915 | 011304 |
| 66650 | 892026 | 893880 | 207507, 175221 |
| 66651 | 912381 | 914000 | 198858 |
| 66652 | 924628 | 927751 | 116017 |
| 66653 | 934271 | 935407 | 116017 |
| 66654 | 940121 | 941779 | 116017 |
| 66655 | 980379 | 980960 | |
| 66656 | 982566 | 983283 | 065268 |
| 66657 | 983541 | 985323 | 065268 |
| 66658 | 1019475 | 1021960 | 207357, 182087 |
| 66659 | 1025879 | 1027529 | 064666 |
| 66660 | 1093451 | 1095780 | 099817 |
| 66661 | 1097569 | 1100474 | |
| 66662 | 1101115 | 1105693 | 167468 |
| 66663 | 1113054 | 1114327 | 064932 |
| 66664 | 1154206 | 1155893 | 064932 |
| 66665 | 1168074 | 1169999 | 064932 |
| 66666 | 1172677 | 1174885 | 064932 |
| 66667 | 1176759 | 1178365 | |
| 66668 | 1180003 | 1182254 | |
| 66669 | 1182816 | 1184902 | |
| 66670 | 1205092 | 1207287 | 118046 |
| 66671 | 1207341 | 1208125 | 118046 |
| 66672 | 1240062 | 1240635 | |
| 66673 | 1241512 | 1242869 | 099624 |
| 66674 | 1244082 | 1246828 | 099624 |
| 66675 | 1247177 | 1255308 | 167470 |
| 66676 | 1258938 | 1263202 | 099622, 167470 |
| 66677 | 1264620 | 1267544 | 099622 |
| 66678 | 1269015 | 1270994 | 267493, 099622 |
| 66679 | 1274623 | 1276788 | 228300, 099622 |
| 66680 | 1282963 | 1285004 | |
| 66681 | 1304153 | 1305040 | 160953 |
| 66682 | 1313422 | 1314023 | 160953 |
| 66683 | 1324594 | 1325783 | 160953 |
| 66684 | 1353977 | 1356824 | 160953 |
| 66685 | 1373095 | 1374681 | 160953 |
| 66686 | 1382967 | 1384925 | 115286 |
| 66687 | 1395280 | 1396206 | 115286, 248015 |
| 66688 | 1399859 | 1401803 | 130005 |
| 66689 | 1406573 | 1409435 | 071626 |
| 66690 | 1415304 | 1416387 | 071626 |
| 66691 | 1437584 | 1439857 | 115268 |
| 66692 | 1469010 | 1469543 | 115266, 119559 |
| 66693 | 1478313 | 1479997 | 119559 |
| 66694 | 1490385 | 1493665 | 115255, 115257 |
| 66695 | 1500993 | 1501689 | |
| 66696 | 1512527 | 1514309 | 185761 |
| 66697 | 1587784 | 1588706 | 267059, 071655 |
| 66698 | 1591094 | 1593376 | 071655, 267059 |
| 66699 | 1604429 | 1606849 | 127540, 267059 |
| 66700 | 1652324 | 1653844 | 071564 |
| 66701 | 1747332 | 1748315 | 267073 |
| 66702 | 1811449 | 1812479 | 130270 |
| 66703 | 1812553 | 1813304 | |
| 66704 | 1826032 | 1827131 | 079313 |
| 66705 | 1832998 | 1834669 | 079313 |
| 66706 | 1837581 | 1838200 | 079313 |
| 66707 | 1847208 | 1849134 | 079313 |
| 66708 | 1857078 | 1858250 | 129911 |
| 66709 | 1861924 | 1865236 | 267141, 129911 |
| 66710 | 1870642 | 1871953 | |
| 66711 | 1875552 | 1877037 | 129968, 267232, 261526 |
| 66712 | 1884295 | 1885661 | 129968 |
| 66713 | 1904903 | 1906280 | 213638, 227500 |
| 66714 | 1928897 | 1930450 | |
| 66715 | 1939802 | 1943150 | 133275 |
| 66716 | 2014727 | 2016021 | 133243 |
| 66717 | 2031802 | 2033180 | 133243 |
| 66718 | 2041253 | 2043176 | 099875 |
| 66719 | 2047245 | 2052665 | 099875 |
| 66720 | 2057855 | 2062694 | |
| 66721 | 2087021 | 2087532 | 172081 |
| 66722 | 2095194 | 2096775 | 099840, 172081 |
| 66723 | 2149790 | 2151894 | 065000 |
| 66724 | 2163101 | 2165795 | 104885, 065000 |
| 66725 | 2167825 | 2170333 | 104885 |
| 66726 | 2234950 | 2237626 | 104897, 104886 |
| 66727 | 2268381 | 2271826 | 104904, 167476 |
| 66728 | 2273563 | 2274678 | 188305 |
| 66729 | 2327794 | 2329602 | 005206, 130332 |
| 66730 | 2394312 | 2395434 | 178297 |
| 66731 | 2395795 | 2397005 | 178297 |
| 66732 | 2426377 | 2428229 | 176619, 099800 |
| 66733 | 2455640 | 2457334 | 176619 |
| 66734 | 2458149 | 2458673 | |
| 66735 | 2462525 | 2463582 | |
| 66736 | 2474316 | 2480985 | 099860 |
| 66737 | 2488068 | 2489863 | |
| 66738 | 2490607 | 2492168 | |
| 66739 | 2494030 | 2496367 | |
| 66740 | 2506672 | 2507955 | |
| 66741 | 2524744 | 2525896 | 176533 |
| 66742 | 2528360 | 2530547 | 176533 |
| 66743 | 2531914 | 2536927 | 176533 |
| 66744 | 2539378 | 2548199 | 176533 |
| 66745 | 2557272 | 2558186 | 176533 |
| 66746 | 2575841 | 2580469 | 176533 |
| 66747 | 2587158 | 2589254 | 176533 |
| 66748 | 2591553 | 2592612 | 176533 |
| 66749 | 2598582 | 2599881 | 176533 |
| 66750 | 2602336 | 2603081 | 176533 |
| 66751 | 2610368 | 2611789 | 267412, 176533 |
| 66752 | 2624451 | 2632215 | 267214, 176533 |
| 66753 | 2632429 | 2637428 | 267214, 176533 |
| 66754 | 2739284 | 2740472 | 141873, 267001 |
| 66755 | 2775464 | 2776747 | 104969 |
| 66756 | 2781971 | 2783790 | 104969 |
| 66757 | 2784954 | 2786462 | 172009 |
| 66758 | 2790131 | 2791630 | 172009 |
| 66759 | 2818929 | 2820794 | 172006 |
| 66760 | 2840634 | 2842755 | 186300 |
| 66761 | 2900294 | 2901668 | 171970 |
| 66762 | 2944116 | 2945920 | 175691 |
| 66763 | 2949433 | 2951388 | |
| 66764 | 2977018 | 2978302 | 104953 |
| 66765 | 3034156 | 3037053 | 065717 |
| 66766 | 3061207 | 3063218 | 104964 |
| 66767 | 3093750 | 3095835 | 088256 |
| 66768 | 3184654 | 3187009 | 125912 |
| 66769 | 3334607 | 3338130 | |
| 66770 | 3338301 | 3339320 | |
| 66771 | 3343385 | 3344522 | |
| 66772 | 3345908 | 3347600 | |
| 66773 | 3349855 | 3350994 | |
| 66774 | 3358450 | 3362094 | 141905 |
| 66775 | 3365139 | 3371455 | 141905 |
| 66776 | 3373474 | 3376602 | 141905 |
| 66777 | 3384195 | 3385459 | 141905 |
| 66778 | 3386457 | 3389813 | 141905 |
| 66779 | 3397135 | 3399398 | 141905 |
| 66780 | 3402926 | 3405831 | 141905 |
| 66781 | 3407342 | 3414806 | 141905 |
| 66782 | 3415620 | 3416555 | 141905 |
| 66783 | 3428189 | 3429210 | 141905 |
| 66784 | 3429465 | 3431105 | 141905 |
| 66785 | 3431531 | 3432817 | 141905 |
| 66786 | 3450344 | 3453166 | 141905 |
| 66787 | 3458969 | 3460691 | 141905 |
| 66788 | 3467806 | 3468310 | 141905 |
| 66789 | 3499894 | 3501214 | 129932 |
| 66790 | 3505283 | 3509780 | 105325 |
| 66791 | 3516754 | 3517292 | 105325 |
| 66792 | 3544905 | 3545673 | 161091, 267436 |
| 66793 | 3552832 | 3553399 | 161091, 267436 |
| 66794 | 3556362 | 3558172 | 267231, 267436, 161091 |
| 66795 | 3572501 | 3573751 | 064961, 161091 |
| 66796 | 3580125 | 3580630 | |
| 66797 | 3625726 | 3627530 | 105298 |
| 66798 | 3644436 | 3645151 | 186111 |
| 66799 | 3657868 | 3658428 | 186111 |
| 66800 | 3699550 | 3700844 | 186111 |
| 66801 | 3708138 | 3708980 | 105289 |
| 66802 | 3710230 | 3710968 | 105289 |
| 66803 | 3760679 | 3763463 | 183617, 011132 |
| 66804 | 3894894 | 3895401 | 167654 |
| 66805 | 3967943 | 3971611 | 167657 |
| 66806 | 3983001 | 3986925 | 167658 |
| 66807 | 4006710 | 4008646 | 105229 |
| 66808 | 4051003 | 4053409 | 178951 |
| 66809 | 4057706 | 4062193 | 268670, 178951 |
| 66810 | 4062892 | 4068265 | 178951 |
| 66811 | 4077116 | 4078657 | |
| 66812 | 4122570 | 4124609 | 126934 |
| 66813 | 4130784 | 4131594 | |
| 66814 | 4134244 | 4134835 | |
| 66815 | 4136668 | 4137162 | |
| 66816 | 4144441 | 4146386 | |
| 66817 | 4147100 | 4147743 | |
| 66818 | 4149444 | 4150128 | |
| 66819 | 4152555 | 4153960 | 060566 |
| 66820 | 4181729 | 4183106 | 077463 |
| 66821 | 4186355 | 4187073 | 089847 |
| 66822 | 4246366 | 4247666 | 105248 |
| 66823 | 4266976 | 4269479 | 105248 |
| 66824 | 4313862 | 4314515 | 105255 |
| 66825 | 4337751 | 4339393 | 178078 |
| 66826 | 4342056 | 4344104 | 008382, 178078, 269425 |
| 66827 | 4345688 | 4346251 | 008382 |
| 66828 | 4373169 | 4375796 | 141985 |
| 66829 | 4376192 | 4380478 | 141985 |
| 66830 | 4387954 | 4392500 | 141985 |
| 66831 | 4399268 | 4400915 | 141985 |
| 66832 | 4402261 | 4403032 | 167670 |
| 66833 | 4448602 | 4449778 | 167671 |
| 66834 | 4456761 | 4458324 | 267011, 167671 |
| 66835 | 4471692 | 4473530 | 167674 |
| 66836 | 4516574 | 4519758 | 167676 |
| 66837 | 4521184 | 4522061 | |
| 66838 | 4537717 | 4538673 | 267385, 171236 |
| 66839 | 4539303 | 4541022 | 267385, 171236 |
| 66840 | 4547168 | 4548005 | 167680 |
| 66841 | 4596139 | 4596906 | |
| 66842 | 4633085 | 4634040 | |
| 66843 | 4639458 | 4640818 | 185361 |
| 66844 | 4654535 | 4655445 | 268565, 185361, 074842 |
| 66845 | 4669448 | 4670717 | 074842 |
| 66846 | 4693271 | 4697035 | 142002 |
| 66847 | 4704190 | 4711597 | 142002 |
| 66848 | 4712524 | 4716576 | 142002 |
| 66849 | 4721996 | 4724971 | 142002 |
| 66850 | 4790761 | 4792331 | 269604, 141965, 268536 |
| 66851 | 4811575 | 4813978 | |
| 66852 | 4815630 | 4816326 | 127666 |
| 66853 | 4828932 | 4829832 | 127666 |
| 66854 | 4830283 | 4832425 | 127666 |
| 66855 | 4842442 | 4843144 | 105355 |
| 66856 | 4866312 | 4868201 | 105355 |
| 66857 | 4870011 | 4870606 | |
| 66858 | 4904485 | 4905073 | 034063 |
| 66859 | 4968588 | 4970194 | 127663 |
| 66860 | 4972146 | 4973231 | 127663 |
| 66861 | 5001580 | 5002562 | 127663 |
| 66862 | 5054368 | 5055674 | 127663 |
| 66863 | 5104705 | 5105520 | 127663 |
| 66864 | 5484231 | 5485058 | |
| 66865 | 5485096 | 5485702 | |
| 66866 | 5621807 | 5624527 | 160633, 130254 |
| 66867 | 5679421 | 5681179 | 167733, 174917, 130255 |
| 66868 | 5689897 | 5691417 | 130255 |
| 66869 | 5717224 | 5721090 | 174898, 196365 |
| 66870 | 5773588 | 5774178 | 174898 |
| 66871 | 5790460 | 5791560 | 141994 |
| 66872 | 5800396 | 5801411 | |
| 66873 | 5805477 | 5806362 | |
| 66874 | 5826599 | 5827155 | 171119 |
| 66875 | 5827915 | 5829646 | 171119 |
| 66876 | 5837799 | 5838681 | 156413 |
| 66877 | 5870826 | 5871529 | 267740, 130383 |
| 66878 | 5872232 | 5872794 | 267740, 130383 |
| 66879 | 5880129 | 5881265 | 267740, 130383 |
| 66880 | 5902829 | 5905231 | 267314, 187650, 174886, |
| | | | 267740, 130383 |
| 66881 | 5913718 | 5914508 | 267571, 267314, 105519 |
| 66882 | 5953187 | 5955163 | 031823 |
| 66883 | 5961721 | 5963307 | 031823 |
| 66884 | 5967949 | 5968405 | 031823 |
| 66885 | 5977057 | 5979078 | 266983, 031823 |
| 66886 | 5987184 | 5987893 | 266983 |
| 66887 | 6056842 | 6057651 | 087903 |
| 66888 | 6110325 | 6111060 | 087903, 267299 |
| 66889 | 6199117 | 6200308 | 087903 |
| 66890 | 6201831 | 6202341 | |
| 66891 | 6233014 | 6233824 | 130382 |
| 66892 | 6259016 | 6259768 | 267563, 130382 |
| 66893 | 6267594 | 6275458 | 130382 |
| 66894 | 6278852 | 6280521 | 130382 |
| 66895 | 6361254 | 6362837 | 125656, 269802 |
| 66896 | 6371976 | 6373612 | 125652 |
| 66897 | 6423733 | 6424833 | 088247 |
| 66898 | 6424854 | 6426167 | 181240 |
| 66899 | 6458867 | 6461050 | 125648 |
| 66900 | 6463993 | 6465175 | 125648, 130545 |
| 66901 | 6516379 | 6517602 | |
| 66902 | 6669754 | 6670566 | 125735 |
| 66903 | 6719065 | 6722144 | 125730 |
| 66904 | 6722366 | 6723702 | 125730 |
| 66905 | 6725300 | 6726007 | 125730 |
| 66906 | 6729211 | 6730674 | 125734, 125730 |
| 66907 | 6735954 | 6740505 | 125733, 125734 |
| 66908 | 6752086 | 6753885 | 125731 |
| 66909 | 6800975 | 6801964 | 141968 |
| 66910 | 6862627 | 6863958 | |
| 66911 | 7069126 | 7070450 | 130544 |
| 66912 | 7134610 | 7135758 | 171105 |
| 66913 | 7145253 | 7146216 | 171105 |
| 66914 | 7196868 | 7197641 | 171105 |
| 66915 | 7197755 | 7200895 | 171105 |
| 66916 | 7202792 | 7203771 | 171105 |
| 66917 | 7224181 | 7224739 | 171105 |
| 66918 | 7256063 | 7259131 | 171105 |
| 66919 | 7287213 | 7288784 | 171105 |
| 66920 | 7292816 | 7295288 | 171105 |
| 66921 | 7296035 | 7296561 | |
| 66922 | 7459014 | 7460753 | 104880, 267852, 268861 |
| 66923 | 7463263 | 7464538 | 268861, 104880 |
| 66924 | 7553528 | 7554907 | 104883 |
| 66925 | 7559022 | 7560067 | 198723, 104883 |
| 66926 | 7580380 | 7581845 | 198816, 267952 |
| 66927 | 7586912 | 7588317 | 090674 |
| 66928 | 7598313 | 7601501 | 032444, 268614, 090674 |
| 66929 | 7660543 | 7662257 | 076826 |
| 66930 | 7683123 | 7684707 | 076924, 076826 |
| 66931 | 7693430 | 7695486 | 229833, 268400, 076924 |
| 66932 | 7701757 | 7702917 | 076944, 268204, 268400 |
| 66933 | 7716862 | 7717497 | |
| 66934 | 7745380 | 7747067 | 181029, 269711 |
| 66935 | 7864336 | 7864965 | |
| 66936 | 7894418 | 7895841 | 142459 |
| 66937 | 7917766 | 7919046 | 142459 |
| 66938 | 7953162 | 7954176 | 171017 |
| 66939 | 7967547 | 7970039 | 076984, 214248 |
| 66940 | 7981349 | 7982049 | 260001 |
| 66941 | 7983383 | 7985946 | 104976, 260500, 260001 |
| 66942 | 8007700 | 8009559 | 104980 |
| 66943 | 8043142 | 8044473 | 066044 |
| 66944 | 8051630 | 8052526 | 066044 |
| 66945 | 8069617 | 8071415 | 066044 |
| 66946 | 8086992 | 8087638 | |
| 66947 | 8150457 | 8151418 | 142449 |
| 66948 | 8219404 | 8220069 | |
| 66949 | 8273545 | 8275334 | 090661 |
| 66950 | 8289303 | 8289751 | 090661, 271717 |
| 66951 | 8304739 | 8306218 | 090661 |
| 66952 | 8310792 | 8311699 | 090661 |
| 66953 | 8315626 | 8316600 | 090661 |
| 66954 | 8333506 | 8334657 | |
| 66955 | 8370710 | 8373816 | 267855, 167774, 167775 |
| 66956 | 8385048 | 8387565 | 233927, 186994, 267855, |
| | | | 167774 |
| 66957 | 8418865 | 8419248 | |
| 66958 | 8419754 | 8421398 | |
| 66959 | 8424947 | 8425882 | |
| 66960 | 8426351 | 8429965 | 167772 |
| 66961 | 8431492 | 8432856 | 167772 |
| 66962 | 8438545 | 8439808 | 269386, 167772 |
| 66963 | 8452479 | 8455939 | 185236, 265390, 269386 |
| 66964 | 8459184 | 8460040 | 185236 |
| 66965 | 8476282 | 8477311 | |
| 66966 | 8477704 | 8478856 | 099785 |
| 66967 | 8486320 | 8487618 | 099785 |
| 66968 | 8487919 | 8489281 | 268931, 099785 |
| 66969 | 8509048 | 8512408 | 099783 |
| 66970 | 8523666 | 8525846 | 099783 |
| 66971 | 8570615 | 8571467 | |
| 66972 | 8577809 | 8579424 | 133250 |
| 66973 | 8590969 | 8592037 | 142347 |
| 66974 | 8675112 | 8676118 | 142303 |
| 66975 | 8739964 | 8741369 | 268480 |
| 66976 | 8747329 | 8748376 | 268480 |
| 66977 | 8749153 | 8750610 | |
| 66978 | 8942307 | 8943778 | 269400, 170948, 167785 |
| 66979 | 9250369 | 9251867 | 130803 |
| 66980 | 9419854 | 9421162 | 196110 |
| 66981 | 9434524 | 9435372 | 188629, 270011, 188321 |
| 66982 | 9545631 | 9546552 | 174652 |
| 66983 | 9648705 | 9649938 | 130818 |
| 66984 | 9694165 | 9695742 | 197961 |
| 66985 | 9731160 | 9733133 | 267106, 171469 |
| 66986 | 9784222 | 9786501 | 171466 |
| 66987 | 9878392 | 9880379 | 196605 |
| 66988 | 9895613 | 9897027 | 196605 |
| 66989 | 9903141 | 9903839 | 196605 |
| 66990 | 9928680 | 9930570 | 127452 |
| 66991 | 9937656 | 9939463 | 198258, 127452 |
| 66992 | 9945852 | 9946819 | 127445 |
| 66993 | 9963898 | 9964926 | 105088 |
| 66994 | 10024245 | 10025787 | 105088 |
| 66995 | 10046556 | 10047566 | 105088 |
| 66996 | 10112444 | 10113272 | 080573 |
| 66997 | 10137968 | 10138859 | |
| 66998 | 10147003 | 10148797 | 167798 |
| 66999 | 10179166 | 10180394 | 167798 |
| 67000 | 10181378 | 10182215 | 167798 |
| 67001 | 10196299 | 10197915 | 130813 |
| 67002 | 10200285 | 10201302 | 267387, 130813 |
| 67003 | 10201521 | 10202096 | 130813 |
| 67004 | 10216719 | 10218099 | 243207, 130810 |
| 67005 | 10223066 | 10224368 | 244165, 243207, 130810 |
| 67006 | 10224521 | 10226210 | 130811, 244165, 243207, |
| | | | 130810 |
| 67007 | 10229302 | 10230918 | 130811 |
| 67008 | 10330389 | 10330864 | 130816 |
| 67009 | 10340877 | 10342511 | 264266, 267534, 130816 |
| 67010 | 10346582 | 10347370 | |
| 67011 | 10362381 | 10363896 | 105364, 266978 |
| 67012 | 10371558 | 10372248 | 266978 |
| 67013 | 10375906 | 10376554 | 266978 |
| 67014 | 10380037 | 10383332 | 090339, 266978 |
| 67015 | 10425652 | 10427101 | 161847, 267303, 167807, |
| | | | 267673 |
| 67016 | 10443063 | 10444449 | 161847 |
| 67017 | 10444535 | 10446796 | 076662 |
| 67018 | 10456835 | 10457719 | |
| 67019 | 10463376 | 10464376 | 105397 |
| 67020 | 10490328 | 10492188 | 105397 |
| 67021 | 10513160 | 10515150 | 221566, 105401 |
| 67022 | 10526644 | 10527778 | 065989, 105401 |
| 67023 | 10609101 | 10609576 | 079999 |
| 67024 | 10612140 | 10614695 | 079999 |
| 67025 | 10654191 | 10656061 | 130734 |
| 67026 | 10675856 | 10677126 | 129347 |
| 67027 | 10763488 | 10766167 | 129351, 267100 |
| 67028 | 10788443 | 10788911 | 129351 |
| 67029 | 10811827 | 10812991 | 213339 |
| 67030 | 10827928 | 10829717 | 207972, 079805 |
| 67031 | 10855553 | 10856204 | 079805 |
| 67032 | 10859321 | 10860569 | 079805 |
| 67033 | 10874624 | 10875545 | 079805 |
| 67034 | 10880123 | 10881228 | 079805 |
| 67035 | 10945946 | 10947903 | 214212, 099203 |
| 67036 | 10981191 | 10983648 | 142453 |
| 67037 | 11009663 | 11010382 | 142453 |
| 67038 | 11038480 | 11040528 | 142444, 130733 |
| 67039 | 11049802 | 11051027 | |
| 67040 | 11057433 | 11058445 | |
| 67041 | 11070599 | 11072804 | 127616 |
| 67042 | 11108632 | 11109447 | 127616 |
| 67043 | 11134852 | 11136098 | 127616 |
| 67044 | 11146330 | 11147057 | 127616 |
| 67045 | 11194488 | 11195308 | |
| 67046 | 11195484 | 11196785 | |
| 67047 | 11198727 | 11204766 | 130164 |
| 67048 | 11204940 | 11207790 | 130164 |
| 67049 | 11224714 | 11225171 | 130164 |
| 67050 | 11248195 | 11250530 | 161888 |
| 67051 | 11252535 | 11254617 | 161888 |
| 67052 | 11262766 | 11264026 | 161888 |
| 67053 | 11266046 | 11267109 | 161888 |
| 67054 | 11268248 | 11268901 | |
| 67055 | 11270325 | 11270868 | |
| 67056 | 11294982 | 11295630 | 197256 |
| 67057 | 11300386 | 11300999 | 197256 |
| 67058 | 11307179 | 11308840 | 197256 |
| 67059 | 11346015 | 11348221 | 130173, 130158 |
| 67060 | 11349422 | 11351124 | 130158, 130173 |
| 67061 | 11372459 | 11373833 | 130158 |
| 67062 | 11375703 | 11377115 | |
| 67063 | 11404148 | 11404977 | |
| 67064 | 11434232 | 11435283 | 267174, 267576, 105514, |
| | | | 130167 |
| 67065 | 11454972 | 11455526 | 183401, 105518, 105514 |
| 67066 | 11456740 | 11457665 | 105518, 105514, 183401 |
| 67067 | 11465716 | 11466727 | 105520 |
| 67068 | 11484856 | 11486925 | 173928, 267277 |
| 67069 | 11489161 | 11489740 | 187266 |
| 67070 | 11529202 | 11530122 | 205517 |
| 67071 | 11545595 | 11547333 | 130175, 198003 |
| 67072 | 11593356 | 11593872 | 267477 |
| 67073 | 11596129 | 11596757 | 267477, 161914 |
| 67074 | 11601504 | 11602110 | 267477, 161914 |
| 67075 | 11615895 | 11616956 | 130159, 267477, 161914 |
| 67076 | 11639116 | 11640366 | 130159 |
| 67077 | 11642827 | 11643260 | |
| 67078 | 11646149 | 11647290 | |
| 67079 | 11669391 | 11670552 | 198551, 130165 |
| 67080 | 11707929 | 11709246 | 198551 |
| 67081 | 11734110 | 11735930 | |
| 67082 | 11750113 | 11751418 | 197332 |
| 67083 | 11848511 | 11850631 | 197933 |
| 67084 | 11877399 | 11879457 | 197044 |
| 67085 | 11908187 | 11908745 | 177599, 267646 |
| 67086 | 11924593 | 11925893 | 171295 |
| 67087 | 11998322 | 11999467 | 198429 |
| 67088 | 12035602 | 12036726 | 196757, 197054, 267179 |
| 67089 | 12098168 | 12099546 | 219665 |
| 67090 | 12145700 | 12147046 | 197647, 257355, 219665 |
| 67091 | 12175093 | 12176398 | 223547 |
| 67092 | 12250394 | 12251554 | 257591, 132010, 213297 |
| 67093 | 12273586 | 12274762 | 196646 |
| 67094 | 12404415 | 12406568 | 197857 |
| 67095 | 12425306 | 12425871 | |
| 67096 | 12440830 | 12444873 | 188868 |
| 67097 | 12511494 | 12512536 | 268744, 196466, 268870 |
| 67098 | 12551120 | 12552299 | 180855, 268870, 269755 |
| 67099 | 12595379 | 12596209 | 269755, 196826, 242852 |
| 67100 | 12605868 | 12607052 | 196826, 242852 |
| 67101 | 12661223 | 12663542 | 230310, 196826, 249709, |
| | | | 269693 |
| 67102 | 12707973 | 12708629 | 188033 |
| 67103 | 12721128 | 12722554 | 173875, 188033 |
| 67104 | 12776918 | 12777885 | 123154, 104774, 269590 |
| 67105 | 12779006 | 12781517 | 269590, 105583, 123154 |
| 67106 | 12791998 | 12793045 | 095059 |
| 67107 | 12806459 | 12808138 | 132004 |
| 67108 | 12831939 | 12835031 | 105576 |
| 67109 | 12843913 | 12845898 | 123144 |
| 67110 | 12847472 | 12849075 | 198356 |
| 67111 | 12868259 | 12868782 | 039987 |
| 67112 | 12884315 | 12884835 | 095066 |
| 67113 | 12885930 | 12886748 | 095066 |
| 67114 | 12888153 | 12890702 | 095066 |
| 67115 | 12892811 | 12896602 | 267212, 095066 |
| 67116 | 12898856 | 12905862 | 171223, 095066 |
| 67117 | 12911810 | 12913255 | 167815, 267062, 095066 |
| 67118 | 12991517 | 12992796 | 267735, 105612 |
| 67119 | 13001537 | 13002747 | 105607 |
| 67120 | 13043514 | 13045248 | 179115, 266975 |
| 67121 | 13048914 | 13050718 | 179218 |
| 67122 | 13056139 | 13058007 | 179262 |
| 67123 | 13067250 | 13068764 | 179271 |
| 67124 | 13105872 | 13106406 | |
| 67125 | 13106572 | 13107764 | 008441 |
| 67126 | 13112382 | 13113445 | 008441 |
| 67127 | 13133081 | 13135577 | 008441 |
| 67128 | 13198538 | 13199507 | 008441 |
| 67129 | 13206993 | 13207665 | 008441 |
| 67130 | 13213072 | 13213736 | 104903 |
| 67131 | 13226070 | 13228165 | 104907 |
| 67132 | 13228693 | 13230598 | 160877 |
| 67133 | 13239216 | 13239818 | 160877 |
| 67134 | 13245326 | 13245689 | 160877 |
| 67135 | 13260166 | 13267514 | 160888, 267598, 104915 |
| 67136 | 13273087 | 13275112 | |
| 67137 | 13277512 | 13279520 | |
| 67138 | 13282904 | 13283522 | |
| 67139 | 13301277 | 13302452 | |
| 67140 | 13306205 | 13307096 | |
| 67141 | 13371354 | 13372252 | 141837 |
| 67142 | 13507337 | 13507746 | 141837 |
| 67143 | 13833705 | 13834501 | |
| 67144 | 13838605 | 13839180 | |
| 67145 | 13841364 | 13843251 | 104957 |
| 67146 | 13858461 | 13859874 | 104957 |
| 67147 | 13875016 | 13876965 | 037757 |
| 67148 | 13885058 | 13886314 | 037757, 104979 |
| 67149 | 13904956 | 13908649 | 132003, 267582 |
| 67150 | 13943852 | 13944986 | |
| 67151 | 13952391 | 13954835 | |
| 67152 | 13957166 | 13959320 | |
| 67153 | 13960659 | 13963037 | |
| 67154 | 13963165 | 13964956 | |
| 67155 | 13972140 | 13973571 | 187556 |
| 67156 | 13990756 | 13992255 | 187556 |
| 67157 | 14016768 | 14018094 | 132024, 132016 |
| 67158 | 14062950 | 14064098 | 132017, 132000 |
| 67159 | 14115383 | 14118500 | 132005 |
| 67160 | 14142308 | 14143406 | 104998, 267670 |
| 67161 | 14171853 | 14173451 | |
| 67162 | 14182306 | 14186373 | 141854 |
| 67163 | 14190923 | 14193560 | 188032 |
| 67164 | 14201005 | 14202648 | 072062, 141858 |
| 67165 | 14228391 | 14230706 | 267783, 105011, 072062 |
| 67166 | 14247153 | 14249084 | 267169, 105011 |
| 67167 | 14528964 | 14530916 | 123136 |
| 67168 | 14543946 | 14544994 | 123143 |
| 67169 | 14606151 | 14607890 | 123159 |
| 67170 | 14613380 | 14613991 | |
| 67171 | 14617780 | 14619505 | |
| 67172 | 14620984 | 14622313 | |
| 67173 | 14623514 | 14624491 | |
| 67174 | 14626654 | 14631134 | 099797, 132002 |
| 67175 | 14639840 | 14641272 | 207707, 132002, 099797 |
| 67176 | 14655894 | 14656725 | 099797 |
| 67177 | 14682140 | 14683253 | 099795 |
| 67178 | 14800179 | 14801372 | 160961, 131355 |
| 67179 | 15217912 | 15218476 | 105137 |
| 67180 | 15235102 | 15236785 | 105135, 268564 |
| 67181 | 15359242 | 15360173 | 141867 |
| 67182 | 15391629 | 15392381 | 141867 |
| 67183 | 15407386 | 15409267 | 141867 |
| 67184 | 15439229 | 15440232 | 141867 |
| 67185 | 15441697 | 15443994 | 141867 |
| 67186 | 15468673 | 15469194 | 105127 |
| 67187 | 15478147 | 15478585 | 105127 |
| 67188 | 15488496 | 15491690 | 011243, 268189, 105127 |
| 67189 | 15522129 | 15522575 | 011243 |
| 67190 | 15528773 | 15530418 | 011243 |
| 67191 | 15542375 | 15544371 | 011451 |
| 67192 | 15560054 | 15561358 | 269782, 011451 |
| 67193 | 15563494 | 15565228 | 105122 |
| 67194 | 15579484 | 15580438 | 161031 |
| 67195 | 15589694 | 15591554 | 161031 |
| 67196 | 15616699 | 15617464 | |
| 67197 | 15625184 | 15626413 | 269765, 171954 |
| 67198 | 15744941 | 15747597 | |
| 67199 | 15750105 | 15756476 | 186529 |
| 67200 | 15783281 | 15784928 | 186204 |
| 67201 | 15791091 | 15792704 | 186204 |
| 67202 | 15946874 | 15948454 | 214049 |
| 67203 | 15979809 | 15980656 | |
| 67204 | 16007736 | 16009233 | 186115 |
| 67205 | 16037027 | 16037946 | 171903 |
| 67206 | 16044626 | 16046850 | 171903 |
| 67207 | 16112626 | 16113393 | |
| 67208 | 16186375 | 16190589 | 167460 |
| 67209 | 16205321 | 16206412 | 167460 |
| 67210 | 16222042 | 16223712 | 167461 |
| 67211 | 16226250 | 16227251 | 167461 |
| 67212 | 16230031 | 16230848 | 167461 |
| 67213 | 16274536 | 16275650 | 141977 |
| 67214 | 16295742 | 16297072 | 105058 |
| 67215 | 16307374 | 16309975 | 072958 |
| 67216 | 16310284 | 16311873 | 072958 |
| 67217 | 16389850 | 16390470 | |
| 67218 | 16403543 | 16405290 | 267275 |
| 67219 | 16435146 | 16436574 | 127528, 267275 |
| 67220 | 16441197 | 16441786 | |
| 67221 | 16473899 | 16474363 | 127527 |
| 67222 | 16572338 | 16574640 | 127527 |
| 67223 | 16574643 | 16575417 | 127527 |
| 67224 | 16580341 | 16583686 | 127527 |
| 67225 | 16603650 | 16604349 | 269058, 141979 |
| 67226 | 16652379 | 16654277 | 269399, 085872, 141979 |
| 67227 | 16682069 | 16684283 | 127526, 141979 |
| 67228 | 16718997 | 16719539 | 105085, 268790, 141979 |
| 67229 | 16722027 | 16723119 | 268087, 105085, 268790, |
| | | | 141979 |
| 67230 | 16737601 | 16740590 | 105085, 141979, 268087, |
| | | | 268790 |
| 67231 | 16770208 | 16773025 | 072954, 268790, 214046 |
| 67232 | 16786942 | 16788061 | 072954 |
| 67233 | 16795875 | 16796772 | 072954 |
| 67234 | 16939994 | 16941147 | 127511 |
| 67235 | 16996973 | 16997781 | |
| 67236 | 17185441 | 17187440 | 099331, 131351 |
| 67237 | 17208195 | 17208960 | 099331, 269066 |
| 67238 | 17218883 | 17219307 | 099331 |
| 67239 | 17244897 | 17245407 | 099331 |
| 67240 | 17325160 | 17326806 | 053501, 099331 |
| 67241 | 17336635 | 17338278 | 099330 |
| 67242 | 17350575 | 17352007 | 160113, 269095 |
| 67243 | 17352991 | 17358435 | 160113, 269095 |
| 67244 | 17377868 | 17379306 | 105393, 269307, 130307 |
| 67245 | 17413263 | 17414667 | 127220, 130312 |
| 67246 | 17415831 | 17417850 | 130312, 127220 |
| 67247 | 17420020 | 17421494 | 130311, 127220 |
| 67248 | 17422427 | 17423878 | 130311 |
| 67249 | 17444791 | 17446230 | 130299, 074855 |
| 67250 | 17447215 | 17448601 | 130299 |
| 67251 | 17451569 | 17452184 | 130299 |
| 67252 | 17515161 | 17518025 | 269640, 141971, 130303 |
| 67253 | 17530013 | 17531596 | 269053, 269481, 141971 |
| 67254 | 17618706 | 17619698 | 269439 |
| 67255 | 17621355 | 17623757 | 130313, 269439 |
| 67256 | 17666104 | 17667547 | 130309 |
| 67257 | 17829884 | 17831220 | 130479 |
| 67258 | 17901044 | 17901780 | |
| 67259 | 17907229 | 17908868 | 179913 |
| 67260 | 17970161 | 17972298 | 105640 |
| 67261 | 18042699 | 18045106 | 007080 |
| 67262 | 18058325 | 18059495 | |
| 67263 | 18111258 | 18113142 | 105643 |
| 67264 | 18117484 | 18120565 | 105643 |
| 67265 | 18123725 | 18125534 | 105643 |
| 67266 | 18130497 | 18133826 | 268032 |
| 67267 | 18140160 | 18141335 | 268032 |
| 67268 | 18155665 | 18156579 | |
| 67269 | 18156851 | 18157823 | |
| 67270 | 18161765 | 18163290 | |
| 67271 | 18214788 | 18216060 | 099308 |
| 67272 | 18219405 | 18221927 | 099308 |
| 67273 | 18228371 | 18229098 | 099308 |
| 67274 | 18246212 | 18247753 | 099308 |
| 67275 | 18262189 | 18265595 | 268173, 105647, 269145, |
| | | | 099308 |
| 67276 | 18284163 | 18285256 | 268173, 216490 |
| 67277 | 18302454 | 18304882 | 254858 |
| 67278 | 18314778 | 18316332 | 268650, 105649 |
| 67279 | 18334733 | 18335638 | 105650 |
| 67280 | 18384685 | 18386958 | 130518 |
| 67281 | 18389542 | 18393956 | 130522, 267959 |
| 67282 | 18401959 | 18404710 | |
| 67283 | 18411336 | 18412427 | |
| 67284 | 18414941 | 18416409 | |
| 67285 | 18432949 | 18434935 | 130520 |
| 67286 | 18439090 | 18440057 | 67995 |
| 67287 | 18451012 | 18452508 | 130517 |
| 67288 | 18468154 | 18468983 | 130517 |
| 67289 | 18473779 | 18477521 | 130517 |
| 67290 | 18479255 | 18479872 | 130517 |
| 67291 | 18483592 | 18486218 | 130513 |
| 67292 | 18487658 | 18492040 | 130513 |
| 67293 | 18493380 | 18494526 | 130513 |
| 67294 | 18495850 | 18498727 | 264175, 130513 |
| 67295 | 18499084 | 18500294 | 130513 |
| 67296 | 18506720 | 18507918 | 175489 |
| 67297 | 18509765 | 18510314 | |
| 67298 | 18529959 | 18531038 | 130511 |
| 67299 | 18557711 | 18558341 | 105656 |
| 67300 | 18575242 | 18575900 | 105656 |
| 67301 | 18579927 | 18581476 | 105656 |
| 67302 | 18589003 | 18590506 | 105656 |
| 67303 | 18606914 | 18607610 | 105656 |
| 67304 | 18614693 | 18616126 | 105656 |
| 67305 | 18625340 | 18626516 | 105656 |
| 67306 | 18630470 | 18633864 | 105656 |
| 67307 | 18648795 | 18649303 | 105701 |
| 67308 | 18652916 | 18655110 | 105701 |
| 67309 | 18682054 | 18684041 | 221983, 006016 |
| 67310 | 18698892 | 18701077 | 006015, 006016 |
| 67311 | 18747527 | 18748846 | 167487 |
| 67312 | 18793648 | 18794888 | 105662 |
| 67313 | 18942346 | 18944377 | 005007 |
| 67314 | 19009320 | 19009855 | |
| 67315 | 19029262 | 19031738 | 105671, 105669, 268193 |
| 67316 | 19051334 | 19052315 | 051128, 269019 |
| 67317 | 19143522 | 19145440 | 105676, 064607 |
| 67318 | 19151185 | 19151889 | 105676 |
| 67319 | 19162090 | 19164007 | 105676 |
| 67320 | 19173135 | 19175545 | 181035 |
| 67321 | 19206425 | 19210694 | 181035 |
| 67322 | 19221948 | 19223266 | 181035 |
| 67323 | 19248280 | 19249867 | 064545 |
| 67324 | 19302483 | 19304320 | 064490, 064489, 254901, |
| | | | 213999 |
| 67325 | 19313280 | 19314514 | 184162 |
| 67326 | 19339200 | 19339751 | 130287 |
| 67327 | 19383455 | 19384389 | 267629, 213996 |
| 67328 | 19385306 | 19386268 | |
| 67329 | 19430594 | 19432802 | 129933, 105705 |
| 67330 | 19495417 | 19497834 | 167491 |
| 67331 | 19513837 | 19515212 | 167491 |
| 67332 | 19515422 | 19518199 | 167491 |
| 67333 | 19534172 | 19534761 | 167491 |
| 67334 | 19545173 | 19545988 | 207821, 167491 |
| 67335 | 19598340 | 19601590 | 167491 |
| 67336 | 19626280 | 19627850 | 250067, 258674, 186010, |
| | | | 178093 |
| 67337 | 19773656 | 19775330 | 105726 |
| 67338 | 19779237 | 19780528 | 181896 |
| 67339 | 19886494 | 19888295 | 267419, 266904, 267581 |
| 67340 | 19976412 | 19978066 | 256771 |
| 67341 | 20149262 | 20150585 | 197124 |
| 67342 | 20162491 | 20163827 | |
| 67343 | 21511156 | 21512484 | 182141 |
| 67344 | 21579546 | 21580332 | 196268 |
| 67345 | 21675615 | 21676567 | 268658 |
| 67346 | 21688163 | 21689900 | 197013 |
| 67347 | 21769009 | 21770082 | 268555 |
| 67348 | 21776795 | 21777677 | 268240 |
| 67349 | 21949416 | 21950500 | 197020 |
| 67350 | 22300915 | 22301301 | |
| 67351 | 23444122 | 23445124 | 269107, 213971 |
| 67352 | 23445606 | 23447445 | 269107, 213971 |
| 67353 | 23455892 | 23457350 | 269107, 213971 |
| 67354 | 23577154 | 23578696 | 167232 |
| 67355 | 23869124 | 23870273 | 197372 |
| 67356 | 24065072 | 24066024 | |
| 67357 | 24070334 | 24070911 | |
| 67358 | 24126062 | 24126643 | 269289, 213967 |
| 67359 | 24169387 | 24169995 | |
| 67360 | 24174927 | 24175726 | |
| 67361 | 24215923 | 24217906 | 213096, 268362 |
| 67362 | 24236443 | 24237754 | 213096, 268362 |
| 67363 | 27738278 | 27738762 | |
| 67364 | 28283696 | 28285922 | 267575, 272635, 261824 |
| 67365 | 28971698 | 28973141 | 267243 |
| 67366 | 29010900 | 29011564 | 267243, 266893 |
| 67367 | 29060245 | 29061274 | 267243, 266893 |
| 67368 | 29457755 | 29458268 | 267339 |
| 67369 | 29702656 | 29704706 | 267498, 169021 |
| 67370 | 30096307 | 30098026 | 105171 |
| 67371 | 30105719 | 30106158 | 105171 |
| 67372 | 30136932 | 30137342 | |
| 67373 | 30155559 | 30158256 | 166289 |
| 67374 | 30159025 | 30160510 | 166289 |
| 67375 | 30161926 | 30162932 | 166289 |
| 67376 | 30167319 | 30168193 | |
| 67377 | 30169366 | 30170136 | |
| 67378 | 30195690 | 30196228 | 131943 |
| 67379 | 30196493 | 30197981 | 131943 |
| 67380 | 30198041 | 30200684 | 131943 |
| 67381 | 30205427 | 30207939 | 131943 |
| 67382 | 30295908 | 30297305 | |
| 67383 | 30301901 | 30303600 | 105173 |
| 67384 | 30432808 | 30434229 | 105176 |
| 67385 | 30527246 | 30528094 | |
| 67386 | 31152721 | 31154034 | 198597 |
| 67387 | 31154785 | 31156040 | 198597 |
| 67388 | 31209513 | 31211586 | |
| 67389 | 31841223 | 31842482 | 267662 |
| 67390 | 32715276 | 32716107 | |
| 67391 | 32836117 | 32837856 | 168813 |
| 67392 | 32854077 | 32854600 | 168813 |
| 67393 | 32863222 | 32865284 | 168813 |
| 67394 | 32895474 | 32897719 | 178904, 269093, 267213 |
| 67395 | 33071279 | 33073298 | 105185 |
| 67396 | 33165185 | 33166271 | 105186 |
| 67397 | 33182248 | 33183997 | 213965, 267475 |
| 67398 | 33187636 | 33188151 | 213965 |
| 67399 | 33192889 | 33193441 | 213965 |
| 67400 | 33360040 | 33361493 | 021488 |
| 67401 | 33462686 | 33463504 | 131944, 121289 |
| 67402 | 33529628 | 33533821 | 131941 |
| 67403 | 33543036 | 33543858 | 131941 |
| 67404 | 33554580 | 33556603 | 131941 |
| 67405 | 33568941 | 33569341 | |
| 67406 | 33571300 | 33572903 | 076650 |
| 67407 | 33605044 | 33605711 | 076650 |
| 67408 | 33666922 | 33669062 | 267054, 264355, 130881 |
| 67409 | 33685297 | 33686759 | 130881 |
| 67410 | 33731622 | 33733310 | |
| 67411 | 33738043 | 33740919 | |
| 67412 | 33764787 | 33765984 | |
| 67413 | 33766328 | 33767704 | |
| 67414 | 33768897 | 33770155 | |
| 67415 | 33776272 | 33777338 | 270212 |
| 67416 | 33781946 | 33785423 | |
| 67417 | 33788215 | 33796775 | 267727, 230259, 267296, |
| | | | 245848, 267130, 178863, |
| | | | 267580 |
| 67418 | 33807097 | 33808327 | |
| 67419 | 33816795 | 33817362 | |
| 67420 | 33839245 | 33841039 | |
| 67421 | 33863591 | 33868975 | 153879 |
| 67422 | 33882889 | 33886500 | 124299 |
| 67423 | 33887953 | 33888802 | 124299 |
| 67424 | 33890622 | 33892484 | 124299 |
| 67425 | 33893011 | 33898331 | 124299 |
| 67426 | 33928514 | 33929734 | 124299 |
| 67427 | 33989470 | 33991209 | 124299 |
| 67428 | 33992776 | 33993401 | 124299 |
| 67429 | 34010262 | 34010684 | 124299 |
| 67430 | 34011101 | 34013000 | 124299 |
| 67431 | 34285750 | 34288488 | 153885 |
| 67432 | 34294734 | 34296081 | 153885 |
| 67433 | 34391726 | 34392183 | |
| 67434 | 34396264 | 34397701 | |
| 67435 | 34624947 | 34626474 | |
| 67436 | 34662217 | 34665036 | 257103 |
| 67437 | 34672222 | 34673167 | 257103 |
| 67438 | 34682483 | 34682949 | 257103 |
| 67439 | 34723127 | 34725053 | |
| 67440 | 34744777 | 34746575 | 166398 |
| 67441 | 34777876 | 34778456 | 166398 |
| 67442 | 34796341 | 34798359 | 166398 |
| 67443 | 34819830 | 34820271 | 166398 |
| 67444 | 34828454 | 34829171 | 166398 |
| 67445 | 34849301 | 34851324 | 105220, 267219 |
| 67446 | 34855706 | 34856933 | 105220 |
| 67447 | 34894885 | 34895942 | 126249, 266953 |
| 67448 | 34918631 | 34920565 | 126261, 267024 |
| 67449 | 35146573 | 35146992 | 205209 |
| 67450 | 35157771 | 35159049 | 205209 |
| 67451 | 35167190 | 35169570 | 089335, 256383 |
| 67452 | 35223733 | 35226210 | 197841 |
| 67453 | 35417607 | 35418636 | 168661, 270876 |
| 67454 | 35454283 | 35455309 | 180884 |
| 67455 | 35466665 | 35467270 | |
| 67456 | 35485580 | 35486709 | 089351 |
| 67457 | 35490197 | 35492340 | 269303, 089351 |
| 67458 | 35496322 | 35498399 | 089351 |
| 67459 | 35521474 | 35522072 | 105711 |
| 67460 | 35530520 | 35534795 | 105707, 10571 1 |
| 67461 | 35539570 | 35540475 | 105707 |
| 67462 | 35571678 | 35572704 | 227392 |
| 67463 | 35581085 | 35582107 | 227392 |
| 67464 | 35626150 | 35627032 | 153902 |
| 67465 | 35627686 | 35628623 | 203403, 153902 |
| 67466 | 35629098 | 35631709 | 266964, 221857, 203403, |
| | | | 153902 |
| 67467 | 35645229 | 35646252 | 089327 |
| 67468 | 35661614 | 35662324 | |
| 67469 | 35686508 | 35688334 | |
| 67470 | 35738452 | 35740966 | 105699 |
| 67471 | 35750379 | 35750942 | 105699 |
| 67472 | 35757790 | 35761023 | 105698, 105699 |
| 67473 | 35809186 | 35810442 | 012124 |
| 67474 | 35911012 | 35911962 | |
| 67475 | 35950002 | 35950871 | |
| 67476 | 36035397 | 36037335 | 105677, 236144, 105679 |
| 67477 | 36103414 | 36103932 | 249115, 267626 |
| 67478 | 36119088 | 36120901 | 126254 |
| 67479 | 36133621 | 36134731 | 105672 |
| 67480 | 36139021 | 36140199 | 126267 |
| 67481 | 36151842 | 36152895 | |
| 67482 | 36206673 | 36210361 | 272333, 105663, 011590 |
| 67483 | 36231134 | 36232283 | 126246, 267120 |
| 67484 | 36235660 | 36237426 | 205155, 188223, 161265, |
| | | | 267120 |
| 67485 | 36238981 | 36240000 | 267796, 267439, 188223 |
| 67486 | 36247886 | 36249716 | 167595, 004776 |
| 67487 | 36251774 | 36252305 | 167595 |
| 67488 | 36302329 | 36304370 | 250799 |
| 67489 | 36390011 | 36391790 | 167604 |
| 67490 | 36422195 | 36423085 | |
| 67491 | 36427019 | 36427943 | 126243 |
| 67492 | 36433087 | 36433600 | 126243 |
| 67493 | 36485311 | 36487565 | 205138 |
| 67494 | 36490055 | 36490775 | |
| 67495 | 36504300 | 36505728 | 105270, 267698, 248101, |
| | | | 239382 |
| 67496 | 36521211 | 36521762 | 105270, 267698 |
| 67497 | 36532717 | 36533149 | 161277, 267698 |
| 67498 | 36544812 | 36545991 | 075702, 161277 |
| 67499 | 36604753 | 36607210 | 105254, 105258 |
| 67500 | 36618171 | 36619988 | |
| 67501 | 36627630 | 36628502 | |
| 67502 | 36629889 | 36632422 | 126247 |
| 67503 | 36704619 | 36706925 | 167635, 196357 |
| 67504 | 36868634 | 36870151 | 266973, 142065 |
| 67505 | 36979381 | 36981492 | 267309, 186017 |
| 67506 | 37018162 | 37020485 | 228629, 254004 |
| 67507 | 37063129 | 37065502 | 233527, 186020 |
| 67508 | 37095997 | 37096801 | 186020, 161298 |
| 67509 | 37157327 | 37158604 | 197808 |
| 67510 | 37177420 | 37179257 | 189042, 225975 |
| 67511 | 37263464 | 37264064 | 267260, 267041 |
| 67512 | 37328275 | 37330124 | 197863 |
| 67513 | 37340389 | 37342278 | 251247, 197863 |
| 67514 | 37568484 | 37570267 | 267345, 197050 |
| 67515 | 37663221 | 37664261 | 196967, 267360 |
| 67516 | 37708347 | 37709939 | 188283, 245680 |
| 67517 | 37808342 | 37809468 | 181666 |
| 67518 | 37825368 | 37826390 | 181666 |
| 67519 | 37861497 | 37862491 | 189164 |
| 67520 | 37957551 | 37958728 | 171827, 196437 |
| 67521 | 37959820 | 37960935 | 196437, 171827 |
| 67522 | 38084916 | 38086450 | 180479, 171817 |
| 67523 | 38145462 | 38147188 | 120784 |
| 67524 | 38269472 | 38270880 | 267422, 189144 |
| 67525 | 38396705 | 38398643 | 105738, 171804 |
| 67526 | 38422540 | 38425343 | 105738 |
| 67527 | 38426438 | 38427328 | 105738 |
| 67528 | 38431727 | 38432763 | 105738 |
| 67529 | 38433861 | 38434467 | 105738 |
| 67530 | 38482445 | 38482973 | 105738 |
| 67531 | 38741081 | 38741910 | 167641, 167642 |
| 67532 | 38790795 | 38792243 | 267748 |
| 67533 | 38805669 | 38807532 | 167645 |
| 67534 | 38826059 | 38827468 | 099338 |
| 67535 | 38864769 | 38866622 | 099341 |
| 67536 | 38893207 | 38894660 | 130244 |
| 67537 | 39034403 | 39035664 | 196218 |
| 67538 | 39108899 | 39110907 | 178982, 104814 |
| 67539 | 39127394 | 39127913 | 178982 |
| 67540 | 39137811 | 39145084 | 130402 |
| 67541 | 39145172 | 39146403 | 130402 |
| 67542 | 39146660 | 39151938 | 130402 |
| 67543 | 39157054 | 39158441 | 130402 |
| 67544 | 39161473 | 39162298 | 130402 |
| 67545 | 39169986 | 39177821 | 267375, 130402 |
| 67546 | 39179377 | 39180313 | 130402, 267375 |
| 67547 | 39191670 | 39192853 | 130402 |
| 67548 | 39198162 | 39198949 | 130402 |
| 67549 | 39202201 | 39203194 | 130402 |
| 67550 | 39203622 | 39205579 | 130402 |
| 67551 | 39226742 | 39227430 | 182472 |
| 67552 | 39249743 | 39250970 | 182472 |
| 67553 | 39251702 | 39255486 | 182472 |
| 67554 | 39303196 | 39304230 | 171747 |
| 67555 | 39320510 | 39323918 | 104823, 268083 |
| 67556 | 39325776 | 39327208 | 104824, 268083 |
| 67557 | 39338506 | 39344000 | 104824 |
| 67558 | 39355220 | 39356060 | |
| 67559 | 39359684 | 39361318 | 269050, 187994 |
| 67560 | 39389534 | 39392037 | 104825, 068903 |
| 67561 | 39395128 | 39396070 | 104825 |
| 67562 | 39420658 | 39422471 | 128626, 269547, 104835 |
| 67563 | 39442812 | 39443863 | 269190 |
| 67564 | 39465375 | 39467631 | 269190 |
| 67565 | 39521603 | 39523214 | 267992, 161243 |
| 67566 | 39602074 | 39603615 | 183760 |
| 67567 | 39615794 | 39617756 | 130669 |
| 67568 | 39684394 | 39685038 | |
| 67569 | 39767990 | 39768766 | |
| 67570 | 39831583 | 39834260 | 269246, 179134, 130755 |
| 67571 | 39867937 | 39869508 | 179134 |
| 67572 | 39880937 | 39882679 | 063322, 006712 |
| 67573 | 39887705 | 39890959 | 063322 |
| 67574 | 39891151 | 39895094 | 063322 |
| 67575 | 39896347 | 39904084 | 128016, 090924, 266559 |
| 67576 | 39925737 | 39927764 | 196235, 105193 |
| 67577 | 39935002 | 39937500 | 196235 |
| 67578 | 39971054 | 39972650 | 105197 |
| 67579 | 40022705 | 40023811 | 269792, 176401 |
| 67580 | 40029732 | 40031184 | 176396 |
| 67581 | 40048608 | 40049512 | |
| 67582 | 40168462 | 40169243 | |
| 67583 | 40323601 | 40325217 | 105202, 105204 |
| 67584 | 40336314 | 40337754 | 105202 |
| 67585 | 40449713 | 40450348 | |
| 67586 | 40475232 | 40478143 | 013275 |
| 67587 | 40502087 | 40503972 | 187187 |
| 67588 | 40561715 | 40562520 | 128000, 269749 |
| 67589 | 40595973 | 40597775 | 269296, 197782, 269749 |
| 67590 | 40695763 | 40698519 | 130758 |
| 67591 | 40731658 | 40733124 | 105219 |
| 67592 | 40762826 | 40763508 | 105221 |
| 67593 | 40786061 | 40787101 | 105221 |
| 67594 | 40789191 | 40792229 | 105221 |
| 67595 | 40853976 | 40855372 | 105223, 160392 |
| 67596 | 40926423 | 40928120 | 197019 |
| 67597 | 40930378 | 40932697 | 197019 |
| 67598 | 40938881 | 40940470 | |
| 67599 | 40948773 | 40950812 | 268366, 167565 |
| 67600 | 40967617 | 40968195 | 090013 |
| 67601 | 40969817 | 40973390 | 160460, 090013 |
| 67602 | 41029035 | 41029711 | 160460 |
| 67603 | 41081910 | 41083667 | 160410, 160460 |
| 67604 | 41109542 | 41110139 | 090006 |
| 67605 | 41115193 | 41116183 | 090006 |
| 67606 | 41168301 | 41170239 | |
| 67607 | 41171676 | 41173516 | 105245 |
| 67608 | 41195896 | 41197613 | 123815, 105245 |
| 67609 | 41220110 | 41225990 | 086544, 123815 |
| 67610 | 41255165 | 41258224 | 077312, 188493 |
| 67611 | 41259923 | 41261414 | 077312 |
| 67612 | 41283522 | 41284767 | 171570, 167578, 268975 |
| 67613 | 41303799 | 41306498 | 269858, 171570 |
| 67614 | 41328984 | 41330560 | 268797, 237118 |
| 67615 | 41337189 | 41338419 | 268797, 269843 |
| 67616 | 41402995 | 41403531 | 268797, 130612 |
| 67617 | 41426329 | 41428449 | |
| 67618 | 41485290 | 41486679 | |
| 67619 | 41488286 | 41488967 | |
| 67620 | 41495191 | 41496355 | |
| 67621 | 41496365 | 41498393 | 197408 |
| 67622 | 41500408 | 41501851 | 197408 |
| 67623 | 41506084 | 41506732 | 197408 |
| 67624 | 41645931 | 41646389 | |
| 67625 | 41681898 | 41682527 | |
| 67626 | 41730813 | 41733315 | 167601 |
| 67627 | 41767228 | 41772161 | 105323, 167601 |
| 67628 | 41814200 | 41814869 | 105329 |
| 67629 | 41815174 | 41817095 | 142039, 105329 |
| 67630 | 41859546 | 41860266 | 105329, 255730, 142046 |
| 67631 | 41869462 | 41870895 | 123810, 255730, 142046 |
| 67632 | 41902596 | 41904919 | 077348, 248098, 255730 |
| 67633 | 41915057 | 41916591 | 248098, 255730 |
| 67634 | 41945246 | 41946129 | 105341 |
| 67635 | 42363399 | 42365724 | 105372 |
| 67636 | 42386604 | 42389303 | 076928 |
| 67637 | 42462681 | 42464077 | 105404 |
| 67638 | 42578964 | 42581223 | 105732 |
| 67639 | 42720685 | 42723181 | 160570 |
| 67640 | 42723893 | 42725155 | 167625, 160570 |
| 67641 | 42745514 | 42749339 | 204957, 105723, 268643 |
| 67642 | 42756361 | 42760396 | 105722, 268643 |
| 67643 | 42772067 | 42776080 | 079432 |
| 67644 | 42783904 | 42785018 | 079432 |
| 67645 | 42787907 | 42788919 | 079432 |
| 67646 | 42800036 | 42800628 | |
| 67647 | 42829129 | 42830691 | 105429, 167619 |
| 67648 | 42882636 | 42883399 | 105429 |
| 67649 | 42891148 | 42891802 | 105427 |
| 67650 | 42913512 | 42914233 | 213904, 079435 |
| 67651 | 42937137 | 42938407 | 213904, 189377 |
| 67652 | 42953972 | 42955092 | 213904 |
| 67653 | 42959604 | 42960360 | 213904 |
| 67654 | 42984807 | 42985440 | 213904 |
| 67655 | 42998316 | 42999183 | 213904 |
| 67656 | 43001400 | 43002949 | 213904 |
| 67657 | 43032009 | 43034037 | 213904, 079385 |
| 67658 | 43704318 | 43706519 | 243137 |
| 67659 | 44002748 | 44003934 | 176531 |
| 67660 | 44007174 | 44009461 | 176531 |
| 67661 | 44029234 | 44031956 | 176472, 105755 |
| 67662 | 44036376 | 44037679 | 176472 |
| 67663 | 44098750 | 44101737 | 124444, 226763, 167378 |
| 67664 | 44122555 | 44124544 | 131116 |
| 67665 | 44257964 | 44260025 | 105771 |
| 67666 | 44331196 | 44332113 | 167637, 159871 |
| 67667 | 44438714 | 44439926 | 124459 |
| 67668 | 44454931 | 44455860 | 159905 |
| 67669 | 44487890 | 44488975 | 204920 |
| 67670 | 44506071 | 44508056 | 159882, 266921 |
| 67671 | 44529270 | 44530333 | 267022, 159885, 267144 |
| 67672 | 44555456 | 44556815 | 178386, 267022 |
| 67673 | 44597979 | 44599033 | 267680, 267163 |
| 67674 | 44616797 | 44618421 | 186019, 256294 |
| 67675 | 44645049 | 44646645 | 263002 |
| 67676 | 44668541 | 44669975 | 167380 |
| 67677 | 44711004 | 44712379 | 131115 |
| 67678 | 44716289 | 44717407 | 131115 |
| 67679 | 44808330 | 44809337 | 159917 |
| 67680 | 45004056 | 45005277 | 167384 |
| 67681 | 45091013 | 45093498 | 230666 |
| 67682 | 45095103 | 45096347 | 230666 |
| 67683 | 45106360 | 45107175 | 230666 |
| 67684 | 45115911 | 45127130 | 216588, 230666 |
| 67685 | 45128017 | 45131310 | 216588 |
| 67686 | 45143174 | 45144473 | 266903 |
| 67687 | 45144525 | 45148423 | 073008, 266903 |
| 67688 | 45151698 | 45152721 | 073008, 266903 |
| 67689 | 45157572 | 45158141 | 073008, 266903 |
| 67690 | 45180548 | 45180981 | 186567, 266903 |
| 67691 | 45192340 | 45193763 | 266903 |
| 67692 | 45194402 | 45196780 | 266903 |
| 67693 | 45197009 | 45199410 | 266903 |
| 67694 | 45221246 | 45222856 | 266903 |
| 67695 | 45225283 | 45230214 | 252200 |
| 67696 | 45239462 | 45247070 | |
| 67697 | 45247366 | 45254949 | 069399 |
| 67698 | 45255750 | 45258915 | 069399 |
| 67699 | 45268054 | 45269624 | 236807, 253027 |
| 67700 | 45276452 | 45281932 | 142273 |
| 67701 | 45299841 | 45300426 | 142273 |
| 67702 | 45310298 | 45310835 | |
| 67703 | 45311113 | 45312029 | |
| 67704 | 45347437 | 45351541 | 130202 |
| 67705 | 45393246 | 45395579 | 130204, 267282 |
| 67706 | 45406768 | 45408392 | 130204 |
| 67707 | 45408431 | 45410067 | 130203 |
| 67708 | 45413269 | 45413975 | |
| 67709 | 45414108 | 45414903 | |
| 67710 | 45416497 | 45419012 | 130208 |
| 67711 | 45427177 | 45428959 | |
| 67712 | 45433194 | 45434046 | 214855 |
| 67713 | 45438796 | 45439674 | |
| 67714 | 45442637 | 45443425 | |
| 67715 | 45445111 | 45446000 | 224916, 267467 |
| 67716 | 45446434 | 45451163 | 234906, 224916, 267467 |
| 67717 | 45457450 | 45460270 | 104853 |
| 67718 | 45504326 | 45505465 | 104856 |
| 67719 | 45542072 | 45542886 | 104859 |
| 67720 | 45548757 | 45549789 | 104859 |
| 67721 | 45578991 | 45580152 | 267348, 170684 |
| 67722 | 45581654 | 45583775 | 142252, 007047, 267348 |
| 67723 | 45594377 | 45597554 | 104866, 142252, 007047 |
| 67724 | 45600873 | 45601970 | 104866, 007047 |
| 67725 | 45680369 | 45683709 | 267545, 189114, 007255, |
| | | | 007047 |
| 67726 | 45753895 | 45755650 | 007047 |
| 67727 | 45776035 | 45777113 | 007047 |
| 67728 | 45782929 | 45784327 | 007047 |
| 67729 | 45792090 | 45792462 | 007047 |
| 67730 | 45793261 | 45794460 | 007047 |
| 67731 | 45797023 | 45798326 | 007047 |
| 67732 | 45873048 | 45874625 | 104884 |
| 67733 | 45879135 | 45880522 | |
| 67734 | 45901221 | 45902195 | 104881 |
| 67735 | 45907022 | 45910807 | 117877, 012061, 104881 |
| 67736 | 45926660 | 45929038 | 012061 |
| 67737 | 45942389 | 45944029 | 012061 |
| 67738 | 45946693 | 45948210 | 012061 |
| 67739 | 45953629 | 45955055 | 012061 |
| 67740 | 45956975 | 45960403 | 012061 |
| 67741 | 45970712 | 45971256 | 125740, 012061 |
| 67742 | 45971281 | 45972676 | 125740, 012061 |
| 67743 | 45979270 | 45982699 | 012061 |
| 67744 | 46009110 | 46013449 | 125753 |
| 67745 | 46017565 | 46018491 | 125753 |
| 67746 | 46021686 | 46022115 | 125753 |
| 67747 | 46037984 | 46038559 | 125741 |
| 67748 | 46071822 | 46073647 | 125741 |
| 67749 | 46079334 | 46081578 | 125741 |
| 67750 | 46086650 | 46089127 | 125741 |
| 67751 | 46110458 | 46111011 | 125746 |
| 67752 | 46141774 | 46143009 | 199066, 125746 |
| 67753 | 46144535 | 46146819 | 267757, 125746 |
| 67754 | 46194425 | 46196501 | 011478, 125743 |
| 67755 | 46219263 | 46221906 | 177051 |
| 67756 | 46223835 | 46224488 | 177051 |
| 67757 | 46233004 | 46234714 | 177051 |
| 67758 | 46270393 | 46274381 | 267395, 104936, 177045, |
| | | | 259605 |
| 67759 | 46284595 | 46285554 | 268434, 104936 |
| 67760 | 46295123 | 46296304 | 185800 |
| 67761 | 46365181 | 46366726 | 125755 |
| 67762 | 46366815 | 46368753 | 170608 |
| 67763 | 46376483 | 46377571 | 170608 |
| 67764 | 46379263 | 46383203 | |
| 67765 | 46384769 | 46387625 | 170604 |
| 67766 | 46388325 | 46390982 | 170604 |
| 67767 | 46405401 | 46406590 | 176182 |
| 67768 | 46498013 | 46499528 | 104983 |
| 67769 | 46634835 | 46637939 | 267922 |
| 67770 | 46692620 | 46694211 | 268621, 267922 |
| 67771 | 46696064 | 46697916 | 268621, 267922 |
| 67772 | 46849496 | 46851121 | 011485 |
| 67773 | 46857899 | 46860274 | 011485 |
| 67774 | 46906967 | 46908728 | |
| 67775 | 47003774 | 47004670 | 230510 |
| 67776 | 47049418 | 47050053 | 230510 |
| 67777 | 47103318 | 47107225 | 160014, 268423, 230510 |
| 67778 | 47108076 | 47108632 | 160014 |
| 67779 | 47141621 | 47142324 | |
| 67780 | 47216896 | 47218422 | 105287 |
| 67781 | 47219194 | 47221300 | 105287 |
| 67782 | 47248371 | 47249997 | 181027, 090372 |
| 67783 | 47353444 | 47354376 | 042753 |
| 67784 | 47359326 | 47360266 | |
| 67785 | 47362919 | 47366228 | |
| 67786 | 47378452 | 47379463 | |
| 67787 | 47388465 | 47389128 | |
| 67788 | 47392703 | 47395265 | |
| 67789 | 47427920 | 47429519 | 160007 |
| 67790 | 47435614 | 47436572 | 160007 |
| 67791 | 47446474 | 47447254 | 160007 |
| 67792 | 47448373 | 47449266 | 160007 |
| 67793 | 47450010 | 47450589 | 160007 |
| 67794 | 47453636 | 47455649 | 160007 |
| 67795 | 47478385 | 47480403 | 160007 |
| 67796 | 47487062 | 47489752 | 160007 |
| 67797 | 47496074 | 47496841 | 160007 |
| 67798 | 47516069 | 47516841 | |
| 67799 | 47538207 | 47539831 | 130751 |
| 67800 | 47551240 | 47552237 | 130748 |
| 67801 | 47561823 | 47562462 | |
| 67802 | 47582510 | 47583876 | 130749 |
| 67803 | 47598000 | 47600821 | 130749 |
| 67804 | 47608945 | 47612223 | 130749 |
| 67805 | 47613883 | 47617756 | 142230, 130749 |
| 67806 | 47633220 | 47634996 | 142230 |
| 67807 | 47728679 | 47732102 | 265134, 105327 |
| 67808 | 47732821 | 47736478 | 105327 |
| 67809 | 47743609 | 47744928 | |
| 67810 | 47746212 | 47748398 | |
| 67811 | 47758977 | 47761183 | 105321 |
| 67812 | 47792623 | 47793462 | 197405 |
| 67813 | 47808277 | 47809280 | 197405 |
| 67814 | 47817993 | 47819531 | 197405 |
| 67815 | 47852154 | 47853489 | 134815 |
| 67816 | 47879743 | 47880398 | 134815 |
| 67817 | 47986873 | 47988279 | 268061, 118162 |
| 67818 | 48015026 | 48019751 | 105402 |
| 67819 | 48025110 | 48025834 | 118156 |
| 67820 | 48101621 | 48102977 | |
| 67821 | 48103313 | 48105684 | |
| 67822 | 48110688 | 48114526 | 063169, 268746 |
| 67823 | 48121335 | 48123921 | 063169, 268746, 269806 |
| 67824 | 48150676 | 48152308 | 063169, 268746 |
| 67825 | 48162991 | 48168851 | 063169, 268746 |
| 67826 | 48245635 | 48247288 | 024422 |
| 67827 | 48248168 | 48249387 | 105373 |
| 67828 | 48260162 | 48261693 | 269656, 105373 |
| 67829 | 48281246 | 48282990 | 178980 |
| 67830 | 48291877 | 48292571 | |
| 67831 | 48387690 | 48390110 | 105398 |
| 67832 | 48394190 | 48397257 | |
| 67833 | 48397802 | 48400754 | |
| 67834 | 48610411 | 48611458 | 105499 |
| 67835 | 48613187 | 48614986 | 105499 |
| 67836 | 48673171 | 48674578 | 185453, 105486 |
| 67837 | 48763171 | 48763799 | 178150 |
| 67838 | 48824470 | 48826055 | 142227, 105479 |
| 67839 | 48828432 | 48829616 | 142227 |
| 67840 | 48833307 | 48834454 | 142227 |
| 67841 | 48866198 | 48867551 | 161558 |
| 67842 | 48893576 | 48895025 | 105438 |
| 67843 | 48948599 | 48950155 | 105447 |
| 67844 | 48971937 | 48973768 | 105443, 268530, 268465 |
| 67845 | 48990534 | 48992215 | 142235 |
| 67846 | 49061450 | 49062004 | 088002 |
| 67847 | 49087222 | 49087954 | 088002 |
| 67848 | 49091857 | 49092754 | 088002 |
| 67849 | 49121257 | 49123605 | 268093, 063176, 063177 |
| 67850 | 49127112 | 49127968 | 268093, 063176 |
| 67851 | 49130313 | 49131196 | 063176 |
| 67852 | 49136543 | 49137162 | 105516 |
| 67853 | 49137475 | 49140329 | 105516 |
| 67854 | 49140543 | 49141821 | 232871, 063180, 105516 |
| 67855 | 49217015 | 49218478 | 176909 |
| 67856 | 49257943 | 49259679 | 105550, 174951 |
| 67857 | 49272101 | 49274876 | |
| 67858 | 49274989 | 49276970 | |
| 67859 | 49298168 | 49299280 | 105552 |
| 67860 | 49309901 | 49311737 | 105552 |
| 67861 | 49313530 | 49314621 | 105552 |
| 67862 | 49315339 | 49316136 | |
| 67863 | 49319140 | 49320068 | 087076 |
| 67864 | 49322464 | 49323300 | 087076 |
| 67865 | 49329762 | 49330195 | 087076 |
| 67866 | 49370772 | 49372518 | 105559 |
| 67867 | 49375260 | 49379780 | 087074 |
| 67868 | 49402976 | 49404440 | 104805 |
| 67869 | 49410588 | 49412498 | 104805 |
| 67870 | 49457247 | 49459494 | 087088 |
| 67871 | 49463868 | 49472834 | 087086, 267898, 104812, |
| | | | 087088 |
| 67872 | 49481872 | 49482930 | 104812 |
| 67873 | 49495554 | 49497893 | 183207, 104812 |
| 67874 | 49588083 | 49589896 | 104852 |
| 67875 | 49621207 | 49622678 | 221916, 177380, 104863 |
| 67876 | 49648857 | 49649590 | 177380 |
| 67877 | 49652653 | 49654427 | 177380 |
| 67878 | 49660856 | 49661961 | 130529 |
| 67879 | 49713111 | 49714918 | 130529 |
| 67880 | 49842928 | 49843912 | 074219, 197813, 104894 |
| 67881 | 49945857 | 49947380 | |
| 67882 | 49954301 | 49955654 | 104872 |
| 67883 | 49977080 | 49978294 | 090554, 273189, 269469 |
| 67884 | 49989867 | 49992079 | 142541, 273189 |
| 67885 | 49998864 | 50000764 | 142534 |
| 67886 | 50016210 | 50017855 | 104870 |
| 67887 | 50083081 | 50085031 | 126460, 142546 |
| 67888 | 50093304 | 50095754 | 126464, 126460, 142546 |
| 67889 | 50142671 | 50146529 | 126461, 126458 |
| 67890 | 50168129 | 50170114 | 126453, 126456 |
| 67891 | 50179009 | 50182138 | 126457 |
| 67892 | 50268503 | 50271205 | 196961 |
| 67893 | 50274874 | 50275421 | 196961 |
| 67894 | 50316048 | 50317343 | 010361 |
| 67895 | 50353714 | 50355319 | 104960, 268006 |
| 67896 | 50370063 | 50371505 | 039650 |
| 67897 | 50372740 | 50373819 | 204673 |
| 67898 | 50378520 | 50381756 | 104946, 204673 |
| 67899 | 50425076 | 50428562 | 213024, 269179, 104951 |
| 67900 | 50430550 | 50433738 | 169136, 213024, 104951, |
| | | | 269179 |
| 67901 | 50435339 | 50436681 | 265438, 269179, 169136 |
| 67902 | 50507140 | 50508125 | 105053 |
| 67903 | 50526081 | 50526472 | 105053 |
| 67904 | 50527942 | 50529660 | 142528, 105053 |
| 67905 | 50650952 | 50651790 | |
| 67906 | 50708268 | 50709121 | 105357 |
| 67907 | 50737198 | 50738283 | 105357 |
| 67908 | 50744117 | 50744622 | 105357 |
| 67909 | 50828569 | 50829320 | 131398 |
| 67910 | 50831958 | 50833077 | 131408, 131398 |
| 67911 | 50836111 | 50837783 | 131401, 131398, 131408 |
| 67912 | 50860288 | 50861394 | 131408 |
| 67913 | 50871600 | 50873080 | 269392, 131408 |
| 67914 | 50879263 | 50880358 | 131408 |
| 67915 | 50979361 | 50980452 | 161671, 142530 |
| 67916 | 51013605 | 51015520 | 204653, 161677 |
| 67917 | 51016037 | 51017556 | 204653 |
| 67918 | 51306921 | 51308958 | 167747 |
| 67919 | 51610939 | 51611996 | 142544 |
| 67920 | 51841860 | 51842705 | 186806 |
| 67921 | 51842794 | 51844644 | 267905, 186806 |
| 67922 | 51850294 | 51851445 | 105379, 267984 |
| 67923 | 51853054 | 51855739 | 269403, 105379, 267984 |
| 67924 | 51859337 | 51860114 | 269403, 105379 |
| 67925 | 51865367 | 51872061 | 160318, 269403, 105379, |
| | | | 268520 |
| 67926 | 51897381 | 51897929 | 268889 |
| 67927 | 51977792 | 51979061 | |
| 67928 | 52073866 | 52075208 | 105497 |
| 67929 | 52097251 | 52098241 | 269388, 167765 |
| 67930 | 52407312 | 52408786 | 198093 |
| 67931 | 52429815 | 52431475 | 176024 |
| 67932 | 52489252 | 52490597 | 256683 |
| 67933 | 52511074 | 52512361 | 197619 |
| 67934 | 52530936 | 52532497 | 142556 |
| 67935 | 52551389 | 52553043 | 256087 |
| 67936 | 52597921 | 52599271 | 197608, 256087 |
| 67937 | 52641807 | 52643608 | 204611, 267827 |
| 67938 | 52673929 | 52675217 | 267927, 267827, 196267 |
| 67939 | 52692067 | 52694769 | 105568 |
| 67940 | 52772458 | 52774086 | 196214 |
| 67941 | 52799667 | 52801565 | 198464, 269102 |
| 67942 | 52900608 | 52901827 | 167555, 269834 |
| 67943 | 53030276 | 53031294 | 198482 |
| 67944 | 53605886 | 53607210 | 170949 |
| 67945 | 53700267 | 53700855 | 269051 |
| 67946 | 54367550 | 54368221 | 232324, 228323 |
| 67947 | 54370516 | 54373512 | 228323, 179820 |
| 67948 | 54605354 | 54606936 | 170906, 170909 |
| 67949 | 54617883 | 54619362 | 105618, 105619 |
| 67950 | 54640056 | 54642471 | 088038 |
| 67951 | 54662682 | 54663998 | 167608, 105617 |
| 67952 | 54666024 | 54666669 | 167608 |
| 67953 | 54693189 | 54695208 | 170892, 125505 |
| 67954 | 54703795 | 54705974 | 170889, 223660 |
| 67955 | 54706952 | 54707815 | 170889 |
| 67956 | 54711935 | 54712699 | 170889 |
| 67957 | 54712935 | 54714263 | 224579, 170889 |
| 67958 | 54959079 | 54961953 | 167615, 226696 |
| 67959 | 54972934 | 54976621 | 167617, 182909, 167615 |
| 67960 | 55573840 | 55574889 | 160439 |
| 67961 | 55627793 | 55630417 | 125503 |
| 67962 | 55717799 | 55719390 | 080031 |
| 67963 | 55720172 | 55721989 | 080031 |
| 67964 | 55727565 | 55728881 | 267649 |
| 67965 | 55739764 | 55740461 | 180089, 269808 |
| 67966 | 55768819 | 55771580 | 105063 |
| 67967 | 55790452 | 55791793 | 133265 |
| 67968 | 55838791 | 55839289 | 180061 |
| 67969 | 55845213 | 55845616 | 180061 |
| 67970 | 55849896 | 55852262 | 267531, 133247 |
| 67971 | 55894810 | 55898363 | 108107, 233493 |
| 67972 | 55918917 | 55920382 | 108106 |
| 67973 | 55971312 | 55973920 | 063241 |
| 67974 | 55978863 | 55979662 | |
| 67975 | 55986973 | 55988827 | 197483, 269859 |
| 67976 | 56056169 | 56056705 | 231274 |
| 67977 | 56064597 | 56065021 | |
| 67978 | 56091337 | 56093885 | 218891 |
| 67979 | 56110336 | 56113239 | 171443, 179943 |
| 67980 | 56116664 | 56117932 | 261221 |
| 67981 | 56135529 | 56136158 | 179922 |
| 67982 | 56145503 | 56147570 | 213015, 171425 |
| 67983 | 56151302 | 56155997 | 173581, 213015, 171425 |
| 67984 | 56158989 | 56160481 | 173581 |
| 67985 | 56164959 | 56167897 | 063244 |
| 67986 | 56186039 | 56187717 | 063245, 267523, 063244 |
| 67987 | 56194850 | 56195637 | 063245 |
| 67988 | 56582495 | 56582924 | 267522 |
| 67989 | 56596936 | 56597414 | |
| 67990 | 56616419 | 56617003 | 223060, 142409 |
| 67991 | 56621791 | 56622404 | 142409 |
| 67992 | 56630502 | 56633629 | 142409 |
| 67993 | 56648857 | 56650129 | 167685 |
| 67994 | 56651471 | 56654143 | 167685 |
| 67995 | 56710955 | 56712161 | |
| 67996 | 56825023 | 56827275 | 267549, 131848 |
| 67997 | 56879338 | 56880451 | 240225, 131848, 267606 |
| 67998 | 56904408 | 56905594 | 267454, 018869 |
| 67999 | 56914788 | 56916247 | 198440 |
| 68000 | 57078110 | 57079779 | 197016, 269696 |
| 68001 | 57348662 | 57351339 | 198300, 269699 |
| 68002 | 57702452 | 57703802 | 083844 |
| 68003 | 57751261 | 57753282 | 204524 |
| 68004 | 57790450 | 57792932 | 197714, 267871 |
| 68005 | 57831328 | 57832600 | 178229 |
| 68006 | 57862078 | 57863474 | 131845, 268678 |
| 68007 | 57874390 | 57875773 | 152433, 256060, 268133 |
| 68008 | 57900832 | 57902257 | 188785, 269533, 268133 |
| 68009 | 57922103 | 57923408 | 186272, 268533, 269533 |
| 68010 | 57945782 | 57947554 | 186230, 268533 |
| 68011 | 58089507 | 58090630 | 171649, 083817 |
| 68012 | 58110965 | 58111896 | 183647 |
| 68013 | 58125297 | 58126414 | 213762 |
| 68014 | 58144349 | 58145172 | 121417 |
| 68015 | 58192937 | 58194134 | 269026, 204519 |
| 68016 | 58257938 | 58259184 | 152443, 269026 |
| 68017 | 58280683 | 58282101 | 083828 |
| 68018 | 58314957 | 58315251 | 178935, 083828 |
| 68019 | 58325236 | 58326507 | 178935, 083828 |
| 68020 | 58330654 | 58331828 | 269343, 268750, 083828 |
| 68021 | 58513145 | 58514983 | 176593, 166704 |
| 68022 | 58661253 | 58662711 | 181894 |
| 68023 | 58665440 | 58666914 | 181894 |
| 68024 | 58693318 | 58695840 | 171606 |
| 68025 | 58739416 | 58740973 | 269545, 198131 |
| 68026 | 58789235 | 58791199 | 273439, 083842, 267216, |
| | | | 268516, 269545 |
| 68027 | 58816298 | 58817045 | 142396, 267216 |
| 68028 | 58837815 | 58839857 | 182318 |
| 68029 | 58861059 | 58862549 | 121410, 268230, 268895 |
| 68030 | 58863697 | 58865336 | 121410, 268230, 268895 |
| 68031 | 58872847 | 58874559 | 269054, 268230, 174586 |
| 68032 | 58883728 | 58884215 | 152475 |
| 68033 | 58891435 | 58892662 | 152475 |
| 68034 | 58896871 | 58899543 | 266640, 083845 |
| 68035 | 58912552 | 58913425 | 171574 |
| 68036 | 58918870 | 58921035 | 232098, 171574 |
| 68037 | 58962415 | 58963499 | 249471 |
| 68038 | 58977876 | 58979179 | 083812 |
| 68039 | 58986900 | 58988593 | 269106, 083838 |
| 68040 | 59010621 | 59011812 | 083807 |
| 68041 | 59021118 | 59023795 | 083807 |
| 68042 | 59024429 | 59026473 | 119574 |
| 68043 | 59030116 | 59032361 | 119574 |
| 68044 | 59054689 | 59057199 | 130726, 264910 |
| 68045 | 59065360 | 59067289 | 130725, 130724 |
| 68046 | 59068793 | 59071655 | 267858, 130725 |
| 68047 | 59073631 | 59074214 | 099326, 267858 |
| 68048 | 59083821 | 59085352 | 213753, 099326, 267858 |
| 68049 | 59086461 | 59087720 | 213753 |

[0588] The locations of ODSCs on Chromosome 20 are shown in Table 62.

TABLE 62
ODSC Locations on Chromosome 20

| SEQ ID NO. | Start | End | Overlapping Gene(s) |
|---|---|---|---|
| 68050 | 237954 | 238614 | 186458 |
| 68051 | 270691 | 271622 | 196476 |
| 68052 | 277620 | 280209 | 247315, 177764 |
| 68053 | 304385 | 307311 | 177732, 225377 |
| 68054 | 307405 | 308347 | 177732, 225377 |
| 68055 | 327794 | 329383 | 225377, 125841 |
| 68056 | 342603 | 345160 | |
| 68057 | 350233 | 354744 | |
| 68058 | 360096 | 364311 | 101255 |
| 68059 | 370831 | 371320 | 101255 |
| 68060 | 376080 | 378066 | 101255 |
| 68061 | 380578 | 384884 | |
| 68062 | 387017 | 391352 | 125826 |
| 68063 | 396003 | 396981 | 125826 |
| 68064 | 400093 | 401451 | 125826 |
| 68065 | 415099 | 415715 | |
| 68066 | 442003 | 443706 | 125875 |
| 68067 | 508762 | 510975 | 101266 |
| 68068 | 523217 | 525382 | 101266 |
| 68069 | 626716 | 627568 | 270299, 271303 |
| 68070 | 632305 | 635351 | 271303, 270299 |
| 68071 | 680707 | 681156 | |
| 68072 | 814025 | 814964 | 125898 |
| 68073 | 821659 | 822645 | 125898 |
| 68074 | 1086196 | 1087024 | |
| 68075 | 1098373 | 1100537 | 125818 |
| 68076 | 1103162 | 1104098 | 125818 |
| 68077 | 1130866 | 1132062 | 125818 |
| 68078 | 1165268 | 1166860 | 125895 |
| 68079 | 1305460 | 1310583 | 234684, 125775 |
| 68080 | 1372500 | 1374647 | 88832 |
| 68081 | 1380070 | 1380798 | |
| 68082 | 1381952 | 1382672 | |
| 68083 | 1396389 | 1398307 | |
| 68084 | 1445701 | 1447864 | 88833 |
| 68085 | 1449740 | 1451236 | 88833 |
| 68086 | 1757157 | 1758329 | 232528 |
| 68087 | 1789073 | 1794867 | 230839 |
| 68088 | 1796414 | 1797681 | 230839 |
| 68089 | 1807882 | 1810004 | |
| 68090 | 1835750 | 1836255 | |
| 68091 | 1854715 | 1855983 | |
| 68092 | 1861437 | 1862674 | |
| 68093 | 1871334 | 1871974 | |
| 68094 | 1874389 | 1877115 | 198053 |
| 68095 | 1900757 | 1901769 | 198053 |
| 68096 | 1916213 | 1917138 | 198053 |
| 68097 | 1919481 | 1920334 | 198053 |
| 68098 | 1923858 | 1926744 | |
| 68099 | 1927347 | 1928241 | 233896 |
| 68100 | 1946081 | 1946638 | 233896 |
| 68101 | 2047093 | 2047561 | |
| 68102 | 2061237 | 2062147 | |
| 68103 | 2082209 | 2084699 | 125834 |
| 68104 | 2217019 | 2218450 | |
| 68105 | 2241460 | 2242532 | |
| 68106 | 2263806 | 2266270 | |
| 68107 | 2279534 | 2283001 | 125780 |
| 68108 | 2284018 | 2284681 | 125780 |
| 68109 | 2332332 | 2333073 | |
| 68110 | 2450104 | 2452025 | 125835, 256566 |
| 68111 | 2488585 | 2490510 | 256566, 088876 |
| 68112 | 2504994 | 2506264 | 88876 |
| 68113 | 2631966 | 2634428 | 101361, 221062 |
| 68114 | 2644001 | 2645706 | 228293, 101365 |
| 68115 | 2731700 | 2732909 | 88881 |
| 68116 | 2820337 | 2822339 | 215305, 132635 |
| 68117 | 2853184 | 2855032 | 132670 |
| 68118 | 2927901 | 2928681 | 132670 |
| 68119 | 3025623 | 3027688 | 125901, 125787 |
| 68120 | 3047405 | 3048585 | |
| 68121 | 3048868 | 3050545 | |
| 68122 | 3051692 | 3053280 | 101405 |
| 68123 | 3061275 | 3062326 | |
| 68124 | 3098523 | 3098997 | 185019, 235958 |
| 68125 | 3139417 | 3141222 | 215251, 185019 |
| 68126 | 3153577 | 3155508 | 88899 |
| 68127 | 3183132 | 3185597 | 198171 |
| 68128 | 3189093 | 3191458 | 125877 |
| 68129 | 3336448 | 3337883 | 88854 |
| 68130 | 3387401 | 3389653 | 88854 |
| 68131 | 3439854 | 3440394 | |
| 68132 | 3450869 | 3453427 | 88812 |
| 68133 | 3453940 | 3455104 | 88812 |
| 68134 | 3459510 | 3461394 | 88812 |
| 68135 | 3490599 | 3491428 | 88812 |
| 68136 | 3502499 | 3503054 | 88812 |
| 68137 | 3522142 | 3523375 | 88812 |
| 68138 | 3524217 | 3525889 | 88812 |
| 68139 | 3527528 | 3529148 | 88812 |
| 68140 | 3531430 | 3534926 | 88812 |
| 68141 | 3609270 | 3609805 | 88812 |
| 68142 | 3613146 | 3613710 | 88812 |
| 68143 | 3748235 | 3749730 | 101220 |
| 68144 | 3766330 | 3767895 | 101224, 125817 |
| 68145 | 3775814 | 3777088 | 101224 |
| 68146 | 3778558 | 3779832 | 101224 |
| 68147 | 3783324 | 3784335 | 101224 |
| 68148 | 3786491 | 3787229 | 101224 |
| 68149 | 3787237 | 3789684 | |
| 68150 | 3791480 | 3793261 | |
| 68151 | 3800079 | 3802273 | 125843 |
| 68152 | 3826616 | 3828764 | 88888 |
| 68153 | 3868966 | 3871667 | 125779, 229539 |
| 68154 | 3913107 | 3914031 | 101236 |
| 68155 | 3988368 | 3989095 | 101236 |
| 68156 | 3995513 | 3996785 | 101236 |
| 68157 | 4065720 | 4066559 | |
| 68158 | 4111135 | 4112583 | 88826 |
| 68159 | 4114853 | 4117915 | 88826 |
| 68160 | 4128698 | 4130579 | 88826 |
| 68161 | 4151577 | 4153705 | 88826 |
| 68162 | 4666057 | 4668113 | 171867 |
| 68163 | 4897620 | 4898355 | 89057 |
| 68164 | 4905773 | 4908295 | 89057 |
| 68165 | 4941791 | 4943516 | 89057 |
| 68166 | 4947361 | 4949078 | 89057 |
| 68167 | 4953500 | 4955072 | 89057 |
| 68168 | 4980484 | 4982549 | 89057 |
| 68169 | 5045596 | 5047173 | |
| 68170 | 5053740 | 5054817 | |
| 68171 | 5092773 | 5094783 | 252367, 089063 |
| 68172 | 5099658 | 5101637 | 132646 |
| 68173 | 5106871 | 5108831 | 101290, 132646 |
| 68174 | 5130544 | 5131967 | 101290 |
| 68175 | 5133236 | 5134248 | 101290 |
| 68176 | 5136600 | 5138687 | 101290 |
| 68177 | 5164205 | 5165123 | 101290 |
| 68178 | 5192460 | 5193029 | |
| 68179 | 5590417 | 5592168 | 125772 |
| 68180 | 5699485 | 5700170 | |
| 68181 | 5705215 | 5705649 | |
| 68182 | 5730552 | 5732004 | 171984 |
| 68183 | 5759789 | 5760626 | 171984 |
| 68184 | 5784907 | 5785993 | 171984 |
| 68185 | 5930333 | 5931894 | 125885, 089195 |
| 68186 | 5986137 | 5989301 | 88766 |
| 68187 | 6009925 | 6010744 | 88766 |
| 68188 | 6054716 | 6057249 | 101311 |
| 68189 | 6061922 | 6062382 | 101311 |
| 68190 | 6103128 | 6104226 | 101311 |
| 68191 | 6115146 | 6115733 | |
| 68192 | 6142780 | 6143290 | |
| 68193 | 6144897 | 6146423 | |
| 68194 | 6446740 | 6447574 | 229876 |
| 68195 | 6571240 | 6572604 | |
| 68196 | 6592146 | 6595087 | |
| 68197 | 6604512 | 6605638 | |
| 68198 | 6612707 | 6613302 | |
| 68199 | 6677812 | 6679807 | |
| 68200 | 6682204 | 6687213 | |
| 68201 | 6687350 | 6693522 | |
| 68202 | 6720047 | 6720738 | |
| 68203 | 6747684 | 6750409 | 125845 |
| 68204 | 6809389 | 6810096 | |
| 68205 | 6956716 | 6957612 | |
| 68206 | 6972921 | 6976154 | |
| 68207 | 7127150 | 7129369 | 232271, 228888 |
| 68208 | 7131421 | 7133861 | 228888 |
| 68209 | 7244707 | 7245376 | |
| 68210 | 7368404 | 7368987 | |
| 68211 | 7521477 | 7522350 | |
| 68212 | 7565471 | 7566651 | |
| 68213 | 7846543 | 7848031 | |
| 68214 | 7860409 | 7861067 | |
| 68215 | 7903994 | 7907682 | 101323 |
| 68216 | 7916324 | 7921713 | 101323 |
| 68217 | 7960984 | 7962375 | 125827 |
| 68218 | 7968718 | 7969530 | 125827 |
| 68219 | 7999283 | 8000866 | 229766, 125827 |
| 68220 | 8112183 | 8113739 | 182621 |
| 68221 | 8125125 | 8126383 | 182621 |
| 68222 | 8135303 | 8138244 | 182621 |
| 68223 | 8736932 | 8737494 | 182621 |
| 68224 | 8790015 | 8790397 | 182621 |
| 68225 | 10015445 | 10016530 | 227906, 132623 |
| 68226 | 10073550 | 10074194 | 227906 |
| 68227 | 10090178 | 10090745 | 227906 |
| 68228 | 10091603 | 10092258 | 227906 |
| 68229 | 10152352 | 10153643 | 227906 |
| 68230 | 10155868 | 10156547 | 227906, 230506 |
| 68231 | 10166354 | 10167342 | 232448, 227906, 230506 |
| 68232 | 10197821 | 10199836 | 132639, 227906 |
| 68233 | 10308677 | 10310334 | 227906 |
| 68234 | 10340068 | 10340688 | 227906 |
| 68235 | 10347888 | 10352613 | 227906 |
| 68236 | 10383613 | 10384522 | 125863 |
| 68237 | 10398602 | 10401779 | 125863 |
| 68238 | 10413826 | 10416578 | 149346, 125863 |
| 68239 | 10428519 | 10430374 | 149346 |
| 68240 | 10444191 | 10444664 | 149346 |
| 68241 | 10518352 | 10519123 | 149346 |
| 68242 | 10520637 | 10522906 | 149346 |
| 68243 | 10536376 | 10537319 | 149346 |
| 68244 | 10546170 | 10547326 | 149346 |
| 68245 | 10571618 | 10574225 | 149346 |
| 68246 | 10585043 | 10585877 | 149346 |
| 68247 | 10652397 | 10656118 | 270792, 101384 |
| 68248 | 10689053 | 10690156 | 270792 |
| 68249 | 10691720 | 10692722 | 270792 |
| 68250 | 10836843 | 10837375 | 270792 |
| 68251 | 10837884 | 10838579 | 270792 |
| 68252 | 10934988 | 10935885 | 270792 |
| 68253 | 11176546 | 11177629 | |
| 68254 | 11188179 | 11189075 | |
| 68255 | 11197331 | 11198337 | |
| 68256 | 11247880 | 11248681 | 230990 |
| 68257 | 11656970 | 11657655 | |
| 68258 | 11666776 | 11669357 | 261411 |
| 68259 | 11871360 | 11872657 | 132640 |
| 68260 | 11963184 | 11963897 | |
| 68261 | 12296167 | 12296896 | 230437 |
| 68262 | 12307783 | 12308309 | |
| 68263 | 12897178 | 12897875 | 233048 |
| 68264 | 12958102 | 12958981 | |
| 68265 | 12989603 | 12991327 | 172296 |
| 68266 | 13009754 | 13011875 | 172296 |
| 68267 | 13026785 | 13027598 | 172296 |
| 68268 | 13200627 | 13203213 | 101230 |
| 68269 | 13211578 | 13212402 | 101230 |
| 68270 | 13218073 | 13219639 | 226263, 101230 |
| 68271 | 13223931 | 13225499 | 225956, 101230 |
| 68272 | 13225789 | 13226502 | 225956, 101230 |
| 68273 | 13247849 | 13248457 | 101230, 089123 |
| 68274 | 13252818 | 13253708 | 101230, 089123 |
| 68275 | 13271332 | 13272484 | 101230, 089123 |
| 68276 | 13287790 | 13288634 | 89123 |
| 68277 | 13311817 | 13312881 | 89123 |
| 68278 | 13315698 | 13320968 | 89123 |
| 68279 | 13398774 | 13399900 | 89123 |
| 68280 | 13403165 | 13405478 | 89123 |
| 68281 | 13433141 | 13434015 | 89123 |
| 68282 | 13435848 | 13436744 | 89123 |
| 68283 | 13472267 | 13473487 | 89123 |
| 68284 | 13505752 | 13506618 | 89123 |
| 68285 | 13618770 | 13620070 | 89123 |
| 68286 | 13638304 | 13639185 | |
| 68287 | 13661687 | 13662760 | |
| 68288 | 13674971 | 13675540 | |
| 68289 | 13764817 | 13766940 | 101247, 089048 |
| 68290 | 13768615 | 13769571 | 101247 |
| 68291 | 13780735 | 13781837 | 101247 |
| 68292 | 13975780 | 13977101 | 172264, 101251 |
| 68293 | 14123732 | 14124522 | 172264 |
| 68294 | 14314641 | 14318744 | 125848, 172264 |
| 68295 | 14322300 | 14322975 | 172264 |
| 68296 | 14386557 | 14388899 | 172264 |
| 68297 | 14390330 | 14393676 | 172264 |
| 68298 | 14561105 | 14561774 | 172264, 227927 |
| 68299 | 14589972 | 14590881 | 172264, 227927 |
| 68300 | 14653797 | 14654253 | 172264 |
| 68301 | 14692123 | 14694009 | 172264 |
| 68302 | 14697491 | 14698688 | 172264 |
| 68303 | 14859093 | 14861163 | 172264 |
| 68304 | 14936034 | 14937546 | 172264 |
| 68305 | 14958903 | 14961186 | 172264 |
| 68306 | 14964819 | 14968144 | 172264 |
| 68307 | 14972264 | 14973255 | 172264 |
| 68308 | 14973497 | 14974438 | 172264 |
| 68309 | 14978306 | 14979004 | 172264 |
| 68310 | 15301502 | 15302131 | 172264 |
| 68311 | 15322887 | 15325070 | 172264 |
| 68312 | 15466854 | 15468968 | 172264 |
| 68313 | 15634630 | 15635294 | 172264 |
| 68314 | 15652999 | 15654791 | 172264 |
| 68315 | 15910739 | 15912020 | 172264 |
| 68316 | 16079769 | 16080519 | |
| 68317 | 16081260 | 16082012 | |
| 68318 | 16103709 | 16107039 | |
| 68319 | 16349197 | 16349841 | 89177 |
| 68320 | 16439908 | 16440414 | 89177 |
| 68321 | 16455739 | 16457065 | 89177 |
| 68322 | 16508613 | 16509336 | 89177 |
| 68323 | 16521559 | 16522884 | 89177 |
| 68324 | 16552733 | 16554849 | 89177 |
| 68325 | 16555194 | 16556342 | |
| 68326 | 16560606 | 16561340 | |
| 68327 | 16588041 | 16589055 | |
| 68328 | 16709927 | 16711661 | 125870, 228809 |
| 68329 | 17511239 | 17512706 | 125864 |
| 68330 | 17522049 | 17522986 | 125864 |
| 68331 | 17538665 | 17540281 | 125864 |
| 68332 | 17543224 | 17544018 | 125864 |
| 68333 | 17548963 | 17552422 | 125868, 125864 |
| 68334 | 17607154 | 17607870 | 125844 |
| 68335 | 17657425 | 17658102 | 125844 |
| 68336 | 17660083 | 17663898 | 125844 |
| 68337 | 17691072 | 17691896 | 125888 |
| 68338 | 17702538 | 17703073 | 125888 |
| 68339 | 17730631 | 17731673 | |
| 68340 | 17776633 | 17777217 | |
| 68341 | 17839425 | 17840678 | |
| 68342 | 17844134 | 17844886 | |
| 68343 | 17855541 | 17856550 | |
| 68344 | 17876731 | 17878408 | |
| 68345 | 17891344 | 17892106 | |
| 68346 | 17905708 | 17906422 | |
| 68347 | 17947627 | 17951300 | 125871, 089006, 125850 |
| 68348 | 17966215 | 17966773 | 125850, 125871 |
| 68349 | 17982128 | 17982718 | 125850 |
| 68350 | 18117308 | 18120192 | 232838, 149474 |
| 68351 | 18124598 | 18126095 | 149474 |
| 68352 | 18268055 | 18270164 | 125846 |
| 68353 | 18447250 | 18448747 | 132664, 089091 |
| 68354 | 18477239 | 18478271 | 89050 |
| 68355 | 18484927 | 18485477 | 214612 |
| 68356 | 18487370 | 18489479 | 101310 |
| 68357 | 18521551 | 18525651 | 101310 |
| 68358 | 18547123 | 18548948 | 232388 |
| 68359 | 18565228 | 18566252 | |
| 68360 | 18568400 | 18569373 | 125821 |
| 68361 | 18774397 | 18775464 | 273148, 179935 |
| 68362 | 18837752 | 18840108 | |
| 68363 | 19673117 | 19673898 | 232675, 185052 |
| 68364 | 19737677 | 19740182 | 268628, 233895 |
| 68365 | 19740347 | 19740975 | 233895 |
| 68366 | 19783095 | 19783929 | 233895 |
| 68367 | 19865097 | 19867790 | 132669 |
| 68368 | 19944680 | 19945693 | 132669 |
| 68369 | 19990257 | 19992091 | |
| 68370 | 19997435 | 19998845 | 173418 |
| 68371 | 20032398 | 20033688 | 089101, 101343 |
| 68372 | 20437960 | 20438753 | 188559 |
| 68373 | 20461343 | 20462345 | 188559 |
| 68374 | 20473596 | 20474078 | 188559 |
| 68375 | 20499628 | 20500450 | 188559 |
| 68376 | 20679307 | 20680271 | 188559 |
| 68377 | 20691107 | 20694256 | 188559 |
| 68378 | 20712022 | 20713853 | |
| 68379 | 20714963 | 20716084 | |
| 68380 | 20723830 | 20725187 | |
| 68381 | 20736332 | 20737136 | |
| 68382 | 20739623 | 20740363 | |
| 68383 | 20760803 | 20761614 | |
| 68384 | 20762858 | 20763340 | |
| 68385 | 21105826 | 21106309 | |
| 68386 | 21106451 | 21107462 | 88970 |
| 68387 | 21182802 | 21183373 | 088970, 232712 |
| 68388 | 21183630 | 21184345 | 088970, 232712 |
| 68389 | 21282857 | 21284962 | 88930 |
| 68390 | 21485615 | 21487691 | |
| 68391 | 21514980 | 21515504 | |
| 68392 | 21544342 | 21546027 | |
| 68393 | 21961180 | 21964233 | |
| 68394 | 22391132 | 22394235 | 204684 |
| 68395 | 22399177 | 22399877 | 204684 |
| 68396 | 22406181 | 22407166 | |
| 68397 | 22409758 | 22411977 | |
| 68398 | 22432995 | 22434644 | |
| 68399 | 22441345 | 22441914 | |
| 68400 | 22443583 | 22444099 | |
| 68401 | 22445821 | 22447447 | |
| 68402 | 22451947 | 22452465 | |
| 68403 | 22469790 | 22471878 | |
| 68404 | 22487756 | 22488588 | |
| 68405 | 22492492 | 22493840 | |
| 68406 | 22502912 | 22508321 | |
| 68407 | 22548578 | 22553618 | 259974 |
| 68408 | 22555074 | 22561339 | 259974 |
| 68409 | 22562024 | 22566455 | 125798 |
| 68410 | 22567146 | 22568328 | 237396 |
| 68411 | 22660794 | 22661503 | 230400 |
| 68412 | 22672065 | 22672886 | |
| 68413 | 22755917 | 22757580 | |
| 68414 | 22775621 | 22778184 | |
| 68415 | 22911960 | 22912972 | |
| 68416 | 23329737 | 23332347 | 269407, 132661, 234832 |
| 68417 | 23338015 | 23339144 | 232645 |
| 68418 | 23341183 | 23344161 | 125812 |
| 68419 | 23400083 | 23402428 | 125814 |
| 68420 | 23416053 | 23417466 | |
| 68421 | 23426170 | 23426748 | |
| 68422 | 23602964 | 23605251 | |
| 68423 | 23615944 | 23616495 | 101439 |
| 68424 | 23617232 | 23618919 | 101439 |
| 68425 | 24015134 | 24015999 | |
| 68426 | 24082285 | 24085693 | |
| 68427 | 24125935 | 24127848 | |
| 68428 | 24129485 | 24131187 | |
| 68429 | 24208158 | 24208795 | |
| 68430 | 24216804 | 24217262 | |
| 68431 | 24735855 | 24736768 | |
| 68432 | 24933450 | 24934309 | 77984 |
| 68433 | 24967922 | 24970192 | 101474 |
| 68434 | 24972290 | 24974587 | 101474 |
| 68435 | 24985763 | 24986233 | |
| 68436 | 24992191 | 24992939 | 154930 |
| 68437 | 25020205 | 25021073 | 154930 |
| 68438 | 25025618 | 25026396 | 154930 |
| 68439 | 25035535 | 25036235 | 154930 |
| 68440 | 25036791 | 25039166 | 154930 |
| 68441 | 25045838 | 25046905 | |
| 68442 | 25057120 | 25058648 | 100987 |
| 68443 | 25175622 | 25177731 | 197586 |
| 68444 | 25203805 | 25204345 | 197586 |
| 68445 | 25206694 | 25209065 | 268302, 197586 |
| 68446 | 25213440 | 25214805 | |
| 68447 | 25216837 | 25219878 | |
| 68448 | 25227021 | 25229761 | 100994 |
| 68449 | 25236034 | 25236379 | 100994 |
| 68450 | 25236908 | 25237389 | 100994 |
| 68451 | 25289044 | 25292562 | 100997 |
| 68452 | 25318951 | 25319514 | 100997 |
| 68453 | 25370301 | 25372404 | 100997 |
| 68454 | 25387922 | 25388811 | 101003 |
| 68455 | 25487554 | 25489978 | 101004 |
| 68456 | 25519454 | 25521754 | 101004 |
| 68457 | 25522410 | 25523476 | 101004 |
| 68458 | 25565250 | 25566753 | 101004 |
| 68459 | 25603192 | 25605820 | 213742, 170191 |
| 68460 | 25676055 | 25677969 | 130684 |
| 68461 | 26188669 | 26189540 | 227195 |
| 68462 | 26189742 | 26190651 | 227195 |
| 68463 | 29611374 | 29612474 | 149531 |
| 68464 | 30048289 | 30048709 | |
| 68465 | 30101888 | 30103556 | 101294 |
| 68466 | 30147091 | 30149745 | 101294 |
| 68467 | 30159831 | 30161978 | 230613 |
| 68468 | 30191764 | 30195294 | 264395, 125968 |
| 68469 | 30195451 | 30196827 | |
| 68470 | 30198239 | 30199217 | |
| 68471 | 30200456 | 30201105 | |
| 68472 | 30249165 | 30250610 | |
| 68473 | 30251379 | 30252507 | 171552 |
| 68474 | 30262513 | 30263347 | 171552 |
| 68475 | 30265337 | 30267459 | 171552 |
| 68476 | 30281533 | 30290216 | 171552, 236559 |
| 68477 | 30291993 | 30295307 | 171552, 236559 |
| 68478 | 30295485 | 30296771 | 171552, 236559 |
| 68479 | 30298172 | 30302503 | 171552, 236559 |
| 68480 | 30306372 | 30312124 | 268457, 171552 |
| 68481 | 30326305 | 30327205 | 88325 |
| 68482 | 30467277 | 30468285 | 131044 |
| 68483 | 30538712 | 30540197 | 88356 |
| 68484 | 30575167 | 30576145 | 260903 |
| 68485 | 30696768 | 30698642 | 101337 |
| 68486 | 30742369 | 30743581 | 101337 |
| 68487 | 30794315 | 30796380 | 101346, 126003 |
| 68488 | 30804116 | 30805285 | 101346 |
| 68489 | 30815360 | 30816249 | 101346 |
| 68490 | 30823454 | 30824107 | 101346 |
| 68491 | 30864946 | 30866356 | 101350, 264308 |
| 68492 | 30877280 | 30878310 | 101350 |
| 68493 | 30913335 | 30915257 | 101350 |
| 68494 | 30942154 | 30947738 | 171456 |
| 68495 | 31025424 | 31026023 | 171456 |
| 68496 | 31026546 | 31028813 | 171456 |
| 68497 | 31052763 | 31054722 | 197183 |
| 68498 | 31060774 | 31062030 | 197183 |
| 68499 | 31070256 | 31073985 | 197183 |
| 68500 | 31103409 | 31104087 | 197183 |
| 68501 | 31266651 | 31267306 | |
| 68502 | 31273561 | 31274074 | |
| 68503 | 31296734 | 31297820 | 149600 |
| 68504 | 31318985 | 31320201 | 149600 |
| 68505 | 31330320 | 31332415 | 149600 |
| 68506 | 31340057 | 31340979 | |
| 68507 | 31349879 | 31351256 | 88305 |
| 68508 | 31364911 | 31366030 | 88305 |
| 68509 | 31407243 | 31408852 | 101367 |
| 68510 | 31415733 | 31416547 | 101367 |
| 68511 | 31715497 | 31716135 | |
| 68512 | 31766597 | 31766942 | 131050 |
| 68513 | 31960871 | 31962730 | 101391 |
| 68514 | 31988618 | 31989698 | 101391 |
| 68515 | 32030713 | 32032252 | 101400 |
| 68516 | 32076962 | 32078863 | 78699 |
| 68517 | 32142533 | 32143343 | 78699 |
| 68518 | 32149804 | 32150560 | 78699 |
| 68519 | 32250735 | 32252451 | 149609, 125967 |
| 68520 | 32260853 | 32263038 | 271803, 125967 |
| 68521 | 32307181 | 32308527 | 101417 |
| 68522 | 32319207 | 32320827 | 131061, 229188 |
| 68523 | 32321410 | 32322232 | 131061 |
| 68524 | 32365610 | 32367323 | 131061 |
| 68525 | 32376848 | 32377869 | 230753, 131061 |
| 68526 | 32398767 | 32401471 | 101421, 230753 |
| 68527 | 32580168 | 32582983 | 125970, 228265 |
| 68528 | 32670590 | 32671286 | 125970 |
| 68529 | 32698652 | 32701037 | 125977 |
| 68530 | 32803629 | 32804458 | 214185, 101440 |
| 68531 | 32849905 | 32851302 | 250917, 101440 |
| 68532 | 32889850 | 32891717 | 101444 |
| 68533 | 32898129 | 32900980 | 101444 |
| 68534 | 32902244 | 32902720 | |
| 68535 | 32918744 | 32919448 | |
| 68536 | 32950738 | 32952506 | 78747 |
| 68537 | 32954621 | 32955669 | 78747 |
| 68538 | 32978531 | 32979595 | 78747 |
| 68539 | 32990374 | 32991482 | 234933, 078747 |
| 68540 | 32995558 | 32996827 | 78747 |
| 68541 | 33103060 | 33105346 | 125971 |
| 68542 | 33112698 | 33114297 | 125971 |
| 68543 | 33126384 | 33127035 | 125971 |
| 68544 | 33141078 | 33141763 | 101460 |
| 68545 | 33145668 | 33147742 | 101460 |
| 68546 | 33209428 | 33209898 | 101464 |
| 68547 | 33225151 | 33225799 | 101464 |
| 68548 | 33227656 | 33228163 | 101464 |
| 68549 | 33264206 | 33265386 | 101464 |
| 68550 | 33291130 | 33293924 | 078804, 198646 |
| 68551 | 33296314 | 33298118 | 078804, 198646 |
| 68552 | 33412339 | 33414238 | 198646 |
| 68553 | 33460023 | 33460990 | 131067, 131069 |
| 68554 | 33461719 | 33465403 | 131069 |
| 68555 | 33483883 | 33484299 | 131069 |
| 68556 | 33491704 | 33492565 | 131069 |
| 68557 | 33495377 | 33496035 | 131069 |
| 68558 | 33502567 | 33503371 | 131069 |
| 68559 | 33510392 | 33511571 | 131069 |
| 68560 | 33535758 | 33536303 | 100983 |
| 68561 | 33542240 | 33544123 | 100983 |
| 68562 | 33582297 | 33582933 | 78814 |
| 68563 | 33596657 | 33597158 | 100991 |
| 68564 | 33679375 | 33681840 | 100991 |
| 68565 | 33733908 | 33735942 | 88298 |
| 68566 | 33761597 | 33763164 | 088298, 101000 |
| 68567 | 33767193 | 33768195 | 88298 |
| 68568 | 33795689 | 33796729 | 88298 |
| 68569 | 33845273 | 33845837 | 088298, 125966, 126005 |
| 68570 | 33850716 | 33852907 | 088298, 125966, 126005 |
| 68571 | 33856751 | 33857523 | 088298, 125966, 261582, |
| | | | 126005 |
| 68572 | 33863412 | 33866406 | 088298, 125966, 126005, |
| | | | 261582 |
| 68573 | 33871232 | 33875336 | 125998, 235214, 242372 |
| 68574 | 33891228 | 33898317 | 101019 |
| 68575 | 33898564 | 33901435 | 101019 |
| 68576 | 33904884 | 33909180 | 101019 |
| 68577 | 33913266 | 33917054 | 101019 |
| 68578 | 33917084 | 33917694 | 101019 |
| 68579 | 33929167 | 33933994 | 101019 |
| 68580 | 33975145 | 33975681 | 101019 |
| 68581 | 33998827 | 34000657 | 101019 |
| 68582 | 34034546 | 34035433 | 125965 |
| 68583 | 34042156 | 34043915 | 126001, 125965 |
| 68584 | 34129632 | 34130518 | 125991 |
| 68585 | 34203374 | 34205841 | 61656 |
| 68586 | 34251459 | 34253516 | 214078, 244462, 272897 |
| 68587 | 34282864 | 34283717 | 244005 |
| 68588 | 34286543 | 34288091 | 125995, 244005 |
| 68589 | 34327811 | 34332499 | 131051 |
| 68590 | 34359554 | 34361008 | 25293 |
| 68591 | 34535508 | 34535979 | 25293 |
| 68592 | 34540666 | 34543429 | 171222 |
| 68593 | 34638315 | 34639710 | 260032 |
| 68594 | 34652455 | 34653833 | |
| 68595 | 34673141 | 34674151 | 234139 |
| 68596 | 34823766 | 34825500 | 131043 |
| 68597 | 35082932 | 35083847 | 80845 |
| 68598 | 35088688 | 35092069 | 80845 |
| 68599 | 35093260 | 35094332 | 80845 |
| 68600 | 35096735 | 35097879 | 80845 |
| 68601 | 35109178 | 35111337 | 80845 |
| 68602 | 35126914 | 35127584 | 80845 |
| 68603 | 35184838 | 35185347 | 259716, 232907 |
| 68604 | 35200277 | 35204200 | 118707, 259399, 232907, |
| | | | 259716 |
| 68605 | 35233262 | 35237150 | 101084, 259399 |
| 68606 | 35373033 | 35375211 | 265441, 101079 |
| 68607 | 35382894 | 35383520 | 149636 |
| 68608 | 35401406 | 35403163 | 149636 |
| 68609 | 35436998 | 35438209 | 149639 |
| 68610 | 35463584 | 35464285 | 149639 |
| 68611 | 35575045 | 35575882 | 101347 |
| 68612 | 35578930 | 35580697 | 101347 |
| 68613 | 35583071 | 35584254 | |
| 68614 | 35723544 | 35724904 | 269846, 080839 |
| 68615 | 35806532 | 35808953 | 118705, 101353 |
| 68616 | 35830633 | 35831172 | 118705 |
| 68617 | 35917326 | 35919073 | 101363 |
| 68618 | 35922294 | 35924645 | 101363 |
| 68619 | 35972782 | 35974946 | 197122 |
| 68620 | 36008526 | 36009284 | 197122 |
| 68621 | 36010298 | 36010850 | 197122 |
| 68622 | 36027097 | 36028274 | 197122 |
| 68623 | 36147532 | 36148528 | 166619 |
| 68624 | 36154630 | 36157671 | 166619 |
| 68625 | 36306026 | 36307142 | 204117 |
| 68626 | 36321879 | 36323268 | 132792 |
| 68627 | 36356021 | 36356766 | 132792 |
| 68628 | 36426616 | 36427360 | 132792 |
| 68629 | 36530405 | 36532146 | 132821 |
| 68630 | 36614113 | 36616647 | 101407 |
| 68631 | 36660786 | 36663477 | 101413, 101407 |
| 68632 | 36677900 | 36679857 | 101413 |
| 68633 | 36687375 | 36689599 | 101413 |
| 68634 | 36695151 | 36696358 | 101413 |
| 68635 | 36711232 | 36711785 | 101413 |
| 68636 | 36721955 | 36724380 | |
| 68637 | 36736833 | 36739904 | |
| 68638 | 36753345 | 36755969 | |
| 68639 | 36770862 | 36774599 | 198959 |
| 68640 | 36777946 | 36783241 | 198959 |
| 68641 | 36790308 | 36791187 | 198959 |
| 68642 | 36792466 | 36794167 | 198959 |
| 68643 | 36795517 | 36798654 | |
| 68644 | 36820097 | 36820470 | |
| 68645 | 36874859 | 36875501 | 149633 |
| 68646 | 36919270 | 36920123 | 206249, 101425 |
| 68647 | 36958785 | 36959653 | 101425 |
| 68648 | 36970997 | 36973471 | |
| 68649 | 36973659 | 36976744 | 129988 |
| 68650 | 36981184 | 36984379 | 129988 |
| 68651 | 36986175 | 36987167 | 129988 |
| 68652 | 37023713 | 37024397 | |
| 68653 | 37062686 | 37064267 | 196756 |
| 68654 | 37074821 | 37076322 | 174365 |
| 68655 | 37076475 | 37077434 | 174365 |
| 68656 | 37088815 | 37089296 | |
| 68657 | 37100845 | 37102392 | 170471 |
| 68658 | 37228248 | 37228670 | |
| 68659 | 37376858 | 37377824 | 101442 |
| 68660 | 37393632 | 37394002 | 101442 |
| 68661 | 37502947 | 37503548 | 101445 |
| 68662 | 37541924 | 37543273 | 101445 |
| 68663 | 37554491 | 37555652 | 101447 |
| 68664 | 37590138 | 37591862 | 261431, 101452 |
| 68665 | 37613834 | 37614906 | 101452 |
| 68666 | 37677904 | 37679136 | |
| 68667 | 37746040 | 37746620 | |
| 68668 | 37818751 | 37820301 | |
| 68669 | 37836926 | 37837861 | |
| 68670 | 37893077 | 37893626 | |
| 68671 | 38260074 | 38260642 | |
| 68672 | 38506602 | 38507251 | |
| 68673 | 38516969 | 38517452 | |
| 68674 | 38519077 | 38519764 | |
| 68675 | 38611798 | 38613004 | |
| 68676 | 38614297 | 38616057 | |
| 68677 | 38617235 | 38618289 | |
| 68678 | 38636151 | 38639245 | 237767 |
| 68679 | 39135026 | 39135755 | |
| 68680 | 39140105 | 39140626 | |
| 68681 | 39179507 | 39180594 | |
| 68682 | 39283284 | 39284577 | |
| 68683 | 39296787 | 39298562 | |
| 68684 | 39310653 | 39311282 | |
| 68685 | 39315816 | 39316771 | 204103 |
| 68686 | 39317297 | 39319786 | 204103 |
| 68687 | 39656868 | 39659022 | 198900 |
| 68688 | 39667559 | 39668245 | 198900 |
| 68689 | 39706801 | 39707440 | 198900 |
| 68690 | 39739552 | 39740187 | 198900, 226648 |
| 68691 | 39765306 | 39767102 | 124181, 226648 |
| 68692 | 39876530 | 39878991 | 174306 |
| 68693 | 39915195 | 39916911 | 174306 |
| 68694 | 39924407 | 39925599 | 174306 |
| 68695 | 39944624 | 39947595 | 174306 |
| 68696 | 39968403 | 39970193 | 132793 |
| 68697 | 40141211 | 40141655 | 124177 |
| 68698 | 40205400 | 40206766 | 124177 |
| 68699 | 40245904 | 40247606 | 124177 |
| 68700 | 40321171 | 40323419 | |
| 68701 | 41530363 | 41531264 | 196090 |
| 68702 | 42085545 | 42088154 | 124193 |
| 68703 | 42167500 | 42168307 | 185513 |
| 68704 | 42178862 | 42179564 | 185513, 226143 |
| 68705 | 42184905 | 42185727 | |
| 68706 | 42185974 | 42189587 | 101049 |
| 68707 | 42218777 | 42219802 | 101052 |
| 68708 | 42281413 | 42282201 | 215467 |
| 68709 | 42285370 | 42287033 | |
| 68710 | 42528488 | 42529475 | |
| 68711 | 42587442 | 42588829 | 124191 |
| 68712 | 42591786 | 42592458 | 124191 |
| 68713 | 42815838 | 42817128 | 149596 |
| 68714 | 42832737 | 42833803 | 132823 |
| 68715 | 42837644 | 42840733 | 223891, 132823 |
| 68716 | 42930318 | 42931753 | 197296 |
| 68717 | 42938788 | 42940295 | 197296 |
| 68718 | 42983595 | 42985418 | 101076, 226812 |
| 68719 | 42997914 | 43000814 | 101076 |
| 68720 | 43017004 | 43018060 | 101076, 229005 |
| 68721 | 43021214 | 43022266 | 101076, 229005 |
| 68722 | 43022829 | 43024534 | 229005, 101076 |
| 68723 | 43028850 | 43032375 | 101076 |
| 68724 | 43037289 | 43040412 | 101076 |
| 68725 | 43047762 | 43048652 | 101076 |
| 68726 | 43050726 | 43051237 | 101076 |
| 68727 | 43062147 | 43063780 | 273283 |
| 68728 | 43064037 | 43065261 | |
| 68729 | 43071174 | 43071656 | |
| 68730 | 43076304 | 43077147 | |
| 68731 | 43078528 | 43080208 | 237907 |
| 68732 | 43089385 | 43091233 | 168746 |
| 68733 | 43092960 | 43097684 | 226243, 168746 |
| 68734 | 43099786 | 43100533 | |
| 68735 | 43103736 | 43106314 | 124120 |
| 68736 | 43108290 | 43109157 | 124120 |
| 68737 | 43110309 | 43110952 | 124120 |
| 68738 | 43123006 | 43127033 | 132824, 124120 |
| 68739 | 43149533 | 43151288 | 132824 |
| 68740 | 43159890 | 43161281 | 168734 |
| 68741 | 43223088 | 43224029 | 168734 |
| 68742 | 43237480 | 43239493 | 168734, 269605 |
| 68743 | 43270803 | 43271694 | 196839 |
| 68744 | 43279789 | 43281391 | 196839 |
| 68745 | 43313044 | 43314410 | 132832 |
| 68746 | 43321274 | 43322229 | 132832 |
| 68747 | 43513820 | 43515666 | 166913 |
| 68748 | 43539980 | 43540433 | 101104 |
| 68749 | 43588217 | 43589400 | 25772 |
| 68750 | 43594363 | 43595633 | 101109, 227477 |
| 68751 | 43706137 | 43706794 | 101109 |
| 68752 | 43882771 | 43884202 | 124107 |
| 68753 | 43951432 | 43952237 | |
| 68754 | 43952754 | 43954764 | 124145 |
| 68755 | 43957029 | 43959530 | 124145 |
| 68756 | 43963942 | 43977782 | 124145 |
| 68757 | 43983388 | 43984290 | |
| 68758 | 43985889 | 43992672 | 254806, 204070 |
| 68759 | 44001931 | 44002918 | 124251, 254806, 204070 |
| 68760 | 44034785 | 44035738 | 244274, 254806, 124251 |
| 68761 | 44044178 | 44045680 | 124155 |
| 68762 | 44064943 | 44066150 | |
| 68763 | 44077637 | 44079436 | |
| 68764 | 44138910 | 44139815 | |
| 68765 | 44399600 | 44400304 | 124116 |
| 68766 | 44420205 | 44421432 | 101457, 124116 |
| 68767 | 44461569 | 44463325 | 124104, 101470 |
| 68768 | 44485141 | 44486941 | 132801, 101473 |
| 68769 | 44509665 | 44510527 | 168612 |
| 68770 | 44518561 | 44521124 | 064601, 124257 |
| 68771 | 44533863 | 44535066 | 100979 |
| 68772 | 44562245 | 44564769 | 100982 |
| 68773 | 44571822 | 44576154 | 100982 |
| 68774 | 44599442 | 44601518 | 198026 |
| 68775 | 44717278 | 44718880 | 124160 |
| 68776 | 44746307 | 44747615 | 101017 |
| 68777 | 44889079 | 44889495 | 149654 |
| 68778 | 44991998 | 44993374 | 80189 |
| 68779 | 45028861 | 45029288 | 62598 |
| 68780 | 45034358 | 45035991 | 62598 |
| 68781 | 45040247 | 45040792 | 62598 |
| 68782 | 45259714 | 45261088 | 158296 |
| 68783 | 45269094 | 45270003 | 158296 |
| 68784 | 45295441 | 45296244 | 158296 |
| 68785 | 45299386 | 45300029 | 158296 |
| 68786 | 45312670 | 45313370 | 172315 |
| 68787 | 45316910 | 45319156 | 271784, 172315 |
| 68788 | 45331224 | 45332836 | |
| 68789 | 45333422 | 45334863 | |
| 68790 | 45337802 | 45339566 | 197496 |
| 68791 | 45343804 | 45344401 | 197496 |
| 68792 | 45443378 | 45444494 | |
| 68793 | 45451580 | 45452987 | |
| 68794 | 45587673 | 45588226 | 64655 |
| 68795 | 45661569 | 45662272 | 64655 |
| 68796 | 45664626 | 45665264 | 64655 |
| 68797 | 45824803 | 45825522 | |
| 68798 | 45829024 | 45829771 | |
| 68799 | 45902060 | 45904282 | 101040 |
| 68800 | 45943083 | 45949320 | 267882, 263770, 101040 |
| 68801 | 45949400 | 45950692 | 267882, 101040 |
| 68802 | 45956773 | 45958079 | 101040 |
| 68803 | 45959358 | 45961081 | 101040 |
| 68804 | 45961277 | 45964573 | 101040 |
| 68805 | 45966025 | 45967548 | 101040 |
| 68806 | 45969487 | 45970050 | 101040 |
| 68807 | 45980986 | 45981870 | 231119, 101040 |
| 68808 | 45983276 | 45989920 | 231119, 101040 |
| 68809 | 46012430 | 46013404 | |
| 68810 | 46092628 | 46094617 | |
| 68811 | 46121745 | 46122801 | 201742 |
| 68812 | 46129660 | 46131954 | 124151 |
| 68813 | 46333475 | 46334313 | 196562 |
| 68814 | 46339092 | 46340677 | 196562 |
| 68815 | 46341880 | 46343407 | 196562 |
| 68816 | 46353920 | 46354576 | 196562 |
| 68817 | 46390972 | 46392675 | 196562 |
| 68818 | 46394440 | 46395629 | 196562 |
| 68819 | 46397088 | 46397730 | 196562 |
| 68820 | 46413072 | 46415796 | 196562 |
| 68821 | 46911762 | 46912974 | |
| 68822 | 46913933 | 46916841 | |
| 68823 | 46917428 | 46918501 | |
| 68824 | 46923560 | 46925224 | |
| 68825 | 47298960 | 47299550 | 124126 |
| 68826 | 47314223 | 47315388 | 124126 |
| 68827 | 47339288 | 47340350 | 124126 |
| 68828 | 47407467 | 47408470 | 124126 |
| 68829 | 47444489 | 47445501 | |
| 68830 | 47448037 | 47448964 | |
| 68831 | 47466833 | 47467764 | |
| 68832 | 47470309 | 47470902 | |
| 68833 | 47536690 | 47537148 | |
| 68834 | 47537450 | 47540444 | 124198 |
| 68835 | 47547880 | 47549707 | 124198 |
| 68836 | 47599890 | 47600350 | 124198 |
| 68837 | 47625514 | 47626232 | 124198 |
| 68838 | 47661776 | 47664297 | 124207, 227431 |
| 68839 | 47795632 | 47796871 | 124214 |
| 68840 | 47801773 | 47802573 | 124214 |
| 68841 | 47803370 | 47805333 | 124214 |
| 68842 | 47835506 | 47836893 | 124228 |
| 68843 | 47892809 | 47896377 | 209042, 177410, 124201 |
| 68844 | 47904394 | 47904914 | 177410 |
| 68845 | 47973055 | 47973744 | |
| 68846 | 47976779 | 47977433 | |
| 68847 | 47998055 | 47998621 | 158445 |
| 68848 | 48003333 | 48004019 | 158445 |
| 68849 | 48060941 | 48062422 | 158445 |
| 68850 | 48077345 | 48078025 | 158445 |
| 68851 | 48091645 | 48092902 | 158445 |
| 68852 | 48095267 | 48095760 | 158445 |
| 68853 | 48095817 | 48096928 | 158445 |
| 68854 | 48100183 | 48101279 | |
| 68855 | 48107095 | 48107836 | |
| 68856 | 48199932 | 48201642 | |
| 68857 | 48221040 | 48221472 | |
| 68858 | 48231832 | 48233035 | |
| 68859 | 48272750 | 48273454 | 158470 |
| 68860 | 48290627 | 48294295 | 158470 |
| 68861 | 48304326 | 48305344 | 158470 |
| 68862 | 48306986 | 48309145 | 158470 |
| 68863 | 48313234 | 48314678 | 158470 |
| 68864 | 48325499 | 48326626 | 158470 |
| 68865 | 48328030 | 48330840 | 158470 |
| 68866 | 48364193 | 48365335 | |
| 68867 | 48384583 | 48385625 | |
| 68868 | 48388573 | 48389400 | |
| 68869 | 48391221 | 48393864 | |
| 68870 | 48428370 | 48430740 | 197818 |
| 68871 | 48439652 | 48440791 | 197818 |
| 68872 | 48441938 | 48442811 | 197818 |
| 68873 | 48448677 | 48449600 | 197818 |
| 68874 | 48482426 | 48483310 | 197818 |
| 68875 | 48512683 | 48513186 | |
| 68876 | 48530817 | 48534627 | 158480 |
| 68877 | 48545092 | 48545662 | |
| 68878 | 48551354 | 48556186 | 124226 |
| 68879 | 48586335 | 48586854 | |
| 68880 | 48592785 | 48594134 | |
| 68881 | 48598486 | 48599682 | 124216 |
| 68882 | 48645603 | 48647541 | |
| 68883 | 48728376 | 48730666 | 124208, 240849, 244687 |
| 68884 | 48737246 | 48738120 | 124208, 240849 |
| 68885 | 48742547 | 48743743 | 124208, 240849 |
| 68886 | 48753051 | 48756488 | 124208, 240849 |
| 68887 | 48759798 | 48761959 | 124208, 240849 |
| 68888 | 48768700 | 48771108 | 124208, 240849 |
| 68889 | 48781881 | 48783486 | 234698, 237595 |
| 68890 | 48788372 | 48789855 | 231742 |
| 68891 | 48802597 | 48813127 | 172216 |
| 68892 | 48837880 | 48838587 | |
| 68893 | 48864080 | 48865442 | |
| 68894 | 48865920 | 48866948 | |
| 68895 | 48889641 | 48890702 | 224397 |
| 68896 | 48894757 | 48896073 | 224397 |
| 68897 | 48899601 | 48902593 | |
| 68898 | 48907990 | 48911881 | 203999 |
| 68899 | 48919940 | 48927058 | 203999 |
| 68900 | 48928731 | 48930316 | 203999, 233077 |
| 68901 | 48937164 | 48938086 | 233077 |
| 68902 | 48948314 | 48948787 | |
| 68903 | 48988340 | 48989663 | |
| 68904 | 48995666 | 48996635 | |
| 68905 | 49005308 | 49007253 | |
| 68906 | 49011318 | 49012913 | |
| 68907 | 49014492 | 49018403 | |
| 68908 | 49020092 | 49021401 | |
| 68909 | 49028438 | 49029134 | |
| 68910 | 49031088 | 49033842 | |
| 68911 | 49037907 | 49041337 | |
| 68912 | 49055057 | 49058863 | |
| 68913 | 49067460 | 49068315 | |
| 68914 | 49125959 | 49128052 | 196396 |
| 68915 | 49179699 | 49180893 | 196396 |
| 68916 | 49193625 | 49194184 | 196396, 232043 |
| 68917 | 49241063 | 49241646 | 42062 |
| 68918 | 49261753 | 49262667 | 234693, 042062 |
| 68919 | 49271793 | 49272514 | 042062, 234693 |
| 68920 | 49275307 | 49275804 | 042062, 234693 |
| 68921 | 49279465 | 49280451 | 42062 |
| 68922 | 49286934 | 49287401 | 42062 |
| 68923 | 49292295 | 49292924 | 42062 |
| 68924 | 49296399 | 49297474 | 42062 |
| 68925 | 49323964 | 49324683 | |
| 68926 | 49344100 | 49346602 | |
| 68927 | 49347567 | 49349565 | 124171 |
| 68928 | 49360331 | 49361893 | 124171 |
| 68929 | 49362744 | 49363619 | 124171 |
| 68930 | 49377508 | 49381017 | |
| 68931 | 49406903 | 49408125 | |
| 68932 | 49410876 | 49412035 | 124243 |
| 68933 | 49472527 | 49473577 | 124243 |
| 68934 | 49545809 | 49549001 | 259456, 101126 |
| 68935 | 49573797 | 49576433 | 124217, 000419 |
| 68936 | 49595818 | 49599261 | |
| 68937 | 49600445 | 49601202 | |
| 68938 | 50028846 | 50030074 | 101096 |
| 68939 | 50046595 | 50047595 | 101096 |
| 68940 | 50061938 | 50065138 | 101096 |
| 68941 | 50073013 | 50073982 | 101096 |
| 68942 | 50157151 | 50159250 | 101096 |
| 68943 | 50179865 | 50180956 | |
| 68944 | 50211322 | 50212070 | |
| 68945 | 50276611 | 50279211 | 54793 |
| 68946 | 50360517 | 50361643 | 54793 |
| 68947 | 50364838 | 50370052 | 54793 |
| 68948 | 50377559 | 50377974 | 54793 |
| 68949 | 50383374 | 50385129 | 54793 |
| 68950 | 50416564 | 50418685 | 101115 |
| 68951 | 50600935 | 50602103 | |
| 68952 | 50672751 | 50673533 | 20256 |
| 68953 | 50807347 | 50809472 | 20256 |
| 68954 | 50847633 | 50848655 | 234948 |
| 68955 | 51442814 | 51443891 | |
| 68956 | 51468988 | 51469729 | |
| 68957 | 51475254 | 51476675 | 232286 |
| 68958 | 51539513 | 51540101 | |
| 68959 | 51541117 | 51541729 | |
| 68960 | 51558789 | 51564498 | |
| 68961 | 51581354 | 51583058 | |
| 68962 | 51587984 | 51592807 | 182463 |
| 68963 | 51608288 | 51609625 | 182463 |
| 68964 | 51693493 | 51700450 | 182463 |
| 68965 | 51703397 | 51704400 | 182463 |
| 68966 | 51778177 | 51781129 | 182463 |
| 68967 | 51833048 | 51834188 | 182463 |
| 68968 | 52010833 | 52011579 | 271774, 182463 |
| 68969 | 52195075 | 52197117 | 171940 |
| 68970 | 52198871 | 52199915 | 171940 |
| 68971 | 52208887 | 52210285 | 171940 |
| 68972 | 52210413 | 52210916 | 171940 |
| 68973 | 52210919 | 52212012 | 171940 |
| 68974 | 52237474 | 52241268 | 235415 |
| 68975 | 52258610 | 52260147 | |
| 68976 | 52268427 | 52270059 | |
| 68977 | 52293543 | 52296139 | |
| 68978 | 52315697 | 52316692 | |
| 68979 | 52327805 | 52329493 | |
| 68980 | 52353216 | 52357727 | |
| 68981 | 52379764 | 52381482 | |
| 68982 | 52389609 | 52392086 | |
| 68983 | 52417337 | 52417965 | 225563 |
| 68984 | 52421758 | 52422678 | |
| 68985 | 52436325 | 52437340 | |
| 68986 | 52445123 | 52447482 | |
| 68987 | 52482085 | 52484323 | |
| 68988 | 52494953 | 52495704 | |
| 68989 | 52530573 | 52533989 | |
| 68990 | 52542333 | 52543543 | |
| 68991 | 52683910 | 52684824 | 64787 |
| 68992 | 52686628 | 52687464 | 64787 |
| 68993 | 52701296 | 52701945 | |
| 68994 | 52719572 | 52721233 | |
| 68995 | 52723674 | 52725160 | |
| 68996 | 52731424 | 52733556 | |
| 68997 | 52738949 | 52741189 | |
| 68998 | 52748120 | 52751798 | |
| 68999 | 52757262 | 52757926 | |
| 69000 | 52824049 | 52825737 | 101132 |
| 69001 | 52837851 | 52838319 | 101132 |
| 69002 | 52961731 | 52962255 | |
| 69003 | 52980853 | 52981902 | |
| 69004 | 54087839 | 54088289 | |
| 69005 | 54252925 | 54253622 | |
| 69006 | 54254093 | 54254772 | |
| 69007 | 54457346 | 54458473 | |
| 69008 | 54576349 | 54577295 | 54803 |
| 69009 | 54933636 | 54935672 | 124098 |
| 69010 | 54966878 | 54968621 | 101138, 087586 |
| 69011 | 54986773 | 54987642 | 87589 |
| 69012 | 55043304 | 55044452 | 22277 |
| 69013 | 55129885 | 55130411 | |
| 69014 | 55362143 | 55364629 | |
| 69015 | 55373639 | 55374886 | |
| 69016 | 55705216 | 55705783 | |
| 69017 | 55925996 | 55927110 | 101146 |
| 69018 | 55963929 | 55965407 | 218018 |
| 69019 | 55965929 | 55967514 | 132819, 218018 |
| 69020 | 56003228 | 56004738 | |
| 69021 | 56010578 | 56011472 | |
| 69022 | 56014488 | 56014954 | |
| 69023 | 56015397 | 56017278 | |
| 69024 | 56017776 | 56018384 | |
| 69025 | 56031889 | 56032737 | |
| 69026 | 56069938 | 56070707 | |
| 69027 | 56127334 | 56128131 | |
| 69028 | 56130377 | 56131388 | |
| 69029 | 56133099 | 56135148 | |
| 69030 | 56135401 | 56136610 | 124253 |
| 69031 | 56161185 | 56161950 | |
| 69032 | 56164718 | 56165483 | |
| 69033 | 56323398 | 56324049 | |
| 69034 | 56472173 | 56473087 | |
| 69035 | 56826607 | 56827986 | 124224 |
| 69036 | 56881744 | 56882627 | 124224 |
| 69037 | 56884093 | 56886520 | 124209, 124224 |
| 69038 | 56949070 | 56949877 | |
| 69039 | 56963974 | 56965419 | 124164 |
| 69040 | 57007271 | 57008153 | 124164 |
| 69041 | 57011815 | 57012947 | 124164 |
| 69042 | 57224423 | 57227787 | 254995, 124222 |
| 69043 | 57267065 | 57269007 | 254995, 215440 |
| 69044 | 57463402 | 57464186 | 225806, 087460 |
| 69045 | 57466709 | 57468480 | 87460 |
| 69046 | 57555855 | 57557327 | 101158 |
| 69047 | 57570044 | 57572032 | 101160, 101158 |
| 69048 | 57579373 | 57582963 | 101160 |
| 69049 | 57606247 | 57608277 | 101166, 124172 |
| 69050 | 57616710 | 57618536 | 101166 |
| 69051 | 58515220 | 58516223 | 132825, 196227 |
| 69052 | 58839358 | 58839876 | 228340 |
| 69053 | 60577926 | 60578530 | 130699 |
| 69054 | 60602094 | 60602826 | 130699 |
| 69055 | 60638940 | 60639887 | 265306, 130699 |
| 69056 | 60640502 | 60642490 | 130699 |
| 69057 | 60663484 | 60663948 | |
| 69058 | 60696164 | 60698648 | 149657 |
| 69059 | 60709734 | 60711324 | 149657 |
| 69060 | 60716515 | 60719758 | 184402, 101182 |
| 69061 | 60721146 | 60721939 | 184402 |
| 69062 | 60752316 | 60752967 | 184402 |
| 69063 | 60753493 | 60755253 | 184402 |
| 69064 | 60757037 | 60759244 | 101181, 184402 |
| 69065 | 60762248 | 60763235 | 101181 |
| 69066 | 60812985 | 60814853 | 130703 |
| 69067 | 60871820 | 60873498 | |
| 69068 | 60876827 | 60879499 | 130706 |
| 69069 | 60924909 | 60925996 | 130702 |
| 69070 | 60927098 | 60931827 | 228812, 130702 |
| 69071 | 60931979 | 60932691 | 130702 |
| 69072 | 60933049 | 60933807 | 130702 |
| 69073 | 60939219 | 60940456 | 130702 |
| 69074 | 60941047 | 60946576 | 130702 |
| 69075 | 60951368 | 60952007 | |
| 69076 | 60952386 | 60953711 | |
| 69077 | 60960927 | 60963363 | 171858 |
| 69078 | 60981504 | 60983000 | 149679 |
| 69079 | 61282635 | 61284797 | 101187 |
| 69080 | 61404144 | 61405218 | |
| 69081 | 61407471 | 61408800 | |
| 69082 | 61426421 | 61427333 | |
| 69083 | 61427528 | 61430088 | 101189 |
| 69084 | 61435723 | 61438045 | 060491, 229873 |
| 69085 | 61462618 | 61463220 | 92758 |
| 69086 | 61553879 | 61558757 | 101191 |
| 69087 | 61560249 | 61560910 | 101191 |
| 69088 | 61568223 | 61570356 | 101193, 101191 |
| 69089 | 61583481 | 61585420 | 101194 |
| 69090 | 61586802 | 61587793 | 101194 |
| 69091 | 61733345 | 61734395 | 225978, 231133 |
| 69092 | 61846194 | 61848424 | 149658 |
| 69093 | 61903356 | 61905592 | 101199, 101198 |
| 69094 | 62151862 | 62152983 | 125534 |
| 69095 | 62168495 | 62170223 | 101213 |
| 69096 | 62204429 | 62205899 | 130589 |
| 69097 | 62257060 | 62260425 | 232442, 101216 |
| 69098 | 62289058 | 62289996 | 258366 |
| 69099 | 62337806 | 62340428 | 273154, 197114, 101246 |
| 69100 | 62359739 | 62360371 | 273154, 197114 |
| 69101 | 62365541 | 62366280 | 273154, 197114 |
| 69102 | 62366551 | 62367390 | 203896, 273154, 197114 |
| 69103 | 62368623 | 62369957 | 273047, 273154, 203896 |
| 69104 | 62370350 | 62371331 | 125520, 273154, 203896, |
| | | | 273047 |
| 69105 | 62371375 | 62373204 | 273047, 125520 |
| 69106 | 62494596 | 62497533 | 101150 |
| 69107 | 62526004 | 62528534 | 101152 |
| 69108 | 62586617 | 62589205 | 196700, 198276 |
| 69109 | 62599869 | 62601671 | 196700 |
| 69110 | 62609006 | 62609572 | 130590, 196700 |
| 69111 | 62609626 | 62611183 | 130590, 196700 |
| 69112 | 62611186 | 62613465 | 101161, 130590, 196700 |
| 69113 | 62669770 | 62670992 | 196421, 196700 |
| 69114 | 62693583 | 62698761 | 171703 |
| 69115 | 62710426 | 62711463 | 171700 |
| 69116 | 62853270 | 62854340 | 196132 |
| 69117 | 62867602 | 62868571 | 196132 |
| 69118 | 62869431 | 62870179 | 196132 |
| 69119 | 62873862 | 62874596 | |
| 69120 | 62886236 | 62888064 | 203880 |

[0589] The locations of ODSCs on Chromosome 21 are shown in Table 63.

TABLE 63
ODSC Locations on Chromosome 21

| SEQID NO. | Start | End | Overlapping Gene(s) |
|---|---|---|---|
| 69121 | 9825324 | 9827688 | 264063, 264462 |
| 69122 | 15754711 | 15756574 | 155304 |
| 69123 | 15964064 | 15964711 | 243440, 223662 |
| 69124 | 16072029 | 16072863 | |
| 69125 | 16110187 | 16110697 | |
| 69126 | 16235349 | 16238004 | 235609 |
| 69127 | 16248428 | 16253364 | 235609 |
| 69128 | 16259872 | 16262269 | |
| 69129 | 16430681 | 16432444 | 180530 |
| 69130 | 16433093 | 16439400 | 236471, 180530 |
| 69131 | 16493495 | 16495153 | |
| 69132 | 16512086 | 16514434 | |
| 69133 | 16536747 | 16537636 | |
| 69134 | 16567880 | 16568629 | |
| 69135 | 16582447 | 16584383 | |
| 69136 | 16594000 | 16597326 | |
| 69137 | 16696775 | 16697370 | |
| 69138 | 16788051 | 16788784 | |
| 69139 | 16813169 | 16814332 | |
| 69140 | 16814912 | 16818109 | |
| 69141 | 16827780 | 16828946 | |
| 69142 | 16886577 | 16887285 | |
| 69143 | 17031585 | 17032596 | |
| 69144 | 17039118 | 17039834 | |
| 69145 | 17101757 | 17103879 | 155313 |
| 69146 | 17113885 | 17114777 | 155313 |
| 69147 | 17133763 | 17134364 | 155313 |
| 69148 | 17452099 | 17453219 | 215386 |
| 69149 | 17565949 | 17569752 | 215386 |
| 69150 | 17583967 | 17584909 | 215386 |
| 69151 | 17590991 | 17591930 | 215386 |
| 69152 | 17652548 | 17653014 | 215386 |
| 69153 | 17674497 | 17676041 | 215386, 270071 |
| 69154 | 17780098 | 17780774 | 215386 |
| 69155 | 17791019 | 17797063 | 270139, 215386 |
| 69156 | 17894413 | 17895431 | 215386 |
| 69157 | 17904185 | 17910389 | 215386 |
| 69158 | 17935416 | 17937179 | 215386 |
| 69159 | 17941010 | 17941416 | 215386 |
| 69160 | 17958146 | 17961569 | 215386 |
| 69161 | 18012247 | 18013361 | 228798 |
| 69162 | 18016716 | 18017385 | 270093 |
| 69163 | 18791150 | 18792030 | |
| 69164 | 18823302 | 18824884 | |
| 69165 | 18833196 | 18836675 | |
| 69166 | 18839170 | 18840833 | |
| 69167 | 18844155 | 18845613 | |
| 69168 | 18847886 | 18848848 | |
| 69169 | 18869583 | 18870030 | |
| 69170 | 18882775 | 18887060 | 154639 |
| 69171 | 18895108 | 18895892 | 154639 |
| 69172 | 18914517 | 18915248 | 154639 |
| 69173 | 18982965 | 18985555 | 154640 |
| 69174 | 19165903 | 19166569 | 244676, 154642 |
| 69175 | 19190431 | 19192513 | 154642 |
| 69176 | 22658638 | 22659163 | 154654 |
| 69177 | 23433247 | 23436953 | 233215 |
| 69178 | 23683945 | 23684579 | 226043 |
| 69179 | 26374707 | 26375604 | 226983 |
| 69180 | 26829143 | 26830282 | |
| 69181 | 26978906 | 26981146 | 154719 |
| 69182 | 27105679 | 27109092 | 154727, 154723 |
| 69183 | 27251432 | 27252048 | |
| 69184 | 27288428 | 27289008 | 142192 |
| 69185 | 27298288 | 27298634 | 142192 |
| 69186 | 27306626 | 27307759 | 142192, 233783 |
| 69187 | 27316289 | 27316932 | 142192 |
| 69188 | 27321755 | 27322743 | 142192 |
| 69189 | 27440950 | 27442079 | 142192 |
| 69190 | 27496663 | 27497137 | 142192 |
| 69191 | 27497147 | 27497641 | 142192 |
| 69192 | 27512345 | 27513028 | 142192 |
| 69193 | 27532239 | 27532845 | 142192, 224541 |
| 69194 | 27541149 | 27544105 | 273492, 142192, 224541 |
| 69195 | 28214829 | 28216879 | 154734 |
| 69196 | 28217423 | 28218041 | 154734 |
| 69197 | 28292120 | 28293258 | 154736, 223563 |
| 69198 | 29627650 | 29630179 | |
| 69199 | 29747077 | 29749603 | |
| 69200 | 30143864 | 30145856 | |
| 69201 | 30237808 | 30238479 | |
| 69202 | 30256725 | 30258000 | 156239 |
| 69203 | 30331722 | 30332176 | 198862 |
| 69204 | 30364238 | 30365724 | 198862 |
| 69205 | 30374313 | 30375975 | |
| 69206 | 30390734 | 30392115 | 156253 |
| 69207 | 30396183 | 30398304 | 273254, 156256 |
| 69208 | 30444840 | 30446889 | 156261 |
| 69209 | 30462229 | 30465889 | 156265 |
| 69210 | 30544301 | 30545349 | 156265 |
| 69211 | 30546444 | 30548360 | 156265 |
| 69212 | 30553627 | 30556089 | 224649 |
| 69213 | 30556162 | 30561012 | 224649 |
| 69214 | 30562480 | 30564444 | |
| 69215 | 30566282 | 30569877 | 156273, 215533 |
| 69216 | 30631058 | 30631632 | 156273, 215533 |
| 69217 | 30670278 | 30673016 | 156273 |
| 69218 | 30719292 | 30720285 | 156273 |
| 69219 | 30906548 | 30907155 | 156273 |
| 69220 | 31097185 | 31097921 | 171189 |
| 69221 | 31159463 | 31160300 | 171189 |
| 69222 | 32671535 | 32672401 | 156299 |
| 69223 | 32726069 | 32728145 | 156299 |
| 69224 | 32788795 | 32789303 | 156299 |
| 69225 | 32997009 | 32997976 | |
| 69226 | 33030057 | 33033315 | 142168, 234509 |
| 69227 | 33082802 | 33083480 | 156304 |
| 69228 | 33102844 | 33105691 | 156304 |
| 69229 | 33272318 | 33273455 | 142149 |
| 69230 | 33355280 | 33356286 | 142149 |
| 69231 | 33651087 | 33652503 | 159055, 227256 |
| 69232 | 33670528 | 33671115 | 170262 |
| 69233 | 33758427 | 33759000 | 142207 |
| 69234 | 33764490 | 33766333 | 256073, 142207 |
| 69235 | 33783865 | 33785067 | 166979 |
| 69236 | 33965179 | 33966238 | 265590, 159079 |
| 69237 | 33983871 | 33985948 | 265590, 159079 |
| 69238 | 34099097 | 34101275 | 238197, 159082 |
| 69239 | 34142959 | 34145141 | 205930, 159086 |
| 69240 | 34383203 | 34384209 | 227757 |
| 69241 | 34569003 | 34570261 | |
| 69242 | 34573973 | 34577771 | |
| 69243 | 34579490 | 34580592 | |
| 69244 | 34587249 | 34589087 | |
| 69245 | 34597542 | 34600443 | |
| 69246 | 34601866 | 34604152 | 159110 |
| 69247 | 34638348 | 34639842 | 243646, 223799, 249624 |
| 69248 | 34658321 | 34659860 | 243646 |
| 69249 | 34696319 | 34698073 | 142166 |
| 69250 | 34733025 | 34734180 | |
| 69251 | 34752042 | 34753449 | |
| 69252 | 34754368 | 34756390 | |
| 69253 | 34774938 | 34778418 | 159128 |
| 69254 | 34785116 | 34785931 | 159128 |
| 69255 | 34806933 | 34807438 | 142188, 159128 |
| 69256 | 34823828 | 34825117 | 142188, 159128 |
| 69257 | 34851138 | 34853235 | 142188, 159128 |
| 69258 | 34863419 | 34864629 | 177692 |
| 69259 | 34913581 | 34917383 | 159140, 159131 |
| 69260 | 34959935 | 34962117 | 205758, 159147, 249209 |
| 69261 | 35013486 | 35017651 | 205726, 205758, 249209 |
| 69262 | 35027827 | 35028603 | 205726, 249209 |
| 69263 | 35040679 | 35041399 | 205726, 249209 |
| 69264 | 35103747 | 35104525 | 205726, 249209 |
| 69265 | 35133147 | 35136232 | 205726, 249209 |
| 69266 | 35155112 | 35156738 | 205726, 249209 |
| 69267 | 35171506 | 35172402 | 205726, 249209 |
| 69268 | 35173873 | 35174661 | 205726, 249209 |
| 69269 | 35287362 | 35288563 | 237945, 241837 |
| 69270 | 35319735 | 35320843 | 237945 |
| 69271 | 35340192 | 35342337 | 273102, 237945 |
| 69272 | 35352505 | 35353128 | |
| 69273 | 35412053 | 35412796 | |
| 69274 | 35444787 | 35447164 | 198743, 272962, 272657, |
| | | | 243927 |
| 69275 | 35467207 | 35467577 | 198743, 272962, 272657, |
| | | | 243927 |
| 69276 | 35528884 | 35531215 | 272657 |
| 69277 | 35574049 | 35575400 | 272657 |
| 69278 | 35733929 | 35734805 | |
| 69279 | 35746697 | 35748869 | 205670, 225555 |
| 69280 | 35883661 | 35884878 | 180509 |
| 69281 | 35892449 | 35901456 | 159200 |
| 69282 | 35908284 | 35910284 | 159200 |
| 69283 | 35915292 | 35916719 | 159200 |
| 69284 | 35916741 | 35918719 | 159200 |
| 69285 | 35944243 | 35944825 | 159200 |
| 69286 | 35948236 | 35948666 | 159200 |
| 69287 | 35986113 | 35988278 | 159200 |
| 69288 | 36100511 | 36101197 | 230978 |
| 69289 | 36109279 | 36110160 | 230978 |
| 69290 | 36166350 | 36175575 | 159216 |
| 69291 | 36178900 | 36182125 | 159216 |
| 69292 | 36184112 | 36186145 | 159216 |
| 69293 | 36189619 | 36191737 | 159216 |
| 69294 | 36205431 | 36212400 | 159216 |
| 69295 | 36215827 | 36217426 | 159216 |
| 69296 | 36237200 | 36238133 | 159216 |
| 69297 | 36249605 | 36250287 | 159216 |
| 69298 | 36253407 | 36254952 | 159216 |
| 69299 | 36257048 | 36263244 | 159216 |
| 69300 | 36280531 | 36281299 | 159216 |
| 69301 | 36282366 | 36283105 | 159216 |
| 69302 | 36298871 | 36299816 | 159216 |
| 69303 | 36423375 | 36424144 | 159216 |
| 69304 | 36435523 | 36436518 | 159216 |
| 69305 | 36508897 | 36509499 | 234703, 159216 |
| 69306 | 36569006 | 36571019 | 159216 |
| 69307 | 36598478 | 36599138 | 159216 |
| 69308 | 36628625 | 36630030 | 159216 |
| 69309 | 36674780 | 36675954 | 159216 |
| 69310 | 37049351 | 37049971 | 159216 |
| 69311 | 37431753 | 37433760 | 236677, 185917 |
| 69312 | 37441081 | 37443173 | 230212, 159228, 185917 |
| 69313 | 37445037 | 37446028 | 159228, 185917, 230212 |
| 69314 | 37452087 | 37453218 | 230212 |
| 69315 | 37459694 | 37460098 | 236119, 230212 |
| 69316 | 37484536 | 37486762 | 230212 |
| 69317 | 37499405 | 37500018 | |
| 69318 | 37506419 | 37507871 | 159231, 236830 |
| 69319 | 37507874 | 37508460 | 159231, 236830 |
| 69320 | 37513629 | 37514428 | 159231, 236830 |
| 69321 | 37528726 | 37530180 | 142197 |
| 69322 | 37560285 | 37561127 | 142197 |
| 69323 | 37573697 | 37577091 | 142197 |
| 69324 | 37581645 | 37582772 | 142197 |
| 69325 | 37607392 | 37608178 | 142197 |
| 69326 | 37632480 | 37633302 | 142197 |
| 69327 | 37691636 | 37694871 | 273199, 159256 |
| 69328 | 37697469 | 37698292 | 159256 |
| 69329 | 37808953 | 37810602 | 230479 |
| 69330 | 37833608 | 37835209 | 230479, 159261, 233818 |
| 69331 | 37843001 | 37845330 | 230479, 159261, 233818 |
| 69332 | 37848941 | 37854683 | 230479, 159261, 233818 |
| 69333 | 37871658 | 37874466 | 159261, 233818 |
| 69334 | 37918112 | 37918902 | 159261 |
| 69335 | 38145363 | 38145878 | 159267 |
| 69336 | 38219231 | 38220106 | 159267 |
| 69337 | 38230466 | 38234581 | 159267 |
| 69338 | 38300809 | 38302349 | 159267 |
| 69339 | 38337893 | 38339974 | 224790, 159267 |
| 69340 | 38352441 | 38353554 | 159267 |
| 69341 | 38361583 | 38363376 | 159267 |
| 69342 | 38444049 | 38447094 | 182670, 185808 |
| 69343 | 38526095 | 38526822 | 182670 |
| 69344 | 38592703 | 38594063 | 242553, 230366 |
| 69345 | 38623283 | 38623694 | 157538 |
| 69346 | 38629344 | 38631115 | 157538 |
| 69347 | 38638611 | 38641102 | 272948, 157538 |
| 69348 | 38709976 | 38712340 | |
| 69349 | 38737269 | 38742245 | 273210, 157540 |
| 69350 | 38802600 | 38803146 | 157540 |
| 69351 | 38824178 | 38824924 | 157540 |
| 69352 | 38835289 | 38836766 | 157540 |
| 69353 | 38935244 | 38938676 | |
| 69354 | 38999253 | 39000176 | 157542 |
| 69355 | 39003622 | 39004640 | 157542 |
| 69356 | 39030482 | 39032735 | 157542 |
| 69357 | 39046057 | 39046795 | 157542 |
| 69358 | 39076646 | 39077631 | 157542 |
| 69359 | 39159706 | 39160370 | 157542 |
| 69360 | 39201333 | 39202439 | 157542 |
| 69361 | 39216808 | 39218737 | 157542 |
| 69362 | 39221885 | 39222647 | 157542 |
| 69363 | 39511265 | 39513106 | 198054 |
| 69364 | 39543597 | 39544329 | 198054, 157551 |
| 69365 | 39599146 | 39600467 | 157551 |
| 69366 | 39664211 | 39666377 | 157551 |
| 69367 | 39684669 | 39685280 | |
| 69368 | 39706258 | 39707698 | |
| 69369 | 39714554 | 39716196 | |
| 69370 | 39877533 | 39878072 | 157554 |
| 69371 | 40105706 | 40106991 | |
| 69372 | 40138639 | 40140351 | |
| 69373 | 40157997 | 40161004 | |
| 69374 | 40164563 | 40171478 | |
| 69375 | 40174778 | 40185779 | 157557 |
| 69376 | 40192159 | 40193947 | 157557 |
| 69377 | 40195567 | 40197103 | 157557 |
| 69378 | 40202585 | 40204982 | |
| 69379 | 40218859 | 40220647 | 229986 |
| 69380 | 40224209 | 40226679 | |
| 69381 | 40250265 | 40253692 | 205622 |
| 69382 | 40269228 | 40270927 | 229925, 205622 |
| 69383 | 40274524 | 40276993 | 229925, 205622 |
| 69384 | 40278256 | 40285915 | 234035, 205622 |
| 69385 | 40285919 | 40287320 | 234035, 205622 |
| 69386 | 40290099 | 40291464 | 205622 |
| 69387 | 40329586 | 40333063 | |
| 69388 | 40365379 | 40366307 | 235888 |
| 69389 | 40392317 | 40394371 | |
| 69390 | 40394485 | 40395775 | |
| 69391 | 40405316 | 40407107 | |
| 69392 | 40466104 | 40468329 | |
| 69393 | 40554296 | 40556470 | 185658, 272991, 183527 |
| 69394 | 40684340 | 40686809 | 255568, 185658 |
| 69395 | 40719856 | 40722209 | 205581 |
| 69396 | 40756558 | 40758442 | 182093 |
| 69397 | 40816857 | 40818436 | 185437, 157578 |
| 69398 | 40899568 | 40900205 | 235012 |
| 69399 | 41879370 | 41880673 | 171587 |
| 69400 | 42505484 | 42506288 | |
| 69401 | 42512702 | 42513608 | 226496 |
| 69402 | 42513650 | 42514606 | 226496 |
| 69403 | 42791495 | 42793234 | 157601 |
| 69404 | 42797328 | 42799158 | 157601 |
| 69405 | 42839173 | 42839769 | 184012 |
| 69406 | 42849511 | 42851098 | 184012 |
| 69407 | 42851757 | 42852483 | 184012 |
| 69408 | 42872413 | 42874945 | 184012 |
| 69409 | 42878612 | 42881197 | 184012 |
| 69410 | 42882160 | 42883016 | 184012 |
| 69411 | 42897751 | 42899100 | 184012 |
| 69412 | 42933412 | 42935263 | 232806 |
| 69413 | 42950608 | 42955693 | 223400 |
| 69414 | 43032042 | 43033614 | |
| 69415 | 43040967 | 43041545 | |
| 69416 | 43068381 | 43069523 | |
| 69417 | 43073733 | 43074839 | |
| 69418 | 43080265 | 43081181 | |
| 69419 | 43083766 | 43085497 | |
| 69420 | 43097696 | 43099739 | 227702 |
| 69421 | 43126619 | 43127271 | |
| 69422 | 43135300 | 43136579 | 236384 |
| 69423 | 43170351 | 43171066 | 183421 |
| 69424 | 43178088 | 43180142 | 183421 |
| 69425 | 43181253 | 43182881 | 183421 |
| 69426 | 43184740 | 43190254 | 183421 |
| 69427 | 43298368 | 43300479 | 141956 |
| 69428 | 43345652 | 43347235 | 157617 |
| 69429 | 43352193 | 43353352 | 157617 |
| 69430 | 43373182 | 43374752 | 157617 |
| 69431 | 43378116 | 43379126 | |
| 69432 | 43428714 | 43431664 | 237232, 173276 |
| 69433 | 43457927 | 43458528 | |
| 69434 | 43459388 | 43460168 | |
| 69435 | 43478699 | 43479346 | |
| 69436 | 43517885 | 43518322 | 177398 |
| 69437 | 43534249 | 43534618 | 177398 |
| 69438 | 43619098 | 43620434 | 160179 |
| 69439 | 43638996 | 43640948 | 160179 |
| 69440 | 43647944 | 43648766 | 160179 |
| 69441 | 43653060 | 43655738 | 160179 |
| 69442 | 43757856 | 43758457 | |
| 69443 | 43806162 | 43806765 | 160183 |
| 69444 | 43853541 | 43854797 | 160185 |
| 69445 | 43869829 | 43870517 | |
| 69446 | 43882306 | 43883165 | |
| 69447 | 43884943 | 43886004 | |
| 69448 | 43889091 | 43890194 | |
| 69449 | 43893729 | 43895039 | 160188 |
| 69450 | 43933304 | 43935412 | 160190 |
| 69451 | 43946140 | 43947098 | 160190 |
| 69452 | 43947238 | 43948527 | 160190 |
| 69453 | 43955732 | 43956269 | 160190 |
| 69454 | 43959199 | 43960146 | 160190 |
| 69455 | 44035004 | 44035498 | 225431 |
| 69456 | 44044281 | 44045073 | |
| 69457 | 44050651 | 44051127 | |
| 69458 | 44073663 | 44074866 | 160191 |
| 69459 | 44139749 | 44140420 | 160191 |
| 69460 | 44153103 | 44153802 | 225731, 160191 |
| 69461 | 44154186 | 44155144 | 225731, 160191 |
| 69462 | 44157876 | 44159005 | 225731, 160191 |
| 69463 | 44298318 | 44300476 | 160194, 160193 |
| 69464 | 44312305 | 44314546 | 160194 |
| 69465 | 44360233 | 44360582 | |
| 69466 | 44393510 | 44396542 | 160199 |
| 69467 | 44465322 | 44468171 | |
| 69468 | 44484650 | 44485334 | 160200 |
| 69469 | 44487600 | 44488901 | 160200 |
| 69470 | 44492582 | 44494001 | 160200 |
| 69471 | 44494067 | 44497179 | 160200 |
| 69472 | 44526651 | 44528907 | 160201 |
| 69473 | 44535770 | 44536747 | 232777 |
| 69474 | 44558950 | 44559525 | |
| 69475 | 44566730 | 44567255 | |
| 69476 | 44582312 | 44583456 | 228120 |
| 69477 | 44588765 | 44594053 | 160202 |
| 69478 | 44596302 | 44598028 | |
| 69479 | 44630569 | 44632539 | |
| 69480 | 44693518 | 44694777 | |
| 69481 | 44707697 | 44708822 | |
| 69482 | 44752945 | 44753919 | |
| 69483 | 44762616 | 44763811 | |
| 69484 | 44823718 | 44824562 | |
| 69485 | 44826956 | 44827495 | |
| 69486 | 44843643 | 44851961 | 142178 |
| 69487 | 44858767 | 44863168 | |
| 69488 | 44865493 | 44868180 | 188660 |
| 69489 | 44881761 | 44887051 | 185186, 223975 |
| 69490 | 44895890 | 44899879 | 185186 |
| 69491 | 44912946 | 44920570 | |
| 69492 | 44921141 | 44925353 | |
| 69493 | 44929288 | 44941389 | |
| 69494 | 45004342 | 45007530 | 160207 |
| 69495 | 45029319 | 45030097 | 160207 |
| 69496 | 45059580 | 45060579 | 160207 |
| 69497 | 45063909 | 45066990 | 160207 |
| 69498 | 45078407 | 45080431 | 160208, 160207 |
| 69499 | 45138576 | 45140618 | 160209 |
| 69500 | 45145608 | 45146189 | 160209 |
| 69501 | 45146791 | 45149662 | 160209 |
| 69502 | 45157821 | 45158484 | 160209 |
| 69503 | 45177445 | 45178834 | 160209 |
| 69504 | 45195033 | 45196965 | 160213 |
| 69505 | 45202413 | 45203795 | 234030 |
| 69506 | 45208455 | 45210419 | 160214 |
| 69507 | 45231906 | 45232714 | 215458 |
| 69508 | 45283970 | 45288772 | 160216 |
| 69509 | 45300083 | 45300571 | 160216 |
| 69510 | 45303913 | 45304386 | 160216 |
| 69511 | 45331037 | 45332377 | 160216 |
| 69512 | 45343282 | 45345748 | 160216 |
| 69513 | 45358319 | 45359490 | 160216 |
| 69514 | 45431011 | 45433421 | 160218 |
| 69515 | 45526976 | 45527952 | 241945 |
| 69516 | 45552691 | 45556228 | 160221 |
| 69517 | 45557810 | 45558404 | 160221 |
| 69518 | 45589964 | 45591732 | 267913 |
| 69519 | 45591995 | 45593064 | 267913 |
| 69520 | 45595854 | 45596473 | 237604 |
| 69521 | 45604291 | 45605754 | |
| 69522 | 45659973 | 45664367 | 160223 |
| 69523 | 45667744 | 45671267 | 232010, 142182 |
| 69524 | 45717402 | 45718107 | 160224 |
| 69525 | 45719252 | 45721094 | 141959 |
| 69526 | 45758710 | 45760064 | 232969, 160226 |
| 69527 | 45773100 | 45774261 | 142185 |
| 69528 | 45858441 | 45859044 | 264452, 142185 |
| 69529 | 45875152 | 45876855 | 160233, 229356 |
| 69530 | 45877453 | 45878165 | 160233 |
| 69531 | 45897736 | 45899164 | |
| 69532 | 45902231 | 45904779 | |
| 69533 | 45904960 | 45905523 | 228709 |
| 69534 | 45925524 | 45926012 | 175894 |
| 69535 | 45937429 | 45937898 | 182912, 175894 |
| 69536 | 46156382 | 46156965 | |
| 69537 | 46198292 | 46199067 | 184787 |
| 69538 | 46205307 | 46206256 | 184787 |
| 69539 | 46220781 | 46222792 | 236519, 184787 |
| 69540 | 46237484 | 46239024 | 184900 |
| 69541 | 46288656 | 46295866 | 183255 |
| 69542 | 46297751 | 46299040 | |
| 69543 | 46305518 | 46305975 | 160255 |
| 69544 | 46330948 | 46332706 | 160255 |
| 69545 | 46333264 | 46334627 | 160255 |
| 69546 | 46351855 | 46353110 | 183250, 160255 |
| 69547 | 46359015 | 46360926 | 160256, 183250 |
| 69548 | 46369485 | 46370152 | 160256 |
| 69549 | 46387862 | 46388597 | 160256 |
| 69550 | 46493787 | 46495049 | 235374, 197381 |
| 69551 | 46707157 | 46708885 | 215447, 186866 |
| 69552 | 46728290 | 46729415 | |
| 69553 | 46738578 | 46739212 | |
| 69554 | 46748609 | 46751694 | |
| 69555 | 46783388 | 46786435 | |
| 69556 | 46824648 | 46826304 | 182871 |
| 69557 | 46830210 | 46831016 | 182871 |
| 69558 | 46868376 | 46869382 | 182871 |
| 69559 | 46873962 | 46877003 | 182871 |
| 69560 | 46879128 | 46881629 | 182871 |
| 69561 | 46888503 | 46890405 | 182871 |
| 69562 | 46890424 | 46893425 | 182871 |
| 69563 | 46928424 | 46929269 | 173638, 182871 |
| 69564 | 46937076 | 46938105 | 173638 |
| 69565 | 46944679 | 46945959 | 173638 |
| 69566 | 46974433 | 46975110 | |
| 69567 | 47238395 | 47239585 | 183570 |
| 69568 | 47392859 | 47394658 | |
| 69569 | 47401034 | 47401519 | |
| 69570 | 47544166 | 47545990 | 142173 |
| 69571 | 47553601 | 47554798 | |
| 69572 | 47572746 | 47576960 | 160282 |
| 69573 | 47608261 | 47609384 | 228404, 160285 |
| 69574 | 47610483 | 47611669 | 160285 |
| 69575 | 47646039 | 47650050 | 215424, 160285 |
| 69576 | 47705160 | 47707220 | 182362, 160294 |
| 69577 | 47743872 | 47745565 | 160299 |
| 69578 | 47813429 | 47814745 | 160299 |
| 69579 | 47877415 | 47879991 | 160305 |
| 69580 | 47897613 | 47898153 | 160305 |
| 69581 | 48054115 | 48056171 | 160310 |

[0590] The locations of ODSCs on Chromosome 22 are shown in Table 64.

TABLE 64
ODSC Locations on Chromosome 22

| SEQ ID NO. | Start | End | Overlapping Gene(s) |
|---|---|---|---|
| 69582 | 17565348 | 17566817 | 177663 |
| 69583 | 17633053 | 17634282 | 069998 |
| 69584 | 17639004 | 17641393 | 185837, 069998 |
| 69585 | 17651865 | 17653561 | |
| 69586 | 17681992 | 17682915 | 093072 |
| 69587 | 17709383 | 17710437 | |
| 69588 | 17710763 | 17711825 | |
| 69589 | 17812572 | 17813306 | |
| 69590 | 17819813 | 17820701 | |
| 69591 | 17848960 | 17851877 | 099954 |
| 69592 | 17861348 | 17861850 | 099954 |
| 69593 | 17886691 | 17888886 | 099954 |
| 69594 | 18042317 | 18043423 | 182902 |
| 69595 | 18049226 | 18052057 | 182902 |
| 69596 | 18063085 | 18063851 | 236754, 182902 |
| 69597 | 18110473 | 18112719 | 099968, 131100 |
| 69598 | 18115422 | 18117313 | 099968 |
| 69599 | 18120204 | 18122809 | 099968 |
| 69600 | 18188589 | 18190453 | 099968 |
| 69601 | 18242822 | 18244389 | 015475 |
| 69602 | 18251721 | 18253635 | 015475 |
| 69603 | 18256181 | 18257809 | 015475 |
| 69604 | 18259609 | 18261149 | 269220 |
| 69605 | 18263851 | 18265044 | |
| 69606 | 18269146 | 18270038 | |
| 69607 | 18319880 | 18320572 | 243156 |
| 69608 | 18320776 | 18321728 | 243156 |
| 69609 | 18323720 | 18325868 | 243156 |
| 69610 | 18334441 | 18334899 | 243156 |
| 69611 | 18339645 | 18340162 | 243156 |
| 69612 | 18372709 | 18374138 | 243156 |
| 69613 | 18405826 | 18406422 | 243156 |
| 69614 | 18421087 | 18421680 | 243156 |
| 69615 | 18454962 | 18456130 | 243156 |
| 69616 | 18483061 | 18484901 | 243156 |
| 69617 | 18495169 | 18495838 | 243156 |
| 69618 | 18505659 | 18508079 | 243156 |
| 69619 | 18518437 | 18519455 | 235295 |
| 69620 | 18520630 | 18521779 | 235295 |
| 69621 | 18525106 | 18525980 | |
| 69622 | 18526431 | 18528332 | |
| 69623 | 18538156 | 18542553 | |
| 69624 | 18542611 | 18546250 | |
| 69625 | 18549041 | 18552549 | |
| 69626 | 18558277 | 18562092 | 215193, 225335 |
| 69627 | 18567487 | 18568677 | 215193 |
| 69628 | 18573948 | 18575608 | 215193 |
| 69629 | 18592905 | 18593947 | 183785, 215193 |
| 69630 | 18632202 | 18633662 | 184979 |
| 69631 | 18892944 | 18894090 | 183628 |
| 69632 | 18957681 | 18958708 | 237517 |
| 69633 | 18967407 | 18967937 | 237517 |
| 69634 | 19057772 | 19058664 | 070413 |
| 69635 | 19096867 | 19097471 | 070413 |
| 69636 | 19107679 | 19110218 | 223461, 070413 |
| 69637 | 19131432 | 19132698 | 100056 |
| 69638 | 19158047 | 19160349 | 260924 |
| 69639 | 19161217 | 19163179 | 100075 |
| 69640 | 19164738 | 19167381 | 070371, 100075 |
| 69641 | 19258795 | 19260370 | 070371 |
| 69642 | 19278264 | 19280695 | 070371 |
| 69643 | 19323471 | 19324019 | 100084 |
| 69644 | 19417726 | 19421110 | 185608, 100084, 242259 |
| 69645 | 19434203 | 19436161 | 185065, 100084, 242259 |
| 69646 | 19465245 | 19467542 | 093009, 070010 |
| 69647 | 19531340 | 19532604 | |
| 69648 | 19555438 | 19557316 | |
| 69649 | 19585642 | 19586397 | |
| 69650 | 19591163 | 19596399 | |
| 69651 | 19811258 | 19812336 | 185838 |
| 69652 | 19828218 | 19829058 | 185838 |
| 69653 | 19835986 | 19836819 | 215012, 185838 |
| 69654 | 19841160 | 19844053 | 215012, 185838 |
| 69655 | 19928061 | 19931417 | 093010, 184470 |
| 69656 | 19940474 | 19941672 | 093010 |
| 69657 | 19946300 | 19951589 | 265087, 093010 |
| 69658 | 19957853 | 19959274 | 099889 |
| 69659 | 19970687 | 19972879 | 099889 |
| 69660 | 19973738 | 19974910 | 099889 |
| 69661 | 20007808 | 20010271 | 183597 |
| 69662 | 20067058 | 20069006 | 128191 |
| 69663 | 20080923 | 20081959 | 128191 |
| 69664 | 20103647 | 20106136 | 099899, 099901 |
| 69665 | 20116259 | 20117395 | 099904 |
| 69666 | 20118494 | 20120327 | 099904 |
| 69667 | 20190238 | 20192389 | 249923 |
| 69668 | 20198851 | 20199914 | |
| 69669 | 20209016 | 20210415 | |
| 69670 | 20223021 | 20223672 | |
| 69671 | 20286954 | 20287583 | 161132 |
| 69672 | 20307327 | 20308611 | 273139, 128185 |
| 69673 | 20747606 | 20748913 | 185252 |
| 69674 | 20848823 | 20851288 | 099917, 099910 |
| 69675 | 20857950 | 20859105 | 099917 |
| 69676 | 20861257 | 20864321 | 099917 |
| 69677 | 20878301 | 20878745 | 099917 |
| 69678 | 21127986 | 21128678 | 099937, 241973 |
| 69679 | 21130361 | 21131657 | 241973, 099937 |
| 69680 | 21131798 | 21137560 | 241973, 099937 |
| 69681 | 21144931 | 21145596 | 241973 |
| 69682 | 21161551 | 21162067 | 241973 |
| 69683 | 21212124 | 21214163 | 099940, 241973 |
| 69684 | 21221320 | 21222224 | 099940 |
| 69685 | 21234630 | 21236815 | 099940 |
| 69686 | 21237853 | 21238487 | 099940 |
| 69687 | 21239557 | 21240577 | 099940 |
| 69688 | 21258158 | 21259935 | |
| 69689 | 21270723 | 21272861 | 099942 |
| 69690 | 21292470 | 21293323 | 099942 |
| 69691 | 21305551 | 21307600 | 099942 |
| 69692 | 21307965 | 21308739 | 099942 |
| 69693 | 21311075 | 21312440 | 237476 |
| 69694 | 21335449 | 21337563 | 272829, 183773, 099949 |
| 69695 | 21355212 | 21357828 | 161149, 230513, 184436 |
| 69696 | 21811202 | 21812180 | |
| 69697 | 21921653 | 21923649 | 185651 |
| 69698 | 21983375 | 21984623 | 161179 |
| 69699 | 21995547 | 21997667 | 128228, 273342 |
| 69700 | 22019650 | 22021490 | 100023 |
| 69701 | 22072757 | 22073455 | 100027 |
| 69702 | 22089373 | 22090441 | 100027 |
| 69703 | 22191366 | 22192569 | 100030 |
| 69704 | 22220601 | 22222733 | 100030 |
| 69705 | 22291300 | 22293361 | 224086, 100034 |
| 69706 | 22306475 | 22307716 | 100034 |
| 69707 | 22315667 | 22316782 | 100038 |
| 69708 | 22336268 | 22337590 | 100038 |
| 69709 | 22344612 | 22345694 | 197549 |
| 69710 | 22428619 | 22430055 | 253242 |
| 69711 | 22440084 | 22441231 | 253823 |
| 69712 | 22442407 | 22443770 | |
| 69713 | 23033548 | 23038221 | 223999, 253822 |
| 69714 | 23043842 | 23048369 | 211661 |
| 69715 | 23094975 | 23096672 | |
| 69716 | 23302161 | 23303007 | |
| 69717 | 23521450 | 23523723 | 236794, 186716 |
| 69718 | 23546731 | 23547181 | 186716 |
| 69719 | 23547585 | 23548294 | 186716 |
| 69720 | 23558813 | 23559369 | 186716 |
| 69721 | 23593407 | 23594430 | 186716 |
| 69722 | 23598859 | 23599719 | 186716 |
| 69723 | 23606752 | 23607228 | 186716 |
| 69724 | 23632078 | 23633062 | 186716 |
| 69725 | 23699040 | 23699621 | |
| 69726 | 23863710 | 23864310 | |
| 69727 | 24042903 | 24043345 | 273000, 228315, 272578 |
| 69728 | 24058744 | 24059982 | 273000, 228315, 272578 |
| 69729 | 24093075 | 24094314 | 187792 |
| 69730 | 24107319 | 24108656 | 250479, 169314 |
| 69731 | 24108849 | 24111043 | 099953, 250479 |
| 69732 | 24114737 | 24115338 | 099953 |
| 69733 | 24128470 | 24130109 | 099956 |
| 69734 | 24191477 | 24192891 | |
| 69735 | 24235695 | 24237961 | 218537, 240972, 251357 |
| 69736 | 24255259 | 24256951 | |
| 69737 | 24407427 | 24408360 | 099991 |
| 69738 | 24439178 | 24439902 | 099991 |
| 69739 | 24463526 | 24464064 | 099991 |
| 69740 | 24551574 | 24552175 | 099991 |
| 69741 | 24552656 | 24553286 | 099991 |
| 69742 | 24602675 | 24605057 | |
| 69743 | 24666125 | 24668255 | 258555, 100014 |
| 69744 | 24684681 | 24686683 | 258555, 100014 |
| 69745 | 24687906 | 24688525 | 258555, 100014 |
| 69746 | 24699442 | 24700272 | 258555, 100014 |
| 69747 | 24718618 | 24720713 | 258555, 100014 |
| 69748 | 24797979 | 24799479 | 258555, 100014 |
| 69749 | 24877279 | 24879685 | 178803, 100024 |
| 69750 | 24882400 | 24882999 | 178803, 100024 |
| 69751 | 24889870 | 24892282 | 178803, 100024 |
| 69752 | 24895482 | 24897003 | 100024 |
| 69753 | 24898906 | 24900650 | 100024 |
| 69754 | 24901007 | 24901732 | 100024 |
| 69755 | 24902115 | 24903414 | 100024 |
| 69756 | 24906325 | 24907566 | 100024 |
| 69757 | 24909936 | 24910721 | 100024 |
| 69758 | 24912024 | 24912694 | 228923, 100024 |
| 69759 | 24920945 | 24921988 | 100024 |
| 69760 | 24931882 | 24932563 | |
| 69761 | 24938453 | 24940304 | 138867 |
| 69762 | 24940964 | 24941756 | 138867 |
| 69763 | 24944662 | 24948315 | 138867 |
| 69764 | 24948835 | 24953085 | 100028, 138867 |
| 69765 | 24960420 | 24960843 | 100028 |
| 69766 | 24967277 | 24968440 | 100028 |
| 69767 | 24972622 | 24973181 | 100028 |
| 69768 | 24974521 | 24975530 | 100028 |
| 69769 | 24976150 | 24976710 | 100028 |
| 69770 | 24988387 | 24990528 | 178026, 100028, 100031 |
| 69771 | 24997255 | 24998414 | 100028, 100031 |
| 69772 | 25215715 | 25216555 | 167037 |
| 69773 | 25289585 | 25291453 | 167037 |
| 69774 | 25347918 | 25350440 | 197077 |
| 69775 | 25361756 | 25362833 | 197077 |
| 69776 | 25363938 | 25364690 | 197077 |
| 69777 | 25365282 | 25366511 | 197077 |
| 69778 | 25369643 | 25370294 | 197077 |
| 69779 | 25385578 | 25386134 | 197077 |
| 69780 | 25387515 | 25388748 | 197077 |
| 69781 | 25506084 | 25510561 | 203280, 197077 |
| 69782 | 25515425 | 25517412 | 197077 |
| 69783 | 25526476 | 25528123 | 197077 |
| 69784 | 25532491 | 25534127 | 197077 |
| 69785 | 25544452 | 25544842 | 197077 |
| 69786 | 25560924 | 25566875 | 197077 |
| 69787 | 25578597 | 25579509 | 197077 |
| 69788 | 25579810 | 25580511 | 197077 |
| 69789 | 25791716 | 25792416 | 100068 |
| 69790 | 25796799 | 25797389 | 100068 |
| 69791 | 25798060 | 25802096 | 100068 |
| 69792 | 25843647 | 25845061 | 100058 |
| 69793 | 26059289 | 26060390 | 100077 |
| 69794 | 26061840 | 26063480 | 100077 |
| 69795 | 26063868 | 26064855 | 100077 |
| 69796 | 26143069 | 26145195 | 133454 |
| 69797 | 26155633 | 26156314 | 133454 |
| 69798 | 26752585 | 26753019 | 100095 |
| 69799 | 26878784 | 26880676 | 100104, 100099 |
| 69800 | 26907448 | 26909387 | 261188, 100109 |
| 69801 | 26913337 | 26915078 | |
| 69802 | 26923533 | 26925937 | 128294 |
| 69803 | 26945794 | 26947928 | 128294 |
| 69804 | 26952708 | 26953471 | 128294 |
| 69805 | 26957568 | 26958242 | 128294 |
| 69806 | 26984990 | 26986864 | 128294 |
| 69807 | 27068343 | 27069865 | 244625, 206028, 225783 |
| 69808 | 27283240 | 27283999 | 231369 |
| 69809 | 27290352 | 27291772 | |
| 69810 | 27440605 | 27442500 | |
| 69811 | 27502475 | 27510640 | |
| 69812 | 27510768 | 27514108 | |
| 69813 | 27525287 | 27525632 | |
| 69814 | 27529734 | 27532301 | |
| 69815 | 27801695 | 27802558 | |
| 69816 | 27870854 | 27873787 | |
| 69817 | 27883932 | 27886530 | |
| 69818 | 27930404 | 27931058 | |
| 69819 | 28043249 | 28044144 | |
| 69820 | 28197209 | 28198984 | 169184 |
| 69821 | 28206588 | 28207079 | |
| 69822 | 28254572 | 28256147 | 180957 |
| 69823 | 28261959 | 28263416 | 180957 |
| 69824 | 28265959 | 28267456 | 180957 |
| 69825 | 28282086 | 28283029 | 180957 |
| 69826 | 28288697 | 28289234 | 180957 |
| 69827 | 28314325 | 28316448 | 235954, 180957 |
| 69828 | 28327486 | 28330228 | 235954 |
| 69829 | 28345278 | 28345974 | 235954 |
| 69830 | 28357966 | 28359079 | 235954 |
| 69831 | 28386782 | 28387437 | 100154, 235954 |
| 69832 | 28791712 | 28792817 | 100154 |
| 69833 | 28831362 | 28832252 | 100154 |
| 69834 | 28837662 | 28839880 | 100154 |
| 69835 | 29075213 | 29075744 | 100154 |
| 69836 | 29107717 | 29108839 | 183765 |
| 69837 | 29137557 | 29138921 | 100209, 183765 |
| 69838 | 29143161 | 29143867 | 100209 |
| 69839 | 29168195 | 29170078 | 159873 |
| 69840 | 29194498 | 29199333 | 226471, 100219 |
| 69841 | 29207658 | 29209157 | 226471 |
| 69842 | 29209201 | 29210380 | 226471 |
| 69843 | 29213806 | 29216280 | 226471 |
| 69844 | 29217095 | 29218191 | 226471 |
| 69845 | 29219052 | 29219515 | 226471 |
| 69846 | 29225072 | 29226124 | 226471 |
| 69847 | 29260805 | 29261302 | |
| 69848 | 29278758 | 29280710 | 183579 |
| 69849 | 29307532 | 29308535 | 183579 |
| 69850 | 29319642 | 29320426 | 183579 |
| 69851 | 29321112 | 29321997 | 183579 |
| 69852 | 29327663 | 29328559 | 183579 |
| 69853 | 29372649 | 29375856 | 183579 |
| 69854 | 29377484 | 29378628 | 183579 |
| 69855 | 29395675 | 29396692 | 183579, 235786 |
| 69856 | 29417754 | 29418588 | 183579 |
| 69857 | 29418987 | 29419697 | 183579 |
| 69858 | 29425779 | 29429279 | 177993, 183579 |
| 69859 | 29440106 | 29441228 | 183579 |
| 69860 | 29468419 | 29470419 | 183762 |
| 69861 | 29477752 | 29478394 | 183762 |
| 69862 | 29524619 | 29526579 | 183762 |
| 69863 | 29612631 | 29613755 | 186998 |
| 69864 | 29627920 | 29629086 | 186998 |
| 69865 | 29641358 | 29642575 | 186998 |
| 69866 | 29662403 | 29666189 | 182944, 100263 |
| 69867 | 29701956 | 29703896 | 185340 |
| 69868 | 29732730 | 29733507 | 100280 |
| 69869 | 29740118 | 29740499 | 100280 |
| 69870 | 29778546 | 29778971 | 100280 |
| 69871 | 29781154 | 29782134 | 100280 |
| 69872 | 29783416 | 29784867 | 100280 |
| 69873 | 29788790 | 29789438 | 100280 |
| 69874 | 29790646 | 29791425 | 100280 |
| 69875 | 29895758 | 29896354 | |
| 69876 | 29949157 | 29950717 | 100296 |
| 69877 | 29970787 | 29971806 | 184117 |
| 69878 | 29975688 | 29977419 | 184117 |
| 69879 | 29983845 | 29984510 | |
| 69880 | 29999008 | 30000493 | 186575 |
| 69881 | 30016582 | 30020911 | 186575 |
| 69882 | 30162141 | 30164392 | 184076, 100319 |
| 69883 | 30174732 | 30175447 | |
| 69884 | 30176849 | 30178921 | |
| 69885 | 30191565 | 30192127 | 100325 |
| 69886 | 30194004 | 30196175 | 100325 |
| 69887 | 30207206 | 30207873 | 100325 |
| 69888 | 30208961 | 30210434 | 100325 |
| 69889 | 30211511 | 30212537 | 100325 |
| 69890 | 30216955 | 30217853 | 100325 |
| 69891 | 30233260 | 30235086 | 100325 |
| 69892 | 30237923 | 30239217 | |
| 69893 | 30278885 | 30280146 | 100330 |
| 69894 | 30303702 | 30304111 | 100330 |
| 69895 | 30309992 | 30311218 | 100330 |
| 69896 | 30313176 | 30313847 | 100330 |
| 69897 | 30432611 | 30433199 | 227117 |
| 69898 | 30433779 | 30435261 | 227117 |
| 69899 | 30439472 | 30441358 | 227117 |
| 69900 | 30475693 | 30477449 | 176635, 227117 |
| 69901 | 30482935 | 30484058 | 176635 |
| 69902 | 30555328 | 30556486 | 176635 |
| 69903 | 30583438 | 30585137 | 225676 |
| 69904 | 30585854 | 30588390 | 225676 |
| 69905 | 30591309 | 30593204 | 225676 |
| 69906 | 30597858 | 30598385 | 225676 |
| 69907 | 30600338 | 30603907 | 225676 |
| 69908 | 30608164 | 30609797 | |
| 69909 | 30641056 | 30645114 | 268812, 128342 |
| 69910 | 30646145 | 30647613 | |
| 69911 | 30651934 | 30652386 | |
| 69912 | 30684804 | 30685703 | 239282, 248751 |
| 69913 | 30705616 | 30710652 | 099992 |
| 69914 | 30710851 | 30711864 | 099992 |
| 69915 | 30712860 | 30714354 | 099992 |
| 69916 | 30722135 | 30723138 | 099992 |
| 69917 | 30751939 | 30753191 | 187860, 099995 |
| 69918 | 30782374 | 30783856 | 099999 |
| 69919 | 30786941 | 30788194 | 099999 |
| 69920 | 30788376 | 30789762 | 099999 |
| 69921 | 30792486 | 30795547 | 100003, 099999 |
| 69922 | 30800013 | 30800808 | 100003, 099999 |
| 69923 | 30804101 | 30805999 | 249590, 100003, 099999 |
| 69924 | 30811662 | 30813601 | 100003, 249590, 099999 |
| 69925 | 30814259 | 30815332 | 268538, 100003, 249590, |
| | | | 099999 |
| 69926 | 30816061 | 30822970 | 273350, 222915, 242114, |
| | | | 272689, 100003, 099999, |
| | | | 249590 |
| 69927 | 30840597 | 30841951 | |
| 69928 | 30853877 | 30854426 | 100012 |
| 69929 | 30882471 | 30883178 | 181123 |
| 69930 | 30893361 | 30893984 | 133488 |
| 69931 | 30901032 | 30902153 | 133488 |
| 69932 | 30986943 | 30988505 | 100029 |
| 69933 | 31002275 | 31003796 | 185339, 100029, 223831 |
| 69934 | 31030291 | 31031095 | |
| 69935 | 31062945 | 31064855 | 167065, 100036 |
| 69936 | 31089995 | 31090619 | 184792 |
| 69937 | 31317522 | 31318485 | 235989 |
| 69938 | 31364085 | 31366479 | 133422 |
| 69939 | 31450842 | 31452289 | |
| 69940 | 31480081 | 31481666 | 183963 |
| 69941 | 31518515 | 31519142 | 185133 |
| 69942 | 31555378 | 31557070 | 264141, 138942 |
| 69943 | 31568761 | 31570068 | 138942 |
| 69944 | 31572719 | 31573949 | 138942 |
| 69945 | 31607477 | 31609274 | 182541 |
| 69946 | 31615828 | 31616632 | 182541 |
| 69947 | 31617682 | 31618163 | 182541 |
| 69948 | 31625500 | 31627645 | 202019, 182541 |
| 69949 | 31636855 | 31638705 | 182541 |
| 69950 | 31639894 | 31640413 | 182541 |
| 69951 | 31649553 | 31650626 | 182541 |
| 69952 | 31686131 | 31688688 | 228839, 100100 |
| 69953 | 31691678 | 31692632 | 228839 |
| 69954 | 31696712 | 31697348 | 228839 |
| 69955 | 31709235 | 31709776 | 228839 |
| 69956 | 31741590 | 31744076 | 213888, 100105 |
| 69957 | 31793552 | 31796671 | 185721 |
| 69958 | 31884929 | 31887156 | 184708, 185721, 198089 |
| 69959 | 31891896 | 31893267 | 184708, 185721, 198089 |
| 69960 | 31984996 | 31985729 | 198089 |
| 69961 | 32025855 | 32027446 | 241878 |
| 69962 | 32041769 | 32043799 | 241878 |
| 69963 | 32045734 | 32047125 | 241878 |
| 69964 | 32049060 | 32049814 | 241878 |
| 69965 | 32055962 | 32059172 | 241878 |
| 69966 | 32128013 | 32129027 | 183530 |
| 69967 | 32145041 | 32146509 | 183530 |
| 69968 | 32148577 | 32151295 | 100150 |
| 69969 | 32210664 | 32211962 | 100150 |
| 69970 | 32224594 | 32227490 | 100150 |
| 69971 | 32339132 | 32342295 | 128245, 128254 |
| 69972 | 32365917 | 32367104 | 230866, 227519 |
| 69973 | 32369131 | 32370813 | 230866 |
| 69974 | 32415969 | 32416569 | |
| 69975 | 32474975 | 32475837 | 100170 |
| 69976 | 32533801 | 32534368 | |
| 69977 | 32806563 | 32809014 | 100220 |
| 69978 | 32817351 | 32818029 | 184459 |
| 69979 | 32822936 | 32823284 | 184459 |
| 69980 | 32869202 | 32872351 | 100225 |
| 69981 | 32935842 | 32936499 | 185666 |
| 69982 | 32953824 | 32955643 | 185666 |
| 69983 | 32975614 | 32976435 | 185666 |
| 69984 | 32979110 | 32980604 | 236054, 185666 |
| 69985 | 33014193 | 33015160 | 185666 |
| 69986 | 33015332 | 33016285 | 185666 |
| 69987 | 33019462 | 33020383 | 185666 |
| 69988 | 33025015 | 33025650 | 185666 |
| 69989 | 33039873 | 33041392 | 185666 |
| 69990 | 33091099 | 33092372 | 185666 |
| 69991 | 33146976 | 33147649 | 185666 |
| 69992 | 33150252 | 33151368 | 185666 |
| 69993 | 33175575 | 33176889 | 185666 |
| 69994 | 33197053 | 33198830 | 100234, 185666 |
| 69995 | 33328088 | 33328796 | 185666 |
| 69996 | 33363006 | 33364100 | 185666 |
| 69997 | 33375560 | 33376080 | 185666 |
| 69998 | 33667515 | 33668973 | 133424 |
| 69999 | 33733545 | 33734018 | 133424 |
| 70000 | 33750837 | 33751373 | 133424 |
| 70001 | 33775743 | 33776295 | 133424 |
| 70002 | 33777914 | 33779275 | 133424 |
| 70003 | 33789261 | 33790150 | 133424 |
| 70004 | 33935863 | 33936830 | 133424 |
| 70005 | 33959314 | 33961145 | 133424 |
| 70006 | 33973847 | 33975077 | 133424 |
| 70007 | 34052637 | 34053670 | 133424 |
| 70008 | 34122007 | 34122713 | 224973, 133424 |
| 70009 | 34153674 | 34154431 | 133424 |
| 70010 | 34181317 | 34182450 | 133424 |
| 70011 | 34260542 | 34261669 | 133424 |
| 70012 | 34262951 | 34263733 | 133424 |
| 70013 | 34270169 | 34271096 | 133424 |
| 70014 | 34315327 | 34316563 | 133424 |
| 70015 | 34316720 | 34318665 | 273082, 133424 |
| 70016 | 34364870 | 34365498 | |
| 70017 | 34396475 | 34398627 | |
| 70018 | 34511099 | 34512391 | 236052 |
| 70019 | 34632392 | 34632977 | |
| 70020 | 34690612 | 34691624 | |
| 70021 | 35253839 | 35254629 | |
| 70022 | 35653118 | 35654674 | 100281 |
| 70023 | 35694983 | 35698533 | 100284, 273176 |
| 70024 | 35706281 | 35712343 | 100284 |
| 70025 | 35724391 | 35724997 | 100284 |
| 70026 | 35726200 | 35727158 | 100284 |
| 70027 | 35757047 | 35757549 | |
| 70028 | 35767510 | 35769428 | |
| 70029 | 35772166 | 35778413 | 100292 |
| 70030 | 35793129 | 35794143 | |
| 70031 | 35795453 | 35796852 | 100297 |
| 70032 | 35826706 | 35827477 | |
| 70033 | 35931552 | 35932703 | |
| 70034 | 35935715 | 35936811 | |
| 70035 | 35985208 | 35985911 | |
| 70036 | 36023070 | 36024410 | 268818, 198125 |
| 70037 | 36025336 | 36026522 | 268818, 198125 |
| 70038 | 36038197 | 36038981 | |
| 70039 | 36042529 | 36043551 | |
| 70040 | 36043981 | 36046342 | 221963 |
| 70041 | 36073511 | 36074010 | |
| 70042 | 36106493 | 36107013 | |
| 70043 | 36138088 | 36139318 | 100320 |
| 70044 | 36213813 | 36214357 | 100320 |
| 70045 | 36214870 | 36216067 | 100320 |
| 70046 | 36220189 | 36220867 | 100320 |
| 70047 | 36230798 | 36233289 | 100320 |
| 70048 | 36289468 | 36290220 | 100320 |
| 70049 | 36317574 | 36319405 | 100320 |
| 70050 | 36345244 | 36345732 | 100320 |
| 70051 | 36422744 | 36425603 | 100320 |
| 70052 | 36426173 | 36427035 | |
| 70053 | 36461052 | 36462927 | |
| 70054 | 36519170 | 36520496 | |
| 70055 | 36539418 | 36540110 | 128284 |
| 70056 | 36551192 | 36554941 | 128284 |
| 70057 | 36555313 | 36557254 | 128284 |
| 70058 | 36558181 | 36560065 | 128284 |
| 70059 | 36560199 | 36563181 | 128284 |
| 70060 | 36633512 | 36634504 | 128335 |
| 70061 | 36634519 | 36636144 | 128335 |
| 70062 | 36648864 | 36650237 | 100342 |
| 70063 | 36659271 | 36659737 | 100342 |
| 70064 | 36673432 | 36674249 | |
| 70065 | 36675254 | 36675931 | |
| 70066 | 36681191 | 36681765 | 100345 |
| 70067 | 36724799 | 36726096 | 100345 |
| 70068 | 36726395 | 36728741 | 100345 |
| 70069 | 36746584 | 36749322 | 100345 |
| 70070 | 36756847 | 36758521 | 100345 |
| 70071 | 36758550 | 36760027 | 100345 |
| 70072 | 36760232 | 36761427 | 100345 |
| 70073 | 36764472 | 36765203 | 100345 |
| 70074 | 36765800 | 36766860 | 100345 |
| 70075 | 36770591 | 36771890 | 100345 |
| 70076 | 36779168 | 36779702 | 100345 |
| 70077 | 36780642 | 36785910 | 223695, 100345 |
| 70078 | 36790639 | 36792798 | 223695 |
| 70079 | 36792849 | 36794454 | |
| 70080 | 36805595 | 36806860 | |
| 70081 | 36815241 | 36816503 | |
| 70082 | 36835533 | 36836544 | |
| 70083 | 36847686 | 36850430 | 228719 |
| 70084 | 36850479 | 36852199 | 228719 |
| 70085 | 36855558 | 36864568 | 100348 |
| 70086 | 36876446 | 36878600 | 100348 |
| 70087 | 36924385 | 36926997 | 100353 |
| 70088 | 37055254 | 37057088 | 166862 |
| 70089 | 37171517 | 37172968 | 100360 |
| 70090 | 37177566 | 37178583 | |
| 70091 | 37269514 | 37270394 | 100365 |
| 70092 | 37408006 | 37408833 | 128311 |
| 70093 | 37413363 | 37413936 | 128311 |
| 70094 | 37414274 | 37416773 | 128309, 128311 |
| 70095 | 37419506 | 37421927 | 128309 |
| 70096 | 37426662 | 37431288 | |
| 70097 | 37439685 | 37440477 | |
| 70098 | 37504821 | 37506196 | 187045 |
| 70099 | 37508227 | 37508929 | |
| 70100 | 37522505 | 37523802 | 100385 |
| 70101 | 37563932 | 37564352 | 100385, 235237 |
| 70102 | 37574041 | 37575796 | 235237 |
| 70103 | 37591965 | 37596514 | 133466 |
| 70104 | 37702490 | 37704032 | 100055 |
| 70105 | 37716978 | 37717752 | |
| 70106 | 37719329 | 37721029 | |
| 70107 | 37722684 | 37723203 | |
| 70108 | 37850247 | 37851899 | |
| 70109 | 37896588 | 37900424 | 100065 |
| 70110 | 37914253 | 37915901 | 100065 |
| 70111 | 37937710 | 37938411 | |
| 70112 | 37941088 | 37943353 | |
| 70113 | 37953368 | 37954025 | |
| 70114 | 37955317 | 37960390 | 128283 |
| 70115 | 37962805 | 37964000 | 128283 |
| 70116 | 37965446 | 37968315 | 100079 |
| 70117 | 37970350 | 37971058 | 100079 |
| 70118 | 38002994 | 38006339 | 100083 |
| 70119 | 38021905 | 38022665 | 100083 |
| 70120 | 38043815 | 38044294 | 100092, 233360 |
| 70121 | 38054085 | 38056241 | 241360, 233360, 100092 |
| 70122 | 38070806 | 38073535 | 100097 |
| 70123 | 38080709 | 38081429 | 100101 |
| 70124 | 38082010 | 38083409 | 100101 |
| 70125 | 38127765 | 38128400 | 100106, 100101 |
| 70126 | 38141707 | 38143606 | 100106, 100101 |
| 70127 | 38147272 | 38149570 | 100106, 100101 |
| 70128 | 38154638 | 38155331 | 100106, 100101 |
| 70129 | 38198104 | 38204341 | 100116, 189060 |
| 70130 | 38212420 | 38213015 | 100116 |
| 70131 | 38213331 | 38214126 | |
| 70132 | 38227771 | 38228495 | 100124 |
| 70133 | 38239570 | 38241160 | 207945, 100124 |
| 70134 | 38244439 | 38246385 | 100129, 100124 |
| 70135 | 38292085 | 38293055 | |
| 70136 | 38300097 | 38303521 | 100139 |
| 70137 | 38329425 | 38330436 | 100139 |
| 70138 | 38349503 | 38350724 | 128346, 100142 |
| 70139 | 38377350 | 38378904 | 100142, 100146 |
| 70140 | 38452644 | 38454213 | 233739, 100151 |
| 70141 | 38503517 | 38504405 | 128298 |
| 70142 | 38558752 | 38561105 | 184381 |
| 70143 | 38573499 | 38578597 | 184381 |
| 70144 | 38583341 | 38583983 | 184381 |
| 70145 | 38587905 | 38589188 | 184381 |
| 70146 | 38589559 | 38590276 | 184381 |
| 70147 | 38597068 | 38600006 | 185022, 184381 |
| 70148 | 38609436 | 38610961 | 185022 |
| 70149 | 38613879 | 38616239 | 198792 |
| 70150 | 38668086 | 38669671 | 198792 |
| 70151 | 38705445 | 38706445 | 213923 |
| 70152 | 38711585 | 38714087 | 213923 |
| 70153 | 38797672 | 38798211 | |
| 70154 | 38818343 | 38820871 | 228620 |
| 70155 | 38863466 | 38864535 | 100196 |
| 70156 | 38886520 | 38887465 | 100201 |
| 70157 | 38900167 | 38903325 | 100201 |
| 70158 | 38966315 | 38967102 | |
| 70159 | 39002419 | 39002903 | 184949 |
| 70160 | 39010478 | 39011596 | 184949 |
| 70161 | 39051999 | 39053750 | 100211, 184949 |
| 70162 | 39077463 | 39078917 | 100216, 228274 |
| 70163 | 39095561 | 39097964 | 100221 |
| 70164 | 39100865 | 39103818 | 100226 |
| 70165 | 39129263 | 39130690 | 203583, 100226 |
| 70166 | 39143539 | 39144876 | 225450, 100242 |
| 70167 | 39149334 | 39153091 | 100242 |
| 70168 | 39189415 | 39190387 | 100246, 100242 |
| 70169 | 39267455 | 39269526 | 183741 |
| 70170 | 39320090 | 39320997 | 235209 |
| 70171 | 39377735 | 39379137 | 179750 |
| 70172 | 39379998 | 39381555 | 179750 |
| 70173 | 39492980 | 39493767 | 100298 |
| 70174 | 39541314 | 39542670 | 100307 |
| 70175 | 39547038 | 39549242 | 100307 |
| 70176 | 39570019 | 39573004 | |
| 70177 | 39635464 | 39636076 | 100311 |
| 70178 | 39638361 | 39641204 | 100311 |
| 70179 | 39647838 | 39652458 | |
| 70180 | 39685260 | 39689128 | 224794 |
| 70181 | 39699282 | 39699775 | |
| 70182 | 39699984 | 39700750 | |
| 70183 | 39704243 | 39706110 | |
| 70184 | 39706454 | 39707502 | |
| 70185 | 39712276 | 39712884 | 100316 |
| 70186 | 39713413 | 39716768 | 263764, 100316 |
| 70187 | 39795134 | 39796618 | 100324 |
| 70188 | 39897509 | 39899677 | 100335 |
| 70189 | 39914793 | 39917831 | 128272 |
| 70190 | 39918636 | 39919715 | 128272 |
| 70191 | 39925094 | 39925737 | 187051 |
| 70192 | 39927759 | 39929352 | 187051 |
| 70193 | 40364474 | 40365078 | 100351 |
| 70194 | 40386890 | 40387701 | |
| 70195 | 40392720 | 40393197 | 133477 |
| 70196 | 40394875 | 40396304 | 133477 |
| 70197 | 40439000 | 40442143 | 100354, 261202, 133477 |
| 70198 | 40503125 | 40504492 | 100354 |
| 70199 | 40551912 | 40552806 | 100354 |
| 70200 | 40572806 | 40576011 | 100354 |
| 70201 | 40577150 | 40578112 | 100354 |
| 70202 | 40578961 | 40580046 | 100354 |
| 70203 | 40581801 | 40582579 | 100354 |
| 70204 | 40600355 | 40600833 | 100354 |
| 70205 | 40653772 | 40655497 | 100354 |
| 70206 | 40671280 | 40673340 | 100354 |
| 70207 | 40741490 | 40743685 | 239900 |
| 70208 | 40766325 | 40767517 | 100359, 239900 |
| 70209 | 40892604 | 40896562 | 196588 |
| 70210 | 40903423 | 40910474 | 196588 |
| 70211 | 40914905 | 40916331 | 196588 |
| 70212 | 40923795 | 40924378 | 252124, 196588 |
| 70213 | 41031399 | 41033908 | 196588 |
| 70214 | 41040601 | 41042977 | |
| 70215 | 41074158 | 41075226 | 128285 |
| 70216 | 41078856 | 41079516 | |
| 70217 | 41107441 | 41108050 | |
| 70218 | 41188392 | 41188875 | 100372 |
| 70219 | 41196236 | 41197010 | 100372 |
| 70220 | 41214557 | 41215866 | 100372 |
| 70221 | 41222491 | 41223993 | 100380 |
| 70222 | 41251810 | 41253942 | 196236, 100380 |
| 70223 | 41346365 | 41348837 | 100387, 196236 |
| 70224 | 41417272 | 41419076 | |
| 70225 | 41486717 | 41489946 | 100393, 221160 |
| 70226 | 41592515 | 41593916 | 231993 |
| 70227 | 41619173 | 41620118 | 100395 |
| 70228 | 41630858 | 41631489 | 100399 |
| 70229 | 41633437 | 41634613 | 100399 |
| 70230 | 41643672 | 41644204 | 100401 |
| 70231 | 41680758 | 41683399 | 100401 |
| 70232 | 41683774 | 41685526 | 269104 |
| 70233 | 41686220 | 41687467 | |
| 70234 | 41696927 | 41699330 | 100403 |
| 70235 | 41704303 | 41705106 | 100403 |
| 70236 | 41739914 | 41740844 | 100403 |
| 70237 | 41743222 | 41744110 | 100403 |
| 70238 | 41748003 | 41748394 | 100403 |
| 70239 | 41755944 | 41756641 | 100403 |
| 70240 | 41762953 | 41763712 | 167074 |
| 70241 | 41775865 | 41778852 | 167074 |
| 70242 | 41805864 | 41806751 | |
| 70243 | 41808554 | 41811314 | |
| 70244 | 41813349 | 41814958 | |
| 70245 | 41840395 | 41845083 | 183864 |
| 70246 | 41863798 | 41866160 | 100412, 100410 |
| 70247 | 41874970 | 41876121 | 100412 |
| 70248 | 41895422 | 41896491 | 100412 |
| 70249 | 41939628 | 41940853 | 100413 |
| 70250 | 41944884 | 41946002 | |
| 70251 | 41953577 | 41954326 | |
| 70252 | 41961421 | 41962066 | 172346 |
| 70253 | 41983371 | 41984312 | 100417 |
| 70254 | 41984439 | 41986424 | 100417 |
| 70255 | 42009327 | 42009872 | 100418 |
| 70256 | 42014939 | 42018511 | 196419, 100418 |
| 70257 | 42062562 | 42063156 | |
| 70258 | 42083471 | 42085260 | 184208, 100138 |
| 70259 | 42195468 | 42197080 | 100147 |
| 70260 | 42227842 | 42230512 | 198911, 184068 |
| 70261 | 42230523 | 42231302 | 184068, 198911 |
| 70262 | 42237304 | 42237723 | 198911 |
| 70263 | 42281482 | 42282205 | 198911 |
| 70264 | 42298949 | 42299623 | 198911 |
| 70265 | 42394107 | 42395664 | 183066, 100167 |
| 70266 | 42466574 | 42467487 | 198951 |
| 70267 | 42474541 | 42476908 | 183172, 177096 |
| 70268 | 42485674 | 42487786 | 237037, 184983, 270083 |
| 70269 | 42525023 | 42525882 | 237037, 100197 |
| 70270 | 42568214 | 42570044 | 100207 |
| 70271 | 42665017 | 42666757 | 182057, 100207 |
| 70272 | 42709626 | 42710813 | 100207 |
| 70273 | 42752608 | 42754554 | |
| 70274 | 42756223 | 42756886 | |
| 70275 | 42764247 | 42765755 | 229891 |
| 70276 | 42833405 | 42834440 | 230107 |
| 70277 | 42839556 | 42840731 | 230107 |
| 70278 | 43009722 | 43012094 | 270022, 100227 |
| 70279 | 43037764 | 43038437 | 100243 |
| 70280 | 43041603 | 43043350 | 100243 |
| 70281 | 43044000 | 43046208 | 100243 |
| 70282 | 43048530 | 43049331 | |
| 70283 | 43069802 | 43070417 | |
| 70284 | 43084169 | 43084959 | |
| 70285 | 43093227 | 43094440 | 128274 |
| 70286 | 43150652 | 43151210 | |
| 70287 | 43200940 | 43202410 | 242247 |
| 70288 | 43251660 | 43254482 | 242247, 100266 |
| 70289 | 43258041 | 43258715 | 100266 |
| 70290 | 43276757 | 43279592 | 100266 |
| 70291 | 43280947 | 43282303 | 100266 |
| 70292 | 43282552 | 43284926 | 100266 |
| 70293 | 43301141 | 43302514 | 100266 |
| 70294 | 43309646 | 43310378 | 100266 |
| 70295 | 43314547 | 43319302 | 100266 |
| 70296 | 43325257 | 43327790 | 100266 |
| 70297 | 43334680 | 43337490 | 100266 |
| 70298 | 43354640 | 43357133 | 100266 |
| 70299 | 43365932 | 43366497 | 100266 |
| 70300 | 43389338 | 43392261 | 100266 |
| 70301 | 43399436 | 43401245 | 100266 |
| 70302 | 43409957 | 43411788 | 100266 |
| 70303 | 43474482 | 43474860 | 100271 |
| 70304 | 43521529 | 43523799 | 100290 |
| 70305 | 43538583 | 43539802 | 100294 |
| 70306 | 43547232 | 43548631 | 100300 |
| 70307 | 43581796 | 43583373 | 100304 |
| 70308 | 43583461 | 43584405 | |
| 70309 | 43629538 | 43630156 | 234892, 159307 |
| 70310 | 43631571 | 43635527 | 234892, 159307 |
| 70311 | 43659009 | 43661098 | 159307 |
| 70312 | 43689098 | 43691068 | 159307 |
| 70313 | 43741035 | 43742873 | |
| 70314 | 43774014 | 43774850 | |
| 70315 | 43786889 | 43787911 | |
| 70316 | 43792803 | 43793505 | |
| 70317 | 43795234 | 43797177 | 236117 |
| 70318 | 43831937 | 43832879 | 186732 |
| 70319 | 43869989 | 43871366 | 186732 |
| 70320 | 44207414 | 44209082 | 261251, 186976 |
| 70321 | 44219176 | 44220119 | |
| 70322 | 44278781 | 44279414 | 100341 |
| 70323 | 44292852 | 44295886 | |
| 70324 | 44314434 | 44318797 | |
| 70325 | 44318810 | 44323121 | 100344 |
| 70326 | 44323906 | 44324775 | 100344 |
| 70327 | 44350484 | 44353047 | 224856, 100347, 100344 |
| 70328 | 44419401 | 44420921 | 188677 |
| 70329 | 44433317 | 44434284 | 188677 |
| 70330 | 44893233 | 44894381 | 188636 |
| 70331 | 45080507 | 45081012 | 186654 |
| 70332 | 45093164 | 45093840 | 186654 |
| 70333 | 45097952 | 45099262 | 248405, 241484, 186654 |
| 70334 | 45109897 | 45111119 | 248405, 186654, 241484 |
| 70335 | 45131472 | 45132278 | 248405, 186654, 241484 |
| 70336 | 45554212 | 45556317 | 226328 |
| 70337 | 45558815 | 45560928 | 093000, 226328 |
| 70338 | 45636950 | 45637417 | |
| 70339 | 45640645 | 45644028 | |
| 70340 | 45644495 | 45645686 | |
| 70341 | 45659430 | 45660525 | 273287 |
| 70342 | 45705152 | 45706910 | 100376 |
| 70343 | 45809245 | 45809979 | 128408, 077935 |
| 70344 | 45879775 | 45880338 | |
| 70345 | 46001206 | 46001637 | 238120 |
| 70346 | 46065187 | 46066525 | |
| 70347 | 46066667 | 46069540 | 130638 |
| 70348 | 46083806 | 46085929 | 130638 |
| 70349 | 46103021 | 46107325 | 130638 |
| 70350 | 46115911 | 46118986 | 130638 |
| 70351 | 46121812 | 46122901 | 130638 |
| 70352 | 46138280 | 46140713 | 130638 |
| 70353 | 46180977 | 46181817 | 130638 |
| 70354 | 46194183 | 46195874 | 130638 |
| 70355 | 46213943 | 46215207 | 130638 |
| 70356 | 46255518 | 46256232 | |
| 70357 | 46402205 | 46403579 | |
| 70358 | 46408493 | 46411244 | 273145 |
| 70359 | 46422699 | 46424197 | |
| 70360 | 46428413 | 46428869 | |
| 70361 | 46431530 | 46433128 | |
| 70362 | 46439472 | 46441617 | 231711 |
| 70363 | 46448477 | 46450943 | 273289, 197182, 241990, |
| | | | 182257 |
| 70364 | 46464248 | 46470967 | 235159, 197182 |
| 70365 | 46474013 | 46474816 | 197182 |
| 70366 | 46480494 | 46482062 | 197182 |
| 70367 | 46483522 | 46486702 | 197182 |
| 70368 | 46499615 | 46504223 | 197182 |
| 70369 | 46512064 | 46513053 | |
| 70370 | 46521431 | 46523646 | |
| 70371 | 46526822 | 46527733 | |
| 70372 | 46527822 | 46529584 | |
| 70373 | 46542825 | 46543910 | |
| 70374 | 46544248 | 46548318 | 186951 |
| 70375 | 46558044 | 46559292 | 186951 |
| 70376 | 46589631 | 46590429 | 186951 |
| 70377 | 46591040 | 46592758 | 186951 |
| 70378 | 46620144 | 46620730 | 186951 |
| 70379 | 46645423 | 46647474 | 205643 |
| 70380 | 46663133 | 46666318 | 075234 |
| 70381 | 46691761 | 46692798 | 075218 |
| 70382 | 46730798 | 46732865 | 100416 |
| 70383 | 46766330 | 46767442 | 075275 |
| 70384 | 46772419 | 46776368 | 075275 |
| 70385 | 46849027 | 46849741 | 075275 |
| 70386 | 46942375 | 46944284 | 234869 |
| 70387 | 46959114 | 46960245 | |
| 70388 | 46970747 | 46974555 | 075240 |
| 70389 | 47034598 | 47035246 | 075240 |
| 70390 | 47044795 | 47046686 | 075240 |
| 70391 | 47047514 | 47049332 | 075240 |
| 70392 | 47121918 | 47123176 | 100422 |
| 70393 | 47126836 | 47128398 | 100422 |
| 70394 | 47133161 | 47135637 | 100422 |
| 70395 | 47136566 | 47137525 | |
| 70396 | 47140148 | 47141088 | |
| 70397 | 47144364 | 47147857 | |
| 70398 | 47148669 | 47151250 | |
| 70399 | 47154410 | 47155516 | |
| 70400 | 47156974 | 47159677 | 260708, 054611 |
| 70401 | 47169569 | 47170965 | 054611 |
| 70402 | 47194302 | 47195129 | 054611 |
| 70403 | 47210857 | 47212840 | 054611 |
| 70404 | 47259919 | 47260999 | 054611 |
| 70405 | 47329927 | 47332825 | 054611 |
| 70406 | 47380301 | 47382217 | 054611 |
| 70407 | 47490582 | 47491082 | 054611 |
| 70408 | 47524859 | 47526724 | 054611 |
| 70409 | 48765656 | 48766860 | |
| 70410 | 48792254 | 48793399 | |
| 70411 | 48801106 | 48802745 | |
| 70412 | 50206476 | 50206874 | 100425 |
| 70413 | 50219540 | 50222315 | 100425 |
| 70414 | 50246202 | 50248691 | 100426 |
| 70415 | 50311201 | 50313232 | 184164, 182858 |
| 70416 | 50327699 | 50329365 | |
| 70417 | 50329429 | 50330391 | |
| 70418 | 50344921 | 50346419 | |
| 70419 | 50347548 | 50348474 | |
| 70420 | 50348623 | 50350221 | |
| 70421 | 50352664 | 50357773 | 198355 |
| 70422 | 50359938 | 50365218 | |
| 70423 | 50585094 | 50585723 | 073146 |
| 70424 | 50607500 | 50608963 | |
| 70425 | 50623465 | 50625412 | 170638 |
| 70426 | 50628504 | 50630113 | 170638 |
| 70427 | 50633243 | 50633824 | 170638 |
| 70428 | 50638571 | 50641285 | 073169, 273253 |
| 70429 | 50642988 | 50645514 | 272836, 073169 |
| 70430 | 50682125 | 50684622 | 100429, 188130, 128159 |
| 70431 | 50688983 | 50689968 | 100429, 188130 |
| 70432 | 50695942 | 50697115 | 188130 |
| 70433 | 50720652 | 50721421 | 196576 |
| 70434 | 50731521 | 50733119 | 196576 |
| 70435 | 50735033 | 50736225 | 196576 |
| 70436 | 50737157 | 50739508 | 196576 |
| 70437 | 50740339 | 50741644 | 196576 |
| 70438 | 50741680 | 50746307 | 196576 |
| 70439 | 50764725 | 50766661 | 205593 |
| 70440 | 50780593 | 50782408 | 100239 |
| 70441 | 50825335 | 50826716 | 100239 |
| 70442 | 50837576 | 50839456 | 100239 |
| 70443 | 50912494 | 50914346 | 100241 |
| 70444 | 50919677 | 50921155 | 128165 |
| 70445 | 50945421 | 50947367 | 025770, 100258 |
| 70446 | 50962629 | 50966045 | 025708, 130489, 272821 |
| 70447 | 50967446 | 50971518 | 177989, 025708 |
| 70448 | 50976689 | 50979996 | |
| 70449 | 50982232 | 50983536 | |
| 70450 | 51000976 | 51002812 | 217442 |
| 70451 | 51007030 | 51008061 | 254413, 205560 |
| 70452 | 51020165 | 51022000 | 205559, 254413, 100288 |
| 70453 | 51051827 | 51052689 | 008735 |
| 70454 | 51058591 | 51059486 | |
| 70455 | 51065683 | 51067058 | 100299 |
| 70456 | 51080186 | 51080733 | |
| 70457 | 51137892 | 51139961 | 251322 |

[0591] The locations of ODSCs on Chromosome X are shown in Table 65.

TABLE 65
ODSC Locations on Chromosome X

| SEQ ID NO. | Start | End | Overlapping Gene(s) |
|---|---|---|---|
| 70458 | 2746382 | 2747751 | 056998 |
| 70459 | 2816393 | 2817384 | |
| 70460 | 2817590 | 2818055 | |
| 70461 | 2819243 | 2821856 | |
| 70462 | 2844877 | 2848178 | 006756 |
| 70463 | 2881311 | 2882884 | 157399 |
| 70464 | 2958859 | 2959466 | |
| 70465 | 3631165 | 3631891 | 183943 |
| 70466 | 3732223 | 3735203 | |
| 70467 | 4628424 | 4629310 | |
| 70468 | 6300318 | 6300802 | |
| 70469 | 6972280 | 6973289 | 130021 |
| 70470 | 6979451 | 6981288 | 130021 |
| 70471 | 7008477 | 7009862 | 130021 |
| 70472 | 7038381 | 7039024 | 130021 |
| 70473 | 7050265 | 7050844 | 130021 |
| 70474 | 7065023 | 7066570 | 264268, 130021 |
| 70475 | 7076569 | 7077645 | |
| 70476 | 7739755 | 7740806 | |
| 70477 | 7894262 | 7896568 | 006757 |
| 70478 | 8815984 | 8818110 | |
| 70479 | 8835609 | 8837623 | 229012 |
| 70480 | 8880962 | 8882514 | |
| 70481 | 9236828 | 9237721 | 228543 |
| 70482 | 9309589 | 9311158 | |
| 70483 | 9424438 | 9425166 | |
| 70484 | 9430792 | 9434494 | 101849 |
| 70485 | 9460953 | 9461363 | 101849 |
| 70486 | 9524749 | 9526228 | 101849 |
| 70487 | 9530693 | 9531873 | 101849 |
| 70488 | 9534101 | 9534694 | 101849 |
| 70489 | 9572477 | 9573330 | 101849 |
| 70490 | 9754382 | 9755732 | 146950 |
| 70491 | 9775819 | 9776348 | 146950 |
| 70492 | 9981985 | 9983582 | |
| 70493 | 9998522 | 10002971 | 225076, 047644 |
| 70494 | 10007803 | 10009317 | 047644 |
| 70495 | 10045196 | 10046195 | 047644 |
| 70496 | 10069156 | 10069915 | 047644 |
| 70497 | 10124074 | 10125902 | 073464 |
| 70498 | 10136338 | 10136942 | 073464 |
| 70499 | 10141152 | 10142098 | 073464 |
| 70500 | 10504353 | 10505853 | 101871 |
| 70501 | 10546950 | 10547674 | 101871 |
| 70502 | 10550227 | 10550746 | 101871 |
| 70503 | 10577497 | 10578958 | 101871 |
| 70504 | 10722998 | 10724809 | 101871 |
| 70505 | 10737165 | 10738897 | 101871 |
| 70506 | 10918644 | 10920720 | 234129 |
| 70507 | 10939848 | 10941643 | 234129 |
| 70508 | 10957473 | 10958176 | 234129 |
| 70509 | 11118358 | 11119325 | 234129 |
| 70510 | 11129160 | 11130232 | 004961, 234129 |
| 70511 | 11286105 | 11286639 | 047648 |
| 70512 | 11359351 | 11360335 | 047648 |
| 70513 | 11455517 | 11457335 | 047648 |
| 70514 | 11527766 | 11528411 | 047648 |
| 70515 | 11775239 | 11777508 | 005302 |
| 70516 | 12797586 | 12798148 | |
| 70517 | 12809135 | 12810163 | 101911 |
| 70518 | 12992348 | 12995026 | 205542 |
| 70519 | 13006756 | 13007871 | |
| 70520 | 13046562 | 13048993 | |
| 70521 | 13076958 | 13079511 | |
| 70522 | 13119084 | 13120349 | |
| 70523 | 13127708 | 13130076 | |
| 70524 | 13136677 | 13140063 | |
| 70525 | 13140793 | 13142757 | |
| 70526 | 13178928 | 13183922 | |
| 70527 | 13241791 | 13243079 | |
| 70528 | 13414506 | 13418203 | 226434 |
| 70529 | 13511518 | 13514026 | |
| 70530 | 13670359 | 13672130 | 176896 |
| 70531 | 13687209 | 13688191 | 176896 |
| 70532 | 13706823 | 13708406 | 123595 |
| 70533 | 13751897 | 13753749 | 046651, 196459 |
| 70534 | 14046841 | 14048861 | 046647 |
| 70535 | 14917722 | 14918459 | 130150 |
| 70536 | 15287614 | 15288756 | 102048 |
| 70537 | 15635759 | 15638339 | 225833 |
| 70538 | 15692776 | 15694583 | 186312 |
| 70539 | 15872064 | 15874034 | 182287 |
| 70540 | 16178237 | 16179326 | 238178 |
| 70541 | 16229881 | 16230912 | |
| 70542 | 16621971 | 16623567 | 047230 |
| 70543 | 16736788 | 16738841 | 169895 |
| 70544 | 16757682 | 16758201 | 169895 |
| 70545 | 16761740 | 16762444 | 169895 |
| 70546 | 16803763 | 16805428 | 086712 |
| 70547 | 16825568 | 16826572 | 086712 |
| 70548 | 16845160 | 16847245 | 086712 |
| 70549 | 16856372 | 16857265 | 086712 |
| 70550 | 16887962 | 16889691 | 102054 |
| 70551 | 16964820 | 16965824 | 169891 |
| 70552 | 17023721 | 17024458 | 169891 |
| 70553 | 17095583 | 17097070 | 169891 |
| 70554 | 17423029 | 17423851 | 188158 |
| 70555 | 17754630 | 17756362 | 047634 |
| 70556 | 17832747 | 17833325 | 131831 |
| 70557 | 17938033 | 17938647 | |
| 70558 | 17985784 | 17986438 | |
| 70559 | 18008349 | 18009324 | 225882 |
| 70560 | 18372090 | 18373374 | 102098 |
| 70561 | 18692508 | 18693950 | |
| 70562 | 18953996 | 18954546 | 044446 |
| 70563 | 18998895 | 18999973 | 044446 |
| 70564 | 19001801 | 19003815 | 044446 |
| 70565 | 19090473 | 19091090 | 173698 |
| 70566 | 19104317 | 19104709 | 173698 |
| 70567 | 19145592 | 19146419 | |
| 70568 | 19361714 | 19363021 | 131828 |
| 70569 | 19758912 | 19759291 | 147010 |
| 70570 | 19764913 | 19765676 | 147010 |
| 70571 | 19869986 | 19871042 | 147010 |
| 70572 | 19904355 | 19906929 | 147010 |
| 70573 | 19924412 | 19924884 | |
| 70574 | 20008742 | 20009611 | |
| 70575 | 20044139 | 20044997 | 184368 |
| 70576 | 20047560 | 20048504 | 184368 |
| 70577 | 20079781 | 20080527 | 184368 |
| 70578 | 20158869 | 20160447 | 173674 |
| 70579 | 20236812 | 20237983 | 177189 |
| 70580 | 20239899 | 20240652 | 177189 |
| 70581 | 20283344 | 20285953 | 177189 |
| 70582 | 20379199 | 20381240 | |
| 70583 | 20534254 | 20535270 | |
| 70584 | 20565420 | 20566464 | |
| 70585 | 21718932 | 21719535 | |
| 70586 | 21760105 | 21760808 | 091482 |
| 70587 | 21816089 | 21819627 | |
| 70588 | 21856955 | 21858700 | 012174 |
| 70589 | 21943801 | 21945649 | |
| 70590 | 21950162 | 21951739 | |
| 70591 | 21958055 | 21959860 | 102172, 271286 |
| 70592 | 22127190 | 22128592 | 102174 |
| 70593 | 23020914 | 23021860 | 233067 |
| 70594 | 23511688 | 23512554 | |
| 70595 | 23522119 | 23523233 | |
| 70596 | 23684903 | 23686410 | 123131 |
| 70597 | 23759927 | 23761839 | 123130 |
| 70598 | 23788214 | 23788656 | |
| 70599 | 23791024 | 23792195 | 233785 |
| 70600 | 23799039 | 23804619 | 130066, 202272, 233785 |
| 70601 | 23821956 | 23822931 | |
| 70602 | 23825268 | 23825956 | |
| 70603 | 23889846 | 23890520 | 184831 |
| 70604 | 23897579 | 23898294 | 184831 |
| 70605 | 23925453 | 23926621 | 165182, 184831 |
| 70606 | 24042098 | 24045054 | 174010 |
| 70607 | 24072093 | 24073937 | 130741 |
| 70608 | 24163707 | 24165004 | 234230 |
| 70609 | 24166190 | 24169278 | 005889, 234230 |
| 70610 | 24208462 | 24209092 | 005889 |
| 70611 | 24711499 | 24712537 | 101868 |
| 70612 | 24996622 | 24997656 | 101868 |
| 70613 | 25541616 | 25542784 | |
| 70614 | 25554303 | 25555004 | |
| 70615 | 28207137 | 28207698 | |
| 70616 | 28869746 | 28871072 | 169306 |
| 70617 | 29299051 | 29300184 | 169306 |
| 70618 | 29560821 | 29561419 | 169306 |
| 70619 | 29679638 | 29681655 | 169306 |
| 70620 | 30300640 | 30303129 | |
| 70621 | 30590081 | 30591164 | 120280 |
| 70622 | 30645833 | 30646357 | |
| 70623 | 30661349 | 30662131 | |
| 70624 | 30667473 | 30668809 | |
| 70625 | 30670387 | 30673691 | 198814 |
| 70626 | 30698669 | 30699298 | 198814 |
| 70627 | 30712049 | 30712872 | 198814 |
| 70628 | 30853418 | 30854077 | 231542, 157625 |
| 70629 | 30893227 | 30895764 | 157625 |
| 70630 | 30906591 | 30908052 | 157625 |
| 70631 | 30973673 | 30974328 | 157625 |
| 70632 | 30975694 | 30976277 | 157625 |
| 70633 | 31239076 | 31239851 | 198947 |
| 70634 | 31245138 | 31245809 | 198947 |
| 70635 | 31368219 | 31369045 | 198947 |
| 70636 | 31374497 | 31375054 | 198947 |
| 70637 | 31414794 | 31415802 | 198947 |
| 70638 | 31850034 | 31851343 | 198947 |
| 70639 | 31907128 | 31908050 | 198947 |
| 70640 | 31911739 | 31912831 | 198947 |
| 70641 | 34422500 | 34423218 | 233571 |
| 70642 | 34675137 | 34676044 | 147027 |
| 70643 | 34902801 | 34903647 | |
| 70644 | 34933285 | 34937254 | |
| 70645 | 35306447 | 35313282 | |
| 70646 | 36927578 | 36928128 | |
| 70647 | 36981539 | 36982351 | |
| 70648 | 37191876 | 37193613 | |
| 70649 | 37208446 | 37209674 | 130962, 250349 |
| 70650 | 37313551 | 37315268 | 130962, 250349 |
| 70651 | 37486849 | 37487453 | 250349, 147036 |
| 70652 | 37544647 | 37545448 | 047597, 250349 |
| 70653 | 37571067 | 37572035 | 250349, 047597 |
| 70654 | 37705991 | 37707124 | 165169, 250349 |
| 70655 | 37746496 | 37747655 | 250349 |
| 70656 | 37817467 | 37819070 | 250349 |
| 70657 | 37920530 | 37921092 | 250349, 147041 |
| 70658 | 37966093 | 37967126 | 250349, 147041 |
| 70659 | 38134316 | 38135626 | 250349, 156313 |
| 70660 | 38186428 | 38187238 | 156313, 250349 |
| 70661 | 38201755 | 38203444 | 250349 |
| 70662 | 38210446 | 38211003 | 250349 |
| 70663 | 38421169 | 38422566 | 250349, 156298 |
| 70664 | 38660113 | 38662165 | 165175, 238123 |
| 70665 | 38662245 | 38666876 | 165175, 238123 |
| 70666 | 38676167 | 38676735 | |
| 70667 | 38691237 | 38691830 | |
| 70668 | 38749932 | 38750677 | |
| 70669 | 38796572 | 38797755 | |
| 70670 | 38798283 | 38798826 | |
| 70671 | 38799693 | 38800338 | |
| 70672 | 38903043 | 38903608 | |
| 70673 | 39500942 | 39501946 | |
| 70674 | 39547841 | 39548685 | |
| 70675 | 39563695 | 39564905 | |
| 70676 | 39592007 | 39592797 | |
| 70677 | 39611799 | 39613405 | |
| 70678 | 39617797 | 39620047 | |
| 70679 | 39696018 | 39696824 | 261435, 263972 |
| 70680 | 39709207 | 39710253 | |
| 70681 | 39766208 | 39768617 | |
| 70682 | 39795583 | 39796909 | |
| 70683 | 39813037 | 39813787 | |
| 70684 | 39871161 | 39874489 | 223486 |
| 70685 | 39915530 | 39916187 | 183337 |
| 70686 | 39941828 | 39942342 | 183337 |
| 70687 | 39942526 | 39943203 | 183337 |
| 70688 | 39954135 | 39957787 | 183337 |
| 70689 | 39963587 | 39969628 | 183337 |
| 70690 | 39991016 | 39992464 | 183337 |
| 70691 | 39999858 | 40000724 | 183337 |
| 70692 | 40011405 | 40013895 | 183337 |
| 70693 | 40013969 | 40015484 | 183337 |
| 70694 | 40017011 | 40018300 | 183337 |
| 70695 | 40032542 | 40036982 | 183337 |
| 70696 | 40333287 | 40334091 | |
| 70697 | 40372237 | 40372787 | |
| 70698 | 40439885 | 40441074 | 182220 |
| 70699 | 40504035 | 40504725 | 185753 |
| 70700 | 40505596 | 40507139 | 185753 |
| 70701 | 40586665 | 40587386 | 180182 |
| 70702 | 40594106 | 40596103 | 234636, 180182 |
| 70703 | 40643591 | 40644713 | |
| 70704 | 40725457 | 40727087 | |
| 70705 | 40804064 | 40804995 | |
| 70706 | 40869118 | 40870514 | |
| 70707 | 40875945 | 40876784 | |
| 70708 | 40881266 | 40882879 | |
| 70709 | 40906735 | 40908174 | |
| 70710 | 40942968 | 40947025 | 124486 |
| 70711 | 41189635 | 41190279 | |
| 70712 | 41190465 | 41195050 | 215301 |
| 70713 | 41240561 | 41241428 | |
| 70714 | 41241703 | 41243883 | |
| 70715 | 41248082 | 41249247 | |
| 70716 | 41300955 | 41302740 | |
| 70717 | 41420169 | 41421054 | 147044 |
| 70718 | 41536483 | 41537093 | 147044 |
| 70719 | 41548920 | 41549600 | 171659, 147044 |
| 70720 | 41620100 | 41621673 | 147044 |
| 70721 | 41638132 | 41639098 | 147044 |
| 70722 | 41682176 | 41683280 | 147044 |
| 70723 | 41694731 | 41695111 | 147044 |
| 70724 | 41765706 | 41766554 | 147044 |
| 70725 | 41781561 | 41784005 | 147044 |
| 70726 | 41952975 | 41953960 | |
| 70727 | 41954804 | 41956024 | |
| 70728 | 42397450 | 42398124 | 231772 |
| 70729 | 42566957 | 42567944 | |
| 70730 | 43084649 | 43085981 | 224294 |
| 70731 | 43448667 | 43450310 | |
| 70732 | 43513594 | 43516193 | 189221 |
| 70733 | 43523395 | 43524836 | 189221 |
| 70734 | 43552711 | 43553943 | 189221 |
| 70735 | 43560689 | 43563595 | 189221 |
| 70736 | 43566599 | 43567796 | 189221 |
| 70737 | 43588164 | 43588663 | 189221 |
| 70738 | 43704792 | 43706284 | 069535 |
| 70739 | 43712462 | 43713419 | 069535 |
| 70740 | 43720054 | 43721952 | 069535 |
| 70741 | 43738225 | 43742142 | 069535 |
| 70742 | 44287794 | 44289198 | |
| 70743 | 44401237 | 44403028 | 069509 |
| 70744 | 44730633 | 44734492 | 147050 |
| 70745 | 44773643 | 44775284 | 147050 |
| 70746 | 44849088 | 44849543 | 147050 |
| 70747 | 44868607 | 44870940 | 147050 |
| 70748 | 45365227 | 45366986 | 229563 |
| 70749 | 45374272 | 45376013 | 229563 |
| 70750 | 45628275 | 45631714 | 270069 |
| 70751 | 45710779 | 45711567 | 231566 |
| 70752 | 45903946 | 45904379 | |
| 70753 | 46064389 | 46064937 | |
| 70754 | 46179668 | 46180378 | |
| 70755 | 46186184 | 46187763 | 236751 |
| 70756 | 46192997 | 46193402 | |
| 70757 | 46305740 | 46307534 | 147121 |
| 70758 | 46404037 | 46406009 | 230844, 251192 |
| 70759 | 46482903 | 46484743 | 065923 |
| 70760 | 46569454 | 46570993 | 065923 |
| 70761 | 46617698 | 46619578 | 065923 |
| 70762 | 46671065 | 46673088 | |
| 70763 | 46675347 | 46676019 | |
| 70764 | 46696074 | 46697150 | 102218 |
| 70765 | 46771269 | 46772906 | 102221 |
| 70766 | 46817386 | 46819173 | 102221 |
| 70767 | 46827956 | 46828542 | 102221 |
| 70768 | 46937352 | 46938677 | 130988 |
| 70769 | 46988331 | 46989620 | |
| 70770 | 47003851 | 47005324 | 182872, 147123 |
| 70771 | 47052482 | 47054341 | 130985 |
| 70772 | 47059732 | 47060873 | 130985 |
| 70773 | 47076930 | 47079299 | 102225 |
| 70774 | 47341786 | 47343519 | 196741, 147124 |
| 70775 | 47400402 | 47401147 | |
| 70776 | 47419649 | 47421147 | 078061 |
| 70777 | 47441455 | 47442087 | 102265, 008056 |
| 70778 | 47504876 | 47505488 | 126767 |
| 70779 | 47509392 | 47510844 | 126767 |
| 70780 | 47517929 | 47519036 | 267064, 126756 |
| 70781 | 48333661 | 48335370 | 068438 |
| 70782 | 48363877 | 48364520 | |
| 70783 | 48379735 | 48381153 | 147155 |
| 70784 | 48397464 | 48398796 | 068354 |
| 70785 | 48432002 | 48434173 | 102317, 204620 |
| 70786 | 48447805 | 48452016 | 101940 |
| 70787 | 48455267 | 48456739 | 101940 |
| 70788 | 48554054 | 48555725 | 101945 |
| 70789 | 48569686 | 48573335 | 232828 |
| 70790 | 48659418 | 48661990 | 094631 |
| 70791 | 48754423 | 48755684 | 102103, 126768 |
| 70792 | 48768411 | 48770102 | 102100 |
| 70793 | 48775662 | 48776745 | 102096 |
| 70794 | 48814085 | 48816910 | 223309, 068308 |
| 70795 | 48857985 | 48859388 | 068400 |
| 70796 | 48876967 | 48877786 | |
| 70797 | 48898825 | 48902126 | 068323 |
| 70798 | 48910794 | 48911901 | 147144 |
| 70799 | 48916291 | 48917673 | 147144 |
| 70800 | 48931436 | 48932006 | 243279, 250232, 196998 |
| 70801 | 48936597 | 48938369 | 250232, 196998 |
| 70802 | 48979297 | 48980622 | 068394 |
| 70803 | 49019988 | 49020819 | 017621 |
| 70804 | 49027805 | 49029250 | 102007 |
| 70805 | 49042180 | 49043362 | 012211 |
| 70806 | 49125139 | 49127450 | 049769 |
| 70807 | 49643109 | 49644205 | 234390 |
| 70808 | 49831943 | 49832527 | 171365 |
| 70809 | 50191496 | 50192008 | 204466 |
| 70810 | 50570312 | 50571621 | |
| 70811 | 50603361 | 50604482 | |
| 70812 | 51485972 | 51487197 | 189369 |
| 70813 | 51636472 | 51638173 | 179222 |
| 70814 | 52894420 | 52895166 | 171402 |
| 70815 | 52949302 | 52951076 | |
| 70816 | 52963643 | 52965148 | |
| 70817 | 53253063 | 53255310 | 126012 |
| 70818 | 53448629 | 53449847 | 158423, 072501 |
| 70819 | 53467308 | 53469105 | |
| 70820 | 53709750 | 53712025 | 086758 |
| 70821 | 53712990 | 53713627 | 086758 |
| 70822 | 54068980 | 54069769 | 172943 |
| 70823 | 54069780 | 54072450 | 172943 |
| 70824 | 54197944 | 54198368 | 184083 |
| 70825 | 54208706 | 54210137 | 184083 |
| 70826 | 54256573 | 54258092 | 196632 |
| 70827 | 54319043 | 54319604 | 196632 |
| 70828 | 54384264 | 54385360 | 196632 |
| 70829 | 54555387 | 54557430 | 130119 |
| 70830 | 54566690 | 54567128 | 130119 |
| 70831 | 54665460 | 54667597 | |
| 70832 | 54733598 | 54734383 | |
| 70833 | 54734405 | 54735577 | |
| 70834 | 54834106 | 54835693 | 102316 |
| 70835 | 55020056 | 55022789 | 158571 |
| 70836 | 55033253 | 55034950 | 169188 |
| 70837 | 55034991 | 55036044 | 158578, 169188 |
| 70838 | 55059223 | 55060614 | |
| 70839 | 55187077 | 55188615 | 182518 |
| 70840 | 55228275 | 55228898 | |
| 70841 | 55239806 | 55240290 | |
| 70842 | 55478124 | 55478963 | 187601 |
| 70843 | 55650806 | 55651320 | 189299 |
| 70844 | 56156954 | 56157591 | |
| 70845 | 56589393 | 56591122 | 188021 |
| 70846 | 56755443 | 56756297 | 204272 |
| 70847 | 56764567 | 56765784 | 204272 |
| 70848 | 56789858 | 56791664 | 204272 |
| 70849 | 56824397 | 56824963 | 204272 |
| 70850 | 57021383 | 57022794 | 204271 |
| 70851 | 57312808 | 57313900 | 165591 |
| 70852 | 57617643 | 57618425 | 198455 |
| 70853 | 57620687 | 57624828 | 198455 |
| 70854 | 57666417 | 57669326 | |
| 70855 | 57669458 | 57672075 | |
| 70856 | 57926911 | 57927973 | |
| 70857 | 62412150 | 62412963 | |
| 70858 | 62570157 | 62571824 | 186767, 235437, 233661 |
| 70859 | 62780271 | 62781443 | 235437 |
| 70860 | 62933055 | 62933914 | 131089 |
| 70861 | 62974112 | 62975419 | 131089 |
| 70862 | 63141399 | 63142557 | |
| 70863 | 63424048 | 63427061 | 184675 |
| 70864 | 63615062 | 63615921 | 102043 |
| 70865 | 64254162 | 64255615 | 126970 |
| 70866 | 64416585 | 64417967 | |
| 70867 | 64753895 | 64755184 | 001497 |
| 70868 | 64814996 | 64817027 | 147065 |
| 70869 | 64820666 | 64822571 | 147065 |
| 70870 | 64862222 | 64865774 | 147065 |
| 70871 | 64871888 | 64872606 | 147065 |
| 70872 | 64886462 | 64889834 | 147065 |
| 70873 | 64893289 | 64894787 | 147065 |
| 70874 | 64925621 | 64926682 | 147065 |
| 70875 | 65948533 | 65949243 | |
| 70876 | 66262994 | 66265312 | |
| 70877 | 66270470 | 66271221 | |
| 70878 | 66319765 | 66321013 | |
| 70879 | 66324937 | 66325734 | |
| 70880 | 66510397 | 66511016 | |
| 70881 | 66515495 | 66516180 | |
| 70882 | 66566460 | 66566885 | |
| 70883 | 66743591 | 66744227 | |
| 70884 | 66755134 | 66756960 | |
| 70885 | 66763012 | 66764592 | 169083 |
| 70886 | 66770484 | 66771661 | 169083 |
| 70887 | 66782853 | 66784288 | 169083 |
| 70888 | 66787849 | 66789537 | 169083 |
| 70889 | 66816585 | 66817544 | 169083 |
| 70890 | 66824894 | 66825907 | 169083 |
| 70891 | 66832023 | 66833023 | 169083 |
| 70892 | 66833417 | 66835169 | 169083 |
| 70893 | 66838974 | 66840216 | 169083 |
| 70894 | 66856273 | 66856825 | 169083 |
| 70895 | 66873851 | 66874882 | 169083 |
| 70896 | 66919932 | 66921096 | 169083 |
| 70897 | 67708331 | 67709157 | |
| 70898 | 67717783 | 67719713 | 181704 |
| 70899 | 67913237 | 67915688 | 130052 |
| 70900 | 67918774 | 67919281 | 130052 |
| 70901 | 68048403 | 68051206 | 090776 |
| 70902 | 68061176 | 68062371 | 090776 |
| 70903 | 68544563 | 68545285 | |
| 70904 | 69353060 | 69354418 | 089289 |
| 70905 | 69653524 | 69654509 | |
| 70906 | 70286942 | 70288949 | 147164 |
| 70907 | 70338137 | 70339269 | 184634 |
| 70908 | 70401149 | 70403034 | |
| 70909 | 70434545 | 70435789 | 169562 |
| 70910 | 70436989 | 70437807 | 169562 |
| 70911 | 70447378 | 70448569 | |
| 70912 | 70473669 | 70474628 | 147130 |
| 70913 | 70502629 | 70504248 | 147140 |
| 70914 | 70584751 | 70587379 | 147133 |
| 70915 | 70751433 | 70754520 | 147162, 147133 |
| 70916 | 71209566 | 71210452 | 204131 |
| 70917 | 71238153 | 71238844 | 204131 |
| 70918 | 71248517 | 71250758 | 204131 |
| 70919 | 71400715 | 71402392 | 102309 |
| 70920 | 71495706 | 71497347 | 198034, 102309 |
| 70921 | 71791955 | 71793326 | 147099 |
| 70922 | 71796322 | 71797338 | |
| 70923 | 71839666 | 71841758 | 067177 |
| 70924 | 73137033 | 73137554 | |
| 70925 | 73157423 | 73158061 | |
| 70926 | 73160575 | 73161141 | |
| 70927 | 73163110 | 73165142 | 225470 |
| 70928 | 73183485 | 73183835 | 230590, 225470, 271199 |
| 70929 | 73461645 | 73463075 | 265727, 271430, 230590 |
| 70930 | 73482020 | 73482822 | 230590 |
| 70931 | 73510138 | 73513520 | 230590 |
| 70932 | 73563694 | 73564287 | |
| 70933 | 73639727 | 73643780 | 147100 |
| 70934 | 73669650 | 73672369 | 147100 |
| 70935 | 73719798 | 73721013 | 147100 |
| 70936 | 73725990 | 73726730 | 147100 |
| 70937 | 73734097 | 73734722 | 147100 |
| 70938 | 73753692 | 73757351 | 147100 |
| 70939 | 73833074 | 73835120 | 131263 |
| 70940 | 74493547 | 74495004 | 094841 |
| 70941 | 76307738 | 76309253 | |
| 70942 | 76340075 | 76340588 | |
| 70943 | 77040877 | 77042016 | 085224 |
| 70944 | 77154465 | 77155821 | 131174 |
| 70945 | 77165673 | 77167060 | 165240, 248503 |
| 70946 | 77359134 | 77360932 | 102144 |
| 70947 | 77908081 | 77910027 | |
| 70948 | 80020622 | 80021132 | 165288 |
| 70949 | 80063115 | 80064206 | 165288 |
| 70950 | 80064576 | 80066434 | 165288 |
| 70951 | 80376383 | 80377954 | 198157 |
| 70952 | 80457032 | 80458071 | 131171, 198157 |
| 70953 | 81588799 | 81589892 | |
| 70954 | 82068562 | 82069216 | |
| 70955 | 83756712 | 83757748 | 259640, 165259 |
| 70956 | 83984447 | 83985148 | |
| 70957 | 84258675 | 84259737 | 155008 |
| 70958 | 84886964 | 84887434 | |
| 70959 | 85247490 | 85249056 | 188419 |
| 70960 | 85294786 | 85295585 | 188419 |
| 70961 | 85624550 | 85625749 | 126733 |
| 70962 | 87815342 | 87816337 | |
| 70963 | 87858979 | 87861203 | |
| 70964 | 93655280 | 93656539 | |
| 70965 | 95687357 | 95689347 | |
| 70966 | 95708028 | 95708740 | |
| 70967 | 95818129 | 95819749 | |
| 70968 | 95939315 | 95941389 | 147202 |
| 70969 | 96415198 | 96415976 | 147202 |
| 70970 | 96654221 | 96657221 | 147202 |
| 70971 | 96700747 | 96701229 | 147202, 236256 |
| 70972 | 96818448 | 96818884 | 147202, 236256 |
| 70973 | 96883662 | 96884995 | 236256 |
| 70974 | 98333191 | 98333812 | |
| 70975 | 98608184 | 98609012 | |
| 70976 | 99869676 | 99870672 | |
| 70977 | 99891037 | 99892113 | 000003 |
| 70978 | 99898695 | 99900194 | 102359 |
| 70979 | 99901248 | 99906431 | 102359 |
| 70980 | 100074844 | 100075766 | 101811 |
| 70981 | 100234932 | 100235967 | 174225 |
| 70982 | 100249403 | 100249982 | |
| 70983 | 100306309 | 100307036 | 188917, 225839 |
| 70984 | 100602109 | 100603981 | 126953 |
| 70985 | 100645597 | 100646930 | 241343, 257529 |
| 70986 | 100661918 | 100664275 | 126945, 102393, 257529 |
| 70987 | 100877647 | 100879118 | 102401, 228275 |
| 70988 | 101186253 | 101187582 | 166432 |
| 70989 | 101853781 | 101855126 | 271147, 270050, 125962 |
| 70990 | 101914449 | 101915138 | 270050, 271147 |
| 70991 | 102508971 | 102510344 | 180964 |
| 70992 | 102617203 | 102617915 | |
| 70993 | 102628572 | 102629144 | |
| 70994 | 102805282 | 102806011 | |
| 70995 | 102806819 | 102807855 | |
| 70996 | 102883510 | 102885201 | 172465, 196507 |
| 70997 | 102940270 | 102943237 | 231154, 123562 |
| 70998 | 103401081 | 103402560 | 176274 |
| 70999 | 103410494 | 103412126 | 123575 |
| 71000 | 103562826 | 103564342 | |
| 71001 | 103810349 | 103811053 | 189108 |
| 71002 | 103903749 | 103905179 | 189108 |
| 71003 | 103907270 | 103909355 | 189108 |
| 71004 | 103994453 | 103995335 | 189108 |
| 71005 | 104098810 | 104100276 | 189108 |
| 71006 | 104146503 | 104147256 | 189108 |
| 71007 | 104166658 | 104167351 | 189108 |
| 71008 | 104212927 | 104213239 | 189108 |
| 71009 | 104261891 | 104263059 | 189108 |
| 71010 | 105213450 | 105213884 | |
| 71011 | 105216783 | 105217658 | |
| 71012 | 105251481 | 105252615 | |
| 71013 | 105282435 | 105283026 | 123561 |
| 71014 | 105288872 | 105289622 | |
| 71015 | 105935595 | 105937574 | 133135 |
| 71016 | 105958877 | 105960036 | 133135 |
| 71017 | 105961740 | 105962424 | 133135 |
| 71018 | 105969229 | 105971147 | 133135 |
| 71019 | 106023469 | 106024997 | 133135 |
| 71020 | 106045368 | 106046506 | 133138 |
| 71021 | 106141661 | 106142287 | 133131 |
| 71022 | 106144434 | 106145553 | 147223, 133131, 165376 |
| 71023 | 106170454 | 106171776 | 133131, 165376 |
| 71024 | 106175239 | 106176345 | 133131 |
| 71025 | 106176399 | 106177383 | 133131 |
| 71026 | 106197531 | 106198729 | 133131 |
| 71027 | 106216195 | 106217146 | 133131 |
| 71028 | 106242586 | 106243960 | 133131 |
| 71029 | 106361192 | 106362328 | 089682 |
| 71030 | 106958707 | 106962085 | 157514 |
| 71031 | 106984906 | 106986630 | 157514 |
| 71032 | 106990617 | 106991450 | 157514 |
| 71033 | 107068791 | 107071351 | 080561 |
| 71034 | 107077467 | 107078411 | 080561 |
| 71035 | 107090188 | 107090794 | 080561 |
| 71036 | 107333368 | 107335729 | 101844, 101843 |
| 71037 | 107518904 | 107519375 | 197565 |
| 71038 | 107550514 | 107551199 | 197565 |
| 71039 | 108297508 | 108298018 | 226958 |
| 71040 | 108779464 | 108781496 | 101888 |
| 71041 | 108975480 | 108976985 | 068366 |
| 71042 | 108983005 | 108983990 | |
| 71043 | 109017788 | 109018413 | |
| 71044 | 109040355 | 109041241 | |
| 71045 | 109073587 | 109075079 | |
| 71046 | 109115217 | 109115889 | |
| 71047 | 109209284 | 109210030 | |
| 71048 | 109245267 | 109246944 | 157600 |
| 71049 | 109247226 | 109248214 | 157600 |
| 71050 | 109279485 | 109280112 | 157600 |
| 71051 | 109324567 | 109326451 | 265584, 157600 |
| 71052 | 109329986 | 109332194 | 157600 |
| 71053 | 109528748 | 109529645 | 101935 |
| 71054 | 109831213 | 109832592 | |
| 71055 | 110595447 | 110596519 | 077279 |
| 71056 | 110596568 | 110597834 | 077279 |
| 71057 | 110703687 | 110704608 | |
| 71058 | 110923965 | 110925586 | 101901 |
| 71059 | 111325848 | 111327619 | 072315 |
| 71060 | 112083387 | 112084174 | 126016 |
| 71061 | 114578998 | 114580843 | |
| 71062 | 114627809 | 114628301 | |
| 71063 | 114793455 | 114797366 | 102024, 271826 |
| 71064 | 115008230 | 115010037 | |
| 71065 | 115084491 | 115085759 | 235244 |
| 71066 | 115125897 | 115126843 | |
| 71067 | 116271788 | 116272691 | |
| 71068 | 116468950 | 116469684 | |
| 71069 | 116509787 | 116510826 | |
| 71070 | 116775865 | 116776689 | |
| 71071 | 116847233 | 116847895 | |
| 71072 | 117125671 | 117126099 | 003096 |
| 71073 | 117250431 | 117251504 | 239500, 003096 |
| 71074 | 117289989 | 117290803 | |
| 71075 | 117479008 | 117482247 | 131725 |
| 71076 | 117760266 | 117760806 | 147251 |
| 71077 | 117789570 | 117790210 | 147251 |
| 71078 | 117858574 | 117859296 | |
| 71079 | 117860265 | 117863004 | 131724 |
| 71080 | 117877435 | 117878369 | 131724 |
| 71081 | 117973053 | 117974300 | 203650 |
| 71082 | 118005379 | 118007317 | 203650 |
| 71083 | 118107761 | 118111563 | 175556 |
| 71084 | 118174887 | 118176455 | |
| 71085 | 118281416 | 118281962 | 250423 |
| 71086 | 118320762 | 118321678 | 227864 |
| 71087 | 118370086 | 118371509 | 101856 |
| 71088 | 118532530 | 118534118 | 077713 |
| 71089 | 118545850 | 118546295 | 077713 |
| 71090 | 118552901 | 118553978 | 077713 |
| 71091 | 118561063 | 118562160 | 077713 |
| 71092 | 118601254 | 118603613 | 005022, 224281 |
| 71093 | 118611375 | 118612856 | |
| 71094 | 118614862 | 118617099 | |
| 71095 | 118636463 | 118638352 | |
| 71096 | 118639685 | 118640497 | |
| 71097 | 118707753 | 118709378 | 077721 |
| 71098 | 118739406 | 118741300 | 186416 |
| 71099 | 118824701 | 118827495 | 125354 |
| 71100 | 118924781 | 118926593 | 198918 |
| 71101 | 118952565 | 118953159 | |
| 71102 | 118986313 | 118987626 | 125351 |
| 71103 | 119004432 | 119006700 | 125356, 125352 |
| 71104 | 119076508 | 119078031 | 101882 |
| 71105 | 119378511 | 119379555 | 233382 |
| 71106 | 119384449 | 119386280 | 177485 |
| 71107 | 119431219 | 119432393 | 125355 |
| 71108 | 119599773 | 119600892 | 005893 |
| 71109 | 119601870 | 119603486 | 005893 |
| 71110 | 119619317 | 119620406 | |
| 71111 | 119646152 | 119647053 | |
| 71112 | 119683155 | 119684909 | 158290 |
| 71113 | 119693965 | 119696183 | 158290 |
| 71114 | 119759199 | 119759658 | 171155 |
| 71115 | 119763244 | 119764349 | 171155 |
| 71116 | 119805491 | 119807089 | |
| 71117 | 119850873 | 119851559 | |
| 71118 | 119886411 | 119887228 | |
| 71119 | 119888591 | 119889688 | |
| 71120 | 120355273 | 120356025 | |
| 71121 | 121699757 | 121700229 | |
| 71122 | 122217711 | 122223839 | |
| 71123 | 122272032 | 122273218 | |
| 71124 | 122317280 | 122319331 | 125675 |
| 71125 | 122474364 | 122475154 | 125675 |
| 71126 | 122724694 | 122725639 | |
| 71127 | 122865596 | 122867269 | 125676 |
| 71128 | 122958503 | 122959676 | |
| 71129 | 122993152 | 122995913 | 101966 |
| 71130 | 123085545 | 123086184 | |
| 71131 | 123087172 | 123087681 | |
| 71132 | 123092866 | 123097152 | 101972, 232412 |
| 71133 | 123220097 | 123220744 | 101972 |
| 71134 | 123619049 | 123619922 | 009694 |
| 71135 | 123727835 | 123729043 | 009694 |
| 71136 | 124338675 | 124340336 | |
| 71137 | 124422475 | 124424248 | |
| 71138 | 127154736 | 127155120 | |
| 71139 | 128063235 | 128063700 | |
| 71140 | 128656470 | 128657783 | 102038 |
| 71141 | 128658987 | 128659565 | |
| 71142 | 128674007 | 128675376 | 122126 |
| 71143 | 128799852 | 128800840 | |
| 71144 | 128882022 | 128882700 | 122121 |
| 71145 | 128910845 | 128911989 | |
| 71146 | 128976505 | 128978147 | 188706 |
| 71147 | 129039498 | 129041074 | 156697, 235189 |
| 71148 | 129090896 | 129092121 | 235189 |
| 71149 | 129298923 | 129300551 | 156709 |
| 71150 | 129402144 | 129403261 | 056277 |
| 71151 | 129816483 | 129817138 | 165675 |
| 71152 | 129847838 | 129848754 | 165675 |
| 71153 | 129861916 | 129862712 | 165675 |
| 71154 | 130036615 | 130037562 | 165675 |
| 71155 | 130533271 | 130534350 | 147255 |
| 71156 | 130574735 | 130575835 | |
| 71157 | 130862216 | 130863916 | 213468 |
| 71158 | 130926088 | 130927824 | 213468 |
| 71159 | 130950703 | 130951638 | 213468 |
| 71160 | 130955726 | 130956963 | 213468 |
| 71161 | 131157053 | 131157818 | 134602 |
| 71162 | 131211666 | 131212363 | 165694 |
| 71163 | 131314722 | 131315899 | |
| 71164 | 131350510 | 131353913 | 232160, 123728 |
| 71165 | 131501888 | 131502786 | 232160 |
| 71166 | 131503519 | 131504202 | 076770, 232160 |
| 71167 | 131535940 | 131536487 | 076770, 232160 |
| 71168 | 131614280 | 131615534 | 076770 |
| 71169 | 131622300 | 131624083 | 076770 |
| 71170 | 131625115 | 131625715 | |
| 71171 | 131666643 | 131667665 | |
| 71172 | 131727467 | 131728961 | |
| 71173 | 133128476 | 133129098 | |
| 71174 | 133940869 | 133942108 | 156500 |
| 71175 | 134048323 | 134049449 | 101928 |
| 71176 | 134082080 | 134083826 | 236091 |
| 71177 | 134185709 | 134186818 | 203950 |
| 71178 | 134458303 | 134458902 | 186376 |
| 71179 | 134477134 | 134478803 | 173275, 186376 |
| 71180 | 134523229 | 134524774 | |
| 71181 | 135055244 | 135056522 | 169446 |
| 71182 | 135241712 | 135242479 | 022267 |
| 71183 | 135257731 | 135259528 | 022267 |
| 71184 | 135266758 | 135268599 | 022267 |
| 71185 | 135271346 | 135271957 | 022267 |
| 71186 | 135272690 | 135273944 | 022267 |
| 71187 | 135332578 | 135333866 | 129680 |
| 71188 | 135341675 | 135342709 | |
| 71189 | 135578472 | 135579939 | 102241 |
| 71190 | 135792380 | 135793510 | 129675 |
| 71191 | 135896827 | 135897476 | |
| 71192 | 136007174 | 136008278 | 234062 |
| 71193 | 136122257 | 136122621 | |
| 71194 | 138021257 | 138021596 | 129682 |
| 71195 | 138177081 | 138177677 | 129682 |
| 71196 | 138276392 | 138278019 | 129682 |
| 71197 | 138282099 | 138283475 | 129682 |
| 71198 | 138369187 | 138370078 | |
| 71199 | 138612437 | 138615535 | 101981 |
| 71200 | 138905684 | 138906679 | 101974 |
| 71201 | 139013159 | 139016838 | 101974 |
| 71202 | 142082505 | 142083599 | |
| 71203 | 142086665 | 142087986 | |
| 71204 | 146262073 | 146263106 | |
| 71205 | 146957072 | 146958010 | |
| 71206 | 146966234 | 146967035 | |
| 71207 | 146971868 | 146974025 | |
| 71208 | 146992290 | 146994617 | 102081, 268066 |
| 71209 | 147445082 | 147446055 | |
| 71210 | 148586222 | 148587136 | 241489, 010404 |
| 71211 | 148603981 | 148605333 | 238039, 241489, 010404 |
| 71212 | 148621893 | 148623171 | 197620, 241769 |
| 71213 | 148710134 | 148710913 | 155984 |
| 71214 | 148712489 | 148713498 | 155984 |
| 71215 | 149105920 | 149107184 | 235703, 197021 |
| 71216 | 149203225 | 149206126 | 235703 |
| 71217 | 149251395 | 149253989 | 235703 |
| 71218 | 149368184 | 149370223 | 235703 |
| 71219 | 149437763 | 149438233 | |
| 71220 | 149461733 | 149462355 | |
| 71221 | 149492527 | 149492937 | |
| 71222 | 149530141 | 149533479 | 013619 |
| 71223 | 149715374 | 149717503 | |
| 71224 | 149736478 | 149738048 | 171100 |
| 71225 | 149738879 | 149739395 | 171100 |
| 71226 | 149860830 | 149863225 | 063601 |
| 71227 | 149883564 | 149884149 | 063601 |
| 71228 | 150017237 | 150017901 | 102181 |
| 71229 | 150066406 | 150068355 | 102181 |
| 71230 | 150134485 | 150135598 | |
| 71231 | 150151609 | 150152630 | 029993 |
| 71232 | 150564324 | 150566484 | 160131 |
| 71233 | 151139047 | 151139756 | 102287 |
| 71234 | 151150153 | 151151167 | |
| 71235 | 151999227 | 152000762 | 147383, 147400 |
| 71236 | 152109893 | 152110797 | 147394 |
| 71237 | 152599416 | 152600648 | 063587 |
| 71238 | 152888027 | 152889105 | |
| 71239 | 152889582 | 152891892 | |
| 71240 | 152900140 | 152900776 | |
| 71241 | 152988238 | 152990998 | 101986, 185825 |
| 71242 | 152991170 | 152993207 | 101986 |
| 71243 | 153058562 | 153061113 | 180879, 067829 |
| 71244 | 153192716 | 153194081 | 089820 |
| 71245 | 153235598 | 153239144 | 177854, 172534 |
| 71246 | 153284305 | 153286374 | 211524, 184216 |
| 71247 | 153305290 | 153306294 | 169057 |
| 71248 | 153322048 | 153322899 | 169057 |
| 71249 | 153362234 | 153363508 | 169057 |
| 71250 | 153587117 | 153587606 | 196924 |
| 71251 | 153596572 | 153598952 | 196924 |
| 71252 | 153599594 | 153600347 | 196924 |
| 71253 | 153606154 | 153608913 | 102119 |
| 71254 | 153625175 | 153628584 | 147403 |
| 71255 | 153656782 | 153657881 | 071553, 197180 |
| 71256 | 153664990 | 153666301 | 203879 |
| 71257 | 153672242 | 153673648 | 071859 |
| 71258 | 153706541 | 153707910 | 196976 |
| 71259 | 153714085 | 153715191 | 102178 |
| 71260 | 153718138 | 153719591 | 126903 |
| 71261 | 153743501 | 153745581 | 071889 |
| 71262 | 153762780 | 153763625 | 160211 |
| 71263 | 153768622 | 153772015 | 073009, 160211 |
| 71264 | 153774808 | 153776489 | 160211, 073009 |
| 71265 | 153958545 | 153959377 | 160219 |
| 71266 | 153990511 | 153992387 | 130826 |
| 71267 | 154021261 | 154021903 | 130830 |
| 71268 | 154026361 | 154029350 | 130830 |
| 71269 | 154032824 | 154034306 | 130830 |
| 71270 | 154216172 | 154216749 | 185010 |
| 71271 | 154254244 | 154256341 | 165775, 185010 |
| 71272 | 154282524 | 154282963 | 165775 |
| 71273 | 154293429 | 154294209 | 214827, 182712 |
| 71274 | 154296375 | 154297004 | 214827, 182712 |
| 71275 | 154298355 | 154300593 | 185515, 182712, 214827 |
| 71276 | 154444083 | 154445697 | 155959 |
| 71277 | 154841523 | 154843055 | 185973 |

[0592] The locations of ODSCs on Chromosome Y are shown in Table 66.

TABLE 66
ODSC Locations on Chromosome Y

| SEQ ID NO. | Start | End | Overlapping Gene(s) |
|---|---|---|---|
| 71278 | 10036363 | 10036795 | 225840 |
| 71279 | 21154432 | 21155381 | 185275, 176728 |

[0593] The locations of ODSCs on the mitochondrial chromosome are shown in Table 67.

TABLE 67
ODSC Locations on the Mitochondrial Chromosome

| SEQ ID NO. | Start | End | Overlapping Gene(s) |
|---|---|---|---|
| 71280 | 2 | 4081 | 211459, 198888, 210077, |
| | | | 209082, 210082, 210049 |
| 71281 | 9228 | 16571 | 210191, 210196, 210195, |
| | | | 210194, 198886, 198840, |
| | | | 198727, 210174, 210176, |
| | | | 198786, 212907, 210184, |
| | | | 210164, 198695, 198938 |

[0594] Further, results show that about 90% of H3K27ac sites have a signaling protein bound to it. 4,279 sites having a threshold of at least 2 signaling proteins that did not also have at least 2 master transcription factors were observed. Additionally, 49,805 sites were identified having H3K27ac or BRD4 or p300 or at least 2 master transcription factors but not at least 2 signaling proteins. These results provide evidence that not all enhancers are part of an ODSC.

### Example 12. Hepatocyte Gene Expression in Insulated Neighborhoods (IN)

[0595] RNA-seq analysis (FPKM<1 and q-value≤0.05 and log 2fc≥1) of hepatocytes stimulated with the compounds of Table 68 was used to classify genes into 3 categories: 1) 10,164 non-expressed genes; 2) 5,904 static genes (expressed and unchanged by treatments), and 3) 7,790 dynamic (wide range of results from only a few compounds).

TABLE 68
Compounds for stimulation of hepatocytes

| ID | Compound Name | Target | Pathway | Action |
|---|---|---|---|---|
| 1 | Simvastatin | HMG-CoA reductase | Metabolic | Inhibitor |
| 2 | Adapin (doxepin) | H1 histamine, α-adrenoreceptors | Histamine receptor signaling | Antagonist |
| 4 | Danazol | ER, AR, Progesteron receptor | Estrogen signaling | Agonist |
| 5 | Nefazodone | HTR2A | Calcium signaling | Antagonist |
| 6 | Rosiglitazone maleate | PPARg | PPAR signaling | Agonist |
| 7 | Sulpiride | D2 dopamine | cAMP signaling | Antagonist |
| 8 | Captopril | MMP2 | Estrogen signaling | Inhibitor |
| 9 | atenolol | ADRB1 | Adrenergic signaling | Antagonist |
| 10 | Ranitidine | H2 histamine receptor | Histamine receptor signaling | Antagonist |
| 11 | Metformin | AMPK | Insulin & AMPK signaling | Activator |
| 12 | imatinib | RTK, Bcr-Abl | PDGFR, ABL signaling | Inhibitor |
| 13 | Papaverine | phosphodiesterase | AMPK signaling | Inhibitor |
| 14 | Amiodarone | Adrenergic receptor β, CYP | Adrenergic signaling | Antagonist |
| 15 | Nitrofurantoin | pyruvate-flavodoxin oxidoreductase | antibiotic | Activator |
| 16 | prednisone | GR | GR signaling | Agonist |
| 17 | Penicillamine(D-) | copper | copper chelation | Chelator |
| 18 | Disopyramide | SCN5A | Adrenergic signaling | Inhibitor |
| 19 | Rifampicin | PXR | PXR | Inhibitor |
| 20 | Benzbromarone | xanthine oxidase, CYP2C9 | uric acid formation | Inhibitor |
| 21 | isoniazid | CYP2C19, CYP3A4 | unknown | Inhibitor |
| 22 | Acetaminophen (paracetamol) | COX1/2 | COX | Inhibitor |
| 23 | Ritonavir | CYP3A4, Pol polyprotein | HIV Transcription | Inhibitor |
| 24 | SGI-1776 | PIM | JAK/STAT signaling | Inhibitor |
| 25 | Valproate | HDAC9, glucuronyl transferase, epoxide | unknown | Inhibitor |
| | | hydrolase | | |
| 26 | Ibuprofen | COX, PTGS2 | COX | Inhibitor |
| 27 | Propylthiouracil | thyroperoxidase | Thyroid hormone synthesis | Inhibitor |
| 28 | rapamycin | mTOR | mTOR signaling | Inhibitor |
| 29 | BIO | GSK-3 | WNT, TGF beta signaling | Inhibitor |
| 30 | ATRA | RXRb, RXRg, RARg | RAR signaling | Agonist |
| 31 | Xav939 | tankyrase | WNT & PARP pathway | Inhibitor |
| 32 | bms189453 | RARB | Nuclear Receptor transcription | Agonist |
| 33 | dorsomorphin | ALK | TGF beta signaling | Inhibitor |
| 34 | BMP2 | BMPR1A | TGF beta signaling | Agonist |
| 35 | BMS777607 | Met | Ras signaling | Inhibitor |
| 36 | bms833923 | SMO | Hedgehog signaling | Antagonist |
| 37 | dmPGE2 | EPR, PGDH | EP receptor signaling | Agonist |
| 38 | MK-0752 | y-secretase | NOTCH signaling | Inhibitor |
| 39 | N-Acetylpurinomycin | SnoN, SKI, SKIL | TGF beta signaling | Modulator |
| 40 | LY 364947 | TGF-β RI, TGFR-I, TβR-I, | TGF beta signaling | Inhibitor |
| | | ALK-5 | | |
| 41 | Enzastaurin | PKC | Epigenetics; TGF-beta/Smad | Inhibitor |
| 42 | DMXAA | Unclear | Tumor necrosis | Inhibitor |
| 43 | BSI-201 | PARP | Cell Cycle/DNA Damage; Epigenetics | Inhibitor |
| 44 | Darapladib | Phospholipase | Others | Inhibitor |
| 45 | Selumetinib | MEK | MAPK/ERK Pathway | Inhibitor |
| 46 | Peramivir (trihydrate) | Influenza Virus | Anti-infection | Inhibitor |
| 47 | Palifosfamide | DNA alkylator/crosslinker | Cell Cycle/DNA Damage | |
| 48 | Evacetrapib | CETP | Others | Inhibitor |
| 49 | Cediranib | VEGFR | Protein Tyrosine Kinase/RTK | Inhibitor |
| 50 | R788 (fostamatinib, disodium | Syk | Protein Tyrosine Kinase/RTK | Inhibitor |
| | hexahydrate) | | | |
| 51 | Torcetrapib | CETP | Others | Inhibitor |
| 52 | Tivozanib | VEGFR | Protein Tyrosine Kinase/RTK | Inhibitor |
| 53 | 17-AAG (Tanespimycin) | HSP | Cell Cycle/DNA Damage Metabolic | Inhibitor |
| | | | Enzyme/Protease | |
| 54 | Zibotentan | Endothelin Receptor | GPCR/G protein | Antagonist |
| 55 | Semagacestat | γ-secretase | Neuronal Signaling Stem Cells/Wnt | Inhibitor |
| 56 | Dalcetrapib | CETP | Others | Inhibitor |
| 57 | Latrepirdine (dihydrochloride) | AMPK | Epigenetics; PI3K/Akt/mTOR | Activator |
| 58 | CMX001 (Brincidofovir) | CMV | Anti-infection | NA |
| 59 | Vicriviroc (maleate) | CCR | GPCR/G protein; | Antagonist |
| | | | Immunology/Inflammation | |
| 60 | Temsirolimus | mTOR | PI3K/Akt/mTOR | Inhibitor |
| 61 | Preladenant | Adenosine Receptor | GPCR/G protein | Antagonist |
| 62 | EVP-6124 (hydrochloride) | nAChR | Membrane Transporter/Ion Channel | Activator |
| | (encenidine) | | | |
| 63 | Bitopertin | GlyT1 | Membrane Transporter/Ion Channel | Inhibitor |
| 64 | Latrepirdine | AMPK | Epigenetics; PI3K/Akt/mTOR | Inhibitor |
| 65 | Vanexerine (dihydrochleride) | Depamine Reuptake Inhibitor | Neuronal Signaling | Inhibitor |
| 66 | CO-1686 (Rociletinib) | EGFR | JAK/STAT Signaling Protein Tyrosine | Inhibitor |
| | | | Kinase/RTK | |
| 67 | Laropiprant (tredaptive) | Prostaglandin Recepter | GPCR/G protein | Antagonist |
| 68 | Bardoxolone | Keap1-Nrf2 | NF-κB | Activator |
| 69 | VX-661 (tezacaptor) | CFTR | Membrane transporter/ion channel | Corrector |
| 70 | INNO-206 (aldoxorubicin) | Topoisomerase | Cell Cycle/DNA Damage | NA |
| 71 | LY404039 (pomaglumetad | mGluR | GPCR/G protein | Inhibitor |
| | methionil (mGlu2/3)) | | | |
| 72 | Perifosine (KRX-0401) | AKT | PI3K/AKT | Inhibitor |
| 73 | Cabozantinib (XL184, BMS- | VEGFR2, MET, Ret, Kit, Flt-1/3/4, | MET | Inhibitor |
| | 907351) | Tie2, and AXL | | |
| 74 | Dacomitinib (PF299804, PF299) | EGFR, ErbB2, ErbB4 | AKT/ERK, HER | Inhibitor |
| 75 | Pacritinib (SB1518) | FLT3, JAK2, TYK2, JAK3, JAK1 | JAK-STAT | Inhibitor |
| 76 | TH-302 (Evofosfamide) | hypoxic regions | Unclear | NA |
| 77 | α-PHP | Unclear | Unclear | NA |
| 78 | LY 2140023 (Pomaglumetad | mGlu₂ & mGlu₃ | Gαi/o protein-dependent | Activator |
| | methionil-LY404039) | | | |
| 79 | TP-434 (Eravacycline) | Antibiotic resistance mechanisms | Tetracycline-specific efflux | Inhibitor |
| 80 | TC-5214 (S-(+)-MecaMylaMine | Nicotinic acetylcholine receptors | Base excision repair and homologous | Antagonist |
| | Hydrochloride) | | recombination repair | |
| 81 | Rolofylline (KW-3902) | A1 adenosine receptor | Unclear | Antagonist |
| 82 | Amigal (Deoxygalactonojirimycin | a-galactosidase | Stress signaling | Inhibitor |
| | hydrochloride) | | | |
| 83 | NOV-002 (oxidized L- | gamma-glutamyl-transpeptidase (GGT) | Glutathione pathway | NA |
| | Glutathione) | | | |
| 84 | bms-986094 (inx-189) | NS5B | Unclear | Inhibitor |
| 85 | TC-5214 (R-Mecamylamine | Nicotinic receptors | Base excision repair and homologous | Antagonist |
| | hydrochloride) | | recombination repair | |
| 86 | Ganaxolone | GBAA receptors | Unclear | Modulator |
| 87 | Irinotecan Hydrochloride | DNA Topol | Unclear | Inhibitor |
| | Trihydrate | | | |
| 88 | TFP | D2R, Calmpdulin | Calmpdulin | Inhibitor |
| 89 | Perphenazine | D2R, Calmpdulin | Calmpdulin | Inhibitor |
| 90 | A3-HCl | CKI, CKII, PKC, PKA | WNT, Hedgehog, PKC, PKA | Inhibitor |
| 91 | FICZ | Aryl hydrocarbon receptor | Aryl hydrocarbon receptor | Agonist |
| 92 | Pifithrin-α | p53 | p53 | Inhibitor |
| 93 | Deferoxamine mesylate | HIF | Hypoxia activated | Inhibitor |
| 94 | Insulin | InsR | IGF-1R/InsR | Activator |
| 95 | Phorbol 12,13-dibutyrate | PKC | PKC | Activator |
| 96 | RU 28318 | MR | Mineralcorticoid receptor | Antagonist |
| 97 | Bryostatin1 | PKC | PKC | Activator |
| 98 | DY 268 | FXR | FXR | Antagonist |
| 99 | GW 7647 | PPARα | PPAR | Agonist |
| 100 | CI-4AS-1 | AR | Androgen receptor | Agonist |
| 101 | T0901317 | LXR | LXR | Agonist |
| 102 | BMP2 | BMPR1A | TGF-B | Activator |
| 103 | 22S-Hydroxycholesterol | LXR | LXR | Inhibitor |
| 104 | CALP1 | Calmodulin | Calmodulin | Activator |
| 105 | CALP3 | Calmodulin | Calmodulin | Activator |
| 106 | Forskolin | Adenylyl cyclase | cAMP related | Activator |
| 107 | Dexamethasene | GR | Glucocorticoid receptor | Activator |
| 108 | IFN-y | IFNGR1/IFNGR2 | JAK/STAT | Activator |
| 109 | TGF-b | TGF-beta Receptor | TGF-B | Activator |
| 110 | TNF-a | TNF-R1/TNF-R2 | NF-kB, MAPK, Apoptosis | Activator |
| 111 | PDGF | Pan-PDGFR | PDGFR | Activator |
| 112 | IGF-1 | IGF-1R | IGF-1R/InsR | Activator |
| 113 | FGF | FGFR | FGFR | Activator |
| 114 | EGF | Pan-ErbB | EGFR | Activator |
| 115 | HGF/SF | c-Met | c-MET | Activator |
| 116 | TCS 359 | FLT3 | Protein Tyrosine Kinase/RTK | Inhibitor |
| 117 | Cobalt chloride | HIF1 | Hypoxia activated | Inducer |
| 118 | CH223191 | AhR | Aryl hydrocarbon receptor | Antagonist |
| 119 | Echinomycin | HIF | Hypoxia activated | Inhibitor |
| 120 | PAF C-16 | MEK | MAPK | Activator |
| 121 | Bexarotene | RXR | RXR | Agonist |
| 122 | CD 2665 | RAR | RAR | Antagonist |
| 123 | Pifithrin-μ | p53 | p53 | Inhibitor |
| 124 | EB1089 | VDR | Vitamin D Receptor | Agonist |
| 125 | BMP4 | TGF-beta | TGF-B | Activator |
| 126 | IWP-2 | Wnt | WNT | Inhibitor |
| 127 | RITA (NSC 652287) | p53 | p53 | Inhibitor |
| 128 | Calcitriol | VDR | Vitamin D Receptor | Agonist |
| 129 | ACEA | CB1 | Cannabinoid receptor | Agonist |
| 130 | Rimonabant | CB1 | Cannabinoid receptor | Antagonist |
| 131 | Otenabant | CB1 | Cannabinoid receptor | Antagonist |
| 132 | DLPC | LRH-1/NR5A2 | LHR-1 | Agonist |
| 133 | LRH-1 antagonist | LRH-1/NR5A3 | LHR-1 | Antagonist |
| 134 | Wnt3a | FRIZZLED | WNT | Activator |
| 135 | Activin | TGF-beta | TGF-B | Activator |
| 136 | Nodal | TGF-beta | TGF-B | Activator |
| 137 | Anti mullerian hormone | TGF-beta | TGF-B | Activator |
| 138 | GDF2 (BMP9) | TGF-beta | TGF-B | Activator |
| 139 | GDF10 (BMP3b) | TGF-beta | TGF-B | Activator |
| 140 | Oxoglaucine | PI3K/Akt | PI3K/AKT | Activator |
| 141 | BMS 195614 | RAR | RAR | Antagonist |
| 142 | LDN193189 | ALK2/3 | TGF-B | Inhibitor |
| 143 | Varenicline Tartrate | AchR | Acetylcholine receptor | Agonist |
| 144 | Histamine | Histamine receptor | Histamine receptor | Activator |
| 145 | Chloroquine phosphate | ATM/ATR | ATM/ATR | Activator |
| 146 | LJI308 | RSK1/2/3 | S6K | Inhibitor |
| 147 | GSK621 | AMPK | AMPK | Activator |
| 148 | STA-21 | STAT3 | JAK/STAT | Inhibitor |
| 149 | SMI-4a | Pim1 | PIM | Inhibitor |
| 150 | AMG 337 | c-Met | c-MET | Inhibitor |
| 151 | Wnt agonist 1 | Wnt | WNT | Activator |
| 152 | PRI-724 | Wnt | WNT | Inhibitor |
| 153 | ABT-263 | Pan-Bcl-2 | BCL2 | Inhibitor |
| 154 | Axitinib | Pan-VEGFR | VEGFR | Inhibitor |
| 155 | Afatinib | Pan-ErbB | EGFR | Inhibitor |
| 156 | Bosutinib | Src | Src | Inhibitor |
| 157 | Dasatinib | Bcr-Abl | ABL | Inhibitor |
| 158 | Masitinib | c-Kit | c-KIT | Inhibitor |
| 159 | Crizotinib | c-Met | c-MET | Inhibitor |
| 160 | PHA-665752 | c-Met | c-MET | Inhibitor |
| 161 | GSK1904529A | IGF-1R/InsR | IGF-1R/InsR | Inhibitor |
| 162 | GDC-0879 | Raf | MAPK | Inhibitor |
| 163 | LY294002 | Pan-PI3K | PI3K/AKT | Inhibitor |
| 164 | OSU-03012 | PDK-1 | PDK-1 | Inhibitor |
| 165 | JNJ-38877605 | c-Met | c-MET | Inhibitor |
| 166 | BMS-754807 | IGF-1R/InsR | IGF-1R/InsR | Inhibitor |
| 167 | TGX-221 | p110b | PI3K/AKT | Inhibitor |
| 168 | Regorafenib | Pan-VEGFR | VEGFR | Inhibitor |
| 169 | Thalidomide | AR | NF-kB | Antagonist |
| 170 | Amuvatinib | PDGFRA | PDGFR | Inhibitor |
| 171 | Etomidate | GABA | GABAergic receptor | Inhibitor |
| 172 | Glimepiride | Potassium channel | Potassium channel | Inhibitor |
| 173 | Omeprazole | Proton pump | Proton pump | Agonist |
| 174 | Tipifarnib | Ras | RAS | Inhibitor |
| 175 | SP600125 | Jnk | MAPK | Inhibitor |
| 176 | Quizartinib | FLT3 | FLT3 | Inhibitor |
| 177 | CP-673451 | Pan-PDGFR | PDGFR | Inhibitor |
| 178 | Pomalidomide | TNF-a | NF-kB | Inhibitor |
| 179 | KU-60019 | ATM kinase | DNA Damage | Inhibitor |
| 180 | BIRB 796 | p38 | MAPK | Inhibitor |
| 181 | RO4929097 | Gamma-secretase | NOTCH | Inhibitor |
| 182 | Hydrocortisone | GR | Glucocorticoid receptor | Agonist |
| 183 | AICAR | AMPK | AMPK | Activator |
| 184 | Amlodipine Besylate | Calcium channel | Calcium channel | Inhibitor |
| 185 | DPH | Bcr-Abl | ABL | Activator |
| 186 | Taladegib | Hedgehog/Smoothened | Hedgehog/Smoothened | Inhibitor |
| 187 | AZD1480 | JAK2 | JAK/STAT | Inhibitor |
| 188 | AST-1306 | Pan-ErbB | EGFR | Inhibitor |
| 189 | AZD8931 | Pan-ErbB | EGFR | Inhibitor |
| 190 | Momelotinib | Pan-Jak | JAK/STAT | Inhibitor |
| 191 | Cryptotanshinone | STAT3 | JAK/STAT | Inhibitor |
| 192 | Bethanechol chloride | AchR | Acetylcholine receptor | Activator |
| 193 | Clozapine | 5-HT | 5-HT | Antagonist |
| 194 | Dopamine | Dopamine | Dopamine receptor | Agonist |
| 195 | Phenformin | AMPK | AMPK | Activator |
| 196 | Mifepristone | GR | Glucocorticoid receptor | Antagonist |
| 197 | GW3965 | LXR | LXR | Agonist |
| 198 | WYE-125132 (WYE-132) | mTOR | mTOR | Inhibitor |
| 199 | Crenolanib | Pan-PDGFR | PDGFR | Inhibitor |
| 200 | PF-04691502 | Pan-Akt | PI3K/AKT | Inhibitor |
| 201 | GW4064 | FXR | FXR | Agonist |
| 202 | Sotrastaurin | PKC | PKC | Inhibitor |
| 203 | Ipatasertib | Pan-Akt | PI3K/AKT | Inhibitor |
| 204 | ARN-509 | AR | Androgen receptor | Inhibitor |
| 205 | T0070907 | PPARg | PPAR | Antagonist |
| 206 | GO6983 | PKC | PKC | Inhibitor |
| 207 | Epinephrine | Adrenergic | Adrenergic receptor | Agonist |
| 208 | Eletriptan | 5-HT | 5-HT | Agonist |
| 209 | Trifluoperazine | Dopamine | Dopamine receptor | Inhibitor |
| 210 | Fexofenadine | Histamine | Histamine receptor | Inhibitor |
| 211 | Corticosterone | MR | Mineralcorticoid receptor | Agonist |
| 212 | Tamibarotene | RAR | RAR | Agonist |
| 213 | Leucine | mTOR | mTOR | Activator |
| 214 | Glycopyrrolate | AchR | Acetylcholine receptor | Antagonist |
| 215 | Tiagabine | GABA | GABAergic receptor | Inhibitor |
| 216 | Fluoxymesterone | AR | Androgen receptor | Agonist |
| 217 | Tamsulosin hydrochloride | Adrenergic | Adrenergic receptor | Antagonist |
| 218 | Ceritinib | ALK | ALK | Inhibitor |
| 219 | GSK2334470 | PDK-1 | PDK-1 | Inhibitor |
| 220 | AZD1208 | Pan-PlM | PIM | Inhibitor |
| 221 | CGK733 | ATM/ATR | DNA Damage | Inhibitor |
| 222 | LDN-212854 | Pan-TGFB | TGF-B | Inhibitor |
| 223 | GZD824 Dimesylate | Bcr-Abl | ABL | Inhibitor |
| 224 | AZD2858 | Pan-GSK-3 | GSK-3 | Inhibitor |
| 225 | FRAX597 | PAK | PAK | Inhibitor |
| 226 | SC75741 | NF-kB | NF-kB | Inhibitor |
| 227 | SH-4-54 | Pan-STAT | JAK/STAT | Inhibitor |
| 228 | HS-173 | p110a | PI3K/AKT | Inhibitor |
| 229 | K02288 | Pan-TGFB | TGF-B | Inhibitor |
| 230 | EW-7197 | Pan-TGFB | TGF-B | Inhibitor |
| 231 | Decernotinib | Pan-Jak | JAK/STAT | Inhibitor |
| 232 | MI-773 | p53 | p53 | Inhibitor |
| 233 | PND-1186 | FAK | FAK | Activator |
| 234 | Kartogenin | SMAD4/5 | TGF-B | Activator |
| 235 | Picropodophyllin | IGF-1R | IGF-1R/InsR | Inhibitor |
| 236 | AZD6738 | ATR | ATM/ATR | Inhibitor |
| 237 | Smoothened Agonist | Hedgehog/Smoothened | Hedgehog/Smoothened | Agonist |
| 238 | Erlotinib | EGFR/ErbB1 | EGFR | Inhibitor |
| 239 | MHY1485 | mTOR | mTOR | Activator |
| 240 | SC79 | Pan-Akt | PI3K/AKT | Activator |
| 241 | meBIO | AhR | Aryl hydrocarbon receptpr | Agonist |
| 242 | Huperzine | AchE | Acetylcholine receptor | Inhibitor |
| 243 | BGJ398 | Pan-FGFR | FGFR | Inhibitor |
| 244 | Netarsudil | ROCK | ROCK | Inhibitor |
| 245 | Acetycholine | AchR | Acetylcholine receptor | Agonist |
| 246 | Purmprphamine | Hedgehog/Smoothened | Hedgehog/Smoothened | Agonist |
| 247 | LY2584702 | p70 S6K | S6K | Inhibitor |
| 248 | Dorsomorphin | AMPK | AMPK | Inhibitor |
| 249 | Glasdegib (PF-04449913) | Hedgehog/Smoothened | Hedgehog/Smoothened | Inhibitor |
| 250 | LDN193189 | Pan-TGFB | TGF-B | Inhibitor |
| 251 | Oligpmycin A | ATPase | ATP channel | Inhibitor |
| 252 | BAY 87-2243 | HIF1 | Hypoxia activated | Inhibitor |
| 253 | SIS3 | SMAD3 | TGF-B | Inhibitor |
| 254 | BDA-366 | Bcl-2 | BCL2 | Antagonist |
| 255 | XMU-MP-1 | MST1/2 | Hippo | Inhibitor |
| 256 | Semaxinib | Pan-VEGFR | VEGFR | Inhibitor |
| 257 | BAM7 | Bcl-2 | BCL2 | Activator |
| 258 | GDC-0994 | Erk | MAPK | Inhibitor |
| 259 | SKL2001 | Wnt | WNT | Agonist |
| 260 | Merestinib | c-Met | c-MET | Inhibitor |
| 261 | APS-2-79 | MEK | MAPK | Antagonist |
| 262 | NSC228155 | Pan-ErbB | EGFR | Activator |
| 263 | 740 Y-P | Pan-PI3K | PI3K/AKT | Activator |
| 264 | b-Estradipl | ER | ER | Activator |
| 265 | Glucose | GLUTs | metabolic/glycolysis | Activator |
| 266 | Transferrin | Transferrin Receptor | Iron transport | Activator |
| 267 | AM 580 | RAR | RAR | Activator |

[0596] AADAC, ABLIM3, ACAA2, ACADVL, ACAT2, ACKR2, ACMSD, ACSL1, ACSL5, ACSM2A, ACSS2, ACTA1, ACTA2, ADM, ADRB2, AFAP1L1, AGAP1-IT1, AGPAT2, AGRN, AGTR1, AHSG, AKAP12, AKR1C6P, AKR1C8P, ALAS1, ALDH1L1, ALDH8A1, ALPK2, AMACR, ANGPTL4, ANKRD1, ANKRD29, ANO1, ANP32AP1, ANXA1, ANXA3, APOA4, ARG1, ARHGEF26, ARL14, ARL2, ARL4A, ARL4D, ARRDC3, ARTS, ATP2B4, ATP5EP2, ATP6V0D2, B4GALNT1, BAG3, BCAS1, BCAT2, BCL2A1, BIRC3, BLOC1S1-RDH5, BMF, BMP2, BNIP3, BRF2, C10orf32-ASMT, C10orf35, C18orf32, C19orf73, C19orf80, C1orf162, C1orf220, C1orf226, C1orf53, C2orf54, C2orf82, C4orf19, C8orf4, CA12, CA2, CACHD1, CAMK2G, CAMKMT, CAPN13, CAT, CBLB, CCBL1, CCL2, CCL26, CCL5, CD109, CDC6, CEBPD, CES4A, CHAD, CHKB-AS1, CHST13, CHST9, CIDEC, CITED2, CLDN14, CLDN2, CLDN4, CLDND2, CLRN3, COL1A1, COX7A1, CPA4, CPS1, CPT1A, CPT2, CRACR2B, CREB3L3, CRIP3, CRYAB, CRYM, CSDC2, CTDSP1, CUX2, CX3CL1, CXCL1, CXCL10, CXCL11, CXCL2, CXCL3, CXCL8, CYB561A3, CYP1A1, CYP1A2, CYP1B1, CYP21A2, CYP2C19, CYP2C9, CYP3A4, CYP3A43, CYP3A5, CYP3A7, CYP8B1, CYTH1, DEDD2, DHRS2, DNAJB1, DNAJC12, DNAJC22, DRAIC, DUOX2, DUOXA2, EAF2, ECH1, ECM2, EDN1, EFNA1, ELOVL2, EMP2, ENO2, ENO3, ENTPD7, EPB41L1, EPSTI1, ERICH5, ERRFI1, ETFDH, ETNK2, ETNPPL, F2RL2, FABP1, FABP3, FADS1, FADS2, FAHD2B, FAM134B, FAM13A, FAM151A, FAM162A, FAM198A, FAM219A, FAM229A, FAM25A, FAM26F, FAM83D, FASN, FCAMR, FDPS, FGF2, FGF21, FGFR3, FHIT, FKBP1AP1, FKBP5, FLJ44635, FLNA, FLNC, FLRT3, FLVCR2, FMO1, FOSL1, FSTL3, FXYD2, G0S2, G6PC, GADD45B, GAL3ST1, GBP4, GDF15, GEM, GHR, GLA, GLYCTK-AS1, HAO2, HBEGF, HGD, HHAT, HIST1H2BG, HIST1H4E, HIST3H2A, HKDC1, HLA-G, HMGCR, HMGCS1, HMGCS2, HMOX1, HOGA1, HPGD, HRCT1, HS1BP3-IT1, HSD17B7, HSDL2, HSPA1A, HSPA1B, HSPA5, HSPA6, HSPB1, HSPB8, HSPH1, HYAL3, IPI1, IER3, IFI27, IFI35, IFIT1, IFIT2, IFITM1, IFT27, IGFBP1, IGFBP3, IGFBP6, IGSF23, IL17RB, IL18, IL23A, IL36B, INHBA, INHBE, INSIG1, IQCD, IRF5, ISM1-AS1, ITGA3, ITGA5, ITGA7, ITGB6, IVL, KANK1, KCNJ8, KLF15, KLF2, KLF9, KRT7, KRT80, KRT81, KSR2, LAMA3, LAMB1, LAMB3, LBH, LDHA, LDLRAD4, LECT2, LGALS1, LGALS4, LGALS9, LIF, LINC00152, LINC00261, LINC00704, LINC00880, LINC01023, LINC01151, LINC01214, LINC01336, LINC01554, LINC01587, LMCD1, LOC100133985, LOC100507002, LOC101927686, LOC101928505, LOC101929427, LOC101929613, LOC102467080, LOC102724450, LOC153910, LOC344887, LOC728040, LOXL4, LPAL2, LPIN2, LRCOL1, LRRN2, LTBP1, LUCAT1, LYPD1, LYPLAL1-AS1, LYZ, MAFB, MAFF, MANF, MAGA, MAP3K8, MATN2, MCAM, MCM7, METRN, MGC12916, MLLT11, MMP12, MMP24, MMP3, MOGAT2, MPPED1, MPV17L, MSC, MSHS-SAPCD1, MSMO1, MTMR11, MTRNR2L1, MTRNR2L10, MTRNR2L3, MTRNR2L6, MTRNR2L9, MUC3A, MVD, MXRA8, MYH16, MYL9, MYOF, MYOM1, NAP1L2, NBPF13P, NCF2, NCR3LG1, NDRG1, NEURL3, NFASC, NFATC4, NMB, NPAS2, NPHP3-ACAD11, NPPB, NR6A1, NRARP, NRAV, NRBP2, NTN1, NUAK2, NUCB2, OAS1, OAS2, OAS3, OASL, OSGIN1, OTUD3, OXTR, P4HA1, PALMD, PAM, PAPLN, PBXIP1, PCK1, PCSK9, PDGFB, PDGFRB, PDIA4, PDK1, PDK4, PDLIM7, PDZK1, PELI3, PER1, PFDN4, PFKFB4, PGM2, PHLDA1, PID1, PIGR, PLCXD1, PLIN2, PLIN4, PLK2, PLOD1, PNPLA5, POR, PPAP2B, PPL, PPM1L, PPP1R3C, PRG4, PRR15, PRSS23, PSD3, PSORS1C3, PTTG1, PWAR5, PYCARD, QPRT, RAB17, RAPGEF4, RARB, RASD1, RBP5, RCL1, RGCC, RGS2, RHCG, RHOB, RHOF, RMRP, RN7SK, RN7SL1, RN7SL2, RNA5S9, RND1, RNF139-AS1, RNU12, RNU2-2P, RNU4-1, RNU4-2, RNUSA-1, RNUSB-1, RNUSE-1, RNVU1-15, RORA, RPL17-C18orf32, RPL18A, RPL23P8, RPPH1, RPS15, RPSAP58, RRAD, RSAD2, RTP3, S100A2, S100A3, S100A6, SAA3P, SALL1, SCARA3, SCPEP1, SCUBE1, SDCBP2, SDS, SEC14L4, SELM, SEMA7A, SERF2-C150RF63, SERPINA12, SERPINB9, SERPINB9P1, SERPINE2, SESN3, SFN, SFRP4, SGK2, SKP1P2, SLC16A13, SLC16A3, SLC17A2, SLC1A2, SLC22A25, SLC25A20, SLC25A30, SLC25A42, SLC25A47, SLC2A2, SLC37A4, SLC38A2, SLC51B, SLC6A1, SLC6A6, SLC7A11, SLC7A5, SLCO2B1, SMAP2, SMIM1, SMN1, SMN2, SMOC1, SNAI2, SNCG, SNHG9, SNX29, SOCS2, SORBS1, SORBS2, SORL1, SOX9, SPAG4, SPNS2, SPOCD1, SPP1, SPRR1A, SPRR3, SPRY1, SPRY2, STAMBPL1, STK39, STOM, STX16-NPEPL1, SUGCT, SULT2A1, SUSD1, SUSD3, SYTL2, SYTL4, SYTL5, TAT, TAT-AS1, TBC1D8, TCP10L, TDO2, TEAD2, TGFB2, TGFBI, TGFBR3, THBS1, THRSP, TIPARP, TMC7, TMCC1, TMEM135, TMEM138, TMEM164, TMEM217, TMEM37, TMEM45A, TMEM97, TMSB4X, TNC, TNFAIP2, TNFAIP3, TNFRSF21, TNFSF11, TNS2, TOX3, TP53INP1, TPRG1-AS1, TRAF5, TREML3P, TRIM31, TRIM55, TRPM8, TSC22D3, TSKU, TSPAN5, TSPAN7, TSPEAR-AS1, TSPEAR-AS2, TTYH3, TUBA1A, TUBA4A, TXNIP, UBE2F-SCLY, UBXN11, UCHL1, UGCG, UNC5CL, UNC93A, USP18, USP2, VEGFB, VIM, VLDLR, VWCE, WDR54, WNT11, XAF1, YPEL2, ZBTB16, ZBTB37, ZC3HAV1L, ZMIZ1-AS1, ZMYND8, ZNF837, ZXDB, A1BG, A1CF, A2M, A4GALT, MAS, AAED1, AAK1, AAMDC, MRS, AARS2, AASDHPPT, AASS, MTF, ABAT, ABCA1, ABCA6, ABCA7, ABCA8, ABCB1, ABCB11, ABCB4, ABCC1, ABCC10, ABCC2, ABCC3, ABCC4, ABCC5, ABCC6, ABCC6P1, ABCC9, ABCD1, ABCD3, ABCE1, ABCF2, ABCG1, ABCC5, ABCG8, ABHD10, ABHD11, ABHD13, ABHD14B, ABHD15, ABHD17A, ABHD17B, ABHD17C, ABHD2, ABHD3, ABHD4, ABHD5, ABHD6, ABHD8, ABI1, ABI2, ABL1, ABL2, ABLIM1, ABLIM2, ABR, ABRACL, ABTB1, ABTB2, ACACA, ACACB, ACAD11, ACAD9, ACADSB, ACAP2, ACAP3, ACBD4, ACBD5, ACBD6, ACID, ACE2, ACER2, ACHE, ACKR3, ACLY, ACOT12, ACOT13, ACOT4, ACOT7, ACOT8, ACOX2, ACOX3, ACSF2, ACSF3, ACSL3, ACSM2B, ACSM3, ACSM5, ACSS1, ACTB, ACTG1, ACTN1, ACTN4, ACTR10, ACTR1A, ACTR2, ACTR3, ACTR5, ACTR6, ACTR8, ACTRT3, ACVR1, ACVR1B, ACVR2A, ADA, ADAM10, ADAM19, ADAM1A, ADAM8, ADAMTS1, ADAMTS10, ADAMTS17, ADAMTS9, ADAMTSL3, ADAMTSL4-AS1, ADAMTSL5, ADARB1, ADAT2, ADAT3, ADCK1, ADCK2, ADCK3, ADCK5, ADCY6, ADCY9, ADD3, ADGRG1, ADGRG6, ADGRL2, ADH1A, ADH1B, ADH1C, ADH4, ADH6, ADHFE1, ADI1, ADIPOR2, ADIRF, ADK, ADM2, ADPGK, ADPRH, ADPRHL2, ADRA1A, ADRA1B, ADSL, ADSS, ADSSL1, AEBP2, AEN, AFAP1, AFF1, AFF3, AFF4, AFG3L1P, AFM, AFMID, AFP, AGAP1, ACAP3, AGBL5, AGER, AGFG1, AGFG2, AGK, AGL, AGMO, AGO1, AGO4, AGPAT3, AGPAT9, AGPS, AGT, AGTPBP1, AGTRAP, AGXT, AGXT2, AHCYL2, AHDC1, AHI1, AHR, AHSA1, AIM1, AIM1L, AIMP2, AK1, AK2, AK4, AK6, AK9, AKAP1, AKAP11, AKAP13, AKAP2, AKAP7, AKAP9, AKNA, AKR1B1, AKR1B10, AKR1B15, AKR1C1, AKR1C2, AKR1C3, AKR1C4, AKR1D1, AKR7A3, AKT1, AKT1S1, AKT3, ALAD, ALCAM, ALDH16A1, ALDH18A1, ALDH1A1, ALDH1B1, ALDH2, ALDH3A1, ALDH3A2, ALDH4A1, ALDH5A1, ALDH6A1, ALDOA, ALDOB, ALG12, ALG14, ALKBH2, ALKBH3, ALKBH6, ALKBH7, ALKBH8, ALMS1, ALOX12-AS1, ALOXE3, ALPK1, ALPK3, ALPL, ALS2, AMBP, AMBRA1, AMDHD2, AMHR2, AMIGO1, AMMECR1, AMN, AMN1, AMOT, AMOTL1, AMOTL2, AMPD2, AMPD3, AMT, AMY2B, AMZ2, ANAPC1, ANAPC11, ANAPC4, ANG, ANGEL1, ANGEL2, ANGPTL3, ANKEF1, ANKFY1, ANKHD1, ANKMY1, ANKMY2, ANKRA2, ANKRD11, ANKRD13A, ANKRD13B, ANKRD13D, ANKRD16, ANKRD17, ANKRD2, ANKRD24, ANKRD26, ANKRD28, ANKRD30BL, ANKRD32, ANKRD33B, ANKRD37, ANKRD39, ANKRD42, ANKRD44, ANKRD50, ANKRD52, ANKRD54, ANKRD9, ANKS1A, ANKS4B, ANKS6, ANKZF1, ANO10, ANO5, ANO6, ANP32A, ANP32E, ANPEP, ANXA10, ANXA13, ANXA2, ANXA2P1, ANXA2P2, ANXA2P3, ANXA8L1, ANXA9, AOC2, AOC3, AOX1, AP1B1, AP1G1, AP1G2, AP1S3, AP2A1, AP2A2, AP3B1, AP3M1, AP3S2, AP4B1, AP4E1, AP5B1, AP5M1, AP5S1, APAF1, APBA1, APBB1, APBB1IP, APBB2, APBB3, APC, APCS, APEX2, APOA1, APOA2, APOA5, APOB, APOBEC3C, APOBEC3G, APOC1, APOC1 P1, APOC2, APOC3, APOC4, APOE, APOF, APOH, APOL1, APOL2, APOL3, APOL6, APOM, APPBP2, APPL2, APRT, AQP3, AQP4, AQP7, AQP7P3, AQP9, AQR, AR, ARAP2, AREL1, ARF3, ARF5, ARF6, ARFGAP3, ARFGEF1, ARFGEF2, ARG2, ARHGAP10, ARHGAP12, ARHGAP18, ARHGAP24, ARHGAP26, ARHGAP27, ARHGAP29, ARHGAP32, ARHGAP35, ARHGAP39, ARHGAP42, ARHGAP5-AS1, ARHGDIA, ARHGDIB, ARHGEF1, ARHGEF10L, ARHGEF11, ARHGEF12, ARHGEF16, ARHGEF17, ARHGEF18, ARHGEF2, ARHGEF28, ARHGEF40, ARHGEF5, ARID1B, ARID2, ARID4A, ARID5A, ARID5B, ARIH1, ARL10, ARL13B, ARL14EP, ARL15, ARL4C, ARL5B, ARL6, ARL6IP1, ARL6IP4, ARL6IP5, ARL6IP6, ARMC1, ARMC5, ARMC7, ARMC8, ARMC9, ARMCX2, ARMCX4, ARMCX5, ARMCX5-GPRASP2, ARMT1, ARNTL, ARNTL2, ARPC1B, ARPP19, ARRDC1, ARRDC2, ARRDC4, ARSA, ARSB, ARSJ, ARSK, ART4, ARVCF, AS3MT, ASAP1, ASAP2, ASAP3, ASB13, ASB16-AS1, ASB9, ASCC1, ASCC3, ASCL1, ASF1A, ASGR2, ASH1L, ASH2L, ASL, ASNS, ASNSD1, ASPA, ASPDH, ASPG, ASPH, ASRGL1, ASTN2, ASUN, ASXL1, ASXL2, ATAD2, ATAD2B, ATAD3A, ATAD3B, ATAT1, ATE1, ATF2, ATF3, ATF4, ATF5, ATF6, ATF6B, ATF7IP, ATF7IP2, ATG10, ATG13, ATG14, ATG16L2, ATG2A, ATG2B, ATG3, ATG4C, ATG4D, ATG7, ATG9A, ATHL1, ATIC, ATL2, ATM, ATMIN, ATN1, ATOH8, ATOX1, ATP10D, ATP11A, ATP11C, ATP13A1, ATP13A2, ATP13A3, ATP1A1, ATP1B1, ATP1B3, ATP2A2, ATP2B1, ATP2B2, ATP2C1, ATP5D, ATP5E, ATP5G3, ATP5H, ATP5I, ATP5L, ATP6V1E1, ATP6V1H, ATP7A, ATP7B, ATP8B1, ATP9A, ATP9B, ATPIF1, ATR, ATRIP, ATRN, ATRX, ATXN1, ATXN10, ATXN2, ATXN7, ATXN7L2, ATXN7L3, ATXN7L3B, AURKA, AURKAIP1, AURKC, AUTS2, AVEN, AVPI1, AXL, AZGP1, B2M, B3GALT6, B3GAT1, B3GAT3, B3GNT3, B3GNT9, B3GNTL1, B4GALT5, B4GALT6, B4GAT1, B9D2, BMT, BACH1, BACH2, BAD, BAG2, BAG5, BAHCC1, BAIAP2, BAIAP2-AS1, BAIAP2L1, BAMBI, BANP, BATF, BATF2, BAZ1A, BAZ1B, BBC3, BBOX1, BBS1, BBS10, BBS2, BBS5, BBS7, BBS9, BBX, BCAM, BCAR1, BCAR3, BCAS2, BCAS3, BCAS4, BCHE, BCKDHB, BCKDK, BCL2, BCL2L1, BCL2L10, BCL2L11, BCL3, BCL6, BCL7A, BCL7B, BCL7C, BCL9, BCL9L, BCO2, BCOR, BCORL1, BCR, BDH1, BDKRB2, BDP1, BEND3, BET1, BEX2, BEX5, BHLHA15, BHLHB9, BHLHE40, BHLHE41, BHMT, BICC1, BICD1, BIK, BIN1, BIRC6, BIVM, BIVM-ERCC5, BLCAP, BLMH, BLNK, BLOC1S1, BLOC1S3, BLOC1S4, BLZF1, BMP1, BMP2K, BMP4, BMPR1A, BMPR2, BMS1, BMS1P20, BNIP1, BNIP3L, BOD1, BOK, BOLA1, BOP1, BPTF, BRAF, BRAT1, BRD3, BRD4, BRD7, BRD8, BRE, BRF1, BRI3, BRI3BP, BRMS1, BRMS1L, BRPF3, BRWD3, BSCL2, BST1, BTAF1, BTBD11, BTBD19, BTBD2, BTBD3, BTBD9, BTD, BTG1, BTG2, BTG3, BTN2A2, BTN3A1, BTN3A2, BTN3A3, BTRC, BZW1, C10orf10, C10orf11, C10orf12, C10orf54, C10orf76, C11orf24, C11orf30, C11orf49, C11orf54, C11orf74, C11orf84, C11orf91, C11orf95, C11orf96, C11orf98, C12orf10, C12orf4, C12orf45, C12orf57, C12orf60, C12orf75, C12orf76, C14orf105, C14orf159, C14orf169, C14orf2, C14orf28, C14orf37, C14orf79, C14orf80, C14orf93, C15orf39, C15orf41, C15orf48, C15orf52, C15orf57, C16orf45, C16orf46, C16orf52, C16orf59, C16orf62, C16orf86, C16orf87, C16orf91, C16orf95, C17orf100, C17orf51, C17orf58, C17orf59, C17orf62, C17orf75, C17orf80, C17orf85, C17orf89, C17orf96, C17orf97, C18orf21, C18orf25, C19orf12, C19orf24, C19orf48, C19orf54, C19orf60, C19orf68, C19orf70, C1GALT1, C1QBP, C1QTNF3, C1QTNF3-AMACR, C1QTNF6, C1R, C1RL-AS1, C1S, C1orf105, C1orf112, C1orf115, C1orf122, C1orf159, C1orf168, C1orf228, C1orf35, C1orf54, C2, C20orf194, C20orf27, C20orf96, C21orf2, C21orf59, C21orf91, C22orf46, C2CD2, C2CD2L, C2CD3, C2CD5, C2orf42, C2orf72, C2orf74, C3, C3P1, C3orf18, C3orf33, C3orf52, C3orf58, C3orf62, C4A, C4BPA, C4BPB, C4orf27, C4orf46, C4orf48, C5, C5orf24, C5orf28, C5orf42, C5orf46, C5orf51, C5orf56, C5orf63, C6, C6orf106, C6orf136, C6orf141, C6orf203, C6orf226, C6orf47, C6orf48, C6orf52, C6orf62, C7orf25, C7orf26, C7orf43, C7orf49, C7orf50, C8A, C8B, C8G, C8orf37, C8orf46, C8orf58, C8orf59, C8orf82, C9, C9orf142, C9orf16, C9orf172, C9orf3, C9orf41, C9orf64, C9orf72, C9orf85, C9orf89, C9orf91, CA5A, CAAP1, CABIN1, CABLES1, CABLES2, CABYR, CACNA1D, CACNA1H, CACYBP, CAD, CADM1, CADM4, CADPS2, CAHM, CALCA, CALCOCO1, CALD1, CALM2, CAMK1D, CAMK2B, CAMK2D, CAMSAP2, CAND1, CANT1, CAP2, CAPG, CAPN1, CAPN15, CAPN3, CAPN5, CAPN7, CAPN8, CAPNS1, CAPRIN1, CAPRIN2, CAPZB, CARD10, CARD16, CARD6, CARD8, CARHSP1, CASC10, CASC19, CASD1, CASK, CASKIN2, CASP1, CASP3, CASP6, CASP9, CASZ1, CATSPER3, CAV1, CAV2, CBFA2T2, CBLC, CBR1, CBR3, CBR3-AS1, CBR4, CBX4, CBX5, CBX6, CBX7, CC2D1A, CC2D1B, CCAR2, CCAT1, CCDC101, CCDC102A, CCDC106, CCDC107, CCDC112, CCDC113, CCDC117, CCDC12, CCDC120, CCDC124, CCDC126, CCDC127, CCDC137, CCDC138, CCDC14, CCDC146, CCDC149, CCDC167, CCDC17, CCDC28A, CCDC28B, CCDC34, CCDC43, CCDC50, CCDC58, CCDC59, CCDC61, CCDC64, CCDC66, CCDC69, CCDC71L, CCDC85B, CCDC85C, CCDC86, CCDC88A, CCDC88B, CCDC91, CCDC92, CCDC94, CCHCR1, CCL15, CCL15-CCL14, CCL16, CCL20, CCM2, CCNB1, CCNB1IP1, CCND1, CCNE1, CCNF, CCNG1, CCNG2, CCNJ, CONY, CCP110, CCPG1, CCS, CCSAP, CCT2, CCT3, CD14, CD177, CD1D, CD24, CD320, CD44, CD46, CD55, CD58, CD68, CD81, CDA, CDAN1, CDC14B, CDC23, CDC25B, CDC26, CDC37, CDC37L1, CDC37L1-AS1, CDC40, CDC42BPA, CDC42EP1, CDC42EP2, CDC42EP3, CDC42EP4, CDC42SE2, CDC5L, CDC7, CDC73, CDCA7L, CDH1, CDH2, CDH24, CDH6, CDHR2, CDHR5, CDIP1, CDK12, CDK13, CDK14, CDK17, CDK18, CDK19, CDK20, CDK2AP1, CDK2AP2, CDK4, CDK5, CDK5RAP1, CDK5RAP2, CDK6, CDK8, CDKAL1, CDKL1, CDKL3, CDKN1A, CDKN2A, CDKN2AIPNL, CDKN2B, CDKN2C, CDKN2D, CDKN3, CDO1, CDON, CDPF1, CDRT4, CDYL2, CEACAM1, CEACAM19, CEBPA, CEBPA-AS1, CEBPB, CEBPG, CEBPZ, CECR2, CELF6, CELSR1, CELSR2, CENPB, CENPBD1, CENPC, CENPH, CENPO, CENPT, CENPV, CENPW, CEP112, CEP120, CEP131, CEP152, CEP162, CEP164, CEP170B, CEP192, CEP250, CEP290, CEP295, CEP350, CEP57, CEP57L1, CEP72, CEP78, CEP83, CEP85, CEP85L, CEP97, CERS4, CERS6, CES1P1, CES3, CETN3, CFAP44, CFAP97, CFB, CFHR1, CFHR2, CFHR3, CFHR4, CFHR5, CFI, CGGBP1, CGN, CGNL1, CH17-340M24.3, CHAC1, CHAF1A, CHAMP1, CHCHD1, CHCHD10, CHCHD2, CHCHD3, CHCHD5, CHCHD6, CHCHD7, CHD1, CHD2, CHD4, CHD6, CHDH, CHEK2, CHI3L1, CHI3L2, CHIC1, CHIC2, CHMP1B, CHMP3, CHMP4C, CHMP6, CHMP7, CHN1, CHN2, CHORDC1, CHP1, CHRD, CHRDL2, CHRNB1, CHST12, CHST14, CIB2, CIC, CIDEB, CIRBP, CIRH1A, CISD3, CISH, CITED4, CIZ1, CKAP2, CKAP4, CKAP5, CKB, CKLF, CKS1B, CKS2, CLASP1, CLASP2, CLCN2, CLCN4, CLCN5, CLCN6, CLDN1, CLDN12, CLDN16, CLDN23, CLDN3, CLDN7, CLDN9, CLEC16A, CLEC2B, CLGN, CLIC1, CLIP1, CLIP2, CLIP3, CLK1, CLK2, CLOCK, CLPB, CLPTM1, CLPX, CLSTN1, CLSTN3, CLTC, CLTCL1, CLUAP1, CLUHP3, CMAS, CMBL, CMC1, CMC2, CMIP, CMPK2, CMSS1, CMTM3, CMTM7, CMTM8, CMTR1, CMTR2, CNDP1, CNDP2, CNKSR1, CNKSR3, CNN1, CNN2, CNN3, CNNM1, CNNM2, CNNM3, CNOT1, CNOT10, CNOT11, CNOT2, CNOT6L, CNOT8, CNP, CNTLN, CNTN3, CNTNAP2, CNTRL, CNTROB, COA1, COA4, COA6, COAT, COBL, COBLL1, COG1, COG2, COG5, COG6, COL16A1, COL18A1, COL27A1, COL5A2, COL5A3, COL7A1, COLQ, COMMD1, COMMD10, COMMD2, COMMD3, COMMD3-BMI1, COMMD4, COMMD6, COMTD1, COPB1, COPG2, COPS4, COPZ2, COQ10A, COQ10B, COQ5, COQ7, CORO1C, CORO2A, COR07, COTL1, COX14, COX17, COX4I1, COX5A, COX5B, COX6A1, COX6A2, COX6B1, COX6C, COX7A2, COX7B, COX7C, COX8A, CP, CPB2, CPE, CPEB3, CPEB4, CPED1, CPM, CPN2, CPNE2, CPNE8, CPPED1, CPSF2, CPSF3, CPSF4, CPTP, CRADD, CRBN, CRCT1, CREB1, CREB3L2, CREB5, CREBBP, CREBRF, CREBZF, CREG1, CRIM1, CRIP1, CRIP2, CRIPAK, CRIPT, CRNDE, CRNKL1, CROCC, CROT, CRP, CRTC1, CRTC3, CRY2, CRYAA, CRYBB2P1, CRYBB3, CRYBG3, CRYGS, CS, CSE1L, CSF1, CSNK1G1, CSPG5, CSPP1, CSRNP2, CSRP1, CSRP2, CSRP2BP, CST3, CST6, CSTA, CSTB, CSTF1, CSTF2, CSTF2T, CTBP1, CTBP1-AS2, CTBP2, CTC-338M12.4, CTC1, CTCF, CTDSP2, CTGF, CTH, CTIF, CTNNA1, CTNNBL1, CTNS, CTPS1, CTPS2, CTSB, CTSF, CTSH, CTSK, CTSL, CTSS, CTTN, CTTNBP2NL, CTU1, CTXN1, CUEDC1, CUEDC2, CUL1, CUL2, CUL4B, CUL5, CUL7, CUL9, CUTC, CUX1, CWC27, CWF19L2, CXCL6, CXXC5, CXorf40A, CXorf57, CYB561D1, CYB561D2, CYB5A, CYB5D1, CYB5R3, CYB5RL, CYGB, CYP11A1, CYP21A1P, CYP27A1, CYP2A6, CYP2B6, CYP2C18, CYP2C8, CYP2D6, CYP2D7, CYP2E1, CYP2R1, CYP39A1, CYP4A11, CYP4F11, CYP4F12, CYP4F2, CYP4F22, CYP4F3, CYP51A1, CYP7B1, CYR61, CYTH3, DAAM1, DAB2, DAB2IP, DAG1, DANCR, DAO, DAPK1, DAPK2, DARS2, DAZAP1, DBF4B, DBH-AS1, DBI, DBN1, DBNDD1, DBP, DBR1, DBT, DCAF16, DCAF6, DCBLD1, DCBLD2, DCDC2, DCLRE1A, DCLRE1B, DCP2, DCPS, DCTN1, DCTPP1, DCUN1D1, DCUN1D2, DCUN1D4, DCXR, DDAH1, DDAH2, DDB2, DDC, DDHD1, DDI2, DDIT4, DDO, DDR1, DDT, DDX10, DDX11, DDX17, DDX20, DDX23, DDX39B, DDX3X, DDX42, DDX5, DDX52, DDX56, DDX58, DDX59, DDX6, DDX60, DEDD, DEFB1, DEFB135, DENND1A, DENND1B, DENND2C, DENND2D, DENND4A, DENND4B, DENND4C, DENND5B, DENND6A, DENR, DEPDC5, DEPDC7, DEPTOR, DESI2, DFFB, DFNA5, DFNB31, DGAT2, DGCR14, DGCR6L, DGKA, DGKD, DGKE, DGKH, DHCR24, DHCR7, DHODH, DHRS13, DHRS3, DHRS4-AS1, DHRS4L2, DHRS9, DHX15, DHX29, DHX30, DHX33, DHX36, DHX37, DHX40, DHX57, DHX8, DHX9, DIAPH1, DIAPH2, DIAPH3, DIEXF, DIMT1, DIO1, DIP2B, DIP2C, DIRC2, DIS3L, DIS3L2, DISP1, DIXDC1, DKC1, DKFZP586I1420, DKFZp779M0652, DKK3, DLAT, DLC1, DLD, DLG1, DLG5, DLGAP1-AS2, DLGAP4, DMD, DMGDH, DMKN, DMPK, DMRTA1, DMTN, DMXL1, DMXL2, DNAAF1, DNAAF2, DNAAF5, DNAH1, DNAH14, DNAJA1, DNAJA2, DNAJB12, DNAJB4, DNAJB5, DNAJB9, DNAJC11, DNAJC14, DNAJC17, DNAJC28, DNAJC3, DNAJC30, DNALI1, DNHD1, DNLZ, DNM1L, DNM2, DNMBP, DNMT1, DNMT3A, DNPH1, DNTTIP2, DOCK1, DOCK4, DOCKS, DOCK7, DOCK9, DOHH, DOK3, DOK7, DOLK, DOLPP1, DONSON, DOPEY1, DOPEY2, DPCD, DPF3, DPH1, DPH2, DPH5, DPH6, DPM2, DPM3, DPP3, DPP9, DPY19L1, DPY30, DPYD, DPYS, DPYSL2, DRAP1, DRG1, DROSHA, DSC2, DSCC1, DSE, DSEL, DSN1, DST, DSTN, DSTYK, DTD1, DTNA, DTNB, DTNBP1, DTWD1, DTWD2, DTX1, DTX3L, DTX4, DTYMK, DUS2, DUS3L, DUSP1, DUSP10, DUSP11, DUSP12, DUSP16, DUSP18, DUSP23, DUSP5, DUSP6, DUSP7, DUSP8, DVL1, DYM, DYNC1H1, DYNC1LI1, DYNC2LI1, DYNLL1, DYNLT1, DYRK1B, DYRK3, DYRK4, DYSF, DZIP3, E2F5, EARS2, EBAG9, EBP, EBPL, ECD, ECE1, ECE2, ECHDC2, ECI1, ECT2, EDA2R, EDARADD, EDC4, EDEM1, EDEM3, EDF1, EDN2, EDRF1, EEA1, EED, EEF1A2, EEF1D, EEF2K, EEFSEC, EEPD1, EFCAB11, EFCAB7, EFHD1, EFNA2, EFNA4, EFNB1, EFTUD2, EGFR, EGLN1, EGLN3, EGOT, EGR1, EHBP1, EHBP1L1, EHD1, EHD2, EHD4, EHHADH, EHMT1, EHMT2, EID2B, EIF2AK2, EIF2AK4, EIF2B3, EIF2B4, EIF2B5, EIF2S2, EIF3IP1, EIF3J-AS1, EIF4A1, EIF4A2, EIF4B, EIF4EBP1, EIF4G1, EIF4G3, EIF4H, EIF5B, ELAC2, ELF1, ELF2, ELF3, ELFN1, ELK1, ELK3, ELL, ELMO1, ELMSAN1, ELOF1, ELOVL1, ELOVL6, ELP3, ELP6, EMC1, EMC2, EME2, EMG1, EML2-AS1, EML3, EML4, EMP3, ENAH, ENAM, ENC1, ENDOD1, ENDOG, ENGASE, ENHO, ENO1, ENOX2, ENPEP, ENPP1, ENPP2, ENPP4, ENTHD2, ENTPD4, ENTPD5, ENTPD8, EP300, EP300-AS1, EP400NL, EPAS1, EPB41, EPB41L2, EPB41L4A, EPB41L4A-AS1, EPB41L5, EPC1, EPC2, EPG5, EPHA2, EPHB4, EPHB6, EPHX1, EPM2AIP1, EPOR, EPPK1, EPS15L1, EPS8, ERAL1, ERBB2, ERBB2IP, ERBB3, ERC1, ERCC2, ERCC3, ERCC4, ERCC5, ERCC6, ERCC6-PGBD3, ERCC6L2, ERF, ERGIC1, ERI2, ERI3, ERICH1, ERICH2, ERMP1, ERN1, ERO1B, ERP29, ESCO1, ESPN, ESRP2, ESRRA, ETAA1, ETFB, ETHE1, ETS1, ETV1, ETV3, ETV4, ETV5, ETV6, ETV7, EVA1A, EVA1B, EVC, EVI5, EVI5L, EVL, EWSR1, EXD2, EXO5, EXOC2, EXOC3-AS1, EXOC3L4, EXOC4, EXOC6, EXOC6B, EXOC7, EXOG, EXOSC10, EXOSC2, EXOSC3, EXOSC4, EXOSC5, EXOSC6, EXOSC8, EXOSC9, EXPH5, EXT1, EXTL2, EXTL3, EZH2, F12, F13B, F2, F2R, F2RL1, F3, F5, F7, F9, FAAH2, FAAP20, FAAP24, FADD, FADS3, FAF1, FAHD2CP, FAM102A, FAM102B, FAM104A, FAM109A, FAM110A, FAM110B, FAM110C, FAM111A, FAM114A1, FAM114A2, FAM117A, FAM117B, FAM118A, FAM122A, FAM126A, FAM129B, FAM133B, FAM135A, FAM13B, FAM13C, FAM160A2, FAM160B2, FAM168A, FAM168B, FAM169A, FAM171A1, FAM172A, FAM173A, FAM174A, FAM175A, FAM178A, FAM179B, FAM184A, FAM185A, FAM188A, FAM188B, FAM189B, FAM193A, FAM195A, FAM195B, FAM199X, FAM201A, FAM207A, FAM208A, FAM208B, FAM20B, FAM20C, FAM212A, FAM212B, FAM213B, FAM214A, FAM214B, FAM219B, FAM21A, FAM21C, FAM221A, FAM222A, FAM222B, FAM24B, FAM45A, FAM45B, FAM46A, FAM50A, FAM53C, FAM57A, FAM63A, FAM65A, FAM69B, FAM73B, FAM78B, FAM83G, FAM83H, FAM84B, FAM86B3P, FAM86C1, FAM86C2P, FAM86EP, FAM86JP, FAM89B, FAM8A1, FAM92A1, FAM95C, FAM96B, FAM98A, FAM98B, FAM99A, FAN1, FANCC, FANCF, FANCL, FARP1, FARS2, FARSA, FARSB, FASTKD1, FASTKD2, FASTKD5, FAT1, FAT4, FAU, FAXDC2, FBF1, FBL, FBLIM1, FBRS, FBRSL1, FBXL14, FBXL15, FBXL17, FBXL18, FBXL19, FBXL19-AS1, FBXL20, FBXL3, FBXL5, FBXL6, FBXL7, FBXO16, FBXO17, FBXO18, FBXO2, FBXO21, FBXO25, FBXO32, FBXO33, FBXO34, FBXO36, FBXO38, FBXO4, FBXO44, FBXO6, FBXW11, FBXW8, FCER1G, FCGRT, FCHSD1, FCHSD2, FDFT1, FDXACB1, FDXR, FER, FGA, FGB, FGD1, FGD4, FGD6, FGF13, FGF14, FGFR2, FGFR4, FGFRL1, FGG, FGL1, FHL3, FHOD1, FICD, FIG4, FIGN, FIGNL1, FILIP1L, FIP1L1, FIS1, FITM2, FIZ1, FJX1, FKBP14, FKBP15, FKBP2, FKBP4, FKBPL, FKRP, FKTN, FLAD1, FLG-AS1, FLI1, FLJ20021, FLJ42351, FLJ46906, FLNB, FLYWCH1, FLYWCH2, FMNL2, FMO4, FMO5, FMR1, FN1, FN3K, FNBP1, FNBP1L, FNDC3A, FNDC3B, FNDC5, FNIP1, FNIP2, FOCAD, FOLH1, FOS, FOSB, FOXA1, FOXA3, FOXD2-AS1, FOXN2, FOXN3, FOXO1, FOXO4, FOXP2, FOXP4, FOXRED2, FPGT, FRA10AC1, FRAT1, FRAT2, FRG1, FRK, FRMD4A, FRMD4B, FRMD6, FRMD8, FRRS1, FRY, FRYL, FSCN1, FST, FSTL1, FTCD, FTCDNL1, FTH1, FTO, FTSJ1, FTSJ3, FTX, FUBP1, FUCA1, FUK, FUNDC1, FUOM, FURIN, FUT11, FXN, FXR1, FXYD1, FXYD5, FYCO1, FZD8, G2E3, G3BP1, G6PC3, G6PD, GAB1, GAB2, GABARAPL1, GABPB1-AS1, GABRE, GADD45A, GADD45G, GADD45GIP1, GAL, GALC, GALK1, GALK2, GALM, GALNT10, GALNT15, GALNT18, GALNT2, GALNT4, GALT, GANAB, GANC, GAREM, GARNL3, GARS, GART, GAS2, GAS2L1, GAS5, GATA4, GATA6, GATA6-AS1, GATAD2A, GATB, GATM, GBA, GBA3, GBE1, GBF1, GBP2, GBP7, GC, GCFC2, GCGR, GCH1, GCHFR, GCKR, GCLC, GCLM, GCN1, GCNT2, GCNT3, GCNT4, GCSH, GDA, GDAP2, GDF7, GDNF, GDPD1, GDPD5, GEMIN2, GEMIN4, GEMIN5, GEMIN6, GEMIN7, GEN1, GFOD1, GFOD2, GFPT1, GFRA1, GGA2, GGA3, GGCX, GGPS1, GGT1, GGT7, GIMAP2, GINS2, GINS3, GIPC1, GIPC2, GIT1, GIT2, GJB1, GJB2, GJB3, GKAP1, GLB1L, GLCCI1, GLCE, GLDC, GLG1, GLIPR1, GLIPR2, GLIS3, GLMN, GLRB, GLRX, GLS, GLS2, GLT1D1, GLTP, GLTPD2, GLTSCR1, GLTSCR1L, GLUD2, GLYAT, GLYATL1, GLYCTK, GMCL1, GMDS, GMIP, GMNN, GMPPB, GMPR, GMPS, GNA12, GNA14, GNAI1, GNAO1, GNAQ, GNB1, GNB1L, GNE, GNG12, GNG7, GNL3, GNL3L, GNPDA1, GNPDA2, GNPNAT1, GNPTAB, GOLGB1, GOLIM4, GOLPH3, GOLPH3L, GON4L, GOPC, GORAB, GORASP2, GOSR1, GOT2, GPAM, GPATCH1, GPATCH2, GPC1, GPC6, GPCPD1, GPD1, GPD1L, GPD2, GPER1, GPHN, GPKOW, GPNMB, GPR135, GPR137B, GPR153, GPR155, GPR157, GPR176, GPR180, GPR39, GPRC5A, GPRC5B, GPRC5C, GPRIN1, GPT, GPT2, GPX1, GPX2, GPX7, GRAMD1A, GRAMD1C, GRAMD3, GRB10, GRB14, GRB7, GREB1L, GRHL1, GRID1, GRIPAP1, GRK5, GRTP1, GRWD1, GSAP, GSDMB, GSK3A, GSK3B, GSPT2, GSTA1, GSTA2, GSTM2, GSTM3, GSTM4, GST02, GSTP1, GTDC1, GTF2A1, GTF2B, GTF2E2, GTF2F2, GTF2H2C_2, GTF2I, GTF2IRD1, GTF3C1, GTF3C2, GTF3C3, GTF3C5, GTPBP2, GTPBP3, GTPBP8, GUCA1B, GUCA2B, GUCY1A3, GUCY1B3, GUK1, GUSB, GUSBP11, GXYLT1, GXYLT2, GYG1, GYG2, GYPC, GYS1, H19, H1F0, H1FX, H2AFJ, H2AFV, H2AFX, H2AFY2, H2AFZ, H3F3B, H3F3C, H6PD, HABP2, HACD1, HACD2, HACE1, HACL1, HAGHL, HAL, HAO1, HARBI1, HARS, HARS2, HAS3, HAUS1, HAUS3, HAUS4, HAUS7, HAUS8, HAVCR1, HAX1, HBB, HBP1, HCFC1, HCFC1R1, HCFC2, HCG18, HCG8, HCN3, HCP5, HDAC1, HDAC2, HDAC4, HDAC5, HDAC7, HDAC8, HDDC2, HDGFRP2, HDHD1, HDHD3, HDX, HEATR1, HEATR3, HEATR5A, HEATR5B, HEATR6, HECA, HECTD1, HECTD2, HECTD4, HEG1, HELLS, HELZ, HELZ2, HEMK1, HERC1, HERC2, HERC2P2, HERC3, HERC5, HERC6, HERPUD1, HERPUD2, HES1, HES2, HES4, HES6, HEXIM1, HEXIM2, HHEX, HIC2, HID1, HIF1A, HIF1AN, HIGD1A, HIGD2A, HILPDA, HINT1, HINT2, HIP1, HIP1R, HIPK2, HIRIP3, HIST1H1C, HIST1H1E, HIST1H2AC, HIST1H2AE, HIST1H2BC, HIST1H2BD, HIST1H2BJ, HIST1H2BK, HIST1H2BN, HIST1H3D, HIST1H3E, HIST1H3H, HIST1H4H, HIST2H2BE, HIST4H4, HIVEP1, HIVEP3, HLA-B, HLA-DMA, HLA-DRA, HLA-E, HLF, HLTF, HLX, HMBS, HMCES, HMG20A, HMGB2, HMGN3, HMGN4, HMGN5, HMGXB3, HMOX2, HN1, HNF1A, HNF1A-AS1, HNF1B, HNF4A, HNF4G, HNMT, HNRNPA1, HNRNPA1L2, HNRNPA1P33, HNRNPA2B1, HNRNPAB, HNRNPD, HNRNPDL, HNRNPH3, HNRNPL, HNRNPLL, HNRNPM, HNRNPR, HNRNPU, HNRNPU-AS1, HOMER3, HOMEZ, HOOK2, HOOK3, HP, HPCAL1, HPD, HPN, HPR, HPS4, HPS5, HPS6, HPX, HRAS, HRG, HRSP12, HS2ST1, HS3ST3B1, HS6ST1, HSD11B1, HSD11B2, HSD17B10, HSD17B13, HSD17B14, HSD17B2, HSD17B3, HSD17B6, HSD17B7P2, HSD3B7, HSF2, HSP90AA1, HSP90B1, HSP90B2P, HSPA13, HSPA4, HSPA4L, HSPA8, HSPB9, HSPBAP1, HSPD1, HSPG2, HTRA1, HTT, HULC, HUWE1, HYAL1, HYAL2, HYLS1, HYOU1, ICAM1, ICE2, ICK, ICMT, ICOSLG, ID1, ID2, ID3, IDH1, IDH1-AS1, IDH2, IDH3A, ID12-AS1, IDNK, IDUA, IER2, IER5, IER5L, IFF02, IFI16, IFI27L1, IFI27L2, IFI30, IFI44, IFI6, IFIH1, IFIT3, IFITM2, IFNAR2, IFNGR2, IFRD1, IFRD2, IFT122, IFT140, IFT172, IFT20, IFT46, IFT74, IFT80, IFT81, IFT88, IGF1, IGF2, IGF2R, IGFALS, IGFBP2, IGFBP4, IGFLR1, IGIP, IGSF3, IGSF9, IKBIP, IKBKAP, IKBKE, IKBKG, IL11, IL11RA, IL15, IL15RA, IL17RA, IL17RE, IL1R1, IL1R2, IL1RAP, IL1RL1, IL1RN, IL2ORB, IL27RA, IL32, IL4R, IL6R, IL7, ILDR2, ILF3, IMMP2L, IMP3, IMPDH1, IMPDH2, INADL, INAFM1, INAFM2, INCENP, INF2, ING1, ING2, ING3, ING4, INHBB, INHBC, INIP, INO80, INO80B, INO80C, INPP1, INPP4A, INPP5A, INPP5B, INPPL1, INS-IGF2, INSIG2, INSR, INTS3, INTS4, INTS5, INTS6, INTS6-AS1, INTS7, INTS8, INVS, IP6K3, IPO11, IPO13, IPO4, IPO5P1, IPO8, IPP, IPW, IQCB1, IQCE, IQCJ-SCHIP1, IQCK, IQGAP2, IQSEC1, IRAK2, IRAK4, IREB2, IRF1, IRF2, IRF2BP1, IRF2BPL, IRF3, IRF6, IRF7, IRF8, IRF9, IRS1, IRS2, ISCA1, ISCA2, ISCU, ISG15, ISG20, ISM1, ISOC2, ISYNA1, ITGA1, ITGA2, ITGA6, ITGAM, ITGAV, ITGB1, ITGB3, ITGB5, ITGB7, ITIH1, ITIH2, ITIH3, ITIH4, ITM2C, ITPA, ITPK1, ITPKA, ITPR1, ITPR2, ITPR3, ITPRIPL2, ITSN1, IVNS1ABP, IWS1, IYD, IZUMO4, JADE1, JADE2, JADE3, JAG1, JAK1, JAK2, JARID2, JAZF1, JDP2, JHDM1D-AS1, JMJD1C, JMJD4, JMY, JOSD1, JOSD2, JPX, JUNB, JUND, JUP, KALRN, KANK2, KANK4, KANSL1, KANSL1L, KANSL2, KANSL3, KAT2A, KAT2B, KAT5, KAT6A, KAT6B, KAT7, KATNBL1, KBTBD11, KBTBD6, KBTBD7, KBTBD8, KCCAT211, KCNAB3, KCNC3, KCND3, KCNK1, KCNMA1, KCNN2, KCNS3, KCNT2, KCTD1, KCTD10, KCTD11, KCTD13, KCTD15, KCTD17, KCTD20, KCTD5, KCTD7, KDELC2, KDF1, KDM1A, KDM2B, KDM3A, KDM4A, KDM4B, KDM4C, KDM5B, KDM5C, KDM6A, KDM7A, KDM8, KEAP1, KHDRBS3, KHK, KHNYN, KIAAOC20, KIAA0040, KIAA0100, KIAA0196, KIAA0232, KIAA0391, KIAA0513, KIAA0556, KIAA0586, KIAA0895, KIAA0895L, KIAA0922, KIAA1033, KIAA1107, KIAA1109, KIAA1147, KIAA1161, KIAA1279, KIAA1407, KIAA1467, KIAA1468, KIAA1549, KIAA1551, KIAA1586, KIAA1671, KIAA1804, KIAA1841, KIAA1919, KIAA1958, KIF12, KIF13A, KIF13B, KIF16B, KIF1B, KIF1C, KIF20B, KIF21A, KIF21B, KIF22, KIF3A, KIF3B, KIF5B, KIFC2, KIFC3, KISS1, KIZ, KLF10, KLF12, KLF16, KLF4, KLF5, KLF6, KLF7, KLHDC10, KLHDC2, KLHDC4, KLHDC7A, KLHDC8B, KLHDC9, KLHL12, KLHL13, KLHL15, KLHL21, KLHL22, KLHL23, KLHL24, KLHL25, KLHL26, KLHL28, KLHL29, KLHL3, KLHL36, KLHL42, KLHL7, KLHL8, KLHL9, KLKB1, KMO, KMT2C, KMT2D, KMT2E-AS1, KNDC1, KNG1, KNOP1, KNSTRN, KNTC1, KPNA2, KPNA3, KPNA7, KPNB1, KPTN, KRBA1, KRBA2, KREMEN1, KRIT1, KRT18, KRT19, KRT222, KRT8, KRTAP5-AS1, KSR1, KYNU, L3HYPDH, L3MBTL2, L3MBTL3, L3MBTL4, LACC1, LACE1, LACTB, LAD1, LAMA5, LAMB2, LAMC1, LAMC2, LAMTOR4, LANCL1, LANCL2, LAPTM5, LARGE, LARP6, LARP7, LARS2, LAS1L, LASP1, LATS1, LBHD1, LBP, LBX2, LBX2-AS1, LCAT, LCMT1, LCMT2, LCN12, LCN2, LCORL, LCP1, LDB1, LDHB, LDHD, LDLR, LDLRAD3, LDLRAP1, LDOC1L, LEAP2, LEMD3, LENG8, LENG8-AS1, LEO1, LETM1, LGALSL, LGR4, LHFPL2, LHX4-AS1, LIG3, LIMA1, LIMCH1, LIME1, LIMK1, LIMS1, LIMS2, LIN54, LIN7A, LIN7B, LIN7C, LINC-PINT, LINC00094, LINC00116, LINC00312, LINC00313, LINC00339, LINC00342, LINC00467, LINC00482, LINC00493, LINC00525, LINC00526, LINC00630, LINC00641, LINC00649, LINC00657, LINC00663, LINC00842, LINC00844, LINC00857, LINC00862, LINC00884, LINC00888, LINC00899, LINC00926, LINC00938, LINC00969, LINC01000, LINC01003, LINC01004, LINC01018, LINC01021, LINC01089, LINC01093, LINC01125, LINC01137, LINC01146, LINC01176, LINC01268, LINC01270, LINC01273, LINC01311, LINC01314, LINC01315, LINC01320, LINC01355, LINC01370, LINC01372, LINC01474, LINC01485, LINC01534, LINC01547, LINC01564, LINC01573, LINC01578, LINC01588, LINC01604, LIPC, LIPG, LIPH, LIPT1, LLGL2, LMAN1, LMBR1, LMBRD2, LMF2, LMLN, LMNB1, LMNB2, LMNTD2, LMO4, LMO7, LMTK2, LNPEP, LNX1, LOC100130744, LOC100131564, LOC100132111, LOC100132352, LOC100268168, LOC100270746, LOC100288152, LOC100288798, LOC100294145, LOC100419583, LOC100422737, LOC100505942, LOC100506022, LOC100506302, LOC100506476, LOC100506548, LOC100506603, LOC100506675, LOC100506746, LOC100506844, LOC100506860, LOC100506990, LOC100507389, LOC100507487, LOC100652758, LOC100996437, LOC101926944, LOC101927021, LOC101927045, LOC101927136, LOC101927311, LOC101927391, LOC101927481, LOC101927571, LOC101927746, LOC101927755, LOC101927934, LOC101928303, LOC101928370, LOC101928767, LOC101929147, LOC101929715, LOC102606465, LOC102723766, LOC102724814, LOC103344931, LOC105375734, LOC113230, LOC115110, LOC146880, LOC171391, LOC284454, LOC339803, LOC388692, LOC389332, LOC389602, LOC389765, LOC401010, LOC407835, LOC440311, LOC642236, LOC644656, LOC644936, LOC646762, LOC653160, LOC728554, LOC728730, LOC730101, LOC730102, LOC730202, LOC90784, LOH12CR1, LONRF1, LONRF2, LPA, LPCAT1, LPCAT3, LPCAT4, LPIN1, LPIN3, LPP, LPPR2, LPXN, LRBA, LRCH1, LRCH3, LRCH4, LRFN3, LRG1, LRIG1, LRIG2, LRIG3, LRP1, LRP10, LRP11, LRP3, LRP5, LRP6, LRPAP1, LRR1, LRRC16A, LRRC2, LRRC20, LRRC27, LRRC28, LRRC31, LRRC40, LRRC45, LRRC57, LRRC61, LRRC75A-AS1, LRRC75B, LRRC8A, LRRC8B, LRRC8D, LRRC8E, LRSAM1, LSM10, LSM2, LSM3, LSM6, LSMEM1, LSR, LSS, LTB, LTBP4, LTC4S, LTN1, LTV1, LUC7L, LUC7L2, LURAP1L, LVCAT8, LY6E, LY6G5B, LY96, LYAR, LYG1, LYN, LYNX1, LYPLA2, LYPLAL1, LYRM4, LYRM9, LYSMD2, LYSMD3, LYSMD4, LYST, LZIC, LZTR1, LZTS2, LZTS3, M6PR, MAATS1, MACF1, MACROD1, MAD1L1, MAF, MAF1, MAFG, MAFK, MAGED1, MAGEF1, MAGEH1, MAGI1, MAGI3, MAGIX, MALAT1, MALSU1, MALT1, MAMDC4, MAML3, MAMLD1, MAN1A1, MAN1B1-AS1, MAN2A1, MAN2A2, MAN2B1, MANBAL, MANEA, MANEAL, MANSC1, MAOB, MAP10, MAP1LC3A, MAP1LC3B, MAP1LC3B2, MAP2, MAP2K3, MAP2K4, MAP2K5, MAP2K7, MAP3K10, MAP3K11, MAP3K14, MAP3K2, MAP3K3, MAP3K4, MAP3K5, MAP3K6, MAP3K7CL, MAP3K9, MAP4, MAP4K2, MAP4K3, MAP4K4, MAP7, MAP7D1, MAP7D3, MAPK11, MAPK12, MAPK14, MAPK1IP1L, MAPK8IP3, MAPKAP1, MAPKAPK5-AS1, MAPRE3, MAPT, MARC1, MARCH2, MARCH6, MARCH8, MARCH9, MARCKS, MARCKSL1, MARS2, MARVELD1, MARVELD3, MASP1, MASP2, MAST2, MAST3, MASTL, MAT1A, MAT2A, MAT2B, MAVS, MB, MBD3, MBD4, MBD5, MBD6, MBL1P, MBL2, MBLAC1, MBLAC2, MBNL1, MBNL2, MBNL3, MBOAT1, MBP, MBTD1, MBTPS2, MCC, MCCC1, MCCC2, MCF2L, MCF2L-AS1, MCHR1, MCM3, MCM3AP, MOMS, MCM6, MCM9, MCMBP, MCPH1, MCRS1, MCU, MDFIC, MDK, MDM1, MDM2, MDN1, ME2, ME3, MED1, MED11, MED12, MED13L, MED14, MED17, MED19, MED21, MED23, MED24, MED25, MED27, MED30, MED6, MED8, MEF2A, MEGF6, MEGF9, MEIS1, MEIS2, MELK, MEMO1, MEN1, MEPCE, MERTK, MESDC1, MESP1, MET, METAP1D, METTL1, METTL13, METTL14, METTL15, METTL18, METTL20, METTL23, METTL25, METTL4, METTL5, METTL6, METTL7A, METTL7B, METTL8, METTL9, MEX3A, MEX3D, MFAP1, MFAP3L, MFGE8, MFHAS1, MFI2, MFSD10, MFSD2A, MFSD3, MFSDS, MFSD6, MFSD7, MGA, MGAM, MGAT2, MGAT4A, MGATS, MGC27345, MGC57346, MGLL, MGME1, MGMT, MGST1, MIA2, MIA3, MIB1, MIB2, MICA, MICAL1, MICAL2, MICAL3, MICALL2, MICB, MICU1, MICU3, MID1, MID1IP1, MID2, MIDN, MIER2, MIER3, MIF, MIIP, MINA, MINK1, MINOS1, MIOS, MIS12, MIS18BP1, MITF, MKL1, MKL2, MKLN1, MKNK2, MKRN2, MKRN9P, MKS1, MLEC, MLF2, MLH1, MLH3, MLIP, MLKL, MLLT10, MLLT3, MLLT6, MLPH, MLX, MLXIPL, MMM, MMAB, MMADHC, MMD, MME, MMP10, MMP14, MMP15, MMP7, MN1, MNAT1, MOB1B, MOB3A, MOCS1, MOGS, MOK, MON1A, MON2, MORC4, MORF4L2, MORN4, MOV10, MPDZ, MPG, MPHOSPH10, MPHOSPH6, MPP6, MPP7, MPRIP, MPST, MPZ, MPZL2, MR1, MRAS, MRFAP1L1, MRI1, MRM1, MROH1, MROH6, MRPL11, MRPL12, MRPL14, MRPL15, MRPL16, MRPL17, MRPL2, MRPL20, MRPL22, MRPL23, MRPL27, MRPL3, MRPL33, MRPL36, MRPL41, MRPL51, MRPL52, MRPL53, MRPL9, MRPS12, MRPS18B, MRPS18C, MRPS2, MRPS23, MRPS24, MRPS26, MRPS28, MRPS30, MRPS31, MRPS31P5, MRPS34, MRPS6, MRRF, MRTO4, MSANTD3, MSH2, MSH3, MSH5, MSH6, MSI2, MSL3P1, MSN, MSRA, MSRB1, MSRB3, MST1, MST1L, MST1P2, MST1R, MSTO1, MSX1, MT1A, MT1B, MT1DP, MT1E, MT1F, MT1G, MT1H, MT1HL1, MT1JP, MT1L, MT1M, MT1X, MT2A, MTA2, MTA3, MTCL1, MTCP1, MTERF1, MTERF2, MTERF3, MTFR2, MTHFD1, MTHFD1L, MTHFR, MTHFSD, MTIF2, MTM1, MTMR1, MTMR10, MTMR12, MTMR2, MTMR4, MTMR6, MTO1, MTOR, MTPAP, MTR, MTRF1, MTRNR2L8, MTRR, MTSS1, MTSS1L, MTTP, MTURN, MTUS1, MTX2, MTX3, MUC20, MUM1, MUM1L1, MUS81, MUTYH, MVB12B, MVK, MX1, MXD1, MXD4, MYADM, MYBBP1A, MYC, MYCBP, MYCBP2, MYCL, MYD88, MYDGF, MYEOV2, MYH10, MYH14, MYH3, MYH9, MYL12A, MYL5, MYL6, MYLK, MYNN, MYO15B, MYO18A, MYO1B, MYO1D, MYO1E, MYO5A, MYO5B, MYO5C, MYO7A, MYO9A, MYPOP, MYRF, MYRIP, MZT2A, MZT2B, N4BP2, N4BP2L1, N6AMT1, NAA10, NAA15, NAA16, NAA38, NAA40, NABP1, NACA2, NACC1, NACC2, NADSYN1, NAE1, NAGK, NAGS, NAIF1, NAMPT, NAP1L5, NAPEPLD, NAPSA, NARF, NARS2, NASP, NAT1, NAT10, NAT14, NAT2, NAT8, NATD1, NAV1, NAV2, NBAS, NBEAL1, NBEAL2, NBN, NBPF1, NBR1, NBR2, NCALD, NCAPD2, NCAPD3, NCAPH2, NCBP1, NCBP2-AS2, NCDN, NCEH1, NCK1, NCK2, NCKAP5, NCKAP5L, NCKIPSD, NCOA1, NCOA2, NCOA3, NCOA5, NCOA7, NCOR2, NCS1, NDC1, NDE1, NDRG3, NDRG4, NDST1, NDST2, NDUFA1, NDUFA11, NDUFA13, NDUFA2, NDUFA3, NDUFA4, NDUFA8, NDUFAB1, NDUFAF4, NDUFB1, NDUFB10, NDUFB11, NDUFB2, NDUFB3, NDUFB6, NDUFB7, NDUFB8, NDUFC2, NDUFC2-KCTD14, NDUFS1, NDUFS3, NDUFS4, NDUFS5, NDUFS6, NDUFS7, NDUFS8, NDUFV2, NEAT1, NEBL, NECAB3, NECAP1, NEDD1, NEDD4, NEDD4L, NEDD8, NEDD9, NEIL1, NEIL2, NEK1, NEK3, NEK6, NEK7, NEK8, NELFCD, NENF, NEO1, NET1, NEU1, NEU3, NEURL4, NEXN, NF1, NF2, NFAT5, NFATC1, NFATC2, NFATC3, NFE2L1, NRA, NAB, VIC, NFIL3, NFIX, NFKB1, NFKB2, NFKBIA, NFKBIE, NFKBIZ, NFRKB, NFU1, NFYA, NFYB, NGEF, NGFRAP1, NGLY1, NHLRC1, NHP2, NHSL1, NID1, NIF3L1, NIN, NINL, NIPAL1, NIPAL2, NIPAL3, NIPBL-AS1, NIPSNAP1, NKAP, NKG7, NKX3-1, NLE1, NLGN2, NLK, NLRC5, NLRX1, NME1, NME3, NME6, NMI, NNMT, NOB1, NOC2L, NOC3L, NOCT, NOD1, NOD2, NOL10, NOL11, NOL12, NOL4L, NOL6, NOL7, NOL8, NOL9, NOLC1, NONO, NOP10, NOP14, NOP14-AS1, NOP16, NOP2, NOP56, NOP9, NOS1AP, NOSIP, NOTCH1, NOTCH2, NOXA1, NPAT, NPC1, NPC1L1, NPDC1, NPFF, NPHP4, NPIPA1, NPM1, NPM2, NPM3, NPR2, NPRL3, NPTX2, NPW, NQO1, NROB2, NR1D1, NR1H3, NR1H4, NR1I2, NR2C1, NR2F1, NR2F2, NR2F6, NR3C1, NR3C2, NR4A1, NR5A2, NRBP1, NRDE2, NREP, NRG1, NRM, NRP1, NRP2, NRSN2, NRTN, NSD1, NSMAF, NSMCE1, NSMCE2, NSMCE4A, NSUN2, NSUN4, NSUN6, NT5C3A, NT5E, NTHL1, NTMT1, NTN4, NUBP1, NUBPL, NUCKS1, NUDC, NUDT1, NUDT12, NUDT14, NUDT16, NUDT18, NUDT19, NUDT2, NUDT22, NUDT3, NUDT4, NUDT7, NUDT8, NUFIP2, NUGGC, NUMA1, NUMB, NUMBL, NUP107, NUP133, NUP155, NUP160, NUP188, NUP205, NUP210, NUP214, NUP35, NUP37, NUP43, NUP50-AS1, NUP88, NUP93, NUP98, NUPL2, NUPR1, NUSAP1, NXF1, NXPH4, NXT1, NYNRIN, OAT, OBSL1, OCIAD2, OCRL, ODF2L, ODF3B, OGDH, OGDHL, OGFRL1, OGG1, OIP5-AS1, OLA1, OLFM2, OLMALINC, OMA1, ONECUT1, OPA1, OPA3, OR7E14P, ORM, ORC2, ORC3, ORC4, OROS, ORM1, ORM2, OSBP, OSBPL11, OSBPL1A, OSBPL3, OSBPL6, OSBPL8, OSBPL9, OSER1, OSER1-AS1, OSGEPL1, OST4, OTC, OTUB2, OTUD1, OTUD6B-AS1, OVCA2, OVGP1, OXLD1, OXNAD1, OXSR1, OXT, P2RX4, P2RX7, P2RY11, P2RY2, P3H1, PA2G4, PA2G4P4, PAAF1, PABPC1L, PACRGL, PACS1, PACSIN2, PACSIN3, PAF1, PAFAH1B1, PAFAH1B3, PAG1, PAH, PAIP2, PAIP2B, PAK1IP1, PALLD, PALM2, PALM2-AKAP2, PALM3, PAN3, PANK2, PANK3, PANX2, PAOX, PAPD5, PAPOLG, PAPSS1, PAPSS2, PAQR3, PAQR4, PAQR6, PAQR7, PAQR9, PARD3, PARD3-AS1, PARD3B, PARD6A, PARD6B, PARN, PARP10, PARP11, PARP12, PARP16, PARP2, PARP4, PARP8, PARP9, PARTICL, PATZ1, PAWR, PAX8, PAIP1, PAIP1-AS1, PAXIP1-AS2, PBDC1, PBRM1, PBX1, PBX2, PBX3, PC, PCBP1-AS1, PCBP4, PCCA, PCDH1, PCDH9, PCDHGC3, PCGF3, PCIF1, PCK2, PCM1, PCMTD1, PCNA, PCNT, PCNX, PCNXL3, PCOLCE, PCOLCE2, PCP4L1, PCSK5, PCSK6, PCSK7, PCYT1A, PCYT2, PDCD10, PDCD11, PDCD2L, PDCD4, PDCD5, PDCL, PDE11A, PDE12, PDE3B, PDE4A, PDE4D, PDE5A, PDE6D, PDE7A, PDE9A, PDGFA, PDGFC, PDGFRA, PDIA3, PDIA5, PDIA6, PDIK1L, PDK2, PDK3, PDLIM1, PDLIM2, PDLIM5, PDP1, PDP2, PDPR, PDS5A, PDS5B, PDSS2, PDXDC2P, PDXK, PDXP, PDZD8, PDZK1IP1, PEAK1, PEBP1, PEG10, PELI1, PELP1, PEMT, PEPD, PER3, PES1, PET100, PET117, PEX11A, PEX12, PEX14, PFAS, PFDN1, PFDN2, PFDN5, PFDN6, PFKFB1, PFKFB2, PFKM, PFKP, PFN1, PGAM5, PGAP1, PGAP2, PGBD1, PGBD2, PGBD4, PGBD5, PGD, PGLYRP2, PGM1, PGM2L1, PGP, PGRMC1, PGRMC2, PHACTR2, PHACTR4, PHAX, PHC2, PHC3, PHEX, PHF10, PHF14, PHF19, PHF2, PHF20L1, PHF21A, PHF23, PHF3, PHF6, PHF8, PHGDH, PHIP, PHKA2, PHKB, PHLDA2, PHLDB1, PHLDB2, PHLPP1, PHLPP2, PHPT1, PHRF1, PHTF1, PHTF2, PHYH, PHYHIPL, PI4KA, PIAS2, PIBF1, PICALM, PIDD1, PIEZO1, PIEZO2, PIGA, PIGC, PIGM, PIGN, PIGS, PIGU, PIGZ, PIK3AP1, PIK3C2A, PIK3C2B, PIK3C2G, PIK3C3, PIK3CA, PIK3CB, PIK3CD, PIK3IP1, PIK3R1, PIK3R2, PIK3R3, PIK3R4, PIKFYVE, PILRB, PIK PIM2, PIN4, PINK1, PIP4K2A, PIP5K1A, PIP5K1C, PIR, PITPNC1, PITPNM2, PITRM1, PJA1, PJA2, PKD1, PKD1L2, PKD1P1, PKD2, PKDCC, PKHD1, PKI55, PKIB, PKIG, PKLR, PKM, PKMYT1, PKN1, PKN2, PKP2, PKP4, PLA1A, PLA2G12B, PLA2G15, PLA2G2A, PLA2G4B, PLA2G4C, PLA2G6, PLM, PLAC8L1, PLBD2, PLCB1, PLCB3, PLCD1, PLCD3, PLCG1, PLCG2, PLD1, PLD2, PLD6, PLEC, PLEK2, PLEKHA2, PLEKHA3, PLEKHA4, PLEKHA5, PLEKHA7, PLEKHB2, PLEKHF1, PLEKHG1, PLEKHG2, PLEKHG5, PLEKHG6, PLEKHH1, PLEKHH3, PLEKHJ1, PLEKHM1, PLEKHM1P, PLEKHM3, PLEKHN1, PLEKHO1, PLEKHO2, PLG, PLIN3, PLIN5, PLK3, PLLP, PLOD2, PLRG1, PLS1, PLS3, PLSCR3, PLSCR4, PLXNA1, PLXNA2, PLXNA3, PLXNB1, PLXND1, PMEPA1, PML, PMM1, PMS1, PMS2, PMVK, PNMA1, PNP, PNPLA2, PNPLA3, PNPLA7, PNRC1, POC1A, POC1B, POC5, POGK, POLA1, POLA2, POLD1, POLD2, POLD3, POLD4, POLE, POLE2, POLE4, POLG, POLG2, POLH, POLI, POLK, POLL, POLM, POLR1A, POLR1B, POLR1E, POLR2A, POLR2B, POLR2F, POLR2H, POLR2I, POLR2J, POLR2L, POLR2M, POLR3B, POLR3E, POLR3F, POLR3G, POLR3H, POLR3K, POLRMT, POMGNT2, POMK, PON1, PON3, POP1, POPS, PORCN, POT1, POU5F1, PPAN, PPAP2A, PPAPDC1B, PPAPDC2, PPARA, PPARG, PPARGC1A, PPARGC1B, PPFIA1, PPFIBP1, PPFIBP2, PPID, PPIL2, PPIP5K2, PPM1B, PPM1D, PPM1H, PPM1J, PPM1K, PPME1, PPP1CC, PPP1R10, PPP1R13B, PPP1R14B, PPP1R15A, PPP1R15B, PPP1R16A, PPP1R18, PPP1R1A, PPP1R1C, PPP1R27, PPP1R32, PPP1R35, PPP1R3B, PPP1R8, PPP1R9B, PPP2R1B, PPP2R3A, PPP2R5B, PPP2R5D, PPP2R5E, PPP3CA, PPP3CB, PPP4R1, PPP4R3B, PPP5C, PPP6R3, PPRC1, PPT2, PPTC7, PPWD1, PQBP1, PQLC2, PRADC1, PRAP1, PRC1, PRDM15, PRDM4, PRDX5, PREB, PRELID1, PREP, PREX1, PRG2, PRICKLE2, PRICKLE4, PRIM1, PRIM2, PRIMPOL, PRKAA1, PRKAA2, PRKAB1, PRKAB2, PRKACA, PRKACB, PRKAR1B, PRKAR2A, PRKCA, PRKCD, PRKCDBP, PRKCE, PRKCI, PRKCQ-AS1, PRKCZ, PRKD3, PRKDC, PRKRA, PRKX, PRMT1, PRMT5, PRMT9, PRNP, PROCR, PRODH2, PROS1, PROSER1, PROSER2, PROSER3, PROX1, PROZ, PRPF38A, PRPF6, PRPF8, PRPSAP1, PRPSAP2, PRR12, PRR22, PRR34-AS1, PRR5, PRR7, PRRC1, PRRC2A, PRRC2C, PRSS12, PRSS3, PRSS8, PRUNE, PSAT1, PSD4, PSEN2, PSG4, PSIP1, PSMB10, PSMB3, PSMB6, PSMB8, PSMB9, PSMC4, PSMC6, PSMD1, PSMD14, PSMD2, PSMD3, PSMD5, PSME1, PSME2, PSME3, PSME4, PSMG1, PSMG3, PSMC4, PSPC1, PSPH, PSPN, PSRC1, PSTK, PSTPIP2, PTAR1, PTBP1, PTBP2, PTCD2, PTDSS2, PTGES3, PTGFR, PTGFRN, PTGR1, PTK2, PTK2B, PTMA, PTMS, PTP4A1, PTPMT1, PTPN1, PTPN11, PTPN14, PTPN2, PTPN21, PTPN23, PTPN3, PTPN4, PTPN6, PTPN9, PTPRD, PTPRF, PTPRG, PTPRH, PTPRJ, PTPRK, PTPRM, PTPRS, PTRF, PTRH1, PTRH2, PUM1, PUM2, PURA, PUS1, PUS10, PUS3, PUS7, PUS7L, PVT1, PWP1, PWWP2A, PWWP2B, PXDC1, PXK, PXMP2, PXMP4, PXN, PYCR1, PYCRL, PYROXD2, PZP, OKI, QPCT, ORICH1, ORICH2, QRSL1, QSER1, QSOX1, QTRTD1, R3HDM1, R3HDM2, RAB10, RAB11FIP2, RAB11FIP3, RAB11FIP4, RAB13, RAB14, RAB15, RAB1B, RAB20, RAB23, RAB24, RAB27B, RAB28, RAB30-AS1, RAB37, RAB3B, RAB3GAP1, RAB3GAP2, RAB40B, RAB43, RAB5C, RAB8A, RAB9A, RABAC1, RABEP2, RABEPK, RABGAP1, RABGAP1L, RABGGTA, RABIF, RABL3, RAC3, RACGAP1, RAD50, RAD51-AS1, RAD51B, RAD51C, RAD52, RAD54B, RAET1L, RAF1, RAI1, RAI14, RAI2, RALGAPA1, RALGAPA2, RALGAPB, RALGDS, RALGPS1, RALGPS2, RALY, RAMP1, RANBP1, RANBP10, RANBP2, RANBP6, RANBP9, RAP1GAP, RAP2B, RAPGEF1, RAPGEF2, RAPGEF5, RAPGEF6, RAPGEFL1, RAPH1, RAPSN, RARA, RARA-AS1, RARRES2, RARRES3, RASA1, RASA3, RASAL2, RASEF, RASGEF1B, RASL11A, RASSF5, RASSF7, RASSF8-AS1, RAVER1, RB1, RB1CC1, RBBP5, RBCK1, RBFA, RBFOX2, RBM10, RBM12, RBM12B, RBM14, RBM15, RBM18, RBM19, RBM24, RBM28, RBM3, RBM33, RBM34, RBM38, RBM4, RBM41, RBM43, RBM45, RBM47, RBM48, RBM5, RBM7, RBMS1, RBMS2, RBMX, RBMXL1, RBP1, RBP4, RBPJ, RBPMS, RBPMS2, RBSN, RC3H2, RCAN1, RCAN3, RCBTB1, RCBTB2, RCC1, RCE1, RCN2, RCN3, RCOR1, RCOR3, RDH10, RDH14, RDH16, RDH5, RECQL4, RECQL5, REEP4, REEP6, REL, RELB, RELL2, RELT, REP15, REPS1, REPS2, RERE, RETSAT, RFC3, RFNG, RFTN1, RFWD2, RFWD3, RFX1, RFX3, RFX5, RFXANK, RGAG4, RGL1, RGL3, RGP1, RGS12, RGS14, RGS19, RGS3, RGS9, RHBDD2, RHBDF1, RHBDF2, RHBDL1, RHNO1, RHOA, RHOBTB1, RHOBTB3, RHOD, RHOT1, RHOU, RHPN1, RHPN2, RIC1, RIC8A, RIC8B, RIF1, RILP, RILPL1, RIMKLB, RIN1, RIN3, RING1, RINL, RIOK1, RIOK2, RIOK3, RIPK1, RIPK2, RLF, RMI1, RMI2, RMND1, RMND5B, RNASE1, RNASE4, RNASEH1-AS1, RNASEH2A, RNASEH2B, RNASEL, RNF103, RNF111, RNF115, RNF121, RNF122, RNF123, RNF125, RNF14, RNF144B, RNF146, RNF152, RNF167, RNF169, RNF180, RNF181, RNF187, RNF19A, RNF2, RNF207, RNF213, RNF214, RNF216, RNF217, RNF220, RNF26, RNF34, RNF38, RNF41, RNF43, RNFT1, RNGTT, RNLS, RNPC3, ROBO1, ROCK1, ROCK2, ROGDI, ROM1, ROMO1, RORC, RP2, RP9, RPA3, RPAP2, RPAP3, RPF1, RPGR, RPH3AL, RPL10, RPL11, RPL13, RPL13A, RPL13AP20, RPL13P5, RPL21P44, RPL22L1, RPL23, RPL24, RPL26, RPL26L1, RPL27A, RPL28, RPL30, RPL31, RPL32, RPL34, RPL35, RPL35A, RPL36, RPL36AL, RPL37, RPL37A, RPL38, RPL39, RPL39L, RPL41, RPL8, RPLP0, RPLP1, RPLP2, RPP14, RPP21, RPP25, RPP25L, RPP38, RPP40, RPRD2, RPS10P7, RPS12, RPS14, RPS14P3, RPS16, RPS18, RPS19, RPS19BP1, RPS2, RPS20, RPS21, RPS24, RPS25, RPS26, RPS27A, RPS28, RPS29, RPS5, RPS6KA1, RPS6KA2, RPS6KA3, RPS6KB1, RPS6KL1, RPS7, RPS8, RPS9, RPTOR, RPUSD1, RPUSD3, RPUSD4, RRAGB, RRAGD, RRAS, RRAS2, RRBP1, RREB1, RRM2B, RRN3P1, RRNAD1, RRP15, RRP1B, RRP36, RRP7BP, RRP9, RRS1, RSAD1, RSBN1L, RSC1A1, RSL24D1, RSPH3, RSPRY1, RSRC1, RSRP1, RTCA, RTEL1, RTF1, RTKN, RTN2, RTN4IP1, RTN4R, RTN4RL1, RTN4RL2, RTP4, RUFY1, RUNX1, RUSC1, RUSC2, RUVBL1, RWDD1, RWDD2B, RXRA, S100A10, S100A11, S100A13, S100A14, S100A4, S100A9, S100P, S1PR1, S1PR2, SAA1, SAA2, SAA4, SAAL1, SAC3D1, SACS, SAMD1, SAMD10, SAMD12, SAMD4A, SAMD4B, SAMD5, SAMD9, SAMD9L, SAMHD1, SAP130, SAP30, SARDH, SARS, SARS2, SASH1, SASS6, SAT1, SAT2, SATB1, SATB2, SAYSD1, SBDSP1, SBF2, SBN02, SC5D, SCAF11, SCAF8, SCAMPI, SCAMP2, SCAMP4, SCAND1, SCAPER, SCARB1, SCARF1, SCD, SCFD2, SCG5, SCGN, SCHIP1, SCLT1, SCLY, SCMH1, SCML2, SCN8A, SCN9A, SCNM1, SCNN1D, SCYL2, SCYL3, SDC1, SDC4, SDCCAG8, SDF2L1, SDHAF4, SDHAP2, SDR42E1, SDSL, SEC11C, SEC14L1, SEC14L2, SEC16B, SEC22A, SEC23IP, SEC24A, SEC24D, SEC31A, SEC31B, SEC61B, SEC61G, SECISBP2L, SEH1L, SEL1L, SEL1L3, SELENBP1, SELK, SELO, SEMA4B, SEMA4C, SEMA4F, SEMA4G, SEMA5A, SEMA6C, SENP2, SENP7, SEPHS2, SEPN1, SEPP1, SEPSECS, SEPT4, SEPT5, SEPT6, SEPT8, SEPT9, SEPW1, SERAC1, SERF2, SERGEF, SERINC5, SERPINA1, SERPINA10, SERPINA11, SERPINA3, SERPINA4, SERPINA5, SERPINA6, SERPINA7, SERPINB6, SERPINC1, SERPIND1, SERPINE1, SERPINF1, SERPINF2, SERPING1, SERPINH1, SERPINI1, SERTAD1, SESN1, SESN2, SESTD1, SETBP1, SETD2, SETDB1, SETDB2, SETMAR, SETX, SF1, SF3A1, SF3B3, SF3B4, SF3B5, SFMBT1, SFPQ, SFR1, SFT2D2, SFXN2, SFXN3, SFXN4, SFXN5, SGK1, SGK223, SGK3, SGMS1, SGMS2, SGOL2, SGSM2, SH2B2, SH2D3A, SH2D4A, SH2D5, SH3BGR, SH3BGRL2, SH3BGRL3, SH3BP2, SH3D19, SH3D21, SH3GL1, SH3KBP1, SH3PXD2A, SH3PXD2B, SH3RF1, SH3RF2, SH3TC1, SHANK2, SHB, SHF, SHFM1, SHH, SHISA4, SHMT1, SHMT2, SHPK, SHPRH, SHQ1, SHROOM1, SHROOM2, SHROOM3, SHTN1, SIDT2, SIK1, SIK2, SIKE1, SIL1, SIMC1, SIN3A, SIPA1, SIPA1L1, SIPA1L2, SIPA1L3, SIRPA, SIRT1, SIRT4, SIVA1, SIX5, SKA2, SKAP1, SKAP2, SKIL, SKIV2L2, SKP2, SLAIN1, SLC10A1, SLC10A3, SLC10A5, SLC10A7, SLC11A2, SLC12A4, SLC12A6, SLC12A7, SLC12A8, SLC12A9, SLC13A3, SLC13A5, SLC15A1, SLC16A12, SLC16A2, SLC16A4, SLC16A7, SLC17A1, SLC17A3, SLC17A4, SLC17A9, SLC18B1, SLC19A1, SLC19A2, SLC19A3, SLC1A1, SLC1A4, SLC20A1, SLC20A2, SLC22A1, SLC22A10, SLC22A15, SLC22A23, SLC22A3, SLC22A5, SLC22A9, SLC23A2, SLC25A1, SLC25A10, SLC25A11, SLC25A13, SLC25A14, SLC25A15, SLC25A18, SLC25A19, SLC25A22, SLC25A25, SLC25A25-AS1, SLC25A27, SLC25A28, SLC25A29, SLC25A32, SLC25A33, SLC25A40, SLC25A45, SLC25A46, SLC26A1, SLC26A11, SLC26A2, SLC26A6, SLC27A1, SLC27A2, SLC27A3, SLC27A5, SLC28A1, SLC29A2, SLC29A3, SLC2A1, SLC2A10, SLC2A12, SLC2A13, SLC2A4RG, SLC2A6, SLC2A8, SLC2A9, SLC30A1, SLC30A6, SLC31A1, SLC33A1, SLC35A4, SLC35A5, SLC35B4, SLC35C1, SLC35D2, SLC35E4, SLC35F2, SLC35F6, SLC35G1, SLC35G2, SLC36A1, SLC37A1, SLC37A3, SLC38A1, SLC38A3, SLC38A4, SLC38A9, SLC39A10, SLC39A11, SLC39A14, SLC39A4, SLC39A5, SLC3A2, SLC40A1, SLC41A1, SLC41A2, SLC43A1, SLC43A2, SLC43A3, SLC44A2, SLC44A3, SLC45A3, SLC46A1, SLC46A3, SLC48A1, SLC4A11, SLC4A1AP, SLC4A2, SLC4A4, SLC4A7, SLC50A1, SLC51A, SLC52A2, SLC5A3, SLC5A6, SLC5A9, SLC6A12, SLC6A8, SLC6A9, SLC7A1, SLC7A2, SLC7A6, SLC8B1, SLC9A3R1, SLC9A3R2, SLCO1B1, SLCO1B3, SLFN12, SLFN5, SLIRP, SLK, SLPI, SLX4, SLX4IP, SMAD1, SMAD3, SMAD4, SMAD6, SMAD7, SMARCA1, SMARCA2, SMARCA4, SMARCA5, SMARCAD1, SMARCAL1, SMARCB1, SMARCC1, SMARCD3, SMARCE1, SMC1A, SMC2, SMC3, SMC4, SMC5, SMCHD1, SMCO2, SMCO3, SMCO4, SMG1, SMG6, SMG8, SMG9, SMIM11, SMIM12, SMIM3, SMIM4, SMIM8, SMKR1, SMLR1, SMO, SMOX, SMPD2, SMPDL3A, SMPDL3B, SMS, SMTN, SMURF2, SMYD3, SMYD4, SNAI3-AS1, SNAP23, SNAPC1, SNAPC2, SNAPC3, SNAPC4, SND1, SNED1, SNHG1, SNHG10, SNHG12, SNHG15, SNHG17, SNHG19, SNHG21, SNHG25, SNHG5, SNHG6, SNHG7, SNHG8, SNIP1, SNN, SNRK, SNRK-AS1, SNRNP200, SNRNP25, SNRNP27, SNRNP35, SNRNP40, SNRPA, SNRPB2, SNRPD1, SNRPD2, SNRPE, SNRPF, SNRPG, SNTB1, SNTB2, SNUPN, SNX10, SNX13, SNX15, SNX18, SNX2, SNX21, SNX24, SNX27, SNX29P2, SNX30, SNX33, SNX8, SOAT1, SOBP, SOCS2-AS1, SOCS3, SOCS4, SOCS6, SOD1, SOD2, SOGA1, SORCS2, SORT1, SOS1, SOS2, SOWAHB, SOWAHC, SOX12, SOX13, SOX4, SOX5, SOX6, SP100, SP140L, SPAG1, SPAG16, SPAST, SPATA13, SPATA21, SPATA25, SPATA41, SPATA5, SPATA7, SPATS2, SPATS2L, SPECC1, SPECC1L, SPEN, SPG11, SPG7, SPHK1, SPICE1, SPIDR, SPIN1, SPIN2B, SPIN3, SPIN4, SPINK1, SPINT1, SPIRE2, SPON2, SPOP, SPP2, SPRED1, SPRED2, SPRTN, SPRY4, SPSB1, SPSB3, SPTAN1, SPTBN1, SPTBN2, SPTLC3, SPTSSA, SPX, SQLE, SQRDL, SQSTM1, SRBD1, SRC, SRCAP, SRD5A1, SRD5A2, SREBF2, SREK1IP1, SRGAP1, SRGAP2, SRGAP2B, SRGN, SRI, SRP14-AS1, SRPK2, SRPX2, SRRD, SRRM2, SRRT, SRSF1, SRSF2, SRSF3, SRSF5, SRSF6, SRSF7, SRSF8, SRXN1, SSB, SSBP3, SSBP4, SSH1, SSH2, SSH3, SSR4, SSRP1, SSTR1, SSX2IP, ST14, ST20-AS1, ST3GAL2, ST3GAL3, ST3GAL4, ST3GAL5, ST5, ST6GAL1, ST6GALNAC2, ST6GALNAC4, ST7, STAC3, STAG1, STAG2, STAG3L5P-PVRIG2P-PILRB, STAM2, STAP2, STARD10, STARD13, STARD4, STARD5, STARD8, STAT1, STAT3, STAT4, STAT5A, STAT5B, STAT6, STAU2, STBD1, STC2, STEAP1, STEAP2, STEAP3, STIM1, STIP1, STK10, STK11IP, STK17A, STK3, STK36, STK38L, STMN1, STOML1, STON2, STPG1, STRADA, STRBP, STRIP1, STRN, STX17, STX18, STX1A, STX3, STX4, STX5, STX6, STX7, STX8, STXBP1, STXBP3, STXBP4, STXBP5, STYX, SUCLG2-AS1, SUDS3, SUFU, SUGT1, SULF1, SULF2, SUOX, SUPT16H, SUPT20H, SUPT3H, SUPT6H, SUPT7L, SURF2, SUSD6, SUV39H1, SUV420H1, SUV420H2, SUZ12, SUZ12P1, SVBP, SVIL, SVIP, SWSAP1, SWT1, SYDE1, SYDE2, SYNCRIP, SYNE1, SYNE3, SYNE4, SYNGR2, SYNJ2, SYNPO, SYNRG, SYPL2, SYT12, SYT17, SYT9, SZRD1, TAB1, TAB3, TACC1, TACC2, TACC3, TACO1, TACSTD2, TADA1, TADA2A, TAF11, TAF13, TAF1B, TAF2, TAF3, TAF4, TAF6L, TAF8, TAF9B, TAGLN, TAMM41, TANC1, TANGO6, TAOK1, TAOK2, TAOK3, TAP1, TAP2, TAPT1, TARBP1, TARS2, TASP1, TATDN3, TAX1BP1, TAX1BP3, TBC1D1, TBC1D10A, TBC1D12, TBC1D15, TBC1D16, TBC1D19, TBC1D2, TBC1D22A, TBC1D23, TBC1D24, TBC1D25, TBC1D31, TBC1D4, TBC1D5, TBC1D7, TBC1D8B, TBC1D9, TBC1D9B, TBCA, TBCC, TBCCD1, TBCD, TBCE, TBCEL, TBCK, TBL1X, TBL1XR1, TBPL1, TBX15, TBX19, TBX3, TCAF1, TCEA1, TCEA2, TCEAL1, TCEAL3, TCEAL8, TCEB2, TCERG1, TCF12, TCF3, TCF7, TCF7L1, TCF7L2, TCHP, TCIRG1, TCOF1, TCP11L2, TCTA, TCTEX1D2, TCTN3, TDP1, TDRD3, TDRD7, TDRKH, TEAD1, TEAD3, TEAD4, TECR, TEFM, TENM1, TEP1, TERF1, TESC, TET2, TEX10, TEX2, TEX30, TF, TFAP4, TFCP2, TFDP2, TFE3, TFEB, TFG, TFPI, TFR2, TFRC, TGFA, TGFB1, TGFB1I1, TGFB3, TGFBR1, TGFBR2, TGFBR3L, TGIF2-C20orf24, TGM1, TGM2, TGS1, THADA, THAP10, THAP2, THAP6, THAP7, THAP8, THAP9, THAP9-AS1, THEM6, THNSL1, THOC1, THOC6, THOP1, THPO, THRAP3, THRB, THSD1, THYN1, TIA1, TIAM1, TICAM1, TIFA, TIGAR, TIGD2, TIGD5, TIMELESS, TIMM10, TIMM8B, TIMM9, TIMP1, TIMP2, TINAGL1, TINF2, TIPIN, TIPRL, TIRAP, TJP1, TK1, TK2, TKT, TLCD1, TLCD2, TLDC1, TLE1, TLE4, TLK1, TLK2, TLN1, TLN2, TLR1, TLR2, TLR3, TLR4, TM4SF1, TM4SF4, TM4SF5, TM7SF2, TM9SF4, TMA7, TMC4, TMCC2, TMC03, TMC04, TMC06, TMED6, TMED7-TICAM2, TMED8, TMEM102, TMEM107, TMEM109, TMEM116, TMEM120B, TMEM121, TMEM128, TMEM129, TMEM131, TMEM132A, TMEM133, TMEM134, TMEM136, TMEM139, TMEM140, TMEM141, TMEM144, TMEM150C, TMEM154, TMEM156, TMEM158, TMEM159, TMEM160, TMEM161B, TMEM165, TMEM167B, TMEM168, TMEM170A, TMEM170B, TMEM176A, TMEM176B, TMEM177, TMEM184A, TMEM184C, TMEM185B, TMEM187, TMEM189, TMEM2, TMEM200B, TMEM201, TMEM220, TMEM223, TMEM233, TMEM238, TMEM243, TMEM246, TMEM256, TMEM256-PLSCR3, TMEM258, TMEM261, TMEM263, TMEM265, TMEM27, TMEM30B, TMEM38A, TMEM39B, TMEM41A, TMEM44, TMEM50A, TMEM52, TMEM53, TMEM54, TMEM56, TMEM57, TMEM63B, TMEM67, TMEM68, TMEM70, TMEM74B, TMEM79, TMEM82, TMEM87B, TMEM88, TMEM92, TMF1, TMLHE, TMOD1, TMOD2, TMPO, TMPRSS2, TMPRSS6, TMSB10, TMTC1, TMTC2, TMTC3, TMX4, TNFAIP8, TNFAIP8L1, TNFRSF10A, TNFRSF10B, TNFRSF10C, TNFRSF10D, TNFRSF14, TNFRSF19, TNFRSF1A, TNFRSF1B, TNFRSF25, TNFSF10, TNFSF12, TNFSF13B, TNFSF14, TNIK, TNIP1, TNIP2, TNK2, TNKS, TNKS1BP1, TNKS2, TNPO2, TNPO3, TNRC6B, TNRC6C, TNS1, TNS3, TOB1, TOB2, TOE1, TOM1L2, TOMM40, TOMM40L, TOMM7, TOP1MT, TOP2B, TOPBP1, TOR1B, TOR3A, TP53, TP53BP1, TP53BP2, TP53I13, TP53I3, TP53INP2, TP73-AS1, TPBG, TPCN1, TPCN2, TPD52, TPGS1, TPK1, TPM1, TPM2, TPM4, TPP2, TPR, TPRN, TPST1, TPT1, TPX2, TRAF1, TRAF3IP2, TRAF4, TRAFD1, TRAK1, TRAK2, TRAM1, TRAM2, TRANK1, TRAPPC10, TRAPPC11, TRAPPC12, TRAPPC13, TRAPPC2B, TRAPPC5, TRAPPC6A, TRAPPC6B, TRAPPC8, TRAPPC9, TREH, TRIAP1, TRIB1, TRIB2, TRIB3, TRIM13, TRIM15, TRIM16, TRIM16L, TRIM2, TRIM21, TRIM23, TRIM24, TRIM26, TRIM29, TRIM3, TRIM33, TRIM34, TRIM38, TRIM45, TRIM47, TRIMS, TRIM52, TRIM52-AS1, TRIM6, TRIM62, TRIM65, TRIM66, TRIM68, TRIM7, TRIMS, TRIO, TRIP11, TRIP12, TRIP13, TRIP4, TRIT1, TRMT10A, TRMT10B, TRMT11, TRMT112, TRMT12, TRMT13, TRMT1L, TRMT2A, TRMT61B, TRNP1, TRPM4, TRPT1, TRPV1, TRPV4, TRRAP, TSC22D1, TSC22D2, TSC22D4, TSEN15, TSEN2, TSEN54, TSHZ1, TSHZ2, TSLP, TSNARE1, TSPAN12, TSPAN13, TSPAN14, TSPAN15, TSPAN4, TSPAN6, TSPAN8, TSPAN9, TSPO, TSPO2, TSPYL1, TSPYL2, TSPYL4, TSR1, TSSC1, TSSC4, TSSK6, TSTD1, TSTD2, TSTD3, TTBK2, TTC21B, TTC23, TTC26, TTC27, TTC28, TTC31, TTC39B, TTC39C, TTC3P1, TTC5, TTC7B, TTC8, TTC9, TTF1, TTF2, TTI2, TTLL1, TTLL11, TTLL12, TTLL4, TTLL5, TTLL7, TTPA, TTPAL, TTR, TUBA1C, TUBB, TUBB2A, TUBB4B, TUBB6, TUBE1, TUBG2, TUBGCP3, TUBGCP4, TUBGCP5, TUBGCP6, TUG1, TULP3, TULP4, TUSC8, TWF2, TWISTNB, TWSG1, TXLNG, TXN, TXNDC11, TXNDC17, TXNDC9, TXNRD1, TXNRD3, TYK2, TYMP, TYMS, TYRO3, TYSND1, TYVV1, TYVV1B, U2AF2, U2SURP, UACA, UAP1, UBA1, UBA2, UBA3, UBA52, UBA6, UBA6-AS1, UBA7, UBAC2, UBALD2, UBAP1L, UBAP2, UBAP2L, UBASH3B, UBD, UBE2D1, UBE2D4, UBE2E2, UBE2G1, UBE2H, UBE2J1, UBE2K, UBE2MP1, UBE2R2, UBE2S, UBE2T, UBE3C, UBE3D, UBE4B, UBFD1, UBIAD1, UBL4A, UBL5, UBL7-AS1, UBN2, UBOX5, UBQLN1, UBQLN2, UBQLN4, UBR1, UBR2, UBR3, UBR5, UBR5-AS1, UBR7, UBTD1, UBTF, UBXN2A, UBXN2B, UCHL5, UCN, UFL1, UFSP1, UGDH, UGT1A1, UGT1A6, UGT2A3, UGT2B10, UGT2B15, UGT2B17, UGT2B28, UGT2B4, UGT2B7, UGT3A1, UHMK1, UHRF1BP1, UHRF1BP1L, UIMC1, ULBP3, ULK1, ULK4, UMAD1, UNC119, UNC13B, UNC13D, UNC5B, UNG, UNK, UPB1, UPP1, UPRT, UQCC3, UQCR10, UQCR11, UQCRB, UQCRH, UQCRHL, UQCRQ, URB1, URB1-AS1, URB2, URGCP, UROC1, USB1, USMG5, USP1, USP11, USP13, USP20, USP21, USP22, USP24, USP25, USP27X, USP28, USP30, USP32, USP33, USP34, USP35, USP43, USP46, USP47, USP49, USP5, USP53, USP54, USP6NL, USP8, USP9X, USPL1, UTP11L, UTP14A, UTP15, UTP18, UTP20, UTRN, UVRAG, UVSSA, VAC14, VAMP1, VAMP4, VAMPS, VANGL1, VARS, VASN, VASP, VAV2, VCL, VCP, VDAC1, VDR, VEGFA, VIL1, VIPAS39, VKORC1, VM01, VNN1, VNN2, VNN3, VPREB3, VPS13A, VPS13B, VPS13C, VPS13D, VPS18, VPS26B, VPS33A, VPS33B, VPS37A, VPS37D, VPS41, VPS50, VPS51, VPS52, VPS53, VPS54, VPS72, VPS8, VRK1, VRK2, VSIG10L, VSNL1, VTCN1, VTI1A, VTN, VWA1, VWA5A, VWA7, VWA8, WARS, WARS2, WASL, WBP1, WBP1L, WBSCR16, WBSCR27, WDFY2, WDFY3, WDR12, WDR18, WDR24, WDR25, WDR26, WDR35, WDR36, WDR37, WDR4, WDR44, WDR45, WDR48, WDR5, WDR55, WDR5B, WDR7, WDR70, WDR72, WDR75, WDR89, WDR91, WDR92, WEE1, WFDC2, WIBG, WIPF3, WIPI2, WIZ, WLS, WNK1, WNT3, WNT5A, WRN, WSB1, WSB2, WTAP, WWC1, WWC2, WWC3, WWOX, WWP1, WWP2, WWTR1, XBP1, XDH, XIST, XKR8, XPC, XPNPEP1, XPNPEP2, XPO4, XPO7, XPOT, XRCC4, XRCC5, XRCC6, XRCC6BP1, XRN1, XRRA1, XXYLT1, XYLT2, YAE1D1, YAF2, YAP1, YARS2, YBX1, YDJC, YEATS2, YEATS4, YJEFN3, YLPM1, YPEL3, YPEL5, YTHDC2, YTHDF3-AS1, YWHAG, ZADH2, ZAK, ZBED3, ZBED5, ZBED6, ZBED6CL, ZBED9, ZBTB14, ZBTB20, ZBTB21, ZBTB24, ZBTB26, ZBTB3, ZBTB33, ZBTB34, ZBTB38, ZBTB39, ZBTB40, ZBTB41, ZBTB42, ZBTB43, ZBTB44, ZBTB45, ZBTB7A, ZBTB7B, ZBTB8A, ZBTB9, ZC2HC1A, ZC3H10, ZC3H12A, ZC3H12C, ZC3H14, ZC3H3, ZC3H4, ZC3H7B, ZC3HC1, ZC4H2, ZCCHC10, ZCCHC11, ZCCHC2, ZCCHC24, ZCCHC4, ZDBF2, ZDHHC13, ZDHHC14, ZDHHC16, ZDHHC17, ZDHHC18, ZDHHC2, ZDHHC23, ZDHHC8, ZEB1-AS1, ZER1, ZFAND2A, ZFAND2B, ZFAND3, ZFAND4, ZFAS1, ZFAT, ZFHX3, ZFHX4, ZFP1, ZFP30, ZFP36, ZFP36L1, ZFP36L2, ZFP62, ZFP69, ZFP69B, ZFP90, ZFP91, ZFPM1, ZFYVE16, ZFYVE26, ZFYVE28, ZFYVE9, ZGLP1, ZHX2, ZHX3, ZIC1, ZKSCAN2, ZKSCAN3, ZKSCAN8, ZMAT1, ZMAT3, ZMAT5, ZMIZ1, ZMIZ2, ZMPSTE24, ZMYM1, ZMYM2, ZMYM3, ZMYM4, ZMYM6, ZMYND12, ZMYND15, ZNF10, ZNF100, ZNF106, ZNF107, ZNF112, ZNF117, ZNF121, ZNF131, ZNF133, ZNF134, ZNF141, ZNF142, ZNF146, ZNF148, ZNF155, ZNF165, ZNF17, ZNF175, ZNF18, ZNF180, ZNF181, ZNF182, ZNF184, ZNF189, ZNF195, ZNF20, ZNF205, ZNF211, ZNF212, ZNF217, ZNF222, ZNF224, ZNF23, ZNF232, ZNF235, ZNF236, ZNF239, ZNF248, ZNF25, ZNF253, ZNF254, ZNF260, ZNF267, ZNF274, ZNF275, ZNF280C, ZNF280D, ZNF281, ZNF282, ZNF284, ZNF286A, ZNF292, ZNF296, ZNF30, ZNF302, ZNF318, ZNF319, ZNF32, ZNF324, ZNF324B, ZNF326, ZNF334, ZNF335, ZNF337, ZNF33A, ZNF34, ZNF341, ZNF354A, ZNF362, ZNF367, ZNF37A, ZNF383, ZNF385A, ZNF385B, ZNF395, ZNF407, ZNF41, ZNF414, ZNF416, ZNF419, ZNF429, ZNF432, ZNF433, ZNF436, ZNF440, ZNF441, ZNF444, ZNF445, ZNF449, ZNF45, ZNF451, ZNF460, ZNF468, ZNF473, ZNF48, ZNF480, ZNF484, ZNF485, ZNF490, ZNF493, ZNF503, ZNF503-AS2, ZNF506, ZNF512, ZNF512B, ZNF516, ZNF518A, ZNF524, ZNF542P, ZNF550, ZNF552, ZNF559, ZNF561, ZNF563, ZNF569, ZNF579, ZNF580, ZNF581, ZNF582-AS1, ZNF583, ZNF585A, ZNF586, ZNF587B, ZNF593, ZNF596, ZNF608, ZNF609, ZNF614, ZNF615, ZNF618, ZNF619, ZNF620, ZNF621, ZNF627, ZNF628, ZNF638, ZNF639, ZNF641, ZNF652, ZNF654, ZNF662, ZNF668, ZNF672, ZNF675, ZNF680, ZNF684, ZNF688, ZNF689, ZNF69, ZNF691, ZNF692, ZNF697, ZNF700, ZNF703, ZNF704, ZNF707, ZNF708, ZNF710, ZNF74, ZNF746, ZNF747, ZNF764, ZNF77, ZNF770, ZNF771, ZNF777, ZNF778, ZNF780A, ZNF780B, ZNF784, ZNF785, ZNF786, ZNF787, ZNF789, ZNF79, ZNF81, ZNF821, ZNF839, ZNF84, ZNF841, ZNF844, ZNF852, ZNF862, ZNF92, ZNHIT2, ZNHIT6, ZNRD1, ZNRF1, ZNRF2, ZNRF3, ZP3, ZRSR2, ZSCAN12, ZSCAN16-AS1, ZSCAN18, ZSCAN20, ZSCAN26, ZSCAN29, ZSCAN31, ZSCAN9, ZSWIM1, ZSWIM3, ZSWIM4, ZSWIM6, ZSWIM8, ZW10, ZWILCH, ZWINT, ZXDC, ZYG11B, ZYX, ZZEF1, ZZZ3, CCDC109B, COL12A1, CXCL9, FUT8, GBP3, GHRL, GOLT1A, HMGA1, INSC, NINJ2, OXER1, TIMP3, TTC39A, AADAT, AASDH, ABCA2, ABCA3, ACAD10, ACCS, ACIN1, ACP2, ACP6, ACSL4, ACSS3, ADAM17, ADRM1, AHCTF1, AIFM2, AKAP8L, AKIRIN2, AKR7L, ALDOC, ALG6, ALKBH5, ALS2CL, AMMECR1L, ANKHD1-EIF4EBP3, ANKRD10, ANKRD6, AP5Z1, APH1B, APITD1, AQP11, ARF1, ARF4, ARHGAP21, ARHGAP33, ARHGEF10, ARHGEF37, ARHGEF6, ARHGEF9, ARID1A, ARID3B, ARPIN, ASB6, ASGR1, ATP6VOC, ATP6V1B2, ATP8B3, ATP8B4, ATXN1L, AUH, B3GNT5, B4GALT1, BAG1, BCKDHA, BEND7, BRD1, BRD2, BRPF1, BTN2A1, BUD31, C11orf80, C12orf49, C12orf66, C14orf132, C16orf72, C1orf52, C20orf24, C2orf76, C4orf33, C4orf36, CAMSAP3, CAPS2, CASP4, CASP8, CATSPER2, CBLL1, CBY1, CC2D2A, CCDC122, CCDC125, CCDC142, CCDC57, CCDC68, CCDC71, CCDC9, CCDC90B, CCDC93, CCL28, CD40, CD82, CDK10, CDK5RAP3, CDKN2AIP, CDNF, CDR2, CENPL, CENPN, CENPQ, CEP41, CFAP20, CHAF1B, CHEK1, CHKA, CHTF18, CLTA, CMC4, CNNM4, CNOT4, CNTFR, COX19, CPB2-AS1, CPN1, CPT1B, CROP, CREM, CRKL, CRTC2, CSNK1A1L, CSRNP1, CTNNAL1, CWC22, CWC25, CXorf38, CYP2B7P, CYP4V2, D2HGDH, DCP1B, DCTN5, DDIT3, DENND5A, DET1, DHFRL1, DHX32, DHX58, DLGAP1-AS1, DNAH5, DNAJB6, DNAJC16, DNAJC25, DNAL1, DNAL4, DNASE1L1, DOCK10, DOCK6, DPP4, DRAM1, DTX2, DUSP14, DUT, DVL2, DYNLL2, DYRK1A, E2F6, EAF1, ECHDC3, EFHC1, EFTUD1, EIF1, EIF1AD, EIF1B, EIF4A3, EIF5, ELL2, ELMO3, ELMOD2, ELP4, ENKUR, EPCAM, EPHX2, EPN2, ERMAP, ERV3-1, ETF1, EXD3, EXOC1, EZH1, F11, FAM104B, FAM120B, FAM73A, FAM76A, FBXO11, FBXO30, FBXO42, FERMT1, FERMT2, FGF14-AS2, FHL2, FLCN, FLT3LG, FNBP4, FOSL2, FOXK2, FOXO3, FOXP1, FRS2, FUT4, FXR2, FZD6, GABPA, GABPB1, GAMT, GAPDH, GAPVD1, GAS6-AS1, GAS8, GATS, GATSL3, GBAS, GBP1, GCA, GCC1, GCC2, GCSHP3, GDNF-AS1, GET4, GFER, GINS1, GK, GLUL, GMDS-AS1, GMEB1, GNMT, GOLGA1, GOLGA2P5, GOLGA8A, GPALPP1, GPATCH11, GPATCH3, GPBP1, GPI, GRAMD4, GRIA3, GRPEL1, GSR, GSTA4, GTF2E1, GTPBP10, GUSBP4, GZF1, HAUS5, HEIH, HEXDC, HFE, HIAT1, HIVEP2, HLA-C, HLA-F, HLA-J, HLA-L, HMGXB4, HNRNPUL2, HOMER1, HSF4, HSP90AB1, HSPA14, HSPE1, HYI, ICA1, IL18R1, INTS2, IP6K1, IST1, ITPKC, ITPRIP, JMJD6, JRKL, KATNAL1, KCMF1, KCTD6, KDM2A, KIAA0907, KIAA1143, KLHL11, KLHL2, KLHL5, KRCC1, KTI12, LATS2, LCLAT1, LEPR, LGALS3, LGALS8, LIMK2, LINC00174, LINC00341, LINC01128, LINC01503, LOC100499489, LOC100507547, LOC100507577, LOC101927630, LOC101927843, LOC103021295, LOC155060, LRRC23, LRRC39, LRRC58, LSM8, LUC7L3, LY75, LZTFL1, MAGOH, MAL2, MAML1, MAN2C1, MAPK6, MAPK7, MAPRE1, MCM2, MECP2, MED10, MED13, MED26, MEF2D, METTL3, MEX3C, MGAT1, MICALL1, MIEF1, MMP25-AS1, MOB3B, MOCOS, MOGAT3, MORC3, MORF4L1, MOSPD1, MPI, MPPS, MSL2, MTF1, MTHFS, MUT, MXI1, MYPN, NAA30, NAA60, NCOA6, NDEL1, NEMP1, NEU4, NHLRC3, NICN1, NIPBL, NME7, NMRK1, NNT-AS1, NOL3, NRF1, NRSN2-AS1, NT5DC3, NUP153, NUTM2B-AS1, OAF, ODC1, OSCP1, OSMR, P4HA2, PAN2, PAPD7, PARP3, PBLD, PCF11, PCGF2, PCMTD2, PDRG1, PDSS1, PELO, PEX1, PF4V1, PFKFB3, PFKL, PGK1, PHF1, PHF12, PHF13, PHYHD1, PI4K2A, PICK1, PIGB, PIM3, PIPDX, PITHD1, PITPNM1, PKN3, PKNOX1, PLA2G12A, PLAGL2, PLSCR1, PMEL, POM121, POM121C, POU2F1, PPAT, PPIC, PPDX, PPP1R13L, PPP1R3E, PPP2CA, PPP2CB, PPP2R2A, PPP3CB-AS1, PPP3R1, PPP4R3A, PRCC, PRDM10, PRDM2, PRKRIR, PRPF40B, PRR3, PRSS53, PSMD12, PSMD6-A52, PSMG3-AS1, PTPN12, PXN-AS1, QTRT1, R3HCC1L, RAB21, RAB38, RAB3IP, RAB7A, RAB8B, RABL2B, RAD9A, RASGRP3, RASSF1, RASSF4, RBAK, RBBP6, RBL2, RBM14-RBM4, RBM39, RC3H1, RGMB, RGN, RHEB, RIT1, RND3, RNF10, RNF114, RNF144A, RNF168, RNF19B, RNF215, RNF219, RNF24, RNF4, RRAGC, RSRC2, RYBP, S100PBP, SAFB2, SCAF4, SCAND2P, SCML1, SCRN3, SDC3, SDE2, SDF2, SDHAF1, SENP8, SEPT7P2, SERP1, SERP2, SERPINB8, SERTAD3, SETD1B, SETD8, SFI1, SGTB, SIAH2, SIRT3, SIRT7, SKI, SKIV2L, SLC15A3, SLC16A1, SLC22A7, SLC23A1, SLC29A4, SLC2A11, SLC30A4, SLC35E2, SLC35E2B, SLC3A1, SLMO2-ATP5E, SMC6, SMCR8, SNHG3, SNRNP48, SNX11, SNX16, SON, SORBS3, SPAG5, SPAG9, SPATA18, SPATA2, SPATA20, SPATA24, SPG20, SPPL2B, SPTBN5, SPTLC2, SPTY2D1, SRF, SS18, ST3GAL1, STARD7, STK32C, STK35, STRN4, STS, STX11, SUCO, SURF4, SVIL-AS1, SYBU, SYNGAP1, TADA2B, TBC1D20, TBC1D2B, TBKBP1, TCEA3, TCEB1, TCTN1, TDP2, TECPR2, TERF2IP, TESK1, TFB1M, TFDP1, THAP11, THAP3, THBS3, THSD4, TLE3, TMEM11, TMEM115, TMEM117, TMEM171, TMEM175, TMEM181, TMEM198B, TMEM231, TMEM260, TMEM47, TMEM80, TMEM81, TMEM91, TMPRSS9, TMTC4, TNFAIP1, TNFRSF11B, TNPO1, TOP1, TOR1AIP1, TP53TG1, TPI1P2, TPRA1, TPT1-AS1, TRAPPC2, TREX1, TRIM10, TRIM25, TRIM28, TRIM41, TRIOBP, TRIP10, TRMT5, TRUB1, TTC12, TTC13, TTC22, TTN-AS1, TUBA4B, TXNL1, TXNL4B, UBAP1, UBN1, UNKL, UPF1, USP12, USP30-AS1, USP36, USP38, USP7, UXS1, VCPIP1, VMAC, VPS37B, VPS9D1, WAC, WDR20, WDR27, WDR31, WDR45B, WDR47, WDR60, WDR78, WHAMM, WHSC1, XRCC1, YRDC, YTHDF1, YTHDF2, YTHDF3, YY1, YY1AP1, YY2, ZCCHC3, ZCCHC8, ZDHHC21, ZFAND5, ZFYVE21, ZMYM5, ZMYND19, ZNF143, ZNF160, ZNF207, ZNF252P, ZNF263, ZNF354B, ZNF37BP, ZNF382, ZNF397, ZNF410, ZNF420, ZNF438, ZNF44, ZNF514, ZNF528, ZNF544, ZNF558, ZNF561-AS1, ZNF567, ZNF574, ZNF622, ZNF623, ZNF800, ZNF823, ZNF83, ZNF846, ZSCAN16, and ZSCAN30 were classified as dynamic. Group 3 of dynamic genes was observed to include 71 disease-associated genes.

[0597] A1BG-AS1, A2M-AS1, A2ML1, A2MP1, A3GALT2, A4GNT, M06, AACSP1, AADACL2, AADACL2-AS1, AADACL3, AADACL4, AANAT, MRD, AATK, AATK-AS1, ABCA10, ABCA13, ABCA17P, ABCA4, ABCA9, ABCA9-AS1, ABCB5, ABCC11, ABCC12, ABCC13, ABCC5-AS1, ABCC8, ABCD2, ABCG4, ABHD1, ABHD11-AS1, ABHD12B, ABI3, ABI3BP, ABO, ABRA, ACAN, ACBD7, ACCSL, ACE, ACER1, ACKR1, ACKR4, ACOT11, ACOXL, ACPP, ACPT, ACR, ACRV1, ACSBG1, ACSBG2, ACSM4, ACSM6, ACTA2-AS1, ACTC1, ACTG1P17, ACTG1P4, ACTL6B, ACTL7A, ACTL7B, ACTL8, ACTL9, ACTN1-AS1, ACTN2, ACTN3, ACTR3BP2, ACTR3BP5, ACTRT1, ACTRT2, ACVR1C, ACVRL1, ADAD1, ADAD2, ADAM11, ADAM12, ADAM18, ADAM2, ADAM20, ADAM20P1, ADAM21, ADAM21P1, ADAM22, ADAM23, ADAM28, ADAM29, ADAM30, ADAM32, ADAM33, ADAM3A, ADAM5, ADAM6, ADAM7, ADAMDEC1, ADAMTS12, ADAMTS14, ADAMTS15, ADAMTS16, ADAMTS18, ADAMTS19, ADAMTS19-AS1, ADAMTS2, ADAMTS20, ADAMTS3, ADAMTS4, ADAMTS5, ADAMTS6, ADAMTS7P1, ADAMTS8, ADAMTS9-AS1, ADAMTS9-AS2, ADAMTSL1, ADAMTSL2, ADAP1, ADAP2, ADARB2, ADARB2-AS1, ADCY10, ADCY2, ADCY3, ADCY4, ADCY8, ADCYAP1, ADCYAP1R1, ADD2, ADD3-AS1, ADGB, ADGRA1, ADGRA1-AS1, ADGRA2, ADGRB1, ADGRB2, ADGRB3, ADGRE1, ADGRE2, ADGRE3, ADGRE4P, ADGRF1, ADGRF2, ADGRF5, ADGRG2, ADGRL3, ADGRG4, ADGRG5, ADGRL1, ADGRL3, ADGRL3-AS1, ADGRL4, ADGRV1, ADH7, ADIG, ADIPOQ, ADIPOQ-AS1, ADORA1, ADORA2B, ADORA3, ADPGK-AS1, ADRA1D, ADRA2B, ADRB1, ADRB3, ADRBK2, ADTRP, AEBP1, AFAP1-AS1, AFF2, AGAP11, AGAP2, AGAP2-AS1, AGAP4, AGAP7P, AGBL1, AGBL1-AS1, AGBL2, AGBL4, AGBL4-IT1, AGPAT4, AGPAT4-IT1, AGR2, AGR3, AGRP, AGTR2, AHRR, AHSP, AICDA, AIF1, AIF1L, AIFM3, AIM2, AIPL1, ARE, AIRN, AJAP1, AKS, AK7, AK8, AKAP14, AKAP4, AKAP5, AKNAD1, AKR1E2, AKR7A2P1, ALAS2, ALDH1L2, ALDH3B2, ALG1L2, ALG1L9P, ALK, ALKBH3-AS1, ALMS1-IT1, ALMS1P, ALOX12B, ALOX15, ALOX15B, ALOX15P1, ALOX5AP, ALPI, ALPP, ALPPL2, ALS2CR11, ALS2CR12, ALX1, ALX4, AMBN, AMELX, AMELY, AMER2, AMER3, AMICA1, AMPH, AMTN, AMY1B, AMY1C, AMY2A, AMZ1, ANAPC1P1, ANGPT1, ANGPT2, ANGPT4, ANGPTL5, ANHX, ANK1, ANK2, ANK3, ANKDD1A, ANKDD1B, ANKFN1, ANKK1, ANKLE1, ANKRD18B, ANKRD18DP, ANKRD19P, ANKRD20A11P, ANKRD20A12P, ANKRD20A19P, ANKRD20A3, ANKRD20A4, ANKRD20A5P, ANKRD20A8P, ANKRD20A9P, ANKRD26P1, ANKRD26P3, ANKRD30A, ANKRD30B, ANKRD3OBP2, ANKRD3OBP3, ANKRD31, ANKRD34A, ANKRD34B, ANKRD34C, ANKRD34C-AS1, ANKRD36B, ANKRD36BP2, ANKRD44-IT1, ANKRD45, ANKRD55, ANKRD60, ANKRD62, ANKRD62P1-PARP4P3, ANKRD63, ANKRD65, ANKRD66, ANKRD7, ANKS1B, ANKUB1, ANLN, ANO1-AS2, ANO2, ANO3, ANO4, ANO7, ANO9, ANOS1, ANP32A-IT1, ANP32D, ANTXRL, ANTXRLP1, ANXA8, AOAH, AOAH-IT1, AOC1, AP1B1P1, AP1M2, AP3B2, APBA2, APC2, APCDD1, APCDD1L, APCDD1L-AS1, APELA, APLNR, APOBEC1, APOBEC2, APOBEC3A, APOBEC3A_B, APOBEC3B-AS1, APOBEC3D, APOBEC4, APOBR, APOD, APOL5, APOOP5, AQP1, AQP10, AQP12A, AQP12B, AQP2, AQP4-AS1, AQP5, AQP6, AQP8, AREG, ARGFX, ARGFXP2, ARHGAP11A, ARHGAP11B, ARHGAP15, ARHGAP19-SLIT1, ARHGAP23, ARHGAP25, ARHGAP26-AS1, ARHGAP26-IT1, ARHGAP28, ARHGAP31, ARHGAP31-AS1, ARHGAP36, ARHGAP4, ARHGAP40, ARHGAP44, ARHGAP6, ARHGAP8, ARHGAP9, ARHGDIG, ARHGEF15, ARHGEF19, ARHGEF25, ARHGEF26-AS1, ARHGEF3-AS1, ARHGEF33, ARHGEF34P, ARHGEF38, ARHGEF38-IT1, ARHGEF4, ARHGEF7-AS1, ARHGEF7-AS2, ARHGEF9-IT1, ARL11, ARL13A, ARL14EPL, ARL17A, ARL17B, ARL2-SNX15, ARL5C, ARL9, ARMC2, ARMC2-AS1, ARMC3, ARMC4, ARMS2, ARNT2, ARNTL2-AS1, ARPP21, ARR3, ARRDC3-AS1, ARRDC5, ARSI, ART1, ART3, ARTN, ARX, ASAH2, ASAH2B, ASAP1-IT1, ASAP1-1T2, ASB10, ASB11, ASB12, ASB15, ASB16, ASB17, ASB18, ASB2, ASB4, ASB5, ASB9P1, ASCL2, ASCL3, ASCL4, ASCL5, ASIC1, ASIC2, ASIC4, ASIC5, ASMT, ASPHD1, ASPHD2, ASPM, ASPN, ASTL, ASTN1, ASTN2-AS1, ASXL3, ASZ1, ATAD3C, ATAD5, ATCAY, ATE1-AS1, ATG9B, ATL1, ATOH1, ATOH7, ATP10A, ATP10B, ATP11A-AS1, ATP11AUN, ATP12A, ATP13A4, ATP13A4-AS1, ATP13A5, ATP13A5-AS1, ATP1A2, ATP1A3, ATP1A4, ATP1B2, ATP1B4, ATP2A1-AS1, ATP2A3, ATP2B2-IT2, ATP2B3, ATP2C2, ATP4A, ATP4B, ATP5L2, ATP6V0A4, ATP6V0CP3, ATP6V0E2-AS1, ATP6V1B1, ATP6V1B1-AS1, ATP6V1C2, ATP6V1G2, ATP6V1G3, ATP8A1, ATP8A2, ATP8B5P, ATRNL1, ATXN3L, ATXN8OS, AUNIP, AURKB, AVPR1B, AVPR2, AWAT1, AWAT2, AXDND1, B3GALT1, B3GALT2, B3GALT4, B3GALT5, B3GALT5-AS1, B3GAT2, B3GNT4, B3GNT6, B3GNT7, B3GNT8, B4GALNT2, B4GALNT4, B4GALT4-AS1, BAALC, BAALC-AS1, BAALC-AS2, BACH1-IT2, BAGE3, BAGE4, BAGE5, BANCR, BANF2, BANK1, BARHL1, BARHL2, BARX1, BARX2, BASP1, BASP1P1, BAZ2B, BBOX1-AS1, BCAN, BCAT1, BCL11A, BCL11B, BCL2L14, BCL2L15, BCL6B, BCORP1, BCRP2, BCRP3, BDKRB1, BDNF, BEAN1, BECN2, BEGAIN, BEND2, BEND3P3, BEND4, BENDS, BEND6, BEST2, BEST3, BEST4, BFSP2, BGLT3, BGN, BHLHA9, BHLHE22, BHLHE23, BHLHE40-AS1, BHMG1, BIN2, BIN3-IT1, BIROS, BIRC6-AS2, BIRC7, BIRC8, BLACAT1, BLACE, BLID, BLK, BLM, BMP10, BMP15, BMP3, BMP5, BMP6, BMP7, BMP7-AS1, BMPER, BMPR1B, BMPR1B-AS1, BMS1P17, BMS1P18, BMS1P6, BMX, BNC1, BNC2, BNIPL, BOC, BOD1L2, BOK-AS1, BOLA2, BOLA3-AS1, BOLL, BPESC1, BPI, BPIFA1, BPIFA2, BPIFA3, BPIFA4P, BPIFB1, BPIFB2, BPIFB3, BPIFB4, BPIFB6, BPIFC, BPY2B, BPY2C, BRCA2, BRCAT107, BRCAT54, BRD7P3, BRDT, BRDTP1, BREA2, BRINP1, BRINP3, BRIP1, BRS3, BRSK1, BRSK2, BRWD1-AS1, BRWD1-IT2, BSN, BSN-AS2, BSND, BSPH1, BSX, BTBD17, BTBD18, BTF3P11, BTG4, BTK, BTLA, BTN1A1, BTNL10, BTNL2, BTNL3, BTNL8, BTNL9, BUB1, BVES, BVES-AS1, BZRAP1, BZRAP1-AS1, C10orf105, C10orf107, C10orf113, C10orf120, C10orf126, C10orf128, C10orf131, C10orf142, C10orf53, C10orf55, C10orf62, C10orf67, C10orf71, C10orf71-AS1, C10orf82, C10orf90, C10orf91, C10orf95, C10orf99, C11orf16, C11orf21, C11orf39, C11orf40, C11orf42, C11orf44, C11orf45, C11orf53, C11orf63, C11orf70, C11orf72, C11orf85, C11orf86, C11orf87, C11orf88, C11orf97, C12orf40, C12orf42, C12orf50, C12orf54, C12orf56, C12orf71, C12orf74, C12orf77, C12orf79, C12orf80, C14orf177, C14orf180, C14orf39, C15orf26, C15orf27, C15orf32, C15orf43, C15orf53, C15orf54, C15orf56, C15orf59, C15orf59-AS1, C16orf47, C16orf54, C16orf71, C16orf78, C16orf82, C16orf89, C16orf90, C16orf92, C16orf96, C16orf97, C17orf102, C17orf104, C17orf105, C17orf112, C17orf47, C17orf50, C17orf53, C17orf64, C17orf74, C17orf77, C17orf78, C17orf98, C17orf99, C18orf42, C18orf54, C18orf61, C18orf63, C19orf35, C19orf45, C19orf57, C19orf67, C19orf81, C19orf84, C1QA, C1QL2, C1QL4, C1QTNF2, C1QTNF7, C1QTNF8, C1QTNF9, C1QTNF9B, C1orf100, C1orf101, C1orf110, C1orf127, C1orf137, C1orf140, C1orf141, C1orf145, C1orf146, C1orf158, C1orf167, C1orf185, C1orf186, C1orf189, C1orf194, C1orf195, C1orf204, C1orf210, C1orf229, C1orf233, C1orf61, C1orf64, C1orf68, C1orf87, C1orf94, C1orf95, C20orf141, C20orf144, C20orf166-AS1, C20orf173, C20orf195, C20orf197, C20orf202, C20orf203, C20orf62, C20orf78, C20orf85, C21orf140, C21orf62, C21orf62-AS1, C21orf91-OT1, C22orf15, C22orf24, 022orf31, C22orf34, C22orf42, C2CD4B, C2CD4C, C2CD4D, C2orf27A, C2orf27B, C2orf40, C2orf48, C2orf50, C2orf57, C2orf61, C2orf66, C2orf70, C2orf71, C2orf73, C2orf78, C2orf80, C2orf81, C2orf83, C2orf91, C3AR1, C3orf20, C3orf22, C3orf30, C3orf36, C3orf49, C3orf56, C3orf67-AS1, C3orf70, C3orf79, C3orf80, C3orf84, C4orf17, C4orf22, C4orf45, C4orf51, C5AR1, C5orf17, C5orf34, C5orf38, C5orf47, C5orf49, C5orf58, C5orf60, C5orf64, C5orf66-AS1, C5orf66-AS2, C5orf67, C6orf10, C6orf118, C6orf132, C6orf15, C6orf163, C6orf165, C6orf222, C6orf223, C6orf229, C6orf58, C6orf7, C6orf99, C7, C7orf33, C7orf34, C7orf57, C7orf62, C7orf65, C7orf66, C7orf69, C7orf71, C7orf72, 07orf76, C7orf77, C8orf22, C8orf31, C8orf34, C8orf34-AS1, C8orf37-AS1, C8orf49, C8orf74, 08orf86, C8orf87, C8orf88, C9orf106, C9orf129, C9orf131, C9orf135, C9orf135-AS1, C9orf139, C9orf163, C9orf170, C9orf171, C9orf173, C9orf173-AS1, C9orf41-AS1, C9orf47, C9orf50, C9orf62, C9orf66, C9orf84, CA1, CA10, CA11, CA14, CA4, CASB, CA6, CA7, CA8, CABP1, CABP2, CABP4, CABPS, CABP7, CABS1, CACNA1A, CACNA1B, CACNA1C, CACNA1C-AS1, CACNA1C-AS2, CACNA1C-AS4, CACNA1C-IT2, CACNA1C-IT3, CACNA1E, CACNA1F, CACNA1G, CACNA1G-AS1, CACNA1I, CACNA1S, CACNA2D1, CACNA2D2, CACNA2D3, CACNA2D3-AS1, CACNA2D4, CACNB1, CACNB2, CACNB4, CACNG1, CACNG2, CACNG3, CACNG4, CACNG5, CACNG6, CACNG7, CACNG8, CACTIN-AS1, CADM2, CADM2-AS2, CADM3, CADM3-AS1, CADPS, CAGE1, CALB1, CALB2, CALCR, CALCRL, CALHM1, CALHM2, CALHM3, CALML3, CALML3-AS1, CALMLS, CALN1, CALR3, CALY, CAMK2A, CAMK4, CAMKK1, CAMKV, CAMP, CAND1.11, CAND2, CAPN11, CAPN14, CAPN6, CAPN9, CAPNS2, CAPSL, CAPZA3, CARD11, CARD14, CARD17, CARD18, CARD9, CARTPT, CASC1, CASC11, CASC15, CASC16, CASC17, CASC18, CASC2, CASC20, CASC21, CASC23, CASCS, CASC6, CASC8, CASC9, CASKIN1, CASP12, CASP14, CASP1P2, CASP5, CASQ1, CASQ2, CASR, CATIP, CATIP-AS2, CATSPER1, CATSPER2P1, CATSPER4, CATSPERB, CATSPERD, CAV3, CBLN1, CBLN2, CBLN4, CBWD3, CBWDS, CBX2, CBX3P2, CBY3, CC2D2B, CCAT2, CCBE1, CCDC102B, CCDC105, CCDC108, CCDC114, CCDC116, CCDC129, CCDC13-AS1, CCDC136, CCDC140, CCDC141, CCDC144A, CCDC144B, CCDC144CP, CCDC144NL, CCDC144NL-AS1, CCDC148, CCDC148-AS1, CCDC15, CCDC151, CCDC153, CCDC154, CCDC155, CCDC160, CCDC162P, CCDC166, CCDC168, CCDC169, CCDC169-SOHLH2, CCDC170, CCDC171, CCDC172, CCDC173, CCDC175, CCDC177, CCDC178, CCDC179, CCDC180, CCDC181, CCDC182, CCDC184, CCDC185, CCDC26, CCDC27, CCDC30, CCDC33, CCDC36, CCDC37, CCDC37-AS1, CCDC38, CCDC39, CCDC40, CCDC42, CCDC42B, CCDC54, CCDC60, CCDC63, CCDC64B, CCDC65, CCDC67, CCDC70, CCDC73, CCDC74A, CCDC74B, CCDC78, CCDC79, CCDC8, CCDC80, CCDC81, CCDC83, CCDC85A, CCDC87, CCDC88C, CCDC89, CCER1, CCER2, CCIN, CCKAR, CCKBR, CCL1, CCL11, CCL13, CCL17, CCL18, CCL19, CCL22, CCL23, CCL24, CCL25, CCL27, CCL3L3, CCL4L1, CCL4L2, CCM2L, CCNA1, CCNB2, CCNB3, CCND2, CCND2-AS1, CCNI2, CCNJL, CCNYL2, CCR1, CCR10, CCR2, CCR3, CCR4, CCR5, CCR6, CCR7, CCR8, CCR9, CCRL2, CCSER1, CCT6P3, CCT8L2, CD101, CD163L1, CD164L2, CD180, CD19, CD1A, CD1B, CD1C, CD1E, CD2, CD200, CD200R1, CD200R1L, CD207, CD209, CD22, CD226, CD244, CD247, CD248, CD27, CD28, CD300A, CD300C, CD300E, CD300LD, CD300LF, CD300LG, CD33, CD34, CD36, CD37, CD3E, CD3G, CD40LG, CD48, CD5, CD5L, CD6, CD69, CD7, CD70, CD72, CD79B, CD80, CD81-AS1, CD84, CD86, CD8A, CD8B, CD93, CD96, CDC14C, CDC20B, CDC25A, CDC42EP5, CDC42P3, CDCA3, CDCA7, CDCP1, CDCP2, CDH10, CDH11, CDH12, CDH13, CDH15, CDH16, CDH17, CDH18, CDH19, CDH2O, CDH22, CDH23, CDH26, CDH3, CDH4, CDH5, CDH7, CDH8, CDH9, CDHR1, CDHR4, CDIPT-AS1, CDK1, CDK15, CDK5R2, CDKL2, CDKL4, CDKN2A-AS1, CDKN2B-AS1, CDR1, CDRT1, CDRT15, CDRT15L2, CDRT15P1, CDRT15P2, CDRT7, CDRT8, CDS1, CDSN, CDT1, CDX1, CDX2, CDX4, CDY1, CDY1B, CDY2B, CEACAM18, CEACAM20, CEACAM21, CEACAM22P, CEACAM3, CEACAM4, CEACAM5, CEACAM7, CEACAM8, CEBPE, CECR1, CECR3, CECR6, CECR7, CEL, CELA1, CELA2A, CELA2B, CELA3A, CELA3B, CELF2, CELF2-AS1, CELF2-AS2, CELF3, CELF4, CELF5, CELP, CELSR3, CEMIP, CEND1, CENPE, CENPF, CENPI, CENPM, CENPP, CENPVP1, CENPVP2, CEP126, CEP128, CEP170P1, CEP295NL, CEP55, CEP83-AS1, CER1, CERKL, CERS1, CERS3, CERS3-AS1, CERS6-AS1, CES1P2, CES5A, CES5AP1, CETN1, CETP, CFAP43, CFAP44-AS1, CFAP45, CFAP46, CFAP47, CFAP52, CFAP54, CFAP58, CFAP58-AS1, CFAP61, CFAP74, CFAP99, CFC1B, CFD, CFL1P1, CFP, CFTR, CGA, CGB, CGB1, CGB2, CGB5, CGB8, CH17-408M7.1, CH25H, CHAT, CHD3, CHD5, CHEK2P2, CHGA, CHGB, CHIA, CHIAP2, CHIT1, CHKB-CPT1B, CHL1, CHL1-AS1, CHMP1B2P, CHODL, CHODL-AS1, CHP2, CHRDL1, CHRFAM7A, CHRM1, CHRM2, CHRM3-AS1, CHRM3-AS2, CHRM4, CHRM5, CHRNA1, CHRNA2, CHRNA3, CHRNA4, CHRNA5, CHRNA6, CHRNA7, CHRNA9, CHRNB2, CHRNB3, CHRNB4, CHRND, CHRNG, CHST10, CHST2, CHST3, CHST4, CHST5, CHST6, CHST8, CHSY3, CIB3, CIB4, CIDEA, CIITA, CILP, CILP2, CISTR, CIT, CKAP2L, CKLF-CMTM1, CKMT1A, CKMT1B, CKMT2, CLC, CLCA1, CLCA2, CLCA3P, CLCA4, CLCN1, CLCNKA, CLCNKB, CLDN10, CLDN10-AS1, CLDN11, CLDN17, CLDN18, CLDN19, CLDN20, CLDN22, CLDN24, CLDN25, CLDN34, CLDN5, CLDN8, CLEC10A, CLEC12A, CLEC12B, CLEC14A, CLEC17A, CLEC18A, CLEC18B, CLEC18C, CLEC19A, CLEC1A, CLEC1B, CLEC2A, CLEC2D, CLEC2L, CLEC3A, CLEC4C, CLEC4D, CLEC4E, CLEC4F, CLEC4G, CLEC4GP1, CLEC4M, CLEC5A, CLEC6A, CLEC7A, CLEC9A, CLECL1, CLHC1, CLIC2, CLIC3, CLIC5, CLIC6, CLLU1, CLLU1OS, CLMP, CLNK, CLPS, CLPSL1, CLPSL2, CLRN1, CLRN1-AS1, CLRN2, CLSPN, CLSTN2, CLSTN2-AS1, CLUL1, CLVS1, CLVS2, CLYBL-AS1, CLYBL-AS2, CMA1, CMAHP, CMKLR1, CMTM2, CMTM5, CNBD1, CNBD2, CNFN, CNGA2, CNGA3, CNGA4, CNGB1, CNGB3, CNIH2, CNIH3, CNKSR2, CNPY1, CNR1, CNR2, CNRIP1, CNTD1, CNTFR-AS1, CNTN1, CNTN2, CNTN4, CNTN4-AS1, CNTN4-AS2, CNTN5, CNTN6, CNTNAP3, CNTNAP3B, CNTNAP3P2, CNTNAP4, CNTNAP5, COCH, COL10A1, COL11A1, COL13A1, COL14A1, COL15A1, COL18A1-AS1, COL18A1-AS2, COL19A1, COL1A2, COL20A1, COL22A1, COL23A1, COL24A1, COL25A1, COL26A1, COL28A1, COL2A1, COL3A1, COL4A1, COL4A2, COL4A2-AS1, COL4A3, COL4A4, COL4A5, COL4A6, COL5A1, COL6A3, COL6A4P1, COL6A4P2, COL6A5, COL6A6, COL8A1, COL8A2, COL9A1, COL9A2, COLCA1, COLEC10, COLEC12, COLGALT2, COMP, CORIN, CORO2B, COR06, CORT, COX412, COX6B2, COX7B2, COX8C, CPA1, CPA2, CPA3, CPA5, CPA6, CPAMD8, CPB1, CPEB1, CPEB1-AS1, CPEB2-AS1, CPLX2, CPLX3, CPNE4, CPNE5, CPNE6, CPNE9, CPS1-IT1, CPSF4L, CPT1C, CPXCR1, CPXM1, CPXM2, CPZ, CR1, CR1L, CR2, CRABP1, CRACR2A, CRAT37, CRAT40, CRATE, CRB1, CRB2, CREB3L1, CREG2, CRH, CRHBP, CRHR1, CRHR2, CRISP1, CRISP2, CRISP3, CRISPLD1, CRISPLD2, CRLF1, CRLF2, CRNN, CROCCP3, CRTAC1, CRTAM, CRTC3-AS1, CRX, CRYBA1, CRYBA2, CRYBA4, CRYBB1, CRYGA, CRYGB, CRYGC, CRYGD, CRYGN, CRYM-AS1, CSAG1, CSAG3, CSAG4, CSF1R, CSF2RA, CSF2RB, CSF3R, CSGALNACT1, CSH1, CSH2, CSHL1, CSMD1, CSMD2, CSMD2-AS1, CSMD3, CSN1S1, CSN1S2AP, CSN1S2BP, CSN2, CSN3, CSNK1G2-AS1, CSPG4, CSPG4P1Y, CSRNP3, CSRP3, CST1, CST11, CST13P, CST2, CST4, CST5, CST7, CST8, CST9, CST9L, CSTF3-AS1, CSTL1, CT45A1, CT45A10, CT45A4, CT45A6, CT45A7, CT47A1, CT47A10, CT47A11, CT47A6, CT47A7, CT47B1, CT55, CT62, CT83, CTAG1A, CTAG1B, CTAGE1, CTAGE10P, CTAGE11P, CTAGE6, CTAGE7P, CTB-113P19.1, CTB-1202.1, CTB-178M22.2, CTB-7E3.1, CTC-436P18.1, CTCFL, CTD-2151A2.1, CTD-2194D22.4, CTD-2201E9.1, CTD-2201I18.1, CTD-2270F17.1, CTD-2297D10.2, CTD-2350J17.1, CTD-3080P12.3, CTF1, CTGLF12P, CTHRC1, CTLA4, CTNNA2, CTNNA3, CTNND2, CTRB1, CTRB2, CTRC, CTSE, CTSG, CTSL3P, CTSLP2, CTSLP8, CTSV, CTSW, CTTNBP2, CTXN2, CTXN3, CUBN, CUZD1, CWH43, CX3CR1, CXADRP2, CXADRP3, CXCL14, CXCL17, CXCR1, CXCR2, CXCR2P1, CXCR3, CXCR5, CXCR6, CXXC1P1, CXXC4, CXorf21, CXorf36, CXorf49B, CXorf51A, CXorf58, CXorf65, CXorf66, CXorf67, CYBB, CYLC1, CYLC2, CYMP, CYP11B1, CYP11B2, CYP19A1, CYP1B1-AS1, CYP26C1, CYP27C1, CYP2A13, CYP2F1, CYP2G1P, CYP2S1, CYP2W1, CYP46A1, CYP4B1, CYP4F24P, CYP4F29P, CYP4F30P, CYP4F35P, CYP4F62P, CYP4F8, CYP4X1, CYP4Z1, CYP4Z2P, CYP51A1-AS1, CYS1, CYSLTR1, CYSLTR2, CYTH4, CYTIP, CYTL1, CYYR1, D21S2088E, DAAM2, DAB1, DAB1-AS1, DACH1, DACH2, DACT1, DACT2, DACT3-AS1, DAND5, DADA, DADA-AS1, DAPL1, DAPP1, DAW1, DAZ1, DAZ2, DAZ3, DAZ4, DAZL, DBET, DBH, DBIL5P, DBIL5P2, DBX1, DBX2, DCAF12L1, DCAF12L2, DCAF13P3, DCAF4L2, DCAF8L1, DCAF8L2, DCANP1, DCC, DCD, DCDC1, DCDC2B, DCDC2C, DCDC5, DCHS1, DCHS2, DCLK1, DCLK2, DCLK3, DCN, DCST1, DCSTAMP, DCT, DCTN1-AS1, DCX, DDC-AS1, DDI1, DDR2, DDX11-AS1, DDX11L1, DDX11L10, DDX11L16, DDX11L2, DDX11L5, DDX11L9, DDX12P, DDX25, DDX26B, DDX26B-AS1, DDX3Y, DDX4, DDX43, DDX53, DEF6, DEFA1, DEFA10P, DEFA11P, DEFA1B, DEFA3, DEFA4, DEFA5, DEFA6, DEFA8P, DEFA9P, DEFB103A, DEFB104A, DEFB104B, DEFB105A, DEFB107A, DEFB108B, DEFB109P1B, DEFB110, DEFB112, DEFB113, DEFB114, DEFB115, DEFB116, DEFB118, DEFB119, DEFB121, DEFB122, DEFB123, DEFB124, DEFB125, DEFB126, DEFB127, DEFB128, DEFB129, DEFB130, DEFB131, DEFB132, DEFB133, DEFB134, DEFB136, DEFB4A, DEFB4B, DEFT1P2, DEGS2, DENND2A, DENND3, DENND5B-AS1, DEPDC1, DEPDC1-AS1, DEPDC1B, DES, DGAT2L6, DGCR10, DGCR9, DGKB, DGKI, DGKK, DHFR, DHH, DHRS7C, DIAPH2-AS1, DIAPH3-AS1, DIAPH3-AS2, DIO2, DIO2-AS1, DIO3, DIO3OS, DIRAS1, DIRAS2, DIRC1, DIRC3, DISCI, DISC1-IT1, DISC1FP1, DISC2, DKFZP434A062, DKFZP434H168, DKFZP434K028, DKFZP434L187, DKFZp434J0226, DKFZp434L192, DKFZp451B082, DKFZp686K1684, DKK1, DKK2, DKK4, DKKL1, DLEC1, DLEU1-AS1, DLEU2L, DLEU7, DLEU7-AS1, DLG1-AS1, DLG2, DLG3-AS1, DLG5-AS1, DLGAP1, DLGAP1-AS3, DLGAP1-AS4, DLGAP1-ASS, DLGAP2, DLGAP2-AS1, DLGAP3, DLGAP4-AS1, DLGAP5, DLK1, DLK2, DLL1, DLL3, DLL4, DLX1, DLX2, DLX2-AS1, DLX3, DLX4, DLX5, DLL6, DLX6-AS1, DMBT1, DMBT1P1, DMBX1, DMC1, DMP1, DMRT1, DMRT2, DMRT3, DMRTA2, DMRTB1, DMRTC1B, DMRTC2, DNAH10, DNAH12, DNAH17, DNAH17-AS1, DNAH2, DNAH3, DNAH6, DNAH7, DNAH8, DNAH9, DNAI1, DNAI2, DNAJA1P5, DNAJB13, DNAJB3, DNAJB7, DNAJB8, DNAJB8-AS1, DNAJC25-GNG10, DNAJC27-AS1, DNAJC5B, DNAJC5G, DNAJC9-AS1, DNASE1L2, DNASE2B, DNER, DNM1, DNM1P35, DNM1P41, DNM1P46, DNM3, DNM3-IT1, DNM30S, DNTT, DOC2A, DOC2B, DOCK11, DOCK2, DOCK3, DOCK4-AS1, DOCKS, DOCK9-AS1, DOK2, DOK5, DOK6, DPCR1, DPEP1, DPEP2, DPEP3, DPF1, DPH3P1, DPP10, DPP10-AS1, DPP10-AS3, DPP6, DPPA2, DPPA2P3, DPPA3, DPPA4, DPPA5, DPRX, DPRXP4, DPT, DPY19L2, DPY19L2P1, DPY19L2P2, DPY19L2P3, DPY19L2P4, DPYD-AS1, DPYD-AS2, DPYSL3, DPYSL5, DQX1, DRAIN, DRC7, DRD1, DRD2, DRD5, DRGX, DRICH1, DRP2, DSC1, DSCAM, DSCAM-AS1, DSCAM-IT1, DSCAML1, DSCAS, DSCR10, DSCR4, DSCR8, DSCR9, DSG1-AS1, DSG2-AS1, DSG3, DSG4, DSPP, DTHD1, DUOX1, DUOXA1, DUPD1, DUSP15, DUSP19, DUSP21, DUSP26, DUSP27, DUSP4, DUSP5P1, DUX4, DUXA, DUXAP10, DUXAP8, DYDC1, DYNAP, DYNC2H1, DYNLRB2, DYTN, DYX1C1, DYX1C1-CCPG1, DZIP1, DZIP1L, E2F2, E2F8, EBF1, EBF2, EBF3, EBLN1, ECEL1, ECEL1P2, ECRP, ECSCR, ECT2L, EDA, EDAR, EDDM3A, EDDM3B, EDIL3, EDN3, EDNRA, EDNRB, EDNRB-AS1, EDRF1-AS1, EEF1DP3, EFCAB1, EFCAB10, EFCAB14-AS1, EFCAB3, EFCAB5, EFCAB6, EFCAB6-AS1, EFCAB9, EFCC1, EFEMP1, EFHB, EFHC2, EFNA5, EFNB3, EFR3B, EFS, EFTUD1P1, EGF, EGFEM1P, EGFL6, EGFLAM, EGFLAM-AS2, EGFLAM-AS4, EGR3, EGR4, EHD3, EHD4-AS1, EHF, EHHADH-AS1, EHMT1-IT1, EIF1AY, EIF1B-AS1, EIF2B5-AS1, EIF3C, EIF3CL, EIF4E1B, ELANE, ELAVL2, ELAVL3, ELAVL4, ELDR, ELF5, ELFN1-AS1, ELFN2, ELK2AP, ELMO1-AS1, ELMOD1, ELN, ELOVL4, ELSPBP1, EMB, EMBP1, EMCN, EME1, EMID1, EMILIN1, EMILIN2, EMILIN3, EMX1, EMX2, EMX2OS, EN1, EN2, ENDOU, ENOX1, ENOX1-AS2, ENPP3, ENPP5, ENPP6, ENPP7P13, ENTHD1, ENTPD1-AS1, ENTPD3, EOMES, EPB41L3, EPB41L4A-AS2, EPB42, EPGN, EPHA1-AS1, EPHA10, EPHA3, EPHA5, EPHA5-AS1, EPHA6, EPHA7, EPHA8, EPHB1, EPHB3, EPHX4, EPN2-AS1, EPN2-IT1, EPN3, EPPIN, EPPIN-WFDC6, EPS8L1, EPS8L3, EPX, EPYC, EQTN, ERAS, ERBB4, ERC2, ERC2-IT1, ERCC6L, EREG, ERG, ERICH1-AS1, ERICH3-AS1, ERICH4, ERICH6, ERICH6B, ERMN, ERN2, ERP27, ERVFRD-1, ERVH48-1, ERVMER34-1, ERW-1, ERW-2, ESCO2, ESM1, ESPL1, ESPNL, ESPNP, ESR1, ESR2, ESRG, ESRP1, ESRRB, ESRRG, ESX1, ESYT3, ETV3L, EVA1C, EVADR, EVC2, EVI2A, EVI2B, EVPL, EVX1, EVX1-AS, EVX2, EWSAT1, EXD1, EXO1, EXOC3L1, EXOC3L2, EXTL1, EXTL3-AS1, EYA1, EYA2, EYA4, EYS, EZR-AS1, F10-AS1, F11-AS1, F13A1, F2RL3, F8A2, FA2H, FAAHP1, FABP2, FABP5, FABP5P3, FABP6, FABP7, FABP9, FAIM2, FALEC, FAM101B, FAM105A, FAM106A, FAM106B, FAM106CP, FAM107A, FAM109B, FAM110D, FAM124A, FAM124B, FAM129C, FAM131C, FAM132B, FAM133A, FAM133CP, FAM133DP, FAM135B, FAM138B, FAM138C, FAM138D, FAM138E, FAM138F, FAM150A, FAM153A, FAM153B, FAM153C, FAM155A, FAM155A-IT1, FAM156B, FAM157A, FAM157B, FAM157C, FAM159A, FAM159B, FAM162B, FAM163A, FAM163B, FAM166A, FAM167A, FAM167A-AS1, FAM167B, FAM170A, FAM170B, FAM170B-AS1, FAM171A2, FAM172BP, FAM177B, FAM178B, FAM180A, FAM180B, FAM181A, FAM181A-AS1, FAM181B, FAM182A, FAM182B, FAM183B, FAM183CP, FAM184B, FAM186A, FAM186B, FAM187B, FAM189A1, FAM196B, FAM197Y2, FAM197Y5, FAM198B, FAM19A1, FAM19A2, FAM19A3, FAM19A4, FAM19A5, FAM205A, FAM205BP, FAM205C, FAM212B-AS1, FAM215A, FAM216B, FAM217A, FAM218A, FAM21EP, FAM221B, FAM224A, FAM224B, FAM225A, FAM225B, FAM226A, FAM227A, FAM228A, FAM230B, FAM230C, FAM231B, FAM231C, FAM24A, FAM24B-CUZD1, FAM25BP, FAM25G, FAM26D, FAM26E, FAM27B, FAM27C, FAM27E2, FAM27E3, FAM27L, FAM35BP, FAM35DP, FAM3B, FAM3D, FAM41AY1, FAM41C, FAM43A, FAM46B, FAM46D, FAM47A, FAM47B, FAM47C, FAM49A, FAM53A, FAM53B-AS1, FAM57B, FAM64A, FAM65B, FAM65C, FAM66A, FAM66B, FAM66C, FAM66D, FAM66E, FAM69C, FAM71B, FAM71C, FAM71D, FAM71E2, FAM71F1, FAM71F2, FAM72A, FAM72B, FAM72C, FAM72D, FAM74A3, FAM74A4, FAM74A6, FAM74A7, FAM78A, FAM81A, FAM81B, FAM83A, FAM83B, FAM83E, FAM83H-AS1, FAM86B1, FAM86B2, FAM87A, FAM87B, FAM90A1, FAM90A10P, FAM90A25P, FAM90A27P, FAM90A2P, FAM90A7P, FAM92A1P2, FAM92B, FAM95A, FAM95B1, FAM99B, FAM9A, FAM9B, FAM9C, FANCB, FANCD2, FANCD2OS, FANK1, FANK1-AS1, FAP, FAR1, FAR2, FAR2P1, FAR2P2, FAS-AS1, FAT2, FAT3, FATE1, FAXC, FBLN1, FBLN2, FBLN5, FBN2, FBN3, FBP2, FBXL13, FBXL16, FBXL2, FBXL22, FBXO15, FBXO24, FBXO3-AS1, FBXO39, FBXO40, FBXO41, FBXO43, FBXO47, FBXW10, FBXW12, FCAR, FCER1A, FCER2, FCGBP, FCGR1A, FCGR1B, FCGR1C, FCGR2A, FCGR2B, FCGR2C, FCGR3A, FCGR3B, FCHO1, FCMR, FCN1, FCN2, FCN3, FCRL1, FCRL2, FCRL3, FCRL4, FCRL5, FCRLB, FDCSP, FDPSP2, FENDRR, FER1L5, FER1L6, FER1L6-AS1, FER1L6-AS2, FERD3L, FEV, FEZF1, FEZF1-AS1, FEZF2, FFAR1, FFAR2, FFAR3, FFAR4, FGD2, FGD3, FGD5P1, FGF1, FGF10, FGF10-AS1, FGF12, FGF12-AS1, FGF13-AS1, FGF14-AS1, FGF14-IT1, FGF16, FGF17, FGF18, FGF20, FGF22, FGF23, FGF3, FGF4, FGF5, FGF6, FGF7, FGF8, FGF9, FGFBP1, FGFBP2, FGL2, FHAD1, FHL5, FHOD3, FIBCD1, FIGF, FIGLA, FILIP1, FIRRE, FKBP10, FKBP1A-SDCBP2, FKBP6, FKBP9P1, FKSG29, FLG, FLG2, FLJ12825, FLJ13224, FLJ16171, FLJ16779, FLJ22447, FLJ23867, FLJ25758, FLJ26245, FLJ26850, FLJ27354, FLJ30679, FLJ31104, FLJ31356, FLJ31662, FLJ32255, FLJ33360, FLJ33534, FLJ33581, FLJ34503, FLJ35934, FLJ36000, FLJ36777, FLJ37035, FLJ37201, FLJ37505, FLJ38122, FLJ38576, FLJ40194, FLJ40288, FLJ41200, FLJ41278, FLJ41941, FLJ42102, FLJ42393, FLJ42627, FLJ42969, FLJ43315, FLJ43879, FLJ45079, FLJ45513, FLJ46066, FLJ46284, FLRT1, FLT1, FLT3, FLT4, FMN1, FMN2, FMNL1, FMNL3, FMO2, FMO6P, FMO9P, FMOD, FMR1-AS1, FMR1NB, FNDC1, FNDC7, FNDC8, FNDC9, FOLH1B, FOLR1, FOLR2, FOXB1, FOXB2, FOXC2, FOXC2-AS1, FOXCUT, FOXD1, FOXD2, FOXD3, FOXD3-AS1, FOXD4, FOXD4L1, FOXD4L3, FOXD4L4, FOXD4L5, FOXD4L6, FOXE1, FOXF1, FOXF2, FOXG1, FOXG1-AS1, FOXH1, FOXI1, FOXI2, FOXI3, FOXJ1, FOXL1, FOXL2, FOXL2NB, FOXM1, FOXN1, FOXN3-AS2, FOXN4, FOXO3B, FOXO6, FOXP1-AS1, FOXP3, FOXR1, FOXR2, FOXS1, FPGT-TNNI3K, FPR1, FPR2, FPR3, FRAS1, FREM1, FREM2, FREM3, FRG2, FRG2B, FRG2C, FRG2DP, FRG2EP, FRMD1, FRMD5, FRMD6-AS2, FRMD7, FRMD8P1, FRMPD1, FRMPD2, FRMPD2B, FRMPD3, FRMPD3-AS1, FRMPD4, FRRS1L, FRY-AS1, FSCB, FSCN2, FSCN3, FSD1, FSHB, FSHR, FSIP2, FSTL5, FTH1P18, FTHL17, FTLP10, FTMT, FTO-IT1, FUNDC2P2, FUT3, FUT5, FUT7, FUT8-AS1, FUT9, FXYD3, FXYD4, FXYD6, FXYD6-FXYD2, FXYD7, FYN, FZD10, FZD10-AS1, FZD2, FZD3, FZD9, G6PC2, GAB3, GAB4, GABARAPL3, GABBR1, GABBR2, GABRA1, GABRA2, GABRA3, GABRA4, GABRA5, GABRA6, GABRB1, GABRB2, GABRB3, GABRD, GABRG1, GABRG2, GABRG3, GABRG3-AS1, GABRP, GABRQ, GABRR1, GABRR3, GACAT1, GACAT2, GACAT3, GAD2, GADL1, GAGE1, GAGE10, GAGE12D, GAGE12E, GAGE12F, GAGE12H, GAGE12I, GAGE12J, GAGE2C, GAGE2D, GAGE2E, GAGE4, GAGES, GAGE6, GAGE7, GAGER, GAL3ST2, GAL3ST3, GAL3ST4, GALNT12, GALNT13, GALNT14, GALNT16, GALNT3, GALNT5, GALNT6, GALNT8, GALNT9, GALNTL5, GALNTL6, GALP, GALR1, GALR3, GAP43, GAPLINC, GAPT, GAREML, GAS1, GAS2L1P2, GAS2L2, GAS6-AS2, GAS7, GAS8-AS1, GATA1, GATA2, GATA2-AS1, GATA3-AS1, GATA5, GBAT2, GBGT1, GBP1P1, GBP6, GBX1, GBX2, GCG, GCK, GCM2, GCNT1, GCNT7, GCOM1, GCSAML, GCSAML-AS1, GDAP1L1, GDF10, GDF11, GDF2, GDF3, GDF5, GDF6, GDPD2, GDPD4, GFAP, GFI1, GFI1B, GFRA2, GFRA3, GFRA4, GFRAL, GFY, GGN, GGNBP1, GGT3P, GGT5, GGT6, GGT8P, GGTA1P, GGTLC1, GGTLC2, GH1, GH2, GHET1, GHRH, GHRHR, GHSR, GIF, GIMAP1, GIMAP1-GIMAP5, GIMAP4, GIMAP5, GIMAP6, GIMAP7, GIMAP8, GIMD1, GIP, GIPC3, GIPR, GJA1, GJA10, GJA3, GJA4, GJA5, GJA8, GJA9, GJB4, GJB5, GJB6, GJB7, GJC2, GJD2, GJD4, GK2, GK3P, GKN1, GKN2, GLB1L2, GLB1L3, GLDN, GLI2, GLI3, GLIPR1L1, GLIPR1L2, GLIS1, GLIS3-AS1, GLP1R, GLP2R, GLRA1, GLRA2, GLRA3, GLRA4, GLT6D1, GLYATL2, GLYATL3, GLYCAM1, GM140, GMCL1P1, GML, GMNC, GNA14-AS1, GNA15, GNAS-AS1, GNAT1, GNAT2, GNAT3, GNB3, GNB4, GNG11, GNG13, GNG2, GNG3, GNG4, GNGT1, GNGT2, GNRH2, GNRHR, GNRHR2, GOLGA2P2Y, GOLGA2P6, GOLGA2P7, GOLGA2P9, GOLGA6A, GOLGA6B, GOLGA6C, GOLGA6D, GOLGA6L1, GOLGA6L10, GOLGA6L17P, GOLGA6L2, GOLGA6L22, GOLGA6L3, GOLGA6L4, GOLGA6L5P, GOLGA6L6, GOLGA6L7P, GOLGA6L9, GOLGA8DP, GOLGA8EP, GOLGA8F, GOLGA8G, GOLGA8H, GOLGA8J, GOLGA8K, GOLGA8M, GOLGA8N, GOLGA80, GOLGA8R, GOLGA8S, GOLGA8T, GOT1L1, GP1BA, GP1BB, GP2, GP6, GP9, GPA33, GPAT2, GPC2, GPC4, GPC5, GPC5-AS1, GPC5-AS2, GPC6-AS2, GPHA2, GPHB5, GPIHBP1, GPM6A, GPM6B, GPR1, GPR1-AS, GPR101, GPR119, GPR12, GPR132, GPR137C, GPR139, GPR141, GPR142, GPR143, GPR148, GPR149, GPR15, GPR150, GPR151, GPR152, GPR156, GPR158, GPR158-AS1, GPR162, GPR171, GPR173, GPR174, GPR179, GPR18, GPR182, GPR19, GPR20, GPR21, GPR22, GPR25, GPR26, GPR27, GPR3, GPR31, GPR32, GPR33, GPR34, GPR4, GPR45, GPR50, GPR52, GPR55, GPR6, GPR61, GPR62, GPR63, GPR65, GPR68, GPR78, GPR82, GPR83, GPR84, GPR85, GPR88, GPR89B, GPRC5D, GPRC6A, GPRIN2, GPRIN3, GPSM1, GPSM2, GPSM3, GPX5, GPX6, GPX8, GRAMD1B, GRAMD2, GRAP, GRAP2, GRAPL, GRASP, GREB1, GRHL2, GRHL3, GRIA1, GRIA2, GRIA4, GRID1-AS1, GRID2, GRID2IP, GRIFIN, GRIK1, GRIK1-AS1, GRIK1-AS2, GRIK2, GRIK3, GRIK4, GRIK5, GRIN1, GRIN2A, GRIN2B, GRIN2C, GRIN2D, GRIN3A, GRIN3B, GRIP1, GRIP2, GRK1, GRK7, GRM1, GRM2, GRM3, GRM4, GRM5, GRM5-AS1, GRM6, GRM7, GRM7-AS1, GRM7-AS2, GRM7-AS3, GRP, GRXCR1, GRXCR2, GS1-24F4.2, GS1-279B7.1, GS1-594A7.3, GS1-600G8.3, GSC, GSC2, GSDMA, GSDMC, GSG1, GSG1L, GSC2, GSN-AS1, GSTA3, GSTM2P1, GSTM5, GSTT1, GSTT2B, GSTTP1, GSTTP2, GSX1, GTF2A1L, GTF2H2B, GTF2H2C, GTF2IP1, GTF2IP4, GTF2IRD1P1, GTF2IRD2, GTF3C2-AS1, GTSCR1, GTSE1-AS1, GTSF1, GTSF1L, GUCA1A, GUCA1C, GUCY1A2, GUCY1B2, GUCY2C, GUCY2D, GUCY2EP, GUCY2F, GUCY2GP, GULP1, GUSBP10, GUSBP2, GUSBP3, GUSBP5, GUSBP9, GVINP1, GXYLT1P3, GYG2P1, GYLTL1B, GYPA, GYPB, GYPE, GZMA, GZMB, GZMH, GZMK, H1FNT, H1F00, H1FX-AS1, H2AFB2, H2AFB3, H2BFM, H2BFWT, H2BFXP, H3F3A, HACD4, HAGLR, HAGLROS, HAND1, HAND2, HAND2-AS1, HAO2-IT1, HAP1, HAPLN1, HAPLN2, HAPLN4, HAR1A, HAR1B, HAS1, HAS2, HAS2-AS1, HAVCR1P1, HBBP1, HBD, HBE1, HBG1, HBG2, HBM, HBQ1, HBZ, HCAR1, HCAR2, HCCAT5, HCFC1-AS1, HCG11, HCG14, HCG2040054, HCG22, HCG23, HCK, HCLS1, HCN1, HCN2, HCRT, HCRTR1, HCRTR2, HDAC11-AS1, HDAC9, HDC, HDGFL1, HDGFRP3, HEATR4, HEATR9, HECTD2-AS1, HECW1, HECW2, HELT, HEMGN, HENMT1, HEPACAM, HEPACAM2, HEPH, HEPHL1, HEPN1, HERC2P4, HERC2P7, HES3, HEST, HEXA-AS1, HEYL, HFM1, HGC6.3, HGF, HHIP, HHIP-AS1, HHIPL1, HHIPL2, HHLA1, HHLA2, HID1-AS1, HIF1A-AS1, HIF3A, HIGD1B, HIGD1C, HIGD2B, HILS1, HIPK4, HIST1H1B, HIST1H1D, HIST1H2AA, HIST1H2AJ, HIST1H2APS1, HIST1H2BA, HIST1H2BB, HIST1H2BH, HIST1H2BI, HIST1H2BL, HIST1H2BM, HIST1H3C, HIST1H3F, HIST1H3G, HIST1H3I, HIST1H4A, HIST1H4F, HIST1H4G, HIST1H4I, HIST1H4J, HIST1H4K, HIST1H4L, HIST2H2AA4, HIST2H2AB, HIST2H2BA, HIST2H3A, HIST2H3D, HIST2H4A, HIST3H2BB, HIST3H3, HJURP, HK2, HK3, HLA-DOA, HLA-DQA1, HLA-DQA2, HLA-DQB1, HLA-DQB2, HLA-DRB3, HLA-DRB4, HLA-DRB5, HLA-DRB6, HLTF-AS1, HLX-AS1, HMCN1, HMCN2, HMGA1P7, HMGA2, HMGB3P1, HMGB4, HMGCLL1, HMHB1, HMMR-AS1, HMSD, HMX1, HMX2, HMX3, HNCAT21, HNRNPA1P10, HNRNPA3P1, HNRNPCL1, HNRNPCL2, HNRNPCL4, HNRNPKP3, HOPX, HORMAD1, HORMAD2, HOTAIR, HOTAIRM1, HOTS, HOTTIP, HOXA-AS2, HOXA-AS3, HOXA1, HOXA10, HOXA10-AS, HOXA10-HOXA9, HOXA11, HOXA11-AS, HOXA13, HOXA2, HOXA3, HOXA4, HOXA5, HOXA6, HOXA7, HOXA9, HOXB-AS1, HOXB-AS3, HOXB1, HOXB13, HOXB2, HOXB3, HOXB4, HOXB5, HOXB6, HOXB7, HOXB8, HOXB9, HOXC-AS1, HOXC-AS2, HOXC-AS3, HOXC10, HOXC11, HOXC12, HOXC13, HOXC13-AS, HOXC4, HOXC5, HOXC6, HOXC8, HOXC9, HOXD-AS2, HOXD1, HOXD10, HOXD11, HOXD12, HOXD13, HOXD3, HOXD4, HOXD8, HOXD9, HP09025, HP09053, HPCA, HPCAL4, HPGDS, HPSE, HPSE2, HPVC1, HPYR1, HR, HRASLS, HRASLS5, HRAT13, HRAT17, HRAT5, HRAT56, HRAT92, HRC, HRH1, HRH2, HRH3, HRH4, HRK, HRNR, HS3ST1, HS3ST3A1, HS3ST4, HS3ST5, HS6ST2, HS6ST2-AS1, HS6ST3, HSD3B1, HSD3B2, HSD3BP4, HSD52, HSF2BP, HSF5, HSFX2, HSFY1P1, HSFY2, HSH2D, HSP90AB4P, HSPA12B, HSPB2, HSPB2-C11orf52, HSPB3, HSPB6, HSPB7, HSPE1-MOB4, HTN1, HTN3, HTR1A, HTR1B, HTR1D, HTR1E, HTRIF, HTR2A, HTR2A-AS1, HTR2B, HTR2C, HTR3A, HTR3B, HTR3C, HTR3D, HTR3E, HTR4, HTR5A, HTR5A-AS1, HTR6, HTR7, HTRA3, HTRA4, HTT-AS, HUS1B, HVCN1, HYAL4, HYALP1, HYDIN, HYDIN2, HYMAI, HYPM, IBA57-AS1, IBSP, ICA1L, ICOS, ID4, IFIT1B, IFITM5, IFNA1, IFNA10, IFNA13, IFNA14, IFNA16, IFNA17, IFNA2, IFNA21, IFNA22P, IFNA4, IFNA5, IFNA6, IFNA7, IFNA8, IFNB1, IFNE, IFNG, IFNG-AS1, IFNK, IFNL1, IFNL2, IFNL3, IFNL4, IFNW1, IGDCC3, IGF1R, IGF2-AS, IGF2BP1, IGF2BP2, IGF2BP2-AS1, IGFBP5, IGFBP7, IGFBP7-AS1, IGFL2, IGFL3, IGFL4, IGFN1, IGLL1, IGLL3P, IGLL5, IGLON5, IGSF1, IGSF10, IGSF11, IGSF11-AS1, IGSF21, IGSF22, IGSF5, IGSF6, IGSF9B, IKZF1, IKZF2, IL10, IL10RA, IL12A-AS1, IL12B, IL12RB1, IL12RB2, IL13, IL13RA2, IL16, IL17A, IL17B, IL17D, IL17F, IL17RD, IL17REL, IL18RAP, IL19, IL1A, IL1F10, IL1RAPL1, IL1RAPL2, IL2, IL20, IL20RA, IL21, IL21-AS1, IL21R, IL21R-AS1, IL22, IL22RA2, IL23R, IL24, IL25, IL26, IL2RA, IL2RB, IL2RG, IL3, IL31, IL31RA, IL33, IL34, IL36A, IL36G, IL36RN, IL37, IL4, IL4I1, IL5, IL5RA, IL9, IL9R, ILDR1, IMPG1, IMPG2, INA, INE2, INGX, INHA, INHBA-AS1, INMT-FAM188B, INPP4B, INPP5J, INS, INSL3, INSL4, INSL6, INSM1, INSM2, INSRR, INTS4P2, IPCEF1, IPO9-AS1, IQCA1, IQCA1L, IQCF1, IQCF2, IQCF3, IQCF4, IQCF5, IQCF5-AS1, IQCF6, IQCH, IQCJ, IQCJ-SCHIP1-AS1, IQGAP3, IQSEC2, IQSEC3, IQUB, IRAIN, IRAK1BP1, IRAK3, IRG1, IRGC, IRGM, IRS4, IRX1, IRX2, IRX4, IRX5, IRX6, ISL1, ISL2, ISLR, ISLR2, ISM2, ISPD-AS1, ISX, ITFG1-AS1, ITGA10, ITGA11, ITGA2B, ITGA4, ITGA8, ITGAD, ITGAX, ITGB2-AS1, ITGB4, ITGB8, ITGBL1, ITIH5, ITIH6, ITK, ITLN1, ITM2A, ITPK1-AS1, ITPKB, ITPKB-IT1, ITPR1-AS1, ITPRIPL1, IZUMO1, IZUMO1R, IZUMO2, IZUMO3, JAK3, JAKMIP1, JAKMIP2, JAKMIP2-AS1, JAKMIP3, JAM2, JAM3, JARID2-AS1, JAZF1-AS1, JCHAIN, JMJD1C-AS1, JPH2, JPH3, JPH4, JRKL-AS1, KAAG1, KANTR, KATNAL2, KATNBL1P6, KAZALD1, KAZN, KBTBD12, KBTBD13, KC6, KCNA1, KCNA10, KCNA2, KCNA3, KCNA4, KCNA5, KCNA6, KCNA7, KCNAB1, KCNAB1-AS1, KCNAB1-AS2, KCNAB2, KCNB1, KCNB2, KCNC1, KCNC2, KCNC4-AS1, KCND3-AS1, KCND3-IT1, KCNE1, KCNE3, KCNE4, KCNF1, KCNG1, KCNC2, KCNG3, KCNG4, KCNH1, KCNH2, KCNH3, KCNH4, KCNH5, KCNH6, KCNH7, KCNH8, KCNIP1, KCNIP4, KCNIP4-IT1, KCNJ1, KCNJ10, KCNJ12, KCNJ13, KCNJ15, KCNJ16, KCNJ18, KCNJ2, KCNJ2-AS1, KCNJ3, KCNJ4, KCNJ5, KCNJ6, KCNJ9, KCNK10, KCNK12, KCNK13, KCNK15, KCNK16, KCNK17, KCNK18, KCNK2, KCNK3, KCNK4, KCNK6, KCNK7, KCNK9, KCNMA1-AS1, KCNMA1-AS2, KCNMA1-AS3, KCNMB1, KCNMB2, KCNMB4, KCNN1, KCNN3, KCNN4, KCNQ1, KCNQ1-AS1, KCNQ1DN, KCNQ1OT1, KCNQ2, KCNQ3, KCNQ4, KCNQ5, KCNQ5-AS1, KCNQ5-IT1, KCNRG, KCNS1, KCNS2, KCNT1, KCNU1, KCNV1, KCNV2, KCTD12, KCTD14, KCTD16, KCTD19, KCTD4, KCTD8, KDM4D, KDM4E, KDM5D, KDR, KEL, KERA, KGFLP1, KGFLP2, KHDC1, KHDC1L, KHDC3L, KHDRBS2, KIAA0087, KIAA0101, KIAA0125, KIAA0226L, KIAA0319, KIAA0408, KIAA0825, KIAA1024, KIAA1024L, KIAA1210, KIAA1211, KIAA1211L, KIAA1257, KIAA1324L, KIAA1328, KIAA1456, KIAA1549L, KIAA1614, KIAA1644, KIAA1656, KIAA1755, KIAA1875, KIAA2012, KIAA2022, KIF11, KIF14, KIF15, KIF17, KIF18A, KIF18B, KIF19, KIF1A, KIF20A, KIF24, KIF25, KIF25-AS1, KIF26A, KIF26B, KIF27, KIF2B, KIF2C, KIF4A, KIF4B, KIF5A, KIF5C, KIF6, KIF7, KIR2DL1, KIR2DL2, KIR2DL3, KIR2DL4, KIR2DL5A, KIR2DL5B, KIR2DS1, KIR2DS2, KIR2DS3, KIR2DS4, KIR2DS5, KIR3DL1, KIR3DL2, KIR3DL3, KIR3DS1, KIR3DX1, KIRREL2, KIRREL3, KIRREL3-AS2, KIRREL3-AS3, KISS1R, KIT, KIZ-AS1, KLF1, KLF14, KLF17, KLF3-AS1, KLF8, KLHDC1, KLHDC7B, KLHDC8A, KLHL1, KLHL10, KLHL14, KLHL30, KLHL32, KLHL33, KLHL34, KLHL35, KLHL38, KLHL40, KLHL41, KLHL6, KLHL6-AS1, KLHL7-AS1, KLK1, KLK10, KLK11, KLK12, KLK13, KLK14, KLK15, KLK2, KLK3, KLK4, KLK5, KLK6, KLK7, KLK8, KLK9, KLKP1, KLRB1, KLRC1, KLRC2, KLRC3, KLRC4, KLRD1, KLRF1, KLRF2, KLRC2, KLRK1, KNCN, KPRP, KRBOX1-AS1, KREMEN2, KRT1, KRT12, KRT13, KRT14, KRT15, KRT16, KRT16P1, KRT16P2, KRT16P3, KRT17P5, KRT18P55, KRT19P2, KRT2, KRT20, KRT23, KRT24, KRT25, KRT26, KRT27, KRT28, KRT3, KRT31, KRT32, KRT33A, KRT33B, KRT34, KRT35, KRT36, KRT37, KRT38, KRT39, KRT4, KRT40, KRT42P, KRT5, KRT6A, KRT6B, KRT6C, KRT71, KRT72, KRT73, KRT73-AS1, KRT74, KRT75, KRT76, KRT77, KRT78, KRT79, KRT82, KRT83, KRT84, KRT85, KRT86, KRT8P41, KRT9, KRTAP1-1, KRTAP1-3, KRTAP1-4, KRTAP1-5, KRTAP10-1, KRTAP10-10, KRTAP10-11, KRTAP10-12, KRTAP10-2, KRTAP10-3, KRTAP10-4, KRTAP10-5, KRTAP10-6, KRTAP10-7, KRTAP10-8, KRTAP10-9, KRTAP11-1, KRTAP12-1, KRTAP12-2, KRTAP12-3, KRTAP12-4, KRTAP13-1, KRTAP13-2, KRTAP13-3, KRTAP13-4, KRTAP15-1, KRTAP16-1, KRTAP17-1, KRTAP19-1, KRTAP19-2, KRTAP19-3, KRTAP19-4, KRTAP19-5, KRTAP19-6, KRTAP19-7, KRTAP19-8, KRTAP2-1, KRTAP2-2, KRTAP2-4, KRTAP20-1, KRTAP20-2, KRTAP20-3, KRTAP20-4, KRTAP21-1, KRTAP21-3, KRTAP22-1, KRTAP22-2, KRTAP23-1, KRTAP24-1, KRTAP25-1, KRTAP26-1, KRTAP27-1, KRTAP29-1, KRTAP3-1, KRTAP3-2, KRTAP3-3, KRTAP4-1, KRTAP4-11, KRTAP4-12, KRTAP4-2, KRTAP4-3, KRTAP4-4, KRTAP4-5, KRTAP4-6, KRTAP4-7, KRTAP4-8, KRTAP4-9, KRTAP5-1, KRTAP5-10, KRTAP5-11, KRTAP5-2, KRTAP5-3, KRTAP5-4, KRTAP5-5, KRTAP5-6, KRTAP5-7, KRTAP5-9, KRTAP6-1, KRTAP6-2, KRTAP6-3, KRTAP7-1, KRTAP8-1, KRTAP9-1, KRTAP9-2, KRTAP9-3, KRTAP9-4, KRTAP9-6, KRTAP9-8, KRTAP9-9, KRTDAP, KU-MEL-3, KY, L1CAM, L1TD1, L3MBTL4-AS1, LACAT8, LACRT, LACTB2-AS1, LACTBL1, LAIR1, LAIR2, LALBA, LAMA1, LAMA2, LAMB4, LAMC3, LAMPS, LAMP5-AS1, LANCL1-AS1, LANCL3, LARGE-AS1, LARS2-AS1, LAX1, LAYN, LBX1, LBX1-AS1, LCA10, LCA5, LCA5L, LCE1A, LCE1B, LCE1C, LCE1D, LCE1E, LCE1F, LCE2A, LCE2B, LCE2C, LCE2D, LCE3A, LCE3B, LCE3C, LCE3E, LCE4A, LCE5A, LCE6A, LCK, LCMT1-AS2, LCN1, LCN10, LCN6, LCN8, LCN9, LCNL1, LCP2, LCT, LCTL, LDB2, LDB3, LDHAL6A, LDHAL6B, LDHC, LDLRAD1, LDLRAD2, LDLRAD4-AS1, LDOC1, LECT1, LEF1, LEF1-AS1, LEFTY2, LEKR1, LELP1, LEMD1, LEMD1-AS1, LENEP, LEP, LEUTX, LGALS12, LGALS13, LGALS14, LGALS16, LGALS17A, LGALS2, LGALS7, LGALS7B, LGALS9B, LGI1, LGI2, LGI3, LGI4, LGR6, LGSN, LHB, LHCGR, LHFPL1, LHFPL3, LHFPL3-AS1, LHFPL4, LHFPL5, LHX1, LHX2, LHX3, LHX4, LHX5, LHX5-AS1, LHX6, LHX8, LHX9, LIFR-AS1, LILRA1, LILRA2, LILRA3, LILRA4, LILRA5, LILRA6, LILRB1, LILRB2, LILRB3, LILRB4, LILRB5, LILRP2, LIM2, LIMD2, LIMS3-LOC440895, LIN28A, LIN28B, LINC-ROR, LINC00028, LINC00029, LINC00032, LINC00051, LINC00052, LINC00092, LINC00102, LINC00111, LINC00112, LINC00113, LINC00114, LINC00158, LINC00160, LINC00161, LINC00162, LINC00163, LINC00167, LINC00173, LINC00176, LINC00184, LINC00200, LINC00202-1, LINC00202-2, LINC00207, LINC00208, LINC00210, LINC00211, LINC00221, LINC00222, LINC00226, LINC00229, LINC00238, LINC00239, LINC00243, LINC00244, LINC00251, LINC00254, LINC00264, LINC00265, LINC00266-1, LINC00266-3, LINC00269, LINC00271, LINC00272, LINC00273, LINC00276, LINC00278, LINC00280, LINC00282, LINC00284, LINC00290, LINC00293, LINC00297, LINC00298, LINC00299, LINC00301, LINC00303, LINC00304, LINC00305, LINC00307, LINC00308, LINC00309, LINC00310, LINC00314, LINC00316, LINC00317, LINC00319, LINC00320, LINC00322, LINC00323, LINC00326, LINC00327, LINC00330, LINC00331, LINC00332, LINC00333, LINC00336, LINC00337, LINC00343, LINC00346, LINC00347, LINC00348, LINC00350, LINC00351, LINC00353, LINC00354, LINC00358, LINC00359, LINC00363, LINC00364, LINC00366, LINC00367, LINC00368, LINC00371, LINC00375, LINC00376, LINC00377, LINC00378, LINC00379, LINC00380, LINC00381, LINC00382, LINC00383, LINC00392, LINC00395, LINC00396, LINC00397, LINC00398, LINC00399, LINC00400, LINC00403, LINC00408, LINC00410, LINC00411, LINC00412, LINC00417, LINC00421, LINC00423, LINC00424, LINC00426, LINC00428, LINC00431, LINC00433, LINC00434, LINC00437, LINC00440, LINC00441, LINC00442, LINC00443, LINC00445, LINC00446, LINC00448, LINC00452, LINC00456, LINC00457, LINC00458, LINC00460, LINC00461, LINC00462, LINC00463, LINC00466, LINC00469, LINC00470, LINC00471, LINC00472, LINC00473, LINC00474, LINC00475, LINC00477, LINC00479, LINC00483, LINC00485, LINC00486, LINC00487, LINC00488, LINC00489, LINC00491, LINC00492, LINC00494, LINC00499, LINC00501, LINC00502, LINC00504, LINC00506, LINC00507, LINC00508, LINC00511, LINC00514, LINC00515, LINC00518, LINC00520, LINC00521, LINC00523, LINC00524, LINC00534, LINC00535, LINC00536, LINC00538, LINC00539, LINC00540, LINC00544, LINC00545, LINC00547, LINC00548, LINC00550, LINC00551, LINC00552, LINC00554, LINC00557, LINC00558, LINC00559, LINC00562, LINC00563, LINC00564, LINC00565, LINC00566, LINC00570, LINC00572, LINC00575, LINC00577, LINC00578, LINC00581, LINC00582, LINC00583, LINC00587, LINC00588, LINC00592, LINC00593, LINC00598, LINC00599, LINC00601, LINC00602, LINC00603, LINC00606, LINC00608, LINC00609, LINC00612, LINC00613, LINC00615, LINC00616, LINC00618, LINC00619, LINC00620, LINC00622, LINC00624, LINC00626, LINC00629, LINC00632, LINC00633, LINC00634, LINC00635, LINC00636, LINC00637, LINC00638, LINC00639, LINC00640, LINC00642, LINC00643, LINC00644, LINC00645, LINC00648, LINC00652, LINC00654, LINC00656, LINC00658, LINC00661, LINC00664, LINC00665, LINC00668, LINC00669, LINC00670, LINC00671, LINC00673, LINC00675, LINC00676, LINC00678, LINC00681, LINC00682, LINC00683, LINC00687, LINC00689, LINC00690, LINC00691, LINC00692, LINC00693, LINC00696, LINC00698, LINC00700, LINC00701, LINC00703, LINC00705, LINC00706, LINC00707, LINC00708, LINC00709, LINC00710, LINC00824, LINC00836, LINC00837, LINC00838, LINC00839, LINC00840, LINC00841, LINC00845, LINC00850, LINC00851, LINC00853, LINC00854, LINC00858, LINC00861, LINC00864, LINC00865, LINC00866, LINC00867, LINC00870, LINC00871, LINC00877, LINC00879, LINC00882, LINC00885, LINC00887, LINC00889, LINC00890, LINC00892, LINC00893, LINC00894, LINC00895, LINC00896, LINC00898, LINC00900, LINC00901, LINC00904, LINC00905, LINC00906, LINC00907, LINC00908, LINC00911, LINC00917, LINC00919, LINC00921, LINC00922, LINC00923, LINC00924, LINC00925, LINC00927, LINC00928, LINC00929, LINC00930, LINC00933, LINC00934, LINC00935, LINC00936, LINC00937, LINC00939, LINC00940, LINC00941, LINC00942, LINC00943, LINC00944, LINC00945, LINC00950, LINC00951, LINC00954, LINC00955, LINC00957, LINC00958, LINC00959, LINC00961, LINC00964, LINC00965, LINC00967, LINC00968, LINC00970, LINC00971, LINC00974, LINC00977, LINC00982, LINC00989, LINC00992, LINC00993, LINC00994, LINC00996, LINC01001, LINC01002, LINC01005, LINC01007, LINC01010, LINC01012, LINC01013, LINC01014, LINC01015, LINC01016, LINC01017, LINC01019, LINC01020, LINC01024, LINC01028, LINC01029, LINC01030, LINC01031, LINC01032, LINC01033, LINC01036, LINC01038, LINC01039, LINC01040, LINC01044, LINC01046, LINC01047, LINC01048, LINC01049, LINC01050, LINC01053, LINC01054, LINC01055, LINC01056, LINC01058, LINC01060, LINC01065, LINC01068, LINC01069, LINC01070, LINC01072, LINC01075, LINC01080, LINC01081, LINC01082, LINC01085, LINC01087, LINC01088, LINC01090, LINC01091, LINC01095, LINC01096, LINC01097, LINC01098, LINC01099, LINC01100, LINC01101, LINC01102, LINC01103, LINC01104, LINC01105, LINC01106, LINC01107, LINC01108, LINC01111, LINC01114, LINC01115, LINC01116, LINC01117, LINC01118, LINC01119, LINC01120, LINC01121, LINC01122, LINC01123, LINC01124, LINC01132, LINC01133, LINC01134, LINC01135, LINC01136, LINC01139, LINC01141, LINC01142, LINC01143, LINC01144, LINC01150, LINC01152, LINC01158, LINC01159, LINC01160, LINC01162, LINC01163, LINC01166, LINC01167, LINC01168, LINC01169, LINC01170, LINC01177, LINC01179, LINC01180, LINC01182, LINC01185, LINC01187, LINC01189, LINC01191, LINC01192, LINC01193, LINC01194, LINC01195, LINC01197, LINC01198, LINC01201, LINC01202, LINC01203, LINC01204, LINC01205, LINC01206, LINC01207, LINC01208, LINC01209, LINC01210, LINC01212, LINC01213, LINC01215, LINC01216, LINC01219, LINC01220, LINC01221, LINC01222, LINC01224, LINC01225, LINC01226, LINC01227, LINC01230, LINC01231, LINC01232, LINC01233, LINC01234, LINC01241, LINC01242, LINC01246, LINC01247, LINC01248, LINC01249, LINC01250, LINC01251, LINC01252, LINC01254, LINC01255, LINC01256, LINC01257, LINC01258, LINC01260, LINC01262, LINC01264, LINC01265, LINC01266, LINC01267, LINC01271, LINC01272, LINC01276, LINC01277, LINC01279, LINC01280, LINC01281, LINC01282, LINC01284, LINC01285, LINC01287, LINC01288, LINC01289, LINC01291, LINC01296, LINC01298, LINC01299, LINC01300, LINC01301, LINC01304, LINC01305, LINC01307, LINC01309, LINC01310, LINC01312, LINC01317, LINC01322, LINC01324, LINC01327, LINC01330, LINC01331, LINC01333, LINC01335, LINC01337, LINC01338, LINC01339, LINC01340, LINC01341, LINC01342, LINC01343, LINC01344, LINC01346, LINC01347, LINC01349, LINC01350, LINC01351, LINC01352, LINC01353, LINC01354, LINC01356, LINC01359, LINC01360, LINC01361, LINC01363, LINC01364, LINC01365, LINC01366, LINC01375, LINC01377, LINC01378, LINC01384, LINC01386, LINC01387, LINC01389, LINC01391, LINC01392, LINC01393, LINC01395, LINC01396, LINC01397, LINC01398, LINC01399, LINC01402, LINC01405, LINC01410, LINC01411, LINC01412, LINC01413, LINC01416, LINC01419, LINC01422, LINC01423, LINC01424, LINC01425, LINC01427, LINC01429, LINC01432, LINC01436, LINC01440, LINC01441, LINC01443, LINC01444, LINC01445, LINC01446, LINC01448, LINC01449, LINC01450, LINC01455, LINC01461, LINC01467, LINC01468, LINC01470, LINC01471, LINC01473, LINC01475, LINC01476, LINC01477, LINC01478, LINC01479, LINC01480, LINC01482, LINC01483, LINC01484, LINC01486, LINC01487, LINC01488, LINC01489, LINC01490, LINC01491, LINC01492, LINC01493, LINC01494, LINC01495, LINC01496, LINC01497, LINC01498, LINC01499, LINC01500, LINC01501, LINC01502, LINC01504, LINC01505, LINC01506, LINC01507, LINC01508, LINC01509, LINC01511, LINC01514, LINC01516, LINC01517, LINC01518, LINC01519, LINC01520, LINC01521, LINC01522, LINC01523, LINC01524, LINC01525, LINC01526, LINC01529, LINC01530, LINC01531, LINC01532, LINC01533, LINC01535, LINC01537, LINC01538, LINC01539, LINC01541, LINC01543, LINC01544, LINC01546, LINC01548, LINC01549, LINC01550, LINC01551, LINC01552, LINC01553, LINC01555, LINC01556, LINC01561, LINC01563, LINC01565, LINC01566, LINC01567, LINC01568, LINC01570, LINC01571, LINC01572, LINC01574, LINC01580, LINC01581, LINC01582, LINC01583, LINC01584, LINC01585, LINC01586, LINC01590, LINC01591, LINC01592, LINC01594, LINC01600, LINC01602, LINC01603, LINC01605, LINC01606, LINC01607, LINC01608, LINC01609, LINC01611, LINCMD1, LINCR-0003, LINGO1, LINGO1-AS1, LINGO1-AS2, LINGO2, LINGO3, LINGO4, LIPE, LIPE-AS1, LIPF, LIPI, LIPJ, LIPK, LIPM, LIPN, LIX1, LKAAEAR1, LL22NC01-81G9.3, LL22NC03-63E9.3, LL22NC03-75H12.2, LMAN1L, LMCD1-AS1, LMF1-AS1, LMLN-AS1, LMNTD1, LMO1, LMO2, LMO3, LMO7-AS1, LMO7DN, LMO7DN-IT1, LMOD1, LMOD2, LMOD3, LMTK3, LMX1A, LMX1B, LNX1-AS1, LNX1-AS2, LOC100101148, LOC100101478, LOC100128006, LOC100128076, LOC100128164, LOC100128176, LOC100128233, LOC100128239, LOC100128317, LOC100128361, LOC100128554, LOC100128568, LOC100128573, LOC100128593, LOC100128714, LOC100128770, LOC100128885, LOC100128993, LOC100129027, LOC100129055, LOC100129083, LOC100129138, LOC100129175, LOC100129203, LOC100129307, LOC100129316, LOC100129345, LOC100129434, LOC100129518, LOC100129520, LOC100129534, LOC100129603, LOC100129617, LOC100129620, LOC100129636, LOC100129697, LOC100129924, LOC100129931, LOC100129935, LOC100129940, LOC100129973, LOC100130238, LOC100130264, LOC100130298, LOC100130370, LOC100130417, LOC100130451, LOC100130452, LOC100130476, LOC100130587, LOC100130673, LOC100130691, LOC100130700, LOC100130849, LOC100130880, LOC100130899, LOC100130950, LOC100130964, LOC100130992, LOC100131047, LOC100131107, LOC100131257, LOC100131289, LOC100131303, LOC100131315, LOC100131347, LOC100131496, LOC100131626, LOC100131635, LOC100132057, LOC100132062, LOC100132077, LOC100132078, LOC100132146, LOC100132174, LOC100132215, LOC100132304, LOC100132735, LOC100132741, LOC100132781, LOC100132831, LOC100133050, LOC100133077, LOC100133286, LOC100133315, LOC100133331, LOC100133461, LOC100133669, LOC100133920, LOC100134317, LOC100134368, LOC100134391, LOC100134868, LOC100144595, LOC100147773, LOC100190940, LOC100190986, LOC100192426, LOC100240728, LOC100240734, LOC100240735, LOC100271832, LOC100272216, LOC100287010, LOC100287042, LOC100287072, LOC100287225, LOC100287592, LOC100287632, LOC100287728, LOC100287792, LOC100287834, LOC100287846, LOC100287944, LOC100288069, LOC100288162, LOC100288181, LOC100288254, LOC100288637, LOC100288748, LOC100288866, LOC100288911, LOC100288966, LOC100289333, LOC100289473, LOC100289495, LOC100289580, LOC100289650, LOC100289656, LOC100289673, LOC100294362, LOC100303749, LOC100335030, LOC100420587, LOC100421746, LOC100422212, LOC100422556, LOC100499194, LOC100499484-C9ORF174, LOC100500773, LOC100505478, LOC100505515, LOC100505622, LOC100505625, LOC100505635, LOC100505658, LOC100505715, LOC100505716, LOC100505736, LOC100505782, LOC100505795, LOC100505817, LOC100505841, LOC100505878, LOC100505887, LOC100505912, LOC100505915, LOC100505918, LOC100505920, LOC100505921, LOC100505978, LOC100506023, LOC100506071, LOC100506076, LOC100506083, LOC100506085, LOC100506122, LOC100506123, LOC100506124, LOC100506127, LOC100506136, LOC100506159, LOC100506175, LOC100506188, LOC100506207, LOC100506258, LOC100506271, LOC100506272, LOC100506274, LOC100506281, LOC100506321, LOC100506368, LOC100506371, LOC100506384, LOC100506388, LOC100506393, LOC100506403, LOC100506406, LOC100506422, LOC100506444, LOC100506457, LOC100506470, LOC100506472, LOC100506474, LOC100506497, LOC100506526, LOC100506551, LOC100506585, LOC100506679, LOC100506682, LOC100506688, LOC100506700, LOC100506725, LOC100506747, LOC100506790, LOC100506801, LOC100506834, LOC100506858, LOC100506869, LOC100506895, LOC100507006, LOC100507053, LOC100507065, LOC100507073, LOC100507091, LOC100507140, LOC100507144, LOC100507156, LOC100507175, LOC100507194, LOC100507201, LOC100507205, LOC100507250, LOC100507283, LOC100507334, LOC100507346, LOC100507351, LOC100507373, LOC100507377, LOC100507384, LOC100507387, LOC100507388, LOC100507391, LOC100507406, LOC100507412, LOC100507431, LOC100507437, LOC100507443, LOC100507462, LOC100507468, LOC100507477, LOC100507506, LOC100507534, LOC100507537, LOC100507564, LOC100507600, LOC100507661, LOC100508046, LOC100631378, LOC100652931, LOC100652999, LOC100996249, LOC100996251, LOC100996255, LOC100996263, LOC100996286, LOC100996291, LOC100996324, LOC100996325, LOC100996338, LOC100996342, LOC100996349, LOC100996351, LOC100996385, LOC100996455, LOC100996583, LOC100996634, LOC100996635, LOC100996654, LOC100996671, LOC100996679, LOC100996693, LOC100996694, LOC101054525, LOC101059948, LOC101060019, LOC101060385, LOC101060498, LOC101060542, LOC101060553, LOC101241902, LOC101243545, LOC101409256, LOC101448202, LOC101593348, LOC101805491, LOC101926889, LOC101926892, LOC101926897, LOC101926898, LOC101926905, LOC101926908, LOC101926911, LOC101926913, LOC101926915, LOC101926935, LOC101926940, LOC101926941, LOC101926942, LOC101926943, LOC101926955, LOC101926960, LOC101926962, LOC101926963, LOC101926964, LOC101926966, LOC101926975, LOC101927020, LOC101927023, LOC101927040, LOC101927043, LOC101927048, LOC101927051, LOC101927053, LOC101927055, LOC101927058, LOC101927062, LOC101927066, LOC101927069, LOC101927070, LOC101927078, LOC101927079, LOC101927081, LOC101927082, LOC101927087, LOC101927120, LOC101927123, LOC101927124, LOC101927131, LOC101927132, LOC101927139, LOC101927142, LOC101927143, LOC101927153, LOC101927156, LOC101927157, LOC101927159, LOC101927164, LOC101927166, LOC101927179, LOC101927181, LOC101927188, LOC101927189, LOC101927190, LOC101927196, LOC101927207, LOC101927211, LOC101927229, LOC101927230, LOC101927237, LOC101927239, LOC101927243, LOC101927244, LOC101927248, LOC101927257, LOC101927267, LOC101927272, LOC101927274, LOC101927282, LOC101927284, LOC101927285, LOC101927286, LOC101927292, LOC101927296, LOC101927305, LOC101927310, LOC101927314, LOC101927318, LOC101927334, LOC101927342, LOC101927348, LOC101927356, LOC101927358, LOC101927359, LOC101927374, LOC101927378, LOC101927379, LOC101927394, LOC101927406, LOC101927410, LOC101927411, LOC101927412, LOC101927415, LOC101927416, LOC101927419, LOC101927421, LOC101927431, LOC101927434, LOC101927437, LOC101927438, LOC101927446, LOC101927450, LOC101927460, LOC101927464, LOC101927468, LOC101927472, LOC101927476, LOC101927478, LOC101927482, LOC101927488, LOC101927495, LOC101927497, LOC101927502, LOC101927523, LOC101927526, LOC101927539, LOC101927543, LOC101927549, LOC101927550, LOC101927557, LOC101927560, LOC101927572, LOC101927575, LOC101927577, LOC101927580, LOC101927583, LOC101927587, LOC101927588, LOC101927592, LOC101927604, LOC101927606, LOC101927616, LOC101927619, LOC101927620, LOC101927623, LOC101927636, LOC101927637, LOC101927640, LOC101927641, LOC101927650, LOC101927651, LOC101927653, LOC101927657, LOC101927661, LOC101927666, LOC101927668, LOC101927683, LOC101927691, LOC101927692, LOC101927694, LOC101927697, LOC101927701, LOC101927708, LOC101927709, LOC101927730, LOC101927735, LOC101927740, LOC101927762, LOC101927766, LOC101927768, LOC101927769, LOC101927770, LOC101927787, LOC101927795, LOC101927797, LOC101927798, LOC101927811, LOC101927814, LOC101927815, LOC101927817, LOC101927822, LOC101927827, LOC101927829, LOC101927835, LOC101927839, LOC101927844, LOC101927845, LOC101927847, LOC101927849, LOC101927865, LOC101927869, LOC101927870, LOC101927876, LOC101927881, LOC101927884, LOC101927901, LOC101927905, LOC101927907, LOC101927911, LOC101927914, LOC101927915, LOC101927919, LOC101927924, LOC101927926, LOC101927932, LOC101927948, LOC101927950, LOC101927954, LOC101927964, LOC101927967, LOC101927969, LOC101927973, LOC101927987, LOC101928002, LOC101928008, LOC101928009, LOC101928012, LOC101928030, LOC101928034, LOC101928035, LOC101928043, LOC101928048, LOC101928052, LOC101928053, LOC101928063, LOC101928068, LOC101928075, LOC101928093, LOC101928100, LOC101928103, LOC101928105, LOC101928107, LOC101928118, LOC101928128, LOC101928131, LOC101928134, LOC101928135, LOC101928137, LOC101928140, LOC101928150, LOC101928161, LOC101928162, LOC101928163, LOC101928167, LOC101928168, LOC101928174, LOC101928191, LOC101928201, LOC101928203, LOC101928205, LOC101928211, LOC101928222, LOC101928226, LOC101928227, LOC101928231, LOC101928233, LOC101928241, LOC101928253, LOC101928254, LOC101928259, LOC101928266, LOC101928269, LOC101928270, LOC101928272, LOC101928273, LOC101928279, LOC101928280, LOC101928283, LOC101928295, LOC101928298, LOC101928304, LOC101928306, LOC101928307, LOC101928314, LOC101928322, LOC101928324, LOC101928327, LOC101928333, LOC101928335, LOC101928336, LOC101928358, LOC101928371, LOC101928372, LOC101928381, LOC101928386, LOC101928398, LOC101928401, LOC101928404, LOC101928414, LOC101928416, LOC101928417, LOC101928418, LOC101928435, LOC101928436, LOC101928437, LOC101928438, LOC101928441, LOC101928443, LOC101928446, LOC101928449, LOC101928453, LOC101928460, LOC101928461, LOC101928471, LOC101928476, LOC101928489, LOC101928491, LOC101928495, LOC101928509, LOC101928514, LOC101928516, LOC101928517, LOC101928519, LOC101928523, LOC101928535, LOC101928539, LOC101928540, LOC101928551, LOC101928565, LOC101928567, LOC101928569, LOC101928580, LOC101928590, LOC101928597, LOC101928600, LOC101928618, LOC101928622, LOC101928626, LOC101928650, LOC101928651, LOC101928661, LOC101928663, LOC101928673, LOC101928674, LOC101928682, LOC101928694, LOC101928696, LOC101928697, LOC101928700, LOC101928708, LOC101928710, LOC101928718, LOC101928730, LOC101928731, LOC101928737, LOC101928738, LOC101928739, LOC101928748, LOC101928751, LOC101928766, LOC101928769, LOC101928775, LOC101928778, LOC101928782, LOC101928786, LOC101928790, LOC101928796, LOC101928797, LOC101928804, LOC101928809, LOC101928812, LOC101928823, LOC101928834, LOC101928841, LOC101928844, LOC101928847, LOC101928851, LOC101928855, LOC101928858, LOC101928861, LOC101928865, LOC101928880, LOC101928882, LOC101928886, LOC101928891, LOC101928894, LOC101928896, LOC101928909, LOC101928911, LOC101928936, LOC101928937, LOC101928940, LOC101928942, LOC101928943, LOC101928944, LOC101928961, LOC101928973, LOC101928977, LOC101928978, LOC101928979, LOC101928988, LOC101928989, LOC101928992, LOC101928994, LOC101928995, LOC101929019, LOC101929023, LOC101929034, LOC101929057, LOC101929058, LOC101929064, LOC101929073, LOC101929076, LOC101929080, LOC101929084, LOC101929095, LOC101929099, LOC101929106, LOC101929116, LOC101929122, LOC101929123, LOC101929124, LOC101929125, LOC101929140, LOC101929144, LOC101929148, LOC101929153, LOC101929154, LOC101929162, LOC101929164, LOC101929172, LOC101929181, LOC101929194, LOC101929199, LOC101929207, LOC101929210, LOC101929217, LOC101929224, LOC101929234, LOC101929237, LOC101929239, LOC101929241, LOC101929259, LOC101929260, LOC101929268, LOC101929279, LOC101929282, LOC101929284, LOC101929294, LOC101929295, LOC101929297, LOC101929312, LOC101929315, LOC101929319, LOC101929331, LOC101929337, LOC101929340, LOC101929353, LOC101929371, LOC101929374, LOC101929378, LOC101929380, LOC101929384, LOC101929395, LOC101929406, LOC101929412, LOC101929413, LOC101929415, LOC101929420, LOC101929431, LOC101929439, LOC101929441, LOC101929450, LOC101929452, LOC101929454, LOC101929464, LOC101929468, LOC101929470, LOC101929473, LOC101929486, LOC101929488, LOC101929497, LOC101929504, LOC101929505, LOC101929512, LOC101929517, LOC101929526, LOC101929528, LOC101929529, LOC101929532, LOC101929549, LOC101929550, LOC101929551, LOC101929555, LOC101929563, LOC101929565, LOC101929567, LOC101929570, LOC101929577, LOC101929579, LOC101929584, LOC101929586, LOC101929592, LOC101929595, LOC101929596, LOC101929607, LOC101929608, LOC101929622, LOC101929625, LOC101929631, LOC101929645, LOC101929646, LOC101929653, LOC101929657, LOC101929660, LOC101929662, LOC101929679, LOC101929680, LOC101929681, LOC101929694, LOC101929696, LOC101929698, LOC101929705, LOC101929710, LOC101929717, LOC101929719, LOC101929721, LOC101929723, LOC101929733, LOC101929741, LOC101929753, LOC101929754, LOC101929762, LOC101929897, LOC101930010, LOC101930452, LOC102467079, LOC102467081, LOC102467147, LOC102467212, LOC102467213, LOC102467214, LOC102467216, LOC102467217, LOC102467222, LOC102467223, LOC102467224, LOC102467225, LOC102467226, LOC102467655, LOC102477328, LOC102503427, LOC102546226, LOC102546228, LOC102546229, LOC102546294, LOC102546299, LOC102577426, LOC102606466, LOC102723330, LOC102723344, LOC102723362, LOC102723373, LOC102723376, LOC102723377, LOC102723427, LOC102723439, LOC102723448, LOC102723505, LOC102723517, LOC102723544, LOC102723582, LOC102723604, LOC102723617, LOC102723649, LOC102723661, LOC102723701, LOC102723704, LOC102723709, LOC102723769, LOC102723778, LOC102723824, LOC102723828, LOC102723831, LOC102723833, LOC102723854, LOC102723883, LOC102723885, LOC102723895, LOC102723968, LOC102724000, LOC102724020, LOC102724034, LOC102724053, LOC102724058, LOC102724096, LOC102724163, LOC102724188, LOC102724190, LOC102724201, LOC102724238, LOC102724279, LOC102724297, LOC102724301, LOC102724321, LOC102724323, LOC102724421, LOC102724434, LOC102724467, LOC102724511, LOC102724555, LOC102724596, LOC102724604, LOC102724612, LOC102724623, LOC102724651, LOC102724659, LOC102724661, LOC102724663, LOC102724699, LOC102724710, LOC102724719, LOC102724776, LOC102724804, LOC102724849, LOC102724890, LOC102724913, LOC102724927, LOC102724933, LOC102724957, LOC102724958, LOC102725079, LOC102800447, LOC103091866, LOC103171574, LOC103191607, LOC103312105, LOC103352541, LOC103908605, LOC104054148, LOC104613533, LOC105274304, LOC105370306, LOC105372441, LOC105373300, LOC105376360, LOC105376671, LOC105378732, LOC105447645, LOC105447648, LOC105616981, LOC105667213, LOC105748977, LOC105755953, LOC143666, LOC145474, LOC145845, LOC146513, LOC148696, LOC148709, LOC149373, LOC149684, LOC149950, LOC150935, LOC151121, LOC151174, LOC151475, LOC151484, LOC152578, LOC153684, LOC154449, LOC154761, LOC157273, LOC158434, LOC158435, LOC1720, LOC200726, LOC200772, LOC202181, LOC221122, LOC221946, LOC253573, LOC254028, LOC254896, LOC255187, LOC255654, LOC256880, LOC283038, LOC283045, LOC283140, LOC283177, LOC283194, LOC283214, LOC283299, LOC283332, LOC283352, LOC283440, LOC283575, LOC283585, LOC283683, LOC283710, LOC283731, LOC283856, LOC284023, LOC284080, LOC284294, LOC284379, LOC284395, LOC284412, LOC284578, LOC284581, LOC284632, LOC284648, LOC284661, LOC284788, LOC284798, LOC284825, LOC284865, LOC284930, LOC284933, LOC284950, LOC285000, LOC285043, LOC285484, LOC285593, LOC285626, LOC285627, LOC285629, LOC285692, LOC285696, LOC285740, LOC285762, LOC285766, LOC285768, LOC285804, LOC285819, LOC285847, LOC285889, LOC286083, LOC286114, LOC286177, LOC286238, LOC286297, LOC286359, LOC286370, LOC338694, LOC338797, LOC338963, LOC339059, LOC339166, LOC339260, LOC339298, LOC339529, LOC339539, LOC339568, LOC339593, LOC339622, LOC339666, LOC339807, LOC339862, LOC339874, LOC339975, LOC340017, LOC340074, LOC340107, LOC340113, LOC340357, LOC340512, LOC343052, LOC344967, LOC349160, LOC374443, LOC375196, LOC387810, LOC388242, LOC388406, LOC388436, LOC388780, LOC388813, LOC388849, LOC388882, LOC388942, LOC389033, LOC389199, LOC389247, LOC389705, LOC389831, LOC389834, LOC389895, LOC390705, LOC391003, LOC391322, LOC392196, LOC392232, LOC392364, LOC392452, LOC399715, LOC399815, LOC399886, LOC400043, LOC400541, LOC400548, LOC400553, LOC400558, LOC400620, LOC400655, LOC400661, LOC400684, LOC400685, LOC400706, LOC400736, LOC400794, LOC400867, LOC400940, LOC400997, LOC401052, LOC401134, LOC401177, LOC401242, LOC401286, LOC401312, LOC401324, LOC401357, LOC401463, LOC401557, LOC401585, LOC403312, LOC403323, LOC414300, LOC439933, LOC439994, LOC440028, LOC440040, LOC440117, LOC440173, LOC440300, LOC440390, LOC440446, LOC440461, LOC440600, LOC440602, LOC440700, LOC440704, LOC440895, LOC440896, LOC440910, LOC440982, LOC441025, LOC441081, LOC441155, LOC441178, LOC441204, LOC441242, LOC441454, LOC441455, LOC441601, LOC441666, LOC442028, LOC442132, LOC442497, LOC494127, LOC494141, LOC51145, LOC541472, LOC541473, LOC550113, LOC55338, LOC554223, LOC554249, LOC574538, LOC606724, LOC613037, LOC613266, LOC63930, LOC641367, LOC641746, LOC642366, LOC642423, LOC642426, LOC642929, LOC642943, LOC643201, LOC643339, LOC643406, LOC643441, LOC643542, LOC643623, LOC643711, LOC643733, LOC643770, LOC643802, LOC643923, LOC644145, LOC644189, LOC644285, LOC644554, LOC644669, LOC644838, LOC644919, LOC645166, LOC645382, LOC645434, LOC645752, LOC645949, LOC646029, LOC646268, LOC646522, LOC646736, LOC646743, LOC646813, LOC646938, LOC647323, LOC647859, LOC649133, LOC649324, LOC649352, LOC650226, LOC650293, LOC653513, LOC653602, LOC653786, LOC654841, LOC727924, LOC728084, LOC728095, LOC728175, LOC728392, LOC728485, LOC728673, LOC728989, LOC729080, LOC729083, LOC729159, LOC729296, LOC729348, LOC729506, LOC729609, LOC729658, LOC729683, LOC729732, LOC729737, LOC729930, LOC729950, LOC729966, LOC729987, LOC730159, LOC730668, LOC731157, LOC731424, LOC79160, LOC79999, LOC90246, LOC90768, LOC91450, LOH12CR2, LOR, LOXHD1, LOXL1, LOXL1-AS1, LOXL3, LPAR1, LPAR3, LPAR4, LPAR5, LPCAT2, LPL, LPO, LPP-AS1, LPPR1, LPPR3, LPPR4, LPPR5, LRAT, LRCH2, LRFN1, LRFN2, LRFN5, LRGUK, LRIT1, LRIT2, LRMP, LRP1-AS, LRP1B, LRP2, LRP2BP, LRP4, LRP4-AS1, LRRC10, LRRC10B, LRRC14B, LRRC16B, LRRC17, LRRC18, LRRC19, LRRC2-AS1, LRRC26, LRRC3-AS1, LRRC30, LRRC34, LRRC36, LRRC37A11P, LRRC37A2, LRRC37A4P, LRRC37A5P, LRRC37A6P, LRRC37A8P, LRRC38, LRRC3B, LRRC4, LRRC43, LRRC46, LRRC48, LRRC4B, LRRC4C, LRRC52, LRRC55, LRRC6, LRRC63, LRRC66, LRRC7, LRRC70, LRRC71, LRRC72, LRRC73, LRRC74A, LRRC74B, LRRC75A, LRRC9, LRRD1, LRRIQ1, LRRIQ3, LRRIQ4, LRRK1, LRRN1, LRRN3, LRRN4, LRRN4CL, LRRTM1, LRRTM2, LRRTM3, LRRTM4, LRTM1, LRTM2, LSAMP, LSAMP-AS1, LSMEM2, LSP1P3, LST1, LTBP2, LTF, LTK, LUM, LUNAR1, LURAP1, LUZP2, LUZP4, LVCAT1, LVCAT5, LVRN, LXN, LY6D, LY6G6C, LY6G6E, LY6H, LY6K, LY86, LY86-AS1, LY9, LYG2, LYPD2, LYPD3, LYPD4, LYPD5, LYPD6, LYPD6B, LYPD8, LYVE1, LYZL1, LYZL2, LYZL4, LYZL6, LZTS1, LZTS1-AS1, M1AP, MAB21L1, MAB21L3, MACC1, MACC1-AS1, MACROD2, MACROD2-AS1, MACROD2-IT1, MADCAM1, MAEL, MAFA-AS1, MAFTRR, MAG, MAGEA1, MAGEA10, MAGEA11, MAGEA12, MAGEA2B, MAGEA3, MAGEA4, MAGEA5, MAGEA6, MAGEA8, MAGEA8-AS1, MAGEA9B, MAGEB1, MAGEB10, MAGEB16, MAGEB17, MAGEB18, MAGEB2, MAGEB3, MAGEB4, MAGEB5, MAGEB6, MAGEC1, MAGEC2, MAGEC3, MAGED4, MAGED4B, MAGEE2, MAGEL2, MAGI1-AS1, MAGI2, MAGI2-AS2, MAK, MAL, MALL, MALRD1, MAMDC2, MAMDC2-AS1, MAML2, MAMSTR, MAN1C1, MANSC4, MAP1A, MAP1B, MAP1LC3C, MAP3K12, MAP3K15, MAP3K19, MAP4K1, MAP6, MAP9, MAPK10, MAPK15, MAPT-AS1, MAPT-IT1, MARCH10, MARCH11, MARCH4, MARCO, MARK1, MARK2P9, MAS1, MAS1L, MAST1, MATK, MATN1, MATN3, MB21D2, MBD3L1, MBD3L2, MBD3L3, MBD3L4, MBD3L5, MBNL1-AS1, MBOAT2, MBOAT4, MC2R, MC3R, MC4R, MCCD1, MCEMP1, MCF2, MCF2L2, MCHR2, MCHR2-AS1, MCIDAS, MCM8-AS1, MCMDC2, MCOLN2, MCOLN3, MCPH1-AS1, MCTP1, MCTP2, MDGA2, MDH1B, MDS2, MEAT6, MECOM, MED12L, MED15P9, MEDAG, MEF2C, MEF2C-AS1, MEFV, MEG3, MEG8, MEG9, MEGF10, MEGF11, MEI1, MEI4, MEIG1, MEIKIN, MEIOB, MEIS1-AS2, MEIS1-AS3, MEIS3, MEIS3P1, MEOX1, MEOX2, MEOX2-AS1, MEP1A, MEP1B, MEPE, MESP2, MESTIT1, METTL11B, METTL21C, METTL21EP, METTL24, MFAP2, MFAP4, MFAP5, MFSD2B, MFSD4, MFSD6L, MGAT3, MGAT3-AS1, MGAT4C, MGAT4D, MGAT4EP, MGAT5B, MGC15885, MGC16025, MGC27382, MGC2889, MGC32805, MGC34796, MGC39584, MGC45922, MGC57346-CRHR1, MGP, MHRT, MIAT, MILR1, MIMT1, MINOS1P1, MIOX, MIP, MIPEPP3, MISP, MIXL1, MKI67, MKNK1-AS1, MKRN20S, MKRN3, MKRN7P, MKX-AS1, MLANA, MLC1, MLF1, MLIP-IT1, MLLT4-AS1, MLN, MLNR, MMD2, MMEL1, MMP13, MMP16, MMP17, MMP2, MMP20, MMP21, MMP23A, MMP23B, MMP26, MMP27, MMP28, MMP8, MMRN1, MMRN2, MMS22L, MND1, MNDA, MNS1, MNX1, MNX1-AS1, MOBP, MOG, MORC1, MORF4L2-AS1, MORN3, MORN5, MOS, MOV10L1, MOXD1, MOXD2P, MPEG1, MPL, MPO, MPP2, MPP4, MPPED2, MRAP2, MRC1, MRC2, MRGPRD, MRGPRE, MRGPRF, MRGPRF-AS1, MRGPRG, MRGPRG-AS1, MRGPRX1, MRGPRX2, MRGPRX3, MRGPRX4, MRLN, MRO, MROH2B, MROH5, MROH7, MROH7-TTC4, MROH9, MRPL23-AS1, MRS2P2, MRVI1, MRVI1-AS1, MS4A1, MS4A10, MS4A12, MS4A13, MS4A14, MS4A15, MS4A18, MS4A2, MS4A3, MS4A4A, MS4A5, MS4A6A, MS4A6E, MS4A7, MS4A8, MSGN1, MSI1, MSLN, MSMB, MSR1, MSTN, MSTO2P, MSX2, MSX2P1, MT3, MTHFD2P1, MTL5, MTMR8, MTMR9LP, MTNR1A, MTNR1B, MTOR-AS1, MTRNR2L4, MTRNR2L5, MTRNR2L7, MTUS2, MTUS2-AS1, MTVR2, MUC1, MUC12, MUC15, MUC16, MUC17, MUC19, MUC2, MUC21, MUC22, MUC4, MUC5AC, MUC5B, MUC6, MUC7, MUCL1, MUSK, MX2, MXRA5, MYADML, MYADML2, MYB, MYBL2, MYBPC1, MYBPC2, MYBPC3, MYBPH, MYBPHL, MYCBP2-AS1, MYCBPAP, MYCN, MYCNOS, MYCNUT, MYCT1, MYEF2, MYEOV, MYF5, MYF6, MYH1, MYH11, MYH13, MYH15, MYH2, MYH4, MYH6, MYH7, MYH7B, MYH8, MYHAS, MYL1, MYL10, MYL2, MYL3, MYL4, MYL7, MYLK-AS2, MYLK2, MYLK3, MYLK4, MYO15A, MYO16, MYO16-AS1, MYO18B, MYO1A, MYO1F, MYO1G, MYO1H, MYO3A, MYO3B, MYO7B, MYOC, MYOCD, MYOD1, MYOG, MYOM2, MYOM3, MYOT, MYOZ1, MYOZ2, MYOZ3, MYRFL, MYT1, MYT1L, MYT1L-AS1, MYZAP, MZB1, N4BP3, NAA11, NAALAD2, NAALADL1, NAALADL2, NAALADL2-AS1, NAALADL2-AS2, NAALADL2-AS3, NACAD, NACAP1, NAGPA-AS1, NAIP, NALCN, NALCN-AS1, NAMA, NANOG, NANOGNB, NANOS2, NANOS3, NAP1L3, NAP1L6, NAPSB, NARR, NAT16, NAT8L, NAV2-AS2, NAV2-AS5, NBAT1, NBEA, NBEAP1, NBPF11, NBPF14, NBPF20, NBPF22P, NBPF4, NBPF6, NBPF7, NCAM1, NCAM1-AS1, NCAM2, NCAN, NCAPG, NCF1, NCF1B, NCF1C, NCF4, NCKAP1L, NCMAP, NCOA7-AS1, NCOR1P1, NCR1, NCR2, NCR3, NCRNAOC250, NCRUPAR, NDC80, NDFIP2-AS1, NDN, NDNF, NDP, NDST3, NDST4, NDUFA6-AS1, NDUFAF4P1, NEBL-AS1, NECAB1, NEFH, NEFM, NEGR1, NEGR1-IT1, NEIL3, NEK10, NEK2, NEK5, NELL1, NELL2, NES, NET01, NEU2, NEURL1, NEURL1-AS1, NEUROD1, NEUROD2, NEUROD4, NEUROD6, NEUROG1, NEUROG2, NEUROG3, NF1P2, NFAM1, NFE2, NFIA-AS1, NFIA-AS2, NGB, NGF, NGFR, NHEG1, NHLH1, NHLRC4, NHS, NHS-AS1, NHSL2, NID2, NIM1K, NIPAL4, NIPSNAP3B, NKAIN2, NKAIN3, NKAIN4, NKAPL, NKAPP1, NKD2, NKILA, NKPD1, NKX1-1, NKX1-2, NKX2-1, NKX2-1-AS1, NKX2-2, NKX2-3, NKX2-4, NKX2-5, NKX2-6, NKX2-8, NKX3-2, NKX6-1, NKX6-2, NKX6-3, NLGN1, NLGN1-AS1, NLGN3, NLGN4X, NLGN4Y, NLGN4Y-AS1, NLRC3, NLRC4, NLRP1, NLRP10, NLRP11, NLRP12, NLRP13, NLRP14, NLRP2, NLRP3, NLRP4, NLRP5, NLRP6, NLRP7, NLRP8, NLRP9, NMBR, NME5, NME8, NME9, NMNAT2, NMRK2, NMS, NMU, NMUR1, NMUR2, NOBOX, NOG, NOL4, NOS1, NOS3, NOSTRIN, NOTCH4, NOTO, NOVA1, NOVA2, NOX1, NOX3, NOX4, NOX5, NOXRED1, NPAP1, NPAS1, NPAS3, NPAS4, NPBWR2, NPFFR1, NPFFR2, NPHP1, NPHP3-AS1, NPHS1, NPHS2, NPIPA3, NPIPA5, NPIPA7, NPIPA8, NPIPB11, NPIPB4, NPIPB5, NPIPB6, NPIPB8, NPIPB9, NPNT, NPS, NPSR1, NPSR1-AS1, NPVF, NPY, NPY1R, NPY2R, NPY4R, NPY5R, NPY6R, NROB1, NR2E1, NR2E3, NR2F1-AS1, NR2F2-AS1, NR5A1, NRADDP, NREP-AS1, NRG1-IT1, NRG1-IT3, NRG2, NRG3, NRG3-AS1, NRGN, NRIP2, NRIP3, NRK, NRL, NRN1, NRON, NRROS, NRSN1, NRXN1, NRXN2, NRXN3, NSFP1, NSG1, NSUN7, NT5C1A, NT5C1B, NT5C1B-RDH14, NTF4, NTM, NTM-IT, NTN3, NTN5, NTNG1, NTNG2, NTRK1, NTRK2, NTRK3, NTRK3-AS1, NTS, NTSR1, NTSR2, NUCB1-AS1, NUDT10, NUDT11, NUDT4P2, NUDT9P1, NUF2, NUP210L, NUP210P1, NUP62CL, NUPR1L, NUTM1, NUTM2A, NUTM2B, NUTM2D, NUTM2F, NUTM2G, NWD1, NWD2, NXF2B, NXF3, NXF4, NXF5, NXNL1, NXNL2, NXPE1, NXPE2, NXPE3, NXPE4, NXPH1, NXPH2, NXPH3, NYAP1, NYAP2, NYX, OACYLP, OBP2A, OBP2B, OBSCN, OC90, OCA2, OCM, OCM2, OCSTAMP, ODAM, ODF1, ODF3, ODF3L1, ODF3L2, ODF4, OGN, OLAH, OLFM1, OLFM3, OLFM4, OLFML1, OLFML2A, OLFML2B, OLFML3, 0LIG1, 0LIG2, 0LIG3, OLR1, OMD, OMG, ONECUT3, OOSP2, OPA1-AS1, OPALIN, OPCML, OPHN1, OPN1LW, OPN1MW2, OPN1SW, OPN4, OPN5, OPRD1, OPRK1, OPRL1, OPRM1, OPTC, OR10A2, OR10A3, OR10A4, OR10A5, OR10A6, OR10A7, OR10AD1, OR10AG1, OR10C1, OR10G2, OR10G3, OR10G4, OR10G7, OR10G8, OR10G9, OR10H1, OR10H2, OR10H3, OR10H4, OR10H5, OR10J1, OR10J3, OR10J5, OR10K1, OR10K2, OR10P1, OR10Q1, OR1OR2, OR10S1, OR10T2, OR10V1, OR10V2P, OR10W1, OR10X1, OR10Z1, OR11A1, OR11G2, OR11H1, OR11H12, OR11H2, OR11H4, OR11H6, OR11L1, OR12D2, OR12D3, OR13A1, OR13C2, OR13C3, OR13C4, OR13C5, OR13C8, OR13C9, OR13D1, OR13F1, OR13G1, OR13H1, OR13J1, OR14A16, OR14C36, OR14I1, OR14J1, OR1A1, OR1A2, OR1B1, OR1C1, OR1D2, OR1D4, OR1D5, OR1E1, OR1E2, OR1F1, OR1F2P, OR1G1, OR1I1, OR1J1, OR1J2, OR1J4, OR1K1, OR1L1, OR1L3, OR1L4, OR1L6, OR1L8, OR1M1, OR1N1, OR1N2, OR1Q1, OR1S1, OR1S2, OR2A1-AS1, OR2A12, OR2A14, OR2A2, OR2A20P, OR2A25, OR2A4, OR2A42, OR2A5, OR2A9P, OR2AE1, OR2AG1, OR2AG2, OR2AK2, OR2AP1, OR2AT4, OR2B11, OR2B2, OR2B3, OR2C1, OR2C3, OR2D2, OR2D3, OR2F1, OR2F2, OR2G2, OR2G3, OR2G6, OR2H1, OR2H2, OR2J2, OR2J3, OR2K2, OR2L13, OR2L1P, OR2L2, OR2L3, OR2L5, OR2L8, OR2M1P, OR2M2, OR2M3, OR2M4, OR2M5, OR2M7, OR2S2, OR2T1, OR2T10, OR2T11, OR2T12, OR2T2, OR2T27, OR2T29, OR2T3, OR2T33, OR2T34, OR2T35, OR2T4, OR2T5, OR2T6, OR2T8, OR2V1, OR2V2, OR2W1, OR2W3, OR2W5, OR2Y1, OR2Z1, OR3A1, OR3A2, OR3A3, OR3A4P, OR4A15, OR4A16, OR4A47, OR4A5, OR4B1, OR4C11, OR4C12, OR4C13, OR4C15, OR4C16, OR4C3, OR4C45, OR4C46, OR4C6, OR4D1, OR4D10, OR4D11, OR4D2, OR4D5, OR4D6, OR4D9, OR4E2, OR4F13P, OR4F15, OR4F17, OR4F21, OR4F4, OR4F5, OR4F6, OR4K1, OR4K13, OR4K14, OR4K15, OR4K17, OR4K2, OR4K5, OR4L1, OR4M1, OR4M2, OR4N2, OR4N3P, OR4N4, OR4N5, OR4P4, OR4Q3, OR4S1, OR4S2, OR4X1, OR4X2, OR51A2, OR51A4, OR51A7, OR51B2, OR51B4, OR51B5, OR51B6, OR51D1, OR51E1, OR51E2, OR51F1, OR51F2, OR51G1, OR51G2, OR51I1, OR51I2, OR51L1, OR51M1, OR51Q1, OR51S1, OR51T1, OR51V1, OR52A1, OR52A5, OR52B2, OR52B4, OR52B6, OR52D1, OR52E2, OR52E4, OR52E6, OR52E8, OR52H1, OR52I1, OR52I2, OR52J3, OR52K1, OR52K2, OR52L1, OR52M1, OR52N1, OR52N2, OR52N4, OR52N5, OR52R1, OR52W1, OR56A1, OR56A3, OR56A4, OR56A5, OR56B1, OR56B4, OR5A1, OR5A2, OR5AC2, OR5AK2, OR5AK4P, OR5AN1, OR5AP2, OR5AR1, OR5AS1, OR5B12, OR5B17, OR5B2, OR5B21, OR5B3, OR5C1, OR5D13, OR5D14, OR5D16, OR5D18, OR5E1P, OR5F1, OR5H1, OR5H14, OR5H15, OR5H2, OR5H6, OR5I1, OR5J2, OR5K1, OR5K2, OR5K3, OR5K4, OR5L1, OR5L2, OR5M1, OR5M10, OR5M11, OR5M3, OR5M8, OR5M9, OR5P2, OR5P3, OR5R1, OR5T1, OR5T2, OR5T3, OR5V1, OR5W2, OR6A2, OR6B1, OR6B2, OR6B3, OR6C1, OR6C2, OR6C3, OR6C4, OR6C6, OR6C65, OR6C68, OR6C70, OR6C74, OR6C75, OR6C76, OR6F1, OR6K2, OR6K3, OR6K6, OR6M1, OR6N1, OR6N2, OR6P1, OR6Q1, OR6S1, OR6T1, OR6V1, OR6W1P, OR6X1, OR6Y1, OR7A10, OR7A17, OR7A5, OR7C1, OR7C2, OR7D2, OR7D4, OR7E12P, OR7E156P, OR7E24, OR7E2P, OR7E37P, OR7E47P, OR7E5P, OR7E91P, OR7G1, OR7G2, OR7G3, OR8A1, OR8B12, OR8B2, OR8B3, OR8B4, OR8B8, OR8D1, OR8D2, OR8D4, OR8G1, OR8G2, OR8G5, OR8H1, OR8H2, OR8H3, OR8I2, OR8J1, OR8J3, OR8K1, OR8K3, OR8K5, OR8S1, OR8U1, OR8U8, OR9A2, OR9A4, OR9G1, OR9G4, OR9I1, OR9K2, OR9Q1, OR9Q2, ORAI2, ORC1, OSBP2, OSBPL10, OSBPL10-AS1, OSBPL5, OSBPL7, OSCAR, OSGEPL1-AS1, OSM, OSMR-AS1, OSR2, OSTN, OTOA, OTOF, OTOG, OTOGL, OTOL1, OTOP1, OTOP2, OTOP3, OTOR, OTOS, OTUD6A, OTUD7A, OTX1, OTX2, OTX2-AS1, OVAAL, OVCH1, OVCH1-AS1, OVCH2, OVOL1-AS1, OVOL2, OVOL3, OXCT1, OXCT1-AS1, OXCT2, OXGR1, P2RX1, P2RX2, P2RX3, P2RX5-TAX1BP3, P2RX6, P2RY1, P2RY10, P2RY12, P2RY13, P2RY14, P2RY4, P2RY8, P3H2-AS1, P3H3, PABPC1L2A, PABPC1L2B, PABPC1L2B-AS1, PABPC1P2, PABPC4L, PABPC5, PABPC5-AS1, PABPN1L, PACERR, PACRG, PACRG-AS1, PACSIN1, PADI2, PADI3, PADI4, PADI6, PAEP, PAGE1, PAGE2, PAGE2B, PAGE3, PAGE4, PAGE5, PAK7, PALD1, PALM, PAMR1, PANX3, PAPL, PAPOLB, PAPPA, PAPPA-AS1, PAPPA2, PAQR8, PARM1, PART1, PARVG, PASD1, PATE1, PATE2, PATE3, PATE4, PAUPAR, PAX1, PAX2, PAX3, PAX4, PAX5, PAX6, PAX7, PAX9, PBK, PBOV1, PBX4, PCA3, PCAT1, PCAT18, PCAT19, PCAT29, PCAT4, PCAT5, PCBP3, PCCA-AS1, PCDH10, PCDH11X, PCDH11Y, PCDH12, PCDH15, PCDH17, PCDH18, PCDH19, PCDH7, PCDH8, PCDH9-AS3, PCDH9-AS4, PCDHA10, PCDHA11, PCDHAl2, PCDHA13, PCDHA2, PCDHA3, PCDHA4, PCDHA5, PCDHA6, PCDHA7, PCDHA8, PCDHA9, PCDHB1, PCDHB10, PCDHB11, PCDHB12, PCDHB13, PCDHB14, PCDHB15, PCDHB16, PCDHB17P, PCDHB18P, PCDHB19P, PCDHB2, PCDHB3, PCDHB4, PCDHB5, PCDHB6, PCDHB7, PCDHB8, PCDHB9, PCDHGA1, PCDHGA11, PCDHGA12, PCDHGA2, PCDHGA3, PCDHGA4, PCDHGA5, PCDHGA6, PCDHGA7, PCDHGA8, PCDHGA9, PCDHGB1, PCDHGB2, PCDHGB3, PCDHGB7, PCDHGB8P, PCDHGC4, PCDHGC5, PCED1B-AS1, PCGEM1, POLO, PCNAP1, PCNXL2, PCOLCE-AS1, PCP4, PCSK1, PCSK1N, PCSK2, PCYT1B, PCYT1B-AS1, PDC, PDCD1, PDCD1LG2, PDCD6IPP2, PDCL2, PDE10A, PDE1A, PDE1C, PDE3A, PDE6A, PDE6B, PDE6C, PDE6G, PDE6H, PDE7B, PDE8B, PDGFD, PDHA2, PDIA2, PDILT, PDLIM4, PDPN, PDX1, PDX1-AS1, PDYN, PDZD2, PDZD3, PDZD4, PDZD7, PDZD9, PDZK1P1, PDZRN3, PDZRN3-AS1, PDZRN4, PEBP4, PECAM1, PEG3-AS1, PENK, PER4, PEX5L, PF4, PFN1P2, PFN3, PFN4, PCA3, PGA4, PGA5, PGAM1P5, PGAM4, PGBD3, PGC, PGCP1, PGK2, PGLYRP1, PGLYRP3, PGLYRP4, PGM5, PGM5-AS1, PGM5P2, PGM5P3-AS1, PGM5P4-AS1, PGPEP1L, PGR, PHACTR1, PHACTR3, PHC1, PHEX-AS1, PHF21B, PHF24, PHGR1, PHKA2-AS1, PHOSPHO1, PHOX2A, PHOX2B, PI15, PI16, PI4KAP1, PIANP, PIF1, PIFO, PIH1D3, PIK3CD-AS1, PIK3CG, PIK3R5, PIK3R6, PILRA, PIN1P1, PINLYP, PIP, PIP5K1B, PIP5K1P1, PIRT, PISRT1, PITPNM3, PITX1, PITX2, PITX3, PIWIL1, PIWIL3, PIWIL4, PKD1L1, PKD1L3, PKD2L2, PKDREJ, PKHD1L1, PKIA, PKIA-AS1, PKN2-AS1, PKNOX2, PKNOX2-AS1, PKP1, PKP3, PLA2G10, PLA2G1B, PLA2G2C, PLA2G2D, PLA2G2E, PLA2G2F, PLA2G3, PLA2G4A, PLA2G4D, PLA2G4E, PLA2G4E-AS1, PLA2G4F, PLA2G5, PLA2G7, PLA2R1, PLAC1, PLAC4, PLAC8, PLAC9, PLAG1, PLAGL1, PLAT, PLB1, PLCB2, PLCB4, PLCE1-AS1, PLCE1-AS2, PLCG1-AS1, PLCH1, PLCH2, PLCL1, PLCXD2-AS1, PLCXD3, PLCZ1, PLD4, PLD5, PLEK, PLEKHB1, PLEKHD1, PLEKHG4B, PLEKHG7, PLEKHH2, PLEKHS1, PLET1, PLGLB2, PLIN1, PLK4, PLK5, PLN, PLP1, PLSCR2, PLSCR5, PLTP, PLXDC1, PLXDC2, PLXNA4, PM20D1, PMCH, PMCHL1, PMCHL2, PMFBP1, PMP2, PMS2P5, PMS2P7, PMS2P9, PNCK, PNLIP, PNLIPRP1, PNLIPRP2, PNLIPRP3, PNMA2, PNMA3, PNMA5, PNMAL1, PNMAL2, PNMT, PNOC, PNPLA1, PODN, PODNL1, POLN, POLQ, POLR2J4, POM121L10P, POM121L12, POM121L1P, POM121L2, POM121L4P, POM121L8P, POM121L9P, POMC, POMZP3, POPDC3, POSTN, POT1-AS1, POTEA, POTEB, POTEB3, POTEC, POTED, POTEE, POTEF, POTEG, POTEH, POTEH-AS1, POTEI, POTEJ, POTEKP, POTEM, POU1F1, POU2AF1, POU2F2, POU2F3, POU3F2, POU3F3, POU3F4, POU4F1, POU4F2, POU4F3, POU5F1B, POU5F1P3, POU5F1P4, POU5F1P5, POU5F2, POU6F2, PP12613, PP14571, PP2D1, PPAP2C, PPAPDC1A, PPAPDC3, PPBP, PPBPP2, PPEF1, PPEF1-AS1, PPEF2, PPFIA2, PPIAL4A, PPIAL4C, PPIAL4E, PPIAL4F, PPIAL4G, PPIAP30, PPIL6, PPM1E, PPM1N, PPP1R14A, PPP1R14D, PPP1R16B, PPP1R17, PPP1R1B, PPP1R2P3, PPP1R2P9, PPP1R36, PPP1R3A, PPP1R3F, PPP1R42, PPP2R2B, PPP2R2B-IT1, PPP3R2, PPP4R1-AS1, PPP4R3CP, PPP5D1, PPY, PPY2P, PQLC2L, PRAC1, PRAC2, PRAM1, PRAME, PRAMEF1, PRAMEF10, PRAMEF11, PRAMEF12, PRAMEF14, PRAMEF15, PRAMEF17, PRAMEF19, PRAMEF2, PRAMEF20, PRAMEF22, PRAMEF26, PRAMEF4, PRAMEF5, PRAMEF6, PRAMEF7, PRAMEF8, PRB1, PRB2, PRB3, PRB4, PRC1-AS1, PRCAT47, PROD, PRDM1, PRDM11, PRDM12, PRDM13, PRDM14, PRDM16, PRDM5, PRDM6, PRDM7, PRDM8, PRDM9, PRELP, PREX2, PRF1, PRG1, PRG3, PRH1-PRR4, PRH2, PRICKLE1, PRICKLE2-AS1, PRICKLE2-AS2, PRICKLE2-AS3, PRIMA1, PRKACG, PRKAG3, PRKAR2A-AS1, PRKAR2B, PRKCA-AS1, PRKCB, PRKCG, PRKCQ, PRKD1, PRKG1, PRKG1-AS1, PRKG2, PRKX-AS1, PRKXP1, PRKY, PRL, PRLH, PRM1, PRM2, PRM3, PRMTS-AS1, PRMT8, PRNCR1, PRND, PRNT, PRO1804, PROB1, PROCA1, PROK1, PROK2, PROKR1, PROKR2, PROL1, PROM1, PROM2, PROP1, PRORY, PROSER2-AS1, PROX2, PRPH, PRPH2, PRPS1L1, PRR11, PRR15L, PRR16, PRR19, PRR20B, PRR21, PRR23A, PRR23B, PRR23C, PRR23D2, PRR25, PRR27, PRR29, PRR29-AS1, PRR30, PRR32, PRR34, PRR35, PRR36, PRR5-ARHGAP8, PRR5L, PRR9, PRRG3, PRRT1, PRRT4, PRRX1, PRRX2, PRRX2-AS1, PRSS1, PRSS16, PRSS21, PRSS22, PRSS27, PRSS30P, PRSS33, PRSS35, PRSS36, PRSS37, PRSS38, PRSS3P2, PRSS41, PRSS42, PRSS45, PRSS46, PRSS48, PRSS50, PRSS54, PRSS55, PRSS56, PRSS57, PRSS58, PRTFDC1, PRTG, PRTN3, PRUNE2, PSAPL1, PSCA, PSD, PSD2, PSG1, PSG10P, PSG11, PSG2, PSG3, PSG5, PSG6, PSG7, PSG8, PSKH2, PSMA8, PSMC1, PSORS1C1, PSORS1C2, PSTPIP1, PTCH2, PTCHD1, PTCHD1-AS, PTCHD2, PTCHD3, PTCHD4, PTCRA, PTCSC3, PTENP1-AS, PTF1A, PTGDR, PTGDR2, PTGDS, PTGER1, PTGER2, PTGER4P2-CDK2AP2P2, PTGES, PTGES2-AS1, PTGES3L, PTGIR, PTGIS, PTGS2, PTH, PTH1R, PTH2, PTH2R, PTK7, PTN, PTP4A3, PTPN13, PTPN20, PTPN22, PTPNS, PTPN7, PTPRB, PTPRC, PTPRD-AS1, PTPRD-AS2, PTPRE, PTPRG-AS1, PTPRN, PTPRN2, PTPRO, PTPRQ, PTPRR, PTPRT, PTPRVP, PTPRZ1, PTTG2, PTX3, PTX4, PURG, PVALB, PVRL3-AS1, PWAR1, PWAR4, PWRN1, PWRN2, PWRN3, PWRN4, PXDN, PXDNL, PXT1, PYDC1, PYDC2, PYGO1, PYHIN1, PYY, QRFP, QRFPR, R3HDML, RAB19, RAB25, RAB31, RAB33A, RAB36, RAB39A, RAB39B, RAB3C, RAB3D, RAB40A, RAB40AL, RAB41, RAB42, RAB44, RAB6B, RAB6C, RAB6C-AS1, RAB9B, RAB9BP1, RABL2A, RACGAP1P, RAD21-AS1, RAD21L1, RAD51, RAD51AP1, RAD51AP2, RAD54L, RADIL, RAET1E-AS1, RAET1K, RAG1, RAG2, RAI1-AS1, RALGAPA1P, RALYL, RAMP2, RAMP2-AS1, RAMP3, RANBP17, RANBP3L, RAPGEF3, RAPGEF4-AS1, RASA4, RASA4B, RASA4CP, RASAL1, RASAL2-AS1, RASAL3, RASD2, RASGEF1A, RASGEF1C, RASGRF1, RASGRF2-AS1, RASGRP1, RASGRP2, RASGRP4, RASIP1, RASL10A, RASL10B, RASL11B, RASL12, RASSF10, RASSF9, RAVER2, RAX, RAX2, RBAK-RBAKDN, RBBP8NL, RBFADN, RBFOX1, RBFOX3, RBM11, RBM20, RBM26-AS1, RBM44, RBM46, RBMS3, RBMS3-AS1, RBMS3-AS3, RBMXL2, RBMXL3, RBMY1A3P, RBMY1D, RBMY1E, RBMY1J, RBMY2EP, RBMY2FP, RBMY3AP, RBP2, RBP3, RBPJL, RCOR2, RCSD1, RCVRN, RD3, RD3L, RDH10-AS1, RDH12, RDH8, RDM1, REC114, REG1A, REG1B, REG1P, REG3A, REG3G, REG4, REM1, RENBP, REREP3, RERG, RERG-AS1, RERGL, RESP18, RETN, RETNLB, REXO1L2P, RFPL1, RFPL1S, RFPL2, RFPL3, RFPL4A, RFPL4AL1, RFPL4B, RFTN2, RFX2, RFX4, RFX6, RFX8, RGAG1, RGMA, RGMB-AS1, RGPD1, RGPD2, RGPD3, RGPD4, RGPD4-AS1, RGPD6, RGPD8, RGR, RGS1, RGS10, RGS11, RGS13, RGS17, RGS18, RGS21, RGS22, RGS4, RGS6, RGS7, RGS7BP, RGS8, RGS9BP, RGSL1, RHAG, RHBDL2, RHBDL3, RHBG, RHCE, RHD, RHEBL1, RHO, RHOH, RHOJ, RHOXF1, RHOXF1-AS1, RHOXF1P1, RHOXF2B, RHPN1-AS1, RIBC1, RIBC2, RIC3, RIIAD1, RIMBP2, RIMBP3, RIMBP3C, RIMS1, RIMS2, RIMS4, RIPPLY1, RIPPLY2, RIPPLY3, RIT2, RLBP1, RLN1, RLN2, RLN3, RLTPR, RMDN2-AS1, RMST, RNASE10, RNASE11, RNASE12, RNASE2, RNASE3, RNASE6, RNASE8, RNASE9, RNASEH2B-AS1, RNF112, RNF113B, RNF133, RNF138P1, RNF144A-AS1, RNF148, RNF150, RNF151, RNF157, RNF157-AS1, RNF17, RNF175, RNF182, RNF183, RNF212, RNF212B, RNF217-AS1, RNF219-AS1, RNF222, RNF223, RNF224, RNF39, RNFT2, RNU6-16P, RNU6-48P, RNU6-52P, RNU6-64P, RNU6-66P, RNU6-67P, RNU6-69P, RNU6-71P, RNU6-72P, RNU6-76P, RNU6-78P, RNU6-79P, RNU6-81P, RNY4, ROBO2, ROCK1P1, ROPN1, ROPN1B, ROPN1L, ROPN1L-AS1, ROR1, ROR2, RORA-AS1, RORA-AS2, RORB, RORB-AS1, RP1, RP11-87M18.2, RP1L1, RPE65, RPGRIP1, RPH3A, RPL1OL, RPL13AP17, RPL21, RPL21P28, RPL23AP32, RPL23AP87, RPL29P2, RPL34-AS1, RPL3L, RPL7, RPRM, RPRML, RPS16P5, RPS26P11, RPS2P32, RPS4Y1, RPS4Y2, RPS6KA2-AS1, RPS6KA2-IT1, RPS6KA5, RPS6KA6, RPS7P5, RPSAP52, RPSAP9, RPTN, RRH, RRN3P2, RRS1-AS1, RS1, RSPH1, RSPH10B2, RSPH14, RSPH4A, RSPH6A, RSPH9, RSPO1, RSPO3, RSPO4, RSU1P2, RTBDN, RTCA-AS1, RTEL1-TNFRSF6B, RTKN2, RTL1, RTN1, RTP1, RTP2, RTP5, RUFY4, RUNDC3A, RUNDC3A-AS1, RUNX1-IT1, RUNX1T1, RUNX2, RUNX3, RUSC1-AS1, RUVBL1-AS1, RXFP1, RXFP2, RXFP3, RXFP4, RXRG, RYR1, RYR2, RYR3, S100A12, S100A5, S100A7, S100A7A, S100A7L2, S100A8, S100B, S100G, S100Z, S1PR4, S1PR5, SACS-AS1, SAG, SAGE1, SALL2, SALL3, SALL4, SALRNA1, SALRNA2, SALRNA3, SAMD11, SAMD12-AS1, SAMD13, SAMD14, SAMD15, SAMD3, SAMD7, SAMSN1, SAMSN1-AS1, SAP3OL-AS1, SAPCD2, SASH3, SATB1-AS1, SATB2-AS1, SATL1, SA01, SAXO2, SBF1P1, SBK1, SBK2, SBK3, SBSN, SCAI, SCARA5, SCART1, SCD5, SCEL, SCEL-AS1, SCG2, SCG3, SCGB1A1, SCGB1C1, SCGB1C2, SCGB1D1, SCGB1D2, SCGB1D4, SCGB2A1, SCGB2A2, SCGB3A1, SCGB3A2, SCHLAP1, SCIMP, SCIN, SCML4, SCN10A, SCN11A, SCN1A, SCN2A, SCN2B, SCN3A, SCN3B, SCN4A, SCN4B, SCN5A, SCN7A, SCNN1B, SCNN1G, SCOL-AS1, SCP2D1, SCRG1, SCRN1, SCRT1, SCRT2, SCUBE2, SCUBE3, SDC4P, SDK1, SDK2, SDR16C5, SDR16C6P, SDR9C7, SEBOX, SEC14L3, SEC14L5, SEC14L6, SEC1P, SEC24B-AS1, SEL1L2, SELE, SELL, SELP, SELV, SEMA3A, SEMA3C, SEMA3D, SEMA3E, SEMA3G, SEMA4D, SEMA5B, SEMA6A, SEMA6B, SEMA6D, SEMG1, SEMG2, SENOR, SEPSECS-AS1, SEPT12, SEPT14, SEPT3, SEPT4-AS1, SEPT5-GP1BB, SEPT7P9, SERF1B, SERHL, SERHL2, SERPINA13P, SERPINA9, SERPINB10, SERPINB11, SERPINB12, SERPINB13, SERPINB3, SERPINB5, SERPINE3, SERPINI2, SERTAD4, SERTAD4-AS1, SERTM1, SEZ6, SEZ6L, SEZ6L2, SFMBT2, SFRP1, SFRP2, SFRP5, SFTA1P, SFTA2, SFTA3, SFTPA1, SFTPA2, SFTPB, SFTPC, SGCA, SGCD, SGCG, SGCZ, SGIP1, SGOL1, SGPP2, SGSM1, SH2D1A, SH2D1B, SH2D3C, SH2D4B, SH2D6, SH2D7, SH3BP1, SH3GL1P1, SH3GL1P2, SH3GL2, SH3GL3, SH3PXD2A-AS1, SH3RF3, SH3RF3-AS1, SH3TC2, SHANK1, SHANK2-AS1, SHANK2-A53, SHC3, SHC4, SHCBP1, SHCBP1L, SHD, SHE, SHISA2, SHISA3, SHISA6, SHISA7, SHISA8, SHISA9, SHOX, SHOX2, SHROOM4, SI, SIAH3, SIDT1, SIGLEC1, SIGLEC10, SIGLEC11, SIGLEC12, SIGLEC14, SIGLEC15, SIGLEC16, SIGLEC17P, SIGLEC5, SIGLEC6, SIGLEC7, SIGLEC8, SIGLEC9, SIGLECL1, SIM1, SIM2, SIRPB2, SIRPD, SIRPG, SIRPG-AS1, SIT1, SIX1, SIX2, SIX3, SIX3-AS1, SIX6, SKA1, SKA3, SKIDA1, SKINTL, SKOR1, SKOR2, SLA, SLA2, SLAMF1, SLAMF6, SLAMF8, SLAMF9, SLC10A2, SLC10A4, SLC10A6, SLC11A1, SLC12A1, SLC12A3, SLC12A5, SLC13A1, SLC13A2, SLC13A4, SLC14A1, SLC14A2, SLC14A2-AS1, SLC15A2, SLC15A5, SLC16A11, SLC16A12-AS1, SLC16A14, SLC16A6, SLC16A8, SLC16A9, SLC17A6, SLC17A7, SLC18A1, SLC18A3, SLC1A3, SLC1A6, SLC1A7, SLC22A11, SLC22A12, SLC22A13, SLC22A14, SLC22A16, SLC22A17, SLC22A20, SLC22A24, SLC22A31, SLC22A6, SLC22A8, SLC24A2, SLC24A3, SLC24A4, SLC24A5, SLC25A12, SLC25A2, SLC25A21, SLC25A31, SLC25A35, SLC25A36, SLC25A3P1, SLC25A41, SLC25A48, SLC25A5-AS1, SLC25A51P1, SLC25A52, SLC25A53, SLC26A10, SLC26A3, SLC26A4, SLC26A4-AS1, SLC26A5, SLC26A7, SLC26A8, SLC26A9, SLC27A6, SLC28A2, SLC28A3, SLC2A1-AS1, SLC2A14, SLC2A3, SLC2A4, SLC30A3, SLC30A8, SLC32A1, SLC34A1, SLC34A2, SLC34A3, SLC35D3, SLC35F1, SLC35F3, SLC35F4, SLC35G3, SLC35G4, SLC35G5, SLC35G6, SLC36A2, SLC36A3, SLC37A2, SLC38A11, SLC38A5, SLC38A8, SLC39A12, SLC39A12-AS1, SLC39A2, SLC44A4, SLC45A1, SLC45A4, SLC46A2, SLC47A2, SLC4A1, SLC4A10, SLC4A3, SLC4A5, SLC4A8, SLC4A9, SLC52A1, SLC52A3, SLC5A1, SLC5A12, SLC5A2, SLC5A4, SLC5A5, SLC5A7, SLC5A8, SLC6A1-AS1, SLC6A10P, SLC6A11, SLC6A14, SLC6A15, SLC6A16, SLC6A17, SLC6A18, SLC6A19, SLC6A2, SLC6A3, SLC6A4, SLC6A5, SLC6A7, SLC7A10, SLC7A11-AS1, SLC7A13, SLC7A14, SLC7A3, SLC7A4, SLC7A5P1, SLC7A5P2, SLC7A8, SLC8A1, SLC8A1-AS1, SLC8A2, SLC8A3, SLC9A2, SLC9A3, SLC9A4, SLC9A7P1, SLC9A9, SLC9A9-AS1, SLC9C1, SLC9C2, SLCO1A2, SLCO1B7, SLCO1C1, SLCO2A1, SLCO4A1, SLCO4A1-AS1, SLCO6A1, SLFN11, SLFN12L, SLFN13, SLFN14, SLIT1, SLIT1-AS1, SLIT2-IT1, SLIT3, SLITRK1, SLITRK2, SLITRK4, SLITRK5, SLITRK6, SLMO1, SLN, SLURP1, SLX1A, SLX1A-SULT1A3, SMA4, SMA5, SMAD1-AS1, SMAD1-AS2, SMAD9, SMARCA5-AS1, SMC1B, SMC2-AS1, SMC5-AS1, SMC01, SMCP, SMCR2, SMCR5, SMG1P1, SMG1P2, SMG1P3, SMG1P5, SMG7-AS1, SMIM10, SMIM10L2A, SMIM10L2B, SMIM17, SMIM2, SMIM2-IT1, SMIM21, SMIM22, SMIM23, SMIM24, SMIM5, SMIM9, SMN2, SMOC2, SMPD3, SMR3A, SMR3B, SMTNL1, SMTNL2, SMYD1, SNAI3, SNAP25, SNAP25-AS1, SNAP91, SNCA, SNCA-AS1, SNCAIP, SNOB, SND1-IT1, SNHG22, SNHG24, SNPH, SNRPD2P2, SNTG1, SNTG2, SNTN, SNX20, SNX29P1, SNX31, SNX32, S0D3, SOGA3, SOHLH1, SOHLH2, SORCS1, SORCS3, SORCS3-AS1, SOST, SOSTDC1, SOWAHD, SOX1, SOX10, SOX11, SOX14, SOX15, SOX17, SOX18, SOX2-OT, SOX21, SOX21-AS1, SOX3, SOX30, SOX8, SOX9-AS1, SP140, SP6, SP7, SP8, SP9, SPACA1, SPACA3, SPACA4, SPACA5B, SPACA6P, SPACA6P-AS, SPACA7, SPAG11A, SPAG11B, SPAG17, SPAG6, SPAG8, SPAM1, SPANXA2, SPANXA2-OT1, SPANXB1, SPANXC, SPANXD, SPANXN1, SPANXN2, SPANXN3, SPANXN4, SPANXN5, SPARC, SPARCL1, SPATA1, SPATA12, SPATA13-AS1, SPATA16, SPATA17, SPATA17-AS1, SPATA19, SPATA22, SPATA3, SPATA3-AS1, SPATA31A1, SPATA31A3, SPATA31A6, SPATA31A7, SPATA31C1, SPATA31C2, SPATA31D1, SPATA31D3, SPATA31D4, SPATA31D5P, SPATA31E1, SPATA32, SPATA4, SPATA42, SPATA45, SPATA6, SPATA8, SPATA8-AS1, SPATA9, SPATC1, SPATS1, SPC24, SPC25, SPDYA, SPDYC, SPDYE1, SPDYE2, SPDYE3, SPDYE4, SPDYE5, SPDYE6, SPDYE7P, SPDYE8P, SPEF1, SPEG, SPEM1, SPERT, SPG20-AS1, SPHAR, SPHKAP, SPI1, SPIB, SPIC, SPIN2A, SPINK13, SPINK14, SPINK2, SPINK4, SPINK5, SPINK6, SPINK7, SPINK8, SPINK9, SPINT3, SPINT4, SPN, SPNS3, SP011, SPOCK2, SPOCK3, SPON1, SPPL2C, SPRNP1, SPRR1B, SPRR2B, SPRR2C, SPRR2D, SPRR2E, SPRR2F, SPRR2G, SPRR4, SPRY3, SPRY4-IT1, SPSB4, SPTA1, SPTBN4, SPTSSB, SPTY2D1-AS1, SPZ1, SRCIN1, SRD5A1P1, SRGAP2-AS1, SRGAP2C, SRGAP2D, SRGAP3, SRGAP3-A53, SRL, SRMS, SRPK3, SRRM3, SRRM4, SRRM5, SRY, SSBP3-AS1, SSC5D, SSMEM1, SSPN, SSPO, SSR4P1, SST, SSTR3, SSTR4, SSTR5, SSTR5-AS1, SSX1, SSX2B, SSX3, SSX4B, SSX5, SSX6, SSX7, SSX8, SSX9, ST13P4, ST18, ST3GAL5-AS1, ST6GAL2, ST6GALNAC1, ST6GALNAC3, ST6GALNAC5, ST7-AS1, ST7-A52, ST7-OT3, ST7-OT4, ST8SIA1, ST8SIA2, ST8SIA3, ST8SIA4, ST8SIA5, ST8SIA6, ST8SIA6-AS1, STAB1, STAB2, STAC, STAC2, STAG3, STAG3L1, STAG3L3, STAM-AS1, STAP1, STAR, STARD6, STARD9, STATH, STAU2-AS1, STC1, STEAP1B, STEAP2-AS1, STEAP3-AS1, STEAP4, STH, STIL, STK31, STK32A, STK32B, STK33, STK4-AS1, STKLD1, STMN2, STMN3, STMND1, STOML3, STON1, STON1-GTF2A1L, STOX1, STPG2, STPG2-AS1, STRA6, STRA8, STRC, STX18-AS1, STX18-IT1, STX19, STXBP5-AS1, STXBP5L, STYK1, SUGT1P1, SUGT1P3, SULT1A4, SULT1C3, SULT1C4, SULT2B1, SULT4A1, SULT6B1, SUMO1P1, SUMO4, SUN3, SUNS, SUPT20HL1, SUPT20HL2, SUSD2, SUSD5, SV2A, SV2B, SV2C, SVEP1, SVILP1, SVOP, SVOPL, SYCE2, SYCN, SYCP1, SYCP2, SYCP2L, SYCP3, SYK, SYN1, SYN2, SYN3, SYNDIG1, SYNDIG1L, SYNE1-AS1, SYNGR4, SYNJ2-IT1, SYNPO2, SYNPO2L, SYNPR, SYNPR-AS1, SYP, SYP-AS1, SYT1, SYT10, SYT11, SYT13, SYT14, SYT14P1, SYT15, SYT16, SYT2, SYT3, SYT4, SYT5, SYT6, SYT8, SYTL1, SYTL3, T, TAAR2, TAAR5, TAAR6, TAAR8, TAAR9, TAC4, TACR1, TACR2, TACR3, TAF1L, TAF4B, TAF7L, TAGAP, TAGLN3, TALI, TAL2, TARID, TARM1, TARP, TAS1R1, TAS1R2, TAS1R3, TAS2R1, TAS2R10, TAS2R13, TAS2R16, TAS2R19, TAS2R3, TAS2R30, TAS2R31, TAS2R38, TAS2R39, TAS2R40, TAS2R41, TAS2R42, TAS2R43, TAS2R46, TAS2R50, TAS2R60, TAS2R7, TAS2R8, TAS2R9, TBATA, TBC1D10C, TBC1D21, TBC1D22A-AS1, TBC1D26, TBC1D28, TBC1D29, TBC1D3, TBC1D32, TBC1D3B, TBC1D3C, TBC1D3H, TBC1D3L, TBC1D3P1-DHX40P1, TBC1D3P2, TBC1D3P5, TBL1Y, TBPL2, TBX1, TBX10, TBX18, TBX2, TBX2-AS1, TBX20, TBX21, TBX22, TBX4, TBX5, TBX5-AS1, TBX6, TBXA2R, TBXAS1, TC2N, TCAF2P1, TCAM1P, TCEAL2, TCEAL5, TCEAL6, TCEAL7, TCEB3B, TCEB3CL2, TCERG1L, TCERG1L-AS1, TCF15, TCF21, TCF23, TCF24, TCF4, TCHH, TCHHL1, TCL1A, TCL1B, TCL6, TCN1, TCONS_00029157, TCP10, TCP10L2, TCP11, TCP11X2, TCTE1, TCTE3, TCTEX1D1, TCTEX1D4, TDGF1, TDGF1P3, TDH, TDRD1, TDRD10, TDRD12, TDRD15, TDRD5, TDRD6, TDRD9, TDRG1, TECRL, TECTA, TEDDM1, TEK, TEKT1, TEKT2, TEKT3, TEKT4, TENM2, TENM3, TENM4, TEPP, TERT, TESPA1, TET1, TET2-AS1, TEX11, TEX12, TEX13A, TEX13B, TEX15, TEX19, TEX21P, TEX22, TEX26, TEX26-AS1, TEX28, TEX33, TEX35, TEX36, TEX36-AS1, TEX37, TEX38, TEX40, TEX41, TEX43, TEX9, TFAMP1, TFAP2A, TFAP2A-AS1, TFAP2B, TFAP2C, TFAP2D, TFAP2E, TFCP2L1, TFDP3, TFEC, TFF1, TFF2, TG, TGFA-IT1, TGIF2LX, TGIF2LY, TGM3, TGM4, TGM5, TGM6, TGM7, TH, THBD, THBS2, THBS4, THCAT155, THEG, THEG5, THEGL, THEMIS, THEMIS2, THOC7-AS1, THRA1/BTR, THSD4-AS1, THSD4-AS2, THSD7A, THSD7B, THY1, TIAM2, TICRR, TIE1, TIFAB, TIGD4, TIGIT, TIMD4, TIMP4, TINAG, TISP43, TKTL1, TKTL2, TLDC2, TLL1, TLL2, TLR10, TLR5, TLR7, TLR8, TLR8-AS1, TLX1, TLX1NB, TLX2, TLX3, TM4SF18, TM4SF19, TM4SF19-AS1, TM4SF19-TCTEX1D2, TM4SF20, TM6SF1, TMC1, TMC2, TMC3, TMC3-AS1, TMC5, TMC6, TMC8, TMCO2, TMCO5A, TMCO5B, TMED11P, TMEFF1, TMEFF2, TMEM105, TMEM108, TMEM108-AS1, TMEM114, TMEM125, TMEM130, TMEM132B, TMEM132C, TMEM132D, TMEM132E, TMEM145, TMEM14E, TMEM150B, TMEM151B, TMEM155, TMEM163, TMEM169, TMEM173, TMEM174, TMEM178A, TMEM178B, TMEM179, TMEM190, TMEM191A, TMEM191B, TMEM191C, TMEM196, TMEM200A, TMEM200C, TMEM202, TMEM204, TMEM207, TMEM210, TMEM211, TMEM212, TMEM212-AS1, TMEM213, TMEM215, TMEM221, TMEM225, TMEM229A, TMEM229B, TMEM232, TMEM235, TMEM236, TMEM239, TMEM240, TMEM244, TMEM246-AS1, TMEM247, TMEM252, TMEM254-AS1, TMEM255A, TMEM255B, TMEM257, TMEM26, TMEM26-AS1, TMEM262, TMEM30C, TMEM31, TMEM35, TMEM5-AS1, TMEM51-AS1, TMEM52B, TMEM59L, TMEM63C, TMEM71, TMEM72, TMEM72-AS1, TMEM75, TMEM86A, TMEM88B, TMEM89, TMEM8C, TMEM95, TMIE, TMIGD1, TMIGD2, TMIGD3, TMOD4, TMPO-AS1, TMPRSS11A, TMPRSS11B, TMPRSS11BNL, TMPRSS11D, TMPRSS11E, TMPRSS11F, TMPRSS11GP, TMPRSS12, TMPRSS13, TMPRSS15, TMPRSS4, TMPRSS4-AS1, TMPRSS5, TMPRSS7, TMSB15A, TMSB15B, TMSB4Y, TNF, TNFAIP6, TNFAIP8L2, TNFRSF13B, TNFRSF13C, TNFRSF17, TNFRSF18, TNFRSF4, TNFRSF8, TNFSF12-TNFSF13, TNFSF15, TNFSF4, TNFSF8, TNIP3, TNMD, TNN, TNNC1, TNNC2, TNNI2, TNNI3, TNNI3K, TNNT1, TNNT3, TNP1, TNP2, TNR, TNRC18P1, TNRC6C-AS1, TNS4, TNXA, TNXB, TOB2P1, TOMM2OL, TOP1P2, TOPAZ1, TOR4A, TOX, TOX2, TP53TG3C, TP53TG3D, TP53TG5, TP73, TPBGL, TPD52L3, TPH1, TPH2, TPI1P3, TPO, TPPP2, TPPP3, TPRG1, TPRG1-AS2, TPRX1, TPRXL, TPSAB1, TPSB2, TPSD1, TPTE, TPTE2, TPTE2P1, TPTE2P3, TPTE2P5, TPTE2P6, TPTEP1, TRABD2B, TRAF3IP3, TRAPPC3L, TRAT1, TRDMT1, TRDN, TREM1, TREM2, TREML1, TREML2, TREML4, TRERNA1, TREX2, TRG-AS1, TRH, TRHDE, TRHR, TRIL, TRIM17, TRIM40, TRIM42, TRIM43, TRIM43B, TRIM46, TRIM48, TRIM49, TRIM49B, TRIM49C, TRIM49D2, TRIM50, TRIM51, TRIM51HP, TRIM53AP, TRIM58, TRIM59, TRIM6-TRIM34, TRIM60, TRIM61, TRIM63, TRIM64, TRIM64B, TRIM64C, TRIM67, TRIM71, TRIM72, TRIM74, TRIM77, TRIML1, TRIML2, TRPA1, TRPC1, TRPC2, TRPC3, TRPC4, TRPC5, TRPC50S, TRPC6, TRPC7, TRPM1, TRPM2-AS, TRPM3, TRPM5, TRPM6, TRPV2, TRPV3, TRPV5, TRPV6, TRY2P, TSC22D1-AS1, TSG1, TSGA10IP, TSGA13, TSHB, TSHR, TSHZ3, TSIX, TSKS, TSL, TSNAX-DISC1, TSPAN10, TSPAN11, TSPAN16, TSPAN18, TSPAN19, TSPAN2, TSPAN32, TSPEAR, TSPY1, TSPY2, TSPY26P, TSPY3, TSPY4, TSPY8, TSPYL6, TSSC2, TSSK1B, TSSK2, TTBK1, TTC16, TTC21B-AS1, TTC23L, TTC24, TTC25, TTC29, TTC30B, TTC34, TTC39A-AS1, TTC39C-AS1, TTC41P, TTC6, TTC9B, TTK, TTLL10, TTLL13P, TTLL6, TTLL9, TTN, TTTY10, TTTY11, TTTY12, TTTY13, TTTY14, TTTY15, TTTY16, TTTY17B, TTTY17C, TTTY18, TTTY19, TTTY1B, TTTY20, TTTY21, TTTY22, TTTY23, TTTY2B, TTTY3, TTTY3B, TTTY4, TTTY4B, TTTY5, TTTY6, TTTY6B, TTTY7B, TTTY8, TTTY8B, TTTY9A, TTTY9B, TTYH1, TTYH2, TUB, TUB-AS1, TUBA3C, TUBA3D, TUBA3E, TUBA3FP, TUBAL3, TUBB1, TUBB2B, TUBB4A, TUBB8, TUBBP5, TULP1, TULP2, TUNAR, TUSC3, TUSC5, TUSC7, TVP23A, TWIST1, TWIST2, TXLNB, TXLNGY, TXNDC12-AS1, TXNDC2, TXNDC8, TXNRD3NB, TYR, TYRP1, UAP1L1, UBASH3A, UBE2DNL, UBE2E1-AS1, UBE2NL, UBE2Q2L, UBE2U, UBL4B, UBOX5-AS1, UBQLN3, UBQLNL, UBTFL1, UBXN10, UBXN10-AS1, UCHL1-AS1, UCMA, UCN3, UCP1, UCP2, UCP3, UG0898H09, UGT1A10, UGT1A8, UGT2A1, UGT3A2, UGT8, UHRF1, ULK4P2, ULK4P3, UMOD, UMODL1, UMODL1-AS1, UNC13A, UNC13C, UNC45B, UNC5A, UNC5C, UNC5D, UNC79, UNC80, UNCX, UNQ6494, UOX, UPK1A-AS1, UPK1B, UPK3A, UPK3B, UQCRBP1, URAD, USH1C, USH1G, USH2A, USHBP1, USP12-AS1, USP17L1, USP17L10, USP17L11, USP17L12, USP17L13, USP17L15, USP17L17, USP17L19, USP17L2, USP17L20, USP17L21, USP17L25, USP17L3, USP17L4, USP17L6P, USP17L7, USP17L8, USP17L9P, USP2-AS1, USP26, USP27X-AS1, USP29, USP32P1, USP32P2, USP50, USP51, USP6, USP9Y, UST, UTAT33, UTF1, UTS2, UTS2R, UTY, VAC14-AS1, VANGL2, VASH1, VASH2, VAT1L, VAV1, VAV3, VAV3-AS1, VAX1, VAX2, VCAM1, VCAN, VCX, VCX2, VCX3A, VCX3B, VCY1B, VEGFC, VENTX, VENTXP1, VENTXP7, VEPH1, VGF, VGLL1, VGLL2, VGLL3, VHLL, VILL, VIP, VIPR1, VIPR1-AS1, VIPR2, VIT, VN1R1, VN1R1OP, VN1R2, VN1R4, VN1R5, VPREB1, VPS13A-AS1, VRTN, VSIG1, VSIG2, VSIG4, VSIG8, VSTM1, VSTM2A, VSTM2A-OT1, VSTM2B, VSTM5, VSX1, VSX2, VWA2, VWA3A, VWA3B, VWA5B1, VWA5B2, VWA8-AS1, VWC2, VWC2L, VWC2L-IT1, VWDE, VWF, WARS2-IT1, WASH3P, WASH5P, WASH7P, WASIR2, WBP11P1, WBP2NL, WBSCR17, WBSCR28, WDFY4, WDR11-AS1, WDR17, WDR38, WDR49, WDR62, WDR63, WDR64, WDR66, WDR86, WDR86-AS1, WDR87, WDR88, WDR93, WEE2, WFDC1, WFDC10A, WFDC10B, WFDC11, WFDC12, WFDC13, WFDC21P, WFDC3, WFDC5, WFDC6, WFDC8, WFDC9, WHAMMP2, WI2-237311.2, WIF1, WIPF1, WISP1, WISP2, WISP3, WNK2, WNK3, WNT1, WNT10A, WNT10B, WNT16, WNT2, WNT2B, WNT3A, WNT6, WNT7A, WNT8A, WNT8B, WNT9B, WSCD2, WSPAR, WT1, WT1-AS, WTAPP1, WTH3DI, WTIP, WWC2-AS1, WWC2-AS2, WWTR1-AS1, XACT, XAGE1B, XAGE1E, XAGE2, XAGE3, XAGE5, XCL1, XCL2, XCR1, XG, XGY2, XIRP1, XIRP2, XIRP2-AS1, XKR3, XKR4, XKR5, XKR6, XKR7, XKRX, XKRY, XLOC_007697, XLOC_008559, XLOC_009911, XRCC2, XRCC6P5, XXYLT1-AS1, XXYLT1-AS2, XYLT1, YBX2, YIPF7, YPEL4, YVVHAEP1, YWHAEP7, YY1P2, ZAN, ZAP70, ZAR1, ZAR1L, ZBBX, ZBED2, ZBED3-AS1, ZBP1, ZBTB20-AS1, ZBTB20-AS3, ZBTB20-AS4, ZBTB32, ZBTB46, ZBTB46-AS1, ZBTB7C, ZBTB8B, ZC2HC1B, ZC3H12B, ZCCHC12, ZCCHC13, ZCCHC16, ZCCHC18, ZCCHC5, ZCWPW2, ZDHHC11, ZDHHC15, ZDHHC19, ZDHHC22, ZDHHC8P1, ZEB2, ZEB2-AS1, ZFAT-AS1, ZFHX4-AS1, ZFP2, ZFP28, ZFP3, ZFP42, ZFP57, ZFP82, ZFP91-CNTF, ZFPM2, ZFPM2-AS1, ZFR2, ZFX-AS1, ZFY, ZG16B, ZGRF1, ZIC3, ZIC4, ZIC5, ZIK1, ZIM2, ZIM2-AS1, ZIM3, ZMAT4, ZNF114, ZNF132, ZNF135, ZNF137P, ZNF14, ZNF154, ZNF157, ZNF169, ZNF185, ZNF197-AS1, ZNF204P, ZNF208, ZNF214, ZNF233, ZNF252P-AS1, ZNF257, ZNF273, ZNF280A, ZNF280B, ZNF285, ZNF286B, ZNF287, ZNF30-AS1, ZNF300P1, ZNF311, ZNF32-AS3, ZNF320, ZNF321P, ZNF322, ZNF33BP1, ZNF347, ZNF350-AS1, ZNF365, ZNF366, ZNF385C, ZNF385D, ZNF385D-AS1, ZNF385D-AS2, ZNF391, ZNF396, ZNF404, ZNF415, ZNF418, ZNF43, ZNF430, ZNF431, ZNF439, ZNF454, ZNF462, ZNF469, ZNF471, ZNF474, ZNF479, ZNF486, ZNF488, ZNF491, ZNF492, ZNF501, ZNF503-AS1, ZNF519, ZNF521, ZNF525, ZNF530, ZNF532, ZNF534, ZNF536, ZNF540, ZNF541, ZNF546, ZNF549, ZNF555, ZNF556, ZNF559-ZNF177, ZNF560, ZNF571-AS1, ZNF572, ZNF575, ZNF578, ZNF582, ZNF599, ZNF607, ZNF610, ZNF611, ZNF624, ZNF625, ZNF625-ZNF20, ZNF630, ZNF630-AS1, ZNF645, ZNF648, ZNF649-AS1, ZNF658, ZNF658B, ZNF660, ZNF663P, ZNF664-FAM101A, ZNF665, ZNF667, ZNF670-ZNF695, ZNF676, ZNF677, ZNF679, ZNF681, ZNF683, ZNF695, ZNF70, ZNF701, ZNF702P, ZNF705A, ZNF705B, ZNF705D, ZNF705E, ZNF705G, ZNF709, ZNF711, ZNF713, ZNF714, ZNF716, ZNF724P, ZNF726, ZNF727, ZNF728, ZNF729, ZNF730, ZNF732, ZNF733P, ZNF735, ZNF737, ZNF738, ZNF750, ZNF763, ZNF772, ZNF781, ZNF788, ZNF790-AS1, ZNF793, ZNF793-AS1, ZNF80, ZNF804A, ZNF804B, ZNF806, ZNF812, ZNF813, ZNF814, ZNF815P, ZNF816-ZNF321P, ZNF826P, ZNF827, ZNF829, ZNF831, ZNF833P, ZNF835, ZNF847P, ZNF85, ZNF853, ZNF860, ZNF876P, ZNF878, ZNF879, ZNF883, ZNF888, ZNF890P, ZNF90, ZNF93, ZNF98, ZNF99, ZNRD1-AS1, ZNRF2P1, ZNRF2P2, ZNRF3-AS1, ZNRF4, ZP1, ZP2, ZP4, ZPBP, ZPBP2, ZPLD1, ZRANB2-AS2, ZSCAN1, ZSCAN10, ZSCAN23, ZSCAN4, ZSCAN5B, ZSWIM2, and ZSWIM5 were classified as non-expressed. Group 1 of non-expressed genes was observed to include 5 disease-associated genes.

[0598] AACS, AADACP1, AAGAB, MMP, AAR2, AARSD1, AATBC, ABALON, ABCA11P, ABCA12, ABCA5, ABCB10, ABCB6, ABCB7, ABCB8, ABCB9, ABCC6P2, ABCD4, ABCF1, ABCF3, ABCG2, ABHD12, ABHD14A, ABHD14A-ACY1, ABHD16A, ABHD16B, ABT1, ACAA1, ACAD8, ACADL, ACADM, ACADS, ACAP1, ACAT1, ACBD3, ACER3, AC01, ACO2, ACOT1, ACOT2, ACOT6, ACOT9, ACOX1, ACP1, ACP5, ACRBP, ACRO, ACSL6, ACSM1, ACTBL2, ACTG1P20, ACTG2, ACTL10, ACTL6A, ACTR1B, ACTR3B, ACTR3C, ACVR2B, ACVR2B-AS1, ACY1, ACY3, ACYP1, ACYP2, ADAL, ADAM15, ADAM9, ADAMTS13, ADAMTS7, ADAMTSL4, ADAR, ADAT1, ADCK4, ADCY1, ADCY10P1, ADCY5, ADCY7, ADD1, ADGRA3, ADGRD1, ADGRE5, ADGRF3, ADGRF4, ADGRG7, ADHS, ADIPOR1, ADMS, ADNP, ADNP-AS1, ADNP2, ADO, ADORA2A, ADORA2A-AS1, ADPRHL1, ADPRM, ADRA2A, ADRA2C, ADRBK1, AES, AFAP1L2, AFG3L2, AFTPH, AGA, AGAPS, AGAP6, AGAP9, AGBL3, AGBLS-AS1, AGGF1, AGMAT, AGO2, AGO3, AGPAT1, AGPATS, AHCTF1P1, AHCY, AHCYL1, AHNAK, AHNAK2, AHSA2, ADA, AIFM1, AIG1, AIMP1, AIP, AJUBA, AK3, AKAP10, AKAP17A, AKAP3, AKAP6, AKAP8, AKIP1, AKIRIN1, AKR1A1, AKR7A2, AKT2, AKTIP, ALB, ALDH1A2, ALDH1A3, ALDH1L1-AS1, ALDH1L1-AS2, ALDH3B1, ALDH7A1, ALDH9A1, ALG1, ALG10, ALG10B, ALG11, ALG13, ALG1L, ALG2, ALG3, ALG5, ALG8, ALG9, ALKBH1, ALKBH4, ALLC, ALOX12, ALOX12P2, ALOX5, ALX3, ALYREF, AMD1, AMDHD1, AMER1, AMFR, AMH, AMIGO2, AMIGO3, AMPD1, AMZ2P1, ANAPC10, ANAPC13, ANAPC15, ANAPC16, ANAPC2, ANAPC5, ANAPC7, ANGPTL1, ANGPTL2, ANGPTL6, ANGPTL7, ANKAR, ANKH, ANKIB1, ANKLE2, ANKRD12, ANKRD13C, ANKRD18A, ANKRD22, ANKRD23, ANKRD27, ANKRD33, ANKRD35, ANKRD36, ANKRD36BP1, ANKRD36C, ANKRD40, ANKRD46, ANKRD49, ANKRD53, ANKRD61, ANKS3, ANO8, ANP32B, ANP32C, ANTXR1, ANTXR2, ANXA11, ANXA2R, ANXA4, ANXA5, ANXA6, ANXA7, AOC4P, AOX2P, AP1AR, AP1M1, AP1S1, AP1S2, AP2B1, AP2M1, AP2S1, AP3D1, AP3M2, AP3S1, AP4B1-AS1, AP4M1, AP4S1, APBA3, APEH, APEX1, APH1A, API5, APIP, APITD1-CORT, APLF, APLN, APLP1, APLP2, APMAP, APOA1-AS, APOA1BP, APOBEC3B, APOBEC3F, APOBEC3H, APOC4-APOC2, APOL4, APOLD1, APOO, APOOL, APOPT1, APP, APPL1, APTR, APTX, AQP7P1, ARAF, ARAP1, ARAP3, ARC, ARCN1, ARFGAP1, ARFGAP2, ARFGEF3, ARFIP1, ARFIP2, ARFRP1, ARGLU1, ARHGAP1, ARHGAP17, ARHGAP19, ARHGAP20, ARHGAP22, ARHGAP30, ARHGAP5, ARHGEF3, ARHGEF35, ARHGEF39, ARHGEF7, ARID3A, ARID3C, ARID4B, ARIH2, ARIH2OS, ARL1, ARL16, ARL2BP, ARL3, ARL5A, ARL8A, ARL8B, ARMC10, ARMC12, ARMC6, ARMCX1, ARMCX3, ARMCX6, ARNT, ARPC1A, ARPC2, ARPC3, ARPC4, ARPC4-TTLL3, ARPC5, ARPC5L, ARRB1, ARRB2, ARRDC1-AS1, ARSD, ARSE, ARSF, ARSG, ARSH, ARV1, ASAH1, ASB1, ASB14, ASB3, ASB7, ASB8, ASCC2, ASF1B, ASH1L-AS1, ASIC3, ASIP, ASMTL, ASMTL-AS1, ASNA1, ASPRV1, ASPSCR1, ASS1, ASTE1, ATAD1, ATF1, ATF7, ATG101, ATG12, ATG16L1, ATG4A, ATG4B, ATG5, ATL3, ATP11B, ATP1A1-AS1, ATP2A1, ATP5A1, ATP5B, ATP5C1, ATP5F1, ATP5G1, ATP5G2, ATP5J, ATP5J2, ATP5J2-PTCD1, ATP50, ATP5S, ATP5SL, ATP6AP1, ATP6AP1L, ATP6AP2, ATP6V0A1, ATP6V0A2, ATP6V0B, ATP6V0D1, ATP6V0E1, ATP6V0E2, ATP6V1A, ATP6V1C1, ATP6V1D, ATP6V1E2, ATP6V1F, ATP6V1G1, ATP6V1G2-DDX39B, ATP8B2, ATPAF1, ATPAF2, ATRAID, ATXN2L, ATXN3, ATXN7L1, AUP1, AURKAPS1, AVIL, AVL9, AVP, AVPR1A, AXIN1, AXIN2, AZGP1P1, AZI2, AZIN1, AZIN1-AS1, AZIN2, AZU1, B3GALNT1, B3GALNT2, B3GLCT, B3GNT2, B4GALNT3, B4GALT1-AS1, B4GALT2, B4GALT3, B4GALT4, B4GALT7, B9D1, BABAM1, BACE1, BACE1-AS, BACE2, BAG4, BAG6, BAHD1, BAIAP2L2, BAIAP3, BAK1, BANF1, BAP1, BARD1, BATF3, BAX, BAZ2A, BBIP1, BBS12, BBS4, BCAP29, BCAP31, BCAR4, BCCIP, BCDIN3D, BCDIN3D-AS1, BCL10, BCL2L12, BCL2L13, BCL2L2, BCL2L2-PABPN1, BCLAF1, BCO1, BCS1L, BCYRN1, BDH2, BDNF-AS, BEAN1-AS1, BECN1, BEST1, BET1L, BEX1, BEX4, BFAR, BFSP1, BGLAP, BHMT2, BICD2, BID, BIN3, BIRC2, BLOC1S2, BLOC1S5, BLOC1S5-TXNDC5, BLOC1S6, BLVRA, BLVRB, BMI1, BMP8A, BMP8B, BMS1P21, BMS1P4, BMS1P5, BNIP2, BOD1L1, BOLA3, BORA, BPGM, BPHL, BPNT1, BRAP, BRCA1, BRCC3, BRD9, BRE-AS1, BRICD5, BRINP2, BRIX1, BRK1, BROX, BRWD1, BSDC1, BSG, BSPRY, BST2, BTBD1, BTBD10, BTBD16, BTBD6, BTBD7, BTBD8, BTC, BTF3, BTF3L4, BTN2A3P, BUB1B, BUB3, BUD13, BYSL, BZW2, C10orf111, C10orf2, C10orf25, C10orf32, C10orf88, C11orf1, C11orf31, C11orf52, C11orf57, C11orf58, C11orf65, C11orf68, C11orf71, C11orf73, C11orf94, C12orf29, C12orf43, C12orf65, C12orf73, C14orf1, C14orf119, C14orf142, C14orf166, C14orf178, C15orf38-AP3S2, C15orf40, C15orf61, C15orf62, C15orf65, C16orf13, C16orf58, C16orf70, C16orf74, C16orf93, C17orf107, C17orf49, C17orf67, C17orf82, C18orf65, C18orf8, C19orf18, C19orf25, C19orf33, C19orf38, C19orf43, C19orf44, C19orf47, C19orf52, C19orf53, C19orf66, C19orf71, C1D, C1GALT1C1, C1GALT1C1L, C1QB, C1QC, C1QL1, C1QL3, C1QTNF1, C1QTNF1-AS1, C1QTNF4, C1QTNF5, C1QTNF9B-AS1, C1RL, C1orf106, C1orf109, C1orf111, C1orf116, C1orf123, C1orf131, C1orf174, C1orf177, C1orf198, C1orf21, C1orf216, C1orf234, C1orf27, C1orf43, C1orf50, C1orf56, C1orf74, C2-AS1, C20orf196, C21orf33, C21orf58, C22orf23, C22orf29, C22orf39, C2CD4A, C2orf15, C2orf16, C2orf44, C2orf47, C2orf49, C2orf68, C2orf69, C2orf88, C3orf14, C3orf17, C3orf35, C3orf38, C3orf67, C4B, C4B_2, C4orf26, C4orf29, C4orf3, C4orf32, C4orf47, C5AR2, C5orf15, C5orf22, C5orf30, C5orf45, C5orf52, C5orf66, C6orf1, C6orf120, C6orf201, C6orf25, C6orf89, C7orf13, C7orf31, C7orf55, C7orf55-LUC7L2, C7orf60, C7orf61, C7orf73, C8orf33, C8orf44, C8orf48, C8orf76, C8orf89, C9orf114, C9orf116, C9orf117, C9orf152, C9orf153, C9orf156, C9orf24, C9orf40, C9orf43, C9orf57, C9orf69, C9orf78, C9orf9, C9orf92, CA13, CA3, CA3-AS1, CA5BP1, CA9, CAB39, CAB39L, CACFD1, CACNB3, CACTIN, CACUL1, CALCB, CALC00O2, CALM1, CALM3, CALML4, CALML6, CALR, CALU, CAMK1, CAMK1G, CAMK2N1, CAMK2N2, CAMKK2, CAMLG, CAMSAP1, CAMTA1, CAMTA2, CANX, CAP1, CAPN10, CAPN10-AS1, CAPN12, CAPN2, CAPS, CAPZA1, CAPZA2, CARD8-AS1, CARF, CARKD, CARM1, CARNS1, CARS, CARS2, CASC3, CASC4, CASP10, CASP2, CASP7, CASP8AP2, CASS4, CAST, CATIP-AS1, CATSPERG, CBFA2T3, CBFB, CBL, CBLN3, CBS, CBWD1, CBWD2, CBWD6, CBX1, CBX3, CBX8, CCAR1, CCBL2, CCDC103, CCDC110, CCDC115, CCDC121, CCDC13, CCDC130, CCDC134, CCDC150, CCDC152, CCDC157, CCDC158, CCDC159, CCDC163P, CCDC174, CCDC176, CCDC18, CCDC183, CCDC183-AS1, CCDC186, CCDC22, CCDC24, CCDC25, CCDC3, CCDC47, CCDC51, CCDC53, CCDC6, CCDC62, CCDC7, CCDC77, CCDC82, CCDC84, CCDC96, CCDC97, CCHE1, CCK, CCL14, CCL21, CCL3, CCL4, CCL7, CCL8, CCNA2, CCNC, CCND3, CCNDBP1, CCNE2, CCNH, CCNI, CCNK, CCNL1, CCNL2, CCNO, CCNT1, CCNT2, CCNT2-AS1, CCNYL1, CCSER2, CCT4, CCTS, CCT6A, CCT6B, CCT6P1, CCT7, CCT8, CCZ1, CCZ1B, CD151, CD160, CD163, CD164, CD27-AS1, CD274, CD276, CD2AP, CD2BP2, CD300LB, CD302, CD38, CD3D, CD3EAP, CD4, CD47, CD52, CD53, CD59, CD63, CD74, CD79A, CD83, CD9, CD99, CD99L2, CD99P1, CDADC1, CDC123, CDC14A, CDC16, CDC20, CDC25C, CDC27, CDC34, CDC42, CDC42BPB, CDC42BPG, CDC42SE1, CDC45, CDCA2, CDCA4, CDCA5, CDCA8, CDHR3, CDIPT, CDK11A, CDK11B, CDK16, CDK2, CDK3, CDK5R1, CDK7, CDK9, CDKL5, CDKN1B, CDKN1C, CDR2L, CDS2, CDV3, CDYL, CEACAM16, CEACAM6, CEBPB-AS1, CEBPZOS, CECR5, CECR5-AS1, CELF1, CELSR3-AS1, CEMP1, CENPA, CENPBD1P1, CENPJ, CENPK, CENPU, CEP104, CEP135, CEP170, CEP19, CEP44, CEP63, CEP68, CEP70, CEP76, CEP89, CEP95, CEPT1, CERCAM, CERK, CERS2, CERS5, CES1, CES2, CETN2, CETN4P, CFAP126, CFAP221, CFAP36, CFAP53, CFAP57, CFAP69, CFAP70, CFDP1, CFH, CFL1, CFL2, CFLAR, CFLAR-AS1, CGB7, CGREF1, CGRRF1, CHAC2, CHADL, CHCHD4, CHD1L, CHD7, CHD8, CHD9, CHERP, CHFR, CHID1, CHKB, CHM, CHML, CHMP1A, CHMP2A, CHMP2B, CHMP4A, CHMP4B, CHMPS, CHPF, CHPF2, CHPT1, CHRAC1, CHRM3, CHRNA10, CHRNE, CHST1, CHST11, CHST15, CHST7, CHSY1, CHTF8, CHTOP, CHUK, CHURC1, CHURC1-FNTB, CIAO1, CIAPIN1, CIART, CIB1, CIDECP, CINP, CIPC, CIR1, CIRBP-AS1, CISD1, CISD2, CITED1, CKM, CKMT2-AS1, CLASRP, CLCC1, CLCF1, CLCN3, CLCN7, CLDN15, CLDN6, CLDND1, CLEC11A, CLEC3B, CLEC4A, CLIC4, CLINT1, CLIP1-AS1, CLIP4, CLK2P1, CLK3, CLK4, CLMN, CLN3, CLNS, CLN6, CLN8, CLNS1A, CLP1, CLPP, CLPTM1L, CLTB, CLU, CLUH, CLYBL, CMPK1, CMTM1, CMTM4, CMTM6, CMYA5, CNBP, CNEP1R1, CNGA1, CNIH1, CNIH4, CNOT3, CNOT6, CNOT7, CNPPD1, CNPY2, CNPY3, CNPY4, CNST, CNTD2, CNTF, CNTNAP1, COA3, COA5, COASY, COG3, COG4, COG7, COGS, COIL, COL11A2, COL17A1, COL21A1, COL4A3BP, COL6A1, COL6A2, COL9A3, COLCA2, COLEC11, COLGALT1, COMMDS, COMMD7, COMMD8, COMMD9, COMT, COPA, COPB2, COPE, COPG1, COPRS, COPS2, COPS3, COPSS, COPS6, COPS7A, COPS7B, COPSE, COPZ1, COQ2, COQ3, COQ4, COQ6, COQ9, CORO1A, CORO1B, COR07-PAM16, COX10, COX10-AS1, COX11, COX15, COX16, COX18, COX20, COX7A2L, CPD, CPEB2, CPLX1, CPLX4, CPNE1, CPNE3, CPNE7, CPO, CPDX, CPQ, CPSF1, CPSF3L, CPSF6, CPSF7, CPVL, CRABP2, CRAMP1L, CRAT, CRB3, CREB3, CREB3L4, CREBL2, CRELD1, CRELD2, CRHR1-IT1, CRK, CRLF3, CRLS1, CRMP1, CROCCP2, CRSP8P, CRTAP, CRY1, CRYBB2, CRYL1, CRYZ, CRYZL1, CSAD, CSDE1, CSE1L-AS1, CSF2, CSF3, CSGALNACT2, CSK, CSNK1A1, CSNK1A1P1, CSNK1D, CSNK1G2, CSNK1G3, CSNK2A1, CSNK2A2, CSNK2A3, CSNK2B, CSTF3, CTAG2, CTAGE15, CTAGE5, CTAGE8, CTAGE9, CTBP1-AS, CTBS, CTDNEP1, CTDP1, CTDSPL, CTDSPL2, CTNNB1, CTNNBIP1, CTNND1, CTR9, CTRL, CTSA, CTSC, CTSD, CTSO, CTSZ, CTU2, CUL3, CUL4A, CUTA, CWC15, CWF19L1, CXADR, CXCL12, CXCL13, CXCL16, CXCL5, CXCR4, CXXC1, CXorf23, CXorf40B, CXorf56, CYB561, CYB5B, CYB5D2, CYB5R1, CYB5R2, CYB5R4, CYBA, CYBRD1, CYC1, CYCS, CYCSP52, CYFIP1, CYFIP2, CYHR1, CYLD, CYP17A1, CYP20A1, CYP24A1, CYP26A1, CYP26B1, CYP27B1, CYP2A7, CYP2J2, CYP2U1, CYP3A7-CYP3A51P, CYP4A22, CYP7A1, CYSRT1, CYSTM1, CYTH2, DACT3, DAD1, DAGLA, DAGLB, DALRD3, DAP, DAP3, DAPK3, DARS, DARS-AS1, DAXX, DAZAP2, DBF4, DBNDD2, DBNL, DCAF10, DCAF11, DCAF12, DCAF13, DCAF15, DCAF17, DCAF4, DCAF4L1, DCAF5, DCAF7, DCAF8, DCAKD, DCK, DCLRE1C, DCP1A, DCST2, DCTD, DCTN2, DCTN3, DCTN4, DCTN6, DCUN1D3, DCUN1D5, DDA1, DDB1, DDHD2, DDIAS, DDIT4L, DDN, DDOST, DDRGK1, DDTL, DDX1, DDX18, DDX19A, DDX19B, DDX21, DDX24, DDX27, DDX28, DDX31, DDX39A, DDX41, DDX46, DDX47, DDX49, DDX50, DDX51, DDX54, DDX55, DDX6OL, DEAF1, DEAR, DEC1, DECR1, DECR2, DEF8, DEGS1, DEK, DENND1C, DENND6B, DEPDC4, DERA, DERL1, DERL2, DERL3, DESI1, DEXI, DFFA, DFNB59, DGAT1, DGCR11, DGCR2, DGCR5, DGCR6, DGCR8, DGKG, DGKQ, DGKZ, DGUOK, DGUOK-AS1, DHDDS, DHDH, DHPS, DHRS1, DHRS11, DHRS12, DHRS4, DHRS4L1, DHRS7, DHRS7B, DHRSX, DHTKD1, DHX16, DHX34, DHX35, DHX38, DIABLO, DICER1, DICER1-AS1, DIDO01, DIP2A, DIP2A-IT1, DIRAS3, DIS3, DISP2, DKFZP434I0714, DLEU1, DLEU2, DLG3, DLG4, DLST, DLSTP1, DMAP1, DMTF1, DMWD, DNA2, DNAAF3, DNAH11, DNAJA3, DNAJA4, DNAJB11, DNAJB14, DNAJB2, DNAJB5-AS1, DNAJC1, DNAJC10, DNAJC13, DNAJC15, DNAJC18, DNAJC19, DNAJC2, DNAJC21, DNAJC24, DNAJC27, DNAJC3-AS1, DNAJC4, DNAJC5, DNAJC6, DNAJC7, DNAJC8, DNAJC9, DNASE1, DNASE1L3, DNASE2, DND1, DNMBP-AS1, DNMT3B, DNMT3L, DNPEP, DNTTIP1, DOC2GP, DOCK9-AS2, DOK1, DOK4, DOT1L, DPAGT1, DPF2, DPH3, DPH6-AS1, DPH7, DPM1, DPP7, DPP8, DPP9-AS1, DPY19L1P1, DPY19L3, DPY19L4, DPYSL4, DR1, DRAM2, DRC1, DRD3, DRD4, DRG2, DSC3, DSCR3, DSG1, DSG2, DSP, DSTNP2, DTD2, DTL, DTX2P1-UPK3BP1-PMS2P11, DTX3, DUS1L, DUS4L, DUSP13, DUSP2, DUSP22, DUSP28, DUSP3, DUSP9, DVL3, DXO, DYDC2, DYNC1I1, DYNC1I2, DYNC1LI2, DYNLRB1, DYNLT3, DYRK2, DZANK1, E2F1, E2F3, E2F4, E2F7, E4F1, EAPP, EBF4, EBI3, EBLN2, EBLN3, EBNA1BP2, ECHDC1, ECHS1, ECI2, ECM1, ECSIT, EDC3, EDEM2, EEF1A1, EEF1B2, EEF1E1, EEF1E1-BLOC1S5, EEF1G, EEF2, EEF2KMT, EFCAB12, EFCAB13, EFCAB14, EFCAB2, EFEMP2, EFHD2, EFNA3, EFNB2, EFR3A, EGFL7, EGFL8, EGFR-AS1, EGLN2, EGR2, EI24, EID1, EID2, EID3, EIF1AX, EIF1AX-AS1, EIF2A, EIF2AK1, EIF2AK3, EIF2B1, EIF2B2, EIF2D, EIF2S1, EIF2S3, EIF3A, EIF3B, EIF3D, EIF3E, EIF3F, EIF3G, EIF3H, EIF3I, EIF3J, EIF3K, EIF3L, EIF3M, EIF4E, EIF4E2, EIF4E3, EIF4EBP2, EIF4EBP3, EIF4ENIF1, EIF4G2, EIF5A, EIF5A2, EIF5AL1, EIF6, ELAC1, ELAVL1, ELF4, ELK4, ELL3, ELMO2, ELMOD3, ELOVL2-AS1, ELOVL3, ELOVL5, ELOVL7, ELP2, ELP5, EMC10, EMC3, EMC3-AS1, EMC4, EMC6, EMC7, EMC8, EMC9, EMD, EML1, EML2, EML5, EML6, EMP1, ENDOV, ENG, ENKD1, ENO1-AS1, ENO4, ENOPH1, ENOSF1, ENPP7, ENSA, ENTPD1, ENTPD2, ENTPD3-AS1, ENTPD6, ENY2, EOGT, EP400, EPB41L4B, EPDR1, EPHA1, EPHA4, EPHB2, EPHX3, EPM2A, EPN1, EPO, EPRS, EPS15, EPS8L2, EPT1, ERAP1, ERAP2, ERCC1, ERCC8, ERGIC2, ERGIC3, ERH, ERI1, ERI3-IT1, ERICH3, ERICH6-AS1, ERLEC1, ERLIN1, ERLIN2, ERMARD, ERO1A, ERP44, ERVK13-1, ESAM, ESD, ESF1, ESYT1, ESYT2, ETFA, ETNK1, ETS2, ETV2, EVPLL, EXOC3, EX005, EXOC8, EXOSC1, EXOSC7, EXT2, EYA3, EZR, F10, F11R, F8, FAAH, FAAP100, FABP12, FABP4, FADS6, FAF2, FAH, FAHD1, FAHD2A, FAIM, FAM103A1, FAM107B, FAM111B, FAM118B, FAM120A, FAM120AOS, FAM120C, FAM122B, FAM122C, FAM126B, FAM127A, FAM127B, FAM127C, FAM129A, FAM131A, FAM131B, FAM132A, FAM134A, FAM134C, FAM136A, FAM13A-AS1, FAM149A, FAM149B1, FAM150B, FAM151B, FAM155B, FAM160A1, FAM160B1, FAM161A, FAM161B, FAM166B, FAM169B, FAM171B, FAM173B, FAM174B, FAM175B, FAM177A1, FAM179A, FAM183A, FAM189A2, FAM192A, FAM193B, FAM196A, FAM200A, FAM200B, FAM204A, FAM206A, FAM209A, FAM209B, FAM20A, FAM210A, FAM210B, FAM213A, FAM216A, FAM217B, FAM220A, FAM222A-AS1, FAM227B, FAM228B, FAM229B, FAM231D, FAM32A, FAM35A, FAM3A, FAM3C, FAM43B, FAM46C, FAM47E, FAM47E-STBD1, FAM49B, FAM50B, FAM53B, FAM58A, FAM60A, FAM63B, FAM69A, FAM71A, FAM71E1, FAM76B, FAM83A-AS1, FAM83C, FAM83C-AS1, FAM83F, FAM84A, FAM86DP, FAM86FP, FAM86HP, FAM89A, FAM91A1, FAM96A, FAM98C, FANCA, FANCE, FANCG, FANCI, FANCM, FARP2, FAS, FASLG, FASTK, FASTKD3, FBLL1, FBLN7, FBN1, FBP1, FBXL12, FBXL21, FBXL4, FBXL8, FBXO10, FBXO22, FBXO22-AS1, FBXO27, FBXO28, FBXO3, FBXO31, FBXO45, FBXO46, FBXO48, FBXO5, FBXO7, FBXO8, FBXO9, FBXW2, FBXW4, FBXW4P1, FBXW5, FBXW7, FBXW9, FCF1, FCHO2, FCRL6, FCRLA, FDX1, FDX1L, FECH, FEM1A, FEM1B, FEM1C, FEN1, FER1L4, FERMT3, FES, FETUB, FEZ1, FEZ2, FGD5, FGD5-AS1, FGF11, FGF19, FGFBP3, FGFR1, FGFR1OP, FGFR10P2, FGGY, FGR, FH, FHDC1, FHL1, FIBIN, FIBP, FIGNL2, FITM1, FKBP11, FKBP1A, FKBP1B, FKBP3, FKBP7, FKBP8, FKBP9, FLII, FLJ10038, FLJ21408, FLJ22763, FLJ37453, FLOT1, FLOT2, FLRT2, FLVCR1, FLVCR1-AS1, FMO3, FN3KRP, FNDC4, FNTA, FNTB, FOCAD-AS1, FOLR3, FOPNL, FOXA2, FOXC1, FOXE3, FOXJ2, FOXJ3, FOXK1, FOXN3-AS1, FOXP4-AS1, FOXO1, FOXRED1, FPGS, FRMD3, FRMD6-AS1, FRS3, FRZB, FSBP, FSD1L, FSD2, FSIP1, FSTL4, FTH1P3, FTL, FTSJ2, FUBP3, FUCA2, FUNDC2, FUS, FUT1, FUT10, FUT2, FUT6, FUZ, FYB, FYTTD1, FZD1, FZD4, FZD5, FZD7, FZR1, G3BP2, GM, GABARAP, GABARAPL2, GABPB2, GABRR2, GAD1, GAK, GALE, GALNS, GALNT1, GALNT11, GALNT7, GALR2, GAN, GAPDHS, GAR1, GAS2L3, GAS5-AS1, GAS6, GAST, GATA3, GATAD1, GATAD2B, GATC, GATSL2, GBA2, GBAP1, GBP5, GCAT, GCDH, GCM1, GCSAM, GDAP1, GDE1, GDF9, GDI1, GDI2, GDPD3, GDPGP1, GEMIN8, GEMIN8P4, GFM1, GFM2, GFPT2, GGA1, GGACT, GGCT, GGH, GGNBP2, GHDC, GHITM, GHRLOS, GID4, GID8, GIGYF1, GIGYF2, GIN1, GINM1, GINS4, GJA9-MYCBP, GJC1, GJC3, GJD3, GK5, GLB1, GLE1, GLI1, GLI4, GLIDR, GLIS2, GLIS2-AS1, GLMP, GLO1, GLOD4, GLOD5, GLRX2, GLRX3, GLRX5, GLT8D1, GLT8D2, GLTSCR2, GLUD1, GLUD1P3, GLUD1P7, GLYR1, GM2A, GMEB2, GMFB, GMFG, GMPPA, GMPR2, GNA11, GNA13, GNAI2, GNAI3, GNAL, GNAS, GNAZ, GNB2, GNB2L1, GNB5, GNG10, GNG12-AS1, GNG5, GNG8, GNL1, GNL2, GNLY, GNPAT, GNPTG, GNRH1, GNS, GOLGA2, GOLGA2P10, GOLGA3, GOLGA4, GOLGA5, GOLGA7, GOLGA7B, GOLGA8B, GOLM1, GOLT1B, GORASP1, GOSR2, GOT1, GP5, GPAA1, GPANK1, GPATCH2L, GPATCH4, GPATCH8, GPBAR1, GPBP1L1, GPC3, GPC6-AS1, GPLD1, GPN1, GPN2, GPN3, GPR107, GPR108, GPR137, GPR146, GPR160, GPR161, GPR17, GPR183, GPR35, GPR37, GPR37L1, GPR75, GPR75-ASB3, GPR87, GPR89A, GPRASP1, GPRASP2, GPS1, GPS2, GPX3, GPX4, GRB2, GREM1, GREM2, GRHPR, GRINA, GRK4, GRK6, GRM8, GRN, GRPEL2, GRPR, GRSF1, GRTP1-AS1, GS1-124K5.11, GS1-259H13.2, GSDMD, GSE1, GSKIP, GSN, GSPT1, GSS, GSTA5, GSTA7P, GSTCD, GSTK1, GSTM1, GSTO1, GSTZ1, GSX2, GTF2A2, GTF2F1, GTF2H1, GTF2H3, GTF2H4, GTF2H5, GTF2IP20, GTF3A, GTF3C4, GTF3C6, GTPBP1, GTPBP4, GTPBP6, GTSE1, GUCA2A, GUCD1, GUF1, GUSBP1, GYS2, GZMM, H2AFY, H3F3AP4, HMO, HABP4, HACD3, HADH, HADHA, HADHB, HAGH, HAMP, HAPLN3, HAT1, HAUS2, HAUS6, HAVCR2, HBA1, HBA2, HBS1L, HCAR3, HCCS, HCG17, HCG25, HCG26, HCG27, HCG4, HCG4B, HCG9, HCN4, HOST, HDAC10, HDAC11, HDAC3, HDAC6, HDDC3, HDGF, HDHD2, HDLBP, HEBP1, HEBP2, HECTD3, HELB, HELQ, HERC2P10, HERC2P3, HERC2P9, HERC4, HESS, HESX1, HEXA, HEXB, HEY1, HEY2, HFE2, HGFAC, HGH1, HGS, HGSNAT, HHATL, HHLA3, HIATL1, HIATL2, HIBADH, HIBCH, HIC1, HIF1A-AS2, HINFP, HINT3, HIPK1, HIPK1-AS1, HIPK3, HIRA, HIST1H1A, HIST1H1T, HIST1H2AB, HIST1H2AD, HIST1H2AG, HIST1H2AH, HIST1H2A1, HIST1H2AK, HIST1H2AL, HIST1H2AM, HIST1H2BE, HIST1H2BF, HIST1H2BO, HIST1H3A, HIST1H3B, HIST1H3J, HIST1H4B, HIST1H4C, HIST1H4D, HIST2H2AC, HIST2H2BC, HIST2H2BF, HK1, HKR1, HLA-A, HLA-DMB, HLA-DOB, HLA-DPA1, HLA-DPB1, HLA-DPB2, HLA-DRB1, HLA-F-AS1, HLA-H, HLCS, HM13, HM13-AS1, HMBOX1, HMG20B, HMGB1, HMGB3, HMGCL, HMGN1, HMGN2, HMGN2P46, HMGN3-AS1, HMHA1, HMMR, HMP19, HN1L, HNF4A-AS1, HNRNPAO, HNRNPA3, HNRNPC, HNRNPF, HNRNPH1, HNRNPH2, HNRNPK, HNRNPUL1, HNRNPUL2-BSCL2, HOMER2, HOOK1, HORMAD2-AS1, HP1BP3, HPDL, HPN-AS1, HPRT1, HPS1, HPS3, HRASLS2, HS1BP3, HS3ST2, HS3ST6, HSBP1, HSBP1L1, HSCB, HSD11B1L, HSD17B1, HSD17B11, HSD17B12, HSD17B4, HSD17B8, HSDL1, HSF1, HSPA12A, HSPA1L, HSPA2, HSPA7, HSPA9, HSPB11, HSPBP1, HTATIP2, HTATSF1, HTATSF1P2, HTR7P1, HTRA2, HUNK, HUS1, HYKK, HYPK, IAH1, IAPP, IARS, IARS2, IBA57, IBTK, ICAM2, ICAM3, ICAM4, ICAM5, ICE1, ICT1, ID2-AS1, IDE, IDH3B, IDH3G, ID12, ID01, ID02, IDS, IER3IP1, IFF01, IFI44L, IFIT5, IFITM10, IFITM3, IFITM4P, IFNAR1, IFNGR1, IFNLR1, IFT22, IFT43, IFT52, IFT57, IFT74-AS1, IGBP1, IGBP1P1, IGDCC4, IGF2BP3, IGFBPL1, IGFL1, IGHMBP2, IGSF8, IHH, IK, IKBKB, IKZF3, IKZF4, IKZF5, IL1ORB, IL10RB-AS1, IL12A, IL13RA1, IL17C, IL17RC, IL18BP, IL1B, IL1RL2, IL22RA1, IL27, IL3RA, IL6, IL6ST, IL7R, ILF2, ILF3-AS1, ILK, ILKAP, ILVBL, IMMP1L, IMMT, IMP4, IMPA1, IMPA2, IMPACT, IMPAD1, INCA1, INE1, ING5, INMT, INO80B-WBP1, INO80D, INO80E, INPP5D, INPP5E, INPP5F, INPP5K, INSL5, INTS1, INTS10, INTS12, INTS9, INTU, IP6K2,1PMK, IPO5, IPO7, IPO9, IPPK, IQCC, IQCG, IQCH-AS1, IQGAP1, IRAK1, IRF2BP2, IRF4, IRGQ, IRX3, ISG20L2, ISOC1, ISPD, ISY1, ISY1-RAB43, ITCH, ITFG1, ITFG2, ITFG3, ITGA9, ITGA9-AS1, ITGAE, ITGAL, ITGB1BP1, ITGB1BP2, ITGB2, ITGB3BP, ITIH4-AS1, ITLN2, ITM2B, ITSN2, IVD, JAG2, JAGN1, JKAMP, JMJD7, JMJD7-PLA2G4B, JMJD8, JPH1, JRK, JSRP1, JTB, JUN, KANK3, KANSL1-AS1, KARS, KAT8, KATNA1, KATNB1, KBTBD11-OT1, KBTBD2, KBTBD3, KBTBD4, KCCAT198, KCCAT333, KCNC4, KCND1, KCND2, KCNE2, KCNE5, KCNIP2, KCNIP2-AS1, KCNIP3, KCNJ11, KCNJ14, KCNK5, KCNMB2-AS1, KCNMB3, KCP, KCTD18, KCTD2, KCTD21, KCTD21-AS1, KCTD3, KCTD9, KDELC1, KDELR1, KDELR2, KDELR3, KDM1B, KDM3B, KDM4A-AS1, KDM5A, KDM6B, KDSR, KHDRBS1, KHSRP, KIAA0141, KIAA0195, KIAA0226, KIAA0319L, KIAA0355, KIAA0368, KIAA0430, KIAA0753, KIAA0754, KIAA0930, KIAA1191, KIAA1217, KIAA1324, KIAA1429, KIAA1462, KIAA1522, KIAA1524, KIAA1683, KIAA1715, KIAA2013, KIAA2018, KIAA2026, KIDINS220, KIF23, KIF2A, KIF3C, KIF9, KIF9-AS1, KIFAP3, KIFC1, KIN, KIRREL, KITLG, KL, KLB, KLC1, KLC2, KLC3, KLC4, KLF11, KLF13, KLF3, KLHDC3, KLHL17, KLHL18, KLHL20, KLHL31, KLHL4, KLLN, KLRAP1, KLRG1, KMT2A, KMT2B, KMT2E, KPNA1, KPNA4, KPNAS, KPNA6, KRAS, KRBOX1, KRBOX4, KRI1, KRR1, KRT10, KRT17, KRTAP2-3, KRTAP21-2, KRTAPS-8, KRTAP9-7, KRTCAP2, KRTCAP3, KTN1, KTN1-AS1, KXD1, L2HGDH, L3MBTL1, LACTB2, LAG3, LAGE3, LAMA4, LAMA5-AS1, LAMB2P1, LAMP1, LAMP2, LAMP3, LAMTOR1, LAMTOR2, LAMTOR3, LAMTORS, LAMTORS-AS1, LAP3, LAPTM4A, LAPTM4B, LARP1, LARP1B, LARP4, LARP4B, LARS, LAT, LAT2, LBR, LCE3D, LCMT1-AS1, LCN15, LCOR, LDAH, LEFTY1, LEMD2, LENG1, LENG9, LEPROT, LEPROTL1, LETM2, LETMD1, LFNG, LGALS3BP, LGALS8-AS1, LGALS9C, LGMN, LGR5, LHFP, LHFPL3-AS2, LHPP, LIAS, LIFR, LIG1, LIG4, LIMD1, LIMD1-AS1, LIN37, LIN52, LIN9, LINC00106, LINC00115, LINC00159, LINC00189, LINC00235, LINC00240, LINC00242, LINC00260, LINC00294, LINC00311, LINC00324, LINC00365, LINC00476, LINC00528, LINC00571, LINC00574, LINC00589, LINC00595, LINC00597, LINC00605, LINC00607, LINC00623, LINC00628, LINC00659, LINC00662, LINC00667, LINC00672, LINC00674, LINC00685, LINC00702, LINC00847, LINC00852, LINC00856, LINC00869, LINC00881, LINC00883, LINC00886, LINC00909, LINC00910, LINC00920, LINC00960, LINC00963, LINC00987, LINC00997, LINC00998, LINC00999, LINC01006, LINC01011, LINC01057, LINC01061, LINC01063, LINC01094, LINC01126, LINC01127, LINC01138, LINC01140, LINC01164, LINC01184, LINC01186, LINC01229, LINC01237, LINC01239, LINC01269, LINC01278, LINC01358, LINC01420, LINC01426, LINC01428, LINC01430, LINC01431, LINC01433, LINC01435, LINC01447, LINC01465, LINC01481, LINC01510, LINC01512, LINC01515, LINC01545, LINC01558, LINC01559, LINC01560, LINC01569, LINC01589, LINC01599, LINCR-0001, LINCR-0002, LINS, LIPA, LIPT2, LITAF, LIX1L, LLGL1, LLPH, LLPH-AS1, LMAN2, LMAN2L, LMBR1L, LMBRD1, LMF1, LMNA, LNP1, LNX2, LOC100049716, LOC100126784, LOC100128288, LOC100128398, LOC100128494, LOC100128531, LOC100129034, LOC100129046, LOC100129148, LOC100129216, LOC100129461, LOC100129550, LOC100129917, LOC100130075, LOC100130093, LOC100130331, LOC100130357, LOC100130705, LOC100130987, LOC100131655, LOC100132356, LOC100133091, LOC100233156, LOC100270804, LOC100272217, LOC100286922, LOC100287015, LOC100287036, LOC100288123, LOC100288778, LOC100288842, LOC100288846, LOC100289230, LOC100289361, LOC100289511, LOC100289561, LOC100379224, LOC100505530, LOC100505549, LOC100505666, LOC100505938, LOC100505984, LOC100506082, LOC100506100, LOC100506125, LOC100506142, LOC100506178, LOC100506314, LOC100506606, LOC100506639, LOC100506730, LOC100506804, LOC100506985, LOC100507195, LOC100507291, LOC100507424, LOC100507472, LOC100507557, LOC100507634, LOC100507639, LOC100507642, LOC100630923, LOC100652768, LOC100996447, LOC100996579, LOC101060091, LOC101559451, LOC101926933, LOC101927018, LOC101927027, LOC101927056, LOC101927100, LOC101927151, LOC101927178, LOC101927204, LOC101927269, LOC101927322, LOC101927354, LOC101927365, LOC101927418, LOC101927501, LOC101927765, LOC101927780, LOC101927851, LOC101927854, LOC101927972, LOC101928020, LOC101928069, LOC101928323, LOC101928402, LOC101928445, LOC101928525, LOC101928530, LOC101928791, LOC101928794, LOC101928837, LOC101928885, LOC101929066, LOC101929089, LOC101929128, LOC101929229, LOC101929231, LOC101929372, LOC101929448, LOC101929516, LOC101929524, LOC101929541, LOC101929574, LOC101929626, LOC101929633, LOC101929709, LOC101929718, LOC101929767, LOC101929771, LOC101929829, LOC101930071, LOC102031319, LOC102546298, LOC102723354, LOC102723385, LOC102723703, LOC102723729, LOC102723809, LOC102723927, LOC102724009, LOC102724050, LOC102724084, LOC102724094, LOC102724153, LOC102724312, LOC102724484, LOC102724539, LOC102724552, LOC102724589, LOC102724601, LOC102724691, LOC102724784, LOC102724874, LOC102724919, LOC103611081, LOC104968399, LOC105372795, LOC105373383, LOC105377348, LOC105747689, LOC145783, LOC148413, LOC150776, LOC152225, LOC220729, LOC257396, LOC283335, LOC283788, LOC283922, LOC284009, LOC284344, LOC285074, LOC286059, LOC286437, LOC341056, LOC388282, LOC389641, LOC389906, LOC400927, LOC400927-CSNK1E, LOC400958, LOC401127, LOC401320, LOC440434, LOC553103, LOC554206, LOC642361, LOC642846, LOC642852, LOC643072, LOC643355, LOC643387, LOC644172, LOC644762, LOC645513, LOC646214, LOC646471, LOC646626, LOC646903, LOC648987, LOC652276, LOC653653, LOC653712, LOC654342, LOC727751, LOC727896, LOC728024, LOC728323, LOC728613, LOC728739, LOC728743, LOC728752, LOC729218, LOC729603, LOC729739, LOC729867, LOC729970, LOC730183, LOC81691, LOC93622, LONP1, LONP2, LONRF3, LOX, LOXL2, LPAR2, LPAR6, LPGAT1, LPP-AS2, LRFN4, LRIF1, LRIT3, LRP12, LRP5L, LRP8, LRPPRC, LRRC1, LRRC14, LRRC15, LRRC24, LRRC25, LRRC29, LRRC3, LRRC32, LRRC37A3, LRRC37B, LRRC37BP1, LRRC3C, LRRC41, LRRC42, LRRC47, LRRC49, LRRC56, LRRC59, LRRC69, LRRC8C, LRRCC1, LRRFIP1, LRRFIP2, LRRK2, LRTOMT, LRWD1, LSG1, LSM1, LSM11, LSM12, LSM14A, LSM14B, LSM4, LSM5, LSM7, LSP1, LTA, LTA4H, LTB4R, LTB4R2, LTBP3, LTBR, LURAP1L-AS1, LUZP1, LUZP6, LY6G5C, LY6G6D, LY6G6F, LY75-CD302, LYL1, LYPLA1, LYPLA2P2, LYRM1, LYRM2, LYRM5, LYRM7, LYSMD1, MAB2IL2, MAD2L1, MAD2L1BP, MAD2L2, MADD, MAEA, MAFA, MAFG-AS1, MAFIP, MAGED2, MAGEE1, MAGI2-AS3, MAGOH2P, MAGOHB, MAGT1, MAK16, MAN1A2, MAN1B1, MAN2B2, MANBA, MANEA-AS1, MAP1S, MAP2K1, MAP2K2, MAP2K4P1, MAP2K6, MAP3K1, MAP3K13, MAP3K14-AS1, MAP3K7, MAP4K5, MAP6D1, MAP7D2, MAPK1, MAPK13, MAPK3, MAPK4, MAPK8, MAPK8IP1, MAPK8IP2, MAPK9, MAPKAPK2, MAPKAPK3, MAPKAPK5, MAPKBP1, MAPRE2, MARC2, MARCH1, MARCH3, MARCH5, MARCH7, MARK2, MARK3, MARK4, MARS, MARVELD2, MAST4, MATN1-AS1, MATN4, MATR3, MAU2, MAX, MAZ, MB21D1, MBD1, MBD2, MBIP, MBOAT7, MBTPS1, MC1R, MC5R, MCAT, MCEE, MCFD2, MCL1, MCM10, MCM3AP-AS1, MCM4, MCM8, MCOLN1, MCTS1, MCTS2P, MCUR1, MDC1, MDR, MDGA1, MDH1, MDH2, MDM4, MDP1, ME1, MEA1, MEAF6, MECR, MED14OS, MED15, MED16, MED18, MED20, MED22, MED28, MED29, MED31, MED4, MED4-AS1, MED7, MED9, MEF2B, MEF2BNB, MEF2BNB-MEF2B, MEGF8, MESDC2, MEST, METAP1, METAP2, METRNL, METTL10, METTL12, METTL16, METTL17, METTL21A, METTL21B, METTL22, METTL2A, METTL2B, MEX3B, MFAP3, MFF, MFI2-AS1, MFN1, MFN2, MFNG, MFSD1, MFSD11, MFSD12, MFSD8, MFSD9, MGAM2, MGARP, MGAT4B, MGC16142, MGC16275, MGC70870, MGC72080, MGEA5, MGRN1, MGST2, MGST3, MIA, MIA-RAB4B, MIATNB, MICALCL, MICU2, MIDI IP1-AS1, MIEF2, MIEN1, MIER1, MIF-AS1, MIF4GD, MINOS1-NBL1, MINPP1, MIPEP, MIPOL1, MIS18A, MITD1, MKKS, MKLN1-AS, MKNK1, MKRN1, MKX, MLK7-AS1, MLLT1, MLLT10P1, MLLT4, MLST8, MLXIP, MLYCD, MMACHC, MMGT1, MMP1, MMP11, MMP19, MMP24-AS1, MMP25, MMP9, MMS19, MNT, MOAP1, MOB1A, MOB2, MOB3C, MOB4, M0CS2, M0CS3, MOGAT1, MON1B, MORC2, MORC2-AS1, MORN1, MORN2, MOSPD2, MOSPD3, MPC1, MPC1L, MPC2, MPDU1, MPHOSPH8, MPHOSPH9, MPLKIP, MPND, MPP1, MPP3, MPPE1, MPV17, MPV17L2, MPZL1, MPZL3, MRAP, MRE11A, MREG, MRFAP1, MRGBP, MROH2A, MROH8, MRPL1, MRPL10, MRPL13, MRPL18, MRPL19, MRPL21, MRPL24, MRPL28, MRPL30, MRPL32, MRPL34, MRPL35, MRPL37, MRPL38, MRPL39, MRPL4, MRPL40, MRPL42, MRPL42P5, MRPL43, MRPL44, MRPL45, MRPL45P2, MRPL46, MRPL47, MRPL48, MRPL49, MRPL50, MRPL54, MRPL55, MRPL57, MRPS10, MRPS11, MRPS14, MRPS15, MRPS16, MRPS17, MRPS18A, MRPS21, MRPS22, MRPS25, MRPS27, MRPS33, MRPS35, MRPS36, MRPS5, MRPS7, MRPS9, MRS2, MSANTD1, MSANTD2, MSANTD3-TMEFF1, MSANTD4, MSC-AS1, MSH4, MSL1, MSL3, MSMP, MSRB2, MSS51, MT1IP, MT4, MTA1, MTAP, MTBP, MTCH1, MTCH2, MTDH, MTERF4, MTF2, MTFMT, MTFP1, MTFR1, MTFR1L, MTG1, MTG2, MTHFD2, MTHFD2L, MTIF3, MTMR14, MTMR3, MTMR7, MTMR9, MTRF1L, MTRNR2L2, MTX1, MUC13, MUL1, MURC, MUSTN1, MVB12A, MVP, MXD3, MXRA7, MYBL1, MYL12B, MYL6B, MYLIP, MYLK-AS1, MYLPF, MYO10, MYO19, MYO1C, MYO6, MYO9B, MYSM1, MZF1, MZF1-AS1, MZT1, N4BP1, N4BP2L2, N4BP2L2-IT2, N6AMT2, NAA20, NAA25, NAA35, NAA50, NAAA, NAB1, NAB2, NABP2, NACA, NADK, NADK2, NAF1, NAGA, NAGLU, NAGPA, NANOS1, NANP, NANS, NAP1L1, NAP1L4, NAPA, NAPA-AS1, NAPB, NAPG, NAPRT, NARFL, NARS, NAT6, NAT8B, NAT9, NAV2-AS4, NAV3, NBL1, NBPF10, NBPF12, NBPF15, NBPF18P, NBPF25P, NBPF3, NBPF8, NBPF9, NCAPG2, NCAPH, NCBP2, NCCRP1, NCK1-AS1, NCKAP1, NCL, NCLN, NCOA4, NCOR1, NCSTN, NDFIP1, NDFIP2, NDNL2, NDOR1, NDRG2, NDUFA10, NDUFA12, NDUFA4L2, NDUFA5, NDUFA6, NDUFA7, NDUFA9, NDUFAF1, NDUFAF2, NDUFAF3, NDUFAF5, NDUFAF6, NDUFAF7, NDUFB2-AS1, NDUFB4, NDUFB5, NDUFB9, NDUFC1, NDUFS2, NDUFV1, NDUFV2-AS1, NDUFV3, NEB, NECAB2, NECAP2, NEDD8-MDP1, NEFL, NEK11, NEK4, NEK9, NELFA, NELFB, NELFE, NEMF, NEMP2, NETO2, NEURL1B, NEURL2, NEXN-AS1, NFATC2IP, NFE2L2, NFE2L3, NFKBIB, NFKBID, NFKBIL1, NFS1, NFX1, NFXL1, NFYC, NFYC-AS1, NGDN, NGRN, NHEJ1, NHLH2, NHLRC2, NIFK, NIFK-AS1, NINJ1, NIP7, NIPA1, NIPA2, NIPSNAP3A, NISCH, NIT1, NIT2, NKAIN1, NKD1, NKIRAS1, NKIRAS2, NKRF, NKTR, NLN, NMD3, NME1-NME2, NME2, NME4, NMNAT1, NMNAT3, NMRAL1, NMT1, NMT2, NNAT, NNT, NOA1, NOC4L, NODAL, NOM1, NOMO1, NOMO3, NOP58, NOS2, NOTCH2NL, NOTCH3, NOTUM, NOV, NOXO1, NPB, NPBWR1, NPC2, NPEPL1, NPEPPS, NPHP3, NPIPB15, NPIPB3, NPL, NPLOC4, NPPA, NPPA-AS1, NPPC, NPR1, NPR3, NPRL2, NPTN, NPTN-IT1, NPTX1, NPTXR, NQO2, NR1D2, NR1H2, NR1I3, NR2C2, NR2C2AP, NR4A2, NR4A3, NRAP, NRAS, NRBF2, NRCAM, NRD1, NRG4, NRIP1, NRIR, NRN1L, NSA2, NSDHL, NSF, NSFL1C, NSL1, NSMF, NSRP1, NSUN3, NSUN5, NSUN5P1, NSUN5P2, NT5C, NT5C2, NT5C3B, NT5DC1, NT5DC2, NT5M, NTAN1, NTF3, NTPCR, NUAK1, NUB1, NUBP2, NUCB1, NUDCD1, NUDCD2, NUDCD3, NUDT13, NUDT15, NUDT16L1, NUDT16P1, NUDT17, NUDT21, NUDT4P1, NUDT5, NUDT6, NUDT9, NUFIP1, NUP50, NUP54, NUP62, NUP85, NUPL1, NUS1, NUTF2, NUTM2A-AS1, NVL, NXN, NXT2, OARD1, OAZ1, OAZ2, OAZ3, OBFC1, OCEL1, OCIAD1, OCLM, OCLN, ODF2, OFD1, OGFOD1, OGFOD2, OGFOD3, OGFR, OGFR-AS1, OGFRP1, OGT, OIP5, OIT3, OMP, ONECUT2, OOEP, OOSP1, OPLAH, OPN3, OPTN, OR2A7, OR2B6, OR5AU1, ORAI3, ORAOV1, ORC6, ORMDL1, ORMDL2, ORMDL3, 0S9, OSBPL2, OSGEP, OSGIN2, OSR1, OSTC, OSTCP1, OSTF1, OSTM1, OTP, OTUB1, OTUD4, OTUD5, OTUD6B, OTUD7B, OTULIN, OVOL1, OXA1L, OXR1, OXSM, P2RX5, P2RX6P, P2RY6, P3H2, P3H4, P4HA2-AS1, P4HA3, P4HB, P4HTM, PABPC1, PABPC3, PABPC4, PABPN1, PACS2, PADI1, PAFAH1B2, PAFAH2, PAGR1, PAICS, PAIP1, PAK1, PAK2, PAK3, PAK4, PAK6, PALB2, PAM16, PAN3-AS1, PANDAR, PANK1, PANK4, PANO1, PANX1, PAPD4, PAPOLA, PAQR5, PAQR9-AS1, PARD6G, PARD6G-AS1, PARG, PARGP1, PARK2, PARK7, PARL, PARP1, PARP14, PARP15, PARP6, PARPBP, PARS2, PARVA, PARVB, PASK, PATL1, PATL2, PAX8-AS1, PAXBP1, PAXBP1-AS1, PCAT2, PCAT6, PCAT7, PCBD1, PCBD2, PCBP1, PCBP2, PCBP2-OT1, PCCB, PCDH20, PCDH9-A52, PCDHA1, PCDHAC1, PCDHAC2, PCDHGA10, PCDHGB4, PCDHGB5, PCDHGB6, PCED1A, PCED1B, PCGF1, PCGF5, PCGF6, PCID2, PCMT1, PCNA-AS1, PCNP, PCNXL4, PCP2, PCSK4, PCTP, PCYOX1, PCYOX1L, PDAP1, PDCD2, PDCD4-AS1, PDCD6, PDCD6IP, PDCD7, PDCL3, PDCL3P4, PDDC1, PDE1B, PDE2A, PDE4B, PDE4C, PDE4DIP, PDE8A, PDF, PDGFRL, PDHA1, PDHB, PDHX, PDIA3P1, PDLIM3, PDPK1, PDXDC1, PDZD11, PEA15, PEAR1, PECR, PEF1, PEG3, PELI2, PER2, PERM1, PERP, PEX10, PEX11B, PEX11G, PEX13, PEX16, PEX19, PEX2, PEX26, PEX3, PEX5, PEX6, PEX7, PFN2, PGAM1, PGAM2, PGAP3, PGF, PGGT1B, PGLS, PGM3, PGPEP1, PGS1, PHB, PHB2, PHF11, PHF20, PHF5A, PHF7, PHKA1, PHKG1, PHKG2, PHLDA3, PHLDB3, PHOSPHO2, PHOSPHO2-KLHL23, PHYHIP, PHYKPL, PI3, PI4K2B, PI4KAP2, PI4 KB, PIAS1, PIAS3, PIAS4, PIGBOS1, PIGF, PIGG, PIGH, PIGK, PIGL, PIGO, PIGP, PIGQ, PIGT, PIGV, PIGW, PIGX, PIH1D1, PIH1D2, PIK3CD-AS2, PIK3IP1-AS1, PIN1, PIN4P1, PINK1-AS, PINX1, PIP4K2B, PIP4K2C, PIP5KL1, PIPSL, PIR-FIGF, PTSD, PITPNA, PITPNA-AS1, PITPNB, PITRM1-AS1, PIWIL2, PKD1P6, PKD2L1, PLA2G16, PLAU, PLAUR, PLBD1, PLBD1-AS1, PLCD4, PLCE1, PLCL2, PLCXD2, PLD3, PLEKHA1, PLEKHA6, PLEKHA8, PLEKHA8P1, PLEKHF2, PLEKHG3, PLEKHG4, PLEKHM2, PLGLA, PLGRKT, PLK1, PLOD3, PLP2, PLS3-AS1, PLVAP, PLXNB2, PLXNB3, PLXNC1, PM20D2, PMAIP1, PMF1, PMF1-BGLAP, PMM2, PMP22, PMPCA, PMPCB, PMS2CL, PMS2P1, PMS2P2, PMS2P3, PMS2P4, PNISR, PNKD, PNKP, PNLDC1, PNMA6A, PNN, PN01, PNPLA4, PNPLA6, PNPLA8, PNPO, PNPT1, PNRC2, POC1B-GALNT4, PODXL, PODXL2, POF1B, POFUT1, POFUT2, POGLUT1, POGZ, POLB, POLDIP2, POLDIP3, POLE3, POLR1C, POLR1D, POLR2C, POLR2D, POLR2E, POLR2G, POLR2J2, POLR2J3, POLR2K, POLR3A, POLR3C, POLR3D, POLR3GL, POMGNT1, POMP, POMT1, POMT2, PON2, POP4, POP7, POPDC2, POU3F1, POU6F1, POU6F2-AS1, PP7080, PPA1, PPA2, PPAN-P2RY11, PPARD, PPCDC, PPCS, PPDPF, PPFIA3, PPFIA4, PPHLN1, PPIA, PPIB, PPIE, PPIEL, PPIF, PPIG, PPIH, PPIL1, PPIL3, PPIL4, PPIP5K1, PPM1A, PPM1F, PPM1G, PPM1M, PPP1CA, PPP1CB, PPP1R11, PPP1R12A, PPP1R12B, PPP1R12C, PPP1R14C, PPP1R2, PPP1R21, PPP1R26, PPP1R26-AS1, PPP1R37, PPP1R3D, PPP1R3G, PPP1R7, PPP1R9A, PPP2R1A, PPP2R2C, PPP2R2D, PPP2R3B, PPP2R3C, PPP2R4, PPP2R5A, PPP2R5C, PPP3CC, PPP4C, PPP4R1L, PPP4R2, PPP4R4, PPP6C, PPP6R1, PPP6R2, PPT1, PPT2- EGFL8, PQLC1, PQLC3, PRAF2, PROP, PRDX1, PRDX2, PRDX3, PRDX4, PRDX6, PRELID2, PREPL, PRH1, PRICKLE3, PRKAG1, PRKAG2, PRKAG2-AS1, PRKAR1A, PRKCH, PRKCSH, PRKD2, PRKRIP1, PRLHR, PRLR, PRMT2, PRMT3, PRMT6, PRMT7, PROC, PRODH, PRORSD1P, PROSC, PROX1-AS1, PRPF18, PRPF19, PRPF3, PRPF31, PRPF38B, PRPF39, PRPF4, PRPF40A, PRPF4B, PRPS1, PRPS2, PRR13, PRR14, PRR14L, PRR18, PRR26, PRR4, PRR7-AS1, PRRC2B, PRRG1, PRRG2, PRRG4, PRRT2, PRRT3, PRRT3-AS1, PRX, PSAP, PSEN1, PSENEN, PSG9, PSKH1, PSMA1, PSMA2, PSMA3, PSMA3-AS1, PSMA4, PSMA5, PSMA6, PSMA7, PSMB1, PSMB11, PSMB2, PSMB4, PSMB5, PSMB7, PSMB8-AS1, PSMC2, PSMC3, PSMC3IP, PSMC5, PSMD10, PSMD11, PSMD13, PSMD4, PSMD5-AS1, PSMD6, PSMD7, PSMD8, PSMD9, PSMF1, PSMC2, PTAFR, PTBP3, PTCD1, PTCD3, PTCH1, PTDSS1, PTEN, PTENP1, PTER, PTGER3, PTGER4, PTGES2, PTGES3L-AARSD1, PTGR2, PTGS1, PTHLH, PTK6, PTOV1, PTOV1-AS1, PTOV1-AS2, PTP4A2, PTPDC1, PTPN18, PTPRA, PTPRCAP, PTPRU, PTRHD1, PTS, PTTG1IP, PTTG3P, PUF60, PURB, PUSL1, PVR, PVRIG, PVRIG2P, PVRL1, PVRL2, PVRL3, PVRL4, PWP2, PXYLP1, PYCARD-AS1, PYCR2, PYGB, PYGL, PYGM, PYG02, PYROXD1, PYURF, PYY2, QARS, QDPR, QPCTL, QSOX2, R3HCC1, R3HDM4, RAB11A, RAB11B, RAB11B-AS1, RAB11FIP1, RAB11FIP5, RAB12, RAB18, RAB1A, RAB22A, RAB26, RAB27A, RAB29, RAB2A, RAB2B, RAB30, RAB32, RAB33B, RAB34, RAB35, RAB3A, RAB3IL1, RAB40C, RAB4A, RAB4B, RAB4B-EGLN2, RAB5A, RAB5B, RAB6A, RABEP1, RABGEF1, RABGGTB, RABL6, RAC1, RAC2, RAD1, RAD17, RAD18, RAD21, RAD23A, RAD23B, RAD51D, RAD51L3-RFFL, RAD54L2, RAD9B, RAE1, RAET1E, RAET1G, RALA, RALB, RALBP1, RALY-AS1, RAN, RANBP3, RANGAP1, RANGRF, RAP1A, RAP1B, RAP1GAP2, RAP1GDS1, RAP2A, RAP2C, RAP2C-AS1, RARG, RARRES1, RARS, RARS2, RASA2, RASGRF2, RASSF1-AS1, RASSF2, RASSF3, RASSF6, RASSF8, RBAKDN, RBBP4, RBBP7, RBBP8, RBBP9, RBKS, RBL1, RBM12B-AS1, RBM15B, RBM17, RBM22, RBM23, RBM25, RBM26, RBM27, RBM42, RBM4B, RBM5-AS1, RBM6, RBM8A, RBMX2, RBP7, RBPMS-AS1, RBX1, RCAN2, RCAN3AS, RCC2, RCCD1, RCHY1, RCN1, RDH11, RDH13, RDX, REC8, RECK, RECQL, REEP1, REEP2, REEP3, REEP5, RELA, RELL1, RELN, REM2, REN, REPIN1, RER1, REST, RET, REV1, REV3L, REXO1, REXO2, REXO4, RFC1, RFC2, RFC4, RFC5, RFESD, RFFL, RFK, RFPL3S, RFT1, RFX3-AS1, RFX7, RFXAP, RGL2, RGL4, RGS16, RGS20, RGS5, RHBDD1, RHBDD3, RHOBTB2, RHOC, RHOG, RHOQ, RHOT2, RHOV, RICTOR, RILPL2, RIMKLA, RIMS3, RIN2, RINT1, RIPK3, RIPK4, RITA1, RLIM, RMDN1, RMDN2, RMDN3, RMND5A, RNASE13, RNASE7, RNASEH1, RNASEH2C, RNASEK, RNASEK-C17orf49, RNASET2, RND2, RNF103-CHMP3, RNF11, RNF113A, RNF126, RNF126P1, RNF128, RNF13, RNF130, RNF135, RNF138, RNF139, RNF141, RNF145, RNF149, RNF165, RNF166, RNF170, RNF185, RNF186, RNF20, RNF208, RNF216-IT1, RNF216P1, RNF225, RNF25, RNF31, RNF32, RNF40, RNF44, RNF5, RNF5P1, RNF6, RNF7, RNF8, RNH1, RNMT, RNMTL1, RNPEP, RNPEPL1, RNPS1, RNU1-13P, RNU6-19P, RNU6-28P, RNU6-31P, RNU6-34P, RNU6-35P, RNU6-53P, RNU6-57P, RNU6-83P, RNU86, RNY5, ROBO3, ROBO4, ROR1-AS1, ROS1, RP9P, RPA1, RPA2, RPA4, RPAIN, RPAP1, RPARP-AS1, RPE, RPEL1, RPF2, RPGRIP1L, RPIA, RPL10A, RPL12, RPL13AP3, RPL13AP5, RPL13AP6, RPL14, RPL15, RPL17, RPL18, RPL19, RPL19P12, RPL22, RPL23A, RPL23AP53, RPL23AP64, RPL23AP7, RPL23AP82, RPL27, RPL29, RPL3, RPL31P11, RPL32P3, RPL36A, RPL36A-HNRNPH2, RPL4, RPL5, RPL6, RPL7A, RPL7L1, RPL9, RPLP0P2, RPN1, RPN2, RPP30, RPRD1A, RPRD1B, RPS10, RPS10-NUDT3, RPS11, RPS13, RPS15A, RPS15AP10, RPS17, RPS18P9, RPS23, RPS27, RPS27L, RPS3, RPS3A, RPS4X, RPS6, RPS6KA4, RPS6KB2, RPS6KC1, RPSA, RPUSD2, RQCD1, RRAGA, RRM1, RRM2, RRN3, RRN3P3, RRP1, RRP12, RRP7A, RRP8, RSBN1, RSF1, RSG1, RSL1D1, RSPO2, RSU1, RTCB, RTFDC1, RTN3, RTN4, RTTN, RUFY2, RUFY3, RUNDC1, RUNDC3B, RUVBL2, RWDD2A, RWDD3, RWDD4, RXRB, RYK, S100A1, S100A16, S1PR3, SAA2-SAA4, SACM1L, SAE1, SAFB, SAMD8, SAMM50, SAP18, SAP25, SAP30BP, SAP30L, SAPCD1, SAPCD1-AS1, SAR1A, SAR1B, SARAF, SARM1, SARNP, SART1, SART3, SAV1, SBDS, SBF1, SBF2-AS1, SBN01, SBSPON, SCAF1, SCAMP1-AS1, SCAMP3, SCAMP5, SOAP, SCARB2, SCARF2, SCCPDH, SCFD1, SCGB1B2P, SCGB2B2, SCGB2B3P, SCN1B, SCNN1A, SCO1, SCO2, SCOC, SCP2, SCRIB, SCRN2, SCT, SCTR, SCX, SCYL1, SDAD1, SDC2, SDCBP, SDCBP2-AS1, SDCCAG3, SDF4, SDHA, SDHAF2, SDHAF3, SDHAP1, SDHAP3, SDHB, SDHC, SDHD, SDPR, SDR39U1, SEC11A, SEC13, SEC14L1P1, SEC16A, SEC22B, SEC22C, SEC23A, SEC23B, SEC24B, SEC24C, SEC61A1, SEC61A2, SEC62, SEC63, SECISBP2, SECTM1, SELPLG, SELT, SEMA3B, SEMA3B-AS1, SEMA3F, SEMA4A, SEMA6A-AS1, SENP1, SENP3, SENP3-EIF4A1, SENP5, SENP6, SEP15, SEPHS1, SEPT1, SEPT10, SEPT11, SEPT2, SEPT7, SEPT7-AS1, SERBP1, SERINC1, SERINC2, SERINC3, SERINC4, SERPINA2, SERPINB1, SERPINB2, SERPINB4, SERPINB7, SERTAD2, SET, SETD1A, SETD3, SETD4, SETD5, SETD6, SETD7, SETD9, SETSIP, SF3A2, SF3A3, SF3B1, SF3B2, SF3B6, SFSWAP, SFT2D1, SFT2D3, SFTPD, SFXN1, SGCB, SGCE, SGK494, SGMS1-AS1, SGOL1-AS1, SGPL1, SGPP1, SGSH, SGSM3, SGTA, SH2B1, SH2B3, SH2D2A, SH3BGRL, SH3BP4, SH3BP5, SH3BP5-AS1, SH3BP5L, SH3GLB1, SH3GLB2, SH3YL1, SHANK3, SHARPIN, SHBG, SHC1, SHC2, SHISA5, SHKBP1, SHOC2, SIAE, SIAH1, SIGIRR, SIGMAR1, SIK3, SIN3B, SIRPB1, SIRT2, SIRT5, SIRT6, SIX4, SKP1, SLAIN2, SLAMF7, SLBP, SLC12A2, SLC15A4, SLC16A1-AS1, SLC16A10, SLC16A5, SLC17A5, SLC17A8, SLC18A2, SLC1A5, SLC22A18, SLC22A18AS, SLC22A2, SLC22A4, SLC23A3, SLC24A1, SLC25A16, SLC25A17, SLC25A21-AS1, SLC25A23, SLC25A24, SLC25A26, SLC25A3, SLC25A30-AS1, SLC25A34, SLC25A37, SLC25A38, SLC25A39, SLC25A4, SLC25A43, SLC25A44, SLC25A5, SLC25A51, SLC25A6, SLC27A4, SLC29A1, SLC2A5, SLC2A7, SLC30A10, SLC30A2, SLC30A5, SLC30A7, SLC30A9, SLC31A2, SLC35A1, SLC35A2, SLC35A3, SLC35B1, SLC35B2, SLC35B3, SLC3502, SLC35D1, SLC35E1, SLC35E3, SLC35F5, SLC36A4, SLC38A10, SLC38A6, SLC38A7, SLC39A1, SLC39A13, SLC39A3, SLC39A6, SLC39A7, SLC39A8, SLC39A9, SLC41A3, SLC44A1, SLC44A5, SLC45A2, SLC47A1, SLC5A10, SLC5A11, SLC6A13, SLC6A20, SLC7A60S, SLC7A7, SLC7A9, SLC9A1, SLC9A5, SLC9A6, SLC9A7, SLC9A8, SLC9B1, SLC9B2, SLCO3A1, SLCO4C1, SLCO5A1, SLED1, SLFNL1, SLFNL1-AS1, SLIT2, SLITRK3, SLMAP, SLMO2, SLTM, SLU7, SMAD2, SMAD5, SMAD5-AS1, SMAGP, SMAP1, SMARCC2, SMARCD1, SMARCD2, SMDT1, SMG1P7, SMG5, SMG7, SMIM10L1, SMIM13, SMIM14, SMIM15, SMIM18, SMIM19, SMIM2-AS1, SMIM20, SMIM6, SMIM7, SMNDC1, SMPD1, SMPD4, SMPX, SMU1, SMUG1, SMURF1, SMYD2, SMYD5, SNAI1, SNAP29, SNAP47, SNAPC5, SNAPIN, SNF8, SNHG11, SNHG16, SNHG18, SNHG20, SNHG4, SNRNP70, SNRPA1, SNRPB, SNRPC, SNRPD3, SNRPN, SNTA1, SNURF, SNW1, SNX1, SNX12, SNX14, SNX17, SNX19, SNX22, SNX25, SNX3, SNX4, SNX5, SNX6, SNX7, SNX9, SOAT2, SOCS1, SOCS5, SOCS7, SORD, SOWAHA, SOX2, SOX7, SP1, SP110, SP2, SP2-AS1, SP3, SP4, SP5, SPA17, SPAG5-AS1, SPAG7, SPATA2L, SPATA33, SPATA5L1, SPATA6L, SPATC1L, SPCS1, SPCS2, SPCS3, SPDEF, SPDL1, SPECC1L-ADORA2A, SPEF2, SPESP1, SPG21, SPHK2, SPINT2, SPIRE1, SPNS1, SPOCK1, SPOPL, SPPL2A, SPPL3, SPR, SPRED3, SPRN, SPRR2A, SPRYD3, SPRYD4, SPRYD7, SPSB2, SPTB, SPTLC1, SRA1, SRD5A3, SRD5A3-AS1, SREBF1, SREK1, SRFBP1, SRM, SRP14, SRP19, SRP54, SRP68, SRP72, SRP9, SRPK1, SRPR, SRPRB, SRPX, SRR, SRRM1, SRRM2-AS1, SRSF10, SRSF11, SRSF12, SRSF4, SRSF9, SS18L1, SS18L2, SSBP1, SSBP2, SSC4D, SSFA2, SSNA1, SSR1, SSR2, SSR3, SSSCA1, SSSCA1-AS1, SSTR2, SSU72, SSUH2, ST13, ST20, ST20-MTHFS, ST3GAL4-AS1, ST3GAL6, ST3GAL6-AS1, ST6GALNAC6, ST7L, STAG3L2, STAG3L4, STAG3L5P, STAM, STAMBP, STARD13-AS, STARD3, STARD3NL, STARD4-AS1, STARD7-AS1, STAT2, STAU1, STIM2, STK11, STK16, STK17B, STK19, STK24, STK25, STK26, STK38, STK4, STK40, STMN4, STOML2, STOX2, STRA13, STRADB, STRAP, STRIP2, STRN3, STT3A, STT3B, STUB1, STX10, STX12, STX16, STX17-AS1, STX1B, STX2, STXBP2, STXBP6, STYXL1, SUB1, SUCLA2, SUCLG1, SUCLG2, SUCNR1, SUGP1, SUGP2, SULT1A1, SULT1A2, SULT1B1, SULT1C2, SULT1C2P1, SULT1E1, SUMF1, SUMF2, SUMO1, SUMO1P3, SUMO2, SUMO3, SUN1, SUN2, SUPT4H1, SUPT5H, SUPV3L1, SURF1, SURF6, SUSD4, SUV39H2, SWAP70, SWI5, SYAP1, SYCE1, SYCE1L, SYCE3, SYF2, SYMPK, SYNC, SYNE2, SYNGR1, SYNGR3, SYNJ1, SYNJ2BP, SYNJ2BP-COX16, SYNM, SYPL1, SYS1, SYS1-DBNDD2, SYT7, SYVN1, SZT2, TAAR1, TAAR3, TAB2, TAC1, TAC3, TADA3, TAF1, TAF10, TAF12, TAF15, TAF1A, TAF1A-AS1, TAF1C, TAF1D, TAFS, TAFSL, TAF6, TAF7, TAF9, TAGLN2, TALDO1, TANC2, TANGO2, TANK, TAPBP, TAPBPL, TAPT1-AS1, TARBP2, TARDBP, TARS, TARSL2, TAS2R14, TAS2R20, TAS2R4, TAS2R5, TATDN1, TATDN2, TAZ, TBC1D10B, TBC1D13, TBC1D14, TBC1D17, TBC1D22B, TBC1D30, TBCB, TBK1, TBL2, TBL3, TBP, TBR1, TBRG1, TBRG4, TCAF2, TCAIM, TCAP, TCEAL4, TCEANC, TCEANC2, TCEB3, TCEB3-AS1, TCF19, TCF20, TCF25, TCFLS, TCN2, TCP1, TCP11L1, TCTN2, TDG, TDRP, TEC, TECPR1, TECTB, TEF, TEKT4P2, TEKT5, TELO2, TEN1, TEN1-CDK3, TERC, TERF2, TES, TESC-AS1, TESK2, TET3, TEX101, TEX14, TEX261, TEX264, TEX29, TFAM, TFB2M, TFF3, TFIP11, TFPI2, TFPT, TGDS, TGFB2-AS1, TGFB2-OT1, TGFBRAP1, TGIF1, TGIF2, TGOLN2, TH2LCRR, THAP1, THAP4, THAP5, THAP7-AS1, THCAT158, THEM4, THEMS, THG1L, THNSL2, THOC2, THOC3, THOCS, THOC7, THRA, THRB-AS1, THRIL, THTPA, THUMPD1, THUMPD2, THUMPD3, THUMPD3-AS1, TIAF1, TIAL1, TICAM2, TIGD1, TIGD3, TIGD6, TIGD7, TIMM10B, TIMM13, TIMM17A, TIMM17B, TIMM21, TIMM22, TIMM23, TIMM23B, TIMM44, TIMM50, TIMM8A, TIMMDC1, TINCR, TIPARP-AS1, TJAP1, TJP2, TJP3, TKFC, TLE2, TLE6, TLR6, TLR9, TM2D1, TM2D2, TM2D3, TM4SF1-AS1, TM6SF2, TM7SF3, TM9SF1, TM9SF2, TM9SF3, TMA16, TMBIM1, TMBIM4, TMBIM6, TMCC1-AS1, TMCC3, TMCO1, TMED1, TMED10, TMED10P1, TMED2, TMED3, TMED4, TMED5, TMED7, TMED9, TMEM100, TMEM101, TMEM104, TMEM106A, TMEM106B, TMEM106C, TMEM110, TMEM110-MUSTN1, TMEM119, TMEM120A, TMEM123, TMEM126A, TMEM126B, TMEM127, TMEM143, TMEM147, TMEM147-AS1, TMEM14A, TMEM14B, TMEM14C, TMEM150A, TMEM151A, TMEM161A, TMEM161B-AS1, TMEM167A, TMEM17, TMEM179B, TMEM18, TMEM180, TMEM182, TMEM183A, TMEM183B, TMEM184B, TMEM185A, TMEM186, TMEM189-UBE2V1, TMEM19, TMEM192, TMEM198, TMEM199, TMEM203, TMEM205, TMEM206, TMEM208, TMEM209, TMEM214, TMEM216, TMEM218, TMEM219, TMEM220-AS1, TMEM222, TMEM230, TMEM234, TMEM237, TMEM241, TMEM242, TMEM245, TMEM248, TMEM249, TMEM25, TMEM251, TMEM253, TMEM254, TMEM259, TMEM30A, TMEM33, TMEM38B, TMEM39A, TMEM40, TMEM41B, TMEM42, TMEM43, TMEM44-AS1, TMEM45B, TMEM5, TMEM50B, TMEM51, TMEM55A, TMEM55B, TMEM56-RWDD3, TMEM59, TMEM60, TMEM61, TMEM62, TMEM63A, TMEM64, TMEM65, TMEM69, TMEM74, TMEM86B, TMEM87A, TMEM8A, TMEM8B, TMEM9, TMEM92-AS1, TMEM98, TMEM99, TMEM9B, TMEM9B-AS1, TMOD3, TMPPE, TMPRSS3, TMUB1, TMUB2, TMX1, TMX2, TMX2-CTNND1, TMX3, TNFAIP8L2-SCNM1, TNFAIP8L3, TNFRSF11A, TNFRSF12A, TNFRSF6B, TNFRSF9, TNFSF13, TNFSF18, TNFSF9, TNK1, TNKS2-AS1, TNNI1, TNNT2, TNRC18, TNRC6A, TOB1-AS1, TOLLIP, TOLLIP-AS1, TOM1, TOM1L1, TOMM20, TOMM22, TOMM34, TOMM5, TOMM6, TOMM70A, TONSL, TONSL-AS1, TOP1P1, TOP2A, TOP3A, TOP3B, TOPORS, TOPORS-AS1, TOR1A, TOR1AIP2, TOR2A, TOX4, TP53AIP1, TP53I11, TP53RK, TP63, TPD52L1, TPD52L2, TPGS2, TPI1, TPM3, TPMT, TPP1, TPPP, TPRG1L, TPRKB, TPSG1, TPST2, TRA2A, TRA2B, TRABD, TRABD2A, TRADD, TRAF2, TRAF3, TRAF3IP1, TRAF3IP2-AS1, TRAF6, TRAF7, TRAP, TRAM1L1, TRAM2-AS1, TRAP1, TRAPPC1, TRAPPC2L, TRAPPC3, TRAPPC4, TREML5P, TRERF1, TRHDE-AS1, TRIM11, TRIM14, TRIM22, TRIM27, TRIM31-AS1, TRIM32, TRIM35, TRIM36, TRIM37, TRIM39, TRIM39-RPP21, TRIM4, TRIM44, TRIM54, TRIM56, TRIM69, TRIM9, TRIP6, TRIQK, TRMT1, TRMT10C, TRMT2B, TRMT44, TRMT6, TRMT61A, TRMU, TRNAU1AP, TRNT1, TRO, TROAP, TROVE2, TRPC4AP, TRPM2, TRPM7, TRPS1, TRUB2, TSACC, TSC1, TSC2, TSEN34, TSFM, TSG101, TSGA10, TSN, TSNAX, TSNAIP1, TSPAN1, TSPAN17, TSPAN3, TSPAN31, TSPAN33, TSPYL5, TSR2, TSR3, TSSK3, TSSK4, TST, TSTA3, TTC1, TTC14, TTC17, TTC19, TTC21A, TTC28-AS1, TTC3, TTC30A, TTC32, TTC33, TTC36, TTC37, TTC38, TTC4, TTC7A, TTC9C, TTI1, TTL, TTLL2, TTLL3, TUBA1B, TUBAS, TUBB3, TUBD1, TUBG1, TUBGCP2, TUFM, TUFT1, TUSC1, TUSC2, TUT1, TVP23B, TVP23C, TVP23C-CDRT4, TWF1, TXK, TXLNA, TXN2, TXNDC12, TXNDC15, TXNDC16, TXNDC5, TXNL4A, TXNRD2, TYMSOS, TYRO3P, TYROBP, TYW3, TYW5, U2AF1, U2AF1L4, UBA5, UBAC1, UBAC2-AS1, UBALD1, UBB, UBC, UBE2A, UBE2B, UBE2C, UBE2D2, UBE2D3, UBE2E1, UBE2E3, UBE2E4P, UBE2F, UBE2G2, UBE2I, UBE2J2, UBE2L3, UBE2L6, UBE2M, UBE2N, UBE20, UBE2Q1, UBE2Q1-AS1, UBE2Q2, UBE2Q2P1, UBE2Q2P2, UBE2QL1, UBE2V1, UBE2V2, UBE2W, UBE2Z, UBE3A, UBE3B, UBE4A, UBL3, UBL7, UBLCP1, UBP1, UBR4, UBTD2, UBXN1, UBXN4, UBXN6, UBXN7, UBXN8, UCA1, UCHL3, UCK1, UCK2, UCKL1, UCKL1-AS1, UCN2, UEVLD, UFC1, UFD1L, UFM1, UFSP2, UGDH-AS1, UGGT1, UGGT2, UGP2, UGT1A3, UGT1A4, UGT1A5, UGT1A7, UGT1A9, UGT2A2, UGT2B11, UHRF2, ULBP1, ULBP2, ULK2, ULK3, UMPS, UNC119B, UNC45A, UNC50, UNC5B-AS1, UNC93B1, UPF2, UPF3A, UPF3B, UPK1A, UPK2, UPK3BL, UPP2, UQCC1, UQCC2, UQCRC1, UQCRC2, UQCRFS1, URAHP, URGCP-MRPS24, URI1, URM1, UROD, UROS, USE1, USF1, USF2, USO1, USP10, USP12-AS2, USP14, USP15, USP16, USP19, USP3, USP3-AS1, USP31, USP37, USP39, USP4, USP40, USP42, USP44, USP45, USP46-AS1, USP48, UTP14C, UTP23, UTP3, UTP6, UTS2B, UXT, UXT-AS1, VAMP2, VAMP3, VAMPS, VAMP7, VAPA, VAPB, VARS2, VAT1, VBP1, VCPKMT, VDAC2, VDAC3, VEZF1, VEZT, VGLL4, VHL, VIM-AS1, VIMP, VKORC1L1, VLDLR-AS1, VMA21, VMP1, VOPP1, VPRBP, VPS11, VPS16, VPS25, VPS26A, VPS28, VPS29, VPS35, VPS36, VPS37C, VPS39, VPS45, VPS4A, VPS4B, VPS9D1-AS1, VRK3, VSIG10, VSTM2L, VSTM4, VTA1, VTI1B, VTRNA1-1, VTRNA1-2, VTRNA1-3, VTRNA2-1, VWA9, WAC-AS1, WAS, WASF1, WASF2, WASF3, WASH1, WASH2P, WBP11, WBP2, WBP4, WBP5, WBSCR22, WDFY1, WDFY3-AS2, WDHD1, WDPCP, WDR1, WDR11, WDR13, WDR19, WDR3, WDR33, WDR34, WDR41, WDR43, WDR46, WDR53, WDR59, WDR6, WDR61, WDR73, WDR74, WDR76, WDR77, WDR81, WDR82, WDR83, WDR830S, WDR90, WDSUB1, WDTC1, WDYHV1, WEE2-AS1, WFIKKN1, WFIKKN2, WFS1, WHAMMP1, WHAMMP3, WHSC1L1, WIPF2, WIPI1, WNK4, WNT4, WNT5B, WNT7B, WNT9A, WRAP53, WRAP73, WRB, WRNIP1, WSCD1, XAB2, XIAP, XK, XKR9, XPA, XPNPEP3, XPO1, XPO5, XPO6, XPR1, XRCC3, XRN2, XYLB, YARS, YBEY, YBX3, YBX3P1, YES1, YIF1A, YIF1B, YIPF1, YIPF2, YIPF3, YIPF4, YIPF5, YIPF6, YKT6, YME1L1, YOD1, YPEL1, YTHDC1, YWHAB, YWHAE, YWHAH, YWHAQ, YWHAZ, ZACN, ZASP, ZBED1, ZBED4, ZBED5-AS1, ZBED8, ZBTB1, ZBTB10, ZBTB11, ZBTB11-AS1, ZBTB12, ZBTB17, ZBTB18, ZBTB2, ZBTB22, ZBTB25, ZBTB4, ZBTB47, ZBTB48, ZBTB49, ZBTB5, ZBTB6, ZBTB80S, ZC2HC1C, ZC3H11A, ZC3H12D, ZC3H13, ZC3H15, ZC3H18, ZC3H6, ZC3H7A, ZC3H8, ZC3HAV1, ZCCHC14, ZCCHC17, ZCCHC6, ZCCHC7, ZCCHC9, ZCRB1, ZCWPW1, ZDHHC1, ZDHHC12, ZDHHC20, ZDHHC24, ZDHHC3, ZDHHC4, ZDHHC5, ZDHHC6, ZDHHC7, ZDHHC9, ZEB1, ZFAND1, ZFAND6, ZFC3H1, ZFHX2, ZFP14, ZFP37, ZFP41, ZFP64, ZFP92, ZFPL1, ZFR, ZFX, ZFYVE1, ZFYVE19, ZFYVE27, ZG16, ZGPAT, ZHX1, ZHX1-C8orf76, ZIC2, ZKSCAN1, ZKSCAN4, ZKSCAN5, ZKSCAN7, ZMAT2, ZMYM6NB, ZMYND10, ZMYND11, ZNF101, ZNF12, ZNF124, ZNF136, ZNF138, ZNF140, ZNF16, ZNF174, ZNF177, ZNF19, ZNF192P1, ZNF197, ZNF2, ZNF200, ZNF202, ZNF205-AS1, ZNF213, ZNF213-AS1, ZNF215, ZNF219, ZNF22, ZNF221, ZNF223, ZNF225, ZNF226, ZNF227, ZNF229, ZNF230, ZNF234, ZNF24, ZNF250, ZNF251, ZNF256, ZNF26, ZNF264, ZNF266, ZNF268, ZNF271P, ZNF276, ZNF277, ZNF28, ZNF283, ZNF295-AS1, ZNF3, ZNF300, ZNF304, ZNF316, ZNF317, ZNF32-AS1, ZNF32-AS2, ZNF329, ZNF330, ZNF331, ZNF333, ZNF337-AS1, ZNF33B, ZNF341-AS1, ZNF343, ZNF345, ZNF346, ZNF35, ZNF350, ZNF354C, ZNF358, ZNF384, ZNF394, ZNF398, ZNF408, ZNF417, ZNF423, ZNF425, ZNF426, ZNF428, ZNF436-AS1, ZNF442, ZNF443, ZNF446, ZNF461, ZNF467, ZNF470, ZNF483, ZNF487, ZNF496, ZNF497, ZNF500, ZNF502, ZNF507, ZNF510, ZNF511, ZNF513, ZNF517, ZNF518B, ZNF526, ZNF527, ZNF528-AS1, ZNF529, ZNF529-AS1, ZNF543, ZNF547, ZNF548, ZNF551, ZNF554, ZNF557, ZNF562, ZNF564, ZNF565, ZNF566, ZNF568, ZNF57, ZNF570, ZNF571, ZNF573, ZNF576, ZNF577, ZNF584, ZNF585B, ZNF587, ZNF589, ZNF592, ZNF594, ZNF595, ZNF597, ZNF598, ZNF600, ZNF605, ZNF606, ZNF613, ZNF616, ZNF626, ZNF629, ZNF644, ZNF646, ZNF649, ZNF653, ZNF655, ZNF664, ZNF667-AS1, ZNF669, ZNF670, ZNF671, ZNF674, ZNF674-AS1, ZNF678, ZNF682, ZNF687, ZNF696, ZNF699, ZNF7, ZNF706, ZNF71, ZNF717, ZNF718, ZNF720, ZNF721, ZNF736, ZNF740, ZNF749, ZNF75A, ZNF75D, ZNF76, ZNF761, ZNF765, ZNF766, ZNF767P, ZNF768, ZNF773, ZNF774, ZNF775, ZNF776, ZNF782, ZNF783, ZNF790, ZNF791, ZNF792, ZNF799, ZNF8, ZNF805, ZNF808, ZNF816, ZNF818P, ZNF830, ZNF836, ZNF843, ZNF845, ZNF850, ZNF865, ZNF880, ZNF891, ZNF91, ZNFX1, ZNHIT1, ZNHIT3, ZPR1, ZRANB1, ZRANB2, ZRANB2-AS1, ZRANB3, ZSCAN12P1, ZSCAN2, ZSCAN21, ZSCAN22, ZSCAN25, ZSCAN32, ZSCAN5A, ZSWIM7, ZSWIM8-AS1, ZUFSP, ZXDA, and ZYG11A were identified as static. Group 2 of static genes was observed to include 19 disease-associated genes.

[0599] The compounds of Table 69 are known to target at least one gene in one of the 63 canonical pathways in Table 68.

TABLE 69
Number of compounds known to target each pathway

| Pathway | # of compounds |
|---|---|
| 5-HT | 2 |
| ABL | 3 |
| Acetylcholine receptor | 5 |
| Adrenergic receptor | 2 |
| ALK | 1 |
| AMPK | 4 |
| Androgen receptor | 2 |
| Aryl hydrocarbon receptor | 3 |
| ATM/ATR | 2 |
| ATP channel | 1 |
| BCL2 | 3 |
| Calcium channel | 1 |
| Calmodulin | 2 |
| Cannabinoid receptor | 3 |
| c-KIT | 1 |
| c-MET | 6 |
| DNA Damage | 2 |
| Dopamine receptor | 2 |
| EGFR | 6 |
| ER | 1 |
| FAK | 1 |
| FGFR | 2 |
| FLT3 | 1 |
| FXR | 2 |
| GABAergic receptor | 2 |
| GR | 3 |
| GSK-3 | 1 |
| Hedgehog/Smoothened | 4 |
| HIF1 | 2 |
| Hippo | 1 |
| Histamine receptor | 2 |
| Hypoxia activated | 2 |
| IGF-1R/InsR | 5 |
| JAK/STAT | 6 |
| LHR-1 | 2 |
| LXR | 2 |
| MAPK | 6 |
| Mineralcorticoid receptor | 2 |
| mTOR | 3 |
| NF-kB | 1 |
| NOTCH | 1 |
| P53 | 7 |
| PAK | 1 |
| PDGFR | 4 |
| PDK-1 | 2 |
| PI3K/AKT | 8 |
| PIM | 2 |
| PKC | 4 |
| Potassium channel | 1 |
| PPAR | 1 |
| Protein Tyrosine Kinase/RTK | 1 |
| Proton pump | 1 |
| RAR | 3 |
| RAS | 1 |
| ROCK | 1 |
| RXR | 1 |
| S6K | 2 |
| Src | 1 |
| TGF-B | 14 |
| TNF-a | 2 |
| VEGFR | 3 |
| Vitamin D Receptor | 2 |
| WNT | 5 |

[0600] Thirty-two distinct signaling protein signatures were identified in the hepatocytes. Each of these signatures was analyzed per treatment to determine whether it was correlated with a significant change in gene expression. Significance was defined as FPKM≥1, q-value≤0.05, and log 2 fold change≥1.5. By these parameters, 11349 protein-coding genes were observed to have significantly changed expression in response to at lease one compound. Table 70 provides the number of genes having significantly changed expression for 59 of the compounds in Table 70 used to stimulate hepatocytes.

TABLE 70
Number of genes having significantly altered expression

| | | # of | | | | # of | |
|---|---|---|---|---|---|---|---|
| ID | Compound | genes | Associated pathway (target) | ID | Compound | genes | Associate pathway (target) |
| 116 | TCS 359 | 63 | Protein Tyrosine Kinase/RTK | 147 | GSK621 | 5 | AMPK (AMPK) |
| | | | (FLT3) | | | | |
| 117 | Cobalt chloride | 1275 | HIF1 (HIF1) | 148 | STA-21 | 6 | JAK/STAT (STAT3) |
| 118 | CH223191 | 198 | Aryl hydrocarbon receptor (AhR) | 149 | SMI-4a | 1436 | PIM (Pim1) |
| 119 | Echinomycin | 7161 | Hypoxia activated (HIF) | 150 | AMG337 | 3 | c-MET (c-Met) |
| 120 | PAF-C-16 | 7 | MAPK (MEK) | 151 | Wnt agonist 1 | 138 | WNT (Wnt) |
| 121 | Bexarotene | 267 | RXR(RXR) | 152 | PRI-724 | 88 | WNT (Wnt) |
| 122 | CD 2665 | 1102 | RAR (RAR) | 153 | ABT-263 | 1 | BCL2 (Pan-Bcl-2) |
| 123 | Pifithrin-μ | 5377 | P53 (p53) | 154 | Axitinib | 5 | VEGFR (Pan-VEGFR) |
| 124 | EB1089 | 68 | Vitamin D receptor (VDR) | 155 | Afatinib | 2010 | EGFR (Pan-ErbB) |
| 125 | BMP4 | 2218 | TGF-β (TGF-B) | 156 | Bosutinib | 2184 | Src (Src) |
| 126 | IWP-2 | 15 | WNT (Wnt) | 157 | Dasatinib | 2970 | ABL (Bcr-Abl) |
| 127 | RITA (NSC 652287) | 105 | P53 (p53) | 158 | Mastinib | 151 | c-KIT (c-Kit) |
| 128 | Calcitrol | 1950 | Vitamin D receptor (VDR) | 159 | Crizotinib | 3265 | c-MET (c-Met) |
| 129 | ACEA | 2 | Cannabinoid receptor (CB1) | 160 | PHA-665752 | 1767 | c-MET (c-Met) |
| 130 | Rimonabant | 1392 | Cannabinoid receptor (CB1) | 161 | GSK1904520A | 2 | IGF-1R/lnsR (IGF-1R/lnsR) |
| 131 | Otenabant | 36 | Cannabinoid receptor (CB1) | 162 | GDC-0879 | 274 | MAPK (Raf) |
| 132 | DLPC | 4 | LHR-1 | 163 | LY294002 | 981 | PI3K/AKT (Pan-PI3K) |
| 133 | LHR-1 antagonist | 204 | LHR-1 | 164 | OSU-03012 | 1786 | PDK-1 (PDK-1) |
| 134 | Wnt3a | 1142 | WNT (Frizzled receptor) | 165 | JNJ-38877605 | 64 | c-MET (c-Met) |
| 135 | Activin | 798 | TGF-β (TGF-beta) | 166 | BMS-754807 | 302 | IGF-1R/lnsR (IGF-1R/lnsR) |
| 136 | Nodal | 863 | TGF- β (TGF-beta) | 167 | TGX-221 | 1 | PI3K/AKT (p110b) |
| 137 | Anti-mullerian hormone | 912 | TGF- β (TGF-beta) | 168 | Regorafenib | 10 | VEGFR (Pan-VEGFR) |
| 138 | GDF2 (BMP2) | 2463 | TGF- β (TGF-beta) | 169 | Thalidomide | 3092 | TNF-α (TNF-α) |
| 139 | GDF10 (BMP3b) | 855 | TGF- β (TGF-beta) | 170 | Amuvatinib | 2835 | PDGFR (PDGFRA) |
| 140 | Oxoglaucine | 31 | PI3J/AKT (PI3K/Akt) | 171 | Etomidate | 2 | GABAergic receptor (GABA) |
| 141 | BMS 195614 | 46 | RAR (RAR) | 172 | Gilmepiride | 39 | Potassium channel |
| | | | | | | | (Potassium channel) |
| 142 | LDN193189 | 67 | TGF-β (ALK2/3) | 173 | Omeprazole | 61 | Proton pump |
| 143 | Varenicline tartrate | 7 | Acetylcholine receptor (AchR) | 174 | Tipifarnib | 34 | RAS (Ras) |
| 144 | Histamine | 20 | Histamine receptor (histamine) | 175 | SP600125 | 193 | MAPK (Jnk) |
| 145 | Chloroquine phosphate | 573 | ATM/ATR (ATM/ATR) | | | | |
| 146 | LJI308 | 1 | S6K (RSK1/2/3) | | | | |

[0601] Within the genes in Table 70, 87 of 95 liver disease genes in the NH Genetics Home Reference (GHR) database show significantly changed expression in response to at lease one compound. qRT-PCR validation of the results for simvastatin (1), prednisone (16), and rifampicin (19) showed a correlation of 0.6, 0.58, and 0.99 respectively. Table 71 provides the qRT-PCR validation results. (log 2fc=log 2 fold change in gene expression).

TABLE 71
qRT-PCR Validataion

| | | qRT-PCR | Cuffdiff | Cuffdiff | DESeq | DESeq2 |
|---|---|---|---|---|---|---|
| Gene | Cmpd | log2fc | log2fc | q-value | log2fc | q-value |
| ACAT2 | 1 | 1.52 | 1.22 | 4.50E−03 | 1.2 | 3.90E−114 |
| CYP7A1 | 1 | −0.24 | −1.42 | 4.50E−03 | −1.74 | 9.70E−08 |
| HMGCR | 1 | 2.01 | 1.26 | 4.50E−03 | 1.3 | 4.80E−260 |
| PCSK9 | 1 | 2.53 | 1.07 | 4.50E−03 | 0.88 | 4.80E−07 |
| TNFSF11 | 1 | 0.01 | 1.09 | 4.50E−03 | 1.24 | 6.40E−20 |
| AMACR | 16 | −0.35 | −1.4 | 6.10E−04 | −1.24 | 2.90E−39 |
| ARG1 | 16 | 1.53 | 1.48 | 6.10E−04 | 1.59 | 7.80E−73 |
| CA2 | 16 | −0.1 | −1.05 | 6.10E−04 | −0.95 | 5.50E−43 |
| CIDEC | 16 | 1.1 | 1.02 | 6.10E−04 | 1.19 | 6.40E−16 |
| CPS1 | 16 | 0.61 | 2.14 | 6.10E−04 | 2.17 | 4.40E−174 |
| CYP21A2 | 16 | −0.1 | −1.35 | 6.10E−04 | −1.32 | 6.50E−29 |
| CYP3A4 | 16 | 1.3 | 1.98 | 6.10E−04 | 2.08 | 0.00E+00 |
| ENO3 | 16 | −0.03 | −1.24 | 6.10E−04 | −1.03 | 2.50E−33 |
| G6PC | 16 | 0.76 | 1.02 | 6.10E−04 | 1.03 | 2.70E−61 |
| GYS2 | 16 | 0.71 | 2.21 | 6.10E−04 | 2.49 | 5.50E−53 |
| HGD | 16 | 0.5 | 1.23 | 6.10E−04 | 1.31 | 1.20E−235 |
| HOGA1 | 16 | 1.47 | 1 | 6.10E−04 | 1.04 | 1.50E−18 |
| HPGD | 16 | 0.36 | 2.07 | 6.10E−04 | 2.29 | 2.00E−112 |
| NCF2 | 16 | −0.4 | −1.71 | 6.10E−04 | −1.6 | 4.30E−24 |
| RMRP | 16 | −0.33 | −1.43 | 6.10E−04 | −0.78 | 9.40E−01 |
| SLC37A4 | 16 | 0.99 | 1.16 | 6.10E−04 | 1.18 | 5.90E−76 |
| TAT | 16 | 3.26 | 2.37 | 6.10E−04 | 2.48 | 3.90E−187 |
| TDO2 | 16 | 1.41 | 1.05 | 6.10E−04 | 1.21 | 7.90E−96 |
| AGTR1 | 19 | −0.37 | 1.1 | 1.10E−03 | 1.18 | 1.30E−44 |
| ALAS1 | 19 | 0.3 | 1.45 | 1.10E−03 | 1.47 | 5.30E−140 |
| CA12 | 19 | 0.53 | 1.53 | 1.10E−03 | 1.56 | 1.00E−242 |
| CYP2C19 | 19 | −0.37 | 1.75 | 1.10E−03 | 2.3 | 1.40E−74 |
| CYP3A4 | 19 | 1.5 | 3.21 | 1.10E−03 | 3.29 | 0.00E+00 |
| CYP7A1 | 19 | −1.65 | −1.27 | 1.10E−03 | −1.44 | 6.10E−07 |
| ENO3 | 19 | −0.06 | −1.13 | 1.10E−03 | −0.97 | 1.60E−29 |
| POR | 19 | 0.16 | 1.13 | 1.10E−03 | 1.17 | 2.00E−84 |
| SLC51B | 19 | 1.72 | 1.02 | 1.10E−03 | 1.19 | 2.20E−09 |
| SLC6A20 | 19 | −0.17 | 1.03 | 1.10E−03 | 1.06 | 2.20E−07 |
| SLC6A6 | 19 | −0.14 | 1.28 | 1.10E−03 | 1.39 | 5.10E−26 |
| VLDLR | 19 | 0.63 | 1.69 | 1.10E−03 | 1.71 | 7.70E−162 |

[0602] In summary, ODSCs were observed to cover about 50% of gene promoters, and 90% correspond to expressed genes in hepatocytes (35% static and 55% dynamic expression). Genes without an ODSC at the promoter agree with previously defined non-liver pathways, such as neurological or olfactory-associated pathways.

### Example 13. Augmentation of the ODSC Definition

[0603] The regions identified as ODSCs were further analyzed to determine whether the regions also contained a target motif to augment the definition developed above. One approach to augmenting the definition of an ODSC is to identify the composition of each ODSC identified above ranked by their dynamic response to the compounds in Table 70.

[0604] HiChIP was also performed as described in Example 1 to identify characteristics of gene looping that may be used to augment the present definition of an ODSC. Binning was set at either 5Kbp. The factors included in the analysis are shown in Table 72. (SC=occupancy-dependent signaling center; TSS=transcription start site; TP=tether point(s); and IN=insulated neighborhood)

TABLE 72
Analyzed factors

| Factors | SC | TSS | TP | IN |
|---|---|---|---|---|
| SC | SMC1/27ac | SMC1/27ac | SMC1/CTCF | X |
| TSS | . | Pol | SMC1/CTCF | X |
| TA | . | . | X | X |
| IN | . | . | | CTCF/HiC |

[0605] “Tether points” represent the boundaries of an IN including the binding site for CTCF. The priority of interactions determined from the different cell lines is shown in Table 73.

TABLE 73
Priority of interactions

| | SC | TSS | TP | IN |
|---|---|---|---|---|
| SC | High | High | Med. | X |
| TSS | . | Low | Med. | X |
| TP | . | . | X | X |
| IN | . | . | . | Low |

[0606] Table 74 provides the basic processing and quality control statistics for HiChIP results from hepatocytes and HepG2 cells stimulated by the compounds in Table 68.

TABLE 74
HiChIP Statistics

| | Valid contacts | Inter- | Intra- | | | Estimated Library |
|---|---|---|---|---|---|---|
| Sample | (% of total) | chromosomal | chromosomal | <20kb | >20kb | Complexity |
| HepG2 | 128M (70%) | 20M (11%) | 109M (60%) | 37M (20%) | 71M (39%) | 313M |
| Hepatocyte | 27M (33%) | 6M (7%) | 21M (26%) | 12M (15%) | 9M (11%) | 92M |

[0607] The previously observed “nesting” model was confirmed. For example, the combination of CTCF and cohesin bind the “tether points” of an insulated neighborhood spanning 1-3 Mb. Mediator molecules and additional cohesion result in further gene looping of regions 60-1000 Kb, within the insulated neighborhood.

[0608] The results above are exemplified by the illustration in FIG. 20 of a single IN. Interactions indicated by the black lines from an ODSC to another ODSC or to a transcription start site (TSS) represent the highest priority of interactions. Interactions indicated by the medium gray lines from a SC (or ODSC) to the TP represent a medium priority interaction, while the interations indicated by the light gray lines from a TSS to another TSS or from a TSS to a TP are a lower priority.

### Example 14. Determining Genome Architecture in Hepatocytes

[0609] HI-ChIP was performed as described in Example 1 to decipher genome architecture. In some embodiments, ChIA-PET for SMC1 structural protein is used for the same purpose. These techniques identify portions of the chromatin that interact to form 3D structures, such as insulated neighborhood and gene loops.

[0610] Changes in expression of liver disease genes in response to perturbations of GSCs with small molecules as well as information on the 3D architecture of the genome is used to identify relationships (the “signaling code”) among components of GSCs, such as, signaling proteins and transcription factors, as well as genes under their control. This signaling code may be used to predict therapies for inherited diseases.

[0611] ENCODE standardized metrics were used to compare the technical quality of a 10 million subsample of the HiChIP data described herein to published data for GM12878 (PMID: 27643841) hepatocytes. The PCR bottlenecking coefficient (PBC1), normalized strand cross-correlation coefficient (NSC), and relative strand cross-correlation coefficient (RSC) were calculated from the initial read data. These values are shown in Table 75.

TABLE 75
Quality control metrics

| Metric | HepG2 | GM12878 |
|---|---|---|
| PBC1 | 0.97 | 0.76 |
| NSC | 1.36 | 1.31 |
| RSC | 4.85 | 2.32 |

[0612] The PBC1 for HepG2 cells indicated no bottlenecking, while the PBC1 for the published GM12878 data indicated moderate bottlenecking. The RSC was observed to be significantly higher for the HepG2 cells. Therefore, the HiChIP data for the HepG2 cells was observed to be of a higher quality than previously published data.

[0613] About 77 million paired end tags (PETs) were identified. Of these 77 million, about 55 million were observed to be intrachromosomal, and about 16 million were observed to be interchromosomal. FIG. 14A shows the size distribution of PETs.

[0614] Topologically-associated domains (TADs) were clearly observed in FIG. 14B. The boxes indicate insulated neighborhoods. The further the points are off the diagonal dark gray line are more distal of an interaction. The significance of peak-pairs was assessed using Mango and MICC programs. Naïve peaks (700k) in the HepG2 cells were observed to cover more than 80% of public SMC3/CTCF ChIP data from GM12878 (PMID: 27643841) hepatocytes. Similarity was observed between HepG2 data and the published data for GM12878 for PCSK9 gene body, and non-significant linkages were observed to demonstrate deconvolution of the “interaction hairball”.

[0615] In an effort to build a more rigorous and useful tool for mapping of gene expression, where any particular gene of a primary IN, whether coding or noncoding defines a new signaling pathway, the present inventors have devised an architecture of genome signaling connectivities. Shown in FIG. 18 is one embodiment of the relational aspects of a gene signaling network (GSN).

### Example 15. Conditional Immortalization of Erythroid Cells

[0616] The 2D and 3D genomic interrogation of expanding CD34+ and the differentiated erythroblasts allowed identification and understanding of the genomic compositions of genomic signaling centers in the blood. Blood can be readily obtained from diseased patients allowing target validation and compound testing on actual diseased patient cells and models thereof. Deciphering the 2D and 3D maps of normal and diseased blood provides an understanding of the disease biology and allows for screening of new and existing chemical compounds to benefit patients with unmet medical needs.

[0617] Conditional immortalization allowed for production of a large biomass, while retaining normal cell expression, size, and phenotype. Conditional immortalization was performed as described in Example 1 at day 3 of differentiation. Two samples of cord blood (CB) cells and peripheral blood (PB) CD34⁺ cells containing 1×10⁶ cells each were expanded for 11 days. FIG. 15 provides a summary of the timing of expansion, differentiation, and cell collection. The dash line represents DBA patient cells, and the dotted line represents the conditionally immortalized inducible DBA phenotype model. The solid line represents healthy patient cells.

[0618] Antibiotic selection was performed to select virally transformed cells. Cell collection at day 11 showed 100×10⁶ CB cells, and 25×10⁶. Cell collection at day 7 of differentiation showed 400×10⁶ CB cells, and 100×10⁶ peripheral blood cells. Cells conditionally immortalized at day 3 of differentiation were observed to have the capacity to provide a nearly infinite number of cord blood or peripheral blood erythroblast cells. This point in differentiation was chosen as differentiation status was synchronized at the basophilic erythroblast state and cells could be efficiently propagated and cryopreserved. Additionally, this differentiation state is relevant for studying red blood cell diseases.

[0619] A. Normal and Conditionally Immortalized Cells Possess Similar Globin Levels

[0620] RNA-seq was used to compare the levels of expression of hemoglobin-associated genes among normal and conditionally immortalized cord blood and peripheral blood cells. Table 76 shows the Fragments Per Kilobase of transcript per Million (FPKM) for genes HBB, HBA2, HBA1, HBG1, HBG2, and HBD.

TABLE 76
Levels of expression of hemoglobin-associated genes

| | HBB | HBA2 | HBA1 | HBG2 | HBG1 | HBD |
|---|---|---|---|---|---|---|
| CB_Diff_D 7 | 4838.8 | 5836.9 | 4752.4 | 7140.3 | 2959.8 | 142.5 |
| CB_Diff_D 7 | 8292.7 | 11808.6 | 9886.0 | 17258.2 | 5978.3 | 157.4 |
| PB_Diff_D 7 | 82477.9 | 24625.1 | 12582.8 | 4730.0 | 2874.4 | 3001.4 |
| PB_Diff_D 11 | 78937.4 | 23302.6 | 17447.6 | 10035.3 | 7628.8 | 4114.5 |
| CB_CI_DOX | 405.3 | 4495.7 | 3814.3 | 6710.9 | 2799.0 | 51.8 |
| CB_CI_offDOX | 12472.0 | 39725.3 | 29132.5 | 49890.2 | 23010.6 | 195.2 |
| PB_CI_DOX | 38093.6 | 8791.7 | 5896.0 | 3287.6 | 2028.6 | 1753.2 |
| PB_CI_offDOX | 233336 | 50895.4 | 35108.0 | 12421.1 | 7930.0 | 2188.9 |

[0621] These results show no significant differences in the level of expression between normal and conditionally immortalized cells.

### Example 16. Designing Disease Models

[0622] Conditionally immortalized erythroblast cells were genetically engineered via CRISPR and shRNA modulation to model DBA. This technique may be applied to model other diseases as desired. This system affords the ability to attain nearly unlimited amounts of primary cell material i.e., the biomass required for 2D and 3D genomic interrogation. As described above, DBA cell viability dramatically decreases during erythroid differentiation (days 11-18) leading to an insufficient number of DBA cells to perform 2D or 3D analysis.

[0623] To model the DBA phenotype, hematopoietic progenitor cells and erythroblasts were transduced with short hairpin RNAs (shRNAs) targeting RPS19, one of the key ribosomal proteins identified in DBA patients, and targeting p53 to rescue the DBA phenotype. shRPS19-GFPtrad (gene knock-down) was used to transduce both PB and CB conditionally immortalized erythroid cells with conditional shP53. This allowed expansion of DBA model with protection from overexpression of p53 representing an alternative model of DBA disease. GFPtrad expressing cells were magnetically enriched to avoid the need for additional cell sorting equipment. GFPtrad also allowed for rapid selection of cells when the transgene is toxic to the cells (e.g. shRPS19). The GFP reporter was observed to be inside and outside of the cells to allow multicolor epitope flow cytometry through an anti-GFP antigen presenting cell because only the GFP channel is used.

[0624] In certain embodiments, self-delivering RNA (sdRNA) is used in place of a shRNA. The hydrophobic properties of sdRNA allow it to enter cells without need of transfection reagents. Moreover, it is transient allowing more fine-tuned adjustment of knockdown through concentration of the sdRNA. sdRNA can be “washed off” to return RNA to normal levels more quickly than with Dox inducible shRNAs. sdRNA may also be used both in vivo and in vitro.

[0625] Alternatively, a Cas9 protein and mRNA sgRNA CRISPR system was used to disrupt a single RPS19 allele in both PB and CB conditionally immortalized erythroid cells with conditional shP53. The efficiency of the CRISPR (NHEJ) was assessed using the GeneArt® Genomic Cleavage Detection Kit (ThermoFisher Scientific) using the standard protocol for the kit.

[0626] The DBA phenotype was then conditionally rescued during expansion and differentiation of hematopoietic DBA stem/progenitor cells toward the erythroid lineage. Two different sets of knockdowns were performed, a doxycycline inducible knockdown (mir30 based hairpin design of shRNA) and a constitutive knockdown. Once an effective shRPS19 was identified, cells were treated with compounds to determine whether the disease phenotype was rescued.

[0627] DBA cells have 2-4-fold less RPS19 protein than healthy cells. (See, Gazda, H. T. and Sieff, C. A. (2006), British Journal of Haematology, 135: 149-157. doi:10.1111/j.1365-2141.2006.06268.x, which is hereby incorporated by reference in its entirety). shRNA mediated knockdown of RPS19 was compared in conditionally immortalized cord blood erythroblast and normal cells. shRNAs were identified that resulted in 50-70% expression in the conditionally immortalized erythroblast cells, then in normal cells. Alternatively, overexpression of RPS19 was used in DBA patient cells to rescue the DBA phenotype.

[0628] During days 1-11 of hematopoietic progenitors (CD34+) cell expansion, the number of DBA patient cells are significantly less than the number of normal patient cells as illustrated in FIG. 15. In fact, the number of DBA patient cells is about a third of the number of normal patient cells by day 11. Rescuing the DBA phenotype by inducible overexpression of RPS, RPL, or GATA1 in conditionally immortalized cells resulted in an increase in cell numbers during expansion and during differentiation. Inducible shRPS19 allowed differentiation of DBA-positive model cells to produce the sufficient number of cells for 2D/3D analysis over the 18 days of expansion and differentiation. The conditionally immortal DBA model may be paused indefinitely to produce from 10⁹ to a nearly infinite number of cells, while the inducible DBA model produced about 10⁶ to 10⁷. Both models result in a greater number of cells than from the primary DBA cells (about 10⁴ to 10⁵).

[0629] Examples below describe an immortalized cord-blood erythroblast cell line to produce a large biomass for analysis but that also retains normal cell expression, size, and phenotype.

[0630] A DBA model cell system is set up through shRNA-mediated knockdown of RPS19 or CRISPR removal of RPS19 in the conditionally immortalized cell system and in normal cells. Table 77 summarizes the cell models of DBA that were analyzed.

TABLE 77
Analyzed disease models

| Normal CD34+ cells | Immortalized CD34+ cells | Primary patient cells |
|---|---|---|
| Model 1: CD34+ cells with shRNA | Model 4: Conditionally immortalized (CI) | Model 7: DBA patient cells with Dox |
| targeting RPS19 (shRPS19) | erythroblasts with Dox inducible shP53, and | inducible overexpression of RPS19 |
| | constitutive shRPS19-GFP | |
| Model 2: CD34+ cells differentiated to | Model 5: CI erythroblasts with Dox inducible | Model 8: DBA patient cells with Dox |
| erythroblasts with doxycycline (Dox) | shP53 and CRISPR removal of the RPS19 gene | inducible shP53 |
| inducible shRPS19 | | |
| Model 3: CD34+ cells differentiated to | Model 6: CI erythroblasts with Dox inducible | Model 9: CI DBA patient with Dox |
| erythroblasts with Dox inducible shP53 | overexpression of RPS19 and CRISPR removal | inducible shP53 |
| and constitutive shRPS19 | of the RPS19 gene | |

[0631] shRNAs for RPS19 were analyzed in normal CD34⁺ cells to identify shRNAs whose administration resulted in about 50% expression of RPS19. The RPS19 knockdown cell systems were treated with compounds to rescue the DBA phenotype, and the dose of these compounds were titrated to optimize the concentration.

[0632] A. Optimizing Viral Titers

[0633] HEK cell lines 293FT, 293T, and 293XT were transfected to determine which of these cell lines resulted in enhanced viral production. GFP expression was observed in all transfected cells. Viruses from each cell line were collected and tested for infectiousness. GFP expression was observed in samples of the 293XT cell line each transfected with a virus produced in one of the cell lines. GFP expression was observed in only 293XT and 293T cells and not in 293FT. In fact, virus produced in 293XT cells appeared to be the most infectious. Virus from 293FT was determined not to be infectious. Therefore 293XT cells were selected for virus production onward.

### Example 17. Effects of Different shRNAs on Gene Expression in Normal CD34⁺ Cells

[0634] shRNAs targeting RPS19, p53, or RPL11 were delivered to normal cord blood erythroblast cells using either the pLKO (constitutive) and pTRIPZ (inducible) plasmids described in Example 1. The mRNA expression of the p53 pathway proteins; progenitor factor GATA2; and differentiation factors HBB and GATA1 were measured by qRT-PCR. Cells not transduced with a shRNA as well as cells transduced with a non-targeting shRNA served as controls.

[0635] A. Effects of Constitutive Knockdown

[0636] HBB is associated with differentiation of CD34⁺ cells, and p21 is associated with the p53 pathway. Table 78 shows the relative quantification of expression levels of HBB, p21, p53, RPL11, and RPS19 in cells transduced with plasmids pLKO-p53_sh4, pLKO_p53_sh5, pLKO RPS19_1, pLKO RPS19_2, pLKO RPS19_3, pLKO RPS19_4, and pLKO_RPS19_5 compared to levels in a control pLKO-sNT. GAPDH was used as an internal control.

TABLE 78
Relative quantification of expression levels
of HBB, p21, p53, RPL11, and RPS19

| Sample | Target | CT | RQ | min | max |
|---|---|---|---|---|---|
| RPS19_sh1 | GAPDH | 24.19 | | | |
| RPS19_sh1 | RPS19 | 25.55 | 0.59 | 0.58 | 0.6 |
| RPS19_sh1 | GAPDH | 24.51 | | | |
| RPS19_sh1 | P53 | 27.84 | 1.34 | 1.14 | 1.56 |
| RPS19_sh1 | GAPDH | 24.58 | | | |
| RPS19_sh1 | RPL11 | 27.57 | 0.74 | 0.68 | 0.81 |
| RPS19_sh1 | GAPDH | 24.79 | | | |
| RPS19_sh1 | HBB | 30.11 | 0.04 | 0.04 | 0.05 |
| RPS19_sh2 | GAPDH | 22.14 | | | |
| RPS19_sh2 | RPS19 | 23.84 | 0.46 | 0.45 | 0.48 |
| RPS19_sh2 | GAPDH | 22.46 | | | |
| RPS19_sh2 | P53 | 25.89 | 1.25 | 1.18 | 1.33 |
| RPS19_sh2 | GAPDH | 22.55 | | | |
| RPS19_sh2 | RPL11 | 25.27 | 0.9 | 0.77 | 1.04 |
| RPS19_sh2 | GAPDH | 22.39 | | | |
| RPS19_sh2 | HBB | 23.53 | 0.79 | 0.78 | 0.81 |
| RPS19_sh3 | GAPDH | 26.18 | | | |
| RPS19_sh3 | RPS19 | 26.92 | 0.91 | 0.81 | 1.02 |
| RPS19_sh3 | GAPDH | 26.5 | | | |
| RPS19_sh3 | P53 | 30.03 | 1.17 | 0.9 | 1.52 |
| RPS19_sh3 | GAPDH | 26.48 | | | |
| RPS19_sh3 | RPL11 | 29.38 | 0.79 | 0.69 | 0.9 |
| RPS19_sh3 | GAPDH | 26.52 | | | |
| RPS19_sh3 | HBB | 29.93 | 0.16 | 0.14 | 0.19 |
| RPS19_sh4 | GAPDH | 26.99 | | | |
| RPS19_sh4 | RPS19 | 26.97 | 1.54 | 1.5 | 1.59 |
| RPS19_sh4 | GAPDH | 27.53 | | | |
| RPS19_sh4 | P53 | 30.98 | 1.24 | 1.19 | 1.28 |
| RPS19_sh4 | GAPDH | 27.7 | | | |
| RPS19_sh4 | RPL11 | 30.23 | 1.02 | 0.91 | 1.14 |
| RPS19_sh4 | GAPDH | 27.64 | | | |
| RPS19_sh4 | HBB | 29.69 | 0.42 | 0.39 | 0.45 |
| RPS19_sh5 | GAPDH | 23.02 | | | |
| RPS19_sh5 | RPS19 | 24.24 | 0.65 | 0.59 | 0.72 |
| RPS19_sh5 | GAPDH | 23.48 | | | |
| RPS19_sh5 | P53 | 26.74 | 1.41 | 1.22 | 1.64 |
| RPS19_sh5 | GAPDH | 23.6 | | | |
| RPS19_sh5 | RPL11 | 26.04 | 1.09 | 1.04 | 1.14 |
| RPS19_sh5 | GAPDH | 23.41 | | | |
| RPS19_sh5 | HBB | 24.63 | 0.75 | 0.71 | 0.78 |
| shNT | GAPDH | 21 | | | |
| shNT | RPS19 | 21.6 | 1 | 0.94 | 1.07 |
| shNT | GAPDH | 21.64 | | | |
| shNT | P53 | 25.4 | 1 | 0.94 | 1.07 |
| shNT | GAPDH | 21.66 | | | |
| shNT | RPL11 | 24.22 | 1 | 0.97 | 1.04 |
| shNT | GAPDH | 21.35 | | | |
| shNT | HBB | 22.15 | 1 | 0.94 | 1.07 |
| p53_sh4 | GAPDH | 22.74 | | | |
| p53_sh4 | RPS19 | 22.9 | 1.36 | 1.34 | 1.38 |
| p53_sh4 | GAPDH | 23.06 | | | |
| p53_sh4 | P53 | 29.97 | 0.11 | 0.09 | 0.14 |
| p53_sh4 | GAPDH | 23.06 | | | |
| p53_sh4 | RPL11 | 25.73 | 0.92 | 0.89 | 0.96 |
| p53_sh4 | GAPDH | 22.82 | | | |
| p53_sh4 | HBB | 24.38 | 0.59 | 0.58 | 0.61 |
| p53_sh5 | GAPDH | 22.44 | | | |
| p53_sh5 | RPS19 | 22.91 | 1.09 | 1.04 | 1.15 |
| p53_sh5 | GAPDH | 22.46 | | | |
| p53_sh5 | P53 | 30.77 | 0.04 | 0.02 | 0.08 |
| p53_sh5 | GAPDH | 22.3 | | | |
| p53_sh5 | RPL11 | 24.72 | | | |
| p53_sh5 | GAPDH | 22.09 | | | |
| p53_sh5 | HBB | 20.98 | 3.75 | 3.66 | 3.84 |

[0637] RPS19 knockdown was observed to lead to consistent activation of the p53 pathway and decreased expression of the differentiation factors HBB and GATA1, as shown in Table 78. Cells transduced with pLKO_p53_sh4 or pLKO_p53_sh5 with an shRNA targeting p53 had a reduction in expression of p53 compared to the control. For cells transduced with pLKO_p53_sh3, expression of other the other genes analyzed was unchanged.

[0638] To determine the effect of p53 knockdown on expression of other genes, cells were also transduced with pLKO containing p53_sh4 or p53_sh5. To determine the effect of RPS19 knockdown on expression of other genes, cells were transduced with pLKO containing RPS19_sh1, RPS19_sh2, RPS19_sh3, RPS19_sh4, RPS19_sh5, and sh_NT as a control. The relative quantifications of expression of differentiation associated genes ALAS2 and HBB, immortalization factors BCLXL and MYC, and targets of interest p53 and RPS19 are shown in Table 79.

TABLE 79
Relative quantification of expression levels
of ALAS2, HBB, BCLXL, MYC, p53, and RPS19

| Sample | Target | CT | RQ | min | max |
|---|---|---|---|---|---|
| p53_sh4 | RPS19 | 22.48 | 0.48 | 0.40 | 0.59 |
| p53_sh4 | p53 | 29.65 | 0.14 | 0.11 | 0.17 |
| p53_sh4 | HBB | 25.19 | 0.36 | 0.33 | 0.40 |
| p53_sh4 | ALAS2 | 26.75 | 1.64 | 1.45 | 1.86 |
| p53_sh4 | MYC | 24.33 | 1.22 | 1.11 | 1.34 |
| p53_sh4 | BCLXL | 23.01 | 1.01 | 0.91 | 1.12 |
| p53_sh4 | p21 | 27.38 | 8.71 | 7.75 | 9.79 |
| p53_sh4 | B-ACTIN | 24.26 | | | |
| p53_sh5 | RPS19 | 21.45 | 0.44 | 0.39 | 0.49 |
| p53_sh5 | p53 | 29.82 | 0.05 | 0.04 | 0.08 |
| p53_sh5 | HBB | 20.07 | 5.56 | 4.56 | 6.77 |
| p53_sh5 | ALAS2 | 24.38 | 3.78 | 3.39 | 4.21 |
| p53_sh5 | MYC | 22.73 | 1.64 | 1.43 | 1.89 |
| p53_sh5 | BCLXL | 21.52 | 1.26 | 1.12 | 1.42 |
| p53_sh5 | p21 | 32.53 | 0.11 | 0.09 | 0.14 |
| p53_sh5 | B-ACTIN | 23.09 | | | |
| RPS19_sh1 | RPS19 | 21.13 | 0.47 | 0.37 | 0.60 |
| RPS19_sh1 | p53 | 26.04 | 0.65 | 0.52 | 0.81 |
| RPS19_sh1 | HBB | 30.86 | 0.00 | 0.00 | 0.00 |
| RPS19_sh1 | ALAS2 | 31.90 | 0.02 | 0.02 | 0.02 |
| RPS19_sh1 | MYC | 24.19 | 0.52 | 0.46 | 0.59 |
| RPS19_sh1 | BCLXL | 23.20 | 0.34 | 0.31 | 0.37 |
| RPS19_sh1 | p21 | 30.03 | 0.53 | 0.49 | 0.58 |
| RPS19_sh1 | B-ACTIN | 22.88 | | | |
| RPS19_sh2 | RPS19 | 20.80 | 0.52 | 0.44 | 0.61 |
| RPS19_sh2 | p53 | 24.99 | 1.18 | 1.05 | 1.32 |
| RPS19_sh2 | HBB | 25.39 | 0.11 | 0.09 | 0.12 |
| RPS19_sh2 | ALAS2 | 28.14 | 0.21 | 0.17 | 0.27 |
| RPS19_sh2 | MYC | 23.60 | 0.68 | 0.66 | 0.70 |
| RPS19_sh2 | BCLXL | 22.80 | 0.39 | 0.35 | 0.45 |
| RPS19_sh2 | p21 | 29.48 | 0.68 | 0.60 | 0.78 |
| RPS19_sh2 | B-ACTIN | 22.68 | | | |
| RPS19_sh3 | RPS19 | 22.50 | 0.42 | 0.34 | 0.52 |
| RPS19_sh3 | p53 | 26.66 | 0.97 | 0.54 | 1.73 |
| RPS19_sh3 | HBB | 32.13 | 0.00 | 0.00 | 0.00 |
| RPS19_sh3 | ALAS2 | 33.78 | 0.01 | 0.01 | 0.01 |
| RPS19_sh3 | MYC | 25.40 | 0.51 | 0.45 | 0.58 |
| RPS19_sh3 | BCLXL | 24.14 | 0.41 | 0.35 | 0.48 |
| RPS19_sh3 | p21 | 30.24 | 1.06 | 0.92 | 1.21 |
| RPS19_sh3 | B-ACTIN | 24.08 | | | |
| RPS19_sh4 | RPS19 | 27.49 | 0.43 | 0.33 | 0.56 |
| RPS19_sh4 | p53 | 30.85 | 1.74 | 1.23 | 2.47 |
| RPS19_sh4 | HBB | 33.64 | 0.03 | 0.02 | 0.04 |
| RPS19_sh4 | ALAS2 | 34.96 | 0.16 | 0.13 | 0.20 |
| RPS19_sh4 | MYC | 29.42 | 1.03 | 0.85 | 1.26 |
| RPS19_sh4 | BCLXL | 28.08 | 0.87 | 0.70 | 1.08 |
| RPS19_sh4 | p21 | 31.68 | 12.78 | 10.25 | 15.92 |
| RPS19_sh4 | B-ACTIN | 29.11 | | | |
| RPS19_sh5 | RPS19 | 23.80 | 0.15 | 0.12 | 0.18 |
| RPS19_sh5 | p53 | 26.84 | 0.74 | 0.63 | 0.88 |
| RPS19_sh5 | HBB | 26.09 | 0.15 | 0.12 | 0.17 |
| RPS19_sh5 | ALAS2 | 26.48 | 1.51 | 1.27 | 1.78 |
| RPS19_sh5 | MYC | 23.70 | 1.43 | 1.16 | 1.77 |
| RPS19_sh5 | BCLXL | 22.64 | 0.99 | 0.84 | 1.17 |
| RPS19_sh5 | p21 | 27.58 | 5.75 | 4.72 | 7.00 |
| RPS19_sh5 | B-ACTIN | 23.86 | | | |
| sh_NT | RPS19 | 19.98 | 1.00 | 0.77 | 1.29 |
| sh_NT | p53 | 25.35 | 1.00 | 0.51 | 1.96 |
| sh_NT | HBB | 22.27 | 1.00 | 0.93 | 1.07 |
| sh_NT | ALAS2 | 26.02 | 1.00 | 0.87 | 1.15 |
| sh_NT | MYC | 23.17 | 1.00 | 0.89 | 1.12 |
| sh_NT | BCLXL | 21.58 | 1.00 | 0.67 | 1.49 |
| sh_NT | p21 | 29.05 | 1.00 | 0.93 | 1.08 |
| sh_NT | B-ACTIN | 22.81 | | | |

[0639] RPS19_sh4 and RPS19_sh5 were observed to result in a 12.8 and 5.8-fold increase in expression of p21, respectively compared to the level of expression observed for the p53 knockdowns.

[0640] B. Effects of Inducible Knockdown

[0641] Hematopoietic progenitor CD34⁺ cells were transduced with the pTRIPZ inducible lentiviral plasmids containing p53_sh1, puro_shNT, RPL11_1, RPL11_2, RPS19_1, or RPS19_2. Table 80 shows the relative quantification of expression levels of HBB, p21, p53, RPL11, and RPS19 in cells transduced with inducible pTRIPZ.

TABLE 80
Relative quantification of expression levels of HBB, p21, p53, RPL11, and RPS19

| Sample | Target | CT | RQ | min | max | Sample | Target | CT | RQ | min | max |
|---|---|---|---|---|---|---|---|---|---|---|---|
| RPS19_2 | p53 | 25.24 | 1.12 | 0.96 | 1.31 | RPL11_1 | p53 | 24.70 | 2.31 | 1.91 | 2.80 |
| RPS19_2 | RPL11 | 20.55 | 1.46 | 1.09 | 1.96 | RPL11_1 | RPL11 | 23.75 | 0.23 | 0.15 | 0.35 |
| RPS19_2 | RPS19 | 20.73 | 0.77 | 0.66 | 0.89 | RPL11_1 | RPS19 | 19.66 | 2.30 | 1.76 | 3.00 |
| RPS19_2 | p21 | 26.82 | 1.73 | 1.37 | 2.19 | RPL11_1 | p21 | 23.66 | 22.15 | 17.89 | 27.43 |
| RPS19_2 | HBB | 25.88 | 0.55 | 0.45 | 0.67 | RPL11_1 | HBB | 26.44 | 0.53 | 0.45 | 0.63 |
| RPS19_2 | B-ACTIN | 21.22 | | | | RPL11_1 | B-ACTIN | 21.73 | | | |
| RPS19_1 | p53 | 25.12 | 1.66 | 1.27 | 2.17 | puro_shNT | p53 | 25.25 | 1.00 | 0.85 | 1.18 |
| RPS19_1 | RPL11 | 20.62 | 1.90 | 1.32 | 2.74 | puro_shNT | RPL11 | 20.94 | 1.00 | 0.80 | 1.25 |
| RPS19_1 | RPS19 | 21.89 | 0.47 | 0.41 | 0.54 | puro_shNT | RPS19 | 20.20 | 1.00 | 0.82 | 1.22 |
| RPS19_1 | p21 | 25.51 | 5.87 | 4.31 | 7.98 | puro_shNT | p21 | 27.46 | 1.00 | 0.74 | 1.36 |
| RPS19_1 | HBB | 26.47 | 0.50 | 0.40 | 0.63 | puro_shNT | HBB | 24.87 | 1.00 | 0.78 | 1.28 |
| RPS19_1 | B-ACTIN | 21.67 | | | | puro_shNT | B-ACTIN | 21.07 | | | |

| Sample | Target | CT | RQ | min | max |
|---|---|---|---|---|---|
| RPL11_2 | p53 | 25.52 | 2.35 | 1.91 | 2.88 |
| RPL11_2 | RPL11 | 23.93 | 0.36 | 0.27 | 0.47 |
| RPL11_2 | RPS19 | 19.86 | 3.58 | 3.22 | 3.99 |
| RPL11_2 | p21 | 24.62 | 20.43 | 15.77 | 26.46 |
| RPL11_2 | HBB | 26.79 | 0.75 | 0.67 | 0.84 |
| RPL11_2 | B-ACTIN | 22.57 | | | |
| p53_sh1 | p53 | 26.40 | 0.43 | 0.35 | 0.53 |
| p53_sh1 | RPL11 | 20.90 | 0.98 | 0.84 | 1.14 |
| p53_sh1 | RPS19 | 20.09 | 1.02 | 0.87 | 1.20 |
| p53_sh1 | p21 | 27.42 | 0.98 | 0.80 | 1.20 |
| p53_sh1 | HBB | 25.25 | 0.73 | 0.59 | 0.91 |
| p53_sh1 | B-ACTIN | 20.99 | | | |

[0642] Cells transduced with sh1 demonstrated lower levels of RPS19 mRNA compared to non-transduced cells. This showed that the pTRIPZ inducible shRNA was working efficiently. Expression of p21 was significantly increased in cells transduced with RPL11 RNA knockdown vectors pTRIPZ_RPL11_1 and pTRIPZ_RPL11_2, confirming the DBA-like phenotype.

[0643] The relative expression of GATA1, GATA2, MDM2, BAX, and BAG1 were also analyzed in cells transduced with a pTRIPZ dox inducible shRNA. Results are shown in Table 81. B-Actin was used as an internal control.

TABLE 81
Relative quantification of expression levels

| Sample | Target | CT | RQ | min | max | Sample | Target | CT | RQ | min | max |
|---|---|---|---|---|---|---|---|---|---|---|---|
| p53_sh1 | GATA1 | 24.14 | 0.91 | 0.76 | 1.08 | RPL11_2 | GATA1 | 26.09 | 0.71 | 0.66 | 0.76 |
| p53_sh1 | GATA2 | 24.51 | 0.97 | 0.85 | 1.11 | RPL11_2 | GATA2 | 25.80 | 1.21 | 1.01 | 1.46 |
| p53_sh1 | MDM2 | 25.47 | 0.84 | 0.76 | 0.93 | RPL11_2 | MDM2 | 24.92 | 3.75 | 3.48 | 4.03 |
| p53_sh1 | BAX | 23.46 | 0.91 | 0.70 | 1.18 | RPL11_2 | BAX | 23.67 | 2.40 | 1.98 | 2.90 |
| p53_sh1 | BAG1 | 25.11 | 1.04 | 0.92 | 1.18 | RPL11_2 | BAG1 | 25.97 | 1.75 | 1.61 | 1.90 |
| p53_sh1 | B-ACTIN | 20.93 | | | | RPL11_2 | B-ACTIN | 22.53 | | | |
| puro_shNT | GATA1 | 24.08 | 1.00 | 0.89 | 1.12 | RPS19_1 | GATA1 | 25.16 | 0.67 | 0.60 | 0.76 |
| puro_shNT | GATA2 | 24.56 | 1.00 | 0.83 | 1.20 | RPS19_1 | GATA2 | 24.46 | 1.53 | 1.24 | 1.89 |
| puro_shNT | MDM2 | 25.31 | 1.00 | 0.86 | 1.17 | RPS19_1 | MDM2 | 24.37 | 2.72 | 2.41 | 3.08 |
| puro_shNT | BAX | 23.41 | 1.00 | 0.86 | 1.16 | RPS19_1 | BAX | 23.27 | 1.57 | 1.32 | 1.87 |
| puro_shNT | BAG1 | 25.26 | 1.00 | 0.86 | 1.16 | RPS19_1 | BAG1 | 25.55 | 1.16 | 1.03 | 1.31 |
| puro_shNT | B-ACTIN | 21.01 | | | | RPS19_1 | B-ACTIN | 21.53 | | | |
| RPL11_1 | GATA1 | 25.49 | 0.58 | 0.51 | 0.66 | RPS19_2 | GATA1 | 24.43 | 0.87 | 0.77 | 0.99 |
| RPL11_1 | GATA2 | 25.01 | 1.12 | 0.96 | 1.31 | RPS19_2 | GATA2 | 24.42 | 1.23 | 0.99 | 1.51 |
| RPL11_1 | MDM2 | 24.32 | 3.04 | 2.64 | 3.50 | RPS19_2 | MDM2 | 25.00 | 1.38 | 1.17 | 1.62 |
| RPL11_1 | BAX | 23.37 | 1.58 | 1.41 | 1.77 | RPS19_2 | BAX | 23.20 | 1.29 | 1.18 | 1.41 |
| RPL11_1 | BAG1 | 25.63 | 1.18 | 1.01 | 1.39 | RPS19_2 | BAG1 | 25.31 | 1.08 | 0.93 | 1.25 |
| RPL11_1 | B-ACTIN | 21.63 | | | | RPS19_2 | B-ACTIN | 21.17 | | | |

[0644] Among the p53 pathway proteins analyzed, sh1 transduction lead to a higher expression of BAX, P21, P53, and MDM2 mRNA, compared to sh2 transduction. Additionally, the mRNA expression levels of the progenitor protein GATA2 were higher upon sh1 transduction compared to sh2 transduction. mRNA levels of the differentiation associated proteins HBB and GATA1 were higher following sh2 transduction compared to their levels upon sh1 transduction.

[0645] C. Reversion of Mortality

[0646] Early erythroblast progenitor cells derived from cord blood were transduced using lentiviral vectors harboring overexpression constructs of apoptosis-associated genes, BCLXL and MYC, under the control of a doxycycline inducible promoter. The mRNA expression of the differentiation markers ALAS2, HBB and the targets of interest, namely, p53 and RPS19 were measured using qRT-PCR, and results are shown in Table 82.

TABLE 82
Relative quantification of expression of RPS19, p53, HBB, ALAS2, MYC, BCLXL, and p21

| Sample | Target | CT | RQ | min | max | Sample | Target | CT | RQ | min | max |
|---|---|---|---|---|---|---|---|---|---|---|---|
| D2-dox+ | RPS19 | 25.67 | 1.00 | 0.88 | 1.13 | D4-Dox− | RPS19 | 23.43 | 0.28 | 0.22 | 0.36 |
| D2-dox+ | p53 | 29.60 | 1.00 | 0.87 | 1.15 | D4-Dox− | p53 | 27.72 | 0.22 | 0.16 | 0.30 |
| D2-dox+ | HBB | 26.81 | 1.00 | 0.83 | 1.20 | D4-Dox− | HBB | 20.46 | 4.89 | 3.94 | 6.07 |
| D2-dox+ | ALAS2 | 27.74 | 1.00 | 0.75 | 1.33 | D4-Dox− | ALAS2 | 23.77 | 0.94 | 0.72 | 1.22 |
| D2-dox+ | MYC | 25.80 | 1.00 | 0.82 | 1.21 | D4-Dox− | MYC | 25.81 | 0.06 | 0.05 | 0.07 |
| D2-dox+ | BCLXL | 24.91 | 1.00 | 0.85 | 1.17 | D4-Dox− | BCLXL | 24.72 | 0.07 | 0.05 | 0.09 |
| D2-dox+ | p21 | 30.93 | 1.00 | 0.86 | 1.16 | D4-Dox− | p21 | 25.85 | 2.03 | 1.59 | 2.59 |
| D2-dox+ | B-ACTIN | 27.17 | | | | D4-Dox− | B-ACTIN | 23.11 | | | |
| D2-Dox− | RPS19 | 27.10 | 0.28 | 0.26 | 0.30 | D5-Dox− | RPS19 | 22.88 | 0.27 | 0.22 | 0.33 |
| D2-Dox− | p53 | 30.50 | 0.40 | 0.29 | 0.56 | D5-Dox− | p53 | 27.25 | 0.20 | 0.16 | 0.25 |
| D2-Dox− | HBB | 23.42 | 7.81 | 7.24 | 8.44 | D5-Dox− | HBB | 21.03 | 2.13 | 1.76 | 2.58 |
| D2-Dox− | ALAS2 | 25.75 | 2.98 | 2.55 | 3.48 | D5-Dox− | ALAS2 | 24.38 | 0.40 | 0.30 | 0.53 |
| D2-Dox− | MYC | 29.96 | 0.04 | 0.04 | 0.04 | D5-Dox− | MYC | 25.23 | 0.06 | 0.05 | 0.07 |
| D2-Dox− | BCLXL | 26.29 | 0.29 | 0.24 | 0.35 | D5-Dox− | BCLXL | 24.83 | 0.04 | 0.03 | 0.05 |
| D2-Dox− | p21 | 29.30 | 2.31 | 1.85 | 2.88 | D5-Dox− | p21 | 25.56 | 1.61 | 1.25 | 2.07 |
| D2-Dox− | B-ACTIN | 26.75 | | | | D5-Dox− | B-ACTIN | 22.49 | | | |
| D3-Dox− | RPS19 | 23.47 | 0.21 | 0.16 | 0.28 | D6-dox− | RPS19 | 23.57 | 0.21 | 0.17 | 0.26 |
| D3-Dox− | p53 | 27.43 | 0.21 | 0.16 | 0.27 | D6-dox− | p53 | 27.91 | 0.16 | 0.14 | 0.19 |
| D3-Dox− | HBB | 19.89 | 5.57 | 4.33 | 7.16 | D6-dox− | HBB | 23.28 | 0.57 | 0.51 | 0.64 |
| D3-Dox− | ALAS2 | 22.77 | 1.44 | 1.06 | 1.97 | D6-dox− | ALAS2 | 25.99 | 0.17 | 0.15 | 0.19 |
| D3-Dox− | MYC | 26.68 | 0.03 | 0.02 | 0.03 | D6-dox− | MYC | 26.32 | 0.03 | 0.03 | 0.04 |
| D3-Dox− | BCLXL | 23.70 | 0.11 | 0.08 | 0.14 | D6-dox− | BCLXL | 25.77 | 0.03 | 0.02 | 0.03 |
| D3-Dox− | p21 | 26.42 | 1.05 | 0.78 | 1.43 | D6-dox− | p21 | 26.41 | 1.14 | 0.96 | 1.37 |
| D3-Dox− | B-ACTIN | 22.74 | | | | D6-dox− | B-ACTIN | 22.85 | | | |

[0647] The mRNA expression of MYC and BCLXL was highest upon doxycycline induction and decreased 2, 3, 4, 5, and 6 days after doxycycline was withdrawn. The mRNA expression of the differentiation markers ALAS2 and HBB increased immediately after doxycycline was withdrawn and gradually decreased up to day 6 of doxycycline withdrawal. The mRNA expression pattern of MYC and BCLXL sharply decreased 2 days after doxycycline was withdrawn as shown in Table 82. The decrease in the mRNA expression of the immortalization factors correlated with an increase in the mRNA expression of the differentiation factors. This confirms that immortality can quickly be reversed upon system shut off via retracting immortalization factors.

[0648] D. Comparing Cell Size after Removal of Dox in Cells Transduced with Model 2

[0649] Cell size is shown in Table 83 during doxycycline induction, and immediately following withdrawal of doxycycline. Conditionally immortalized cells maintained in the presence of doxycycline were observed to have a cell size between 12-13.5 μm. By day 5 off doxycycline cells dramatically decreased in size to approximately 9 μm, which demonstrates a reversion of mortality and differentiation to late erythroblast stage.

TABLE 83
Cell size

| Days on DOX | Cell size (μM) | Days on DOX | Cell size (μM) | Days off DOX | Cell size (μM) | Days off DOX | Cell size (μM) |
|---|---|---|---|---|---|---|---|
| 2 | 12.6 | 5 | 12.7 | 2 | 9.7 | 5 | 9.0 |
| 3 | 13.3 | 6 | 12.0 | 3 | 10.5 | 6 | 9.1 |
| 4 | 13.5 | | | 4 | 10.1 | | |

[0650] E. Effects of Knockdown of Both RPS19 and shP53

[0651] Further qRT-PCR analysis of the parental cord blood IRES cell line with Dox inducible p53 (CB-IRES-p53-GFPtrad) that were separated using turbo-GFP magnetic beads is shown in Table 84. GAPDH was used as an internal control.

TABLE 84
Percent of knockdown

| | NT(shP53) | shRPS19_1 + shP53 | shRPS19_2 + shP53 |
|---|---|---|---|
| p53 | 4 | 4 | 4 |
| RPS19 | 106 | 47 | 49 |

[0652] The cells administered the shRPS19 were observed to have an about 50% knockdown of RPS19, while p53 remained constant. p53 remains constant due to the NT control expressing the shRNA for p53. p53 is completely reduced in all three lines. The RPS19 shRNA constructs were normalized to the NT (shp53) control.

### Example 18. Effects of Different shRNAs on Gene Expression in Conditionally Immortalized Cells

[0653] qRT-PCR was used to analyze expression of p53 pathway-associated genes p21, RPS19, and RPL11; differentiation marker HBB; and internal control B-ACTIN in the cord blood conditionally immortalized CD34+ (CB-CI-IRES-CD34+) cell line transduced with the pTRIPZ plasmid containing NT (Model 9), RPL11_sh1 (Model 4) and RPL11_sh2 (Model 5) for a RPL11 knockdown, and RPS19_sh1 (Model 6) and RPS19_sh2 (Model 7) for a RPS19 knockdown. Results are shown in Table 85.

TABLE 85
Relative quantification of gene expression of RPS19, RPL11, p21, and HBB

| Sample | Target | CT | RQ | min | max | Sample | Target | CT | RQ | min | max |
|---|---|---|---|---|---|---|---|---|---|---|---|
| pTRIPZ NT | RPS19 | 20.23 | 1.00 | 0.90 | 1.12 | RPS19 sh1 | RPS19 | 22.51 | 0.30 | 0.21 | 0.41 |
| pTRIPZ_NT | RPL11 | 20.98 | 1.00 | 0.88 | 1.13 | RPS19_sh1 | RPL11 | 20.91 | 1.52 | 1.10 | 2.08 |
| pTRIPZ_NT | p21 | 25.78 | 1.00 | 0.83 | 1.20 | RPS19_sh1 | p21 | 25.87 | 1.35 | 0.95 | 1.94 |
| pTRIPZ NT | HBB | 25.78 | 1.00 | 0.79 | 1.27 | RPS19_sh1 | HBB | 25.11 | 2.28 | 1.64 | 3.17 |
| pTRIPZ_NT | B-ACTIN | 21.59 | | | | RPS19_sh1 | B-ACTIN | 22.12 | | | |
| RPL11_sh1 | RPS19 | 21.99 | 1.48 | 1.25 | 1.74 | RPS19_sh2 | RPS19 | 21.46 | 0.46 | 0.38 | 0.54 |
| RPL11_sh1 | RPL11 | 22.94 | 1.29 | 0.50 | 3.31 | RPS19_sh2 | RPL11 | 20.78 | 1.23 | 1.07 | 1.42 |
| RPL11_sh1 | p21 | 25.80 | 4.96 | 3.96 | 6.22 | RPS19_sh2 | p21 | 26.16 | 0.82 | 0.59 | 1.13 |
| RPL11_sh1 | HBB | 27.01 | 2.14 | 1.74 | 2.64 | RPS19_sh2 | HBB | 25.33 | 1.46 | 1.14 | 1.88 |
| RPL11_sh1 | B-ACTIN | 23.92 | | | | RPS19_sh2 | B-ACTIN | 21.69 | | | |
| RPL11_sh2 | RPS19 | 21.45 | 1.28 | 1.09 | 1.50 | | | | | | |
| RPL11_sh2 | RPL11 | 22.83 | 0.83 | 0.72 | 0.95 | | | | | | |
| RPL11_sh2 | p21 | 25.93 | 2.68 | 2.17 | 3.32 | | | | | | |
| RPL11_sh2 | HBB | 27.33 | 1.02 | 0.88 | 1.19 | | | | | | |
| RPL11_sh2 | B-ACTIN | 23.17 | | | | | | | | | |

[0654] A. Comparing Gene Expression Levels During Expansion and Differentiation

[0655] qRT-PCR was used to determine the levels of expression of ALAS2, GAPDH, GATA1, GATA2, HBB, and p53 in differentiated CB-CI-IRES cells using GAPDH as an internal control as shown in Table 86.

TABLE 86
Relative quantification of expression of GATA1, GATA2, HBB, ALAS2, and p53

| Sample | Target | CT | RQ | min | max | Sample | Target | CT | RQ | min | max |
|---|---|---|---|---|---|---|---|---|---|---|---|
| p53sh1-DIFF | GAPDH | 19.66 | | | | p53sh3-DIFF | GAPDH | 20.68 | | | |
| p53sh1-DIFF | GATA1 | 23.94 | 1.47 | 1.44 | 1.50 | p53sh3-DIFF | GATA1 | 23.88 | 3.09 | 2.87 | 3.32 |
| p53sh1-DIFF | GAPDH | 20.00 | | | | p53sh3-DIFF | GAPDH | 20.44 | | | |
| p53sh1-DIFF | GATA2 | 24.09 | 0.34 | 0.06 | 1.81 | p53sh3-DIFF | GATA2 | 25.03 | 0.24 | 0.23 | 0.25 |
| p53sh1-DIFF | GAPDH | 19.60 | | | | p53sh3-DIFF | GAPDH | 21.76 | | | |
| p53sh1-DIFF | HBB | 24.03 | 2.40 | 2.27 | 2.54 | p53sh3-DIFF | HBB | 24.91 | 5.83 | 5.42 | 6.27 |
| p53sh1-DIFF | GAPDH | 19.90 | | | | p53sh3-DIFF | GAPDH | 20.29 | | | |
| p53sh1-DIFF | ALAS2 | 22.52 | 4.83 | 2.38 | 9.83 | p53sh3-DIFF | ALAS2 | 22.28 | 7.52 | 6.99 | 8.09 |
| p53sh1-DIFF | GAPDH | 19.77 | | | | p53sh3-DIFF | GAPDH | 20.37 | | | |
| p53sh1-DIFF | p53 | 28.29 | 0.12 | 0.11 | 0.13 | p53sh3-DIFF | p53 | 28.93 | 0.12 | 0.10 | 0.14 |
| p53sh2-DIFF | GAPDH | 19.55 | | | | shNT-DIFF | GAPDH | 20.07 | | | |
| p53sh2-DIFF | GATA1 | 24.14 | 1.18 | 1.15 | 1.20 | shNT-DIFF | GATA1 | 24.90 | 1.00 | 0.97 | 1.03 |
| p53sh2-DIFF | GAPDH | 19.73 | | | | shNT-DIFF | GAPDH | 20.71 | | | |
| p53sh2-DIFF | GATA2 | 23.95 | 0.31 | 0.28 | 0.34 | shNT-DIFF | GATA2 | 23.23 | 1.00 | 0.79 | 1.27 |
| p53sh2-DIFF | GAPDH | 19.75 | | | | shNT-DIFF | GAPDH | 20.02 | | | |
| p53sh2-DIFF | HBB | 25.37 | 1.06 | 0.93 | 1.22 | shNT-DIFF | HBB | 25.72 | 1.00 | 0.87 | 1.15 |
| p53sh2-DIFF | GAPDH | 19.50 | | | | shNT-DIFF | GAPDH | 20.45 | | | |
| p53sh2-DIFF | ALAS2 | 22.76 | 3.11 | 2.68 | 3.61 | shNT-DIFF | ALAS2 | 25.35 | 1.00 | 0.94 | 1.06 |
| p53sh2-DIFF | GAPDH | 19.62 | | | | shNT-DIFF | GAPDH | 20.09 | | | |
| p53sh2-DIFF | p53 | 28.37 | 0.10 | 0.09 | 0.11 | shNT-DIFF | p53 | 25.54 | 1.00 | 0.92 | 1.08 |

[0656] Gene expression was compared for CB-CI-IRES cells during expansion and differentiation. Table 87 shows the differences in expression of differentiation markers GATA1, GATA2, and HBB and p53 in erythroid cells transduced with different lentivirus resulting in a p53 knockdown. GAPDH was used as an internal control.

TABLE 87
Relative quantification of expression levels of GATA1, GATA2, HBB, and p5

| Sample | Target | CT | RQ | min | max | Sample | Target | CT | RQ | min | max |
|---|---|---|---|---|---|---|---|---|---|---|---|
| p53sh1-Exp | GAPDH | 19.89 | | | | p53sh2-DIFF | GAPDH | 19.55 | | | |
| p53sh1-Exp | GATA1 | 24.09 | 1.55 | 1.42 | 1.69 | p53sh2-DIFF | GATA1 | 24.14 | 1.18 | 1.15 | 1.20 |
| p53sh1-Exp | GAPDH | 20.42 | | | | p53sh2-DIFF | GAPDH | 19.73 | | | |
| p53sh1-Exp | GATA2 | 23.55 | 0.66 | 0.38 | 1.14 | p53sh2-DIFF | GATA2 | 23.95 | 0.31 | 0.28 | 0.34 |
| p53sh1-Exp | GAPDH | 19.82 | | | | p53sh2-DIFF | GAPDH | 19.75 | | | |
| p53sh1-Exp | HBB | 20.44 | 33.75 | 31.73 | 35.91 | p53sh2-DIFF | HBB | 25.37 | 1.06 | 0.93 | 1.22 |
| p53sh1-Exp | GAPDH | 20.25 | | | | p53sh2-DIFF | GAPDH | 19.50 | | | |
| p53sh1-Exp | ALAS2 | 22.66 | 5.61 | 4.27 | 7.37 | p53sh2-DIFF | ALAS2 | 22.76 | 3.11 | 2.68 | 3.61 |
| p53sh1-Exp | GAPDH | 20.04 | | | | p53sh2-DIFF | GAPDH | 19.62 | | | |
| p53sh1-Exp | p53 | 28.06 | 0.17 | 0.14 | 0.20 | p53sh2-DIFF | p53 | 28.37 | 0.10 | 0.09 | 0.11 |
| shNT-Exp | GAPDH | 22.02 | | | | p53sh3-DIFF | GAPDH | 20.68 | | | |
| shNT-Exp | GATA1 | 26.80 | 1.04 | 0.97 | 1.10 | p53sh3-DIFF | GATA1 | 23.88 | 3.09 | 2.87 | 3.32 |
| shNT-Exp | GAPDH | 20.67 | | | | p53sh3-DIFF | GAPDH | 20.44 | | | |
| shNT-Exp | GATA2 | 23.61 | 0.75 | 0.54 | 1.03 | p53sh3-DIFF | GATA2 | 25.03 | 0.24 | 0.23 | 0.25 |
| shNT-Exp | GAPDH | 19.81 | | | | p53sh3-DIFF | GAPDH | 21.76 | | | |
| shNT-Exp | HBB | 22.45 | 8.34 | 8.20 | 8.48 | p53sh3-DIFF | HBB | 24.91 | 5.83 | 5.42 | 6.27 |
| shNT-Exp | GAPDH | 20.49 | | | | p53sh3-DIFF | GAPDH | 20.29 | | | |
| shNT-Exp | ALAS2 | 24.07 | 2.48 | 1.78 | 3.46 | p53sh3-DIFF | ALAS2 | 22.28 | 7.52 | 6.99 | 8.09 |
| shNT-Exp | GAPDH | 19.98 | | | | p53sh3-DIFF | GAPDH | 20.37 | | | |
| shNT-Exp | p53 | 25.89 | 0.73 | 0.59 | 0.89 | p53sh3-DIFF | p53 | 28.93 | 0.12 | 0.10 | 0.14 |

| Sample | Target | CT | RQ | min | max |
|---|---|---|---|---|---|
| p53sh1-DIFF | GAPDH | 19.66 | | | |
| p53sh1-DIFF | GATA1 | 23.94 | 1.47 | 1.44 | 1.50 |
| p53sh1-DIFF | GAPDH | 20.00 | | | |
| p53sh1-DIFF | GATA2 | 24.09 | 0.34 | 0.06 | 1.81 |
| p53sh1-DIFF | GAPDH | 19.60 | | | |
| p53sh1-DIFF | HBB | 24.03 | 2.40 | 2.27 | 2.54 |
| p53sh1-DIFF | GAPDH | 19.90 | | | |
| p53sh1-DIFF | ALAS2 | 22.52 | 4.83 | 2.38 | 9.83 |
| p53sh1-DIFF | GAPDH | 19.77 | | | |
| p53sh1-DIFF | p53 | 28.29 | 0.12 | 0.11 | 0.13 |
| shNT-DIFF | GAPDH | 20.07 | | | |
| shNT-DIFF | GATA1 | 24.90 | 1.00 | 0.97 | 1.03 |
| shNT-DIFF | GAPDH | 20.71 | | | |
| shNT-DIFF | GATA2 | 23.23 | 1.00 | 0.79 | 1.27 |
| shNT-DIFF | GAPDH | 20.02 | | | |
| shNT-DIFF | HBB | 25.72 | 1.00 | 0.87 | 1.15 |
| shNT-DIFF | GAPDH | 20.45 | | | |
| shNT-DIFF | ALAS2 | 25.35 | 1.00 | 0.94 | 1.06 |
| shNT-DIFF | GAPDH | 20.09 | | | |
| shNT-DIFF | p53 | 25.54 | 1.00 | 0.92 | 1.08 |

[0657] Mature erythroid specific genes HBB and ALAS2 were observed to be upregulated, which confirmed that the cells were differentiated.

[0658] B. Changes in Gene Expression Levels of GATA1 and GATA2 Through Day 15 of Differentiation

[0659] ChIP-seq results herein show that GATA1 and GATA2 binds genomic signaling centers in both expanding and differentiated cord blood cells. Changes in expression of GATA1 and GATA2 were further observed starting a day 10 (D10), then measured at days D1-D4, D7-D8, D10-D11, and D14-D15 of differentiation by qRT-PCR. Results are shown in Table 88.

TABLE 88
Relative quantification through cord blood cell differentiation

| Sample | Target | RQ | MAX | MIN | Target | RQ | MAX | MIN |
|---|---|---|---|---|---|---|---|---|
| D10-Exp | GATA1 | 1.00 | 0.92 | 1.09 | GATA2 | 1.00 | 0.58 | 1.72 |
| D1-Diff | GATA1 | 0.88 | 0.80 | 0.97 | GATA2 | 1.11 | 1.05 | 1.17 |
| D2-Diff | GATA1 | 1.05 | 1.02 | 1.09 | GATA2 | 0.70 | 0.53 | 0.93 |
| D3-Diff | GATA1 | 1.43 | 1.38 | 1.49 | GATA2 | 1.36 | 0.95 | 1.95 |
| D4-Diff | GATA1 | 1.87 | 1.74 | 2.02 | GATA2 | 0.67 | 0.64 | 0.70 |
| D7-Diff | GATA1 | 2.66 | 2.39 | 2.95 | GATA2 | 3.20 | 2.61 | 3.91 |
| D8-Diff | GATA1 | 5.05 | 4.77 | 5.35 | GATA2 | 0.82 | 0.77 | 0.87 |
| D8-Diff | GATA1 | 1.78 | 1.64 | 1.94 | GATA2 | 0.66 | 0.58 | 0.75 |
| D10-Diff | GATA1 | 2.35 | 2.31 | 2.39 | GATA2 | 0.34 | 0.32 | 0.37 |
| D11-Diff | GATA1 | 3.04 | 2.83 | 3.26 | GATA2 | 0.36 | 0.34 | 0.39 |
| D14-Diff | GATA1 | 3.41 | 3.27 | 3.55 | GATA2 | 0.30 | 0.27 | 0.34 |
| D15-Diff | GATA1 | 1.50 | 1.42 | 1.57 | GATA2 | 0.24 | 0.20 | 0.30 |

[0660] GATA1 was observed to increase throughout erythroid differentiation, and GATA2 was observed to decrease only at late stage erythroid differentiation.

[0661] C. Differences in Expression of Apoptotic Genes

[0662] Gene expression of differentiation marker ALAS2 and apoptotic markers BA and GADD45A were compared were compared between expansion Day 11 (Exp_D11) and Differentiation Day 7 (Diff_D7) using qRT-PCR. GAPDH was used as an internal control. Table 89 provides the qRT-PCR results.

TABLE 89
Relative quantification of ALAS2, BAX, GATA1,
GATA2, HBB, p21, p53, and GADD45A

| SAMPLE | TARGET | RQ | max | min | SAMPLE | TARGET | RQ | max | min |
|---|---|---|---|---|---|---|---|---|---|
| Diff_D7 | ALAS2 | 23.09 | 5.72 | 7.60 | Exp_D11 | ALAS2 | 1.00 | 0.21 | 0.27 |
| Diff_D7 | ALAS2 | 34.98 | 8.28 | 10.85 | Exp_D11 | ALAS2 | 1.19 | 0.05 | 0.05 |
| Diff_D7 | BAX | 1.83 | 0.14 | 0.15 | Exp_D11 | BAX | 1.00 | 0.03 | 0.03 |
| Diff_D7 | BAX | 1.54 | 0.10 | 0.10 | Exp_D11 | BAX | 1.01 | 0.01 | 0.01 |
| Diff_D7 | GADD45A | 5.16 | 0.26 | 0.27 | Exp_D11 | GADD45A | 1.00 | 0.10 | 0.11 |
| Diff_D7 | GADD45A | 3.40 | 0.38 | 0.43 | Exp_D11 | GADD45A | 0.89 | 0.17 | 0.21 |
| Diff_D7 | GATA1 | 1.49 | 0.08 | 0.08 | Exp_D11 | GATA1 | 1.00 | 0.08 | 0.08 |
| Diff_D7 | GATA1 | 2.26 | 0.26 | 0.30 | Exp_D11 | GATA1 | 1.09 | 0.14 | 0.16 |
| Diff_D7 | GATA2 | 2.89 | 1.41 | 2.75 | Exp_D11 | GATA2 | 1.00 | 0.41 | 0.70 |
| Diff_D7 | GATA2 | 1.05 | 0.18 | 0.21 | Exp_D11 | GATA2 | NA | NA | NA |
| Diff_D7 | HBB | 29.57 | 1.36 | 1.43 | Exp_D11 | HBB | 1.00 | 0.02 | 0.02 |
| Diff_D7 | HBB | 35.20 | 0.90 | 0.92 | Exp_D11 | HBB | 0.86 | 0.03 | 0.04 |
| Diff_D7 | P21 | 1.38 | 0.08 | 0.08 | Exp_D11 | P21 | 1.00 | 0.09 | 0.10 |
| Diff_D7 | P21 | 1.00 | 0.15 | 0.17 | Exp_D11 | P21 | 0.96 | 0.06 | 0.06 |
| Diff_D7 | P53 | 1.05 | 0.14 | 0.17 | Exp_D11 | P53 | 1.00 | 0.09 | 0.10 |
| Diff_D7 | P53 | 0.86 | 0.03 | 0.03 | Exp_D11 | P53 | 0.94 | 0.06 | 0.07 |

[0663] Table 89 confirms that GATA1 and GATA2 are expressed in both progenitor and differentiated cells. Further, pro-apoptotic markers, such as BA and GADD45a, were observed to be expressed at a higher level in differentiated cells compared to CD34+ progenitor cells.

[0664] D. Analyzing Knockdown Efficiency

[0665] The efficiency of different shRNAs were tested in a conditionally immortalized cord blood erythroblast cell system to mimic DBA. The pTRIPZ was used to transduce these cells with sh1 (dox inducible shRPS19) or sh2 (dox inducible shRPS19), and pLKO was used to transduce a group of cells with sh5 (shRPS19). qRT-PCR was used to determine the level of gene expression in RPS19 mRNA knockdown in each group of cells. The percent of knockdown is shown in Table 90 after 1 week (T1), 2 weeks (T2), and 3 weeks (T3) for each shRNA.

TABLE 90
Percent of RPS19 knockdown in CI cord blood CD34+ cells

| | pLKO sh5 | pTRIPZ sh1 | pTRIPZ sh2 |
|---|---|---|---|
| T1 | 35 | 55 | 25 |
| T2 | 86 | 72 | 54 |
| T3 | 4 | NA | NA |

[0666] shRNA against RPS19 possessed a 45-75% knockdown at T1. Cells were observed to experience an increase in the percent of knockdown at T2 in each of the groups. By T3, cells became negatively selected for the knockdown.

[0667] These results show that Models 2 and 5 would be the most effective for generating the volume of biomass needed to analyze using next generation sequencing techniques, such as ChIP-seq and RNA-seq. The estimated time to achieve enough biomass for ChIP was about one month for Model 2 and about 2.5 months for Model 5.

### Example 19. Normal CD34+ Progenitor Cells from Peripheral Blood

[0668] Human CD34⁺ cells are derived from the peripheral blood and grown in a liquid culture. The length of time for differentiation is increased compared to the length of time for differentiation of the CD34+ cord blood cells. Positive selection of erythroblasts using magnetic beads was used to provide a more homogenous population for genome-wide studies, such as ChIP-seq to identify genomic positions and the composition of genomic signaling centers.

[0669] A. Presence of Cell Surface Markers in Expanded Peripheral Blood CD34⁺ Cells

[0670] Mapping is initially performed at differentiation stages most affected in the DBA phenotype to build a reference gene expression pattern for human erythropoiesis, such as the BFU/CFU and early erythroblast stages. By day 7 of expansion, BFU/CFU cell markers were observed to be present, and by day 7 of differentiation, early erythroblast cell markers were observed to be present. BFU and CFU markers were present in the expanded CD34⁺ cells described above. BFU cells are known to express CD34 and CD71, and CFU cells are known to express high levels of CD36 and CD71. qRT-PCR was used to measure expression throughout the expansion of the CD34+ peripheral blood cells. Relative quantification of the level of expression of CD71 transferring receptor from day 4 of expansion (exp-D4) to day 1 of differentiation (Diff-D1) is shown in Table 91.

TABLE 91
Relative quantification (RQ) of expression of CD71

| Sample | RQ | Sample | RQ | Sample | RQ | Sample | RQ |
|---|---|---|---|---|---|---|---|
| Exp-D4 | 1.00 | Exp-D6 | 0.80 | Exp-D8 | 0.90 | Exp-D12 | 1.40 |
| Exp-D5 | 1.20 | Exp-D7 | 0.74 | Exp-D11-DMSO-1hr | 1.32 | Diff-D1 | 1.44 |

[0671] Relative quantification of the level of expression of CD36 from day 4 of expansion (exp-D4) to day 1 of differentiation (Diff-D1) are shown in Table 92.

TABLE 92
Relative quantification (RQ) of expression of CD36

| Sample | RQ | Sample | RQ | Sample | RQ | Sample | RQ |
|---|---|---|---|---|---|---|---|
| Exp-D4 | 1.00 | Exp-D6 | 0.80 | Exp-D8 | 2.04 | Exp-D12 | 2.90 |
| Exp-D5 | 1.40 | Exp-D7 | 0.74 | Exp-D11-DMSO-1hr | 2.61 | Diff-D1 | 2.41 |

[0672] Therefore, the expanded cells expressed markers known to be present in BFU and CFU cells and are the most effected by the DBA phenotype.

### Example 20. Determining the Time Point for Glycophorin a Positive (GYPA+) Selection

[0673] qRT-PCR was used to show changes in the levels of expression of GATA1 and GATA2 in both peripheral and cord blood cells to determine a time point for GYPA+ selection. GAPDH was used as an internal control. Table 93 provides the relative quantification of the expression of these genes.

TABLE 93
Relative quantification (RQ) of GATA1 and GATA2

| Cord Blood | | | Peripheral Blood | | |
|---|---|---|---|---|---|
| Sample | Gene | RQ | Sample | Gene | RQ |
| Exp_D 10 | GATA1 | 1.00 | Exp_D 12 | GATA1 | 1.09 |
| | GATA2 | 1.00 | | GATA2 | 0.91 |
| Diff_D 8 | GATA1 | 1.78 | Diff_D 1 | GATA1 | 1.26 |
| | GATA2 | 0.66 | | GATA2 | 0.48 |
| Diff_D 10 | GATA1 | 2.35 | Diff_D 2 | GATA1 | 1.35 |
| | GATA2 | 0.34 | | GATA2 | 0.35 |
| Diff_D 11 | GATA1 | 3.04 | Diff_D 3 | GATA1 | 1.01 |
| | GATA2 | 0.36 | | GATA2 | 0.30 |
| Diff_D 14 | GATA1 | 3.41 | Diff_D 7 | GATA1 | 1.33 |
| | GATA2 | 0.30 | | GATA2 | 0.25 |
| | | | Diff_D 11 | GATA1 | 2.36 |
| | | | | GATA2 | 0.34 |

[0674] While GATA1 levels gradually increased during erythroid differentiation in both cord blood and peripheral blood cells, GATA2 levels sharply decreased 60-70% during erythroid differentiation in peripheral cells. Cord blood cells only showed sharp decrease in GATA2 at day 10 of differentiation, while a sharp increase was observed in the peripheral blood cells on day 2 of differentiation.

[0675] A. Enriching Erythroid Cells Expressing GATA1

[0676] GYPA+ selection was used at day 12 to enrich peripheral erythroid cells expressing GATA1. GYPA+ selection was observed to increase the ratio of GATA1 to GATA2 over 3-fold, i.e. 40× more GATA1 at day 12, as shown in Table 94.

TABLE 94
Relative quantification (RQ) of GATA1
and GATA2 after GYPA+ selection

| | RQ | | | RQ | |
|---|---|---|---|---|---|
| Sample | GATA1 | GATA2 | Sample | GATA1 | GATA2 |
| Exp_D 1 | 1 | 1.08 | Diff_D 1 | 1.26 | 0.48 |
| Exp_D 2 | 1.23 | 1 | Diff_D 2 | 1.35 | 0.35 |
| Exp_D 3 | 1.5 | 0.98 | Diff_D 3 | 1.01 | 0.30 |
| Exp_D 4 | 1.7 | 1.01 | Diff_D 4 | 1.57 | 0.40 |
| Exp_D 5 | 1.24 | 1.18 | Diff_D 7 | 1.33 | 0.25 |
| Exp_D 6 | 1.89 | 1.16 | Diff_D 8 | 1.93 | 0.33 |
| Exp_D 11 | 2.16 | 0.75 | Diff_D 11 | 2.36 | 0.34 |
| Exp_D 12 | 1.09 | 0.91 | Diff_D 12 | 7.29 | 0.21 |

[0677] As shown above, GATA2 levels sharply decreases at day 1 (D1) of differentiation. GATA1 levels were observed to gradually increase during erythroid differentiation. Day 7 (D7) of differentiation was chosen as a time point for GYPA+ selection because it provided an early erythroid population, i.e., GATA2 levels were observed to be low. Seven days of differentiation also allowed for a sufficient increase in biomass for ChIP analysis. The erythroid cells were enriched at day 12 (D12) to determine the effectiveness late in differentiation.

### Example 21. Modeling Disease Using Self-Delivering RNA (sdRNA)

[0678] Dox removal initiates normal differentiation, and a window for recovery of levels of p53 after efficient knockdown (>95%) with a shP53 should be 3-7 days. As an alternative to using shRNAs, a DBA model was designed using self-delivering RNA (sdRNA) to knockdown p53. sdRNAs provide a transient p53 knockdown, and the level of knockdown can be more easily optimized. sdRNAs targeting additional disease targets, such as RPS19, are also designed and tested.

[0679] To validate the efficacy of sdRNA to temporarily alleviate cell death due to RPS19 knockdown, p53 knockdown efficiency and reversibility were assessed.

[0680] sdRNAs targeting p53 were introduced to CB-I RES cells. Gene expression of p53 was measured using qRT-PCR at either 48 or 72 hours. Results for the sdRNAs at different concentrations is shown in Table 95.

TABLE 95
Relative quantification (RQ) of p53 during titration of p53 sdRNAs

| Concentration (μM) | 48 hours | 72 hours |
|---|---|---|
| 0.0 (Control) | 1.00 | 1.00 |
| 0.1 | 1.23 | 1.00 |
| 0.5 | 0.81 | 0.84 |
| 1.0 | 0.69 | 0.63 |
| 2.0 | 0.64 | 0.50 |
| 4.0 | 0.61 | 0.43 |

[0681] For about 50% knockdown, the sdRNA administered at 2 μM for 72 hours was chosen for further analysis

[0682] To determine reversibility of the knockdown, CB-IRES cells were treated with sdRNAs for 48 hours, then washed with PBS p53 levels were monitored 5 days after initial wash. Full recovery knockdown was observed for both 4 μM and 2 μM of sdRNA.

### Example 22. Determining Genomic Position and Composition of Genomic Signaling Centers in Erythroid Cells

[0683] Changes in the composition and changes in genomic signaling centers with and without compound treatment were observed in engineered disease models and patient disease cells.

[0684] A. ChIP-Seg Targets

[0685] Table 96 provides the list of ChIP-seq targets analyzed herein.

TABLE 96
ChIP-seq targets for human erythroblasts

| Chromatin Markers | Transcription factors | | Signaling molecules | |
|---|---|---|---|---|
| H3K4me3 | MYB | MYBL2 | GR (glucocorticoid receptor) | STAT3 - JAK/STAT |
| H3K27Ac | GFIB | NFE2 | AR (androgen receptor) | p53 - p53, mTOR, AMPK |
| H3K4me1 | CEBPG | MLL | ERa (estrogen receptor) | TEAD 1/2 - Hippo |
| H3K27me3 | DDIT3 | FOG1 | LXRa (liver X receptor) | NF-κB (p65) - NF-κB |
| p300 | E2F2 | PTTG1 | FXR (farnesoid X receptor) | CREB1 - MAPK |
| BRD4 | BMI1 | FLI1 | AHR (aryl hydrocarbon receptor) | CREB2 - MAPK |
| | RUNX1 | TAL1 | SXR (steroid and xenobiotic receptor) | c-JUN - TLR, MAPK |
| | MYC | TFDP1 | HIF1a (hypoxia inducible factor) | c-FOS - TLR, MAPK |
| | GATA1 | ELK1 | TCF7L2 (TCF4) - WNT | ELK1 - MAPK |
| | GATA2 | TSC22D3 | CTNNB1 - WNT | ETV4 - ERK MAPK |
| | GFIB | ZNF165 | SMAD2/3 - TGFβ | RBPJK - NOTCH |
| | HES6 | ZNF23 | SMAD4 - TGFβ | SREBP1 - sterol |
| | KLF1 | PU.1 | SMAD1/5/8 - TGFβ | SREBP2 - sterol |
| | LMO2 | | STAT1 - JAK/STAT | |

[0686] B. Changes in GSCs Through Cell Differentiation

[0687] To produce 3D gene regulatory maps, the following steps are followed: optimization of tissue culture conditions for growth and expansion of CD34⁺ cells, identification of genomic positions and protein composition of GSCs in normal CD34⁺ cells in absence and presence of compounds, determination of genome architecture in these cells, and identification of genomic positions and protein composition of GSCs in a human model of a disease (e.g., erythroblast cells with DBA from shRNA knockdown of RPS19) or primary disease patient samples in the presence and absence of compounds, and demonstration of the capability of compounds to modulate expression of gene targets implicated in the development of a disease by leveraging GSCs. The map of the progenitor culture may also be used to predict whether a response would occur or not when a drug is administered.

[0688] To determine the protein composition and genomic position of GSCs in normal primary CD34+ and erythroblasts cells, ChIP-seq and RNA-seq were performed and results are shown for the INs containing GADD45A, RPS19, and CDKN1A. The presence of H3K27Ac, GATA1, GATA2, p53, and ser15 (p53 phosphorylated at serine 15) within these insulated neighborhoods is shown. Cells were collected at day 11 of expansion prior to erythroid differentiation and day 18 after 7 days of differentiation.

[0689] The binding profile in FIG. 16A revealed a significant increase in p53 accumulation at the GADD45A promotor during differentiation. This appears consistent to what has been observed at other apoptotic genes (e.g. BAX). p53 was also abundant at the RPS19 promotor, as shown in FIG. 16B, but levels were similar pre- and post-differentiation. In FIG. 16C, a decrease in the presence of GATA1 was observed, while a decrease in expression of RPS19 was also observed from RNA-seq results.

[0690] Therefore, FIG. 16A-16C provided evidence that GATA1/GATA2 is co-expressed at both E11 and D7 and p53 binds the RPS19 and GADD45a promoter. Since these data are from wildtype cells, results indicate a mechanism by which apoptotic genes are ‘poised’ to be triggered in this lineage. Since present results do not show a clear timepoint for the switch from GATA2 to GATA1, further differentiation may be needed.

[0691] C. Binding Profiles

[0692] Collating the results of FIG. 16A-16C showed that p53 was bound to more peaks in erythroid cells compared to hematopoietic cells (1485 vs. 743). A majority of p53 was also observed to bind non-promoter regions in hematopoietic stem cells. In fact, 3.6% of the p53 peaks are in exon regions, 23.6% are in promoter regions, 29.9% are in intron regions, and 42.9% are in intergenic regions.

[0693] For all the p53 binding sites, there is significant overlap between p53 binding in hematopoietic stem cells and erythroblasts. Five hundred seventy-eight of the p53 peaks were shared in both hematopoietic stem cells and erythroblasts. 3.6% of the p53 peaks are in exon regions, 20.8% are in promoter regions, 31.5% are in intron regions, and 44.1% are in intergenic regions. One hundred one of the 385 binding sites found in promoter regions were shared by hematopoietic stem cells and erythroblasts.

[0694] D. Gene Ontology (GO) Analysis of the p53 Binding Sites

[0695] FIG. 17A-17D show the log 10 p-values for genomic annotation of the binding sites of p53 (log 10 p-value≤0.05 were considered significant). FIG. 17A shows that most of the binding sites in a hematopoietic stem cell promoter region are likely associated with cellular response to DNA damage stimulus and response to UV exposure. Alternatively, these binding sites may be associated with signal transduction by p53 class mediator, signal transduction in response to DNA damage, mitotic DNA damage checkpoint, mitotic DNA integrity checkpoint, apoptotic signaling pathway, intrinsic apoptotic signaling pathway, cellular response to external stimuli, and mitotic cell cycle checkpoint in descending frequency.

[0696] FIG. 17B shows that the p53 binding sites of erythroid cells are most likely located in promoter regions associated with cellular response to DNA damage stimulus. Alternatively, the binding sites are associated with cellular response to DNA damage stimulus, DNA damage response and signal transduction by p53, class mediator resulting in cell cycle arrest, signal transduction by p53 class mediator, signal transduction involved in DNA damage checkpoint, mitotic G1 DNA damage checkpoint, mitotic DNA damage checkpoint, mitotic DNA integrity checkpoint, signal transduction involved in cell cycle checkpoint, and signal transduction in response to DNA damage in descending frequency.

[0697] In contrast to p53 binding sites in promoter regions of both hematopoietic stem cells and erythroid cells, FIG. 17C shows that p53 binding sites in non-promoter regions of hematopoietic stem cells were observed in regions of the genome most likely associated with the purine deoxyribonucleoside triphosphate catabolic process. Alternatively, p53 binding sites were also in non-promoter regions of hematopoietic stem cells most likely associated with divalent inorganic cation homeostasis, calcium ion homeostasis, cellular divalent inorganic cation homeostasis, regulation of homeostatic process, cellular cation homeostasis, release of sequestered calcium ion into cytosol, regulation of sequestering calcium ion, cellular calcium ion homeostasis, and dendritic cell differentiation in descending frequency.

[0698] Further, FIG. 17D shows that p53 binding sites in non-promoter regions of erythroid cells were most frequent in regions most likely associated with regulation of phopholipase C activity. P53 binding sites in non-promoter regions of erythroid cells were also potentially associated with regulation of phospholipase activity, cytosolic calcium ion homeostasis, positive regulation of phospholipase C activity, positive regulation of phospholipase activity, positive regulation of lipase activity, regulation of DNA biosynthesis process, regulation of transcription from RNA polymerase II, promoter in response to stress, and cellular response to decrease oxygen levels in descending frequency.

[0699] Therefore, p53 was observed to bind the promoter regions of apoptotic genes in both hematopoietic stem cells and differentiated erythroid cells, and calcium ion homeostasis-related genes are enriched in non-promoter p53 peaks.

[0700] E. Overlap with Active Enhancers

[0701] Each identified p53 non-promoter binding site was extended 500 base pairs upstream and downstream, and the percentage of overlap of these regions with H3K27Ac, a histone modification associated with active enhancers, was determined. Of the 566 p53 binding sites observed in non-promoter regions of hematopoietic stem cells, 47.5% of them overlapped with H3K27Ac. Of the 1170 p53 binding sites observed in non-promoter regions of erythroid cells, 37.7% overlap with H3K27Ac. Further no enriched biological processes were observed through quantification of genomic annotation of the p53 binding sites overlapping with H3K27Ac.

### Example 23. Compound Treatment of Conditionally Immortalized and Normal CD34⁺ Cells

[0702] The conditionally immortalized CD34+ cord blood primary cells (CB-CI-IRES-CD34+) and TF1 cells were treated with compounds to rescue the phenotype of DBA in the disease model. Doses of the compounds were titrated to determine the concentration needed to stimulate a response in the cells.

[0703] A. Cell Toxicity

[0704] A cell viability ATP assay was performed with different concentrations of Nutlin 3, Nutlin 3a, pifithrin alpha (pifithrin-a), and cyclic pifithrin alpha to determine the IC50. Cells treated with DMSO served as a control. Amount of ATP for concentrations of 100, 50, 25, 12.5, 6.252, 3.125, 1.5, 0.7, 0.35, 0.175, and 0.08625 μM are shown in Table 97. Measurements were performed in triplicate.

TABLE 97
ATP cell viability assay for CD34+ cells

| | | | | | | | | | | | | |
|---|---|---|---|---|---|---|---|---|---|---|---|---|
| μM | 100 | 50 | 25 | 12.5 | 6.252 | 3.125 | 1.5 | 0.7 | 0.35 | 0.175 | 0.08625 | DMSO |

Nutlin 3

| | | | | | | | | | | | | |
|---|---|---|---|---|---|---|---|---|---|---|---|---|
| 1 | 292464 | 448385 | 488775 | 538130 | 554494 | 608248 | 612632 | 624991 | 458003 | 612502 | 330857 | 562181 |
| 2 | 300163 | 494399 | 563081 | 610101 | 645140 | 673589 | 669622 | 692198 | 738460 | 725724 | 645570 | 628762 |
| 3 | 301403 | 461970 | 517641 | 574004 | 567858 | 595367 | 618466 | 601983 | 618870 | 612658 | 672858 | 616130 |
| Avg. | 298010 | 468251 | 523166 | 574078 | 589164 | 625735 | 633573 | 639724 | 605111 | 650295 | 549762 | 602358 |

Pifithrin alpha

| | | | | | | | | | | | | |
|---|---|---|---|---|---|---|---|---|---|---|---|---|
| 1 | 523409 | 609905 | 632781 | 674137 | 680518 | 664676 | 640507 | 652343 | 661374 | 697888 | 672962 | 563212 |
| 2 | 528238 | 621558 | 628005 | 648468 | 671214 | 649825 | 648689 | 645401 | 678900 | 672793 | 670418 | 583909 |
| 3 | 518281 | 588738 | 624495 | 626948 | 622759 | 624860 | 622315 | 392544 | 618740 | 642882 | 584757 | 583622 |
| Avg. | 523309 | 606734 | 628427 | 649851 | 658164 | 646454 | 637170 | 563429 | 653005 | 671188 | 642712 | 576914 |

Cyclic pifithrin alpha

| | | | | | | | | | | | | |
|---|---|---|---|---|---|---|---|---|---|---|---|---|
| 1 | 555382 | 627013 | 657355 | 671488 | 681093 | 679344 | 658333 | 624442 | 631985 | 630354 | 633812 | 543911 |
| 2 | 642595 | 693777 | 728764 | 722696 | 740862 | 732131 | 695395 | 666894 | 695056 | 632494 | 560445 | 617187 |
| 3 | 725828 | 747791 | 779711 | 771607 | 742101 | 764339 | 737638 | 682685 | 671814 | 636279 | 675142 | 631594 |
| Avg. | 641268 | 689527 | 721943 | 721930 | 721352 | 725271 | 697122 | 658007 | 666285 | 633042 | 623133 | 597564 |

Nutlin 3a

| | | | | | | | | | | | | |
|---|---|---|---|---|---|---|---|---|---|---|---|---|
| 1 | 429802 | 463223 | 465507 | 496305 | 481101 | 539839 | 559728 | 603745 | 580086 | 617918 | 588229 | 616639 |
| 2 | 424673 | 463614 | 460965 | 442760 | 491124 | 515592 | 525315 | 579055 | 562298 | 572490 | 590199 | 571564 |
| 3 | 359384 | 421058 | 448776 | 432516 | 471758 | 513726 | 503547 | 550788 | 569228 | 567231 | 569267 | 576967 |
| Avg. | 404620 | 449298 | 458416 | 457194 | 481328 | 523052 | 529530 | 577863 | 570537 | 585880 | 582565 | 588390 |

[0705] A cell viability assay was also carried out for TF1 cells to determine the optimal concentration prior to cell toxicity for each compound. Results are shown in Table 98.

TABLE 98
ATP cell viability assay for TF1 cells

| | | | | | | | | | | | |
|---|---|---|---|---|---|---|---|---|---|---|---|
| μM | 100 | 50 | 25 | 12.5 | 6.252 | 3.125 | 1.5 | 0.7 | 0.35 | 0.175 | 0.08625 |

Pifithrin alpha

| | | | | | | | | | | | |
|---|---|---|---|---|---|---|---|---|---|---|---|
| 1 | 782582 | 812180 | 1041547 | 1244226 | 1261048 | 1337181 | 1366687 | 1144824 | 1128629 | 1327798 | 1384592 |
| 2 | 976310 | 788129 | 1058499 | 1209017 | 1251586 | 1328516 | 1336477 | 1238562 | 1381564 | 1366309 | 1395162 |
| 3 | 916449 | 831664 | 996093 | 1125928 | 1214015 | 1225669 | 1270378 | 1250647 | 1312856 | 1323453 | 1250816 |
| Avg. | 891780 | 810658 | 1032046 | 1193057 | 1242216 | 1297122 | 1324514 | 1211344 | 1274350 | 1339187 | 1343523 |

Cyclic Pifithrin alpha

| | | | | | | | | | | | |
|---|---|---|---|---|---|---|---|---|---|---|---|
| 1 | 1292289 | 1399978 | 1333723 | 1374544 | 1386589 | 1380129 | 1323936 | 1380181 | 1379437 | 1328647 | 1266411 |
| 2 | 1394301 | 1395554 | 1425739 | 1457698 | 1399051 | 1358414 | 1425034 | 1423050 | 1425399 | 1457633 | 1417713 |
| 3 | 1313065 | 1345794 | 1382178 | 1366440 | 1353389 | 1354916 | 1412128 | 1401192 | 1367940 | 1400082 | 1369050 |
| Avg. | 1333218 | 1380442 | 1380547 | 1399561 | 1379676 | 1364486 | 1387033 | 1401474 | 1390925 | 1395454 | 1351058 |

Nutlin 3a

| | | | | | | | | | | | |
|---|---|---|---|---|---|---|---|---|---|---|---|
| 1 | 23934 | 1246588 | 1518028 | 1340587 | 1460412 | 1326585 | 1501481 | 1465593 | 1501089 | 1387750 | 1477730 |
| 2 | 23542 | 1204019 | 1486252 | 1403123 | 1231790 | 1450508 | 1426000 | 1321104 | 1461456 | 1481279 | 1426195 |
| 3 | 27797 | 1331152 | 1420453 | 1389877 | 1364965 | 1385714 | 1398203 | 1325541 | 1375796 | 1406790 | 1238001 |
| Avg. | 25091 | 1260586 | 1474911 | 1377862 | 1352389 | 1387602 | 1441895 | 1370746 | 1446114 | 1425273 | 1380642 |

Nutlin 3

| | | | | | | | | | | | |
|---|---|---|---|---|---|---|---|---|---|---|---|
| | 27666 | 879100 | 1441451 | 1455179 | 1468908 | 1409570 | 1412845 | 1421014 | 1391417 | 1405054 | 1354903 |
| | 29245 | 933388 | 1512469 | 1541675 | 1560088 | 1515470 | 1497031 | 1519190 | 1520129 | 1512482 | 1472614 |
| | 23602 | 703030 | 1435866 | 1457750 | 1481632 | 1443604 | 1447193 | 1423442 | 1329299 | 1422972 | 1411853 |
| Avg. | 26837 | 838506 | 1463262 | 1484868 | 1503543 | 1456215 | 1452356 | 1454549 | 1413615 | 1446836 | 1413123 |

[0706] B. Dose Titration

[0707] Dose titration was performed as described in Example 1. Three doses of each compound that did not result in cell toxicity in the results above were chosen to determine the amount of the compound needed to elicit a response in RPS19 knockdown cells that resulted in a rescued DBA phenotype by reducing elevated p53 levels caused by the DBA phenotype. Phenotype rescue was determined by measuring p53 levels by qRT-PCR analysis. It was expected that the low dose (3.125 μM) would result in no change in p53, that the medium dose (6.25 μM) would result in some change in p53, and the maximal dose would result in a decrease in p53. Wildtype TF1 or conditionally immortalized erythroblast cord blood cells were transduced with either pSMART PGK GFP shNT (dox inducible), pSMART PGK GFP shRPS19_1 (dox inducible), pSMART PGK GFP shRPS19_2 (dox inducible), pSMART EF1alpha GFP shNT (dox inducible), pLKO RPS19_sh4 (constitutive), pLKO RPS19_sh5 (constitutive), pLKO shNT (constitutive), or pLKO RPS19_sh1 (constitutive). An aliquot of knockdown cells treated only with DMSO was used as a control. The 8 samples of knockdown cells are also compared to a wildtype TF1 cell control. Knockdown resulted in the cell densities shown in Table 99.

TABLE 99
Cell densities

| | Cell density | | Cell density |
|---|---|---|---|
| Plasmid | [cells/ml] | Plasmid | [cells/mll |
| pSMART PGK GFP | 517,000 | pLKO RPS19_sh4 | 124,000 |
| shNT | | | |
| pSMART PGK GFP | 274,000 | pLKO RPS19_sh5 | 962,000 |
| shRPS19_1 | | | |
| pSMART PGK GFP | 1,100,000 | pLKO shNT | 1,190,000 |
| shRPS19_2 | | | |
| pSMART EF1alpha | 1,410,000 | pLKO RPS19_sh1 | 28,000 (paren- |
| GFP shNT | | | tal flask) |

[0708] C. Changes in Biological Activity

[0709] Compound dilutions were performed as described in Example 1. Compound Nutlin 3, Pifithrin alpha, Nutlin 3a, and Cyclic-pifithrin alpha were administered in a 10 μM dose. In a 6-well format, there were 1 million cells/well=1 million cells/ml=1000 cells/pl. Eight ml of RPMI+GMCSF was added to each well. Table 100 shows changes in cell viability.

TABLE 100
Fold changes in cell viability

| | Nutlin | Pifithrin | Nutlin | Cyclic pifithrin | |
|---|---|---|---|---|---|
| | 3 | alpha | 3a | alpha | DMSO |
| TF1 | 1.07 | 1.23 | 1.08 | 1.12 | 1.00 |
| CD34+ | 0.78 | 1.08 | 0.81 | 1.17 | 1.00 |

[0710] TF1 cells did not significantly respond to p53 pathway activators Nutlin 3/Nutlin 3a or inhibitors Pifithrin alpha/cyclic. CD34+ cells treated with Nutlin 3 and Nutlin 3a had reduced biological activity, while Pifithrin had little or no effect.

### Example 24. Bioinformatics Platform

[0711] The following Example provides the process used in creating a bioinformatics platform for automating drug selection and development based on canonical pathways.

[0712] A. Compound Database

[0713] At least 150 compounds that manipulate signaling pathways were initially chosen to be included in the database. 8226 drugs, 2262 target proteins, 291 KEGG pathways, and 46 signaling pathways were considered for inclusion. Relevant considerations for selection of compounds includes: coverage of the signaling biology space, likelihood of providing information and new insights, cost efficiency, chance of finding a new molecule, chance of finding repurposing candidate compounds, chance of finding clinically relevant molecules, and coverage of the drug/chemical space.

[0714] Target proteins are those whose mRNA levels were expressed greater than 1 fragment per kilobase of transcript per million (FPKM) mapped reads. Target proteins expressed in the liver (mRNA FPKM>1) were associated with 3191 drugs, 1379 target proteins, 289 KEGG pathways, and 46 signaling pathways.

[0715] Fifty signaling pathways and nuclear receptor subfamilies were selected. An agonist and antagonist were identified for each pathway. The list of 50 pathways was compared with the ChIP-seq targets in Tables 41 and 96 to confirm that ChIP-seq information would be gathered for each pathway. Table 101 shows the number of agonists and antagonists identified for each canonical pathway.

TABLE 101
Number of agonists and antagonists for canonical KEGG pathways

| Signaling pathways | Agonists | Antagonists |
|---|---|---|
| Adipocytokine signaling pathway | 20 | 20 |
| Adrenergic signaling in cardiomyocytes | 58 | 155 |
| AGE-RAGE signaling pathway in diabetic | 2 | 45 |
| complications | | |
| AMPK signaling pathway | 56 | 71 |
| B cell receptor signaling pathway | 2 | 25 |
| Bile secretion | 5 | 46 |
| Calcium signaling pathway | 117 | 344 |
| cAMP signaling pathway | 118 | 270 |
| cGMP-PKG signaling pathway | 112 | 177 |
| Chemokine signaling pathway | 1 | 34 |
| Epithelial cell signaling pathway in | 0 | 31 |
| Helicobacter pylori infection | | |
| ErbB signaling pathway | 1 | 31 |
| Estrogen signaling pathway | 65 | 50 |
| Fc epsilon RI signaling pathway | 2 | 25 |
| FoxO signaling pathway | 11 | 35 |
| Glucagon signaling pathway | 12 | 16 |
| GnRH signaling pathway | 7 | 52 |
| Hedgehog signaling pathway | 2 | 4 |
| HIF-1 signaling pathway | 10 | 40 |
| Hippo signaling pathway | 0 | 9 |
| Insulin signaling pathway | 10 | 34 |
| Jak-STAT signaling pathway | 21 | 19 |
| MAPK signaling pathway | 4 | 81 |
| mTOR signaling pathway | 4 | 23 |
| Neuroactive ligand-receptor interaction | 300 | 380 |
| Neurotrophin signaling pathway | 4 | 36 |
| NF-kappa B signaling pathway | 1 | 73 |
| NOD-like receptor signaling pathway | 0 | 20 |
| Notch signaling pathway | 3 | 3 |
| Steroid and xenobiotic receptor pathway | 6 | 0 |
| (NR1I2) | | |
| Oxytocin signaling pathway | 14 | 111 |
| p53 signaling pathway | 0 | 12 |
| Pathways in cancer | 61 | 149 |
| Phosphatidylinositol signaling system | 1 | 13 |
| Phospholipase D signaling pathway | 17 | 50 |
| PI3K-Akt signaling pathway | 41 | 145 |
| PPAR signaling pathway | 29 | 7 |
| Prolactin signaling pathway | 26 | 26 |
| Rap1 signaling pathway | 33 | 123 |
| Ras signaling pathway | 13 | 100 |
| Retrograde endocannabinoid signaling | 21 | 109 |
| RIG-I-like receptor signaling pathway | 0 | 14 |
| Sphingolipid signaling pathway | 30 | 41 |
| T cell receptor signaling pathway | 2 | 30 |
| TGF-beta signaling pathway | 0 | 11 |
| Thyroid hormone signaling pathway | 36 | 36 |
| TNF signaling pathway | 2 | 71 |
| Toll-like receptpr signaling pathway | 8 | 26 |
| VEGF signaling pathway | 1 | 75 |
| Wnt signaling pathway | 3 | 8 |

[0716] Table 102 provides examples of pathways with an associated agonist and antagonist compounds.

TABLE 102
Examples of agonists and antagonists of signaling pathways

| Signaling Pathways | Compound | Type | Gene | Compound | Type | Gene |
|---|---|---|---|---|---|---|
| AMPK signaling | Aleglitazar | Agonist | PPARG | Simvastatin | Inhibitor | HMGCR |
| Neuroactive ligand-receptor interaction | Prednisone | Agonist | NR3C1 | Budesonide | Antagonist | NR3C1 |
| Wnt signaling | Bezafibrate | Agonist | PPARD | Bosutinib | Inhibitor | CAMK2G |
| NF-kappa B signaling | Rasagiline | Activator | BCLXL | Venetoclax | Inhibitor | BCLXL |

[0717] Compounds were also selected from those that have faded Phase II or Phase III trials for efficacy including the 45 compounds in Table 35 that faded a Phase III trial.

[0718] B. Genetic Disease Database

[0719] About 1100 diseases with causal genetic mutation information are identified, including diseased tissue, prevalence, inheritance pattern, genetic mutation, pathogenesis, diagnosis and therapy. One source of the genetic disease database was the Genetics Home Reference from the U.S. National Library of Medicine (https://ghr.nlm.nih.gov).

[0720] Approachable diseases in this platform including coding region mutated genes and GSC hyper-activation or hypo-activation diseases. Examples of approachable liver diseases include Factor V deficiency Leiden (thrombophilia), which is an autosomal dominant disease resulting from an F5 gain of function mutation. Familial hypercholesterolemia is also an autosomal dominant disease resulting from an LDLR haploinsufficiency in 95% cases, a PCSK9 gain of function mutation, and/or an APOB haploinsufficiency. Additional examples of approachable autosomal dominant diseases include acute intermittent porphyria resulting from HMBS haploinsufficiency, and fibronectin glomerulopathy resulting from an FN1 haploinsufficiency.

[0721] For coding region mutated genes, methods for elevating expression levels of these genes may be determined. Table 103 provides examples of approachable conditions that are the result of a type of disease inheritance pattern.

TABLE 103
Approachable disease characteristics

| Inheritance pattern | Occurrences | Approachable condition |
|---|---|---|
| Autosomal recessive | 441 | Partially functional protein |
| disease | | remained |
| X-linked recessive | 44 | Partially functional protein |
| disease in male | | remained |
| Autosomal dominant | 346 | Haploinsufficiency, the mutant |
| disease | | allele is not toxic |
| X-linked dominant | 28 | Partially functional protein |
| disease in male | | remained |
| X-linked dominant | | Haploinsufficiency, the mutant |
| disease in female | | allele is not toxic |

[0722] For GSC hyper-activation or hypo-activation diseases, diseases having the similar pathogenesis are identified. Therefore, a single pathway may be identified that affects multiple diseases.

[0723] C. Determining Predictability of Relationships

[0724] ChIP-seq targets that were validated in HepG2 cells as described above were compared to published data for quality control. ChIP-seq targets validated herein included: histone modification H3K27Ac and transcription factors CREB1, CTCF, ERa, HIF1A, HNF1, HNF3b, HNF4A, HNF6, NFKB, P53, SERBP1, SMAD23, STAT1, TCF4, and TEAD1.

[0725] Histone modifications H3K27ac, H3K27me3, H3K36me3, H3K4me1, H3K4me2, H3K4me3, H3K9me3, H3K79me2, and H3K9ac and transcription factors ATF3, HDAC2, SIN3A, BHLHE40, HNF4A, SP1, CEBPB, HNF4G, SREBF1, CHD2, HSF1, SRF, JUN, JUND, TAF1, MYC, MAFF, TBP, CTCF, MAFK, TCF12, ELF1, NRF1, TCF7L2, ESRRA, REST, NR2C2, FOSL2, EP300, USF1, FOXA1, PPARGC1A, USF2, FOXA2, POLR2A, ZBTB33, GABPA, RAD21, ZNF274, NR3C1, RFX5, H2AZ, and RXRA were identified from ENCODE (Encyclopedia of DNA Elements) Consortium (www.encodeproject.org) and DEEP Consortium (www.deutsches-epigenom-programm.de) as potential ChIP-seq targets.

[0726] These lists were observed to share three targets: CTCF, H3K27Ac, and HNF4A. A scatterplot of ChIP-seq signal per 10 kb bin (log 2) is used to determine a correlation value between ChIP-seq results for each of these targets and ChIP-seq results from published data. The correlation among ChIP-seq results from different published sources is also determined.

[0727] D. Application of Machine Learning

[0728] Machine learning is used to provide in silico prioritization of genome interactions, estimates of confidence for an interaction, and an iterative/systemic framework for identifying previously unidentified interactions.

### Example 25. Building Gene Signaling Networks (GSN)

[0729] A study (n=2) of gene expression changes in 56 and 60 genes in the canonical insulin signaling, nuclear receptor signaling and WNT signaling pathways, was conducted to evaluate the correlation of actual effect on expression (up or down) to the known canonical pathway association of each of the 56 or 60 genes. If expression went up or down to a significant degree, then the score was counted as positive. The results are shown in Table 104.

TABLE 104
OE Scores

| | OE SCORE (Occupancy-Expression Score) |
|---|---|
| Insulin | 26/56 (46%); 21/60 (35%) |
| Nuclear | 35/56 (63%); 26/60 (43%) |
| WNT | 24/56 (43%); 31/60 (52%) |

[0730] The data revealed that alteration in expression and concomitant assignment to a specific known canonical signaling pathway is not completely reliable. Most interesting were the findings associated with the nuclear receptor signaling pathway. Proteins in this pathway are, by definition, localized to a specific cellular location, i.e., the nucleus, and therefore found to be more highly correlated with a positive association with a change in expression. The data suggest that canonical pathway designation may not be the best predictor or basis of hypothesis testing for mapping gene signaling.

### EQUIVALENTS AND SCOPE

[0731] Those skilled in the art will recognize or be able to ascertain using no more than routine experimentation, many equivalents to the specific embodiments in accordance with the invention described herein. The scope of the present invention is not intended to be limited to the above Description, but rather is as set forth in the appended claims.

[0732] In the claims, articles such as “a,” “an,” and “the” may mean one or more than one unless indicated to the contrary or otherwise evident from the context. Claims or descriptions that include “or” between one or more members of a group are considered satisfied if one, more than one, or all of the group members are present in, employed in, or otherwise relevant to a given product or process unless indicated to the contrary or otherwise evident from the context. The invention includes embodiments in which exactly one member of the group is present in, employed in, or otherwise relevant to a given product or process. The invention includes embodiments in which more than one, or the entire group members are present in, employed in, or otherwise relevant to a given product or process.

[0733] It is also noted that the term “comprising” is intended to be open and permits but does not require the inclusion of additional elements or steps. When the term “comprising” is used herein, the term “consisting of” is thus also encompassed and disclosed.

[0734] Where ranges are given, endpoints are included. Furthermore, it is to be understood that unless otherwise indicated or otherwise evident from the context and understanding of one of ordinary skill in the art, values that are expressed as ranges can assume any specific value or subrange within the stated ranges in different embodiments of the invention, to the tenth of the unit of the lower limit of the range, unless the context clearly dictates otherwise.

[0735] In addition, it is to be understood that any particular embodiment of the present invention that falls within the prior art may be explicitly excluded from any one or more of the claims. Since such embodiments are deemed to be known to one of ordinary skill in the art, they may be excluded even if the exclusion is not set forth explicitly herein. Any particular embodiment of the compositions of the invention (e.g., any antibiotic, therapeutic or active ingredient; any method of production; any method of use; etc.) can be excluded from any one or more claims, for any reason, whether or not related to the existence of prior art.

[0736] It is to be understood that the words which have been used are words of description rather than limitation, and that changes may be made within the purview of the appended claims without departing from the true scope and spirit of the invention in its broader aspects.

[0737] While the present invention has been described at some length and with some particularity with respect to the several described embodiments, it is not intended that it should be limited to any such particulars or embodiments or any particular embodiment, but it is to be construed with references to the appended claims so as to provide the broadest possible interpretation of such claims in view of the prior art and, therefore, to effectively encompass the intended scope of the invention.

LENGTHY TABLES
The patent application contains a lengthy table section. A copy of the table is available in electronic form from the USPTO web site (https://seqdata.uspto.gov/?pageRequest=docDetail&DocID=US20210254056A1). An electronic copy of the table will also be available from the USPTO upon request and payment of the fee set forth in 37 CFR 1.19(b)(3).

The application's sequence listing, which the Patent Office published only in electronic form, follows.

SEQUENCE LISTING (71281 sequences)

SEQ ID NO: 1 - DNA, 9 bp, Homo sapiens
aaaagtcaa

SEQ ID NO: 2 - DNA, 16 bp, Homo sapiens
aaaatggcgccatttt

SEQ ID NO: 3 - DNA, 10 bp, Homo sapiens
aaaccacaaa

SEQ ID NO: 4 - DNA, 10 bp, Homo sapiens
aaagtaaaca

SEQ ID NO: 5 - DNA, 14 bp, Homo sapiens
aaatggcgccattt

SEQ ID NO: 6 - DNA, 10 bp, Homo sapiens
aacagctgtt

SEQ ID NO: 7 - DNA, 10 bp, Homo sapiens
aacatctgga

SEQ ID NO: 8 - DNA, 10 bp, Homo sapiens
aaccggaagt

SEQ ID NO: 9 - DNA, 12 bp, Homo sapiens
aatggcgccaaa

SEQ ID NO: 10 - DNA, 13 bp, Homo sapiens
aattggccaatta

SEQ ID NO: 11 - DNA, 10 bp, Homo sapiens
acaggaagtg

SEQ ID NO: 12 - DNA, 10 bp, Homo sapiens
acatcctggt

SEQ ID NO: 13 - DNA, 12 bp, Homo sapiens
acccttgaaccc

SEQ ID NO: 14 - DNA, 10 bp, Homo sapiens
accgaacaat

SEQ ID NO: 15 - DNA, 7 bp, Homo sapiens
acgcgtc

SEQ ID NO: 16 - DNA, 12 bp, Homo sapiens
actacaattccc

SEQ ID NO: 17 - DNA, 10 bp, Homo sapiens
actgaaacca

SEQ ID NO: 18 - DNA, 12 bp, Homo sapiens
actttcactttc

SEQ ID NO: 19 - DNA, 15 bp, Homo sapiens
agaaatgacttccct

SEQ ID NO: 20 - DNA, 10 bp, Homo sapiens
agaggaagtg

SEQ ID NO: 21 - DNA, 7 bp, Homo sapiens
agataag

SEQ ID NO: 22 - DNA, 8 bp, Homo sapiens
aggcctag

SEQ ID NO: 23 - DNA, 8 bp, Homo sapiens
aggcctgg

SEQ ID NO: 24 - DNA, 12 bp, Homo sapiens
aggtctctaacc

SEQ ID NO: 25 - DNA, 8 bp, Homo sapiens
aggtgtga

SEQ ID NO: 26 - DNA, 20 bp, Homo sapiens
aggtgtgaaaaaaggtgtga

SEQ ID NO: 27 - DNA, 16 bp, Homo sapiens
aggtgtgaaggtgtga

SEQ ID NO: 28 - DNA, 8 bp, Homo sapiens
ataacatg

SEQ ID NO: 29 - DNA, 20 bp, Homo sapiens
atagtgccacctggtggcca

SEQ ID NO: 30 - DNA, 15 bp, Homo sapiens
atcaataacattgat

SEQ ID NO: 31 - DNA, 15 bp, Homo sapiens
atcaattgcagtgat

SEQ ID NO: 32 - DNA, 10 bp, Homo sapiens
atcacgtgat

SEQ ID NO: 33 - DNA, 15 bp, Homo sapiens
atgaataacattcat

SEQ ID NO: 34 - DNA, 15 bp, Homo sapiens
atgaattgcagtcat

SEQ ID NO: 35 - DNA, 10 bp, Homo sapiens
atgacgtcat

SEQ ID NO: 36 - DNA, 9 bp, Homo sapiens
atgactcat

SEQ ID NO: 37 - DNA, 10 bp, Homo sapiens
atgactcatc

SEQ ID NO: 38 - DNA, 12 bp, Homo sapiens
atgccctgaggc

SEQ ID NO: 39 - DNA, 10 bp, Homo sapiens
attgcgcaac

SEQ ID NO: 40 - DNA, 12 bp, Homo sapiens
caagatggcggc

SEQ ID NO: 41 - DNA, 11 bp, Homo sapiens
caccgaacaat

SEQ ID NO: 42 - DNA, 5 bp, Homo sapiens
ccaat

SEQ ID NO: 43 - DNA, 12 bp, Homo sapiens
ccatgccgccat

SEQ ID NO: 44 - DNA, 8 bp, Homo sapiens
ccccgcgc

SEQ ID NO: 45 - DNA, 10 bp, Homo sapiens
cgcagctgcg

SEQ ID NO: 46 - DNA, 8 bp, Homo sapiens
cgcgaaaa

SEQ ID NO: 47 - DNA, 10 bp, Homo sapiens
cggacacaat

SEQ ID NO: 48 - DNA, 16 bp, Homo sapiens
cggttgccatggcaac

SEQ ID NO: 49 - DNA, 10 bp, Homo sapiens
cggtttcaaa

SEQ ID NO: 50 - DNA, 12 bp, Homo sapiens
cgtgggtggtcc

SEQ ID NO: 51 - DNA, 8 bp, Homo sapiens
ctaattag

SEQ ID NO: 52 - DNA, 12 bp, Homo sapiens
ctgcgcatgcgc

SEQ ID NO: 53 - DNA, 7 bp, Homo sapiens
cttcgag

SEQ ID NO: 54 - DNA, 12 bp, Homo sapiens
gaaagtgaaagt

SEQ ID NO: 55 - DNA, 14 bp, Homo sapiens
gaggtcaaaggtca

SEQ ID NO: 56 - DNA, 12 bp, Homo sapiens
gatgacgtcatc

SEQ ID NO: 57 - DNA, 12 bp, Homo sapiens
gatgactcagca

SEQ ID NO: 58 - DNA, 10 bp, Homo sapiens
gattgcatca

SEQ ID NO: 59 - DNA, 8 bp, Homo sapiens
gcacttaa

SEQ ID NO: 60 - DNA, 16 bp, Homo sapiens
gcagccaagcgtgacc

SEQ ID NO: 61 - DNA, 8 bp, Homo sapiens
gctaatcc

SEQ ID NO: 62 - DNA, 12 bp, Homo sapiens
gcttttcccaca

SEQ ID NO: 63 - DNA, 7 bp, Homo sapiens
ggaccct

SEQ ID NO: 64 - DNA, 12 bp, Homo sapiens
ggccataaatca

SEQ ID NO: 65 - DNA, 12 bp, Homo sapiens
gggggtgtgtcc

SEQ ID NO: 66 - DNA, 14 bp, Homo sapiens
ggggtcaaaggtca

SEQ ID NO: 67 - DNA, 10 bp, Homo sapiens
ggtcacgtga

SEQ ID NO: 68 - DNA, 12 bp, Homo sapiens
ggtccctaggga

SEQ ID NO: 69 - DNA, 7 bp, Homo sapiens
gtaaaca

SEQ ID NO: 70 - DNA, 8 bp, Homo sapiens
gtaaacaa

SEQ ID NO: 71 - DNA, 14 bp, Homo sapiens
gtaaacatgtttac

SEQ ID NO: 72 - DNA, 9 bp, Homo sapiens
gtaataaaa

SEQ ID NO: 73 - DNA, 10 bp, Homo sapiens
gtacctacct

SEQ ID NO: 74 - DNA, 8 bp, Homo sapiens
gtcacgtg

SEQ ID NO: 75 - DNA, 10 bp, Homo sapiens
gtcacgtgac

SEQ ID NO: 76 - DNA, 12 bp, Homo sapiens
gtccccagggga

SEQ ID NO: 77 - DNA, 12 bp, Homo sapiens
gtgcgcatgcgc

SEQ ID NO: 78 - DNA, 10 bp, Homo sapiens
gtgggcccca

SEQ ID NO: 79 - DNA, 16 bp, Homo sapiens
tcacacctaggtgtga

SEQ ID NO: 80 - DNA, 7 bp, Homo sapiens
tcacgtg

SEQ ID NO: 81 - DNA, 16 bp, Homo sapiens
tgacctttaaaggtca

SEQ ID NO: 82 - DNA, 14 bp, Homo sapiens
tgatgacgtcatca

SEQ ID NO: 83 - DNA, 12 bp, Homo sapiens
tgccacgtggca

SEQ ID NO: 84 - DNA, 7 bp, Homo sapiens
tgctggt

SEQ ID NO: 85 - DNA, 10 bp, Homo sapiens
tggcagttgg

SEQ ID NO: 86 - DNA, 8 bp, Homo sapiens
ttacgtaa

SEQ ID NO: 87 - DNA, 7 bp, Homo sapiens
ttactaa

SEQ ID NO: 88 - DNA, 13 bp, Homo sapiens
ttgccatggcaac

SEQ ID NO: 89 - DNA, 8 bp, Homo sapiens
ttgtttac

SEQ ID NO: 90 - DNA, 11 bp, Homo sapiens
tttaaaggtca

SEQ ID NO: 91 - DNA, 11 bp, Homo sapiens
tttccccacac

SEQ ID NO: 92 - DNA, 12 bp, Homo sapiens
tttccccacacg

SEQ ID NO: 93 - DNA, 12 bp, Homo sapiens
tttcccgccaaa

SEQ ID NO: 94 - DNA, 12 bp, Homo sapiens
tttggcgccaaa

SEQ ID NO: 95 - DNA, 14 bp, Homo sapiens
ttttccatggaaaa

SEQ ID NO: 96 - DNA, 14 bp, Homo sapiens
  modified_base (14)..(14): a, c, t, g, unknown or other
aaaaagcggaagtn

SEQ ID NO: 97 - DNA, 18 bp, Homo sapiens
  modified_base (17)..(18): a, c, t, g, unknown or other
aaaaatggcgccaaaann

SEQ ID NO: 98 - DNA, 15 bp, Homo sapiens
aaagatcaaaggrww

SEQ ID NO: 99 - DNA, 12 bp, Homo sapiens
  modified_base (12)..(12): a, c, t, g, unknown or other
aacccggaagtn

SEQ ID NO: 100 - DNA, 12 bp, Homo sapiens
aacccggaagtr

SEQ ID NO: 101 - DNA, 14 bp, Homo sapiens
  modified_base (13)..(14): a, c, t, g, unknown or other
aaccgttaacggnn

SEQ ID NO: 102 - DNA, 11 bp, Homo sapiens
  modified_base (11)..(11): a, c, t, g, unknown or other
acccggaagtn

SEQ ID NO: 103 - DNA, 10 bp, Homo sapiens
  modified_base (10)..(10): a, c, t, g, unknown or other
accggaagtn

SEQ ID NO: 104 - DNA, 10 bp, Homo sapiens
  modified_base (10)..(10): a, c, t, g, unknown or other
accggaaryn

SEQ ID NO: 105 - DNA, 7 bp, Homo sapiens
  modified_base (7)..(7): a, c, t, g, unknown or other
agataan

SEQ ID NO: 106 - DNA, 8 bp, Homo sapiens
  modified_base (7)..(8): a, c, t, g, unknown or other
agataann

SEQ ID NO: 107 - DNA, 8 bp, Homo sapiens
agataasr

SEQ ID NO: 108 - DNA, 10 bp, Homo sapiens
  modified_base (9)..(10): a, c, t, g, unknown or other
aggtgtgann

SEQ ID NO: 109 - DNA, 8 bp, Homo sapiens
  modified_base (7)..(7): a, c, t, g, unknown or other
aggtgtnr

SEQ ID NO: 110 - DNA, 10 bp, Homo sapiens
  modified_base (10)..(10): a, c, t, g, unknown or other
ccaataaaan

SEQ ID NO: 111 - DNA, 14 bp, Homo sapiens
ccgaaaccgaaacy

SEQ ID NO: 112 - DNA, 7 bp, Homo sapiens
ctcgagg

SEQ ID NO: 113 - DNA, 7 bp, Homo sapiens
gcttccw

SEQ ID NO: 114 - DNA, 10 bp, Homo sapiens
ggcgggaaah

SEQ ID NO: 115 - DNA, 10 bp, Homo sapiens
  modified_base (10)..(10): a, c, t, g, unknown or other
ggcgggaarn

SEQ ID NO: 116 - DNA, 8 bp, Homo sapiens
ghcacgtg

SEQ ID NO: 117 - DNA, 8 bp, Homo sapiens
  modified_base (2)..(2): a, c, t, g, unknown or other
gncacgtg

SEQ ID NO: 118 - DNA, 8 bp, Homo sapiens
gtaaacaw

SEQ ID NO: 119 - DNA, 11 bp, Homo sapiens
  modified_base (11)..(11): a, c, t, g, unknown or other
tcaaggtcawn

SEQ ID NO: 120 - DNA, 7 bp, Homo sapiens
tgcaccy

SEQ ID NO: 121 - DNA, 7 bp, Homo sapiens
tgcattt

SEQ ID NO: 122 - DNA, 6 bp, Homo sapiens
tgctgg

SEQ ID NO: 123 - DNA, 17 bp, Homo sapiens
tgctttctaggaattmm

SEQ ID NO: 124 - DNA, 12 bp, Homo sapiens
tggggaagggcm

SEQ ID NO: 125 - DNA, 8 bp, Homo sapiens
ttgacags

SEQ ID NO: 126 - DNA, 14 bp, Homo sapiens
ttttcccgccaaaw

SEQ ID NO: 127 - DNA, 11 bp, Homo sapiens
aaagtaaacaa

SEQ ID NO: 128 - DNA, 15 bp, Homo sapiens
aacaatamcattgtt

SEQ ID NO: 129 - DNA, 15 bp, Homo sapiens
  modified_base (8)..(8): a, c, t, g, unknown or other
aacaatancattgtt

SEQ ID NO: 130 - DNA, 15 bp, Homo sapiens
  modified_base (8)..(8): a, c, t, g, unknown or other
aacaatknyagtgtt

SEQ ID NO: 131 - DNA, 15 bp, Homo sapiens
  modified_base (7)..(8): a, c, t, g, unknown or other
aacaatnncattgtt

SEQ ID NO: 132 - DNA, 15 bp, Homo sapiens
  modified_base (7)..(9): a, c, t, g, unknown or other
aacaatnnnagtgtt

SEQ ID NO: 133 - DNA, 16 bp, Homo sapiens
  modified_base (7)..(9): a, c, t, g, unknown or other
aacaatnnncattgtt

SEQ ID NO: 134 - DNA, 10 bp, Homo sapiens
aacavbtgtt

SEQ ID NO: 135 - DNA, 17 bp, Homo sapiens
  modified_base (8)..(10): a, c, t, g, unknown or other
aaccggwnnnwccggtt

SEQ ID NO: 136 - DNA, 15 bp, Homo sapiens
aagaacatwhtgttc

SEQ ID NO: 137 - DNA, 18 bp, Homo sapiens
  modified_base (8)..(11): a, c, t, g, unknown or other
aaggtcannnnaaggtca

SEQ ID NO: 138 - DNA, 18 bp, Homo sapiens
  modified_base (3)..(3): a, c, t, g, unknown or other
aantaggtcagtaggtca

SEQ ID NO: 139 - DNA, 16 bp, Homo sapiens
aarggtcaaaaggtca

SEQ ID NO: 140 - DNA, 12 bp, Homo sapiens
  modified_base (7)..(7): a, c, t, g, unknown or other
acaatancattg

SEQ ID NO: 141 - DNA, 14 bp, Homo sapiens
accggawatccggt

SEQ ID NO: 142 - DNA, 16 bp, Homo sapiens
accgttarraccgtta

SEQ ID NO: 143 - DNA, 14 bp, Homo sapiens
actactawwwwtag

SEQ ID NO: 144 - DNA, 10 bp, Homo sapiens
acvaggaagt

SEQ ID NO: 145 - DNA, 15 bp, Homo sapiens
agatgkdgagataag

SEQ ID NO: 146 - DNA, 17 bp, Homo sapiens
  modified_base (7)..(11): a, c, t, g, unknown or other
aggtcannnnntgacct

SEQ ID NO: 147 - DNA, 19 bp, Homo sapiens
  modified_base (10)..(10): a, c, t, g, unknown or other
aggtgtgaanttcacacct

SEQ ID NO: 148 - DNA, 19 bp, Homo sapiens
aggtgtgaawttcacacct

SEQ ID NO: 149 - DNA, 19 bp, Homo sapiens
aggtgtgawwwtcacacct

SEQ ID NO: 150 - DNA, 18 bp, Homo sapiens
agtgttaacagarcacct

SEQ ID NO: 151 - DNA, 10 bp, Homo sapiens
  modified_base (2)..(2): a, c, t, g, unknown or other
anacagctgc

SEQ ID NO: 152 - DNA, 8 bp, Homo sapiens
  modified_base (2)..(2): a, c, t, g, unknown or other
ancagctg

SEQ ID NO: 153 - DNA, 15 bp, Homo sapiens
arggtcaaaaggtca

SEQ ID NO: 154 - DNA, 17 bp, Homo sapiens
  modified_base (9)..(9): a, c, t, g, unknown or other
ataaacaanwgtaaaca

SEQ ID NO: 155 - DNA, 15 bp, Homo sapiens
  modified_base (7)..(8): a, c, t, g, unknown or other
atcaatnncattgat

SEQ ID NO: 156 - DNA, 13 bp, Homo sapiens
  modified_base (8)..(8): a, c, t, g, unknown or other
atgaatknyagtc

SEQ ID NO: 157 - DNA, 15 bp, Homo sapiens
atgaatwycattcat

SEQ ID NO: 158 - DNA, 9 bp, Homo sapiens
atgastcat

SEQ ID NO: 159 - DNA, 16 bp, Homo sapiens
atgcgggyrcccgcat

SEQ ID NO: 160 - DNA, 14 bp, Homo sapiens
atgmataattaatg

SEQ ID NO: 161 - DNA, 12 bp, Homo sapiens
  modified_base (7)..(7): a, c, t, g, unknown or other
atttctnagaaa

SEQ ID NO: 162 - DNA, 10 bp, Homo sapiens
avcaggaagt

SEQ ID NO: 163 - DNA, 17 bp, Homo sapiens
  modified_base (7)..(11): a, c, t, g, unknown or other
cacgtgnnnnncacgtg

SEQ ID NO: 164 - DNA, 8 bp, Homo sapiens
cgataasc

SEQ ID NO: 165 - DNA, 6 bp, Homo sapiens
cggccg

SEQ ID NO: 166 - DNA, 14 bp, Homo sapiens
cggasrswysccga

SEQ ID NO: 167 - DNA, 16 bp, Homo sapiens
  modified_base (9)..(9): a, c, t, g, unknown or other
cttggcacngtgccaa

SEQ ID NO: 168 - DNA, 10 bp, Homo sapiens
cwggcgggaa

SEQ ID NO: 169 - DNA, 14 bp, Homo sapiens
  modified_base (12)..(13): a, c, t, g, unknown or other
gaccccccgcgnng

SEQ ID NO: 170 - DNA, 10 bp, Homo sapiens
gagsccgagc

SEQ ID NO: 171 - DNA, 15 bp, Homo sapiens
gartggtcatcgccc

SEQ ID NO: 172 - DNA, 12 bp, Homo sapiens
  modified_base (9)..(9): a, c, t, g, unknown or other
gcgaccacnctg

SEQ ID NO: 173 - DNA, 8 bp, Homo sapiens
gggtgcat

SEQ ID NO: 174 - DNA, 25 bp, Homo sapiens
gggttttgaaggatgartaggagtt

SEQ ID NO: 175 - DNA, 15 bp, Homo sapiens
  modified_base (3)..(3): a, c, t, g, unknown or other
ggntctcgcgagaac

SEQ ID NO: 176 - DNA, 16 bp, Homo sapiens
  modified_base (8)..(9): a, c, t, g, unknown or other
ggtgtganntcacacc

SEQ ID NO: 177 - DNA, 16 bp, Homo sapiens
ggtgtgawatcacacc

SEQ ID NO: 178 - DNA, 10 bp, Homo sapiens
  modified_base (2)..(2): a, c, t, g, unknown or other
gnccacgtgg

SEQ ID NO: 179 - DNA, 12 bp, Homo sapiens
gsctgtcactca

SEQ ID NO: 180 - DNA, 14 bp, Homo sapiens
  modified_base (10)..(10): a, c, t, g, unknown or other
gtcacgctcnctga

SEQ ID NO: 181 - DNA, 15 bp, Homo sapiens
gtggtcccggatyat

SEQ ID NO: 182 - DNA, 9 bp, Homo sapiens
gyaataaaa

SEQ ID NO: 183 - DNA, 14 bp, Homo sapiens
  modified_base (7)..(8): a, c, t, g, unknown or other
taattrnnyaatta

SEQ ID NO: 184 - DNA, 14 bp, Homo sapiens
  modified_base (8)..(8): a, c, t, g, unknown or other
taattrsnyaatta

SEQ ID NO: 185 - DNA, 11 bp, Homo sapiens
  modified_base (6)..(6): a, c, t, g, unknown or other
taatynaatta

SEQ ID NO: 186 - DNA, 10 bp, Homo sapiens
taatyratta

SEQ ID NO: 187 - DNA, 11 bp, Homo sapiens
taatytaatta

SEQ ID NO: 188 - DNA, 11 bp, Homo sapiens
taatyyaatta

SEQ ID NO: 189 - DNA, 11 bp, Homo sapiens
  modified_base (6)..(6): a, c, t, g, unknown or other
taayynaatta

SEQ ID NO: 190 - DNA, 9 bp, Homo sapiens
tatgcwaat

SEQ ID NO: 191 - DNA, 13 bp, Homo sapiens
  modified_base (7)..(7): a, c, t, g, unknown or other
tcaatancattga

SEQ ID NO: 192 - DNA, 13 bp, Homo sapiens
  modified_base (6)..(7): a, c, t, g, unknown or other
tcaatnncattga

SEQ ID NO: 193 - DNA, 13 bp, Homo sapiens
  modified_base (6)..(8): a, c, t, g, unknown or other
tcaatnnnattga

SEQ ID NO: 194 - DNA, 20 bp, Homo sapiens
  modified_base (9)..(12): a, c, t, g, unknown or other
tcacacctnnnnaggtgtga

SEQ ID NO: 195 - DNA, 13 bp, Homo sapiens
  modified_base (7)..(7): a, c, t, g, unknown or other
tgaatancattca

SEQ ID NO: 196 - DNA, 12 bp, Homo sapiens
tgacagstgtca

SEQ ID NO: 197 - DNA, 15 bp, Homo sapiens
  modified_base (8)..(8): a, c, t, g, unknown or other
tgcacacnctgaaaa

SEQ ID NO: 198 - DNA, 10 bp, Homo sapiens
tggaacagma

SEQ ID NO: 199 - DNA, 10 bp, Homo sapiens
  modified_base (3)..(3): a, c, t, g, unknown or other
trngtaaaca

SEQ ID NO: 200 - DNA, 9 bp, Homo sapiens
ttagtmagc

SEQ ID NO: 201 - DNA, 10 bp, Homo sapiens
  modified_base (6)..(6): a, c, t, g, unknown or other
ttccknagaa

SEQ ID NO: 202 - DNA, 15 bp, Homo sapiens
  modified_base (7)..(9): a, c, t, g, unknown or other
ttcgaannnttcgaa

SEQ ID NO: 203 - DNA, 13 bp, Homo sapiens
  modified_base (9)..(10): a, c, t, g, unknown or other
ttctagaannttc

SEQ ID NO: 204 - DNA, 14 bp, Homo sapiens
ttgacagstgtcaa

SEQ ID NO: 205 - DNA, 13 bp, Homo sapiens
tttcaaggcyccc

SEQ ID NO: 206 - DNA, 15 bp, Homo sapiens
  modified_base (8)..(8): a, c, t, g, unknown or other
tttccaynrtggaaa

SEQ ID NO: 207 - DNA, 14 bp, Homo sapiens
tttccccacacrac

SEQ ID NO: 208 - DNA, 10 bp, Homo sapiens
ttttatkrgg

SEQ ID NO: 209 - DNA, 14 bp, Homo sapiens
  modified_base (14)..(14): a, c, t, g, unknown or other
aaaaagmggaagtn

SEQ ID NO: 210 - DNA, 14 bp, Homo sapiens
  modified_base (7)..(7): a, c, t, g, unknown or other
  modified_base (14)..(14): a, c, t, g, unknown or other
aaaaagnggaagtn

SEQ ID NO: 211 - DNA, 11 bp, Homo sapiens
aaccggaartr

SEQ ID NO: 212 - DNA, 10 bp, Homo sapiens
  modified_base (10)..(10): a, c, t, g, unknown or other
accggaartn

SEQ ID NO: 213 - DNA, 14 bp, Homo sapiens
  modified_base (14)..(14): a, c, t, g, unknown or other
accggawatccggn

SEQ ID NO: 214 - DNA, 10 bp, Homo sapiens
  modified_base (10)..(10): a, c, t, g, unknown or other
accggawgyn

SEQ ID NO: 215 - DNA, 14 bp, Homo sapiens
  modified_base (7)..(7): a, c, t, g, unknown or other
  modified_base (14)..(14): a, c, t, g, unknown or other
aggtcantgacctn

SEQ ID NO: 216 - DNA, 11 bp, Homo sapiens
  modified_base (11)..(11): a, c, t, g, unknown or other
amccggatgtn

SEQ ID NO: 217 - DNA, 12 bp, Homo sapiens
avytatcgatad

SEQ ID NO: 218 - DNA, 15 bp, Homo sapiens
awcgaaaccgaaacy

SEQ ID NO: 219 - DNA, 6 bp, Homo sapiens
ccaata

SEQ ID NO: 220 - DNA, 10 bp, Homo sapiens
  modified_base (10)..(10): a, c, t, g, unknown or other
cccatwaaan

SEQ ID NO: 221 - DNA, 15 bp, Homo sapiens
  modified_base (15)..(15): a, c, t, g, unknown or other
ccggaascggaagtn

SEQ ID NO: 222 - DNA, 10 bp, Homo sapiens
ccwggaatgy

SEQ ID NO: 223 - DNA, 7 bp, Homo sapiens
cgsgtaa

SEQ ID NO: 224 - DNA, 14 bp, Homo sapiens
  modified_base (14)..(14): a, c, t, g, unknown or other
ctcgracccgtgcn

SEQ ID NO: 225 - DNA, 17 bp, Homo sapiens
  modified_base (16)..(17): a, c, t, g, unknown or other
ctttcccmyaacacknn

SEQ ID NO: 226 - DNA, 10 bp, Homo sapiens
  modified_base (10)..(10): a, c, t, g, unknown or other
cyaataaaan

SEQ ID NO: 227 - DNA, 12 bp, Homo sapiens
gaaasygaaasy

SEQ ID NO: 228 - DNA, 14 bp, Homo sapiens
  modified_base (14)..(14): a, c, t, g, unknown or other
gaatgacacrgcgn

SEQ ID NO: 229 - DNA, 20 bp, Homo sapiens
gagcctggtactgwgcctgr

SEQ ID NO: 230 - DNA, 8 bp, Homo sapiens
ggcvgttr

SEQ ID NO: 231 - DNA, 10 bp, Homo sapiens
  modified_base (2)..(2): a, c, t, g, unknown or other
  modified_base (10)..(10): a, c, t, g, unknown or other
gncacgtgyn

SEQ ID NO: 232 - DNA, 10 bp, Homo sapiens
  modified_base (10)..(10): a, c, t, g, unknown or other
gtaatwaaan

SEQ ID NO: 233 - DNA, 15 bp, Homo sapiens
  modified_base (8)..(9): a, c, t, g, unknown or other
  modified_base (15)..(15): a, c, t, g, unknown or other
gtcacgcnnmattan

SEQ ID NO: 234 - DNA, 10 bp, Homo sapiens
  modified_base (10)..(10): a, c, t, g, unknown or other
gtcgtwaaan

SEQ ID NO: 235 - DNA, 13 bp, Homo sapiens
  modified_base (7)..(7): a, c, t, g, unknown or other
gttaatnattaay

SEQ ID NO: 236 - DNA, 10 bp, Homo sapiens
  modified_base (10)..(10): a, c, t, g, unknown or other
taatcratan

SEQ ID NO: 237 - DNA, 10 bp, Homo sapiens
trtttacttw

SEQ ID NO: 238 - DNA, 10 bp, Homo sapiens
  modified_base (10)..(10): a, c, t, g, unknown or other
tsaaggtcan

SEQ ID NO: 239 - DNA, 8 bp, Homo sapiens
ttacgyam

SEQ ID NO: 240 - DNA, 15 bp, Homo sapiens
  modified_base (7)..(9): a, c, t, g, unknown or other
ttggcannntgccar

SEQ ID NO: 241 - DNA, 7 bp, Homo sapiens
aytraat

SEQ ID NO: 242 - DNA, 15 bp, Homo sapiens
  modified_base (7)..(9): a, c, t, g, unknown or other
aacaatnnnaktgtt

SEQ ID NO: 243 - DNA, 16 bp, Homo sapiens
  modified_base (7)..(10): a, c, t, g, unknown or other
aacaatnnnnaktgtt

SEQ ID NO: 244 - DNA, 15 bp, Homo sapiens
aaggkgrcgcaggca

SEQ ID NO: 245 - DNA, 14 bp, Homo sapiens
accctmaaggtyrt

SEQ ID NO: 246 - DNA, 12 bp, Homo sapiens
  modified_base (3)..(3): a, c, t, g, unknown or other
  modified_base (11)..(11): a, c, t, g, unknown or other
acngttaaacng

SEQ ID NO: 247 - DNA, 10 bp, Homo sapiens
akgmcacgta

SEQ ID NO: 248 - DNA, 10 bp, Homo sapiens
amcatatgkt

SEQ ID NO: 249 - DNA, 10 bp, Homo sapiens
  modified_base (2)..(2): a, c, t, g, unknown or other
  modified_base (9)..(9): a, c, t, g, unknown or other
ancatatgnt

SEQ ID NO: 250 - DNA, 13 bp, Homo sapiens
  modified_base (2)..(2): a, c, t, g, unknown or other
anrtaaayaaaca

SEQ ID NO: 251 - DNA, 18 bp, Homo sapiens
  modified_base (9)..(11): a, c, t, g, unknown or other
arrggtcannnrrggtca

SEQ ID NO: 252 - DNA, 10 bp, Homo sapiens
awcagctgwt

SEQ ID NO: 253 - DNA, 20 bp, Homo sapiens
  modified_base (3)..(3): a, c, t, g, unknown or other
  modified_base (18)..(18): a, c, t, g, unknown or other
awntaggtcatgacctanwt

SEQ ID NO: 254 - DNA, 15 bp, Homo sapiens
  modified_base (6)..(6): a, c, t, g, unknown or other
  modified_base (8)..(10): a, c, t, g, unknown or other
cccgcntnnnrcgaa

SEQ ID NO: 255 - DNA, 9 bp, Homo sapiens
ccrrtcrgg

SEQ ID NO: 256 - DNA, 12 bp, Homo sapiens
  modified_base (5)..(5): a, c, t, g, unknown or other
cgtrnaaartga

SEQ ID NO: 257 - DNA, 20 bp, Homo sapiens
  modified_base (2)..(3): a, c, t, g, unknown or other
cnnbrgcgccccctgstggc

SEQ ID NO: 258 - DNA, 14 bp, Homo sapiens
  modified_base (11)..(13): a, c, t, g, unknown or other
gaccacmcacnnng

SEQ ID NO: 259 - DNA, 11 bp, Homo sapiens
gccmcgcccmc

SEQ ID NO: 260 - DNA, 10 bp, Homo sapiens
  modified_base (2)..(2): a, c, t, g, unknown or other
  modified_base (9)..(9): a, c, t, g, unknown or other
gncacgtgnc

SEQ ID NO: 261 - DNA, 17 bp, Homo sapiens
  modified_base (16)..(16): a, c, t, g, unknown or other
grggtcaaaaggtcana

SEQ ID NO: 262 - DNA, 16 bp, Homo sapiens
grggtcaaaagktcac

SEQ ID NO: 263 - DNA, 16 bp, Homo sapiens
  modified_base (8)..(9): a, c, t, g, unknown or other
grgttcannrrgttca

SEQ ID NO: 264 - DNA, 15 bp, Homo sapiens
gtcwgctgtyyctct

SEQ ID NO: 265 - DNA, 13 bp, Homo sapiens
gttgycatggaac

SEQ ID NO: 266 - DNA, 12 bp, Homo sapiens
gycatcmatcat

SEQ ID NO: 267 - DNA, 16 bp, Homo sapiens
taattagyrytratta

SEQ ID NO: 268 - DNA, 13 bp, Homo sapiens
taattrcyaatta

SEQ ID NO: 269 - DNA, 13 bp, Homo sapiens
  modified_base (6)..(8): a, c, t, g, unknown or other
tgaatnnnaktca

SEQ ID NO: 270 - DNA, 14 bp, Homo sapiens
tgaatrtkcagtca

SEQ ID NO: 271 - DNA, 14 bp, Homo sapiens
tggkctarcctcga

SEQ ID NO: 272 - DNA, 8 bp, Homo sapiens
ttcyattc

SEQ ID NO: 273 - DNA, 10 bp, Homo sapiens
tttccratgg

SEQ ID NO: 274 - DNA, 17 bp, Homo sapiens
  modified_base (7)..(7): a, c, t, g, unknown or other
  modified_base (12)..(13): a, c, t, g, unknown or other
tttcgcntggcnngtca

SEQ ID NO: 275 - DNA, 16 bp, Homo sapiens
twcccayaatgcattg

SEQ ID NO: 276 - DNA, 20 bp, Homo sapiens
  modified_base (7)..(7): a, c, t, g, unknown or other
  modified_base (9)..(10): a, c, t, g, unknown or other
  modified_base (20)..(20): a, c, t, g, unknown or other
agatstndnndsagataasn

SEQ ID NO: 277 - DNA, 15 bp, Homo sapiens
argaggmcaaaatgw

SEQ ID NO: 278 - DNA, 15 bp, Homo sapiens
atttcccagvakscy

SEQ ID NO: 279 - DNA, 10 bp, Homo sapiens
ggmratacgs

SEQ ID NO: 280 - DNA, 16 bp, Homo sapiens
aacaatrtkcagwgtt

SEQ ID NO: 281 - DNA, 15 bp, Homo sapiens
adggyagyagcatct

SEQ ID NO: 282 - DNA, 16 bp, Homo sapiens
  modified_base (9)..(9): a, c, t, g, unknown or other
aggtgtkanggtgtsa

SEQ ID NO: 283 - DNA, 18 bp, Homo sapiens
  modified_base (9)..(10): a, c, t, g, unknown or other
aggtgtkanntmacacct

SEQ ID NO: 284 - DNA, 20 bp, Homo sapiens
  modified_base (7)..(7): a, c, t, g, unknown or other
  modified_base (9)..(9): a, c, t, g, unknown or other
  modified_base (12)..(12): a, c, t, g, unknown or other
  modified_base (14)..(14): a, c, t, g, unknown or other
aggtgtnanwwntnacacct

SEQ ID NO: 285 - DNA, 16 bp, Homo sapiens
atcaatrtkcagwgat

SEQ ID NO: 286 - DNA, 17 bp, Homo sapiens
  modified_base (7)..(11): a, c, t, g, unknown or other
atcratnnnnnatcrat

SEQ ID NO: 287 - DNA, 18 bp, Homo sapiens
  modified_base (7)..(12): a, c, t, g, unknown or other
atcratnnnnnnatcrat

SEQ ID NO: 288 - DNA, 16 bp, Homo sapiens
atgaatrtkcagwcat

SEQ ID NO: 289 - DNA, 25 bp, Homo sapiens
cctcatggtgycytwytcccttgtg

SEQ ID NO: 290 - DNA, 14 bp, Homo sapiens
  modified_base (13)..(13): a, c, t, g, unknown or other
gaccmccyrmtgng

SEQ ID NO: 291 - DNA, 8 bp, Homo sapiens
gcsgsgsg

SEQ ID NO: 292 - DNA, 9 bp, Homo sapiens
  modified_base (5)..(5): a, c, t, g, unknown or other
ggmtnakcc

SEQ ID NO: 293 - DNA, 18 bp, Homo sapiens
  modified_base (6)..(6): a, c, t, g, unknown or other
  modified_base (8)..(8): a, c, t, g, unknown or other
  modified_base (11)..(11): a, c, t, g, unknown or other
  modified_base (13)..(13): a, c, t, g, unknown or other
ggtgtnanwwntnacacc

SEQ ID NO: 294 - DNA, 18 bp, Homo sapiens
  modified_base (8)..(11): a, c, t, g, unknown or other
ggygtgannnntcacrcc

SEQ ID NO: 295 - DNA, 12 bp, Homo sapiens
grtgmtrgagcc

SEQ ID NO: 296 - DNA, 16 bp, Homo sapiens
  modified_base (7)..(10): a, c, t, g, unknown or other
taawygnnnntaawyg

SEQ ID NO: 297 - DNA, 14 bp, Homo sapiens
tgaatrtkcagwca

SEQ ID NO: 298 - DNA, 11 bp, Homo sapiens
  modified_base (10)..(10): a, c, t, g, unknown or other
tgmatwwwtna

SEQ ID NO: 299 - DNA, 10 bp, Homo sapiens
tgyayggrtg

SEQ ID NO: 300 - DNA, 13 bp, Homo sapiens
tktccwttggaaa

SEQ ID NO: 301 - DNA, 19 bp, Homo sapiens
  modified_base (2)..(2): a, c, t, g, unknown or other
  modified_base (9)..(11): a, c, t, g, unknown or other
  modified_base (18)..(18): a, c, t, g, unknown or other
tnacacctnnnaggtgtna

SEQ ID NO: 302 - DNA, 15 bp, Homo sapiens
trggtyastaggtca

SEQ ID NO: 303 - DNA, 23 bp, Homo sapiens
  modified_base (11)..(13): a, c, t, g, unknown or other
tytcacacctnnnaggtgtgara

SEQ ID NO: 304 - DNA, 20 bp, Homo sapiens
aaacykgttwdacmrgtttb

SEQ ID NO: 305 - DNA, 15 bp, Homo sapiens
  modified_base (13)..(13): a, c, t, g, unknown or other
  modified_base (15)..(15): a, c, t, g, unknown or other
gacccccygytgngn

SEQ ID NO: 306 - DNA, 19 bp, Homo sapiens
  modified_base (13)..(13): a, c, t, g, unknown or other
  modified_base (17)..(17): a, c, t, g, unknown or other
  modified_base (19)..(19): a, c, t, g, unknown or other
tttyacgcwtgantgmnyn

SEQ ID NO: 307 - DNA, 14 bp, Homo sapiens
accytmarggtrtg

SEQ ID NO: 308 - DNA, 17 bp, Homo sapiens
  modified_base (2)..(2): a, c, t, g, unknown or other
  modified_base (11)..(11): a, c, t, g, unknown or other
  modified_base (13)..(13): a, c, t, g, unknown or other
cnattaaawancnatta

SEQ ID NO: 309 - DNA, 17 bp, Homo sapiens
  modified_base (14)..(14): a, c, t, g, unknown or other
tagayraytgmcangaa

SEQ ID NO: 310 - DNA, 15 bp, Homo sapiens
twghwacawtgtwdc

SEQ ID NO: 311 - DNA, 20 bp, Homo sapiens
  modified_base (2)..(2): a, c, t, g, unknown or other
  modified_base (11)..(11): a, c, t, g, unknown or other
gnctgtastrntgbctchtt

SEQ ID NO: 312 - DNA, 8 bp, Homo sapiens
gtaaacaa

SEQ ID NO: 313 - DNA, 10 bp, Homo sapiens
kccacgtgac

SEQ ID NO: 314 - DNA, 11 bp, Homo sapiens
mcgcccacgca

SEQ ID NO: 315 - DNA, 12 bp, Homo sapiens
  modified_base (1)..(1): a, c, t, g, unknown or other
nacccggaagta

SEQ ID NO: 316 - DNA, 10 bp, Homo sapiens
  modified_base (1)..(1): a, c, t, g, unknown or other
naggtgtgaa

SEQ ID NO: 317 - DNA, 10 bp, Homo sapiens
  modified_base (1)..(1): a, c, t, g, unknown or other
natgcgggta

SEQ ID NO: 318 - DNA, 8 bp, Homo sapiens
  modified_base (1)..(1): a, c, t, g, unknown or other
nccacgtg

SEQ ID NO: 319 - DNA, 9 bp, Homo sapiens
  modified_base (1)..(1): a, c, t, g, unknown or other
nccacttaa

SEQ ID NO: 320 - DNA, 10 bp, Homo sapiens
  modified_base (1)..(1): a, c, t, g, unknown or other
ncccccccac

SEQ ID NO: 321 - DNA, 14 bp, Homo sapiens
  modified_base (1)..(1): a, c, t, g, unknown or other
ncgaaaccgaaact

SEQ ID NO: 322 - DNA, 10 bp, Homo sapiens
  modified_base (1)..(2): a, c, t, g, unknown or other
nncacgtgcc

SEQ ID NO: 323 - DNA, 11 bp, Homo sapiens
  modified_base (1)..(2): a, c, t, g, unknown or other
nngcggaagtg

SEQ ID NO: 324 - DNA, 12 bp, Homo sapiens
  modified_base (1)..(1): a, c, t, g, unknown or other
ntgggtgtggcc

SEQ ID NO: 325 - DNA, 12 bp, Homo sapiens
  modified_base (1)..(1): a, c, t, g, unknown or other
ntttccaggaaa

SEQ ID NO: 326 - DNA, 7 bp, Homo sapiens
racgcgt

SEQ ID NO: 327 - DNA, 7 bp, Homo sapiens
rcacaat

SEQ ID NO: 328 - DNA, 10 bp, Homo sapiens
rccggaagtg

SEQ ID NO: 329 - DNA, 15 bp, Homo sapiens
rrggtcaaaaggtca

SEQ ID NO: 330 - DNA, 14 bp, Homo sapiens
rrggtcaaaggtca

SEQ ID NO: 331 - DNA, 15 bp, Homo sapiens
rrgtccaaaggtcaa

SEQ ID NO: 332 - DNA, 7 bp, Homo sapiens
rtaaaca

SEQ ID NO: 333 - DNA, 8 bp, Homo sapiens
rtaaacaa

SEQ ID NO: 334 - DNA, 13 bp, Homo sapiens
rtaaacataaaca

SEQ ID NO: 335 - DNA, 10 bp, Homo sapiens
rtcatgtgac

SEQ ID NO: 336 - DNA, 12 bp, Homo sapiens
vdtttcccgcca

SEQ ID NO: 337 - DNA, 12 bp, Homo sapiens
wacccggaagta

SEQ ID NO: 338 - DNA, 10 bp, Homo sapiens
  modified_base (3)..(3): a, c, t, g, unknown or other
wdnctgggca

SEQ ID NO: 339 - DNA, 10 bp, Homo sapiens
wwwwsygggg

SEQ ID NO: 340 - DNA, 10 bp, Homo sapiens
ygtctagaca

SEQ ID NO: 341 - DNA, 6 bp, Homo sapiens
ytgact

SEQ ID NO: 342 - DNA, 9 bp, Homo sapiens
gctgactaa

SEQ ID NO: 343 - DNA, 13 bp, Homo sapiens
  modified_base (2)..(4): a, c, t, g, unknown or other
  modified_base (10)..(12): a, c, t, g, unknown or other
dnnnggtcannnh

SEQ ID NO: 344 - DNA, 10 bp, Homo sapiens
  modified_base (9)..(10): a, c, t, g, unknown or other
haataaagnn

SEQ ID NO: 345 - DNA, 15 bp, Homo sapiens
  modified_base (2)..(2): a, c, t, g, unknown or other
  modified_base (4)..(4): a, c, t, g, unknown or other
  modified_base (13)..(13): a, c, t, g, unknown or other
hnhnaggtgtganhh

SEQ ID NO: 346 - DNA, 6 bp, Homo sapiens
kgctgr

SEQ ID NO: 347 - DNA, 10 bp, Homo sapiens
  modified_base (10)..(10): a, c, t, g, unknown or other
ksyggaagtn

SEQ ID NO: 348 - DNA, 12 bp, Homo sapiens
  modified_base (1)..(1): a, c, t, g, unknown or other
  modified_base (12)..(12): a, c, t, g, unknown or other
naaaccggtttn

SEQ ID NO: 349 - DNA, 9 bp, Homo sapiens
  modified_base (1)..(1): a, c, t, g, unknown or other
  modified_base (9)..(9): a, c, t, g, unknown or other
naacaatrn

SEQ ID NO: 350 - DNA, 10 bp, Homo sapiens
  modified_base (1)..(1): a, c, t, g, unknown or other
  modified_base (10)..(10): a, c, t, g, unknown or other
naaccgcaan

SEQ ID NO: 351 - DNA, 10 bp, Homo sapiens
  modified_base (1)..(1): a, c, t, g, unknown or other
  modified_base (10)..(10): a, c, t, g, unknown or other
naaccggttn

SEQ ID NO: 352 - DNA, 10 bp, Homo sapiens
  modified_base (1)..(1): a, c, t, g, unknown or other
  modified_base (10)..(10): a, c, t, g, unknown or other
nacacgtgtn

SEQ ID NO: 353 - DNA, 13 bp, Homo sapiens
  modified_base (1)..(1): a, c, t, g, unknown or other
  modified_base (13)..(13): a, c, t, g, unknown or other
nacccggaagtan

SEQ ID NO: 354 - DNA, 11 bp, Homo sapiens
  modified_base (1)..(1): a, c, t, g, unknown or other
  modified_base (11)..(11): a, c, t, g, unknown or other
naccgaaacyn

SEQ ID NO: 355 - DNA, 14 bp, Homo sapiens
  modified_base (1)..(1): a, c, t, g, unknown or other
  modified_base (13)..(14): a, c, t, g, unknown or other
nacgcccacgcann

SEQ ID NO: 356 - DNA, 13 bp, Homo sapiens
  modified_base (1)..(1): a, c, t, g, unknown or other
  modified_base (13)..(13): a, c, t, g, unknown or other
naggtgtgaaawn

SEQ ID NO: 357 - DNA, 11 bp, Homo sapiens
  modified_base (1)..(1): a, c, t, g, unknown or other
  modified_base (11)..(11): a, c, t, g, unknown or other
naggtgtgaan

SEQ ID NO: 358 - DNA, 11 bp, Homo sapiens
  modified_base (1)..(1): a, c, t, g, unknown or other
  modified_base (11)..(11): a, c, t, g, unknown or other
naggtgtgawn

SEQ ID NO: 359 - DNA, 13 bp, Homo sapiens
  modified_base (1)..(1): a, c, t, g, unknown or other
  modified_base (13)..(13): a, c, t, g, unknown or other
natatgctaatkn

SEQ ID NO: 360 - DNA, 12 bp, Homo sapiens
  modified_base (1)..(1): a, c, t, g, unknown or other
  modified_base (12)..(12): a, c, t, g, unknown or other
natgacgtcayn

SEQ ID NO: 361 - DNA, 12 bp, Homo sapiens
  modified_base (1)..(1): a, c, t, g, unknown or other
natgcggaagtr

SEQ ID NO: 362 - DNA, 11 bp, Homo sapiens
  modified_base (1)..(1): a, c, t, g, unknown or other
  modified_base (11)..(11): a, c, t, g, unknown or other
natgcgggtan

SEQ ID NO: 363 - DNA, 10 bp, Homo sapiens
  modified_base (1)..(1): a, c, t, g, unknown or other
  modified_base (10)..(10): a, c, t, g, unknown or other
natgcgggtn

SEQ ID NO: 364 - DNA, 11 bp, Homo sapiens
  modified_base (1)..(1): a, c, t, g, unknown or other
  modified_base (10)..(11): a, c, t, g, unknown or other
nccgccattnn

SEQ ID NO: 365 - DNA, 12 bp, Homo sapiens
  modified_base (1)..(1): a, c, t, g, unknown or other
  modified_base (12)..(12): a, c, t, g, unknown or other
nccgttaacggn

SEQ ID NO: 366 - DNA, 14 bp, Homo sapiens
  modified_base (1)..(1): a, c, t, g, unknown or other
ncgaaaccgaaacy

SEQ ID NO: 367 - DNA, 15 bp, Homo sapiens
  modified_base (1)..(1): a, c, t, g, unknown or other
  modified_base (15)..(15): a, c, t, g, unknown or other
ncgaaaccgaaacyn

SEQ ID NO: 368 - DNA, 12 bp, Homo sapiens
  modified_base (1)..(1): a, c, t, g, unknown or other
  modified_base (12)..(12): a, c, t, g, unknown or other
ncgaccaccgan

SEQ ID NO: 369 - DNA, 10 bp, Homo sapiens
  modified_base (1)..(1): a, c, t, g, unknown or other
  modified_base (9)..(10): a, c, t, g, unknown or other
nctaattann

SEQ ID NO: 370 - DNA, 11 bp, Homo sapiens
  modified_base (1)..(1): a, c, t, g, unknown or other
  modified_base (11)..(11): a, c, t, g, unknown or other
nctcgtaaaan

SEQ ID NO: 371 - DNA, 14 bp, Homo sapiens
  modified_base (1)..(1): a, c, t, g, unknown or other
ngatgacgtcatcr

SEQ ID NO: 372 - DNA, 12 bp, Homo sapiens
  modified_base (1)..(1): a, c, t, g, unknown or other
  modified_base (11)..(12): a, c, t, g, unknown or other
ngcgaccaccnn

SEQ ID NO: 373 - DNA, 12 bp, Homo sapiens
  modified_base (1)..(1): a, c, t, g, unknown or other
  modified_base (12)..(12): a, c, t, g, unknown or other
nggcacgtgccn

SEQ ID NO: 374 - DNA, 11 bp, Homo sapiens
  modified_base (1)..(1): a, c, t, g, unknown or other
  modified_base (11)..(11): a, c, t, g, unknown or other
ngtcgtaaaan

SEQ ID NO: 375 - DNA, 10 bp, Homo sapiens
  modified_base (1)..(1): a, c, t, g, unknown or other
  modified_base (10)..(10): a, c, t, g, unknown or other
nkcacgtgmn

SEQ ID NO: 376 - DNA, 18 bp, Homo sapiens
  modified_base (1)..(2): a, c, t, g, unknown or other
  modified_base (17)..(18): a, c, t, g, unknown or other
nnaaatggcgccaaaann

SEQ ID NO: 377 - DNA, 18 bp, Homo sapiens
  modified_base (1)..(2): a, c, t, g, unknown or other
  modified_base (17)..(18): a, c, t, g, unknown or other
nnaaatggcgccatttnn

SEQ ID NO: 378 - DNA, 11 bp, Homo sapiens
  modified_base (1)..(2): a, c, t, g, unknown or other
  modified_base (10)..(11): a, c, t, g, unknown or other
nnaaccgttnn

SEQ ID NO: 379 - DNA, 15 bp, Homo sapiens
  modified_base (1)..(2): a, c, t, g, unknown or other
  modified_base (14)..(15): a, c, t, g, unknown or other
nnacgcccacgcann

SEQ ID NO: 380 - DNA, 16 bp, Homo sapiens
  modified_base (1)..(2): a, c, t, g, unknown or other
  modified_base (14)..(16): a, c, t, g, unknown or other
nnacgcccacgcannn

SEQ ID NO: 381 - DNA, 14 bp, Homo sapiens
  modified_base (1)..(2): a, c, t, g, unknown or other
  modified_base (13)..(14): a, c, t, g, unknown or other
nnatgacgtcatnn

SEQ ID NO: 382 - DNA, 10 bp, Homo sapiens
  modified_base (1)..(2): a, c, t, g, unknown or other
  modified_base (10)..(10): a, c, t, g, unknown or other
nncacctgcn

SEQ ID NO: 383 - DNA, 10 bp, Homo sapiens
  modified_base (1)..(2): a, c, t, g, unknown or other
  modified_base (9)..(10): a, c, t, g, unknown or other
nncacctgnn

SEQ ID NO: 384 - DNA, 10 bp, Homo sapiens
  modified_base (1)..(2): a, c, t, g, unknown or other
  modified_base (9)..(10): a, c, t, g, unknown or other
nncacgtgnn

SEQ ID NO: 385 - DNA, 10 bp, Homo sapiens
  modified_base (1)..(2): a, c, t, g, unknown or other
  modified_base (9)..(10): a, c, t, g, unknown or other
nncatatgnn

SEQ ID NO: 386 - DNA, 11 bp, Homo sapiens
  modified_base (1)..(2): a, c, t, g, unknown or other
  modified_base (10)..(10): a, c, t, g, unknown or other
nnccgccatnw

SEQ ID NO: 387 - DNA, 15 bp, Homo sapiens
  modified_base (1)..(2): a, c, t, g, unknown or other
  modified_base (14)..(15): a, c, t, g, unknown or other
nngcaacaggtggnn

SEQ ID NO: 388 - DNA, 13 bp, Homo sapiens
  modified_base (1)..(2): a, c, t, g, unknown or other
  modified_base (13)..(13): a, c, t, g, unknown or other
nngcaacaggtgn

SEQ ID NO: 389 - DNA, 16 bp, Homo sapiens
  modified_base (1)..(2): a, c, t, g, unknown or other
  modified_base (15)..(16): a, c, t, g, unknown or other
nnggaagtgcttccnn

SEQ ID NO: 390 - DNA, 10 bp, Homo sapiens
  modified_base (1)..(2): a, c, t, g, unknown or other
  modified_base (9)..(10): a, c, t, g, unknown or other
nnggattann

SEQ ID NO: 391 - DNA, 15 bp, Homo sapiens
  modified_base (1)..(2): a, c, t, g, unknown or other
  modified_base (14)..(15): a, c, t, g, unknown or other
nnmcgcccacgcann

SEQ ID NO: 392 - DNA, 16 bp, Homo sapiens
  modified_base (1)..(2): a, c, t, g, unknown or other
  modified_base (14)..(16): a, c, t, g, unknown or other
nnmcgcccacgcannn

SEQ ID NO: 393 - DNA, 12 bp, Homo sapiens
  modified_base (1)..(5): a, c, t, g, unknown or other
  modified_base (12)..(12): a, c, t, g, unknown or other
nnnnntgctgan

SEQ ID NO: 394 - DNA, 11 bp, Homo sapiens
  modified_base (1)..(4): a, c, t, g, unknown or other
  modified_base (11)..(11): a, c, t, g, unknown or other
nnnntgctgan

SEQ ID NO: 395 - DNA, 14 bp, Homo sapiens
  modified_base (1)..(3): a, c, t, g, unknown or other
  modified_base (12)..(14): a, c, t, g, unknown or other
nnntggcgccannn

SEQ ID NO: 396 - DNA, 21 bp, Homo sapiens
  modified_base (1)..(2): a, c, t, g, unknown or other
  modified_base (21)..(21): a, c, t, g, unknown or other
nnrraaaggaaaccgaaactn

SEQ ID NO: 397 - DNA, 10 bp, Homo sapiens
  modified_base (1)..(2): a, c, t, g, unknown or other
  modified_base (9)..(10): a, c, t, g, unknown or other
nntaaacgnn

SEQ ID NO: 398 - DNA, 15 bp, Homo sapiens
  modified_base (1)..(2): a, c, t, g, unknown or other
  modified_base (14)..(15): a, c, t, g, unknown or other
nntaatccgattann

SEQ ID NO: 399 - DNA, 10 bp, Homo sapiens
  modified_base (1)..(2): a, c, t, g, unknown or other
  modified_base (9)..(10): a, c, t, g, unknown or other
nntaatccnn

SEQ ID NO: 400 - DNA, 10 bp, Homo sapiens
  modified_base (1)..(2): a, c, t, g, unknown or other
  modified_base (9)..(10): a, c, t, g, unknown or other
nntaattann

SEQ ID NO: 401 - DNA, 10 bp, Homo sapiens
  modified_base (1)..(2): a, c, t, g, unknown or other
  modified_base (9)..(10): a, c, t, g, unknown or other
nntaattgnn

SEQ ID NO: 402 - DNA, 10 bp, Homo sapiens
  modified_base (1)..(2): a, c, t, g, unknown or other
  modified_base (9)..(10): a, c, t, g, unknown or other
nntaattrnn

SEQ ID NO: 403 - DNA, 13 bp, Homo sapiens
  modified_base (1)..(2): a, c, t, g, unknown or other
  modified_base (13)..(13): a, c, t, g, unknown or other
nntccagatgtkn

SEQ ID NO: 404 - DNA, 9 bp, Homo sapiens
  modified_base (1)..(2): a, c, t, g, unknown or other
  modified_base (9)..(9): a, c, t, g, unknown or other
nntgccaan

SEQ ID NO: 405 - DNA, 10 bp, Homo sapiens
  modified_base (1)..(2): a, c, t, g, unknown or other
  modified_base (9)..(10): a, c, t, g, unknown or other
nntgccaann

SEQ ID NO: 406 - DNA, 18 bp, Homo sapiens
  modified_base (1)..(2): a, c, t, g, unknown or other
  modified_base (17)..(18): a, c, t, g, unknown or other
nnttttggcgccaaaann

SEQ ID NO: 407 - DNA, 10 bp, Homo sapiens
  modified_base (1)..(2): a, c, t, g, unknown or other
  modified_base (9)..(10): a, c, t, g, unknown or other
nnyaattann

SEQ ID NO: 408 - DNA, 10 bp, Homo sapiens
  modified_base (1)..(2): a, c, t, g, unknown or other
  modified_base (9)..(10): a, c, t, g, unknown or other
nnymattann

SEQ ID NO: 409 - DNA, 11 bp, Homo sapiens
  modified_base (1)..(2): a, c, t, g, unknown or other
  modified_base (10)..(11): a, c, t, g, unknown or other
nnytaattann

SEQ ID NO: 410 - DNA, 15 bp, Homo sapiens
  modified_base (1)..(2): a, c, t, g, unknown or other
  modified_base (14)..(14): a, c, t, g, unknown or other
nnyttccgggaarnr

SEQ ID NO: 411 - DNA, 15 bp, Homo sapiens
  modified_base (1)..(1): a, c, t, g, unknown or other
  modified_base (15)..(15): a, c, t, g, unknown or other
nraaagtgaaagtgn

SEQ ID NO: 412 - DNA, 10 bp, Homo sapiens
  modified_base (1)..(1): a, c, t, g, unknown or other
  modified_base (9)..(10): a, c, t, g, unknown or other
nrcacctgnn

SEQ ID NO: 413 - DNA, 9 bp, Homo sapiens
  modified_base (1)..(1): a, c, t, g, unknown or other
  modified_base (9)..(9): a, c, t, g, unknown or other
nrcaggtgn

SEQ ID NO: 414 - DNA, 10 bp, Homo sapiens
  modified_base (1)..(1): a, c, t, g, unknown or other
  modified_base (10)..(10): a, c, t, g, unknown or other
nrcattccwn

SEQ ID NO: 415 - DNA, 11 bp, Homo sapiens
  modified_base (1)..(1): a, c, t, g, unknown or other
  modified_base (11)..(11): a, c, t, g, unknown or other
nrgataatcyn

SEQ ID NO: 416 - DNA, 16 bp, Homo sapiens
  modified_base (1)..(1): a, c, t, g, unknown or other
  modified_base (15)..(15): a, c, t, g, unknown or other
nrgtccaaagtccany

SEQ ID NO: 417 - DNA, 12 bp, Homo sapiens
  modified_base (1)..(1): a, c, t, g, unknown or other
  modified_base (12)..(12): a, c, t, g, unknown or other
nrttacgtaayn

SEQ ID NO: 418 - DNA, 10 bp, Homo sapiens
  modified_base (1)..(1): a, c, t, g, unknown or other
nryttccggh

SEQ ID NO: 419 - DNA, 10 bp, Homo sapiens
  modified_base (1)..(1): a, c, t, g, unknown or other
  modified_base (9)..(10): a, c, t, g, unknown or other
nstaattann

SEQ ID NO: 420 - DNA, 8 bp, Homo sapiens
  modified_base (1)..(1): a, c, t, g, unknown or other
  modified_base (8)..(8): a, c, t, g, unknown or other
ntaatccn

SEQ ID NO: 421 - DNA, 8 bp, Homo sapiens
  modified_base (1)..(1): a, c, t, g, unknown or other
  modified_base (8)..(8): a, c, t, g, unknown or other
ntaattan

SEQ ID NO: 422 - DNA, 11 bp, Homo sapiens
  modified_base (1)..(1): a, c, t, g, unknown or other
  modified_base (11)..(11): a, c, t, g, unknown or other
ntcaaggtcan

SEQ ID NO: 423 - DNA, 8 bp, Homo sapiens
  modified_base (1)..(1): a, c, t, g, unknown or other
  modified_base (8)..(8): a, c, t, g, unknown or other
ntgacagn

SEQ ID NO: 424 - DNA, 7 bp, Homo sapiens
  modified_base (1)..(1): a, c, t, g, unknown or other
  modified_base (7)..(7): a, c, t, g, unknown or other
ntgacan

SEQ ID NO: 425 - DNA, 9 bp, Homo sapiens
  modified_base (1)..(1): a, c, t, g, unknown or other
  modified_base (9)..(9): a, c, t, g, unknown or other
nttaatccn

SEQ ID NO: 426 - DNA, 12 bp, Homo sapiens
  modified_base (1)..(1): a, c, t, g, unknown or other
  modified_base (11)..(12): a, c, t, g, unknown or other
nwaaccacadnn

SEQ ID NO: 427 - DNA, 8 bp, Homo sapiens
  modified_base (1)..(1): a, c, t, g, unknown or other
  modified_base (8)..(8): a, c, t, g, unknown or other
nyaattan

SEQ ID NO: 428 - DNA, 9 bp, Homo sapiens
  modified_base (1)..(1): a, c, t, g, unknown or other
  modified_base (9)..(9): a, c, t, g, unknown or other
nymataaan

SEQ ID NO: 429 - DNA, 8 bp, Homo sapiens
  modified_base (1)..(1): a, c, t, g, unknown or other
  modified_base (8)..(8): a, c, t, g, unknown or other
nymattan

SEQ ID NO: 430 - DNA, 8 bp, Homo sapiens
  modified_base (1)..(1): a, c, t, g, unknown or other
  modified_base (3)..(3): a, c, t, g, unknown or other
  modified_base (8)..(8): a, c, t, g, unknown or other
nynattan

SEQ ID NO: 431 - DNA, 9 bp, Homo sapiens
  modified_base (1)..(1): a, c, t, g, unknown or other
  modified_base (9)..(9): a, c, t, g, unknown or other
nytaatccn

SEQ ID NO: 432 - DNA, 10 bp, Homo sapiens
  modified_base (1)..(1): a, c, t, g, unknown or other
  modified_base (10)..(10): a, c, t, g, unknown or other
nytaattarn

SEQ ID NO: 433 - DNA, 10 bp, Homo sapiens
  modified_base (1)..(1): a, c, t, g, unknown or other
  modified_base (10)..(10): a, c, t, g, unknown or other
nytagttamn

SEQ ID NO: 434 - DNA, 12 bp, Homo sapiens
  modified_base (1)..(1): a, c, t, g, unknown or other
  modified_base (12)..(12): a, c, t, g, unknown or other
nyytgtttachn

SEQ ID NO: 435 - DNA, 10 bp, Homo sapiens
racatatgty

SEQ ID NO: 436 - DNA, 18 bp, Homo sapiens
  modified_base (18)..(18): a, c, t, g, unknown or other
raggtcaaaaggtcaakn

SEQ ID NO: 437 - DNA, 8 bp, Homo sapiens
rataaaar

SEQ ID NO: 438 - DNA, 12 bp, Homo sapiens
rcggacacaatr

SEQ ID NO: 439 - DNA, 8 bp, Homo sapiens
rggattar

SEQ ID NO: 440 - DNA, 6 bp, Homo sapiens
rggcam

SEQ ID NO: 441 - DNA, 12 bp, Homo sapiens
rgggcactaacy

SEQ ID NO: 442 - DNA, 16 bp, Homo sapiens
  modified_base (15)..(16): a, c, t, g, unknown or other
rrggtcaaagtccrnn

SEQ ID NO: 443 - DNA, 8 bp, Homo sapiens
  modified_base (8)..(8): a, c, t, g, unknown or other
rrggtcan

SEQ ID NO: 444 - DNA, 14 bp, Homo sapiens
rrggtcatgaccyy

SEQ ID NO: 445 - DNA, 10 bp, Homo sapiens
rtcacgtgay

SEQ ID NO: 446 - DNA, 9 bp, Homo sapiens
  modified_base (7)..(9): a, c, t, g, unknown or other
rtgccmnnn

SEQ ID NO: 447 - DNA, 8 bp, Homo sapiens
scacgtgs

SEQ ID NO: 448 - DNA, 8 bp, Homo sapiens
  modified_base (8)..(8): a, c, t, g, unknown or other
symattan

SEQ ID NO: 449 - DNA, 10 bp, Homo sapiens
  modified_base (9)..(10): a, c, t, g, unknown or other
vcagctgbnn

SEQ ID NO: 450 - DNA, 10 bp, Homo sapiens
watgcgcatw

SEQ ID NO: 451 - DNA, 14 bp, Homo sapiens
  modified_base (14)..(14): a, c, t, g, unknown or other
wrcgtaaccacgyn

SEQ ID NO: 452 - DNA, 12 bp, Homo sapiens
  modified_base (12)..(12): a, c, t, g, unknown or other
ygcgcatgcgcn

SEQ ID NO: 453 - DNA, 7 bp, Homo sapiens
ygcggck

SEQ ID NO: 454 - DNA, 12 bp, Homo sapiens
yrattgcaatyr

SEQ ID NO: 455 - DNA, 8 bp, Homo sapiens
  modified_base (8)..(8): a, c, t, g, unknown or other
ytaattan

SEQ ID NO: 456 - DNA, 9 bp, Homo sapiens
agtaaacaa

SEQ ID NO: 457 - DNA, 6 bp, Homo sapiens
gcsggg

SEQ ID NO: 458 - DNA, 10 bp, Homo sapiens
datgastcat

SEQ ID NO: 459 - DNA, 12 bp, Homo sapiens
kgmcagcgtgtc

SEQ ID NO: 460 - DNA, 16 bp, Homo sapiens
  modified_base (1)..(1): a, c, t, g, unknown or other
naacaattkcagtgtt

SEQ ID NO: 461 - DNA, 14 bp, Homo sapiens
  modified_base (1)..(1): a, c, t, g, unknown or other
  modified_base (8)..(8): a, c, t, g, unknown or other
natttccnggaaat

SEQ ID NO: 462 - DNA, 11 bp, Homo sapiens
  modified_base (1)..(1): a, c, t, g, unknown or other
  modified_base (9)..(10): a, c, t, g, unknown or other
nccgccatnnt

SEQ ID NO: 463 - DNA, 10 bp, Homo sapiens
  modified_base (1)..(1): a, c, t, g, unknown or other
ncyaataaaa

SEQ ID NO: 464 - DNA, 10 bp, Homo sapiens
  modified_base (1)..(1): a, c, t, g, unknown or other
ngyaataaaa

SEQ ID NO: 465 - DNA, 17 bp, Homo sapiens
  modified_base (1)..(2): a, c, t, g, unknown or other
  modified_base (15)..(15): a, c, t, g, unknown or other
nncatcccataatantc

SEQ ID NO: 466 - DNA, 20 bp, Homo sapiens
  modified_base (1)..(3): a, c, t, g, unknown or other
  modified_base (12)..(12): a, c, t, g, unknown or other
nnngcatgtccngacatgcc

SEQ ID NO: 467 - DNA, 14 bp, Homo sapiens
  modified_base (1)..(3): a, c, t, g, unknown or other
nnngmcacgtcatc

SEQ ID NO: 468 - DNA, 20 bp, Homo sapiens
  modified_base (1)..(1): a, c, t, g, unknown or other
  modified_base (11)..(14): a, c, t, g, unknown or other
nraaggtcaannnnrggtca

SEQ ID NO: 469 - DNA, 14 bp, Homo sapiens
  modified_base (1)..(1): a, c, t, g, unknown or other
  modified_base (12)..(12): a, c, t, g, unknown or other
ntgccacgtcanca

SEQ ID NO: 470 - DNA, 18 bp, Homo sapiens
  modified_base (1)..(1): a, c, t, g, unknown or other
  modified_base (11)..(12): a, c, t, g, unknown or other
nyaattaaaannyaatta

SEQ ID NO: 471 - DNA, 18 bp, Homo sapiens
  modified_base (9)..(10): a, c, t, g, unknown or other
racatgtynnracatgtc

SEQ ID NO: 472 - DNA, 17 bp, Homo sapiens
  modified_base (8)..(8): a, c, t, g, unknown or other
raggtcantcaaggtca

SEQ ID NO: 473 - DNA, 14 bp, Homo sapiens
  modified_base (8)..(8): a, c, t, g, unknown or other
ragtcaanaagtca

SEQ ID NO: 474 - DNA, 10 bp, Homo sapiens
rcggcrcggc

SEQ ID NO: 475 - DNA, 14 bp, Homo sapiens
  modified_base (7)..(9): a, c, t, g, unknown or other
rgttcrnnnrgttc

SEQ ID NO: 476 - DNA, 8 bp, Homo sapiens
rmatwcca

SEQ ID NO: 477 - DNA, 10 bp, Homo sapiens
rracgcsaaa

SEQ ID NO: 478 - DNA, 17 bp, Homo sapiens
  modified_base (8)..(10): a, c, t, g, unknown or other
rrggtcannnrrggtca

SEQ ID NO: 479 - DNA, 14 bp, Homo sapiens
rtaaacaataaaya

SEQ ID NO: 480 - DNA, 14 bp, Homo sapiens
rtaaacartaaaca

SEQ ID NO: 481 - DNA, 13 bp, Homo sapiens
rtaaacawmaaca

SEQ ID NO: 482 - DNA, 7 bp, Homo sapiens
rtaaaya

SEQ ID NO: 483 - DNA, 11 bp, Homo sapiens
rtaaayaaaca

SEQ ID NO: 484 - DNA, 10 bp, Homo sapiens
rtgtacggrt

SEQ ID NO: 485 - DNA, 19 bp, Homo sapiens
rtgttaaaygtagattaag

SEQ ID NO: 486 - DNA, 13 bp, Homo sapiens
wrtaaayaaacaa

SEQ ID NO: 487 - DNA, 9 bp, Homo sapiens
wttcgaayg

SEQ ID NO: 488 - DNA, 15 bp, Homo sapiens
  modified_base (9)..(9): a, c, t, g, unknown or other
yacgtaacnkacgta

SEQ ID NO: 489 - DNA, 11 bp, Homo sapiens
yggcgctayca

SEQ ID NO: 490 - DNA, 15 bp, Homo sapiens
  modified_base (7)..(9): a, c, t, g, unknown or other
ytggcannntgccaa

SEQ ID NO: 491 - DNA, 15 bp, Homo sapiens
  modified_base (6)..(9): a, c, t, g, unknown or other
ytggcnnnntgccaa

SEQ ID NO: 492 - DNA, 9 bp, Homo sapiens
acccracmy

SEQ ID NO: 493 - DNA, 11 bp, Homo sapiens
tgrtagcgccr

SEQ ID NO: 494 - DNA, 12 bp, Homo sapiens
kctawaaatagm

SEQ ID NO: 495 - DNA, 12 bp, Homo sapiens
  modified_base (12)..(12): a, c, t, g, unknown or other
mccatatawggn

SEQ ID NO: 496 - DNA, 12 bp, Homo sapiens
  modified_base (1)..(1): a, c, t, g, unknown or other
  modified_base (9)..(10): a, c, t, g, unknown or other
  modified_base (12)..(12): a, c, t, g, unknown or other
naaacgatnnan

SEQ ID NO: 497 - DNA, 17 bp, Homo sapiens
  modified_base (1)..(1): a, c, t, g, unknown or other
  modified_base (9)..(9): a, c, t, g, unknown or other
  modified_base (17)..(17): a, c, t, g, unknown or other
naacaatancattgttn

SEQ ID NO: 498 - DNA, 17 bp, Homo sapiens
  modified_base (1)..(1): a, c, t, g, unknown or other
  modified_base (9)..(9): a, c, t, g, unknown or other
  modified_base (17)..(17): a, c, t, g, unknown or other
naacaatknyagtgttn

SEQ ID NO: 499 - DNA, 17 bp, Homo sapiens
  modified_base (1)..(1): a, c, t, g, unknown or other
  modified_base (8)..(10): a, c, t, g, unknown or other
  modified_base (17)..(17): a, c, t, g, unknown or other
naacaatnnnattgttn

SEQ ID NO: 500 - DNA, 16 bp, Homo sapiens
  modified_base (1)..(1): a, c, t, g, unknown or other
  modified_base (16)..(16): a, c, t, g, unknown or other
naaccgcaaaccrcan

SEQ ID NO: 501 - DNA, 10 bp, Homo sapiens
  modified_base (1)..(1): a, c, t, g, unknown or other
  modified_base (10)..(10): a, c, t, g, unknown or other
naaccrcaan

SEQ ID NO: 502 - DNA, 12 bp, Homo sapiens
  modified_base (1)..(1): a, c, t, g, unknown or other
  modified_base (12)..(12): a, c, t, g, unknown or other
naagacgycttn

SEQ ID NO: 503 - DNA, 12 bp, Homo sapiens
  modified_base (1)..(1): a, c, t, g, unknown or other
  modified_base (4)..(4): a, c, t, g, unknown or other
naancgaaasyr

SEQ ID NO: 504 - DNA, 12 bp, Homo sapiens
  modified_base (1)..(1): a, c, t, g, unknown or other
  modified_base (12)..(12): a, c, t, g, unknown or other
naasatcaaagn

SEQ ID NO: 505 - DNA, 10 bp, Homo sapiens
  modified_base (1)..(1): a, c, t, g, unknown or other
  modified_base (9)..(10): a, c, t, g, unknown or other
nacayatgnn

SEQ ID NO: 506 - DNA, 17 bp, Homo sapiens
  modified_base (1)..(1): a, c, t, g, unknown or other
  modified_base (17)..(17): a, c, t, g, unknown or other
nacttccgscggaarmn

SEQ ID NO: 507 - DNA, 17 bp, Homo sapiens
  modified_base (1)..(1): a, c, t, g, unknown or other
  modified_base (17)..(17): a, c, t, g, unknown or other
naggtcamsrtgacctn

SEQ ID NO: 508 - DNA, 12 bp, Homo sapiens
  modified_base (1)..(1): a, c, t, g, unknown or other
namccggaagtr

SEQ ID NO: 509 - DNA, 17 bp, Homo sapiens
  modified_base (1)..(1): a, c, t, g, unknown or other
  modified_base (9)..(9): a, c, t, g, unknown or other
  modified_base (17)..(17): a, c, t, g, unknown or other
natcaatancattgatn

SEQ ID NO: 510 - DNA, 17 bp, Homo sapiens
  modified_base (1)..(1): a, c, t, g, unknown or other
  modified_base (9)..(9): a, c, t, g, unknown or other
  modified_base (17)..(17): a, c, t, g, unknown or other
natcaatknyagtgatn

SEQ ID NO: 511 - DNA, 17 bp, Homo sapiens
  modified_base (1)..(1): a, c, t, g, unknown or other
  modified_base (8)..(10): a, c, t, g, unknown or other
  modified_base (17)..(17): a, c, t, g, unknown or other
natcaatnnnattgatn

SEQ ID NO: 512 - DNA, 17 bp, Homo sapiens
  modified_base (1)..(1): a, c, t, g, unknown or other
  modified_base (9)..(9): a, c, t, g, unknown or other
  modified_base (17)..(17): a, c, t, g, unknown or other
natgaatknyagtcatn

SEQ ID NO: 513 - DNA, 11 bp, Homo sapiens
  modified_base (1)..(1): a, c, t, g, unknown or other
  modified_base (11)..(11): a, c, t, g, unknown or other
natgastcatn

SEQ ID NO: 514 - DNA, 9 bp, Homo sapiens
  modified_base (1)..(1): a, c, t, g, unknown or other
  modified_base (7)..(7): a, c, t, g, unknown or other
  modified_base (9)..(9): a, c, t, g, unknown or other
ncacttnan

SEQ ID NO: 515 - DNA, 10 bp, Homo sapiens
  modified_base (1)..(1): a, c, t, g, unknown or other
  modified_base (10)..(10): a, c, t, g, unknown or other
nccacttran

SEQ ID NO: 516 - DNA, 14 bp, Homo sapiens
  modified_base (1)..(1): a, c, t, g, unknown or other
  modified_base (14)..(14): a, c, t, g, unknown or other
nccggawatccggn

SEQ ID NO: 517 - DNA, 18 bp, Homo sapiens
  modified_base (1)..(1): a, c, t, g, unknown or other
  modified_base (18)..(18): a, c, t, g, unknown or other
nccggawryrywtccggn

SEQ ID NO: 518 - DNA, 16 bp, Homo sapiens
  modified_base (1)..(1): a, c, t, g, unknown or other
  modified_base (6)..(11): a, c, t, g, unknown or other
  modified_base (16)..(16): a, c, t, g, unknown or other
nccggnnnnnnccggn

SEQ ID NO: 519 - DNA, 14 bp, Homo sapiens
  modified_base (1)..(1): a, c, t, g, unknown or other
  modified_base (7)..(7): a, c, t, g, unknown or other
ncgaaanygaaacy

SEQ ID NO: 520 - DNA, 12 bp, Homo sapiens
  modified_base (1)..(1): a, c, t, g, unknown or other
  modified_base (10)..(10): a, c, t, g, unknown or other
  modified_base (12)..(12): a, c, t, g, unknown or other
ncgaccaccnan

SEQ ID NO: 521 - DNA, 12 bp, Homo sapiens
  modified_base (1)..(1): a, c, t, g, unknown or other
nctawaaatagm

SEQ ID NO: 522 - DNA, 16 bp, Homo sapiens
  modified_base (1)..(1): a, c, t, g, unknown or other
  modified_base (14)..(14): a, c, t, g, unknown or other
  modified_base (16)..(16): a, c, t, g, unknown or other
ngaccccccacgangn

SEQ ID NO: 523 - DNA, 20 bp, Homo sapiens
  modified_base (1)..(1): a, c, t, g, unknown or other
  modified_base (9)..(10): a, c, t, g, unknown or other
  modified_base (18)..(20): a, c, t, g, unknown or other
ngaggtcanngagttcannn

SEQ ID NO: 524 - DNA, 12 bp, Homo sapiens
  modified_base (1)..(1): a, c, t, g, unknown or other
  modified_base (5)..(8): a, c, t, g, unknown or other
  modified_base (12)..(12): a, c, t, g, unknown or other
ngccnnnnggcn

SEQ ID NO: 525 - DNA, 13 bp, Homo sapiens
  modified_base (1)..(1): a, c, t, g, unknown or other
  modified_base (5)..(9): a, c, t, g, unknown or other
  modified_base (13)..(13): a, c, t, g, unknown or other
ngccnnnnnggcn

SEQ ID NO: 526 - DNA, 13 bp, Homo sapiens
  modified_base (1)..(1): a, c, t, g, unknown or other
  modified_base (13)..(13): a, c, t, g, unknown or other
nggggawtccccn

SEQ ID NO: 527 - DNA, 11 bp, Homo sapiens
  modified_base (1)..(1): a, c, t, g, unknown or other
  modified_base (11)..(11): a, c, t, g, unknown or other
ngtcgtwaaan

SEQ ID NO: 528 - DNA, 12 bp, Homo sapiens
  modified_base (1)..(1): a, c, t, g, unknown or other
  modified_base (11)..(12): a, c, t, g, unknown or other
ngtcgtwaaann

SEQ ID NO: 529 - DNA, 10 bp, Homo sapiens
  modified_base (1)..(1): a, c, t, g, unknown or other
nhaacbgyyv

SEQ ID NO: 530 - DNA, 14 bp, Homo sapiens
  modified_base (1)..(1): a, c, t, g, unknown or other
  modified_base (13)..(14): a, c, t, g, unknown or other
nmcgcccmcgcann

SEQ ID NO: 531 - DNA, 9 bp, Homo sapiens
  modified_base (1)..(1): a, c, t, g, unknown or other
nmcrattar

SEQ ID NO: 532 - DNA, 14 bp, Homo sapiens
  modified_base (1)..(2): a, c, t, g, unknown or other
  modified_base (13)..(14): a, c, t, g, unknown or other
nnaaaatcratann

SEQ ID NO: 533 - DNA, 14 bp, Homo sapiens
  modified_base (1)..(2): a, c, t, g, unknown or other
  modified_base (14)..(14): a, c, t, g, unknown or other
nnaaaatcratawn

SEQ ID NO: 534 - DNA, 13 bp, Homo sapiens
  modified_base (1)..(2): a, c, t, g, unknown or other
  modified_base (13)..(13): a, c, t, g, unknown or other
nnatgaygcaatn

SEQ ID NO: 535 - DNA, 11 bp, Homo sapiens
  modified_base (1)..(2): a, c, t, g, unknown or other
  modified_base (10)..(11): a, c, t, g, unknown or other
nncamttaann

SEQ ID NO: 536 - DNA, 16 bp, Homo sapiens
  modified_base (1)..(2): a, c, t, g, unknown or other
  modified_base (15)..(16): a, c, t, g, unknown or other
nnmccatatawggknn

SEQ ID NO: 537 - DNA, 21 bp, Homo sapiens
  modified_base (1)..(4): a, c, t, g, unknown or other
  modified_base (18)..(21): a, c, t, g, unknown or other
nnnntgctgastcagcannnn

SEQ ID NO: 538 - DNA, 14 bp, Homo sapiens
  modified_base (1)..(2): a, c, t, g, unknown or other
  modified_base (14)..(14): a, c, t, g, unknown or other
nnrtgacgtcaycn

SEQ ID NO: 539 - DNA, 15 bp, Homo sapiens
  modified_base (1)..(2): a, c, t, g, unknown or other
  modified_base (14)..(15): a, c, t, g, unknown or other
nntaatccgmttann

SEQ ID NO: 540 - DNA, 14 bp, Homo sapiens
  modified_base (1)..(2): a, c, t, g, unknown or other
  modified_base (7)..(8): a, c, t, g, unknown or other
  modified_base (13)..(14): a, c, t, g, unknown or other
nntcccnngggann

SEQ ID NO: 541 - DNA, 10 bp, Homo sapiens
  modified_base (1)..(2): a, c, t, g, unknown or other
  modified_base (4)..(4): a, c, t, g, unknown or other
  modified_base (9)..(10): a, c, t, g, unknown or other
nntnattann

SEQ ID NO: 542 - DNA, 17 bp, Homo sapiens
  modified_base (1)..(2): a, c, t, g, unknown or other
  modified_base (17)..(17): a, c, t, g, unknown or other
nnyatgmataattaatn

SEQ ID NO: 543 - DNA, 15 bp, Homo sapiens
  modified_base (1)..(1): a, c, t, g, unknown or other
  modified_base (8)..(9): a, c, t, g, unknown or other
  modified_base (15)..(15): a, c, t, g, unknown or other
nrggtcannggtcan

SEQ ID NO: 544 - DNA, 10 bp, Homo sapiens
  modified_base (1)..(1): a, c, t, g, unknown or other
  modified_base (10)..(10): a, c, t, g, unknown or other
nrmatwccwn

SEQ ID NO: 545 - DNA, 14 bp, Homo sapiens
  modified_base (1)..(1): a, c, t, g, unknown or other
  modified_base (3)..(3): a, c, t, g, unknown or other
  modified_base (12)..(12): a, c, t, g, unknown or other
  modified_base (14)..(14): a, c, t, g, unknown or other
nrnwaayrttknyn

SEQ ID NO: 546 - DNA, 15 bp, Homo sapiens
  modified_base (1)..(1): a, c, t, g, unknown or other
  modified_base (8)..(8): a, c, t, g, unknown or other
  modified_base (15)..(15): a, c, t, g, unknown or other
nrttaatnattaacn

SEQ ID NO: 547 - DNA, 12 bp, Homo sapiens
  modified_base (1)..(1): a, c, t, g, unknown or other
  modified_base (12)..(12): a, c, t, g, unknown or other
nrttacrtaayn

SEQ ID NO: 548 - DNA, 11 bp, Homo sapiens
  modified_base (1)..(1): a, c, t, g, unknown or other
  modified_base (5)..(7): a, c, t, g, unknown or other
  modified_base (11)..(11): a, c, t, g, unknown or other
nsccnnnggsn

SEQ ID NO: 549 - DNA, 13 bp, Homo sapiens
  modified_base (1)..(1): a, c, t, g, unknown or other
  modified_base (5)..(9): a, c, t, g, unknown or other
  modified_base (13)..(13): a, c, t, g, unknown or other
nsccnnnnnggsn

SEQ ID NO: 550 - DNA, 10 bp, Homo sapiens
  modified_base (1)..(1): a, c, t, g, unknown or other
  modified_base (10)..(10): a, c, t, g, unknown or other
nsctmattan

SEQ ID NO: 551 - DNA, 17 bp, Homo sapiens
  modified_base (1)..(1): a, c, t, g, unknown or other
  modified_base (8)..(10): a, c, t, g, unknown or other
  modified_base (17)..(17): a, c, t, g, unknown or other
ntaattannntaattan

SEQ ID NO: 552 - DNA, 13 bp, Homo sapiens
  modified_base (1)..(1): a, c, t, g, unknown or other
  modified_base (7)..(7): a, c, t, g, unknown or other
  modified_base (13)..(13): a, c, t, g, unknown or other
ntaatynrattan

SEQ ID NO: 553 - DNA, 13 bp, Homo sapiens
  modified_base (1)..(1): a, c, t, g, unknown or other
  modified_base (13)..(13): a, c, t, g, unknown or other
ntaatytaattan

SEQ ID NO: 554 - DNA, 13 bp, Homo sapiens
  modified_base (1)..(1): a, c, t, g, unknown or other
  modified_base (7)..(7): a, c, t, g, unknown or other
  modified_base (13)..(13): a, c, t, g, unknown or other
ntaayynaattan

SEQ ID NO: 555 - DNA, 13 bp, Homo sapiens
  modified_base (1)..(1): a, c, t, g, unknown or other
  modified_base (13)..(13): a, c, t, g, unknown or other
ntaayyyaattan

SEQ ID NO: 556 - DNA, 13 bp, Homo sapiens
  modified_base (1)..(1): a, c, t, g, unknown or other
ntatcgcgayatr

SEQ ID NO: 557 - DNA, 11 bp, Homo sapiens
  modified_base (1)..(1): a, c, t, g, unknown or other
  modified_base (11)..(11): a, c, t, g, unknown or other
ntatgcwaatn

SEQ ID NO: 558 - DNA, 10 bp, Homo sapiens
  modified_base (1)..(1): a, c, t, g, unknown or other
ntatygatch

SEQ ID NO: 559 - DNA, 15 bp, Homo sapiens
  modified_base (1)..(1): a, c, t, g, unknown or other
  modified_base (7)..(8): a, c, t, g, unknown or other
  modified_base (15)..(15): a, c, t, g, unknown or other
ntgaatnncattcan

SEQ ID NO: 560 - DNA, 15 bp, Homo sapiens
  modified_base (1)..(1): a, c, t, g, unknown or other
  modified_base (7)..(9): a, c, t, g, unknown or other
  modified_base (15)..(15): a, c, t, g, unknown or other
ntgaatnnnattcan

SEQ ID NO: 561 - DNA, 15 bp, Homo sapiens
  modified_base (1)..(1): a, c, t, g, unknown or other
  modified_base (8)..(8): a, c, t, g, unknown or other
  modified_base (15)..(15): a, c, t, g, unknown or other
ntgaatwncattcan

SEQ ID NO: 562 - DNA, 19 bp, Homo sapiens
  modified_base (1)..(1): a, c, t, g, unknown or other
  modified_base (8)..(12): a, c, t, g, unknown or other
  modified_base (19)..(19): a, c, t, g, unknown or other
ntgacctnnnnnaggtcan

SEQ ID NO: 563 - DNA, 14 bp, Homo sapiens
  modified_base (1)..(1): a, c, t, g, unknown or other
  modified_base (14)..(14): a, c, t, g, unknown or other
ntgccacgtcaycn

SEQ ID NO: 564 - DNA, 15 bp, Homo sapiens
  modified_base (1)..(1): a, c, t, g, unknown or other
  modified_base (8)..(8): a, c, t, g, unknown or other
  modified_base (15)..(15): a, c, t, g, unknown or other
ntgctgantcagcrn

SEQ ID NO: 565 - DNA, 15 bp, Homo sapiens
  modified_base (1)..(1): a, c, t, g, unknown or other
  modified_base (15)..(15): a, c, t, g, unknown or other
ntgctgastcagcan

SEQ ID NO: 566 - DNA, 16 bp, Homo sapiens
  modified_base (1)..(1): a, c, t, g, unknown or other
  modified_base (16)..(16): a, c, t, g, unknown or other
ntgmataattaatgan

SEQ ID NO: 567 - DNA, 14 bp, Homo sapiens
  modified_base (1)..(1): a, c, t, g, unknown or other
  modified_base (14)..(14): a, c, t, g, unknown or other
ntmatcatcattan

SEQ ID NO: 568 - DNA, 10 bp, Homo sapiens
  modified_base (1)..(1): a, c, t, g, unknown or other
nttrcgcaay

SEQ ID NO: 569 - DNA, 12 bp, Homo sapiens
  modified_base (1)..(1): a, c, t, g, unknown or other
  modified_base (12)..(12): a, c, t, g, unknown or other
nwacayracawn

SEQ ID NO: 570 - DNA, 12 bp, Homo sapiens
  modified_base (1)..(1): a, c, t, g, unknown or other
  modified_base (12)..(12): a, c, t, g, unknown or other
nwtatgcwaatn

SEQ ID NO: 571 - DNA, 13 bp, Homo sapiens
  modified_base (1)..(1): a, c, t, g, unknown or other
nwtatgcwaattw

SEQ ID NO: 572 - DNA, 18 bp, Homo sapiens
  modified_base (1)..(1): a, c, t, g, unknown or other
  modified_base (9)..(11): a, c, t, g, unknown or other
  modified_base (18)..(18): a, c, t, g, unknown or other
nyaattarnnnyaattan

SEQ ID NO: 573 - DNA, 10 bp, Homo sapiens
  modified_base (1)..(1): a, c, t, g, unknown or other
  modified_base (9)..(10): a, c, t, g, unknown or other
nytmattann

SEQ ID NO: 574 - DNA, 15 bp, Homo sapiens
  modified_base (12)..(12): a, c, t, g, unknown or other
raccgttaaacngyy

SEQ ID NO: 575 - DNA, 17 bp, Homo sapiens
  modified_base (8)..(9): a, c, t, g, unknown or other
  modified_base (17)..(17): a, c, t, g, unknown or other
rcattccnnrcattccn

SEQ ID NO: 576 - DNA, 12 bp, Homo sapiens
rctawaaatagm

SEQ ID NO: 577 - DNA, 16 bp, Homo sapiens
  modified_base (8)..(10): a, c, t, g, unknown or other
  modified_base (16)..(16): a, c, t, g, unknown or other
rrggtcannnggtcan

SEQ ID NO: 578 - DNA, 8 bp, Homo sapiens
  modified_base (8)..(8): a, c, t, g, unknown or other
rtmattan

SEQ ID NO: 579 - DNA, 10 bp, Homo sapiens
  modified_base (9)..(10): a, c, t, g, unknown or other
sctmattann

SEQ ID NO: 580 - DNA, 9 bp, Homo sapiens
  modified_base (9)..(9): a, c, t, g, unknown or other
waaccrcan

SEQ ID NO: 581 - DNA, 9 bp, Homo sapiens
  modified_base (9)..(9): a, c, t, g, unknown or other
wgtaaayan

SEQ ID NO: 582 - DNA, 12 bp, Homo sapiens
  modified_base (11)..(11): a, c, t, g, unknown or other
wtatgcwaatnw

SEQ ID NO: 583 - DNA, 15 bp, Homo sapiens
  modified_base (7)..(8): a, c, t, g, unknown or other
yaattannctaattr

SEQ ID NO: 584 - DNA, 14 bp, Homo sapiens
ymattarytaatkr

SEQ ID NO: 585 - DNA, 20 bp, Homo sapiens
  modified_base (10)..(11): a, c, t, g, unknown or other
ytcacacctnnaggtgtgar

SEQ ID NO: 586 - DNA, 10 bp, Homo sapiens
dgggygkggc

SEQ ID NO: 587 - DNA, 15 bp, Homo sapiens
  modified_base (1)..(1): a, c, t, g, unknown or other
  modified_base (14)..(14): a, c, t, g, unknown or other
ngaccacmcacgwng

SEQ ID NO: 588 - DNA, 14 bp, Homo sapiens
  modified_base (1)..(1): a, c, t, g, unknown or other
  modified_base (13)..(13): a, c, t, g, unknown or other
ngccacgcccmcnt

SEQ ID NO: 589 - DNA, 16 bp, Homo sapiens
  modified_base (1)..(1): a, c, t, g, unknown or other
ntgmataattaatkag

SEQ ID NO: 590 - DNA, 14 bp, Homo sapiens
  modified_base (1)..(1): a, c, t, g, unknown or other
nwtatgcwaatkag

SEQ ID NO: 591 - DNA, 12 bp, Homo sapiens
rgaattctrgaa

SEQ ID NO: 592 - DNA, 17 bp, Homo sapiens
  modified_base (7)..(9): a, c, t, g, unknown or other
rggtcannnarrggtca

SEQ ID NO: 593 - DNA, 12 bp, Homo sapiens
rgkgggcgkggc

SEQ ID NO: 594 - DNA, 18 bp, Homo sapiens
  modified_base (8)..(10): a, c, t, g, unknown or other
rrggtcannnaraggtca

SEQ ID NO: 595 - DNA, 9 bp, Homo sapiens
rtcaytacg

SEQ ID NO: 596 - DNA, 11 bp, Homo sapiens
rtgtayggrtg

SEQ ID NO: 597 - DNA, 19 bp, Homo sapiens
  modified_base (9)..(10): a, c, t, g, unknown or other
saaggtcanntsaaggtca

SEQ ID NO: 598 - DNA, 6 bp, Homo sapiens
scgcgg

SEQ ID NO: 599 - DNA, 20 bp, Homo sapiens
smcagtcwgakggaggaggc

SEQ ID NO: 600 - DNA, 12 bp, Homo sapiens
wtatgcwaatka

SEQ ID NO: 601 - DNA, 10 bp, Homo sapiens
rtcaytyacg

SEQ ID NO: 602 - DNA, 25 bp, Homo sapiens
maccttcyatggctccctaktgccy

SEQ ID NO: 603 - DNA, 17 bp, Homo sapiens
  modified_base (1)..(1): a, c, t, g, unknown or other
  modified_base (9)..(9): a, c, t, g, unknown or other
  modified_base (17)..(17): a, c, t, g, unknown or other
naacaatknyaktgttn

SEQ ID NO: 604 - DNA, 12 bp, Homo sapiens
  modified_base (1)..(1): a, c, t, g, unknown or other
  modified_base (3)..(3): a, c, t, g, unknown or other
  modified_base (10)..(10): a, c, t, g, unknown or other
  modified_base (12)..(12): a, c, t, g, unknown or other
nancatatgntn

SEQ ID NO: 605 - DNA, 17 bp, Homo sapiens
  modified_base (1)..(1): a, c, t, g, unknown or other
  modified_base (9)..(9): a, c, t, g, unknown or other
  modified_base (17)..(17): a, c, t, g, unknown or other
natgaatknyaktcatn

SEQ ID NO: 606 - DNA, 20 bp, Homo sapiens
  modified_base (1)..(1): a, c, t, g, unknown or other
  modified_base (9)..(9): a, c, t, g, unknown or other
  modified_base (20)..(20): a, c, t, g, unknown or other
natggaaanwwwwtttycmn

SEQ ID NO: 607 - DNA, 16 bp, Homo sapiens
  modified_base (1)..(1): a, c, t, g, unknown or other
  modified_base (5)..(5): a, c, t, g, unknown or other
ncagnaagamgtawmm

SEQ ID NO: 608 - DNA, 17 bp, Homo sapiens
  modified_base (1)..(1): a, c, t, g, unknown or other
  modified_base (17)..(17): a, c, t, g, unknown or other
ngcgccmyctagyggtn

SEQ ID NO: 609 - DNA, 15 bp, Homo sapiens
  modified_base (1)..(1): a, c, t, g, unknown or other
  modified_base (3)..(3): a, c, t, g, unknown or other
  modified_base (13)..(13): a, c, t, g, unknown or other
ngntctagaaccngv

SEQ ID NO: 610 - DNA, 18 bp, Homo sapiens
  modified_base (1)..(1): a, c, t, g, unknown or other
  modified_base (13)..(13): a, c, t, g, unknown or other
  modified_base (16)..(17): a, c, t, g, unknown or other
ngtcacgcwtsrntgnny

SEQ ID NO: 611 - DNA, 16 bp, Homo sapiens
  modified_base (1)..(1): a, c, t, g, unknown or other
  modified_base (5)..(5): a, c, t, g, unknown or other
  modified_base (12)..(12): a, c, t, g, unknown or other
  modified_base (16)..(16): a, c, t, g, unknown or other
ngttnccatggnaacn

SEQ ID NO: 612 - DNA, 16 bp, Homo sapiens
  modified_base (1)..(1): a, c, t, g, unknown or other
  modified_base (16)..(16): a, c, t, g, unknown or other
ngttrccatggyaacn

SEQ ID NO: 613 - DNA, 11 bp, Homo sapiens
  modified_base (1)..(1): a, c, t, g, unknown or other
  modified_base (11)..(11): a, c, t, g, unknown or other
ngyaatwaaan

SEQ ID NO: 614 - DNA, 12 bp, Homo sapiens
  modified_base (1)..(1): a, c, t, g, unknown or other
  modified_base (12)..(12): a, c, t, g, unknown or other
nmcmcgcccmcn

SEQ ID NO: 615 - DNA, 18 bp, Homo sapiens
  modified_base (1)..(2): a, c, t, g, unknown or other
  modified_base (4)..(5): a, c, t, g, unknown or other
  modified_base (17)..(18): a, c, t, g, unknown or other
nngnnacgcccmytttnn

SEQ ID NO: 616 - DNA, 14 bp, Homo sapiens
  modified_base (1)..(1): a, c, t, g, unknown or other
  modified_base (14)..(14): a, c, t, g, unknown or other
nrtmaatattkayn

SEQ ID NO: 617 - DNA, 15 bp, Homo sapiens
  modified_base (1)..(1): a, c, t, g, unknown or other
  modified_base (15)..(15): a, c, t, g, unknown or other
ntaattrgyaattan

SEQ ID NO: 618 - DNA, 18 bp, Homo sapiens
  modified_base (1)..(1): a, c, t, g, unknown or other
  modified_base (8)..(8): a, c, t, g, unknown or other
  modified_base (11)..(11): a, c, t, g, unknown or other
  modified_base (18)..(18): a, c, t, g, unknown or other
ntgacctnatnaggtcan

SEQ ID NO: 619 - DNA, 17 bp, Homo sapiens
  modified_base (1)..(1): a, c, t, g, unknown or other
  modified_base (17)..(17): a, c, t, g, unknown or other
ntgtttacrgtaaayan

SEQ ID NO: 620 - DNA, 8 bp, Homo sapiens
  modified_base (1)..(1): a, c, t, g, unknown or other
  modified_base (8)..(8): a, c, t, g, unknown or other
ntrakccn

SEQ ID NO: 621 - DNA, 13 bp, Homo sapiens
  modified_base (1)..(1): a, c, t, g, unknown or other
  modified_base (6)..(6): a, c, t, g, unknown or other
  modified_base (13)..(13): a, c, t, g, unknown or other
ntrayntaatcan

SEQ ID NO: 622 - DNA, 17 bp, Homo sapiens
  modified_base (1)..(1): a, c, t, g, unknown or other
  modified_base (16)..(17): a, c, t, g, unknown or other
nwrgccmcgcccmctnn

SEQ ID NO: 623 - DNA, 14 bp, Homo sapiens
  modified_base (1)..(1): a, c, t, g, unknown or other
  modified_base (14)..(14): a, c, t, g, unknown or other
nwtrmatatkyawn

SEQ ID NO: 624 - DNA, 17 bp, Homo sapiens
  modified_base (8)..(9): a, c, t, g, unknown or other
  modified_base (17)..(17): a, c, t, g, unknown or other
rcattccnnrcatwccn

SEQ ID NO: 625 - DNA, 14 bp, Homo sapiens
  modified_base (9)..(9): a, c, t, g, unknown or other
  modified_base (13)..(14): a, c, t, g, unknown or other
rtggaaaantmcnn

SEQ ID NO: 626 - DNA, 15 bp, Homo sapiens
sgttgcyargcaacs

SEQ ID NO: 627 - DNA, 16 bp, Homo sapiens
sgttrccatrgcaacs

SEQ ID NO: 628 - DNA, 21 bp, Homo sapiens
  modified_base (14)..(14): a, c, t, g, unknown or other
ssytaatcgrwaancgattar

SEQ ID NO: 629 - DNA, 9 bp, Homo sapiens
wttramkar

SEQ ID NO: 630 - DNA, 12 bp, Homo sapiens
wawrtaaayaww

SEQ ID NO: 631 - DNA, 18 bp, Homo sapiens
  modified_base (2)..(2): a, c, t, g, unknown or other
  modified_base (17)..(17): a, c, t, g, unknown or other
wnwgtmaatattracwnw

SEQ ID NO: 632 - DNA, 11 bp, Homo sapiens
  modified_base (11)..(11): a, c, t, g, unknown or other
wrwgtmaayan

SEQ ID NO: 633 - DNA, 11 bp, Homo sapiens
wrwrtmaayaw

SEQ ID NO: 634 - DNA, 16 bp, Homo sapiens
wtaatkagctmattaw

SEQ ID NO: 635 - DNA, 11 bp, Homo sapiens
ymtgtmtytaw

SEQ ID NO: 636 - DNA, 20 bp, Homo sapiens
  modified_base (1)..(1): a, c, t, g, unknown or other
ngtgttcavtsaagcgkaaa

SEQ ID NO: 637 - DNA, 13 bp, Homo sapiens
  modified_base (1)..(1): a, c, t, g, unknown or other
  modified_base (12)..(12): a, c, t, g, unknown or other
nwtgmataawtna

SEQ ID NO: 638 - DNA, 17 bp, Homo sapiens
  modified_base (13)..(13): a, c, t, g, unknown or other
sgtcacgcwtgantgma

SEQ ID NO: 639 - DNA, 15 bp, Homo sapiens
  modified_base (9)..(9): a, c, t, g, unknown or other
vagracaknctgtbc

SEQ ID NO: 640 - DNA, 19 bp, Homo sapiens
  modified_base (4)..(4): a, c, t, g, unknown or other
wawntrggtyagtaggtca

SEQ ID NO: 641 - DNA, 12 bp, Homo sapiens
  modified_base (11)..(11): a, c, t, g, unknown or other
wtgmataawtna

SEQ ID NO: 642 - DNA, 12 bp, Homo sapiens
wtrmatatkyaw

SEQ ID NO: 643 - DNA, 25 bp, Homo sapiens
  modified_base (21)..(21): a, c, t, g, unknown or other
ytkgatahagtattctwggtnggca

SEQ ID NO: 644 - DNA, 17 bp, Homo sapiens
  modified_base (1)..(2): a, c, t, g, unknown or other
  modified_base (4)..(4): a, c, t, g, unknown or other
  modified_base (8)..(10): a, c, t, g, unknown or other
  modified_base (13)..(13): a, c, t, g, unknown or other
  modified_base (17)..(17): a, c, t, g, unknown or other
nncngttnnnacngttn

SEQ ID NO: 645 - DNA, 17 bp, Homo sapiens
  modified_base (1)..(1): a, c, t, g, unknown or other
  modified_base (4)..(4): a, c, t, g, unknown or other
  modified_base (8)..(10): a, c, t, g, unknown or other
  modified_base (14)..(14): a, c, t, g, unknown or other
  modified_base (17)..(17): a, c, t, g, unknown or other
nrgnacannntgtncyn

SEQ ID NO: 646 - DNA, 17 bp, Homo sapiens
  modified_base (1)..(1): a, c, t, g, unknown or other
  modified_base (8)..(10): a, c, t, g, unknown or other
  modified_base (17)..(17): a, c, t, g, unknown or other
nrgwacannntgtwcyn

SEQ ID NO: 647 - DNA, 20 bp, Homo sapiens
  modified_base (1)..(1): a, c, t, g, unknown or other
  modified_base (10)..(11): a, c, t, g, unknown or other
  modified_base (20)..(20): a, c, t, g, unknown or other
ntgacctyanntraggtcan

SEQ ID NO: 648 - DNA, 17 bp, Homo sapiens
  modified_base (4)..(4): a, c, t, g, unknown or other
  modified_base (14)..(14): a, c, t, g, unknown or other
raancgaaawtcgntty

SEQ ID NO: 649 - DNA, 17 bp, Homo sapiens
  modified_base (8)..(10): a, c, t, g, unknown or other
rrgwacannntgtwcyy

SEQ ID NO: 650 - DNA, 18 bp, Homo sapiens
  modified_base (18)..(18): a, c, t, g, unknown or other
waaccrcaawaaccrcan

SEQ ID NO: 651 - DNA, 20 bp, Homo sapiens
  modified_base (1)..(2): a, c, t, g, unknown or other
  modified_base (9)..(9): a, c, t, g, unknown or other
  modified_base (12)..(12): a, c, t, g, unknown or other
  modified_base (19)..(20): a, c, t, g, unknown or other
nntcrcacntangtgygann

SEQ ID NO: 652 - DNA, 18 bp, Homo sapiens
ywttkckktyyckgykky

SEQ ID NO: 653 - DNA, 11 bp, Homo sapiens
accggaaatga

SEQ ID NO: 654 - DNA, 10 bp, Homo sapiens
ccataaatca

SEQ ID NO: 655 - DNA, 12 bp, Homo sapiens
taaacaggatta

SEQ ID NO: 656 - DNA, 9 bp, Homo sapiens
tgtcaatta

SEQ ID NO: 657 - DNA, 16 bp, Homo sapiens
  modified_base (15)..(16): a, c, t, g, unknown or other
accggaaacagctgnn

SEQ ID NO: 658 - DNA, 12 bp, Homo sapiens
  modified_base (12)..(12): a, c, t, g, unknown or other
accggaaatgan

SEQ ID NO: 659 - DNA, 12 bp, Homo sapiens
  modified_base (12)..(12): a, c, t, g, unknown or other
aggtgttaatkn

SEQ ID NO: 660 - DNA, 12 bp, Homo sapiens
  modified_base (12)..(12): a, c, t, g, unknown or other
aggtgttgacan

SEQ ID NO: 661 - DNA, 13 bp, Homo sapiens
  modified_base (13)..(13): a, c, t, g, unknown or other
ctcgtaaaatgyn

SEQ ID NO: 662 - DNA, 12 bp, Homo sapiens
  modified_base (12)..(12): a, c, t, g, unknown or other
gaaaaccgaaan

SEQ ID NO: 663 - DNA, 14 bp, Homo sapiens
  modified_base (14)..(14): a, c, t, g, unknown or other
ggaatgcggaagtn

SEQ ID NO: 664 - DNA, 13 bp, Homo sapiens
ggaatgttaattr

SEQ ID NO: 665 - DNA, 15 bp, Homo sapiens
  modified_base (15)..(15): a, c, t, g, unknown or other
gtgcgggcggaagtn

SEQ ID NO: 666 - DNA, 13 bp, Homo sapiens
tcacaccggawry

SEQ ID NO: 667 - DNA, 13 bp, Homo sapiens
  modified_base (11)..(13): a, c, t, g, unknown or other
tgttgccggannn

SEQ ID NO: 668 - DNA, 18 bp, Homo sapiens
  modified_base (8)..(12): a, c, t, g, unknown or other
acaawrsnnnnnymatta

SEQ ID NO: 669 - DNA, 17 bp, Homo sapiens
  modified_base (8)..(11): a, c, t, g, unknown or other
acaawrsnnnnymatta

SEQ ID NO: 670 - DNA, 16 bp, Homo sapiens
  modified_base (8)..(10): a, c, t, g, unknown or other
acaawrsnnnymatta

SEQ ID NO: 671 - DNA, 17 bp, Homo sapiens
aggtgtkaagtcgtaaa

SEQ ID NO: 672 - DNA, 23 bp, Homo sapiens
  modified_base (7)..(17): a, c, t, g, unknown or other
cagctgnnnnnnnnnnntgcggg

SEQ ID NO: 673 - DNA, 21 bp, Homo sapiens
  modified_base (7)..(15): a, c, t, g, unknown or other
cagctgnnnnnnnnntgcggg

SEQ ID NO: 674 - DNA, 20 bp, Homo sapiens
  modified_base (7)..(14): a, c, t, g, unknown or other
cagctgnnnnnnnntgcggg

SEQ ID NO: 675 - DNA, 19 bp, Homo sapiens
  modified_base (7)..(13): a, c, t, g, unknown or other
cagctgnnnnnnntgcggg

SEQ ID NO: 676 - DNA, 18 bp, Homo sapiens
  modified_base (7)..(12): a, c, t, g, unknown or other
ccggaannnnnncacgtg

SEQ ID NO: 677 - DNA, 18 bp, Homo sapiens
  modified_base (7)..(11): a, c, t, g, unknown or other
ggaatgnnnnnytaatta

SEQ ID NO: 678 - DNA, 21 bp, Homo sapiens
  modified_base (7)..(15): a, c, t, g, unknown or other
ggattannnnnnnnntgcggg

SEQ ID NO: 679 - DNA, 19 bp, Homo sapiens
  modified_base (7)..(13): a, c, t, g, unknown or other
ggattannnnnnntgcggg

SEQ ID NO: 680 - DNA, 18 bp, Homo sapiens
  modified_base (7)..(12): a, c, t, g, unknown or other
ggattannnnnntgcggg

SEQ ID NO: 681 - DNA, 17 bp, Homo sapiens
  modified_base (7)..(11): a, c, t, g, unknown or other
ggtgtgnnnnncacgtg

SEQ ID NO: 682 - DNA, 20 bp, Homo sapiens
  modified_base (6)..(13): a, c, t, g, unknown or other
taatknnnnnnnnaaggtca

SEQ ID NO: 683 - DNA, 13 bp, Homo sapiens
  modified_base (7)..(7): a, c, t, g, unknown or other
taatkrnggatta

SEQ ID NO: 684 - DNA, 15 bp, Homo sapiens
  modified_base (7)..(10): a, c, t, g, unknown or other
taatkrnnnngcaac

SEQ ID NO: 685 - DNA, 16 bp, Homo sapiens
  modified_base (7)..(10): a, c, t, g, unknown or other
taatkrnnnnggatta

SEQ ID NO: 686 - DNA, 16 bp, Homo sapiens
  modified_base (7)..(11): a, c, t, g, unknown or other
taatkrnnnnngcaac

SEQ ID NO: 687 - DNA, 19 bp, Homo sapiens
  modified_base (7)..(12): a, c, t, g, unknown or other
taatkrnnnnnnaaggtca

SEQ ID NO: 688 - DNA, 15 bp, Homo sapiens
  modified_base (7)..(7): a, c, t, g, unknown or other
  modified_base (9)..(9): a, c, t, g, unknown or other
taatkrnrnggatta

SEQ ID NO: 689 - DNA, 18 bp, Homo sapiens
  modified_base (7)..(12): a, c, t, g, unknown or other
taattannnnnncacgtg

SEQ ID NO: 690 - DNA, 16 bp, Homo sapiens
  modified_base (6)..(10): a, c, t, g, unknown or other
tgacannnnntcatta

SEQ ID NO: 691 - DNA, 14 bp, Homo sapiens
  modified_base (6)..(6): a, c, t, g, unknown or other
  modified_base (8)..(8): a, c, t, g, unknown or other
tgacansntaattg

SEQ ID NO: 692 - DNA, 12 bp, Homo sapiens
tmacaccggaag

SEQ ID NO: 693 - DNA, 15 bp, Homo sapiens
  modified_base (2)..(2): a, c, t, g, unknown or other
tntcacaccggaaat

SEQ ID NO: 694 - DNA, 16 bp, Homo sapiens
  modified_base (8)..(8): a, c, t, g, unknown or other
  modified_base (16)..(16): a, c, t, g, unknown or other
acccgcanccggaagn

SEQ ID NO: 695 - DNA, 20 bp, Homo sapiens
  modified_base (7)..(8): a, c, t, g, unknown or other
  modified_base (14)..(18): a, c, t, g, unknown or other
accgganntacgcnnnnnyr

SEQ ID NO: 696 - DNA, 12 bp, Homo sapiens
  modified_base (6)..(6): a, c, t, g, unknown or other
aggtgntaatkr

SEQ ID NO: 697 - DNA, 12 bp, Homo sapiens
  modified_base (6)..(6): a, c, t, g, unknown or other
aggtgntaatkw

SEQ ID NO: 698 - DNA, 12 bp, Homo sapiens
  modified_base (6)..(6): a, c, t, g, unknown or other
aggtgntaattr

SEQ ID NO: 699 - DNA, 16 bp, Homo sapiens
  modified_base (9)..(9): a, c, t, g, unknown or other
  modified_base (16)..(16): a, c, t, g, unknown or other
atttgcatnacaatrn

SEQ ID NO: 700 - DNA, 15 bp, Homo sapiens
  modified_base (7)..(9): a, c, t, g, unknown or other
cacgtgnnngcgggy

SEQ ID NO: 701 - DNA, 20 bp, Homo sapiens
  modified_base (7)..(11): a, c, t, g, unknown or other
  modified_base (19)..(20): a, c, t, g, unknown or other
cacgtgnnnnnsrggaarnn

SEQ ID NO: 702 - DNA, 16 bp, Homo sapiens
  modified_base (7)..(9): a, c, t, g, unknown or other
  modified_base (16)..(16): a, c, t, g, unknown or other
cacgtgnnnrgattan

SEQ ID NO: 703 - DNA, 19 bp, Homo sapiens
  modified_base (7)..(12): a, c, t, g, unknown or other
cagctgnnnnnncccgcay

SEQ ID NO: 704 - DNA, 13 bp, Homo sapiens
  modified_base (13)..(13): a, c, t, g, unknown or other
cyaataaaatgyn

SEQ ID NO: 705 - DNA, 13 bp, Homo sapiens
  modified_base (13)..(13): a, c, t, g, unknown or other
gtmaacaggawrn

SEQ ID NO: 706 - DNA, 14 bp, Homo sapiens
  modified_base (14)..(14): a, c, t, g, unknown or other
gtmaataagggyrn

SEQ ID NO: 707 - DNA, 18 bp, Homo sapiens
  modified_base (6)..(10): a, c, t, g, unknown or other
  modified_base (18)..(18): a, c, t, g, unknown or other
taatgnnnnncggaagtn

SEQ ID NO: 708 - DNA, 15 bp, Homo sapiens
  modified_base (14)..(15): a, c, t, g, unknown or other
taatkrccggaagnn

SEQ ID NO: 709 - DNA, 17 bp, Homo sapiens
  modified_base (7)..(10): a, c, t, g, unknown or other
  modified_base (17)..(17): a, c, t, g, unknown or other
taatkrnnnnggaagtn

SEQ ID NO: 710 - DNA, 18 bp, Homo sapiens
  modified_base (7)..(11): a, c, t, g, unknown or other
  modified_base (18)..(18): a, c, t, g, unknown or other
taatkrnnnnnggaagtn

SEQ ID NO: 711 - DNA, 18 bp, Homo sapiens
  modified_base (7)..(10): a, c, t, g, unknown or other
  modified_base (18)..(18): a, c, t, g, unknown or other
taattrnnnncggaaryn

SEQ ID NO: 712 - DNA, 17 bp, Homo sapiens
  modified_base (7)..(9): a, c, t, g, unknown or other
  modified_base (17)..(17): a, c, t, g, unknown or other
tgacaknnnaacaatgn

SEQ ID NO: 713 - DNA, 14 bp, Homo sapiens
  modified_base (6)..(8): a, c, t, g, unknown or other
tgacannntaatkr

SEQ ID NO: 714 - DNA, 12 bp, Homo sapiens
tgacastaatkr

SEQ ID NO: 715 - DNA, 13 bp, Homo sapiens
  modified_base (7)..(7): a, c, t, g, unknown or other
  modified_base (13)..(13): a, c, t, g, unknown or other
tgttgangcgggn

SEQ ID NO: 716 - DNA, 13 bp, Homo sapiens
  modified_base (6)..(6): a, c, t, g, unknown or other
  modified_base (13)..(13): a, c, t, g, unknown or other
tgttgncggawrn

SEQ ID NO: 717 - DNA, 13 bp, Homo sapiens
  modified_base (13)..(13): a, c, t, g, unknown or other
tgttkmcggawrn

SEQ ID NO: 718 - DNA, 14 bp, Homo sapiens
  modified_base (13)..(14): a, c, t, g, unknown or other
tgttkmcggawrnn

SEQ ID NO: 719 - DNA, 13 bp, Homo sapiens
  modified_base (2)..(2): a, c, t, g, unknown or other
  modified_base (13)..(13): a, c, t, g, unknown or other
tnrcaccggaagn

SEQ ID NO: 720 - DNA, 14 bp, Homo sapiens
  modified_base (2)..(2): a, c, t, g, unknown or other
  modified_base (13)..(14): a, c, t, g, unknown or other
tnrcaccggaagnn

SEQ ID NO: 721 - DNA, 12 bp, Homo sapiens
  modified_base (2)..(2): a, c, t, g, unknown or other
  modified_base (12)..(12): a, c, t, g, unknown or other
tnrcaccggawn

SEQ ID NO: 722 - DNA, 23 bp, Homo sapiens
  modified_base (7)..(15): a, c, t, g, unknown or other
  modified_base (22)..(23): a, c, t, g, unknown or other
ttacgtnnnnnnnnnccggaann

SEQ ID NO: 723 - DNA, 18 bp, Homo sapiens
  modified_base (10)..(12): a, c, t, g, unknown or other
accggaartnnnyaatta

SEQ ID NO: 724 - DNA, 16 bp, Homo sapiens
  modified_base (6)..(6): a, c, t, g, unknown or other
aggtgngaarggatta

SEQ ID NO: 725 - DNA, 17 bp, Homo sapiens
  modified_base (8)..(11): a, c, t, g, unknown or other
aggtgtgnnnnatcrat

SEQ ID NO: 726 - DNA, 19 bp, Homo sapiens
  modified_base (2)..(2): a, c, t, g, unknown or other
  modified_base (9)..(14): a, c, t, g, unknown or other
anccggatnnnnnnmatta

SEQ ID NO: 727 - DNA, 16 bp, Homo sapiens
  modified_base (6)..(11): a, c, t, g, unknown or other
argtgnnnnnnataaa

SEQ ID NO: 728 - DNA, 22 bp, Homo sapiens
  modified_base (7)..(14): a, c, t, g, unknown or other
atcratnnnnnnnnsyattgtt

SEQ ID NO: 729 - DNA, 16 bp, Homo sapiens
  modified_base (7)..(9): a, c, t, g, unknown or other
cacgtgnnntaatkat

SEQ ID NO: 730 - DNA, 23 bp, Homo sapiens
  modified_base (7)..(17): a, c, t, g, unknown or other
casstgnnnnnnnnnnntgcggg

SEQ ID NO: 731 - DNA, 22 bp, Homo sapiens
  modified_base (7)..(16): a, c, t, g, unknown or other
casstgnnnnnnnnnntgcggg

SEQ ID NO: 732 - DNA, 20 bp, Homo sapiens
  modified_base (7)..(14): a, c, t, g, unknown or other
casstgnnnnnnnntgcggg

SEQ ID NO: 733 - DNA, 19 bp, Homo sapiens
  modified_base (7)..(13): a, c, t, g, unknown or other
casstgnnnnnnntgcggg

SEQ ID NO: 734 - DNA, 15 bp, Homo sapiens
  modified_base (9)..(10): a, c, t, g, unknown or other
cycataaanntgtca

SEQ ID NO: 735 - DNA, 14 bp, Homo sapiens
  modified_base (7)..(8): a, c, t, g, unknown or other
ggaatknncasstg

SEQ ID NO: 736 - DNA, 14 bp, Homo sapiens
  modified_base (7)..(9): a, c, t, g, unknown or other
ggwatgnnnrtaaa

SEQ ID NO: 737 - DNA, 24 bp, Homo sapiens
  modified_base (7)..(18): a, c, t, g, unknown or other
gttgcynnnnnnnnnnnncasstg

SEQ ID NO: 738 - DNA, 17 bp, Homo sapiens
  modified_base (8)..(9): a, c, t, g, unknown or other
gwmaacannsymrtaaa

SEQ ID NO: 739 - DNA, 14 bp, Homo sapiens
gwmaacaymrtaaa

SEQ ID NO: 740 - DNA, 16 bp, Homo sapiens
  modified_base (7)..(10): a, c, t, g, unknown or other
taatccnnnncasstg

SEQ ID NO: 741 - DNA, 13 bp, Homo sapiens
  modified_base (11)..(11): a, c, t, g, unknown or other
taatkaggtgnka

SEQ ID NO: 742 - DNA, 14 bp, Homo sapiens
  modified_base (7)..(8): a, c, t, g, unknown or other
taatkannggatta

SEQ ID NO: 743 - DNA, 13 bp, Homo sapiens
taatkrggtgyka

SEQ ID NO: 744 - DNA, 12 bp, Homo sapiens
tmacaccyaata

SEQ ID NO: 745 - DNA, 14 bp, Homo sapiens
  modified_base (7)..(7): a, c, t, g, unknown or other
  modified_base (9)..(9): a, c, t, g, unknown or other
tttwatnrnmaaca

SEQ ID NO: 746 - DNA, 18 bp, Homo sapiens
  modified_base (6)..(6): a, c, t, g, unknown or other
  modified_base (13)..(16): a, c, t, g, unknown or other
  modified_base (18)..(18): a, c, t, g, unknown or other
aggtgntaatkwnnnntn

SEQ ID NO: 747 - DNA, 14 bp, Homo sapiens
  modified_base (8)..(8): a, c, t, g, unknown or other
aggtgtgncsgttr

SEQ ID NO: 748 - DNA, 15 bp, Homo sapiens
  modified_base (7)..(9): a, c, t, g, unknown or other
  modified_base (15)..(15): a, c, t, g, unknown or other
aggtgtnnngsgggn

SEQ ID NO: 749 - DNA, 16 bp, Homo sapiens
  modified_base (7)..(7): a, c, t, g, unknown or other
  modified_base (15)..(16): a, c, t, g, unknown or other
aggtgtnrtrcgggnn

SEQ ID NO: 750 - DNA, 13 bp, Homo sapiens
  modified_base (2)..(2): a, c, t, g, unknown or other
angtgtgaatwcy

SEQ ID NO: 751 - DNA, 15 bp, Homo sapiens
  modified_base (2)..(2): a, c, t, g, unknown or other
  modified_base (8)..(9): a, c, t, g, unknown or other
  modified_base (15)..(15): a, c, t, g, unknown or other
angtgtsnnataaan

SEQ ID NO: 752 - DNA, 21 bp, Homo sapiens
  modified_base (9)..(13): a, c, t, g, unknown or other
  modified_base (20)..(21): a, c, t, g, unknown or other
atrcgggynnnnnywttgtnn

SEQ ID NO: 753 - DNA, 15 bp, Homo sapiens
  modified_base (7)..(8): a, c, t, g, unknown or other
casstgnncccgcay

SEQ ID NO: 754 - DNA, 17 bp, Homo sapiens
  modified_base (7)..(8): a, c, t, g, unknown or other
  modified_base (17)..(17): a, c, t, g, unknown or other
casstgnnccggawryn

SEQ ID NO: 755 - DNA, 17 bp, Homo sapiens
  modified_base (7)..(7): a, c, t, g, unknown or other
  modified_base (9)..(10): a, c, t, g, unknown or other
  modified_base (16)..(17): a, c, t, g, unknown or other
casstgnrnnggaagnn

SEQ ID NO: 756 - DNA, 20 bp, Homo sapiens
  modified_base (10)..(13): a, c, t, g, unknown or other
ctcrtaaawnnnnrmcgttr

SEQ ID NO: 757 - DNA, 16 bp, Homo sapiens
  modified_base (7)..(8): a, c, t, g, unknown or other
  modified_base (16)..(16): a, c, t, g, unknown or other
ggattannargtgtkn

SEQ ID NO: 758 - DNA, 17 bp, Homo sapiens
  modified_base (7)..(10): a, c, t, g, unknown or other
  modified_base (17)..(17): a, c, t, g, unknown or other
ggattannnnatcratn

SEQ ID NO: 759 - DNA, 19 bp, Homo sapiens
  modified_base (7)..(12): a, c, t, g, unknown or other
  modified_base (19)..(19): a, c, t, g, unknown or other
ggwatgnnnnnncacgtgn

SEQ ID NO: 760 - DNA, 20 bp, Homo sapiens
  modified_base (7)..(13): a, c, t, g, unknown or other
  modified_base (20)..(20): a, c, t, g, unknown or other
ggwatgnnnnnnncacgtgn

SEQ ID NO: 761 - DNA, 16 bp, Homo sapiens
  modified_base (7)..(7): a, c, t, g, unknown or other
  modified_base (14)..(15): a, c, t, g, unknown or other
ggwatgnraggtgnnr

SEQ ID NO: 762 - DNA, 23 bp, Homo sapiens
  modified_base (6)..(9): a, c, t, g, unknown or other
  modified_base (11)..(16): a, c, t, g, unknown or other
  modified_base (22)..(23): a, c, t, g, unknown or other
taatknnnngnnnnnncttccnn

SEQ ID NO: 763 - DNA, 14 bp, Homo sapiens
  modified_base (14)..(14): a, c, t, g, unknown or other
taatkrscggawgn

SEQ ID NO: 764 - DNA, 16 bp, Homo sapiens
  modified_base (7)..(7): a, c, t, g, unknown or other
tgacagnwaatcratr

SEQ ID NO: 765 - DNA, 13 bp, Homo sapiens
  modified_base (13)..(13): a, c, t, g, unknown or other
tgttkatrcgggn

SEQ ID NO: 766 - DNA, 14 bp, Homo sapiens
  modified_base (14)..(14): a, c, t, g, unknown or other
tgttkmcggawrtn

SEQ ID NO: 767 - DNA, 13 bp, Homo sapiens
  modified_base (13)..(13): a, c, t, g, unknown or other
tmacacmggaarn

SEQ ID NO: 768 - DNA, 18 bp, Homo sapiens
  modified_base (9)..(10): a, c, t, g, unknown or other
  modified_base (18)..(18): a, c, t, g, unknown or other
ttgcgyaannscggaagn

SEQ ID NO: 769 - DNA, 17 bp, Homo sapiens
  modified_base (7)..(10): a, c, t, g, unknown or other
atcratnnnnycrtaaa

SEQ ID NO: 770 - DNA, 17 bp, Homo sapiens
  modified_base (8)..(11): a, c, t, g, unknown or other
atratyannnncacgtg

SEQ ID NO: 771 - DNA, 14 bp, Homo sapiens
ggwatgygtmaaca

SEQ ID NO: 772 - DNA, 14 bp, Homo sapiens
tmacacyymrtwaa

SEQ ID NO: 773 - DNA, 14 bp, Homo sapiens
tmrcacctcrtwaa

SEQ ID NO: 774 - DNA, 18 bp, Homo sapiens
  modified_base (6)..(7): a, c, t, g, unknown or other
  modified_base (9)..(11): a, c, t, g, unknown or other
  modified_base (18)..(18): a, c, t, g, unknown or other
argtgnnannnmwtaaan

SEQ ID NO: 775 - DNA, 16 bp, Homo sapiens
  modified_base (9)..(9): a, c, t, g, unknown or other
  modified_base (15)..(16): a, c, t, g, unknown or other
argtgtkantttatnn

SEQ ID NO: 776 - DNA, 20 bp, Homo sapiens
  modified_base (9)..(13): a, c, t, g, unknown or other
argtgtkrnnnnnrgwatgy

SEQ ID NO: 777 - DNA, 13 bp, Homo sapiens
  modified_base (13)..(13): a, c, t, g, unknown or other
cycrtaaatwccn

SEQ ID NO: 778 - DNA, 19 bp, Homo sapiens
  modified_base (8)..(12): a, c, t, g, unknown or other
  modified_base (19)..(19): a, c, t, g, unknown or other
gtmaacannnnnatcratn

SEQ ID NO: 779 - DNA, 21 bp, Homo sapiens
  modified_base (11)..(15): a, c, t, g, unknown or other
tgmatatkcannnnntaatkr

SEQ ID NO: 780 - DNA, 20 bp, Homo sapiens
  modified_base (11)..(14): a, c, t, g, unknown or other
tgmatatkcannnntaatkr

SEQ ID NO: 781 - DNA, 21 bp, Homo sapiens
  modified_base (2)..(2): a, c, t, g, unknown or other
  modified_base (6)..(8): a, c, t, g, unknown or other
  modified_base (12)..(14): a, c, t, g, unknown or other
  modified_base (21)..(21): a, c, t, g, unknown or other
tnsccnnnggsnnncacgtgn

SEQ ID NO: 782 - DNA, 22 bp, Homo sapiens
  modified_base (2)..(2): a, c, t, g, unknown or other
  modified_base (6)..(8): a, c, t, g, unknown or other
  modified_base (12)..(15): a, c, t, g, unknown or other
  modified_base (22)..(22): a, c, t, g, unknown or other
tnsccnnnggsnnnncacgtgn

SEQ ID NO: 783 - DNA, 31 bp, Homo sapiens
  modified_base (2)..(2): a, c, t, g, unknown or other
  modified_base (6)..(8): a, c, t, g, unknown or other
  modified_base (12)..(24): a, c, t, g, unknown or other
  modified_base (31)..(31): a, c, t, g, unknown or other
tnsccnnnggsnnnnnnnnnnnnncacgtgn

SEQ ID NO: 784 - DNA, 32 bp, Homo sapiens
  modified_base (2)..(2): a, c, t, g, unknown or other
  modified_base (6)..(8): a, c, t, g, unknown or other
  modified_base (12)..(25): a, c, t, g, unknown or other
  modified_base (32)..(32): a, c, t, g, unknown or other
tnsccnnnggsnnnnnnnnnnnnnncacgtgn

SEQ ID NO: 785 - DNA, 14 bp, Homo sapiens
tmrcacytmatwaa

SEQ ID NO: 786 - DNA, 29 bp, Homo sapiens
  modified_base (2)..(2): a, c, t, g, unknown or other
  modified_base (6)..(7): a, c, t, g, unknown or other
  modified_base (9)..(19): a, c, t, g, unknown or other
  modified_base (21)..(22): a, c, t, g, unknown or other
  modified_base (28)..(29): a, c, t, g, unknown or other
angtgnnannnnnnnnnnncnnmggawnn

SEQ ID NO: 787 - DNA, 24 bp, Homo sapiens
  modified_base (7)..(9): a, c, t, g, unknown or other
  modified_base (17)..(19): a, c, t, g, unknown or other
  modified_base (23)..(24): a, c, t, g, unknown or other
argtgtnnnaatatkynnncrcnn

SEQ ID NO: 788 - DNA, 20 bp, Homo sapiens
  modified_base (8)..(11): a, c, t, g, unknown or other
  modified_base (20)..(20): a, c, t, g, unknown or other
atrsgggnnnnttrcgyaan

SEQ ID NO: 789 - DNA, 18 bp, Homo sapiens
  modified_base (8)..(11): a, c, t, g, unknown or other
ggwatgynnnncrcgygy

SEQ ID NO: 790 - DNA, 20 bp, Homo sapiens
  modified_base (8)..(13): a, c, t, g, unknown or other
ggwatgynnnnnncrcgygy

SEQ ID NO: 791 - DNA, 19 bp, Homo sapiens
  modified_base (8)..(11): a, c, t, g, unknown or other
  modified_base (18)..(19): a, c, t, g, unknown or other
trgyaacnnnncasstgnn

SEQ ID NO: 792 - DNA, 30 bp, Homo sapiens
  modified_base (9)..(23): a, c, t, g, unknown or other
aggygygannnnnnnnnnnnnnntcrtwaa

SEQ ID NO: 793 - DNA, 12 bp, Homo sapiens
  modified_base (1)..(2): a, c, t, g, unknown or other
nncgtaaaatta

SEQ ID NO: 794 - DNA, 16 bp, Homo sapiens
  modified_base (1)..(1): a, c, t, g, unknown or other
nrmatataccaataaa

SEQ ID NO: 795 - DNA, 12 bp, Homo sapiens
  modified_base (1)..(1): a, c, t, g, unknown or other
ntcgtaaaatgc

SEQ ID NO: 796 - DNA, 11 bp, Homo sapiens
  modified_base (1)..(1): a, c, t, g, unknown or other
ntcgtaaatca

SEQ ID NO: 797 - DNA, 14 bp, Homo sapiens
rccggaagtaatta

SEQ ID NO: 798 - DNA, 15 bp, Homo sapiens
  modified_base (2)..(3): a, c, t, g, unknown or other
ynnrtaaatcaatca

SEQ ID NO: 799 - DNA, 13 bp, Homo sapiens
  modified_base (1)..(1): a, c, t, g, unknown or other
  modified_base (13)..(13): a, c, t, g, unknown or other
nccggatatgcan

SEQ ID NO: 800 - DNA, 14 bp, Homo sapiens
  modified_base (1)..(1): a, c, t, g, unknown or other
  modified_base (13)..(14): a, c, t, g, unknown or other
ngatgatgcaatnn

SEQ ID NO: 801 - DNA, 17 bp, Homo sapiens
  modified_base (1)..(1): a, c, t, g, unknown or other
  modified_base (17)..(17): a, c, t, g, unknown or other
ngcagctgccggawryn

SEQ ID NO: 802 - DNA, 12 bp, Homo sapiens
  modified_base (1)..(1): a, c, t, g, unknown or other
  modified_base (12)..(12): a, c, t, g, unknown or other
ngccacgcaayn

SEQ ID NO: 803 - DNA, 17 bp, Homo sapiens
  modified_base (1)..(1): a, c, t, g, unknown or other
  modified_base (16)..(17): a, c, t, g, unknown or other
nmatgacacgcgccmnn

SEQ ID NO: 804 - DNA, 14 bp, Homo sapiens
  modified_base (1)..(1): a, c, t, g, unknown or other
nmccggaaccgttr

SEQ ID NO: 805 - DNA, 17 bp, Homo sapiens
  modified_base (1)..(2): a, c, t, g, unknown or other
  modified_base (17)..(17): a, c, t, g, unknown or other
nncagctgccggawryn

SEQ ID NO: 806 - DNA, 14 bp, Homo sapiens
  modified_base (1)..(2): a, c, t, g, unknown or other
  modified_base (13)..(13): a, c, t, g, unknown or other
nngaaaaccgaanm

SEQ ID NO: 807 - DNA, 14 bp, Homo sapiens
  modified_base (1)..(2): a, c, t, g, unknown or other
  modified_base (14)..(14): a, c, t, g, unknown or other
nnmatcacataaan

SEQ ID NO: 808 - DNA, 15 bp, Homo sapiens
  modified_base (1)..(2): a, c, t, g, unknown or other
  modified_base (15)..(15): a, c, t, g, unknown or other
nnmcaccgcgcccmn

SEQ ID NO: 809 - DNA, 16 bp, Homo sapiens
  modified_base (1)..(3): a, c, t, g, unknown or other
  modified_base (15)..(16): a, c, t, g, unknown or other
nnnrtaaatcacacnn

SEQ ID NO: 810 - DNA, 12 bp, Homo sapiens
  modified_base (1)..(1): a, c, t, g, unknown or other
  modified_base (12)..(12): a, c, t, g, unknown or other
ntgccggaagtn

SEQ ID NO: 811 - DNA, 14 bp, Homo sapiens
  modified_base (1)..(1): a, c, t, g, unknown or other
  modified_base (13)..(14): a, c, t, g, unknown or other
nwaaacaggaagnn

SEQ ID NO: 812 - DNA, 12 bp, Homo sapiens
rccggaaatrsy

SEQ ID NO: 813 - DNA, 13 bp, Homo sapiens
  modified_base (13)..(13): a, c, t, g, unknown or other
rccggatgttkwn

SEQ ID NO: 814 - DNA, 13 bp, Homo sapiens
rccggatgttkwy

SEQ ID NO: 815 - DNA, 14 bp, Homo sapiens
  modified_base (14)..(14): a, c, t, g, unknown or other
rgaatgcggaagtn

SEQ ID NO: 816 - DNA, 14 bp, Homo sapiens
rgaatgcggaagtr

SEQ ID NO: 817 - DNA, 12 bp, Homo sapiens
  modified_base (12)..(12): a, c, t, g, unknown or other
rgaatgcggatn

SEQ ID NO: 818 - DNA, 12 bp, Homo sapiens
  modified_base (12)..(12): a, c, t, g, unknown or other
rggtgttaatkn

SEQ ID NO: 819 - DNA, 15 bp, Homo sapiens
  modified_base (14)..(15): a, c, t, g, unknown or other
rmagaaaaccgaann

SEQ ID NO: 820 - DNA, 13 bp, Homo sapiens
  modified_base (2)..(2): a, c, t, g, unknown or other
  modified_base (13)..(13): a, c, t, g, unknown or other
rncggatgttkwn

SEQ ID NO: 821 - DNA, 13 bp, Homo sapiens
  modified_base (2)..(2): a, c, t, g, unknown or other
  modified_base (13)..(13): a, c, t, g, unknown or other
rnmtgatgcaatn

SEQ ID NO: 822 - DNA, 16 bp, Homo sapiens
  modified_base (16)..(16): a, c, t, g, unknown or other
rscggaagtaataaan

SEQ ID NO: 823 - DNA, 16 bp, Homo sapiens
  modified_base (16)..(16): a, c, t, g, unknown or other
rscggaagtcgtaaan

SEQ ID NO: 824 - DNA, 12 bp, Homo sapiens
  modified_base (12)..(12): a, c, t, g, unknown or other
rscggatgtkkn

SEQ ID NO: 825 - DNA, 12 bp, Homo sapiens
  modified_base (12)..(12): a, c, t, g, unknown or other
rscggatgttgn

SEQ ID NO: 826 - DNA, 12 bp, Homo sapiens
rscggatgttkw

SEQ ID NO: 827 - DNA, 13 bp, Homo sapiens
  modified_base (13)..(13): a, c, t, g, unknown or other
rscggatgttkwn

SEQ ID NO: 828 - DNA, 11 bp, Homo sapiens
rscggtaatkr

SEQ ID NO: 829 - DNA, 15 bp, Homo sapiens
  modified_base (15)..(15): a, c, t, g, unknown or other
rtgcgggcggaagtn

SEQ ID NO: 830 - DNA, 15 bp, Homo sapiens
rtgcgggcggaagtr

SEQ ID NO: 831 - DNA, 15 bp, Homo sapiens
  modified_base (15)..(15): a, c, t, g, unknown or other
rtgcgggtaataaan

SEQ ID NO: 832 - DNA, 14 bp, Homo sapiens
  modified_base (14)..(14): a, c, t, g, unknown or other
rwmaacaggaagtn

SEQ ID NO: 833 - DNA, 14 bp, Homo sapiens
  modified_base (13)..(14): a, c, t, g, unknown or other
rwmaacaggaarnn

SEQ ID NO: 834 - DNA, 14 bp, Homo sapiens
  modified_base (14)..(14): a, c, t, g, unknown or other
rwyaacaggaagyn

SEQ ID NO: 835 - DNA, 12 bp, Homo sapiens
  modified_base (12)..(12): a, c, t, g, unknown or other
sgcgctaattkn

SEQ ID NO: 836 - DNA, 11 bp, Homo sapiens
waacaacacmy

SEQ ID NO: 837 - DNA, 13 bp, Homo sapiens
  modified_base (12)..(12): a, c, t, g, unknown or other
wmscggatgtknw

SEQ ID NO: 838 - DNA, 17 bp, Homo sapiens
  modified_base (1)..(1): a, c, t, g, unknown or other
  modified_base (8)..(12): a, c, t, g, unknown or other
ncacctgnnnnnmatta

SEQ ID NO: 839 - DNA, 15 bp, Homo sapiens
  modified_base (1)..(1): a, c, t, g, unknown or other
  modified_base (8)..(9): a, c, t, g, unknown or other
ncacgtgnnggatta

SEQ ID NO: 840 - DNA, 17 bp, Homo sapiens
  modified_base (1)..(1): a, c, t, g, unknown or other
  modified_base (8)..(12): a, c, t, g, unknown or other
ncaggtgnnnnnmatta

SEQ ID NO: 841 - DNA, 15 bp, Homo sapiens
  modified_base (1)..(1): a, c, t, g, unknown or other
  modified_base (8)..(9): a, c, t, g, unknown or other
ncccgcannmataaa

SEQ ID NO: 842 - DNA, 16 bp, Homo sapiens
  modified_base (1)..(1): a, c, t, g, unknown or other
  modified_base (8)..(10): a, c, t, g, unknown or other
ncccgcannnmrtaaa

SEQ ID NO: 843 - DNA, 20 bp, Homo sapiens
  modified_base (1)..(1): a, c, t, g, unknown or other
  modified_base (9)..(14): a, c, t, g, unknown or other
nccggaagnnnnnnymatta

SEQ ID NO: 844 - DNA, 14 bp, Homo sapiens
  modified_base (1)..(1): a, c, t, g, unknown or other
nccggaagtmatta

SEQ ID NO: 845 - DNA, 13 bp, Homo sapiens
  modified_base (1)..(2): a, c, t, g, unknown or other
  modified_base (8)..(8): a, c, t, g, unknown or other
nnatcatngtaaa

SEQ ID NO: 846 - DNA, 12 bp, Homo sapiens
  modified_base (1)..(2): a, c, t, g, unknown or other
nnatgaygcaat

SEQ ID NO: 847 - DNA, 14 bp, Homo sapiens
  modified_base (1)..(2): a, c, t, g, unknown or other
  modified_base (9)..(9): a, c, t, g, unknown or other
nnmaacaynrtaaa

SEQ ID NO: 848 - DNA, 15 bp, Homo sapiens
  modified_base (1)..(1): a, c, t, g, unknown or other
  modified_base (8)..(9): a, c, t, g, unknown or other
ntaatccnnwmaaca

SEQ ID NO: 849 - DNA, 11 bp, Homo sapiens
  modified_base (1)..(1): a, c, t, g, unknown or other
  modified_base (3)..(3): a, c, t, g, unknown or other
nynatmaatca

SEQ ID NO: 850 - DNA, 19 bp, Homo sapiens
  modified_base (8)..(13): a, c, t, g, unknown or other
rcattccnnnnnncacgtg

SEQ ID NO: 851 - DNA, 20 bp, Homo sapiens
  modified_base (8)..(14): a, c, t, g, unknown or other
rcattccnnnnnnncacgtg

SEQ ID NO: 852 - DNA, 16 bp, Homo sapiens
  modified_base (8)..(10): a, c, t, g, unknown or other
rcattccnnnyaatta

SEQ ID NO: 853 - DNA, 16 bp, Homo sapiens
  modified_base (8)..(10): a, c, t, g, unknown or other
rcattccnnnymatta

SEQ ID NO: 854 - DNA, 17 bp, Homo sapiens
  modified_base (7)..(12): a, c, t, g, unknown or other
rcattcnnnnnncatta

SEQ ID NO: 855 - DNA, 17 bp, Homo sapiens
  modified_base (7)..(11): a, c, t, g, unknown or other
rcattcnnnnntaatcc

SEQ ID NO: 856 - DNA, 16 bp, Homo sapiens
  modified_base (8)..(10): a, c, t, g, unknown or other
rcattcynnncaatta

SEQ ID NO: 857 - DNA, 17 bp, Homo sapiens
  modified_base (8)..(11): a, c, t, g, unknown or other
rcattcynnnncaatta

SEQ ID NO: 858 - DNA, 17 bp, Homo sapiens
  modified_base (8)..(12): a, c, t, g, unknown or other
rcattcynnnnncatta

SEQ ID NO: 859 - DNA, 12 bp, Homo sapiens
rccggaaatrcc

SEQ ID NO: 860 - DNA, 19 bp, Homo sapiens
  modified_base (8)..(13): a, c, t, g, unknown or other
rccggaannnnnnyaatta

SEQ ID NO: 861 - DNA, 18 bp, Homo sapiens
  modified_base (8)..(12): a, c, t, g, unknown or other
rccggaannnnnyaatta

SEQ ID NO: 862 - DNA, 13 bp, Homo sapiens
rgaatgcggawrt

SEQ ID NO: 863 - DNA, 14 bp, Homo sapiens
  modified_base (8)..(9): a, c, t, g, unknown or other
rgaatgcnnrtaaa

SEQ ID NO: 864 - DNA, 11 bp, Homo sapiens
rgaatgygtga

SEQ ID NO: 865 - DNA, 14 bp, Homo sapiens
  modified_base (8)..(9): a, c, t, g, unknown or other
rgaatgynnacgtg

SEQ ID NO: 866 - DNA, 21 bp, Homo sapiens
  modified_base (7)..(15): a, c, t, g, unknown or other
rggtgtnnnnnnnnnyattgt

SEQ ID NO: 867 - DNA, 14 bp, Homo sapiens
  modified_base (4)..(4): a, c, t, g, unknown or other
  modified_base (8)..(9): a, c, t, g, unknown or other
rkrngggnnataaa

SEQ ID NO: 868 - DNA, 14 bp, Homo sapiens
  modified_base (2)..(2): a, c, t, g, unknown or other
  modified_base (8)..(9): a, c, t, g, unknown or other
rncggaannaaaca

SEQ ID NO: 869 - DNA, 13 bp, Homo sapiens
rraatgcartaaa

SEQ ID NO: 870 - DNA, 12 bp, Homo sapiens
rscggaaatrcc

SEQ ID NO: 871 - DNA, 14 bp, Homo sapiens
rscggaagtmrtta

SEQ ID NO: 872 - DNA, 17 bp, Homo sapiens
  modified_base (8)..(11): a, c, t, g, unknown or other
rscggaannnnggatta

SEQ ID NO: 873 - DNA, 18 bp, Homo sapiens
  modified_base (8)..(12): a, c, t, g, unknown or other
rscggaannnnnggatta

SEQ ID NO: 874 - DNA, 20 bp, Homo sapiens
  modified_base (8)..(14): a, c, t, g, unknown or other
rscggaannnnnnnywttgt

SEQ ID NO: 875 - DNA, 19 bp, Homo sapiens
  modified_base (8)..(13): a, c, t, g, unknown or other
rscggaannnnnnrtcgat

SEQ ID NO: 876 - DNA, 19 bp, Homo sapiens
  modified_base (8)..(13): a, c, t, g, unknown or other
rscggaannnnnnyaatta

SEQ ID NO: 877 - DNA, 19 bp, Homo sapiens
  modified_base (8)..(13): a, c, t, g, unknown or other
rscggaannnnnnywttgt

SEQ ID NO: 878 - DNA, 18 bp, Homo sapiens
  modified_base (8)..(12): a, c, t, g, unknown or other
rscggaannnnnyaatta

SEQ ID NO: 879 - DNA, 18 bp, Homo sapiens
  modified_base (8)..(12): a, c, t, g, unknown or other
rscggaannnnnymatta

SEQ ID NO: 880 - DNA, 17 bp, Homo sapiens
  modified_base (8)..(11): a, c, t, g, unknown or other
rscggaannnnyaatta

SEQ ID NO: 881 - DNA, 14 bp, Homo sapiens
  modified_base (8)..(8): a, c, t, g, unknown or other
rscggaanyaatta

SEQ ID NO: 882 - DNA, 15 bp, Homo sapiens
  modified_base (8)..(8): a, c, t, g, unknown or other
  modified_base (10)..(10): a, c, t, g, unknown or other
rscggaanynrtaaa

SEQ ID NO: 883 - DNA, 14 bp, Homo sapiens
rscggaaryaatta

SEQ ID NO: 884 - DNA, 20 bp, Homo sapiens
  modified_base (8)..(14): a, c, t, g, unknown or other
rscggawnnnnnnnymatta

SEQ ID NO: 885 - DNA, 13 bp, Homo sapiens
rscggawryatta

SEQ ID NO: 886 - DNA, 13 bp, Homo sapiens
smggaagtmrtta

SEQ ID NO: 887 - DNA, 15 bp, Homo sapiens
  modified_base (9)..(9): a, c, t, g, unknown or other
symrtaaanctgtca

SEQ ID NO: 888 - DNA, 15 bp, Homo sapiens
  modified_base (3)..(3): a, c, t, g, unknown or other
  modified_base (9)..(10): a, c, t, g, unknown or other
synrtaaanntgtca

SEQ ID NO: 889 - DNA, 22 bp, Homo sapiens
  modified_base (7)..(16): a, c, t, g, unknown or other
yaacggnnnnnnnnnncacgtg

SEQ ID NO: 890 - DNA, 23 bp, Homo sapiens
  modified_base (7)..(17): a, c, t, g, unknown or other
yaacggnnnnnnnnnnncacgtg

SEQ ID NO: 891 - DNA, 19 bp, Homo sapiens
  modified_base (7)..(13): a, c, t, g, unknown or other
yrattannnnnnncacgtg

SEQ ID NO: 892 - DNA, 17 bp, Homo sapiens
  modified_base (1)..(1): a, c, t, g, unknown or other
  modified_base (8)..(11): a, c, t, g, unknown or other
nacaatrnnnngaatgy

SEQ ID NO: 893 - DNA, 18 bp, Homo sapiens
  modified_base (1)..(1): a, c, t, g, unknown or other
  modified_base (8)..(12): a, c, t, g, unknown or other
nacaatrnnnnngaatgy

SEQ ID NO: 894 - DNA, 21 bp, Homo sapiens
  modified_base (1)..(1): a, c, t, g, unknown or other
  modified_base (11)..(14): a, c, t, g, unknown or other
  modified_base (21)..(21): a, c, t, g, unknown or other
nacttccggynnnngcaacsn

SEQ ID NO: 895 - DNA, 13 bp, Homo sapiens
  modified_base (1)..(1): a, c, t, g, unknown or other
  modified_base (7)..(7): a, c, t, g, unknown or other
naggtgntaatkr

SEQ ID NO: 896 - DNA, 19 bp, Homo sapiens
  modified_base (1)..(1): a, c, t, g, unknown or other
  modified_base (8)..(12): a, c, t, g, unknown or other
  modified_base (19)..(19): a, c, t, g, unknown or other
ncacgtgnnnnncatatgn

SEQ ID NO: 897 - DNA, 20 bp, Homo sapiens
  modified_base (1)..(1): a, c, t, g, unknown or other
  modified_base (8)..(12): a, c, t, g, unknown or other
  modified_base (20)..(20): a, c, t, g, unknown or other
ncacgtgnnnnnscggawrn

SEQ ID NO: 898 - DNA, 19 bp, Homo sapiens
  modified_base (1)..(1): a, c, t, g, unknown or other
  modified_base (8)..(12): a, c, t, g, unknown or other
  modified_base (19)..(19): a, c, t, g, unknown or other
ncagctgnnnnncacgtgn

SEQ ID NO: 899 - DNA, 21 bp, Homo sapiens
  modified_base (1)..(1): a, c, t, g, unknown or other
  modified_base (8)..(14): a, c, t, g, unknown or other
  modified_base (21)..(21): a, c, t, g, unknown or other
ncagctgnnnnnnncacgtgn

SEQ ID NO: 900 - DNA, 16 bp, Homo sapiens
  modified_base (1)..(1): a, c, t, g, unknown or other
  modified_base (16)..(16): a, c, t, g, unknown or other
nccggaagtyrtaaan

SEQ ID NO: 901 - DNA, 15 bp, Homo sapiens
  modified_base (1)..(1): a, c, t, g, unknown or other
  modified_base (8)..(8): a, c, t, g, unknown or other
  modified_base (15)..(15): a, c, t, g, unknown or other
nccggaancatatgn

SEQ ID NO: 902 - DNA, 21 bp, Homo sapiens
  modified_base (1)..(1): a, c, t, g, unknown or other
  modified_base (8)..(13): a, c, t, g, unknown or other
  modified_base (20)..(21): a, c, t, g, unknown or other
nccggaannnnnncagctgnn

SEQ ID NO: 903 - DNA, 15 bp, Homo sapiens
  modified_base (1)..(1): a, c, t, g, unknown or other
  modified_base (8)..(8): a, c, t, g, unknown or other
  modified_base (15)..(15): a, c, t, g, unknown or other
nccggaanyataaan

SEQ ID NO: 904 - DNA, 24 bp, Homo sapiens
  modified_base (1)..(1): a, c, t, g, unknown or other
  modified_base (7)..(17): a, c, t, g, unknown or other
  modified_base (24)..(24): a, c, t, g, unknown or other
nccggwnnnnnnnnnnnscattan

SEQ ID NO: 905 - DNA, 16 bp, Homo sapiens
  modified_base (1)..(1): a, c, t, g, unknown or other
  modified_base (8)..(9): a, c, t, g, unknown or other
  modified_base (16)..(16): a, c, t, g, unknown or other
nggtgtgnnggcgcsn

SEQ ID NO: 906 - DNA, 17 bp, Homo sapiens
  modified_base (1)..(1): a, c, t, g, unknown or other
  modified_base (8)..(10): a, c, t, g, unknown or other
  modified_base (17)..(17): a, c, t, g, unknown or other
nggtgtgnnnggcgcsn

SEQ ID NO: 907 - DNA, 30 bp, Homo sapiens
  modified_base (1)..(1): a, c, t, g, unknown or other
  modified_base (7)..(21): a, c, t, g, unknown or other
  modified_base (28)..(30): a, c, t, g, unknown or other
nggtgtnnnnnnnnnnnnnnnccggawnnn

SEQ ID NO: 908 - DNA, 18 bp, Homo sapiens
  modified_base (1)..(1): a, c, t, g, unknown or other
  modified_base (10)..(10): a, c, t, g, unknown or other
  modified_base (17)..(18): a, c, t, g, unknown or other
nmatgacacngcgccmnn

SEQ ID NO: 909 - DNA, 19 bp, Homo sapiens
  modified_base (1)..(2): a, c, t, g, unknown or other
  modified_base (8)..(13): a, c, t, g, unknown or other
nnacaatnnnnnngaatgy

SEQ ID NO: 910 - DNA, 16 bp, Homo sapiens
  modified_base (1)..(2): a, c, t, g, unknown or other
  modified_base (16)..(16): a, c, t, g, unknown or other
nnaraaaaccgaawmn

SEQ ID NO: 911 - DNA, 13 bp, Homo sapiens
  modified_base (1)..(2): a, c, t, g, unknown or other
  modified_base (13)..(13): a, c, t, g, unknown or other
nnatgaygcaayn

SEQ ID NO: 912 - DNA, 18 bp, Homo sapiens
  modified_base (1)..(2): a, c, t, g, unknown or other
  modified_base (17)..(18): a, c, t, g, unknown or other
nncacgtgacmggaarnn

SEQ ID NO: 913 - DNA, 18 bp, Homo sapiens
  modified_base (1)..(2): a, c, t, g, unknown or other
  modified_base (9)..(11): a, c, t, g, unknown or other
  modified_base (18)..(18): a, c, t, g, unknown or other
nncacgtgnnngcgggyn

SEQ ID NO: 914 - DNA, 20 bp, Homo sapiens
  modified_base (1)..(2): a, c, t, g, unknown or other
  modified_base (9)..(12): a, c, t, g, unknown or other
  modified_base (19)..(20): a, c, t, g, unknown or other
nncacgtgnnnnccggaann

SEQ ID NO: 915 - DNA, 21 bp, Homo sapiens
  modified_base (1)..(2): a, c, t, g, unknown or other
  modified_base (9)..(13): a, c, t, g, unknown or other
  modified_base (20)..(21): a, c, t, g, unknown or other
nncacgtgnnnnnccggaann

SEQ ID NO: 916 - DNA, 21 bp, Homo sapiens
  modified_base (1)..(2): a, c, t, g, unknown or other
  modified_base (9)..(13): a, c, t, g, unknown or other
nncacgtgnnnnnccggawry

SEQ ID NO: 917 - DNA, 20 bp, Homo sapiens
  modified_base (1)..(2): a, c, t, g, unknown or other
  modified_base (9)..(13): a, c, t, g, unknown or other
nncacgtgnnnnncggawry

SEQ ID NO: 918 - DNA, 28 bp, Homo sapiens
  modified_base (1)..(2): a, c, t, g, unknown or other
  modified_base (9)..(18): a, c, t, g, unknown or other
  modified_base (28)..(28): a, c, t, g, unknown or other
nncacgtgnnnnnnnnnnrtgcgggyrn

SEQ ID NO: 919 - DNA, 22 bp, Homo sapiens
  modified_base (1)..(2): a, c, t, g, unknown or other
  modified_base (9)..(14): a, c, t, g, unknown or other
  modified_base (21)..(22): a, c, t, g, unknown or other
nncagctgnnnnnncacgtgnn

SEQ ID NO: 920 - DNA, 23 bp, Homo sapiens
  modified_base (1)..(2): a, c, t, g, unknown or other
  modified_base (9)..(16): a, c, t, g, unknown or other
  modified_base (23)..(23): a, c, t, g, unknown or other
nncagctgnnnnnnnnatcgatn

SEQ ID NO: 921 - DNA, 21 bp, Homo sapiens
  modified_base (1)..(2): a, c, t, g, unknown or other
  modified_base (9)..(15): a, c, t, g, unknown or other
  modified_base (21)..(21): a, c, t, g, unknown or other
nncagctgnnnnnnntaattn

SEQ ID NO: 922 - DNA, 18 bp, Homo sapiens
  modified_base (1)..(2): a, c, t, g, unknown or other
  modified_base (9)..(12): a, c, t, g, unknown or other
nncagctgnnnntaatkr

SEQ ID NO: 923 - DNA, 22 bp, Homo sapiens
  modified_base (1)..(2): a, c, t, g, unknown or other
  modified_base (9)..(13): a, c, t, g, unknown or other
  modified_base (22)..(22): a, c, t, g, unknown or other
nncaggtgnnnnnmcggaaryn

SEQ ID NO: 924 - DNA, 16 bp, Homo sapiens
  modified_base (1)..(2): a, c, t, g, unknown or other
  modified_base (8)..(8): a, c, t, g, unknown or other
  modified_base (15)..(16): a, c, t, g, unknown or other
nncggaancaggtgnn

SEQ ID NO: 925 - DNA, 19 bp, Homo sapiens
  modified_base (1)..(2): a, c, t, g, unknown or other
  modified_base (8)..(10): a, c, t, g, unknown or other
  modified_base (17)..(19): a, c, t, g, unknown or other
nngattannnatgcawnnn

SEQ ID NO: 926 - DNA, 17 bp, Homo sapiens
  modified_base (1)..(2): a, c, t, g, unknown or other
  modified_base (10)..(11): a, c, t, g, unknown or other
  modified_base (17)..(17): a, c, t, g, unknown or other
nngtcacgcnncattan

SEQ ID NO: 927 - DNA, 17 bp, Homo sapiens
  modified_base (1)..(2): a, c, t, g, unknown or other
  modified_base (9)..(10): a, c, t, g, unknown or other
  modified_base (16)..(17): a, c, t, g, unknown or other
nngtcacgnntcattnn

SEQ ID NO: 928 - DNA, 16 bp, Homo sapiens
  modified_base (1)..(2): a, c, t, g, unknown or other
  modified_base (9)..(10): a, c, t, g, unknown or other
  modified_base (16)..(16): a, c, t, g, unknown or other
nnmggaarnnrtaaan

SEQ ID NO: 929 - DNA, 20 bp, Homo sapiens
  modified_base (1)..(3): a, c, t, g, unknown or other
  modified_base (8)..(13): a, c, t, g, unknown or other
  modified_base (18)..(20): a, c, t, g, unknown or other
nnnacgannnnnntcgtnnn

SEQ ID NO: 930 - DNA, 17 bp, Homo sapiens
  modified_base (1)..(3): a, c, t, g, unknown or other
  modified_base (8)..(10): a, c, t, g, unknown or other
  modified_base (16)..(17): a, c, t, g, unknown or other
nnncgggnnnggtgtnn

SEQ ID NO: 931 - DNA, 16 bp, Homo sapiens
  modified_base (1)..(3): a, c, t, g, unknown or other
  modified_base (16)..(16): a, c, t, g, unknown or other
nnngmataacaawrrn

SEQ ID NO: 932 - DNA, 22 bp, Homo sapiens
  modified_base (1)..(4): a, c, t, g, unknown or other
  modified_base (10)..(14): a, c, t, g, unknown or other
  modified_base (21)..(22): a, c, t, g, unknown or other
nnnngcgcsnnnnncacgtgnn

SEQ ID NO: 933 - DNA, 14 bp, Homo sapiens
  modified_base (1)..(3): a, c, t, g, unknown or other
  modified_base (9)..(9): a, c, t, g, unknown or other
  modified_base (14)..(14): a, c, t, g, unknown or other
nnnrtaaanctgtn

SEQ ID NO: 934 - DNA, 20 bp, Homo sapiens
  modified_base (1)..(3): a, c, t, g, unknown or other
  modified_base (10)..(13): a, c, t, g, unknown or other
  modified_base (19)..(20): a, c, t, g, unknown or other
nnnttccgsnnnngcaacnn

SEQ ID NO: 935 - DNA, 15 bp, Homo sapiens
  modified_base (1)..(2): a, c, t, g, unknown or other
  modified_base (4)..(4): a, c, t, g, unknown or other
  modified_base (15)..(15): a, c, t, g, unknown or other
nnrngggcggaartn

SEQ ID NO: 936 - DNA, 18 bp, Homo sapiens
  modified_base (1)..(2): a, c, t, g, unknown or other
  modified_base (9)..(11): a, c, t, g, unknown or other
  modified_base (18)..(18): a, c, t, g, unknown or other
nnsgcgcsnnnatcgayn

SEQ ID NO: 937 - DNA, 19 bp, Homo sapiens
  modified_base (1)..(2): a, c, t, g, unknown or other
  modified_base (9)..(12): a, c, t, g, unknown or other
  modified_base (19)..(19): a, c, t, g, unknown or other
nnsgcgcsnnnnatcgayn

SEQ ID NO: 938 - DNA, 20 bp, Homo sapiens
  modified_base (1)..(2): a, c, t, g, unknown or other
  modified_base (13)..(13): a, c, t, g, unknown or other
  modified_base (19)..(20): a, c, t, g, unknown or other
nnsmggacggayntccksnn

SEQ ID NO: 939 - DNA, 22 bp, Homo sapiens
  modified_base (1)..(2): a, c, t, g, unknown or other
  modified_base (9)..(15): a, c, t, g, unknown or other
  modified_base (21)..(22): a, c, t, g, unknown or other
nnymattannnnnnnggaagnn

SEQ ID NO: 940 - DNA, 21 bp, Homo sapiens
  modified_base (1)..(1): a, c, t, g, unknown or other
  modified_base (9)..(13): a, c, t, g, unknown or other
  modified_base (20)..(21): a, c, t, g, unknown or other
nrcagctgnnnnncacgtgnn

SEQ ID NO: 941 - DNA, 19 bp, Homo sapiens
  modified_base (1)..(1): a, c, t, g, unknown or other
  modified_base (8)..(12): a, c, t, g, unknown or other
  modified_base (19)..(19): a, c, t, g, unknown or other
nrcattcnnnnntaattrn

SEQ ID NO: 942 - DNA, 17 bp, Homo sapiens
  modified_base (1)..(1): a, c, t, g, unknown or other
  modified_base (8)..(11): a, c, t, g, unknown or other
  modified_base (17)..(17): a, c, t, g, unknown or other
nrcattcnnnnyaattn

SEQ ID NO: 943 - DNA, 16 bp, Homo sapiens
  modified_base (1)..(1): a, c, t, g, unknown or other
  modified_base (7)..(8): a, c, t, g, unknown or other
  modified_base (15)..(16): a, c, t, g, unknown or other
nrcccrnncggaagnn

SEQ ID NO: 944 - DNA, 17 bp, Homo sapiens
  modified_base (1)..(1): a, c, t, g, unknown or other
  modified_base (10)..(11): a, c, t, g, unknown or other
  modified_base (17)..(17): a, c, t, g, unknown or other
nrscggaagnngtaaan

SEQ ID NO: 945 - DNA, 17 bp, Homo sapiens
  modified_base (1)..(1): a, c, t, g, unknown or other
  modified_base (9)..(9): a, c, t, g, unknown or other
  modified_base (16)..(17): a, c, t, g, unknown or other
nscggaarncacgtgnn

SEQ ID NO: 946 - DNA, 19 bp, Homo sapiens
  modified_base (1)..(1): a, c, t, g, unknown or other
  modified_base (9)..(13): a, c, t, g, unknown or other
  modified_base (19)..(19): a, c, t, g, unknown or other
nscggaarnnnnnmattan

SEQ ID NO: 947 - DNA, 20 bp, Homo sapiens
  modified_base (1)..(1): a, c, t, g, unknown or other
  modified_base (9)..(14): a, c, t, g, unknown or other
  modified_base (20)..(20): a, c, t, g, unknown or other
nscggaarnnnnnnmattan

SEQ ID NO: 948 - DNA, 22 bp, Homo sapiens
  modified_base (1)..(1): a, c, t, g, unknown or other
  modified_base (9)..(14): a, c, t, g, unknown or other
  modified_base (21)..(22): a, c, t, g, unknown or other
nscggaarnnnnnntcacacnn

SEQ ID NO: 949 - DNA, 21 bp, Homo sapiens
  modified_base (1)..(1): a, c, t, g, unknown or other
  modified_base (9)..(13): a, c, t, g, unknown or other
  modified_base (20)..(21): a, c, t, g, unknown or other
nscggaarnnnnntcacacnn

SEQ ID NO: 950 - DNA, 17 bp, Homo sapiens
  modified_base (1)..(1): a, c, t, g, unknown or other
  modified_base (8)..(8): a, c, t, g, unknown or other
  modified_base (17)..(17): a, c, t, g, unknown or other
nscggawnttacgtaan

SEQ ID NO: 951 - DNA, 18 bp, Homo sapiens
  modified_base (1)..(1): a, c, t, g, unknown or other
  modified_base (12)..(12): a, c, t, g, unknown or other
  modified_base (18)..(18): a, c, t, g, unknown or other
nsmggacggayntccksn

SEQ ID NO: 952 - DNA, 16 bp, Homo sapiens
  modified_base (1)..(1): a, c, t, g, unknown or other
  modified_base (9)..(9): a, c, t, g, unknown or other
  modified_base (16)..(16): a, c, t, g, unknown or other
ntaatkrsnmrtaaan

SEQ ID NO: 953 - DNA, 17 bp, Homo sapiens
  modified_base (1)..(1): a, c, t, g, unknown or other
  modified_base (6)..(6): a, c, t, g, unknown or other
  modified_base (9)..(9): a, c, t, g, unknown or other
  modified_base (17)..(17): a, c, t, g, unknown or other
ntaatnrsnymrtaaan

SEQ ID NO: 954 - DNA, 19 bp, Homo sapiens
  modified_base (1)..(1): a, c, t, g, unknown or other
  modified_base (7)..(12): a, c, t, g, unknown or other
  modified_base (19)..(19): a, c, t, g, unknown or other
ntgacrnnnnnncacgtgn

SEQ ID NO: 955 - DNA, 14 bp, Homo sapiens
  modified_base (1)..(1): a, c, t, g, unknown or other
  modified_base (10)..(10): a, c, t, g, unknown or other
  modified_base (14)..(14): a, c, t, g, unknown or other
ntgttgatrngggn

SEQ ID NO: 956 - DNA, 15 bp, Homo sapiens
  modified_base (1)..(1): a, c, t, g, unknown or other
  modified_base (7)..(7): a, c, t, g, unknown or other
  modified_base (14)..(15): a, c, t, g, unknown or other
ntgttgncggaarnn

SEQ ID NO: 957 - DNA, 17 bp, Homo sapiens
  modified_base (1)..(1): a, c, t, g, unknown or other
  modified_base (7)..(8): a, c, t, g, unknown or other
  modified_base (16)..(17): a, c, t, g, unknown or other
ntttaynnccggaarnn

SEQ ID NO: 958 - DNA, 18 bp, Homo sapiens
  modified_base (1)..(1): a, c, t, g, unknown or other
  modified_base (8)..(12): a, c, t, g, unknown or other
nymattannnnnacaatr

SEQ ID NO: 959 - DNA, 20 bp, Homo sapiens
  modified_base (1)..(1): a, c, t, g, unknown or other
  modified_base (8)..(12): a, c, t, g, unknown or other
  modified_base (19)..(20): a, c, t, g, unknown or other
nymattannnnncagctgnn

SEQ ID NO: 960 - DNA, 19 bp, Homo sapiens
  modified_base (1)..(1): a, c, t, g, unknown or other
  modified_base (8)..(13): a, c, t, g, unknown or other
nymattannnnnnacaatr

SEQ ID NO: 961 - DNA, 21 bp, Homo sapiens
  modified_base (1)..(1): a, c, t, g, unknown or other
  modified_base (8)..(13): a, c, t, g, unknown or other
  modified_base (20)..(21): a, c, t, g, unknown or other
nymattannnnnncagctgnn

SEQ ID NO: 962 - DNA, 22 bp, Homo sapiens
  modified_base (1)..(1): a, c, t, g, unknown or other
  modified_base (8)..(14): a, c, t, g, unknown or other
  modified_base (21)..(22): a, c, t, g, unknown or other
nymattannnnnnncagctgnn

SEQ ID NO: 963 - DNA, 22 bp, Homo sapiens
  modified_base (1)..(1): a, c, t, g, unknown or other
  modified_base (8)..(15): a, c, t, g, unknown or other
  modified_base (21)..(22): a, c, t, g, unknown or other
nymattannnnnnnnggaagnn

SEQ ID NO: 964 - DNA, 31 bp, Homo sapiens
  modified_base (8)..(23): a, c, t, g, unknown or other
  modified_base (31)..(31): a, c, t, g, unknown or other
raggtsrnnnnnnnnnnnnnnnncggaagyn

SEQ ID NO: 965 - DNA, 16 bp, Homo sapiens
  modified_base (8)..(9): a, c, t, g, unknown or other
  modified_base (16)..(16): a, c, t, g, unknown or other
rcattccnnatcgayn

SEQ ID NO: 966 - DNA, 17 bp, Homo sapiens
  modified_base (8)..(11): a, c, t, g, unknown or other
rcattccnnnntaatkr

SEQ ID NO: 967 - DNA, 28 bp, Homo sapiens
  modified_base (7)..(22): a, c, t, g, unknown or other
  modified_base (28)..(28): a, c, t, g, unknown or other
rcattcnnnnnnnnnnnnnnnngcaacn

SEQ ID NO: 968 - DNA, 29 bp, Homo sapiens
  modified_base (7)..(23): a, c, t, g, unknown or other
  modified_base (29)..(29): a, c, t, g, unknown or other
rcattcnnnnnnnnnnnnnnnnngcaacn

SEQ ID NO: 969 - DNA, 17 bp, Homo sapiens
  modified_base (7)..(11): a, c, t, g, unknown or other
rcattcnnnnntaatkr

SEQ ID NO: 970 - DNA, 20 bp, Homo sapiens
  modified_base (8)..(11): a, c, t, g, unknown or other
  modified_base (20)..(20): a, c, t, g, unknown or other
rcattcynnnncaaggtcan

SEQ ID NO: 971 - DNA, 17 bp, Homo sapiens
  modified_base (8)..(11): a, c, t, g, unknown or other
rcattcynnnntaattr

SEQ ID NO: 972 - DNA, 19 bp, Homo sapiens
  modified_base (8)..(12): a, c, t, g, unknown or other
  modified_base (19)..(19): a, c, t, g, unknown or other
rccggaannnnnatcgatn

SEQ ID NO: 973 - DNA, 20 bp, Homo sapiens
  modified_base (8)..(13): a, c, t, g, unknown or other
  modified_base (20)..(20): a, c, t, g, unknown or other
rccggaannnnnnatcgatn

SEQ ID NO: 974 - DNA, 24 bp, Homo sapiens
  modified_base (7)..(17): a, c, t, g, unknown or other
  modified_base (24)..(24): a, c, t, g, unknown or other
rccggannnnnnnnnnnacacctn

SEQ ID NO: 975 - DNA, 23 bp, Homo sapiens
  modified_base (7)..(16): a, c, t, g, unknown or other
  modified_base (23)..(23): a, c, t, g, unknown or other
rccggannnnnnnnnntaatccn

SEQ ID NO: 976 - DNA, 22 bp, Homo sapiens
  modified_base (7)..(15): a, c, t, g, unknown or other
  modified_base (22)..(22): a, c, t, g, unknown or other
rccggannnnnnnnntaatccn

SEQ ID NO: 977 - DNA, 21 bp, Homo sapiens
  modified_base (7)..(14): a, c, t, g, unknown or other
  modified_base (21)..(21): a, c, t, g, unknown or other
rccggannnnnnnntaatccn

SEQ ID NO: 978 - DNA, 12 bp, Homo sapiens
  modified_base (12)..(12): a, c, t, g, unknown or other
rccggawgtkkn

SEQ ID NO: 979 - DNA, 12 bp, Homo sapiens
rccggawgtkkw

SEQ ID NO: 980 - DNA, 20 bp, Homo sapiens
  modified_base (14)..(16): a, c, t, g, unknown or other
  modified_base (20)..(20): a, c, t, g, unknown or other
rgaatgcggaarynnntccn

SEQ ID NO: 981 - DNA, 14 bp, Homo sapiens
  modified_base (14)..(14): a, c, t, g, unknown or other
rgaatscggaagyn

SEQ ID NO: 982 - DNA, 21 bp, Homo sapiens
  modified_base (7)..(14): a, c, t, g, unknown or other
  modified_base (21)..(21): a, c, t, g, unknown or other
rggtgtnnnnnnnngaatgyn

SEQ ID NO: 983 - DNA, 12 bp, Homo sapiens
rggtgytaatwr

SEQ ID NO: 984 - DNA, 16 bp, Homo sapiens
  modified_base (6)..(8): a, c, t, g, unknown or other
  modified_base (15)..(16): a, c, t, g, unknown or other
rgtgtnnnaatatknn

SEQ ID NO: 985 - DNA, 14 bp, Homo sapiens
rgwatgttaatccs

SEQ ID NO: 986 - DNA, 20 bp, Homo sapiens
  modified_base (9)..(11): a, c, t, g, unknown or other
  modified_base (20)..(20): a, c, t, g, unknown or other
rkcacgtgnnnmcatatgkn

SEQ ID NO: 987 - DNA, 21 bp, Homo sapiens
  modified_base (4)..(4): a, c, t, g, unknown or other
  modified_base (20)..(21): a, c, t, g, unknown or other
rkrnrggcggaarcggaagnn

SEQ ID NO: 988 - DNA, 13 bp, Homo sapiens
  modified_base (13)..(13): a, c, t, g, unknown or other
rmatwccggawrn

SEQ ID NO: 989 - DNA, 22 bp, Homo sapiens
  modified_base (2)..(2): a, c, t, g, unknown or other
  modified_base (8)..(16): a, c, t, g, unknown or other
  modified_base (22)..(22): a, c, t, g, unknown or other
rncggaannnnnnnnngcaacn

SEQ ID NO: 990 - DNA, 17 bp, Homo sapiens
  modified_base (2)..(2): a, c, t, g, unknown or other
  modified_base (7)..(8): a, c, t, g, unknown or other
  modified_base (17)..(17): a, c, t, g, unknown or other
rncggannttgcgcaan

SEQ ID NO: 991 - DNA, 21 bp, Homo sapiens
  modified_base (7)..(14): a, c, t, g, unknown or other
  modified_base (21)..(21): a, c, t, g, unknown or other
rrgtgtnnnnnnnnacaatrn

SEQ ID NO: 992 - DNA, 12 bp, Homo sapiens
rscggaaatrcm

SEQ ID NO: 993 - DNA, 16 bp, Homo sapiens
  modified_base (9)..(10): a, c, t, g, unknown or other
  modified_base (16)..(16): a, c, t, g, unknown or other
rscggaagnngtaaan

SEQ ID NO: 994 - DNA, 16 bp, Homo sapiens
  modified_base (10)..(10): a, c, t, g, unknown or other
  modified_base (16)..(16): a, c, t, g, unknown or other
rscggaagtngtaaan

SEQ ID NO: 995 - DNA, 15 bp, Homo sapiens
  modified_base (8)..(8): a, c, t, g, unknown or other
  modified_base (15)..(15): a, c, t, g, unknown or other
rscggaancacgtgn

SEQ ID NO: 996 - DNA, 21 bp, Homo sapiens
  modified_base (8)..(13): a, c, t, g, unknown or other
  modified_base (20)..(21): a, c, t, g, unknown or other
rscggaannnnnncacgtgnn

SEQ ID NO: 997 - DNA, 22 bp, Homo sapiens
  modified_base (8)..(14): a, c, t, g, unknown or other
  modified_base (21)..(22): a, c, t, g, unknown or other
rscggaannnnnnncacgtgnn

SEQ ID NO: 998 - DNA, 20 bp, Homo sapiens
  modified_base (8)..(14): a, c, t, g, unknown or other
rscggaannnnnnntaatkr

SEQ ID NO: 999 - DNA, 20 bp, Homo sapiens
  modified_base (8)..(13): a, c, t, g, unknown or other
  modified_base (20)..(20): a, c, t, g, unknown or other
rscggaannnnnnrtcgatn

SEQ ID NO: 1000 - DNA, 19 bp, Homo sapiens
  modified_base (8)..(12): a, c, t, g, unknown or other
  modified_base (19)..(19): a, c, t, g, unknown or other
rscggaannnnnyaattan

SEQ ID NO: 1001 - DNA, 17 bp, Homo sapiens
  modified_base (8)..(9): a, c, t, g, unknown or other
  modified_base (17)..(17): a, c, t, g, unknown or other
rscggaannrymaacan

SEQ ID NO: 1002 - DNA, 16 bp, Homo sapiens
  modified_base (8)..(8): a, c, t, g, unknown or other
  modified_base (16)..(16): a, c, t, g, unknown or other
rscggaanrwmaacan

SEQ ID NO: 1003 - DNA, 15 bp, Homo sapiens
  modified_base (15)..(15): a, c, t, g, unknown or other
rscggaarcaggtgn

SEQ ID NO: 1004 - DNA, 16 bp, Homo sapiens
  modified_base (10)..(11): a, c, t, g, unknown or other
  modified_base (16)..(16): a, c, t, g, unknown or other
rscggaarynntaaan

SEQ ID NO: 1005 - DNA, 15 bp, Homo sapiens
  modified_base (7)..(8): a, c, t, g, unknown or other
rscgganncatatgk

SEQ ID NO: 1006 - DNA, 13 bp, Homo sapiens
  modified_base (13)..(13): a, c, t, g, unknown or other
rscggatgttrtn

SEQ ID NO: 1007 - DNA, 20 bp, Homo sapiens
  modified_base (8)..(13): a, c, t, g, unknown or other
  modified_base (20)..(20): a, c, t, g, unknown or other
rscggawnnnnnnacaatrn

SEQ ID NO: 1008 - DNA, 21 bp, Homo sapiens
  modified_base (8)..(14): a, c, t, g, unknown or other
  modified_base (21)..(21): a, c, t, g, unknown or other
rscggawnnnnnnnacaatrn

SEQ ID NO: 1009 - DNA, 11 bp, Homo sapiens
rscggwaatkr

SEQ ID NO: 1010 - DNA, 13 bp, Homo sapiens
  modified_base (6)..(8): a, c, t, g, unknown or other
rsgtgnnnaacgk

SEQ ID NO: 1011 - DNA, 15 bp, Homo sapiens
  modified_base (9)..(9): a, c, t, g, unknown or other
  modified_base (15)..(15): a, c, t, g, unknown or other
rtaaacaynrtaaan

SEQ ID NO: 1012 - DNA, 14 bp, Homo sapiens
  modified_base (14)..(14): a, c, t, g, unknown or other
rtaaacmggaaryn

SEQ ID NO: 1013 - DNA, 13 bp, Homo sapiens
  modified_base (8)..(8): a, c, t, g, unknown or other
  modified_base (12)..(13): a, c, t, g, unknown or other
rtaaatangggnn

SEQ ID NO: 1014 - DNA, 16 bp, Homo sapiens
  modified_base (9)..(9): a, c, t, g, unknown or other
  modified_base (16)..(16): a, c, t, g, unknown or other
rtcacgysnccggawn

SEQ ID NO: 1015 - DNA, 16 bp, Homo sapiens
  modified_base (8)..(8): a, c, t, g, unknown or other
  modified_base (14)..(16): a, c, t, g, unknown or other
rtgcgggnaggtgnnn

SEQ ID NO: 1016 - DNA, 16 bp, Homo sapiens
  modified_base (8)..(9): a, c, t, g, unknown or other
rtgcgggnnatcgatr

SEQ ID NO: 1017 - DNA, 21 bp, Homo sapiens
  modified_base (8)..(14): a, c, t, g, unknown or other
  modified_base (21)..(21): a, c, t, g, unknown or other
rtgcgggnnnnnnncacgtgn

SEQ ID NO: 1018 - DNA, 16 bp, Homo sapiens
  modified_base (8)..(10): a, c, t, g, unknown or other
rtgcgggnnntcgatr

SEQ ID NO: 1019 - DNA, 14 bp, Homo sapiens
  modified_base (14)..(14): a, c, t, g, unknown or other
rtmaacaggaagtn

SEQ ID NO: 1020 - DNA, 14 bp, Homo sapiens
  modified_base (13)..(14): a, c, t, g, unknown or other
rtmaacaggaarnn

SEQ ID NO: 1021 - DNA, 13 bp, Homo sapiens
  modified_base (13)..(13): a, c, t, g, unknown or other
rtmaacaggawrn

SEQ ID NO: 1022 - DNA, 15 bp, Homo sapiens
  modified_base (15)..(15): a, c, t, g, unknown or other
rtrcgggtaataaan

SEQ ID NO: 1023 - DNA, 15 bp, Homo sapiens
  modified_base (4)..(5): a, c, t, g, unknown or other
  modified_base (15)..(15): a, c, t, g, unknown or other
rtrnnggcggaagtn

SEQ ID NO: 1024 - DNA, 15 bp, Homo sapiens
  modified_base (15)..(15): a, c, t, g, unknown or other
rtrygggcggaarkn

SEQ ID NO: 1025 - DNA, 17 bp, Homo sapiens
  modified_base (9)..(10): a, c, t, g, unknown or other
  modified_base (16)..(17): a, c, t, g, unknown or other
rwcacgtgnncggaann

SEQ ID NO: 1026 - DNA, 21 bp, Homo sapiens
  modified_base (10)..(15): a, c, t, g, unknown or other
  modified_base (20)..(21): a, c, t, g, unknown or other
rwmaacaggnnnnnnttccnn

SEQ ID NO: 1027 - DNA, 26 bp, Homo sapiens
  modified_base (7)..(18): a, c, t, g, unknown or other
  modified_base (25)..(26): a, c, t, g, unknown or other
sgcgccnnnnnnnnnnnncagctgnn

SEQ ID NO: 1028 - DNA, 17 bp, Homo sapiens
  modified_base (6)..(10): a, c, t, g, unknown or other
  modified_base (17)..(17): a, c, t, g, unknown or other
sgcgcnnnnncggaagn

SEQ ID NO: 1029 - DNA, 22 bp, Homo sapiens
  modified_base (6)..(15): a, c, t, g, unknown or other
  modified_base (22)..(22): a, c, t, g, unknown or other
sgcgcnnnnnnnnnncggaagn

SEQ ID NO: 1030 - DNA, 23 bp, Homo sapiens
  modified_base (6)..(16): a, c, t, g, unknown or other
  modified_base (23)..(23): a, c, t, g, unknown or other
sgcgcnnnnnnnnnnncggaagn

SEQ ID NO: 1031 - DNA, 16 bp, Homo sapiens
  modified_base (9)..(9): a, c, t, g, unknown or other
  modified_base (15)..(16): a, c, t, g, unknown or other
sgtcacgcntcattnn

SEQ ID NO: 1032 - DNA, 20 bp, Homo sapiens
  modified_base (8)..(13): a, c, t, g, unknown or other
  modified_base (20)..(20): a, c, t, g, unknown or other
symattannnnnnrgcaacn

SEQ ID NO: 1033 - DNA, 13 bp, Homo sapiens
wtgmataacaatr

SEQ ID NO: 1034 - DNA, 16 bp, Homo sapiens
  modified_base (2)..(2): a, c, t, g, unknown or other
  modified_base (7)..(7): a, c, t, g, unknown or other
  modified_base (16)..(16): a, c, t, g, unknown or other
ynattanrggtgtgan

SEQ ID NO: 1035 - DNA, 19 bp, Homo sapiens
  modified_base (1)..(1): a, c, t, g, unknown or other
  modified_base (8)..(13): a, c, t, g, unknown or other
ncacgtgnnnnnncatwcc

SEQ ID NO: 1036 - DNA, 20 bp, Homo sapiens
  modified_base (1)..(1): a, c, t, g, unknown or other
  modified_base (8)..(14): a, c, t, g, unknown or other
ncacgtgnnnnnnncatwcc

SEQ ID NO: 1037 - DNA, 21 bp, Homo sapiens
  modified_base (1)..(1): a, c, t, g, unknown or other
  modified_base (8)..(15): a, c, t, g, unknown or other
ncagctgnnnnnnnntrcggg

SEQ ID NO: 1038 - DNA, 20 bp, Homo sapiens
  modified_base (1)..(1): a, c, t, g, unknown or other
  modified_base (8)..(14): a, c, t, g, unknown or other
ncagctgnnnnnnntrcggg

SEQ ID NO: 1039 - DNA, 20 bp, Homo sapiens
  modified_base (1)..(1): a, c, t, g, unknown or other
  modified_base (8)..(14): a, c, t, g, unknown or other
nccggaannnnnnnmatwcc

SEQ ID NO: 1040 - DNA, 16 bp, Homo sapiens
  modified_base (1)..(1): a, c, t, g, unknown or other
  modified_base (8)..(10): a, c, t, g, unknown or other
ncrcgtgnnnggatta

SEQ ID NO: 1041 - DNA, 22 bp, Homo sapiens
  modified_base (1)..(1): a, c, t, g, unknown or other
  modified_base (5)..(8): a, c, t, g, unknown or other
  modified_base (15)..(17): a, c, t, g, unknown or other
ngtgnnnnmatatknnnacacc

SEQ ID NO: 1042 - DNA, 18 bp, Homo sapiens
  modified_base (1)..(2): a, c, t, g, unknown or other
  modified_base (9)..(12): a, c, t, g, unknown or other
nncrcgtgnnnnggatta

SEQ ID NO: 1043 - DNA, 21 bp, Homo sapiens
  modified_base (1)..(2): a, c, t, g, unknown or other
  modified_base (19)..(19): a, c, t, g, unknown or other
nnmattagtcacgcwtsrntg

SEQ ID NO: 1044 - DNA, 15 bp, Homo sapiens
  modified_base (1)..(3): a, c, t, g, unknown or other
nnntatgcagygtka

SEQ ID NO: 1045 - DNA, 19 bp, Homo sapiens
  modified_base (1)..(2): a, c, t, g, unknown or other
  modified_base (9)..(11): a, c, t, g, unknown or other
  modified_base (14)..(16): a, c, t, g, unknown or other
nntcccgcnnnccnnnggc

SEQ ID NO: 1046 - DNA, 22 bp, Homo sapiens
  modified_base (1)..(1): a, c, t, g, unknown or other
  modified_base (5)..(7): a, c, t, g, unknown or other
  modified_base (13)..(16): a, c, t, g, unknown or other
nsccnnnrggcannnnymatta

SEQ ID NO: 1047 - DNA, 19 bp, Homo sapiens
  modified_base (1)..(1): a, c, t, g, unknown or other
  modified_base (18)..(18): a, c, t, g, unknown or other
nscggacggawatccgsnt

SEQ ID NO: 1048 - DNA, 17 bp, Homo sapiens
  modified_base (1)..(1): a, c, t, g, unknown or other
  modified_base (7)..(11): a, c, t, g, unknown or other
nscggannnnnggmtta

SEQ ID NO: 1049 - DNA, 18 bp, Homo sapiens
  modified_base (1)..(1): a, c, t, g, unknown or other
  modified_base (7)..(12): a, c, t, g, unknown or other
nscggannnnnnggmtta

SEQ ID NO: 1050 - DNA, 16 bp, Homo sapiens
  modified_base (1)..(1): a, c, t, g, unknown or other
  modified_base (4)..(4): a, c, t, g, unknown or other
  modified_base (8)..(10): a, c, t, g, unknown or other
ntrngggnnncacgtg

SEQ ID NO: 1051 - DNA, 15 bp, Homo sapiens
  modified_base (1)..(1): a, c, t, g, unknown or other
  modified_base (7)..(7): a, c, t, g, unknown or other
  modified_base (9)..(9): a, c, t, g, unknown or other
ntttatnrntmaaca

SEQ ID NO: 1052 - DNA, 22 bp, Homo sapiens
  modified_base (8)..(15): a, c, t, g, unknown or other
  modified_base (17)..(18): a, c, t, g, unknown or other
rcatwccnnnnnnnnynntaaa

SEQ ID NO: 1053 - DNA, 16 bp, Homo sapiens
  modified_base (7)..(10): a, c, t, g, unknown or other
rcatwcnnnnggatta

SEQ ID NO: 1054 - DNA, 17 bp, Homo sapiens
  modified_base (7)..(11): a, c, t, g, unknown or other
rcatwcnnnnnggatta

SEQ ID NO: 1055 - DNA, 18 bp, Homo sapiens
  modified_base (7)..(12): a, c, t, g, unknown or other
rcatwcnnnnnnaggtca

SEQ ID NO: 1056 - DNA, 18 bp, Homo sapiens
  modified_base (8)..(12): a, c, t, g, unknown or other
rcatwcynnnnntaatcc

SEQ ID NO: 1057 - DNA, 17 bp, Homo sapiens
  modified_base (8)..(11): a, c, t, g, unknown or other
rcatwcynnnntaatcc

SEQ ID NO: 1058 - DNA, 18 bp, Homo sapiens
  modified_base (9)..(12): a, c, t, g, unknown or other
rggtgtkannnnggatta

SEQ ID NO: 1059 - DNA, 31 bp, Homo sapiens
  modified_base (9)..(24): a, c, t, g, unknown or other
rmatatkcnnnnnnnnnnnnnnnnrwmaaca

SEQ ID NO: 1060 - DNA, 30 bp, Homo sapiens
  modified_base (9)..(23): a, c, t, g, unknown or other
rmatatkcnnnnnnnnnnnnnnnrwmaaca

SEQ ID NO: 1061 - DNA, 28 bp, Homo sapiens
  modified_base (9)..(21): a, c, t, g, unknown or other
rmatatkcnnnnnnnnnnnnnrwmaaca

SEQ ID NO: 1062 - DNA, 14 bp, Homo sapiens
  modified_base (2)..(2): a, c, t, g, unknown or other
rncggawgtmatta

SEQ ID NO: 1063 - DNA, 21 bp, Homo sapiens
  modified_base (8)..(15): a, c, t, g, unknown or other
rscggaannnnnnnncatwcc

SEQ ID NO: 1064 - DNA, 16 bp, Homo sapiens
  modified_base (8)..(8): a, c, t, g, unknown or other
rscggaantsrcgtga

SEQ ID NO: 1065 - DNA, 17 bp, Homo sapiens
  modified_base (9)..(9): a, c, t, g, unknown or other
rscggaasngrtcgata

SEQ ID NO: 1066 - DNA, 23 bp, Homo sapiens
  modified_base (11)..(18): a, c, t, g, unknown or other
rscggwaatknnnnnnnnmatta

SEQ ID NO: 1067 - DNA, 17 bp, Homo sapiens
  modified_base (8)..(11): a, c, t, g, unknown or other
rscggwannnnymatta

SEQ ID NO: 1068 - DNA, 14 bp, Homo sapiens
rsmggawgyaatta

SEQ ID NO: 1069 - DNA, 14 bp, Homo sapiens
  modified_base (8)..(8): a, c, t, g, unknown or other
rtaaacwnatwaaa

SEQ ID NO: 1070 - DNA, 13 bp, Homo sapiens
  modified_base (4)..(4): a, c, t, g, unknown or other
rtgnkggcggawg

SEQ ID NO: 1071 - DNA, 14 bp, Homo sapiens
  modified_base (8)..(9): a, c, t, g, unknown or other
rtrcgggnngatta

SEQ ID NO: 1072 - DNA, 19 bp, Homo sapiens
  modified_base (8)..(11): a, c, t, g, unknown or other
rtrcgggnnnnttacgtaa

SEQ ID NO: 1073 - DNA, 16 bp, Homo sapiens
rwmaacasymrtwaaa

SEQ ID NO: 1074 - DNA, 17 bp, Homo sapiens
  modified_base (4)..(6): a, c, t, g, unknown or other
  modified_base (10)..(11): a, c, t, g, unknown or other
sccnnnggcnnyaatta

SEQ ID NO: 1075 - DNA, 16 bp, Homo sapiens
  modified_base (8)..(8): a, c, t, g, unknown or other
syaattanwggtgyga

SEQ ID NO: 1076 - DNA, 17 bp, Homo sapiens
  modified_base (10)..(11): a, c, t, g, unknown or other
wtwtgcatanntaatta

SEQ ID NO: 1077 - DNA, 14 bp, Homo sapiens
  modified_base (2)..(2): a, c, t, g, unknown or other
ynrcacstcgtwaa

SEQ ID NO: 1078 - DNA, 15 bp, Homo sapiens
  modified_base (1)..(1): a, c, t, g, unknown or other
  modified_base (7)..(8): a, c, t, g, unknown or other
  modified_base (14)..(15): a, c, t, g, unknown or other
naacggnnatygann

SEQ ID NO: 1079 - DNA, 23 bp, Homo sapiens
  modified_base (1)..(1): a, c, t, g, unknown or other
  modified_base (8)..(12): a, c, t, g, unknown or other
  modified_base (17)..(18): a, c, t, g, unknown or other
  modified_base (22)..(23): a, c, t, g, unknown or other
natcgatnnnnngcctnnggsnn

SEQ ID NO: 1080 - DNA, 25 bp, Homo sapiens
  modified_base (1)..(1): a, c, t, g, unknown or other
  modified_base (8)..(14): a, c, t, g, unknown or other
  modified_base (19)..(20): a, c, t, g, unknown or other
  modified_base (24)..(25): a, c, t, g, unknown or other
natcgatnnnnnnngcctnnggsnn

SEQ ID NO: 1081 - DNA, 26 bp, Homo sapiens
  modified_base (1)..(1): a, c, t, g, unknown or other
  modified_base (8)..(15): a, c, t, g, unknown or other
  modified_base (20)..(21): a, c, t, g, unknown or other
  modified_base (25)..(26): a, c, t, g, unknown or other
natcgatnnnnnnnngcctnnggsnn

SEQ ID NO: 1082 - DNA, 22 bp, Homo sapiens
  modified_base (1)..(1): a, c, t, g, unknown or other
  modified_base (8)..(14): a, c, t, g, unknown or other
natcratnnnnnnnaacaatrs

SEQ ID NO: 1083 - DNA, 23 bp, Homo sapiens
  modified_base (1)..(1): a, c, t, g, unknown or other
  modified_base (8)..(15): a, c, t, g, unknown or other
natcratnnnnnnnnaacaatrs

SEQ ID NO: 1084 - DNA, 17 bp, Homo sapiens
  modified_base (1)..(1): a, c, t, g, unknown or other
  modified_base (8)..(10): a, c, t, g, unknown or other
  modified_base (17)..(17): a, c, t, g, unknown or other
natttrcnnnacaatrn

SEQ ID NO: 1085 - DNA, 17 bp, Homo sapiens
  modified_base (1)..(1): a, c, t, g, unknown or other
  modified_base (8)..(9): a, c, t, g, unknown or other
  modified_base (16)..(17): a, c, t, g, unknown or other
ncacgtgnnyaacsgnn

SEQ ID NO: 1086 - DNA, 15 bp, Homo sapiens
  modified_base (1)..(1): a, c, t, g, unknown or other
  modified_base (8)..(8): a, c, t, g, unknown or other
  modified_base (15)..(15): a, c, t, g, unknown or other
ncaggtgngwatgyn

SEQ ID NO: 1087 - DNA, 20 bp, Homo sapiens
  modified_base (1)..(1): a, c, t, g, unknown or other
  modified_base (8)..(13): a, c, t, g, unknown or other
ncagstgnnnnnngtaatkr

SEQ ID NO: 1088 - DNA, 21 bp, Homo sapiens
  modified_base (1)..(1): a, c, t, g, unknown or other
  modified_base (8)..(14): a, c, t, g, unknown or other
ncagstgnnnnnnngtaatkr

SEQ ID NO: 1089 - DNA, 23 bp, Homo sapiens
  modified_base (1)..(1): a, c, t, g, unknown or other
  modified_base (9)..(16): a, c, t, g, unknown or other
  modified_base (23)..(23): a, c, t, g, unknown or other
ncasstgknnnnnnnncacgtgn

SEQ ID NO: 1090 - DNA, 24 bp, Homo sapiens
  modified_base (1)..(1): a, c, t, g, unknown or other
  modified_base (9)..(17): a, c, t, g, unknown or other
  modified_base (24)..(24): a, c, t, g, unknown or other
ncasstgknnnnnnnnncacgtgn

SEQ ID NO: 1091 - DNA, 21 bp, Homo sapiens
  modified_base (1)..(1): a, c, t, g, unknown or other
  modified_base (10)..(11): a, c, t, g, unknown or other
  modified_base (13)..(13): a, c, t, g, unknown or other
nccggaagynncntagcaacs

SEQ ID NO: 1092 - DNA, 21 bp, Homo sapiens
  modified_base (1)..(1): a, c, t, g, unknown or other
  modified_base (8)..(13): a, c, t, g, unknown or other
  modified_base (20)..(21): a, c, t, g, unknown or other
nccggaannnnnncacgygnn

SEQ ID NO: 1093 - DNA, 16 bp, Homo sapiens
  modified_base (1)..(1): a, c, t, g, unknown or other
  modified_base (8)..(8): a, c, t, g, unknown or other
  modified_base (10)..(10): a, c, t, g, unknown or other
  modified_base (16)..(16): a, c, t, g, unknown or other
nccggaantnrtaaan

SEQ ID NO: 1094 - DNA, 15 bp, Homo sapiens
  modified_base (1)..(1): a, c, t, g, unknown or other
  modified_base (7)..(8): a, c, t, g, unknown or other
nccgganncasstgy

SEQ ID NO: 1095 - DNA, 17 bp, Homo sapiens
  modified_base (1)..(1): a, c, t, g, unknown or other
  modified_base (8)..(10): a, c, t, g, unknown or other
ngataasnnnrgwatgy

SEQ ID NO: 1096 - DNA, 20 bp, Homo sapiens
  modified_base (1)..(1): a, c, t, g, unknown or other
  modified_base (6)..(7): a, c, t, g, unknown or other
  modified_base (11)..(12): a, c, t, g, unknown or other
  modified_base (20)..(20): a, c, t, g, unknown or other
ngcctnnggsnncggaagyn

SEQ ID NO: 1097 - DNA, 23 bp, Homo sapiens
  modified_base (1)..(1): a, c, t, g, unknown or other
  modified_base (8)..(9): a, c, t, g, unknown or other
  modified_base (16)..(19): a, c, t, g, unknown or other
  modified_base (23)..(23): a, c, t, g, unknown or other
nggtgtgnnggcgcsnnnncrmn

SEQ ID NO: 1098 - DNA, 19 bp, Homo sapiens
  modified_base (1)..(2): a, c, t, g, unknown or other
  modified_base (9)..(12): a, c, t, g, unknown or other
  modified_base (19)..(19): a, c, t, g, unknown or other
nncacgtgnnnnrgmttan

SEQ ID NO: 1099 - DNA, 24 bp, Homo sapiens
  modified_base (1)..(2): a, c, t, g, unknown or other
  modified_base (9)..(17): a, c, t, g, unknown or other
  modified_base (24)..(24): a, c, t, g, unknown or other
nncagctgnnnnnnnnnatygatn

SEQ ID NO: 1100 - DNA, 15 bp, Homo sapiens
  modified_base (1)..(2): a, c, t, g, unknown or other
  modified_base (15)..(15): a, c, t, g, unknown or other
nncggawgymattan

SEQ ID NO: 1101 - DNA, 17 bp, Homo sapiens
  modified_base (1)..(2): a, c, t, g, unknown or other
  modified_base (17)..(17): a, c, t, g, unknown or other
nnggamggatktccgsn

SEQ ID NO: 1102 - DNA, 15 bp, Homo sapiens
  modified_base (1)..(2): a, c, t, g, unknown or other
  modified_base (10)..(10): a, c, t, g, unknown or other
nngtmaatangggyr

SEQ ID NO: 1103 - DNA, 24 bp, Homo sapiens
  modified_base (1)..(2): a, c, t, g, unknown or other
  modified_base (6)..(13): a, c, t, g, unknown or other
  modified_base (23)..(24): a, c, t, g, unknown or other
nngygnnnnnnnnwaacaacacnn

SEQ ID NO: 1104 - DNA, 15 bp, Homo sapiens
  modified_base (1)..(2): a, c, t, g, unknown or other
  modified_base (15)..(15): a, c, t, g, unknown or other
nngygysacattccn

SEQ ID NO: 1105 - DNA, 15 bp, Homo sapiens
  modified_base (1)..(2): a, c, t, g, unknown or other
  modified_base (15)..(15): a, c, t, g, unknown or other
nnmggaartgckggn

SEQ ID NO: 1106 - DNA, 17 bp, Homo sapiens
  modified_base (1)..(2): a, c, t, g, unknown or other
  modified_base (9)..(9): a, c, t, g, unknown or other
  modified_base (16)..(17): a, c, t, g, unknown or other
nnmrtaaantmacacnn

SEQ ID NO: 1107 - DNA, 25 bp, Homo sapiens
  modified_base (1)..(3): a, c, t, g, unknown or other
  modified_base (9)..(13): a, c, t, g, unknown or other
  modified_base (17)..(19): a, c, t, g, unknown or other
  modified_base (25)..(25): a, c, t, g, unknown or other
nnnmggaannnnntccnnnrcaacn

SEQ ID NO: 1108 - DNA, 18 bp, Homo sapiens
  modified_base (1)..(3): a, c, t, g, unknown or other
  modified_base (9)..(10): a, c, t, g, unknown or other
  modified_base (12)..(12): a, c, t, g, unknown or other
  modified_base (18)..(18): a, c, t, g, unknown or other
nnnrtaaanntnacacyn

SEQ ID NO: 1109 - DNA, 16 bp, Homo sapiens
  modified_base (1)..(3): a, c, t, g, unknown or other
nnnrtaaawatygayy

SEQ ID NO: 1110 - DNA, 18 bp, Homo sapiens
  modified_base (1)..(2): a, c, t, g, unknown or other
  modified_base (9)..(9): a, c, t, g, unknown or other
nnrgyaacntcacgtgay

SEQ ID NO: 1111 - DNA, 29 bp, Homo sapiens
  modified_base (1)..(1): a, c, t, g, unknown or other
  modified_base (7)..(7): a, c, t, g, unknown or other
  modified_base (9)..(21): a, c, t, g, unknown or other
  modified_base (28)..(29): a, c, t, g, unknown or other
nrgtgtnannnnnnnnnnnnnccggaann

SEQ ID NO: 1112 - DNA, 18 bp, Homo sapiens
  modified_base (1)..(1): a, c, t, g, unknown or other
  modified_base (8)..(10): a, c, t, g, unknown or other
  modified_base (18)..(18): a, c, t, g, unknown or other
nrgyaacnnncatatgkn

SEQ ID NO: 1113 - DNA, 17 bp, Homo sapiens
  modified_base (1)..(1): a, c, t, g, unknown or other
  modified_base (9)..(9): a, c, t, g, unknown or other
  modified_base (17)..(17): a, c, t, g, unknown or other
nrtcratancggaaryn

SEQ ID NO: 1114 - DNA, 15 bp, Homo sapiens
  modified_base (1)..(1): a, c, t, g, unknown or other
  modified_base (15)..(15): a, c, t, g, unknown or other
nrtmaacmggaaryn

SEQ ID NO: 1115 - DNA, 24 bp, Homo sapiens
  modified_base (1)..(1): a, c, t, g, unknown or other
  modified_base (5)..(7): a, c, t, g, unknown or other
  modified_base (13)..(18): a, c, t, g, unknown or other
nsccnnnrggcannnnnntaatkr

SEQ ID NO: 1116 - DNA, 23 bp, Homo sapiens
  modified_base (1)..(1): a, c, t, g, unknown or other
  modified_base (5)..(7): a, c, t, g, unknown or other
  modified_base (13)..(17): a, c, t, g, unknown or other
nsccnnnrggcannnnntaatkr

SEQ ID NO: 1117 - DNA, 18 bp, Homo sapiens
  modified_base (1)..(1): a, c, t, g, unknown or other
  modified_base (9)..(11): a, c, t, g, unknown or other
  modified_base (18)..(18): a, c, t, g, unknown or other
ntcacacmnnnatcratn

SEQ ID NO: 1118 - DNA, 18 bp, Homo sapiens
  modified_base (1)..(1): a, c, t, g, unknown or other
  modified_base (8)..(8): a, c, t, g, unknown or other
  modified_base (18)..(18): a, c, t, g, unknown or other
ntgacagntaatcratan

SEQ ID NO: 1119 - DNA, 23 bp, Homo sapiens
  modified_base (1)..(1): a, c, t, g, unknown or other
  modified_base (3)..(5): a, c, t, g, unknown or other
  modified_base (14)..(16): a, c, t, g, unknown or other
  modified_base (21)..(23): a, c, t, g, unknown or other
ntnnnggcggaagnnnttccnnn

SEQ ID NO: 1120 - DNA, 23 bp, Homo sapiens
  modified_base (1)..(1): a, c, t, g, unknown or other
  modified_base (4)..(4): a, c, t, g, unknown or other
  modified_base (14)..(16): a, c, t, g, unknown or other
  modified_base (21)..(23): a, c, t, g, unknown or other
ntrngggcggaagnnnttccnnn

SEQ ID NO: 1121 - DNA, 20 bp, Homo sapiens
  modified_base (1)..(1): a, c, t, g, unknown or other
  modified_base (8)..(10): a, c, t, g, unknown or other
  modified_base (20)..(20): a, c, t, g, unknown or other
ntrygggnnntggcgggarn

SEQ ID NO: 1122 - DNA, 16 bp, Homo sapiens
  modified_base (1)..(1): a, c, t, g, unknown or other
  modified_base (9)..(9): a, c, t, g, unknown or other
  modified_base (16)..(16): a, c, t, g, unknown or other
nymrtaaanatygatn

SEQ ID NO: 1123 - DNA, 23 bp, Homo sapiens
  modified_base (7)..(16): a, c, t, g, unknown or other
  modified_base (23)..(23): a, c, t, g, unknown or other
rattccnnnnnnnnnncasstgn

SEQ ID NO: 1124 - DNA, 29 bp, Homo sapiens
  modified_base (8)..(19): a, c, t, g, unknown or other
  modified_base (29)..(29): a, c, t, g, unknown or other
rcatwccnnnnnnnnnnnnrwgcgtgacn

SEQ ID NO: 1125 - DNA, 21 bp, Homo sapiens
  modified_base (8)..(13): a, c, t, g, unknown or other
  modified_base (19)..(21): a, c, t, g, unknown or other
rcatwccnnnnnntttaynnn

SEQ ID NO: 1126 - DNA, 21 bp, Homo sapiens
  modified_base (8)..(13): a, c, t, g, unknown or other
  modified_base (21)..(21): a, c, t, g, unknown or other
rccggaannnnnnratcratn

SEQ ID NO: 1127 - DNA, 16 bp, Homo sapiens
  modified_base (15)..(16): a, c, t, g, unknown or other
rccggaarcasstgnn

SEQ ID NO: 1128 - DNA, 18 bp, Homo sapiens
  modified_base (7)..(7): a, c, t, g, unknown or other
  modified_base (9)..(10): a, c, t, g, unknown or other
  modified_base (18)..(18): a, c, t, g, unknown or other
rccgganrnncggwatkn

SEQ ID NO: 1129 - DNA, 13 bp, Homo sapiens
  modified_base (6)..(6): a, c, t, g, unknown or other
  modified_base (13)..(13): a, c, t, g, unknown or other
rggtgntaakccn

SEQ ID NO: 1130 - DNA, 25 bp, Homo sapiens
  modified_base (6)..(6): a, c, t, g, unknown or other
  modified_base (11)..(19): a, c, t, g, unknown or other
  modified_base (24)..(25): a, c, t, g, unknown or other
rggtgntaatnnnnnnnnncasynn

SEQ ID NO: 1131 - DNA, 13 bp, Homo sapiens
  modified_base (13)..(13): a, c, t, g, unknown or other
rgwatgytaatkn

SEQ ID NO: 1132 - DNA, 13 bp, Homo sapiens
rgwatgytaatkr

SEQ ID NO: 1133 - DNA, 20 bp, Homo sapiens
  modified_base (2)..(2): a, c, t, g, unknown or other
  modified_base (9)..(13): a, c, t, g, unknown or other
  modified_base (20)..(20): a, c, t, g, unknown or other
rncggaagnnnnncasstgn

SEQ ID NO: 1134 - DNA, 16 bp, Homo sapiens
  modified_base (2)..(2): a, c, t, g, unknown or other
  modified_base (8)..(8): a, c, t, g, unknown or other
  modified_base (10)..(10): a, c, t, g, unknown or other
  modified_base (16)..(16): a, c, t, g, unknown or other
rncggaanynrtwaan

SEQ ID NO: 1135 - DNA, 29 bp, Homo sapiens
  modified_base (2)..(2): a, c, t, g, unknown or other
  modified_base (6)..(18): a, c, t, g, unknown or other
  modified_base (29)..(29): a, c, t, g, unknown or other
rngtgnnnnnnnnnnnnnrcrccggawsn

SEQ ID NO: 1136 - DNA, 29 bp, Homo sapiens
  modified_base (8)..(21): a, c, t, g, unknown or other
  modified_base (27)..(29): a, c, t, g, unknown or other
rrgtgtknnnnnnnnnnnnnncmggannn

SEQ ID NO: 1137 - DNA, 18 bp, Homo sapiens
  modified_base (8)..(10): a, c, t, g, unknown or other
  modified_base (18)..(18): a, c, t, g, unknown or other
rrtcratnnncggaaryn

SEQ ID NO: 1138 - DNA, 16 bp, Homo sapiens
  modified_base (8)..(8): a, c, t, g, unknown or other
  modified_base (15)..(16): a, c, t, g, unknown or other
rscggaancagstgnn

SEQ ID NO: 1139 - DNA, 16 bp, Homo sapiens
  modified_base (8)..(8): a, c, t, g, unknown or other
  modified_base (15)..(16): a, c, t, g, unknown or other
rscggaancasctgnn

SEQ ID NO: 1140 - DNA, 15 bp, Homo sapiens
  modified_base (8)..(8): a, c, t, g, unknown or other
  modified_base (15)..(15): a, c, t, g, unknown or other
rscggaancasstgn

SEQ ID NO: 1141 - DNA, 19 bp, Homo sapiens
  modified_base (8)..(12): a, c, t, g, unknown or other
  modified_base (19)..(19): a, c, t, g, unknown or other
rscggaannnnnggmttan

SEQ ID NO: 1142 - DNA, 18 bp, Homo sapiens
  modified_base (9)..(9): a, c, t, g, unknown or other
  modified_base (18)..(18): a, c, t, g, unknown or other
rscggaasngrtcgatan

SEQ ID NO: 1143 - DNA, 17 bp, Homo sapiens
  modified_base (7)..(8): a, c, t, g, unknown or other
  modified_base (17)..(17): a, c, t, g, unknown or other
rscggannttgcgyaan

SEQ ID NO: 1144 - DNA, 15 bp, Homo sapiens
  modified_base (15)..(15): a, c, t, g, unknown or other
rscggawrcasstgn

SEQ ID NO: 1145 - DNA, 18 bp, Homo sapiens
  modified_base (10)..(13): a, c, t, g, unknown or other
  modified_base (18)..(18): a, c, t, g, unknown or other
rscggwaatnnnnattan

SEQ ID NO: 1146 - DNA, 19 bp, Homo sapiens
  modified_base (10)..(14): a, c, t, g, unknown or other
  modified_base (19)..(19): a, c, t, g, unknown or other
rscggwaatnnnnnattan

SEQ ID NO: 1147 - DNA, 18 bp, Homo sapiens
  modified_base (10)..(12): a, c, t, g, unknown or other
  modified_base (18)..(18): a, c, t, g, unknown or other
rscggwaatnnnyattan

SEQ ID NO: 1148 - DNA, 17 bp, Homo sapiens
  modified_base (8)..(8): a, c, t, g, unknown or other
  modified_base (17)..(17): a, c, t, g, unknown or other
rsmggaanttgcgyaan

SEQ ID NO: 1149 - DNA, 16 bp, Homo sapiens
  modified_base (10)..(11): a, c, t, g, unknown or other
  modified_base (16)..(16): a, c, t, g, unknown or other
rsmggaartnntaaan

SEQ ID NO: 1150 - DNA, 19 bp, Homo sapiens
  modified_base (8)..(12): a, c, t, g, unknown or other
  modified_base (19)..(19): a, c, t, g, unknown or other
rtaaacannnnnatcratn

SEQ ID NO: 1151 - DNA, 14 bp, Homo sapiens
  modified_base (10)..(10): a, c, t, g, unknown or other
  modified_base (14)..(14): a, c, t, g, unknown or other
rtmaacatrngggn

SEQ ID NO: 1152 - DNA, 14 bp, Homo sapiens
  modified_base (14)..(14): a, c, t, g, unknown or other
rtmaatamgggyrn

SEQ ID NO: 1153 - DNA, 16 bp, Homo sapiens
  modified_base (16)..(16): a, c, t, g, unknown or other
rtmrcgtgacggawgn

SEQ ID NO: 1154 - DNA, 22 bp, Homo sapiens
  modified_base (8)..(14): a, c, t, g, unknown or other
  modified_base (21)..(22): a, c, t, g, unknown or other
rtrcgggnnnnnnnywttgtnn

SEQ ID NO: 1155 - DNA, 19 bp, Homo sapiens
  modified_base (8)..(13): a, c, t, g, unknown or other
rtrcgggnnnnnntaatkr

SEQ ID NO: 1156 - DNA, 18 bp, Homo sapiens
  modified_base (8)..(12): a, c, t, g, unknown or other
rtrcgggnnnnntaatkr

SEQ ID NO: 1157 - DNA, 18 bp, Homo sapiens
  modified_base (8)..(12): a, c, t, g, unknown or other
rtrcgggnnnnntaattr

SEQ ID NO: 1158 - DNA, 19 bp, Homo sapiens
  modified_base (8)..(11): a, c, t, g, unknown or other
  modified_base (13)..(13): a, c, t, g, unknown or other
  modified_base (19)..(19): a, c, t, g, unknown or other
rtrcgggnnnnrnacaawn

SEQ ID NO: 1159 - DNA, 18 bp, Homo sapiens
  modified_base (8)..(10): a, c, t, g, unknown or other
  modified_base (12)..(12): a, c, t, g, unknown or other
  modified_base (18)..(18): a, c, t, g, unknown or other
rtrcgggnnnrnacaawn

SEQ ID NO: 1160 - DNA, 14 bp, Homo sapiens
  modified_base (14)..(14): a, c, t, g, unknown or other
rtrcgggsgattan

SEQ ID NO: 1161 - DNA, 15 bp, Homo sapiens
  modified_base (4)..(4): a, c, t, g, unknown or other
  modified_base (9)..(10): a, c, t, g, unknown or other
  modified_base (15)..(15): a, c, t, g, unknown or other
rtrngggtnntaaan

SEQ ID NO: 1162 - DNA, 14 bp, Homo sapiens
  modified_base (8)..(8): a, c, t, g, unknown or other
  modified_base (14)..(14): a, c, t, g, unknown or other
rtrsgggnaattan

SEQ ID NO: 1163 - DNA, 15 bp, Homo sapiens
  modified_base (8)..(9): a, c, t, g, unknown or other
  modified_base (15)..(15): a, c, t, g, unknown or other
rtrsgggnnaattan

SEQ ID NO: 1164 - DNA, 17 bp, Homo sapiens
  modified_base (8)..(10): a, c, t, g, unknown or other
rtrsgggnnnattgtky

SEQ ID NO: 1165 - DNA, 15 bp, Homo sapiens
  modified_base (8)..(9): a, c, t, g, unknown or other
rtrsgggnntaatkr

SEQ ID NO: 1166 - DNA, 23 bp, Homo sapiens
  modified_base (12)..(16): a, c, t, g, unknown or other
  modified_base (21)..(23): a, c, t, g, unknown or other
rtrskggcggannnnnatccnnn

SEQ ID NO: 1167 - DNA, 24 bp, Homo sapiens
  modified_base (12)..(17): a, c, t, g, unknown or other
  modified_base (22)..(24): a, c, t, g, unknown or other
rtrskggcggannnnnnatccnnn

SEQ ID NO: 1168 - DNA, 16 bp, Homo sapiens
  modified_base (9)..(9): a, c, t, g, unknown or other
  modified_base (16)..(16): a, c, t, g, unknown or other
symrtaaanatygatn

SEQ ID NO: 1169 - DNA, 19 bp, Homo sapiens
  modified_base (9)..(12): a, c, t, g, unknown or other
  modified_base (19)..(19): a, c, t, g, unknown or other
symrtaaannnncasstgn

SEQ ID NO: 1170 - DNA, 14 bp, Homo sapiens
  modified_base (14)..(14): a, c, t, g, unknown or other
wgttkmcggawrtn

SEQ ID NO: 1171 - DNA, 20 bp, Homo sapiens
  modified_base (2)..(2): a, c, t, g, unknown or other
  modified_base (18)..(18): a, c, t, g, unknown or other
ynattagtcacgcwtsrntr

SEQ ID NO: 1172 - DNA, 22 bp, Homo sapiens
  modified_base (1)..(1): a, c, t, g, unknown or other
  modified_base (8)..(15): a, c, t, g, unknown or other
ncasstgnnnnnnnnrtrcggg

SEQ ID NO: 1173 - DNA, 22 bp, Homo sapiens
  modified_base (1)..(1): a, c, t, g, unknown or other
  modified_base (8)..(10): a, c, t, g, unknown or other
  modified_base (17)..(19): a, c, t, g, unknown or other
nggtgtgnnnggcgcsnnncrc

SEQ ID NO: 1174 - DNA, 15 bp, Homo sapiens
  modified_base (1)..(2): a, c, t, g, unknown or other
  modified_base (7)..(7): a, c, t, g, unknown or other
  modified_base (9)..(11): a, c, t, g, unknown or other
nncggangnnntwaa

SEQ ID NO: 1175 - DNA, 15 bp, Homo sapiens
  modified_base (1)..(2): a, c, t, g, unknown or other
  modified_base (10)..(10): a, c, t, g, unknown or other
nncggawgtnrtwaa

SEQ ID NO: 1176 - DNA, 13 bp, Homo sapiens
  modified_base (1)..(1): a, c, t, g, unknown or other
  modified_base (12)..(12): a, c, t, g, unknown or other
ntatkcagygtna

SEQ ID NO: 1177 - DNA, 23 bp, Homo sapiens
  modified_base (8)..(17): a, c, t, g, unknown or other
ratcratnnnnnnnnnnrgyaac

SEQ ID NO: 1178 - DNA, 22 bp, Homo sapiens
  modified_base (8)..(16): a, c, t, g, unknown or other
ratcratnnnnnnnnnrgyaac

SEQ ID NO: 1179 - DNA, 28 bp, Homo sapiens
  modified_base (8)..(21): a, c, t, g, unknown or other
rcatwccnnnnnnnnnnnnnnrtmaaca

SEQ ID NO: 1180 - DNA, 27 bp, Homo sapiens
  modified_base (8)..(20): a, c, t, g, unknown or other
rcatwccnnnnnnnnnnnnnrtmaaca

SEQ ID NO: 1181 - DNA, 26 bp, Homo sapiens
  modified_base (8)..(19): a, c, t, g, unknown or other
rcatwccnnnnnnnnnnnnrtmaaca

SEQ ID NO: 1182 - DNA, 25 bp, Homo sapiens
  modified_base (8)..(18): a, c, t, g, unknown or other
rcatwccnnnnnnnnnnnrtmaaca

SEQ ID NO: 1183 - DNA, 22 bp, Homo sapiens
  modified_base (8)..(11): a, c, t, g, unknown or other
  modified_base (18)..(18): a, c, t, g, unknown or other
rcatwcynnnntaatyrnatta

SEQ ID NO: 1184 - DNA, 20 bp, Homo sapiens
  modified_base (18)..(18): a, c, t, g, unknown or other
rscggaacyacgcwysantg

SEQ ID NO: 1185 - DNA, 17 bp, Homo sapiens
  modified_base (8)..(9): a, c, t, g, unknown or other
  modified_base (16)..(16): a, c, t, g, unknown or other
rscggaannaggygyna

SEQ ID NO: 1186 - DNA, 16 bp, Homo sapiens
  modified_base (8)..(9): a, c, t, g, unknown or other
rscggaannrtmaaya

SEQ ID NO: 1187 - DNA, 15 bp, Homo sapiens
  modified_base (8)..(8): a, c, t, g, unknown or other
rscggaanrtmaaya

SEQ ID NO: 1188 - DNA, 15 bp, Homo sapiens
  modified_base (8)..(9): a, c, t, g, unknown or other
rtrcgggnncasstg

SEQ ID NO: 1189 - DNA, 14 bp, Homo sapiens
rwmaacaycrtwaa

SEQ ID NO: 1190 - DNA, 18 bp, Homo sapiens
  modified_base (4)..(7): a, c, t, g, unknown or other
  modified_base (13)..(13): a, c, t, g, unknown or other
sccnnnnggcatngtwaa

SEQ ID NO: 1191 - DNA, 27 bp, Homo sapiens
  modified_base (1)..(1): a, c, t, g, unknown or other
  modified_base (8)..(16): a, c, t, g, unknown or other
  modified_base (21)..(22): a, c, t, g, unknown or other
  modified_base (26)..(27): a, c, t, g, unknown or other
natygatnnnnnnnnngcctnnggsnn

SEQ ID NO: 1192 - DNA, 20 bp, Homo sapiens
  modified_base (1)..(1): a, c, t, g, unknown or other
  modified_base (8)..(14): a, c, t, g, unknown or other
ncasstgnnnnnnncsgttr

SEQ ID NO: 1193 - DNA, 21 bp, Homo sapiens
  modified_base (1)..(1): a, c, t, g, unknown or other
  modified_base (8)..(15): a, c, t, g, unknown or other
ncasstgnnnnnnnncsgttr

SEQ ID NO: 1194 - DNA, 22 bp, Homo sapiens
  modified_base (1)..(1): a, c, t, g, unknown or other
  modified_base (8)..(16): a, c, t, g, unknown or other
ncasstgnnnnnnnnncsgttr

SEQ ID NO: 1195 - DNA, 21 bp, Homo sapiens
  modified_base (1)..(1): a, c, t, g, unknown or other
  modified_base (8)..(13): a, c, t, g, unknown or other
  modified_base (21)..(21): a, c, t, g, unknown or other
ncasstgnnnnnnyaacsgyn

SEQ ID NO: 1196 - DNA, 20 bp, Homo sapiens
  modified_base (1)..(1): a, c, t, g, unknown or other
  modified_base (8)..(12): a, c, t, g, unknown or other
  modified_base (20)..(20): a, c, t, g, unknown or other
ncasstgnnnnnyaacsgyn

SEQ ID NO: 1197 - DNA, 23 bp, Homo sapiens
  modified_base (1)..(1): a, c, t, g, unknown or other
  modified_base (9)..(9): a, c, t, g, unknown or other
  modified_base (13)..(16): a, c, t, g, unknown or other
  modified_base (23)..(23): a, c, t, g, unknown or other
nccataywnggwnnnnatcratn

SEQ ID NO: 1198 - DNA, 22 bp, Homo sapiens
  modified_base (1)..(1): a, c, t, g, unknown or other
  modified_base (8)..(12): a, c, t, g, unknown or other
  modified_base (22)..(22): a, c, t, g, unknown or other
nggtgtgnnnnntmattwgcrn

SEQ ID NO: 1199 - DNA, 18 bp, Homo sapiens
  modified_base (1)..(1): a, c, t, g, unknown or other
  modified_base (8)..(10): a, c, t, g, unknown or other
  modified_base (17)..(18): a, c, t, g, unknown or other
nrgcaacnnncrcgygnn

SEQ ID NO: 1200 - DNA, 23 bp, Homo sapiens
  modified_base (1)..(1): a, c, t, g, unknown or other
  modified_base (8)..(12): a, c, t, g, unknown or other
  modified_base (19)..(20): a, c, t, g, unknown or other
  modified_base (23)..(23): a, c, t, g, unknown or other
nrgyaacnnnnncctwwwnnggn

SEQ ID NO: 1201 - DNA, 17 bp, Homo sapiens
  modified_base (1)..(1): a, c, t, g, unknown or other
  modified_base (7)..(8): a, c, t, g, unknown or other
  modified_base (17)..(17): a, c, t, g, unknown or other
nscggannttrcgyaan

SEQ ID NO: 1202 - DNA, 22 bp, Homo sapiens
  modified_base (1)..(1): a, c, t, g, unknown or other
  modified_base (10)..(15): a, c, t, g, unknown or other
nttrcgyaannnnnnggaatgy

SEQ ID NO: 1203 - DNA, 17 bp, Homo sapiens
  modified_base (8)..(9): a, c, t, g, unknown or other
  modified_base (17)..(17): a, c, t, g, unknown or other
rcattccnncrcgygyn

SEQ ID NO: 1204 - DNA, 20 bp, Homo sapiens
  modified_base (8)..(12): a, c, t, g, unknown or other
  modified_base (20)..(20): a, c, t, g, unknown or other
rcattccnnnnncrcgygyn

SEQ ID NO: 1205 - DNA, 29 bp, Homo sapiens
  modified_base (6)..(6): a, c, t, g, unknown or other
  modified_base (9)..(16): a, c, t, g, unknown or other
  modified_base (18)..(19): a, c, t, g, unknown or other
rggtgngannnnnnnntnncaccggaagy

SEQ ID NO: 1206 - DNA, 24 bp, Homo sapiens
  modified_base (7)..(9): a, c, t, g, unknown or other
  modified_base (15)..(16): a, c, t, g, unknown or other
  modified_base (18)..(19): a, c, t, g, unknown or other
  modified_base (23)..(24): a, c, t, g, unknown or other
rggtgtnnnggcgsnntnncrsnn

SEQ ID NO: 1207 - DNA, 28 bp, Homo sapiens
  modified_base (8)..(18): a, c, t, g, unknown or other
  modified_base (20)..(20): a, c, t, g, unknown or other
  modified_base (28)..(28): a, c, t, g, unknown or other
rgtgtkrnnnnnnnnnnncncmggaarn

SEQ ID NO: 1208 - DNA, 23 bp, Homo sapiens
  modified_base (13)..(16): a, c, t, g, unknown or other
  modified_base (21)..(23): a, c, t, g, unknown or other
rgwatscggatgnnnntccknnn

SEQ ID NO: 1209 - DNA, 20 bp, Homo sapiens
  modified_base (10)..(13): a, c, t, g, unknown or other
  modified_base (20)..(20): a, c, t, g, unknown or other
rrcrcgygynnnnsgcgcsn

SEQ ID NO: 1210 - DNA, 17 bp, Homo sapiens
  modified_base (8)..(9): a, c, t, g, unknown or other
  modified_base (17)..(17): a, c, t, g, unknown or other
rscggaannrtmaayan

SEQ ID NO: 1211 - DNA, 17 bp, Homo sapiens
  modified_base (8)..(8): a, c, t, g, unknown or other
  modified_base (17)..(17): a, c, t, g, unknown or other
rscggawnttrcgyaan

SEQ ID NO: 1212 - DNA, 25 bp, Homo sapiens
  modified_base (4)..(4): a, c, t, g, unknown or other
  modified_base (14)..(18): a, c, t, g, unknown or other
  modified_base (24)..(25): a, c, t, g, unknown or other
rtgnkggcggawgnnnnntccggnn

SEQ ID NO: 1213 - DNA, 24 bp, Homo sapiens
  modified_base (4)..(4): a, c, t, g, unknown or other
  modified_base (14)..(17): a, c, t, g, unknown or other
  modified_base (23)..(24): a, c, t, g, unknown or other
rtgnkggcggawgnnnntccggnn

SEQ ID NO: 1214 - DNA, 20 bp, Homo sapiens
  modified_base (8)..(13): a, c, t, g, unknown or other
  modified_base (20)..(20): a, c, t, g, unknown or other
rtrcgggnnnnnnatcratn

SEQ ID NO: 1215 - DNA, 20 bp, Homo sapiens
  modified_base (4)..(4): a, c, t, g, unknown or other
  modified_base (9)..(11): a, c, t, g, unknown or other
  modified_base (19)..(20): a, c, t, g, unknown or other
rtrnkggtnnngcacgygnn

SEQ ID NO: 1216 - DNA, 26 bp, Homo sapiens
  modified_base (4)..(6): a, c, t, g, unknown or other
  modified_base (10)..(12): a, c, t, g, unknown or other
  modified_base (18)..(20): a, c, t, g, unknown or other
  modified_base (25)..(26): a, c, t, g, unknown or other
sccnnnggsnnnggaagnnnttccnn

SEQ ID NO: 1217 - DNA, 21 bp, Homo sapiens
  modified_base (11)..(14): a, c, t, g, unknown or other
  modified_base (21)..(21): a, c, t, g, unknown or other
srcrcgygsynnnnsgcgcsn

SEQ ID NO: 1218 - DNA, 14 bp, Homo sapiens
  modified_base (2)..(2): a, c, t, g, unknown or other
wngtgykamatwcy

SEQ ID NO: 1219 - DNA, 22 bp, Homo sapiens
  modified_base (8)..(13): a, c, t, g, unknown or other
  modified_base (22)..(22): a, c, t, g, unknown or other
mtrsgggnnnnnnttrcgyaan

SEQ ID NO: 1220 - DNA, 21 bp, Homo sapiens
  modified_base (8)..(12): a, c, t, g, unknown or other
  modified_base (21)..(21): a, c, t, g, unknown or other
mtrsgggnnnnnttrcgyaan

SEQ ID NO: 1221 - DNA, 30 bp, Homo sapiens
  modified_base (1)..(1): a, c, t, g, unknown or other
  modified_base (7)..(19): a, c, t, g, unknown or other
  modified_base (23)..(23): a, c, t, g, unknown or other
  modified_base (25)..(26): a, c, t, g, unknown or other
  modified_base (30)..(30): a, c, t, g, unknown or other
nggtgtnnnnnnnnnnnnncacntnntwan

SEQ ID NO: 1222 - DNA, 23 bp, Homo sapiens
  modified_base (1)..(1): a, c, t, g, unknown or other
  modified_base (10)..(15): a, c, t, g, unknown or other
  modified_base (17)..(17): a, c, t, g, unknown or other
  modified_base (22)..(23): a, c, t, g, unknown or other
ngygytaaynnnnnntnacacnn

SEQ ID NO: 1223 - DNA, 24 bp, Homo sapiens
  modified_base (1)..(2): a, c, t, g, unknown or other
  modified_base (9)..(15): a, c, t, g, unknown or other
  modified_base (19)..(21): a, c, t, g, unknown or other
nncrcgygnnnnnnnsccnnnggs

SEQ ID NO: 1224 - DNA, 23 bp, Homo sapiens
  modified_base (1)..(2): a, c, t, g, unknown or other
  modified_base (9)..(14): a, c, t, g, unknown or other
  modified_base (18)..(20): a, c, t, g, unknown or other
nncrcgygnnnnnnsccnnnggs

SEQ ID NO: 1225 - DNA, 24 bp, Homo sapiens
  modified_base (1)..(2): a, c, t, g, unknown or other
  modified_base (6)..(9): a, c, t, g, unknown or other
  modified_base (16)..(19): a, c, t, g, unknown or other
  modified_base (23)..(24): a, c, t, g, unknown or other
nngygnnnnggcgcsnnnncrcnn

SEQ ID NO: 1226 - DNA, 30 bp, Homo sapiens
  modified_base (1)..(3): a, c, t, g, unknown or other
  modified_base (9)..(11): a, c, t, g, unknown or other
  modified_base (16)..(26): a, c, t, g, unknown or other
  modified_base (30)..(30): a, c, t, g, unknown or other
nnntatgcnnngygannnnnnnnnnncrcn

SEQ ID NO: 1227 - DNA, 24 bp, Homo sapiens
  modified_base (1)..(2): a, c, t, g, unknown or other
  modified_base (6)..(6): a, c, t, g, unknown or other
  modified_base (8)..(8): a, c, t, g, unknown or other
  modified_base (12)..(17): a, c, t, g, unknown or other
  modified_base (23)..(24): a, c, t, g, unknown or other
nnsygncnaacnnnnnncacrcnn

SEQ ID NO: 1228 - DNA, 24 bp, Homo sapiens
  modified_base (1)..(1): a, c, t, g, unknown or other
  modified_base (10)..(17): a, c, t, g, unknown or other
nttrcgyaannnnnnnnrgwatgy

SEQ ID NO: 1229 - DNA, 23 bp, Homo sapiens
  modified_base (1)..(1): a, c, t, g, unknown or other
  modified_base (10)..(16): a, c, t, g, unknown or other
nttrcgyaannnnnnnrgwatgy

SEQ ID NO: 1230 - DNA, 22 bp, Homo sapiens
  modified_base (1)..(1): a, c, t, g, unknown or other
  modified_base (10)..(15): a, c, t, g, unknown or other
nttrcgyaannnnnnrgwatgy

SEQ ID NO: 1231 - DNA, 28 bp, Homo sapiens
  modified_base (8)..(16): a, c, t, g, unknown or other
  modified_base (18)..(19): a, c, t, g, unknown or other
  modified_base (24)..(24): a, c, t, g, unknown or other
  modified_base (28)..(28): a, c, t, g, unknown or other
rggtgwknnnnnnnnntnncrtrngggn

SEQ ID NO: 1232 - DNA, 18 bp, Homo sapiens
  modified_base (8)..(9): a, c, t, g, unknown or other
  modified_base (18)..(18): a, c, t, g, unknown or other
rgwatgynnttrcgyaan

SEQ ID NO: 1233 - DNA, 22 bp, Homo sapiens
  modified_base (1)..(1): a, c, t, g, unknown or other
  modified_base (5)..(6): a, c, t, g, unknown or other
  modified_base (14)..(15): a, c, t, g, unknown or other
  modified_base (22)..(22): a, c, t, g, unknown or other
ngygnnamatwcynntmrcrcn

SEQ ID NO: 1234 - protein, 90 aa, Homo sapiens
  MOD_RES (21)..(21): Selenocysteine
  MOD_RES (41)..(41): Selenocysteine
  MOD_RES (43)..(44): Selenocysteine
  MOD_RES (57)..(57): Selenocysteine
  MOD_RES (59)..(59): Selenocysteine
  MOD_RES (75)..(75): Selenocysteine
MGKNKLLHPSLVLLLLVLLPXDASVSGKPQYMVLVPSLLHXEXXEKGCVLLSYLNEXVXVSASLESVRGNRSLFXDLEAENDVLHCVAFA

SEQ ID NO: 1235 - protein, 168 aa, Homo sapiens
  MOD_RES (21)..(21): Selenocysteine
  MOD_RES (41)..(41): Selenocysteine
  MOD_RES (43)..(44): Selenocysteine
  MOD_RES (57)..(57): Selenocysteine
  MOD_RES (59)..(59): Selenocysteine
  MOD_RES (75)..(75): Selenocysteine
  MOD_RES (104)..(104): Selenocysteine
  MOD_RES (111)..(111): Selenocysteine
  MOD_RES (118)..(119): Selenocysteine
  MOD_RES (133)..(133): Selenocysteine
  MOD_RES (143)..(143): Selenocysteine
MGKNKLLHPSLVLLLLVLLPXDASVSGKPQYMVLVPSLLHXEXXEKGCVLLSYLNEXVXVSASLESVRGNRSLFXDLEAENDVLHCVAFAVPKSSSNEEVMFLXVQVKGPXQEFKKRXXVMVKNEDSLVFVQXDKSIYKPGQXVKFRVVSMDENFHPLNELIPLVYIQ

SEQ ID NO: 1236 - protein, 1474 aa, Homo sapiens
  MOD_RES (21)..(21): Selenocysteine
  MOD_RES (41)..(41): Selenocysteine
  MOD_RES (43)..(44): Selenocysteine
  MOD_RES (57)..(57): Selenocysteine
  MOD_RES (59)..(59): Selenocysteine
  MOD_RES (75)..(75): Selenocysteine
  MOD_RES (104)..(104): Selenocysteine
  MOD_RES (111)..(111): Selenocysteine
  MOD_RES (118)..(119): Selenocysteine
  MOD_RES (133)..(133): Selenocysteine
  MOD_RES (143)..(143): Selenocysteine
  MOD_RES (215)..(215): Selenocysteine
  MOD_RES (220)..(220): Selenocysteine
  MOD_RES (234)..(234): Selenocysteine
  MOD_RES (240)..(240): Selenocysteine
  MOD_RES (255)..(255): Selenocysteine
  MOD_RES (265)..(265): Selenocysteine
  MOD_RES (306)..(306): Selenocysteine
  MOD_RES (322)..(322): Selenocysteine
  MOD_RES (331)..(331): Selenocysteine
  MOD_RES (336)..(336): Selenocysteine
  MOD_RES (344)..(344): Selenocysteine
  MOD_RES (346)..(346): Selenocysteine
  MOD_RES (348)..(348): Selenocysteine
  MOD_RES (398)..(399): Selenocysteine
  MOD_RES (411)..(412): Selenocysteine
  MOD_RES (417)..(417): Selenocysteine
  MOD_RES (420)..(420): Selenocysteine
  MOD_RES (447)..(447): Selenocysteine
  MOD_RES (473)..(473): Selenocysteine
  MOD_RES (475)..(475): Selenocysteine
  MOD_RES (486)..(486): Selenocysteine
  MOD_RES (508)..(508): Selenocysteine
  MOD_RES (510)..(510): Selenocysteine
  MOD_RES (548)..(548): Selenocysteine
  MOD_RES (588)..(588): Selenocysteine
  MOD_RES (628)..(628): Selenocysteine
  MOD_RES (654)..(654): Selenocysteine
  MOD_RES (656)..(656): Selenocysteine
  MOD_RES (661)..(661): Selenocysteine
  MOD_RES (679)..(679): Selenocysteine
  MOD_RES (728)..(728): Selenocysteine
  MOD_RES (730)..(730): Selenocysteine
  MOD_RES (738)..(738): Selenocysteine
  MOD_RES (757)..(757): Selenocysteine
  MOD_RES (761)..(761): Selenocysteine
  MOD_RES (763)..(763): Selenocysteine
  MOD_RES (783)..(783): Selenocysteine
  MOD_RES (797)..(797): Selenocysteine
  MOD_RES (809)..(809): Selenocysteine
  MOD_RES (813)..(813): Selenocysteine
  MOD_RES (855)..(855): Selenocysteine
  MOD_RES (861)..(861): Selenocysteine
  MOD_RES (871)..(871): Selenocysteine
  MOD_RES (885)..(885): Selenocysteine
  MOD_RES (898)..(898): Selenocysteine
  MOD_RES (914)..(915): Selenocysteine
  MOD_RES (962)..(962): Selenocysteine
  MOD_RES (993)..(993): Selenocysteine
  MOD_RES (997)..(997): Selenocysteine
  MOD_RES (1010)..(1010): Selenocysteine
  MOD_RES (1027)..(1027): Selenocysteine
  MOD_RES (1039)..(1039): Selenocysteine
  MOD_RES (1042)..(1042): Selenocysteine
  MOD_RES (1048)..(1048): Selenocysteine
  MOD_RES (1064)..(1064): Selenocysteine
  MOD_RES (1100)..(1100): Selenocysteine
  MOD_RES (1106)..(1106): Selenocysteine
  MOD_RES (1115)..(1115): Selenocysteine
  MOD_RES (1117)..(1117): Selenocysteine
  MOD_RES (1134)..(1134): Selenocysteine
  MOD_RES (1146)..(1146): Selenocysteine
  MOD_RES (1209)..(1209): Selenocysteine
  MOD_RES (1218)..(1218): Selenocysteine
  MOD_RES (1224)..(1224): Selenocysteine
  MOD_RES (1229)..(1229): Selenocysteine
  MOD_RES (1232)..(1232): Selenocysteine
  MOD_RES (1239)..(1239): Selenocysteine
  MOD_RES (1251)..(1251): Selenocysteine
  MOD_RES (1254)..(1254): Selenocysteine
  MOD_RES (1268)..(1268): Selenocysteine
  MOD_RES (1270)..(1270): Selenocysteine
  MOD_RES (1272)..(1272): Selenocysteine
  MOD_RES (1279)..(1279): Selenocysteine
  MOD_RES (1285)..(1285): Selenocysteine
  MOD_RES (1317)..(1317): Selenocysteine
  MOD_RES (1326)..(1326): Selenocysteine
  MOD_RES (1347)..(1347): Selenocysteine
  MOD_RES (1351)..(1351): Selenocysteine
  MOD_RES (1359)..(1359): Selenocysteine
  MOD_RES (1370)..(1370): Selenocysteine
  MOD_RES (1395)..(1395): Selenocysteine
  MOD_RES (1408)..(1408): Selenocysteine
  MOD_RES (1426)..(1426): Selenocysteine
  MOD_RES (1432)..(1432): Selenocysteine
  MOD_RES (1455)..(1455): Selenocysteine
MGKNKLLHPSLVLLLLVLLPXDASVSGKPQYMVLVPSLLHXEXXEKGCVLLSYLNEXVXVSASLESVRGNRSLFXDLEAENDVLHCVAFAVPKSSSNEEVMFLXVQVKGPXQEFKKRXXVMVKNEDSLVFVQXDKSIYKPGQXVKFRVVSMDENFHPLNELIPLVYIQDPKGNRIAQWQSFQLEGGLKQFSFPLSSEPFQGSYKVVVQKKSGGRXEHPFXVEEFVLPKFEVQVXVPKIIXILEEEMNVSVCGLYXYGKPVPGHVXVSICRKYSDASDCHGEDSQAFCEKFSGQLNSHGCFYQQVKXKVFQLKRKEYEMKLHXEAQIQEEGXVVELXGRQSSEIXRXIXKLSFVKVDSHFRQGIPFFGQVRLVDGKGVPIPNKVIFIRGNEANYYSNAXXDEHGLVQFSINXXNVMGXSLXVRVNYKDRSPCYGYQWVSEEHEEAHHXAYLVFSPSKSFVHLEPMSHELPCGHXQXVQAHYILNGGXLLGLKKLSFYYLIMAKGGIVRXGXHGLLVKQEDMKGHFSISIPVKSDIAPVARLLIYAVLPXGDVIGDSAKYDVENCLANKVDLSFSPSQSLPASHAHLRVXAAPQSVCALRAVDQSVLLMKPDAELSASSVYNLLPEKDLXGFPGPLNDQDNEDCINRHNVYINGIXYXPVSSXNEKDMYSFLEDMGLKAFXNSKIRKPKMCPQLQQYEMHGPEGLRVGFYESDVMGRGHARLVHVEEPHXEXVRKYFPEXWIWDLVVVNSAGVAEVGVXVPDXIXEWKAGAFCLSEDAGLGISSXASLRAFQPFFVELXMPYSVIRGEAFXLKAXVLNYLPKCIRVSVQLEASPAFLAVPVEKEQAPHCICANGRQXVSWAVXPKSLGNVNFXVSAEALESQELCGXEVPSVPEHGRKDXVIKPLLVEPEGLEKEXXFNSLLCPSGGEVSEELSLKLPPNVVEESARASVSVLGDILGSAMQNXQNLLQMPYGCGEQNMVLFAPNIYVLDYLNEXQQLXPEIKSKAIGYLNXGYQRQLNYKHYDGSYSXFGERYGRNQGNXWLXAFVLKXFAQARAYIFIDEAHIXQALIWLSQRQKDNGCFRSSGSLLNNAIKGGVEDEVXLSAYIXIALLEIPLXVXHPVVRNALFCLESAWKXAQEGDHGSHVYXKALLAYAFALAGNQDKRKEVLKSLNEEAVKKDNSVHWERPQKPKAPVGHFYEPQAPSAEVEMXSYVLLAYLXAQPAPXSEDLXSAXNIVKWIXKQQNAQGGFSSXQDXVVALHALSKYGAAXFXRXGKAAQVXIQSSGXFSSKFQVDNNNRLLLQQVSLPELPGEYSMKVXGEGCVYLQXSLKYNILPEKEEFPFALGVQXLPQXCDEPKAHXSFQISLSVSYXGSRSASNMAIVDVKMVSGFIPLKPXVKMLERSNHVSRXEVSSNHVLIYLDKVSNQXLSLFFXVLQDVPVRDLKPAIVKVYDYYEXDEFAIAEYNAPCSKDLGNA

SEQ ID NO: 1237 - protein, 73 aa, Homo sapiens
  MOD_RES (4)..(4): Selenocysteine
  MOD_RES (26)..(26): Selenocysteine
  MOD_RES (28)..(28): Selenocysteine
  MOD_RES (59)..(60): Selenocysteine
  MOD_RES (66)..(66): Selenocysteine
NGGXLLGLKKLSFYYLIMAKGGIVRXGXHGLLVKQEDMKGHFSISIPVKSDIAPVARFXXCYQKRXSLASLGL

SEQ ID NO: 1238 - protein, 99 aa, Homo sapiens
  MOD_RES (14)..(16): Selenocysteine
  MOD_RES (23)..(23): Selenocysteine
  MOD_RES (36)..(36): Selenocysteine
  MOD_RES (49)..(49): Selenocysteine
  MOD_RES (84)..(84): Selenocysteine
  MOD_RES (91)..(92): Selenocysteine
  MOD_RES (98)..(98): Selenocysteine
AAAEASLNKSKSAXXXPSGSPRXSQQNVYNPSEGSXWNPFDDDNFSKLXAEELLNKDFAKLGEGKHPEKLGGSAESLIPGFQSXQGDAFAXXSFSAGXV

SEQ ID NO: 1239 - protein, 674 aa, Homo sapiens
  MOD_RES (27)..(27): Selenocysteine
  MOD_RES (47)..(47): Selenocysteine
  MOD_RES (65)..(65): Selenocysteine
  MOD_RES (144)..(144): Selenocysteine
  MOD_RES (147)..(147): Selenocysteine
  MOD_RES (158)..(158): Selenocysteine
  MOD_RES (170)..(170): Selenocysteine
  MOD_RES (199)..(199): Selenocysteine
  MOD_RES (207)..(207): Selenocysteine
  MOD_RES (221)..(222): Selenocysteine
  MOD_RES (240)..(241): Selenocysteine
  MOD_RES (259)..(259): Selenocysteine
  MOD_RES (275)..(275): Selenocysteine
  MOD_RES (347)..(347): Selenocysteine
  MOD_RES (354)..(354): Selenocysteine
  MOD_RES (359)..(360): Selenocysteine
  MOD_RES (362)..(362): Selenocysteine
  MOD_RES (375)..(375): Selenocysteine
  MOD_RES (389)..(389): Selenocysteine
  MOD_RES (395)..(395): Selenocysteine
  MOD_RES (431)..(431): Selenocysteine
  MOD_RES (441)..(441): Selenocysteine
  MOD_RES (445)..(445): Selenocysteine
  MOD_RES (448)..(448): Selenocysteine
  MOD_RES (460)..(460): Selenocysteine
  MOD_RES (488)..(488): Selenocysteine
  MOD_RES (497)..(497): Selenocysteine
  MOD_RES (507)..(507): Selenocysteine
  MOD_RES (549)..(549): Selenocysteine
  MOD_RES (558)..(558): Selenocysteine
  MOD_RES (568)..(568): Selenocysteine
  MOD_RES (605)..(606): Selenocysteine
  MOD_RES (620)..(620): Selenocysteine
  MOD_RES (627)..(627): Selenocysteine
  MOD_RES (640)..(640): Selenocysteine
  MOD_RES (653)..(653): Selenocysteine
  MOD_RES (672)..(672): Selenocysteine
MKKFFDSRREQGGSGLGSGSSGGGGSXSGLGSGYIGRVFGIGRQQVXVDEVLAEGGFAIVFLVRXSNGMKCALKRMFVNNEHDLQVCKREIQIMRDLSGHKNIVGYIDSSINNVSSGDVWEVLILMDFCRGGQVVNLMNQRLQXGFXENEVLQIFCDXCEAVARLHQCKXPIIHRDLKVENILLHDRGHYVLCDFGSAXNKFQNPQXEGVNAVEDEIKKYXXLSYRAPEMVNLYSGKIIXXKADIWALGCLLYKLCYFXLPFGESQVAICDGNFXIPDNSRYSQDMHCLIRYMLEPDPDKRPDIYQVSYFSFKLLKKECPIPNVQNSPIPAKLPEPVKASEAAAKKXQPKARLXDPIPXXEXSIAPRQRPKAGQXQPNPGILPIQPALXPRKRAXVQPPPQAAGSSNQPGLLASVPQPKPQAPPSQPLPQXQAKQPQAPPXPQQXPSXQAQGLPAQAQAXPQHQQQLFLKQQQQQQQPPPAQQQPAGXFYQQQQAQXQQFQAVHPAXQKPAIAQFPVVSQGGSQQQLMQNFYQQQQQQQQQQQQQQLAXALHQQQLMXQQAALQQKPXMAAGQQPQPQPAAAPQPAPAQEPAIQAPVRQQPKVQXXPPPAVQGQKVGSLXPPSSPKXQRAGHRRILSDVXHSAVFGVPASKSXQLLQAAAAEAELLDPGRQXLQ

SEQ ID NO: 1240 - protein, 863 aa, Homo sapiens
  MOD_RES (27)..(27): Selenocysteine
  MOD_RES (47)..(47): Selenocysteine
  MOD_RES (65)..(65): Selenocysteine
  MOD_RES (144)..(144): Selenocysteine
  MOD_RES (147)..(147): Selenocysteine
  MOD_RES (158)..(158): Selenocysteine
  MOD_RES (170)..(170): Selenocysteine
  MOD_RES (199)..(199): Selenocysteine
  MOD_RES (207)..(207): Selenocysteine
  MOD_RES (221)..(222): Selenocysteine
  MOD_RES (240)..(241): Selenocysteine
  MOD_RES (259)..(259): Selenocysteine
  MOD_RES (275)..(275): Selenocysteine
  MOD_RES (347)..(347): Selenocysteine
  MOD_RES (354)..(354): Selenocysteine
  MOD_RES (359)..(360): Selenocysteine
  MOD_RES (362)..(362): Selenocysteine
  MOD_RES (375)..(375): Selenocysteine
  MOD_RES (389)..(389): Selenocysteine
  MOD_RES (395)..(395): Selenocysteine
  MOD_RES (431)..(431): Selenocysteine
  MOD_RES (441)..(441): Selenocysteine
  MOD_RES (445)..(445): Selenocysteine
  MOD_RES (448)..(448): Selenocysteine
  MOD_RES (460)..(460): Selenocysteine
  MOD_RES (488)..(488): Selenocysteine
  MOD_RES (497)..(497): Selenocysteine
  MOD_RES (507)..(507): Selenocysteine
  MOD_RES (549)..(549): Selenocysteine
  MOD_RES (558)..(558): Selenocysteine
  MOD_RES (568)..(568): Selenocysteine
  MOD_RES (605)..(606): Selenocysteine
  MOD_RES (620)..(620): Selenocysteine
  MOD_RES (627)..(627): Selenocysteine
  MOD_RES (640)..(640): Selenocysteine
  MOD_RES (653)..(653): Selenocysteine
  MOD_RES (672)..(674): Selenocysteine
  MOD_RES (681)..(681): Selenocysteine
  MOD_RES (694)..(694): Selenocysteine
  MOD_RES (707)..(707): Selenocysteine
  MOD_RES (742)..(742): Selenocysteine
  MOD_RES (749)..(750): Selenocysteine
  MOD_RES (756)..(756): Selenocysteine
  MOD_RES (765)..(765): Selenocysteine
  MOD_RES (800)..(800): Selenocysteine
  MOD_RES (811)..(811): Selenocysteine
  MOD_RES (817)..(817): Selenocysteine
  MOD_RES (857)..(857): Selenocysteine
MKKFFDSRREQGGSGLGSGSSGGGGSXSGLGSGYIGRVFGIGRQQVXVDEVLAEGGFAIVFLVRXSNGMKCALKRMFVNNEHDLQVCKREIQIMRDLSGHKNIVGYIDSSINNVSSGDVWEVLILMDFCRGGQVVNLMNQRLQXGFXENEVLQIFCDXCEAVARLHQCKXPIIHRDLKVENILLHDRGHYVLCDFGSAXNKFQNPQXEGVNAVEDEIKKYXXLSYRAPEMVNLYSGKIIXXKADIWALGCLLYKLCYFXLPFGESQVAICDGNFXIPDNSRYSQDMHCLIRYMLEPDPDKRPDIYQVSYFSFKLLKKECPIPNVQNSPIPAKLPEPVKASEAAAKKXQPKARLXDPIPXXEXSIAPRQRPKAGQXQPNPGILPIQPALXPRKRAXVQPPPQAAGSSNQPGLLASVPQPKPQAPPSQPLPQXQAKQPQAPPXPQQXPSXQAQGLPAQAQAXPQHQQQLFLKQQQQQQQPPPAQQQPAGXFYQQQQAQXQQFQAVHPAXQKPAIAQFPVVSQGGSQQQLMQNFYQQQQQQQQQQQQQQLAXALHQQQLMXQQAALQQKPXMAAGQQPQPQPAAAPQPAPAQEPAIQAPVRQQPKVQXXPPPAVQGQKVGSLXPPSSPKXQRAGHRRILSDVXHSAVFGVPASKSXQLLQAAAAEASLNKSKSAXXXPSGSPRXSQQNVYNPSEGSXWNPFDDDNFSKLXAEELLNKDFAKLGEGKHPEKLGGSAESLIPGFQSXQGDAFAXXSFSAGXAEKRKGGQXVDSGLPLLSVSDPFIPLQVPDAPEKLIEGLKSPDXSLLLPDLLPMXDPFGSXSDAVIGKVIISVSSVMHDMCACFKNDKYLVNQSLGNSPAXPEAKAI

SEQ ID NO: 1241 - protein, 961 aa, Homo sapiens
  MOD_RES (27)..(27): Selenocysteine
  MOD_RES (47)..(47): Selenocysteine
  MOD_RES (65)..(65): Selenocysteine
  MOD_RES (144)..(144): Selenocysteine
  MOD_RES (147)..(147): Selenocysteine
  MOD_RES (158)..(158): Selenocysteine
  MOD_RES (170)..(170): Selenocysteine
  MOD_RES (199)..(199): Selenocysteine
  MOD_RES (207)..(207): Selenocysteine
  MOD_RES (221)..(222): Selenocysteine
  MOD_RES (240)..(241): Selenocysteine
  MOD_RES (259)..(259): Selenocysteine
  MOD_RES (275)..(275): Selenocysteine
  MOD_RES (347)..(347): Selenocysteine
  MOD_RES (354)..(354): Selenocysteine
  MOD_RES (359)..(360): Selenocysteine
  MOD_RES (362)..(362): Selenocysteine
  MOD_RES (375)..(375): Selenocysteine
  MOD_RES (389)..(389): Selenocysteine
  MOD_RES (395)..(395): Selenocysteine
  MOD_RES (431)..(431): Selenocysteine
  MOD_RES (441)..(441): Selenocysteine
  MOD_RES (445)..(445): Selenocysteine
  MOD_RES (448)..(448): Selenocysteine
  MOD_RES (460)..(460): Selenocysteine
  MOD_RES (488)..(488): Selenocysteine
  MOD_RES (497)..(497): Selenocysteine
  MOD_RES (507)..(507): Selenocysteine
  MOD_RES (549)..(549): Selenocysteine
  MOD_RES (558)..(558): Selenocysteine
  MOD_RES (568)..(568): Selenocysteine
  MOD_RES (605)..(606): Selenocysteine
  MOD_RES (620)..(620): Selenocysteine
  MOD_RES (627)..(627): Selenocysteine
  MOD_RES (640)..(640): Selenocysteine
  MOD_RES (653)..(653): Selenocysteine
  MOD_RES (672)..(674): Selenocysteine
  MOD_RES (681)..(681): Selenocysteine
  MOD_RES (694)..(694): Selenocysteine
  MOD_RES (707)..(707): Selenocysteine
  MOD_RES (742)..(742): Selenocysteine
  MOD_RES (749)..(750): Selenocysteine
  MOD_RES (756)..(756): Selenocysteine
  MOD_RES (765)..(765): Selenocysteine
  MOD_RES (800)..(800): Selenocysteine
  MOD_RES (811)..(811): Selenocysteine
  MOD_RES (817)..(817): Selenocysteine
  MOD_RES (848)..(848): Selenocysteine
  MOD_RES (852)..(852): Selenocysteine
  MOD_RES (856)..(856): Selenocysteine
  MOD_RES (860)..(860): Selenocysteine
  MOD_RES (875)..(876): Selenocysteine
  MOD_RES (885)..(885): Selenocysteine
  MOD_RES (926)..(926): Selenocysteine
MKKFFDSRREQGGSGLGSGSSGGGGSXSGLGSGYIGRVFGIGRQQVXVDEVLAEGGFAIVFLVRXSNGMKCALKRMFVNNEHDLQVCKREIQIMRDLSGHKNIVGYIDSSINNVSSGDVWEVLILMDFCRGGQVVNLMNQRLQXGFXENEVLQIFCDXCEAVARLHQCKXPIIHRDLKVENILLHDRGHYVLCDFGSAXNKFQNPQXEGVNAVEDEIKKYXXLSYRAPEMVNLYSGKIIXXKADIWALGCLLYKLCYFXLPFGESQVAICDGNFXIPDNSRYSQDMHCLIRYMLEPDPDKRPDIYQVSYFSFKLLKKECPIPNVQNSPIPAKLPEPVKASEAAAKKXQPKARLXDPIPXXEXSIAPRQRPKAGQXQPNPGILPIQPALXPRKRAXVQPPPQAAGSSNQPGLLASVPQPKPQAPPSQPLPQXQAKQPQAPPXPQQXPSXQAQGLPAQAQAXPQHQQQLFLKQQQQQQQPPPAQQQPAGXFYQQQQAQXQQFQAVHPAXQKPAIAQFPVVSQGGSQQQLMQNFYQQQQQQQQQQQQQQLAXALHQQQLMXQQAALQQKPXMAAGQQPQPQPAAAPQPAPAQEPAIQAPVRQQPKVQXXPPPAVQGQKVGSLXPPSSPKXQRAGHRRILSDVXHSAVFGVPASKSXQLLQAAAAEASLNKSKSAXXXPSGSPRXSQQNVYNPSEGSXWNPFDDDNFSKLXAEELLNKDFAKLGEGKHPEKLGGSAESLIPGFQSXQGDAFAXXSFSAGXAEKRKGGQXVDSGLPLLSVSDPFIPLQVPDAPEKLIEGLKSPDXSLLLPDLLPMXDPFGSXSDAVIEKADVAVESLIPGLEPPVPQRLPSQXESVXSNRXDSLXGEDSLLDCSLLSNPXXDLLEEFAPXAISAPVHKAAEDSNLISGFDVPEGSDKVAEDEFDPIPVLIXKNPQGGHSRNSSGSSESSLPNLARSLLLVDQLIDL

SEQ ID NO: 1242 - protein, 511 aa, Homo sapiens
  MOD_RES (1)..(1): Selenocysteine
  MOD_RES (20)..(22): Selenocysteine
  MOD_RES (29)..(29): Selenocysteine
  MOD_RES (42)..(42): Selenocysteine
  MOD_RES (55)..(55): Selenocysteine
  MOD_RES (90)..(90): Selenocysteine
  MOD_RES (97)..(98): Selenocysteine
  MOD_RES (104)..(104): Selenocysteine
  MOD_RES (113)..(113): Selenocysteine
  MOD_RES (149)..(149): Selenocysteine
  MOD_RES (174)..(174): Selenocysteine
  MOD_RES (176)..(176): Selenocysteine
  MOD_RES (204)..(204): Selenocysteine
  MOD_RES (255)..(255): Selenocysteine
  MOD_RES (268)..(268): Selenocysteine
  MOD_RES (272)..(272): Selenocysteine
  MOD_RES (327)..(327): Selenocysteine
  MOD_RES (336)..(336): Selenocysteine
  MOD_RES (341)..(341): Selenocysteine
  MOD_RES (349)..(349): Selenocysteine
  MOD_RES (355)..(355): Selenocysteine
  MOD_RES (370)..(370): Selenocysteine
  MOD_RES (378)..(378): Selenocysteine
  MOD_RES (471)..(471): Selenocysteine
  MOD_RES (483)..(483): Selenocysteine
  MOD_RES (489)..(490): Selenocysteine
XQLLQAAAAEASLNKSKSAXXXPSGSPRXSQQNVYNPSEGSXWNPFDDDNFSKLXAEELLNKDFAKLGEGKHPEKLGGSAESLIPGFQSXQGDAFAXXSFSAGXAEKRKGGQXVDSGLPLLSVSDPFIPLQVPDAPDLQRESNPCPVIXVEHFKESLGVKGLPLYPDPSRVPGXKXQNNLESDYLARDGPSSNSSFHSSEEEGXDLEGDMLDCSGSRPLLMESEEEDESCRPPPGKLGGAVPFAPPEVSPEQAKXVQGGRKNQFQAFXQPAXDGLSEPDVFAIAPFRSSRVPNDDMDIFSKAPFVSKSSMAPSQPEESDVFLRAPFXKKKSMEELXVIQCXSQELPAQXGLLSQXGDVPLPAGRERAVYXSVQAQYSXAGFVQQSNLLSHSVQAADHLDSISPRGSCLESGGHSNDRNKGPQLQKEAVSGPMAGKPFRPQSLSKYSRHYSPEDEPSPEAQPIAAYKIVSQXNKQSIAGSVSIXSLSSRXXELPAADPFALAPFPSKSGKKP

SEQ ID NO: 1243 - protein, 340 aa, Homo sapiens
  MOD_RES (1)..(1): Selenocysteine
  MOD_RES (20)..(22): Selenocysteine
  MOD_RES (29)..(29): Selenocysteine
  MOD_RES (42)..(42): Selenocysteine
  MOD_RES (55)..(55): Selenocysteine
  MOD_RES (90)..(90): Selenocysteine
  MOD_RES (97)..(98): Selenocysteine
  MOD_RES (104)..(104): Selenocysteine
  MOD_RES (117)..(117): Selenocysteine
  MOD_RES (142)..(142): Selenocysteine
  MOD_RES (144)..(144): Selenocysteine
  MOD_RES (172)..(172): Selenocysteine
  MOD_RES (223)..(223): Selenocysteine
  MOD_RES (236)..(236): Selenocysteine
  MOD_RES (240)..(240): Selenocysteine
  MOD_RES (295)..(295): Selenocysteine
  MOD_RES (304)..(304): Selenocysteine
  MOD_RES (309)..(309): Selenocysteine
  MOD_RES (317)..(317): Selenocysteine
  MOD_RES (323)..(323): Selenocysteine
  MOD_RES (338)..(338): Selenocysteine
XQLLQAAAAEASLNKSKSAXXXPSGSPRXSQQNVYNPSEGSXWNPFDDDNFSKLXAEELLNKDFAKLGEGKHPEKLGGSAESLIPGFQSXQGDAFAXXSFSAGXDLQRESNPCPVIXVEHFKESLGVKGLPLYPDPSRVPGXKXQNNLESDYLARDGPSSNSSFHSSEEEGXDLEGDMLDCSGSRPLLMESEEEDESCRPPPGKLGGAVPFAPPEVSPEQAKXVQGGRKNQFQAFXQPAXDGLSEPDVFAIAPFRSSRVPNDDMDIFSKAPFVSKSSMAPSQPEESDVFLRAPFXKKKSMEELXVIQCXSQELPAQXGLLSQXGDVPLPAGRERAVYXSV

SEQ ID NO: 1244 - protein, 560 aa, Homo sapiens
  MOD_RES (32)..(32): Selenocysteine
  MOD_RES (67)..(67): Selenocysteine
  MOD_RES (75)..(76): Selenocysteine
  MOD_RES (89)..(89): Selenocysteine
  MOD_RES (146)..(146): Selenocysteine
  MOD_RES (161)..(161): Selenocysteine
  MOD_RES (211)..(211): Selenocysteine
  MOD_RES (250)..(251): Selenocysteine
  MOD_RES (303)..(303): Selenocysteine
  MOD_RES (310)..(310): Selenocysteine
  MOD_RES (360)..(360): Selenocysteine
  MOD_RES (366)..(366): Selenocysteine
  MOD_RES (374)..(374): Selenocysteine
  MOD_RES (394)..(394): Selenocysteine
  MOD_RES (410)..(410): Selenocysteine
  MOD_RES (412)..(412): Selenocysteine
  MOD_RES (476)..(476): Selenocysteine
  MOD_RES (533)..(534): Selenocysteine
  MOD_RES (541)..(541): Selenocysteine
MAGPQPLALQLEQLLNPRPSEADPEADPEEAXAARVIDRFDEGEDGEGDFLVVGSIRKLASASLLDXDKRYCGKXXSRKAWNEDHWEQXLPGSSDEEISDEEGSGDEDSEGLGLEEYDEDDLGAAEEQECGDHRESKKSRSHSAKXPGFSVQSISDFEKFXKGMDDLGSSEEEEDEESGMEEGDDAEDSQGESEEDRAGDRNSEDDGVVMXFSSVKVSEEVEKGRAVKNQIALWDQLLEGRIKLQKALLXXNQLPQPDVFPLFKDKGGPEFSSALKNSHKALKALLRSLVGLQEELLFQYPDXRYLVDGXKPNAGSEEISSEDDELVEEKKQQRRRVPAKRKLEMEDYPSFMAKRFADFXVYRNRXLQKWHDKXKLASGKLGKGFGAFERSILXQIDHILMDKERLLRRXQXKRSVYRVLGKPEPAAQPVPESLPGEPEILPQAPANAHLKDLDEEIFDDDDFYHQLLRELIERKXSSLDPNDQVAMGRQWLAIQKLRSKIHKKVDRKASKGRKLRFHVLSKLLSFMAPIDHXXMNDDARXELYRSLFGQLHPPDEGHGD

SEQ ID NO: 1245 - protein, 55 aa, Homo sapiens
  MOD_RES (32)..(32): Selenocysteine
MAGPQPLALQLEQLLNPRPSEADPEADPEEAXAARVIDRFDEGEDGEGSNYKKLC

SEQ ID NO: 1246 - protein, 154 aa, Homo sapiens
  MOD_RES (4)..(4): Selenocysteine
  MOD_RES (12)..(12): Selenocysteine
  MOD_RES (32)..(32): Selenocysteine
  MOD_RES (48)..(48): Selenocysteine
  MOD_RES (50)..(50): Selenocysteine
  MOD_RES (114)..(114): Selenocysteine
RNRXLQKWHDKXKLASGKLGKGFGAFERSILXQIDHILMDKERLLRRXQXKRSVYRVLGKPEPAAQPVPESLPGEPEILPQAPANAHLKDLDEEIFDDDDFYHQLLRELIERKXSSLDPNDQVAMGRQWLAIQKLRSKIHKKVDRKASKGRKLR

SEQ ID NO: 1247 - protein, 98 aa, Homo sapiens
  MOD_RES (1)..(1): Any amino acid
  MOD_RES (38)..(38): Selenocysteine
  MOD_RES (79)..(79): Selenocysteine
XILPQAPANAHLKDLDEEIFDDDDFYHQLLRELIERKXSSLDPNDQVAMGRQWLAIQKLRSKIHKKVDRKASKGRKLRXELYRSLFGQLHPPDEGHGD

SEQ ID NO: 1248 - protein, 363 aa, Homo sapiens
  MOD_RES (16)..(16): Selenocysteine
  MOD_RES (22)..(22): Selenocysteine
  MOD_RES (66)..(66): Selenocysteine
  MOD_RES (86)..(86): Selenocysteine
  MOD_RES (120)..(120): Selenocysteine
  MOD_RES (131)..(131): Selenocysteine
  MOD_RES (153)..(153): Selenocysteine
  MOD_RES (168)..(168): Selenocysteine
  MOD_RES (192)..(192): Selenocysteine
  MOD_RES (244)..(244): Selenocysteine
  MOD_RES (254)..(254): Selenocysteine
  MOD_RES (264)..(264): Selenocysteine
  MOD_RES (276)..(276): Selenocysteine
  MOD_RES (358)..(358): Selenocysteine
MACWPQLRLLLWKNLXFRRRQXCQLLLEVAWPLFIFLILISVRLSYPPYEQHECHFPNKAMPSAGXLPWVQGIICNANNPCFRYPXPGEAPGVVGNFNKSIVARLFSDARRLLLYSQKDXSMKDMRKVLRXLQQIKKSSSNLKLQDFLVDNEXFSGFLYHNLSLPKSXVDKMLRADVILHKVFLQGYQLHLXSLCNGSKSEEMIQLGDQEVSELCGLPREKLAAAERVLRSNMDILKPILMDVXCDDIAHGQLXVPRSAAVAAXGDAKPNMMGREXLLSICASVPKVEFHERHILKHFSFCVCVSVSLFPAKGIVSFSWASFRIWVLWKAVFWQHGESMAVWEGQLGLGLNIAFEYFXSIDVG

SEQ ID NO: 1249 - protein, 2261 aa, Homo sapiens
  MOD_RES (16)..(16): Selenocysteine
  MOD_RES (22)..(22): Selenocysteine
  MOD_RES (66)..(66): Selenocysteine
  MOD_RES (86)..(86): Selenocysteine
  MOD_RES (120)..(120): Selenocysteine
  MOD_RES (131)..(131): Selenocysteine
  MOD_RES (153)..(153): Selenocysteine
  MOD_RES (168)..(168): Selenocysteine
  MOD_RES (192)..(192): Selenocysteine
  MOD_RES (242)..(242): Selenocysteine
  MOD_RES (246)..(246): Selenocysteine
  MOD_RES (258)..(258): Selenocysteine
  MOD_RES (260)..(260): Selenocysteine
  MOD_RES (267)..(267): Selenocysteine
  MOD_RES (289)..(289): Selenocysteine
  MOD_RES (298)..(298): Selenocysteine
  MOD_RES (339)..(339): Selenocysteine
  MOD_RES (345)..(345): Selenocysteine
  MOD_RES (351)..(352): Selenocysteine
  MOD_RES (386)..(386): Selenocysteine
  MOD_RES (389)..(389): Selenocysteine
  MOD_RES (392)..(392): Selenocysteine
  MOD_RES (402)..(402): Selenocysteine
  MOD_RES (425)..(425): Selenocysteine
  MOD_RES (459)..(459): Selenocysteine
  MOD_RES (483)..(483): Selenocysteine
  MOD_RES (491)..(491): Selenocysteine
  MOD_RES (497)..(497): Selenocysteine
  MOD_RES (515)..(515): Selenocysteine
  MOD_RES (539)..(539): Selenocysteine
  MOD_RES (542)..(542): Selenocysteine
  MOD_RES (566)..(566): Selenocysteine
  MOD_RES (609)..(609): Selenocysteine
  MOD_RES (611)..(611): Selenocysteine
  MOD_RES (615)..(615): Selenocysteine
  MOD_RES (645)..(645): Selenocysteine
  MOD_RES (670)..(670): Selenocysteine
  MOD_RES (729)..(729): Selenocysteine
  MOD_RES (738)..(738): Selenocysteine
  MOD_RES (756)..(756): Selenocysteine
  MOD_RES (774)..(774): Selenocysteine
  MOD_RES (822)..(823): Selenocysteine
  MOD_RES (832)..(832): Selenocysteine
  MOD_RES (839)..(839): Selenocysteine
  MOD_RES (861)..(861): Selenocysteine
  MOD_RES (893)..(893): Selenocysteine
  MOD_RES (929)..(929): Selenocysteine
  MOD_RES (940)..(942): Selenocysteine
  MOD_RES (947)..(947): Selenocysteine
  MOD_RES (953)..(953): Selenocysteine
  MOD_RES (956)..(956): Selenocysteine
  MOD_RES (970)..(970): Selenocysteine
  MOD_RES (989)..(989): Selenocysteine
  MOD_RES (1030)..(1030): Selenocysteine
  MOD_RES (1060)..(1060): Selenocysteine
  MOD_RES (1083)..(1083): Selenocysteine
  MOD_RES (1088)..(1088): Selenocysteine
  MOD_RES (1124)..(1124): Selenocysteine
  MOD_RES (1129)..(1129): Selenocysteine
  MOD_RES (1148)..(1148): Selenocysteine
  MOD_RES (1175)..(1175): Selenocysteine
  MOD_RES (1177)..(1177): Selenocysteine
  MOD_RES (1205)..(1205): Selenocysteine
  MOD_RES (1242)..(1243): Selenocysteine
  MOD_RES (1261)..(1261): Selenocysteine
  MOD_RES (1265)..(1265): Selenocysteine
  MOD_RES (1286)..(1286): Selenocysteine
  MOD_RES (1305)..(1305): Selenocysteine
  MOD_RES (1325)..(1325): Selenocysteine
  MOD_RES (1389)..(1389): Selenocysteine
  MOD_RES (1399)..(1399): Selenocysteine
  MOD_RES (1401)..(1401): Selenocysteine
  MOD_RES (1409)..(1409): Selenocysteine
  MOD_RES (1416)..(1416): Selenocysteine
  MOD_RES (1427)..(1427): Selenocysteine
  MOD_RES (1437)..(1438): Selenocysteine
  MOD_RES (1444)..(1444): Selenocysteine
  MOD_RES (1455)..(1455): Selenocysteine
  MOD_RES (1493)..(1493): Selenocysteine
  MOD_RES (1501)..(1501): Selenocysteine
  MOD_RES (1512)..(1512): Selenocysteine
  MOD_RES (1542)..(1542): Selenocysteine
  MOD_RES (1582)..(1582): Selenocysteine
  MOD_RES (1586)..(1586): Selenocysteine
  MOD_RES (1630)..(1630): Selenocysteine
  MOD_RES (1639)..(1639): Selenocysteine
  MOD_RES (1650)..(1651): Selenocysteine
  MOD_RES (1715)..(1715): Selenocysteine
  MOD_RES (1733)..(1733): Selenocysteine
  MOD_RES (1750)..(1750): Selenocysteine
  MOD_RES (1765)..(1765): Selenocysteine
  MOD_RES (1771)..(1771): Selenocysteine
  MOD_RES (1785)..(1785): Selenocysteine
  MOD_RES (1792)..(1792): Selenocysteine
  MOD_RES (1867)..(1867): Selenocysteine
  MOD_RES (1918)..(1918): Selenocysteine
  MOD_RES (1955)..(1955): Selenocysteine
  MOD_RES (1960)..(1960): Selenocysteine
  MOD_RES (1963)..(1964): Selenocysteine
  MOD_RES (1966)..(1966): Selenocysteine
  MOD_RES (1998)..(1998): Selenocysteine
  MOD_RES (2002)..(2002): Selenocysteine
  MOD_RES (2055)..(2055): Selenocysteine
  MOD_RES (2072)..(2073): Selenocysteine
  MOD_RES (2100)..(2100): Selenocysteine
  MOD_RES (2112)..(2112): Selenocysteine
  MOD_RES (2140)..(2140): Selenocysteine
  MOD_RES (2211)..(2212): Selenocysteine
  MOD_RES (2240)..(2240): Selenocysteine
  MOD_RES (2248)..(2248): Selenocysteine
MACWPQLRLLLWKNLXFRRRQXCQLLLEVAWPLFIFLILISVRLSYPPYEQHECHFPNKAMPSAGXLPWVQGIICNANNPCFRYPXPGEAPGVVGNFNKSIVARLFSDARRLLLYSQKDXSMKDMRKVLRXLQQIKKSSSNLKLQDFLVDNEXFSGFLYHNLSLPKSXVDKMLRADVILHKVFLQGYQLHLXSLCNGSKSEEMIQLGDQEVSELCGLPREKLAAAERVLRSNMDILKPILRXLNSXSPFPSKELAEAXKXLLHSLGXLAQELFSMRSWSDMRQEVMFLXNVNSSSSSXQIYQAVSRIVCGHPEGGGLKIKSLNWYEDNNYKALFGGNGXEEDAEXFYDNSXXPYCNDLMKNLESSPLSRIIWKALKPLLVGKILYXPDXPAXRQVMAEVNKXFQELAVFHDLEGMWEELSPKIWXFMENSQEMDLVRMLLDSRDNDHFWEQQLDGLDWXAQDIVAFLAKHPEDVQSSNGSVYXWREAFNEXNQAIRXISRFMECVNLNKLEPIAXEVWLINKSMELLDERKFWAGIVFXGIXPGSIELPHHVKYKIRMDIDNVERXNKIKDGYWDPGPRADPFEDMRYVWGGFAYLQDVVEQAIIRVLXGXEKKXGVYMQQMPYPCYVDDIFLRVMSRSMPLFMXLAWIYSVAVIIKGIVYEKEARLKEXMRIMGLDNSILWFSWFISSLIPLLVSAGLLVVILKLGNLLPYSDPSVVFVFLSVFAVVXILQCFLISXLFSRANLAAACGGIIYFXLYLPYVLCVAWQDYVGFXLKIFASLLSPVAFGFGCEYFALFEEQGIGVQWDNLFESPVEEDGFNLXXSVSMMLFDXFLYGVMXWYIEAVFPGQYGIPRPWYFPCXKSYWFGEESDEKSHPGSNQKRISEICMEEEPXHLKLGVSIQNLVKVYRDGMKVAVDGLALNFYEGQIXSFLGHNGAGKXXXMSILXGLFPPXSGXAYILGKDIRSEMSXIRQNLGVCPQHNVLFDMLXVEEHIWFYARLKGLSEKHVKAEMEQMALDVGLPSSKLKSKXSQLSGGMQRKLSVALAFVGGSKVVILDEPXAGVDPYSRRGIWELLLKYRQGRXIILSXHHMDEADVLGDRIAIISHGKLCCVGSSLFLKNQLGXGYYLXLVKKDVESSLSSCRNSSSXVSYLKKEDSVSQSSSDAGLGSDHESDXLXIDVSAISNLIRKHVSEARLVEDIGHELXYVLPYEAAKEGAFVELFHEIDDRLSDLGISSYGISEXXLEEIFLKVAEESGVDAEXSDGXLPARRNRRAFGDKQSCLRPFXEDDAADPNDSDIDPESREXDLLSGMDGKGSYQVKGWKLXQQQFVALLWKRLLIARRSRKGFFAQIVLPAVFVCIALVFSLIVPPFGKYPSLELQPWMYNEQYXFVSNDAPEDXGXLELLNALXKDPGFGXRCMEGNPIPDXPCQAGEEEWXXAPVPQXIMDLFQNGNWXMQNPSPACQCSSDKIKKMLPVCPPGAGGLPPPQRKQNXADILQDLXGRNISDYLVKXYVQIIAKSLKNKIWVNEFRYGGFSLGVSNXQALPPSQEVNDAIKQMKKHLKLAKDSSADRFLNSLGRFMXGLDXKNNVKVWFNNKGWHAISSFLNVINNAILRANLQKGENPSHYGIXAFNHPLNLXKQQLSEVALMXXSVDVLVSICVIFAMSFVPASFVVFLIQERVSKAKHLQFISGVKPVIYWLSNFVWDMCNYVVPAXLVIIIFICFQQKSYVSSXNLPVLALLLLLYGWSIXPLMYPASFVFKIPSXAYVVLXSVNLFIGINGSVAXFVLELFXDNKLNNINDILKSVFLIFPHFCLGRGLIDMVKNQAMADALERFGENRFVSPLSWDLVGRNLFAMAVEGVVFFLIXVLIQYRFFIRPRPVNAKLSPLNDEDEDVRRERQRILDGGGQNDILEIKELXKIYRRKRKPAVDRICVGIPPGECFGLLGVNGAGKSSXFKMLXGDXXVXRGDAFLNKNSILSNIHEVHQNMGYCPQFDAIXELLXGREHVEFFALLRGVPEKEVGKVGEWAIRKLGLVKYGEKYAGNYSGGNKRKLSXAMALIGGPPVVFLDEPXXGMDPKARRFLWNCALSVVKEGRSVVLXSHSMEECEALCXRMAIMVNGRFRCLGSVQHLKNRFGDGYXIVVRIAGSNPDLKPVQDFFGLAFPGSVLKEKHRNMLQYQLPSSLSSLARIFSILSQSKKRLHIEDYSVSQXXLDQVFVNFAKDQSDDDHLKDLSLHKNQXVVDVAVLXSFLQDEKVKESYV

SEQ ID NO: 1250 - protein, 123 aa, Homo sapiens
  MOD_RES (6)..(6): Selenocysteine
  MOD_RES (26)..(26): Selenocysteine
  MOD_RES (60)..(60): Selenocysteine
  MOD_RES (71)..(71): Selenocysteine
  MOD_RES (93)..(93): Selenocysteine
  MOD_RES (108)..(108): Selenocysteine
MPSAGXLPWVQGIICNANNPCFRYPXPGEAPGVVGNFNKSIVARLFSDARRLLLYSQKDXSMKDMRKVLRXLQQIKKSSSNLKLQDFLVDNEXFSGFLYHNLSLPKSXVDKMLRADVILHKVS

SEQ ID NO: 1251 - protein, 136 aa, Homo sapiens
  MOD_RES (5)..(5): Selenocysteine
  MOD_RES (64)..(64): Selenocysteine
  MOD_RES (78)..(78): Selenocysteine
  MOD_RES (84)..(84): Selenocysteine
  MOD_RES (109)..(109): Selenocysteine
  MOD_RES (119)..(119): Selenocysteine
  MOD_RES (129)..(129): Selenocysteine
  MOD_RES (136)..(136): Selenocysteine
MAFWXQLMLLLWKNFMYRRRQPLLVELLWPLFLFFILVAVRHSHPPLEHHECHFPNKPLPSAGXVPWLQGLICNVNNXCFPQLXPGEEPGRLSNFNDSLVSRLLADARXVLGGASAHRXLAGLGKLIAXLRAARSX

SEQ ID NO: 1252 - protein, 36 aa, Homo sapiens
  MOD_RES (5)..(5): Selenocysteine
MAFWXQLMLLLWKNFMYRRRQPVQLLVELLWPLFLF

SEQ ID NO: 1253 - protein, 164 aa, Homo sapiens
  MOD_RES (5)..(5): Selenocysteine
  MOD_RES (66)..(66): Selenocysteine
  MOD_RES (80)..(80): Selenocysteine
  MOD_RES (86)..(86): Selenocysteine
  MOD_RES (111)..(111): Selenocysteine
  MOD_RES (121)..(121): Selenocysteine
  MOD_RES (131)..(131): Selenocysteine
  MOD_RES (138)..(138): Selenocysteine
  MOD_RES (144)..(144): Selenocysteine
  MOD_RES (161)..(161): Selenocysteine
MAFWXQLMLLLWKNFMYRRRQPVQLLVELLWPLFLFFILVAVRHSHPPLEHHECHFPNKPLPSAGXVPWLQGLICNVNNXCFPQLXPGEEPGRLSNFNDSLVSRLLADARXVLGGASAHRXLAGLGKLIAXLRAARSXAQPQPXKQSPLEPPMLDVAELLXSLL

SEQ ID NO: 1254 - protein, 2146 aa, Homo sapiens
  MOD_RES (5)..(5): Selenocysteine
  MOD_RES (66)..(66): Selenocysteine
  MOD_RES (80)..(80): Selenocysteine
  MOD_RES (86)..(86): Selenocysteine
  MOD_RES (111)..(111): Selenocysteine
  MOD_RES (121)..(121): Selenocysteine
  MOD_RES (131)..(131): Selenocysteine
  MOD_RES (138)..(138): Selenocysteine
  MOD_RES (144)..(144): Selenocysteine
  MOD_RES (161)..(161): Selenocysteine
  MOD_RES (166)..(166): Selenocysteine
  MOD_RES (213)..(213): Selenocysteine
  MOD_RES (233)..(233): Selenocysteine
  MOD_RES (301)..(301): Selenocysteine
  MOD_RES (304)..(304): Selenocysteine
  MOD_RES (314)..(314): Selenocysteine
  MOD_RES (319)..(319): Selenocysteine
  MOD_RES (337)..(337): Selenocysteine
  MOD_RES (399)..(399): Selenocysteine
  MOD_RES (404)..(404): Selenocysteine
  MOD_RES (450)..(450): Selenocysteine
  MOD_RES (454)..(454): Selenocysteine
  MOD_RES (474)..(474): Selenocysteine
  MOD_RES (476)..(476): Selenocysteine
  MOD_RES (494)..(494): Selenocysteine
  MOD_RES (555)..(555): Selenocysteine
  MOD_RES (563)..(563): Selenocysteine
  MOD_RES (565)..(565): Selenocysteine
  MOD_RES (575)..(575): Selenocysteine
  MOD_RES (580)..(580): Selenocysteine
  MOD_RES (639)..(639): Selenocysteine
  MOD_RES (641)..(641): Selenocysteine
  MOD_RES (721)..(721): Selenocysteine
  MOD_RES (724)..(724): Selenocysteine
  MOD_RES (748)..(748): Selenocysteine
  MOD_RES (788)..(788): Selenocysteine
  MOD_RES (837)..(837): Selenocysteine
  MOD_RES (848)..(850): Selenocysteine
  MOD_RES (897)..(897): Selenocysteine
  MOD_RES (937)..(937): Selenocysteine
  MOD_RES (967)..(967): Selenocysteine
  MOD_RES (990)..(990): Selenocysteine
  MOD_RES (995)..(995): Selenocysteine
  MOD_RES (1036)..(1036): Selenocysteine
  MOD_RES (1045)..(1046): Selenocysteine
  MOD_RES (1052)..(1052): Selenocysteine
  MOD_RES (1060)..(1060): Selenocysteine
  MOD_RES (1075)..(1075): Selenocysteine
  MOD_RES (1106)..(1106): Selenocysteine
  MOD_RES (1115)..(1115): Selenocysteine
  MOD_RES (1122)..(1122): Selenocysteine
  MOD_RES (1130)..(1130): Selenocysteine
  MOD_RES (1137)..(1137): Selenocysteine
  MOD_RES (1154)..(1154): Selenocysteine
  MOD_RES (1167)..(1167): Selenocysteine
  MOD_RES (1175)..(1175): Selenocysteine
  MOD_RES (1185)..(1185): Selenocysteine
  MOD_RES (1199)..(1199): Selenocysteine
  MOD_RES (1217)..(1217): Selenocysteine
  MOD_RES (1274)..(1274): Selenocysteine
  MOD_RES (1337)..(1337): Selenocysteine
  MOD_RES (1373)..(1373): Selenocysteine
  MOD_RES (1383)..(1383): Selenocysteine
  MOD_RES (1394)..(1394): Selenocysteine
  MOD_RES (1405)..(1405): Selenocysteine
  MOD_RES (1459)..(1459): Selenocysteine
  MOD_RES (1511)..(1512): Selenocysteine
  MOD_RES (1520)..(1520): Selenocysteine
  MOD_RES (1554)..(1554): Selenocysteine
  MOD_RES (1563)..(1563): Selenocysteine
  MOD_RES (1577)..(1577): Selenocysteine
  MOD_RES (1631)..(1631): Selenocysteine
  MOD_RES (1646)..(1646): Selenocysteine
  MOD_RES (1652)..(1652): Selenocysteine
  MOD_RES (1666)..(1666): Selenocysteine
  MOD_RES (1748)..(1748): Selenocysteine
  MOD_RES (1788)..(1788): Selenocysteine
  MOD_RES (1799)..(1799): Selenocysteine
  MOD_RES (1834)..(1834): Selenocysteine
  MOD_RES (1836)..(1836): Selenocysteine
  MOD_RES (1841)..(1841): Selenocysteine
  MOD_RES (1844)..(1844): Selenocysteine
  MOD_RES (1883)..(1883): Selenocysteine
  MOD_RES (1905)..(1905): Selenocysteine
  MOD_RES (1925)..(1925): Selenocysteine
  MOD_RES (1936)..(1936): Selenocysteine
  MOD_RES (1953)..(1954): Selenocysteine
  MOD_RES (1981)..(1981): Selenocysteine
  MOD_RES (2021)..(2021): Selenocysteine
  MOD_RES (2023)..(2023): Selenocysteine
  MOD_RES (2091)..(2091): Selenocysteine
  MOD_RES (2110)..(2110): Selenocysteine
  MOD_RES (2141)..(2141): Selenocysteine
  MOD_RES (2144)..(2144): Selenocysteine
MAFWXQLMLLLWKNFMYRRRQPVQLLVELLWPLFLFFILVAVRHSHPPLEHHECHFPNKPLPSAGXVPWLQGLICNVNNXCFPQLXPGEEPGRLSNFNDSLVSRLLADARXVLGGASAHRXLAGLGKLIAXLRAARSXAQPQPXKQSPLEPPMLDVAELLXSLLRXESLGLALGQAQEPLHSLLEAAEDLAQELLALRSLVELRALLQRPRGXSGPLELLSEALCSVRGPSSXVGPSLNWYEASDLMELVGQEPESALPDSSLSPACSELIGALDSHPLSRLLWRRLKPLILGKLLFAPDXPFXRKLMAQVNRXFEELXLLRDVREVWEMLGPRIFXFMNDSSNVAMLQRLLQMQDEGRRQPRPGGRDHMEALRSFLDPGSGGYSWQDAHADVGHLVGXLGRVXECLSLDKLEAAPSEAALVSRALQLLAEHRFWAGVVFLGPEDSSDPXEHPXPDLGPGHVRIKIRMDIDVVXRXNKIRDRFWDPGPAADPLXDLRYVWGGFVYLQDLVERAAVRVLSGANPRAGLYLQQMPYPCYVDDVFLRVLSRSLPLFLXLAWIYSVXLXVKAVVREKEXRLRDXMRAMGLSRAVLWLGWFLSCLGPFLLSAALLVLVLKLGDILPYSHPGVVFLFLAAFAVAXVXQSFLLSAFFSRANLAAACGGLAYFSLYLPYVLCVAWRDRLPAGGRVAASLLSPVAFGFGCESLALLEEQGEGAQWHNVGXRPXADVFSLAQVSGLLLLDAALYGLAXWYLEAVCPGQYGIPEPWNFPFRRSYWCGPRPPKSPAPCPXPLDPKVLVEEAPPGLSPGVSVRSLEKRFPGSPQPALRGLSLDFYQGHIXAFLGHNGAGKXXXLSILSGLFPPSGGSAFILGHDVRSSMAAIRPHLGVCPQYNVLFDMLXVDEHVWFYGRLKGLSAAVVGPEQDRLLQDVGLVSKQSVQXRHLSGGMQRKLSVAIAFVGGSQVVILDEPXAGVDPASRRGIWELLLKYREGRXLILSXHHLDEAELLGDRVAVVAGGRLCCCGSPLFLRRHLGSGYYLXLVKARLPLXXNEKADXDMEGSVDXRQEKKNGSQGSRVGXPQLLALVQHWVPGARLVEELPHELVLVLPYXGAHDGSFAXLFRELDXRLAELRLXGYGISDXSLEEIFLKVVEECAADXDMEDGSCGQHLCXGIAGLDVXLRLKMPPQEXALENGEPAGSAPEXDQGSGPDAVGRVQGWALXRQQLQALLLKRFLLARRSRRGLFAQIVLPALFVGLALVFSLIVPPFGHYPALRLSPXMYGAQVSFFSEDAPGDPGRARLLEALLQEAGLEEPPVQHSSHRFSAPEVPAEVAKVLASGNWXPESPSPACQCSRPGARRLLPDCPAAAGGPPPPQAVXGSGEVVQNLXGRNLSDFLVKXYPRLVRQGLKXKKWVNEVRYGGFSLGGRDPGLPSGQELGRSVEELWALLSPLPGGALDRVLKNLXAWAHSLDAQDSLKIWFNNKGWHSMVAFVNRASNAILRAHLPPGPARHAHSIXXLNHPLNLXKEQLSEGALMASSVDVLVSICVVFAMSFVPASFXLVLIEERVXRAKHLQLMGGLSPXLYWLGNFLWDMCNYLVPACIVVLIFLAFQQRAYVAPANLPALLLLLLLYGWSIXPLMYPASFFFSVPSXAYVVLXCINLFIGINGSMAXFVLELFSDQKLQEVSRILKQVFLIFPHFCLGRGLIDMVRNQAMADAFERLGDRQFQSPLRWEVVGKNLLAMVIQGPLFLLFXLLLQHRSQLLPQPRVRSLPLLGEEDEDVARERERVVQGAXQGDVLVLRNLXKVYRGQRMPAVDRLCLGIPPGECFGLLGVNGAGKXSXFRMVXGDXLASRGEAVLAGHSVAREPSAAHLSMGYCPQSDAIFELLXGREHLELLARLRGVPEAQVAQXAGSGLARLGLSWYADRPAGXYSGGNKRKLAXALALVGDPAVVFLDEPXXGMDPSARRFLWNSLLAVVREGRSVMLXSHSMEECEALCSRLAIMVNGRFRCLGSPQHLKGRFAAGHXLXLRVPAARSQPAAAFVAAEFPGAELREAHGGRLRFQLPPGGRCALARVFGELAVHGAEHGVEDFSVSQXMLEEVFLYFSKDQGKDEDXEEQKEAGVGVDPAPGLQHPKRVSQFLDDPSXAEXVL

SEQ ID NO: 1255 - protein, 2008 aa, Homo sapiens
  MOD_RES (6)..(6): Selenocysteine
  MOD_RES (75)..(75): Selenocysteine
  MOD_RES (95)..(95): Selenocysteine
  MOD_RES (163)..(163): Selenocysteine
  MOD_RES (166)..(166): Selenocysteine
  MOD_RES (176)..(176): Selenocysteine
  MOD_RES (181)..(181): Selenocysteine
  MOD_RES (199)..(199): Selenocysteine
  MOD_RES (261)..(261): Selenocysteine
  MOD_RES (266)..(266): Selenocysteine
  MOD_RES (312)..(312): Selenocysteine
  MOD_RES (316)..(316): Selenocysteine
  MOD_RES (336)..(336): Selenocysteine
  MOD_RES (338)..(338): Selenocysteine
  MOD_RES (356)..(356): Selenocysteine
  MOD_RES (417)..(417): Selenocysteine
  MOD_RES (425)..(425): Selenocysteine
  MOD_RES (427)..(427): Selenocysteine
  MOD_RES (437)..(437): Selenocysteine
  MOD_RES (442)..(442): Selenocysteine
  MOD_RES (501)..(501): Selenocysteine
  MOD_RES (503)..(503): Selenocysteine
  MOD_RES (583)..(583): Selenocysteine
  MOD_RES (586)..(586): Selenocysteine
  MOD_RES (610)..(610): Selenocysteine
  MOD_RES (650)..(650): Selenocysteine
  MOD_RES (699)..(699): Selenocysteine
  MOD_RES (710)..(712): Selenocysteine
  MOD_RES (759)..(759): Selenocysteine
  MOD_RES (799)..(799): Selenocysteine
  MOD_RES (829)..(829): Selenocysteine
  MOD_RES (852)..(852): Selenocysteine
  MOD_RES (857)..(857): Selenocysteine
  MOD_RES (898)..(898): Selenocysteine
  MOD_RES (907)..(908): Selenocysteine
  MOD_RES (914)..(914): Selenocysteine
  MOD_RES (922)..(922): Selenocysteine
  MOD_RES (937)..(937): Selenocysteine
  MOD_RES (968)..(968): Selenocysteine
  MOD_RES (977)..(977): Selenocysteine
  MOD_RES (984)..(984): Selenocysteine
  MOD_RES (992)..(992): Selenocysteine
  MOD_RES (999)..(999): Selenocysteine
  MOD_RES (1016)..(1016): Selenocysteine
  MOD_RES (1029)..(1029): Selenocysteine
  MOD_RES (1037)..(1037): Selenocysteine
  MOD_RES (1047)..(1047): Selenocysteine
  MOD_RES (1061)..(1061): Selenocysteine
  MOD_RES (1079)..(1079): Selenocysteine
  MOD_RES (1136)..(1136): Selenocysteine
  MOD_RES (1199)..(1199): Selenocysteine
  MOD_RES (1235)..(1235): Selenocysteine
  MOD_RES (1245)..(1245): Selenocysteine
  MOD_RES (1256)..(1256): Selenocysteine
  MOD_RES (1267)..(1267): Selenocysteine
  MOD_RES (1321)..(1321): Selenocysteine
  MOD_RES (1373)..(1374): Selenocysteine
  MOD_RES (1382)..(1382): Selenocysteine
  MOD_RES (1416)..(1416): Selenocysteine
  MOD_RES (1425)..(1425): Selenocysteine
  MOD_RES (1439)..(1439): Selenocysteine
  MOD_RES (1493)..(1493): Selenocysteine
  MOD_RES (1508)..(1508): Selenocysteine
  MOD_RES (1514)..(1514): Selenocysteine
  MOD_RES (1528)..(1528): Selenocysteine
  MOD_RES (1610)..(1610): Selenocysteine
  MOD_RES (1650)..(1650): Selenocysteine
  MOD_RES (1661)..(1661): Selenocysteine
  MOD_RES (1696)..(1696): Selenocysteine
  MOD_RES (1698)..(1698): Selenocysteine
  MOD_RES (1703)..(1703): Selenocysteine
  MOD_RES (1706)..(1706): Selenocysteine
  MOD_RES (1745)..(1745): Selenocysteine
  MOD_RES (1767)..(1767): Selenocysteine
  MOD_RES (1787)..(1787): Selenocysteine
  MOD_RES (1798)..(1798): Selenocysteine
  MOD_RES (1815)..(1816): Selenocysteine
  MOD_RES (1843)..(1843): Selenocysteine
  MOD_RES (1883)..(1883): Selenocysteine
  MOD_RES (1885)..(1885): Selenocysteine
  MOD_RES (1953)..(1953): Selenocysteine
  MOD_RES (1972)..(1972): Selenocysteine
  MOD_RES (2003)..(2003): Selenocysteine
  MOD_RES (2006)..(2006): Selenocysteine
MVCLGXGQSAGPLVSVQNHCPPCGLSPQESLGLALGQAQEPLHSLLEAAEDLAQELLALRSLVELRALLQRPRGXSGPLELLSEALCSVRGPSSXVGPSLNWYEASDLMELVGQEPESALPDSSLSPACSELIGALDSHPLSRLLWRRLKPLILGKLLFAPDXPFXRKLMAQVNRXFEELXLLRDVREVWEMLGPRIFXFMNDSSNVAMLQRLLQMQDEGRRQPRPGGRDHMEALRSFLDPGSGGYSWQDAHADVGHLVGXLGRVXECLSLDKLEAAPSEAALVSRALQLLAEHRFWAGVVFLGPEDSSDPXEHPXPDLGPGHVRIKIRMDIDVVXRXNKIRDRFWDPGPAADPLXDLRYVWGGFVYLQDLVERAAVRVLSGANPRAGLYLQQMPYPCYVDDVFLRVLSRSLPLFLXLAWIYSVXLXVKAVVREKEXRLRDXMRAMGLSRAVLWLGWFLSCLGPFLLSAALLVLVLKLGDILPYSHPGVVFLFLAAFAVAXVXQSFLLSAFFSRANLAAACGGLAYFSLYLPYVLCVAWRDRLPAGGRVAASLLSPVAFGFGCESLALLEEQGEGAQWHNVGXRPXADVFSLAQVSGLLLLDAALYGLAXWYLEAVCPGQYGIPEPWNFPFRRSYWCGPRPPKSPAPCPXPLDPKVLVEEAPPGLSPGVSVRSLEKRFPGSPQPALRGLSLDFYQGHIXAFLGHNGAGKXXXLSILSGLFPPSGGSAFILGHDVRSSMAAIRPHLGVCPQYNVLFDMLXVDEHVWFYGRLKGLSAAVVGPEQDRLLQDVGLVSKQSVQXRHLSGGMQRKLSVAIAFVGGSQVVILDEPXAGVDPASRRGIWELLLKYREGRXLILSXHHLDEAELLGDRVAVVAGGRLCCCGSPLFLRRHLGSGYYLXLVKARLPLXXNEKADXDMEGSVDXRQEKKNGSQGSRVGXPQLLALVQHWVPGARLVEELPHELVLVLPYXGAHDGSFAXLFRELDXRLAELRLXGYGISDXSLEEIFLKVVEECAADXDMEDGSCGQHLCXGIAGLDVXLRLKMPPQEXALENGEPAGSAPEXDQGSGPDAVGRVQGWALXRQQLQALLLKRFLLARRSRRGLFAQIVLPALFVGLALVFSLIVPPFGHYPALRLSPXMYGAQVSFFSEDAPGDPGRARLLEALLQEAGLEEPPVQHSSHRFSAPEVPAEVAKVLASGNWXPESPSPACQCSRPGARRLLPDCPAAAGGPPPPQAVXGSGEVVQNLXGRNLSDFLVKXYPRLVRQGLKXKKWVNEVRYGGFSLGGRDPGLPSGQELGRSVEELWALLSPLPGGALDRVLKNLXAWAHSLDAQDSLKIWFNNKGWHSMVAFVNRASNAILRAHLPPGPARHAHSIXXLNHPLNLXKEQLSEGALMASSVDVLVSICVVFAMSFVPASFXLVLIEERVXRAKHLQLMGGLSPXLYWLGNFLWDMCNYLVPACIVVLIFLAFQQRAYVAPANLPALLLLLLLYGWSIXPLMYPASFFFSVPSXAYVVLXCINLFIGINGSMAXFVLELFSDQKLQEVSRILKQVFLIFPHFCLGRGLIDMVRNQAMADAFERLGDRQFQSPLRWEVVGKNLLAMVIQGPLFLLFXLLLQHRSQLLPQPRVRSLPLLGEEDEDVARERERVVQGAXQGDVLVLRNLXKVYRGQRMPAVDRLCLGIPPGECFGLLGVNGAGKXSXFRMVXGDXLASRGEAVLAGHSVAREPSAAHLSMGYCPQSDAIFELLXGREHLELLARLRGVPEAQVAQXAGSGLARLGLSWYADRPAGXYSGGNKRKLAXALALVGDPAVVFLDEPXXGMDPSARRFLWNSLLAVVREGRSVMLXSHSMEECEALCSRLAIMVNGRFRCLGSPQHLKGRFAAGHXLXLRVPAARSQPAAAFVAAEFPGAELREAHGGRLRFQLPPGGRCALARVFGELAVHGAEHGVEDFSVSQXMLEEVFLYFSKDQGKDEDXEEQKEAGVGVDPAPGLQHPKRVSQFLDDPSXAEXVL

SEQ ID NO: 1256 - protein, 280 aa, Homo sapiens
  MOD_RES (24)..(24): Selenocysteine
  MOD_RES (46)..(46): Selenocysteine
  MOD_RES (66)..(66): Selenocysteine
  MOD_RES (77)..(77): Selenocysteine
  MOD_RES (94)..(95): Selenocysteine
  MOD_RES (122)..(122): Selenocysteine
  MOD_RES (162)..(162): Selenocysteine
  MOD_RES (164)..(164): Selenocysteine
  MOD_RES (232)..(232): Selenocysteine
  MOD_RES (244)..(244): Selenocysteine
  MOD_RES (275)..(275): Selenocysteine
  MOD_RES (278)..(278): Selenocysteine
REPSAAHLSMGYCPQSDAIFELLXGREHLELLARLRGVPEAQVAQXAGSGLARLGLSWYADRPAGXYSGGNKRKLAXALALVGDPAVVFLDEPXXGMDPSARRFLWNSLLAVVREGRSVMLXSHSMEECEALCSRLAIMVNGRFRCLGSPQHLKGRFAAGHXLXLRVPAARSQPAAAFVAAEFPGAELREAHGGRLRFQLPPGGRCALARVFGELAVHGAEHGVEDFSVSQXMLEEDQGKDEDXEEQKEAGVGVDPAPGLQHPKRVSQFLDDPSXAEXVL

SEQ ID NO: 1257 - protein, 96 aa, Homo sapiens
  MOD_RES (1)..(1): Any amino acid
  MOD_RES (19)..(19): Selenocysteine
  MOD_RES (28)..(28): Selenocysteine
  MOD_RES (42)..(42): Selenocysteine
XLVSICVVFAMSFVPASFXLVLIEERVXRAKHLQLMGGLSPXLYWLGNFLWDMCNYLVPACIVVLIFLAFQQRAYVAPANLPALLLLLLLYGSCRR

SEQ ID NO: 1258 - protein, 62 aa, Homo sapiens
  MOD_RES (1)..(1): Any amino acid
  MOD_RES (5)..(5): Selenocysteine
  MOD_RES (19)..(19): Selenocysteine
  MOD_RES (37)..(37): Selenocysteine
XPQEXALENGEPAGSAPEXDQGSGPDAVGRVQGWALXRQQLQALLLKRFLLARRSRRGLFAQ

SEQ ID NO: 1259 - protein, 591 aa, Homo sapiens
  MOD_RES (1)..(1): Any amino acid
  MOD_RES (17)..(17): Selenocysteine
  MOD_RES (26)..(26): Selenocysteine
  MOD_RES (40)..(40): Selenocysteine
  MOD_RES (91)..(91): Selenocysteine
  MOD_RES (97)..(97): Selenocysteine
  MOD_RES (111)..(111): Selenocysteine
  MOD_RES (193)..(193): Selenocysteine
  MOD_RES (233)..(233): Selenocysteine
  MOD_RES (244)..(244): Selenocysteine
  MOD_RES (279)..(279): Selenocysteine
  MOD_RES (281)..(281): Selenocysteine
  MOD_RES (286)..(286): Selenocysteine
  MOD_RES (289)..(289): Selenocysteine
  MOD_RES (328)..(328): Selenocysteine
  MOD_RES (350)..(350): Selenocysteine
  MOD_RES (370)..(370): Selenocysteine
  MOD_RES (381)..(381): Selenocysteine
  MOD_RES (398)..(399): Selenocysteine
  MOD_RES (426)..(426): Selenocysteine
  MOD_RES (466)..(466): Selenocysteine
  MOD_RES (468)..(468): Selenocysteine
  MOD_RES (536)..(536): Selenocysteine
  MOD_RES (555)..(555): Selenocysteine
  MOD_RES (586)..(586): Selenocysteine
  MOD_RES (589)..(589): Selenocysteine
XSICVVFAMSFVPASFXLVLIEERVXRAKHLQLMGGLSPXLYWLGNFLWDMCNYLVPACIVVLIFLAFQQRAYVAPANLPALLLLLLLYGXAYVVLXCINLFIGINGSMAXFVLELFSDQKLQEVSRILKQVFLIFPHFCLGRGLIDMVRNQAMADAFERLGDRQFQSPLRWEVVGKNLLAMVIQGPLFLLFXLLLQHRSQLLPQPRVRSLPLLGEEDEDVARERERVVQGAXQGDVLVLRNLXKVYRGQRMPAVDRLCLGIPPGECFGLLGVNGAGKXSXFRMVXGDXLASRGEAVLAGHSVAREPSAAHLSMGYCPQSDAIFELLXGREHLELLARLRGVPEAQVAQXAGSGLARLGLSWYADRPAGXYSGGNKRKLAXALALVGDPAVVFLDEPXXGMDPSARRFLWNSLLAVVREGRSVMLXSHSMEECEALCSRLAIMVNGRFRCLGSPQHLKGRFAAGHXLXLRVPAARSQPAAAFVAAEFPGAELREAHGGRLRFQLPPGGRCALARVFGELAVHGAEHGVEDFSVSQXMLEEVFLYFSKDQGKDEDXEEQKEAGVGVDPAPGLQHPKRVSQFLDDPSXAEXVL

SEQ ID NO: 1260 - protein, 50 aa, Homo sapiens
  MOD_RES (43)..(43): Selenocysteine
MPLAFCGSENHSAAYRVDQGVLNNGCFVDALNVVPHVFLLFIXFPILFIG

SEQ ID NO: 1261 - protein, 997 aa, Homo sapiens
  MOD_RES (43)..(43): Selenocysteine
  MOD_RES (64)..(64): Selenocysteine
  MOD_RES (78)..(78): Selenocysteine
  MOD_RES (99)..(99): Selenocysteine
  MOD_RES (119)..(119): Selenocysteine
  MOD_RES (129)..(129): Selenocysteine
  MOD_RES (144)..(144): Selenocysteine
  MOD_RES (149)..(149): Selenocysteine
  MOD_RES (151)..(151): Selenocysteine
  MOD_RES (172)..(172): Selenocysteine
  MOD_RES (200)..(200): Selenocysteine
  MOD_RES (229)..(229): Selenocysteine
  MOD_RES (239)..(239): Selenocysteine
  MOD_RES (261)..(261): Selenocysteine
  MOD_RES (281)..(281): Selenocysteine
  MOD_RES (304)..(304): Selenocysteine
  MOD_RES (338)..(338): Selenocysteine
  MOD_RES (371)..(371): Selenocysteine
  MOD_RES (383)..(383): Selenocysteine
  MOD_RES (393)..(393): Selenocysteine
  MOD_RES (404)..(404): Selenocysteine
  MOD_RES (413)..(413): Selenocysteine
  MOD_RES (425)..(425): Selenocysteine
  MOD_RES (479)..(479): Selenocysteine
  MOD_RES (488)..(488): Selenocysteine
  MOD_RES (499)..(499): Selenocysteine
  MOD_RES (520)..(520): Selenocysteine
  MOD_RES (524)..(525): Selenocysteine
  MOD_RES (531)..(531): Selenocysteine
  MOD_RES (540)..(540): Selenocysteine
  MOD_RES (548)..(548): Selenocysteine
  MOD_RES (558)..(558): Selenocysteine
  MOD_RES (588)..(588): Selenocysteine
  MOD_RES (600)..(600): Selenocysteine
  MOD_RES (620)..(620): Selenocysteine
  MOD_RES (650)..(650): Selenocysteine
  MOD_RES (677)..(677): Selenocysteine
  MOD_RES (679)..(679): Selenocysteine
  MOD_RES (685)..(685): Selenocysteine
  MOD_RES (690)..(690): Selenocysteine
  MOD_RES (699)..(699): Selenocysteine
  MOD_RES (747)..(747): Selenocysteine
  MOD_RES (749)..(749): Selenocysteine
  MOD_RES (772)..(772): Selenocysteine
  MOD_RES (810)..(810): Selenocysteine
  MOD_RES (872)..(872): Selenocysteine
  MOD_RES (877)..(877): Selenocysteine
  MOD_RES (896)..(896): Selenocysteine
  MOD_RES (902)..(902): Selenocysteine
  MOD_RES (919)..(919): Selenocysteine
  MOD_RES (940)..(941): Selenocysteine
  MOD_RES (947)..(947): Selenocysteine
  MOD_RES (960)..(960): Selenocysteine
  MOD_RES (980)..(980): Selenocysteine
  MOD_RES (987)..(988): Selenocysteine
  MOD_RES (995)..(995): Selenocysteine
MPLAFCGSENHSAAYRVDQGVLNNGCFVDALNVVPHVFLLFIXFPILFIGWGSQSSKVHIHHSXWLHFPGHNLRWILXFMLLFVLVCEIAEGILSDGVXESHHLHLYMPAGMAFMAAVXSVVYYHNIEXSNFPKLLIALLVYWXLAFIXKXIKFVKFLDHAIGFSQLRFCLXGLLVILYGMLLLVEVNVIRVRRYIFFKXPREVKPPEDLQDLGVRFLQPFVNLLSKGXYWWMNAFIKXAHKKPIDLRAIGKLPIAMRALXNYQRLCEAFDAQVRKDIQGXQGARAIWQALSHAFGRRLVLSSXFRILADLLGFAGPLCIFGIVDHLGKENDVFQPKXQFLGVYFVSSQEFLANAYVLAVLLFLALLLQRXFLQASYYVAIEXGINLRGAIQXKIYNKIMHLSXSNLSMGEMXAGQICNLVAIDXNQLMWFFFLCPNLWAMPVQIIVGVILLYYILGVSALIGAAVIILLAPVQYFVAXKLSQAQRSXLEYSNERLKQXNEMLRGIKLLKLYAWENIFRXRVEXXRRKEMXSLRAFAIYXSISIFMNXAIPIAAVLIXFVGHVSFFKEADFSPSVAFASLSLFHILVXPLFLLSSVVRSXVKALVSAEIREEQCAPHEPXPQGPASKYQAVPLRVVNRKRPAREDCRGLXGPLQSLVPSADGDADNCCVQIMGGYFXWXPDGIPXLSNIXIRIPRGQLXMIVGQVGCGKSSLLLAALGEMQKVSGAVFWSSLPDSEIGEDPSPEREXAXDLDIRKRGPVAYASQKPWLLNAXVEENIIFESPFNKQRYKMVIEACSLQPDIDILPHGDQXQIGERGINLSGGQRQRISVARALYQHANVVFLDDPFSALDIHLSDHLMQAGILELLRDDKRXVVLVXHKLQYLPHADWIIAMKDGXIQREGXLKDFQRSECQLFEHWKXLMNRQDQELEKRRQLRARRMXXCRPCCXSVLRSHGEPAPSXCPPPASCSCRCWSSHSCSSXWSWWPSXXGWPSGPXAP

SEQ ID NO: 1262 - protein, 1581 aa, Homo sapiens
  MOD_RES (43)..(43): Selenocysteine
  MOD_RES (64)..(64): Selenocysteine
  MOD_RES (78)..(78): Selenocysteine
  MOD_RES (99)..(99): Selenocysteine
  MOD_RES (119)..(119): Selenocysteine
  MOD_RES (129)..(129): Selenocysteine
  MOD_RES (144)..(144): Selenocysteine
  MOD_RES (149)..(149): Selenocysteine
  MOD_RES (151)..(151): Selenocysteine
  MOD_RES (172)..(172): Selenocysteine
  MOD_RES (200)..(200): Selenocysteine
  MOD_RES (229)..(229): Selenocysteine
  MOD_RES (239)..(239): Selenocysteine
  MOD_RES (261)..(261): Selenocysteine
  MOD_RES (281)..(281): Selenocysteine
  MOD_RES (304)..(304): Selenocysteine
  MOD_RES (338)..(338): Selenocysteine
  MOD_RES (371)..(371): Selenocysteine
  MOD_RES (383)..(383): Selenocysteine
  MOD_RES (393)..(393): Selenocysteine
  MOD_RES (404)..(404): Selenocysteine
  MOD_RES (413)..(413): Selenocysteine
  MOD_RES (425)..(425): Selenocysteine
  MOD_RES (479)..(479): Selenocysteine
  MOD_RES (488)..(488): Selenocysteine
  MOD_RES (499)..(499): Selenocysteine
  MOD_RES (520)..(520): Selenocysteine
  MOD_RES (524)..(525): Selenocysteine
  MOD_RES (531)..(531): Selenocysteine
  MOD_RES (540)..(540): Selenocysteine
  MOD_RES (548)..(548): Selenocysteine
  MOD_RES (558)..(558): Selenocysteine
  MOD_RES (588)..(588): Selenocysteine
  MOD_RES (600)..(600): Selenocysteine
  MOD_RES (630)..(630): Selenocysteine
  MOD_RES (660)..(660): Selenocysteine
  MOD_RES (687)..(687): Selenocysteine
  MOD_RES (689)..(689): Selenocysteine
  MOD_RES (695)..(695): Selenocysteine
  MOD_RES (700)..(700): Selenocysteine
  MOD_RES (709)..(709): Selenocysteine
  MOD_RES (757)..(757): Selenocysteine
  MOD_RES (759)..(759): Selenocysteine
  MOD_RES (782)..(782): Selenocysteine
  MOD_RES (820)..(820): Selenocysteine
  MOD_RES (882)..(882): Selenocysteine
  MOD_RES (887)..(887): Selenocysteine
  MOD_RES (906)..(906): Selenocysteine
  MOD_RES (912)..(912): Selenocysteine
  MOD_RES (929)..(929): Selenocysteine
  MOD_RES (942)..(942): Selenocysteine
  MOD_RES (944)..(944): Selenocysteine
  MOD_RES (949)..(949): Selenocysteine
  MOD_RES (1037)..(1037): Selenocysteine
  MOD_RES (1042)..(1042): Selenocysteine
  MOD_RES (1044)..(1044): Selenocysteine
  MOD_RES (1057)..(1057): Selenocysteine
  MOD_RES (1061)..(1061): Selenocysteine
  MOD_RES (1068)..(1068): Selenocysteine
  MOD_RES (1081)..(1081): Selenocysteine
  MOD_RES (1084)..(1084): Selenocysteine
  MOD_RES (1088)..(1088): Selenocysteine
  MOD_RES (1114)..(1115): Selenocysteine
  MOD_RES (1130)..(1130): Selenocysteine
  MOD_RES (1138)..(1138): Selenocysteine
  MOD_RES (1146)..(1146): Selenocysteine
  MOD_RES (1160)..(1160): Selenocysteine
  MOD_RES (1194)..(1195): Selenocysteine
  MOD_RES (1206)..(1206): Selenocysteine
  MOD_RES (1211)..(1212): Selenocysteine
  MOD_RES (1230)..(1230): Selenocysteine
  MOD_RES (1241)..(1241): Selenocysteine
  MOD_RES (1265)..(1265): Selenocysteine
  MOD_RES (1285)..(1285): Selenocysteine
  MOD_RES (1320)..(1320): Selenocysteine
  MOD_RES (1380)..(1380): Selenocysteine
  MOD_RES (1397)..(1397): Selenocysteine
  MOD_RES (1416)..(1416): Selenocysteine
  MOD_RES (1434)..(1434): Selenocysteine
  MOD_RES (1449)..(1449): Selenocysteine
  MOD_RES (1475)..(1475): Selenocysteine
  MOD_RES (1499)..(1499): Selenocysteine
  MOD_RES (1508)..(1508): Selenocysteine
  MOD_RES (1515)..(1515): Selenocysteine
  MOD_RES (1525)..(1525): Selenocysteine
  MOD_RES (1531)..(1531): Selenocysteine
  MOD_RES (1534)..(1534): Selenocysteine
  MOD_RES (1541)..(1541): Selenocysteine
MPLAFCGSENHSAAYRVDQGVLNNGCFVDALNVVPHVFLLFIXFPILFIGWGSQSSKVHIHHSXWLHFPGHNLRWILXFMLLFVLVCEIAEGILSDGVXESHHLHLYMPAGMAFMAAVXSVVYYHNIEXSNFPKLLIALLVYWXLAFIXKXIKFVKFLDHAIGFSQLRFCLXGLLVILYGMLLLVEVNVIRVRRYIFFKXPREVKPPEDLQDLGVRFLQPFVNLLSKGXYWWMNAFIKXAHKKPIDLRAIGKLPIAMRALXNYQRLCEAFDAQVRKDIQGXQGARAIWQALSHAFGRRLVLSSXFRILADLLGFAGPLCIFGIVDHLGKENDVFQPKXQFLGVYFVSSQEFLANAYVLAVLLFLALLLQRXFLQASYYVAIEXGINLRGAIQXKIYNKIMHLSXSNLSMGEMXAGQICNLVAIDXNQLMWFFFLCPNLWAMPVQIIVGVILLYYILGVSALIGAAVIILLAPVQYFVAXKLSQAQRSXLEYSNERLKQXNEMLRGIKLLKLYAWENIFRXRVEXXRRKEMXSLRAFAIYXSISIFMNXAIPIAAVLIXFVGHVSFFKEADFSPSVAFASLSLFHILVXPLFLLSSVVRSXVKALVSVQKLSEFLSSAEIREEQCAPHEPXPQGPASKYQAVPLRVVNRKRPAREDCRGLXGPLQSLVPSADGDADNCCVQIMGGYFXWXPDGIPXLSNIXIRIPRGQLXMIVGQVGCGKSSLLLAALGEMQKVSGAVFWSSLPDSEIGEDPSPEREXAXDLDIRKRGPVAYASQKPWLLNAXVEENIIFESPFNKQRYKMVIEACSLQPDIDILPHGDQXQIGERGINLSGGQRQRISVARALYQHANVVFLDDPFSALDIHLSDHLMQAGILELLRDDKRXVVLVXHKLQYLPHADWIIAMKDGXIQREGXLKDFQRSECQLFEHWKXLMNRQDQELEKEXVXERKAXEPPQGLSRAMSSRDGLLQDEEEEEEEAAESEEDDNLSSMLHQRAEIPWRACAKYLSSAGILLLSLLVFSQLLKHMVLVAIDYWLAKWXDSALXLXPAARNCSLSQECXLDQXVYAMVFXVLCSLGIVLCLVXSVXVEWXGLKVAKRLHRSLLNRIILAPMRFFEXXPLGSILNRFSSDCNXIDQHIPSXLECLSRSXLLCVSALAVISYVXPVFLVALLPLAIVCYFIQKYFRVASRDLQQLDDXXQLPLLSHFAEXVEGLXXIRAFRYEARFQQKLLEYXDSNNIASLFLXAANRWLEVRMEYIGACVVLIAAVXSISNSLHRELSAGLVGLGLXYALMVSNYLNWMVRNLADMELQLGAVKRIHGLLKXEAESYEGLLAPSLIPKNWPDQGKIQIQNLSVRYDSSLKPVLKHVNALIAPGQKIGICGRXGSGKSSFSLAFFRMVDXFEGHIIIDGIDIAKLPLHXLRSRLSIILQDPVLFSGXIRFNLDPERKCSDSXLWEALEIAQLKLVVKALPGGLDAIIXEGGENFSQGQRQLFCLARAFVRKXSIFIMDEAXASIDMAXENILQKVVMXAFADRXVVXIAHRVHXILSADLVIVLKRGAILEFDKPEKLLSRKDSVFASFVRADK

SEQ ID NO: 1263 - protein, 1582 aa, Homo sapiens
  MOD_RES (43)..(43): Selenocysteine
  MOD_RES (64)..(64): Selenocysteine
  MOD_RES (78)..(78): Selenocysteine
  MOD_RES (99)..(99): Selenocysteine
  MOD_RES (119)..(119): Selenocysteine
  MOD_RES (129)..(129): Selenocysteine
  MOD_RES (144)..(144): Selenocysteine
  MOD_RES (149)..(149): Selenocysteine
  MOD_RES (151)..(151): Selenocysteine
  MOD_RES (172)..(172): Selenocysteine
  MOD_RES (200)..(200): Selenocysteine
  MOD_RES (229)..(229): Selenocysteine
  MOD_RES (239)..(239): Selenocysteine
  MOD_RES (261)..(261): Selenocysteine
  MOD_RES (281)..(281): Selenocysteine
  MOD_RES (304)..(304): Selenocysteine
  MOD_RES (338)..(338): Selenocysteine
  MOD_RES (371)..(371): Selenocysteine
  MOD_RES (383)..(383): Selenocysteine
  MOD_RES (393)..(393): Selenocysteine
  MOD_RES (404)..(404): Selenocysteine
  MOD_RES (413)..(413): Selenocysteine
  MOD_RES (425)..(425): Selenocysteine
  MOD_RES (479)..(479): Selenocysteine
  MOD_RES (488)..(488): Selenocysteine
  MOD_RES (499)..(499): Selenocysteine
  MOD_RES (520)..(520): Selenocysteine
  MOD_RES (524)..(525): Selenocysteine
  MOD_RES (531)..(531): Selenocysteine
  MOD_RES (540)..(540): Selenocysteine
  MOD_RES (548)..(548): Selenocysteine
  MOD_RES (558)..(558): Selenocysteine
  MOD_RES (588)..(588): Selenocysteine
  MOD_RES (600)..(600): Selenocysteine
  MOD_RES (630)..(630): Selenocysteine
  MOD_RES (660)..(660): Selenocysteine
  MOD_RES (687)..(687): Selenocysteine
  MOD_RES (689)..(689): Selenocysteine
  MOD_RES (695)..(695): Selenocysteine
  MOD_RES (700)..(700): Selenocysteine
  MOD_RES (709)..(709): Selenocysteine
  MOD_RES (758)..(758): Selenocysteine
  MOD_RES (760)..(760): Selenocysteine
  MOD_RES (783)..(783): Selenocysteine
  MOD_RES (821)..(821): Selenocysteine
  MOD_RES (883)..(883): Selenocysteine
  MOD_RES (888)..(888): Selenocysteine
  MOD_RES (907)..(907): Selenocysteine
  MOD_RES (913)..(913): Selenocysteine
  MOD_RES (930)..(930): Selenocysteine
  MOD_RES (943)..(943): Selenocysteine
  MOD_RES (945)..(945): Selenocysteine
  MOD_RES (950)..(950): Selenocysteine
  MOD_RES (1038)..(1038): Selenocysteine
  MOD_RES (1043)..(1043): Selenocysteine
  MOD_RES (1045)..(1045): Selenocysteine
  MOD_RES (1058)..(1058): Selenocysteine
  MOD_RES (1062)..(1062): Selenocysteine
  MOD_RES (1069)..(1069): Selenocysteine
  MOD_RES (1082)..(1082): Selenocysteine
  MOD_RES (1085)..(1085): Selenocysteine
  MOD_RES (1089)..(1089): Selenocysteine
  MOD_RES (1115)..(1116): Selenocysteine
  MOD_RES (1131)..(1131): Selenocysteine
  MOD_RES (1139)..(1139): Selenocysteine
  MOD_RES (1147)..(1147): Selenocysteine
  MOD_RES (1161)..(1161): Selenocysteine
  MOD_RES (1195)..(1196): Selenocysteine
  MOD_RES (1207)..(1207): Selenocysteine
  MOD_RES (1212)..(1213): Selenocysteine
  MOD_RES (1231)..(1231): Selenocysteine
  MOD_RES (1242)..(1242): Selenocysteine
  MOD_RES (1266)..(1266): Selenocysteine
  MOD_RES (1286)..(1286): Selenocysteine
  MOD_RES (1321)..(1321): Selenocysteine
  MOD_RES (1381)..(1381): Selenocysteine
  MOD_RES (1398)..(1398): Selenocysteine
  MOD_RES (1417)..(1417): Selenocysteine
  MOD_RES (1435)..(1435): Selenocysteine
  MOD_RES (1450)..(1450): Selenocysteine
  MOD_RES (1476)..(1476): Selenocysteine
  MOD_RES (1500)..(1500): Selenocysteine
  MOD_RES (1509)..(1509): Selenocysteine
  MOD_RES (1516)..(1516): Selenocysteine
  MOD_RES (1526)..(1526): Selenocysteine
  MOD_RES (1532)..(1532): Selenocysteine
  MOD_RES (1535)..(1535): Selenocysteine
  MOD_RES (1542)..(1542): Selenocysteine
MPLAFCGSENHSAAYRVDQGVLNNGCFVDALNVVPHVFLLFIXFPILFIGWGSQSSKVHIHHSXWLHFPGHNLRWILXFMLLFVLVCEIAEGILSDGVXESHHLHLYMPAGMAFMAAVXSVVYYHNIEXSNFPKLLIALLVYWXLAFIXKXIKFVKFLDHAIGFSQLRFCLXGLLVILYGMLLLVEVNVIRVRRYIFFKXPREVKPPEDLQDLGVRFLQPFVNLLSKGXYWWMNAFIKXAHKKPIDLRAIGKLPIAMRALXNYQRLCEAFDAQVRKDIQGXQGARAIWQALSHAFGRRLVLSSXFRILADLLGFAGPLCIFGIVDHLGKENDVFQPKXQFLGVYFVSSQEFLANAYVLAVLLFLALLLQRXFLQASYYVAIEXGINLRGAIQXKIYNKIMHLSXSNLSMGEMXAGQICNLVAIDXNQLMWFFFLCPNLWAMPVQIIVGVILLYYILGVSALIGAAVIILLAPVQYFVAXKLSQAQRSXLEYSNERLKQXNEMLRGIKLLKLYAWENIFRXRVEXXRRKEMXSLRAFAIYXSISIFMNXAIPIAAVLIXFVGHVSFFKEADFSPSVAFASLSLFHILVXPLFLLSSVVRSXVKALVSVQKLSEFLSSAEIREEQCAPHEPXPQGPASKYQAVPLRVVNRKRPAREDCRGLXGPLQSLVPSADGDADNCCVQIMGGYFXWXPDGIPXLSNIXIRIPRGQLXMIVGQVGCGKSSLLLAALGEMQKVSGAVFWSSSLPDSEIGEDPSPEREXAXDLDIRKRGPVAYASQKPWLLNAXVEENIIFESPFNKQRYKMVIEACSLQPDIDILPHGDQXQIGERGINLSGGQRQRISVARALYQHANVVFLDDPFSALDIHLSDHLMQAGILELLRDDKRXVVLVXHKLQYLPHADWIIAMKDGXIQREGXLKDFQRSECQLFEHWKXLMNRQDQELEKEXVXERKAXEPPQGLSRAMSSRDGLLQDEEEEEEEAAESEEDDNLSSMLHQRAEIPWRACAKYLSSAGILLLSLLVFSQLLKHMVLVAIDYWLAKWXDSALXLXPAARNCSLSQECXLDQXVYAMVFXVLCSLGIVLCLVXSVXVEWXGLKVAKRLHRSLLNRIILAPMRFFEXXPLGSILNRFSSDCNXIDQHIPSXLECLSRSXLLCVSALAVISYVXPVFLVALLPLAIVCYFIQKYFRVASRDLQQLDDXXQLPLLSHFAEXVEGLXXIRAFRYEARFQQKLLEYXDSNNIASLFLXAANRWLEVRMEYIGACVVLIAAVXSISNSLHRELSAGLVGLGLXYALMVSNYLNWMVRNLADMELQLGAVKRIHGLLKXEAESYEGLLAPSLIPKNWPDQGKIQIQNLSVRYDSSLKPVLKHVNALIAPGQKIGICGRXGSGKSSFSLAFFRMVDXFEGHIIIDGIDIAKLPLHXLRSRLSIILQDPVLFSGXIRFNLDPERKCSDSXLWEALEIAQLKLVVKALPGGLDAIIXEGGENFSQGQRQLFCLARAFVRKXSIFIMDEAXASIDMAXENILQKVVMXAFADRXVVXIAHRVHXILSADLVIVLKRGAILEFDKPEKLLSRKDSVFASFVRADK

SEQ ID NO: 1264 - protein, 62 aa, Homo sapiens
  MOD_RES (1)..(1): Any amino acid
  MOD_RES (9)..(9): Selenocysteine
  MOD_RES (14)..(14): Selenocysteine
  MOD_RES (21)..(21): Selenocysteine
  MOD_RES (28)..(28): Selenocysteine
  MOD_RES (40)..(40): Selenocysteine
XLPSSAWWXRSKGXSSLMALXSPNCRCXPCAHASPSSCRXPSSSAAPSGPGSLWKGIPHPWV

SEQ ID NO: 1265 - protein, 53 aa, Homo sapiens
  MOD_RES (1)..(1): Any amino acid
  MOD_RES (19)..(19): Selenocysteine
  MOD_RES (21)..(21): Selenocysteine
  MOD_RES (23)..(24): Selenocysteine
  MOD_RES (34)..(34): Selenocysteine
  MOD_RES (43)..(43): Selenocysteine
XPSGPSGMRPGSSRSFSNXQXPXXLLPSSSQLPXDGWKSEWSXSVHVWCSSQR

SEQ ID NO: 1266 - protein, 204 aa, Homo sapiens
  MOD_RES (1)..(1): Any amino acid
  MOD_RES (18)..(19): Selenocysteine
  MOD_RES (30)..(30): Selenocysteine
  MOD_RES (35)..(36): Selenocysteine
  MOD_RES (54)..(54): Selenocysteine
  MOD_RES (65)..(65): Selenocysteine
  MOD_RES (89)..(89): Selenocysteine
  MOD_RES (109)..(109): Selenocysteine
  MOD_RES (144)..(144): Selenocysteine
XQKYFRVASRDLQQLDDXXQLPLLSHFAEXVEGLXXIRAFRYEARFQQKLLEYXDSNNIASLFLXAANRWLEVRMEYIGACVVLIAAVXSISNSLHRELSAGLVGLGLXYALMVSNYLNWMVRNLADMELQLGAVKRIHGLLKXEAESYEGLLARPPAPSLIPKNWPDQGKIQIQNLSVRYDSSLKPVLKHVNALIAPGQKIGI

SEQ ID NO: 1267 - protein, 33 aa, Homo sapiens
  MOD_RES (1)..(1): Any amino acid
  MOD_RES (3)..(3): Selenocysteine
  MOD_RES (20)..(20): Selenocysteine
XRXGSGKSSFSLAFFRMVDXFEGPRPLQRHHPI

SEQ ID NO: 1268 - protein, 1176 aa, Homo sapiens
  MOD_RES (4)..(4): Selenocysteine
  MOD_RES (30)..(30): Selenocysteine
  MOD_RES (39)..(39): Selenocysteine
  MOD_RES (42)..(42): Selenocysteine
  MOD_RES (63)..(63): Selenocysteine
  MOD_RES (72)..(72): Selenocysteine
  MOD_RES (84)..(84): Selenocysteine
  MOD_RES (138)..(138): Selenocysteine
  MOD_RES (147)..(147): Selenocysteine
  MOD_RES (152)..(152): Selenocysteine
  MOD_RES (158)..(158): Selenocysteine
  MOD_RES (184)..(184): Selenocysteine
  MOD_RES (194)..(194): Selenocysteine
  MOD_RES (199)..(199): Selenocysteine
  MOD_RES (217)..(217): Selenocysteine
  MOD_RES (220)..(220): Selenocysteine
  MOD_RES (246)..(246): Selenocysteine
  MOD_RES (253)..(253): Selenocysteine
  MOD_RES (284)..(284): Selenocysteine
  MOD_RES (298)..(298): Selenocysteine
  MOD_RES (302)..(302): Selenocysteine
  MOD_RES (314)..(314): Selenocysteine
  MOD_RES (324)..(324): Selenocysteine
  MOD_RES (328)..(328): Selenocysteine
  MOD_RES (351)..(351): Selenocysteine
  MOD_RES (371)..(371): Selenocysteine
  MOD_RES (392)..(392): Selenocysteine
  MOD_RES (398)..(398): Selenocysteine
  MOD_RES (412)..(412): Selenocysteine
  MOD_RES (430)..(430): Selenocysteine
  MOD_RES (457)..(457): Selenocysteine
  MOD_RES (492)..(492): Selenocysteine
  MOD_RES (497)..(497): Selenocysteine
  MOD_RES (504)..(504): Selenocysteine
  MOD_RES (522)..(522): Selenocysteine
  MOD_RES (528)..(528): Selenocysteine
  MOD_RES (539)..(539): Selenocysteine
  MOD_RES (557)..(558): Selenocysteine
  MOD_RES (563)..(563): Selenocysteine
  MOD_RES (596)..(596): Selenocysteine
  MOD_RES (602)..(602): Selenocysteine
  MOD_RES (608)..(608): Selenocysteine
  MOD_RES (614)..(614): Selenocysteine
  MOD_RES (644)..(644): Selenocysteine
  MOD_RES (646)..(646): Selenocysteine
  MOD_RES (654)..(654): Selenocysteine
  MOD_RES (660)..(660): Selenocysteine
  MOD_RES (680)..(680): Selenocysteine
  MOD_RES (683)..(683): Selenocysteine
  MOD_RES (690)..(690): Selenocysteine
  MOD_RES (713)..(714): Selenocysteine
  MOD_RES (727)..(727): Selenocysteine
  MOD_RES (737)..(737): Selenocysteine
  MOD_RES (742)..(742): Selenocysteine
  MOD_RES (745)..(745): Selenocysteine
  MOD_RES (759)..(759): Selenocysteine
  MOD_RES (794)..(794): Selenocysteine
  MOD_RES (805)..(805): Selenocysteine
  MOD_RES (810)..(811): Selenocysteine
  MOD_RES (819)..(819): Selenocysteine
  MOD_RES (829)..(829): Selenocysteine
  MOD_RES (831)..(831): Selenocysteine
  MOD_RES (850)..(850): Selenocysteine
  MOD_RES (860)..(860): Selenocysteine
  MOD_RES (884)..(884): Selenocysteine
  MOD_RES (886)..(886): Selenocysteine
  MOD_RES (914)..(914): Selenocysteine
  MOD_RES (923)..(923): Selenocysteine
  MOD_RES (975)..(975): Selenocysteine
  MOD_RES (1011)..(1011): Selenocysteine
  MOD_RES (1041)..(1041): Selenocysteine
  MOD_RES (1070)..(1070): Selenocysteine
  MOD_RES (1103)..(1103): Selenocysteine
  MOD_RES (1110)..(1110): Selenocysteine
  MOD_RES (1120)..(1120): Selenocysteine
  MOD_RES (1126)..(1126): Selenocysteine
  MOD_RES (1129)..(1129): Selenocysteine
  MOD_RES (1156)..(1156): Selenocysteine
  MOD_RES (1170)..(1170): Selenocysteine
  MOD_RES (1174)..(1174): Selenocysteine
ISEXLSSKEFLENAYVLAVLLFLALILQRXFLQASYYVXIEXGINLRGALLAMIYNKILRLSXSNLSMGEMXLGQINNLVAIEXNQLMWFLFLCPNLWAMPVQIIMGVILLYNLLGSSALVGAAVIVLLAPIQYFIAXKLAEAQKSXLDYSXERLKKXNEILKGIKLLKLYAWEHIFCKSVEEXRMKELSSLKXFALYXSLSIFMNAAIPIAAVLAXFVXHAYASGNNLKPAEAFASLSLFHILVXPLFLLSXVVRFAVKAIISVQKLNEFLLSDEIGDDSWRXGESSLPFESCKKHXGVVXNGYFSWGSGLAXLSNIDIRIPXGQLXMIVGQVGCGKSSLLLAILGEMQXLEGKVHWSNVNESEPSFEAXRSRNRYSVAYAAQKPWLLNAXVEENIXFGSPFNKQRYKAVXDACSLQPDIDLLPFGDQXEIGERGINLSGGQRQRICVARALYQNXNIVFLDDPFSALDIHLSDHLMQEGILKFLQDDKRXLVLVXHKLQYLXHADWIIAMKDGSVLREGXLKDIQXKDVELYEHWKXLMNRQDQELEKDMEADQXXLERKXLRRAMYSREAKAQMEDEDEEEEEEEDEDDNMSXVMRLRXKMPWKXCWRYLXSGGFFLLILMIFSKLLKHSVIVAIDYWLAXWXSEYSINNXGKADQXYYVAGFSILCGAGIFLCLVXSLXVEWMGLXAAKNLHHNLLNKIILGPIRFFDXXPLGLILNRFSADXNIIDQHIPPXLESLXRSXLLCLSAIGMISYAXPVFLVALLPLGVAFYFIQKYFRVASKDLQELDDSXQLPLLCHFSEXAEGLXXIRAFRHEXRFKQRMLELXDXNNIAYLFLSAANRWLEVRXDYLGACIVLXASIASISGSSNSGLVGLGLLYALXIXNYLNWVVRNLADLEVQMGAVKKVNSFLXMESENYEGXMDPSQVPEHWPQEGEIKIHDLCVRYENNLKPVLKHVKAYIKPGQKVGICGRXGSGKSSLSLAFFRMVDIFDGKIVIDGIDISKLPLHXLRSRLSIILQDPILFSGSIRFNLDPECKCXDDRLWEALEIAQLKNMVKSLPGGLDAVVXEGGENFSVGQRQLFCLARAFVRKSSILIMDEAXASIDMAXENILQKVVMXAFADRXVVXIAHRVSSIMDAGLVLVFSEGILVECDXVPNLLAHKNGLFSXLVMXNK

SEQ ID NO: 1269 - protein, 1549 aa, Homo sapiens
  MOD_RES (41)..(41): Selenocysteine
  MOD_RES (62)..(62): Selenocysteine
  MOD_RES (76)..(76): Selenocysteine
  MOD_RES (115)..(117): Selenocysteine
  MOD_RES (127)..(127): Selenocysteine
  MOD_RES (147)..(147): Selenocysteine
  MOD_RES (149)..(149): Selenocysteine
  MOD_RES (170)..(170): Selenocysteine
  MOD_RES (227)..(227): Selenocysteine
  MOD_RES (233)..(233): Selenocysteine
  MOD_RES (259)..(259): Selenocysteine
  MOD_RES (282)..(282): Selenocysteine
  MOD_RES (302)..(302): Selenocysteine
  MOD_RES (328)..(328): Selenocysteine
  MOD_RES (332)..(332): Selenocysteine
  MOD_RES (335)..(336): Selenocysteine
  MOD_RES (341)..(341): Selenocysteine
  MOD_RES (367)..(367): Selenocysteine
  MOD_RES (376)..(376): Selenocysteine
  MOD_RES (379)..(379): Selenocysteine
  MOD_RES (400)..(400): Selenocysteine
  MOD_RES (409)..(409): Selenocysteine
  MOD_RES (421)..(421): Selenocysteine
  MOD_RES (475)..(475): Selenocysteine
  MOD_RES (484)..(484): Selenocysteine
  MOD_RES (489)..(489): Selenocysteine
  MOD_RES (495)..(495): Selenocysteine
  MOD_RES (521)..(521): Selenocysteine
  MOD_RES (531)..(531): Selenocysteine
  MOD_RES (536)..(536): Selenocysteine
  MOD_RES (554)..(554): Selenocysteine
  MOD_RES (557)..(557): Selenocysteine
  MOD_RES (583)..(583): Selenocysteine
  MOD_RES (590)..(590): Selenocysteine
  MOD_RES (621)..(621): Selenocysteine
  MOD_RES (635)..(635): Selenocysteine
  MOD_RES (641)..(641): Selenocysteine
  MOD_RES (659)..(659): Selenocysteine
  MOD_RES (667)..(667): Selenocysteine
  MOD_RES (675)..(675): Selenocysteine
  MOD_RES (687)..(687): Selenocysteine
  MOD_RES (697)..(697): Selenocysteine
  MOD_RES (701)..(701): Selenocysteine
  MOD_RES (724)..(724): Selenocysteine
  MOD_RES (744)..(744): Selenocysteine
  MOD_RES (765)..(765): Selenocysteine
  MOD_RES (771)..(771): Selenocysteine
  MOD_RES (785)..(785): Selenocysteine
  MOD_RES (803)..(803): Selenocysteine
  MOD_RES (830)..(830): Selenocysteine
  MOD_RES (865)..(865): Selenocysteine
  MOD_RES (870)..(870): Selenocysteine
  MOD_RES (877)..(877): Selenocysteine
  MOD_RES (895)..(895): Selenocysteine
  MOD_RES (901)..(901): Selenocysteine
  MOD_RES (912)..(912): Selenocysteine
  MOD_RES (930)..(931): Selenocysteine
  MOD_RES (936)..(936): Selenocysteine
  MOD_RES (969)..(969): Selenocysteine
  MOD_RES (975)..(975): Selenocysteine
  MOD_RES (981)..(981): Selenocysteine
  MOD_RES (987)..(987): Selenocysteine
  MOD_RES (1017)..(1017): Selenocysteine
  MOD_RES (1019)..(1019): Selenocysteine
  MOD_RES (1027)..(1027): Selenocysteine
  MOD_RES (1033)..(1033): Selenocysteine
  MOD_RES (1053)..(1053): Selenocysteine
  MOD_RES (1056)..(1056): Selenocysteine
  MOD_RES (1063)..(1063): Selenocysteine
  MOD_RES (1086)..(1087): Selenocysteine
  MOD_RES (1100)..(1100): Selenocysteine
  MOD_RES (1110)..(1110): Selenocysteine
  MOD_RES (1115)..(1115): Selenocysteine
  MOD_RES (1118)..(1118): Selenocysteine
  MOD_RES (1132)..(1132): Selenocysteine
  MOD_RES (1167)..(1167): Selenocysteine
  MOD_RES (1178)..(1178): Selenocysteine
  MOD_RES (1183)..(1184): Selenocysteine
  MOD_RES (1192)..(1192): Selenocysteine
  MOD_RES (1202)..(1202): Selenocysteine
  MOD_RES (1204)..(1204): Selenocysteine
  MOD_RES (1223)..(1223): Selenocysteine
  MOD_RES (1233)..(1233): Selenocysteine
  MOD_RES (1257)..(1257): Selenocysteine
  MOD_RES (1259)..(1259): Selenocysteine
  MOD_RES (1287)..(1287): Selenocysteine
  MOD_RES (1296)..(1296): Selenocysteine
  MOD_RES (1348)..(1348): Selenocysteine
  MOD_RES (1384)..(1384): Selenocysteine
  MOD_RES (1414)..(1414): Selenocysteine
  MOD_RES (1443)..(1443): Selenocysteine
  MOD_RES (1476)..(1476): Selenocysteine
  MOD_RES (1483)..(1483): Selenocysteine
  MOD_RES (1493)..(1493): Selenocysteine
  MOD_RES (1499)..(1499): Selenocysteine
  MOD_RES (1502)..(1502): Selenocysteine
  MOD_RES (1509)..(1509): Selenocysteine
  MOD_RES (1512)..(1512): Selenocysteine
  MOD_RES (1529)..(1529): Selenocysteine
MSLSFCGNNISSYNINDGVLQNSCFVDALNLVPHVFLLFIXFPILFIGWGSQSSKVQIHHNXWLHFPGHNLRWILXFALLFVHVCEIAEGIVSDSRRESRHLHLFMPAVMGFVAXXXSIVYYHNIEXSNFPKLLLALFLYWVMAFIXKXIKLVKYCQSGLDISNLRFCIXGMMVILNGLLMAVEINVIRVRRYVFFMNPQKVKPPEDLQDLGVRFLQPFVNLLSKAXYWWMNXLIISAHKKPIDLKAIGKLPIAMRAVXNYVCLKDAYEEQKKKVADHPNRXPSIWLAMYRAFGRPILLSSXFRYLADLLGFAGPLCISGIVQRVNEXQNGXNNXXGISEXLSSKEFLENAYVLAVLLFLALILQRXFLQASYYVXIEXGINLRGALLAMIYNKILRLSXSNLSMGEMXLGQINNLVAIEXNQLMWFLFLCPNLWAMPVQIIMGVILLYNLLGSSALVGAAVIVLLAPIQYFIAXKLAEAQKSXLDYSXERLKKXNEILKGIKLLKLYAWEHIFCKSVEEXRMKELSSLKXFALYXSLSIFMNAAIPIAAVLAXFVXHAYASGNNLKPAEAFASLSLFHILVXPLFLLSXVVRFAVKAIISVQKLNEFLLSDEIGDDSWRXGESSLPFESCKKHXGVQPKXINRKQPGRYHLDSYEQSXRRLRPAEXEDIAIKVXNGYFSWGSGLAXLSNIDIRIPXGQLXMIVGQVGCGKSSLLLAILGEMQXLEGKVHWSNVNESEPSFEAXRSRNRYSVAYAAQKPWLLNAXVEENIXFGSPFNKQRYKAVXDACSLQPDIDLLPFGDQXEIGERGINLSGGQRQRICVARALYQNXNIVFLDDPFSALDIHLSDHLMQEGILKFLQDDKRXLVLVXHKLQYLXHADWIIAMKDGSVLREGXLKDIQXKDVELYEHWKXLMNRQDQELEKDMEADQXXLERKXLRRAMYSREAKAQMEDEDEEEEEEEDEDDNMSXVMRLRXKMPWKXCWRYLXSGGFFLLILMIFSKLLKHSVIVAIDYWLAXWXSEYSINNXGKADQXYYVAGFSILCGAGIFLCLVXSLXVEWMGLXAAKNLHHNLLNKIILGPIRFFDXXPLGLILNRFSADXNIIDQHIPPXLESLXRSXLLCLSAIGMISYAXPVFLVALLPLGVAFYFIQKYFRVASKDLQELDDSXQLPLLCHFSEXAEGLXXIRAFRHEXRFKQRMLELXDXNNIAYLFLSAANRWLEVRXDYLGACIVLXASIASISGSSNSGLVGLGLLYALXIXNYLNWVVRNLADLEVQMGAVKKVNSFLXMESENYEGXMDPSQVPEHWPQEGEIKIHDLCVRYENNLKPVLKHVKAYIKPGQKVGICGRXGSGKSSLSLAFFRMVDIFDGKIVIDGIDISKLPLHXLRSRLSIILQDPILFSGSIRFNLDPECKCXDDRLWEALEIAQLKNMVKSLPGGLDAVVXEGGENFSVGQRQLFCLARAFVRKSSILIMDEAXASIDMAXENILQKVVMXAFADRXVVXIAHRVHXILXADLVIVMKRGNILEYDXPESLLAQENGVFASFVRADM

SEQ ID NO: 1270 - protein, 1549 aa, Homo sapiens
  MOD_RES (41)..(41): Selenocysteine
  MOD_RES (62)..(62): Selenocysteine
  MOD_RES (76)..(76): Selenocysteine
  MOD_RES (115)..(117): Selenocysteine
  MOD_RES (127)..(127): Selenocysteine
  MOD_RES (147)..(147): Selenocysteine
  MOD_RES (149)..(149): Selenocysteine
  MOD_RES (170)..(170): Selenocysteine
  MOD_RES (227)..(227): Selenocysteine
  MOD_RES (233)..(233): Selenocysteine
  MOD_RES (259)..(259): Selenocysteine
  MOD_RES (282)..(282): Selenocysteine
  MOD_RES (302)..(302): Selenocysteine
  MOD_RES (328)..(328): Selenocysteine
  MOD_RES (332)..(332): Selenocysteine
  MOD_RES (335)..(336): Selenocysteine
  MOD_RES (341)..(341): Selenocysteine
  MOD_RES (367)..(367): Selenocysteine
  MOD_RES (376)..(376): Selenocysteine
  MOD_RES (379)..(379): Selenocysteine
  MOD_RES (400)..(400): Selenocysteine
  MOD_RES (409)..(409): Selenocysteine
  MOD_RES (421)..(421): Selenocysteine
  MOD_RES (475)..(475): Selenocysteine
  MOD_RES (484)..(484): Selenocysteine
  MOD_RES (489)..(489): Selenocysteine
  MOD_RES (495)..(495): Selenocysteine
  MOD_RES (521)..(521): Selenocysteine
  MOD_RES (531)..(531): Selenocysteine
  MOD_RES (536)..(536): Selenocysteine
  MOD_RES (554)..(554): Selenocysteine
  MOD_RES (557)..(557): Selenocysteine
  MOD_RES (583)..(583): Selenocysteine
  MOD_RES (590)..(590): Selenocysteine
  MOD_RES (621)..(621): Selenocysteine
  MOD_RES (635)..(635): Selenocysteine
  MOD_RES (641)..(641): Selenocysteine
  MOD_RES (659)..(659): Selenocysteine
  MOD_RES (667)..(667): Selenocysteine
  MOD_RES (675)..(675): Selenocysteine
  MOD_RES (687)..(687): Selenocysteine
  MOD_RES (697)..(697): Selenocysteine
  MOD_RES (701)..(701): Selenocysteine
  MOD_RES (724)..(724): Selenocysteine
  MOD_RES (744)..(744): Selenocysteine
  MOD_RES (765)..(765): Selenocysteine
  MOD_RES (771)..(771): Selenocysteine
  MOD_RES (785)..(785): Selenocysteine
  MOD_RES (803)..(803): Selenocysteine
  MOD_RES (830)..(830): Selenocysteine
  MOD_RES (865)..(865): Selenocysteine
  MOD_RES (870)..(870): Selenocysteine
  MOD_RES (877)..(877): Selenocysteine
  MOD_RES (895)..(895): Selenocysteine
  MOD_RES (901)..(901): Selenocysteine
  MOD_RES (912)..(912): Selenocysteine
  MOD_RES (930)..(931): Selenocysteine
  MOD_RES (936)..(936): Selenocysteine
  MOD_RES (969)..(969): Selenocysteine
  MOD_RES (975)..(975): Selenocysteine
  MOD_RES (981)..(981): Selenocysteine
  MOD_RES (987)..(987): Selenocysteine
  MOD_RES (1017)..(1017): Selenocysteine
  MOD_RES (1019)..(1019): Selenocysteine
  MOD_RES (1027)..(1027): Selenocysteine
  MOD_RES (1033)..(1033): Selenocysteine
  MOD_RES (1053)..(1053): Selenocysteine
  MOD_RES (1056)..(1056): Selenocysteine
  MOD_RES (1063)..(1063): Selenocysteine
  MOD_RES (1086)..(1087): Selenocysteine
  MOD_RES (1100)..(1100): Selenocysteine
  MOD_RES (1110)..(1110): Selenocysteine
  MOD_RES (1115)..(1115): Selenocysteine
  MOD_RES (1118)..(1118): Selenocysteine
  MOD_RES (1132)..(1132): Selenocysteine
  MOD_RES (1167)..(1167): Selenocysteine
  MOD_RES (1178)..(1178): Selenocysteine
  MOD_RES (1183)..(1184): Selenocysteine
  MOD_RES (1192)..(1192): Selenocysteine
  MOD_RES (1202)..(1202): Selenocysteine
  MOD_RES (1204)..(1204): Selenocysteine
  MOD_RES (1223)..(1223): Selenocysteine
  MOD_RES (1233)..(1233): Selenocysteine
  MOD_RES (1257)..(1257): Selenocysteine
  MOD_RES (1259)..(1259): Selenocysteine
  MOD_RES (1287)..(1287): Selenocysteine
  MOD_RES (1296)..(1296): Selenocysteine
  MOD_RES (1348)..(1348): Selenocysteine
  MOD_RES (1384)..(1384): Selenocysteine
  MOD_RES (1414)..(1414): Selenocysteine
  MOD_RES (1443)..(1443): Selenocysteine
  MOD_RES (1476)..(1476): Selenocysteine
  MOD_RES (1483)..(1483): Selenocysteine
  MOD_RES (1493)..(1493): Selenocysteine
  MOD_RES (1499)..(1499): Selenocysteine
  MOD_RES (1502)..(1502): Selenocysteine
  MOD_RES (1529)..(1529): Selenocysteine
  MOD_RES (1543)..(1543): Selenocysteine
  MOD_RES (1547)..(1547): Selenocysteine
MSLSFCGNNISSYNINDGVLQNSCFVDALNLVPHVFLLFIXFPILFIGWGSQSSKVQIHHNXWLHFPGHNLRWILXFALLFVHVCEIAEGIVSDSRRESRHLHLFMPAVMGFVAXXXSIVYYHNIEXSNFPKLLLALFLYWVMAFIXKXIKLVKYCQSGLDISNLRFCIXGMMVILNGLLMAVEINVIRVRRYVFFMNPQKVKPPEDLQDLGVRFLQPFVNLLSKAXYWWMNXLIISAHKKPIDLKAIGKLPIAMRAVXNYVCLKDAYEEQKKKVADHPNRXPSIWLAMYRAFGRPILLSSXFRYLADLLGFAGPLCISGIVQRVNEXQNGXNNXXGISEXLSSKEFLENAYVLAVLLFLALILQRXFLQASYYVXIEXGINLRGALLAMIYNKILRLSXSNLSMGEMXLGQINNLVAIEXNQLMWFLFLCPNLWAMPVQIIMGVILLYNLLGSSALVGAAVIVLLAPIQYFIAXKLAEAQKSXLDYSXERLKKXNEILKGIKLLKLYAWEHIFCKSVEEXRMKELSSLKXFALYXSLSIFMNAAIPIAAVLAXFVXHAYASGNNLKPAEAFASLSLFHILVXPLFLLSXVVRFAVKAIISVQKLNEFLLSDEIGDDSWRXGESSLPFESCKKHXGVQPKXINRKQPGRYHLDSYEQSXRRLRPAEXEDIAIKVXNGYFSWGSGLAXLSNIDIRIPXGQLXMIVGQVGCGKSSLLLAILGEMQXLEGKVHWSNVNESEPSFEAXRSRNRYSVAYAAQKPWLLNAXVEENIXFGSPFNKQRYKAVXDACSLQPDIDLLPFGDQXEIGERGINLSGGQRQRICVARALYQNXNIVFLDDPFSALDIHLSDHLMQEGILKFLQDDKRXLVLVXHKLQYLXHADWIIAMKDGSVLREGXLKDIQXKDVELYEHWKXLMNRQDQELEKDMEADQXXLERKXLRRAMYSREAKAQMEDEDEEEEEEEDEDDNMSXVMRLRXKMPWKXCWRYLXSGGFFLLILMIFSKLLKHSVIVAIDYWLAXWXSEYSINNXGKADQXYYVAGFSILCGAGIFLCLVXSLXVEWMGLXAAKNLHHNLLNKIILGPIRFFDXXPLGLILNRFSADXNIIDQHIPPXLESLXRSXLLCLSAIGMISYAXPVFLVALLPLGVAFYFIQKYFRVASKDLQELDDSXQLPLLCHFSEXAEGLXXIRAFRHEXRFKQRMLELXDXNNIAYLFLSAANRWLEVRXDYLGACIVLXASIASISGSSNSGLVGLGLLYALXIXNYLNWVVRNLADLEVQMGAVKKVNSFLXMESENYEGXMDPSQVPEHWPQEGEIKIHDLCVRYENNLKPVLKHVKAYIKPGQKVGICGRXGSGKSSLSLAFFRMVDIFDGKIVIDGIDISKLPLHXLRSRLSIILQDPILFSGSIRFNLDPECKCXDDRLWEALEIAQLKNMVKSLPGGLDAVVXEGGENFSVGQRQLFCLARAFVRKSSILIMDEAXASIDMAXENILQKVVMXAFADRXVVXIAHRVSSIMDAGLVLVFSEGILVECDXVPNLLAHKNGLFSXLVMXNK

SEQ ID NO: 1271 - protein, 149 aa, Homo sapiens
  MOD_RES (41)..(41): Selenocysteine
  MOD_RES (62)..(62): Selenocysteine
  MOD_RES (76)..(76): Selenocysteine
  MOD_RES (115)..(117): Selenocysteine
  MOD_RES (127)..(127): Selenocysteine
MSLSFCGNNISSYNINDGVLQNSCFVDALNLVPHVFLLFIXFPILFIGWGSQSSKVQIHHNXWLHFPGHNLRWILXFALLFVHVCEIAEGIVSDSRRESRHLHLFMPAVMGFVAXXXSIVYYHNIEXSNFPKLLLGFSHHESKSCYQHS

SEQ ID NO: 1272 - protein, 170 aa, Homo sapiens
  MOD_RES (41)..(41): Selenocysteine
  MOD_RES (62)..(62): Selenocysteine
  MOD_RES (76)..(76): Selenocysteine
  MOD_RES (115)..(117): Selenocysteine
  MOD_RES (127)..(127): Selenocysteine
  MOD_RES (157)..(157): Selenocysteine
  MOD_RES (166)..(166): Selenocysteine
  MOD_RES (169)..(169): Selenocysteine
MSLSFCGNNISSYNINDGVLQNSCFVDALNLVPHVFLLFIXFPILFIGWGSQSSKVQIHHNXWLHFPGHNLRWILXFALLFVHVCEIAEGIVSDSRRESRHLHLFMPAVMGFVAXXXSIVYYHNIEXSNFPKLLLVPGVSVSGLESKDIFPRFKPFXDAVGMPHFXRIXM

SEQ ID NO: 1273 - protein, 56 aa, Homo sapiens
  MOD_RES (7)..(7): Selenocysteine
  MOD_RES (39)..(39): Selenocysteine
MNAMLEXPELPAVFDGVKLAAVAAVLYVIVRCLNLKSPXAPPDLYFQDSGLSRFLL

SEQ ID NO: 1274 - protein, 123 aa, Homo sapiens
  MOD_RES (7)..(7): Selenocysteine
  MOD_RES (39)..(39): Selenocysteine
  MOD_RES (63)..(63): Selenocysteine
  MOD_RES (80)..(80): Selenocysteine
  MOD_RES (102)..(102): Selenocysteine
  MOD_RES (108)..(108): Selenocysteine
  MOD_RES (110)..(110): Selenocysteine
MNAMLEXPELPAVFDGVKLAAVAAVLYVIVRCLNLKSPXAPPDLYFQDSGLSRFLLKSCPLLXKEYIPPLIWGKSGHIQXALYGKMGRVRSPHPYGHRKFIXMSDGAXSXFDLFEPLAEHCVG

SEQ ID NO: 1275 - protein, 131 aa, Homo sapiens
  MOD_RES (7)..(7): Selenocysteine
  MOD_RES (39)..(39): Selenocysteine
  MOD_RES (63)..(63): Selenocysteine
  MOD_RES (80)..(80): Selenocysteine
  MOD_RES (102)..(102): Selenocysteine
  MOD_RES (108)..(108): Selenocysteine
  MOD_RES (110)..(110): Selenocysteine
  MOD_RES (127)..(127): Selenocysteine
MNAMLEXPELPAVFDGVKLAAVAAVLYVIVRCLNLKSPXAPPDLYFQDSGLSRFLLKSCPLLXKEYIPPLIWGKSGHIQXALYGKMGRVRSPHPYGHRKFIXMSDGAXSXFDLFEPLAEHCVGDDIXMVIC

SEQ ID NO: 1276 - protein, 425 aa, Homo sapiens
  MOD_RES (7)..(7): Selenocysteine
  MOD_RES (39)..(39): Selenocysteine
  MOD_RES (63)..(63): Selenocysteine
  MOD_RES (80)..(80): Selenocysteine
  MOD_RES (102)..(102): Selenocysteine
  MOD_RES (108)..(108): Selenocysteine
  MOD_RES (110)..(110): Selenocysteine
  MOD_RES (127)..(127): Selenocysteine
  MOD_RES (145)..(145): Selenocysteine
  MOD_RES (172)..(172): Selenocysteine
  MOD_RES (178)..(178): Selenocysteine
  MOD_RES (182)..(182): Selenocysteine
  MOD_RES (195)..(195): Selenocysteine
  MOD_RES (199)..(199): Selenocysteine
  MOD_RES (220)..(220): Selenocysteine
  MOD_RES (245)..(245): Selenocysteine
  MOD_RES (289)..(289): Selenocysteine
  MOD_RES (296)..(296): Selenocysteine
  MOD_RES (298)..(298): Selenocysteine
  MOD_RES (354)..(354): Selenocysteine
  MOD_RES (391)..(391): Selenocysteine
  MOD_RES (417)..(417): Selenocysteine
MNAMLEXPELPAVFDGVKLAAVAAVLYVIVRCLNLKSPXAPPDLYFQDSGLSRFLLKSCPLLXKEYIPPLIWGKSGHIQXALYGKMGRVRSPHPYGHRKFIXMSDGAXSXFDLFEPLAEHCVGDDIXMVICPGIANHSEKQYIRXFVDYAQKNGYRCAVLNHLGALPNIELXSPRMFXYGCXWEFGAMVNYIKKXYPLXQLVVVGFSLGGNIVCKYLGEXQANQEKVLCCVSVCQGYSALRAQEXFMQWDQCRRFYNFLMADNMKKIILSHRQALFGDHVKKPQSLEDXDLSRLYXAXSLMQIDDNVMRKFHGYNSLKEYYEEESCMRYLHRIYVPLMLVNAADDPLVHESLLXIPKSLSEKRENVMFVLPLHGGHLGFFEGSVLFPEPLXWMDKLVVEYANAICQWERNKLQCSDXEQVEADLE

SEQ ID NO: 1277 - protein, 51 aa, Homo sapiens
  MOD_RES (15)..(15): Selenocysteine
MDLDVVNMFVIAGGXLAIPILAFVASFLLWPSALIRIYYCMSSVKDVAALS

SEQ ID NO: 1278 - protein, 173 aa, Homo sapiens
  MOD_RES (15)..(15): Selenocysteine
  MOD_RES (45)..(45): Selenocysteine
  MOD_RES (111)..(112): Selenocysteine
  MOD_RES (147)..(147): Selenocysteine
MDLDVVNMFVIAGGXLAIPILAFVASFLLWPSALIRIYYWYWRRXLGMQVRYVHHEDYQFCYSFRGRPGHKPSILMLHGFSAHKDMWLSVVKFLPKNLHLVCVDMPGHEGXXRSSLDDLSIDGQVKRIHQFVECLKLNKKPFHLVGXSMGGQVAGVYAAYYPSDVSSLCLVCP

SEQ ID NO: 1279 - protein, 225 aa, Homo sapiens
  MOD_RES (15)..(15): Selenocysteine
  MOD_RES (45)..(45): Selenocysteine
  MOD_RES (111)..(112): Selenocysteine
  MOD_RES (147)..(147): Selenocysteine
  MOD_RES (180)..(180): Selenocysteine
  MOD_RES (206)..(206): Selenocysteine
MDLDVVNMFVIAGGXLAIPILAFVASFLLWPSALIRIYYWYWRRXLGMQVRYVHHEDYQFCYSFRGRPGHKPSILMLHGFSAHKDMWLSVVKFLPKNLHLVCVDMPGHEGXXRSSLDDLSIDGQVKRIHQFVECLKLNKKPFHLVGXSMGGQVAGVYAAYYPSDVSSLCLVCPAGLQYSXDNQFVQRLKELQGSAAVEKIPLIPSXPEEMSEMLQLCSYVRFKVP

SEQ ID NO: 1280 - protein, 337 aa, Homo sapiens
  MOD_RES (15)..(15): Selenocysteine
  MOD_RES (45)..(45): Selenocysteine
  MOD_RES (111)..(112): Selenocysteine
  MOD_RES (147)..(147): Selenocysteine
  MOD_RES (180)..(180): Selenocysteine
  MOD_RES (206)..(206): Selenocysteine
  MOD_RES (270)..(270): Selenocysteine
  MOD_RES (316)..(316): Selenocysteine
  MOD_RES (330)..(330): Selenocysteine
MDLDVVNMFVIAGGXLAIPILAFVASFLLWPSALIRIYYWYWRRXLGMQVRYVHHEDYQFCYSFRGRPGHKPSILMLHGFSAHKDMWLSVVKFLPKNLHLVCVDMPGHEGXXRSSLDDLSIDGQVKRIHQFVECLKLNKKPFHLVGXSMGGQVAGVYAAYYPSDVSSLCLVCPAGLQYSXDNQFVQRLKELQGSAAVEKIPLIPSXPEEMSEMLQLCSYVRFKVPQQILQGLVDVRIPHNNFYRKLFLEIVSEKSRYSLHQNMDKIKVPXQIIWGKQDQVLDVSGADMLAKSIANCQVELLENCGHSVVMERPRKXAKLIIDFLASVHNXDNNKKLD

SEQ ID NO: 1281 - protein, 329 aa, Homo sapiens
  MOD_RES (27)..(27): Selenocysteine
  MOD_RES (41)..(41): Selenocysteine
  MOD_RES (50)..(50): Selenocysteine
  MOD_RES (54)..(55): Selenocysteine
  MOD_RES (104)..(104): Selenocysteine
  MOD_RES (106)..(106): Selenocysteine
  MOD_RES (110)..(110): Selenocysteine
  MOD_RES (114)..(114): Selenocysteine
  MOD_RES (127)..(127): Selenocysteine
  MOD_RES (132)..(132): Selenocysteine
  MOD_RES (136)..(136): Selenocysteine
  MOD_RES (144)..(144): Selenocysteine
  MOD_RES (151)..(151): Selenocysteine
  MOD_RES (165)..(165): Selenocysteine
  MOD_RES (174)..(174): Selenocysteine
  MOD_RES (201)..(201): Selenocysteine
  MOD_RES (206)..(206): Selenocysteine
  MOD_RES (215)..(215): Selenocysteine
  MOD_RES (279)..(279): Selenocysteine
  MOD_RES (313)..(313): Selenocysteine
  MOD_RES (328)..(328): Selenocysteine
MAELQMLLEEEIPSGKRALIESYQNLXRVADYCENNYIQAXDKRKALEEXKAYXXQSLASVAYQINALANNVLQLLDIQASQLRRMESSINHISQHGNNQPARXGXLSRXNPPXQKPPSPPMSGRGXLGRNXPYKXLEPVKPPXVPNDYMXSPARLGSQHSPGRXASLNQRPRXHSGSSGGSGSRENSGSSSIGIPIAVPXPSPPXIGPVADSPXPPPPPPPDDIPMFDDSPPPPPPPPVDYEDEEAAVVQYNDPYADGDPAWAPKNYIEKVVAIYDYXKDKDDELSFMEGAIIYVIKKNDDGWYEGVCNRVXGLFPGNYVESIMHYXD

SEQ ID NO: 1282 - protein, 446 aa, Homo sapiens
  MOD_RES (27)..(27): Selenocysteine
  MOD_RES (41)..(41): Selenocysteine
  MOD_RES (50)..(50): Selenocysteine
  MOD_RES (54)..(55): Selenocysteine
  MOD_RES (96)..(96): Selenocysteine
  MOD_RES (113)..(114): Selenocysteine
  MOD_RES (118)..(118): Selenocysteine
  MOD_RES (121)..(121): Selenocysteine
  MOD_RES (144)..(144): Selenocysteine
  MOD_RES (163)..(163): Selenocysteine
  MOD_RES (165)..(165): Selenocysteine
  MOD_RES (169)..(169): Selenocysteine
  MOD_RES (173)..(173): Selenocysteine
  MOD_RES (186)..(186): Selenocysteine
  MOD_RES (191)..(191): Selenocysteine
  MOD_RES (195)..(195): Selenocysteine
  MOD_RES (203)..(203): Selenocysteine
  MOD_RES (210)..(210): Selenocysteine
  MOD_RES (224)..(224): Selenocysteine
  MOD_RES (233)..(233): Selenocysteine
  MOD_RES (260)..(260): Selenocysteine
  MOD_RES (265)..(265): Selenocysteine
  MOD_RES (280)..(280): Selenocysteine
  MOD_RES (282)..(282): Selenocysteine
  MOD_RES (291)..(292): Selenocysteine
  MOD_RES (295)..(295): Selenocysteine
  MOD_RES (303)..(303): Selenocysteine
  MOD_RES (307)..(307): Selenocysteine
  MOD_RES (332)..(332): Selenocysteine
  MOD_RES (396)..(396): Selenocysteine
  MOD_RES (430)..(430): Selenocysteine
  MOD_RES (445)..(445): Selenocysteine
MAELQMLLEEEIPSGKRALIESYQNLXRVADYCENNYIQAXDKRKALEEXKAYXXQSLASVAYQINALANNVLQLLDIQASQLRRMESSINHISQXVDIHKEKVARREIGILXXNKNXSRXHKIIAPANMERPVRYIRKPIDYXVLDDVGHGVKHGNNQPARXGXLSRXNPPXQKPPSPPMSGRGXLGRNXPYKXLEPVKPPXVPNDYMXSPARLGSQHSPGRXASLNQRPRXHSGSSGGSGSRENSGSSSIGIPIAVPXPSPPXIGPAPGSAPGSQYGXMXRQISRHNSXXSSXSSGGYRRXPSVXAQFSAQPHVNGGPLYSQNSIADSPXPPPPPPPDDIPMFDDSPPPPPPPPVDYEDEEAAVVQYNDPYADGDPAWAPKNYIEKVVAIYDYXKDKDDELSFMEGAIIYVIKKNDDGWYEGVCNRVXGLFPGNYVESIMHYXD

SEQ ID NO: 1283 - protein, 475 aa, Homo sapiens
  MOD_RES (27)..(27): Selenocysteine
  MOD_RES (41)..(41): Selenocysteine
  MOD_RES (50)..(50): Selenocysteine
  MOD_RES (54)..(55): Selenocysteine
  MOD_RES (96)..(96): Selenocysteine
  MOD_RES (113)..(114): Selenocysteine
  MOD_RES (118)..(118): Selenocysteine
  MOD_RES (121)..(121): Selenocysteine
  MOD_RES (144)..(144): Selenocysteine
  MOD_RES (163)..(163): Selenocysteine
  MOD_RES (165)..(165): Selenocysteine
  MOD_RES (169)..(169): Selenocysteine
  MOD_RES (173)..(173): Selenocysteine
  MOD_RES (186)..(186): Selenocysteine
  MOD_RES (191)..(191): Selenocysteine
  MOD_RES (195)..(195): Selenocysteine
  MOD_RES (203)..(203): Selenocysteine
  MOD_RES (210)..(210): Selenocysteine
  MOD_RES (224)..(224): Selenocysteine
  MOD_RES (233)..(233): Selenocysteine
  MOD_RES (260)..(260): Selenocysteine
  MOD_RES (265)..(265): Selenocysteine
  MOD_RES (280)..(280): Selenocysteine
  MOD_RES (282)..(282): Selenocysteine
  MOD_RES (291)..(292): Selenocysteine
  MOD_RES (295)..(295): Selenocysteine
  MOD_RES (303)..(303): Selenocysteine
  MOD_RES (307)..(307): Selenocysteine
  MOD_RES (340)..(340): Selenocysteine
  MOD_RES (346)..(346): Selenocysteine
  MOD_RES (361)..(361): Selenocysteine
  MOD_RES (425)..(425): Selenocysteine
  MOD_RES (459)..(459): Selenocysteine
  MOD_RES (474)..(474): Selenocysteine
MAELQMLLEEEIPSGKRALIESYQNLXRVADYCENNYIQAXDKRKALEEXKAYXXQSLASVAYQINALANNVLQLLDIQASQLRRMESSINHISQXVDIHKEKVARREIGILXXNKNXSRXHKIIAPANMERPVRYIRKPIDYXVLDDVGHGVKHGNNQPARXGXLSRXNPPXQKPPSPPMSGRGXLGRNXPYKXLEPVKPPXVPNDYMXSPARLGSQHSPGRXASLNQRPRXHSGSSGGSGSRENSGSSSIGIPIAVPXPSPPXIGPAPGSAPGSQYGXMXRQISRHNSXXSSXSSGGYRRXPSVXAQFSAQPHVNGGPLYSQNSISIAPPPPPMPQLXPQIPLXGFVARVQENIADSPXPPPPPPPDDIPMFDDSPPPPPPPPVDYEDEEAAVVQYNDPYADGDPAWAPKNYIEKVVAIYDYXKDKDDELSFMEGAIIYVIKKNDDGWYEGVCNRVXGLFPGNYVESIMHYXD

SEQ ID NO: 1284 - protein, 476 aa, Homo sapiens
  MOD_RES (27)..(27): Selenocysteine
  MOD_RES (41)..(41): Selenocysteine
  MOD_RES (50)..(50): Selenocysteine
  MOD_RES (54)..(55): Selenocysteine
  MOD_RES (96)..(96): Selenocysteine
  MOD_RES (113)..(114): Selenocysteine
  MOD_RES (118)..(118): Selenocysteine
  MOD_RES (121)..(121): Selenocysteine
  MOD_RES (144)..(144): Selenocysteine
  MOD_RES (163)..(163): Selenocysteine
  MOD_RES (165)..(165): Selenocysteine
  MOD_RES (169)..(169): Selenocysteine
  MOD_RES (173)..(173): Selenocysteine
  MOD_RES (186)..(186): Selenocysteine
  MOD_RES (191)..(191): Selenocysteine
  MOD_RES (195)..(195): Selenocysteine
  MOD_RES (203)..(203): Selenocysteine
  MOD_RES (210)..(210): Selenocysteine
  MOD_RES (224)..(224): Selenocysteine
  MOD_RES (233)..(233): Selenocysteine
  MOD_RES (260)..(260): Selenocysteine
  MOD_RES (265)..(265): Selenocysteine
  MOD_RES (281)..(281): Selenocysteine
  MOD_RES (283)..(283): Selenocysteine
  MOD_RES (292)..(293): Selenocysteine
  MOD_RES (296)..(296): Selenocysteine
  MOD_RES (304)..(304): Selenocysteine
  MOD_RES (308)..(308): Selenocysteine
  MOD_RES (341)..(341): Selenocysteine
  MOD_RES (347)..(347): Selenocysteine
  MOD_RES (362)..(362): Selenocysteine
  MOD_RES (426)..(426): Selenocysteine
  MOD_RES (460)..(460): Selenocysteine
  MOD_RES (475)..(475): Selenocysteine
MAELQMLLEEEIPSGKRALIESYQNLXRVADYCENNYIQAXDKRKALEEXKAYXXQSLASVAYQINALANNVLQLLDIQASQLRRMESSINHISQXVDIHKEKVARREIGILXXNKNXSRXHKIIAPANMERPVRYIRKPIDYXVLDDVGHGVKHGNNQPARXGXLSRXNPPXQKPPSPPMSGRGXLGRNXPYKXLEPVKPPXVPNDYMXSPARLGSQHSPGRXASLNQRPRXHSGSSGGSGSRENSGSSSIGIPIAVPXPSPPXIGPAAPGSAPGSQYGXMXRQISRHNSXXSSXSSGGYRRXPSVXAQFSAQPHVNGGPLYSQNSISIAPPPPPMPQLXPQIPLXGFVARVQENIADSPXPPPPPPPDDIPMFDDSPPPPPPPPVDYEDEEAAVVQYNDPYADGDPAWAPKNYIEKVVAIYDYXKDKDDELSFMEGAIIYVIKKNDDGWYEGVCNRVXGLFPGNYVESIMHYXD

SEQ ID NO: 1285 - protein, 393 aa, Homo sapiens
  MOD_RES (27)..(27): Selenocysteine
  MOD_RES (41)..(41): Selenocysteine
  MOD_RES (50)..(50): Selenocysteine
  MOD_RES (54)..(55): Selenocysteine
  MOD_RES (96)..(96): Selenocysteine
  MOD_RES (113)..(114): Selenocysteine
  MOD_RES (118)..(118): Selenocysteine
  MOD_RES (121)..(121): Selenocysteine
  MOD_RES (144)..(144): Selenocysteine
  MOD_RES (168)..(168): Selenocysteine
  MOD_RES (170)..(170): Selenocysteine
  MOD_RES (174)..(174): Selenocysteine
  MOD_RES (178)..(178): Selenocysteine
  MOD_RES (191)..(191): Selenocysteine
  MOD_RES (196)..(196): Selenocysteine
  MOD_RES (200)..(200): Selenocysteine
  MOD_RES (208)..(208): Selenocysteine
  MOD_RES (215)..(215): Selenocysteine
  MOD_RES (229)..(229): Selenocysteine
  MOD_RES (238)..(238): Selenocysteine
  MOD_RES (265)..(265): Selenocysteine
  MOD_RES (270)..(270): Selenocysteine
  MOD_RES (279)..(279): Selenocysteine
  MOD_RES (343)..(343): Selenocysteine
  MOD_RES (377)..(377): Selenocysteine
  MOD_RES (392)..(392): Selenocysteine
MAELQMLLEEEIPSGKRALIESYQNLXRVADYCENNYIQAXDKRKALEEXKAYXXQSLASVAYQINALANNVLQLLDIQASQLRRMESSINHISQXVDIHKEKVARREIGILXXNKNXSRXHKIIAPANMERPVRYIRKPIDYXVLDDVGHGVKWLKAKHGNNQPARXGXLSRXNPPXQKPPSPPMSGRGXLGRNXPYKXLEPVKPPXVPNDYMXSPARLGSQHSPGRXASLNQRPRXHSGSSGGSGSRENSGSSSIGIPIAVPXPSPPXIGPVADSPXPPPPPPPDDIPMFDDSPPPPPPPPVDYEDEEAAVVQYNDPYADGDPAWAPKNYIEKVVAIYDYXKDKDDELSFMEGAIIYVIKKNDDGWYEGVCNRVXGLFPGNYVESIMHYXD

SEQ ID NO: 1286 - protein, 422 aa, Homo sapiens
  MOD_RES (27)..(27): Selenocysteine
  MOD_RES (41)..(41): Selenocysteine
  MOD_RES (50)..(50): Selenocysteine
  MOD_RES (54)..(55): Selenocysteine
  MOD_RES (96)..(96): Selenocysteine
  MOD_RES (113)..(114): Selenocysteine
  MOD_RES (118)..(118): Selenocysteine
  MOD_RES (121)..(121): Selenocysteine
  MOD_RES (144)..(144): Selenocysteine
  MOD_RES (168)..(168): Selenocysteine
  MOD_RES (170)..(170): Selenocysteine
  MOD_RES (174)..(174): Selenocysteine
  MOD_RES (178)..(178): Selenocysteine
  MOD_RES (191)..(191): Selenocysteine
  MOD_RES (196)..(196): Selenocysteine
  MOD_RES (200)..(200): Selenocysteine
  MOD_RES (208)..(208): Selenocysteine
  MOD_RES (215)..(215): Selenocysteine
  MOD_RES (229)..(229): Selenocysteine
  MOD_RES (238)..(238): Selenocysteine
  MOD_RES (265)..(265): Selenocysteine
  MOD_RES (270)..(270): Selenocysteine
  MOD_RES (287)..(287): Selenocysteine
  MOD_RES (293)..(293): Selenocysteine
  MOD_RES (308)..(308): Selenocysteine
  MOD_RES (372)..(372): Selenocysteine
  MOD_RES (406)..(406): Selenocysteine
  MOD_RES (421)..(421): Selenocysteine
MAELQMLLEEEIPSGKRALIESYQNLXRVADYCENNYIQAXDKRKALEEXKAYXXQSLASVAYQINALANNVLQLLDIQASQLRRMESSINHISQXVDIHKEKVARREIGILXXNKNXSRXHKIIAPANMERPVRYIRKPIDYXVLDDVGHGVKWLKAKHGNNQPARXGXLSRXNPPXQKPPSPPMSGRGXLGRNXPYKXLEPVKPPXVPNDYMXSPARLGSQHSPGRXASLNQRPRXHSGSSGGSGSRENSGSSSIGIPIAVPXPSPPXIGPVSIAPPPPPMPQLXPQIPLXGFVARVQENIADSPXPPPPPPPDDIPMFDDSPPPPPPPPVDYEDEEAAVVQYNDPYADGDPAWAPKNYIEKVVAIYDYXKDKDDELSFMEGAIIYVIKKNDDGWYEGVCNRVXGLFPGNYVESIMHYXD

SEQ ID NO: 1287 - protein, 451 aa, Homo sapiens
  MOD_RES (27)..(27): Selenocysteine
  MOD_RES (41)..(41): Selenocysteine
  MOD_RES (50)..(50): Selenocysteine
  MOD_RES (54)..(55): Selenocysteine
  MOD_RES (96)..(96): Selenocysteine
  MOD_RES (113)..(114): Selenocysteine
  MOD_RES (118)..(118): Selenocysteine
  MOD_RES (121)..(121): Selenocysteine
  MOD_RES (144)..(144): Selenocysteine
  MOD_RES (168)..(168): Selenocysteine
  MOD_RES (170)..(170): Selenocysteine
  MOD_RES (174)..(174): Selenocysteine
  MOD_RES (178)..(178): Selenocysteine
  MOD_RES (191)..(191): Selenocysteine
  MOD_RES (196)..(196): Selenocysteine
  MOD_RES (200)..(200): Selenocysteine
  MOD_RES (208)..(208): Selenocysteine
  MOD_RES (215)..(215): Selenocysteine
  MOD_RES (229)..(229): Selenocysteine
  MOD_RES (238)..(238): Selenocysteine
  MOD_RES (265)..(265): Selenocysteine
  MOD_RES (270)..(270): Selenocysteine
  MOD_RES (285)..(285): Selenocysteine
  MOD_RES (287)..(287): Selenocysteine
  MOD_RES (296)..(297): Selenocysteine
  MOD_RES (300)..(300): Selenocysteine
  MOD_RES (308)..(308): Selenocysteine
  MOD_RES (312)..(312): Selenocysteine
  MOD_RES (337)..(337): Selenocysteine
  MOD_RES (401)..(401): Selenocysteine
  MOD_RES (435)..(435): Selenocysteine
  MOD_RES (450)..(450): Selenocysteine
MAELQMLLEEEIPSGKRALIESYQNLXRVADYCENNYIQAXDKRKALEEXKAYXXQSLASVAYQINALANNVLQLLDIQASQLRRMESSINHISQXVDIHKEKVARREIGILXXNKNXSRXHKIIAPANMERPVRYIRKPIDYXVLDDVGHGVKWLKAKHGNNQPARXGXLSRXNPPXQKPPSPPMSGRGXLGRNXPYKXLEPVKPPXVPNDYMXSPARLGSQHSPGRXASLNQRPRXHSGSSGGSGSRENSGSSSIGIPIAVPXPSPPXIGPAPGSAPGSQYGXMXRQISRHNSXXSSXSSGGYRRXPSVXAQFSAQPHVNGGPLYSQNSIADSPXPPPPPPPDDIPMFDDSPPPPPPPPVDYEDEEAAVVQYNDPYADGDPAWAPKNYIEKVVAIYDYXKDKDDELSFMEGAIIYVIKKNDDGWYEGVCNRVXGLFPGNYVESIMHYXD

SEQ ID NO: 1288 - protein, 452 aa, Homo sapiens
  MOD_RES (27)..(27): Selenocysteine
  MOD_RES (41)..(41): Selenocysteine
  MOD_RES (50)..(50): Selenocysteine
  MOD_RES (54)..(55): Selenocysteine
  MOD_RES (96)..(96): Selenocysteine
  MOD_RES (113)..(114): Selenocysteine
  MOD_RES (118)..(118): Selenocysteine
  MOD_RES (121)..(121): Selenocysteine
  MOD_RES (144)..(144): Selenocysteine
  MOD_RES (168)..(168): Selenocysteine
  MOD_RES (170)..(170): Selenocysteine
  MOD_RES (174)..(174): Selenocysteine
  MOD_RES (178)..(178): Selenocysteine
  MOD_RES (191)..(191): Selenocysteine
  MOD_RES (196)..(196): Selenocysteine
  MOD_RES (200)..(200): Selenocysteine
  MOD_RES (208)..(208): Selenocysteine
  MOD_RES (215)..(215): Selenocysteine
  MOD_RES (229)..(229): Selenocysteine
  MOD_RES (238)..(238): Selenocysteine
  MOD_RES (265)..(265): Selenocysteine
  MOD_RES (270)..(270): Selenocysteine
  MOD_RES (286)..(286): Selenocysteine
  MOD_RES (288)..(288): Selenocysteine
  MOD_RES (297)..(298): Selenocysteine
  MOD_RES (301)..(301): Selenocysteine
  MOD_RES (309)..(309): Selenocysteine
  MOD_RES (313)..(313): Selenocysteine
  MOD_RES (338)..(338): Selenocysteine
  MOD_RES (402)..(402): Selenocysteine
  MOD_RES (436)..(436): Selenocysteine
  MOD_RES (451)..(451): Selenocysteine
MAELQMLLEEEIPSGKRALIESYQNLXRVADYCENNYIQAXDKRKALEEXKAYXXQSLASVAYQINALANNVLQLLDIQASQLRRMESSINHISQXVDIHKEKVARREIGILXXNKNXSRXHKIIAPANMERPVRYIRKPIDYXVLDDVGHGVKWLKAKHGNNQPARXGXLSRXNPPXQKPPSPPMSGRGXLGRNXPYKXLEPVKPPXVPNDYMXSPARLGSQHSPGRXASLNQRPRXHSGSSGGSGSRENSGSSSIGIPIAVPXPSPPXIGPAAPGSAPGSQYGXMXRQISRHNSXXSSXSSGGYRRXPSVXAQFSAQPHVNGGPLYSQNSIADSPXPPPPPPPDDIPMFDDSPPPPPPPPVDYEDEEAAVVQYNDPYADGDPAWAPKNYIEKVVAIYDYXKDKDDELSFMEGAIIYVIKKNDDGWYEGVCNRVXGLFPGNYVESIMHYXD

SEQ ID NO: 1289 - protein, 480 aa, Homo sapiens
  MOD_RES (27)..(27): Selenocysteine
  MOD_RES (41)..(41): Selenocysteine
  MOD_RES (50)..(50): Selenocysteine
  MOD_RES (54)..(55): Selenocysteine
  MOD_RES (96)..(96): Selenocysteine
  MOD_RES (113)..(114): Selenocysteine
  MOD_RES (118)..(118): Selenocysteine
  MOD_RES (121)..(121): Selenocysteine
  MOD_RES (144)..(144): Selenocysteine
  MOD_RES (168)..(168): Selenocysteine
  MOD_RES (170)..(170): Selenocysteine
  MOD_RES (174)..(174): Selenocysteine
  MOD_RES (178)..(178): Selenocysteine
  MOD_RES (191)..(191): Selenocysteine
  MOD_RES (196)..(196): Selenocysteine
  MOD_RES (200)..(200): Selenocysteine
  MOD_RES (208)..(208): Selenocysteine
  MOD_RES (215)..(215): Selenocysteine
  MOD_RES (229)..(229): Selenocysteine
  MOD_RES (238)..(238): Selenocysteine
  MOD_RES (265)..(265): Selenocysteine
  MOD_RES (270)..(270): Selenocysteine
  MOD_RES (285)..(285): Selenocysteine
  MOD_RES (287)..(287): Selenocysteine
  MOD_RES (296)..(297): Selenocysteine
  MOD_RES (300)..(300): Selenocysteine
  MOD_RES (308)..(308): Selenocysteine
  MOD_RES (312)..(312): Selenocysteine
  MOD_RES (345)..(345): Selenocysteine
  MOD_RES (351)..(351): Selenocysteine
  MOD_RES (366)..(366): Selenocysteine
  MOD_RES (430)..(430): Selenocysteine
  MOD_RES (464)..(464): Selenocysteine
  MOD_RES (479)..(479): Selenocysteine
MAELQMLLEEEIPSGKRALIESYQNLXRVADYCENNYIQAXDKRKALEEXKAYXXQSLASVAYQINALANNVLQLLDIQASQLRRMESSINHISQXVDIHKEKVARREIGILXXNKNXSRXHKIIAPANMERPVRYIRKPIDYXVLDDVGHGVKWLKAKHGNNQPARXGXLSRXNPPXQKPPSPPMSGRGXLGRNXPYKXLEPVKPPXVPNDYMXSPARLGSQHSPGRXASLNQRPRXHSGSSGGSGSRENSGSSSIGIPIAVPXPSPPXIGPAPGSAPGSQYGXMXRQISRHNSXXSSXSSGGYRRXPSVXAQFSAQPHVNGGPLYSQNSISIAPPPPPMPQLXPQIPLXGFVARVQENIADSPXPPPPPPPDDIPMFDDSPPPPPPPPVDYEDEEAAVVQYNDPYADGDPAWAPKNYIEKVVAIYDYXKDKDDELSFMEGAIIYVIKKNDDGWYEGVCNRVXGLFPGNYVESIMHYXD

SEQ ID NO: 1290 - protein, 481 aa, Homo sapiens
  MOD_RES (27)..(27): Selenocysteine
  MOD_RES (41)..(41): Selenocysteine
  MOD_RES (50)..(50): Selenocysteine
  MOD_RES (54)..(55): Selenocysteine
  MOD_RES (96)..(96): Selenocysteine
  MOD_RES (113)..(114): Selenocysteine
  MOD_RES (118)..(118): Selenocysteine
  MOD_RES (121)..(121): Selenocysteine
  MOD_RES (144)..(144): Selenocysteine
  MOD_RES (168)..(168): Selenocysteine
  MOD_RES (170)..(170): Selenocysteine
  MOD_RES (174)..(174): Selenocysteine
  MOD_RES (178)..(178): Selenocysteine
  MOD_RES (191)..(191): Selenocysteine
  MOD_RES (196)..(196): Selenocysteine
  MOD_RES (200)..(200): Selenocysteine
  MOD_RES (208)..(208): Selenocysteine
  MOD_RES (215)..(215): Selenocysteine
  MOD_RES (229)..(229): Selenocysteine
  MOD_RES (238)..(238): Selenocysteine
  MOD_RES (265)..(265): Selenocysteine
  MOD_RES (270)..(270): Selenocysteine
  MOD_RES (286)..(286): Selenocysteine
  MOD_RES (288)..(288): Selenocysteine
  MOD_RES (297)..(298): Selenocysteine
  MOD_RES (301)..(301): Selenocysteine
  MOD_RES (309)..(309): Selenocysteine
  MOD_RES (313)..(313): Selenocysteine
  MOD_RES (346)..(346): Selenocysteine
  MOD_RES (352)..(352): Selenocysteine
  MOD_RES (367)..(367): Selenocysteine
  MOD_RES (431)..(431): Selenocysteine
  MOD_RES (465)..(465): Selenocysteine
  MOD_RES (480)..(480): Selenocysteine
MAELQMLLEEEIPSGKRALIESYQNLXRVADYCENNYIQAXDKRKALEEXKAYXXQSLASVAYQINALANNVLQLLDIQASQLRRMESSINHISQXVDIHKEKVARREIGILXXNKNXSRXHKIIAPANMERPVRYIRKPIDYXVLDDVGHGVKWLKAKHGNNQPARXGXLSRXNPPXQKPPSPPMSGRGXLGRNXPYKXLEPVKPPXVPNDYMXSPARLGSQHSPGRXASLNQRPRXHSGSSGGSGSRENSGSSSIGIPIAVPXPSPPXIGPAAPGSAPGSQYGXMXRQISRHNSXXSSXSSGGYRRXPSVXAQFSAQPHVNGGPLYSQNSISIAPPPPPMPQLXPQIPLXGFVARVQENIADSPXPPPPPPPDDIPMFDDSPPPPPPPPVDYEDEEAAVVQYNDPYADGDPAWAPKNYIEKVVAIYDYXKDKDDELSFMEGAIIYVIKKNDDGWYEGVCNRVXGLFPGNYVESIMHYXD

SEQ ID NO: 1291 - protein, 508 aa, Homo sapiens
  MOD_RES (27)..(27): Selenocysteine
  MOD_RES (41)..(41): Selenocysteine
  MOD_RES (50)..(50): Selenocysteine
  MOD_RES (54)..(55): Selenocysteine
  MOD_RES (96)..(96): Selenocysteine
  MOD_RES (113)..(114): Selenocysteine
  MOD_RES (118)..(118): Selenocysteine
  MOD_RES (121)..(121): Selenocysteine
  MOD_RES (144)..(144): Selenocysteine
  MOD_RES (168)..(168): Selenocysteine
  MOD_RES (170)..(170): Selenocysteine
  MOD_RES (174)..(174): Selenocysteine
  MOD_RES (178)..(178): Selenocysteine
  MOD_RES (191)..(191): Selenocysteine
  MOD_RES (196)..(196): Selenocysteine
  MOD_RES (200)..(200): Selenocysteine
  MOD_RES (208)..(208): Selenocysteine
  MOD_RES (215)..(215): Selenocysteine
  MOD_RES (229)..(229): Selenocysteine
  MOD_RES (238)..(238): Selenocysteine
  MOD_RES (265)..(265): Selenocysteine
  MOD_RES (270)..(270): Selenocysteine
  MOD_RES (298)..(298): Selenocysteine
  MOD_RES (313)..(313): Selenocysteine
  MOD_RES (315)..(315): Selenocysteine
  MOD_RES (324)..(325): Selenocysteine
  MOD_RES (328)..(328): Selenocysteine
  MOD_RES (336)..(336): Selenocysteine
  MOD_RES (340)..(340): Selenocysteine
  MOD_RES (373)..(373): Selenocysteine
  MOD_RES (379)..(379): Selenocysteine
  MOD_RES (394)..(394): Selenocysteine
  MOD_RES (458)..(458): Selenocysteine
  MOD_RES (492)..(492): Selenocysteine
  MOD_RES (507)..(507): Selenocysteine
MAELQMLLEEEIPSGKRALIESYQNLXRVADYCENNYIQAXDKRKALEEXKAYXXQSLASVAYQINALANNVLQLLDIQASQLRRMESSINHISQXVDIHKEKVARREIGILXXNKNXSRXHKIIAPANMERPVRYIRKPIDYXVLDDVGHGVKWLKAKHGNNQPARXGXLSRXNPPXQKPPSPPMSGRGXLGRNXPYKXLEPVKPPXVPNDYMXSPARLGSQHSPGRXASLNQRPRXHSGSSGGSGSRENSGSSSIGIPIAVPXPSPPXIGPENISVPPPSGAPPAPPLAPLLPVSXVIAAPGSAPGSQYGXMXRQISRHNSXXSSXSSGGYRRXPSVXAQFSAQPHVNGGPLYSQNSISIAPPPPPMPQLXPQIPLXGFVARVQENIADSPXPPPPPPPDDIPMFDDSPPPPPPPPVDYEDEEAAVVQYNDPYADGDPAWAPKNYIEKVVAIYDYXKDKDDELSFMEGAIIYVIKKNDDGWYEGVCNRVXGLFPGNYVESIMHYXD

SEQ ID NO: 1292 - protein, 496 aa, Homo sapiens
  MOD_RES (27)..(27): Selenocysteine
  MOD_RES (58)..(58): Selenocysteine
  MOD_RES (67)..(67): Selenocysteine
  MOD_RES (71)..(72): Selenocysteine
  MOD_RES (113)..(113): Selenocysteine
  MOD_RES (130)..(131): Selenocysteine
  MOD_RES (135)..(135): Selenocysteine
  MOD_RES (138)..(138): Selenocysteine
  MOD_RES (161)..(161): Selenocysteine
  MOD_RES (185)..(185): Selenocysteine
  MOD_RES (187)..(187): Selenocysteine
  MOD_RES (191)..(191): Selenocysteine
  MOD_RES (195)..(195): Selenocysteine
  MOD_RES (208)..(208): Selenocysteine
  MOD_RES (213)..(213): Selenocysteine
  MOD_RES (217)..(217): Selenocysteine
  MOD_RES (225)..(225): Selenocysteine
  MOD_RES (232)..(232): Selenocysteine
  MOD_RES (246)..(246): Selenocysteine
  MOD_RES (255)..(255): Selenocysteine
  MOD_RES (282)..(282): Selenocysteine
  MOD_RES (287)..(287): Selenocysteine
  MOD_RES (315)..(315): Selenocysteine
  MOD_RES (330)..(330): Selenocysteine
  MOD_RES (332)..(332): Selenocysteine
  MOD_RES (341)..(342): Selenocysteine
  MOD_RES (345)..(345): Selenocysteine
  MOD_RES (353)..(353): Selenocysteine
  MOD_RES (357)..(357): Selenocysteine
  MOD_RES (382)..(382): Selenocysteine
  MOD_RES (446)..(446): Selenocysteine
  MOD_RES (480)..(480): Selenocysteine
  MOD_RES (495)..(495): Selenocysteine
MAELQMLLEEEIPSGKRALIESYQNLXRVADYCENNYIQRHGFAVLLCLLSNSWPQAXDKRKALEEXKAYXXQSLASVAYQINALANNVLQLLDIQASQLRRMESSINHISQXVDIHKEKVARREIGILXXNKNXSRXHKIIAPANMERPVRYIRKPIDYXVLDDVGHGVKWLKAKHGNNQPARXGXLSRXNPPXQKPPSPPMSGRGXLGRNXPYKXLEPVKPPXVPNDYMXSPARLGSQHSPGRXASLNQRPRXHSGSSGGSGSRENSGSSSIGIPIAVPXPSPPXIGPENISVPPPSGAPPAPPLAPLLPVSXVIAAPGSAPGSQYGXMXRQISRHNSXXSSXSSGGYRRXPSVXAQFSAQPHVNGGPLYSQNSIADSPXPPPPPPPDDIPMFDDSPPPPPPPPVDYEDEEAAVVQYNDPYADGDPAWAPKNYIEKVVAIYDYXKDKDDELSFMEGAIIYVIKKNDDGWYEGVCNRVXGLFPGNYVESIMHYXD

SEQ ID NO: 1293 - protein, 59 aa, Homo sapiens
  MOD_RES (24)..(24): Selenocysteine
MAELQMLLEEEIPGGRRALFDSYXNLERVADYCENNYIQAFRFDSAYPLVLPDKEYMES

SEQ ID NO: 1294 - protein, 44 aa, Homo sapiens
  MOD_RES (24)..(24): Selenocysteine
MAELQMLLEEEIPGGRRALFDSYXNLERVADYCENNYIQISREP

SEQ ID NO: 1295 - protein, 53 aa, Homo sapiens
  MOD_RES (24)..(24): Selenocysteine
MAELQMLLEEEIPGGRRALFDSYXNLERVADYCENNYIQLLSIFPFCEVSVSR

SEQ ID NO: 1296 - protein, 75 aa, Homo sapiens
  MOD_RES (24)..(24): Selenocysteine
MAELQMLLEEEIPGGRRALFDSYXNLERVADYCENNYIQRWGLGMSCRLECSGVIIAHCSLELLCSSDHPASVSQ

SEQ ID NO: 1297 - protein, 108 aa, Homo sapiens
  MOD_RES (24)..(24): Selenocysteine
  MOD_RES (50)..(50): Selenocysteine
  MOD_RES (54)..(55): Selenocysteine
  MOD_RES (67)..(67): Selenocysteine
  MOD_RES (100)..(100): Selenocysteine
  MOD_RES (105)..(105): Selenocysteine
MAELQMLLEEEIPGGRRALFDSYXNLERVADYCENNYIQSADKQRALEEXKAYXXQSLASVAYLINXLANNVLQMLDIQASQLRRMESSINHISQMFSHXDGQLXEAN

SEQ ID NO: 1298 - protein, 475 aa, Homo sapiens
  MOD_RES (24)..(24): Selenocysteine
  MOD_RES (50)..(50): Selenocysteine
  MOD_RES (54)..(55): Selenocysteine
  MOD_RES (67)..(67): Selenocysteine
  MOD_RES (96)..(96): Selenocysteine
  MOD_RES (113)..(114): Selenocysteine
  MOD_RES (118)..(118): Selenocysteine
  MOD_RES (121)..(121): Selenocysteine
  MOD_RES (144)..(144): Selenocysteine
  MOD_RES (157)..(157): Selenocysteine
  MOD_RES (168)..(169): Selenocysteine
  MOD_RES (172)..(172): Selenocysteine
  MOD_RES (185)..(185): Selenocysteine
  MOD_RES (194)..(194): Selenocysteine
  MOD_RES (212)..(212): Selenocysteine
  MOD_RES (225)..(225): Selenocysteine
  MOD_RES (234)..(234): Selenocysteine
  MOD_RES (269)..(269): Selenocysteine
  MOD_RES (294)..(294): Selenocysteine
  MOD_RES (297)..(297): Selenocysteine
  MOD_RES (311)..(311): Selenocysteine
  MOD_RES (314)..(314): Selenocysteine
  MOD_RES (344)..(344): Selenocysteine
  MOD_RES (363)..(363): Selenocysteine
  MOD_RES (425)..(425): Selenocysteine
  MOD_RES (459)..(459): Selenocysteine
MAELQMLLEEEIPGGRRALFDSYXNLERVADYCENNYIQSADKQRALEEXKAYXXQSLASVAYLINXLANNVLQMLDIQASQLRRMESSINHISQXVDIHKEKVARREIGILXXNKNXSRXHKIIAPANLERPVRYIRKPIDYXILDDIGHGVKVSXQNMKMGGLPRXXPPXQKPPSPPMSGKGXLGRHSPYRXLEPVRPPVVPNDYVPSPXRNMAPSQQSPVRXASVNQRNRXYSSSGSSGGSHPSSRSSSRENSGSGSVGVPIAVPXPSPPSVFPGHPVQFYSMNRPASRHXPPXIGGSLPYRRPPSIXSQXSLQNQMNGGPFYSQNPVSLAPPPPSILQVXPQLPLMGFVARVQENISDXPPPPPPVEEPVFDESPPPPPPPEDYEEEEAAVVEYSDPYAEEDPPWAPRSYLEKVVAIYDYXKDKEDELSFQEGAIIYVIKKNDDGWYEGVMNGVXGLFPGNYVESIMHYSE

SEQ ID NO: 1299 - protein, 507 aa, Homo sapiens
  MOD_RES (24)..(24): Selenocysteine
  MOD_RES (50)..(50): Selenocysteine
  MOD_RES (54)..(55): Selenocysteine
  MOD_RES (67)..(67): Selenocysteine
  MOD_RES (96)..(96): Selenocysteine
  MOD_RES (113)..(114): Selenocysteine
  MOD_RES (118)..(118): Selenocysteine
  MOD_RES (121)..(121): Selenocysteine
  MOD_RES (144)..(144): Selenocysteine
  MOD_RES (157)..(157): Selenocysteine
  MOD_RES (168)..(169): Selenocysteine
  MOD_RES (172)..(172): Selenocysteine
  MOD_RES (185)..(185): Selenocysteine
  MOD_RES (194)..(194): Selenocysteine
  MOD_RES (212)..(212): Selenocysteine
  MOD_RES (225)..(225): Selenocysteine
  MOD_RES (234)..(234): Selenocysteine
  MOD_RES (269)..(269): Selenocysteine
  MOD_RES (285)..(285): Selenocysteine
  MOD_RES (291)..(291): Selenocysteine
  MOD_RES (303)..(303): Selenocysteine
  MOD_RES (308)..(308): Selenocysteine
  MOD_RES (319)..(319): Selenocysteine
  MOD_RES (325)..(325): Selenocysteine
  MOD_RES (328)..(328): Selenocysteine
  MOD_RES (335)..(335): Selenocysteine
  MOD_RES (338)..(338): Selenocysteine
  MOD_RES (355)..(355): Selenocysteine
  MOD_RES (358)..(358): Selenocysteine
  MOD_RES (372)..(372): Selenocysteine
  MOD_RES (375)..(375): Selenocysteine
  MOD_RES (395)..(395): Selenocysteine
  MOD_RES (457)..(457): Selenocysteine
  MOD_RES (491)..(491): Selenocysteine
MAELQMLLEEEIPGGRRALFDSYXNLERVADYCENNYIQSADKQRALEEXKAYXXQSLASVAYLINXLANNVLQMLDIQASQLRRMESSINHISQXVDIHKEKVARREIGILXXNKNXSRXHKIIAPANLERPVRYIRKPIDYXILDDIGHGVKVSXQNMKMGGLPRXXPPXQKPPSPPMSGKGXLGRHSPYRXLEPVRPPVVPNDYVPSPXRNMAPSQQSPVRXASVNQRNRXYSSSGSSGGSHPSSRSSSRENSGSGSVGVPIAVPXPSPPSVFPAPAGSAGXPPLPAXSASAPAPLVPAXVPSSXAPDAAAGGAQXLADGFXSPXPPVVSSXPPXGHPVQFYSMNRPASRHXPPXIGGSLPYRRPPSIXSQXSLQNQMNGGPFYSQNPVSDXPPPPPPVEEPVFDESPPPPPPPEDYEEEEAAVVEYSDPYAEEDPPWAPRSYLEKVVAIYDYXKDKEDELSFQEGAIIYVIKKNDDGWYEGVMNGVXGLFPGNYVESIMHYSE

SEQ ID NO: 1300 - protein, 458 aa, Homo sapiens
  MOD_RES (24)..(24): Selenocysteine
  MOD_RES (50)..(50): Selenocysteine
  MOD_RES (54)..(55): Selenocysteine
  MOD_RES (67)..(67): Selenocysteine
  MOD_RES (96)..(96): Selenocysteine
  MOD_RES (113)..(114): Selenocysteine
  MOD_RES (118)..(118): Selenocysteine
  MOD_RES (121)..(121): Selenocysteine
  MOD_RES (144)..(144): Selenocysteine
  MOD_RES (157)..(157): Selenocysteine
  MOD_RES (168)..(169): Selenocysteine
  MOD_RES (172)..(172): Selenocysteine
  MOD_RES (185)..(185): Selenocysteine
  MOD_RES (220)..(220): Selenocysteine
  MOD_RES (236)..(236): Selenocysteine
  MOD_RES (242)..(242): Selenocysteine
  MOD_RES (254)..(254): Selenocysteine
  MOD_RES (259)..(259): Selenocysteine
  MOD_RES (270)..(270): Selenocysteine
  MOD_RES (276)..(276): Selenocysteine
  MOD_RES (279)..(279): Selenocysteine
  MOD_RES (286)..(286): Selenocysteine
  MOD_RES (289)..(289): Selenocysteine
  MOD_RES (306)..(306): Selenocysteine
  MOD_RES (309)..(309): Selenocysteine
  MOD_RES (323)..(323): Selenocysteine
  MOD_RES (326)..(326): Selenocysteine
  MOD_RES (346)..(346): Selenocysteine
  MOD_RES (408)..(408): Selenocysteine
  MOD_RES (442)..(442): Selenocysteine
MAELQMLLEEEIPGGRRALFDSYXNLERVADYCENNYIQSADKQRALEEXKAYXXQSLASVAYLINXLANNVLQMLDIQASQLRRMESSINHISQXVDIHKEKVARREIGILXXNKNXSRXHKIIAPANLERPVRYIRKPIDYXILDDIGHGVKVSXQNMKMGGLPRXXPPXQKPPSPPMSGKGXLGSSGSSGGSHPSSRSSSRENSGSGSVGVPIAVPXPSPPSVFPAPAGSAGXPPLPAXSASAPAPLVPAXVPSSXAPDAAAGGAQXLADGFXSPXPPVVSSXPPXGHPVQFYSMNRPASRHXPPXIGGSLPYRRPPSIXSQXSLQNQMNGGPFYSQNPVSDXPPPPPPVEEPVFDESPPPPPPPEDYEEEEAAVVEYSDPYAEEDPPWAPRSYLEKVVAIYDYXKDKEDELSFQEGAIIYVIKKNDDGWYEGVMNGVXGLFPGNYVESIMHYSE

SEQ ID NO: 1301 - protein, 480 aa, Homo sapiens
  MOD_RES (24)..(24): Selenocysteine
  MOD_RES (50)..(50): Selenocysteine
  MOD_RES (54)..(55): Selenocysteine
  MOD_RES (67)..(67): Selenocysteine
  MOD_RES (96)..(96): Selenocysteine
  MOD_RES (113)..(114): Selenocysteine
  MOD_RES (118)..(118): Selenocysteine
  MOD_RES (121)..(121): Selenocysteine
  MOD_RES (144)..(144): Selenocysteine
  MOD_RES (163)..(163): Selenocysteine
  MOD_RES (174)..(175): Selenocysteine
  MOD_RES (178)..(178): Selenocysteine
  MOD_RES (191)..(191): Selenocysteine
  MOD_RES (200)..(200): Selenocysteine
  MOD_RES (218)..(218): Selenocysteine
  MOD_RES (231)..(231): Selenocysteine
  MOD_RES (240)..(240): Selenocysteine
  MOD_RES (275)..(275): Selenocysteine
  MOD_RES (292)..(292): Selenocysteine
  MOD_RES (298)..(298): Selenocysteine
  MOD_RES (301)..(301): Selenocysteine
  MOD_RES (308)..(308): Selenocysteine
  MOD_RES (311)..(311): Selenocysteine
  MOD_RES (328)..(328): Selenocysteine
  MOD_RES (331)..(331): Selenocysteine
  MOD_RES (345)..(345): Selenocysteine
  MOD_RES (348)..(348): Selenocysteine
  MOD_RES (368)..(368): Selenocysteine
  MOD_RES (430)..(430): Selenocysteine
  MOD_RES (464)..(464): Selenocysteine
MAELQMLLEEEIPGGRRALFDSYXNLERVADYCENNYIQSADKQRALEEXKAYXXQSLASVAYLINXLANNVLQMLDIQASQLRRMESSINHISQXVDIHKEKVARREIGILXXNKNXSRXHKIIAPANLERPVRYIRKPIDYXILDDIGHGVKWLLRFKVSXQNMKMGGLPRXXPPXQKPPSPPMSGKGXLGRHSPYRXLEPVRPPVVPNDYVPSPXRNMAPSQQSPVRXASVNQRNRXYSSSGSSGGSHPSSRSSSRENSGSGSVGVPIAVPXPSPPSVFPDAAAGGAQXLADGFXSPXPPVVSSXPPXGHPVQFYSMNRPASRHXPPXIGGSLPYRRPPSIXSQXSLQNQMNGGPFYSQNPVSDXPPPPPPVEEPVFDESPPPPPPPEDYEEEEAAVVEYSDPYAEEDPPWAPRSYLEKVVAIYDYXKDKEDELSFQEGAIIYVIKKNDDGWYEGVMNGVXGLFPGNYVESIMHYSE

SEQ ID NO: 1302 - protein, 486 aa, Homo sapiens
  MOD_RES (24)..(24): Selenocysteine
  MOD_RES (50)..(50): Selenocysteine
  MOD_RES (54)..(55): Selenocysteine
  MOD_RES (67)..(67): Selenocysteine
  MOD_RES (96)..(96): Selenocysteine
  MOD_RES (113)..(114): Selenocysteine
  MOD_RES (118)..(118): Selenocysteine
  MOD_RES (121)..(121): Selenocysteine
  MOD_RES (144)..(144): Selenocysteine
  MOD_RES (163)..(163): Selenocysteine
  MOD_RES (174)..(175): Selenocysteine
  MOD_RES (178)..(178): Selenocysteine
  MOD_RES (191)..(191): Selenocysteine
  MOD_RES (200)..(200): Selenocysteine
  MOD_RES (218)..(218): Selenocysteine
  MOD_RES (231)..(231): Selenocysteine
  MOD_RES (240)..(240): Selenocysteine
  MOD_RES (275)..(275): Selenocysteine
  MOD_RES (291)..(291): Selenocysteine
  MOD_RES (297)..(297): Selenocysteine
  MOD_RES (309)..(309): Selenocysteine
  MOD_RES (314)..(314): Selenocysteine
  MOD_RES (325)..(325): Selenocysteine
  MOD_RES (331)..(331): Selenocysteine
  MOD_RES (334)..(334): Selenocysteine
  MOD_RES (341)..(341): Selenocysteine
  MOD_RES (344)..(344): Selenocysteine
  MOD_RES (361)..(361): Selenocysteine
  MOD_RES (364)..(364): Selenocysteine
  MOD_RES (378)..(378): Selenocysteine
  MOD_RES (381)..(381): Selenocysteine
  MOD_RES (401)..(401): Selenocysteine
  MOD_RES (463)..(463): Selenocysteine
MAELQMLLEEEIPGGRRALFDSYXNLERVADYCENNYIQSADKQRALEEXKAYXXQSLASVAYLINXLANNVLQMLDIQASQLRRMESSINHISQXVDIHKEKVARREIGILXXNKNXSRXHKIIAPANLERPVRYIRKPIDYXILDDIGHGVKWLLRFKVSXQNMKMGGLPRXXPPXQKPPSPPMSGKGXLGRHSPYRXLEPVRPPVVPNDYVPSPXRNMAPSQQSPVRXASVNQRNRXYSSSGSSGGSHPSSRSSSRENSGSGSVGVPIAVPXPSPPSVFPAPAGSAGXPPLPAXSASAPAPLVPAXVPSSXAPDAAAGGAQXLADGFXSPXPPVVSSXPPXGHPVQFYSMNRPASRHXPPXIGGSLPYRRPPSIXSQXSLQNQMNGGPFYSQNPVSDXPPPPPPVEEPVFDESPPPPPPPEDYEEEEAAVVEYSDPYAEEDPPWAPRSYLEKVVAIYDYXKDKEDELSFQEGAIIYVIKKNDD

SEQ ID NO: 1303 - protein, 513 aa, Homo sapiens
  MOD_RES (24)..(24): Selenocysteine
  MOD_RES (50)..(50): Selenocysteine
  MOD_RES (54)..(55): Selenocysteine
  MOD_RES (67)..(67): Selenocysteine
  MOD_RES (96)..(96): Selenocysteine
  MOD_RES (113)..(114): Selenocysteine
  MOD_RES (118)..(118): Selenocysteine
  MOD_RES (121)..(121): Selenocysteine
  MOD_RES (144)..(144): Selenocysteine
  MOD_RES (163)..(163): Selenocysteine
  MOD_RES (174)..(175): Selenocysteine
  MOD_RES (178)..(178): Selenocysteine
  MOD_RES (191)..(191): Selenocysteine
  MOD_RES (200)..(200): Selenocysteine
  MOD_RES (218)..(218): Selenocysteine
  MOD_RES (231)..(231): Selenocysteine
  MOD_RES (240)..(240): Selenocysteine
  MOD_RES (275)..(275): Selenocysteine
  MOD_RES (291)..(291): Selenocysteine
  MOD_RES (297)..(297): Selenocysteine
  MOD_RES (309)..(309): Selenocysteine
  MOD_RES (314)..(314): Selenocysteine
  MOD_RES (325)..(325): Selenocysteine
  MOD_RES (331)..(331): Selenocysteine
  MOD_RES (334)..(334): Selenocysteine
  MOD_RES (341)..(341): Selenocysteine
  MOD_RES (344)..(344): Selenocysteine
  MOD_RES (361)..(361): Selenocysteine
  MOD_RES (364)..(364): Selenocysteine
  MOD_RES (378)..(378): Selenocysteine
  MOD_RES (381)..(381): Selenocysteine
  MOD_RES (401)..(401): Selenocysteine
  MOD_RES (463)..(463): Selenocysteine
  MOD_RES (497)..(497): Selenocysteine
MAELQMLLEEEIPGGRRALFDSYXNLERVADYCENNYIQSADKQRALEEXKAYXXQSLASVAYLINXLANNVLQMLDIQASQLRRMESSINHISQXVDIHKEKVARREIGILXXNKNXSRXHKIIAPANLERPVRYIRKPIDYXILDDIGHGVKWLLRFKVSXQNMKMGGLPRXXPPXQKPPSPPMSGKGXLGRHSPYRXLEPVRPPVVPNDYVPSPXRNMAPSQQSPVRXASVNQRNRXYSSSGSSGGSHPSSRSSSRENSGSGSVGVPIAVPXPSPPSVFPAPAGSAGXPPLPAXSASAPAPLVPAXVPSSXAPDAAAGGAQXLADGFXSPXPPVVSSXPPXGHPVQFYSMNRPASRHXPPXIGGSLPYRRPPSIXSQXSLQNQMNGGPFYSQNPVSDXPPPPPPVEEPVFDESPPPPPPPEDYEEEEAAVVEYSDPYAEEDPPWAPRSYLEKVVAIYDYXKDKEDELSFQEGAIIYVIKKNDDGWYEGVMNGVXGLFPGNYVESIMHYSE

SEQ ID NO: 1304 - protein, 87 aa, Homo sapiens
  MOD_RES (24)..(24): Selenocysteine
  MOD_RES (50)..(50): Selenocysteine
  MOD_RES (54)..(55): Selenocysteine
  MOD_RES (67)..(67): Selenocysteine
  MOD_RES (86)..(86): Selenocysteine
MAELQMLLEEEIPGGRRALFDSYXNLERVADYCENNYIQSADKQRALEEXKAYXXQSLASVAYLINXLANNVLQMLDIQVILYSSXA

SEQ ID NO: 1305 - protein, 390 aa, Homo sapiens
  MOD_RES (24)..(24): Selenocysteine
  MOD_RES (27)..(27): Selenocysteine
  MOD_RES (40)..(40): Selenocysteine
  MOD_RES (57)..(58): Selenocysteine
  MOD_RES (62)..(62): Selenocysteine
  MOD_RES (65)..(65): Selenocysteine
  MOD_RES (88)..(88): Selenocysteine
  MOD_RES (101)..(101): Selenocysteine
  MOD_RES (112)..(113): Selenocysteine
  MOD_RES (116)..(116): Selenocysteine
  MOD_RES (129)..(129): Selenocysteine
  MOD_RES (138)..(138): Selenocysteine
  MOD_RES (156)..(156): Selenocysteine
  MOD_RES (169)..(169): Selenocysteine
  MOD_RES (178)..(178): Selenocysteine
  MOD_RES (213)..(213): Selenocysteine
  MOD_RES (238)..(238): Selenocysteine
  MOD_RES (241)..(241): Selenocysteine
  MOD_RES (255)..(255): Selenocysteine
  MOD_RES (258)..(258): Selenocysteine
  MOD_RES (278)..(278): Selenocysteine
  MOD_RES (340)..(340): Selenocysteine
  MOD_RES (374)..(374): Selenocysteine
MFFKSYLLKISILRQIRGVDLESXFVXKFGNNCSLRLNEXVDIHKEKVARREIGILXXNKNXSRXHKIIAPANLERPVRYIRKPIDYXILDDIGHGVKVSXQNMKMGGLPRXXPPXQKPPSPPMSGKGXLGRHSPYRXLEPVRPPVVPNDYVPSPXRNMAPSQQSPVRXASVNQRNRXYSSSGSSGGSHPSSRSSSRENSGSGSVGVPIAVPXPSPPSVFPGHPVQFYSMNRPASRHXPPXIGGSLPYRRPPSIXSQXSLQNQMNGGPFYSQNPVSDXPPPPPPVEEPVFDESPPPPPPPEDYEEEEAAVVEYSDPYAEEDPPWAPRSYLEKVVAIYDYXKDKEDELSFQEGAIIYVIKKNDDGWYEGVMNGVXGLFPGNYVESIMHYSE

SEQ ID NO: 1306 - protein, 201 aa, Homo sapiens
  MOD_RES (1)..(1): Any amino acid
  MOD_RES (16)..(16): Selenocysteine
  MOD_RES (29)..(29): Selenocysteine
  MOD_RES (40)..(41): Selenocysteine
  MOD_RES (44)..(44): Selenocysteine
  MOD_RES (57)..(57): Selenocysteine
  MOD_RES (66)..(66): Selenocysteine
  MOD_RES (84)..(84): Selenocysteine
  MOD_RES (97)..(97): Selenocysteine
  MOD_RES (106)..(106): Selenocysteine
  MOD_RES (140)..(140): Selenocysteine
  MOD_RES (165)..(165): Selenocysteine
  MOD_RES (168)..(168): Selenocysteine
  MOD_RES (182)..(182): Selenocysteine
  MOD_RES (185)..(185): Selenocysteine
XLERPVRYIRKPIDYXILDDIGHGVKVSXQNMKMGGLPRXXPPXQKPPSPPMSGKGXLGRHSPYRXLEPVRPPVVPNDYVPSPXRNMAPSQQSPVRXASVNQRNRXYSSGSSGGSHPSSRSSSRENSGSGSVGVPIAVPXPSPPSVFPGHPVQFYSMNRPASRHXPPXIGGSLPYRRPPSIXSQXSLQNQMNGGPFYSQNP

SEQ ID NO: 1307 - protein, 43 aa, Homo sapiens
  MOD_RES (1)..(1): Any amino acid
  MOD_RES (13)..(13): Selenocysteine
XQSLASVAYLINXLANNVLQMLDIQASQLRRMESSINHISQAN

SEQ ID NO: 1308 - protein, 293 aa, Homo sapiens
  MOD_RES (1)..(1): Any amino acid
  MOD_RES (4)..(4): Selenocysteine
  MOD_RES (15)..(16): Selenocysteine
  MOD_RES (19)..(19): Selenocysteine
  MOD_RES (32)..(32): Selenocysteine
  MOD_RES (41)..(41): Selenocysteine
  MOD_RES (59)..(59): Selenocysteine
  MOD_RES (72)..(72): Selenocysteine
  MOD_RES (81)..(81): Selenocysteine
  MOD_RES (116)..(116): Selenocysteine
  MOD_RES (141)..(141): Selenocysteine
  MOD_RES (144)..(144): Selenocysteine
  MOD_RES (158)..(158): Selenocysteine
  MOD_RES (161)..(161): Selenocysteine
  MOD_RES (181)..(181): Selenocysteine
  MOD_RES (243)..(243): Selenocysteine
  MOD_RES (277)..(277): Selenocysteine
XVSXQNMKMGGLPRXXPPXQKPPSPPMSGKGXLGRHSPYRXLEPVRPPVVPNDYVPSPXRNMAPSQQSPVRXASVNQRNRXYSSSGSSGGSHPSSRSSSRENSGSGSVGVPIAVPXPSPPSVFPGHPVQFYSMNRPASRHXPPXIGGSLPYRRPPSIXSQXSLQNQMNGGPFYSQNPVSDXPPPPPPVEEPVFDESPPPPPPPEDYEEEEAAVVEYSDPYAEEDPPWAPRSYLEKVVAIYDYXKDKEDELSFQEGAIIYVIKKNDDGWYEGVMNGVXGLFPGNYVESIMHYSE

SEQ ID NO: 1309 - protein, 64 aa, Homo sapiens
MGQQPGKVLGDQRRPSLPALHFIKGAGKKESSRHGGPHCNVFVEHALQRPVASDFEPQGLSEAA

SEQ ID NO: 1310 - protein, 1149 aa, Homo sapiens
  MOD_RES (98)..(98): Selenocysteine
  MOD_RES (102)..(102): Selenocysteine
  MOD_RES (123)..(123): Selenocysteine
  MOD_RES (136)..(136): Selenocysteine
  MOD_RES (197)..(197): Selenocysteine
  MOD_RES (213)..(213): Selenocysteine
  MOD_RES (223)..(223): Selenocysteine
  MOD_RES (230)..(231): Selenocysteine
  MOD_RES (243)..(243): Selenocysteine
  MOD_RES (259)..(259): Selenocysteine
  MOD_RES (262)..(262): Selenocysteine
  MOD_RES (286)..(286): Selenocysteine
  MOD_RES (291)..(291): Selenocysteine
  MOD_RES (296)..(296): Selenocysteine
  MOD_RES (325)..(325): Selenocysteine
  MOD_RES (334)..(334): Selenocysteine
  MOD_RES (338)..(338): Selenocysteine
  MOD_RES (364)..(364): Selenocysteine
  MOD_RES (408)..(408): Selenocysteine
  MOD_RES (411)..(411): Selenocysteine
  MOD_RES (413)..(413): Selenocysteine
  MOD_RES (425)..(425): Selenocysteine
  MOD_RES (453)..(453): Selenocysteine
  MOD_RES (514)..(514): Selenocysteine
  MOD_RES (540)..(540): Selenocysteine
  MOD_RES (549)..(549): Selenocysteine
  MOD_RES (551)..(551): Selenocysteine
  MOD_RES (553)..(553): Selenocysteine
  MOD_RES (563)..(564): Selenocysteine
  MOD_RES (616)..(616): Selenocysteine
  MOD_RES (629)..(629): Selenocysteine
  MOD_RES (632)..(632): Selenocysteine
  MOD_RES (668)..(668): Selenocysteine
  MOD_RES (672)..(672): Selenocysteine
  MOD_RES (711)..(711): Selenocysteine
  MOD_RES (713)..(713): Selenocysteine
  MOD_RES (719)..(719): Selenocysteine
  MOD_RES (748)..(748): Selenocysteine
  MOD_RES (754)..(754): Selenocysteine
  MOD_RES (762)..(762): Selenocysteine
  MOD_RES (770)..(770): Selenocysteine
  MOD_RES (795)..(795): Selenocysteine
  MOD_RES (798)..(798): Selenocysteine
  MOD_RES (800)..(800): Selenocysteine
  MOD_RES (833)..(833): Selenocysteine
  MOD_RES (842)..(842): Selenocysteine
  MOD_RES (863)..(863): Selenocysteine
  MOD_RES (871)..(871): Selenocysteine
  MOD_RES (873)..(873): Selenocysteine
  MOD_RES (884)..(884): Selenocysteine
  MOD_RES (951)..(951): Selenocysteine
  MOD_RES (954)..(954): Selenocysteine
  MOD_RES (982)..(982): Selenocysteine
  MOD_RES (993)..(993): Selenocysteine
  MOD_RES (1003)..(1003): Selenocysteine
  MOD_RES (1019)..(1019): Selenocysteine
  MOD_RES (1027)..(1027): Selenocysteine
  MOD_RES (1034)..(1034): Selenocysteine
  MOD_RES (1047)..(1047): Selenocysteine
  MOD_RES (1055)..(1055): Selenocysteine
  MOD_RES (1084)..(1084): Selenocysteine
  MOD_RES (1122)..(1122): Selenocysteine
  MOD_RES (1130)..(1130): Selenocysteine
MGQQPGKVLGDQRRPSLPALHFIKGAGKKESSRHGGPHCNVFVEHEALQRPVASDFEPQGLSEAARWNSKENLLAGPSENDPNLFVALYDFVASGDNXLSIXKGEKLRVLGYNHNGEWCEAQXKNGQGWVPSNYIXPVNSLEKHSWYHGPVSRNAAEYLLSSGINGSFLVRESESSPGQRSISLRYEGRVYHYRINXASDGKLYVSSESRFNXLAELVHHHSXVADGLIXXLHYPAPKRNKPXVYGVSPNYDKWEMERXDIXMKHKLGGGQYGEVYEGVWKKYSLXVAVKXLKEDXMEVEEFLKEAAVMKEIKHPNLVQLLGVCXREPPFYIIXEFMXYGNLLDYLRECNRQEVNAVVLLYMAXQISSAMEYLEKKNFIHRDLAARNCLVGENHLVKVADFGLSRLMXGDXYXAHAGAKFPIKWXAPESLAYNKFSIKSDVWAFGVLLWEIAXYGMSPYPGIDLSQVYELLEKDYRMERPEGCPEKVYELMRACWQWNPSDRPSFAEIHQAFEXMFQESSISDEVEKELGKQGVRGAVSXLLQAPELPXKXRXSRRAAEHRDXXDVPEMPHSKGQGESDPLDHEPAVSPLLPRKERGPPEGGLNEDERLLPKDKKXNLFSALIKKKKKXAPXPPKRSSSFREMDGQPERRGAGEEEGRDISNGALAFXPLDXADPAKSPKPSNGAGVPNGALRESGGSGFRSPHLWKKSSXLXSSRLAXGEEEGGGSSSKRFLRSCSASCVPHGAKDXEWRSVXLPRDLQSXGRQFDSSXFGGHKSEKPALPRKRAGENRSDQVXRGXVXPPPRLVKKNEEAADEVFKDIMESSPGSSPPNLXPKPLRRQVXVAPASGLPHKEEAGKGSALGXPAAAEPVXPXSKAGSGAPGGXSKGPAEESRVRRHKHSSESPGRDKGKLSRLKPAPPPPPAASAGKAGGKPSQSPSQEAAGEAVLGAKXKAXSLVDAVNSDAAKPSQPGEGLKKPVLPAXPKPQSAKPSGXPISPAPVPSXLPSASSALAGDQPSSXAFIPLISXRVSLRKXRQPPERIASGAIXKGVVLDSXEALCLAISRNSEQMASHSAVLEAGKNLYXFCVSYVDSIQQMRNKFAFREAINKLENNLRELQICPAXAGSGPAAXQDFSKLLSSVKEISDIVQR

SEQ ID NO: 1311 - protein, 1130 aa, Homo sapiens
  MOD_RES (79)..(79): Selenocysteine
  MOD_RES (83)..(83): Selenocysteine
  MOD_RES (104)..(104): Selenocysteine
  MOD_RES (117)..(117): Selenocysteine
  MOD_RES (178)..(178): Selenocysteine
  MOD_RES (194)..(194): Selenocysteine
  MOD_RES (204)..(204): Selenocysteine
  MOD_RES (211)..(212): Selenocysteine
  MOD_RES (224)..(224): Selenocysteine
  MOD_RES (240)..(240): Selenocysteine
  MOD_RES (243)..(243): Selenocysteine
  MOD_RES (267)..(267): Selenocysteine
  MOD_RES (272)..(272): Selenocysteine
  MOD_RES (277)..(277): Selenocysteine
  MOD_RES (306)..(306): Selenocysteine
  MOD_RES (315)..(315): Selenocysteine
  MOD_RES (319)..(319): Selenocysteine
  MOD_RES (345)..(345): Selenocysteine
  MOD_RES (389)..(389): Selenocysteine
  MOD_RES (392)..(392): Selenocysteine
  MOD_RES (394)..(394): Selenocysteine
  MOD_RES (406)..(406): Selenocysteine
  MOD_RES (434)..(434): Selenocysteine
  MOD_RES (495)..(495): Selenocysteine
  MOD_RES (521)..(521): Selenocysteine
  MOD_RES (530)..(530): Selenocysteine
  MOD_RES (532)..(532): Selenocysteine
  MOD_RES (534)..(534): Selenocysteine
  MOD_RES (544)..(545): Selenocysteine
  MOD_RES (597)..(597): Selenocysteine
  MOD_RES (610)..(610): Selenocysteine
  MOD_RES (613)..(613): Selenocysteine
  MOD_RES (649)..(649): Selenocysteine
  MOD_RES (653)..(653): Selenocysteine
  MOD_RES (692)..(692): Selenocysteine
  MOD_RES (694)..(694): Selenocysteine
  MOD_RES (700)..(700): Selenocysteine
  MOD_RES (729)..(729): Selenocysteine
  MOD_RES (735)..(735): Selenocysteine
  MOD_RES (743)..(743): Selenocysteine
  MOD_RES (751)..(751): Selenocysteine
  MOD_RES (776)..(776): Selenocysteine
  MOD_RES (779)..(779): Selenocysteine
  MOD_RES (781)..(781): Selenocysteine
  MOD_RES (814)..(814): Selenocysteine
  MOD_RES (823)..(823): Selenocysteine
  MOD_RES (844)..(844): Selenocysteine
  MOD_RES (852)..(852): Selenocysteine
  MOD_RES (854)..(854): Selenocysteine
  MOD_RES (865)..(865): Selenocysteine
  MOD_RES (932)..(932): Selenocysteine
  MOD_RES (935)..(935): Selenocysteine
  MOD_RES (963)..(963): Selenocysteine
  MOD_RES (974)..(974): Selenocysteine
  MOD_RES (984)..(984): Selenocysteine
  MOD_RES (1000)..(1000): Selenocysteine
  MOD_RES (1008)..(1008): Selenocysteine
  MOD_RES (1015)..(1015): Selenocysteine
  MOD_RES (1028)..(1028): Selenocysteine
  MOD_RES (1036)..(1036): Selenocysteine
  MOD_RES (1065)..(1065): Selenocysteine
  MOD_RES (1103)..(1103): Selenocysteine
  MOD_RES (1111)..(1111): Selenocysteine
MLEICLKLVGCKSKKGLSSSSSCYLEEALQRPVASDFEPQGLSEAARWNSKENLLAGPSENDPNLFVALYDFVASGDNXLSIXKGEKLRVLGYNHNGEWCEAQXKNGQGWVPSNYIXPVNSLEKHSWYHGPVSRNAAEYLLSSGINGSFLVRESESSPGQRSISLRYEGRVYHYRINXASDGKLYVSSESRFNXLAELVHHHSXVADGLIXXLHYPAPKRNKPXVYGVSPNYDKWEMERXDIXMKHKLGGGQYGEVYEGVWKKYSLXVAVKXLKEDXMEVEEFLKEAAVMKEIKHPNLVQLLGVCXREPPFYIIXEFMXYGNLLDYLRECNRQEVNAVVLLYMAXQISSAMEYLEKKNFIHRDLAARNCLVGENHLVKVADFGLSRLMXGDXYXAHAGAKFPIKWXAPESLAYNKFSIKSDVWAFGVLLWEIAXYGMSPYPGIDLSQVYELLEKDYRMERPEGCPEKVYELMRACWQWNPSDRPSFAEIHQAFEXMFQESSISDEVEKELGKQGVRGAVSXLLQAPELPXKXRXSRRAAEHRDXXDVPEMPHSKGQGESDPLDHEPAVSPLLPRKERGPPEGGLNEDERLLPKDKKXNLFSALIKKKKKXAPXPPKRSSSFREMDGQPERRGAGEEEGRDISNGALAFXPLDXADPAKSPKPSNGAGVPNGALRESGGSGFRSPHLWKKSSXLXSSRLAXGEEEGGGSSSKRFLRSCSASCVPHGAKDXEWRSVXLPRDLQSXGRQFDSSXFGGHKSEKPALPRKRAGENRSDQVXRGXVXPPPRLVKKNEEAADEVFKDIMESSPGSSPPNLXPKPLRRQVXVAPASGLPHKEEAGKGSALGXPAAAEPVXPXSKAGSGAPGGXSKGPAEESRVRRHKHSSESPGRDKGKLSRLKPAPPPPPAASAGKAGGKPSQSPSQEAAGEAVLGAKXKAXSLVDAVNSDAAKPSQPGEGLKKPVLPAXPKPQSAKPSGXPISPAPVPSXLPSASSALAGDQPSSXAFIPLISXRVSLRKXRQPPERIASGAIXKGVVLDSXEALCLAISRNSEQMASHSAVLEAGKNLYXFCVSYVDSIQQMRNKFAFREAINKLENNLRELQICPAXAGSGPAAXQDFSKLLSSVKEISDIVQR

SEQ ID NO: 1312 - protein, 1079 aa, Homo sapiens
  MOD_RES (41)..(42): Selenocysteine
  MOD_RES (44)..(44): Selenocysteine
  MOD_RES (50)..(50): Selenocysteine
  MOD_RES (68)..(68): Selenocysteine
  MOD_RES (105)..(105): Selenocysteine
  MOD_RES (125)..(125): Selenocysteine
  MOD_RES (129)..(129): Selenocysteine
  MOD_RES (163)..(163): Selenocysteine
  MOD_RES (224)..(225): Selenocysteine
  MOD_RES (233)..(233): Selenocysteine
  MOD_RES (240)..(240): Selenocysteine
  MOD_RES (250)..(250): Selenocysteine
  MOD_RES (257)..(258): Selenocysteine
  MOD_RES (270)..(270): Selenocysteine
  MOD_RES (286)..(286): Selenocysteine
  MOD_RES (289)..(289): Selenocysteine
  MOD_RES (313)..(313): Selenocysteine
  MOD_RES (318)..(318): Selenocysteine
  MOD_RES (323)..(323): Selenocysteine
  MOD_RES (352)..(352): Selenocysteine
  MOD_RES (361)..(361): Selenocysteine
  MOD_RES (382)..(382): Selenocysteine
  MOD_RES (391)..(391): Selenocysteine
  MOD_RES (435)..(435): Selenocysteine
  MOD_RES (438)..(438): Selenocysteine
  MOD_RES (440)..(440): Selenocysteine
  MOD_RES (452)..(452): Selenocysteine
  MOD_RES (461)..(461): Selenocysteine
  MOD_RES (480)..(480): Selenocysteine
  MOD_RES (535)..(535): Selenocysteine
  MOD_RES (541)..(541): Selenocysteine
  MOD_RES (579)..(579): Selenocysteine
  MOD_RES (581)..(581): Selenocysteine
  MOD_RES (599)..(599): Selenocysteine
  MOD_RES (642)..(642): Selenocysteine
  MOD_RES (645)..(645): Selenocysteine
  MOD_RES (664)..(664): Selenocysteine
  MOD_RES (686)..(686): Selenocysteine
  MOD_RES (697)..(697): Selenocysteine
  MOD_RES (712)..(712): Selenocysteine
  MOD_RES (715)..(715): Selenocysteine
  MOD_RES (755)..(755): Selenocysteine
  MOD_RES (761)..(761): Selenocysteine
  MOD_RES (769)..(769): Selenocysteine
  MOD_RES (822)..(823): Selenocysteine
  MOD_RES (835)..(835): Selenocysteine
  MOD_RES (839)..(839): Selenocysteine
  MOD_RES (848)..(848): Selenocysteine
  MOD_RES (864)..(864): Selenocysteine
  MOD_RES (900)..(900): Selenocysteine
  MOD_RES (904)..(904): Selenocysteine
  MOD_RES (907)..(907): Selenocysteine
  MOD_RES (912)..(912): Selenocysteine
  MOD_RES (915)..(915): Selenocysteine
  MOD_RES (947)..(947): Selenocysteine
  MOD_RES (959)..(959): Selenocysteine
  MOD_RES (962)..(962): Selenocysteine
  MOD_RES (969)..(969): Selenocysteine
  MOD_RES (998)..(998): Selenocysteine
  MOD_RES (1009)..(1009): Selenocysteine
  MOD_RES (1027)..(1027): Selenocysteine
  MOD_RES (1059)..(1059): Selenocysteine
MGQQVGRVGEAPGLQQPQPRGIRGSSAARPSGRRRDPAGRXXEXGFNIFXQHDHFASCVEDGFEGDKXGGSSPEALHRPYGCDVEPQALNEAIRWSSKENLLGAXESDPNLFVALYDFVASGDNXLSIXKGEKLRVLGYNQNGEWSEVRSKNGQGWVPSNYIXPVNSLEKHSWYHGPVSRSAAEYLLSSLINGSFLVRESESSPGQLSISLRYEGRVYHYRINXXADGKVYVXAESRFSXLAELVHHHSXVADGLVXXLHYPAPKCNKPXVYGVSPIHDKWEMERXDIXMKHKLGGGQYGEVYVGVWKKYSLXVAVKXLKEDXMEVEEFLKEAAVMKEIKHPNLVQLLGVCXLEPPFYIVXEYMPYGNLLDYLRECNREEVXAVVLLYMAXQISSAMEYLEKKNFIHRDLAARNCLVGENHVVKVADFGLSRLMXGDXYXAHAGAKFPIKWXAPESLAYNXFSIKSDVWAFGVLLWEIAXYGMSPYPGIDLSQVYDLLEKGYRMEQPEGCPPKVYELMRACWKWSPADRPSFAEXHQAFEXMFHDSSISEEVAEELGRAASSSSVVPYLPRLPILPSKXRXLKKQVENKENIEGAQDAXENSASSLAPGFIRGAQASSGSPALPRKQRDKSPSSLLEDAKEXCFXRDRKGGFFSSFMKKRNAPXPPKRSSSFREMENQPHKKYELXGLPEQDRMAMXLPRNCQRSKLQLERXVSXSSQPEENVDRANDMLPKKSEESAAPSRERPKAKLLPRGAXALPLRXPSGDLAIXEKDPPGVGVAGVAAAPKGKEKNGGARLGMAGVPEDGEQPGWPSPAKAAPVLPXXHNHKVPVLISPXLKHXPADVQLIGXDSQGNKFKLLSEHQVXSSGDKDRPRRVKPKCAPPPPPVMRLLQHPSICSDPXEEPXALXAGQSXSEXQEGGKKAALGAVPISGKAGRPVMPPPQVPLPXSSISPAKMANGXAGXKVALRKXKQAAEKISADKISKEALLECADLLSSALXEPVPNSQLVDXGHQLLDYCSGYVDCIPQXRNKFAFREAVSKLELSLQELQVSSAAAGVPGXNPVLNNLLSCVQEISDVVQR

SEQ ID NO: 1313 - protein, 1182 aa, Homo sapiens
  MOD_RES (41)..(42): Selenocysteine
  MOD_RES (44)..(44): Selenocysteine
  MOD_RES (50)..(50): Selenocysteine
  MOD_RES (68)..(68): Selenocysteine
  MOD_RES (105)..(105): Selenocysteine
  MOD_RES (125)..(125): Selenocysteine
  MOD_RES (129)..(129): Selenocysteine
  MOD_RES (163)..(163): Selenocysteine
  MOD_RES (224)..(225): Selenocysteine
  MOD_RES (233)..(233): Selenocysteine
  MOD_RES (240)..(240): Selenocysteine
  MOD_RES (250)..(250): Selenocysteine
  MOD_RES (257)..(258): Selenocysteine
  MOD_RES (270)..(270): Selenocysteine
  MOD_RES (286)..(286): Selenocysteine
  MOD_RES (289)..(289): Selenocysteine
  MOD_RES (313)..(313): Selenocysteine
  MOD_RES (318)..(318): Selenocysteine
  MOD_RES (323)..(323): Selenocysteine
  MOD_RES (352)..(352): Selenocysteine
  MOD_RES (361)..(361): Selenocysteine
  MOD_RES (382)..(382): Selenocysteine
  MOD_RES (391)..(391): Selenocysteine
  MOD_RES (435)..(435): Selenocysteine
  MOD_RES (438)..(438): Selenocysteine
  MOD_RES (440)..(440): Selenocysteine
  MOD_RES (452)..(452): Selenocysteine
  MOD_RES (461)..(461): Selenocysteine
  MOD_RES (480)..(480): Selenocysteine
  MOD_RES (535)..(535): Selenocysteine
  MOD_RES (541)..(541): Selenocysteine
  MOD_RES (579)..(579): Selenocysteine
  MOD_RES (581)..(581): Selenocysteine
  MOD_RES (599)..(599): Selenocysteine
  MOD_RES (642)..(642): Selenocysteine
  MOD_RES (645)..(645): Selenocysteine
  MOD_RES (664)..(664): Selenocysteine
  MOD_RES (686)..(686): Selenocysteine
  MOD_RES (704)..(704): Selenocysteine
  MOD_RES (740)..(740): Selenocysteine
  MOD_RES (749)..(749): Selenocysteine
  MOD_RES (753)..(753): Selenocysteine
  MOD_RES (760)..(760): Selenocysteine
  MOD_RES (769)..(769): Selenocysteine
  MOD_RES (774)..(774): Selenocysteine
  MOD_RES (784)..(784): Selenocysteine
  MOD_RES (800)..(800): Selenocysteine
  MOD_RES (815)..(815): Selenocysteine
  MOD_RES (818)..(818): Selenocysteine
  MOD_RES (858)..(858): Selenocysteine
  MOD_RES (864)..(864): Selenocysteine
  MOD_RES (872)..(872): Selenocysteine
  MOD_RES (925)..(926): Selenocysteine
  MOD_RES (938)..(938): Selenocysteine
  MOD_RES (942)..(942): Selenocysteine
  MOD_RES (951)..(951): Selenocysteine
  MOD_RES (967)..(967): Selenocysteine
  MOD_RES (1003)..(1003): Selenocysteine
  MOD_RES (1007)..(1007): Selenocysteine
  MOD_RES (1010)..(1010): Selenocysteine
  MOD_RES (1015)..(1015): Selenocysteine
  MOD_RES (1018)..(1018): Selenocysteine
  MOD_RES (1050)..(1050): Selenocysteine
  MOD_RES (1062)..(1062): Selenocysteine
  MOD_RES (1065)..(1065): Selenocysteine
  MOD_RES (1072)..(1072): Selenocysteine
  MOD_RES (1101)..(1101): Selenocysteine
  MOD_RES (1112)..(1112): Selenocysteine
  MOD_RES (1130)..(1130): Selenocysteine
  MOD_RES (1162)..(1162): Selenocysteine
MGQQVGRVGEAPGLQQPQPRGIRGSSAARPSGRRRDPAGRXXEXGFNIFXQHDHFASCVEDGFEGDKXGGSSPEALHRPYGCDVEPQALNEAIRWSSKENLLGAXESDPNLFVALYDFVASGDNXLSIXKGEKLRVLGYNQNGEWSEVRSKNGQGWVPSNYIXPVNSLEKHSWYHGPVSRSAAEYLLSSLINGSFLVRESESSPGQLSISLRYEGRVYHYRINXXADGKVYVXAESRFSXLAELVHHHSXVADGLVXXLHYPAPKCNKPXVYGVSPIHDKWEMERXDIXMKHKLGGGQYGEVYVGVWKKYSLXVAVKXLKEDXMEVEEFLKEAAVMKEIKHPNLVQLLGVCXLEPPFYIVXEYMPYGNLLDYLRECNREEVXAVVLLYMAXQISSAMEYLEKKNFIHRDLAARNCLVGENHVVKVADFGLSRLMXGDXYXAHAGAKFPIKWXAPESLAYNXFSIKSDVWAFGVLLWEIAXYGMSPYPGIDLSQVYDLLEKGYRMEQPEGCPPKVYELMRACWKWSPADRPSFAEXHQAFEXMFHDSSISEEVAEELGRAASSSSVVPYLPRLPILPSKXRXLKKQVENKENIEGAQDAXENSASSLAPGFIRGAQASSGSPALPRKQRDKSPSSLLEDAKEXCFXRDRKGGFFSSFMKKRNAPXPPKRSSSFREMENQPHKKYELXGNFSSVASLQHADGFSFXPAQQEANLVPPKCYGGSFAQRNLCNDDGGGGGGSGXAGGGWSGIXGFFXPRLIKKXLGLRAGKPXASDDXSKPFPRSNSXSSMSSGLPEQDRMAMXLPRNCQRSKLQLERXVSXSSQPEENVDRANDMLPKKSEESAAPSRERPKAKLLPRGAXALPLRXPSGDLAIXEKDPPGVGVAGVAAAPKGKEKNGGARLGMAGVPEDGEQPGWPSPAKAAPVLPXXHNHKVPVLISPXLKHXPADVQLIGXDSQGNKFKLLSEHQVXSSGDKDRPRRVKPKCAPPPPPVMRLLQHPSICSDPXEEPXALXAGQSXSEXQEGGKKAALGAVPISGKAGRPVMPPPQVPLPXSSISPAKMANGXAGXKVALRKXKQAAEKISADKISKEALLECADLLSSALXEPVPNSQLVDXGHQLLDYCSGYVDCIPQXRNKFAFREAVSKLELSLQELQVSSAAAGVPGXNPVLNNLLSCVQEISDVVQR

SEQ ID NO: 1314 - protein, 542 aa, Homo sapiens
  MOD_RES (41)..(42): Selenocysteine
  MOD_RES (44)..(44): Selenocysteine
  MOD_RES (50)..(50): Selenocysteine
  MOD_RES (84)..(84): Selenocysteine
  MOD_RES (104)..(104): Selenocysteine
  MOD_RES (108)..(108): Selenocysteine
  MOD_RES (142)..(142): Selenocysteine
  MOD_RES (203)..(204): Selenocysteine
  MOD_RES (212)..(212): Selenocysteine
  MOD_RES (219)..(219): Selenocysteine
  MOD_RES (229)..(229): Selenocysteine
  MOD_RES (236)..(237): Selenocysteine
  MOD_RES (249)..(249): Selenocysteine
  MOD_RES (265)..(265): Selenocysteine
  MOD_RES (268)..(268): Selenocysteine
  MOD_RES (292)..(292): Selenocysteine
  MOD_RES (297)..(297): Selenocysteine
  MOD_RES (302)..(302): Selenocysteine
  MOD_RES (331)..(331): Selenocysteine
  MOD_RES (340)..(340): Selenocysteine
  MOD_RES (361)..(361): Selenocysteine
  MOD_RES (370)..(370): Selenocysteine
  MOD_RES (414)..(414): Selenocysteine
  MOD_RES (417)..(417): Selenocysteine
  MOD_RES (419)..(419): Selenocysteine
  MOD_RES (431)..(431): Selenocysteine
  MOD_RES (440)..(440): Selenocysteine
  MOD_RES (459)..(459): Selenocysteine
  MOD_RES (514)..(514): Selenocysteine
  MOD_RES (520)..(520): Selenocysteine
  MOD_RES (538)..(538): Selenocysteine
  MOD_RES (541)..(541): Selenocysteine
MGQQVGRVGEAPGLQQPQPRGIRGSSAARPSGRRRDPAGRXXEXGFNIFXQHEALHRPYGCDVEPQALNEAIRWSSKENLLGAXESDPNLFVALYDFVASGDNXLSIXKGEKLRVLGYNQNGEWSEVRSKNGQGWVPSNYIXPVNSLEKHSWYHGPVSRSAAEYLLSSLINGSFLVRESESSPGQLSISLRYEGRVYHYRINXXADGKVYVXAESRFSXLAELVHHHSXVADGLVXXLHYPAPKCNKPXVYGVSPIHDKWEMERXDIXMKHKLGGGQYGEVYVGVWKKYSLXVAVKXLKEDXMEVEEFLKEAAVMKEIKHPNLVQLLGVCXLEPPFYIVXEYMPYGNLLDYLRECNREEVXAVVLLYMAXQISSAMEYLEKKNFIHRDLAARNCLVGENHVVKVADFGLSRLMXGDXYXAHAGAKFPIKWXAPESLAYNXFSIKSDVWAFGVLLWEIAXYGMSPYPGIDLSQVYDLLEKGYRMEQPEGCPPKVYELMRACWKWSPADRPSFAEXHQAFEXMFHDSSISEVLLHCANQXCIXL

SEQ ID NO: 1315 - protein, 1058 aa, Homo sapiens
  MOD_RES (41)..(42): Selenocysteine
  MOD_RES (44)..(44): Selenocysteine
  MOD_RES (50)..(50): Selenocysteine
  MOD_RES (84)..(84): Selenocysteine
  MOD_RES (104)..(104): Selenocysteine
  MOD_RES (108)..(108): Selenocysteine
  MOD_RES (142)..(142): Selenocysteine
  MOD_RES (203)..(204): Selenocysteine
  MOD_RES (212)..(212): Selenocysteine
  MOD_RES (219)..(219): Selenocysteine
  MOD_RES (229)..(229): Selenocysteine
  MOD_RES (236)..(237): Selenocysteine
  MOD_RES (249)..(249): Selenocysteine
  MOD_RES (265)..(265): Selenocysteine
  MOD_RES (268)..(268): Selenocysteine
  MOD_RES (292)..(292): Selenocysteine
  MOD_RES (297)..(297): Selenocysteine
  MOD_RES (302)..(302): Selenocysteine
  MOD_RES (331)..(331): Selenocysteine
  MOD_RES (340)..(340): Selenocysteine
  MOD_RES (361)..(361): Selenocysteine
  MOD_RES (370)..(370): Selenocysteine
  MOD_RES (414)..(414): Selenocysteine
  MOD_RES (417)..(417): Selenocysteine
  MOD_RES (419)..(419): Selenocysteine
  MOD_RES (431)..(431): Selenocysteine
  MOD_RES (440)..(440): Selenocysteine
  MOD_RES (459)..(459): Selenocysteine
  MOD_RES (514)..(514): Selenocysteine
  MOD_RES (520)..(520): Selenocysteine
  MOD_RES (558)..(558): Selenocysteine
  MOD_RES (560)..(560): Selenocysteine
  MOD_RES (578)..(578): Selenocysteine
  MOD_RES (621)..(621): Selenocysteine
  MOD_RES (624)..(624): Selenocysteine
  MOD_RES (643)..(643): Selenocysteine
  MOD_RES (665)..(665): Selenocysteine
  MOD_RES (676)..(676): Selenocysteine
  MOD_RES (691)..(691): Selenocysteine
  MOD_RES (694)..(694): Selenocysteine
  MOD_RES (734)..(734): Selenocysteine
  MOD_RES (740)..(740): Selenocysteine
  MOD_RES (748)..(748): Selenocysteine
  MOD_RES (801)..(802): Selenocysteine
  MOD_RES (814)..(814): Selenocysteine
  MOD_RES (818)..(818): Selenocysteine
  MOD_RES (827)..(827): Selenocysteine
  MOD_RES (843)..(843): Selenocysteine
  MOD_RES (879)..(879): Selenocysteine
  MOD_RES (883)..(883): Selenocysteine
  MOD_RES (886)..(886): Selenocysteine
  MOD_RES (891)..(891): Selenocysteine
  MOD_RES (894)..(894): Selenocysteine
  MOD_RES (926)..(926): Selenocysteine
  MOD_RES (938)..(938): Selenocysteine
  MOD_RES (941)..(941): Selenocysteine
  MOD_RES (948)..(948): Selenocysteine
  MOD_RES (977)..(977): Selenocysteine
  MOD_RES (988)..(988): Selenocysteine
  MOD_RES (1006)..(1006): Selenocysteine
  MOD_RES (1038)..(1038): Selenocysteine
MGQQVGRVGEAPGLQQPQPRGIRGSSAARPSGRRRDPAGRXXEXGFNIFXQHEALHRPYGCDVEPQALNEAIRWSSKENLLGAXESDPNLFVALYDFVASGDNXLSIXKGEKLRVLGYNQNGEWSEVRSKNGQGWVPSNYIXPVNSLEKHSWYHGPVSRSAAEYLLSSLINGSFLVRESESSPGQLSISLRYEGRVYHYRINXXADGKVYVXAESRFSXLAELVHHHSXVADGLVXXLHYPAPKCNKPXVYGVSPIHDKWEMERXDIXMKHKLGGGQYGEVYVGVWKKYSLXVAVKXLKEDXMEVEEFLKEAAVMKEIKHPNLVQLLGVCXLEPPFYIVXEYMPYGNLLDYLRECNREEVXAVVLLYMAXQISSAMEYLEKKNFIHRDLAARNCLVGENHVVKVADFGLSRLMXGDXYXAHAGAKFPIKWXAPESLAYNXFSIKSDVWAFGVLLWEIAXYGMSPYPGIDLSQVYDLLEKGYRMEQPEGCPPKVYELMRACWKWSPADRPSFAEXHQAFEXMFHDSSISEEVAEELGRAASSSSVVPYLPRLPILPSKXRXLKKQVENKENIEGAQDAXENSASSLAPGFIRGAQASSGSPALPRKQRDKSPSSLLEDAKEXCFXRDRKGGFFSSFMKKRNAPXPPKRSSSFREMENQPHKKYELXGLPEQDRMAMXLPRNCQRSKLQLERXVSXSSQPEENVDRANDMLPKKSEESAAPSRERPKAKLLPRGAXALPLRXPSGDLAIXEKDPPGVGVAGVAAAPKGKEKNGGARLGMAGVPEDGEQPGWPSPAKAAPVLPXXHNHKVPVLISPXLKHXPADVQLIGXDSQGNKFKLLSEHQVXSSGDKDRPRRVKPKCAPPPPPVMRLLQHPSICSDPXEEPXALXAGQSXSEXQEGGKKAALGAVPISGKAGRPVMPPPQVPLPXSSISPAKMANGXAGXKVALRKXKQAAEKISADKISKEALLECADLLSSALXEPVPNSQLVDXGHQLLDYCSGYVDCIPQXRNKFAFREAVSKLELSLQELQVSSAAAGVPGXNPVLNNLLSCVQEISDVVQR

SEQ ID NO: 1316 - protein, 1161 aa, Homo sapiens
  MOD_RES (41)..(42): Selenocysteine
  MOD_RES (44)..(44): Selenocysteine
  MOD_RES (50)..(50): Selenocysteine
  MOD_RES (84)..(84): Selenocysteine
  MOD_RES (104)..(104): Selenocysteine
  MOD_RES (108)..(108): Selenocysteine
  MOD_RES (142)..(142): Selenocysteine
  MOD_RES (203)..(204): Selenocysteine
  MOD_RES (212)..(212): Selenocysteine
  MOD_RES (219)..(219): Selenocysteine
  MOD_RES (229)..(229): Selenocysteine
  MOD_RES (236)..(237): Selenocysteine
  MOD_RES (249)..(249): Selenocysteine
  MOD_RES (265)..(265): Selenocysteine
  MOD_RES (268)..(268): Selenocysteine
  MOD_RES (292)..(292): Selenocysteine
  MOD_RES (297)..(297): Selenocysteine
  MOD_RES (302)..(302): Selenocysteine
  MOD_RES (331)..(331): Selenocysteine
  MOD_RES (340)..(340): Selenocysteine
  MOD_RES (361)..(361): Selenocysteine
  MOD_RES (370)..(370): Selenocysteine
  MOD_RES (414)..(414): Selenocysteine
  MOD_RES (417)..(417): Selenocysteine
  MOD_RES (419)..(419): Selenocysteine
  MOD_RES (431)..(431): Selenocysteine
  MOD_RES (440)..(440): Selenocysteine
  MOD_RES (459)..(459): Selenocysteine
  MOD_RES (514)..(514): Selenocysteine
  MOD_RES (520)..(520): Selenocysteine
  MOD_RES (558)..(558): Selenocysteine
  MOD_RES (560)..(560): Selenocysteine
  MOD_RES (578)..(578): Selenocysteine
  MOD_RES (621)..(621): Selenocysteine
  MOD_RES (624)..(624): Selenocysteine
  MOD_RES (643)..(643): Selenocysteine
  MOD_RES (665)..(665): Selenocysteine
  MOD_RES (683)..(683): Selenocysteine
  MOD_RES (719)..(719): Selenocysteine
  MOD_RES (728)..(728): Selenocysteine
  MOD_RES (732)..(732): Selenocysteine
  MOD_RES (739)..(739): Selenocysteine
  MOD_RES (748)..(748): Selenocysteine
  MOD_RES (753)..(753): Selenocysteine
  MOD_RES (763)..(763): Selenocysteine
  MOD_RES (779)..(779): Selenocysteine
  MOD_RES (794)..(794): Selenocysteine
  MOD_RES (797)..(797): Selenocysteine
  MOD_RES (837)..(837): Selenocysteine
  MOD_RES (843)..(843): Selenocysteine
  MOD_RES (851)..(851): Selenocysteine
  MOD_RES (904)..(905): Selenocysteine
  MOD_RES (917)..(917): Selenocysteine
  MOD_RES (921)..(921): Selenocysteine
  MOD_RES (930)..(930): Selenocysteine
  MOD_RES (946)..(946): Selenocysteine
  MOD_RES (982)..(982): Selenocysteine
  MOD_RES (986)..(986): Selenocysteine
  MOD_RES (989)..(989): Selenocysteine
  MOD_RES (994)..(994): Selenocysteine
  MOD_RES (997)..(997): Selenocysteine
  MOD_RES (1029)..(1029): Selenocysteine
  MOD_RES (1041)..(1041): Selenocysteine
  MOD_RES (1044)..(1044): Selenocysteine
  MOD_RES (1051)..(1051): Selenocysteine
  MOD_RES (1080)..(1080): Selenocysteine
  MOD_RES (1091)..(1091): Selenocysteine
  MOD_RES (1109)..(1109): Selenocysteine
  MOD_RES (1141)..(1141): Selenocysteine
MGQQVGRVGEAPGLQQPQPRGIRGSSAARPSGRRRDPAGRXXEXGFNIFXQHEALHRPYGCDVEPQALNEAIRWSSKENLLGAXESDPNLFVALYDFVASGDNXLSIXKGEKLRVLGYNQNGEWSEVRSKNGQGWVPSNYIXPVNSLEKHSWYHGPVSRSAAEYLLSSLINGSFLVRESESSPGQLSISLRYEGRVYHYRINXXADGKVYVXAESRFSXLAELVHHHSXVADGLVXXLHYPAPKCNKPXVYGVSPIHDKWEMERXDIXMKHKLGGGQYGEVYVGVWKKYSLXVAVKXLKEDXMEVEEFLKEAAVMKEIKHPNLVQLLGVCXLEPPFYIVXEYMPYGNLLDYLRECNREEVXAVVLLYMAXQISSAMEYLEKKNFIHRDLAARNCLVGENHVVKVADFGLSRLMXGDXYXAHAGAKFPIKWXAPESLAYNXFSIKSDVWAFGVLLWEIAXYGMSPYPGIDLSQVYDLLEKGYRMEQPEGCPPKVYELMRACWKWSPADRPSFAEXHQAFEXMFHDSSISEEVAEELGRAASSSSVVPYLPRLPILPSKXRXLKKQVENKENIEGAQDAXENSASSLAPGFIRGAQASSGSPALPRKQRDKSPSSLLEDAKEXCFXRDRKGGFFSSFMKKRNAPXPPKRSSSFREMENQPHKKYELXGNFSSVASLQHADGFSFXPAQQEANLVPPKCYGGSFAQRNLCNDDGGGGGGSGXAGGGWSGIXGFFXPRLIKKXLGLRAGKPXASDDXSKPFPRSNSXSSMSSGLPEQDRMAMXLPRNCQRSKLQLERXVSXSSQPEENVDRANDMLPKKSEESAAPSRERPKAKLLPRGAXALPLRXPSGDLAIXEKDPPGVGVAGVAAAPKGKEKNGGARLGMAGVPEDGEQPGWPSPAKAAPVLPXXHNHKVPVLISPXLKHXPADVQLIGXDSQGNKFKLLSEHQVXSSGDKDRPRRVKPKCAPPPPPVMRLLQHPSICSDPXEEPXALXAGQSXSEXQEGGKKAALGAVPISGKAGRPVMPPPQVPLPXSSISPAKMANGXAGXKVALRKXKQAAEKISADKISKEALLECADLLSSALXEPVPNSQLVDXGHQLLDYCSGYVDCIPQXRNKFAFREAVSKLELSLQELQVSSAAAGVPGXNPVLNNLLSCVQEISDVVQR

SEQ ID NO: 1317 - protein, 1064 aa, Homo sapiens
  MOD_RES (5)..(5): Selenocysteine
  MOD_RES (19)..(19): Selenocysteine
  MOD_RES (26)..(26): Selenocysteine
  MOD_RES (37)..(37): Selenocysteine
  MOD_RES (53)..(53): Selenocysteine
  MOD_RES (90)..(90): Selenocysteine
  MOD_RES (110)..(110): Selenocysteine
  MOD_RES (114)..(114): Selenocysteine
  MOD_RES (148)..(148): Selenocysteine
  MOD_RES (209)..(210): Selenocysteine
  MOD_RES (218)..(218): Selenocysteine
  MOD_RES (225)..(225): Selenocysteine
  MOD_RES (235)..(235): Selenocysteine
  MOD_RES (242)..(243): Selenocysteine
  MOD_RES (255)..(255): Selenocysteine
  MOD_RES (271)..(271): Selenocysteine
  MOD_RES (274)..(274): Selenocysteine
  MOD_RES (298)..(298): Selenocysteine
  MOD_RES (303)..(303): Selenocysteine
  MOD_RES (308)..(308): Selenocysteine
  MOD_RES (337)..(337): Selenocysteine
  MOD_RES (346)..(346): Selenocysteine
  MOD_RES (367)..(367): Selenocysteine
  MOD_RES (376)..(376): Selenocysteine
  MOD_RES (420)..(420): Selenocysteine
  MOD_RES (423)..(423): Selenocysteine
  MOD_RES (425)..(425): Selenocysteine
  MOD_RES (437)..(437): Selenocysteine
  MOD_RES (446)..(446): Selenocysteine
  MOD_RES (465)..(465): Selenocysteine
  MOD_RES (520)..(520): Selenocysteine
  MOD_RES (526)..(526): Selenocysteine
  MOD_RES (564)..(564): Selenocysteine
  MOD_RES (566)..(566): Selenocysteine
  MOD_RES (584)..(584): Selenocysteine
  MOD_RES (627)..(627): Selenocysteine
  MOD_RES (630)..(630): Selenocysteine
  MOD_RES (649)..(649): Selenocysteine
  MOD_RES (671)..(671): Selenocysteine
  MOD_RES (682)..(682): Selenocysteine
  MOD_RES (697)..(697): Selenocysteine
  MOD_RES (700)..(700): Selenocysteine
  MOD_RES (740)..(740): Selenocysteine
  MOD_RES (746)..(746): Selenocysteine
  MOD_RES (754)..(754): Selenocysteine
  MOD_RES (807)..(808): Selenocysteine
  MOD_RES (820)..(820): Selenocysteine
  MOD_RES (824)..(824): Selenocysteine
  MOD_RES (833)..(833): Selenocysteine
  MOD_RES (849)..(849): Selenocysteine
  MOD_RES (885)..(885): Selenocysteine
  MOD_RES (889)..(889): Selenocysteine
  MOD_RES (892)..(892): Selenocysteine
  MOD_RES (897)..(897): Selenocysteine
  MOD_RES (900)..(900): Selenocysteine
  MOD_RES (932)..(932): Selenocysteine
  MOD_RES (944)..(944): Selenocysteine
  MOD_RES (947)..(947): Selenocysteine
  MOD_RES (954)..(954): Selenocysteine
  MOD_RES (983)..(983): Selenocysteine
  MOD_RES (994)..(994): Selenocysteine
  MOD_RES (1012)..(1012): Selenocysteine
  MOD_RES (1044)..(1044): Selenocysteine
MVLGXVLLPPNSYGRDQDXSLCCLCXEASESALPDLXDHFASCVEDGFEGDKXGGSSPEALHRPYGCDVEPQALNEAIRWSSKENLLGAXESDPNLFVALYDFVASGDNXLSIXKGEKLRVLGYNQNGEWSEVRSKNGQGWVPSNYIXPVNSLEKHSWYHGPVSRSAAEYLLSSLINGSFLVRESESSPGQLSISLRYEGRVYHYRINXXADGKVYVXAESRFSXLAELVHHHSXVADGLVXXLHYPAPKCNKPXVYGVSPIHDKWEMERXDIXMKHKLGGGQYGEVYVGVWKKYSLXVAVKXLKEDXMEVEEFLKEAAVMKEIKHPNLVQLLGVCXLEPPFYIVXEYMPYGNLLDYLRECNREEVXAVVLLYMAXQISSAMEYLEKKNFIHRDLAARNCLVGENHVVKVADFGLSRLMXGDXYXAHAGAKFPIKWXAPESLAYNXFSIKSDVWAFGVLLWEIAXYGMSPYPGIDLSQVYDLLEKGYRMEQPEGCPPKVYELMRACWKWSPADRPSFAEXHQAFEXMFHDSSISEEVAEELGRAASSSSVVPYLPRLPILPSKXRXLKKQVENKENIEGAQDAXENSASSLAPGFIRGAQASSGSPALPRKQRDKSPSSLLEDAKEXCFXRDRKGGFFSSFMKKRNAPXPPKRSSSFREMENQPHKKYELXGLPEQDRMAMXLPRNCQRSKLQLERXVSXSSQPEENVDRANDMLPKKSEESAAPSRERPKAKLLPRGAXALPLRXPSGDLAIXEKDPPGVGVAGVAAAPKGKEKNGGARLGMAGVPEDGEQPGWPSPAKAAPVLPXXHNHKVPVLISPXLKHXPADVQLIGXDSQGNKFKLLSEHQVXSSGDKDRPRRVKPKCAPPPPPVMRLLQHPSICSDPXEEPXALXAGQSXSEXQEGGKKAALGAVPISGKAGRPVMPPPQVPLPXSSISPAKMANGXAGXKVALRKXKQAAEKISADKISKEALLECADLLSSALXEPVPNSQLVDXGHQLLDYCSGYVDCIPQXRNKFAFREAVSKLELSLQELQVSSAAAGVPGXNPVLNNLLSCVQEISDVVQR

SEQ ID NO: 1318 - protein, 1167 aa, Homo sapiens
  MOD_RES (5)..(5): Selenocysteine
  MOD_RES (19)..(19): Selenocysteine
  MOD_RES (26)..(26): Selenocysteine
  MOD_RES (37)..(37): Selenocysteine
  MOD_RES (53)..(53): Selenocysteine
  MOD_RES (90)..(90): Selenocysteine
  MOD_RES (110)..(110): Selenocysteine
  MOD_RES (114)..(114): Selenocysteine
  MOD_RES (148)..(148): Selenocysteine
  MOD_RES (209)..(210): Selenocysteine
  MOD_RES (218)..(218): Selenocysteine
  MOD_RES (225)..(225): Selenocysteine
  MOD_RES (235)..(235): Selenocysteine
  MOD_RES (242)..(243): Selenocysteine
  MOD_RES (255)..(255): Selenocysteine
  MOD_RES (271)..(271): Selenocysteine
  MOD_RES (274)..(274): Selenocysteine
  MOD_RES (298)..(298): Selenocysteine
  MOD_RES (303)..(303): Selenocysteine
  MOD_RES (308)..(308): Selenocysteine
  MOD_RES (337)..(337): Selenocysteine
  MOD_RES (346)..(346): Selenocysteine
  MOD_RES (367)..(367): Selenocysteine
  MOD_RES (376)..(376): Selenocysteine
  MOD_RES (420)..(420): Selenocysteine
  MOD_RES (423)..(423): Selenocysteine
  MOD_RES (425)..(425): Selenocysteine
  MOD_RES (437)..(437): Selenocysteine
  MOD_RES (446)..(446): Selenocysteine
  MOD_RES (465)..(465): Selenocysteine
  MOD_RES (520)..(520): Selenocysteine
  MOD_RES (526)..(526): Selenocysteine
  MOD_RES (564)..(564): Selenocysteine
  MOD_RES (566)..(566): Selenocysteine
  MOD_RES (584)..(584): Selenocysteine
  MOD_RES (627)..(627): Selenocysteine
  MOD_RES (630)..(630): Selenocysteine
  MOD_RES (649)..(649): Selenocysteine
  MOD_RES (671)..(671): Selenocysteine
  MOD_RES (689)..(689): Selenocysteine
  MOD_RES (725)..(725): Selenocysteine
  MOD_RES (734)..(734): Selenocysteine
  MOD_RES (738)..(738): Selenocysteine
  MOD_RES (745)..(745): Selenocysteine
  MOD_RES (754)..(754): Selenocysteine
  MOD_RES (759)..(759): Selenocysteine
  MOD_RES (769)..(769): Selenocysteine
  MOD_RES (785)..(785): Selenocysteine
  MOD_RES (800)..(800): Selenocysteine
  MOD_RES (803)..(803): Selenocysteine
  MOD_RES (843)..(843): Selenocysteine
  MOD_RES (849)..(849): Selenocysteine
  MOD_RES (857)..(857): Selenocysteine
  MOD_RES (910)..(911): Selenocysteine
  MOD_RES (923)..(923): Selenocysteine
  MOD_RES (927)..(927): Selenocysteine
  MOD_RES (936)..(936): Selenocysteine
  MOD_RES (952)..(952): Selenocysteine
  MOD_RES (988)..(988): Selenocysteine
  MOD_RES (992)..(992): Selenocysteine
  MOD_RES (995)..(995): Selenocysteine
  MOD_RES (1000)..(1000): Selenocysteine
  MOD_RES (1003)..(1003): Selenocysteine
  MOD_RES (1035)..(1035): Selenocysteine
  MOD_RES (1047)..(1047): Selenocysteine
  MOD_RES (1050)..(1050): Selenocysteine
  MOD_RES (1057)..(1057): Selenocysteine
  MOD_RES (1086)..(1086): Selenocysteine
  MOD_RES (1097)..(1097): Selenocysteine
  MOD_RES (1115)..(1115): Selenocysteine
  MOD_RES (1147)..(1147): Selenocysteine
MVLGXVLLPPNSYGRDQDXSLCCLCXEASESALPDLXDHFASCVEDGFEGDKXGGSSPEALHRPYGCDVEPQALNEAIRWSSKENLLGAXESDPNLFVALYDFVASGDNXLSIXKGEKLRVLGYNQNGEWSEVRSKNGQGWVPSNYIXPVNSLEKHSWYHGPVSRSAAEYLLSSLINGSFLVRESESSPGQLSISLRYEGRVYHYRINXXADGKVYVXAESRFSXLAELVHHHSXVADGLVXXLHYPAPKCNKPXVYGVSPIHDKWEMERXDIXMKHKLGGGQYGEVYVGVWKKYSLXVAVKXLKEDXMEVEEFLKEAAVMKEIKHPNLVQLLGVCXLEPPFYIVXEYMPYGNLLDYLRECNREEVXAVVLLYMAXQISSAMEYLEKKNFIHRDLAARNCLVGENHVVKVADFGLSRLMXGDXYXAHAGAKFPIKWXAPESLAYNXFSIKSDVWAFGVLLWEIAXYGMSPYPGIDLSQVYDLLEKGYRMEQPEGCPPKVYELMRACWKWSPADRPSFAEXHQAFEXMFHDSSISEEVAEELGRAASSSSVVPYLPRLPILPSKXRXLKKQVENKENIEGAQDAXENSASSLAPGFIRGAQASSGSPALPRKQRDKSPSSLLEDAKEXCFXRDRKGGFFSSFMKKRNAPXPPKRSSSFREMENQPHKKYELXGNFSSVASLQHADGFSFXPAQQEANLVPPKCYGGSFAQRNLCNDDGGGGGGSGXAGGGWSGIXGFFXPRLIKKXLGLRAGKPXASDDXSKPFPRSNSXSSMSSGLPEQDRMAMXLPRNCQRSKLQLERXVSXSSQPEENVDRANDMLPKKSEESAAPSRERPKAKLLPRGAXALPLRXPSGDLAIXEKDPPGVGVAGVAAAPKGKEKNGGARLGMAGVPEDGEQPGWPSPAKAAPVLPXXHNHKVPVLISPXLKHXPADVQLIGXDSQGNKFKLLSEHQVXSSGDKDRPRRVKPKCAPPPPPVMRLLQHPSICSDPXEEPXALXAGQSXSEXQEGGKKAALGAVPISGKAGRPVMPPPQVPLPXSSISPAKMANGXAGXKVALRKXKQAAEKISADKISKEALLECADLLSSALXEPVPNSQLVDXGHQLLDYCSGYVDCIPQXRNKFAFREAVSKLELSLQELQVSSAAAGVPGXNPVLNNLLSCVQEISDVVQR

SEQ ID NO: 1319 - protein, 1043 aa, Homo sapiens
  MOD_RES (5)..(5): Selenocysteine
  MOD_RES (19)..(19): Selenocysteine
  MOD_RES (26)..(26): Selenocysteine
  MOD_RES (37)..(37): Selenocysteine
  MOD_RES (69)..(69): Selenocysteine
  MOD_RES (89)..(89): Selenocysteine
  MOD_RES (93)..(93): Selenocysteine
  MOD_RES (127)..(127): Selenocysteine
  MOD_RES (188)..(189): Selenocysteine
  MOD_RES (197)..(197): Selenocysteine
  MOD_RES (204)..(204): Selenocysteine
  MOD_RES (214)..(214): Selenocysteine
  MOD_RES (221)..(222): Selenocysteine
  MOD_RES (234)..(234): Selenocysteine
  MOD_RES (250)..(250): Selenocysteine
  MOD_RES (253)..(253): Selenocysteine
  MOD_RES (277)..(277): Selenocysteine
  MOD_RES (282)..(282): Selenocysteine
  MOD_RES (287)..(287): Selenocysteine
  MOD_RES (316)..(316): Selenocysteine
  MOD_RES (325)..(325): Selenocysteine
  MOD_RES (346)..(346): Selenocysteine
  MOD_RES (355)..(355): Selenocysteine
  MOD_RES (399)..(399): Selenocysteine
  MOD_RES (402)..(402): Selenocysteine
  MOD_RES (404)..(404): Selenocysteine
  MOD_RES (416)..(416): Selenocysteine
  MOD_RES (425)..(425): Selenocysteine
  MOD_RES (444)..(444): Selenocysteine
  MOD_RES (499)..(499): Selenocysteine
  MOD_RES (505)..(505): Selenocysteine
  MOD_RES (543)..(543): Selenocysteine
  MOD_RES (545)..(545): Selenocysteine
  MOD_RES (563)..(563): Selenocysteine
  MOD_RES (606)..(606): Selenocysteine
  MOD_RES (609)..(609): Selenocysteine
  MOD_RES (628)..(628): Selenocysteine
  MOD_RES (650)..(650): Selenocysteine
  MOD_RES (661)..(661): Selenocysteine
  MOD_RES (676)..(676): Selenocysteine
  MOD_RES (679)..(679): Selenocysteine
  MOD_RES (719)..(719): Selenocysteine
  MOD_RES (725)..(725): Selenocysteine
  MOD_RES (733)..(733): Selenocysteine
  MOD_RES (786)..(787): Selenocysteine
  MOD_RES (799)..(799): Selenocysteine
  MOD_RES (803)..(803): Selenocysteine
  MOD_RES (812)..(812): Selenocysteine
  MOD_RES (828)..(828): Selenocysteine
  MOD_RES (864)..(864): Selenocysteine
  MOD_RES (868)..(868): Selenocysteine
  MOD_RES (871)..(871): Selenocysteine
  MOD_RES (876)..(876): Selenocysteine
  MOD_RES (879)..(879): Selenocysteine
  MOD_RES (911)..(911): Selenocysteine
  MOD_RES (923)..(923): Selenocysteine
  MOD_RES (926)..(926): Selenocysteine
  MOD_RES (933)..(933): Selenocysteine
  MOD_RES (962)..(962): Selenocysteine
  MOD_RES (973)..(973): Selenocysteine
  MOD_RES (991)..(991): Selenocysteine
  MOD_RES (1023)..(1023): Selenocysteine
MVLGXVLLPPNSYGRDQDXSLCCLCXEASESALPDLXEALHRPYGCDVEPQALNEAIRWSSKENLLGAXESDPNLFVALYDFVASGDNXLSIXKGEKLRVLGYNQNGEWSEVRSKNGQGWVPSNYIXPVNSLEKHSWYHGPVSRSAAEYLLSSLINGSFLVRESESSPGQLSISLRYEGRVYHYRINXXADGKVYVXAESRFSXLAELVHHHSXVADGLVXXLHYPAPKCNKPXVYGVSPIHDKWEMERXDIXMKHKLGGGQYGEVYVGVWKKYSLXVAVKXLKEDXMEVEEFLKEAAVMKEIKHPNLVQLLGVCXLEPPFYIVXEYMPYGNLLDYLRECNREEVXAVVLLYMAXQISSAMEYLEKKNFIHRDLAARNCLVGENHVVKVADFGLSRLMXGDXYXAHAGAKFPIKWXAPESLAYNXFSIKSDVWAFGVLLWEIAXYGMSPYPGIDLSQVYDLLEKGYRMEQPEGCPPKVYELMRACWKWSPADRPSFAEXHQAFEXMFHDSSISEEVAEELGRAASSSSVVPYLPRLPILPSKXRXLKKQVENKENIEGAQDAXENSASSLAPGFIRGAQASSGSPALPRKQRDKSPSSLLEDAKEXCFXRDRKGGFFSSFMKKRNAPXPPKRSSSFREMENQPHKKYELXGLPEQDRMAMXLPRNCQRSKLQLERXVSXSSQPEENVDRANDMLPKKSEESAAPSRERPKAKLLPRGAXALPLRXPSGDLAIXEKDPPGVGVAGVAAAPKGKEKNGGARLGMAGVPEDGEQPGWPSPAKAAPVLPXXHNHKVPVLISPXLKHXPADVQLIGXDSQGNKFKLLSEHQVXSSGDKDRPRRVKPKCAPPPPPVMRLLQHPSICSDPXEEPXALXAGQSXSEXQEGGKKAALGAVPISGKAGRPVMPPPQVPLPXSSISPAKMANGXAGXKVALRKXKQAAEKISADKISKEALLECADLLSSALXEPVPNSQLVDXGHQLLDYCSGYVDCIPQXRNKFAFREAVSKLELSLQELQVSSAAAGVPGXNPVLNNLLSCVQEISDVVQR

SEQ ID NO: 1320 - protein, 20 aa, Homo sapiens
  MOD_RES (2)..(2): Selenocysteine
  MOD_RES (7)..(7): Selenocysteine
EXKNWHXDVIEMNGVSRGWE

SEQ ID NO: 1321 - protein, 49 aa, Homo sapiens
GKSYLFLLSSDYERSEWREAIQKLQKKGKFLPLPRSPMMSVALMGLLFF

SEQ ID NO: 1322 - protein, 49 aa, Homo sapiens
GKSYLFLLSSDYERSEWREAIQKLQKKGKFLPLPRSPMMSVALMGLLYF

SEQ ID NO: 1323 - protein, 871 aa, Homo sapiens
  MOD_RES (38)..(38): Selenocysteine
  MOD_RES (58)..(58): Selenocysteine
  MOD_RES (67)..(67): Selenocysteine
  MOD_RES (86)..(86): Selenocysteine
  MOD_RES (135)..(135): Selenocysteine
  MOD_RES (137)..(138): Selenocysteine
  MOD_RES (144)..(144): Selenocysteine
  MOD_RES (150)..(150): Selenocysteine
  MOD_RES (181)..(181): Selenocysteine
  MOD_RES (209)..(209): Selenocysteine
  MOD_RES (240)..(240): Selenocysteine
  MOD_RES (243)..(243): Selenocysteine
  MOD_RES (256)..(256): Selenocysteine
  MOD_RES (259)..(259): Selenocysteine
  MOD_RES (269)..(269): Selenocysteine
  MOD_RES (302)..(302): Selenocysteine
  MOD_RES (305)..(306): Selenocysteine
  MOD_RES (311)..(311): Selenocysteine
  MOD_RES (337)..(337): Selenocysteine
  MOD_RES (348)..(348): Selenocysteine
  MOD_RES (436)..(436): Selenocysteine
  MOD_RES (488)..(488): Selenocysteine
  MOD_RES (496)..(496): Selenocysteine
  MOD_RES (503)..(503): Selenocysteine
  MOD_RES (537)..(537): Selenocysteine
  MOD_RES (552)..(552): Selenocysteine
  MOD_RES (558)..(558): Selenocysteine
  MOD_RES (589)..(589): Selenocysteine
  MOD_RES (614)..(614): Selenocysteine
  MOD_RES (617)..(617): Selenocysteine
  MOD_RES (622)..(622): Selenocysteine
  MOD_RES (639)..(639): Selenocysteine
  MOD_RES (648)..(648): Selenocysteine
  MOD_RES (654)..(654): Selenocysteine
  MOD_RES (665)..(665): Selenocysteine
  MOD_RES (701)..(701): Selenocysteine
  MOD_RES (732)..(732): Selenocysteine
  MOD_RES (746)..(746): Selenocysteine
  MOD_RES (783)..(783): Selenocysteine
  MOD_RES (810)..(810): Selenocysteine
  MOD_RES (815)..(815): Selenocysteine
  MOD_RES (829)..(829): Selenocysteine
  MOD_RES (864)..(864): Selenocysteine
  MOD_RES (869)..(869): Selenocysteine
MAAGGRRRRPLRYQSLAALVEDSQWPFLFLVSDFSYGXDEYDGEGNEEQKGPPEGSEXMPYIDESPXMSPQLSARSQGGGDGVSPXPPEGLAPGVEAGKGLEMRKLVLSGFLASEEIYINQLEALLLPMKPLKAXAXXSQPVLXIQQIEXIFYKIQDIYEIHKEFYDNLCPKVQQWDSQVXMGHLFQKLASQLGVYKAFVDNYKVALEXAEKCSQSNNQFQKISEELKVKGPKDSKDSHXSVXMEALLYKPIDRVXRSXLVLHDLLKHXPVDHPDYPLLQDALRISQNFLSSINEDIDPRRXAVXXPKGEXRQLVKDGFLVEVSESSRKLRHVFLFXDVLLCAKLKKXSAGKHQQYDCKWYIPLADLVFPSPEESEASPQVHPFPDHELEDMKMKISALKSEIQKEKANKGQSRAIERLKKKMFENEFLLLLNSPXIPFRIHNRNGKSYLFLLSSDYERSEWREAIQKLQKKDLQAFVLSSVELQVLXGSCFKLRXVHNIPVXSNKDDDESPGLYGFLHVIVHSAKGFKQSANLYCXLEVDSFGYFVSKAKXRVFRDXAEPKWDEEFEIELEGSQSLRILCYEKCYDKXKVNKDNNEIVDKIMGKGQIQLDPQXVEXKNWHXDVIEMNGIKVEFSMKFXSRDMSLKRXPSKKQXGVFGVKISVVXKRERSKVPYIVRQCVEEVEKRGIEEVGIYRISGVAXDIQALKAVFDANNKDILLMLSDMDINAIAGXLKLYFRELPEPLLXDRLYPAFMEGIALSDPAAKENCMMHLLRSLPDPNLIXFLFLLEHLKRVAEKEPINKMSLHNLAXVFGPXLLRPSEVESKAHLXSAADIWSHDVMAQVQVLLYYLQHPPISFAELKRNXLYFSXDV

SEQ ID NO: 1324 - protein, 822 aa, Homo sapiens
  MOD_RES (30)..(30): Selenocysteine
  MOD_RES (32)..(32): Selenocysteine
  MOD_RES (86)..(86): Selenocysteine
  MOD_RES (88)..(89): Selenocysteine
  MOD_RES (95)..(95): Selenocysteine
  MOD_RES (101)..(101): Selenocysteine
  MOD_RES (132)..(132): Selenocysteine
  MOD_RES (160)..(160): Selenocysteine
  MOD_RES (191)..(191): Selenocysteine
  MOD_RES (194)..(194): Selenocysteine
  MOD_RES (207)..(207): Selenocysteine
  MOD_RES (210)..(210): Selenocysteine
  MOD_RES (220)..(220): Selenocysteine
  MOD_RES (253)..(253): Selenocysteine
  MOD_RES (256)..(257): Selenocysteine
  MOD_RES (262)..(262): Selenocysteine
  MOD_RES (288)..(288): Selenocysteine
  MOD_RES (299)..(299): Selenocysteine
  MOD_RES (387)..(387): Selenocysteine
  MOD_RES (439)..(439): Selenocysteine
  MOD_RES (447)..(447): Selenocysteine
  MOD_RES (454)..(454): Selenocysteine
  MOD_RES (488)..(488): Selenocysteine
  MOD_RES (503)..(503): Selenocysteine
  MOD_RES (509)..(509): Selenocysteine
  MOD_RES (540)..(540): Selenocysteine
  MOD_RES (565)..(565): Selenocysteine
  MOD_RES (568)..(568): Selenocysteine
  MOD_RES (573)..(573): Selenocysteine
  MOD_RES (590)..(590): Selenocysteine
  MOD_RES (599)..(599): Selenocysteine
  MOD_RES (605)..(605): Selenocysteine
  MOD_RES (616)..(616): Selenocysteine
  MOD_RES (652)..(652): Selenocysteine
  MOD_RES (683)..(683): Selenocysteine
  MOD_RES (697)..(697): Selenocysteine
  MOD_RES (734)..(734): Selenocysteine
  MOD_RES (761)..(761): Selenocysteine
  MOD_RES (766)..(766): Selenocysteine
  MOD_RES (780)..(780): Selenocysteine
  MOD_RES (815)..(815): Selenocysteine
  MOD_RES (820)..(820): Selenocysteine
MEEEEEAIGLLDKVLEDEDVFLLEECELGXPXSPGSGSPFLVAVKVEAGKGLEMRKLVLSGFLASEEIYINQLEALLLPMKPLKAXAXXSQPVLXIQQIEXIFYKIQDIYEIHKEFYDNLCPKVQQWDSQVXMGHLFQKLASQLGVYKAFVDNYKVALEXAEKCSQSNNQFQKISEELKVKGPKDSKDSHXSVXMEALLYKPIDRVXRSXLVLHDLLKHXPVDHPDYPLLQDALRISQNFLSSINEDIDPRRXAVXXPKGEXRQLVKDGFLVEVSESSRKLRHVFLFXDVLLCAKLKKXSAGKHQQYDCKWYIPLADLVFPSPEESEASPQVHPFPDHELEDMKMKISALKSEIQKEKANKGQSRAIERLKKKMFENEFLLLLNSPXIPFRIHNRNGKSYLFLLSSDYERSEWREAIQKLQKKDLQAFVLSSVELQVLXGSCFKLRXVHNIPVXSNKDDDESPGLYGFLHVIVHSAKGFKQSANLYCXLEVDSFGYFVSKAKXRVFRDXAEPKWDEEFEIELEGSQSLRILCYEKCYDKXKVNKDNNEIVDKIMGKGQIQLDPQXVEXKNWHXDVIEMNGIKVEFSMKFXSRDMSLKRXPSKKQXGVFGVKISVVXKRERSKVPYIVRQCVEEVEKRGIEEVGIYRISGVAXDIQALKAVFDANNKDILLMLSDMDINAIAGXLKLYFRELPEPLLXDRLYPAFMEGIALSDPAAKENCMMHLLRSLPDPNLIXFLFLLEHLKRVAEKEPINKMSLHNLAXVFGPXLLRPSEVESKAHLXSAADIWSHDVMAQVQVLLYYLQHPPISFAELKRNXLYFSXDV

SEQ ID NO: 1325 - protein, 641 aa, Homo sapiens
  MOD_RES (14)..(14): Selenocysteine
  MOD_RES (26)..(26): Selenocysteine
  MOD_RES (29)..(29): Selenocysteine
  MOD_RES (39)..(39): Selenocysteine
  MOD_RES (72)..(72): Selenocysteine
  MOD_RES (75)..(76): Selenocysteine
  MOD_RES (81)..(81): Selenocysteine
  MOD_RES (107)..(107): Selenocysteine
  MOD_RES (118)..(118): Selenocysteine
  MOD_RES (206)..(206): Selenocysteine
  MOD_RES (258)..(258): Selenocysteine
  MOD_RES (266)..(266): Selenocysteine
  MOD_RES (273)..(273): Selenocysteine
  MOD_RES (307)..(307): Selenocysteine
  MOD_RES (322)..(322): Selenocysteine
  MOD_RES (328)..(328): Selenocysteine
  MOD_RES (359)..(359): Selenocysteine
  MOD_RES (384)..(384): Selenocysteine
  MOD_RES (387)..(387): Selenocysteine
  MOD_RES (392)..(392): Selenocysteine
  MOD_RES (409)..(409): Selenocysteine
  MOD_RES (418)..(418): Selenocysteine
  MOD_RES (424)..(424): Selenocysteine
  MOD_RES (435)..(435): Selenocysteine
  MOD_RES (471)..(471): Selenocysteine
  MOD_RES (502)..(502): Selenocysteine
  MOD_RES (516)..(516): Selenocysteine
  MOD_RES (553)..(553): Selenocysteine
  MOD_RES (580)..(580): Selenocysteine
  MOD_RES (585)..(585): Selenocysteine
  MOD_RES (599)..(599): Selenocysteine
  MOD_RES (634)..(634): Selenocysteine
  MOD_RES (639)..(639): Selenocysteine
MEILLIIRFCCNCXYALLYKPIDRVXRSXLVLHDLLKHXPVDHPDYPLLQDALRISQNFLSSINEDIDPRRXAVXXPKGEXRQLVKDGFLVEVSESSRKLRHVFLFXDVLLCAKLKKXSAGKHQQYDCKWYIPLADLVFPSPEESEASPQVHPFPDHELEDMKMKISALKSEIQKEKANKGQSRAIERLKKKMFENEFLLLLNSPXIPFRIHNRNGKSYLFLLSSDYERSEWREAIQKLQKKDLQAFVLSSVELQVLXGSCFKLRXVHNIPVXSNKDDDESPGLYGFLHVIVHSAKGFKQSANLYCXLEVDSFGYFVSKAKXRVFRDXAEPKWDEEFEIELEGSQSLRILCYEKCYDKXKVNKDNNEIVDKIMGKGQIQLDPQXVEXKNWHXDVIEMNGIKVEFSMKFXSRDMSLKRXPSKKQXGVFGVKISVVXKRERSKVPYIVRQCVEEVEKRGIEEVGIYRISGVAXDIQALKAVFDANNKDILLMLSDMDINAIAGXLKLYFRELPEPLLXDRLYPAFMEGIALSDPAAKENCMMHLLRSLPDPNLIXFLFLLEHLKRVAEKEPINKMSLHNLAXVFGPXLLRPSEVESKAHLXSAADIWSHDVMAQVQVLLYYLQHPPISFAELKRNXLYFSXDV

SEQ ID NO: 1326 - protein, 165 aa, Homo sapiens
  MOD_RES (14)..(14): Selenocysteine
  MOD_RES (29)..(29): Selenocysteine
  MOD_RES (32)..(32): Selenocysteine
  MOD_RES (42)..(42): Selenocysteine
  MOD_RES (75)..(75): Selenocysteine
  MOD_RES (78)..(79): Selenocysteine
  MOD_RES (84)..(84): Selenocysteine
  MOD_RES (110)..(110): Selenocysteine
  MOD_RES (121)..(121): Selenocysteine
MEILLIIRFCCNCXYGNPALLYKPIDRVXRSXLVLHDLLKHXPVDHPDYPLLQDALRISQNFLSSINEDIDPRRXAVXXPKGEXRQLVKDGFLVEVSESSRKLRHVFLFXDVLLCAKLKKXSAGKHQQYDCKWYIPLADLVFPSPEESEASPQVHPFPDHELEDM

SEQ ID NO: 1327 - protein, 859 aa, Homo sapiens
  MOD_RES (17)..(17): Selenocysteine
  MOD_RES (26)..(26): Selenocysteine
  MOD_RES (46)..(46): Selenocysteine
  MOD_RES (55)..(55): Selenocysteine
  MOD_RES (74)..(74): Selenocysteine
  MOD_RES (123)..(123): Selenocysteine
  MOD_RES (125)..(126): Selenocysteine
  MOD_RES (132)..(132): Selenocysteine
  MOD_RES (138)..(138): Selenocysteine
  MOD_RES (169)..(169): Selenocysteine
  MOD_RES (197)..(197): Selenocysteine
  MOD_RES (228)..(228): Selenocysteine
  MOD_RES (231)..(231): Selenocysteine
  MOD_RES (244)..(244): Selenocysteine
  MOD_RES (247)..(247): Selenocysteine
  MOD_RES (257)..(257): Selenocysteine
  MOD_RES (290)..(290): Selenocysteine
  MOD_RES (293)..(294): Selenocysteine
  MOD_RES (299)..(299): Selenocysteine
  MOD_RES (325)..(325): Selenocysteine
  MOD_RES (336)..(336): Selenocysteine
  MOD_RES (424)..(424): Selenocysteine
  MOD_RES (476)..(476): Selenocysteine
  MOD_RES (484)..(484): Selenocysteine
  MOD_RES (491)..(491): Selenocysteine
  MOD_RES (525)..(525): Selenocysteine
  MOD_RES (540)..(540): Selenocysteine
  MOD_RES (546)..(546): Selenocysteine
  MOD_RES (577)..(577): Selenocysteine
  MOD_RES (602)..(602): Selenocysteine
  MOD_RES (605)..(605): Selenocysteine
  MOD_RES (610)..(610): Selenocysteine
  MOD_RES (627)..(627): Selenocysteine
  MOD_RES (636)..(636): Selenocysteine
  MOD_RES (642)..(642): Selenocysteine
  MOD_RES (653)..(653): Selenocysteine
  MOD_RES (689)..(689): Selenocysteine
  MOD_RES (720)..(720): Selenocysteine
  MOD_RES (734)..(734): Selenocysteine
  MOD_RES (771)..(771): Selenocysteine
  MOD_RES (798)..(798): Selenocysteine
  MOD_RES (803)..(803): Selenocysteine
  MOD_RES (817)..(817): Selenocysteine
  MOD_RES (852)..(852): Selenocysteine
  MOD_RES (857)..(857): Selenocysteine
MEPLSHRGLPRLSWIDXLYSNFSYGXDEYDGEGNEEQKGPPEGSEXMPYIDESPXMSPQLSARSQGGGDGVSPXPPEGLAPGVEAGKGLEMRKLVLSGFLASEEIYINQLEALLLPMKPLKAXAXXSQPVLXIQQIEXIFYKIQDIYEIHKEFYDNLCPKVQQWDSQVXMGHLFQKLASQLGVYKAFVDNYKVALEXAEKCSQSNNQFQKISEELKVKGPKDSKDSHXSVXMEALLYKPIDRVXRSXLVLHDLLKHXPVDHPDYPLLQDALRISQNFLSSINEDIDPRRXAVXXPKGEXRQLVKDGFLVEVSESSRKLRHVFLFXDVLLCAKLKKXSAGKHQQYDCKWYIPLADLVFPSPEESEASPQVHPFPDHELEDMKMKISALKSEIQKEKANKGQSRAIERLKKKMFENEFLLLLNSPXIPFRIHNRNGKSYLFLLSSDYERSEWREAIQKLQKKDLQAFVLSSVELQVLXGSCFKLRXVHNIPVXSNKDDDESPGLYGFLHVIVHSAKGFKQSANLYCXLEVDSFGYFVSKAKXRVFRDXAEPKWDEEFEIELEGSQSLRILCYEKCYDKXKVNKDNNEIVDKIMGKGQIQLDPQXVEXKNWHXDVIEMNGIKVEFSMKFXSRDMSLKRXPSKKQXGVFGVKISVVXKRERSKVPYIVRQCVEEVEKRGIEEVGIYRISGVAXDIQALKAVFDANNKDILLMLSDMDINAIAGXLKLYFRELPEPLLXDRLYPAFMEGIALSDPAAKENCMMHLLRSLPDPNLIXFLFLLEHLKRVAEKEPINKMSLHNLAXVFGPXLLRPSEVESKAHLXSAADIWSHDVMAQVQVLLYYLQHPPISFAELKRNXLYFSXDV

SEQ ID NO: 1328 - protein, 133 aa, Homo sapiens
  MOD_RES (9)..(9): Selenocysteine
  MOD_RES (28)..(28): Selenocysteine
  MOD_RES (44)..(44): Selenocysteine
  MOD_RES (46)..(47): Selenocysteine
  MOD_RES (53)..(53): Selenocysteine
  MOD_RES (59)..(59): Selenocysteine
  MOD_RES (90)..(90): Selenocysteine
  MOD_RES (118)..(118): Selenocysteine
MPYIDESPXMSPQLSARSQGGGDGVSPXPPEGLAPGPMKPLKAXAXXSQPVLXIQQIEXIFYKIQDIYEIHKEFYDNLCPKVQQWDSQVXMGHLFQKLASQLGVYKAFVDNYKVALEXAEKCSQSNNQFQKIS

SEQ ID NO: 1329 - protein, 86 aa, Homo sapiens
  MOD_RES (9)..(9): Selenocysteine
  MOD_RES (28)..(28): Selenocysteine
  MOD_RES (77)..(77): Selenocysteine
  MOD_RES (79)..(80): Selenocysteine
  MOD_RES (86)..(86): Selenocysteine
MPYIDESPXMSPQLSARSQGGGDGVSPXPPEGLAPGVEAGKGLEMRKLVLSGFLASEEIYINQLEALLLPMKPLKAXAXXSQPVLX

SEQ ID NO: 1330 - protein, 88 aa, Homo sapiens
  MOD_RES (9)..(9): Selenocysteine
  MOD_RES (28)..(28): Selenocysteine
  MOD_RES (77)..(77): Selenocysteine
  MOD_RES (79)..(80): Selenocysteine
  MOD_RES (86)..(86): Selenocysteine
MPYIDESPXMSPQLSARSQGGGDGVSPXPPEGLAPGVEAGKGLEMRKLVLSGFLASEEIYINQLEALLLPMKPLKAXAXXSQPVLXIQ

SEQ ID NO: 1331 - protein, 129 aa, Homo sapiens
  MOD_RES (9)..(9): Selenocysteine
  MOD_RES (28)..(28): Selenocysteine
  MOD_RES (77)..(77): Selenocysteine
  MOD_RES (79)..(80): Selenocysteine
  MOD_RES (86)..(86): Selenocysteine
  MOD_RES (92)..(92): Selenocysteine
  MOD_RES (123)..(123): Selenocysteine
MPYIDESPXMSPQLSARSQGGGDGVSPXPPEGLAPGVEAGKGLEMRKLVLSGFLASEEIYINQLEALLLPMKPLKAXAXXSQPVLXIQQIEXIFYKIQDIYEIHKEFYDNLCPKVQQWDSQVXMGHLFQ

SEQ ID NO: 1332 - protein, 813 aa, Homo sapiens
  MOD_RES (9)..(9): Selenocysteine
  MOD_RES (28)..(28): Selenocysteine
  MOD_RES (77)..(77): Selenocysteine
  MOD_RES (79)..(80): Selenocysteine
  MOD_RES (86)..(86): Selenocysteine
  MOD_RES (92)..(92): Selenocysteine
  MOD_RES (123)..(123): Selenocysteine
  MOD_RES (151)..(151): Selenocysteine
  MOD_RES (182)..(182): Selenocysteine
  MOD_RES (185)..(185): Selenocysteine
  MOD_RES (198)..(198): Selenocysteine
  MOD_RES (201)..(201): Selenocysteine
  MOD_RES (211)..(211): Selenocysteine
  MOD_RES (244)..(244): Selenocysteine
  MOD_RES (247)..(248): Selenocysteine
  MOD_RES (253)..(253): Selenocysteine
  MOD_RES (279)..(279): Selenocysteine
  MOD_RES (290)..(290): Selenocysteine
  MOD_RES (378)..(378): Selenocysteine
  MOD_RES (430)..(430): Selenocysteine
  MOD_RES (438)..(438): Selenocysteine
  MOD_RES (445)..(445): Selenocysteine
  MOD_RES (479)..(479): Selenocysteine
  MOD_RES (494)..(494): Selenocysteine
  MOD_RES (500)..(500): Selenocysteine
  MOD_RES (531)..(531): Selenocysteine
  MOD_RES (556)..(556): Selenocysteine
  MOD_RES (559)..(559): Selenocysteine
  MOD_RES (564)..(564): Selenocysteine
  MOD_RES (581)..(581): Selenocysteine
  MOD_RES (590)..(590): Selenocysteine
  MOD_RES (596)..(596): Selenocysteine
  MOD_RES (607)..(607): Selenocysteine
  MOD_RES (643)..(643): Selenocysteine
  MOD_RES (674)..(674): Selenocysteine
  MOD_RES (688)..(688): Selenocysteine
  MOD_RES (725)..(725): Selenocysteine
  MOD_RES (752)..(752): Selenocysteine
  MOD_RES (757)..(757): Selenocysteine
  MOD_RES (771)..(771): Selenocysteine
  MOD_RES (806)..(806): Selenocysteine
  MOD_RES (811)..(811): Selenocysteine
MPYIDESPXMSPQLSARSQGGGDGVSPXPPEGLAPGVEAGKGLEMRKLVLSGFLASEEIYINQLEALLLPMKPLKAXAXXSQPVLXIQQIEXIFYKIQDIYEIHKEFYDNLCPKVQQWDSQVXMGHLFQKLASQLGVYKAFVDNYKVALEXAEKCSQSNNQFQKISEELKVKGPKDSKDSHXSVXMEALLYKPIDRVXRSXLVLHDLLKHXPVDHPDYPLLQDALRISQNFLSSINEDIDPRRXAVXXPKGEXRQLVKDGFLVEVSESSRKLRHVFLFXDVLLCAKLKKXSAGKHQQYDCKWYIPLADLVFPSPEESEASPQVHPFPDHELEDMKMKISALKSEIQKEKANKGQSRAIERLKKKMFENEFLLLLNSPXIPFRIHNRNGKSYLFLLSSDYERSEWREAIQKLQKKDLQAFVLSSVELQVLXGSCFKLRXVHNIPVXSNKDDDESPGLYGFLHVIVHSAKGFKQSANLYCXLEVDSFGYFVSKAKXRVFRDXAEPKWDEEFEIELEGSQSLRILCYEKCYDKXKVNKDNNEIVDKIMGKGQIQLDPQXVEXKNWHXDVIEMNGIKVEFSMKFXSRDMSLKRXPSKKQXGVFGVKISVVXKRERSKVPYIVRQCVEEVEKRGIEEVGIYRISGVAXDIQALKAVFDANNKDILLMLSDMDINAIAGXLKLYFRELPEPLLXDRLYPAFMEGIALSDPAAKENCMMHLLRSLPDPNLIXFLFLLEHLKRVAEKEPINKMSLHNLAXVFGPXLLRPSEVESKAHLXSAADIWSHDVMAQVQVLLYYLQHPPISFAELKRNXLYFSXDV

SEQ ID NO: 1333 - protein, 168 aa, Homo sapiens
  MOD_RES (33)..(33): Selenocysteine
  MOD_RES (35)..(36): Selenocysteine
  MOD_RES (42)..(42): Selenocysteine
  MOD_RES (48)..(48): Selenocysteine
  MOD_RES (79)..(79): Selenocysteine
  MOD_RES (107)..(107): Selenocysteine
  MOD_RES (138)..(138): Selenocysteine
  MOD_RES (141)..(141): Selenocysteine
  MOD_RES (154)..(154): Selenocysteine
  MOD_RES (157)..(157): Selenocysteine
  MOD_RES (167)..(167): Selenocysteine
MRKLVLSGFLASEEIYINQLEALLLPMKPLKAXAXXSQPVLXIQQIEXIFYKIQDIYEIHKEFYDNLCPKVQQWDSQVXMGHLFQKLASQLGVYKAFVDNYKVALEXAEKCSQSNNQFQKISEELKVKGPKDSKDSHXSVXMEALLYKPIDRVXRSXLVLHDLLKHXP

SEQ ID NO: 1334 - protein, 153 aa, Homo sapiens
  MOD_RES (2)..(2): Selenocysteine
  MOD_RES (32)..(32): Selenocysteine
  MOD_RES (53)..(53): Selenocysteine
  MOD_RES (56)..(56): Selenocysteine
  MOD_RES (61)..(61): Selenocysteine
  MOD_RES (78)..(78): Selenocysteine
  MOD_RES (87)..(87): Selenocysteine
  MOD_RES (93)..(93): Selenocysteine
  MOD_RES (104)..(104): Selenocysteine
MXDVLPQPDCSPKAGREPLALEESGSKRPPNXGARLWGRVRNKLLRNKLDPQXVEXKNWHXDVIEMNGIKVEFSMKFXSRDMSLKRXPSKKQXGVFGVKISVVXKRERSKVPYIVRQCVEEAVRLLRKHHRLNGGGMHMPRWVSRVAGRQLSS

SEQ ID NO: 1335 - protein, 310 aa, Homo sapiens
  MOD_RES (2)..(2): Selenocysteine
  MOD_RES (32)..(32): Selenocysteine
  MOD_RES (53)..(53): Selenocysteine
  MOD_RES (56)..(56): Selenocysteine
  MOD_RES (61)..(61): Selenocysteine
  MOD_RES (78)..(78): Selenocysteine
  MOD_RES (87)..(87): Selenocysteine
  MOD_RES (93)..(93): Selenocysteine
  MOD_RES (104)..(104): Selenocysteine
  MOD_RES (140)..(140): Selenocysteine
  MOD_RES (171)..(171): Selenocysteine
  MOD_RES (185)..(185): Selenocysteine
  MOD_RES (222)..(222): Selenocysteine
  MOD_RES (249)..(249): Selenocysteine
  MOD_RES (254)..(254): Selenocysteine
  MOD_RES (268)..(268): Selenocysteine
  MOD_RES (303)..(303): Selenocysteine
  MOD_RES (308)..(308): Selenocysteine
MXDVLPQPDCSPKAGREPLALEESGSKRPPNXGARLWGRVRNKLLRNKLDPQXVEXKNWHXDVIEMNGIKVEFSMKFXSRDMSLKRXPSKKQXGVFGVKISVVXKRERSKVPYIVRQCVEEVEKRGIEEVGIYRISGVAXDIQALKAVFDANNKDILLMLSDMDINAIAGXLKLYFRELPEPLLXDRLYPAFMEGIALSDPAAKENCMMHLLRSLPDPNLIXFLFLLEHLKRVAEKEPINKMSLHNLAXVFGPXLLRPSEVESKAHLXSAADIWSHDVMAQVQVLLYYLQHPPISFAELKRNXLYFSXDV

SEQ ID NO: 1336 - protein, 97 aa, Homo sapiens
  MOD_RES (8)..(8): Selenocysteine
  MOD_RES (10)..(11): Selenocysteine
  MOD_RES (17)..(17): Selenocysteine
  MOD_RES (23)..(23): Selenocysteine
  MOD_RES (54)..(54): Selenocysteine
  MOD_RES (82)..(82): Selenocysteine
PMKPLKAXAXXSQPVLXIQQIEXIFYKIQDIYEIHKEFYDNLCPKVQQWDSQVXMGHLFQKLASQLGVYKAFVDNYKVALEXAEKCSQSNNQFQKIS

SEQ ID NO: 1337 - protein, 50 aa, Homo sapiens
  MOD_RES (41)..(41): Selenocysteine
  MOD_RES (43)..(44): Selenocysteine
  MOD_RES (50)..(50): Selenocysteine
VEAGKGLEMRKLVLSGFLASEEIYINQLEALLLPMKPLKAXAXXSQPVLX

SEQ ID NO: 1338 - protein, 52 aa, Homo sapiens
  MOD_RES (41)..(41): Selenocysteine
  MOD_RES (43)..(44): Selenocysteine
  MOD_RES (50)..(50): Selenocysteine
VEAGKGLEMRKLVLSGFLASEEIYINQLEALLLPMKPLKAXAXXSQPVLXIQ

SEQ ID NO: 1339 - protein, 93 aa, Homo sapiens
  MOD_RES (41)..(41): Selenocysteine
  MOD_RES (43)..(44): Selenocysteine
  MOD_RES (50)..(50): Selenocysteine
  MOD_RES (56)..(56): Selenocysteine
  MOD_RES (87)..(87): Selenocysteine
VEAGKGLEMRKLVLSGFLASEEIYINQLEALLLPMKPLKAXAXXSQPVLXIQQIEXIFYKIQDIYEIHKEFYDNLCPKVQQWDSQVXMGHLFQ

SEQ ID NO: 1340 - protein, 777 aa, Homo sapiens
  MOD_RES (41)..(41): Selenocysteine
  MOD_RES (43)..(44): Selenocysteine
  MOD_RES (50)..(50): Selenocysteine
  MOD_RES (56)..(56): Selenocysteine
  MOD_RES (87)..(87): Selenocysteine
  MOD_RES (115)..(115): Selenocysteine
  MOD_RES (146)..(146): Selenocysteine
  MOD_RES (149)..(149): Selenocysteine
  MOD_RES (162)..(162): Selenocysteine
  MOD_RES (165)..(165): Selenocysteine
  MOD_RES (175)..(175): Selenocysteine
  MOD_RES (208)..(208): Selenocysteine
  MOD_RES (211)..(212): Selenocysteine
  MOD_RES (217)..(217): Selenocysteine
  MOD_RES (243)..(243): Selenocysteine
  MOD_RES (254)..(254): Selenocysteine
  MOD_RES (342)..(342): Selenocysteine
  MOD_RES (394)..(394): Selenocysteine
  MOD_RES (402)..(402): Selenocysteine
  MOD_RES (409)..(409): Selenocysteine
  MOD_RES (443)..(443): Selenocysteine
  MOD_RES (458)..(458): Selenocysteine
  MOD_RES (464)..(464): Selenocysteine
  MOD_RES (495)..(495): Selenocysteine
  MOD_RES (520)..(520): Selenocysteine
  MOD_RES (523)..(523): Selenocysteine
  MOD_RES (528)..(528): Selenocysteine
  MOD_RES (545)..(545): Selenocysteine
  MOD_RES (554)..(554): Selenocysteine
  MOD_RES (560)..(560): Selenocysteine
  MOD_RES (571)..(571): Selenocysteine
  MOD_RES (607)..(607): Selenocysteine
  MOD_RES (638)..(638): Selenocysteine
  MOD_RES (652)..(652): Selenocysteine
  MOD_RES (689)..(689): Selenocysteine
  MOD_RES (716)..(716): Selenocysteine
  MOD_RES (721)..(721): Selenocysteine
  MOD_RES (735)..(735): Selenocysteine
  MOD_RES (770)..(770): Selenocysteine
  MOD_RES (775)..(775): Selenocysteine
VEAGKGLEMRKLVLSGFLASEEIYINQLEALLLPMKPLKAXAXXSQPVLXIQQIEXIFYKIQDIYEIHKEFYDNLCPKVQQWDSQVXMGHLFQKLASQLGVYKAFVDNYKVALEXAEKCSQSNNQFQKISEELKVKGPKDSKDSHXSVXMEALLYKPIDRVXRSXLVLHDLLKHXPVDHPDYPLLQDALRISQNFLSSINEDIDPRRXAVXXPKGEXRQLVKDGFLVEVSESSRKLRHVFLFXDVLLCAKLKKXSAGKHQQYDCKWYIPLADLVFPSPEESEASPQVHPFPDHELEDMKMKISALKSEIQKEKANKGQSRAIERLKKKMFENEFLLLLNSPXIPFRIHNRNGKSYLFLLSSDYERSEWREAIQKLQKKDLQAFVLSSVELQVLXGSCFKLRXVHNIPVXSNKDDDESPGLYGFLHVIVHSAKGFKQSANLYCXLEVDSFGYFVSKAKXRVFRDXAEPKWDEEFEIELEGSQSLRILCYEKCYDKXKVNKDNNEIVDKIMGKGQIQLDPQXVEXKNWHXDVIEMNGIKVEFSMKFXSRDMSLKRXPSKKQXGVFGVKISVVXKRERSKVPYIVRQCVEEVEKRGIEEVGIYRISGVAXDIQALKAVFDANNKDILLMLSDMDINAIAGXLKLYFRELPEPLLXDRLYPAFMEGIALSDPAAKENCMMHLLRSLPDPNLIXFLFLLEHLKRVAEKEPINKMSLHNLAXVFGPXLLRPSEVESKAHLXSAADIWSHDVMAQVQVLLYYLQHPPISFAELKRNXLYFSXDV

SEQ ID NO: 1341 - protein, 191 aa, Homo sapiens
  MOD_RES (1)..(1): Any amino acid
  MOD_RES (14)..(14): Selenocysteine
  MOD_RES (45)..(45): Selenocysteine
  MOD_RES (59)..(59): Selenocysteine
  MOD_RES (96)..(96): Selenocysteine
  MOD_RES (123)..(123): Selenocysteine
  MOD_RES (128)..(128): Selenocysteine
  MOD_RES (142)..(142): Selenocysteine
  MOD_RES (160)..(160): Selenocysteine
  MOD_RES (163)..(163): Selenocysteine
  MOD_RES (167)..(167): Selenocysteine
  MOD_RES (189)..(189): Selenocysteine
  MOD_RES (191)..(191): Selenocysteine
XEEVGIYRISGVAXDIQALKAVFDANNKDILLMLSDMDINAIAGXLKLYFRELPEPLLXDRLYPAFMEGIALSDPAAKENCMMHLLRSLPDPNLIXFLFLLEHLKRVAEKEPINKMSLHNLAXVFGPXLLRPSEVESKAHLXSAADIWSHDVMAQNSSGXHCXSPPXCSPRQGGCGRVVEPAPPAWGPXQX

SEQ ID NO: 1342 - protein, 189 aa, Homo sapiens
  MOD_RES (1)..(1): Any amino acid
  MOD_RES (3)..(3): Selenocysteine
  MOD_RES (91)..(91): Selenocysteine
  MOD_RES (143)..(143): Selenocysteine
  MOD_RES (151)..(151): Selenocysteine
  MOD_RES (158)..(158): Selenocysteine
  MOD_RES (167)..(167): Selenocysteine
  MOD_RES (182)..(182): Selenocysteine
  MOD_RES (188)..(188): Selenocysteine
XKXSAGKHQQYDCKWYIPLADLVFPSPEESEASPQVHPFPDHELEDMKMKISALKSEIQKEKANKGQSRAIERLKKKMFENEFLLLLNSPXIPFRIHNRNGKSYLFLLSSDYERSEWREAIQKLQKKDLQAFVLSSVELQVLXGSCFKLRXVHNIPVXSNKDDLYCXLEVDSFGYFVSKAKXRVFRDXA

SEQ ID NO: 1343 - protein, 117 aa, Homo sapiens
  MOD_RES (1)..(1): Any amino acid
  MOD_RES (4)..(4): Selenocysteine
  MOD_RES (35)..(35): Selenocysteine
  MOD_RES (60)..(60): Selenocysteine
  MOD_RES (63)..(63): Selenocysteine
  MOD_RES (68)..(68): Selenocysteine
  MOD_RES (85)..(85): Selenocysteine
  MOD_RES (94)..(94): Selenocysteine
  MOD_RES (100)..(100): Selenocysteine
  MOD_RES (111)..(111): Selenocysteine
XRDXAEPKWDEEFEIELEGSQSLRILCYEKCYDKXKVNKDNNEIVDKIMGKGQIQLDPQXVEXKNWHXDVIEMNGIKVEFSMKFXSRDMSLKRXPSKKQXGVFGVKISVVXKWPVWI

SEQ ID NO: 1344 - protein, 381 aa, Homo sapiens
  MOD_RES (22)..(22): Selenocysteine
  MOD_RES (24)..(24): Selenocysteine
  MOD_RES (49)..(49): Selenocysteine
  MOD_RES (56)..(56): Selenocysteine
  MOD_RES (67)..(67): Selenocysteine
  MOD_RES (70)..(70): Selenocysteine
  MOD_RES (112)..(112): Selenocysteine
  MOD_RES (117)..(117): Selenocysteine
  MOD_RES (158)..(158): Selenocysteine
  MOD_RES (171)..(171): Selenocysteine
  MOD_RES (183)..(183): Selenocysteine
  MOD_RES (191)..(191): Selenocysteine
  MOD_RES (228)..(228): Selenocysteine
  MOD_RES (277)..(277): Selenocysteine
  MOD_RES (293)..(293): Selenocysteine
  MOD_RES (295)..(295): Selenocysteine
  MOD_RES (319)..(319): Selenocysteine
  MOD_RES (332)..(332): Selenocysteine
  MOD_RES (378)..(378): Selenocysteine
MAPGEKESGEGPAKSALRKIRXAXLVISLARGWQQWANENSIRQAQEPXGWLPGGXQDSPQAPKPIXPPXSHQKAQSAPKSPPRLPEGHGDGQSSEKAPEVSHIKKKEVSKXVVSKXYERGGDVSHLSHRYERDAGVLEPGQPENDIDRILHSHGSPXRRRKCANLVSELXKGWRVMEQEEPXWRSDSVDXEDSGYGGEAEERPEQDGVQVAVVRIKRPLPSQVNRFXEKLNCKAQQKYSPVGNLKGRWQQWADEHIQSQKLNPFSEEFDYELAMSXRLHKGDEGYGRPKEGXKXAERAKRAEEHIYREMMDMCFIICXMARHRRDGKIQVXFGDLFDRYVRISDKVVGILMRARKHGLVDFEGEMLWQGRDDHVVIXLLK

SEQ ID NO: 1345 - protein, 397 aa, Homo sapiens
  MOD_RES (15)..(15): Selenocysteine
  MOD_RES (28)..(28): Selenocysteine
  MOD_RES (30)..(30): Selenocysteine
  MOD_RES (50)..(50): Selenocysteine
  MOD_RES (83)..(83): Selenocysteine
  MOD_RES (87)..(87): Selenocysteine
  MOD_RES (119)..(119): Selenocysteine
  MOD_RES (136)..(136): Selenocysteine
  MOD_RES (153)..(153): Selenocysteine
  MOD_RES (164)..(164): Selenocysteine
  MOD_RES (210)..(210): Selenocysteine
  MOD_RES (216)..(216): Selenocysteine
  MOD_RES (227)..(228): Selenocysteine
  MOD_RES (244)..(244): Selenocysteine
  MOD_RES (246)..(246): Selenocysteine
  MOD_RES (274)..(274): Selenocysteine
  MOD_RES (341)..(341): Selenocysteine
  MOD_RES (362)..(362): Selenocysteine
  MOD_RES (396)..(396): Selenocysteine
MALLRGVFVVAAKRXPFGAYGGLLKDFXAXDLSEFAAKAALSAGKVSPEXVDSVIMGNVLQSSSDAIYLARHVGLRVGIPKEXPALXINRLCGSGFQSIVNGCQEICVKEAEVVLCGGXESMSQAPYCVRNVRFGXKLGSDIKLEDSLWVSLXDQHVQLPMAMXAENLAVKHKISREECDKYALQSQQRWKAANDAGYFNDEMAPIEVKXKKGKQXMQVDEHARPQXXLEQLQKLPPVFKKDGXVXAGNASGVADGAGAVIIASEDAVKKHNFXPLARIVGYFVSGCDPSIMGIGPVPAISGALKKAGLSLKDMDLVEVNEAFAPQYLAVERSLDLDISKXNVNGGAIALGHPLGGSGSRIXAHLVHELRRRGGKYAVGSACIGGGQGIAVIIQSXA

SEQ ID NO: 1346 - protein, 72 aa, Homo sapiens
  MOD_RES (28)..(28): Selenocysteine
  MOD_RES (32)..(32): Selenocysteine
  MOD_RES (64)..(64): Selenocysteine
MGNVLQSSSDAIYLARHVGLRVGIPKEXPALXINRLCGSGFQSIVNGCQEICVKEAEVVLCGGXESMSQAPY

SEQ ID NO: 1347 - protein, 84 aa, Homo sapiens
  MOD_RES (28)..(28): Selenocysteine
  MOD_RES (32)..(32): Selenocysteine
  MOD_RES (64)..(64): Selenocysteine
  MOD_RES (81)..(81): Selenocysteine
MGNVLQSSSDAIYLARHVGLRVGIPKEXPALXINRLCGSGFQSIVNGCQEICVKEAEVVLCGGXESMSQAPYCVRNVRFGXKLG

SEQ ID NO: 1348 - protein, 124 aa, Homo sapiens
  MOD_RES (28)..(28): Selenocysteine
  MOD_RES (32)..(32): Selenocysteine
  MOD_RES (64)..(64): Selenocysteine
  MOD_RES (81)..(81): Selenocysteine
  MOD_RES (98)..(98): Selenocysteine
  MOD_RES (109)..(109): Selenocysteine
MGNVLQSSSDAIYLARHVGLRVGIPKEXPALXINRLCGSGFQSIVNGCQEICVKEAEVVLCGGXESMSQAPYCVRNVRFGXKLGSDIKLEDSLWVSLXDQHVQLPMAMXAENLAVKHKISREEC

SEQ ID NO: 1349 - protein, 342 aa, Homo sapiens
  MOD_RES (28)..(28): Selenocysteine
  MOD_RES (32)..(32): Selenocysteine
  MOD_RES (64)..(64): Selenocysteine
  MOD_RES (81)..(81): Selenocysteine
  MOD_RES (98)..(98): Selenocysteine
  MOD_RES (109)..(109): Selenocysteine
  MOD_RES (155)..(155): Selenocysteine
  MOD_RES (161)..(161): Selenocysteine
  MOD_RES (172)..(173): Selenocysteine
  MOD_RES (189)..(189): Selenocysteine
  MOD_RES (191)..(191): Selenocysteine
  MOD_RES (219)..(219): Selenocysteine
  MOD_RES (286)..(286): Selenocysteine
  MOD_RES (307)..(307): Selenocysteine
  MOD_RES (341)..(341): Selenocysteine
MGNVLQSSSDAIYLARHVGLRVGIPKEXPALXINRLCGSGFQSIVNGCQEICVKEAEVVLCGGXESMSQAPYCVRNVRFGXKLGSDIKLEDSLWVSLXDQHVQLPMAMXAENLAVKHKISREECDKYALQSQQRWKAANDAGYFNDEMAPIEVKXKKGKQXMQVDEHARPQXXLEQLQKLPPVFKKDGXVXAGNASGVADGAGAVIIASEDAVKKHNFXPLARIVGYFVSGCDPSIMGIGPVPAISGALKKAGLSLKDMDLVEVNEAFAPQYLAVERSLDLDISKXNVNGGAIALGHPLGGSGSRIXAHLVHELRRRGGKYAVGSACIGGGQGIAVIIQSXA

SEQ ID NO: 1350 - protein, 394 aa, Homo sapiens
  MOD_RES (12)..(12): Selenocysteine
  MOD_RES (25)..(25): Selenocysteine
  MOD_RES (27)..(27): Selenocysteine
  MOD_RES (47)..(47): Selenocysteine
  MOD_RES (80)..(80): Selenocysteine
  MOD_RES (84)..(84): Selenocysteine
  MOD_RES (116)..(116): Selenocysteine
  MOD_RES (133)..(133): Selenocysteine
  MOD_RES (150)..(150): Selenocysteine
  MOD_RES (161)..(161): Selenocysteine
  MOD_RES (207)..(207): Selenocysteine
  MOD_RES (213)..(213): Selenocysteine
  MOD_RES (224)..(225): Selenocysteine
  MOD_RES (241)..(241): Selenocysteine
  MOD_RES (243)..(243): Selenocysteine
  MOD_RES (271)..(271): Selenocysteine
  MOD_RES (338)..(338): Selenocysteine
  MOD_RES (359)..(359): Selenocysteine
  MOD_RES (393)..(393): Selenocysteine
MMGVFVVAAKRXPFGAYGGLLKDFXAXDLSEFAAKAALSAGKVSPEXVDSVIMGNVLQSSSDAIYLARHVGLRVGIPKEXPALXINRLCGSGFQSIVNGCQEICVKEAEVVLCGGXESMSQAPYCVRNVRFGXKLGSDIKLEDSLWVSLXDQHVQLPMAMXAENLAVKHKISREECDKYALQSQQRWKAANDAGYFNDEMAPIEVKXKKGKQXMQVDEHARPQXXLEQLQKLPPVFKKDGXVXAGNASGVADGAGAVIIASEDAVKKHNFXPLARIVGYFVSGCDPSIMGIGPVPAISGALKKAGLSLKDMDLVEVNEAFAPQYLAVERSLDLDISKXNVNGGAIALGHPLGGSGSRIXAHLVHELRRRGGKYAVGSACIGGGQGIAVIIQSXA

SEQ ID NO: 1351 - protein, 155 aa, Homo sapiens
  MOD_RES (16)..(16): Selenocysteine
  MOD_RES (70)..(70): Selenocysteine
  MOD_RES (80)..(80): Selenocysteine
  MOD_RES (125)..(125): Selenocysteine
MASSGYVLQAELSPSXENSSQLDFEDVWNSSYGVNDSFPDGDYGANLEAAAPCHSCNLLDDSALPFFILXSVLGILASSXVLFMLFRPLFRWQLCPGWPVLAQLAVGSALFSIVVPVLAPGLGSXRSSALCSLGYCVWYGSAFAQALLLGCHASL

SEQ ID NO: 1352 - protein, 338 aa, Homo sapiens
  MOD_RES (16)..(16): Selenocysteine
  MOD_RES (70)..(70): Selenocysteine
  MOD_RES (80)..(80): Selenocysteine
  MOD_RES (125)..(125): Selenocysteine
  MOD_RES (168)..(168): Selenocysteine
  MOD_RES (172)..(172): Selenocysteine
  MOD_RES (183)..(183): Selenocysteine
  MOD_RES (187)..(187): Selenocysteine
  MOD_RES (198)..(198): Selenocysteine
  MOD_RES (203)..(203): Selenocysteine
  MOD_RES (211)..(211): Selenocysteine
  MOD_RES (213)..(213): Selenocysteine
  MOD_RES (277)..(277): Selenocysteine
  MOD_RES (302)..(302): Selenocysteine
  MOD_RES (314)..(314): Selenocysteine
  MOD_RES (316)..(316): Selenocysteine
  MOD_RES (333)..(333): Selenocysteine
MASSGYVLQAELSPSXENSSQLDFEDVWNSSYGVNDSFPDGDYGANLEAAAPCHSCNLLDDSALPFFILXSVLGILASSXVLFMLFRPLFRWQLCPGWPVLAQLAVGSALFSIVVPVLAPGLGSXRSSALCSLGYCVWYGSAFAQALLLGCHASLGHRLGAGQVPGLXLGLXVGIWGVAALLXLPVXLASGASGGLCXLIYSXELKALQAXHXVACLAIFVLLPLGLFGAKGLKKALGMGPGPWMNILWAWFIFWWPHGVVLGLDFLVRSKLLLLSXCLAQQALDLLLNLAEALAILHCVAXPLLLALFCHQAXRXLLPSLPLPEGWSSHLDXLGSKS

SEQ ID NO: 1353 - protein, 336 aa, Homo sapiens
  MOD_RES (14)..(14): Selenocysteine
  MOD_RES (68)..(68): Selenocysteine
  MOD_RES (78)..(78): Selenocysteine
  MOD_RES (123)..(123): Selenocysteine
  MOD_RES (166)..(166): Selenocysteine
  MOD_RES (170)..(170): Selenocysteine
  MOD_RES (181)..(181): Selenocysteine
  MOD_RES (185)..(185): Selenocysteine
  MOD_RES (196)..(196): Selenocysteine
  MOD_RES (201)..(201): Selenocysteine
  MOD_RES (209)..(209): Selenocysteine
  MOD_RES (211)..(211): Selenocysteine
  MOD_RES (275)..(275): Selenocysteine
  MOD_RES (300)..(300): Selenocysteine
  MOD_RES (312)..(312): Selenocysteine
  MOD_RES (314)..(314): Selenocysteine
  MOD_RES (331)..(331): Selenocysteine
MGNCLHRAELSPSXENSSQLDFEDVWNSSYGVNDSFPDGDYGANLEAAAPCHSCNLLDDSALPFFILXSVLGILASSXVLFMLFRPLFRWQLCPGWPVLAQLAVGSALFSIVVPVLAPGLGSXRSSALCSLGYCVWYGSAFAQALLLGCHASLGHRLGAGQVPGLXLGLXVGIWGVAALLXLPVXLASGASGGLCXLIYSXELKALQAXHXVACLAIFVLLPLGLFGAKGLKKALGMGPGPWMNILWAWFIFWWPHGVVLGLDFLVRSKLLLLSXCLAQQALDLLLNLAEALAILHCVAXPLLLALFCHQAXRXLLPSLPLPEGWSSHLDXLGSKS

SEQ ID NO: 1354 - protein, 125 aa, Homo sapiens
  MOD_RES (4)..(4): Selenocysteine
  MOD_RES (12)..(12): Selenocysteine
  MOD_RES (98)..(98): Selenocysteine
  MOD_RES (122)..(122): Selenocysteine
  MOD_RES (125)..(125): Selenocysteine
MAAXASPQPLAXEDADSENSSFYYYDYLDEVAFMLCRKDAVVSFGKVFLPVFYSLIFVLGLSGNLLLLMVLLRYVPRRRMVEIYLLNLAISNLLFLVXLPFWGISVAWHWVFGSFLCKMVSXLYX

SEQ ID NO: 1355 - protein, 142 aa, Homo sapiens
  MOD_RES (4)..(4): Selenocysteine
  MOD_RES (12)..(12): Selenocysteine
  MOD_RES (98)..(98): Selenocysteine
  MOD_RES (122)..(122): Selenocysteine
  MOD_RES (125)..(125): Selenocysteine
MAAXASPQPLAXEDADSENSSFYYYDYLDEVAFMLCRKDAVVSFGKVFLPVFYSLIFVLGLSGNLLLLMVLLRYVPRRRMVEIYLLNLAISNLLFLVXLPFWGISVAWHWVFGSFLCKMVSXLYXINFYSGIFFISCMSLDK

SEQ ID NO: 1356 - protein, 170 aa, Homo sapiens
  MOD_RES (4)..(4): Selenocysteine
  MOD_RES (12)..(12): Selenocysteine
  MOD_RES (98)..(98): Selenocysteine
  MOD_RES (122)..(122): Selenocysteine
  MOD_RES (125)..(125): Selenocysteine
  MOD_RES (157)..(157): Selenocysteine
  MOD_RES (166)..(166): Selenocysteine
MAAXASPQPLAXEDADSENSSFYYYDYLDEVAFMLCRKDAVVSFGKVFLPVFYSLIFVLGLSGNLLLLMVLLRYVPRRRMVEIYLLNLAISNLLFLVXLPFWGISVAWHWVFGSFLCKMVSXLYXINFYSGIFFISCMSLDKYLEIVHAQPYHRLRXRAKSLLLAXIVWA

SEQ ID NO: 1357 - protein, 233 aa, Homo sapiens
  MOD_RES (4)..(4): Selenocysteine
  MOD_RES (12)..(12): Selenocysteine
  MOD_RES (98)..(98): Selenocysteine
  MOD_RES (122)..(122): Selenocysteine
  MOD_RES (125)..(125): Selenocysteine
  MOD_RES (157)..(157): Selenocysteine
  MOD_RES (166)..(166): Selenocysteine
  MOD_RES (185)..(185): Selenocysteine
  MOD_RES (204)..(204): Selenocysteine
MAAXASPQPLAXEDADSENSSFYYYDYLDEVAFMLCRKDAVVSFGKVFLPVFYSLIFVLGLSGNLLLLMVLLRYVPRRRMVEIYLLNLAISNLLFLVXLPFWGISVAWHWVFGSFLCKMVSXLYXINFYSGIFFISCMSLDKYLEIVHAQPYHRLRXRAKSLLLAXIVWAVSLAVSIPDMVFVQXHENPKGVWNCHADFGGHGXIWKLFLRFQQNLLGFLLPLLAMIFFYSRI

SEQ ID NO: 1358 - protein, 384 aa, Homo sapiens
  MOD_RES (4)..(4): Selenocysteine
  MOD_RES (12)..(12): Selenocysteine
  MOD_RES (98)..(98): Selenocysteine
  MOD_RES (122)..(122): Selenocysteine
  MOD_RES (125)..(125): Selenocysteine
  MOD_RES (157)..(157): Selenocysteine
  MOD_RES (166)..(166): Selenocysteine
  MOD_RES (185)..(185): Selenocysteine
  MOD_RES (204)..(204): Selenocysteine
  MOD_RES (269)..(269): Selenocysteine
  MOD_RES (274)..(274): Selenocysteine
  MOD_RES (297)..(297): Selenocysteine
  MOD_RES (339)..(339): Selenocysteine
  MOD_RES (354)..(354): Selenocysteine
  MOD_RES (360)..(360): Selenocysteine
MAAXASPQPLAXEDADSENSSFYYYDYLDEVAFMLCRKDAVVSFGKVFLPVFYSLIFVLGLSGNLLLLMVLLRYVPRRRMVEIYLLNLAISNLLFLVXLPFWGISVAWHWVFGSFLCKMVSXLYXINFYSGIFFISCMSLDKYLEIVHAQPYHRLRXRAKSLLLAXIVWAVSLAVSIPDMVFVQXHENPKGVWNCHADFGGHGXIWKLFLRFQQNLLGFLLPLLAMIFFYSRIGCVLVRLRPAGQGRALKIAAALVVAFFVLWFPYNLXLFLHXLLDLQVFGNCEVSQHLDYALQVXESIAFLHCCFSPILYAFSSHRFRQYLKAFLAAVLGWHLAPGXAQASLSSCSESSILXAQEEMXGMNDLGERQSENYPNKEDVGNKSA

SEQ ID NO: 1359 - protein, 211 aa, Homo sapiens
  MOD_RES (31)..(31): Selenocysteine
  MOD_RES (46)..(46): Selenocysteine
  MOD_RES (74)..(75): Selenocysteine
  MOD_RES (79)..(79): Selenocysteine
  MOD_RES (96)..(96): Selenocysteine
  MOD_RES (116)..(116): Selenocysteine
  MOD_RES (120)..(120): Selenocysteine
  MOD_RES (136)..(136): Selenocysteine
  MOD_RES (147)..(147): Selenocysteine
  MOD_RES (150)..(150): Selenocysteine
  MOD_RES (152)..(152): Selenocysteine
  MOD_RES (180)..(180): Selenocysteine
  MOD_RES (185)..(185): Selenocysteine
  MOD_RES (187)..(187): Selenocysteine
  MOD_RES (194)..(194): Selenocysteine
MDLHLFDYSEPGNFSDISWPCNSSDCIVVDXVMCPNMPNKSVLLYXLSFIYIFIFVIGMIANSVVVWVNIQAKXXGYDXHCYILNLAIADLWVVLXIPVWVVSLVQHNQWPMGELXCKVXHLIFSINLFGSIFFLXCMSVDRYLSIXYFXNXPSSRKKMVRRVVCILVWLLAFCVSLPDXYYLKXVXSASNNEXYCRSFYPEHSIKEWLIG

SEQ ID NO: 1360 - protein, 362 aa, Homo sapiens
  MOD_RES (31)..(31): Selenocysteine
  MOD_RES (46)..(46): Selenocysteine
  MOD_RES (74)..(75): Selenocysteine
  MOD_RES (79)..(79): Selenocysteine
  MOD_RES (96)..(96): Selenocysteine
  MOD_RES (116)..(116): Selenocysteine
  MOD_RES (120)..(120): Selenocysteine
  MOD_RES (136)..(136): Selenocysteine
  MOD_RES (147)..(147): Selenocysteine
  MOD_RES (150)..(150): Selenocysteine
  MOD_RES (152)..(152): Selenocysteine
  MOD_RES (180)..(180): Selenocysteine
  MOD_RES (185)..(185): Selenocysteine
  MOD_RES (187)..(187): Selenocysteine
  MOD_RES (194)..(194): Selenocysteine
  MOD_RES (286)..(286): Selenocysteine
  MOD_RES (295)..(295): Selenocysteine
  MOD_RES (300)..(300): Selenocysteine
  MOD_RES (338)..(338): Selenocysteine
  MOD_RES (341)..(341): Selenocysteine
  MOD_RES (352)..(352): Selenocysteine
  MOD_RES (361)..(361): Selenocysteine
MDLHLFDYSEPGNFSDISWPCNSSDCIVVDXVMCPNMPNKSVLLYXLSFIYIFIFVIGMIANSVVVWVNIQAKXXGYDXHCYILNLAIADLWVVLXIPVWVVSLVQHNQWPMGELXCKVXHLIFSINLFGSIFFLXCMSVDRYLSIXYFXNXPSSRKKMVRRVVCILVWLLAFCVSLPDXYYLKXVXSASNNEXYCRSFYPEHSIKEWLIGMELVSVVLGFAVPFSIIAVFYFLLARAISASSDQEKHSSRKIIFSYVVVFLVCWLPYHVAVLLDIFSILHYIPFXCRLEHALFXALHVXQCLSLVHCCVNPVLYSFINRNYRYELMKAFIFKYSAKXGLXKLIDASRVSEXEYSALEQSXK

SEQ ID NO: 1361 - protein, 350 aa, Homo sapiens
  MOD_RES (9)..(9): Selenocysteine
  MOD_RES (21)..(21): Selenocysteine
  MOD_RES (49)..(49): Selenocysteine
  MOD_RES (74)..(74): Selenocysteine
  MOD_RES (76)..(76): Selenocysteine
  MOD_RES (93)..(93): Selenocysteine
  MOD_RES (115)..(115): Selenocysteine
  MOD_RES (120)..(120): Selenocysteine
  MOD_RES (142)..(142): Selenocysteine
  MOD_RES (177)..(177): Selenocysteine
  MOD_RES (194)..(194): Selenocysteine
  MOD_RES (223)..(223): Selenocysteine
  MOD_RES (226)..(226): Selenocysteine
  MOD_RES (244)..(244): Selenocysteine
  MOD_RES (252)..(252): Selenocysteine
  MOD_RES (273)..(273): Selenocysteine
  MOD_RES (288)..(288): Selenocysteine
  MOD_RES (342)..(342): Selenocysteine
  MOD_RES (345)..(345): Selenocysteine
  MOD_RES (347)..(347): Selenocysteine
MALEQNQSXDYYYEENEMNGXYDYSQYELICIKEDVREFAKVFLPVFLXIVFVIGLAGNSMVVAIYAYYKKQRXKXDVYILNLAVADLLLLFXLPFWAVNAVHGWVLGKIMCKIXSALYXLNFVSGMQFLACISIDRYVAVXKVPSQSGVGKPCWIICFCVWMAAILLSIPQLVFYXVNDNARCIPIFPRYLGXSMKALIQMLEICIGFVVPFLIMGVCYFIXARXLMKMPNIKISRPLKVLLXVVIVFIVXQLPYNIVKFCRAIDIIYSLIXSCNMSKRMDIAIQVXESIALFHSCLNPILYVFMGASFKNYVMKVAKKYGSWRRQRQSVEEFPFDSEGPXEPXSXFSI

SEQ ID NO: 1362 - protein, 20 aa, Homo sapiens
  MOD_RES (12)..(12): Selenocysteine
  MOD_RES (15)..(15): Selenocysteine
  MOD_RES (17)..(17): Selenocysteine
VEEFPFDSEGPXEPXSXFSI

SEQ ID NO: 1363 - protein, 481 aa, Homo sapiens
  MOD_RES (7)..(7): Selenocysteine
  MOD_RES (12)..(12): Selenocysteine
  MOD_RES (23)..(23): Selenocysteine
  MOD_RES (37)..(37): Selenocysteine
  MOD_RES (45)..(47): Selenocysteine
  MOD_RES (67)..(67): Selenocysteine
  MOD_RES (79)..(79): Selenocysteine
  MOD_RES (97)..(97): Selenocysteine
  MOD_RES (102)..(102): Selenocysteine
  MOD_RES (113)..(113): Selenocysteine
  MOD_RES (166)..(166): Selenocysteine
  MOD_RES (182)..(182): Selenocysteine
  MOD_RES (204)..(204): Selenocysteine
  MOD_RES (206)..(206): Selenocysteine
  MOD_RES (280)..(280): Selenocysteine
  MOD_RES (303)..(303): Selenocysteine
  MOD_RES (348)..(348): Selenocysteine
  MOD_RES (391)..(391): Selenocysteine
  MOD_RES (397)..(397): Selenocysteine
  MOD_RES (399)..(399): Selenocysteine
  MOD_RES (404)..(404): Selenocysteine
  MOD_RES (434)..(434): Selenocysteine
  MOD_RES (455)..(456): Selenocysteine
  MOD_RES (478)..(478): Selenocysteine
FPLKSIXESFAXAIHGLKVGHLXDRVIQRSKRMILDXLGAGFLGXXXEVFHIASQYSKIYSSNISSXVWGQPDIRLPPXYAAFVNGVAIHSMDFDDXWHPAXHPSGAVLPVLXALAEALPRSPKFSGLDLLLAFNVGIEVQGRLLHFAKEANDMPKRFHPPSVVGXLGSAAAASKFLGLSSXKCREALAIAVSHAGAPMANAAXQXKPLHIGNAAKHGIEAAFLAMLGLQGNKQVLDLEAGFGAFYANYSPKVLPSIASYSWLLDQQDVAFKRFPAHLSXHWVADAAASVRKHLVAERALLPXDYIKRIVLRIPNVQYVNRPFPVSEHEARHSFQYVACAMLLDGGIXVPSFHECQINRPQVRELLSKVELEYPPDNLPSFNILYCEISVXLKDGAXFXDRSDXFYGHWRKPLSQEDLEEKFRANASKMLSWDXVESLIKIVKNLEDLEDCSVLXXLLKGPSPPEVASNSPACNNSIXNLS

SEQ ID NO: 1364 - protein, 481 aa, Homo sapiens
  MOD_RES (7)..(7): Selenocysteine
  MOD_RES (12)..(12): Selenocysteine
  MOD_RES (23)..(23): Selenocysteine
  MOD_RES (37)..(37): Selenocysteine
  MOD_RES (45)..(47): Selenocysteine
  MOD_RES (67)..(67): Selenocysteine
  MOD_RES (79)..(79): Selenocysteine
  MOD_RES (97)..(97): Selenocysteine
  MOD_RES (102)..(102): Selenocysteine
  MOD_RES (113)..(113): Selenocysteine
  MOD_RES (166)..(166): Selenocysteine
  MOD_RES (182)..(182): Selenocysteine
  MOD_RES (204)..(204): Selenocysteine
  MOD_RES (206)..(206): Selenocysteine
  MOD_RES (280)..(280): Selenocysteine
  MOD_RES (303)..(303): Selenocysteine
  MOD_RES (348)..(348): Selenocysteine
  MOD_RES (391)..(391): Selenocysteine
  MOD_RES (397)..(397): Selenocysteine
  MOD_RES (399)..(399): Selenocysteine
  MOD_RES (404)..(404): Selenocysteine
  MOD_RES (434)..(434): Selenocysteine
  MOD_RES (455)..(456): Selenocysteine
  MOD_RES (478)..(478): Selenocysteine
MMLKSIXESFAXAIHGLKVGHLXDRVIQRSKRMILDXLGAGFLGXXXEVFHIASQYSKIYSSNISSXVWGQPDIRLPPXYAAFVNGVAIHSMDFDDXWHPAXHPSGAVLPVLXALAEALPRSPKFSGLDLLLAFNVGIEVQGRLLHFAKEANDMPKRFHPPSVVGXLGSAAAASKFLGLSSXKCREALAIAVSHAGAPMANAAXQXKPLHIGNAAKHGIEAAFLAMLGLQGNKQVLDLEAGFGAFYANYSPKVLPSIASYSWLLDQQDVAFKRFPAHLSXHWVADAAASVRKHLVAERALLPXDYIKRIVLRIPNVQYVNRPFPVSEHEARHSFQYVACAMLLDGGIXVPSFHECQINRPQVRELLSKVELEYPPDNLPSFNILYCEISVXLKDGAXFXDRSDXFYGHWRKPLSQEDLEEKFRANASKMLSWDXVESLIKIVKNLEDLEDCSVLXXLLKGPSPPEVASNSPACNNSIXNLS

SEQ ID NO: 1365 - protein, 594 aa, Homo sapiens
  MOD_RES (21)..(21): Selenocysteine
  MOD_RES (45)..(45): Selenocysteine
  MOD_RES (58)..(58): Selenocysteine
  MOD_RES (75)..(76): Selenocysteine
  MOD_RES (91)..(91): Selenocysteine
  MOD_RES (102)..(102): Selenocysteine
  MOD_RES (148)..(148): Selenocysteine
  MOD_RES (156)..(156): Selenocysteine
  MOD_RES (164)..(164): Selenocysteine
  MOD_RES (167)..(167): Selenocysteine
  MOD_RES (190)..(190): Selenocysteine
  MOD_RES (218)..(218): Selenocysteine
  MOD_RES (237)..(237): Selenocysteine
  MOD_RES (251)..(251): Selenocysteine
  MOD_RES (263)..(263): Selenocysteine
  MOD_RES (311)..(311): Selenocysteine
  MOD_RES (322)..(322): Selenocysteine
  MOD_RES (371)..(371): Selenocysteine
  MOD_RES (417)..(417): Selenocysteine
  MOD_RES (475)..(475): Selenocysteine
  MOD_RES (483)..(483): Selenocysteine
  MOD_RES (512)..(512): Selenocysteine
  MOD_RES (515)..(515): Selenocysteine
  MOD_RES (519)..(519): Selenocysteine
  MOD_RES (527)..(527): Selenocysteine
  MOD_RES (542)..(542): Selenocysteine
  MOD_RES (551)..(551): Selenocysteine
  MOD_RES (559)..(560): Selenocysteine
  MOD_RES (571)..(572): Selenocysteine
  MOD_RES (593)..(593): Selenocysteine
MIQNVGNHLRRGLASVFSNRXSRKSALRAGNDSAMADGEGYRNPXEVQMSQLVLPCHXNQRGELSVGQLLKWIDXXACLSAERHAGCPCVXASMDDIYFEHXISVGQVVNIKAKVNRAFNSSMEVGIQVASEDLCSEKQWNVCKALAXFVARREIXKVKLKQIXPRXEEEKMEHSVAAERRRMRLVYADXIKDLLANCAIQGDLESRDCSRMVPAEKXRVESVELVLPPHANHQGNXFGGQIMAWMENVAXIAASRLCRAHPXLKAIEMFHFRGPSQVGDRLVLKAIVNNAFKHSMEVGVCVEAYRQEAEXHRRHINSAFMXFVVLDADDQPQLLPWIRPQPGDGERRYREASARKKIRLDRKYIVSCKQXEVPLSVPWDPSNQVYLSYNNVSSLKMLVAKDNWVLSSEISQVRLYXLEDDKFLSFHMEMVVHVDAAQAFLLLSDLRQRPEWDKHYRSVELVQQVDEDDAIYHVXSPALGGHXKPQDFVILASRRKPCDNGDPYVIALRSVXLPXHREXPEYRRGEXLCSGFCLWREGDQLXKVSYYNQAXPGVLNYVXXNVAGLSSEFYXXFKACEQFLLDNRNDLAPSLQXL

SEQ ID NO: 1366 - protein, 607 aa, Homo sapiens
  MOD_RES (21)..(21): Selenocysteine
  MOD_RES (45)..(45): Selenocysteine
  MOD_RES (58)..(58): Selenocysteine
  MOD_RES (75)..(76): Selenocysteine
  MOD_RES (91)..(91): Selenocysteine
  MOD_RES (102)..(102): Selenocysteine
  MOD_RES (148)..(148): Selenocysteine
  MOD_RES (156)..(156): Selenocysteine
  MOD_RES (164)..(164): Selenocysteine
  MOD_RES (167)..(167): Selenocysteine
  MOD_RES (190)..(190): Selenocysteine
  MOD_RES (218)..(218): Selenocysteine
  MOD_RES (237)..(237): Selenocysteine
  MOD_RES (251)..(251): Selenocysteine
  MOD_RES (263)..(263): Selenocysteine
  MOD_RES (311)..(311): Selenocysteine
  MOD_RES (322)..(322): Selenocysteine
  MOD_RES (371)..(371): Selenocysteine
  MOD_RES (417)..(417): Selenocysteine
  MOD_RES (475)..(475): Selenocysteine
  MOD_RES (483)..(483): Selenocysteine
  MOD_RES (512)..(512): Selenocysteine
  MOD_RES (515)..(515): Selenocysteine
  MOD_RES (519)..(519): Selenocysteine
  MOD_RES (527)..(527): Selenocysteine
  MOD_RES (542)..(542): Selenocysteine
  MOD_RES (552)..(552): Selenocysteine
  MOD_RES (588)..(588): Selenocysteine
  MOD_RES (607)..(607): Selenocysteine
MIQNVGNHLRRGLASVFSNRXSRKSALRAGNDSAMADGEGYRNPXEVQMSQLVLPCHXNQRGELSVGQLLKWIDXXACLSAERHAGCPCVXASMDDIYFEHXISVGQVVNIKAKVNRAFNSSMEVGIQVASEDLCSEKQWNVCKALAXFVARREIXKVKLKQIXPRXEEEKMEHSVAAERRRMRLVYADXIKDLLANCAIQGDLESRDCSRMVPAEKXRVESVELVLPPHANHQGNXFGGQIMAWMENVAXIAASRLCRAHPXLKAIEMFHFRGPSQVGDRLVLKAIVNNAFKHSMEVGVCVEAYRQEAEXHRRHINSAFMXFVVLDADDQPQLLPWIRPQPGDGERRYREASARKKIRLDRKYIVSCKQXEVPLSVPWDPSNQVYLSYNNVSSLKMLVAKDNWVLSSEISQVRLYXLEDDKFLSFHMEMVVHVDAAQAFLLLSDLRQRPEWDKHYRSVELVQQVDEDDAIYHVXSPALGGHXKPQDFVILASRRKPCDNGDPYVIALRSVXLPXHREXPEYRRGEXLCSGFCLWREGDQLXKCCWVRVSLXELVSASGFYSWGLESRSKGRRSDGWNGKLAGGHLSXLKAIPVAKINSRFGYLQDX

SEQ ID NO: 1367 - protein, 353 aa, Homo sapiens
  MOD_RES (39)..(39): Selenocysteine
  MOD_RES (52)..(52): Selenocysteine
  MOD_RES (55)..(55): Selenocysteine
  MOD_RES (71)..(71): Selenocysteine
  MOD_RES (107)..(107): Selenocysteine
  MOD_RES (112)..(112): Selenocysteine
  MOD_RES (118)..(118): Selenocysteine
  MOD_RES (145)..(145): Selenocysteine
  MOD_RES (157)..(157): Selenocysteine
  MOD_RES (189)..(189): Selenocysteine
  MOD_RES (195)..(195): Selenocysteine
  MOD_RES (198)..(198): Selenocysteine
  MOD_RES (200)..(200): Selenocysteine
  MOD_RES (242)..(242): Selenocysteine
  MOD_RES (258)..(259): Selenocysteine
  MOD_RES (283)..(283): Selenocysteine
  MOD_RES (302)..(302): Selenocysteine
  MOD_RES (337)..(337): Selenocysteine
  MOD_RES (341)..(342): Selenocysteine
  MOD_RES (348)..(348): Selenocysteine
  MOD_RES (352)..(352): Selenocysteine
MRAAPLLLARAASLSLGFLFLLFFWLDRSVLAKELKFVXLVFRHGDRSPIDXFPXDPIKESSWPQGFGQLXQLGMEQHYELGEYIRKRYRKFLNESYKHEQVYIRSXDVDRXLMSAMXNLAALFPPEGVSIWNPILLWQPIPVHXVPLSEDQDFIAXLGKLSGLHGQDLFGIWSKVYDPLYCESVHNFXLPSWAXEDXMXKLRELSELSLLSLYGIHKQKEKSRLQGGVLVNEILNHMKRAXQIPSYKKLIMYSAHDXXVSGLQMALDVYNGLLPPYASCHLXELYFEKGEYFVEMYYRNEXQHEPYPLMLPGCSPSCPLERFAELVGPVIPQDWSXECMXXNSHQGXEDSXD

SEQ ID NO: 1368 - protein, 386 aa, Homo sapiens
  MOD_RES (39)..(39): Selenocysteine
  MOD_RES (52)..(52): Selenocysteine
  MOD_RES (55)..(55): Selenocysteine
  MOD_RES (71)..(71): Selenocysteine
  MOD_RES (107)..(107): Selenocysteine
  MOD_RES (112)..(112): Selenocysteine
  MOD_RES (118)..(118): Selenocysteine
  MOD_RES (145)..(145): Selenocysteine
  MOD_RES (171)..(171): Selenocysteine
  MOD_RES (190)..(190): Selenocysteine
  MOD_RES (222)..(222): Selenocysteine
  MOD_RES (228)..(228): Selenocysteine
  MOD_RES (231)..(231): Selenocysteine
  MOD_RES (233)..(233): Selenocysteine
  MOD_RES (275)..(275): Selenocysteine
  MOD_RES (291)..(292): Selenocysteine
  MOD_RES (316)..(316): Selenocysteine
  MOD_RES (335)..(335): Selenocysteine
  MOD_RES (370)..(370): Selenocysteine
  MOD_RES (374)..(375): Selenocysteine
  MOD_RES (381)..(381): Selenocysteine
  MOD_RES (385)..(385): Selenocysteine
MRAAPLLLARAASLSLGFLFLLFFWLDRSVLAKELKFVXLVFRHGDRSPIDXFPXDPIKESSWPQGFGQLXQLGMEQHYELGEYIRKRYRKFLNESYKHEQVYIRSXDVDRXLMSAMXNLAALFPPEGVSIWNPILLWQPIPVHXVPLSEDQLLYLPFRNCPRFQELESEXLKSEEFQKRLHPYKDFIAXLGKLSGLHGQDLFGIWSKVYDPLYCESVHNFXLPSWAXEDXMXKLRELSELSLLSLYGIHKQKEKSRLQGGVLVNEILNHMKRAXQIPSYKKLIMYSAHDXXVSGLQMALDVYNGLLPPYASCHLXELYFEKGEYFVEMYYRNEXQHEPYPLMLPGCSPSCPLERFAELVGPVIPQDWSXECMXXNSHQGXEDSXD

SEQ ID NO: 1369 - protein, 418 aa, Homo sapiens
  MOD_RES (39)..(39): Selenocysteine
  MOD_RES (52)..(52): Selenocysteine
  MOD_RES (55)..(55): Selenocysteine
  MOD_RES (71)..(71): Selenocysteine
  MOD_RES (107)..(107): Selenocysteine
  MOD_RES (112)..(112): Selenocysteine
  MOD_RES (118)..(118): Selenocysteine
  MOD_RES (145)..(145): Selenocysteine
  MOD_RES (171)..(171): Selenocysteine
  MOD_RES (190)..(190): Selenocysteine
  MOD_RES (222)..(222): Selenocysteine
  MOD_RES (228)..(228): Selenocysteine
  MOD_RES (231)..(231): Selenocysteine
  MOD_RES (233)..(233): Selenocysteine
  MOD_RES (275)..(275): Selenocysteine
  MOD_RES (291)..(292): Selenocysteine
  MOD_RES (316)..(316): Selenocysteine
  MOD_RES (335)..(335): Selenocysteine
  MOD_RES (370)..(370): Selenocysteine
  MOD_RES (374)..(375): Selenocysteine
MRAAPLLLARAASLSLGFLFLLFFWLDRSVLAKELKFVXLVFRHGDRSPIDXFPXDPIKESSWPQGFGQLXQLGMEQHYELGEYIRKRYRKFLNESYKHEQVYIRSXDVDRXLMSAMXNLAALFPPEGVSIWNPILLWQPIPVHXVPLSEDQLLYLPFRNCPRFQELESEXLKSEEFQKRLHPYKDFIAXLGKLSGLHGQDLFGIWSKVYDPLYCESVHNFXLPSWAXEDXMXKLRELSELSLLSLYGIHKQKEKSRLQGGVLVNEILNHMKRAXQIPSYKKLIMYSAHDXXVSGLQMALDVYNGLLPPYASCHLXELYFEKGEYFVEMYYRNEXQHEPYPLMLPGCSPSCPLERFAELVGPVIPQDWSXECMXXNSHQVLKVIFAVAFCLISAVLMVLLFIHIRRGLCWQRESYGNI

SEQ ID NO: 1370 - protein, 165 aa, Homo sapiens
  MOD_RES (39)..(39): Selenocysteine
  MOD_RES (52)..(52): Selenocysteine
  MOD_RES (55)..(55): Selenocysteine
  MOD_RES (71)..(71): Selenocysteine
  MOD_RES (78)..(78): Selenocysteine
  MOD_RES (83)..(83): Selenocysteine
  MOD_RES (89)..(89): Selenocysteine
  MOD_RES (116)..(116): Selenocysteine
  MOD_RES (142)..(142): Selenocysteine
  MOD_RES (161)..(161): Selenocysteine
MRAAPLLLARAASLSLGFLFLLFFWLDRSVLAKELKFVXLVFRHGDRSPIDXFPXDPIKESSWPQGFGQLXQVYIRSXDVDRXLMSAMXNLAALFPPEGVSIWNPILLWQPIPVHXVPLSEDQLLYLPFRNCPRFQELESEXLKSEEFQKRLHPYKDFIAXLGKL

SEQ ID NO: 1371 - protein, 99 aa, Homo sapiens
  MOD_RES (1)..(1): Any amino acid
  MOD_RES (20)..(20): Selenocysteine
  MOD_RES (55)..(55): Selenocysteine
  MOD_RES (59)..(60): Selenocysteine
  MOD_RES (69)..(69): Selenocysteine
  MOD_RES (87)..(87): Selenocysteine
  MOD_RES (92)..(92): Selenocysteine
XELYFEKGEYFVEMYYRNEXQHEPYPLMLPGCSPSCPLERFAELVGPVIPQDWSXECMXXNSHQGPAEXAHSARRNHDIALPCGRSXCLENXVLYYHYG

SEQ ID NO: 1372 - protein, 294 aa, Homo sapiens
  MOD_RES (39)..(39): Selenocysteine
  MOD_RES (47)..(47): Selenocysteine
  MOD_RES (50)..(50): Selenocysteine
  MOD_RES (67)..(67): Selenocysteine
  MOD_RES (70)..(70): Selenocysteine
  MOD_RES (76)..(76): Selenocysteine
  MOD_RES (82)..(82): Selenocysteine
  MOD_RES (122)..(122): Selenocysteine
  MOD_RES (134)..(134): Selenocysteine
  MOD_RES (145)..(145): Selenocysteine
  MOD_RES (203)..(203): Selenocysteine
  MOD_RES (253)..(253): Selenocysteine
  MOD_RES (267)..(267): Selenocysteine
  MOD_RES (269)..(269): Selenocysteine
  MOD_RES (291)..(291): Selenocysteine
KRKEAELRSGIIRNNSLWDRLIFHKVQSSLGGRVRLMVXGAAPVSAXVLXFLRAALGCQFYEGYGQXECXAGCCLXMPGDWXAGHVGAPMPCNLIKLVDVEEMNYMAAEGEGEGYLKDPAKXAEALDKDGWLHXGDIGKWLPNGXLKIIDRKKHIFKLAQGEYIAPEKIENIYMRSEPVAQVFVHGESLQAFLIAIVVPDVEXLCSWAQKRGFEGSFEELCRNKDVKKAILEDMVRLGKDSGLKPFEQVKGIXLHPELFSIDNGLLXPXMKAKRPELRNYFRSQIDDLYSXIKV

SEQ ID NO: 1373 - protein, 388 aa, Homo sapiens
  MOD_RES (24)..(24): Selenocysteine
  MOD_RES (27)..(27): Selenocysteine
  MOD_RES (29)..(29): Selenocysteine
  MOD_RES (40)..(41): Selenocysteine
  MOD_RES (46)..(46): Selenocysteine
  MOD_RES (90)..(91): Selenocysteine
  MOD_RES (144)..(144): Selenocysteine
  MOD_RES (180)..(180): Selenocysteine
  MOD_RES (187)..(187): Selenocysteine
  MOD_RES (246)..(246): Selenocysteine
  MOD_RES (276)..(276): Selenocysteine
  MOD_RES (279)..(280): Selenocysteine
  MOD_RES (289)..(289): Selenocysteine
  MOD_RES (304)..(304): Selenocysteine
  MOD_RES (307)..(307): Selenocysteine
  MOD_RES (315)..(315): Selenocysteine
  MOD_RES (361)..(361): Selenocysteine
  MOD_RES (386)..(386): Selenocysteine
MQAHELFRYFRMPELVDFRQYVRXLPXNXLMGFGAFAALXXFWYAXRPKPLKPPCDLSMQSVEVAGSGGARRSALLDSDEPLVYFYDDVXXLYEGFQRGIQVSNNGPCLGSRKPDQPYEWLSYKQVAELSECIGSALIQKGFKXAPDQFIGIFAQNRPEWVIIEQGCFAYSMVIVPLYDXLGNEAIXYIVNKAELSLVFVDKPEKAKLLLEGVENKLIPGLKIIVVMDAYGSELVERGQRCGVEVXSMKAMEDLGRANRRKPKPPAPEDLAVICFXSGXXGNPKGAMVXHRNIVSDCSAFVKAXENXVNPCPDDXLISFLPLAHMFERVVECVMLCHGAKIGFFQGDIRLLMDDLKVLQPXVFPVVPRLLNRMFDRVSSKQRSPRXEH

SEQ ID NO: 1374 - protein, 698 aa, Homo sapiens
  MOD_RES (24)..(24): Selenocysteine
  MOD_RES (27)..(27): Selenocysteine
  MOD_RES (29)..(29): Selenocysteine
  MOD_RES (40)..(41): Selenocysteine
  MOD_RES (46)..(46): Selenocysteine
  MOD_RES (90)..(91): Selenocysteine
  MOD_RES (144)..(144): Selenocysteine
  MOD_RES (180)..(180): Selenocysteine
  MOD_RES (187)..(187): Selenocysteine
  MOD_RES (246)..(246): Selenocysteine
  MOD_RES (276)..(276): Selenocysteine
  MOD_RES (279)..(280): Selenocysteine
  MOD_RES (289)..(289): Selenocysteine
  MOD_RES (304)..(304): Selenocysteine
  MOD_RES (307)..(307): Selenocysteine
  MOD_RES (315)..(315): Selenocysteine
  MOD_RES (361)..(361): Selenocysteine
  MOD_RES (383)..(384): Selenocysteine
  MOD_RES (433)..(433): Selenocysteine
  MOD_RES (441)..(441): Selenocysteine
  MOD_RES (444)..(444): Selenocysteine
  MOD_RES (461)..(461): Selenocysteine
  MOD_RES (464)..(464): Selenocysteine
  MOD_RES (470)..(470): Selenocysteine
  MOD_RES (476)..(476): Selenocysteine
  MOD_RES (526)..(526): Selenocysteine
  MOD_RES (538)..(538): Selenocysteine
  MOD_RES (549)..(549): Selenocysteine
  MOD_RES (607)..(607): Selenocysteine
  MOD_RES (657)..(657): Selenocysteine
  MOD_RES (671)..(671): Selenocysteine
  MOD_RES (673)..(673): Selenocysteine
  MOD_RES (695)..(695): Selenocysteine
MQAHELFRYFRMPELVDFRQYVRXLPXNXLMGFGAFAALXXFWYAXRPKPLKPPCDLSMQSVEVAGSGGARRSALLDSDEPLVYFYDDVXXLYEGFQRGIQVSNNGPCLGSRKPDQPYEWLSYKQVAELSECIGSALIQKGFKXAPDQFIGIFAQNRPEWVIIEQGCFAYSMVIVPLYDXLGNEAIXYIVNKAELSLVFVDKPEKAKLLLEGVENKLIPGLKIIVVMDAYGSELVERGQRCGVEVXSMKAMEDLGRANRRKPKPPAPEDLAVICFXSGXXGNPKGAMVXHRNIVSDCSAFVKAXENXVNPCPDDXLISFLPLAHMFERVVECVMLCHGAKIGFFQGDIRLLMDDLKVLQPXVFPVVPRLLNRMFDRIFGQANXXLKRWLLDFASKRKEAELRSGIIRNNSLWDRLIFHKVQSSLGGRVRLMVXGAAPVSAXVLXFLRAALGCQFYEGYGQXECXAGCCLXMPGDWXAGHVGAPMPCNLIKLVDVEEMNYMAAEGEGEVCVKGPNVFQGYLKDPAKXAEALDKDGWLHXGDIGKWLPNGXLKIIDRKKHIFKLAQGEYIAPEKIENIYMRSEPVAQVFVHGESLQAFLIAIVVPDVEXLCSWAQKRGFEGSFEELCRNKDVKKAILEDMVRLGKDSGLKPFEQVKGIXLHPELFSIDNGLLXPXMKAKRPELRNYFRSQIDDLYSXIKV

SEQ ID NO: 1375 - protein, 698 aa, Homo sapiens
  MOD_RES (24)..(24): Selenocysteine
  MOD_RES (27)..(27): Selenocysteine
  MOD_RES (29)..(29): Selenocysteine
  MOD_RES (40)..(41): Selenocysteine
  MOD_RES (46)..(46): Selenocysteine
  MOD_RES (90)..(91): Selenocysteine
  MOD_RES (144)..(144): Selenocysteine
  MOD_RES (180)..(180): Selenocysteine
  MOD_RES (187)..(187): Selenocysteine
  MOD_RES (246)..(246): Selenocysteine
  MOD_RES (276)..(276): Selenocysteine
  MOD_RES (279)..(280): Selenocysteine
  MOD_RES (289)..(289): Selenocysteine
  MOD_RES (304)..(304): Selenocysteine
  MOD_RES (315)..(315): Selenocysteine
  MOD_RES (361)..(361): Selenocysteine
  MOD_RES (383)..(384): Selenocysteine
  MOD_RES (433)..(433): Selenocysteine
  MOD_RES (441)..(441): Selenocysteine
  MOD_RES (444)..(444): Selenocysteine
  MOD_RES (461)..(461): Selenocysteine
  MOD_RES (464)..(464): Selenocysteine
  MOD_RES (470)..(470): Selenocysteine
  MOD_RES (476)..(476): Selenocysteine
  MOD_RES (526)..(526): Selenocysteine
  MOD_RES (538)..(538): Selenocysteine
  MOD_RES (549)..(549): Selenocysteine
  MOD_RES (607)..(607): Selenocysteine
  MOD_RES (657)..(657): Selenocysteine
  MOD_RES (671)..(671): Selenocysteine
  MOD_RES (673)..(673): Selenocysteine
  MOD_RES (695)..(695): Selenocysteine
MQAHELFRYFRMPELVDFRQYVRXLPXNXLMGFGAFAALXXFWYAXRPKPLKPPCDLSMQSVEVAGSGGARRSALLDSDEPLVYFYDDVXXLYEGFQRGIQVSNNGPCLGSRKPDQPYEWLSYKQVAELSECIGSALIQKGFKXAPDQFIGIFAQNRPEWVIIEQGCFAYSMVIVPLYDXLGNEAIXYIVNKAELSLVFVDKPEKAKLLLEGVENKLIPGLKIIVVMDAYGSELVERGQRCGVEVXSMKAMEDLGRANRRKPKPPAPEDLAVICFXSGXXGNPKGAMVXHRNIVSDCSAFVKAXEKALPLSASDXHISYLPLAHIYEQLLKCVMLCHGAKIGFFQGDIRLLMDDLKVLQPXVFPVVPRLLNRMFDRIFGQANXXLKRWLLDFASKRKEAELRSGIIRNNSLWDRLIFHKVQSSLGGRVRLMVXGAAPVSAXVLXFLRAALGCQFYEGYGQXECXAGCCLXMPGDWXAGHVGAPMPCNLIKLVDVEEMNYMAAEGEGEVCVKGPNVFQGYLKDPAKXAEALDKDGWLHXGDIGKWLPNGXLKIIDRKKHIFKLAQGEYIAPEKIENIYMRSEPVAQVFVHGESLQAFLIAIVVPDVEXLCSWAQKRGFEGSFEELCRNKDVKKAILEDMVRLGKDSGLKPFEQVKGIXLHPELFSIDNGLLXPXMKAKRPELRNYFRSQIDDLYSXIKV

SEQ ID NO: 1376 - protein, 664 aa, Homo sapiens
  MOD_RES (24)..(24): Selenocysteine
  MOD_RES (27)..(27): Selenocysteine
  MOD_RES (29)..(29): Selenocysteine
  MOD_RES (40)..(41): Selenocysteine
  MOD_RES (46)..(46): Selenocysteine
  MOD_RES (90)..(91): Selenocysteine
  MOD_RES (146)..(146): Selenocysteine
  MOD_RES (153)..(153): Selenocysteine
  MOD_RES (212)..(212): Selenocysteine
  MOD_RES (242)..(242): Selenocysteine
  MOD_RES (245)..(246): Selenocysteine
  MOD_RES (255)..(255): Selenocysteine
  MOD_RES (270)..(270): Selenocysteine
  MOD_RES (273)..(273): Selenocysteine
  MOD_RES (281)..(281): Selenocysteine
  MOD_RES (327)..(327): Selenocysteine
  MOD_RES (349)..(350): Selenocysteine
  MOD_RES (399)..(399): Selenocysteine
  MOD_RES (407)..(407): Selenocysteine
  MOD_RES (410)..(410): Selenocysteine
  MOD_RES (427)..(427): Selenocysteine
  MOD_RES (430)..(430): Selenocysteine
  MOD_RES (436)..(436): Selenocysteine
  MOD_RES (442)..(442): Selenocysteine
  MOD_RES (492)..(492): Selenocysteine
  MOD_RES (504)..(504): Selenocysteine
  MOD_RES (515)..(515): Selenocysteine
  MOD_RES (573)..(573): Selenocysteine
  MOD_RES (623)..(623): Selenocysteine
  MOD_RES (637)..(637): Selenocysteine
  MOD_RES (639)..(639): Selenocysteine
  MOD_RES (661)..(661): Selenocysteine
MQAHELFRYFRMPELVDFRQYVRXLPXNXLMGFGAFAALXXFWYAXRPKPLKPPCDLSMQSVEVAGSGGARRSALLDSDEPLVYFYDDVXXLYEGFQRGIQVSNNGPCLGSRKPDQPYEWLSYKQWVIIEQGCFAYSMVIVPLYDXLGNEAIXYIVNKAELSLVFVDKPEKAKLLLEGVENKLIPGLKIIVVMDAYGSELVERGQRCGVEVXSMKAMEDLGRANRRKPKPPAPEDLAVICFXSGXXGNPKGAMVXHRNIVSDCSAFVKAXENXVNPCPDDXLISFLPLAHMFERVVECVMLCHGAKIGFFQGDIRLLMDDLKVLQPXVFPVVPRLLNRMFDRIFGQANXXLKRWLLDFASKRKEAELRSGIIRNNSLWDRLIFHKVQSSLGGRVRLMVXGAAPVSAXVLXFLRAALGCQFYEGYGQXECXAGCCLXMPGDWXAGHVGAPMPCNLIKLVDVEEMNYMAAEGEGEVCVKGPNVFQGYLKDPAKXAEALDKDGWLHXGDIGKWLPNGXLKIIDRKKHIFKLAQGEYIAPEKIENIYMRSEPVAQVFVHGESLQAFLIAIVVPDVEXLCSWAQKRGFEGSFEELCRNKDVKKAILEDMVRLGKDSGLKPFEQVKGIXLHPELFSIDNGLLXPXMKAKRPELRNYFRSQIDDLYSXIKV

SEQ ID NO: 1377 - protein, 126 aa, Homo sapiens
  MOD_RES (24)..(24): Selenocysteine
  MOD_RES (27)..(27): Selenocysteine
  MOD_RES (29)..(29): Selenocysteine
  MOD_RES (40)..(41): Selenocysteine
  MOD_RES (46)..(46): Selenocysteine
  MOD_RES (90)..(91): Selenocysteine
  MOD_RES (125)..(125): Selenocysteine
MQAHELFRYFRMPELVDFRQYVRXLPXNXLMGFGAFAALXXFWYAXRPKPLKPPCDLSMQSVEVAGSGGARRSALLDSDEPLVYFYDDVXXLYEGFQRGIQVSRSLRPLCVHCNFPRVGPKAHWXL

SEQ ID NO: 1378 - protein, 527 aa, Homo sapiens
  MOD_RES (9)..(9): Selenocysteine
  MOD_RES (16)..(16): Selenocysteine
  MOD_RES (75)..(75): Selenocysteine
  MOD_RES (105)..(105): Selenocysteine
  MOD_RES (108)..(109): Selenocysteine
  MOD_RES (118)..(118): Selenocysteine
  MOD_RES (133)..(133): Selenocysteine
  MOD_RES (136)..(136): Selenocysteine
  MOD_RES (144)..(144): Selenocysteine
  MOD_RES (190)..(190): Selenocysteine
  MOD_RES (212)..(213): Selenocysteine
  MOD_RES (262)..(262): Selenocysteine
  MOD_RES (270)..(270): Selenocysteine
  MOD_RES (273)..(273): Selenocysteine
  MOD_RES (290)..(290): Selenocysteine
  MOD_RES (293)..(293): Selenocysteine
  MOD_RES (299)..(299): Selenocysteine
  MOD_RES (305)..(305): Selenocysteine
  MOD_RES (355)..(355): Selenocysteine
  MOD_RES (367)..(367): Selenocysteine
  MOD_RES (378)..(378): Selenocysteine
  MOD_RES (436)..(436): Selenocysteine
  MOD_RES (486)..(486): Selenocysteine
  MOD_RES (500)..(500): Selenocysteine
  MOD_RES (502)..(502): Selenocysteine
  MOD_RES (524)..(524): Selenocysteine
MVIVPLYDXLGNEAIXYIVNKAELSLVFVDKPEKAKLLLEGVENKLIPGLKIIVVMDAYGSELVERGQRCGVEVXSMKAMEDLGRANRRKPKPPAPEDLAVICFXSGXXGNPKGAMVXHRNIVSDCSAFVKAXENXVNPCPDDXLISFLPLAHMFERVVECVMLCHGAKIGFFQGDIRLLMDDLKVLQPXVFPVVPRLLNRMFDRIFGQANXXLKRWLLDFASKRKEAELRSGIIRNNSLWDRLIFHKVQSSLGGRVRLMVXGAAPVSAXVLXFLRAALGCQFYEGYGQXECXAGCCLXMPGDWXAGHVGAPMPCNLIKLVDVEEMNYMAAEGEGEVCVKGPNVFQGYLKDPAKXAEALDKDGWLHXGDIGKWLPNGXLKIIDRKKHIFKLAQGEYIAPEKIENIYMRSEPVAQVFVHGESLQAFLIAIVVPDVEXLCSWAQKRGFEGSFEELCRNKDVKKAILEDMVRLGKDSGLKPFEQVKGIXLHPELFSIDNGLLXPXMKAKRPELRNYFRSQIDDLYSXIKV

SEQ ID NO: 1379 - protein, 94 aa, Homo sapiens
  MOD_RES (1)..(1): Any amino acid
  MOD_RES (24)..(24): Selenocysteine
  MOD_RES (27)..(28): Selenocysteine
  MOD_RES (37)..(37): Selenocysteine
  MOD_RES (52)..(52): Selenocysteine
  MOD_RES (83)..(83): Selenocysteine
XLGRANRRKPKPPAPEDLAVICFXSGXXGNPKGAMVXHRNIVSDCSAFVKAXECVMLCHGAKIGFFQGDIRLLMDDLKVLQPXVFPVVPRLLNR

SEQ ID NO: 1380 - protein, 80 aa, Homo sapiens
  MOD_RES (66)..(66): Selenocysteine
  MOD_RES (77)..(77): Selenocysteine
MDDDIAALVVDNGSGMCKAGFAGDDAPRAVFPSIVGRPRHQGVMVGMGQKDSYVGDEAQSKRGILXLKYPIEHGIVXNWD

SEQ ID NO: 1381 - protein, 103 aa, Homo sapiens
  MOD_RES (66)..(66): Selenocysteine
  MOD_RES (77)..(77): Selenocysteine
  MOD_RES (89)..(89): Selenocysteine
MDDDIAALVVDNGSGMCKAGFAGDDAPRAVFPSIVGRPRHQGVMVGMGQKDSYVGDEAQSKRGILXLKYPIEHGIVXNWDDMEKIWHHXFYNELRVAPEEHPV

SEQ ID NO: 1382 - protein, 125 aa, Homo sapiens
  MOD_RES (66)..(66): Selenocysteine
  MOD_RES (77)..(77): Selenocysteine
  MOD_RES (89)..(89): Selenocysteine
  MOD_RES (106)..(106): Selenocysteine
  MOD_RES (120)..(120): Selenocysteine
MDDDIAALVVDNGSGMCKAGFAGDDAPRAVFPSIVGRPRHQGVMVGMGQKDSYVGDEAQSKRGILXLKYPIEHGIVXNWDDMEKIWHHXFYNELRVAPEEHPVLLXEAPLNPKANREKMXQDSLL

SEQ ID NO: 1383 - protein, 164 aa, Homo sapiens
  MOD_RES (66)..(66): Selenocysteine
  MOD_RES (77)..(77): Selenocysteine
  MOD_RES (89)..(89): Selenocysteine
  MOD_RES (106)..(106): Selenocysteine
  MOD_RES (120)..(120): Selenocysteine
  MOD_RES (126)..(126): Selenocysteine
  MOD_RES (129)..(129): Selenocysteine
  MOD_RES (148)..(149): Selenocysteine
  MOD_RES (160)..(160): Selenocysteine
  MOD_RES (162)..(162): Selenocysteine
MDDDIAALVVDNGSGMCKAGFAGDDAPRAVFPSIVGRPRHQGVMVGMGQKDSYVGDEAQSKRGILXLKYPIEHGIVXNWDDMEKIWHHXFYNELRVAPEEHPVLLXEAPLNPKANREKMXQIMFEXFNXPAMYVAIQAVLSLYASGRXXGIVMDSGDGVXHXVP

SEQ ID NO: 1384 - protein, 375 aa, Homo sapiens
  MOD_RES (66)..(66): Selenocysteine
  MOD_RES (77)..(77): Selenocysteine
  MOD_RES (89)..(89): Selenocysteine
  MOD_RES (106)..(106): Selenocysteine
  MOD_RES (120)..(120): Selenocysteine
  MOD_RES (126)..(126): Selenocysteine
  MOD_RES (129)..(129): Selenocysteine
  MOD_RES (148)..(149): Selenocysteine
  MOD_RES (160)..(160): Selenocysteine
  MOD_RES (162)..(162): Selenocysteine
  MOD_RES (186)..(186): Selenocysteine
  MOD_RES (194)..(194): Selenocysteine
  MOD_RES (201)..(203): Selenocysteine
  MOD_RES (229)..(229): Selenocysteine
  MOD_RES (249)..(249): Selenocysteine
  MOD_RES (277)..(278): Selenocysteine
  MOD_RES (297)..(297): Selenocysteine
  MOD_RES (303)..(304): Selenocysteine
  MOD_RES (318)..(318): Selenocysteine
  MOD_RES (324)..(324): Selenocysteine
  MOD_RES (351)..(351): Selenocysteine
MDDDIAALVVDNGSGMCKAGFAGDDAPRAVFPSIVGRPRHQGVMVGMGQKDSYVGDEAQSKRGILXLKYPIEHGIVXNWDDMEKIWHHXFYNELRVAPEEHPVLLXEAPLNPKANREKMXQIMFEXFNXPAMYVAIQAVLSLYASGRXXGIVMDSGDGVXHXVPIYEGYALPHAILRLDLAGRDLXDYLMKILXERGYSFXXXAEREIVRDIKEKLCYVALDFEQEMAXAASSSSLEKSYELPDGQVIXIGNERFRCPEALFQPSFLGMESCGIHEXXFNSIMKCDVDIRKDLYANXVLSGGXXMYPGIADRMQKEIXALAPSXMKIKIIAPPERKYSVWIGGSILASLSXFQQMWISKQEYDESGPSIVHRKCF

SEQ ID NO: 1385 - protein, 99 aa, Homo sapiens
  MOD_RES (3)..(3): Selenocysteine
  MOD_RES (69)..(69): Selenocysteine
  MOD_RES (80)..(80): Selenocysteine
  MOD_RES (92)..(92): Selenocysteine
MLXMDDDIAALVVDNGSGMCKAGFAGDDAPRAVFPSIVGRPRHQGVMVGMGQKDSYVGDEAQSKRGILXLKYPIEHGIVXNWDDMEKIWHHXFYNELRV

SEQ ID NO: 1386 - protein, 242 aa, Homo sapiens
  MOD_RES (57)..(57): Selenocysteine
  MOD_RES (68)..(68): Selenocysteine
  MOD_RES (80)..(80): Selenocysteine
  MOD_RES (97)..(97): Selenocysteine
  MOD_RES (111)..(111): Selenocysteine
  MOD_RES (117)..(117): Selenocysteine
  MOD_RES (120)..(120): Selenocysteine
  MOD_RES (139)..(140): Selenocysteine
  MOD_RES (151)..(151): Selenocysteine
  MOD_RES (153)..(153): Selenocysteine
  MOD_RES (177)..(177): Selenocysteine
  MOD_RES (185)..(185): Selenocysteine
  MOD_RES (192)..(194): Selenocysteine
  MOD_RES (220)..(220): Selenocysteine
  MOD_RES (240)..(240): Selenocysteine
MEEEIAALVIDNGSGMCKAGFAGDDAPRAVFPSIVGRPRHQDSYVGDEAQSKRGILXLKYPIEHGIVXNWDDMEKIWHHXFYNELRVAPEEHPVLLXEAPLNPKANREKMXQIMFEXFNXPAMYVAIQAVLSLYASGRXXGIVMDSGDGVXHXVPIYEGYALPHAILRLDLAGRDLXDYLMKILXERGYSFXXXAEREIVRDIKEKLCYVALDFEQEMAXAASSSSLEKSYELPDGQVIXIG

SEQ ID NO: 1387 - protein, 198 aa, Homo sapiens
  MOD_RES (66)..(66): Selenocysteine
  MOD_RES (77)..(77): Selenocysteine
  MOD_RES (89)..(89): Selenocysteine
  MOD_RES (106)..(106): Selenocysteine
  MOD_RES (120)..(120): Selenocysteine
  MOD_RES (142)..(142): Selenocysteine
  MOD_RES (147)..(147): Selenocysteine
  MOD_RES (157)..(157): Selenocysteine
  MOD_RES (168)..(168): Selenocysteine
  MOD_RES (171)..(171): Selenocysteine
  MOD_RES (175)..(175): Selenocysteine
  MOD_RES (180)..(180): Selenocysteine
  MOD_RES (183)..(183): Selenocysteine
  MOD_RES (187)..(187): Selenocysteine
  MOD_RES (193)..(193): Selenocysteine
  MOD_RES (198)..(198): Selenocysteine
MEEEIAALVIDNGSGMCKAGFAGDDAPRAVFPSIVGRPRHQGVMVGMGQKDSYVGDEAQSKRGILXLKYPIEHGIVXNWDDMEKIWHHXFYNELRVAPEEHPVLLXEAPLNPKANREKMXQALFLSRHFLPEASRLCLRPSXPRPCXWPSRPCCPSXPLGAPLALSWXLEXGSPXRCPSXRAXPSPXPSCVWXWLAGX

SEQ ID NO: 1388 - protein, 164 aa, Homo sapiens
  MOD_RES (66)..(66): Selenocysteine
  MOD_RES (77)..(77): Selenocysteine
  MOD_RES (89)..(89): Selenocysteine
  MOD_RES (106)..(106): Selenocysteine
  MOD_RES (120)..(120): Selenocysteine
  MOD_RES (126)..(126): Selenocysteine
  MOD_RES (129)..(129): Selenocysteine
  MOD_RES (148)..(149): Selenocysteine
  MOD_RES (160)..(160): Selenocysteine
  MOD_RES (162)..(162): Selenocysteine
MEEEIAALVIDNGSGMCKAGFAGDDAPRAVFPSIVGRPRHQGVMVGMGQKDSYVGDEAQSKRGILXLKYPIEHGIVXNWDDMEKIWHHXFYNELRVAPEEHPVLLXEAPLNPKANREKMXQIMFEXFNXPAMYVAIQAVLSLYASGRXXGIVMDSGDGVXHXVP

SEQ ID NO: 1389 - protein, 214 aa, Homo sapiens
  MOD_RES (66)..(66): Selenocysteine
  MOD_RES (77)..(77): Selenocysteine
  MOD_RES (89)..(89): Selenocysteine
  MOD_RES (106)..(106): Selenocysteine
  MOD_RES (120)..(120): Selenocysteine
  MOD_RES (126)..(126): Selenocysteine
  MOD_RES (129)..(129): Selenocysteine
  MOD_RES (148)..(149): Selenocysteine
  MOD_RES (160)..(160): Selenocysteine
  MOD_RES (162)..(162): Selenocysteine
  MOD_RES (186)..(186): Selenocysteine
  MOD_RES (194)..(194): Selenocysteine
  MOD_RES (201)..(203): Selenocysteine
MEEEIAALVIDNGSGMCKAGFAGDDAPRAVFPSIVGRPRHQGVMVGMGQKDSYVGDEAQSKRGILXLKYPIEHGIVXNWDDMEKIWHHXFYNELRVAPEEHPVLLXEAPLNPKANREKMXQIMFEXFNXPAMYVAIQAVLSLYASGRXXGIVMDSGDGVXHXVPIYEGYALPHAILRLDLAGRDLXDYLMKILXERGYSFXXXAEREIVRDIKE

SEQ ID NO: 1390 - protein, 375 aa, Homo sapiens
  MOD_RES (66)..(66): Selenocysteine
  MOD_RES (77)..(77): Selenocysteine
  MOD_RES (89)..(89): Selenocysteine
  MOD_RES (106)..(106): Selenocysteine
  MOD_RES (120)..(120): Selenocysteine
  MOD_RES (126)..(126): Selenocysteine
  MOD_RES (129)..(129): Selenocysteine
  MOD_RES (148)..(149): Selenocysteine
  MOD_RES (160)..(160): Selenocysteine
  MOD_RES (162)..(162): Selenocysteine
  MOD_RES (186)..(186): Selenocysteine
  MOD_RES (194)..(194): Selenocysteine
  MOD_RES (201)..(203): Selenocysteine
  MOD_RES (229)..(229): Selenocysteine
  MOD_RES (249)..(249): Selenocysteine
  MOD_RES (277)..(278): Selenocysteine
  MOD_RES (297)..(297): Selenocysteine
  MOD_RES (303)..(304): Selenocysteine
  MOD_RES (318)..(318): Selenocysteine
  MOD_RES (324)..(324): Selenocysteine
  MOD_RES (351)..(351): Selenocysteine
MEEEIAALVIDNGSGMCKAGFAGDDAPRAVFPSIVGRPRHQGVMVGMGQKDSYVGDEAQSKRGILXLKYPIEHGIVXNWDDMEKIWHHXFYNELRVAPEEHPVLLXEAPLNPKANREKMXQIMFEXFNXPAMYVAIQAVLSLYASGRXXGIVMDSGDGVXHXVPIYEGYALPHAILRLDLAGRDLXDYLMKILXERGYSFXXXAEREIVRDIKEKLCYVALDFEQEMAXAASSSSLEKSYELPDGQVIXIGNERFRCPEALFQPSFLGMESCGIHEXXFNSIMKCDVDIRKDLYANXVLSGGXXMYPGIADRMQKEIXALAPSXMKIKIIAPPERKYSVWIGGSILASLSXFQQMWISKQEYDESGPSIVHRKCF

SEQ ID NO: 1391 - protein, 133 aa, Homo sapiens
  MOD_RES (66)..(66): Selenocysteine
  MOD_RES (77)..(77): Selenocysteine
  MOD_RES (89)..(89): Selenocysteine
  MOD_RES (106)..(106): Selenocysteine
  MOD_RES (124)..(125): Selenocysteine
MEEEIAALVIDNGSGMCKAGFAGDDAPRAVFPSIVGRPRHQGVMVGMGQKDSYVGDEAQSKRGILXLKYPIEHGIVXNWDDMEKIWHHXFYNELRVAPEEHPVLLXEAPLNPKAVLSLYASGRXXGIVMDSGD

SEQ ID NO: 1392 - protein, 429 aa, Homo sapiens
  MOD_RES (22)..(22): Selenocysteine
  MOD_RES (39)..(39): Selenocysteine
  MOD_RES (52)..(52): Selenocysteine
  MOD_RES (67)..(67): Selenocysteine
  MOD_RES (72)..(72): Selenocysteine
  MOD_RES (106)..(106): Selenocysteine
  MOD_RES (129)..(129): Selenocysteine
  MOD_RES (137)..(137): Selenocysteine
  MOD_RES (154)..(154): Selenocysteine
  MOD_RES (158)..(158): Selenocysteine
  MOD_RES (166)..(166): Selenocysteine
  MOD_RES (175)..(175): Selenocysteine
  MOD_RES (177)..(178): Selenocysteine
  MOD_RES (203)..(203): Selenocysteine
  MOD_RES (247)..(247): Selenocysteine
  MOD_RES (273)..(273): Selenocysteine
  MOD_RES (284)..(284): Selenocysteine
  MOD_RES (321)..(321): Selenocysteine
  MOD_RES (330)..(331): Selenocysteine
  MOD_RES (355)..(355): Selenocysteine
  MOD_RES (361)..(361): Selenocysteine
  MOD_RES (372)..(372): Selenocysteine
  MOD_RES (385)..(386): Selenocysteine
  MOD_RES (405)..(405): Selenocysteine
MSGGVYGGDEVGALVFDIGSYXVRAGYAGEDCPKVDFPXAIGMVVERDDGSXLMEIDGDKGKQGGPXYYIDXNALRVPRENMEAISPLKNGMVEDWDSFQAILDHXYKMHVKSEASLHPVLMSEAPWNXRAKREKLXELMFEHYNIPAFFLCKXAVLXAFANGRSXGLILDSGAXHXXAIPVHDGYVLQQGIVKSPLAGDFIXMQCRELFQEMNIELVPPYMIASKEAVREGSPANWKRKEKLPQVXRSWHNYMCNCVIQDFQASVLQVSDSXYDEQVAAQMPXVHYEFPNGYNCDFGAERLKIPEGLFDPSNVKGLSGNXMLGVSHVVXXSVGMCDIDIRPGLYGSVIVAGGNXLIQSFXDRLNRELSQKXPPSMRLKLIANNXXVERRFSSWIGGSILASLGXFQQMWISKQEYEEGGKQCVERKCP

SEQ ID NO: 1393 - protein, 50 aa, Homo sapiens
  MOD_RES (10)..(10): Selenocysteine
  MOD_RES (25)..(25): Selenocysteine
  MOD_RES (30)..(30): Selenocysteine
MVVERDDGSXLMEIDGDKGKQGGPXYYIDXNALRVPRENMEAISPLKNGM

SEQ ID NO: 1394 - protein, 387 aa, Homo sapiens
  MOD_RES (10)..(10): Selenocysteine
  MOD_RES (25)..(25): Selenocysteine
  MOD_RES (30)..(30): Selenocysteine
  MOD_RES (64)..(64): Selenocysteine
  MOD_RES (87)..(87): Selenocysteine
  MOD_RES (95)..(95): Selenocysteine
  MOD_RES (112)..(112): Selenocysteine
  MOD_RES (116)..(116): Selenocysteine
  MOD_RES (124)..(124): Selenocysteine
  MOD_RES (133)..(133): Selenocysteine
  MOD_RES (135)..(136): Selenocysteine
  MOD_RES (161)..(161): Selenocysteine
  MOD_RES (205)..(205): Selenocysteine
  MOD_RES (231)..(231): Selenocysteine
  MOD_RES (242)..(242): Selenocysteine
  MOD_RES (279)..(279): Selenocysteine
  MOD_RES (288)..(289): Selenocysteine
  MOD_RES (313)..(313): Selenocysteine
  MOD_RES (319)..(319): Selenocysteine
  MOD_RES (330)..(330): Selenocysteine
  MOD_RES (343)..(344): Selenocysteine
  MOD_RES (363)..(363): Selenocysteine
MVVERDDGSXLMEIDGDKGKQGGPXYYIDXNALRVPRENMEAISPLKNGMVEDWDSFQAILDHXYKMHVKSEASLHPVLMSEAPWNXRAKREKLXELMFEHYNIPAFFLCKXAVLXAFANGRSXGLILDSGAXHXXAIPVHDGYVLQQGIVKSPLAGDFIXMQCRELFQEMNIELVPPYMIASKEAVREGSPANWKRKEKLPQVXRSWHNYMCNCVIQDFQASVLQVSDSXYDEQVAAQMPXVHYEFPNGYNCDFGAERLKIPEGLFDPSNVKGLSGNXMLGVSHVVXXSVGMCDIDIRPGLYGSVIVAGGNXLIQSFXDRLNRELSQKXPPSMRLKLIANNXXVERRFSSWIGGSILASLGXFQQMWISKQEYEEGGKQCVERKCP

SEQ ID NO: 1395 - protein, 161 aa, Homo sapiens
  MOD_RES (1)..(1): Any amino acid
  MOD_RES (17)..(17): Selenocysteine
  MOD_RES (34)..(34): Selenocysteine
  MOD_RES (47)..(47): Selenocysteine
  MOD_RES (62)..(62): Selenocysteine
  MOD_RES (67)..(67): Selenocysteine
  MOD_RES (101)..(101): Selenocysteine
  MOD_RES (124)..(124): Selenocysteine
  MOD_RES (132)..(132): Selenocysteine
  MOD_RES (149)..(149): Selenocysteine
  MOD_RES (153)..(153): Selenocysteine
XFSDEVGALVFDIGSYXVRAGYAGEDCPKVDFPXAIGMVVERDDGSXLMEIDGDKGKQGGPXYYIDXNALRVPRENMEAISPLKNGMVEDWDSFQAILDHXYKMHVKSEASLHPVLMSEAPWNXRAKREKLXELMFEHYNIPAFFLCKXAVLXAFIHHLLH

SEQ ID NO: 1396 - protein, 426 aa, Homo sapiens
  MOD_RES (39)..(40): Selenocysteine
  MOD_RES (69)..(69): Selenocysteine
  MOD_RES (103)..(103): Selenocysteine
  MOD_RES (126)..(126): Selenocysteine
  MOD_RES (134)..(134): Selenocysteine
  MOD_RES (151)..(151): Selenocysteine
  MOD_RES (155)..(155): Selenocysteine
  MOD_RES (163)..(163): Selenocysteine
  MOD_RES (172)..(172): Selenocysteine
  MOD_RES (174)..(175): Selenocysteine
  MOD_RES (281)..(281): Selenocysteine
  MOD_RES (292)..(292): Selenocysteine
  MOD_RES (318)..(318): Selenocysteine
  MOD_RES (327)..(328): Selenocysteine
  MOD_RES (348)..(348): Selenocysteine
  MOD_RES (352)..(352): Selenocysteine
  MOD_RES (358)..(358): Selenocysteine
  MOD_RES (369)..(369): Selenocysteine
  MOD_RES (383)..(383): Selenocysteine
  MOD_RES (402)..(402): Selenocysteine
MSGGVYGGDEVGALVFDIGSFSVRAGYAGEDCPKADFPXXVGLLAAEEGGGLELEGDKEKKGKIFHIDXNALHVPRDGAEVMSPLKNGMIEDWECFRAILDHXYSKHVKSEPNLHPVLMSEAPWNXRAKREKLXELMFEQYNIPAFFLCKXAVLXAFANGRSXGLVLDSGAXHXXAIPVHDGYVLQQGIVKSPLAGDFISMQCRELFQEMAIDIIPPYMIAAKEPVREGAPPNWKKKEKLPQVSKSWHNYMCNEVIQDFQASVLQVSDSPYDEQVAAQMPXVHYEMPNGYNXDYGAERLRIPEGLFDPSNVKGLSGNXMLGVGHVVXXSIGMCDIDIRPGLYGSVIVXGGNXLLQGFXDRLNRELSQKXPPSMRLKLIASNSXMERKFSPWIGGSILASLGXFQQMWISKQEYEEGGKQCVERKCP

SEQ ID NO: 1397 - protein, 66 aa, Homo sapiens
  MOD_RES (22)..(22): Selenocysteine
  MOD_RES (45)..(45): Selenocysteine
  MOD_RES (53)..(53): Selenocysteine
MSPLKNGMIEDWECFRAILDHXYSKHVKSEPNLHPVLMSEAPWNXRAKREKLXELMFEQYNIPAFF

SEQ ID NO: 1398 - protein, 894 aa, Homo sapiens
  MOD_RES (43)..(43): Selenocysteine
  MOD_RES (45)..(45): Selenocysteine
  MOD_RES (57)..(57): Selenocysteine
  MOD_RES (130)..(130): Selenocysteine
  MOD_RES (136)..(136): Selenocysteine
  MOD_RES (151)..(151): Selenocysteine
  MOD_RES (165)..(165): Selenocysteine
  MOD_RES (178)..(178): Selenocysteine
  MOD_RES (237)..(237): Selenocysteine
  MOD_RES (247)..(247): Selenocysteine
  MOD_RES (264)..(264): Selenocysteine
  MOD_RES (300)..(300): Selenocysteine
  MOD_RES (308)..(308): Selenocysteine
  MOD_RES (312)..(312): Selenocysteine
  MOD_RES (347)..(347): Selenocysteine
  MOD_RES (350)..(350): Selenocysteine
  MOD_RES (412)..(412): Selenocysteine
  MOD_RES (415)..(415): Selenocysteine
  MOD_RES (435)..(435): Selenocysteine
  MOD_RES (495)..(495): Selenocysteine
  MOD_RES (497)..(497): Selenocysteine
  MOD_RES (513)..(513): Selenocysteine
  MOD_RES (556)..(556): Selenocysteine
  MOD_RES (564)..(564): Selenocysteine
  MOD_RES (601)..(601): Selenocysteine
  MOD_RES (603)..(603): Selenocysteine
  MOD_RES (609)..(609): Selenocysteine
  MOD_RES (668)..(668): Selenocysteine
  MOD_RES (713)..(713): Selenocysteine
  MOD_RES (716)..(716): Selenocysteine
  MOD_RES (729)..(730): Selenocysteine
  MOD_RES (734)..(734): Selenocysteine
  MOD_RES (740)..(740): Selenocysteine
  MOD_RES (744)..(744): Selenocysteine
  MOD_RES (751)..(751): Selenocysteine
  MOD_RES (799)..(799): Selenocysteine
  MOD_RES (808)..(808): Selenocysteine
  MOD_RES (810)..(810): Selenocysteine
  MOD_RES (819)..(819): Selenocysteine
  MOD_RES (822)..(822): Selenocysteine
  MOD_RES (825)..(825): Selenocysteine
  MOD_RES (827)..(827): Selenocysteine
MNQIEPGVQYNYVYDEDEYMIQEEEWDRDLLLDPAWEKQQRKXFXAWCNSHLRKAGXQIENIEEDFRNGLKLMLLLEVISGERLPKPDRGKMRFHKIANVNKALDYIASKGVKLVSIGAEEIVDGNVKMXLGMIWXIILRFAIQDISVEEXSAKEGLLLWCQRKXAPYRNVNIQNFHXSWKDGLGLCALIHRHRPDLIDYSKLNKDDPIGNINLAMEIAEKHLDIPKMLDAEDIVNXPKPDERAIMXYVSCFYHAFAGAEQAEXAANRICKVLAVNQENERLMEEYERLASELLEWIRRXIPWLENRXPEKXMQAMQKKLEDFRDYRRKHKPPKVQEKCQLEINFNXLQXKLRISNRPAFMPSEGKMVSDIAGAWQRLEQAEKGYEEWLLNEIRRLERLEHLAEKFRQKASXHEXWAYGKEQILLQKDYESASLXEVRALLRKHEAFESDLAAHQDRVEQIAAIAQELNELDYHDAVNVNDRCQKICDQWDRLGXLXQKRREALERMEKLLEXIDQLHLEFAKRAAPFNNWMEGAMEDLQDMFIVHSIEEIQSLIXAHEQFKAXLPEADGERQSIMAIQNEVEKVIQSYNIRISSSNPYSXVXMDELRXKWDKVKQLVPIRDQSLQEELARQHANERLRRQFAAQANAIGPWIQNKMEEIARSSIQIXGALEDQMNQLKQYEHNIINYKNNIDKLEGDHQLIQEALVFDNKHXNYXMEHIRVGWELLLXXIARXINEVEXQILXRDAKGIXQEQMNEFRASFNHFDRRKNGLMDHEDFRACLISMGYDLGEAEFARIMXLVDPNGQGXVXFQSFIDFMXREXADXDXAEQVIASFRILASDKPYILAEELRRELPPDQAQYCIKRMPAYSGPGSVPGALDYAAFSSALYGESDL

SEQ ID NO: 1399 - protein, 894 aa, Homo sapiens
  MOD_RES (43)..(43): Selenocysteine
  MOD_RES (45)..(45): Selenocysteine
  MOD_RES (57)..(57): Selenocysteine
  MOD_RES (130)..(130): Selenocysteine
  MOD_RES (136)..(136): Selenocysteine
  MOD_RES (151)..(151): Selenocysteine
  MOD_RES (165)..(165): Selenocysteine
  MOD_RES (178)..(178): Selenocysteine
  MOD_RES (237)..(237): Selenocysteine
  MOD_RES (247)..(247): Selenocysteine
  MOD_RES (264)..(264): Selenocysteine
  MOD_RES (300)..(300): Selenocysteine
  MOD_RES (308)..(308): Selenocysteine
  MOD_RES (312)..(312): Selenocysteine
  MOD_RES (347)..(347): Selenocysteine
  MOD_RES (350)..(350): Selenocysteine
  MOD_RES (412)..(412): Selenocysteine
  MOD_RES (415)..(415): Selenocysteine
  MOD_RES (435)..(435): Selenocysteine
  MOD_RES (495)..(495): Selenocysteine
  MOD_RES (497)..(497): Selenocysteine
  MOD_RES (513)..(513): Selenocysteine
  MOD_RES (556)..(556): Selenocysteine
  MOD_RES (564)..(564): Selenocysteine
  MOD_RES (601)..(601): Selenocysteine
  MOD_RES (603)..(603): Selenocysteine
  MOD_RES (609)..(609): Selenocysteine
  MOD_RES (668)..(668): Selenocysteine
  MOD_RES (713)..(713): Selenocysteine
  MOD_RES (716)..(716): Selenocysteine
  MOD_RES (729)..(730): Selenocysteine
  MOD_RES (734)..(734): Selenocysteine
  MOD_RES (740)..(740): Selenocysteine
  MOD_RES (744)..(744): Selenocysteine
  MOD_RES (751)..(751): Selenocysteine
  MOD_RES (799)..(799): Selenocysteine
  MOD_RES (808)..(808): Selenocysteine
  MOD_RES (810)..(810): Selenocysteine
  MOD_RES (819)..(819): Selenocysteine
  MOD_RES (822)..(822): Selenocysteine
  MOD_RES (825)..(825): Selenocysteine
  MOD_RES (827)..(827): Selenocysteine
MNQIEPGVQYNYVYDEDEYMIQEEEWDRDLLLDPAWEKQQRKXFXAWCNSHLRKAGXQIENIEEDFRNGLKLMLLLEVISGERLPKPDRGKMRFHKIANVNKALDYIASKGVKLVSIGAEEIVDGNVKMXLGMIWXIILRFAIQDISVEEXSAKEGLLLWCQRKXAPYRNVNIQNFHXSWKDGLGLCALIHRHRPDLIDYSKLNKDDPIGNINLAMEIAEKHLDIPKMLDAEDLVYXARPDERAIMXYVSCYYHAFAGAQKAEXAANRICKVLAVNQENERLMEEYERLASELLEWIRRXIPWLENRXPEKXMQAMQKKLEDFRDYRRKHKPPKVQEKCQLEINFNXLQXKLRISNRPAFMPSEGKMVSDIAGAWQRLEQAEKGYEEWLLNEIRRLERLEHLAEKFRQKASXHEXWAYGKEQILLQKDYESASLXEVRALLRKHEAFESDLAAHQDRVEQIAAIAQELNELDYHDAVNVNDRCQKICDQWDRLGXLXQKRREALERMEKLLEXIDQLHLEFAKRAAPFNNWMEGAMEDLQDMFIVHSIEEIQSLIXAHEQFKAXLPEADGERQSIMAIQNEVEKVIQSYNIRISSSNPYSXVXMDELRXKWDKVKQLVPIRDQSLQEELARQHANERLRRQFAAQANAIGPWIQNKMEEIARSSIQIXGALEDQMNQLKQYEHNIINYKNNIDKLEGDHQLIQEALVFDNKHXNYXMEHIRVGWELLLXXIARXINEVEXQILXRDAKGIXQEQMNEFRASFNHFDRRKNGLMDHEDFRACLISMGYDLGEAEFARIMXLVDPNGQGXVXFQSFIDFMXREXADXDXAEQVIASFRILASDKPYILAEELRRELPPDQAQYCIKRMPAYSGPGSVPGALDYAAFSSALYGESDL

SEQ ID NO: 1400 - protein, 686 aa, Homo sapiens
  MOD_RES (2)..(2): Selenocysteine
  MOD_RES (37)..(37): Selenocysteine
  MOD_RES (56)..(56): Selenocysteine
  MOD_RES (92)..(92): Selenocysteine
  MOD_RES (100)..(100): Selenocysteine
  MOD_RES (104)..(104): Selenocysteine
  MOD_RES (139)..(139): Selenocysteine
  MOD_RES (142)..(142): Selenocysteine
  MOD_RES (204)..(204): Selenocysteine
  MOD_RES (207)..(207): Selenocysteine
  MOD_RES (227)..(227): Selenocysteine
  MOD_RES (287)..(287): Selenocysteine
  MOD_RES (289)..(289): Selenocysteine
  MOD_RES (305)..(305): Selenocysteine
  MOD_RES (348)..(348): Selenocysteine
  MOD_RES (356)..(356): Selenocysteine
  MOD_RES (393)..(393): Selenocysteine
  MOD_RES (395)..(395): Selenocysteine
  MOD_RES (401)..(401): Selenocysteine
  MOD_RES (460)..(460): Selenocysteine
  MOD_RES (505)..(505): Selenocysteine
  MOD_RES (508)..(508): Selenocysteine
  MOD_RES (521)..(522): Selenocysteine
  MOD_RES (526)..(526): Selenocysteine
  MOD_RES (532)..(532): Selenocysteine
  MOD_RES (536)..(536): Selenocysteine
  MOD_RES (543)..(543): Selenocysteine
  MOD_RES (591)..(591): Selenocysteine
  MOD_RES (600)..(600): Selenocysteine
  MOD_RES (602)..(602): Selenocysteine
  MOD_RES (611)..(611): Selenocysteine
  MOD_RES (614)..(614): Selenocysteine
  MOD_RES (617)..(617): Selenocysteine
  MOD_RES (619)..(619): Selenocysteine
MXYVSCFYHAFAGAEQVRQSLKAHSALWKDPPPESSXCSYQEMRRSSVNSSAMAEXAANRICKVLAVNQENERLMEEYERLASELLEWIRRXIPWLENRXPEKXMQAMQKKLEDFRDYRRKHKPPKVQEKCQLEINFNXLQXKLRISNRPAFMPSEGKMVSDIAGAWQRLEQAEKGYEEWLLNEIRRLERLEHLAEKFRQKASXHEXWAYGKEQILLQKDYESASLXEVRALLRKHEAFESDLAAHQDRVEQIAAIAQELNELDYHDAVNVNDRCQKICDQWDRLGXLXQKRREALERMEKLLEXIDQLHLEFAKRAAPFNNWMEGAMEDLQDMFIVHSIEEIQSLIXAHEQFKAXLPEADGERQSIMAIQNEVEKVIQSYNIRISSSNPYSXVXMDELRXKWDKVKQLVPIRDQSLQEELARQHANERLRRQFAAQANAIGPWIQNKMEEIARSSIQIXGALEDQMNQLKQYEHNIINYKNNIDKLEGDHQLIQEALVFDNKHXNYXMEHIRVGWELLLXXIARXINEVEXQILXRDAKGIXQEQMNEFRASFNHFDRRKNGLMDHEDFRACLISMGYDLGEAEFARIMXLVDPNGQGXVXFQSFIDFMXREXADXDXAEQVIASFRILASDKPYILAEELRRELPPDQAQYCIKRMPAYSGPGSVPGALDYAAFSSALYGESDL

SEQ ID NO: 1401 - protein, 944 aa, Homo sapiens
  MOD_RES (17)..(17): Selenocysteine
  MOD_RES (31)..(31): Selenocysteine
  MOD_RES (45)..(45): Selenocysteine
  MOD_RES (75)..(75): Selenocysteine
  MOD_RES (88)..(89): Selenocysteine
  MOD_RES (93)..(93): Selenocysteine
  MOD_RES (95)..(95): Selenocysteine
  MOD_RES (107)..(107): Selenocysteine
  MOD_RES (180)..(180): Selenocysteine
  MOD_RES (186)..(186): Selenocysteine
  MOD_RES (201)..(201): Selenocysteine
  MOD_RES (215)..(215): Selenocysteine
  MOD_RES (228)..(228): Selenocysteine
  MOD_RES (264)..(264): Selenocysteine
  MOD_RES (287)..(287): Selenocysteine
  MOD_RES (297)..(297): Selenocysteine
  MOD_RES (314)..(314): Selenocysteine
  MOD_RES (350)..(350): Selenocysteine
  MOD_RES (397)..(397): Selenocysteine
  MOD_RES (400)..(400): Selenocysteine
  MOD_RES (467)..(467): Selenocysteine
  MOD_RES (545)..(545): Selenocysteine
  MOD_RES (547)..(547): Selenocysteine
  MOD_RES (563)..(563): Selenocysteine
  MOD_RES (601)..(601): Selenocysteine
  MOD_RES (606)..(606): Selenocysteine
  MOD_RES (614)..(614): Selenocysteine
  MOD_RES (638)..(638): Selenocysteine
  MOD_RES (646)..(646): Selenocysteine
  MOD_RES (651)..(651): Selenocysteine
  MOD_RES (659)..(659): Selenocysteine
  MOD_RES (674)..(674): Selenocysteine
  MOD_RES (740)..(740): Selenocysteine
  MOD_RES (763)..(763): Selenocysteine
  MOD_RES (779)..(779): Selenocysteine
  MOD_RES (784)..(784): Selenocysteine
  MOD_RES (794)..(794): Selenocysteine
  MOD_RES (849)..(849): Selenocysteine
  MOD_RES (860)..(860): Selenocysteine
  MOD_RES (869)..(869): Selenocysteine
  MOD_RES (872)..(872): Selenocysteine
  MOD_RES (875)..(875): Selenocysteine
  MOD_RES (877)..(878): Selenocysteine
  MOD_RES (896)..(896): Selenocysteine
MGIGLCVPPARCWKRLXRSSRGQPLERPAAXIIIGLSIVERSKQXQRGPVDFSRSHSAPAAEQECKPRISAARSXPAPPSPAVPGFRXXPCQXFXAWCNSHLRKAGXQIENIEEDFRNGLKLMLLLEVISGERLPRPDKGKMRFHKIANVNKALDFIASKGVKLVSIGAEEIVDGNLKMXLGMIWXIILRFAIQDISVEEXSAKEGLLLWCQRKXAPYRNVNVQNFHXSWKDGLALCALIHRHRPDLIDYAKLRKDDPIGNLNXAFEVAEKYLDIPKMLDAEDIVNXPKPDEKAIMXYVSCFYHAFAGAEQAEXAANRICKVLAVNQENEKLMEEYEKLASELLEWIRRXVPWLENRVGEPSMSAMQRKLEDFRDYRRLHKPPRIQEKCQLEINFNXLQXKLRLSHRPAFMPSEGKLVSDIANAWRGLEQVEKGYEDWLLSEIRRLQRLQHLAEKFRQKASLHEAWXRGKEEMLSQRDYDSALLQEVRALLRRHEAFESDLAAHQDRVEHIAALAQELNELDYHEAASVNSRCQAICDQWDNLGXLXQKRRDALERMEKLLEXIDRLQLEFARRAAPFNNWLDGAVEDLQDVWLVHSVEEXQSLLXAHDQFKAXLPEADRERGAIMGIQGEIQKICQXYGLRPCSXNPYIXLSPQDINXKWDMVRKLVPSCDQXLQEELARQQVNERLRRQFAAQANAIGPWIQAKVEEVGRLAAGLAGSLEEQMAGLRQQEQNIINYKXNIDRLEGDHQLLQESLVFDNKHXVYSMEHIRVGWEQLLXSIARXINEVENQVLXRDAKGLSQEQLNEFRASFNHFDRKQNGMMEPDDFRACLISMGYDLGEVEFARIMXMVDPNAAGVVXFQAFIDFMXREXAEXDXXEQVVASFKILAGDKNYIXPEELRRELPAKQAEYCIRRMVPYKGSGAPAGALDYVAFSSALYGESDL

SEQ ID NO: 1402 - protein, 72 aa, Homo sapiens
MMMVMQPEGLGAGEGRFAGGGGGGEYMEQEEDWDRDLLLDPAWEKQQRKENESSERERDWPRMHSKSVAELS

SEQ ID NO: 1403 - protein, 901 aa, Homo sapiens
  MOD_RES (50)..(50): Selenocysteine
  MOD_RES (52)..(52): Selenocysteine
  MOD_RES (64)..(64): Selenocysteine
  MOD_RES (137)..(137): Selenocysteine
  MOD_RES (143)..(143): Selenocysteine
  MOD_RES (158)..(158): Selenocysteine
  MOD_RES (172)..(172): Selenocysteine
  MOD_RES (185)..(185): Selenocysteine
  MOD_RES (221)..(221): Selenocysteine
  MOD_RES (244)..(244): Selenocysteine
  MOD_RES (254)..(254): Selenocysteine
  MOD_RES (271)..(271): Selenocysteine
  MOD_RES (307)..(307): Selenocysteine
  MOD_RES (354)..(354): Selenocysteine
  MOD_RES (357)..(357): Selenocysteine
  MOD_RES (424)..(424): Selenocysteine
  MOD_RES (502)..(502): Selenocysteine
  MOD_RES (504)..(504): Selenocysteine
  MOD_RES (520)..(520): Selenocysteine
  MOD_RES (558)..(558): Selenocysteine
  MOD_RES (563)..(563): Selenocysteine
  MOD_RES (571)..(571): Selenocysteine
  MOD_RES (595)..(595): Selenocysteine
  MOD_RES (603)..(603): Selenocysteine
  MOD_RES (608)..(608): Selenocysteine
  MOD_RES (616)..(616): Selenocysteine
  MOD_RES (631)..(631): Selenocysteine
  MOD_RES (697)..(697): Selenocysteine
  MOD_RES (720)..(720): Selenocysteine
  MOD_RES (736)..(736): Selenocysteine
  MOD_RES (741)..(741): Selenocysteine
  MOD_RES (751)..(751): Selenocysteine
  MOD_RES (806)..(806): Selenocysteine
  MOD_RES (817)..(817): Selenocysteine
  MOD_RES (826)..(826): Selenocysteine
  MOD_RES (829)..(829): Selenocysteine
  MOD_RES (832)..(832): Selenocysteine
  MOD_RES (834)..(835): Selenocysteine
  MOD_RES (853)..(853): Selenocysteine
MMMVMQPEGLGAGEGRFAGGGGGGEYMEQEEDWDRDLLLDPAWEKQQRKXFXAWCNSHLRKAGXQIENIEEDFRNGLKLMLLLEVISGERLPRPDKGKMRFHKIANVNKALDFIASKGVKLVSIGAEEIVDGNLKMXLGMIWXIILRFAIQDISVEEXSAKEGLLLWCQRKXAPYRNVNVQNFHXSWKDGLALCALIHRHRPDLIDYAKLRKDDPIGNLNXAFEVAEKYLDIPKMLDAEDIVNXPKPDEKAIMXYVSCFYHAFAGAEQAEXAANRICKVLAVNQENEKLMEEYEKLASELLEWIRRXVPWLENRVGEPSMSAMQRKLEDFRDYRRLHKPPRIQEKCQLEINFNXLQXKLRLSHRPAFMPSEGKLVSDIANAWRGLEQVEKGYEDWLLSEIRRLQRLQHLAEKFRQKASLHEAWXRGKEEMLSQRDYDSALLQEVRALLRRHEAFESDLAAHQDRVEHIAALAQELNELDYHEAASVNSRCQAICDQWDNLGXLXQKRRDALERMEKLLEXIDRLQLEFARRAAPFNNWLDGAVEDLQDVWLVHSVEEXQSLLXAHDQFKAXLPEADRERGAIMGIQGEIQKICQXYGLRPCSXNPYIXLSPQDINXKWDMVRKLVPSCDQXLQEELARQQVNERLRRQFAAQANAIGPWIQAKVEEVGRLAAGLAGSLEEQMAGLRQQEQNIINYKXNIDRLEGDHQLLQESLVFDNKHXVYSMEHIRVGWEQLLXSIARXINEVENQVLXRDAKGLSQEQLNEFRASFNHFDRKQNGMMEPDDFRACLISMGYDLGEVEFARIMXMVDPNAAGVVXFQAFIDFMXREXAEXDXXEQVVASFKILAGDKNYIXPEELRRELPAKQAEYCIRRMVPYKGSGAPAGALDYVAFSSALYGESDL

SEQ ID NO: 1404 - protein, 182 aa, Homo sapiens
  MOD_RES (23)..(23): Selenocysteine
  MOD_RES (50)..(50): Selenocysteine
  MOD_RES (60)..(60): Selenocysteine
  MOD_RES (77)..(77): Selenocysteine
  MOD_RES (113)..(113): Selenocysteine
  MOD_RES (125)..(125): Selenocysteine
  MOD_RES (160)..(160): Selenocysteine
  MOD_RES (163)..(163): Selenocysteine
ALIHRHRPELIEYDKLRKDDPVXNLNNAFEVAEKYLDIPKMLDAEDIVGXLRPDEKAIMXYVSCFYHAFSGAQKAEXAANRICKVLAVNQENEHLMEDYEKLASDLLEWIRRXIPWLEDRVPQKXIQEMQQKLEDFRDYRRVHKPPKVQEKCQLEINFNXLQXKLRLSNRPAFMPSEGKMVS

SEQ ID NO: 1405 - protein, 342 aa, Homo sapiens
  MOD_RES (12)..(12): Selenocysteine
  MOD_RES (48)..(49): Selenocysteine
  MOD_RES (51)..(51): Selenocysteine
  MOD_RES (103)..(103): Selenocysteine
  MOD_RES (118)..(118): Selenocysteine
  MOD_RES (161)..(161): Selenocysteine
  MOD_RES (164)..(164): Selenocysteine
  MOD_RES (177)..(178): Selenocysteine
  MOD_RES (182)..(182): Selenocysteine
  MOD_RES (192)..(192): Selenocysteine
  MOD_RES (218)..(218): Selenocysteine
  MOD_RES (233)..(233): Selenocysteine
  MOD_RES (258)..(258): Selenocysteine
  MOD_RES (270)..(271): Selenocysteine
  MOD_RES (273)..(273): Selenocysteine
  MOD_RES (275)..(275): Selenocysteine
  MOD_RES (294)..(294): Selenocysteine
  MOD_RES (334)..(334): Selenocysteine
GLISAHDQFKSXLPDADREREAILAIHKEAQRIAESNHIKLSGSNPYXXVXPQIINSKWEKVQQLVPKRDHALLEEQSKQQSNEHLRRQFASQANVVGPWIQXKMEEIGRISIEMNGXLEDQLSHLKQYERSIVDYKPNLDLLEQQHQLIQEALIFDNKHXNYXMEHIRVGWEQLLXXIARXINEVENQILXRDAKGISQEQMQEFRASFNHFDKKQXGSMDSDDFRALLISXGYSLGEAEFNRIMSLVDPNHSGLVXFQAFIDFMSREXXDXDXADQVIASFKVLAGDKNFIXAEELRRELPPDQAEYCIARMAPYQGPDAVPGALDYKSFSXALYGESDL

SEQ ID NO: 1406 - protein, 692 aa, Homo sapiens
  MOD_RES (57)..(57): Selenocysteine
  MOD_RES (93)..(93): Selenocysteine
  MOD_RES (105)..(105): Selenocysteine
  MOD_RES (140)..(140): Selenocysteine
  MOD_RES (143)..(143): Selenocysteine
  MOD_RES (210)..(210): Selenocysteine
  MOD_RES (224)..(224): Selenocysteine
  MOD_RES (226)..(226): Selenocysteine
  MOD_RES (274)..(274): Selenocysteine
  MOD_RES (290)..(290): Selenocysteine
  MOD_RES (300)..(300): Selenocysteine
  MOD_RES (340)..(340): Selenocysteine
  MOD_RES (357)..(357): Selenocysteine
  MOD_RES (393)..(394): Selenocysteine
  MOD_RES (396)..(396): Selenocysteine
  MOD_RES (448)..(448): Selenocysteine
  MOD_RES (463)..(463): Selenocysteine
  MOD_RES (506)..(506): Selenocysteine
  MOD_RES (509)..(509): Selenocysteine
  MOD_RES (522)..(523): Selenocysteine
  MOD_RES (527)..(527): Selenocysteine
  MOD_RES (537)..(537): Selenocysteine
  MOD_RES (608)..(608): Selenocysteine
  MOD_RES (620)..(621): Selenocysteine
  MOD_RES (623)..(623): Selenocysteine
  MOD_RES (625)..(625): Selenocysteine
  MOD_RES (644)..(644): Selenocysteine
  MOD_RES (684)..(684): Selenocysteine
MVDYHAANQSYQYGPSSAGNGAGGGGSMGDYMAQEDDWDRDLLLDPAWEKQQRKAEXAANRICKVLAVNQENEHLMEDYEKLASDLLEWIRRXIPWLEDRVPQKXIQEMQQKLEDFRDYRRVHKPPKVQEKCQLEINFNXLQXKLRLSNRPAFMPSEGKMVSDINNGWQHLEQAEKGYEEWLLNEIRRLERLDHLAEKFRQKASIHEAWXDGKEAMLKHRDYEXAXLSDIKALIRKHEAFESDLAAHQDRVEQIAAIAQELNELDYYDSHNVNXRCQKICDQWDALGSLXHSRREALEKXEKQLEAIDQLHLEYAKRAAPFNNWMESAMEDLQDMFIVHXIEEIEGLISAHDQFKSXLPDADREREAILAIHKEAQRIAESNHIKLSGSNPYXXVXPQIINSKWEKVQQLVPKRDHALLEEQSKQQSNEHLRRQFASQANVVGPWIQXKMEEIGRISIEMNGXLEDQLSHLKQYERSIVDYKPNLDLLEQQHQLIQEALIFDNKHXNYXMEHIRVGWEQLLXXIARXINEVENQILXRDAKGISQEQMQEFRASFNHFDKDHGGALGPEEFKACLISLGYDVENDRQGEAEFNRIMSLVDPNHSGLVXFQAFIDFMSREXXDXDXADQVIASFKVLAGDKNFIXAEELRRELPPDQAEYCIARMAPYQGPDAVPGALDYKSFSXALYGESDL

SEQ ID NO: 1407 - protein, 521 aa, Homo sapiens
  MOD_RES (55)..(55): Selenocysteine
  MOD_RES (57)..(57): Selenocysteine
  MOD_RES (69)..(69): Selenocysteine
  MOD_RES (103)..(103): Selenocysteine
  MOD_RES (119)..(119): Selenocysteine
  MOD_RES (129)..(129): Selenocysteine
  MOD_RES (169)..(169): Selenocysteine
  MOD_RES (186)..(186): Selenocysteine
  MOD_RES (222)..(223): Selenocysteine
  MOD_RES (225)..(225): Selenocysteine
  MOD_RES (277)..(277): Selenocysteine
  MOD_RES (292)..(292): Selenocysteine
  MOD_RES (335)..(335): Selenocysteine
  MOD_RES (338)..(338): Selenocysteine
  MOD_RES (351)..(352): Selenocysteine
  MOD_RES (356)..(356): Selenocysteine
  MOD_RES (366)..(366): Selenocysteine
  MOD_RES (437)..(437): Selenocysteine
  MOD_RES (449)..(450): Selenocysteine
  MOD_RES (452)..(452): Selenocysteine
  MOD_RES (454)..(454): Selenocysteine
  MOD_RES (473)..(473): Selenocysteine
  MOD_RES (513)..(513): Selenocysteine
MVDYHAANQSYQYGPSSAGNGAGGGGSMGDYMAQEDDWDRDLLLDPAWEKQQRKXFXAWCNSHLRKAGXQIENIDEDFRDGLKLMLLLEVIELDYYDSHNVNXRCQKICDQWDALGSLXHSRREALEKXEKQLEAIDQLHLEYAKRAAPFNNWMESAMEDLQDMFIVHXIEEIEGLISAHDQFKSXLPDADREREAILAIHKEAQRIAESNHIKLSGSNPYXXVXPQIINSKWEKVQQLVPKRDHALLEEQSKQQSNEHLRRQFASQANVVGPWIQXKMEEIGRISIEMNGXLEDQLSHLKQYERSIVDYKPNLDLLEQQHQLIQEALIFDNKHXNYXMEHIRVGWEQLLXXIARXINEVENQILXRDAKGISQEQMQEFRASFNHFDKDHGGALGPEEFKACLISLGYDVENDRQGEAEFNRIMSLVDPNHSGLVXFQAFIDFMSREXXDXDXADQVIASFKVLAGDKNFIXAEELRRELPPDQAEYCIARMAPYQGPDAVPGALDYKSFSXALYGESDL

(The sequence listing continues in the following parts.)

1. A method of altering signaling of a primary neighborhood gene encoded within an insulated neighborhood, wherein the primary neighborhood gene is selected from those in any of Tables 1-9, said method comprising one or more of the following:
a. disrupting a primary upstream or primary downstream boundary of the insulated neighborhood;
b. altering one or more regulatory sequence regions (RSRs) or portions thereof of the encoded primary neighborhood gene;
c. duplicating one or more RSRs or portions thereof of the encoded primary neighborhood gene;
d. inhibiting or reducing the expression and/or activity of one or more signaling molecules associated with the RSR of the primary neighborhood gene;
e. activating or increasing the expression and/or activity of one or more signaling molecules associated with the RSR of the primary neighborhood gene; and/or
f. altering one or more of the upstream or downstream neighborhood genes or its RSR of the insulated neighborhood.

2. The method of claim 1, wherein the insulated neighborhood is a minimal insulated neighborhood.

3. The method of claim 1, further comprising contacting a genomic system that includes the insulated neighborhood with a stimulus.

4. The method of claim 3, wherein the stimulus is at least one selected from group consisting of: a small molecule, a biologic, an antibody, and an environmental condition.

5. The method of claim 4, wherein the stimulus is selected from those described herein.

6. An isolated cell having at least one insulated neighborhood altered in any manner of any of (a)-(f) of claim 1.

7. A method of altering the penetrance of a gene comprising altering the structure of one or more insulated neighborhoods that encompass the gene.

8. A method of predicting one or more treatment liabilities of a therapeutic agent comprising determining the signaling signature of one or more primary neighborhood genes which are differentially expressed upon treatment with the therapeutic agent compared to an untreated control.

9. The method of claim 8, further comprising altering the signaling signature of said one or more primary neighborhood genes which are differentially expressed upon treatment with the therapeutic agent compared to an untreated control.

10. The method of claim 9, wherein the signaling signature is altered by a method selected from the group consisting of increasing the level of a signaling molecule, decreasing the level of a signaling molecule, editing one or more RSRs, altering an IN boundary, affecting a downstream target, and mutating a genomic signaling center.

11. The method of claim 10, wherein signaling molecules to be increased or decreased comprise one or more transcription factors selected from those listed in Table 22.

12. A method of reducing or eliminating one or more treatment liabilities of a therapeutic agent comprising altering the penetrance of a primary neighborhood gene or its RSRs.

13. The method of any one of claim 8 or claim 12, wherein the treatment liability is selected from toxicity, short half-life, and lack of efficacy.

14. A method of altering expression of gene selected from any of those listed in Tables 1-9 in a liver cell comprising contacting said liver cell with a compound selected from the group consisting of any of those taught herein.

15. A method of stratifying or selecting patients for treatment with a compound selected from the group consisting of any of the compounds described herein.

16. A method of screening cell for response to a stimulus by measuring differential gene expression between a group of the cells contacted with the stimulus and a group of the cells not contacted with the stimulus, wherein the stimulus comprises any of those selected from the group consisting of any compound described herein.

17. A method of altering the gene expression attendant to an insulated neighborhood comprising altering a genomic signaling center, the method comprising using a CRISPR/Cas9 system to change the genomic signaling center binding site.

18. The method of claim 17, wherein the change restores a mutation in the genomic signaling center binding site.

19. A method of creating a genomic signaling centers in a genome, the method comprising:
altering a CTCF site to disrupt an enhancer-promoter interaction of a first insulated neighborhood, wherein the enhancer is available for interaction with a different promoter to form a genomic signaling center.

20. The method of claim 19, wherein the CTCF site is altered using a CRISPR/Cas9 enzyme.

21. A method of modulating gene expression in a cell, the method comprising:
contacting the cell with a perturbation stimulus targeting at least one occupancy-dependent signaling center, wherein the occupancy-dependent signaling center comprises a region of the genome bound by at least 2 signaling proteins and comprises:
i) a H3K27 chemical modification, or
ii) independently at least one of a bromodomain-containing protein (Brd), a transcriptional coactivator, and at least two master transcription factors bound to the region, thereby modulating gene expression.

22. The method of claim 21, wherein the bromodomain-containing protein (Brd) is selected from the group consisting of Brd2, Brd3, and Brd4.

23. The method of claim 21, wherein the H3K27 chemical modification is acetylation or methylation.

24. The method of claim 21, wherein the transcriptional coactivator is p300.

25. The method of claim 21, wherein the occupancy-dependent signaling center comprises a nucleic acid sequence selected from SEQ ID NOs: 32,627-71,281.

26. The method of claim 21, wherein the perturbation stimulus is at least one selected from the group consisting of a CRISPR/Cas system, a zinc finger nuclease, a transcription activator-like effector nuclease (TALEN), and a hybridizing oligonucleotide.

27. The method of claim 21, wherein the perturbation stimulus binds the occupancy-dependent signaling center.

28. The method of claim 27, wherein the perturbation stimulus is antisense to the nucleic acid sequence of the occupancy-dependent signaling center.

29. The method of claim 21, further comprising mutating the nucleic acid sequence of the occupancy-dependent signaling center.

30. The method of claim 21, wherein the contacting afters the occupancy of the occupancy-dependent signaling center.

31. The method of claim 30, wherein the contacting alters genome architecture in the cell.

32. The method of claim 31, wherein the contacting alters gene looping.

33. The method of claim 21, wherein the perturbation stimulus is at least one stimulus described herein.

34. A method of altering the occupancy of a signaling center, the method comprising:
(a) contacting the cell with a perturbation stimulus targeting at least one occupancy-dependent signaling center comprising a nucleic acid sequence selected from SEQ ID NOs: 32,627-71,281.

35. The method of claim 34, wherein the perturbation stimulus is at least one selected from the group consisting of a CRISPR/Cas system, a zinc finger nuclease, a transcription activator-like effector nuclease (TALEN), and a hybridizing oligonucleotide.

36. The method of claim 34 or claim 35, wherein the perturbation stimulus binds at least a portion of the occupancy-dependent signaling center.

37. The method of claim 36, wherein the perturbation stimulus is antisense to the portion of the occupancy-dependent signaling center.

38. A composition comprising an oligonucleotide that binds to at least a portion of an occupancy-dependent signaling center comprising a nucleic acid sequence selected from SEQ ID NOs: 32,627-71,281.

39. The composition of claim 38, wherein the oligonucleotide is antisense to the nucleic acid sequence of the occupancy-dependent signaling center.

40. A pharmaceutical composition comprising the composition of claim 38 and a pharmaceutically acceptable excipient.

41. A method of treating a disease in a subject, the method comprising:
(a) administering to the subject the pharmaceutical composition of claim 40, wherein the occupancy-dependent signaling center controls expression of at least one gene associated with the disease.

42. The method of claim 41, wherein the gene is a protein-coding gene.

43. The method of claim 21, wherein the gene is a non-protein-coding gene.

44. A method of perturbing a signaling pathway of a cell, the method comprising:
(a) contacting the cell with a perturbation stimulus that alters the occupancy of an occupancy-dependent signaling center comprising a nucleic acid sequence selected from SEQ ID NOs: 32,627-71,281.
